(19) United States
(12) Patent Application Publication
(10) Pub. No.: US 2010/0105865 A1
(43) Pub. Date: Apr. 29, 2010

(54) Nucleic acids and proteins from streptococcus groups a & b

(76) Inventors: John Telford, Siena (IT); Vega Masignani, Siena (IT); Immaculada Margarit Y Ros, Siena (IT); Guido Grandi, Siena (IT); Claire Fraser, Rockville, MD (US); Herve Tettelin, Rockville, MD (US)

Correspondence Address: Chiron Corporation, 4560 Horton Street, Emeryville, CA, 94608-2916, US

(21) Appl. No.: 10/415,182

(22) PCT Filed: Oct. 29, 2001
(86) PCT No.: PCT/GB01/04789

§ 371 Date: Oct. 14, 2003

(30) Foreign Application Priority Data
Oct. 27, 2000 (GB) 0026333.5
Nov. 24, 2000 (GB) 0028727.6
Mar. 7, 2001 (GB) 0105640.7

(51) Int. Cl. C12N 9/00; C07K 14/47; C07K 16/18

(52) U.S. Cl. 530/350; 530/388.1; 435/69.1; 435/183; 435/320.1; 435/325

(57) ABSTRACT

The invention provides proteins from group B streptococcus (Streptococcus agalactiae) and group A streptococcus (Streptococcus pyogenes), including amino acid sequences and the corresponding nucleotide sequences. Data are given to show that the proteins are useful antigens for vaccines, immunogenic compositions, and/or diagnostics. The proteins are also targets for antibiotics.

### CROSS REFERENCE TO RELATED APPLICATIONS

[0001] This application is a National Stage application of co-pending PCT application PCT/GB01/04789 filed Oct. 29, 2001, which was published in English under PCT Article 21(2) on May 2, 2002, which claims the benefit of Great Britain applications Serial No. GB0026333.5 filed Oct. 27, 2000, Serial No. GB0028727.6 filed Nov. 24, 2000, and Serial No. GB0105640.7 filed Mar. 7, 2001. These applications are incorporated herein by reference in their entireties.

### REFERENCE TO A “SEQUENCE LISTING”

[0002] A “Sequence Listing” is provided on one compact disc. The compact disc contains one file named “formal sequence listing.txt.” The file was created on Apr. 15, 2003, and is 21,539,000 bytes in size. The contents of the compact disc are hereby incorporated by reference in its entirety.

[0003] All documents cited herein are incorporated by reference in their entirety.

### TECHNICAL FIELD

[0004] This invention relates to nucleic acid and proteins from the bacteria Streptococcus agalactiae (GBS) and Streptococcus pyogenes (GAS).

### BACKGROUND ART

[0005] Once thought to infect only cows, the Gram-positive bacterium Streptococcus agalactiae (or “group B streptococcus”, abbreviated to “GBS”) is now known to cause serious disease, bacteremia and meningitis, in immunocompromised individuals and in neonates. There are two types of neonatal infection. The first (early onset, usually within 5 days of birth) is manifested by bacteremia and pneumonia. It is contracted vertically as a baby passes through the birth canal. GBS colonises the vagina of about 25% of young women, and approximately 1% of infants born via a vaginal birth to colonised mothers will become infected. Mortality is between 50-70%. The second is a meningitis that occurs 10 to 60 days after birth. If pregnant women are vaccinated with type III capsule so that the infants are passively immunised, the incidence of the late onset meningitis is reduced but is not entirely eliminated.

[0006] The “B” in “GBS” refers to the Lancefield classification, which is based on the antigenicity of a carbohydrate which is soluble in dilute acid and called the C carbohydrate. Lancefield identified 13 types of C carbohydrate, designated A to O, that could be serologically differentiated. The organisms that most commonly infect humans are found in groups A, B, D, and G. Within group B, strains can be divided into 8 serotypes (Ia, Ib, Ia/c, II, III, IV, V, and VI) based on the structure of their polysaccharide capsule.

[0007] Group A streptococcus (“GAS”, S. pyogenes) is a frequent human pathogen, estimated to be present in between 5-15% of normal individuals without signs of disease. When host defenses are compromised, or when the organism is able to exert its virulence, or when it is introduced to vulnerable tissues or hosts, however, an acute infection occurs. Diseases include puerperal fever, scarlet fever, erysipelas, pharyngitis, impetigo, necrotising fasciitis, myositis and streptococcal toxic shock syndrome.

[0008] S. pyogenes is typically treated using antibiotics. Although S. agalactiae is inhibited by antibiotics, however, it is not killed by penicillin as easily as GAS. Prophylactic vaccination is thus preferable.

[0009] Current GBS vaccines are based on polysaccharide antigens, although these suffer from poor immunogenicity. Anti-idiotypic approaches have also been used (e.g. WO99/54457). There remains a need, however, for effective adult vaccines against S. agalactiae infection. There also remains a need for vaccines against S. pyogenes infection.

[0010] It is an object of the invention to provide proteins which can be used in the development of such vaccines. The proteins may also be useful for diagnostic purposes, and as targets for antibiotics.

### DISCLOSURE OF THE INVENTION

[0011] The invention provides proteins comprising the S. agalactiae amino acid sequences disclosed in the examples, and proteins comprising the S. pyogenes amino acid sequences disclosed in the examples. These amino acid sequences are the even SEQ IDs between 1 and 10960.

[0012] It also provides proteins comprising amino acid sequences having sequence identity to the S. agalactiae amino acid sequences disclosed in the examples, and proteins comprising amino acid sequences having sequence identity to the S. pyogenes amino acid sequences disclosed in the examples. Depending on the particular sequence, the degree of sequence identity is preferably greater than 50% (e.g. 60%, 70%, 80%, 90%, 95%, 99% or more). These proteins include homologs, orthologs, allelic variants and functional mutants. Typically, 50% identity or more between two proteins is considered to be an indication of functional equivalence. Identity between proteins is preferably determined by the Smith-Waterman homology search algorithm as implemented in the MPSRCH program (Oxford Molecular), using an affine gap search with parameters gap open penalty=12 and gap extension penalty=1.

[0013] Preferred proteins of the invention are GBS1 to GBS689 (see Table IV).

[0014] The invention further provides proteins comprising fragments of the S. agalactiae amino acid sequences disclosed in the examples, and proteins comprising fragments of the S. pyogenes amino acid sequences disclosed in the examples. The fragments should comprise at least n consecutive amino acids from the sequences and, depending on the particular sequence, n is 7 or more (e.g. 8, 10, 12, 14, 16, 18, 20, 30, 40, 50, 60, 70, 80, 90, 100 or more). Preferably the fragments comprise one or more epitopes from the sequence. Other preferred fragments are (a) the N-terminal signal peptides of the proteins disclosed in the examples, (b) the proteins disclosed in the examples, but without their N-terminal signal peptides, (c) fragments common to the related GAS and GBS proteins disclosed in the examples, and (d) the proteins disclosed in the examples, but without their N-terminal amino acid residue.

[0015] The proteins of the invention can, of course, be prepared by various means (e.g. recombinant expression, purification from GAS or GBS, chemical synthesis etc.) and in various forms (e.g. native, fusions, glycosylated, non-glycosylated etc.). They are preferably prepared in substantially pure form (i.e. substantially free from other streptococcal or host cell proteins) or substantially isolated form. Proteins of the invention are preferably streptococcal proteins.

[0016] According to a further aspect, the invention provides antibodies which bind to these proteins. These may be polyclonal or monoclonal and may be produced by any suitable means (e.g. by recombinant expression). To increase compatibility with the human immune system, the antibodies may be chimeric or humanised (e.g. Breedveld (2000) Lancet 355(9205):735-740; Gorman & Clark (1990) Semin. Immunol. 2:457-466), or fully human antibodies may be used. The antibodies may include a detectable label (e.g. for diagnostic assays).

[0017] According to a further aspect, the invention provides nucleic acid comprising the S. agalactiae nucleotide sequences disclosed in the examples, and nucleic acid comprising the S. pyogenes nucleotide sequences disclosed in the examples. These nucleic acid sequences are the odd SEQ IDs between 1 and 10966.

[0018] In addition, the invention provides nucleic acid comprising nucleotide sequences having sequence identity to the S. agalactiae nucleotide sequences disclosed in the examples, and nucleic acid comprising nucleotide sequences having sequence identity to the S. pyogenes nucleotide sequences disclosed in the examples. Identity between sequences is preferably determined by the Smith-Waterman homology search algorithm as described above.

[0019] Furthermore, the invention provides nucleic acid which can hybridise to the S. agalactiae nucleic acid disclosed in the examples, and nucleic acid which can hybridise to the S. pyogenes nucleic acid disclosed in the examples preferably under ‘high stringency’ conditions (e.g. 65° C. in 0.1×SSC, 0.5% SDS solution).

[0020] Nucleic acid comprising fragments of these sequences are also provided. These should comprise at least n consecutive nucleotides from the S. agalactiae or S. pyogenes sequences and, depending on the particular sequence, n is 10 or more (e.g. 12, 14, 15, 18, 20, 25, 30, 35, 40, 50, 60, 70, 80, 90, 100, 150, 200 or more). The fragments may comprise sequences which are common to the related GAS and GBS sequences disclosed in the examples.

[0021] According to a further aspect, the invention provides nucleic acid encoding the proteins and protein fragments of the invention.

[0022] The invention also provides: nucleic acid comprising nucleotide sequence SEQ ID 10967; nucleic acid comprising nucleotide sequences having sequence identity to SEQ ID 10967; nucleic acid which can hybridise to SEQ ID 10967 (preferably under ‘high stringency’ conditions); nucleic acid comprising a fragment of at least n consecutive nucleotides from SEQ ID 10967, wherein n is 10 or more e.g. 12, 14, 15, 18, 20, 25, 30, 35, 40, 50, 60, 70, 80, 90, 100, 150, 200, 250, 300, 350, 400, 450, 500, 600, 700, 800, 900, 1000, 1500, 2000, 3000, 4000, 5000, 10000, 100000, 1000000 or more Nucleic acids of the invention can be used in hybridisation reactions (e.g. Northern or Southern blots, or in nucleic acid microarrays or ‘gene chips’) and amplification reactions (e.g. PCR, SDA, SSSR, LCR, TMA, NASBA etc.) and other nucleic acid techniques.

[0023] It should also be appreciated that the invention provides nucleic acid comprising sequences complementary to those described above (e.g. for antisense or probing, or for use as primers).

[0024] Nucleic acid according to the invention can, of course, be prepared in many ways (e.g. by chemical synthesis, from genomic or cDNA libraries, from the organism itself etc.) and can take various forms (e.g. single stranded, double stranded, vectors, primers, probes, labelled etc.). The nucleic acid is preferably in substantially isolated form.

[0025] Nucleic acid according to the invention may be labelled e.g. with a radioactive or fluorescent label. This is particularly useful where the nucleic acid is to be used in nucleic acid detection techniques e.g. where the nucleic acid is a primer or as a probe for use in techniques such as PCR, LCR, TMA, NASBA etc.

[0026] In addition, the term “nucleic acid” includes DNA and RNA, and also their analogues, such as those containing modified backbones, and also peptide nucleic acids (PNA) etc.

[0027] According to a further aspect, the invention provides vectors comprising nucleotide sequences of the invention (e.g. cloning or expression vectors) and host cells transformed with such vectors.

[0028] According to a further aspect, the invention provides compositions comprising protein, antibody, and/or nucleic acid according to the invention. These compositions may be suitable as immunogenic compositions, for instance, or as diagnostic reagents, or as vaccines.

[0029] The invention also provides nucleic acid, protein, or antibody according to the invention for use as medicaments (e.g. as immunogenic compositions or as vaccines) or as diagnostic reagents. It also provides the use of nucleic acid, protein, or antibody according to the invention in the manufacture of: (i) a medicament for treating or preventing disease and/or infection caused by streptococcus; (ii) a diagnostic reagent for detecting the presence of streptococcus or of antibodies raised against streptococcus; and/or (iii) a reagent which can raise antibodies against streptococcus. Said streptococcus may be any species, group or strain, but is preferably S. agalactiae, especially serotype III or V, or S. pyogenes. Said disease may be bacteremia, meningitis, puerperal fever, scarlet fever, erysipelas, pharyngitis, impetigo, necrotising fasciitis, myositis or toxic shock syndrome.

[0030] The invention also provides a method of treating a patient, comprising administering to the patient a therapeutically effective amount of nucleic acid, protein, and/or antibody of the invention. The patient may either be at risk from the disease themselves or may be a pregnant woman (‘maternal immunisation’ e.g. Glezen & Alpers (1999) Clin. Infect. Dis. 28:219-224).

[0031] Administration of protein antigens is a preferred method of treatment for inducing immunity.

[0032] Administration of antibodies of the invention is another preferred method of treatment. This method of passive immunisation is particularly useful for newborn children or for pregnant women. This method will typically use monoclonal antibodies, which will be humanised or fully human.

[0033] The invention also provides a kit comprising primers (e.g. PCR primers) for amplifying a template sequence contained within a Streptococcus (e.g. S. pyogenes or S. agalactiae) nucleic acid sequence, the kit comprising a first primer and a second primer, wherein the first primer is substantially complementary to said template sequence and the second primer is substantially complementary to a complement of said template sequence, wherein the parts of said primers which have substantial complementarity define the termini of the template sequence to be amplified. The first primer and/or the second primer may include a detectable label (e.g. a fluorescent label).

[0034] The invention also provides a kit comprising first and second single-stranded oligonucleotides which allow amplification of a Streptococcus template nucleic acid sequence contained in a single- or double-stranded nucleic acid (or mixture thereof), wherein: (a) the first oligonucleotide comprises a primer sequence which is substantially complementary to said template nucleic acid sequence; (b) the second oligonucleotide comprises a primer sequence which is substantially complementary to the complement of said template nucleic acid sequence; (c) the first oligonucleotide and/or the second oligonucleotide comprise(s) sequence which is not complementary to said template nucleic acid; and (d) said primer sequences define the termini of the template sequence to be amplified. The non-complementary sequence(s) of feature (c) are preferably upstream of (i.e. 5′ to) the primer sequences. One or both of these (c) sequences may comprise a restriction site (e.g. EP-B-0509612) or a promoter sequence (e.g. EP-B-0505012). The first oligonucleotide and/or the second oligonucleotide may include a detectable label (e.g. a fluorescent label).

[0035] The template sequence may be any part of a genome sequence (e.g. SEQ ID 10967). For example, it could be a rRNA gene (e.g. Turenne et al. (2000) J. Clin. Microbiol. 38:513-520; SEQ IDs 12018-12024 herein) or a protein-coding gene. The template sequence is preferably specific to GBS.

[0036] The invention also provides a computer-readable medium (e.g. a floppy disk, a hard disk, a CD-ROM, a DVD etc.) and/or a computer database containing one or more of the sequences in the sequence listing. The medium preferably contains SEQ ID 10967.

[0037] The invention also provides a hybrid protein represented by the formula NH₂-A-[-X-L-]ₙ-B—COOH, wherein X is a protein of the invention, L is an optional linker amino acid sequence, A is an optional N-terminal amino acid sequence, B is an optional C-terminal amino acid sequence, and n is an integer greater than 1. The value of n is between 2 and x, and the value of x is typically 3, 4, 5, 6, 7, 8, 9 or 10. Preferably n is 2, 3 or 4; it is more preferably 2 or 3; most preferably, n=2. For each n instances, —X— may be the same or different. For each n instances of [-X-L-], linker amino acid sequence -L- may be present or absent. For instance, when n=2 the hybrid may be NH₂—X₁-L₁-X₂-L₂-COOH, NH₂—X₁-X₂—COOH, NH₂—X₁-L₁-X₂—COOH, NH₂—X₁-X₂-L₂-COOH, etc. Linker amino acid sequence(s) -L- will typically be short (e.g. 20 or fewer amino acids i.e. 19, 18, 17, 16, 15, 14, 13, 12, 11, 10, 9, 8, 7, 6, 5, 4, 3, 2, 1). Examples include short peptide sequences which facilitate cloning, poly-glycine linkers (i.e. Glyₙ where n=2, 3, 4, 5, 6, 7, 8, 9, 10 or more), and histidine tags (i.e. Hisₙ where n=3, 4, 5, 6, 7, 8, 9, 10 or more). Other suitable linker amino acid sequences will be apparent to those skilled in the art. -A- and —B— are optional sequences which will typically be short (e.g. 40 or fewer amino acids i.e. 39, 38, 37, 36, 35, 34, 33, 32, 31, 30, 29, 28, 27, 26, 25, 24, 23, 22, 21, 20, 19, 18, 17, 16, 15, 14, 13, 12, 11, 10, 9, 8, 7, 6, 5, 4, 3, 2, 1). Examples include leader sequences to direct protein trafficking, or short peptide sequences which facilitate cloning or purification (e.g. histidine tags i.e. Hisₙ where n=3, 4, 5, 6, 7, 8, 9, 10 or more). Other suitable N-terminal and C-terminal amino acid sequences will be apparent to those skilled in the art. In some embodiments, each X will be a GBS sequence; in others, mixtures of GAS and GBS will be used.

[0038] According to further aspects, the invention provides various processes.

[0039] A process for producing proteins of the invention is provided, comprising the step of culturing a host cell of to the invention under conditions which induce protein expression.

[0040] A process for producing protein or nucleic acid of the invention is provided, wherein the protein or nucleic acid is synthesised in part or in whole using chemical means.

[0041] A process for detecting polynucleotides of the invention is provided, comprising the steps of: (a) contacting a nucleic probe according to the invention with a biological sample under hybridising conditions to form duplexes; and (b) detecting said duplexes.

[0042] A process for detecting Streptococcus in a biological sample (e.g. blood) is also provided, comprising the step of contacting nucleic acid according to the invention with the biological sample under hybridising conditions. The process may involve nucleic acid amplification (e.g. PCR, SDA, SSSR, LCR, TMA, NASBA etc.) or hybridisation (e.g. microarrays, blots, hybridisation with a probe in solution etc.). PCR detection of Streptococcus in clinical samples, in particular S. pyogenes, has been reported [see e.g. Louie et al. (2000) CMAJ 163:301-309; Louie et al. (1998) J. Clin. Microbiol. 36:1769-1771]. Clinical assays based on nucleic acid are described in general in Tang et al. (1997) Clin. Chem. 43:2021-2038.

[0043] A process for detecting proteins of the invention is provided, comprising the steps of: (a) contacting an antibody of the invention with a biological sample under conditions suitable for the formation of an antibody-antigen complexes; and (b) detecting said complexes.

[0044] A process for identifying an amino acid sequence is provided, comprising the step of searching for putative open reading frames or protein-coding regions within a genome sequence of S. agalactiae. This will typically involve in silico searching the sequence for an initiation codon and for an in-frame termination codon in the downstream sequence. The region between these initiation and termination codons is a putative protein-coding sequence. Typically, all six possible reading frames will be searched. Suitable software for such analysis includes ORFFINDER (NCBI), GENEMARK [Borodovsky & McIninch (1993) Computers Chem. 17:122-133), GLIMMER [Salzberg et al. (1998) Nucleic Acids Res. 26:544-548; Salzberg et al. (1999) Genomics 59:24-31; Delcher et al. (1999) Nucleic Acids Res. 27:4636-4641], or other software which uses Markov models [e.g. Shmatkov et al. (1999) Bioinformatics 15:874-876]. The invention also provides a protein comprising the identified amino acid sequence. These proteins can then expressed using conventional techniques.

[0045] The invention also provides a process for determining whether a test compound binds to a protein of the invention. If a test compound binds to a protein of the invention and this binding inhibits the life cycle of the GBS bacterium, then the test compound can be used as an antibiotic or as a lead compound for the design of antibiotics. The process will typically comprise the steps of contacting a test compound with a protein of the invention, and determining whether the test compound binds to said protein. Preferred proteins of the invention for use in these processes are enzymes (e.g. tRNA synthetases), membrane transporters and ribosomal proteins. Suitable test compounds include proteins, polypeptides, carbohydrates, lipids, nucleic acids (e.g. DNA, RNA, and modified forms thereof), as well as small organic compounds (e.g. MW between 200 and 2000 Da). The test compounds may be provided individually, but will typically be part of a library (e.g. a combinatorial library). Methods for detecting a binding interaction include NMR, filter-binding assays, gel-retardation assays, displacement assays, surface plasmon resonance, reverse two-hybrid etc. A compound which binds to a protein of the invention can be tested for antibiotic activity by contacting the compound with GBS bacteria and then monitoring for inhibition of growth. The invention also provides a compound identified using these methods.

[0046] The invention also provides a composition comprising a protein or the invention and one or more of the following antigens:
[0047] a protein antigen from Helicobacter pylori such as VacA, CagA, NAP, HopX, HopY [e.g. WO98/04702] and/or urease.
[0048] a protein antigen from N. meningitidis serogroup B, such as those in WO99/24578, WO99/36544, WO99/57280, WO00/22430, Tettelin et al. (2000) Science 287:1809-1815, Pizza et al. (2000) Science 287:1816-1820 and WO96/29412, with protein ‘287’ and derivatives being particularly preferred.
[0049] an outer-membrane vesicle (OMV) preparation from N. meningitidis serogroup B, such as those disclosed in WO01/52885; Bjune et al. (1991) Lancet 338(8775):1093-1096; Fukasawa et al. (1999) Vaccine 17:2951-2958; Rosenqvist et al. (1998) Dev. Biol. Stand. 92:323-333 etc.
[0050] a saccharide antigen from N. meningitidis serogroup A, C, W135 and/or Y, such as the oligosaccharide disclosed in Costantino et al. (1992) Vaccine 10:691-698 from serogroup C [see also Costantino et al. (1999) Vaccine 17:1251-1263].
[0051] a saccharide antigen from Streptococcus pneumoniae [e.g. Watson (2000) Pediatr Infect Dis J 19:331-332; Rubin (2000) Pediatr Clin North Am 47:269-285, v; Jedrzejas (2001) Microbiol Mol Biol Rev 65:187-207].
[0052] an antigen from hepatitis A virus, such as inactivated virus [e.g. Bell (2000) Pediatr Infect Dis J 19:1187-1188; Iwarson (1995) APMIS 103:321-326].
[0053] an antigen from hepatitis B virus, such as the surface and/or core antigens [e.g. Gerlich et al. (1990) Vaccine 8 Suppl:S63-68 & 79-80].
[0054] an antigen from hepatitis C virus [e.g. Hsu et al. (1999) Clin Liver Dis 3:901-915].
[0055] an antigen from Bordetella pertussis, such as pertussis holotoxin (PT) and filamentous haemagglutinin (FHA) from B. pertussis, optionally also in combination with pertactin and/or agglutinogens 2 and 3 [e.g. Gustafsson et al. (1996) N. Engl. J. Med. 334:349-355; Rappuoli et al. (1991) TIBTECH 9:232-238].
[0056] a diphtheria antigen, such as a diphtheria toxoid [e.g. chapter 3 of Vaccines (1988) eds. Plotkin & Mortimer. ISBN 0-7216-1946-0] e.g. the CRM₁₉₇ mutant [e.g. Del Guidice et al. (1998) Molecular Aspects of Medicine 19:1-70].
[0057] a tetanus antigen, such as a tetanus toxoid [e.g. chapter 4 of Plotkin & Mortimer].
[0058] a saccharide antigen from Haemophilus influenzae B.
[0059] an antigen from N. gonorrhoeae [e.g. WO99/24578, WO99/36544, WO99/57280].
[0060] an antigen from Chlamydia pneumoniae [e.g. PCT/IB01/01445; Kalman et al. (1999) Nature Genetics 21:385-389; Read et al. (2000) Nucleic Acids Res 28:1397-406; Shirai et al. (2000) J. Infect. Dis. 181(Suppl 3):S524-S527; WO99/27105; WO00/27994; WO00/37494].
[0061] an antigen from Chlamydia trachomatis [e.g. WO99/28475].
[0062] an antigen from Porphyromonas gingivalis [e.g. Ross et al. (2001) Vaccine 19:4135-4142].
[0063] polio antigen(s) [e.g. Sutter et al. (2000) Pediatr Clin North Am 47:287-308; Zimmerman & Spann (1999) Am Fam Physician 59:113-118, 125-126] such as IPV or OPV.
[0064] rabies antigen(s) [e.g. Dreesen (1997) Vaccine 15 Suppl:S2-6] such as lyophilised inactivated virus [e.g. MMWR Morb Mortal Wkly Rep 1998 Jan. 16; 47(1):12, 19; RabAvert™].
[0065] measles, mumps and/or rubella antigens [e.g. chapters 9, 10 & 11 of Plotkin & Mortimer].
[0066] influenza antigen(s) [e.g. chapter 19 of Plotkin & Mortimer], such as the haemagglutinin and/or neuramimidase surface proteins.
[0067] an antigen from Moraxella catarrhalis [e.g. McMichael (2000) Vaccine 19 Suppl 1:S101-107].
[0068] an antigen from Staphylococcus aureus [e.g. Kuroda et al. (2001) Lancet 357(9264): 1225-1240; see also pages 1218-1219].

[0069] Where a saccharide or carbohydrate antigen is included, it is preferably conjugated to a carrier protein in order to enhance immunogenicity [e.g. Ramsay et al. (2001) Lancet 357(9251):195-196; Lindberg (1999) Vaccine 17 Suppl 2:S28-36; Conjugate Vaccines (eds. Cruse et al.) ISBN 3805549326, particularly vol. 10:48-114 etc.]. Preferred carrier proteins are bacterial toxins or toxoids, such as diphtheria or tetanus toxoids. The CRM₁₉₇ diphtheria toxoid is particularly preferred. Other suitable carrier proteins include the N. meningitidis outer membrane protein [e.g. EP-0372501], synthetic peptides [e.g. EP-0378881, EP-0427347], heat shock proteins [e.g. WO93/17712], pertussis proteins [e.g. WO98/58668; EP-0471177], protein D from H. influenzae [e.g. WO00/56360], toxin A or B from C. difficile [e.g. WO00/61761], etc. Any suitable conjugation reaction can be used, with any suitable linker where necessary.

[0070] Toxic protein antigens may be detoxified where necessary (e.g. detoxification of pertussis toxin by chemical and/or genetic means).

[0071] Where a diphtheria antigen is included in the composition it is preferred also to include tetanus antigen and pertussis antigens. Similarly, where a tetanus antigen is included it is preferred also to include diphtheria and pertussis antigens. Similarly, where a pertussis antigen is included it is preferred also to include diphtheria and tetanus antigens.

[0072] Antigens are preferably adsorbed to an aluminium salt.

[0073] Antigens in the composition will typically be present at a concentration of at least 1 μg/ml each. In general, the concentration of any given antigen will be sufficient to elicit an immune response against that antigen.

[0074] The invention also provides compositions comprising two or more proteins of the present invention.

[0075] The two or more proteins may comprise GBS sequences or may comprise GAS and GBS sequences.

[0076] A summary of standard techniques and procedures which may be employed to perform the invention (e.g. to utilise the disclosed sequences for vaccination or diagnostic purposes) follows. This summary is not a limitation on the invention but, rather, gives examples that may be used, but are not required.

### General

[0077] The practice of the present invention will employ, unless otherwise indicated, conventional techniques of molecular biology, microbiology, recombinant DNA, and immunology, which are within the skill of the art. Such techniques are explained fully in the literature eg. Sambrook Molecular Cloning, A Laboratory Manual, Second Edition (1989); DNA Cloning, Volumes I and II (D. N Glover ed. 1985); Oligonucleotide Synthesis (M. J. Gait ed, 1984); Nucleic Acid Hybridization (B. D. Hames & S. J. Higgins eds. 1984); Transcription and Translation (B. D. Hames & S. J. Higgins eds. 1984); Animal Cell Culture (R. I. Freshney ed. 1986); Immobilized Cells and Enzymes (IRL Press, 1986); B. Perbal, A Practical Guide to Molecular Cloning (1984); the Methods in Enzymology series (Academic Press, Inc.), especially volumes 154 & 155; Gene Transfer Vectors for Mammalian Cells (J. H. Miller and M. P. Calos eds. 1987, Cold Spring Harbor Laboratory); Mayer and Walker, eds. (1987), Immunochemical Methods in Cell and Molecular Biology (Academic Press, London); Scopes, (1987) Protein Purification: Principles and Practice, Second Edition (Springer-Verlag, N.Y.), and Handbook of Experimental Immunology, Volumes I-IV (D. M. Weir and C. C. Blackwell eds 1986).

[0078] Standard abbreviations for nucleotides and amino acids are used in this specification.

### DEFINITIONS

[0079] A composition containing X is “substantially free of” Y when at least 85% by weight of the total X+Y in the composition is X. Preferably, X comprises at least about 90% by weight of the total of X+Y in the composition, more preferably at least about 95% or even 99% by weight.

[0080] The term “comprising” means “including” as well as “consisting” e.g. a composition “comprising” X may consist exclusively of X or may include something additional e.g. X+Y.

[0081] The term “heterologous” refers to two biological components that are not found together in nature. The components may be host cells, genes, or regulatory regions, such as promoters. Although the heterologous components are not found together in nature, they can function together, as when a promoter heterologous to a gene is operably linked to the gene. Another example is where a streptococcus sequence is heterologous to a mouse host cell. A further examples would be two epitopes from the same or different proteins which have been assembled in a single protein in an arrangement not found in nature.

[0082] An “origin of replication” is a polynucleotide sequence that initiates and regulates replication of polynucleotides, such as an expression vector. The origin of replication behaves as an autonomous unit of polynucleotide replication within a cell, capable of replication under its own control. An origin of replication may be needed for a vector to replicate in a particular host cell. With certain origins of replication, an expression vector can be reproduced at a high copy number in the presence of the appropriate proteins within the cell. Examples of origins are the autonomously replicating sequences, which are effective in yeast; and the viral T-antigen, effective in COS-7 cells.

[0083] A “mutant” sequence is defined as DNA, RNA or amino acid sequence differing from but having sequence identity with the native or disclosed sequence. Depending on the particular sequence, the degree of sequence identity between the native or disclosed sequence and the mutant sequence is preferably greater than 50% (eg. 60%, 70%, 80%, 90%, 95%, 99% or more, calculated using the Smith-Waterman algorithm as described above). As used herein, an “allelic variant” of a nucleic acid molecule, or region, for which nucleic acid sequence is provided herein is a nucleic acid molecule, or region, that occurs essentially at the same locus in the genome of another or second isolate, and that, due to natural variation caused by, for example, mutation or recombination, has a similar but not identical nucleic acid sequence. A coding region allelic variant typically encodes a protein having similar activity to that of the protein encoded by the gene to which it is being compared. An allelic variant can also comprise an alteration in the 5′ or 3′ untranslated regions of the gene, such as in regulatory control regions (eg. see U.S. Pat. No. 5,753,235).

### Expression Systems

[0084] The streptococcus nucleotide sequences can be expressed in a variety of different expression systems; for example those used with mammalian cells, baculoviruses, plants, bacteria, and yeast.

i. Mammalian Systems

[0085] Mammalian expression systems are known in the art. A mammalian promoter is any DNA sequence capable of binding mammalian RNA polymerase and initiating the downstream (3′) transcription of a coding sequence (eg. structural gene) into mRNA. A promoter will have a transcription initiating region, which is usually placed proximal to the 5′ end of the coding sequence, and a TATA box, usually located 25-30 base pairs (bp) upstream of the transcription initiation site. The TATA box is thought to direct RNA polymerase II to begin RNA synthesis at the correct site. A mammalian promoter will also contain an upstream promoter element, usually located within 100 to 200 bp upstream of the TATA box. An upstream promoter element determines the rate at which transcription is initiated and can act in either orientation [Sambrook et al. (1989) “Expression of Cloned Genes in Mammalian Cells.” In Molecular Cloning: A Laboratory Manual, 2nd ed].

[0086] Mammalian viral genes are often highly expressed and have a broad host range; therefore sequences encoding mammalian viral genes provide particularly useful promoter sequences. Examples include the SV40 early promoter, mouse mammary tumor virus LTR promoter, adenovirus major late promoter (Ad MLP), and herpes simplex virus promoter. In addition, sequences derived from non-viral genes, such as the murine metallotheionein gene, also provide useful promoter sequences. Expression may be either constitutive or regulated (inducible), depending on the promoter can be induced with glucocorticoid in hormone-responsive cells.

[0087] The presence of an enhancer element (enhancer), combined with the promoter elements described above, will usually increase expression levels. An enhancer is a regulatory DNA sequence that can stimulate transcription up to 1000-fold when linked to homologous or heterologous promoters, with synthesis beginning at the normal RNA start site. Enhancers are also active when they are placed upstream or downstream from the transcription initiation site, in either normal or flipped orientation, or at a distance of more than 1000 nucleotides from the promoter [Maniatis et al. (1987) Science 236:1237; Alberts et al. (1989) Molecular Biology of the Cell, 2nd ed.]. Enhancer elements derived from viruses may be particularly useful, because they usually have a broader host range. Examples include the SV40 early gene enhancer [Dijkema et al (1985) EMBO J. 4:761] and the enhancer/promoters derived from the long terminal repeat (LTR) of the Rous Sarcoma Virus [Gorman et al. (1982b) Proc. Natl. Acad. Sci. 79:6777] and from human cytomegalovirus [Boshart et al. (1985) Cell 41:521]. Additionally, some enhancers are regulatable and become active only in the presence of an inducer, such as a hormone or metal ion [Sassone-Corsi and Borelli (1986) Trends Genet. 2:215; Maniatis et al. (1987) Science 236:1237].

[0088] A DNA molecule may be expressed intracellularly in mammalian cells. A promoter sequence may be directly linked with the DNA molecule, in which case the first amino acid at the N-terminus of the recombinant protein will always be a methionine, which is encoded by the ATG start codon. If desired, the N-terminus may be cleaved from the protein by in vitro incubation with cyanogen bromide.

[0089] Alternatively, foreign proteins can also be secreted from the cell into the growth media by creating chimeric DNA molecules that encode a fusion protein comprised of a leader sequence fragment that provides for secretion of the foreign protein in mammalian cells. Preferably, there are processing sites encoded between the leader fragment and the foreign gene that can be cleaved either in vivo or in vitro. The leader sequence fragment usually encodes a signal peptide comprised of hydrophobic amino acids which direct the secretion of the protein from the cell. The adenovirus triparite leader is an example of a leader sequence that provides for secretion of a foreign protein in mammalian cells.

[0090] Usually, transcription termination and polyadenylation sequences recognized by mammalian cells are regulatory regions located 3′ to the translation stop codon and thus, together with the promoter elements, flank the coding sequence. The 3′ terminus of the mature mRNA is formed by site-specific post-transcriptional cleavage and polyadenylation [Birnstiel et al. (1985) Cell 41:349; Proudfoot and Whitelaw (1988) “Termination and 3′ end processing of eukaryotic RNA. In Transcription and splicing (ed. B. D. Hames and D. M. Glover); Proudfoot (1989) Trends Biochem. Sci. 14:105]. These sequences direct the transcription of an mRNA which can be translated into the polypeptide encoded by the DNA. Examples of transcription terminater/polyadenylation signals include those derived from SV40 [Sambrook et al (1989) “Expression of cloned genes in cultured mammalian cells.” In Molecular Cloning: A Laboratory Manual].

[0091] Usually, the above described components, comprising a promoter, polyadenylation signal, and transcription termination sequence are put together into expression constructs. Enhancers, introns with functional splice donor and acceptor sites, and leader sequences may also be included in an expression construct, if desired. Expression constructs are often maintained in a replicon, such as an extrachromosomal element (eg. plasmids) capable of stable maintenance in a host, such as mammalian cells or bacteria. Mammalian replication systems include those derived from animal viruses, which require trans-acting factors to replicate. For example, plasmids containing the replication systems of papovaviruses, such as SV40 [Gluzman (1981) Cell 23:175] or polyomavirus, replicate to extremely high copy number in the presence of the appropriate viral T antigen. Additional examples of mammalian replicons include those derived from bovine papillomavirus and Epstein-Barr virus. Additionally, the replicon may have two replication systems, thus allowing it to be maintained, for example, in mammalian cells for expression and in a prokaryotic host for cloning and amplification. Examples of such mammalian-bacteria shuttle vectors include pMT2 [Kaufman et al. (1989) Mol. Cell. Biol. 9:946] and pHEBO [Shimizu et al. (1986) Mol. Cell. Biol. 6:1074].

[0092] The transformation procedure used depends upon the host to be transformed. Methods for introduction of heterologous polynucleotides into mammalian cells are known in the art and include dextran-mediated transfection, calcium phosphate precipitation, polybrene mediated transfection, protoplast fusion, electroporation, encapsulation of the polynucleotide(s) in liposomes, and direct microinjection of the DNA into nuclei.

[0093] Mammalian cell lines available as hosts for expression are known in the art and include many immortalized cell lines available from the American Type Culture Collection (ATCC), including but not limited to, Chinese hamster ovary (CHO) cells, HeLa cells, baby hamster kidney (BHK) cells, monkey kidney cells (COS), human hepatocellular carcinoma cells (eg. Hep G2), and a number of other cell lines.

ii. Baculovirus Systems

[0094] The polynucleotide encoding the protein can also be inserted into a suitable insect expression vector, and is operably linked to the control elements within that vector. Vector construction employs techniques which are known in the art. Generally, the components of the expression system include a transfer vector, usually a bacterial plasmid, which contains both a fragment of the baculovirus genome, and a convenient restriction site for insertion of the heterologous gene or genes to be expressed; a wild type baculovirus with a sequence homologous to the baculovirus-specific fragment in the transfer vector (this allows for the homologous recombination of the heterologous gene in to the baculovirus genome); and appropriate insect host cells and growth media.

[0095] After inserting the DNA sequence encoding the protein into the transfer vector, the vector and the wild type viral genome are transfected into an insect host cell where the vector and viral genome are allowed to recombine. The packaged recombinant virus is expressed and recombinant plaques are identified and purified. Materials and methods for baculovirus/insect cell expression systems are commercially available in kit form from, inter alia, Invitrogen, San Diego Calif. (“MaxBac” kit). These techniques are generally known to those skilled in the art and fully described in Summers and Smith, Texas Agricultural Experiment Station Bulletin No. 1555 (1987) (hereinafter “Summers and Smith”).

[0096] Prior to inserting the DNA sequence encoding the protein into the baculovirus genome, the above described components, comprising a promoter, leader (if desired), coding sequence, and transcription termination sequence, are usually assembled into an intermediate transplacement construct (transfer vector). This may contain a single gene and operably linked regulatory elements; multiple genes, each with its owned set of operably linked regulatory elements; or multiple genes, regulated by the same set of regulatory elements. Intermediate transplacement constructs are often maintained in a replicon, such as an extra-chromosomal element (e.g. plasmids) capable of stable maintenance in a host, such as a bacterium. The replicon will have a replication system, thus allowing it to be maintained in a suitable host for cloning and amplification.

[0097] Currently, the most commonly used transfer vector for introducing foreign genes into AcNPV is pAc373. Many other vectors, known to those of skill in the art, have also been designed. These include, for example, pVL985 (which alters the polyhedrin start codon from ATG to ATT, and which introduces a BamHI cloning site 32 basepairs downstream from the ATT; see Luckow and Summers, Virology (1989) 17:31.

[0098] The plasmid usually also contains the polyhedrin polyadenylation signal (Miller et al. (1988) Ann. Rev. Microbiol., 42:177) and a prokaryotic ampicillin-resistance (amp) gene and origin of replication for selection and propagation in E. coli.

[0099] Baculovirus transfer vectors usually contain a baculovirus promoter. A baculovirus promoter is any DNA sequence capable of binding a baculovirus RNA polymerase and initiating the downstream (5′ to 3′) transcription of a coding sequence (eg. structural gene) into mRNA. A promoter will have a transcription initiation region which is usually placed proximal to the 5′ end of the coding sequence. This transcription initiation region usually includes an RNA polymerase binding site and a transcription initiation site. A baculovirus transfer vector may also have a second domain called an enhancer, which, if present, is usually distal to the structural gene. Expression may be either regulated or constitutive.

[0100] Structural genes, abundantly transcribed at late times in a viral infection cycle, provide particularly useful promoter sequences. Examples include sequences derived from the gene encoding the viral polyhedron protein, Friesen et al., (1986) “The Regulation of Baculovirus Gene Expression,” in: The Molecular Biology of Baculoviruses (ed. Walter Doerfler); EPO Publ. Nos. 127 839 and 155 476; and the gene encoding the p10 protein, Vlak et al., (1988), J. Gen. Virol. 69:765.

[0101] DNA encoding suitable signal sequences can be derived from genes for secreted insect or baculovirus proteins, such as the baculovirus polyhedrin gene (Carbonell et al. (1988) Gene, 73:409). Alternatively, since the signals for mammalian cell posttranslational modifications (such as signal peptide cleavage, proteolytic cleavage, and phosphorylation) appear to be recognized by insect cells, and the signals required for secretion and nuclear accumulation also appear to be conserved between the invertebrate cells and vertebrate cells, leaders of non-insect origin, such as those derived from genes encoding human α-interferon, Maeda et al., (1985), Nature 315:592; human gastrin-releasing peptide, Lebacq-Verheyden et al., (1988), Molec. Cell. Biol. 8:3129; human IL-2, Smith et al., (1985) Proc. Nat'l Acad. Sci. USA, 82:8404; mouse IL-3, (Miyajima et al., (1987) Gene 58:273; and human glucocerebrosidase, Martin et al. (1988) DNA, 7:99, can also be used to provide for secretion in insects.

[0102] A recombinant polypeptide or polyprotein may be expressed intracellularly or, if it is expressed with the proper regulatory sequences, it can be secreted. Good intracellular expression of nonfused foreign proteins usually requires heterologous genes that ideally have a short leader sequence containing suitable translation initiation signals preceding an ATG start signal. If desired, methionine at the N-terminus may be cleaved from the mature protein by in vitro incubation with cyanogen bromide.

[0103] Alternatively, recombinant polyproteins or proteins which are not naturally secreted can be secreted from the insect cell by creating chimeric DNA molecules that encode a fusion protein comprised of a leader sequence fragment that provides for secretion of the foreign protein in insects. The leader sequence fragment usually encodes a signal peptide comprised of hydrophobic amino acids which direct the translocation of the protein into the endoplasmic reticulum.

[0104] After insertion of the DNA sequence and/or the gene encoding the expression product precursor of the protein, an insect cell host is co-transformed with the heterologous DNA of the transfer vector and the genomic DNA of wild type baculovirus—usually by co-transfection. The promoter and transcription termination sequence of the construct will usually comprise a 2-5 kb section of the baculovirus genome. Methods for introducing heterologous DNA into the desired site in the baculovirus virus are known in the art. (See Summers and Smith supra; Ju et al. (1987); Smith et al., Mol. Cell. Biol. (1983) 3:2156; and Luckow and Summers (1989)). For example, the insertion can be into a gene such as the polyhedrin gene, by homologous double crossover recombination; insertion can also be into a restriction enzyme site engineered into the desired baculovirus gene. Miller et al., (1989), Bioessays 4:91. The DNA sequence, when cloned in place of the polyhedrin gene in the expression vector, is flanked both 5′ and 3′ by polyhedrin-specific sequences and is positioned downstream of the polyhedrin promoter.

[0105] The newly formed baculovirus expression vector is subsequently packaged into an infectious recombinant baculovirus. Homologous recombination occurs at low frequency (between about 1% and about 5%); thus, the majority of the virus produced after cotransfection is still wild-type virus. Therefore, a method is necessary to identify recombinant viruses. An advantage of the expression system is a visual screen allowing recombinant viruses to be distinguished. The polyhedrin protein, which is produced by the native virus, is produced at very high levels in the nuclei of infected cells at late times after viral infection. Accumulated polyhedrin protein forms occlusion bodies that also contain embedded particles. These occlusion bodies, up to 15 μm in size, are highly refractile, giving them a bright shiny appearance that is readily visualized under the light microscope. Cells infected with recombinant viruses lack occlusion bodies. To distinguish recombinant virus from wild-type virus, the transfection supernatant is plaqued onto a monolayer of insect cells by techniques known to those skilled in the art. Namely, the plaques are screened under the light microscope for the presence (indicative of wild-type virus) or absence (indicative of recombinant virus) of occlusion bodies. “Current Protocols in Microbiology” Vol. 2 (Ausubel et al. eds) at 16.8 (Supp. 10, 1990); Summers and Smith, supra; Miller et al. (1989).

[0106] Recombinant baculovirus expression vectors have been developed for infection into several insect cells. For example, recombinant baculoviruses have been developed for, inter alia: Aedes aegypti, Autographa californica, Bombyx mori, Drosophila melanogaster, Spodoptera frugiperda, and Trichoplusia ni (WO 89/046699; Carbonell et al., (1985) J. Virol. 56:153; Wright (1986) Nature 321:718; Smith et al., (1983) Mol. Cell. Biol. 3:2156; and see generally, Fraser, et al. (1989) In Vitro Cell. Dev. Biol. 25:225).

[0107] Cells and cell culture media are commercially available for both direct and fusion expression of heterologous polypeptides in a baculovirus/expression system; cell culture technology is generally known to those skilled in the art. See, eg. Summers and Smith supra.

[0108] The modified insect cells may then be grown in an appropriate nutrient medium, which allows for stable maintenance of the plasmid(s) present in the modified insect host. Where the expression product gene is under inducible control, the host may be grown to high density, and expression induced. Alternatively, where expression is constitutive, the product will be continuously expressed into the medium and the nutrient medium must be continuously circulated, while removing the product of interest and augmenting depleted nutrients. The product may be purified by such techniques as chromatography, eg HPLC, affinity chromatography, ion exchange chromatography, etc.; electrophoresis; density gradient centrifugation; solvent extraction, etc. As appropriate, the product may be further purified, as required, so as to remove substantially any insect proteins which are also present in the medium, so as to provide a product which is at least substantially free of host debris, eg. proteins, lipids and polysaccharides.

[0109] In order to obtain protein expression, recombinant host cells derived from the transformants are incubated under conditions which allow expression of the recombinant protein encoding sequence. These conditions will vary, dependent upon the host cell selected. However, the conditions are readily ascertainable to those of ordinary skill in the art, based upon what is known in the art.

iii. Plant Systems

[0110] There are many plant cell culture and whole plant genetic expression systems known in the art. Exemplary plant cellular genetic expression systems include those described in patents, such as: U.S. Pat. No. 5,693,506; U.S. Pat. No. 5,659,122; and U.S. Pat. No. 5,608,143. Additional examples of genetic expression in plant cell culture has been described by Zenk, Phytochemistry 30:3861-3863 (1991). Descriptions of plant protein signal peptides may be found in addition to the references described above in Vaulcombe et al., Mol. Gen. Genet. 209:33-40 (1987); Chandler et al., Plant Molecular Biology 3:407-418 (1984); Rogers, J. Biol. Chem. 260:3731-3738 (1985); Rothstein et al., Gene 55:353-356 (1987); Whittier et al., Nucleic Acids Research 15:2515-2535 (1987); Wirsel et al., Molecular Microbiology 3:3-14 (1989); Yu et al., Gene 122:247-253 (1992). A description of the regulation of plant gene expression by the phytohormone, gibberellic acid and secreted enzymes induced by gibberellic acid can be found in R. L. Jones and J. MacMillin, Gibberellins: in: Advanced Plant Physiology, Malcolm B. Wilkins, ed., 1984 Pitman Publishing Limited, London, pp. 21-52. References that describe other metabolically-regulated genes: Sheen, Plant Cell, 2:1027-1038 (1990); Maas et al., EMBO J. 9:3447-3452 (1990); Benkel and Hickey, Proc. Natl. Acad. Sci. 84:1337-1339 (1987).

[0111] Typically, using techniques known in the art, a desired polynucleotide sequence is inserted into an expression cassette comprising genetic regulatory elements designed for operation in plants. The expression cassette is inserted into a desired expression vector with companion sequences upstream and downstream from the expression cassette suitable for expression in a plant host. The companion sequences will be of plasmid or viral origin and provide necessary characteristics to the vector to permit the vectors to move DNA from an original cloning host, such as bacteria, to the desired plant host. The basic bacterial/plant vector construct will preferably provide a broad host range prokaryote replication origin; a prokaryote selectable marker; and, for Agrobacterium transformations, T DNA sequences for Agrobacterium-mediated transfer to plant chromosomes. Where the heterologous gene is not readily amenable to detection, the construct will preferably also have a selectable marker gene suitable for determining if a plant cell has been transformed. A general review of suitable markers, for example for the members of the grass family, is found in Wilmink and Dons, 1993, Plant Mol. Biol. Reptr, 11(2):165-185.

[0112] Sequences suitable for permitting integration of the heterologous sequence into the plant genome are also recommended. These might include transposon sequences and the like for homologous recombination as well as Ti sequences which permit random insertion of a heterologous expression cassette into a plant genome. Suitable prokaryote selectable markers include resistance toward antibiotics such as ampicillin or tetracycline. Other DNA sequences encoding additional functions may also be present in the vector, as is known in the art.

[0113] The nucleic acid molecules of the subject invention may be included into an expression cassette for expression of the protein(s) of interest. Usually, there will be only one expression cassette, although two or more are feasible. The recombinant expression cassette will contain in addition to the heterologous protein encoding sequence the following elements, a promoter region, plant 5′ untranslated sequences, initiation codon depending upon whether or not the structural gene comes equipped with one, and a transcription and translation termination sequence. Unique restriction enzyme sites at the 5′ and 3′ ends of the cassette allow for easy insertion into a pre-existing vector.

[0114] A heterologous coding sequence may be for any protein relating to the present invention. The sequence encoding the protein of interest will encode a signal peptide which allows processing and translocation of the protein, as appropriate, and will usually lack any sequence which might result in the binding of the desired protein of the invention to a membrane. Since, for the most part, the transcriptional initiation region will be for a gene which is expressed and translocated during germination, by employing the signal peptide which provides for translocation, one may also provide for translocation of the protein of interest. In this way, the protein(s) of interest will be translocated from the cells in which they are expressed and may be efficiently harvested. Typically secretion in seeds are across the aleurone or scutellar epithelium layer into the endosperm of the seed. While it is not required that the protein be secreted from the cells in which the protein is produced, this facilitates the isolation and purification of the recombinant protein.

[0115] Since the ultimate expression of the desired gene product will be in a eucaryotic cell it is desirable to determine whether any portion of the cloned gene contains sequences which will be processed out as introns by the host's splicosome machinery. If so, site-directed mutagenesis of the “intron” region may be conducted to prevent losing a portion of the genetic message as a false intron code, Reed and Maniatis, Cell 41:95-105, 1985.

[0116] The vector can be microinjected directly into plant cells by use of micropipettes to mechanically transfer the recombinant DNA. Crossway, Mol. Gen. Genet, 202:179-185, 1985. The genetic material may also be transferred into the plant cell by using polyethylene glycol, Krens, et al., Nature, 296, 72-74, 1982. Another method of introduction of nucleic acid segments is high velocity ballistic penetration by small particles with the nucleic acid either within the matrix of small beads or particles, or on the surface, Klein, et al., Nature, 327, 70-73, 1987 and Knudsen and Muller, 1991, Planta, 185:330-336 teaching particle bombardment of barley endosperm to create transgenic barley. Yet another method of introduction would be fusion of protoplasts with other entities, either minicells, cells, lysosomes or other fusible lipid-surfaced bodies, Fraley, et al., Proc. Natl. Acad. Sci. USA, 79, 1859-1863, 1982.

[0117] The vector may also be introduced into the plant cells by electroporation. (Fromm et al., Proc. Natl. Acad. Sci. USA 82:5824, 1985). In this technique, plant protoplasts are electroporated in the presence of plasmids containing the gene construct. Electrical impulses of high field strength reversibly permeabilize biomembranes allowing the introduction of the plasmids. Electroporated plant protoplasts reform the cell wall, divide, and form plant callus.

[0118] All plants from which protoplasts can be isolated and cultured to give whole regenerated plants can be transformed by the present invention so that whole plants are recovered which contain the transferred gene. It is known that practically all plants can be regenerated from cultured cells or tissues, including but not limited to all major species of sugarcane, sugar beet, cotton, fruit and other trees, legumes and vegetables. Some suitable plants include, for example, species from the genera Fragaria, Lotus, Medicago, Onobrychis, Trifolium, Trigonella, Vigna, Citrus, Linum, Geranium, Manihot, Daucus, Arabidopsis, Brassica, Raphanus, Sinapis, Atropa, Capsicum, Datura, Hyoscyamus, Lycopersion, Nicotiana, Solanum, Petunia, Digitalis, Majorana, Cichorium, Helianthus, Lactuca, Bromus, Asparagus, Antirrhinum, Hererocallis, Nemesia, Pelargonium, Panicum, Pennisetum, Ranunculus, Senecio, Salpiglossis, Cucumis, Browaalia, Glycine, Lolium, Zea, Triticum, Sorghum, and Datura.

[0119] Means for regeneration vary from species to species of plants, but generally a suspension of transformed protoplasts containing copies of the heterologous gene is first provided. Callus tissue is formed and shoots may be induced from callus and subsequently rooted. Alternatively, embryo formation can be induced from the protoplast suspension. These embryos germinate as natural embryos to form plants. The culture media will generally contain various amino acids and hormones, such as auxin and cytokinins. It is also advantageous to add glutamic acid and proline to the medium, especially for such species as corn and alfalfa. Shoots and roots normally develop simultaneously. Efficient regeneration will depend on the medium, on the genotype, and on the history of the culture. If these three variables are controlled, then regeneration is fully reproducible and repeatable.

[0120] In some plant cell culture systems, the desired protein of the invention may be excreted or alternatively, the protein may be extracted from the whole plant. Where the desired protein of the invention is secreted into the medium, it may be collected. Alternatively, the embryos and embryoless-half seeds or other plant tissue may be mechanically disrupted to release any secreted protein between cells and tissues. The mixture may be suspended in a buffer solution to retrieve soluble proteins. Conventional protein isolation and purification methods will be then used to purify the recombinant protein. Parameters of time, temperature pH, oxygen, and volumes will be adjusted through routine methods to optimize expression and recovery of heterologous protein.

iv. Bacterial Systems

[0121] Bacterial expression techniques are known in the art. A bacterial promoter is any DNA sequence capable of binding bacterial RNA polymerase and initiating the downstream (3′) transcription of a coding sequence (eg. structural gene) into mRNA. A promoter will have a transcription initiation region which is usually placed proximal to the 5′ end of the coding sequence. This transcription initiation region usually includes an RNA polymerase binding site and a transcription initiation site. A bacterial promoter may also have a second domain called an operator, that may overlap an adjacent RNA polymerase binding site at which RNA synthesis begins. The operator permits negative regulated (inducible) transcription, as a gene repressor protein may bind the operator and thereby inhibit transcription of a specific gene. Constitutive expression may occur in the absence of negative regulatory elements, such as the operator. In addition, positive regulation may be achieved by a gene activator protein binding sequence, which, if present is usually proximal (5′) to the RNA polymerase binding sequence. An example of a gene activator protein is the catabolite activator protein (CAP), which helps initiate transcription of the lac operon in Escherichia coli (E. coli) [Raibaud et al. (1984) Annu. Rev. Genet. 18:173]. Regulated expression may therefore be either positive or negative, thereby either enhancing or reducing transcription.

[0122] Sequences encoding metabolic pathway enzymes provide particularly useful promoter sequences. Examples include promoter sequences derived from sugar metabolizing enzymes, such as galactose, lactose (lac) [Chang et al. (1977) Nature 198:1056], and maltose. Additional examples include promoter sequences derived from biosynthetic enzymes such as tryptophan (trp) [Goeddel et al. (1980) Nuc. Acids Res. 8:4057; Yelverton et al. (1981) Nucl. Acids Res. 9:731; U.S. Pat. No. 4,738,921; EP-A-0036776 and EP-A-0121775]. The g-laotamase (bla) promoter system [Weissmann (1981) “The cloning of interferon and other mistakes.” In Interferon 3 (ed. I. Gresser)], bacteriophage lambda PL [Shimatake et al. (1981) Nature 292:128] and T5 [U.S. Pat. No. 4,689,406] promoter systems also provide useful promoter sequences.

[0123] In addition, synthetic promoters which do not occur in nature also function as bacterial promoters. For example, transcription activation sequences of one bacterial or bacteriophage promoter may be joined with the operon sequences of another bacterial or bacteriophage promoter, creating a synthetic hybrid promoter [U.S. Pat. No. 4,551,433]. For example, the tac promoter is a hybrid trp-lac promoter comprised of both trp promoter and lac operon sequences that is regulated by the lac repressor [Amann et al. (1983) Gene 25:167; de Boer et al. (1983) Proc. Natl. Acad. Sci. 80:21]. Furthermore, a bacterial promoter can include naturally occurring promoters of non-bacterial origin that have the ability to bind bacterial RNA polymerase and initiate transcription. A naturally occurring promoter of non-bacterial origin can also be coupled with a compatible RNA polymerase to produce high levels of expression of some genes in prokaryotes. The bacteriophage T7 RNA polymerase/promoter system is an example of a coupled promoter system [Studier et al. (1986) J. Mol. Biol. 189:113; Tabor et al. (1985) Proc Natl. Acad. Sci. 82:1074]. In addition, a hybrid promoter can also be comprised of a bacteriophage promoter and an E. coli operator region (EPO-A-0 267 851).

[0124] In addition to a functioning promoter sequence, an efficient ribosome binding site is also useful for the expression of foreign genes in prokaryotes. In E. coli, the ribosome binding site is called the Shine-Dalgarno (SD) sequence and includes an initiation codon (ATG) and a sequence 3-9 nucleotides in length located 3-11 nucleotides upstream of the initiation codon [Shine et al. (1975) Nature 254:34]. The SD sequence is thought to promote binding of mRNA to the ribosome by the pairing of bases between the SD sequence and the 3′ and of E. coli 16S rRNA [Steitz et al. (1979) “Genetic signals and nucleotide sequences in messenger RNA.” In Biological Regulation and Development: Gene Expression (ed. R. F. Goldberger)]. To express eukaryotic genes and prokaryotic genes with weak ribosome-binding site [Sambrook et al. (1989) “Expression of cloned genes in Escherichia coli.” In Molecular Cloning: A Laboratory Manual].

[0125] A DNA molecule may be expressed intracellularly. A promoter sequence may be directly linked with the DNA molecule, in which case the first amino acid at the N-terminus will always be a methionine, which is encoded by the ATG start codon. If desired, methionine at the N-terminus may be cleaved from the protein by in vitro incubation with cyanogen bromide or by either in vivo on in vitro incubation with a bacterial methionine N-terminal peptidase (EP-A-0 219 237).

[0126] Fusion proteins provide an alternative to direct expression. Usually, a DNA sequence encoding the N-terminal portion of an endogenous bacterial protein, or other stable protein, is fused to the 5′ end of heterologous coding sequences. Upon expression, this construct will provide a fusion of the two amino acid sequences. For example, the bacteriophage lambda cell gene can be linked at the 5′ terminus of a foreign gene and expressed in bacteria. The resulting fusion protein preferably retains a site for a processing enzyme (factor Xa) to cleave the bacteriophage protein from the foreign gene [Nagai et al. (1984) Nature 309:810]. Fusion proteins can also be made with sequences from the lacZ [Jia et al. (1987) Gene 60:197], trpE [Allen et al. (1987) J. Biotechnol. 5:93; Makoff et al. (1989) J. Gen. Microbiol. 135:11], and Chey [EP-A-0 324 647] genes. The DNA sequence at the junction of the two amino acid sequences may or may not encode a cleavable site. Another example is a ubiquitin fusion protein. Such a fusion protein is made with the ubiquitin region that preferably retains a site for a processing enzyme (eg. ubiquitin specific processing-protease) to cleave the ubiquitin from the foreign protein. Through this method, native foreign protein can be isolated [Miller et al. (1989) Bio/Technology 7:698].

[0127] Alternatively, foreign proteins can also be secreted from the cell by creating chimeric DNA molecules that encode a fusion protein comprised of a signal peptide sequence fragment that provides for secretion of the foreign protein in bacteria [U.S. Pat. No. 4,336,336]. The signal sequence fragment usually encodes a signal peptide comprised of hydrophobic amino acids which direct the secretion of the protein from the cell. The protein is either secreted into the growth media (gram-positive bacteria) or into the periplasmic space, located between the inner and outer membrane of the cell (gram-negative bacteria). Preferably there are processing sites, which can be cleaved either in vivo or in vitro encoded between the signal peptide fragment and the foreign gene.

[0128] DNA encoding suitable signal sequences can be derived from genes for secreted bacterial proteins, such as the E. coli outer membrane protein gene (ompA) [Masui et al. (1983), in: Experimental Manipulation of Gene Expression; Ghrayeb et al. (1984) EMBO J. 3:2437] and the E. coli alkaline phosphatase signal sequence (phoA) [Oka et al. (1985) Proc. Natl. Acad. Sci. 82:7212]. As an additional example, the signal sequence of the alpha-amylase gene from various Bacillus strains can be used to secrete heterologous proteins from B. subtilis [Palva et al. (1982) Proc. Natl. Acad. Sci. USA 79:5582; EP-A-0 244 042].

[0129] Usually, transcription termination sequences recognized by bacteria are regulatory regions located 3′ to the translation stop codon, and thus together with the promoter flank the coding sequence. These sequences direct the transcription of an mRNA which can be translated into the polypeptide encoded by the DNA. Transcription termination sequences frequently include DNA sequences of about 50 nucleotides capable of forming stem loop structures that aid in terminating transcription. Examples include transcription termination sequences derived from genes with strong promoters, such as the trp gene in E. coli as well as other biosynthetic genes.

[0130] Usually, the above described components, comprising a promoter, signal sequence (if desired), coding sequence of interest, and transcription termination sequence, are put together into expression constructs. Expression constructs are often maintained in a replicon, such as an extrachromosomal element (eg. plasmids) capable of stable maintenance in a host, such as bacteria. The replicon will have a replication system, thus allowing it to be maintained in a prokaryotic host either for expression or for cloning and amplification. In addition, a replicon may be either a high or low copy number plasmid. A high copy number plasmid will generally have a copy number ranging from about 5 to about 200, and usually about 10 to about 150. A host containing a high copy number plasmid will preferably contain at least about 10, and more preferably at least about 20 plasmids. Either a high or low copy number vector may be selected, depending upon the effect of the vector and the foreign protein on the host.

[0131] Alternatively, the expression constructs can be integrated into the bacterial genome with an integrating vector. Integrating vectors usually contain at least one sequence homologous to the bacterial chromosome that allows the vector to integrate. Integrations appear to result from recombinations between homologous DNA in the vector and the bacterial chromosome. For example, integrating vectors constructed with DNA from various Bacillus strains integrate into the Bacillus chromosome (EP-A-0 127 328). Integrating vectors may also be comprised of bacteriophage or transposon sequences.

[0132] Usually, extrachromosomal and integrating expression constructs may contain selectable markers to allow for the selection of bacterial strains that have been transformed. Selectable markers can be expressed in the bacterial host and may include genes which render bacteria resistant to drugs such as ampicillin, chloramphenicol, erythromycin, kanamycin (neomycin), and tetracycline [Davies et al. (1978) Annu. Rev. Microbiol. 32:469]. Selectable markers may also include biosynthetic genes, such as those in the histidine, tryptophan, and leucine biosynthetic pathways.

[0133] Alternatively, some of the above described components can be put together in transformation vectors. Transformation vectors are usually comprised of a selectable market that is either maintained in a replicon or developed into an integrating vector, as described above.

[0134] Expression and transformation vectors, either extra-chromosomal replicons or integrating vectors, have been developed for transformation into many bacteria. For example, expression vectors have been developed for, inter alia, the following bacteria: Bacillus subtilis [Palva et al. (1982) Proc. Natl. Acad. Sci. USA 79:5582; EP-A-0 036 259 and EP-A-0 063 953; WO 84/04541], Escherichia coli [Shimatake et al. (1981) Nature 292:128; Amann et al. (1985) Gene 40:183; Studier et al. (1986) J. Mol. Biol. 189:113; EP-A-0 036 776, EP-A-0 136 829 and EP-A-0 136 907], Streptococcus cremoris [Powell et al. (1988) Appl. Environ. Microbiol. 54:655]; Streptococcus lividans [Powell et al. (1988) Appl. Environ. Microbiol. 54:655], Streptomyces lividans [U.S. Pat. No. 4,745,056].

[0135] Methods of introducing exogenous DNA into bacterial hosts are well-known in the art, and usually include either the transformation of bacteria treated with CaCl₂ or other agents, such as divalent cations and DMSO. DNA can also be introduced into bacterial cells by electroporation. Transformation procedures usually vary with the bacterial species to be transformed. See eg. [Masson et al. (1989) FEMS Microbiol. Lett. 60:273; Palva et al. (1982) Proc. Natl. Acad. Sci. USA 79:5582; EP-A-0 036 259 and EP-A-0 063 953; WO 84/04541, Bacillus], [Miller et al. (1988) Proc. Natl. Acad. Sci. 85:856; Wang et al. (1990) J. Bacteriol. 172:949, Campylobacter], [Cohen et al. (1973) Proc. Natl. Acad. Sci. 69:2110; Dower et al. (1988) Nucleic Acids Res. 16:6127; Kushner (1978) “An improved method for transformation of Escherichia coli with ColE1-derived plasmids. In Genetic Engineering: Proceedings of the International Symposium on Genetic Engineering (eds. H. W. Boyer and S. Nicosia); Mandel et al. (1970) J. Mol. Biol. 53:159; Taketo (1988) Biochim. Biophys. Acta 949:318; Escherichia], [Chassy et al. (1987) FEMS Microbiol. Lett. 44:173 Lactobacillus]; [Fiedler et al. (1988) Anal. Biochem 170:38, Pseudomonas]; [Augustin et al. (1990) FEMS Microbiol. Lett. 66:203, Staphylococcus], [Barany et al. (1980) J. Bacteriol. 144:698; Harlander (1987) “Transformation of Streptococcus lactis by electroporation, in: Streptococcal Genetics (ed. J. Ferretti and R. Curtiss III); Perry et al. (1981) Infect. Immun. 32:1295; Powell et al. (1988) Appl. Environ. Microbiol. 54:655; Somkuti et al. (1987) Proc. 4th Evr. Cong. Biotechnology 1:412, Streptococcus].

v. Yeast Expression

[0136] Yeast expression systems are also known to one of ordinary skill in the art. A yeast promoter is any DNA sequence capable of binding yeast RNA polymerase and initiating the downstream (3′) transcription of a coding sequence (eg. structural gene) into mRNA. A promoter will have a transcription initiation region which is usually placed proximal to the 5′ end of the coding sequence. This transcription initiation region usually includes an RNA polymerase binding site (the “TATA Box”) and a transcription initiation site. A yeast promoter may also have a second domain called an upstream activator sequence (UAS), which, if present, is usually distal to the structural gene. The UAS permits regulated (inducible) expression. Constitutive expression occurs in the absence of a UAS. Regulated expression may be either positive or negative, thereby either enhancing or reducing transcription.

[0137] Yeast is a fermenting organism with an active metabolic pathway, therefore sequences encoding enzymes in the metabolic pathway provide particularly useful promoter sequences. Examples include alcohol dehydrogenase (ADH) (EP-A-0 284 044), enolase, glucokinase, glucose-6-phosphate isomerase, glyceraldehyde-3-phosphate-dehydrogenase (GAP or GAPDH), hexokinase, phosphofructokinase, 3-phosphoglycerate mutase, and pyruvate kinase (PyK) (EPO-A-0 329 203). The yeast PHO5 gene, encoding acid phosphatase, also provides useful promoter sequences [Myanohara et al. (1983) Proc. Natl. Acad. Sci. USA 80: 1].

[0138] In addition, synthetic promoters which do not occur in nature also function as yeast promoters. For example, UAS sequences of one yeast promoter may be joined with the transcription activation region of another yeast promoter, creating a synthetic hybrid promoter. Examples of such hybrid promoters include the ADH regulatory sequence linked to the GAP transcription activation region (U.S. Pat. Nos. 4,876,197 and 4,880,734). Other examples of hybrid promoters include promoters which consist of the regulatory sequences of either the ADH2, GAL4, GAL10, OR PHO5 genes, combined with the transcriptional activation region of a glycolytic enzyme gene such as GAP or PyK (EP-A-0 164 556). Furthermore, a yeast promoter can include naturally occurring promoters of non-yeast origin that have the ability to bind yeast RNA polymerase and initiate transcription. Examples of such promoters include, inter alia, [Cohen et al. (1980) Proc. Natl. Acad. Sci. USA 77:1078; Henikoff et al. (1981) Nature 283:835; Hollenberg et al. (1981) Curr. Topics Microbiol. Immunol. 96:119; Hollenberg et al. (1979) “The Expression of Bacterial Antibiotic Resistance Genes in the Yeast Saccharomyces cerevisiae,” in: Plasmids of Medical, Environmental and Commercial Importance (eds. K. N. Timmis and A. Puhler); Mercerau-Puigalon et al. (1980) Gene 11:163; Panthier et al. (1980) Curr. Genet. 2:109;].

[0139] A DNA molecule may be expressed intracellularly in yeast. A promoter sequence may be directly linked with the DNA molecule, in which case the first amino acid at the N-terminus of the recombinant protein will always be a methionine, which is encoded by the ATG start codon. If desired, methionine at the N-terminus may be cleaved from the protein by in vitro incubation with cyanogen bromide.

[0140] Fusion proteins provide an alternative for yeast expression systems, as well as in mammalian, baculovirus, and bacterial expression systems. Usually, a DNA sequence encoding the N-terminal portion of an endogenous yeast protein, or other stable protein, is fused to the 5′ end of heterologous coding sequences. Upon expression, this construct will provide a fusion of the two amino acid sequences. For example, the yeast or human superoxide dismutase (SOD) gene, can be linked at the 5′ terminus of a foreign gene and expressed in yeast. The DNA sequence at the junction of the two amino acid sequences may or may not encode a cleavable site. See eg. EP-A-0 196 056. Another example is a ubiquitin fusion protein. Such a fusion protein is made with the ubiquitin region that preferably retains a site for a processing enzyme (eg. ubiquitin-specific processing protease) to cleave the ubiquitin from the foreign protein. Through this method, therefore, native foreign protein can be isolated (eg. WO88/024066).

[0141] Alternatively, foreign proteins can also be secreted from the cell into the growth media by creating chimeric DNA molecules that encode a fusion protein comprised of a leader sequence fragment that provide for secretion in yeast of the foreign protein. Preferably, there are processing sites encoded between the leader fragment and the foreign gene that can be cleaved either in vivo or in vitro. The leader sequence fragment usually encodes a signal peptide comprised of hydrophobic amino acids which direct the secretion of the protein from the cell.

[0142] DNA encoding suitable signal sequences can be derived from genes for secreted yeast proteins, such as the yeast invertase gene (EP-A-0 012 873; JPO. 62,096,086) and the A-factor gene (U.S. Pat. No. 4,588,684). Alternatively, leaders of non-yeast origin, such as an interferon leader, exist that also provide for secretion in yeast (EP-A-0 060 057).

[0143] A preferred class of secretion leaders are those that employ a fragment of the yeast alpha-factor gene, which contains both a “pre” signal sequence, and a “pro” region. The types of alpha-factor fragments that can be employed include the full-length pre-pro alpha factor leader (about 83 amino acid residues) as well as truncated alpha-factor leaders (usually about 25 to about 50 amino acid residues) (U.S. Pat. Nos. 4,546,083 and 4,870,008; EP-A-0 324 274). Additional leaders employing an alpha-factor leader fragment that provides for secretion include hybrid alpha-factor leaders made with a presequence of a first yeast, but a pro-region from a second yeast alphafactor. (eg. see WO 89/02463.)

[0144] Usually, transcription termination sequences recognized by yeast are regulatory regions located 3′ to the translation stop codon, and thus together with the promoter flank the coding sequence. These sequences direct the transcription of an mRNA which can be translated into the polypeptide encoded by the DNA. Examples of transcription terminator sequence and other yeast-recognized termination sequences, such as those coding for glycolytic enzymes.

[0145] Usually, the above described components, comprising a promoter, leader (if desired), coding sequence of interest, and transcription termination sequence, are put together into expression constructs. Expression constructs are often maintained in a replicon, such as an extrachromosomal element (eg. plasmids) capable of stable maintenance in a host, such as yeast or bacteria. The replicon may have two replication systems, thus allowing it to be maintained, for example, in yeast for expression and in a prokaryotic host for cloning and amplification. Examples of such yeast-bacteria shuttle vectors include YEp24 [Botstein et al. (1979) Gene 8:17-24], pCl/1 [Brake et al. (1984) Proc. Natl. Acad. Sci USA 81:4642-4646], and YRp17 [Stinchcomb et al. (1982) J. Mol. Biol. 158:157]. In addition, a replicon may be either a high or low copy number plasmid. A high copy number plasmid will generally have a copy number ranging from about 5 to about 200, and usually about 10 to about 150. A host containing a high copy number plasmid will preferably have at least about 10, and more preferably at least about 20. Enter a high or low copy number vector may be selected, depending upon the effect of the vector and the foreign protein on the host. See eg. Brake et al., supra.

[0146] Alternatively, the expression constructs can be integrated into the yeast genome with an integrating vector. Integrating vectors usually contain at least one sequence homologous to a yeast chromosome that allows the vector to integrate, and preferably contain two homologous sequences flanking the expression construct. Integrations appear to result from recombinations between homologous DNA in the vector and the yeast chromosome [Orr-Weaver et al. (1983) Methods in Enzymol. 101:228-245]. An integrating vector may be directed to a specific locus in yeast by selecting the appropriate homologous sequence for inclusion in the vector. See Orr-Weaver et al., supra. One or more expression construct may integrate, possibly affecting levels of recombinant protein produced [Rine et al. (1983) Proc. Natl. Acad. Sci. USA 80:6750]. The chromosomal sequences included in the vector can occur either as a single segment in the vector, which results in the integration of the entire vector, or two segments homologous to adjacent segments in the chromosome and flanking the expression construct in the vector, which can result in the stable integration of only the expression construct.

[0147] Usually, extrachromosomal and integrating expression constructs may contain selectable markers to allow for the selection of yeast strains that have been transformed. Selectable markers may include biosynthetic genes that can be expressed in the yeast host, such as ADE2, HIS4, LEU2, TRP1, and ALG7, and the G418 resistance gene, which confer resistance in yeast cells to tunicamycin and G418, respectively. In addition, a suitable selectable marker may also provide yeast with the ability to grow in the presence of toxic compounds, such as metal. For example, the presence of CUP1 allows yeast to grow in the presence of copper ions [Butt et al. (1987) Microbiol, Rev. 51:351].

[0148] Alternatively, some of the above described components can be put together into transformation vectors. Transformation vectors are usually comprised of a selectable marker that is either maintained in a replicon or developed into an integrating vector, as described above.

[0149] Expression and transformation vectors, either extrachromosomal replicons or integrating vectors, have been developed for transformation into many yeasts. For example, expression vectors have been developed for, inter alia, the following yeasts: Candida albicans [Kurtz, et al. (1986) Mol. Cell. Biol. 6:142], Candida maltosa [Kunze, et al. (1985) J. Basic Microbiol. 25:141]. Hansenula polymorpha [Gleeson, et al. (1986) J. Gen. Microbiol. 132:3459; Roggenkamp et al. (1986) Mol. Gen. Genet. 202:302], Kluyveromyces fragilis [Das, et al. (1984) J. Bacteriol. 158:1165], Kluyveromyces lactis [De Louvencourt et al. (1983) J. Bacteriol. 154:737; Van den Berg et al. (1990) Bio/Technology 8:135], Pichia guillerimondii [Kunze et al. (1985) J. Basic Microbiol. 25:141], Pichia pastoris [Cregg, et al. (1985) Mol. Cell. Biol. 5:3376; U.S. Pat. Nos. 4,837,148 and 4,929,555], Saccharomyces cerevisiae [Hinnen et al. (1978) Proc. Natl. Acad. Sci. USA 75:1929; Ito et al. (1983) J. Bacteriol. 153:163], Schizosaccharomyces pombe [Beach and Nurse (1981) Nature 300:706], and Yarrowia lipolytica [Davidow, et al. (1985) Curr. Genet. 10:380471 Gaillardin, et al. (1985) Curr. Genet. 10:49].

[0150] Methods of introducing exogenous DNA into yeast hosts are well-known in the art, and usually include either the transformation of spheroplasts or of intact yeast cells treated with alkali cations. Transformation procedures usually vary with the yeast species to be transformed. See eg. [Kurtz et al. (1986) Mol. Cell. Biol. 6:142; Kunze et al. (1985) J. Basic Microbiol. 25:141; Candida]; [Gleeson et al. (1986) J. Gen. Microbiol. 132:3459; Roggenkamp et al. (1986) Mol. Gen. Genet. 202:302; Hansenula]; [Das et al. (1984) J. Bacteriol. 158:1165; De Louvencourt et al. (1983) J. Bacteriol. 154:1165; Van den Berg et al. (1990) Bio/Technology 8:135; Kluyveromyces]; [Cregg et al. (1985) Mol. Cell. Biol. 5:3376; Kunze et al. (1985) J. Basic Microbiol. 25:141; U.S. Pat. Nos. 4,837,148 and 4,929,555; Pichia]; [Hinnen et al. (1978) Proc. Natl. Acad. Sci. USA 75; 1929; Ito et al. (1983) J. Bacteriol. 153:163 Saccharomyces]; [Beach and Nurse (1981) Nature 300:706; Schizosaccharomyces]; [Davidow et al. (1985) Curr. Genet. 10:39; Gaillardin et al. (1985) Curr. Genet. 10:49; Yarrowia].

### Antibodies

[0151] As used herein, the term “antibody” refers to a polypeptide or group of polypeptides composed of at least one antibody combining site. An “antibody combining site” is the three-dimensional binding space with an internal surface shape and charge distribution complementary to the features of an epitope of an antigen, which allows a binding of the antibody with the antigen. “Antibody” includes, for example, vertebrate antibodies, hybrid antibodies, chimeric antibodies, humanised antibodies, altered antibodies, univalent antibodies, Fab proteins, and single domain antibodies.

[0152] Antibodies against the proteins of the invention are useful for affinity chromatography, immunoassays, and distinguishing/identifying streptococcus proteins.

[0153] Antibodies to the proteins of the invention, both polyclonal and monoclonal, may be prepared by conventional methods. In general, the protein is first used to immunize a suitable animal, preferably a mouse, rat, rabbit or goat. Rabbits and goats are preferred for the preparation of polyclonal sera due to the volume of serum obtainable, and the availability of labeled anti-rabbit and anti-goat antibodies. Immunization is generally performed by mixing or emulsifying the protein in saline, preferably in an adjuvant such as Freund's complete adjuvant, and injecting the mixture or emulsion parenterally (generally subcutaneously or intramuscularly). A dose of 50-200 μg/injection is typically sufficient. Immunization is generally boosted 2-6 weeks later with one or more injections of the protein in saline, preferably using Freund's incomplete adjuvant. One may alternatively generate antibodies by in vitro immunization using methods known in the art, which for the purposes of this invention is considered equivalent to in vivo immunization. Polyclonal antisera is obtained by bleeding the immunized animal into a glass or plastic container, incubating the blood at 25° C. for one hour, followed by incubating at 4° C. for 2-18 hours. The serum is recovered by centrifugation (eg. 1,000 g for 10 minutes). About 20-50 ml per bleed may be obtained from rabbits.

[0154] Monoclonal antibodies are prepared using the standard method of Kohler & Milstein [Nature (1975) 256:495-96], or a modification thereof. Typically, a mouse or rat is immunized as described above. However, rather than bleeding the animal to extract serum, the spleen (and optionally several large lymph nodes) is removed and dissociated into single cells. If desired, the spleen cells may be screened (after removal of nonspecifically adherent cells) by applying a cell suspension to a plate or well coated with the protein antigen. B-cells expressing membrane-bound immunoglobulin specific for the antigen bind to the plate, and are not rinsed away with the rest of the suspension. Resulting B-cells, or all dissociated spleen cells, are then induced to fuse with myeloma cells to form hybridomas, and are cultured in a selective medium (eg. hypoxanthine, aminopterin, thymidine medium, “HAT”). The resulting hybridomas are plated by limiting dilution, and are assayed for production of antibodies which bind specifically to the immunizing antigen (and which do not bind to unrelated antigens). The selected MAb-secreting hybridomas are then cultured either in vitro (eg. in tissue culture bottles or hollow fiber reactors), or in vivo (as ascites in mice).

[0155] If desired, the antibodies (whether polyclonal or monoclonal) may be labeled using conventional techniques. Suitable labels include fluorophores, chromophores, radioactive atoms (particularly ³²P and ¹²⁵I), electron-dense reagents, enzymes, and ligands having specific binding partners. Enzymes are typically detected by their activity. For example, horseradish peroxidase is usually detected by its ability to convert 3,3′,5,5′-tetramethylbenzidine (TMB) to a blue pigment, quantifiable with a spectrophotometer. “Specific binding partner” refers to a protein capable of binding a ligand molecule with high specificity, as for example in the case of an antigen and a monoclonal antibody specific therefor. Other specific binding partners include biotin and avidin or streptavidin, IgG and protein A, and the numerous receptor-ligand couples known in the art. It should be understood that the above description is not meant to categorize the various labels into distinct classes, as the same label may serve in several different modes. For example, ¹²⁵I may serve as a radioactive label or as an electron-dense reagent. HRP may serve as enzyme or as antigen for a MAb. Further, one may combine various labels for desired effect. For example, MAbs and avidin also require labels in the practice of this invention: thus, one might label a MAb with biotin, and detect its presence with avidin labeled with ¹²⁵I, or with an anti-biotin MAb labeled with HRP. Other permutations and possibilities will be readily apparent to those of ordinary skill in the art, and are considered as equivalents within the scope of the instant invention.

### Pharmaceutical Compositions

[0156] Pharmaceutical compositions can comprise either polypeptides, antibodies, or nucleic acid of the invention. The pharmaceutical compositions will comprise a therapeutically effective amount of either polypeptides, antibodies, or polynucleotides of the claimed invention.

[0157] The term “therapeutically effective amount” as used herein refers to an amount of a therapeutic agent to treat, ameliorate, or prevent a desired disease or condition, or to exhibit a detectable therapeutic or preventative effect. The effect can be detected by, for example, chemical markers or antigen levels. Therapeutic effects also include reduction in physical symptoms, such as decreased body temperature. The precise effective amount for a subject will depend upon the subject's size and health, the nature and extent of the condition, and the therapeutics or combination of therapeutics selected for administration. Thus, it is not useful to specify an exact effective amount in advance. However, the effective amount for a given situation can be determined by routine experimentation and is within the judgement of the clinician.

[0158] For purposes of the present invention, an effective dose will be from about 0.01 mg/kg to 50 mg/kg or 0.05 mg/kg to about 10 mg/kg of the molecule of the invention in the individual to which it is administered.

[0159] A pharmaceutical composition can also contain a pharmaceutically acceptable carrier. The term “pharmaceutically acceptable carrier” refers to a carrier for administration of a therapeutic agent, such as antibodies or a polypeptide, genes, and other therapeutic agents. The term refers to any pharmaceutical carrier that does not itself induce the production of antibodies harmful to the individual receiving the composition, and which may be administered without undue toxicity. Suitable carriers may be large, slowly metabolized macromolecules such as proteins, polysaccharides, polylactic acids, polyglycolic acids, polymeric amino acids, amino acid copolymers, and inactive virus particles. Such carriers are well known to those of ordinary skill in the art.

[0160] Pharmaceutically acceptable salts can be used therein, for example, mineral acid salts such as hydrochlorides, hydrobromides, phosphates, sulfates, and the like; and the salts of organic acids such as acetates, propionates, malonates, benzoates, and the like. A thorough discussion of pharmaceutically acceptable excipients is available in Remington's Pharmaceutical Sciences (Mack Pub. Co., N.J. 1991).

[0161] Pharmaceutically acceptable carriers in therapeutic compositions may contain liquids such as water, saline, glycerol and ethanol. Additionally, auxiliary substances, such as wetting or emulsifying agents, pH buffering substances, and the like, may be present in such vehicles. Typically, the therapeutic compositions are prepared as injectables, either as liquid solutions or suspensions; solid forms suitable for solution in, or suspension in, liquid vehicles prior to injection may also be prepared. Liposomes are included within the definition of a pharmaceutically acceptable carrier.

### Delivery Methods

[0162] Once formulated, the compositions of the invention can be administered directly to the subject. The subjects to be treated can be animals; in particular, human subjects can be treated.

[0163] Direct delivery of the compositions will generally be accomplished by injection, either subcutaneously, intraperitoneally, intravenously or intramuscularly or delivered to the interstitial space of a tissue. The compositions can also be administered into a lesion. Other modes of administration include oral and pulmonary administration, suppositories, and transdermal or transcutaneous applications (eg. see WO98/20734), needles, and gene guns or hyposprays. Dosage treatment may be a single dose schedule or a multiple dose schedule.

### Vaccines

[0164] Vaccines according to the invention may either be prophylactic (ie. to prevent infection) or therapeutic (ie. to treat disease after infection).

[0165] Such vaccines comprise immunising antigen(s), immunogen(s), polypeptide(s), protein(s) or nucleic acid, usually in combination with “pharmaceutically acceptable carriers,” which include any carrier that does not itself induce the production of antibodies harmful to the individual receiving the composition. Suitable carriers are typically large, slowly metabolized macromolecules such as proteins, polysaccharides, polylactic acids, polyglycolic acids, polymeric amino acids, amino acid copolymers, lipid aggregates (such as oil droplets or liposomes), and inactive virus particles. Such carriers are well known to those of ordinary skill in the art. Additionally, these carriers may function as immunostimulating agents (“adjuvants”). Furthermore, the antigen or immunogen may be conjugated to a bacterial toxoid, such as a toxoid from diphtheria, tetanus, cholera, H. pylori, etc. pathogens.

[0166] Preferred adjuvants to enhance effectiveness of the composition include, but are not limited to: (1) oil-in-water emulsion formulations (with or without other specific immunostimulating agents such as muramyl peptides (see below) or bacterial cell wall components), such as for example (a) MF59™ (WO90/14837; Chapter 10 in Vaccine Design—the subunit and adjuvant approach (1995) ed. Powell & Newman), containing 5% Squalene, 0.5% Tween 80, and 0.5% Span 85 (optionally containing MTP-PE) formulated into submicron particles using a microfluidizer, (b) SAF, containing 10% Squalane, 0.4% Tween 80, 5% pluronic-blocked polymer L121, and thr-MDP either microfluidized into a submicron emulsion or vortexed to generate a larger particle size emulsion, and (c) Ribi™ adjuvant system (RAS), (Ribi Immunochem, Hamilton, Mont.) containing 2% Squalene, 0.2% Tween 80, and one or more bacterial cell wall components from the group consisting of monophosphorylipid A (MPL), trehalose dimycolate (TDM), and cell wall skeleton (CWS), preferably MPL+CWS (Detox™); (2) saponin adjuvants, such as QS21 or Stimulon™ (Cambridge Bioscience, Worcester, Mass.) may be used or particles generated therefrom such as ISCOMs (immunostimulating complexes), which ISCOMS may be devoid of additional detergent e.g. WO00/07621; (3) Complete Freund's Adjuvant (CFA) and Incomplete Freund's Adjuvant (IFA); (4) cytokines, such as interleukins (e.g. IL-1, IL-2, IL-4, IL-5, IL-6, IL-7, IL-12 (WO99/44636), etc.), interferons (e.g. gamma interferon), macrophage colony stimulating factor (M-CSF), tumor necrosis factor (TNF), etc.; (5) monophosphoryl lipid A (MPL) or 3-O-deacylated MPL (3dMPL) e.g. GB-2220221, EP-A-0689454; (6) combinations of 3dMPL with, for example, QS21 and/or oil-in-water emulsions e.g. EP-A-0835318, EP-A-0735898, EP-A-0761231; (7) oligonucleotides comprising CpG motifs [Krieg Vaccine 2000, 19, 618-622; Krieg Curr opin Mol Ther 2001 3:15-24; Roman et al., Nat. Med., 1997, 3, 849-854; Weiner et al., PNAS USA, 1997, 94, 10833-10837; Davis et al., J. Immunol., 1998, 160, 870-876; Chu et al., J. Exp. Med., 1997, 186, 1623-1631; Lipford et al., Eur. J. Immunol., 1997, 27, 2340-2344; Moldoveanu et al., Vaccine, 1988, 16, 1216-1224, Krieg et al., Nature, 1995, 374, 546-549; Klinman et al., PNAS USA, 1996, 93, 2879-2883; Ballas et al., J. Immunol., 1996, 157, 1840-1845; Cowdery et al., J. Immunol., 1996, 156, 4570-4575; Halpern et al., Cell. Immunol., 1996, 167, 72-78; Yamamoto et al., Jpn. J. Cancer Res., 1988, 79, 866-873; Stacey et al., J. Immunol., 1996, 157, 2116-2122; Messina et al., J. Immunol., 1991, 147, 1759-1764; Yi et al., J. Immunol., 1996, 157, 4918-4925; Yi et al., J. Immunol., 1996, 157, 5394-5402; Yi et al., J. Immunol., 1998, 160, 4755-4761; and Yi et al., J. Immunol., 1998, 160, 5898-5906; International patent applications WO96/02555, WO98/16247, WO98/18810, WO98/40100, WO98/55495, WO98/37919 and WO98/52581] i.e. containing at least one CG dinucleotide, with 5-methylcytosine optionally being used in place of cytosine; (8) a polyoxyethylene ether or a polyoxyethylene ester e.g. WO99/52549; (9) a polyoxyethylene sorbitan ester surfactant in combination with an octoxynol (e.g. WO01/21207) or a polyoxyethylene alkyl ether or ester surfactant in combination with at least one additional non-ionic surfactant such as an octoxynol (e.g. WO01/21152); (10) an immunostimulatory oligonucleotide (e.g. a CpG oligonucleotide) and a saponin e.g. WO00/62800; (11) an immunostimulant and a particle of metal salt e.g. WO00/23105; (12) a saponin and an oil-in-water emulsion e.g. WO99/11241; (13) a saponin (e.g. QS21)+3dMPL+IL-12 (optionally+a sterol) e.g. WO98/57659; (14) aluminium salts, preferably hydroxide or phosphate, but any other suitable salt may also be used (e.g. hydroxyphosphate, oxyhydroxide, orthophosphate, sulphate etc. [e.g. see chapters 8 & 9 of Powell & Newman]). Mixtures of different aluminium salts may also be used. The salt may take any suitable form (e.g. gel, crystalline, amorphous etc.); (15) other substances that act as immunostimulating agents to enhance the efficacy of the composition. Aluminium salts and/or MF59™ are preferred.

[0167] As mentioned above, muramyl peptides include, but are not limited to, N-acetyl-muramyl-L-threonyl-D-isoglutamine (thr-MDP), N-acetyl-normuramyl-L-alanyl-D-isoglutamine (nor-MDP), N-acetylmuramyl-L-alanyl-D-isoglutaminyl-L-alanine-2-(1′-2′-dipalmitoyl-sn-glycero-3-hydroxyphosphoryloxy)-ethylamine (MTP-PE), etc.

[0168] The immunogenic compositions (eg. the immunising antigen/immunogen/polypeptide/protein/nucleic acid, pharmaceutically acceptable carrier, and adjuvant) typically will contain diluents, such as water, saline, glycerol, ethanol, etc. Additionally, auxiliary substances, such as wetting or emulsifying agents, pH buffering substances, and the like, may be present in such vehicles.

[0169] Typically, the immunogenic compositions are prepared as injectables, either as liquid solutions or suspensions; solid forms suitable for solution in, or suspension in, liquid vehicles prior to injection may also be prepared. The preparation also may be emulsified or encapsulated in liposomes for enhanced adjuvant effect, as discussed above under pharmaceutically acceptable carriers.

[0170] Immunogenic compositions used as vaccines comprise an immunologically effective amount of the antigenic or immunogenic polypeptides, as well as any other of the above-mentioned components, as needed. By “immunologically effective amount”, it is meant that the administration of that amount to an individual, either in a single dose or as part of a series, is effective for treatment or prevention. This amount varies depending upon the health and physical condition of the individual to be treated, the taxonomic group of individual to be treated (eg. nonhuman primate, primate, etc.), the capacity of the individual's immune system to synthesize antibodies, the degree of protection desired, the formulation of the vaccine, the treating doctor's assessment of the medical situation, and other rel-evant factors. It is expected that the amount will fall in a relatively broad range that can be determined through routine trials.

[0171] The immunogenic compositions are conventionally administered parenterally, eg. by injection, either subcutaneously, intramuscularly, or transdermally/transcutaneously (eg. WO98/20734). Additional formulations suitable for other modes of administration include oral and pulmonary formulations, suppositories, and transdermal applications. Dosage treatment may be a single dose schedule or a multiple dose schedule. The vaccine may be administered in conjunction with other immunoregulatory agents.

[0172] As an alternative to protein-based vaccines, DNA vaccination may be used [eg. Robinson & Torres (1997) Seminars in Immunol 9:271-283; Donnelly et al. (1997) Annu Rev Immunol 15:617-648; later herein].

### Gene Delivery Vehicles

[0173] Gene therapy vehicles for delivery of constructs including a coding sequence of a therapeutic of the invention, to be delivered to the mammal for expression in the mammal, can be administered either locally or systemically. These constructs can utilize viral or non-viral vector approaches in in vivo or ex vivo modality. Expression of such coding sequence can be induced using endogenous mammalian or heterologous promoters. Expression of the coding sequence in vivo can be either constitutive or regulated.

[0174] The invention includes gene delivery vehicles capable of expressing the contemplated nucleic acid sequences. The gene delivery vehicle is preferably a viral vector and, more preferably, a retroviral, adenoviral, adeno-associated viral (AAV), herpes viral, or alphavirus vector. The viral vector can also be an astrovirus, coronavirus, orthomyxovirus, papovavirus, paramyxovirus, parvovirus, picornavirus, poxvirus, or togavirus viral vector. See generally, Jolly (1994) Cancer Gene Therapy 1:51-64; Kimura (1994) Human Gene Therapy 5:845-852; Connelly (1995) Human Gene Therapy 6:185-193; and Kaplitt (1994) Nature Genetics 6:148-153.

[0175] Retroviral vectors are well known in the art and we contemplate that any retroviral gene therapy vector is employable in the invention, including B, C and D type retroviruses, xenotropic retroviruses (for example, NZB-X1, NZB-X2 and NZB9-1 (see O'Neill (1985) J. Virol. 53:160) polytropic retroviruses eg. MCF and MCF-MLV (see Kelly (1983) J. Virol. 45:291), spumaviruses and lentiviruses. See RNA Tumor Viruses, Second Edition, Cold Spring Harbor Laboratory, 1985.

[0176] Portions of the retroviral gene therapy vector may be derived from different retroviruses. For example, retrovector LTRs may be derived from a Murine Sarcoma Virus, a tRNA binding site from a Rous Sarcoma Virus, a packaging signal from a Murine Leukemia Virus, and an origin of second strand synthesis from an Avian Leukosis Virus.

[0177] These recombinant retroviral vectors may be used to generate transduction competent retroviral vector particles by introducing them into appropriate packaging cell lines (see U.S. Pat. No. 5,591,624). Retrovirus vectors can be constructed for site-specific integration into host cell DNA by incorporation of a chimeric integrase enzyme into the retroviral particle (see WO96/37626). It is preferable that the recombinant viral vector is a replication defective recombinant virus.

[0178] Packaging cell lines suitable for use with the above-described retrovirus vectors are well known in the art, are readily prepared (see WO95/30763 and WO92/05266), and can be used to create producer cell lines (also termed vector cell lines or “VCLs”) for the production of recombinant vector particles. Preferably, the packaging cell lines are made from human parent cells (eg. HT1080 cells) or mink parent cell lines, which eliminates inactivation in human serum.

[0179] Preferred retroviruses for the construction of retroviral gene therapy vectors include Avian Leukosis Virus, Bovine Leukemia, Virus, Murine Leukemia Virus, Mink-Cell Focus-Inducing Virus, Murine Sarcoma Virus, Reticuloendotheliosis Virus and Rous Sarcoma Virus. Particularly preferred Murine Leukemia Viruses include 4070A and 1504A (Hartley and Rowe (1976) J Virol 19:19-25), Abelson (ATCC No. VR-999), Friend (ATCC No. VR-245), Graffi, Gross (ATCC Nol VR-590), Kirsten, Harvey Sarcoma Virus and Rauscher (ATCC No. VR-998) and Moloney Murine Leukemia Virus (ATCC No. VR-190). Such retroviruses may be obtained from depositories or collections such as the American Type Culture Collection (“ATCC”) in Rockville, Md. or isolated from known sources using commonly available techniques.

[0180] Exemplary known retroviral gene therapy vectors employable in this invention include those described in patent applications GB2200651, EP0415731, EP0345242, EP0334301, WO89/02468; WO89/05349, WO89/09271, WO90/02806, WO90/07936, WO94/03622, WO93/25698, WO93/25234, WO93/11230, WO93/10218, WO91/02805, WO91/02825, WO95/07994, U.S. Pat. No. 5,219,740, U.S. Pat. No. 4,405,712, U.S. Pat. No. 4,861,719, U.S. Pat. No. 4,980,289, U.S. Pat. No. 4,777,127, U.S. Pat. No. 5,591,624. See also Vile (1993) Cancer Res 53:3860-3864; Vile (1993) Cancer Res 53:962-967; Ram (1993) Cancer Res 53 (1993) 83-88; Takamiya (1992) J Neurosci Res 33:493-503; Baba (1993) J Neurosurg 79:729-735; Mann (1983) Cell 33:153; Cane (1984) Proc Natl Acad Sci 81:6349; and Miller (1990) Human Gene Therapy 1.

[0181] Human adenoviral gene therapy vectors are also known in the art and employable in this invention. See, for example, Berkner (1988) Biotechniques 6:616 and Rosenfeld (1991) Science 252:431, and WO93/07283, WO93/06223, and WO93/07282. Exemplary known adenoviral gene therapy vectors employable in this invention include those described in the above referenced documents and in WO94/12649, WO93/03769, WO93/19191, WO94/28938, WO95/11984, WO95/00655, WO95/27071, WO95/29993, WO95/34671, WO96/05320, WO94/08026, WO94/11506, WO93/06223, WO94/24299, WO95/14102, WO95/24297, WO95/02697, WO94/28152, WO94/24299, WO95/09241, WO95/25807, WO95/05835, WO94/18922 and WO95/09654. Alternatively, administration of DNA linked to killed adenovirus as described in Curiel (1992) Hum. Gene Ther. 3:147-154 may be employed. The gene delivery vehicles of the invention also include adenovirus associated virus (AAV) vectors. Leading and preferred examples of such vectors for use in this invention are the AAV-2 based vectors disclosed in Srivastava, WO93/09239. Most preferred AAV vectors comprise the two AAV inverted terminal repeats in which the native D-sequences are modified by substitution of nucleotides, such that at least 5 native nucleotides and up to 18 native nucleotides, preferably at least 10 native nucleotides up to 18 native nucleotides, most preferably 10 native nucleotides are retained and the remaining nucleotides of the D-sequence are deleted or replaced with non-native nucleotides. The native D-sequences of the AAV inverted terminal repeats are sequences of 20 consecutive nucleotides in each AAV inverted terminal repeat (ie. there is one sequence at each end) which are not involved in HP formation. The non-native replacement nucleotide may be any nucleotide other than the nucleotide found in the native D-sequence in the same position. Other employable exemplary AAV vectors are pWP-19, pWN-1, both of which are disclosed in Nahreini (1993) Gene 124:257-262. Another example of such an AAV vector is psub201 (see Samulski (1987) J. Virol. 61:3096). Another exemplary AAV vector is the Double-D ITR vector. Construction of the Double-D ITR vector is disclosed in U.S. Pat. No. 5,478,745. Still other vectors are those disclosed in Carter U.S. Pat. No. 4,797,368 and Muzyczka U.S. Pat. No. 5,139,941, Chartejee U.S. Pat. No. 5,474,935, and Kotin WO94/288157. Yet a further example of an AAV vector employable in this invention is SSV9AFABTKneo, which contains the AFP enhancer and albumin promoter and directs expression predominantly in the liver. Its structure and construction are disclosed in Su (1996) Human Gene Therapy 7:463-470. Additional AAV gene therapy vectors are described in U.S. Pat. No. 5,354,678, U.S. Pat. No. 5,173,414, U.S. Pat. No. 5,139,941, and U.S. Pat. No. 5,252,479.

[0182] The gene therapy vectors of the invention also include herpes vectors. Leading and preferred examples are herpes simplex virus vectors containing a sequence encoding a thymidine kinase polypeptide such as those disclosed in U.S. Pat. No. 5,288,641 and EP0176170 (Roizman). Additional exemplary herpes simplex virus vectors include HFEM/ICP6-LacZ disclosed in WO95/04139 (Wistar Institute), pHSVIac described in Geller (1988) Science 241:1667-1669 and in WO90/09441 and WO92/07945, HSV Us3::pgC-lacZ described in Fink (1992) Human Gene Therapy 3:11-19 and HSV 7134, 2 RH 105 and GAL4 described in EP 0453242 (Breakefield), and those deposited with the ATCC with accession numbers VR-977 and VR-260.

[0183] Also contemplated are alpha virus gene therapy vectors that can be employed in this invention. Preferred alpha virus vectors are Sindbis viruses vectors. Togaviruses, Semliki Forest virus (ATCC VR-67; ATCC VR-1247), Middleberg virus (ATCC VR-370), Ross River virus (ATCC VR-373; ATCC VR-1246), Venezuelan equine encephalitis virus (ATCC VR923; ATCC VR-1250; ATCC VR-1249; ATCC VR-532), and those described in U.S. Pat. Nos. 5,091,309, 5,217,879, and WO92/10578. More particularly, those alpha virus vectors described in U.S. Ser. No. 08/405,627, filed Mar. 15, 1995, WO94/21792, WO92/10578, WO95/07994, U.S. Pat. No. 5,091,309 and U.S. Pat. No. 5,217,879 are employable. Such alpha viruses may be obtained from depositories or collections such as the ATCC in Rockville, Md. or isolated from known sources using commonly available techniques. Preferably, alphavirus vectors with reduced cytotoxicity are used (see U.S. Ser. No. 08/679,640).

[0184] DNA vector systems such as eukaryotic layered expression systems are also useful for expressing the nucleic acids of the invention. See WO95/07994 for a detailed description of eukaryotic layered expression systems. Preferably, the eukaryotic layered expression systems of the invention are derived from alphavirus vectors and most preferably from Sindbis viral vectors.

[0185] Other viral vectors suitable for use in the present invention include those derived from poliovirus, for example ATCC VR-58 and those described in Evans, Nature 339 (1989) 385 and Sabin (1973) J. Biol. Standardization 1:115; rhinovirus, for example ATCC VR-1110 and those described in Arnold (1990) J Cell Biochem L401; pox viruses such as canary pox virus or vaccinia virus, for example ATCC VR-111 and ATCC VR-2010 and those described in Fisher-Hoch (1989) Proc Natl Acad Sci 86:317; Flexner (1989) Ann NY Acad Sci 569:86, Flexner (1990) Vaccine 8:17; in U.S. Pat. No. 4,603,112 and U.S. Pat. No. 4,769,330 and WO89/01973; SV40 virus, for example ATCC VR-305 and those described in Mulligan (1979) Nature 277:108 and Madzak (1992) J Gen Virol 73:1533; influenza virus, for example ATCC VR-797 and recombinant influenza viruses made employing reverse genetics techniques as described in U.S. Pat. No. 5,166,057 and in Enami (1990) Proc Natl Acad Sci 87:3802-3805; Enami & Palese (1991) J Virol 65:2711-2713 and Luytjes (1989) Cell 59:110, (see also McMichael (1983) NEJ Med 309:13, and Yap (1978) Nature 273:238 and Nature (1979) 277:108); human immunodeficiency virus as described in EP-0386882 and in Buchschacher (1992) J. Virol. 66:2731; measles virus, for example ATCC VR-67 and VR-1247 and those described in EP-0440219; Aura virus, for example ATCC VR-368; Bebaru virus, for example ATCC VR-600 and ATCC VR-1240; Cabassou virus, for example ATCC VR-922; Chikungunya virus, for example ATCC VR-64 and ATCC VR-1241; Fort Morgan Virus, for example ATCC VR-924; Getah virus, for example ATCC VR-369 and ATCC VR-1243; Kyzylagach virus, for example ATCC VR-927; Mayaro virus, for example ATCC VR-66; Mucambo virus, for example ATCC VR-580 and ATCC VR-1244; Ndumu virus, for example ATCC VR-371; Pixuna virus, for example ATCC VR-372 and ATCC VR-1245; Tonate virus, for example ATCC VR-925; Triniti virus, for example ATCC VR-469; Una virus, for example ATCC VR-374; Whataroa virus, for example ATCC VR-926; Y-62-33 virus, for example ATCC VR-375; O'Nyong virus, Eastern encephalitis virus, for example ATCC VR-65 and ATCC VR-1242; Western encephalitis virus, for example ATCC VR-70, ATCC VR-1251, ATCC VR-622 and ATCC VR-1252; and coronavirus, for example ATCC VR-740 and those described in Hamre (1966) Proc Soc Exp Biol Med 121:190.

[0186] Delivery of the compositions of this invention into cells is not limited to the above mentioned viral vectors. Other delivery methods and media may be employed such as, for example, nucleic acid expression vectors, polycationic condensed DNA linked or unlinked to killed adenovirus alone, for example see U.S. Ser. No. 08/366,787, filed Dec. 30, 1994 and Curiel (1992) Hum Gene Ther 3:147-154 ligand linked DNA, for example see Wu (1989) J Biol Chem 264:16985-16987, eucaryotic cell delivery vehicles cells, for example see U.S. Ser. No. 08/240,030, filed May 9, 1994, and U.S. Ser. No. 08/404,796, deposition of photopolymerized hydrogel materials, hand-held gene transfer particle gun, as described in U.S. Pat. No. 5,149,655, ionizing radiation as described in U.S. Pat. No. 5,206,152 and in WO92/11033, nucleic charge neutralization or fusion with cell membranes. Additional approaches are described in Philip (1994) Mol Cell Biol 14:2411-2418 and in Woffendin (1994) Proc Natl Acad Sci 91:1581-1585.

[0187] Particle mediated gene transfer may be employed, for example see U.S. Ser. No. 60/023,867. Briefly, the sequence can be inserted into conventional vectors that contain conventional control sequences for high level expression, and then incubated with synthetic gene transfer molecules such as polymeric DNA-binding cations like polylysine, protamine, and albumin, linked to cell targeting ligands such as asialoorosomucoid, as described in Wu & Wu (1987) J. Biol. Chem. 262:4429-4432, insulin as described in Hucked (1990) Biochem Pharmacol 40:253-263, galactose as described in Plank (1992) Bioconjugate Chem 3:533-539, lactose or transferrin.

[0188] Naked DNA may also be employed. Exemplary naked DNA introduction methods are described in WO 90/11092 and U.S. Pat. No. 5,580,859. Uptake efficiency may be improved using biodegradable latex beads. DNA coated latex beads are efficiently transported into cells after endocytosis initiation by the beads. The method may be improved further by treatment of the beads to increase hydrophobicity and thereby facilitate disruption of the endosome and release of the DNA into the cytoplasm.

[0189] Liposomes that can act as gene delivery vehicles are described in U.S. Pat. No. 5,422,120, WO95/13796, WO94/23697, WO91/14445 and EP-524,968. As described in U.S. Ser. No. 60/023,867, on non-viral delivery, the nucleic acid sequences encoding a polypeptide can be inserted into conventional vectors that contain conventional control sequences for high level expression, and then be incubated with synthetic gene transfer molecules such as polymeric DNA-binding cations like polylysine, protamine, and albumin, linked to cell targeting ligands such as asialoorosomucoid, insulin, galactose, lactose, or transferrin. Other delivery systems include the use of liposomes to encapsulate DNA comprising the gene under the control of a variety of tissue-specific or ubiquitously-active promoters. Further non-viral delivery suitable for use includes mechanical delivery systems such as the approach described in Woffendin et al (1994) Proc. Natl. Acad. Sci. USA 91(24):11581-11585. Moreover, the coding sequence and the product of expression of such can be delivered through deposition of photopolymerized hydrogel materials. Other conventional methods for gene delivery that can be used for delivery of the coding sequence include, for example, use of hand-held gene transfer particle gun, as described in U.S. Pat. No. 5,149,655; use of ionizing radiation for activating transferred gene, as described in U.S. Pat. No. 5,206,152 and WO92/11033

[0190] Exemplary liposome and polycationic gene delivery vehicles are those described in U.S. Pat. Nos. 5,422,120 and 4,762,915; in WO 95/13796; WO94/23697; and WO91/14445; in EP-0524968; and in Stryer, Biochemistry, pages 236-240 (1975) W.H. Freeman, San Francisco; Szoka (1980) Biochem Biophys Acta 600:1; Bayer (1979) Biochem Biophys Acta 550:464; Rivnay (1987) Meth Enzymol 149:119; Wang (1987) Proc Natl Acad Sci 84:7851; Plant (1989) Anal Biochem 176:420.

[0191] A polynucleotide composition can comprises therapeutically effective amount of a gene therapy vehicle, as the term is defined above. For purposes of the present invention, an effective dose will be from about 0.01 mg/kg to 50 mg/kg or 0.05 mg/kg to about 10 mg/kg of the DNA constructs in the individual to which it is administered.

### Delivery Methods

[0192] Once formulated, the polynucleotide compositions of the invention can be administered (1) directly to the subject; (2) delivered ex vivo, to cells derived from the subject; or (3) in vitro for expression of recombinant proteins. The subjects to be treated can be mammals or birds. Also, human subjects can be treated.

[0193] Direct delivery of the compositions will generally be accomplished by injection, either subcutaneously, intraperitoneally, intravenously or intramuscularly or delivered to the interstitial space of a tissue. The compositions can also be administered into a lesion. Other modes of administration include oral and pulmonary administration, suppositories, and transdermal or transcutaneous applications (eg. see WO98/20734), needles, and gene guns or hyposprays. Dosage treatment may be a single dose schedule or a multiple dose schedule.

[0194] Methods for the ex vivo delivery and reimplantation of transformed cells into a subject are known in the art and described in eg. WO93/14778. Examples of cells useful in ex vivo applications include, for example, stem cells, particularly hematopoetic, lymph cells, macrophages, dendritic cells, or tumor cells.

[0195] Generally, delivery of nucleic acids for both ex vivo and in vitro applications can be accomplished by the following procedures, for example, dextran-mediated transfection, calcium phosphate precipitation, polybrene mediated transfection, protoplast fusion, electroporation, encapsulation of the polynucleotide(s) in liposomes, and direct microinjection of the DNA into nuclei, all well known in the art.

### Polynucleotide and Polypeptide Pharmaceutical Compositions

[0196] In addition to the pharmaceutically acceptable carriers and salts described above, the following additional agents can be used with polynucleotide and/or polypeptide compositions.

### A. Polypeptides

[0197] One example are polypeptides which include, without limitation: asioloorosomucoid (ASOR); transferrin; asialoglycoproteins; antibodies; antibody fragments; ferritin; interleukins; interferons, granulocyte, macrophage colony stimulating factor (GM-CSF), granulocyte colony stimulating factor (G-CSF), macrophage colony stimulating factor (M-CSF), stem cell factor and erythropoietin. Viral antigens, such as envelope proteins, can also be used. Also, proteins from other invasive organisms, such as the 17 amino acid peptide from the circumsporozoite protein of plasmodium falciparum known as RII.

### B. Hormones, Vitamins, etc.

[0198] Other groups that can be included are, for example: hormones, steroids, androgens, estrogens, thyroid hormone, or vitamins, folic acid.

C. Polyalkylenes, Polysaccharides. Etc.

[0199] Also, polyalkylene glycol can be included with the desired polynucleotides/polypeptides. In a preferred embodiment, the polyalkylene glycol is polyethlylene glycol. In addition, mono-, di-, or polysaccharides can be included. In a preferred embodiment of this aspect, the polysaccharide is dextran or DEAE-dextran. Also, chitosan and poly(lactide-co-glycolide)

### D. Lipids, and Liposomes

[0200] The desired polynucleotide/polypeptide can also be encapsulated in lipids or packaged in liposomes prior to delivery to the subject or to cells derived therefrom.

[0201] Lipid encapsulation is generally accomplished using liposomes which are able to stably bind or entrap and retain nucleic acid. The ratio of condensed polynucleotide to lipid preparation can vary but will generally be around 1:1 (mg DNA:micromoles lipid), or more of lipid. For a review of the use of liposomes as carriers for delivery of nucleic acids, see, Hug and Sleight (1991) Biochim. Biophys. Acta. 1097:1-17; Straubinger (1983) Meth. Enzymol. 101:512-527.

[0202] Liposomal preparations for use in the present invention include cationic (positively charged), anionic (negatively charged) and neutral preparations. Cationic liposomes have been shown to mediate intracellular delivery of plasmid DNA (Felgner (1987) Proc. Natl. Acad. Sci. USA 84:7413-7416); mRNA (Malone (1989) Proc. Natl. Acad. Sci. USA 86:6077-6081); and purified transcription factors (Debs (1990) J. Biol. Chem. 265:10189-10192), in functional form.

[0203] Cationic liposomes are readily available. For example, N[1-2,3-dioleyloxy)propyl]-N,N,N-triethyl-ammonium (DOTMA) liposomes are available under the trademark Lipofectin, from GIBCO BRL, Grand Island, N.Y. (See, also, Felgner supra). Other commercially available liposomes include transfectace (DDAB/DOPE) and DOTAP/DOPE (Boerhinger). Other cationic liposomes can be prepared from readily available materials using techniques well known in the art. See, eg. Szoka (1978) Proc. Natl. Acad. Sci. USA 75:4194-4198; WO90/11092 for a description of the synthesis of DOTAP (1,2-bis(oleoyloxy)-3-(trimethylammonio)propane) liposomes.

[0204] Similarly, anionic and neutral liposomes are readily available, such as from Avanti Polar Lipids (Birmingham, Ala.), or can be easily prepared using readily available materials. Such materials include phosphatidyl choline, cholesterol, phosphatidyl ethanolamine, dioleoylphosphatidyl choline (DOPC), dioleoylphosphatidyl glycerol (DOPG), dioleoylphoshatidyl ethanolamine (DOPE), among others. These materials can also be mixed with the DOTMA and DOTAP starting materials in appropriate ratios. Methods for making liposomes using these materials are well known in the art.

[0205] The liposomes can comprise multilammelar vesicles (MLVs), small unilamellar vesicles (SUVs), or large unilamellar vesicles (LUVs). The various liposome-nucleic acid complexes are prepared using methods known in the art. See eg. Straubinger (1983) Meth. Immunol. 101:512-527; Szoka (1978) Proc. Natl. Acad. Sci. USA 75:4194-4198; Papahadjopoulos (1975) Biochim. Biophys. Acta 394:483; Wilson (1979) Cell 17:77); Deamer & Bangham (1976) Biochim. Biophys. Acta 443:629; Ostro (1977) Biochem. Biophys. Res. Commun. 76:836; Fraley (1979) Proc. Natl. Acad. Sci. USA 76:3348); Enoch & Strittmatter (1979) Proc. Natl. Acad. Sci. USA 76:145; Fraley (1980) J. Biol. Chem. (1980) 255:10431; Szoka & Papahadjopoulos (1978) Proc. Natl. Acad. Sci. USA 75:145; and Schaefer-Ridder (1982) Science 215:166.

### E. Lipoproteins

[0206] In addition, lipoproteins can be included with the polynucleotide/polypeptide to be delivered. Examples of lipoproteins to be utilized include: chylomicrons, HDL, IDL, LDL, and VLDL. Mutants, fragments, or fusions of these proteins can also be used. Also, modifications of naturally occurring lipoproteins can be used, such as acetylated LDL. These lipoproteins can target the delivery of polynucleotides to cells expressing lipoprotein receptors. Preferably, if lipoproteins are including with the polynucleotide to be delivered, no other targeting ligand is included in the composition.

[0207] Naturally occurring lipoproteins comprise a lipid and a protein portion. The protein portion are known as apoproteins. At the present, apoproteins A, B, C, D, and E have been isolated and identified. At least two of these contain several proteins, designated by Roman numerals, AI, AII, AIV; CI, CII, CIII.

[0208] A lipoprotein can comprise more than one apoprotein. For example, naturally occurring chylomicrons comprises of A, B, C & E, over time these lipoproteins lose A and acquire C & E. VLDL comprises A, B, C & E apoproteins, LDL comprises apoprotein B; and HDL comprises apoproteins A, C, & E.

[0209] The amino acid of these apoproteins are known and are described in, for example, Breslow (1985) Annu Rev. Biochem 54:699; Law (1986) Adv. Exp Med. Biol. 151:162; Chen (1986) J Biol Chem 261:12918; Kane (1980) Proc Natl Acad Sci USA 77:2465; and Utermann (1984) Hum Genet 65:232.

[0210] Lipoproteins contain a variety of lipids including, triglycerides, cholesterol (free and esters), and phospholipids. The composition of the lipids varies in naturally occurring lipoproteins. For example, chylomicrons comprise mainly triglycerides. A more detailed description of the lipid content of naturally occurring lipoproteins can be found, for example, in Meth. Enzymol. 128 (1986). The composition of the lipids are chosen to aid in conformation of the apoprotein for receptor binding activity. The composition of lipids can also be chosen to facilitate hydrophobic interaction and association with the polynucleotide binding molecule.

[0211] Naturally occurring lipoproteins can be isolated from serum by ultracentrifugation, for instance. Such methods are described in Meth. Enzymol. (supra); Pitas (1980) J. Biochem. 255:5454-5460 and Mahey (1979) J. Clin. Invest 64:743-750. Lipoproteins can also be produced by in vitro or recombinant methods by expression of the apoprotein genes in a desired host cell. See, for example, Atkinson (1986) Annu Rev Biophys Chem 15:403 and Radding (1958) Biochim Biophys Acta 30: 443. Lipoproteins can also be purchased from commercial suppliers, such as Biomedical Techniologies, Inc., Stoughton, Mass., USA. Further description of lipoproteins can be found in WO98/06437.

### F. Polycationic Agents

[0212] Polycationic agents can be included, with or without lipoprotein, in a composition with the desired polynucleotide/polypeptide to be delivered.

[0213] Polycationic agents, typically, exhibit a net positive charge at physiological relevant pH and are capable of neutralizing the electrical charge of nucleic acids to facilitate delivery to a desired location. These agents have both in vitro, ex vivo, and in vivo applications. Polycationic agents can be used to deliver nucleic acids to a living subject either intramuscularly, subcutaneously, etc.

[0214] The following are examples of useful polypeptides as polycationic agents: polylysine, polyarginine, polyornithine, and protamine. Other examples include histones, protamines, human serum albumin, DNA binding proteins, non-histone chromosomal proteins, coat proteins from DNA viruses, such as (X174, transcriptional factors also contain domains that bind DNA and therefore may be useful as nucleic aid condensing agents. Briefly, transcriptional factors such as C/CEBP, c-jun, c-fos, AP-1, AP-2, AP-3, CPF, Prot-1, Sp-1, Oct-1, Oct-2, CREP, and TFIID contain basic domains that bind DNA sequences.

[0215] Organic polycationic agents include: spermine, spermidine, and purtrescine.

[0216] The dimensions and of the physical properties of a polycationic agent can be extrapolated from the list above, to construct other polypeptide polycationic agents or to produce synthetic polycationic agents.

[0217] Synthetic polycationic agents which are useful include, for example, DEAE-dextran, polybrene. Lipofectin™, and lipofectAMINE™ are monomers that form polycationic complexes when combined with polynucleotides/polypeptides.

### Immunodiagnostic Assays

[0218] Streptococcus antigens of the invention can be used in immunoassays to detect antibody levels (or, conversely, anti-streptococcus antibodies can be used to detect antigen levels). Immunoassays based on well defined, recombinant antigens can be developed to replace invasive diagnostics methods. Antibodies to streptococcus proteins within biological samples, including for example, blood or serum samples, can be detected. Design of the immunoassays is subject to a great deal of variation, and a variety of these are known in the art. Protocols for the immunoassay may be based, for example, upon competition, or direct reaction, or sandwich type assays. Protocols may also, for example, use solid supports, or may be by immunoprecipitation. Most assays involve the use of labeled antibody or polypeptide; the labels may be, for example, fluorescent, chemiluminescent, radioactive, or dye molecules. Assays which amplify the signals from the probe are also known; examples of which are assays which utilize biotin and avidin, and enzyme-labeled and mediated immunoassays, such as ELISA assays.

[0219] Kits suitable for immunodiagnosis and containing the appropriate labeled reagents are constructed by packaging the appropriate materials, including the compositions of the invention, in suitable containers, along with the remaining reagents and materials (for example, suitable buffers, salt solutions, etc.) required for the conduct of the assay, as well as suitable set of assay instructions.

### Nucleic Acid Hybridisation

[0220] “Hybridization” refers to the association of two nucleic acid sequences to one another by hydrogen bonding. Typically, one sequence will be fixed to a solid support and the other will be free in solution. Then, the two sequences will be placed in contact with one another under conditions that favor hydrogen bonding. Factors that affect this bonding include: the type and volume of solvent; reaction temperature; time of hybridization; agitation; agents to block the non-specific attachment of the liquid phase sequence to the solid support (Denhardt's reagent or BLOTTO); concentration of the sequences; use of compounds to increase the rate of association of sequences (dextran sulfate or polyethylene glycol); and the stringency of the washing conditions following hybridization. See Sambrook et al. [supra] Volume 2, chapter 9, pages 9.47 to 9.57.

[0221] “Stringency” refers to conditions in a hybridization reaction that favor association of very similar sequences over sequences that differ. For example, the combination of temperature and salt concentration should be chosen that is approximately 120 to 200° C. below the calculated Tm of the hybrid under study. The temperature and salt conditions can often be determined empirically in preliminary experiments in which samples of genomic DNA immobilized on filters are hybridized to the sequence of interest and then washed under conditions of different stringencies. See Sambrook et al. at page 9.50.

[0222] Variables to consider when performing, for example, a Southern blot are (1) the complexity of the DNA being blotted and (2) the homology between the probe and the sequences being detected. The total amount of the fragment(s) to be studied can vary a magnitude of 10, from 0.1 to 1 μg for a plasmid or phage digest to 10⁻⁹ to 10⁻⁸ g for a single copy gene in a highly complex eukaryotic genome. For lower complexity polynucleotides, substantially shorter blotting, hybridization, and exposure times, a smaller amount of starting polynucleotides, and lower specific activity of probes can be used. For example, a single-copy yeast gene can be detected with an exposure time of only 1 hour starting with 1 μg of yeast DNA, blotting for two hours, and hybridizing for 4-8 hours with a probe of 10⁸ cpm/μg. For a single-copy mammalian gene a conservative approach would start with 10 μg of DNA, blot overnight, and hybridize overnight in the presence of 10% dextran sulfate using a probe of greater than 10⁸ cpm/μg, resulting in an exposure time of −24 hours.

[0223] Several factors can affect the melting temperature (Tm) of a DNA-DNA hybrid between the probe and the fragment of interest, and consequently, the appropriate conditions for hybridization and washing. In many cases the probe is not 100% homologous to the fragment. Other commonly encountered variables include the length and total G+C content of the hybridizing sequences and the ionic strength and formamide content of the hybridization buffer. The effects of all of these factors can be approximated by a single equation:

Tm=81+16.6(log₁₀Ci)+0.4[%(G+C)]−0.6(% formamide)−600/n−1.5(% mismatch).

where Ci is the salt concentration (monovalent ions) and n is the length of the hybrid in base pairs (slightly modified from Meinkoth & Wahl (1984) Anal. Biochem. 138: 267-284).

[0224] In designing a hybridization experiment, some factors affecting nucleic acid hybridization can be conveniently altered. The temperature of the hybridization and washes and the salt concentration during the washes are the simplest to adjust. As the temperature of the hybridization increases (ie. stringency), it becomes less likely for hybridization to occur between strands that are nonhomologous, and as a result, background decreases. If the radiolabeled probe is not completely homologous with the immobilized fragment (as is frequently the case in gene family and interspecies hybridization experiments), the hybridization temperature must be reduced, and background will increase. The temperature of the washes affects the intensity of the hybridizing band and the degree of background in a similar manner. The stringency of the washes is also increased with decreasing salt concentrations.

[0225] In general, convenient hybridization temperatures in the presence of 50% formamide are 42° C. for a probe with is 95% to 100% homologous to the target fragment, 37° C. for 90% to 95% homology, and 32° C. for 85% to 90% homology. For lower homologies, formamide content should be lowered and temperature adjusted accordingly, using the equation above. If the homology between the probe and the target fragment are not known, the simplest approach is to start with both hybridization and wash conditions which are nonstringent. If non-specific bands or high background are observed after autoradiography, the filter can be washed at high stringency and reexposed. If the time required for exposure makes this approach impractical, several hybridization and/or washing stringencies should be tested in parallel.

### Nucleic Acid Probe Assays

[0226] Methods such as PCR, branched DNA probe assays, or blotting techniques utilizing nucleic acid probes according to the invention can determine the presence of cDNA or mRNA. A probe is said to “hybridize” with a sequence of the invention if it can form a duplex or double stranded complex, which is stable enough to be detected.

[0227] The nucleic acid probes will hybridize to the streptococcus nucleotide sequences of the invention (including both sense and antisense strands). Though many different nucleotide sequences will encode the amino acid sequence, the native streptococcus sequence is preferred because it is the actual sequence present in cells. mRNA represents a coding sequence and so a probe should be complementary to the coding sequence; single-stranded cDNA is complementary to mRNA, and so a cDNA probe should be complementary to the non-coding sequence.

[0228] The probe sequence need not be identical to the streptococcus sequence (or its complement)—some variation in the sequence and length can lead to increased assay sensitivity if the nucleic acid probe can form a duplex with target nucleotides, which can be detected. Also, the nucleic acid probe can include additional nucleotides to stabilize the formed duplex. Additional streptococcus sequence may also be helpful as a label to detect the formed duplex. For example, a non-complementary nucleotide sequence may be attached to the 5′ end of the probe, with the remainder of the probe sequence being complementary to a streptococcus sequence. Alternatively, non-complementary bases or longer sequences can be interspersed into the probe, provided that the probe sequence has sufficient complementarity with the a streptococcus sequence in order to hybridize therewith and thereby form a duplex which can be detected.

[0229] The exact length and sequence of the probe will depend on the hybridization conditions (e.g. temperature, salt condition etc.). For example, for diagnostic applications, depending on the complexity of the analyte sequence, the nucleic acid probe typically contains at least 10-20 nucleotides, preferably 15-25, and more preferably at least 30 nucleotides, although it may be shorter than this. Short primers generally require cooler temperatures to form sufficiently stable hybrid complexes with the template.

[0230] Probes may be produced by synthetic procedures, such as the triester method of Matteucci et al. [J. Am. Chem. Soc. (1981) 103:3185], or according to Urdea et al. [Proc. Natl. Acad. Sci. USA (1983) 80: 7461], or using commercially available automated oligonucleotide synthesizers.

[0231] The chemical nature of the probe can be selected according to preference. For certain applications, DNA or RNA are appropriate. For other applications, modifications may be incorporated eg. backbone modifications, such as phosphorothioates or methylphosphonates, can be used to increase in vivo half-life, alter RNA affinity, increase nuclease resistance etc. [eg. see Agrawal & Iyer (1995) Curr Opin Biotechnol 6:12-19; Agrawal (1996) TIBTECH 14:376-387]; analogues such as peptide nucleic acids may also be used [eg. see Corey (1997) TIBTECH 15:224-229; Buchardt et al. (1993) TIBTECH 11:384-386].

[0232] Alternatively, the polymerase chain reaction (PCR) is another well-known means for detecting small amounts of target nucleic acid. The assay is described in Mullis et al. [Meth. Enzymol. (1987) 155:335-350] & U.S. Pat. Nos. 4,683,195 & 4,683,202. Two “primer” nucleotides hybridize with the target nucleic acids and are used to prime the reaction. The primers can comprise sequence that does not hybridize to the sequence of the amplification target (or its complement) to aid with duplex stability or, for example, to incorporate a convenient restriction site. Typically, such sequence will flank the desired streptococcus sequence.

[0233] A thermostable polymerase creates copies of target nucleic acids from the primers using the original target nucleic acids as a template. After a threshold amount of target nucleic acids are generated by the polymerase, they can be detected by more traditional methods, such as Southern blots. When using the Southern blot method, the labelled probe will hybridize to the streptococcus sequence (or its complement).

[0234] Also, mRNA or cDNA can be detected by traditional blotting techniques described in Sambrook et al [supra]. mRNA, or cDNA generated from mRNA using a polymerase enzyme, can be purified and separated using gel electrophoresis. The nucleic acids on the gel are then blotted onto a solid support, such as nitrocellulose. The solid support is exposed to a labelled probe and then washed to remove any unhybridized probe. Next, the duplexes containing the labeled probe are detected. Typically, the probe is labelled with a radioactive moiety.

### BRIEF DESCRIPTION OF DRAWINGS

[0235] FIGS. 1 to 85, 119 to 188, 238 and 239 show SDS-PAGE analysis of total cell extracts from cultures of recombinant E. coli expressing GBS proteins of the invention. Lane 1 in each gel (except for FIG. 185) contains molecular weight markers. These are 94, 67, 43, 30, 20.1 & 14.4 kDa (except for FIGS. 7, 8, 10, 11, 13, 14, 15 and 119-170, which use 250, 150, 100, 75, 50, 37, 25, 15 & 10 kDa).

[0236] FIG. 86A shows the pDEST15 vector and FIG. 86B shows the pDEST17-1 vector.

[0237] FIGS. 88 to 118 and 247 to 319 show protein characterisation data for various proteins of the invention.

[0238] FIGS. 189 to 237 and 240 to 246 show SDS-PAGE analysis of purified GBS proteins of the invention. The left-hand lane contains molecular weight markers. These are 94, 67, 43, 30, 20.1 & 14.4 kDa.

### MODES FOR CARRYING OUT THE INVENTION

[0239] The following examples describe nucleic acid sequences which have been identified in Streptococcus, along with their inferred translation products. The examples are generally in the following format:
[0240] a nucleotide sequence which has been identified in Streptococcus
[0241] the inferred translation product of this sequence
[0242] a computer analysis (e.g. PSORT output) of the translation product, indicating antigenicity

[0243] Most examples describe nucleotide sequences from S. agalactiae. The specific strain which was sequenced was from serotype V, and is a clinical strain isolated in Italy which expresses the R antigen (ISS/Rome/Italy collection, strain.2603 V/R). For several of these examples, the corresponding sequences from S. pyogenes are also given. Where GBS and GAS show homology in this way, there is conservation between species which suggests an essential function and also gives good cross-species reactivity.

[0244] In contrast, several examples describe nucleotide sequences from GAS for which no homolog in GBS has been identified. This lack of homology gives molecules which are useful for distinguishing GAS from GBS and for making GAS-specific products. The same is true for GBS sequences which lack GAS homologs e.g. these are useful for making GBS-specific products.

[0245] The examples typically include details of homology to sequences in the public databases. Proteins that are similar in sequence are generally similar in both structure and function, and the homology often indicates a common evolutionary origin. Comparison with sequences of proteins of known function is widely used as a guide for the assignment of putative protein function to a new sequence and has proved particularly useful in whole-genome analyses.

[0246] Various tests can be used to assess the in vivo immunogenicity of the proteins identified in the examples. For example, the proteins can be expressed recombinantly and used to screen patient sera by immunoblot. A positive reaction between the protein and patient serum indicates that the patient has previously mounted an immune response to the protein in question i.e. the protein is an immunogen. This method can also be used to identify immunodominant proteins. The mouse model used in the examples can also be used.

[0247] The recombinant protein can also be conveniently used to prepare antibodies e.g. in a mouse. These can be used for direct confirmation that a protein is located on the cell-surface. Labelled antibody (e.g. fluorescent labelling for FACS) can be incubated with intact bacteria and the presence of label on the bacterial surface confirms the location of the protein.

[0248] For many GBS proteins, the following data are given:
[0249] SDS-PAGE analysis of total recombinant E. coli cell extracts for GBS protein expression
[0250] SDS-PAGE analysis after the protein purification
[0251] Western-blot analysis of GBS total cell extract using antisera raised against recombinant proteins
[0252] FACS and ELISA analysis against GBS using antisera raise against recombinant proteins
[0253] Results of the in vivo passive protection assay

[0254] Details of experimental techniques used are presented below:

### Sequence Analysis

[0255] Open reading frames (ORFs) within nucleotide sequences were predicted using the GLIMMER program [Salzberg et al. (1998) Nucleic Acids Res 26:544-8]. Where necessary, start codons were modified and corrected manually on the basis of the presence of ribosome-binding sites and promoter regions on the upstream DNA sequence.

[0256] ORFs were then screened against the non-redundant protein databases using the programs BLASTp [Altschul et al. (1990) J. Mol. Biol. 215:403-410] and PRAZE, a modification of the Smith-Waterman algorithm [Smith & Waterman (1981) J Mol Biol 147:195-7; see Fleischmann et al (1995) Science 269:496-512].

[0257] Leader peptides within the ORFs were located using three different approaches: (i) PSORT [Nakai (1991) Bull. Inst. Chem. Res., Kyoto Univ. 69:269-291; Horton & Nakai (1996) Intellig. Syst. Mol. Biol. 4:109-115; Horton & Nakai (1997) Intellig. Syst. Mol. Biol. 5:147-152]; (ii) SignalP [Nielsen & Krogh (1998) in Proceedings of the Sixth International Conference on Intelligent Systems for Molecular Biology (ISMB 6), AAAI Press, Menlo Park, Calif., pp. 122-130; Nielsen et al. (1999) Protein Engineering 12:3-9; Nielsen et al. (1997). Int. J. Neural Sys. 8:581-599]; and (iii) visual inspection of the ORF sequences. Where a signal sequences is given a “possible site” value, the value represents the C-terminus residue of the signal peptide e.g. a “possible site” of 26 means that the signal sequence consists of amino acids 1-26.

[0258] Lipoprotein-specific signal peptides were located using three different approaches: (i) PSORT [see above]; (ii) the “prokaryotic membrane lipoprotein lipid attachment site” PROSITE motif [Hofmann et al. (1999) Nucleic Acids Res. 27:215-219; Bucher & Bairoch (1994) in Proceedings 2nd International Conference on Intelligent Systems for Molecular Biology (ISMB-94), AAAI Press, pages 53-61]; and (iii) the FINDPATTERNS program available in the GCG Wisconsin Package, using the pattern (M,L,V)x{9, 35} LxxCx.

[0259] Transmembrane domains were located using two approaches: (i) PSORT [see above]; (ii) TopPred [von Heijne (1992) J. Mol. Biol. 225:487-494].

[0260] LPXTG motifs, characteristic of cell-wall attached proteins in Gram-positive bacteria [Fischetti et al. (1990) Mol Microbiol 4:1603-5] were located, with FINDPATTERNS using the pattern (L,I,V,M,Y,F)Px(T,A,S,G)(G,N,S,T,A,L).

[0261] RGD motifs, characteristic of cell-adhesion molecules [D'Souza et al. (1991) Trends Biochem Sci 16:246-50] were located using FINDPATTERNS.

[0262] Enzymes belonging to the glycolytic pathway were also selected as antigens, because these have been found experimentally expressed on the surface of Streptococci [e.g. Pancholi & Fischetti (1992) J Exp Med 176:415-26; Pancholi & Fischetti (1998) J Biol Chem 273:14503-15].

### Cloning, Expression and Purification of Proteins

[0263] GBS genes were cloned to facilitate expression in E. coli as two different types of fusion proteins:
[0264] a) proteins having a hexa-histidine tag at the amino-terminus (His-gbs)
[0265] b) proteins having a GST fusion partner at the amino-terminus (Gst-gbs)

[0266] Cloning was performed using the Gateway™ technology (Life Technologies), which is based on the site-specific recombination reactions that mediate integration and excision of phage lambda into and from the E. coli genome. A single cloning experiment included the following steps:
[0267] 1—Amplification of GBS chromosomal DNA to obtain a PCR product coding for a single ORF flanked by attB recombination sites.
[0268] 2—Insertion of the PCR product into a pDONR vector (containing attP sites) through a BP reaction (attB×attP sites). This reaction gives a so called ‘pEntry’ vector, which now contains attL sites flanking the insert.
[0269] 3—Insertion of the GBS gene into E. coli expression vectors (pDestination vectors, containing attR sites) through a LR reaction between pEntry and pDestination plasmids (attL×attR sites).

### A) Chromosomal DNA Preparation

[0270] For chromosomal DNA preparation, GBS strain 2603 V/R (Istituto Superiore Sanita, Rome) was grown to exponential phase in 2 litres TH Broth (Difco) at 37° C., harvested by centrifugation, and dissolved in 40 ml TES (50 mM Tris pH 8, 5 mM EDTA pH 8, 20% sucrose). After addition of 2.5 ml lysozyme solution (25 mg/ml in TES) and 0.5 ml mutanolysin (Sigma M-9901, 25000 U/ml in H₂O), the suspension was incubated at 37° C. for 1 hour. 1 ml RNase (20 mg/ml) and 0.1 ml proteinase K (20 mg/ml) were added and incubation was continued for 30 min. at 37° C.

[0271] Cell lysis was obtained by adding 5 ml sarkosyl solution (10% N-laurylsarcosine in 250 mM EDTA pH 8.0), and incubating 1 hour at 37° C. with frequent inversion. After sequential extraction with phenol, phenol-chloroform and chloroform, DNA was precipitated with 0.3M sodium acetate pH 5.2 and 2 volumes of absolute ethanol. The DNA pellet was rinsed with 70% ethanol and dissolved in TE buffer (10 mM Tris-HCl, 1 mM EDTA, pH 8). DNA concentration was evaluated by OD₂₆₀.

### B) Oligonucleotide Design

[0272] Synthetic oligonucleotide primers were designed on the basis of the coding sequence of each ORF. The aim was to express the protein's extracellular region. Accordingly, predicted signal peptides were omitted (by deducing the 5′ end amplification primer sequence immediately downstream from the predicted leader sequence) and C-terminal cell-wall ancoring regions were removed (e.g. LPXTG motifs and downstream amino acids). Where additional nucleotides have been deleted, this is indicated by the suffix ‘d’ (e.g. ‘GBS352d’—see Table V). Conversely, a suffix ‘L’ refers to expression without these deletions. Deletions of C- or N-terminal residues were also sometimes made, as indicated by a ‘C’ or ‘N’ suffix.

[0273] The amino acid sequences of the expressed GBS proteins (including ‘d’ and ‘L’ forms etc.) are definitively defined by the sequences of the oligonuclotides primers given in Table II.

[0274] 5′ tails of forward primers and 3′ tails of reverse primers included attB1 and attB2 sites respectively:

Forward primers: 5′-GGGGACAAGTTTGTACAAAAAAGCAGGCTCT-ORF in frame-3′ (the TCT sequence preceding the ORF was omitted when the ORF's first coding triplet began with T).
Reverse primers: 5′-GGGGACCACTTTGTACAAGAAAGCTGGGTT-ORF reverse complement-3′.

[0275] The number of nucleotides which hybridized to the sequence to be amplified depended on the melting temperature of the primers, which was determined as described by Breslauer et al. [PNAS USA (1986) 83:3746-50]. The average melting temperature of the selected oligos was 50-55° C. for the hybridizing region and 80-85° C. for the whole oligos.

### C) Amplification

[0276] The standard PCR protocol was as follows: 50 ng genomic DNA were used as template in the presence of 0.5 μM each primer, 200 μM each dNTP, 1.5 mM MgCl₂, 1× buffer minus Mg⁺⁺ (Gibco-BRL) and 2 units of Taq DNA polymerase (Platinum Taq, Gibco-BRL) in a final volume of 100 μl. Each sample underwent a double-step of amplification: 5 cycles performed using as the hybridizing temperature 50° C., followed by 25 cycles at 68° C.

[0277] The standard cycles were as follows:

| | |
|---|---|
| | Denaturation: 94° C., 2 min |
| 5 cycles: | Denaturation: 94° C., 30 seconds |
| | Hybridization: 50° C., 50 seconds |
| | Elongation: 72° C., 1 min. or 2 min. and 40 sec. |
| 25 cycles: | Denaturation: 94° C., 30 seconds |
| | Hybridization: 68° C., 50 seconds |
| | Elongation: 72° C., 1 min. or 2 min. and 40 sec. |

[0278] Elongation time was 1 minute for ORFs shorter than 2000 bp and 2:40 minutes for ORFs longer than 2000 bp. Amplifications were performed using a Gene Amp PCR system 9600 (Perkin Elmer).

[0279] To check amplification results, 2 μl of each PCR product were loaded onto 1-1.5 agarose gel and the size of amplified fragments was compared with DNA molecular weight standards (DNA marker IX Roche, 1 kb DNA ladder Biolabs).

[0280] Single band PCR products were purified by PEG precipitation: 300 μl of TE buffer and 200 μl of 30% PEG 8000/30 mM MgCl₂ were added to 100 μl PCR reaction. After vortexing, the DNA was centrifuged for 20 min at 10000 g, washed with 1 vol. 70% ethanol and the pellet dissolved in 30 μl TE. PCR products smaller than 350 bp were purified using a PCR purification Kit (Qiagen) and eluted with 30 μl of the provided elution buffer.

[0281] In order to evaluate the yield, 2 μl of the purified DNA were subjected to agarose gel electrophoresis and compared to titrated molecular weight standards.

D) Cloning of PCR Products into Expression Vectors

[0282] Cloning was performed following the Gateway™ technology's “one-tube protocol”, which consists of a two step reaction (BP and LR) for direct insertion of PCR products into expression vectors.

BP reaction (attB×attP sites): The reaction allowed insertion of the PCR product into a pDONR vector. The pDONR™ 201 vector we used contains the killer toxin gene ccdB between attP1 and attP2 sites to minimize background colonies lacking the PCR insert, and a selectable marker gene for kanamycin resistance. The reaction resulted in a so called pEntry vector, in which the GBS gene was located between attL1 and attL2 sites.

[0283] 60 fmol of PCR product and 100 ng of pDONR™ 201 vector were incubated with 2.5 μl of BP Clonase™ in a final volume of 12.5 μl for 4 hours at 25° C.

[0284] LR reaction (attL×attR sites): The reaction allowed the insertion of the GBS gene, now present in the pEntry vector, into E. coli expression vectors (pDestination vectors, containing attR sites). Two pDestination vectors were used (PDEST15 for N-terminal GST fusions—FIG. 86; and pDEST17-1 for N-terminal His-tagged fusions—FIG. 87). Both allow transcription of the ORF fusion coding mRNA under T7 RNA polymerase promoter [Studier et al (1990) Meth. Enzymol 185: 60ff].

[0285] To 5 μl of BP reaction were added 0.25 μl of 0.75 M NaCl, 100 ng of destination vector and 1.5 μl of LR Clonase™. The reaction was incubated at 25° C. for 2 hours and stopped with 1 μl of 1 mg/ml proteinase K solution at 37° C. for 15 min.

[0286] 1 μl of the completed reaction was used to transform 50 μl electrocompetent BL21-SI™ cells (0.1 cm, 200 ohms, 25 μF). BL21-SI cells contain an integrated T7 RNA polymerase gene under the control of the salt-inducible prU promoter [Gowrishankar (1985) J. Bacteriol. 164:434ff]. After electroporation cells were diluted in 1 ml SOC medium (20 g/l bacto-tryptone, 5 g/l yeast extract, 0.58 g/l NaCl, 0.186 g/l KCl, 20 mM glucose, 10 mM MgCl₂) and incubated at 37° C. for 1 hour. 200 μl cells were plated onto LBON plates (Luria Broth medium without NaCl) containing 100 μg/ml ampicillin. Plates were then incubated for 16 hours at 37° C.

Entry clones: In order to allow the future preparation of Gateway compatible pEntry plasmids containing genes which might turn out of interest after immunological assays, 2.5 μl of BP reaction were incubated for 15 min in the presence of 3 μl 0.15 mg/ml proteinase K solution and then kept at −20° C. The reaction was in this way available to transform E. coli competent cells so as to produce Entry clones for future introduction of the genes in other Destination vectors.

### E) Protein Expression

[0287] Single colonies derived from the transformation of LR reactions were inoculated as small-scale cultures in 3 ml LBON 100 μg/ml ampicillin for overnight growth at 25° C. 50-200 μl of the culture was inoculated in 3 ml LBON/Amp to an initial OD600 of 0.1. The cultures were grown at 37° C. until OD600 0.4-0.6 and recombinant protein expression was induced by adding NaCl to a final concentration of 0.3 M. After 2 hour incubation the final OD was checked and the cultures were cooled on ice. 0.5 OD₆₀₀ of cells were harvested by centrifugation. The cell pellet was suspended in 50 μl of protein Loading Sample Buffer (50 mM TRIS-HCl pH 6.8, 0.5% w/v SDS, 2.5% v/v glycerin, 0.05% w/v Bromophenol Blue, 100 mM DTT) and incubated at 100 IC for 5 min. 10 μl of sample was analyzed by SDS-PAGE and Coomassie Blue staining to verify the presence of induced protein band.

### F) Purification of the Recombinant Proteins

[0288] Single colonies were inoculated in 25 ml LBON 100 μg/ml ampicillin and grown at 25° C. overnight. The overnight culture was inoculated in 500 ml LBON/amp and grown under shaking at 25 IC until OD₆₀₀ values of 0.4-0.6. Protein expression was then induced by adding NaCl to a final concentration of 0.3 M. After 3 hours incubation at 25 IC the final OD₆₀₀ was checked and the cultures were cooled on ice. After centrifugation at 6000 rpm (JA10 rotor, Beckman) for 20 min., the cell pellet was processed for purification or frozen at −20° C.

[0289] Proteins were purified in 1 of 3 ways depending on the fusion partner and the protein's solubility:

Purification of Soluble His-Tagged Proteins from E. coli
[0290] 1. Transfer pellets from −20° C. to ice bath and reconstitute each pellet with 10 ml B-PER™ solution (Bacterial-Protein Extraction Reagent, Pierce cat. 78266), 10 μl of a 100 mM MgCl₂ solution, 50 μl of DNAse I (Sigma D-4263, 100 Kunits in PBS) and 100 μl of 100 mg/ml lysozyme in PBS (Sigma L-7651, final concentration 1 mg/ml).
[0291] 2. Transfer resuspended pellets in 50 ml centrifuge tubes and leave at room temperature for 30-40 minutes, vortexing 3-4 times.
[0292] 3. Centrifuge 15-20 minutes at about 30-40000×g.
[0293] 4. Prepare Poly-Prep (Bio-Rad) columns containing 1 ml of Fast Flow Ni-activated Chelating Sepharose (Pharmacia). Equilibrate with 50 mM phosphate buffer, 300 mM NaCl, pH 8.0.
[0294] 5. Store the pellet at −20° C., and load the supernatant on to the columns.
[0295] 6. Discard the flow through.
[0296] 7. Wash with 10 ml 20 mM imidazole buffer, 50 mM phosphate, 300 mM NaCl, pH 8.0.
[0297] 8. Elute the proteins bound to the columns with 4.5 ml (1.5 ml+1.5 ml+1.5 ml) 250 mM imidazole buffer, 50 mM phosphate, 300 mM NaCl, pH 8.0 and collect three fractions of ˜1.5 ml each. Add to each tube 15 μl DTT 200 mM (final concentration 2 mM).
[0298] 9. Measure the protein concentration of the collected fractions with the Bradford method and analyse the proteins by SDS-PAGE.
[0299] 10. Store the collected fractions at +4° C. while waiting for the results of the SDS-PAGE analysis.
[0300] 11. For immunisation prepare 4-5 aliquots of 20-100 μg each in 0.5 ml in 40% glycerol. The dilution buffer is the above elution buffer, plus 2 mM DTT. Store the aliquots at −20° C. until immunisation.
   Purification of His-Tagged Proteins from Inclusion Bodies
[0301] 1. Bacteria are collected from 500 ml cultures by centrifugation. If required store bacterial pellets at −20° C. Transfer the pellets from −20° C. to room temperature and reconstitute each pellet with 10 ml B-PER™ solution, 10 μl of a 100 mM MgCl₂ solution (final 1 mM), 50 μl of DNAse 1 equivalent to 100 Kunits units in PBS and 100 μl of a 100 mg/ml lysozime (Sigma L-7651) solution in PBS (equivalent to 10 mg, final concentration 1 mg/ml).
[0302] 2. Transfer the resuspended pellets in 50 ml centrifuge tubes and let at room temperature for 30-40 minutes, vortexing 3-4 times.
[0303] 3. Centrifuge 15 minutes at 30-4000×g and collect the pellets.
[0304] 4. Dissolve the pellets with 50 mM TRIS-HCl, 1 mM TCEP {Tris(2-carboxyethyl)-phosphine hydrochloride, Pierce}, 6M guanidine hydrochloride, pH 8.5. Stir for ˜10 min. with a magnetic bar.
[0305] 5. Centrifuge as described above, and collect the supernatant.
[0306] 6. Prepare Poly-Prep (Bio-Rad) columns containing 1 ml of Fast Flow Ni-activated Chelating Sepharose (Pharmacia). Wash the columns twice with 5 ml of H₂0 and equilibrate with 50 mM TRIS-HCl, 1 mM TCEP, 6M guanidine hydrochloride, pH 8.5.
[0307] 7. Load the supernatants from step 5 onto the columns, and wash with 5 ml of 50 mM TRIS-HCl buffer, 1 mM TCEP, 6M urea, pH 8.5
[0308] 8. Wash the columns with 10 ml of 20 mM imidazole, 50 mM TRIS-HCl, 6M urea, 1 mM TCEP, pH 8.5. Collect and set aside the first 5 ml for possible further controls.
[0309] 9. Elute proteins bound to columns with 4.5 ml buffer containing 250 mM imidazole, 50 mM TRIS-HCl, 6M urea, 1 mM TCEP, pH 8.5. Add the elution buffer in three 1.5 ml aliquots, and collect the corresponding three fractions. Add to each fraction 15 μl DTT (final concentration 2 mM).
[0310] 10. Measure eluted protein concentration with Bradford method and analyse proteins by SDS-PAGE.
[0311] 11. Dialyse overnight the selected fraction against 50 mM Na phosphate buffer, pH 8.8, containing 10% glycerol, 0.5 M arginine, 5 mM reduced glutathione, 0.5 mM oxidized glutathione, 2 M urea.
[0312] 12. Dialyse against 50 mM Na phosphate buffer, pH 8.8, containing 10% glycerol, 0.5 M arginine, 5 mM reduced glutathione, 0.5 mM oxidized glutathione.
[0313] 13. Clarify the dialysed protein preparation by centrifugation and discard the non-soluble material and measure the protein concentration with the Bradford method.
[0314] 14. For each protein destined to the immunization prepare 4-5 aliquot of 20-100 μg each in 0.5 ml after having adjusted the glycerol content up to 40%. Store the prepared aliquots at −20° C. until immunization.
   Purification of GST-Fusion Proteins from E. coli
[0315] 1. Bacteria are collected from 500 ml cultures by centrifugation. If required store bacterial pellets at −20° C. Transfer the pellets from −20° C. to room temperature and reconstitute each pellet with 10 ml B-PER™ solution, 10 μl of a 100 mM MgCl₂ solution (final 1 mM), 50 μl of DNAse 1 equivalent to 100 Kunits units in PBS and 100 μl of a 100 mg/ml lysozime (Sigma L-7651) solution in PBS (equivalent to 10 mg, final concentration 1 mg/ml).
[0316] 2. Transfer the resuspended pellets in 50 ml centrifuge tubes and let at room temperature for 30-40 minutes, vortexing 3-4 times.
[0317] 3. Centrifuge 15-20 minutes at about 30-40000×g.
[0318] 4. Discard centrifugation pellets and load supernatants onto the chromatography columns, as follows.
[0319] 5. Prepare Poly-Prep (Bio-Rad) columns containing 0.5 ml of Glutathione-Sepharose 4B resin. Wash the columns twice with 1 ml of H₂O and equilibrate with 10 ml PBS, pH 7.4.
[0320] 6. Load supernatants on to the columns and discard the flow through.
[0321] 7. Wash the columns with 10 ml PBS, pH 7.4.
[0322] 8. Elute proteins bound to columns with 4.5 ml of 50 mM TRIS buffer, 10 mM reduced glutathione, pH 8.0, adding 1.5 ml+1.5 ml+1.5 ml and collecting the respective 3 fractions of 1.5 ml each.
[0323] 9. Measure protein concentration of the fractions with the Bradford method and analyse the proteins by SDS-PAGE.
[0324] 10. Store the collected fractions at +4° C. while waiting for the results of the SDS-PAGE analysis.
[0325] 11. For each protein destined for immunisation prepare 4-5 aliquots of 20-100 μg each in 0.5 ml of 40% glycerol. The dilution buffer is 50 mM TRIS-HCl, 2 mM DTT, pH 8.0. Store the aliquots at −20° C. until immunisation.

### FIGS. 167 to 170 and 238 to 239

[0326] For the experiments shown in FIGS. 167 to 170, FIG. 238 and lanes 2-6 of FIG. 239, the GBS proteins were fused at the N-terminus to thioredoxin and at C-terminus to a poly-His tail. The plasmid used for cloning is pBAD-DEST49 (Invitrogen Gateway™ technology) and expression is under the control of an L(+)-Arabinose dependent promoter. For the production of these GBS antigens, bacteria are grown on RM medium (6 g/l Na₂HPO₄, 3 g/l KH₂PO₄, 0.5 g/l NaCl, 1 g/l NH₄Cl, pH7.4, 2% casaminoacids, 0.2% glucose, 1 mM MgCl₂) containing 100 μg/ml ampicillin. After incubation at 37° C. until cells reach OD₆₀₀=0.5, protein expression is induced by adding 0.2% (v/v) L(+)Arabinose for 3 hours.

Immunisations with GBS Proteins

[0327] The purified proteins were used to immunise groups of four CD-1 mice intraperitoneally. 20 μg of each purified protein was injected in Freund's adjuvant at days 1, 21 & 35. Immune responses were monitored by using samples taken on day 0 & 49. Sera were analysed as pools of sera from each group of mice.

### FACScan Bacteria Binding Assay Procedure.

[0328] GBS serotype V 2603 V/R strain was plated on TSA blood agar plates and incubated overnight at 37° C. Bacterial colonies were collected from the plates using a sterile dracon swab and inoculated into 100 ml Todd Hewitt Broth. Bacterial growth was monitored every 30 minutes by following OD₆₀₀. Bacteria were grown until OD₆₀₀=0.7-0.8. The culture was centrifuged for 20 minutes at 5000 rpm. The supernatant was discarded and bacteria were washed once with PBS, resuspended in ½ culture volume of PBS containing 0.05% paraformaldehyde, and incubated for 1 hour at 37° C. and then overnight at 4° C.

[0329] 50 μl bacterial cells (OD₆₀₀ 0.1) were washed once with PBS and resuspended in 20 μl blocking serum (Newborn Calf Serum, Sigma) and incubated for 20 minutes at room temperature. The cells were then incubated with 100 μl diluted sera (1:200) in dilution buffer (20% Newborn Calf Serum 0.1% BSA in PBS) for 1 hour at 4° C. Cells were centrifuged at 5000 rpm, the supernatant aspirated and cells washed by adding 200 μl washing buffer (0.1% BSA in PBS). 50 μl R-Phicoerytrin conjugated F(ab)₂ goat anti-mouse, diluted 1:100 in dilution buffer, was added to each sample and incubated for 1 hour at 4° C. Cells were spun down by centrifugation at 5000 rpm and washed by adding 200 μl of washing buffer. The supernatant was aspirated and cells resuspended in 200 μl PBS. Samples were transferred to FACScan tubes and read. The condition for FACScan setting were: FL2 on; FSC-H threshold:54; FSC PMT Voltage: E 02; SSC PMT: 516; Amp. Gains 2.63; FL-2 PMT: 728. Compensation values: 0.

[0330] Samples were considered as positive if they had a Δ mean values>50 channel values.

### Whole Extracts Preparation

[0331] GBS serotype III COH1 strain and serotype V 2603 V/R strain cells were grown overnight in Todd Hewitt Broth. 1 ml of the culture was inoculated into 100 ml Todd Hewitt Broth. Bacterial growth was monitored every 30 minutes by following OD₆₀₀. The bacteria were grown until the OD reached 0.7-0.8. The culture was centrifuged for 20 minutes at 5000 rpm. The supernatant was discarded and bacteria were washed once with PBS, resuspended in 2 ml 50 mM Tris-HCl, pH 6.8 adding 400 units of Mutanolysin (Sigma-Aldrich) and incubated 3 hrs at 37° C. After 3 cycles of freeze/thaw, cellular debris were removed by centrifugation at 14000 g for 15 minutes and the protein concentration of the supernatant was measured by the Bio-Rad Protein assay, using BSA as a standard.

### Western Blotting

[0332] Purified proteins (50 ng) and total cell extracts (25 μg) derived from GBS serotype III COH1 strain and serotype V 2603 V/R strain were loaded on 12% or 15% SDS-PAGE and transferred to a nitrocellulose membrane. The transfer was performed for 1 hours at 100V at 4° C., in transferring buffer (25 mM Tris base, 192 mM glycine, 20% methanol). The membrane was saturated by overnight incubation at 4° C. in saturation buffer (5% skimmed milk, 0.1% Tween 20 in PBS). The membrane was incubated for 1 hour at room temperature with 1:1000 mouse sera diluted in saturation buffer. The membrane was washed twice with washing buffer (3% skimmed milk, 0.1% Tween 20 in PBS) and incubated for 1 hour with a 1:5000 dilution of horseradish peroxidase labelled anti-mouse Ig (Bio-Rad). The membrane was washed twice with 0.1% Tween 20 in PBS and developed with the Opti-4CN Substrate Kit (Bio-Rad). The reaction was stopped by adding water.

[0333] Unless otherwise indicated, lanes 1, 2 and 3 of blots in the drawings are: (1) the purified protein; (2) GBS-III extracts; and (3) GBS-V extracts. Molecular weight markers are also shown.

In Vivo Passive Protection Assay in Neonatal Sepsis Mouse model.

[0334] The immune sera collected from the CD1 immunized mice were tested in a mouse neonatal sepsis model to verify their protective efficacy in mice challenged with GBS serotype III. Newborn Balb/C littermates were randomly divided in two groups within 24 hrs from birth and injected subcutaneously with 25 μl of diluted sera (1:15) from immunized CD1 adult mice. One group received preimmune sera, the other received immune sera. Four hours later all pups were challenged with a 75% lethal dose of the GBS serotype III COH1 strain. The challenge dose obtained diluting a mid log phase culture was administered subcutaneously in 25 μl of saline. The number of pups surviving GBS infection was assessed every 12 hours for 4 days. Results are in Table III.

### EXAMPLE 1

[0335] A DNA sequence (GBSx1402) was identified in S. agalactiae <SEQ ID I> which encodes the amino acid sequence <SEQ ID 2>. Analysis of this protein sequence reveals the following:

| Possible site: 27 | | | |
|---|---|---|---|
| >>> Seems to have an uncleavable N-term signal seq | | | |
| | INTEGRAL | Likelihood = −0.48 | Transmembrane 169-185 (169-185) |

```
----- Final Results -----
                              bacterial membrane --- Certainty = 0.1192 (Affirmative) < succ>
                                bacterial outside --- Certainty = 0.0000 (Not Clear) < succ>
                            bacterial cytoplasm --- Certainty = 0.0000 (Not Clear) < succ>
```

[0336] The protein has homology with the following sequences in the GENPEPT database.

| >GP: CAB88235 GB: AL353012 hypothetical serine-rich repeat protein | | | |
|---|---|---|---|
| [Schizosaccharomyces pombe] | | | |
| Identities = 41/152 (26%), Positives = 75/152 (48%), Gaps = 4/152 (2%) | | | |
| Query: | 22 | SSIGYADTSDKNTDTSVVTTTLSEEKRSDELDQSSTGSSSENESSSSSEPETNPSTNPPT | 81 |
| | | SS +++S +++D+S ++ E S+ D SS+ SSSE+ESSS ++ S++ + | |
| Sbjct: | 132 | SSDSESESSSEDSDSSSSSSDSESESSSEGSDSSSSSSSSESESSSEDNDSSSSSSDSES | 191 |
| Query: | 82 | TEPSQPSPSEENKPDGRTKTE---IGNNKDISSGTKVLISEDSIKNFSKASSDQEEVDRD | 138 |
| | | S+ S S + D +++ ++ SS SED+ + S + S+ E D | |
| Sbjct: | 192 | ESSSEDSDSSSSSSDSESESSSEGSDSSSSSSSSESESSSEDNDSSSSSSDSESESSSED | 251 |
| Query: | 139 | ESSSSKANDGK-KGHSKPKKELPKTGDSHSDT | 169 |
| | | SSS ++D + + SK + DS D+ | |
| Sbjct: | 252 | SDSSSSSSDSESESSSKDSDSSSNSSDSEDDS | 283 |

[0337] There is also homology to SEQ ID 1984.

[0338] A related GBS gene <SEQ ID 8785> and protein <SEQ ID 8786> were also identified. Analysis of this protein sequence reveals the following:

| Lipop: Possible site: −1 | Crend: 5 | |
|---|---|---|
| McG: Discrim Score: 6.72 | | |
| GvH: Signal Score (−7.5): −4.34 | | |
| Possible site: 27 | | |
| >>> Seems to have an uncleavable N-term signal seq | | |
| ALOM program count: 1 | value: −0.48 | threshold: 0.0 |

| | |
|---|---|
| INTEGRAL Likelihood = −0.48 | Transmembrane 169-185 (169-185) |
| PERIPHERAL Likelihood = 0.16 | 7 |
| modified ALOM score: 0.60 | |
| *** Reasoning Step: 3 | |

```
----- Final Results -----
                              bacterial membrane --- Certainty = 0.1192 (Affirmative) < succ>
                                bacterial outside --- Certainty = 0.0000 (Not Clear) < succ>
                            bacterial cytoplasm --- Certainty = 0.0000 (Not Clear) < succ>
LPXTG motif: 159-163
```

[0339] SEQ ID 2 (GBS4) was expressed in E. coli as a GST-fusion product. SDS-PAGE analysis of total cell extract is shown in FIG. 9 (lane 3; MW 43.1 kDa) and FIG. 63 (lane 4; MW 50 kDa). It was also expressed in E. coli as a His-fusion product. SDS-PAGE analysis of total cell extract is shown in FIG. 12 (lane 7; MW 30 kDa), FIG. 63 (lane 3; MW 30 kDa) and in FIG. 178 (lane 3; MW 30 kDa).

[0340] GBS4-GST was purified as shown in FIG. 190 (lane 6) and FIG. 209 (lane 8).

[0341] Purified GBS4-His is shown in FIGS. 89A, 191 (lane 10), 209 (lane 7) and 228 (lanes 9 & 10).

[0342] The purified GBS4-His fusion product was used to immunise mice (lane 2 product; 20 μg/mouse). The resulting antiserum was used for Western blot (FIG. 89B), FACS, and in the in vivo passive protection assay (Table III). These tests confirm that the protein is immunoaccessible on GBS bacteria and that it is an effective protective immunogen.

[0343] Based on this analysis, it was predicted that these proteins and their epitopes could be useful antigens for vaccines or diagnostics.

### EXAMPLE 2

[0344] A DNA sequence (GBSx1100) was identified in S. agalactiae <SEQ ID 3> which encodes the amino acid sequence <SEQ ID 4>. This protein is predicted to be aggregation promoting protein. Analysis of this protein sequence reveals the following:

```
Possible site: 33
>>> Seems to have a cleavable N-term signal seq.
----- Final Results -----
                                bacterial outside --- Certainty = 0.3000 (Affirmative) < succ>
                              bacterial membrane --- Certainty = 0.0000 (Not Clear) < succ>
                            bacterial cytoplasm --- Certainty = 0.0000 (Not Clear) < succ>
```

[0345] The protein has homology with the following sequences in the GENPEPT database.

| >GP: CAA69725 GB: Y08498 aggregation promoting protein [Lactobacillus gasseri] | | |
|---|---|---|
| Identities = 56/103 (54%), | Positives = 69/103 (66%), | Gaps = 5/103 (4%) |

| | | |
|---|---|---|
| Query: 82 | TASQAEAKSQPT-----IENSMNSSSNLSSSDSAAKEEIARRESNGSYTAQNGQYYGRYQ | 136 |
| | T S A A+ Q T + + + + N S S++AAK +A RES G Y+A NGQY G+YQ | |
| Sbjct: 195 | TYSYASAQKQTTQVAQKTQTTTSYTLNASGSEAAAKAWMAGRESGGPYSAGNGQYIGKYQ | 254 |
| Query: 137 | LSQSYLNGDLSPENQEKVADNYVVSRYGSWSAALSFWNSNGWY | 179 |
| | LS SYL GD S NQE+VADNYV SRYGSW+ A FW +NGWY | |
| Sbjct: 255 | LSASYLGGDYSAANQERVADNYVKSRYGSWTGAQKFWQTNGWY | 297 |

[0346] No corresponding DNA sequence was identified in S. pyogenes.

[0347] A related GBS gene <SEQ ID 8709> and protein <SEQ ID 8710> were also identified. Analysis of this protein sequence reveals the following:

| Lipop: Possible site: −1 | Crend: 9 | |
|---|---|---|
| McG: Discrim Score: 2.59 | | |
| GvH: Signal Score (−7.5): −0.42 | | |
| Possible site: 33 | | |
| >>> Seems to have a cleavable N-term signal seq. | | |
| ALOM program count: 0 | value: 6.79 | threshold: 0.0 |
| PERIPHERAL Likelihood = 6.79 | 59 | |

```
modified ALOM score: −1.86
*** Reasoning Step: 3
----- Final Results -----
                            bacterial outside --- Certainty = 0.3000 (Affirmative) < succ>
                          bacterial membrane --- Certainty = 0.0000 (Not Clear) <succ>
                        bacterial cytoplasm --- Certainty = 0.0000 (Not Clear) <succ>
```

[0348] The protein has homology with the following sequences in the databases:

[chemical structure]

[0349] A related GBS gene <SEQ ID 8711> and protein <SEQ ID 8712> were also identified. Analysis of this protein sequence reveals the following:

```
Lipop: Possible site: −1 Crend: 9
McG: Discrim Score: 2.59
GvH: Signal Score (−7.5): −0.42
          Possible site: 33
>>> Seems to have a cleavable N-term signal seq.
ALOM program count: 0 value: 6.79 threshold: 0.0
      PERIPHERAL Likelihood = 6.79 59
modified ALOM score: −1.86
*** Reasoning Step: 3
----- Final Results -----
                                bacterial outside --- Certainty = 0.3000(Affirmative) < succ>
                              bacterial membrane --- Certainty = 0.0000(Not Clear) < succ>
                            bacterial cytoplasm --- Certainty = 0.0000(Not Clear) < succ>
```

[0350] The protein has homology with the following sequences in the databases:

[chemical structure]

[0351] SEQ ID 8712 (GBS166) was expressed in E. coli as a His-fusion product. SDS-PAGE analysis of total cell extract is shown in FIG. 30 (lane 2; MW 13.1 kDa).

[0352] The GBS166-His fusion product was purified (FIG. 200, lane 10) and used to immunise mice. The resulting antiserum was used for FACS (FIG. 315), which confirmed that the protein is immunoaccessible on GBS bacteria.

[0353] SEQ ID 4 (GBS15) was expressed in E. coli as a GST-fusion product. SDS-PAGE analysis of total cell extract is shown in FIG. 9 (lane 5; MW 44.8 kDa), FIG. 63 (lane 5; MW 44.8 kDa) and FIG. 66 (lane 7; MW 45 kDa). It was also expressed in E. coli as a His-fusion product. SDS-PAGE analysis of total cell extract is shown in FIG. 10 (lane 4; MW 22.3 kDa). It was also expressed as GBS15L, with SDS-PAGE analysis of total cell extract is shown in FIG. 185 (lane 1; MW 50 kDa).

[0354] Purified GBS15-GST is shown in FIG. 91A, FIG. 190 (lane 9), FIG. 210 (lane 4) and FIG. 245 (lanes 4 & 5).

[0355] The purified GBS15-GST fusion product was used to immunise mice (lane 1+2 products; 20 μg/mouse). The resulting antiserum was used for Western blot (FIG. 91B), FACS (FIG. 91C), and in the in vivo passive protection assay (Table III). These tests confirm that the protein is immunoaccessible on GBS bacteria and that it is an effective protective immunogen.

[0356] Based on this analysis, it was predicted that these proteins and their epitopes could be useful antigens for vaccines or diagnostics.

### EXAMPLE 3

[0357] A DNA sequence (GBSx0091) was identified in S. agalactiae <SEQ ID 303> which encodes the amino acid sequence <SEQ ID 304>. Analysis of this protein sequence reveals the following:

| Possible site: 32 | | | | |
|---|---|---|---|---|
| >>> Seems to have no N-terminal signal sequence | | | | |
| | INTEGRAL | Likelihood = −9.66 | Transmembrane | 22-38 (15-41) |

```
----- Final Results -----
                              bacterial membrane --- Certainty = 0.4864(Affirmative) < succ>
                                bacterial outside --- Certainty = 0.0000(Not Clear) < succ>
                            bacterial cytoplasm --- Certainty = 0.0000(Not Clear) < succ>
```

[0358] The protein has homology with the following sequences in the GENPEPT database:

| >GP: CAA72096 GB: Y11213 hypothetical protein [Streptococcus thermophilus] | | | |
|---|---|---|---|
| Identities = 149/274 (54%), Positives = 208/274 (75%), Gaps = 9/274 (3%) | | | |
| Query: | 23 | FLVSLLLSFGIFSLIIPKSNP--KLTKKDFLTKKVIPLNYVALGDSLTEGVGDTTSQGGF | 80 |
| | | F + LL GI IIP S+ K++ K KK + YVA+GDSLT+GVGD+++QGGF | |
| Sbjct: | 5 | FFLLFLLFVGILIFIIPSSHQSSKISDKIRSVKKE-KVTYVAIGDSLTQGVGDSSNQGGF | 63 |
| Query: | 81 | VPLLSESLHNRYSYQVTSVNYGVSGNTSQQILKRMTTDPQIEKDLEKADLLTLTVGGNDV | 140 |
| | | VP+LS++L + +++QVT NYG++GNTS QILKRM I++DL+KA L+TLTVGGNDV | |
| Sbjct: | 64 | VPVLSQALESDFNWQVTPRNYGIAGNTSNQILKRMQEKKDIKRDLKKAKLMTLTVGGNDV | 123 |
| Query: | 141 | LAVIRKELSHLSLNSFEKPAEAYKERLKEILAKARQDNPKLPIYVLGIYNPFYLNFPQLT | 200 |
| | | + VI+ +++L++N+F K A Y++RL++I+ AR++N LPIY++GIYNPFYLNEP++T | |
| Sbjct: | 124 | IHVIKDNITNLNVNTFSKAAVDYQKRLRQIIELARKENKTLPIYIIGIYNPFYLNFPEMT | 183 |
| Query: | 201 | KMQTVIDNWNKATKEVVDASENVYFVPINDRLYKGINGKEGITES------SNSQASITN | 254 |
| | | +MQT++DNWN++T+EV +NVYFVP+ND LYKGINGK G+T S + S N | |
| Sbjct: | 184 | EMQTIVDNWNRSTEEVSKEYDNVYFVPVNDLLYKGINGKGGVTSSDETSQPTKSSQDSLN | 243 |
| Query: | 255 | DALFTGDHFHPNNIGYQIMSNAVMEKINETRKNW | 288 |
| | | DALF DHFHPNN GYQIMS+A++++IN+T+K W | |
| Sbjct: | 244 | DALFEEDHFNPNNTGYQIMSDAILKRINQTKKEW | 277 |

[0359] A related DNA sequence was identified in S. pyogenes <SEQ ID 305> which encodes the amino acid sequence <SEQ ID 306>. Analysis of this protein sequence reveals the following:

| Possible site: 39 | | | | |
|---|---|---|---|---|
| >>> Seems to have en uncleavable N-term signal seq | | | | |
| | INTEGRAL | Likelihood = −12.05 | Transmembrane | 18-34 (10-37) |

```
----- Final Results -----
                              bacterial membrane --- Certainty = 0.5819(Affirmative) < succ>
                                bacterial outside --- Certainty = 0.0000(Not Clear) < succ>
                            bacterial cytoplasm --- Certainty = 0.0000(Not Clear) < succ>
```

[0360] A related sequence was also identified in GAS <SEQ ID 9123> which encodes the amino acid sequence <SEQ ID 9124>. Analysis of this protein sequence reveals the following:

| Possible site: 33 | | | | |
|---|---|---|---|---|
| >>> Seems to have an uncleavable N-term signal seq | | | | |
| | INTEGRAL | Likelihood = −12.05 | Transmembrane | 12-28 |

```
----- Final Results -----
                              bacterial membrane --- Certainty = 0.5819(Affirmative) < succ>
                                bacterial outside --- Certainty = 0.0000(Not Clear) < succ>
                            bacterial cytoplasm --- Certainty = 0.0000(Not Clear) < succ>
```

[0361] An alignment of the GAS and GBS proteins is shown below:

| Identities = 178/282 (63%), Positives = 218/282 (77%) | | | |
|---|---|---|---|
| Query: | 5 | LLLWFVMNKKKILTGLSFFLVSLLLSFGIFSLIIPKSNPKLTKKDFLTKKVIPLNYVALG | 64 |
| | | L LWFVMN + + +G+ FF++SL L+F + ++IIPKSN +L K DFL K+ + + YVA+G | |
| Sbjct: | 1 | LRLWFVMNNRHLFSGIFFFVISLCLAFLLLNIIIPKSNSRLKKSDFLKKEQVAIQYVAIG | 60 |
| Query: | 65 | DSLTEGVGDTTSQGGFVPLLSESLHNRYSYQVTSVNYGVSGNTSQQILKRMTTDPQIEKD | 124 |
| | | DSLTEGVGD T QGGFVPLL+ L + V NYGVSG+TSQQIL RM QI+ | |
| Sbjct: | 61 | DSLTEGVGDLTHQGGFVPLLTNDLSEYFKANVNHQNYGVSGDTSQQILDRMIKQKQIQLS | 120 |
| Query: | 125 | LEKADLLTLTVGGNDVLAVIRKELSHLSLNSFEKPAEAYKERLKEILAKARQDNPKLPIY | 184 |
| | | L+KAD++TLTVGGNDV+AVIRK L+ L ++SF KPA Y++RL++I+ AR+DN LPI+ | |
| Sbjct: | 121 | LKKADIMTLTVGGNDVMAVIRKNLADLQVSSFRKPARQYQKRLRQIIELARKDNKDLPIF | 180 |
| Query: | 185 | VLGIYNPFYLNFPQLTKMQTVIDNWNKATKEVVDASENVYFVPINDRLYKGINGKEGITE | 244 |
| | | +LGIYNPFYLNFP+LT MQ VID+WN TKEVV + VYFVPIND LYKGING+EGI | |
| Sbjct: | 181 | ILGIYNPFYLNFPELTDMQKVIDDWNTKTKEVVGEYDRVYFVPINDLLYKGINGQEGIVH | 240 |
| Query: | 245 | SSNSQASITNDALFTGDHFHPNNIGYQIMSNAVMEKINETRK | 286 |
| | | SS Q +I NDALFTGDHFHPNN GYQIMSNAVMEKI + K | |
| Sbjct: | 241 | SSGDQTTIVNDALFTGDHFHPNNTGYQIMSNAVMEKIKKHEK | 282 |

[0362] A related GBS gene <SEQ ID 5> and protein <SEQ ID 6> were also identified. Analysis of this protein sequence reveals the following:

| Lipop: Possible site: −1 Crend: 4 | | | | |
|---|---|---|---|---|
| SRCFLG: 0 | | | | |
| McG: Length of UR: 24 | | | | |
| Peak Value of UR: 3.02 | | | | |
| Net Charge of CR: 3 | | | | |
| McG: Discrim Score: 12.27 | | | | |
| GvH: Signal Score (−7.5): −3.44 | | | | |
| Possible site: 22 | | | | |
| >>> Seems to have an uncleavable N-term signal seq | | | | |
| Amino Acid Composition: calculated from 1 | | | | |
| ALOM program Count: 1 value: −9.66 threshold: 0.0 | | | | |
| | INTEGRAL | Likelihood = 9.66 | Transmembrane | 12-28 (5-31) |
| | PERIPHERAL | Likelihood = 1.96 | 118 | |

```
modified ALOM score: 2.43
icm1 HYPID: 7 CFP: 0.486
*** Reasoning Step: 3
----- Final Results -----
                              bacterial membrane --- Certainty = 0.4864(Affirmative) < succ>
                                bacterial outside --- Certainty = 0.0000(Not Clear) < succ>
                            bacterial cytoplasm --- Certainty = 0.0000(Not Clear) < succ>
```

[0363] The protein has homology with the following sequences in the databases:

[chemical structure]

[0364] SEQ ID 6 (GBS103) was expressed in E. coli as a His-fusion product. SDS-PAGE analysis of total cell extract is shown in FIG. 36 (lane 4; MW 32 kDa).

[0365] The GBS103-His fusion product was purified (FIG. 107A; see also FIG. 201, lane 9) and used to immunise mice (lane 2+3 product; 18.5 μg/mouse). The resulting antiserum was used for Western blot (FIG. 107B), FACS (FIG. 107C) and in the in vivo passive protection assay (Table III). These tests confirm that the protein is immunoaccessible on GBS bacteria and that it is an effective protective immunogen.

[0366] Based on this analysis, it was predicted that these proteins and their epitopes could be useful antigens for vaccines or diagnostics.

### EXAMPLE 4

[0367] A DNA sequence (GBSx1316) was identified in S. agalactiae <SEQ ID 3837> which encodes the amino acid sequence <SEQ ID 3838>. Analysis of this protein sequence reveals the following:

| Possible site: 23 | | | | |
|---|---|---|---|---|
| >>> Seems to have no N-terminal signal sequence | | | | |
| | INTEGRAL | Likelihood = −4.30 | Transmembrane | 1058-1074 (1056-1075) |

```
----- Final Results -----
                              bacterial membrane --- Certainty = 0.2720(Affirmative) < succ>
                                bacterial outside --- Certainty = 0.0000(Not Clear) < succ>
                            bacterial cytoplasm --- Certainty = 0.0000(Not Clear) < succ>
```

[0368] The protein has no significant homology with any sequences in the GENPEPT database.

[0369] No corresponding DNA sequence was identified in S. pyogenes.

[0370] A related GBS gene <SEQ ID 7> and protein <SEQ ID 8> were also identified. Analysis of this protein sequence reveals the following:

| Lipop: Possible site: −1 Crend: 10 | | | | |
|---|---|---|---|---|
| McG: Discrim Score: −13.26 | | | | |
| GvH: Signal Score (−7.5): −5.76 | | | | |
| Possible site: 41 | | | | |
| >>> Seems to have no N-terminal signal sequence | | | | |
| ALOM program count: 1 value: −4.30 threshold: 0.0 | | | | |
| | INTEGRAL | Likelihood = −4.30 | Transmembrane | 489-505 (487-506) |
| | PERIPHERAL | Likelihood = 3.71 | 97 | |

```
modified ALOM score: 1.36
*** Reasoning Step: 3
----- Final Results -----
                              bacterial membrane --- Certainty = 0.2720(Affirmative) < succ>
                                bacterial outside --- Certainty = 0.0000(Not Clear) < succ>
                            bacterial cytoplasm --- Certainty = 0.0000(Not Clear) < succ>
LPXTG motif: 478-482
```

[0371] SEQ ID 8 (GBS195) was expressed in E. coli as a His-fusion product. SDS-PAGE analysis of total cell extract is shown in FIG. 24 (lane 8). It was also expressed in E. coli as a GST-fusion product. SDS-PAGE analysis of total cell extract is shown in FIG. 31 (lane 5).

[0372] GBS195C was expressed in E. coli as a GST-fusion product. SDS-PAGE analysis of total cell extract is shown in FIG. 175 (lane 6 & 7; MW 81 kDa).

[0373] GBS195L was expressed in E. coli as a His-fusion product. SDS-PAGE analysis of total cell extract is shown in FIG. 83 (lane 2; MW 123 kDa).

[0374] GBS195LN was expressed in E. coli as a His-fusion product. SDS-PAGE analysis of total cell extract is shown in FIG. 83 (lane 3; MW 66 kDa).

[0375] GBS195-GST was purified as shown in FIG. 198, lane 5. GBS195-His was purified as shown in FIG. 222, lane 4-5. GBS195N-His was purified as shown in FIG. 222, lane 6-7.

[0376] The GBS195-GST fusion product was purified (FIG. 87A) and used to immunise mice (lane 1 product; 13.6 μg/mouse). The resulting antiserum was used for Western blot (FIG. 87B), FACS, and in the in vivo passive protection assay (Table III). These tests confirm that the protein is immunoaccessible on GBS bacteria and that it is an effective protective immunogen.

[0377] Based on this analysis, it was predicted that these proteins and their epitopes could be useful antigens for vaccines or diagnostics.

### EXAMPLE 5

[0378] A DNA sequence (GBSx0002) was identified in S. agalactiae <SEQ ID 4043> which encodes the amino acid sequence <SEQ ID 4044>. This protein is predicted to be lipoprotein MtsA. Analysis of this protein sequence reveals the following:

```
Possible site: 19
>>> Seems to have no N-terminal signal sequence
----- Final Results -----
                            bacterial cytoplasm --- Certainty = 0.3361(Affirmative) < succ>
                              bacterial membrane --- Certainty = 0.0000(Not Clear) < succ>
                                bacterial outside --- Certainty = 0.0000(Not Clear) < succ>
```

[0379] A related GBS nucleic acid sequence <SEQ ID 9403> which encodes amino acid sequence <SEQ ID 9404> was also identified.

[0380] A related DNA sequence was identified in S. pyogenes <SEQ ID 3177> which encodes the amino acid sequence <SEQ ID 3178>. Analysis of this protein sequence reveals the following:

Possible site: 13
>>> Seems to have no N-terminal signal sequence
----- Final Results -----
bacterial cytoplasm --- Certainty = 0.2412 (Affirmative) < succ>
bacterial membrane --- Certainty = 0.0000 (Not Clear) < succ>
bacterial outside --- Certainty = 0.0000 (Not Clear) < succ>

[0381] An alignment of the GAS and GBS proteins is shown below:

| Identities = 146/168 (86%), Positives = 161/168 (94%) | | | |
|---|---|---|---|
| Query: | 1 | MNLENGIIYSKNIAKQLIAKDPKNKATYEKNRDAYVAKLEKLDKEAKSKFNAIPANKKLI | 60 |
| | | +NLENGIIYSKNIAKQLIAKDPKNK TYEKN AYVAKLEKLDKEAKSKF+AI NKKLI | |
| Sbjct: | 107 | LNLENGIIYSKNIAKQLIAKDPKNKETYEKNLKAYVAKLEKLDKEAKSKFDAIAENKKLI | 166 |
| Query: | 61 | VTSEGCFKYFSKAYGVPSAYIWEINTEEEGTPDQITSLVKKLKQVRPSALFVESSVDKRP | 120 |
| | | VTSEGCFKYFSKAYGVPSAYIWEINTEEEGTPDQI+SL++KLK ++PSALFVESSVD+RP | |
| Sbjct: | 167 | VTSEGCFKYFSKAYGVPSAYIWEINTEEEGTPDQISSLIEKLKVIKPSALFVESSVDRRP | 226 |
| Query: | 121 | MKSVSRESGIPIYAEIFTDSIAKKGQKGDSYYAMMKWNLDKIAEGLAK | 168 |
| | | M++VS++SGIPIY+EIFTDSIAKKG+ GDSYYAMMKWNLDKI+EGLAK | |
| Sbjct: | 227 | METVSKDSGIPIYSEIFTDSIAKKGKPGDSYYAMMKWNLDKISEGLAK | 274 |

[0382] SEQ ID 9404 (GBS679) was expressed in E. coli as a His-fusion product. SDS-PAGE analysis of total cell extract is shown in FIG. 164 (lane 7-9; MW 36 kDa) and in FIG. 188 (lane 8; MW 36 kDa). Purified protein is shown in FIG. 242, lanes 9 & 10.

[0383] Based on this analysis, it was predicted that these proteins and their epitopes could be useful antigens for vaccines or diagnostics.

### EXAMPLE 6

[0384] A DNA sequence (GBSx0003) was identified in S. agalactiae <SEQ ID 8485> which encodes the amino acid sequence <SEQ ID 8486>. This protein is predicted to be ATP-binding protein MtsB. Analysis of this protein sequence reveals the following:

Possible site: 55
>>> Seems to have no N-terminal signal sequence
----- Final Results -----
bacterial cytoplasm --- Certainty = 0.2097 (Affirmative) < succ>
bacterial membrane --- Certainty = 0.0000 (Not Clear) < succ>
bacterial outside --- Certainty = 0.0000 (Not Clear) < succ>

[0385] A related DNA sequence was identified in S. pyogenes <SEQ ID 8765> which encodes the amino acid sequence <SEQ ID 8766>. Analysis of this protein sequence reveals the following:

Possible site: 29
>>> Seems to have no N-terminal signal sequence
----- Final Results -----
bacterial cytoplasm --- Certainty = 0.1929 (Affirmative) < succ>
bacterial membrane --- Certainty = 0.0000 (Not Clear) < succ>
bacterial outside --- Certainty = 0.0000 (Not Clear) < succ>

[0386] An alignment of the GAS and GBS proteins is shown below:

| Identities = 143/238 (60%), Positives = 186/238 (78%), Gaps = 2/238 (0%) | | | |
|---|---|---|---|
| Query: | 1 | MIISKHLSVSYDNNL-VLEDINLRLEGSGIIGILGPNGAGKSTLMKALLGLVDSTGESGI | 59 |
| | | MI + +L V+YD N LE IN+ +EG I+GI+GPNGAGKST MKA+L L+D G + | |
| Sbjct: | 10 | MITTNNLCVTYDGNSNALEAINVTIEGPSIVGIIGPNGAGKSTFMKAILNLIDYQGHVTV | 69 |
| Query: | 60 | GG-DLLPLMGRVAYVEQKTNIDYQFPITVGECVSLGLYKERGLFKRLSKTDWEKVSRVID | 118 |
| | | G D L VAYVEQ++ IDY FPITV ECV+LG Y + GLF+R+ K +E+V +V+ | |
| Sbjct: | 70 | DGKDGRKLGHTVAYVEQRSMIDYNFPITVKECVALGTYSKLGLFRRVGKKQFEQVDKVLK | 129 |
| Query: | 119 | QVGLRGFENRPINALSGGQFQRMLMARCLVQEADYIFLDEPFVGIDSISEQIIVNLLKKL | 178 |
| | | QVGL F +RPI +LSGGQFQRML+ARCL+QE+DYIFLDEPFVGIDS+SE+IIV+LLK+L | |
| Sbjct: | 130 | QVGLEDFGHRPIKSLSGGQFQRMLVARCLIQESDYIFLDEPFVGIDSVSEKIIVDLLKEL | 189 |
| Query: | 179 | SKAGKLILVVHHDLSKVDHYFDQVIILNRHLIACGPIDQAFTRENLSAAYGDAILLGQ | 236 |
| | | AGK IL+VHHDLSKV+HYFD+++ILN+HL+A G + + FT + LS AYG+ ++LG+ | |
| Sbjct: | 190 | KMAGKTILIVHHDLSKVEHYFDKLMILNKHLVAYGNVCEVFTVDTLSKAYGNHLILGK | 247 |

[0387] Based on this analysis, it was predicted that these proteins and their epitopes could be useful antigens for vaccines or diagnostics.

### EXAMPLE 7

[0388] A DNA sequence (GBSx0004) was identified in S. agalactiae <SEQ ID 9> which encodes the amino acid sequence <SEQ ID 10>. Analysis of this protein sequence reveals the following:

Possible site: 28
>>> Seems to have an uncleavable N-term signal seq
----- Final Results -----
bacterial membrane --- Certainty = 0.0000 (Not Clear) < succ>
bacterial outside --- Certainty = 0.0000 (Not Clear) < succ>
bacterial cytoplasm --- Certainty = 0.0000 (Not Clear) < succ>

[0389] The protein has no significant homology with any sequences in the GENPEPT database.

[0390] No corresponding DNA sequence was identified in S. pyogenes.

[0391] Based on this analysis, it was predicted that this protein and its epitopes, could be useful antigens for vaccines or diagnostics.

### EXAMPLE 8

[0392] A DNA sequence (GBSx0005) was identified in S. agalactiae <SEQ ID 11> which encodes the amino acid sequence <SEQ ID 12>. This protein is predicted to be integral membrane protein MtsC (znuB). Analysis of this protein sequence reveals the following:

| Lipop: Possible site: −1 Crend: 6 | | | | |
|---|---|---|---|---|
| McG: Discrim Score: 3.77 | | | | |
| GvH: Signal Score (−7.5): −0.47 | | | | |
| Possible site: 45 | | | | |
| >>> Seems to have a cleavable N-term signal seq. | | | | |
| | INTEGRAL | Likelihood = −10.83 | Transmembrane | 138-154 (134-162) |
| | INTEGRAL | Likelihood = −7.96 | Transmembrane | 60-76 (50-86) |
| | INTEGRAL | Likelihood = −6.95 | Transmembrane | 95-111 (93-118) |
| | INTEGRAL | Likelihood = −5.79 | Transmembrane | 180-196 (174-216) |
| | INTEGRAL | Likelihood = −4.35 | Transmembrane | 198-214 (197-216) |
| | INTEGRAL | Likelihood = −4.30 | Transmembrane | 250-266 (246-268) |
| | INTEGRAL | Likelihood = −3.93 | Transmembrane | 222-238 (221-241) |
| | PERIPHERAL | Likelihood = 5.94 | 116 | |

```
modified ALOM score: 2.67
*** Reasoning Step: 3
----- Final Results -----
                              bacterial membrane --- Certainty = 0.5331(Affirmative) < succ>
                                bacterial outside --- Certainty = 0.0000(Not Clear) < succ>
                            bacterial cytoplasm --- Certainty = 0.0000(Not Clear) < succ>
```

[0393] A related DNA sequence was identified in S. pyogenes <SEQ ID 13> which encodes the amino acid sequence <SEQ ID 14>. Analysis of this protein sequence reveals the following:

| Possible site: 45 | | | | |
|---|---|---|---|---|
| >>> Seems to have a cleavable N-term signal seq. | | | | |
| | INTEGRAL | Likelihood = −11.25 | Transmembrane | 138-154 (134-163) |
| | INTEGRAL | Likelihood = −9.08 | Transmembrane | 66-82 (50-86) |
| | INTEGRAL | Likelihood = −6.79 | Transmembrane | 95-111 (93-118) |
| | INTEGRAL | Likelihood = −5.63 | Transmembrane | 180-196 (176-216) |
| | INTEGRAL | Likelihood = −4.73 | Transmembrane | 221-237 (218-241) |
| | INTEGRAL | Likelihood = −4.35 | Transmembrane | 250-266 (246-268) |
| | INTEGRAL | Likelihood = −4.35 | Transmembrane | 198-214 (197-216) |
| | INTEGRAL | Likelihood = −2.81 | Transmembrane | 48-64 (47-64) |

```
----- Final Results -----
                              bacterial membrane --- Certainty = 0.5501(Affirmative) < succ>
                                bacterial outside --- Certainty = 0.0000(Not Clear) < succ>
                            bacterial cytoplasm --- Certainty = 0.0000(Not Clear) < succ>
```

[0394] An alignment of the GAS and GBS proteins is shown below:

| Identities = 224/275 (81%), Positives = 255/275 (92%) | | | |
|---|---|---|---|
| Query: | 1 | MFTKFFEGLLTYHFLQNAFITAIVIGIVAGAVGCFIILRSMSLMGDAISHAVLPGVAISF | 60 |
| | | M KFFEGL++YHFLQNA ITA+VIGIV+GAVGCFIILRSMSLMGDAISHAVLPGVA+SF | |
| Sbjct: | 1 | MSMKFFEGLMSYHFLQNALITAVVIGIVSGAVGCFIILRSMSLMGDAISHAVLPGVALSF | 60 |
| Query: | 61 | ILGINFFIGAIVFGLLSSIIITYIKENSVIKGDTAIGITFSSFLALGIILIGLANSTTDL | 120 |
| | | ILG+NFFIGAI+FGLL+S+IITYIKENSVIKGDTAIGITFSSFLALG+ILIG+ANS+TDL | |
| Sbjct: | 61 | ILGVNFFIGAIIFGLLASVIITYIKENSVIKGDTAIGITFSSFLALGVILIGVANSSTDL | 120 |
| Query: | 121 | FHILFGNILAVQDSDKYMTIIVGLIVLTLITIFFKELLLTSFDPVLAKSMGMRVSFYHYL | 180 |
| | | FHILFGNILAVQDSDK++TI V + VL +I++FFKELLLTSFDP+LAKSMG++V+ YHYL | |
| Sbjct: | 121 | FHILFGNILAVQDSDKWITIGVSIFVLVVISLFFKELLLTSFDPILAKSMGVKVNAYHYL | 180 |
| Query: | 181 | LMILLTLVAVTAMQSVGTILIVALLITPAATAYLYVKSLRTMLFLSSALGAVASVLGLYI | 240 |
| | | LM+LLTLVAVTAMQSVGTILIVALLITPAATAYLY SL+ ML +SS LGA+ASVLGLY+ | |
| Sbjct: | 181 | LMVLLTLVAVTAMQSVGTILIVALLITPAATAYLYANSLKVMLVMSSLLGALASVLGLYL | 240 |
| Query: | 241 | GYTFNIAAGSSIVLTSTFMFLLAFLFSPKQSLFKK | 275 |
| | | GYTFN+AAGSSIVLTS MFL++F SPKQ K+ | |
| Sbjct: | 241 | GYTFNVAAGSSIVLTSAMMFLISFFVSPKQGYLKR | 275 |

[0395] Based on this analysis, it was predicted that these proteins and their epitopes could be useful antigens for vaccines or diagnostics.

### EXAMPLE 9

[0396] A DNA sequence (GBSx0006) was identified in S. agalactiae <SEQ ID 15> which encodes the amino acid sequence <SEQ ID 16>. Analysis of this protein sequence reveals the following:

```
Possible site: 38
>>> Seems to have no N-terminal signal sequence
----- Final Results -----
                            bacterial cytoplasm --- Certainty = 0.1280(Affirmative) < succ>
                              bacterial membrane --- Certainty = 0.0000(Not Clear) < succ>
                                bacterial outside --- Certainty = 0.0000(Not Clear) < succ>
```

[0397] The protein has no significant homology with any sequences in the GENPEPT database.

[0398] No corresponding DNA sequence was identified in S. pyogenes.

[0399] Based on this analysis, it was predicted that this protein and its epitopes, could be useful antigens for vaccines or diagnostics.

### EXAMPLE 10

[0400] A DNA sequence (GBSx0007) was identified in S. agalactiae <SEQ ID 17> which encodes the amino acid sequence <SEQ ID 18>. This protein is predicted to be peptidyl-prolyl cis-trans isomerase 10 (rotamase). Analysis of this protein sequence reveals the following:

| Lipop Possible site: 19 Crend: 2 | | | |
|---|---|---|---|
| McG: Discrim Score: 5.27 | | | |
| GvH: Signal Score (−7.5): −4.14 | | | |
| Possible site: 19 | | | |
| >>> May be a lipoprotein | | | |
| ALOM program | count: 0 | value: 9.34 | threshold: 0.0 |

| | | |
|---|---|---|
| PERIPHERAL | Likelihood = 9.34 | 89 |

modified ALOM score: −2.37
*** Reasoning Step: 3
----- Final Results -----
bacterial membrane --- Certainty = 0.0000 (Not Clear) < succ>
bacterial outside --- Certainty = 0.0000 (Not Clear) < succ>
bacterial cytoplasm --- Certainty = 0.0000 (Not Clear) < succ>

[0401] The protein has homology with the following sequences in the GENPEPT database:

| >GP: CAA19257 GB: AL023704 putative Cyclophilin-type peptidyl-prolyl | | | |
|---|---|---|---|
| cis-trans isomerase protein [Schizosaccharomyces pombe] | | | |
| Identities = 88/224 (39%), Positives = 123/224 (54%), Gaps = 46/224 (20%) | | | |
| Query: | 50 | NKKTKQALKADKKAFPQLDKAVAKNEAQ-----------VLIKTSKGDINIKLFPKYAPL | 98 |
| | | N TK L +D+ + + V NE + +I T++GDI+IKL+P+ AP | |
| Sbjct: | 419 | NMSTKFTL-SDRDVYNEQVLPVTNNEGRQENGNILLGKAAIIHTTQGDISIKLYPEEAPK | 477 |
| Query: | 99 | AVENFLTHAKEGYYNGLSFHRVIKDFMIQSGDPNGDGTGGKSIWNSKDKKKDSGNGFVNE | 158 |
| | | AV+NF THA+ GYY+ FHR+IK+FMIQ GDP GDGTGG+SIW KKD F +E | |
| Sbjct: | 478 | AVQNFTTHAENGYYDNTIFHRIIKNFMIQGGDPLGDGTGGESIW-----KKD----FEDE | 528 |
| Query: | 159 | ISPYLYNIRG-SLAMANAGADTNGSQFFINQSQQDHSKQLSDKKVPKVIIKAYSEGGNPS | 217 |
| | | ISP L + R +++MAN+G +TNGSQFFI P | |
| Sbjct: | 529 | ISPNLKHDRPFTVSMANSGPNTNGSQFFITTDL------------------------TPW | 564 |
| Query: | 218 | LDGGYTVFGQVISGMETVDKIASVEVTKSDQPKEKITITSIKVI | 261 |
| | | LDG +T+F + +G++ V +I E K D+P E I +I ++ | |
| Sbjct: | 565 | LDGKHTIFARAYAGLDVVHRIEQGETDKYDRPLEPTKIINISIV | 608 |

[0402] A related DNA sequence was identified in S. pyogenes <SEQ ID 19> which encodes the amino acid sequence <SEQ ID 20>. Analysis of this protein sequence reveals the following:

Possible site: 19
>>> May be a lipoprotein
----- Final Results -----
bacterial membrane --- Certainty = 0.0000 (Not Clear) < succ>
bacterial outside --- Certainty = 0.0000 (Not Clear) < succ>
bacterial cytoplasm --- Certainty = 0.0000 (Not Clear) < succ>

[0403] The protein has homology with the following sequences in the databases:

| >GP: CAB88542 GB: AL353818 putative protein [Arabidopsis thaliana] | | | |
|---|---|---|---|
| Identities = 83/186 (44%), Positives = 104/186 (55%), Gaps = 34/186 (18%) | | | |
| Query: | 78 | VVMRTSQGDITLKLFPKYAPLAVENFLTHAKKGYYDNLTFHRVINDFMIQSGDPKGDGTG | 137 |
| | | V+M T+ GDI +KL+P+ P VENF TH + GYYDN FHRVI FMIQ+GDP GDGTG | |
| Sbjct: | 476 | VIMHTTLGDIHMKLYPEECPKTVENFTTHCRNGYYDNHLFHRVIRGFMIQTGDPLGDGTG | 535 |
| Query: | 138 | GESIWKGKDPKKDAGNGFVNEISPFLYHIRG-ALAMANAGANTNGSQFYINQNKKNQSKG | 196 |
| | | G+SIW G F +E L H R L+MANAG NTNGSQF+I | |
| Sbjct: | 536 | GQSIW---------GREFEDEFHKSLRHDRPFTLSMANAGPNTNGSQFFITT-------- | 578 |
| Query: | 197 | LSSTNYPKPIISAYEHGGNPSLDGGYTVFGQVIDGMDVVDKIAATSINQNDKPEQDITIT | 256 |
| | | P LD +TVFG+V+ GMDVV I ++ND+P QD+ I | |
| Sbjct: | 579 | ----------------VATPWLDNKHTVFGRVVKGMDVVQGIEKVKTDKNDRPYQDVKIL | 622 |
| Query: | 257 | SIDIVK | 262 |
| | | ++ + K | |
| Sbjct: | 623 | NVTVPK | 628 |

[0404] An alignment of the GAS and GBS proteins is shown below:

| Identities = 172/267 (64%), Positives 221/267 (82%) | | | |
|---|---|---|---|
| Query: | 1 | MKKIIYLGLACVSILTLSGCESIERSLKGDRYVDQKLAENSSKEATEQLNKKTKQALKAD | 60 |
| | | MKK++ L L +S+L LS CES++R++KGD+Y+D+K A+ S+ A++ + ++ALKAD | |
| Sbjct: | 1 | MKKLLSLSLVAISLLNLSACESVDRAIKGDKYIDEKTAKEESEAASKAYEESIQKALKAD | 60 |
| Query: | 61 | KKAFPQLDKAVAKNEAQVLIKTSKGDINIKLFPKYAPLAVENFLTHAKEGYYNGLSFHRV | 120 |
| | | FPQL K V K EA+V+++TS+GDI +KLFPKYAPLAVENFLTHAK+GYY+ L+FHRV | |
| Sbjct: | 61 | ASQFPQLTKEVGKEEAKVVMRTSQGDITLKLFPKYAPLAVENFLTHAKKGYYDNLTFHRV | 120 |
| Query: | 121 | IKDFMIQSGDPNGDGTGGKSIWNSKDKKKDSGNGFVNEISPYLYNIRGSLAMANAGADTN | 180 |
| | | I DFMIQSGDP GDGTGG+SIW KD KKD+GNGFVNEISP+LY+IRG+LAMANAGA+TN | |
| Sbjct: | 121 | INDFMIQSGDPKGDGTGGESIWKGKDPKKDAGNGFVNEISPFLYHIRGALAMANAGANTN | 180 |
| Query: | 181 | GSQFFINQSQQDHSKQLSDKKVPKVIIKAYSEGGNPSLDGGYTVFGQVISGMETVDKIAS | 240 |
| | | GSQF+INQ++++ SK LS PK II AY GGNPSLDGGYTVFGQVI GM+ VDKIA+ | |
| Sbjct: | 181 | GSQFYINQNKKNQSKGLSSTNYPKPIISAYEHGGNPSLDGGYTVFGQVIDGMDVVDKIAA | 240 |
| Query: | 241 | VEVTKSDQPKEKITITSIKVIKDYKFK | 267 |
| | | + ++D+P++ ITITSI ++KDY+FK | |
| Sbjct: | 241 | TSINQNDKPEQDITITSIDIVKDYRFK | 267 |

[0405] SEQ ID 18 (GBS205) was expressed in E. coli as a His-fusion product. SDS-PAGE analysis of total cell extract is shown in FIG. 51 (lane 13; MW 31 kDa).

[0406] GBS205-His was purified as shown in FIG. 206, lane 8.

[0407] Based on this analysis, it was predicted that these proteins and their epitopes could be useful antigens for vaccines or diagnostics.

### EXAMPLE II

[0408] A DNA sequence (GBSx0008) was identified in S. agalactiae <SEQ ID 21> which encodes the amino acid sequence <SEQ ID 22>. This protein is predicted to be sporulation protein SpoIIIE (ftsK). Analysis of this protein sequence reveals the following:

| Lipop Possible site: −1 Crend: 10 | | | | |
|---|---|---|---|---|
| McG: Discrim Score: −22.83 | | | | |
| GvH: Signal Score (−7.5): −7.13 | | | | |
| Possible site: 39 | | | | |
| >>> Seems to have no N-terminal signal sequence | | | | |
| ALOM program count: 5 value: −9.24 threshold: 0.0 | | | | |
| INTEGRAL | Likelihood = −9.24 | Transmembrane | 36-52 | (27-60) |
| INTEGRAL | Likelihood = −9.18 | Transmembrane | 162-178 | (154-188) |
| INTEGRAL | Likelihood = −4.04 | Transmembrane | 597-613 | (595-615) |
| INTEGRAL | Likelihood = −3.77 | Transmembrane | 63-79 | (58-83) |
| INTEGRAL | Likelihood = −2.60 | Transmembrane | 90-106 | (88-108) |
| PERIPHERAL | Likelihood = −1.32 | 136 | | |

modified ALOM score: 2.35
*** Reasoning Step: 3
----- Final Results -----
bacterial membrane --- Certainty = 0.4694 (Affirmative) < succ>
bacterial outside --- Certainty = 0.0000 (Not Clear) < succ>
bacterial cytoplasm --- Certainty = 0.0000 (Not Clear) < succ>

[0409] A related GBS nucleic acid sequence <SEQ ID 10035> which encodes amino acid sequence <SEQ ID 10036> was also identified.

[0410] The protein has homology with the following sequences in the GENPEPT database:

[chemical structure]

[chemical structure]

[0411] A related DNA sequence was identified in S. pyogenes <SEQ ID 23> which encodes the amino acid sequence <SEQ ID 24>. Analysis of this protein sequence reveals the following:

| Possible site: 51 | | | | |
|---|---|---|---|---|
| >>> Seems to have no N-terminal signal sequence | | | | |
| INTEGRAL | Likelihood = −9.45 | Transmembrane | 31-47 | (25-55) |
| INTEGRAL | Likelihood = −7.17 | Transmembrane | 160-176 | (153-183) |
| INTEGRAL | Likelihood = −4.99 | Transmembrane | 93-109 | (86-111) |
| INTEGRAL | Likelihood = −4.04 | Transmembrane | 586-602 | (584-604) |
| INTEGRAL | Likelihood = −1.22 | Transmembrane | 64-80 | (64-80) |

----- Final Results -----
bacterial membrane --- Certainty = 0.4779 (Affirmative) < succ>
bacterial outside --- Certainty = 0.0000 (Not Clear) < succ>
bacterial cytoplasm --- Certainty = 0.0000 (Not Clear) < succ>

[0412] The protein has homology with the following sequences in the databases:

| | | |
|---|---|---|
| !GB:Z99112 DNA translocase [Bacillus subtilis] | 601 | e-170 |

| Identities = 354/816 (43%), Positives = 499/816 (60%), | | | |
|---|---|---|---|
| Gaps = 69/816 (8%) | | | |
| Query: | 11 | APKKRLTKAEVEKQRAIKRMILSVLMALLLIFAMLRLGVFGVTTYNMIRFLVGSLAYPFM | 70 |
| | | A KKR ++ + KQ IK + +L + I A+L+LGV G T + RF G + | |
| Sbjct: | 2 | AKKKRKSRKKQAKQLNIKYELNGLLCIAISIIAILQLGVVGQTFIYLFRFFAGEWFILCL | 61 |
| Query: | 71 | FAWLIYLFCFKWLRQKDGMI----AGVVIAFLGLLVEWHAFLFA----MPRMLDQDIFLG | 122 |
| | | L+ W ++ ++ AG+ +L+ H LF + + | |
| Sbjct: | 62 | LGLLVLGVSLFWKKKTPSLLTRRKAGLYCIIASILLLSHVQLFKNLTHKGSIESASVVRN | 121 |
| Query: | 123 | TARLITRDLLALRVTEFVGGGMLGALLYKPIAFLFSNIGSYFIGFLFILLGLFLMTPWDI | 182 |
| | | T L D+ + +GGGM+GALL+ FLF++ GS + + IL+G+ L+T + | |
| Sbjct: | 122 | TWELFLMDMNGSSASPDLGGGMIGALLFAASHFLFASTGSQIMAIVMILIGMILVTGRSL | 181 |
| Query: | 183 | YD--------VSHFVKEA----VDKLAVAYQENKEKRFIKREEHRLQAEKEALEKQAQEE | 230 |
| | | + + F+KE +D + +++ N + K+ + + +K A +KQ E | |
| Sbjct: | 182 | QETLKKWMSPIGRFIKEQWLAFIDDMK-SFKSNMQSS--KKTKAPSKKQKPARKKQQMEP | 238 |
| Query: | 231 | EKRLAELTVDPETGEIVEDSQSQVSYDLAEDMT-KEPEILAYDSHLKDDETSLFDQ---- | 285 |
| | | E E G+ Y+ + EP I ++ +++E+ + ++ | |
| Sbjct: | 239 | EP-------PDEEGD----------YETVSPLIHSEPIISSFSDRNEEEESPVIEKRAEP | 281 |
| Query: | 286 | --EDLAYAHEEIGAYDSLSALASSEDEMDMDEPVEVDFTPKTHLLYKLPTIDLFAPDKPK | 343 |
| | | +L E G +++SA + E++ + Y++P++DL A K | |
| Sbjct: | 282 | VSKPLQDIQPETGDQETVSAPPMTFTELENKD-------------YEMPSLDLLADPKHT | 328 |
| Query: | 344 | NQSKEKNLVRKNIKVLEDTFQSFGIDVKVERAEIGPSVTKYEIKPAVGVRVNRISNLADD | 403 |
| | | Q +K + +N + LE TFQSFG+ KV + +GP+VTKYE+ P VGV+V++I NL+DD | |
| Sbjct: | 329 | GQQADKKNIYENARKLERTFQSFGVKAKVTQVHLGPAVTKYEVYPDVGVKVSKIVNLSDD | 388 |
| Query: | 404 | LALALAAKDVRIEAPIPGKSLIGIEVPNSEIATVSFRELWEQS-DANPENLLEVPLGKAV | 462 |
| | | LALALAAKD+RIEAPIPGKS IGIEVPN+E+A VS +E+ E + P+ + + LG+ + | |
| Sbjct: | 389 | LALALAAKDIRIEAPIPGKSAIGIEVPNAEVAMVSLKEVLESKLNDRPDANVLIGLGRNI | 448 |
| Query: | 463 | NGNARSFNLARMPHLLVAGSTGSGKSVAVNGIISSILMKARPDQVKFMMIDPKMVELSVY | 522 |
| | | +G A L +MPHLLVAG+TGSGKSV VNGII+SILM+A+P +VK MMIDPKMVEL+VY | |
| Sbjct: | 449 | SGEAVLAELNKMPHLLVAGATGSGKSVCVNGIITSILMRAKPHEVKMMMIDPKMVELNVY | 508 |
| Query: | 523 | NDIPHLLIPVVTNPRKASKALQKVVDEMENRYELFSKIGVRNIAGYNTKVEEFNASSEQK | 582 |
| | | N IPHLL PVVT+P+KAS+AL+KVV+EME RYELFS G RNI GYN ++ N K | |
| Sbjct: | 509 | NGIPHLLAPVVTDPKKASQALKKVVNEMERRYELFSHTGTRNIEGYNDYIKRANNEEGAK | 568 |
| Query: | 583 | QIPLPLIVVIVDELADLMMVASKEVEDAIIRLGQKARAAGIHMILATQRPSVDVISGLIK | 642 |
| | | Q LP IVVIVDELADLMMVAS +VED+I RL Q ARAAGIH+I+ATQRPSVDVI+G+IK | |
| Sbjct: | 569 | QPELPYIVVIVDELADLMMVASSDVEDSITRLSQMARAAGIHLIIATQRPSVDVITGVIK | 628 |
| Query: | 643 | ANVPSRMAFAVSSGTDSRTILDENGAEKLLGRGDMLFKPIDENHPVRLQGSFISDDDVER | 702 |
| | | AN+PSR+AF+VSS TDSRTILD GAEKLLGRGDMLF P+ N PVR+QG+F+SDD+VE+ | |
| Sbjct: | 629 | ANIPSRIAFSVSSQTDSRTILDMGGAEKLLGRGDMLFLPVGANKPVRVQGAFLSDDEVEK | 688 |
| Query: | 703 | IVNFIKDQTEADYDDAFDPGEVSDNDPGFSGNGGAAEGDPLFEEAKALVLETQKASASMI | 762 |
| | | +V+ + Q +A Y + P E ++ + D L++EA L++ Q AS SM+ | |
| Sbjct: | 689 | VVDHVITQQKAQYQEEMIPEETTETHSEVT--------DELYDEAVELIVGMQTASVSML | 740 |
| Query: | 763 | QRRLSVGFNRATRLMDELEEAGVIGPAEGTKPRKVL | 798 |
| | | QRR +G+ RA RL+D +EE GV+GP EG+KPR+VL | |
| Sbjct: | 741 | QRRFRIGYTRAARLIDAMEERGVVGPYEGSKPREVL | 776 |

[0413] An alignment of the GAS and GBS proteins is shown below:

| Identities = 620/818 (75%), Positives = 701/818 (84%), Gaps = 25/818 (3%) | | | |
|---|---|---|---|
| Query: | 1 | MVFMANKKKTKGKKTRRPTKAEIERQRAIQRMITALVLTIILFFGIIRLGIFGITVYNVI | 60 |
| | | MV +KK+ KK R TKAE+E+QRAI+RMI ++++ ++L F ++RLG+FG+T YN+I | |
| Sbjct: | 1 | MVKRNQRKKSAPKK--RLTKAEVEKQRAIKRMILSVLMALLLIFAMLRLGVFGVTTYNMI | 58 |
| Query: | 61 | RFMVGSLAYLFIAATLIYLYFFKWLRKKDSLVAGFLIASLGLLIEWHAYLFSMPILKDKE | 120 |
| | | RF+VGSLAY F+ A LIYL+ FKWLR+KD ++AG +IA LGLL+EWHA+LF+MP + D++ | |
| Sbjct: | 59 | RFLVGSLAYPFMFAWLIYLFCFKWLRQKDGMIAGVVIAFLGLLVEWHAFLFAMPRMLDQD | 118 |
| Query: | 121 | ILRSTARLIVSDLMQFKITVFAGGGMLGALIYKPIAFLFSNIGAYMIGVLFIILGLFLMS | 180 |
| | | I TARLI DL+ ++T F GGGMLGAL+YKPIAFLFSNIG+Y IG LFI+LGLFLM+ | |
| Sbjct: | 119 | IFLGTARLITRDLLALRVTEFVGGGMLGALLYKPIAFLFSNIGSYFIGFLFILLGLFLMT | 178 |
| Query: | 181 | SLEVYDIVEFIRAFKNKVAEKHEQNKKERFAKREMKKAIAEQERIERQKAEEEAYLASVN | 240 |
| | | ++YD+ F++ +K+A +++NK++RF KRE + AE+E +E+Q EEE LA + | |
| Sbjct: | 179 | PWDIYDVSHFVKEAVDKLAVAYQENKEKRFIKREEHRLQAEKEALEKQAQEEEKRLAELT | 238 |
| Query: | 241 | VDPETGEILEDQAEDNLDDALPPEVSETSTPVFEPEILAYETSPQNDPLPV---EPTIYL | 297 |
| | | VDPETGEI+ED + +++E T EPEILAY++ ++D + E Y | |
| Sbjct: | 239 | VDPETGEIVEDSQSQ-----VSYDLAEDMTK--EPEILAYDSHLKDDETSLFDQEDLAYA | 291 |
| Query: | 298 | ED----YDSPIPNMRENDEEMVYDLDDDVDDSDIENVDFTPKTTLVYKLPTIDLFAPDKP | 353 |
| | | + YDS + + +++EM D+D+ V+ VDFTPKT L+YKLPTIDLFAPDKP | |
| Sbjct: | 292 | HEEIGAYDS-LSALASSEDEM--DMDEPVE------VDFTPKTHLLYKLPTIDLFAPDKP | 342 |
| Query: | 354 | KNQSKEKDLVRKNIRVLEETFRSFGIDVKVERAEIGPSVTKYEIKPAVGVRVNRISNLSD | 413 |
| | | KNQSKEK+LVRKNI+VLE+TF+SFGIDVKVERAEIGPSVTKYEIKPAVGVRVNRISNL+D | |
| Sbjct: | 343 | KNQSKEKNLVRKNIKVLEDTFQSFGIDVKVERAEIGPSVTKYEIKPAVGVRVNRISNLAD | 402 |
| Query: | 414 | DLALALAAKDVRIETPIPGKSLIGIEVPNSEIATVSFRELWEQSDANPENLLEVPLGKAV | 473 |
| | | DLALALAAKDVRIE PIPGKSLIGIEVPNSEIATVSFRELWEQSDANPENLLEVPLGKAV | |
| Sbjct: | 403 | DLALALAAKDVRIEAPIPGKSLIGIEVPNSEIATVSFRELWEQSDANPENLLEVPLGKAV | 462 |
| Query: | 474 | NGNARSFNLARMPHLLVAGSTGSGKSVAVNGIISSILMKARPDQVKFMMIDPKMVELSVY | 533 |
| | | NGNARSFNLARMPHLLVAGSTGSGKSVAVNGIISSILMKARPDQVKFMMIDPKMVELSVY | |
| Sbjct: | 463 | NGNARSFNLARMPHLLVAGSTGSGKSVAVNGIISSILMKARPDQVKFMMIDPKMVELSVY | 522 |
| Query: | 534 | NDIPHLLIPVVTNPRKASKALQKVVDEMENRYELFSKIGVRNIAGYNTKVEEFNASSEQK | 593 |
| | | NDIPHLLIPVVTNPRKASKALQKVVDEMENRYELFSKIGVRNIAGYNTKVEEFNASSEQK | |
| Sbjct: | 523 | NDIPHLLIPVVTNPRKASKALQKVVDEMENRYELFSKIGVRNIAGYNTKVEEFNASSEQK | 582 |
| Query: | 594 | QIPLPLIVVIVDELADLMMVASKEVEDAIIRLGQKARAAGIHMILATQRPSVDVISGLIK | 653 |
| | | QIPLPLIVVIVDELADLMMVASKEVEDAIIRLGQKARAAGIHMILATQRPSVDVISGLIK | |
| Sbjct: | 583 | QIPLPLIVVIVDELADLMMVASKEVEDAIIRLGQKARAAGIHMILATQRPSVDVISGLIK | 642 |
| Query: | 654 | ANVPSRIAFAVSSGTDSRTILDENGAEKLLGRGDMLFKPIDENHPVRLQGSFISDDDVER | 713 |
| | | ANVPSR+AFAVSSGTDSRTILDENGAEKLLGRGDMLFKPIDENHPVRLQGSFISDDDVER | |
| Sbjct: | 643 | ANVPSRMAFAVSSGTDSRTILDENGAEKLLGRGDMLFKPIDENHPVRLQGSFISDDDVER | 702 |
| Query: | 714 | IVGFIKDQAEADYDDAFDPGEVSETDNGSGGGGGVPESDPLFEEAKGLVLETQKASASMI | 773 |
| | | IV FIKDQ EADYDDAFDPGEVS+ D G G GG E DPLFEEAK LVLETQKASASMI | |
| Sbjct: | 703 | IVNFIKDQTEADYDDAFDPGEVSDNDPGFSGNGGAAEGDPLFEEAKALVLETQKASASMI | 762 |
| Query: | 774 | QRRLSVGFNRATRLMEELEAAGVIGPAEGTKPRKVLMT | 811 |
| | | QRRLSVGFNRATRLM+ELE AGVIGPAEGTKPRKVL T | |
| Sbjct: | 763 | QRRLSVGFNRATRLMDELEEAGVIGPAEGTKPRKVLQT | 800 |

[0414] SEQ ID 22 (GBS272d) was expressed in E. coli as a GST-fusion product. SDS-PAGE analysis of total cell extract is shown in FIG. 147 (lane 9; MW 55 kDa+lane 10; MW 70 kDa). It was also expressed in E. coli as a His-fusion product. SDS-PAGE analysis of total cell extract is shown in FIG. 147 (lane 11 & 13; MW 85 kDa+lane 12; MW 74 kDa).

[0415] Based on this analysis, it was predicted that these proteins and their epitopes could be useful antigens for vaccines or diagnostics.

### EXAMPLE 12

[0416] A DNA sequence (GBSx0009) was identified in S. agalactiae <SEQ ID 25> which encodes the amino acid sequence <SEQ ID 26>. This protein is predicted to be para-aminobenzoate synthetase (pabB) (pabB). Analysis of this protein sequence reveals the following:

Possible site: 61
>>> Seems to have no N-terminal signal sequence
----- Final Results -----
bacterial cytoplasm --- Certainty = 0.4073 (Affirmative) < succ>
bacterial membrane --- Certainty = 0.0000 (Not Clear) < succ>
bacterial outside --- Certainty = 0.0000 (Not Clear) < succ>

[0417] The protein has homology with the following sequences in the GENPEPT database:

| >GP: AAD07357 GB: AE000547 para-aminobenzoate synthetase (pabB) | | | |
|---|---|---|---|
| [Helicobacter pylori 26695] | | | |
| Identities = 204/580 (35%), Positives = 325/580 (55%), Gaps = 50/580 (8%) | | | |
| Query: | 16 | YRFKNPTKELIADTLEQVLEVIKEVDYYQSQNYYVVGYLSYEASAAF-DSHFKVSQQKLA | 74 |
| | | ++++ K+L A L ++ + + + Y+V GYL YEA AF D +F+ L | |
| Sbjct: | 6 | FKYQKSVKKLTATNLNELKNALDFISQNRGNGYFV-GYLLYEARLAFLDENFQSQTPFLY | 64 |
| Query: | 75 | GEHLAY---FTVHKDCENEAFPLSYENVRLADNWTANVSEQEYQEAIANIKGQIRQGNTY | 131 |
| | | E +++ E+ +P + +++ ++ Y + +K +++ G+TY | |
| Sbjct: | 65 | FEQFLERKKYSLEPLKEHAFYPKIH----------SSLDQKTYFKQFKAVKERLKNGDTY | 114 |
| Query: | 132 | QVNYTLELSQQLCSDPFSVYERLMVEQGAGYNAYIAYDDKRILSVSPELFFKKK--DEVL | 189 |
| | | QVN T++L + P V++ ++ Q + A+I + +LS SPELFF+ + D + | |
| Sbjct: | 115 | QVNLTMDLFLDTKAKPKRVFKEVVHNQNTPFKAFIENEFGSVLSFSPELFFELEFLDTAI | 174 |
| Query: | 190 | T--TRPMKGTSARKPTYQEDVAERDWLANDPKNRSENMMIVDLLRNDMGRICDVGTVKVK | 247 |
| | | T+PMKGT AR D R +L ND KNRSEN+MIVDLLRND+ R+ +VKV | |
| Sbjct: | 175 | KIITKPMKGTIARSKNPLIDEKNRLFLQNDDKNRSENVMIVDLLRNDLSRLALKNSVKVN | 234 |
| Query: | 248 | KLCQVEQYATVWQMTSTIEGVLSPEVTLMSIFQALYPCGSITGAPKISTMAIINELEKRP | 307 |
| | | +L ++ +V+QM S IE L + +L IF+AL+PCGS+TG PKI TM II LEKRP | |
| Sbjct: | 235 | QLFEIISLPSVYQMISEIEAKLPLKTSLFEIFKALFPCGSVTGCPKIKTMQIIESLEKRP | 294 |
| Query: | 308 | RGIYCGTIGLCMPDGQAIFNVPIRTVQMKGQQ--AYYGVGGGITWESQTDSEYEETRQKS | 365 |
| | | RG+YCG IG+ + + +A+F+VPIRT++ + + + GVG G+T++S+ EYEE+ KS | |
| Sbjct: | 295 | RGVYCGAIGM-VEEKKALFSVPIRTLEKRVHENFLHLGVGSGVTYKSKAPKEYEESFLKS | 353 |
| Query: | 366 | -AVLTRVNPKFQLITTGRV--TENKLLFSQQ--HVERLVESASYFAYSFDKSKFERELKK | 420 |
| | | V+ ++ +F+++ T ++ + KL + + H ERL+ S YF + +D++ + EL | |
| Sbjct: | 354 | FFVMPKI--EFEIVETMKIIKKDQKLEINNKNAHKERLMNSTRYFNFKYDENLLDFEL-- | 409 |
| Query: | 421 | YLHQLDEKDYRLKIMLDKTGKVTFEVKQLVNLSKKFLTAEVVVQDYPI-KLSPFTYFKTS | 479 |
| | | +EK+ L+++L+K GK+ E K L L + E+ + + PI K + F Y KT+ | |
| Sbjct: | 410 | ------EKEGVLRVLLNKKGKLIKEYKTLEPLK----SLEIRLSEAPIDKRNDFLYHKTT | 459 |
| Query: | 480 | YRPHIIEGQN--------EKIFVSPEGLLLETSIGNIVLEKNGRFLTPDLSEGGLNGIYR | 531 |
| | | Y P + + ++IF + + L E + N+VLE + R LTP S G LNG | |
| Sbjct: | 460 | YAPFYQKARALIKKGVMFDEIFYNQDLELTEGARSNLVLEIHNRLLTPYFSAGALNGTGV | 519 |
| Query: | 532 | RHLLKNQKVIEAPLTLKDLESADAIYACNAVRGLYPLNLK | 571 |
| | | LLK V APL L+DL+ A IY NA+ GL + +K | |
| Sbjct: | 520 | VGLLKKGLVGHAPLKLQDLQKASKIYCINALYGLVEVKIK | 559 |

[0418] A related DNA sequence was identified in S. pyogenes <SEQ ID 27> which encodes the amino acid sequence <SEQ ID 28>. Analysis of this protein sequence reveals the following:

Possible site: 31
>>> Seems to have no N-terminal signal sequence
----- Final Results -----
bacterial cytoplasm --- Certainty = 0.2669 (Affirmative) < succ>
bacterial membrane --- Certainty = 0.0000 (Not Clear) < succ>
bacterial outside --- Certainty = 0.0000 (Not Clear) < succ>

[0419] An alignment of the GAS and GBS proteins is shown below:

| Identities = 303/572 (52%), Positives = 406/572 (70%), Gaps = 1/572 (0%) | | | |
|---|---|---|---|
| Query: | 1 | MHIETVIDFKELGKRYRFKNPTKELIADTLEQVLEVIKEVDYYQSQNYYVVGYLSYEASA | 60 |
| | | MH +T+IDFKELG+RY F P EL+A +L+QV VI++V +YQ YYVVGYLSYEA+A | |
| Sbjct: | 3 | MHRKTIIDFKELGQRYLFDEPLVELVAKSLDQVGPVIEKVQHYQQLGYYVVGYLSYEAAA | 62 |
| Query: | 61 | AFDSHFKVSQQKLAGEHLAYFTVHKDCENEAFPLSYENVRLADNWTANVSEQEYQEAIAN | 120 |
| | | FD+ + +L E+LAYFTVHK C+ + PL Y+++ + + W + ++ YQ+AI | |
| Sbjct: | 63 | FFDNALQTHNDRLGNEYLAYFTVHKTCQKKDLPLDYDSITIPNQWVSATQKEAYQKAIET | 122 |
| Query: | 121 | IKGQIRQGNTYQVNYTLELSQQL-CSDPFSVYERLMVEQGAGYNAYIAYDDKRILSVSPE | 179 |
| | | I +++QGNTYQVNYTL+L+Q+L +D ++Y +L+VEQ AGYNAYIA+D+ ++S SPE | |
| Sbjct: | 123 | IHREMQQGNTYQVNYTLQLTQELNAADSLAIYNKLVVEQAAGYNAYIAHDEFAVISASPE | 182 |
| Query: | 180 | LFFKKKDEVLTTRPMKGTSARKPTYQEDVAERDWLANDPKNRSENMMIVDLLRNDMGRIC | 239 |
| | | LFFK++ LTTRPMKGT+ R D E DWL D KNRSENMMIVDLLRNDMG+IC | |
| Sbjct: | 183 | LFFKQEGNRLTTRPMKGTTKRGVNSWLDQQEHDWLQADGKNRSENMMIVDLLRNDMGKIC | 242 |
| Query: | 240 | DVGTVKVKKLCQVEQYATVWQMTSTIEGVLSPEVTLMSIFQALYPCGSITGAPKISTMAI | 299 |
| | | G+V+V +LC+VE+Y+TVWQMTSTI G L + L+ I +AL+PCGSITGAPK+STMAI | |
| Sbjct: | 243 | QTGSVRVDRLCEVERYSTVWQMTSTIVGDLKADCDLIDILKALFPCGSITGAPKVSTMAI | 302 |
| Query: | 300 | INELEKRPRGIYCGTIGLCMPDGQAIFNVPIRTVQMKGQQAYYGVGGGITWESQTDSEYE | 359 |
| | | I LE +PRGIYCG+IG+C+PDG+ FNVPIRT+Q+ QA YGVGGGITW+S+ + EYE | |
| Sbjct: | 303 | ITSLEPKPRGIYCGSIGICLPDGRRFFNVPIRTIQLSHNQATYGVGGGITWQSKWEDEYE | 362 |
| Query: | 360 | ETRQKSAVLTRVNPKFQLITTGRVTENKLLFSQQHVERLVESASYFAYSFDKSKFERELK | 419 |
| | | E QK+A L R F L TT +V K+ F +QH+ RL E+A+YFAY +++ +++L | |
| Sbjct: | 363 | EVHQKTAFLYRHKQIFDLKTTAKVEHKKIAFLEQHLNRLKEAATYFAYPYNEKALQKQLS | 422 |
| Query: | 420 | KYLHQLDEKDYRLKIMLDKTGKVTFEVKQLVNLSKKFLTAEVVVQDYPIKLSPFTYFKTS | 479 |
| | | YL + YRL I L K GK++ + L LS FLTA++ +Q + SPFTYFKTS | |
| Sbjct: | 423 | TYLENKNNAAYRLMIRLSKDGKISLSDQPLEPLSADFLTAQLSLQKKDVTASPFTYFKTS | 482 |
| Query: | 480 | YRPHIIEGQNEKIFVSPEGLLLETSIGNIVLEKNGRFLTPDLSEGGLNGIYRRHLLKNQK | 539 |
| | | YRPHI + E++F + G LLETSIGN+ ++ TP ++ G L G++R+ LL + | |
| Sbjct: | 483 | YRPHIEQKSYEQLFYNQAGQLLETSIGNLFVQLGQTLYTPPVAVGILPGLFRQELLATGQ | 542 |
| Query: | 540 | VIEAPLTLKDLESADAIYACNAVRGLYPLNLK | 571 |
| | | E +TL DL+ A AI+ NAVRGLYPLNL+ | |
| Sbjct: | 543 | AQEKEVTLADLKEASAIFGGNAVRGLYPLNLE | 574 |

[0420] Based on this analysis, it was predicted that these proteins and their epitopes could be useful antigens for vaccines or diagnostics.

### EXAMPLE 13

[0421] A DNA sequence (GBSx0010) was identified in S. agalactiae <SEQ ID 29> which encodes the amino acid sequence <SEQ ID 30>. Analysis of this protein sequence reveals the following:

```
Possible site: 20
>>> Seems to have no N-terminal signal sequence
----- Final Results -----
                            bacterial cytoplasm --- Certainty = 0.1564(Affirmative) < succ>
                              bacterial membrane --- Certainty = 0.0000(Not Clear) < succ>
                                bacterial outside --- Certainty = 0.0000(Not Clear) < succ>
```

[0422] A related DNA sequence was identified in S. pyogenes <SEQ ID 31> which encodes the amino acid sequence <SEQ ID 32>. Analysis of this protein sequence reveals the following:

```
Possible site: 13
>>> Seems to have no N-terminal signal sequence
----- Final Results -----
                            bacterial cytoplasm --- Certainty = 0.5335(Affirmative) < succ>
                              bacterial membrane --- Certainty = 0.0000(Not Clear) < succ>
                                bacterial outside --- Certainty = 0.0000(Not Clear) < succ>
```

[0423] An alignment of the GAS and GBS proteins is shown below:

| Identities = 220/267 (82%), Positives = 243/267 (90%) | | | |
|---|---|---|---|
| Query: | 10 | LLLEITKIARATYYYQLKKLNKPNKDKAIKSDIQSIYDEHRGNYGYRRIYLELRNRGFVI | 69 |
| | | +LLEI ++R+TYYYQ+K+L + +KD +K I+ IYDEH+GNYGYRRI++ELRNRGFV+ | |
| Sbjct: | 1 | MLLEILDLSRSTYYYQVKRLAQGDKDIELKHVIREIYDEHKGNYGYRRIHMELRNRGFVV | 60 |
| Query: | 70 | NHKRVQGLMKSMGLTARIRRKRKYASYKGEVGKKADNLIQRQFEGSKPYEKCYTDVTEFA | 129 |
| | | NHK+VQ LMK MGL ARIRRKRKY+SYKGEVGKKADNLI+R FEGSKPYEKCYTDVTE A | |
| Sbjct: | 61 | NHKKVQRLMKVMGLAARIRRKRKYSSYKGEVGKKADNLIKRHFEGSKPYEKCYTDVTELA | 120 |
| Query: | 130 | LPEGKLYLSPVLDGYNSEIIDFTLSRSPDLKQVQTMLEBAFPAASYSETILHSDQGWQYQ | 189 |
| | | LPEGKLYLSPVLDGYNSEIIDFTLSRSP+LKQVQTMLE+ FPA SYS TILHSDQGWQYQ | |
| Sbjct: | 121 | LPEGKLYLSPVLDGYNSEIIDFTLSRSPNLKQVQTMLEKTFPADSYSGTILHSDQGWQYQ | 180 |
| Query: | 190 | HKSYHQFLEDKGIRPSMSRKGNSPDNGMMESFFGILKSEMFYGLEKSYKSLDDLEQAITD | 249 |
| | | H+SYH FLE KGI SMSRKGNSPDNGMMESFFGILKSEMFYGLE +Y+SLD LE+AITD | |
| Sbjct: | 181 | HQSYHDFLESKGILASMSRKGNSPDNGMMESFFGILKSEMFYGLETTYQSLDKLEEAITD | 240 |
| Query: | 250 | YIFYYNNKRIKAKLKGLSPVQYRTKSF | 276 |
| | | YIFYYNNKRIKAKLKG SPVQYRTKSF | |
| Sbjct: | 241 | YIFYYNNKRIKAKLKGFSPVQYRTKSF | 267 |

[0424] Based on this analysis, it was predicted that these proteins and their epitopes could be useful antigens for vaccines or diagnostics.

### EXAMPLE 14

[0425] A DNA sequence (GBSx0011; GBSx2234) was identified in S. agalactiae <SEQ ID 33> which encodes the amino acid sequence <SEQ ID 34>. Analysis of this protein sequence reveals the following:

```
Possible site: 27
>>> Seems to have no N-terminal signal sequence
----- Final Results -----
                            bacterial cytoplasm --- Certainty = 0.3578(Affirmative) < succ>
                              bacterial membrane --- Certainty = 0.0000(Not Clear) < succ>
                                bacterial outside --- Certainty = 0.0000(Not Clear) < succ>
```

[0426] A related DNA sequence was identified in S. pyogenes <SEQ ID 35> which encodes the amino acid sequence <SEQ ID 36>. Analysis of this protein sequence reveals the following:

```
Possible site: 25
>>> Seems to have no N-terminal signal sequence
----- Final Results -----
                            bacterial cytoplasm --- Certainty = 0.3869(Affirmative) < succ>
                              bacterial membrane --- Certainty = 0.0000(Not Clear) < succ>
                                bacterial outside --- Certainty = 0.0000(Not Clear) < succ>
```

[0427] An alignment of the GAS and GBS proteins is shown below:

| Identities = 107/170 (62%), Positives = 134/170 (77%) | | | |
|---|---|---|---|
| Query: | 1 | MKLSYEDKLEIYELRKIGMSWSQISQRYDVRISNLKYMIKLMDRYGVEIVEKGRNEYYPP | 60 |
| | | MK + E K++IYELR++G S IS+++D+ S+LKYMI+L+DRYGV IV+K +N YY P | |
| Sbjct: | 1 | MKFNQETKVKIYELRQMGESIKSISKKFDMAESDLKYMIRLIDRYGVTIVQKCKNHYYSP | 60 |
| Query: | 61 | ELKQEMIDKVLIHGCSQLSVSLDYALSNCSILTNWLSQFKKNGYTIVEKTRGRPSKMGRK | 120 |
| | | ELKQE+I+KVLI G SQ SLDYAL S+L+ W++Q+KKNGYTI+EK RGRPSKMGRK | |
| Sbjct: | 61 | ELKQEIINKVLIDGQSQKQTSLDYALPTSSMLSRWIAQYKKNGYTILEKPRGRPSKMGRK | 120 |
| Query: | 121 | RKKTWEEMTELERLQEENERLRTENAFLKKLRDLRLRDEALQSERQKQLE | 170 |
| | | RKK EEMTE+ERLQ+E E R ENA LKKLR+ RLRDEA E+QK + | |
| Sbjct: | 121 | RKKNLEEMTEVERLQKELEYPRAENAVLKKLREYRLRDEAKLKEQQKSFK | 170 |

[0428] Based on this analysis, it was predicted that these proteins and their epitopes could be useful antigens for vaccines or diagnostics.

### EXAMPLE 15

[0429] A DNA sequence (GBSx0012) was identified in S. agalactiae <SEQ ID 37> which encodes the amino acid sequence <SEQ ID 38>. This protein is predicted to be oxyR protein. Analysis of this protein sequence reveals the following:

```
Possible site: 22
>>> Seems to have no N-terminal signal sequence
----- Final Results -----
                            bacterial cytoplasm --- Certainty = 0.1323(Affirmative) < succ>
                              bacterial membrane --- Certainty = 0.0000(Not Clear) < succ>
                                bacterial outside --- Certainty = 0.0000(Not Clear) < succ>
```

[0430] A related GBS nucleic acid sequence <SEQ ID 10033> which encodes amino acid sequence <SEQ ID 10034> was also identified.

[0431] The protein has homology with the following sequences in the GENPEPT database:

| >GP: CAA91664 GB: Z67753 former trsE (rbcR homolog) [Odontella sinensis] | | | |
|---|---|---|---|
| Identities = 72/259 (27%), Positives = 127/259 (48%), Gaps = 7/259 (2%) | | | |
| Query: | 5 | QKLMYLESIELYSNITKAAAMLFISQPYLSKVIKQLENELEIKLIQSQGHQTFLTYAGQR | 64 |
| | | Q+L L++I + T+AA LF+SQP LSK IK LE+ L I L+ + + LT AG+ | |
| Sbjct: | 8 | QQLRILKAIATEKSFTRAAEVLFVSQPSLSKQIKTLESRLNISLLNRENNIVSLTQAGKL | 67 |
| Query: | 65 | YLFYLKEIDMIERQMAKELYLIRSDKKGEITLGINSGLASSILANVLPKFNLEHPEISVK | 124 |
| | | +L Y + I + + + L +++ +G + +G + + + ++ VL F HP+I+++ | |
| Sbjct: | 68 | FLEYSERILALCEESCRVLNDLKTGDRGNLIVGASQTIGTYLMPRVLALFAQNHPQINIE | 127 |
| Query: | 125 | LLENNQNISEQLVASGDIDLAV--GMAPILYKDGIASTTIYRDELFLMIPTTSQLYNAEK | 182 |
| | | + ++ + V GDID+AV G P + + DEL L+IP + +K | |
| Sbjct: | 128 | VHVDSTRKIAKRVLEGDIDIAVVGGNIPEEIEKNLKVEDFVNDELILIIPKSHPFALKKK | 187 |
| Query: | 183 | RGQIIPFEYPISVLD-NEPLILTPLEYGIGKTIAQFYELHHMSLNQMITTSTVPTAASLS | 241 |
| | | + Y ++ + N + L I IA F + Q+ + + TA SL | |
| Sbjct: | 188 | KKINKDDLYHLNFITLNSNSTIRKLIDNILIQIA-FEPKQFNIIMQLNSIEAIKTAVSL- | 245 |
| Query: | 242 | LSGMGATFVPQTLIHRYLD | 260 |
| | | G+GA FV + I + ++ | |
| Sbjct: | 246 | --GLGAAFVSSSAIEKEIE | 262 |

[0432] A related DNA sequence was identified in S. pyogenes <SEQ ID 39> which encodes the amino acid sequence <SEQ ID 40>. Analysis of this protein sequence reveals the following:

| Possible site: 30 | | | | |
|---|---|---|---|---|
| >>> Seems to have no N-terminal signal sequence | | | | |
| | INTEGRAL | Likelihood = −1.28 | Transmembrane | 109-125 (109-126) |
| | INTEGRAL | Likelihood = −0.27 | Transmembrane | 146-162 (146-162) |

```
----- Final Results -----
                              bacterial membrane --- Certainty = 0.1510(Affirmative) < succ>
                                bacterial outside --- Certainty = 0.0000(Not Clear) < succ>
                            bacterial cytoplasm --- Certainty = 0.0000(Not Clear) < succ>
```

[0433] The protein has homology with the following sequences in the databases:

| >GP: AAC22434 GB: U32761 transcriptional regulator [Haemophilus | | | |
|---|---|---|---|
| influenzae Rd] | | | |
| Identities = 157/303 (51%), Positives = 221/303 (72%) | | | |
| Query: | 2 | IRQGESYLDIKQIRYFIAIVENHFNLSQAAELLYVSQPTLSMMINDFEKRENVKLFKRKR | 61 |
| | | + +G +DI+ +RYF++IV+N FNLS+A++ LYVSQP LSMMI +FE REN+++FKR | |
| Sbjct: | 9 | VLRGVKMMDIRHLRYFVSIVDNDFNLSRASQNLYVSQPALSMMITEFENRENIQIFKRAS | 68 |
| Query: | 62 | GRIIGLTYLGDNYYKDAQKVLSLYDDMFLKLHDHSKGLKGSINIGIPPLILSVVFSEVMP | 121 |
| | | G+IIGLT+ G+NYY+DA++V+ Y+DM L+ KG+I IGIPPL+LS VFS V+P | |
| Sbjct: | 69 | GKIIGLTFAGENYYRDAKEVIKRYNDMRTNLYKSKDCKKGTITIGIPPLVLSAVFSSVLP | 128 |
| Query: | 122 | KLILENPGIQFNVKEIGAYQLKNELLVGNVDVAVLLSPTGIADNLVETYEIQRSELSVCL | 181 |
| | | LIL+NP I F +KEIGAY LK+ELL+ VD+AVLL P I+ N++++ EI SEL++ L | |
| Sbjct: | 129 | HLILKNPDINFIIKEIGAYALKSELLLDKVDLAVLLYPERISKNIIDSIEIHSSELALFL | 188 |
| Query: | 182 | SPRHRLASKKVIQWEDLTDEQLALFDPSFMVHHLVLEACERHQVRPNIILTSSSWDFMLN | 241 |
| | | SP+H LA K+ I W DL +++A+FD +FM+HH + EA ER+ P+I+L SS WDF+L+ | |
| Sbjct: | 189 | SPKHVLAKKQQITWADLHQQKMAIFDQTFMIHHHLKEAFERNNCYPDIVLDSSCWDFLLS | 248 |
| Query: | 242 | STKINHNVLTICPKPITELYQLKDIKCIPMERPISWRVVLTRLRKKSYSEIEAYIMDDLL | 301 |
| | | + K N +LTI P P+ ELY K+ C +E P+ W+V L R RK Y+ +E YI D LL | |
| Sbjct: | 249 | AVKTNKELLTILPLPMAELYHSKEFLCRKIESPVPWKVTLCRQRKTVYTHLEEYIFDKLL | 308 |
| Query: | 302 | QSF | 304 |
| | | ++F | |
| Sbjct: | 309 | EAF | 311 |

[0434] An alignment of the GAS and GBS proteins is shown below:

| Identities = 61/227 (26%), Positives = 111/227 (48%), Gaps = 10/227 (4%) | | | |
|---|---|---|---|
| Query: | 9 | YLESIELYSNITKAAAHLFISQPYLSKVIKQLENELEIKLIQ-SQGHQTFLTYAGQRYLF | 67 |
| | | ++ +E + N+++AA L++SQP LS +I E +KL + +G LTY G Y | |
| Sbjct: | 17 | FIAIVENHFNLSQAAELLYVSQPTLSDMMINDFEKRENVKLFKRKRGRIIGLTYLGDNYYK | 76 |
| Query: | 68 | YLKEIDMIERQMAKELYLIRSDKKGEITLGINSGLASSILANVLPKFNLEHPEISVKLLE | 127 |
| | | +++ + M +L+ KG I +GI + S + + V+PK LE+P I + E | |
| Sbjct: | 77 | DAQKVLSLYDDMFLKLHDHSKGLKGSINIGIPPLILSVVFSEVMPKLILENPGIQFNVKE | 136 |
| Query: | 128 | NNQNISEQLVASGDIDLAVGMAPILYKDGIAST-TIYRDELFLMIPTTSQLYNAEKRGQI | 186 |
| | | + + G++D+AV ++P D + T I R EL + + +L A K+ + | |
| Sbjct: | 137 | IGAYQLKNELLVGNVDVAVLLSPTGIADNLVETYEIQRSELSVCLSPRHRL--ASKK--V | 192 |
| Query: | 187 | IPFEYPISVLDNEPLILTPLEYGIGKTIAQFYELHHMSLNQMITTST | 233 |
| | | I +E L +E L L + + + + E H + N ++T+S+ | |
| Sbjct: | 193 | IQWE----DLTDEQLALFDPSFMVHHLVLEACERHQVRPNIILTSSS | 235 |

[0435] Based on this analysis, it was predicted that these proteins and their epitopes could be useful antigens for vaccines or diagnostics.

### EXAMPLE 16

[0436] A DNA sequence (GBSx0013) was identified in S. agalactiae <SEQ ID 41> which encodes the amino acid sequence <SEQ ID 42>. This protein is predicted to be aminoacylase (cpsA). Analysis of this protein sequence reveals the following:

| Possible site: 43 | | | | |
|---|---|---|---|---|
| >>> Seems to have no N-terminal signal sequence | | | | |
| | INTEGRAL | Likelihood = −0.75 | Transmembrane | 385-401 (385-401) |

```
----- Final Results -----
                              bacterial membrane --- Certainty = 0.1298(Affirmative) < succ>
                                bacterial outside --- Certainty = 0.0000(Not Clear) < succ>
                            bacterial cytoplasm --- Certainty = 0.0000(Not Clear) < succ>
```

[0437] The protein has homology with the following sequences in the GENPEPT database:

| >GP: AAF36227 GB: AF168363 aminoacylase [Lactococcus lactis] | | | |
|---|---|---|---|
| Identities = 201/395 (50%), Positives = 274/395 (68%), Gaps = 5/395 (1%) | | | |
| Query: | 6 | LRHQLFEKLDQKCDQMVAIRRYLHENPELSFKETKTAAYISDFYKGKDCHVQTQFGGMNG | 65 |
| | | L + L L Q ++M+ IRR+LH+ PE+SF+E +T YI FYK DC + G G | |
| Sbjct: | 3 | LLNNLLTSLTQYENEMIQIRRHLHQYPEISFQEKETFKYIMGFYKELDCEPKLIGKGF-G | 61 |
| Query: | 66 | VVVDIYGDKATDKPIKHIALRADFDALPIQEETGLSFASKTAGVMHACGHDAHTAYLLIL | 125 |
| | | ++VDI G K+ K +ALRADFDAL I E+ LSF S GVMHACGHDAHTAYL++L | |
| Sbjct: | 62 | IIVDIEGGKSG----KTLALRADFDALAIFEDNDLSFKSVNPGVMHACGHDAHTAYLMVL | 117 |
| Query: | 126 | AESLIELKSEFSGHIRILHQPAEEVPPGGAKAMIEAGCLDGIDAVLGIHVMSTMEEGTVQ | 185 |
| | | A L+++K E G +RI+HQPAEEV PGGAK+MI+AG LDG+D ++G+HVM+T++ G + | |
| Sbjct: | 118 | ARELVKIKQELPGRVRIVHQPAEEVSPGGAKSMIKAGALDGVDNMIGVHVMTTIKTGVIA | 177 |
| Query: | 186 | YHAGPIQTGRATFKVILQGKGGHGSMPHRANDTIVAASSFVMAAQTIVSRRVNPFDTAVV | 245 |
| | | YH QTGR+ F + ++G GGH SMP +ND IVAAS FV QT++SRR++PFD V | |
| Sbjct: | 178 | YHNKETQTGRSNFTITIKGNGGHASMPQLSNDAIVAASYFVTELQTVISRRIDPFDMGTV | 237 |
| Query: | 246 | TIGSWDGKGSANVIKDSVTLEGDVRVMSEETRGVVEEEFKRILDGIAQTYGVSYQLDYQN | 305 |
| | | TIGSFDG GS N I+D V L+GDVR+M E TR V+ ++ K+I G T+GV +DY + | |
| Sbjct: | 238 | TIGSFDGAGSFNAIQDKVLLKGDVRMMKETTRKVIRDQVKQIAKGVGVTFGVEVIVDYDD | 297 |
| Query: | 306 | DYPVLVNNSEVTQKVANSLKSVAIKEILDVIDCDPQTPSEDFAYYAQTIPACFFYVGAHE | 365 |
| | | +YPVL N+ +T V +SLK I E+ +++D PQ PSEDF+YY Q +P+ FFY+GA | |
| Sbjct: | 298 | NYPVLFNSENLTHFVVDSLKDQNISEVNNIVDLGPQNPSEDFSYYGQVVPSTFFYIGAQP | 357 |
| Query: | 366 | EGQPYYPHHHPKFQIAESSLMVSAKSMATAALAML | 400 |
| | | E YPHH P F++ E S++++AK++AT + L | |
| Sbjct: | 358 | EDGGNYPHHSPLFKMNEKSILIAAKAVATVTINYL | 392 |

[0438] No corresponding DNA sequence was identified in S. pyogenes.

[0439] Based on this analysis, it was predicted that this protein and its epitopes, could be useful antigens for vaccines or diagnostics.

### EXAMPLE 17

[0440] A DNA sequence (GBSx0014) was identified in S. agalactiae <SEQ ID 43> which encodes the amino acid sequence <SEQ ID 44>. This protein is predicted to be drug transporter. Analysis of this protein sequence reveals the following:

| Lipop: Possible Site: −1 Crend: 8 | | | | |
|---|---|---|---|---|
| McG: Discrim Score: 6.19 | | | | |
| GvH: Signal Score (−7.5): −0.899999 | | | | |
| Possible site: 31 | | | | |
| >>> Seems to have a cleavable N-term signal seq. | | | | |
| ALOM program count: 11 value: −12.15 threshold: 0.0 | | | | |
| | INTEGRAL | Likelihood = −12.15 | Transmembrane | 169-185 (166-190) |
| | INTEGRAL | Likelihood = −8.86 | Transmembrane | 229-245 (224-250) |
| | INTEGRAL | Likelihood = −8.65 | Transmembrane | 82-98 (78-111) |
| | INTEGRAL | Likelihood = −8.60 | Transmembrane | 436-452 (428-457) |
| | INTEGRAL | Likelihood = −7.48 | Transmembrane | 202-218 (198-222) |
| | INTEGRAL | Likelihood = −4.99 | Transmembrane | 334-350 (332-352) |
| | INTEGRAL | Likelihood = −4.88 | Transmembrane | 358-374 (354-376) |
| | INTEGRAL | Likelihood = −4.09 | Transmembrane | 301-317 (301-317) |
| | INTEGRAL | Likelihood = −2.81 | Transmembrane | 102-118 (101-119) |
| | INTEGRAL | Likelihood = −2.71 | Transmembrane | 52-68 (50-70) |
| | INTEGRAL | Likelihood = −1.70 | Transmembrane | 271-287 (270-288) |
| | PERIPHERAL | Likelihood = 0.32 | 401 | |

```
modified ALOM score: 2.93
*** Reasoning Step: 3
----- Final Results -----
                              bacterial membrane --- Certainty = 0.5861(Affirmative) < succ>
                                bacterial outside --- Certainty = 0.0000(Not Clear) < succ>
                            bacterial cytoplasm --- Certainty = 0.0000(Not Clear) < succ>
```

[0441] The protein has homology with the following sequences in the GENPEPT database:

| >GP: CAB02058 GB: Z79702 hypothetical protein Rv2333c [Mycobacterium | | | |
|---|---|---|---|
| tuberculosis] | | | |
| Identities = 118/405 (29%), Positives = 199/405 (49%), Gaps = 9/405 (2%) | | | |
| Query: | 13 | KLLVGIVLAVLSFWLFAQS-ILNMG-PDVQSSLGISSGAMDIGVSSTALFSGLFIVVTGG | 70 |
| | | +LL I + F +F + I+N+ PD+Q S + + V+S +L +FI+ | |
| Sbjct: | 5 | QLLTLIATGLGLFMIFLDALIVNVALPDIQRSFAVGEDGLQWVVASYSLGMAVFIMSAAT | 64 |
| Query: | 71 | LADKLGRVKFTFIGLCLNIIGSLLIVLANGAVLFIMGRIFQGLAAAFIMPSTMALVKTYY | 130 |
| | | LAD GR ++ IG+ L +GS+ LA + R QGL AA + +++ALV + | |
| Sbjct: | 65 | LADLDGRRRWYLIGVSLFTLGSIACGLAPSIAVLTTARGAQGLGAAAVSVTSLALVSAAF | 124 |
| Query: | 131 | -DGKDRQRAVSFWSIGSWGGSGLCSYFGGAVASTLGWRYVFIFSI-IASVVSFLLILGTP | 188 |
| | | + K++ RA+ W+ + G+ GG + GWR +F ++ + ++V FL + | |
| Sbjct: | 125 | PEAKEKAPAIGIWTAIASIGTTTGPTLGGLLVDQWGWRSIFYVNLPMGALVLFLTLCYVE | 184 |
| Query: | 189 | ESKNVGQRTHFDYLGLIIFIISMLSLNIGISMAQEHGLMNVIPLSLFTVMLIGFVLFYYV | 248 |
| | | ES N + FD G ++FI+++ +L + + G +V + + +G LF ++ | |
| Sbjct: | 185 | ESCN-ERARRFDLSGQLLFIVAVGALVYAVIEGPQIGWTSVQTIVMLWTAAVGCALFVWL | 243 |
| Query: | 249 | ETRKSNSFIDFHLFENRFY-LGATISNFLLNAVAGTLIVINTYMQQGRQLTPKVAGEMSL | 307 |
| | | E R SN +D LF + Y L + AV G L++ ++Q R TP V G M L | |
| Sbjct: | 244 | ERRSSNPMMDLTLFRDTSYALAIATICTVFFAVYGMLLLTTQFLQNVRGYTPSVTGLMIL | 303 |
| Query: | 308 | GYLVCVLIAIRVGEKILQRFGARKPMLLGAMSTFVGIFLMTLVNIQGPLYLVLVFVGYAL | 367 |
| | | + V I + ++ R GAR P+L G +G+ ++ + LV VG L | |
| Sbjct: | 304 | PFSAAVAIVSPLVGHLVGRIGARVPILAGLCMLMLGLLMLIFSEHRSS---ALVLVGLGL | 360 |
| Query: | 368 | FGTGLGIYATPSTDTAISSIPNEKVGSASGIYKMASSLGGAIGVA | 412 |
| | | G+G+ + TP T A++++P E+ G ASGI ++G IG A | |
| Sbjct: | 361 | CGSGVALCLTPITTVAMTAVPAERAGMASGIMSAQRAIGSTIGFA | 405 |

[0442] A related DNA sequence was identified in S. pyogenes <SEQ ID 45> which encodes the amino acid sequence <SEQ ID 46>. Analysis of this protein sequence reveals the following:

| Possible site: 61 | | | | |
|---|---|---|---|---|
| >>> Seems to have an uncleavable N-term signal seq | | | | |
| | INTEGRAL | Likelihood = −8.28 | Transmembrane | 169-185 (165-189) |
| | INTEGRAL | Likelihood = −8.23 | Transmembrane | 12-28 (11-32) |
| | INTEGRAL | Likelihood = −8.17 | Transmembrane | 429-445 (423-450) |
| | INTEGRAL | Likelihood = −6.64 | Transmembrane | 203-219 (200-222) |
| | INTEGRAL | Likelihood = −5.41 | Transmembrane | 227-243 (225-245) |
| | INTEGRAL | Likelihood = −3.72 | Transmembrane | 82-98 (80-99) |
| | INTEGRAL | Likelihood = −3.72 | Transmembrane | 136-152 (135-155) |
| | INTEGRAL | Likelihood = −2.92 | Transmembrane | 302-318 (299-319) |
| | INTEGRAL | Likelihood = −2.55 | Transmembrane | 261-277 (261-277) |
| | INTEGRAL | Likelihood = −2.07 | Transmembrane | 331-347 (331-347) |
| | INTEGRAL | Likelihood = −1.06 | Transmembrane | 56-72 (56-72) |
| | INTEGRAL | Likelihood = −0.96 | Transmembrane | 351-367 (351-368) |
| | INTEGRAL | Likelihood = −0.37 | Transmembrane | 104-120 (103-120) |

```
----- Final Results -----
                              bacterial membrane --- Certainty = 0.4312(Affirmative) < succ>
                                bacterial outside --- Certainty = 0.0000(Not Clear) < succ>
                            bacterial cytoplasm --- Certainty = 0.0000(Not Clear) < succ>
```

[0443] The protein has homology with the following sequences in the databases:

| !GB: AJ250422 ORFC [Oenococcus oeni] 271 1e−71 | | | |
|---|---|---|---|
| Identities = 152/445 (34%), Positives = 248/445 (55%), Gaps = 7/445 (1%) | | | |
| Query: | 1 | MSHHQQTVSKQTIMAIIAIALIGFSGILSETSMNVTFPTLMSVYQLPLNSLQWMTTIYLL | 60 |
| | | M Q VS +AI+ +A + F G+L ETSMNVTFPTLM + + LN +QW+TT YLL | |
| Sbjct: | 1 | MQKDNQPVSLHVKLAILGLAGLAFCGVLIETSMNVTFPTLMQQFSISLNKVQWLTTAYLL | 60 |
| Query: | 61 | AVAIMMTTSATLKKNVRERPLFFMATGLFTFGTILAVLTQSFAIMLLARIFQGIGTGLVM | 120 |
| | | VA ++ +A ++K + +FF A LF G I + L +F I+L+ R+ Q + TGL + | |
| Sbjct: | 61 | LVAATISIAAFIEKRFIFKKIFFWAGLLFIIGVICSALAPNFLILLIGRLIQALSTGLAI | 120 |
| Query: | 121 | PQMFNIILERVPMHKVGLFMGFAGLIISLAPAFGPTYGGFMISHFSWQWIFICILPVPLI | 180 |
| | | P + I++++P K G +M ++ P+ GPTYGG + SW+ IF +LP+ LI | |
| Sbjct: | 121 | PLLITEIMQQIPQKKQGSYMELVEWLLLWQPSLGPTYGGVITQDLSWRLIFWFVLPIGLI | 180 |
| Query: | 181 | AGILAYYYLEDSPVSEKVPFDWLAFIALSISLTSALLAITSLE-NGSVNLYYLGLFILSF | 239 |
| | | A ++ ++E K+PF W FI+L ++L S +A+ + G ++ + G +++ | |
| Sbjct: | 181 | AWLIGLSFIEQKSSPSKIPFAWKQFISLILALLSITVAVNNAGIYGWTSIKFYGFLLIAV | 240 |
| Query: | 240 | IL---FLYKNLTAKQPFLDIRILKIPSLTFGLIPFFVFQLINLGINFLTPNFIVMEKIAN | 296 |
| | | IL F+ + ++Q + I I K L+ +F+ Q I L + FL PN+ + | |
| Sbjct: | 241 | ILLIVFIKLSTNSRQALISISIFKKWEFVCPLLIYFLIQFIQLSLTFLLPNYAQLILKKG | 300 |
| Query: | 297 | SSQAGMVLLPGTLLGALLAPAFGKLYDQKGARLSLYLGNALFSLSLIIMTLQTRHFMLLP | 356 |
| | | +G++LL G+L+ A+L P G++ D ++ L +G S I T+ R+ + | |
| Sbjct: | 301 | VMISGIMLLCGSLISAILQPLTGRMLDSFSVKIPLVIGAFFLITSTISFTIFQRYLSVFL | 360 |
| Query: | 357 | FTLLYILFTFGRNMGFNNSLATAIRELPAEKNADATAIFQMMQQFAGALGTAMAS-LIAN | 415 |
| | | LY+++ G + FNNSL A+++LP + +D A+F +QQ+AG+LGT++AS L+AN | |
| Sbjct: | 361 | IAALYVIYMIGFSFVFNNSLTYALQKLPLKLISDGNAVFNTLQQYAGSLGTSVASALLAN | 420 |
| Query: | 416 | SQAEFTSGVQSVYLLFTIFALLDFI | 440 |
| | | T G QS Y +L+FI | |
| Sbjct: | 421 | GIG--TDGKQSNYTGSRHIFILNFI | 443 |

[0444] An alignment of the GAS and GBS proteins is shown below:

| Identities = 91/369 (24%), Positives = 160/369 (42%), Gaps = 14/369 (3%) | | | |
|---|---|---|---|
| Query: | 82 | FIGLCLNIIGSLLIVLANGAVLFIMGRIFQGLAAAFIMPSTMALVKTYYDGKDRQRAVSF | 141 |
| | | F+ L G++L VL + ++ RIFQG+ +MP ++ + F | |
| Sbjct: | 83 | FMATGLFTFGTILAVLTQSFAIMLLARIFQGIGTGLVMPQMFNIILERVPMHKVGLFMGF | 142 |
| Query: | 142 | WSIGSWGGSGLCSYFGGAVASTLGWRYVFIFSIIASVVSFLLILGTPESKNVGQKTHFDY | 201 |
| | | + +GG + S W+++FI + +++ +L E V +K FD+ | |
| Sbjct: | 143 | AGLIISLAPAFGPTYGGFMISHFSWQWIFICILPVPLIAGILAYYYLEDSPVSEKVPFDW | 202 |
| Query: | 202 | LGLIIFIISMLSLNIGISMAQEHGLMNVIPLSLFTVMLIGFVLFYYVETRKSNSFIDFHL | 261 |
| | | L I IS+ S + I+ + E+G +N+ L LF ++ F+LF Y F+D + | |
| Sbjct: | 203 | LAFIALSISLTSALLAIT-SLENGSVNLYYLGLF---ILSFILFLYKNLTAKQPFLDIRI | 258 |
| Query: | 262 | FENRFYLGATISNFLLNAV-AGTLIVINTYMQQGRQLTPKVAGEMSL-GYLVCVLIAIRV | 319 |
| | | + I F+ + G + ++ + AG + L G L+ L+A | |
| Sbjct: | 259 | LKIPSLTFGLIPFFVFQLINLGINFLTPNFIVMEKIANSSQAGMVLLPGTLLGALLAPAF | 318 |
| Query: | 320 | GEKILQRFGARKPMLLGAMSTFVGIFLMTLVNIQGPLYLVLVF-VGYALFGTGLGIYATP | 378 |
| | | G K+ + GAR + LG + + +MTL Q +++L F + Y LF G + | |
| Sbjct: | 319 | G-KLYDQKGARLSLYLGNALFSLSLIIMTL---QTRHFMLLPFTLLYILFTFGRNMGFNN | 374 |
| Query: | 379 | STDTAISSIPNEKVGSASGIYKMASSLGGAIGVATSIAIYHAFSGNADFHKAALCGLILN | 438 |
| | | S TAI +P EK A+ I++M GA+G A + I ++ A+F +L | |
| Sbjct: | 375 | SLATAIRELPAEKNADATAIFQMMQQFAGALGTAMASLIANS---QAEFTSGVQSVYLLF | 431 |
| Query: | 439 | LVFCSLSIL | 447 |
| | | +F L + | |
| Sbjct: | 432 | TIFALLDFI | 440 |

[0445] Based on this analysis, it was predicted that these proteins and their epitopes could be useful antigens for vaccines or diagnostics.

### EXAMPLE 18

[0446] A DNA sequence (GBSx0015) was identified in S. agalactiae <SEQ ID 47> which encodes the amino acid sequence <SEQ ID 48>. This protein is predicted to be transposase. Analysis of this protein sequence reveals the following:

```
Possible site: 45
>>> Seems to have no N-terminal signal sequence
----- Final Results -----
                            bacterial cytoplasm --- Certainty = 0.3116(Affirmative) < succ>
                              bacterial membrane --- Certainty = 0.0000(Not Clear) < succ>
                                bacterial outside --- Certainty = 0.0000(Not Clear) < succ>
```

[0447] The protein has no significant homology with any sequences in the GENPEPT database.

[0448] No corresponding DNA sequence was identified in S. pyogenes.

[0449] Based on this analysis, it was predicted that this protein and its epitopes, could be useful antigens for vaccines or diagnostics.

### EXAMPLE 19

[0450] A DNA sequence (GBSx0016) was identified in S. agalactiae <SEQ ID 49> which encodes the amino acid sequence <SEQ ID 50>. This protein is predicted to be L11 protein (rplK). Analysis of this protein sequence reveals the following:

```
Possible site: 21
>>> Seems to have no N-terminal signal sequence
----- Final Results -----
                            bacterial cytoplasm --- Certainty = 0.1859(Affirmative) < succ>
                              bacterial membrane --- Certainty = 0.0000(Not Clear) < succ>
                                bacterial outside --- Certainty = 0.0000(Not Clear) < succ>
```

[0451] The protein has homology with the following sequences in the GENPEPT database:

| >GP: CAA53739 GB: X76134 L11 protein [Staphylococcus carnosus] | | | |
|---|---|---|---|
| Identities = 117/139 (84%), Positives = 129/139 (92%) | | | |
| Query: | 1 | MAKKVEKLVKLQIPAGKATPAPPVGPALGQAGINIMGFTKEFNARTADQAGMIIPVVISV | 60 |
| | | MAKKVEK+VKLQIPAGKA PAPPVGPALGQAG+NIMGF KEFNART +QAG+IIPV ISV | |
| Sbjct: | 1 | MAKKVEKVVKLQIPAGKANPAPPVGPALGQAGVNIMGFCKEFNARTQEQAGLIIPVEISV | 60 |
| Query: | 61 | YEDKSFDFITKTPPAAVLLKKAAGVEKGSGEPNKTKVATITRAQVQEIAETKMPDLNAAN | 120 |
| | | YED+SF FITKTPPA VLLKKAAGVEKGSGEPNK KVAT+T+ QV+EIA+TKMPDLNAA+ | |
| Sbjct: | 61 | YEDRSFTFITKTPPAPVLLKKAAGVEKGSGEPNKNKVATVTKDQVREIAQTKMPDLNAAD | 120 |
| Query: | 121 | LESAMRMIEGTARSMGFTV | 139 |
| | | E+AMR+IEGTARSMG TV | |
| Sbjct: | 121 | EEAAMRIIEGTARSMGITV | 139 |

[0452] A related DNA sequence was identified in S. pyogenes <SEQ ID 51> which encodes the amino acid sequence <SEQ ID 52>. Analysis of this protein sequence reveals the following:

```
Possible site: 45
>>> Seems to have no N-terminal signal sequence
----- Final Results -----
                            bacterial cytoplasm --- Certainty = 0.4276(Affirmative) < succ>
                              bacterial membrane --- Certainty = 0.0000(Not Clear) < succ>
                                bacterial outside --- Certainty = 0.0000(Not Clear) < succ>
```

[0453] An alignment of the GAS and GBS proteins is shown below:

| Identities = 136/141 (96%), Positives = 139/141 (98%) | | | |
|---|---|---|---|
| Query: | 1 | MAKKVEKLVKLQIPAGKATPAPPVGPALGQAGINIMGFTKEFNARTADQAGMIIPVVISV | 60 |
| | | MAKKVEKLVKLQIPAGKATPAPPVGPALGQAGINIMGFTKEFNARTADQAGMIIPVVISV | |
| Sbjct: | 25 | MAKKVEKLVKLQIPAGKATPAPPVGPALGQAGINIMGFTKEFNARTADQAGMIIPVVISV | 84 |
| Query: | 61 | YEDKSFDFITKTPPAAVLLKKAAGVEKGSGEPNKTKVATITRAQVQEIAETKMPDLNAAN | 120 |
| | | YEDKSFDFITKTPPAAVLLKKAAGVEKGSG PN TKVAT+TRAQVQEIAETKMPDLNAAN | |
| Sbjct: | 85 | YEDKSFDFITKTPPAAVLLKKAAGVEKGSGTPNTTKVATVTRAQVQEIAETKNPDLNAAN | 144 |
| Query: | 121 | LESAMRMIEGTARSMGFTVTD | 141 |
| | | +E+AMRMIEGTARSMGFTVTD | |
| Sbjct: | 145 | IEAAMRMIEGTARSMGFTVTD | 165 |

[0454] Based on this analysis, it was predicted that these proteins and their epitopes could be useful antigens for vaccines or diagnostics.

### EXAMPLE 20

[0455] A DNA sequence (GBSx0017) was identified in S. agalactiae <SEQ ID 53> which encodes the amino acid sequence <SEQ ID 54>. This protein is predicted to be ribosomal protein L1 (rplA). Analysis of this protein sequence reveals the following:

```
Possible site: 30
>>> Seems to have no N-terminal signal sequence
----- Final Results -----
                            bacterial cytoplasm --- Certainty = 0.2285(Affirmative) < succ>
                              bacterial membrane --- Certainty = 0.0000(Not Clear) < succ>
                                bacterial outside --- Certainty = 0.0000(Not Clear) < succ>
```

[0456] The protein has homology with the following sequences in the GENPEPT database:

| >GP: CAB11879 GB: Z99104 ribosomal protein L1 (BL1) [Bacillus subtilis] | | | |
|---|---|---|---|
| Identities = 144/228 (63%), Positives = 177/228 (77%) | | | |
| Query: | 1 | MAKKSKNLRAALEKIDSTKAYSVEEAVALAKETNFAKFDATVEVSYNLNIDVKKADQQIR | 60 |
| | | MAKK K A + +D +KAY V EAVAL K+TN AKFDATVEV++ L +D K QQIR | |
| Sbjct: | 1 | MAKKGKKYVEAAKLVDHSKAYDVSEAVALVKKTNTAKFDATVEVAFRLGVDPSKNHQQIR | 60 |
| Query: | 61 | GAMVLPAGTGKTSRVLVFARGAKAEEAKAAGADFVGEDDLVAKIQGGWLDFDVVIATPDM | 120 |
| | | GA+VLP GTGKT RVLVFA+G KA+EA+AAGADFVG+ D + KIQ GW DFDV++ATPDM | |
| Sbjct: | 61 | GAVVLPNGTGKTQRVLVFAKGEKAKEAEAAGADFVGDTDYINKIQQGWFDFDVIVATPDM | 120 |
| Query: | 121 | MALVGRLGRVLGPRNLMPNPKTGTVTMDVAKAVEESKGGKITYRADKAGNVQALIGKVSF | 180 |
| | | M VG++GRVLGP+ LMPNPKTGTVT +V KA+ E K GK+ YR DKAGN+ IGKVSF | |
| Sbjct: | 121 | MGEVGKIGRVLGPKGLMPNPKTGTVTFEVEKAIGEIKAGKVEYRVDKAGNIHVPIGKVSF | 180 |
| Query: | 181 | DDAKLVDNFKAFNDVIVKAKPATAKGTYITNLSITTTQGVGIKVDPNS | 228 |
| | | +D KLV+NF D I+KAKPA AKG Y+ N+++T+T G G+KVD ++ | |
| Sbjct: | 181 | EDEKLVENFTTMYDTILKAKPAAAKGVYVKNVAVTSTMGPGVKVDSST | 228 |

[0457] A related DNA sequence was identified in S. pyogenes <SEQ ID 55> which encodes the amino acid sequence <SEQ ID 56>. Analysis of this protein sequence reveals the following:

```
Possible site: 22
>>> Seems to have no N-terminal signal sequence
----- Final Results -----
                            bacterial cytoplasm --- Certainty = 0.2309(Affirmative) < succ>
                              bacterial membrane --- Certainty = 0.0000(Not Clear) < succ>
                                bacterial outside --- Certainty = 0.0000(Not Clear) < succ>
```

[0458] An alignment of the GAS and GBS proteins is shown below:

| Identities = 208/229 (90%), Positives = 220/229 (95%) | | | |
|---|---|---|---|
| Query: | 1 | MAKKSKNLRAALEKIDSTKAYSVEEAVALAKETNFAKFDATVEVSYNLNIDVKKADQQIR | 60 |
| | | MAKKSK +RAALEK+DSTKAYSVEEAVAL KETNFAKFDA+VEV+YNLNIDV+KADQQIR | |
| Sbjct: | 1 | MAKKSKQMRAALEKVDSTKAYSVEEAVALVKETNFAKFDASVEVAYNLNIDVRKADQQIR | 60 |
| Query: | 61 | GAMVLPAGTGKTSRVLVFARGAKAEEAKAAGADFVGEDDLVAKIQGGWLDFDVVIATPDM | 120 |
| | | GAMVLP GTGKT RVLVFARGAKAEEAKAAGADFVGEDDLVAKI GGWLDFDVVIATPDM | |
| Sbjct: | 61 | GAMVLPNGTGKTQRVLVFARGAKAEEAKAAGADFVGEDDLVAKINGGWLDFDVVIATPDM | 120 |
| Query: | 121 | MALVGRLGRVLGPRNLMPNPKTGTVTMDVAKAVEESKGGKITYRADKAGNVQALIGKVSF | 180 |
| | | MA+VGRLGRVLGPRNLMPNPKTGTVTMDVAKAVEESKGGKITYRADKAGNVQALIGKVSF | |
| Sbjct: | 121 | MAIVGRLGRVLGPRNLMPNPKTGTVTMDVAKAVEESKGGKITYRADKAGNVQALIGKVSF | 180 |
| Query: | 181 | DDAKLVDNFKAFNDVIVKAKPATAKGTYITNLSITTTQGVGIKVDPNSL | 229 |
| | | D KLV+NFKAF+DV+ KAKPATAKGTY+ N+SIT+TQGVGIKVDPNSL | |
| Sbjct: | 181 | DADKLVENFKAFHDVMAKAKPATAKGTYMANVSITSTQGVGIKVDPNSL | 229 |

[0459] Based on this analysis, it was predicted that these proteins and their epitopes could be useful antigens for vaccines or diagnostics.

### EXAMPLE 21

[0460] A DNA sequence (GBSx0018) was identified in S. agalactiae <SEQ ID 57> which encodes the amino acid sequence <SEQ ID 58>. Analysis of this protein sequence reveals the following:

```
Possible site: 25
>>> May be a lipoprotein
----- Final Results -----
                              bacterial membrane --- Certainty = 0.0000(Not Clear) < succ>
                                bacterial outside --- Certainty = 0.0000(Not Clear) < succ>
                            bacterial cytoplasm --- Certainty = 0.0000(Not Clear) < succ>
```

[0461] A related GBS nucleic acid sequence <SEQ ID 10029> which encodes amino acid sequence <SEQ ID 10030> was also identified.

[0462] The protein has homology with the following sequences in the GENPEPT database:

| >GP: BAB04286 GB: AP001509 nickel transport system (nickel-binding | | | |
|---|---|---|---|
| protein) [Bacillus halodurans] | | | |
| Identities = 209/541 (38%), Positives = 324/541 (59%), Gaps = 14/541 (2%) | | | |
| Query: | 5 | RRNILLSITCLLMVTLTACHSQDS----KSHKLNSDK-LTLAWGEDFGDVNPHRYNPDQF | 59 |
| | | R+ ILL + L+ L C +S + N++K +T +W D G +NPH YNP Q | |
| Sbjct: | 6 | RKLILLFVISLISSILVGCAESESGTVSNEGEENTEKSITFSWPRDIGPMNPHVYNPSQL | 65 |
| Query: | 60 | VIQDMVYEGLVRYGDNGKIEPALAKSWSISQDGKTYTFKLRNA-KYSDGSNFNAANVKRN | 118 |
| | | Q M+YE LV Y + G+++P LA SW+IS+DGK YTFKLR ++SDG+ FNA VK+N | |
| Sbjct: | 66 | FAQSMIYEPLVSYTEGGELQPHLADSWTISEDGKEYTFKLREGVQFSDGTPFNAEIVKKN | 125 |
| Query: | 119 | FDSIFSKSNRGNHNWFNLTNQLENYRALNQSTFEIKLKQAYSATLYDLSMIRPIRFLSDS | 178 |
| | | FD+ S+ H+W + N LE +++ TF++ LK+ Y L DL+++RP+RFL ++ | |
| Sbjct: | 126 | FDTWIEHSSL--HSWLGVMNVLEKTEVVDEFTFKMVLKEPYYPALQDLAVVRPVRFLGEA | 183 |
| Query: | 179 | AFPKGDDTTKKNVKKPIGTGQWVVKSKKQNEYITFKRNENYWGKKPKLKEVTVKVIPDAQ | 238 |
| | | FP DT++ +K+PIGTG W++ KQ+EY F RN NYWG+ PK+ +VTVK+IPDA+ | |
| Sbjct: | 184 | GFPDDGDTSQ-GIKEPIGTGPWMLSDYKQDEYAVFTRNPNYWGESPKIDKVTVKIIPDAE | 242 |
| Query: | 239 | TRALAFESGDVDLIYGNGIIGLDTFAQYTKDKKYVTAISQPMSTRLLLLNAKESIFQDKK | 298 |
| | | TR LAFESG++DLI+G G+I +D F Q + +Y T +S+P+ TR LLLN D + | |
| Sbjct: | 243 | TRVLAFESGELDLIFGEGVISMDAFNQLKESGQYGTDLSEPVGTRSLLLNTSNEKLADLR | 302 |
| Query: | 299 | VRQAMNHAIDKVSIAKNTFRGTEKPADTIFSKSTSHSDAKLNPYSYNVDKANQLLDQAGW | 358 |
| | | VR A++H +K ++ + G E+ AD I S + ++D + P Y+V++AN LD+AGW | |
| Sbjct: | 303 | VRLALHHGFNKQAMVEGVTLGLEEKADNILSTNFPYTDIDVEPIEYDVEQANAYLDEAGW | 362 |
| Query: | 359 | KMGKDK-VREKDGKTLTLRLPYIATKATDKDLVTYFQGEWRKIGINVSLIAMEEDDYWAN | 417 |
| | | ++ K VREK+G+ L L L Y T K + Q EW IG+ + + +E | |
| Sbjct: | 363 | ELPAGKTVREKNGEQLELELIYDKTDPLQKAMAETMQAEWAAIGVKLDITGLELTTQIQR | 422 |
| Query: | 418 | AKKGNFDMMLTYSWGAPWDPHAWMSALTAKADHGHPENIALENLATKTEMDRLIKSALVD | 477 |
| | | + G+FD+ Y++GAP+DPH++++ + A+A G E A NL+ K E+D +++ L | |
| Sbjct: | 423 | RRAGDFDVDFWYNYGAPYDPHSFIN-VVAEAGWGVAE--AHSNLSMKEELDEQVRATLAS | 479 |
| Query: | 478 | PKEENVDRDYKKVLELLHDEAVYIPLTYQSVISVYRKGDFKTMRFAPEENSFPLRYIEKNN | 538 |
| | | E Y +L L +++V++P++Y VY++ + F + P I+ +N | |
| Sbjct: | 480 | TDETERQELYGSILNTLQEQSVFVPISYIKKTVVYQE-NVNEFIFPANRDEHPFNGIDVSN | 539 |

[0463] A related DNA sequence was identified in S. pyogenes <SEQ ID 59> which encodes the amino acid sequence <SEQ ID 60>. Analysis of this protein sequence reveals the following:

```
Possible site: 24
>>> May be a lipoprotein
----- Final Results -----
                              bacterial membrane --- Certainty = 0.0000(Not Clear) < succ>
                                bacterial outside --- Certainty = 0.0000(Not Clear) < succ>
                            bacterial cytoplasm --- Certainty = 0.0000(Not Clear) < succ>
```

[0464] An alignment of the GAS and GBS proteins is shown below:

| Identities = 131/497 (26%), Positives = 220/497 (43%), | | | |
|---|---|---|---|
| Gaps = 55/497 (11%) | | | |
| Query: | 8 | ILLSITCLLMVTLTACHSQDSKSHKLN-----SDKLTLAWGEDFGDVNPHRYNP-DQFVI | 61 |
| | | I L +T L++V AC Q ++ + D+L ++ G PH ++P D++ + | |
| Sbjct: | 13 | ITLFLTGLILV---ACQQQKPQTKERQRKQRPKDELVVSMGAKL----PHEFDPKDRYGV | 65 |
| Query: | 62 | QD---MVYEGLVRYGDNGKIEPALAKSWSISQDGKTYTFKLRNA-KYSDGSNFNAANVKR | 117 |
| | | + + + L++ I+ LAK++ +S+DG T++F L + K+S+G A +VK | |
| Sbjct: | 66 | HNEGNITHSTLLKRSPELDIKGELAKTYHLSEDGLTWSFDLHDDFKFSNGEPVTADDVKF | 125 |
| Query: | 118 | NFDSIFSKSNRGNHNWFNLTNQLENYRALNQSTFEIKLKQAYSATLYDLSMIRPIRFLSD | 177 |
| | | +D + + + ++LT ++N + ++ I L +A+S L+ I PI | |
| Sbjct: | 126 | TYDML-----KADGKAWDLTF-IKNVEVVGKNQVNIHLTEAHSTFTAQLTEI-PI----- | 173 |
| Query: | 178 | SAFPKG--DDTTKKNVKKPIGTGQWVVKSKKQNEYITFKRNENYWGKKPKLKEVTVKVIP | 235 |
| | | PK +D K N PIG+G ++VK K E F RN + GKKP K+ T V+ | |
| Sbjct: | 174 | --VPKKHYNDKYKSN---PIGSGPYMVKEYKAGEQAIFVRNPYWHGKKPYFKKWT-WVLL | 227 |
| Query: | 236 | DAQTRALAFESGDVDLIYGNGIIGLDTFAQYTK----DKKYVTAISQPMSTRLLLLNAKE | 291 |
| | | D T A ESGDVD+IY + D + T+ V +S P + ++ ++ + | |
| Sbjct: | 228 | DENTALAALESGDVDMIYATPELA-DKKVKGTRLLDIPSNDVRGLSLPYVKKGVITDSPD | 286 |
| Query: | 292 | ------SIFQDKKVRQAMNHAIDKVSIAKNTFRGTEKPADTIFSKSTSHSDAKLNPYSYN | 345 |
| | | + D +R+A+ +++ + G KPA +I K T + K | |
| Sbjct: | 287 | GYPVGNDVTSDPAIRKALTIGLNRQKVLDTVLNGYGKPAYSIIDK-TPFWNPKTAIKDNK | 345 |
| Query: | 346 | VDKANQLLDQAGWKMGKDKVREKDGKTLTLRLPYIATKATDKDLVTYFQGEWRKIGINVS | 405 |
| | | V KA QLL +AGWK D R+K L Y +L + + +GI + | |
| Sbjct: | 346 | VAKAKQLLTKAGWKEQADGSRKKGDLDAAFDLYYPTNDQLRANLAVEVAEQAKALGITIK | 405 |
| Query: | 406 | LIAMEEDDYWANAKKGNFDMMLTYSWGAPWDPHAWMSALTAKADHGHPENIALENLATKT | 465 |
| | | L A W + D L Y+ G + S + A G NI N T T | |
| Sbjct: | 406 | LKASN----WDEMATKSHDSALLYAGGRHHAQQFYESHHPSLAGKGW-TNITFYNNPTVT | 460 |
| Query: | 466 | E-MDRLIKSALVDPKEE | 481 |
| | | + +D+ + S+ +D E | |
| Sbjct: | 461 | KYLDKADMTSSDLDKANE | 477 |

[0465] A related GBS gene <SEQ ID 8469> and protein <SEQ ID 8470> were also identified. Analysis of this protein sequence reveals the following:

```
Lipop: Possible site: 22 Crend: 5
McG: Discrim Score: 7.69
GvH: Signal Score (−7.5): −3.34
          Possible site: 25
>>> May be a lipoprotein
ALOM program count: 0 value: 7.21 threshold: 0.0
      PERIPHERAL Likelihood = 7.21 273
modified ALOM score: −1.94
*** Reasoning Step: 3
----- Final Results -----
                              bacterial membrane --- Certainty = 0.0000(Not Clear) < succ>
                                bacterial outside --- Certainty = 0.0000(Not Clear) < succ>
                            bacterial cytoplasm --- Certainty = 0.0000(Not Clear) < succ>
```

[0466] The protein has homology with the following sequences in the databases:

[chemical structure]

[0467] There is also homology to SEQ ID 318. An alignment of the GAS and GBS sequences follows:

| Identities = 44/186 (23%), Positives = 78/186 (41%), Gaps = 27/186 (14%) | | | |
|---|---|---|---|
| Query: | 65 | VITQMV-DGLLENDEYGNLVPSLAKDWKVSKDGLTYTYTLRDGVSWYTADGEEYAPVTAE | 123 |
| | | VI MV +GL+ + G + P+LAK W +S+DG TYT+ LR+ +DG + + | |
| Sbjct: | 57 | VIQDMVYEGLVRYGDNGKIEPALAKSWSISQDGKTYTFKLRNA---KYSDGSNFNAANVK | 113 |
| Query: | 124 | DFVTGLKHAVDDKSDALYVVEDSIKNLKAYQNGEVDFKEVGVKALDDKTVQYTLNKPESY | 183 |
| | | + + + + + + ++N +AL+ T + L ++Y | |
| Sbjct: | 114 | RNFDSIFSKSNRGNHNWFNLTNQLEN---------------YRALNQSTFEIKLK--QAY | 156 |
| Query: | 184 | WNSKTTYSVLFPVNAKFLKS----KGKDFGTTDPSSILVNGAYFLSAFTSKSSMEFHKNE | 239 |
| | | S T Y + +FL KG D + + G + + + + F +NE | |
| Sbjct: | 157 | --SATLYDLSMIRPIRFLSDSAFPKGDDTTKKNVKKPIGTGQWVVKSKKQNEYITFKRNE | 214 |
| Query: | 240 | NYWDAK | 245 |
| | | NYW K | |
| Sbjct: | 215 | NYWGKK | 220 |

[0468] SEQ ID 8470 (GBS186) was expressed in E. coli as a His-fusion product. SDS-PAGE analysis of total cell extract is shown in FIG. 35 (lane 7; MW 60 kDa). It was also expressed in E. coli as a GST-fusion product. SDS-PAGE analysis of total cell extract is shown in FIG. 41 (lane 6; MW 85.7 kDa).

[0469] GBS186-GST was purified as shown in FIG. 202, lane 4.

[0470] Based on this analysis, it was predicted that these proteins and their epitopes could be useful antigens for vaccines or diagnostics.

### EXAMPLE 22

[0471] A DNA sequence (GBSx0019) was identified in S. agalactiae <SEQ ID 61> which encodes the amino acid sequence <SEQ ID 62>. Analysis of this protein sequence reveals the following:

| Possible site: 37 | | | | |
|---|---|---|---|---|
| >>> Seems to have a cleavable N-term signal seq. | | | | |
| | INTEGRAL | Likelihood = −5.95 | Transmembrane | 101-117 (99-123) |
| | INTEGRAL | Likelihood = −4.73 | Transmembrane | 276-292 (275-293) |
| | INTEGRAL | Likelihood = −1.12 | Transmembrane | 232-248 (232-248) |
| | INTEGRAL | Likelihood = −0.96 | Transmembrane | 151-167 (150-169) |

```
----- Final Results -----
                              bacterial membrane --- Certainty = 0.3378(Affirmative) < succ>
                                bacterial outside --- Certainty = 0.0000(Not Clear) < succ>
                            bacterial cytoplasm --- Certainty = 0.0000(Not Clear) < succ>
```

[0472] The protein has homology with the following sequences in the GENPEPT database:

| >GP: BAB04287 GB: AP001509 nickel transport system (permease) | | | |
|---|---|---|---|
| [Bacillus halodurans] | | | |
| Identities = 119/304 (39%), Positives = 174/304 (57%) | | | |
| Query: | 5 | SSIIKKILSAFLALFFISLLTFILIKLSTVNSAENYLRLSKISVSPEALKEAEHYLGLDK | 64 |
| | | S I K+I + + F + F+ I+LS V+ AE YL + I + E L E H GLD+ | |
| Sbjct: | 3 | SYIAKRIFAVIPIVLFAIFIMFVFIRLSPVDPAEAYLTAANIHPTEELLAEKRHEFGLDQ | 62 |
| Query: | 65 | PLWKQYWLWFQKALTGDFGYSYVLRLPVLDLVLQRFLATLFLGTSAFLLIVTISTPLGVW | 124 |
| | | P+ QY K DFG+SYV PV D V R ATL L S+ L V IS PLG | |
| Sbjct: | 63 | PMAVQYVQTIVKVFQLDFGHSYVTNQPVWDEVTARMPATLQLAVSSIFLAVLISIPLGFL | 122 |
| Query: | 125 | AGLHESARSDHLIRFLSFSSVSMPNFWVAYLLMLLFSAKLNLLPVSGGNDLQSLILPSIT | 184 |
| | | + +++++ D R LS+ S+P FW+ YLL+ FS KLNL PV G L+LP++T | |
| Sbjct: | 123 | SAIYKNSLIDRFSRLLSYLGASIPQFWLGYLLIFFFSVKLNLFPVEGRGSWAHLVLPTVT | 182 |
| Query: | 185 | LSFSTVGQYIALIRKAISQENRSLNVENARLRGVKERYIVTHHLLRNALPAIMTALSLTW | 244 |
| | | LS + + Y L+R ++ ++ + V AR RG+KE+ I+ H+L+ A+ ++T L + | |
| Sbjct: | 183 | LSLALIAIYTRLLRASVLEQMQESYVLYARTRGIKEKVIMVKHVLKLAISPVITGLGMNV | 242 |
| Query: | 245 | VYLLTGSIIVEEIFSWNGIGRLFVTSLRTSDLPVIQACMLIFGTLFLANNFMTQCFMNWV | 304 |
| | | LLTG+IIVE++FSW G GR FV ++ D+PVIQ +L+ LF+ N + + | |
| Sbjct: | 243 | GKLLTGTIIVEQVFSWPGFGRYFVDAIFNRDIPVIQCYVLLAACLFIVCNLIVDLVQLAM | 302 |
| Query: | 305 | DPRL | 308 |
| | | DPR+ | |
| Sbjct: | 303 | DPRI | 306 |

[0473] A related DNA sequence was identified in S. pyogenes <SEQ ID 63> which encodes the amino acid sequence <SEQ ID 64>. Analysis of this protein sequence reveals the following:

| Possible site: 40 | | | | |
|---|---|---|---|---|
| >>> Seems to have an uncleavable N-term signal seq | | | | |
| | INTEGRAL | Likelihood = −7.27 | Transmembrane | 290-306 (287-313) |
| | INTEGRAL | Likelihood = −6.37 | Transmembrane | 12-28 (4-33) |
| | INTEGRAL | Likelihood = −5.89 | Transmembrane | 105-121 (100-128) |
| | INTEGRAL | Likelihood = −5.26 | Transmembrane | 145-161 (142-172) |
| | INTEGRAL | Likelihood = −2.39 | Transmembrane | 191-207 (190-208) |

```
----- Final Results -----
                              bacterial membrane --- Certainty = 0.3909(Affirmative) < succ>
                                bacterial outside --- Certainty = 0.0000(Not Clear) < succ>
                            bacterial cytoplasm --- Certainty = 0.0000(Not Clear) < succ>
```

[0474] An alignment of the GAS and GBS proteins is shown below:

| Identities = 102/324 (31%), Positives = 167/324 (51%), Gaps = 28/324 (8%) | | | |
|---|---|---|---|
| Query: | 7 | IIKKILSAFLALFFISLLTFILIKLSTVN---SAENYLRLSKISVSPEALKEAEHYLGLD | 63 |
| | | II KI+ +F +S+LTF+L+K S V+ ++ NY S++P K H+ GLD | |
| Sbjct: | 8 | IIWKIIRCVTLIFGVSVLTFVLLKQSPVDPVMASVNY----DTSLTPAQYKAIAHHYGLD | 63 |
| Query: | 64 | KPLWKQYWLWFQKALTGDFGYSYVLRLPVLDLVLQRFLATLFLGTSAFLLIVTISTPLGV | 123 |
| | | KP QY++W + + GD G S V R PV D++ R A+ L +++L I LG | |
| Sbjct: | 64 | KPALVQYFIWLKNVIQGDLGTSLVYRQPVSDIIRSRAGASFILMGLSWILSGLIGFILGT | 123 |
| Query: | 124 | WAGLHESARSDHLIRFLSFSSVSMPNFWVAYLLMLLFSAKLNLLPVSGGNDL-------- | 175 |
| | | + H+ D ++R+ S+ +S+P FW+ + +L+FS +L P+ + + | |
| Sbjct: | 124 | LSAFHQGKLLDRVVRWFSYLQISVPTFWIGLIFLLIFSVQLGWFPIGISSPIGTLSQDIT | 183 |
| Query: | 176 | -----QSLILPSITLSFSTVGQYIALIRKAISQENRSLNVENARLRGVKERYIVTHHLLR | 230 |
| | | + L+LP TLS + R + S V AR RG + I HH LR | |
| Sbjct: | 184 | LADRVKHLMLPVFTLSILGIANVTLHTRTKMMSVLSSEYVLFARARGETQWQIFKHHCLR | 243 |
| Query: | 231 | NALPAIMTALSLTWVY---LLTGSIIVEEIFSWNGIGRLFVTSLRTSDLPVIQACMLIFG | 287 |
| | | N AI+ A++L + Y L GS++ E++FS+ G+G + SD P++ A ++I G | |
| Sbjct: | 244 | N---AIVPAITLHFSYFGELFGGSVLAEQVFSYPGLGSTLTEAGLKSDTPLLLAIVMI-G | 299 |
| Query: | 288 | TLFL-ANNFMTQCFMNWVDPRLRK | 310 |
| | | TLF+ A N + + ++P+LR+ | |
| Sbjct: | 300 | TLFVFAGNLIADILNSIINPQLRR | 323 |

[0475] Based on this analysis, it was predicted that these proteins and their epitopes could be useful antigens for vaccines or diagnostics.

### EXAMPLE 23

[0476] A DNA sequence (GBSx0020) was identified in S. agalactiae <SEQ ID 65> which encodes the amino acid sequence <SEQ ID 66>. This protein is predicted to be nickel transport system (permease). Analysis of this protein sequence reveals the following:

| Possible site: 14 | | | | |
|---|---|---|---|---|
| >>> Seems to have a cleavable N-term signal seq. | | | | |
| | INTEGRAL | Likelihood = −7.64 | Transmembrane | 57-73 (51-80) |
| | INTEGRAL | Likelihood = −6.85 | Transmembrane | 173-189 (169-194) |
| | INTEGRAL | Likelihood = −5.79 | Transmembrane | 94-110 (86-112) |
| | INTEGRAL | Likelihood = −1.44 | Transmembrane | 221-237 (221-238) |
| | INTEGRAL | Likelihood = −1.33 | Transmembrane | 118-134 (118-134) |

```
----- Final Results -----
                              bacterial membrane --- Certainty = 0.4057(Affirmative) < succ>
                                bacterial outside --- Certainty = 0.0000(Not Clear) < succ>
                            bacterial cytoplasm --- Certainty = 0.0000(Not Clear) < succ>
```

[0477] The protein has homology with the following sequences in the GENPEPT database:

| >GP: BAB04288 GB: AP001509 nickel transport system (permease) | | | |
|---|---|---|---|
| [Bacillus halodurans] | | | |
| Identities = 103/239 (43%), Positives = 157/239 (65%) | | | |
| Query: | 6 | AIFAPILSSFDPQYVDLSQKLLAPNNVHLLGTDQLGRDVLSRLLYGARYSLFLAIIISLL | 65 |
| | | AI AP ++ DP V+L+ KLL P+ + LGTDQLGR LSRLL+GAR SL A +I + | |
| Sbjct: | 29 | AILAPWIAPHDPIQVNLALKLLPPSWEYPLGTDQLGRCNLSRLLFGARVSLGFATLIFIS | 88 |
| Query: | 66 | ELTIGMFVGLIVGWYQGKLENLFLWIANIILAFPSFLLSLATVGILGHGLGNLIFAIVFV | 125 |
| | | L IG+ VG I G+ G ++++ + ++AFP+ +L L VG+ G GL ++ A+V V | |
| Sbjct: | 89 | SLGIGLLVGAIAGYRGGWIDSVLMRFCEGVMAFPNLVLVLGLVGLFGPGLWQVVLALVMV | 148 |
| Query: | 126 | EWVYYAKLMTNLVKSAKKEPYVINAQIMGLSVWHILRKHIFPFVYQPILVMVLMNIGNII | 185 |
| | | +WVYYA++ +++ S K++ ++ A+I G S W I+R+HI P V PI+V+ + +G I | |
| Sbjct: | 149 | QWVYYARMFRSMIVSLKEQNFITAARISGSSPWKIIRRHIIPNVLPPIVVIGTLEMGWAI | 208 |
| Query: | 186 | LMISGFSFLGIGVQPNVTEWGMMLHDARGYFRTATWMMLSPGIAIFLTVFSFNTLGDAI | 244 |
| | | + IS SFLG+G+QP EWG M+H+ + + R+ +ML PGI I L V +FN LG+++ | |
| Sbjct: | 209 | MDISALSFLGLGIQPPTPEWGAMIHEGKSFIRSHPELMLYPGIMILLVVMTFNVLGESL | 267 |

[0478] A related DNA sequence was identified in S. pyogenes <SEQ ID 67> which encodes the amino acid sequence <SEQ ID 68>. Analysis of this protein sequence reveals the following:

| Possible site: 39 | | | | |
|---|---|---|---|---|
| >>> Seems to have an uncleavable N-term signal seq | | | | |
| | INTEGRAL | Likelihood = −7.80 | Transmembrane | 182-198 (180-204) |
| | INTEGRAL | Likelihood = −7.38 | Transmembrane | 77-93 (69-98) |
| | INTEGRAL | Likelihood = −7.06 | Transmembrane | 112-128 (104-132) |
| | INTEGRAL | Likelihood = −6.16 | Transmembrane | 8-24 (7-31) |
| | INTEGRAL | Likelihood = −5.10 | Transmembrane | 239-255 (235-258) |

```
----- Final Results -----
                              bacterial membrane --- Certainty = 0.4121(Affirmative) < succ>
                                bacterial outside --- Certainty = 0.0000(Not Clear) < succ>
                            bacterial cytoplasm --- Certainty = 0.0000(Not Clear) < succ>
```

[0479] An alignment of the GAS and GBS proteins is shown below:

| Identities = 61/246 (24%), Positives = 127/246 (50%), Gaps = 1/246 (0%) | | | |
|---|---|---|---|
| Query: | 2 | LVISAIFAPILSSFDPQYVDLSQKLLAPNNVHLLGTDQLGRDVLSRLLYGARYSLFLAII | 61 |
| | | L++S + + P + + + LAP+ HL GTD LGRD+ R + G +SL + ++ | |
| Sbjct: | 19 | LILSILALNLYFYRTPLETNAALRNLAPSLNHLFGTDGLGRDMFVRTIRGLYFSLQVGLL | 78 |
| Query: | 62 | ISLLELTIGMFVGLIVGWYQGKLENLFLWIANIILAFPSFLLSLATVGILGHGLGNLIFA | 121 |
| | | +L+ + + G++ G ++ + W+ ++ + P + + ++G G +I A | |
| Sbjct: | 79 | GALMGVFLATVFGVLAGLGNSLIDKIIAWLVDLFIGMPHLIFMILISFVVGKGAQGVIIA | 138 |
| Query: | 122 | IVFVEWVYYAKLMTNLVKSAKREPYVINAQIMGLSVWHILRKHIFPFVYQPILVMVLMNI | 181 |
| | | W A+L+ N V K + +V ++ MG + ++I+R HI P + I + ++ | |
| Sbjct: | 139 | TAVTHWPSLARLIRNEVYDLKNKAFVQLSKSMGKTPYYIVRHHILPLIASQIFIGFILLF | 198 |
| Query: | 182 | GNIILMISGFSFLGIGVQPNVTEWGMMLHDARGYFRTAT-WMMLSPGIAIFLTVFSFNTL | 240 |
| | | ++IL + +FLG G+ G++L +A + W+++ PG+ + L V +F+T+ | |
| Sbjct: | 199 | PHVILHEASMTFLGFGLSAEQPSVGIILSEAAKHISLGNWWLVIFPGLYLILVVNAFDTI | 258 |
| Query: | 241 | GDAIDK | 246 |
| | | G+++ K | |
| Sbjct: | 259 | GESLKK | 264 |

[0480] A related GBS gene <SEQ ID 8473> and protein <SEQ ID 8474> were also identified. Analysis of this protein sequence reveals the following:

| Lipop: Possible site: −1 Crend: 0 | | | | |
|---|---|---|---|---|
| McG: Discrim Score: 7.56 | | | | |
| GvH: Signal Score (−7.5): −1.15 | | | | |
| Possible site: 14 | | | | |
| >>> Seems to have a cleavable N-term signal seq. | | | | |
| ALOM program count: 5 value: −7.64 threshold: 0.0 | | | | |
| | INTEGRAL | Likelihood = −7.64 | Transmembrane | 57-73 (51-80) |
| | INTEGRAL | Likelihood = −6.85 | Transmembrane | 173-189 (169-194) |
| | INTEGRAL | Likelihood = −5.79 | Transmembrane | 94-110 (86-112) |
| | INTEGRAL | Likelihood = −1.44 | Transmembrane | 221-237 (221-238) |
| | INTEGRAL | Likelihood = −1.33 | Transmembrane | 118-134 (118-134) |
| | PERIPHERAL | Likelihood = 4.72 | 145 | |

```
modified ALOM score: 2.03
*** Reasoning Step: 3
----- Final Results -----
                              bacterial membrane --- Certainty = 0.4057(Affirmative) < succ>
                                bacterial outside --- Certainty = 0.0000(Not Clear) < succ>
                            bacterial cytoplasm --- Certainty = 0.0000(Not Clear) < succ>
```

[0481] The protein has homology with the following sequences in the databases:

[chemical structure]

[0482] Based on this analysis, it was predicted that these proteins and their epitopes could be useful antigens for vaccines or diagnostics.

### EXAMPLE 24

[0483] A DNA sequence (GBSx0021) was identified in S. agalactiae <SEQ ID 69> which encodes the amino acid sequence <SEQ ID 70>. This protein is predicted to be peptide ABC transporter, ATP-binding protein. Analysis of this protein sequence reveals the following:

| Possible site: 60 | | | | |
|---|---|---|---|---|
| >>> Seems to have no N-terminal signal sequence | | | | |
| | INTEGRAL | Likelihood = −0.32 | Transmembrane | 161-177 (161-177) |

```
----- Final Results -----
                              bacterial membrane --- Certainty = 0.1128(Affirmative) < succ>
                                bacterial outside --- Certainty = 0.0000(Not Clear) < succ>
                            bacterial cytoplasm --- Certainty = 0.0000(Not Clear) < succ>
```

[0484] A related GBS nucleic acid sequence <SEQ ID 10027> which encodes amino acid sequence <SEQ ID 10028> was also identified.

[0485] The protein has homology with the following sequences in the GENPEPT database:

| >GP: AAF73561 GB: AE002315 peptide ABC transporter, ATP-binding | | | |
|---|---|---|---|
| protein [Chlamydia muridarum] | | | |
| Identities = 86/253 (33%), Positives = 154/253 (59%), Gaps = 2/253 (0%) | | | |
| Query: | 1 | METTMEQLEIRKLSLQIGEVPVLRDFSCKIDMGESLTIIGESGSGKTLLAKLLVGHIPQG | 60 |
| | | M T+ ++E ++++ ++ S I +SL ++GE+GSGKT ++K ++G +P | |
| Sbjct: | 1 | MSKTLLKIENLVVAIKESNQRLVNHLSLTIKQRQSLALVGENGSGKTTVSKAILGFLPDN | 60 |
| Query: | 61 | MTVR-GNIFFKGVDLGKLTVKQWQKLRGRDIAYLVQNPMSMFNPFQKIEAHILETILSHE | 119 |
| | | ++ G IF+ G D+ +L+ K++Q +RG+ I+ + QN M P ++ I+ET+ H | |
| Sbjct: | 61 | CCIQSGKIFYSGTDITRLSRKEFQSIRGKKISTIFQNAMGTLTPSMRVGTQIIETLRHHF | 120 |
| Query: | 120 | KCSKRVALSKALEWMKRLNLDDAISLLKKYPFELSGGMLQRIMLATILSLDPQVIILDEP | 179 |
| | | SK A +KA E + ++++ L+ YPFELSGGM QR+ +A L+ +P++II DEP | |
| Sbjct: | 121 | VMSKEEAFAKARELLVSVHIESPDRCLQLYPFELSGGMCQRVSIAIALATNPELIIADEP | 180 |
| Query: | 180 | TSAVDCHNCSTISAILQEL-QNNGKTLITVTHDYQLARDLGGQLLVISEGEVVEQGQTQA | 238 |
| | | ++A+D + + + +L+++ QNN L+ +TH+ L +L ++ +I GE+VEQG | |
| Sbjct: | 181 | STALDSISQAQVLRVLKQIHQNNNTALLLITHNLALVSELCEEMAIIHHGEIVEQGPVHE | 240 |
| Query: | 239 | ILSNPQHNYTKAL | 251 |
| | | +L +P H YT+ L | |
| Sbjct: | 241 | LLRSPSHPYTQKL | 253 |

[0486] A related DNA sequence was identified in S. pyogenes <SEQ ID 71> which encodes the amino acid sequence <SEQ ID 72>. Analysis of this protein sequence reveals the following:

| Possible site: 55 | | | | |
|---|---|---|---|---|
| >>> Seems to have no N-terminal signal sequence | | | | |
| | INTEGRAL | Likelihood = −2.50 | Transmembrane | 168-184 (167-184) |
| | INTEGRAL | Likelihood = −1.70 | Transmembrane | 211-227 (211-227) |

```
----- Final Results -----
                              bacterial membrane --- Certainty = 0.1999(Affirmative) < succ>
                                bacterial outside --- Certainty = 0.0000(Not Clear) < succ>
                            bacterial cytoplasm --- Certainty = 0.0000(Not Clear) < succ>
```

[0487] An alignment of the GAS and GBS proteins is shown below:

| Identities = 87/232 (37%), Positives = 138/232 (58%), Gaps = 3/232 (1%) | | | |
|---|---|---|---|
| Query: | 23 | LRDFSCKIDMGESLTIIGESGSGKTLLAKLLVGHIPQ-GMTVRGNIFFKGVDLGKL-TVK | 80 |
| | | +R+ S ++ GE L +GESGSGK++L K G + G G+I ++G +L L T K | |
| Sbjct: | 28 | IRNVSLELVEGEVLAFVGESGSGKSVLTKTFTGMLESNGRIANGSIVYRGQELTDLKTNK | 87 |
| Query: | 81 | QWQKLRGRDIAYLVQNPMSMFNPFQKIEAHILETILSHEKCSKRVALSKALEWMKRLNLD | 140 |
| | | +W K+RG IA + Q+PM+ +P + I + I E I+ H+K S A AL++M ++ + | |
| Sbjct: | 88 | EWAKIRGSKIATIFQDPMTSLSPIKTIGSQITEVIIKHQKVSHAKAKEMALDYMNKVGIP | 147 |
| Query: | 141 | DAISLLKKYPFELSGGMLQRIMLATILSLDPQVIILDEPTSAVDCHNCSTISAILQELQN | 200 |
| | | +A + YPFE SGGM QRI++A L+ P ++I DEPT+A+D + I +L+ LQ | |
| Sbjct: | 148 | NAKKRFEDYPFEYSGGMRQRIVIAIALACRPDILICDEPTTALDVTIQAQIVELLKSLQR | 207 |
| Query: | 201 | NGK-TLITVTHDYQLARDLGGQLLVISEGEVVEQGQTQAILSNPQHNYTKAL | 251 |
| | | T+I +THD + + ++ V+ GE+VE G + I +P+H YT +L | |
| Sbjct: | 208 | EYHFTIIFITHDLGVVASIADKVAVMYAGEIVEFGTVEEIFYDPRHPYTWSL | 259 |

[0488] Based on this analysis, it was predicted that these proteins and their epitopes could be useful antigens for vaccines or diagnostics.

### EXAMPLE 25

[0489] A DNA sequence (GBSx0022) was identified in S. agalactiae <SEQ ID 73> which encodes the amino acid sequence <SEQ ID 74>. This protein is predicted to be peptide ABC transporter, ATP-binding protein. Analysis of this protein sequence reveals the following:

```
Possible site: 50
>>> Seems to have an uncleavable N-term signal seq
----- Final Results -----
                              bacterial membrane --- Certainty = 0.0000(Not Clear) < succ>
                                bacterial outside --- Certainty = 0.0000(Not Clear) < succ>
                            bacterial cytoplasm --- Certainty = 0.0000(Not Clear) < succ>
```

[0490] A related GBS nucleic acid sequence <SEQ ID 10025> which encodes amino acid sequence <SEQ ID 10026> was also identified.

[0491] The protein has homology with the following sequences in the GENPEPT database:

| >GP: BAB05797 GB: AP001514 oligopeptide ABC transporter (ATP-binding | | | |
|---|---|---|---|
| protein) [Bacillus halodurans] | | | |
| Identities = 82/199 (41%), Positives = 130/199 (65%), Gaps = 2/199 (1%) | | | |
| Query: | 19 | RQEVLKDCHFHLKRGEIIGIMGKSGSGKSSLARLIIGLIDSPTCGSIYFQG-KIYTPKDGK | 77 |
| | | +Q++L F + GE +GI+G+SGSGKS+L RL++G++ P G IYF+G K+ | |
| Sbjct: | 21 | KQKILNHISFECRHGECLGIIGESGSGKSTLGRLLLGIEKPDRGHIYFEGNKVEERSVRS | 80 |
| Query: | 78 | AQIILVFQDALSSVNPYFSIEEILNEAFYGKKTT-FELCQILEAVGLDGTYLKYKARQLS | 136 |
| | | I VFQD SS+NP+F++E + E GKK ++ +L+ VGL +Y K +LS | |
| Sbjct: | 81 | GNISAVFQDYTSSINPFFTVETAIMEPLKGKKAAKSKVDYLLKQVGLHPSYKKKYPHELS | 140 |
| Query: | 137 | GGQLQRVCIARALLLKPKIIIFDESLSGLDPVTQIKMLRLLQKIKRRYELSFIMISHDPK | 196 |
| | | GG++QRVCIARA+ +PK I+ DE++S LD Q ++L LL ++KR Y++S++ I+HD + | |
| Sbjct: | 141 | GGEVQRVCIARAISTEPKCIVLDEAISSLDVSIQTQVLDLLIELKRIYQMSYLFITHDIQ | 200 |
| Query: | 197 | ICQAICNRVFLIKNGYLVE | 215 |
| | | IC+R+ + ++G + E | |
| Sbjct: | 201 | AAAYICDRIMIFRHGQIEE | 219 |

[0492] A related DNA sequence was identified in S. pyogenes <SEQ ID 75> which encodes the amino acid sequence <SEQ ID 76>. Analysis of this protein sequence reveals the following:

```
Possible site: 60
>>> Seems to have no N-terminal signal sequence
----- Final Results -----
                            bacterial cytoplasm --- Certainty = 0.3195(Affirmative) < succ>
                              bacterial membrane --- Certainty = 0.0000(Not Clear) < succ>
                                bacterial outside --- Certainty = 0.0000(Not Clear) < succ>
```

[0493] An alignment of the GAS and GBS proteins is shown below:

| Identities = 91/238 (38%), Positives = 137/238 (57%), Gaps = 21/238 (8%) | | | |
|---|---|---|---|
| Query: | 1 | MKEIFLMLVCNHVGKTFGRQ----EVLKDCHFHLKRGEIIGIMGKSGSGKSSLARLIIGL | 56 |
| | | M E + L +H+ TF ++ E +KD H+ +G+I GI+G SG+GKS+L R+I L | |
| Sbjct: | 1 | MNEAIIQL--DHIDITFRQKKRVIEAVKDVTVHINQGDIYGIVGYSGAGKSTLVRVINLL | 58 |
| Query: | 57 | DSPTCGSI-------YFQGKIYTPKDGKAQ----IILVFQ--DALSSVNPYFSIEEILNE | 103 |
| | | +PT G I + QGKI D Q I ++FQ + ++ ++ L | |
| Sbjct: | 59 | QAPTNGKITVDGDVTFDQGKIQLSADALRQKRRDIGMIFQHFNLMAQKTAKENVAFALRH | 118 |
| Query: | 104 | AFYGK-KTTFELCQILEAVGLDGTYLKYKARQLSGGQLQRVCIARALLLKPKIIIFDESL | 162 |
| | | + K + ++ ++LE VGL Y A QLSGGQ QRV IARAL PKI+I DE+ | |
| Sbjct: | 119 | SSLSKTEKEHKVIELLELVGLSERADNYPA-QLSGGQKQRVAIARALANDPKILISDEAT | 177 |
| Query: | 163 | SGLDPVTQIKMLRLLQKIKRRYELSFIMISHDPKICQAICNRVFLIKNGYLVEDNEFL | 220 |
| | | S LDP T ++L LLQ++ R+ L+ +MI+H+ +I + ICNRV +++NG L+E+ L | |
| Sbjct: | 178 | SALDPKTTKQILALLQELNRKLGLTIVMITHEMQIVKDICNRVAVMQNGVLIEEGSVL | 235 |

[0494] Based on this analysis, it was predicted that these proteins and their epitopes could be useful antigens for vaccines or diagnostics.

### EXAMPLE 26

[0495] A DNA sequence (GBSx0023) was identified in S. agalactiae <SEQ ID 77> which encodes the amino acid sequence <SEQ ID 78>. This protein is predicted to be UMP kinase (pyrH). Analysis of this protein sequence reveals the following:

```
Possible site: 18
>>> Seems to have no N-terminal signal sequence
----- Final Results -----
                            bacterial cytoplasm --- Certainty = 0.1935(Affirmative) < succ>
                              bacterial membrane --- Certainty = 0.0000(Not Clear) < succ>
                                bacterial outside --- Certainty = 0.0000(Not Clear) < succ>
```

[0496] The protein has homology with the following sequences in the GENPEPT database:

| >GP: CAB13524 GB: Z99112 uridylate kinase [Bacillus subtilis] | | | |
|---|---|---|---|
| Identities = 143/238 (60%), Positives = 193/238 (81%) | | | |
| Query: | 2 | EPKYQRILIKLSGEALAGDKGVGIDIPTVQSIAKEIAEVHNSGVQIALVIGGGNLWRGEP | 61 |
| | | +PKY+RI++KLSGEALAG++G GI+ +QSIAK++ E+ V++A+V+GGGN + | |
| Sbjct: | 3 | KPKYKRIVLKLSGEALAGEQGNGINPTVIQSIAKQVKEIAELEVEVAVVVGGGNYGAEKT | 62 |
| Query: | 62 | AAEAGMDRVQADYTGMLGTVMNALVMADSLQQYGVDTRVQTAIPMQTVAEPYVRGRALRH | 121 |
| | | ++ GMDR ADY GML TVMN+L + DSL+ G+ +RVQT+I M+ VAEPY+R +A+RH | |
| Sbjct: | 63 | GSDLGMDRATADYMGMLATVMNSLALQDSLETLGIQSRVQTSIEMRQVAEPYIRRKAIRH | 122 |
| Query: | 122 | LEKNRIVVFGAGIGSPYFSTDTTAALRAAEIEAEAILMAKNGVDGVYNADPKKDANAVKF | 181 |
| | | LEK R+V+F AG G+PYFSTDTTAALRAAEIEA+ ILMAKN VDGVYNADP+KD +AVK+ | |
| Sbjct: | 123 | LEKKRVVIFAAGTGNPYFSTDTTAALRAAEIEADVILMAKNNVDGVYNADPRKDESAVKY | 182 |
| Query: | 182 | DELTHVEVIKRGLKIMDATASTISMDNDIDLVVFNMNETGNIKRVVLGEQIGTTVSNK | 239 |
| | | + L++++V+K GL++MD+TAS++ MDNDI L+VF++ E GNIKR V+GE IGT V K | |
| Sbjct: | 183 | ESLSYLDVLKDGLEVMDSTASSLCMDNDIPLIVFSIMEEGNIKRAVIGESIGTIVRGK | 240 |

[0497] A related DNA sequence was identified in S. pyogenes <SEQ ID 79> which encodes the amino acid sequence <SEQ ID 80>. Analysis of this protein sequence reveals the following:

```
Possible site: 18
>>> Seems to have no N-terminal signal sequence
----- Final Results -----
                            bacterial cytoplasm --- Certainty = 0.1955(Affirmative) < succ>
                              bacterial membrane --- Certainty = 0.0000(Not Clear) < succ>
                                bacterial outside --- Certainty = 0.0000(Not Clear) < succ>
```

[0498] An alignment of the GAS and GBS proteins is shown below:

Identities = 224/242 (92%), Positives = 233/242 (95%)

| | | | |
|---|---|---|---|
| Query: | 1 | MEPKYQRILIKLSGEALAGDKGVGIDIPTVQSIAKEIAEVHNSGVQIALVIGGGNLWRGE | 60 |
| | | +EPKYQRILIKLSGEALAG+KGVGIDIPTVQ+IAKEIAEVH SGVQIALVIGGGNLWRGE | |
| Sbjct: | 1 | VEPKYQRILIKLSGEALAGEKGVGIDIPTVQAIAKEIAEVHVSGVQIALVIGGGNLWRGE | 60 |
| Query: | 61 | PAAEAGMDRVQADYTGMLGTVMNALVMADSLQQYGVDTRVQTAIPMQTVAEPYVRGRALR | 120 |
| | | PAA+AGMDRVQADYTGMLGTVMNALVMADSLQ YGVDTRVQTAIPMQ VAEPY+RGRALR | |
| Sbjct: | 61 | PAADAGMDRVQADYTGMLGTVMNALVMADSLQHYGVDTRVQTAIPMQNVAEPYIRGRALR | 120 |
| Query: | 121 | HLEKNRIVVFGAGIGSPYFSTDTTAALRAAEIEAEAILMAKNGVDGVYNADPKKDANAVK | 180 |
| | | HLEKNRIVVFGAGIGSPYFSTDTTAALRAAEIEA+AILMAKNGVDGVYNADPKKDANAVK | |
| Sbjct: | 121 | HLEKNRIVVFGAGIGSPYFSTDTTAALRAAEIEADAILMAKNGVDGVYNADPKKDANAVK | 180 |
| Query: | 181 | FDELTHVEVIKRGLKIMDATASTISMDNDIDLVVFNMNETGNIKRVVLGEQIGTTVSNKA | 240 |
| | | FDELTH EVIKRGLKIMDATAST+SMDNDIDLVVFNMNE GNI+RVV GE IGTTVSNK | |
| Sbjct: | 181 | FDELTHGEVIKRGLKIMDATASTLSMDNDIDLVVFNMNEAGNIQRVVFGEHIGTTVSNKV | 240 |
| Query: | 241 | SE | 242 |
| | | + | |
| Sbjct: | 241 | CD | 242 |

[0499] Based on this analysis, it was predicted that these proteins and their epitopes could be useful antigens for vaccines or diagnostics.

### EXAMPLE 27

[0500] A DNA sequence (GBSx0024) was identified in S. agalactiae <SEQ ID 81> which encodes the amino acid sequence <SEQ ID 82>. Analysis of this protein sequence reveals the following:

```
Possible site: 22
>>> Seems to have no N-terminal signal sequence
----- Final Results -----
                            bacterial cytoplasm --- Certainty = 0.3712(Affirmative) < succ>
                              bacterial membrane --- Certainty = 0.0000(Not Clear) < succ>
                                bacterial outside --- Certainty = 0.0000(Not Clear) < succ>
```

[0501] The protein has no significant homology with any sequences in the GENPEPT database.

[0502] No corresponding DNA sequence was identified in S. pyogenes.

[0503] Based on this analysis, it was predicted that this protein and its epitopes, could be useful antigens for vaccines or diagnostics.

### EXAMPLE 28

[0504] A DNA sequence (GBSx0025) was identified in S. agalactiae <SEQ ID 83> which encodes the amino acid sequence <SEQ ID 84>. This protein is predicted to be ribosome recycling factor (frr). Analysis of this protein sequence reveals the following:

```
Possible site: 34
>>> Seems to have no N-terminal signal sequence
----- Final Results -----
                            bacterial cytoplasm --- Certainty = 0.3522(Affirmative) < succ>
                              bacterial membrane --- Certainty = 0.0000(Not Clear) < succ>
                                bacterial outside --- Certainty = 0.0000(Not Clear) < succ>
```

[0505] The protein has homology with the following sequences in the GENPEPT database:

| >GP: BAB06143 GB: AP001515 ribosome recycling factor [Bacillus halodurans] | | | |
|---|---|---|---|
| Identities = 112/185 (60%), Positives = 149/185 (80%) | | | |
| Query: | 1 | MTKEIVTKAQERFEQSHQSLSREFAGIRAGRANASLLDRIQVEYYGAPTPLNQLASITVP | 60 |
| | | M+KE++ A++R ++ ++L RE A +RAGRAN ++LDRI VEYYGA TPLNQLA+I+VP | |
| Sbjct: | 1 | MSKEVLNDAEQRMTKATEALGRELAKLRAGRANPAMLDRITVEYYGAETPLNQLATISVP | 60 |
| Query: | 61 | EARVLLISPFDKSSIKDIERAINESDLGINPANDGSVIRLVIPALTEETRRDLAKEVKKV | 120 |
| | | EAR+L+I PFDKSSI DIERAI +SDLG+ P+NDG+VIR+ IP LTEE RRDL K VKK | |
| Sbjct: | 61 | EARLLVIQPFDKSSISDIERAIQKSDLGLTPSNDGTVIRITIPPLTEERRRDLTKLVKKS | 120 |
| Query: | 121 | GENAKIAIRNIRRDAMDEAKKQEKNKEITEDDLKSLEKDIQKATDDAVKHIDEMTANKEK | 180 |
| | | E AK+A+RNIRRDA D+ KK++K+ E+TEDDL+ + +D+QK TD ++ ID+ KEK | |
| Sbjct: | 121 | AEEAKVAVRNIRRDANDDLKKRQKDGELTEDDLRRVTEDVQKLTDKYIEQIDQKAEAKEK | 180 |
| Query: | 181 | ELLEV | 185 |
| | | E++EV | |
| Sbjct: | 181 | EIMEV | 185 |

[0506] A related DNA sequence was identified in S. pyogenes <SEQ ID 85> which encodes the amino acid sequence <SEQ ID 86>. Analysis of this protein sequence reveals the following:

```
Possible site: 21
>>> Seems to have no N-terminal signal sequence
----- Final Results -----
                            bacterial cytoplasm --- Certainty = 0.4462(Affirmative) < succ>
                              bacterial membrane --- Certainty = 0.0000(Not Clear) < succ>
                                bacterial outside --- Certainty = 0.0000(Not Clear) < succ>
```

[0507] An alignment of the GAS and GBS proteins is shown below:

| Identities = 160/185 (86%), Positives = 171/185 (91%) | | | |
|---|---|---|---|
| Query: | 1 | MTKEIVTKAQERFEQSHQSLSREFAGIRAGRANASLLDRIQVEYYGAPTPLNQLASITVP | 60 |
| | | M I+ A+ERF QSHQSLSRE+A IRAGRANASLLDRIQV+YYGAPTPLNQLASITVP | |
| Sbjct: | 1 | MANAIIETAKERFAQSHQSLSREYASIRAGRANASLLDRIQVDYYGAPTPLNQLASITVP | 60 |
| Query: | 61 | EARVLLISPFDKSSIKDIERAINESDLGINPANDGSVIRLVIPALTEETRRDLAKEVKKV | 120 |
| | | EARVLLISPFDKSSIRDIERA+N SDLGI PANDGSVIRLVIPALTEETR++LAKEVKKV | |
| Sbjct: | 61 | EARVLLISPFDKSSIKDIERALNASDLGITPANDGSVIRLVIPALTEETRKELAKEVKKV | 120 |
| Query: | 121 | GENAKIAIRNIRRDAMDEAKKQEKNKEITEDDLKSLEKDIQKATDDAVKHIDEMTANKEK | 180 |
| | | GENAKIAIRNIRRDAMD+AKKQEK KEITED+LK+LEKDIQKATDDA+K ID MTA KEK | |
| Sbjct: | 121 | GENAKIAIRNIRRDAMDDAKKQEKAKEITEDELKTLEKDIQKATDDAIKEIDRMTAEKEK | 180 |
| Query: | 181 | ELLEV | 185 |
| | | ELL V | |
| Sbjct: | 181 | ELLSV | 185 |

[0508] Based on this analysis, it was predicted that these proteins and their epitopes could be useful antigens for vaccines or diagnostics.

### EXAMPLE 29

[0509] A DNA sequence (GBSx0026) was identified in S. agalactiae <SEQ ID 87> which encodes the amino acid sequence <SEQ ID 88>. Analysis of this protein sequence reveals the following:

```
Possible site: 44
>>> Seems to have no N-terminal signal sequence
----- Final Results -----
                            bacterial cytoplasm --- Certainty = 0.1356(Affirmative) < succ>
                              bacterial membrane --- Certainty = 0.0000(Not Clear) < succ>
                                bacterial outside --- Certainty = 0.0000(Not Clear) < succ>
```

[0510] A related GBS nucleic acid sequence <SEQ ID 10023> which encodes amino acid sequence <SEQ ID 10024> was also identified.

[0511] The protein has homology with the following sequences in the GENPEPT database:

| >GP: CAB12943 GB: Z99109 yitL [Bacillus subtilis] | | | |
|---|---|---|---|
| Identities = 107/269 (39%), Positives = 155/269 (56%), Gaps = 6/269 (2%) | | | |
| Query: | 42 | LVTDENKDF-YFIQKDGFTFALSKSEGEHHIGEM--VKGFAYTDMQQKARLTTKETFATR | 98 |
| | | L D DF YF+ T L SE I + V+ F Y D Q++ T K + | |
| Sbjct: | 25 | LSIDHQTDFGYFLTDGEDTILLHNSEMTEDIEDRDEVEVFIYVDQQERLAATMKIPIISA | 84 |
| Query: | 99 | DHYGWGTVTEVRKDLGVFLDTGLPDKQVVVSLDVLPELKELWPKKGDRLYVCLDVDKKDR | 158 |
| | | D YGW V + +D+GVF+D GL K +V+ + LP +++WP+KGD+LY L V + R | |
| Sbjct: | 85 | DEYGWVEVVDKVEDMGVFVDVGL-SKDALVATEHLPPYEDVWPQKGDKLYCMLKVTNRGR | 143 |
| Query: | 159 | LWALPADPEVFQRMATPAYNNMQNQNWPAIVYRLKLSGTFVYLPENNMLGFIHPSERYSE | 218 |
| | | ++A PA ++ + T A ++ N+ VYRL SG+FV + ++ + FIHPSER E | |
| Sbjct: | 144 | MFAKPAPEDIISELFTDASEDLMNKELTGTVYRLIASGSFV-ITDDGIRCFIHPSERKEE | 202 |
| Query: | 219 | PRLGQVLDARVIGFREVDRTLNLSLKPRSFEMLENDAQMILTYLESNGGFMTLNDKSSPE | 278 |
| | | PRLG + RVI +E D ++NLSL PR + + DA+ ILTY+ G M +DKS P+ | |
| Sbjct: | 203 | PRLGSRVTGRVIQVKE-DGSVNLSLLPRKQDAMSVDAECILTYMRMRNGAMPYSDKSQPD | 261 |
| Query: | 279 | EIKATFGISKGQFKKALGGLMKAKKIKQD | 307 |
| | | +I+ F +SK FK+ALG LMK K+ Q+ | |
| Sbjct: | 262 | DIRERFNMSKAAFKRALGHLMKNGKVYQE | 290 |

[0512] A related DNA sequence was identified in S. pyogenes <SEQ ID 89> which encodes the amino acid sequence <SEQ ID 90>. Analysis of this protein sequence reveals the following:

```
Possible site: 51
>>> Seems to have no N-terminal signal sequence
----- Final Results -----
                            bacterial cytoplasm --- Certainty = 0.0811(Affirmative) < succ>
                              bacterial membrane --- Certainty = 0.0000(Not Clear) < succ>
                                bacterial outside --- Certainty = 0.0000(Not Clear) < succ>
```

[0513] An alignment of the GAS and GBS proteins is shown below:

| Identities = 235/284 (82%), Positives = 265/284 (92%) | | | |
|---|---|---|---|
| Query: | 31 | MNTLLATVITGLVTDENKDFYFIQKDGFTFALSKSEGEHHIGEMVKGFAYTDMQQKARLT | 90 |
| | | MN LLATVITGL+ +EN + YFI K+GFTF LSK+EGE IG+MV GFAYTD++QKARLT | |
| Sbjct: | 1 | MNDLLATVITGLIKEENANDYFIHKEGFTFTLSKAEGERQIGDMVTGFAYTDIEQKARLT | 60 |
| Query: | 91 | TKETFATRDHYGWGTVTEVRKDLGVFLDTGLPDKQVVVSLDVLPELKELWPKKGDRLYVC | 150 |
| | | TKE +TR YGWG VTEVR+DLGVF+DTG+P+K++VVSLDVLPE+KELWPKKGD+LY+ | |
| Sbjct: | 61 | TKEIRSTRTSYGWGEVTEVRRDLGVFVDTGIPNKEIVVSLDVLPEMKELWPKKGDKLYIR | 120 |
| Query: | 151 | LDVDKKDRLWALPADPEVFQRMATPAYNNMQNQNWPAIVYRLKLSGTFVYLPENNMLGFI | 210 |
| | | LDVDKKDR+W LPA+PEVFQ+MA+PAYNNMQNQ+WPAIVYRLKL+GTFVYLPENNMLGFI | |
| Sbjct: | 121 | LDVDKKDRIWGLPAEPEVFQKMASPAYNNMQNQHWPAIVYRLKLTGTFVYLPENNMLGFI | 180 |
| Query: | 211 | HPSERYSEPRLGQVLDARVIGFREVDRTLNLSLKPRSFEMLENDAQMILTYLESNGGFMT | 270 |
| | | H SERY+EPRLGQVLDARVIGFREVDRTLNLSLKPRSFEMLENDAQMI+TYLE+NGGFMT | |
| Sbjct: | 181 | HSSERYAEPRLGQVLDARVIGFREVDRTLNLSLKPRSFEMLENDAQMIVTYLEANGGFMT | 240 |
| Query: | 271 | LNDKSSPEEIKATFGISKGQFKKALGGLMKAKKIKQDQLGTELL | 314 |
| | | LNDKSSPEEIKA+FGISKGQFKKALGGLMKAK+IKQD GTEL+ | |
| Sbjct: | 241 | LNDKSSPEEIKASFGISKGQFKKALGGLMKAKRIKQDATGTELI | 284 |

[0514] Based on this analysis, it was predicted that these proteins and their epitopes could be useful antigens for vaccines or diagnostics.

### EXAMPLE 30

[0515] A DNA sequence (GBSx0028) was identified in S. agalactiae <SEQ ID 91> which encodes the amino acid sequence <SEQ ID 92>. This protein is predicted to be peptide methionine sulfoxide reductase (msrA). Analysis of this protein sequence reveals the following:

```
Possible site: 33
>>> Seems to have no N-terminal signal sequence
----- Final Results -----
                            bacterial cytoplasm --- Certainty = 0.0866(Affirmative) < succ>
                              bacterial membrane --- Certainty = 0.0000(Not Clear) < succ>
                                bacterial outside --- Certainty = 0.0000(Not Clear) < succ>
```

[0516] A related GBS nucleic acid sequence <SEQ ID 10021> which encodes amino acid sequence <SEQ ID 10022> was also identified.

[0517] The protein has homology with the following sequences in the GENPEPT database:

| >GP: BAB05167 GB: AP001512 peptide methionine sulfoxide reductase | | | |
|---|---|---|---|
| [Bacillus halodurans] | | | |
| Identities = 102/173 (58%), Positives = 126/173 (71%), Gaps = 2/173 (1%) | | | |
| Query: | 14 | ENDMERAIFAGGCFWCMVQPFEELDGIESVLSGYTGGHVENPTYKEVCSKTTGHTEAVEI | 73 |
| | | E+ A FAGGCFWCMV PFEE GI V+SGYTGGH ENPTYKEVCS+TTGH EAV+I | |
| Sbjct: | 3 | ESKWALATFAGGCFWCMVSPFEEEPGIHQVVSGYTGGHTENPTYKEVCSETTGHYEAVQI | 62 |
| Query: | 74 | IFNPEKISYADLVELYWAQTDPTDAFGQFEDRGDNYRPVIFYENEEQRQIAQKSKDKLQA | 133 |
| | | F+PE Y L+E+YW Q DPTD GQF DRGD+YR IFY +E+Q+Q A SK KL+ | |
| Sbjct: | 63 | SFDPEVFPYEKLLEIYWTQIDPTDPGGQFHDRGDSYRTAIFYHDEQQKQAADASKQKLEE | 122 |
| Query: | 134 | SGRFDRPIVTSIEPADTFYPAEDYHQAFYRTNPARYAL--SSARRHAFLEENW | 184 |
| | | SG+F+ PIVT I PA FYPAE+YHQ +++ NP Y + + R AF++++W | |
| Sbjct: | 123 | SGKFNAPIVTRILPAKPFYPAEEYHQKYHKKNPFHYKMYRHGSGREAFIKQHW | 175 |

[0518] A related DNA sequence was identified in S. pyogenes <SEQ ID 93> which encodes the amino acid sequence <SEQ ID 94>. Analysis of this protein sequence reveals the following:

```
Possible site: 17
>>> Seems to have no N-terminal signal sequence
----- Final Results -----
                            bacterial cytoplasm --- Certainty = 0.0084(Affirmative) < succ>
                              bacterial membrane --- Certainty = 0.0000(Not Clear) < succ>
                                bacterial outside --- Certainty = 0.0000(Not Clear) < succ>
RGD motif: 89-91
```

[0519] The protein has homology with the following sequences in the databases:

| >GP: BAB05167 GB: AP001512 peptide methionine sulfoxide reductase | | | |
|---|---|---|---|
| [Bacillus halodurans] | | | |
| Identities = 98/168 (58%), Positives = 125/168 (74%), Gaps = 4/168 (2%) | | | |
| Query: | 4 | AIFAGGCFWCMVQPFEEQAGILSVRSGYTGGHLPNPSYEQVCAKTTGHTEAVEIIFDPKQ | 63 |
| | | A FAGGCFWCMV PFEE+ GI V SGYTGGH NP+Y++VC++TTGH EAV+I FDP+ | |
| Sbjct: | 9 | ATFAGGCFWCMVSPFEEEPGIHQVVSGYTGGHTENPTYKEVCSETTGHYEAVQISFDPEV | 68 |
| Query: | 64 | IAYKDLVELYWTQTDPTDAFGQFEDRGDNYRPVIYYTTERQKEIAEQSKANLQASGRFDQ | 123 |
| | | Y+ L+E+YWTQ DPTD GQF DRGD+YR I+Y E+QK+ A+ SK L+ SG+F+ | |
| Sbjct: | 69 | FPYEKLLEIYWTQIDPTDPGGQFHDRGDSYRTAIFYHDEQQKQAADASKQKLEESGKFNA | 128 |
| Query: | 124 | PIVTTIEPAEPFYLAEDYHQGFYKKNP---KRYAQSSAIRHQFLEENW | 168 |
| | | PIVT I PA+PFY AE+YHQ ++KKNP K Y S R F++++W | |
| Sbjct: | 129 | PIVTRILPAKPFYPAEEYHQKYHKKNPFHYKMYRHGSG-REAFIKQHW | 175 |

[0520] An alignment of the GAS and GBS proteins is shown below:

| Identities = 130/168 (77%), Positives = 148/168 (87%) | | | |
|---|---|---|---|
| Query: | 17 | MERAIFAGGCFWCMVQPFEELDGIESVLSGYTGGHVENPTYKEVCSKTTGHTEAVEIIFN | 76 |
| | | MERAIFAGGCFWCMVQPFEE GI SV SGYTGGH+ NP+Y++VC+KTTGHTEAVEIIF+ | |
| Sbjct: | 1 | MERAIFAGGCFWCMVQPFEEQAGILSVRSGYTGGHLPNPSYEQVCAKTTGHTEAVEIIFD | 60 |
| Query: | 77 | PEKISYADLVELYWAQTDPTDAFGQFEDRGDNYRPVIFYENEEQRQIAQKSKDKLQASGR | 136 |
| | | P++I+Y DLVELYW QTDPTDAFGQFEDRGDNYRPVI+Y E Q++IA++SK LQASGR | |
| Sbjct: | 61 | PKQIAYKDLVELYWTQTDPTDAFGQFEDRGDNYRPVIYYTTERQKEIAEQSKANLQASGR | 120 |
| Query: | 137 | FDRPIVTSIEPADTFYPAEDYHQAFYRTNPARYALSSARRHAFLEENW | 184 |
| | | FD+PIVT+IEPA+ FY AEDYHQ FY+ NP RYA SSA RH FLEENW | |
| Sbjct: | 121 | FDQPIVTTIEPAEPFYLAEDYHQGFYKKNPKRYAQSSAIRHQFLEENW | 168 |

[0521] Based on this analysis, it was predicted that these proteins and their epitopes could be useful antigens for vaccines or diagnostics.

### EXAMPLE 31

[0522] A DNA sequence (GBSx0029) was identified in S. agalactiae <SEQ ID 95> which encodes the amino acid sequence <SEQ ID 96>. Analysis of this protein sequence reveals the following:

```
Possible site: 55
>>> Seems to have no N-terminal signal sequence
----- Final Results -----
                            bacterial cytoplasm --- Certainty = 0.2727(Affirmative) < succ>
                              bacterial membrane --- Certainty = 0.0000(Not Clear) < succ>
                                bacterial outside --- Certainty = 0.0000(Not Clear) < succ>
```

[0523] The protein has homology with the following sequences in the GENPEPT database:

| >GP: CAB13859 GB: Z99114 yozE [Bacillus subtilis] | | | |
|---|---|---|---|
| Identities = 24/66 (36%), Positives = 42/66 (63%) | | | |
| Query: | 3 | KSFYSWLMTQRNPKSNEPVAILADYAFDETTFPKHSSDFETVSRYLEDEASFSFNLTDFD | 62 |
| | | KSFY +L+ R+PK + ++ A+ A+++ +FPK S+D+ +S YLE A + + FD | |
| Sbjct: | 2 | KSFYHYLLKYRHPKPKDSISEFANQAYEDHSFPKTSTDYHEISSYLELNADYLHTMATFD | 61 |
| Query: | 63 | DIWEDY | 68 |
| | | + W+ Y | |
| Sbjct: | 62 | EAWDQY | 67 |

[0524] A related DNA sequence was identified in S. pyogenes <SEQ ID 97> which encodes the amino acid sequence <SEQ ID 98>. Analysis of this protein sequence reveals the following:

```
Possible site: 57
>>> Seems to have no N-terminal signal sequence
----- Final Results -----
                            bacterial cytoplasm --- Certainty = 0.2571(Affirmative) < succ>
                              bacterial membrane --- Certainty = 0.0000(Not Clear) < succ>
                                bacterial outside --- Certainty = 0.0000(Not Clear) < succ>
```

[0525] An alignment of the GAS and GBS proteins is shown below:

| Identities = 59/71 (83%), Positives = 65/71 (91%) | | | |
|---|---|---|---|
| Query: | 1 | MRKSFYSWLMTQRNPKSNEPVAILADYAFDETTFPKHSSDFETVSRYLEDEASFSFNLTD | 60 |
| | | MRKSFYSWLMTQRNPKSNEPVAILAD FD+TTFPKH++DFE +SRYLED+ASFSFNL | |
| Sbjct: | 3 | MRKSFYSWLMTQRNPKSNEPVAILADLVFDDTTFPKHTNDFELISRYLEDQASFSFNLGQ | 62 |
| Query: | 61 | FDDIWEDYLNH | 71 |
| | | FD+IWEDYL H | |
| Sbjct: | 63 | FDEIWEDYLAH | 73 |

[0526] Based on this analysis, it was predicted that these proteins and their epitopes could be useful antigens for vaccines or diagnostics.

### EXAMPLE 32

[0527] A DNA sequence (GBSx0030) was identified in S. agalactiae <SEQ ID 99> which encodes the amino acid sequence <SEQ ID 100>. This protein is predicted to be antigen, 67 kDa (myosin-crossreactive). Analysis of this protein sequence reveals the following:

| Possible site: 14 | | | | |
|---|---|---|---|---|
| >>> Seems to have no N-terminal signal sequence | | | | |
| | INTEGRAL | Likelihood = −4.57 | Transmembrane | 28-44 (26-45) |

```
----- Final Results -----
                              bacterial membrane --- Certainty = 0.2826(Affirmative) < succ>
                                bacterial outside --- Certainty = 0.0000(Not Clear) < succ>
                            bacterial cytoplasm --- Certainty = 0.0000(Not Clear) < succ>
```

[0528] A related DNA sequence was identified in S. pyogenes <SEQ ID 101> which encodes the amino acid sequence <SEQ ID 102>. Analysis of this protein sequence reveals the following:

| Possible site: 26 | | | | |
|---|---|---|---|---|
| >>> Seems to have an uncleavable N-term signal seq | | | | |
| | INTEGRAL | Likelihood = −4.62 | Transmembrane | 40-56 (38-57) |

```
----- Final Results -----
                              bacterial membrane --- Certainty = 0.2848(Affirmative) < succ>
                                bacterial outside --- Certainty = 0.0000(Not Clear) < succ>
                            bacterial cytoplasm --- Certainty = 0.0000(Not Clear) < succ>
```

[0529] A related sequence was also identified in GAS <SEQ ID 9109> which encodes the amino acid sequence <SEQ ID 9110>. Analysis of this protein sequence reveals the following:

```
Possible cleavage site: 50
>>> Seems to have no N-terminal signal sequence
----- Final Results -----
                              bacterial membrane --- Certainty = 0.285(Affirmative) < succ>
                                bacterial outside --- Certainty = 0.000(Not Clear) < succ>
                            bacterial cytoplasm --- Certainty = 0.000(Not Clear) < succ>
```

[0530] An alignment of the GAS and GBS proteins is shown below:

| Identities = 477/590 (80%), Positives = 542/590 (91%) | | | |
|---|---|---|---|
| Query: | 3 | MRYTNGNFEAFARPRKPEGVDKKSAYIVGSGLAGLAAAVFLIRDGQMDGQRIHIFEELPL | 62 |
| | | M YT+GN+EAFA PRKPEGVD+KSAYIVG+GLAGLAAAVFLIRDG M G+RIH+FEELPL | |
| Sbjct: | 15 | MYYTSGNYEAFATPRKPEGVDQKSAYIVGTGLAGLAAAVFLIRDGHMAGERIHLFEELPL | 74 |
| Query: | 63 | SGGSLDGVKRPDIGFVTRGGREMENHFECMWDMYRSIPSLEVPDASYLDEFYWLDKDDPN | 122 |
| | | +GGSLDG+++P +GFVTRGGREMENHFECMWDMYRSIPSLE+P ASYLDEFYWLDKDDPN | |
| Sbjct: | 75 | AGGSLDGIEKPHLGFVTRGGREMENHFECMWDMYRSIPSLEIPGASYLDEFYWLDKDDPN | 134 |
| Query: | 123 | SSNCRLIHKQGNRLESDGDFTLGTHSKELVKLVMETEESLGAKTIEEVFSKEFFESNFWT | 182 |
| | | SSNCRLIHK+GNR++ DG +TLG SKEL+ L+M+TEESLG +TIEE FS++FF+SNFW | |
| Sbjct: | 135 | SSNCRLIHKRGNRVDDDGQYTLGKQSKELIHLIMKTEESLGDQTIEEFFSEDFFKSNFWV | 194 |
| Query: | 183 | YWGTMFAFEKWHSAIEMRRYAMRFIHHIGGLPDFTSLKFNKYNQYDSMVKPIISYLESHN | 242 |
| | | YW TMFAFEKWHSA+EMRRYAMRFIHHI GLPDFTSLKFNKYNQYDSMVKPII+YLESH+ | |
| Sbjct: | 195 | YWATMFAFEKWHSAVEMRRYAMRFIHHIDGLPDFTSLKFNKYNQYDSMVKPIIAYLESHD | 254 |
| Query: | 243 | VDVQFDSKVTNISVDFKNGQKLAKAIHLTVGGEAKTIDLTPNDFVFVTNGSITESTNYGS | 302 |
| | | VD+QFD+KVT+I V+ G+K+AK IH+TV GEAK I+LTP+D VFVTNGSITES+ YGS | |
| Sbjct: | 255 | VDIQFDTKVTDIQVEQTAGKKVAKTIHMTVSGEAKAIELTPDDLVFVTNGSITESSTYGS | 314 |
| Query: | 303 | HDTVAKPNTDLGGSWNLWENLAAQSDEFGHPKVFYKDIPKESWFVSATATIKDPAIEPYI | 362 |
| | | H VAKP LGGSWNLWENLAAQSD+FGHPKVFY+D+P ESWFVSATATIK PAIEPYI | |
| Sbjct: | 315 | HHEVAKPTKALGGSWNLWENLAAQSDDFGHPKVFYQDLPAESWFVSATATIKHPAIEPYI | 374 |
| Query: | 363 | ERLTHRDLHDGKVNTGGIVTVTDSNWMMSFAIHRQPHFKEQKENETIVWIYGLYSNVEGN | 422 |
| | | ERLTHRDLHDGKVNTGGI+T+TDSNWMMSFAIHRQPHFKEQKENET VWIYGLYSN EGN | |
| Sbjct: | 375 | ERLTHRDLHDGKVNTGGIITITDSNWMMSFAIHRQPHFKEQKENETTVWIYGLYSNSEGN | 434 |
| Query: | 423 | YIKKPIEECTGREITEEWLYHLGVPEMKIHDLSDKQYVSTVPVYMPYITSYFMPRVKGDR | 482 |
| | | Y+ K IEECTG+EITEEWLYHLGVP KI DL+ + Y++TVPVYMPYITSYFMPRVKGDR | |
| Sbjct: | 435 | YVHKKIEECTGQEITEEWLYHLGVPVDKIKDLASQDYINTVPVYMPYITSYFMPRVKGDR | 494 |
| Query: | 483 | PDVIPQGSVNLAFIGNFAESPSRDTVFTTEYSIRTAMEAVYTFLNIERGVPEVFNSAFDI | 542 |
| | | P VIP GSVNLAFIGNFAESPSRDTVFTTEYSIRTAMEAVY+FLN+ERG+PEVFNSA+DI | |
| Sbjct: | 495 | PKVIPDGSVNLAFIGNFAESPSRDTVFTTEYSIRTAMEAVYSFLNVERGIPEVFNSAYDI | 554 |
| Query: | 543 | RVLLQSLYYLNDKKSVEDMDLPIPALMRKVGMKKIRGTYLEELLREAHLL | 592 |
| | | R LL++ YYLNDKK+++DMDLPIPAL+ K+G KKI+ T++EELL++A+L+ | |
| Sbjct: | 555 | RELLKAFYYLNDKKAIKDMDLPIPALIEKIGHKKIKDTFIEELLKDANLM | 604 |

[0531] A related GBS gene <SEQ ID 8475> and protein <SEQ ID 8476> were also identified. Analysis of this protein sequence reveals the following:

| Lipop: Possible site: −1 Crend: 10 | | | | |
|---|---|---|---|---|
| McG: Discrim Score: −19.82 | | | | |
| GvH: Signal Score (−7.5): −1.16 | | | | |
| Possible site: 14 | | | | |
| >>> Seems to have no N-terminal signal sequence | | | | |
| ALOM program count: 1 value: −4.57 threshold: 0.0 | | | | |
| | INTEGRAL | Likelihood = −4.57 | Transmembrane | 26-42 (26-45) |
| | PERIPHERAL | Likelihood = 6.79 | 378 | |

```
modified ALOM score: 1.41
*** Reasoning Step: 3
----- Final Results -----
                              bacterial membrane --- Certainty = 0.2826(Affirmative) < succ>
                                bacterial outside --- Certainty = 0.0000(Not Clear) < succ>
                            bacterial cytoplasm --- Certainty = 0.0000(Not Clear)
```

[0532] SEQ ID 8476 (GBS90) was expressed in E. coli as a His-fusion product. SDS-PAGE analysis of total cell extract is shown in FIG. 18 (lane 6; MW 68.5 kDa).

[0533] The GBS90-His fusion product was purified (FIG. 194, lane 11) and used to immunise mice. The resulting antiserum was used for Western blot (FIG. 256A), FACS (FIG. 256B), and in the in vivo passive protection assay (Table III). These tests confirm that the protein is immunoaccessible on GBS bacteria and that it is an effective protective immunogen.

[0534] Based on this analysis, it was predicted that these proteins and their epitopes could be useful antigens for vaccines or diagnostics.

### EXAMPLE 33

[0535] A DNA sequence (GBSx0031) was identified in S. agalactiae <SEQ ID 103> which encodes the amino acid sequence <SEQ ID 104>. This protein is predicted to be phoh-like protein (phoH). Analysis of this protein sequence reveals the following:

```
Possible site: 38
>>> Seems to have no N-terminal signal sequence
----- Final Results -----
                            bacterial cytoplasm --- Certainty = 0.2339(Affirmative) < succ>
                              bacterial membrane --- Certainty = 0.0000(Not Clear) < succ>
                                bacterial outside --- Certainty = 0.0000(Not Clear) < succ>
```

[0536] The protein has homology with the following sequences in the GENPEPT database:

| >GP: CAB14476 GB: Z99117 phosphate starvation-induced protein | | | |
|---|---|---|---|
| [Bacillus subtilis] | | | |
| Identities = 191/305 (62%), Positives = 241/305 (78%), Gaps = 1/305 (0%) | | | |
| Query: | 27 | LQHPDDMMSLFGSNERHLKLIEENLDVIIHARTERVQVLGDSEEAVETARLTIEALLVLV | 86 |
| | | L++PD+ +SLFG+ + LKL+E++L++ I R E + V GD +E+ + A + +LL L+ | |
| Sbjct: | 12 | LKNPDEALSLFGNQDSFLKLMEKDLNLNIITRGETIYVSGD-DESFQIADRLLGSLLALI | 70 |
| Query: | 87 | NRGMTVNTSDVVTALSMAQNGSIDKFVALYEEEIIKDSYGKPIRVKTLGQKIYVDSVKNH | 146 |
| | | +G+ ++ DV+ A+ MA+ ++ F ++YEEEI K++ GK IRVKT+GQ+ YV ++K + | |
| Sbjct: | 71 | RKGIEISERDVIYAIKMAKKNELEYFESMYEEEITKNAKGKSIRVKTMGQREYVAAMKRN | 130 |
| Query: | 147 | DVVFGIGPAGTGKTFLAVTLAVTALKRGQVKRIILTRPAVEAGESLGFLPGDLKEKVDPY | 206 |
| | | D+VFGIGPAGTGKT+LAV AV ALK G +K+IILTRPAVEAGESLGFLPGDLKEKVDPY | |
| Sbjct: | 131 | DLVFGIGPAGTGKTYLAVVKAVHALKNGHIKKIILTRPAVEAGESLGFLPGDLKEKVDPY | 190 |
| Query: | 207 | LRPVYDALYQILGKEQTSRLMEREIIEIAPLAYMRGRTLDDAFVILDEAQNTTIMQMKMF | 266 |
| | | LRP+YDAL+ +LG + T RLMER IIEIAPLAYMRGRTLDDA+VILDEAQNTT QMKMF | |
| Sbjct: | 191 | LRPLYDALHDVLGADHTERLMERGIIEIAPLAYMRGRTLDDAYVILDEAQNTTPAQMKMF | 250 |
| Query: | 267 | LTRLGFNSKMIVNGDVSQIDLPKNVKSGLIDAVEKLRNIKKIDFIHLSAKDVVRHPVVAE | 326 |
| | | LTRLGF+SKMI+ GDVSQIDLPK VKSGL A E L+ I I I L DVVRHP+VA+ | |
| Sbjct: | 251 | LTRLGFSSKMIITGDVSQIDLPKGVKSGLAVAKEMLKGIDGISMIELDQTDVVRHPLVAK | 310 |
| Query: | 327 | IINAY | 331 |
| | | II AY | |
| Sbjct: | 311 | IIEAY | 315 |

[0537] A related DNA sequence was identified in S. pyogenes <SEQ ID 105> which encodes the amino acid sequence <SEQ ID 106>. Analysis of this protein sequence reveals the following:

| Possible site: 42 | | | | |
|---|---|---|---|---|
| >>> Seems to have no N-terminal signal sequence | | | | |
| | INTEGRAL | Likelihood = −0.85 | Transmembrane | 54-70 (54-70) |

```
----- Final Results -----
                              bacterial membrane --- Certainty = 0.1341(Affirmative) < succ>
                                bacterial outside --- Certainty = 0.0000(Not Clear) < succ>
                            bacterial cytoplasm --- Certainty = 0.0000(Not Clear) < succ>
```

[0538] An alignment of the GAS and GBS proteins is shown below:

| Identities = 274/322 (85%), Positives = 298/322 (92%) | | | |
|---|---|---|---|
| Query: | 18 | LQEYSIEITLQHPDDMMSLFGSNERHLKLIEENLDVIIHARTERVQVLGDSEEAVETARL | 77 |
| | | LQEYSI+ITL HPDD+++LFGSNERHLKLIE +L VI+HARTERVQV+GD EEAVE ARL | |
| Sbjct: | 1 | LQEYSIDITLTHPDDVLALFGSNERHLKLIEAHLGVIVHARTERVQVIGDDEEAVELARL | 60 |
| Query: | 78 | TIEALLVLVNRGMTVNTSDVVTALSMAQNGSIDKFVALYEEEIIKDSYGKPIRVKTLGQK | 137 |
| | | TI+ALLVLV RGM VNTSDVVTALSMA++ ID+F+ALYEEEIIKD+YGK IRVKTLGQK | |
| Sbjct: | 61 | TIKALLVLVGRGMVVNTSDVVTALSMAESHQIDQFMALYEEEIIKDNYGKAIRVKTLGQK | 120 |
| Query: | 138 | IYVDSVKNHDVVFGIGPAGTGKTFLAVTLAVTALKRGQVKRIILTRPAVEAGESLGFLPG | 197 |
| | | YVDSVK HDVVFG+GPAGTGKTFLAVTLAVTALKRGQVKRIILTRPAVEAGESLGFLPG | |
| Sbjct: | 121 | TYVDSVKRHDVVFGVGPAGTGKTFLAVTLAVTALKRGQVKRIILTRPAVEAGESLGFLPG | 180 |
| Query: | 198 | DLKEKVDPYLRPVYDALYQILGKEQTSRLMEREIIEIAPLAYMRGRTLDDAFVILDEAQN | 257 |
| | | DLKEKVDPYLRPVYDALY ILGKEQT+RLMER++IEIAPLAYMRGRTLDDAFVILDEAQN | |
| Sbjct: | 181 | DLKEKVDPYLRPVYDALYHILGKEQTTRLMERDVIEIAPLAYMRGRTLDDAFVILDEAQN | 240 |
| Query: | 258 | TTIMQMKMFLTRLGFNSKMIVNGDVSQIDLPKNVKSGLIDAVEKLRNIKKIDFIHLSAKD | 317 |
| | | TTIMQMKMFLTRLGFNSKMIVNGD SQIDLP+NVKSGLIDA +KL+ IK+IDF++ SAKD | |
| Sbjct: | 241 | TTIMQMKMFLTRLGFNSKMIVNGDTSQIDLPRNVKSGLIDATQKLQGIKQIDFVYFSAKD | 300 |
| Query: | 318 | VVRHPVVAEIINAYSDSESSHK | 339 |
| | | VVRHPVVA+II AY S K | |
| Sbjct: | 301 | VVRHPVVADIIKAYETSSEEMMK | 322 |

[0539] Based on this analysis, it was predicted that these proteins and their epitopes could be useful antigens for vaccines or diagnostics.

### EXAMPLE 34

[0540] A DNA sequence (GBSx0032) was identified in S. agalactiae <SEQ ID 107> which encodes the amino acid sequence <SEQ ID 108>. Analysis of this protein sequence reveals the following:

```
Possible site: 30
>>> Seems to have no N-terminal signal sequence
----- Final Results -----
                            bacterial cytoplasm --- Certainty = 0.0275(Affirmative) < succ>
                              bacterial membrane --- Certainty = 0.0000(Not Clear) < succ>
                                bacterial outside --- Certainty = 0.0000(Not Clear) < succ>
```

[0541] The protein has no significant homology with any sequences in the GENPEPT database.

[0542] No corresponding DNA sequence was identified in S. pyogenes.

[0543] Based on this analysis, it was predicted that this protein and its epitopes, could be useful antigens for vaccines or diagnostics.

### EXAMPLE 35

[0544] A DNA sequence (GBSx0033) was identified in S. agalactiae <SEQ ID 109> which encodes the amino acid sequence <SEQ ID 110>. This protein is predicted to be MutT/nudix family protein. Analysis of this protein sequence reveals the following:

```
Possible site: 46
>>> Seems to have no N-terminal signal sequence
----- Final Results -----
                            bacterial cytoplasm --- Certainty = 0.2383(Affirmative) < succ>
                              bacterial membrane --- Certainty = 0.0000(Not Clear) < succ>
                                bacterial outside --- Certainty = 0.0000(Not Clear) < succ>
```

[0545] The protein has homology with the following sequences in the GENPEPT database:

| >Gp: AAF09597 GB: AE001864 MutT/nudix family | | | |
|---|---|---|---|
| protein [Deinococcus radiodurans] | | | |
| Identities = 49/136 (36%), Positives = 69/136 (50%), Gaps = 8/136 (5%) | | | |
| Query: | 5 | YISYIRSKVGHETIFLTYSGGILTDGKGRVLLQLRADKNSWGIIGGCMELGESSVDTLKR | 64 |
| | | Y+S +R+ GH + +L D GRVLLQ R D WGI+GG +E GE + R | |
| Sbjct: | 6 | YLSELRAVWGHRALPAAGVSVLLQDETGRVLLQRRGDDGQWGILGGGLEPGEDFLIAAHR | 65 |
| Query: | 65 | EFFEETGLRVEPIRLLNVY------TNFQDSYPNGDKAQTVGFIYEVSCPKPVNIEGFHN | 118 |
| | | E EETGLR +R L + F YPNGD+ VG E + P + + | |
| Sbjct: | 66 | ELLEETGLRCPNLRPLPLSEGLVSGPQFWHRYPNGDEVYLVGLRTEGTVPAAALTDACPD | 125 |
| Query: | 119 | E--ETLQLDYFSKEDV | 132 |
| | | + ETL+L +F+ +D+ | |
| Sbjct: | 126 | DGGETLELRWFALDDL | 141 |

[0546] A related DNA sequence was identified in S. pyogenes <SEQ ID 111> which encodes the amino acid sequence <SEQ ID 112>. Analysis of this protein sequence reveals the following:

```
Possible site: 61
>>> Seems to have no N-terminal signal sequence
----- Final Results -----
                            bacterial cytoplasm --- Certainty = 0.4375(Affirmative) < succ>
                              bacterial membrane --- Certainty = 0.0000(Not Clear) < succ>
                                bacterial outside --- Certainty = 0.0000(Not Clear) < succ>
```

[0547] An alignment of the GAS and GBS proteins is shown below:

Identities = 93/157 (59%), Positives = 123/157 (78%)

| | | | |
|---|---|---|---|
| Query: | 1 | MKQDYISYIRSKVGHETIFLTYSGGILTDGKGRVLLQLRADKNSWGIIGGCMELGESSVD | 60 |
| | | M QDYISYIRSKVGH+ I L ++GGILT+ G+VL+QLR DK +W I GG MELGESS++ | |
| Sbjct: | 16 | MPQDYISYIRSKVGHDKIILNFAGGILTNDDGKVLMQLRGDKKTWTIPGGTMELGESSLE | 75 |
| Query: | 61 | TLKREFFEETGLRVEPIRLLNVYTNFQDSYPNGDKAQTVGFIYEVSCPKPVNIEGFHNEE | 120 |
| | | T KREF EETG+ VE +RLLNVYT+F++ YPNGD QT+ FIYE++ + I+ FHNEE | |
| Sbjct: | 76 | TCKREFLEETGIEVEAVRLLNVYTHFEEVYPNGDAVQTIVFIYELTAVSDMAIDNFHNEE | 135 |
| Query: | 121 | TLQLDYFSKEDVKNITIVNEQHQLILDEYFSQTFQMG | 157 |
| | | TL+L +FS E++ + V+ +H+L+L+EYFS +F MG | |
| Sbjct: | 136 | TLKLQFFSHEEIAELESVSAKHRLMLEEYFSDSFAMG | 172 |

[0548] Based on this analysis, it was predicted that these proteins and their epitopes could be useful antigens for vaccines or diagnostics.

### EXAMPLE 36

[0549] A DNA sequence (GBSx0034) was identified in S. agalactiae <SEQ ID 113> which encodes the amino acid sequence <SEQ ID 114>. Analysis of this protein sequence reveals the following:

Possible site: 13
>>> Seems to have no N-terminal signal sequence
----- Final Results -----
bacterial cytoplasm --- Certainty = 0.3690 (Affirmative) < succ>
bacterial membrane --- Certainty = 0.0000 (Not Clear) < succ>
bacterial outside --- Certainty = 0.0000 (Not Clear) < succ>

[0550] The protein has no significant homology with any sequences in the GENPEPT database.

[0551] No corresponding DNA sequence was identified in S. pyogenes.

[0552] Based on this analysis, it was predicted that this protein and its epitopes, could be useful antigens for vaccines or diagnostics.

### EXAMPLE 37

[0553] A DNA sequence (GBSx0035) was identified in S. agalactiae <SEQ ID 115> which encodes the amino acid sequence <SEQ ID 116>. Analysis of this protein sequence reveals the following:

Possible site: 25
>>> Seems to have a cleavable N-term signal seq.
----- Final Results -----
bacterial outside --- Certainty = 0.3000 (Affirmative) < succ>
bacterial membrane --- Certainty = 0.0000 (Not Clear) < succ>
bacterial cytoplasm --- Certainty = 0.0000 (Not Clear) < succ>

[0554] The protein has homology with the following sequences in the GENPEPT database:

| >GP: AAG05249 GB: AE004612 hypothetical protein [Pseudomonas aeruginosa] | | | |
|---|---|---|---|
| Identities = 70/254 (27%), Positives = 127/254 (49%), Gaps = 2/254 (0%) | | | |
| Query: | 2 | KITLHGVAETLLITLYIRAKDAMAKHPILNDQKSLAIVEQIEYDFDKFDNSEASFYATLA | 61 |
| | | +ITL G +TLLITLY +A D+ IL+D+ + V QI++DF + + + A | |
| Sbjct: | 5 | RITLTGEKQTLLITLYAKALDSRLDDSILHDRFAEEAVRQIDFDFSRVALGKGNERALAM | 64 |
| Query: | 62 | RIRVMDREIKKFIRENPNSQILSIGCGLDTRFERVD-NGQIRWYNLDLPEVMEIRKLFFE | 120 |
| | | R D+ ++F+ +P Q+L++GCGLD+R RVD ++ W++LD PEVM++R+ + | |
| Sbjct: | 65 | RSHYFDQACREFLGRHPEGQVLNLGCGLDSRIYRVDPPAELPWFDLDYPEVMDLRERLYP | 124 |
| Query: | 121 | EHERVTNIAKSALDETWTREVNPQNAPFLIVSEGVLMFLKEDDVETFLHILTNSFSQFMA | 180 |
| | | + ++D+ + P+ P L+++EG++ +L+E V + L + | |
| Sbjct: | 125 | PRAGAYRALRHSVDDDGWLQGVPRERPALVLAEGLMPYLRESQVRRLVERLVDHLGSGEL | 184 |
| Query: | 181 | QFDLCHKEMINKGKQHDTVKYMDTEFQFGITDGHEIVDLDPKLKQINLINFTDEMSKFEL | 240 |
| | | FD + I + + ++ + + I D E+ P L+ I + D +L | |
| Sbjct: | 185 | LFDGYGRLGIMLLRLYPPLRETGAQVHWSIDDPRELERWHPALRFIEEVTDYDPQDVAKL | 244 |
| Query: | 241 | -GTLRSLLPTIRKF | 253 |
| | | + R +LP F | |
| Sbjct: | 245 | PQSSRLMLPIYNGF | 258 |

[0555] No corresponding DNA sequence was identified in S. pyogenes.

[0556] A related GBS gene <SEQ ID 8477> and protein <SEQ ID 8478> were also identified. Analysis of this protein sequence reveals the following:

| Lipop: Possible site: −1 Crend: 9 | | |
|---|---|---|
| McG: Discrim Score: 0.37 | | |
| GvH: Signal Score (−7.5): −0.97 | | |
| Possible site: 25 | | |
| >>> Seems to have a cleavable N-term signal seq. | | |
| ALOM program count: 0 | value: 4.35 | threshold: 0.0 |

| | | |
|---|---|---|
| PERIPHERAL | Likelihood = 4.35 | 143 |

modified ALOM score: −1.37
*** Reasoning Step: 3
----- Final Results -----
bacterial outside --- Certainty = 0.3000 (Affirmative) < succ>
bacterial membrane --- Certainty = 0.0000 (Not Clear) < succ>
bacterial cytoplasm ---Certainty = 0.0000 (Not Clear) < succ>

[0557] The protein has homology with the following sequences in the databases:

[chemical structure]

[0558] SEQ ID 8478 (GBS176) was expressed in E. coli as a His-fusion product. SDS-PAGE analysis of total cell extract is shown in FIG. 36 (lane 5 & 6; MW 30 kDa). It was also expressed in E. coli as a GST-fusion product. SDS-PAGE analysis of total cell extract is shown in FIG. 41 (lane 7; MW 55.4 kDa).

[0559] The GBS176-GST fusion product was purified (FIG. 117A; see also FIG. 202, lane 5) and used to immunise mice (lane 1+2 product; 13.5 μg/mouse). The resulting antiserum was used for Western blot (FIG. 117B), FACS (FIG. 117C), and in the in vivo passive protection assay (Table III). These tests confirm that the protein is immunoaccessible on GBS bacteria and that it is an effective protective immunogen.

[0560] Based on this analysis, it was predicted that these proteins and their epitopes could be useful antigens for vaccines or diagnostics.

### EXAMPLE 38

[0561] A DNA sequence (GBSx0036) was identified in S. agalactiae <SEQ ID 117> which encodes the amino acid sequence <SEQ ID 118>. Analysis of this protein sequence reveals the following:

```
Possible site: 32
>>> Seems to have no N-terminal signal sequence
----- Final Results -----
                            bacterial cytoplasm --- Certainty = 0.3712(Affirmative) < succ>
                              bacterial membrane --- Certainty = 0.0000(Not Clear) < succ>
                                bacterial outside --- Certainty = 0.0000(Not Clear) < succ>
```

[0562] A related GBS nucleic acid sequence <SEQ ID 10019> which encodes amino acid sequence <SEQ ID 10020> was also identified.

[0563] The protein has homology with the following sequences in the GENPEPT database:

| >GP: AAC38046 GB: AF000954 No definition line found [Streptococcus mutans] | | | |
|---|---|---|---|
| Identities = 140/164 (85%), Positives = 157/164 (95%) | | | |
| Query: | 1 | MYVEMIDETGQVSEDIKKQTLDLLEFAAQKTGKENKEMAVTFVTNERSHELNLEYRDTDR | 60 |
| | | MY+EMIDET QVSE IK QTLD+LEFAAQKTGKE+KEMAVTFVTNERSHELNL+YRDT+R | |
| Sbjct: | 1 | MYIEMIDETNQVSEGIKNQTLDILEFAAQKTGKEDKEMAVTFVTNERSHELNLKYRDTNR | 60 |
| Query: | 61 | PTDVISLEYKPEVDISFDEEDLAENPELAEMLEDFDSYIGELFISIDKAKEQAEEYGHSY | 120 |
| | | PTDVISLEYKPE +SFDEEDLA++P+LAE+L +FD+YIGELFIS+DKA+EQA+EYGHS+ | |
| Sbjct: | 61 | PTDVISLEYKPESSLSFDEEDLADDPDLAEVLTEFDAYIGELFISVDKAREQAQEYGHSF | 120 |
| Query: | 121 | EREMGFLAVHGFLHINGYDHYTPEEEKEMFSLQEEILTAYGLKR | 164 |
| | | EREMGFLAVHGFLHINGYDHYTP+EEKEMFSLQEEIL AYGLKR | |
| Sbjct: | 121 | EREMGFLAVHGFLHINGYDHYTPQEEKEMFSLQEEILDAYGLKR | 164 |

[0564] A related DNA sequence was identified in S. pyogenes <SEQ ID 119> which encodes the amino acid sequence <SEQ ID 120>. Analysis of this protein sequence reveals the following:

```
Possible site: 49
>>> Seems to have no N-terminal signal sequence
----- Final Results -----
                            bacterial cytoplasm --- Certainty = 0.1145(Affirmative) < succ>
                              bacterial membrane --- Certainty = 0.0000(Not Clear) < succ>
                                bacterial outside --- Certainty = 0.0000(Not Clear) < succ>
```

[0565] An alignment of the GAS and GBS proteins is shown below:

| Identities = 138/165 (83%), Positives = 153/165 (92%) | | | |
|---|---|---|---|
| Query: | 1 | MYVEMIDETGQVSEDIKKQTLDLLEFAAQKTGKENKEMAVTFVTNERSHELNLEYRDTDR | 60 |
| | | MY+EMIDETGQVS++I +QTLDLL FAAQKTGKE KEM+VTFVTNERSHELNLEYRDTDR | |
| Sbjct: | 18 | MYIEMIDETGQVSQEIMEQTLDLLNFAAQKTGKEEKEMSVTFVTNERSHELNLEYRDTDR | 77 |
| Query: | 61 | PTDVISLEYKPEVDISFDEEDLAENPELAEMLEDFDSYIGELFISIDKAKEQAEEYGHSY | 120 |
| | | PTDVISLEYKPE I F +EDLA +P LAEM+ +FD+YIGELFISIDKA+EQ++EYGHS+ | |
| Sbjct: | 78 | PTDVISLEYKPETPILFSQEDLAADPSLAEMMAEFDAYIGELFISIDKAREQSQEYGHSF | 137 |
| Query: | 121 | EREMGFLAVHGFLHINGYDHYTPEEEKEMFSLQEEILTAYGLKRQ | 165 |
| | | EREMGFLAVHGFLHINGYDHYT EEEKEMF+LQEEILTAYGL RQ | |
| Sbjct: | 138 | EREMGFLAVHGFLHINGYDHYTLEEEKEMFTLQEEILTAYGLTRQ | 182 |

[0566] Based on this analysis, it was predicted that these proteins and their epitopes could be useful antigens for vaccines or diagnostics.

### EXAMPLE 39

[0567] A DNA sequence (GBSx0038) was identified in S. agalactiae <SEQ ID 121> which encodes the amino acid sequence <SEQ ID 122>. This protein is predicted to be phosphoglycerate dehydrogenase (serA) (serA). Analysis of this protein sequence reveals the following:

```
Possible site: 59
>>> Seems to have no N-terminal signal sequence
----- Final Results -----
                            bacterial cytoplasm --- Certainty = 0.2817(Affirmative) < succ>
                              bacterial membrane --- Certainty = 0.0000(Not Clear) < succ>
                                bacterial outside --- Certainty = 0.0000(Not Clear) < succ>
```

[0568] The protein has homology with the following sequences in the GENPEPT database:

| >GP: AAB99020 GB: U67544 phosphoglycerate dehydrogenase (serA) | | | |
|---|---|---|---|
| [Methanococcus jannaschii] | | | |
| Identities = 82/232 (35%), Positives = 132/232 (56%), | | | |
| Gaps = 14/232 (6%) | | | |
| Query: | 3 | ENPDAYIIRSQNLHNQDF---PSNLKAIARAGAGTNNIPIEEASAQGIVVFNTPGANANA | 59 |
| | | ++ D ++RS +D LK I RAG G +NI +E A+ +GI+V N P A++ + | |
| Sbjct: | 40 | KDADVLVVRSGTKVTRDVIEKAEKLKVIGRAGVGVDNIDVEAATEKGIIVVNAPDASSIS | 99 |
| Query: | 60 | VKEAVIAALLLSARDYLGANRWVNTLTGTDIPKQIEAGKKAFAGNEIAGKKLGVIGLGAI | 119 |
| | | V E + +L +AR N T K+ E +K F G E+ GK LGVIGLG I | |
| Sbjct: | 100 | VAELTMGLMLAAAR---------NIPQATASLKRGEWDRKRFKGIELYGKTLGVIGLGRI | 150 |
| Query: | 120 | GARIANDARRLGMTVLGYDPYVSIETAWNISSHVQRVKEIKDIFETCDYITIHVPLTNET | 179 |
| | | G ++ A+ GM ++GYDPY+ E A ++ V+ V +I ++ + D+IT+HVPLT +T | |
| Sbjct: | 151 | GQQVVKRAKAFGMNIIGYDPYIPKEVAESMG--VELVDDINELCKRADFITLHVPLTPKT | 208 |
| Query: | 180 | KHTFDAKAFSIMKKGTTIINFARAELVNNQELFEAIETGVVKRYITDFGDKE | 231 |
| | | +H + ++MKK I+N AR L++ + L+EA++ G ++ D ++E | |
| Sbjct: | 209 | RHIIGREQIALMKKNAIIVNCARGGLIDEKALYEALKEGKIRAAALDVFEEE | 260 |

[0569] A related DNA sequence was identified in S. pyogenes <SEQ ID 123> which encodes the amino acid sequence <SEQ ID 124>. Analysis of this protein sequence reveals the following:

```
Possible site: 52
>>> Seems to have no N-terminal signal sequence
----- Final Results -----
                            bacterial cytoplasm --- Certainty = 0.2384(Affirmative) < succ>
                              bacterial membrane --- Certainty = 0.0000(Not Clear) < succ>
                                bacterial outside --- Certainty = 0.0000(Not Clear) < succ>
```

[0570] An alignment of the GAS and GBS proteins is shown below:

| Identities = 52/198 (26%), Positives = 93/198 (46%), | | | |
|---|---|---|---|
| Gaps = 14/198 (7%) | | | |
| Query: | 24 | LKAIARAGAGTNNIPIEEASAQGIVVFNTPGANANAVKEAVIAALLLSARDYLGANRWVN | 83 |
| | | +K IA+ A + ++ A+ I++ N P + ++ E + +L R | |
| Sbjct: | 70 | IKQIAQHSASVDMYNLDLATENDIIITNVPSYSPESIAEFTVTIVLNLIRHV-------- | 121 |
| Query: | 84 | TLTGTDIPKQIEAGKKAFAGNEIAGKKLGVIGLGAIGARIANDARRLGMTVLGYDPYVSI | 143 |
| | | L ++ KQ G + + +IG G IG A + G V+GYD Y S | |
| Sbjct: | 122 | ELIRENVKKQNFTWGLPIRGRVLGDMTVAIIGTGRIGLATAKIFKGFGCKVVGYDIYQS- | 180 |
| Query: | 144 | ETAWNISSHVQRVKE-IKDIFETCDYITIHVPLTNETKHTFDAKAFSIMKKGTTIINFAR | 202 |
| | | + A + + + V+E IKD D +++H+P T E H F++ F KKG ++N AR | |
| Sbjct: | 181 | DAAKAVLDYKESVEEAIKD----ADLVSLHMPPTAENTHLFNSDLFKSFKKGAILMNMAR | 236 |
| Query: | 203 | AELVNNQELFEAIETGVV | 220 |
| | | ++ Q+L +A++ G++ | |
| Sbjct: | 237 | GAVIETQDLLDALDAGLL | 254 |

[0571] Based on this analysis, it was predicted that these proteins and their epitopes could be useful antigens for vaccines or diagnostics.

### EXAMPLE 40

[0572] A DNA sequence (GBSx0039) was identified in S. agalactiae <SEQ ID 125> which encodes the amino acid sequence <SEQ ID 126>. This protein is predicted to be alpha-glycerophosphate oxidase. Analysis of this protein sequence reveals the following:

```
Possible site: 50
>>> Seems to have no N-terminal signal sequence
----- Final Results -----
                            bacterial cytoplasm --- Certainty = 0.2067(Affirmative) < succ>
                              bacterial membrane --- Certainty = 0.0000(Not Clear) < succ>
                                bacterial outside --- Certainty = 0.0000(Not Clear) < succ>
```

[0573] The protein has homology with the following sequences in the GENPEPT database:

| >GP: AAC34740 GB: U94770 alpha-glycerophosphate oxidase | | | |
|---|---|---|---|
| [Streptococcus pneumoniae] | | | |
| Identities = 24/49 (48%), Positives = 37/49 (74%) | | | |
| Query: | 1 | MLFMRDNLDSLIQPVIDEMAKHYQWSDQDKTFYEEELHETLKDNDLAAL | 49 |
| | | MLFMRD+LDS+++PV+DEM + Y W++++K Y ++ L +NDLA L | |
| Sbjct: | 558 | MLFMRDSLDSIVEPVLDEMGRFYDWTEEEKATYRADVEAALANNDLAEL | 606 |

[0574] A related DNA sequence was identified in S. pyogenes <SEQ ID 127> which encodes the amino acid sequence <SEQ ID 128>. Analysis of this protein sequence reveals the following:

| Possible site: 40 | | | | |
|---|---|---|---|---|
| >>> Seems to have no N-terminal signal sequence | | | | |
| | INTEGRAL | Likelihood = −1.81 | Transmembrane | 20-36 (20-36) |

```
----- Final Results -----
                              bacterial membrane --- Certainty = 0.1723(Affirmative) < succ>
                                bacterial outside --- Certainty = 0.0000(Not Clear) < succ>
                            bacterial cytoplasm --- Certainty = 0.0000(Not Clear) < succ>
```

[0575] The protein has homology with the following sequences in the databases:

| >GP: AAC34740 GB: U94770 alpha-glycerophosphate oxidase | | | |
|---|---|---|---|
| [Streptococcus pneumonia] | | | |
| Identities = 462/607 (76%), Positives = 539/607 (88%) | | | |
| Query: | 1 | MEFSRETRRLALQKMQERDLDLLIIGGGITGAGVALQAAASGLDTGLIEMQDFAQGTSSR | 60 |
| | | MEFS++TR L+++KMQER LDLLIIGGGITGAGVALQAAASGL+TGLIEMQDFA+GTSSR | |
| Sbjct: | 1 | MEFSKKTRELSIKKMQERTLDLLIIGGGITGAGVALQAAASGLETGLIEMQDFAEGTSSR | 60 |
| Query: | 61 | STKLVHGGLRYLKQFDVEVVSDTVSERAVVQQIAPHIPKPDPMLLPVYDEPGSTFSMFRL | 120 |
| | | STKLVHGGLRYLKQFDVEVVSDTVSERAVVQQIAPHIPKPDPMLLPVYDE G+TFS+FRL | |
| Sbjct: | 61 | STKLVHGGLRYLKQFDVEVVSDTVSERAVVQQIAPHIPKPDPMLLPVYDEDGATFSLFRL | 120 |
| Query: | 121 | KVAMDLYDLLAGVSNTPAANKVLTKEEVLKREPDLKQEGLLGGGVYLDFRNNDARLVIEN | 180 |
| | | KVAMDLYDLLAGVSNTP ANKVL+K++VL+R+P+LK+EGL+GGGVYLDFRNNDARLVIEN | |
| Sbjct: | 121 | KVAMDLYDLLAGVSNTPTANKVLSKDQVLERQPNLKKEGLVGGGVYLDFRNNDARLVIEN | 180 |
| Query: | 181 | IKRANRDGALIASHVKAEDFLLDDNGKIIGVKARDLLSDQEIIIKAKLVINTTGPWSDEI | 240 |
| | | IKRAN+DGALIA+HVKAE FL D++GKI GV ARDLL+DQ IKA+LVINTTGPWSD++ | |
| Sbjct: | 181 | IKRANQDGALIANHVKAEGFLFDESGKITGVVARDLLTDQVFEIKARLVINTTGPWSDKV | 240 |
| Query: | 241 | RQFSHKGQPIHQMRPTKGVHLVVDRQKLPVSQPVYVDTGLNDGRMVFVLPREEKTYFGTT | 300 |
| | | R S+KG QMRPTKGVHLVVD K+ VSQPVY DTGL DGRMVFVLPRE KTYFGTT | |
| Sbjct: | 241 | RNLSNKGTQFSQMRPTKGVHLVVDSSKIKVSQPVYFDTGLGDGRMVFVLPRENKTYFGTT | 300 |
| Query: | 301 | DTDYTGDLEHPQVTQEDVDYLLGVVNNRFPNANVTIDDIESSWAGLRPLLSGNSASDYNG | 360 |
| | | DTDYTGDLEHP+VTQEDVDYLLG+VNNRFP +N+TIDDIESSWAGLRPL++GNSASDYNG | |
| Sbjct: | 301 | DTDYTGDLEHPKVTQEDVDYLLGIVNNRFPESNITIDDIESSWAGLRPLIAGNSASDYNG | 360 |
| Query: | 361 | GNSGKVSDDSFDHLVDTVKAYINHEDSREAVEKAIKQVETSTSEKELDPSAVSRGSSFER | 420 |
| | | GN+G +SD+SFD+L+ TV++Y++ E +RE VE A+ ++E+STSEK LDPSAVSRGSS +R | |
| Sbjct: | 361 | GNNGTISDESFDNLIATVESYLSKEKTREDVESAVSKLESSTSEKHLDPSAVSRGSSLDR | 420 |
| Query: | 421 | DENGLFTLAGGKITDYRKMAEGALTGIIQILKEEFGKSFKLINSKTYPVSGGEINPANVD | 480 |
| | | D+NGL TLAGGKITDYRKMAEGA+ ++ ILK EF +SFKLINSKTYPVSGGE+NPANVD | |
| Sbjct: | 421 | DDNGLLTLAGGKITDYRKMAEGAMERVVDILKAEFDRSFKLINSKTYPVSGGELNPANVD | 480 |
| Query: | 481 | SEIEAYAQLGTLSGLSMDDARYLANLYGSNAPKVFALTRQLTAAEGLSLAETLSLHYAMD | 540 |
| | | SEIEA+AQLG GL +A YLANLYGSNAPKVFAL L A GLSLA+TLSLHYAM | |
| Sbjct: | 481 | SEIEAFAQLGVSRGLDSKEAHYLANLYGSNAPKVFALAHSLEQAPGLSLADTLSLHYAMR | 540 |
| Query: | 541 | YEMALKPTDYFLRRTNHLLFMRDSLDALIDPVINEMAKHFEWSDQERVAQEDDLRRVIAD | 600 |
| | | E+AL P D+ LRRTNH+LFMRDSLD++++PV++EM + ++W+++E+ D+ +A+ | |
| Sbjct: | 541 | NELALSPVDFLLRRTNHMLFMRDSLDSIVEPVLDEMGRFYDWTEEEKATYRADVEAALAN | 600 |
| Query: | 601 | NDLSALK | 607 |
| | | NDL+ LK | |
| Sbjct: | 601 | NDLAELK | 607 |

[0576] An alignment of the GAS and GBS proteins is shown below:

| Identities = 29/49 (59%), Positives = 41/49 (83%) | | | |
|---|---|---|---|
| Query: | 1 | MLFMRDNLDSLIQPVIDEMAKHYQWSDQDKTFYEEELHETLKDNDLAAL | 49 |
| | | +LFMRD+LD+LI PVI+EMAKH++WSDQ++ E++L + DNDL+AL | |
| Sbjct: | 558 | LLFMRDSLDALIDPVINEMAKHFEWSDQERVAQEDDLRRVIADNDLSAL | 606 |

[0577] Based on this analysis, it was predicted that these proteins and their epitopes could be useful antigens for vaccines or diagnostics.

### EXAMPLE 41

[0578] A DNA sequence (GBSx0040) was identified in S. agalactiae <SEQ ID 129> which encodes the amino acid sequence <SEQ ID 130>. Analysis of this protein sequence reveals the following:

```
Possible site: 40
>>> Seems to have no N-terminal signal sequence
----- Final Results -----
                            bacterial cytoplasm --- Certainty = 0.1011(Affirmative) < succ>
                              bacterial membrane --- Certainty = 0.0000(Not Clear) < succ>
                                bacterial outside --- Certainty = 0.0000(Not Clear) < succ>
```

[0579] The protein has homology with the following sequences in the GENPEPT database:

| >GP: BAB06309 GB: AP001516 unknown conserved protein [Bacillus halodurans] | | | |
|---|---|---|---|
| Identities = 70/160 (43%), Positives = 106/160 (65%), Gaps = 3/160 (1%) | | | |
| Query: | 5 | TRPTTDKVKGAIFNMIGPFFEGGRVLDLFSGSGSLAIEAISRGMDQAVLVEKDRRAQVVI | 64 |
| | | TRPTTDKVK AIFNMIGPFF+GG LDL+ GSG L IEA+SRG+++ + V++ +RA I | |
| Sbjct: | 21 | TRPTTDKVKEAIFNMIGPFFDGGIGLDLYGGSGGLGIEALSRGVERMIFVDQQKRAIETI | 80 |
| Query: | 65 | QENIAMTKSPEQFQLLKMEANRALEQLTGQ---FDLVLLDPPYAKEEIVKQIQIMDSKGL | 121 |
| | | ++N++ + ++ + +A RAL+ LT + F V LDPPYAK+ I + I+ + GL | |
| Sbjct: | 81 | KQNLSHCGLEGRAEVYRNDAKRALQVLTKRGIVFAYVFLDPPYAKQTIKNDLAILANHGL | 140 |
| Query: | 122 | LGDDIMIACETDKSVDLPEEIASFGIWKQKIYGISKVTVY | 161 |
| | | L + ++ CE D+ LP++I K++ YG + +T+Y | |
| Sbjct: | 141 | LEEGGVVVCEHDRDTMLPDQIEYAVKHKEETYGDTMITIY | 180 |

[0580] A related DNA sequence was identified in S. pyogenes <SEQ ID 131> which encodes the amino acid sequence <SEQ ID 132>. Analysis of this protein sequence reveals the following:

```
Possible site: 58
>>> Seems to have no N-terminal signal sequence
----- Final Results -----
                            bacterial cytoplasm --- Certainty = 0.3814(Affirmative) < succ>
                              bacterial membrane --- Certainty = 0.0000(Not Clear) < succ>
                                bacterial outside --- Certainty = 0.0000(Not Clear) < succ>
```

[0581] An alignment of the GAS and GBS proteins is shown below:

| Identities = 111/160 (69%), Positives = 136/160 (84%) | | | |
|---|---|---|---|
| Query: | 3 | RTTRPTTDKVKGAIFNMIGPFFEGGRVLDLFSGSGSLAIEAISRGMDQAVLVEKDRRAQV | 62 |
| | | + TRPT+DKV+GAIFNMIGP+F GGRVLDLF+GSG LAIEA+SRGM AVLVEK+R+AQ | |
| Sbjct: | 19 | KITRPTSDKVRGAIFNMIGPYFNGGRVLDLFAGSGGLAIEAVSRGMSAAVLVEKNRKAQA | 78 |
| Query: | 63 | VIQENIAMTKSPEQFQLLKMEANRALEQLTGQFDLVLLDPPYAKEEIVKQIQIMDSKGLL | 122 |
| | | +IQ+NI MTK+ +F LLKMEA RA++ LTG+FDLV LDPPYAKE IV I+ + +K LL | |
| Sbjct: | 79 | IIQDNIIMTKAENRFTLLKMEAERAIDCLTGRFDLVFLDPPYAKETIVATIEALAAKNLL | 138 |
| Query: | 123 | GDDIMIACETDKSVDLPEEIASFGIWKQKIYGISKVTVYV | 162 |
| | | + +M+ CETDK+V LP+EIA+ GIWK+KIYGISKVTVYV | |
| Sbjct: | 139 | SEQVMVVCETDKTVLLPKEIATLGIWKEKIYGISKVTVYV | 178 |

[0582] Based on this analysis, it was predicted that these proteins and their epitopes could be useful antigens for vaccines or diagnostics.

### EXAMPLE 42

[0583] A DNA sequence (GBSx0041) was identified in S. agalactiae <SEQ ID 133> which encodes the amino acid sequence <SEQ ID 134>. This protein is predicted to be lipopolysaccharide core biosynthesis protein kdtB (kdtB). Analysis of this protein sequence reveals the following:

```
Possible site: 17
>>> Seems to have no N-terminal signal sequence
----- Final Results -----
                            bacterial cytoplasm --- Certainty = 0.1937(Affirmative) < succ>
                              bacterial membrane --- Certainty = 0.0000(Not Clear) < succ>
                                bacterial outside --- Certainty = 0.0000(Not Clear) < succ>
```

[0584] The protein has homology with the following sequences in the GENPEPT database:

| >GP: BAB13272 GB: AP001119 lipopolysaccharide core biosynthesis | | | |
|---|---|---|---|
| protein kdtB [Buchnera sp. APS] | | | |
| Identities = 56/149 (37%), Positives = 94/149 (62%) | | | |
| Query: | 1 | MTKKALFTGSFDPVTNGHLDIIERASYLFDHVYIGLFYNLEKQGYFSIECRKKMLEEAIR | 60 |
| | | M K A++ G+FDP+T GHLDII RA+ +FD + I + N K+ F+++ R ++ + | |
| Sbjct: | 1 | MNKTAIYPGTFDPITYGHLDIITRATKIFDSITIAISNNFTKKPIFNLKERIELTRKVTL | 60 |
| Query: | 61 | QFKNVSVLVAQDRLAVDLAREVGAKYFVRGLRNSQDFDYEANLEFFNKQLADDIETVYLS | 120 |
| | | KNV ++ + L +LA++ A +RG+R DFDYE L NKQ+ D+++++L | |
| Sbjct: | 61 | HLKNVKKILGFNDLLANLAKKEKANILIRGVRTIFDFDYEIKLAAINKQIYPDLDSIFLL | 120 |
| Query: | 121 | TSPSLSPISSSRIRELIHFKASVKPFVPK | 149 |
| | | +S +S ISSS ++E+ +K +KP++PK | |
| Sbjct: | 121 | SSKEVSFISSSFVKEIAKYKGDIKPYLPK | 149 |

[0585] A related DNA sequence was identified in S. pyogenes <SEQ ID 135> which encodes the amino acid sequence <SEQ ID 136>. Analysis of this protein sequence reveals the following:

```
Possible site: 61
>>> Seems to have no N-terminal signal sequence
----- Final Results -----
                            bacterial cytoplasm --- Certainty = 0.1862(Affirmative) < succ>
                              bacterial membrane --- Certainty = 0.0000(Not Clear) < succ>
                                bacterial outside --- Certainty = 0.0000(Not Clear) < succ>
```

[0586] An alignment of the GAS and GBS proteins is shown below:

| Identities = 88/161 (54%), Positives = 124/161 (76%) | | | |
|---|---|---|---|
| Query: | 1 | MTKKALFTGSFDPVTNGHLDIIERASYLFDHVYIGLFYNLEKQGYFSIECRKKMLEEAIR | 60 |
| | | +TK L+TGSFDPVTNGHLDI++RAS LFD +Y+G+F N K+ YF +E RK ML +A+ | |
| Sbjct: | 2 | LTKIGLYTGSFDPVTNGHLDIVKRASGLFDQIYVGIFDNPTKKSYFKLEVRKAMLTQALA | 61 |
| Query: | 61 | QFKNVSVLVAQDRLAVDLAREVGAKYFVRGLRNSQDFDYEANLEFFNKQLADDIETVYLS | 120 |
| | | F NV V+ + +RLA+D+A+E+ + +RGLRN+ DF+YE NLE+FN LA +IETVYL | |
| Sbjct: | 62 | DFTNVIVVTSHERLAIDVAKELRVTHLIRGLRNATDFEYEENLEYFNHLLAPNIETVYLI | 121 |
| Query: | 121 | TSPSLSPISSSRIRELIHFKASVKPFVPKSVVREVEKMSEE | 161 |
| | | + +SSSR+RELIHF++S++ VP+SV+ +VEKM+E+ | |
| Sbjct: | 122 | SRNKWQALSSSRVRELIHFQSSLEGLVPQSVIAQVEKMNEK | 162 |

[0587] Based on this analysis, it was predicted that these proteins and their epitopes could be useful antigens for vaccines or diagnostics.

### EXAMPLE 43

[0588] A DNA sequence (GBSx0042) was identified in S. agalactiae <SEQ ID 137> which encodes the amino acid sequence <SEQ ID 138>. Analysis of this protein sequence reveals the following:

```
Possible site: 15
>>> Seems to have no N-terminal signal sequence
----- Final Results -----
                            bacterial cytoplasm --- Certainty = 0.1126(Affirmative) < succ>
                              bacterial membrane --- Certainty = 0.0000(Not Clear) < succ>
                                bacterial outside --- Certainty = 0.0000(Not Clear) < succ>
```

[0589] The protein has no significant homology with any sequences in the GENPEPT database.

[0590] No corresponding DNA sequence was identified in S. pyogenes.

[0591] Based on this analysis, it was predicted that this protein and its epitopes, could be useful antigens for vaccines or diagnostics.

### EXAMPLE 44

[0592] A DNA sequence (GBSx0043) was identified in S. agalactiae <SEQ ID 139> which encodes the amino acid sequence <SEQ ID 140>. Analysis of this protein sequence reveals the following:

| Possible site: 25 | | | | |
|---|---|---|---|---|
| >>> Seems to have an uncleavable N-term signal seq | | | | |
| | INTEGRAL | Likelihood = −11.04 | Transmembrane | 20-36 (12-43) |

```
----- Final Results -----
                              bacterial membrane --- Certainty = 0.5416(Affirmative) < succ>
                                bacterial outside --- Certainty = 0.0000(Not Clear) < succ>
                            bacterial cytoplasm --- Certainty = 0.0000(Not Clear) < succ>
```

[0593] The protein has homology with the following sequences in the GENPEPT database:

| >GP: CAB13378 GB: Z99111 ylbL [Bacillus subtilis] | | | |
|---|---|---|---|
| Identities = 124/344 (36%), Positives = 199/344 (57%), Gaps = 21/344 (6%) | | | |
| Query: | 20 | WIIGFAFLLLVLASLVVRLPYYLEMPGGAYDIRSVLKVNKKADKAKGSYNFVAVSVSQAT | 79 |
| | | W++ L+ VL+ ++LPYY+ PG A ++ S++KV + KGS + + V V A | |
| Sbjct: | 9 | WMLVILILIAVLS--FIKLPYYITKPGEATELASLIKVEGGYPE-KGSLSLMTVKVGPAN | 65 |
| Query: | 80 | PAQVLYAWLTPFTEL----SSKEETTGGFSNDDYLRINQFYMETSQNESIYQALKLANKQ | 135 |
| | | P ++A + P+ E+ S KEE G S+ +Y++ M++SQ ++ A + A K+ | |
| Sbjct: | 66 | PFTYVWAKMHPYYEIVPDESIKEE---GESDKEYMKRQLQMMKSSQENAVIAAYQKAGKK | 122 |
| Query: | 136 | VSLTYKGVYVLNLAKNSTFKDRLHLADTVTGVNGKSFKNSSQLIKYVAALHLGDKVKVQY | 195 |
| | | VS ++ G+Y ++ +N K ++ + D + +GK+++++ +LI Y+++ GDKV ++ | |
| Sbjct: | 123 | VSYSFNGIYASSVVENMPAKGKIEVGDKIISADGKNYQSAEKLIDYISSKKAGDKVTLKI | 182 |
| Query: | 196 | TSQGKKKESVGKVIKLSNGKNGIGIGLTDHTE--VLSDVPVDFNTEGVGGPSAGLMFTLA | 253 |
| | | + K+K + + + + GIG++ +T+ V + +DF E +GGPSAGLM +L | |
| Sbjct: | 183 | EREEKEKRVTLTLKQFPDEPDRAGIGVSLYTDRNVKVEPDIDFEIENIGGPSAGLMMSLE | 242 |
| Query: | 254 | IYDQLVKEDLRKGRKIAGTGTIEQNGHVGDIGGAGLKVVSAAKKGMDIFFVPNNPIDKNA | 313 |
| | | IY+QL K D KG IAGTGTI+ +G VG IGG KVV+A K G DIFF PN N | |
| Sbjct: | 243 | IYNQLTKPDETKGYDIAGTGTIDVDGKVGPIGGIDQKVVAADKAGKDIFFAPNQNGASN- | 301 |
| Query: | 314 | KKGKTKVQTNYQEAKAAAKRLGTKMKIVPVQNVQQAIDYLKKTK | 357 |
| | | ++Y+ A AK + + MKIVPV +Q AIDYL K K | |
| Sbjct: | 302 | --------SDYKNAVKTAKDIDSNMKIVPVDTMQDAIDYLNKLK | 337 |

[0594] A related DNA sequence was identified in S. pyogenes <SEQ ID 141> which encodes the amino acid sequence <SEQ ID 142>. Analysis of this protein sequence reveals the following:

| Possible site: 23 | | | | |
|---|---|---|---|---|
| >>> Seems to have an uncleavable N-term signal seq | | | | |
| | INTEGRAL | Likelihood = −10.24 | Transmembrane | 10-26 (6-34) |

```
----- Final Results -----
                              bacterial membrane --- Certainty = 0.5097(Affirmative) < succ>
                                bacterial outside --- Certainty = 0.0000(Not Clear) < succ>
                            bacterial cytoplasm --- Certainty = 0.0000(Not Clear) < succ>
```

[0595] The protein has homology with the following sequences in the databases:

| >GP: CAB13378 GB: Z99111 ylbL [Bacillus subtilis] | | | |
|---|---|---|---|
| Identities = 132/348 (37%), Positives = 198/348 (55%), Gaps = 16/348 (4%) | | | |
| Query: | 1 | MKRLKKIKWWLVGLLALISLLLALFFPLPYYIEMPGGAYDIRTVLQVNGKEDKRKGAYQF | 60 |
| | | M R K W LV +L LI++L F LPYYI PG A ++ ++++V G + KG+ | |
| Sbjct: | 1 | MLRKKHFSWMLV-ILILIAVLS--FIKLPYYITKPGEATELASLIKVEGGYPE-KGSLSL | 56 |
| Query: | 61 | VAVGISRASLAQLLYAWLTPFTEISTAEDTTG-GYSDADFLRINQFYMETSQNAAIYQAL | 119 |
| | | + V + A+ ++A + P+ EI E G SD ++++ M++SQ A+ A | |
| Sbjct: | 57 | MTVKVGPANPFTYVWAKMHPYYEIVPDESIKEEGESDKEYMKRQLQMMKSSQENAVIAAY | 116 |
| Query: | 120 | SLAGKPVTLDYKGVYVLDVNNESTFKGTLHLADTVTGVNGKQFTSSAELIDYVSHLKLGD | 179 |
| | | AGK V+ + G+Y V KG + + D + +GK + S+ +LIDY+S K GD | |
| Sbjct: | 117 | QKAGKKVSYSFNGIYASSVVENMPAKGKIEVGDKIISADGKNYQSAEKLIDYISSKKAGD | 176 |
| Query: | 180 | EVTVQFTSDNKPKKGVGRIIKLKN--GKNGIGIALTDHTSVNSEDTVIFSTKGVGGPSAG | 237 |
| | | +VT++ + K K+ + + + + GIG++L +V E + F + +GGPSAG | |
| Sbjct: | 177 | KVTLKIEREEKEKRVTLTLKQFPDEPDRAGIGVSLYTDRNVKVEPDIDFEIENIGGPSAG | 236 |
| Query: | 238 | LMFTLDIYDQITKEDLRKGRTIAGTGTIGKDGEVGDIGGAGLKVVAAAEAGADIFFVPNN | 297 |
| | | LM +L+IY+Q+TK D KG IAGTGTI DG+VG IGG KVVAA +AG DIFF PN | |
| Sbjct: | 237 | LMMSLEIYNQLTKPDETKGYDIAGTGTIDVDGKVGPIGGIDQKVVAADKAGKDIFFAPNQ | 296 |
| Query: | 298 | PVDKEIKKVNPNAISNYEEAKRAAKRLKTKMKIVPVTTVQEALVYLRK | 345 |
| | | N + S+Y+ A + AK + + MKIVPV T+Q+A+ YL K | |
| Sbjct: | 297 | ---------NGASNSDYKNAVKTAKDIDSNMKIVPVDTMQDAIDYLNK | 335 |

[0596] An alignment of the GAS and GBS proteins is shown below:

| Identities = 229/339 (67%), Positives = 276/339 (80%) | | | |
|---|---|---|---|
| Query: | 17 | LKWWIIGFAFLLLVLASLVVRLPYYLEMPGGAYDIRSVLKVNKKADKAKGSYNFVAVSVS | 76 |
| | | +KWW++G L+ +L +L LPYY+EMPGGAYDIR+VL+VN K DK KG+Y FVAV +S | |
| Sbjct: | 7 | IKWWLVGLLALISLLLALFFPLPYYIEMPGGAYDIRTVLQVNGKEDKRKGAYQFVAVGIS | 66 |
| Query: | 77 | QATPAQVLYAWLTPFTELSSKEETTGGFSNDDYLRINQFYMETSQNESIYQALKLANKQV | 136 |
| | | +A+ AQ+LYAWLTPFTE+S+ E+TTGG+S+ D+LRINQFYMETSQN +IYQAL LA K V | |
| Sbjct: | 67 | RASLAQLLYAWLTPFTEISTAEDTTGGYSDADFLRINQFYMETSQNAAIYQALSLAGKPV | 126 |
| Query: | 137 | SLTYKGVYVLNLAKNSTFKDRLHLADTVTGVNGKSFKNSSQLIKYVAALHLGDKVKVQYT | 196 |
| | | +L YKGVYVL++ STFK LHLADTVTGVNGK F +S++LI YV+ L LGD+V VQ+T | |
| Sbjct: | 127 | TLDYKGVYVLDVNNESTFKGTLHLADTVTGVNGKQFTSSAELIDYVSHLKLGDEVTVQFT | 186 |
| Query: | 197 | SQGKKKESVGKVIKLSNGKNGIGIGLTDHTEVLSDVPVDFNTEGVGGPSAGLMFTLAIYD | 256 |
| | | S K K+ VG++IKL NGKNGIGI LTDHT V S+ V F+T+GVGGPSAGLMFTL IYD | |
| Sbjct: | 187 | SDNKPKKGVGRIIKLKNGKNGIGIALTDHTSVNSEDTVIFSTKGVGGPSAGLMFTLDIYD | 246 |
| Query: | 257 | QLVKEDLRKGRKIAGTGTIEQNGHVGDIGGAGLKVVSAAKKGMDIFFVPNNPIDKNAKKG | 316 |
| | | Q+ KEDLRKGR IAGTGTI ++G VGDIGGAGLKVV+AA+ G DIFFVPNNP+DK KK | |
| Sbjct: | 247 | QITKEDLRKGRTIAGTGTIGKDGEVGDIGGAGLKVVAAAEAGADIFFVPNNPVDKEIKKV | 306 |
| Query: | 317 | KTKVQTNYQEAKAAAKRLGTKMKIVPVQNVQQAIDYLKK | 355 |
| | | +NY+EAK AAKRL TKMKIVPV VQ+A+ YL+K | |
| Sbjct: | 307 | NPNAISNYEEAKRAAKRLKTKMKIVPVTTVQEALVYLRK | 345 |

[0597] A related GBS gene <SEQ ID 8479> and protein <SEQ ID 8480> were also identified. Analysis of this protein sequence reveals the following:

| Lipop: Possible site: −1 Crend: 10 | | | | |
|---|---|---|---|---|
| McG: Discrim Score: 8.26 | | | | |
| GvH: Signal Score (−7.5): −4.04 | | | | |
| Possible site: 25 | | | | |
| >>> Seems to have an uncleavable N-term signal seq | | | | |
| ALOM program count: 1 value: −11.04 threshold: 0.0 | | | | |
| | INTEGRAL | Likelihood = −11.04 | Transmembrane | 20-36 (12-43) |
| | PERIPHERAL | Likelihood = 4.51 | 70 | |

```
modified ALOM score: 2.71
*** Reasoning Step: 3
----- Final Results -----
                              bacterial membrane --- Certainty = 0.5416(Affirmative) < succ>
                                bacterial outside --- Certainty = 0.0000(Not Clear) < succ>
                            bacterial cytoplasm --- Certainty = 0.0000(Not Clear) < succ>
```

[0598] The protein has homology with the following sequences in the databases:

[chemical structure]

[0599] SEQ ID 8480 (GBS39) was expressed in E. coli as a GST-fusion product. SDS-PAGE analysis of total cell extract is shown in FIG. 12 (lane 9; MW 65.2 kDa) and FIG. 15 (lane 3; MW 40 kDa).

[0600] Based on this analysis, it was predicted that these proteins and their epitopes could be useful antigens for vaccines or diagnostics.

### EXAMPLE 45

[0601] A DNA sequence (GBSx0044) was identified in S. agalactiae <SEQ ID 143> which encodes the amino acid sequence <SEQ ID 144>. This protein is predicted to be UDP-sugar hydrolase. Analysis of this protein sequence reveals the following:

```
Possible site: 17
>>> Seems to have no N-terminal signal sequence
----- Final Results -----
                            bacterial cytoplasm --- Certainty = 0.3908(Affirmative) < succ>
                              bacterial membrane --- Certainty = 0.0000(Not Clear) < succ>
                                bacterial outside --- Certainty = 0.0000(Not Clear) < succ>
```

[0602] The protein has homology with the following sequences in the GENPEPT database:

| >GP: CAB15227 GB: Z99120 similar to hypothetical proteins [Bacillus subtilis] | | | |
|---|---|---|---|
| Identities = 114/280 (40%), Positives = 173/280 (61%), Gaps = 9/280 (3%) | | | |
| Query: | 1 | MTELIRILHLNDLHSHFENFPKVKRFFH----DNQAQPIETISLDLGDNIDKSHPLTEAS | 56 |
| | | M E +R+ H NDLHSHFEN+PK+ + ++Q+ ET+ D+GD++D+ +TEA+ | |
| Sbjct: | 1 | MKEKLRLYHTNDLHSHFENWPKIVDYIEQKRKEHQSDGEETLVFDIGDHLDRFQFVTEAT | 60 |
| Query: | 57 | SGKANVQLMNELGIELATIGNNEGVGLSKKDLDQVYKDSDFTVIVGNLKD-NIIEPSWAK | 115 |
| | | GKANV L+N L I+ A IGNNEG+ L ++L +Y ++F VIV NL D N PSWA | |
| Sbjct: | 61 | FGKANVDLLNRLHIDGAAIGNNEGITLPHEELAALYDNAEFPVIVSNLFDKNGNRPSWAV | 120 |
| Query: | 116 | PYIIYETQQGTKLAFLAYTFPYYKTYEPNGWTIEDPIDCLKCHLQINEIK-EANCRILMS | 174 |
| | | PY I + G +AFL T PYY Y+ GWT+ D ++ +K I E+K +A+ +L+S | |
| Sbjct: | 121 | PYHIKSLKNGMSIAFLGVTVPYYPVYDKLGWTVTDALESIK--ETILEVKGQADIIVLLS | 178 |
| Query: | 175 | HLGIRFDTRIAQEFSEIDLIIGAHTHHLFEEGELINGTYLAAAGKYGRFVGSIDITFDNH | 234 |
| | | HLGI D +A+ EID+I+ +HTHHL E+G+++NG LA+A KYG +VG ++IT D+ | |
| Sbjct: | 179 | HLGILDDQAVAEAVPEIDVILESHTHHLLEDGQVVNGVLLASAEKYGHYVGCVEITVDS- | 237 |
| Query: | 235 | TLKDILISTCDTKQLTGYPSDSDWLRRLSQKVKNSLEKKV | 274 |
| | | + I T + + + +S + + + E+K+ | |
| Sbjct: | 238 | VQRSINSKTASVQNMAEWTGESAETKAFLNEKEREAEEKL | 277 |

[0603] No corresponding DNA sequence was identified in S. pyogenes.

[0604] Based on this analysis, it was predicted that this protein and its epitopes, could be useful antigens for vaccines or diagnostics.

### EXAMPLE 46

[0605] A DNA sequence (GBSx0045) was identified in S. agalactiae <SEQ ID 145> which encodes the amino acid sequence <SEQ ID 146>. This protein is predicted to be UDP-sugar hydrolase. Analysis of this protein sequence reveals the following:

| Possible site: 44 | | | | |
|---|---|---|---|---|
| >>> Seems to have no N-terminal signal sequence | | | | |
| | INTEGRAL | Likelihood = −0.48 | Transmembrane | 5-21 (5-21) |

```
----- Final Results -----
                              bacterial membrane --- Certainty = 0.1192(Affirmative) < succ>
                                bacterial outside --- Certainty = 0.0000(Not Clear) < succ>
                            bacterial cytoplasm --- Certainty = 0.0000(Not Clear) < succ>
```

[0606] A related GBS nucleic acid sequence <SEQ ID 9605> which encodes amino acid sequence <SEQ ID 9606> was also identified.

[0607] The protein has homology with the following sequences in the GENPEPT database:

| >GP: CAB15227 GB: Z99120 similar to hypothetical proteins [Bacillus subtilis] | | | |
|---|---|---|---|
| Identities = 29/137 (21%), Positives = 71/137 (51%), Gaps = 13/137 (9%) | | | |
| Query: | 3 | AMLFYAGADVAIINSGLIVQPFEKD-FSRKNLHESLPHQMRLAKLTVSSQELLEIYETIY | 61 |
| | | A+ + D++++NSG+I+ P + ++ +LH PH + + ++ +EL E ++ | |
| Sbjct: | 305 | ALKEWCETDISMVNSGVILGPLKAGPVTKLDLHRICPHPINPVAVRLTGEELKETI--VH | 362 |
| Query: | 62 | QQGQFLAQQKIHGMGFRGKCFGEVLHSGFDYKN----------GKIVYNEKDIDAKEEVI | 111 |
| | | + + Q +I G+GFRG+ G+++++G + + +I N +DI+ ++ | |
| Sbjct: | 363 | AASEQMEQLRIKGLGFRGEVMGKMVYAGVEVETKRLDDGITHVTRITLNGEDIEKHKQYS | 422 |
| Query: | 112 | LVIVDQYYFASYFECLK | 128 |
| | | + ++D + F ++ | |
| Sbjct: | 423 | VAVLDMFTLGKLFPLIR | 439 |

[0608] No corresponding DNA sequence was identified in S. pyogenes.

[0609] Based on this analysis, it was predicted that this protein and its epitopes, could be useful antigens for vaccines or diagnostics.

### EXAMPLE 47

[0610] A DNA sequence (GBSx0046) was identified in S. agalactiae <SEQ ID 147> which encodes the amino acid sequence <SEQ ID 148>. This protein is predicted to be unnamed protein product. Analysis of this protein sequence reveals the following:

```
Possible site: 29
>>> Seems to have no N-terminal signal sequence
----- Final Results -----
                            bacterial cytoplasm --- Certainty = 0.3567(Affirmative) < succ>
                              bacterial membrane --- Certainty = 0.0000(Not Clear) < succ>
                                bacterial outside --- Certainty = 0.0000(Not Clear) < succ>
```

[0611] The protein differs from AX026665 at the C-terminus:

| | | | |
|---|---|---|---|
| Query: | 181 | SAKQHFVIRKK | 191 |
| | | SAKQH + +K | |
| Sbjct: | 181 | SAKQHLLFVRK | 191 |

[0612] A related DNA sequence was identified in S. pyogenes <SEQ ID 149> which encodes the amino acid sequence <SEQ ID 150>. Analysis of this protein sequence reveals the following:

```
Possible site: 37
>>> Seems to have no N-terminal signal sequence
----- Final Results -----
                            bacterial cytoplasm --- Certainty = 0.3974(Affirmative) < succ>
                              bacterial membrane --- Certainty = 0.0000(Not Clear) < succ>
                                bacterial outside --- Certainty = 0.0000(Not Clear) < succ>
```

[0613] An alignment of the GAS and GBS proteins is shown below:

| Identities = 110/205 (53%), Positives = 147/205 (71%), Gaps = 15/205 (7%) | | | |
|---|---|---|---|
| Query: | 1 | MRKEVTPEMLNYNKYPGPQFIHFENIVKSDDIEFQLVINEKSAFDVTVFGQRFSEILLKY | 60 |
| | | M+KE++PEM NYNK+PGP+FIHFE VK++ I+ L+ + K+AFD T FGQR++E+LLKY | |
| Sbjct: | 9 | MKKEISPEMYNYNKFPGPKFIHFEEQVKAEGIDLLLLEDVKNAFDTTSFGQRYTEVLLKY | 68 |
| Query: | 61 | DFIVGDWGNEQLRLRGFYKDASTIRKNSRISRLEDYIKEYCNFGCAYFVLENPNPRDIKF | 120 |
| | | D+IVGDWGNEQLRL+GFYKD+ I+K +RISRLEDYIKE+CNFGCAYFVLEN +P+DIKF | |
| Sbjct: | 69 | DYIVGDWGNEQLRLKGFYKDSDDIKKTNRISRLEDYIKEFCNFGCAYFVLENLHPQDIKF | 128 |
| Query: | 121 | DDERPHKRRKS------RSKSQSSKSQTRNNRSQSNA--------NAHFTSKKRKDTKRR | 166 |
| | | ++ER +R+KS R K S Q +S+S N FTS+KR+ + | |
| Sbjct: | 129 | EEERQPRRKKSPKSKSNRRKPNYSNQQPATPKSKSKRASKEKQPENQAFTSQKRRSNTKH | 188 |
| Query: | 167 | QERHIKEEQDKEMTSAKQHFVIRKK | 191 |
| | | +E+ K Q ++ + HF+IRKK | |
| Sbjct: | 189 | KEKS-KRNQTSQLNTKISHFIIRKK | 212 |

[0614] Based on this analysis, it was predicted that these proteins and their epitopes could be useful antigens for vaccines or diagnostics.

### EXAMPLE 48

[0615] A DNA sequence (GBSx0047) was identified in S. agalactiae <SEQ ID 151> which encodes the amino acid sequence <SEQ ID 152>. Analysis of this protein sequence reveals the following:

```
Possible site: 32
>>> Seems to have no N-terminal signal sequence
----- Final Results -----
                            bacterial cytoplasm --- Certainty = 0.3627(Affirmative) < succ>
                              bacterial membrane --- Certainty = 0.0000(Not Clear) < succ>
                                bacterial outside --- Certainty = 0.0000(Not Clear) < succ>
```

[0616] A related GBS nucleic acid sequence <SEQ ID 9607> which encodes amino acid sequence <SEQ ID 9608> was also identified.

[0617] The protein has homology with the following sequences in the GENPEPT database:

| >GP: BAB06225 GB: AP001515 unknown conserved protein [Bacillus halodurans] | | | |
|---|---|---|---|
| Identities = 205/349 (58%), Positives = 258/349 (73%), Gaps = 5/349 (1%) | | | |
| Query: | 18 | PSIYSLTRDELIAWAIEHGEKKFRASQIWDWLYKKRVQSFDEMTNISKDFIALLNENFVV | 77 |
| | | PSIY+L +EL W E GE KFRA+QI++WLY+KRV+ F EMTN+SKD A L ++F + | |
| Sbjct: | 17 | PSIYTLQFEELEMWLKEQGEPKFRATQIFEWLYEKRVKQFQEMTNLSKDLRAKLEKHFNL | 76 |
| Query: | 78 | NPLKQRIVQESADGTVKYLFELPDGMLIETVLMRQHYGLSVCVTTQVGCNIGCTFCASGL | 137 |
| | | LK Q+S+DGT+K+LFEL DG IETV+MR +YG SVCVTTQVGC +GCTFCAS L | |
| Sbjct: | 77 | TTLKTVTKQQSSDGTIKFLFELHDGYSIETVVMRHNYGNSVCVTTQVGCRLGCTFCASTL | 136 |
| Query: | 138 | IKKQRDLNNGEITAQIMLVQKYFDERGQGERVSHIVVMGIGEPFDNYTNVLKFLRTVNDD | 197 |
| | | +R+L GEI AQ++ Q+ DE QGERV IVVMGIGEPFDNY ++ FL+TVN D | |
| Sbjct: | 137 | GGLKRNLEAGEIVAQVVEAQRAMDE--QGERVGSIVVMGIGEPFDNYQALMPFLKTVNHD | 194 |
| Query: | 198 | NGLAIGARHITVSTSGLAHKIREFANEGVQVNLAVSLHAPNNDLRSSIMRINRSFPLEKL | 257 |
| | | GL IGARHITVSTSG+ KI +FA+EG+Q+N A+SLHAPN +LRS +M +NR++PL KL | |
| Sbjct: | 195 | KGLNIGARHITVSTSGVVPKIYQFADEGLQINFAISLHAPNTELRSKLMPVNRAWPLPKL | 254 |
| Query: | 258 | FAAIEYYIETTNRRVTFEYIMLNGVNDTPENAQELADLTKKIRKLSYVNLIPYNPVSEHD | 317 |
| | | AI YYI+ T RRVTFEY + G ND E+A+ELADL K I+ +VNLIP N V E D | |
| Sbjct: | 255 | MDAIRYYIDKTGRRVTFEYGLFGGENDQVEHAEELADLIKDIK--CHVNLIPVNYVPERD | 312 |
| Query: | 318 | QYSRSPKERVEAFYDVLKKNGVNCVVRQEHGTDIDAACGQLRSNTMKRD | 366 |
| | | Y R+P++++ AF LK+ GVN +R+E G DIDAACGQLR+ K + | |
| Sbjct: | 313 | -YVRTPRDQIFAFERTLKERGVNVTIRREQGHDIDAACGQLRAKERKEE | 360 |

[0618] A related DNA sequence was identified in S. pyogenes <SEQ ID 153> which encodes the amino acid sequence <SEQ ID 154>. Analysis of this protein sequence reveals the following:

```
Possible site: 17
>>> Seems to have no N-terminal signal sequence
----- Final Results -----
                            bacterial cytoplasm --- Certainty = 0.2320(Affirmative) < succ>
                              bacterial membrane --- Certainty = 0.0000(Not Clear) < succ>
                                bacterial outside --- Certainty = 0.0000(Not Clear) < succ>
```

[0619] An alignment of the GAS and GBS proteins is shown below:

| Identities = 316/353 (89%), Positives = 339/353 (95%) | | | |
|---|---|---|---|
| Query: | 17 | KPSIYSLTRDELIAWAIEHGEKKFRASQIWDWLYKKRVQSFDEMTNISKDFIALLNENFV | 76 |
| | | KPSIYSLTRDELIAWA+E G+K+FRA+QIWDWLYKKRVQSF+EMTNISKDF+++LN++F | |
| Sbjct: | 2 | KPSIYSLTRDELIAWAVERGQKQFRATQIWDWLYKKRVQSFEEMTNISKDFVSILNDSFC | 61 |
| Query: | 77 | VNPLKQRIVQESADGTVKYLFELPDGMLIETVLMRQHYGLSVCVTTQVGCNIGCTFCASG | 136 |
| | | VNPLKQR+VQESADGTVKYLFELPDGMLIETVLMRQHYG SVCVTTQVGCNIGCTFCASG | |
| Sbjct: | 62 | VNPLKQRVVQESADGTVKYLFELPDGMLIETVLMRQHYGHSVCVTTQVGCNIGCTFCASG | 121 |
| Query: | 137 | LIKKQRDLNNGEITAQIMLVQKYFDERGQGERVSHIVVMGIGEPFDNYTNVLKFLRTVND | 196 |
| | | LIKKQRDLN+GEITAQIMLVQKYFD+R QGERVSH+VVMGIGEPFDNY NV+ FLR +ND | |
| Sbjct: | 122 | LIKKQRDLNSGEITAQIMLVQKYFDDRKQGERVSHVVVMGIGEPFDNYKNVMCFLRVIND | 181 |
| Query: | 197 | DNGLAIGARHITVSTSGLAHKIREFANEGVQVNLAVSLHAPNNDLRSSIMRINRSFPLEK | 256 |
| | | DNGLAIGARHITVSTSGLAHKIR+FANEGVQVNLAVSLHAPNNDLRSSIMR+NRSFPLEK | |
| Sbjct: | 182 | DNGLAIGARHITVSTSGLAHKIRDFANEGVQVNLAVSLHAPNNDLRSSIMRVNRSFPLEK | 241 |
| Query: | 257 | LFAAIEYYIETTNRRVTFEYIMLNGVNDTPENAQELADLTKKIRKLSYVNLIPYNPVSEH | 316 |
| | | LF+AIEYYIE TNRRVTFEYIMLN VND+ + AQELADLTK IRKLSYVNLIPYNPVSEH | |
| Sbjct: | 242 | LFSAIEYYIEKTNRRVTFEYIMLNEVNDSIKQAQELADLTKTIRKLSYVNLIPYNPVSEH | 301 |
| Query: | 317 | DQYSRSPKERVEAFYDVLKKNGVNCVVRQEHGTDIDAACGQLRSNTMKRDRQK | 369 |
| | | DQYSRSPKERV AFYDVLKKNGVNCVVRQEHGTDIDAACGQLRS TMK+DR+K | |
| Sbjct: | 302 | DQYSRSPKERVLAFYDVLKKNGVNCVVRQEHGTDIDAACGQLRSKTMKKDREK | 354 |

[0620] Based on this analysis, it was predicted that these proteins and their epitopes could be useful antigens for vaccines or diagnostics.

### EXAMPLE 49

[0621] A DNA sequence (GBSx0048) was identified in S. agalactiae <SEQ ID 155> which encodes the amino acid sequence <SEQ ID 156>. This protein is predicted to be VanZF. Analysis of this protein sequence reveals the following:

| Possible site: 47 | | | | |
|---|---|---|---|---|
| >>> Seems to have an uncleavable N-term signal seq | | | | |
| | INTEGRAL | Likelihood = −9.61 | Transmembrane | 86-102 (77-106) |
| | INTEGRAL | Likelihood = −8.60 | Transmembrane | 19-35 (15-42) |
| | INTEGRAL | Likelihood = −5.15 | Transmembrane | 113-129 (109-134) |

```
----- Final Results -----
                              bacterial membrane --- Certainty = 0.4843(Affirmative) < succ>
                                bacterial outside --- Certainty = 0.0000(Not Clear) < succ>
                            bacterial cytoplasm --- Certainty = 0.0000(Not Clear) < succ>
```

[0622] The protein has homology with the following sequences in the GENPEPT database:

| >GP: AAF36806 GB: AF155139 VanZF [Paenibacillus popilliae] | | | |
|---|---|---|---|
| Identities = 45/154 (29%), Positives = 68/154 (43%), Gaps = 36/154 (23%) | | | |
| Query: | 17 | RRFVWMLVIIYCLIIVRMCFGPQIMIEGVSTPNVQRFGRIVAL-------LVPFNSFRSL | 69 |
| | | R F+W+ V ++ L +V M G NV GR L L+PF+S | |
| Sbjct: | 36 | RHFLWVYVFLFYLALVYMMTG---------IGNVWVVGRYETLIRVSEINLLPFSS---- | 82 |
| Query: | 70 | DQLTSFKEIFWVIGQNVVNILLLFPLIIGLLSLKPSLRKYKSVILLAFLMSIFIECTQVV | 129 |
| | | + +T++ ++NI+L PL L ++ P R K+ F S+ IE TQ++ | |
| Sbjct: | 83 | EGVTTY----------ILNIILFMPLGFLLPTIWPQFRTIKNTACTGFFFSLAIELTQLL | 132 |
| Query: | 130 | LDILIDANRVFEIDDLWTNTLGGPFALWTYRNIK | 163 |
| | | +R+ +IDDL NTLG YR K | |
| Sbjct: | 133 | ------NHRITDIDDLLMNTLGAIIGYLLYRAFK | 160 |

[0623] No corresponding DNA sequence was identified in S. pyogenes.

[0624] Based on this analysis, it was predicted that this protein and its epitopes, could be useful antigens for vaccines or diagnostics.

### EXAMPLE 50

[0625] A DNA sequence (GBSx0049) was identified in S. agalactiae <SEQ ID 157> which encodes the amino acid sequence <SEQ ID 158>. This protein is predicted to be multidrug resistance-like ATP-binding protein mdl. Analysis of this protein sequence reveals the following:

| Possible site: 30 | | | | |
|---|---|---|---|---|
| >>> Seems to have no N-terminal signal sequence | | | | |
| | INTEGRAL | Likelihood = −6.79 | Transmembrane | 18-34 (17-36) |
| | INTEGRAL | Likelihood = −5.15 | Transmembrane | 247-263 (242-268) |
| | INTEGRAL | Likelihood = −2.81 | Transmembrane | 160-176 (158-176) |
| | INTEGRAL | Likelihood = −2.71 | Transmembrane | 141-157 (134-158) |
| | INTEGRAL | Likelihood = −1.12 | Transmembrane | 56-72 (56-73) |
| | INTEGRAL | Likelihood = −0.69 | Transmembrane | 278-294 (277-294) |

```
----- Final Results -----
                              bacterial membrane --- Certainty = 0.3718(Affirmative) < succ>
                                bacterial outside --- Certainty = 0.0000(Not Clear) < succ>
                            bacterial cytoplasm --- Certainty = 0.0000(Not Clear) < succ>
```

[0626] The protein has homology with the following sequences in the GENPEPT database:

| >GP: BAB06055 ABC transporter (ATP-binding protein) [Bacillus halodurans] | | | |
|---|---|---|---|
| Identities = 284/575 (49%), Positives = 406/575 (70%), Gaps = 2/575 (0%) | | | |
| Query: | 1 | MSIIKNLWWFFKEEKKRYLIGILSLSLVAVLNLIPPKIMGSVIDAITTGKLTRPQLLWNL | 60 |
| | | M + +LWWFFK+EKK Y GI+ L++V++L L+PP+++G ++D I G LT P LL + | |
| Sbjct: | 1 | MKVFVDLWWFFKQEKKSYGFGIVMLAIVSLLTLVPPRVVGIIVDHIYEGTLTMPVLLQWI | 60 |
| Query: | 61 | LGLVLSALAMYGLRYIWRMYILGTSYKLGQVVRYRLFEHFTKMSPSFYQKYRTGDLMAHA | 120 |
| | | L AL +Y RY+WR+ I G S +L +++R +L+ HFT M+ FYQK+RTGDLMAHA | |
| Sbjct: | 61 | GVLAALALIVYVARYLWRVMIFGASLRLARLLRNQLYTHFTNMAAPFYQKHRTGDLMAHA | 120 |
| Query: | 121 | TNDINSLTRLAGGGVMSAVDASITALVTLITMFFTISWQMTLIAVIPLPLMALATSKLGR | 180 |
| | | TNDI ++ AG GV++ VD+ ++TM TISW++TLI+++P+PLMAL TS G | |
| Sbjct: | 121 | TNDIRAIQATAGQGVLTLVDSLTMGGFVILTMAITISWELTLISLLPMPLMALLTSYYGS | 180 |
| Query: | 181 | KTHETFKESQAAFSELNNKVQESVSGVKVTKSFGYQEQEIASFQEVNQMTFVKNMRTMTY | 240 |
| | | H+ F +QAAFS LN+KVQESV+GV+VTK+FG +EQ+I +F++ + KN+ | |
| Sbjct: | 181 | LLHKRFHHAQAAFSSLNDKVQESVTGVRVTKAFGQEEQDIEAFRKQSDDVVKKNVAVARV | 240 |
| Query: | 241 | DVMFDPLVLLFIGASYVLTLAMGAFMISKGQVTVGDLVTFVTYLDMLVWPLMAIGFLFNM | 300 |
| | | D +FDP + L +G SY L + GA + Q+T+G L +F YL +L+WP++A GFLFN+ | |
| Sbjct: | 241 | DALFDPTISLIVGLSYFLAIVFGARFVIAEQLTIGQLTSFTIYLGLLIWPMLAFGFLFNI | 300 |
| Query: | 301 | VQRGSVSYNRINSLLEQESDITDPLNPIRPVVNGTLRYDIDFFRYDN--EETLADIHFTL | 358 |
| | | V+RG SYNR++ LL+ + +ITD I G + ID F Y N E LAD+ F L | |
| Sbjct: | 301 | VERGRASYNRVSQLLQAKQEITDSRARIHVPPTGHVDVAIDQFVYPNQKEPALADVQFEL | 360 |
| Query: | 359 | EKGQTLGLVGQTGSGKTSLIKLLLREHDVTQGKITLNKHDIRDYRLSELRQLIGYVPQDQ | 418 |
| | | +G+TLG+VG+TG+GKT+L++LL RE+D+ QG I L+ I Y L L+ G VPQD | |
| Sbjct: | 361 | SEGETLGIVGKTGAGKTTLLRLLQREYDIKQGTIILDGRPIEHYTLDALKAAFGTVPQDH | 420 |
| Query: | 419 | FLFATSILENVRFGNPTLSINAVKKATKLAHVYDDIKQMPAGFETLIGEKGVSLSGGQKQ | 478 |
| | | FLF+ +I +N+ F P +I+ + + ++LAH++DDI Q G++T++GE+GV+LSGGQKQ | |
| Sbjct: | 421 | FLFSATIADNIAFAKPDATISEIIQVSQLAHIHDDIIQFEQGYDTVVGERGVTLSGGQKQ | 480 |
| Query: | 479 | RIAMSRAMILDPDILILDDSLSAVDAKTEHAIIENLKTNRQGKSTIISAHRLSAVVHADL | 538 |
| | | R++++RA++ +P+ILILDDSLSAVDAKTE AI+ +L+ R+GK+TII+AHRLSA+ HAD | |
| Sbjct: | 481 | RVSIARALLANPNILILDDSLSAVDAKTEEAILSSLRAERKGKTTIITAHRLSAIKHADH | 540 |
| Query: | 539 | ILVMQDGRVIERGQHQELLNKGGWYAETYASQQLE | 573 |
| | | ILVM DGR++ERG H+ L+ GGWY Y QQLE | |
| Sbjct: | 541 | ILVMDDGRIVERGTHETLMEAGGWYRNMYERQQLE | 575 |

[0627] There is also homology to SEQ ID 8.

[0628] A related DNA sequence was identified in S. pyogenes <SEQ ID 159> which encodes the amino acid sequence <SEQ ID 160>. Analysis of this protein sequence reveals the following:

| Possible site: 23 | | | | |
|---|---|---|---|---|
| >>> Seems to have an uncleavable N-term signal seq | | | | |
| | INTEGRAL | Likelihood = −7.75 | Transmembrane | 176-192 (173-197) |
| | INTEGRAL | Likelihood = −4.78 | Transmembrane | 267-283 (265-285) |
| | INTEGRAL | Likelihood = −4.09 | Transmembrane | 18-34 (15-40) |
| | INTEGRAL | Likelihood = −2.13 | Transmembrane | 151-167 (150-169) |
| | INTEGRAL | Likelihood = −0.69 | Transmembrane | 85-101 (85-101) |

```
----- Final Results -----
                              bacterial membrane --- Certainty = 0.4100(Affirmative) < succ>
                                bacterial outside --- Certainty = 0.0000(Not Clear) < succ>
                            bacterial cytoplasm --- Certainty = 0.0000(Not Clear) < succ>
```

[0629] An alignment of the GAS and GBS proteins is shown below:

| Identities = 172/609 (28%), Positives = 315/609 (51%), Gaps = 58/609 (9%) | | | |
|---|---|---|---|
| Query: | 1 | MSIIKNLWWFFKEEKKRYLIGILSLSLVAVLNLIPPKIMGSVIDAITTGKLTRPQLLWNL | 60 |
| | | M + W++FK + + + +++ L L + P +G + + GK+ + + + | |
| Sbjct: | 2 | MKTARFFWFYFKRYRFSFTVIAVAVILATYLQVKAPVFLGESLTEL--GKIGQAYYVAKM | 59 |
| Query: | 61 | LGLV-----LSAL--AMYGLRYIWRMYILGT---SYKLGQVV-------RYRLFEHFTKM | 103 |
| | | G LSA M+ L + +L S+ L +VV R LF ++ | |
| Sbjct: | 60 | SGQTHFSPDLSAFNAVMFKLLMTYFFTVLANLIYSFLLTRVVSHSTNRMRKGLFGKLERL | 119 |
| Query: | 104 | SPSFYQKYRTGDLMAHATNDINSLTRLAGGGVMSAVDASITALVTLITMFFTISWQM--- | 160 |
| | | + +F+ +++ G++++ T+D+++ + ++++ S+ +VT I ++ + W M | |
| Sbjct: | 120 | TVAFFDRHKDGEILSRFTSDLDN--------IQNSLNQSLIQVVTNIALYIGLVWMMFRQ | 171 |
| Query: | 161 | ------TLIAVIPLPLMALATS-KLGRKTHETFKESQAAFSELNNKVQESVSGVKVTKSF | 213 |
| | | IA P+ L+ L + +L RK Q S LN + E++SG K | |
| Sbjct: | 172 | DSRLALLTIASTPVALIFLVINIRLARKYTNI---QQQEVSALNAFMDETISGQKAIIVQ | 228 |
| Query: | 214 | GYQEQEIASF----QEVNQMTFVKNMRT------MTYDVMFDPLVLLFIGASYVLT-LAM | 262 |
| | | G QE + +F + V Q TF + + + M + + +++F+G++ VL+ +M | |
| Sbjct: | 229 | GVQEDTMTAFLKHNERVRQATFKRRLFSGQLFPVMNGMSLINTAIVIFVGSTIVLSDKSM | 288 |
| Query: | 263 | GAFMISKGQVTVGDLVTFVTYLDMLVWPLMAIGFLFNMVQRGSVSYNRINSLLEQESDIT | 322 |
| | | A +G +VTFV Y P+M I + +Q +RI + ++ ++ | |
| Sbjct: | 289 | PA------AAALGLVVTFVQYSQQYYQPMMQIASSWGELQLAFTGAHRIQEMFDETEEVR | 342 |
| Query: | 323 | DPLNPIRPVVNGTLRYD-IDFFRYDNEETLADIHFTLEKGQTLGLVGQTGSGKTSLIKLL | 381 |
| | | P + + + +DF ++ L+D+ KG+ + +VG TGSGKT+++ L+ | |
| Sbjct: | 343 | PQNAPAFTSLKEAVAINHVDFGYLPGQKVLSDVSIVAPKGKMIAVVGPTGSGKTTIMNLI | 402 |
| Query: | 382 | LREHDVTQGKITLHKHDIRDYRLSELRQLIGYVPQDQFLFATSILENVRFGNPTLSINAV | 441 |
| | | R +DV G IT + DIRDY L LRQ +G V Q+ LF+ +I +N+RFG+ T+S + V | |
| Sbjct: | 403 | NRFYDVDAGSITFDGRDIRDYDLDSLRQKVGIVLQESVLFSGTITDNIRFGDQTISQDMV | 462 |
| Query: | 442 | KKATKLAHVYDDIKQMPAGFETLIGEKGVSLSGGQKQRIAMSRAMILDPDILILDDSLSA | 501 |
| | | + A + H++D I +P G+ T + + S GQKQ I+++R ++ DP++LILD++ S | |
| Sbjct: | 463 | ETAARATHIHDFIMSLPKGYNTYVSDDDNVFSTGQKQLISIARTLLTDPEVLILDEATSN | 522 |
| Query: | 502 | VDAKTEHAIIENLKTNRQGKSTIISAHRLSAVVHADLILVMQDGRVIERGQHQELLNKGG | 561 |
| | | VD TE I ++ G+++ + AHRL +++AD I+V++DG+VIE+G H ELL++ G | |
| Sbjct: | 523 | VDTVTESKIQRAMEAIVAGRTSFVIAHRLKTILNADHIIVLKDGKVIEQGNHHELLHQKG | 582 |
| Query: | 562 | WYAETYASQ | 570 |
| | | +YAE Y +Q | |
| Sbjct: | 583 | FYAELYHNQ | 591 |

[0630] Based on this analysis, it was predicted that these proteins and their epitopes could be useful antigens for vaccines or diagnostics.

### EXAMPLE 51

[0631] A DNA sequence (GBSx0050) was identified in S. agalactiae <SEQ ID 161> which encodes the amino acid sequence <SEQ ID 162>. This protein is predicted to be mdlB (ATP-bindingprot). Analysis of this protein sequence reveals the following:

| Possible site: 39 | | | | |
|---|---|---|---|---|
| >>> Seems to have no N-terminal signal sequence | | | | |
| | INTEGRAL | Likelihood = −8.65 | Transmembrane | 164-180 (155-183) |
| | INTEGRAL | Likelihood = −5.15 | Transmembrane | 25-41 (21-46) |
| | INTEGRAL | Likelihood = −4.88 | Transmembrane | 143-159 (133-163) |
| | INTEGRAL | Likelihood = −1.49 | Transmembrane | 251-267 (251-270) |
| | INTEGRAL | Likelihood = −1.33 | Transmembrane | 61-77 (61-77) |

```
----- Final Results -----
                              bacterial membrane --- Certainty = 0.4461(Affirmative) < succ>
                                bacterial outside --- Certainty = 0.0000(Not Clear) < succ>
                            bacterial cytoplasm --- Certainty = 0.0000(Not Clear) < succ>
```

[0632] The protein has homology with the following sequences in the GENPEPT database:

| >GP: BAB06054 ABC transporter (ATP-binding protein) [Bacillus halodurans] | | | |
|---|---|---|---|
| Identities = 278/582 (47%), Positives = 398/582 (67%), Gaps = 6/582 (1%) | | | |
| Query: | 1 | MMKSNQWQVFKRLISYLRPYKWFTVLALSLLLLTTVVKNIIPLIASHFIDHYLT-NVNQT | 59 |
| | | + Q VFKRL+SY YK ++A LL + T + +P+I FID YLT T | |
| Sbjct: | 9 | LSSKEQRTVFKRLLSYAAHYKGQLMVAFLLLFIATGAQLLGPIIVKIFIDDYLTPRYFPT | 68 |
| Query: | 60 | AVLILVG--YYSMYVLQTLIQYFGNLFFARVSYSIVRDIRRDAFANMERLGMSYFDRTPA | 117 |
| | | VL L+G Y +++ +I Y+ F +V+ SIV+ +R D F++++RLG+S+FD+TPA | |
| Sbjct: | 69 | DVLFLLGAGYLVLHLTAVIIDYYQLFLFQKVALSIVQRLRIDVFSSVQRLGLSFFDQTPA | 128 |
| Query: | 118 | GSIVSRITNDTEAISDMFSGILSSFISAIFIFTVTLYTMLMLDIKLTGLVALLLPVIFIL | 177 |
| | | G +VSRITNDTE+I +++ +L++F+ I M L++ L +LLP+IF L | |
| Sbjct: | 129 | GGLVSRITNDTESIKELYVTVLATFVQNIIFLIGIFAAMFYLNVTLAIYCLVLLPLIFAL | 188 |
| Query: | 178 | VNVYRKKSVTVIAKTRSLLSDINSKLSESIEGIRIVQAFGQEERLKTEFEEINKEHVVYA | 237 |
| | | + VYRK S A LS +N +++ESI+G+ I+Q F QE R++ EF IN EH + | |
| Sbjct: | 189 | MQVYRKYSSRFYADMSEKLSLLNGRINESIQGMAIIQMFRQERRMRKEFSAINDEHFLAG | 248 |
| Query: | 238 | NRSMALDSLFLRPAMSLLKLLAYAVLMAYFGFTGVKGGLTAGLMYAFIQYVNRLFDPLIE | 297 |
| | | +SM LD L LRPA+ +L +LA ++++YFG + + G++YAF+ Y++R F+P+ + | |
| Sbjct: | 249 | MKSMKLDGLLLRPAVDVLSILALMLILSYFGIMSMDTAVEIGVVYAFVNYLDRFFEPVNQ | 308 |
| Query: | 298 | VTQNFSTLQTSMVSAGRVFDLIDETGFEPSQKNTE--AFVREGNIEFKNVSFSYDGKKQI | 355 |
| | | + S Q ++VSAGRVF L+D P ++ E A + EGN+EF+NVSFSYDGK + | |
| Sbjct: | 309 | MMMRLSMFQQAIVSAGRVFKLMDHRELAPDREGNEHPAIIGEGNVEFRNVSFSYDGKTNV | 368 |
| Query: | 356 | LDNVSFSVKKGETIAFVGATGSGKSSIINVFMRFYEFQSGQVLLDGKDIRDYSQEQLRKN | 415 |
| | | L N+SF+VKKGET+A VG TGSGK+SIINV MRFY Q G++L+DGK + + +LR | |
| Sbjct: | 369 | LKNISFTVKKGETVALVGHTGSGKTSIINVLMRFYPLQDGEILIDGKPLTSFENNELRAK | 428 |
| Query: | 416 | IGLVLQDPFLYHGTIKSNIKMY-QDITDQEVQDAAEFVDADQFIQKLPDKYDAAVSERGS | 474 |
| | | +GLVLQDPFLY GTI SNI++Y Q I+D ++ AA FV AD FI++L Y+ V+ERG+ | |
| Sbjct: | 429 | VGLVLQDPFLYTGTIASNIRLYDQAISDDRIKRAASFVRADGFIERLSHGYETKVTERGA | 488 |
| Query: | 475 | SFSTGQRQLLAFARTVASKPKILILDEATANIDSETEQIVQDSLAKMRQGRTTIAIAHRL | 534 |
| | | +FS+GQRQLL+FART+ +P ILILDEATA++D+ETE+ +Q++L +M+QGRTTIAIAHRL | |
| Sbjct: | 489 | TFSSGQRQLLSFARTMVREPAILILDEATASVDTETEEAIQEALERMKQGRTTIAIAHRL | 548 |
| Query: | 535 | STIQDANCIYVLDRGKIIESGNHESLLDLKGTYYRMYQLQAG | 576 |
| | | STI+DA+ I VL +G+I+E G H+ L+ KG Y +MY LQ G | |
| Sbjct: | 549 | STIKDADQILVLHQGEIVERGTHDELIAKKGLYQKMYVLQKG | 590 |

[0633] There is also homology to SEQ ID 160.

[0634] A related GBS gene <SEQ ID 8481> and protein <SEQ ID 8482> were also identified. Analysis of this protein sequence reveals the following:

| Lipop: Possible site: −1 Crend: 10 | | |
|---|---|---|
| McG: Discrim Score: −4.63 | | |
| GvH: Signal Score (−7.5): −5.85 | | |
| Possible site: 39 | | |
| >>>Seems to have no N-terminal signal sequence | | |
| ALOM program count: 5 | value: −8.65 | threshold: 0.0 |

| | | | |
|---|---|---|---|
| INTEGRAL | Likelihood = −8.65 | Transmembrane | 164-180 (155-183) |
| INTEGRAL | Likelihood = −5.15 | Transmembrane | 25-41 (21-46) |
| INTEGRAL | Likelihood = −4.88 | Transmembrane | 143-159 (133-163) |
| INTEGRAL | Likelihood = −1.49 | Transmembrane | 251-267 (251-270) |
| INTEGRAL | Likelihood = −1.33 | Transmembrane | 61-77 (61-77) |

| | | |
|---|---|---|
| PERIPHERAL | Likelihood = 3.02 | 483 |

modified ALOM score: 2.23
*** Reasoning Step: 3
----- Final Results -----
bacterial membrane --- Certainty =0.4461 (Affirmative) < succ>
bacterial outside --- Certainty =0.0000 (Not Clear) < succ>
bacterial cytoplasm --- Certainty =0.0000 (Not Clear) < succ>

[0635] The protein has homology with the following sequences in the databases:

[chemical structure]

[0636] There is also homology to SEQ IDs 330, 4634 and 5788.

[0637] Based on this analysis, it was predicted that these proteins and their epitopes could be useful antigens for vaccines or diagnostics.

### EXAMPLE 52

[0638] A DNA sequence (GBSx0051) was identified in S. agalactiae <SEQ ID 163> which encodes the amino acid sequence <SEQ ID 164>. Analysis of this protein sequence reveals the following:

```
Possible site: 25
>>> Seems to have no N-terminal signal sequence
----- Final Results -----
                            bacterial cytoplasm --- Certainty = 0.0635(Affirmative) < succ>
                              bacterial membrane --- Certainty = 0.0000(Not Clear) < succ>
                                bacterial outside --- Certainty = 0.0000(Not Clear) < succ>
```

[0639] A related GBS nucleic acid sequence <SEQ ID 9609> which encodes amino acid sequence <SEQ ID 9610> was also identified.

[0640] The protein has homology with the following sequences in the GENPEPT database:

| >GP: AAA25224 GB: M87483 anthranilate synthase beta subunit | | | |
|---|---|---|---|
| [Lactococcus lactis] | | | |
| Identities = 101/191 (52%), Positives = 133/191 (68%), Gaps = 4/191 (2%) | | | |
| Query: | 14 | MLLLVDNYDSFTYNLKQYLSVYKEVFVIKNDVPNLFLLAESAEAIVLSPGPGHPKDAGKM | 73 |
| | | M+L++DNYDSFTYNL QY+ V +V V+KND +L +AE A+A++ SPGPG P DAGKM | |
| Sbjct: | 1 | MILIIDNYDSFTYNLVQYVGVLTDVAVVKNDDDSLGNMAEKADALIFSPGPGWPADAGKM | 60 |
| Query: | 74 | VELINQFIGKKPILGICLGHQALAECLGGRLNLANHVMHGKQSWVTINDHTSLFKGIDSP | 133 |
| | | LI QF G+KPILGICLG QA+ E GG+L LA+ VMHGK S V +F + S | |
| Sbjct: | 61 | ETLIQQFAGQKPILGICLGFQAIVEVFGGKLRLAHQVMHGKNSQVRQTSGNLIFNHLPSK | 120 |
| Query: | 134 | TQVMRYHSLVVTD---LPENIAVIARSNEDNEIMAFHCPSLKVYAMQFHPESIGSIDGMK | 190 |
| | | VMRYHS+V+ + LP+ A+ A + +D EIMA ++Y +QFHPESIG++DGM | |
| Sbjct: | 121 | FLVMRYHSIVMDEAVALPD-FAITAVATDDGEIMAIENEKEQIYGLQFHPESIGTLDGMT | 179 |
| Query: | 191 | MIENFLTLIND | 201 |
| | | MIENF+ +N+ | |
| Sbjct: | 180 | MIENFVNQVNE | 190 |

[0641] A related DNA sequence was identified in S. pyogenes <SEQ ID 165> which encodes the amino acid sequence <SEQ ID 166>. Analysis of this protein sequence reveals the following:

```
Possible site: 57
>>> Seems to have no N-terminal signal sequence
----- Final Results -----
                            bacterial cytoplasm --- Certainty = 0.3183(Affirmative) < succ>
                              bacterial membrane --- Certainty = 0.0000(Not Clear) < succ>
                                bacterial outside --- Certainty = 0.0000(Not Clear) < succ>
```

[0642] An alignment of the GAS and GBS proteins is shown below:

| Identities = 104/186 (55%), Positives = 131/186 (69%) | | | |
|---|---|---|---|
| Query: | 14 | MLLLVDNYDSFTYNLKQYLSVYKEVFVIKNDVPNLFLLAESAEAIVLSPGPGHPKDAGKM | 73 |
| | | M+LL+DNYDSFTYNL QYLS + E V+ N PNL+ +A+ A A+VLSPGPG PK+A +M | |
| Sbjct: | 1 | MILLIDNYDSFTYNLAQYLSEFDETIVLYNQDPNLYDMAKKANALVLSPGPGWPKEANQM | 60 |
| Query: | 74 | VELINQFIGKKPILGICLGHQALAECLGGRLNLANHVMHGKQSWVTINDHTSLFKGIDSP | 133 |
| | | +LI F KPILG+CLGHQA+AE LGG L LA VMHG+QS + SLF+ + | |
| Sbjct: | 61 | PKLIQDFYQTKPILGVCLGHQAIAETLGGTLRLAKRVMHGRQSTIETQGPASLFRSLPQE | 120 |
| Query: | 134 | TQVMRYHSLVVTDLPENIAVIARSNEDNEIMAFHCPSLKVYAMQFHPESIGSIDGMKMIE | 193 |
| | | VMRYHS+VV LP+ +V AR +D EIMAF +L ++ +QFHPESIG+ DGM MI | |
| Sbjct: | 121 | ITVMRYHSIVVDQLPKGFSVTARDCDDQEIMAFEHHTLPLFGLQFHPESIGTPDGMTMIA | 180 |
| Query: | 194 | NFLTLI | 199 |
| | | NF+ I | |
| Sbjct: | 181 | NFIAAI | 186 |

[0643] Based on this analysis, it was predicted that these proteins and their epitopes could be useful antigens for vaccines or diagnostics.

### EXAMPLE 53

[0644] A DNA sequence (GBSx0052) was identified in S. agalactiae <SEQ ID 167> which encodes the amino acid sequence <SEQ ID 168>. Analysis of this protein sequence reveals the following:

| Possible site: 58 | | | | |
|---|---|---|---|---|
| >>> Seems to have a cleavable N-term signal seq. | | | | |
| | INTEGRAL | Likelihood = −8.17 | Transmembrane | 117-133 (108-140) |
| | INTEGRAL | Likelihood = −1.70 | Transmembrane | 150-166 (150-166) |

```
----- Final Results -----
                              bacterial membrane --- Certainty = 0.4270(Affirmative) < succ>
                                bacterial outside --- Certainty = 0.0000(Not Clear) < succ>
                            bacterial cytoplasm --- Certainty = 0.0000(Not Clear) < succ>
```

[0645] The protein has homology with the following sequences in the GENPEPT database:

| >GP: CAB12877 GB: Z99109 similar to biotin biosynthesis [Bacillus subtilis] | | | |
|---|---|---|---|
| Identities = 70/168 (41%), Positives = 106/168 (62%) | | | |
| Query: | 8 | YIALMVALLIVLGFIPGIPLGFIPVPIVLQNLGVMLAGALLGSRKGFLAVAIFLLLVAIG | 67 |
| | | +IA+ AL+ VLGF+P + L F PVPI LQ LGVMLAG++L + FL+ +FLLLVA G | |
| Sbjct: | 9 | HIAIFTALMAVLGFMPPLFLSFTPVPITLQTLGVMLAGSILRPKSAFLSQLVFLLLVAFG | 68 |
| Query: | 68 | APFLPGGRSGLVTLFGPTAGYLLTYPFAAFFIGLGLEKVKTTKLWVQFLIIWIFGVLLID | 127 |
| | | AP LPGGR G FGP+AG+L+ YP A++ I L +++ + F +FG++ I | |
| Sbjct: | 69 | APLLPGGRGGFGVFFGPSAGFLIAYPLASWLISLAANRLRKVTVLRLFFTHIVFGIIFIY | 128 |
| Query: | 128 | ICGSIVLSFQTSLPLTKSLFSNLIFIPGDTLKASICLIIYRKFANRLT | 175 |
| | | + G V +F + L+++ F +L ++PGD +KA++ + K L+ | |
| Sbjct: | 129 | LLGIPVQAFIMHIDLSQAAFMSLAYVPGDLIKAAVSAFLAIKITQALS | 176 |

[0646] A related DNA sequence was identified in S. pyogenes <SEQ ID 169> which encodes the amino acid sequence <SEQ ID 170>. Analysis of this protein sequence reveals the following:

| Possible site: 51 | | | | |
|---|---|---|---|---|
| >>> Seems to have an uncleavable N-term signal seq | | | | |
| | INTEGRAL | Likelihood = −10.03 | Transmembrane | 113-129 (109-139) |
| | INTEGRAL | Likelihood = −8.97 | Transmembrane | 55-71 (52-76) |
| | INTEGRAL | Likelihood = −7.54 | Transmembrane | 10-26 (6-38) |
| | INTEGRAL | Likelihood = −5.79 | Transmembrane | 86-102 (81-105) |
| | INTEGRAL | Likelihood = −2.87 | Transmembrane | 33-49 (28-51) |
| | INTEGRAL | Likelihood = −1.97 | Transmembrane | 150-166 (150-168) |

```
----- Final Results -----
                              bacterial membrane --- Certainty = 0.5012(Affirmative) < succ>
                                bacterial outside --- Certainty = 0.0000(Not Clear) < succ>
                            bacterial cytoplasm --- Certainty = 0.0000(Not Clear) < succ>
```

[0647] An alignment of the GAS and GBS proteins is shown below:

| Identities = 80/168 (47%), Positives = 108/168 (63%), Gaps = 1/168 (0%) | | | |
|---|---|---|---|
| Query: | 3 | TRTTTYIALMVALLIVLGFIPGIPLGFIPVPIVLQNLGVMLAGALLGSRKGFLAVAIFLL | 62 |
| | | T+ +A+M L+I+LGFIP IPLGFIPVPIVLQNLGVMLAG +LG +KG L+V +F L | |
| Sbjct: | 4 | TKELVKVAMMTTLIIILGFIPAIPLGFIPVPIVLQNLGVMLAGLMLGGKKGTLSVFLF-L | 62 |
| Query: | 63 | LVAIGAPFLPGGRSGLVTLFGPTAGYLLTYPFAAFFIGLGLEKVKTTKLWVQFLIIWIFG | 122 |
| | | ++ + P G R+ + L GP+AGY++ Y L + + FL + I G | |
| Sbjct: | 63 | VIGLFLPVFSGSRTTIPVLMGPSAGYVIAYLLVPIVFSLLYRNWFSKSTPLAFLALLISG | 122 |
| Query: | 123 | VLLIDICGSIVLSFQTSLPLTKSLFSNLIFIPGDTLKASICLIIYRKF | 170 |
| | | V+L+D+ G+I LS T + L SL SNL+FIPGDT+KA I II K+ | |
| Sbjct: | 123 | VVLVDVLGAIWLSAYTGMSLVTSLLSNLVFIPGDTIKAIIATIIAVKY | 170 |

[0648] Based on this analysis, it was predicted that these proteins and their epitopes could be useful antigens for vaccines or diagnostics.

### EXAMPLE 54

[0649] A DNA sequence (GBSx0053) was identified in S. agalactiae <SEQ ID 171> which encodes the amino acid sequence <SEQ ID 172>. Analysis of this protein sequence reveals the following:

```
Possible site: 17
>>> Seems to have no N-terminal signal sequence
----- Final Results -----
                            bacterial cytoplasm --- Certainty = 0.3914(Affirmative) < succ>
                              bacterial membrane --- Certainty = 0.0000(Not Clear) < succ>
                                bacterial outside --- Certainty = 0.0000(Not Clear) < succ>
```

[0650] The protein has no significant homology with any sequences in the GENPEPT database.

[0651] No corresponding DNA sequence was identified in S. pyogenes.

[0652] Based on this analysis, it was predicted that this protein and its epitopes, could be useful antigens for vaccines or diagnostics.

### EXAMPLE 55

[0653] A DNA sequence (GBSx0054) was identified in S. agalactiae <SEQ ID 173> which encodes the amino acid sequence <SEQ ID 174>. Analysis of this protein sequence reveals the following:

```
Possible site: 15
>>> Seems to have no N-terminal signal sequence
----- Final Results -----
                          bacterial cytoplasm --- Certainty = 0.1864(Affirmative) < succ>
                            bacterial membrane --- Certainty = 0.0000(Not Clear) < succ>
                              bacterial outside --- Certainty = 0.0000(Not Clear) < succ>
```

[0654] A related GBS nucleic acid sequence <SEQ ID 9611> which encodes amino acid sequence <SEQ ID 9612> was also identified.

[0655] The protein has homology with the following sequences in the GENPEPT database:

| >GP: BAB05467 GB: AP001513 biotin synthase [Bacillus halodurans] | | | |
|---|---|---|---|
| Identities = 133/316 (42%), Positives = 201/316 (63%), Gaps = 2/316 (0%) | | | |
| Query: | 17 | NYIHLADEILSGKTSISYEQALEILNS-DENWWEIYAAALYLKNQVSRNNIRLNVLLSAK | 75 |
| | | N+I LA E++ GK IS +AL ILNS D+ + A ++ ++LN++++AK | |
| Sbjct: | 2 | NWIQLAQEVIEGKR-ISENEALAILNSPDDELLLLLQGAFTIRQTYYGKKVKLNMIMNAK | 60 |
| Query: | 76 | QGLCAENCGYCSQSKESTADIDKFGLLPQNVILKQAIVAHQNGASVFCIAMSGTKPSKRE | 135 |
| | | G C ENCGYCSQS S A ID + ++ + IL+ A AH+ +CI SG P+ R+ | |
| Sbjct: | 61 | SGFCPENCGYCSQSSISKAPIDAYPMVNKETILEGAKRAHELNVGTYCIVASGRGPTNRD | 120 |
| Query: | 136 | IEQLCQVIPEIKKSLPLEICLTAGFLDREQLHQLKQAGIDRINHNLNTPEENYPNIATTH | 195 |
| | | I+ + + + EIK + L+IC G L EQ QLK AG+DR NHN+NT ++ I T+H | |
| Sbjct: | 121 | IDHVTEAVREIKDTYGLKICACLGILKPEQAEQLKAAGVDRYNHNVNTSARHHDQITTSH | 180 |
| Query: | 196 | SFKDRCDTLERIHNEDIDVCSGFICGMGESDEGLITLAFRLKELDPYSIPVNFLLAVEGT | 255 |
| | | +++DR +T+E + + I CSG I GM E+ E ++ +AF+L+ELD SIPVNFL A++GT | |
| Sbjct: | 181 | TYEDRVNTVEVVKHSGISPCSGVIVGMKETKEDVVDMAFQLRELDADSIPVNFLHAIDGT | 240 |
| Query: | 256 | PLGKYNYLTPIKCLKIMAMLRFVFPFKELRLSAGREVHFENFESLVTLLVDSTFLGNYLT | 315 |
| | | PL + LTPI CLK++++ R+V P KE+R+S GREV+ ++ + L +S F+G+YLT | |
| Sbjct: | 241 | PLQGVHELTPIYCLKVLSLFRYVCPTKEIRISGGREVNLKSLQPLGLYAANSIFIGDYLT | 300 |
| Query: | 316 | EGGRNQHTDIEFLEKL | 331 |
| | | G+ + D + L+ L | |
| Sbjct: | 301 | TAGQEETADHQILKDL | 316 |

[0656] No corresponding DNA sequence was identified in S. pyogenes.

[0657] Based on this analysis, it was predicted that this protein and its epitopes, could be useful antigens for vaccines or diagnostics.

### EXAMPLE 56

[0658] A DNA sequence (GBSx0055) was identified in S. agalactiae <SEQ ID 175> which encodes the amino acid sequence <SEQ ID 176>. Analysis of this protein sequence reveals the following:

```
Possible site: 24
>>> Seems to have no N-terminal signal sequence
----- Final Results -----
                            bacterial cytoplasm --- Certainty = 0.3440(Affirmative) < succ>
                              bacterial membrane --- Certainty = 0.0000(Not Clear) < succ>
                                bacterial outside --- Certainty = 0.0000(Not Clear) < succ>
```

[0659] A related GBS nucleic acid sequence <SEQ ID 9613> which encodes amino acid sequence <SEQ ID 9614> was also identified.

[0660] The protein has no significant homology with any sequences in the GENPEPT database.

[0661] No corresponding DNA sequence was identified in S. pyogenes.

[0662] Based on this analysis, it was predicted that this protein and its epitopes, could be useful antigens for vaccines or diagnostics.

### EXAMPLE 57

[0663] A DNA sequence (GBSx0056) was identified in S. agalactiae <SEQ ID 177> which encodes the amino acid sequence <SEQ ID 178>. Analysis of this protein sequence reveals the following:

```
Possible site: 15
>>> Seems to have no N-terminal signal sequence
----- Final Results -----
                            bacterial cytoplasm --- Certainty = 0.1985(Affirmative) < succ>
                              bacterial membrane --- Certainty = 0.0000(Not Clear) < succ>
                                bacterial outside --- Certainty = 0.0000(Not Clear) < succ>
```

[0664] The protein has no significant homology with any sequences in the GENPEPT database.

[0665] No corresponding DNA sequence was identified in S. pyogenes.

[0666] Based on this analysis, it was predicted that this protein and its epitopes, could be useful antigens for vaccines or diagnostics.

### EXAMPLE 58

[0667] A DNA sequence (GBSx0057) was identified in S. agalactiae <SEQ ID 179> which encodes the amino acid sequence <SEQ ID 180>. Analysis of this protein sequence reveals the following:

| Possible site: 32 | | | | |
|---|---|---|---|---|
| >>> Seems to have no N-terminal signal sequence | | | | |
| | INTEGRAL | Likelihood = −0.11 | Transmembrane | 347-363 (347-363) |

```
----- Final Results -----
                              bacterial membrane --- Certainty = 0.1044(Affirmative) < succ>
                                bacterial outside --- Certainty = 0.0000(Not Clear) < succ>
                          bacterial cytoplasm --- Certainty = 0.0000(Not Clear) < succ>
```

[0668] The protein has homology with the following sequences in the GENPEPT database:

| >GP: CAC11722 GB: AL445064 acetyl-CoA acetyltransferase related | | | |
|---|---|---|---|
| protein [Thermoplasma acidophilum] | | | |
| Identities = 113/388 (29%), Positives = 181/388 (46%), Gaps = 31/388 (7%) | | | |
| Query: | 4 | RDVYIGFGLRTPIGIKGKQFKHYR-PELLGAHLLNQIKKIESESNID-----SIICGNTV | 57 |
| | | RDV+I RT IG G+ F + P+L GA IK + E+++D +I GN + | |
| Sbjct: | 2 | RDVFIVAAKRTAIGKFGRSFSKLKAPQLGGA----AIKAVMDEAHVDPASVEEVIMGNVI | 57 |
| Query: | 58 | --GTGGNIGRLMTLFSDYESYIPVQTIDMQCASSSSALFFGYLKISTGINEKVLVGGIES | 115 |
| | | G G N + + T+++ CAS A+ +I+ G + V+ GG+ES | |
| Sbjct: | 58 | QAGNGQNPAGQAAFHGGLPNSVLKYTVNVVCASGMLAVESAAREIALGERDLVIAGGMES | 117 |
| Query: | 116 | SSLQPMR-----RYAKEDNRNGEYTVAQ-FSPDSYAETVMLE----GAQRVCQKYGFRRE | 165 |
| | | S P R+ + + Y + D + E A+R +K+G RE | |
| Sbjct: | 118 | MSNAPFLLPADLRWGPKHLLHKNYKIDDAMLTDGLLDAFYFEHMGVSAERTSRKFGITRE | 177 |
| Query: | 166 | MLDKLAFLSHKRALTAKQGGYLEEVILPMEGM-RDQGVRKLKETFFQKLPRLMENSPLLT | 224 |
| | | M D+ + S++RA+ A + G + I+ EG+ D+G+RK +LP + + +LT | |
| Sbjct: | 178 | MADEYSVQSYERAIRATESGEFADEIVQFEGLDHDEGIRKTTMEDLARLPPAFDKNGILT | 237 |
| Query: | 225 | IGNVCLMHDAAAFLTLQSQKT--EFRIVHIVEVAG------DPKLSPELVHTATEKLLTE | 276 |
| | | GH + D + L + S+K E+ + I + G DP E AT KLL + | |
| Sbjct: | 238 | AGNSAQLSDGGSALMIASEKAINEYGLKPIARITGYEQASLDPLDFVEAPIPATRKLLEK | 297 |
| Query: | 277 | THTKISDYDAIEWNEPFAAIDALFNHYYPEEREKFNIFGGTLAYGHPYACSGIINILHLM | 336 |
| | | H I YD +E NE F+ + + + E+FN+ GG +A GHP SG I+ LM | |
| Sbjct: | 298 | QHKSIDYYDLVEHNEAFSIASVIVRNELKIDNERFNVNGGAVAIGHPIGNSGARIIVTLM | 357 |
| Query: | 337 | QALKYKNKPMGLTAIAGAGGVGMAISIE | 364 |
| | | ALK+++ GL + GG +++E | |
| Sbjct: | 358 | NALKHRHLKTGLATLCHGGGGAHTLTLE | 385 |

[0669] A related DNA sequence was identified in S. pyogenes <SEQ ID 181> which encodes the amino acid sequence <SEQ ID 182>. Analysis of this protein sequence reveals the following:

| Possible site: 22 | | | | |
|---|---|---|---|---|
| >>> Seems to have no N-terminal signal sequence | | | | |
| | INTEGRAL | Likelihood = −1.28 | Transmembrane | 345-361 (345-361) |

```
----- Final Results -----
                              bacterial membrane --- Certainty = 0.1510(Affirmative) < succ>
                                bacterial outside --- Certainty = 0.0000(Not Clear) < succ>
                            bacterial cytoplasm --- Certainty = 0.0000(Not Clear) < succ>
```

[0670] The protein has homology with the following sequences in the databases:

| >GP: BAB03328 GB: AB035449 acetyl-CoA c-acetyltransferase | | | |
|---|---|---|---|
| [Staphylococcus aureus] | | | |
| Identities = 115/382 (30%), Positives = 184/382 (48%), Gaps = 29/382 (7%) | | | |
| Query: | 1 | MTDVYIAAGLRTPIGLVGKQFAKEQPEILGAKLINALQNKYPV---PIDQVICGNTVGTG | 57 |
| | | M I A RT G G +PE L L + KYP ID V+ GN VG G | |
| Sbjct: | 1 | MNQAVIVAAKRTAFGKYGGTLKHLEPEQLLKPLFQHFKEKYPEVISKIDDVVLGNVVGNG | 60 |
| Query: | 58 | GNIGRLMTLYSHLGESVSALTVDMQCASAGAALSVGYAKIKAGMASNLLVGGIESSS--- | 114 |
| | | GNI R L + L +S+ +T+D QC S ++ I+AG + GG+ES+S | |
| Sbjct: | 61 | GNIARKALLEAGLKDSIPGVTIDRQCGSGLESVQYACRMIQAGAGKVYIAGGVESTSRAP | 120 |
| Query: | 115 | ---LQPESVYASADWRQGAYKVAQFSPDSISPFAMIEGAERVAREHGFTKEYLNHWTLRS | 171 |
| | | +P SVY +A Y+ A F+P+ P +MI+GAE VA+ + ++E + + RS | |
| Sbjct: | 121 | WKIKRPHSVYETA--LPEFYERASFAPEMSDP-SMIQGAENVAKMYDVSRELQDEFAYRS | 177 |
| Query: | 172 | HQKASYCQEQALLADLILDLSGA-----SDQGIRPRLSSKVLSKVPPILGEGHVISAANA | 226 |
| | | HQ + + ++ IL ++ +D+ ++ + + P++ +G ++AAN+ | |
| Sbjct: | 178 | HQLTAENVKNGNISQEILPITVKGEIFNTDESLKSHIPKDNFGRFKPVI-KGGTVTAANS | 236 |
| Query: | 227 | CLTHDAAAFLQLSSQPSAFKL--------IDVVEVAGDPQRSPLMVIKASQVLLEKHGLG | 278 |
| | | C+ +D A L + + A++L D V V D + + A LL+++ L | |
| Sbjct: | 237 | CMKNDGAVLLLIMEKDMAYELGFEHGLLFKDGVTVGVDSNFPGIGPVPAISNLLKRNQLT | 296 |
| Query: | 279 | MADMTAIEWNEAFAVIDGLFETHYPDLLDRYNIFGGALAYGHPYGASAAIIILHLMRALE | 338 |
| | | + ++ IE NEAF+ + + NI+GGALA GHPYGAS A ++ L + | |
| Sbjct: | 297 | IENIEVIEINEAFSAQVVACQQALNISNTQLNIWGGALASGHPYGASGAQLVTRLFYMFD | 356 |
| Query: | 339 | IKNGRYGIAAIAAAGGQGFAVL | 360 |
| | | + IA++ GG G A L | |
| Sbjct: | 357 | KET---MIASMGIGGGLGNAAL | 375 |

[0671] An alignment of the GAS and GBS proteins is shown below:

| Identities = 182/362 (50%), Positives = 243/362 (66%), Gaps = 2/362 (0%) | | | |
|---|---|---|---|
| Query: | 5 | DVYIGFGLRTPIGIKGKQFKHYRPELLGAHLLNQIKKIESESNIDSIICGNTVGTGGNIG | 64 |
| | | DVYI GLRTPIG+ GKQF +PE+LGA L+N ++ + ID +ICGNTVGTGGNIG | |
| Sbjct: | 3 | DVYIAAGLRTPIGLVGKQFAKEQPEILGAKLINALQN-KYPVPIDQVICGNTVGTGGNIG | 61 |
| Query: | 65 | RLMTLFSDYESYIPVQTIDMQCASSSSALFFGYLKISTGINEKVLVGGIESSSLQPMRRY | 124 |
| | | RLMTL+S + T+DMQCAS+ +AL GY KI G+ +LVGGIESSSLQP Y | |
| Sbjct: | 62 | RLMTLYSHLGESVSALTVDMQCASAGAALSVGYAKIKAGMASNLLVGGIESSSLQPESVY | 121 |
| Query: | 125 | AKEDNRNGEYTVAQFSPDSYAETVMLEGAQRVCQKYGFRREMLDKLAFLSHKRALTAKQG | 184 |
| | | A D R G Y VAQFSPDS + M+EGA+RV +++GF +E L+ SH++A ++ | |
| Sbjct: | 122 | ASADWRQGAYKVAQFSPDSISPFAMIEGAERVAREHGFTKEYLNHWTLRSHQKASYCQEQ | 181 |
| Query: | 185 | GYLEEVILPMEGMRDQGVR-KLKETFFQKLPRLMENSPLLTIGNVCLMHDAAAFLTLQSQ | 243 |
| | | L ++IL + G DQG+R +L K+P ++ +++ N CL HDAAAFL L SQ | |
| Sbjct: | 182 | ALLADLILDLSGASDQGIRPRLSSKVLSKVPPILGEGHVISAANACLTHDAAAFLQLSSQ | 241 |
| Query: | 244 | KTEFRIVHIVEVAGDPKLSPELVHTATEKLLTETHTKISDYDAIEWNEPFAAIDALFNHY | 303 |
| | | + F+++ +VEVAGDP+ SP +V A++ LL + ++D AIEWNE FA ID LF + | |
| Sbjct: | 242 | PSAFKLIDVVEVAGDPQRSPLMVIKASQVLLEKHGLGMADMTAIEWNEAFAVIDGLFETH | 301 |
| Query: | 304 | YPEEREKFNIFGGTLAYGHPYACSGIINILHLMQALKYKNKPMGLTAIAGAGGVGMAISIEY | 365 |
| | | YP+ +++NIFGG LAYGHPY S I ILHLM+AL+ KN G+ AIA AGG G A+ ++Y | |
| Sbjct: | 302 | YPDLLDRYNIFGGALAYGHPYGASAAIIILHLMRALEIKNGRYGIAAIAAAGGQGFAVLLKY | 363 |

[0672] Based on this analysis, it was predicted that these proteins and their epitopes could be useful antigens for vaccines or diagnostics.

### EXAMPLE 59

[0673] A DNA sequence (GBSx0058) was identified in S. agalactiae <SEQ ID 183> which encodes the amino acid sequence <SEQ ID 184>. Analysis of this protein sequence reveals the following:

| Possible site: 13 | | | | |
|---|---|---|---|---|
| >>> Seems to have no N-terminal signal sequence | | | | |
| | INTEGRAL | Likelihood = −3.82 | Transmembrane | 149-165 (148-165) |

```
----- Final Results -----
                              bacterial membrane --- Certainty = 0.2529(Affirmative) < succ>
                                bacterial outside --- Certainty = 0.0000(Not Clear) < succ>
                            bacterial cytoplasm --- Certainty = 0.0000(Not Clear) < succ>
```

[0674] The protein has homology with the following sequences in the GENPEPT database:

| >GP: CAB12876 GB: Z99109 similar to long-chain fatty-acid-CoA ligase | | | |
|---|---|---|---|
| [Bacillus subtilis] | | | |
| Identities = 90/382 (23%), Positives = 158/382 (40%), Gaps = 24/382 (6%) | | | |
| Query: | 47 | ISTHSLLNQLVRFVSKLCQKALPIICKPNLTHNEISRLEKEV--QYAPQLADFGVLSSGT | 104 |
| | | IS L+ L F +KL P++ N +IS + P+ + +SG+ | |
| Sbjct: | 95 | ISNADLVVTLAFFKNKLTDSQTPVVLLDNCMA-DISEAAADPLPTIDPEHPFYMGFTSGS | 153 |
| Query: | 105 | TADAKLLWRSFTSWSDFFSIQNAYFSVTSNSKLFIQGDFSFTGNLNLALSLLLLGGTLVV | 164 |
| | | T K RS SW + F+ FS++S+ K+ I G + L A+S L LGGT+ + | |
| Sbjct: | 154 | TGKPKAFTRSHRSWMESFTCTETDFSISSDDKVLIPGALMSSHFLYGAVSTLFLGGTVCL | 213 |
| Query: | 165 | TQKNSVKYWQTLWEKTGVTHLYLLPSYLKLVEQYSKETALDNKTIITSSQYVSDSLLEGL | 224 |
| | | +K S + + ++ LY +P+ + + K I + + + ++S + L | |
| Sbjct: | 214 | LKKFSPAKAKEWLCRESISVLYTVPTMTDALARIEGFPDSPVKIISSGADWPAES-KKKL | 272 |
| Query: | 225 | YRKHPKVSVKIFYGASELNYVSWYDGRDIRDKPQYVGEIVPNVAVRIKE----------- | 273 |
| | | P + + FYG SEL++V++ D + KP G NV + I+ | |
| Sbjct: | 273 | AAAWPHLKLYDFYGTSELSFVTFSSPEDSKRKPHSAGRPFHNVRIEIRNAGGERCQPGEI | 332 |
| Query: | 274 | GRIFVKTPYSICG-----LSSEYCAGDYGELID--GKLYLFGRGGDWCNQSGIKLYLPRL | 326 |
| | | G+IFVK+P G E+ D +D G LY+ GR G+ ++ + | |
| Sbjct: | 333 | GKIFVKSPMRFSGYVNGSTPDEWMTVDDMGYVDEEGFLYISGRENGMIVYGGLNIFPEEI | 392 |
| Query: | 327 | IEKIKTCPYIKDAVAFTKESQSHGQESHCCIVLIENQMQQECLKWLSEHFEKKYGFKHYH | 386 |
| | | + CP ++ A + G+ + V++ N + W + K + | |
| Sbjct: | 393 | ERVLLACPEVESAAVVGIPDEYWGEIA--VAVILGNANARTLKAWCKQKLASYKIPKKWV | 450 |
| Query: | 387 | IVSKIPLMPSGKIDYQQLKRQL | 408 |
| | | +P SGKI ++K+ L | |
| Sbjct: | 451 | FADSLPETSSGKIARSRVKKWL | 472 |

[0675] A related DNA sequence was identified in S. pyogenes <SEQ ID 185> which encodes the amino acid sequence <SEQ ID 186>. Analysis of this protein sequence reveals the following:

```
Possible site: 52
>>> Seems to have no N-terminal signal sequence
----- Final Results -----
                            bacterial cytoplasm --- Certainty = 0.2487(Affirmative) < succ>
                              bacterial membrane --- Certainty = 0.0000(Not Clear) < succ>
                                bacterial outside --- Certainty = 0.0000(Not Clear) < succ>
```

[0676] An alignment of the GAS and GBS proteins is shown below:

| Identities = 154/413 (37%), Positives = 235/413 (56%), Gaps = 9/413 (2%) | | | |
|---|---|---|---|
| Query: | 1 | MLESLKTIVKTNSDKKLFDGD-LQVSYGEFYNLVR-QDMASQDNRKHVISTHSLLNQLVR | 58 |
| | | ML L+ K +KK D + ++Y E + V +D +D+ ++IS LNQL+ | |
| Sbjct: | 1 | MLTKLEYWAKQCPNKKAIVADQISLTYQELWQAVLIKDQTIKDSVPYIISHSRYLNQLLS | 60 |
| Query: | 59 | FVSKLCQKALPIICKPNLT---HNEISRLEKEVQYAPQLADFGVLSSGTTADAKLLWRSF | 115 |
| | | F+ L + + PII PN++ +I ++ E+ + ADF VLSSGTT AKL WR | |
| Sbjct: | 61 | FLRGLKEGSCPIILHPNISGTFQQQIKHVDGELL---KKADFAVLSSGTTGKAKLFWRRL | 117 |
| Query: | 116 | TSWSDFFSIQNAYFSVTSNSKLFIQGDFSFTGNLNLALSLLLLGGTLVVTQKNSVKYWQT | 175 |
| | | ++W+ F QN F +T NS LF+ G FSFTGNLNLAL+ L GG LV++QK S+K W + | |
| Sbjct: | 118 | STWTRLFDYQNKVFGMTGNSCLFLHGSFSFTGNLNLALAQLWAGGCLVLSQKLSLKTWLS | 177 |
| Query: | 176 | LWEKTGVTHLYLLPSYLKLVEQYSKETALDNKTIITSSQYVSDSLLEGLYRKHPKVSVKI | 235 |
| | | LW+ V+HLYLLP+YL + Y + + ++TSSQ +S LL Y+K P++ + I | |
| Sbjct: | 178 | LWQAKKVSHLYLLPTYLNRLLPYLTKNNMTATHLLTSSQMISQELLRHYYKKFPQLEIVI | 237 |
| Query: | 236 | FYGASELNYVSWYDGRDIRDKPQYVGEIVPNVAVRIKEGRIFVKTPYSICGLSSEYCAGD | 295 |
| | | FYGASEL++++W +GR VG+ P+V++ K+ IFV+TPYS+ G+S Y D | |
| Sbjct: | 238 | FYGASELSFITWCNGRAAVKINGLVGQPFPDVSISFKDKEIFVETPYSVEGMSQPYSVSD | 297 |
| Query: | 296 | YGELIDGKLYLFGRGGDWCNQSGIKLYLPRLIEKIKTCPYIKDAVAFTKESQSHGQESHC | 355 |
| | | G++ L L GR DW NQ G+K +LP L+E P +K+A A K + + | |
| Sbjct: | 298 | LGKMSPAGLILEGRQDDWVNQRGVKCHLPSLVELAHQAPNVKEAHAL-KIGKGENETLIL | 356 |
| Query: | 356 | CIVLIENQMQQECLKWLSEHFEKKYGFKHYHIVSKIPLMPSGKIDYQQLKRQL | 408 |
| | | +VL + +L+ + K+Y ++ +PL +GKI+ + L ++ | |
| Sbjct: | 357 | VLVLTKKDCLAPIKDFLALYLNSGQLPKYYLVIDCLPLKDNGKINREVLLNKI | 409 |

[0677] Based on this analysis, it was predicted that these proteins and their epitopes could be useful antigens for vaccines or diagnostics.

### EXAMPLE 60

[0678] A DNA sequence (GBSx0059) was identified in S. agalactiae <SEQ ID 187> which encodes the amino acid sequence <SEQ ID 188>. This protein is predicted to be endonuclease III (pdg). Analysis of this protein sequence reveals the following:

| Possible site: 46 | | | | |
|---|---|---|---|---|
| >>> Seems to have no N-terminal signal sequence | | | | |
| | INTEGRAL | Likelihood = −0.00 | Transmembrane | 25-41 (25-41) |

```
----- Final Results -----
                              bacterial membrane --- Certainty = 0.1001(Affirmative) < succ>
                                bacterial outside --- Certainty = 0.0000(Not Clear) < succ>
                            bacterial cytoplasm --- Certainty = 0.0000(Not Clear) < succ>
```

[0679] The protein has homology with the following sequences in the GENPEPT database:

| >GP: BAB05417 GB: AP001512 endonuclease III (DNA repair) [Bacillus | | | |
|---|---|---|---|
| halodurans] | | | |
| Identities = 95/202 (47%), Positives = 134/202 (66%) | | | |
| Query: | 1 | MLSKAKSRYIIREIIKLFPDAKPSLDFTNVFELLVAVMLSAQTTDAAVNKVTPALFERFP | 60 |
| | | ML+K +++ + I ++PDA+ L +N FELL+AV+LSAQ TDA VNKVTP LF ++ | |
| Sbjct: | 1 | MLTKKQTQEALAVIADMYPDAECELTHSNPFELLIAVVLSAQCTDALVNKVTPRLFAKYK | 60 |
| Query: | 61 | NPLVLAQADPKEIEPYISKIGLYRNKARFLNQCAKQLIEHFDGKVPRTRQELESLAGVGR | 120 |
| | | P +E+E I IGLYRNKA+ + + + L+E + G+VP+ R EL LAGVGR | |
| Sbjct: | 61 | TPEDYIAVPLEELEQDIRSIGLYRNKAKNIKKLCQSLLEQYGGEVPQDRDELVKLAGVGR | 120 |
| Query: | 121 | KTANVVMSVGFGIPAFAVDTHVTRICKHHQICKQSASPLEIEKRVMEVLPPEEWLAAHQS | 180 |
| | | KTANVV SV FG+PA AVDTHV R+ K IC+ + ++E+ +M+ +P +EW +H | |
| Sbjct: | 121 | KTANVVASVAFGVPAIAVDTHVERVSKRLGICRWKDNVTQVEQTLMKKIPMDEWSISHHR | 180 |
| Query: | 181 | MIYFGRAICHPKNPKCDQYPQL | 202 |
| | | +I+FGR C +NP+CD P L | |
| Sbjct: | 181 | LIFFGRYHCKAQNPQCDICPLL | 202 |

[0680] A related DNA sequence was identified in S. pyogenes <SEQ ID 189> which encodes the amino acid sequence <SEQ ID 190>. Analysis of this protein sequence reveals the following:

```
Possible site: 44
>>> Seems to have a cleavable N-term signal seq.
----- Final Results -----
                                bacterial outside --- Certainty = 0.3000(Affirmative) < succ>
                              bacterial membrane --- Certainty = 0.0000(Not Clear) < succ>
                            bacterial cytoplasm --- Certainty = 0.0000(Not Clear) < succ>
```

[0681] An alignment of the GAS and GBS proteins is shown below:

| Identities = 91/199 (45%), Positives = 133/199 (66%) | | | |
|---|---|---|---|
| Query: | 2 | LSKAKSRYIIREIIKLFPDAKPSLDFTNVFELLVAVMLSAQTTDAAVNKVTPALFERFPN | 61 |
| | | + KA+ ++ I ++FP+AK LD+ F+LL+AV+LSAQTTD AVNKVTP L++ +P | |
| Sbjct: | 3 | IGKARLAKVLTIIGQMFPEAKGELDWETPFQLLIAVILSAQTTDKAVNKVTPGLWQSYPE | 62 |
| Query: | 62 | PLVLAQADPKEIEPYISKIGLYRNKARFLNQCAKQLIEHFDGKVPRTRQELESLAGVGRK | 121 |
| | | LA A+ ++E + IGLY+NKA+ + + A+ + + F G+VP+T +ELESL GVGRK | |
| Sbjct: | 63 | IEDLAFAELSDVENALRTIGLYKNKAKNIIKTAQAIRDDFKGQVPKTHKELESLPGVGRK | 122 |
| Query: | 122 | TANVVMSVGFGIPAFAVDTHVTRICKHHQICKQSASPLEIEKRVMEVLPPEEWLAAHQSM | 181 |
| | | TANVV++ +G+PA AVDTHV R+ K I A +IE +M +P ++W+ H + | |
| Sbjct: | 123 | TANVVLAEVYGVPAIAVDTHVARVSKRLNISSPDADVKQIEADLMAKIPKKDWIITHHRL | 182 |
| Query: | 182 | IYFGRAICHPKNPKCDQYP | 200 |
| | | I+FGR C K PKC+ P | |
| Sbjct: | 183 | IFFGRYHCLAKKPKCEICP | 201 |

[0682] Based on this analysis, it was predicted that these proteins and their epitopes could be useful antigens for vaccines or diagnostics.

### EXAMPLE 61

[0683] A DNA sequence (GBSx0060) was identified in S. agalactiae <SEQ ID 191> which encodes the amino acid sequence <SEQ ID 192>. Analysis of this protein sequence reveals the following:

Possible site: 51
>>> Seems to have no N-terminal signal sequence
----- Final Results -----
bacterial cytoplasm --- Certainty = 0.2264 (Affirmative) < succ>
bacterial membrane --- Certainty = 0.0000 (Not Clear) < succ>
bacterial outside --- Certainty = 0.0000 (Not Clear) < succ>

[0684] The protein has homology with the following sequences in the GENPEPT database:

| >GP: BAA96473 GB: AB036428 hypothetical 8.3 kDa protein [Streptococcus mutans] | | | |
|---|---|---|---|
| Identities = 53/67 (79%), Positives = 62/67 (92%) | | | |
| Query: | 1 | MKVLFDVQNLLKKFGIYVYIGKRLYDIEVMKIELQRLYDNGLISRDDYLKAELILRREHR | 60 |
| | | MK L+DVQ LLK+FGI+VY+GKRLYDIE+MKIEL+RLYDNGLIS+ DYL AELILRREHR | |
| Sbjct: | 1 | MKTLYDVQRLLKQFGIFVYLGKRLYDIEMMKIELERLYDNGLISKSDYLHAELILRREHR | 60 |
| Query: | 61 | LELEKEN | 67 |
| | | +E E+EN | |
| Sbjct: | 61 | IEKEREN | 67 |

[0685] A related DNA sequence was identified in S. pyogenes <SEQ ID 193> which encodes the amino acid sequence <SEQ ID 194>. Analysis of this protein sequence reveals the following:

Possible site: 57
>>> Seems to have no N-terminal signal sequence
----- Final Results -----
bacterial cytoplasm --- Certainty = 0.1962 (Affirmative) < succ>
bacterial membrane --- Certainty = 0.0000 (Not Clear) < succ>
bacterial outside --- Certainty = 0.0000 (Not Clear) < succ>

[0686] An alignment of the GAS and GBS proteins is shown below:

| Identities = 53/66 (80%), Positives = 60/66 (90%) | | | |
|---|---|---|---|
| Query: | 1 | MKVLFDVQNLLKKFGIYVYIGKRLYDIEVMKIELQRLYDNGLISRDDYLKAELILRREHR | 60 |
| | | MK L+DVQ LLK FGI+VY+GKRLYDIE+MKIELQRLYD+GL+ + DYL AELILRREHR | |
| Sbjct: | 7 | MKTLYDVQQLLKNFGIFVYLGKRLYDIEMMKIELQRLYDSGLLDKRDYLNAELILRREHR | 66 |
| Query: | 61 | LELEKE | 66 |
| | | LELEKE | |
| Sbjct: | 67 | LELEKE | 72 |

[0687] Based on this analysis, it was predicted that these proteins and their epitopes could be useful antigens for vaccines or diagnostics.

### EXAMPLE 62

[0688] A DNA sequence (GBSx0061) was identified in S. agalactiae <SEQ ID 195> which encodes the amino acid sequence <SEQ ID 196>. Analysis of this protein sequence reveals the following:

| Possible site: 31 | | | | |
|---|---|---|---|---|
| >>> Seems to have no N-terminal signal sequence | | | | |
| | INTEGRAL | Likelihood = −0.06 | Transmembrane | 133-149 (133-150) |

```
----- Final Results -----
                              bacterial membrane --- Certainty = 0.1022(Affirmative) < succ>
                                bacterial outside --- Certainty = 0.0000(Not Clear) < succ>
                            bacterial cytoplasm --- Certainty = 0.0000(Not Clear) < succ>
```

[0689] The protein has homology with the following sequences in the GENPEPT database:

| >GP: BAB05144 GB: AP001512 glucose kinase [Bacillus halodurans] | | | |
|---|---|---|---|
| Identities = 145/315 (46%), Positives = 209/315 (66%), Gaps = 2/315 (0%) | | | |
| Query: | 6 | LGIDLGGTTIKFGILTLEGEVQEKWAIETNTLENGRHIVSDIVESLKHRLSLYGLTKDDF | 65 |
| | | +G+D+GGTTIK LT GE+ +KW I TN + G I ++I ++L RLS + +K D | |
| Sbjct: | 7 | VGVDVGGTTIKMAFLTTAGEIVDKWEIPTNKQDGGALITTNIADALDKRLSGHHKSKSDL | 66 |
| Query: | 66 | LGIGMGSPGAVDRTSKTVTGAFNLNWADTQEVGSVIEKEVGIPFFIDNDANVAALGERWV | 125 |
| | | +GIG+G+PG ++ + + A N+ W D + +E+E +P +DNDAN+AALGE W | |
| Sbjct: | 67 | IGIGLGAPGFIEMDTGFIYHAVNIGWRDFP-LKDKLEEETKLPVIVDNDANIAALGEMWK | 125 |
| Query: | 126 | GAGANNPDVVFVTLGTGVGGGVIADGNLIHGVAGAGGEIGHMIVDPENGFTCTCGNKGCL | 185 |
| | | GAG +++ +TLGTGVGGG++A+GN++HGV G GEIGH+ V PE G C CG GCL | |
| Sbjct: | 126 | GAGDGAKNMLLITLGTGVGGGIVANGNILHGVNGMAGEIGHITVIPEGGAPCNCGKTGCL | 185 |
| Query: | 186 | ETVASATGVVRVARQLAEQYEGSSAIKAAIDNGDTVTSKDIFIAAEDGDKFANSVVERVS | 245 |
| | | ETVASATG+ R+A + +++ S + D +T+KD+F AA+ D FA SVV+ ++ | |
| Sbjct: | 186 | ETVASATGIARIATEGVTEHK-ESQLALDYDKHGVLTAKDVFSAADASDAFALSVVDHIA | 244 |
| Query: | 246 | RYLGLAAANISNILNPDSVVIGGGVSAAGEFLRSRVEKYFVTFAFPQVKKSTKIKIAELG | 305 |
| | | YLG A AN++N LNP+ +VIGGGVS AG+ L ++++F +A P+V + +IA LG | |
| Sbjct: | 245 | YYLGFAIANLANALNPEKIVIGGGVSKAGDTLLKPIKQHFEAYALPRVADGAEFRIATLG | 304 |
| Query: | 306 | NDAGIIGAASLANQQ | 320 |
| | | NDAG+IG L QQ | |
| Sbjct: | 305 | NDAGVIGGGWLVKQQ | 319 |

[0690] A related DNA sequence was identified in S. pyogenes <SEQ ID 197> which encodes the amino acid sequence <SEQ ID 198>. Analysis of this protein sequence reveals the following:

```
Possible site: 23
>>> Seems to have no N-terminal signal sequence
----- Final Results -----
                            bacterial cytoplasm --- Certainty = 0.1060(Affirmative) < succ>
                              bacterial membrane --- Certainty = 0.0000(Not Clear) < succ>
                                bacterial outside --- Certainty = 0.0000(Not Clear) < succ>
```

[0691] An alignment of the GAS and GBS proteins is shown below:

| Identities = 270/319 (84%), Positives = 292/319 (90%) | | | |
|---|---|---|---|
| Query: | 1 | MSKKLLGIDLGGTTIKFGILTLEGEVQEKWAIETNTLENGRHIVSDIVESLKHRLSLYGL | 60 |
| | | MS+KLLGIDLGGTTIKFGILT GEVQEKWAIETN LE G+HIV DI+ S+KHRL LYGL | |
| Sbjct: | 1 | MSQKLLGIDLGGTTIKFGILTAAGEVQEKWAIETNILEGGKHIVPDIIASIKHRLDLYGL | 60 |
| Query: | 61 | TKDDFLGIGMGSPGAVDRTSKTVTGAFNLNWADTQEVGSVIEKEVGIPFFIDNDANVAAL | 120 |
| | | + DF+GIGMGSPGAVDR + TVTGAFNLNW +TQEVGSV+EKE+GIPF IDNDANVAAL | |
| Sbjct: | 61 | SSADFVGIGMGSPGAVDRDTNTVTGAFNLNWKETQEVGSVVEKELGIPFAIDNDANVAAL | 120 |
| Query: | 121 | GERWVGAGANNPDVVFVTLGTGVGGGVIADGNLIHGVAGAGGEIGHMIVDPENGFTCTCG | 180 |
| | | GERWVGAG NNPDVVF+TLGTGVGGG+IADGNLIHGVAGAGGEIGHMIV+PENGF CTCG | |
| Sbjct: | 121 | GERWVGAGENNPDVVFMTLGTGVGGGIIADGNLIHGVAGAGGEIGHMIVEPENGFACTCG | 180 |
| Query: | 181 | NKGCLETVASATGVVRVARQLAEQYEGSSAIKAAIDNGDTVTSKDIFIAAEDGDKFANSV | 240 |
| | | + GCLETVASATGVV+VAR LAE YEG SAIKAAIDNG+ VTSKDIF+AAE GD FA+SV | |
| Sbjct: | 181 | SHGCLETVASATGVVKVARLLAEAYEGDSAIKAAIDNGEGVTSKDIFMAAEAGDSFADSV | 240 |
| Query: | 241 | VERVSRYLGLAAANISNILNPDSVVIGGGVSAAGEFLRSRVEKYFVTFAFPQVKKSTKIK | 300 |
| | | VE+V YLGLA+ANISNILNPDSVVIGGGVSAAGEFLRSR+EKYFVTF FPQV+ STKIK | |
| Sbjct: | 241 | VEKVGYYLGLASANISNILNPDSVVIGGGVSAAGEFLRSRIEKYFVTFTFPQVRYSTKIK | 300 |
| Query: | 301 | IAELGNDAGIIGAASLANQ | 319 |
| | | IAELGNDAGIIGAASLA Q | |
| Sbjct: | 301 | IAELGNDAGIIGAASLARQ | 319 |

[0692] Based on this analysis, it was predicted that these proteins and their epitopes could be useful antigens for vaccines or diagnostics.

### EXAMPLE 63

[0693] A DNA sequence (GBSx0062) was identified in S. agalactiae <SEQ ID 199> which encodes the amino acid sequence <SEQ ID 200>. Analysis of this protein sequence reveals the following:

```
Possible site: 19
>>> Seems to have a cleavable N-term signal seq.
----- Final Results -----
                                bacterial outside --- Certainty = 0.3000(Affirmative) < succ>
                              bacterial membrane --- Certainty = 0.0000(Not Clear) < succ>
                            bacterial cytoplasm --- Certainty = 0.0000(Not Clear) < succ>
```

[0694] The protein has homology with the following sequences in the GENPEPT database:

| >GP: CAB14385 GB: Z99116 similar to hypothetical proteins [Bacillus | | | |
|---|---|---|---|
| subtilis] | | | |
| Identities = 51/124 (41%), Positives = 71/124 (57%), Gaps = 1/124 (0%) | | | |
| Query: | 3 | MSVILIIVILLAFVAWASWNYWRVRRAAKFLDNESFQKEMSRGQLIDIREAGAFHRKHIL | 62 |
| | | MS +++++I AF+ + +Y +R K L E F+ + QLID+RE F HIL | |
| Sbjct: | 1 | MSNMIVLIIFPAFIIYMIASYVYQQRIMKTLTEEEFRAGYRKAQLIDVREPNEFEGGHIL | 60 |
| Query: | 63 | GARNIPASQFKVALSALRKDKPVLLYDASRGQSIPRIVLLLRKEGFNQLYVLKDGFNYWT | 122 |
| | | GARNIP SQ K + +R DKPV LY + +S R LRK G ++Y LK GF W | |
| Sbjct: | 61 | GARNIPLSQLKQRKNEIRTDKPVYLYCQNSVRS-GRAAQTLRKNGCTEIYNLKGGFKKWG | 119 |
| Query: | 123 | GRVK | 126 |
| | | G++K | |
| Sbjct: | 120 | GKIK | 123 |

[0695] A related DNA sequence was identified in S. pyogenes <SEQ ID 201> which encodes the amino acid sequence <SEQ ID 202>. Analysis of this protein sequence reveals the following:

| Possible site: 30 | | | |
|---|---|---|---|
| >>> Seems to have an uncleavable N-term signal seq | | | |
| INTEGRAL | Likelihood = −4.41 | Transmembrane | 4-20 (1-22) |

----- Final Results -----
bacterial membrane --- Certainty = 0.2763 (Affirmative) < succ>
bacterial outside --- Certainty = 0.0000 (Not Clear) < succ>
bacterial cytoplasm --- Certainty = 0.0000 (Not Clear) < succ>

[0696] The protein has homology with the following sequences in the databases:

| >GP: BAB06532 GB: AP001516 unknown conserved protein [Bacillus halodurans] | | | |
|---|---|---|---|
| Identities = 46/120 (38%), Positives = 64/120 (53%) | | | |
| Query: | 8 | LWLLLVGIVGYYTWNYFSFRKMAKQVDNETFKDVMRQGQLIDLREPAAFRTKHILGARNF | 67 |
| | | +WL+L+ ++ Y + K K + E F R+ QLID+REP + + HILGARN | |
| Sbjct: | 5 | VWLVLLALLVYVLFKRLYTPKYLKTLTQEEFIQGYRKAQLIDVREPREYDSGHILGARNI | 64 |
| Query: | 68 | PAQQFDAAIKGLRKDKPVLIYENMRPQYRVPAVKKLKKAGFEDVYVLKDGIDYWDGKVKQ | 127 |
| | | P Q +K +R D+PV +Y + R A KK G EDV LK G W GK+K+ | |
| Sbjct: | 65 | PLSQLKQRLKEVRTDQPVYLYCQSGARSRQAAAILKKKHGVEDVNHLKGGFRKWTGKIKK | 124 |

[0697] An alignment of the GAS and GBS proteins is shown below:

| Identities = 63/126 (50%), Positives = 85/126 (67%) | | | |
|---|---|---|---|
| Query: | 1 | MDMSVILIIVILLAFVAWASWNYWRVRRAAKFLDNESFQKEMSRGQLIDIREAGAFHRKH | 60 |
| | | M +++ ++L+ V + +WNY+ R+ AK +DNE+F+ M +GQLID+RE AF KH | |
| Sbjct: | 1 | MSPITLILWLLLVGIVGYYTWNYFSFRKMAKQVDNETFKDVMRQGQLIDLREPAAFRTKH | 60 |
| Query: | 61 | ILGARNIPASQFKVALSALRKDKPVLLYDASRGQSIPRIVLLLRKEGFNQLYVLKDGFNY | 120 |
| | | ILGARN PA QF A+ LRKDKPVL+Y+ R Q V L+K GF +YVLKDG +Y | |
| Sbjct: | 61 | ILGARNFPAQQFDAAIKGLRKDKPVLIYENMRPQYRVPAVKKLKKAGFEDVYVLKDGIDY | 120 |
| Query: | 121 | WTGRVK | 126 |
| | | W G+VK | |
| Sbjct: | 121 | WDGKVK | 126 |

[0698] A related GBS gene <SEQ ID 8483> and protein <SEQ ID 8484> were also identified. Analysis of this protein sequence reveals the following:

| Lipop: Possible site: −1 Crend: 1 | | | |
|---|---|---|---|
| McG: Discrim Score: 17.55 | | | |
| GvH: Signal Score (−7.5): 3.36 | | | |
| Possible site: 17 | | | |
| >>> Seems to have a cleavable N-term signal seq. | | | |
| ALOM program | count: 0 | value: 8.86 | threshold: 0.0 |

| | | |
|---|---|---|
| PERIPHERAL | Likelihood = 8.86 | 99 |

modified ALOM score: −2.27
*** Reasoning Step: 3
----- Final Results -----
bacterial outside --- Certainty = 0.3000 (Affirmative) < succ>
bacterial membrane --- Certainty = 0.0000 (Not Clear) < succ>

[0699] The protein has homology with the following sequences in the databases:

[chemical structure]

[0700] SEQ ID 8484 (GBS13) was expressed in E. coli as a His-fusion product. SDS-PAGE analysis of total cell extract is shown in FIG. 3 (lane 4; MW 16 kDa). It was also expressed in E. coli as a GST-fusion product. SDS-PAGE analysis of total cell extract is shown in FIG. 9 (lane 2; MW 40.5 kDa).

[0701] The GST-fusion protein was purified as shown in FIG. 190, lane 5.

[0702] Based on this analysis, it was predicted that these proteins and their epitopes could be useful antigens for vaccines or diagnostics.

### EXAMPLE 64

[0703] A DNA sequence (GBSx0063) was identified in S. agalactiae <SEQ ID 203> which encodes the amino acid sequence <SEQ ID 204>. This protein is predicted to be regulatory protein TypA (typA). Analysis of this protein sequence reveals the following:

```
Possible Site: 36
>>> Seems to have no N-terminal signal sequence
----- Final Results -----
bacterial cytoplasm --- Certainty = 0.1738 (Affirmative) <succ>
  bacterial membrane --- Certainty = 0.0000 (Not Clear) <succ>
    bacterial outside --- Certainty = 0.0000 (Not Clear) <succ>
```

[0704] The protein has homology with the following sequences in the GENPEPT database:

| >GP:CAB13350 GB:Z99111 similar to GTP-binding elongation factor | | |
|---|---|---|
| [Bacillus subtilis] | | |
| Identities = 455/609 (74%), Positives = 534/609 (86%), Gaps = 2/609 (0%) | | |
| Query: 4 | LRTDIRNVAIIAHVDHGKTTLVDELLKQSHTLDERKELEERAMDSNDIEKERGITILAKN | 63 |
| | LR D+RN+AIIAHVDHGKTTLVD+LL Q+ T +++ ERAMDSND+E+ERGITILAKN | |
| Sbjct: 3 | LRNDLRNIAIIAHVDHGKTTLVDQLLHQAGTFRANEQVAERAMDSNDLERERGITILAKN | 62 |
| Query: 64 | TAVAYNDVRINIMDTPGHADFGGEVERIMKMVDGVVLVVDAYEGTMPQTRFVLKKALEQN | 123 |
| | TA+ Y D RINI+DTPGHADFGGEVERIMKMVDGVVLVVDAYEG MPQTRFVLKKALEQN | |
| Sbjct: 63 | TAINYKDTRINILDTPGHADFGGEVERIMKMVDGVVLVVDAYEGCMPQTRFVLKKALEQN | 122 |
| Query: 124 | LIPIVVVNKIDKPSARPSEVVDEVLELFIELGADDDQLDFPVVYASAINGTSSMSDDPSD | 183 |
| | L P+VVVNKID+ ARP EV+DEVL+LFIEL A+++QL+FPVVYASAINGT+S+ DP | |
| Sbjct: 123 | LNPVVVVNKIDRDFARPEEVIDEVLDLFIELDANEEQLEFPVVYASAINGTASL--DPKQ | 180 |
| Query: 184 | QEKTMAPIFDTIIDHIPAPVDNSEEPLQFQVSLLDYNDFVGRIGIGRVFRGTVKVGDQVT | 243 |
| | Q++ M +++TII H+PAPVDN+EEPLQFQV+LLDYND+VGRIGIGRVFRGT+KVG QV+ | |
| Sbjct: 181 | QDENMEALYETIIKHVPAPVDNAEEPLQFQVALLDYNDYVGRIGIGRVFRGTMKVGQQVS | 240 |
| Query: 244 | LSKLDGTTKNFRVTKLFGFFGLERKEIQEAKAGDLIAVSGMEDIFVGETVTPTDAIEPLP | 303 |
| | L KLDGT K+FRVTK+FGF GL+R EI+EAKAGDL+AVSGMEDI VGETV P D +PLP | |
| Sbjct: 241 | LMKLDGTAKSFRVTKIFGFQGLKRVEIEEAKAGDLVAVSGMEDINVGETVCPVDHQDPLP | 300 |
| Query: 304 | VLRIDEPTLQMTFLVNNSPFAGREGKWITSRKVEERLLAELQTDVSLRVDPTDSPDKWTV | 363 |
| | VLRIDEPTLQMTF+VNNSPFAGREGK++T+RK+EERL ++LQTDVSLRV+PT SPD W V | |
| Sbjct: 301 | VLRIDEPTLQMTFVVNNSPFAGREGKYVTARKIEERLQSQLQTDVSLRVEPTASPDAWVV | 360 |
| Query: 364 | SGRGELHLSILIETMRREGYELQVSRPEVIIKEIDGVQCEPFERVQIDTPEEYQGAIIQS | 423 |
| | SGRGELHLSILIE MRREGYELQVS+PEVIIKEIDGV+CEP ERVQID PEE+ G++++S | |
| Sbjct: 361 | SGRGELHLSILIENMRREGYELQVSKPEVIIKEIDGVRCEPVERVQIDVPEEHTGSVMES | 420 |
| Query: 424 | LSERKGDMLDMQMVGNGQTRLIFLIPARGLIGYSTEFLSMTRGYGIMNHTFDQYLPVVQG | 483 |
| | + RKG+M+DM GNGQ RLIF +P+RGLIGYSTEFLS+TRG+GI+NHTFD Y P+ G | |
| Sbjct: 421 | MGARKGEMVDMINNGNGQVRLIFTVPSRGLIGYSTEFLSLTRGFGILNHTFDSYQPMQAG | 480 |
| Query: 484 | EIGGRHRGALVSIENGKATTYSIMRIEERGTIFVNPGIEVYEGMIVGENSRDNDLGVNIT | 543 |
| | ++GGR +G LVS+ENGKAT+Y I IE+RG IFV PG EVYEGMIVGE++RDNDL VN++ | |
| Sbjct: 481 | QVGGRRQGVLVSMENGKATSYGIQGIEDRGVIFVEPGTEVYEGMIVGEHNRDNDLVVNVS | 540 |
| Query: 544 | TAKQMTNVRSATKDQTAVIKTPRILTLEESLEFLADDEYMEVTPESIRLRKQILNKAARD | 603 |
| | KQ TNVRSATKDQT IK RI++LEESLE+L +DEY EVTPESIRLRK+ILNK R+ | |
| Sbjct: 541 | KMKQQTNVRSATKDQTTTIKKARIMSLEESLEYLNEDEYCEVTPESIRLRKKILNKNERE | 600 |
| Query: 604 | KANKKKKSA | 612 |
| | KA KKKK+A | |
| Sbjct: 601 | KAAKKKKTA | 609 |

[0705] A related DNA sequence was identified in S. pyogenes <SEQ ID 205> which encodes the amino acid sequence <SEQ ID 206>. Analysis of this protein sequence reveals the following:

```
Possible site: 36
>>> Seems to have no N-termina1 signal sequence
----- Final Results -----
bacterial cytoplasm --- Certainty = 0.1738 (Affirmative) <succ>
  bacterial membrane --- Certainty = 0.0000 (Not Clear) <succ>
    bacterial outside --- Certainty = 0.0000 (Not Clear) <succ>
```

[0706] An alignment of the GAS and GBS proteins is shown below:

| Identities = 594/613 (96%), Positives = 607/613 (98%) | | | |
|---|---|---|---|
| Query: | 1 | MTNLRTDIRNVAIIAHVDHGKTTLVDELLKQSHTLDERKELEERAMDSNDIEKERGITIL | 60 |
| | | MTNLR DIRNVAIIAHVDHGKTTLVDELLKQSHTLDERKEL+ERAMDSND+EKERGITIL | |
| Sbjct: | 1 | MTNLRNDIRNVAIIAHVDHGKTTLVDELLKQSHTLDERKELQERAMDSNDLEKERGITIL | 60 |
| Query: | 61 | AKNTAVAYNDVRINIMDTPGHADFGGEVERIMKMVDGVVLVVDAYEGTMPQTRFVLKKAL | 120 |
| | | AKNTAVAYNDVRINIMDTPGHADFGGEVERIMKMVDGVVLVVDAYEGTMPQTRFVLKKAL | |
| Sbjct: | 61 | AKNTAVAYNDVRINIMDTPGHADFGGEVERIMKMVDGVVLVVDAYEGTMPQTRFVLKKAL | 120 |
| Query: | 121 | EQNLIPIVVVNKIDKPSARPSEVVDEVLELFIELGADDDQLDFPVVYASAINGTSSMSDD | 180 |
| | | EQNLIPIVVVNKIDKPSARP+EVVDEVLELFIELGADD+QL+FPVVYASAINGTSS+SDD | |
| Sbjct: | 121 | EQNLIPIVVVNKIDKPSARPAEVVDEVLELFIELGADDEQLEFPVVYASAINGTSSLSDD | 180 |
| Query: | 181 | PSDQEKTMAPIFDTIIDHIPAPVDNSEEPLQFQVSLLDYNDFVGRIGIGRVFRGTVKVGD | 240 |
| | | P+DQE TMAPIFDTIIDHIPAPVDNS+EPLQFQVSLLDYNDFVGRIGIGRVFRGTVKVGD | |
| Sbjct: | 181 | PADQEHTMAPIFDTIIDHIPAPVDNSDEPLQFQVSLLDYNDFVGRIGIGRVFRGTVKVGD | 240 |
| Query: | 241 | QVTLSKLDGTTKNFRVTKLFGFFGLERKEIQEAKAGDLIAVSGMEDIFVGETVTPTDAIE | 300 |
| | | QVTLSKLDGTTKNFRVTKLFGFFGLER+EIQEAKAGDLIAVSGMEDIFVGET+TPTD +E | |
| Sbjct: | 241 | QVTLSKLDGTTKNFRVTKLFGFFGLERREIQEAKAGDLIAVSGMEDIFVGETITPTDCVE | 300 |
| Query: | 301 | PLPVLRIDEPTLQMTFLVNNSPFAGREGKWITSRKVEERLLAELQTDVSLRVDPTDSPDK | 360 |
| | | LP+LRIDEPTLQMTFLVNNSPFAGREGKWITSRKVEERLLAELQTDVSLRVDPTDSPDK | |
| Sbjct: | 301 | ALPILRIDEPTLQMTFLVNNSPFAGREGKWITSRKVEERLLAELQTDVSLRVDPTDSPDK | 360 |
| Query: | 361 | WTVSGRGELHLSILIETMRREGYELQVSRPEVIIKEIDGVQCEPFERVQIDTPEEYQGAI | 420 |
| | | WTVSGRGELHLSILIETMRREGYELQVSRPEVIIKEIDGV+CEPFERVQIDTPEEYQGAI | |
| Sbjct: | 361 | WTVSGRGELHLSILIETMRREGYELQVSRPEVIIKEIDGVKCEPFERVQIDTPEEYQGAI | 420 |
| Query: | 421 | IQSLSERKGDMLDMQMVGNGQTRLIFLIPARGLIGYSTEFLSMTRGYGIMNHTFDQYLPV | 480 |
| | | IQSLSERKGDMLDMQMVGNGQTRLIFLIPARGLIGYSTEFLSMTRGYGIMNHTFDQYLPV | |
| Sbjct: | 421 | IQSLSERKGDMLDMQMVGNGQTRLIFLIPARGLIGYSTEFLSMTRGYGIMNHTFDQYLPV | 480 |
| Query: | 481 | VQGEIGGRHRGALVSIENGKATTYSIMRIEERGTIFVNPGIEVYEGMIVGENSRDNDLGV | 540 |
| | | VQGEIGGRHRGALVSIENGKATTYSIMRIEERGTIFVNPG EVYEGMIVGENSRDNDLGV | |
| Sbjct: | 481 | VQGEIGGRHRGALVSIENGKATTYSIMRIEERGTIFVNPGTEVYEGMIVGENSRDNDLGV | 540 |
| Query: | 541 | NITTAKQMTNVRSATKDQTAVIKTPRILTLEESLEFLADDEYMEVTPESIRLRKQILNKA | 600 |
| | | NITTAKQMTNVRSATKDQTAVIKTPRILTLEESLEFL DDEYMEVTPESIRLRKQILNKA | |
| Sbjct: | 541 | NITTAKQMTNVRSATKDQTAVIKTPRILTLEESLEFLNDDEYMEVTPESIRLRKQILNKA | 600 |
| Query: | 601 | ARDKANKKKKSAE | 613 |
| | | ARDKANKKKKSAE | |
| Sbjct: | 601 | ARDKANKKKKSAE | 613 |

[0707] Based on this analysis, it was predicted that these proteins and their epitopes could be useful antigens for vaccines or diagnostics.

### EXAMPLE 65

[0708] A DNA sequence (GBSx0065) was identified in S. agalactiae <SEQ ID 207> which encodes the amino acid sequence <SEQ ID 208>. This protein is predicted to be D-glutamic acid adding enzyme MurD (murD). Analysis of this protein sequence reveals the following:

```
RGD motif 441-443
Possible site: 29
>>> Seems to have no N-terminal signal sequence
----- Final Results -----
                              bacterial membrane --- Certainty = 0.0000(Not Clear) < succ>
                                bacterial outside --- Certainty = 0.0000(Not Clear) < succ>
                            bacterial cytoplasm --- Certainty = 0.0000(Not Clear) < succ>
```

[0709] A related GBS nucleic acid sequence <SEQ ID 9615> which encodes amino acid sequence <SEQ ID 9616> was also identified.

[0710] The protein has homology with the following sequences in the GENPEPT database:

| >GP: AAC95449 GB: AF068902 D-glutamic acid enzyme MurD [Streptococcus pneumoniae] | | | |
|---|---|---|---|
| Identities = 341/449 (75%), Positives = 394/449 (86%) | | | |
| Query: | 5 | MKTITTFENKKVLVLGLARSGEAAARLLAKLGAIVTVNDGKPFDENPTAQSLLEEGIKVV | 64 |
| | | MK I F+NKKVLVLGLA+SGE+AARLL KLGAIVTVNDGKPF++NP AQ LLEEGIKV+ | |
| Sbjct: | 1 | MKVIDQFKNKKVLVLGLAKSGESAARLLDKLGAIVTVNDGKPFEDNPAAQCLLEEGIKVI | 60 |
| Query: | 65 | CGSHPLELLDEDFCYMIKNPGIPYNNPMVKKALEKQIPVLTEVELAYLVSESQLIGITGS | 124 |
| | | G HPLELLDE+F M+KNPGIPY+NPM++KAL K IPVLTEVELAYL+SE+ +IGITGS | |
| Sbjct: | 61 | TGGHPLELLDEEFALMVKNPGIPYSNPMIEKALAKGIPVLTEVELAYLISEAPIIGITGS | 120 |
| Query: | 125 | NGKTTTTTMIAEVLNAGGQRGLLAGNIGFPASEVVQAANDKDTLVMELSSFQLMGVKEFR | 184 |
| | | NGKTTTTTMI EVL A GQ GLL+GNIG+PAS+V Q A DK+TLVMELSSFQLMGV+EF | |
| Sbjct: | 121 | NGKTTTTTMIGEVLTAAGQHGLLSGNIGYPASQVAQIATDKNTLVMELSSFQLMGVQEFH | 180 |
| Query: | 185 | PHIAVITNLMPTHLDYHGSFEDYVAAKWNIQNQMSSSDFLVLNFNQGISKELAKTTKATI | 244 |
| | | P IAVITNLMPTH+DYHG FE+YVAAKWNIQN+M+++DFLVLNFNQ + K+LA T+AT+ | |
| Sbjct: | 181 | PEIAVITNLMPTHIDYHGLFEEYVAAKWNIQNKMTAADFLVLNFNQDLVKDLASKTEATV | 240 |
| Query: | 245 | VPFSTTEKVDGAYVQDKQLFYKGENIMSVDDIGVPGSHNVENALATIAVAKLAGISNQVI | 304 |
| | | VPFST EKVDGAY++D QL+++GE +M+ ++IGVPGSHNVENALATIAVAKL G+ NQ I | |
| Sbjct: | 241 | VPFSTLEKVDGAYLEDGQLYFRGEVVMAANEIGVPGSHNVENALATIAVAKLRGVDNQTI | 300 |
| Query: | 305 | RETLSNFGGVKHRLQSLGKVHGISFYNDSKSTNILATQKALSGFDNTKVILIAGGLDRGN | 364 |
| | | +ETLS FGGVKHRLQ + + G+ FYNDSKSTNILATQKALSGFDN+KV+LIAGGLDRGN | |
| Sbjct: | 301 | KETLSAFGGVKHRLQFVDDIKGVKFYNDSKSTNILATQKALSGFDNSKVVLIAGGLDRGN | 360 |
| Query: | 365 | EFDELIPDITGLKHMVVLGESASRVKRAAQKAGVTYSDALDVRDAVHKAYEVAQQGDVIL | 424 |
| | | EFDEL+PDITGLK MV+LG+SA RVKRAA KAGV Y +A D+ DA KAYE+A QGDV+L | |
| Sbjct: | 361 | EFDELVPDITGLKKMVILGQSAERVKRAADKAGVAYVEATDIADATRKAYELATQGDVVL | 420 |
| Query: | 425 | LSPANASWDMYKNFEVRGDEFIDTFESLR | 453 |
| | | LSPANASWDMY NFEVRGD FIDT L+ | |
| Sbjct: | 421 | LSPANASWDMYANFEVRGDLFIDTVAELK | 449 |

[0711] A related DNA sequence was identified in S. pyogenes <SEQ ID 209> which encodes the amino acid sequence <SEQ ID 210>. Analysis of this protein sequence reveals the following:

```
Possible site: 25
>>> Seems to have a cleavable N-term signal seq.
----- Final Results -----
                                bacterial outside --- Certainty = 0.3000(Affirmative) < succ>
                              bacterial membrane --- Certainty = 0.0000(Not Clear) < succ>
                            bacterial cytoplasm --- Certainty = 0.0000(Not Clear) < succ>
RGD motif: 436-438
```

[0712] An alignment of the GAS and GBS proteins is shown below:

| Identities = 329/451 (72%), Positives = 397/451 (87%) | | | |
|---|---|---|---|
| Query: | 5 | MKTITTFENKKVLVLGLARSGEAAARLLAKLGAIVTVNDGKPFDENPTAQSLLEEGIKVV | 64 |
| | | MK I+ F+NKK+L+LGLA+SGEAAA+LL KLGA+VTVND KPFD+NP AQ+LLEEGIKV+ | |
| Sbjct: | 1 | MKVISNFQNKKILILGLAKSGEAAAKLLTKLGALVTVNDSKPFDQNPAAQALLEEGIKVI | 60 |
| Query: | 65 | CGSHPLELLDEDFCYMIKNPGIPYNNPMVKKALEKQIPVLTEVELAYLVSESQLIGITGS | 124 |
| | | CGSHP+ELLDE+F YM+KNPGIPY+NPMVK+AL K+IP+LTEVELAY VSE+ +IGITGS | |
| Sbjct: | 61 | CGSHPVELLDENFEYMVKNPGIPYDNPMVKRALAKEIPILTEVELAYFVSEAPIIGITGS | 120 |
| Query: | 125 | NGKTTTTTMIAEVLNAGGQRGLLAGNIGFPASEVVQAANDKDTLVMELSSFQLMGVKEFR | 184 |
| | | NGKTTTTTMIA+VLNAGGQ LL+GNIG+PAS+VVQ A DTLVMELSSFQL+GV FR | |
| Sbjct: | 121 | NGKTTTTTMIADVLNAGGQSALLSGNIGYPASKVVQKAIAGDTLVMELSSFQLVGVNAFR | 180 |
| Query: | 185 | PHIAVITNLMPTHLDYHGSFEDYVAAKWNIQNQMSSSDFLVLNFNQGISKELAKTTKATI | 244 |
| | | PHIAVITNLMPTHLDYHGSFEDYVAAKW IQ QM+ SD+L+LN NQ IS LAKTTKAT+ | |
| Sbjct: | 181 | PHIAVITNLMPTHLDYHGSFEDYVAAKWMIQAQMTESDYLILNANQEISATLAKTTKATV | 240 |
| Query: | 245 | VPFSTTEKVDGAYVQDKQLFYKGENIMSVDDIGVPGSHNVENALATIAVAKLAGISNQVI | 304 |
| | | +PFST + VDGAY++D L++K + I++ D+GVPGSHN+ENALATIAVAKL+GI++ +I | |
| Sbjct: | 241 | IPFSTQKVVDGAYLKDGILYFKEQAIIAATDLGVPGSHNIENALATIAVAKLSGIADDII | 300 |
| Query: | 305 | RETLSNFGGVKHRLQSLGKVHGISFYNDSKSTNILATQKALSGFDNTKVILIAGGLDRGN | 364 |
| | | + LS+FGGVKHRLQ +G++ I+FYNDSKSTNILATQKALSGFDN+++ILIAGGLDRGN | |
| Sbjct: | 301 | AQCLSHFGGVKHRLQRVGQIKDITFYNDSKSTNILATQKALSGFDNSRLILIAGGLDRGN | 360 |
| Query: | 365 | EFDELIPDITGLKHMVVLGESASRVKRAAQKAGVTYSDALDVRDAVHKAYEVAQQGDVIL | 424 |
| | | EFD+L+PD+ GLK M++LGESA R+KRAA KA V+Y +A +V +A A+++AQ GD IL | |
| Sbjct: | 361 | EFDDLVPDLLGLKQMIILGESAERMKRAANKAEVSYLEARNVAEATELAFKLAQTGDTIL | 420 |
| Query: | 425 | LSPANASWDMYKNFEVRGDEFIDTFESLRGE | 455 |
| | | LSPANASWDMY NFEVRGDEF+ TF+ LRG+ | |
| Sbjct: | 421 | LSPANASWDMYPNFEVRGDEFLATFDCLRGD | 451 |

[0713] SEQ ID 208 (GBS305) was expressed in E. coli as a His-fusion product. SDS-PAGE analysis of total cell extract is shown in FIG. 51 (lane 11; MW 53.7 kDa). It was also expressed in E. coli as a GST-fusion product. SDS-PAGE analysis of total cell extract is shown in FIG. 56 (lane 3; MW 79 kDa).

[0714] The GBS305-GST fusion product was purified (FIG. 207, lane 8) and used to immunise mice. The resulting antiserum was used for FACS (FIG. 270), which confirmed that the protein is immunoaccessible on GBS bacteria.

[0715] Based on this analysis, it was predicted that these proteins and their epitopes could be useful antigens for vaccines or diagnostics.

### EXAMPLE 66

[0716] A DNA sequence (GBSx0066) was identified in S. agalactiae <SEQ ID 211> which encodes the amino acid sequence <SEQ ID 212>. Analysis of this protein sequence reveals the following:

| RGD motif 285-287 | | | | |
|---|---|---|---|---|
| Possible site: 60 | | | | |
| >>> Seems to have no N-terminal signal sequence | | | | |
| | INTEGRAL | Likelihood = −1.65 | Transmembrane | 74-90 (73-93) |

```
----- Final Results -----
                              bacterial membrane --- Certainty = 0.1659(Affirmative) < succ>
                                bacterial outside --- Certainty = 0.0000(Not Clear) < succ>
                            bacterial cytoplasm --- Certainty = 0.0000(Not Clear) < succ>
```

[0717] A related DNA sequence was identified in S. pyogenes <SEQ ID 213> which encodes the amino acid sequence <SEQ ID 214>. Analysis of this protein sequence reveals the following:

| Possible site: 37 | | | | |
|---|---|---|---|---|
| >>> Seems to have no N-terminal signal sequence | | | | |
| | INTEGRAL | Likelihood = −1.33 | Transmembrane | 81-97 (80-100) |
| | INTEGRAL | Likelihood = −0.16 | Transmembrane | 272-288 (271-288) |

```
----- Final Results -----
                              bacterial membrane --- Certainty = 0.1532(Affirmative) < succ>
                                bacterial outside --- Certainty = 0.0000(Not Clear) < succ>
                            bacterial cytoplasm --- Certainty = 0.0000(Not Clear) < succ>
```

[0718] A related sequence was also identified in GAS <SEQ ID 9141> which encodes the amino acid sequence <SEQ ID 9142>. Analysis of this protein sequence reveals the following:

| Possible site: 37 | | | | |
|---|---|---|---|---|
| >>> Seems to have no N-terminal signal sequence | | | | |
| | INTEGRAL | Likelihood = −1.33 | Transmembrane | 74-90 |
| | INTEGRAL | Likelihood = −0.16 | Transmembrane | 265-281 |

```
----- Final Results -----
                              bacterial membrane --- Certainty = 0.1532(Affirmative) < succ>
                                bacterial outside --- Certainty = 0.0000(Not Clear) < succ>
                            bacterial cytoplasm --- Certainty = 0.0000(Not Clear) < succ>
RGD motif: 286-288
```

[0719] An alignment of the GAS and GBS proteins is shown below:

| Identities = 249/358 (69%), Positives = 293/358 (81%), Gaps = 1/358 (0%) | | | |
|---|---|---|---|
| Query: | 1 | MGKKIVFTGGGTVGHVTLNLILIPKFIKDGWEVHYIGDKNGIEHEQINQSGLDITFHSIA | 60 |
| | | M KKI+FTGGGTVGHVTLNLILIPKFIKDGWEVHYIGDKNGIEH +I +SGLD+TFH+IA | |
| Sbjct: | 8 | MPKKILFTGGGTVGHVTLNLILIPKFIKDGWEVHYIGDKNGIEHTEIEKSGLDVTFHAIA | 67 |
| Query: | 61 | TGKLRRYFSWQNMLDVFKVGVGVLQSIAIIAKLRPQALFSKGGFVSVPPVVAARLLKVPV | 120 |
| | | TGKLRRYFSWQN+ DVFKV +G+LQS+ I+AKLRPQALFSKGGFVSVPPVVAA+LL PV | |
| Sbjct: | 68 | TGKLRRYFSWQNLADVFKVALGLLQSLFIVAKLRPQALFSKGGFVSVPPVVAAKLLGKPV | 127 |
| Query: | 121 | FVHESDLSMGLANKIAYKFATIMYTTFEQSKDLIKTKHIGAVTKVM-DCKKSFENTDLTS | 179 |
| | | F+HESD SMGLANKIAYKFAT MYTTFEQ L K KH+GAVTKV D + E+T L + | |
| Sbjct: | 128 | FIHESDRSMGLANKIAYKFATTMYTTFEQEDQLSKVKHLGAVTKVFKDANQMPESTQLEA | 187 |
| Query: | 180 | IKEAFDPNLKTLLFIGGSAGAKVFNDFITQTPELEEKYNVINISGDSSLNRLKKNLYRVD | 239 |
| | | +KE F +LKTLLFIGGSAGA VFN FI+ PEL+++YN+INI+GD LN L +LYRVD | |
| Sbjct: | 188 | VKEYFSRDLKTLLFIGGSAGAHVFNQFISDHPELKQRYNIINITGDPHLNELSSHLYRVD | 247 |
| Query: | 240 | YVTDLYQPLMNLADVVVTRGGSNTIFELVAMKKLHLIIPLGREASRGDQLENAAYFEEKG | 299 |
| | | YVTDLYQPLM +AD+VVTRGGSNT+FEL+AM KLHLI+PLG+EASRGDQLENA YFE++G | |
| Sbjct: | 248 | YVTDLYQPLMAMADLVVTRGGSNTLFELLAMAKLHLIVPLGKEASRGDQLENATYFEKRG | 307 |
| Query: | 300 | YALQLPESELNINTLEKQINLLISNSESYEKNMSQSSEIKSQDEFYQLLIDDMAKVTK | 357 |
| | | YA QL E +L ++ ++ + L + YE M + EI+S D FY LL D++ K | |
| Sbjct: | 308 | YAKQLQEPDLTLHNFDQAMADLFEHQADYEATMLATKEIQSPDFFYDLLRADISSAIK | 365 |

[0720] SEQ ID 212 (GBS306) was expressed in E. coli as a His-fusion product. SDS-PAGE analysis of total cell extract is shown in FIG. 51 (lane 12; MW 43 kDa). It was also expressed in E. coli as a GST-fusion product. SDS-PAGE analysis of total cell extract is shown in FIG. 56 (lane 4; MW 68 kDa).

[0721] GBS306-GST was purified as shown in FIG. 207, lane 9.

[0722] Based on this analysis, it was predicted that these proteins and their epitopes could be useful antigens for vaccines or diagnostics.

### EXAMPLE 67

[0723] A DNA sequence (GBSx0067) was identified in S. agalactiae <SEQ ID 215> which encodes the amino acid sequence <SEQ ID 216>. This protein is predicted to be cell division protein DivIB. Analysis of this protein sequence reveals the following:

| Possible site: 58 | | | | |
|---|---|---|---|---|
| >>> Seems to have no N-terminal signal sequence | | | | |
| | INTEGRAL | Likelihood = −14.33 | Transmembrane | 103-119 (96-124) |

```
----- Final Results -----
                              bacterial membrane --- Certainty = 0.6731(Affirmative) < succ>
                                bacterial outside --- Certainty = 0.0000(Not Clear) < succ>
                            bacterial cytoplasm --- Certainty = 0.0000(Not Clear) < succ>
```

[0724] The protein has homology with the following sequences in the GENPEPT database:

| >GP: AAC95451 GB: AF068902 cell division protein | | | |
|---|---|---|---|
| DivIB [Streptococcus pneumoniae] | | | |
| Identities = 119/396 (30%), Positives = 214/396 (53%), | | | |
| Gaps = 38/396 (9%) | | | |
| Query: | 3 | KKKSDTPEKEEVV-LTEWQKRNLEFLKKRKEDEE---EQKRINEKLRLDKRS-----KLN | 53 |
| | | KK D EE+ L+EWQKRN E+LKK+ E+E E+K + R+ + S K + | |
| Sbjct: | 5 | KKNEDKEILEELKELSEWQKRNQEYLKKKAEEEAALAEEKEKERQARMGEESEKSEDKQD | 64 |
| Query: | 54 | ISSPEEPQNTTKIKKLHFPKIS------------RPKIEKKQKKEKIVNSLAKTNR---- | 97 |
| | | S + +++ K+ K++ P+ ++K++++K ++ A + | |
| Sbjct: | 65 | QESETDQEDSESAKEESEEKVASSEADKEKEEKEEPESKEKEEQDKKLSKKATKEKPAKA | 124 |
| Query: | 98 | -------IRTAPIFVVAFLVILVSVFLLTPFSKQKTITVSGNQHTPDDILIEKTNIQKND | 150 |
| | | +R I + L+++VS +LL+P++ K I V G T D + + + IQ +D | |
| Sbjct: | 125 | KIPGIHILRAFTILFPSLLLLIVSAYLLSPYATMKDIRVEGTVQTTADDIRQASGIQDSD | 184 |
| Query: | 151 | YFFSLIFKHKAIEQRLAAEDVWVKTAQMTYQFPNKFHIQVQENKIIAYAHTKQGYQPVLE | 210 |
| | | Y +L+ E+++ + + WV++AQ+ YQFP KF I+V+E I+AY + + + P+L | |
| Sbjct: | 185 | YTINLLLDKAKYEKQIKS-NYWVESAQLVYQFPTKFTIKVKEYDIVAYYISGENHYPILS | 243 |
| Query: | 211 | TGK-KADPVNSSELPKHFLTINLDKEDSIKLLIKDLKALDPDLISEIQVISLADSKTTPD | 269 |
| | | +G+ + V+ + LP+ +L++ + + IK+ + +L + P+L + IQ + LA SK T D | |
| Sbjct: | 244 | SGQLETSSVSLNSLPETYLSVLFNDSEQIKVFVSELAQISPELKAAIQKVELAPSKVTSD | 303 |
| Query: | 270 | LLLLDMHDGNSIRIPLSKFKERLPFYKQIKKNLKEPSIVDMEVGVYTTTNTIESTPVKAE | 329 |
| | | L+ L M+D + + +PLS+ ++LP+Y +IK L EPS+VDME G+Y+ T + E | |
| Sbjct: | 304 | LIRLTMNDSDEVLVPLSEMSKKLPYYSKIKPQLSEPSVVDMEAGIYSYTVADKLIMEVEE | 363 |
| Query: | 330 | DTKNKSTDKTQTQNGQVAENSQGQTNNSNTNQQGQQ | 365 |
| | | K ++ + + Q E + Q SN NQ Q+ | |
| Sbjct: | 364 | KAKQEAKEAEKKQE----EEQKKQEEESNRNQTTQR | 395 |

[0725] A related DNA sequence was identified in S. pyogenes <SEQ ID 217> which encodes the amino acid sequence <SEQ ID 218>. Analysis of this protein sequence reveals the following:

| Possible site: 59 | | | | |
|---|---|---|---|---|
| >>> Seems to have no N-terminal signal sequence | | | | |
| | INTEGRAL | Likelihood = −9.45 | Transmembrane | 106-122 (102-125) |

```
----- Final Results -----
                              bacterial membrane --- Certainty = 0.4779(Affirmative) < succ>
                                bacterial outside --- Certainty = 0.0000(Not Clear) < succ>
                            bacterial cytoplasm --- Certainty = 0.0000(Not Clear) < succ>
```

[0726] An alignment of the GAS and GBS proteins is shown below:

| Identities = 152/381 (39%), Positives = 232/381 (59%), Gaps = 14/381 (3%) | | | |
|---|---|---|---|
| Query: | 4 | KKSDTPEKEEVVLTEWQKRNLEFLKKRKEDEEEQKRINEKLRLDKRSKLNISSPEEP--- | 60 |
| | | K + +++VLTEWQKRN+EFLKK+K+ EE+K++ EKL DK+++ + E | |
| Sbjct: | 3 | KDKEKQSDDKLVLTEWQKRNIEFLKKKKQQAEEEKKLKEKLLSDKKAQQQAQNASEAVEL | 62 |
| Query: | 61 | --QNTTKIKKLHFPKISRPKIEKK--QKKEKIVNSLAKTNRIRTAPIFVVAFLVILVSVF | 116 |
| | | T +++ S+PK KK Q KEK +A ++ P+ + A L++ VS+F | |
| Sbjct: | 63 | KTDEKTDSQEIESETTSKPKKTKKVRQPKEKSATQIAFQ---KSLPVLLGALLLMAVSIF | 119 |
| Query: | 117 | LLTPFSKQKTITVSGNQHTPDDILIEKTNIQKNDYFFSLIFKHKAIEQRLAAEDVWVKTA | 176 |
| | | ++TP+SK+K +V GN T D LI+ + ++ +DY+ +L+ E+ + WVK+ | |
| Sbjct: | 120 | MITPYSKKKEFSVRGNHQTNLDELIKASKVKASDYWLTLLTSPGQYERPILRTIPWVKSV | 179 |
| Query: | 177 | QMTYQFPNKFHIQVQENKIIAYAHTKQGYQPVLETGKKADPVNSSELPKHFLTINLDKED | 236 |
| | | ++YQFPN F V E +IIAYA + G+QP+LE GK+ D V +SELPK FL +NL E | |
| Sbjct: | 180 | HLSYQFPNHFLFNVIEFEIIAYAQVENGFQPILENGKRVDKVRASELPKSFLILNLKDEK | 239 |
| Query: | 237 | SIKLLIKDLKALDPDLISEIQVISLADSKTTPDLLLLDMHDGNSIRIPLSRFKERLPFYK | 296 |
| | | +I+ L+K L L L+ I+ +SLA+SKTT DLLL++MHDGN +R+P S+ +LP+Y+ | |
| Sbjct: | 240 | AIQQLVKQLTTLPKKLVKNIKSVSLANSKTTADLLLIEMHDGNVVRVPQSQLTLKLPYYQ | 299 |
| Query: | 297 | QIKKNLKEPSIVDMEVGVYTTTNTIESTPVKAEDTKNKSTDKTQTQNGQVAENSQGQTNN | 356 |
| | | ++KKNL+ SIVDMEVG+YTTT IE+ P + + DK + G+ Q QT+N | |
| Sbjct: | 300 | KLKKNLENDSIVDMEVGIYTTTQEIENQPEVPLTPEQNAADKEGDKPGE----HQEQTDN | 355 |
| Query: | 357 | SNTNQQGQQIATEQAPNPQNV | 377 |
| | | + Q + P+P+ V | |
| Sbjct: | 356 | DSETPANQSSPQQTPPSPETV | 376 |

[0727] SEQ ID 216 (GBS85) was expressed in E. coli as a His-fusion product. SDS-PAGE analysis of total cell extract is shown in FIG. 17 (lane 10; MW 45.2 kDa).

[0728] The GBS85-His fusion product was purified (FIG. 105A; see also FIG. 193, lane 5) and used to immunise mice (lane 1 product; 20 μg/mouse). The resulting antiserum was used for Western blot (FIG. 105B), FACS (FIG. 105C), and in the in vivo passive protection assay (Table III). These tests confirm that the protein is immunoaccessible on GBS bacteria and that it is an effective protective immunogen.

[0729] Based on this analysis, it was predicted that these proteins and their epitopes could be useful antigens for vaccines or diagnostics.

### EXAMPLE 68

[0730] A DNA sequence (GBSx0068) was identified in S. agalactiae <SEQ ID 219> which encodes the amino acid sequence <SEQ ID 220>. This protein is predicted to be cell division protein FtsA (ftsA). Analysis of this protein sequence reveals the following:

| Possible site: 56 | | | | |
|---|---|---|---|---|
| >>> Seems to have an uncleavable N-term signal seq | | | | |
| | INTEGRAL | Likelihood = −3.19 | Transmembrane | 322-338 (321-338) |

```
----- Final Results -----
                              bacterial membrane --- Certainty = 0.2275(Affirmative) < succ>
                                bacterial outside --- Certainty = 0.0000(Not Clear) < succ>
                            bacterial cytoplasm --- Certainty = 0.0000(Not Clear) < succ>
```

[0731] The protein has homology with the following sequences in the GENPEPT database:

| >GP: AAC95439 GB: AF068901 cell division protein | | | |
|---|---|---|---|
| FtsA [Streptococcus pneumoniae] | | | |
| Identities = 292/457 (63%), Positives = 366/457 (79%), Gaps = 1/457 (0%) | | | |
| Query: | 1 | MARNGFFTGLDIGTSSIKVLVAEFIANEMNVIGVSNVPSSGVKDGIIIDIEAAATAIKEA | 60 |
| | | MAR GFFTGLDIGTSS+KVLVAE E+NVIGVSN S GVKDGII+DI+AAATAIK A | |
| Sbjct: | 1 | MAREGFFTGLDIGTSSVKVLVAEQRNGELNVIGVSNAKSKGVKDGIIVDIDAAATAIKSA | 60 |
| Query: | 61 | VKQAEEKAGITIDKINVGLPANLLQIEPTQGMIPVPNESKEIKDEDVESVVKSALTKSIT | 120 |
| | | + QAEEKAGI+I +NVGLP NLLQ+EPTQGMIPV +++KEI D+DVE+VVKSALTKS+T | |
| Sbjct: | 61 | ISQAEEKAGISIKSVNVGLPGNLLQVEPTQGMIPVTSDTKEITDQDVENVVKSALTKSMT | 120 |
| Query: | 121 | PEREVISLIPLEFIVDGFQGIRDPRGMMGIRLEMRGLIYTGPTTILHNLRKTVERAGIKV | 180 |
| | | P+REVI+ IP EFIVDGFQGIRDPRGMMG+RLEMRGL+YTGP TILHNLRKTVERAG++V | |
| Sbjct: | 121 | PDREVITFIPLEFIVDGFQGIRDPRGMMGVRLEMRGLLYTGPRTILHNLRKTVERAGVQV | 180 |
| Query: | 181 | EHVVIAPLALAKSVLNEGEREFGATVIDMGGGQTTVASMRNQELQYTNIYSEGSDYVTKD | 240 |
| | | E+V+I+PLA+ +SVLNEGEREFGATVIDMG GQTTVA++RNQELQ+T+I EG DYVTKD | |
| Sbjct: | 181 | ENVIISPLAMVQSVLNEGEREFGATVIDMGAGQTTVATIRNQELQFTHILQEGGDYVTKD | 240 |
| Query: | 241 | ISKVLRTTVEIAEALKFNFGQANVEEASTSDTVQVNVVGNEEPVEITESYLSQIISGRIR | 300 |
| | | ISKVL+T+ ++AE LK N+G+A AS +T QV V+G E VE+TE+YLS+IIS RI+ | |
| Sbjct: | 241 | ISKVLKTSRKLAEGLKLNYGEAYPPLAS-KETFQVEVIGEVEAVEVTEAYLSEIISARIK | 299 |
| Query: | 301 | QILEHVKQDLGRGRLLDLPGGIILVGGGAIMPGVVEVAQQIFGTRVKLHVPNQVGIRNPM | 360 |
| | | ILE +KQ+L R RLLDLPGGI+L+GG AI+PG+VE+AQ++FG RVKL+VPNQVGIRNP | |
| Sbjct: | 300 | HILEQIKQELDRRRLLDLPGGIVLIGGNAILPGMVELAQEVFGVRVKLYVPNQVGIRNPA | 359 |
| Query: | 361 | FANVISIVDYVGMMSEVDIIAQHAVTGDEMLRHKPVDFDYKEKTNTMSTMPYSEPLTSSM | 420 |
| | | FA+VIS+ ++ G ++EV+++AQ A+ G+ L H+P+ F + + | |
| Sbjct: | 360 | FAHVISLSEFAGQLTEVNLLAQGAIKGENDLSHQPISFGGMLQKTAQFVQSTPVQPAPAP | 419 |
| Query: | 421 | EDSNLEPIRARENAQEPTEPKANIGERIRGIFGSMFD | 457 |
| | | E +P + Q+ ++ K + +R RG+ GSMFD | |
| Sbjct: | 420 | EVEPVAPTEPMADFQQASQNKPKLADRFRGLIGSMFD | 456 |

[0732] A related DNA sequence was identified in S. pyogenes <SEQ ID 221> which encodes the amino acid sequence <SEQ ID 222>. Analysis of this protein sequence reveals the following:

| Possible site: 55 | | | | |
|---|---|---|---|---|
| >>> Seems to have no N-terminal signal sequence | | | | |
| | INTEGRAL | Likelihood = −3.35 | Transmembrane | 313-329 (312-329) |

```
----- Final Results -----
                              bacterial membrane --- Certainty = 0.2338(Affirmative) < succ>
                                bacterial outside --- Certainty = 0.0000(Not Clear) < succ>
                            bacterial cytoplasm --- Certainty = 0.0000(Not Clear) < succ>
```

[0733] The protein has homology with the following sequences in the databases:

| >GP: AAC95439 GB: AF068901 cell division protein | | | |
|---|---|---|---|
| FtsA [Streptococcus pneumoniae] | | | |
| Identities = 299/448 (66%), Positives = 368/448 (81%), Gaps = 4/448 (0%) | | | |
| Query: | 1 | LDIGTSSIKVLVAEFISGEMNVIGVSNVPSTGVKDGIIIDIEAAATAIKTAVEQAEEKAG | 60 |
| | | LDIGTSS+KVLVAE +GE+NVIGVSN S GVKDGII+DI+AAATAIK+A+ QAEEKAG | |
| Sbjct: | 10 | LDIGTSSVKVLVAEQRNGELNVIGVSNAKSKGVKDGIIVDIDAAATAIKSAISQAEEKAG | 69 |
| Query: | 61 | MTIEKVNVGLPANLLQIEPTQGMIPVPSESKEIKDEDVDSVVKSALTKSITPERSVISLV | 120 |
| | | ++I+ VNVGLP NLLQ+EPTQGMIPV S++KEI D+DV++VVKSALTKS+TP+REVI+ + | |
| Sbjct: | 70 | ISIKSVNVGLPGNLLQVEPTQGMIPVTSDTKEITDQDVENVVKSALTKSMTPDREVITFI | 129 |
| Query: | 121 | PEEFIVDGFQGIRDPRGMMGIRLEMRGLIYTGPSTILHNLRKTVERAGIKVENIIISPLA | 180 |
| | | PEEFIVDGFQGIRDPRGMMG+RLEMRGL+YTGP TILHNLRKTVERAG++VEN+IISPLA | |
| Sbjct: | 130 | PEEFIVDGFQGIRDPRGMMGVRLEMRGLLYTGPRTILHNLRKTVERAGVQVENVIISPLA | 189 |
| Query: | 181 | MAKTILNEGEREFGATVIDMGGGQTTVASMRAQELQYTNIYAEGGEYITKDISKVLKTSL | 240 |
| | | M +++LNEGEREFGATVIDMG GQTTVA++R QELQ+T+I EGG+Y+TKDISKVLKTS | |
| Sbjct: | 190 | MVQSVLNEGEREFGATVIDMGAGQTTVATIRNQELQFTHILQEGGDYVTKDISKVLKTSR | 249 |
| Query: | 241 | AIAEALKFNFGQAEISEASITETVKVDVVGSEEPVEVTERYLSEIISARIRHILDRVKQD | 300 |
| | | +AE LK N+G+A AS ET +V+V+G E VEVTE YLSEIISARI+HIL+++KQ+ | |
| Sbjct: | 250 | KLAEGLKLNYGEAYPPLAS-KETFQVEVIGEVEAVEVTEAYLSEIISARIKHILEQIKQE | 308 |
| Query: | 301 | LERGRLLDLPGGIVLIGGGAIMPGVVEIAQEIFGVTVKLHVPNQVGIRNPMFSNVISLVE | 360 |
| | | L+R RLLDLPGGIVLIGG AI+PG+VE+AQE+FGV VKL+VPNQVGIRNP F++VISL E | |
| Sbjct: | 309 | LDRRRLLDLPGGIVLIGGNAILPGMVELAQEVFGVRVKLYVPNQVGIRNPAFAHVISLSE | 368 |
| Query: | 361 | YVGMMSEVDVLAQTAVSGEELLRRKPIDFSGQESYLPDYDDSRRPESTIGYEQQ---ASQ | 417 |
| | | + G ++EV++LAQ A+ GE L +PI F G + S + E + ++ | |
| Sbjct: | 369 | FAGQLTEVNLLAQGAIKGENDLSHQPISFGGMLQKTAQFVQSTPVQPAPAPEVEPVAPTE | 428 |
| Query: | 418 | TAYDSQVPSDPKQKISERVRGIFGSMFD | 445 |
| | | D Q S K K+++R RG+ GSMFD | |
| Sbjct: | 429 | PMADFQQASQNKPKLADRFRGLIGSMFD | 456 |

[0734] An alignment of the GAS and GBS proteins is shown below:

| Identities = 349/456 (76%), Positives = 402/456 (87%), Gaps = 19/456 (4%) | | | |
|---|---|---|---|
| Query: | 10 | LDIGTSSIKVLVAEFIANEMNVIGVSNVPSSGVKDGIIIDIEAAATAIKEAVKQAEEKAG | 69 |
| | | LDIGTSSIKVLVAEFI+ EMNVIGVSNVPS+GVKDGIIIDIEAAATAIK AV+QAEEKAG | |
| Sbjct: | 1 | LDIGTSSIKVLVAEFISGEMNVIGVSNVPSTGVKDGIIIDIEAAATAIKTAVEQAEEKAG | 60 |
| Query: | 70 | ITIDKINVGLPANLLQIEPTQGMIPVPNESKEIKDEDVESVVKSALTKSITPEREVISLI | 129 |
| | | +TI+K+NVGLPANLLQIEPTQGMIPVP+ESKEIKDEDV+SVVKSALTKSITPEREVISL+ | |
| Sbjct: | 61 | MTIEKVNVGLPANLLQIEPTQGMIPVPSESKEIKDEDVDSVVKSALTKSITPEREVISLV | 120 |
| Query: | 130 | PLEFIVDGFQGIRDPRGMMGIRLEMRGLIYTGPTTILHNLRKTVERAGIKVEHVVIAPLA | 189 |
| | | P EFIVDGFQGIRDPRGMMGIRLEMRGLIYTGP+TILHNLRKTVERAGIKVE+++I+PLA | |
| Sbjct: | 121 | PEEFIVDGFQGIRDPRGMMGIRLEMRGLIYTGPSTILHNLRKTVERAGIKVENIIISPLA | 180 |
| Query: | 190 | LAKSVLNEGEREFGATVIDMGGGQTTVASMRNQELQYTNIYSEGSDYVTKDISKVLRTTV | 249 |
| | | +AK++LNEGEREFGATVIDMGGGQTTVASMR QELQYTNIY+EG +Y+TKDISKVL+T++ | |
| Sbjct: | 181 | MAKTILNEGEREFGATVIDMGGGQTTVASMRAQELQYTNIYAEGGEYITKDISKVLKTSL | 240 |
| Query: | 250 | EIAEALKFNFGQANVEEASTSDTVQVNVVGNEEPVEITESYLSQIISGRIRQILEHVKQD | 309 |
| | | IAEALKFNFGQA + EAS ++TV+V+VVG+EEPVE+TE YLS+IIS RIR IL+ VKQD | |
| Sbjct: | 241 | AIAEALKFNFGQAEISEASITETVKVDVVGSEEPVEVTERYLSEIISARIRHILDRVKQD | 300 |
| Query: | 310 | LGRGRLLDLPGGIILVGGGAIMPGVVEVAQQIFGTRVKLHVPNQVGIRNPMFANVISIVD | 369 |
| | | L RGRLLDLPGGI+L+GGGAIMPGVVE+AQ+IFG VKLHVPNQVGIRNPMF+NVIS+V+ | |
| Sbjct: | 301 | LERGRLLDLPGGIVLIGGGAIMPGVVEIAQEIFGVTVKLHVPNQVGIRNPMFSNVISLVE | 360 |
| Query: | 370 | YVGMMSEVDIIAQHAVTGDEMLRHKPVDF--------DYKEKTNTMSTMPYSEPLTSSME | 421 |
| | | YVGMMSEVD++AQ AV+G+E+LR KP+DF DY + ST+ Y + + + | |
| Sbjct: | 361 | YVGMMSEVDVLAQTAVSGEELLRRKPIDFSGQESYLPDYDDSRRPESTIGYEQQASQTAY | 420 |
| Query: | 422 | DSNLEPIRARENAQEPTEPKANIGERIRGIFGSMFD | 457 |
| | | DS Q P++PK I ER+RGIFGSMFD | |
| Sbjct: | 421 | DS-----------QVPSDPKQKISERVRGIFGSMFD | 445 |

[0735] SEQ ID 220 (GBS73) was expressed in E. coli as a His-fusion product. SDS-PAGE analysis of total cell extract is shown in FIG. 17 (lane 5; MW 47.8 kDa). It was also expressed in E. coli as a GST-fusion product. SDS-PAGE analysis of total cell extract is shown in FIG. 20 (lane 5; MW 70.1 kDa).

[0736] GBS73-GST was purified as shown in FIG. 197, lane 7.

[0737] The GBS73-His fusion product was purified (FIG. 103A) and used to immunise mice (lane 1 product; 20 μg/mouse). The resulting antiserum was used for Western blot (FIG. 103B), FACS (FIG. 103C) and in the in vivo passive protection assay (Table III). These tests confirm that the protein is immunoaccessible on GBS bacteria and that it is an effective protective immunogen.

[0738] Based on this analysis, it was predicted that these proteins and their epitopes could be useful antigens for vaccines or diagnostics.

### EXAMPLE 69

[0739] A DNA sequence (GBSx0069) was identified in S. agalactiae <SEQ ID 223> which encodes the amino acid sequence <SEQ ID 224>. This protein is predicted to be cell division protein FtsZ (ftsz). Analysis of this protein sequence reveals the following:

| Possible site: 56 | | | |
|---|---|---|---|
| >>> Seems to have a cleavable N-term signal seq. | | | |
| INTEGRAL | Likelihood = −1.97 | Transmembrane | 117-133 (117-133) |

----- Final Results -----
bacterial membrane --- Certainty = 0.1786 (Affirmative) < succ>
bacterial outside --- Certainty = 0.0000 (Not Clear) < succ>
bacterial cytoplasm --- Certainty = 0.0000 (Not Clear) < succ>

[0740] The protein has homology with the following sequences in the GENPEPT database:

| >GP: AAC95440 GB: AF068901 cell division protein FtsZ | | | |
|---|---|---|---|
| [Streptococcus pneumoniae] | | | |
| Identities = 327/426 (76%), Positives = 363/426 (84%), Gaps = 7/426 (1%) | | | |
| Query: | 1 | MVFSFDTASVQGAVIKVIGVGGGGGNAINRMIDEGVAGVEFIAANTDIQALSSSKAETVI | 60 |
| | | M FSFDTA+ QGAVIKVIGVGGGGGNAINRM+DEGV GVEFIAANTD+QALSS+KAETVI | |
| Sbjct: | 1 | MTFSFDTAAAQGAVIKVIGVGGGGGNAINRMVDEGVTGVEFIAANTDVQALSSTKAETVI | 60 |
| Query: | 61 | QLGPKLTRGLGAGGQPEVGRKAAEESEEVLTEALTGADMVFITAGMGGGSGTGAAPVIAR | 120 |
| | | QLGPKLTRGLGAGGQPEVGRKAAEESEE LTEA++GADMVFITAGMGGGSGTGAAPVIAR | |
| Sbjct: | 61 | QLGPKLTRGLGAGGQPEVGRKAAEESEETLTEAISGADMVFITAGMGGGSGTGAAPVIAR | 120 |
| Query: | 121 | IAKSLGALTVAVITRPFGFEGNKRSNFAIEGIQELREQVDTLLIISNNNLLEIVDKKTPL | 180 |
| | | IAK LGALTV V+TRPFGFEG+KR FA+EGI +LRE VDTLLIISNNNLLEIVDKKTPL | |
| Sbjct: | 121 | IAKDLGALTVGVVTRPFGFEGSKRGQFAVEGINQLREHVDTLLIISNNNLLEIVDKKTPL | 180 |
| Query: | 181 | LEALSEADNVLRQGVQGITDLITNPGLINLDFADVKTVMANKGNALMGIGIGSGEERITE | 240 |
| | | LEALSEADNVLRQGVQGITDLITNPGLINLDFADVKTVMANKGNALMGIGIGSGEER+ E | |
| Sbjct: | 181 | LEALSEADNVLRQGVQGITDLITNPGLINLDFADVKTVMANKGNALMGIGIGSGEERVVE | 240 |
| Query: | 241 | AARKAIYSPLLETTIDGAEDVIVNVTGGMDMTLTEAEEASEIVSQAAGKGVNIWLGTSID | 300 |
| | | AARKAIYSPLLETTIDGAEDVIVNVTGG+D+TL EAEEAS+IV+QAAG+GVNIWLGTSID | |
| Sbjct: | 241 | AARKAIYSPLLETTIDGAEDVIVNVTGGLDLTLIEAEEASQIVNQAAGQGVNIWLGTSID | 300 |
| Query: | 301 | MDMKDEIRVTVVATGVRKDKTNQVSGFTTSAPTNQAPSERQSTSNSNFDRRGNFDMTESR | 360 |
| | | M+DEIRVTVVATGVR+D+ +V + TN + + + S+ FDR +FDM E+ | |
| Sbjct: | 301 | ESMRDEIRVTVVATGVRQDRVEKVVAPQARSATNYRETVKPAHSH-GFDR--HFDMAETA | 357 |
| Query: | 361 | ENPTQQNQPHAQNQQQSSAFGNWDLRRDNISRPTEGELDSKLSMSTFSENDDMDDELETP | 420 |
| | | E+P Q P Q+SAFG+WDLRR++I R T+ + D +DEL+TP | |
| Sbjct: | 358 | ELPKQ--NPRRLEPTQASAFGDWDLRRESIVRTTDSVVSPVERFEAPISQD--EDELDTP | 413 |
| Query: | 421 | PFFKNR | 426 |
| | | PFFKNR | |
| Sbjct: | 414 | PFFKNR | 419 |

[0741] A related DNA sequence was identified in S. pyogenes <SEQ ID 225> which encodes the amino acid sequence <SEQ ID 226>. Analysis of this protein sequence reveals the following:

| Possible site: 56 | | | |
|---|---|---|---|
| >>> Seems to have a cleavable N-term signal seq. | | | |
| INTEGRAL | Likelihood = −1.81 | Transmembrane | 117-133 (117-133) |

----- Final Results -----
bacterial membrane --- Certainty = 0.1723 (Affirmative) < succ>
bacterial outside --- Certainty = 0.0000 (Not Clear) < succ>
bacterial cytoplasm --- Certainty = 0.0000 (Not Clear) < succ>

[0742] An alignment of the GAS and GBS proteins is shown below:

| Identities = 372/439 (84%), Positives = 391/439 (88%), Gaps = 13/439 (2%) | | | |
|---|---|---|---|
| Query: | 1 | MVFSFDTASVQGAVIKVIGVGGGGGNAINRMIDEGVAGVEFIAANTDIQALSSSKAETVI | 60 |
| | | M FSFDTAS+QGA+IKVIGVGGGGGNAINRMIDEGVAGVEFIAANTDIQALSSSKAETVI | |
| Sbjct: | 1 | MAFSFDTASIQGAIIKVIGVGGGGGNAINRMIDEGVAGVEFIAANTDIQALSSSKAETVI | 60 |
| Query: | 61 | QLGPKLTRGLGAGGQPEVGRKAAEESEEVLTEALTGADMVFITAGMGGGSGTGAAPVIAR | 120 |
| | | QLGPKLTRGLGAGGQPEVGRKAAEESEE+LTEALTGADMVFITAGMGGGSGTGAAPVIAR | |
| Sbjct: | 61 | QLGPKLTRGLGAGGQPEVGRKAAEESEEILTEALTGADMVFITAGMGGGSGTGAAPVIAR | 120 |
| Query: | 121 | IAKSLGALTVAVITRPFGFEGNKRSNFAIEGIQELREQVDTLLIISNNNLLEIVDKKTPL | 180 |
| | | IAKSLGALTVAV+TRPFGFEGNKR NFAIEGI+ELREQVDTLLIISNNNLLEIVDKKTPL | |
| Sbjct: | 121 | IAKSLGALTVAVVTRPFGFEGNKRGNFAIEGIEELREQVDTLLIISNNNLLEIVDKKTPL | 180 |
| Query: | 181 | LEALSEADNVLRQGVQGITDLITNPGLINLDFADVKTVMANKGNALMGIGIGSGEERITE | 240 |
| | | LEALSEADNVLRQGVQGITDLIT+PGLINLDFADVKTVMANKGNALMGIGIGSGEERI E | |
| Sbjct: | 181 | LEALSEADNVLRQGVQGITDLITSPGLINLDFADVKTVMANKGNALMGIGIGSGEERIVE | 240 |
| Query: | 241 | AARKAIYSPLLETTIDGAEDVIVNVTGGMDMTLTEAEEASEIVSQAAGKGVNIWLGTSID | 300 |
| | | AARKAIYSPLLETTIDGA+DVIVNVTGG+DMTLTEAEEASEIV QAAG+GVNIWLGTSID | |
| Sbjct: | 241 | AARKAIYSPLLETTIDGAQDVIVNVTGGLDMTLTEAEEASEIVGQAAGQGVNIWLGTSID | 300 |
| Query: | 301 | MDMKDEIRVTVVATGVRKDKTNQVSGF---TTSAPTN--------QAPSERQSTSNSNFD | 349 |
| | | MKD+IRVTVVATGVR++K QVSGF T TN A + + + FD | |
| Sbjct: | 301 | DTMKDDIRVTVVATGVRQEKAEQVSGFRQPRTFTQTNAQQVAGAQYASDQAKQSVQPGFD | 360 |
| Query: | 350 | RRGN--FDMTESREMPTQQNQPHAQNQQQSSAFGNWDLRRDNISRPTEGELDSKLSMSTF | 407 |
| | | RR N FDM ESRE+P+ Q NQ Q SAFGNWDLRRDNISRPTEGELD+ L+MSTF | |
| Sbjct: | 361 | RRSNFDFDMGESREIPSAQKVISNHNQNQGSAFGNWDLRRDNISRPTEGELDNHLNMSTF | 420 |
| Query: | 408 | SENDDMDDELETPPFFKNR | 426 |
| | | S NDD DDELETPPFFKNR | |
| Sbjct: | 421 | SANDDSDDELETPPFFKNR | 439 |

[0743] SEQ ID 224 (GBS163) was expressed in E. coli as a His-fusion product. SDS-PAGE analysis of total cell extract is shown in FIG. 28 (lane 7; MW 44 kDa). It was also expressed in E. coli as a GST-fusion product. SDS-PAGE analysis of total cell extract is shown in FIG. 34 (lane 4; MW 69 kDa).

[0744] The GBS163-GST fusion product was purified (FIG. 114A; see also FIG. 198, lane 11) and used to immunise mice (lane 1 product; 20 μg/mouse). The resulting antiserum was used for Western blot (FIG. 114B), FACS and in the in vivo passive protection assay (Table III). These tests confirm that the protein is immunoaccessible on GBS bacteria and that it is an effective protective immunogen.

[0745] Based on this analysis, it was predicted that these proteins and their epitopes could be useful antigens for vaccines or diagnostics.

### EXAMPLE 70

[0746] A DNA sequence (GBSx0070) was identified in S. agalactiae <SEQ ID 227> which encodes the amino acid sequence <SEQ ID 228>. Analysis of this protein sequence reveals the following:

Possible site: 21
>>> Seems to have no N-terminal signal sequence
----- Final Results -----
bacterial cytoplasm --- Certainty = 0.2750 (Affirmative) < succ>
bacterial membrane --- Certainty = 0.0000 (Not Clear) < succ>
bacterial outside --- Certainty = 0.0000 (Not Clear) < succ>

[0747] The protein has homology with the following sequences in the GENPEPT database:

| >GP: AAC95441 GB: AF068901 YlmE [Streptococcus pneumoniae] | | | |
|---|---|---|---|
| Identities = 140/223 (62%), Positives = 177/223 (78%) | | | |
| Query: | 2 | MNLQENKTAIFDNVSKLALKAGRAHESVHIVAVTKYVNCQTTEALIRTGVNHIGENRVDK | 61 |
| | | MN++EN +F V++ +L A R SV ++AVTKYV+ T EAL+ GV+HIGENRVDK | |
| Sbjct: | 1 | MNVKENTELVFREVAEASLSAHRESGSVSVIAVTKYVDVPTAEALLPLGVHHIGENRVDK | 60 |
| Query: | 62 | FLEKYQALKDEKLTWHLIGSLQRRKVKDVINYVDYFHALDSVKLAAEIQKHAQKLIKCFL | 121 |
| | | FLEKY+ALKD +TWHLIG+LQRRKVKDVI YVDYFHALDSVKLA EIQK + ++IKCFL | |
| Sbjct: | 61 | FLEKYEALKDRDVTWHLIGTLQRRKVKDVIQYVDYFHALDSVKLAGEIQKRSDRVIKCFL | 120 |
| Query: | 122 | QVNISREDSKHGFTIEQIDDALNLISRYDKIELIGIMTMAPLKATKEEISSIFEETESLR | 181 |
| | | QVNIS+E+SKHGF+ E++ + L ++R DKIE +G+MTMAP +A+ E++ IF+ + L+ | |
| Sbjct: | 121 | QVNISKEESKHGFSREELLEILPELARLDKIEYVGLMTMAPFEASSEQLKEIFKAAQDLQ | 180 |
| Query: | 182 | KRLQARNIERMPFTELSMGMSRDYDIAIQNGSTFVRIGTSFFK | 224 |
| | | + +Q + I MP TELSMGMSRDY AIQ GSTFVRIGTSFFK | |
| Sbjct: | 181 | REIQEKQIPNMPMTELSMGMSRDYKEAIQFGSTFVRIGTSFFK | 223 |

[0748] A related DNA sequence was identified in S. pyogenes <SEQ ID 229> which encodes the amino acid sequence <SEQ ID 230>. Analysis of this protein sequence reveals the following:

```
Possible site: 20
>>> Seems to have no N-terminal signal sequence
----- Final Results -----
                            bacterial cytoplasm --- Certainty = 0.2451(Affirmative) < succ>
                              bacterial membrane --- Certainty = 0.0000(Not Clear) < succ>
                                bacterial outside --- Certainty = 0.0000(Not Clear) < succ>
```

[0749] An alignment of the GAS and GBS proteins is shown below:

| Identities = 133/222 (59%), Positives = 164/222 (72%) | | | |
|---|---|---|---|
| Query: | 2 | MNLQENKTAIFDNVSKLALKAGRAHESVHIVAVTKYVNCQTTEALIRTGVNHIGENRVDK | 61 |
| | | M+L NK IF+ + A R ++SV ++AVTKYV+ LI G+ HI ENRVDK | |
| Sbjct: | 1 | MDLLTNKKKIFETIRLSTEAANRTNDSVSVIAVTKYVDSTIAGQLIEAGIEHIAENRVDK | 60 |
| Query: | 62 | FLEKYQALKDEKLTWHLIGSLQRRKVKDVINYVDYFHALDSVKLAAEIQKHAQKLIKCFL | 121 |
| | | FLEKY ALK + WHLIG+LQRRKVK+VINYVDYFHALDSV+LA EI K A +KCFL | |
| Sbjct: | 61 | FLEKYDALKYMPVKWHLIGTLQRRKVKEVINYVDYFHALDSVRLALEINKRADHPVKCFL | 120 |
| Query: | 122 | QVNISREDSKHGFTIEQIDDALNLISRYDKIELIGIMTMAPLKATKEEISSIFEETESLR | 181 |
| | | QVNIS+E+SKHGF I +ID+A+ I + +KI+L+G+MTMAP A+KE I +IF + LR | |
| Sbjct: | 121 | QVNISKEESKHGFNISEIDEAIGEIGKMEKIQLVGLMTMAPANASKESIITIFRQANQLR | 180 |
| Query: | 182 | KRLQARNIERMPFTELSMGMSRDYDIAIQNGSTFVRIGTSFF | 223 |
| | | K LQ + + MPFTELSMGMS DY IAIQ GSTF+RIG +FF | |
| Sbjct: | 181 | KNLQLKKRKNMPFTELSMGMSNDYPIAIQEGSTFIRIGRAEF | 222 |

[0750] Based on this analysis, it was predicted that these proteins and their epitopes could be useful antigens for vaccines or diagnostics.

### EXAMPLE 71

[0751] A DNA sequence (GBSx0071) was identified in S. agalactiae <SEQ ID 231> which encodes the amino acid sequence <SEQ ID 232>. This protein is predicted to be YlmF. Analysis of this protein sequence reveals the following:

```
Possible site: 58
>>> Seems to have no N-terminal signal sequence
----- Final Results -----
                            bacterial cytoplasm --- Certainty = 0.2194(Affirmative) < succ>
                              bacterial membrane --- Certainty = 0.0000(Not Clear) < succ>
                                bacterial outside --- Certainty = 0.0000(Not Clear) < succ>
```

[0752] A related GBS nucleic acid sequence <SEQ ID 9617> which encodes amino acid sequence <SEQ ID 9618> was also identified.

[0753] The protein has homology with the following sequences in the GENPEPT database:

| >GP: AAC95442 GB: AF068901 YlmF [Streptococcus pneumoniae] | | | |
|---|---|---|---|
| Identities = 86/200 (43%), Positives = 120/200 (60%), Gaps = 25/200 (12%) | | | |
| Query: | 5 | MALKDRFDKIISYFDTDDVSENEVHEVQERTSVQRDSRAATAQEASQRSHMTNSASEEMI | 64 |
| | | M+LKDRFD+ I YF T+D + +E +RD T+ +SQ + + + | |
| Sbjct: | 1 | MSLKDRFDRFIDYF-TEDEDSSLPYE-------KRDEPVFTSVNSSQEPALPMNQPSQSA | 52 |
| Query: | 65 | GSRPRTYTYDPNRQERQRVQRDNAYQQATPRVQNKDSVRQQREQVTIALKYPRKYEDAQE | 124 |
| | | G++ T RQ+ + N Q+AT ++V I ++YPRKYEDA E | |
| Sbjct: | 53 | GTKENNITRLHARQQ----ELANQSQRAT-------------DKVIIDVRYPRKYEDATE | 95 |
| Query: | 125 | IVDLLIVNECVLIDFQYMLDAQARRCLDYIDGASRVLYGSLQKVGSSMFLLTPANVMVDI | 184 |
| | | IVDLL NE +LIDFQYM + QARRCLDY+DGA VL G+L+KV S+M+LLTP NV+V++ | |
| Sbjct: | 96 | IVDLLAGNESILIDFQYMTEVQARRCLDYLDGACHVLAGNLKKVASTMYLLTPVNVIVNV | 155 |
| Query: | 185 | EEMNIPKTGQETSFDFDMKR | 204 |
| | | E++ +P Q+ F FDMKR | |
| Sbjct: | 156 | EDIRLPDEDQQGEFGFDMKR | 175 |

[0754] A related DNA sequence was identified in S. pyogenes <SEQ ID 233> which encodes the amino acid sequence <SEQ ID 234>. Analysis of this protein sequence reveals the following:

| Possible site: 49 | | | | |
|---|---|---|---|---|
| >>> Seems to have no N-terminal signal sequence | | | | |
| | INTEGRAL | Likelihood = −0.64 | Transmembrane | 142-158 (142-158) |

```
----- Final Results -----
                              bacterial membrane --- Certainty = 0.1256(Affirmative) < succ>
                                bacterial outside --- Certainty = 0.0000(Not Clear) < succ>
                            bacterial cytoplasm --- Certainty = 0.0000(Not Clear) < succ>
```

[0755] The protein has homology with the following sequences in the databases:

| >GP: AAC95442 GB: AF068901 YlmF [Streptococcus pneumoniae] | | | |
|---|---|---|---|
| Identities = 82/219 (37%), Positives = 113/219 (51%), Gaps = 46/219 (21%) | | | |
| Query: | 5 | MAFKDTFNKMISYFDTDEVNEVEEDVAASTDNVIP--RSQQSVRASSHPKQEPRNNHVQQ | 62 |
| | | M+ KD F++ I YF DE D+ +P + + V S + QEP Q | |
| Sbjct: | 1 | MSLKDRFDRFIDYFTEDE------------DSSLPYEKRDEPVFTSVNSSQEPALPMNQP | 48 |
| Query: | 63 | DHQARSQEQTRSQMHPKHGTSERYYQQSQPKEGHEMVDRRKRMSTSSIANRREQYQQSTC | 122 |
| | | A ++E +++H + +AN Q | |
| Sbjct: | 49 | SQSAGTKENNITRLHARQ---------------------------QELAN-----QSQRA | 76 |
| Query: | 123 | SDQTTIALKYPRKYEDAQEIVDLLIVNECVLIDFQFMLDAQARRCLDFIDGASKVLYGSL | 182 |
| | | +D+ I ++YPRKYEDA EIVDLL NE +LIDFQ+M + QARRCLD++DGA VL G+L | |
| Sbjct: | 77 | TDKVIIDVRYPRKYEDATEIVDLLAGNESILIDFQYMTEVQARRCLDYLDGACHVLAGNL | 136 |
| Query: | 183 | QKVGSSMYLLAPSNVSVNIEEMTIPHTTQDIGFDFDMKR | 221 |
| | | +KV S+MYLL P NV VN+E++ +P Q F FDMKR | |
| Sbjct: | 137 | KKVASTMYLLTPVNVIVNVEDIRLPDEDQQGEFGFDMKR | 175 |

[0756] An alignment of the GAS and GBS proteins is shown below:

| Identities = 118/222 (53%), Positives = 145/222 (65%), Gaps = 17/222 (7%) | | | |
|---|---|---|---|
| Query: | 1 | MEGNMALKDRFDKIISYFDTDDVSENEVHEVQERTSV----QRDSRAATAQEAS------ | 50 |
| | | ME MA KD F+K+ISYFDTD+V+E E +V Q+ RA++ + | |
| Sbjct: | 1 | MENKMAFKDTFNKMISYFDTDEVNEVEEDVAASTDNVIPRSQQSVRASSHPKQEPRNNHV | 60 |
| Query: | 51 | QRSHMTNSAEEEMIGSRPRTYTYDPNRQERQRVQR----DNAYQQATPRVQNKDSVRQQR | 106 |
| | | Q+ H S E+ P+ T + Q+ Q + D + +T + N+ QQ | |
| Sbjct: | 61 | QQDHQARSQEQTRSQMHPKHGTSERYYQQSQPKEGHEMVDRRKRMSTSSIANRREQYQQS | 120 |
| Query: | 107 | ---EQVTIALKYPRKYEDAQEIVDLLIVNECVLIDFQYMLDAQARRCLDYIDGASRVLYG | 163 |
| | | +Q TIALKYPRKYEDAQEIVDLLIVNECVLIDFQ+MLDAQARRCLD+IDGAS+VLYG | |
| Sbjct: | 121 | TCSDQTTIALKYPRKYEDAQEIVDLLIVNECVLIDFQFMLDAQARRCLDFIDGASKVLYG | 180 |
| Query: | 164 | SLQKVGSSMFLLTPANVMVDIEEMNIPKTGQETSFDFDMKRR | 205 |
| | | SLQKVGSSM+LL P+NV V+IEEM IP T Q+ FDFDMKRR | |
| Sbjct: | 181 | SLQKVGSSMYLLAPSNVSVNIEEMTIPHTTQDIGFDFDMKRR | 222 |

[0757] Based on this analysis, it was predicted that these proteins and their epitopes could be useful antigens for vaccines or diagnostics.

### EXAMPLE 72

[0758] A DNA sequence (GBSx0072) was identified in S. agalactiae <SEQ ID 235> which encodes the amino acid sequence <SEQ ID 236>. This protein is predicted to be YlmH. Analysis of this protein sequence reveals the following:

```
Possible site: 35
>>> Seems to have no N-terminal signal sequence
----- Final Results -----
                            bacterial cytoplasm --- Certainty = 0.3956(Affirmative) < succ>
                              bacterial membrane --- Certainty = 0.0000(Not Clear) < succ>
                                bacterial outside --- Certainty = 0.0000(Not Clear) < succ>
```

[0759] The protein has homology with the following sequences in the GENPEPT database:

| >GP: AAC95444 GB: AF068901 YlmH [Streptococcus pneumoniae] | | | |
|---|---|---|---|
| Identities = 101/255 (39%), Positives = 161/255 (62%) | | | |
| Query: | 6 | IYQHFRPEEYAFIHKIDHLAQYVENTYSFITTEFLNPREFKILESVLERRGSHYYTSGQY | 65 |
| | | IYQHF E+ F+ K + VE++Y+ T F+NP + K+L+ + + G +SG++ | |
| Sbjct: | 5 | IYQHFSIEDRPFLDKGMEWIKKVEDSYAPFLTPFINPHQEKLLKILAKTYGLACSSSGEF | 64 |
| Query: | 66 | FQTEYVKVIIAPEYYQLDMADFNLSLIEIKYNAKFNHLTHAKIMGTLLNYLGVKRSILGD | 125 |
| | | +EYV+V++ P+Y+Q + +DF +SL EI Y+ KF HLTHAKI+GT++N LG++R + GD | |
| Sbjct: | 65 | VSSEYVRVLLYPDYFQPEFSDFEISLQEIVYSNKFEHLTHAKILGTVINQLGIERKLFGD | 124 |
| Query: | 126 | ILVEEGCAQVLVDSQMTNHLVHSVTKIGTASVQLAEVPLSKLLTPKQDIQKLTVIASSLR | 185 |
| | | ILV+E AQ++++ Q + KIG V L E P ++ + + ++L + SS R | |
| Sbjct: | 125 | ILVDEERAQIMINQQFLLLFQDGLKKIGRIPVSLEERPFTEKIDKLEQYRELDLSVSSFR | 184 |
| Query: | 186 | LDKILATILKISRTQSTKLIEADKVKVNYATVNRVSEQLVEGDLISVRGYGRFTLNHNLG | 245 |
| | | LD +L+ +LK+SR Q+ +LIE V+VNY V++ + GDLISVR +GR L + G | |
| Sbjct: | 185 | LDVLLSNVLKLSRNQANQLIEKKLVQVNYHVVDKSDYTVQVGDLISVRKFGRLRLLQDKG | 244 |
| Query: | 246 | LTKNQKYKLEVDKMI | 260 |
| | | TK +K K+ V ++ | |
| Sbjct: | 245 | QTKKEKKKITVQLLL | 259 |

[0760] A related DNA sequence was identified in S. pyogenes <SEQ ID 237> which encodes the amino acid sequence <SEQ ID 238>. Analysis of this protein sequence reveals the following:

| Possible site: 56 | | | | |
|---|---|---|---|---|
| >>> Seems to have no N-terminal signal sequence | | | | |
| | INTEGRAL | Likelihood = −0.69 | Transmembrane | 46-62 (46-62) |

```
----- Final Results -----
                              bacterial membrane --- Certainty = 0.1277(Affirmative) < succ>
                                bacterial outside --- Certainty = 0.0000(Not Clear) < succ>
                            bacterial cytoplasm --- Certainty = 0.0000(Not Clear) < succ>
```

[0761] The protein has homology with the following sequences in the databases:

| >GP: AAC95444 GB: AF068901 YlmH [Streptococcus pneumoniae] | | | |
|---|---|---|---|
| Identities = 110/257 (42%), Positives = 161/257 (61%) | | | |
| Query: | 7 | IYQHFHQEEYPFIDRMSDMINRVEDYYLLEVTEFLNPREVMILKSLIALTDLKMFVSTDY | 66 |
| | | IYQHF E+ PF+D+ + I +VED Y +T F+NP + +LK L L S ++ | |
| Sbjct: | 5 | IYQHFSIEDRPFLDKGMEWIKKVEDSYAPFLTPFINPHQEKLLKILAKTYGLACSSSGEF | 64 |
| Query: | 67 | YPSEYGRVIIAPGYYDLEQSDFQIALVEISYQAKFNQLTHSQILGTLINELGVKRNLFGD | 126 |
| | | SEY RV++ P Y+ E SDF+I+L EI Y KF LTH++ILGT+IN+LG++R LFGD | |
| Sbjct: | 65 | VSSEYVRVLLYPDYFQPEFSDFEISLQEIVYSNKFEHLTHAKILGTVINQLGIERKLFGD | 124 |
| Query: | 127 | VFVEMGYAQLMIKRELLDYFLGTITKIAKTSVKLREVNFDQLIRSIDNSQTLDILVSSFR | 186 |
| | | + V+ AQ+MI ++ L F + KI + V L E F + I ++ + LD+ VSSFR | |
| Sbjct: | 125 | ILVDEERAQIMINQQFLLLFQDGLKKIGRIPVSLEERPFTEKIDKLEQYRELDLSVSSFR | 184 |
| Query: | 187 | LDGVVATILKKSRTQVIALIEANKIKVNYRVANKASDNLVIGDMVSIRGHGRFTLLADNG | 246 |
| | | LD +++ +LK SR Q LIE ++VNY V +K+ + +GD++S+R GR LL D G | |
| Sbjct: | 185 | LDVLLSNVLKLSRNQANQLIEKKLVQVNYHVVDKSDYTVQVGDLISVRKFGRLRLLQDKG | 244 |
| Query: | 247 | VTKHGKQKITLSKMIHK | 263 |
| | | TK K+KIT+ ++ K | |
| Sbjct: | 245 | QTKKEKKKITVQLLLSK | 261 |

[0762] An alignment of the GAS and GBS proteins is shown below:

| Identities = 123/256 (48%), Positives = 177/256 (69%) | | | |
|---|---|---|---|
| Query: | 6 | IYQHFRPEEYAFIHKIDHLAQYVENTYSFITTEFLNPREFKILESVLERRGSHYYTSGQY | 65 |
| | | IYQHF EEY FI ++ + VE+ Y TEFLNPRE IL+S++ + S Y | |
| Sbjct: | 7 | IYQHFHQEEYPFIDRMSDMINRVEDYYLLEVTEFLNPREVMILKSLIALTDLKMFVSTDY | 66 |
| Query: | 66 | FQTEYVKVIIAPEYYQLDMADFNLSLIEIKYNAKFNHLTHAKIMGTLLNYLGVKRSILGD | 125 |
| | | + +EY +VIIAP YY L+ +DF ++L+EI Y AKFN LTH++I+GTL+N LGVKR++ GD | |
| Sbjct: | 67 | YPSEYGRVIIAPGYYDLEQSDFQIALVEISYQAKFNQLTHSQILGTLINELGVKRNLFGD | 126 |
| Query: | 126 | ILVEEGCAQVLVDSQMTNHLVHSVTKIGTASVQLAEVPLSKLLTPKQDIQKLTVIASSLR | 185 |
| | | + VE G AQ+++ ++ ++ + ++TKI SV+L EV +L+ + Q L ++ SS R | |
| Sbjct: | 127 | VFVEMGYAQLMIKRELLDYFLGTITKIAKTSVKLREVNFDQLIRSIDNSQTLDILVSSFR | 186 |
| Query: | 186 | LDKILATILKISRTQSTKLIEADKVKVNYATVNRVSEQLVEGDLISVRGYGRFTLNHNLG | 245 |
| | | LD ++ATILK SRTQ LIEA+K+KVNY N+ S+ LV GD++S+RG+GRFTL + G | |
| Sbjct: | 187 | LDGVVATILKKSRTQVIALIEANKIKVNYRVANKASDNLVIGDMVSIRGHGRFTLLADNG | 246 |
| Query: | 246 | LTKNQKYKLEVDKMIH | 261 |
| | | +TK+ K K+ + KMIH | |
| Sbjct: | 247 | VTKHGKQKITLSKMIH | 262 |

[0763] Based on this analysis, it was predicted that these proteins and their epitopes could be useful antigens for vaccines or diagnostics.

### EXAMPLE 73

[0764] A DNA sequence (GBSx0073) was identified in S. agalactiae <SEQ ID 239> which encodes the amino acid sequence <SEQ ID 240>. This protein is predicted to be cell division protein DivIVA (septumplacement). Analysis of this protein sequence reveals the following:

Possible site: 14
>>> Seems to have no N-terminal signal sequence
----- Final Results -----
bacterial cytoplasm --- Certainty = 0.5418 (Affirmative) < succ>
bacterial membrane --- Certainty = 0.0000 (Not Clear) < succ>
bacterial outside --- Certainty = 0.0000 (Not Clear) < succ>

[0765] The protein has homology with the following sequences in the GENPEPT database:

| >GP: AAC95445 GB: AF068901 cell division protein DivIVA [Streptococcus pneumoniae] | | | |
|---|---|---|---|
| Identities = 132/227 (58%), Positives = 179/227 (78%), Gaps = 2/227 (0%) | | | |
| Query: | 1 | MPLTALEIKDKTFSSKFRGYSEEEVNEFLEIVVDDYEDLIRRNREQEQYIKDLEEKIAYF | 60 |
| | | MP+T+LEIKDKTF ++FRG+ EEV+EFL+IVV DYEDL+R N ++ IK LEE+++YF | |
| Sbjct: | 1 | MPITSLEIKDKTFGTRFRGFDPEEVDEFLDIVVRDYEDLVRANHDKNLRIKSLEERLSYF | 60 |
| Query: | 61 | NEMKESLSQSVILAQETAERVKISAQDEASNLMGKATFDAQHLIDEAKLKANQILRDATD | 120 |
| | | +E+K+SLSQSV++AQ+TAERVK +A + ++N++ +A DAQ L++EAK KAN+ILR ATD | |
| Sbjct: | 61 | DEIKDSLSQSVLIAQDTAERVKQAAHERSNNIIHQAEQDAQRLLEEAKYKANEILRQATD | 120 |
| Query: | 121 | DAKRVAIETEDLKRQSRVFHQRLLSELEGQLKLANSSAWEELLKPTAIYLQNSDASFKEV | 180 |
| | | +AK+VA+ETE+LK +SRVFHQRL S +E QL + SS WE++L+PTA YLQ SD +FKEV | |
| Sbjct: | 121 | NAKKVAVETEELKNKSRVFHQRLKSTIESQLAIVESSDWEDILRPTATYLQTSDEAFKEV | 180 |
| Query: | 181 | VEKVLDEDDALPVVDDTESFDATRQFSPDEMEELQRRVEESNKQLEE | 227 |
| | | V +VL E P+ + E D TRQFS EM ELQ R+E ++K+L E | |
| Sbjct: | 181 | VSEVLGEPIPAPI--EEEPIDMTRQFSQAEMAELQARIEVADKELSE | 225 |

[0766] A related DNA sequence was identified in S. pyogenes <SEQ ID 241> which encodes the amino acid sequence <SEQ ID 242>. Analysis of this protein sequence reveals the following:

Possible site: 14
>>> Seems to have no N-terminal signal sequence
----- Final Results -----
bacterial cytoplasm --- Certainty = 0.6272 (Affirmative) < succ>
bacterial membrane --- Certainty = 0.0000 (Not Clear) < succ>
bacterial outside --- Certainty = 0.0000 (Not Clear) < succ>

[0767] An alignment of the GAS and GBS proteins is shown below:

| Identities = 180/254 (70%), Positives = 217/254 (84%), Gaps = 2/254 (0%) | | | |
|---|---|---|---|
| Query: | 1 | MPLTALEIKDKTFSSKFRGYSEEEVNEFLEIVVDDYEDLIRRNREQEQYIKDLEEKIAYF | 60 |
| | | M LT LEIKDKTF +KFRGY EEEVNEFL+IVVDDYE L+R+NR+ E IKDLEEK++YF | |
| Sbjct: | 1 | MALTTLEIKDKTFKTKFRGYCEEEVNEFLDIVVDDYEALVRKNRDNEARIKDLEEKLSYF | 60 |
| Query: | 61 | NEMKESLSQSVILAQETAERVKISAQDEASNLMGKATFDAQHLIDEAKLKANQILRDATD | 120 |
| | | +EMKESLSQSVILAQETAE+VK +A EA+NL+ KAT+DAQHL+DE+K KANQ+LRDATD | |
| Sbjct: | 61 | DEMKESLSQSVILAQETAEKVKATANAEATNLVSKATYDAQHLLDESKAKANQMLRDATD | 120 |
| Query: | 121 | DAKRVAIETEDLKRQSRVFHQRLLSELEGQLKLANSSAWEELLKPTAIYLQNSDASFKEV | 180 |
| | | +AKRVAIETE+LKRQ+RVFHQRL+S +E QL L+NS W+ELL+PTAIYLQNSD +FKEV | |
| Sbjct: | 121 | EAKRVAIETEELKRQTRVFHQRLISSIESQLSLSNSPEWDELLQPTAIYLQNSDDAFKEV | 180 |
| Query: | 181 | VEKVLDEDDALPVVDDTESFDATRQFSPDEMEELQRRVEESNKQLEESGLLDTNNFQMEE | 240 |
| | | V+ VL+ED +P DD+ SFDATRQF+P+E+EELQRRV+ESNK+LE L ++ E | |
| Sbjct: | 181 | VKTVLNED--IPESDDSASFDATRQFTPEELEELQRRVDESNKELEAYQLDSQSDSTTEP | 238 |
| Query: | 241 | PINLGETQTFKLNI | 254 |
| | | +NL ETQTFKLNI | |
| Sbjct: | 239 | EVNLSETQTFKLNI | 252 |

[0768] Based on this analysis, it was predicted that these proteins and their epitopes could be useful antigens for vaccines or diagnostics.

### EXAMPLE 74

[0769] A DNA sequence (GBSx0074) was identified in S. agalactiae <SEQ ID 243> which encodes the amino acid sequence <SEQ ID 244>. Analysis of this protein sequence reveals the following:

| Possible site: 61 | | | |
|---|---|---|---|
| >>> Seems to have no N-terminal signal sequence | | | |
| INTEGRAL | Likelihood = −0.43 | Transmembrane | 841-857 (841-857) |

----- Final Results -----
bacterial membrane --- Certainty = 0.1171 (Affirmative) < succ>
bacterial outside --- Certainty = 0.0000 (Not Clear) < succ>
bacterial cytoplasm --- Certainty = 0.0000 (Not Clear) < succ>

[0770] The protein has homology with the following sequences in the GENPEPT database:

| >GP: AAC95446 GB: AF068901 isoleucine-tRNA synthetase [Streptococcus pneumoniae] | | | |
|---|---|---|---|
| Identities = 730/929 (78%), Positives = 822/929 (87%), Gaps = 1/929 (0%) | | | |
| Query: | 1 | MKLKETLNLGQTAFPMRAGLPNKEPQWQEAWDQADIYKKRQALNEGKPAFHLHDGPPYAN | 60 |
| | | MKLK+TLNLG+T FPMRAGLP KEP WQ+ W+ A +Y++RQ LN+GKP F LHDGPPYAN | |
| Sbjct: | 1 | MKLKDTLNLGKTEFPMRAGLPTKEPVWQKEWEDAKLYQRRQELNQGKPHFTLHDGPPYAN | 60 |
| Query: | 61 | GNIHVGHALNKISKDIIVRSKSMSGFRAPYVPGWDTHGLPIEQVLAKKGVKRKEMDLAEY | 120 |
| | | GNIHVGHA+NKISKDIIVRSKSMSGF AP++PGWDTHGLPIEQVL+K+GVKRKEMDL EY | |
| Sbjct: | 61 | GNIHVGHAMNKISKDIIVRSKSMSGFYAPFIPGWDTHGLPIEQVLSRQGVKRKEMDLVEY | 120 |
| Query: | 121 | LEMCRDYALSQVDKQRDDFKRLGVSADWENPYITLTPDYEADQVRVFGAMADKGYIYRGA | 180 |
| | | L++CR+YALSQVDKQR+DFKRLGVS DWENPY+TLTPDYEA Q+RVFG MA+KGYIYRGA | |
| Sbjct: | 121 | LKLCREYALSQVDKQREDFKRLGVSGDWENPYVTLTPDYEAAQIRVFGEMANKGYIYRGA | 180 |
| Query: | 181 | KPVYWSWSSESALAEAEIEYHDIDSTSLYYANKVKDGKGILDTDTYIVVWTTTPFTVTAS | 240 |
| | | KPVYWSWSSESALAEAEIEYHD+ STSLYYANKVKDGKG+LDTDTYIVVWTTTPFT+TAS | |
| Sbjct: | 181 | KPVYWSWSSESALAEAEIEYHDLVSTSLYYANKVKDGKGVLDTDTYIVVWTTTPFTITAS | 240 |
| Query: | 241 | RGLTVGPDMEYVVVVPVGSERKYLLAEVLVDSLAAKFGWENFEIVTHHTGKELNHIVTEH | 300 |
| | | RGLTVG D++YV+V PVG RK+++A L+ SL+ KFGW + +++ + G+ELNHIVTEH | |
| Sbjct: | 241 | RGLTVGADIDYVLVQPVGEARKFVVAAELLTSLSEKFGWADVQVLETYRGQELNHIVTEH | 300 |
| Query: | 301 | PWDTEVEELVILGDHVTTDSGTGIVHTAPGFGEDDYNVGIANGLDVVVTVDSRGLMMENA | 360 |
| | | PWDT VEELVILGDHVTTDSGTGIVHTAPGFGEDDYNVGIAN L+V VTVD RG+MM+NA | |
| Sbjct: | 301 | PWDTAVEELVILGDHVTTDSGTGIVHTAPGFGEDDYNVGIANNLEVAVTVDERGIMMKNA | 360 |
| Query: | 361 | GPDFEGQFYDKVTPLVKEKLGDLLLASEVINHSYPFDWRTKKPIIWRAVPQWFASVSKFR | 420 |
| | | GP+FEGQFY+KV P V EKLG+LLLA E I+HSYPFDWRTKKPIIWRAVPQWFASVSKFR | |
| Sbjct: | 361 | GPEFEGQFYEKVVPTVIEKLGNLLLAQEEISHSYPFDWRTKKPIIWRAVPQWFASVSKFR | 420 |
| Query: | 421 | QEILDEIEKTNFQPEWGKKRLYNMIRDRGDWVISRQRAWGVPLPIFYAEDGTAIMTKEVT | 480 |
| | | QEILDETEK F EWGK RLYNMIRDRGDWVISRQR WGVPLPIFYAEDGTAIM E | |
| Sbjct: | 421 | QEILDEIEKVKFHSEWGKVRLYNMIRDRGDWVISRQRTWGVPLPIFYAEDGTAIMVAETI | 480 |
| Query: | 481 | DHVADLFAEYGSIVWWQRDAKDLLPAGYTHPGSPNGLFEKETDIMDVWFDSGSSWNGVMN | 540 |
| | | +HVA LF ++GS +WW+RDAKDLLP G+THPGSPNG F+KETDIMDVWFDSGSSWNGV+ | |
| Sbjct: | 481 | EHVAQLFSKHGSSIWWERDAKDLLPEGFTHPGSPNGEFKKETDIMDVWFDSGSSWNGVVV | 540 |
| Query: | 541 | ARENLSYPADLYLEGSDQYRGWFNSSLITSVAVNGHAPYKAVLSQGFVLDGKGEKMSKSL | 600 |
| | | R L+YPADLYLEGSDQYRGWFNSSLITSVA +G APYK +LSQGF LDGKGEKMSKSL | |
| Sbjct: | 541 | NRPELTYPADLYLEGSDQYRGWFNSSLITSVANHGVAPYKQILSQGFALDGKGEKMSKSL | 600 |
| Query: | 601 | GNTILPSDVEKQFGAEILRLWVTSVDSSNDVRISMDILEQTSETYRKIRNTLRFLIANTS | 660 |
| | | GNTI PSDVEKQFGAEILRLWVTSVDSSNDVRISMDIL Q SETYRKIRNTLRFLIANTS | |
| Sbjct: | 601 | GNTIAPSDVEKQFGAEILRLWVTSVDSSNDVRISMDILSQVSETYRKIRNTLRFLIANTS | 660 |
| Query: | 661 | DFNPKQDAVAYENLGAVDRYMTIKFNQVVDTINKAYAAYDFMAIYKAVVNFVTVDLSAFY | 720 |
| | | DFNP QD VAY+ L +VD+YMTI+FNQ+V TI AYA ++F+ IYKA+VNF+ VDLSAFY | |
| Sbjct: | 661 | DFNPAQDTVAYDELRSVDKYMTIRFNQLVKTIRDAYADFEFLTIYKALVNFINVDLSAFY | 720 |
| Query: | 721 | LDFAKDVVYIEAANSPERRPMQTVFYDILVKLTKLLTPILPHTAEEIWSYLEHEEEEFVQ | 780 |
| | | LDFAKDVVYIE A S ERR+MQTVFYDILVK+TKLLTPILPHTAEEIWSYLE E E+FVQ | |
| Sbjct: | 721 | LDFAKDVVYIEGAKSLERRQMQTVFYDILVKITKLLTPILPHTAEEIWSYLEFETEDFVQ | 780 |
| Query: | 781 | LAEMPVAQTFSGQEEILEEWSAFMTLRTQAQKALEEARNAKVIGKSLEAHLTIYASQEVK | 840 |
| | | L+E+P QTF+ QEEIL+ W+AFM R QAQKALEEARNAKVIGKSLEAHLT+Y ++ VK | |
| Sbjct: | 781 | LSELPEVQTFANQEEILDTWAAFMDFRGQAQKALEEARNAKVIGKSLEAHLTVYPNEVVK | 840 |
| Query: | 841 | TLLTALNSDIALLMIVSQLTIADEADKPADSVSFEGVAFTVEHAEGEVCERSRRIDPTTK | 900 |
| | | TLL A+NS++A L+IVS+LTIA+E P +SFE VAFTVE A GEVC+R RRIDPTT | |
| Sbjct: | 841 | TLLEAVNSNVAQLLIVSELTIAEE-PAPEAALSFEDVAFTVERAAGEVCDRCRRIDPTTA | 899 |
| Query: | 901 | MRSYGVAVCDASAAIIEQYYPEAVAQGFE | 929 |
| | | RSY +CD A+I+E+ + +AVA+GFE | |
| Sbjct: | 900 | ERSYQAVICDHCASIVEENFADAVAEGFE | 928 |

[0771] A related DNA sequence was identified in S. pyogenes <SEQ ID 245> which encodes the amino acid sequence <SEQ ID 246>. Analysis of this protein sequence reveals the following:

| Possible site: 61 | | | |
|---|---|---|---|
| >>> Seems to have no N-terminal signal sequence | | | |
| INTEGRAL | Likelihood = −1.70 | Transmembrame | 849-865 (848-867) |

----- Final Results -----
bacterial membrane --- Certainty = 0.1680 (Affirmative) < succ>
bacterial outside --- Certainty = 0.0000 (Not Clear) < succ>
bacterial cytoplasm --- Certainty = 0.0000 (Not Clear) < succ>

[0772] An alignment of the GAS and GBS proteins is shown below:

| Identities = 798/929 (85%), Positives = 857/929 (91%) | | | |
|---|---|---|---|
| Query: | 1 | MKLKETLNLGQTAFPMRAGLPNKEPQWQEAWDQADIYKKRQALNEGKPAFHLHDGPPYAN | 60 |
| | | MKLKETLNLG+TAFPMRAGLPNKEPQWQ AW+QA++YKKRQ LN GKPAFHLHDGPPYAN | |
| Sbjct: | 1 | MKLKETLNLGKTAFPMRAGLPNKEPQWQAAWEQAELYKKRQELNAGKPAFHLHDGPPYAN | 60 |
| Query: | 61 | GNIHVGHALNKISKDIIVRSKSMSGFRAPYVPGWDTHGLPIEQVLAKKGVKRKEMDLAEY | 120 |
| | | GNIHVGHALNKISKDIIVRSKSMSGF+APYVPGWDTHGLPIEQVLAK+G+KRKEMDLAEY | |
| Sbjct: | 61 | GNIHVGHALNKISKDIIVRSKSMSGFQAPYVPGWDTHGLPIEQVLAKQGIKRKEMDLAEY | 120 |
| Query: | 121 | LEMCRDYALSQVDKQRDDFKRLGVSADWENPYITLTPDYEADQVRVFGAMADKGYIYRGA | 180 |
| | | LEMCR YALSQVDKQRDDFKRLGVSADWENPY+TL P +EADQ+RVFGAMA+KGYIYRGA | |
| Sbjct: | 121 | LEMCRQYALSQVDKQRDDFKRLGVSADWENPYVTLDPQFEADQIRVFGAMAEKGYIYRGA | 180 |
| Query: | 181 | KPVYWSWSSESALAEAEIEYHDIDSTSLYYANKVKDGKGILDTDTYIVVWTTTPFTVTAS | 240 |
| | | KPVYWSWSSESALAEAEIEYHDIDSTSLYYANKVKDGKGILDT+TYIVVWTTTPFTVTAS | |
| Sbjct: | 181 | KPVYWSWSSESALAEAEIEYHDIDSTSLYYANKVKDGKGILDTNTYIVVWTTTPFTVTAS | 240 |
| Query: | 241 | RGLTVGPDMEYVVVVPVGSERKYLLAEVLVDSLAAKFGWENFEIVTHHTGKELNHIVTEH | 300 |
| | | RGLTVGPDM+Y+VV P GS+R+Y++AE L+DSLA KFGWE+FE + H G +L +IVTEH | |
| Sbjct: | 241 | RGLTVGPDMDYLVVKPAGSDRQYVVAEGLLDSLAGKFGWESFETLASHKGADLEYIVTEH | 300 |
| Query: | 301 | PWDTEVEELVILGDHVTTDSGTGIVHTAPGFGEDDYNVGIANGLDVVVTVDSRGLMMENA | 360 |
| | | PWDT+VEELVILGDHVT +SGTGIVHTAPGFGEDDYNVG L+V VTVD RGLMMENA | |
| Sbjct: | 301 | PWDTDVEELVILGDHVTLSSGTGIVHTAPGFGEDDYNVGTKYKLEVAVTVDERGLMMENA | 360 |
| Query: | 361 | GPDFEGQFYDKVTPLVKEKLGDLLLASEVINHSYPFDWRTKKPIIWRAVPQWFASVSKFR | 420 |
| | | GPDF GQFY+KVTP+V +KLGDLLLA EVINHSYPFDWRTKKPIIWRAVPQWFASVS FR | |
| Sbjct: | 361 | GPDFHGQFYNKVTPIVIDKLGDLLLAQEVINHSYPFDWRTKKPIIWRAVPQWFASVSDFR | 420 |
| Query: | 421 | QEILDEIEKTNFQFEWGKKRLYNMIRDRGDWVISRQRAWGVPLPIFYAEDGTAIMTKEVT | 480 |
| | | Q+ILDEIEKT F P WG+ RLYNMIRDRGDWVISRQRAWGVPLPIFYAEDGTAIMTKEVT | |
| Sbjct: | 421 | QDILDEIEKTTFHPSWGETRLYNMIRDRGDWVISRQRAWGVPLPIFYAEDGTAIMTKEVT | 480 |
| Query: | 481 | DHVADLFAEYGSIVWWQRDARDLLPAGYTHPGSPNGLFEKETDIMDVWFDSGSSWNGVMN | 540 |
| | | DHVADLF E GSI+WWQ++AKDLLP G+THPGSPNG F KETDIMDVWFDSGSSWNGVMN | |
| Sbjct: | 481 | DHVADLFQENGSIIWWQKEAKDLLPEGFTHPGSPNGEFTKETDIMDVWFDSGSSWNGVMN | 540 |
| Query: | 541 | ARENLSYPADLYLEGSDQYRGWFNSSLITSVAVNGHAPYKAVLSQGFVLDGKGEKNSKSL | 600 |
| | | +ENLSYPADLYLEGSDQYRGWFNSSLITSVAVNGHAPYKA+LSQGFVLDGKGEKMSRS | |
| Sbjct: | 541 | TKENLSYPADLYLEGSDQYRGWFNSSLITSVAVNGHAPYKAILSQGFVLDGKGEKMSKSK | 600 |
| Query: | 601 | GNTILPSDVEKQFGAEILRLWVTSVDSSNDVRISMDILKQTSETYRKIRNTLRFLIANTS | 660 |
| | | GN I P+DV KQ+GA+ILRLWV SVD+ NDVR+SM+IL Q SETYRKIRNTLRFLIANTS | |
| Sbjct: | 601 | GNIISPNDVAKQYGADILRLWVASVDTDNDVRVSMEILGQVSETYRKIRNTLRFLIANTS | 660 |
| Query: | 661 | DFNPKQDAVAYENLGAVDRYMTIKFNQVVDTINKAYAAYDFMAIYKAVVNFVTVDLSAFY | 720 |
| | | DFNP D VAY +LG VD+YMTI FNQ+V TI AY YDFMAIYKAVVNFVTVDLSAFY | |
| Sbjct: | 661 | DFNPATDTVAYADLGTVDKYMTIVFNQLVATITDAYERYDFMAIYKAVVNFVTVDLSAFY | 720 |
| Query: | 721 | LDFAKDVVYIEAANSPERRRMQTVFYDILVKLTKLLTPILPHTAEEIWSYLEHEEEEFVQ | 780 |
| | | LDFAKDVVYIEAANS ERRRMQTVFYDILVK+TKLLTPILPHT EEIWSYLEHE E FVQ | |
| Sbjct: | 721 | LDFAKDVVYIEAANSLERRRMQTVFYDILVKITKLLTPILPHTTEEIWSYLEHESEAFVQ | 780 |
| Query: | 781 | LAEMPVAQTFSGQEEILEEWSAFMTLRTQAQKALEEARNAKVIGKSLEAHLTIYASQEVK | 840 |
| | | LAEMPVA+TFS QE+ILE WSAFMTLRTQAQKALEEARNAK+IGKSLEAHLTIYAS+EVK | |
| Sbjct: | 781 | LAEMPVAETFSAQEDILEAWSAFMTLRTQAQKALEEARNAKIIGKSLEAHLTIYASEEVK | 840 |
| Query: | 841 | TLLTALNSDIALLMIVSQLTIADEADKPADSVSFEGVAFTVEHAEGEVCERSRRIDPTTK | 900 |
| | | TLLTAL+SDIALL+IVSQLTIAD AD PAD+V+FEGVAF VEHA GEVCERSRRIDPTT+ | |
| Sbjct: | 841 | TLLTALDSDIALLLIVSQLTIADLADAPADAVAFEGVAFIVEHAIGEVCERSRRIDPTTR | 900 |
| Query: | 901 | MRSYGVAVCDASAAIIEQYYPEAVAQGFE | 929 |
| | | MRSY VCD SA IIE+ +PEAVA+GFE | |
| Sbjct: | 901 | MRSYNAFVCDHSAKIIEENFPEAVAEGFE | 929 |

[0773] Based on this analysis, it was predicted that these proteins and their epitopes could be useful antigens for vaccines or diagnostics.

### EXAMPLE 75

[0774] A DNA sequence (GBSx0075) was identified in S. agalactiae <SEQ ID 247> which encodes the amino acid sequence <SEQ ID 248>. Analysis of this protein sequence reveals the following:

```
Possible site: 39
>>> Seems to have no N-terminal signal sequence
----- Final Results -----
                            bacterial cytoplasm --- Certainty = 0.3425(Affirmative) < succ>
                              bacterial membrane --- Certainty = 0.0000(Not Clear) < succ>
                                bacterial outside --- Certainty = 0.0000(Not Clear) < succ>
```

[0775] The protein has no significant homology with any sequences in the GENPEPT database.

[0776] A related DNA sequence was identified in S. pyogenes <SEQ ID 249> which encodes the amino acid sequence <SEQ ID 250>. Analysis of this protein sequence reveals the following:

```
Possible site: 32
>>> Seems to have no N-terminal signal sequence
----- Final Results -----
                            bacterial cytoplasm --- Certainty = 0.3467(Affirmative) < succ>
                              bacterial membrane --- Certainty = 0.0000(Not Clear) < succ>
                                bacterial outside --- Certainty = 0.0000(Not Clear) < succ>
```

[0777] An alignment of the GAS and GBS proteins is shown below:

| Identities = 77/99 (77%), Positives = 89/99 (89%) | | | |
|---|---|---|---|
| Query: | 1 | MRLINTTSSHPELVRNQLQNTDAKLVEVYSAGNTDVVFTKAPKHYELLISNKYRAIKDEE | 60 |
| | | MRLINTTSSHPEL++NQL+NTDA LVEVYSAGNTDV+FT+APKHYELLISNKYRAIK++E | |
| Sbjct: | 1 | MRLINTTSSHPELIKNQLKNTDAYLVEVYSAGNTDVIFTQAPKHYELLISNKYRAIKEDE | 60 |
| Query: | 61 | LEAIREFFLKRKIDQSIIIQEQMKSLHTAKLIEISYPTT | 99 |
| | | L+ IREFFLKRKID I+I Q K+LHT LIEIS+ T+ | |
| Sbjct: | 61 | LDIIREFFLKRKIDPRIVIPGQSKTLHTNNLIEISFQTS | 99 |

[0778] Based on this analysis, it was predicted that these proteins and their epitopes could be useful antigens for vaccines or diagnostics.

### EXAMPLE 76

[0779] A DNA sequence (GBSx0076) was identified in S. agalactiae <SEQ ID 251> which encodes the amino acid sequence <SEQ ID 252>. This protein is predicted to be AP4A hydrolase. Analysis of this protein sequence reveals the following:

```
Possible site: 42
>>> Seems to have no N-terminal signal sequence
----- Final Results -----
                            bacterial cytoplasm --- Certainty = 0.1714(Affirmative) < succ>
                              bacterial membrane --- Certainty = 0.0000(Not Clear) < succ>
                                bacterial outside --- Certainty = 0.0000(Not Clear) < succ>
```

[0780] The protein has homology with the following sequences in the GENPEPT database:

| >GP: AAC06510 GB: AE000676 AP4A hydrolase [Aquifex aeolicus] | | | |
|---|---|---|---|
| Identities = 30/101 (29%), Positives = 48/101 (46%), | | | |
| Gaps = 2/101 (1%) | | | |
| Query: | 32 | KIILVQAPNGAWFLPGGEIEENENHLEALTRELIEELGYSATIGHYYGQADEYFYSRHRD | 91 |
| | | +++L++ P+ W P G IE E E RE+ EE G I Y G+ Y+Y+ + | |
| Sbjct: | 16 | EVLLIKTPSNVWSFPKGNIEPGEKPEETAVREVWEETGVKGEILDYIGEI-HYWYTLKGE | 74 |
| Query: | 92 | TYYYNPAYIYEVTAYHKDQAPLEDFNHLAWFPIQEAKEKLK | 132 |
| | | + Y Y + + P + +FPI+EAK+ LK | |
| Sbjct: | 75 | RIFKTVKY-YLMKYKEGEPRPSWEVKDAKFFPIKEAKKLLK | 114 |

[0781] A related DNA sequence was identified in S. pyogenes <SEQ ID 253> which encodes the amino acid sequence <SEQ ID 254>. Analysis of this protein sequence reveals the following:

```
Possible site: 47
>>> Seems to have no N-terminal signal sequence
----- Final Results -----
                            bacterial cytoplasm --- Certainty = 0.1954(Affirmative) < succ>
                              bacterial membrane --- Certainty = 0.0000(Not Clear) < succ>
                                bacterial outside --- Certainty = 0.0000(Not Clear) < succ>
```

[0782] An alignment of the GAS and GBS proteins is shown below:

| Identities = 102/149 (68%), Positives = 118/149 (78%) | | | |
|---|---|---|---|
| Query: | 1 | MTNPTFGEKIDNVNYRSRFGVYAIIPNPTHDKIILVQAPNGAWFLPGGEIEENENHLEAL | 60 |
| | | M PTFG K + +Y +R+GVYAIIPN KIILVQAPNG+WFLPGGEIE E L+AL | |
| Sbjct: | 1 | MMIPTFGHKNAHKDYVTRYGVYAIIPNHEQTKIILVQAPNGSWFLPGGEIEAGEGQLQAL | 60 |
| Query: | 61 | TRELIEELGYSATIGHYYGQADEYFYSRHRDTYYYNPAYIYEVTAYHKDQAPLEDFNHLA | 120 |
| | | RELIEELG+SATIG YYGQADEYFYSRHRDT++Y+PAY+YEVTA+ PLEDFN+L | |
| Sbjct: | 61 | ERELIEELGFSATIGSYYGQADEYFYSRHRDTHFYHPAYLYEVTAFQAVSKPLEDFNNLG | 120 |
| Query: | 121 | WFPIQEAKEKLKRGSHRWGVQAWEKNHHS | 149 |
| | | WF EA KLKR SH+WGV+ W+K HHS | |
| Sbjct: | 121 | WFSPIEAIAKLKRESHQWGVKEWQKKHHS | 149 |

[0783] Based on this analysis, it was predicted that these proteins and their epitopes could be useful antigens for vaccines or diagnostics.

### EXAMPLE 77

[0784] A DNA sequence (GBSx0077) was identified in S. agalactiae <SEQ ID 255> which encodes the amino acid sequence <SEQ ID 256>. This protein is predicted to be ClpE (clpB-1). Analysis of this protein sequence reveals the following:

```
Possible site: 54
>>> Seems to have no N-terminal signal sequence
----- Final Results -----
                            bacterial cytoplasm --- Certainty = 0.2882(Affirmative) < succ>
                              bacterial membrane --- Certainty = 0.0000(Not Clear) < succ>
                                bacterial outside --- Certainty = 0.0000(Not Clear) < succ>
```

[0785] The protein has homology with the following sequences in the GENPEPT database:

| >GP: AAD01782 GB: AF023421 ClpE [Lactococcus lactis] | | | |
|---|---|---|---|
| Identities = 560/752 (74%), Positives = 647/752 (85%), Gaps = 12/752 (1%) | | | |
| Query: | 1 | MLCQNCKLNESTIHLYTNVNGKQKQVDLCQNCYQIIKTDPNNPLFSGLNHVS-HAPGGIN | 59 |
| | | MLCQNC +NE+TIHLYT+VNG++KQ+DLCQNCYQI+K+ LF N + ++ N | |
| Sbjct: | 1 | MLCQNCNINEATIHLYTSVNGQKKQIDLCQNCYQIMKSGGQEALFGAGNASNGNSDEPFN | 60 |
| Query: | 60 | PFFDDFFGDLNNFRAFNGQDLPNTPPTQSGGNRGGGNGNGRNNNRNQTATPSQAKGILEE | 119 |
| | | PF +D F L + FNG TPPTQ+GG G N R Q KG+LEE | |
| Sbjct: | 61 | PF-NDIFSALQG-QDFNGAASNQTPPTQTGGRGPRGPQNPR---------AKQPKGMLEE | 109 |
| Query: | 120 | FGINVTEIARHGDIDPVIGRDSEIIRVIEILNRRTKNNPVLIGEPGVGKTAVVEGLAQKI | 179 |
| | | FGIN+TE AR G+IDPVIGRD EI RVIEILNRRTKNNPVLIGEPGVGKTAVVEGLAQKI | |
| Sbjct: | 110 | FGINITESARRGEIDPVIGRDEEIKRVIEILNRRTKNNPVLIGEPGVGKTAVVEGLAQKI | 169 |
| Query: | 180 | VDGNVPHKLQGKQVIRLDVVSLVQGTGIRGQFEERMQKLMEEIRQRQDVILFIDEIHEIV | 239 |
| | | VDG+VP KLQ K+VIRLDVVSLVQGTGIRGQFEERMQKLM+EIR+R DVI+FIDEIHEIV | |
| Sbjct: | 170 | VDGDVPQKLQNKEVIRLDVVSLVQGTGIRGQFEERMQKLMDEIRKRNDVIMFIDEIHEIV | 229 |
| Query: | 240 | GAGTAGEGSMDAGNILKPALARGELQLVGATTLNEYRIIEKDAALERRMQPVKVDEPSVE | 299 |
| | | GAG+AG+G+MDAGNILKPALARGELQLVGATTLNEYRIIEKDAALERRMQPVKVDEPSV+ | |
| Sbjct: | 230 | GAGSAGDGNMDAGNILKPALARGELQLVGATTLNEYRIIEKDAALERRMQPVKVDEPSVD | 289 |
| Query: | 300 | ETITILKGIQKKYEDYHHVKYNNDAIEAAAVLSNRYIQDRFLPDKAIDLLDEAGSKMNLT | 359 |
| | | ETITIL+GIQ +YEDYHHVKY ++AIEAAA LSNRYIQDRFLPDKAIDLLDE+GSK NLT | |
| Sbjct: | 290 | ETITILRGIQARYEDYHHVKYTDEAIEAAAHLSNRYIQDRFLPDKAIDLLDESGSKKNLT | 349 |
| Query: | 360 | LNFVDPKEIDQRLIEAENLKAQATREEDYERAAYFRDQIAKYKEMQQQKVDDQDTPIITE | 419 |
| | | L FVDP++I++R+ +AE+ K +AT+ ED+E+AA+FRDQI+K +E+Q+Q+V D+D P+ITE | |
| Sbjct: | 350 | LKFVDPEDINRRIADAESKKNEATKAEDFEKAAHFRDQISKLRELQKQEVTDEDMPVITE | 409 |
| Query: | 420 | KTIEHIIEEKTNIPVGDLKEKEQSQLINLADDLKQHVIGQDDAVVKIAKAIRRNRVGLGS | 479 |
| | | K IE I+E+KT IPVGDLKEKEQ+QLINLADDLK HVIGQD+AV KI+KAIRR+RVGLG | |
| Sbjct: | 410 | KDIEQIVEQKTQIPVGDLKEKEQTQLINLADDLKAHVIGQDEAVDKISKAIRRSRVGLGK | 469 |
| Query: | 480 | PNRPIGSFLFVGPTGVGKTELSKQLAIELFGSADSMIRFDMSEYMEKHAVAKLVGAPPGY | 539 |
| | | PNRPIG FLFVGPTGVGKTEL+KQLA ELFGS++SMIRFDMSEYMEKH+VAKL+GAPPGY | |
| Sbjct: | 470 | PNRPIGFFLFVGPTGVGKTELAKQLAKELFGSSESMIRFDMSEYMEKHSVAKLIGAPPGY | 529 |
| Query: | 540 | VGYEEAGQLTEKVRRNPYSLILLDEIEKAHPDVMHMFLQVLDDGRLTDGQGRTVSFKDTI | 599 |
| | | VGYEEAGQLTE+VRRNPYSLILLDEIEKAHPDVMHMFLQ+L+DGRLTD QGRTVSFKD++ | |
| Sbjct: | 530 | VGYEEAGQLTERVRRNPYSLILLDEIEKAHPDVMHMFLQILEDGRLTDAQGRTVSFKDSL | 589 |
| Query: | 600 | IIMTSNAGSGKTEASVGFGASREGRTNSVLGQLGNFFSPEFMNRFDGIIEFKALDKENLL | 659 |
| | | IIMTSNAG+GK EASVGFGA+REGRT SVLGQLG+FFSPEFMNRFDGIIEF AL KENLL | |
| Sbjct: | 590 | IIMTSNAGTGKVEASVGFGAAREGRTKSVLGQLGDFFSPEFMNRFDGIIEFSALSKENLL | 649 |
| Query: | 660 | NIVDIMLSDVNARLAINGIHLDVTDKVKEKLVDLGYDPKMGARPLRRTIQEHIEDAITDY | 719 |
| | | IVD+ML +VN ++ N IHL VT KEKLVDLGY+P MGARPLRR IQE+IED+I D+ | |
| Sbjct: | 650 | KIVDLMLDEVNEQIGRNDIHLSVTQAAKEKLVDLGYNPAMGARPLRRIIQENIEDSIADF | 709 |
| Query: | 720 | YLENPSEKELRAIMTSNGNIIIKSSKKTEEST | 751 |
| | | Y+E+P K+L A + + +I +++T E+T | |
| Sbjct: | 710 | YIEHPEYKQLVADLIDDKIVISNQTQETAETT | 741 |

[0786] A related DNA sequence was identified in S. pyogenes <SEQ ID 257> which encodes the amino acid sequence <SEQ ID 258>. Analysis of this protein sequence reveals the following:

```
Possible site: 43
>>> Seems to have no N-terminal signal sequence
----- Final Results -----
                            bacterial cytoplasm --- Certainty = 0.3104(Affirmative) < succ>
                              bacterial membrane --- Certainty = 0.0000(Not Clear) < succ>
                                bacterial outside --- Certainty = 0.0000(Not Clear) < succ>
```

[0787] An alignment of the GAS and GBS proteins is shown below:

| Identities = 640/751 (85%), Positives = 691/751 (91%), Gaps = 7/751 (0%) | | | |
|---|---|---|---|
| Query: | 1 | MLCQNCKLNESTIHLYTNVNGKQKQVDLCQNCYQIIKTDPNNPLFSGLNHVSHAPG-GIN | 59 |
| | | MLCQNC LNESTIHLYT+VNGKQ+QVDLCQNCYQI+K+DP N + +GL A + | |
| Sbjct: | 1 | MLCQNCNLNESTIHLYTSVNGKQRQVDLCQNCYQIMKSDPANSILNGLTPGYRAQDRSTS | 60 |
| Query: | 60 | PFFDDFFGDLNNFRAFNGQDLPNTPPTQSGGNRGGGNGNGRNNNRNQTATPS----QAKG | 115 |
| | | PFFDDFFGDLNNFRAF +LPNTPPTQ+G N GG G N N + A P QAKG | |
| Sbjct: | 61 | PFFDDFFGDLNNFRAFG--NLPNTPPTQAGQNGNGGGRYGGNYNGQRPAQPQTPNQQAKG | 118 |
| Query: | 116 | ILEEFGINVTEIARHGDIDPVIGRDSEIIRVIEILNRRTKNNPVLIGEPGVGKTAVVEGL | 175 |
| | | +LEEFGINVT+IAR+G+IDPVIGRD EI RVIEILNRRTKNNPVLIGEPGVGKTAVVEGL | |
| Sbjct: | 119 | LLEEFGINVTDIARNGNIDPVIGRDEEITRVIEILNRRTKNNPVLIGEPGVGKTAVVEGL | 178 |
| Query: | 176 | AQKIVDGNVPHKLQGKQVIRLDVVSLVQGTGIRGQFEERMQKLMEEIRQRQDVILFIDEI | 235 |
| | | AQKI+DG VP KLQGKQVIRLDVVSLVQGTGIRGQFEERMQKLMEEIR R+DVILFIDEI | |
| Sbjct: | 179 | AQKIIDGTVPQKLQGKQVIRLDVVSLVQGTGIRGQFEERMQKLMEEIRNRKDVILFIDEI | 238 |
| Query: | 236 | HEIVGAGTAGEGSMDAGNILKPALARGELQLVGATTLNEYRIIEKDAALERRMQPVKVDE | 295 |
| | | HEIVGAG+AG+G+MDAGNILKPALARGELQLVGATTLNEYRIIEKDAALERRMQPVKVDE | |
| Sbjct: | 239 | HEIVGAGSAGDGNMDAGNILKPALARGELQLVGATTLNEYRIIEKDAALERRMQPVKVDE | 298 |
| Query: | 296 | PSVEETITILKGIQKKYEDYHHVKYNNDAIEAAAVLSNRYIQDRFLPDKAIDLLDEAGSK | 355 |
| | | PSVEETITILKGIQ KYEDYHHVKY+ AIEAAA LSNRYIQDRFLPDKAIDLLDEAGSK | |
| Sbjct: | 299 | PSVEETITILKGIQPKYEDYHHVKYSPAAIEAAAHLSNRYIQDRFLPDKAIDLLDEAGSK | 358 |
| Query: | 356 | MNLTLNFVDPKEIDQRLIEAENLKAQATREEDYERAAYFRDQIAKYKEMQQQKVDDQDTP | 415 |
| | | MNLTLNFVDPKEID+RLIEAENLKAQATR+EDYERAAYFRDQI KYKEMQ QKVD+QD P | |
| Sbjct: | 359 | MNLTLNFVDPKEIDKRLIEAENLKAQATRDEDYERAAYFRDQITKYKEMQAQKVDEQDIP | 418 |
| Query: | 416 | IITEKTIEHIIEEKTNIPVGDLKEKEQSQLINLADDLKQHVIGQDDAVVKIAKAIRRNRV | 475 |
| | | IITEKTIE I+E+KTNIPVGDLKEKEQSQL+NLA+DLK HVIGQDDAV KIAKAIRRNRV | |
| Sbjct: | 419 | IITEKTIEAIVEQKTNIPVGDLKEKEQSQLVNLANDLKAHVIGQDDAVDKIAKAIRRNRV | 478 |
| Query: | 476 | GLGSPNRPIGSFLFVGPTGVGKTELSKQLAIELFGSADSMIRFDMSEYMEKHAVAKLVGA | 535 |
| | | GLG+PNRPIGSFLFVGPTGVGKTELSKQLAIELFGS ++MIRFDMSEYMEKHAVAKLVGA | |
| Sbjct: | 479 | GLGTPNRPIGSFLFVGPTGVGKTELSKQLAIELFGSTNNMIRFDMSEYMEKHAVAKLVGA | 538 |
| Query: | 536 | PPGYVGYEEAGQLTEKVRRNPYSLILLDEIEKAHPDVMHMFLQVLDDGRLTDGQGRTVSF | 595 |
| | | PPGY+GYEEAGQLTE+VRRNPYSLILLDE+EKAHPDVMHMFLQVLDDGRLTDGQGRTVSF | |
| Sbjct: | 539 | PPGYIGYEEAGQLTEQVRRNPYSLILLDEVEKAHPDVMHMFLQVLDDGRLTDGQGRTVSF | 598 |
| Query: | 596 | KDTIIIMTSNAGSGKTEASVGFGASREGRTNSVLGQLGNFFSPEFMNRFDGIIEFKALDK | 655 |
| | | KDTIIIMTSNAG+GK+EASVGFGA+REGRT+SVLG+L NFFSPEFMNRFDGIIEFKAL K | |
| Sbjct: | 599 | KDTIIIMTSNAGTGKSEASVGFGAAREGRTSSVLGELSNFFSPEFMNRFDGIIEFKALSK | 658 |
| Query: | 656 | ENLLNIVDIMLSDVNARLAINGIHLDVTDKVKEKLVDLGYDPKMGARPLRRTIQEHIEDA | 715 |
| | | E+LL+IVD+ML DVN RL NGIHLDVT KVKEKLVDLGYDPKMGARPLRRTIQ++IEDA | |
| Sbjct: | 659 | EHLLHIVDLMLEDVNERLGYNGIHLDVTQKVKEKLVDLGYDPKMGARPLRRTIQDYIEDA | 718 |
| Query: | 716 | ITDYYLENPSEKELRAIMTSNGNIIIKSSKK | 746 |
| | | ITDYYLE+P+EK+LRA+MT++ NI IK+ K+ | |
| Sbjct: | 719 | ITDYYLEHPTEKQLRALMTNSENITIKAVKE | 749 |

[0788] Based on this analysis, it was predicted that these proteins and their epitopes could be useful antigens for vaccines or diagnostics.

### EXAMPLE 78

[0789] A DNA sequence (GBSx0078) was identified in S. agalactiae <SEQ ID 259> which encodes the amino acid sequence <SEQ ID 260>. This protein is predicted to be glutamine ABC transporter, permease protein (glnP). Analysis of this protein sequence reveals the following:

| Possible site: 61 | | | | |
|---|---|---|---|---|
| >>> Seems to have an uncleavable N-term signal seq | | | | |
| | INTEGRAL | Likelihood = −9.92 | Transmembrane | 27-43 (15-46) |
| | INTEGRAL | Likelihood = −2.50 | Transmembrane | 200-216 (196-217) |

```
----- Final Results -----
                              bacterial membrane --- Certainty = 0.4970(Affirmative) < succ>
                                bacterial outside --- Certainty = 0.0000(Not Clear) < succ>
                            bacterial cytoplasm --- Certainty = 0.0000(Not Clear) < succ>
```

[0790] A related GBS nucleic acid sequence <SEQ ID 9619> which encodes amino acid sequence <SEQ ID 9620> was also identified.

[0791] The protein has homology with the following sequences in the GENPEPT database:

| >GP: AAB91000 GB: AE001090 glutamine ABC transporter, permease protein | | | |
|---|---|---|---|
| (glnP) [Archaeoglobus fulgidus] | | | |
| Identities = 92/209 (44%), Positives = 129/209 (61%), Gaps = 10/209 (4%) | | | |
| Query: | 17 | YGVMVTIMISTCVVFFGTIIGVLIALVKRTNLHFLTILANFYVWVFRGTPMVVQIMIAFA | 76 |
| | | +G VT+ ++ +FFG IIG + L + + ++ YV V RGTP++VQI+I + | |
| Sbjct: | 21 | FGASVTLKLTLISIFFGLIIGTIAGLGRVSKNPLPFAISTAYVEVIRGTPLLVQILIVYF | 80 |
| Query: | 77 | WMHFNNLPTISFGVLDLDFTRLLPGIIIISLNSGAYISEIVRAGIEAVPSGQIEAAYSLG | 136 |
| | | LP I + GII +S+ SGAYI+EIVRAGIE++P GQ+EAA SLG | |
| Sbjct: | 81 | -----GLPAIGINLQPEP-----AGIIALSICSGAYIAEIVRAGIESIPIGQMEAARSLG | 130 |
| Query: | 137 | IRPKNTLRYVILPQAFKNILPALGNEFITIIKDSALLQTIGVMELWNGAQSVVTATYSPV | 196 |
| | | + +RYVI PQAF+NILPALGNEFI ++KDS+LL I ++EL + +V T++ | |
| Sbjct: | 131 | MTYLQAMRYVIFPQAFRNILPALGNEFIALLKDSSLLSVISIVELTRVGRQIVNTTFNAW | 190 |
| Query: | 197 | APLLFAAFYYLMLTTILSALLKQMEKYLG | 225 |
| | | P L A +YLM+T LS L+ +K LG | |
| Sbjct: | 191 | TPFLGVALFYLMMTIPLSRLVAYSQKKLG | 219 |

[0792] A related DNA sequence was identified in S. pyogenes <SEQ ID 261> which encodes the amino acid sequence <SEQ ID 262>. Analysis of this protein sequence reveals the following:

| Possible site: 30 | | | | |
|---|---|---|---|---|
| >>> Seems to have an uncleavable N-term signal seq | | | | |
| | INTEGRAL | Likelihood = −9.08 | Transmembrane | 25-41 (11-44) |
| | INTEGRAL | Likelihood = −1.91 | Transmembrane | 202-218 (201-218) |

```
----- Final Results -----
                              bacterial membrane --- Certainty = 0.4630(Affirmative) < succ>
                                bacterial outside --- Certainty = 0.0000(Not Clear) < succ>
                            bacterial cytoplasm --- Certainty = 0.0000(Not Clear) < succ>
```

[0793] The protein has homology with the following sequences in the databases:

| >GP: AAB91000 GB: AE001090 glutamine ABC transporter, permease protein | | | |
|---|---|---|---|
| (glnP) [Archaeoglobus fulgidus] | | | |
| Identities = 91/209 (43%), Positives = 138/209 (65%), Gaps = 12/209 (5%) | | | |
| Query: | 15 | YGVLVTIMISVSVVFFGTLIGVLVTLIKRSHVKPLTWVVNL-YVWIFRGTPMVVQIMIAF | 73 |
| | | +G VT+ +++ +FFG +IG + L + S PL + ++ YV + RGTP++VQI+I + | |
| Sbjct: | 21 | FGASVTLKLTLISIFFGLIIGTIAGLGRVSK-NPLPFAISTAYVEVIRGTPLLVQILIVY | 79 |
| Query: | 74 | AWMHFNNMPTIGFGVLDLDFSRLLPGIIIISLNSGAYISEIVRAGIEAVPKGQLEAAYSL | 133 |
| | | +P IG ++ GII +S+ SGAYI+EIVRAGIE++P GQ+EAA SL | |
| Sbjct: | 80 | F-----GLPAIG-----INLQPEPAGIIALSICSGAYIAEIVRAGIESIPIGQMEAARSL | 129 |
| Query: | 134 | GIRPQNAMRYVILPQAFKNILPALGNEFITIIKDSALLQTIGVMELWNGAQSVVTATYSP | 193 |
| | | G+ AMRYVI PQAF+NILPALGNEFI ++KDS+LL I ++EL + +V T++ | |
| Sbjct: | 130 | GMTYLQAMRYVIFPQAFRNILPALGNEFIALLKDSSLLSVISIVELTRVGRQIVNTTFNA | 189 |
| Query: | 194 | ISPLLVAAFYYLMVTTVMAQLLAVLERHM | 222 |
| | | +P L A +YLM+T +++L+A ++ + | |
| Sbjct: | 190 | WTPFLGVALFYLMMTIPLSRLVAYSQKKL | 218 |

[0794] An alignment of the GAS and GBS proteins is shown below:

| Identities = 180/225 (80%), Positives = 208/225 (92%) | | | |
|---|---|---|---|
| Query: | 3 | MNFSFLPQYWSYFNYGVMVTIMISTCVVFFGTIIGVLIALVKRTNLHFLTILANFYVWVF | 62 |
| | | M+ SFLP+YW+YFNYGV+VTIMIS VVFFGT+IGVL+ L+KR+++ LT + N YVW+F | |
| Sbjct: | 1 | MDLSFLPKYWAYFNYGVLVTIMISVSVVFFGTLIGVLVTLIKRSHVKPLTWVVNLYVWIF | 60 |
| Query: | 63 | RGTPMVVQIMIAFAWMHFNNLPTISFGVLDLDFTRLLPGIIIISLNSGAYISEIVRAGIE | 122 |
| | | RGTPMVVQIMIAFAWMHFNN+PTI FGVLDLDF+RLLPGIIIISLNSGAYISEIVRAGIE | |
| Sbjct: | 61 | RGTPMVVQIMIAFAWMHFNNMPTIGFGVLDLDFSRLLPGIIIISLNSGAYISEIVRAGIE | 120 |
| Query: | 123 | AVPSGQIEAAYSLGIRPKNTLRYVILPQAFKNILPALGNEFITIIKDSALLQTIGVMELW | 182 |
| | | AVP GQ+EAAYSLGIRP+N +RYVILPQAFKNILPALGNEFITIIKDSALLQTIGVMELW | |
| Sbjct: | 121 | AVPKGQLEAAYSLGIRPQNAMRYVILPQAFKNILPALGNEFITIIKDSALLQTIGVMELW | 180 |
| Query: | 183 | NGAQSVVTATYSPVAPLLFAAFYYLMLTTILSALLKQMEKYLGKG | 227 |
| | | NGAQSVVTATYSP++PLL AAFYYLM+TT+++ LL +E+++ +G | |
| Sbjct: | 181 | NGAQSVVTATYSPISPLLVAAFYYLMVTTVMAQLLAVLERHMAQG | 225 |

[0795] Based on this analysis, it was predicted that these proteins and their epitopes could be useful antigens for vaccines or diagnostics.

### EXAMPLE 79

[0796] A DNA sequence (GBSx0079) was identified in S. agalactiae <SEQ ID 263> which encodes the amino acid sequence <SEQ ID 264>. This protein is predicted to be phosphomannomutase (manB). Analysis of this protein sequence reveals the following:

```
Possible site: 60
>>> Seems to have no N-terminal signal sequence
----- Final Results -----
                            bacterial cytoplasm --- Certainty = 0.5400(Affirmative) < succ>
                              bacterial membrane --- Certainty = 0.0000(Not Clear) < succ>
                                bacterial outside --- Certainty = 0.0000(Not Clear) < succ>
```

[0797] A related GBS nucleic acid sequence <SEQ ID 9621> which encodes amino acid sequence <SEQ ID 9622> was also identified.

[0798] The protein has homology with the following sequences in the GENPEPT database:

| >GP: BAB04825 GB: AP001510 phosphomannomutase [Bacillus halodurans] | | | |
|---|---|---|---|
| Identities = 239/548 (43%), Positives = 344/548 (62%), Gaps = 14/548 (2%) | | | |
| Query: | 4 | MNYKEIYQEWLENDSLGKDIKSDLEAIKGDESEIQDRFYKTLEFGTAGLRGKLGAGTNRN | 63 |
| | | M++++ Y++W + L ++K LEAI GD +++D FYK LEFGT G+RG++G G NRN | |
| Sbjct: | 1 | MSWRQRYEKWKGFNELELELKQSLEAIGGDEQQLEDCFYKNLEFGTGGMRGEIGPGPNRM | 60 |
| Query: | 64 | NTYMVGKAAQALANTIIDHGPEAIARGIAVSYDVRYQSKEFAELTCSIMAANGIKSYIYK | 123 |
| | | NTY + KA++ A +++ G A+G+ ++YD R++S EFA + +GIK+Y+++ | |
| Sbjct: | 61 | NTYTIRKASEGFARYLLEQGEHVKAQGVVIAYDSRHKSPEFAREAALTIGKHGIKAYLFE | 120 |
| Query: | 124 | GIRPTPMCSYAIRALGCVSGVMITASHNPQAYNGYKAYWKEGSQILDDIADQIANHMDAI | 183 |
| | | +RPTP S+A+R LG G++ITASHNP YNG+K Y +G Q+ + A+++ ++ I | |
| Sbjct: | 121 | ELRPTPELSFAVRKLGAAGGIVITASHNPPEYNGFKVYGSDGCQLPPEPANRLVKFVNEI | 180 |
| Query: | 184 | TDYQQIKQIPFEEALASGSASYIDESIEEAYKKEVLGLTINDTNID---KSVRVVYTPLN | 240 |
| | | D I E +G+ I E ++ AY + + + +N ++ K VR+V+TPL+ | |
| Sbjct: | 181 | EDELVIPVGDERELKENGTLEMIGEEVDVAYHEALKTIIVNPELLEASAKDVRIVFTPLH | 240 |
| Query: | 241 | GVGNLPVREVLRRRGFENVYVVPEQEMPDPDFTTVGYPNPEVPKAFAYSESLGKSVDADI | 300 |
| | | G NLPVR VL GFENV VV EQE+PDP F+TV PNPE AFA + GK +AD+ | |
| Sbjct: | 241 | GTANLPVRRVLEAVGFENVTVVKEQELPDPQFSTVKAPNPEEHAAFALAIEYGKKTEADV | 300 |
| Query: | 301 | LLATDPDCDRVALEVKDSKGEYIFLNGNKIGALLSYYIFSQRCALGNLPHHPVLVKSIVT | 360 |
| | | L+ATDPD DRV + V++ GEYI L GN+ G L+ +Y+ SQ+ G LP + + +K+IVT | |
| Sbjct: | 301 | LIATDPDADRVGVAVQNQAGEYIVLTGNQTGGLMLHYLLSQKKEKGQLPVNGIALKTIVT | 360 |
| Query: | 361 | GDLSKVIADKYNIETVETLTGFKNICGKANEYDISKDKTYLFGYEESIGFCYGTFVRDKD | 420 |
| | | + + IA+ + I V+TLTGFK I K EY + S + +LFGYEES G+ G FVRDKD | |
| Sbjct: | 361 | SEFGRAIAEDFGIPMVDTLTGFKFIGEKIKEYEQSGEHQFLFGYEESYGYLIGDFVRDKD | 420 |
| Query: | 421 | AVSASMMVVEMTAYYKERGQTLLDVLQTIYDKFGYYNERQFSLELEGAEGQERISRIMED | 480 |
| | | AV A ++ EMTAYYK RG TL D L ++D++GYY E S+ L+G G E+I ++ | |
| Sbjct: | 421 | AVQACLLAAEMTAYYKSRGMTLYDGLLELFDRYGYYREGLTSITLKGKVGVEKIQHVLSQ | 480 |
| Query: | 481 | FRQDPILQVGEMTLENSIDFKDGYK-----------DFPKQNCLKYYFNEGSWYALRPSG | 529 |
| | | FRQ P QV + + D++ K P N LKY +GSW+ LRPSG | |
| Sbjct: | 481 | FRQSPPKQVNDQQVVVIEDYQTKEKVSVKERTVEAITLPTSNVLKYMLEDGSWFCLRPSG | 540 |
| Query: | 530 | TEPKIKCY | 537 |
| | | TEPK+K Y | |
| Sbjct: | 541 | TEPKLKIY | 548 |

[0799] A related DNA sequence was identified in S. pyogenes <SEQ ID 265> which encodes the amino acid sequence <SEQ ID 266>. Analysis of this protein sequence reveals the following:

```
Possible site: 35
>>> Seems to have no N-terminal signal sequence
----- Final Results -----
                            bacterial cytoplasm --- Certainty = 0.5487(Affirmative) < succ>
                              bacterial membrane --- Certainty = 0.0000(Not Clear) < succ>
                                bacterial outside --- Certainty = 0.0000(Not Clear) < succ>
```

[0800] An alignment of the GAS and GBS proteins is shown below:

| Identities = 470/564 (83%), Positives = 517/564 (91%) | | | |
|---|---|---|---|
| Query: | 1 | MSHMNYKEIYQEWLENDSLGKDIKSDLEAIKGDESEIQDRFYKTLEFGTAGLRGKLGAGT | 60 |
| | | MS+M Y E+YQEWL N+ L DIK+DL AIK +E+EIQDRFYKTLEFGTAGLRGKLGAGT | |
| Sbjct: | 1 | MSNMTYNEVYQEWLHNNDLSDDIKADLAAIKDNEAEIQDRFYKTLEFGTAGLRGKLGAGT | 60 |
| Query: | 61 | NRMNTYMVGKAAQALANTIIDHGPEAIARGIAVSYDVRYQSKEFAELTCSIMAANGIKSY | 120 |
| | | NRMNTYMVGKAAQALANTIIDHGPEA+ +GIAVSYDVRYQS+ FAELTCSIMAANGIK+Y | |
| Sbjct: | 61 | NRMNTYMVGKAAQALANTIIDHGPEAVKKGIAVSYDVRYQSRTFAELTCSIMAANGIKAY | 120 |
| Query: | 121 | IYKGIRPTPMCSYAIRALGCVSGVMITASHNPQAYNGYKAYWKEGSQILDDIADQIANHM | 180 |
| | | +YKGIRPTPMCSYAIRALGC+SGVMITASHNPQAYNGYKAYW+EGSQILDDIADQIA HM | |
| Sbjct: | 121 | LYKGIRPTPMCSYAIRALGCISGVMITASHNPQAYNGYKAYWQEGSQILDDIADQIAQHM | 180 |
| Query: | 181 | DAITDYQQIKQIPFEEALASGSASYIDESIEEAYKKEVLGLTINDTNIDKSVRVVYTPLN | 240 |
| | | A+T YQ+IKQ+PFE+AL SG +YIDESIEEAYKKEVLGLTINDT+IDKSVRVVYTPLN | |
| Sbjct: | 181 | AALTQYQEIKQMPFEKALDSGLVTYIDESIEEAYKKEVLGLTINDTDIDKSVRVVYTPLN | 240 |
| Query: | 241 | GVGNLPVREVLRRRGFENVYVVPEQEMPDPDFTTVGYPNPEVPKAFAYSESLGKSVDADI | 300 |
| | | GVGNLPVREVLRRRGFENVYVVPEQEMPDPDFTTVGYPNPEVPK FAYSE LGK+VDADI | |
| Sbjct: | 241 | GVGNLPVREVLRRRGFENVYVVPEQEMPDPDFTTVGYPNPEVPKTFAYSEKLGKAVDADI | 300 |
| Query: | 301 | LLATDPDCDRVALEVKDSKGEYIFLNGNKIGALLSYYIFSQRCALGNLPHHPVLVKSIVT | 360 |
| | | L+ATDPDCDRVALEVK++ G+Y+FLNGNKIGALLSYYIFSQR LGNLP +PVLVKSIVT | |
| Sbjct: | 301 | LIATDPDCDRVALEVKNAVGDYVFLNGNKIGALLSYYIFSQRFDLGNLPANPVLVKSIVT | 360 |
| Query: | 361 | GDLSKVIADKYNIETVETLTGFKNICGKANEYDISKDKTYLFGYEESIGFCYGTFVRDKD | 420 |
| | | GDLS+ IA Y IETVETLTGFKNICGKANEYD++K K YLFGYEESIGFCYGTFVRDKD | |
| Sbjct: | 361 | GDLSRAIASHYGIETVETLTGFKNICGKANEYDVTKQKNYLFGYEESIGFCYGTFVRDKD | 420 |
| Query: | 421 | AVSASMMVVEMTAYYKERGQTLLDVLQTIYDKFGYYNERQFSLELEGAEGQERISRIMED | 480 |
| | | AVSASMM+VEM AYYK++GQ LLDVLQTIY FGYYNERQ +LELEG EGQ+RI+RIMED | |
| Sbjct: | 421 | AVSASMMIVEMAAYYKKKGQNLLDVLQTIYATFGYYNERQIALELEGIEGQKRIARIMED | 480 |
| Query: | 481 | FRQDPILQVGEMTLENSIDFKDGYKDFPKQNCLKYYFNEGSWYALRPSGTEPKIKCYLYT | 540 |
| | | FRQ PI V EM L+ +IDF DGY+DFPKQNCLK+Y ++GSWYALRPSGTEPKIK YLYT | |
| Sbjct: | 481 | FRQTPIASVAEMALDKTIDFIDGYQDFPKQNCLKFYLDDGSWYALRPSGTEPKIKFYLYT | 540 |
| Query: | 541 | IGCTEADSLSKLNAIESACRAKMN | 564 |
| | | IG T+ +S +KL+AIE+ACR K+N | |
| Sbjct: | 541 | IGQTQENSATKLDAIEAACRTKIN | 564 |

[0801] Based on this analysis, it was predicted that these proteins and their epitopes could be useful antigens for vaccines or diagnostics.

### EXAMPLE 80

[0802] A DNA sequence (GBSx0080) was identified in S. agalactiae <SEQ ID 267> which encodes the amino acid sequence <SEQ ID 268>. This protein is predicted to be methylenetetrahydrofolate dehydrogenase (folD). Analysis of this protein sequence reveals the following:

```
Possible site: 48
>>> Seems to have no N-terminal signal sequence
----- Final Results -----
                            bacterial cytoplasm --- Certainty = 0.4672(Affirmative) < succ>
                              bacterial membrane --- Certainty = 0.0000(Not Clear) < succ>
                                bacterial outside --- Certainty = 0.0000(Not Clear) < succ>
```

[0803] The protein has homology with the following sequences in the GENPEPT database:

| >GP: AAC44612 GB: U58210 tetrahydrofolate dehydrogenase/cyclohydrolase | | | |
|---|---|---|---|
| [Streptococcus thermophilus] | | | |
| Identities = 209/282 (74%), Positives = 248/282 (87%) | | | |
| Query: | 1 | MTELIDGKALSQKMQAELGRKVERLKEQHGIIPGLAVILVGDNPASQVYVRNKERSALEA | 60 |
| | | M ++DGKAL+ MQ +L KV RLKE+ I+PGL VI+VG+NPASQVYVRNKER+A +A | |
| Sbjct: | 1 | MAIIMDGKALAVNMQEQLQEKVARLKEKEWIVPGLVVIMVGENPASQVYVRNKERAAKKA | 60 |
| Query: | 61 | GFKSETLRLSESISQEELIDIIHQYNEDKSIHGILVQLPLPQHINDKKIILAIDPKKDVD | 120 |
| | | GF S+T+ LSESIS+EELI++I +YN++ HGILVQLPLP HIN+ +I+LAIDPKKDVD | |
| Sbjct: | 61 | GFHSKTVNLSESISEEELIEVIEKYNQNPLFHGILVQLPLPNHINEMRILLAIDPKKDVD | 120 |
| Query: | 121 | GFHPMNTGHLWSGRPMMVPCTPAGIMEMFREYHVDLEGKHAVIIGRSNIVGKPMAQLLLD | 180 |
| | | GFHPMNTG+LW+GRP MVPCTPAGIME+ REY+V+LEGK AVIIGRSNIVGKPMAQLLL+ | |
| Sbjct: | 121 | GFHPMNTGNLWNGRPQMVPCTPAGIMEILREYNVELEGKTAVIIGRSNIVGKPMAQLLLE | 180 |
| Query: | 181 | KNATVTLTHSRTRNLSEVTKEADILIVAIGQGHFVTKDFVKEGAVVIDVGMNRDENGKLI | 240 |
| | | KNATVTLTHSRT +L++V +AD+LIVAIG+ FVT++FVKEGAVVIDVG+NRDE GKL | |
| Sbjct: | 181 | KNATVTLTHSRTPHLAKVCNKADVLIVAIGRAKFVTEEFVKEGAVVIDVGINRDEEGKLC | 240 |
| Query: | 241 | GDVVFEQVAEVASMITPVPGGVGPMTITMLLEQTYQAALRSV | 282 |
| | | GDV F+QV E SMITPVPGGVGPMTITML+EQTYQAALRS+ | |
| Sbjct: | 241 | GDVDFDQVKEKVSMITPVPGGVGPMTITMLMEQTYQAALRSL | 282 |

[0804] A related DNA sequence was identified in S. pyogenes <SEQ ID 269> which encodes the amino acid sequence <SEQ ID 270>. Analysis of this protein sequence reveals the following:

```
Possible site: 22
>>> Seems to have no N-terminal signal sequence
----- Final Results -----
                            bacterial cytoplasm --- Certainty = 0.3368(Affirmative) < succ>
                              bacterial membrane --- Certainty = 0.0000(Not Clear) < succ>
                                bacterial outside --- Certainty = 0.0000(Not Clear) < succ>
```

[0805] An alignment of the GAS and GBS proteins is shown below:

| Identities = 230/281 (81%), Positives = 257/281 (90%) | | | |
|---|---|---|---|
| Query: | 1 | MTELIDGKALSQKMQAELGRKVERLKEQHGIIPGLAVILVGDNPASQVYVRNKERSALEA | 60 |
| | | MTELIDGKAL+QKMQ EL KV LK++ GI+PGLAVILVGD+PASQVYVRNKER+AL | |
| Sbjct: | 3 | MTELIDGKALAQKMQQELAAKVNNLKQKKGIVPGLAVILVGDDPASQVYVRNKERAALTV | 62 |
| Query: | 61 | GFKSETLRLSESISQEELIDIIHQYNEDKSIHGILVQLPLPQHINDKKIILAIDPKKDVD | 120 |
| | | GFKSET+RLSE I QEELI +I +YN D +IHGILVQLPLP HINDKKIILAIDPKKDVD | |
| Sbjct: | 63 | GFKSETVRLSEFICQEELIAVIERYNADNTIHGILVQLPLPNHINDKKIILAIDPKKDVD | 122 |
| Query: | 121 | GFHPMNTGHLWSGRPMMVPCTPAGIMEMFREYHVDLEGKHAVIIGRSNIVGKPMAQLLLD | 180 |
| | | GFHPMNTGHLWSGRP+MVPCTP+GIME+ REY+V+LEGKHAVIIGRSNIVGKPMAQLLLD | |
| Sbjct: | 123 | GFHPMNTGHLWSGRPLMVPCTPSGIMELLREYNVNLEGKHAVIIGRSNIVGKPMAQLLLD | 182 |
| Query: | 181 | KNATVTLTHSRTRNLSEVTKEADILIVAIGQGHFVTKDFVKEGAVVIDVGMNRDENGKLI | 240 |
| | | KNATVTLTHSRTR L EV + AD+LIVAIGQGHF+TK ++K+GA+VIDVGMNRD+NGKLI | |
| Sbjct: | 183 | KNATVTLTHSRTRQLEEVCRCADVLIVAIGQGHFITKQYIKDGAIVIDVGMNRDDNGKLI | 242 |
| Query: | 241 | GDVVFEQVAEVASMITPVPGGVGPMTITMLLEQTYQAALRS | 281 |
| | | GDV F++VAEVA+ ITPVPGGVGPMTI MLLEQTYQ+ALRS | |
| Sbjct: | 243 | GDVAFDEVAEVAAKITPVPGGVGPMTIAMLLEQTYQSALRS | 283 |

[0806] Based on this analysis, it was predicted that these proteins and their epitopes could be useful antigens for vaccines or diagnostics.

### EXAMPLE 81

[0807] A DNA sequence (GBSx0081) was identified in S. agalactiae <SEQ ID 271> which encodes the amino acid sequence <SEQ ID 272>. Analysis of this protein sequence reveals the following:

Possible site: 39
>>> Seems to have no N-terminal signal sequence

| | | | |
|---|---|---|---|
| INTEGRAL | Likelihood = −3.24 | Transmembrane | 39-55 (38-58) |

```
----- Final Results -----
                              bacterial membrane --- Certainty = 0.2296(Affirmative) < succ>
                                bacterial outside --- Certainty = 0.0000(Not Clear) < succ>
                            bacterial cytoplasm --- Certainty = 0.0000(Not Clear) < succ>
```

[0808] A related GBS nucleic acid sequence <SEQ ID 9623> which encodes amino acid sequence <SEQ ID 9624> was also identified.

[0809] The protein has homology with the following sequences in the GENPEPT database:

| >GP: AAC44613 GB: U58210 orf1091 [Streptococcus thermophilus] | | | |
|---|---|---|---|
| Identities = 149/277 (53%), Positives = 191/277 (68%) | | | |
| Query: | 1 | MIVGEQEARALIKPRPKSSHKGDYGSVLLIGGFYPYGGAIIMAALACVKTGAGLVTVATQ | 60 |
| | | M V + R +I+PR + SHKG YG VLL+GG YPYGGAIIMAA+ACV +GAGLVTVAT | |
| Sbjct: | 1 | MKVDDDLVRQVIRPRLRGSHKGSYGRVLLVGGLYPYGGAIIMAAIACVNSGAGLVTVATD | 60 |
| Query: | 61 | SCNIPSLHSQLPEVMAFDSDDYKWLEKSIVQSDVIVIGPGLGVSESSRKILNQTMEKIQS | 120 |
| | | NI +LH+ LPE MAFD + + + +DVI+IG GLG E++ L + I+S | |
| Sbjct: | 61 | RENIIALHAHLPEAMAFDLRETERFLDKLRAADVILIGSGLGEEETADWALELVLANIRS | 120 |
| Query: | 121 | HQSVILDGSALTLLSEGAFPQTKAKNLVLTPHQKEWERLSGIAVSQQTKENTQTALKSFP | 180 |
| | | +Q++++DGSAL LL++ +L+LTPHQKEWERLSG+A+S+Q+ NTQ AL+ F | |
| Sbjct: | 121 | NQNLVVDGSALNLLAKKNQSSLPKCHLILTPHQKEWERLSGLAISEQSVSNTQRALEEFQ | 180 |
| Query: | 181 | KGTILVAKSSHTRIFQDLDEKEIIVGGPYQATGGMGDTLCGMIAGMLAQFKEASPLDKVS | 240 |
| | | GTILVAKS T ++Q + + VGGPYQATGGMGDTL GM+AG LAQF V | |
| Sbjct: | 181 | SGTILVAKSHKTAVYQGAEVTHLEVGGPYQATGGMGDTLAGMVAGFLAQFASTDSYKAVI | 240 |
| Query: | 241 | VGVYLHSAIAQGLSKEAYVVLPTTISDEIPKEMARLS | 277 |
| | | V +LHSAIA +++ AYVVLPT IS IP M +LS | |
| Sbjct: | 241 | VATWLHSAIADNIAENAYVVLPTRISKAIPSWMKKLS | 277 |

[0810] Based on this analysis, it was predicted that these proteins and their epitopes could be useful antigens for vaccines or diagnostics.

### EXAMPLE 82

[0811] A DNA sequence (GBSx0082) was identified in S. agalactiae <SEQ ID 273> which encodes the amino acid sequence <SEQ ID 274>. This protein is predicted to be Exonuclease VII large subunit (xseA). Analysis of this protein sequence reveals the following:

```
Possible site: 36
>>> Seems to have no N-terminal signal sequence
----- Final Results -----
                            bacterial cytoplasm --- Certainty = 0.3172(Affirmative) < succ>
                              bacterial membrane --- Certainty = 0.0000(Not Clear) < succ>
                                bacterial outside --- Certainty = 0.0000(Not Clear) < succ>
```

[0812] The protein has homology with the following sequences in the GENPEPT database:

| >GP: CAB14361 GB: Z99116 similar to exodeoxyribonuclease VII (large | | | |
|---|---|---|---|
| subunit) [Bacillus subtilis] | | | |
| Identities = 193/446 (43%), Positives = 283/446 (63%), Gaps = 10/446 (2%) | | | |
| Query: | 4 | YLSVSTLTKYLKLKFDKDPYLERVYLTGQVSNFR-RRPNHQYFSLKDDKSVIQATMWSGH | 62 |
| | | Y++VS LTKY+K KFD DP+LE +++ G++SN + H YF+LK+ K +Q+ M++ | |
| Sbjct: | 6 | YVTVSALTKYIKRKFDVDPHLENIWIKGELSNVKIHTRGHIYFTLKERKGRMQSVMFARQ | 65 |
| Query: | 63 | FKKLGFELEEGMKVNVVGRVQLYEPSGSYSIIVEKAEPDGIGALAIQFEQLKKKLSQAGY | 122 |
| | | ++L F+ E GMKV V G + +YEPSG+Y + ++ +PDG+GAL + +E+LKKKL+ G | |
| Sbjct: | 66 | SERLPFKPENGMKVLVRGGISVYEPSGNYQLYAKEMQPDGVGALYLAYEELKKKLAGEGL | 125 |
| Query: | 123 | FDDRHKQLIPQFVRKIGVVTSPSGAVIRDIITTVSRRFPGVEILLFPTKVQGEGAAQEIA | 182 |
| | | FDDR+K+ IP F IGVVTSP+GA +RD+ITT+ RR+P V++++ P VQGE A++ I | |
| Sbjct: | 126 | FDDRYKKQIPAFPATIGVVTSPTGAAVRDVITTLKRRYPLVKVIVLPALVQGENASRSIV | 185 |
| Query: | 183 | QTIALANEKKDLDLLIVGRGGGSIEDLWAFNEECVVEAIFESRLPVISSVGHETDTTLAD | 242 |
| | | I ANEK+ D+LIVGRGGGSIE+LWAFNEE V AIF S +P+IS+VGHETD T++D | |
| Sbjct: | 186 | TRIEEANEKEICDVLIVGRGGGSIEELWAFNEEIVARAIFASNIPIISAVGHETDFTISD | 245 |
| Query: | 243 | FVADRRAATPTAAAELATPVTKIDILSWITERENRMYQSSLRLIRTKEERLQKSKQSVIF | 302 |
| | | FVAD RAATPT AAE+A P T D++ E RM ++ + + ++ R+Q + S F | |
| Sbjct: | 246 | FVADIRAATPTGAAEIAVPHT-TDLIERTKTAEVRMTRAMQQHLGQEKGRIQTLQSSYAF | 304 |
| Query: | 303 | RQPERLYDGFLQKLD----NLNQQLTYSMRDKLQTVRQKQGLLHQKLQGIDLKQRIHIYQ | 358 |
| | | R P+RLY Q+ D QLT + K + + ++ L LKQ YQ | |
| Sbjct: | 305 | RFPKRLYAQKEQQFDLAYQQFQAQLTALLDRKSRQLERETYRLEALHPHEQLKQARTRYQ | 364 |
| Query: | 359 | ERVVQSRRLLSSTMTSQYDSKLARFEKAQDALISLDSSRIVARGYAIIEKNHTLVSTTNG | 418 |
| | | E+ Q R+ M Q ++F+ L +L +++ RGY++ K L+ + + | |
| Sbjct: | 365 | EQTNQLRK----NMNIQMKQLHSQFQTVLGKLNALSPLQVMERGYSLAYKEDKLIKSVSQ | 420 |
| Query: | 419 | INEGDHLQVKMQDGLLEVEVKDVRQE | 444 |
| | | I E D L++K++DG+L EV + R E | |
| Sbjct: | 421 | IEEQDRLEIKLKDGVLTCEVLEKRGE | 446 |

[0813] A related DNA sequence was identified in S. pyogenes <SEQ ID 275> which encodes the amino acid sequence <SEQ ID 276>. Analysis of this protein sequence reveals the following:

```
Possible site: 61
>>> Seems to have no N-terminal signal sequence
----- Final Results -----
                            bacterial cytoplasm --- Certainty = 0.3275(Affirmative) < succ>
                              bacterial membrane --- Certainty = 0.0000(Not Clear) < succ>
                                bacterial outside --- Certainty = 0.0000(Not Clear) < succ>
```

[0814] An alignment of the GAS and GBS proteins is shown below:

| Identities = 321/446 (71%), Positives = 386/446 (85%) | | | |
|---|---|---|---|
| Query: | 1 | MSDYLSVSTLTKYLKLKFDKDPYLERVYLTGQVSNFRRRPNHQYFSLKDDKSVIQATMWS | 60 |
| | | M+DYL+V+ LTKYLKLKFD+DPYLERVYLTGQVSNFR+RP HQYFSLKD+ +VIQATMW+ | |
| Sbjct: | 6 | MADYLTVTHLTKYLKLKFDRDPYLERVYLTGQVSNFRKRPTHQYFSLKDESAVIQATMWA | 65 |
| Query: | 61 | GHFKKLGFELEEGMKVNVVGRVQLYEPSGSYSIIVEKAEPDGIGALAIQFEQLKKKLSQA | 120 |
| | | G +KKLGF+LEEGMK+NV+GRVQLYEPSGSYSI++EKAEPDGIGALA+QFEQLKKKL+ | |
| Sbjct: | 66 | GVYKKLGFDLEEGMKINVIGRVQLYEPSGSYSIVIEKAEPDGIGALALQFEQLKKKLTAE | 125 |
| Query: | 121 | GYFDDRHKQLIPQFVRKIGVVTSPSGAVIRDIITTVSRRFPGVEILLFPTKVQGEGAAQE | 180 |
| | | GYF+ +HKQ +PQFV KIGV+TSPSGAVIRDIITTVSRRFPGVEILLFPTKVQG+GAAQE | |
| Sbjct: | 126 | GYFEQKHKQPLPQFVSKIGVITSPSGAVIRDIITTVSRRFPGVEILLFPTKVQGDGAAQE | 185 |
| Query: | 181 | IAQTIALANEKKDLDLLIVGRGGGSIEDLWAFNEECVVEAIFESRLPVISSVGHETDTTL | 240 |
| | | + I AN+++DLDLLIVGRGGGSIEDLWAFNEE VV+AIFES+LPVISSVGHETDTTL | |
| Sbjct: | 186 | VVANIRRANQREDLDLLIVGRGGGSIEDLWAFNEEIVVQAIFESQLPVISSVGHETDTTL | 245 |
| Query: | 241 | ADFVADRRAATPTAAAELATPVTKIDILSWITERENRMYQSSLRLIRTKEERLQKSKQSV | 300 |
| | | ADFVADRRAATPTAAAELATP+TK D++SWI ER+NR YQ+ LR I+ ++E + K QSV | |
| Sbjct: | 246 | ADFVADRRAATPTAAAELATPITKTDLMSWIVERQNRSYQACLRRIKQRQEWVDKLSQSV | 305 |
| Query: | 301 | IFRQPERLYDGFLQKLDNLNQQLTYSMRDKLQTVRQKQGLLHQKLQGIDLKQRIHIYQER | 360 |
| | | IFRQPERLYD +LQK+D L+ L +M+D+L + ++ + L L L+ +I YQ+R | |
| Sbjct: | 306 | IFRQPERLYDAYLQKIDRLSMTLMNTMKDRLSSAKENKVQLDHALANSQLQTKIERYQDR | 365 |
| Query: | 361 | VVQSRRLLSSTMTSQYDSKLARFEKAQDALISLDSSRIVARGYAIIEKNHTLVSTTNGIN | 420 |
| | | V ++RLL + M SQYDS+LARFEKAQDAL+SLD+SRI+ARGYA+IEKN LV++ + I | |
| Sbjct: | 366 | VATAKRLLMANMASQYDSQLARFEKAQDALLSLDASRIIARGYAMIEKNQALVASVSQIT | 425 |
| Query: | 421 | EGDHLQVKMQDGLLEVEVKDVRQENI | 446 |
| | | +GD L +KM+DG L+VEVKDV+ ENI | |
| Sbjct: | 426 | KGDQLTIKMRDGQLDVEVKDVKNENI | 451 |

[0815] Based on this analysis, it was predicted that these proteins and their epitopes could be useful antigens for vaccines or diagnostics.

### EXAMPLE 83

[0816] A DNA sequence (GBSx0083) was identified in S. agalactiae <SEQ ID 277> which encodes the amino acid sequence <SEQ ID 278>. Analysis of this protein sequence reveals the following:

```
Possible site: 33
>>> Seems to have no N-terminal signal sequence
----- Final Results -----
                            bacterial cytoplasm --- Certainty = 0.2913(Affirmative) < succ>
                              bacterial membrane --- Certainty = 0.0000(Not Clear) < succ>
                                bacterial outside --- Certainty = 0.0000(Not Clear) < succ>
```

[0817] The protein has homology with the following sequences in the GENPEPT database:

| >GP: AAG07429 GB: AE004821 exodeoxyribonuclease VII small subunit | | | |
|---|---|---|---|
| [Pseudomonas aeruginosa] | | | |
| Identities = 26/66 (39%), Positives = 51/66 (76%), Gaps = 2/66 (3%) | | | |
| Query: | 1 | MSDKKT--FEENLQELETIVSRLETGDVALEDAIAEFQKGMLISKELQRTLKEAEETLVK | 58 |
| | | M+ KKT FE++L EL+T+V RLE+G+++LE+++ F++G+ +++E Q +L +AE+ + | |
| Sbjct: | 1 | MARKKTLDFEQSLTELQTLVERLESGELSLEESLGAFEQGIRLTRECQTSLSQAEQKVQI | 60 |
| Query: | 59 | VMQADG | 64 |
| | | +++ DG | |
| Sbjct: | 61 | LLERDG | 66 |

[0818] A related DNA sequence was identified in S. pyogenes <SEQ ID 279> which encodes the amino acid sequence <SEQ ID 280>. Analysis of this protein sequence reveals the following:

```
Possible site: 51
>>> Seems to have no N-terminal signal sequence
----- Final Results -----
                            bacterial cytoplasm --- Certainty = 0.2796(Affirmative) < succ>
                              bacterial membrane --- Certainty = 0.0000(Not Clear) < succ>
                                bacterial outside --- Certainty = 0.0000(Not Clear) < succ>
```

[0819] An alignment of the GAS and GBS proteins is shown below:

| Identities = 55/70 (78%), Positives = 65/70 (92%) | | | |
|---|---|---|---|
| Query: | 1 | MSDKKTFEENLQELETIVSRLETGDVALEDAIAEFQKGMLISKELQRTLKEAEETLVKVM | 60 |
| | | MS KTFEENLQ+LETIV++LE GDV LE+AI+EFQKGML+SKELQ+TL+ AE+TLVKVM | |
| Sbjct: | 1 | MSKTKTFEENLQDLETIVNKLENGDVPLEEAISEFQKGMLLSKELQKTLQAAEKTLVKVM | 60 |
| Query: | 61 | QADGTEVEMD | 70 |
| | | QADGTEV+MD | |
| Sbjct: | 61 | QADGTEVDMD | 70 |

[0820] Based on this analysis, it was predicted that these proteins and their epitopes could be useful antigens for vaccines or diagnostics.

### EXAMPLE 84

[0821] A DNA sequence (GBSx0084) was identified in S. agalactiae <SEQ ID 281> which encodes the amino acid sequence <SEQ ID 282>. Analysis of this protein sequence reveals the following:

```
Possible site: 58
>>> Seems to have no N-terminal signal sequence
----- Final Results -----
                            bacterial cytoplasm --- Certainty = 0.2614(Affirmative) < succ>
                              bacterial membrane --- Certainty = 0.0000(Not Clear) < succ>
                                bacterial outside --- Certainty = 0.0000(Not Clear) < succ>
```

[0822] The protein has homology with the following sequences in the GENPEPT database:

| >GP: BAA25265 GB: AB003187 farnesyl diphosphate synthase [Micrococcus | | | |
|---|---|---|---|
| luteus] | | | |
| Identities = 126/258 (48%), Positives = 175/258 (66%), Gaps = 2/258 (0%) | | | |
| Query: | 27 | LIKAILYSVDGGGKRIRPRILLEILEGFGVELIDGHYDVAAALEMIHTGSLIHDDLPAMD | 86 |
| | | L +AI YS+ GGKRIRP ++L L+ G DG ALEMIHT SLIHDDLPAMD | |
| Sbjct: | 31 | LHEAINYSLSAGGKRIRPLLVLTTLDSLGGNAHDG-LPFGIALEMIHTYSLIHDDLPAMD | 89 |
| Query: | 87 | NDDFRRGRLTNHKKFDEATAVLAGDSLFLDPFDLVVKAGFKADVTVRLIELLSMSAGSFG | 146 |
| | | NDD+RRG+LTNHK+FDEATA+LAGD+L D F ++ A++ + LI LLS ++GS G | |
| Sbjct: | 90 | NDDYRRGKLTNHKRFDEATAILAGDALLTDAFQCILNTQLNAEIKLSLINLLSTASGSNG | 149 |
| Query: | 147 | MVGGQMLDMKGENKVLSIDDLSLIHINKTGRLLAYPFVAAGILAEKSEEVKGKLHQAGLL | 206 |
| | | MV GQMLDM+GE+K L++++L IHI+KTG L+ V+AGI+ ++ +L+ G | |
| Sbjct: | 150 | MVYGQMLDMQGEHKTLTLNELERIHIHKTGELIRAAIVSAGIIMNFNDAQIEQLNIIGKN | 209 |
| Query: | 207 | IGHAFQVRDDILDVTASFEELGKTPNKDIVAEKTTYPNLLGLDKSQEILDDTLKKAQAIF | 266 |
| | | +G FQ++DDILDV SFE +GKT D+ +K+TY +LLGL+ S+++L+D L + | |
| Sbjct: | 210 | VGLMFQIKDDILDVEGSFENIGKTVGSDLNNDKSTYVSLLGLEASKQLLNDKLTETYDAL | 269 |
| Query: | 267 | QNLEKKANFNARKIIDII | 284 |
| | | + L+ N N + +I I | |
| Sbjct: | 270 | KTLQ-PINDNLKTLITYI | 286 |

[0823] A related DNA sequence was identified in S. pyogenes <SEQ ID 283> which encodes the amino acid sequence <SEQ ID 284>. Analysis of this protein sequence reveals the following:

```
Possible site: 38
>>> Seems to have no N-terminal signal sequence
----- Final Results -----
                            bacterial cytoplasm --- Certainty = 0.3887(Affirmative) < succ>
                              bacterial membrane --- Certainty = 0.0000(Not Clear) < succ>
                                bacterial outside --- Certainty = 0.0000(Not Clear) < succ>
```

[0824] An alignment of the GAS and GBS proteins is shown below:

| Identities = 192/289 (66%), Positives = 237/289 (81%) | | | |
|---|---|---|---|
| Query: | 2 | MVTIEKIDEAIHRYYKQTHSVVSPDLIKAILYSVDGGGKRIRPRILLEILEGFGVELIDG | 61 |
| | | M + +IDEAI RYYK T + VS +LI AILYSVD GGKRIRP ILLE++EGFGV L + | |
| Sbjct: | 1 | MDKLARIDEAIRRYYKTTSNGVSEELIDAILYSVDSGGKRIRPLILLEMIEGFGVSLQNA | 60 |
| Query: | 62 | HYDVAAALEMIHTGSLIHDDLPAMDNDDFRRGRLTNHKKFDEATAVLAGDSLFLDPFDLV | 121 |
| | | H+D+AAALEMIHTGSLIHDDLPAMDNDD+RRGRLTNHK+F EATA+LAGDSLFLDPF L+ | |
| Sbjct: | 61 | HFDLAAALEMIHTGSLIHDDLPAMDNDDYRRGRLTNHKQFGEATAILAGDSLFLDPFGLI | 120 |
| Query: | 122 | VKAGFKADVTVRLIELLSMSAGSFGMVGGQMLDMKGENKVLSIDDLSLIHINKTGRLLAY | 181 |
| | | +A ++V V LI+ LS+++G+FGMVGGQMLDMKGEN+ LS+ LSLIH+NKTG+LLA+ | |
| Sbjct: | 121 | AQAELNSEVKVALIQELSLASGTFGMVGGQMLDMKGENQALSLPQLSLIHLNKTGKLLAF | 180 |
| Query: | 182 | PFVAAGILAEKSEEVKGKLHQAGLLIGHAFQVRDDILDVTASFEELGKTPNKDIVAEKTT | 241 |
| | | PF AA ++ E++ V+ +L QAG+LIGHAFQ+RDDILDVTASFE+LGKTP KD+ AEK T | |
| Sbjct: | 181 | PFKAAALITEQAMTVRQQLEQAGMLIGHAFQIRDDILDVTASFEDLGKTPKKDLFAEKAT | 240 |
| Query: | 242 | YPNLLGLDKSQEILDDTLKKAQAIFQNLEKKANFNARKIIDIIEGLRLN | 290 |
| | | YP+LLGL+ S ++L ++L +A IFQ LE F + I +IEGLRLN | |
| Sbjct: | 241 | YPSLLGLEASYQLLTESLDQALTIFQTLESDVGFKPQIITKLIEGLRLN | 289 |

[0825] Based on this analysis, it was predicted that these proteins and their epitopes could be useful antigens for vaccines or diagnostics.

### EXAMPLE 85

[0826] A DNA sequence (GBSx0085) was identified in S. agalactiae <SEQ ID 285> which encodes the amino acid sequence <SEQ ID 286>. This protein is predicted to be hemolysin-like protein (tly). Analysis of this protein sequence reveals the following:

| Possible site: 37 | | | | |
|---|---|---|---|---|
| >>> Seems to have no N-terminal signal sequence | | | | |
| | INTEGRAL | Likelihood = −0.75 | Transmembrane | 152-168 (151-168) |

```
----- Final Results -----
                              bacterial membrane --- Certainty = 0.1298(Affirmative) < succ>
                                bacterial outside --- Certainty = 0.0000(Not Clear) < succ>
                            bacterial cytoplasm --- Certainty = 0.0000(Not Clear) < succ>
```

[0827] The protein has homology with the following sequences in the GENPEPT database:

| >GP: BAB06497 GB: AP001516 hemolysin-like protein [Bacillus halodurans] | | | |
|---|---|---|---|
| Identities = 162/270 (60%), Positives = 202/270 (74%), Gaps = 3/270 (1%) | | | |
| Query: | 3 | KERVDVLAYKQGLFDTREQAKRGVMAGMVINVINGERYDKPGEKVADDTELKLKGEKLKY | 62 |
| | | KERVDVL ++GL +TRE+AKR +MAG+V + ER DKPG KV DT L +KGE L Y | |
| Sbjct: | 4 | KERVDVLLVERGLMETREKAKRSIMAGLVFS--GHERVDKPGLKVDRDTPLSVKGEVLPY | 61 |
| Query: | 63 | VSRGGLKLEKALQVFEISVADKLTIDIGASTGGFTDVMLQSGARLVYAVDVGTNQLVWKL | 122 |
| | | VSRGGLKLEKA++ F++ + D++ +DIGASTGGFTD LQ+GA VYAVDVG NQL WKL | |
| Sbjct: | 62 | VSRGGLKLEKAIRAFDLHLTDRVVLDIGASTGGFTDCALQNGATFVYAVDVGYNQLAWKL | 121 |
| Query: | 123 | RQDHRVRSMEQYNFRYAQKEDFKEGLPEFASIDVSFISLNLILPALKEILVDGGQVVALI | 182 |
| | | RQD RV ME+ NFRY + E + GLP A+IDVSFISL LILP LK +L++ VVAL+ | |
| Sbjct: | 122 | RQDERVVVMERTNFRYLKPEVLERGLPNMATIDVSFISLKLILPVLKTMLLENSDVVALV | 181 |
| Query: | 183 | KPQFEAGREQIGKNGIVKDKLVHEKVLTTVTNFTKDYGYTVKHLDFSPIQGGHGNIEFLM | 242 |
| | | KPQFEAGRE++GK GIV+DK VH+KVL+T+ F GY V LDFSPI GG GNIEFL+ | |
| Sbjct: | 182 | KPQFEAGREEVGKKGIVRDKSVHQKVLSTIVEFALKEGYAVGGLDFSPITGGEGNIEFLL | 241 |
| Query: | 243 | HLQKCQDPQNLV-LDQIQDVIEKAHKEFKK | 271 |
| | | HL +D ++ + + I+D +E+AH E KK | |
| Sbjct: | 242 | HLMWRKDKESFISQEMIRDTVERAHLELKK | 271 |

[0828] A related DNA sequence was identified in S. pyogenes <SEQ ID 287> which encodes the amino acid sequence <SEQ ID 288>. Analysis of this protein sequence reveals the following:

| Possible site: 37 | | | | |
|---|---|---|---|---|
| >>> Seems to have no N-terminal signal sequence | | | | |
| | INTEGRAL | Likelihood = −2.92 | Transmembrane | 150-166 (149-168) |

```
----- Final Results -----
                              bacterial membrane --- Certainty = 0.2168(Affirmative) < succ>
                                bacterial outside --- Certainty = 0.0000(Not Clear) < succ>
                            bacterial cytoplasm --- Certainty = 0.0000(Not Clear) < succ>
```

[0829] The protein has homology with the following sequences in the databases:

| >GP: BAB06497 GB: AP001516 hemolysin-like protein [Bacillus halodurans] | | | |
|---|---|---|---|
| Identities = 156/270 (57%), Positives = 196/270 (71%), Gaps = 3/270 (1%) | | | |
| Query: | 3 | KERVDVLAYKQGLFETREQAKRGVMAGLVVSVINGQRYDKPGDKIDDGTELKLKGEKLKY | 62 |
| | | KERVDVL ++GL ETRE+AKR +MAGLV S +R DKPG K+D T L +KGE L Y | |
| Sbjct: | 4 | KERVDVLLVERGLMETREKAKRSIMAGLVFS--GHERVDKPGLKVDRDTPLSVKGEVLPY | 61 |
| Query: | 63 | VSRGGLKLEKGLHVFGVSVANQIGIDIGASTGGFTDVMLQDGAKLVYAVDVGTNQLVWKL | 122 |
| | | VSRGGLKLEK + F + + +++ +DIGASTGGFTD LQ+GA VYAVDVG NQL WKL | |
| Sbjct: | 62 | VSRGGLKLEKAIRAFDLHLTDRVVLDIGASTGGFTDCALQNGATFVYAVDVGYNQLAWKL | 121 |
| Query: | 123 | RQDPRVRSMEQYNFRYAQPEDFNEGQPVFASIDVSFISLSLILPALHNVLSDQGQVIALI | 182 |
| | | RQD RV ME+ NFRY +PE G P A+IDVSFISL LILP L +L + V+AL+ | |
| Sbjct: | 122 | RQDERVVVMERTNFRYLKPEVLERGLPNMATIDVSFISLKLILPVLKTMLLENSDVVALV | 181 |
| Query: | 183 | KPQFEAGREQIGKKGIVKDKQIHEKVIQKVMDFASGYGFTVKGLDFSPIQGGHGNIEFLA | 242 |
| | | KPQFEAGRE++GKKGIV+DK +H+KV+ +++FA G+ V GLDFSPI GG GNIEFL | |
| Sbjct: | 182 | KPQFEAGREEVGKKGIVRDKSVHQKVLSTIVEFALKEGYAVGGLDFSPITGGEGNIEFLL | 241 |
| Query: | 243 | HLAKSQTPET-LAPHLIQKVVAKAHKEFEK | 271 |
| | | HL + E+ ++ +I+ V +AH E +K | |
| Sbjct: | 242 | HLMWRKDKESFISQEMIRDTVERAHLELKK | 271 |

[0830] An alignment of the GAS and GBS proteins is shown below:

| Identities = 214/275 (77%), Positives = 238/275 (85%) | | | |
|---|---|---|---|
| Query: | 1 | MAKERVDVLAYKQGLFDTREQAKRGVMAGMVINVINGERYDKPGEKVADDTELKLKGEKL | 60 |
| | | M KERVDVLAYKQGLF+TREQAKRGVMAG+V++VING+RYDKPG+K+ D TELKLKGEKL | |
| Sbjct: | 1 | MPKERVDVLAYKQGLFETREQAKRGVMAGLVVSVINGQRYDKPGDKIDDGTELKLKGEKL | 60 |
| Query: | 61 | KYVSRGGLKLEKALQVFEISVADKLTIDIGASTGGFTDVMLQSGARLVYAVDVGTNQLVW | 120 |
| | | KYVSRGGLKLEK L VF +SVA+++ IDIGASTGGFTDVMLQ GA+LVYAVDVGTNQLVW | |
| Sbjct: | 61 | KYVSRGGLKLEKGLHVFGVSVANQIGIDIGASTGGFTDVMLQDGAKLVYAVDVGTNQLVW | 120 |
| Query: | 121 | KLRQDHRVRSMEQYNFRYAQKEDFKEGLPEFASIDVSFISLNLILPALKEILVDGGQVVA | 180 |
| | | KLRQD RVRSMEQYNFRYAQ EDF EG P FASIDVSFISL+LILPAL +L D GQV+A | |
| Sbjct: | 121 | KLRQDPRVRSMEQYNFRYAQPEDFNEGQPVFASIDVSFISLSLILPALHNVLSDQGQVIA | 180 |
| Query: | 181 | LIKPQFEAGREQIGKNGIVKDKLVHEKVLTTVTNFTKDYGYTVKHLDFSPIQGGHGNIEF | 240 |
| | | LIKPQFEAGREQIGK GIVKDK +HEKV+ V +F YG+TVK LDFSPIQGGHGNIEF | |
| Sbjct: | 181 | LIKPQFEAGREQIGKKGIVKDKQIHEKVIQKVMDFASGYGFTVKGLDFSPIQGGHGNIEF | 240 |
| Query: | 241 | LMHLQKCQDPQNLVLDQIQDVIEKAHKEFKKNEEE | 275 |
| | | L HL K Q P+ L IQ V+ KAHKEF+K+E+E | |
| Sbjct: | 241 | LAHLAKSQTPETLAPHLIQKVVAKAHKEFEKHEKE | 275 |

[0831] SEQ ID 286 (GBS310) was expressed in E. coli as a His-fusion product. SDS-PAGE analysis of total cell extract is shown in FIG. 57 (lane 3; MW 34 kDa). It was also expressed in E. coli as a GST-fusion product. SDS-PAGE analysis of total cell extract is shown in FIG. 61 (lane 4; MW 58.8 kDa).

[0832] The GBS310-GST fusion product was purified (FIG. 210, lane 10) and used to immunise mice. The resulting antiserum was used for FACS (FIG. 282), which confirmed that the protein is immunoaccessible on GBS bacteria.

[0833] Based on this analysis, it was predicted that these proteins and their epitopes could be useful antigens for vaccines or diagnostics.

### EXAMPLE 86

[0834] A DNA sequence (GBSx0086) was identified in S. agalactiae <SEQ ID 289> which encodes the amino acid sequence <SEQ ID 290>. Analysis of this protein sequence reveals the following:

```
Possible site: 18
>>> Seems to have no N-terminal signal sequence
----- Final Results -----
                            bacterial cytoplasm --- Certainty = 0.1966(Affirmative) < succ>
                              bacterial membrane --- Certainty = 0.0000(Not Clear) < succ>
                                bacterial outside --- Certainty = 0.0000(Not Clear) < succ>
```

[0835] The protein has homology with the following sequences in the GENPEPT database:

| >GP: CAA09426 GB: AJ010954 arginine repressor [Bacillus | | | |
|---|---|---|---|
| stearothermophilus] | | | |
| Identities = 49/153 (32%), Positives = 84/153 (54%), Gaps = 4/153 (2%) | | | |
| Query: | 1 | MKKSERLNLIKQIVLNHAVETQHELLRRLEAYGVTLTQATISRDMNEIGIIKVPSAKGRY | 60 |
| | | M K +R I++I++NH +ETQ EL+ L+ G +TQAT+SRD+ E+ ++KVP A GRY | |
| Sbjct: | 1 | MNKGQRHIKIREIIMNHEIETQDELVDMLKKAGFNVTQATVSRDIKELQLVKVPMANGRY | 60 |
| Query: | 61 | IYGLSNENDPIFTTAVAKPIKTSILSISDKLLGLEQFININVIPGNSQLIKTFIMSHCQE | 120 |
| | | Y L +D F + +K +++ KL G + + +PGN+ I + + | |
| Sbjct: | 61 | KYSL--PSDQRFNP--TQKLKRALMDAFVKLDGSGNLLVLKTLPGNAHAIGVLLDNLDWN | 116 |
| Query: | 121 | HIFSLTADDNSLLLIAKSEADADHIRQSMIAML | 153 |
| | | I D++ L+I ++ DA+ + ++ ML | |
| Sbjct: | 117 | EIVGTICGDDTCLIICRTAEDAEKVSGQLLGML | 149 |

[0836] A related DNA sequence was identified in S. pyogenes <SEQ ID 291> which encodes the amino acid sequence <SEQ ID 292>. Analysis of this protein sequence reveals the following:

```
Possible site: 50
>>> Seems to have no N-terminal signal sequence
----- Final Results -----
                            bacterial cytoplasm --- Certainty = 0.1717(Affirmative) < succ>
                              bacterial membrane --- Certainty = 0.0000(Not Clear) < succ>
                                bacterial outside --- Certainty = 0.0000(Not Clear) < succ>
```

[0837] An alignment of the GAS and GBS proteins is shown below:

| Identities = 87/154 (56%), Positives = 118/154 (76%), Gaps = 1/154 (0%) | | | |
|---|---|---|---|
| Query: | 1 | MKKSERLNLIKQIVLNHAVETQHELLRRLEAYGVTLTQATISRDMNEIGIIKVPSARGRY | 60 |
| | | MKKSERL LIK++VL H +ETQH+LLR L +G+ LTQATISRDMNEIGI+K+PS GRY | |
| Sbjct: | 12 | MKKSERLELIKKMVLTHPIETQHDLLRLLAEHGLELTQATISRDMNEIGIVKIPSGSGRY | 71 |
| Query: | 61 | IYGLSNENDPIFTTAVAKPIKTSILSISDKLLGLEQFININVIPGNSQLIKTFIMSHCQE | 120 |
| | | IYGLS ++ + IK++IL++SDK GLEQ + + V+PGNS+LIK ++++ + | |
| Sbjct: | 72 | IYGLSQDSGKKIVQG-PRSIKSTILAVSDKTKGLEQHLYLKVVPGNSKLIKRYLLADFSK | 130 |
| Query: | 121 | HIFSLTADDNSLLLIAKSEADADHIRQSMIAMLE | 154 |
| | | IFSL ADD+SLLLIAKS ++AD IRQ ++ ++ | |
| Sbjct: | 131 | AIFSLIADDDSLLLIAKSPSEADMIRQEILLWMQ | 164 |

[0838] Based on this analysis, it was predicted that these proteins and their epitopes could be useful antigens for vaccines or diagnostics.

### EXAMPLE 87

[0839] A DNA sequence (GBSx0088) was identified in S. agalactiae <SEQ ID 293> which encodes the amino acid sequence <SEQ ID 294>. Analysis of this protein sequence reveals the following:

```
Possible site: 15
>>> Seems to have no N-terminal signal sequence
----- Final Results -----
                            bacterial cytoplasm --- Certainty = 0.3339(Affirmative) < succ>
                              bacterial membrane --- Certainty = 0.0000(Not Clear) < succ>
                                bacterial outside --- Certainty = 0.0000(Not Clear) < succ>
```

[0840] The protein has no significant homology with any sequences in the GENPEPT database.

[0841] No corresponding DNA sequence was identified in S. pyogenes.

[0842] Based on this analysis, it was predicted that this protein and its epitopes, could be useful antigens for vaccines or diagnostics.

### EXAMPLE 88

[0843] A DNA sequence (GBSx0089) was identified in S. agalactiae <SEQ ID 295> which encodes the amino acid sequence <SEQ ID 296>. This protein is predicted to be DNA repair protein recn (recN). Analysis of this protein sequence reveals the following:

Possible site: 50
>>> Seems to have no N-terminal signal sequence
----- Final Results -----
bacterial cytoplasm --- Certainty = 0.1651 (Affirmative) < succ>
bacterial membrane --- Certainty = 0.0000 (Not Clear) < succ>
bacterial outside --- Certainty = 0.0000 (Not Clear) < succ>

[0844] The protein has homology with the following sequences in the GENPEPT database:

| >GP: CAB14355 GB: Z99116 recN [Bacillus subtilis] | | | |
|---|---|---|---|
| Identities = 244/567 (43%), Positives = 366/567 (64%), Gaps = 18/567 (3%) | | | |
| Query: | 1 | MLLEISIKNFAIIEEISLNFETGMTVLTGETGAGKSIIIDAMNMMLGSRASVEVIRHGAN | 60 |
| | | ML E+SIKNFAIIEE++++FE G+TVLTGETGAGKSIIIDA+++++G R S E +R+G | |
| Sbjct: | 1 | MLAELSIKNFAIIEELTVSFERGLTVLTGETGAGKSIIIDAISLLVGGRGSSEFVRYGEA | 60 |
| Query: | 61 | KAEIEGFFSVEKNQSLVQLLEENGIELADELII-RREIFQNGRSVSRINGQMVNLSTLKA | 119 |
| | | KAE+EG F +E ++ + E GI+++DE+I+ RR+I +G+SV R+NG++V +++L+ | |
| Sbjct: | 61 | KAELEGLFLLESGHPVLGVCAEQGIDVSDEMIVMRRDISTSGKSVCRVNGKLVTIASLRE | 120 |
| Query: | 120 | VGHYLVDIYGQHDQEELMKPNMHILMLDEFGNTEFNVIKERYQSLFDAYRQLRKRVLDKQ | 179 |
| | | +G L+DI+GQHD + LM+ H+ +LD+F E + YQ + Y +L K++ | |
| Sbjct: | 121 | IGRLLLDIHGQHDNQLLMEDENHLQLLDKFAGAEVESALKTYQEGYQRYVKLLKKLKQLS | 180 |
| Query: | 180 | KNEQENKSRIEMLEFQIAEIESVALKSDEDQTLLKQRDKLMNHKNIADTLTNAYLMLDNE | 239 |
| | | ++EQE +++++FQ+ EIES L+ +ED+ L ++R ++ N + I ++L NAY L +E | |
| Sbjct: | 181 | ESEQEMAHCLDLIQFQLEEIESAKLELNEDEQLQEERQQISNFEKIYESLQNAYNALRSE | 240 |
| Query: | 240 | EFSSLSNVRSAMNDLMALEEFDREYKDLSTNLSEAYYVIEEVTKRLGDVIDDLDFDAGLL | 299 |
| | | + L V A L + + + K +S ++S +YY++E+ T ++ +++D+L+FD L | |
| Sbjct: | 241 | Q-GGLDWVGMASAQLEDISDINEPLKKMSESVSNSYYLLEDATFQMRNMLDELEFDPERL | 299 |
| Query: | 300 | QEIENRLDVINTITRKYGGDVNDVLDYFDNITKEYSLLTGSEESSDALEKELKILEHDLI | 359 |
| | | IE RL+ I + RKYG V D+L+Y I +E + + +L+KEL + D+ | |
| Sbjct: | 300 | NYIETRLNEIKQLKRKYGATVEDILEYASKIEEEIDQIENRDSHLQSLKKELDSVGKDVA | 359 |
| Query: | 360 | ESANQLSLERHKLAKQLENEIKQELTELYMEKADFQVQFTKG----------------KF | 403 |
| | | A +S R AK+L +EI +EL LYMEK+ F +F + | |
| Sbjct: | 360 | VEAANVSQIRKTWAKKLADEIHRELKSLYMEKSTFDTEFKVRTASRNEEAPLVNGQPVQL | 419 |
| Query: | 404 | NKEGNEIVEFYISTNPGEGFKPLVKVASGGELSRLMLAIKSAFSRKEDKTSIVFDEVDTG | 463 |
| | | ++G ++V+F ISTN GE K L KVASGGELSR+MLAIKS FS ++D TSI+FDEVDTG | |
| Sbjct: | 420 | TEQGIDLVKFLISTNTGEPLKSLSKVASGGELSRVMLAIKSIFSSQQDVTSIIFDEVDTG | 479 |
| Query: | 464 | VSGRVAQAIAQKIHKIGSHGQVLAISHLAQVIAIADYQYFIEKISSDSSTVSTVRLLSYE | 523 |
| | | VSGRVAQAIA+KIHK+ QVL I+HL QV A+AD +I K D T + V+ LS + | |
| Sbjct: | 480 | VSGRVAQAIAEKIHKVSIGSQVLCITHLPQVAAMADTHLYIAKELKDGRTTTRVKPLSKQ | 539 |
| Query: | 524 | ERVEEIAKMLAGNNVTDTARTQAKELL | 550 |
| | | E+V EI + +AG VTD + AKELL | |
| Sbjct: | 540 | EKVAEIERSIAGVEVTDLTKRHAKELL | 566 |

[0845] A related DNA sequence was identified in S. pyogenes <SEQ ID 297> which encodes the amino acid sequence <SEQ ID 298>. Analysis of this protein sequence reveals the following:

Possible site: 51
>>> Seems to have no N-terminal signal sequence
----- Final Results -----
bacterial cytoplasm --- Certainty = 0.1215 (Affirmative) < succ>
bacterial membrane --- Certainty = 0.0000 (Not Clear) < succ>
bacterial outside --- Certainty = 0.0000 (Not Clear) < succ>

[0846] An alignment of the GAS and GBS proteins is shown below:

| Identities = 403/550 (73%), Positives = 472/550 (85%) | | | |
|---|---|---|---|
| Query: | 1 | MLLEISIKNFAIIEEISLNFETGMTVLTGETGAGKSIIIDAMNMMLGSRASVEVIRHGAN | 60 |
| | | MLLEISIKNFAII+EISLNFE GMTVLTGETGAGKSIIIDAMNMMLG+RAS EVIR GAN | |
| Sbjct: | 2 | MLLEISIKNFAIIDEISLNFENGMTVLTGETGAGKSIIIDAMNMMLGARASTEVIRRGAN | 61 |
| Query: | 61 | KAEIEGFFSVEKNQSLVQLLEENGIELADELIIRREIFQNGRSVSRINGQMVNLSTLKAV | 120 |
| | | KAEIEGFFSV+ LV LE +GI + +ELIIRR+IF NGRSVSRINGQMVNL+TLK V | |
| Sbjct: | 62 | KAEIEGFFSVDATPELVACLESSGIAMEEELIIRRDIFANGRSVSRINGQMVNLATLKQV | 121 |
| Query: | 121 | GHYLVDIYGQHDQEELMKPNMHILMLDEFGNTEFNVIKERYQSLFDAYRQLRKRVLDKQK | 180 |
| | | G +LVDI+GQHDQEELM+P +H +LD FG+ F +KE YQ +FD Y+ LR++V+DKQK | |
| Sbjct: | 122 | GQFLVDIHGQHDQEELMRPQLHQQILDAFGDKAFEQLKENYQLIFDRYKSLRRQVIDKQK | 181 |
| Query: | 181 | NEQENKSRIEMLEFQIAEIESVALKSDEDQTLLKQRDKLMNHKNIADTLTNAYLMLDNEE | 240 |
| | | NE+E+K RI+ML FQIAEIE+ AL ED L ++RD+LMNHK IADTLTNAY+MLDN++ | |
| Sbjct: | 182 | NEKEHKDRIDMLAFQIAEIEAAALSRGEDDRLNQERDRLMNHKQIADTLTNAYVMLDNDD | 241 |
| Query: | 241 | FSSLSNVRSAMNDLMALEEFDREYKDLSTNLSEAYYVIEEVTKRLGDVIDDLDFDAGLLQ | 300 |
| | | FSSLSN+RS+MNDL+++E+FD EYK +ST++SEAYY++EEV+K+L D ID LDFD G LQ | |
| Sbjct: | 242 | FSSLSNIRSSMNDLLSIEQFDSEYKGMSTSISEAYYILEEVSKQLSDTIDQLDFDGGRLQ | 301 |
| Query: | 301 | EIENRLDVINTITRKYGGDVNDVLDYFDNITKEYSLLTGSEESSDALEKELKILEHDLIE | 360 |
| | | EIE RLD++N++TRKYGG+VNDVLDY+DNI KEY LLTG + SS LE ELK LE L+ | |
| Sbjct: | 302 | EIEFRLDILNSLTRKYGGNVNDVLDYYDNIVKEYQLLTGDDLSSGDLEAELKSLEKQLVA | 361 |
| Query: | 361 | SANQLSLERHKLAKQLENEIKQELTELYMEKADFQVQFTKGKFNKEGNEIVEFYISTNPG | 420 |
| | | +A++LS+ RH+LA+QLE EIK EL ELYMEKADF+V FT KFN++GNE +EFYISTNPG | |
| Sbjct: | 362 | AASELSVSRHQLAEQLEAEIKAELKELYMEKADFKVHFTTSKFNRDGNESLEFYISTNPG | 421 |
| Query: | 421 | EGFKPLVKVASGGELSRLMLAIKSAFSRKEDKTSIVFDEVDTGVSGRVAQAIAQKIHKIG | 480 |
| | | EGFKPLVKVASGGELSRLMLAIK+A SRKEDKTSIVFDEVDTGVSGRVAQAIAQKI+KIG | |
| Sbjct: | 422 | EGFKPLVKVASGGELSRLMLAIKAAISRKEDKTSIVFDEVDTGVSGRVAQAIAQKIYKIG | 481 |
| Query: | 481 | SHGQVLAISHLAQVIAIADYQYFIEKISSDSSTVSTVRLLSYEERVEEIAKMLAGNNVTD | 540 |
| | | HGQVLAISHL QVIAIADYQYFI K S + STVS VRLL+ EERVEEIA M+AG ++T | |
| Sbjct: | 482 | RHGQVLAISHLPQVIAIADYQYFISKESKEESTVSKVRLLTPEERVEEIASMIAGTDMTQ | 541 |
| Query: | 541 | TARTQAKELL | 550 |
| | | A TQA+ELL | |
| Sbjct: | 542 | AALTQARELL | 551 |

[0847] Based on this analysis, it was predicted that these proteins and their epitopes could be useful antigens for vaccines or diagnostics.

### EXAMPLE 89

[0848] A DNA sequence (GBSx0090) was identified in S. agalactiae <SEQ ID 299> which encodes the amino acid sequence <SEQ ID 300>. This protein is predicted to be degV protein. Analysis of this protein sequence reveals the following:

| Possible site: 38 | | | |
|---|---|---|---|
| >>> Seems to have no N-terminal signal sequence | | | |
| INTEGRAL | Likelihood = −0.96 | Transmembrane | 246-262 (246-262) |

----- Final Results -----
bacterial membrane --- Certainty = 0.1383 (Affirmative) < succ>
bacterial outside --- Certainty = 0.0000 (Not Clear) < succ>
bacterial cytoplasm --- Certainty = 0.0000 (Not Clear) < succ>

[0849] The protein has homology with the following sequences in the GENPEPT database:

| >GP: BAB07346 GB: AP001519 unknown conserved protein | | | |
|---|---|---|---|
| [Bacillus halodurans] | | | |
| Identities = 93/277 (33%), Positives = 152/277 (54%), Gaps = 4/277 (1%) | | | |
| Query: | 1 | MSKIKIVTDSSITIEPELIKELDITVVPLSVMIDGTLYSDNDLKAQGEFLNLMRGSKELP | 60 |
| | | M+KI IVTDS+ + P+ KEL + VVPLSV+ Y + + +F ++ ++LP | |
| Sbjct: | 1 | MTKIAIVTDSTAYLGPKRAKELGVIVVPLSVVFGEEAYQEEVELSSADFYERLKHEEKLP | 60 |
| Query: | 61 | KTSQPPVGVFAEIYEKLMNEGVEHIIAIHLTHTLSGTIE-ASRQGANIAGADVTVIDSTF | 119 |
| | | TSQP VG+F E +E+L EG E +I+IHL+ +SGT + A G+ + G +V DS | |
| Sbjct: | 61 | TTSQPAVGLFVETFERLAKEGFEVVISIHLSSKISGTYQSALTAGSMVEGIEVIGYDSGI | 120 |
| Query: | 120 | TDQCQKFQVVEAAKLAKEGADLDTILARVEEVRQKSELFIGVSTLENLVKGGRIGRVTGL | 179 |
| | | + + Q V EAAKL KEGAD TI+ ++EV++++ V L +L +GGR+ + | |
| Sbjct: | 121 | SCEPQANFVAEAAKLVKEGADPQTIIDHLDEVKKRTNALFVVHDLSHLHRGGRLNAAQLV | 180 |
| Query: | 180 | LSSLLNIKVIMELTNHELVPIVKGR-GLKTFSKWLDNFVESAQTRKIAEIGISYCGKADM | 238 |
| | | + SLL IK I+ + +VP+ K R K +++ + F E A + + + + + D | |
| Sbjct: | 181 | VGSLLKIKPILHFEDGSIVPLEKVRTEKKAWARVKELFAEEASSASSVKATVIHANRLDG | 240 |
| Query: | 239 | ANNFREKL-AVLGAPISVLETGSIIQTHTGEDAFAV | 273 |
| | | A +++ +S+ G +I TH GE + + | |
| Sbjct: | 241 | AEKLADEIRSQFSHVDVSISHFGPVIGTHLGEGSIGL | 277 |

[0850] A related DNA sequence was identified in S. pyogenes <SEQ ID 301> which encodes the amino acid sequence <SEQ ID 302>. Analysis of this protein sequence reveals the following:

| Possible site: 37 | | | | |
|---|---|---|---|---|
| >>> Seems to have no N-terminal signal sequence | | | | |
| | INTEGRAL | Likelihood = −1.54 | Transmembrane | 180-196 (180-196) |
| | INTEGRAL | Likelihood = −0.16 | Transmembrane | 21-37 (21-38) |

```
----- Final Results -----
                              bacterial membrane --- Certainty = 0.1617(Affirmative) < succ>
                                bacterial outside --- Certainty = 0.0000(Not Clear) < succ>
                            bacterial cytoplasm --- Certainty = 0.0000(Not Clear) < succ>
```

[0851] An alignment of the GAS and GBS proteins is shown below:

| Identities = 197/279 (70%), Positives = 226/279 (80%), Gaps = 1/279 (0%) | | | |
|---|---|---|---|
| Query: | 1 | MSKIKIVTDSSITIEPELIKELDITVVPLSVMIDGTLYSDNDLKAQGEFLNLMRGSKELP | 60 |
| | | M IKIVTDSSITIEPELIK LDITVVPLSVMID LYSDNDLK +G FL+LM+ SK LP | |
| Sbjct: | 5 | MGTIKIVTDSSITIEPELIKALDITVVPLSVMIDSKLYSDNDLKEEGHFLSLMKASKSLP | 64 |
| Query: | 61 | KTSQPPVGVFAEIYEKLMNEGVEHIIAIHLTHTLSGTIEASRQGANIAGADVTVIDSTFT | 120 |
| | | KTSQPPVG+FAE YE L+ +GV I+AIHL+ LSGTIEASRQGA IA A VTV+DS FT | |
| Sbjct: | 65 | KTSQPPVGLFAETYENLVKKGVTDIVAIHLSPALSGTIEASRQGAEIAEAPVTVLDSGFT | 124 |
| Query: | 121 | DQCQKFQVVEAAKLAKEGADLDTILARVEEVRQKSELFIGVSTLENLVKGGRIGRVTGLL | 180 |
| | | DQ KFQVVEAAK+AK GA L+ ILA V+ ++ K+EL+IGVSTLENLVKGGRIGRVTG+L | |
| Sbjct: | 125 | DQAMKFQVVEAAKMAKAGASLNEILAAVQAIKSKTELYIGVSTLENLVKGGRIGRVTGVL | 184 |
| Query: | 181 | SSLLNIKVIMELTNHELVPIVKGRGLKTFSKWLDNFVESAQTRKIAEIGISYCGKADMAN | 240 |
| | | SSLLN+KV+M L N EL +VKGRG KTF+KWLD+++ R IAEI ISY G+A +A | |
| Sbjct: | 185 | SSLLNVKVVMALKNDELKTLVKGRGNKTFTKWLDSYLAKNSHRPIAEIAISYAGEASLAL | 244 |
| Query: | 241 | NFREKLAV-LGAPISVLETGSIIQTHTGEDAFAVMVRYE | 278 |
| | | +E++A ISVLETGSIIQTHTGE AFAVMVRYE | |
| Sbjct: | 245 | TLKERIAAYYNHSISVLETGSIIQTHTGEGAFAVMVRYE | 283 |

[0852] SEQ ID 300 (GBS113) was expressed in E. coli as a His-fusion product. Purified protein is shown in FIG. 201, lane 8.

[0853] Based on this analysis, it was predicted that these proteins and their epitopes could be useful antigens for vaccines or diagnostics.

### EXAMPLE 90

[0854] A DNA sequence (GBSx0092) was identified in S. agalactiae <SEQ ID 307> which encodes the amino acid sequence <SEQ ID 308>. Analysis of this protein sequence reveals the following:

```
Possible site: 28
>>> Seems to have a cleavable N-term signal seq.
----- Final Results -----
                                bacterial outside --- Certainty = 0.3000(Affirmative) < succ>
                              bacterial membrane --- Certainty = 0.0000(Not Clear) < succ>
                            bacterial cytoplasm --- Certainty = 0.0000(Not Clear) < succ>
```

[0855] The protein has homology with the following sequences in the GENPEPT database:

| >GP: CAA72097 GB: Y11213 hypothetical protein [Streptococcus thermophilus] | | | |
|---|---|---|---|
| Identities = 75/185 (40%), Positives = 116/185 (62%), Gaps = 3/185 (1%) | | | |
| Query: | 13 | WKWAFLLLLAINLSFTAVIASRLIQVREPNTGKISTGVQDKVKVGTFTTNKSQLNKTIAL | 72 |
| | | WKW FL LLA+NL+ +V+ R++ E + + G K+G ++ +K +L++++ | |
| Sbjct: | 5 | WKWLFLGLLALNLALISVVTVRIMTPVETSPVSLPKGA---TKIGKYSMSKEELDESLRG | 61 |
| Query: | 73 | YLKQYQTKKMNYKIYAASSSILFEGSYQLLGYEVPLYIYFEPYRLTNGAVQLKVTSFSVG | 132 |
| | | + + Y T KM +K+ +S I+FE SY++LG+ VPLY+YF P +GAV L+ + S G | |
| Sbjct: | 62 | FAQDYSTDKMRFKVKVTNSKIVFESSYKVLGHAVPLYVYFTPLVSESGAVVLQESELSAG | 121 |
| Query: | 133 | TLPLPEKDVLQYIKSSYKLPNFVDIKPKKSVININLQDLKNKEGIYLKATAIDLVNDNFS | 192 |
| | | TL LP D L IK S KLP+++ I KK + +N+Q +KN +GI +A + DLVND | |
| Sbjct: | 122 | TLKLPILDALNMIKRSTKLPDYIVIDSKKGKVILNIQSMKNDKGITARAQSFDLVNDRSE | 181 |
| Query: | 193 | FDIFK | 197 |
| | | FDI+K | |
| Sbjct: | 182 | FDIYK | 186 |

[0856] A related DNA sequence was identified in S. pyogenes <SEQ ID 309> which encodes the amino acid sequence <SEQ ID 310>. Analysis of this protein sequence reveals the following:

```
Possible site: 29
>>> Seems to have a cleavable N-term signal seq.
----- Final Results -----
                                bacterial outside --- Certainty = 0.3000(Affirmative) < succ>
                              bacterial membrane --- Certainty = 0.0000(Not Clear) < succ>
                            bacterial cytoplasm --- Certainty = 0.0000(Not Clear) < succ>
```

[0857] The protein has homology with the following sequences in the databases:

| >GP: CAA72097 GB: Y11213 hypothetical protein [Streptococcus thermophilus] | | | |
|---|---|---|---|
| Identities = 73/185 (39%), Positives = 112/185 (60%), Gaps = 3/185 (1%) | | | |
| Query: | 10 | WKWSFLCLLAFNTAFLMVIASRLIQVREPESELIAKKPVKNIKIGTFVTTREQLNETVAS | 69 |
| | | WKW FL LLA N A + V+ R++ E + K K IG + ++E+L+E++ | |
| Sbjct: | 5 | WKWLFLGLLALNLALISVVTVRIMTPVETSPVSLPKGATK---IGKYSMSKEELDESLRG | 61 |
| Query: | 70 | YLKDYQTEKMSYKFYATSSSILFEGTYQLLGYEVPLYIYFQPHRLENGAVQLQVISFSVG | 129 |
| | | + +DY T+KM +K T+S I+FE +Y++LG+ VPLY+YF P E+GAV LQ S G | |
| Sbjct: | 62 | FAQDYSTDKMRFKVKVTNSKIVFESSYKVLGHAVPLYVYFTPLVSESGAVVLQESELSAG | 121 |
| Query: | 130 | TLPLPEKDVLQYLKSSYKLPSFVKVMPNQSAIVVNLQDIQNDAKVYLKAKKIDLFNDEIS | 189 |
| | | TL LP D L +K S KLP ++ + + +++N+Q ++ND + +A+ DL ND | |
| Sbjct: | 122 | TLKLPILDALNMIKRSTKLPDYIVIDSKKGKVILNIQSMKNDKGITARAQSFDLVNDRSE | 181 |
| Query: | 190 | FNIYK | 194 |
| | | F+IYK | |
| Sbjct: | 182 | FDIYK | 186 |

[0858] An alignment of the GAS and GBS proteins is shown below:

| Identities = 129/194 (66%), Positives = 155/194 (79%) | | | |
|---|---|---|---|
| Query: | 5 | KTGRNLNFWKWAFLLLLAINLSFTAVIASRLIQVREPNTGKISTGVQDKVKVGTFTTNKS | 64 |
| | | K NLN+WKW+FL LLA N +F VIASRLIQVREP + I+ +K+GTF T + | |
| Sbjct: | 2 | KKKSNLNWWKWSFLCLLAFNTAFLMVIASRLIQVREPESELIAKKPVKNIKIGTFVTTRE | 61 |
| Query: | 65 | QLNKTIALYLKQYQTKKMNYKIYAASSSILFEGSYQLLGYEVPLYIYFEPYRLTNGAVQL | 124 |
| | | QLN+T+A YLK YQT+KM+YK YA SSSILFEG+YQLLGYEVPLYIYF+P+RL NGAVQL | |
| Sbjct: | 62 | QLNETVASYLKDYQTEKMSYKFYATSSSILFEGTYQLLGYEVPLYIYFQPHRLENGAVQL | 121 |
| Query: | 125 | KVTSFSVGTLPLPEKDVLQYIKSSYKLPNFVDIKPKKSVININLQDLKNKEGIYLKATAI | 184 |
| | | +V SFSVGTLPLPEKDVLQY+KSSYKLP+FV + P +S I +NLQD++N +YLKA I | |
| Sbjct: | 122 | QVISFSVGTLPLPEKDVLQYLKSSYKLPSFVKVMPNQSAIVVNLQDIQNDAKVYLKAKKI | 181 |
| Query: | 185 | DLVNDNFSFDIFKK | 198 |
| | | DL ND SF+I+KK | |
| Sbjct: | 182 | DLFNDEISFNIYKK | 195 |

[0859] Based on this analysis, it was predicted that these proteins and their epitopes could be useful antigens for vaccines or diagnostics.

[0860] A related GBS gene <SEQ ID 8487> and protein <SEQ ID 8488> were also identified. Analysis of this protein sequence reveals the following:

```
Lipop: Possible site: −1 Crend: 7
McG: Discrim Score: 7.47
GvH: Signal Score (−7.5): 2.42
          Possible site: 28
>>> Seems to have a cleavable N-term signal seq.
ALOM program count: 0 value: 5.89 threshold: 0.0
PERIPHERAL Likelihood = 5.89 120
modified ALOM score: −1.68
*** Reasoning Step: 3
----- Final Results -----
                                bacterial outside --- Certainty = 0.3000(Affirmative) < succ>
                              bacterial membrane --- Certainty = 0.0000(Not Clear) < succ>
                            bacterial cytoplasm --- Certainty = 0.0000(Not Clear) < succ>
```

[0861] SEQ ID 308 (GBS20) was expressed in E. coli as a His-fusion product. SDS-PAGE analysis of total cell extract is shown in FIG. 4 (lane 5; MW 25 kDa) and in FIG. 167 (lane 12-14; MW 37 kDa—thioredoxin fusion). It was also expressed in E. coli as a GST-fusion product. SDS-PAGE analysis of total cell extract is shown in FIG. 9 (lane 7; MW 47.6 kDa). Purified Thio-GBS20-His is shown in FIG. 244, lane 12.

### EXAMPLE 91

[0862] A DNA sequence (GBSx0093) was identified in S. agalactiae <SEQ ID 311> which encodes the amino acid sequence <SEQ ID 312>. This protein is predicted to be histone-like DNA-binding protein. Analysis of this protein sequence reveals the following:

```
Possible site: 40
>>> Seems to have no N-terminal signal sequence
----- Final Results -----
                            bacterial cytoplasm --- Certainty = 0.2768(Affirmative) < succ>
                              bacterial membrane --- Certainty = 0.0000(Not Clear) < succ>
                                bacterial outside --- Certainty = 0.0000(Not Clear) < succ>
```

[0863] A related GBS nucleic acid sequence <SEQ ID 9313> which encodes amino acid sequence <SEQ ID 9314> was also identified.

[0864] The protein has homology with the following sequences in the GENPEPT database:

| >GP: AAD40810 GB: L40355 histone-like DNA-binding protein | | | |
|---|---|---|---|
| [Streptococcus mutans] | | | |
| Identities = 43/47 (91%), Positives = 46/47 (97%) | | | |
| Query: | 1 | MANKQDLIAKVAEATELTKKDSAAAVDAVFAAVADYLAEGEKVQLIG | 47 |
| | | MANKQDLIAKVAEATELTKKDSAAAVDAVF+AV+ YLA+GEKVQLIG | |
| Sbjct: | 1 | MANKQDLIAKVAEATELTKKDSAAAVDAVFSAVSSYLAKGEKVQLIG | 47 |

[0865] A related DNA sequence was identified in S. pyogenes <SEQ ID 313> which encodes the amino acid sequence <SEQ ID 314>. Analysis of this protein sequence reveals the following:

```
Possible site: 25
>>> Seems to have no N-terminal signal sequence
----- Final Results -----
                            bacterial cytoplasm --- Certainty = 0.2834(Affirmative) < succ>
                              bacterial membrane --- Certainty = 0.0000(Not Clear) < succ>
                                bacterial outside --- Certainty = 0.0000(Not Clear) < succ>
```

[0866] An alignment of the GAS and GBS proteins is shown below:

| Identities = 41/47 (87%), Positives = 44/47 (93%) | | | |
|---|---|---|---|
| Query: | 1 | MANKQDLIAKVAEATELTKKDSAAAVDAVFAAVADYLAEGEKVQLIG | 47 |
| | | MANKQDLIAKVAEATELTKKDSAAAVDAVF+ + +LAEGEKVQLIG | |
| Sbjct: | 1 | MANKQDLIAKVAEATELTKKDSAAAVDAVFSTIEAFLAEGEKVQLIG | 47 |

[0867] Based on this analysis, it was predicted that these proteins and their epitopes could be useful antigens for vaccines or diagnostics.

### EXAMPLE 92

[0868] A DNA sequence (GBSx0094) was identified in S. agalactiae <SEQ ID 315> which encodes the amino acid sequence <SEQ ID 316>. Analysis of this protein sequence reveals the following:

```
Possible site: 54
>>> Seems to have no N-terminal signal sequence
----- Final Results -----
                            bacterial cytoplasm --- Certainty = 0.2722(Affirmative) < succ>
                              bacterial membrane --- Certainty = 0.0000(Not Clear) < succ>
                                bacterial outside --- Certainty = 0.0000(Not Clear) < succ>
```

[0869] A related GBS nucleic acid sequence <SEQ ID 9293> which encodes amino acid sequence <SEQ ID 9294> was also identified. A further related GBS nucleic acid sequence <SEQ ID 10793> which encodes amino acid sequence <SEQ ID 10794> was also identified.

[0870] The protein has homology with the following sequences in the GENPEPT database:

| >GP: AAD17886 GB: AF100456 hyaluronate-associated protein precursor | | | |
|---|---|---|---|
| [Streptococcus equi] | | | |
| Identities = 303/435 (69%), Positives = 360/435 (82%), Gaps = 1/435 (0%) | | | |
| Query: | 1 | MATKVDVSKDGLTYTATLRKGLKWSDGSKLTAKDFVYSWQRLVDPKTASQYAYLAVEGHV | 60 |
| | | +A KVDVS+DGLTYTATLR GLKWSDGS LTA+DFVYSWQR+VDPKTAS+YAYLA E H+ | |
| Sbjct: | 87 | LAEKVDVSEDGLTYTATLRDGLKWSDGSDLTAEDFVYSWQRMVDPKTASEYAYLATESHL | 146 |
| Query: | 61 | LNADKINEGQEKDLNKLGVKAEGDDKVVITLSSPSPQFIYYLAFTNFMPQKQEVVEKYGK | 120 |
| | | NA+ IN G+ DL+ LGVKA+G+ KV+ TL+ P+PQF L+F+NF+PQK+ V+ GK | |
| Sbjct: | 147 | KNAEDINSGKNPDLDSLGVKADGN-KVIFTLTEPAPQFKSLLSFSNFVPQKESFVKDAGK | 205 |
| Query: | 121 | DYATTSKNTVYSGPYTVEGWNGSNGTFTLKKNKNYWDAKNVKTKEVRIQTVKKPDTAVQM | 180 |
| | | DY TTS+ +YSGPY V+ WNG++GTF L KNKNYWDAKNVKT+ V +QTVKKPDTAVQM | |
| Sbjct: | 206 | DYGTTSEKQIYSGPYIVKDWNGTSGTFKLVKNKNYWDAKNVKTETVNVQTVKKPDTAVQM | 265 |
| Query: | 181 | YKRGELDAANISNTSAIYQANKNNKDVTDVLEATTAYMEYNTTGSVKGLDNVKIRRALNL | 240 |
| | | YK+G+LD ANIS TSAIY ANK +KDV VLEATTAY+ YN TG+++GL+++KIR+ALNL | |
| Sbjct: | 266 | YKQGKLDFANISGTSAIYNANKKHKDVVPVLEATTAYIVYNQTGAIEGLNSLKIRQALNL | 325 |
| Query: | 241 | ATNRKGVVQAAVDTGSKPAIAFAPTGLAKTPDGTDLAKYVAPGYEYNKTEAAKLFKEGLA | 300 |
| | | AT+RKG+V AAVDTGSKPA A PTGLAK DGTDL ++VAPGY+Y+ EAAKLFKEGLA | |
| Sbjct: | 326 | ATDRKGIVSAAVDTGSKPATALVPTGLAKLSDGTDLTEHVAPGYKYDDKEAAKLFKEGLA | 385 |
| Query: | 301 | ESGLTKLKLTITADADAPAAKNSVDYIKSTWEAALPGLTVEEKFVTFKQRLEDSRKQNFD | 360 |
| | | E G L +TITADADAPAAK++VDYIK TWE ALPGLTVEEKFV FKQRLED++ QNF+ | |
| Sbjct: | 386 | ELGKDALTITITADADAPAAKSAVDYIKETWETALPGLTVEEKFVPFKQRLEDTKNQNFE | 445 |
| Query: | 361 | IVVSLWGGDYPEGSTFYGLFKSDSQNNDGKFANKDYDAAYNKAISEDAMKPAESAKDYKE | 420 |
| | | + V LWGGDYP+GSTFYGLFKS S N GKF N DYDAAYNKA++ DA+ +A DYK | |
| Sbjct: | 446 | VAVVLWGGDYPKGSTFYGLFKSGSAYNYGKFTNADYDAAYNKALTTDALNTDAAADDYKA | 505 |
| Query: | 421 | AEKILFEQGAYNPLY | 435 |
| | | AEK L++ YNPLY | |
| Sbjct: | 506 | AEKALYDNALYNPLY | 520 |

[0871] A related GBS gene <SEQ ID 8489> and protein <SEQ ID 8490> were also identified. Analysis of this protein sequence reveals the following:

```
Lipop: Possible site: 21 Crend: 4
              Sequence Pattern: CGSK
SRCFLG: 0
McG: Length of UR: 19
          Peak Value of UR: 2.34
          Net Charge of CR: 3
McG: Discrim Score: 5.94
GvH: Signal Score (−7.5): 0.6
          Possible site: 20
>>> May be a lipoprotein
Amino Acid Composition: calculated from 22
ALOM program count: 0 value: 5.14 threshold: 0.0
      PERIPHERAL Likelihood = 5.14 166
modified ALOM score: −1.53
*** Reasoning Step: 3
----- Final Results -----
                              bacterial membrane --- Certainty = 0.0000(Not Clear) < succ>
                                bacterial outside --- Certainty = 0.0000(Not Clear) < succ>
                            bacterial cytoplasm --- Certainty = 0.0000(Not Clear) < succ>
```

[0872] The protein has homology with the following sequences in the databases:

| >GP\|4336671\|gb\|AAD17886.1\|\|AF100456 hyaluronate-associated protein | | | |
|---|---|---|---|
| precursor {Streptococcus equi} | | | |
| Score = 721 bits (1840), Expect = 0.0 | | | |
| Identities = 354/515 (68%), Positives = 417/515 (80%), Gaps = 2/515 (0%) | | | |
| Query: | 1 | KNWRRVGVGVLTLASVATLAACGSK-SASQDSNGAINWAIPTEINTLDLSKVTDTYSNLA | 59 |
| | | K +R+G+ +TLASVA L ACG+K SAS D INW PTEI TLD+SK TDTYS LA | |
| Sbjct: | 7 | KACKRLGLAAVTLASVAALMACGNKQSASTDKKSEINWYTPTEIITLDISKNTDTYSALA | 66 |
| Query: | 60 | IGNSSSNFLRLDKDGKTRPDLATKVDVSKDGLTYTATLRKGLKWSDGSKLTAKDFVYSWQ | 119 |
| | | IGNS SN LR D GK +PDLA KVDVS+DGLTYTATLR GLKWSDGS LTA+DFVYSWQ | |
| Sbjct: | 67 | IGNSGSNLLRADAKGKLQPDLAEKVDVSEDGLTYTATLRDGLKWSDGSDLTAEDFVYSWQ | 126 |
| Query: | 120 | RLVDPKTASQYAYLAVEGHVLNADKINEGQEKDLNKLGVKAEGDDKVVITLSSPSPQFIY | 179 |
| | | R+VDPKTAS+YAYLA E H+ NA+ IN G+ DL+ LGVKA+G+ KV+ TL+ P+PQF | |
| Sbjct: | 127 | RMVDPKTASEYAYLATESHLKNAEDINSGKNPDLDSLGVKADGN-KVIFTLTEPAPQFKS | 185 |
| Query: | 180 | YLAFTNFMPQKQEVVEKYGKDYATTSKNTVYSGPYTVEGWNGSNGTFTLKKNKNYWDAKN | 239 |
| | | L+F+NF+PQK+ V+ GKDY TTS+ +YSGPY V+ WNG++GTF L KNKNYWDAKN | |
| Sbjct: | 186 | LLSFSNFVPQKESFVKDAGKDYGTTSEKQIYSGPYIVKDWNGTSGTFKLVKNKNYWDAKN | 245 |
| Query: | 240 | VKTKEVRIQTVKKPDTAVQMYKRGELDAANISNTSAIYQANKNNKDVTDVLEATTAYMEY | 299 |
| | | VKT+ V +QTVKKPDTAVQMYK+G+LD ANIS TSAIY ANK +KDV VLEATTAY+ Y | |
| Sbjct: | 246 | VKTETVNVQTVKKPDTAVQMYKQGKLDFANISGTSAIYNANKKHKDVVPVLEATTAYIVY | 305 |
| Query: | 300 | NTTGSVKGLDNVKIRRALNLATNRKGVVQAAVDTGSKPAIAFAPTGLAKTPDGTDLAKYV | 359 |
| | | N TG+++GL+++KIR+ALNLAT+RKG+V AAVDTGSKPA A PTGLAK DGTDL ++V | |
| Sbjct: | 306 | NQTGAIEGLNSLKIRQALNLATDRKGIVSAAVDTGSKPATALVPTGLAKLSDGTDLTEHV | 365 |
| Query: | 360 | APGYEYNKTEAAKLFKEGLAESGLTKLKLTITADADAPAAKNSVDYIKSTWEAALPGLTV | 419 |
| | | APGY+Y+ EAAKLFKEGLAE G L +TITADADAPAAK++VDYIK TWE ALPGLTV | |
| Sbjct: | 366 | APGYKYDDKEAAKLFKEGLAELGKDALTITITADADAPAAKSAVDYIKETWETALPGLTV | 425 |
| Query: | 420 | EEKFVTFKQRLEDSRKQNFDIVVSLWGGDYPEGSTFYGLFKSDSQNNDGKFANKDYDAAY | 479 |
| | | EEKFV FKQRLED++ QNF++ V LWGGDYP+GSTFYGLFKS S N GKF N DYDAAY | |
| Sbjct: | 426 | EEKFVPFKQRLEDTKNQNFEVAVVLWGGDYPKGSTFYGLFKSGSAYNYGKFTNADYDAAY | 485 |
| Query: | 480 | NKAISEDAMKPAESAKDYKEAEKILFEQGAYNPLY | 514 |
| | | NKA++ DA+ +A DYK AEK L++ YNPLY | |
| Sbjct: | 486 | NKALTTDALNTDAAADDYKAAEKALYDNALYNPLY | 520 |

[0873] A related DNA sequence was identified in S. pyogenes <SEQ ID 317> which encodes the amino acid sequence <SEQ ID 318>. Analysis of this protein sequence reveals the following:

```
Possible site: 24
>>> May be a lipoprotein
----- Final Results -----
                              bacterial membrane --- Certainty = 0.0000(Not Clear) < succ>
                                bacterial outside --- Certainty = 0.0000(Not Clear) < succ>
                            bacterial cytoplasm --- Certainty = 0.0000(Not Clear) < succ>
```

[0874] An alignment of the GAS and GBS proteins is shown below:

| Identities = 114/428 (26%), Positives = 185/428 (42%), Gaps = 63/428 (14%) | | | |
|---|---|---|---|
| Query: | 7 | VSKDGLTYTATLRKGLKW--SDGSK---LTAKDFVYSWQRLVDPKTASQYAYLAVEGHVL | 61 |
| | | VSKDGLTYT TLR G+ W +DG + +TA+DFV + VD K+ + Y VE + | |
| Sbjct: | 92 | VSKDGLTYTYTLRDGVSWYTADGEEYAPVTAEDFVTGLKHAVDDKSDALY---VVEDSIK | 148 |
| Query: | 62 | NADKINEGQEKDLNKLGVKAEGDDKVVITLSSPSPQFIYYLAFTNFMPQKQEVVEKYGKD | 121 |
| | | N G E D ++GVKA D V TL+ P + ++ P + ++ GKD | |
| Sbjct: | 149 | NLKAYQNG-EVDFKEVGVKALDDKTVQYTLNKPESYWNSKTTYSVLFPVNAKFLKSKGKD | 207 |
| Query: | 122 | YATTSKNTV-YSGPYTVEGWNGSNGTFTLKKNKNYWDAKNVKTKEVRI--QTVKKPDTAV | 178 |
| | | + TT +++ +G Y + + S + KN+NYWDAKNV + V++ P + | |
| Sbjct: | 208 | FGTTDPSSILVNGAYFLSAFT-SKSSMEFHKNENYWDAKNVGIESVKLTYSDGSDPGSFY | 266 |
| Query: | 179 | QMYKRGELDAANISNTSAIYQANKNN--KDVT-DVLEATTAYMEYNTT------------ | 223 |
| | | + + +GE A + Y++ K N ++T +L ++ +N | |
| Sbjct: | 267 | KNFDKGEFSVARLYPNDPTYKSAKKNYADNITYGMLTGDIRHLTWNLNRTSFKNTKKDPA | 326 |
| Query: | 224 | ---GSVKGLDNVKIRRALNLATNRKGVVQAAVDTGSKPA----IAFAPT--GLAKTPDGT | 274 |
| | | K L+N R+A+ A +R +K + PT + ++ G+ | |
| Sbjct: | 327 | QQDAGKKALNNKDFRQAIQFAFDRASFQAQTAGQDAKTKALRNMLVPPTFVTIGESDFGS | 386 |
| Query: | 275 | DLAKYVAP-GYE-------------YNKTEAAKLF---KEGLAESGLT-KLKLTITADAD | 316 |
| | | ++ K +A G E YN +A F KE L G+T ++L D | |
| Sbjct: | 387 | EVEKEMAKLGDEWKDVNLADAQDGFYNPEKAKAEFAKAKEALTAEGVTFPVQLDYPVDQA | 446 |
| Query: | 317 | APAAKNSVDYIKSTWEAALPGLTV-----EEKFVTFKQR---LEDSRKQNFDIVVSLWGG | 368 |
| | | A K + EA+L V E + T + + E +Q++DI+ S WG | |
| Sbjct: | 447 | NAATVQEAQSFKQSVEASLGKENVIVNVLETETSTHEAQGFYAETPEQQDYDIISSWWGP | 506 |
| Query: | 369 | DYPEGSTF | 376 |
| | | DY + T+ | |
| Sbjct: | 507 | DYQDPRTY | 514 |

[0875] SEQ ID 9294 (GBS663) was expressed in E. coli as a GST-fusion product. SDS-PAGE analysis of total cell extract is shown in FIG. 137 (lane 3; MW 89.5 kDa). It was also expressed in E. coli as a His-fusion product. SDS-PAGE analysis of total cell extract is shown in FIG. 137 (lane 5-7; MW 64.5 kDa), in FIG. 179 (lane 11; MW 65 kDa) and in FIG. 65 (lane 2; MW 61 kDa). Purified GBS663-His is shown in FIG. 231, lane 34. Purified GBS324-His is shown in lane 6 of FIG. 210.

[0876] Based on this analysis, it was predicted that these proteins and their epitopes could be useful antigens for vaccines or diagnostics.

### EXAMPLE 93

[0877] A DNA sequence (GBSx0095) was identified in S. agalactiae <SEQ ID 319> which encodes the amino acid sequence <SEQ ID 320>. This protein is predicted to be transmembrane protein OppB (oppB). Analysis of this protein sequence reveals the following:

| Possible site: 37 | | | | |
|---|---|---|---|---|
| >>> Seems to have no N-terminal signal sequence | | | | |
| | INTEGRAL | Likelihood = −10.77 | Transmembrane | 293-309 (281-313) |
| | INTEGRAL | Likelihood = −9.77 | Transmembrane | 21-37 (14-46) |
| | INTEGRAL | Likelihood = −6.32 | Transmembrane | 115-131 (105-132) |
| | INTEGRAL | Likelihood = −4.88 | Transmembrane | 144-160 (140-166) |
| | INTEGRAL | Likelihood = −3.03 | Transmembrane | 238-254 (237-255) |

```
----- Final Results -----
                              bacterial membrane --- Certainty = 0.5310(Affirmative) < succ>
                                bacterial outside --- Certainty = 0.0000(Not Clear) < succ>
                            bacterial cytoplasm --- Certainty = 0.0000(Not Clear) < succ>
```

[0878] A related GBS nucleic acid sequence <SEQ ID 8491> which encodes amino acid sequence <SEQ ID 8492> was also identified.

[0879] The protein has homology with the following sequences in the GENPEPT database:

| >GP: AAF73091 GB: AF103793 transmembrane protein | | | |
|---|---|---|---|
| OppB [Listeria monocytogenes] | | | |
| Identities = 147/304 (48%), Positives = 221/304 (72%), Gaps = 1/304 (0%) | | | |
| Query: | 13 | MIKYILKRVAILLVTLWVVITLSFFLMQILPGTPYNNP-KLTEEMIALLNKQYGLDKPVW | 71 |
| | | M+KY LKRV +L+TL+++ +++F LM+ LPGTPY N KL++E I + N++YGL+ + | |
| Sbjct: | 1 | MVKYTLKRVLYMLITLFIIASVTFVLMKFLPGTPYRNQEKLSDEQIHMTNEKYGLNDSIP | 60 |
| Query: | 72 | QQYLTYLWNVLHGDFGTSYQSVNQPVSRMISLRLGVSVHLGVQALVFGVLGGILVGAISA | 131 |
| | | QY Y+ ++ GD G S+Q N+PVS ++S +G SV L ++A+ FGV+ GIL+G I+A | |
| Sbjct: | 61 | VQYFNYMTGLVKGDLGVSFQLDNRPVSEILSALIGPSVQLALEAMAFGVIFGILLGVIAA | 120 |
| Query: | 132 | RHKNDKVDGILSVIATLGISMPSFIIGILLLDYFGFKWNLLPLSGWGTFSQTILPSLALG | 191 |
| | | ++N D + IA LG S+PSF+ +L + G K + P++GWGTF+ TILP+ AL | |
| Sbjct: | 121 | MYQNRWPDYTSTFIAILGKSVPSFVFATVLQYWLGAKLQIFPVAGWGTFADTILPAFALA | 180 |
| Query: | 192 | LPTLASVSRFFRSEMIETLNSDYVQLARSKGMTIRQVTRKHAYRNSMIPILTLIGPLAAG | 251 |
| | | + LA+ +RF R+E+I+ SDYV LA++KG + +V KHA RN++IP++T++GPL+ | |
| Sbjct: | 181 | MFPLATAARFMRTELIDVFASDYVLLAKAKGNSRTEVAVKHAIRNALIPLITVLGPLSVA | 240 |
| Query: | 252 | LLTGSALIEQIFSIPGIGQQFVTSIPTKDYPVIMGTTIVYAVMLMVAILITDVVISIVDP | 311 |
| | | L+TGS +IE I+SIPGIG QFV+SI T DYPVIMGTTI++AVML+ IL+ D++ ++DP | |
| Sbjct: | 241 | LMTGSLVIENIYSIPGIGSQFVSSIQTNDYPVIMGTTILFAVMLVFVILVVDILYGLIDP | 300 |
| Query: | 312 | RVRL | 315 |
| | | R+R+ | |
| Sbjct: | 301 | RIRV | 304 |

[0880] There is also homology to SEQ ID 64.

[0881] A related DNA sequence was identified in S. pyogenes <SEQ ID 9069> which encodes amino acid sequence <SEQ ID 9070>. Analysis of this protein sequence reveals the following:

| Possible site: 25 | | | | |
|---|---|---|---|---|
| >>> Seems to have an uncleavable N-term signal seq | | | | |
| | INTEGRAL | Likelihood = −8.81 | Transmembrane | 466-482 (463-493) |
| | INTEGRAL | Likelihood = −5.10 | Transmembrane | 419-435 (418-440) |
| | INTEGRAL | Likelihood = −4.78 | Transmembrane | 328-344 (322-348) |
| | INTEGRAL | Likelihood = −4.41 | Transmembrane | 366-382 (365-384) |
| | INTEGRAL | Likelihood = −4.09 | Transmembrane | 290-306 (287-311) |
| | INTEGRAL | Likelihood = −2.97 | Transmembrane | 17-33 (13-36) |

```
----- Final Results -----
                              bacterial membrane --- Certainty = 0.4524(Affirmative) < succ>
                                bacterial outside --- Certainty = 0.0000(Not Clear) < succ>
                            bacterial cytoplasm --- Certainty = 0.0000(Not Clear) < succ>
```

[0882] An alignment of the GAS and GBS sequences follows:

| Score = 117 bits (291), Expect = 3e−28 | | | |
|---|---|---|---|
| Identities = 61/208 (29%), Positives = 121/208 (57%), Gaps = 4/208 (1%) | | | |
| Query: | 291 | IGFFGVMFSYIVGLPLGLFMARFKNTYFDSFSTATMTFMLALPSIAV-IYVVRFLGGMVG | 349 |
| | | +G ++F + G+ +G AR KN D + T +++PS + I ++ + G | |
| Sbjct: | 99 | LGVQALVFGVLGGILVGAISARHKNDKVDGILSVIATLGISMPSFIIGILLLDYFGFKWN | 158 |
| Query: | 350 | LPDSFPMLGASDPKSYILPALILGILNIPTTVIWFRRYLVDLQASDWVRFARSKGLSESE | 409 |
| | | L P+ G ILP+L LG+ + + +FR +++ SD+V+ ARSKG++ + | |
| Sbjct: | 159 | L---LPLSGWGTFSQTILPSLALGLPTLASVSRFFRSEMIETLNSDYVQLARSKGMTIRQ | 215 |
| Query: | 410 | IYRGHLFKNAMVPIVSGVPASIILAIGGATLTETVFAFPGMGKMLIDSIKSANNSMIVGL | 469 |
| | | + R H ++N+M+PI++ + + G+ L E +F+ PG+G+ + SI + + +I+G | |
| Sbjct: | 216 | VTRKHAYRNSMIPILTLIGPLAAGLLTGSALIEQIFSIPGIGQQFVTSIPTKDYPVIMGT | 275 |
| Query: | 470 | TFIFTVLSIVSLLLGDIVMTLVDPRIKL | 497 |
| | | T ++ V+ +V++L+ D+V+++VDPR++L | |
| Sbjct: | 276 | TIVYAVMLMVAILITDVVISIVDPRVRL | 303 |

[0883] Based on this analysis, it was predicted that these proteins and their epitopes could be useful antigens for vaccines or diagnostics.

### EXAMPLE 94

[0884] A DNA sequence (GBSx0096) was identified in S. agalactiae <SEQ ID 321> which encodes the amino acid sequence <SEQ ID 322>. This protein is predicted to be transmembrane protein OppC (oppC). Analysis of this protein sequence reveals the following:

| Possible site: 59 | | | | |
|---|---|---|---|---|
| >>> Seems to have no N-terminal signal sequence | | | | |
| | INTEGRAL | Likelihood = −11.52 | Transmembrane | 311-327 (307-333) |
| | INTEGRAL | Likelihood = −7.80 | Transmembrane | 42-58 (40-65) |
| | INTEGRAL | Likelihood = −7.43 | Transmembrane | 142-158 (131-165) |
| | INTEGRAL | Likelihood = −4.73 | Transmembrane | 182-198 (179-214) |
| | INTEGRAL | Likelihood = −3.50 | Transmembrane | 257-273 (257-276) |

```
----- Final Results -----
                              bacterial membrane --- Certainty = 0.5607(Affirmative) < succ>
                                bacterial outside --- Certainty = 0.0000(Not Clear) < succ>
                            bacterial cytoplasm --- Certainty = 0.0000(Not Clear) < succ>
```

[0885] The protein has homology with the following sequences in the GENPEPT database:

| >GP: AAF73092 GB: AF103793 transmembrane protein OppC | | | |
|---|---|---|---|
| [Listeria monocytogenes] | | | |
| Identities = 157/325 (48%), Positives = 219/325 (67%), | | | |
| Gaps = 4/325 (1%) | | | |
| Query: | 20 | EKIEKPALSFMQDAWRRLKKNKLAVVSLYLLALLLTFSLASNLFVTQKDANGFDSKKVTT | 79 |
| | | EKI +P+L+F+QD+W R++KNK A+VSL +LAL++ ++ ++++T | |
| Sbjct: | 22 | EKINRPSLTFLQDSWLRIRKNKAALVSLIVLALVIIMAIVGPYLSQNLGPEHNINRQITE | 81 |
| Query: | 80 | YRNLPPKLSS--NLPFWNGSIKYAGNTESTDAYKSQNVPEKVKYALGTDSLGRSVAKRII | 137 |
| | | +LPPK+ N+PFWNG G E D YK N+ E Y LG+D+LGR RI | |
| Sbjct: | 82 | NASLPPEVQGFENMPFWNGHQSIGG--EDVDIYKQNNIKEGTYYWLGSDTLGRDQFARIW | 139 |
| Query: | 138 | VGIRISLLVAIAATFIDLIIGVTYGLVSGFAGGRLDTLMQRIVEVISSIPNLVIVTMLGL | 197 |
| | | G R+SL++A+ A DL+IGV YGL+SG+ GGR+D MQR++EVI +IPNLV+V ++ L | |
| Sbjct: | 140 | AGTRVSLIIAVVAALCDLVIGVAYGLISGYVGGRVDNFMQRVLEVIGAIPNLVVVILMML | 199 |
| Query: | 198 | VLGNGITAIIISIAFTGWTSMSRQVRNLTLSYREREFVLAARSLGESPIKIAFKHILPNI | 257 |
| | | +L GI +III+IA T W +M+R VR L + +EFV+A+ +LGES KI KH++PNI | |
| Sbjct: | 200 | ILEPGIVSIIIAIAMTSWITMARVVRGQVLKRKNQEFVMASMTLGESTPKILIKHLIPNI | 259 |
| Query: | 258 | SGIIIVQIMMTIPSAIMYEAVLSAINLGVKPPTASLGSLISDAQENLQYYPYQVILPALA | 317 |
| | | SGIII+ IM +IPSAI +EA LS I LG+ P ASLG L++D + LQ PY ++ P + | |
| Sbjct: | 260 | SGIIIINIMFSIPSAIFFEAFLSFIGLGLPAPAASLGVLVNDGYKTLQVLPYMILYPCIV | 319 |
| Query: | 318 | LVMISLAFILLGDGLRDAFDPKSSD | 342 |
| | | L +I +AF L+ DGLRDAFDPK D | |
| Sbjct: | 320 | LCIIMIAFNLIADGLRDAFDPKMRD | 344 |

[0886] A related DNA sequence was identified in S. pyogenes <SEQ ID 323> which encodes the amino acid sequence <SEQ ID 324>. Analysis of this protein sequence reveals the following:

| Possible site: 59 | | | | |
|---|---|---|---|---|
| >>> Seems to have no N-terminal signal sequence | | | | |
| | INTEGRAL | Likelihood = −10.30 | Transmembrane | 43-59 (37-65) |
| | INTEGRAL | Likelihood = −8.49 | Transmembrane | 111-127 (109-135) |
| | INTEGRAL | Likelihood = −6.26 | Transmembrane | 279-295 (270-298) |
| | INTEGRAL | Likelihood = −3.88 | Transmembrane | 172-188 (172-188) |
| | INTEGRAL | Likelihood = −3.61 | Transmembrane | 145-161 (145-165) |
| | INTEGRAL | Likelihood = −1.49 | Transmembrane | 223-239 (223-239) |

```
----- Final Results -----
                              bacterial membrane --- Certainty = 0.5118(Affirmative) < succ>
                                bacterial outside --- Certainty = 0.0000(Not Clear) < succ>
                            bacterial cytoplasm --- Certainty = 0.0000(Not Clear) < succ>
```

[0887] An alignment of the GAS and GBS proteins is shown below:

| Identities = 91/325 (28%), Positives = 156/325 (48%), | | | |
|---|---|---|---|
| Gaps = 34/325 (10%) | | | |
| Query: | 16 | SSTQEKIEKPALSFMQDAWRRLKKNKLAVVSLYLLALLLTFSLASNLFVTQKDANGFDSK | 75 |
| | | S E I+ PA S+ + +R+ K V L +L +L S +F +D | |
| Sbjct: | 16 | SEASEVIDTPAYSYWKSVFRQFFSKKSTVFMLVILVTVLMMSFIYPMFAN------YDFN | 69 |
| Query: | 76 | KVTTYRNLPPKLSSNLPFWNGSIKYAGNTESTDAYKSQNVPEKVKYALGTDSLGRSVAKR | 135 |
| | | V+ + + + + +Y GTD G+S+ | |
| Sbjct: | 70 | DVSNIND---------------------------FSKRYIWPNAEYWFGTDKNGQSLFDG | 102 |
| Query: | 136 | IIVGIRISLLVAIAATFIDLIIGVTYGLVSGFAGGRLDTLMQRIVEVISSIPNLVIVTML | 195 |
| | | + G R S+L+++ AT I++ IGV G + G + D +M I +IS+IP+++I+ +L | |
| Sbjct: | 103 | VWYGARNSILISVIATLINITIGVVLGAIWGVSKA-FDKVMIEIYNIISNIPSMLIIIVL | 161 |
| Query: | 196 | GLVLGNGITAIIISIAFTGWTSMSRQVRNLTLSYREREFVLAARSLGESPIKIAFKHILP | 255 |
| | | LG G +I++ TGW ++ +R L YR+ E+ LA+++LG KIA K++LP | |
| Sbjct: | 162 | TYSLGAGFWNLILAFCITGWIGVAYSIRVQILRYRDLEYNLASQTLGTPMYKIAVKNLLP | 221 |
| Query: | 256 | NISGIIIVQIMMTIPSAIMYEAVLSAINLGVKPPTASLGSLISDAQENLQYYPYQVILPA | 315 |
| | | + +I+ + +P + EA LS +G+ T SLG I++ NL Y +P | |
| Sbjct: | 222 | QLVSVIMTMLSQMLPVYVSSEAFLSFFGIGLPTTTPSLGRFIANYSSNLTTNAYLFWIPL | 281 |
| Query: | 316 | LALVMISLAFILLGDGLRDAFDPKS | 340 |
| | | + L+++SL ++G L DA DP+S | |
| Sbjct: | 282 | VTLILVSLPLYIVGQNLADASDPRS | 306 |

[0888] Based on this analysis, it was predicted that these proteins and their epitopes could be useful antigens for vaccines or diagnostics.

### EXAMPLE 95

[0889] A DNA sequence (GBSx0097) was identified in S. agalactiae <SEQ ID 325> which encodes the amino acid sequence <SEQ ID 326>. This protein is predicted to be ATPase OppD (oppD). Analysis of this protein sequence reveals the following:

| Possible site: 20 | | | | |
|---|---|---|---|---|
| >>> Seems to have no N-terminal signal sequence | | | | |
| | INTEGRAL | Likelihood = −0.85 | Transmembrane | 164-180 (163-180) |

```
----- Final Results -----
                              bacterial membrane --- Certainty = 0.1341(Affirmative) < succ>
                                bacterial outside --- Certainty = 0.0000(Not Clear) < succ>
                            bacterial cytoplasm --- Certainty = 0.0000(Not Clear) < succ>
```

[0890] The protein has homology with the following sequences in the GENPEPT database:

| >GP: AAF73093 GB: AF103793 ATPase OppD [Listeria monocytogenes] | | | |
|---|---|---|---|
| Identities = 230/342 (67%), Positives = 283/342 (82%), Gaps = 2/342 (0%) | | | |
| Query: | 4 | ETILSVNNLHVDFHTYAGEVKAIRDVNFELKKGETLAIVGESGSGKSVTTRTLIGLNAK- | 62 |
| | | E +L V +L++ FHTYAGEVKAIR VNF+L KGETLAIVGESGSGKSVTT++++ L + | |
| Sbjct: | 2 | EKLLEVKDLNISFHTYAGEVKAIRGVNFDLYKGETLAIVGESGSGKSVTTKSIMRLLPEG | 61 |
| Query: | 63 | NSEI-SGNVQFKGRNLVELSEEEWTKVRGNEISMIFQDPMTSLDPTMKIGMQIAEPMMIH | 121 |
| | | NSEI SG + F G ++ + E++ K+RG +I+MIFQDPMTSL+PTM IG QI+EP++ H | |
| Sbjct: | 62 | NSEIKSGQILFNGMDIAKAHEKQMQKIRGKDIAMIFQDPMTSLNPTMTIGKQISEPLIKH | 121 |
| Query: | 122 | QKISKKDALKLALELMKDVGIPNAEEHINDYPHQWSGGMRQRAVIAIALAADPEILIADE | 181 |
| | | QKISK +A K AL L++ VGI NAEE I YPHQ+SGGMRQR VIAI+LA +P+ILIADE | |
| Sbjct: | 122 | QKISKHEAHKTALRLLQLVGIANAEERIKQYPHQFSGGMRQRVVIAISLACNPQILIADE | 181 |
| Query: | 182 | PTTALDVTIQAQILNLMKKIQAERDSSIVFITHDLGVVAGMADRVAVMYAGKIVEFGTVD | 241 |
| | | PTTALDVTIQAQIL+LMK +Q + D+SI+FITHDLGVVA +ADRVAVMY GKIVE GTVD | |
| Sbjct: | 182 | PTTALDVTIQAQILDLMKDLQKKIDTSIIFITHDLGVVANVADRVAVMYGGKIVEIGTVD | 241 |
| Query: | 242 | EVFYNPQHPYTWGLLNSMPTTDTESGSLESIPGTPPDLLNPPKGDAFAARNEFALDIDHE | 301 |
| | | E+FYNPQHPYTWGL++SMPT DT+ L IPGTPPDLL+PPKGDAFAARN++A+ ID E | |
| Sbjct: | 242 | EIFYNPQHPYTWGLISSMPTLDTDDEELFVIPGTPPDLLHPPKGDAFAARNKYAMQIDLE | 301 |
| Query: | 302 | EEPPYFKVSETHFAATWLLDERSPKVLPPLPIQKRWEKWNEI | 343 |
| | | EEPP FKVS+TH+AATWLL +P+V PP + +R E++ E+ | |
| Sbjct: | 302 | EEPPLFKVSDTHYAATWLLHPDAPEVTPPDAVLRRQEQFAEL | 343 |

[0891] There is also homology to SEQ ID 72.

[0892] SEQ ID 326 (GBS375) was expressed in E. coli as a His-fusion product. SDS-PAGE analysis of total cell extract is shown in FIG. 64 (lane 9; MW 42 kDa). It was also expressed in E. coli as a GST-fusion product. SDS-PAGE analysis of total cell extract is shown in FIG. 71 (lane 3; MW 67 kDa).

[0893] GBS375-GST was purified as shown in FIG. 215, lane 10.

[0894] Based on this analysis, it was predicted that this protein and its epitopes, could be useful antigens for vaccines or diagnostics.

### EXAMPLE 96

[0895] A DNA sequence (GBSx0098) was identified in S. agalactiae <SEQ ID 327> which encodes the amino acid sequence <SEQ ID 328>. Analysis of this protein sequence reveals the following:

Possible site: 28
>>> Seems to have no N-terminal signal sequence
----- Final Results -----
bacterial cytoplasm --- Certainty = 0.3060 (Affirmative) < succ>
bacterial membrane --- Certainty = 0.0000 (Not Clear) < succ>
bacterial outside --- Certainty = 0.0000 (Not Clear) < succ>

[0896] The protein has homology with the following sequences in the GENPEPT database:

| >GP: AAA62692 GB: M57689 sporulation protein [Bacillus subtilis] | | | |
|---|---|---|---|
| Identities = 195/308 (63%), Positives = 245/308 (79%), Gaps = 4/308 (1%) | | | |
| Query: | 1 | MTENRKKLVEVKNVSLTFNKGKANEVRAIDNVSFDIYEGEVFGLVGESGSGKTTVGRSIL | 60 |
| | | M E +KL+E+K++ F + V+A+D++SFDIY+GE GLVGESG GK+T GRSI+ | |
| Sbjct: | 1 | MNELTEKLLEIKHLKQHFVTPRGT-VKAVDDLSFDIYKGETLGLVGESGCGKSTTGRSII | 59 |
| Query: | 61 | KLYDISDGEITFNGEVISHLKG-KALHSFRKDAQMIFQDPQASLNGRMKIRDIVAEGLDI | 119 |
| | | +LY+ +DGE+ FNGE + K K L F + QMIFQDP ASLN RM + DI+AEGLDI | |
| Sbjct: | 60 | RLYEATDGEVLFNGENVHGRKSRKKLLEFNRKMQMIFQDPYASLNPRMTVADIIAEGLDI | 119 |
| Query: | 120 | HKLAKSKSDRDSKVQALLDLVGLNKDHLTRYPHEFSGGQRQRIGIARALAVEPKFIIADE | 179 |
| | | HKLAK+K +R +V LL+ VGLNK+H RYPHEFSGGQRQRIGIARALAV+P+FIIADE | |
| Sbjct: | 120 | HKLAKTKKERMQRVHELLETVGLNKEHANRYPHEFSGGQRQRIGIARALAVDPEFIIADE | 179 |
| Query: | 180 | PISALDVSIQAQVVNLMQKLQREQGLTYLFIAHDLSMVKYISDRIGVMHWGKLLEVGTSD | 239 |
| | | PISALDVSIQAQVVNLM++LQ+E+GLTYLFIAHDLSMVKYISDRIGVM++GKL+E+ +D | |
| Sbjct: | 180 | PISALDVSIQAQVVNLMKELQKEKGLTYLFIAHDLSMVKYISDRIGVMYFGKLVELAPAD | 239 |
| Query: | 240 | DVYNNPIHPYTKSLLSAIPEPDPESERQRVHQPYNPAIEQ--DGQERQMHEITPGHFVLS | 297 |
| | | ++Y NP+HPYTKSLLSAIP PDP+ ER RV Q Y+P++ Q DG+ + E+ PGHFV+ | |
| Sbjct: | 240 | ELYENPLHPYTKSLLSAIPLPDPDYERNRVRQKYDPSVHQLKDGETMEFREVKPGHFVMC | 299 |
| Query: | 298 | TPQEAEEY | 305 |
| | | T E + + | |
| Sbjct: | 300 | TEAEFKAF | 307 |

[0897] A related DNA sequence was identified in S. pyogenes <SEQ ID 329> which encodes the amino acid sequence <SEQ ID 330>. Analysis of this protein sequence reveals the following:

```
Possible site: 47
>>> Seems to have no N-terminal signal sequence
----- Final Results -----
                            bacterial cytoplasm --- Certainty = 0.3900(Affirmative) < succ>
                              bacterial membrane --- Certainty = 0.0000(Not Clear) < succ>
                                bacterial outside --- Certainty = 0.0000(Not Clear) < succ>
```

[0898] An alignment of the GAS and GBS proteins is shown below:

| Identities = 164/306 (53%), Positives = 228/306 (73%), Gaps = 3/306 (0%) | | | |
|---|---|---|---|
| Query: | 6 | KKLVEVKNVSLTFNKGKANEVRAIDNVSFDIYEGEVFGLVGESGSGKTTVGRSILKLYDI | 65 |
| | | +KLVEVK++ ++F +GK V A+ N +F I +GE F LVGESGSGKTT+GR+I+ L D | |
| Sbjct: | 3 | EKLVEVKDLEISFGEGKKKFV-AVKNANFFIKKGETFSLVGESGSGKTTIGRAIIGLNDT | 61 |
| Query: | 66 | SDGEITFNGEVISHLKGKA-LHSFRKDAQMIFQDPQASLNGRMKIRDIVAEGLDIHKLAK | 124 |
| | | S G+I ++G+VI+ K K+ + + QMIFQDP ASLN R + I++EGL L K | |
| Sbjct: | 62 | SSGQILYDGKVINGRKSKSEANELIRKIQMIFQDPAASLNERATVDYIISEGLYNFNLFK | 121 |
| Query: | 125 | SKSDRDSKVQALLDLVGLNKDHLTRYPHEFSGGQRQRIGIARALAVEPKFIIADEPISAL | 184 |
| | | ++ +R K++ ++ VGL +HLTRYPHEFSGGQRQRIGIARAL + P+F+IADEPISAL | |
| Sbjct: | 122 | TEEERKEKIKNMMAEVGLLSEHLTRYPHEFSGGQRQRIGIARALVMNPEFVIADEPISAL | 181 |
| Query: | 185 | DVSIQAQVVNLMQKLQREQGLTYLFIAHDLSMVKYISDRIGVMHWGKLLEVGTSDDVYNN | 244 |
| | | DVS++AQV+NL++++Q E+GLTYLFIAHDLS+V++ISDRI V+H G ++EV +++++NN | |
| Sbjct: | 182 | DVSVRAQVLNLLKRMQAEKGLTYLFIAHDLSVVRFISDRIAVIHKGVIVEVAETEELFNN | 241 |
| Query: | 245 | PIHPYTKSLLSAIPEPDPESERQRVHQPYNPAIEQDGQER-QMHEITPGHFVLSTPQEAE | 303 |
| | | PIHPYT+SLLSA+P PDP ERQ+ Y+P ++ M EI P HFV + E E | |
| Sbjct: | 242 | PIHPYTQSLLSAVPIPDPILERQKELVVYHPDQHDYTLDKPSMVEIKPNHFVWANQAEIE | 301 |
| Query: | 304 | EYKKQI | 309 |
| | | +Y+K++ | |
| Sbjct: | 302 | KYQKEL | 307 |

[0899] Based on this analysis, it was predicted that these proteins and their epitopes could be useful antigens for vaccines or diagnostics.

### EXAMPLE 97

[0900] A repeated DNA sequence (GBSx0099) was identified in S. agalactiae <SEQ ID 331> which encodes the amino acid sequence <SEQ ID 332>. Analysis of this protein sequence reveals the following:

```
Possible site: 28
>>> Seems to have no N-terminal signal sequence
----- Final Results -----
                            bacterial cytoplasm --- Certainty = 0.3021(Affirmative) < succ>
                              bacterial membrane --- Certainty = 0.0000(Not Clear) < succ>
                                bacterial outside --- Certainty = 0.0000(Not Clear) < succ>
```

[0901] The protein has no significant homology with any sequences in the GENPEPT database.

[0902] No corresponding DNA sequence was identified in S. pyogenes.

[0903] Based on this analysis, it was predicted that this protein and its epitopes, could be useful antigens for vaccines or diagnostics.

### EXAMPLE 98

[0904] A repeated DNA sequence (GBSx0100) was identified in S. agalactiae <SEQ ID 333> which encodes the amino acid sequence <SEQ ID 334>. Analysis of this protein sequence reveals the following:

```
Possible site: 24
>>> Seems to have no N-terminal signal sequence
----- Final Results -----
                            bacterial cytoplasm --- Certainty = 0.0352(Affirmative) < succ>
                              bacterial membrane --- Certainty = 0.0000(Not Clear) < succ>
                                bacterial outside --- Certainty = 0.0000(Not Clear) < succ>
```

[0905] The protein has no significant homology with any sequences in the GENPEPT database.

[0906] No corresponding DNA sequence was identified in S. pyogenes.

[0907] Based on this analysis, it was predicted that this protein and its epitopes, could be useful antigens for vaccines or diagnostics.

### EXAMPLE 99

[0908] A repeated DNA sequence (GBSx0101) was identified in S. agalactiae <SEQ ID 335> which encodes the amino acid sequence <SEQ ID 336>. Analysis of this protein sequence reveals the following:

```
Possible site: 23
>>> Seems to have no N-terminal signal sequence
----- Final Results -----
                            bacterial cytoplasm --- Certainty = 0.5857(Affirmative) < succ>
                              bacterial membrane --- Certainty = 0.0000(Not Clear) < succ>
                                bacterial outside --- Certainty = 0.0000(Not Clear) < succ>
```

[0909] The protein has no significant homology with any sequences in the GENPEPT database.

[0910] No corresponding DNA sequence was identified in S. pyogenes.

[0911] Based on this analysis, it was predicted that this protein and its epitopes, could be useful antigens for vaccines or diagnostics.

### EXAMPLE 100

[0912] A repeated DNA sequence (GBSx0103) was identified in S. agalactiae <SEQ ID 337> which encodes the amino acid sequence <SEQ ID 338>. Analysis of this protein sequence reveals the following:

```
Possible site: 14
>>> Seems to have no N-terminal signal sequence
----- Final Results -----
                            bacterial cytoplasm --- Certainty = 0.1472(Affirmative) < succ>
                              bacterial membrane --- Certainty = 0.0000(Not Clear) < succ>
                                bacterial outside --- Certainty = 0.0000(Not Clear) < succ>
```

[0913] The protein has no significant homology with any sequences in the GENPEPT database.

[0914] No corresponding DNA sequence was identified in S. pyogenes.

[0915] Based on this analysis, it was predicted that this protein and its epitopes, could be useful antigens for vaccines or diagnostics.

### EXAMPLE 101

[0916] A repeated DNA sequence (GBSx0104) was identified in S. agalactiae <SEQ ID 339> which encodes the amino acid sequence <SEQ ID 340>. Analysis of this protein sequence reveals the following:

```
Possible site: 13
>>> Seems to have no N-terminal signal sequence
----- Final Results -----
                            bacterial cytoplasm --- Certainty = 0.0111(Affirmative) < succ>
                              bacterial membrane --- Certainty = 0.0000(Not Clear) < succ>
                                bacterial outside --- Certainty = 0.0000(Not Clear) < succ>
```

[0917] The protein has no significant homology with any sequences in the GENPEPT database.

[0918] No corresponding DNA sequence was identified in S. pyogenes.

[0919] Based on this analysis, it was predicted that this protein and its epitopes, could be useful antigens for vaccines or diagnostics.

### EXAMPLE 102

[0920] A repeated DNA sequence (GBSx0105) was identified in S. agalactiae <SEQ ID 341> which encodes the amino acid sequence <SEQ ID 342>. Analysis of this protein sequence reveals the following:

```
Possible site: 20
>>> Seems to have no N-terminal signal sequence
----- Final Results -----
                            bacterial cytoplasm --- Certainty = 0.5628(Affirmative) < succ>
                              bacterial membrane --- Certainty = 0.0000(Not Clear) < succ>
                                bacterial outside --- Certainty = 0.0000(Not Clear) < succ>
```

[0921] The protein has no significant homology with any sequences in the GENPEPT database.

[0922] No corresponding DNA sequence was identified in S. pyogenes.

[0923] Based on this analysis, it was predicted that this protein and its epitopes, could be useful antigens for vaccines or diagnostics.

### EXAMPLE 103

[0924] A repeated DNA sequence (GBSx0106) was identified in S. agalactiae <SEQ ID 343> which encodes the amino acid sequence <SEQ ID 344>. Analysis of this protein sequence reveals the following:

```
Possible site: 39
>>> Seems to have no N-terminal signal sequence
----- Final Results -----
                            bacterial cytoplasm --- Certainty = 0.2059(Affirmative) < succ>
                              bacterial membrane --- Certainty = 0.0000(Not Clear) < succ>
                                bacterial outside --- Certainty = 0.0000(Not Clear) < succ>
```

[0925] The protein has no significant homology with any sequences in the GENPEPT database;

[0926] No corresponding DNA sequence was identified in S. pyogenes.

[0927] Based on this analysis, it was predicted that this protein and its epitopes, could be useful antigens for vaccines or diagnostics.

### EXAMPLE 104

[0928] A repeated DNA sequence (GBSx0107) was identified in S. agalactiae <SEQ ID 345> which encodes the amino acid sequence <SEQ ID 346>. Analysis of this protein sequence reveals the following:

```
Possible site: 21
>>> Seems to have no N-terminal signal sequence
----- Final Results -----
                            bacterial cytoplasm --- Certainty = 0.2045(Affirmative) < succ>
                              bacterial membrane --- Certainty = 0.0000(Not Clear) < succ>
                                bacterial outside --- Certainty = 0.0000(Not Clear) < succ>
```

[0929] The protein has no significant homology with any sequences in the GENPEPT database.

[0930] No corresponding DNA sequence was identified in S. pyogenes.

[0931] Based on this analysis, it was predicted that this protein and its epitopes, could be useful antigens for vaccines or diagnostics.

### EXAMPLE 105

[0932] A DNA sequence (GBSx0108) was identified in S. agalactiae <SEQ ID 347> which encodes the amino acid sequence <SEQ ID 348>. Analysis of this protein sequence reveals the following:

```
Possible site: 36
>>> Seems to have no N-terminal signal sequence
----- Final Results -----
                            bacterial cytoplasm --- Certainty = 0.3031(Affirmative) < succ>
                              bacterial membrane --- Certainty = 0.0000(Not Clear) < succ>
                                bacterial outside --- Certainty = 0.0000(Not Clear) < succ>
```

[0933] The protein has homology with the following sequences in the GENPEPT database:

| >GP: CAB11822 GB: Z99104 similar to hypothetical proteins [Bacillus | | | |
|---|---|---|---|
| subtilis] | | | |
| Identities = 125/282 (44%), Positives = 184/282 (64%) | | | |
| Query: | 1 | MKIFEKAPAKLNLGLDIKGRCDDGYHELAMIMVSIDLNDYVTISELKEDCIVIDSDSSKM | 60 |
| | | M+I EKAPAK+NL LD+ + DGYHE+ MIM +IDL D + ++EL ED + + S + + | |
| Sbjct: | 1 | MRILEKAPAKINLSLDVTRKRPDGYHEVEMIMTTIDLADRIELTELAEDEVRVSSHNRFV | 60 |
| Query: | 61 | PLNNDNDVFKAADIIKNQYGINKGVHIRLEKSIPVCAGLGGGSTDAAATIRALNRLWNLQ | 120 |
| | | P + N ++AA +IK++Y + KGV I + K IPV AGL GGS+DAAAT+R LNRLWNL | |
| Sbjct: | 61 | PDDQRNLAYQAAKLIKDRYNVKKGVSIMITKVIPVAAGLAGGSSDAAATLRGLNRLWNLN | 120 |
| Query: | 121 | MDYDEMVAIGFKIGSDVPYCLGGGCSLVLGKGEIVKPLPTLRPCWIVLVKPDFGISTKSI | 180 |
| | | + + + +G +IGSDV +C+ GG +L G+GE +K + T CW++L KP G+ST + | |
| Sbjct: | 121 | LSAETLAELGAEIGSDVSFCVYGGTALATGRGEKIKHISTPPHCWVILAKPTIGVSTAEV | 180 |
| Query: | 181 | FRDIDCKSISRVDIDLLKSAILSSDYQLMVKSMGNSLEDITITKNPVISTIKERMLNSGA | 240 |
| | | +R + I D+ + AI +Q M +GN LE +T+ +P ++ IK +M GA | |
| Sbjct: | 181 | YRALKLDGIEHPDVQGMIEAIEEKSFQKMCSRLGNVLESVTLDMHPEVAMIKNQMKRFGA | 240 |
| Query: | 241 | DVALMTGSGPTVFSMCSTEKKADRVFNSMKGFCKEVYKVRLL | 282 |
| | | D LM+GSGPTVF + E K R++N ++GFC +VY VR++ | |
| Sbjct: | 241 | DAVLMSGSGPTVFGLVQYESKVQRIYNGLRGFCDQVYAVRMI | 282 |

[0934] A related DNA sequence was identified in S. pyogenes <SEQ ID 349> which encodes the amino acid sequence <SEQ ID 350>. Analysis of this protein sequence reveals the following:

| Possible site: 44 | | | | |
|---|---|---|---|---|
| >>> Seems to have no N-terminal signal sequence | | | | |
| | INTEGRAL | Likelihood = −2.87 | Transmembrane | 28-44 (27-45) |

```
----- Final Results -----
                              bacterial membrane --- Certainty = 0.2147(Affirmative) < succ>
                                bacterial outside --- Certainty = 0.0000(Not Clear) < succ>
                            bacterial cytoplasm --- Certainty = 0.0000(Not Clear) < succ>
```

[0935] An alignment of the GAS and GBS proteins is shown below:

| Identities = 33/52 (63%), Positives = 38/52 (72%) | | | |
|---|---|---|---|
| Query: | 126 | MVAIGFKIGSDVPYCLGGGCSLVLGKGEIVKPLPTLRPCWIVLVKPDFGIST | 177 |
| | | M+ IG IGSDVPYCL GC+ V GKGE+V + L W+VLVKPDFGIST | |
| Sbjct: | 1 | MMDIGIPIGSDVPYCLLSGCAQVTGKGEVVCRILGLLSSWVVLVKPDFGIST | 52 |

[0936] Based on this analysis, it was predicted that these proteins and their epitopes could be useful antigens for vaccines or diagnostics.

### EXAMPLE 106

[0937] A DNA sequence (GBSx0109) was identified in S. agalactiae <SEQ ID 351> which encodes the amino acid sequence <SEQ ID-352>. This protein is predicted to be AdcR protein. Analysis of this protein sequence reveals the following:

```
Possible site: 19
>>> Seems to have no N-terminal signal sequence
----- Final Results -----
                            bacterial cytoplasm --- Certainty = 0.1264(Affirmative) < succ>
                              bacterial membrane --- Certainty = 0.0000(Not Clear) < succ>
                                bacterial outside --- Certainty = 0.0000(Not Clear) < succ>
```

[0938] The protein has homology with the following sequences in the GENPEPT database:

| >GP: CAA96184 GB: Z71552 AdcR protein [Streptococcus pneumoniae] | | | |
|---|---|---|---|
| Identities = 77/146 (52%), Positives = 117/146 (79%) | | | |
| Query: | 1 | MTVLEQKLDHLVSQILLKAENQHELLFGTCQSDVKLTNTQEHILMLLSQEQLTNSDLAKK | 60 |
| | | M L + ++ +++++L+AENQHE+L G C S+V LTNTQEHILMLLS+E LTNS+LA++ | |
| Sbjct: | 1 | MRQLAKDINAFLNEVILQAENQHEILIGHCTSEVALTNTQEHILMLLSEESLTNSELARR | 60 |
| Query: | 61 | LNISQAAVTKAVKSLISQDMLKANKDSKDARITYFELSELAKPIADEHTHHHDNTLGVYG | 120 |
| | | LN+SQAAVTKA+KSL+ + ML+ +KDSKDAR+ +++L++LA+PIA+EH HHH++TL Y | |
| Sbjct: | 61 | LNVSQAAVTKAIKSLVKEGMLETSKDSKDARVIFYQLTDLARPIAEEHHHHHEHTLLTYE | 120 |
| Query: | 121 | RLVNHFSKDEKVVLERFLDLFSRELE | 146 |
| | | ++ F+ +E+ V++RFL E++ | |
| Sbjct: | 121 | QVATQFTPNEQKVIQRFLTALVGEIK | 146 |

[0939] A related DNA sequence was identified in S. pyogenes <SEQ ID 353> which encodes the amino acid sequence <SEQ ID 354>. Analysis of this protein sequence reveals the following:

```
Possible site: 28
>>> Seems to have no N-terminal signal sequence
----- Final Results -----
                            bacterial cytoplasm --- Certainty = 0.1536(Affirmative) < succ>
                              bacterial membrane --- Certainty = 0.0000(Not Clear) < succ>
                                bacterial outside --- Certainty = 0.0000(Not Clear) < succ>
```

[0940] An alignment of the GAS and GBS proteins is shown below:

| Identities = 106/147 (72%), Positives = 126/147 (85%) | | | |
|---|---|---|---|
| Query: | 1 | MTVLEQKLDHLVSQILLKAENQHELLFGTCQSDVKLTNTQEHILMLLSQEQLTNSDLAKK | 60 |
| | | M +LE+KLD+LV+ ILLKAENQHELLFG CQSDVKLTNTQEHILMLLSQ++LTN+DLAK | |
| Sbjct: | 1 | MGILEKKLDNLVNTILLKAENQHELLFGACQSDVKLTNTQEHILMLLSQQRLTNTDLAKA | 60 |
| Query: | 61 | LNISQAAVTKAVKSLISQDMLKANKDSKDARITYFELSELAKPIADEHTHHHDNTLGVYG | 120 |
| | | LNISQAAVTKA+KSL+ QDML KD+ DAR+TYFEL+ELAKPIA EHTHHHD TL VY | |
| Sbjct: | 61 | LNISQAAVTKAIKSLVKQDMLAGTKDTVDARVTYFELTELAKPIASEHTHHHDETLNVYN | 120 |
| Query: | 121 | RLVNHFSKDEKVVLERFLDLFSRELEG | 147 |
| | | RL+ FS E ++++F+ +F+ ELEG | |
| Sbjct: | 121 | RLLQKFSAKELEIVDKFVTVFAEELEG | 147 |

[0941] Based on this analysis, it was predicted that these proteins and their epitopes could be useful antigens for vaccines or diagnostics.

### EXAMPLE 107

[0942] A DNA sequence (GBSx0110) was identified in S. agalactiae <SEQ ID 355> which encodes the amino acid sequence <SEQ ID 356>. This protein is predicted to be AdcC protein. Analysis of this protein sequence reveals the following:

```
Possible site: 43
>>> Seems to have no N-terminal signal sequence
----- Final Results -----
                            bacterial cytoplasm --- Certainty = 0.1089(Affirmative) < succ>
                              bacterial membrane --- Certainty = 0.0000(Not Clear) < succ>
                                bacterial outside --- Certainty = 0.0000(Not Clear) < succ>
```

[0943] The protein has homology with the following sequences in the GENPEPT database:

| >GP: CAA96186 GB: Z71552 AdcC protein [Streptococcus pneumoniae] | | | |
|---|---|---|---|
| Identities = 182/231 (78%), Positives = 206/231 (88%) | | | |
| Query: | 1 | MRYITVSGLTFQYDSDPVLEGVNYHLDSGEFVTLTGENGAAKSTLIKATLGILTPKVGTV | 60 |
| | | MRYITV L+F YD +PVLE +NY +DSGEFVTLTGENGAAK+TLIKA+LGIL P++G V | |
| Sbjct: | 1 | MRYITVEDLSFYYDKEPVLEHINYCVDSGEFVTLTGENGAAKTTLIKASLGILQPRIGKV | 60 |
| Query: | 61 | NISKENKEGKKLRIAYLPQQIASFNAGFPSSVYEFVKSGRYPRNGWFRRLTKHDEEHIRV | 120 |
| | | ISK N +GKKLRIAYLPQQIASFNAGFPS+VYEFVKSGRYPR GWFRRL HDEEHI+ | |
| Sbjct: | 61 | AISKTNTQGKKLRIAYLPQQIASFNAGFPSTVYEFVKSGRYPRKGWFRRLNAHDEEHIKA | 120 |
| Query: | 121 | SLEAVGMWDNRHKKIGSLSGGQKQRAVIARMFASDPDIFVLDEPTTGMDAGTTEKFYELM | 180 |
| | | SL++VGMW++R K++GSLSGGQKQRAVIARMFASDPD+F+LDEPTTGMDAG+ +FYELM | |
| Sbjct: | 121 | SLDSVGMWEHRDKRLGSLSGGQKQRAVIARMFASDPDVFILDEPTTGMDAGSKNEFYELM | 180 |
| Query: | 181 | HHNAHKHGKSVLMITHDPDEVKGYADRNIHLVRNQSLPWRCFNVHTNEMEV | 231 |
| | | HH+AH HGK+VLMITHDP+EVK YADRNIHLVRNQ PWRCFNVH N EV | |
| Sbjct: | 181 | HHSAHHHGKAVLMITHDPEEVKDYADRNIHLVRNQDSPWRCFNVHENGQEV | 231 |

[0944] A related DNA sequence was identified in S. pyogenes <SEQ ID 357> which encodes the amino acid sequence <SEQ ID 358>. Analysis of this protein sequence reveals the following:

```
Possible Site: 43
>>> Seems to have no N-terminal signal sequence
----- Final Results -----
                            bacterial cytoplasm --- Certainty = 0.2722(Affirmative) < succ>
                              bacterial membrane --- Certainty = 0.0000(Not Clear) < succ>
                                bacterial outside --- Certainty = 0.0000(Not Clear) < succ>
```

[0945] An alignment of the GAS and GBS proteins is shown below:

| Identities = 190/232 (81%), Positives = 214/232 (91%) | | | |
|---|---|---|---|
| Query: | 1 | MRYITVSGLTFQYDSDPVLEGVNYHLDSGEFVTLTGENGAAKSTLIKATLGILTPKVGTV | 60 |
| | | MRYI+V L+FQY+S+PVLEG+ YHLDSGEFVT+TGENGAAKSTLIKATLGIL PK G V | |
| Sbjct: | 1 | MRYISVKNLSFQYESEPVLEGITYHLDSGEFVTMTGENGAAKSTLIKATLGILQPKAGRV | 60 |
| Query: | 61 | NISKENKEGKKLRIAYLPQQIASFNAGFPSSVYEFVKSGRYPRNGWFRRLTKHDEEHIRV | 120 |
| | | I+K+NK+GK+LRIAYLPQQ+ASFNAGFPS+VYEFVKSGRYPR+GWFR L KHDEEH++ | |
| Sbjct: | 61 | TIAKKNKDGKQLRIAYLPQQVASFNAGFPSTVYEFVKSGRYPRSGWFRHLNKHDEEHVQA | 120 |
| Query: | 121 | SLEAVGMWDNRHKKIGSLSGGQKQRAVIARMFASDPDIFVLDEPTTGMDAGTTEKFYELM | 180 |
| | | SLEAVGMW+NRHK+IGSLSGGQKQR VIARMFASDPDIFVLDEPTTGMD+GTT+ FYELM | |
| Sbjct: | 121 | SLEAVGMWENRHKRIGSLSGGQKQRVVIARMFASDPDIFVLDEPTTGMDSGTTDTFYELM | 180 |
| Query: | 181 | HHNAHKHGKSVLMITHDPDEVKGYADRNIHLVRNQSLPWRCFNVHTNEMEVE | 232 |
| | | HH+AH+HGKSVLMITHDP+EVK YADRNIHLVRNQ LPWRCFN+H E + E | |
| Sbjct: | 181 | HHSAHQHGKSVLMITHDPEEVKAYADRNIHLVRNQKLPWRCFNIHEAETDDE | 232 |

[0946] Based on this analysis, it was predicted that these proteins and their epitopes could be useful antigens for vaccines or diagnostics.

### EXAMPLE 108

[0947] A DNA sequence (GBSx0111) was identified in S. agalactiae <SEQ ID 359> which encodes the amino acid sequence <SEQ ID 360>. Analysis of this protein sequence reveals the following:

```
Possible site: 36
>>> Seems to have no N-terminal signal sequence
----- Final Results -----
                            bacterial cytoplasm --- Certainty = 0.2299(Affirmative) < succ>
                              bacterial membrane --- Certainty = 0.0000(Not Clear) < succ>
                                bacterial outside --- Certainty = 0.0000(Not Clear) < succ>
```

[0948] The protein has no significant homology with any sequences in the GENPEPT database.

[0949] No corresponding DNA sequence was identified in S. pyogenes.

[0950] Based on this analysis, it was predicted that this protein and its epitopes, could be useful antigens for vaccines or diagnostics.

### EXAMPLE 109

[0951] A DNA sequence (GBSx0112) was identified in S. agalactiae <SEQ ID 361> which encodes the amino acid sequence <SEQ ID 362>. This protein is predicted to be AdcB protein (znuB). Analysis of this protein sequence reveals the following:

| Possible site: 36 | | | | |
|---|---|---|---|---|
| >>> Seems to have no N-terminal signal sequence | | | | |
| | INTEGRAL | Likelihood = −14.33 | Transmembrane | 145-161 (136-172) |
| | INTEGRAL | Likelihood = −11.57 | Transmembrane | 29-45 (20-47) |
| | INTEGRAL | Likelihood = −10.56 | Transmembrane | 261-277 (255-280) |
| | INTEGRAL | Likelihood = −8.70 | Transmembrane | 231-247 (227-253) |
| | INTEGRAL | Likelihood = −5.63 | Transmembrane | 101-117 (99-121) |
| | INTEGRAL | Likelihood = −4.94 | Transmembrane | 186-202 (183-225) |
| | INTEGRAL | Likelihood = −3.82 | Transmembrane | 55-71 (54-74) |
| | INTEGRAL | Likelihood = −3.61 | Transmembrane | 206-222 (203-225) |
| | INTEGRAL | Likelihood = −3.03 | Transmembrane | 78-94 (75-94) |

```
----- Final Results -----
                              bacterial membrane --- Certainty = 0.6731(Affirmative) < succ>
                                bacterial outside --- Certainty = 0.0000(Not Clear) < succ>
                            bacterial cytoplasm --- Certainty = 0.0000(Not Clear) < succ>
```

[0952] A related GBS nucleic acid sequence <SEQ ID 9487> which encodes amino acid sequence <SEQ ID 9488> was also identified.

[0953] The protein has homology with the following sequences in the GENPEPT database:

| >GP: CAA96187 GB: Z71552 AdcB protein [Streptococcus pneumoniae] | | | |
|---|---|---|---|
| Identities = 197/263 (74%), Positives = 236/263 (88%) | | | |
| Query: | 13 | LLDMLSYDFMQRALLAVVAISIFAPILGIFLILRRQSLMSDTLSHVSLAGVALGVVLGIS | 72 |
| | | +L +LSYDF+QRA LAV+A+S+F+P+LG FLILRRQSLMSDTLSHVSL+GVA G+VLGIS | |
| Sbjct: | 1 | MLSLLSYDFIQRAFLAVIAMSLFSPVLGTFLILRRQSLMSDTLSHVSLSGVAFGLVLGIS | 60 |
| Query: | 73 | PTWSTIFVVTLAAVVLEYLRTVYKHYMEISTAILMSMGLAISLIVMSKAHNVGNVSLEQY | 132 |
| | | PT STI +V +AAV LEYLRTVYK +MEI TAILMS GLA+SLIVMSK + ++SL+QY | |
| Sbjct: | 61 | PTVSTIAIVLIAAVFLEYLRTVYKSFMEIGTAILMSTGLAVSLIVMSKGKSSSSMSLDQY | 120 |
| Query: | 133 | LFGSIITIGKEQVIALFVIALITFILTILFIRPMYILTFDEDTAFVDGLPVRTMSILFNV | 192 |
| | | LFGSI+TI +EQVI+LFVIA + ILT LF+RPMYILTFDEDTAFVDGLPVRTMSILFN+ | |
| Sbjct: | 121 | LFGSIVTISEEQVISLFVIAAVVLILTFLFLRPMYILTFDEDTAFVDGLPVRTMSILFNM | 180 |
| Query: | 193 | VTGIAIALTIPAAGALLVSTIMVLPASIAMRLGRNFKTVIFLGMLIGFVGMVAGIFLSYY | 252 |
| | | VTG+AIAL IPAAGALLVSTIMVLPASIA+RLG+NFK+V+ L IGF+GMVAG+++SYY | |
| Sbjct: | 181 | VTGVAIALMIPAAGALLVSTIMVLPASIALRLGKNFKSVMLLASAIGFLGMVAGLYISYY | 240 |
| Query: | 253 | WETPASATITMIFIGIFLLVSLV | 275 |
| | | ETPASA+IT+IF+ +F+L+SLV | |
| Sbjct: | 241 | AETPASASITIIFVTVFILISLV | 263 |

[0954] A related DNA sequence was identified in S. pyogenes <SEQ ID 363> which encodes the amino acid sequence <SEQ ID 364>. Analysis of this protein sequence reveals the following:

| Possible site: 18 | | | | |
|---|---|---|---|---|
| >>> Seems to have a cleavable N-term signal seq. | | | | |
| | INTEGRAL | Likelihood = −14.97 | Transmembrane | 135-151 (123-162) |
| | INTEGRAL | Likelihood = −9.08 | Transmembrane | 68-84 (44-86) |
| | INTEGRAL | Likelihood = −6.95 | Transmembrane | 20-36 (19-37) |
| | INTEGRAL | Likelihood = −6.90 | Transmembrane | 251-267 (245-270) |
| | INTEGRAL | Likelihood = −6.58 | Transmembrane | 221-237 (217-243) |
| | INTEGRAL | Likelihood = −6.42 | Transmembrane | 91-107 (89-111) |
| | INTEGRAL | Likelihood = −4.78 | Transmembrane | 176-192 (171-215) |
| | INTEGRAL | Likelihood = −3.82 | Transmembrane | 45-61 (44-67) |
| | INTEGRAL | Likelihood = −3.61 | Transmembrane | 196-212 (193-215) |

```
----- Final Results -----
                              bacterial membrane --- Certainty = 0.6986(Affirmative) < succ>
                                bacterial outside --- Certainty = 0.0000(Not Clear) < succ>
                            bacterial cytoplasm --- Certainty = 0.0000(Not Clear) < succ>
```

[0955] The protein has homology with the following sequences in the databases:

| >GP: CAA96187 GB: Z71552 AdcB protein [Streptococcus pneumoniae] | | | |
|---|---|---|---|
| Identities = 195/262 (74%), Positives = 239/262 (90%) | | | |
| Query: | 3 | MLDILFYDFMQRAVMAVVAISIFAPILGIFLILRRQSLMSDTLSHVSLAGVALGVVLGIS | 62 |
| | | ML +L YDF+QRA +AV+A+S+F+P+LG FLILRRQSLMSDTLSHVSL+GVA G+VLGIS | |
| Sbjct: | 1 | MLSLLSYDFIQRAFLAVIAMSLFSPVLGTFLILRRQSLMSDTLSHVSLSGVAFGLVLGIS | 60 |
| Query: | 63 | PTITTIIVVVLAAILLEYLRVVYKHYMEISTAILMSLGLALSLIIMSKSHSSSSMSLEQY | 122 |
| | | PT++TI +V++AA+ LEYLR VYK +MEI TAILMS GLA+SLI+MSK SSSSMSL+QY | |
| Sbjct: | 61 | PTVSTIAIVLIAAVFLEYLRTVYKSFMEIGTAILMSTGLAVSLIVMSKGKSSSSMSLDQY | 120 |
| Query: | 123 | LFGSIITISMEQVVALFAIAAIILILTVLFIRPMYILTFDEDTAFVDGLPVRLMSVLFNI | 182 |
| | | LFGSI+TIS EQV++LF IAA++LILT LF+RPMYILTFDEDTAFVDGLPVR MS+LFN+ | |
| Sbjct: | 121 | LFGSIVTISEEQVISLFVIAAVVLILTFLFLRPMYILTFDEDTAFVDGLPVRTMSILFNM | 180 |
| Query: | 183 | VTGVAIALTIPAAGALLVSTIMVLPASIAMRLGKNFKTVILLGIVIGFSGMLSGIFLSYF | 242 |
| | | VTGVAIAL IPAAGALLVSTIMVLPASIA+RLGKNFK+V+LL IGF GM++G+++SY+ | |
| Sbjct: | 181 | VTGVAIALMIPAAGALLVSTIMVLPASIALRLGKNFKSVMLLASAIGFLGMVAGLYISYY | 240 |
| Query: | 243 | FETPASATITMIFISIFLLVSL | 264 |
| | | ETPASA+IT+IF+++F+L+SL | |
| Sbjct: | 241 | AETPASASITIIFVTVFILISL | 262 |

[0956] An alignment of the GAS and GBS proteins is shown below:

| Identities = 223/270 (82%), Positives = 252/270 (92%) | | | |
|---|---|---|---|
| Query: | 12 | MLLDMLSYDFMQRALLAVVAISIFAPILGIFLILRRQSLMSDTLSHVSLAGVALGVVLGI | 71 |
| | | ++LD+L YDFMQRA++AVVAISIFAPILGIFLILRRQSLMSDTLSHVSLAGVALGVVLGI | |
| Sbjct: | 2 | VMLDILFYDFMQRAVMAVVAISIFAPILGIFLILRRQSLMSDTLSHVSLAGVALGVVLGI | 61 |
| Query: | 72 | SPTWSTIFVVTLAAVVLEYLRTVYKHYMEISTAILMSMGLAISLIVMSKAHNVGNVSLEQ | 131 |
| | | SPT +TI VV LAA++LEYLR VYKHYMEISTAILMS+GLA+SLI+MSK+H+ ++SLEQ | |
| Sbjct: | 62 | SPTITTIIVVVLAAILLEYLRVVYKHYMEISTAILMSLGLALSLIIMSKSHSSSSMSLEQ | 121 |
| Query: | 132 | YLFGSIITIGKEQVIALFVIALITFILTILFIRPMYILTFDEDTAFVDGLPVRTMSILFN | 191 |
| | | YLFGSIITI EQV+ALF IA I ILT+LFIRPMYILTFDEDTAFVDGLPVR MS+LFN | |
| Sbjct: | 122 | YLFGSIITISMEQVVALFAIAAIILILTVLFIRPMYILTFDEDTAFVDGLPVRLMSVLFN | 181 |
| Query: | 192 | VVTGIAIALTIPAAGALLVSTIMVLPASIAMRLGRNFKTVIFLGMLIGFVGMVAGIFLSY | 251 |
| | | +VTG+AIALTIPAAGALLVSTIMVLPASIAMRLG+NFKTVI LG++IGF GM++GIFLSY | |
| Sbjct: | 182 | IVTGVAIALTIPAAGALLVSTIMVLPASIAMRLGKNFKTVILLGIVIGFSGMLSGIFLSY | 241 |
| Query: | 252 | YWETPASATITMIFIGIFLLVSLVGLLRKR | 281 |
| | | ++ETPASATITMIFI IFLLVSL G+L+KR | |
| Sbjct: | 242 | FFETPASATITMIFISIFLLVSLGGMLKKR | 271 |

[0957] Based on this analysis, it was predicted that these proteins and their epitopes could be useful antigens for vaccines or diagnostics.

### EXAMPLE 110

[0958] A DNA sequence (GBSx0113) was identified in S. agalactiae <SEQ ID 365> which encodes the amino acid sequence <SEQ ID 366>. This protein is predicted to be streptodornase. Analysis of this protein sequence reveals the following:

```
Possible site: 59
>>> Seems to have no N-terminal signal sequence
----- Final Results -----
                            bacterial cytoplasm --- Certainty = 0.2601(Affirmative) < succ>
                              bacterial membrane --- Certainty = 0.0000(Not Clear) < succ>
                                bacterial outside --- Certainty = 0.0000(Not Clear) < succ>
```

[0959] The protein has homology with the following sequences in the GENPEPT database:

| >GP: CAA59264 GB: X84793 streptodornase [Streptococcus pyogenes] | | | |
|---|---|---|---|
| Identities = 58/167 (34%), Positives = 85/167 (50%), | | | |
| Gaps = 30/167 (17%) | | | |
| Query: | 2 | TPIYEGNNLVPSRVELQYVGIDKQGKLLEIKLGGGKEQVDEYGVTTVTLENTSPLAKIDY | 61 |
| | | TP+Y+G+ L+P V + + D +DE TV + N IDY | |
| Sbjct: | 245 | TPVYQGSELLPRAVLVSALSSDGF--------------IDE----TVRVFNNVAGFNIDY | 286 |
| Query: | 62 | KTGMLIKEDGKQAEEGEDPNSDADENEAAIE-SASDIEENTNTNTSESDTNNVAPQNRIV | 120 |
| | | + G L+ E P ++ D E +E + IE+ +T+T + D N++ Q + V | |
| Sbjct: | 287 | QNGGLLTES---------PVTETDNVEENVEDNIETIEDEVDTDTLKKDDENISLQ-KTV | 336 |
| Query: | 121 | YVANKGRSNTYWYSLENI-KNANTANIVQMTEQEALNQHKHHSTTEA | 166 |
| | | YVA+ G SN YWYS EN+ KN N +V+M+EQ AL + KHHS EA | |
| Sbjct: | 337 | YVASSGLSNVYWYSKENMPKNVNLDKVVEMSEQTALARGKHHSAQEA | 383 |

[0960] A related DNA sequence was identified in S. pyogenes <SEQ ID 367> which encodes the amino acid sequence <SEQ ID 368>. Analysis of this protein sequence reveals the following:

```
Possible site: 31
>>> Seems to have a cleavable N-term signal seq.
----- Final Results -----
                                bacterial outside --- Certainty = 0.3000(Affirmative) < succ>
                              bacterial membrane --- Certainty = 0.0000(Not Clear) < succ>
                            bacterial cytoplasm --- Certainty = 0.0000(Not Clear) < succ>
```

[0961] An alignment of the GAS and GBS proteins is shown below:

| Identities = 51/90 (56%), Positives = 66/90 (72%), Gaps = 4/90 (4%) | | | |
|---|---|---|---|
| Query: | 1 | MTPIYEGNNLVPSRVELQYVGIDKQGKLLEIKLGGGKEQVDEYGVTTVTLENTSPLAKID | 60 |
| | | +TP+Y N LVP +V LQYVGID+ G LL+IKLG KE VD +GVT+VTL+N SPLA++D | |
| Sbjct: | 182 | VTPVYHKNELVPRQVVLQYVGIDENGDLLQIKLGSEKESVDNFGVTSVTLDNVSPLAELD | 241 |
| Query: | 61 | YKTGMLIKEDGKQAEEGEDPNSDADENEAA | 90 |
| | | Y+TGM++ D Q E ED N + +E E A | |
| Sbjct: | 242 | YQTGMML--DSTQNE--EDSNLETEEFEEA | 267 |

[0962] Based on this analysis, it was predicted that these proteins and their epitopes could be useful antigens for vaccines or diagnostics.

### EXAMPLE III

[0963] A DNA sequence (GBSx0114) was identified in S. agalactiae <SEQ ID 369> which encodes the amino acid sequence <SEQ ID 370>. This protein is predicted to be tyrosyl-tRNA synthetase (tyrS-1). Analysis of this protein sequence reveals the following:

```
Possible site: 60
>>> Seems to have no N-terminal signal sequence
----- Final Results -----
                            bacterial cytoplasm --- Certainty = 0.3618(Affirmative) < succ>
                              bacterial membrane --- Certainty = 0.0000(Not Clear) < succ>
                                bacterial outside --- Certainty = 0.0000(Not Clear) < succ>
```

[0964] The protein has homology with the following sequences in the GENPEPT database:

| >GP: AAC00303 GB: AF008220 tyrosine tRNA synthetase [Bacillus subtilis] | | | |
|---|---|---|---|
| Identities = 234/420 (55%), Positives = 311/420 (73%), Gaps = 2/420 (0%) | | | |
| Query: | 2 | NIFDELKERGLVFQTTDEDALRKALEEGSVSYYTGYDPTADSLHLGHLVAILTSRRLQLA | 61 |
| | | N+ ++L RGL+ Q TDE+ L K L E + Y+G+DPTADSLH+GHL+ ILT RR QLA | |
| Sbjct: | 3 | NLLEDLSFRGLIQQMTDEEGLNKQLNEEKIRLYSGFDPTADSLHIGHLLPILTLRRFQLA | 62 |
| Query: | 62 | GHKPYALVGGATGLIGDPSFKDVERSLQTKKTVVSWGNKIRGQLSNFLEFETGDNKAVLV | 121 |
| | | GH P ALVGGATGLIGDPS K ER+L T V W KI+ QLS FL+FE +N AV+ | |
| Sbjct: | 63 | GHHPIALVGGATGLIGDPSGKKAERTLNTADIVSEWSQKIKNQLSRFLDFEAAENPAVIA | 122 |
| Query: | 122 | NNYDWFSNISFIDFLRDVGKYFTVNYMMSKESVKKRIETGISYTEFAYQIMQGYDFYELN | 181 |
| | | NN+DW ++ IDFLRDVGK F +NYM++K++V RIE+GISYTEF+Y I+Q YDF L | |
| Sbjct: | 123 | NNFDWIGKMNVIDFLRDVGKNFGINYMLAKDTVSSRIESGISYTEFSYMILQSYDFLNLY | 182 |
| Query: | 182 | KNYNVTLQIGGSDQWGNMTAGTELIRR--KSNGVSHVMTVPLITDSTGKKFGKSEGNAVW | 239 |
| | | ++ N LQIGGSDQWGN+TAG ELIR+ + + +T+PL+T + G KFGK+EG A+W | |
| Sbjct: | 183 | RDKNCKLQIGGSDQWGNITAGLELIRKSEEEGAKAFGLTIPLVTKADGTKFGKTEGGAIW | 242 |
| Query: | 240 | LDADKTSPYEMYQFWLNVMDADAVRFLKIFTFLSLKEIEDIRIQFEEAPHQRLAQKTLAR | 299 |
| | | LD +KTSPYE YQFW+N D D V++LK FTFLS +EIE + E AP +R AQK LA | |
| Sbjct: | 243 | LDKEKTSPYEFYQFWINTDDRDVVKYLKYFTFLSKEEIEAYAEKTETAPEKREAQKRLAE | 302 |
| Query: | 300 | EVVTLVHGEKAYKEAVNITEQLFAGNIKGLSVKELKQGLRGVPNYHVQTEDNLNIIDLLV | 359 |
| | | EV +LVHG +A ++A+NI++ LF+GNIK LS +++K G + VP+ V + L+++D+LV | |
| Sbjct: | 303 | EVTSLVHGREALEQAINISQALFSGNIKELSAQDVKVGFKDVPSMEVDSTQELSLVDVLV | 362 |
| Query: | 360 | TSGVVNSKRQAREDVSNGAIYINGDRIQDLEYTISENDKLENEITVIRRGKKKYFVLNFK | 419 |
| | | S + SKRQARED+ NGA+YING+R ++ YT+S D++EN+ TV+RRGKKKYF++ +K | |
| Sbjct: | 363 | QSKLSPSKRQAREDIQNGAVYINGERQTEINYTLSGEDRIENQFTVLRRGKKKYFLVTYK | 422 |

[0965] A related DNA sequence was identified in S. pyogenes <SEQ ID 371> which encodes the amino acid sequence <SEQ ID 372>. Analysis of this protein sequence reveals the following:

```
Possible site: 37
>>> Seems to have no N-terminal signal sequence
----- Final Results -----
                            bacterial cytoplasm --- Certainty = 0.2340(Affirmative) < succ>
                              bacterial membrane --- Certainty = 0.0000(Not Clear) < succ>
                                bacterial outside --- Certainty = 0.0000(Not Clear) < succ>
```

[0966] An alignment of the GAS and GBS proteins is shown below:

| Identities = 344/418 (82%), Positives = 377/418 (89%) | | | |
|---|---|---|---|
| Query: | 1 | MNIFDELKERGLVFQTTDEDALRKALEEGSVSYYTGYDPTADSLHLGHLVAILTSRRLQL | 60 |
| | | MNIF+ELK RGLVFQTTDE AL KAL EG VSYYTGYDPTADSLHLGHLVAILTSRRLQL | |
| Sbjct: | 1 | MNIFEELKARGLVFQTTDEQALVKALTEGQVSYYTGYDPTADSLHLGHLVAILTSRRLQL | 60 |
| Query: | 61 | AGHKPYALVGGATGLIGDPSFKDVERSLQTKKTVVSWGNKIRGQLSNFLEFETGDNKAVL | 120 |
| | | AGHKPYALVGGATGLIGDPSFKD ERSLQTK+TV+ W +KI+GQLS FL+FE GDNKA L | |
| Sbjct: | 61 | AGHKPYALVGGATGLIGDPSFKDAERSLQTKETVLEWSDKIKGQLSTFLDFENGDNKAEL | 120 |
| Query: | 121 | VNNYDWFSNISFIDFLRDVGKYFTVNYMMSKESVKKRIETGISYTEFAYQIMQGYDFYEL | 180 |
| | | VNNYDWFS ISFIDFLRDVGKYFTVNYMNSK+SVKKRIETGISYTEFAYQIMQGYDFYEL | |
| Sbjct: | 121 | VNNYDWFSQISFIDFLRDVGKYFTVNYMMSKDSVKKRIETGISYTEFAYQIMQGYDFYEL | 180 |
| Query: | 181 | NKNYNVTLQIGGSDQWGNMTAGTELIRRKSNGVSHVMTVPLITDSTGKKFGKSEGNAVWL | 240 |
| | | N +NVTLQIGGSDQWGNMTAGTEL+R+K++ HVMTVPLITDSTGKKFGKSEGNAVWL | |
| Sbjct: | 181 | NDKHNVTLQIGGSDQWGNMTAGTELLRKKADKTGHVMTVPLITDSTGKKFGKSEGNAVWL | 240 |
| Query: | 241 | DADKTSPYEMYQEWLNVMDADAVRFLKIFTFLSLKEIEDIRIQFEEAPHQRLAQKTLARE | 300 |
| | | DADKTSPYEMYQFWLNVMD DAVRFLKIFTFLSL EI +I QF A H+RLAQKTLARE | |
| Sbjct: | 241 | DADKTSPYEMYQFWLNVMDDDAVRFLKIFTFLSLDEIAEIETQFNAARHERLAQKTLARE | 300 |
| Query: | 301 | VVTLVHGEKAYKEAVNITEQLFAGNIKGLSVKELKQGLRGVPNYHVQTEDNLNIIDLLVT | 360 |
| | | VVTLVHGE+AYK+A+NITEQLFAGNIK LS ELKQGL VPNYHVQ+ DN NI+++LV | |
| Sbjct: | 301 | VVTLVHGEEAYKQALNITEQLFAGNIKNLSANELKQGLSNVPNYHVQSIDNHNIVEILVA | 360 |
| Query: | 361 | SGVVNSKRQAREDVSNGAIYINGDRIQDLEYTISENDKLENEITVIRRGKKKYFVLNF | 418 |
| | | + + SKRQAREDV NGAIYINGDR+QDL+Y +S +DK+++++TVIRRGKKKY VL + | |
| Sbjct: | 361 | AKISPSKRQAREDVQNGAIYINGDRVQDLDYQLSNDDKIDDQLTVIRRGKKKYAVLTY | 418 |

[0967] Based on this analysis, it was predicted that these proteins and their epitopes could be useful antigens for vaccines or diagnostics.

### EXAMPLE 112

[0968] A DNA sequence (GBSx0115) was identified in S. agalactiae <SEQ ID 373> which encodes the amino acid sequence <SEQ ID 374>. Analysis of this protein sequence reveals the following:

| Possible site: 53 | | | | |
|---|---|---|---|---|
| >>> Seems to have no N-terminal signal sequence | | | | |
| | INTEGRAL | Likelihood = −12.21 | Transmembrane | 36-52 (23-59) |

```
----- Final Results -----
                              bacterial membrane --- Certainty = 0.5883(Affirmative) < succ>
                                bacterial outside --- Certainty = 0.0000(Not Clear) < succ>
                            bacterial cytoplasm --- Certainty = 0.0000(Not Clear) < succ>
```

[0969] The protein has homology with the following sequences in the GENPEPT database:

| >GP: AAF04736 GB: AF101781 penicillin-binding protein 1b | | | |
|---|---|---|---|
| [Streptococcus pneumoniae] | | | |
| Identities = 445/769 (57%), Positives = 581/769 (74%), Gaps = 9/769 (1%) | | | |
| Query: | 3 | KGNKKLNSSKLGDYTP----LEFGSIFLRI---VKLLSDFIYVIILLFVMLGVGLAVGYL | 55 |
| | | K K K G T L+ +IF I +K L + ++V+ L MLG G+A+GY | |
| Sbjct: | 21 | KNKKSARPGKKGSSTKKSKTLDKSAIFPAILLSIKALFNLLFVLGFLGGMLGAGIALGYG | 80 |
| Query: | 56 | ASQVDSVKVPSKNSLVTQVNTLTRVSRLTYSDKSQISEIATDLQRTPVAKDAISDNIKKA | 115 |
| | | + D V+VP LV QV ++ +S +TYSD + I+ I +DL RT ++ + IS+N+KKA | |
| Sbjct: | 81 | VALFDKVRVPQTEELVNQVKDISSISEITYSDGTVIASIESDLLRTSISSEQISENLKKA | 140 |
| Query: | 116 | IIATEDENFNDHKGVVPKAVLRAAAGSVLGFGESSGGSTLTQQLLKQQILGDDPSFKRKS | 175 |
| | | IIATEDE+F +HKGVVPKAV+RA G +G G SSGGSTLTQQL+KQQ++GD P+ RK+ | |
| Sbjct: | 141 | IIATEDEHFKEHKGVVPKAVIRATLGKFVGLGSSSGGSTLTQQLIKQQVVGDAPTLARKA | 200 |
| Query: | 176 | KEIIYALALERYMDKDSILSDYLNVSPFGRNNKGQNIAGIEEAAQGIFGVSAKDLTIPQA | 235 |
| | | EI+ ALALER M+KD IL+ YLNV+PFGRNNKGQNIAG +AA+GIFGV A LT+PQA | |
| Sbjct: | 201 | AEIVDALALERAMNKDEILTTYLNVAPFGRNNKGQNIAGARQAAEGIFGVDASQLTVPQA | 260 |
| Query: | 236 | AFLAGLPQSPIVYSPYTADAQLKSDKDLSFGIKRQKNVLYNMYRTRALTKDEYKSYKDYD | 295 |
| | | AFLAGLPQSPI YSPY +LKSD+DL G++R K VLY+MYRT AL+KDEY YKDYD | |
| Sbjct: | 261 | AFLAGLPQSPITYSPYENTGELKSDEDLEIGLRRAKAVLYSMYRTGALSKDEYSQYKDYD | 320 |
| Query: | 296 | IKKDFIKPAVATTNHHDYLYYSALSEAQKVMYNYLIKKDNVSEHDLKNDETRATYRHRAI | 355 |
| | | +K+DF+ T DYLY++ L+EAQ+ MY+YL ++DNVS +LKN+ T+ YR A | |
| Sbjct: | 321 | LKQDFLPSGTVTGISRDYLYFTTLAEAQERMYDYLAQRDNVSAKELKNEATQKFYRDLAA | 380 |
| Query: | 356 | EEIQQGGYTIKTTINKSVYQAMQDAAAQYGGLLDDGTGKVQMGNVLTDNSSGAIIGFIGG | 415 |
| | | +EI+ GGY I TTI++ ++ AMQ A A YG LLDDGTG+V++GNVL DN +GAI+GF+GG | |
| Sbjct: | 381 | KEIENGGYKITTTIDQKIHSAMQSAVADYGYLLDDGTGRVEVGNVLMDNQTGAILGFVGG | 440 |
| Query: | 416 | RNYSENQNNHAFDTARSPGSSIKPILPYGIAIDQGMLGSGSVLSNYPTTYSSGEKIMHAD | 475 |
| | | RNY ENQNNHAFDT RSP S+ KP+L YGIAIDQG++GS ++LSNYPT +++G IM+A+ | |
| Sbjct: | 441 | RNYQENQNNHAFDTKRSPASTTKPLLAYGIAIDQGLMGSETILSNYPTNFANGNPIMYAN | 500 |
| Query: | 476 | EEGTAMVNLQESLDISWNIPAFWTYKMLRDRGVDVKNYMEKLDYPIENFGIESLPLGGGI | 535 |
| | | +GT M+ L E+L+ SWNIPA+WTY+MLR+ GVDVK YMEK+ Y I +GIESLP+GGGI | |
| Sbjct: | 501 | SKGTGMMTLGEALNYSWNIPAYWTYRMLRENGVDVKGYMEKMGYEIPEYGIESLPMGGGI | 560 |
| Query: | 536 | DTSVAQQTNLYQMIANGGVYHKQYMIESIEDSNGKVIYNHESKPVRVFSKATATILQQLL | 595 |
| | | + +VAQ TN YQ +AN GVYH++++I IE ++G+V+Y ++ KPV+V+SKATATI+Q LL | |
| Sbjct: | 561 | EVTVAQHTNGYQTLANNGVYHQKHVISKIEAADGRVVYEYQDKPVQVYSKATATIMQGLL | 620 |
| Query: | 596 | HGPINSGKTTTFKNRLQGLNSGLAGVDWIGKTGTTNSTSDVWLMLSTPKVTLGGWAGHDN | 655 |
| | | ++S TTTFK+ L LN LA DWIGKTGTTN ++WLMLSTP++TLGGW GHD+ | |
| Sbjct: | 621 | REVLSSRVTTTFKSNLTSLNPTLANADWIGKTGTTNQDENMWLMLSTPRLTLGGWIGHDD | 680 |
| Query: | 656 | NASLAKLTGYNNNANYMAHLVNAINNADGNTFGKSERFRLDDSVIKAKVLKSTGLQPGVV | 715 |
| | | N SL++ GY+NN+NYMAHLVNAI A + +G +ERF LD SV+K++VLKSTG +PG V | |
| Sbjct: | 681 | NHSLSRRAGYSNNSNYMAHLVNAIQQASPSIWG-NERFALDPSVVKSEVLKSTGQKPGKV | 739 |
| Query: | 716 | TVNGRRITVGGESTTSYWA-KNGPGTMTYRFAIGGTDSDYQKAWSTLGG | 763 |
| | | +V G+ + V G + TSYWA K+G +YRFAIGG+D+DYQ AWS++ G | |
| Sbjct: | 740 | SVEGKEVEVTGSTVTSYWANKSGAPATSYRFAIGGSDADYQNAWSSIVG | 788 |

[0970] A related DNA sequence was identified in S. pyogenes <SEQ ID 375> which encodes the amino acid sequence <SEQ ID 376>. Analysis of this protein sequence reveals the following:

| Possible site: 57 | | | | |
|---|---|---|---|---|
| >>> Seems to have no N-terminal signal sequence | | | | |
| | INTEGRAL | Likelihood = −4.83 | Transmembrane | 39-55 (32-60) |

```
----- Final Results -----
                              bacterial membrane --- Certainty = 0.2932(Affirmative) < succ>
                                bacterial outside --- Certainty = 0.0000(Not Clear) < succ>
                            bacterial cytoplasm --- Certainty = 0.0000(Not Clear) < succ>
```

[0971] The protein has homology with the following sequences in the databases:

| >GP: AAF04736 GB: AF101781 penicillin-binding protein 1b | | | |
|---|---|---|---|
| [Streptococcus pneumoniae] | | | |
| Identities = 438/739 (59%), Positives = 580/739 (78%), Gaps = 2/739 (0%) | | | |
| Query: | 27 | PVLLRTLRLLSNFFYIVIFLFGMMGFGMAFGYLASQIESVKVPSKESLVKQVESLTMISQ | 86 |
| | | P +L +++ L N +++ FL GM+G G+A GY + + V+VP E LV QV+ ++ IS+ | |
| Sbjct: | 48 | PAILLSIKALFNLLFVLGFLGGMLGAGIALGYGVALFDKVRVPQTEELVNQVKDISSISE | 107 |
| Query: | 87 | MNYSDNSLISTLDTDLLRTPVANDAISENIKKAIVSTEDEHFQEHKGIVPKAVFRATLAS | 146 |
| | | + YSD ++I+++++DLLRT ++++ ISEN+KKAI++TEDEHF+EHKG+VPKAV RATL | |
| Sbjct: | 108 | ITYSDGTVIASIESDLLRTSISSEQISENLKKAIIATEDEHFKEHKGVVPKAVIRATLGK | 167 |
| Query: | 147 | VLGFGEASGGSTLTQQLVKQQVLGDDPTFKRKSKEIVYALALERYMSKDNILCDYLNVSP | 206 |
| | | +G G +SGGSTLTQQL+KQQV+GD PT RK+ EIV ALALER M+KD IL YLNV+P | |
| Sbjct: | 168 | FVGLGSSSGGSTLTQQLIKQQVVGDAPTLARKAAEIVDALALERAMNKDEILTTYLNVAP | 227 |
| Query: | 207 | FGRNNKGQNIAGVEEAARGIFGVSAKDLTVPQAAFLAGLPQSPIVYSPYLSTGQLKSEKD | 266 |
| | | FGRNNKGQNIAG +AA GIFGV A LTVPQAAFLAGLPQSPI YSPY +TG+LKS++D | |
| Sbjct: | 228 | FGRNNKGQNIAGARQAAEGIFGVDASQLTVPQAAFLAGLPQSPITYSPYENTGELKSDED | 287 |
| Query: | 267 | MAYGIKRQQNVLFNMYRTGVLSKKEYEDYKAYPIQKDFIQPGSAIVNNHDYLYYTVLADA | 326 |
| | | + G++R + VL++MYRTG LSK EY YK Y +++DF+ G+ + DYLY+T LA+A | |
| Sbjct: | 288 | LEIGLRRAKAVLYSMYRTGALSKDEYSQYKDYDLKQDFLPSGTVTGISRDYLYFTTLAEA | 347 |
| Query: | 327 | KKAMYSYLIKRDKVSSRDLKNDETKAAYEERALTELQQGGYTITTTINKPIYNAMQTAAA | 386 |
| | | ++ MY YL +RD VS+++LKN+ T+ Y + A E++ GGY ITTTI++ I++AMQ+A A | |
| Sbjct: | 348 | QERMYDYLAQRDNVSAKELKNEATQKFYRDLAAKEIENGGYKITTTIDQKIHSAMQSAVA | 407 |
| Query: | 387 | QFGGLLDDGTGTVQMGNVLTDNATGAVLGFVGGRDYALNQNNHAFNTVRSPGSSIKPIIA | 446 |
| | | +G LLDDGTG V++GNVL DN TGA+LGFVGGR+Y NQNNHAF+T RSP S+ KP++A | |
| Sbjct: | 408 | DYGYLLDDGTGRVEVGNVLMDNQTGAILGFVGGRNYQENQNNHAFDTKRSPASTTKPLLA | 467 |
| Query: | 447 | YGPAIDQGLMGSASVLSNYPTTYSSGQKIMHADSEGTAMMPLQEALNTSWNIPAFWTQKL | 506 |
| | | YG AIDQGLMGS ++LSNYPT +++G IM+A+S+GT MM L EALN SWNIPA+WT ++ | |
| Sbjct: | 468 | YGIAIDQGLMGSETILSNYPTNFANGNPIMYANSKGTGMMTLGEALNYSWNIPAYWTYRM | 527 |
| Query: | 507 | LREKGVDVENYMTKMGYKIADYSIESLPLGGGIEVSVAQQTNAYQMLSNNGLYQKQYIVD | 566 |
| | | LRE GVDV+ YM KMGY+I +Y IESLP+GGGIEV+VAQ TN YQ L+NNG+Y +++++ | |
| Sbjct: | 528 | LRENGVDVKGYMEKMGYEIPEYGIESLPMGGGIEVTVAQHTNGYQTLANNGVYHQKHVIS | 587 |
| Query: | 567 | KITASDGTVVYKHENKPIRIFSAATATILQELLRGPITSGATTTFKNRLAAINPWLANAD | 626 |
| | | KI A+DG VVY++++KP++++S ATATI+Q LLR ++S TTTFK+ L ++NP LANAD | |
| Sbjct: | 588 | KIEAADGRVVYEYQDKPVQVYSKATATIMQGLLREVLSSRVTTTFKSNLTSLNPTLANAD | 647 |
| Query: | 627 | WIGKTGTTENYTDVWLVLSTPKVTLGGWAGHDDNTSLAPLTGYNNNSNYLAYLANAINQA | 686 |
| | | WIGKTGTT ++WL+LSTP++TLGGW GHDDN SL+ GY+NNSNY+A+L NAI QA | |
| Sbjct: | 648 | WIGKTGTTNQDENMWLMLSTPRLTLGGWIGHDDNHSLSRRAGYSNNSNYMAHLVNAIQQA | 707 |
| Query: | 687 | DPNVIGVGQRFNLDPGVIKANVLKSTGLQPGTVNVNGHTFSVGGEMTTSLWSQK-GPGAM | 745 |
| | | P++ G +RF LDP V+K+ VLKSTG +PG V+V G V G TS W+ K G A | |
| Sbjct: | 708 | SPSIWG-NERFALDPSVVKSEVLKSTGQKPGKVSVEGKEVEVTGSTVTSYWANKSGAPAT | 766 |
| Query: | 746 | TYRFAIGGTDADYQKAWGN | 764 |
| | | +YRFAIGG+DADYQ AW + | |
| Sbjct: | 767 | SYRFAIGGSDADYQNAWSS | 785 |

[0972] An alignment of the GAS and GBS proteins is shown below:

| Identities = 531/760 (69%), Positives = 639/760 (83%), Gaps = 3/760 (0%) | | | |
|---|---|---|---|
| Query: | 6 | KKLNSSKLGDYTPLEFGSIFLRIVKLLSDFIYVIILLFVMLGVGLAVGYLASQVDSVKVP | 65 |
| | | K+++ +LG L+ G + LR ++LLS+F Y++I LF M+G G+A GYLASQ++SVKVP | |
| Sbjct: | 13 | KRISHQRLG---LLDLGPVLLRTLRLLSNFFYIVIFLFGMMGFGMAFGYLASQIESVKVP | 69 |
| Query: | 66 | SKNSLVTQVNTLTRVSRLTYSDKSQISEIATDLQRTPVAKDAISDNIKKAIIATEDENFN | 125 |
| | | SK SLV QV +LT +S++ YSD S IS + TDL RTPVA DAIS+NIKKAI++TEDE+F | |
| Sbjct: | 70 | SKESLVKQVESLTMISQMNYSDNSLISTLDTDLLRTPVANDAISENIKKAIVSTEDEHFQ | 129 |
| Query: | 126 | DHKGVVPKAVLRAAAGSVLGFGESSGGSTLTQQLLKQQILGDDPSFKRKSKEIIYALALE | 185 |
| | | +HKG+VPKAV RA SVLGFGE+SGGSTLTQQL+KQQ+LGDDP+FKRKSKEI+YALALE | |
| Sbjct: | 130 | EHKGIVPKAVFRATLASVLGFGEASGGSTLTQQLVKQQVLGDDPTFKRKSKEIVYALALE | 189 |
| Query: | 186 | RYMDKDSILSDYLNVSPFGRNNKGQNIAGIEEAAQGIFGVSAKDLTIPQAAFLAGLPQSP | 245 |
| | | RYM KD+IL DYLNVSPFGRNNKGQNIAG+EEAA+GIFGVSAKDLT+PQAAFLAGLPQSP | |
| Sbjct: | 190 | RYMSKDNILCDYLNVSPFGRNNKGQNIAGVEEAARGIFGVSAKDLTVPQAAFLAGLPQSP | 249 |
| Query: | 246 | IVYSPYTADAQLKSDKDLSFGIKRQKNVLYNMYRTRALTKDEYKSYKDYDIKKDFIKPAV | 305 |
| | | IVYSPY + QLKS+KD+++GIKRQ+NVL+NMYRT L+K EY+ YK Y I+KDFI+P | |
| Sbjct: | 250 | IVYSPYLSTGQLKSEKDMAYGIKRQQNVLFNMYRTGVLSKKEYEDYKAYPIQKDFIQPGS | 309 |
| Query: | 306 | ATTNHHDYLYYSALSEAQKVMYNYLIKKDNVSEHDLKNDETRATYRHRAIEEIQQGGYTI | 365 |
| | | A N+HDYLYY+ L++A+K MY+YLIK+D VS DLKNDET+A Y RA+ E+QQGGYTI | |
| Sbjct: | 310 | AIVNNHDYLYYTVLADAKKAMYSYLIKRDKVSSRDLKNDETKAAYEERALTELQQGGYTI | 369 |
| Query: | 366 | KTTINKSVYQAMQDAAAQYGGLLDDGTGKVQMGNVLTDNSSGAIIGFIGGRNYSENQNNH | 425 |
| | | TTINK +Y AMQ AAAQ+GGLLDDGTG VQMGNVLTDN++GA++GF+GGR+Y+ NQNNH | |
| Sbjct: | 370 | TTTINKPIYNAMQTAAAQFGGLLDDGTGTVQMGNVLTDNATGAVLGFVGGRDYALNQNNH | 429 |
| Query: | 426 | AFDTARSPGSSIKPILPYGIAIDQGMLGSGSVLSNYPTTYSSGEKIMHADEEGTAMVNLQ | 485 |
| | | AF+T RSPGSSIKPI+ YG AIDQG++GS SVLSNYPTTYSSG+KIMHAD EGTAM+ LQ | |
| Sbjct: | 430 | AFNTVRSPGSSIKPIIAYGPAIDQGLMGSASVLSNYPTTYSSGQKIMHADSEGTAMMPLQ | 489 |
| Query: | 486 | ESLDISWNIPAFWTYKMLRDRGVDVKNYMEKLDYPIENFGIESLPLGGGIDTSVAQQTNL | 545 |
| | | E+L+ SWNIPAFWT K+LR++GVDV+NYM K+ Y I ++ IESLPLGGGI+ SVAQQTN | |
| Sbjct: | 490 | EALNTSWNIPAFWTQKLLREKGVDVENYMTKMGYKIADYSIESLPLGGGIEVSVAQQTNA | 549 |
| Query: | 546 | YQMIANGGVYHKQYMIESIEDSNGKVIYNHESKPVRVFSKATATILQQLLHGPINSGKTT | 605 |
| | | YQM++N G+Y KQY+++ I S+G V+Y HE+KP+R+FS ATATILQ+LL GPI SG TT | |
| Sbjct: | 550 | YQMLSNNGLYQKQYIVDKITASDGTVVYKHENKPIRIFSAATATILQELLRGPITSGATT | 609 |
| Query: | 606 | TFKNRLQGLNSGLAGVDWIGKTGTTNSTSDVWLMLSTPKVTLGGWAGHDNNASLAKLTGY | 665 |
| | | TFKNRL +N LA DWIGKTGTT + +DVWL+LSTPKVTLGGWAGHD+N SLA LTGY | |
| Sbjct: | 610 | TFKNRLAAINPWLANADWIGKTGTTENYTDVWLVLSTPKVTLGGWAGHDDNTSLAPLTGY | 669 |
| Query: | 666 | NNNANYMAHLVNAINNADGNTFGKSERFRLDDSVIKAKVLKSTGLQPGVVTVNGRRITVG | 725 |
| | | NNN+NY+A+L NAIN AD N G +RF LD VIKA VLKSTGLQPG V VNG +VG | |
| Sbjct: | 670 | NNNSNYLAYLANAINQADPNVIGVGQRFNLDPGVIKANVLKSTGLQPGTVNVNGHTFSVG | 729 |
| Query: | 726 | GESTTSYWAKNGPGTMTYRFAIGGTDSDYQKAWSTLGGKR | 765 |
| | | GE TTS W++ GPG MTYRFAIGGTD+DYQKAW G ++ | |
| Sbjct: | 730 | GEMTTSLWSQKGPGAMTYRFAIGGTDADYQKAWGNFGFRK | 769 |

[0973] SEQ ID 374 (GBS64d) was expressed in E. coli as a GST-fusion product. SDS-PAGE analysis of total cell extract is shown in FIG. 120 (lane 24; MW 107 kDa). It was also expressed in E. coli as a His-fusion product. SDS-PAGE analysis of total cell extract is shown in FIG. 120 (lane 5-7; MW 82 kDa) and in FIG. 179 (lane 2; MW 82 kDa).

[0974] GBS64d-His was purified as shown in FIG. 231, lane 7-8.

[0975] Based on this analysis, it was predicted that these proteins and their epitopes could be useful antigens for vaccines or diagnostics.

### EXAMPLE 113

[0976] A DNA sequence (GBSx0116) was identified in S. agalactiae <SEQ ID 377> which encodes the amino acid sequence <SEQ ID 378>. This protein is predicted to be DNA-dependent RNA polymerase subunit beta (rpoB). Analysis of this protein sequence reveals the following:

```
Possible site: 61
>>> Seems to have no N-terminal signal sequence
----- Final Results -----
                            bacterial cytoplasm --- Certainty = 0.3505(Affirmative) < succ>
                              bacterial membrane --- Certainty = 0.0000(Not Clear) < succ>
                                bacterial outside --- Certainty = 0.0000(Not Clear) < succ>
```

[0977] The protein has homology with the following sequences in the GENPEPT database:

| >GP: CAB56706 GB: Y16468 DNA-dependent RNA polymerase subunit beta | | | |
|---|---|---|---|
| [Listeria monocytogenes] | | | |
| Identities = 814/1173 (69%), Positives = 978/1173 (82%), Gaps = 17/1173 (1%) | | | |
| Query: | 2 | AGHEVQYGKHRTRRSFSRIKEVLDLPNLIEIQTDSFQDFLDAGLKEVFEDVLPISNFTDT | 61 |
| | | +GH+V+YG+HRTRRSF+RI EVL+LPNLIEIQT S+Q FLD GL+E+F D+ PI +F | |
| Sbjct: | 5 | SGHDVKYGRHRTRRSFARISEVLELPNLIEIQTASYQWFLDEGLREMFRDISPIEDFAGN | 64 |
| Query: | 62 | MDLEFVGYELKEPKYTLEEARIHDASYSAPIFVTFRLVNKETGEIKTQEVFFGDFPIMTE | 121 |
| | | + LEF+ Y+L EPKY++EE++ DA+Y+AP+ V RL+NKETGE+K QEVF GDFP+MTE | |
| Sbjct: | 65 | LSLEFIDYDLGEPKYSVEESKNRDANYAAPLRVKLRLINKETGEVKDQEVFMGDFPLMTE | 124 |
| Query: | 122 | MGTFIINGGERIIVSQLVRSPGVYFNDKVDKNGKVGYGSTVIPNRGAWLELETDAKDIAY | 181 |
| | | MGTFIING ER+IVSQLVRSPGVYFN K+DKNGK G+GSTVIPNRGAWLE ETDAKD+ + | |
| Sbjct: | 125 | MGTFIINGAERVIVSQLVRSPGVYFNGKLDKNGKKGFGSTVIPNRGAWLEYETDAKDVVH | 184 |
| Query: | 182 | TRIDRTRKIPFTTLVRALGFSGDDEIVDIFGDSELVRNTIEKDIHKNPSDSRTDEALKEI | 241 |
| | | RIDRTRK+P T L+RALGF D EI+D+ GD++ +RNT+EKD N ++AL EI | |
| Sbjct: | 185 | VRIDRTRKLPVTVLLRALGFGSDQEIIDLIGDNDYLRNTLEKDNTDN-----AEKALLEI | 239 |
| Query: | 242 | YERLRPGEPKTADSSRSLLVARFFDPRRYDLAAVGRYKINKKLNLKTRLLNQTIAENLVD | 301 |
| | | YERLRPGEP T D++RSLLV+RFFDP+RYDLA+VGRYKINKKL+LK RL NQT+AE LVD | |
| Sbjct: | 240 | YERLRPGEPPTVDNARSLLVSRFFDPKRYDLASVGRYKINKKLHLKNRLFNQTLAETLVD | 299 |
| Query: | 302 | GETGEILVEAGTVMTRDVIDSIAEHIDGDLNKFVYTPNDYAVVTEPVILQKFKVVAPTDP | 361 |
| | | ETGEI+ G ++ R +D I +++ + P D V+ + V++Q K+ AP D | |
| Sbjct: | 300 | PETGEIIASKGDILDRRNLDQIIPNLENGVGFRTLRPTD-GVMEDSVLVQSIKIYAPNDE | 358 |
| Query: | 362 | DRVVTIVGNSNPEDKVRALTPADILAEMSYFLNLAEGIGKVDDIDHLGNRRIRAVGELLA | 421 |
| | | ++ + I+GN+ E+ V+ +TP+DI++ +SYF NL G+G DDIDHLGNRR+R+VGELL | |
| Sbjct: | 359 | EKEINIIGNAYIEENVKHITPSDIISSISYFFNLLHGVGDTDDIDHLGNRRLRSVGELLQ | 418 |
| Query: | 422 | NQFRIGLARMERNVRERMSVQDNEVLTPQQIINIRPVTAAVKEFFGSSQLSQFMDQHNPL | 481 |
| | | NQFRIGL+RMER VRERMS+QD +TPQQ+INIRPV A++KEFFGSSQLSQFMDQ NPL | |
| Sbjct: | 419 | NQFRIGLSRMERVVRERMSIQDMTTITPQQLINIRPVVASIKEFFGSSQLSQFMDQTNPL | 478 |
| Query: | 482 | SELSHKRRLSALGPGGLTRDRAGYEVRDVHYTHYGRMCPIETPEGPNIGLINNLSSFGHL | 541 |
| | | EL+HKRRLSALGPGGLTR+RAGYEVRDVHY+HYGRMCPIETPEGPNIGLIN+LSSF + | |
| Sbjct: | 479 | GELTHKRRLSALGPGGLTRERAGYEVRDVHYSHYGRMCPIETPEGPNIGLINSLSSFAKV | 538 |
| Query: | 542 | NKYGFIQTPYRKVDRSTGAVTNEIVWLTADEEDEFTVAQANSKLNEDGTFAEEIVMGRHQ | 601 |
| | | NK+GFI+TPYR+VD T VT++I +LTADEED + VAQANSKL+E GTF EE VM R + | |
| Sbjct: | 539 | NKFGFIETPYRRVDPETNRVTDKIDYLTADEEDNYVVAQANSKLDEQGTFTEEEVMARFR | 598 |
| Query: | 602 | GNNQEFPSSIVDFVDVSPKQVVAVATACIPFLENDDSNRALMGANMQRQAVPLIDPKAPY | 661 |
| | | N +D++DVSPKQVV+VATACIPFLENDDSNRALMGANMQRQAVPL+ P+AP+ | |
| Sbjct: | 599 | SENLAVEKERIDYMDVSPKQVVSVATACIPFLENDDSNRALMGANMQRQAVPLMHPEAPF | 658 |
| Query: | 662 | VGTGMEYQAAHDSGAAVIAKHDGRVIFSDAEKVEVRRED--------GSLDVYHVQKFRR | 713 |
| | | VGTGME+ +A DSGAAV AKHDG V +A ++ VRR G +D Y ++KF R | |
| Sbjct: | 659 | VGTGMEHVSAKDSGAAVTAKHDGIVEHVEAREIWVRRVSLVDGKEVTGGIDKYTLRKFVR | 718 |
| Query: | 714 | SNSGTAYNQRTLVKVGDLVEKGDFIADGPSMENGEMALGQNPVVAYMTWEGYNFEDAVIM | 773 |
| | | SN GT YNQR V GD V KG+ + +GPSM++GE+ALG+N +VA+MTW+GYN+EDA+IM | |
| Sbjct: | 719 | SNQGTCYNQRPNVAEGDRVVKGEILGNGPSMDSGELALGRNVLVAFMTWDGYNYEDAIIM | 778 |
| Query: | 774 | SERLVKEDVYTSVHLEEFESETRDTKLGPEEITREIPNVGEDSLRDLDEMGIIRIGAEVK | 833 |
| | | SERLVK+DVYTS+H+EEFESE RDTKLGPEE+TR+IPNVGED+LRDLDE GIIR+GAEVK | |
| Sbjct: | 779 | SERLVKDDVYTSIHIEEFESEARDTKLGPEEMTRDIPNVGEDALRDLDERGIIRVGAEVK | 838 |
| Query: | 834 | EGDILVGKVTPKGEKDLSAEERLLHAIFGDKSREVRDTSLRVPHGGDGVVRDVKIFTRAN | 893 |
| | | + D+LVGKVTPKG +L+AEERLLHAIFG+K+REVRDTSLRVPHGG G+V DVKIFTR | |
| Sbjct: | 839 | DNDLLVGKVTPKGVTELTAEERLLHAIFGEKAREVRDTSLRVPHGGGGIVLDVKIFTREA | 898 |
| Query: | 894 | GDELQSGVNMLVRVYIAQKRKIKVGDKMAGRHGNKGVVSRIVPVEDMPYLPDGTPVDIML | 953 |
| | | GDEL GVN LVRVYI QKRKI GDKMAGRHGNKGV+SRI+P EDMP++PDGTPVDIML | |
| Sbjct: | 899 | GDELPPGVNQLVRVYIVQKRKIHEGDKMAGRHGNKGVISRILPEEDMPFMPDGTPVDIML | 958 |
| Query: | 954 | NPLGVPSRMNIGQVMELHLGMAARNLGIHIATPVFDGASSEDLWETVQEAGMDSDAKTVL | 1013 |
| | | NPLGVPSRMNIGQV+ELHLGMAAR LGIH+ATPVFDGA+ ED+W TV+EAGM DAKT+L | |
| Sbjct: | 959 | NPLGVPSRMNIGQVLELHLGMAARALGIHVATPVFDGANEEDVWSTVEEAGMARDAKTIL | 1018 |
| Query: | 1014 | YDGRTGEPFDNRVSVGVMYMIKLHHMVDDKLHARSVGPYSLVTQQPLGGKAQFGGQRFGE | 1073 |
| | | YDGR+GE FDNR+SVGVMYMIKL HMVDDKLHARS GPYSLVTQQPLGGKAQFGGQRFGE | |
| Sbjct: | 1019 | YDGRSGEAFDNRISVGVMYMIKLAHMVDDKLHARSTGPYSLVTQQPLGGKAQFGGQRFGE | 1078 |
| Query: | 1074 | MEVWALEAYGASNVLQEILTYKSDDVTGRLKAYEAITKGKPIPKPGVPESFRVLVKELQS | 1133 |
| | | MEVWALEAYGA+ LQEILT KSDDV GR+K YEAI KG+ +P+PGVPESF+VL+KELQS | |
| Sbjct: | 1079 | MEVWALEAYGAAYTLQEILTIKSDDVVGRVKTYEAIVKGESVPEPGVPESFKVLIKELQS | 1138 |
| Query: | 1134 | LGLDMRVLDEDDNEVELRDLDEGEDDDVMHVDD | 1166 |
| | | LG+D+++L D+ E+E+RD+D DDD + +D | |
| Sbjct: | 1139 | LGMDVKMLSADEEEIEMRDMD---DDDFTNQND | 1168 |

[0978] A related DNA sequence was identified in S. pyogenes <SEQ ID 379> which encodes the amino acid sequence <SEQ ID 380>. Analysis of this protein sequence reveals the following:

```
Possible site: 61
>>> Seems to have no N-terminal signal sequence
----- Final Results -----
                            bacterial cytoplasm --- Certainty = 0.3392(Affirmative) < succ>
                              bacterial membrane --- Certainty = 0.0000(Not Clear) < succ>
                                bacterial outside --- Certainty = 0.0000(Not Clear) < succ>
```

[0979] An alignment of the GAS and GBS proteins is shown below:

| Identities = 1129/1190 (94%), Positives = 1168/1190 (97%), Gaps = 3/1190 (0%) | | | |
|---|---|---|---|
| Query: | 1 | MAGHEVQYGKHRTRRSFSRIKEVLDLPNLIEIQTDSFQDFLDAGLKEVFEDVLPISNFTD | 60 |
| | | +AGHEV+YGKHRTRRSFSRIKEVLDLPNLIEIQTDSFQDFLD+GLKEVFEDVLPISNFTD | |
| Sbjct: | 1 | LAGHEVRYGKHRTRRSFSRIKEVLDLPNLIEIQTDSFQDFLDSGLKEVFEDVLPISNFTD | 60 |
| Query: | 61 | TMDLEFVGYELKEPKYTLEEARIHDASYSAPIFVTFRLVNKETGEIKTQEVFFGDFPIMT | 120 |
| | | TM+LEFVGYE KEPKYTLEEARIHDASYSAPIFVTFRLVNKETGEIKTQEVFFGDFPIMT | |
| Sbjct: | 61 | TMELEFVGYEFKEPKYTLEEARIHDASYSAPIFVTFRLVNKETGEIKTQEVFFGDFPIMT | 120 |
| Query: | 121 | EMGTFIINGGERIIVSQLVRSPGVYFNDKVDKNGKVGYGSTVIPNRGAWLELETDAKDIA | 180 |
| | | EMGTFIINGGERIIVSQLVRSPGVYFNDKVDKNGKVGYGSTVIPNRGAWLELETD+KDIA | |
| Sbjct: | 121 | EMGTFIINGGERIIVSQLVRSPGVYFNDKVDKNGKVGYGSTVIPNRGAWLELETDSKDIA | 180 |
| Query: | 181 | YTRIDRTRKIPFTTLVRALGFSGDDEIVDIFGDSELVRNTIEKDIHKNPSDSRTDEALKE | 240 |
| | | YTRIDRTRKIPFTTLVRALGFSGDDEIVDIFG+S+LVRNTIEKDIHKNPSDSRTDEALKE | |
| Sbjct: | 181 | YTRIDRTRKIPFTTLVRALGFSGDDEIVDIFGESDLVRNTIEKDIHKNPSDSRTDEALKE | 240 |
| Query: | 241 | IYERLRPGEPKTADSSRSLLVARFFDPRRYDLAAVGRYKINKKLNLKTRLLNQTIAENLV | 300 |
| | | IYERLRPGEPKTADSSRSLL+ARFFD RRYDLAAVGRYK+NKKLN+KTRLLNQ IAENLV | |
| Sbjct: | 241 | IYERLRPGEPKTADSSRSLLIARFFDARRYDLAAVGRYKVNKKLNIKTRLLNQIIAENLV | 300 |
| Query: | 301 | DGETGEILVEAGTVMTRDVIDSIAEHIDGDLNKFVYTPNDYAVVTEPVILQKFKVVAPTD | 360 |
| | | D ETGEILVEAGT MTR VI+SI EH+DGDLNKFVYTPNDYAVVTEPV+LQKFKVV+P D | |
| Sbjct: | 301 | DAETGEILVEAGTEMTRSVIESIEEHLDGDLNKFVYTPNDYAVVTEPVVLQKFKVVSPID | 360 |
| Query: | 361 | PDRVVTIVGNSNPEDKVRALTPADILAEMSYFLNLAEGIGKVDDIDHLGNRRIRAVGELL | 420 |
| | | PDRVVTIVGN+NP+DKVRALTPADILAEMSYFLNLAEG+GKVDDIDHLGNRRIRAVGELL | |
| Sbjct: | 361 | PDRVVTIVGNANPDDKVRALTPADILAEMSYFLNLAEGLGKVDDIDHLGNRRIRAVGELL | 420 |
| Query: | 421 | ANQFRIGLARMERNVRERMSVQDNEVLTPQQIINIRPVTAAVKEFFGSSQLSQFMDQHNP | 480 |
| | | ANQFRIGLARMERNVRERMSVQDN+VLTPQQIINIRPVTAAVKEFFGSSQLSQFMDQHNP | |
| Sbjct: | 421 | ANQFRIGLARMERNVRERMSVQDNDVLTPQQIINIRPVTAAVKEFFGSSQLSQFMDQHNP | 480 |
| Query: | 481 | LSELSHKRRLSALGPGGLTRDRAGYEVRDVHYTHYGRMCPIETPEGPNIGLINNLSSFGH | 540 |
| | | LSELSHKRRLSALGPGGLTRDRAGYEVRDVHYTHYGRMCPIETPEGPNIGLINNLSSFGH | |
| Sbjct: | 481 | LSELSHKRRLSALGPGGLTRDRAGYEVRDVHYTHYGRMCPIETPEGPNIGLINNLSSFGH | 540 |
| Query: | 541 | LNKYGFIQTPYRKVDRSTGAVTNEIVWLTADEEDEFTVAQANSKLNEDGTFAEEIVMGRH | 600 |
| | | LNKYGFIQTPYRKVDR+TG VTNEIVWLTADEEDE+TVAQANSKLNEDGTFAEEIVMGRH | |
| Sbjct: | 541 | LNKYGFIQTPYRKVDRATGTVTNEIVWLTADEEDEYTVAQANSKLNEDGTFAEEIVMGRH | 600 |
| Query: | 601 | QGNNQEFPSSIVDFVDVSPKQVVAVATACIPFLENDDSNRALMGANMQRQAVPLIDPKAP | 660 |
| | | QGNNQEF +S+VDFVDVSPKQVVAVATACIPFLENDDSNRALMGANMQRQAVPLIDPRAP | |
| Sbjct: | 601 | QGNNQEFSASVVDFVDVSPKQVVAVATACIPFLENDDSNRALMGANMQRQAVPLIDPKAP | 660 |
| Query: | 661 | YVGTGMEYQAAHDSGAAVIAKHDGRVIFSDAEKVEVRREDGSLDVYHVQKFRRSNSGTAY | 720 |
| | | YVGTGMEYQAAHDSGAAVIA+ +G+V+FSDAEKVE+RR+DGSLDVYH+ KFRRSNSGTAY | |
| Sbjct: | 661 | YVGTGMEYQAAHDSGAAVIAQQNGKVVFSDAEKVEIRRQDGSLDVYHITKFRRSNSGTAY | 720 |
| Query: | 721 | NQRTLVKVGDLVEKGDFIADGPSMENGEMALGQNPVVAYMTWEGYNFEDAVIMSERLVKE | 780 |
| | | NQRTLVKVGD+VEKGDFIADGPSMENGEMALGQNPVVAYMTWEGYNFEDAVIMSERLVKE | |
| Sbjct: | 721 | NQRTLVKVGDIVEKGDFIADGPSMENGEMALGQNPVVAYMTWEGYNFEDAVIMSERLVKE | 780 |
| Query: | 781 | DVYTSVHLEEFESETRDTKLGPEEITREIPNVGEDSLRDLDEMGIIRIGAEVKEGDILVG | 840 |
| | | DVYTSVHLEEFESETRDTKLGPEEITREIPNVGE++L+DLDEMGIIRIGAEVKEGDILVG | |
| Sbjct: | 781 | DVYTSVHLEEFESETRDTKLGPEEITREIPNVGEEALKDLDEMGIIRIGAEVKEGDILVG | 840 |
| Query: | 841 | KVTPKGEKDLSAEERLLHAIFGDKSREVRDTSLRVPHGGDGVVRDVKIFTRANGDELQSG | 900 |
| | | KVTPKGEKDLSAEERLLHAIFGDKSREVRDTSLRVPHGGDG+VRDVKIFTRANGDELQSG | |
| Sbjct: | 841 | KVTPKGEKDLSAEERLLHAIFGDKSREVRDTSLRVPHGGDGIVRDVIKFTRANGDELQSG | 900 |
| Query: | 901 | VNMLVRVYIAQKRKIKVGDKMAGRHGNKGVVSRIVPVEDMPYLPDGTPVDIMLNPLGVPS | 960 |
| | | VNMLVRVYIAQKRKIKVGDKMAGRHGNKGVVSRIVPVEDMPYLPDGTPVDIMLNPLGVPS | |
| Sbjct: | 901 | VNMLVRVYIAQKRKIKVGDKMAGRHGNKGVVSRIVPVEDMPYLPDGTPVDIMLNPLGVPS | 960 |
| Query: | 961 | RMNIGQVMELHLGMAARNLGIHIATPVFDGASSEDLWETVQEAGMDSDAKTVLYDGRTGE | 1020 |
| | | RMNIGQVMELHLGMAARNLGIHIATPVFDGASSEDLW+TV+EAGMDSDAKTVLYDGRTGE | |
| Sbjct: | 961 | RMNIGQVMELHLGMAARNLGIHIATPVFDGASSEDLWDTVREAGMDSDAKTVLYDGRTGE | 1020 |
| Query: | 1021 | PFDNRVSVGVMYMIKLHHMVDDKLHARSVGPYSLVTQQPLGGKAQFGGQRFGEMEVWALE | 1080 |
| | | PFDNRVSVGVMYMIKLHHMVDDKLHARSVGPYSLVTQQPLGGKAQFGGQRFGEMEVWALE | |
| Sbjct: | 1021 | PFDNRVSVGVMYMIKLHHMVDDKLHARSVGPYSLVTQQPLGGKAQFGGQRFGEMEVWALE | 1080 |
| Query: | 1081 | AYGASNVLQEILTYKSDDVTGRLKAYEAITKGKPIPKPGVPESFRVLVKELQSLGLDMRV | 1140 |
| | | AYGASNVLQEILTYKSDDVTGRLKAYEAITKGKPIPKPGVPESFRVLVKELQSLGLDMRV | |
| Sbjct: | 1081 | AYGASNVLQEILTYKSDDVTGRLKAYEAITKGKPIPKPGVPESERVLVKELQSLGLDNRV | 1140 |
| Query: | 1141 | LDEDDNEVELRDLDEGEDDDVMHVDDLEKARVKQEAEEKQAEQVSEVVQE | 1190 |
| | | LDEDDNEVELRDLDEGEDDD+MHVDDLEKAR KQ E ++VSE E | |
| Sbjct: | 1141 | LDEDDNEVELRDLDEGEDDDIMHVDDLEKAREKQAQE---TQEVSETTDE | 1187 |

[0980] Based on this analysis, it was predicted that these proteins and their epitopes could be useful antigens for vaccines or diagnostics.

### EXAMPLE 114

[0981] A DNA sequence (GBSx0118) was identified in S. agalactiae <SEQ ID 381> which encodes the amino acid sequence <SEQ ID 382>. This protein is predicted to be DNA-directed RNA polymerase, beta subunit (rpoC). Analysis of this protein sequence reveals the following:

Possible site: 32
>>> Seems to have no N-terminal signal sequence
----- Final Results -----
bacterial cytoplasm --- Certainty = 0.1892 (Affirmative) < succ>
bacterial membrane --- Certainty = 0.0000 (Not Clear) < succ>
bacterial outside --- Certainty = 0.0000 (Not Clear) < succ>

[0982] A related DNA sequence was identified in S. pyogenes <SEQ ID 383> which encodes the amino acid sequence <SEQ ID 384>. Analysis of this protein sequence reveals the following:

Possible site: 22
>>> Seems to have no N-terminal signal sequence
----- Final Results -----
bacterial cytoplasm --- Certainty = 0.2128 (Affirmative) < succ>
bacterial membrane --- Certainty = 0.0000 (Not Clear) < succ>
bacterial outside --- Certainty = 0.0000 (Not Clear) < succ>

[0983] An alignment of the GAS and GBS proteins is shown below:

| Identities = 1148/1205 (95%), Positives = 1177/1205 (97%) | | | |
|---|---|---|---|
| Query: | 11 | VVDVNRFKSMQITLASPSKVRSWSYGEVKKPETINYRTLKPEREGLFDEVIFGPTKDWEC | 70 |
| | | VVDVNRFKSMQITLASPSKVRSWSYGEVKKPETINYRTLKPEREGLFDEVIFGPTKDWEC | |
| Sbjct: | 1 | VVDVNRFKSMQITLASPSKVRSWSYGEVKKPETINYRTLKPEREGLFDEVIFGPTKDWEC | 60 |
| Query: | 71 | ACGKYKRIRYKGIICDRCGVEVTRAKVRRERMGHIELKAPVSHIWYFKGIPSRMGLTLDM | 130 |
| | | ACGKYKRIRYKGI+CDRCGVEVTRAKVRRERMGHIELKAPVSHIWYFKGIPSRMGLTLDM | |
| Sbjct: | 61 | ACGKYKRIRYKGIVCDRCGVEVTRAKVRRERMGHIELKAPVSHIWYFKGIPSRMGLTLDM | 120 |
| Query: | 131 | SPRALEEVIYFAAYVVIDPMDTPLEPKSLLTEREYREKLQEYGYGSFVAKMGAEAIQDLL | 190 |
| | | SPRALEEVIYFAAYVVIDP DTPLEPKSLLTEREYREKLQEYG+GSFVAKMGAEAIQDLL | |
| Sbjct: | 121 | SPRALEEVIYFAAYVVIDPKDTPLEPKSLLTEREYREKLQEYGHGSFVAKMGAEAIQDLL | 180 |
| Query: | 191 | KRVDLDAEIAVLKEELKSATGQKRVKAVRRLDVLDAFKKSGNKPEWMVLNILPVIPPDLR | 250 |
| | | KRVDL AEIA LKEELKSA+GQKR+KAVRRLDVLDAF KSGNKPEWMVLNILPVIPPDLR | |
| Sbjct: | 181 | KRVDLAAEIAELKEELKSASGQKRIKAVRRLDVLDAFNKSGNKPEWMVLNILPVIPPDLR | 240 |
| Query: | 251 | PMVQLDGGRFAASDLNDLYRRVINRNNRLARLLELNAPGIIVQNEKRMLQEAVDALIDNG | 310 |
| | | PMVQLDGGRFAASDLNDLYRRVINRNNRLARLLELNAPGIIVQNEKRMLQEAVDALIDNG | |
| Sbjct: | 241 | PMVQLDGGRFAASDLNDLYRRVINRNNRLARLLELNAPGIIVQNEKRMLQEAVDALIDNG | 300 |
| Query: | 311 | RRGRPITGPGSRPLKSLSHMLKGKQGRFRQNLLGKRVDFSGRSVIAVGPTLKMYQCGVPR | 370 |
| | | RRGRPITGPGSRPLKSLSHMLKGKQGRFRQNLLGKRVDFSGRSVIAVGPTLKMYQCGVPR | |
| Sbjct: | 301 | RRGRPITGPGSRPLKSLSHMLKGKQGRFRQNLLGKRVDFSGRSVIAVGPTLKMYQCGVPR | 360 |
| Query: | 371 | EMAIELFKPFVMREIVARDLAGNVKAAKRMVERGDERIWDILEEVIKEHPVLLNRAPTLH | 430 |
| | | EMAIELFKPFVMREIVA++ AGNVKAAKRMVERGDERIWDILEEVIKEHPVLLNRAPTLH | |
| Sbjct: | 361 | EMAIELFKPFVMREIVAKEYAGNVKAAKRMVERGDERIWDILEEVIKEHPVLLNRAPTLH | 420 |
| Query: | 431 | RLGIQAFEPVLIDGKALRLHPLVCEAYNADFDGDQMAIHVPLSEEAQAEARLLMLAAEHI | 490 |
| | | RLGIQAFEPVLIDGKALRLHPLVCEAYNADFDGDQMAIHVPLSEEAQAEARLLMLAAEHI | |
| Sbjct: | 421 | RLGIQAFEPVLIDGKALRLHPLVCEAYNADFDGDQMAIHVPLSEEAQAEARLLMLAAEHI | 480 |
| Query: | 491 | LNPKDGKPVVTPSQDMVLGNYYLTMEDAGREGEGMIFKDHDEAVMAYQNGYVHLHTRVGI | 550 |
| | | LNPKDGKPVVTPSQDMVLGNYYLTMEDAGREGEGMIFKD DEAVMAY+NGY HLH+RVGI | |
| Sbjct: | 481 | LNPKDGKPVVTPSQDMVLGNYYLTMEDAGREGEGMIFKDKDEAVMAYRNGYAHLHSRVGI | 540 |
| Query: | 551 | AVDSMPNKPWTEEQKHKIMVTTVGKILFNDIMPEDLPYLIEPNNANLTEKTPDKYFLEPG | 610 |
| | | AVDSMPNKPW + Q+HKIMVTTVGKILFNDIMPEDLPYL EPNNANLTE TPDKYFLEPG | |
| Sbjct: | 541 | AVDSMPNKPWKDNQRHKIMVTTVGKILFNDIMPEDLPYLQEPNNANLTEGTPDKYFLEPG | 600 |
| Query: | 611 | QDIQAVIDNLEINIPFKKKNLGNIIAETFKRFRTTETSAFLDRLKDLGYYHSTLAGLTVG | 670 |
| | | QDIQ VID L+IN+PFKKKNLGNIIAETFKRFRTTETSAFLDRLKDLGYYHSTLAGLTVG | |
| Sbjct: | 601 | QDIQEVIDRLDINVPFKKKNLGNIIAETFKRFRTTETSAFLDRLKDLGYYHSTLAGLTVG | 660 |
| Query: | 671 | IADIPVIDNKAEIIDAAHHRVEDINKAFRRGLMTEEDRYVAVTTTWREAKEALEKRLIET | 730 |
| | | IADIPVIDNKAEIIDAAHHRVE+INKAFRRGLMT++DRYVAVTTTWREAKEALEKRLIET | |
| Sbjct: | 661 | IADIPVIDNKAEIIDAAHHRVEEINKAFRRGLMTDDDRYVAVTTTWREAKEALEKRLIET | 720 |
| Query: | 731 | QDPKNPIVMMMDSGARGNISNFSQLAGMRGLMAAPNGRIMELPILSNFREGLSVLEMFFS | 790 |
| | | QDPKNPIVMMMDSGARGNISNFSQLAGMRGLMAAPNGRIMELPILSNFREGLSVLEMFFS | |
| Sbjct: | 721 | QDPKNPIVMMMDSGARGNISNFSQLAGMRGLMAAPNGRIMELPILSNFREGLSVLEMFFS | 780 |
| Query: | 791 | THGARKGMTDTALKTADSGYLTRRLVDVAQDVIIREDDCGTDRGLTITAITDGKEVTETL | 850 |
| | | THGARKGMTDTALKTADSGYLTRRLVDVAQDVIIREDDCGTDRGL I AITDGKEVTETL | |
| Sbjct: | 781 | THGARKGMTDTALKTADSGYLTRRLVDVAQDVIIREDDCGTDRGLLIRAITDGKEVTETL | 840 |
| Query: | 851 | EERLIGRYTKKSIKHPETGEILVGADTLITEDMAAKVVKAGVEEVTIRSVFTCNTRHGVC | 910 |
| | | EERL GRYT+KS+KHPETGE+L+GAD LITEDMA K+V AGVEEVTIRSVFTC TRHGVC | |
| Sbjct: | 841 | EERLQGRYTRKSVKHPETGEVLIGADQLITEDMARKIVDAGVEEVTIRSVFTCATRHGVC | 900 |
| Query: | 911 | RHCYGINLATGDAVEVGEAVGTIAAQSIGEPGTQLTMRTFHTGGVASNTDITQGLPRIQE | 970 |
| | | RHCYGINLATGDAVEVGEAVGTIAAQSIGEPGTQLTMRTFHTGGVASNTDITQGLPRIQE | |
| Sbjct: | 901 | RHCYGINLATGDAVEVGEAVGTIAAQSIGEPGTQLTMRTFHTGGVASNTDITQGLPRIQE | 960 |
| Query: | 971 | IFEARNPKGEAVITEVKGEVVAIEEDSSTRTKKVFVKGQTGEGEYVVPFTARMKVEVGDE | 1030 |
| | | IFEARNPKGEAVITEVKG VV IEED+STRTKKV+V+G+TG GEYV+PFTARMKVEVGDE | |
| Sbjct: | 961 | IFEARNPKGEAVITEVKGNVVEIEEDASTRTKKVYVQGKTGMGEYVIPFTARMKVEVGDE | 1020 |
| Query: | 1031 | VARGAALTEGSIQPKRLLEVRDTLSVETYLLAEVQKVYRSQGVEIGDKHVEVMVRQMLRK | 1090 |
| | | V RGAALTEGSIQPKRLLEVRDTLSVETYLLAEVQKVYRSQGVEIGDKHVEVMVRQMLRK | |
| Sbjct: | 1021 | VNRGAALTEGSIQPKRLLEVRDTLSVETYLLAEVQKVYRSQGVEIGDKHVEVMVRQMLRK | 1080 |
| Query: | 1091 | VRVMDPGDTDLLPGTLMDISDFTDANKDIVISGGIPATSRPVLMGITKASLETNSFLSAA | 1150 |
| | | VRVMDPGDTDLLPGTLMDISDFTDANKDIVISGGIPATSRPVLMGITKASLETNSFLSAA | |
| Sbjct: | 1081 | VRVMDPGDTDLLPGTLMDISDFTDANKDIVISGGIPATSRPVLMGITKASLETNSFLSAA | 1140 |
| Query: | 1151 | SFQETTRVLTDAAIRGKKDHLLGLKENVIIGKIIPAGTGMARYRNIEPLAVNEVEIIEGT | 1210 |
| | | SFQETTRVLTDAAIRGKKDHLLGLKENVIIGKIIPAGTGMARYRNIEP A+NE+E+I+ T | |
| Sbjct: | 1141 | SFQETTRVLTDAAIRGKKDHLLGLKENVIIGKIIPAGTGMARYRNIEPQAMNEIEVIDHT | 1200 |
| Query: | 1211 | PVDAE | 1215 |
| | | V AE | |
| Sbjct: | 1201 | EVSAE | 1205 |

[0984] Based on this analysis, it was predicted that these proteins and their epitopes could be useful antigens for vaccines or diagnostics.

### EXAMPLE 115

[0985] A DNA sequence (GBSx0120) was identified in S. agalactiae <SEQ ID 385> which encodes the amino acid sequence <SEQ ID 386>. This protein is predicted to be a DNA binding protein. Analysis of this protein sequence reveals the following:

```
Possible site: 19
>>> Seems to have no N-terminal signal sequence
----- Final Results -----
                            bacterial cytoplasm --- Certainty = 0.4727(Affirmative) < succ>
                              bacterial membrane --- Certainty = 0.0000(Not Clear) < succ>
                                bacterial outside --- Certainty = 0.0000(Not Clear) < succ>
```

[0986] The protein has homology with the following sequences in the GENPEPT database:

| >GP: AAC45309 GB: U81957 putative DNA binding protein | | | |
|---|---|---|---|
| [Streptococcus gordonii] | | | |
| Identities = 42/99 (42%), Positives = 75/99 (75%) | | | |
| Query: | 1 | MYQVVKMFGDWEPWWFIEGWEEDITEIAEYDTLSEALLYFQEEWDRGQEKWPYFQSKSSL | 60 |
| | | MY+VV+M+GD+EPWWF++GWE DI + ++ +AL +++ +W + + ++ ++S+S L | |
| Sbjct: | 1 | MYRVVEMYGDFEPWWFLDGWENDIIQEQRFEKYYDALKFYKIQWLKLETEFKEYKSRSDL | 60 |
| Query: | 61 | LATFWSIKEKRWCEECDEYLQQYHSLMLLKEWQEIPKEE | 99 |
| | | + FW+ ++RWCEECD+Y+QQY S++LL++ + IPK + | |
| Sbjct: | 61 | MTVFWNENDQRWCEECDDYVQQYRSIILLEDEKVIPKSK | 99 |

[0987] A related DNA sequence was identified in S. pyogenes <SEQ ID 387> which encodes the amino acid sequence <SEQ ID 388>. Analysis of this protein sequence reveals the following:

```
Possible site: 36
>>> Seems to have no N-terminal signal sequence
----- Final Results -----
                            bacterial cytoplasm --- Certainty = 0.4741(Affirmative) < succ>
                              bacterial membrane --- Certainty = 0.0000(Not Clear) < succ>
                                bacterial outside --- Certainty = 0.0000(Not Clear) < succ>
```

[0988] An alignment of the GAS and GBS proteins is shown below:

| Identities = 61/121 (50%), Positives = 83/121 (68%) | | | |
|---|---|---|---|
| Query: | 1 | MYQVVKMFGDWEPWWFIEGWEEDITEIAEYDTLSEALLYFQEEWDRGQEKWPYFQSKSSL | 60 |
| | | MYQV+KM+GDWEPWWFI+GW++DI + ++ EAL YF +EW R + +P + S+ +L | |
| Sbjct: | 1 | MYQVIKMYGDWEPWWFIDGWQDDIIDEQQFSDWQEALDYFNQEWQRMKAIFPSYHSQKNL | 60 |
| Query: | 61 | LATFWSIKEKRWCEECDEYLQQYHSLMLLKEWQEIPKEESIERFEVFNKIAELPSACSLNL | 121 |
| | | LATFW ++KRWCE+CDE LQQ+HSL+LLK +P I FE N ++ C LNL | |
| Sbjct: | 61 | LATFWEKEDKRWCEDCDEDLQQFHSLLLLKNKDIVPSNNYIPEFEQRNDSPQVAYLCKLNL | 121 |

[0989] Based on this analysis, it was predicted that these proteins and their epitopes could be useful antigens for vaccines or diagnostics.

### EXAMPLE 116

[0990] A DNA sequence (GBSx0121) was identified in S. agalactiae <SEQ ID 389> which encodes the amino acid sequence <SEQ ID 390>. Analysis of this protein sequence reveals the following:

```
Possible site: 18
>>> Seems to have no N-terminal signal sequence
----- Final Results -----
                            bacterial cytoplasm --- Certainty= 0.2433(Affirmative) < succ>
                              bacterial membrane --- Certainty = 0.0000(Not Clear) < succ>
                                bacterial outside --- Certainty = 0.0000(Not Clear) < succ>
```

[0991] The protein has homology with the following sequences in the GENPEPT database:

| >GP: AAC45310 GB: U81957 putative ABC transporter subunit ComYA | | | |
|---|---|---|---|
| [Streptococcus gordonii] | | | |
| Identities = 203/319 (63%), Positives = 255/319 (79%), Gaps = 1/319 (0%) | | | |
| Query: | 1 | MVQSLAKQVIHQAVEVNAQDIYIIPKGDCYELYMRIDDERRFIDVFEFNRMASLISHFKF | 60 |
| | | MVQ +A+ ++ QA E AQDIY +PK DCYELYMRI DERRFI ++F+++A++ISHFKF | |
| Sbjct: | 1 | MVQKIAQAIVRQAKEECAQDIYFVPKDDCYELYMRIGDERRFIQTYDFDQLAAVISHFKF | 60 |
| Query: | 61 | VAGMNVGEKRRSQLGSCDYELSEGRLVSLRLSSVGDYRGQESLVIRILYSGHQDLKYWFD | 120 |
| | | +AGMNVGEKRRSQLGSCDY + + S+RLS+VGDYRG ESLVIR+L+ +LK+WF | |
| Sbjct: | 61 | LAGMNVGEKRRSQLGSCDYRYDD-KETSIRLSTVGDYRGYESLVIRLLHDEETELKFWFT | 119 |
| Query: | 121 | NIKQMKEVLGIRGLYLFSGPVGSGKTTLMYQLASEVFKNKQIITIEDPVEIKNDKMLQLQ | 180 |
| | | + +++E RGLYLFSGPVGSGKTTLM+QLA FK +Q+++IEDPVEIK + MLQLQ | |
| Sbjct: | 120 | HFPELREKFKDRGLYLFSGPVGSGKTTLMHQLAQLKFKGQQVMSIEDPVEIKQEDMLQLQ | 179 |
| Query: | 181 | LNEDIGMTYDALIKLSLRHRPDILIIGEIRDQATARAVIRASLTGVMVFSTIHAKSIPGV | 240 |
| | | LNE IG+TY++LIKLSLRHRPD+LIIGEIRD TARAV+RASLTG VFSTIHAKSIPGV | |
| Sbjct: | 180 | LNETIGLTYESLIKLSLRHRPDLLIIGEIRDSETARAVVRASLTGATVFSTIHAKSIPGV | 239 |
| Query: | 241 | YDRLIELGVNYQELENSLKLIAYQRLIGGGSLIDFETGNFKKHSSDKWNRQVDILAEEGH | 300 |
| | | Y+RL+ELGV+ +EL+ L+ I YQRLIGGG +IDF + N+++H WN+Q+D L GH | |
| Sbjct: | 240 | YERLLELGVSEEELKIVLQGICYQRLIGGGGVIDFASDNYQEHEPTVWNQQIDQLLAAGH | 299 |
| Query: | 301 | ISKKQAQVEKIIPQETTES | 319 |
| | | I +QA+ EKI Q+ S | |
| Sbjct: | 300 | IHPEQAEAEKIRNQQAKTS | 318 |

[0992] A related DNA sequence was identified in S. pyogenes <SEQ ID 391> which encodes the amino acid sequence <SEQ ID 392>. Analysis of this protein sequence reveals the following:

```
Possible site: 18
>>> Seems to have no N-terminal signal sequence
----- Final Results -----
                            bacterial cytoplasm --- Certainty = 0.1846(Affirmative) < succ>
                              bacterial membrane --- Certainty = 0.0000(Not Clear) < succ>
                                bacterial outside --- Certainty = 0.0000(Not Clear) < succ>
```

[0993] An alignment of the GAS and GBS proteins is shown below:

| Identities = 207/312 (66%), Positives = 257/312 (82%) | | | |
|---|---|---|---|
| Query: | 1 | MVQSLAKQVIHQAVEVNAQDIYIIPKGDCYELYMRIDDERRFIDVFEFNRMASLISHFKF | 60 |
| | | MVQ+LAK ++ +A +V+AQDIYI+P+ D Y+L++RI DERR +DV++ +RMA LISHFKF | |
| Sbjct: | 1 | MVQALAKAILAKAEQVHAQDIYILPRADQYDLFLRIGDERRLVDVYQSDRMAPLISHFKF | 60 |
| Query: | 61 | VAGMNVGEKRRSQLGSCDYELSEGRLVSLRLSSVGDYRGQESLVIRILYSGHQDLKYWFD | 120 |
| | | VAGM VGEKRR Q+GSCDY+LS+ + +SLRLSSVGDYRGQESLVIR+L+ ++ + YWFD | |
| Sbjct: | 61 | VAGMIVGEKRRCQVGSCDYKLSKDKQLSLRLSSVGDYRGQESLVIRLLHHQNKSVHYWFD | 120 |
| Query: | 121 | NIKQMKEVLGIRGLYLFSGPVGSGKTTLMYQLASEVFKNKQIITIEDPVEIKNDKMLQLQ | 180 |
| | | + ++ +G RGLYLF+GPVGSGKTTLMYQL S + Q+I+IEDPVEIKN ++LQLQ | |
| Sbjct: | 121 | GLTKVANQVGGRGLYLFAGPVGSGKTTLMYQLISNYHQEAQVISIEDPVEIKNHQILQLQ | 180 |
| Query: | 181 | LNEDIGMTYDALIKLSLRHRPDILIIGEIRDQATARAVIRASLTGVMVFSTIHAKSIPGV | 240 |
| | | +N+DIGMTYD LIKLSLRHRPDIL+IGEIRD TARAVIRASLTG MVFST+HAKSI GV | |
| Sbjct: | 181 | VNDDIGMTYDNLIKLSLRHRPDILVIGEIRDSQTARAVIRASLTGAMVFSTVHAKSISGV | 240 |
| Query: | 241 | YDRLIELGVNYQELENSLKLIAYQRLIGGGSLIDFETGNFKKHSSDKWNRQVDILAEEGH | 300 |
| | | Y RL+ELGV EL N L LIAYQRL+ GG+LID F+ +SS WN+Q+D L E GH | |
| Sbjct: | 241 | YARLLELGVTKAELSNCLALIAYQRLLNGGALIDSTQNEFEYYSSSNWNQQIDQLLEAGH | 300 |
| Query: | 301 | ISKKQAQVEKII | 312 |
| | | ++ KQA++EKII | |
| Sbjct: | 301 | LNPKQAKLEKII | 312 |

[0994] SEQ ID 390 (GBS63) was expressed in E. coli as a His-fusion product. SDS-PAGE analysis of total cell extract is shown in FIG. 5 (lane 5; MW 39 kDa). It was also expressed in E. coli as a GST-fusion product. SDS-PAGE analysis of total cell extract is shown in FIG. 13 (lane 2; MW 64 kDa).

[0995] The GBS63-GST fusion product was purified (FIG. 101A; see also FIG. 191, lane 3) and used to immunise mice (lane 1 product; 20 μg/mouse). The resulting antiserum was used for Western blot (FIG. 101B), FACS (FIG. 101C), and in the in vivo passive protection assay (Table III). These tests confirm that the protein is immunoaccessible on GBS bacteria and that it is an effective protective immunogen.

[0996] Based on this analysis, it was predicted that these proteins and their epitopes could be useful antigens for vaccines or diagnostics.

### EXAMPLE 117

[0997] A DNA sequence (GBSx0122) was identified in S. agalactiae <SEQ ID 393> which encodes the amino acid sequence <SEQ ID 394>. This protein is predicted to be competence protein (mshG). Analysis of this protein sequence reveals the following:

| Possible site: 49 | | | | |
|---|---|---|---|---|
| >>> Seems to have no N-terminal signal sequence | | | | |
| | INTEGRAL | Likelihood = −14.65 | Transmembrane | 123-139 (113-144) |
| | INTEGRAL | Likelihood = −13.53 | Transmembrane | 272-288 (264-295) |
| | INTEGRAL | Likelihood = −8.55 | Transmembrane | 79-95 (75-102) |
| | INTEGRAL | Likelihood = −0.00 | Transmembrane | 146-162 (146-162) |

```
----- Final Results -----
                              bacterial membrane --- Certainty = 0.6859(Affirmative) < succ>
                                bacterial outside --- Certainty = 0.0000(Not Clear) < succ>
                            bacterial cytoplasm --- Certainty = 0.0000(Not Clear) < succ>
```

[0998] A related GBS nucleic acid sequence <SEQ ID 9489> which encodes amino acid sequence <SEQ ID 9490> was also identified.

[0999] The protein has homology with the following sequences in the GENPEPT database:

| >GP: AAC45311 GB: U81957 putative ABC transporter subunit ComYB | | | |
|---|---|---|---|
| [Streptococcus gordonii] | | | |
| Identities = 161/280 (57%), Positives = 219/280 (77%) | | | |
| Query: | 19 | MNKALLEGKDLSKMLGELGFSDTVITQVALADLHGNISRSLLKIESYLANLLLVRKKVIE | 78 |
| | | M + L G+ S+++ LGFSD V+TQ++LA+LHGN+S +LLKIE YL NL V+KK+IE | |
| Sbjct: | 1 | MRQGLANGQAFSEIMASLGFSDAVVTQLSLAELHGNLSLALLKIEEYLDNLAKVKKKLIE | 60 |
| Query: | 79 | VATYPLILLSFLVLIMIGLRNYLMPQLGENNFATRLITNVPNIFLLLLAVVLIFSLIFYI | 138 |
| | | VATYP++LL FLVLIMIGLRNYL+PQL NFAT+LI ++P IFLL + ++L + Y+ | |
| Sbjct: | 61 | VATYPMMLLGFLVLIMIGLRNYLLPQLSSQNFATQLIGHLPTIFLLTVLMLLGLTGAIYL | 120 |
| Query: | 139 | IQKRLSRIKVACFLTTIPLVGSYVKLYLTAYYAREWGNLLSQGIELDQIVKVMQNQKSKL | 198 |
| | | + K RI V FL +P VGS+V++YLTAYYAREWGN++ QG+EL QI ++MQ Q+S L | |
| Sbjct: | 121 | VFKGQKRIPVYSFLARLPFVGSFVRIYLTAYYAREWGNMIGQGLELSQIFQIMQEQRSVL | 180 |
| Query: | 199 | FREIGYDMEEGFLSGKAFHQKVLDYPFFLTELSLMIEYGQVKAKLGTELDIYADEKWEDF | 258 |
| | | F+EIG D+ + +G+ F K+ YPFF ELSL+IEYG+VK+KLG+EL+IYA + WE+F | |
| Sbjct: | 181 | FQEIGQDLGQALQNGQEFSDKIASYPFFKKELSLIIEYGEVKSKLGSELEIYALKTWEEF | 240 |
| Query: | 259 | FTKLARATQLIQPVIFIFVALIIVMIYAAMLLPMYQNMEI | 298 |
| | | F ++ R LIQP++F+FVAL+IV++YAAMLLP+YQNME+ | |
| Sbjct: | 241 | FGRVNRTMNLIQPLVFVFVALMIVLLYAAMLLPLYQNMEV | 280 |

[1000] A related DNA sequence was identified in S. pyogenes <SEQ ID 395> which encodes the amino acid sequence <SEQ ID 396>. Analysis of this protein sequence reveals the following:

| Possible site: 43 | | | | |
|---|---|---|---|---|
| >>> Seems to have no N-terminal signal sequence | | | | |
| | INTEGRAL | Likelihood = −12.52 | Transmembrane | 317-333 (309-339) |
| | INTEGRAL | Likelihood = −10.14 | Transmembrane | 123-139 (119-147) |
| | INTEGRAL | Likelihood = −6.95 | Transmembrane | 164-180 (161-183) |

```
----- Final Results -----
                              bacterial membrane --- Certainty = 0.6010(Affirmative) < succ>
                                bacterial outside --- Certainty = 0.0000(Not Clear) < succ>
                            bacterial cytoplasm --- Certainty = 0.0000(Not Clear) < succ>
```

[1001] The protein has homology with the following sequences in the databases:

| >GP: AAC45311 GB: U81957 putative ABC transporter subunit ComYB | | | |
|---|---|---|---|
| [Streptococcus gordonii] | | | |
| Identities = 139/278 (50%), Positives = 207/278 (74%) | | | |
| Query: | 63 | MEESLLKGQGLADMLSGLGFSDAILTQISLADRHGNIETTLVAIQHYLNQMARIRRKTVE | 122 |
| | | M + L GQ +++++ LGFSDA++TQ+SLA+ HGN+ L+ I+ YL+ +A++++K +E | |
| Sbjct: | 1 | MRQGLANGQAFSEIMASLGFSDAVVTQLSLAELHGNLSLALLKIEEYLDNLAKVKKKLIE | 60 |
| Query: | 123 | VITYPLILLLFLFVMMLGLRRYLVPQLETQNQITYFLNHFPAFFIGFCSGLILLFGMVWL | 182 |
| | | V TYP++LL FL ++M+GLR YL+PQL +QN T + H P F+ L+ L G ++L | |
| Sbjct: | 61 | VATYPMMLLGFLVLIMIGLRNYLLPQLSSQNFATQLIGHLPTIFLLTVLMLLGLTGAIYL | 120 |
| Query: | 183 | RWRSQSRLKLYSRLSRYPFLGKLLKQYLTSYYAREWGTLIGQGLDLMTILDIMAIEKSSL | 242 |
| | | ++ Q R+ +YS L+R PF+G ++ YLT+YYAREWG +IGQGL+L I IM ++S L | |
| Sbjct: | 121 | VFKGQKRIPVYSFLARLPFVGSFVRIYLTAYYAREWGNMIGQGLELSQIFQIMQEQRSVL | 180 |
| Query: | 243 | MKELAEDIRMSLLEGQAFHIKVATYPFFKKELSLMIEYGEIKSKLGAELEIYAQESWEQF | 302 |
| | | +E+ +D+ +L GQ F K+A+YPFFKKELSL+IEYGE+KSKLG+ELEIYA ++WE+F | |
| Sbjct: | 181 | FQEIGQDLGQALQNGQEFSDKIASYPFFKKELSLIIEYGEVKSKLGSELEIYALKTWEEF | 240 |
| Query: | 303 | FSQLYQVTQLIQPAIFLVVAVTIVMIYAAILLPIYQNM | 340 |
| | | F ++ + LIQP +F+ VA+ IV++YAA+LLP+YQNM | |
| Sbjct: | 241 | FGRVNRTMNLIQPLVFVFVALMIVLLYAAMLLPLYQNM | 278 |

[1002] An alignment of the GAS and GBS proteins is shown below:

| Identities = 148/297 (49%), Positives = 209/297 (69%), Gaps = 2/297 (0%) | | | |
|---|---|---|---|
| Query: | 1 | MVTFLKRSKLLSDCYTDSMNKALLEGKDLSKMLGELGFSDTVITQVALADLHGNISRSLL | 60 |
| | | ++ FLKRS+LL Y M ++LL+G+ L+ ML LGFSD ++TQ++LAD HGNI +L+ | |
| Sbjct: | 45 | VIAFLKRSQLLQLDYVLKMEESLLKGQGLADMLSGLGFSDAILTQISLADRHGNIETTLV | 104 |
| Query: | 61 | KIESYLANLLLVRKKVIEVATYPLILLSFLVLIMIGLRNYLMPQLGENNFATRLITNVPN | 120 |
| | | I+ YL + +R+K +EV TYPLILL FL ++M+GLR YL+PQL N T + + P | |
| Sbjct: | 105 | AIQHYLNQMARIRRKTVEVITYPLILLLFLFVMMLGLRRYLVPQLETQNQITYFLNHFPA | 164 |
| Query: | 121 | IFL-LLLAVVLIFSLIFYIIQKRLSRIKVACFLTTIPLVGSYVKLYLTAYYAREWGNLLS | 179 |
| | | F+ ++L+F ++ ++ + SR+K+ L+ P +G +K YLT+YYAREWG L+ | |
| Sbjct: | 165 | FFIGFCSGLILLFGMV-WLRWRSQSRLKLYSRLSRYPFLGKLLKQYLTSYYAREWGTLIG | 223 |
| Query: | 180 | QGIELDQIVKVMQNQKSKLFREIGYDMEEGFLSGKAFHQKVLDYPFFLTELSLMIEYGQV | 239 |
| | | QG++L I+ +M +KS L +E+ D+ L G+AFH KV YPFF ELSLMIEYG++ | |
| Sbjct: | 224 | QGLDLMTILDIMAIEKSSLMKELAEDIRMSLLEGQAFHIKVATYPFFKKELSLMIEYGEI | 283 |
| Query: | 240 | KAKLGTELDIYADEKWEDFFTKLARATQLIQPVIFIFVALIIVMIYAAMLLPMYQNM | 296 |
| | | K+KLG EL+IYA E WE FF++L + TQLIQP IF+ VA+ IVMIYAA+LLP+YQNM | |
| Sbjct: | 284 | KSKLGAELEIYAQESWEQFFSQLYQVTQLIQPAIFLVVAVTIVMIYAAILLPIYQNM | 340 |

[1003] A related GBS gene <SEQ ID 8493> and protein <SEQ ID 8494> were also identified. Analysis of this protein sequence reveals the following:

| Lipop: Possible site: −1 Crend: 9 | | | |
|---|---|---|---|
| SRCFLG: 0 | | | |
| McG: Length of UR: 2 | | | |
| Peak Value of UR: 1.24 | | | |
| Net Charge of CR: 0 | | | |
| McG: Discrim Score: −8.94 | | | |
| GvH: Signal Score (−7.5): −4.08 | | | |
| Possible site: 31 | | | |
| >>> Seems to have no N-terminal signal sequence | | | |
| Amino Acid Composition: calculated from 1 | | | |
| ALOM program | count: 4 | value: −14.65 | threshold: 0.0 |

| | | | |
|---|---|---|---|
| INTEGRAL | Likelihood = −14.65 | Transmembrane | 105-121 (95-126) |
| INTEGRAL | Likelihood = −13.53 | Transmembrane | 254-270 (246-277) |
| INTEGRAL | Likelihood = −8.55 | Transmembrane | 61-77 (57-84) |

| | | |
|---|---|---|
| PERIPHERAL | Likelihood = 5.09 | 14 |

modified ALOM score: 3.43
icm1 HYPID: 7 CFP: 0.686
*** Reasoning Step: 3
----- Final Results -----
bacterial membrane --- Certainty = 0.6859 (Affirmative) < succ>
bacterial outside --- Certainty = 0.0000 (Not Clear) < succ>
bacterial cytoplasm --- Certainty = 0.0000 (Not Clear) < succ>

[1004] The protein has homology with the following sequences in the databases:

[chemical structure]

[1005] SEQ ID 8494 (GBS49) was expressed in E. coli as a His-fusion product. SDS-PAGE analysis of total cell extract is shown in FIG. 11 (lane 5; MW 15 kDa). It was also was expressed in E. coli as a GST-fusion product. SDS-PAGE analysis of total cell extract is shown in FIG. 15 (lane 5; MW 60 kDa).

[1006] Based on this analysis, it was predicted that these proteins and their epitopes could be useful antigens for vaccines or diagnostics.

### EXAMPLE 118

[1007] A DNA sequence (GBSx0123) was identified in S. agalactiae <SEQ ID 397> which encodes the amino acid sequence <SEQ ID 398>. This protein is predicted to be ComYD or ComGD. Analysis of this protein sequence reveals the following:

Possible site: 55
>>> Seems to have a cleavable N-term signal seq.
----- Final Results -----
bacterial outside --- Certainty = 0.3000 (Affirmative) < succ>
bacterial membrane --- Certainty = 0.0000 (Not Clear) < succ>
bacterial cytoplasm --- Certainty = 0.0000 (Not Clear) < succ>

[1008] The protein has homology with the following sequences in the GENPEPT database:

| >GP: CAA75315 GB: Y15043 homology to ComYD from Streptcoccus gordonii, | | | |
|---|---|---|---|
| and ComGD from Bacillus subtilis [Lactococcus lactis subsp. cremoris] | | | |
| Identities = 56/138 (40%), Positives = 92/138 (66%), Gaps = 2/138 (1%) | | | |
| Query: | 12 | KVKAFTLLECLVALVTITGALLVYQGLTKLLAQQIVVMSSSSQSEWVLLTQQLNAEFEGA | 71 |
| | | K++AFTLLECLVAL+ I+G++LV GLT+++ +Q+ + + S+ +W + +Q+ +E GA | |
| Sbjct: | 13 | KIRAFTLLECLVALLAISGSVLVISGLTRMIEEQMKISQNDSRKDWQIFCEQMRSELSGA | 72 |
| Query: | 72 | HLEYLRQNKLYLRKQDKIVTFGKSNKDDFRKTGYDGRGYQPMVYGLDNCQMSQTKSMVKL | 131 |
| | | L+ + QN LY+ K DK + FG DDFRK+ G+GYQPM+Y L ++ ++++K+ | |
| Sbjct: | 73 | KLDNVNQNFLYVTK-DKKLRFGLVG-DDFRKSDDKGQGYQPMLYDLKGAKIQAEENLIKI | 130 |
| Query: | 132 | VFYFKDGLKRTFYYDFKE | 149 |
| | | F +G +R F Y F + | |
| Sbjct: | 131 | TIDFDNGGERVFIYRFTD | 148 |

[1009] A related DNA sequence was identified in S. pyogenes <SEQ ID 399> which encodes the amino acid sequence <SEQ ID 400>. Analysis of this protein sequence reveals the following:

Possible site: 28
>>> Seems to have a cleavable N-term signal seq.
----- Final Results -----
bacterial outside --- Certainty = 0.3000 (Affirmative) < succ>
bacterial membrane --- Certainty = 0.0000 (Not Clear) < succ>
bacterial cytoplasm --- Certainty = 0.0000 (Not Clear) < succ>

[1010] The protein has homology with the following sequences in the databases:

| >GP: CAA75315 GB: Y15043 homology to ComYD from Streptcoccus gordonii, | | | |
|---|---|---|---|
| and ComGD from Bacillus subtilis [Lactococcus lactis subsp. cremoris] | | | |
| Identities = 65/137 (47%), Positives = 84/137 (60%), Gaps = 2/137 (1%) | | | |
| Query: | 8 | IKAFTLLEALIALLVISGSLLVYQGLTRTLLKHSHYLARHDQDNWLLFSHQLREELSGAR | 67 |
| | | I+AFTLLE L+ALL ISGS+LV GLTR + + + +W +F Q+R ELSGA+ | |
| Sbjct: | 14 | IRAFTLLECLVALLAISGSVLVISGLTRMIEEQMKISQNDSRKDWQIFCEQMRSELSGAK | 73 |
| Query: | 68 | FYKVADNKLYVEKGKKVLAFGQFKSHDFRKSASNGKGYQPMLFGISRSHIHIEQSQICIT | 127 |
| | | V N LYV K KK L FG DFRKS G+GYQPML+ + + I E++ I IT | |
| Sbjct: | 74 | LDNVNQNFLYVTKDKK-LRFG-LVGDDFRKSDDKGQGYQPMLYDLKGAKIQAEENLIKIT | 131 |
| Query: | 128 | LKWKSGLERTFYYAFQD | 144 |
| | | + + +G ER F Y F D | |
| Sbjct: | 132 | IDFDNGGERVFIYRFTD | 148 |

[1011] An alignment of the GAS and GBS proteins is shown below:

| Identities = 58/137 (42%), Positives = 88/137 (63%) | | | |
|---|---|---|---|
| Query: | 13 | VKAFTLLECLVALVTITGALLVYQGLTKLLAQQIVVMSSSSQSEWVLLTQQLNAEFEGAH | 72 |
| | | +KAFTLLE L+AL+ I+G+LLVYQGLT+ L + ++ Q W+L + QL E GA | |
| Sbjct: | 8 | IKAFTLLEALIALLVISGSLLVYQGLTRTLLKHSHYLARHDQDNWLLFSHQLREELSGAR | 67 |
| Query: | 73 | LEYLRQNKLYLRKQDKIVTFGKSNKDDFRKTGYDGRGYQPMVYGLDNCQMSQTKSMVKLV | 132 |
| | | + NKLY+ K K++ FG+ DFRK+ +G+GYQPM++G+ + +S + + | |
| Sbjct: | 68 | FYKVADNKLYVEKGKKVLAFGQFKSHDFRKSASNGKGYQPMLFGISRSHIHIEQSQICIT | 127 |
| Query: | 133 | FYFKDGLKRTFYYDFKE | 149 |
| | | +K GL+RTFYY F++ | |
| Sbjct: | 128 | LKWKSGLERTFYYAFQD | 144 |

[1012] A related GBS gene <SEQ ID 8495> and protein <SEQ ID 8496> were also identified. Analysis of this protein sequence reveals the following:

| Lipop: Possible site: −1 Crend: 10 | | | |
|---|---|---|---|
| McG: Discrim Score: 4.86 | | | |
| GvH: Signal Score (−7.5): −0.22 | | | |
| Possible site: 55 | | | |
| >>> Seems to have a cleavable N-term signal seq. | | | |
| ALOM program | count: 0 | value: 12.47 | threshold: 0.0 |

| | | |
|---|---|---|
| PERIPHERAL | Likelihood = 12.47 | 127 |

modified ALOM score: −2.99
*** Reasoning Step: 3
----- Final Results -----
bacterial outside --- Certainty = 0.3000 (Affirmative) < succ>
bacterial membrane --- Certainty = 0.0000 (Not Clear) < succ>
bacterial cytoplasm --- Certainty = 0.0000 (Not Clear) < succ>

[1013] The protein has homology with the following sequences in the databases:

[chemical structure]

[1014] SEQ ID 398 (GBS6) was expressed in E. coli as a GST-fusion product. SDS-PAGE analysis of total cell extract is shown in FIG. 1 (lane 2; MW 40 kDa). It was also expressed in E. coli as a His-fusion product. SDS-PAGE analysis of total cell extract is shown in FIG. 2 (lane 2; MW 15 kDa). The GBS6-GST fusion product was purified (FIG. 189, lane 2) and used to immunise mice. The resulting antiserum was used for FACS (FIG. 260), which confirmed that the protein is immunoaccessible on GBS bacteria.

[1015] Based on this analysis, it was predicted that these proteins and their epitopes could be useful antigens for vaccines or diagnostics.

### EXAMPLE 119

[1016] A DNA sequence (GBSx0124) was identified in S. agalactiae <SEQ ID 401> which encodes the amino acid sequence <SEQ ID 402>. Analysis of this protein sequence reveals the following:

```
Possible site: 43
>>> Seems to have no N-terminal signal sequence
----- Final Results -----
                            bacterial cytoplasm --- Certainty = 0.3831(Affirmative) < succ>
                              bacterial membrane --- Certainty = 0.0000(Not Clear) < succ>
                                bacterial outside --- Certainty = 0.0000(Not Clear) < succ>
```

[1017] The protein has homology with the following sequences in the GENPEPT database:

| >GP: AAC00317 GB: AF008220 YtxK [Bacillus subtilis] | | | |
|---|---|---|---|
| Identities = 106/329 (32%), Positives = 176/329 (53%), Gaps = 17/329 (5%) | | | |
| Query: | 1 | MNFEKIETAYELILENIQTIENQLKTHIYDALIEQNSYYLGSSCDLDMVVVNNQKLRQLD | 60 |
| | | M + + YEL+ E I+N+L+ +AL E Y D + + +QK +QL | |
| Sbjct: | 1 | MQKDHVGAVYELLNEAAIMIKNELQISYIEALAEAGEMYFLEKTD-QLKLPADQKTKQLQ | 59 |
| Query: | 61 | LSQE---------EW-RRTFQFIFIKSAQTEQLQANHQFTPDSIGFILLFLLEE-LTSQE | 109 |
| | | E EW R+ FQ +K + + N Q TPD+IG + +L+ + + ++ | |
| Sbjct: | 60 | ALLEKAEFGTYEHEWVRKAFQLAVLKGMK-DISHPNRQMTPDTIGLFISYLVNKFMADKK | 118 |
| Query: | 110 | TVDVLEIGSGTGNLAQTLLNN-SSKELNYMGIEVDDLLIDLSASIAEIIGSSAQFIQEDA | 168 |
| | | + +L+ GTGNL T+LN S K N GIE+DD+L+ ++ + A ++ + +D+ | |
| Sbjct: | 119 | ELTILDPALGTGNLLFTVLNQLSEKTANSFGIEIDDVLLKIAYAQANLLKKELELFHQDS | 178 |
| Query: | 169 | VRPQILKESDVIISDLPVGYYPNDGIAKRYAVSSSKEHTYAHHLLMEQSLKYLKKDGIAI | 228 |
| | | + P + D +I DLPVGYYPND A+ + + + + H++AHHL +EQS+K+ K G | |
| Sbjct: | 179 | LEPLFIDPVDTVICDLPVGYYPNDEGAEAFELKADEGHSFAHHLFIEQSVKHTKPGGYLF | 238 |
| Query: | 229 | FLAPENLLTSPQSDLLKEWLKGYADVIAVLTLPETIFGSRQNAKSIFVLKKQAEQKP--- | 285 |
| | | F+ P +L S QS LK++ K + A+L LP++IF +AKSI VL+KQ E | |
| Sbjct: | 239 | FMIPNHLFESSQSGKLKQFFKDKVHINALLQLPKSIFKDEAHAKSILVLQKQGENTKAPG | 298 |
| Query: | 286 | ETFVYPLTDLQNRENMANFIENFQKWSRE | 314 |
| | | + + L N++ M + + F +W ++ | |
| Sbjct: | 299 | QILLANLPSFSNQKAMLDMMAQFDEWFKK | 327 |

[1018] A related DNA sequence was identified in S. pyogenes <SEQ ID 403> which encodes the amino acid sequence <SEQ ID 404>. Analysis of this protein sequence reveals the following:

```
Possible site: 57
>>> Seems to have an uncleavable N-term signal seq
----- Final Results -----
                              bacterial membrane --- Certainty = 0.0000(Not Clear) < succ>
                                bacterial outside --- Certainty = 0.0000(Not Clear) < succ>
                            bacterial cytoplasm --- Certainty = 0.0000(Not Clear) < succ>
```

[1019] An alignment of the GAS and GBS proteins is shown below:

| Identities = 223/315 (70%), Positives = 270/315 (84%) | | | |
|---|---|---|---|
| Query: | 1 | MNFEKIETAYELILENIQTIENQLKTHIYDALIEQNSYYLGSSCDLDMVVVNNQKLRQLD | 60 |
| | | M FEKIE AY+L+LEN Q IEN LKTHIYDA++EQNS+YLG+ V N+ KL+ L | |
| Sbjct: | 16 | MTFEKIEEAYQLLLENCQLIENDLKTHIYDAIVEQNSFYLGAEGASPQVAQNSDKLKALC | 75 |
| Query: | 61 | LSQEEWRRTFQFIFIKSAQTEQLQANHQFTPDSIGFILLFLLEELTSQETVDVLEIGSGT | 120 |
| | | L++EEWR+ +QF+FIK+AQTEQLQANHQFTPD+IGFILL+LLE+L+ +++++VLEIGSGT | |
| Sbjct: | 76 | LTKEEWRKAYQFLFIKAAQTEQLQANHQFTPDAIGFILLYLLEQLSDKDSLEVLEIGSGT | 135 |
| Query: | 121 | GNLAQTLLNNSSKELNYMGIEVDDLLIDLSASIAEIIGSSAQFIQEDAVRPQILKESDVI | 180 |
| | | GNLAQTLLNN+SK L+Y+GIE+DDLLIDLSASIAEI+ SSA FIQEDAVRPQ+LKESD++ | |
| Sbjct: | 136 | GNLAQTLLNNTSKSLDYVGIELDDLLIDLSASIAEIMDSSAHFIQEDAVRPQLLKESDIV | 195 |
| Query: | 181 | ISDLPVGYYPNDGIAKRYAVSSSKEHTYAHHLLMEQSLKYLKKDGIAIFLAPENLLTSPQ | 240 |
| | | ISDLPVGYYPND IAKRY V+SS +HTYAHHLLMEQSLKYLKKDG AIFLAP NLLTSPQ | |
| Sbjct: | 196 | ISDLPVGYYPNDDIAKRYKVASSDKHTYAHHLLMEQSLKYLKKDGFAIFLAPVNLLTSPQ | 255 |
| Query: | 241 | SDLLKEWLKGYADVIAVLTLPETIFGSRQNAKSIFVLKKQAEQKPETFVYPLTDLQNREN | 300 |
| | | S LLK+WLK YA V+ ++TLP++IFG NAKSI VL+KQ + ETFVYP+ DL+ EN | |
| Sbjct: | 256 | SQLLKQWLKDYAQVVTLITLPDSIFGHPSNAKSIIVLQKQTDHPMETFVYPIRDLKLAEN | 315 |
| Query: | 301 | MANFIENFQKWSREN | 315 |
| | | + +F+ENF+KW N | |
| Sbjct: | 316 | IHDFMENFKKWKLSN | 330 |

[1020] Based on this analysis, it was predicted that these proteins and their epitopes could be useful antigens for vaccines or diagnostics.

### EXAMPLE 120

[1021] A DNA sequence (GBSx0125) was identified in S. agalactiae <SEQ ID 405> which encodes the amino acid sequence <SEQ ID 406>. This protein is predicted to be acetate kinase (ackA-1). Analysis of this protein sequence reveals the following:

```
Possible site: 15
>>> Seems to have no N-terminal signal sequence
----- Final Results -----
                            bacterial cytoplasm --- Certainty = 0.2384(Affirmative) < succ>
                              bacterial membrane --- Certainty = 0.0000(Not Clear) < succ>
                                bacterial outside --- Certainty = 0.0000(Not Clear) < succ>
```

[1022] The protein has homology with the following sequences in the GENPEPT database:

| >GP: AAC36857 GB: L17320 acetate kinase [Bacillus subtilis] | | | |
|---|---|---|---|
| Identities = 223/395 (56%), Positives = 293/395 (73%), Gaps = 3/395 (0%) | | | |
| Query: | 1 | MSKTIAINAGSSSLKWQLYEMPEEKVVAKGIIERIGLKDSISTVKFDDKKDEQILDIVDH | 60 |
| | | MSK IAINAGSSSLK+QL+EMP E V+ KG++ERIG+ DS+ T+ + +K+ ++ DI DH | |
| Sbjct: | 1 | MSKIIAINAGSSSLKFQLFEMPSETVLTKGLVERIGIADSVFTISVNGEKNTEVTDIPDH | 60 |
| Query: | 61 | TQAVKILLEDLTKHGIIKDFNEITGVGHRVVAGGEYFKESALVDDKVVEQVEELSALAPL | 120 |
| | | AVK+LL LT+ GIIKD NEI G+GHRVV GGE F +S L+ D+ ++++E++S LAPL | |
| Sbjct: | 61 | AVAVKMLLNKLTEFGIIKDLNEIDGIGHRVVHGGEKFSDSVLLTDETIKEIEDISELAPL | 120 |
| Query: | 121 | HNPAAAAGIRAFREILPDITSVCVFDTAFHTTMQPHTYLYPIPQKYYTDYKVRKYGAHGT | 180 |
| | | HNPA GI+AF+E+LP++ +V VFDTAFH TM +YLY +P +YY + +RKYG HGT | |
| Sbjct: | 121 | HNPANIVGIKAFKEVLPNVPAVAVFDTAFHQTMPEQSYLYSLPYEYYEKFGIRKYGFHGT | 180 |
| Query: | 181 | SHQYVAQEAAKQLGRPLEELKLITAHVGNGVSITANYHGQSIDTSMGFTPLAGPMMGTRS | 240 |
| | | SH+YV + AA+ LGRPL++L+LI+ H+GNG SI A G+SIDTSMGFTPLAG MGTRS | |
| Sbjct: | 181 | SHKYVTERAAELLGRPLKDLRLISCHLGNGASIAAVEGGKSIDTSMGFTPLAGVAMGTRS | 240 |
| Query: | 241 | GDIDPAIIPYLVANDPELEDAAAVVNMLNKQSGLLGVSGTSSDMRDIEAGLQSKDPNAVL | 300 |
| | | G+IDPA+IPY++ + D V+N LNK+SGLLG+SG SSD+RDI + + A | |
| Sbjct: | 241 | GNIDPALIPYIMEKTGQTAD--EVLNTLNKKSGLLGISGFSSDLRDIVEATKEGNERAET | 298 |
| Query: | 301 | AYNVFIDRIKKFIGQYLAVLNGADAIIFTAGMGENAPLMRQDVIAGLSWFGIELDPE-KN | 359 |
| | | A VF RI K+IG Y A ++G DAIIFTAG+GEN+ +R+ V+ GL + G+ DP N | |
| Sbjct: | 299 | ALEVFASRIHKYIGSYAARMSGVDAIIFTAGIGENSVEVRERVLRGLEFMGVYWDPALNN | 358 |
| Query: | 360 | VFGYFGDITKPDSKVKVLVIPTDEELMIARDVERL | 394 |
| | | V G I+ P S VKV++IPTDEE+MIARDV RL | |
| Sbjct: | 359 | VRGEEAFISYPHSPVKVMIIPTDEEVMIARDVVRL | 393 |

[1023] A related DNA sequence was identified in S. pyogenes <SEQ ID 407> which encodes the amino acid sequence <SEQ ID 408>. Analysis of this protein sequence reveals the following:

| Possible site: 28 | | | |
|---|---|---|---|
| >>> Seems to have no N-terminal signal sequence | | | |
| INTEGRAL | Likelihood = −0.22 | Transmembrane | 63-79 (63-79) |

----- Final Results -----
bacterial membrane --- Certainty = 0.1086 (Affirmative) < succ>
bacterial outside --- Certainty = 0.0000 (Not Clear) < succ>
bacterial cytoplasm --- Certainty = 0.0000 (Not Clear) < succ>

[1024] The protein has homology with the following sequences in the databases:

| >GP: AAC36857 GB: L17320 acetate kinase [Bacillus subtilis] | | | |
|---|---|---|---|
| Identities = 218/395 (55%), Positives = 293/395 (73%), Gaps = 3/395 (0%) | | | |
| Query: | 1 | MSKTIAINAGSSSLKWQLYQMPEEAVLAQGIIERIGLKDSISTVKYDGKKEEQILDIHDH | 60 |
| | | MSK IAINAGSSSLK+QL++MP E VL +G++ERIG+ DS+ T+ +G+K ++ DI DH | |
| Sbjct: | 1 | MSKIIAINAGSSSLKFQLFEMPSETVLTKGLVERIGIADSVFTISVNGEKNTEVTDIPDH | 60 |
| Query: | 61 | TEAVKILLNDLIHFGIIAAYDEITGVGHRVVAGGELFKESVVVNDKVLEQIEELSVLAPL | 120 |
| | | AVK+LLN L FGII +EI G+GHRVV GGE F +SV++ D+ +++IE++S LAPL | |
| Sbjct: | 61 | AVAVKMLLNKLTEFGIIKDLNEIDGIGHRVVHGGEKFSDSVLLTDETIKEIEDISELAPL | 120 |
| Query: | 121 | HNPGAAAGIRAFRDILPDITSVCVFDTSFHTSMAKHTYLYPIPQKYYTDYKVRKYGAHGT | 180 |
| | | HNP GI+AF+++LP++ +V VFDT+FH +M + +YLY +P +YY + +RKYG HGT | |
| Sbjct: | 121 | HNPANIVGIKAFKEVLPNVPAVAVFDTAFHQTMPEQSYLYSLPYEYYEKFGIRKYGFHGT | 180 |
| Query: | 181 | SHKYVAQEAAKMLGRPLEELKLITAHIGNGVSITANYHGKSVDTSMGFTPLAGPMMGTRS | 240 |
| | | SHKYV + AA++LGRPL++L+LI+ H+GNG SI A GKS+DTSMGFTPLAG MGTRS | |
| Sbjct: | 181 | SHKYVTERAAELLGRPLKDLRLISCHLGNGASIAAVEGGKSIDTSMGFTPLAGVAMGTRS | 240 |
| Query: | 241 | GDIDPAIIPYLIEQDPELKDAADVVNMLNKKSGLSGVSGISSDMRDIEAGLQEDNPDAVL | 300 |
| | | G+IDPA+IPY++E+ + D +V+N LNKKSGL G+SG SSD+RDI +E N A | |
| Sbjct: | 241 | GNIDPALIPYIMEKTGQTAD--EVLNTLNKKSGLLGISGFSSDLRDIVEATKEGNERAET | 298 |
| Query: | 301 | AYNIFIDRIKKCIGQYFAVLNGADALVFTAGMGENAPLMRQDVIGGLTWFGMDIDPE-KN | 359 |
| | | A +F RI K IG Y A ++G DA++FTAG+GEN+ +R+ V+ GL + G+ DP N | |
| Sbjct: | 299 | ALEVFASRIHKYIGSYAARMSGVDAIIFTAGIGENSVEVRERVLRGLEFMGVYWDPALNN | 358 |
| Query: | 360 | VFGYRGDISTPESKVKVLVISTDEELCIARDVERL | 394 |
| | | V G IS P S VKV++I TDEE+ IARDV RL | |
| Sbjct: | 359 | VRGEEAFISYPHSPVKVMIIPTDEEVMIARDVVRL | 393 |

[1025] An alignment of the GAS and GBS proteins is shown below:

| Identities = 332/395 (84%), Positives = 365/395 (92%) | | | |
|---|---|---|---|
| Query: | 1 | MSKTIAINAGSSSLKWQLYEMPEEKVVAKGIIERIGLKDSISTVKFDDKKDEQILDIVDH | 60 |
| | | MSKTIAINAGSSSLKWQLY+MPEE V+A+GIIERIGLKDSISTVK+D KK+EQILDI DH | |
| Sbjct: | 1 | MSKTIAINAGSSSLKWQLYQMPEEAVLAQGIIERIGLKDSISTVKYDGKKEEQILDIHDH | 60 |
| Query: | 61 | TQAVKILLEDLTKHGIIKDFNEITGVGHRVVAGGEYFKESALVDDKVVEQVEELSALAPL | 120 |
| | | T+AVKILL DL GII ++EITGVGHRVVAGGE FKES +V+DKV+EQ+EELS LAPL | |
| Sbjct: | 61 | TEAVKILLNDLIHFGIIAAYDEITGVGHRVVAGGELFKESVVVNDKVLEQIEELSVLAPL | 120 |
| Query: | 121 | HNPAAAAGIRAFREILPDITSVCVFDTAFHTTMQPHTYLYPIPQKYYTDYKVRKYGAHGT | 180 |
| | | HNP AAAGIRAFR+ILPDITSVCVFDT+FHT+M HTYLYPIPQKYYTDYKVRKYGAHGT | |
| Sbjct: | 121 | HNPGAAAGIRAFRDILPDITSVCVFDTSFHTSMAKHTYLYPIPQKYYTDYKVRKYGAHGT | 180 |
| Query: | 181 | SHQYVAQEAAKQLGRPLEELKLITAHVGNGVSITANYHGQSIDTSMGFTPLAGPMMGTRS | 240 |
| | | SH+YVAQEAAK LGRPLEELKLITAH+GNGVSITANYHG+S+DTSMGFTPLAGPMMGTRS | |
| Sbjct: | 181 | SHKYVAQEAAKMLGRPLEELKLITAHIGNGVSITANYHGKSVDTSMGFTPLAGPMMGTRS | 240 |
| Query: | 241 | GDIDPAIIPYLVANDPELEDAAAVVNMLNKQSGLLGVSGTSSDMRDIEAGLQSKDPNAVL | 300 |
| | | GDIDPAIIPYL+ DPEL+DAA VVNMLNK+SGL GVSG SSDMRDIEAGLQ +P+AVL | |
| Sbjct: | 241 | GDIDPAIIPYLIEQDPELKDAADVVNMLNKKSGLSGVSGISSDMRDIEAGLQEDNPDAVL | 300 |
| Query: | 301 | AYNVFIDRIKKFIGQYLAVLNGADAIIFTAGMGENAPLMRQDVIAGLSWFGIELDPEKNV | 360 |
| | | AYN+FIDRIKK IGQY AVLNGADA++FTAGMGENAPLMRQDVI GL+WFG+++DPEKNV | |
| Sbjct: | 301 | AYNIFIDRIKKCIGQYFAVLNGADALVFTAGMGENAPLMRQDVIGGLTWFGMDIDPEKNV | 360 |
| Query: | 361 | FGYFGDITKPDSKVKVLVIPTDEELMIARDVERLK | 395 |
| | | FGY GDI+ P+SKVKVLVI TDEEL IARDVERLK | |
| Sbjct: | 361 | FGYRGDISTPESKVKVLVISTDEELCIARDVERLK | 395 |

[1026] Based on this analysis, it was predicted that these proteins and their epitopes could be useful antigens for vaccines or diagnostics.

### EXAMPLE 121

[1027] A DNA sequence (GBSx0126) was identified in S. agalactiae <SEQ ID 409> which encodes the amino acid sequence <SEQ ID 410>. This protein is predicted to be repressor protein. Analysis of this protein sequence reveals the following:

```
Possible site: 17
>>> Seems to have an uncleavable N-term signal seq
----- Final Results -----
                              bacterial membrane --- Certainty = 0.0000(Not Clear) < succ>
                                bacterial outside --- Certainty = 0.0000(Not Clear) < succ>
                            bacterial cytoplasm --- Certainty = 0.0000(Not Clear) < succ>
```

[1028] The protein has homology with the following sequences in the GENPEPT database:

| >GP: CAB49550 GB: AJ248284 repressor protein, putative [Pyrococcus | | | |
|---|---|---|---|
| abyssi] | | | |
| Identities = 39/64 (60%), Positives = 49/64 (75%) | | | |
| Query: | 1 | MKNSLQKLRKSRKLSQAELAVALGVTRQTIISLEKEKYTASLELAFKIARYFDKQIEEVF | 60 |
| | | MKN L++ R+ L+Q ELA LGVTRQTII++EK KY SL LAFKIAR+F +IE++F | |
| Sbjct: | 1 | MKNRLREFREKYGLTQEELARILGVTRQTIIAIEKGKYDPSLRLAFKIARFFGVRIEDIF | 60 |
| Query: | 61 | IYTE | 64 |
| | | IY E | |
| Sbjct: | 61 | IYEE | 64 |

[1029] A related DNA sequence was identified in S. pyogenes <SEQ ID 411> which encodes the amino acid sequence <SEQ ID 412>. Analysis of this protein sequence reveals the following:

```
Possible site: 40
>>> Seems to have no N-terminal signal sequence
----- Final Results -----
                            bacterial cytoplasm --- Certainty = 0.4344(Affirmative) < succ>
                              bacterial membrane --- Certainty = 0.0000(Not Clear) < succ>
                                bacterial outside --- Certainty = 0.0000(Not Clear) < succ>
```

[1030] An alignment of the GAS and GBS proteins is shown below:

| Identities = 29/66 (43%), Positives = 44/66 (65%) | | | |
|---|---|---|---|
| Query: | 1 | MKNSLQKLRKSRKLSQAELAVALGVTRQTIISLEKEKYTASLELAFKIARYFDKQIEEVF | 60 |
| | | +KN L++LR ++Q E+A GV+RQTI +E+ +YT S+ +A KIA+ F + +EEVF | |
| Sbjct: | 10 | LKNRLKELRARDGINQTEMAKLAGVSRQTISLIERNEYTPSVIIAMKIAKVFQEPVEEVF | 69 |
| Query: | 61 | IYTESE | 66 |
| | | E E | |
| Sbjct: | 70 | RLVEVE | 75 |

[1031] Based on this analysis, it was predicted that these proteins and their epitopes could be useful antigens for vaccines or diagnostics.

### EXAMPLE 122

[1032] A DNA sequence (GBSx0127) was identified in S. agalactiae <SEQ ID 413> which encodes the amino acid sequence <SEQ ID 414>. Analysis of this protein sequence reveals the following:

| Possible site: 32 | | | | |
|---|---|---|---|---|
| >>> Seems to have an uncleavable N-term signal seq | | | | |
| | INTEGRAL | Likelihood = −8.97 | Transmembrane | 45-61 (41-66) |
| | INTEGRAL | Likelihood = −8.65 | Transmembrane | 14-30 (11-37) |
| | INTEGRAL | Likelihood = −7.80 | Transmembrane | 123-139 (118-145) |
| | INTEGRAL | Likelihood = −3.24 | Transmembrane | 177-193 (177-194) |
| | INTEGRAL | Likelihood = −0.85 | Transmembrane | 81-97 (81-97) |

```
----- Final Results -----
                              bacterial membrane --- Certainty = 0.4588(Affirmative) < succ>
                                bacterial outside --- Certainty = 0.0000(Not Clear) < succ>
                            bacterial cytoplasm --- Certainty = 0.0000(Not Clear) < succ>
```

[1033] A related GBS nucleic acid sequence <SEQ ID 9491> which encodes amino acid sequence <SEQ ID 9492> was also identified.

[1034] The protein has homology with the following sequences in the GENPEPT database:

| >GP: BAA11325 GB: D78257 ORF8 [Enterococcus faecalis] | | | |
|---|---|---|---|
| Identities = 48/120 (40%), Positives = 69/120 (57%), Gaps = 5/120 (4%) | | | |
| Query: | 104 | MQGVKDTANQTVIMELTKQLPLALMLIFAIIGAPIMEEIIFRYIIPKELFAKHQKWGFVI | 163 |
| | | MQG TAN + +++L + L+++ I APIMEEI+FR I L + +I | |
| Sbjct: | 1 | MQGHTTTANDSTLIKLFSGVSPVLVVLLLGIAAPIMEEIVFRGGIIGYLVENNALLAILI | 60 |
| Query: | 164 | GTLAFALIHSPSDIGSFIIYAGMGAILSFVYYKTEHLEYSIMIHFINN-----ALAYSVL | 218 |
| | | + F +IH P++ SF +Y MG ILS YYKT+ L SI IHF+NN A+AY ++ | |
| Sbjct: | 61 | SSFLFGIIHGPTNFISFGMYFFMGIILSVSYYKTKDLRVSISIHFLNNLFPAIAIAYGLI | 120 |

[1035] A related DNA sequence was identified in S. pyogenes <SEQ ID 415> which encodes the amino acid sequence <SEQ ID 416>. Analysis of this protein sequence reveals the following:

Possible site: 24
>>> Seems to have an uncleavable N-term signal seq

| | | | |
|---|---|---|---|
| INTEGRAL | Likelihood = −11.41 | Transmembrane | 12-28 (1-30) |
| INTEGRAL | Likelihood = −9.98 | Transmembrane | 41-57 (33-64) |
| INTEGRAL | Likelihood = −8.33 | Transmembrane | 128-144 (121-151) |
| INTEGRAL | Likelihood = −7.96 | Transmembrane | 83-99 (76-103) |
| INTEGRAL | Likelihood = −3.77 | Transmembrane | 208-224 (207-230) |
| INTEGRAL | Likelihood = −2.13 | Transmembrane | 182-198 (182-199) |

```
----- Final Results -----
                              bacterial membrane --- Certainty = 0.5564(Affirmative) < succ>
                                bacterial outside --- Certainty = 0.0000(Not Clear) < succ>
                            bacterial cytoplasm --- Certainty = 0.0000(Not Clear) < succ>
```

[1036] The protein has homology with the following sequences in the databases:

| >GP: BAA11325 GB: D78257 ORF8 [Enterococcus faecalis] | | | |
|---|---|---|---|
| Identities = 47/120 (39%), Positives = 70/120 (58%), Gaps = 8/120 (6%) | | | |
| Query: | 105 | GQQVSANDAAIHTLARLIKGGFPLYTALFVLVIAFIAPIMEELVFRGFPMIDLFKGKSLK | 164 |
| | | G +AND+ TL +L G P+ L VL++ APIMEE+VFRG + L + +L | |
| Sbjct: | 3 | GHTTTANDS---TLIKLFSGVSPV---LVVLLLGIAAPIMEEIVFRGGIIGYLVENNAL- | 55 |
| Query: | 165 | VAGLVTSLVFALPHA-TNSVEFIMYSCMGIFLFVAYQRRGNLKDAILLHIFNNLIEVILL | 223 |
| | | +A L++S +F + H TN + F MY MGI L V+Y + +L+ +I +H NNL I + | |
| Sbjct: | 56 | LAILISSFLFGIIHGPTNFISFGMYFFMGIILSVSYYKTKDLRVSISIHFLNNLFPAIAI | 115 |

[1037] An alignment of the GAS and GBS proteins is shown below:

| Identities = 72/229 (31%), Positives = 114/229 (49%), Gaps = 24/229 (10%) | | | |
|---|---|---|---|
| Query: | 11 | KGKILALLIAFLVINQLV-PILAVWLLKNHYQTPFTSILLIGL-------ELLIIALFLY | 62 |
| | | KG I L IA L+I +V +L + LL+ + P IG+ +LI+ LY | |
| Sbjct: | 2 | KGFINYLKIAVLIILAMVFNVLPMILLQKQHDIPMVLNWGIGIFYLVIVGSVLIVLWGLY | 61 |
| Query: | 63 | YAKVKQIIRWKALLTRKALVT---ILLGWLSLRVPQIIGYLIMTM-QGVKDTANQTVIME | 118 |
| | | AK I+ + + LV + L WL +RV I+G L+ + G + +AN I | |
| Sbjct: | 62 | QAKQDTFIKQQKM----RLVDWGYLALFWLIIRVIAIVGTLVNQLWSGQQVSANDAAIHT | 117 |
| Query: | 119 | LTKQL----PLALMLIFAIIG--APIMEEIIFRYIIPKELF-AKHQKWGFVIGTLAFALI | 171 |
| | | L + + PL L +I APIMEE++FR +LF K K ++ +L FAL | |
| Sbjct: | 118 | LARLIKGGFPLYTALFVLVIAFIAPIMEELVFRGFPMIDLFKGKSLKVAGLVTSLVFALP | 177 |
| Query: | 172 | HSPSDIGSFIIYAGMGAILSFVYYKTEHLEYSIMIHFINNALAYSVLIS | 220 |
| | | H+ + + FI+Y+ MG L Y + +L+ +I++H NN + +L+S | |
| Sbjct: | 178 | HATNSV-EFIMYSCMGIFLFVAYQRRGNLKDAILLHIFNNLIEVILLMS | 225 |

[1038] Based on this analysis, it was predicted that these proteins and their epitopes could be useful antigens for vaccines or diagnostics.

### EXAMPLE 123

[1039] A DNA sequence (GBSx0128) was identified in S. agalactiae <SEQ ID 417> which encodes the amino acid sequence <SEQ ID 418>. Analysis of this protein sequence reveals the following:

```
Possible site: 14
>>> Seems to have no N-terminal signal sequence
----- Final Results -----
                            bacterial cytoplasm --- Certainty = 0.0826(Affirmative) < succ>
                              bacterial membrane --- Certainty = 0.0000(Not Clear) < succ>
                                bacterial outside --- Certainty = 0.0000(Not Clear) < succ>
```

[1040] The protein has homology with the following sequences in the GENPEPT database:

| >GP: AAC06504 GB: AE000676 pyrroline carboxylate reductase [Aquifex | | | |
|---|---|---|---|
| aeolicus] | | | |
| Identities = 97/259 (37%), Positives = 159/259 (60%), Gaps = 4/259 (1%) | | | |
| Query: | 1 | MKIGIIGVGKM--ASAIIQGLKQTQHDIIISGSCLERSKEIAERLDVTYAESHQSLINQA | 58 |
| | | M++GI+G G M A A+ K + +II++ E+ + +A + + +A + L + + | |
| Sbjct: | 8 | MRVGIVGFGNMGQAFALCFSKKLGKENIIVTDKVQEK-RNLATEMGIAFASDVKFLADNS | 66 |
| Query: | 59 | DIIMLGIKPQLFEKVLLPLDITKPII-SMAAGISLARLSQLTRSDLPLIRIMPNINAQIL | 117 |
| | | D++++ +KP+ ++VL L K II S+ AG+S+ ++ ++ D ++R+MPN+N + | |
| Sbjct: | 67 | DVVLVAVKPKDSQEVLQKLKDYKGIILSIMAGVSIEKMEKILGKDKKIVRVMPNVNVAVG | 126 |
| Query: | 118 | QSCTAICYNNHVSDELRQLAKEITDSFGSSFDIAETNFDTFTALAGSSPAYIYLFIEALA | 177 |
| | | AI N ++S+E R +E+ S G+ + I E FD FTALAGS PA+++ FI+ALA | |
| Sbjct: | 127 | SGVMAITDNGNLSEEERSKVEELLLSCGTLYRIEERLFDAFTALAGSGPAFVFSFIDALA | 186 |
| Query: | 178 | KAGVKYGFPKEQALSIVGQTVLASSQNLLQGQNSTSDLIDNICSPGGTTIAGLLDLEKNG | 237 |
| | | AGV GF EQAL I TV+ S++ L + Q + ++LI + SPGGTTI G+ LE+ G | |
| Sbjct: | 187 | LAGVHQGFSYEQALRIALDTVMGSAKLLKEFQVNPNELIAKVTSPGGTTIEGIKYLEEKG | 246 |
| Query: | 238 | LTHSVISAIDATIEKAKKL | 256 |
| | | +V+ I+ T +KAKKL | |
| Sbjct: | 247 | FKGTVMECINRTSQKAKKL | 265 |

[1041] A related DNA sequence was identified in S. pyogenes <SEQ ID 419> which encodes the amino acid sequence <SEQ ID 420>. Analysis of this protein sequence reveals the following:

```
Possible site: 50
>>> Seems to have no N-terminal signal sequence
----- Final Results -----
                            bacterial cytoplasm --- Certainty = 0.1043(Affirmative) < succ>
                              bacterial membrane --- Certainty = 0.0000(Not Clear) < succ>
                                bacterial outside --- Certainty = 0.0000(Not Clear) < succ>
```

[1042] An alignment of the GAS and GBS proteins is shown below:

| Identities = 180/256 (70%), Positives = 208/256 (80%) | | | |
|---|---|---|---|
| Query: | 1 | MKIGIIGVGKMASAIIQGLKQTQHDIIISGSCLERSKEIAERLDVTYAESHQSLINQADI | 60 |
| | | MKIGIIGVGKMASAII+GLKQT H++IISGS LERSKEIAE+L + YA SHQ LI+Q D+ | |
| Sbjct: | 1 | MKIGIIGVGKMASAIIKGLKQTPHELIISGSSLERSKEIAEQLALPYAMSHQDLIDQVDL | 60 |
| Query: | 61 | IMLGIKPQLFEKVLLPLDITKPIISMAAGISLARLSQLTRSDLPLIRIMPNINAQILQSC | 120 |
| | | ++LGIKPQLFE VL PL +PIISMAAGISL RL+ DLPL+RIMPN+NAQILQS | |
| Sbjct: | 61 | VILGIKPQLFETVLKPLHFKQPIISMAAGISLQRLATFVGQDLPLLRIMPNMNAQILQSS | 120 |
| Query: | 121 | TAICYNNHVSDELRQLAKEITDSFGSSFDIAETNFDTFTALAGSSPAYIYLFIEALAKAG | 180 |
| | | TA+ N VS EL+ +++TDSFGS+FDI+E +FDTFTALAGSSPAYIYLFIEALAKAG | |
| Sbjct: | 121 | TALTGNALVSQELQARVRDLTDSFGSTFDISEKDFDTFTALAGSSPAYIYLFIEALAKAG | 180 |
| Query: | 181 | VKYGFPKEQALSIVGQTVLASSQNLLQGQNSTSDLIDNICSPGGTTIAGLLDLEKNGLTH | 240 |
| | | VK G PK +AL IV QTVLAS+ NL S D ID ICSPGGTTIAGL++LE+ GLT | |
| Sbjct: | 181 | VKNGIPKAKALEIVTQTVLASASNLKTSSQSPHDFIDAICSPGGTTIAGLMELERLGLTA | 240 |
| Query: | 241 | SVISAIDATIEKAKKL | 256 |
| | | +V SAID TI+KAK L | |
| Sbjct: | 241 | TVSSAIDKTIDKAKSL | 256 |

[1043] Based on this analysis, it was predicted that these proteins and their epitopes could be useful antigens for vaccines or diagnostics.

### EXAMPLE 124

[1044] A DNA sequence (GBSx0129) was identified in S. agalactiae <SEQ ID 421> which encodes the amino acid sequence <SEQ ID 422>. Analysis of this protein sequence reveals the following:

```
Possible site: 58
>>> Seems to have no N-terminal signal sequence
----- Final Results -----
                            bacterial cytoplasm --- Certainty = 0.3405(Affirmative) < succ>
                              bacterial membrane --- Certainty = 0.0000(Not Clear) < succ>
                                bacterial outside --- Certainty = 0.0000(Not Clear) < succ>
```

[1045] The protein has homology with the following sequences in the GENPEPT database:

| >GP: CAA56994 GB: X81089 glutamyl-aminopeptidase [Lactococcus lactis] | | | |
|---|---|---|---|
| Identities = 219/354 (61%), Positives = 273/354 (76%), Gaps = 1/354 (0%) | | | |
| Query: | 3 | DLFNKIKTVTELDGIAGYEHNIRNFLRQEITPLVDQVETDGLGGIFGVKNTHETNAPKVM | 62 |
| | | +LF+K+K +TE+ +G+E +R++L+ + L Q E DGLGGIF K + NAP++M | |
| Sbjct: | 2 | ELFDKVKALTEIQATSGFEGPVRDYLKARMVELGYQPEFDGLGGIFVTKASKVENAPRIM | 61 |
| Query: | 63 | VAAHMDEVGFMVSHIQPDGTFRVLEVGGWNPLVVSSQRFTLYTRSGDAIPVISGSVPPHF | 122 |
| | | VAAHMDEVGFMVS I+ DGTFRV+ +GGWNPLVVS QRFTL+TR+G IPV++G +PPH | |
| Sbjct: | 62 | VAAHMDEVGFMVSSIKADGTFRVVPLGGWNPLVVSGQRFTLFTRTGKKIPVVTGGLPPHL | 121 |
| Query: | 123 | LRGQSGGTTLPKISDIVFDGGFTDKNEAESFGIAPGDIIVPKSETILTANQKHIMSKAWD | 182 |
| | | LRG +P ISDI+FDG F + KA FGIA GD+I+P++ETIL+AN K+I+SKAWD | |
| Sbjct: | 122 | LRGTGVTPQIPAISDIIFDGAFENAAEAAEFGIAQGDLIIPETETILSANGKNIISKAWD | 181 |
| Query: | 183 | NRYGVLMVTELLKSLKDQSLSNTLIAGANVQEEVGLRGAHVSTTKFNPDIFLAVDCSPAG | 242 |
| | | NRYG LM+ ELL+ L D+ L TLI GANVQEEVGLRGA VSTTKFNPD+F AVDCSPA | |
| Sbjct: | 182 | NRYGCLMILELLEFLADKELPVTLIIGANVQEEVGLRGAKVSTTKFNPDLFFAVDCSPAS | 241 |
| Query: | 243 | DIYG-EQGKIGEGTLIRFYDPGHIMLKDMRDFLLTTAEEAGIKYQYYAANGGTDAGAAHL | 301 |
| | | D +G + G++GEGT +RF+DPGHIML M++FLL TA A +K Q Y A GGTDAGAAHL | |
| Sbjct: | 242 | DTFGDDNGRLGEGTTLRFFDPGHIMLPGMKNFLLDTANHAKVKTQVYMAKGGTDAGAAHL | 301 |
| Query: | 302 | KNSGIPSTTIGVCARYIHSHQTLYAMDDFLQAQAYLQAIVNKLDRSTVDIIKGY | 355 |
| | | N G+PSTTIGV ARYIHSHQT++ +DDFLQAQ +L+AI+ L+ V IK Y | |
| Sbjct: | 302 | ANGGVPSTTIGVVARYIHSHQTIFNIDDFLQAQTFLRAIITSLNTEKVAEIKNY | 355 |

[1046] A related DNA sequence was identified in S. pyogenes <SEQ ID 423> which encodes the amino acid sequence <SEQ ID 424>. Analysis of this protein sequence reveals the following:

```
Possible site: 55
>>> Seems to have no N-terminal signal sequence
----- Final Results -----
                            bacterial cytoplasm --- Certainty = 0.2747(Affirmative) < succ>
                              bacterial membrane --- Certainty = 0.0000(Not Clear) < succ>
                                bacterial outside --- Certainty = 0.0000(Not Clear) < succ>
```

[1047] An alignment of the GAS and GBS proteins is shown below:

| Identities = 276/355 (77%), Positives = 322/355 (89%) | | | |
|---|---|---|---|
| Query: | 1 | MSDLFNKIKTVTELDGIAGYEHNIRNFLRQEITPLVDQVETDGLGGIFGVKNTHETNAPK | 60 |
| | | M+DLF+KIK VTELDGIAGYEH++R++LR +ITPLVD+VETDGLGGIFG++++ AP+ | |
| Sbjct: | 1 | MTDLFSKIKEVTELDGIAGYEHSVRDYLRTKITPLVDRVETDGLGGIFGIRDSKAEKAPR | 60 |
| Query: | 61 | VMVAAHMDEVGFMVSHIQPDGTFRVLEVGGWNPLVVSSQRFTLYTRSGDAIPVISGSVPP | 120 |
| | | ++VAAHMDEVGFMVS I+ DGT RV+ +GGWNPLVVSSQRFTLYTR+G IP+ISGSVPP | |
| Sbjct: | 61 | ILVAAHMDEVGFMVSDIKVDGTLRVVGIGGWNPLVVSSQRFTLYTRTGQVIPLISGSVPP | 120 |
| Query: | 121 | HFLRGQSGGTTLPKISDIVFDGGFTDKNEAESFGIAPGDIIVPKSETILTANQKHIMSKA | 180 |
| | | HFLRG +G +LP I DIVFDGGFTDK EAE FGI PGDII+P+SETILTANQK+I+SKA | |
| Sbjct: | 121 | HFLRGANGSASLPHIEDIVFDGGFTDKAEAERFGITPGDIIIPQSETILTANQKNIISKA | 180 |
| Query: | 181 | WDNRYGVLMVTELLKSLKDQSLSNTLIAGANVQEEVGLRGAHVSTTKFNPDIFLAVDCSP | 240 |
| | | WDNRYGVLM+TE+L++LK Q L+NTLIAGANVQEEVGLRGAHVSTTKF+P++F AVDCSP | |
| Sbjct: | 181 | WDNRYGVLMITEMLEALKGQDLNNTLIAGANVQEEVGLRGAHVSTTKFDPELFFAVDCSP | 240 |
| Query: | 241 | AGDIYGEQGKIGEGTLIRFYDPGHIMLKDMRDFLLTTAEEAGIKYQYYAANGGTDAGAAH | 300 |
| | | AGDIYG G IG+GTL+RFYDPGH+MLKDMRDFLLTTAEEAG+ +QYY GGTDAGAAH | |
| Sbjct: | 241 | AGDIYGNPGTIGDGTLLRFYDPGHVMLKDMRDFLLTTAEEAGVNFQYYCGKGGTDAGAAH | 300 |
| Query: | 301 | LKNSGIPSTTIGVCARYIHSHQTLYAMDDFLQAQAYLQAIVNKLDRSTVDIIKGY | 355 |
| | | L+N G+PSTTIGVCARYIHSHQTLYAMDDF++AQA+LQAI+ KLDRSTVD+IK Y | |
| Sbjct: | 301 | LQNGGVPSTTIGVCARYIHSHQTLYAMDDFVEAQAFLQAIIKKLDRSTVDLIKCY | 355 |

[1048] Based on this analysis, it was predicted that these proteins and their epitopes could be useful antigens for vaccines or diagnostics.

### EXAMPLE 125

[1049] A DNA sequence (GBSx0130) was identified in S. agalactiae <SEQ ID 425> which encodes the amino acid sequence <SEQ ID 426>. Analysis of this protein sequence reveals the following:

```
Possible site: 26
>>> Seems to have no N-terminal signal sequence
----- Final Results -----
                            bacterial cytoplasm --- Certainty = 0.1672(Affirmative) < succ>
                              bacterial membrane --- Certainty = 0.0000(Not Clear) < succ>
                                bacterial outside --- Certainty = 0.0000(Not Clear) < succ>
```

[1050] The protein has no significant homology with any sequences in the GENPEPT database.

[1051] No corresponding DNA sequence was identified in S. pyogenes.

[1052] Based on this analysis, it was predicted that this protein and its epitopes, could be useful antigens for vaccines or diagnostics.

### EXAMPLE 126

[1053] A DNA sequence (GBSx0131) was identified in S. agalactiae <SEQ ID 427> which encodes the amino acid sequence <SEQ ID 428>. Analysis of this protein sequence reveals the following:

| Possible site: 31 | | | | |
|---|---|---|---|---|
| >>> Seems to have no N-terminal signal sequence | | | | |
| | INTEGRAL | Likelihood = −2.28 | Transmembrane | 18-34 (17-34) |

```
----- Final Results -----
                              bacterial membrane --- Certainty = 0.1914(Affirmative) < succ>
                                bacterial outside --- Certainty = 0.0000(Not Clear) < succ>
                            bacterial cytoplasm --- Certainty = 0.0000(Not Clear) < succ>
```

[1054] The protein has no significant homology with any sequences in the GENPEPT database.

[1055] A related DNA sequence was identified in S. pyogenes <SEQ ID 429> which encodes the amino acid sequence <SEQ ID 430>. Analysis of this protein sequence reveals the following:

| Possible site: 21 | | | | |
|---|---|---|---|---|
| >>> Seems to have an uncleavable N-term signal seq | | | | |
| | INTEGRAL | Likelihood = −6.16 | Transmembrane | 12-28 (8-30) |

```
----- Final Results -----
                              bacterial membrane --- Certainty = 0.3463(Affirmative) < succ>
                                bacterial outside --- Certainty = 0.0000(Not Clear) < succ>
                            bacterial cytoplasm --- Certainty = 0.0000(Not Clear) < succ>
```

[1056] The protein has no significant homology with any sequences in the GENPEPT database.

[1057] An alignment of the GAS and GBS proteins is shown below:

| Identities = 30/91 (32%), Positives = 48/91 (51%) | | | |
|---|---|---|---|
| Query: | 13 | MKNKKILFGTGLAGVGLLAAAGYTLTKKVTDYKRQQITQTLREFFSQMGDIQVFYFNEFE | 72 |
| | | M KKI +G+ G L G + D +R+Q+T+ LR FFS +G I+V Y N + | |
| Sbjct: | 4 | MSKKKIGMISGIFGFSLAIGLGIVIKDYCQDRQRRQMTRDLRTFFSPLGQIEVLYINPCQ | 63 |
| Query: | 73 | SDIKMTSGGLVLEDGRIFEFIYRQGVLDYVE | 103 |
| | | SGG+V+ +G+ ++F Y + + E | |
| Sbjct: | 64 | VKQDYISGGVVMSNGKQYQFTYHSRQISFEE | 94 |

[1058] A related GBS gene <SEQ ID 8497> and protein <SEQ ID 8498> were also identified. Analysis of this protein sequence reveals the following:

```
Lipop Possible site: −1 Crend: 4
SRCFLG: 0
McG: Length of UR: 21
          Peak Value of UR: 2.30
          Net Charge of CR: 3
McG: Discrim Score: 6.28
GvH: Signal Score (−7.5): −1.46
          Possible site: 19
>>> Seems to have a cleavable N-term signal seq.
Amino Acid Composition: calculated from 20
ALOM program count: 0 value: 22.60 threshold: 0.0
PERIPHERAL Likelihood = 22.60 29
modified ALOM score: −5.02
*** Reasoning Step: 3
Rule gpo1
----- Final Results -----
                                bacterial outside --- Certainty = 0.3000(Affirmative) < succ>
                              bacterial membrane --- Certainty = 0.0000(Not Clear) < succ>
                            bacterial cytoplasm --- Certainty = 0.0000(Not Clear) < succ>
```

[1059] SEQ ID 8498 (GBS214) was expressed in E. coli as a His-fusion product. SDS-PAGE analysis of total cell extract is shown in FIG. 40 (lane 3; MW 13.9 kDa). It was also expressed in E. coli as a GST-fusion product. SDS-PAGE analysis of total cell extract is shown in FIG. 46 (lane 6; MW 39 kDa).

[1060] Based on this analysis, it was predicted that these proteins and their epitopes could be useful antigens for vaccines or diagnostics.

### EXAMPLE 127

[1061] A DNA sequence (GBSx0132) was identified in S. agalactiae <SEQ ID 431> which encodes the amino acid sequence <SEQ ID 432>. This protein is predicted to be thioredoxin H1 (trxA). Analysis of this protein sequence reveals the following:

```
Possible site: 40
>>> Seems to have no N-terminal signal sequence
----- Final Results -----
                            bacterial cytoplasm --- Certainty = 0.2350(Affirmative) < succ>
                              bacterial membrane --- Certainty = 0.0000(Not Clear) < succ>
                                bacterial outside --- Certainty = 0.0000(Not Clear) < succ>
```

[1062] The protein has homology with the following sequences in the GENPEPT database:

| >GP: BAB06972 GB: AP001518 thioredoxin H1 [Bacillus halodurans] | | | |
|---|---|---|---|
| Identities = 47/90 (52%), Positives = 66/90 (73%) | | | |
| Query: | 14 | IDSTKKVVFFFTADWCPDCQFIYPVMPSIEKDFSDFVFVRVNRDDYIELAQQWNIFGIPS | 73 |
| | | + + + VVF F+ADWCPDC+ I P +P +E+ + ++ F VNRDD+IEL Q+ +IFGIPS | |
| Sbjct: | 13 | VKNQENVVFLFSADWCPDCRVIEPFLPELEQTYDEYQFYYVNRDDFIELCQELDIFGIPS | 72 |
| Query: | 74 | FVVVENGQELGRLVNKNRKTKAEITKFLAE | 103 |
| | | F+ NG+E R V+K+RKTK EI +FL E | |
| Sbjct: | 73 | FLFYSNGEERSRFVSKDRKTKEEIERFLTE | 102 |

[1063] A related DNA sequence was identified in S. pyogenes <SEQ ID 433> which encodes the amino acid sequence <SEQ ID 434>. Analysis of this protein sequence reveals the following:

```
Possible site: 35
>>> Seems to have no N-terminal signal sequence
----- Final Results -----
                            bacterial cytoplasm --- Certainty = 0.1997(Affirmative) < succ>
                              bacterial membrane --- Certainty = 0.0000(Not Clear) < succ>
                                bacterial outside --- Certainty = 0.0000(Not Clear) < succ>
```

[1064] An alignment of the GAS and GBS proteins is shown below:

| Identities = 70/102 (68%), Positives = 81/102 (78%) | | | |
|---|---|---|---|
| Query: | 1 | MILPESYEEIAAYIDSTKKVVFFFTADWCPDCQFIYPVMPSIEKDFSDFVFVRVNRDDYI | 60 |
| | | MI P SYE +A I+ K+V FFTADWCPDCQFIYP+MP IE + +D FV VNRD +I | |
| Sbjct: | 1 | MIRPTSYESLATLIEKEDKLVLFFTADWCPDCQFIYPIMPEIEAELTDMTFVCVNRDQFI | 60 |
| Query: | 61 | ELAQQWNIFGIPSFVVVENGQELGRLVNKNRKTKAEITKFLA | 102 |
| | | E+AQ+WNIFGIPSFVV+E GQE+GRLVNK RKTK EI FLA | |
| Sbjct: | 61 | EVAQKWNIFGIPSFVVIEKGQEVGRLVNKMRKTKTEIMHFLA | 102 |

[1065] Based on this analysis, it was predicted that these proteins and their epitopes could be useful antigens for vaccines or diagnostics.

### EXAMPLE 128

[1066] A DNA sequence (GBSx0133) was identified in S. agalactiae <SEQ ID 435> which encodes the amino acid sequence <SEQ ID 436>. This protein is predicted to be phenylalanyl-tRNA synthetase beta subunit, non-spirochete. Analysis of this protein sequence reveals the following:

```
Possible site: 47
>>> Seems to have no N-terminal signal sequence
----- Final Results -----
                            bacterial cytoplasm --- Certainty = 0.1310(Affirmative) < succ>
                              bacterial membrane --- Certainty = 0.0000(Not Clear) < succ>
                                bacterial outside --- Certainty = 0.0000(Not Clear) < succ>
```

[1067] The protein has homology with the following sequences in the GENPEPT database:

| >GP: AAC00291 GB: AF008220 YtpR [Bacillus subtilis] | | | |
|---|---|---|---|
| Identities = 78/196 (39%), Positives = 125/196 (62%), Gaps = 1/196 (0%) | | | |
| Query: | 5 | YNREHVGDTLMVIVKDSQGAKLDVDRRGQVARVYLQDSKETVAWNIFEVSSLIVIEGAGQ | 64 |
| | | YN+E VGDTL++ ++D +L ++ G V +++ ++KET +NIF SS + I+ G | |
| Sbjct: | 5 | YNKEGVGDTLLISLQDVTREQLGYEKHGDVVKIFNNETKETTGFNIFNASSYLTIDENGP | 64 |
| Query: | 65 | ITLSDQDIKILNAELLKEGFEDSLVNNIEPTFVVAQIKEIIDHPDSDHLHICQAEINDGK | 124 |
| | | + LS+ ++ +N L + G E++LV ++ P FVV ++ HP++D L +C+ + + + | |
| Sbjct: | 65 | VALSETFVQDVNEILNRNGVEETLVVDLSPKFVVGYVESKEKHPNADKLSVCKVNVGE-E | 123 |
| Query: | 125 | TVQIVCGAPNASVGLKTVAALPGAMMPNGSLIFPGKLRGEDSFGMLCSARELALPNAPQV | 184 |
| | | T+QIVCGAPN G K V A GA+MP+G +I +LRG S GM+CSA+EL LP+AP | |
| Sbjct: | 124 | TLQIVCGAPNVDQGQKVVVAKVGAVMPSGLVIKDAELRGVPSSGMICSAKELDLPDAPAE | 183 |
| Query: | 185 | RGIIELSDQVIVGESF | 200 |
| | | +GI+ L G++F | |
| Sbjct: | 184 | KGILVLEGDYEAGDAF | 199 |

[1068] A related DNA sequence was identified in S. pyogenes <SEQ ID 437> which encodes the amino acid sequence <SEQ ID 438>. Analysis of this protein sequence reveals the following:

| Possible site: 47 | | | | |
|---|---|---|---|---|
| >>> Seems to have no N-terminal signal sequence | | | | |
| | INTEGRAL | Likelihood = −1.49 | Transmembrane | 90-106 (90-107) |

```
----- Final Results -----
                              bacterial membrane --- Certainty = 0.1595(Affirmative) < succ>
                                bacterial outside --- Certainty = 0.0000(Not Clear) < succ>
                            bacterial cytoplasm --- Certainty = 0.0000(Not Clear) < succ>
```

[1069] The protein has homology with the following sequences in the databases:

| >GP: BAB06970 GB: AP001518 phenylalanyl-tRNA synthetase (beta subunit) | | | |
|---|---|---|---|
| [Bacillus halodurans] | | | |
| Identities = 84/196 (42%), Positives = 124/196 (62%), Gaps = 1/196 (0%) | | | |
| Query: | 5 | YNKEQVGDVLMVILQDTKDIKRQVERKGKVARVFAEESGKTLAWNIFEASSLITIEGNGQ | 64 |
| | | YN++ +GD +++++ + + R ER+G V R++ +GKT +N+F AS G G | |
| Sbjct: | 5 | YNEKGIGDTILIVIDEVEPANRAYERQGDVVRIYHLGTGKTTGYNLFHASKYGEFNGQGL | 64 |
| Query: | 65 | IFLTDENLARLNAELAKEGFSERLEPIVGPVFVVGQIVEMVAHPDSDHLNICQVAIGEDQ | 124 |
| | | + LTD +A L K G + LE + P FVVG + HP++D L+IC+V +G D | |
| Sbjct: | 65 | LELTDSLVATLEQAFQKNGVNWTLEVDLSPKFVVGFVQSKDKHPNADKLSICKVDVGSD- | 123 |
| Query: | 125 | TVQIVAGAPNAALGLKTIVALPGAIMPNGSLIFPGKLRGEESYGMMCSPRELALPNAPQK | 184 |
| | | T+QIV GAPN G K +VAL GA+MP+G +I P LRG S GM+CS +ELALP+AP++ | |
| Sbjct: | 124 | TLQIVCGAPNVEAGQKVVVALEGAVMPSGLVIKPTSLRGVSSTGMICSAKELALPDAPEE | 183 |
| Query: | 185 | RGIIEFDESAVVGEAF | 200 |
| | | +GI+ D+S VG +F | |
| Sbjct: | 184 | KGILVLDDSYEVGTSF | 199 |

[1070] An alignment of the GAS and GBS proteins is shown below:

| Identities = 133/207 (64%), Positives = 167/207 (80%) | | | |
|---|---|---|---|
| Query: | 1 | MIFTYNREHVGDTLMVIVKDSQGAKLDVDRRGQVARVYLQDSKETVAWNIFEVSSLIVIE | 60 |
| | | MIF YN+E VGD LMVI++D++ K V+R+G+VARV+ ++S +T+AWNIFE SSLI IE | |
| Sbjct: | 1 | MIFAYNKEQVGDVLMVILQDTKDIKRQVERKGKVARVFAEESGKTLAWNIFEASSLITIE | 60 |
| Query: | 61 | GAGQITLSDQDIKILNAELLKEGFEDSLVNNIEPTFVVAQIKEIIDHPDSDHLHICQAEI | 120 |
| | | G GQI L+D+++ LNAEL KEGF + L + P FVV QI E++ HPDSDHL+ICQ I | |
| Sbjct: | 61 | GNGQIFLTDENLARLNAELAKEGFSERLEPIVGPVFVVGQIVEMVAHPDSDHLNICQVAI | 120 |
| Query: | 121 | NDGKTVQIVCGAPNASVGLKTVAALPGAMMPNGSLIFPGKLRGEDSFGMLCSARELALPN | 180 |
| | | + +TVQIV GAPNA++GLKT+ ALPGA+MPNGSLIFPGKLRGE+S+GM+CS RELALPN | |
| Sbjct: | 121 | GEDQTVQIVAGAPNAALGLKTIVALPGAIMPNGSLIFPGKLRGEESYGMMCSPRELALPN | 180 |
| Query: | 181 | APQVRGIIELSDQVIVGESFDANKHWK | 207 |
| | | APQ RGIIE + +VGE+FD KHWK | |
| Sbjct: | 181 | APQKRGIIEFDESAVVGEAFDPAKHWK | 207 |

[1071] Based on this analysis, it was predicted that these proteins and their epitopes could be useful antigens for vaccines or diagnostics.

### EXAMPLE 129

[1072] A DNA sequence (GBSx0135) was identified in S. agalactiae <SEQ ID 439> which encodes the amino acid sequence <SEQ ID 440>. Analysis of this protein sequence reveals the following:

```
Possible site: 30
>>> Seems to have no N-terminal signal sequence
----- Final Results -----
                            bacterial cytoplasm --- Certainty = 0.3052(Affirmative) < succ>
                              bacterial membrane --- Certainty = 0.0000(Not Clear) < succ>
                                bacterial outside --- Certainty = 0.0000(Not Clear) < succ>
```

[1073] The protein has homology with the following sequences in the GENPEPT database:

| >GP: AAB81904 GB: U92974 unknown [Lactococcus lactis] | | | |
|---|---|---|---|
| Identities = 69/241 (28%), Positives = 117/241 (47%), Gaps = 15/241 (6%) | | | |
| Query: | 7 | YKEMLAKPWGKIQYEITFAQL--SHIKNQNVLDFGAGFCLTEQHLAKEN-NVTAIEPNPK | 63 |
| | | Y E+ KPWG++ Y++ F QL + K+ +L FG+GF TE L ++ VT EP+ + | |
| Sbjct: | 23 | YAEVFEKPWGRMFYDLLFPQLLPNLTKDSKILSFGSGFGRTETFLEEQGFEVTGYEPDVE | 82 |
| Query: | 64 | LLYDNQSDNIYKILGSYEALRD-LPDQSFDTIICHNVLEYIDKHNHPAYFDEFSRLLKPN | 122 |
| | | L ++ G+++ + + ++ +D I+ HNVLEY+ + + LL | |
| Sbjct: | 83 | KLEMMSDQTFRQLTGTFDDFAETVKNERYDVILIHNVLEYV--LDRKVVLELLLSLLTDG | 140 |
| Query: | 123 | GELSLIKHNITGKILQSVIFSNDTSTAMELLTGEANFKSASFDQGNIYT-----LEELKQ | 177 |
| | | G LS++KH+ G +++ ++ A+++ EA AS + G+I L + | |
| Sbjct: | 141 | GTLSIVKHSKYGSMIEMAAGRDNPQAALDVYENEA---VASHNHGDILVYDDDWLTDFVA | 197 |
| Query: | 178 | NTNLLVERYQGIRTFYSLQPN-HFKTETGWLNKMLAIELSVADKAPYKDIAFLQHITLKKS | 237 |
| | | N L ++ GIR FY + N K W ML +E VA +A L H+ KKS | |
| Sbjct: | 198 | NYKLKLQEKFGIRHFYGISQNAEIKETENWYQPMLKLEQKVAKDQTLYPVARLHHLIFKKS | 258 |

[1074] Based on this analysis, it was predicted that this protein and its epitopes, could be useful antigens for vaccines or diagnostics.

### EXAMPLE 130

[1075] A DNA sequence (GBSx0136) was identified in S. agalactiae <SEQ ID 441> which encodes the amino acid sequence <SEQ ID 442>. Analysis of this protein sequence reveals the following:

```
Possible site: 58
>>> Seems to have no N-terminal signal sequence
----- Final Results -----
                            bacterial cytoplasm --- Certainty = 0.3479(Affirmative) < succ>
                              bacterial membrane --- Certainty = 0.0000(Not Clear) < succ>
                                bacterial outside --- Certainty = 0.0000(Not Clear) < succ>
```

[1076] The protein has homology with the following sequences in the GENPEPT database:

| >GP: AAF74079 GB: AF212845 putative single stranded binding protein | | | |
|---|---|---|---|
| [Lactococcus lactis bacteriophage ul36] | | | |
| Identities = 64/141 (45%), Positives = 92/141 (64%), Gaps = 10/141 (7%) | | | |
| Query: | 1 | MYNKVIMIGRLTAKPEMVKTPTDKSVTRATVAVNRRFKGSNGEREADFINVVMWGRLAET | 60 |
| | | M N V ++GR+T +PE+ TP +K+V T+AVNR FK +NGEREADFI+ V+WG+ AE | |
| Sbjct: | 1 | MINNVTLVGRITKEPELRYTPQNKAVATFTLAVNRAFKNANGEREADFISCVIWGKSAEN | 60 |
| Query: | 61 | LASYGTKGSLISIDGELRTRKYE-KDGQTHYITEVLASSFQLLESRAQ---------RAM | 110 |
| | | LA++ KG LI + G ++TR YE + GQ YITEV+AS+FQ+LE Q + | |
| Sbjct: | 61 | LANWTHKGQLIGVIGNIQTRNYENQQGQRVYITEVVASNFQVLEKSNQANGERISNPASK | 120 |
| Query: | 111 | RENNVSGDLSDLVLEEEELPF | 131 |
| | | +NN S + + +++LPF | |
| Sbjct: | 121 | PQNNDSFGSDPMEISDDDLPF | 141 |

[1077] A related DNA sequence was identified in S. pyogenes <SEQ ID 443> which encodes the amino acid sequence <SEQ ID 444>. Analysis of this protein sequence reveals the following:

```
Possible site: 32
>>> Seems to have no N-terminal signal sequence
----- Final Results -----
                            bacterial cytoplasm --- Certainty = 0.1817(Affirmative) < succ>
                              bacterial membrane --- Certainty = 0.0000(Not Clear) < succ>
                                bacterial outside --- Certainty = 0.0000(Not Clear) < succ>
```

[1078] An alignment of the GAS and GBS proteins is shown below:

| Identities = 102/131 (77%), Positives = 116/131 (87%) | | | |
|---|---|---|---|
| Query: | 1 | MYNKVIMIGRLTAKPEMVKTPTDKSVTRATVAVNRRFKGSNGEREADFINVVMWGRLAET | 60 |
| | | MYNKVI IGRL AKPE+VKT TDK V R ++AVNRRFK ++GEREADFI+VV+WG+LAET | |
| Sbjct: | 1 | MYNKVIAIGRLVAKPELVKTATDKHVARLSLAVNRRFKNASGEREADFISVVVWGKLAET | 60 |
| Query: | 61 | LASYGTKGSLISIDGELRTRKYEKDGQTHYITEVLASSFQLLESRAQRAMRENNVSGDLS | 120 |
| | | L SY +KGSL+SIDGELRTRKY+KDGQ HY+TEVL SFQLLESRAQRAMRENNV+ DL | |
| Sbjct: | 61 | LVSYASKGSLMSIDGELRTRKYDKDGQVHYVTEVLCQSFQLLESRAQRAMRENNVTNDLV | 120 |
| Query: | 121 | DLVLEEEELPF | 131 |
| | | DLVLEE+ LPF | |
| Sbjct: | 121 | DLVLEEDTLPF | 131 |

[1079] Based on this analysis, it was predicted that these proteins and their epitopes could be useful antigens for vaccines or diagnostics.

### EXAMPLE 131

[1080] A DNA sequence (GBSx0037) was identified in S. agalactiae <SEQ ID 445> which encodes the amino acid sequence <SEQ ID 446>. Analysis of this protein sequence reveals the following:

```
Possible site: 49
>>> Seems to have no N-terminal signal sequence
----- Final Results -----
                            bacterial cytoplasm --- Certainty = 0.2235(Affirmative) < succ>
                              bacterial membrane --- Certainty = 0.0000(Not Clear) < succ>
                                bacterial outside --- Certainty = 0.0000(Not Clear) < succ>
```

[1081] A related GBS nucleic acid sequence <SEQ ID 9493> which encodes amino acid sequence <SEQ ID 9494> was also identified.

[1082] The protein has homology with the following sequences in the GENPEPT database:

| >GP: CAC13072 GB: AL445503 putative hydrolase [Streptomyces | | | |
|---|---|---|---|
| coelicolor] | | | |
| Identities = 63/179 (35%), Positives = 91/179 (50%), Gaps = 2/179 (1%) | | | |
| Query: | 33 | IIFDMDGVIVDSEYTFLDNKTEMLREEGI-DTDVSYQYQYMGTTFEFMWQAMKEEFGLPK | 91 |
| | | +IFD+DG +VDSE + + L E G+ D + Y+G + + K +GL | |
| Sbjct: | 12 | VIFDLDGTLVDSEPHYYEAGRRTLAEYGVPDFSWADHEAYVGISTQETVADWKRRYGLRA | 71 |
| Query: | 92 | TVKEYIAEMNRRRQAIVARDGVRPIKGAQRLIHWLHQHGYRLAVASSSPMVDIKRNLKEL | 151 |
| | | TV+E +A NR + AR R ++ + L G +AVAS S I L | |
| Sbjct: | 72 | TVEELLAVKNRHYLGL-ARTSARAYPEMRKFVELLAGEGVPMAVASGSSPEAIAAILART | 130 |
| Query: | 152 | GVTECFEYMVTGEDVSSSKPAPDVFLRAAELLDVDPKVCIVIEDTRNGSLAAKAAGMYC | 210 |
| | | G+ +V+ ++V+ KPAPDVFL AA L +P C+V+ED G+ AA AAGM C | |
| Sbjct: | 131 | GLDAHLRTVVSADEVARGKPAPDVFLEAARRLGTEPARCVVLEDAAPGAAAAHAAGMRC | 189 |

[1083] A related DNA sequence was identified in S. pyogenes <SEQ ID 447> which encodes the amino acid sequence <SEQ ID 448>. Analysis of this protein sequence reveals the following:

```
Possible site: 25
>>> Seems to have no N-terminal signal sequence
----- Final Results -----
                            bacterial cytoplasm --- Certainty = 0.3706(Affirmative) < succ>
                              bacterial membrane --- Certainty = 0.0000(Not Clear) < succ>
                                bacterial outside --- Certainty = 0.0000(Not Clear) < succ>
```

[1084] An alignment of the GAS and GBS proteins is shown below:

| Identities = 62/202 (30%), Positives = 100/202 (48%), Gaps = 1/202 (0%) | | | |
|---|---|---|---|
| Query: | 29 | MEKVIIFDMDGVIVDSEYTFLDNKTEMLREEGIDTDVSYQYQYMGTTFEFMWQAMKEEFG | 88 |
| | | M K IIFDMDGV+ D+E +L + + + +GI D ++G + +W+ + + | |
| Sbjct: | 3 | MIKGIIFDMDGVLFDTEPFYLRRREDFFKTKGIPIDHLNSKDFIGGNLQELWKELLGKNR | 62 |
| Query: | 89 | LPKTVKEYIAEMNRRRQAIVARDGVRPIKGAQRLIHWLHQHGYRLAVASSSPMVDIKRNL | 148 |
| | | VK + + +QA I + L + G +LAVAS+S D+ L | |
| Sbjct: | 63 | DDAIVKAITTDYDAYKQAHKPPYQKLLITEVNSCLEQLEKQGIKLAVASNSKRQDVLLAL | 122 |
| Query: | 149 | KELGVTECFEYMVTGEDVSSSKPAPDVFLRAAELLDVDPKVCIVIEDTRNGSLAAKAAGM | 208 |
| | | + + + FE ++ EDVS KP PD++ +A + L + K +V+ED++ G AAKAA + | |
| Sbjct: | 123 | ETTQIKDYFEIILAREDVSRGKPYPDIYNKAVQKLGLQKKQLLVVEDSQKGIAAAKAANL | 182 |
| Query: | 209 | YCFGFANPDYPPQDLSMADKVI | 230 |
| | | F + Y D S AD I | |
| Sbjct: | 183 | TVFAITDYRY-GIDQSQADHKI | 203 |

[1085] Based on this analysis, it was predicted that these proteins and their epitopes could be useful antigens for vaccines or diagnostics.

### EXAMPLE 132

[1086] A DNA sequence (GBSx0138) was identified in S. agalactiae <SEQ ID 449> which encodes the amino acid sequence <SEQ ID 450>. Analysis of this protein sequence reveals the following:

| Possible site: 20 | | | | |
|---|---|---|---|---|
| >>> Seems to have no N-terminal signal sequence | | | | |
| | INTEGRAL | Likelihood = −0.22 | Transmembrane | 16-32 (16-32) |

```
----- Final Results -----
                              bacterial membrane --- Certainty = 0.1086(Affirmative) < succ>
                                bacterial outside --- Certainty = 0.0000(Not Clear) < succ>
                            bacterial cytoplasm --- Certainty = 0.0000(Not Clear) < succ>
```

[1087] The protein has no significant homology with any sequences in the GENPEPT database.

[1088] No corresponding DNA sequence was identified in S. pyogenes.

[1089] Based on this analysis, it was predicted that this protein and its epitopes, could be useful antigens for vaccines or diagnostics.

### EXAMPLE 133

[1090] A DNA sequence (GBSx0139) was identified in S. agalactiae <SEQ ID 451> which encodes the amino acid sequence <SEQ ID 452>. Analysis of this protein sequence reveals the following:

| Possible site: 34 | | | | |
|---|---|---|---|---|
| >>> Seems to have an uncleavable N-term signal seq | | | | |
| | INTEGRAL | Likelihood = 5.04 | Transmembrane | 28-44 (27-45) |

```
----- Final Results -----
                              bacterial membrane --- Certainty = 0.3017(Affirmative) < succ>
                                bacterial outside --- Certainty = 0.0000(Not Clear) < succ>
                            bacterial cytoplasm --- Certainty = 0.0000(Not Clear) < succ>
```

[1091] The protein has no significant homology with any sequences in the GENPEPT database.

[1092] No corresponding DNA sequence was identified in S. pyogenes.

[1093] Based on this analysis, it was predicted that this protein and its epitopes, could be useful antigens for vaccines or diagnostics.

### EXAMPLE 134

[1094] A DNA sequence (GBSx0140) was identified in S. agalactiae <SEQ ID 453> which encodes the amino acid sequence <SEQ ID 454>. Analysis of this protein sequence reveals the following:

| Possible site: 17 | | | | |
|---|---|---|---|---|
| >>> Seems to have an uncleavable N-term signal seq | | | | |
| | INTEGRAL | Likelihood = −10.72 | Transmembrane | 38-54 (34-60) |
| | INTEGRAL | Likelihood = −7.70 | Transmembrane | 4-20 (1-22) |
| | INTEGRAL | Likelihood = −4.99 | Transmembrane | 153-169 (150-171) |
| | INTEGRAL | Likelihood = −2.55 | Transmembrane | 179-195 (178-198) |
| | INTEGRAL | Likelihood = −2.39 | Transmembrane | 93-109 (93-109) |
| | INTEGRAL | Likelihood = −1.17 | Transmembrane | 116-132 (116-133) |
| | INTEGRAL | Likelihood = −0.43 | Transmembrane | 344-360 (344-360) |

```
----- Final Results -----
                              bacterial membrane --- Certainty = 0.5288(Affirmative) < succ>
                                bacterial outside --- Certainty = 0.0000(Not Clear) < succ>
                            bacterial cytoplasm --- Certainty = 0.0000(Not Clear) < succ>
```

[1095] The protein has homology with the following sequences in the GENPEPT database:

| >GP: CAB14853 GB: Z99118 two-component sensor histidine kinase | | | |
|---|---|---|---|
| [Bacillus subtilis] | | | |
| Identities = 254/585 (43%), Positives = 371/585 (63%), | | | |
| Gaps = 9/585 (1%) | | | |
| Query: | 2 | LMVLLFQRLGIIMILAFLLVNNSYFRQLIEERSK-RETVVLVIIFGLFVIISNITGIEIK | 60 |
| | | LM+++ +R+GII+IL F+L + FRQ ++ + + +L+ IF LF IISN TGIEI+ | |
| Sbjct: | 4 | LMIMMLERVGIIVILGFILAHTKLFRQALQNQDGYKGKAILISIFSLFSIISNYTGIEIQ | 63 |
| Query: | 61 | GDRSLVERPFLTTISHSDSLANTRTLVITTASLVGGPLVGSIVGFIGGVHRFFQGSFSGS | 120 |
| | | + +V ++ TI S S+ANTR L + L+GGP VG+ +G + G+HRF G + | |
| Sbjct: | 64 | RNM-IVNNDWVFTIDPSGSIANTRILGVEIGGLLGGPFVGAGIGILAGLHRFSLGGSTAL | 122 |
| Query: | 121 | FYIVSSVLVGIVSGKIGDKLKENHLYPSTSQVILISIIAESIQMLFVGIFT-----GWEL | 175 |
| | | VSS+L G+++G IG + + P+ L+ I ES+QM+ + + WEL | |
| Sbjct: | 123 | SCAVSSILAGVLAGLIGRYFTKRYRMPTPRIAALVGIGMESLQMIIILLMAKPFSDAWEL | 182 |
| Query: | 176 | VKMIVIPMMILNSLGSTLFLAILKTYLSNESQLRAVQTRDVLELTRQTLPYLRQGLTPQS | 235 |
| | | V MI IPM+++N GS +FL+I++ + E Q RA++T VL + QTLP+ RQGL S | |
| Sbjct: | 183 | VSMIGIPMILINGTGSFIFLSIIQAIIRKEEQARALETHRVLTIADQTLPFFRQGLNENS | 242 |
| Query: | 236 | ARSVCEIIKRHTNFDAVGLTDRSNVLAHIGVGHDHHIAGQPVKTDLSKSVIFDGEPRIAQ | 295 |
| | | +SV II + T DAV LTD+ +LAH+G G DHHI, + + T LSK VI G A | |
| Sbjct: | 243 | CKSVAAIIHKLTGTDAVSLTDKEKILAHVGAGMDHHIPSKSLITGLSKKVIKTGHIMKAI | 302 |
| Query: | 296 | DKAAISCPDHNCQLNSAIVVPLKINDKTVGALKMYFAGDKTMSEVEENLVLGLAQIFSGQ | 355 |
| | | + I C C L++AIV+PL N T+G LKMYF +S+VEE L GLA +FS Q | |
| Sbjct: | 303 | SQEEIECTHAECPLHAAIVLPLTSNGNTIGTLKMYFKSPAGLSQVEEELAEGLAMLFSTQ | 362 |
| Query: | 356 | LAMGITEEQNKLASMAEIKALQAQINPHFFFNAINTISALIRIDSDKARYALMQLSTFFR | 415 |
| | | L +G E Q+KL AEIKALQAQ+NPHF FNAINTISAL R D +K R L+QLS +FR | |
| Sbjct: | 363 | LELGEAELQSKLLKDAEIKALQAQVNPHFLFNAINTISALCRTDVEKTRKLLLQLSVYFR | 422 |
| Query: | 416 | TSLQGGQDREVTLEQEKSHVDAYMNVEKLRFPDKYQLSYDI-SAPEKMKLPPFGLQVLVE | 474 |
| | | ++LQG + + L +E +H++AY+++E+ RFP KY++ +I S E++++PPF LQVLVE | |
| Sbjct: | 423 | SNLQGARQLLIPLSKELNHLNAYLSLEQARFPGKYKIELNIDSRLEQIEIPPFVLQVLVE | 482 |
| Query: | 475 | NAVRHAFKERKTDNHILVQIKPDGHYYCVSVSDNGQGISDTIIDKLGQETVAESKGTGTA | 534 |
| | | NA+RHAF +++ + V + D + V+DNG+GI ++ +LG++ +GTGTA | |
| Sbjct: | 483 | NALRHAFPKKQDICKVTVCVLSDDASVYMKVADNGRGIPPDVLPELGKKPFPSKEGTGTA | 542 |
| Query: | 535 | LVNLNNRLNLLYGSVSCLHFSSD-KNGTKVWYRIPNRIREDEHEN | 578 |
| | | L NLN RL L+G + LH SS+ GT+V +++P + ++ E+ | |
| Sbjct: | 543 | LYNLNQRLIGLFGQQAALHISSEVHKGTEVSFQVPMQQMKEGEEH | 587 |

[1096] A related DNA sequence was identified in S. pyogenes <SEQ ID 455> which encodes the amino acid sequence <SEQ ID 456>. Analysis of this protein sequence reveals the following:

```
Possible site: 23
>>> Seems to have no N-terminal signal sequence
----- Final Results -----
                            bacterial cytoplasm --- Certainty = 0.1771(Affirmative) < succ>
                              bacterial membrane --- Certainty = 0.0000(Not Clear) < succ>
                                bacterial outside --- Certainty = 0.0000(Not Clear) < succ>
```

[1097] An alignment of the GAS and GBS proteins is shown below:

| Identities = 75/245 (30%), Positives = 117/245 (47%), Gaps = 22/245 (8%) | | | |
|---|---|---|---|
| Query: | 348 | LAQIFSGQL-----AMGITEEQNKLASMAEIKALQAQINPHFFFNAINTISALIRI-DSD | 401 |
| | | LAQ F+ L M ++ K ++AL +QINPHF +N ++TI + DS | |
| Sbjct: | 4 | LAQQFNALLDQIDSLMVAVADKEKAIGQYRLQALASQINPHFLYNTLDTIIWMAEFNDSK | 63 |
| Query: | 402 | KARYALMQLSTFFRTSLQGGQDREVTLEQEKSHVDAYMNVEKLRFPDKYQLSYDISAPE- | 460 |
| | | + L+ +FR +L G + + L E HV Y+ ++K R+ DK LSY++ + | |
| Sbjct: | 64 | RVVEVTKSLAKYFRLALNQGNEY-IRLADELDHVSQYLFIQKQRYGDK--LSYEVQGLDV | 120 |
| Query: | 461 | --KMKLPPFGLQVLVENAVRHAFKERKTDNHILVQIKPDGHYYCVSVSDNGQGISDTIID | 518 |
| | | +P LQ LVENA+ H KE I V + + ++V DNG+GI D+ + | |
| Sbjct: | 121 | YADFVIPKLILQPLVENAIYHGIKEVDRKGMIKVTVSDTAQHLMLTVWDNGKGIEDSSLT | 180 |
| Query: | 519 | KLGQETVAESKGTGTALVNLNNRLNLLYGS--VSCLHFSSDKNGTKVWYRIPNR---IRE | 573 |
| | | Q +A G L N++ RL L YG +H SD+ T++ +P + + | |
| Sbjct: | 181 | N-SQSLLARG---GVGLKNVDQRLKLHYGEGYHMTIHSQSDQ-FTEIQLSLPKMHELMAD | 235 |
| Query: | 574 | DEHEN | 578 |
| | | D EN | |
| Sbjct: | 236 | DTQEN | 240 |

[1098] Based on this analysis, it was predicted that these proteins and their epitopes could be useful antigens for vaccines or diagnostics.

### EXAMPLE 135

[1099] A DNA sequence (GBSx0141) was identified in S. agalactiae <SEQ ID 457> which encodes the amino acid sequence <SEQ ID 458>. This protein is predicted to be two-component response regulator (lytT). Analysis of this protein sequence reveals the following:

```
Possible site: 61
>>> Seems to have no N-terminal signal sequence
----- Final Results -----
                            bacterial cytoplasm --- Certainty = 0.3230(Affirmative) < succ>
                              bacterial membrane --- Certainty = 0.0000(Not Clear) < succ>
                                bacterial outside --- Certainty = 0.0000(Not Clear) < succ>
```

[1100] A related GBS nucleic acid sequence <SEQ ID 9495> which encodes amino acid sequence <SEQ ID 9496> was also identified.

[1101] The protein has homology with the following sequences in the GENPEPT database:

| >GP: CAB14852 GB: Z99118 two-component response | | | |
|---|---|---|---|
| regulator [Bacillus subtilis] | | | |
| Identities = 105/244 (43%), Positives = 157/244 (64%), | | | |
| Gaps = 6/244 (2%) | | | |
| Query: | 3 | MKILILDDEMFARQELSFLVEHSQEVDNPEIFQAEDISEAEKILFRQQIDLIFLDISLSE | 62 |
| | | +++LI+DDEM AR EL++L++ + D EI +AE+I A + Q+ DL+FLD+ LS | |
| Sbjct: | 2 | LRVLIVDDEMLARDELAYLLKRTN--DEMEINEAENIESAFDQMMDQKPDLLFLDVDLSG | 59 |
| Query: | 63 | ENGFTLANQLSQLAHPPLVVFATAYDNYAVKAFESNAVDYIMKPFEQQRVDMALSKVKKL | 122 |
| | | ENGF +A +L ++ HPP +VFATAYD YA+KAFE +A+DY+ KPF+++R+ L K KK+ | |
| Sbjct: | 60 | ENGFDIAKRLKKMKHPPAIVFATAYDQYALKAFEVDALDYLTKPFDEERIQQTLKKYKKV | 119 |
| Query: | 123 | SQLTTASDVEQAIPKKASVELLTLTLSDRSVVVKMQDIVAASVEDGELTVSTVQKTYTIR | 182 |
| | | ++ VE A L L++ + V+V +DI+ A EDG + V T +YT+ | |
| Sbjct: | 120 | NR----DIVETEQNSHAGQHKLALSVGESIVIVDTKDIIYAGTEDGHVNVKTFDHSYTVS | 175 |
| Query: | 183 | KTLNWFKSRAVAPYFLQIHRNTVINLEMIEEIQPWFNHTLLLIMSNGEKFPVGRSYLKDL | 242 |
| | | TL + + F+++HR+ V+N E I+EIQPWFN T LIM +G K PV R+Y K+L | |
| Sbjct: | 176 | DTLVVIEKKLPDSDFIRVHRSFVVNTEYIKEIQPWFNSTYNLIMKDGSKIPVSRTYAKEL | 235 |
| Query: | 243 | NEHL | 246 |
| | | + L | |
| Sbjct: | 236 | KKLL | 239 |

[1102] A related DNA sequence was identified in S. pyogenes <SEQ ID 459> which encodes the amino acid sequence <SEQ ID 460>. Analysis of this protein sequence reveals the following:

```
Possible site: 27
>>> Seems to have no N-terminal signal sequence
----- Final Results -----
                            bacterial cytoplasm --- Certainty = 0.3818(Affirmative) < succ>
                              bacterial membrane --- Certainty = 0.0000(Not Clear) < succ>
                                bacterial outside --- Certainty = 0.0000(Not Clear) < succ>
```

[1103] An alignment of the GAS and GBS proteins is shown below:

| Identities = 44/148 (29%), Positives = 84/148 (56%), Gaps = 5/148 (3%) | | | |
|---|---|---|---|
| Query: | 5 | ILILDDEMFARQELSFLVEHSQ-EVDNPEIFQAEDISEAEKILFRQQIDLIFLDISLSEE | 63 |
| | | +LI++DE RQ + LV+ SQ ++D + +AE+ A + ++ D++ DI++ + | |
| Sbjct: | 4 | LLIVEDEYLVRQGIRSLVDFSQFKIDR--VNEAENGQLAWDLFQKEPYDIVLTDINMPKL | 61 |
| Query: | 64 | NGFTLANQLSQLAHPPLVVFATAYD--NYAVKAFESNAVDYIMKPFEQQRVDMALSKVKK | 121 |
| | | NG LA + Q + +VF T YD NYA+ A + A DY++KPF + V+ L K++K | |
| Sbjct: | 62 | NGIQLAELIKQESPQTHLVFLTGYDDFNYALSALKLGADDYLLKPFSKADVEDMLGKLRK | 121 |
| Query: | 122 | LSQLTTASDVEQAIPKKASVELLTLTLS | 149 |
| | | +L+ ++ Q + ++ E+ + ++ | |
| Sbjct: | 122 | KLELSKKTETIQELVEQPQKEVSAIAMA | 149 |

[1104] Based on this analysis, it was predicted that these proteins and their epitopes could be useful antigens for vaccines or diagnostics.

### EXAMPLE 136

[1105] A DNA sequence (GBSx0142) was identified in S. agalactiae <SEQ ID 461> which encodes the amino acid sequence <SEQ ID 462>. Analysis of this protein sequence reveals the following:

```
Possible site: 18
>>> Seems to have no N-terminal signal sequence
----- Final Results -----
                            bacterial cytoplasm --- Certainty = 0.0266(Affirmative) < succ>
                              bacterial membrane --- Certainty = 0.0000(Not Clear) < succ>
                                bacterial outside --- Certainty = 0.0000(Not Clear) < succ>
```

[1106] The protein has no significant homology with any sequences in the GENPEPT database.

[1107] No corresponding DNA sequence was identified in S. pyogenes.

[1108] Based on this analysis, it was predicted that this protein and its epitopes, could be useful antigens for vaccines or diagnostics.

### EXAMPLE 137

[1109] A DNA sequence (GBSx0143) was identified in S. agalactiae <SEQ ID 463> which encodes the amino acid sequence <SEQ ID 464>. Analysis of this protein sequence reveals the following:

| Possible site: 37 | | | | |
|---|---|---|---|---|
| >>> Seems to have no N-terminal signal sequence | | | | |
| | INTEGRAL | Likelihood = −11.89 | Transmembrane | 104-120 (99-134) |
| | INTEGRAL | Likelihood = −5.89 | Transmembrane | 47-63 (46-65) |
| | INTEGRAL | Likelihood = −3.29 | Transmembrane | 22-38 (21-39) |
| | INTEGRAL | Likelihood = −2.81 | Transmembrane | 74-90 (70-92) |

```
----- Final Results -----
                              bacterial membrane --- Certainty = 0.5755(Affirmative) < succ>
                                bacterial outside --- Certainty = 0.0000(Not Clear) < succ>
                            bacterial cytoplasm --- Certainty = 0.0000(Not Clear) < succ>
```

[1110] A related GBS nucleic acid sequence <SEQ ID 8499> which encodes amino acid sequence <SEQ ID 8500> was also identified.

[1111] The protein has homology with the following sequences in the GENPEPT database:

| >GP: CAB14851 GB: Z99118 similar to hypothetical proteins from | | | |
|---|---|---|---|
| B. subtilis [Bacillus subtilis] | | | |
| Identities = 50/110 (45%), Positives = 82/110 (74%), | | | |
| Gaps = 2/110 (1%) | | | |
| Query: | 20 | QMSIYAAILLVSQMISMLLPKSLPIPTTVIGLVLMYVLLTAKIIKVEWVDSFGALMISMI | 79 |
| | | Q I+A I+LVS MI+ ++P +PIP +V+GLVL+++LL K+IK+E V++ G + S+I | |
| Sbjct: | 12 | QAFIFAVIMLVSNMIAAIVP--IPIPASVVGLVLLFLLLCLKVIKLEQVETLGTSLTSLI | 69 |
| Query: | 80 | GFMFVPSGISVAANLDILKAEGLQLVAVITISTVVMLVVVAYVARLILAI | 129 |
| | | GF+FVPSGISV +L +++ GLQ+V VI ++T+++L ++LIL++ | |
| Sbjct: | 70 | GFLFVPSGISVMNSLGVMQQYGLQIVLVILLATIILLGATGLFSQLILSL | 119 |

[1112] Based on this analysis, it was predicted that these proteins and their epitopes could be useful antigens for vaccines or diagnostics.

### EXAMPLE 138

[1113] A DNA sequence (GBSx0144) was identified in S. agalactiae <SEQ ID 465> which encodes the amino acid sequence <SEQ ID 466>. Analysis of this protein sequence reveals the following:

| Possible site: 44 | | | |
|---|---|---|---|
| >>> Seems to have a cleavable N-term signal seq. | | | |
| INTEGRAL | Likelihood = −12.21 | Transmembrane | 219-235 (208-241) |
| INTEGRAL | Likelihood = −11.94 | Transmembrane | 103-119 (99-133) |
| INTEGRAL | Likelihood = −5.57 | Transmembrane | 157-173 (154-175) |
| INTEGRAL | Likelihood = −1.70 | Transmembrane | 73-89 (73-89) |

----- Final Results -----
bacterial membrane --- Certainty = 0.5883 (Affirmative) < succ>
bacterial outside --- Certainty = 0.0000 (Not Clear) < succ>
bacterial cytoplasm --- Certainty = 0.0000 (Not Clear) < succ>

[1114] The protein has homology with the following sequences in the GENPEPT database:

| >GP: CAB14850 GB: Z99118 similar to hypothetical proteins [Bacillus | | | |
|---|---|---|---|
| subtilis] | | | |
| Identities = 120/240 (50%), Positives = 159/240 (66%), Gaps = 10/240 (4%) | | | |
| Query: | 1 | MELLKTPIFGICFSLILYTIGEHLFKKSKGFFLLQPLFFAMVSGIVILWLMSKGLGTDVK | 60 |
| | | ME +P FGI SL + IG LFKK+KGFFL PLF AMV GI L + | |
| Sbjct: | 1 | MESTMSPYFGIVVSLAAFGIGTFLFKKTKGFFLFTPLFVAMVLGIAFL---------KIG | 51 |
| Query: | 61 | TFYTQAYKPGGDLIFWFLNPATIAFAVPLYKKNDVVKKYWVEILSSLVIGMIVSLILIVA | 120 |
| | | F Y GG++I +FL PATIAFA+PLYK+ D +KKYW +I++S++ G I S+ ++ | |
| Sbjct: | 52 | GFSYADYNNGGEIIKFFLEPATIAFAIPLYKQRDKLKKYWWQIMASIIAGSICSVTIVYL | 111 |
| Query: | 121 | ISKMVGLSQVGIASMLPQAATTAIALPITAAIGGNTAVTAMACILNAVIIYALGKKLVSF | 180 |
| | | ++K + L + SMLPQAATTAIALP++ IGG + +TA A I NAVI+YALG + | |
| Sbjct: | 112 | LAKGIHLDSAVMKSMLPQAATTAIALPLSKGIGGISDITAFAVIFNAVIVYALGALFLKV | 171 |
| Query: | 181 | FHLNDSKIGAGLGLGTSGHTVGAAFALELGELQGAMAAIAVVVIGLVVDLVIPIFSHLIG | 240 |
| | | F + + I GL LGTSGH +G A +E+GE++ AMA+IAVVV+G+V LVIP+F LIG | |
| Sbjct: | 172 | FKVK-NPISKGLALGTSGHALGVAVGIEMGEVEAAMASIAVVVVGVVTVLVIPVFVQLIG | 230 |

[1115] No corresponding DNA sequence was identified in S. pyogenes.

[1116] Based on this analysis, it was predicted that these proteins and their epitopes could be useful antigens for vaccines or diagnostics.

### EXAMPLE 139

[1117] A DNA sequence (GBSx0145) was identified in S. agalactiae <SEQ ID 467> which encodes the amino acid sequence <SEQ ID 468>. Analysis of this protein sequence reveals the following:

Possible site: 22
>>> May be a lipoprotein
----- Final Results -----
bacterial membrane --- Certainty = 0.0000 (Not Clear) < succ>
bacterial outside --- Certainty = 0.0000 (Not Clear) < succ>
bacterial cytoplasm --- Certainty = 0.0000 (Not Clear) < succ>

[1118] An alignment of the GAS and GBS proteins is shown below:

| Identities = 508/542 (93%), Positives = 523/542 (95%) | | | |
|---|---|---|---|
| Query: | 1 | MTKYLKYISFVALFLASIFLVACQNQNSQTKERTRKQRPKDELVVSMGAKLPHEFDPKDR | 60 |
| | | ++KYLKY S + LFL + LVACQ Q QTKER RKQRPKDELVVSMGAKLPHEFDPKDR | |
| Sbjct: | 3 | VSKYLKYFSIITLFLTGLILVACQQQKPQTKERQRKQRPKDELVVSMGAKLPHEFDPKDR | 62 |
| Query: | 61 | YGIHNEGNITHSTLLKRSPELDIKGELAKKYKISKDGLTWSFDLNDDFKFSNGEPVTADD | 120 |
| | | YG+HNEGNITHSTLLKRSPELDIKGELAK Y +S+DGLTWSFDL+DDFKFSNGEPVTADD | |
| Sbjct: | 63 | YGVHNEGNITHSTLLKRSPELDIKGELAKTYHLSEDGLTWSFDLHDDFKFSNGEPVTADD | 122 |
| Query: | 121 | VKFTYDMLKADGKAWDLTFIKNVEVVGKNQVNIHLTEAHSTFTAQLTEIPIVPKKHYNDK | 180 |
| | | VKFTYDMLKADGKAWDLTFIKNVEVVGKNQVNIHLTEAHSTFTAQLTEIPIVPKKHYNDK | |
| Sbjct: | 123 | VKFTYDMLKADGKAWDLTFIKNVEVVGKNQVNIHLTEAHSTFTAQLTEIPIVPKKHYNDK | 182 |
| Query: | 181 | YKSNPIGSGPYMVKEYKAGEQAIFVRNPYWHGKKPYFKKWTWVLLDENTALAALESGDVD | 240 |
| | | YKSNPIGSGPYMVKEYKAGEQAIFVRNPYWHGKKPYFKKWTWVLLDENTALAALESGDVD | |
| Sbjct: | 183 | YKSNPIGSGPYMVKEYKAGEQAIFVRNPYWHGKKPYFKKWTWVLLDENTALAALESGDVD | 242 |
| Query: | 241 | MIYATPELASKKVKGTRLLDIASNDVRGLSLPYVKKGVVKNSPDGYPVGNDVTSDPAIRK | 300 |
| | | MIYATPELA KKVKGTRLLDI SNDVRGLSLPYVKKGV+ +SPDGYPVGNDVTSDPAIRK | |
| Sbjct: | 243 | MIYATPELADKKVKGTRLLDIPSNDVRGLSLPYVKKGVITDSPDGYPVGNDVTSDPAIRK | 302 |
| Query: | 301 | ALTIGLNRQKVLDTVLNGYGKPAYSIIDRTPFWNPKTAIKDNKVAKAKQLLTKAGWKEQA | 360 |
| | | ALTIGLNRQKVLDTVLNGYGKPAYSIID+TPFWNPKTAIKDNKVAKAKQLLTKAGWKEQA | |
| Sbjct: | 303 | ALTIGLNRQKVLDTVLNGYGKPAYSIIDKTPFWNPKTAIKDNKVAKAKQLLTKAGWKEQA | 362 |
| Query: | 361 | DGSRKKGNLKSEFDLYYPTNDQLRANLAVEVAEQAKALGITIKLKASNWDEMATKSHDSA | 420 |
| | | DGSRKKG+L + FDLYYPTNDQLRANLAVEVAEQAKALGITIKLKASNWDEMATKSHDSA | |
| Sbjct: | 363 | DGSRKKGDLDAAFDLYYPTNDQLRANLAVEVAEQAKALGITIKLKASNWDEMATKSHDSA | 422 |
| Query: | 421 | LLYAGGRHHAQQFYESHYPSLAGKGWTNITFYNNPTVTKYLDKAMTSPDLDKANKYWKLA | 480 |
| | | LLYAGGRHHAQQFYESH+PSLAGKGWTNITFYNNPTVTKYLDKAMTS DLDKAN+YWKLA | |
| Sbjct: | 423 | LLYAGGRHHAQQFYESHHPSLAGKGWTNITFYNNPTVTKYLDKAMTSSDLDKANEYWKLA | 482 |
| Query: | 481 | QWDGKTGASTLGDLPNVWLVSLNHTYIGDKRINVGKQGVHSHGHDWSLLTNIAEWTWDES | 540 |
| | | QWDGKTGASTLGDLPNVWLVSLNHTYIGDKRINVGKQGVHSHGHDWSLLTNIAEWTWDES | |
| Sbjct: | 483 | QWDGKTGASTLGDLPNVWLVSLNHTYIGDKRINVGKQGVHSHGHDWSLLTNIAEWTWDES | 542 |
| Query: | 541 | AK | 542 |
| | | K | |
| Sbjct: | 543 | TK | 544 |

[1119] There is also homology to SEQ ID 60.

[1120] A related GBS gene <SEQ ID 8501> and protein <SEQ ID 8502> were also identified. Analysis of this protein sequence reveals the following:

| Lipop: Possible site: 22 Crend: 5 | | | |
|---|---|---|---|
| McG: Discrim Score: 10.46 | | | |
| GvH: Signal Score (−7.5): −1.29 | | | |
| Possible site: 22 | | | |
| >>> May be a lipoprotein | | | |
| ALOM program | count: 0 | value: 7.27 | threshold: 0.0 |

| | | |
|---|---|---|
| PERIPHERAL | Likelihood = 7.27 | 386 |

modified ALOM score: −1.95
*** Reasoning Step: 3
----- Final Results -----
bacterial membrane --- Certainty = 0.0000 (Not Clear) < succ>
bacterial outside -- Certainty = 0.0000 (Not Clear) < succ>
bacterial cytoplasm --- Certainty = 0.0000 (Not Clear) < succ>

[1121] SEQ ID 8502 (GBS106) was expressed in E. coli as a His-fusion product. SDS-PAGE analysis of total cell extract is shown in FIG. 18 (lane 3; MW 61 kDa).

[1122] The GBS106-His fusion product was purified (FIG. 194, lane 2) and used to immunise mice. The resulting antiserum was used for Western blot (FIG. 255A), FACS (FIG. 255B), and in the in vivo passive protection assay (Table III). These tests confirm that the protein is immunoaccessible on GBS bacteria and that it is an effective protective immunogen.

[1123] Based on this analysis, it was predicted that these proteins and their epitopes could be useful antigens for vaccines or diagnostics.

### EXAMPLE 140

[1124] A DNA sequence (GBSx0146) was identified in S. agalactiae <SEQ ID 469> which encodes the amino acid sequence <SEQ ID 470>. Analysis of this protein sequence reveals the following:

Possible site: 41
>>> Seems to have no N-terminal signal sequence
----- Final Results -----
bacterial cytoplasm --- Certainty = 0.4862 (Affirmative) < succ>
bacterial membrane --- Certainty = 0.0000 (Not Clear) < succ>
bacterial outside --- Certainty = 0.0000 (Not Clear) < succ>

[1125] The protein has no significant homology with any sequences in the GENPEPT database.

[1126] No corresponding DNA sequence was identified in S. pyogenes.

[1127] Based on this analysis, it was predicted that this protein and its epitopes, could be useful antigens for vaccines or diagnostics.

### EXAMPLE 141

[1128] A DNA sequence (GBSx0147) was identified in S. agalactiae <SEQ ID 471> which encodes the amino acid sequence <SEQ ID 472>. Analysis of this protein sequence reveals the following:

| Possible site: 19 | | | |
|---|---|---|---|
| >>> Seems to have no N-terminal signal sequence | | | |
| INTEGRAL | Likelihood = −7.27 | Transmembrane | 252-268 (249-275) |
| INTEGRAL | Likelihood = −5.73 | Transmembrane | 67-83 (62-90) |
| INTEGRAL | Likelihood = −5.26 | Transmembrane | 107-123 (104-134) |
| INTEGRAL | Likelihood = −3.77 | Transmembrane | 153-169 (152-170) |

----- Final Results -----
bacterial membrane --- Certainty = 0.3909 (Affirmative) < succ>
bacterial outside --- Certainty = 0.0000 (Not Clear) < succ>
bacterial cytoplasm --- Certainty = 0.0000 (Not Clear) < succ>

[1129] A related GBS nucleic acid sequence <SEQ ID 9295> which encodes amino acid sequence <SEQ ID 9296> was also identified.

[1130] The protein differs from U78968 at the N-terminus:

| | | | |
|---|---|---|---|
| Query: | 1 | MASVNYDTSLTPVQYKAIAHHYGLDKPAPVQYFIWLKNFIQGHLGTSLVYRQPVIDIIRS | 60 |
| | | MASVNYDTSLTP QYKAIAHHYGLDKPA VQYFIWLKN IQG LGTSLVYRQPV DIIRS | |
| Sbjct: | 39 | MASVNYDTSLTPAQYKAIAHHYGLDKPALVQYFIWLKNVIQGDLGTSLVYRQPVSDIIRS | 98 |

[1131] There is also homology to SEQ ID 64.

[1132] A related GBS gene <SEQ ID 8471> and protein <SEQ ID 8472> were also identified. Analysis of this protein sequence reveals the following:

| Lipop: Possible site: −1 Crend: 10 | | | |
|---|---|---|---|
| McG: Discrim Score: 3.72 | | | |
| GvH: Signal Score (−7.5): −5.37 | | | |
| Possible site: 40 | | | |
| >>> Seems to have an uncleavable N-term signal seq | | | |
| ALOM program | count: 5 | value: −7.27 | threshold: 0.0 |

| | | | |
|---|---|---|---|
| INTEGRAL | Likelihood = −7.27 | Transmembrane | 290-306 (287-313) |
| INTEGRAL | Likelihood = −5.89 | Transmembrane | 12-28 (11-33) |
| INTEGRAL | Likelihood = −5.73 | Transmembrane | 105-121 (100-128) |
| INTEGRAL | Likelihood = −5.26 | Transmembrane | 145-161 (142-172) |
| INTEGRAL | Likelihood = −3.77 | Transmembrane | 191-207 (190-208) |

| | | |
|---|---|---|
| PERIPHERAL | Likelihood = 2.97 | 245 |

modified ALOM score: 1.95
*** Reasoning Step: 3
----- Final Results -----
bacterial membrane --- Certainty = 0.3909 (Affirmative) < succ>
bacterial outside --- Certainty = 0.0000 (Not Clear) < succ>
bacterial cytoplasm --- Certainty = 0.0000 (Not Clear) < succ>

[1133] SEQ ID 8472 (GBS436) was expressed in E. coli as a GST-fusion product. SDS-PAGE analysis of total cell extract is shown in FIG. 173 (lane 9; MW 54 kDa).

[1134] Based on this analysis, it was predicted that these proteins and their epitopes could be useful antigens for vaccines or diagnostics.

### EXAMPLE 142

[1135] A DNA sequence (GBSx0148) was identified in S. agalactiae <SEQ ID 473> which encodes the amino acid sequence <SEQ ID 474>. This protein is predicted to be transmembrane transport protein DppC (oppC). Analysis of this protein sequence reveals the following:

| Possible site: 39 | | | | |
|---|---|---|---|---|
| >>> Seems to have a cleavable N-term signal seq. | | | | |
| | INTEGRAL | Likelihood = −8.28 | Transmembrane | 77-93 (68-101) |
| | INTEGRAL | Likelihood = −7.80 | Transmembrane | 182-198 (180-204) |
| | INTEGRAL | Likelihood = −7.06 | Transmembrane | 112-128 (104-132) |
| | INTEGRAL | Likelihood = −5.10 | Transmembrane | 239-255 (235-258) |

```
----- Final Results -----
                              bacterial membrane --- Certainty = 0.4312(Affirmative) < succ>
                                bacterial outside --- Certainty = 0.0000(Not Clear) < succ>
                            bacterial cytoplasm --- Certainty = 0.0000(Not Clear) < succ>
```

[1136] There is homology to SEQ ID 68.

[1137] Based on this analysis, it was predicted that this protein and its epitopes, could be useful antigens for vaccines or diagnostics.

### EXAMPLE 143

[1138] A DNA sequence (GBSx0149) was identified in S. agalactiae <SEQ ID 475> which encodes the amino acid sequence <SEQ ID 476>. This protein is predicted to be ATPase protein DppD. Analysis of this protein sequence reveals the following:

```
Possible site: 59
>>> Seems to have no N-terminal signal sequence
----- Final Results -----
                            bacterial cytoplasm --- Certainty = 0.1957(Affirmative) < succ>
                              bacterial membrane --- Certainty = 0.0000(Not Clear) < succ>
                                bacterial outside --- Certainty = 0.0000(Not Clear) < succ>
```

[1139] The protein differs from U78968 at the C-terminus:

| | | | |
|---|---|---|---|
| Query: | 241 | QTEFARSLWRSLPQQEFLKGVTHDLRG | 267 |
| | | QTEFAR LWR+LPQQ+FLKGVTHDLRG | |
| Sbjct: | 241 | QTEFARRLWRTLPQQDFLKGVTHDLRG | 267 |

[1140] A related DNA sequence was identified in S. pyogenes <SEQ ID 477> which encodes the amino acid sequence <SEQ ID 478>. Analysis of this protein sequence reveals the following:

```
Possible site: 59
>>> Seems to have no N-terminal signal sequence
----- Final Results -----
                            bacterial cytoplasm --- Certainty = 0.1957(Affirmative) < succ>
                              bacterial membrane --- Certainty = 0.0000(Not Clear) < succ>
                                bacterial outside --- Certainty = 0.0000(Not Clear) < succ>
```

[1141] An alignment of the GAS and GBS proteins is shown below:

| Identities = 255/267 (95%), Positives = 262/267 (97%) | | | |
|---|---|---|---|
| Query: | 1 | MTETLLSIKDLSITFTQYGRFLKPFQSTPIQALNLEIKKGELLAIIGASGSGKSLLAHAI | 60 |
| | | MTETLLSIKDLSITFTQYGRFLKPFQSTPIQALNLE+KKGELLAIIGASGSGKSLLAHAI | |
| Sbjct: | 1 | MTETLLSIKDLSITFTQYGRFLKPFQSTPIQALNLEVKKGELLAIIGASGSGKSLLAHAI | 60 |
| Query: | 61 | MDILPKNASVTGDMIYRGQSLNSKRIKQLRGKDITLIPQSVNYLDPSTKVKHQVRLGISE | 120 |
| | | MDILPKNA+VTGDMIYRGQSL SKRIKQLRGK++TLIPQSVNYLDPS KVKHQVRLGISE | |
| Sbjct: | 61 | MDILPKNAAVTGDMIYRGQSLTSKRIKQLRGKEMTLIPQSVNYLDPSMKVKHQVRLGISE | 120 |
| Query: | 121 | NSKATQEGLFQQFGLKESDGDLYPFQLSGGMLRRVLFTTCISDKVSLIIADEPTPGLHPD | 180 |
| | | N+KATQEGLFQQFGLKESDGDLYPFQLSGGMLRRVLFTTCISD VSLIIADEPTPGLHPD | |
| Sbjct: | 121 | NAKATQEGLFQQFGLKESDGDLYPFQLSGGMLRRVLFTTCISDTVSLIIADEPTPGLHPD | 180 |
| Query: | 181 | ALQMVLDQLRSFADKGISVIFITHDIVAASQIADRITIFKEGKAIETAPASFFSGNGEQL | 240 |
| | | ALQMVLDQLRSFADKGISVIFITHDIVAASQIADRITIFKEGKAIETAPASFFSG GEQL | |
| Sbjct: | 181 | ALQMVLDQLRSFADKGISVIFITHDIVAASQIADRITIFKEGKAIETAPASFFSGGGEQL | 240 |
| Query: | 241 | QTEFARSLWRSLPQQEFLKGVTHDLRG | 267 |
| | | QTEFAR LWR+LPQQ+FLKGVTHDLRG | |
| Sbjct: | 241 | QTEFARRLWRTLPQQDFLKGVTHDLRG | 267 |

[1142] Based on this analysis, it was predicted that these proteins and their epitopes could be useful antigens for vaccines or diagnostics.

### EXAMPLE 144

[1143] A DNA sequence (GBSx0150) was identified in S. agalactiae <SEQ ID 479> which encodes the amino acid sequence <SEQ ID 480>. This protein is predicted to be ATPase protein DppE. Analysis of this protein sequence reveals the following:

```
Possible site: 41
>>> Seems to have no N-terminal signal sequence
----- Final Results -----
                            bacterial cytoplasm --- Certainty = 0.3783(Affirmative) < succ>
                              bacterial membrane --- Certainty = 0.0000(Not Clear) < succ>
                                bacterial outside --- Certainty = 0.0000(Not Clear) < succ>
```

[1144] A related DNA sequence was identified in S. pyogenes <SEQ ID 481> which encodes the amino acid sequence <SEQ ID 482>. Analysis of this protein sequence reveals the following:

```
Possible site: 41
>>> Seems to have no N-terminal signal sequence
----- Final Results -----
                            bacterial cytoplasm --- Certainty = 0.3383(Affirmative) < succ>
                              bacterial membrane --- Certainty = 0.0000(Not Clear) < succ>
                                bacterial outside --- Certainty = 0.0000(Not Clear) < succ>
```

[1145] An alignment of the GAS and GBS proteins is shown below:

| Identities = 188/205 (91%), Positives = 197/205 (95%) | | | |
|---|---|---|---|
| Query: | 1 | MTLEAKKLGFYHKKDQWLFKEINLEVAPGQVLGIFGQSGCGKTSLSRVLAGFLHPKSGEV | 60 |
| | | MTLEAKKLGFYHKKDQWLFKEI+LEVAPGQ+LGIFGQSGCGKTSLSRVLAGFL PKSGEV | |
| Sbjct: | 1 | MTLEAKKLGFYHKKDQWLFKEIDLEVAPGQILGIFGQSGCGKTSLSRVLAGFLQPKSGEV | 60 |
| Query: | 61 | LVDGSNLPSKAFRPVQLIQQHPEKTMNPLWPMKKSLEEAYYPSRDLLDAFGIQEKWLNRR | 120 |
| | | LVDGS+LP+KAFRPVQLIQQHPE+TMNPLWPMKKSLEEAYYPS+DL DAFGIQEKWL RR | |
| Sbjct: | 61 | LVDGSHLPNKAFRPVQLIQQHPEQTMNPLWPMKKSLEEAYYPSQDLRDAFGIQEKWLKRR | 120 |
| Query: | 121 | PSELSGGELQRFSIVRSLHPETKYLIADEMTTMLDSITQASVWKSLLEIVKDRNLGLIVI | 180 |
| | | PSELSGGELQRFSIVRSLHPETKYLIADEMTTMLDSITQASVWKSLLEIVKDRNLGLI+I | |
| Sbjct: | 121 | PSELSGGELQRFSIVRSLHPETKYLIADEMTTMLDSITQASVWKSLLEIVKDRNLGLIII | 180 |
| Query: | 181 | SHDFAMLEKLCNQCYMIEENRIVSF | 205 |
| | | SH+F MLEKLC+ CYMIEENR F | |
| Sbjct: | 181 | SHEFDMLEKLCDACYMIEENRTQLF | 205 |

[1146] Based on this analysis, it was predicted that these proteins and their epitopes could be useful antigens for vaccines or diagnostics.

### EXAMPLE 145

[1147] A DNA sequence (GBSx0151) was identified in S. agalactiae <SEQ ID 483> which encodes the amino acid sequence <SEQ ID 484>. This protein is predicted to be PTS system, trehalose-specific IIBC component (treB). Analysis of this protein sequence reveals the following:

| Possible site: 59 | | | | |
|---|---|---|---|---|
| >>> Seems to have no N-terminal signal sequence | | | | |
| | INTEGRAL | Likelihood = −10.14 | Transmembrane | 468-484 (462-489) |
| | INTEGRAL | Likelihood = −8.23 | Transmembrane | 279-295 (275-306) |
| | INTEGRAL | Likelihood = −6.05 | Transmembrane | 112-128 (105-130) |
| | INTEGRAL | Likelihood = −3.35 | Transmembrane | 204-220 (203-222) |
| | INTEGRAL | Likelihood = −1.75 | Transmembrane | 255-271 (255-271) |
| | INTEGRAL | Likelihood = −1.54 | Transmembrane | 327-343 (326-344) |
| | INTEGRAL | Likelihood = −0.37 | Transmembrane | 422-438 (422-438) |
| | INTEGRAL | Likelihood = −0.06 | Transmembrane | 304-320 (304-320) |

```
----- Final Results -----
                              bacterial membrane --- Certainty = 0.5055(Affirmative) < succ>
                                bacterial outside --- Certainty = 0.0000(Not Clear) < succ>
                            bacterial cytoplasm --- Certainty = 0.0000(Not Clear) < succ>
```

[1148] The protein has homology with the following sequences in the GENPEPT database:

| >GP: AAF94072 GB: AE004175 PTS system, trehalose-specific IIBC | | | |
|---|---|---|---|
| component [Vibrio cholerae] | | | |
| Identities = 225/484 (46%), Positives = 318/484 (65%), Gaps = 28/484 (5%) | | | |
| Query: | 5 | KHDAKALLEAIGGKENISAVTHCATRMRFVLNDSSKAKVKVIEELPSVKGTFTNAGQFQV | 64 |
| | | K D L+E +GG+ NI++VTHC TR+RFVLN +A +E L VKG FTNAGQFQV | |
| Sbjct: | 10 | KQDVTRLIELVGGESNIASVTHCLTRLRFVLNQPEQADKAGLEALSMVKGCFTNAGQFQV | 69 |
| Query: | 65 | IIGNDVPIFYNAFVAVSGIEGVSKEAAKSAAQKNQNPLQRVLTMLAEIFTPIIPAIIVGG | 124 |
| | | +IG +V Y + +G + VSK+ AK AA++N N L+R ++ LAEIF P++PAII GG | |
| Sbjct: | 70 | VIGTEVDQVYKMLLEQTGKQAVSKDDAKVAARQNMNVLERGISHLAEIFVPLLPAIITGG | 129 |
| Query: | 125 | LILGFRNILDAVPFEFLGQKVVDGVRQVDSSGHPIWNTLVDVSTFWSGVDSFLWLPGEAI | 184 |
| | | LILGFRN++ + ++ DG TL ++S FW+ V +FLWL GEAI | |
| Sbjct: | 130 | LILGFRNVIGDI-------RMFDG------------KTLTEISQFWASVHAFLWLIGEAI | 170 |
| Query: | 185 | FHFLPVGIVWSVTRKMGTTQILGIVLGICLVSPQLLNAYSVASTSAADIAKNWSWNFGYF | 244 |
| | | F FLPVG+ WS +K+G T ILGI LG+ LVSPQL+NAY + W+FG F | |
| Sbjct: | 171 | FFFLPVGVCWSTVKKLGGTPILGITLGVTLVSPQLMNAYLIGKEVPE------VWDFGLF | 224 |
| Query: | 245 | TVQKIGYQAQVIPALLAGLSLSYLEIFWRKHIPEVVSMIFVPFLSLVPAIILAHTVLGPI | 304 |
| | | ++K+GYQAQVIPA+LAG++L+++E R+ +P + ++ VPF+S++ +++LAH +GP | |
| Sbjct: | 225 | AIEKVGYQAQVIPAILAGVALAFIENNLRRVVPSYLYLVVVPFVSIIVSVVLAHAFIGPF | 284 |
| Query: | 305 | GWTLGKWISAIVLIGLTGPVKWLFGAIFGALYAPFVITGLHHMTNAIDTQLIADTKTHTT | 364 |
| | | G +G ++ +TG + +FG +YAP VITG+HH TNA+D QL+ + T | |
| Sbjct: | 285 | GRVIGDGVAFAAKAAMTGDFAVIGSTLFGFMYAPLVITGIHHTTNAVDLQLMQE--LGGT | 342 |
| Query: | 365 | GLWPMIALSNIAQGSAVLAYYFMHRHDEKEAQISLPAAISAYLGVTEPALFGVNVKYIYP | 424 |
| | | +WP+IALSNIAQ SAV+ + + + E IS+PAAISAYLGVTEPA++G+N+KY +P | |
| Sbjct: | 343 | PIWPLIALSNIAQASAVVGIIIISK-KQGERDISVPAAISAYLGVTEPAMYGINLKYKFP | 401 |
| Query: | 425 | FVAGMIGSSVAGLLATTFNVQANSIGVGGLPGFLSINVKYMGYFFICMAVAIFIPLFLTL | 484 |
| | | ++ MIGS++A + + V AN IGVGGLPG LSI ++ + + M +AI +P LTL | |
| Sbjct: | 402 | MLSAMIGSALAAAVCGSAGVMANGIGVGGLPGILSIQPQFWSIYLVAMLIAILVPAALTL | 461 |
| Query: | 485 | FFKK | 488 |
| | | K | |
| Sbjct: | 462 | LMYK | 465 |

[1149] A related DNA sequence was identified in S. pyogenes <SEQ ID 485> which encodes the amino acid sequence <SEQ ID 486>. Analysis of this protein sequence reveals the following:

| Possible site: 59 | | | | |
|---|---|---|---|---|
| >>> Seems to have no N-terminal signal sequence | | | | |
| | INTEGRAL | Likelihood = −9.61 | Transmembrane | 466-482 (457-488) |
| | INTEGRAL | Likelihood = −8.01 | Transmembrane | 279-295 (275-306) |
| | INTEGRAL | Likelihood = −6.05 | Transmembrane | 112-128 (105-130) |
| | INTEGRAL | Likelihood = −3.35 | Transmembrane | 204-220 (203-222) |
| | INTEGRAL | Likelihood = −3.13 | Transmembrane | 255-271 (255-272) |
| | INTEGRAL | Likelihood = −2.07 | Transmembrane | 327-343 (325-344) |
| | INTEGRAL | Likelihood = −0.59 | Transmembrane | 422-438 (422-438) |

```
----- Final Results -----
                              bacterial membrane --- Certainty = 0.4843(Affirmative) < succ>
                                bacterial outside --- Certainty = 0.0000(Not Clear) < succ>
                            bacterial cytoplasm --- Certainty = 0.0000(Not Clear) < succ>
```

[1150] The protein has homology with the following sequences in the databases:

| >GP: AAF94072 GB: AE004175 PTS system, trehalose-specific IIBC | | | |
|---|---|---|---|
| component [Vibrio cholerae] | | | |
| Identities = 231/484 (47%), Positives = 322/484 (65%), Gaps = 28/484 (5%) | | | |
| Query: | 5 | EQDAKSLLTAIGGKENIKVVTHCATRMRFVLNDNNKANVKEIEKISVVKGTFTNAGQFQV | 64 |
| | | +QD L+ +GG+ NI VTHC TR+RFVLN +A+ +E +S+VKG FTNAGQFQV | |
| Sbjct: | 10 | KQDVTRLIELVGGESNIASVTHCLTRLRFVLNQPEQADKAGLEALSMVKGCFTNAGQFQV | 69 |
| Query: | 65 | IIGNDVPVFYNDFTAVSSIEGVSKEAAKSAAKSNQNALQRVMTMLAEIFTPIIPAIIVGG | 124 |
| | | +IG +V Y + + VSK+ AK AA+ N N L+R ++ LAEIF P++PAII GG | |
| Sbjct: | 70 | VIGTEVDQVYKMLLEQTGKQAVSKDDAKVAARQNMNVLERGISHLAEIFVPLLPAIITGG | 129 |
| Query: | 125 | LILGFRNILESVPFEFLGQQVEKGKLVFDAAGDPVWNTIVRVSPFWSGVNHFLWLPGEAI | 184 |
| | | LILGFRN++ + +FD T+ +S FW+ V+ FLWL GEAI | |
| Sbjct: | 130 | LILGFRNVIGDI-------------RMFDG------KTLTEISQFWASVHAFLWLIGEAI | 170 |
| Query: | 185 | FHFLPVGITWSVTRKMGTTQILGIVLGICLVSPQLLNAYAVAGTPAAEIAKNWVWDFGFF | 244 |
| | | F FLPVG+ WS +K+G T ILGI LG+ LVSPQL+NAY + G E VWDFG F | |
| Sbjct: | 171 | FFFLPVGVCWSTVKKLGGTPILGITLGVTLVSPQLMNAYLI-GKEVPE-----VWDFGLF | 224 |
| Query: | 245 | TINRIGYQAQVIPALLAGLSLAYLEIFWRKRIPEVVSMIFVPFLSLIPALILAHTVLGPI | 304 |
| | | I ++GYQAQVIPA+LAG++LA++E R+ +P + ++ VPF+S+I +++LAH +GP | |
| Sbjct: | 225 | AIEKVGYQAQVIPAILAGVALAFIENNLRRVVPSYLYLVVVPFVSIIVSVVLAHAFIGPF | 284 |
| Query: | 305 | GWTIGKGISFVVLAGLTGPVKWLFGAIFGALYAPLVITGLHHMTNAIDTQLIADTATRTT | 364 |
| | | G IG G++F A +TG + +FG +YAPLVITG+HH TNA+D QL+ + T | |
| Sbjct: | 285 | GRVIGDGVAFAAKAAMTGDFAVIGSTLFGFMYAPLVITGIHHTTNAVDLQLMQELG--GT | 342 |
| Query: | 365 | GLWPMIALSNIAQGSAVFAYYLMNRHEEREAEISLPAAISAYLGVTEPALFGVNVKYVYP | 424 |
| | | +WP+IALSNIAQ SAV ++++ ++ E +IS+PAAISAYLGVTEPA++G+N+KY +P | |
| Sbjct: | 343 | PIWPLIALSNIAQASAVVGIIIISK-KQGERDISVPAAISAYLGVTEPAMYGINLKYKFP | 401 |
| Query: | 425 | FVAGMIGSGIAGLLSTTFNVQANSIGVGGLPGFMAINVKYMIPFFICMAVAIVVPMFLTF | 484 |
| | | ++ MIGS +A + + V AN IGVGGLPG ++I ++ + + M +AI+VP LT | |
| Sbjct: | 402 | MLSAMIGSALAAAVCGSAGVMANGIGVGGLPGILSIQPQFWSIYLVAMLIAILVPAALTL | 461 |
| Query: | 485 | FFRK | 488 |
| | | K | |
| Sbjct: | 462 | LMYK | 465 |

[1151] An alignment of the GAS and GBS proteins is shown below:

| Identities = 501/675 (74%), Positives = 573/675 (84%), Gaps = 2/675 (0%) | | | |
|---|---|---|---|
| Query: | 1 | MEQFKHDAKALLEAIGGKENISAVTHCATRMRFVLNDSSKAKVKVIEELPSVKGTFTNAG | 60 |
| | | M +F+ DAK+LL AIGGKENI VTHCATRMRFVLND++KA VK IE++ VKGTFTNAG | |
| Sbjct: | 1 | MGKFEQDAKSLLTAIGGKENIKVVTHCATRMRFVLNDNNKANVKEIEKISVVKGTFTNAG | 60 |
| Query: | 61 | QFQVIIGNDVPIFYNAFVAVSGIEGVSKEAAKSAAQKNQNPLQRVLTMLAEIFTPIIPAI | 120 |
| | | QFQVIIGNDVP+FYN F AVS IEGVSKEAAKSAA+ NQN LQRV+TMLAEIFTPIIPAI | |
| Sbjct: | 61 | QFQVIIGNDVPVFYNDFTAVSSIEGVSKEAAKSAAKSNQNALQRVMTMLAEIFTPIIPAI | 120 |
| Query: | 121 | IVGGLILGFRNILDAVPFEFLGQRVVDGVRQVDSSGHPIWNTLVDVSTFWSGVDSFLWLP | 180 |
| | | IVGGLILGFRNIL++VPFEFLGQ+V G D++G P+WNT+V VS FWSGV+ FLWLP | |
| Sbjct: | 121 | IVGGLILGFRNILESVPFEFLGQQVEKGKLVFDAAGDPVWNTIVRVSPFWSGVNHFLWLP | 180 |
| Query: | 181 | GEAIFHFLPVGIVWSVTRKMGTTQILGIVLGICLVSPQLLNAYSVASTSAADIAKNWSWN | 240 |
| | | GEAIFHFLPVGI WSVTRKNGTTQILGIVLGICLVSPQLLNAY+VA T AA+IAKNW W+ | |
| Sbjct: | 181 | GEAIFHFLPVGITWSVTRKMGTTQILGIVLGICLVSPQLLNAYAVAGTPAAEIAKNWVWD | 240 |
| Query: | 241 | FGYFTVQKIGYQAQVIPALLAGLSLSYLEIFWRKHIPEVVSMIFVPFLSLVPAIILAHTV | 300 |
| | | FG+FT+ +IGYQAQVIPALLAGLSL+YLEIFWRK IPEVVSMIFVPFLSL+PA+ILAHTV | |
| Sbjct: | 241 | FGFFTINRIGYQAQVIPALLAGLSLAYLEIFWRKRIPEVVSMIFVPFLSLIPALILAHTV | 300 |
| Query: | 301 | LGPIGWTLGKWISAIVLIGLTGPVKWLFGAIFGALYAPFVITGLHHMTNAIDTQLIADTK | 360 |
| | | LGPIGWT+GK IS +VL GLTGPVKWLFGAIFGALYAP VITGLHHMTNAIDTQLIADT | |
| Sbjct: | 301 | LGPIGWTIGKGISFVVLAGLTGPVKWLFGAIFGALYAPLVITGLHHMTNAIDTQLIADTA | 360 |
| Query: | 361 | THTTGLWPMIALSNIAQGSAVLAYYFMHRHDEKEAQISLPAAISAYLGVTEPALFGVNVK | 420 |
| | | T TTGLWPMIALSNIAQGSAV AYY M+RH+E+EA+ISLPAAISAYLGVTEPALFGVNVK | |
| Sbjct: | 361 | TRTTGLWPMIALSNIAQGSAVFAYYLMNRHEEREAEISLPAAISAYLGVTEPALFGVNVK | 420 |
| Query: | 421 | YIYPFVAGMIGSSVAGLLATTFNVQANSIGVGGLPGFLSINVKYMGYFFICMAVAIFIPL | 480 |
| | | Y+YPFVAGMIGS +AGLL+TTFNVQANSIGVGGLPGF++INVKYM FFICMAVAI +P+ | |
| Sbjct: | 421 | YVYPFVAGMIGSGIAGLLSTTFNVQANSIGVGGLPGFMAINVKYMIPFFICMAVAIVVPM | 480 |
| Query: | 481 | FLTLFFKKSGILTKTEEEKLVPDAVIASTTETKSAKEKAVVSGTKLSVVSPLSGLAKPLD | 540 |
| | | FLT FF+KS I+TKTE+E +P+ + S +A K + GT +++ SPL+G K L | |
| Sbjct: | 481 | FLTFFFRKSHIMTKTEDEAKLPETPV-SDAPVATAPHK-TMQGTVITLTSPLTGEVKALS | 538 |
| Query: | 541 | QASDPVFSQGIMGKGVVIDPSDGELVSPVDATVSVLFPTKHAIGLLTSEGVEFLIHIGMD | 600 |
| | | +A DPVF+QG+MG+G ++ P++G LV+P DA VSVLFPTKHAI L+T+EG+E L+HIGMD | |
| Sbjct: | 539 | EAVDPVFAQGVMGQGALLQPTEGVLVAPCDAEVSVLFPTKHAICLVTTEGLELLMHIGMD | 598 |
| Query: | 601 | TVNLEGKGFTSHVAQGDTVKVGDKLITFDIPMIKEEGYIVETPILITNQQEFRPEELIDL | 660 |
| | | TVNL+G+GF + V QGD VK G LI FDI I E GY ETP+++TNQ F L | |
| Sbjct: | 599 | TVNLDGQGFEALVKQGDQVKAGQTLIQFDIAAISEAGYATETPLVVTNQDVFTVTVEGSL | 658 |
| Query: | 661 | PKQIKRGQALMVAKK | 675 |
| | | P+QIK L VA K | |
| Sbjct: | 659 | PRQIKVNDKLAVAVK | 673 |

[1152] Based on this analysis, it was predicted that these proteins and their epitopes could be useful antigens for vaccines or diagnostics.

### EXAMPLE 146

[1153] A DNA sequence (GBSx0052) was identified in S. agalactiae <SEQ ID 487> which encodes the amino acid sequence <SEQ ID 488>. This protein is predicted to be dextran glucosidase DexS (treC). Analysis of this protein sequence reveals the following:

```
Possible site: 48
>>> Seems to have no N-terminal signal sequence
----- Final Results -----
                            bacterial cytoplasm --- Certainty = 0.3493(Affirmative) < succ>
                              bacterial membrane --- Certainty = 0.0000(Not Clear) < succ>
                                bacterial outside --- Certainty = 0.0000(Not Clear) < succ>
```

[1154] The protein has homology with the following sequences in the GENPEPT database:

| >GP: AAB65079 GB: U35633 dextran glucosidase DexS [Streptococcus suis] | | | |
|---|---|---|---|
| Identities = 383/547 (70%), Positives = 439/547 (80%), Gaps = 13/547 (2%) | | | |
| Query: | 1 | MTIDKRKVVYQIYPKSYKDTTGNGVGDLRGIIEKLPYLAELGIDMVWLNPFYPSPQRDNG | 60 |
| | | MTIDKRKVVYQIYPKSYKDTTGNGVGDLRGIIEKLPYL ELGIDM+WLNPFYPSPQRDNG | |
| Sbjct: | 1 | MTIDKRKVVYQIYPKSYKDTTGNGVGDLRGIIEKLPYLKELGIDMIWLNPFYPSPQRDNG | 60 |
| Query: | 61 | YDISDYTAINPDFGTMDDFEEMIEVGRQYRIDFMLDMVLNHCSIEHEWFKKALAGDRYYQ | 120 |
| | | YDISDYTA+NPDFGTM DFEEM+ VG++ I+FMLDMVLNHCS +HEWF+KAL+GD+YYQ | |
| Sbjct: | 61 | YDISDYTAVNPDFGTMADFEEMVTVGKELGIEFMLDMVLNHCSTDHEWFQKALSGDQYYQ | 120 |
| Query: | 121 | DFFILRDNPTDWVSKFGGNAWAPFGDTGKYYLHLFDITQADLNWRNADVRKELFKVVNFW | 180 |
| | | DFFILRD PTDWVSKFGGNAWAPFGDTGKYYLHLFD+TQADLNWRN +R+ELFKVVNFW | |
| Sbjct: | 121 | DFFILRDQPTDWVSKFGGNAWAPFGDTGKYYLHLFDVTQADLNWRNPHIREELFKVVNFW | 180 |
| Query: | 181 | RDKGVKGFRFDVINLIGKDEILENCPINDGKPAYTDRPITHDYLKMLNNASFGQDDSFMT | 240 |
| | | +DKGVKGFRFDVINLIGKDE E+CPINDGKPAYTDRPITHDYLKM+NNA+FG + FMT | |
| Sbjct: | 181 | KDKGVKGFRFDVINLIGKDEAREDCPINDGKPAYTDRPITHDYLKMMNNATFGSEKGFMT | 240 |
| Query: | 241 | VGEMSSTTIANCILYTAPEREELSMAFNFHHLKVDYKDGQKWTIMAFDFPALRDLFHSWG | 300 |
| | | VGEMS+TTI NCILYTAPER+ELSMAFNFHHLKVDYKDGQKWTIM FDF L+ LFH+WG | |
| Sbjct: | 241 | VGEMSATTIENCILYTAPERKELSMAFNFHHLKVDYKDGQKWTIMDFDFEELKHLFHTWG | 300 |
| Query: | 301 | EGMSEGNGWNALFYNNHDQPRALNRFVDVKRFRNEGATMLAASIHLSRGTPYIYMGEEIG | 360 |
| | | E MS GNGWNALFYNNHDQPRALNRF+DV+ FR EGATMLAASIHLSRG | |
| Sbjct: | 301 | EEMSVGNGWNALFYNNHDQPRALNRFIDVENFRKEGATMLAASIHLSRGNNLTST----- | 355 |
| Query: | 361 | MLDPDYSSMDDYVDIESLNAYQIMLDEGKSQEEAFSIIRAKSRDNSRVPMQWDDS----- | 415 |
| | | + SS + + + + + S + + R SR + P+ | |
| Sbjct: | 356 | WVRRSVSSTLTTIAWTTTWTWSLSMPTRCSWTKVTRLSR-PSRLSRPSPVTIPAPRCNGT | 414 |
| Query: | 416 | --TNAGFSEGAPWLKVGKSYKEINVAKEKTGLIFTFYQELIRLRKQLPIIADGNYKAAFK | 473 |
| | | T + PWLK GKSY+ INV +EKTG IFTFY+ LRK+LP+I++G+YKAA+K | |
| Sbjct: | 415 | LLTMQASQQATPWLKAGKSYQTINVEQEKTGPIFTFYKRTHPLRKELPLISEGDYKAAYK | 474 |
| Query: | 474 | DNEKVYAFERHLDKEKLLVLNNFFAEKVKIKLPENYLQGQVLLSNYKDVTLDETVTLQPY | 533 |
| | | D++KVYAFER L+ EKLLVLNNFFAE+V++ L ++Y GQVL+SNY D L + + L+PY | |
| Sbjct: | 475 | DSQKVYAFERLLNDEKLLVLNNFFAEEVELDLADDYAHGQVLISNYPDNKLGKKIILKPY | 534 |
| Query: | 534 | QTLAILV | 540 |
| | | Q LAI V | |
| Sbjct: | 535 | QALAIQV | 541 |

[1155] A related DNA sequence was identified in S. pyogenes <SEQ ID 489> which encodes the amino acid sequence <SEQ ID 490>. Analysis of this protein sequence reveals the following:

```
Possible site: 56
>>> Seems to have no N-terminal signal sequence
----- Final Results -----
                            bacterial cytoplasm --- Certainty = 0.3631(Affirmative) < succ>
                              bacterial membrane --- Certainty = 0.0000(Not Clear) < succ>
                                bacterial outside --- Certainty = 0.0000(Not Clear) < succ>
```

[1156] An alignment of the GAS and GBS proteins is shown below:

| Identities = 431/539 (79%), Positives = 486/539 (89%) | | | |
|---|---|---|---|
| Query: | 1 | MTIDKRKVVYQIYPKSYKDTTGNGVGDLRGIIEKLPYLAELGIDMVWLNPFYPSPQRDNG | 60 |
| | | MTIDK+KVVYQIYPKSYKDTTGNGVGDL GII+KLPYL ELGIDM+WLNPFYPSPQRDNG | |
| Sbjct: | 1 | MTIDKKKVVYQIYPKSYKDTTGNGVGDLLGIIDKLPYLQELGIDMIWLNPFYPSPQRDNG | 60 |
| Query: | 61 | YDISDYTAINPDFGTMDDFEEMIEVGRQYRIDFMLDMVLNHCSIEHEWFKKALAGDRYYQ | 120 |
| | | YD+SDYTA+NPDFGTM DFE +++ ++++I+ MLDMVLNHCS +HEWF+KALAGD YYQ | |
| Sbjct: | 61 | YDVSDYTAVNPDFGTMADFENLVKAAKEHQIELMLDMVLNHCSTDHEWFQKALAGDPYYQ | 120 |
| Query: | 121 | DFFILRDNPTDWVSKFGGNAWAPFGDTGKYYLHLFDITQADLNWRNADVRKELFKVVNFW | 180 |
| | | DFFILRD PTDWVSKFGGNAWAPFGDTGKYYLHLFD+TQADLNWRN VR+EL KVVNFW | |
| Sbjct: | 121 | DFFILRDQPTDWVSKFGGNAWAPFGDTGKYYLHLFDVTQADLNWRNPHVREELAKVVNFW | 180 |
| Query: | 181 | RDKGVKGFRFDVINLIGKDEILENCPINDGKPAYTDRPITHDYLKMLNNASFGQDDSFMT | 240 |
| | | RDKGVKGFRFDVINLIGKDE L +CP+NDGKPAYTDRPITH YL LN ASFGQDDSFMT | |
| Sbjct: | 181 | RDKGVKGFRFDVINLIGKDEELVDCPVNDGKPAYTDRPITHTYLHDLNQASFGQDDSFMT | 240 |
| Query: | 241 | VGEMSSTTIANCILYTAPEREELSMAFNFHHLKVDYKDGQKWTIMAFDFPALRDLFHSWG | 300 |
| | | VGEMS+TTI NC+LYTAPEREELSMAFNFHHLKVDY++GQKWTIMAFDF ALRDLFH+WG | |
| Sbjct: | 241 | VGEMSATTIDNCLLYTAPEREELSMAFNFHHLKVDYENGQKWTIMAFDFAALRDLFHAWG | 300 |
| Query: | 301 | EGMSEGNGWNALFYNNHDQPRALNRFVDVKRFRNEGATMLAASIHLSRGTPYIYMGEEIG | 360 |
| | | EGMS+GNGWNALFYNNHDQPRALNRFVDV FRNEGATMLAASIHLSRGTPYIYMGEEIG | |
| Sbjct: | 301 | EGMSQGNGWNALFYNNHDQPRALNRFVDVTHFRNEGATMLAASIHLSRGTPYIYMGEEIG | 360 |
| Query: | 361 | MLDPDYSSMDDYVDIESLNAYQIMLDEGKSQEEAFSIIRAKSRDNSRVPMQWDDSTNAGF | 420 |
| | | MLDPD+ SMDDYVD+ESLNAY +L GKS EEAF+II+AKSRDN+R PMQWD S +AGF | |
| Sbjct: | 361 | MLDPDFDSMDDYVDVESLNAYSSLLVSGKSAEEAFAIIKAKSRDNARTPMQWDASEHAGF | 420 |
| Query: | 421 | SEGAPWLKVGKSYKEINVAKEKTGLIFTFYQELIRLRKQLPIIADGNYKAAFKDNEKVYA | 480 |
| | | + G PWL+VGKSY++INV EK G IF FYQ LI LRK+LPIIA+G+Y+AAFKD++ VYA | |
| Sbjct: | 421 | TTGKPWLEVGKSYRDINVETEKEGRIFPFYQRLIALRKELPIIAEGDYRAAFKDSQAVYA | 480 |
| Query: | 481 | FERHLDKEKLLVLNNFFAEKVKIKLPENYLQGQVLLSNYKDVTLDETVTLQPYQTLAIL | 539 |
| | | FERHL + LLVLN+F+A++V+++LP Y GQVL+SNY+ V++ E V L+PYQTLAIL | |
| Sbjct: | 481 | FERHLGDQCLLVLNHFYADEVELELPPRYQHGQVLISNYEKVSICEKVILKPYQTLAIL | 539 |

[1157] Based on this analysis, it was predicted that these proteins and their epitopes could be useful antigens for vaccines or diagnostics.

### EXAMPLE 147

[1158] A DNA sequence (GBSx0153) was identified in S. agalactiae <SEQ ID 491> which encodes the amino acid sequence <SEQ ID 492>. Analysis of this protein sequence reveals the following:

| Possible site: 29 | | | | |
|---|---|---|---|---|
| >>> Seems to have an uncleavable N-term signal seq | | | | |
| | INTEGRAL | Likelihood = −3.03 | Transmembrane | 8-24 (8-25) |

```
----- Final Results -----
                              bacterial membrane --- Certainty = 0.2211(Affirmative) < succ>
                                bacterial outside --- Certainty = 0.0000(Not Clear) < succ>
                            bacterial cytoplasm --- Certainty = 0.0000(Not Clear) < succ>
```

[1159] The protein has no significant homology with any sequences in the GENPEPT database.

[1160] No corresponding DNA sequence was identified in S. pyogenes.

[1161] Based on this analysis, it was predicted that this protein and its epitopes, could be useful antigens for vaccines or diagnostics.

### EXAMPLE 148

[1162] A DNA sequence (GBSx0154) was identified in S. agalactiae <SEQ ID 493> which encodes the amino acid sequence <SEQ ID 494>. Analysis of this protein sequence reveals the following:

```
Possible site: 57
>>> Seems to have a cleavable N-term signal seq.
----- Final Results -----
                                bacterial outside --- Certainty = 0.3000(Affirmative) < succ>
                              bacterial membrane --- Certainty = 0.0000(Not Clear) < succ>
                            bacterial cytoplasm --- Certainty = 0.0000(Not Clear) < succ>
```

[1163] The protein has homology with the following sequences in the GENPEPT database:

| >GP: BAB03939 GB: AP001507 unknown conserved protein | | | |
|---|---|---|---|
| [Bacillus halodurans] | | | |
| Identities = 190/639 (29%), Positives = 331/639 (51%), Gaps = 34/639 (5%) | | | |
| Query: | 6 | TVVIMLVFLARKNLSLYELTVQTKFSIKVIIEQINYLNSFLAKNHLPAIAHSAGRYQLLG | 65 |
| | | T ++ + AR L + ELT + S + + + +NS+L + L A+ + L+ | |
| Sbjct: | 8 | TFILTQLLHARSYLPIQELTQKLNVSRRTVYNDLEKINSWLEEQGLKAV-YKVRSQGLIL | 66 |
| Query: | 66 | DEKEHDKI---VSLLEAEQFYLTQEERVCLIYLYSFCRREFVSNVHYQDFLKVSKNTTLS | 122 |
| | | DE+ ++I + L++ + + +ER + +Y R E + H D VS+NTT+ | |
| Sbjct: | 67 | DERAKEEIPTKLRSLKSWHYEYSAQERKAWVVIYLLTRLEPLFLEHLMDRTGVSRNTTID | 126 |
| Query: | 123 | DIKMLRSKLAKRGISLTYTRAKGYSLVGDEMDKHQVAFQMITQLLE--------SPIGFW | 174 |
| | | DIK L+ +L ++L + R GY++ GDE DK + ++Q L SPI + | |
| Sbjct: | 127 | DIKCLKDELNNFHLALEFERKDGYTISGDETDKRKALVYYLSQALPQQNWETELSPIRIF | 186 |
| Query: | 175 | SLNYILSSWKFALSYEKLEKTVEYFYESFQLSPIQ---DRLEKSLYFIILILCRYQRSVD | 231 |
| | | + F + E+L+K + ES ++ IQ D L +L + R + | |
| Sbjct: | 187 | LRTKRDNGRIFTI--EELQKVYDVISESEKVLKIQYTDDVLHSLSLRFLLFMKRVAKG-- | 242 |
| Query: | 232 | RVLQGSPIVSEQLK-----ELTTIIVTNLSQDISLSKPLDQKEKDYITLILSGCF----- | 281 |
| | | + ++ P+ + LK E ++ L Q + P D++ T ILS | |
| Sbjct: | 243 | KFIKVHPLEKQVLKGTKEYEAAKVMSFKLEQAFGVHYP-DEEVLYLTTHILSSKINYANG | 301 |
| Query: | 282 | EGEGTKDDDFFEALAKAIVDEMETVSLLNFSNKEELLQGLKRHIIPAYFRLKYGLTGDSG | 341 |
| | | E E K+ + ++V++ + + + F KE L + L HI PA++R+KYGL ++ | |
| Sbjct: | 302 | EIESRKESQELTHIVTSMVNDFQKYACVVFEEKELLEKNLFFHIKPAFYRIKYGLEVENN | 361 |
| Query: | 342 | YTQNIKEHYSDLFLLVKKALRPLEEQVGL-IPDSEISYFVIHFGGYLRQSGGTQSMSYKA | 400 |
| | | ++IK Y +LFLL +K + LE VG + D+E+++ +HF G++R+ G + KA | |
| Sbjct: | 362 | IAESIKTSYPELFLLTRKVVHYLERYVGKSVNDNEVAFITMHFVGWMRREGTIPTKRKKA | 421 |
| Query: | 401 | LILCPNGVSSSLVIKEKLRGLFPQIHFHRVSKIEQLKLIDNQTYDMVFSTIFVETKKPNY | 460 |
| | | LI+C NGV +S +K +L GLFP + + I + + + ++ +T E P + | |
| Sbjct: | 422 | LIVCANGVGTSQFLKNQLEGLFPAVDIIKTCSIREYEKTPVEVDFIISTTSIPEKNVPIF | 481 |
| Query: | 461 | LVSLMMT-AEQVQQLKELVISDFPKACLDDFQLDQLIATIKKYAHVHCEEELKLALRTMV | 519 |
| | | +V+ ++T E+ + LK + ++ + + ++ L+ IK++ +V E+ L LR | |
| Sbjct: | 482 | IVNPILTETEKERLLKSVHVALDELGAMKGYSIEGLMDVIKRHGNVDDEKALYQDLRRFF | 541 |
| Query: | 520 | KQD--ILRKDVRPLLHQLITEETYQTSSEQMNWKEAIRLAAKPLLASGKITESYPEAMIE | 577 |
| | | Q I K +P L+QL+TE+ Q + +W+EAI+LAAKPLL G +TESY + MI+ | |
| Sbjct: | 542 | TQPTPIGPKQEKPDLNQLLTEDMIQLREQVTHWQEAIQLAAKPLLLKGMVTESYVKKMIK | 601 |
| Query: | 578 | KVEEFGPFINLGKGIAIPHARPEDGVNSVGMSMLVLEQP | 616 |
| | | +E+FGP++ + AIPHA+PEDGV +GMS+L L++P | |
| Sbjct: | 602 | NIEKFGPYMIIAPHFAIPHAKPEDGVRQLGMSLLWLKKP | 640 |

[1164] A related DNA sequence was identified in S. pyogenes <SEQ ID 495> which encodes the amino acid sequence <SEQ ID 496>. Analysis of this protein sequence reveals the following:

| Possible site: 57 or 61 | | | | |
|---|---|---|---|---|
| >>> Seems to have no N-terminal signal sequence | | | | |
| | INTEGRAL | Likelihood = −0.64 | Transmembrane | 123-139 (123-139) |

```
----- Final Results -----
                              bacterial membrane --- Certainty = 0.1256(Affirmative) < succ>
                                bacterial outside --- Certainty = 0.0000(Not Clear) < succ>
                            bacterial cytoplasm --- Certainty = 0.0000(Not Clear) < succ>
```

[1165] An alignment of the GAS and GBS proteins is shown below:

| Identities = 187/624 (29%), Positives = 327/624 (51%), Gaps = 20/624 (3%) | | | |
|---|---|---|---|
| Query: | 1 | MVDNKTVVIMLVFLARKNLSLYELTVQTKFSIKVIIEQINYLNSFLAKNHLPAIAHSAGR | 60 |
| | | M+ ++ + +F K SL K S + I+ I +N L+ LP IA | |
| Sbjct: | 35 | MLSHELIRNYQLFSKYKGHSLEAFESILKASKRHILADIAKINDTLSLYQLPLIALDR-- | 92 |
| Query: | 61 | YQLL--GDEKEHDKIVSLLEAEQFYLTQEERVCLIYLYSFCRREFVSNVHYQDFLKVSKN | 118 |
| | | QL+ D E D + +L YL Q+ER+ +I +Y +EF+S H + L++S+N | |
| Sbjct: | 93 | -QLVYPPDLTEKDLLNRMLPTLDDYLFQDERLDMIIIYIMMAKEFISINHLESLLRLSRN | 151 |
| Query: | 119 | TTLSDIKMLRSKLAKRGISLTYTRAKGYSLVGDEMDKHQVAFQMITQLLESPIGFWSLNY | 178 |
| | | + ++D+ ++R ++ ++L Y R GY G+ + ++ ++ LL+ G W +Y | |
| Sbjct: | 152 | SVIADLNLVRDRVQAFQVTLAYNRQDGYFFEGEPLALRRLLESAVSSLLQVTSGPWVFSY | 211 |
| Query: | 179 | ILSSWKFALSYEKLEKTVEYFYESFQLSPIQDRLEKSLYFIILILCR-YQRSVD-RVLQG | 236 |
| | | +L + + T+E L+ I ++L +YF L+ R + R+V + | |
| Sbjct: | 212 | LLHELGLPDQKKVMAATLEELSRENHLTFISEKLRDLIYFFCLLAHRPFSRNVRAEAVDT | 271 |
| Query: | 237 | SPIVSEQLKELTTIIVTNLSQDISLSKPLDQKEKDYITLILSGCFEG--EGTKDDDFFEA | 294 |
| | | P+ S ++ + ++ N P +EK + L GC +G E ++ | |
| Sbjct: | 272 | FPLASPAVETMVDQLLVNF--------PSLTEEKYLVQSRLLGCIQGDLELVFQQPIYDI | 323 |
| Query: | 295 | LAKAIVDEMETVSLLNFSNKEELLQGLKRHIIPAYFRLKYGLTGDSGYTQNIKEHYSDLF | 354 |
| | | + + I++ + + L+ ++ EL Q L H++PAY+RL Y + + + IK+ Y LF | |
| Sbjct: | 324 | MEE-IINSVAVNTGLSITDTPELRQNLYSHLLPAYYRLYYDINLTNPLKEQIKQDYESLF | 382 |
| Query: | 355 | LLVKKALRPLEEQVGL-IPDSEISYFVIHFGGYLRQSGGTQSMSYKALILCPNGVSSSLV | 413 |
| | | LVK++L PLE+Q+G + + E++YF IHFG +L+ S AL +CPNG+SSSL+ | |
| Sbjct: | 383 | YLVKRSLSPLEKQLGKSVNEDEVAYFTIHFGRWLQAPKKRPSNQLVALSVCPNGISSSLM | 442 |
| Query: | 414 | IKEKLRGLFPQIHFHRVSKIEQLKLIDNQTYDMVFSTIFVETKKPNYLVSLMMTAEQVQQ | 473 |
| | | ++ L+ LFPQ+ F R+ +++++KL+D ++D++FST+ + KP Y+ +M + | |
| Sbjct: | 443 | LEATLKELFPQLQFIRIHQLDKIKLLDPASFDLIFSTVAFDCAKPVYVTQALMGPVEKMM | 502 |
| Query: | 474 | LKELVISDFPKACLDDFQLDQLIATIKKYAHVHCEEELKLAL-RTMVKQDILRKDVRPLL | 532 |
| | | LK++V DF + F LD L++ I K+ + +E L L R ++ + + L | |
| Sbjct: | 503 | LKKMVCDDFHLPLSEQFALDDLLSIIHKHTTITNKEGLVSDLSRYLIGNHLTIEKGGLGL | 562 |
| Query: | 533 | HQLITEETYQTSSEQMNWKEAIRLAAKPLLASGKITESYPEAMIEKVEEFGPFINLGKGI | 592 |
| | | L+T + + + +W+EAIRLAA+PLL I SY + MI+ V E G +I L + | |
| Sbjct: | 563 | LDLLTADFIRQADAVSDWQEAIRLAAQPLLEHQMIETSYIDGMIDSVNELGAYIVLAPKV | 622 |
| Query: | 593 | AIPHARPEDGVNSVGMSMLVLEQP | 616 |
| | | A+PHA PE G +GMS+L L++P | |
| Sbjct: | 623 | AVPHAAPEKGTRQLGMSLLQLKEP | 646 |

[1166] Based on this analysis, it was predicted that these proteins and their epitopes could be useful antigens for vaccines or diagnostics.

### EXAMPLE 149

[1167] A DNA sequence (GBSx0155) was identified in S. agalactiae <SEQ ID 497> which encodes the amino acid sequence <SEQ ID 498>. Analysis of this protein sequence reveals the following:

```
Possible site: 22
>>> Seems to have no N-terminal signal sequence
----- Final Results -----
                            bacterial cytoplasm --- Certainty = 0.3665(Affirmative) < succ>
                              bacterial membrane --- Certainty = 0.0000(Not Clear) < succ>
                                bacterial outside --- Certainty = 0.0000(Not Clear) < succ>
```

[1168] The protein has no significant homology with any sequences in the GENPEPT database.

[1169] A related DNA sequence was identified in S. pyogenes <SEQ ID 499> which encodes the amino acid sequence <SEQ ID 500>. Analysis of this protein sequence reveals the following:

```
Possible site: 22
>>> Seems to have no N-terminal signal sequence
----- Final Results -----
                            bacterial cytoplasm --- Certainty = 0.3665(Affirmative) < succ>
                              bacterial membrane --- Certainty = 0.0000(Not Clear) < succ>
                                bacterial outside --- Certainty = 0.0000(Not Clear) < succ>
```

[1170] An alignment of the GAS and GBS proteins is shown below:

Identities = 33/35 (94%), Positives = 35/35 (99%)

| | | | |
|---|---|---|---|
| Query: | 1 | MEKEAKQIIDLKRNLFKIDVRAQKDEEKVFMRTAW | 35 |
| | | +EKEAKQ+IDLKRNLFKIDVRAQKDEEKVFMRTAW | |
| Sbjct: | 1 | LEKEAKQMIDLKRNLFKIDVRAQKDEEKVFMRTAW | 35 |

[1171] Based on this analysis, it was predicted that these proteins and their epitopes could be useful antigens for vaccines or diagnostics.

### EXAMPLE 150

[1172] A repeated DNA sequence (GBSx0156) was identified in S. agalactiae <SEQ ID 501> which encodes the amino acid sequence <SEQ ID 502>. This protein is predicted to be a repeat-associated protein in rhsc-phrb intergenic region. Analysis of this protein sequence reveals the following:

| Possible site: 44 | | | | |
|---|---|---|---|---|
| >>> Seems to have no N-terminal signal sequence | | | | |
| | INTEGRAL | Likelihood = −4.57 | Transmembrane | 29-45 (28-48) |

```
----- Final Results -----
                              bacterial membrane --- Certainty = 0.2826(Affirmative) < succ>
                                bacterial outside --- Certainty = 0.0000(Not Clear) < succ>
                            bacterial cytoplasm --- Certainty = 0.0000(Not Clear) < succ>
```

[1173] A closely-related DNA sequence was identified in S. agalactiae <SEQ ID 1035> which encodes the amino acid sequence <SEQ ID 1036>. Further related GBS sequences are: <SEQ ID 9067>, <SEQ ID 9068>, <SEQ ID 9497>, <SEQ ID 9498>, <SEQ ID 9733>, <SEQ ID 9734>

[1174] A related repeated DNA sequence was identified in S. pyogenes <SEQ ID 503> which encodes the amino acid sequence <SEQ ID 504>. Analysis of this protein sequence reveals the following:

| Possible site: 44 | | | | |
|---|---|---|---|---|
| >>> Seems to have no N-terminal signal sequence | | | | |
| | INTEGRAL | Likelihood = −4.57 | Transmembrane | 29-45 (28-48) |

```
----- Final Results -----
                              bacterial membrane --- Certainty = 0.2826(Affirmative) < succ>
                                bacterial outside --- Certainty = 0.0000(Not Clear) < succ>
                            bacterial cytoplasm --- Certainty = 0.0000(Not Clear) < succ>
```

[1175] A related GBS gene <SEQ ID 8547> and protein <SEQ ID 8548> were also identified. Analysis of this protein sequence reveals the following:

| Lipop Possible site: −1 Crend: 5 | | | | |
|---|---|---|---|---|
| McG: Discrim Score: −7.73 | | | | |
| GvH: Signal Score (−7.5): −3.88 | | | | |
| Possible site: 44 | | | | |
| >>> Seems to have no N-terminal signal sequence | | | | |
| ALOM program count: 1 value: −4.57 threshold: 0.0 | | | | |
| | INTEGRAL | Likelihood = −4.57 | Transmembrane | 26-42 (25-45) |
| | PERIPHERAL | Likelihood = 2.12 | 334 | |

```
modified ALOM score: 1.41
*** Reasoning Step: 3
----- Final Results -----
                              bacterial membrane --- Certainty = 0.2826(Affirmative) < succ>
                                bacterial outside --- Certainty = 0.0000(Not Clear) < succ>
                            bacterial cytoplasm --- Certainty = 0.0000(Not Clear) < succ>
```

[1176] A related DNA sequence was identified in S. pyogenes <SEQ ID 7071> which encodes the amino acid sequence <SEQ ID 7072>. An alignment of the GAS and GBS sequences follows:

| Score = 767 bits (1960), Expect = 0.0 | | | |
|---|---|---|---|
| Identities = 375/377 (99%), Positives = 375/377 (99%) | | | |
| Query: | 4 | MIDFIISIDDCAVELDSRQSWKIRSPLSTILFLVFVCQLAGIETWKEMEDFIEMNEPLFA | 63 |
| | | MIDFIISIDDCAVELDSRQSWKIR PLSTILFLVFVCQLAGIETWKEMEDFIEMNEPLFA | |
| Sbjct: | 1 | MIDFIISIDDCAVELDSRQSWKIRYPLSTILFLVFVCQLAGIETWKEMEDFIEMNEPLFA | 60 |
| Query: | 64 | TYVDLSEGCSSHDTLERVISLVNSDRLKELKVQFEQSLTSLDAVHQLISVDGKTIRGNRG | 123 |
| | | TYVDLSEGC SHDTLERVISLVNSDRLKELKVQFEQSLTSLDAVHQLISVDGKTIRGNRG | |
| Sbjct: | 61 | TYVDLSEGCPSHDTLERVISLVNSDRLKELKVQFEQSLTSLDAVHQLISVDGKTIRGNRG | 120 |
| Query: | 124 | KNQKPVHIVTAYDGGHHLSLGQVAVEEKSNEIVAIPQLLRTIDIRKSIVTIDAMGTQTAI | 183 |
| | | KNQKPVHIVTAYDGGHHLSLGQVAVEEKSNEIVAIPQLLRTIDIRKSIVTIDAMGTQTAI | |
| Sbjct: | 121 | KNQKPVHIVTAYDGGHHLSLGQVAVEEKSNEIVAIPQLLRTIDIRKSIVTIDAMGTQTAI | 180 |
| Query: | 184 | VDTIIKGKADYCLAVKGNQETLYDDIALYFSDVNLLEELQENAQYYQTVEKSRGQIEVRE | 243 |
| | | VDTIIKGKADYCLAVKGNQETLYDDIALYFSDVNLLEELQENAQYYQTVEKSRGQIEVRE | |
| Sbjct: | 181 | VDTIIKGKADYCLAVKGNQETLYDDIALYFSDVNLLEELQENAQYYQTVEKSRGQIEVRE | 240 |
| Query: | 244 | YWVSSDIKWLCQNHPKWHKLRGIGMTRNTIDKDGQLSQENRYFIFSFKPDVLTFANCVRG | 303 |
| | | YWVSSDIKWLCQNHPKWHKLRGIGMTRNTIDKDGQLSQENRYFIFSFKPDVLTFANCVRG | |
| Sbjct: | 241 | YWVSSDIKWLCQNHPKWHKLRGIGMTRNTIDKDGQLSQENRYFIFSFKPDVLTFANCVRG | 300 |
| Query: | 304 | HWQIESMHWLLDVVYHEDHHQTLDKRAAFNLNLIRKMCLYFLKVMVFPKKDLSYRRKQRY | 363 |
| | | HWQIESMHWLLDVVYHEDHHQTLDKRAAFNLNLIRKMCLYFLKVMVFPKKDLSYRRKQRY | |
| Sbjct: | 301 | HWQIESMHWLLDVVYHEDHHQTLDKRAAFNLNLIRKMCLYFLKVMVFPKKDLSYRRKQRY | 360 |
| Query: | 364 | ISVHLEDYLVQLFGERG | 380 |
| | | ISVHLEDYLVQLFGERG | |
| Sbjct: | 361 | ISVHLEDYLVQLFGERG | 377 |

[1177] A further related DNA sequence was identified in S. pyogenes <SEQ ID 9087> which encodes the amino acid sequence <SEQ ID 9088>. A further related DNA sequence was identified in S. pyogenes <SEQ ID 9089> which encodes the amino acid sequence <SEQ ID 9090>. The GAS and GBS proteins are 100% identical.

[1178] There is also homology to SEQ IDs 7018 and 8548.

[1179] SEQ ID 8548 (GBS318) was expressed in E. coli as a GST-fusion product. SDS-PAGE analysis of total cell extract is shown in FIG. 46 (lane 5; MW 70 kDa).

[1180] GBS318-GST was purified as shown in FIG. 203, lane 3.

[1181] Based on this analysis, it was predicted that these proteins and their epitopes could be useful antigens for vaccines or diagnostics.

### EXAMPLE 151

[1182] A DNA sequence (GBSx0157) was identified in S. agalactiae <SEQ ID 505> which encodes the amino acid sequence <SEQ ID 506>. Analysis of this protein sequence reveals the following:

```
Possible site: 34
>>> Seems to have an uncleavable N-term signal seq
----- Final Results -----
                              bacterial membrane --- Certainty = 0.0000(Not Clear) < succ>
                                bacterial outside --- Certainty = 0.0000(Not Clear) < succ>
                            bacterial cytoplasm --- Certainty = 0.0000(Not Clear) < succ>
```

[1183] The protein has no significant homology with any sequences in the GENPEPT database, but there is homology to SEQ ID 496.

[1184] Based on this analysis, it was predicted that this protein and its epitopes, could be useful antigens for vaccines or diagnostics.

### EXAMPLE 152

[1185] A repeated DNA sequence (GBSx0158) was identified in S. agalactiae <SEQ ID 507> which encodes the amino acid sequence <SEQ ID 508>. Analysis of this protein sequence reveals the following:

```
Possible site: 48
>>> Seems to have no N-terminal signal sequence
----- Final Results -----
                            bacterial cytoplasm --- Certainty = 0.1054(Affirmative) < succ>
                              bacterial membrane --- Certainty = 0.0000(Not Clear) < succ>
                                bacterial outside --- Certainty = 0.0000(Not Clear) < succ>
```

[1186] The protein has homology with the following sequences in the GENPEPT database:

| >GP: BAB03941 GB: AP001507 unknown conserved protein [Bacillus halodurans] | | | |
|---|---|---|---|
| Identities = 26/82 (31%), Positives = 52/82 (62%), Gaps = 2/82 (2%) | | | |
| Query: | 2 | LRIGTACGSGLGSSFMVQMNIESILKDLGVSDVEVEHYDLGGADPSAADVWIVGRDLEDS | 61 |
| | | ++I CG G G+S +++MN+E++L LG++ +V++ D+ A +D I ++L +S | |
| Sbjct: | 1 | MKILCVCGLGQGTSLILKMNVETVLSQLGIA-ADVDNTDVSSASSEQSDFIITSKELAES | 59 |
| Query: | 62 | -AGHLGDVRILNSIIDMDELRE | 82 |
| | | A H + I+N+ DM+E+++ | |
| Sbjct: | 60 | LASHPSKIVIVNNYFDMEEIKQ | 81 |

[1187] A related DNA sequence was identified in S. pyogenes <SEQ ID 509> which encodes the amino acid sequence <SEQ ID 510>. Analysis of this protein sequence reveals the following:

```
Possible site: 48
>>> Seems to have an uncleavable N-term signal seq
----- Final Results -----
                              bacterial membrane --- Certainty = 0.0000(Not Clear) < succ>
                                bacterial outside --- Certainty = 0.0000(Not Clear) < succ>
                            bacterial cytoplasm --- Certainty = 0.0000(Not Clear) < succ>
```

[1188] An alignment of the GAS and GBS proteins is shown below:

| Identities = 27/90 (30%), Positives = 51/90 (56%), Gaps = 1/90 (1%) | | | |
|---|---|---|---|
| Query: | 1 | MLRIGTACGSGLGSSFMVQMNIESILKDLGVSDVEVEHYDLGGADPSAADVWIVGRDLED | 60 |
| | | M++I T CG+G+GSS +++M +E+I LG+ DV+ E D A AD+++ ++ +D | |
| Sbjct: | 8 | MIKIVTVCGNGIGSSLLLRMKVEAIASSLGI-DVDAESCDSNAAVGKGADLFVTVKEFKD | 66 |
| Query: | 61 | SAGHLGDVRILNSIIDMDELRELVTGICQE | 90 |
| | | V I+ S + ++ E + + +E | |
| Sbjct: | 67 | IFPEDAKVCIVKSYTNRKKIEEDLVPVLKE | 96 |

[1189] Based on this analysis, it was predicted that these proteins and their epitopes could be useful antigens for vaccines or diagnostics.

### EXAMPLE 153

[1190] A DNA sequence (GBSx0159) was identified in S. agalactiae <SEQ ID 511> which encodes the amino acid sequence <SEQ ID 512>. Analysis of this protein sequence reveals the following:

```
Possible site: 20
>>> Seems to have an uncleavable N-term signal seq
----- Final Results -----
                              bacterial membrane --- Certainty = 0.0000(Not Clear) < succ>
                                bacterial outside --- Certainty = 0.0000(Not Clear) < succ>
                            bacterial cytoplasm --- Certainty = 0.0000(Not Clear) < succ>
```

[1191] The protein has no significant homology with any sequences in the GENPEPT database.

[1192] No corresponding DNA sequence was identified in S. pyogenes.

[1193] Based on this analysis, it was predicted that this protein and its epitopes, could be useful antigens for vaccines or diagnostics.

### EXAMPLE 154

[1194] A DNA sequence (GBSx0160) was identified in S. agalactiae <SEQ ID 513> which encodes the amino acid sequence <SEQ ID 514>. This protein is predicted to be sgaT. Analysis of this protein sequence reveals the following:

| Possible site: 16 | | | | |
|---|---|---|---|---|
| >>> Seems to have a cleavable N-term signal seq. | | | | |
| | INTEGRAL | Likelihood = −14.97 | Transmembrane | 424-440 (411-447) |
| | INTEGRAL | Likelihood = −8.86 | Transmembrane | 224-240 (221-248) |
| | INTEGRAL | Likelihood = −7.27 | Transmembrane | 134-150 (124-167) |
| | INTEGRAL | Likelihood = −7.11 | Transmembrane | 321-337 (314-349) |
| | INTEGRAL | Likelihood = −6.64 | Transmembrane | 379-395 (370-397) |
| | INTEGRAL | Likelihood = −6.21 | Transmembrane | 96-112 (94-115) |
| | INTEGRAL | Likelihood = −6.05 | Transmembrane | 267-283 (257-289) |
| | INTEGRAL | Likelihood = −3.13 | Transmembrane | 18-34 (17-35) |
| | INTEGRAL | Likelihood = −2.55 | Transmembrane | 151-167 (151-167) |
| | INTEGRAL | Likelihood = −0.32 | Transmembrane | 42-58 (42-58) |

```
----- Final Results -----
                              bacterial membrane --- Certainty = 0.6986(Affirmative) < succ>
                                bacterial outside --- Certainty = 0.0000(Not Clear) < succ>
                            bacterial cytoplasm --- Certainty = 0.0000(Not Clear) < succ>
```

[1195] The protein has homology with the following sequences in the GENPEPT database:

| >GP: CAB52363 GB: AL109747 putative integral membrane protein | | | |
|---|---|---|---|
| [Streptomyces coelicolor A3(2)] | | | |
| Identities = 202/453 (44%), Positives = 292/453 (63%), Gaps = 22/453 (4%) | | | |
| Query: | 7 | FLVN-IASTPAILVALIAIIGLVLQKKGVPDIVKGGIKTFVGFLVVSGGTGIVQNSLNPF | 65 |
| | | FLVN I S PA L+ +I +GL KK V V G IK +G L+V G G+V +SL+P | |
| Sbjct: | 10 | FLVNEILSQPAYLIGIITAVGLAALKKSVGQTVGGAIKATLGLLLVGAGAGLVSSSLDPL | 69 |
| Query: | 66 | GKMFEHAFHLVGVVPNNEAIVAVALTKYGSATALIMLAGMIFNILIARFTKFKYIFLTGH | 125 |
| | | G+M + GV+P NEAIV +A +++G+ A +M+ G + ++ +ARFT +Y+FLTGH | |
| Sbjct: | 70 | GRMIQGTTGTHGVIPTNEAIVGIAQSEFGARVAWLMILGFLVSLALARFTPLRYVFLTGH | 129 |
| Query: | 126 | HTLYMACMIAVIFAVAGFTSFSLILFGGLALGIIMSVSPAFVQKYMIQLTGNDKVALGHF | 185 |
| | | H L+MA ++ ++ A AG S +++L GG+ +GI++ PAF + ++TGND +A+GHF | |
| Sbjct: | 130 | HMLFMATLLTIVMATAGQGSVAVVLGGGVLVGILLVALPAFAHPWTKKVTGNDTLAIGHF | 189 |
| Query: | 186 | GSLGYWLSGFIGGIVGDKSKSTEDIKFPKSLSFLRDSTVSITISMAIIYLIVAV------ | 239 |
| | | G+ GY +SG G +VG S+STE++K P+ L FLRDS V+ +SM +IYL++++ | |
| Sbjct: | 190 | GTAGYIVSGATGQLVGKNSRSTEEMKLPEGLRFLRDSMVATALSMVLIYLVMSLLFLAKV | 249 |
| Query: | 240 | --------FAGEAYIAKEISNGVNGLVYALQLAGQFAAGVFVILAGVRLILGEIVPAFKG | 291 |
| | | FAG ++ N L+ ++ QF GV VIL GVR ILGE+VPAF+G | |
| Sbjct: | 250 | GQDAAFKAFAGSG--GDPAADVGNYLMQSVMQGLQFGIGVAVILFGVRTILGELVPAFQG | 307 |
| Query: | 292 | ISEKLVPNSKPALDCPIVYPYAPNAVLIGFISSFVGGLVSMIVMI-----VTGTTVILPG | 346 |
| | | I+ ++VP +KPALD PIV+PYA NAVLIGFI SF+GGL + +I G ++LPG | |
| Sbjct: | 308 | IAGRVVPGAKPALDAPIVFPYAQNAVLIGFIFSFLGGLTGLAALIWVFNPAFGLALVLPG | 367 |
| Query: | 347 | VVPHFFCGATAGVIGNASGGVRGATIGAFVQGILISFLPIFLMPVLGGLGFKGSTFSDAD | 406 |
| | | +VPHFF G AGV GNA+GG RGA +G+F+ G+LI+FLP L+ LG G +TF DAD | |
| Sbjct: | 368 | LVPHFFTGGAAGVYGNATGGRRGAAVGSFLNGLLITFLPAILLKALGSFGEANTTFGDAD | 427 |
| Query: | 407 | FGLTGIILGALNHVGGAIAIVIGIVVILIGLFG | 439 |
| | | FG G +LG++ + G ++ ++ L+ L G | |
| Sbjct: | 428 | FGWFGAVLGSIGKLDGTAGLIGMLIFGLLILAG | 460 |

[1196] A related DNA sequence was identified in S. pyogenes <SEQ ID 515> which encodes the amino acid sequence <SEQ ID 516>. Analysis of this protein sequence reveals the following:

| Possible site: 34 | | | | |
|---|---|---|---|---|
| >>> Seems to have a cleavable N-term signal seq. | | | | |
| | INTEGRAL | Likelihood = −8.33 | Transmembrane | 330-346 (315-353) |
| | INTEGRAL | Likelihood = −8.17 | Transmembrane | 227-243 (221-246) |
| | INTEGRAL | Likelihood = −4.62 | Transmembrane | 127-143 (126-145) |
| | INTEGRAL | Likelihood = −4.25 | Transmembrane | 269-285 (266-291) |
| | INTEGRAL | Likelihood = −3.77 | Transmembrane | 43-59 (41-62) |
| | INTEGRAL | Likelihood = −3.66 | Transmembrane | 98-114 (91-116) |
| | INTEGRAL | Likelihood = −2.76 | Transmembrane | 146-162 (145-163) |
| | INTEGRAL | Likelihood = −1.59 | Transmembrane | 308-324 (308-324) |

```
----- Final Results -----
                              bacterial membrane --- Certainty = 0.4333(Affirmative) < succ>
                                bacterial outside --- Certainty = 0.0000(Not Clear) < succ>
                            bacterial cytoplasm --- Certainty = 0.0000(Not Clear) < succ>
```

[1197] The protein has homology with the following sequences in the databases:

| >GP: CAB52363 GB: AL109747 putative integral membrane protein | | | |
|---|---|---|---|
| [Streptomyces coelicolor A3(2)] | | | |
| Identities = 162/387 (41%), Positives = 245/387 (62%), Gaps = 17/387 (4%) | | | |
| Query: | 8 | IRDILKEPAFLMGLIAFAGLVALKTPAHKVLTGTLGPILGYLMLVAGAGVIVTNLDPLAK | 67 |
| | | + +IL +PA+L+G+I GL ALK + + G + LG L++ AGAG++ ++LDPL + | |
| Sbjct: | 12 | VNEILSQPAYLIGIITAVGLAALKKSVGQTVGGAIKATLGLLLVGAGAGLVSSSLDPLGR | 71 |
| Query: | 68 | LIEHGFSITGVVPNNEAVTSVAQKILGVETMSILVVGLLLNLAFARFTRFKYIFLTGHHS | 127 |
| | | +I+ GV+P NEA+ +AQ G ++++G L++LA ARFT +Y+FLTGHH | |
| Sbjct: | 72 | MIQGTTGTHGVIPTNEAIVGIAQSEFGARVAWLMILGFLVSLALARFTPLRYVFLTGHHM | 131 |
| Query: | 128 | FFMACLLSAVLGAVGFKGSLLIIL-DGFLLGAWSAISPAIGQQYTLKVTDGDEIAMGHFG | 186 |
| | | FMA LL+ V+ G +GS+ ++L G L+G PA +T KVT D +A+GHFG | |
| Sbjct: | 132 | LFMATLLTIVMATAG-QGSVAVVLGGGVLVGILLVALPAFAHPWTKKVTGNDTLAIGHFG | 190 |
| Query: | 187 | SLGYYLSAWVGSKVGKDSKDTEDLQISEKWSFLRNTTISTGLIMVIFYLVAT---VASVL | 243 |
| | | + GY +S G VGK+S+ TE++++ E FLR++ ++T L MV+ YLV + +A V | |
| Sbjct: | 191 | TAGYIVSGATGQLVGKNSRSTEEMKLPEGLRFLRDSMVATALSMVLIYLVMSLLFLAKVG | 250 |
| Query: | 244 | RNASVAEELAAGQNP-------FIFAIKSGLTFAVGVAIVYAGVRMILADLIPAFQGIAN | 296 |
| | | ++A+ +G +P + ++ GL F +GVA++ GVR IL +L+PAFQGIA | |
| Sbjct: | 251 | QDAAFKAFAGSGGDPAADVGNYLMQSVMQGLQFGIGVAVILFGVRTILGELVPAFQGIAG | 310 |
| Query: | 297 | KLIPNAIPAVDCAVFFPYAPTAVIIGFASSFVGGLLGMLIL-----GVAGGVLIIPGMVP | 351 |
| | | +++P A PA+D + FPYA AV+IGF SF+GGL G+ L G L++PG+VP | |
| Sbjct: | 311 | RVVPGAKPALDAPIVFPYAQNAVLIGFIFSFLGGLTGLAALIWVFNPAFGLALVLPGLVP | 370 |
| Query: | 352 | HFFCGATAEIFGNSTGGRRGAMIGASL | 378 |
| | | HFF G A ++GN+TGGRRGA +G+ L | |
| Sbjct: | 371 | HFFTGGAAGVYGNATGGRRGAAVGSFL | 397 |

[1198] An alignment of the GAS and GBS proteins is shown below:

| Identities = 174/376 (46%), Positives = 258/376 (68%), Gaps = 2/376 (0%) | | | |
|---|---|---|---|
| Query: | 1 | MKGLLDFLVNIASTPAILVALIAIIGLVLQKKGVPDIVKGGIKTFVGFLVVSGGTGIVQN | 60 |
| | | M+ LL F+ +I PA L+ LIA GLV K ++ G + +G+L++ G G++ | |
| Sbjct: | 1 | MEALLSFIRDILKEPAFLMGLIAFAGLVALKTPAHKVLTGTLGPILGYLMLVAGAGVIVT | 60 |
| Query: | 61 | SLNPFGKMFEHAFHLVGVVPNNEAIVAVALTKYGSATALIMLAGMIFNILIARFTKFKYI | 120 |
| | | +L+P K+ EH F + GVVPNNEA+ +VA G T I++ G++ N+ ARFT+FKYI | |
| Sbjct: | 61 | NLDPLAKLIEHGFSITGVVPNNEAVTSVAQKILGVETMSILVVGLLLNLAFARFTRFKYI | 120 |
| Query: | 121 | FLTGHHTLYMACMIAVIFAVAGFTSFSLILFGGLALGIIMSVSPAFVQKYMIQLTGNDKV | 180 |
| | | FLTGHH+ +MAC+++ + GF LI+ G LG ++SPA Q+Y +++T D++ | |
| Sbjct: | 121 | FLTGHHSFFMACLLSAVLGAVGFKGSLLIILDGFLLGAWSAISPAIGQQYTLKVTDGDEI | 180 |
| Query: | 181 | ALGHFGSLGYWLSGFIGGIVGDKSKSTEDIKFPKSLSFLRDSTVSITISMAIIYLI--VA | 238 |
| | | A+GHFGSLGY+LS ++G VG SK TED++ + SFLR++T+S + M I YL+ VA | |
| Sbjct: | 181 | AMGHFGSLGYYLSAWVGSKVGKDSKDTEDLQISEKWSFLRNTTISTGLIMVIFYLVATVA | 240 |
| Query: | 239 | VFAGEAYIAKEISNGVNGLVYALQLAGQFAAGVFVILAGVRLILGEIVPAFKGISEKLVP | 298 |
| | | A +A+E++ G N ++A++ FA GV ++ AGVR+IL +++PAF+GI+ KL+P | |
| Sbjct: | 241 | SVLRNASVAEELAAGQNPFIFAIKSGLTFAVGVAIVYAGVRMILADLIPAFQGIANKLIP | 300 |
| Query: | 299 | NSKPALDCPIVYPYAPNAVLIGFISSFVGGLVSMIVMIVTGTTVILPGVVPHFFCGATAG | 358 |
| | | N+ PA+DC + +PYAP AV+IGF SSFVGGL+ M+++ V G +I+PG+VPHFFCGATA | |
| Sbjct: | 301 | NAIPAVDCAVFFPYAPTAVIIGFASSFVGGLLGMLILGVAGGVLIIPGMVPHFFCGATAE | 360 |
| Query: | 359 | VIGNASGGVRGATIGA | 374 |
| | | + GN++GG RGA IGA | |
| Sbjct: | 361 | IFGNSTGGRRGAMIGA | 376 |

[1199] Based on this analysis, it was predicted that these proteins and their epitopes could be useful antigens for vaccines or diagnostics.

### EXAMPLE 155

[1200] A DNA sequence (GBSx0161) was identified in S. agalactiae <SEQ ID 517> which encodes the amino acid sequence <SEQ ID 518>. This protein is predicted to be transketolase, N-terminal subunit (tkt). Analysis of this protein sequence reveals the following:

```
Possible site: 45
>>> Seems to have no N-terminal signal sequence
----- Final Results -----
                            bacterial cytoplasm --- Certainty = 0.3680(Affirmative) < succ>
                              bacterial membrane --- Certainty = 0.0000(Not Clear) < succ>
                                bacterial outside --- Certainty = 0.0000(Not Clear) < succ>
```

[1201] The protein has homology with the following sequences in the GENPEPT database:

| >GP: AAB98676 GB: U67515 transketolase' [Methanococcus jannaschii] | | | |
|---|---|---|---|
| Identities = 106/269 (39%), Positives = 158/269 (58%), Gaps = 4/269 (1%) | | | |
| Query: | 11 | LRRFATEIRLNTLETLNHLGFGHYGGSLSIVEALAVLYGDIMDINPEKFKESDRDYMVLS | 70 |
| | | L + A ++R N ++ + GH GGSLS + + LY +M+ +P+ + DRD VLS | |
| Sbjct: | 10 | LEKIAKKVRYNIVKMVGLAKSGHPGGSLSATDIIVALYFKLMNYSPDNPYKKDRDRFVLS | 69 |
| Query: | 71 | KGHAGPALYSTLYLKGFFDKTFLHSLNTNGTKLPSHPDRNLTPGIDVTTGSLGQGISIAT | 130 |
| | | KGHA PALY+ L G ++ L L KL HP + TPG+++ TGSLGQG S A | |
| Sbjct: | 70 | KGHAAPALYAVLSELGIIEEEELWKLRRLEGKLQGHPSMD-TPGVEICTGSLGQGFSAAV | 128 |
| Query: | 131 | GIAYAQKIENSSYYTYTIVGDGELNEGQCWEAIQFAAHHQLHHLIVFVDDNKKQLDGLTA | 190 |
| | | G+A +++ + Y Y ++GDGE EG WEA AAH++L +LI F+D NK Q+DG T | |
| Sbjct: | 129 | GMALGCRLDKLNNYVYVLLGDGECQEGIVWEAAMAAAHYKLDNLIAFIDRNKLQIDGCTE | 188 |
| Query: | 191 | DICNPGDFVAKFEAFGFDAVRVKGDDIEAIDKAIKTFQDSNSVRPKCIVLDSIKGQGVKE | 250 |
| | | D+ + GD AKFEAFG+D + G + E I ++ + + +PK I+ ++KG+GV | |
| Sbjct: | 189 | DVMSLGDIKAKFEAFGWDVFEIDGHNFEEIINTVEKAKSMKNGKPKMIIAYTVKGKGVSF | 248 |
| Query: | 251 | LEELASNHHLRPDLQQKTMLERALISLRE | 279 |
| | | +E + H P+ +Q L++AL L E | |
| Sbjct: | 249 | MENNVAFHGKAPNEEQ---LKQALEELSE | 274 |

[1202] A related DNA sequence was identified in S. pyogenes <SEQ ID 519> which encodes the amino acid sequence <SEQ ID 520>. Analysis of this protein sequence reveals the following:

| Possible site: 26 | | | | |
|---|---|---|---|---|
| >>> Seems to have an uncleavable N-term signal seq | | | | |
| | INTEGRAL | Likelihood = −0.75 | Transmembrane | 58-74 (57-74) |

```
----- Final Results -----
                              bacterial membrane --- Certainty = 0.1298(Affirmative) < succ>
                                bacterial outside --- Certainty = 0.0000(Not Clear) < succ>
                            bacterial cytoplasm --- Certainty = 0.0000(Not Clear) < succ>
```

[1203] A related sequence was also identified in GAS <SEQ ID 9165> which encodes the amino acid sequence <SEQ ID 9166>. Analysis of this protein sequence reveals the following:

| Possible site: 54 | | | | |
|---|---|---|---|---|
| >>> Seems to have an uncleavable N-term signal seq | | | | |
| | INTEGRAL | Likelihood = −0.75 | Transmembrane | 40-56 (39-56) |

```
----- Final Results -----
                              bacterial membrane --- Certainty = 0.130(Affirmative) < succ>
                                bacterial outside --- Certainty = 0.0000(Not Clear) < succ>
                            bacterial cytoplasm --- Certainty = 0.0000(Not Clear) < succ>
```

[1204] An alignment of the GAS and GBS proteins is shown below:

| Identities = 82/246 (33%), Positives = 129/246 (52%), Gaps = 15/246 (6%) | | | |
|---|---|---|---|
| Query: | 18 | IRLNTLETLNHLGFGHYGGSLSIVEALAVLYGDIMDINPEKFKE-SDRDYMVLSKGHAGP | 76 |
| | | +R +++ + GH G + VL+ M+INP+ + S+RD +LS GH | |
| Sbjct: | 82 | VRTLSMDAIQAANSGHPGLPMGAAPMAYVLWNHFMNINPKTSRNWSNRDRFILSAGHGSA | 141 |
| Query: | 77 | ALYSTLYLKGF-FDKTFLHSLNTNGTKLPSHPDRNLTPGIDVTTGSLGQGISIATGIAYA | 135 |
| | | LYS L+L G+ L + G+K P HP+ N T G++ TTG LGQGI+ A G+A A | |
| Sbjct: | 142 | MLYSLLHLAGYDLSVEDLKNFRQWGSKTPGHPEVNHTDGVEATTGPLGQGIANAVGMAMA | 201 |
| Query: | 136 | QK----------IENSSYYTYTIVGDGELNEGQCWEAIQFAAHHQLHHLIVFVDDNKKQL | 185 |
| | | + + +YT+ + GDG+L EG EA A H +L L++ D N L | |
| Sbjct: | 202 | EAHLAAKFNKPGFDIVDHYTFALNGDGDLMEGVSQEAASMAGHLKLGKLVLLYDSNDISL | 261 |
| Query: | 186 | DGLTADICNPGDFVAKFEAFGFDAVRVK-GDDIEAIDKAIKTFQDSNSVRPKCIVLDSIK | 244 |
| | | DG T+ + D +FEA+G+ + VK G+D+E I AI+ + + + +P I + +I | |
| Sbjct: | 262 | DGPTS-MAFTEDVKGRFEAYGWQHILVKDGNDLEEIAAAIEAAK-AETEKPTIIEVKTII | 319 |
| Query: | 245 | GQGVKE | 250 |
| | | G G ++ | |
| Sbjct: | 320 | GFGAEK | 325 |

[1205] Based on this analysis, it was predicted that these proteins and their epitopes could be useful antigens for vaccines or diagnostics.

### EXAMPLE 156

[1206] A DNA sequence (GBSx0162) was identified in S. agalactiae <SEQ ID 521> which encodes the amino acid sequence <SEQ ID 522>. Analysis of this protein sequence reveals the following:

| Possible site: 43 | | | |
|---|---|---|---|
| >>> Seems to have no N-terminal signal sequence | | | |
| INTEGRAL | Likelihood = −0.27 | Transmembrane | 53-69 (53-69) |

----- Final Results -----
bacterial membrane --- Certainty = 0.1107 (Affirmative) < succ>
bacterial outside --- Certainty = 0.0000 (Not Clear) < succ>
bacterial cytoplasm --- Certainty = 0.0000 (Not Clear) < succ>

[1207] A related GBS nucleic acid sequence <SEQ ID 9499> which encodes amino acid sequence <SEQ ID 9500> was also identified.

[1208] The protein has homology with the following sequences in the GENPEPT database:

| >GP: AAB98674 GB: U67515 transketolase‘’ [Methanococcus jannaschii] | | | |
|---|---|---|---|
| Identities = 100/301 (33%), Positives = 171/301 (56%), Gaps = 7/301 (2%) | | | |
| Query: | 6 | KEMRLVYRDFLLQANQENKQITVLEADLSSSMSTNALASEFGKRYINLGIMEAEMVGLAA | 65 |
| | | K MR Y + L++ ++ + + VL+ADLS S T A EF +R+ N G+ E M+G+AA | |
| Sbjct: | 9 | KGMRKGYGETLIELGKKYENLVVLDADLSGSTQTAMFAKEFPERFFNAGVAEQNMIGMAA | 68 |
| Query: | 66 | GLAIKGYKPYLHTFGPFASRRVFDQVFLSLGYSQLSATIIGSDAGISAEMNGGTHMPFEE | 125 |
| | | GLA G + +F FAS R ++ + + Y +L+ I+ + AGI+ +G +H E+ | |
| Sbjct: | 69 | GLATTGKIVFASSFSMFASGRAWEIIRNLVAYPKLNVKIVATHAGITVGEDGASHQMCED | 128 |
| Query: | 126 | LGLLRLIPKATIFEVSDDIQFEAILKQTLSIDGLKYIRTIRKAPTAVYEGRE----DFSK | 181 |
| | | + ++R IP + +D + +++ G Y+R R+ +YE E + K | |
| Sbjct: | 129 | IAIMRAIPNMVVIAPTDYYHTKNVIRTIAEYKGPVYVRMPRRDTEIIYENEEEATFEIGK | 188 |
| Query: | 182 | GFIQLRQGKDITLVASGIMVSRAIEAADYLKELGIEASVIDLFKIKPLPEELKPLLIDQS | 241 |
| | | G I L G+D+T++A+G V A+ A + LKE GI A ++++ IKP+ EE+ D | |
| Sbjct: | 189 | GKI-LVDGEDLTIIATGEEVPEALRAGEILKENGISAEIVEMATIKPIDEEIIKKSKD-F | 246 |
| Query: | 242 | IVTIENHNRIGGIGSALCEWL-SMEKDTTVSRMGIDERFGQVGQMEYLLEEYGLAVKDIVQ | 301 |
| | | +VT+E+H+ IGG+G A+ E + S + + R+GI++ FG+ G+ + LL+ YGL + I + | |
| Sbjct: | 247 | VVTVEDHSIIGGLGGAVAEVIASNGLNKKLLRIGINDVFGRSGKADELLKYYGLDGESIAK | 307 |

[1209] There is also homology to SEQ ID 520.

[1210] Based on this analysis, it was predicted that these proteins and their epitopes could be useful antigens for vaccines or diagnostics.

### EXAMPLE 157

[1211] A DNA sequence (GBSx0163) was identified in S. agalactiae <SEQ ID 523> which encodes the amino acid sequence <SEQ ID 524>. Analysis of this protein sequence reveals the following:

Possible site: 24
>>> Seems to have no N-terminal signal sequence
----- Final Results -----
bacterial cytoplasm --- Certainty = 0.2517 (Affirmative) < succ>
bacterial membrane --- Certainty = 0.0000 (Not Clear) < succ>
bacterial outside --- Certainty = 0.0000 (Not Clear) < succ>

[1212] The protein has no significant homology with any sequences in the GENPEPT database.

[1213] No corresponding DNA sequence was identified in S. pyogenes.

[1214] Based on this analysis, it was predicted that this protein and its epitopes, could be useful antigens for vaccines or diagnostics.

### EXAMPLE 158

[1215] A DNA sequence (GBSx0164) was identified in S. agalactiae <SEQ ID 525> which encodes the amino acid sequence <SEQ ID 526>. Analysis of this protein sequence reveals the following:

| Possible site: 35 | | | |
|---|---|---|---|
| >>> Seems to have no N-terminal signal sequence | | | |
| INTEGRAL | Likelihood = −6.42 | Transmembrane | 119-135 (114-145) |
| INTEGRAL | Likelihood = −5.10 | Transmembrane | 33-49 (32-50) |
| INTEGRAL | Likelihood = −4.30 | Transmembrane | 94-110 (94-111) |
| INTEGRAL | Likelihood = −3.66 | Transmembrane | 67-83 (60-83) |

----- Final Results -----
bacterial membrane --- Certainty = 0.3569 (Affirmative) < succ>
bacterial outside --- Certainty = 0.0000 (Not Clear) < succ>
bacterial cytoplasm --- Certainty = 0.0000 (Not Clear) < succ>

[1216] No corresponding DNA sequence was identified in S. pyogenes.

[1217] A related GBS gene <SEQ ID 8503> and protein <SEQ ID 8504> were also identified. Analysis of this protein sequence reveals the following:

| Lipop: Possible site: −1 Crend: 4 | | | |
|---|---|---|---|
| SRCFLG: 0 | | | |
| McG: Length of UR: 22 | | | |
| Peak Value of UR: 2.96 | | | |
| Net Charge of CR: 2 | | | |
| McG: Discrim Score: 10.55 | | | |
| GvH: Signal Score (−7.5): −4.31 | | | |
| Possible site: 22 | | | |
| >>> Seems to have an uncleavable N-term signal seq | | | |
| Amino Acid Composition: calculated from 1 | | | |
| ALOM program | count: 6 | value: −6.42 | threshold: 0.0 |

| | | | |
|---|---|---|---|
| INTEGRAL | Likelihood = −6.42 | Transmembrane | 154-170 (149-180) |
| INTEGRAL | Likelihood = −5.10 | Transmembrane | 68-84 (67-85) |
| INTEGRAL | Likelihood = −5.04 | Transmembrane | 6-22 (2-24) |
| INTEGRAL | Likelihood = −4.30 | Transmembrane | 129-145 (129-146) |
| INTEGRAL | Likelihood = −3.66 | Transmembrane | 102-118 (95-118) |
| INTEGRAL | Likelihood = −3.56 | Transmembrane | 29-45 (29-46) |

| | | |
|---|---|---|
| PERIPHERAL | Likelihood = 0.79 | 285 |

modified ALOM score: 1.78
icm1 HYPID: 7 CFP: 0.357
*** Reasoning Step: 3
----- Final Results -----
bacterial membrane --- Certainty = 0.3569 (Affirmative) < succ>
bacterial outside --- Certainty = 0.0000 (Not Clear) < succ>
bacterial cytoplasm --- Certainty = 0.0000 (Not Clear) < succ>

[1218] The protein has homology with the following sequences in the databases:

[chemical structure]

[1219] Based on this analysis, it was predicted that these proteins and their epitopes could be useful antigens for vaccines or diagnostics.

### EXAMPLE 159

[1220] A DNA sequence (GBSx0165) was identified in S. agalactiae <SEQ ID 527> which encodes the amino acid sequence <SEQ ID 528>. This protein is predicted to be 30S ribosomal protein S15 (rpsO). Analysis of this protein sequence reveals the following:

```
Possible site: 24
>>> Seems to have no N-terminal signal sequence
----- Final Results -----
                            bacterial cytoplasm --- Certainty = 0.4074(Affirmative) < succ>
                              bacterial membrane --- Certainty = 0.0000(Not Clear) < succ>
                                bacterial outside --- Certainty = 0.0000(Not Clear) < succ>
```

[1221] The protein has homology with the following sequences in the GENPEPT database:

| >GP: CAB13541 GB: Z99112 ribosomal protein S15 (BS18) [Bacillus subtilis] | | | |
|---|---|---|---|
| Identities = 55/89 (61%), Positives = 71/89 (78%) | | | |
| Query: | 1 | MAISKEKKNEIIAQYARHEGDTGSVEVQVAVLTWEINHLNDHIKQHKKDHATYRGLMKKI | 60 |
| | | MAI++E+KN++I ++ HE DTGS EVQ+A+LT IN+LN+H++ HKKDH + RGL+K + | |
| Sbjct: | 1 | MAITQERKNQLINEFKTHESDTGSPEVQIAILTDSINNLNEHLRTHKKDHHSRRGLLKMV | 60 |
| Query: | 61 | GHRRNLLAYLRRTDVNRYRELIQSLGLRR | 89 |
| | | G RRNLL YLR DV RYRELI LGLRR | |
| Sbjct: | 61 | GKRRNLLTYLRNKDVTRYRELINKLGLRR | 89 |

[1222] A related DNA sequence was identified in S. pyogenes <SEQ ID 529> which encodes the amino acid sequence <SEQ ID 530>. Analysis of this protein sequence reveals the following:

```
Possible site: 41
>>> Seems to have no N-terminal signal sequence
----- Final Results -----
                            bacterial cytoplasm --- Certainty = 0.3746(Affirmative) < succ>
                              bacterial membrane --- Certainty = 0.0000(Not Clear) < succ>
                                bacterial outside --- Certainty = 0.0000(Not Clear) < succ>
```

[1223] An alignment of the GAS and GBS proteins is shown below:

| Identities = 88/89 (98%), Positives = 88/89 (98%) | | | |
|---|---|---|---|
| Query: | 1 | MAISKEKKNEIIAQYARHEGDTGSVEVQVAVLTWEINHLNDHIKQHKKDHATYRGLMKKI | 60 |
| | | MAISKEKKNEIIAQYARHEGDTGSVEVQVAVLTWEINHLN HIKQHKKDHATYRGLMKKI | |
| Sbjct: | 1 | MAISKEKKNEIIAQYARHEGDTGSVEVQVAVLTWEINHLNSHIKQHKKDHATYRGLMKKI | 60 |
| Query: | 61 | GHRRNLLAYLRRTDVNRYRELIQSLGLRR | 89 |
| | | GHRRNLLAYLRRTDVNRYRELIQSLGLRR | |
| Sbjct: | 61 | GHRRNLLAYLRRTDVNRYRELIQSLGLRR | 89 |

[1224] Based on this analysis, it was predicted that these proteins and their epitopes could be useful antigens for vaccines or diagnostics.

### EXAMPLE 160

[1225] A DNA sequence (GBSx0166) was identified in S. agalactiae <SEQ ID 531> which encodes the amino acid sequence <SEQ ID 532>. This protein is predicted to be polyribonucleotide nucleotidyltransferase (pnp). Analysis of this protein sequence reveals the following:

| Possible site: 46 | | | | |
|---|---|---|---|---|
| >>> Seems to have no N-terminal signal sequence | | | | |
| | INTEGRAL | Likelihood = −0.64 | Transmembrane | 448-464 (448-464) |

```
----- Final Results -----
                              bacterial membrane --- Certainty = 0.1256(Affirmative) < succ>
                                bacterial outside --- Certainty = 0.0000(Not Clear) < succ>
                            bacterial cytoplasm --- Certainty = 0.0000(Not Clear) < succ>
```

[1226] A related GBS nucleic acid sequence <SEQ ID 9501> which encodes amino acid sequence <SEQ ID 9502> was also identified.

[1227] The protein has homology with the following sequences in the GENPEPT database:

| >GP: AAC43595 GB: U29668 polynucleotide phosphorylase [Bacillus subtilis] | | | |
|---|---|---|---|
| Identities = 428/694 (61%), Positives = 532/694 (75%), Gaps = 4/694 (0%) | | | |
| Query: | 7 | KQVFEMIFAGKKLVVETGQVAKQANGSVVVRYGDSTVLTAAVMSKKMSTGDFFPLQVNYE | 66 |
| | | K VF + +AG+ L VETGQ+AKQANG+V++RYGD+ VL+ A SK+ DFFPL VNYE | |
| Sbjct: | 5 | KHVFTIDWAGRTLTVETGQLAKQANGAVMIRYGDTAVLSTATASKEPKPLDFFPLTVNYE | 64 |
| Query: | 67 | EKMYAAGKFPGGFNKREGRPSTDATLTARLIDRPIRPMFAEGFRNEVQVINTVLSFDENA | 126 |
| | | E++YA GK PGGF KREGRPS A L +RLIDRPIRP+FA+GFRNEVQVI+ V+S D+N | |
| Sbjct: | 65 | ERLYAVGKIPGGFIKREGRPSEKAVLASRLIDRPIRPLFADGFRNEVQVISIVMSVDQNC | 124 |
| Query: | 127 | SAPMAAMFGSSLALSISDIPFNGPIAGVQVAYVDGNFIINPTAQEQEASALELTVAGTKE | 186 |
| | | S+ MAAMFGSSLALS+SDIPF GPIAGV V +D FIINPT + E S + L VAGTK+ | |
| Sbjct: | 125 | SSEMAAMFGSSLALSVSDIPFEGPIAGVTVGRIDDQFIINPTVDQLEKSDINLVVAGTKD | 184 |
| Query: | 187 | AINMVESGAKELSEEIMLEALLKGHEAVCELIAFQEEIVTAIGKEKAEVELLQVDPELQA | 246 |
| | | AINMVE+GA E+ EEIMLEA++ GHE + LIAFQEEIV A+GKEK+E++L ++D EL | |
| Sbjct: | 185 | AINMVEAGADEVPEEIMLEAIMFGHEEIKRLIAFQEEIVAAVGKEKSEIKLFEIDEELNE | 244 |
| Query: | 247 | EIIATHNIALQAAVQVEEKKAREAATEAVKEVVIGEYEARYAEHEEYDRIMRDVAEILEQ | 306 |
| | | ++ A L A+QV EK ARE A VK V+ ++E EH+E ++ V +IL + | |
| Sbjct: | 245 | KVKALAEEDLLKAIQVHEKHAREDAINEVKNAVVAKFEDE--EHDE--DTIKQVKQILSK | 300 |
| Query: | 307 | MEHAEVRRLITEDKIRPDGRRVDEIRPLDAEIDFLPQVHGSGLFTRGQTQALSVLTLAPM | 366 |
| | | + EVRRLITE+K+RPDGR VD+IRPL +E+ LP+ HGSGLFTRGQTQALSV TL + | |
| Sbjct: | 301 | LVKNEVRRLITEEKVRPDGRGVDQIRPLSSEVGLLPRTHGSGLFTRGQTQALSVCTLGAL | 360 |
| Query: | 367 | GEAQIIDGLTPEYKKRFMHHYNFPQYSVGETGRYGAAGRREIGHGALGERALEQVLPRLE | 426 |
| | | G+ QI+DGL E KRFMHHYNFPQ+SVGETG GRREIGHGALGERALE V+P + | |
| Sbjct: | 361 | GDVQILDGLGVEESKRFMHHYNFPQFSVGETGPMRGPGRREIGHGALGERALEPVIPSEK | 420 |
| Query: | 427 | EFPYAIRLVAEVLESNGSSSQASICAGTLALMAGGVPIKAPVAGIAMGLISDGTNYTVLT | 486 |
| | | +FPY +RLV+EVLESNGS+SQASICA TLA+M GVPIKAPVAGIAMGL+ G +YTVLT | |
| Sbjct: | 421 | DFPYTVRLVSEVLESNGSTSQASICASTLAMMDAGVPIKAPVAGIAMGLVKSGEHYTVLT | 480 |
| Query: | 487 | DIQGLEDHFGDMDFKVAGTREGITALQMDIKIEGITPQILEEALAQAKKARFEILDVLHG | 546 |
| | | DIQG+ED GDMDFKVAGT +G+TALQMDIKIEG++ +ILEEAL QAKK R EIL+ + | |
| Sbjct: | 481 | DIQGMEDALGDMDFKVAGTEKGVTALQMDIKIEGLSREILEEALQQAKKGRMEILNSMLA | 540 |
| Query: | 547 | AIAEPRPQLAPTAPKIDMIKIDVDKIKVVIGKGGETIDKIIAETGVKIDIDEEGNVSIFS | 606 |
| | | ++E R +L+ APKI + I+ DKI+ VIG G+ I+KII ETGVKIDI+++G + I S | |
| Sbjct: | 541 | TLSESRKELSRYAPKILTMTINPDKIRDVIGPSGKQINKIIEETGVKIDIEQDGTIFISS | 600 |
| Query: | 607 | SDQAAIDRTKDIIASLVREAKVGEVYHAKVVRIEKFGAFVNLFDKTDALVHISEIAWTRT | 666 |
| | | +D++ + K II LVRE +VG++Y KV RIEKFGAFV +F D LVHISE+A R | |
| Sbjct: | 601 | TDESGNQKAKKIIEDLVREVEVGQLYLGKVKRIEKFGAFVEIFSGKDGLVHISELALERV | 660 |
| Query: | 667 | ANVADVLEIGEEVDVKVIKIDDKGRVDASMKALL | 700 |
| | | V DV++IG+E+ VKV +ID +GRV+ S KA+L | |
| Sbjct: | 661 | GKVEDVVKIGDEILVKVTEIDKQGRVNLSRKAVL | 694 |

[1228] A related DNA sequence was identified in S. pyogenes <SEQ ID 533> which encodes the amino acid sequence <SEQ ID 534>. Analysis of this protein sequence reveals the following:

| Possible site: 28 | | | | |
|---|---|---|---|---|
| >>> Seems to have no N-terminal signal sequence | | | | |
| | INTEGRAL | Likelihood = −0.64 | Transmembrane | 444-460 (444-460) |

```
----- Final Results -----
                              bacterial membrane --- Certainty = 0.1256(Affirmative) < succ>
                                bacterial outside --- Certainty = 0.0000(Not Clear) < succ>
                            bacterial cytoplasm --- Certainty = 0.0000(Not Clear) < succ>
```

[1229] An alignment of the GAS and GBS proteins is shown below:

| Identities = 631/708 (89%), Positives = 664/708 (93%), Gaps = 2/708 (0%) | | | |
|---|---|---|---|
| Query: | 5 | MSKQVFEMIFAGKKLVVETGQVAKQANGSVVVRYGDSTVLTAAVMSKKMSTGDFFPLQVN | 64 |
| | | MSKQ F FAGK LVVE GQVAKQANG+ VVRYGDSTVLTAAVMSKKM+TGDFFPLQVN | |
| Sbjct: | 1 | MSKQTFTTTFAGKPLVVEVGQVAKQANGATVVRYGDSTVLTAAVMSKKMATGDFFPLQVN | 60 |
| Query: | 65 | YEEKMYAAGKFPGGFNKREGRPSTDATLTARLIDRPIRPMFAEGFRNEVQVINTVLSFDE | 124 |
| | | YEEKNYAAGKFPGGF KREGRPSTDATLTARLIDRPIRPMFAEGFRNEVQVINTVLS+DE | |
| Sbjct: | 61 | YEEKMYAAGKFPGGFMKREGRPSTDATLTARLIDRPIRPMFAEGFRNEVQVINTVLSYDE | 120 |
| Query: | 125 | NASAPMAAMFGSSLALSISDIPFNGPIAGVQVAYVDGNFIINPTAQEQEASALELTVAGT | 184 |
| | | NASAPMAAMFGSSLALSISDIPFNGPIAGVQV Y+DG FIINP ++ EAS LELTVAG+ | |
| Sbjct: | 121 | NASAPMAAMFGSSLALSISDIPFNGPIAGVQVGYIDGEFIINPDKEQMEASLLELTVAGS | 180 |
| Query: | 185 | KEAINMVESGAKELSEEIMLEALLKGHEAVCELIAFQEEIVTAIGKEKAEVELLQVDPEL | 244 |
| | | KEAINMVESGAKELSE+IMLEALLKGH+A+ ELIAFQE+IV +GKEKAEVELLQVD +L | |
| Sbjct: | 181 | KEAINMVESGAKELSEDIMLEALLKGHQAIQELIAFQEQIVAVVGKEKAEVELLQVDVDL | 240 |
| Query: | 245 | QAEIIATHNIALQAAVQVEEKKAREAATEAVKEVVIGEYEARYAEHEEYDRIMRDVAEIL | 304 |
| | | QA+I+A +N LQ AVQVEEKKAREAATEAVKE+V EYE RYAE E IMRDVAEIL | |
| Sbjct: | 241 | QADIVAKYNAQLQKAVQVEEKKAREAATEAVKEMVKAEYEERYAEDENLATIMRDVAEIL | 300 |
| Query: | 305 | EQMEHAEVRRLITEDKIRPDGRRVDEIRPLDAEIDFLPQVHGSGLFTRGQTQALSVLTLA | 364 |
| | | EQMEHAEVRRLITEDKIRPDGR++DEIRPLDA +DFLP+VHGSGLFTRGQTQALSVLTLA | |
| Sbjct: | 301 | EQMEHAEVRRLITEDKIRPDGRKIDEIRPLDAVVDFLPKVHGSGLFTRGQTQALSVLTLA | 360 |
| Query: | 365 | PMGEAQIIDGLTPEYKKRFMHHYNFPQYSVGETGRYGAAGRREIGHGALGERALEQVLPR | 424 |
| | | PMGE QIIDGL PEYKKRF+HHYNFPQYSVGETGRYGAAGRREIGHGALGERALEQVLP | |
| Sbjct: | 361 | PMGETQIIDGLAPEYKKRFLHHYNFPQYSVGETGRYGAAGRREIGHGALGERALEQVLPS | 420 |
| Query: | 425 | LEEFPYAIRLVAEVLESNGSSSQASICAGTLALMAGGVPIKAPVAGIAMGLISDGTNYTV | 484 |
| | | LEEFPYAIRLVAEVLESNGSSSQASICAGTLALMAGGVPIKAPVAGIAMGLISDGTNYTV | |
| Sbjct: | 421 | LEEFPYAIRLVAEVLESNGSSSQASICAGTLALMAGGVPIKAPVAGIAMGLISDGTNYTV | 480 |
| Query: | 485 | LTDIQGLEDHFGDMDFKVAGTREGITALQMDIKIEGITPQILEEALAQAKKARFEILDVL | 544 |
| | | LTDIQGLEDHFGDMDFKVAGTREGITALQMDIKI GITPQILEEALAQAKKARFEILDV+ | |
| Sbjct: | 481 | LTDIQGLEDHFGDMDFKVAGTREGITALQMDIKIAGITPQILEEALAQAKKARFEILDVI | 540 |
| Query: | 545 | HGAIAEPRPQLAPTAPKIDMIKIDVDKIKVVIGKGGETIDKIIAETGVKIDIDEEGNVSI | 604 |
| | | IAEPRP+LAPTAPKID IKIDVDKIKVVIGKGGETIDKIIAETGVKIDID+EGNVSI | |
| Sbjct: | 541 | EATIAEPRPELAPTAPKIDTIKIDVDKIKVVIGKGGETIDKIIAETGVKIDIDDEGNVSI | 600 |
| Query: | 605 | FSSDQAAIDRTKDIIASLVREAKVGEVYHAKVVRIEKFGAFVNLFDKTDALVHISEIAWT | 664 |
| | | +SSDQAAIDRTK+IIA LVREAKVGEVYHAKVVRIEKFGAFVNLFDKTDALVHISEIAWT | |
| Sbjct: | 601 | YSSDQAAIDRTKEIIAGLVREAKVGEVYHAKVVRIEKFGAFVNLFDKTDALVHISEIAWT | 660 |
| Query: | 665 | RTANVADVLEIGEEVDVKVIKIDDKGRVDASMKALLPRPPKADNPKKE | 712 |
| | | RT NV+DVLE+GE+VDVKVIKID+KGRVDASMKAL+PRPPK + KKE | |
| Sbjct: | 661 | RTTNVSDVLEVGEDVDVKVIKIDEKGRVDASMKALIPRPPKPE--KKE | 706 |

[1230] Based on this analysis, it was predicted that these proteins and their epitopes could be useful antigens for vaccines or diagnostics.

### EXAMPLE 161

[1231] A DNA sequence (GBSx0167) was identified in S. agalactiae <SEQ ID 535> which encodes the amino acid sequence <SEQ ID 536>. Analysis of this protein sequence reveals the following:

Possible site: 39
>>> Seems to have no N-terminal signal sequence
----- Final Results -----
bacterial cytoplasm --- Certainty = 0.1293 (Affirmative) < succ>
bacterial membrane --- Certainty = 0.0000 (Not Clear) < succ>
bacterial outside --- Certainty = 0.0000 (Not Clear) < succ>

[1232] The protein has no significant homology with any sequences in the GENPEPT database.

[1233] A related DNA sequence was identified in S. pyogenes <SEQ ID 537> which encodes the amino acid sequence <SEQ ID 538>. Analysis of this protein sequence reveals the following:

| Possible site: 38 | | | |
|---|---|---|---|
| >>> Seems to have no N-terminal signal sequence | | | |
| INTEGRAL | Likelihood = −0.43 | Transmembrane | 83-99 (83-99) |

----- Final Results -----
bacterial membrane --- Certainty = 0.1171 (Affirmative) < succ>
bacterial outside --- Certainty = 0.0000 (Not Clear) < succ>
bacterial cytoplasm --- Certainty = 0.0000 (Not Clear) < succ>

[1234] The protein has no significant homology with any sequences in the GENPEPT database.

[1235] An alignment of the GAS and GBS proteins is shown below:

| Identities = 172/248 (69%), Positives = 211/248 (84%) | | | |
|---|---|---|---|
| Query: | 1 | MTSTNELDIRLRAFINAPDNFLDSIGLVNALHHSTVWASKEPYAIQVDGQEVVPVFTDIT | 60 |
| | | MT +NELDIRLRAFINAPDNFLDS+ LVNA H+ VWA+KEPY I+V+G +V PVFTD | |
| Sbjct: | 1 | MTKSNELDIRLRAFINAPDNFLDSLALVNAFHNFPVWAAKEPYVIEVEGVKVTPVFTDKE | 60 |
| Query: | 61 | DLNHFKEEQESARDMFWESRRSLDVLDEAISHGLAGLVYNLKKEGDFGNSTIFYCEDMVQ | 120 |
| | | D+ FKEEQ+SA+ +W R +L VL+E I+ G AGL++NLKK+GDFGNSTIF DM+Q | |
| Sbjct: | 61 | DMARFKEEQKSAQSQYWLERSALAVLEEVITSGAAGLIFNLKKKGDFGNSTIFKSSDMIQ | 120 |
| Query: | 121 | FMNNYTTILNQLLNEDNIVADIMDKTYLVPAFVHPREEGSFDRLFPTMSTPEGKSYVPVF | 180 |
| | | FMN+YTT+LN L+++DN+ AD M+K YLVPAFV+P++ +DRLFPTMSTPEGKSYVP F | |
| Sbjct: | 121 | FMNHYTTVLNTLMSDDNVAADTMEKVYLVPAFVYPKDNNHYDRLFPTMSTPEGKSYVPAF | 180 |
| Query: | 181 | SNLLSFEKWYNHNDFGGAFRKAQGVILAWTIDDIYKPRNGENEIDDTFGVAINPFDEQQV | 240 |
| | | SNL SF KWYN +DFGG FRKA+GVIL WTIDDIY+PRNGENE+D+TFGVAINPFD+QQ+ | |
| Sbjct: | 181 | SNLQSFAKWYNQDDFGGLFRKAEGVILTWTIDDIYQPRNGENELDETFGVAINPFDDQQI | 240 |
| Query: | 241 | LVDWSDVE | 248 |
| | | LVDWS+++ | |
| Sbjct: | 241 | LVDWSELD | 248 |

[1236] Based on this analysis, it was predicted that these proteins and their epitopes could be useful antigens for vaccines or diagnostics.

### EXAMPLE 162

[1237] A DNA sequence (GBSx0168) was identified in S. agalactiae <SEQ ID 539> which encodes the amino acid sequence <SEQ ID 540>. This protein is predicted to be serine acetyltransferase (cysE). Analysis of this protein sequence reveals the following:

| Possible site: 39 | | | |
|---|---|---|---|
| >>> Seems to have no N-terminal signal sequence | | | |
| INTEGRAL | Likelihood = −2.02 | Transmembrane | 150-166 (147-168) |

----- Final Results -----
bacterial membrane --- Certainty = 0.1808 (Affirmative) < succ>
bacterial outside --- Certainty = 0.0000 (Not Clear) < succ>
bacterial cytoplasm --- Certainty = 0.0000 (Not Clear) < succ>

[1238] A related GBS nucleic acid sequence <SEQ ID 9503> which encodes amino acid sequence <SEQ ID 9504> was also identified.

[1239] The protein has homology with the following sequences in the GENPEPT database:

| >GP: CAB71304 GB: AJ130879 serine acetyltransferase [Clostridium | | | |
|---|---|---|---|
| sticklandii] | | | |
| Identities = 92/169 (54%), Positives = 125/169 (73%) | | | |
| Query: | 9 | KESIAIVKEQDPAARSSLEVILTYPGIKALAAHRLSHFLWNHNFKLLARMHSQFWRFWTQ | 68 |
| | | KE+I + +E+DPAA+ ++ +++ PGI A+ HR++H L+N +AR+ SQ RF T | |
| Sbjct: | 20 | KETIEVAREKDPAAKGAINILVNTPGIHAIMFHRVAHSLYNRKHFFIARLISQISRFLTG | 79 |
| Query: | 69 | IEIHPGATISEGVFIDHGSGLVIGETAIVEKGAMLYHGVTLGGTGKDKGKRHPTIRKGAL | 128 |
| | | IEIHPGA I FIDHG G+VIGETA + ML+H VTLGGTGKDKGKRHPT+ + | |
| Sbjct: | 80 | IEIHPGAQIGRRFFIDHGMGVVIGETAEIGDDVMLFHQVTLGGTGKDKGKRHPTVENNVI | 139 |
| Query: | 129 | ISAHSQIIGPIEVGENAKVGAAAVVLADVPADVTVVGVPAKVVRVHGQK | 177 |
| | | ISA +++GPI +GEN+K+GA AVVL D+P + T VG+PAKVVR++G+K | |
| Sbjct: | 140 | ISAGVKVLGPIVIGENSKIGANAVVLHDIPKNATAVGIPAKVVRLNGEK | 188 |

[1240] A related DNA sequence was identified in S. pyogenes <SEQ ID 541> which encodes the amino acid sequence <SEQ ID 542>. Analysis of this protein sequence reveals the following:

Possible site: 35
>>> Seems to have no N-terminal signal sequence
----- Final Results -----
bacterial cytoplasm --- Certainty = 0.0141 (Affirmative) < succ>
bacterial membrane --- Certainty = 0.0000 (Not Clear) < succ>
bacterial outside --- Certainty = 0.0000 (Not Clear) < succ>

[1241] An alignment of the GAS and GBS proteins is shown below:

| Identities = 162/193 (83%), Positives = 178/193 (91%) | | | |
|---|---|---|---|
| Query: | 5 | MGWWKESIAIVKEQDPAARSSLEVILTYPGIKALAAHRLSHFLWNHNFKLLARMHSQFWR | 64 |
| | | MGWWKESIAIVK DPAAR+SLEVILTYPGIKALAAHRLSHFLW H+FKLLARMHSQFWR | |
| Sbjct: | 1 | MGWWKESIAIVKALDPAARNSLEVILTYPGIKALAAHRLSHFLWRHHFKLLARMHSQFWR | 60 |
| Query: | 65 | FWTQIEIHPGATISEGVFIDHGSGLVIGETAIVEKGAMLYHGVTLGGTGKDKGKRHPTIR | 124 |
| | | FWTQIEIHPGA I+ GVFIDHG+GLVIGETAIVEKG MLYHGVTLGGTGKD GKRHPT+R | |
| Sbjct: | 61 | FWTQIEIHPGAQIAPGVFIDHGAGLVIGETAIVEKGVMLYHGVTLGGTGKDCGKRHPTVR | 120 |
| Query: | 125 | KGALISAHSQIIGPIEVGENAKVGAAAVVLADVPADVTVVGVPAKVVRVHGQKDDLQIRS | 184 |
| | | +GALISAH+Q+IGPI++G NAKVGAAAVVL+DVP DVTVVGVPAK+VRVHGQKD+ QI+S | |
| Sbjct: | 121 | QGALISAHAQVIGPIDIGANAKVGAAAVVLSDVPEDVTVVGVPAKIVRVHGQKDNRQIQS | 180 |
| Query: | 185 | IEHDREESYYSSK | 197 |
| | | ++ RE SY SK | |
| Sbjct: | 181 | LQKQREVSYQLSK | 193 |

[1242] Based on this analysis, it was predicted that these proteins and their epitopes could be useful antigens for vaccines or diagnostics.

### EXAMPLE 163

[1243] A DNA sequence (GBSx0169) was identified in S. agalactiae <SEQ ID 543> which encodes the amino acid sequence <SEQ ID 544>. Analysis of this protein sequence reveals the following:

| Possible site: 29 | | | |
|---|---|---|---|
| >>> May be a lipoprotein | | | |
| INTEGRAL | Likelihood = −5.89 | Transmembrane | 32-48 (29-49) |

----- Final Results -----
bacterial membrane --- Certainty = 0.3357 (Affirmative) < succ>
bacterial outside --- Certainty = 0.0000 (Not Clear) < succ>
bacterial cytoplasm --- Certainty = 0.0000 (Not Clear) < succ>

[1244] The protein has no significant homology with any sequences in the GENPEPT database.

[1245] No corresponding DNA sequence was identified in S. pyogenes.

[1246] Based on this analysis, it was predicted that this protein and its epitopes, could be useful antigens for vaccines or diagnostics.

### EXAMPLE 164

[1247] A DNA sequence (GBSx0170) was identified in S. agalactiae <SEQ ID 545> which encodes the amino acid sequence <SEQ ID 546>. This protein is predicted to be cysteinyl-tRNA synthetase (cysS). Analysis of this protein sequence reveals the following:

Possible site: 46
>>> Seems to have no N-terminal signal sequence
----- Final Results -----
bacterial cytoplasm --- Certainty = 0.2227 (Affirmative) < succ>
bacterial membrane --- Certainty = 0.0000 (Not Clear) < succ>
bacterial outside --- Certainty = 0.0000 (Not Clear) < succ>

[1248] The protein has homology with the following sequences in the GENPEPT database:

| >GP: CAB11870 GB: Z99104 cysteinyl-tRNA synthetase [Bacillus subtilis] | | | |
|---|---|---|---|
| Identities = 246/465 (52%), Positives = 322/465 (68%), Gaps = 23/465 (4%) | | | |
| Query: | 2 | IKIYDTMTRSLQDFIPLNEGKVNMYVCGPTVYNYIHIGNARSVVAFDTIRRYFEYCGYQV | 61 |
| | | I +Y+T+TR + F+PL EGKV MYVCGPTVYNYIHIGNAR + +DT+R Y EY GY V | |
| Sbjct: | 3 | ITLYNTLTRQKETFVPLEEGKVKMYVCGPTVYNYIHIGNARPAIVYDTVRNYLEYKGYDV | 62 |
| Query: | 62 | NYISNFTDVDDKIIKGAAEAGMDTKSFSDKFISAFMEDVAALGVKPATKNPRVIDYMDEI | 121 |
| | | Y+SNFTDVDDK+IK A E G D + S++FI A+ EDV ALG + A +PRV++ MD I | |
| Sbjct: | 63 | QYVSNFTDVDDKLIKAANELGEDVPTISERFIKAYFEDVGALGCRKADLHPRVMENMDAI | 122 |
| Query: | 122 | IDFVKVLVDKEFAYEANGDVYFRVSKSHHYAKLANKTLEDLEIGASGRVDGEGEIKENPL | 181 |
| | | I+FV LV K +AYE+ GDVYF+ Y KL+ +++++L GA RV GE KE+ L | |
| Sbjct: | 123 | IEFVDQLVKKGYAYESEGDVYFKTRAFEGYGKLSQQSIDELRSGARIRV---GEKKEDAL | 179 |
| Query: | 182 | DFALWKSAKSGEVSWESPWGKGRPGWHIECSVMATEILGDTIDIHGGGADLEFPHHTNEI | 241 |
| | | DFALWK+AK GE+SW+SPWGKGRPGWHIECS M + LGD IDIH GG DL FPHH NEI | |
| Sbjct: | 180 | DFALWKAAKEGEISWDSPWGKGRPGWHIECSAMVKKYLGDQIDIHAGGQDLTFPHHENEI | 239 |
| Query: | 242 | AQSEAKTGKTFANYWMHNGFVNVDNEKMSKSLGNFITVHDMLKSVDGQVIRFFLATQQYR | 301 |
| | | AQSEA TGKTFA YW+HNG++N+DNEKMSKSLGNF+ VHD++K D Q++RFF+ + YR | |
| Sbjct: | 240 | AQSEALTGKTFAKYWLHNGYINIDNEKMSKSLGNFVLVHDIIKQHDPQLLRFFMLSVHYR | 299 |
| Query: | 302 | KPVNFTEKAVHDAEVNLKYLKNTF-----------NLPIQENANDEELEQFVKAFQGAMD | 350 |
| | | P+N++E+ + + + LK + NL ++ E++E+ KAF+ MD | |
| Sbjct: | 300 | HPINYSEELLENTKSAFSRLKTAYSNLQHRLNSSTNLTEDDDQWLEKVEEHRKAFEEEMD | 359 |
| Query: | 351 | DDFNTANGITVIFEMAKWIN--------SGHYTSRVKETFAELLEIFGI-VFQEEVLDAD | 401 |
| | | DDFNTAN I+V+F++AK N + H + E F ++ + G + ++E+LD + | |
| Sbjct: | 360 | DDFNTANAISVLFDLAKHANYYLQKDHTADHVITAFIEMFDRIVSVLGFSLGEQELLDQE | 419 |
| Query: | 402 | IESLIEQRQEARANRDFATADRIRDELAKQGIKLLDTKDGVRWTR | 446 |
| | | IE LIE+R EAR NRDFA +D+IRD+L I L DT G RW R | |
| Sbjct: | 420 | IEDLIEKRNEARRNRDFALSDQIRDQLKSMNIILEDTAQGTRWKR | 464 |

[1249] A related DNA sequence was identified in S. pyogenes <SEQ ID 547> which encodes the amino acid sequence <SEQ ID 548>. Analysis of this protein sequence reveals the following:

```
Possible site: 46
>>> Seems to have no N-terminal signal sequence
----- Final Results -----
                            bacterial cytoplasm --- Certainty = 0.1765(Affirmative) < succ>
                              bacterial membrane --- Certainty = 0.0000(Not Clear) < succ>
                                bacterial outside --- Certainty = 0.0000(Not Clear) < succ>
```

[1250] An alignment of the GAS and GBS proteins is shown below:

| Identities = 357/447 (79%), Positives = 401/447 (88%) | | | |
|---|---|---|---|
| Query: | 1 | MIKIYDTMTRSLQDFIPLNEGKVNMYVCGPTVYNYIHIGNARSVVAFDTIRRYFEYCGYQ | 60 |
| | | MIKIYDTMTRSL+ F+PL E VN+YVCGPTVYNYIHIGNARS VAFDTIRRYFEY GYQ | |
| Sbjct: | 1 | MIKIYDTMTRSLRKFVPLTENTVNIYVCGPTVYNYIHIGNARSAVAFDTIRRYFEYTGYQ | 60 |
| Query: | 61 | VNYISNFTDVDDKIIKGAAEAGMDTKSFSDKFISAFMEDVAALGVKPATKNPRVIDYMDE | 120 |
| | | VNYISNFTDVDDKIIK A +AG+ K SD+FI+AF+ED ALGVKPAT+NPRV+DY+ E | |
| Sbjct: | 61 | VNYISNFTDVDDKIIKAATQAGVSPKELSDRFIAAFIEDTKALGVKPATQNPRVMDYIAE | 120 |
| Query: | 121 | IIDFVKVLVDKEFAYEANGDVYFRVSKSHHYAKLANKTLEDLEIGASGRVDGEGEIKENP | 180 |
| | | II FV+ L++K+FAYEA+GDVYFRV KS HYAKLANKTL +LE+GASGR D E +KENP | |
| Sbjct: | 121 | IISFVESLIEKDFAYEADGDVYFRVEKSEHYAKLANKTLSELEVGASGRTDAETALKENP | 180 |
| Query: | 181 | LDFALWKSAKSGEVSWESPWGKGRPGWHIECSVMATEILGDTIDIHGGGADLEFPHHTNE | 240 |
| | | LDFALWKSAK+GEVSW+SPWG GRPGWHIECSVMATEILGDTIDIHGGGADLEFPHHTNE | |
| Sbjct: | 181 | LDFALWKSAKAGEVSWDSPWGFGRPGWHIECSVMATEILGDTIDIHGGGADLEFPHHTNE | 240 |
| Query: | 241 | IAQSEAKTGKTFANYWMHNGFVNVDNEKMSKSLGNFITVHDMLKSVDGQVIRFFLATQQY | 300 |
| | | IAQSEAKTGKTFANYWMHNGFV VDNEKMSKSLGNF+TVHDML++VDGQV+RFFLATQQY | |
| Sbjct: | 241 | IAQSEAKTGKTFANYWMHNGFVTVDNEKMSKSLGNFVTVHDMLQTVDGQVLRFFLATQQY | 300 |
| Query: | 301 | RKPVNFTEKAVHDAEVNLKYLKNTFNLPIQENANDEELEQFVKAFQGAMDDDFNTANGIT | 360 |
| | | RKP+NFTEK +HDAE+NLKYLKNT P+ E A+++EL+QFV AFQ AMDDDFNTANGIT | |
| Sbjct: | 301 | RKPINFTEKTIHDAEINLKYLKNTLQQPLTETADEQELKQFVIAFQDAMDDDFNTANGIT | 360 |
| Query: | 361 | VIFEMAKWINSGHYTSRVKETFAELLEIFGIVFQEEVLDADIESLIEQRQEARANRDFAT | 420 |
| | | V+F+MAKWINSG YT VK F ++L +FGI+F+EEVL+ DIE+LI +RQEARANRDFAT | |
| Sbjct: | 361 | VVFDMAKWINSGSYTEPVKSAFEKMLAVFGIIFEEEVLEVDIEALIAKRQEARANRDFAT | 420 |
| Query: | 421 | ADRIRDELAKQGIKLLDTKDGVRWTRD | 447 |
| | | AD IRD+LA QGIKLLDTKDGVRW RD | |
| Sbjct: | 421 | ADAIRDQLAVQGIKLLDTKDGVRWLRD | 447 |

[1251] Based on this analysis, it was predicted that these proteins and their epitopes could be useful antigens for vaccines or diagnostics.

### EXAMPLE 165

[1252] A DNA sequence (GBSx0171) was identified in S. agalactiae <SEQ ID 549> which encodes the amino acid sequence <SEQ ID 550>. Analysis of this protein sequence reveals the following:

```
Possible site: 53
>>> Seems to have no N-terminal signal sequence
----- Final Results -----
                            bacterial cytoplasm --- Certainty = 0.0259(Affirmative) < succ>
                              bacterial membrane --- Certainty = 0.0000(Not Clear) < succ>
                                bacterial outside --- Certainty = 0.0000(Not Clear) < succ>
```

[1253] A related GBS nucleic acid sequence <SEQ ID 9505> which encodes amino acid sequence <SEQ ID 9506> was also identified.

[1254] The protein has homology with the following sequences in the GENPEPT database:

| >GP: CAB11871 GB: Z99104 similar to hypothetical proteins | | | |
|---|---|---|---|
| [Bacillus subtilis] | | | |
| Identities = 58/122 (47%), Positives = 87/122 (70%) | | | |
| Query: | 3 | DVRLINGIALAFEGDAVYSLYIRRHLIMQGFTKPNQLHRKATQYVSANAQALLINAMLEE | 62 |
| | | D + +NG+ALA+ GDA++ +Y+R HL+ QGFTKPN LH+K+++ VSA +QA ++ + + | |
| Sbjct: | 9 | DSKQLNGLALAYIGDAIFEVYVRHHLLKQGFTKPNDLHKKSSRIVSAKSQAEILFFLQNQ | 68 |
| Query: | 63 | NILTDEEQLIYKRGRNANSHTKAKNADIITYRMSTGFEALMGYLDMTGQIKRLETLIQWC | 122 |
| | | + T+EE+ + KRGRNA S T KN D+ TYR ST FEAL+GYL + + +RL L+ | |
| Sbjct: | 69 | SFFTEEEEAVLKRGRNAKSGTTPKNTDVQTYRYSTAFEALLGYLFLEKKEERLSQLVAEA | 128 |
| Query: | 123 | IE | 124 |
| | | I+ | |
| Sbjct: | 129 | IQ | 130 |

[1255] A related DNA sequence was identified in S. pyogenes <SEQ ID 551> which encodes the amino acid sequence <SEQ ID 552>. Analysis of this protein sequence reveals the following:

Possible site: 56
>>> Seems to have no N-terminal signal sequence
----- Final Results -----
bacterial membrane --- Certainty = 0.0000 (Not Clear) < succ>
bacterial outside --- Certainty = 0.0000 (Not Clear) < succ>
bacterial cytoplasm --- Certainty = 0.0000 (Not Clear) < succ>

[1256] An alignment of the GAS and GBS proteins is shown below:

| Identities = 99/127 (77%), Positives = 111/127 (86%) | | | |
|---|---|---|---|
| Query: | 2 | IDVRLINGIALAFEGDAVYSLYIRRHLIMQGFTKPNQLHRKATQYVSANAQALLINAMLE | 61 |
| | | +DV LINGIALAFEGDAVYS Y+RRHLI QG TKP+QLHR AT+YVSA AQA LI AMLE | |
| Sbjct: | 5 | VDVNLINGIALAFEGDAVYSYYVRRHLIFQGKTKPSQLHRLATRYVSAKAQANLIQAMLE | 64 |
| Query: | 62 | ENILTDEEQLIYKRGRNANSHTKAKNADIITYRMSTGFEALMGYLDMTGQIKRLETLIQW | 121 |
| | | +LT++E+ IYKRGRN NSHTKAKNADIITYRMSTGFEA+MGYLDM GQ +RLE LI+W | |
| Sbjct: | 65 | AQLLTEKEEDIYKRGRNTNSHTKAKNADIITYRMSTGFEAIMGYLDMMGQKERLEELIRW | 124 |
| Query: | 122 | CIETIEK | 128 |
| | | CIE +EK | |
| Sbjct: | 125 | CIEYVEK | 131 |

[1257] Based on this analysis, it was predicted that these proteins and their epitopes could be useful antigens for vaccines or diagnostics.

### EXAMPLE 166

[1258] A DNA sequence (GBSx0172) was identified in S. agalactiae <SEQ ID 553> which encodes the amino acid sequence <SEQ ID 554>. This protein is predicted to be spoU rRNA methylase family protein. Analysis of this protein sequence reveals the following:

Possible site: 30
>>> Seems to have no N-terminal signal sequence
----- Final Results -----
bacterial cytoplasm --- Certainty = 0.1478 (Affirmative) < succ>
bacterial membrane --- Certainty = 0.0000 (Not Clear) < succ>
bacterial outside --- Certainty = 0.0000 (Not Clear) < succ>

[1259] The protein has homology with the following sequences in the GENPEPT database:

| >GP: CAB11872 GB: Z99104 similar to hypothetical proteins [Bacillus subtilis] | | | |
|---|---|---|---|
| Identities = 113/244 (46%), Positives = 163/244 (66%), Gaps = 6/244 (2%) | | | |
| Query: | 11 | ESSDLVYGLHAVTESLRANTG-NKLYLQDDLRGKNVDKVKALATEKKVSISWTPKKTLSD | 69 |
| | | + D V G +AV E+L+++ KL++ ++ +V LA ++ ++I + P+K L | |
| Sbjct: | 3 | QQHDYVIGKNAVIETLKSDRKLYKLWMAENTVKGQAQQVIELAKKQGITIQYVPRKKLDQ | 62 |
| Query: | 70 | MTNGGVHQGFVLKVSEFAYADLSEIMTKAENE-ENPLILILDGLTDPHNLGSILRTADAT | 128 |
| | | M G HQG V +V+ + YA+L ++ AE + E P LILD L DPHNLGSI+RTADA | |
| Sbjct: | 63 | MVTGQ-HQGVVAQVAAYEYAELDDLYKAAEEKNEQPFFLILDELEDPHNLGSIMRTADAV | 121 |
| Query: | 129 | NVTGIIIPKHRSVGVTPVVSKTSTGAVEHVPIARVTNLSQTLDTLKDKEFWIFGTDMNGT | 188 |
| | | GI+IPK R+VG+T V+K STGA+EH+P+ARVTNL++TL+ +K++ W+ GTD + | |
| Sbjct: | 122 | GAHGIVIPKRRAVGLTTTVAKASTGAIEHIPVARVTNLARTLEEMKERGIWVVGTDASAR | 181 |
| Query: | 189 | PSHKWNTKGK--LALVIGNEGKGISHNIKKQVDEMITIPMNGHVQSLNASVAAAILMYEV | 246 |
| | | + N G LALVIG+EGKG+ +K++ D +I +PM G V SLNASVAA +LMYEV | |
| Sbjct: | 182 | EDFR-NMDGNMPLALVIGSEGKGMGRLVKEKCDFLIKLPMAGKVTSLNASVAAGLLMYEV | 240 |
| Query: | 247 | FRNR | 250 |
| | | +R R | |
| Sbjct: | 241 | YRKR | 244 |

[1260] A related DNA sequence was identified in S. pyogenes <SEQ ID 555> which encodes the amino acid sequence <SEQ ID 556>. Analysis of this protein sequence reveals the following:

Possible site: 36
>>> Seems to have no N-terminal signal sequence
----- Final Results -----
bacterial cytoplasm --- Certainty = 0.1037 (Affirmative) < succ>
bacterial membrane --- Certainty = 0.0000 (Not Clear) < succ>
bacterial outside --- Certainty = 0.0000 (Not Clear) < succ>

[1261] An alignment of the GAS and GBS proteins is shown below:

| Identities = 206/248 (83%), Positives = 225/248 (90%), Gaps = 1/248 (0%) | | | |
|---|---|---|---|
| Query: | 3 | MKDKQFKEESSDLVYGLHAVTESLRANTGNKLYLQDDLRGKNVDKVKALATEKKVSISWT | 62 |
| | | M+DK E++D+VYG+HAVTESL+ANTGNKLY+Q+DLRGK VD +K+LAT+KKV+ISWT | |
| Sbjct: | 10 | MEDKD-TIETNDIVYGVHAVTESLQANTGNKLYIQEDLRGKKVDNIKSLATQKKVAISWT | 68 |
| Query: | 63 | PKKTLSDMTNGGVHQGFVLKVSEFAYADLSEIMTKAENEENPLILILDGLTDPHNLGSIL | 122 |
| | | PKKTLS MT+G VHQGFVL+VS FAY D+ EI+ AE E NPLILILDGLTDPHNLGSIL | |
| Sbjct: | 69 | PKKTLSQMTDGAVHQGFVLRVSAFAYTDVDEILEIAEQEANPLILILDGLTDPHNLGSIL | 128 |
| Query: | 123 | RTADATNVTGIIIPKHRSVGVTPVVSKTSTGAVEHVPIARVTNLSQTLDTLKDKEFWIFG | 182 |
| | | RTADATNV G+IIPKHRSVGVTPVVSKTSTGAVEH+PIARVTNLSQTLD LK + FWIFG | |
| Sbjct: | 129 | RTADATNVCGVIIPKHRSVGVTPVVSKTSTGAVEHIPIARVTNLSQTLDKLKARGFWIFG | 188 |
| Query: | 183 | TDMNGTPSHKWNTKGKLALVIGNEGKGISHNIKKQVDEMITIPMNGHVQSLNASVAAAIL | 242 |
| | | TDMNGTPS WNT GKLALVIGNEGKGIS NIKKQVDEMITIPMNGHVQSLNASVAAAIL | |
| Sbjct: | 189 | TDMNGTPSDCWNTNGKLALVIGNEGKGISTNIKKQVDEMITIPMNGHVQSLNASVAAAIL | 248 |
| Query: | 243 | MYEVFRNR | 250 |
| | | MYEVFRNR | |
| Sbjct: | 249 | MYEVFRNR | 256 |

[1262] Based on this analysis, it was predicted that these proteins and their epitopes could be useful antigens for vaccines or diagnostics.

### EXAMPLE 167

[1263] A DNA sequence (GBSx0173) was identified in S. agalactiae <SEQ ID 557> which encodes the amino acid sequence <SEQ ID 558>. Analysis of this protein sequence reveals the following:

Possible site: 18
>>> Seems to have no N-terminal signal sequence
----- Final Results -----
bacterial cytoplasm --- Certainty = 0.2187 (Affirmative) < succ>
bacterial membrane --- Certainty = 0.0000 (Not Clear) < succ>
bacterial outside --- Certainty = 0.0000 (Not Clear) < succ>

[1264] The protein has homology with the following sequences in the GENPEPT database:

| >GP: CAB11873 GB: Z99104 similar to hypothetical proteins | | | |
|---|---|---|---|
| [Bacillus subtilis] | | | |
| Identities = 67/147 (45%), Positives = 94/147 (63%), Gaps = 2/147 (1%) | | | |
| Query: | 6 | ILLVDGYNMIAFWKDTRQLFKSNRLEEAREVLLRKLNHYAHFEHIDIICVFDAQYVPGVR | 65 |
| | | ILLVDGYNMI W + L K+N EEAR+VL++K+ Y + +I VFDA V G+ | |
| Sbjct: | 3 | ILLVDGYNMIGAWPQLKDL-KANSFEEARDVLIQKMAEYQSYTGNRVIVVFDAHLVKGLE | 61 |
| Query: | 66 | QRYDQYKISVIFTEEDETADSYIERAAAELNQSVLNLVSVATSDLNEQWTIFSQGALRVS | 125 |
| | | ++ +++ VIFT+E+ETAD IE+ A LN ++ + VATSD EQW IF QGALR S | |
| Sbjct: | 62 | KKQTNHRVEVIFTKENETADERIEKLAQALN-NIATQIHVATSDYTEQWAIFGQGALRKS | 120 |
| Query: | 126 | ARELEQRVATVKSDLDKMSSQIDLSTP | 152 |
| | | AREL + V T++ +++ +I P | |
| Sbjct: | 121 | ARELLREVETIERRIERRVRKITSEKP | 147 |

[1265] A related DNA sequence was identified in S. pyogenes <SEQ ID 559> which encodes the amino acid sequence <SEQ ID 560>. Analysis of this protein sequence reveals the following:

```
Possible site: 46
>>> Seems to have no N-terminal signal sequence
----- Final Results -----
                            bacterial cytoplasm --- Certainty = 0.2465(Affirmative) < succ>
                              bacterial membrane --- Certainty = 0.0000(Not Clear) < succ>
                                bacterial outside --- Certainty = 0.0000(Not Clear) < succ>
```

[1266] An alignment of the GAS and GBS proteins is shown below:

| Identities = 130/167 (77%), Positives = 149/167 (88%), Gaps = 1/167 (0%) | | | |
|---|---|---|---|
| Query: | 3 | KHSILLVDGYNMIAEWKDTRQLFKSNRLEEAREVLLRKLNHYAHFEHIDIICVFDAQYVP | 62 |
| | | K ILLVDGYNMIAFW+ TRQLFK+N+L++AR LL KLNHYAHFE+I+IICVFDAQYVP | |
| Sbjct: | 2 | KKRILLVDGYNMIAFWQSTRQLFKTNQLDQARNTLLTKLNHYAHFENINIICVFDAQYVP | 61 |
| Query: | 63 | GVRQRYDQYKISVIFTEEDETADSYIERAAAELNQSVLNLVSVATSDLNEQWTIFSQGAL | 122 |
| | | G+RQRYDQY ISV+FTEEDETADSYIER AAELN + +++V VATSDLNEQWTIFSQGAL | |
| Sbjct: | 62 | GLRQRYDQYYISVVFTEEDETADSYIERMAAELN-TAIHMVEVATSDLNEQWTIFSQGAL | 120 |
| Query: | 123 | RVSARELEQRVATVKSDLDKMSSQIDLSTPKLRPWNDEQLGKLKDFL | 169 |
| | | RV+ARELEQRV TVK+DLDKMS IDL TPKLRP++ QL +LKDF+ | |
| Sbjct: | 121 | RVTARELEQRVHTVKADLDKMSRDIDLKTPKLRPFDQGQLIQLKDFM | 167 |

[1267] Based on this analysis, it was predicted that these proteins and their epitopes could be useful antigens for vaccines or diagnostics.

### EXAMPLE 168

[1268] A DNA sequence (GBSx0174) was identified in S. agalactiae <SEQ ID 561> which encodes the amino acid sequence <SEQ ID 562>. Analysis of this protein sequence reveals the following:

```
Possible site: 58
>>> Seems to have no N-terminal signal sequence
----- Final Results -----
                            bacterial cytoplasm --- Certainty = 0.4889(Affirmative) < succ>
                              bacterial membrane --- Certainty = 0.0000(Not Clear) < succ>
                                bacterial outside --- Certainty = 0.0000(Not Clear) < succ>
```

[1269] The protein has homology with the following sequences in the GENPEPT database:

| >GP: CAB12951 GB: Z99109 yits [Bacillus subtilis] | | | |
|---|---|---|---|
| Identities = 100/284 (35%), Positives = 157/284 (55%), Gaps = 6/284 (2%) | | | |
| Query: | 1 | MTFKILTDSTSDLDEKWAQEHNVDIIGLTIELDGKTYETVGDEKITSDFLLERMQEGAKP | 60 |
| | | MT ++ DS +DL + +E + I L +L K +E I +D + E MQ G P | |
| Sbjct: | 1 | MTVHLIADSATDLPRSYFEEKGIGFIPLRVSLGDKEFEDA--VTIHADQIFEAMQNGETP | 58 |
| Query: | 61 | TTSQINVGQFEEVFSTYAENDHALLYLALSSHLSGTYQSATIAREMVLDKYPDAQIEIVD | 120 |
| | | TSQ + + VF YAE LY+A SS LSGTYQ+A + V +++PD + ++D | |
| Sbjct: | 59 | KTSQASPQTIKNVFLQYAETGDPALYIAFSSGLSGTYQTAVMIANEVKEEFPDFDLRVID | 118 |
| Query: | 121 | TMAASCGEGVLAMLATKERQEGKSLEEVKQKIESLLPKLNTYFLVDDLNHLMRSGRLSKG | 180 |
| | | + AS G G+ A G +++E++ +++ +L F VDDL +L R GR+SK | |
| Sbjct: | 119 | SKCASLGYGLAVRHAADLCINGNTIQEIETSVKNFCSQLEHIFTVDDLTYLARGGRISKT | 178 |
| Query: | 181 | AAIIGSVAKIKPLLKLDSEGKLVPFAKTRGRKKGIK---EIVTQATKTLSYSTLIIAYSG | 237 |
| | | +A +G + IKPLL+++ +GKLVP K RG+KK K E++ + S T+ I+Y+ | |
| Sbjct: | 179 | SAFVGGLLNIKPLLQME-DGKLVPLEKIRGQKKLFKRIIELMKERGDDWSNQTVGISYAA | 237 |
| Query: | 238 | EKDSAQVMKEQLLADERIEEVIIRPLGPVISAHVGSGALALFSL | 281 |
| | | K+ A MK + + +E+I+ P+ I +H G G LA+F L | |
| Sbjct: | 238 | NKEKATDMKHLIEEAFKPKEIIMHPISSAIGSHAGPGTLAIFFL | 281 |

[1270] A related DNA sequence was identified in S. pyogenes <SEQ ID 563> which encodes the amino acid sequence <SEQ ID 564>. Analysis of this protein sequence reveals the following:

```
Possible site: 18
>>> Seems to have no N-terminal signal sequence
----- Final Results -----
                            bacterial cytoplasm --- Certainty = 0.3247(Affirmative) < succ>
                              bacterial membrane --- Certainty = 0.0000(Not Clear) < succ>
                                bacterial outside --- Certainty = 0.0000(Not Clear) < succ>
```

[1271] An alignment of the GAS and GBS proteins is shown below:

| Identities = 167/286 (58%), Positives = 227/286 (78%) | | | |
|---|---|---|---|
| Query: | 1 | MTFKILTDSTSDLDEKWAQEHNVDIIGLTIELDGKTYETVGDEKITSDFLLERMQEGAKP | 60 |
| | | MTF I+TDST+DL++ WA++H++ +IGLTI DG+ YETVG +I+SD+LL++M+ G+ P | |
| Sbjct: | 1 | MTFTIMTDSTADLNQTWAEDHDIVLIGLTILCDGEVYETVGPNRISSDYLLKKMKAGSHP | 60 |
| Query: | 61 | TTSQINVGQFEEVFSTYAENDHALLYLALSSHLSGTYQSATIAREMVLDKYPDAQIEIVD | 120 |
| | | TSQINVG+FE+VF +A N+ ALLYLA SS LSGTYQSA +AR++V + YPDA IEIVD | |
| Sbjct: | 61 | QTSQINVGEFEKVFREHARNNKALLYLAFSSVLSGTYQSALMARDLVREDYPDAVIEIVD | 120 |
| Query: | 121 | TMAASCGEGVLAMLATKERQEGKSLEEVKQKIESLLPKLNTYFLVDDLNHLMRSGRLSKG | 180 |
| | | T+AA+ GEG L +LA + R GK+L E K +E+++P+L TYFLVDDL HLMR GRLSKG | |
| Sbjct: | 121 | TLAAAGGEGYLTILAAEARDSGKNLLETKDIVEAVIPRLRTYFLVDDLFHLMRGGRLSKG | 180 |
| Query: | 181 | AAIIGSVAKIKPLLKLDSEGKLVPFAKTRGRKKGIKEIVTQATKTLSYSTLIIAYSGEKD | 240 |
| | | +A +GS+A IKPLL +D EGKLVP AK RGR+K IKE+V Q K ++ ST+I++Y+ ++ | |
| Sbjct: | 181 | SAFLGSLASIKPLLWIDEEGKLVPIAKIRGRQKAIKEMVAQVEKDIADSTVIVSYTSDQG | 240 |
| Query: | 241 | SAQVMKEQLLADERIEEVIIRPLGPVISAHVGSGALALFSLGEENR | 286 |
| | | SA+ ++E+LLA E I +V++ PLGPVISAHVG LA+F +G+ +R | |
| Sbjct: | 241 | SAEKLREELLAHENISDVLMMPLGPVISAHVGPNTLAVFVIGQNSR | 286 |

[1272] Based on this analysis, it was predicted that these proteins and their epitopes could be useful antigens for vaccines or diagnostics.

### EXAMPLE 169

[1273] A DNA sequence (GBSx0175) was identified in S. agalactiae <SEQ ID 565> which encodes the amino acid sequence <SEQ ID 566>. Analysis of this protein sequence reveals the following:

| Possible site: 56 | | | | |
|---|---|---|---|---|
| >>> Seems to have no N-terminal signal sequence | | | | |
| | INTEGRAL | Likelihood = −8.76 | Transmembrane | 43-59 (40-62) |

```
----- Final Results -----
                              bacterial membrane --- Certainty = 0.4503(Affirmative) < succ>
                                bacterial outside --- Certainty = 0.0000(Not Clear) < succ>
                            bacterial cytoplasm --- Certainty = 0.0000(Not Clear) < succ>
```

[1274] The protein has no significant homology with any sequences in the GENPEPT database.

[1275] No corresponding DNA sequence was identified in S. pyogenes.

[1276] Based on this analysis, it was predicted that this protein and its epitopes, could be useful antigens for vaccines or diagnostics.

### EXAMPLE 170

[1277] A DNA sequence (GBSx0176) was identified in S. agalactiae <SEQ ID 567> which encodes the amino acid sequence <SEQ ID 568>. This protein is predicted to be ribosomal protein L13 (rplM). Analysis of this protein sequence reveals the following:

```
Possible site: 55
>>> Seems to have no N-terminal signal sequence
----- Final Results -----
                            bacterial cytoplasm --- Certainty = 0.3426(Affirmative) < succ>
                              bacterial membrane --- Certainty = 0.0000(Not Clear) < succ>
                                bacterial outside --- Certainty = 0.0000(Not Clear) < succ>
```

[1278] A related GBS nucleic acid sequence <SEQ ID 9507> which encodes amino acid sequence <SEQ ID 9508> was also identified.

[1279] The protein has homology with the following sequences in the GENPEPT database:

| >GP: BAB03887 GB: AP001507 ribosomal protein L13 [Bacillus halodurans] | | | |
|---|---|---|---|
| Identities = 89/144 (61%), Positives = 113/144 (77%) | | | |
| Query: | 36 | KTTFMAKPGQVERKWYVVDAADVPLGRLSAVVASVLRGKNKPTFTPHTDTGDFVIVINAE | 95 |
| | | +TT+MAKP +VERKWYVVDA LGRL++ VAS+LRGK+KPT+TPH DTGD VI+INAE | |
| Sbjct: | 2 | RTTYMAKPNEVERKWYVVDAEGQTLGRLASEVASILRGKHKPTYTPHVDTGDHVIIINAE | 61 |
| Query: | 96 | KVKLTGKKASDKIYYTHSMYPGGLKQISAGELRSKNAVRLIEKSVKGMLPHNTLGRAQGM | 155 |
| | | K+ LTG K DKIYY HS +PGGLK+ A ++R+ +++E ++KGMLP NTLGR QGM | |
| Sbjct: | 62 | KIHLTGNKLQDKIYYRHSGHPGGLKETRAADMRANKPEKMLELAIKGMLPKNTLGRKQGM | 121 |
| Query: | 156 | KLKVFVGGEHTHAAQQPEVLDISG | 179 |
| | | KL V+ G EH H AQ+PEV ++ G | |
| Sbjct: | 122 | KLHVYAGSEHKHQAQKPEVYELRG | 145 |

[1280] A related DNA sequence was identified in S. pyogenes <SEQ ID 569> which encodes the amino acid sequence <SEQ ID 570>. Analysis of this protein sequence reveals the following:

```
Possible site: 57
>>> Seems to have no N-terminal signal sequence
----- Final Results -----
                            bacterial cytoplasm --- Certainty = 0.4249(Affirmative) < succ>
                              bacterial membrane --- Certainty = 0.0000(Not Clear) < succ>
                                bacterial outside --- Certainty = 0.0000(Not Clear) < succ>
```

[1281] An alignment of the GAS and GBS proteins is shown below:

| Identities = 167/184 (90%), Positives = 171/184 (92%), Gaps = 4/184 (2%) | | | |
|---|---|---|---|
| Query: | 1 | MFTPFVRPRNLSNTLVDRNIHT--CKQ-KRIRIGEIMNKTTFMAKPGQVERKWYVVDAAD | 57 |
| | | +FTPF RPRNL NT D H CKQ RIRIGEIMNKTTFMAKPGQVERKWYVVDAAD | |
| Sbjct: | 1 | LFTPFERPRNLPNTF-DGTEHPSPCKQILRIRIGEIMNKTTFMAKPGQVERKWYVVDAAD | 59 |
| Query: | 58 | VPLGRLSAVVASVLRGKNKPTFTPHTDTGDFVIVINAEKVKLTGKKASDKIYYTHSMYPG | 117 |
| | | VPLGRLSAVVASVLRGKNKPTFTPHTDTGDFVIVINAEKVKLTGKKA+DK+YYTHSMYPG | |
| Sbjct: | 60 | VPLGRLSAVVASVLRGKNKPTFTPHTDTGDFVIVINAEKVKLTGKKATDKVYYTHSMYPG | 119 |
| Query: | 118 | GLKQISAGELRSKNAVRLIEKSVKGMLPHNTLGRAQGMKLKVFVGGEHTHAAQQPEVLDI | 177 |
| | | GLK I+AGELRSKNAVRLIEKSVKGMLPHNTLGRAQGMKLKVFVGGEHTHAAQQPEVLDI | |
| Sbjct: | 120 | GLKSITAGELRSKNAVRLIEKSVKGMLPHNTLGRAQGMKLKVFVGGEHTHAAQQPEVLDI | 179 |
| Query: | 178 | SGLI | 181 |
| | | SGLI | |
| Sbjct: | 180 | SGLI | 183 |

[1282] Based on this analysis, it was predicted that these proteins and their epitopes could be useful antigens for vaccines or diagnostics.

### EXAMPLE 171

[1283] A DNA sequence (GBSx0177) was identified in S. agalactiae <SEQ ID 571> which encodes the amino acid sequence <SEQ ID 572>. This protein is predicted to be 30S ribosomal protein S9 (rpsI). Analysis of this protein sequence reveals the following:

```
Possible site: 53
>>> Seems to have no N-terminal signal sequence
----- Final Results -----
                            bacterial cytoplasm --- Certainty = 0.1761(Affirmative) < succ>
                              bacterial membrane --- Certainty = 0.0000(Not Clear) < succ>
                                bacterial outside --- Certainty = 0.0000(Not Clear) < succ>
```

[1284] The protein has homology with the following sequences in the GENPEPT database:

| >GP: CAB11926 GB: Z99104 ribosomal protein S9 [Bacillus subtilis] | | | |
|---|---|---|---|
| Identities = 88/130 (67%), Positives = 105/130 (80%) | | | |
| Query: | 1 | MAQAQYAGTGRRKNAVARVRLVPGTGKITINKKDVEEYIPHADLRLVINQPFAVTSTQGS | 60 |
| | | MAQ QY GTGRRK++VARVRLVPG G+I +N +++ E+IP A L I QP +T T G+ | |
| Sbjct: | 1 | MAQVQYYGTGRRKSSVARVRLVPGEGRIVVNNREISEHIPSAALIEDIKQPLTLTETAGT | 60 |
| Query: | 61 | YDVFVNVVGGGYAGQSGAIRHGISRALLEVDPDFRDSLKRAGLLTRDARMVERKKPGLKK | 120 |
| | | YDV VNV GGG +GQ+GAIRHGI+RALLE DP++R +LKRAGLLTRDARM ERKK GLK | |
| Sbjct: | 61 | YDVLVNVHGGGLSGQAGAIRHGIARALLEADPEYRTTLKRAGLLTRDARMKERKKYGLKG | 120 |
| Query: | 121 | ARKASQFSKR | 130 |
| | | AR+A QFSKR | |
| Sbjct: | 121 | ARRAPQFSKR | 130 |

[1285] A related DNA sequence was identified in S. pyogenes <SEQ ID 573> which encodes the amino acid sequence <SEQ ID 574>. Analysis of this protein sequence reveals the following:

```
Possible site: 56
>>> Seems to have no N-terminal signal sequence
----- Final Results -----
                            bacterial cytoplasm --- Certainty = 0.1865(Affirmative) < succ>
                              bacterial membrane --- Certainty = 0.0000(Not Clear) < succ>
                                bacterial outside --- Certainty = 0.0000(Not Clear) < succ>
```

[1286] An alignment of the GAS and GBS proteins is shown below:

| Identities = 124/130 (95%), Positives = 129/130 (98%) | | | |
|---|---|---|---|
| Query: | 1 | MAQAQYAGTGRRKNAVARVRLVPGTGKITINKKDVEEYIPHADLRLVINQPFAVTSTQGS | 60 |
| | | MAQAQYAGTGRRKNAVARVRLVPGTGKIT+NKKDVEEYIPHADLRL+INQPFAVTST+GS | |
| Sbjct: | 1 | MAQAQYAGTGRRKNAVARVRLVPGTGKITVNKKDVEEYIPHADLRLIINQPFAVTSTEGS | 60 |
| Query: | 61 | YDVFVNVVGGGYAGQSGAIRHGISRALLEVDPDFRDSLKRAGLLTRDARMVERKKPGLKK | 120 |
| | | YDVFVNVVGGGY GQSGAIRHGI+RALL+VDPDFRDSLKRAGLLTRDARMVERKKPGLKK | |
| Sbjct: | 61 | YDVFVNVVGGGYGGQSGAIRHGIARALLQVDPDFRDSLKRAGLLTRDARMVERKKPGLKK | 120 |
| Query: | 121 | ARKASQFSKR | 130 |
| | | ARKASQFSKR | |
| Sbjct: | 121 | ARKASQFSKR | 130 |

[1287] Based on this analysis, it was predicted that these proteins and their epitopes could be useful antigens for vaccines or diagnostics.

### EXAMPLE 172

[1288] A DNA sequence (GBSx0078) was identified in S. agalactiae <SEQ ID 575> which encodes the amino acid sequence <SEQ ID 576>. This protein is predicted to be recombinase (b1345). Analysis of this protein sequence reveals the following:

```
Possible site: 43
>>> Seems to have no N-terminal signal sequence
----- Final Results -----
                            bacterial cytoplasm --- Certainty = 0.1939(Affirmative) < succ>
                              bacterial membrane --- Certainty = 0.0000(Not Clear) < succ>
                                bacterial outside --- Certainty = 0.0000(Not Clear) < succ>
```

[1289] The protein has homology with the following sequences in the GENPEPT database:

| >GP: AAG29618 GB: AF217235 integrase-like protein [Staphylococcus | | | |
|---|---|---|---|
| aureus] | | | |
| Identities = 127/386 (32%), Positives = 205/386 (52%), Gaps = 18/386 (4%) | | | |
| Query: | 3 | IHKYPSKKAKNGYLYFVKIYMVKD---SQRADHIKRGFRTRKEAKDYEARLIYLKASGKL | 59 |
| | | I KY K Y++ Y+ D ++ +RGF+T +EAK EA+L + | |
| Sbjct: | 2 | IKKYKKKDGSTAYMFVA--YLGTDPITGKQKRTTRRGFKTEREAKIAEAKL---QTEVSQ | 56 |
| Query: | 60 | EEFIKPTHKTYNEIFEKWYQAYQDMVEPTTASRTLDMFRLHILPVMGDLPISKISPLDCQ | 119 |
| | | F+ T+ E++E W + YQ+ V +T R L +F IL D+PI KI+ CQ | |
| Sbjct: | 57 | NGFLNNDITTFKEVYELWLEQYQNTVRESTYQRVLTLFDTAILEHFQDVPIKKITVPYCQ | 116 |
| Query: | 120 | NFITDKAKTFKNIKQIKSYTGKVFDFAIKMKLLKHNPMAEIIMPKRKKTRIE---NYWTV | 176 |
| | | I K + +IK I+ YT VF +A+ +K++ NP A P++K+ + + Y++ | |
| Sbjct: | 117 | KVINKWNKKYSDIKAIRIYTSNVFKYAVSLKIIVDNPFAHTKAPRKKEAQQDASTKYYSS | 176 |
| Query: | 177 | QELQEFLAIVLQEEPYKHYALFRLLAYSGLRKGELYALKWADIDFQTETLSVDKSLGR-L | 235 |
| | | EL++FL V E+ +YA+FR LA++G R+GEL AL W DIDF +T+S++K+ R | |
| Sbjct: | 177 | DELKQFLTFV--EDDPLYYAIFRTLAFTGFRRGELMALTWNDIDFTKQTISINKTCARGA | 234 |
| Query: | 236 | DGQAIEKGTKNDFSVRKIKLDSETISILQEWKSISQKEKAQLAVAPLSIEQDFLFTYCTR | 295 |
| | | + + + + K S R I +D +T S+L+ W++ + E + S + +FT | |
| Sbjct: | 235 | NYKLVIQEPKTKSSHRTISIDDKTASVLKSWRTHQRVESLKYG-HNTSDKHQHVFTTVRD | 293 |
| Query: | 296 | SGSIEPLHADYINNVLSRIIRKHGLKKISPHGFRHTHATLMIEIGVDPVNTAKRLGHASS | 355 |
| | | + +PL+ ++ N L I K+ K+I HGFRHTH +L+ E G+ RLGH | |
| Sbjct: | 294 | N---KPLYPEHCNKALDLICEKNSFKRIKVHGFRHTHCSLLFEAGLSIQEVQDRLGHGDI | 350 |
| Query: | 356 | QMTLDTYSHSTTTGEDRSVKQFADYL | 381 |
| | | + T+D Y+H T D+ +FA Y+ | |
| Sbjct: | 351 | KTTMDIYAHVTEKQRDQVADKFAKYI | 376 |

[1290] A related DNA sequence was identified in S. pyogenes <SEQ ID 577> which encodes the amino acid sequence <SEQ ID 578>. Analysis of this protein sequence reveals the following:

```
Possible site: 39
>>> Seems to have no N-terminal signal sequence
----- Final Results -----
                            bacterial cytoplasm --- Certainty = 0.3445(Affirmative) < succ>
                              bacterial membrane --- Certainty = 0.0000(Not Clear) < succ>
                                bacterial outside --- Certainty = 0.0000(Not Clear) < succ>
```

[1291] An alignment of the GAS and GBS proteins is shown below:

| Identities = 109/386 (28%), Positives = 185/386 (47%), Gaps = 28/386 (7%) | | | |
|---|---|---|---|
| Query: | 3 | IHKYPSKKAKNGYL-YFVKIYMVKDSQRADHIKRGF--RTRKEA--KDYEARLIYLKASG | 57 |
| | | I K K KNG + Y IY+ D +K RTRKE K A+ +L | |
| Sbjct: | 6 | IMKITEHKKKNGTIVYRASIYLGIDQMTGKRVKTSITGRTRKEVNQKAKHAQFDFLSNGS | 65 |
| Query: | 58 | KLEEFIKPTHKTYNEIFEKWYQAYQDMVEPTTASRTLDMFRLHILPVMGDLPISKISPLD | 117 |
| | | ++ K KT+ E+ W + Y+ V+P T T+ HI+P +G++ + KI+ D | |
| Sbjct: | 66 | TIKR--KVVIKTFKELSHLWLETYKLTVKPQTYDATVTRLNRHIMPTLGNMKVDKITASD | 123 |
| Query: | 118 | CQNFITDKAKTFKNIKQIKSYTGKVFDFAIKMKLLKHNPMAEIIMPKRK---KTRIENYW | 174 |
| | | Q I +K + N ++S KV + + L+ +N +II+P+++ K +++ + | |
| Sbjct: | 124 | IQMLINRLSKYYVNYTAVRSVIRKVLQQGVLLGLIDYNSARDIILPRKQPNAKKKVK-FI | 182 |
| Query: | 175 | TVQELQEFLAIVLQEEPYKHY------ALFRLLAYSGLRKGELYALKWADIDFQTETLSV | 228 |
| | | +L+ FL L+ +K Y L++LL +GLR GE AL+W DID + T+++ | |
| Sbjct: | 183 | DPSDLKSFLE-HLETSQHKRYNLYFDAVLYQLLLSTGLRIGEACALEWGDIDLENGTIAI | 241 |
| Query: | 229 | DKSLGRLDGQAIEKGTKNDFSVRKIKLDSETISILQEWKSISQKEKAQLAVAPLSIEQDF | 288 |
| | | +K+ + K R I +D +T+ L+ + Q + QL + + | |
| Sbjct: | 242 | NKTYNK--NLKFLSTAKTQSGNRVISVDKKTLRSLK----LYQMRQRQLFNEVGARVSEV | 295 |
| Query: | 289 | LFTYCTRSGSIEPLHADYINNVLSRIIRKHGLKKISPHGFRHTHATLMIEIGVDPVNTAK | 348 |
| | | +F TR + +A + L ++ G+++ + H FRHTHA+L++ G+ | |
| Sbjct: | 296 | VFATPTR----KYFNASVRQSALDTRCKEAGIERFTFHAFRHTHASLLLNAGISYKELQY | 351 |
| Query: | 349 | RLGHASSQMTLDTYSHSTTTGEDRSV | 374 |
| | | RLGHA+ MTLDTY H + E +V | |
| Sbjct: | 352 | RLGHANISMTLDTYGHLSKGKEKEAV | 377 |

[1292] Based on this analysis, it was predicted that these proteins and their epitopes could be useful antigens for vaccines or diagnostics.

### EXAMPLE 173

[1293] A DNA sequence (GBSx0179) was identified in S. agalactiae <SEQ ID 579> which encodes the amino acid sequence <SEQ ID 580>. Analysis of this protein sequence reveals the following:

```
Possible site: 61
>>> Seems to have no N-terminal signal sequence
----- Final Results -----
                            bacterial cytoplasm --- Certainty = 0.2477(Affirmative) < succ>
                              bacterial membrane --- Certainty = 0.0000(Not Clear) < succ>
                                bacterial outside --- Certainty = 0.0000(Not Clear) < succ>
```

[1294] The protein has homology with the following sequences in the GENPEPT database:

| >GP: AAF63067 GB: AF158600 putative DNA binding protein | | | |
|---|---|---|---|
| [Streptococcus thermophilus bacteriophage Sfill] | | | |
| Identities = 32/70 (45%), Positives = 46/70 (65%), Gaps = 3/70 (4%) | | | |
| Query: | 3 | NRLKELRKDKGLTQADLAKVINTNQSQYGKYENGKTSLSIENSKILADFFGVSIPYLLGL | 62 |
| | | NRL LR+ + +T+ +LA+ I ++ K E+G + +S +K LADFFGVS+ YLLGL | |
| Sbjct: | 2 | NRLYLLRESRKITRVELAEKIGVSKLTVLKLEHGTSKISRREAKKLADFFGVSVGYLLGL | 61 |
| Query: | 63 | D---NNSKIA | 69 |
| | | D N+S IA | |
| Sbjct: | 62 | DTTENDSLIA | 71 |

[1295] A related DNA sequence was identified in S. pyogenes <SEQ ID 581> which encodes the amino acid sequence <SEQ ID 582>. Analysis of this protein sequence reveals the following:

```
Possible site: 30
>>> Seems to have no N-terminal signal sequence
----- Final Results -----
                            bacterial cytoplasm --- Certainty = 0.0680(Affirmative) < succ>
                              bacterial membrane --- Certainty = 0.0000(Not Clear) < succ>
                                bacterial outside --- Certainty = 0.0000(Not Clear) < succ>
```

[1296] An alignment of the GAS and GBS proteins is shown below:

| Identities = 21/61 (34%), Positives = 34/61 (55%) | | | |
|---|---|---|---|
| Query: | 1 | MYNRLKELRKDKGLTQADLAKVINTNQSQYGKYENGKTSLSIENSKILADFFGVSIPYLL | 60 |
| | | MY R++ LR+D TQ +A +++ + + Y K E G+ +L + + +VSI YLL | |
| Sbjct: | 1 | MYPRIRNLREDNDFTQKFVANLLSFSHANYAKIERGEVALMADVLVQFYKLYNVSIDYLL | 60 |
| Query: | 61 | G | 61 |
| | | G | |
| Sbjct: | 61 | G | 61 |

[1297] Based on this analysis, it was predicted that these proteins and their epitopes could be useful antigens for vaccines or diagnostics.

### EXAMPLE 174

[1298] A DNA sequence (GBSx0180) was identified in S. agalactiae <SEQ ID 583> which encodes the amino acid sequence <SEQ ID 584>. Analysis of this protein sequence reveals the following:

```
Possible site: 29
>>> Seems to have no N-terminal signal sequence
----- Final Results -----
                            bacterial cytoplasm --- Certainty = 0.5278(Affirmative) < succ>
                              bacterial membrane --- Certainty = 0.0000(Not Clear) < succ>
                                bacterial outside --- Certainty = 0.0000(Not Clear) < succ>
```

[1299] The protein has no significant homology with any sequences in the GENPEPT database.

[1300] No corresponding DNA sequence was identified in S. pyogenes.

[1301] Based on this analysis, it was predicted that this protein and its epitopes, could be useful antigens for vaccines or diagnostics.

### EXAMPLE 175

[1302] A DNA sequence (GBSx0181) was identified in S. agalactiae <SEQ ID 585> which encodes the amino acid sequence <SEQ ID 586>. Analysis of this protein sequence reveals the following:

```
Possible site: 60
>>> Seems to have no N-terminal signal sequence
----- Final Results -----
                            bacterial cytoplasm --- Certainty = 0.3762(Affirmative) < succ>
                              bacterial membrane --- Certainty = 0.0000(Not Clear) < succ>
                                bacterial outside --- Certainty = 0.0000(Not Clear) < succ>
```

[1303] The protein has no significant homology with any sequences in the GENPEPT database.

[1304] No corresponding DNA sequence was identified in S. pyogenes.

[1305] Based on this analysis, it was predicted that this protein and its epitopes, could be useful antigens for vaccines or diagnostics.

### EXAMPLE 176

[1306] A DNA sequence (GBSx0182) was identified in S. agalactiae <SEQ ID 587> which encodes the amino acid sequence <SEQ ID 588>. Analysis of this protein sequence reveals the following:

| Possible site: 59 | | | | |
|---|---|---|---|---|
| >>> Seems to have no N-terminal signal sequence | | | | |
| | INTEGRAL | Likelihood = −9.66 | Transmembrane | 40-56 (33-65) |
| | INTEGRAL | Likelihood = −5.79 | Transmembrane | 62-78 (59-81) |

```
----- Final Results -----
                              bacterial membrane --- Certainty = 0.4864(Affirmative) < succ>
                                bacterial outside --- Certainty = 0.0000(Not Clear) < succ>
                            bacterial cytoplasm --- Certainty = 0.0000(Not Clear) < succ>
```

[1307] No corresponding DNA sequence was identified in S. pyogenes.

[1308] A related GBS gene <SEQ ID 8505> and protein <SEQ ID 8506> were also identified. Analysis of this protein sequence reveals the following:

| Lipop: Possible site: −1 Crend: 7 | | | | |
|---|---|---|---|---|
| McG: Discrim Score: −16.96 | | | | |
| GvH: Signal Score (−7.5): −2.95 | | | | |
| Possible site: 57 | | | | |
| >>> Seems to have no N-terminal signal sequence | | | | |
| ALOM program count: 2 value: −9.66 threshold: 0.0 | | | | |
| | INTEGRAL | Likelihood = −9.66 | Transmembrane | 33-49 (26-58) |
| | INTEGRAL | Likelihood = −5.79 | Transmembrane | 55-71 (52-74) |
| | PERIPHERAL | Likelihood = 10.87 | 14 | |

```
modified ALOM score: 2.43
*** Reasoning Step: 3
----- Final Results -----
                              bacterial membrane --- Certainty = 0.4864(Affirmative) < succ>
                                bacterial outside --- Certainty = 0.0000(Not Clear) < succ>
                            bacterial cytoplasm --- Certainty = 0.0000(Not Clear) < succ>
```

[1309] Based on this analysis, it was predicted that these proteins and their epitopes could be useful antigens for vaccines or diagnostics.

### EXAMPLE 177

[1310] A DNA sequence (GBSx0183) was identified in S. agalactiae <SEQ ID 589> which encodes the amino acid sequence <SEQ ID 590>. Analysis of this protein sequence reveals the following:

Possible site: 31
>>> Seems to have no N-terminal signal sequence
----- Final Results -----
bacterial cytoplasm --- Certainty = 0.3276 (Affirmative) < succ>
bacterial membrane --- Certainty = 0.0000 (Not Clear) < succ>
bacterial outside --- Certainty = 0.0000 (Not Clear) < succ>

[1311] The protein has no significant homology with any sequences in the GENPEPT database.

[1312] No corresponding DNA sequence was identified in S. pyogenes.

[1313] Based on this analysis, it was predicted that this protein and its epitopes, could be useful antigens for vaccines or diagnostics.

### EXAMPLE 178

[1314] A DNA sequence (GBSx0184) was identified in S. agalactiae <SEQ ID 591> which encodes the amino acid sequence <SEQ ID 592>. Analysis of this protein sequence reveals the following:

Possible site: 44
>>> Seems to have no N-terminal signal sequence
----- Final Results -----
bacterial cytoplasm --- Certainty = 0.3482 (Affirmative) < succ>
bacterial membrane --- Certainty = 0.0000 (Not Clear) < succ>
bacterial outside --- Certainty = 0.0000 (Not Clear) < succ>

[1315] A related GBS nucleic acid sequence <SEQ ID 9509> which encodes amino acid sequence <SEQ ID 9510> was also identified.

[1316] The protein has homology with the following sequences in the GENPEPT database:

| >GP: CAA30291 GB: X07371 RepM protein (AA 1-314) [Staphylococcus | | | |
|---|---|---|---|
| aureus] | | | |
| Identities = 89/283 (31%), Positives = 145/283 (50%), Gaps = 26/283 (9%) | | | |
| Query: | 67 | KVSLDNITMTAYIKSKKYLAMKQLIETHLAITVQTAMTDMFRATTGDGIHVVLHMNYDKQ | 126 |
| | | K+S D +T+ + + + I + + F+A + +++ YDK | |
| Sbjct: | 42 | KLSFDAMTIVGNLNKNSAKKLSDFMSLDPQIRLWDILQTKFKAKA---LQEKVYIEYDKV | 98 |
| Query: | 127 | KGQDRKARPFRLEFNPNKLRLVDSEII---DTIIPFLEDISISRADLAFDLFEVDCSEF- | 182 |
| | | K R R+EFNPNKL E++ II ++ED +R DLAFD FE D S++ | |
| Sbjct: | 99 | KADTWDRRNMRVEFNPNKL--THDEMLWLKHNIIDYMEDDGFTRLDLAFD-FEDDLSDYY | 155 |
| Query: | 183 | -VLEKKGRPTATKEFRSSTGTLETKYLGAPRSEKQVRLYNKKKEQLQNGTDKDKDFASQF | 241 |
| | | + EK + T F +TG ETKY G+ S + +R+YNKKKE+ +N D D +++ | |
| Sbjct: | 156 | ALSEKALKRTV---FFGTTGKAETKYFGSRDSNRFIRIYNKKKERKENA---DVDVSAE- | 208 |
| Query: | 242 | KHWWRLEFQLRSRSIDEIFEVI-DTIIFKP--FNLKGLSIETQIYLTALIHDKNIWKKLH | 298 |
| | | H WR+E +L+ +D D I KP L+ L + +YL L+H+++ W +LH | |
| Sbjct: | 209 | -HLWRVEIELKRDMVDYWNNCFNDLHILKPAWATLESLKEQAMVYL--LLHEESKWGELH | 265 |
| Query: | 299 | RNTRARYKKILETHQTSDTDYLGLLKDLLKHERPRLENQLAYY | 341 |
| | | RN+R +YK+I++ + S D L+K L L+ Q+ ++ | |
| Sbjct: | 266 | RNSRRKYKQIIQ--EISSIDLTDLMKSTLTDNEENLQKQINFW | 306 |

[1317] No corresponding DNA sequence was identified in S. pyogenes.

[1318] Based on this analysis, it was predicted that these proteins and their epitopes could be useful antigens for vaccines or diagnostics.

### EXAMPLE 179

[1319] A DNA sequence (GBSx0185) was identified in S. agalactiae <SEQ ID 593> which encodes the amino acid sequence <SEQ ID 594>. Analysis of this protein sequence reveals the following:

| Possible site: 32 | | | |
|---|---|---|---|
| >>> Seems to have no N-terminal signal sequence | | | |
| INTEGRAL | Likelihood = −15.55 | Transmembrane | 137-153 (133-157) |

----- Final Results -----
bacterial membrane --- Certainty = 0.7220 (Affirmative) < succ>
bacterial outside --- Certainty = 0.0000 (Not Clear) < succ>
bacterial cytoplasm --- Certainty = 0.0000 (Not Clear) < succ>

[1320] A related GBS nucleic acid sequence <SEQ ID 9511> which encodes amino acid sequence <SEQ ID 9512> was also identified.

[1321] The protein has no significant homology with any sequences in the GENPEPT database.

[1322] No corresponding DNA sequence was identified in S. pyogenes.

[1323] A related GBS gene <SEQ ID 8507> and protein <SEQ ID 8508> were also identified. Analysis of this protein sequence reveals the following:

| Lipop: Possible site: −1 Crend: 2 | | | |
|---|---|---|---|
| McG: Discrim Score: −16.84 | | | |
| GvH: Signal Score (−7.5): −5.3 | | | |
| Possible site: 32 | | | |
| >>> Seems to have no N-terminal signal sequence | | | |
| ALOM program | count: 1 | value: −15.55 | threshold: 0.0 |

| | | | |
|---|---|---|---|
| INTEGRAL | Likelihood = −15.55 | Transmembrane | 137-153 (133-157) |

| | | |
|---|---|---|
| PERIPHERAL | Likelihood = 10.93 | 60 |

modified ALOM score: 3.61
*** Reasoning Step: 3
----- Final Results -----
bacterial membrane --- Certainty = 0.7220 (Affirmative) < succ>
bacterial outside --- Certainty = 0.0000 (Not Clear) < succ>
bacterial cytoplasm --- Certainty = 0.0000 (Not Clear) < succ>

[1324] The protein has homology with the following sequences in the databases:

[chemical structure]

[1325] Based on this analysis, it was predicted that these proteins and their epitopes could be useful antigens for vaccines or diagnostics.

### EXAMPLE 180

[1326] A DNA sequence (GBSx0186) was identified in S. agalactiae <SEQ ID 595> which encodes the amino acid sequence <SEQ ID 596>. Analysis of this protein sequence reveals the following:

Possible site: 18
>>> Seems to have no N-terminal signal sequence
----- Final Results -----
bacterial cytoplasm --- Certainty = 0.3406 (Affirmative) < succ>
bacterial membrane --- Certainty = 0.0000 (Not Clear) < succ>
bacterial outside --- Certainty = 0.0000 (Not Clear) < succ>

[1327] The protein has homology with the following sequences in the GENPEPT database:

| >GP:CAA33713 GB:X15669 pre protein (AA 1-494) | | | |
|---|---|---|---|
| [Streptococcus agalactiae] | | | |
| Identities = 171/402 (42%), Positives = 250/402 (61%), | | | |
| Gaps = 46/402 (11%) | | | |
| Query: | 1 | MSYVVARMAKYKSGQLTAIYNHNERIFKNHSNKEIDVEKSHLNYELTNRDQAQNYHKQIK | 60 |
| | | MSY+VARM K K+G L + HNER+F+ HSNK+I+ +SHLNYELT+RD++ +Y KQIK | |
| Sbjct: | 1 | MSYMVARMQKMKAGNLGGAFKHNERVFETHSNKDINPSRSHLNYELTDRDRSVSYEKQIK | 60 |
| Query: | 61 | EHINENRLSTRGVRKDAILCNEWIITSDKTFFDSLDEKQTREFFETAKDYFAEKYGDANI | 120 |
| | | +++NEN++S R +RKDA+LC+EWIITSDK FF+ LDE+QTR FFETAK+YFAE YG++NI | |
| Sbjct: | 61 | DYVNENKVSNRAIRKDAVLCDEWIITSDKDFFEKLDEEQTRTFFETAKNYFAENYGESNI | 120 |
| Query: | 121 | AYARVHLDESTPHMHLGIVPMKNGKLSSKALFGNKEKLVAIQDELPKYLNEHGFNLQRGE | 180 |
| | | AYA VHLDESTPHMH+G+VP +NGKLSSKA+F ++E+L IQ++LP+Y+++HGF L+RG+ | |
| Sbjct: | 121 | AYASVHLDESTPHMHMGVVPFENGKLSSKAMF-DREELKHIQEDLPRYMSDHGFELERGK | 179 |
| Query: | 181 | IGSKKKHLETAEFKEKQRLLDNADRKLADKHEELKALDDKISNV-NDTIA---------- | 229 |
| | | + S+ KH AEFK ++ +L +K+ +D++ + NDT A | |
| Sbjct: | 180 | LNSEAKHKTVAEFKRAMADME-LKEELLEKYHAPPFVDERTGELNNDTEAFWHEKEFADM | 238 |
| Query: | 230 | -DKESRLKEL---EAKEWDAVGDLKQYELEKQSLAESIEDIKDIELLQLDRIQKEDLVKQ | 285 |
| | | + +S ++E E +W KQY+ E + L S + ++D D E+L+ + | |
| Sbjct: | 239 | FEVQSPIRETTNQEKMDWLR----KQYQEELKKLESSKKPLED------DLSHLEELLDK | 288 |
| Query: | 286 | SFDGKLKMDKETYNRLFQTASKHASSNAELKRDLVKAQSQNNHLSRELLNHRKTAEKNIK | 345 |
| | | +K+D E AS+ AS +L KA+ N L NH K+ E I+ | |
| Sbjct: | 289 | KTKEYIKIDSE--------ASERAS-------ELSKAEGYINTLE----NHSKSLEAKIE | 329 |
| Query: | 346 | LSQENRKLKDKVKMLDEQVKILNKSLSVWKEKAKEFMPKQVY | 387 |
| | | + + +K K + K LN+S + K F+ K+ Y | |
| Sbjct: | 330 | CLESDNLQLEKQKATKLEAKALNESELRELKPKKNFLGKEHY | 371 |

[1328] A related DNA sequence was identified in S. pyogenes <SEQ ID 597> which encodes the amino acid sequence <SEQ ID 598>. Analysis of this protein sequence reveals the following:

| LPXTG motif: 2025-2030 | | | | |
|---|---|---|---|---|
| Possible site: 52 | | | | |
| >>> Seems to have no N-terminal signal sequence | | | | |
| INTEGRAL | Likelihood = −10.08 | Transmembrane | 2034-2050 | (2030-2053) |
| INTEGRAL | Likelihood = −6.05 | Transmembrane | 21-37 | (20-39) |

----- Final Results -----
bacterial membrane --- Certainty = 0.5034 (Affirmative) < succ>
bacterial outside --- Certainty = 0.0000 (Not Clear) < succ>
bacterial cytoplasm --- Certainty = 0.0000 (Not Clear) < succ>

[1329] The protein has homology with the following sequences in the databases:

| >GP: AA003320 GB: AF067776 extracellular matrix binding protein | | | |
|---|---|---|---|
| [Abiotrophia defectiva] | | | |
| Identities = 362/1396 (25%), Positives = 591/1396 (41%), Gaps = 87/1396 (6%) | | | |
| Query: | 636 | KAEVKLREAHEATKQAIEKDPWLSPEQKKAQKEKAKARLDEGLKALKAADSLEILKVTEE | 695 |
| | | +A+ + A +A AI+ + L+ E+K A+K K +A + L + A K T | |
| Sbjct: | 636 | EAKNAVNNAAKAKNTAIDNNNNLTAEEKAAEKAKVEAAKNATLAGIDQA------KTTAA | 689 |
| Query: | 696 | AFVDKEKNPDSIPNQHKAGTADQARKQALDSLDKEVQKELESIDNDNTLTTDEKAAAKKK | 755 |
| | | + K I + A A AL+ + ++ I LT +EK A + | |
| Sbjct: | 690 | RNAAQNKGTTDINAVNPVPVAKPAANAALE---QAAVNKINEISQRPDLTREEKQAFMDQ | 746 |
| Query: | 756 | VNDAYDVARQTAMEANSYEDLTTIKDEFLS---NLPHKQGTPLKDQQSDAIAELEKKQQE | 812 |
| | | V A D A A + + +T+ +D+ L+ NLP TP + +A+ + + | |
| Sbjct: | 747 | VRTARDAAMAKVASAANNQAVTSARDQGLNAVNNLP----TPAA-KYPEALGHVRQAADA | 801 |
| Query: | 813 | IEKAIEGDKTLPRDEKEKQIADSKERLKSDTQKVKDAKNADAIKKAFEEGKVNIPQAHIP | 872 |
| | | +AI + L +E+ + + + + KA +G I | |
| Sbjct: | 802 | KRQAIRDNANLTAEEQADALRQVDAAQTAAEAAINQNHTNATLAKADSDGVKAI------ | 855 |
| Query: | 873 | GDLN---KDKEKLLAELKQKADDTEKAIDVDKTLTEDEKKEQKVKTKAELEKAKTDVKNT | 929 |
| | | D+N + K L+Q A +AI+ + LT++EK + + L AKT V+ | |
| Sbjct: | 856 | NDINPQPRSKPAANQALEQVAAAKRQAINNNNQLTDEEKAQAIQQVDQALANAKTQVQAA | 915 |
| Query: | 930 | QTREELDKKVPELKKAIEDTHVKGNLEGVKNKAIEDLKKAHTETVAKINGDDTLDKATKE | 989 |
| | | +++ AI + + +G K +AI ++ A ++ G + L + | |
| Sbjct: | 916 | NDNNGVNQAKTAGTTAINNINPQGTQ---KAQAIAAIEAAEQAKRLELQGRNDLTTEERN | 972 |
| Query: | 990 | AQVKEADKALAAGKDAITKADDADKVSTAVTEHTPKIKAAHKTGDLKKAQVDANTALDKA | 1049 |
| | | + + A KDA+ +A + V+ A +I+ + T +K DA A+D+A | |
| Sbjct: | 973 | NALADLTAKAQAAKDAVNQARNNTGVAGAKDNGVAQIQGINPTAVVKP---DARNAIDQA | 1029 |
| Query: | 1050 | AEKERGEINKDATLTTEDKAKQLKEVETALTKAKDNVKAAKTADAINDARDKGVATIDAV | 1109 |
| | | A + E + LT E+KA +K+V+ A AK + A + +N+A ++G A I A+ | |
| Sbjct: | 1030 | ARDKEAEFQANTKLTDEEKAAAIKKVQDAARDAKAAIDRAGSNGDVNNAVNQGKAAIQAI | 1089 |
| Query: | 1110 | HKAGQDLGARKSGQVAKLEEAAKATKDKISADPTLTSKEKEEQSKAVDAELKKAIEAVNA | 1169 |
| | | + K A ++ AA A K I+A+ LT +EK K V+ E KA AV+A | |
| Sbjct: | 1090 | KALDDSQPSAKDTAKAAIQNAADAKKAAITANNALTQEEKAAAIKQVEDEAAKAQAAVDA | 1149 |
| Query: | 1170 | ADTADKVDDALGEGVTDIKNQHKSGDSIDARREAHGKELDRVAQETKGAIEKDPTLTTEE | 1229 |
| | | + + VD A +G+ I + ++ + +D+ A + K I D TLT EE | |
| Sbjct: | 1150 | SRSKADVDRAKDQGLQKISDV----PAVQPPKLNAIAAVDQAATDKKAVINNDTTLTQEE | 1205 |
| Query: | 1230 | KAKQVKDVDAAKERGMAKLNEAKDADALDKAYGEGVTDIKNQHKSGDPVDARRGLHNKSI | 1289 |
| | | K ++ VD + +N+A + +G I N ++ A + ++ | |
| Sbjct: | 1206 | KEAAIRKVDEEAAKARQAINDATSNADVAAKQAQGTQAINNVPQT----PAAKNAAKAAV | 1261 |
| Query: | 1290 | DEVAQATKDAITADTTLTEAEKETQRGNVDKEATKAKEELAKAKDADALDKAYGDGVTSI | 1349 |
| | | ++ A A K AI D LT EK+ VD+E KA++ + A + +G +I | |
| Sbjct: | 1262 | EQAADAKKQAIENDPNLTRQEKDAAIAKVDQETNKARQAIDAATTNADVTAKQNEGTQAI | 1321 |
| Query: | 1350 | KNQHKSGKGLDVRKDEHKKALEAVAKRVTAEIEADPTLTPEVREQQKAEVQKELELATDK | 1409 |
| | | ++ K K + K A+ A+ + IE DP LT E ++ KA+V E A + | |
| Sbjct: | 1322 | NAVPQTPKA----KTDAKNAVTQAAEDKKSAIENDPNLTREEKDAAKAKVDAEATKAKNA | 1377 |
| Query: | 1410 | IAEAKDADEADKAYGDGVTAIENAHVIGKGIEARKDLAKKDLAEAAAKTKALIIEDKTLT | 1469 |
| | | I A D+ +G AI + + + +A+ D AK + +AA + K I D LT | |
| Sbjct: | 1378 | IDAATSNDDETAKQNEGTQAI---NAVPQTPKAKTD-AKNAVTQAADRKKDAIENDPNLT | 1433 |
| Query: | 1470 | DDQRKEQLLGVDTEYAKGIENIDAAKDAAGVDKAYSDGVRDILAQYKEGQNLNDRRNAAK | 1529 |
| | | +++ VD E K + IDAA A V ++G + I + + AK | |
| Sbjct: | 1434 | REEKVAAKAKVDAEAKKAKDAIDAATSNADVTAKQNEGTKAI----NDVPQTPTAKTDAK | 1489 |
| Query: | 1530 | EFLLKEADKVTKLINDDPTLTHDQKVDQINKVEQAKLDAIKSVDDAQTADAINDALGKGI | 1589 |
| | | + + AD I DP LT ++K KV+ A ++D A + + +G | |
| Sbjct: | 1490 | NAVTQAADAKKDAIEKDPNLTREEKDAAKAKVDAEAKKAKDAIDAATSNADVTAKQNEGT | 1549 |
| Query: | 1590 | ENINNQYQHGDGVDVRKATAKGDLEKEAAKVKALIAKDPTLTQADKDKQTAAVDAAKNTA | 1649 |
| | | + IN+ Q K AK + + A K I KDP LT+ +KD A VDA A | |
| Sbjct: | 1550 | KAINDVPQ----TPTAKTDAKNAVTQAADAKKDAIEKDPNLTREEKDAAKAKVDAEAKKA | 1605 |
| Query: | 1650 | IAAVDKATTTEGINQELGKGITAINKAYRPGEGVKARKEAAKADLEKEAAKVKALITNDP | 1709 |
| | | A+D AT+ + + G AIN + K AK + + A K I ND | |
| Sbjct: | 1606 | KDAIDAATSNADVTAQKDAGKNAINAVPQ----TPTAKTDAKNAVTQAADAKKDAIENDA | 1661 |
| Query: | 1710 | TLTKADK-AKQTEAVAKALKAAIAAVDKATTAEGINQELGKGITAINKAYRPGEGVKARK | 1768 |
| | | LT+ +K A + + A+A KA A+D AT+ + + +G AIN + K | |
| Sbjct: | 1662 | NLTREEKDAAKAKVDAEATKAK-NAIDAATSNADVTAKQNEGTKAINDVPQ----TPTAK | 1716 |
| Query: | 1769 | EAAKADLEREAAKVREAIANDPTLTKADK-AKQTEAVAKALKAAIAAVDKATTAEGINQE | 1827 |
| | | AK +++ A + AI NDP LT+ +K A + + A+A KA A+D AT+ + + | |
| Sbjct: | 1717 | TDAKNAVDQAATDKKSAIENDPALTREEKDAAKAKVDAEATKAK-NAIDAATSNADVTAQ | 1775 |
| Query: | 1828 | LGKGITAINKAYRPGEGVEAHKEAAKANLEKVAKETKALISGDRYLSKTEKAVQKQAVEQ | 1887 |
| | | G AIN + K AK +++ A + KA I D L+ EK K V+ | |
| Sbjct: | 1776 | KDAGKNAINAVPQ----TPTAKTDAKNAVDQAATDKKAAIENDPALTREEKDAAKAKVDA | 1831 |
| Query: | 1888 | ALAKALGQVEAAKTVEAVKLAENLGTVAIRSAYVAGLAKDTDQATAALNEAKQAAIEALK | 1947 |
| | | KA ++AA + V ++ G KD A AK A A+ | |
| Sbjct: | 1832 | EAKKAKDAIDAATSNADVTAQKDAG-------------KDAINAVPQTPTAKTDAKNAVD | 1878 |
| Query: | 1948 | QAAAETLAKITTDAKLTEAQKAEQSENVSLALKTAIATVRSAQSIASVKEAKDKGITAIR | 2007 |
| | | QAA + + I D LT +K V K A + +A S A V + +G AI | |
| Sbjct: | 1879 | QAATDKKSAIENDPALTREEKDAVKAKVDAEAKKAKDAIDAATSNADVTAKQTEGTQAIN | 1938 |
| Query: | 2008 | AAYVPNKAVAKSSSAN | 2023 |
| | | A VP AK+ + N | |
| Sbjct: | 1939 | A--VPQTPTAKTDAKN | 1952 |

[1330] An alignment of the GAS and GBS proteins is shown below:

| Identities = 77/396 (19%), Positives = 157/396 (39%), Gaps = 48/396 (12%) | | | |
|---|---|---|---|
| Query: | 42 | LNYELTNRDQAQNYHKQIKEHINENRLSTRGVRKDAILCNEWIITSDKTFFDSLDEKQTR | 101 |
| | | L++E+ + ++QN K+I + + D E +I K +++ EK T | |
| Sbjct: | 338 | LDFEILH-PRSQNVSKKISKQVEAKPF-------DPASYKEKVIAKLKPVYEATSEKITN | 389 |
| Query: | 102 | EFF--ETAKDYFAEKYGDANIAYARVHLDESTPHMHLGIVPMKNGKLSSKALFG--NKEK | 157 |
| | | + + E AKD +K + I+ G V + +A+ NK | |
| Sbjct: | 390 | DAWLDENAKDLQKQKLEEQYIS---------------GKVAISEAGTKQEAIDAAYNKYS | 434 |
| Query: | 158 | LVAIQDELPKYLNEHGFNLQRGEIGSKKKHLETAEFKEKQRLLDN---ADRKLADKHEEL | 214 |
| | | D LP + N + + ++ ++T + K D K K E L | |
| Sbjct: | 435 | SQTDPDSLPSQYKQG--NKENEQEKGRQDLIQTRDLTLKAIQEDKWLTEQEKTIQKEEAL | 492 |
| Query: | 215 | KALDDKISNVNDTIADKESRLKELEAKEWDAVGDLKQYE----------LEKQSLAESIE | 264 |
| | | KA + I +VN T++ ++ + + + K + + K+Y EK+ A E | |
| Sbjct: | 493 | KAFETGIESVNQTVSLEQLKQRLIVYKASEKDSEKKEYPESIPNQHIPGKEKEVKAAKQE | 552 |
| Query: | 265 | DIKDIELLQLDRIQKEDLVKQSFDGKLKMDKETYNRLFQTASKHASSNAELKRDLVKAQS | 324 |
| | | ++K + L++I ++ + + +E + Q A K A + +L+ DL S | |
| Sbjct: | 553 | ELKKLHDTTLEKINQDKWLTPDQQAEQLKQAEVTFKKGQEAIKSAQTLTQLETDLADYVS | 612 |
| Query: | 325 | QNNHLSRELLNHRKTAEKNIKLSQENRKLKDKVKMLDEQVK----ILNKSLSVWKEKAKE | 380 |
| | | +N + + K+ K+ +++ KLK+ + + ++ + + KEKAK | |
| Sbjct: | 613 | ENEGKGNSIPDKYKSGNKDDLVNKAEVKLKEAHEATKQAIEKDPWLSPEQKKAQKEKAKA | 672 |
| Query: | 381 | FMPKQVYRETLSIINTLNPIGLAKTAIRQVKKMVDS | 416 |
| | | + + + + L ++L + + + A +K DS | |
| Sbjct: | 673 | RLDEGL--KALKAADSLEILKVTEEAFVDKEKNPDS | 706 |

[1331] Based on this analysis, it was predicted that these proteins and their epitopes could be useful antigens for vaccines or diagnostics.

### EXAMPLE 181

[1332] A DNA sequence (GBSx0187) was identified in S. agalactiae <SEQ ID 599> which encodes the amino acid sequence <SEQ ID 600>. Analysis of this protein sequence reveals the following:

Possible site: 42
>>> Seems to have no N-terminal signal sequence
----- Final Results -----
bacterial cytoplasm --- Certainty = 0.2544 (Affirmative) < succ>
bacterial membrane --- Certainty = 0.0000 (Not Clear) < succ>
bacterial outside --- Certainty = 0.0000 (Not Clear) < succ>

[1333] The protein has no significant homology with any sequences in the GENPEPT database.

[1334] No corresponding DNA sequence was identified in S. pyogenes.

[1335] Based on this analysis, it was predicted that this protein and its epitopes, could be useful antigens for vaccines or diagnostics.

### EXAMPLE 182

[1336] A DNA sequence (GBSx0188) was identified in S. agalactiae <SEQ ID 601> which encodes the amino acid sequence <SEQ ID 602>. Analysis of this protein sequence reveals the following:

Possible site: 57
>>> Seems to have no N-terminal signal sequence
----- Final Results -----
bacterial cytoplasm --- Certainty = 0.2045 (Affirmative) < succ>
bacterial membrane --- Certainty = 0.0000 (Not Clear) < succ>
bacterial outside --- Certainty = 0.0000 (Not Clear) < succ>

[1337] The protein has no significant homology with any sequences in the GENPEPT database.

[1338] A related DNA sequence was identified in S. pyogenes <SEQ ID 603> which encodes the amino acid sequence <SEQ ID 604>. Analysis of this protein sequence reveals the following:

Possible site: 57
>>> Seems to have no N-terminal signal sequence
----- Final Results -----
bacterial cytoplasm --- Certainty = 0.2045 (Affirmative) < succ>
bacterial membrane --- Certainty = 0.0000 (Not Clear) < succ>
bacterial outside --- Certainty = 0.0000 (Not Clear) < succ>

[1339] An alignment of the GAS and GBS proteins is shown below:

| Identities = 102/111 (91%), Positives = 107/111 (95%) | | | |
|---|---|---|---|
| Query: | 1 | MDYKKYQIIYAPDVLEKLKEIRDYISQNYSSTSGQHKMEQIISDIEKLEVFPEVGFDADE | 60 |
| | | +DYKKYQIIYAPDVLEKLKEIRDYISQNYSSTSGQ KMEQIISDIEKLEVFPEVGFDADE | |
| Sbjct: | 1 | LDYKKYQIIYAPDVLEKLKEIRDYISQNYSSTSGQRKMEQIISDIEKLEVFPEVGFDADE | 60 |
| Query: | 61 | KYGSKISKYHSTRGYTLSKDYIVLYHIEEEENRVVIDYLLPTRSDYMKLFK | 111 |
| | | KYGSKI YHST+GYTLSKDYIVLYHIE EENR+VIDYLLPT+SDY+KLFK | |
| Sbjct: | 61 | KYGSKIIHYHSTKGYTLSKDYIVLYHIEGEENRIVIDYLLPTQSDYIKLFK | 111 |

[1340] Based on this analysis, it was predicted that these proteins and their epitopes could be useful antigens for vaccines or diagnostics.

### EXAMPLE 183

[1341] A DNA sequence (GBSx0189) was identified in S. agalactiae <SEQ ID 605> which encodes the amino acid sequence <SEQ ID 606>. Analysis of this protein sequence reveals the following:

```
Possible site: 13
>>> Seems to have no N-terminal signal sequence
----- Final Results -----
                            bacterial cytoplasm --- Certainty = 0.1621(Affirmative) < succ>
                              bacterial membrane --- Certainty = 0.0000(Not Clear) < succ>
                                bacterial outside --- Certainty = 0.0000(Not Clear) < succ>
```

[1342] The protein has no significant homology with any sequences in the GENPEPT database.

[1343] A related DNA sequence was identified in S. pyogenes <SEQ ID 607> which encodes the amino acid sequence <SEQ ID 608>. Analysis of this protein sequence reveals the following:

```
Possible site: 22
>>> Seems to have no N-terminal signal sequence
----- Final Results -----
                            bacterial cytoplasm --- Certainty = 0.1596(Affirmative) < succ>
                              bacterial membrane --- Certainty = 0.0000(Not Clear) < succ>
                                bacterial outside --- Certainty = 0.0000(Not Clear) < succ>
```

[1344] An alignment of the GAS and GBS proteins is shown below:

| Identities = 91/95 (95%), Positives = 93/95 (97%) | | | |
|---|---|---|---|
| Query: | 1 | MVTAEKNRAVTFQANKELVSEAMTVLNKKNLTLSSALRLFLQNVVVTNEVDLLTEEELEK | 60 |
| | | M T +KNRAVTFQANKELVSEAMTVLNKKNLTLSSALRLFLQNVVVTNEVDLLTEEELEK | |
| Sbjct: | 1 | MTTVKKNRAVTFQANKELVSEAMTVLNKKNLTLSSALRLFLQNVVVTNEVDLLTEEELEK | 60 |
| Query: | 61 | EKLFKQFQAEINKNIEDVRQGKFYTSEEVRSELGL | 95 |
| | | EKLFKQFQAEINKNIEDVRQGKFYTSEEVR+ELGL | |
| Sbjct: | 61 | EKLFKQFQAEINKNIEDVRQGKFYTSEEVRAELGL | 95 |

[1345] Based on this analysis, it was predicted that these proteins and their epitopes could be useful antigens for vaccines or diagnostics.

### EXAMPLE 184

[1346] A DNA sequence (GBSx0190) was identified in S. agalactiae <SEQ ID 609> which encodes the amino acid sequence <SEQ ID 610>. Analysis of this protein sequence reveals the following:

```
Possible site: 56
>>> Seems to have no N-terminal signal sequence
----- Final Results -----
                            bacterial cytoplasm --- Certainty = 0.4568(Affirmative) < succ>
                              bacterial membrane --- Certainty = 0.0000(Not Clear) < succ>
                                bacterial outside --- Certainty = 0.0000(Not Clear) < succ>
```

[1347] A related GBS nucleic acid sequence <SEQ ID 9513> which encodes amino acid sequence <SEQ ID 9514> was also identified.

[1348] The protein has homology with the following sequences in the GENPEPT database:

| >GP: CAA46375 GB: X65276 ORFA1 [Clostridium acetobutylicum] | | | |
|---|---|---|---|
| Identities = 36/91 (39%), Positives = 51/91 (55%) | | | |
| Query: | 2 | MSQIKLTPEELRISAQKYTTGSQSITDVLTVLTQEQAVIDENWDGTAFDSFEAQFNELSP | 61 |
| | | M+QI +TPEEL+ AQ Y + I + + + I E W G AF ++ Q+N+L | |
| Sbjct: | 1 | MAQISVTPEELKSQAQVYIQSKEEIDQAIQKVNSMNSTIAEEWKGQAFQAYLEQYNQLHQ | 60 |
| Query: | 62 | KITQFAQLLEDINQQLLKVADVVEQTDSDIA | 92 |
| | | + QF LLE +NQQL K AD V + D+ A | |
| Sbjct: | 61 | TVVQFENLLESVNQQLNKYADTVAERDAQDA | 91 |

[1349] No corresponding DNA sequence was identified in S. pyogenes.

[1350] Based on this analysis, it was predicted that these proteins and their epitopes could be useful antigens for vaccines or diagnostics.

### EXAMPLE 185

[1351] A DNA sequence (GBSx0191) was identified in S. agalactiae <SEQ ID 611> which encodes the amino acid sequence <SEQ ID 612>. Analysis of this protein sequence reveals the following:

```
Possible site: 21
>>> Seems to have no N-terminal signal sequence
----- Final Results -----
                            bacterial cytoplasm --- Certainty = 0.4523(Affirmative) < succ>
                              bacterial membrane --- Certainty = 0.0000(Not Clear) < succ>
                                bacterial outside --- Certainty = 0.0000(Not Clear) < succ>
```

[1352] The protein has no significant homology with any sequences in the GENPEPT database.

[1353] No corresponding DNA sequence was identified in S. pyogenes.

[1354] Based on this analysis, it was predicted that this protein and its epitopes, could be useful antigens for vaccines or diagnostics.

### EXAMPLE 186

[1355] A DNA sequence (GBSx0192) was identified in S. agalactiae <SEQ ID 613> which encodes the amino acid sequence <SEQ ID 614>. Analysis of this protein sequence reveals the following:

```
Possible site: 44
>>> Seems to have no N-terminal signal sequence
----- Final Results -----
                            bacterial cytoplasm --- Certainty = 0.5339(Affirmative) < succ>
                              bacterial membrane --- Certainty = 0.0000(Not Clear) < succ>
                                bacterial outside --- Certainty = 0.0000(Not Clear) < succ>
```

[1356] The protein has no significant homology with any sequences in the GENPEPT database.

[1357] No corresponding DNA sequence was identified in S. pyogenes.

[1358] Based on this analysis, it was predicted that this protein and its epitopes, could be useful antigens for vaccines or diagnostics.

### EXAMPLE 187

[1359] A DNA sequence (GBSx0193) was identified in S. agalactiae <SEQ ID 615> which encodes the amino acid sequence <SEQ ID 616>. This protein is predicted to be chromosome assembly protein. Analysis of this protein sequence reveals the following:

```
Possible site: 61
>>> Seems to have no N-terminal signal sequence
----- Final Results -----
                            bacterial cytoplasm --- Certainty = 0.4620(Affirmative) < succ>
                              bacterial membrane --- Certainty = 0.0000(Not Clear) < succ>
                                bacterial outside --- Certainty = 0.0000(Not Clear) < succ>
```

[1360] The protein has no significant homology with any sequences in the GENPEPT database.

[1361] No corresponding DNA sequence was identified in S. pyogenes.

[1362] Based on this analysis, it was predicted that this protein and its epitopes, could be useful antigens for vaccines or diagnostics.

### EXAMPLE 188

[1363] A DNA sequence (GBSx0194) was identified in S. agalactiae <SEQ ID 617> which encodes the amino acid sequence <SEQ ID 618>. Analysis of this protein sequence reveals the following:

```
Possible site: 46
>>> Seems to have no N-terminal signal sequence
----- Final Results -----
                            bacterial cytoplasm --- Certainty = 0.4511(Affirmative) < succ>
                              bacterial membrane --- Certainty = 0.0000(Not Clear) < succ>
                                bacterial outside --- Certainty = 0.0000(Not Clear) < succ>
```

[1364] The protein has no significant homology with any sequences in the GENPEPT database.

[1365] No corresponding DNA sequence was identified in S. pyogenes.

[1366] Based on this analysis, it was predicted that this protein and its epitopes, could be useful antigens for vaccines or diagnostics.

### EXAMPLE 189

[1367] A DNA sequence (GBSx0195) was identified in S. agalactiae <SEQ ID 619> which encodes the amino acid sequence <SEQ ID 620>. Analysis of this protein sequence reveals the following:

```
Possible site: 20
>>> Seems to have no N-terminal signal sequence
----- Final Results -----
                            bacterial cytoplasm --- Certainty = 0.5249(Affirmative) < succ>
                              bacterial membrane --- Certainty = 0.0000(Not Clear) < succ>
                                bacterial outside --- Certainty = 0.0000(Not Clear) < succ>
```

[1368] The protein has no significant homology with any sequences in the GENPEPT database.

[1369] No corresponding DNA sequence was identified in S. pyogenes.

[1370] Based on this analysis, it was predicted that this protein and its epitopes, could be useful antigens for vaccines or diagnostics.

### EXAMPLE 190

[1371] A DNA sequence (GBSx0196) was identified in S. agalactiae <SEQ ID 621> which encodes the amino acid sequence <SEQ ID 622>. Analysis of this protein sequence reveals the following:

```
Possible site: 14
>>> Seems to have no N-terminal signal sequence
----- Final Results -----
                            bacterial cytoplasm --- Certainty = 0.3542(Affirmative) < succ>
                              bacterial membrane --- Certainty = 0.0000(Not Clear) < succ>
                                bacterial outside --- Certainty = 0.0000(Not Clear) < succ>
```

[1372] A related GBS nucleic acid sequence <SEQ ID 9515> which encodes amino acid sequence <SEQ ID 9516> was also identified.

[1373] The protein has no significant homology with any sequences in the GENPEPT database.

[1374] No corresponding DNA sequence was identified in S. pyogenes.

[1375] Based on this analysis, it was predicted that these proteins and their epitopes could be useful antigens for vaccines or diagnostics.

### EXAMPLE 191

[1376] A DNA sequence (GBSx0197) was identified in S. agalactiae <SEQ ID 623> which encodes the amino acid sequence <SEQ ID 624>. Analysis of this protein sequence reveals the following:

Possible site: 15
>>> Seems to have no N-terminal signal sequence
----- Final Results -----
bacterial cytoplasm --- Certainty = 0.3098 (Affirmative) < succ>
bacterial membrane --- Certainty = 0.0000 (Not Clear) < succ>
bacterial outside --- Certainty = 0.0000 (Not Clear) < succ>

[1377] The protein has no significant homology with any sequences in the GENPEPT database.

[1378] No corresponding DNA sequence was identified in S. pyogenes.

[1379] Based on this analysis, it was predicted that this protein and its epitopes, could be useful antigens for vaccines or diagnostics.

### EXAMPLE 192

[1380] A DNA sequence (GBSx0198) was identified in S. agalactiae <SEQ ID 625> which encodes the amino acid sequence <SEQ ID 626>. This protein is predicted to be rgg protein. Analysis of this protein sequence reveals the following:

Possible site: 59
>>> Seems to have no N-terminal signal sequence
----- Final Results -----
bacterial cytoplasm --- Certainty = 0.3177 (Affirmative) < succ>
bacterial membrane --- Certainty = 0.0000 (Not Clear) < succ>
bacterial outside --- Certainty = 0.0000 (Not Clear) < succ>

[1381] The protein has homology with the following sequences in the GENPEPT database:

| >GP: AAA26968 GB: M89776 rgg [Streptococcus gordonii] | | | |
|---|---|---|---|
| Identities = 74/277 (26%), Positives = 142/277 (50%) | | | |
| Query: | 7 | IFREFRLNRQFSLKQVASNELSVSQLSRFERGESDLSLTKFLGALEAIDLSISEFMDRVN | 66 |
| | | I + R ++ SLK+VA+ ++SV+QLSR+ERG S L++ F L + +S++EF + | |
| Sbjct: | 10 | ILKIIRESKNMSLKEVAAGDISVAQLSRYERGISSLTVDSFYSCLRNMSVSLAEFQYVYH | 69 |
| Query: | 67 | KYQKSDQISLMSQMAQYHYQRDVAGLEKMISVEEGKLKKDSSDIRCRLNIVLFRGMICEC | 126 |
| | | Y+++D + L ++++ + ++ LE +++ E ++ +LN ++ R + C | |
| Sbjct: | 70 | NYREADDVVLSQKLSEAQRENNIVKLESILAGSEAMAQEFPEKKNYKLNTIVIRATLTSC | 129 |
| Query: | 127 | DSSRKMSEEDLCFLSDYLFQKDSWEISDYILIGNLYRYYNTRHICQLVKEVINQKEYYRD | 186 |
| | | + ++S+ D+ FL+DYLF + W + L N + E+IN+ ++Y + | |
| Sbjct: | 130 | NPDYQVSKGDIEFLTDYLFSVEEWGRYELWLFTNSVNLLTLETLETFASEMINRTQFYNN | 189 |
| Query: | 187 | IYTNRNVVEATLLNVVETLIERRALEEATFFLEKVEALLNNERNAYHRIILLYEKGFLAY | 246 |
| | | + NR + LLNVV IE L+ A FL ++ E + Y R+++ Y K +Y | |
| Sbjct: | 190 | LPENRRRIIKMLLNVVSACIENNHLQVAMKFLNYIDNTKIPETDLYDRVLIKYHKALYSY | 249 |
| Query: | 247 | AKGDSRGIQSMKQAIFCFQAIGSKHHVENFQEHFNRV | 283 |
| | | G+ ++Q + F+ + S +E F R+ | |
| Sbjct: | 250 | KVGNPHARHDIEQCLSTFEYLDSFGVARKLKEQFERI | 286 |

[1382] A related DNA sequence was identified in S. pyogenes <SEQ ID 627> which encodes the amino acid sequence <SEQ ID 628>. Analysis of this protein sequence reveals the following:

Possible site: 29
>>> Seems to have no N-terminal signal sequence
----- Final Results -----
bacterial cytoplasm --- Certainty = 0.3792 (Affirmative) < succ>
bacterial membrane --- Certainty = 0.0000 (Not Clear) < succ>
bacterial outside --- Certainty = 0.0000 (Not Clear) < succ>

[1383] An alignment of the GAS and GBS proteins is shown below:

| Identities = 79/275 (28%), Positives = 146/275 (52%), Gaps = 11/275 (4%) | | | |
|---|---|---|---|
| Query: | 9 | REFRLNRQFSLKQVASNELSVSQLSRFERGESDLSLTKFLGALEAIDLSISEFMDRVNKY | 68 |
| | | R R +Q S+ +A LS SQ+SRFERGES+++ ++ L L+ ++++I EF+ +K | |
| Sbjct: | 15 | RRLRKGKQVSISFLADEYLSKSQISRFERGESEITCSRLLNLLDKLNITIDEFVSAHSKT | 74 |
| Query: | 69 | QKSDQISLMSQMAQYHYQRDVAGLEKMISVEEGKLKKDSSDIRCRLNIVLFRGMICECDS | 128 |
| | | + +L+SQ + + +++V L K++ + KD R + +LF DS | |
| Sbjct: | 75 | H-THFFTLLSQARKCYAEKNVVKLTKLL---KDYAHKDYE--RTMIKAILF-----SIDS | 123 |
| Query: | 129 | SRKMSEEDLCFLSDYLFQKDSWEISDYILIGNLYRYYNTRHICQLVKEVINQKEYYRDIY | 188 |
| | | S S+E+L L+DYLF+ + W + IL+GN R+ N + L KE++ Y | |
| Sbjct: | 124 | SIAPSQEELTRLTDYLFKVEQWGYYEIILLGNCSRFMNYNTLFLLTKEMVASFAYSEQNK | 183 |
| Query: | 189 | TNRNVVEATLLNVVETLIERRALEEATFFLEKVEALLNNERNAYHRIILLYEKGFLAYAK | 248 |
| | | TN+ +V +N + I+ E + + + K++ LL +E N Y + + LY G+ + | |
| Sbjct: | 184 | TNKMLVTQLSINCLIISIDHSCFEHSRYLINKIDLLLRDELNFYEKTVFLYVHGYYKLKQ | 243 |
| Query: | 249 | GDSRGIQSMKQAIFCFQAIGSKHHVENFQEHFNRV | 283 |
| | | + G + M+QA+ F+ +G +++EH+ ++ | |
| Sbjct: | 244 | EEMSGEEDMRQALQIFKYLGEDSLYYSYKEHYRQI | 278 |

[1384] Based on this analysis, it was predicted that these proteins and their epitopes could be useful antigens for vaccines or diagnostics.

### EXAMPLE 193

[1385] A DNA sequence (GBSx0199) was identified in S. agalactiae <SEQ ID 629> which encodes the amino acid sequence <SEQ ID 630>. This protein is predicted to be permease. Analysis of this protein sequence reveals the following:

| Possible site: 15 | | | | |
|---|---|---|---|---|
| >>> Seems to have no N-terminal signal sequence | | | | |
| | INTEGRAL | Likelihood = −8.07 | Transmembrane | 217-233 (215-238) |
| | INTEGRAL | Likelihood = −7.96 | Transmembrane | 163-179 (158-185) |
| | INTEGRAL | Likelihood = −7.75 | Transmembrane | 71-87 (69-91) |
| | INTEGRAL | Likelihood = −7.22 | Transmembrane | 369-385 (356-389) |
| | INTEGRAL | Likelihood = −5.15 | Transmembrane | 279-295 (275-299) |
| | INTEGRAL | Likelihood = −4.88 | Transmembrane | 252-268 (250-270) |
| | INTEGRAL | Likelihood = −4.78 | Transmembrane | 140-156 (139-157) |
| | INTEGRAL | Likelihood = −3.56 | Transmembrane | 343-359 (340-367) |
| | INTEGRAL | Likelihood = −3.13 | Transmembrane | 40-56 (39-56) |
| | INTEGRAL | Likelihood = −2.28 | Transmembrane | 94-110 (92-112) |

```
----- Final Results -----
                              bacterial membrane --- Certainty = 0.4227(Affirmative) < succ>
                                bacterial outside --- Certainty = 0.0000(Not Clear) < succ>
                            bacterial cytoplasm --- Certainty = 0.0000(Not Clear) < succ>
```

[1386] The protein has homology with the following sequences in the GENPEPT database:

| >GP: AAD36408 GB: AE001788 permease, | | | |
|---|---|---|---|
| putative [Thermotoga maritima] | | | |
| Identities = 97/396 (24%), Positives = 194/396 (48%), | | | |
| Gaps = 15/396 (3%) | | | |
| Query: | 1 | MNINGIKLLSSRAVSKLGDVFYDYGNSTWIASMGGLGQKILGIYQIVELLVSIVLNPFGG | 60 |
| | | MN N + S VS +G Y + W+ S G + + G++ I L +I+++PF G | |
| Sbjct: | 1 | MNRNLLLFASGSFVSLIGTRIYQVALAWWLYSKTGSSEYV-GLFMISSFLPAIIVSPFAG | 59 |
| Query: | 61 | ALADRFQRRKILLITDAICAIM---CFLLSFIGDDKVMVYGLIVANAILAVSNAFSSPAY | 117 |
| | | + DR RR ++++ D + ++ FL+ + + + + L++ +++V ++F +PA | |
| Sbjct: | 60 | TVVDRHSRRNMMVVMDILRGVLFMYLFLMEYFSELTMAL--LLIVTVLVSVFDSFFNPAV | 117 |
| Query: | 118 | KSYIPEIVDKADIITYNANLETIVQIISVSSPVLGFLIFNNFGIRITLIVDAITFLISFL | 177 |
| | | S +P++V K +++ N+ + + + P LG L+ G+ +++++++FLIS + | |
| Sbjct: | 118 | DSLLPDLVRKENLVRANSLYRLLKNLSKILGPALGSLLLKVVGLAGVILINSLSFLISGI | 177 |
| Query: | 178 | FLYAIKVERVQLSKQEKVAIKNILADIADGFTYIKKEKEIMFFLIIAALLNTFLAMFNYL | 237 |
| | | F IKVE L K K +N+ DI YI+ + I+ +++ A++N F + L | |
| Sbjct: | 178 | FEMFIKVEEKHLKKVSKE--RNMWQDIKSALLYIRSVRFILVTILVIAIMNFFTGSMHVL | 235 |
| Query: | 238 | LP-FTNSLLKTSGAYATILSISAIGSIIGALIARKI--KSSINSMLSMLVFSSLGVIVMG | 294 |
| | | LP + L K+ Y T++S+ + G +I + I ++S+ ++ LV L V V | |
| Sbjct: | 236 | LPEHVSKLGKSEWVYGTLMSMLSFGGLIVTFLMATIRTRASVKTLGLNLVGYGLAVFVFA | 295 |
| Query: | 295 | FPSLFELPIWIPYSGSFLFNSLLTMFNIHFFSQVQIRVDEAYMGRVMSTIFTIAIMFMPI | 354 |
| | | W+ ++ FL T+FNI+ + +Q+ + E G++ S I ++ +P+ | |
| Sbjct: | 296 | MTGNH----WLMFAMYFLIGIFQTLFNINVITLLQLAIPEEMRGKIFSLISAVSFSLLPV | 351 |
| Query: | 355 | GTLFMTIFSFALSNVSFIVIGCAIAILGGLGFSYSK | 390 |
| | | F S ++ + I GG+ S + | |
| Sbjct: | 352 | SYGFFGFLSSYVATAHIFITTSMALIAGGVLISLQR | 387 |

[1387] A related DNA sequence was identified in S. pyogenes <SEQ ID 631> which encodes the amino acid sequence <SEQ ID 632>. Analysis of this protein sequence reveals the following:

| Possible site: 45 | | | | |
|---|---|---|---|---|
| >>> Seems to have no N-terminal signal sequence | | | | |
| | INTEGRAL | Likelihood = −8.17 | Transmembrane | 172-188 (161-194) |
| | INTEGRAL | Likelihood = −8.07 | Transmembrane | 220-236 (218-242) |
| | INTEGRAL | Likelihood = −7.22 | Transmembrane | 311-327 (303-329) |
| | INTEGRAL | Likelihood = −5.26 | Transmembrane | 98-114 (96-118) |
| | INTEGRAL | Likelihood = −4.99 | Transmembrane | 347-363 (342-370) |
| | INTEGRAL | Likelihood = −4.62 | Transmembrane | 154-170 (151-171) |
| | INTEGRAL | Likelihood = −4.25 | Transmembrane | 284-300 (281-306) |
| | INTEGRAL | Likelihood = −3.66 | Transmembrane | 378-394 (378-396) |
| | INTEGRAL | Likelihood = −3.56 | Transmembrane | 74-90 (73-92) |
| | INTEGRAL | Likelihood = −2.39 | Transmembrane | 50-66 (49-66) |

```
----- Final Results -----
                              bacterial membrane --- Certainty = 0.4270(Affirmative) < succ>
                                bacterial outside --- Certainty = 0.0000(Not Clear) < succ>
                            bacterial cytoplasm --- Certainty = 0.0000(Not Clear) < succ>
```

[1388] The protein has homology with the following sequences in the databases:

| >GP: AAD36408 GB: AE001788 permease, putative [Thermotoga maritima] | | | |
|---|---|---|---|
| Identities = 85/345 (24%), Positives = 171/345 (48%), Gaps = 8/345 (2%) | | | |
| Query: | 40 | SLSLVAVYQSLESVIGVLFNLFGGVIADSFKRKKIIITTNILCGTACLVLSFLTKEQWLV | 99 |
| | | S V ++ + ++ + F G + D R+ +++ +IL G + L + L | |
| Sbjct: | 36 | SSEYVGLFMISSFLPAIIVSPFAGTVVDRHSRRNMMVVMDILRGVLFMYLFLMEYFSELT | 95 |
| Query: | 100 | YAIVL-TNVILAFMSAFSSPSYKAFTKEIVKKDSISQLNSLLETTSTVIKVTVPMVAIFL | 158 |
| | | A++L V+++ +F +P+ + ++V+K+++ + NSL + K+ P + L | |
| Sbjct: | 96 | MALLLIVTVLVSVFDSFFNPAVDSLLPDLVRKENLVRANSLYRLLKNLSKILGPALGSLL | 155 |
| Query: | 159 | YKLLGIHGVLLLDGLSFLIAALLISFILPVNDEVVIKEKVTIREIFNDLKIGFKYVYSHK | 218 |
| | | K++G+ GV+L++ LSFLI+ + FI +E +K+ R ++ D+K Y+ S + | |
| Sbjct: | 156 | LKVVGLAGVILINSLSFLISGIFEMFIKV--EEKHLKKVSKERNMWQDIKSALLYIRSVR | 213 |
| Query: | 219 | SIFIITVLSALVNFFLAAYNLLLPYSNQMFGEISTGLYGTFLTAEAIGGFIGAILSGFVN | 278 |
| | | I + ++ A++NFF + ++LLP G+ S +YGT ++ + GG I L + | |
| Sbjct: | 214 | FILVTILVIAIMNFFTGSMHVLLPEHVSKLGK-SEWVYGTLMSMLSFGGLIVTFLMATIR | 272 |
| Query: | 279 | KELSSMRLILFLSLSGLMLMLAPPFYIMFHNAIILALSPALFSLFLSIFNIQFFSLVQKD | 338 |
| | | S L L L GL + + + M N ++ L +F ++FNI +L+Q | |
| Sbjct: | 273 | TRASVKTLGLNLVGYGLAVFV----FAMTGNHWLMFAMYFLIGIFQTLFNINVITLLQLA | 328 |
| Query: | 339 | VDNDFLGRVFGIIFTITILFMPIGTGFFSVALNPNNSFNLFIIGS | 383 |
| | | + + G++F +I ++ +P+ GFF + + ++FI S | |
| Sbjct: | 329 | IPEEMRGKIFSLISAVSFSLLPVSYGFFGFLSSYVATAHIFITTS | 373 |

[1389] An alignment of the GAS and GBS proteins is shown below:

| Identities = 136/379 (35%), Positives = 229/379 (59%), Gaps = 6/379 (1%) | | | |
|---|---|---|---|
| Query: | 8 | LLSSRAVSKLGDVFYDYGNSTWIASMGGLGQKILGIYQIVELLVSIVLNPFGGALADRFQ | 67 |
| | | L+ S+ + ++GDV +D+ N+T++A + ++ +YQ +E ++ ++ N FGG +AD F+ | |
| Sbjct: | 11 | LVYSKVIYRIGDVMFDFANNTFLAGLNPASLSLVAVYQSLESVIGVLFNLFGGVIADSFK | 70 |
| Query: | 68 | RRKILLITDAICAIMCFLLSFIGDDKVMVYGLIVANAILAVSNAFSSPAYKSYIPEIVDK | 127 |
| | | R+KI++ T+ +C C +LSF+ ++ +VY +++ N ILA +AFSSP+YK++ EIV K | |
| Sbjct: | 71 | RKKIIITTNILCGTACLVLSFLTKEQWLVYAIVLTNVILAFMSAFSSPSYKAFTKEIVKK | 130 |
| Query: | 128 | ADIITYNANLETIVQIISVSSPVLGFLIFNNFGIRITLIVDAITFLISFLFLYAIKVERV | 187 |
| | | I N+ LET +I V+ P++ ++ GI L++D ++FLI+ L + I | |
| Sbjct: | 131 | DSISQLNSLLETTSTVIKVTVPMVAIFLYKLLGIHGVLLLDGLSFLIAALLISFILPVND | 190 |
| Query: | 188 | QLSKQEKVAIKNILADIADGFTYIKKEKEIMFFLIIAALLNTFLAMFNYLLPFTNSLLK- | 246 |
| | | ++ +EKV I+ I D+ GF Y+ K I +++AL+N FLA +N LLP++N + | |
| Sbjct: | 191 | EVVIKEKVTIREIFNDLKIGFKYVYSHKSIFIITVLSALVNFFLAAYNLLLPYSNQMFGE | 250 |
| Query: | 247 | -TSGAYATILSISAIGSIIGALIARKIKSSINSMLSMLVFSSLGVIVMGFPS---LFELP | 302 |
| | | ++G Y T L+ AIG IGA+++ + ++SM +L S G+++M P +F | |
| Sbjct: | 251 | ISTGLYGTFLTAEAIGGFIGAILSGFVNKELSSMRLILFLSLSGLMLMLAPPFYIMFHNA | 310 |
| Query: | 303 | IWIPYSGSFLFNSLLTMFNIHFFSQVQIRVDEAYMGRVMSTIFTIAIMFMPIGTLFMTIF | 362 |
| | | I + S + LF+ L++FNI FFS VQ VD ++GRV IFTI I+FMPIGT F ++ | |
| Sbjct: | 311 | IILALSPA-LFSLFLSIFNIQFFSLVQKDVDNDFLGRVFGIIFTITILFMPIGTGFFSVA | 369 |
| Query: | 363 | SFALSNVSFIVIGCAIAIL | 381 |
| | | ++ + +IG I L | |
| Sbjct: | 370 | LNPNNSFNLFIIGSCITTL | 388 |

[1390] Based on this analysis, it was predicted that these proteins and their epitopes could be useful antigens for vaccines or diagnostics.

### EXAMPLE 194

[1391] A DNA sequence (GBSx0200) was identified in S. agalactiae <SEQ ID 633> which encodes the amino acid sequence <SEQ ID 634>. This protein is predicted to be membrane permease OpuCD. Analysis of this protein sequence reveals the following:

| Possible site: 46 | | | | |
|---|---|---|---|---|
| >>> Seems to have an uncleavable N-term signal seq | | | | |
| | INTEGRAL | Likelihood = −5.68 | Transmembrane | 91-107 (88-110) |
| | INTEGRAL | Likelihood = −4.30 | Transmembrane | 15-31 (9-37) |
| | INTEGRAL | Likelihood = −3.72 | Transmembrane | 72-88 (72-88) |
| | INTEGRAL | Likelihood = −3.19 | Transmembrane | 124-140 (123-142) |

```
----- Final Results -----
                              bacterial membrane --- Certainty = 0.3272(Affirmative) < succ>
                                bacterial outside --- Certainty = 0.0000(Not Clear) < succ>
                            bacterial cytoplasm --- Certainty = 0.0000(Not Clear) < succ>
```

[1392] A related GBS nucleic acid sequence <SEQ ID 8509> which encodes amino acid sequence <SEQ ID 8510> was also identified. Analysis of this protein sequence reveals the following:

| Lipop: Possible site: −1 Crend: 1 | | | | |
|---|---|---|---|---|
| McG: Discrim Score: −10.69 | | | | |
| GvH: Signal Score (−7.5): −3.79 | | | | |
| Possible site: 39 | | | | |
| >>> Seems to have no N-terminal signal sequence | | | | |
| ALOM program count: 5 value: −9.02 threshold: 0.0 | | | | |
| | INTEGRAL | Likelihood = −9.02 | Transmembrane | 35-51 (25-53) |
| | INTEGRAL | Likelihood = −5.68 | Transmembrane | 151-167 (148-170) |
| | INTEGRAL | Likelihood = −4.30 | Transmembrane | 75-91 (69-97) |
| | INTEGRAL | Likelihood = −3.72 | Transmembrane | 132-148 (132-148) |
| | INTEGRAL | Likelihood = −3.19 | Transmembrane | 184-200 (183-202) |
| | PERIPHERAL | Likelihood = 2.17 | 58 | |

```
modified ALOM score: 2.30
*** Reasoning Step: 3
----- Final Results -----
                              bacterial membrane --- Certainty = 0.4609(Affirmative) < succ>
                                bacterial outside --- Certainty = 0.0000(Not Clear) < succ>
                            bacterial cytoplasm --- Certainty = 0.0000(Not Clear) < succ>
```

[1393] The protein has homology with the following sequences in the GENPEPT database:

| >GP: AAF91342 GB: AF249729 membrane permease OpuCD | | | |
|---|---|---|---|
| [Listeria monocytogenes] | | | |
| Identities = 104/154 (67%), Positives = 133/154 (85%) | | | |
| Query: | 3 | IANVIQTIPSLAMISIIMLGLGLGIKTVVATVFLYSLLPIITNTYTGIRNVDSDLLDAAK | 62 |
| | | IAN+IQTIP+LAM++++ML +GLG TVV ++FLYSLLPI+ NTYTGIRNVD LL++ K | |
| Sbjct: | 60 | IANIIQTIPALAMLAVLMLIMGLGTNTVVLSLFLYSLLPILKNTYTGIRNVDGALLESGK | 119 |
| Query: | 63 | GMGMTKRQRLFMVELPLSISVIMAGLRNALVVAIGITAIGAFVGGGGLGDIIIRGTNATN | 122 |
| | | MGMTK Q L ++E+PL++SVIMAG+RNALV+AIG+ AIG FVG GGLGDII+RGTNATN | |
| Sbjct: | 120 | AMGMTKWQVLRLIEMPLALSVIMAGIRNALVIAIGVAAIGTFVGAGGLGDIIVRGTNATN | 179 |
| Query: | 123 | GGAIILAGSLPTALMAIFSDLILGGIQRMLEPRK | 156 |
| | | G AIILAG++PTA+MAI +D++LG ++R L P K | |
| Sbjct: | 180 | GTAIILAGAIPTAVMAILADVLLGWVERTLNPVK | 213 |

[1394] A related DNA sequence was identified in S. pyogenes <SEQ ID 635> which encodes the amino acid sequence <SEQ ID 636>. Analysis of this protein sequence reveals the following:

| Possible site: 49 | | | | |
|---|---|---|---|---|
| >>> Seems to have no N-terminal signal sequence | | | | |
| | INTEGRAL | Likelihood = −9.24 | Transmembrane | 39-55 (31-59) |
| | INTEGRAL | Likelihood = −7.17 | Transmembrane | 190-206 (188-211) |
| | INTEGRAL | Likelihood = −4.62 | Transmembrane | 93-109 (75-110) |
| | INTEGRAL | Likelihood = −3.66 | Transmembrane | 76-92 (75-92) |
| | INTEGRAL | Likelihood = −2.87 | Transmembrane | 221-237 (220-237) |
| | INTEGRAL | Likelihood = −2.44 | Transmembrane | 168-184 (165-184) |

```
----- Final Results -----
                              bacterial membrane --- Certainty = 0.4694(Affirmative) < succ>
                                bacterial outside --- Certainty = 0.0000(Not Clear) < succ>
                            bacterial cytoplasm --- Certainty = 0.0000(Not Clear) < succ>
```

[1395] The protein has homology with the following sequences in the databases:

| >GP: AAD45530 GB: AF162656 choline transporter [Streptococcus pneumoniae] | | | |
|---|---|---|---|
| Identities = 344/508 (67%), Positives = 425/508 (82%), Gaps = 2/508 (0%) | | | |
| Query: | 13 | MPSLFVTFQNRFNEWLAALGEHLQISLLSLMIALLIGVPLAALLSRSKRWSDIMLQVTGV | 72 |
| | | M +L TFQ+RF++WL AL +HLQ+SLL+L++A+L+ +PLA L ++ +D +LQ+ G+ | |
| Sbjct: | 1 | MTNLIATFQDRFSDWLTALSQHLQLSLLTLLLAILLAIPLAVFLRYHEKLADWVLQIAGI | 60 |
| Query: | 73 | FQTIPSLALLGLFIPLMGIGTLPAVTALVIYAIFPILQNTITGLNGIDPSLVEAGIAFGM | 132 |
| | | FQTIPSLALLGLFIPLMGIGTLPA+TALVIYAIFPILQNTITGL GIDP+L EAGIAFGM | |
| Sbjct: | 61 | FQTIPSLALLGLFIPLMGIGTLPALTALVIYAIFPILQNTITGLKGIDPNLQEAGIAFGM | 120 |
| Query: | 133 | TKWERLKTFEIPIAMPVIMSGVRTSAVMIIGTATLASLIGAGGLGSFILLGIDRNNANLI | 192 |
| | | T+WERLK FEIP+AMPVIMSG+RT+AV+IIGTATLA+LIGAGGLGSFILLGIDRNNA+LI | |
| Sbjct: | 121 | TRWERLKKFEIPLAMPVIMSGIRTAAVLIIGTATLAALIGAGGLGSFILLGIDRNNASLI | 180 |
| Query: | 193 | LIGAISSALLAIIFNSLLQYLEKASLRRIMISFGITLLALLASYTPMALSQFSKGKDTVV | 252 |
| | | LIGA+SSA+LAI FN LL+ +EKA LR I F + L L SY+P L Q K K+ +V | |
| Sbjct: | 181 | LIGALSSAVLAIAFNFLLKVMEKAKLRTIFSGFALVALLLGLSYSPALLVQ--KEKENLV | 238 |
| Query: | 253 | IAGKLGAEPDILINLYKELIEDQSDISVELKSNFGKTSFLYEALKSGDIDMYPEFTGTIT | 312 |
| | | IAGK+G EP+IL N+YK LIE+ + ++ +K NFGKTSFLYEALK GDID+YPEFTGT+T | |
| Sbjct: | 239 | IAGKIGPEPEILANMYKLLIEENTSMTATVKPNFGKTSFLYEALKKGDIDIYPEFTGTVT | 298 |
| Query: | 313 | SSLLRDKPPLSNDPKQVYEDAKKGIAKQDKLTLLKPFAYQNTYAVAMPEKLAKEYQIETI | 372 |
| | | SLL+ P +S++P+QVY+ A+ GIAKQD L LKP +YQNTYAVA+P+K+A+EY ++TI | |
| Sbjct: | 299 | ESLLQPSPKVSHEPEQVYQVARDGIAKQDHLAYLKPMSYQNTYAVAVPKKIAQEYGLKTI | 358 |
| Query: | 373 | SDLKAHADTLKAGFTLEFKDRADGYKGMQSQYGLQLSVATMEPALRYQAIQSGDIQVTDA | 432 |
| | | SDLK LKAGFTLEF DR DG KG+QS YGL L+VAT+EPALRYQAIQSGDIQ+TDA | |
| Sbjct: | 359 | SDLKKVEGQLKAGFTLEFNDREDGNKGLQSMYGLNLNVATIEPALRYQAIQSGDIQITDA | 418 |
| Query: | 433 | YSTDAEITKYHLKVLKDDKQLFPPYQGAPLMKTSLLTKHPELKGILNQLAGKITEKEMQD | 492 |
| | | YSTDAE+ +Y L+VL+DDKQLFPPYQGAPLMK +LL KHPEL+ +LN LAGKITE +M | |
| Sbjct: | 419 | YSTDAELERYDLQVLEDDKQLFPPYQGAPLMKEALLKKHPELERVLNTLAGKITESQMSQ | 478 |
| Query: | 493 | MNYEVSVKGADANKVARDYLLKTGLIQK | 520 |
| | | +NY+V V+G A +VA+++L + GL++K | |
| Sbjct: | 479 | LNYQVGVEGKSAKQVAKEFLQEQGLLKK | 506 |

[1396] An alignment of the GAS and GBS proteins is shown below:

| Identities = 53/148 (35%), Positives = 93/148 (62%), Gaps = 1/148 (0%) | | | |
|---|---|---|---|
| Query: | 3 | IANVIQTIPSLAMISIIMLGLGLGIKTVVATVFLYSLLPIITNTYTGIRNVDSDLLDAAK | 62 |
| | | + V QTIPSLA++ + + +G+G V + +Y++ PI+ NT TG+ +D L++A | |
| Sbjct: | 69 | VTGVFQTIPSLALLGLFIPLMGIGTLPAVTALVIYAIFPILQNTITGLNGIDPSLVEAGI | 128 |
| Query: | 63 | GMGMTKRQRLFMVELPLSISVIMAGLRNALVVAIGITAIGAFVGGGGLGDIIIRGTNATN | 122 |
| | | GMTK +RL E+P+++ VIM+G+R + V+ IG + + +G GGLG I+ G + N | |
| Sbjct: | 129 | AFGMTKWERLKTFEIPIAMPVIMSGVRTSAVMIIGTATLASLIGAGGLGSFILLGIDRNN | 188 |
| Query: | 123 | GGAIILAGSLPTALMAIFSDLILGGIQR | 150 |
| | | +IL G++ +AL+AI + +L +++ | |
| Sbjct: | 189 | AN-LILIGAISSALLAIIFNSLLQYLEK | 215 |

[1397] Based on this analysis, it was predicted that these proteins and their epitopes could be useful antigens for vaccines or diagnostics.

### EXAMPLE 195

[1398] A DNA sequence (GBSx0201) was identified in S. agalactiae <SEQ ID 637> which encodes the amino acid sequence <SEQ ID 638>. This protein is predicted to be choline transporter-related. Analysis of this protein sequence reveals the following:

| Possible site: 44 | | | | |
|---|---|---|---|---|
| >>> May be a lipoprotein | | | | |
| | INTEGRAL | Likelihood = −3.03 | Transmembrane | 306-322 (306-327) |

```
----- Final Results -----
                              bacterial membrane --- Certainty = 0.2211(Affirmative) < succ>
                                bacterial outside --- Certainty = 0.0000(Not Clear) < succ>
                            bacterial cytoplasm --- Certainty = 0.0000(Not Clear) < succ>
```

[1399] A related GBS nucleic acid sequence <SEQ ID 9517> which encodes amino acid sequence <SEQ ID 9518> was also identified.

[1400] The protein has homology with the following sequences in the GENPEPT database:

| >GP: CAB15386 GB: Z99121 glycine betaine/carnitine/choline ABC | | | |
|---|---|---|---|
| transporter (osmoprotectant-binding protein) [Bacillus subtilis] | | | |
| Identities = 168/303 (55%), Positives = 224/303 (73%), Gaps = 1/303 (0%) | | | |
| Query: | 2 | LKKSHFLQIFTLCLALLTISGCQLTDTKKSGHTTIKVAAQSSTESSIMANIITELIHHEL | 61 |
| | | + K +L F L +L + GC L + TIK+ AQS TES I+AN+I +LI H+ | |
| Sbjct: | 1 | MTKIKWLGAFALVFVML-LGGCSLPGLGGASDDTIKIGAQSMTESEIVANMIAQLIEHDT | 59 |
| Query: | 62 | GYNTTLISNLGSSTVTHQALLRGDADIAATRYTGTDITGTLGLKAVKDPKEASKIVKTEF | 121 |
| | | NT L+ NLGS+ V HQA+L GD DI+ATRY+GTD+T TLG +A KDPK+A IV+ EF | |
| Sbjct: | 60 | DLNTALVKNLGSNYVQHQAMLGGDIDISATRYSGTDLTSTLGKEAEKDPKKALNIVQNEF | 119 |
| Query: | 122 | QKRYNQTWYPTYGFSDTYAFMVTKEFARQNKITKISDLKKLSTTMKAGVDSSWMNREGDG | 181 |
| | | QKR++ W+ +YGF +TYAF VTK+FA + I +SDLKK ++ K GVD++W+ R+GDG | |
| Sbjct: | 120 | QKRFSYKWFDSYGFDNTYAFTVTKKFAEKEHINTVSDLKKNASQYKLGVDNAWLKRKGDG | 179 |
| Query: | 182 | YTDFAKTYGFEFSHIYPMQIGLVYDAVESNKMQSVLGYSTDGRISSYDLEILRDDKKFFP | 241 |
| | | Y F TYGFEF YPMQIGLVYDAV++ KM +VL YSTDGRI +YDL+IL+DDK+FFP | |
| Sbjct: | 180 | YKGFVSTYGFEFGTTYPMQIGLVYDAVKNGKMDAVLAYSTDGRIKAYDLKILKDDKRFFP | 239 |
| Query: | 242 | PYEASMVVNNSIIKKDPKLKKLLHRLDGKINLKTMQNLNYMVDDKLLEPSVVAKQFLEKN | 301 |
| | | PY+ S V+ ++K+ P+L+ ++++L G+I+ +TMQ LNY VD KL EPSVVAK+FLEK+ | |
| Sbjct: | 240 | PYDCSPVIPEKVLKEHPELEGVINKLIGQIDTETMQELNYEVDGKLKEPSVVAKEFLEKH | 299 |
| Query: | 302 | HYF | 304 |
| | | HYF | |
| Sbjct: | 300 | HYF | 302 |

[1401] Based on this analysis, it was predicted that these proteins and their epitopes could be useful antigens for vaccines or diagnostics.

[1402] A related GBS gene <SEQ ID 8511> and protein <SEQ ID 8512> were also identified. Analysis of this protein sequence reveals the following:

| Lipop: Possible site: 22 Crend: 5 | | | |
|---|---|---|---|
| McG: Discrim Score: 10.26 | | | |
| GvH: Signal Score (−7.5): −4.19 | | | |
| Possible site: 44 | | | |
| >>> May be a lipoprotein | | | |
| ALOM program | count: 0 | value: 8.65 | threshold: 0.0 |

PERIPHERAL Likelihood = 8.65 66
modified ALOM score: −2.23
----- Final Results -----
bacterial membrane --- Certainty = 0.0000 (Not Clear) < succ>
bacterial outside --- Certainty = 0.0000 (Not Clear) < succ>
bacterial cytoplasm --- Certainty = 0.0000 (Not Clear) < succ>

[1403] The protein has homology with the following sequences in the databases:

[chemical structure]

[1404] SEQ ID 8512 (GBS23) was expressed in E. coli as a His-fusion product. SDS-PAGE analysis of total cell extract is shown in FIG. 14 (lane 8; MW 35 kDa).

[1405] The GBS23-His fusion product was purified (FIG. 194, lane 9) and used to immunise mice. The resulting antiserum was used for Western blot (FIG. 251). These tests confirm that the protein is immunoaccessible on GBS bacteria.

### EXAMPLE 196

[1406] A DNA sequence (GBSx0202) was identified in S. agalactiae <SEQ ID 639> which encodes the amino acid sequence <SEQ ID 640>. This protein is predicted to be membrane permease OpuCB (opuBB). Analysis of this protein sequence reveals the following:

| Possible site: 34 | | | |
|---|---|---|---|
| >>> Seems to have no N-terminal signal sequence | | | |
| INTEGRAL | Likelihood = −9.66 | Transmembrane | 25-41 (18-45) |
| INTEGRAL | Likelihood = −7.96 | Transmembrane | 182-198 (174-202) |
| INTEGRAL | Likelihood = −4.83 | Transmembrane | 61-77 (57-95) |
| INTEGRAL | Likelihood = −4.09 | Transmembrane | 78-94 (78-95) |
| INTEGRAL | Likelihood = −1.22 | Transmembrane | 134-150 (134-150) |

----- Final Results -----
bacterial membrane --- Certainty = 0.4864 (Affirmative) < succ>
bacterial outside --- Certainty = 0.0000 (Not Clear) < succ>
bacterial cytoplasm --- Certainty = 0.0000 (Not Clear) < succ>

[1407] The protein has homology with the following sequences in the GENPEPT database:

| >GP: AAF91340 GB: AF249729 membrane permease OpuCB [Listeria | | | |
|---|---|---|---|
| monocytogenes] | | | |
| Identities = 121/208 (58%), Positives = 160/208 (76%) | | | |
| Query: | 1 | MVNFLSQYGMQILVKTWEQVYISFFAIALGIAIAVPLGVVLTRFPKVAKIIIAIASMLQT | 60 |
| | | +V F + G +LV+TW+ ++IS A+ LGIA+AVP G++LTR PKVA +I + S+LQT | |
| Sbjct: | 4 | IVTFFQENGHNLLVQTWQHLFISLSAVILGIAVAVPTGILLTRSPKVANFVIGVVSVLQT | 63 |
| Query: | 61 | IPSLALLALMIPLFGIGKIPAIVALFIYSLLPILRNTYIGMNNVNPTLKDCAKGMGMKPI | 120 |
| | | +PSLA+LA +IP G+G +PAI+ALFIY+LLPILRNT+IG+ V+ L + +GMGM | |
| Sbjct: | 64 | VPSLAILAFIIPFLGVGTLPAIIALFIYALLPILRNTFIGVRGVDKNLIESGRGMGMTNW | 123 |
| Query: | 121 | QSIFQVELPLATPIIMAGIRLSTIYVIAWATLASYIGAGGLGDLIFSGLNLFQSKLILGG | 180 |
| | | Q I VE+P + +IMAGIRLS +YVIAWATLASYIGAGGLGD IF+GLNL++ LILGG | |
| Sbjct: | 124 | QLIVNVEIPNSISVIMAGIRLSAVYVIAWATLASYIGAGGLGDFIFNGLNLYRPDLILGG | 183 |
| Query: | 181 | TIPVIILSLIIDYLLGLLETALTPRTTR | 208 |
| | | IPV IL+L++++ LG LE LTP+ R | |
| Sbjct: | 184 | AIPVTILALVVEFALGKLEYRLTPKAIR | 211 |

[1408] A related GBS gene <SEQ ID 8513> and protein <SEQ ID 8514> were also identified. Analysis of this protein sequence reveals the following:

| Lipop: Possible site: −1 Crend: 0 | | | |
|---|---|---|---|
| McG: Discrim Score: −9.08 | | | |
| GvH: Signal Score (−7.5): −1.86 | | | |
| Possible site: 37 | | | |
| >>> Seems to have no N-terminal signal sequence | | | |
| ALOM program | count: 5 | value: −8.60 | threshold: 0.0 |

| | | | |
|---|---|---|---|
| INTEGRAL | Likelihood = −8.60 | Transmembrane | 25-41 (18-45) |
| INTEGRAL | Likelihood = −7.96 | Transmembrane | 182-198 (174-202) |
| INTEGRAL | Likelihood = −4.83 | Transmembrane | 61-77 (57-95) |
| INTEGRAL | Likelihood = −4.09 | Transmembrane | 78-94 (78-95) |
| INTEGRAL | Likelihood = −1.22 | Transmembrane | 134-150 (134-150) |

| | | |
|---|---|---|
| PERIPHERAL | Likelihood = 2.70 | 156 |

modified ALOM score: 2.22
*** Reasoning Step: 3
----- Final Results -----
bacterial membrane --- Certainty = 0.4439 (Affirmative) < succ>
bacterial outside --- Certainty = 0.0000 (Not Clear) < succ>
bacterial cytoplasm --- Certainty = 0.0000 (Not Clear) < succ>

[1409] The protein has homology with the following sequences in the databases:

[chemical structure]

[1410] Based on this analysis, it was predicted that these proteins and their epitopes could be useful antigens for vaccines or diagnostics.

### EXAMPLE 197

[1411] A DNA sequence (GBSx0203) was identified in S. agalactiae <SEQ ID 641> which encodes the amino acid sequence <SEQ ID 642>. Analysis of this protein sequence reveals the following:

Possible site: 46
>>> Seems to have no N-terminal signal sequence
----- Final Results -----
bacterial cytoplasm --- Certainty = 0.3531 (Affirmative) < succ>
bacterial membrane --- Certainty = 0.0000 (Not Clear) < succ>
bacterial outside --- Certainty = 0.0000 (Not Clear) < succ>

[1412] The protein has homology with the following sequences in the GENPEPT database:

| >GP: AAF91339 GB: AF249729 ATPase OpuCA [Listeria monocytogenes] | | | |
|---|---|---|---|
| Identities = 230/380 (60%), Positives = 298/380 (77%), Gaps = 4/380 (1%) | | | |
| Query: | 6 | IIEYQNINKVY-GENVAVEDINLKIYPGDFVCFIGTSGSGKTTLMRMVNHMLKPTNGTLL | 64 |
| | | +++++++ K Y G AV D+ L I G+FVCFIG SG GKTT M+M+N +++PT G + | |
| Sbjct: | 1 | MLKFEHVTKTYKGGKKAVNDLTLNIDKGEFVCFIGPSGCGKTTTMKMINRLIEPTEGKIF | 60 |
| Query: | 65 | FKGKDISTINPIELRRRIGYVIQNIGLMPHMTIYENIVLVPKLLKWSEEAKRAKARELIK | 124 |
| | | KDI +P++LRR IGYVIQ IGLMPHMTI ENIVLVPKLLKWSEE K+ +A+ELIK | |
| Sbjct: | 61 | INDKDIMAEDPVKLRRSIGYVIQQIGLMPHMTIRENIVLVPKLLKWSEEKKQERAKELIK | 120 |
| Query: | 125 | LVELPEEYLDRYPSELSGGQQQRIGVIRALAADQDIILMDEPFGALDPITREGIQDLVKS | 184 |
| | | LV+LPEE+LDRYP ELSGGQQQRIGV+RALAA+Q++ILMDEPFGALDPITR+ +Q+ K+ | |
| Sbjct: | 121 | LVDLPEEFLDRYPYELSGGQQQRIGVLRALAAEQNLILMDEPFGALDPITRDSLQEEFKN | 180 |
| Query: | 185 | LQEEMGKTIILVTHDMDEALKLATKIIVMDNGKMVQEGTPNDLLHHPATSFVEQMIGEER | 244 |
| | | LQ+E+GKTII VTHDMDEA+KLA +I++M +G++VQ TP+++L +PA SFVE IG++R | |
| Sbjct: | 181 | LQKELGKTIIFVTHDMDEAIKLADRIVIMKDGEIVQFDTPDEILRNPANSFVEDFIGKDR | 240 |
| Query: | 245 | LLHAQADITPVKQIMLNNPVSITAEKTLTEAITLMRQKRVDSLLVTDNGKLI-GFIDLES | 303 |
| | | L+ A+ D+T V QIM NPVSITA+K+L AIT+M++KRVD+LLV D G ++ GFID+E | |
| Sbjct: | 241 | LIEAKPDVTQVAQIMNTNPVSITADKSLQAAITVMKEKRVDTLLVVDEGNVLKGFIDVEQ | 300 |
| Query: | 304 | LSSKYKKDRLVSDILKHTDFYVMEDDLLRNTAERILKLGLKYAPVVDHENNLKGIVTRAS | 363 |
| | | + + V DI++ FYV ED LLR+T +RILK G KY PVVD + L GIVTRAS | |
| Sbjct: | 301 | IDLNRRTATSVMDIIEKNVFYVYEDTLLRDTVQRILKRGYKYIPVVDKDKRLVGIVTRAS | 360 |
| Query: | 364 | LVDMLYDIIWGDTE--TEDQ | 381 |
| | | LVD++YD IWG E TE+Q | |
| Sbjct: | 361 | LVDIVYDSIWGTLEDATENQ | 380 |

[1413] A related DNA sequence was identified in S. pyogenes <SEQ ID 643> which encodes the amino acid sequence <SEQ ID 644>. Analysis of this protein sequence reveals the following:

```
Possible site: 39
>>> Seems to have no N-terminal signal sequence
----- Final Results -----
                            bacterial cytoplasm --- Certainty = 0.3619(Affirmative) < succ>
                              bacterial membrane --- Certainty = 0.0000(Not Clear) < succ>
                                bacterial outside --- Certainty = 0.0000(Not Clear) < succ>
```

[1414] An alignment of the GAS and GBS proteins is shown below:

| Identities = 102/237 (43%), Positives = 165/237 (69%), Gaps = 1/237 (0%) | | | |
|---|---|---|---|
| Query: | 6 | IIEYQNINKVYGENVAVEDINLKIYPGDFVCFIGTSGSGKTTLMRMVNHMLKPTNGTLLF | 65 |
| | | +I + N++K +G+ +++ +I +F +G SGSGKTTL++M+N +++P++G +L | |
| Sbjct: | 1 | MIRFNNVSKTFGQTKVLQEQTFQINDREFFVLVGPSGSGKTTLLKMINCLIEPSSGDILL | 60 |
| Query: | 66 | KGKDISTINPIELRRRIGYVIQNIGLMPHMTIYENIVLVPKLLKWSEEAKRAKARELIKL | 125 |
| | | + ++ E+R IGYV+Q I L P++T+ ENI ++P++ +WS E R K EL+ | |
| Sbjct: | 61 | NNVPQTELDLREMRLSIGYVLQQIALFPNLTVAENIAIIPEMKQWSAEEIRQKTEELLDK | 120 |
| Query: | 126 | VELP-EEYLDRYPSELSGGQQQRIGVIRALAADQDIILMDEPFGALDPITREGIQDLVKS | 184 |
| | | V LP ++YLDRYPS+LSGG+QQRIG++RA+ + I+LMDEPF ALDPI+R+ +Q+L+ S | |
| Sbjct: | 121 | VGLPAKDYLDRYPSDLSGGEQQRIGIVRAIISHPKILLMDEPFSALDPISRKQLQELMLS | 180 |
| Query: | 185 | LQEEMGKTIILVTHDMDEALKLATKIIVMDNGKMVQEGTPNDLLHHPATSFVEQMIG | 241 |
| | | L +E TI+ VTHD+DEA+KL ++ +++ G++VQ P + HPA +FV + G | |
| Sbjct: | 181 | LHKEFDMTIVFVTHDIDEAIKLGDRVAILNEGEIVQLDRPEMIKTHPANAFVVNLFG | 237 |

[1415] Based on this analysis, it was predicted that these proteins and their epitopes could be useful antigens for vaccines or diagnostics.

### EXAMPLE 198

[1416] A repeated DNA sequence (GBSx0212) was identified in S. agalactiae <SEQ ID 645> which encodes the amino acid sequence <SEQ ID 646>. Analysis of this protein sequence reveals the following:

```
Possible site: 24
>>> Seems to have no N-terminal signal sequence
----- Final Results -----
                            bacterial cytoplasm --- Certainty = 0.4736(Affirmative) < succ>
                              bacterial membrane --- Certainty = 0.0000(Not Clear) < succ>
                                bacterial outside --- Certainty = 0.0000(Not Clear) < succ>
```

[1417] The protein has no significant homology with any sequences in the GENPEPT database.

[1418] No corresponding DNA sequence was identified in S. pyogenes.

[1419] Based on this analysis, it was predicted that this protein and its epitopes, could be useful antigens for vaccines or diagnostics.

### EXAMPLE 199

[1420] A DNA sequence (GBSx0213) was identified in S. agalactiae <SEQ ID 647> which encodes the amino acid sequence <SEQ ID 648>. Analysis of this protein sequence reveals the following:

| Possible site: 38 | | | | |
|---|---|---|---|---|
| >>> Seems to have no N-terminal signal sequence | | | | |
| | INTEGRAL | Likelihood = −1.06 | Transmembrane | 18-34 (18-34) |

```
----- Final Results -----
                              bacterial membrane --- Certainty = 0.1426(Affirmative) < succ>
                                bacterial outside --- Certainty = 0.0000(Not Clear) < succ>
                            bacterial cytoplasm --- Certainty= 0.0000(Not Clear) < succ>
```

[1421] No corresponding DNA sequence was identified in S. pyogenes.

[1422] A related GBS gene <SEQ ID 8515> and protein <SEQ ID 8516> were also identified. Analysis of this protein sequence reveals the following:

```
Lipop: Possible site: 20 Crend: 5
              Sequence Pattern: CQMN
SRCFLG: 0
McG: Length of UR: 19
          Peak Value of UR: 2.60
          Net Charge of CR: 3
McG: Discrim Score: 7.77
GvH: Signal Score (−7.5): −4.89
          Possible site: 25
>>> May be a lipoprotein
Amino Acid Composition: calculated from 21
ALOM program count: 0 value: 13.21 threshold: 0.0
PERIPHERAL Likelihood = 13.21 115
modified ALOM score: −3.14
*** Reasoning Step: 3
----- Final Results -----
                              bacterial membrane --- Certainty = 0.0000(Not Clear) < succ>
                                bacterial outside --- Certainty = 0.0000(Not Clear) < succ>
                            bacterial cytoplasm --- Certainty = 0.0000(Not Clear) < succ>
```

[1423] The protein has homology with the following sequences in the databases:

[chemical structure]

[1424] SEQ ID 8516 (GBS389) was expressed in E. coli as a His-fusion product. SDS-PAGE analysis of total cell extract is shown in FIG. 74 (lane 6; MW 18 kDa).

[1425] The GBS389-His fusion product was purified (FIG. 214, lane 4) and used to immunise mice. The resulting antiserum was used for FACS (FIG. 313), which confirmed that the protein is immunoaccessible on GBS bacteria.

[1426] Based on this analysis, it was predicted that these proteins and their epitopes could be useful antigens for vaccines or diagnostics.

### EXAMPLE 200

[1427] A DNA sequence (GBSx0214) was identified in S. agalactiae <SEQ ID 649> which encodes the amino acid sequence <SEQ ID 650>. Analysis of this protein sequence reveals the following:

Possible site: 19
>>> Seems to have no N-terminal signal sequence
----- Final Results -----
bacterial cytoplasm --- Certainty = 0.3766 (Affirmative) < succ>
bacterial membrane --- Certainty = 0.0000 (Not Clear) < succ>
bacterial outside --- Certainty = 0.0000 (Not Clear) < succ>

[1428] The protein has no significant homology with any sequences in the GENPEPT database.

[1429] No corresponding DNA sequence was identified in S. pyogenes.

[1430] Based on this analysis, it was predicted that this protein and its epitopes, could be useful antigens for vaccines or diagnostics.

### EXAMPLE 201

[1431] A DNA sequence (GBSx0215) was identified in S. agalactiae <SEQ ID 651> which encodes the amino acid sequence <SEQ ID 652>. Analysis of this protein sequence reveals the following:

Possible site: 46
>>> Seems to have no N-terminal signal sequence
----- Final Results -----
bacterial cytoplasm --- Certainty = 0.3882 (Affirmative) < succ>
bacterial membrane --- Certainty = 0.0000 (Not Clear) < succ>
bacterial outside --- Certainty = 0.0000 (Not Clear) < succ>

[1432] The protein has no significant homology with any sequences in the GENPEPT database.

[1433] No corresponding DNA sequence was identified in S. pyogenes.

[1434] Based on this analysis, it was predicted that this protein and its epitopes, could be useful antigens for vaccines or diagnostics.

### EXAMPLE 202

[1435] A DNA sequence (GBSx0216) was identified in S. agalactiae <SEQ ID 653> which encodes the amino acid sequence <SEQ ID 654>. This protein is predicted to be lectin, alpha subunit precursor. Analysis of this protein sequence reveals the following:

Possible site: 47
>>> Seems to have no N-terminal signal sequence
----- Final Results -----
bacterial cytoplasm --- Certainty = 0.0653 (Affirmative) < succ>
bacterial membrane --- Certainty = 0.0000 (Not Clear) < succ>
bacterial outside --- Certainty = 0.0000 (Not Clear) < succ>

[1436] The protein has no significant homology with any sequences in the GENPEPT database.

[1437] No corresponding DNA sequence was identified in S. pyogenes.

[1438] Based on this analysis, it was predicted that this protein and its epitopes, could be useful antigens for vaccines or diagnostics.

### EXAMPLE 203

[1439] A DNA sequence (GBSx0217) was identified in S. agalactiae <SEQ ID 655> which encodes the amino acid sequence <SEQ ID 656>. Analysis of this protein sequence reveals the following:

```
Possible site: 41
>>> Seems to have no N-terminal signal sequence
----- Final Results -----
                            bacterial cytoplasm --- Certainty = 0.6569(Affirmative) < succ>
                              bacterial membrane --- Certainty = 0.0000(Not Clear) < succ>
                                bacterial outside --- Certainty = 0.0000(Not Clear) < succ>
```

[1440] The protein has no significant homology with any sequences in the GENPEPT database.

[1441] No corresponding DNA sequence was identified in S. pyogenes.

[1442] Based on this analysis, it was predicted that this protein and its epitopes, could be useful antigens for vaccines or diagnostics.

### EXAMPLE 204

[1443] A DNA sequence (GBSx0218) was identified in S. agalactiae <SEQ ID 657> which encodes the amino acid sequence <SEQ ID 658>. Analysis of this protein sequence reveals the following:

```
Possible site: 27
>>> Seems to have no N-terminal signal sequence
----- Final Results -----
                            bacterial cytoplasm --- Certainty = 0.5736(Affirmative) < succ>
                              bacterial membrane --- Certainty = 0.0000(Not Clear) < succ>
                                bacterial outside --- Certainty = 0.0000(Not Clear) < succ>
```

[1444] The protein has no significant homology with any sequences in the GENPEPT database.

[1445] No corresponding DNA sequence was identified in S. pyogenes.

[1446] Based on this analysis, it was predicted that this protein and its epitopes, could be useful antigens for vaccines or diagnostics.

### EXAMPLE 205

[1447] A DNA sequence (GBSx0219) was identified in S. agalactiae <SEQ ID 659> which encodes the amino acid sequence <SEQ ID 660>. Analysis of this protein sequence reveals the following:

| Possible site: 52 | | | | |
|---|---|---|---|---|
| >>> Seems to have an uncleavable N-term signal seq | | | | |
| | INTEGRAL | Likelihood = −13.11 | Transmembrane | 146-162 (138-170) |
| | INTEGRAL | Likelihood = −12.90 | Transmembrane | 13-29 (9-32) |
| | INTEGRAL | Likelihood = −9.50 | Transmembrane | 108-124 (104-129) |
| | INTEGRAL | Likelihood = −7.75 | Transmembrane | 40-56 (33-61) |
| | INTEGRAL | Likelihood = −6.64 | Transmembrane | 177-193 (170-195) |
| | INTEGRAL | Likelihood = −3.35 | Transmembrane | 77-93 (77-97) |

```
----- Final Results -----
                              bacterial membrane --- Certainty = 0.6243(Affirmative) < succ>
                                bacterial outside --- Certainty = 0.0000(Not Clear) < succ>
                            bacterial cytoplasm --- Certainty = 0.0000(Not Clear) < succ>
```

[1448] A related GBS nucleic acid sequence <SEQ ID 8517> which encodes amino acid sequence <SEQ ID 8518> was also identified.

[1449] The protein has no significant homology with any sequences in the GENPEPT database.

[1450] No corresponding DNA sequence was identified in S. pyogenes.

[1451] Based on this analysis, it was predicted that these proteins and their epitopes could be useful antigens for vaccines or diagnostics.

### EXAMPLE 206

[1452] A DNA sequence (GBSx0220) was identified in S. agalactiae <SEQ ID 661> which encodes the amino acid sequence <SEQ ID 662>. Analysis of this protein sequence reveals the following:

```
Possible site: 37
>>> Seems to have no N-terminal signal sequence
----- Final Results -----
                            bacterial cytoplasm --- Certainty = 0.2374(Affirmative) < succ>
                              bacterial membrane --- Certainty = 0.0000(Not Clear) < succ>
                                bacterial outside --- Certainty = 0.0000(Not Clear) < succ>
```

[1453] The protein has homology with the following sequences in the GENPEPT database:

| >GP: AAB89623 GB: AE000990 repressor protein [Archaeoglobus | | | |
|---|---|---|---|
| fulgidus] | | | |
| Identities = 34/62 (54%), Positives = 46/62 (73%) | | | |
| Query: | 11 | LKQVREDIGMTQQELAIRIGVRRETIGHLENNRYNPSLEMALKIVKIFDMKIEDIFQLRK | 70 |
| | | +K+ R MTQ+ELA R+GVRRETI LE +YNPSL++A KI ++F+ KIEDIF + | |
| Sbjct: | 5 | IKEFRAKFNMTQEELAKRVGVRRETIVFLEKGKYNPSLKLAYKIARVFNAKIEDIFIFDE | 64 |
| Query: | 71 | ED | 72 |
| | | E+ | |
| Sbjct: | 65 | EE | 66 |

[1454] There is also homology to SEQ ID 412.

[1455] Based on this analysis, it was predicted that this protein and its epitopes, could be useful antigens for vaccines or diagnostics.

### EXAMPLE 207

[1456] A DNA sequence (GBSx0221) was identified in S. agalactiae <SEQ ID 663> which encodes the amino acid sequence <SEQ ID 664>. Analysis of this protein sequence reveals the following:

Possible site: 36
>>> Seems to have no N-terminal signal sequence
----- Final Results -----
bacterial cytoplasm --- Certainty = 0.3794 (Affirmative) < succ>
bacterial membrane --- Certainty = 0.0000 (Not Clear) < succ>
bacterial outside --- Certainty = 0.0000 (Not Clear) < succ>

[1457] The protein has homology with the following sequences in the GENPEPT database:

| >GP: CAB61817 GB: AL133236 putative acetyl transferase [Streptomyces | | | |
|---|---|---|---|
| coelicolor A3(2)] | | | |
| Identities = 30/97 (30%), Positives = 52/97 (52%), Gaps = 1/97 (1%) | | | |
| Query: | 82 | VGMLNIVTLARADMQWGELGYVFHNQFWSNGYAFESILALLNSTYEKLGFHHIEAQITPG | 141 |
| | | VGM ++ + Q GE+ Y+ H + W G E +LL+ +++ G H I A P | |
| Sbjct: | 72 | VGMGDLHVRSHTQRQ-GEISYIVHPRVWGQGIGTEIGRSLLSLGFDRWGLHRIRATCDPR | 130 |
| Query: | 142 | NERSEKLVRRLGLTYETTRKDFSFENGKWTDKLIYSI | 178 |
| | | N+ S +++ +LG+TYE + ++ W D L++SI | |
| Sbjct: | 131 | NQASSRVLTKLGMTYEGRHRHTAWIRDGWRDSLVFSI | 167 |

[1458] No corresponding DNA sequence was identified in S. pyogenes.

[1459] Based on this analysis, it was predicted that this protein and its epitopes, could be useful antigens for vaccines or diagnostics.

### EXAMPLE 208

[1460] A DNA sequence (GBSx0222) was identified in S. agalactiae <SEQ ID 665> which encodes the amino acid sequence <SEQ ID 666>. This protein is predicted to be p20 protein. Analysis of this protein sequence reveals the following:

Possible site: 44
>>> Seems to have no N-terminal signal sequence
----- Final Results -----
bacterial cytoplasm --- Certainty = 0.1044 (Affirmative) < succ>
bacterial membrane --- Certainty = 0.0000 (Not Clear) < succ>
bacterial outside --- Certainty = 0.0000 (Not Clear) < succ>

[1461] The protein has homology with the following sequences in the GENPEPT database:

| >GP: CAA30415 GB: X07542 P20 (AA 1-178) [Bacillus licheniformis] | | | |
|---|---|---|---|
| Identities = 56/175 (32%), Positives = 94/175 (53%), Gaps = 6/175 (3%) | | | |
| Query: | 16 | TVLTERLRLQPVELTNVNDFLEFSSDSETVFYMQRYKANTVEEAQVVLA---NVCMKSPL | 72 |
| | | T+ TERL L+ +EL + + ++ SD E YM V +A+ ++ ++ ++ | |
| Sbjct: | 3 | TLYTERLTLRKMELEDADVLCQYWSDPEVTKYMNITPFTDVSQARDMIQMINDLSLEGQA | 62 |
| Query: | 73 | GIYAMIEKESQKMIGIIELEIRDEFS--AEFGYILNKNYNGKGYMTEACSKLMSIGFEHL | 130 |
| | | +++I KE+ ++IG + D+ + AE GY L +N+ GKG+ +EA KL+ GF L | |
| Sbjct: | 63 | NRFSIIVKETDEVIGTCGFNMIDQENGRAEIGYDLGRNHWGKGFASEAVQKLIDYGFTSL | 122 |
| Query: | 131 | DLERIYARFDINNKKSGNVMERIGMKKEGELRHLAKNPKGEWKTRAYYSILKEEY | 185 |
| | | +L RI A+ + N S ++ + +KEG LR K KG +S+LK EY | |
| Sbjct: | 123 | NLNRIEAKVEPENTPSIKLLNSLSFQKEGLLRDYEK-AKGRLIDVYMFSLLKREY | 176 |

[1462] Based on this analysis, it was predicted that this protein and its epitopes, could be useful antigens for vaccines or diagnostics.

### EXAMPLE 209

[1463] A DNA sequence (GBSx0223) was identified in S. agalactiae <SEQ ID 669> which encodes the amino acid sequence <SEQ ID 670>. Analysis of this protein sequence reveals the following:

Possible site: 51
>>> Seems to have no N-terminal signal sequence
----- Final Results -----
bacterial cytoplasm --- Certainty = 0.5180 (Affirmative) < succ>
bacterial membrane --- Certainty = 0.0000 (Not Clear) < succ>
bacterial outside --- Certainty = 0.0000 (Not Clear) < succ>

[1464] The protein has homology with the following sequences in the GENPEPT database:

| >GP: CAA87001 GB: Z46902 unknown [Saccharomyces cerevisiae] | | | |
|---|---|---|---|
| Identities = 105/224 (46%), Positives = 148/224 (65%), Gaps = 3/224 (1%) | | | |
| Query: | 1 | MGDVVENFTEGKNPKIDTLNGKTVRIEKINPD-HFEDLFQVYGELSTEDSLTYISFSKFN | 59 |
| | | +G VE +T P+ L G T R+E ++ + H +LF Y E + TY+ F | |
| Sbjct: | 11 | VGADVEGWTTRAFPEKVVLKGNTCRLEPLDRERHGSELFSAYSEAG-QKLWTYLPAGPFT | 69 |
| Query: | 60 | SKNEFDVFFQTLLKSEDPYYLAIVDNNTGKVLGTFSLMRIDTKNRVVEMGWVVYSSKLKQ | 119 |
| | | + E+ F + L +++D AI++ T + +GT L+RID N +E+G+VV+S +L++ | |
| Sbjct: | 70 | NLEEYLEFIKELNETKDTVPFAIINKETERAVGTLCLIRIDEANGSLEVGYVVFSPELQK | 129 |
| Query: | 120 | TRIATEAQYLVMKYVFEELCYRRYEWKCDSLNAPSNNSAKRLGFTFEGTFRQAVVYKGRN | 179 |
| | | T IATEAQ+L+MKYVF++L YRRYEWKCDSLN PS +A RLGF +EGTFRQ VVYKGR | |
| Sbjct: | 130 | TIIATEAQFLLMKYVFDDLQYRRYEWKCDSLNGPSRRAAMRLGFKYEGTFRQVVVYKGRT | 189 |
| Query: | 180 | RDTNWYSILDKEWPEKKTRFEKWLDDSNFAVNGYQIRSLSSIEQ | 223 |
| | | RDT W+SI+DKEW + FE+WLD +NF NG Q R +++I + | |
| Sbjct: | 190 | RDTQWFSIIDKEWLRIRKTFEEWLDKTNFE-NGKQKRGIAAIRE | 232 |

[1465] No corresponding DNA sequence was identified in S. pyogenes.

[1466] Based on this analysis, it was predicted that this protein and its epitopes, could be useful antigens for vaccines or diagnostics.

### EXAMPLE 210

[1467] A DNA sequence (GBSx0224) was identified in S. agalactiae <SEQ ID 671> which encodes the amino acid sequence <SEQ ID 672>. Analysis of this protein sequence reveals the following:

| Possible site: 39 | | | |
|---|---|---|---|
| >>> Seems to have no N-terminal signal sequence | | | |
| INTEGRAL | Likelihood = −12.15 | Transmembrane | 25-41 (20-49) |

----- Final Results -----
bacterial membrane --- Certainty = 0.5861 (Affirmative) < succ>
bacterial outside --- Certainty = 0.0000 (Not Clear) < succ>
bacterial cytoplasm --- Certainty = 0.0000 (Not Clear) < succ>

[1468] The protein has no significant homology with any sequences in the GENPEPT database.

[1469] No corresponding DNA sequence was identified in S. pyogenes.

[1470] A related GBS gene <SEQ ID 8519> and protein <SEQ ID 8520> were also identified. Analysis of this protein sequence reveals the following:

| Lipop: Possible site: −1 Crend: 10 | | | |
|---|---|---|---|
| McG: Discrim Score: −3.31 | | | |
| GvH: Signal Score (−7.5): −4.44 | | | |
| Possible site: 39 | | | |
| >>> Seems to have no N-terminal signal sequence | | | |
| ALOM program | count: 1 | value: −12.15 | threshold: 0.0 |

| | | | |
|---|---|---|---|
| INTEGRAL | Likelihood = −12.15 | Transmembrane | 25-41 (20-49) |

| | | |
|---|---|---|
| PERIPHERAL | Likelihood = 11.94 | 59 |

modified ALOM score: 2.93
*** Reasoning Step: 3
----- Final Results -----
bacterial membrane --- Certainty = 0.5861 (Affirmative) < succ>
bacterial outside --- Certainty = 0.0000 (Not Clear) < succ>
bacterial cytoplasm --- Certainty = 0.0000 (Not Clear) < succ>

[1471] SEQ ID 672 (GBS43) was expressed in E. coli as a His-fusion product. SDS-PAGE analysis of total cell extract is shown in FIG. 5 (lane 4; MW 34 kDa). It was also expressed in E. coli as a GST-fusion product. SDS-PAGE analysis of total cell extract is shown in FIG. 13 (lane 9; MW 58 kDa) and in FIG. 15 (lane 4; MW 59 kDa).

[1472] Based on this analysis, it was predicted that these proteins and their epitopes could be useful antigens for vaccines or diagnostics.

### EXAMPLE 211

[1473] A DNA sequence (GBSx0225) was identified in S. agalactiae <SEQ ID 673> which encodes the amino acid sequence <SEQ ID 674>. Analysis of this protein sequence reveals the following:

Possible site: 32
>>> May be a lipoprotein
----- Final Results -----
bacterial membrane --- Certainty = 0.0000 (Not Clear) < succ>
bacterial outside --- Certainty = 0.0000 (Not Clear) < succ>
bacterial cytoplasm --- Certainty = 0.0000 (Not Clear) < succ>

[1474] A related GBS nucleic acid sequence <SEQ ID 9519> which encodes amino acid sequence <SEQ ID 9520> was also identified.

[1475] The protein has no significant homology with any sequences in the GENPEPT database.

[1476] No corresponding DNA sequence was identified in S. pyogenes.

[1477] Based on this analysis, it was predicted that these proteins and their epitopes could be useful antigens for vaccines or diagnostics.

### EXAMPLE 212

[1478] A DNA sequence (GBSx0226) was identified in S. agalactiae <SEQ ID 675> which encodes the amino acid sequence <SEQ ID 676>. Analysis of this protein sequence reveals the following:

| Possible site: 44 | | | |
|---|---|---|---|
| >>> Seems to have no N-terminal signal sequence | | | |
| INTEGRAL | Likelihood = −1.54 | Transmembrane | 165-181 (164-181) |
| INTEGRAL | Likelihood = −0.85 | Transmembrane | 67-83 (67-84) |

----- Final Results -----
bacterial membrane --- Certainty = 0.1617 (Affirmative) < succ>
bacterial outside --- Certainty = 0.0000 (Not Clear) < succ>
bacterial cytoplasm --- Certainty = 0.0000 (Not Clear) < succ>

[1479] The protein has homology with the following sequences in the GENPEPT database:

| >GP: CAA82211 GB: Z28353 similar to a B. subtilis gene (GB: | | | |
|---|---|---|---|
| BACHEMEHY_5) [Clostridium pasteurianum] | | | |
| Identities = 40/185 (21%), Positives = 87/185 (46%), Gaps = 6/185 (3%) | | | |
| Query: | 18 | MPKGKQKVILSAIELFASQGFHGTSTAQLAKNAEVSQATIYKYFETKDKLLVFILELIVQ | 77 |
| | | M K K + SAI++F++ G++G + ++A NA V++ T+Y +F++K+++ +I+E V | |
| Sbjct: | 1 | MNKTKDNIFYSAIKVFSNNGYNGATMDEIASNAGVAKGTLYYHFKSKEEIFKYIIEEGVN | 60 |
| Query: | 78 | TIGRPFFTELSTFSTKEELIHFFVQDRFKFIEKNNDLIKILMQELLINSETSTIFTKLIN | 137 |
| | | + T E + + + I KN D K++ +L ++ | |
| Sbjct: | 61 | LMKNEIDEATDKEKTALEKLKAVCRVQLNLIYKNRDFFKVIASQLWGKELRQLELRDIMR | 120 |
| Query: | 138 | STDPNITKIFNCLSEGNSL---NKMEILRAVIGQFITFFIQLY-ILNIKPENLEEELKQI | 193 |
| | | + +I + E S+ N + + A +G + + LY ++N + +N+ ++ + | |
| Sbjct: | 121 | NYVVHIEEFVKDAMEAGSIKKGNSLFVAYAFLGTLCS--VSLYEVINAENDNINNTIENL | 178 |
| Query: | 194 | EKQIL | 198 |
| | | IL | |
| Sbjct: | 179 | MNYIL | 183 |

[1480] No corresponding DNA sequence was identified in S. pyogenes.

[1481] Based on this analysis, it was predicted that this protein and its epitopes, could be useful antigens for vaccines or diagnostics.

### EXAMPLE 213

[1482] A DNA sequence (GBSx0227) was identified in S. agalactiae <SEQ ID 677> which encodes the amino acid sequence <SEQ ID 678>. Analysis of this protein sequence reveals the following:

```
Possible site: 24
>>> Seems to have no N-terminal signal sequence
----- Final Results -----
                            bacterial cytoplasm --- Certainty = 0.2389(Affirmative) < succ>
                              bacterial membrane --- Certainty = 0.0000(Not Clear) < succ>
                                bacterial outside --- Certainty = 0.0000(Not Clear) < succ>
```

[1483] The protein has no significant homology with any sequences in the GENPEPT database.

[1484] No corresponding DNA sequence was identified in S. pyogenes.

[1485] Based on this analysis, it was predicted that this protein and its epitopes, could be useful antigens for vaccines or diagnostics.

### EXAMPLE 214

[1486] A DNA sequence (GBSx0228) was identified in S. agalactiae <SEQ ID 679> which encodes the amino acid sequence <SEQ ID 680>. Analysis of this protein sequence reveals the following:

| Possible site: 43 | | | | |
|---|---|---|---|---|
| >>> Seems to have no N-terminal signal sequence | | | | |
| | INTEGRAL | Likelihood = −13.32 | Transmembrane | 341-357 (333-361) |
| | INTEGRAL | Likelihood = −10.93 | Transmembrane | 253-269 (238-277) |
| | INTEGRAL | Likelihood = −10.77 | Transmembrane | 172-188 (166-196) |
| | INTEGRAL | Likelihood = −8.01 | Transmembrane | 225-241 (215-251) |
| | INTEGRAL | Likelihood = −7.01 | Transmembrane | 21-37 (18-42) |
| | INTEGRAL | Likelihood = −2.66 | Transmembrane | 285-301 (283-301) |

```
----- Final Results -----
                              bacterial membrane --- Certainty = 0.6328(Affirmative) < succ>
                                bacterial outside --- Certainty = 0.0000(Not Clear) < succ>
                            bacterial cytoplasm --- Certainty = 0.0000(Not Clear) < succ>
```

[1487] The protein has homology with the following sequences in the GENPEPT database:

| >GP: CAB42664 GB: AL049819 putative integral membrane protein | | | |
|---|---|---|---|
| [Streptomyces coelicolor A3(2)] | | | |
| Identities = 60/156 (38%), Positives = 101/156 (64%), Gaps = 1/156 (0%) | | | |
| Query: | 176 | LMGFMVFFFVFLISGMALLKERTSGTLDRLLATPVKRSDIVFGYMLSYGILAIIQTIVIV | 235 |
| | | L+G +FL++ +A L+ERTSGTL+RLLA P+ + D++ GY L++G LAI+Q+ + | |
| Sbjct: | 77 | LLGIFPLITMFLVTSIATLRERTSGTLERLLAMPLGKGDLIAGYALAFGALAIVQSALAT | 136 |
| Query: | 236 | LSTIWLLDIQVVGSIFSVIIVNFILALVALSLGILMSTLAKSEFQMMQFIPLIIMPQLFF | 295 |
| | | +W L + V GS + +++V + AL+ +LG+ +S A SEFQ +QF+P +I PQL | |
| Sbjct: | 137 | GLAVWFLGLDVTGSPWLLLLVALLDALLGTALGLFVSAFAASEFQAVQFMPAVIFPQLLL | 196 |
| Query: | 296 | SGII-PLENMASWAQTVGKILPLSYSGDALTKIIMY | 330 |
| | | G+ P +NM + V +LP+SY+ D + +++ + | |
| Sbjct: | 197 | CGLFTPRDNMHPALEAVSDVLPMSYAVDGMNEVLRH | 232 |

[1488] There is also homology to a DNA sequence which was identified in S. pyogenes <SEQ ID 681> which encodes the amino acid sequence <SEQ ID 682>. Analysis of this protein sequence reveals the following:

| Possible site: 39 | | | | |
|---|---|---|---|---|
| >>> Seems to have no N-terminal signal sequence | | | | |
| | INTEGRAL | Likelihood = −11.41 | Transmembrane | 263-279 (246-284) |
| | INTEGRAL | Likelihood = −7.70 | Transmembrane | 231-247 (224-258) |
| | INTEGRAL | Likelihood = −4.99 | Transmembrane | 20-36 (18-39) |
| | INTEGRAL | Likelihood = −3.72 | Transmembrane | 349-365 (345-368) |
| | INTEGRAL | Likelihood = −3.45 | Transmembrane | 187-203 (182-204) |

```
----- Final Results -----
                              bacterial membrane --- Certainty = 0.5564(Affirmative) < succ>
                                bacterial outside --- Certainty = 0.0000(Not Clear) < succ>
                            bacterial cytoplasm --- Certainty = 0.0000(Not Clear) < succ>
```

[1489] The protein has homology with the following sequences in the databases:

| >GP: CAB12662 GB: Z99108 similar to ABC transporter (ATP-binding | | | |
|---|---|---|---|
| protein) [Bacillus subtilis] | | | |
| Identities = 92/369 (24%), Positives = 180/369 (47%), | | | |
| Gaps = 25/369 (6%) | | | |
| Query: | 12 | IKRKKTSYVTFFLMPILTTLLALSLSFSNNNQAKIGILDKDNSQISKQFIAQLKQNKKYD | 71 |
| | | I +K +Y+ F P+L T + S+ N+++ ++ I+D+D++ +S+ +I QLK + | |
| Sbjct: | 15 | IFKKPQNYLIMFAAPLLLTFVFGSMLSGNDDKVRLAIVDQDDTILSQHYIRQLKAHDDMY | 74 |
| Query: | 72 | IFTKIKKEHIDHYLQDKSLEAVLTIDKGFSDKVLQGKSQKLNIRSIANSEITEWVKAQTN | 131 |
| | | +F + + L+ K + ++ I + F ++ +GK +L R VK | |
| Sbjct: | 75 | VFENMSESKASEKLKQKKIAGIIVISRSFQTQLEKGKHPELIFRHGPELSEAPMVKQYAE | 134 |
| Query: | 132 | YLLENYNIIGDVALGNEDTFNR---------ILQKNQQLNYDVKQVTLTDRSRSKAVSST | 182 |
| | | L NI A T +K++ + V + TL+D+ S T | |
| Sbjct: | 135 | SALATLNIQVTAAKTASQTAGENWKAAYKTVFAKKHEDIVPAVTRQTLSDKKEGAEASDT | 194 |
| Query: | 183 | TT---GFLLILMLGSTSVIYSGILADKSSQLYHRLMLSNLSRFR----YMLSYVCVGFVA | 235 |
| | | + GF ++ ++ + IL + + ++ RL+ +++SR Y+LS+ +G++ | |
| Sbjct: | 195 | ASRAAGFSILFVMLTMMGAAGTILEARKNGVWSRLLTASVSRAEIGAGYVLSFFVIGWIQ | 254 |
| Query: | 236 | FTIQIVIMLSLLKVFNISFFVPTSLLLIIFFLFSLLAIGFGLLIGAITQNSQQSSQLANL | 295 |
| | | F I ++LS +F I++ P ++++++ LF L +G GL+I A + +Q NL | |
| Sbjct: | 255 | FGI---LLLSTHWLFGINWGNPAAVIVLVS-LFLLTVVGIGLMIAANVRTPEQQLAFGNL | 310 |
| Query: | 296 | IVMPTSMLAGCLWPLSITPSYMQAIGKLLPQNWVLSAIA-IFQSGGTLSQAWPYLLALMG | 354 |
| | | V+ T M++G WP+ I P +MQ+I + LPQ W +S + I +G ++ +L + G | |
| Sbjct: | 311 | FVIATCMVSGMYWPIDIEPKFMQSIAEFLPQKWAMSGLTEIIANGARVTD----ILGICG | 366 |
| Query: | 355 | TALALISFS | 363 |
| | | LA + + | |
| Sbjct: | 367 | ILLAFAAIT | 375 |

[1490] An alignment of the GAS and GBS proteins is shown below:

| Identities = 92/375 (24%), Positives = 164/375 (43%), | | | |
|---|---|---|---|
| Gaps = 66/375 (17%) | | | |
| Query: | 11 | IKELF----RDKRTLAMMFLAPILIMFLMNVMFSANSNTKVKIGTINVNTKVVSNLDNIK | 66 |
| | | IK LF R K + FL PIL L+ + S ++N + KIG ++ + +S | |
| Sbjct: | 5 | IKTLFVKIKRKKTSYVTFFLMPILTT-LLALSLSFSNNNQAKIGILDKDNSQISK----- | 58 |
| Query: | 67 | HIQVRSFKFNSSAKKALKSNKIDALISEDNKSYTVFYANTDSSKTTLT-RQAFKTAVNTM | 125 |
| | | +F + LK NK + ++ K + Y S + LT + F V | |
| Sbjct: | 59 | -------QFIAQ----LKQNKKYDIFTKIKKEHIDHYLQDKSLEAVLTIDKGFSDKVLQG | 107 |
| Query: | 126 | NSKELISQVKILANKNPKLAQSLQTRSKYIKEKYNY------GNKNT-----------GF | 168 |
| | | S++L I + N ++ + ++ ++ Y+ E YN GN++T + | |
| Sbjct: | 108 | KSQKL----NIRSIANSEITEWVKAQTNYLLENYNIIGDVALGNEDTFNRILQKNQQLNY | 163 |
| Query: | 169 | FAKMIPIL------------MGFMVFFFVFLISGM--ALLKERTSGTLDRLLATPVKRSD | 214 |
| | | K + + GF++ + S + +L +++S RL+ + + R | |
| Sbjct: | 164 | DVKQVTLTDRSRSKAVSSTTTGFLLILMLGSTSVIYSGILADKSSQLYHRLMLSNLSR-- | 221 |
| Query: | 215 | IVFGYMLSY---GILAIIQTIVIVLSTIWLLDIQVVGSIFSVIIVNFILALVALSLGILM | 271 |
| | | F YMLSY G +A IVI+LS + + +I ++I+ F+ +L+A+ G+L+ | |
| Sbjct: | 222 | --FRYMLSYVCVGFVAFTIQIVIMLSLLKVFNISFFVPTSLLLIIFFLFSLLAIGFGLLI | 279 |
| Query: | 272 | STLAKSEFQMMQFIPLIIMPQLFFSGII-PLENMASWAQTVGKILPLSYSGDALTKIIMY | 330 |
| | | + ++ Q Q LI+MP +G + PL S+ Q +GK+LP ++ A+ I | |
| Sbjct: | 280 | GAITQNSQQSSQLANLIVMPTSMLAGCLWPLSITPSYMQAIGKLLPQNWVLSAIA-IFQS | 338 |
| Query: | 331 | GQGLPNVSSNLLVLL | 345 |
| | | G L LL L+ | |
| Sbjct: | 339 | GGTLSQAWPYLLALM | 353 |

[1491] A further related DNA sequence was identified in S. pyogenes <SEQ ID 9081> which encodes the amino acid sequence <SEQ ID 9082>. Analysis of this protein sequence reveals the following:

| Possible site: 38 | | | | |
|---|---|---|---|---|
| >>> Seems to have an uncleavable N-term signal seq | | | | |
| | INTEGRAL | Likelihood = −12.52 | Transmembrane | 21-37 (17-43) |
| | INTEGRAL | Likelihood = −10.30 | Transmembrane | 351-367 (346-371) |
| | INTEGRAL | Likelihood = −5.36 | Transmembrane | 262-278 (260-285) |
| | INTEGRAL | Likelihood = −2.60 | Transmembrane | 288-304 (288-305) |
| | INTEGRAL | Likelihood = −1.81 | Transmembrane | 229-245 (229-246) |

```
----- Final Results -----
                              bacterial membrane --- Certainty = 0.6010(Affirmative) < succ>
                                bacterial outside --- Certainty = 0.0000(Not Clear) < succ>
                            bacterial cytoplasm --- Certainty = 0.0000(Not Clear) < succ>
```

[1492] An alignment of the GAS and GBS sequences follows:

| Score = 62.5 bits (149), Expect = 9e−12 | | | |
|---|---|---|---|
| Identities = 72/382 (18%), Positives = 166/382 (42%), Gaps = 32/382 (8%) | | | |
| Query: | 1 | MVLFHLIKKESLQIFRNRTALLMMVIFPILMIVILSFAFKSSFNTATTVPKLTIRYQLEG | 60 |
| | | M + + +K ++FR++ L MM + PIL++ +++ F ++ NT + + + ++ | |
| Sbjct: | 1 | MRIIAITEKVIKELFRDKRTLAMMFLAPILIMFLMNVMFSANSNTKVKIGTINVNTKVVS | 60 |
| Query: | 61 | EKTDYQKNFLAFLKVLNQKLHLETKPSNSLEKDRQRVSEGALTAVLEVKKNQTIKVITNN | 120 |
| | | L+ H++ + ++ + + A++ + N++ V N | |
| Sbjct: | 61 | N--------------LDNIKHIQVRSFKFNSSAKKALKSNKIDALIS-EDNKSYTVFYAN | 105 |
| Query: | 121 | INQQNADLINMLVKNYVDNAKTYDSIAALY------PQQLNHIRKRSVDYVKVSSIQTSK | 174 |
| | | + L K V+ + + I+ + P+ ++ RS Y+K + + | |
| Sbjct: | 106 | TDSSKTTLTRQAFKTAVNTMNSKELISQVKILANKNPKLAQSLQTRS-KYIKE---KYNY | 161 |
| Query: | 175 | GMTSADYYA----ISMFTMITFYSMMSAMNLVLSDRQQRITNRIHLTGVSPSFLVFGKLI | 230 |
| | | G + ++A I M M+ F+ + + +L +R +R+ T V S +VFG ++ | |
| Sbjct: | 162 | GNKNTGFFAKMIPILMGFMVFFFVFLISGMALLKERTSGTLDRLLATPVKRSDIVFGYML | 221 |
| Query: | 231 | GAMLATTVQLSLLYIFTRFVLRVNWGTNEWMLIGITASLVYLSVAIGIGLGISIKNEAFL | 290 |
| | | + +Q ++ + T ++L + + + +I + L +++++GI + K+E + | |
| Sbjct: | 222 | SYGILAIIQTIVIVLSTIWLLDIQVVGSIFSVIIVNFILALVALSLGILMSTLAKSEFQM | 281 |
| Query: | 291 | TVASNTIIPIFAFLGGSYVPLTTLHSSIINQLSNISPIKWVNDSLFYLIFGGQYNP-IPV | 349 |
| | | II F G +PL + +S + I P+ + D+L +I GQ P + | |
| Sbjct: | 282 | MQFIPLIIMPQLFFSG-IIPLENM-ASWAQTVGKILPLSYSGDALTKIIMYGQGLPNVSS | 339 |
| Query: | 350 | TLIVNISIGTIFIILALIGMRK | 371 |
| | | L+V + I I + G+++ | |
| Sbjct: | 340 | NLLVLLLFLIILTIANIFGLKR | 361 |

[1493] Based on this analysis, it was predicted that these proteins and their epitopes could be useful antigens for vaccines or diagnostics.

### EXAMPLE 215

[1494] A DNA sequence (GBSx0229) was identified in S. agalactiae <SEQ ID 683> which encodes the amino acid sequence <SEQ ID 684>. This protein is predicted to be CG1718 gene product (b0794). Analysis of this protein sequence reveals the following:

| Possible site: 61 | | | | |
|---|---|---|---|---|
| >>> Seems to have no N-terminal signal sequence | | | | |
| | INTEGRAL | Likelihood = −1.17 | Transmembrane | 118-134 (117-134) |

```
----- Final Results -----
                              bacterial membrane --- Certainty = 0.1468(Affirmative) < succ>
                                bacterial outside --- Certainty = 0.0000(Not Clear) < succ>
                            bacterial cytoplasm --- Certainty = 0.0000(Not Clear) < succ>
```

[1495] A related GBS nucleic acid sequence <SEQ ID 8521> which encodes amino acid sequence <SEQ ID 8522> was also identified. Analysis of this protein sequence reveals the following:

| Lipop: Possible site: −1 Crend: 8 | | | | |
|---|---|---|---|---|
| McG: Discrim Score: −10.96 | | | | |
| GvH: Signal Score (−7.5): −4.84 | | | | |
| Possible site: 15 | | | | |
| >>> Seems to have no N-terminal signal sequence | | | | |
| ALOM program count: 1 value: −1.17 threshold: 0.0 | | | | |
| | INTEGRAL | Likelihood = −1.17 | Transmembrane | 142-158 (141-158) |
| | PERIPHERAL | Likelihood = 4.98 | 197 | |

```
modified ALOM score: 0.73
*** Reasoning Step: 3
----- Final Results -----
                              bacterial membrane --- Certainty = 0.1468(Affirmative) < succ>
                                bacterial outside --- Certainty = 0.0000(Not Clear) < succ>
                            bacterial cytoplasm --- Certainty = 0.0000(Not Clear) < succ>
```

[1496] The protein has homology with the following sequences in the GENPEPT database:

| >GP: AAF50837 GB: AE003568 CG1718 gene product [Drosophila melanogaster] | | | |
|---|---|---|---|
| Identities = 80/204 (39%), Positives = 123/204 (60%), Gaps = 3/204 (1%) | | | |
| Query: | 7 | EIIGLIGPSGAGKSTLIKTMLGMEKADKGTALV--LDTQMPDRNILNQIGYMAQSDALYE | 64 |
| | | E GL+G +GAGK+T K M G E+ G A V L + +I IGY Q DAL + | |
| Sbjct: | 1394 | ECFGLLGVNGAGKTTTFKMMTGDERISSGAAYVQGLSLESNMNSIYKMIGYCPQFDALLD | 1453 |
| Query: | 65 | SLTGLENLLFFGKMKGIQKTELKQQITHISKVVDLENQLDKFVSGYSGGMKRRLSLAIAL | 124 |
| | | LTG E L F ++G+Q++ ++Q ++K +DK YSGG KR+LS AIA+ | |
| Sbjct: | 1454 | DLTGREVLRIFCMLRGVQESRIRQLSEDLAKSFGFMKHIDKQTHAYSGGNKRKLSTAIAV | 1513 |
| Query: | 125 | LGNPTVLILDEPTVGIDPSLRRKIWQELINIKDEGHSIFITTHVMDEAE-LTSKVALLLR | 183 |
| | | +G+P+V+ LDEPT G+DP+ RR++W + I+D G SI +T+H M+E E L +++A+++ | |
| Sbjct: | 1514 | IGSPSVIYLDEPTTGMDPAARRQLWNMVCRIRDSGKSIVLTSHSMEECEALCTRLAIMVN | 1573 |
| Query: | 184 | GNIIAFDTPLHLKKQFNVSTIEEV | 207 |
| | | G + HLK +F+ I ++ | |
| Sbjct: | 1574 | GEFKCIGSTQHLKNKFSKGLILKI | 1597 |
| Identities = 73/216 (33%), Positives = 128/216 (58%), Gaps = 9/216 (4%) | | | |
| Query: | 1 | MEVFKGEIIGLIGPSGAGKSTLIKTMLGMEKADKGTALV--LDTQMPDRNILNQIGYMAQ | 58 |
| | | M +F+ EI L+G +GAGK+T I + GM GTA++ D + +G Q | |
| Sbjct: | 536 | MNMFEDEITVLLGHNGAGKTTTISMLTGMFPPTSGTAIINGSDIRTNIEGARMSLGICPQ | 595 |
| Query: | 59 | SDALYESLTGLENLLFFGKMKGIQKTELKQQITHISKVVDLENQLDKFVSGYSGGMKRRL | 118 |
| | | + L++ ++ ++ FF +MKG++ ++Q++ K+++LE++ + S SGGMKR+L | |
| Sbjct: | 596 | HNVLFDEMSVSNHIRFFSRMKGLRGKAVEQEVAKYLKMIELEDKANVASSKLSGGMKRKL | 655 |
| Query: | 119 | SLAIALLGNPTVLILDEPTVGIDPSLRRKIWQELINIKDEGHSIFITTHVMDEAE-LTSK | 177 |
| | | S+ AL G+ V++ DEP+ G+DPS RR++W +L+ + G ++ +TTH MDEA+ L + | |
| Sbjct: | 656 | SVCCALCGDTKVVLCDEPSSGMDPSARRQLW-DLLQQEKVGRTLLLTTHFMDEADVLGDR | 714 |
| Query: | 178 | VALLLRGNIIAFDTPLHLKKQFN-----VSTIEEVF | 208 |
| | | +A++ G + T LKKQ+ VS ++ +F | |
| Sbjct: | 715 | IAIMCDGELKCQGTSFFLKKQYGSGYRLVSGVQNLF | 750 |

[1497] A related DNA sequence was identified in S. pyogenes <SEQ ID 685> which encodes the amino acid sequence <SEQ ID 686>. Analysis of this protein sequence reveals the following:

| Possible site: 59 | | | | |
|---|---|---|---|---|
| >>> Seems to have no N-terminal signal sequence | | | | |
| | INTEGRAL | Likelihood = −0.43 | Transmembrane | 49-65 (49-65) |

```
----- Final Results -----
                              bacterial membrane --- Certainty = 0.1171(Affirmative) < succ>
                                bacterial outside --- Certainty = 0.0000(Not Clear) < succ>
                            bacterial cytoplasm --- Certainty = 0.0000(Not Clear) < succ>
```

[1498] The protein has homology with the following sequences in the databases:

| >GP: CAB12660 GB: Z99108 similar to ABC transporter (ATP-binding | | | |
|---|---|---|---|
| protein) [Bacillus subtilis] | | | |
| Identities = 151/316 (47%), Positives = 202/316 (63%), Gaps = 18/316 (5%) | | | |
| Query: | 4 | VQLTNVVKSYKNGKKA-VNDVSLSIEAGNIYGLLGPNGAGKSTLINLILGLIPLSSGKIT | 62 |
| | | +Q N+ K+Y GKK V +S S++ G +GLLGPNGAGKST I++I GL+P SG IT | |
| Sbjct: | 2 | LQAENIKKAY--GKKTIVKGISFSLKKGESFGLLGPNGAGKSTTISMISGLVPHDSGNIT | 59 |
| Query: | 63 | VLGQS-QKTIRKISSQIGYVPQDIAVYPDLTAYENVELFGSLYGLKGAQLKKQVLKSLEF | 121 |
| | | V G K K +IG VPQ+IA+YP LTA+EN+ +G +YGL + KK+ + LE+ | |
| Sbjct: | 60 | VGGYVIGKETAKAKQKIGIVPQEIALYPTLTAHENLMFWGKMYGLTHDEAKKRAAEVLEY | 119 |
| Query: | 122 | VGLHSQAKQFPSQFSGGMKRRLNIACALVHSPKLIIFDEPTVGIDPQSRNHILESIRLLN | 181 |
| | | VGL +AK FSGGMKRR+NI AL+H P+L+I DEPTVGIDPQSRNHILE+++ LN | |
| Sbjct: | 120 | VGLTERAKDKIETFSGGMKRRINIGAALMHKPELLIMDEPTVGIDPQSRNHILETVKQLN | 179 |
| Query: | 182 | KEGATVIYTTHYMEEVEALCDYIFIMDHGQVIEEGPKFELEKRYVANLANQIIVTLTDSR | 241 |
| | | + G TVIYT+HYMEEVE LCD I I+D G++I G K +L R + Q+ V+ + | |
| Sbjct: | 180 | ETGMTVIYTSHYMEEVEFLCDRIGIIDQGEMIAIGTKTDLCSRLGGDTIIQLTVSGINEA | 239 |
| Query: | 242 | HL----ELADKPDWSLIEDGEKLMLKIDNSD------MTSVVHQLTQANITFSEIRHNHL | 291 |
| | | L LA D ++ E L LKID S +TS++ + T +I ++ | |
| Sbjct: | 240 | FLVAIRSLAHVNDVTVHE----LELKIDISAAHHEKVVTSLLAEATAHHINLLSLQVQEP | 295 |
| Query: | 292 | NLEEIFLHLTGKKLRD | 307 |
| | | NLE +FL+LTG+ LRD | |
| Sbjct: | 296 | NLERLFLNLTGRTLRD | 311 |

[1499] An alignment of the GAS and GBS proteins is shown below:

| Identities = 81/211 (38%), Positives = 125/211 (58%), Gaps = 2/211 (0%) | | | |
|---|---|---|---|
| Query: | 1 | MEVFKGEIIGLIGPSGAGKSTLIKTMLGMEKADKGTALVL-DTQMPDRNILNQIGYMAQS | 59 |
| | | + + G I GL+GP+GAGKSTLI +LG+ G VL +Q R I +QIGY+ Q | |
| Sbjct: | 25 | LSIEAGNIYGLLGPNGAGKSTLINLILGLIPLSSGKITVLGQSQKTIRKISSQIGYVPQD | 84 |
| Query: | 60 | DALYESLTGLENLLFFGKMKGIQKTELKQQITHISKVVDLENQLDKFVSGYSGGMKRRLS | 119 |
| | | A+Y LT EN+ FG + G++ +LK+Q+ + V L +Q +F S +SGGMKRRL+ | |
| Sbjct: | 85 | IAVYPDLTAYENVELFGSLYGLKGAQLKKQVLKSLEFVGLHSQAKQFPSQFSGGMKRRLN | 144 |
| Query: | 120 | LAIALLGNPTVLILDEPTVGIDPSLRRKIWQELINIKDEGHSIFITTHVMDEAE-LTSKV | 178 |
| | | +A AL+ +P ++I DEPTVGIDP R I + + + EG ++ TTH M+E E L + | |
| Sbjct: | 145 | IACALVHSPKLIIFDEPTVGIDPQSRNHILESIRLLNKEGATVIYTTHYMEEVEALCDYI | 204 |
| Query: | 179 | ALLLRGNIIAFDTPLHLKKQFNVSTIEEVFL | 209 |
| | | ++ G +I L+K++ + ++ + | |
| Sbjct: | 205 | FIMDHGQVIEEGPKFELEKRYVANLANQIIV | 235 |

[1500] SEQ ID 8522 (GBS391) was expressed in E. coli as a His-fusion product. SDS-PAGE analysis of total cell extract is shown in FIG. 74 (lane 7; MW 30 kDa). It was also expressed in E. coli as a GST-fusion product. SDS-PAGE analysis of total cell extract is shown in FIG. 83 (lane 4; MW 55 kDa).

[1501] GBS391-GST was purified as shown in FIG. 217, lane 3.

[1502] Based on this analysis, it was predicted that these proteins and their epitopes could be useful antigens for vaccines or diagnostics.

### EXAMPLE 216

[1503] A DNA sequence (GBSx0230) was identified in S. agalactiae <SEQ ID 687> which encodes the amino acid sequence <SEQ ID 688>. Analysis of this protein sequence reveals the following:

```
Possible site: 13
>>> Seems to have no N-terminal signal sequence
----- Final Results -----
                            bacterial cytoplasm --- Certainty = 0.6732(Affirmative) < succ>
                              bacterial membrane --- Certainty = 0.0000(Not Clear) < succ>
                                bacterial outside --- Certainty = 0.0000(Not Clear) < succ>
```

[1504] The protein has no significant homology with any sequences in the GENPEPT database.

[1505] No corresponding DNA sequence was identified in S. pyogenes.

[1506] Based on this analysis, it was predicted that this protein and its epitopes, could be useful antigens for vaccines or diagnostics.

### EXAMPLE 217

[1507] A repeated DNA sequence (GBSx0231) was identified in S. agalactiae <SEQ ID 689> which encodes the amino acid sequence <SEQ ID 690>. This protein is predicted to be ISL2 protein. Analysis of this protein sequence reveals the following:

```
Possible site: 58
>>> Seems to have an uncleavable N-term signal seq
----- Final Results -----
                              bacterial membrane --- Certainty = 0.0000(Not Clear) < succ>
                                bacterial outside --- Certainty = 0.0000(Not Clear) < succ>
                            bacterial cytoplasm --- Certainty = 0.0000(Not Clear) < succ>
```

[1508] The protein has homology with the following sequences in the GENPEPT database:

| >GP: CAC18596 GB: AJ278419 IS1381 transposase [Streptococcus pneumoniae] | | | |
|---|---|---|---|
| Identities = 111/129 (86%), Positives = 117/129 (90%) | | | |
| Query: | 1 | MKAQAIVTSQGRIVSLDIAVNYCHDMKLFKMSRRNIGQAAKILADSGYQGIMKMYSQAQT | 60 |
| | | MK QAIVTSQGRIVSLDI VNYCHDMKLFKMSRRNIGQA KILADSGYQG+MK+Y QAQT | |
| Sbjct: | 1 | MKTQAIVTSQGRIVSLDITVNYCHDMKLFKMSRRNIGQAGKILADSGYQGLMKIYPQAQT | 60 |
| Query: | 61 | PRKSSKLKPLTLEDKTYNHTLSKERIKVENIFAKVKTFKIFSTTYRNRRKRFGLRMNLIA | 120 |
| | | RKSSKLKPLT+EDK NH LSKER KVENIFAKVKTFK+FSTTYR+ RKRFGLRMNL A | |
| Sbjct: | 61 | SRKSSKLKPLTVEDKACNHALSKERSKVENIFAKVKTFKMFSTTYRSHRKRFGLRMNLSA | 120 |
| Query: | 121 | GMINRELGF | 129 |
| | | G+IN ELGF | |
| Sbjct: | 121 | GIINHELGF | 129 |

[1509] No corresponding DNA sequence was identified in S. pyogenes.

[1510] Based on this analysis, it was predicted that this protein and its epitopes, could be useful antigens for vaccines or diagnostics.

### EXAMPLE 218

[1511] A repeated DNA sequence (GBSx0232) was identified in S. agalactiae <SEQ ID 691> which encodes the amino acid sequence <SEQ ID 692>. This protein is predicted to be ISL2 protein. Analysis of this protein sequence reveals the following:

```
Possible site: 41
>>> Seems to have no N-terminal signal sequence
----- Final Results -----
                            bacterial cytoplasm --- Certainty = 0.3996(Affirmative) < succ>
                              bacterial membrane --- Certainty = 0.0000(Not Clear) < succ>
                                bacterial outside --- Certainty = 0.0000(Not Clear) < succ>
```

[1512] The protein has homology with the following sequences in the GENPEPT database:

| >GP: CAC18595 GB: AJ278419 IS1381 transposase [Streptococcus pneumoniae] | | | |
|---|---|---|---|
| Identities = 110/125 (88%), Positives = 119/125 (95%) | | | |
| Query: | 1 | MNYEASKQLTDVRFKRLVGVQRTTFEEMLAVLKTAYQRKHAKGGRTPKLSLEDLLMATLQ | 60 |
| | | MNYEASKQLTD RFKRLVGVQRTTFEEMLAVLKTAYQ KHAKGGR PKLSLEDLLMATLQ | |
| Sbjct: | 1 | MNYEASKQLTDARFKRLVGVQRTTFEEMLAVLKTAYQLKHAKGGRKPKLSLEDLLMATLQ | 60 |
| Query: | 61 | YMREYRTYEQIAADFGIHESNLIRRSQWVESTLIQSGFTISKTHLSAEDTVIVDATEVKI | 120 |
| | | Y+REYRTYE+IAADFG+HESNL+RRSQWVE TL+QSG TIS+T LS+EDTV++DATEVKI | |
| Sbjct: | 61 | YVREYRTYEEIAADFGVHESNLLRRSQWVEVTLVQSGVTISRTPLSSEDTVMIDATEVKI | 120 |
| Query: | 121 | NRPKK | 125 |
| | | NRPKK | |
| Sbjct: | 121 | NRPKK | 125 |

[1513] No corresponding DNA sequence was identified in S. pyogenes.

[1514] Based on this analysis, it was predicted that this protein and its epitopes, could be useful antigens for vaccines or diagnostics.

### EXAMPLE 219

[1515] A DNA sequence (GBSx0233) was identified in S. agalactiae <SEQ ID 693> which encodes the amino acid sequence <SEQ ID 694>. Analysis of this protein sequence reveals the following:

| Possible site: 57 | | | | |
|---|---|---|---|---|
| >>> Seems to have no N-terminal signal sequence | | | | |
| | INTEGRAL | Likelihood = −10.40 | Transmembrane | 130-146 (123-156) |
| | INTEGRAL | Likelihood = −7.86 | Transmembrane | 169-185 (167-191) |
| | INTEGRAL | Likelihood = −6.90 | Transmembrane | 100-116 (95-118) |
| | INTEGRAL | Likelihood = −5.52 | Transmembrane | 199-215 (189-216) |

```
----- Final Results -----
                              bacterial membrane --- Certainty = 0.5161(Affirmative) < succ>
                                bacterial outside --- Certainty = 0.0000(Not Clear) < succ>
                            bacterial cytoplasm --- Certainty = 0.0000(Not Clear) < succ>
```

[1516] The protein has homology with the following sequences in the GENPEPT database:

| >GP: BAB04126 GB: AP001508 unknown conserved protein in others | | | |
|---|---|---|---|
| [Bacillus halodurans] | | | |
| Identities = 47/207 (22%), Positives = 95/207 (45%), Gaps = 14/207 (6%) | | | |
| Query: | 7 | LQKENTLLEGRIDNSNNQTYTDMIVYLRGA-SISPYHQELIRNDIVNMLLEAQERQASLV | 65 |
| | | L K+N + N + Y D+++Y+R A S S E + ++++ LLEAQ + S | |
| Sbjct: | 6 | LIKDNNEKRKLLTEENLKVYEDLLLYIRLAHSKSEQETEELLTELLDHLLEAQAKGKSAK | 65 |
| Query: | 66 | SVFGEDRHDFINQVIKSTPKISKKEE-TLQRWDLAILLLTIQMIIFLGGYLITEALQQSV | 124 |
| | | +VFG++ + +++I PK+ KE L + L++ T+ ++F G Y + V | |
| Sbjct: | 66 | AVFGDNPKQYADEIIGEIPKMVTKERFGLFAYGLSMFFATV--LVFSGIYRMLRYYVFQV | 123 |
| Query: | 125 | PDLIPITLLDVLFAIFISIIAVKIADTIIYATYNFDK----SKEKKYFFRYIFLILSLII | 180 |
| | | + + + A+ +I ++ IA ++ + + + K F +I + +I | |
| Sbjct: | 124 | GEAVSEVYVGT--ALITTIASIVIAWMFVFVVFQYFRWSCFRTINKVFEFFILWLGGMIP | 181 |
| Query: | 181 | AYILIGKYYHLP----FINIPLWIYLI | 203 |
| | | + Y P I IP+++Y + | |
| Sbjct: | 182 | FALFFALLYFTPNVGRMIEIPVYLYFV | 208 |

[1517] No corresponding DNA sequence was identified in S. pyogenes.

[1518] Based on this analysis, it was predicted that this protein and its epitopes, could be useful antigens for vaccines or diagnostics.

### EXAMPLE 220

[1519] A DNA sequence (GBSx0234) was identified in S. agalactiae <SEQ ID 695> which encodes the amino acid sequence <SEQ ID 696>. This protein is predicted to be minor extracellular protease epr precursor (epr). Analysis of this protein sequence reveals the following:

| Possible site: 31 | | | | |
|---|---|---|---|---|
| >>> Seems to have an uncleavable N-term signal seq | | | | |
| | INTEGRAL | Likelihood = −10.72 | Transmembrane | 10-26 (5-33) |

```
----- Final Results -----
                              bacterial membrane --- Certainty = 0.5288(Affirmative) < succ>
                                bacterial outside --- Certainty = 0.0000(Not Clear) < succ>
                            bacterial cytoplasm --- Certainty = 0.0000(Not Clear) < succ>
```

[1520] A related GBS nucleic acid sequence <SEQ ID 8523> which encodes amino acid sequence <SEQ ID 8524> was also identified. Analysis of this protein sequence reveals the following:

Lipop Possible site: −1 Crend: 8
McG: Discrim Score: 12.11
GvH: Signal Score (−7.5): −4.02
Possible site: 29
>>> Seems to have an uncleavable N-term signal seq
ALOM program count: 1 value: −10.72 threshold: 0.0

| | | | |
|---|---|---|---|
| INTEGRAL | Likelihood = −10.72 | Transmembrane | 8-24 (5-33) |
| PERIPHERAL | Likelihood = 13.74 | 219 | |

```
modified ALOM score: 2.64
*** Reasoning Step: 3
----- Final Results -----
                              bacterial membrane --- Certainty = 0.5288(Affirmative) < succ>
                                bacterial outside --- Certainty = 0.0000(Not Clear) < succ>
                            bacterial cytoplasm --- Certainty = 0.0000(Not Clear) < succ>
```

[1521] The protein has homology with the following sequences in the GENPEPT database:

| !GB: Z99123 extracellular serine protease [Bacillus s . . . | | | |
|---|---|---|---|
| >GP: CAB15866 GB: Z99123 extracellular serine protease [Bacillus subtilis] | | | |
| Identities = 44/150 (29%), Positives = 80/150 (53%), Gaps = 14/150 (9%) | | | |
| Query: | 37 | QMDTVESSVNHVSDSQLTEAQDMLDKFEKKPSEKLLKDVELALNKLSNSSKKEALQKRFK | 96 |
| | | ++D V+S N + +A+D + K EK +++ + + A+NKL N + K+ LQKR | |
| Sbjct: | 428 | RLDKVQSYRN------VKDAKDKVAKAEKYKTQQTVDTAQTAINKLPNGTDKKNLQKRLD | 481 |
| Query: | 97 | KAKDKYLKDEADKKATKDATDLVEILEQAPSEENVLKAEAAVNKLTVKESKEALQKRIDT | 156 |
| | | + K +Y+ A+K A D V E++ + +V A++A+ KL K +LQKR++ | |
| Sbjct: | 482 | QVK-RYI-------ASKQAKDKVAKAEKSKKKTDVDSAQSAIGKLPASSEKTSLQKRLNK | 533 |
| Query: | 157 | VKTQYGLIGNQTPSSSVAETTEQGTANPAS | 186 |
| | | VK+ Q+ S++ ++T+ A S | |
| Sbjct: | 534 | VKSTNLKTAQQSVSAAEKKSTDANAAKAQS | 563 |
| Identities = 39/124 (31%), Positives = 64/124 (51%), Gaps = 2/124 (1%) | | | |
| Query: | 35 | TTQMDTVESSVNHVSDSQLTEAQDMLDKFEKKPSEKLLKDVELALNKLSNSSKKEALQKR | 94 |
| | | +++ +++ +N V + L AQ + EKK ++ + A+N+L K ALQKR | |
| Sbjct: | 521 | SSEKTSLQKRLNKVKSTNLKTAQQSVSAAEKKSTDANAAKAQSAVNQLQAGKDKTALQKR | 580 |
| Query: | 95 | FKKAKDKYLKDEADKKATKDATDLVEILEQAPSEENVLKAEAAVNKLTVKESKEALQKRI | 154 |
| | | K K K EA K T A V+ E+ ++++ A++AVN+L K LQKR+ | |
| Sbjct: | 581 | LDKVKKKVAAAEAKKVETAKAK--VKKAEKDKTKKSKTSAQSAVNQLKASNEKTKLQKRL | 638 |
| Query: | 155 | DTVK | 158 |
| | | + VK | |
| Sbjct: | 639 | NAVK | 642 |

[1522] A related DNA sequence was identified in S. pyogenes <SEQ ID 697> which encodes the amino acid sequence <SEQ ID 698>. Analysis of this protein sequence reveals the following:

Possible site: 41
>>> Seems to have no N-terminal signal sequence

| | | | |
|---|---|---|---|
| INTEGRAL | Likelihood = −4.99 | Transmembrane | 24-40 (23-43) |

```
----- Final Results -----
                              bacterial membrane --- Certainty = 0.2996(Affirmative) < succ>
                                bacterial outside --- Certainty = 0.0000(Not Clear) < succ>
                            bacterial cytoplasm --- Certainty = 0.0000(Not Clear) < succ>
```

[1523] The protein has homology with the following sequences in the databases:

| >GP: CAB15866 GB: Z99123 extracellular serine protease [Bacillus subtilis] | | | |
|---|---|---|---|
| Identities = 43/130 (33%), Positives = 71/130 (54%), Gaps = 8/130 (6%) | | | |
| Query: | 41 | GSHPQTQDKVA---KHSKSAASLLKKAVKAVNDADRLATAAAIQEAQKAVDKLAESSKKK | 97 |
| | | G P + +K + + +K ++ LK A ++V+ A++ +T A +AQ AV++L K | |
| Sbjct: | 516 | GKLPASSEKTSLQKRLNKVKSTNLKTAQQSVSAAEKKSTDANAAKAQSAVNQLQAGKDKT | 575 |
| Query: | 98 | TLQEQLN-----VAKAKQEQEDAATQAVKAAEETLNQNLKDIAQKAVNDLSNKGKKAALQ | 152 |
| | | LQ++L+ VA A+ ++ + A VK AE+ + K AQ AVN L +K LQ | |
| Sbjct: | 576 | ALQKRLDKVKKKVAAAEAKKVETAKAKVKKAEKDKTKKSKTSAQSAVNQLKASNEKTKLQ | 635 |
| Query: | 153 | SRLDAILPAK | 162 |
| | | RL+A+ P K | |
| Sbjct: | 636 | KRLNAVKPKK | 645 |
| Identities = 31/105 (29%), Positives = 53/105 (49%), Gaps = 1/105 (0%) | | | |
| Query: | 54 | SKSAASLLKKAVKAVNDADRLATAAAIQEAQKAVDKLAESSKKKTLQEQLNVAKAKQEQE | 113 |
| | | +++ S A +AV A++ I +A++ + +L S K L ++L+ ++ + + | |
| Sbjct: | 380 | AQATDSAYAAAEQAVKKAEQTKAQIDINKARELISQLPNSDAKTALHKRLDKVQSYRNVK | 439 |
| Query: | 114 | DAATQAVKAAEETLNQNLKDIAQKAVNDLSNKGKKAALQSRLDAI | 158 |
| | | DA + KA E+ Q D AQ A+N L N K LQ RLD + | |
| Sbjct: | 440 | DAKDKVAKA-EKYKTQQTVDTAQTAINKLPNGTDKKNLQKRLDQV | 483 |

[1524] An alignment of the GAS and GBS proteins is shown below:

| Identities = 61/233 (26%), Positives = 115/233 (49%), Gaps = 13/233 (5%) | | | |
|---|---|---|---|
| Query: | 2 | SMKIDKKELLALIASIILLIFASVTFFLFKDHGTTQMDTVESSVNHVSDSQLTEAQDMLD | 61 |
| | | SM +KE L + S++ + + +F H TQ + S + + S L +A ++ | |
| Sbjct: | 12 | SMTKSQKEALYWMLSVLTITLIGGSCLIFGSHPQTQDKVAKHSKS--AASLLKKAVKAVN | 69 |
| Query: | 62 | KFEKKPSEKLLKDVELALNKLSNSSKKEALQKRFKKAKDKYLKDEADKKATKDATDLVEI | 121 |
| | | ++ + +++ + A++KL+ SSKK+ LQ++ AK K +++A AT V+ | |
| Sbjct: | 70 | DADRLATAAAIQEAQKAVDKLAESSKKKTLQEQLNVAKAKQEQEDA-------ATQAVKA | 122 |
| Query: | 122 | LEQAPSEENVLKAEAAVNKLTVKESKEALQKRIDTVKTQYGLIGNQTPSSSVAETTEQGT | 181 |
| | | E+ ++ A+ AVN L+ K K ALQ R+D + +I ++ P S E T+ | |
| Sbjct: | 123 | AEETLNQNLKDIAQKAVNDLSNKGKKAALQSRLDAILPAKPII-DEFPRQS-GEITDNSY | 180 |
| Query: | 182 | ANPASQDTSSYVNQNVAPTYE-QPQANNTPVTPGVNNTVP-TPGTGTVPATNG | 232 |
| | | P D S + + +PT + +++ + VTP ++ P P T + P+ +G | |
| Sbjct: | 181 | WTPFPGDVSDTYDNSQSPTLDPSSESSASDVTPQPSHPDPIPPQTSSEPSDSG | 233 |

[1525] SEQ ID 8524 (GBS278) was expressed in E. coli as a His-fusion product. SDS-PAGE analysis of total cell extract is shown in FIG. 52 (lane 6; MW 40 kDa).

[1526] The GBS278-His fusion product was purified (FIG. 206, lane 10) and used to immunise mice. The resulting antiserum was used for FACS (FIG. 305), which confirmed that the protein is immunoaccessible on GBS bacteria.

[1527] Based on this analysis, it was predicted that these proteins and their epitopes could be useful antigens for vaccines or diagnostics.

### EXAMPLE 221

[1528] A DNA sequence (GBSx0235) was identified in S. agalactiae <SEQ ID 699> which encodes the amino acid sequence <SEQ ID 700>. Analysis of this protein sequence reveals the following:

Possible site: 53
>>> Seems to have no N-terminal signal sequence
----- Final Results -----
bacterial cytoplasm --- Certainty = 0.1466 (Affirmative) < succ>
bacterial membrane --- Certainty = 0.0000 (Not Clear) < succ>
bacterial outside --- Certainty = 0.0000 (Not Clear) < succ>

[1529] The protein has no significant homology with any sequences in the GENPEPT database.

[1530] No corresponding DNA sequence was identified in S. pyogenes.

[1531] Based on this analysis, it was predicted that this protein and its epitopes, could be useful antigens for vaccines or diagnostics.

### EXAMPLE 222

[1532] A DNA sequence (GBSx0236) was identified in S. agalactiae <SEQ ID 701> which encodes the amino acid sequence <SEQ ID 702>. This protein is predicted to be N-acetylglucosamine-6-phosphate deacetylase (nagA). Analysis of this protein sequence reveals the following:

Possible site: 15
>>> Seems to have no N-terminal signal sequence
----- Final Results -----
bacterial cytoplasm --- Certainty = 0.4607 (Affirmative) < succ>
bacterial membrane --- Certainty = 0.0000 (Not Clear) < succ>
bacterial outside --- Certainty = 0.0000 (Not Clear) < succ>

[1533] A related GBS nucleic acid sequence <SEQ ID 9297> which encodes amino acid sequence <SEQ ID 9298> was also identified.

[1534] The protein has homology with the following sequences in the GENPEPT database:

| >GP: AAG21688 GB: AY007718 N-acetylglucosamine-6-phosphate deacetylase | | | |
|---|---|---|---|
| [Lactococcus lactis subsp. cremoris] | | | |
| Identities = 113/178 (63%), Positives = 135/178 (75%) | | | |
| Query: | 131 | GIYFEGPYFTEEYKGAQNPIYMRNPNLEEFAQWQKAAKGLITKIALAPEREGVEEFVSAI | 190 |
| | | GI+FEGP+FTEE KGAQNP YMR+ + E WQ+AA G++ KI LAPEREG E+F+ | |
| Sbjct: | 1 | GIFFEGPFFTEEKKGAQNPKYMRDAKMWELEDWQEAAHGMLKKIGLAPEREGSEDFIRKA | 60 |
| Query: | 191 | TKQGVTVALGHSNGTYKEAKKAVKAGASVWVHAYNGMRGLTHREPGMVGAVYNLPNTYAE | 250 |
| | | T+ GV +ALGHSN TYK+A V+AGASVWVH +NGM G+TH+EPGMVGA+ N PNTYAE | |
| Sbjct: | 61 | TESGVVIALGHSNATYKQAVAGVQAGASVWVHTFNGMSGMTHQEPGMVGAILNTPNTYAE | 120 |
| Query: | 251 | LICDGHHVDPVACDILMTQKGHNHVALITDCMAAGGAPDGDYMLGELPVVVSNGTARL | 308 |
| | | LICDGHHV P A +I++ KG +HV LITD M A G PDG YMLGE V V +G A L | |
| Sbjct: | 121 | LICDGHHVRPEAAEIVVKMKGADHVVLITDSMRAAGLPDGPYMLGEYEVEVRDGAAWL | 178 |

[1535] A related DNA sequence was identified in S. pyogenes <SEQ ID 703> which encodes the amino acid sequence <SEQ ID 704>. Analysis of this protein sequence reveals the following:

Possible site: 40
>>> Seems to have no N-terminal signal sequence
----- Final Results -----
bacterial cytoplasm --- Certainty = 0.3114 (Affirmative) < succ>
bacterial membrane --- Certainty = 0.0000 (Not Clear) < succ>
bacterial outside --- Certainty = 0.0000 (Not Clear) < succ>

[1536] An alignment of the GAS and GBS proteins is shown below:

| Identities = 227/300 (75%), Positives = 262/300 (86%) | | | |
|---|---|---|---|
| Query: | 9 | MTKYIKADRFFYADHVKENGYLEIKDNHFGKWIENISGQEEILDYSGYQIAPGLVDTHIH | 68 |
| | | MT Y+KAD F+Y V+ GYL + D FG+W E + +I+DY+GYQIAPGLVDTHIH | |
| Sbjct: | 1 | MTCYLKADCFYYPTEVRPAGYLSLHDGVFGEWTEIVPADAQIIDYTGYQIAPGLVDTHIH | 60 |
| Query: | 69 | GFAGADVMDCDSEGILRMSAGLLSTGVTSFLPTTLTSDTKRLEEASKSVAAVAGKEQGAK | 128 |
| | | G+AGADVMD ++GI +MS GLL+TGVTSFLPTTLTS ++LE+ S ++A+VA + +GAK | |
| Sbjct: | 61 | GYAGADVMDNSAQGIHQMSEGLLATGVTSFLPTTLTSTFEQLEKVSGTIASVADQVKGAK | 120 |
| Query: | 129 | IQGIYFEGPYFTEEYKGAQNPIYMRNPNLEEFAQWQKAAKGLITKIALAPEREGVEEFVS | 188 |
| | | IQGIYFEGPYFTEEYKGAQNP YM+ P LEEF WQKAAKGLI KIALAPER+GV+EFVS | |
| Sbjct: | 121 | IQGIYFEGPYFTEEYKGAQNPSYMKTPRLEEFDAWQKAAKGLIKKIALAPERDGVKEFVS | 180 |
| Query: | 189 | AITKQGVTVALGHSNGTYKEAKKAVKAGASVWVHAYNGMRGLTHREPGMVGAVYNLPNTY | 248 |
| | | A+TKQGVTVALGHSNGTY+EAK+AV+AGASVWVHAYNGMRGLTHREPGMVGAVYNLPNTY | |
| Sbjct: | 181 | AVTKQGVTVALGHSNGTYQEAKEAVQAGASVWVHAYNGMRGLTHREPGMVGAVYNLPNTY | 240 |
| Query: | 249 | AELICDGHHVDPVACDILMTQKGHNHVALITDCMAAGGAPDGDYMLGELPVVVSNGTARL | 308 |
| | | AELICDGHHV P+ACDILM QKGH+HVA+ITDCM AGG+PDGDY+LGE VVV+NGTARL | |
| Sbjct: | 241 | AELICDGHHVSPIACDILMQQKGHDHVAMITDCMRAGGSPDGDYLLGEFSVVVANGTARL | 300 |

[1537] Based on this analysis, it was predicted that these proteins and their epitopes could be useful antigens for vaccines or diagnostics.

### EXAMPLE 223

[1538] A DNA sequence (GBSx0237) was identified in S. agalactiae <SEQ ID 705> which encodes the amino acid sequence <SEQ ID 706>. Analysis of this protein sequence reveals the following:

```
Possible site: 25
>>> Seems to have no N-terminal signal sequence
----- Final Results -----
                            bacterial cytoplasm --- Certainty = 0.3709(Affirmative) < succ>
                              bacterial membrane --- Certainty = 0.0000(Not Clear) < succ>
                                bacterial outside --- Certainty = 0.0000(Not Clear) < succ>
```

[1539] A related GBS nucleic acid sequence <SEQ ID 9307> which encodes amino acid sequence <SEQ ID 9308> was also identified.

[1540] The protein has homology with the following sequences in the GENPEPT database:

| >GP: CAB16112 GB: Z99124 yyaQ [Bacillus subtilis] | | | |
|---|---|---|---|
| Identities = 40/110 (36%), Positives = 62/110 (56%), Gaps = 12/110 (10%) | | | |
| Query: | 121 | IAKTFEDSVDYPFAKHPQYASYRVSG--KWYALLFPLKMGKLENVPAQLSED---EVEVL | 175 |
| | | + + + S DYP+ K+P YAS R + KWY L+ + +P +L D E+++L | |
| Sbjct: | 11 | VKEKYGTSPDYPWEKYPNYASLRHTSNKKWYGLIMNV-------LPEKLGLDGHGEIDIL | 63 |
| Query: | 176 | NIKVNPQDMEILLQKEGIYPSYHMSKKTWVSIVLDNTLSDIEIFKLVSDS | 225 |
| | | N+K P+ + L E I P YHM K+ W+SIVL+ T + EI+ L+ S | |
| Sbjct: | 64 | NLKCPPEISDRLRNGENILPGYHMDKEHWISIVLERTDPEGEIYNLIEQS | 113 |

[1541] A related DNA sequence was identified in S. pyogenes <SEQ ID 707> which encodes the amino acid sequence <SEQ ID 708>. Analysis of this protein sequence reveals the following:

```
Possible site: 22
>>> Seems to have no N-terminal signal sequence
----- Final Results -----
                            bacterial cytoplasm --- Certainty = 0.2541(Affirmative) < succ>
                              bacterial membrane --- Certainty = 0.0000(Not Clear) < succ>
                                bacterial outside --- Certainty = 0.0000(Not Clear) < succ>
```

[1542] An alignment of the GAS and GBS proteins is shown below:

| Identities = 114/247 (46%), Positives = 169/247 (68%), Gaps = 1/247 (0%) | | | |
|---|---|---|---|
| Query: | 7 | MSIESDFFRKKRFIFSSLEEFGFIKSDQEYIYCQTFMDNDFKAIITISLDGKIAGKVIDS | 66 |
| | | MS+ +D+F ++ I L +GF K D Y Y +FM+ +F+A + I G I +VID | |
| Sbjct: | 1 | MSLATDYFSRQTPIVEKLMAYGFEKRDNGYFYNERFMEGEFEAQLRIDEAGNIWDRVIDC | 60 |
| Query: | 67 | ALEEEYLPLRAANYNGSFVGEVRSAYMAILGDISDSCCKDLLFTKDQSNRLAEKIAKTFE | 126 |
| | | LEE+YLPL+ A + G++ G+VR+AY+ +L +S +C + F Q+NRLA+ I K + | |
| Sbjct: | 61 | DLEEDYLPLQQAAWQGTYTGQVRAAYLELLERLSVACFEATPFQSMQANRLAKHITKEWS | 120 |
| Query: | 127 | DSVDYPFAKHPQYASYRVSGKWYALLFPLKMGKLENVPAQLSEDEVEVLNIKVNPQDMEI | 186 |
| | | D +DYPF KHP A+YRV GKWYA++F L KL+ + P +L EV+ +KVNP+ | |
| Sbjct: | 121 | DPMDYPFEKHPDLATYRVGGKWYAMIFSLLADKLDQIPERLVGQTCEVMTVKVNPKAFPQ | 180 |
| Query: | 187 | LLQKEGIYPSYHMSKKTWVSIVLDNTLSDIEIFKLVSDSRKLVSHNKKSN-SEPEFWIIP | 245 |
| | | LLQ+EGIYP+YHMSKK W+SI+LD+ ++D +++ LV+ SR+LV+ N SN + P++W+IP | |
| Sbjct: | 181 | LLQQEGIYPAYHMSKKNWISIILDDKVTDDKLWTLVTQSRQLVNPNGLSNPNGPDYWVIP | 240 |
| Query: | 246 | ANPKFYD | 252 |
| | | AN K+YD | |
| Sbjct: | 241 | ANLKYYD | 247 |

[1543] Based on this analysis, it was predicted that these proteins and their epitopes could be useful antigens for vaccines or diagnostics.

### EXAMPLE 224

[1544] A DNA sequence (GBSx0238) was identified in S. agalactiae <SEQ ID 709> which encodes the amino acid sequence <SEQ ID 710>. This protein is predicted to be transposase for insertion sequence element is 905. Analysis of this protein sequence reveals the following:

```
Possible site: 61
>>> Seems to have no N-terminal signal sequence
----- Final Results -----
                            bacterial cytoplasm --- Certainty = 0.1824(Affirmative) < succ>
                              bacterial membrane --- Certainty = 0.0000(Not Clear) < succ>
                                bacterial outside --- Certainty = 0.0000(Not Clear) < succ>
```

[1545] A related GBS nucleic acid sequence <SEQ ID 9601> which encodes amino acid sequence <SEQ ID 9602> was also identified.

[1546] A related GBS nucleic acid sequence <SEQ ID 9595> which encodes amino acid sequence <SEQ ID 9596> was also identified.

[1547] The protein has homology with the following sequences in the GENPEPT database:

| >GP: AAA25167 GB: L20851 transposase [Lactococcus lactis] | | | |
|---|---|---|---|
| Identities = 325/391 (83%), Positives = 365/391 (93%) | | | |
| Query: | 12 | MTQFTTELLNFLAQKQDIDEFFRSSLETAMNDLLQVELSAFLGYEPYDKAGYNTGNSRNG | 71 |
| | | MTQFTTELLNFLAQKQDIDEFFR+SLETAMNDLLQ ELSAFLGYEPYDK GYN+GNSRNG | |
| Sbjct: | 1 | MTQFTTELLNFLAQKQDIDEFFRTSLETAMNDLLQAELSAFLGYEPYDKVGYNSGNSRNG | 60 |
| Query: | 72 | AYTRRFETKYGVVNLLIPRDRNGEFSPALIPSYGRRDNHLEEMVIKLYRTGVTTREISDI | 131 |
| | | +Y+R+FETKYG V L IPRDRNG FSPAL+P+YGRRD+HLEEMVIKLY+TGVTTREISDI | |
| Sbjct: | 61 | SYSRQFETKYGTVQLSIPRDRNGNFSPALLPAYGRRDDHLEEMVIKLYQTGVTTREISDI | 120 |
| Query: | 132 | IERMYGHHYSPATVSNISKATQENVASFHERSLEANYTVLYLDGTYLPLRRGTVSKECIH | 191 |
| | | IERMYGHHYSPAT+SNISKATQENVA+FHERSLEANY+VL+LDGTYLPLRRGTVSKECIH | |
| Sbjct: | 121 | IERMYGHHYSPATISNISKATQENVATFHERSLEANYSVLFLDGTYLPLRRGTVSKECIH | 180 |
| Query: | 192 | IALGVTSYGHKAILGYDIAPNENNASWSDLLERFKGQGVQQVSLVVSDGFNGLDQLIQQA | 251 |
| | | IALG+T G KA+LGY+IAPNENNASWS LL++ + QG+QQVSLVV+DGF GL+Q+I QA | |
| Sbjct: | 181 | IALGITPEGQKAVLGYEIAPNENNASWSTLLDKLQNQGIQQVSLVVTDGFKGLEQIISQA | 240 |
| Query: | 252 | FPMAKQQRCLVHIGRNIASKVKRADRALILEQFKTIYRAINVEEAKQALDSFINEWKPHY | 311 |
| | | +P+AKQQRCL+HI RN+ASKVKRADRA+ILEQFKTIYRA N+E A QAL++FI EWKP Y | |
| Sbjct: | 241 | YPLAKQQRCLIHISRNLASKVKRADRAVILEQFKTIYRAENLEMAVQALENFIAEWKPKY | 300 |
| Query: | 312 | KKVIETLESIENLLIFYEFPHQIWGSIYSTNLIESLNKEIKRQTKKKVVFPNEESLERYL | 371 |
| | | +KV+E+LE+ +NLL FY+FP+QIW SIYSTNLIESLNKEIKRQTKKKV+FPNEE+LERYL | |
| Sbjct: | 301 | RKVMESLENTDNLLTFYQFPYQIWHSIYSTNLIESLNKEIKRQTKKKVLFPNEEALERYL | 360 |
| Query: | 372 | VTLFSDYNFKQGQRIHKGFGQCTDTLESLFD | 402 |
| | | VTLF DYNFKQ QRIHKGFGQC DTLESLFD | |
| Sbjct: | 361 | VTLFEDYNFKQSQRIHKGFGQCADTLESLFD | 391 |

[1548] A related DNA sequence was identified in S. pyogenes <SEQ ID 711> which encodes the amino acid sequence <SEQ ID 712>. Analysis of this protein sequence reveals the following:

Possible site: 15
>>> Seems to have no N-terminal signal sequence
----- Final Results -----
bacterial cytoplasm --- Certainty = 0.3054 (Atfirmative) < succ>
bacterial membrane --- Certainty = 0.0000 (Not Clear) < succ>
bacterial outside --- Certainty = 0.0000 (Not Clear) < succ>

[1549] An alignment of the GAS and GBS proteins is shown below:

| Identities = 111/128 (86%), Positives = 122/128 (94%) | | | |
|---|---|---|---|
| Query: | 12 | MTQFTTELLNFLAQKQDIDEFFRSSLETAMNDLLQVELSAFLGYEPYDKAGYNTGNSRNG | 71 |
| | | MTQFTTELLNFLAQKQDIDEFFRSSLE AMNDLLQVELSAFLGYEPY+K GYNTGNSRNG | |
| Sbjct: | 1 | MTQFTTELLNFLAQKQDIDEFFRSSLEIAMNDLLQVELSAFLGYEPYEKEGYNTGNSRNG | 60 |
| Query: | 72 | AYTRRFETKYGVVNLLIPRDRNGEFSPALIPSYGRRDNHLEEMVIKLYRTGVTTREISDI | 131 |
| | | Y+R+FETKYG+VNL+IPRDRNGEFSP L+PSY RR++HLEE+VIKLY+TGVTTREISDI | |
| Sbjct: | 61 | TYSRQFETKYGLVNLIIPRDRNGEFSPVLLPSYARREDHLEEIVIKLYQTGVTTREISDI | 120 |
| Query: | 132 | IERMYGHH | 139 |
| | | I+RMYG H | |
| Sbjct: | 121 | IKRMYGDH | 128 |

[1550] Based on this analysis, it was predicted that these proteins and their epitopes could be useful antigens for vaccines or diagnostics.

### EXAMPLE 225

[1551] A DNA sequence (GBSx0239) was identified in S. agalactiae <SEQ ID 713> which encodes the amino acid sequence <SEQ ID 714>. Analysis of this protein sequence reveals the following:

| Possible site: 32 | | | |
|---|---|---|---|
| >>> Seems to have no N-terminal signal sequence | | | |
| INTEGRAL | Likelihood = −12.42 | Transmembrane | 268-284 (260-286) |
| INTEGRAL | Likelihood = −6.32 | Transmembrane | 232-248 (231-254) |

----- Final Results -----
bacterial membrane --- Certainty = 0.5967 (Affirmative) < succ>
bacterial outside --- Certainty = 0.0000 (Not Clear) < succ>
bacterial cytoplasm --- Certainty = 0.0000 (Not Clear) < succ>

[1552] The protein has homology with the following sequences in the GENPEPT database:

| >GP: AAD40365 GB: AF036485 hypothetical protein [Piasmid pNZ4000] | | | |
|---|---|---|---|
| Identities = 69/283 (24%), Positives = 133/283 (46%), Gaps = 9/283 (3%) | | | |
| Query: | 11 | INVDDLSLQEERF-LPSELLAYARDENESS-FVRDIEGHLALVYQLLDTQGHVDDVRHVP | 68 |
| | | IN ++ + E+++ + +++ Y D +ES+ +V DI L L D +R++ | |
| Sbjct: | 19 | INAEERATLEDQYGIDEDIIEYVTDNDESTNYVYDINEDDQLFIFLAPYALDKDALRYIT | 78 |
| Query: | 69 | RVIPVTLFLKEDGLFVLANHKNINLVKKALNRV---EKVDSPKHLLLSLVTAFSKQYFDV | 125 |
| | | + P + L + LF N I V AL +V S +L + + + | |
| Sbjct: | 79 | Q--PFGMLLHKGVLFTF-NQSGIPEVNTALYSALDNPEVKSVDAFILETLFTVVVSFIPI | 135 |
| Query: | 126 | LDTISEERDKLINDLRKRPNKSNLARLANLQSGTVHLMMGTKQNFEMLTDLQNIEQDKEN | 185 |
| | | I+++R+ L L ++ S+L L+ LQ L + N L L | |
| Sbjct: | 136 | SRAITKKRNYLDKMLNRKTKNSDLVSLSYLQQTLTFLSSAVQTNLSELDRLPKTHFGVGA | 195 |
| Query: | 186 | TRNEKMQLQDAIIEARQLSNMCSLNSQVFQELS-SYNNVLSNNLNDNVTTLTIISIGISI | 244 |
| | | +++ +D IE Q+ M + +QV + + N++ +NNLND + LTI S+ +++ | |
| Sbjct: | 196 | DQDKIDLFEDVQIEGEQVQRMFEIETQVVDRIDHTLNSLANNNLNDTMKFLTIWSLTMAV | 255 |
| Query: | 245 | IAMVTSFYGMNVKLPFDSVDAVWVLIILITTIITIMLSIVMYI | 287 |
| | | +++ FYGMNVKLP + W+L + I+ ++ + + I++ + | |
| Sbjct: | 256 | PTIISGFYGMNVKLPLAGMQYAWMLTLGISVVLIVAMLIMLKV | 298 |

[1553] SEQ ID 714 (GBS422) was expressed in E. coli as a GST-fusion product. SDS-PAGE analysis of total cell extract is shown in FIG. 172 (lane 7; MW 60 kDa).

[1554] GBS422-GST was purified as shown in FIG. 219, lane 12.

[1555] Based on this analysis, it was predicted that these proteins and their epitopes could be useful antigens for vaccines or diagnostics.

### EXAMPLE 226

[1556] A DNA sequence (GBSx0240) was identified in S. agalactiae <SEQ ID 717> which encodes the amino acid sequence <SEQ ID 718>. Analysis of this protein sequence reveals the following:

```
Possible site: 45
>>> Seems to have no N-terminal signal sequence
----- Final Results -----
                            bacterial cytoplasm --- Certainty = 0.0783(Affirmative) < succ>
                              bacterial membrane --- Certainty = 0.0000(Not Clear) < succ>
                                bacterial outside --- Certainty = 0.0000(Not Clear) < succ>
```

[1557] The protein has homology with the following sequences in the GENPEPT database:

| >GP: CAB61731 GB: AL133220 putative oxidoreductase. [Streptomyces | | | |
|---|---|---|---|
| coelicolor A3(2)] | | | |
| Identities = 100/306 (32%), Positives = 152/306 (48%), Gaps = 3/306 (0%) | | | |
| Query: | 3 | KVRYGVVSTAKVAPRFIEGVRLAGNGEVVAVSSRTLESAQAFANKYHLPKAYDKLEDMLA | 62 |
| | | KVR+G+++T +A RF + + EVVAV+SRT SA+ FA ++ +P+AY E + | |
| Sbjct: | 8 | KVRWGILATGGMAARFTADLVDLPDAEVVAVASRTEASAKTFAERFGIPRAYGGWETLAR | 67 |
| Query: | 63 | DESIDVIYVATINQDHYKVAKAALLAGKHVLVEKPFTLTYDQANELFALAESCNLFLMEA | 122 |
| | | DE +DV+YVAT + H A L AG++VL EKPFTL +A EL ALA +FLMEA | |
| Sbjct: | 68 | DEDVDVVYVATPHSAHRTAAGLCLEAGRNVLCEKPFTLNAREAAELVALARENGVFLMEA | 127 |
| Query: | 123 | QKSVFIPMTQVIKKLLASGEIGEVISISSTTAYPN-IDHVTWFRELELGGGTVHFMAPYA | 181 |
| | | P+ + +K+L+A G IGEV S+ + R+ GGG + + Y | |
| Sbjct: | 128 | MWMYCNPLVRRLKELVADGAIGEVRSLQADFGLAGPFPAAHRLRDPAQGGGALLDLGVYP | 187 |
| Query: | 182 | LSYLQYLFDATITHASGTATFPKGQSDSQSKLLLQLSNGVLVDIFLTTRLNLPHEMIIYG | 241 |
| | | +S+ Q L T + A + D Q+ LL N L I + P+ I G | |
| Sbjct: | 188 | VSFAQLLLGEP-TDVAARAVLSEEGVDLQTGALLSYGNDALASIHCSITGGTPNSASITG | 246 |
| Query: | 242 | TEGRLIIPH-FWKTTHAKLVRNDTSARTIQVDMVSDFEKEAYHVSQMILEGQRVSHIMTP | 300 |
| | | +EGR+ +P+ F+ H L R + + D + H ++ ++ R +P | |
| Sbjct: | 247 | SEGRIDVPNGFFFPDHFVLHRTGRDPQEFRADPADGPRESLRHEAEEVMRALRAGETESP | 306 |
| Query: | 301 | QLTLSG | 306 |
| | | + L G | |
| Sbjct: | 307 | LVPLDG | 312 |

[1558] Based on this analysis, it was predicted that this protein and its epitopes, could be useful antigens for vaccines or diagnostics.

### EXAMPLE 227

[1559] A DNA sequence (GBSx0241) was identified in S. agalactiae <SEQ ID 721> which encodes the amino acid sequence <SEQ ID 722>. This protein is predicted to be valyl-tRNA synthetase (valS). Analysis of this protein sequence reveals the following:

| Possible site: 36 | | | | |
|---|---|---|---|---|
| >>> Seems to have no N-terminal signal sequence | | | | |
| | INTEGRAL | Likelihood = −0.00 | Transmembrane | 794-810 (794-810) |

```
----- Final Results -----
                              bacterial membrane --- Certainty = 0.1001(Affirmative) < succ>
                                bacterial outside --- Certainty = 0.0000(Not Clear) < succ>
                          bacterial cytoplasm --- Certainty = 0.0000(Not Clear) < succ>
```

[1560] The protein has homology with the following sequences in the GENPEPT database:

| >GP: AAA57558 GB: L08854 valyl-tRNA synthetase [Lactobacillus casei] | | | |
|---|---|---|---|
| Identities = 543/881 (61%), Positives = 679/881 (76%), Gaps 12/881 (1%) | | | |
| Query: | 5 | LSPKYNPAEVEEGRYQTWLDQDVFKPSGDTEAKPYSIVIPPPNVTGKLHLGHAWDTTLQD | 64 |
| | | L+PKY+ VEEGRYQ WLD+DVFKPSGD +AKPYSIVIPPPNVTGKLH+GHAWDTTLQD | |
| Sbjct: | 27 | LAPKYDHKAVEEGRYQEWLDEDVFKPSGDKKAKPYSIVIPPPNVTGKLHMGHAWDTTLQD | 86 |
| Query: | 65 | IIIRQKRMQGFDTLWLPGMDHAGIATQAKVEERLREQGISRYDLGREKFLDKVWEWKDEY | 124 |
| | | I+IRQKR++GFDTLWLPGMDHAGIATQAKVE +LR++GISRYDLGREKF+ KVWEWKDE+ | |
| Sbjct: | 87 | IVIRQKRIEGFDTLWLPGMDHAGIATQAKVEAKLRKEGISRYDLGREKFVQKVWEWKDEF | 146 |
| Query: | 125 | AATIKSQWGKMGLSVDYSRERFTLDEGLSKAVRKVFVDLYNKGWIYRGEFIINWDPAART | 184 |
| | | A TI QW KMGLS+DYSRERFTLD+GL++AVR+VFVDLYN+G IYRGE+I+NWDP ART | |
| Sbjct: | 147 | AKTIHGQWAKMGLSLDYSRERFTLDKGLNQAVRRVFVDLYNQGLIYRGEYIVNWDPQART | 206 |
| Query: | 185 | ALSDIEVIHKDVEGAFYHMNYMLEDGSRALEVATTRPETMFGDVAVAVNPEDARYKDLIG | 244 |
| | | ALSDIEVIHKD +GAFYH+ Y DGS +E+ATTRPETM GD AVAV+P D RYKD++G | |
| Sbjct: | 207 | ALSDIEVIHKDDKGAFYHVKYPFADGSGYIEIATTRPETMMGDTAVAVHPGDERYKDMVG | 266 |
| Query: | 245 | QNVILPIINKPIPIVADEHADPEFGTGVVKITPAHDPNDFAVGQRHNLPQVNVMNDDGTM | 304 |
| | | +ILP+ N+ IPI+ D + DPEFGTG VKITPAHDPNDF VG RH+L ++N MNDDGTM | |
| Sbjct: | 267 | TELILPLANRKIPIIEDAYVDPEFGTGAVKITPAHDPNDFQVGNRHDLKRINTMNDDGTM | 326 |
| Query: | 305 | NELADEFNGMDRFEARKAVVAKLESLGNLVKIKKTTHSVGHSERTGVVVEPRLSTQWFVK | 364 |
| | | NE A ++ GMDRFEARKA+VA L+ G L+K++ HSVGHSERTGV VE RLSTQWFVK | |
| Sbjct: | 327 | NENAGKYQGMDRFEARKAMVADLDKAGLLLKVEPIVHSVGHSERTGVQVEARLSTQWFVK | 386 |
| Query: | 365 | MDQLAKNAI-ANQDTEDKVEFYPPRFNDTFMSWMENVHDWVISRQLWWGHQIPAWYN-VN | 422 |
| | | M LA+ AI A Q+ + KV F P RF T++ WMEN+HDWVISRQLWWGHQIPAWYN | |
| Sbjct: | 387 | MKPLAEAAIKAQQEPDKKVTFVPERFEHTYLQWMENIHDWVISRQLWWGHQIPAWYNKQT | 446 |
| Query: | 423 | GEMYVGEDAPEG-DGWTQDEDVLDTWFSSALWPFSTMGWPDTEAADFKRYFPTSTLVTGY | 481 |
| | | GE YVG +AP+ + W QD DVLDTWFSSALWPFSTMGWP+T+A D+KRY+PT TLVTGY | |
| Sbjct: | 447 | GETYVGMEAPKDIENWKQDPDVLDTWFSSALWPFSTMGWPNTDAPDYKRYYPTDTLVTGY | 506 |
| Query: | 482 | DIIFFWVSRMIFQSLEFTGRQPFSNVLIHGLIRDEEGRKMSKSLGNGIDPMDVIEKYGAD | 541 |
| | | DII FWV+RMIFQ L FT ++PF LIHGL+RDE+GRKMSKSLGNGIDPMDVIEKYGAD | |
| Sbjct: | 507 | DIIPFWVARMIFQGLHFTHQRPFQYTLIHGLMRDEQGRKMSKSLGNGIDPMDVIEKYGAD | 566 |
| Query: | 542 | ALRWFLSNGSAPGQDVRFSYEKMDASWNFINKIWNISRYILMNNEGLTLDQARENVEKVV | 601 |
| | | ALRWFL G+ PGQD RFSY++++A+WNFINKIWNISR+++MN L Q + | |
| Sbjct: | 567 | ALRWFLITGNKPGQDTRFSYKQVEAAWNFINKIWNISRFVMMNLGDLDTPQQPD------ | 620 |
| Query: | 602 | NSQVGNVTDRWILHNLNETVGKVTENFDKFEFGVAGHILYNFIWEEFANWYVELTKEVLY | 661 |
| | | +++D+W+ LNET+ +V + +FEFG G LYNF W A+WYVE++KEVLY | |
| Sbjct: | 621 | -PSTFDLSDKWLFAQLNETIKQVMDLSARFEFGEMGRTLYNFTWNVLADWYVEMSKEVLY | 679 |
| Query: | 662 | SDNEDEKVITRSVLLYTLDQILRLLHPINPFVTEEIF--GQYAEGSIVLASYPQVNATFE | 719 |
| | | D+E K R L Y LDQILRLLHP+NPFV +++ + SIV ASYP N FE | |
| Sbjct: | 680 | GDDEQAKAAKRVNLAYALDQILRLLHPVMPFVHGKLWLALPHTGKSIVTASYPVANTAFE | 739 |
| Query: | 720 | NQTAHKGVESLKDLIRSVRNSRAEVNVAPSKPITILVKTSDSELESFFKDNSNYIKRFTN | 779 |
| | | N A ++++ LIR VR R E + ILVK +D L+ F+ N ++I RF N | |
| Sbjct: | 740 | NADATSAMDAIIALIRGVRGIRKEAGAPLKTKVDILVKLTDPALKPIFEQNFDFIDRFVN | 799 |
| Query: | 780 | PETLEISSAIATPELAMSSVITGAEIFLPLADLLNVEEELARLEKELAKWQKELDNVGKK | 839 |
| | | + + + +A P++A S+VITGA IF+PL +L++++EE A+L K+ K ++E+ + KK | |
| Sbjct: | 800 | SKAFTVGTDVAEPKMAGSAVITGATIFVPLNELIDLDEEKAKLTKDAKKLEQEIARIDKK | 859 |
| Query: | 840 | LSNERFVANAKPEVVQKEKDKQTDYQTKYDATIARIEEMKK | 880 |
| | | L+N+ F++ A VV +++ K++D++ + +T R+E++++ | |
| Sbjct: | 860 | LNNQGFLSKAPEAVVAEQRTKRSDFEDQLTSTKQRLEQLQR | 900 |

[1561] A related DNA sequence was identified in S. pyogenes <SEQ ID 723> which encodes the amino acid sequence <SEQ ID 724>. Analysis of this protein sequence reveals the following:

Possible site: 61
>>> Seems to have no N-terminal signal sequence
----- Final Results -----
bacterial cytoplasm --- Certainty = 0.5062 (Affirmative) < succ>
bacterial membrane --- Certainty = 0.0000 (Not Clear) < succ>
bacterial outside --- Certainty = 0.0000 (Not Clear) < succ>

[1562] An alignment of the GAS and GBS proteins is shown below:

| Identities = 782/878 (89%), Positives = 818/878 (93%) | | | |
|---|---|---|---|
| Query: | 4 | ELSPKYNPAEVEEGRYQTWLDQDVFKPSGDTEAKPYSIVIPPPNVTGKLHLGHAWDTTLQ | 63 |
| | | ELSPKYNPAEVE GRYQ WLD DVFKPSGD +AKPYSIVIPPPNVTGKLHLGHAWDTTLQ | |
| Sbjct: | 3 | ELSPKYNPAEVEAGRYQKWLDADVFKPSGDQKAKPYSIVIPPPNVTGKLHLGHAWDTTLQ | 62 |
| Query: | 64 | DIIIRQKRMQGFDTLWLPGMDHAGIATQAKVEERLREQGISRYDLGREKFLDKVWEWKDE | 123 |
| | | DIIIRQKRMQGFDTLWLPGMDHAGIATQAKVEERLREQGISRYDLGR+KFLDKVWEWKDE | |
| Sbjct: | 63 | DIIIRQKRMQGFDTLWLPGMDHAGIATQAKVEERLREQGISRYDLGRDKFLDKVWEWKDE | 122 |
| Query: | 124 | YAATIKSQWGKMGLSVDYSRERFTLDEGLSKAVRKVFVDLYNKGWIYRGEFIINWDPAAR | 183 |
| | | YA TIK QWGKMGLSVDYSRERFTLDEGLSKAVRKVFVDLY KGWIYRGEFIINWDPAAR | |
| Sbjct: | 123 | YATTIKEQWGKMGLSVDYSRERFTLDEGLSKAVRKVFVDLYKKGWIYRGEFIINWDPAAR | 182 |
| Query: | 184 | TALSDIEVIHKDVEGAFYHMNYMLEDGSRALEVATTRPETMFGDVAVAVNPEDARYKDLI | 243 |
| | | TALSDIEVIHKDVEGAFYHMNYMLEDGSRAL+VATTRPETMFGDVAVAVNPED RYKDLI | |
| Sbjct: | 183 | TALSDIEVIHKDVEGAFYHMNYMLEDGSRALQVATTRPETMFGDVAVAVNPEDPRYKDLI | 242 |
| Query: | 244 | GQNVILPIINKPIPIVADEHADPEFGTGVVKITPAHDPNDFAVGQRHNLPQVNVMNDDGT | 303 |
| | | G+NVILPI+NK IPIV DEHADPEFGTGVVKITPAHDPNDF VGQRHNLPQVNVMNDDGT | |
| Sbjct: | 243 | GKNVILPIVNKLIPIVGDEHADPEFGTGVVKITPAHDPNDFEVGQRHNLPQVNVMNDDGT | 302 |
| Query: | 304 | MNELADEFNGMDRFEARKAVVAKLESLGNLVKIKKTTHSVGHSERTGVVVEPRLSTQWFV | 363 |
| | | MNELA +F GMDRFEAR+A VAKLE LG LV I+K HSVGHSER+G VVEPRLSTQWFV | |
| Sbjct: | 303 | MNELAGDFAGMDRFEARQATVAKLEELGALVNIEKRVHSVGHSERSGAVVEPRLSTQWFV | 362 |
| Query: | 364 | KMDQLAKNAIANQDTEDKVEFYPPRFNDTFMSWMENVHDWVISRQLWWGHQIPAWYNVNG | 423 |
| | | KMD+LAK A+ NQ+T+D+V+FYPPRFNDTF+ WMENVHDWVISRQLWWGHQIPAWYN G | |
| Sbjct: | 363 | KMDELAKQAMDNQETDDRVDFYPPRFNDTFLQWMENVHDWVISRQLWWGHQIPAWYNAEG | 422 |
| Query: | 424 | EMYVGEDAPEGDGWTQDEDVLDTWFSSALWPFSTMGWPDTEAADFKRYFPTSTLVTGYDI | 483 |
| | | E+YVGE+APEGD WTQDEDVLDTWFSSALWPFSTMGWPDT+ DFKRYFPTSTLVTGYDI | |
| Sbjct: | 423 | EIYVGEEAPEGDDWTQDEDVLDTWFSSALWPFSTMGWPDTDVEDFKRYFPTSTLVTGYDI | 482 |
| Query: | 484 | IFFWVSRMIFQSLEFTGRQPFSNVLIHGLIRDEEGRKMSKSLGNGIDPMDVIEKYGADAL | 543 |
| | | IFFWVSRMIFQSLEFTGRQPF NVLIHGLIRDEEGRKMSKSLGNGIDPMDVIEKYGAD+L | |
| Sbjct: | 483 | IFFWVSRMIFQSLEFTGRQPFQNVLIHGLIRDEEGRKMSKSLGNGIDPMDVIEKYGADSL | 542 |
| Query: | 544 | RWFLSNGSAPGQDVRFSYEKMDASWNFINKIWNISRYILMNNEGLTLDQARENVEKVVNS | 603 |
| | | RWFLSNGSAPGQDVRFSYEKMDASWNFINKIWNISRYILMNNEGLTL+ A NV KV S | |
| Sbjct: | 543 | RWFLSNGSAPGQDVRFSYEKMDASWNFINKIWNISRYILMNNEGLTLEDAESNVAKVAAS | 602 |
| Query: | 604 | QVGNVTDRWILHNLNETVGKVTENFDKFEFGVAGHILYNFIWEEFANWYVELTKEVLYSD | 663 |
| | | + GNVTD+WILHNLNET+ KVTENFDKFEFGVAGHILYNFIWEEFANWYVELTKEVLYSD | |
| Sbjct: | 603 | EAGNVTDQWILHNLNETIAKVTENFDKFEFGVAGHILYNFIWEEFANWYVELTKEVLYSD | 662 |
| Query: | 664 | NEDEKVITRSVLLYTLDQILRLLHPIMPFVTEEIFGQYAEGSIVLASYPQVNATFENQTA | 723 |
| | | NE EKVITRSVLLYTLD+ILRLLHPIMPFVTEEI+ QYA+GSIV YP V FEN+ A | |
| Sbjct: | 663 | NEAEKVITRSVLLYTLDKILRLLHPIMPFVTEEIYAQYAQGSIVTVDYPVVRPAFENEAA | 722 |
| Query: | 724 | HKGVESLKDLIRSVRNSRAEVNVAPSKPITILVKTSDSELESFFKDNSNYIKRFTNPETL | 783 |
| | | HKGVESLKDLIR+VRN+RAEVNVAPSKPITILVKT+DSELE FF N NYIK FTNPE L | |
| Sbjct: | 723 | HKGVESLKDLIRAVRNARAEVNVAPSKPITILVKTADSELEDFFNSNINYIKCFTNPEKL | 782 |
| Query: | 784 | EISSAIATPELAMSSVITGAEIFLPLADLLNVEEELARLEKELAKWQKELDMVGKKLSNE | 843 |
| | | EISSAIA PELAM+S+ITGAEI+LPLADLLNVEEELARL+KELAKWQKELDMVGKKL NE | |
| Sbjct: | 783 | EISSAIAAPELAMTSIITGAEIYLPLADLLNVEEELARLDKELAKWQKELDMVGKKLGNE | 842 |
| Query: | 844 | RFVANAKPEVVQKEKDKQTDYQTKYDATIARIEMKKL | 881 |
| | | RFVANAKPEVVQKEKDKQ DYQ KYDAT RI EMKK+ | |
| Sbjct: | 843 | RFVANAKPEVVQKEKDKQADYQAKYDATQERIAEMKKI | 880 |

[1563] Based on this analysis, it was predicted that these proteins and their epitopes could be useful antigens for vaccines or diagnostics.

### EXAMPLE 228

[1564] A DNA sequence (GBSx0242) was identified in S. agalactiae <SEQ ID 725> which encodes the amino acid sequence <SEQ ID 726>. Analysis of this protein sequence reveals the following:

Possible site: 30
>>> Seems to have no N-terminal signal sequence
----- Final Results -----
bacterial cytoplasm --- Certainty = 0.0669 (Affirmative) < succ>
bacterial membrane --- Certainty = 0.0000 (Not Clear) < succ>
bacterial outside --- Certainty = 0.0000 (Not Clear) < succ>

[1565] The protein has no significant homology with any sequences in the GENPEPT database.

[1566] A related DNA sequence was identified in S. pyogenes <SEQ ID 727> which encodes the amino acid sequence <SEQ ID 728>. Analysis of this protein sequence reveals the following:

```
Possible site: 57
>>> Seems to have a cleavable N-term signal seq.
----- Final Results -----
                                bacterial outside --- Certainty = 0.3000(Affirmative) < succ>
                              bacterial membrane --- Certainty = 0.0000(Not Clear) < succ>
                            bacterial cytoplasm --- Certainty = 0.0000(Not Clear) < succ>
```

[1567] The protein has no significant homology with any sequences in the GENPEPT database.

[1568] An alignment of the GAS and GBS proteins is shown below:

| Identities = 148/191 (77%), Positives = 165/191 (85%) | | | |
|---|---|---|---|
| Query: | 14 | GEKKKMNIIIIGAQASGKMTIGQEIAKQTGMTLFHNHDSIDFVLRFMPWSPDSIALTESI | 73 |
| | | G + KMN+IIIGAQASGKMTIGQE+A+QTGMTLFHNHDSIDFVLRFMPWS +S AL E I | |
| Sbjct: | 3 | GAETKMNLIIIGAQASGKMTIGQEVARQTGMTLFHNHDSIDFVLRFMPWSQESTALIERI | 62 |
| Query: | 74 | RFKFFETFAKTGQEMIFTIVIDFNDSRDVVFLEKIQIVFQSHNQEVLFVELETELSERLK | 133 |
| | | RF FFETFAKTGQ+MIFTIVIDFND DV LEKIQ VFQS++QEVLFVEL+T++ ERLK | |
| Sbjct: | 63 | RFAFFETFAKTGQDMIFTIVIDFNDPNDVAMLEKIQAVFQSYDQEVLFVELKTDIEERLK | 122 |
| Query: | 134 | RNRTENRLKHKPSKRDIKWSESDICSTMDYAIFNPEVAPEALTYYHKINNTCLTATETAY | 193 |
| | | RNRTENRLKHKP KR+I+WSE DI STM YA+FNPE P+ LT+Y KINNT LTA ETA | |
| Sbjct: | 123 | RNRTENRLKHKPLKRNIEWSEQDIQSTMAYAVFNPEEPPKTLTHYQKINNTQLTAAETAQ | 182 |
| Query: | 194 | LIIQKINQIKE | 204 |
| | | LIIQK+ IKE | |
| Sbjct: | 183 | LIIQKMTHIKE | 193 |

[1569] Based on this analysis, it was predicted that these proteins and their epitopes could be useful antigens for vaccines or diagnostics.

### EXAMPLE 229

[1570] A DNA sequence (GBSx0243) was identified in S. agalactiae <SEQ ID 729> which encodes the amino acid sequence <SEQ ID 730>. Analysis of this protein sequence reveals the following:

```
Possible site: 49
>>> Seems to have no N-terminal signal sequence
----- Final Results -----
                            bacterial cytoplasm --- Certainty = 0.3614(Affirmative) < succ>
                              bacterial membrane --- Certainty = 0.0000(Not Clear) < succ>
                                bacterial outside --- Certainty = 0.0000(Not Clear) < succ>
```

[1571] The protein has homology with the following sequences in the GENPEPT database:

| >GP: BAB04556 GB: AP001510 unknown conserved protein | | | |
|---|---|---|---|
| [Bacillus halodurans] | | | |
| Identities = 60/189 (31%), Positives = 102/189 (53%), Gaps = 3/189 (1%) | | | |
| Query: | 7 | EIVDNQLPVVETNRLLLRQRKLEDAKEIFEFVKLDEVSYPAGFPAVKSLEEEITYIQEIY | 66 |
| | | E + LP +ET RL LR+ +DA I+++ ++V+ + +S+++ ++ + | |
| Sbjct: | 4 | EDIYGDLPTLETERLRLRKFYKDDAAAIYDYASNEQVTKYVLWETHQSIKDSEAFLA--F | 61 |
| Query: | 67 | PTNLEKEKLPSGYAITLKGDDKVIGSVDFNH-RHEDDIFEIGYLLHPDYWGQGIVPEAAS | 125 |
| | | N EK S +AI LK ++++IG+VDF + +D E+GY+L YWGQGI+ EA + | |
| Sbjct: | 62 | ALNKYDEKDVSPWAIELKRNERMIGTVDFVWWKPKDKTAELGYVLSEPYWGQGIMTEAVN | 121 |
| Query: | 126 | ALVEIGFTLLGLHKIELGCYDYNKQSQAVARKLGFTLEANIRDRRDAQGKRCGDMRFGLL | 185 |
| | | ALVE GF + L +I+ C+ N S V K G E R +G + ++ | |
| Sbjct: | 122 | ALVEFGFNNMELERIQAKCFAENISSARVMEKAGLIYEGTHRRAIYVKGAHRDFKVYAII | 181 |
| Query: | 186 | RSEWEKKRR | 194 |
| | | R ++E+K + | |
| Sbjct: | 182 | REDYEQKHQ | 190 |

[1572] A related DNA sequence was identified in S. pyogenes <SEQ ID 731> which encodes the amino acid sequence <SEQ ID 732>. Analysis of this protein sequence reveals the following:

```
Possible site: 30
>>> Seems to have no N-terminal signal sequence
----- Final Results -----
                            bacterial cytoplasm --- Certainty = 0.1864(Affirmative) < succ>
                              bacterial membrane --- Certainty = 0.0000(Not Clear) < succ>
                                bacterial outside --- Certainty = 0.0000(Not Clear) < succ>
```

[1573] An alignment of the GAS and GBS proteins is shown below:

| Identities = 50/58 (86%), Positives = 56/58 (96%) | | | |
|---|---|---|---|
| Query: | 137 | LHKIELGCYDYNKQSQAVARKLGFTLEANIRDRRDAQGKRCGDMRFGLLRSEWEKKRR | 194 |
| | | LHKIELGCYDYNKQSQAVARKLGFTLEAN RDR+D QG+RCGDMRFGLLRSEWE++++ | |
| Sbjct: | 1 | LHKIELGCYDYNKQSQAVARKLGFTLEANARDRKDVQGRRCGDMRFGLLRSEWEEQKQ | 58 |

[1574] Based on this analysis, it was predicted that these proteins and their epitopes could be useful antigens for vaccines or diagnostics.

### EXAMPLE 230

[1575] A DNA sequence (GBSx0244) was identified in S. agalactiae <SEQ ID 733> which encodes the amino acid sequence <SEQ ID 734>. This protein is predicted to be ribosomal-protein-alanine N-acetyltransferase. Analysis of this protein sequence reveals the following:

```
Possible site: 54
>>> Seems to have no N-terminal signal sequence
----- Final Results -----
                            bacterial cytoplasm --- Certainty = 0.4066(Affirmative) < succ>
                              bacterial membrane --- Certainty = 0.0000(Not Clear) < succ>
                                bacterial outside --- Certainty = 0.0000(Not Clear) < succ>
```

[1576] A related GBS nucleic acid sequence <SEQ ID 9599> which encodes amino acid sequence <SEQ ID 9600> was also identified.

[1577] The protein has homology with the following sequences in the GENPEPT database:

| >GP: BAB04418 GB: AP001509 ribosomal-protein-alanine | | | |
|---|---|---|---|
| N-acetyltransferase [Bacillus halodurans] | | | |
| Identities = 63/185 (34%), Positives = 95/185 (51%), Gaps = 11/185 (5%) | | | |
| Query: | 53 | KALPKLETDRLILRQRTVGDVPAMFDYVCLEEVAYPAGLSPIASLEDEYDYFENRYYQNL | 112 |
| | | K P LET RLILR+ T D ++ Y+ +EV GL P +LED E +Y+++ | |
| Sbjct: | 6 | KRFPILETKRLILRKITTDDARSILSYLSDKEVMKYFGLEPFQTLEDALG--EIAWYESI | 63 |
| Query: | 113 | EKAKLPSGYGITVKGSDRIIGSCAFN-----HRHEDDVFEICYLLHPDYWGHGYMTEAVA | 167 |
| | | + +GIT+KG D +IGSC F+ H + FE+ L YWG G +EA+ | |
| Sbjct: | 64 | LHEQTGIRWGITLKGQDEVIGSCGFHQWVPKHHRAEIGFELSKL----YWGQGIASEAIR | 119 |
| Query: | 168 | ALIEVGFTLLNLHKIEIRCYDYNKQSRRVAEKLGFTLEATIRDRKDNQDNRCVNLIYGLL | 227 |
| | | A+I+ GF L L +I+ N S+R+ EK GF E +R + +Y LL | |
| Sbjct: | 120 | AVIQYGFEHLELQRIQALIEPPNIPSQRLVEKQGFISEGLLRSYEYTCGKFDDLYMYSLL | 179 |
| Query: | 228 | RSEWE | 232 |
| | | + +++ | |
| Sbjct: | 180 | KRDFD | 184 |

[1578] There is also homology to SEQ ID 732:

| Identities = 39/54 (72%), Positives = 44/54 (81%) | | | |
|---|---|---|---|
| Query: | 179 | LHKIEIRCYDYNKQSRRVAEKLGFTLEATIRDRKDNQDNRCVNLIYGLLRSEWE | 232 |
| | | LHKIE+ CYDYNKQS+ VA KLGFTLEA RDRKD Q RC ++ +GLLRSEWE | |
| Sbjct: | 1 | LHKIELGCYDYNKQSQAVARKLGFTLEANARDRKDVQGRRCGDMRFGLLRSEWE | 54 |

[1579] Based on this analysis, it was predicted that these proteins and their epitopes could be useful antigens for vaccines or diagnostics.

### EXAMPLE 231

[1580] A DNA sequence (GBSx0245) was identified in S. agalactiae <SEQ ID 735> which encodes the amino acid sequence <SEQ ID 736>. Analysis of this protein sequence reveals the following:

```
Possible site: 51
>>> Seems to have no N-terminal signal sequence
----- Final Results -----
                            bacterial cytoplasm --- Certainty = 0.2719(Affirmative) < succ>
                              bacterial membrane --- Certainty = 0.0000(Not Clear) < succ>
                                bacterial outside --- Certainty = 0.0000(Not Clear) < succ>
```

[1581] The protein has no significant homology with any sequences in the GENPEPT database.

[1582] No corresponding DNA sequence was identified in S. pyogenes.

[1583] Based on this analysis, it was predicted that this protein and its epitopes, could be useful antigens for vaccines or diagnostics.

### EXAMPLE 232

[1584] A DNA sequence (GBSx0246) was identified in S. agalactiae <SEQ ID 737> which encodes the amino acid sequence <SEQ ID 738>. Analysis of this protein sequence reveals the following:

```
Possible site: 53
>>> Seems to have no N-terminal signal sequence
----- Final Results -----
                            bacterial cytoplasm --- Certainty = 0.3250(Affirmative) < succ>
                              bacterial membrane --- Certainty = 0.0000(Not Clear) < succ>
                                bacterial outside --- Certainty = 0.0000(Not Clear) < succ>
```

[1585] A related GBS nucleic acid sequence <SEQ ID 9597> which encodes amino acid sequence <SEQ ID 9598> was also identified.

[1586] The protein has no significant homology with any sequences in the GENPEPT database.

[1587] A related DNA sequence was identified in S. pyogenes <SEQ ID 739> which encodes the amino acid sequence <SEQ ID 740>. Analysis of this protein sequence reveals the following:

```
Possible site: 38
>>> Seems to have no N-terminal signal sequence
----- Final Results -----
                            bacterial cytoplasm --- Certainty = 0.3293(Affirmative) < succ>
                              bacterial membrane --- Certainty = 0.0000(Not Clear) < succ>
                                bacterial outside --- Certainty = 0.0000(Not Clear) < succ>
```

[1588] An alignment of the GAS and GBS proteins is shown below:

| Identities = 24/55 (43%), Positives = 38/55 (68%) | | | |
|---|---|---|---|
| Query: | 56 | LLEGLTANKQDVLKEAGLVSLEAFAKVSEADVLALKGIGPAAIKQLVDNGVVFAK | 110 |
| | | ++ G+ ++ + L G+ S +AF + +E D+LALKGIGPA +K+LV+NG F K | |
| Sbjct: | 77 | VVAGIRSDLVETLYAEGIHSAQAFKEWTEKDLLALKGIGPATVKKLVENGASFKK | 131 |

[1589] Based on this analysis, it was predicted that these proteins and their epitopes could be useful antigens for vaccines or diagnostics.

### EXAMPLE 233

[1590] A DNA sequence (GBSx0247) was identified in S. agalactiae <SEQ ID 741> which encodes the amino acid sequence <SEQ ID 742>. Analysis of this protein sequence reveals the following:

```
Possible site: 25
>>> Seems to have no N-terminal signal sequence
----- Final Results -----
                            bacterial cytoplasm --- Certainty = 0.2901(Affirmative) < succ>
                              bacterial membrane --- Certainty = 0.0000(Not Clear) < succ>
                                bacterial outside --- Certainty = 0.0000(Not Clear) < succ>
```

[1591] The protein has no significant homology with any sequences in the GENPEPT database.

[1592] A related DNA sequence was identified in S. pyogenes <SEQ ID 743> which encodes the amino acid sequence <SEQ ID 744>. Analysis of this protein sequence reveals the following:

```
Possible site: 27
>>> Seems to have no N-terminal signal sequence
----- Final Results -----
                            bacterial cytoplasm --- Certainty = 0.2536(Affirmative) < succ>
                              bacterial membrane --- Certainty = 0.0000(Not Clear) < succ>
                                bacterial outside --- Certainty = 0.0000(Not Clear) < succ>
```

[1593] An alignment of the GAS and GBS proteins is shown below:

| Identities = 57/84 (67%), Positives = 73/84 (86%) | | | |
|---|---|---|---|
| Query: | 1 | MSYEQEFLKDFEEWLQSQISINQMAMDSAKKVLEEDKDERAADAYIRYESKLDAYRFLQG | 60 |
| | | MSYE+EFLKDFE+W+++QI +NQ+AM ++++V +ED DERA DA+IRYESKLDAY FL G | |
| Sbjct: | 1 | MSYEKEFLKDFEDWVKTQIQVNQLAMATSQEVAQEDGDERAKDAFIRYESKLDAYEFLLG | 60 |
| Query: | 61 | KFNNYHNQKSFHDLPDGLFGQRHY | 84 |
| | | KF+NY N K+FHD+PD LFG RHY | |
| Sbjct: | 61 | KFDNYKNGKAFHDIPDELFGARHY | 84 |

[1594] Based on this analysis, it was predicted that these proteins and their epitopes could be useful antigens for vaccines or diagnostics.

### EXAMPLE 234

[1595] A DNA sequence (GBSx0248) was identified in S. agalactiae <SEQ ID 745> which encodes the amino acid sequence <SEQ ID 746>. This protein is predicted to be methyltransferase. Analysis of this protein sequence reveals the following:

```
Possible site: 61
>>> Seems to have no N-terminal signal sequence
----- Final Results -----
                            bacterial cytoplasm --- Certainty = 0.2469(Affirmative) < succ>
                              bacterial membrane --- Certainty = 0.0000(Not Clear) < succ>
                                bacterial outside --- Certainty = 0.0000(Not Clear) < succ>
```

[1596] A related DNA sequence was identified in S. pyogenes <SEQ ID 747> which encodes the amino acid sequence <SEQ ID 748>. Analysis of this protein sequence reveals the following:

```
Possible site: 35
>>> Seems to have no N-terminal signal sequence
----- Final Results -----
                            bacterial cytoplasm --- Certainty = 0.3352(Affirmative) < succ>
                              bacterial membrane --- Certainty = 0.0000(Not Clear) < succ>
                                bacterial outside --- Certainty = 0.0000(Not Clear) < succ>
```

[1597] An alignment of the GAS and GBS proteins is shown below:

| Identities = 26/60 (43%), Positives = 37/60 (61%) | | | |
|---|---|---|---|
| Query: | 23 | LKNERCPHPKLINVLERKLEIILGDQKHILEKDSLISLSPQETHHLRAIENSKFLQIELD | 82 |
| | | + E P K+I VLE +L L DQK +L ++SLI++ Q+ HHL A + K LQ+ LD | |
| Sbjct: | 42 | ISQETSPRDKVILVLEGQLIFDLEDQKQVLTQESLIAIPAQKVHHLEAKTDCKLLQVLLD | 101 |

[1598] Based on this analysis, it was predicted that these proteins and their epitopes could be useful antigens for vaccines or diagnostics.

### EXAMPLE 235

[1599] A DNA sequence (GBSx0249) was identified in S. agalactiae <SEQ ID 749> which encodes the amino acid sequence <SEQ ID 750>. This protein is predicted to be integrase (codV). Analysis of this protein sequence reveals the following:

```
Possible site: 59
>>> Seems to have no N-terminal signal sequence
----- Final Results -----
                            bacterial cytoplasm --- Certainty = 0.3842(Affirmative) < succ>
                              bacterial membrane --- Certainty = 0.0000(Not Clear) < succ>
                                bacterial outside --- Certainty = 0.0000(Not Clear) < succ>
```

[1600] No corresponding DNA sequence was identified in S. pyogenes.

[1601] Based on this analysis, it was predicted that this protein and its epitopes, could be useful antigens for vaccines or diagnostics.

### EXAMPLE 236

[1602] A DNA sequence (GBSx0250) was identified in S. agalactiae <SEQ ID 751> which encodes the amino acid sequence <SEQ ID 752>. Analysis of this protein sequence reveals the following:

```
Possible site: 22
>>> May be a lipoprotein
----- Final Results -----
  bacterial membrane --- Certainty = 0.0000 (Not Clear) <succ>
    bacterial outside --- Certainty = 0.0000 (Not Clear) <succ>
bacterial cytoplasm --- Certainty = 0.0000 (Not Clear) <succ>
```

[1603] The protein has no significant homology with any sequences in the GENPEPT database.

[1604] No corresponding DNA sequence was identified in S. pyogenes.

[1605] SEQ ID 752 (GBS128) was expressed in E. coli as a His-fusion product. SDS-PAGE analysis of total cell extract is shown in FIG. 23 (lane 5; MW 15 kDa). It was also expressed in E. coli as a GST-fusion product. SDS-PAGE analysis of total cell extract is shown in FIG. 32 (lane 4; 2 bands).

[1606] The GBS128-GST fusion product was purified (FIG. 198, lane 2) and used to immunise mice. The resulting antiserum was used for FACS (FIG. 288), which confirmed that the protein is immunoaccessible on GBS bacteria.

[1607] Based on this analysis, it was predicted that this protein and its epitopes, could be useful antigens for vaccines or diagnostics.

### EXAMPLE 237

[1608] A DNA sequence (GBSx0251) was identified in S. agalactiae <SEQ ID 753> which encodes the amino acid sequence <SEQ ID 754>. Analysis of this protein sequence reveals the following:

```
Possible site: 30
>>> Seems to have no N-terminal signal sequence
----- Final Results -----
bacterial cytoplasm --- Certainty = 0.2940 (Affirmative) <succ>
  bacterial membrane --- Certainty = 0.0000 (Not Clear) <succ>
    bacterial outside --- Certainty = 0.0000 (Not Clear) <succ>
```

[1609] The protein has no significant homology with any sequences in the GENPEPT database.

[1610] A related DNA sequence was identified in S. pyogenes <SEQ ID 755> which encodes the amino acid sequence <SEQ ID 756>. Analysis of this protein sequence reveals the following:

```
Possible site: 42
>>> Seems to have no N-terminal signal sequence
----- Final Results -----
bacterial cytoplasm --- Certainty = 0.2518 (Affirmative) <succ>
  bacterial membrane --- Certainty = 0.0000 (Not Clear) <succ>
    bacterial outside --- Certainty = 0.0000 (Not Clear) <succ>
```

[1611] An alignment of the GAS and GBS proteins is shown below:

| Identities = 30/90 (33%), Positives = 49/90 (54%), Gaps = 10/90 (11%) | | |
|---|---|---|
| Query: 3 | TVAVRVDDQLKDDATELFQSLGLDMSTAVKMFLIQSVKTQSIPFEIK--------NKSSV | 54 |
| | T+ +RVDD +K A ++ + LG+ MSTA+ MFL Q + T IPF++ N + | |
| Sbjct: 15 | TLNLRVDDSVKSAADDILKRLGIPMSTAIDMFLNQIILTGGIPFDVSLPEAPQRVNVDYM | 74 |
| Query: 55 | SDEEFQNLVETKLKGIRVKASDPESVNAFF | 84 |
| | S E+F + + T + K +P+ V F+ | |
| Sbjct: 75 | SQEKFYDKLITSFED--AKTCNPQDVGKFY | 102 |

[1612] Based on this analysis, it was predicted that these proteins and their epitopes could be useful antigens for vaccines or diagnostics.

### EXAMPLE 238

[1613] A DNA sequence (GBSx0252) was identified in S. agalactiae <SEQ ID 757> which encodes the amino acid sequence <SEQ ID 758>. This protein is predicted to be surface protein Rib. Analysis of this protein sequence reveals the following:

| Possible site: 24 | | |
|---|---|---|
| >>> Seems to have no N-terminal signal sequence | | |
| INTEGRAL | Likelihood = −2.81 | Transmembrane 370-386 (368-388) |

```
----- Final Results -----
  bacterial membrane --- Certainty = 0.2126 (Affirmative) <succ>
    bacterial outside --- Certainty = 0.0000 (Not Clear) <succ>
bacterial cytoplasm --- Certainty = 0.0000 (Not Clear) <succ>
```

[1614] A related GBS nucleic acid sequence <SEQ ID 9593> which encodes amino acid sequence <SEQ ID 9594> was also identified. A related GBS nucleic acid sequence <SEQ ID 10773> which encodes amino acid sequence <SEQ ID 10774> was also identified.

[1615] A related DNA sequence was identified in S. pyogenes <SEQ ID 759> which encodes the amino acid sequence <SEQ ID 760>. Analysis of this protein sequence reveals the following:

| Possible site: 37 | | |
|---|---|---|
| >>> Seems to have a cleavable N-term signal seq. | | |
| INTEGRAL | Likelihood = −4.57 | Transmembrane 354-370 (353-371) |

```
----- Final Results -----
  bacterial membrane --- Certainty = 0.2826 (Affirmative) <succ>
    bacterial outside --- Certainty = 0.0000 (Not Clear) <succ>
bacterial cytoplasm --- Certainty = 0.0000 (Not Clear) <succ>
LPXTG motif: 344-348
```

[1616] An alignment of the GAS and GBS proteins is shown below:

| Identities = 64/277 (23%), Positives = 99/277 (35%), Gaps = 31/277 (11%) | | |
|---|---|---|
| Query: 126 | SIGNLPDLPKGTTVAFETPVDTATPGDKPAKVVVTYPDGSKDTVDVTVKVVDPRTDADKN | 185 |
| | ++ +LP + TT E PV + V + D+ + T P A | |
| Sbjct: 121 | AVKDLPASTESTTQPVEAPVQETQASASDSMVTGDSTSVTTDSPEETPSSESPVAPALSE | 180 |
| Query: 186 | DPAGKDQQVNVGETPKAEDSIGNLPDLPKGTTVAFETPVDTATPGDKPAKVVVTYPDGSK | 245 |
| | PA Q E P S P T A ETP + A P P + S+ | |
| Sbjct: 181 | APA----QPAESEEPSVAASSEETPS--PSTPAAPETPEEPAAPSPSPESEEPSVAAPSE | 234 |
| Query: 246 | DTVDVTVKVVDPRTDADKNDPAGKDQQVNVGETPKAEDSIGNLPDLPKGTTVAFETPVDT | 305 |
| | +T P A + PA ++ T + P P + +TP | |
| Sbjct: 235 | ETPSPET----PEEPAAPSQPAESEESSVAATTSPS-------PSTPAESET--QTPPAV | 281 |
| Query: 306 | ATPGDKPAKVVVTYPDGSKDTVDVTVKVVDPRTDADK----------NDPAGKDQQVNGK | 355 |
| | DKP+ | P S + TV+ + +DK N + + + |
| Sbjct: 282 | TKDSDKPSSAAEK-PAASSLVSEQTVQQPTSKRSSDKKEEQEQSYSPNRSLSRQVRAHES | 340 |
| Query: 356 | GNKLPATGENATPFFNVVALTIMSSVGLLSVSKKKED | 392 |
| | G LP+TGE A P F + +T+MS G L V+K++++ | |
| Sbjct: 341 | GKYLPSTGEKAQPLF-IATMTLMSLFGSLLVTKRQKE | 376 |

[1617] Based on this analysis, it was predicted that these proteins and their epitopes could be useful antigens for vaccines or diagnostics.

### EXAMPLE 239

[1618] A DNA sequence (GBSx0253) was identified in S. agalactiae <SEQ ID 761> which encodes the amino acid sequence <SEQ ID 762>. This protein is predicted to be surface protein Rib. Analysis of this protein sequence reveals the following:

```
Possible site: 49
>>> Seems to have no N-terminal signal sequence
----- Final Results -----
bacterial cytoplasm --- Certainty = 0.5289 (Affirmative) <succ>
  bacterial membrane --- Certainty = 0.0000 (Not Clear) <succ>
    bacterial outside --- Certainty = 0.0000 (Not Clear) <succ>
```

[1619] Based on this analysis, it was predicted that this protein and its epitopes, could be useful antigens for vaccines or diagnostics.

### EXAMPLE 240

[1620] A DNA sequence (GBSx0254) was identified in S. agalactiae <SEQ ID 763> which encodes the amino acid sequence <SEQ ID 764>. This protein is predicted to be surface protein Rib. Analysis of this protein sequence reveals the following:

| Possible site: 53 | | |
|---|---|---|
| >>> Seems to have no N-terminal signal sequence | | |
| INTEGRAL | Likelihood = −1.06 | Transmembrane 39-55 (39-55) |

```
----- Final Results -----
  bacterial membrane --- Certainty = 0.1426 (Affirmative) <succ>
    bacterial outside --- Certainty = 0.0000 (Not Clear) <succ>
bacterial cytoplasm --- Certainty = 0.0000 (Not Clear) <succ>
```

[1621] A related GBS nucleic acid sequence <SEQ ID 9591> which encodes amino acid sequence <SEQ ID 9592> was also identified.

[1622] The protein differs significantly from U58333 in several places:

| | | | |
|---|---|---|---|
| Query: | 157 | TKPDGQVDIVNVSLTIYNSSALRDKIDEVKK----------KAED-----PKWDEGSRDK | 201 |
| | | T PDG D V+V++ + + DK D K KAED P +G+ | |
| Sbjct: | 683 | TYPDGSKDTVDVTVKVVDPRTDADKNDPAGKDQQVNVGETPKAEDSIGNLPDLPKGTTVA | 742 |
| Query: | 202 | VLISLDDIKTDIDNNPK---TQSDIANKITEVTNLEKILVPRIPDADKNDPAGKDQQVNV | 258 |
| | | +D T D K T D + +VT K++ PR DADKNDPAGKDQQVNV | |
| Sbjct: | 743 | FETPVDTA-TPGDKPAKVVVTYPDGSKDTVDVT--VKVVDPRT-DADKNDPAGKDQQVNV | 798 |
| Query: | 157 | TKPDGQVDIVNVSLTIYNSSALRDKIDEVKK----------KAED-----PKWDEGSRDK | 201 |
| | | T PDG D V+V++ + + DK D K KAED P +G+ | |
| Sbjct: | 841 | TYPDGSKDTVDVTVKVVDPRTDADKNDPAGKDQQVNVGETPKAEDSIGNLPDLPKGTTVA | 900 |
| Query: | 202 | VLISLDDIKTDIDNNPK---TQSDIANKITEVTNLEKILVPRIPDADKNDPAGKDQQVNV | 258 |
| | | +D T D K T D + +VT K++ PR DADKNDPAGKDQQVNV | |
| Sbjct: | 901 | FETPVDTA-TPGDKPAKVVVTYPDGSKDTVDVT--VKVVDPRT-DADKNDPAGKDQQVNV | 956 |
| Query: | 157 | TKPDGQVDIVNVSLTIYNSSALRDKIDEVKK----------KAED-----PKWDEGSRDK | 201 |
| | | T PDG D V+V++ + + DK D K KAED P +G+ | |
| Sbjct: | 288 | TYPDGSKDTVDVTVKVVDPRTDADKNDPAGKDQQVNVGETPKAEDSIGNLPDLPKGTTVA | 347 |
| Query: | 202 | VLISLDDIKTDIDNNPK---TQSDIANKITEVTNLEKILVPRIPDADKNDPAGKDQQVNV | 258 |
| | | +D T D K T D + +VT K++ PR DADKNDPAGKDQQVNV | |
| Sbjct: | 348 | FETPVDTA-TPGDKPAKVVVTYPDGSKDTVDVT--VKVVDPRT-DADKNDPAGKDQQVNV | 403 |
| Query: | 157 | TKPDGQVDIVNVSLTIYNSSALRDKIDEVKK----------KAED-----PKWDEGSRDK | 201 |
| | | T PDG D V+V++ + + DK D K KAED P +G+ | |
| Sbjct: | 604 | TYPDGSKDTVDVTVKVVDPRTDADKNDPAGKDQQVNVGETPKAEDSIGNLPDLPKGTTVA | 663 |
| Query: | 202 | VLISLDDIKTDIDNNPK---TQSDIANKITEVTNLEKILVPRIPDADKNDPAGKDQQVNV | 258 |
| | | +D T D K T D + +VT K++ PR DADKNDPAGKDQQVNV | |
| Sbjct: | 664 | FETPVDTA-TPGDKPAKVVVTYPDGSKDTVDVT--VKVVDPRT-DADKNDPAGKDQQVNV | 719 |
| Query: | 157 | TKPDGQVDIVNVSLTIYNSSALRDKIDEVKK----------KAED-----PKWDEGSRDK | 201 |
| | | T PDG D V+V++ + + DK D K KAED P +G+ | |
| Sbjct: | 446 | TYPDGSKDTVDVTVKVVDPRTDADKNDPAGKDQQVNVGETPKAEDSIGNLPDLPKGTTVA | 505 |
| Query: | 202 | VLISLDDIKTDIDNNPK---TQSDIANKITEVTNLEKILVPRIPDADKNDPAGKDQQVNV | 258 |
| | | +D T D K T D + +VT K++ PR DADKNDPAGKDQQVNV | |
| Sbjct: | 506 | FETPVDTA-TPGDKPAKVVVTYPDGSKDTVDVT--VKVVDPRT-DADKNDPAGKDQQVNV | 561 |
| Query: | 157 | TKPDGQVDIVNVSLTIYNSSALRDKIDEVKK----------KAED-----PKWDEGSRDK | 201 |
| | | T PDG D V+V++ + + DK D K KAED P +G+ | |
| Sbjct: | 920 | TYPDGSKDTVDVTVKVVDPRTDADKNDPAGKDQQVNVGETPKAEDSIGNLPDLPKGTTVA | 979 |
| Query: | 202 | VLISLDDIKTDIDNNPK---TQSDIANKITEVTNLEKILVPRIPDADKNDPAGKDQQVNV | 258 |
| | | +D T D K T D + +VT K++ PR DADKNDPAGKDQQVNV | |
| Sbjct: | 980 | FETPVDTA-TPGDKPAKVVVTYPDGSKDTVDVT--VKVVDPRT-DADKNDPAGKDQQVNV | 1035 |

[1623] No corresponding DNA sequence was identified in S. pyogenes.

[1624] Based on this analysis, it was predicted that these proteins and their epitopes could be useful antigens for vaccines or diagnostics.

### EXAMPLE 241

[1625] A DNA sequence (GBSx0255) was identified in S. agalactiae <SEQ ID 765> which encodes the amino acid sequence <SEQ ID 766>. This protein is predicted to be ara-C-like activator. Analysis of this protein sequence reveals the following:

| Possible site: 30 | | | | |
|---|---|---|---|---|
| >>> Seems to have no N-terminal signal sequence | | | | |
| | INTEGRAL | Likelihood = −0.37 | Transmembrane | 8-24 (8-25) |

```
----- Final Results -----
                              bacterial membrane --- Certainty = 0.1150(Affirmative) < succ>
                                bacterial outside --- Certainty = 0.0000(Not Clear) < succ>
                            bacterial cytoplasm --- Certainty = 0.0000(Not Clear) < succ>
```

[1626] A related GBS nucleic acid sequence <SEQ ID 9589> which encodes amino acid sequence <SEQ ID 9590> was also identified.

[1627] There is homology to SEQ ID 460.

[1628] Based on this analysis, it was predicted that these proteins and their epitopes could be useful antigens for vaccines or diagnostics.

### EXAMPLE 242

[1629] A DNA sequence (GBSx0256) was identified in S. agalactiae <SEQ ID 767> which encodes the amino acid sequence <SEQ ID 768>. Analysis of this protein sequence reveals the following:

```
Possible site: 53
>>> Seems to have no N-terminal signal sequence
----- Final Results -----
                            bacterial cytoplasm --- Certainty = 0.1200(Affirmative) < succ>
                              bacterial membrane --- Certainty = 0.0000(Not Clear) < succ>
                                bacterial outside --- Certainty = 0.0000(Not Clear) < succ>
```

[1630] A related GBS nucleic acid sequence <SEQ ID 9587> which encodes amino acid sequence <SEQ ID 9588> was also identified.

[1631] A related DNA sequence was identified in S. pyogenes <SEQ ID 769> which encodes the amino acid sequence <SEQ ID 770>. Analysis of this protein sequence reveals the following:

Possible site: 50
>>> Seems to have no N-terminal signal sequence
----- Final Results -----
bacterial cytoplasm --- Certainty = 0.0679 (Affirmative) < succ>
bacterial membrane --- Certainty = 0.0000 (Not Clear) < succ>
bacterial outside --- Certainty = 0.0000 (Not Clear) < succ>

[1632] An alignment of the GAS and GBS proteins is shown below:

| Identities = 135/176 (76%), Positives = 161/176 (90%) | | | |
|---|---|---|---|
| Query: | 1 | MSYMVKDRQIQKTKVAIYNAFISLLQENDYSKITVQDVIGLANVGRSTFYSHYESKEVLL | 60 |
| | | +S M KDRQI+KTK AIY+AFI+LLQ+ +YSKITV+D+I LANVGRSTFY+HYESKE+LL | |
| Sbjct: | 1 | VSDMTKDRQIKKTKTAIYSAFIALLQKKEYSKITVRDMITLANVGRSTFYAHYESKEMLL | 60 |
| Query: | 61 | KELCEDLFHHLFKQGRDVTFEEYLVHILKHFEQNQDSIATLLLSDDPYFLLRFRSELEHD | 120 |
| | | KELCE+LFHHLF+Q R+VTFE+YLVHILKHFEQN+DSIATLLLS+DPYFLLRF++ELEHD | |
| Sbjct: | 61 | KELCEELFHHLFRQKRNVTFEDYLVHILKHFEQNKDSIATLLLSNDPYFLLRFKNELEHD | 120 |
| Query: | 121 | VYPRLREEYITKVDIPEDFLKQFLLSSFIETLKWWLHQRQKMTVEDLLKYYLTMVE | 176 |
| | | VYP LR +YI K IPE FLKQF+LSSFIETLKWWLHQRQ+M+ +LLKYYL +++ | |
| Sbjct: | 121 | VYPNLRCKYIDKTTIPEVFLKQFVLSSFIETLKWWLHQRQRMSANELLKYYLELIK | 176 |

[1633] Based on this analysis, it was predicted that these proteins and their epitopes could be useful antigens for vaccines or diagnostics.

### EXAMPLE 243

[1634] A DNA sequence (GBSx0257) was identified in S. agalactiae <SEQ ID 771> which encodes the amino acid sequence <SEQ ID 772>. Analysis of this protein sequence reveals the following:

Possible site: 29
>>> Seems to have no N-terminal signal sequence
----- Final Results -----
bacterial cytoplasm --- Certainty = 0.3573 (Affirmative) < succ>
bacterial membrane --- Certainty = 0.0000 (Not Clear) < succ>
bacterial outside --- Certainty = 0.0000 (Not Clear) < succ>

[1635] The protein has no significant homology with any sequences in the GENPEPT database.

[1636] No corresponding DNA sequence was identified in S. pyogenes.

[1637] Based on this analysis, it was predicted that this protein and its epitopes, could be useful antigens for vaccines or diagnostics.

### EXAMPLE 244

[1638] A DNA sequence (GBSx0258) was identified in S. agalactiae <SEQ ID 773> which encodes the amino acid sequence <SEQ ID 774>. Analysis of this protein sequence reveals the following:

| Possible site: 35 | | | |
|---|---|---|---|
| >>> Seems to have a cleavable N-term signal seq. | | | |
| INTEGRAL | Likelihood = −10.19 | Transmembrane | 112-128 (107-131) |
| INTEGRAL | Likelihood = −8.07 | Transmembrane | 77-93 (71-97) |
| INTEGRAL | Likelihood = −6.10 | Transmembrane | 144-160 (138-165) |
| INTEGRAL | Likelihood = −3.03 | Transmembrane | 165-181 (164-182) |

----- Final Results -----
bacterial membrane --- Certainty = 0.5076 (Affirmative) < succ>
bacterial outside --- Certainty = 0.0000 (Not Clear) < succ>
bacterial cytoplasm --- Certainty = 0.0000 (Not Clear) < succ>

[1639] A related DNA sequence was identified in S. pyogenes <SEQ ID 775> which encodes the amino acid sequence <SEQ ID 776>. Analysis of this protein sequence reveals the following:

| Possible site: 35 | | | |
|---|---|---|---|
| >>> Seems to have an uncleavable N-term signal seq | | | |
| INTEGRAL | Likelihood = −9.13 | Transmembrane | 112-128 (107-130) |
| INTEGRAL | Likelihood = −5.89 | Transmembrane | 144-160 (138-163) |
| INTEGRAL | Likelihood = −5.47 | Transmembrane | 7-23 (6-29) |
| INTEGRAL | Likelihood = −3.50 | Transmembrane | 77-93 (74-94) |
| INTEGRAL | Likelihood = −2.07 | Transmembrane | 166-182 (165-183) |

----- Final Results -----
bacterial membrane --- Certainty = 0.4652 (Affirmative) < succ>
bacterial outside --- Certainty = 0.0000 (Not Clear) < succ>
bacterial cytoplasm --- Certainty = 0.0000 (Not Clear) < succ>

[1640] An alignment of the GAS and GBS proteins is shown below:

| Identities = 212/287 (73%), Positives = 245/287 (84%) | | | |
|---|---|---|---|
| Query: | 1 | MTSNKKVAIAFILNISFSVLEFIFGSLFFSGAILADAVHDFGDAIAIGISATLEKKSKKD | 60 |
| | | M ++KKV I FILN+SFS++EFIFG+LFFSGAILADAVHDFGDAIAIGISA LE+K+ K | |
| Sbjct: | 1 | MPASKKVTIIFILNLSFSLIEFIFGTLFFSGAILADAVHDFGDAIAIGISAILERKAVKK | 60 |
| Query: | 61 | EDTIFSLGYKRFSLLGALITSLILISGSILVMIENIPKLWHPTPVNYHGMFILAVIAIII | 120 |
| | | E FSLGYKRFSLLGAL T+LILISGS+LVMIE IPKLWHPT VNY GMF+LA+ AIII | |
| Sbjct: | 61 | ESPNFSLGYKRFSLLGALTTNLILISGSLLVMIETIPKLWHPTIVNYDGMFVLAIFAIII | 120 |
| Query: | 121 | NGLASFILHSGQSKHEEILSLHFLEDILGWLAIIVISLILNWKPLYILDPLLSVAISTFI | 180 |
| | | NG ASFI+HS Q+K+EEILSLHFLEDILGWLAII++SLIL WKP YILDPLLS+AI++FI | |
| Sbjct: | 121 | NGFASFIIHSNQTKNEEILSLHFLEDILGWLAIIILSLILKWKPWYILDPLLSIAIASFI | 180 |
| Query: | 181 | LSKALPKLLSTLKLFLDGVPDSIDYAALHDELKGLSQVRSINQLNIWSMDGIDNRAIIHC | 240 |
| | | LSKALPKL++T +FLDGVPDSIDY LH EL L + S+NQLN+WSMDGID+RA IHC | |
| Sbjct: | 181 | LSKALPKLVATANIFLDGVPDSIDYCTLHHELSQLPHIVSVNQLNVWSMDGIDHRATIHC | 240 |
| Query: | 241 | CLNQLISEKDCKRAIRTICQHYKINDVTVEIDYSLREHQNHCKPLKN | 287 |
| | | CL + +EK CK++IR ICQ Y IN VTVEID SL EHQ+HC L + | |
| Sbjct: | 241 | CLRESTTEKHCKKSIRLICQRYNINSVTVEIDTSLNENQHHCSSLSS | 287 |

[1641] Based on this analysis, it was predicted that these proteins and their epitopes could be useful antigens for vaccines or diagnostics.

### EXAMPLE 245

[1642] A DNA sequence (GBSx0259) was identified in S. agalactiae <SEQ ID 777> which encodes the amino acid sequence <SEQ ID 778>. Analysis of this protein sequence reveals the following:

| Possible site: 48 | | | |
|---|---|---|---|
| >>> Seems to have no N-terminal signal sequence | | | |
| INTEGRAL | Likelihood = −1.22 | Transmembrane | 221-237 (221-237) |

----- Final Results -----
bacterial membrane --- Certainty = 0.1489 (Affirmative) < succ>
bacterial outside --- Certainty = 0.0000 (Not Clear) < succ>
bacterial cytoplasm --- Certainty = 0.0000 (Not Clear) < succ>

[1643] There is also homology to SEQ ID 780.

[1644] Based on this analysis, it was predicted that this protein and its epitopes, could be useful antigens for vaccines or diagnostics.

### EXAMPLE 246

[1645] A DNA sequence (GBSx0260) was identified in S. agalactiae <SEQ ID 781> which encodes the amino acid sequence <SEQ ID 782>. Analysis of this protein sequence reveals the following:

| Possible site: 13 | | | | |
|---|---|---|---|---|
| >>> Seems to have no N-terminal signal sequence | | | | |
| | INTEGRAL | Likelihood = −2.50 | Transmembrane | 2-18 (1-18) |

```
----- Final Results -----
                              bacterial membrane --- Certainty = 0.1999(Affirmative) < succ>
                                bacterial outside --- Certainty = 0.0000(Not Clear) < succ>
                            bacterial cytoplasm --- Certainty = 0.0000(Not Clear) < succ>
```

[1646] The protein has no significant homology with any sequences in the GENPEPT database.

[1647] No corresponding DNA sequence was identified in S. pyogenes.

[1648] Based on this analysis, it was predicted that this protein and its epitopes, could be useful antigens for vaccines or diagnostics.

### EXAMPLE 247

[1649] A DNA sequence (GBSx0261) was identified in S. agalactiae <SEQ ID 783> which encodes the amino acid sequence <SEQ ID 784>. This protein is predicted to be dehydrogenase (Zn-dependent). Analysis of this protein sequence reveals the following:

| Possible site: 15 | | | | |
|---|---|---|---|---|
| >>> Seems to have no N-terminal signal sequence | | | | |
| | INTEGRAL | Likelihood = −3.77 | Transmembrane | 171-187 (170-187) |

```
----- Final Results -----
                              bacterial membrane --- Certainty = 0.2508(Affirmative) < succ>
                                bacterial outside --- Certainty = 0.0000(Not Clear) < succ>
                            bacterial cytoplasm --- Certainty = 0.0000(Not Clear) < succ>
```

[1650] The protein has homology with the following sequences in the GENPEPT database:

| >GP: AAG20655 GB: AE005134 alcohol dehydrogenase; Adh2 [Halobacterium | | | |
|---|---|---|---|
| sp. NRC-1] | | | |
| Identities = 169/348 (48%), Positives = 232/348 (66%), Gaps = 9/348 (2%) | | | |
| Query: | 1 | MKVATFIEPGKMVITDTPKPVIEQETDAVIKIVRACVCGSDLWWYRGISKRESGSFAGHE | 60 |
| | | M+ A + PG++ + + PKP IE DAVI++ VCGSDLW+YRG S RE+GS GHE | |
| Sbjct: | 1 | MRAAVYQGPGEIAVEEVPKPDIESPEDAVIRVTHTAVCGSDLWFYRGDSDREAGSRVGHE | 60 |
| Query: | 61 | AIGIVEEVGTKVTDVSKGDFVIVPFTHGCGQCPSCKAGFDGNCTNHQA---AKNVGYQGQ | 117 |
| | | +GIVEEVG VT V+ GD VI PF CG+C C+ G +C ++ N G QG+ | |
| Sbjct: | 61 | PMGIVEEVGDDVTSVAPGDRVIAPFAISCGECEFCRQGLYTSCVEDESWGSEANGGGQGE | 120 |
| Query: | 118 | YLRYTNANWALVKIPGQPSDYDNETLNSLLTLSDVMATGYHAAATAEVKEGDTVVVMGDG | 177 |
| | | Y++ A+ LV++P + +D D + L SLL L+DVM TG+HAA +A V EGDT VV+GDG | |
| Sbjct: | 121 | YVKCPFADGTLVRVPDRYAD-DEDVLESLLPLTDVMGTGHHAAVSAGVGEGDTAVVVGDG | 179 |
| Query: | 178 | AVGLCGVIAAKMLGANRIIAMSRHKDRQELALTFGATDIVEERGDEAVKRVLDLTNQAGA | 237 |
| | | AVGLCGV+AA+ LGA RIIAM H+DR ELA FGATD + RGD+A++R DLT+ GA | |
| Sbjct: | 180 | AVGLCGVLAAQRLGAERIIAMGHHEDRLELAAEFGATDTISARGDDAIERARDLTH-GGA | 238 |
| Query: | 238 | DAVLECVGTEQSVDTATQIARPGAVIGRVGIP---QNPDMNTNNLFWKNIGLRGGIASVT | 294 |
| | | + V+ECVG ++D+A IARPG +G VG+P ++ ++ +F NI +RGG+A V | |
| Sbjct: | 239 | NHVMECVGAASAMDSAIAIARPGGTVGYVGVPYGVEDGGLDVFTMFSDNITIRGGVAPVR | 298 |
| Query: | 295 | TFDKSVLLDAVLTHKINPGLVFTKSFVLDDIQKAYEAMDKRDAIKSLV | 342 |
| | | + + ++ D VL ++P +FTK+ LD + + Y AMD R+AIK LV | |
| Sbjct: | 299 | AYAEELMAD-VLQGTLDPSPIFTKTVDLDGVPEGYAAMDDREAIKVLV | 345 |

[1651] There is also homology to SEQ ID 786.

[1652] A related sequence was also identified in GAS <SEQ ID 9145> which encodes the amino acid sequence <SEQ ID 9146>. Analysis of this protein sequence reveals the following:

| Possible site: 23 | | | | |
|---|---|---|---|---|
| >>> Seems to have no N-terminal signal sequence | | | | |
| | INTEGRAL | Likelihood = −5.41 | Transmembrane | 170-186 |

```
----- Final Results -----
                              bacterial membrane --- Certainty = 0.3166(Affirmative) < succ>
                                bacterial outside --- Certainty = 0.0000(Not Clear) < succ>
                            bacterial cytoplasm --- Certainty = 0.0000(Not Clear) < succ>
```

[1653] An alignment of the GAS and GBS proteins is shown below:

| Identities = 121/353 (34%), Positives = 182/353 (51%), Gaps = 16/353 (4%) | | |
|---|---|---|
| Query: 1 | MKVATFIEPGKMVITDTPKPVIEQETDAVIKIVRACVCGSDLWWYRG-ISKRESGSFAGH | 59 |
| | MK AT++ G + + D PKPVI + TDA++++V+ + CG+DL G + + G+ GH | |
| Sbjct: 15 | MKAATYLSTGNLQLIDKPKPVIIKPTDAIVQLVKTTICGTDLHILGGDVPACKEGTILGH | 74 |
| Query: 60 | EAIGIVEEVGTKVTDVSKGDFVIVPFTHGCGQCPSCKAGFDGNCTNHQAAKN---VGYQG | 116 |
| | E IGIV+EVG VT+ GD VI+ C C CK G +C + G Q | |
| Sbjct: 75 | EGIGIVKEVGDAVTNFKIGDKVIISCVTSCHTCYYCKRGLSSHCQDGGWILGHLINGTQA | 134 |
| Query: 117 | QYLRYTNANWALVKIPGQPSDYDNETLNSLLTLSDVMATGYH-AAATAEVKEGDTVVVMG | 175 |
| | +Y+ +A+ +L P D +L+ LSD++ T Y + VK GD V ++G | |
| Sbjct: 135 | EYVHIPHADGSLYHAPDTIDD------EALVMLSDILPTSYEIGVLPSHVKPGDNVCIVG | 188 |
| Query: 176 | DGAVGLCGVIAAKMLGANRIIAMSRHKDRQELALTFGATDIVEERGDEAVKRVL-DLTNQ | 234 |
| | G VGL ++ + II + ++R E A TFGAT + E VK ++ D+TN | |
| Sbjct: 189 | AGPVGLAALLTVQFFSPANIIMVDLSQNRLEAAKTFGATHTICSGSSEEVKAIIDDITNG | 248 |
| Query: 235 | AGADAVLECVGTEQSVDTATQIARPGAVIGRVGIPQNP-DMNTNNLFWKNIGLRGGIASV | 293 |
| | G D +ECVG + D +I G I VG+ P D N + L+ KNI L G+ + | |
| Sbjct: 249 | RGVDISMECVGYPATFDICQKIISVGGHIANVGVHGKPVDFNLDELWIKNITLNTGLVNA | 308 |
| Query: 294 | TTFDKSVLLDAVLTHKINPGLVFTKSFVLDDIQKAYEAMDKRDAIKSL-VIVD | 345 |
| | T + +LL+ + T KI+ + T F L +++KAYE A +L VI+D | |
| Sbjct: 309 | NTTE--MLLNVLKTGKIDATRLITHHFKLSEVEKAYETFKHAGANNALKVIID | 359 |

[1654] Based on this analysis, it was predicted that these proteins and their epitopes could be useful antigens for vaccines or diagnostics.

### EXAMPLE 248

[1655] A DNA sequence (GBSx0262) was identified in S. agalactiae <SEQ ID 787> which encodes the amino acid sequence <SEQ ID 788>. Analysis of this protein sequence reveals the following:

```
Possible site: 31
>>> Seems to have no N-terminal signal sequence
----- Final Results -----
bacterial cytoplasm --- Certainty = 0.2169 (Affirmative) <succ>
  bacterial membrane --- Certainty = 0.0000 (Not Clear) <succ>
    bacterial outside --- Certainty = 0.0000 (Not Clear) <succ>
```

[1656] The protein has homology with the following sequences in the GENPEPT database:

| >GP:AAD36075 GB:AE001762 hypothetical protein [Thermotoga maritima] | | |
|---|---|---|
| Identities = 55/128 (42%), Positives = 72/128 (55%), Gaps = 8/128 (6%) | | |
| Query: 8 | IFPKGEKNPYGEFFIGQSYLAALAKSPDG--NVSVGNVTFEAGCRNNWHVHLDGYQILLV | 65 |
| | IF +G K +FF G ++ L +G N V +V FE G R +WH H G QIL+V | |
| Sbjct: 5 | IFERGSKGS-SDFFTGNVWVKMLVTDENGVFNTQVYDVVFEPGARTHWHSHPGG-QILIV | 62 |
| Query: 66 | TEGSGWYQEEGKEAVSLKPGDVIVTDKGVRHWHGAKKDSEFAHIAITA----GKSEFYEA | 121 |
| | T G G+YQE GK A LK GDV+ V HWHGA D E HI I+ G +E+ + | |
| Sbjct: 63 | TRGKGFYQERGKPARILKKGDVVEIPPNVVHWHGAAPDEELVHIGISTQVHLGPAEWLGS | 122 |
| Query: 122 | VSDEEYSR | 129 |
| | V++EEY + | |
| Sbjct: 123 | VTEEEYRK | 130 |

[1657] No corresponding DNA sequence was identified in S. pyogenes.

[1658] Based on this analysis, it was predicted that this protein and its epitopes, could be useful antigens for vaccines or diagnostics.

### EXAMPLE 249

[1659] A DNA sequence (GBSx0263) was identified in S. agalactiae <SEQ ID 789> which encodes the amino acid sequence <SEQ ID 790>. This protein is predicted to be gamma-carboxymuconolactone decarboxylase. Analysis of this protein sequence reveals the following:

```
Possible site: 49
>>> Seems to have no N-terminal signal sequence
----- Final Results -----
bacterial cytoplasm --- Certainty = 0.4089 (Affirmative) <succ>
  bacterial membrane --- Certainty = 0.0000 (Not Clear) <succ>
    bacterial outside --- Certainty = 0.0000 (Not Clear) <succ>
```

[1660] The protein has homology with the following sequences in the GENPEPT database:

| >GP:CAA20070 GB:AL031155 3-oxoadipate enol-lactone hydrolase/ | | |
|---|---|---|
| 4-carboxymuconolactone decarboxylase [Streptomyces coelicolor A3(2)] | | |
| Identities = 33/93 (35%), Positives = 59/93 (62%), Gaps = 1/93 (1%) | | |
| Query: 11 | QLEEFAPEFARYNDDILFGEVWAKEDHLTDKTRSIITISALISGGNLEQLEHHLQFAKQN | 70 |
| | Q +EF+ +F + +GE+W + L ++RS +T++AL++GG+L++L HL+ A +N | |
| Sbjct: 349 | QADEFSGDFQEFLTRYAWGEIWDRPG-LDRRSRSCVTLTALVAGGHLDELAPHLRAALRN | 407 |
| Query: 71 | GVTKEEIADIITHLAFYVGWPKAWSAFNKAKEI | 103 |
| | G+T EI+++ A Y G P A AF A+++ | |
| Sbjct: 408 | GLTPGEIKEVLLQAAVYCGVPAANGAFRVAQQV | 440 |

[1661] No corresponding DNA sequence was identified in S. pyogenes.

[1662] Based on this analysis, it was predicted that this protein and its epitopes, could be useful antigens for vaccines or diagnostics.

### EXAMPLE 250

[1663] A DNA sequence (GBSx0265) was identified in S. agalactiae <SEQ ID 791> which encodes the amino acid sequence <SEQ ID 792>. Analysis of this protein sequence reveals the following:

```
Possible site: 44
>>> Seems to have no N-terminal signal sequence
----- Final Results -----
bacterial cytoplasm --- Certainty = 0.5529 (Affirmative) <succ>
  bacterial membrane --- Certainty = 0.0000 (Not Clear) <succ>
    bacterial outside --- Certainty = 0.0000 (Not Clear) <succ>
```

[1664] The protein has no significant homology with any sequences in the GENPEPT database.

[1665] No corresponding DNA sequence was identified in S. pyogenes.

[1666] Based on this analysis, it was predicted that this protein and its epitopes, could be useful antigens for vaccines or diagnostics.

### EXAMPLE 251

[1667] A DNA sequence (GBSx0266) was identified in S. agalactiae <SEQ ID 793> which encodes the amino acid sequence <SEQ ID 794>. This protein is predicted to be probable transcriptional regulator. Analysis of this protein sequence reveals the following:

```
Possible site: 58
>>> Seems to have an uncleavable N-term signal seq
----- Final Results -----
                              bacterial membrane --- Certainty = 0.0000(Not Clear) < succ>
                                bacterial outside --- Certainty = 0.0000(Not Clear) < succ>
                            bacterial cytoplasm --- Certainty = 0.0000(Not Clear) < succ>
```

[1668] A related GBS nucleic acid sequence <SEQ ID 9585> which encodes amino acid sequence <SEQ ID 9586> was also identified.

[1669] The protein has homology with the following sequences in the GENPEPT database:

| >GP: AAG08263 GB: AE004901 probable transcriptional regulator | | | |
|---|---|---|---|
| [Pseudomonas aeruginosa] | | | |
| Identities = 36/148 (24%), Positives = 68/148 (45%), Gaps = 22/148 (14%) | | | |
| Query: | 5 | QIVEKPAMILAG-------------------VTLENVKSNQEGIQQAIGICKTQPDFRFD | 45 |
| | | +IVE+PA + G + E+ + + + + GIC QP+ F | |
| Sbjct: | 123 | RIVERPAFSVVGMEYFGSAPGDTIGQLWERFIPREHEIAGKHDPEVSYGICAQQPNGEFH | 182 |
| Query: | 46 | YSATYQVETSVQAPKGLEIIRIPSATYAVISVKGPMPSSLQETWRKIIQGFFQENNLKPA | 105 |
| | | Y A ++V+ P+G+ ++P+ YAV + KG P + E+++ I E L+P | |
| Sbjct: | 183 | YVAGFEVQEGWPVPEGMVRFQVPAQKYAVFTHKGTAP-QIAESFQAIYSHLLAERGLEPK | 241 |
| Query: | 106 | NSPNLEIYSSQH--PQDTDYQMEIWLAI | 131 |
| | | + E Y + P D + Q+++++ I | |
| Sbjct: | 242 | AGVDFEYYDQRFRGPLDPNSQVDLYIPI | 269 |

[1670] No corresponding DNA sequence was identified in S. pyogenes.

[1671] Based on this analysis, it was predicted that these proteins and their epitopes could be useful antigens for vaccines or diagnostics.

### EXAMPLE 252

[1672] A DNA sequence (GBSx0267) was identified in S. agalactiae <SEQ ID 795> which encodes the amino acid sequence <SEQ ID 796>. Analysis of this protein sequence reveals the following:

```
Possible site: 24
>>> Seems to have no N-terminal signal sequence
----- Final Results -----
                            bacterial cytoplasm --- Certainty = 0.0887(Affirmative) < succ>
                              bacterial membrane --- Certainty = 0.0000(Not Clear) < succ>
                                bacterial outside --- Certainty = 0.0000(Not Clear) < succ>
```

[1673] The protein has homology with the following sequences in the GENPEPT database:

| >GP: AAB84919 GB: AE000825 conserved protein [Methanothermobacter | | | |
|---|---|---|---|
| thermoautotrophicus] | | | |
| Identities = 42/130 (32%), Positives = 71/130 (54%), Gaps = 3/130 (2%) | | | |
| Query: | 1 | MITQEMKEIINSQLAMVATVDAKGQPNIGPKRSMRLWDDKTFIYNENTDGQTRINIEDNG | 60 |
| | | M+T EM + I +L VAT D +G PN+ P R D++T + +N +T N+ +N | |
| Sbjct: | 1 | MMTPEMMDAIEKELVFVATADEEGTPNVVPIGFARPLDERTILIADNYMKKTIRNLHENP | 60 |
| Query: | 61 | KIEIAFVDRERLLGYRFVGTAEIQTEGTYYEAAKKWAEGRMG--VPKAVGIIHVERIFNL | 118 |
| | | +I + R Y+F GT EI G Y++ +WA+ M PK+ ++ VE I+++ | |
| Sbjct: | 61 | RIAL-IPQNARECPYQFKGTVEIFKSGKYFDMVVEWAQNVMTELEPKSAILMTVEEIYSV | 119 |
| Query: | 119 | QSGANAGKEI | 128 |
| | | + G AG+++ | |
| Sbjct: | 120 | KPGPEAGEKV | 129 |

[1674] A related DNA sequence was identified in S. pyogenes <SEQ ID 797> which encodes the amino acid sequence <SEQ ID 798>. Analysis of this protein sequence reveals the following:

```
Possible site: 24
>>> Seems to have no N-terminal signal sequence
----- Final Results -----
                            bacterial cytoplasm --- Certainty = 0.0789(Affirmative) < succ>
                              bacterial membrane --- Certainty = 0.0000(Not Clear) < succ>
                                bacterial outside --- Certainty = 0.0000(Not Clear) < succ>
```

[1675] An alignment of the GAS and GBS proteins is shown below:

| Identities = 123/128 (96%), Positives = 127/128 (99%) | | | |
|---|---|---|---|
| Query: | 1 | MITQEMKEIINSQLAMVATVDAKGQPNIGPKRSMRLWDDKTFIYNENTDGQTRINIEDNG | 60 |
| | | MITQEMK++IN+QLAMVATVDAKGQPNIGPKRSMRLWDDKTFIYNENTDGQTRINIEDNG | |
| Sbjct: | 1 | MITQEMKDLINNQLAMVATVDAKGQPNIGPKRSMRLWDDKTFIYNENTDGQTRINIEDNG | 60 |
| Query: | 61 | KIEIAFVDRERLLGYRFVGTAEIQTEGTYYEAAKKWAEGRMGVPKAVGIIHVERIFNLQS | 120 |
| | | KIEIAFVDRERLLGYRFVGTAEIQTEG YYEAAKKWA+GRMGVPKAVGIIHVERIFNLQS | |
| Sbjct: | 61 | KIEIAFVDRERLLGYRFVGTAEIQTEGAYYEAAKKWAQGRMGVPKAVGIIHVERIFNLQS | 120 |
| Query: | 121 | GANAGKEI | 128 |
| | | GANAGKEI | |
| Sbjct: | 121 | GANAGKEI | 128 |

[1676] Based on this analysis, it was predicted that these proteins and their epitopes could be useful antigens for vaccines or diagnostics.

### EXAMPLE 253

[1677] A DNA sequence (GBSx0268) was identified in S. agalactiae <SEQ ID 799> which encodes the amino acid sequence <SEQ ID 800>. Analysis of this protein sequence reveals the following:

| Possible site: 22 | | | | |
|---|---|---|---|---|
| >>> Seems to have a cleavable N-term signal seq. | | | | |
| | INTEGRAL | Likelihood = −5.47 | Transmembrane | 1028-1044 (1027-1048) |

```
----- Final Results -----
                              bacterial membrane --- Certainty = 0.3187(Affirmative) < succ>
                                bacterial outside --- Certainty = 0.0000(Not Clear) < succ>
                            bacterial cytoplasm --- Certainty = 0.0000(Not Clear) < succ>
```

[1678] The protein has homology with the following sequences in the GENPEPT database:

| !GB: AF054892 surface antigen BspA [Bacteroides forsy . . . | | | |
|---|---|---|---|
| !GB: AF054892 surface antigen BspA [Bacteroides forsy . . . | | | |
| !GB: AF054892 surface antigen BspA [Bacteroides forsy . . . | | | |
| !GB: AF054892 surface antigen BspA [Bacteroides forsy . . . | | | |
| !GB: AF054892 surface antigen BspA [Bacteroides forsy . . . | | | |
| >GP: AAC82625 GB: AF054892 surface antigen BspA [Bacteroides | | | |
| forsythus] | | | |
| Identities = 143/566 (25%), Positives = 243/566 (42%), Gaps = 52/566 (9%) | | | |
| Query: | 95 | VPKAKPEVTQEASNSSNDASKVEVPKQDTASKKETLETSTWEAKDFVTRGDTLVG----F | 150 |
| | | +P + + + A + + +P TA + L T + T +G F | |
| Sbjct: | 120 | IPNSVTTIGEWAFKGCSGLKSITLPNSLTAIGQSALSGCTGLTSITIPNSVTTIGEWAFF | 179 |
| Query: | 151 | SKSGINKLSQTSHLVLPSHAA--DGTQLTQVASFAFTPDKKTAIAEYTSRLGENGKPSRL | 208 |
| | | SG+ ++ + L +A LT + PD T I E + G +G S | |
| Sbjct: | 180 | GCSGLTSITFPNSLTAIGESAFYGCGALTSIT----LPDALTTIGESAFK-GCSGLKSIT | 234 |
| Query: | 209 | DIDQKEIIDEGEIFNAYQLTKLTIPNGYKSIGQDAFVDNKNIAEVNLPESLETISDYAFA | 268 |
| | | + I E ++ LT +T+P+ +IG+ AF + + P SL TI + AF | |
| Sbjct: | 235 | FPNSLTTIGESAFYDCGALTSITLPDALTTIGRSAFYGCSGLKSITFPNSLTTIGESAFY | 294 |
| Query: | 269 | HM-SLKQVKLPDNLKVIGELAFFDNQIGGKLYLPRHLIKLAERAFKSNRIQTVEFLGSKL | 327 |
| | | + SL + +P+++ IG AF+ + LP L + ERAF + + T + + + | |
| Sbjct: | 295 | NCGSLTSITIPNSVTTIGRSAFYGCSGLKSITLPDGLTTIEERAFYNCGVLTSITIPNSV | 354 |
| Query: | 328 | KVIGEASFQD-NNLRNVMLPDGLEKIESEAFTGNPGDEHYNNQVVLRTRTGQNPHQLATE | 386 |
| | | IGE++F + L+++ LPDGL IE AF N L + T N E | |
| Sbjct: | 355 | ATIGESAFYGCSGLKSITLPDGLTTIEWGAFY---------NCGALTSITIPNSVSTIGE | 405 |
| Query: | 387 | NTYVNPDKSLWRATPDMDYTKWLEEDFTYQKNSVTGFS---NKGLQKVRRNKNLEIPKQH | 443 |
| | | + + +L T D ++ D +++ +++G G + V K ++ K+ | |
| Sbjct: | 406 | SAFYGCG-ALKDVTVAWDTPIDIQRD-VFRELTLSGIRLHVPAGKKTVYEAK--DVWKEF | 461 |
| Query: | 444 | NGITITEIGDNAFRNVDFQSKTLRKYDLEEIKLPSTIRKIGAFAFQSNNLKSFEASEDLE | 503 |
| | | N + + G + N D +KTL + P T + + FA ++ L | |
| Sbjct: | 462 | NIVEDDDFGGLQW-NYDAATKTLTITN----PTPDTPKPMPNFATPNDQLW--------- | 507 |
| Query: | 504 | EIKEGAFMNNRIGTLDLKDKLIKIGDAAFH-INHIYAIVLPESVQEIGRSAFRQNGALHL | 562 |
| | | GAF I + + D + +GD AF + + +I LP+SV IG+SAF L | |
| Sbjct: | 508 | ----GAFQKE-IQKITIGDGVTSVGDFAFSGCDALKSITLPKSVTTIGQSAFSGCWDLRS | 562 |
| Query: | 563 | MFIGNKVKTIGEMAFLSNKLESVNLSEQKQLKTIEVQAFS-DNALSEVVLPPNLQTIREE | 621 |
| | | + + + V TIGE AF + LE +++ K + I + F +L+ + LP L I ++ | |
| Sbjct: | 563 | LTLPDGVNTIGEKAFY-DCLELTSITIPKSVTAIGQETFHYCVSLTSLTLPDALTAIGKK | 621 |
| Query: | 622 | AF-KRNHLKEVKGSSTLSQITFNAFD | 646 |
| | | AF N L V +++ I NAFD | |
| Sbjct: | 622 | AFYSCNALTSVTFPKSITTIGENAFD | 647 |
| Identities = 109/407 (26%), Positives = 175/407 (42%), | | | |
| Gaps = 48/407 (11%) | | | |
| Query: | 222 | FNAYQLTKLTIPNGYKSIGQDAFVDNKNIAEVNLPESLETISDYAFAHMS-LKQVKLPDN | 280 |
| | | F+ LT +T+PN +IG AF + + +P S+ TI ++AF S LK + LP++ | |
| Sbjct: | 87 | FSDCALTSVTLPNSLTAIGDHAFKGCSGLTSITIPNSVTTIGEWAFKGCSGLKSITLPNS | 146 |
| Query: | 281 | LKVIGELAFFDNQIGGKLYLPRHLIKLAERAFKSNRIQTVEFLGSKLKVIGEASFQD-NN | 339 |
| | | L IG+ A + +P + + E AF T + L IGE++F | |
| Sbjct: | 147 | LTAIGQSALSGCTGLTSITIPNSVTTIGEWAFFGCSGLTSITFPNSLTAIGESAFYGCGA | 206 |
| Query: | 340 | LRNVMLPDGLEKIESEAFTGNPGDEHYNNQVVLRTRTGQNPHQLATENTYVNPDKSLWRA | 399 |
| | | L ++ LPD L I AF G G L++ T N E+ + + | |
| Sbjct: | 207 | LTSITLPDALTTIGESAFKGCSG---------LKSITFPNSLTTIGESAFYDCGALTSIT | 257 |
| Query: | 400 | TPDMDYTKWLEEDFTYQKNSVTGFSNKGLQKVRRNKNLEIPKQHNGITITEIGDNAFRNV | 459 |
| | | PD ++T K++ P ++T IG++AF N | |
| Sbjct: | 258 | LPD----------------ALTTIGRSAFYGCSGLKSITFPN-----SLTTIGESAFYNC | 296 |
| Query: | 460 | DFQSKTLRKYDLEEIKLPSTIRKIGAFAFQS-NNLKSFEASEDLEEIKEGAFMNNRIGT- | 517 |
| | | L I +P+++ IG AF + LKS + L I+E AF N + T | |
| Sbjct: | 297 | G---------SLTSITIPNSVTTIGRSAFYGCSGLKSITLPDGLTTIEERAFYNCGVLTS | 347 |
| Query: | 518 | LDLKDKLIKIGDAAFH-INHIYAIVLPESVQEIGRSAFRQNGALHLMFIGNKVKTIGEMA | 576 |
| | | + + + + IG++AF+ + + +I LP+ + I AF GAL + I N V TIGE A | |
| Sbjct: | 348 | ITIPNSVATIGESAFYGCSGLKSITLPDGLTTIEWGAFYNCGALTSITIPNSVSTIGESA | 407 |
| Query: | 577 | FLS-NKLESVNLSEQKQLKTIEVQAFSDNALSEVVL--PPNLQTIRE | 620 |
| | | F L+ V ++ + I+ F + LS + L P +T+ E | |
| Sbjct: | 408 | FYGCGALKDVTVAWDTPI-DIQRDVFRELTLSGIRLHVPAGKKTVYE | 453 |
| Identities = 111/465 (23%), Positives = 185/465 (38%), | | | |
| Gaps = 56/465 (12%) | | | |
| Query: | 141 | VTRGDTLVGFSKSGINKLSQTSHLVLPSHAADGTQLTQVASFAF----------TPDKKT | 190 |
| | | +T D L +S S + P+ LT + AF PD T | |
| Sbjct: | 210 | ITLPDALTTIGESAFKGCSGLKSITFPN------SLTTIGESAFYDCGALTSITLPDALT | 263 |
| Query: | 191 | AIAEYTSRLGENGKPSRLDIDQKEIIDEGEIFNAYQLTKLTIPNGYKSIGQDAFVDNKNI | 250 |
| | | I ++ G +G S + I E +N LT +TIPN +IG+ AF + | |
| Sbjct: | 264 | TIGR-SAFYGCSGLKSITFPNSLTTIGESAFYNCGSLTSITIPNSVTTIGRSAFYGCSGL | 322 |
| Query: | 251 | AEVNLPESLETISDYAFAHMS-LKQVKLPDNLKVIGELAFFDNQIGGKLYLPRHLIKLAE | 309 |
| | | + LP+ L TI + AF + L + +P+++ IGE AF+ + LP L + | |
| Sbjct: | 323 | KSITLPDGLTTIEERAFYNCGVLTSITIPNSVATIGESAFYGCSGLKSITLPDGLTTIEW | 382 |
| Query: | 310 | RAFKSNRIQTVEFLGSKLKVIGEASFQD-NNLRNVMLP-DGLEKIESEAF-----TGNPG | 362 |
| | | AF + T + + + IGE++F L++V + D I+ + F +G | |
| Sbjct: | 383 | GAFYNCGALTSITIPNSVSTIGESAFYGCGALKDVTVAWDTPIDIQRDVFRELTLSGIRL | 442 |
| Query: | 363 | DEHYNNQVVLRTRTGQNPHQLATEN-------TYVNPDKSLWRATPDMDYTKWLEEDFTY | 415 |
| | | + V + + ++ Y K+L P D K + +F | |
| Sbjct: | 443 | HVPAGKKTVYEAKDVWKEFNIVEDDDFGGLQWNYDAATKTLTITNPTPDTPKPM-PNFAT | 501 |
| Query: | 416 | QKNSVTGFSNKGLQKVRRNKNLEIPKQHNGITITEIGDNAFRNVDFQSKTLRKYDLEEIK | 475 |
| | | + + G K +QK+ G +T +GD AF D L+ I | |
| Sbjct: | 502 | PNDQLWGAFQKEIQKIT-----------IGDGVTSVGDFAFSGCD---------ALKSIT | 541 |
| Query: | 476 | LPSTIRKIGAFAFQSN-NLKSFEASEDLEEIKEGAFMN-NRIGTLDLKDKLIKIGDAAFH | 533 |
| | | LP ++ IG AF +L+S + + I E AF + + ++ + + IG FH | |
| Sbjct: | 542 | LPKSVTTIGQSAFSGCWDLRSLTLPDGVNTIGEKAFYDCLELTSITIPKSVTAIGQETFH | 601 |
| Query: | 534 | -INHIYAIVLPESVQEIGRSAFRQNGALHLMFIGNKVKTIGEMAF | 577 |
| | | + ++ LP+++. IG+ AF AL + + TIGE AF | |
| Sbjct: | 602 | YCVSLTSLTLPDALTAIGKKAFYSCNALTSVTFPKSITTIGENAF | 646 |
| Identities = 98/351 (27%), Positives = 152/351 (42%), Gaps = 53/351 (15%) | | | |
| Query: | 315 | NRIQTVEFLGSKLKVIGEASFQDNNLRNVMLPDGLEKIESEAFTGNPGDEHYNNQVVLRT | 374 |
| | | ++IQTV +G + +G +F D L +V LP+ L I AF G G L + | |
| Sbjct: | 68 | SKIQTVT-IGDGVTSVGNNAFSDCALTSVTLPNSLTAIGDHAFKGCSG---------LTS | 117 |
| Query: | 375 | RTGQNPHQLATENTYVNPDKSLWRATPDMDYTKWLEEDFTYQKNSVTGFSNKGLQKVRRN | 434 |
| | | T P+ + T + S ++ NS+T L | |
| Sbjct: | 118 | IT--IPNSVTTIGEWAFKGCSGLKSIT--------------LPNSLTAIGQSALSGCTGL | 161 |
| Query: | 435 | KNLEIPKQHNGITITEIGDNAF------RNVDFQSKTLRKYD--------LEEIKLPSTI | 480 |
| | | ++ IP ++T IG+ AF ++ F + + L I LP + | |
| Sbjct: | 162 | TSITIPN-----SVTTIGEWAFFGCSGLTSITFPNSLTAIGESAFYGCGALTSITLPDAL | 216 |
| Query: | 481 | RKIGAFAFQS-NNLKSFEASEDLEEIKEGAFMN-NRIGTLDLKDKLIKIGDAAFH-INHI | 537 |
| | | IG AF+ + LKS L I E AF + + ++ L D L IG +AF+ + + | |
| Sbjct: | 217 | TTIGESAFKGCSGLKSITFPNSLTTIGESAFYDCGALTSITLPDALTTIGRSAFYGCSGL | 276 |
| Query: | 538 | YAIVLPESVQEIGRSAFRQNGALHLMFIGNKVKTIGEMAFLS-NKLESVNLSEQKQLKTI | 596 |
| | | +I P S+ IG SAF G+L + I N V TIG AF + L+S+ L + L TI | |
| Sbjct: | 277 | KSITFPNSLTTIGESAFYNCGSLTSITIPNSVTTIGRSAFYGCSGLKSITLPD--GLTTI | 334 |
| Query: | 597 | EVQAFSD-NALSEVVLPPNLQTIREEAFKR-NHLKEVKGSSTLSQITFNAF | 645 |
| | | E +AF + L+ + +P ++ TI E AF + LK + L+ I + AF | |
| Sbjct: | 335 | EERAFYNCGVLTSITIPNSVATIGESAFYGCSGLKSITLPDGLTTIEWGAF | 385 |
| Identities = 78/282 (27%), Positives = 123/282 (42%), Gaps = 46/282 (16%) | | | |
| Query: | 111 | NDASKVEVPKQDTASKKETLETSTWEAKDFVTRGDTLVGFSKSGINKLSQTSHLVLPS-- | 168 |
| | | N+AS E+P SK +T VT GD + + + + TS + LP+ | |
| Sbjct: | 56 | NNAS--EIPWHSLQSKIQT-----------VTIGDGVTSVGNNAFSDCALTS-VTLPNSL | 101 |
| Query: | 169 | -----HAADG----------TQLTQVASFAFT----------PDKKTAIAEYTSRLGENG | 203 |
| | | HA G +T + +AF P+ TAI + ++ G G | |
| Sbjct: | 102 | TAIGDHAFKGCSGLTSITIPNSVTTIGEWAFKGCSGLKSITLPNSLTAIGQ-SALSGCTG | 160 |
| Query: | 204 | KPSRLDIDQKEIIDEGEIFNAYQLTKLTIPNGYKSIGQDAFVDNKNIAEVNLPESLETIS | 263 |
| | | S + I E F LT +T PN +IG+ AF + + LP++L TI | |
| Sbjct: | 161 | LTSITIPNSVTTIGEWAFFGCSGLTSITFPNSLTAIGESAFYGCGALTSITLPDALTTIG | 220 |
| Query: | 264 | DYAFAHMS-LKQVKLPDNLKVIGELAFFDNQIGGKLYLPRHLIKLAERAFKS-NRIQTVE | 321 |
| | | + AF S LK + P++L IGE AF+D + LP L + AF + ++++ | |
| Sbjct: | 221 | ESAFKGCSGLKSITFPNSLTTIGESAFYDCGALTSITLPDALTTIGRSAFYGCSGLKSIT | 280 |
| Query: | 322 | FLGSKLKVIGEASFQD-NNLRNVMLPDGLEKIESEAFTGNPG | 362 |
| | | F S L IGE++F + +L ++ +P+ + I AF G G | |
| Sbjct: | 281 | FPNS-LTTIGESAFYNCGSLTSITIPNSVTTIGRSAFYGCSG | 321 |
| Identities = 43/144 (29%), Positives = 70/144 (47%), Gaps = 4/144 (2%) | | | |
| Query: | 220 | EIFNAYQ--LTKLTIPNGYKSIGQDAFVDNKNIAEVNLPESLETISDYAFAHM-SLKQVK | 76 |
| | | +++ A+Q + K+TI +G S+G AF + + LP+S+ TI AF+ L+ + | |
| Sbjct: | 505 | QLWGAFQKEIQKITIGDGVTSVGDFAFSGCDALKSITLPKSVTTIGQSAFSGCWDLRSLT | 564 |
| Query: | 277 | LPDNLKVIGELAFFDNQIGGKLYLPRHLIKLAERAFKSNRIQTVEFLGSKLKVIGEASFQ | 336 |
| | | LPD + IGE AF+D + +P+ + + + F T L L IG+ +F | |
| Sbjct: | 565 | LPDGVNTIGEKAFYDCLELTSITIPKSVTAIGQETFHYCVSLTSLTLPDALTAIGKKAFY | 624 |
| Query: | 337 | D-NNLRNVMLPDGLEKIESEAFTG | 359 |
| | | N L +V P + I AF G | |
| Sbjct: | 625 | SCNALTSVTFPKSITTIGENAFDG | 648 |
| Identities = 43/134 (32%), Positives = 66/134 (49%), Gaps = 12/134 (8%) | | | |
| Query: | 511 | MNNRIGTLDLKDKLIKIGDAAFHINHIYAIVLPESVQEIGRSAFRQNGALHLMFIGNKVK | 570 |
| | | + ++I T+ + D + +G+ AF + ++ LP S+ IG AF+ L + I N V | |
| Sbjct: | 66 | LQSKIQTVTIGDGVTSVGNNAFSDCALTSVTLPNSLTAIGDHAFKGCSGLTSITIPNSVT | 125 |
| Query: | 571 | TIGEMAFLS-NKLESVNLSEQKQLKTIEVQAFSD-NALSEVVLPPNLQTIREEAFKRNHL | 628 |
| | | TIGE AF + L+S+ L L I A S L+ + +P ++ TI E AF | |
| Sbjct: | 126 | TIGEWAFKGCSGLKSITL--PNSLTAIGQSALSGCTGLTSITIPNSVTTIGEWAF----- | 178 |
| Query: | 629 | KEVKGSSTLSQITF | 642 |
| | | G S L+ ITF | |
| Sbjct: | 179 | ---FGCSGLTSITF | 189 |

[1679] A related DNA sequence was identified in S. pyogenes <SEQ ID 801> which encodes the amino acid sequence <SEQ ID 802>. Analysis of this protein sequence reveals the following:

```
Possible site: 21
>>> Seems to have a cleavable N-term signal seq.
INTEGRAL Likelihood = −2.44 Transmembrane 984-1000 (984-1001)
----- Final Results -----
                              bacterial membrane --- Certainty = 0.1977 (Affirmative) < succ>
                                bacterial outside --- Certainty = 0.0000 (Not Clear) < succ>
                            bacterial cytoplasm --- Certainty = 0.0000 (Not Clear) < succ>
LPXTG motif: 975-979
```

[1680] An alignment of the GAS and GBS proteins is shown below:

| Identities = 751/1050 (71%), Positives 861/1050 (81%), Gaps = 45/1050 (4%) | | | |
|---|---|---|---|
| Query: | 3 | KKHLKTLALALTTVSVVTYSQEVYGLEREESVKQEQTQSA-SEDDWFEEDNERKTNVSKE | 61 |
| | | KKHLKT+AL LTTVSVVT++QEV+ L +E +K Q Q S+ S D+ E + K +++ | |
| Sbjct: | 2 | KKHLKTVALTLTTVSVVTHNQEVFSLVKEPILKQTQASSSISGADYAESSGKSKLKINET | 61 |
| Query: | 62 | NSTVDETVSDLFSDGNSWNSSSKTESVVSDPKQVPKAKPEVTQEASWSSNDASKVEVPKQ | 121 |
| | | + VD+TV+DLFSD + K +Q KA E T E+ S++E K+ | |
| Sbjct: | 62 | SGPVDDTVTDLFSDKRTTPEKIKDNLAKGPREQELKAVTENT-ESEKQITSGSQLEQSKE | 120 |
| Query: | 122 | DTASKKETLETSTWEAKDFVTRGDTLVGFSKSGIWKLSQTSHLVLPSHAADGTQLTQVAS | 181 |
| | | + K TS WE DF+T+G+TLVG SKSG+ KLSQT NLVLPS AADGTQL QVAS | |
| Sbjct: | 121 | SLSLNKTVPSTSNWEICDFITKGWTLVGLSKSGVEKLSQTDHLVLPSQAADGTQLIQVAS | 180 |
| Query: | 182 | FAFTPDKKTAIAEYTSRLGENGKPSRLDIDQKEIIDEGEIFWAYQLTKLTIPNGYKSIGQ | 241 |
| | | FAFTPDKKTAIAEYTSR GENG+ S+LD+D KEII+EGE+FN+Y L K+TIP GYK IGQ | |
| Sbjct: | 181 | FAFTPDKKTAIAEYTSRAGENGEISQLDVDGKEIINEGEVFWSYLLKKVTIPTGYKHIGQ | 240 |
| Query: | 242 | DAFVDNKNIAEVNLPESLETISDYAFAHMSLKQVKLPDWLKVIGELAFFDNQIGGKLYLP | 301 |
| | | DAFVDNKNIAEVWLPESLETISDYAFAH++LKQ+ LPDWLK IGELAFFDNQI GKL LP | |
| Sbjct: | 241 | DAFVDNKNIAEVNLPESLETISDYAFAHLALKQIDLPDWLKAIGELAFFDWQITGKLSLP | 300 |
| Query: | 302 | RHLIKLAERAFKSNRIQTVEFLGSKLKVIGEASFQDWNLRNVMLPDGLEKIESEAFTGNF | 361 |
| | | R L++LAERAFKSN I+T+EF G+ LKVIGEASFQDN+L +MLPDGLEKIESEAFTGNP | |
| Sbjct: | 301 | RQLMRLAERAFKSNHIKTIEFRGNSLKVIGEASFQDWDLSQLMLPDGLEKIESEAFTGNP | 360 |
| Query: | 362 | GDEHYNNQVVLRTRTGQNPHQLATENTYVNPDKSLWRATPDMDYTKWLEEDFTYQKWSVT | 421 |
| | | GD+HYNN+VVL T++G+NP LATENTYVNPDKSLW+ +P++DYTKWLEEDFTYQKNSVT | |
| Sbjct: | 361 | GDDHYWNRVVLWTKSGKNPSGLATENTYVNPDKSLWQESPEIDYTKWLEEDFTYQKWSVT | 420 |
| Query: | 422 | GFSNKGLQKVRRNKNLEIPKQHNGITITEIGDNAFRNVDFQSKTLRKYDLEEIKLPSTIR | 481 |
| | | GFSNKGLQKV+RNKNLEIPKQHNG+TITEIGDNAFRNVDFQ+KTLRKYDLEE+KLPSTIR | |
| Sbjct: | 421 | GFSNKGLQKVKRNKNLEIPKQHNGVTITEIGDNAFRNVDFQNKTLRKYDLEEVKLPSTIR | 480 |
| Query: | 482 | KIGAFAFQSNNLKSFEASEDLEEIKEGAFMNNRIGTLDLKDKLIKIGDAAFHINHIYAIV | 541 |
| | | KIGAFAFQSNNLKSFEAS+DLEEIKEGAFMNNRI TL+LKDKL+ IGDAAFHINHIYAIV | |
| Sbjct: | 481 | KIGAFAFQSNNLKSFEASDDLEEIKEGAFMNNRIETLELKDKLVTIGDAAFHINHIYAIV | 540 |
| Query: | 542 | LPESVQEIGRSAFRQNGALHLMFIGNKVKTIGSMAFLSNKLSSVNLSEQKQLKTIEVQAF | 601 |
| | | LPESVQEIGRSAFRQNGA +L+F+G+KVKT+GEMAFLSN+LE ++LSEQKQL I VQAF | |
| Sbjct: | 541 | LPESVQEIGRSAFRQNGANNLIFNGSKVKTLGEMAFLSNRLEHLDLSEQKQLTSIPVQAF | 600 |
| Query: | 602 | SDNALSEVVLPPNLQTIREEAFKRNHLKEVKGSSTLSQITFNAFDQNDGDKRFGKKVVVR | 661 |
| | | SDNAL EV+LP +L+TIREEAFK+NHLK+++ +S LS I FNA D NDGD++F KVVV+ | |
| Sbjct: | 601 | SDNALKEVLLFASLKTIREEAFKKNHLKQLEVASALSHIAFNALDDNDGDEQFDNKVVVK | 660 |
| Query: | 662 | THNNSHMLADGERFIIDPDKLSSTMVDLEKVLKIIEGLDYSTLRQTTQTQFREMTTAGKA | 721 |
| | | TH+NS+ LADGE FI+DPDKLSST+VDLEK+LK+IEGLDYSTLRQTTQTQFR+MTTAGKA | |
| Sbjct: | 661 | THHNSYALADGEHFIVDPDKLSSTIVDLEKILKLIEGLDYSTLRQTTQTQFRDMTTAGKA | 720 |
| Query: | 722 | LLSKSNLRQGEKQKFLQEAQFFLGRVDLDKAIAKAEKALVTKKATKNGHLLERSINKAVL | 781 |
| | | LLSKSNLRQGEKQKFLQEAQFFLGRVDLDKAIAKAEKALVTKKATKNG LLERSINKAVL | |
| Sbjct: | 721 | LLSKSNLRQGEKQKFLQEAQFFLGRVDLDKAIAKAEKALVTKKATKNGQLLERSINKAVL | 780 |
| Query: | 782 | AYNNSAIKKANVKRLEKELDLLTDLVEGKGPLAQATMVQGVYLLKTPLPLFEYYIGLNVY | 841 |
| | | AYNNSAIKKANVKRLEKELDLLT LVEGKGPLAQATMVQGVYLLKTPLPLPEYYIGLNVY | |
| Sbjct: | 781 | AYNNSAIKKANVKRLEKELDLLTGLVEGKGPLAQATMVQGVYLLKTPLPLPEYYIGLNVY | 840 |
| Query: | 842 | FDKSGKLIYALDMSDTIGEGQKDAYGNPILNVDEDNEGYHTLAVATLADYEGLYIKDILN | 901 |
| | | FDKSGKLIYALDMSDTIGEGQKDAYGNPILNVDEDNEGYH LAVATLADYEGL IK ILN | |
| Sbjct: | 841 | FDKSGKLIYALDMSDTIGEGQKDAYGNPILNVDEDNEGYHALAVATLADYEGLDIKTILN | 900 |
| Query: | 902 | SSLDKIKAIRQIPLAKYHRLGIFQAIRNAAAEADRLLPKTPKGYLNEVPNYRKKQVEKNL | 961 |
| | | S L ++ +IRQ+P A YHR GIFQAI+NAAAEA++LLPK | |
| Sbjct: | 901 | SKLSQLTSIRQVPTAAYHRAGIFQAIQNAAAEAEQLLPK--------------------- | 939 |
| Query: | 962 | KPVDYKTPIFNKALPNEKVDGDRAAKGHNINAETNNSVAVTPIRSEQQLHKSQSDVNLPQ | 1021 |
| | | ++++ + N++ ++S + ++ + LP+ | |
| Sbjct: | 940 | ----------------PGTHSEKSSSSESANSKDRG------LQSNPKTNRGRHSAILPR | 977 |
| Query: | 1022 | TSSKNNFIYEILGYVSLCLLFLVTAGKKGK | 1051 |
| | | T SK +F+Y ILGY S+ LL L+TA KK K | |
| Sbjct: | 978 | TGSKGSFVYGILGYTSVALLSLITAIKKKK | 1007 |

[1681] Based on this analysis, it was predicted that these proteins and their epitopes could be useful antigens for vaccines or diagnostics.

### EXAMPLE 254

[1682] A DNA sequence (GBSx0269) was identified in S. agalactiae <SEQ ID 803> which encodes the amino acid sequence <SEQ ID 804>. This protein is predicted to be ribonucleoside-diphosphate reductase alpha chain (nrdE). Analysis of this protein sequence reveals the following:

```
Possible site: 48
>>> Seems to have no N-terminal signal sequence
----- Final Results -----
                            bacterial cytoplasm --- Certainty = 0.4274 (Affirmative) < succ>
                              bacterial membrane --- Certainty = 0.0000 (Not Clear) < succ>
                                bacterial outside --- Certainty = 0.0000 (Not Clear) < succ>
```

[1683] The protein has homology with the following sequences in the GENPEPT database:

| >GP:AAB96160 GB:AE000050 ribonucleoside-diphosphate reductase | | | |
|---|---|---|---|
| alpha | | | |
| chain~MPN324 (new), 513 (Himmelreich et al., 1996) | | | |
| [Mycoplasma pneumoniae] | | | |
| Identities = 476/725 (65%), Positives = 586/725 (80%), | | | |
| Gaps = 20/725 (2%) | | | |
| Query: | 2 | TQSD--AYLSLNAKTRFRDRTGNYHFTSDKEAVEQYMIEHVEPNTHVFTSLIEKLDYLVS | 59 |
| | | TQ D +Y+SLNA T+ F D AVE Y+ EHV+P T VF S E+LD+LV | |
| Sbjct: | 12 | TQEDLESYISLNAYTKVYG-----DFKMDLHAVEAYIQEHVKPKTKVFHSTKERLDFLVK | 66 |
| Query: | 60 | NNYYESDLLKQYNLEFICQIFEHAYAKKFAFLNFHGALKFYNAYALKTEDNRYYLEHYED | 119 |
| | | N+YY+ +++ Y+ E +I AYA +F + NFMGA KFYNAYALKT D ++ YLE+YED | |
| Sbjct: | 67 | NDYYDENIINMYSFEQFEEITRRAYAYRFRYANFHGAFKFYNAYALKTFDGKWYLENYED | 126 |
| Query: | 120 | RVVMNALFLAAGDEKAAYDLVDDMLANRFQPATPTFLNAGKKRRGEYISCYLLRIEDNME | 179 |
| | | RVVMN LFLA G+ A L+ ++ NRFQPATPTFLNAG+K+RGE++SCYLLRIEDNME | |
| Sbjct: | 127 | RVVMNVLFLANGNYNKALKLLKQIITNRFQPATPTFLNAGRKKRGEFVSCYLLRIEDNME | 186 |
| Query: | 180 | SISRAISTSLQLSRRGGGVALCLTNLREFGAFIRGIKNQATGIVPVNKLLEDSFSYANQL | 239 |
| | | SI RAI+T+LQLSKR GGVAL LTN+RE GAPIK I+NQ++GI+P+MKLLEDSFSYANQL | |
| Sbjct: | 187 | SIGRAITTTLQLSRRDGGVALLLTNIRESGAPIRRIENQSSGIIPIMRLLEDSFSYANQL | 246 |
| Query: | 240 | GQRQGAGAVYLHAHHPEVLTFLDTRRENADEKIRIKSLSLGLVIPDITFELAKANKDMAL | 299 |
| | | GQRQGAGAVYLHAHHP+V+ FLDTKRENADEEIRIRSLSLGLVIPDITF LAK N++MAL | |
| Sbjct: | 247 | GQRQGAGAVYLHAHHPDVMQFLDTKRENADEKIRIKSLSLGLVIPDITFTLAKNNEEMAL | 306 |
| Query: | 300 | FSPYDIERVYGKPMSDISITEEYETLLANADIRKTFISARKLFQTIAELHFESGYPYILF | 359 |
| | | FSPYD+ YGKP+SDIS+TE Y LLAN I+KTFI+ARK FQT+AELHFESGYPYILF | |
| Sbjct: | 307 | FSPYDVYEEYGKPLSDISVTEMYYELLANQRIKKTFINARKFFQTVAELHFESGYPYILF | 366 |
| Query: | 360 | EDTVNAKNPHKKEGRIVMSNLCSEIAQVNTASQFSEDLTFTKVGHDVCCNLGSINIARAM | 419 |
| | | +DTVN +N H RIVMSNLCSEI Q +T S+F DL F KVG+D+ CNLGS+NIA+AM | |
| Sbjct: | 367 | DDTVNRRNAH--PNRIVMSNLCSEIVQPSTPSEFHHDLAFKKVGNDISCNLGSLNIARAM | 424 |
| Query: | 420 | DQAADFEKLIANSIRALDRVSRTSDLDSAPSIKKGNAANHAVGLGANNLHGFLATNHIYY | 479 |
| | | + +F +L+ +I +LD VSR S+L++APSI+KGN+ NHA+GLGAMNLHGFLATH IYY | |
| Sbjct: | 425 | ESGPEFSELVKLAIESLDLVSRVSNLETAPSIQKGNSENHALGLGANNLHGFLATNQIYY | 484 |
| Query: | 480 | DSQEAIDFTDCFFYANAYYAFKASNHLAKEKGTFEGFSESSYADGSYFYQY--TEQNF-E | 536 |
| | | +S EAIDFT+ FFY +AY+AFKAS+ LA ERG F+ F + +ADGSYF +Y E +F | |
| Sbjct: | 485 | NSFEAIDFTNIFFYTVAYHAFKASSELALEKGKFKNFENTKFADGSYFDKYIKVEPDFWT | 544 |
| Query: | 537 | PKTQRVKNLLAEYGLTLPSQEDWRKLVQSIKEIGLANAHLLAVAPTGSISYLSSCTPSLQ | 596 |
| | | PKT+RVK L +Y + +P++E+W++L +I++ GLAN+HLLA+APTGSISYLSSCTPSLQ | |
| Sbjct: | 545 | PKTERVKALFQKYQVEIPTRENWKELALNIQKNGLANSHLLAIAPTGSISYLSSCTPSLQ | 604 |
| Query: | 597 | PVVSPVEVRKEGALGRVYVPAYKIDADNYVYYKKGAYEVGSEAIINIAAAAQKHIDQAIS | 656 |
| | | PVVSPVEVRKEG LGR+YVPAY+++ D+Y +YK GAYE+G E IINIAAAAQ+H+DQAIS | |
| Sbjct: | 605 | PVVSPVEVRKEGRLGRIYVPAYQLNEDSYPFYKDGAYELGPEPIINIAAAAQQHVDQAIS | 664 |
| Query: | 657 | LTLFMTDQATTRDLNKAYIQAFKQKCASIYYVRVRQDILEGSESYDDMLDDFTSSDLEDC | 716 |
| | | LTLFMTD+ATTRDLNKAYI AFK+ C+SIYYVRVRQ++LE SE + + ++ C | |
| Sbjct: | 665 | LTLFMTDKATTRDLNKAYIYAFKKGCSSIYYVRVRQEVLEDSEDH--------TIQMQQC | 716 |
| Query: | 717 | QSCMI | 721 |
| | | ++C+I | |
| Sbjct: | 717 | EACVI | 721 |

[1684] A related DNA sequence was identified in S. pyogenes <SEQ ID 805> which encodes the amino acid sequence <SEQ ID 806>. Analysis of this protein sequence reveals the following:

```
Possible site: 47
>>> Seems to have no N-terminal signal sequence
----- Final Results -----
                              bacterial cytoplasm --- Certainty = 0.1843 (Affirmative) < succ>
                                bacterial membrane --- Certainty = 0.0000 (Not Clear) < succ>
                                  bacterial outside --- Certainty = 0.0000 (Not Clear) < succ>
```

[1685] The protein has homology with the following sequences in the databases:

| >GP:AAC82625 GB:AF054892 surface antigen BspA [Bacteroides forsythus] | | | |
|---|---|---|---|
| Identities = 124/451 (27%), Positives = 202/451 (44%), | | | |
| Gaps = 65/451 (14%) | | | |
| Query: | 221 | FNSYLLKKVTIPTGYKHIGQDAFVDNKNIAEVNLPSSLETISDYAFAHLA-LKQIDLPDN | 279 |
| | | F+ L VT+P IG AF + + +P S+ TI ++AF + LK I LP++ | |
| Sbjct: | 87 | FSDCALTSVTLPNSLTAIGDHAFKGCSGLTSITIPNSVTTIGEWAFKGCSGLKSITLPNS | 146 |
| Query: | 280 | LKAIGELAFFDNQITGKLSLPRQLMRLAERA-FKSNHIKTISFRGNSLKVIGEASFQD-N | 337 |
| | | L AIG+A +++P + + E A F + + +I F NSL IGE++F | |
| Sbjct: | 147 | LTAIGQSALSGCTGLTSITIPNSVTTIGEWAFFGCSGLTSITF-PNSLTAIGESAFYGCG | 205 |
| Query: | 338 | DLSQLMLPDGLEKIESEAFTGNPGDDHYNNRVVLWTKSGKNPSGLATENTYVNPDKSLWQ | 397 |
| | | L+ + LPD L I AF G G KS P+ L T +S + | |
| Sbjct: | 206 | ALTSITLPDALTTIGESAFKGCSG-----------LKSITFPNSLTTIG------ESAFY | 248 |
| Query: | 398 | SSPEIDYTKWLEEDFTYQKNSVTGFSNKGLQKVKRNKNLSIPKQHNGVTITEIGDNAFRN | 457 |
| | | + + + T +++ G S GL K++ P ++T IG++AF N | |
| Sbjct: | 249 | DCGALTSITLPDALTTIGRSAFYGCS--GL------KSITFPN-----SLTTIGESAFYN | 295 |
| Query: | 458 | VDFQNKTLRKYDLEEVKLPSTIRKIGAFAFQS-NNLKSFEASDDLEEIKEGAFMNNRIET | 516 |
| | | L + +P+++ IG AF + LKS D L I+E AF N + T | |
| Sbjct: | 296 | CG---------SLTSITIPNSVTTIGRSAFYGCSGLKSITLPDGLTTIEERAFYNCGVLT | 346 |
| Query: | 517 | -LELKDKLVTIGDAAFH-INHIYAIVLPESVQEIGRSAFRQNGANNLIFNGSKVKTLGEM | 574 |
| | | + + + + TIG++AF+ + + +I LP+ + I AF GA I + + V T+GE | |
| Sbjct: | 347 | SITIPNSVATIGESAFYGCSGLKSITLPDGLTTIEWGAFYNCGALTSITIPNSVSTIGES | 406 |
| Query: | 575 | AFLS-NRLEHLDLSEQKQLTEIPVQAFSDNALKEVLL--PASLKTIREEAFKKNHLKQLE | 631 |
| | | AF L+ + ++ + +I F + L + L PA KT+ E K+ K+ | |
| Sbjct: | 407 | AFYGCGALKDVTVAWDTPI-DIQRDVFRELTLSGIRLHVPAGKKTVYE---AKDVWKE-- | 460 |
| Query: | 632 | VASALSHIAFNALDDND-GDEQFDNKVVVRT | 661 |
| | | FN ++D+D G Q++ | KT |
| Sbjct: | 461 | ---------FNIVEDDDFGGLQWNYDAATKT | 482 |

[1686] An alignment of the GAS and GBS proteins is shown below:

| Identities = 534/726 (73%), Positives = 614/726 (84%), | | | |
|---|---|---|---|
| Gaps = 5/726 (0%) | | | |
| Query: | 1 | HTQSDA-YLSLNAKTRFRDRTGNYHFTSDKSAVEQYHIEHVEPNTMVFTSLIEKLDYLVS | 59 |
| | | M+Q++A YLSLNA TRF+ G+YHF SDKEAV +Y+ EHV PN M F SL +KL YL++ | |
| Sbjct: | 1 | MSQTNASYLSLNALTRFKKPDGSYHFDSDKEAVRRYLEEHVSPNQMAFNSLEDKLAYLIN | 60 |
| Query: | 60 | NNYYESDLLKQYNLEFICQIFEHAYAKKFAFLNFMGALKFYNAYALKTEDNRYYLEHYED | 119 |
| | | YYE + Y + I + F +AY + + FLN MGA+KFY +YALKT D + YLE +ED | |
| Sbjct: | 61 | EGYYEQAIFDAYPNDLIKEAFHYAYQQGYRFLNLNGAMKFYQSYALKTLDGKQYLETFED | 120 |
| Query: | 120 | RVVMNALFLAAGDEKAAYDLVDDMLANRFQPATPTFLNAGKERRGEYISCYLLRIEDNME | 179 |
| | | R VMNALFLA GD+ +D++D +L RFQPATPTFLNAGKKRRGEYISCYLLR+EDNME | |
| Sbjct: | 121 | PAVMNALFLADGDQTFVFDVIDAILHRRFQPATPTFLNAGKKRRGEYISCYLLRVEDNME | 180 |
| Query: | 180 | SISRAISTSLQLSKRGGGVALCLTNLREFGAPIKGIKNQATGIVPVMKLLEDSFSYANQL | 239 |
| | | SISRAISTSLQLSKRGGGVALCLTNLRE GAPIKGI+NQATGIVPVMKLLEDSFSYANQL | |
| Sbjct: | 181 | SISRAISTSLQLSKRGGGVALCLTNLREIGAPIKGIENQATGIVPVMKLLEDSFSYANQL | 240 |
| Query: | 240 | GQRQGAGAVYLHAHHPEVLTFLDTKRENADEKIRIKSLSLGLVIPDITFELAKANKDMAL | 299 |
| | | GQRQGAGAVYLHAHHPEVLTFLDTKRENADEKIRIKSL+LGLVIPDITF+LAK NKDMAL | |
| Sbjct: | 241 | GQRQGAGAVYLHAHHPEVLTFLDTKRENADEKIRIKSLALGLVIPDITFQLAKENKDMAL | 300 |
| Query: | 300 | FSPYDIERVYGKPMSDISITEEYETLLANADIRKTFISARKLFQTIAELHFESGYPYILF | 359 |
| | | FSPYDI+R Y K MSDISITEEY+ LLAN I+KT+ISARK FQ IAELHFESGYPY+LF | |
| Sbjct: | 301 | FSPYDIKRAYGKDMSDISITEEYDKLLANPAIKKTYISARKFFQLIAELHFSSGYPYLLF | 360 |
| Query: | 360 | EDTVNAKNPHKKEGRIVIASNLCSEIAQVNTASQFSEDLTFTKVGHDVCCNLGSINIARM | 419 |
| | | +DTVN +NPH K+GRIVMSNLCSEIAQV+T S F EDL+F +G D+CCNLGSINIA+AN | |
| Sbjct: | 361 | DDTVNKRNPHAKKGRIVMSNLCSEIAQVSTPSTFKEDLSFETIGEDICCNLGSINIAQAN | 420 |
| Query: | 420 | DQAADFEKLIANSIRALDRVSRTS0LDSAPSIKKGNAANHAVGLGAMNLHGFLATNNIYY | 479 |
| | | A FE+LI SIRALDRVSR SDL+ APS++ GNAANHAVGLGAMNLHGFLATNHIYY | |
| Sbjct: | 421 | ADAPHFEQLITTSIRALDRVSRVSDLNCAPSVETGNAANHAVGLGAMNLHGFLATNNIYY | 480 |
| Query: | 480 | DSQEAIDFTDCFFYAMAYYAFKASNHLAKEKGTFEGFSESSYADGSYFYQYTEQNFEPKT | 539 |
| | | D++EA+DFTD FF+AMAYYAFKAS LAKEKG F GFS S+Y+DG+YF +Y +++ +P+T | |
| Sbjct: | 481 | DTKEAVDFTDLFFHAMAYYAFKASCQLAKEKGAFAGFSLSTYSDGTYFAKYLQEDAKPQT | 540 |
| Query: | 540 | QRVKNLLAEYGLTLPSQEDWRKLVQSIKEIGLANAHLLAVAPTGSISYLSSCTPSLQPVV | 599 |
| | | +V LL +YG TLP+ DW+ LV IK+ GLANAHLLAVAPTGSISYLSSCTPSLQPVV | |
| Sbjct: | 541 | AKVATLLQDYGFTLPTVADWQALVADIKQFGLANAHLLAVAPTGSISYLSSCTPSLQPVV | 600 |
| Query: | 600 | SPVEVRKEGALGRVYVPAYKIDADNYVYYKRGAYEVGSEAIINIAAAAQKHIDQAISLTL | 659 |
| | | +PVEVRKEG+LGR+YVPAY+ID NY YY++GAYEVG +AII++ AAAQKH+DQAISLTL | |
| Sbjct: | 601 | APVEVRKEGSLGRIYVPAYQIDQANYAYYERGAYEVGPKAIIDVVAAAQKHVDQAISLTL | 660 |
| Query: | 660 | FMTDQATTRDLNKAYIQAFKQKCASIYYVRVRQDILEGSESYDD----MLDDFTSSDLED | 715 |
| | | FMTDQATTRDLN++YIQAFKQ CASIYYVRVRQD+L GSE YD+ + + | |
| Sbjct: | 661 | FMTDQATTRDLNRSYIQAFKQNCASIYYVRVRQDVLAGSEQYDEDSLVTAPGASDETTTE | 720 |
| Query: | 716 | CQSCMI | 721 |
| | | CQSCMI | |
| Sbjct: | 721 | CQSCMI | 726 |

[1687] Based on this analysis, it was predicted that these proteins and their epitopes could be useful antigens for vaccines or diagnostics.

### EXAMPLE 255

[1688] A DNA sequence (GBSx0270) was identified in S. agalactiae <SEQ ID 807> which encodes the amino acid sequence <SEQ ID 808>. This protein is predicted to be nrdI protein (nrdI). Analysis of this protein sequence reveals the following:

Possible site: 54
>>> Seems to have no N-terminal signal sequence
----- Final Results ----
bacterial cytoplasm --- Certainty = 0.2952 (Affirmative) < succ>
bacterial membrane --- Certainty = 0.0000 (Not Clear) < succ>
bacterial outside --- Certainty = 0.0000 (Not Clear) < succ>

[1689] The protein has homology with the following sequences in the GENPEPT database:

| >GP:AAC71451 GB:U39702 nrdI protein (nrdI) [Mycoplasma genitalium] | | | |
|---|---|---|---|
| Identities = 77/127 (60%), Positives = 104/127 (81%), Gaps = 1/127 (0%) | | | |
| Query: | 7 | VVYFSSKSNNTHRFVQKLACSNQRIPSD-GSSILVTEDYILIVPTYAGGGDDTKGAVPKQ | 65 |
| | | +VYFSS SNNTHRF++KL ++RIP D SI V+ +Y+LI PTY+GGG+ +GAVPKQ | |
| Sbjct: | 22 | IVYFSSISNNTHRFIEKLGFQHKRIPVDITQSITVSNEYVLICPTYSGGGNQVEGAVPKQ | 81 |
| Query: | 66 | VVQFLNVRQNREHCQGVISSGNTNFGDTYAIAGPIIARKLNVPLLHQFELLGTQEDVTRV | 125 |
| | | V+QFLN + NRE C+GVI+SGNTNFGDT+ +AG +I++KLNVPLL+QFELLGT+ DV + | |
| Sbjct: | 82 | VIQFLNNKHNRELCRGVIASGNTNFGDTFCLAGTVISKKLNVPLLYQFELLGTKNDVEQT | 141 |
| Query: | 126 | KELLCQF | 132 |
| | | ++++ F | |
| Sbjct: | 142 | QKIIANF | 148 |

[1690] A related DNA sequence was identified in S. pyogenes <SEQ ID 809> which encodes the amino acid sequence <SEQ ID 810>. Analysis of this protein sequence reveals the following:

Possible site: 54
>>> Seems to have no N-terminal signal sequence
----- Final Results -----
bacterial cytoplasm --- Certainty = 0.0089 (Affirmative) < succ>
bacterial membrane --- Certainty = 0.0000 (Not Clear) < succ>
bacterial outside --- Certainty = 0.0000 (Not Clear) < succ>

[1691] An alignment of the GAS and GBS proteins is shown below:

| Identities = 84/125 (67%), Positives = 100/125 (79%) | | | |
|---|---|---|---|
| Query: | 7 | VVYFSSKSNNTHRFVQKLACSNQRIPSDGSSILVTEDYILIVPTYAGGGDDTKGAVPKQV | 66 |
| | | +VYFSSKS NTHRFVQKL QRIP D + V+ Y+LIVPTYA GG D KGAV KQV | |
| Sbjct: | 6 | IVYFSSKSNNTHRFVQKLGLPAQRIPVDNRPLEVSTHYLLIVPTYAAGGSDAKGAVSKQV | 65 |
| Query: | 67 | VQFLNVRQNREHCQGVISSGNTNFGDTYAIAGPIIARKLNVPLLHQFELLGTQEDVTRVK | 126 |
| | | ++FLN NR+HC+GVISSGNTNFGDT+A+AGPII++KL VPLLHQFELLGT DV +V+ | |
| Sbjct: | 66 | IRFLNNPNNRKHCKGVISSGNTNFGDTFALAGPIISQKLQVPLLHQFELLGTATDVKKVQ | 125 |
| Query: | 127 | ELLCQ | 131 |
| | | ++ | |
| Sbjct: | 126 | AIFAR | 130 |

[1692] Based on this analysis, it was predicted that these proteins and their epitopes could be useful antigens for vaccines or diagnostics.

### EXAMPLE 256

[1693] A DNA sequence (GBSx0271) was identified in S. agalactiae <SEQ ID 811> which encodes the amino acid sequence <SEQ ID 812>. This protein is predicted to be ribonucleoside-diphosphate reductase beta chain (nrdF). Analysis of this protein sequence reveals the following:

```
Possible site: 27
>>> Seems to have no N-terminal signal sequence
----- Final Results -----
                            bacterial cytoplasm --- Certainty = 0.3889 (Affirmative) < succ>
                              bacterial membrane --- Certainty = 0.0000 (Not Clear) < succ>
                                bacterial outside --- Certainty = 0.0000 (Not Clear) < succ>
```

[1694] The protein has homology with the following sequences in the GENPEPT database:

| >GP:AAB96162 GB:AE000050 ribonucleoside-diphosphate reductase beta | | | |
|---|---|---|---|
| chain [Mycoplasma pneumoniae] | | | |
| Identities = 261/335 (77%), Positives = 301/335 (88%) | | | |
| Query: | 2 | QSYYDRSQSPLDYALSEKAFPMRSVNWNKLNDDKDLEVWNRVTQNFWLPSKIPVSNDLNS | 61 |
| | | + Y+ S SPL+YA + +RSVNWN ++D+KDLEVWNR+TQNFWLPEKIPVSND+ S | |
| Sbjct: | 5 | KKYFLESVSPLEYAQKKPQGNLRSVNWNLVDDEKDLEVWNRITQNFWLPEKIPVSNDIPS | 64 |
| Query: | 62 | WRTLDADWQQLITRTFTGLTLLDSVQATVGDIAQIKHSQTDHSQVIYANFAFMVAIHARS | 121 |
| | | W+ L +WQ LIT+TFTGLTLLD++QAT+GDI QI ++ TDHSQVIYANFAFMV +HARS | |
| Sbjct: | 65 | WKQLSKEWQDLITKTFTGLTLLDTIQATIGDIKQIDYALTDHEQVIYANFAFMVGVHARS | 124 |
| Query: | 122 | YGTIFSTLCTSQQIEEAHEWVVDTESLQARSRILIPFYTGDDPLKSKVAAAMMPGFLLYG | 181 |
| | | YGTIFSTLCTS+QI EAHEWVV TESLQ R++ LIP+YTG DPLKSKVAAA+MPGFLLYG | |
| Sbjct: | 125 | YGTIFSTLCTSEQITEAHEWVVKTESLQKRAKALIPYYTGKDPLKSKVAAALMPGFLLYG | 184 |
| Query: | 182 | GFYLPFYLSARGKLPNTSDIIRLILRDKVIHNYYSGYKYQQKVAKLSVEKQAEMKTFVFD | 241 |
| | | GFYLPFYLS+R +LPNTSDIIRLILRDKVIHNYYSGYK+Q+KV K+S EKQAEMK FVFD | |
| Sbjct: | 185 | GFYLPFYLSSRKQLPNTSDIIRLILRDKVIHNYYSGYKFQRKVEKMSKEKQAEMKRFVFD | 244 |
| Query: | 242 | LLYQLIDLEKAYLYELYDGEDLAEDAIRFSIYNAGKFLQNLGYDSPFTEEETRISPEVFA | 301 |
| | | L+Y+LI+LEKAYL ELY+GF + EDAI+FSIYNAGKFLQNLGYDSPFTEESTRI PE+FA | |
| Sbjct: | 245 | LMYELIELEKAYLKELYEGEGIVEDAIKFSIYNAGKFLQNLGYDSPFTSEETRIKPEIFA | 304 |
| Query: | 302 | QLSARADENHDFFSGMGSSYIMGITEETLDEDWEF | 336 |
| | | QLSARADENHDFFSGNGSSY+MGI+EET D+DW+F | |
| Sbjct: | 305 | QLSARADENHDFFSGNGSSYVMGISEETEDKDWDF | 339 |

[1695] A related DNA sequence was identified in S. pyogenes <SEQ ID 813> which encodes the amino acid sequence <SEQ ID 814>. Analysis of this protein sequence reveals the following:

```
Possible site: 18
>>> Seems to have no N-terminal signal sequence
----- Final Results -----
                            bacterial cytoplasm --- Certainty = 0.3779 (Affirmative) < succ>
                              bacterial membrane --- Certainty = 0.0000 (Not Clear) < succ>
                                bacterial outside --- Certainty = 0.0000 (Not Clear) < succ>
```

[1696] An alignment of the GAS and GBS proteins is shown below:

| Identities = 292/335 (87%), Positives = 318/335 (94%) | | | |
|---|---|---|---|
| Query: | 2 | QSYYDRSQSPLDYALSEKAFPMRSVNWNKLNDDKDLEVWNRVTQNFWLPEKIPVSNDLNS | 61 |
| | | Q YY+RSQSP++YALSE +RS+NWN LNDDKDLEVWNRVTQNFWLPEK+PVSNDLNS | |
| Sbjct: | 3 | QHYYERSQSPIEYALSETQKQLRSINWNYLNDDKDLEVWNRVTQNFWLPEKVPVSNDLNS | 62 |
| Query: | 62 | WRTLDADWQQLITRTFTGLTLLDSVQATVGDIAQIKHSQTDHEQVIYANFAFMVAIHARS | 121 |
| | | WR+L DWQQLITRT+TGLTLLD+VQATVGD+AQI+HSQTDHEQVIY NFAFMV IHARS | |
| Sbjct: | 63 | WRSLGEDWQQLITRTYTGLTLLDTVQATVGDVAQIQHSQTDHEQVIYTNFAFMVGIHARS | 122 |
| Query: | 122 | YGTIFSTLCTSQQIEEAHEWVVDTESLQARSRILIPFYTGDDPLKSKVAAAMMPGFLLYG | 181 |
| | | YGTIFSTLC+S+QIEEAHEWVV T+SLQ R+R+LIP+YTGDDPLKSKVAAAMMPGFLLYG | |
| Sbjct: | 123 | YGTIFSTLCSSEQIEEAHEWVVSTQSLQDRARVLIPYYTGDDPLKSKVAAAMMPGFLLYG | 182 |
| Query: | 182 | GFYLPFYLSARGKLPNTSDIIRLILRDKVIHNYYSGYKYQQKVAKLSVEKQAEMKTFVFD | 241 |
| | | GFYLPFYLSARGK+PNTSDIIRLILRDKVIHNYYSGYKYQQKVA+LS EKQAEMK FVFD | |
| Sbjct: | 183 | GFYLPFYLSARGKMPNTSDIIRLILRDKVIHNYYSGYKYQQKVARLSPEEQAEMKAFVFD | 242 |
| Query: | 242 | LLYQLIDLEKAYLYELYDGFDLAEDAIRWSIYNAGKFLQNLGYDSPFTEEETRISPEVFA | 301 |
| | | LLY+LIDLEKAYL ELY GFDLAEDAIRFS+YNAGKFLQNLGY+SPFT+EETR+SPEVFA | |
| Sbjct: | 243 | LLYELIDLEKAYLRELYAGFDLAEDAIRFSLYNAGKFLQNLGYESPFTDEETRVSPEVFA | 302 |
| Query: | 302 | QLSARADENHDFFSGNGSSYIMGITEETLDEDWEF | 336 |
| | | QLSARADENHDFFSGNGSSY+MGITEET D+DWEF | |
| Sbjct: | 303 | QLSARADENHDFFSGNGSSYVHGITEETTDDDWEF | 337 |

[1697] Based on this analysis, it was predicted that these proteins and their epitopes could be useful antigens for vaccines or diagnostics.

### EXAMPLE 257

[1698] A DNA sequence (GBSx0272) was identified in S. agalactiae <SEQ ID 815> which encodes the amino acid sequence <SEQ ID 816>. This protein is predicted to be rhamnosyltransferase. Analysis of this protein sequence reveals the following:

```
Possible site: 55
>>> Seems to have no N-terminal signal sequence
----- Final Results -----
                            bacterial cytoplasm --- Certainty = 0.1741 (Affirmative) < succ>
                              bacterial membrane --- Certainty = 0.0000 (Not Clear) < succ>
                                bacterial outside --- Certainty = 0.0000 (Not Clear) < succ>
```

[1699] A related GBS nucleic acid sequence <SEQ ID 9583> which encodes amino acid sequence <SEQ ID 9584> was also identified.

[1700] The protein has homology with the following sequences in the GENPEPT database:

| >GP:BAA32090 GB:AB010970 rhamnosyltransferase [Streptococcus mutans] | | | |
|---|---|---|---|
| Identities = 104/309 (33%), Positives = 173/309 (55%), Gaps = 21/309 (6%) | | | |
| Query: | 11 | QINICLATYNGQKYLRQQLDSIIQQGYTDWICLIRDDGSTDDTVAIIKEYVNRDSRFIFI | 70 |
| | | ++NI ++TYNGQ+++ QQ+ SI +Q + +W LIRDDGS+D T II ++ D+R FI | |
| Sbjct: | 2 | KVNILMSTYNGQEFIAQQIQSIQKQTFENWNLLIRDDGSSDGTPKIIADFAKSDARIRFI | 61 |
| Query: | 71 | NSNDDRKLGSHRSFYELVNYKKADFYVFSDQDDVWKENRLERYLEEAEKFNQELPLLVYS | 130 |
| | | N++ G ++FY L+ Y+KAD+Y FSDQDDVW +LE L EK N ++PL+VY+ | |
| Sbjct: | 62 | NADKRENFGVIKNFYTLLKYEKADYYFFSDQDDVWLPQKLELTLASVEKENNQIPLNVYT | 121 |
| Query: | 131 | NWTSVDEKLTVL-------KEHNPATVIQEQIAFNQINGMVINMNNELAKLWE--YRQIG | 181 |
| | | + T VD L VL + H+ T + E++ N + G +M+NH LAK W+ Y + | |
| Sbjct: | 122 | DLTVVDRDLQVLHDSMIKTQSHHANTSLLEELTENTVTGGTMMVNHCLAKQWKQCYDDLI | 181 |
| Query: | 182 | AHDSYVGTLAYAVGNVAYISDSTVLWRRQ----VGAES----LNNYGRQYG-VATFWQMI | 232 |
| | | HD Y+ LA ++G + Y+ ++T L+R+ +GA + L N+ R + V +W ++ | |
| Sbjct: | 182 | MHDWYLALLAASLGKLIYLDETTELYRQHESNVLGARTWSKRLKNWLRPHRLVKKYWWLV | 241 |
| Query: | 233 | NTSFDRASLIFAQVSDKNSLERKLFFSRFIELKNANLMRRIYLLSKLKLRRKSLKETVAN | 292 |
| | | +S +AS + + + K ++ L + + + RI L + + T | |
| Sbjct: | 242 | TSSQQQASHL---LELDLPAANKAIIRAYVTLLDQSFLNRIKWLKQYGFAKNRAFHTFVF | 298 |
| Query: | 293 | TILLLTGYG | 301 |
| | | L++T +G | |
| Sbjct: | 299 | KTLIITKFG | 307 |

[1701] Based on this analysis, it was predicted that these proteins and their epitopes could be useful antigens for vaccines or diagnostics.

### EXAMPLE 258

[1702] A DNA sequence (GBSx0273) was identified in S. agalactiae <SEQ ID 819> which encodes the amino acid sequence <SEQ ID 820>. Analysis of this protein sequence reveals the following:

```
Possible site: 36
>>> Seems to have no N-terminal signal sequence
INTEGRAL Likelihood = −4.19 Transmembrane 1213-1229 (1211-1230)
----- Final Results -----
                            bacterial membrane --- Certainty = 0.2678 (Affirmative) < succ>
                              bacterial outside --- Certainty = 0.0000 (Not Clear) < succ>
                                bacterial cytoplasm --- Certainty = 0.0000 (Not Clear) < succ>
```

[1703] A related GBS nucleic acid sequence <SEQ ID 9581> which encodes amino acid sequence <SEQ ID 9582> was also identified.

[1704] There is also homology to SEQ ID 822.

[1705] A related GBS gene <SEQ ID 8525> and protein <SEQ ID 8526> were also identified. Analysis of this protein sequence reveals the following:

```
Lipop: Possible site: −1 Crend: 7
SRCFLG: 0
McG: Length of UR: 3
          Peak Value of UR: 2.28
          Net Charge of CR: 4
McG: Discrim Score: 1.29
GvH: Signal Score (−7.5): 2.84
Possible site: 30
>>> Seems to have a cleavable N-term signal seq.
Amino Acid Composition: calculated from 31
ALOM program count: 0 value: 1.16 threshold: 0.0
PERIPHERAL Likelihood = 1.16 344
modified ALOM score: −0.73
*** Reasoning Step: 3
----- Final Results -----
                                bacterial outside --- Certainty = 0.3000 (Affirmative) < succ>
                              bacterial membrane --- Certainty = 0.0000 (Not Clear) < succ>
                            bacterial cytoplasm --- Certainty = 0.0000 (Not Clear) < succ>
LPXTG motif: 1197-1201
```

[1706] SEQ ID 8526 (GBS147) was expressed in E. coli as a His-fusion product. SDS-PAGE analysis of total cell extract is shown in FIG. 29 (lane 4; MW 132 kDa).

[1707] The GBS147-His fusion product was purified (FIG. 200, lane 5) and used to immunise mice. The resulting antiserum was used for FACS (FIG. 286), which confirmed that the protein is immunoaccessible on GBS bacteria.

[1708] Based on this analysis, it was predicted that these proteins and their epitopes could be useful antigens for vaccines or diagnostics.

### EXAMPLE 259

[1709] A DNA sequence (GBSx0274) was identified in S. agalactiae <SEQ ID 823> which encodes the amino acid sequence <SEQ ID 824>. This protein is predicted to be Acetyltransferase (GNAT) family. Analysis of this protein sequence reveals the following:

```
Possible site: 57
>>> Seems to have no N-terminal signal sequence
----- Final Results -----
                            bacterial cytoplasm --- Certainty = 0.2781 (Affirmative) < succ>
                              bacterial membrane --- Certainty = 0.0000 (Not Clear) < succ>
                                bacterial outside --- Certainty = 0.0000 (Not Clear) < succ>
```

[1710] The protein has homology with the following sequences in the GENPEPT database:

| >GP: AAG03505 GB: AE004449 conserved hypothetical protein [Pseudomonas | | | |
|---|---|---|---|
| aeruginosa] | | | |
| Identities = 66/143 (46%), Positives = 94/143 (65%), Gaps = 5/143 (3%) | | | |
| Query: | 2 | WNVKTFDNLTTHELFQIYKLRVSVFVVEQDCPYQEVDDEDLI--CLHGMNWVDGQLAAYY | 59 |
| | | W K +LT EL+ + +LR VFVVEQ CPYQEVD DL+ H M W DGQL AY | |
| Sbjct: | 5 | WTCKHHADLTLKELYALLQLRTEVFVVEQKCPYQEVDGLDLVGDTHHLMAWRDGQLLAYL | 64 |
| Query: | 60 | RLIP---EDDKVHLGRVIVNPDFRKKGLGNQLVEYAIKFSEANYPNKPIYAQAQAYLQDF | 116 |
| | | RL+ + +V +GRV+ + R +GLG+QL+E A++ +E + + P+Y AQA+LQ + | |
| Sbjct: | 65 | RLLDPVRHEGQVVIGRVVSSSAARGQGLGHQLMERALQAAERLWLDTPVYLSAQAHLQAY | 124 |
| Query: | 117 | YQSFGFQPVSDIYLEDNIPHLDM | 139 |
| | | Y +GF V+++YLED+IPH+ M | |
| Sbjct: | 125 | YGRYGFVAVTEVYLEDDIPHIGM | 147 |

[1711] No corresponding DNA sequence was identified in S. pyogenes.

[1712] Based on this analysis, it was predicted that this protein and its epitopes, could be useful antigens for vaccines or diagnostics.

### EXAMPLE 260

[1713] A DNA sequence (GBSx0275) was identified in S. agalactiae <SEQ ID 825> which encodes the amino acid sequence <SEQ ID 826>. Analysis of this protein sequence reveals the following:

```
Possible site: 37
>>> Seems to have no N-terminal signal sequence
----- Final Results -----
                            bacterial cytoplasm --- Certainty = 0.2010(Affirmative) < succ>
                              bacterial membrane --- Certainty = 0.0000(Not Clear) < succ>
                                bacterial outside --- Certainty = 0.0000(Not Clear) < succ>
```

[1714] The protein has no significant homology with any sequences in the GENPEPT database.

[1715] No corresponding DNA sequence was identified in S. pyogenes.

[1716] Based on this analysis, it was predicted that this protein and its epitopes, could be useful antigens for vaccines or diagnostics.

### EXAMPLE 261

[1717] A DNA sequence (GBSx0276) was identified in S. agalactiae <SEQ ID 827> which encodes the amino acid sequence <SEQ ID 828>. Analysis of this protein sequence reveals the following:

```
Possible site: 39
>>> Seems to have no N-terminal signal sequence
----- Final Results -----
                            bacterial cytoplasm --- Certainty = 0.2935(Affirmative) < succ>
                              bacterial membrane --- Certainty = 0.0000(Not Clear) < succ>
                                bacterial outside --- Certainty = 0.0000(Not Clear) < succ>
```

[1718] The protein has homology with the following sequences in the GENPEPT database:

| >GP: CAB12631 GB: Z99108 similar to RNA methyltransferase [Bacillus | | | |
|---|---|---|---|
| subtilis] | | | |
| Identities = 217/448 (48%), Positives = 298/448 (66%), Gaps = 4/448 (0%) | | | |
| Query: | 7 | QRIPLKIKRMGINGEGIGFYKKTLIFVPGALKGEEVFCQISSVRRNFAEAKLLKINKKSK | 66 |
| | | Q PL IKR+GINGEG+G++KK ++FVPGAL GEEV Q + V+ F+E ++ KI K S+ | |
| Sbjct: | 16 | QTFPLTIKRLGINGEGVGYFKKKVVFVPGALPGEEVVVQATKVQPKFSEGRIKKIRKASE | 75 |
| Query: | 67 | NRVEPPCSIYKECGGCQIMHLQYDKQLEFKTDVIRQALMKFKPEGYENYEIRKTIGMSEP | 126 |
| | | +RV PPC +Y++CGGCQ+ HL Y +QL K D++ Q+L + EN EI++TIGM P | |
| Sbjct: | 76 | HRVAPPCPVYEQCGGCQLQHLAYSQQLREKRDIVIQSLERHTKFKVENMEIKETIGMDNP | 135 |
| Query: | 127 | EHYRAKLQFQV-RSFGGNVKAGLYAQGTHRLIDIKDCLVQDSLTQEMINRVAELLGKYKL | 185 |
| | | +YR K QFQ+ RS G++ AGLY +H ++ IKDC+VQ T + V +L + + | |
| Sbjct: | 136 | WNYRNKSQFQIGRSQSGSIIAGLYGLDSHDIVPIKDCIVQHPATNKTTGIVRRILEDFNV | 195 |
| Query: | 186 | PIYNERKIAG-VRTVMIRRAQASGEVQLIFITSKRL--DFDDVVIELVREFPELKTVAVN | 242 |
| | | +YNERK G VRT++ R +GEVQ++ +T+K +++V + + PE+K++ N | |
| Sbjct: | 196 | SVYNERKRKGDVRTIVTRVGFETGEVQVVLVTAKETLPHKEEIVKAIQKRLPEVKSIIQN | 255 |
| Query: | 243 | INASKTSDIYGQITEVIWGQESINEEVLDYGFSLSPRAFYQLNPKQTQILYSEAVKALDV | 302 |
| | | +N +KTS I+G+ T+ + G+ I E + D F LS RAF+QLNP+QT LY E KA + | |
| Sbjct: | 256 | VNGAKTSVIFGEKTKQLAGKTVIQEVLGDVSFELSARAFFQLNPEQTVKLYDEVKKAAQL | 315 |
| Query: | 303 | KEDDDLIDAYCGVGTIGLAFAGKVKSVRGMDIIPEAIQDAKENALYMGFTNTHYEAGKAE | 362 |
| | | + ++DAYCGVGTIG+ A K VRGMD+I E+I DAK+NA G N Y G AE | |
| Sbjct: | 316 | TGKEKVVDAYCGVGTIGMWVADGAKEVRGMDVIKESIDDAKKNAKKHGMANATYVTGTAE | 375 |
| Query: | 363 | DIIPRWYSEGFRANALIVDPPRTGLDDKLLNTILKMPPEKMVYVSCNTSTLARDLVTLTK | 422 |
| | | +P+W EGFR + +IVDPPRTG D L+TI K+ P++ VYVSCN STLA+DL TL+K | |
| Sbjct: | 376 | HWLPKWTKEGFRPDVVIVDPPRTGCDSTFLDTIKKVKPKRFVYVSCNPSTLAKDLQTLSK | 435 |
| Query: | 423 | VYHVHYIQSVDMFPHTARTEAVVKLQRK | 450 |
| | | Y V YIQ VDMFP TA EAV +L K | |
| Sbjct: | 436 | DYRVDYIQPVDMFPQTAHVEAVARLVLK | 463 |

[1719] A related DNA sequence was identified in S. pyogenes <SEQ ID 829> which encodes the amino acid sequence <SEQ ID 830>. Analysis of this protein sequence reveals the following:

```
Possible site: 56
>>> Seems to have no N-terminal signal sequence
----- Final Results -----
                            bacterial cytoplasm --- Certainty = 0.2980(Affirmative) < succ>
                              bacterial membrane --- Certainty = 0.0000(Not Clear) < succ>
                                bacterial outside --- Certainty = 0.0000(Not Clear) < succ>
```

[1720] An alignment of the GAS and GBS proteins is shown below:

| Identities = 327/450 (72%), Positives = 397/450 (87%) | | | |
|---|---|---|---|
| Query: | 1 | MNVVLKQRIPLKIKRMGINGEGIGFYKKTLIFVPGALKGEEVFCQISSVRRNFAEAKLLK | 60 |
| | | M V +KQ+IPLKIKRMGINGEGIGFY+KTL+FVPGALKGE++FCQI++V+RNFAEAKLL | |
| Sbjct: | 1 | MVVKVKQKIPLKIKRMGINGEGIGFYQKTLVFVPGALKGEDIFCQITAVKRNFAEAKLLT | 60 |
| Query: | 61 | INKKSKNRVEPPCSIYKECGGCQIMHLQYDKQLEFKTDVIRQALMKFKPEGYENYEIRKT | 120 |
| | | +NK SKNRV+P CS+Y+ CGGCQIMHL Y KQL+FK DVIRQAL KFEP GYE +EIR T | |
| Sbjct: | 61 | VNKASKNRVKPACSVYETCGGCQIMHLAYPKQLDFKDDVIRQALKKFKPTGYEQFEIRPT | 120 |
| Query: | 121 | IGMSEPEHYRAKLQFQVRSFGGNVKAGLYAQGTHRLIDIKDCLVQDSLTQEMINRVAELL | 180 |
| | | +GM +P+HYRAKLQFQ+RSFGG VKAGL++QG+HRL+ I +CLVQD LTQ++IN++ +L+ | |
| Sbjct: | 121 | LGMKKPDHYRAKLQFQLRSFGGTVKAGLFSQGSHRLVPIDNCLVQDQLTQDIINKITQLV | 180 |
| Query: | 181 | GKYKLPIYNERKIAGVRTVMIRRAQASGEVQLIFITSKRLDFDDVVIELVREFPELKTVA | 240 |
| | | KYKLPIYNERKIAG+RT+M+R+AQAS +VQ+I ++SK + + + EL + FP++KTVA | |
| Sbjct: | 181 | DKYKLPIYNERKIAGIRTIMVRKAQASDQVQIIVVSSKEVRLANFIGELTKAFPQVKTVA | 240 |
| Query: | 241 | VNINASKTSDIYGQITEVIWGQESINEEVLDYGFSLSPRAFYQLNPKQTQILYSEAVKAL | 300 |
| | | +N N SK+S+IYG TE++WGQE+I+EEVLDYGF+LSPRAFYQLNP+QT++LY E VKAL | |
| Sbjct: | 241 | LNSNRSKSSEIYGDETEILWGQEAIHEEVLDYGFALSPRAFYQLNPQQTEVLYGEVVKAL | 300 |
| Query: | 301 | DVKEDDDLIDAYCGVGTIGLAFAGKVKSVRGMDIIPEAIQDAKENALYMGFTNTHYEAGK | 360 |
| | | DV D +IDAYCGVG+IG AFAGKVKSVRGMDIIPEAI+DA++NA MGF N +YEAGK | |
| Sbjct: | 301 | DVGSKDHIIDAYCGVGSIGFAFAGKVKSVRGMDIIPEAIEDAQKNAKAMGFDNAYYEAGK | 360 |
| Query: | 361 | AEDIIPRWYSEGFRANALIVDPPRTGLDDKLLNTILKMPPEKMVYVSCNTSTLARDLVTL | 420 |
| | | AEDII +WY +G+RA+A+IVDPPRTGLDDKLL TIL P++MVYVSCNTSTLARDLV L | |
| Sbjct: | 361 | AEDIISKWYKQGYRADAVIVDPPRTGLDDKLLKTILHYQPKQMVYVSCNTSTLARDLVQL | 420 |
| Query: | 421 | TKVYHVHYIQSVDMFPHTARTEAVVKLQRK | 450 |
| | | TKVY VHYIQSVDMFPHTARTEAVVKLQ++ | |
| Sbjct: | 421 | TKVYDVHYIQSVDMFPHTARTEAVVKLQKR | 450 |

[1721] Based on this analysis, it was predicted that these proteins and their epitopes could be useful antigens for vaccines or diagnostics.

### EXAMPLE 262

[1722] A DNA sequence (GBSx0277) was identified in S. agalactiae <SEQ ID 831> which encodes the amino acid sequence <SEQ ID 832>. Analysis of this protein sequence reveals the following:

```
Possible site: 45
>>> Seems to have no N-terminal signal sequence
----- Final Results -----
                            bacterial cytoplasm --- Certainty = 0.3505(Affirmative) < succ>
                              bacterial membrane --- Certainty = 0.0000(Not Clear) < succ>
                                bacterial outside --- Certainty = 0.0000(Not Clear) < succ>
```

[1723] The protein has homology with the following sequences in the GENPEPT database:

| >GP: BAB04643 GB: AP001510 unknown conserved protein in B. subtilis | | | |
|---|---|---|---|
| [Bacillus halodurans] | | | |
| Identities = 74/263 (28%), Positives = 141/263 (53%), | | | |
| Gaps = 9/263 (3%) | | | |
| Query: | 3 | ITKIEKKKR---LYTLEL-DNTENLY---ITEDTIVHFMLSKGMIINAEKLENIKKFAQL | 55 |
| | | IT+IE +KR Y + + N +++Y + E ++ L KG+ I+AE+++ I ++ | |
| Sbjct: | 4 | ITRIEVQKRNNERYNIFIHQNGQDVYAFSVDEQVLIKQGLRKGLDIDAEQMKQILYEDEV | 63 |
| Query: | 56 | SYGKNLGLYYISFKQRTEKEVIKYLQQHDIDSKIIPQIIDNLKSENWINDKNYVQSFIQQ | 115 |
| | | NL L+Y+S++ R+ EV YL++ D + II ++ L + ++D + ++FIQ | |
| Sbjct: | 64 | QKTFNLALHYLSYRMRSVHEVRTYLKKKDREEPIIEHVLHRLTEQRLLDDHAFAEAFIQT | 123 |
| Query: | 116 | NLNTGDKGPYVIKQKLLQKGIKSKIIESELQAINFQDLASKISQKLYKKYQNKLPLKAL- | 174 |
| | | T KGP +KQ+L +KG+ K IE L ++++ ++ L K+ +L | |
| Sbjct: | 124 | KRATTSKGPLKLKQELAEKGVSEKTIEGALTTFSYEEQVEQVKAWLEKQKGRTFKGSSLA | 183 |
| Query: | 175 | -KDKLMQSLTTKGFDYQIVHTVIQNLEIEKDQELEEDLIYKELDKQYQKLSKKHDQYELK | 233 |
| | | K KL + L KG+ ++ ++ I++++E E + + +K +K + K +EL+ | |
| Sbjct: | 184 | WKQKLSRQLLAKGYTSPVIEEAFADVPIKQEEEEEWEALKAFGEKAMRKYAGKKTGWELQ | 243 |
| Query: | 234 | QRIINALMRKGYQYEDIKSALRE | 256 |
| | | Q++ AL RKG+ E I+ L + | |
| Sbjct: | 244 | QKVKQALYRKGFSLEMIERYLND | 266 |

[1724] A related DNA sequence was identified in S. pyogenes <SEQ ID 833> which encodes the amino acid sequence <SEQ ID 834>. Analysis of this protein sequence reveals the following:

```
Possible site: 58
>>> Seems to have no N-terminal signal sequence
----- Final Results -----
                            bacterial cytoplasm --- Certainty = 0.2388(Affirmative) < succ>
                              bacterial membrane --- Certainty = 0.0000(Not Clear) < succ>
                                bacterial outside --- Certainty = 0.0000(Not Clear) < succ>
```

[1725] An alignment of the GAS and GBS proteins is shown below:

| Identities = 146/258 (56%), Positives = 190/258 (73%) | | | |
|---|---|---|---|
| Query: | 1 | MKITKIEKKKRLYTLELDNTENLYITEDTIVHFMLSKGMIINAEKLENIKKFAQLSYGKN | 60 |
| | | MKITKIEKKKRLY +ELDN E+LY+TEDTIV FMLSK +++ ++LE++K FAQLSYGKN | |
| Sbjct: | 1 | MKITKIEKKKRLYLIELDNDESLYVTEDTIVRFMLSKDKVLDNDQLEDMKHFAQLSYGKN | 60 |
| Query: | 61 | LGLYYISFKQRTEKEVIKYLQQHDIDSKIIPQIIDNLKSENWINDKNYVQSFIQQNLNTG | 120 |
| | | L LY++SF+QR+ K+V YL++H+I+ II II L+ E WI+D ++I+QN G | |
| Sbjct: | 61 | LALYFLSFQQRSNKQVADYLRKHEIEEHIIADIITQLQEEQWIDDTKLADTYIRQNQLNG | 120 |
| Query: | 121 | DKGPYVIKQKLLQKGIKSKIIESELQAINFQDLASKISQKLYKKYQNKLPLKALKDKLMQ | 180 |
| | | DKGP V+KQKLLQKGI S I+ L +F LA K+SQKL+ KYQ KLP KALKDK+ Q | |
| Sbjct: | 121 | DKGPQVLKQKLLQKGIASHDIDPILSQTDFSQLAQKVSQKLFDKYQEKLPPKALKDKITQ | 180 |
| Query: | 181 | SLTTKGFDYQIVHTVIQNLEIEKDQELEEDLIYKELDKQYQKLSKKHDQYELKQRIINAL | 240 |
| | | +L TKGF Y + + +L ++D + EDL+ KELDKQY+KLS+K+D Y LKQ++ AL | |
| Sbjct: | 181 | ALLTKGFSYDLAKHSLNHLNFDQDNQEIEDLLDKELDKQYRKLSRKYDGYTLKQKLYQAL | 240 |
| Query: | 241 | MRKGYQYEDIKSALREYL | 258 |
| | | RKGY +DI LR YL | |
| Sbjct: | 241 | YRKGYNSDDINCKLRNYL | 258 |

[1726] Based on this analysis, it was predicted that these proteins and their epitopes could be useful antigens for vaccines or diagnostics.

### EXAMPLE 263

[1727] A DNA sequence (GBSx0278) was identified in S. agalactiae <SEQ ID 835> which encodes the amino acid sequence <SEQ ID 836>. Analysis of this protein sequence reveals the following:

```
Possible site: 33
>>> Seems to have no N-terminal signal sequence
----- Final Results -----
                            bacterial cytoplasm --- Certainty = 0.3912(Affirmative) < succ>
                              bacterial membrane --- Certainty = 0.0000(Not Clear) < succ>
                                bacterial outside --- Certainty = 0.0000(Not Clear) < succ>
```

[1728] The protein has homology with the following sequences in the GENPEPT database:

| >GP: BAB04659 GB: AP001510 unknown conserved protein in B. subtilis | | | |
|---|---|---|---|
| [Bacillus halodurans] | | | |
| Identities = 96/175 (54%), Positives = 122/175 (68%) | | | |
| Query: | 1 | MRLPKEGDFITIQSYKHDGSLHRTWRDTMVLKTTENALIGVNDHTLVTENDGRRWVTREP | 60 |
| | | M PK G I IQSYKH+GS+HR W +T+VLK T +IG ND LV E+DGR W TREP | |
| Sbjct: | 1 | MNFPKVGSKIQIQSYKHNGSIHRIWEETIVLKGTSKVVIGGNDRILVKESDGRHWRTREP | 60 |
| Query: | 61 | AIVYFHKKYWFNIIAMIRETGVSYYCNLASPYILDPEALKYIDYDLDVKVFADGEKRLLD | 120 |
| | | AI YF + WFN I MIR G+ +YCNL +P+ D EALKYIDYDLD+KVF D +LLD | |
| Sbjct: | 61 | AICYFDSEQWFNTIGMIRADGIYFYCNLGTPFTWDEEALKYIDYDLDIKVFPDMTFKLLD | 120 |
| Query: | 121 | VDEYEQHKAQMNYPTDIDYILKENVKILVEWINENKGPFSSSYINIWYKRYLELK | 175 |
| | | DEY H+ M YP +ID IL+ +V LV WI++ KGPF+ ++ WY+R+L+ + | |
| Sbjct: | 121 | EDEYAMHRKMMKYPPEIDRILQRSVDELVSWIHQRKGPFAPQFVESWYERFLQYR | 175 |

[1729] A related DNA sequence was identified in S. pyogenes <SEQ ID 837> which encodes the amino acid sequence <SEQ ID 838>. Analysis of this protein sequence reveals the following:

```
Possible site: 33
>>> Seems to have no N-terminal signal sequence
----- Final Results -----
                            bacterial cytoplasm --- Certainty = 0.3912(Affirmative) < succ>
                              bacterial membrane --- Certainty = 0.0000(Not Clear) < succ>
                                bacterial outside --- Certainty = 0.0000(Not Clear) < succ>
```

[1730] An alignment of the GAS and GBS proteins is shown below:

| Identities = 155/177 (87%), Positives = 165/177 (92%) | | | |
|---|---|---|---|
| Query: | 1 | MRLPKEGDFITIQSYKHDGSLHRTWRDTMVLKTTENALIGVNDHTLVTENDGRRWVTREP | 60 |
| | | M+LPKEGDFITIQSYKHDGSLHRTWRDTMVLKTTENALIGVNDHTLVTE+DGRRWVTREP | |
| Sbjct: | 1 | MKLPKEGDFITIQSYKHDGSLHRTWRDTMVLKTTENALIGVNDHTLVTESDGRRWVTREP | 60 |
| Query: | 61 | AIVYFHKKYWFNIIAMIRETGVSYYCNLASPYILDPEALKYIDYDLDVKVFADGEKRLLD | 120 |
| | | AIVYFHKKYWFNIIAMIR+ GVSYYCNLASPY++D EALKYIDYDLDVKVFADGEKRLLD | |
| Sbjct: | 61 | AIVYFHKKYWFNIIAMIRDNGVSYYCNLASPYMMDTEALKYIDYDLDVKVFADGEKRLLD | 120 |
| Query: | 121 | VDEYEQHKAQMNYPTDIDYILKENVKILVEWINENKGPFSSSYINIWYKRYLELKKR | 177 |
| | | VDEYE HK +M Y D+D+ILKENVKILV+WIN KGPFS +YI IWYKRYLELK R | |
| Sbjct: | 121 | VDEYEIHKKEMQYSADMDFILKENVKILVDWINHEKGPFSKAYITIWYKRYLELKNR | 177 |

[1731] Based on this analysis, it was predicted that these proteins and their epitopes could be useful antigens for vaccines or diagnostics.

### EXAMPLE 264

[1732] A DNA sequence (GBSx0288) was identified in S. agalactiae <SEQ ID 839> which encodes the amino acid sequence <SEQ ID 840>. This protein is predicted to be jag protein. Analysis of this protein sequence reveals the following:

```
Possible site: 49
>>> Seems to have no N-terminal signal sequence
----- Final Results -----
                            bacterial cytoplasm --- Certainty = 0.1666(Affirmative) < succ>
                              bacterial membrane --- Certainty = 0.0000(Not Clear) < succ>
                                bacterial outside --- Certainty = 0.0000(Not Clear) < succ>
```

[1733] The protein has homology with the following sequences in the GENPEPT database:

| >GP: BAB07782 GB: AP001520 spoIIIJ-associated protein | | | |
|---|---|---|---|
| [Bacillus halodurans] | | | |
| Identities = 54/198 (27%), Positives = 98/198 (49%), Gaps = 6/198 (3%) | | | |
| Query: | 100 | DVVEEYIEEVDETLEKEDVSQPELPKIDDKNVVTTSEAIEKIDLLPNIEVAAAQVTKYVE | 159 |
| | | + VE+ I E+ T E+ + E PK ++ + A+ ++ + P+ + ++E | |
| Sbjct: | 13 | EAVEQAIIELGTTRERITYTVVEEPKSGLFGILGSKPAVIEVVVKPD---PVDRAKAFLE | 69 |
| Query: | 160 | NIIYEMDLDA--TIETTTSKRQINLQIETPEAGRIIGYHGKVLKSLQLLAQNYLHDRFSK | 217 |
| | | ++ EMD++ TIE + N+ E + G +IG G+ L SLQ L + + | |
| Sbjct: | 70 | ELLQEMDMEVEVTIEKDPATVLFNISGEQ-DLGTLIGKRGQTLDSLQYLVNLVANKEEGE | 128 |
| Query: | 218 | SFSVSINVHDYVEHRTETLIDFSKKIARRVLETNEPYHMDPMSNSERKTVHKTIATIEGV | 277 |
| | | + ++ +Y R E L+ ++++A + L T P ++PMS ERK +H + + V | |
| Sbjct: | 129 | FIRIKLDAENYRARRKEALVQLAERLASKALRTKRPVSLEPMSAHERKIIHTALQELGDV | 188 |
| Query: | 278 | ESYSEGNDPNRFVVVTKK | 295 |
| | | E+YSEG R VV+ K | |
| Sbjct: | 189 | ETYSEGQGIGRHVVIAPK | 206 |

[1734] A related DNA sequence was identified in S. pyogenes <SEQ ID 841> which encodes the amino acid sequence <SEQ ID 842>. Analysis of this protein sequence reveals the following:

```
Possible site: 27
>>> Seems to have no N-terminal signal sequence
----- Final Results -----
                            bacterial cytoplasm --- Certainty = 0.3721(Affirmative) < succ>
                              bacterial membrane --- Certainty = 0.0000(Not Clear) < succ>
                                bacterial outside --- Certainty = 0.0000(Not Clear) < succ>
```

[1735] An alignment of the GAS and GBS proteins is shown below:

| Identities = 176/302 (58%), Positives = 223/302 (73%), Gaps = 32/302 (10%) | | | |
|---|---|---|---|
| Query: | 23 | MVLFTGATVEEAIEKGLQELNISRLRAHIKVVSREKKGFLGFGKKPAKVEIEGITDEVTD | 82 |
| | | MVLFTG TVEEAIE GLQEL +SRL+AHIKV+S+EKKGFLGFGKKPA+V+IEGI+D+ | |
| Sbjct: | 1 | MVLFTGKTVEEAIETGLQELGLSRLKAHIKVISKEKKGFLGFGKKPAQVDIEGISDKTVY | 60 |
| Query: | 83 | INESVALKNI------KNVPS--SVDVVEEYIEEVDETLEKEDVSQPELPKIDDK----- | 129 |
| | | + A + + +N P+ S DV E I+ + LE ED L D | |
| Sbjct: | 61 | KADKKATRGVPEDINRQNTPAVNSADVEPEEIKAT-QRLEAEDTKVVPLMSEDSPAQTPS | 119 |
| Query: | 130 | ---NVVTTSEA------IEKIDL---------LPNIEVAAAQVTKYVENIIYEMDLDATI | 171 |
| | | VT ++A +E+ ++ +IE AA +V+ YV IIYEMD++AT+ | |
| Sbjct: | 120 | NLAETVTETKAQQPSIPVEESEVPQDAGNDGFSKDIEKAAQEVSDYVTKIIYEMDIEATV | 179 |
| Query: | 172 | ETTTSKRQINLQIETPEAGRIIGYHGKVLKSLQLLAQNYLHDRFSKSFSVSINVHDYVEH | 231 |
| | | ET+ ++RQINLQIETPEAGR+IGYHGKVLKSLQLLAQN+LHDR+SK+FSVS+NVHDYVEH | |
| Sbjct: | 180 | ETSNNRRQINLQIETPEAGRVIGYHGKVLKSLQLLAQNFLHDRYSKNFSVSLNVHDYVEH | 239 |
| Query: | 232 | RTETLIDFSKKIARRVLETNEPYHMDPMSNSERKTVHKTIATIEGVESYSEGNDPNRFVV | 291 |
| | | RTETLIDF++K+A+RVLE+ + Y MDPMSNSERK VHKT+++IEGV+SYSEGNDPNR+VV | |
| Sbjct: | 240 | RTETLIDFTQKVAKRVLESGQDYTMDPMSNSERKIVHKTVSSIEGVDSYSEGNDPNRYVV | 299 |
| Query: | 292 | VT | 293 |
| | | V+ | |
| Sbjct: | 300 | VS | 301 |

[1736] Based on this analysis, it was predicted that these proteins and their epitopes could be useful antigens for vaccines or diagnostics.

### EXAMPLE 265

[1737] A DNA sequence (GBSx0290) was identified in S. agalactiae <SEQ ID 843> which encodes the amino acid sequence <SEQ ID 844>. This protein is predicted to be 60 kd inner-membrane protein (yidC). Analysis of this protein sequence reveals the following:

| Possible site: 42 | | | | |
|---|---|---|---|---|
| >>> May be a lipoprotein | | | | |
| | INTEGRAL | Likelihood = −7.38 | Transmembrane | 54-70 (52-75) |
| | INTEGRAL | Likelihood = −5.20 | Transmembrane | 193-209 (192-211) |
| | INTEGRAL | Likelihood = −3.61 | Transmembrane | 125-141 (124-144) |
| | INTEGRAL | Likelihood = −2.44 | Transmembrane | 168-184 (167-184) |

```
----- Final Results -----
                              bacterial membrane --- Certainty = 0.3951(Affirmative) < succ>
                                bacterial outside --- Certainty = 0.0000(Not Clear) < succ>
                            bacterial cytoplasm --- Certainty = 0.0000(Not Clear) < succ>
```

[1738] The protein has homology with the following sequences in the GENPEPT database:

| >GP: CAA78595 GB: Z14225 SpoIIIJ [Bacillus subtilis] | | | |
|---|---|---|---|
| Identities = 79/243 (32%), Positives = 142/243 (57%), Gaps = 5/243 (2%) | | | |
| Query: | 1 | MKKKLKTFSLILLTGSLLVACG--RGEVSSHSATLWEQ-IVYAFAKSIQWLS--FNHSIG | 55 |
| | | MK+++ ++ LL C + +++ S W++ +VY ++ I +++ + G | |
| Sbjct: | 1 | MKRRIGLLLSMVGVFMLLAGCSSVKEPITADSPHFWDKYVVYPLSELITYVAKLTGDNYG | 60 |
| Query: | 56 | LGIILFTLIIRAIMMPLYNMQMKSSQKMQEIQPRLKELQKKYPGKDPDNRLKLNDEMQSM | 115 |
| | | L IIL T++IR +++PL Q++SS+ MQ +QP +++L++KY KD + KL E ++ | |
| Sbjct: | 61 | LSIILVTILIRLLILPLMIKQLRSSKAMQALQPEMQKLKEKYSSKDQKTQQKLQQETMAL | 120 |
| Query: | 116 | YKAEGVNPYASVLPLLIQLPVLWALFQALTRVSFLKVGTFLSLELSQPDPYYILPVLAAL | 175 |
| | | ++ GVNP A P+LIQ+P+L + A+ R + +FL +L + DPYYILP++A + | |
| Sbjct: | 121 | FQKHGVNPLAGCFPILIQMPILIGFYHAIMRTQAISEHSFLWFDLGEKDPYYILPIVAGV | 180 |
| Query: | 176 | FTFLSTWLTNKAAVEKNIALTLMTYVMPFIILVTSFNFASGVVLYWTVSNAFQVFQILLL | 235 |
| | | TF+ L ++N + +M ++MP +I+V + NF + + LYW V N F + Q L+ | |
| Sbjct: | 181 | ATFVQQKLMMAGNAQQNPQMAMMLWIMPIMIIVFAINFPAALSLYWVVGNLFMIAQTFLI | 240 |
| Query: | 236 | NNP | 238 |
| | | P | |
| Sbjct: | 241 | KGP | 243 |

[1739] A related GBS sequence was identified <SEQ ID 10783> which encodes amino acid sequence <SEQ ID 10784>.

[1740] A related DNA sequence was identified in S. pyogenes <SEQ ID 845> which encodes the amino acid sequence <SEQ ID 846>. Analysis of this protein sequence reveals the following:

| Possible site: 49 | | | |
|---|---|---|---|
| >>> May be a lipoprotein | | | |
| INTEGRAL | Likelihood = −6.32 | Transmembrane | 198-214 (197-220) |
| INTEGRAL | Likelihood = −5.52 | Transmembrane | 59-75 (57-80) |
| INTEGRAL | Likelihood = −4.25 | Transmembrane | 130-146 (129-150) |
| INTEGRAL | Likelihood = −2.28 | Transmembrane | 173-189 (170-189) |

----- Final Results -----
bacterial membrane --- Certainty = 0.3527 (Affirmative) < succ>
bacterial outside --- Certainty = 0.0000 (Not Clear) < succ>
bacterial cytoplasm --- Certainty = 0.0000 (Not Clear) < succ>

[1741] The protein has homology with the following sequences in the databases:

| >GP: BAA05234 GB: D26185 stage III sporulation [Bacillus subtilis] | | | |
|---|---|---|---|
| Identities = 90/249 (36%), Positives = 150/249 (60%), Gaps = 6/249 (2%) | | | |
| Query: | 16 | IVPLVLLLVACG--RGEVTAQSSSGWDQ-LVYLFARAIQWLS--FDGSIGVGIILFTLTI | 70 |
| | | +V + +LL C + +TA S WD+ +VY + I +++ + G+ IIL T+ I | |
| Sbjct: | 13 | MVGVFMLLAGCSSVKEPITADSPHFWDKYVVYPLSELITYVAKLTGDNYGLSIILVTILI | 72 |
| Query: | 71 | RLMLMPLFNMQIKSSQKMQDIQPELRELQRKYAGKDTQTRMKLAEESQALYKKYGVNPYA | 130 |
| | | RL+++PL Q++SS+ MQ +QPE+++L+ KY+ KD +T+ KL +E+ AL++K+GVNP A | |
| Sbjct: | 73 | RLLILPLMIKQLRSSKAMQALQPEMQKLKEKYSSKDQKTQQKLQQETMALFQKHGVNPLA | 132 |
| Query: | 131 | SLLPLLIQMPVMIALFQALTRVSFLKTGTFLWVELAQHDHLYLLPVLAAVFTFLSTWLTN | 190 |
| | | P+LIQMP++I + A+ R + +FLW +L + D Y+LP++A V TF+ L | |
| Sbjct: | 133 | GCFPILIQMPILIGFYHAIMRTQAISEHSFLWFDLGEKDPYYILPIVAGVATFVQQKLMM | 192 |
| Query: | 191 | LAAKEKNVMMTVMIYVMPLMIFFMGFNLASGVVLYWTVSNAFQVVQLLLLNNP-FKIIAE | 249 |
| | | ++N M +M+++MP+MI N + + LYW V N F + Q L+ P K E | |
| Sbjct: | 193 | AGNAQQNPQMAMMLWIMPIMIIVFAINFPAALSLYWVVGNLFMIAQTFLIKGPDIKKNPE | 252 |
| Query: | 250 | RQRLANEEK | 258 |
| | | Q+ ++K | |
| Sbjct: | 253 | PQKAGGKKK | 261 |

[1742] An alignment of the GAS and GBS proteins is shown below:

| Identities = 172/270 (63%), Positives = 217/270 (79%), Gaps = 1/270 (0%) | | | |
|---|---|---|---|
| Query: | 1 | MKKKLKTFSLILLTGSLLVACGRGEVSSHSATLWEQIVYAFAKSIQWLSFNHSIGLGIIL | 60 |
| | | +KK +K ++ L LLVACGRGEV++ S++ W+Q+VY FA++IQWLSF+ SIG+GIIL | |
| Sbjct: | 7 | VKKNIKIARIVPLV-LLLVACGRGEVTAQSSSGWDQLVYLFARAIQWLSFDGSIGVGIIL | 65 |
| Query: | 61 | FTLIIRAIMMPLYNMQMKSSQKMQEIQPRLKELQKKYPGKDPDNRLKLNDEMQSMYKAEG | 120 |
| | | FTL IR ++MPL+NMQ+KSSQKMQ+IQP L+ELQ+KY GKD R+KL +E Q++YK G | |
| Sbjct: | 66 | FTLTIRLMLMPLFNMQIKSSQKMQDIQPELRELQRKYAGKDTQTRMKLAEESQALYKKYG | 125 |
| Query: | 121 | VNPYASVLPLLIQLPVLWALFQALTRVSFLKVGTFLSLELSQPDPYYILPVLAALFTFLS | 180 |
| | | VNPYAS+LPLLIQ+PV+ ALFQALTRVSFLK GTFL +EL+Q D Y+LPVLAA+FTFLS | |
| Sbjct: | 126 | VNPYASLLPLLIQMPVMIALFQALTRVSFLKTGTFLWVELAQHDHLYLLPVLAAVFTFLS | 185 |
| Query: | 181 | TWLTNKAAVEKNIALTLMTYVMPFIILVTSFNFASGVVLYWTVSNAFQVFQILLLNNPYK | 240 |
| | | TWLTN AA EKN+ +T+M YVMP +I FN ASGVVLYWTVSNAFQV Q+LLLNNP+K | |
| Sbjct: | 186 | TWLTNLAAKEKNVMMTVMIYVMPLMIFFMGFNLASGVVLYWTVSNAFQVVQLLLLNNPFK | 245 |
| Query: | 241 | IIKVREEAVRVAHEKEQRVKRAKRKASKKR | 270 |
| | | II R+ E+ R +RA++KA K++ | |
| Sbjct: | 246 | IIAERQRLANEEKERRLRERRARKKAMKRK | 275 |

[1743] Based on this analysis, it was predicted that this protein and its epitopes, could be useful antigens for vaccines or diagnostics.

[1744] A related GBS gene <SEQ ID 8527> and protein <SEQ ID 8528> were also identified. Analysis of this protein sequence reveals the following:

| Lipop: Possible site: 20 Crend: 5 | | |
|---|---|---|
| McG: Discrim Score: 4.90 | | |
| GvH: Signal Score (−7.5): −0.39 | | |
| Possible site: 42 | | |
| >>> May be a lipoprotein | | |
| ALOM program count: 4 | value: −7.38 | threshold: 0.0 |

| | | | |
|---|---|---|---|
| INTEGRAL | Likelihood = −7.38 | Transmembrane | 54-70 (52-75) |
| INTEGRAL | Likelihood = −5.20 | Transmembrane | 193-209 (192-211) |
| INTEGRAL | Likelihood = −3.61 | Transmembrane | 125-141 (124-144) |
| INTEGRAL | Likelihood = −2.44 | Transmembrane | 168-184 (167-184) |

| | | |
|---|---|---|
| PERIPHERAL | Likelihood = 2.54 | 217 |

modified ALOM score: 1.98
*** Reasoning Step: 3
----- Final Results -----
bacterial membrane --- Certainty = 0.3951 (Affirmative) < succ>
bacterial outside --- Certainty = 0.0000 (Not Clear) < succ>
bacterial cytoplasm --- Certainty = 0.0000 (Not Clear) < succ>

[1745] The protein has homology with the following sequences in the databases:

[chemical structure]

### EXAMPLE 266

[1746] A DNA sequence (GBSx0291) was identified in S. agalactiae <SEQ ID 847> which encodes the amino acid sequence <SEQ ID 848>. Analysis of this protein sequence reveals the following:

Possible site: 46
>>> Seems to have no N-terminal signal sequence
----- Final Results -----
bacterial cytoplasm --- Certainty = 0.3778 (Affirmative) < succ>
bacterial membrane --- Certainty = 0.0000 (Not Clear) < succ>
bacterial outside --- Certainty = 0.0000 (Not Clear) < succ>

[1747] A related GBS nucleic acid sequence <SEQ ID 9579> which encodes amino acid sequence <SEQ ID 9580> was also identified.

[1748] The protein has homology with the following sequences in the GENPEPT database:

| >GP: CAA44400 GB: X62539 homologous to E. coli rnpA [Bacillus subtilis] | | | |
|---|---|---|---|
| Identities = 52/109 (47%), Positives = 77/109 (69%), Gaps = 1/109 (0%) | | | |
| Query: | 21 | LKKTYRVKSDKDFQMIFSRGKNVANRKFVIYYLEK-EQKHFRVGISVSKKLGNAVVRNAI | 79 |
| | | LKK R+K ++DFQ +F G +VANR+FV+Y L++ E RVG+SVSKK+GNAV+RN I | |
| Sbjct: | 4 | LKKRNRLKKNEDFQKVFKHGTSVANRQFVLYTLDQPENDELRVGLSVSKKIGNAVMRNRI | 63 |
| Query: | 80 | KRKIRHVLLSQKTALQDYDFVVIARKGVEELDYQALEKNLIHVLKIAGL | 128 |
| | | KR IR L +K L++ D+++IARK +L Y+ +K+L H+ + + L | |
| Sbjct: | 64 | KRLIRQAFLEEKERLKEKDYIIIARKPASQLTYEETKKSLQHLFRKSSL | 112 |

[1749] A related DNA sequence was identified in S. pyogenes <SEQ ID 849> which encodes the amino acid sequence <SEQ ID 850>. Analysis of this protein sequence reveals the following:

Possible site: 24
>>> Seems to have no N-terminal signal sequence
----- Final Results -----
bacterial cytoplasm --- Certainty = 0.3820 (Affirmative) < succ>
bacterial membrane --- Certainty = 0.0000 (Not Clear) < succ>
bacterial outside --- Certainty = 0.0000 (Not Clear) < succ>

[1750] An alignment of the GAS and GBS proteins is shown below:

| Identities = 73/109 (66%), Positives = 88/109 (79%) | | | |
|---|---|---|---|
| Query: | 21 | LKKTYRVKSDKDFQMIFSRGKNVANRKFVIYYLEKEQKHFRVGISVSKKLGNAVVRNAIK | 80 |
| | | LKKTYRVK +KDFQ IF GK+ ANRKFVIY+L + Q HFRVGISV KK+GNAV RNA+K | |
| Sbjct: | 1 | LKKTYRVKREKDFQAIFKDGKSTANRKFVIYHLNRGQDHFRVGISVGKKIGNAVTRNAVK | 60 |
| Query: | 81 | RKIRHVLLSQKTALQDYDFVVIARKGVEELDYQALEKNLIHVLKIAGLI | 129 |
| | | RKIRHV+++ L+ DFVVIARKGV L+YQ L++NL HVLK+A L+ | |
| Sbjct: | 61 | RKIRHVIMALGHQLKSEDFVVIARKGVHSLEYQELQQNLHHVLKLAQLL | 109 |

[1751] Based on this analysis, it was predicted that these proteins and their epitopes could be useful antigens for vaccines or diagnostics.

### EXAMPLE 267

[1752] A DNA sequence (GBSx0292) was identified in S. agalactiae <SEQ ID 851> which encodes the amino acid sequence <SEQ ID 852>. This protein is predicted to be glycerol-3-phosphate dehydrogenase, NAD-dependent (gpsA). Analysis of this protein sequence reveals the following:

Possible site: 33
>>> Seems to have no N-terminal signal sequence
----- Final Results -----
bacterial cytoplasm --- Certainty = 0.1429 (Affirmative) < succ>
bacterial membrane --- Certainty = 0.0000 (Not Clear) < succ>
bacterial outside --- Certainty = 0.0000 (Not Clear) < succ>

[1753] A related GBS nucleic acid sequence <SEQ ID 8529> which encodes amino acid sequence <SEQ ID 8530> was also identified. There is a signal peptide at residues 1-19. The protein has homology with the following sequences in the GENPEPT database:

| >GP: AAA86746 GB: U32164 NAD(P)H-dependent dihydroxyacetone-phosphate | | | |
|---|---|---|---|
| reductase [Bacillus subtilis] | | | |
| Identities = 177/333 (53%), Positives = 241/333 (72%) | | | |
| Query: | 18 | QKIAVLGPGSWGTALAQVLNDNGHEVRLWGNVVEQIEEINTNHTNQRYFKDITLDSKIKA | 77 |
| | | +K+ +LG GSWGTALA VL DHG+EV +W + + I +IN H N+ Y ++ L + IK | |
| Sbjct: | 2 | KKVTMLGAGSWGTALALVLTDNGNEVCVWAHRADLIHQINELHENKDYLPNVKLSTSIKG | 61 |
| Query: | 78 | YTNLEEAINNVDSILFVVPTKVTRLVAKQVANLLKHKVVLMHASKGLEPGTHERLSTILE | 137 |
| | | T+++EA+++ D I+ VPTK R V +Q + K V +H SKG+EP + R+S I+E | |
| Sbjct: | 62 | TTDMKEAVSDADVIIVAVPTKAIREVLRQAVPFITKKAVFVHVSKGIEPDSLLRISEIME | 121 |
| Query: | 138 | EEISEQYRSDIVVVSGPSHAEEAIVRDITLITAASKDIEAAKYVQKLFSNHYFRLYTNTD | 197 |
| | | E+ R DIVV+SGPSHAEE +R T +TA+SK + AA+ VQ LF NH FR+YTN D | |
| Sbjct: | 122 | IELPSDVRRDIVVLSGPSHAEEVGLRHATTVTASSKSMRAAEEVQDLFINHNFRVYTNPD | 181 |
| Query: | 198 | VVGVETAGALKNIIAVGAGALHGLGYGDNAKAAIITRGLAEITRLGVQLGADPLTFSGLS | 257 |
| | | ++GVE GALKNIIA+ AG GLGYGDNAKAA+ITRGLAEI RLG ++G +PLTFSGL+ | |
| Sbjct: | 182 | IIGVEIGGALKNIIALAAGITDGLGYGDNAKAALITRGLAEIARLGTKMGGNPLTFSGLT | 241 |
| Query: | 258 | GVGDLIVTGTSVHSRNWRAGDALGRGEKLEDIEKNMGMVIEGISTTKVAYEIAQNLNVYM | 317 |
| | | GVGDLIVT TSVHSRNWRAG+ LG+G KLED+ + MGMV+EG+ TTK AY++++ +V M | |
| Sbjct: | 242 | GVGDLIVTCTSVHSRNWRAGNLLGKGYKLEDVLEEMGMVVEGVRTTKAAYQLSKKYDVKM | 301 |
| Query: | 318 | PITEAIYKSIYEGANIKDSILDMMSNEFRSENE | 350 |
| | | PITEA+++ ++ G ++ ++ +M+ E E | |
| Sbjct: | 302 | PITEALHQVLFNGQKVETAVESLMARGKTHEME | 334 |

[1754] A related DNA sequence was identified in S. pyogenes <SEQ ID 853> which encodes the amino acid sequence <SEQ ID 854>. Analysis of this protein sequence reveals the following:

```
Possible site: 19
>>> Seems to have no N-terminal signal sequence
----- Final Results -----
                            bacterial cytoplasm --- Certainty = 0.0882(Affirmative) < succ>
                              bacterial membrane --- Certainty = 0.0000(Not Clear) < succ>
                                bacterial outside --- Certainty = 0.0000(Not Clear) < succ>
```

[1755] An alignment of the GAS and GBS proteins is shown below:

| Identities = 287/338 (84%), Positives = 316/338 (92%) | | | |
|---|---|---|---|
| Query: | 15 | MTKQKIAVLGPGSWGTALAQVLNDNGHEVRLWGNVVEQIEEINTNHTNQRYFKDITLDSK | 74 |
| | | MTKQK+A+LGPGSWGTAL+QVLNDNGH+VRLWGN+ +QIEEINT HTN+ YFKDI LD | |
| Sbjct: | 1 | MTKQKVAILGPGSWGTALSQVLNDNGHDVRLWGNIPDQIEEINTKHTNRHYFKDIVLDKN | 60 |
| Query: | 75 | IKAYTNLEEAINNVDSILFVVPTKVTRLVAKQVANLLKHKVVLMHASKGLEPGTHERLST | 134 |
| | | I A +L +A+++VD++LFVVPTKVTRLVA+QVA +L HKVV+MHASKGLEP THERLST | |
| Sbjct: | 61 | ITATLDLGQALSDVDAVLFVVPTKVTRLVARQVAAILDHKVVVMHASKGLEPETHERLST | 120 |
| Query: | 135 | ILEEEISEQYRSDIVVVSGPSHAEEAIVRDITLITAASKDIEAAKYVQKLFSNHYFRLYT | 194 |
| | | ILEEEI +RS++VVVSGPSHAEE IVRDITLITAASKDIEAAKYVQ LFSNHYFRLYT | |
| Sbjct: | 121 | ILEEEIPAHFRSEVVVVSGPSHAEETIVRDITLITAASKDIEAAKYVQSLFSNHYFRLYT | 180 |
| Query: | 195 | NTDVVGVETAGALKNIIAVGAGALHGLGYGDNAKAAIITRGLAEITRLGVQLGADPLTFS | 254 |
| | | NTDV+GVETAGALKNIIAVGAGALHGLGYGDNAKAA+ITRGLAEITRLGV+LGADPLT+S | |
| Sbjct: | 181 | NTDVIGVETAGALKNIIAVGAGALHGLGYGDNAKAAVITRGLAEITRLGVKLGADPLTYS | 240 |
| Query: | 255 | GLSGVGDLIVTGTSVHSRNWRAGDALGRGEKLEDIEKNMGMVIEGISTTKVAYEIAQNLN | 314 |
| | | GLSGVGDLIVTGTSVHSRNWRAG ALGRGEKLEDIE+NMGMVIEGI+TTKVAYEIAQ+L | |
| Sbjct: | 241 | GLSGVGDLIVTGTSVHSRNWRAGAALGRGEKLEDIERNMGMVIEGIATTKVAYEIAQDLG | 300 |
| Query: | 315 | VYMPITEAIYKSIYEGANIKDSILDMMSNEFRSENEWH | 352 |
| | | VYMPIT AIYKSIYEGA+IK+SIL MMSNEFRSENEWH | |
| Sbjct: | 301 | VYMPITTAIYKSIYEGADIKESILGMMSNEFRSENEWH | 338 |

[1756] SEQ ID 8530 (GBS291) was expressed in E. coli as a His-fusion product. SDS-PAGE analysis of total cell extract is shown in FIG. 59 (lane 5; MW 38.9 kDa). It was also expressed in E. coli as a GST-fusion product. SDS-PAGE analysis of total cell extract is shown in FIG. 77 (lane 2; MW 64 kDa).

[1757] GBS291-GST was purified as shown in FIG. 226, lane 10-11.

[1758] Based on this analysis, it was predicted that these proteins and their epitopes could be useful antigens for vaccines or diagnostics.

### EXAMPLE 268

[1759] A DNA sequence (GBSx0293) was identified in S. agalactiae <SEQ ID 855> which encodes the amino acid sequence <SEQ ID 856>. This protein is predicted to be glucose-1-phosphate uridylyltransferase (gtaB). Analysis of this protein sequence reveals the following:

```
Possible site: 25
>>> Seems to have a cleavable N-term signal seq.
----- Final Results -----
                                bacterial outside --- Certainty = 0.3000(Affirmative) < succ>
                              bacterial membrane --- Certainty = 0.0000(Not Clear) < succ>
                            bacterial cytoplasm --- Certainty = 0.0000(Not Clear) < succ>
```

[1760] The protein has homology with the following sequences in the GENPEPT database:

| >GP:BAA28714 GB:AB001562 glucose-1-phosphate uridylyltransferase | | | |
|---|---|---|---|
| [Streptococcus mutans] | | | |
| Identities = 263/296 (88%), Positives = 285/296 (95%) | | | |
| Query: | 2 | KVRKAVIPAAGLGTRFLPATKALAKEMLPIVDKPTIQFIVEEALKSGIEDILVVTGKSKR | 61 |
| | | KVRKAVIPAAGLGTRFLPATKALAKEMLPIVDKPTIQFIVEEALKSGIEDILVVTGKSKR | |
| Sbjct: | 5 | KVRKAVIPAAGLGTRFLPATKALAKEMLPIVDKPTIQFIVEEALKSGIEDILVVTGKSKR | 64 |
| Query: | 62 | SIEDEFDSNFELEYNLKEKGKNELLKLVDETTGIRLHFIRQSHPRGLGDAVLQAKAFVGN | 121 |
| | | SIEDHFDSNFELEYNL++KGK +LLKLV++TT I LHFIRQSHPRGLGDAVLQAKAFVGN | |
| Sbjct: | 65 | SIEDHFDSNFELEYNLEQKGKTDLLKLVNDTTAINLHFIRQSHPRGLGDAVLQAKAFVGN | 124 |
| Query: | 122 | EPFVVNLGDDLMDITNNKVIPLTKQLINDFEATHASTIAVMEVPHEDVSAYGVIAPQGEG | 181 |
| | | EPFVVMLGDDLMDIT++K IPLT+QL+ND+E THASTIAVMEVPHEDVSAYGVIAPQGEG | |
| Sbjct: | 125 | EPFVVMLGDDLMDITDDKAIPLTRQLMNDYEETHASTIAVMEVPHEDVSAYGVIAPQGEG | 184 |
| Query: | 182 | VNGLYSVNTFVEKPSPEEAPSNLAIIGRYLLTPEIFNILETQKPGAGNEIQLTDAIDTLN | 241 |
| | | V+GLYSV+TWVEKP+P+EAPSNLAIIGRYLLTPEIF ILETQ+PGAGNE+QLTDAIDTLN | |
| Sbjct: | 185 | VSGLYSVDTWVEKPAPKEAPSNLAIIGRYLLTFEIFTILETQEPGAGNEVQLTDAIDTLN | 244 |
| Query: | 242 | KTQRVFARKFTGDRYDVGDKFGFMKTSIDYALQHPQVKDDLKKYIIDLGKSLEKTS | 297 |
| | | KTQRVFAR+F G RYDVGDKFGFMKTSIDYAL+HPQVK+DLK YII+LGK L++ S | |
| Sbjct: | 245 | KTQRVFAREFRGKRYDVGDKFGFMKTSIDYALKHPQVKEDLEAYIIELGKKLDQKS | 300 |

[1761] A related DNA sequence was identified in S. pyogenes <SEQ ID 857> which encodes the amino acid sequence <SEQ ID 858>. Analysis of this protein sequence reveals the following:

```
Possible site: 26
>>> Seems to have a cleavable N-term signal seq.
----- Final Results -----
                              bacterial outside --- Certainty = 0.3000 (Affirmative) < succ>
                            bacterial membrane --- Certainty = 0.0000 (Not Clear) < succ>
                          bacterial cytoplasm --- Certainty = 0.0000 (Not Clear) < succ>
```

[1762] An alignment of the GAS and GBS proteins is shown below:

| Identities = 257/295 (87%), Positives = 277/295 (93%) | | | |
|---|---|---|---|
| Query: | 2 | KVRKAVIPAAGLGTRFLPATKALAKEMLPIVDKPTIQFIVEEALKSGIEDILVVTGKSKR | 61 |
| | | KVRKA+IPAAGLGTRFLPATKALAKEMLPIVDKPTIQFIVEEALKSGIE+ILVVTGK+KR | |
| Sbjct: | 3 | KVRKAIIPAAGLGTRFLPATKALAKEMLPIVDKPTIQFIVEEALKSGIEEILVVTGKAKR | 62 |
| Query: | 62 | SIEDHFDSNFELEYNLKEKGKNELLKLVDETTGIRLHFIRQSHPRGLGDAVLQAKAFVGN | 121 |
| | | SIEDHFDSNFELEYNL+ KGKNSLLKLVDETT I LHFIRQSHPRGLGDAVLQAKAFVGN | |
| Sbjct: | 63 | SIEDHFDSNFELEYNLQAKGKNELLKLVDETTAINLHFIRQSHPRGLGDAVLQAKAFVGN | 122 |
| Query: | 122 | EPFVVNLGDDLMDITNNKVIPLTKQLINDFEATHASTIAVMEVPHEDVSAYGVIAPQGEG | 181 |
| | | EPFVVMLGDDLMDITN PLTKQL+ D++ THASTIAVM+VPHEDVS+YGVIAPQG+ | |
| Sbjct: | 123 | EPFVVMLGDDLMDITNASAKPLTKQLMEDYDKTHASTIAVMKVPHEDVSSYGVIAPQGKA | 182 |
| Query: | 182 | VNGLYSVNTFVEKPSPEEAPSNLAIIGRYLLTPEIFNILETQKPGAGNEIQLTDAIDTLN | 241 |
| | | V GLYSV+TFVEKP PE+APS+LAIIGRYLLTPEIF ILE Q PGAGNE+QLTDAIDTLN | |
| Sbjct: | 183 | VKGLYSVDTFVEKPQPEDAPSDLAIIGRYLLTPEIFGILERQTPGAGNEVQLTDAIDTLN | 242 |
| Query: | 242 | KTQRVFARKFTGDRYDVGDKFGFMKTSIDYALQHPQVKDDLKKYIIDLGKSLSKT | 296 |
| | | KTQRVFAR+F G+RYDVGDKFGFMKTSIDYAL+HPQVK+DLK YII LGK+LEK+ | |
| Sbjct: | 243 | KTQRVFAREFKGNRYDVGDKFGFMKTSIDYALEHPQVKEDLKNYIIKLGKALEKS | 297 |

[1763] Based on this analysis, it was predicted that these proteins and their epitopes could be useful antigens for vaccines or diagnostics.

### EXAMPLE 269

[1764] A DNA sequence (GBSx0294) was identified in S. agalactiae <SEQ ID 859> which encodes the amino acid sequence <SEQ ID 860>. Analysis of this protein sequence reveals the following:

```
Possible Site: 42
>>> Seems to have no N-terminal signal sequence
INTEGRAL Likelihood = −4.94 Transmembrane 28-44 (27-45)
----- Final Results -----
                              bacterial membrane --- Certainty = 0.2975 (Affirmative) < succ>
                                bacterial outside --- Certainty = 0.0000 (Not Clear) < succ>
                            bacterial cytoplasm --- Certainty = 0.0000 (Not Clear) < succ>
```

[1765] The protein has homology with the following sequences in the GENPEPT database:

| >GP:CAB15143 GB:Z99120 similar to ABC transporter (lipoprotein) | | | |
|---|---|---|---|
| [Bacillus subtilis] | | | |
| Identities = 148/346 (42%), Positives = 222/346 (63%), Gaps = 16/346 (4%) | | | |
| Query: | 31 | LTLLSLSVLTLTACGNRSDKSAN---KSDIKVAMVTNQGGVDDKSFNQSAWEGLQKWGKK | 87 |
| | | ++L+ + L ACGN S + K+ VAMVT+ GGVDDKSFNQSAWEG+Q +GK+ | |
| Sbjct: | 1 | MSLVIAAGTILGACGNSEKSSGSGEGKNKESVAMVTDVGGVDDKSFNQSAWEGIQAFGKE | 60 |
| Query: | 88 | KGLTKG-NGFDYFQSSNESDHANNLDTAASSGYNLIFGIGFGLHDTIEKVSENNKDVKYV | 146 |
| | | GL KG NG+DY QS +++D+ NL+ A ++LI+G+G+ + D+I ++++ K+ + | |
| Sbjct: | 61 | NGLKKGKNGYDYLQSKSDADYTTNLNKLARENFDLIYGVGYLMEDSISEIADQRKNTNFA | 120 |
| Query: | 147 | IVDDIIKGKENVASVTFADNEAAYLAGVAAAKTTKTKTVGFIGGMEGVVVKRFEAGFKAG | 206 |
| | | I+D ++ K+NVAS+TF + E ++L GVAAA ++K+ +GF+GGNE ++K+FE GF+AG | |
| Sbjct: | 121 | IIDAVVD-KDNVASITFKEQEGSFLVGVAAALSSKSGKIGFVGGMESELIKKFEVGFRAG | 179 |
| Query: | 207 | VKSIDPAIKVAVSYAGSFTDAAKGKTIAATQYATGVDVIYQAAGGTGAGIFSEAKTENET | 266 |
| | | V++++P V V YAG F A GK A + Y +GVDVIY +AG TG G+F+EAK | |
| Sbjct: | 180 | VQAVNPKAVVEVKYAGGFDKADVGKATAESMYKSGVDVIYHSAGATGTGVFTEAK---NL | 236 |
| Query: | 267 | RKESNK--VWVIGVDRDQSQEGNYVSKDGKKANFVLASTIKEVGKSLQSVAELTEKKQYP | 324 |
| | | +KE K VWVIGVD+DQ EG +G N L S +K+V ++ V + ++P | |
| Sbjct: | 237 | KKEDPKRDVWVIGVDKDQYAEGQV---EGTDDNVTLTSMVKKVDTVVEDVTKKASDGKFP | 293 |
| Query: | 325 | GGKVTVFGLKDSGVDI--KEHQLSSEGSVAVKKAKEDIVSGKIQVP | 368 |
| | | GG+ +GL GV I + LS + AV K K+ I+ G +++P | |
| Sbjct: | 294 | GGETLTYGLDQDGVGISPSKQNLSDDVIKAVDKWKKKIIDG-LEIP | 338 |

[1766] There is also homology to SEQ ID 862.

[1767] A related GBS gene <SEQ ID 8531> and protein <SEQ ID 8532D were also identified. Analysis of this protein sequence reveals the following:

```
Lipop: Possible site: 20 Crend: 3
          Sequence Pattern: CGNR
SRCFLG: 0
McG: Length of UR: 19
          Peak Value of UR: 2.31
          Net Charge of CR: 2
McG: Discrim Score: 5.09
GvH: Signal Score (−7.5): −3.29
          Possible site: 19
>>> May be a lipoprotein
Amino Acid Composition: calculated from 21
ALOM program count: 0 value: 5.20 threshold: 0.0
          PERIPHERAL Likelihood = 5.20 90
modified ALOM score: −1.54
Reasoning Step: 3
----- Final Results -----
                              bacterial membrane --- Certainty = 0.0000 (Not Clear) < succ>
                                bacterial outside --- Certainty = 0.0000 (Not Clear) < succ>
                            bacterial cytoplasm --- Certainty = 0.0000 (Not Clear) < succ>
```

[1768] The protein has homology with the following sequences in the databases:

[chemical structure]

[1769] A related GBS nucleic acid sequence <SEQ ID 10947> which encodes amino acid sequence <SEQ ID 10948> was also identified.

[1770] SEQ ID 8532 (GBS108) was expressed in E. coli as a His-fusion product. SDS-PAGE analysis of total cell extract is shown in FIG. 38 (lane 7; MW 39.6 kDa). It was also expressed in E. coli as a GST-fusion product. SDS-PAGE analysis of total cell extract is shown in FIG. 41 (lane 9; MW 64.6 kDa).

[1771] The GBS108-GST fusion product was purified (FIG. 202, lane 9) and used to immunise mice. The resulting antiserum was used for FACS (FIG. 273), which confirmed that the protein is immunoaccessible on GBS bacteria.

[1772] Based on this analysis, it was predicted that these proteins and their epitopes could be useful antigens for vaccines or diagnostics.

### EXAMPLE 270

[1773] A DNA sequence (GBSx0295) was identified in S. agalactiae <SEQ ID 863> which encodes the amino acid sequence <SEQ ID 864>. Analysis of this protein sequence reveals the following:

| Possible site: 35 | | | |
|---|---|---|---|
| >>> Seems to have a cleavable N-term signal seq. | | | |
| INTEGRAL | Likelihood = −12.74 | Transmembrane | 206-222 (197-224) |
| INTEGRAL | Likelihood = −3.72 | Transmembrane | 174-190 (171-194) |
| INTEGRAL | Likelihood = −3.19 | Transmembrane | 98-114 (98-116) |
| INTEGRAL | Likelihood = −1.54 | Transmembrane | 120-136 (120-139) |
| INTEGRAL | Likelihood = −0.90 | Transmembrane | 157-173 (157-173) |

----- Final Results -----
bacterial membrane --- Certainty = 0.6095 (Affirmative) < succ>
bacterial outside --- Certainty = 0.0000 (Not Clear) < succ>
bacterial cytoplasm --- Certainty = 0.0000 (Not Clear) < succ>

[1774] The protein has homology with the following sequences in the GENPEPT database:

| >GP: CAB90755 GB: AJ400707 hypothetical protein [Streptococcus uberis] | | | |
|---|---|---|---|
| Identities = 126/218 (57%), Positives = 166/218 (75%) | | | |
| Query: | 8 | KEYPTTVLLVSLTTLVFLLMQLTYGSQAESSQVIFQFGGIQGDYLKAYPTNLWRLISPIF | 67 |
| | | KE P T +S+T L+F++MQ+ YGS A+S QV+FQFGG+ G +K+ P+ LWRL++PIF | |
| Sbjct: | 5 | KEKPVTFFFLSVTILLFIVMQVFYGSWAKSPQVVFQFGGMFGLVVKSMPSQLWRLVTPIF | 64 |
| Query: | 68 | VHIGWEHFLLNGLALYFVGQMGESIWGSLRFLILYILSGLMGNIFTLFFTPHVVAAGAST | 127 |
| | | +HIGWEHFL+N L LYFVGQ+ ESIWGS FL+LY+LSG+MGN+ TLFFTPHVVAAGAST | |
| Sbjct: | 65 | IHIGWEHFLINSLTLYFVGQLAESIWGSRFFLLLYVLSGIMGNVLTLFFTPHVVAAGAST | 124 |
| Query: | 128 | SLFGVFSAIAIAGYFGKNPYLKQVGKSYQVMILLNLFFNIFTPGVSLAGHVGGLVGGVLV | 187 |
| | | SLFG+F+AI + GYFG N LK +GKSYQ +I+LNL N+F P V + GH+GG +GG L | |
| Sbjct: | 125 | SLFGLFAAIVVVGYFGHNQLLKSIGKSYQTLIILNLVMNLFMPNVGIVGHLGGALGGALA | 184 |
| Query: | 188 | AIFLTKQNGSLLFKTWQSILALMIFIIVSISLIGLSLV | 225 |
| | | A+FL + LF Q AL+ ++ +++ LI LSL+ | |
| Sbjct: | 185 | AVFLPTLLDAELFTKKQKTSALLSYLTLALVLITLSLM | 222 |

[1775] A related DNA sequence was identified in S. pyogenes <SEQ ID 865> which encodes the amino acid sequence <SEQ ID 866>. Analysis of this protein sequence reveals the following:

| Possible site: 43 | | | | |
|---|---|---|---|---|
| >>> Seems to have no N-terminal signal sequence | | | | |
| | INTEGRAL | Likelihood = −9.92 | Transmembrane | 214-230 (212-232) |
| | INTEGRAL | Likelihood = −5.36 | Transmembrane | 135-151 (128-153) |
| | INTEGRAL | Likelihood = −1.81 | Transmembrane | 101-117 (100-117) |
| | INTEGRAL | Likelihood = −1.44 | Transmembrane | 183-199 (182-199) |
| | INTEGRAL | Likelihood = −0.53 | Transmembrane | 166-182 (166-182) |

```
----- Final Results -----
                              bacterial membrane --- Certainty = 0.4970(Affirmative) < succ>
                                bacterial outside --- Certainty = 0.0000(Not Clear) < succ>
                            bacterial cytoplasm --- Certainty = 0.0000(Not Clear) < succ>
```

[1776] The protein has homology with the following sequences in the databases:

| >GP: CAB90755 GB: AJ400707 hypothetical protein [Streptococcus uberis] | | | |
|---|---|---|---|
| Identities = 72/128 (56%), Positives = 94/128 (73%) | | | |
| Query: | 106 | FLLLYVLSGVMGNAFTFWLTPETVAAGASTSLFGLFAAIVVLSFLGKNQALKDLGKSYQT | 165 |
| | | FLLLYVLSG+MGN T + TP VAAGASTSLFGLFAAIVV+ + G NQ LK +GKSYQT | |
| Sbjct: | 95 | FLLLYVLSGIMGNVLTLFFTPHVVAAGASTSLFGLFAAIVVVGYFGHNQLLKSIGKSYQT | 154 |
| Query: | 166 | LIVVNLLMNLFMPNVSMAGHIGGVVGGALLSIVFPTKMRVITVKKTKRMLALVSYGIILV | 225 |
| | | LI++NL+MNLFMPNV + GH+GG +GGAL ++ PT + K ++ AL+SY + + | |
| Sbjct: | 155 | LIILNLVMNLFMPNVGIVGHLGGALGGALAAVFLPTLLDAELFTKKQKTSALLSYLTLAL | 214 |
| Query: | 226 | GVLVLGFL | 233 |
| | | ++ L + | |
| Sbjct: | 215 | VLITLSLM | 222 |

[1777] An alignment of the GAS and GBS proteins is shown below:

| Identities = 63/132 (47%), Positives = 92/132 (68%) | | | |
|---|---|---|---|
| Query: | 94 | GSLRFLILYILSGLMGNIFTLFFTPHVVAAGASTSLFGVFSAIAIAGYFGKNPYLKQVGK | 153 |
| | | G FL+LY+LSG+MGN FT + TP VAAGASTSLFG+F+AI + + GKN LK +GK | |
| Sbjct: | 102 | GLTPFLLLYVLSGVMGNAFTFWLTPETVAAGASTSLFGLFAAIVVLSFLGKNQALKDLGK | 161 |
| Query: | 154 | SYQVMILLNLFFNIFTPGVSLAGHVGGLVGGVLVAIFLTKQNGSLLFKTWQSILALMIFI | 213 |
| | | SYQ +I++NL N+F P VS+AGH+GG+VGG L++I + + K + +LAL+ + | |
| Sbjct: | 162 | SYQTLIVVNLLMNLFMPNVSMAGHIGGVVGGALLSIVFPTKMRVITVKKTKRMLALVSYG | 221 |
| Query: | 214 | IVSISLIGLSLV | 225 |
| | | I+ + ++ L + | |
| Sbjct: | 222 | IILVGVLVLGFL | 233 |

[1778] A further corresponding DNA sequence was identified in S. pyogenes <SEQ ID 9083> which encodes the amino acid sequence <SEQ ID 9084>. Analysis of this protein sequence reveals the following:

| Possible site: 52 | | | | |
|---|---|---|---|---|
| >>> Seems to have an uncleavable N-term signal seq | | | | |
| | INTEGRAL | Likelihood = −7.70 | Transmembrane | 12-28 (7-30) |

```
----- Final Results -----
                              bacterial membrane --- Certainty = 0.4079(Affirmative) < succ>
                                bacterial outside --- Certainty = 0.0000(Not Clear) < succ>
                            bacterial cytoplasm --- Certainty = 0.0000(Not Clear) < succ>
```

[1779] An alignment of the GAS and GBS sequences follows:

| Score = 74.5 bits (180), Expect = 5e−16 | | | |
|---|---|---|---|
| Identities = 37/96 (38%), Positives = 48/96 (49%) | | | |
| Query: | 1 | MTQLLKRYPXXXXXXXXXXXXXXAMQVVYGHLATGAQAIYQVGGMFGLLVKAMPDQLWRL | 60 |
| | | M + K YP MQ+ YG A +Q I+Q GG+ G +KA P LWRL | |
| Sbjct: | 3 | MKKFAKEYPTTVLLVSLTTLVFLLMQLTYGSQAESSQVIFQFGGIQGDYLKAYPTNLWRL | 62 |
| Query: | 61 | VTPXXXXXXXXXXXVNGLTLYFVGQIVEDLWGSRLF | 96 |
| | | ++P +NGL LYFVGQ+ E +WGS F | |
| Sbjct: | 63 | ISPIFVHIGWEHFLLNGLALYFVGQMGESIWGSLRF | 98 |

[1780] Based on this analysis, it was predicted that these proteins and their epitopes could be useful antigens for vaccines or diagnostics.

### EXAMPLE 271

[1781] A DNA sequence (GBSx0296) was identified in S. agalactiae <SEQ ID 867> which encodes the amino acid sequence <SEQ ID 868>. Analysis of this protein sequence reveals the following:

```
Possible site: 22
>>> Seems to have no N-terminal signal sequence
----- Final Results -----
                            bacterial cytoplasm --- Certainty = 0.2055(Affirmative) < succ>
                              bacterial membrane --- Certainty = 0.0000(Not Clear) < succ>
                                bacterial outside --- Certainty = 0.0000(Not Clear) < succ>
```

[1782] The protein has homology with the following sequences in the GENPEPT database:

| >GP: BAA28715 GB: AB001562 hypothetical protein [Streptococcus mutans] | | | |
|---|---|---|---|
| Identities = 96/173 (55%), Positives = 129/173 (74%) | | | |
| Query: | 1 | MEKKLLRKEVLITLKSQPQAYKSEVDCKLLEAFIKTKAYQNSCVIATYLSFDYEYNTQLL | 60 |
| | | M KK R +V+ LK Q +A K D +LLE I+ +AYQ + VIATYL+F +E++T LL | |
| Sbjct: | 1 | MMKKDYRTQVIEDLKKQDKAKKVLRDEQLLEELIQLEAYQKAHVIATYLAFPFEFDTSLL | 60 |
| Query: | 61 | IKQALCDGKRVLVPKTYPKGKMIFVDYQKDNLRTTPFGLLEPVNDRAVEKASIDLIHVPG | 120 |
| | | I+QA D K ++VPKTYP+ KMIFV Y + +L+ T FGL EP ++ A+EK++IDLIHVPG | |
| Sbjct: | 61 | IEQAQRDNKSIVVPKTYPQRKMIFVVYDEADLQITKFGLKEPRSEEALEKSAIDLIHVPG | 120 |
| Query: | 121 | LIFNNKGFRIGYGAGYFDRYLSDFEGDTISTIYRCQRQDFVEEKHDVAVKEVL | 173 |
| | | L FNN+G+RIG+GAGY+D+YL+DF+GDT+STIY Q+ F D+ VKEVL | |
| Sbjct: | 121 | LAFNNEGYRIGFGAGYYDQYLADFQGDTVSTIYSFQQFTFEPSFFDIPVKEVL | 173 |

[1783] A related GBS nucleic acid sequence <SEQ ID 10925> which encodes amino acid sequence <SEQ ID 10926> was also identified.

[1784] No corresponding DNA sequence was identified in S. pyogenes.

[1785] Based on this analysis, it was predicted that these proteins and their epitopes could be useful antigens for vaccines or diagnostics.

### EXAMPLE 272

[1786] A DNA sequence (GBSx0297) was identified in S. agalactiae <SEQ ID 869> which encodes the amino acid sequence <SEQ ID 870>. Analysis of this protein sequence reveals the following:

| Possible site: 43 | | | | |
|---|---|---|---|---|
| >>> Seems to have no N-terminal signal sequence | | | | |
| | INTEGRAL | Likelihood = −1.44 | Transmembrane | 161-177 (161-177) |
| | INTEGRAL | Likelihood = −0.22 | Transmembrane | 29-45 (28-45) |

```
----- Final Results -----
                              bacterial membrane --- Certainty = 0.1574(Affirmative) < succ>
                                bacterial outside --- Certainty = 0.0000(Not Clear) < succ>
                            bacterial cytoplasm --- Certainty = 0.0000(Not Clear) < succ>
```

[1787] A related GBS nucleic acid sequence <SEQ ID 9305> which encodes amino acid sequence <SEQ ID 9306> was also identified.

[1788] The protein has homology with the following sequences in the GENPEPT database:

| >GP: AAD33517 GB: AF132127 glucose-6-phosphate isomerese | | | |
|---|---|---|---|
| [Streptococcus mutans] | | | |
| Identities = 344/401 (85%), Positives = 374/401 (92%) | | | |
| Query: | 1 | MDLPENYDKEEFSRIQKAAEKIKSDSEVLVVIGIGGSYLGAKAAIDFLNNHFANLQTAEE | 60 |
| | | ++LP+NYDKEEF+RI+KAAEKIKSDSEVLVVIGIGGSYLGA+AAIDFLN+ F NL+ EE | |
| Sbjct: | 49 | LNLPQNYDKEEFARIKKAAEKIKSDSEVLVVIGIGGSYLGARAAIDFLNSSFVNLENKEE | 108 |
| Query: | 61 | RKAPQILYAGNSISSTYLADLVEYVQDKEFSVNVISKSGTTTEPAIAFRVFKELLVKKYG | 120 |
| | | RKAPQILYAGNSISS YLADLV+YV DK+FSVNVISKSGTTTEPAIAFRVFK+LLVKKYG | |
| Sbjct: | 109 | RKAPQILYAGNSISSNYLADLVDYVADKDFSVNVISKSGTTTEPAIAFRVFKDLLVKKYG | 168 |
| Query: | 121 | QEEANKRIYATTDKVKGAVKVEADANNWETFVVPDNVGGRFSVLTAVGLLPIAASGADIT | 180 |
| | | QEEAN+RIYATTD+VKGAVKVEADAN WETFVVPD+VGGRF+VLTAVGLLPIAASGAD+ | |
| Sbjct: | 169 | QEEANQRIYATTDRVKGAVKVEADANGWETFVVPDSVGGRFTVLTAVGLLPIAASGADLD | 228 |
| Query: | 181 | ALMEGANAARKDLSSDKISENIAYQYAAVRNVLYRKGYITEILANYEPSLQYFGEWWKQL | 240 |
| | | LM GA AAR+D SS ++SEN AYQYAA+RN+LYRKGY+TE+LANYEPSLQYF EWWKQL | |
| Sbjct: | 229 | QLMAGAEAARQDYSSAELSENEAYQYAAIRNILYRKGYVTEVLANYEPSLQYFSEWWKQL | 288 |
| Query: | 241 | AGESEGKDQKGIYPTSANFSTDLHSLGQFIQEGYRNLFETVVRVEKPRKNVTIPELTEDL | 300 |
| | | AGESEGKDQKGIYPTSANFSTDLHSLGQFIQEG RNLFETV+RVEK RKN+ +PE EDL | |
| Sbjct: | 289 | AGESEGKDQKGIYPTSANFSTDLHSLGQFIQEGNRNLFETVIRVEKARKNILVPEAAEDL | 348 |
| Query: | 301 | DGLGYLQGKDVDFVNKKATDGVLLAHTDGGVPNMFVTLPTQDAYTLGYTIYFFELAIGLS | 360 |
| | | DGL YLQGKDVDFVNKKATDGVLLAHTDGGVPN F+T+P QD +TLGY IYFFELAIGLS | |
| Sbjct: | 349 | DGLAYLQGKDVDFVNKKATDGVLLAHTDGGVPNTFLTIPEQDEFTLGYVIYFFELAIGLS | 408 |
| Query: | 361 | GYLNSVNPFDQPGVEAYKRNMFALLGKPGFEELSAELNARL | 401 |
| | | GYLN VNPFDQPGVEAYK+NMFALLGKPGFEEL AELNARL | |
| Sbjct: | 409 | GYLNGVNPFDQPGVEAYKKNMFALLGKPGFEELGAELNARL | 449 |

[1789] A related DNA sequence was identified in S. pyogenes <SEQ ID 871> which encodes the amino acid sequence <SEQ ID 872>. Analysis of this protein sequence reveals the following:

| Possible site: 31 | | | | |
|---|---|---|---|---|
| >>> Seems to have no N-terminal signal sequence | | | | |
| | INTEGRAL | Likelihood = −1.44 | Transmembrane | 209-225 (209-225) |
| | INTEGRAL | Likelihood = −0.22 | Transmembrane | 77-93 (76-93) |

```
----- Final Results -----
                              bacterial membrane --- Certainty = 0.1574(Affirmative) < succ>
                                bacterial outside --- Certainty = 0.0000(Not Clear) < succ>
                            bacterial cytoplasm --- Certainty = 0.0000(Not Clear) < succ>
```

[1790] The protein has homology with the following sequences in the databases:

| >GP: AAD33517 GB: AF132127 glucose-6-phosphate isomerase | | | |
|---|---|---|---|
| [Streptococcus mutans] | | | |
| Identities = 369/449 (82%), Positives = 408/449 (90%) | | | |
| Query: | 1 | MSHITFDYSKVLESFAGQHEIDFLQGQVTEADKLLREGTGPGSDFLGWLDLPENYDKDEF | 60 |
| | | M+HI FDYSKVL F HE+D++Q QVT AD+ LR+GTGPG++ GWL+LP+NYDK+EF | |
| Sbjct: | 1 | MTHIKFDYSKVLGKFLASHELDYIQMQVTAADEALRKGTGPGAEMTGWLNLPQNYDKEEF | 60 |
| Query: | 61 | ARILTAAEKIKADSEVLVVIGIGGSYLGAKAAIDFLNHHFANLQTAKERKAPQILYAGNS | 120 |
| | | ARI AAEKIK+DSEVLVVIGIGGSYLGA+AAIDFLN F NL+ +ERKAPQILYAGNS | |
| Sbjct: | 61 | ARIKKAAEKIKSDSEVLVVIGIGGSYLGARAAIDFLNSSFVNLENKEERKAPQILYAGNS | 120 |
| Query: | 121 | ISSTYLADLVEYVQDKEFSVNVISKSGTTTEPAIAFRVFKELLVKKYGQEEANKRIYATT | 180 |
| | | ISS YLADLV+YV DK+FSVNVISKSGTTTEPAIAFRVFK+LLVKKYGQEEAN+RIYATT | |
| Sbjct: | 121 | ISSNYLADLVDYVADKDFSVNVISKSGTTTEPAIAFRVFKDLLVKKYGQEEANQRIYATT | 180 |
| Query: | 181 | DKVKGAVKVEADANNWETFVVPDNVGGRFSVLTAVGLLPIAASGADITALMEGANAARKD | 240 |
| | | D+VKGAVKVEADAN WETFVVPD+VGGRF+VLTAVGLLPIAASGAD+ LM GA AAR+D | |
| Sbjct: | 181 | DRVKGAVKVEADANGWETFVVPDSVGGRFTVLTAVGLLPIAASGADLDQLMAGAEAARQD | 240 |
| Query: | 241 | LSSDKISENIAYQYAAVRNVLYRKGYITEILANYEPSLQYFGEWWKQLAGESEGKDQKGI | 300 |
| | | SS ++SEN AYQYAA+RN+LYRKGY+TE+LANYEPSLQYF EWWKQLAGESEGKDQKGI | |
| Sbjct: | 241 | YSSAELSENEAYQYAAIRNILYRKGYVTEVLANYEPSLQYFSEWWKQLAGESEGKDQKGI | 300 |
| Query: | 301 | YPTSANFSTDLHSLGQFIQEGYRNLFETVIRVDNPRKNVIIPELAEDLDGLGYLQGKDVD | 360 |
| | | YPTSANFSTDLHSLGQFIQEG RNLFETVIRV+ RKN+++PE AEDLDGL YLQGKDVD | |
| Sbjct: | 301 | YPTSANFSTDLHSLGQFIQEGNRNLFETVIRVEKARKNILVPEAAEDLDGLAYLQGKDVD | 360 |
| Query: | 361 | FVNKKATDGVLLAHTDGGVPNMFVTLPAQDEFTLGYTIYFFELAIAVSGYMNAVNPFDQP | 420 |
| | | FVNKKATDGVLLAHTDGGVPN F+T+P QDEFTLGY IYFFELAI +SGY+N VNPFDQP | |
| Sbjct: | 361 | FVNKKATDGVLLAHTDGGVPNTFLTIPEQDEFTLGYVIYFFELAIGLSGYLNGVNPFDQP | 420 |
| Query: | 421 | GVEAYKRNMFALLGKPGFEALSAELNARL | 449 |
| | | GVEAYK+NMFALLGKPGFE L AELNARL | |
| Sbjct: | 421 | GVEAYKKNMFALLGKPGFEELGAELNARL | 449 |

[1791] The protein has homology with the following sequences in the databases:

| >GP: CAB90755 GB: AJ400707 hypothetical protein [Streptococcus | | | |
|---|---|---|---|
| uberis] | | | |
| Identities = 58/91 (63%), Positives = 69/91 (75%) | | | |
| Query: | 6 | KRYPITIFLLGLTGLIFIAMQVVYGHLATGAQAIYQVGGMFGLLVKAMPDQLWRLVTPIF | 65 |
| | | K P+T F L +T L+FI MQV YG A Q ++Q GGMFGL+VK+MP QLWRLVTPIF | |
| Sbjct: | 5 | KEKPVTFFFLSVTILLFIVMQVFYGSWAKSPQVVFQFGGMFGLVVKSMPSQLWRLVTPIF | 64 |
| Query: | 66 | IHIGFGHFFVNGLTLYFVGQIVEDLWGSRLF | 96 |
| | | IHIG+ HF +N LTLYFVGQ+ E +WGSR F | |
| Sbjct: | 65 | IHIGWEHFLINSLTLYFVGQLAESIWGSRFF | 95 |

[1792] An alignment of the GAS and GBS proteins is shown below:

| Identities = 380/401 (94%), Positives = 392/401 (96%) | | | |
|---|---|---|---|
| Query: | 1 | MDLPENYDKEEFSRIQKAAEKIKSDSEVLVVIGIGGSYLGAKAAIDFLNNHFANLQTAEE | 60 |
| | | +DLPENYDK+EF+RI AAERIK+DSEVLVVIGIGGSYLGAKAAIDFLN+HFANLQTA+E | |
| Sbjct: | 49 | LDLPENYDKDEFARILTAAEKIKADSEVLVVIGIGGSYLGAKAAIDFLNHHFANLQTAKE | 108 |
| Query: | 61 | RKAPQILYAGNSISSTYLADLVEYVQDKEFSVNVISKSGTTTEPAIAFRVFKELLVKKYG | 120 |
| | | RKAPQILYAGNSISSTYLADLVEYVQDKEFSVNVISKSGTTTEPAIAFRVFKELLVKKYG | |
| Sbjct: | 109 | RKAPQILYAGNSISSTYLADLVEYVQDKEFSVNVISKSGTTTEPAIAFRVFKELLVKKYG | 168 |
| Query: | 121 | QEEANKRIYATTDKVKGAVKVEADANNWETFVVPDNVGGRFSVLTAVGLLPIAASGADIT | 180 |
| | | QEEANKRIYATTDKVKGAVKVEADANNWETFVVPDNVGGRFSVLTAVGLLPIAASGADIT | |
| Sbjct: | 169 | QEEANKRIYATTDKVKGAVKVEADANNWETFVVPDNVGGRFSVLTAVGLLPIAASGADIT | 228 |
| Query: | 181 | ALMEGANAARKDLSSDKISENIAYQYAAVRNVLYRKGYITEILANYEPSLQYFGEWWKQL | 240 |
| | | ALMEGANAARKDLSSDKISENIAYQYAAVRNVLYRKGYITEILANYEPSLQYFGEWWKQL | |
| Sbjct: | 229 | ALMEGANAARKDLSSDKISENIAYQYAAVRNVLYRKGYITEILANYEPSLQYFGEWWKQL | 288 |
| Query: | 241 | AGESEGKDQKGIYPTSANFSTDLHSLGQFIQEGYRNLFETVVRVEKPRKNVTIPELTEDL | 300 |
| | | AGESEGKDQKGIYPTSANFSTDLHSLGQFIQEGYRNLFETV+RV+ PRKNV IPEL EDL | |
| Sbjct: | 289 | AGESEGKDQKGIYPTSANFSTDLHSLGQFIQEGYRNLFETVIRVDNPRKNVIIPELAEDL | 348 |
| Query: | 301 | DGLGYLQGKDVDFVNKKATDGVLLAHTDGGVPNMFVTLPTQDAYTLGYTIYFFELAIGLS | 360 |
| | | DGLGYLQGKDVDFVNKKATDGVLLAHTDGGVPNMFVTLP QD +TLGYTIYFFELAI +S | |
| Sbjct: | 349 | DGLGYLQGKDVDFVNKKATDGVLLAHTDGGVPNMFVTLPAQDEFTLGYTIYFFELAIAVS | 408 |
| Query: | 361 | GYLNSVNPFDQPGVEAYKRNMFALLGKPGFEELSAELNARL | 401 |
| | | GY+N+VNPFDQPGVEAYKRNMFALLGKPGFE LSAELNARL | |
| Sbjct: | 409 | GYMNAVNPFDQPGVEAYKRNMFALLGKPGFEALSAELNARL | 449 |

[1793] Based on this analysis, it was predicted that these proteins and their epitopes could be useful antigens for vaccines or diagnostics.

### EXAMPLE 273

[1794] A DNA sequence (GBSx0298) was identified in S. agalactiae <SEQ ID 873> which encodes the amino acid sequence <SEQ ID 874>. Analysis of this protein sequence reveals the following:

| Possible site: 38 | | | |
|---|---|---|---|
| >>> Seems to have no N-terminal signal sequence | | | |
| INTEGRAL | Likelihood = −2.66 | Transmembrane | 654-670 (653-671) |
| INTEGRAL | Likelihood = −1.65 | Transmembrane | 113-129 (113-129) |

----- Final Results -----
bacterial membrane --- Certainty = 0.2062 (Affirmative) < succ>
bacterial outside --- Certainty = 0.0000 (Not Clear) < succ>
bacterial cytoplasm --- Certainty = 0.0000 (Not Clear) < succ>

[1795] A related GBS nucleic acid sequence <SEQ ID 9463> which encodes amino acid sequence <SEQ ID 9464> was also identified.

[1796] The protein has homology with the following sequences in the GENPEPT database:

| >GP: AAA81906 GB: U04863 alcohol dehydrogenase 2 [Entamoeba | | | |
|---|---|---|---|
| histolytica] | | | |
| Identities = 536/864 (62%), Positives = 663/864 (76%), Gaps = 3/864 (0%) | | | |
| Query: | 20 | ETTDVALAIDTLVQNGLKALDEMR--QLNQEQVDYIVAKASVAALDAHGELALHAVEETG | 77 |
| | | +T V I+ LV+ AL E + QE++DYIV KASVAALD H LA AVEETG | |
| Sbjct: | 5 | QTMTVDEHINQLVRKAQVALKEYLKPEYTQEKIDYIVKKASVAALDQHCALAAAAVEETG | 64 |
| Query: | 78 | RGVFEDKATKNLFACEHVVNNMRHTKTVGVIEEDDVTGLTLIAEPVGVVCGITPTTNPTS | 137 |
| | | RG+FEDKATKN+FACEHV + MRH KTVG+I D + G+T IAEPVGVVCG+TP TNPTS | |
| Sbjct: | 65 | RGIFEDKATKNIFACEHVTHEMRHAKTVGIINVDPLYGITEIAEPVGVVCGVTPVTNPTS | 124 |
| Query: | 138 | TAIFKSLISLKTRNPIIFAFHPSAQESSAHAARIVRDAAIAAGAPENCVQWIEQPSIDAT | 197 |
| | | TAIFKSLIS+KTRNPI+F+FHPSA + S AA+IVRDAAIAAGAPENC+QWIE I+A+ | |
| Sbjct: | 125 | TAIFKSLISIKTRNPIVFSFHPSALKCSIMAAKIVRDAAIAAGAPENCIQWIEFGGIEAS | 184 |
| Query: | 198 | NALMNHDGIATILATGGNAMVKAAYSCGKPALGVGAGNVPAYVEKSANIRQAAHDIVMSK | 257 |
| | | N LMNH G+ATILATGGNAMVKAAYS GKPALGVGAGNVP Y+EK+ NI+QAA+D+VMSK | |
| Sbjct: | 185 | NKLMNHPGVATILATGGNAMVKAAYSSGKPALGVGAGNVPTYIEKTCNIKQAANDVVMSK | 244 |
| Query: | 258 | SFDNGMVCASEQAVIIDKEIYKEFVEEFKSYHTYFVNKKEKALLEEFCFGAKANSKNCAG | 317 |
| | | SFDNGM+CASEQA IIDKEIY + VEE K+ YF+N++EKA LE+F FG A S + | |
| Sbjct: | 245 | SFDNGMICASEQAAIIDKEIYDQVVEEMKTLGAYFINEEEKAKLEKFMFGVNAYSADVNN | 304 |
| Query: | 318 | AKLNPNIVGKSAVWIAEQAGFTVPEGTNILAAECTEVSEKEPLTREKLSPVIAVLKAEST | 377 |
| | | A+LNP G S W AEQ G VPE NI+ A C EV EPLTREKLSPV+A+LKAE+T | |
| Sbjct: | 305 | ARLNPKCPGMSPQWFAEQVGIKVPEDCNIICAVCKEVGPNEPLTREKLSPVLAILKAENT | 364 |
| Query: | 378 | EDGVEKARQMVEFNGLGHSAAIHTKDADLAREFGTRIRAIRVIWNSPSTFGGIGDVYNAF | 437 |
| | | +DG++KA MVEFNG GHSAAIH+ D + ++ ++A R++ N+PS+ GGIG +YN | |
| Sbjct: | 365 | QDGIDKAEAMVEFNGRGHSAAIHSNDKAVVEKYALTMKACRILHNTPSSQGGIGSIYNYI | 424 |
| Query: | 438 | LPSLTLGCGSYGRNSVGDNVSAINLLNIKKVGRRRNNMQWFKVPSKTYFERDSIQYLQKC | 497 |
| | | PS TLGCGSYG NSV NV+ NLLNIK++ RRNN+QWF+VP K +FE SI+YL + | |
| Sbjct: | 425 | WPSFTLGCGSYGGNSVSANVTYHNLLNIKRLADRRNNLQWFRVPPKIFFEPHSIRYLAEL | 484 |
| Query: | 498 | RDVERVMIVTDHAMVELGFLDRIIEQLDLRRNKVVYQIFAEVEPDPDITTVMKGTDLMRT | 557 |
| | | +++ ++ IV+D M +LG++DR+++ L R N+V +IF +VEPDP I TV KG +M T | |
| Sbjct: | 485 | KELSKIFIVSDRMMYKLGYVDRVMDVLKRRSNEVEIEIFIDVEPDPSIQTVQKGLAVMNT | 544 |
| Query: | 558 | FKPDTIIALGGGSPMDAAKVMWLFYEQPEVDFHDLVQKFMDIRKRAFKFPELGKKTKFVA | 617 |
| | | F PD IIA+GGGS MDAAK+MWL YE PE DF + QKF+D+RKRAFKFP +GKK + + | |
| Sbjct: | 545 | FGPDNIIAIGGGSAMDAAKIMWLLYEHPEADFFAMKQKFIDLRKRAFKFPTMGKKARLIC | 604 |
| Query: | 618 | IPTTSGTGSEVTPFAVISDKANNRKYPIADYSLTPTVAIVDPALVMTVPGFIAADTGMDV | 677 |
| | | IPTTSGTGSEVTPFAVISD +KYP+ADYSLTP+VAIVDP M++P ADTG+DV | |
| Sbjct: | 605 | IPTTSGTGSEVTPFAVISDHETGKKYPLADYSLTPSVAIVDPMFTMSLPKRAIADTGLDV | 664 |
| Query: | 678 | LTHATEAYVSQMANDYTDGLALQAIKIVFDYLERSVKDADFEAREKMHNASTMAGMAFAN | 737 |
| | | L HATEAYVS MAN+YTDGLA +A+K+VF+ L +S + D EAREKMHNA+T+AGMAFA+ | |
| Sbjct: | 665 | LVHATEAYVSVMANEYTDGLAREAVKLVFENLLKSY-NGDLEAREKMHNAATIAGMAFAS | 723 |
| Query: | 738 | AFLGISHSMAHKIGAQFHTVHGRTNAILLPYVIRYNGTRPAKTATWPKYNYYRADEKYQD | 797 |
| | | AFLG+ HSMAHK+GA FH HGR A+LLP+VIRYNG +P K A WPKYN+Y+AD++Y + | |
| Sbjct: | 724 | AFLGMDHSMAHKVGAAFHLPHGRCVAVLLPHVIRYNGQKPRKLAMWPKYNFYKADQRYME | 783 |
| Query: | 798 | IAKLLGLPAATPEEAVESYAKAVYDLGTRLGIKMNFRDQGIDEKEWKEKSRELAFLAYED | 857 |
| | | +A+++GL TP E VE++AKA +L F+ IDE W K E+A LA+ED | |
| Sbjct: | 784 | LAQMVGLKCNTPAEGVEAFAKACEELMKATETITGFKKANIDEAAWMSKVPEMALLAFED | 843 |
| Query: | 858 | QCSPANPRLPMVDHMQEIIEDAYY | 881 |
| | | QCSPANPR+PMV M++I++ AYY | |
| Sbjct: | 844 | QCSPANPRVPMVKDMEKILKAAYY | 867 |

[1797] A related DNA sequence was identified in S. pyogenes <SEQ ID 875> which encodes the amino acid sequence <SEQ ID 876>. Analysis of this protein sequence reveals the following:

| Possible site: 55 | | | | |
|---|---|---|---|---|
| >>> Seems to have no N-terminal signal sequence | | | | |
| | INTEGRAL | Likelihood = −3.66 | Transmembrane | 643-659 (642-660) |
| | INTEGRAL | Likelihood = −1.81 | Transmembrane | 102-118 (102-118) |

```
----- Final Results -----
                              bacterial membrane --- Certainty = 0.2466(Affirmative) < succ>
                                bacterial outside --- Certainty = 0.0000(Not Clear) < succ>
                            bacterial cytoplasm --- Certainty = 0.0000(Not Clear) < succ>
```

[1798] The protein has homology with the following sequences in the databases:

| >GP: AAA81906 GB: U04863 alcohol dehydrogenase 2 | | | |
|---|---|---|---|
| [Entamoeba histolytica] | | | |
| Identities = 535/870 (61%), Positives = 669/870 (76%), | | | |
| Gaps = 3/870 (0%) | | | |
| Query: | 6 | NTVETTSVSVTIDALVQKGLAALEEMRKLD--QEQVDYIVAKASVAALDAHGELAKHAYE | 63 |
| | | +T +T +V I+ LV+K AL+E K + QE++DYIV KASVAALD H LA A E | |
| Sbjct: | 2 | STQQTMTVDEHINQLVRKAQVALKEYLKPEYTQEKIDYIVKKASVAALDQHCALAAAAVE | 61 |
| Query: | 64 | ETGRGVFEDKATKHLFACEHVVNNMRHQKTVGIIEEDDVTGLTLIAEPVGVICGITPTTN | 123 |
| | | ETGRG+FEDKATK++FACEHV + MRH KTVGII D + G+T IAEPVGV+CG+TP TN | |
| Sbjct: | 62 | ETGRGIFEDKATKNIFACEHVTHEMRHAKTVGIINVDPLYGITEIAEPVGVVCGVTPVTN | 121 |
| Query: | 124 | PTSTAIFKSLISLKTRNPIIFAFHPSAQESSAHAARIVRDAAIAAGAPENCVQWVETPSL | 183 |
| | | PTSTAIFKSLIS+KTRNPI+F+FHPSA + S AA+IVRDAAIAAGAPENC+QW+E + | |
| Sbjct: | 122 | PTSTAIFKSLISIKTRNPIVFSFHPSALKCSIMAAKIVRDAAIAAGAPENCIQWIEFGGI | 181 |
| Query: | 184 | EATNALMNHDGIATILATGGNAMVKAAYSCGKPALGVGAGNVPAYVEKSANIRQAAHDIV | 243 |
| | | EA+N LMNH G+ATILATGGNAMVKAAYS GKPALGVGAGNVP Y+EK+ NI+QAA+D+V | |
| Sbjct: | 182 | EASNKLMNHPGVATILATGGNAMVKAAYSSGKPALGVGAGNVPTYIEKTCNIKQAANDVV | 241 |
| Query: | 244 | MSKSFDNGMVCASEQAVIIDKEIYDDFVAEFKSYHTYFVNKKEKALLEEFCFGAKANSKN | 303 |
| | | MSKSFDNGM+CASEQA IIDKEIYD V E K+ YF+N++EKA LE+F FG A S + | |
| Sbjct: | 242 | MSKSFDNGMICASEQAAIIDKEIYDQVVEEMKTLGAYFINEEEKAKLEKFMFGVNAYSAD | 301 |
| Query: | 304 | CAGAKLNPNIVGKPATWIAEQAGFTVPEGTNILAAECKEVSENEPLTREKLSPVIAVLKS | 363 |
| | | A+LNP G W AEQ G VPE NI+ A CKEV NEPLTREKLSPV+A+LK+ | |
| Sbjct: | 302 | VNNARLNPKCPGMSPQWFAEQVGIKVPEDCNIICAVCKEVGPNEPLTREKLSPVLAILKA | 361 |
| Query: | 364 | ESREDGVEKARQMVEFNGLGHSAAIHTADAELAKEFGTRIRAIRVIWNSPSTFGGIGDVY | 423 |
| | | E+ +DG++KA MVEFNG GHSAAIH+ D + +++ ++A R++ N+PS+ GGIG +Y | |
| Sbjct: | 362 | ENTQDGIDKAEAMVEFNGRGHSAAIHSNDKAVVEKYALTMKACRILHNTPSSQGGIGSIY | 421 |
| Query: | 424 | NAFLPSLTLGCGSYGRNAVGDNVSAINLLNIKKVGRRRNNMQWFKVPSKTYFERDSIQYL | 483 |
| | | N PS TLGCGSYG N+V NV+ NLLNIK++ RRNN+QWF+VP K +FE SI+YL | |
| Sbjct: | 422 | NYIWPSFTLGCGSYGGNSVSANVTYHNLLNIKRLADRRNNLQWFRVPPKIFFEPHSIRYL | 481 |
| Query: | 484 | QKCRDVERVMIVTDHAMVELGFLDRIIEQLDLRRNKVVYQIFAEVEPDPDITTVMKGTEL | 543 |
| | | + +++ ++ IV+D M +LG++DR+++ L R N+V +IF +VEPDP I TV KG + | |
| Sbjct: | 482 | AELKELSKIFIVSDRMMYKLGYVDRVMDVLKRRSNEVEIEIFIDVEPDPSIQTVQKGLAV | 541 |
| Query: | 544 | MRTFKPDTIIALGGGSPMDAAKVMWLFYEQPEVDFHDLVQKFMDIRKRAFKFPELGKKTK | 603 |
| | | M TF PD IIA+GGGS MDAAK+MWL YE PE DF + QKF+D+RKRAFKFP +GKK + | |
| Sbjct: | 542 | MNTFGPDNIIAIGGGSAMDAAKIMWLLYEHPEADFFAMKQKFIDLRKRAFKFPTMGKKAR | 601 |
| Query: | 604 | FVAIPTTSGTGSEVTPFAVISDKANNRKYPIADYSLTPTVAIVDPALVLTVPGFIAADTG | 663 |
| | | + IPTTSGTGSEVTPFAVISD +KYP+ADYSLTP+VAIVDP +++P ADTG | |
| Sbjct: | 602 | LICIPTTSGTGSEVTPFAVISDHETGKKYPLADYSLTPSVAIVDPMFTMSLPKRAIADTG | 661 |
| Query: | 664 | MDVLTHATEAYVSQMANDFTDGLALQAIKIVFDNLEKSVKTADFEAREKMHNASTMAGMA | 723 |
| | | +DVL HATEAYVS MAN++TDGLA +A+K+VF+NL KS D EAREKMHNA+T+AGMA | |
| Sbjct: | 662 | LDVLVHATEAYVSVMANEYTDGLAREAVKLVFENLLKSY-NGDLEAREKMHNAATIAGMA | 720 |
| Query: | 724 | FANAFLGISHSMAHKIGAQFHTVHGRTNAILLPYVIRYNGTRPAKTATWPKYNYYRADEK | 783 |
| | | FA+AFLG+ HSMAHK+GA FH HGR A+LLP+VIRYNG +P K A WPKYN+Y+AD++ | |
| Sbjct: | 721 | FASAFLGMDHSMAHKVGAAFHLPHGRCVAVLLPHVIRYNGQKPRKLAMWPKYNFYKADQR | 780 |
| Query: | 784 | YQDIAKLLGLPASTPEEAVESYAKAVYDLGCRVGIQMNFKAQGIDENEWKEHSRELAYLA | 843 |
| | | Y ++A+++GL +TP E VE++AKA +L FK IDE W E+A LA | |
| Sbjct: | 781 | YMELAQMVGLKCNTPAEGVEAFAKACEELMKATETITGFKKANIDEAAWMSKVPEMALLA | 840 |
| Query: | 844 | YEDQCSPANPRLPMVDHMQEIIEDAYYGYA | 873 |
| | | +EDQCSPANPR+PMV M++I++ AYY A | |
| Sbjct: | 841 | FEDQCSPANPRVPMVKDMEKILKAAYYPIA | 870 |

[1799] An alignment of the GAS and GBS proteins is shown below:

| Identities = 827/880 (93%), Positives = 852/880 (95%) | | |
|---|---|---|
| Query: 12 | MTEKTKAVETTDVALAIDTLVQNGLKALDEMRQLNQEQVDYIVAKASVAALDAHGELALH | 71 |
| | MTE VETT V++ ID LVQ GL AL+EMR+L+QEQVDYIVAKASVAALDAHGELA H | |
| Sbjct: 1 | MTEGHNTVETTSVSVTIDALVQKGLAALEEMRKLDQEQVDYIVAKASVAALDAHGELAKH | 60 |
| Query: 72 | AVEETGRGVFEDKATKNLFACEHVVNNMRHTKTVGVIEEDDVTGLTLIAEPVGVVCGITP | 131 |
| | A EETGRGVFEDKATK+LFACEHVVNNMRH KTVG+IEEDDVTGLTLIAEPVGV+CGITP | |
| Sbjct: 61 | AYEETGRGVFEDKATKHLFACEHVVNNMRHQKTVGIIEEDDVTGLTLIAEPVGVICGITP | 120 |
| Query: 132 | TTNPTSTAIFKSLISLKTRNPIIFAFHPSAQESSAHAARIVRDAAIAAGAPENCVQWIEQ | 191 |
| | TTNPTSTAIFKSLISLKTRNPIIFAFHPSAQESSAHAARIVRDAAIAAGAPENCVQW+E | |
| Sbjct: 121 | TTNPTSTAIFKSLISLKTRNPIIFAFHPSAQESSAHAARIVRDAAIAAGAPENCVQWVET | 180 |
| Query: 192 | PSIDATNALMNHDGIATILATGGNAMVKAAYSCGKPALGVGAGNVPAYVEKSANIRQAAH | 251 |
| | PS++ATNALMNHDGIATILATGGNAMVKAAYSCGKPALGVGAGNVPAYVEKSANIRQAAH | |
| Sbjct: 181 | PSLEATNALMNHDGIATILATGGNAMVKAAYSCGKPALGVGAGNVPAYVEKSANIRQAAH | 240 |
| Query: 252 | DIVMSKSFDNGMVCASEQAVIIDKEIYKEFVEEFKSYHTYFVNKKEKALLEEFCFGAKAN | 311 |
| | DIVMSKSFDNGMVCASEQAVIIDKEIY +FV EFKSYHTYFVNKKEKALLEEFCFGAKAN | |
| Sbjct: 241 | DIVMSKSFDNGMVCASEQAVIIDKEIYDDFVAEFKSYHTYFVNKKEKALLEEFCFGAKAN | 300 |
| Query: 312 | SKNCAGAKLNPNIVGKSAVWIAEQAGFTVPEGTNILAAECTEVSEKEPLTREKLSPVIAV | 371 |
| | SKNCAGAKLNPNIVGK A WIAEQAGFTVPEGTNILAAEC EVSE EPLTREKLSPVIAV | |
| Sbjct: 301 | SKNCAGAKLNPNIVGKPATWIAEQAGFTVPEGTNILAAECKEVSENEPLTREKLSPVIAV | 360 |
| Query: 372 | LKAESTEDGVEKARQMVEFNGLGHSAAIHTKDADLAREFGTRIRAIRVIWNSPSTFGGIG | 431 |
| | LK+ES EDGVEKARQMVEFNGLGHSAAIHT DA+LA+EFGTRIRAIRVIWNSPSTFGGIG | |
| Sbjct: 361 | LKSESREDGVEKARQMVEFNGLGHSAAIHTADAELAKEFGTRIRAIRVIWNSPSTFGGIG | 420 |
| Query: 432 | DVYNAFLPSLTLGCGSYGRNSVGDNVSAINLLNIKKVGRRRNNMQWFKVPSKTYFERDSI | 491 |
| | DVYNAFLPSLTLGCGSYGRN+VGDNVSAINLLNIKKVGRRRNNNQWFKVPSKTYFERDSI | |
| Sbjct: 421 | DVYNAFLPSLTLGCGSYGRNAVGDNVSAINLLNIKKVGRRRNNMQWFKVPSKTYFERDSI | 480 |
| Query: 492 | QYLQKCRDVERVMIVTDHAMVELGFLDRIIEQLDLRRNKVVYQIFAEVEPDPDITTVMKG | 551 |
| | QYLQKCRDVERVMIVTDHAMVELGFLDRIIEQLDLRRNKVVYQIFAEVEPDPDITTVMKG | |
| Sbjct: 481 | QYLQKCRDVERVMIVTDHAMVELGFLDRIIEQLDLRRNKVVYQIFAEVEPDPDITTVMKG | 540 |
| Query: 552 | TDLMRTFKPDTIIALGGGSPMDAAKVMWLFYEQPEVDFHDLVQKFMDIRKRAFKFPELGK | 611 |
| | T+LMRTFKPDTIIALGGGSPMDAAKVMWLFYEQPEVDEHDLVQKFNDIRKRAFKFPELGK | |
| Sbjct: 541 | TELMRTFKPDTIIALGGGSPMDAAKVMWLFYEQPEVDEHDLVQKFNDIRKRAFKFPELGK | 600 |
| Query: 612 | KTKFVAIPTTSGTGSEVTPFAVISDKANNRKYPIADYSLTPTVAIVDPALVMTVPGFIAA | 671 |
| | KTKFVAIPTTSGTGSEVTPFAVISDKANNRKYPIADYSLTPTVAIVDPALV+TVPGFIAA | |
| Sbjct: 601 | KTKFVAIPTTSGTGSEVTPFAVISDKANNRKYPIADYSLTPTVAIVDPALVLTVPGFIAA | 660 |
| Query: 672 | DTGMDVLTHATEAYVSQMANDYTDGLALQAIKIVFDYLERSVKDADFEAREKMHNASTMA | 731 |
| | DTGMDVLTHATEAYVSQMAND+TDGLALQAIKIVFD LE+SVK ADFEAREKMHNASTMA | |
| Sbjct: 661 | DTGMDVLTHATEAYVSQMANDFTDGLALQAIKIVFDNLEKSVKTADFEAREKMHNASTMA | 720 |
| Query: 732 | GMAFANAFLGISHSMAHKIGAQFHTVHGRTNAILLPYVIRYNGTRPAKTATWPKYNYYRA | 791 |
| | GMAFANAFLGISHSMAHKIGAQFHTVHGRTNAILLPYVIRYNGTRPAKTATWPKYNYYRA | |
| Sbjct: 721 | GMAFANAFLGISHSMAHKIGAQFHTVHGRTNAILLPYVIRYNGTRPAKTATWPKYNYYRA | 780 |
| Query: 792 | DEKYQDIAKLLGLPAATPEEAVESYAKAVYDLGTRLGIKMNFRDQGIDEKEWKEKSRELA | 851 |
| | DEKYQDIAKLLGLPA+TPEEAVESYAKAVYDLG R+GI+MNF+ QGIDE EWKE SRELA | |
| Sbjct: 781 | DEKYQDIAKLLGLPASTPEEAVESYAKAVYDLGCRVGIQMNFKAQGIDENEWKEHSRELA | 840 |
| Query: 852 | FLAYEDQCSPANPRLPMVDHMQEIIEDAYYGYEERPGRRK | 891 |
| | +LAYEDQCSPANPRLPMVDHMQEIIEDAYYGY ERPGRRK | |
| Sbjct: 841 | YLAYEDQCSPANPRLPMVDHMQEIIEDAYYGYAERPGRRK | 880 |

[1800] A related GBS gene <SEQ ID 8533> and protein <SEQ ID 8534> were also identified. Analysis of this protein sequence reveals the following:

| | | |
|---|---|---|
| Lipop: | Possible site: −1 | Crend: 10 |
| McG: | Discrim Score: −4.68 | |
| GvH: | Signal Score (−7.5): −2.48 | |
| | Possible site: 21 | |

| >>> Seems to have no N-terminal signal sequence | | |
|---|---|---|
| ALOM program count: 1 value: −2.66 threshold: 0.0 | | |
| INTEGRAL | Likelihood = −2.66 | Transmembrane 100-116 (99-117) |
| PERIPHERAL | Likelihood = 3.61 | 173 |

```
modified ALOM score: 1.03
*** Reasoning Step: 3
----- Final Results -----
  bacterial membrane --- Certainty = 0.2062 (Affirmative) <succ>
    bacterial outside --- Certainty = 0.0000 (Not Clear) <succ>
bacterial cytoplasm --- Certainty = 0.0000 (Not Clear) <succ>
```

[1801] SEQ ID 8534 (GBS432) was expressed in E. coli as a GST-fusion product. SDS-PAGE analysis of total cell extract is shown in FIG. 173 (lane 5; MW 66 kDa). It was also expressed in E. coli as a His-fusion product. SDS-PAGE analysis of total cell extract is shown in FIG. 77 (lane 7; MW 41 kDa).

[1802] GBS432-GST was purified as shown in FIG. 223, lane 9.

[1803] Based on this analysis, it was predicted that these proteins and their epitopes could be useful antigens for vaccines or diagnostics.

### EXAMPLE 274

[1804] A DNA sequence (GBSx0299) was identified in S. agalactiae <SEQ ID 877> which encodes the amino acid sequence <SEQ ID 878>. Analysis of this protein sequence reveals the following:

```
Possible site: 21
>>> Seems to have no N-terminal signal sequence
----- Final Results -----
bacterial cytoplasm --- Certainty = 0.3444 (Affirmative) <succ>
  bacterial membrane --- Certainty = 0.0000 (Not Clear) <succ>
    bacterial outside --- Certainty = 0.0000 (Not Clear) <succ>
```

[1805] The protein has no significant homology with any sequences in the GENPEPT database, but there is homology to SEQ ID 880.

[1806] Based on this analysis, it was predicted that this protein and its epitopes, could be useful antigens for vaccines or diagnostics.

### EXAMPLE 275

[1807] A DNA sequence (GBSx0300) was identified in S. agalactiae <SEQ ID 881> which encodes the amino acid sequence <SEQ ID 882>. Analysis of this protein sequence reveals the following:

| Possible site: 26 | | |
|---|---|---|
| >>> Seems to have a cleavable N-term signal seq. | | |
| INTEGRAL | Likelihood = −8.39 | Transmembrane 74-90 (69-94) |
| INTEGRAL | Likelihood = −5.31 | Transmembrane 168-184 (163-186) |
| INTEGRAL | Likelihood = −4.83 | Transmembrane 34-50 (29-52) |
| INTEGRAL | Likelihood = −0.75 | Transmembrane 202-218 (202-219) |

```
----- Final Results -----
  bacterial membrane --- Certainty = 0.4354 (Affirmative) <succ>
    bacterial outside --- Certainty = 0.0000 (Not Clear) <succ>
bacterial cytoplasm --- Certainty = 0.0000 (Not Clear) <succ>
```

[1808] The protein has homology with the following sequences in the GENPEPT database:

>GP:CAA17305 GB:AL021926 hypothetical protein Rv0111
[Mycobacterium tuberculosis]
Identities = 70/218 (32%), Positives = 104/218 (47%), Gaps = 12/218 (5%)

| | | |
|---|---|---|
| Query: 9 | VRITGLLLVLLYHFFKNSFPGGFVGVDIFFTFSGFLITALLIDEFSKTKKIDFVSFCRRR | 68 |
| | +R + LVL H GGF+GVD FF SGFLIT+LL+DE +T +ID F RR | |
| Sbjct: 39 | LRAIAVALVLASHGGIPGMGGGFIGVDAFFVLSGFLITSLLLDELGRTGRIDLSGFWIRR | 98 |
| Query: 69 | FYRIFPPLVLMVLVTIPFVFLVKSDFRASIGSQIMTALGFTSNFYEILTGGNYESQFI-P | 127 |
| | R+ P LVLMVL L + S + A +T+N+ + +Y +Q P | |
| Sbjct: 99 | ARRLLPALVLMVLTVSAARALFPDQALTGLRSDAIAAFLWTANWRFVAQNTDYFTQGAPP | 158 |
| Query: 128 | HLFVHTWSLSIEVHFYVLWGL----TVWLLSKRSKDQKQLRGTLFLISMGIFGVSFLTMF | 183 |
| | HTWSL +E +YV+W L LL+ R++ ++ R T+ + F ++ L | |
| Sbjct: 159 | SPLQHTWSLGVEEQYYVVWPLLLIGATLLLAARAR-RRCRRATVGGVRFAAFLIASLGTM | 217 |
| Query: 184 | VRAFFVDNFST------IYFSTLSHIFPFFLGAMVATI | 215 |
| | A F++ IYF T + +G+ A + | |
| Sbjct: 218 | ASATAAVAFTSAATRDRIYFGTDTRAQALLIGSAAAAL | 255 |

[1809] A related DNA sequence was identified in S. pyogenes <SEQ ID 879> which encodes the amino acid sequence <SEQ ID 880>. Analysis of this protein sequence reveals the following:

| Possible site: 46 | | |
|---|---|---|
| >>>Seems to have an uncleavable N-term signal seq | | |
| INTEGRAL | Likelihood = −10.83 | Transmembrane 325-341 (313-346) |
| INTEGRAL | Likelihood = −9.29 | Transmembrane 237-253 (234-258) |
| INTEGRAL | Likelihood = −7.91 | Transmembrane 166-182 (162-188) |
| INTEGRAL | Likelihood = −6.10 | Transmembrane 72-88 (68-92) |
| INTEGRAL | Likelihood = −4.09 | Transmembrane 264-280 (260-281) |
| INTEGRAL | Likelihood = −2.87 | Transmembrane 371-387 (370-390) |
| INTEGRAL | Likelihood = −2.66 | Transmembrane 34-50 (32-50) |
| INTEGRAL | Likelihood = −1.91 | Transmembrane 3-19 (3-19) |
| INTEGRAL | Likelihood = −0.85 | Transmembrane 136-152 (136-154) |

```
----- Final Results -----
  bacterial membrane --- Certainty = 0.5331 (Affirmative) <succ>
    bacterial outside --- Certainty = 0.0000 (Not Clear) <succ>
bacterial cytoplasm --- Certainty = 0.0000 (Not Clear) <succ>
```

[1810] An alignment of the GAS and GBS proteins is shown below:

| Identities = 167/226 (73%), Positives = 195/226 (85%) | | |
|---|---|---|
| Query: 1 | MRIKWFSLVRITGLLLVLLYHFFKNSFPGGFVGVDIFFTFSGFLITALLIDEFSKTKKID | 60 |
| | MRIKWFS VR+TGLLLVLLYHFFKN FPGGF+GVDIFFTFSG+LITALLIDE++K +ID | |
| Sbjct: 1 | MRIKWFSFVRVTGLLLVLLYHFFKNVFPGGFIGVDIFFTFSGYLITALLIDEYTKKESID | 60 |
| Query: 61 | FVSFCRRRFYRIFPPLVLMVLVTIPFVFLVKSDFRASIGSQIMTALGFTSNFYEILTGGN | 120 |
| | + F +RRFYRI PPLVLM+L+TIPF FL+K DF A+IGSQI LGFT+N YEILTG + | |
| Sbjct: 61 | IIGFLKRRFYRIVPPLVLMILLTIPFTFLIKKDFIANIGSQITAVLGFTTNIYEILTGSS | 120 |
| Query: 121 | YESQFIPHLFVHTWSLSIEVHFYVLWGLTVWLLSKRSKDQKQLRGTLFLISMGIFGVSFL | 180 |
| | YESQFIPHLFVHTWSL+IEVHFY+ WG+ VWLL++R + QKQLRG LFLIS+GIF +SFL | |
| Sbjct: 121 | YESQFIPHLFVHTWSLAIEVHFYLFWGVFVWLLARRKETQKQLRGLLFLISLGIFAISFL | 180 |
| Query: 181 | TMFVRAFFVDNFSTIYFSTLSHIFPFFLGAMVATISGIREITGRFK | 226 |
| | +MF+R+F NFS IYFS+LSH FPFFLGAM ATI+GI E T RF+ | |
| Sbjct: 181 | SMFIRSFMTSNFSLIYFSSLSHSFPFFLGAMFATITGINETTVRFQ | 226 |

[1811] Based on this analysis, it was predicted that these proteins and their epitopes could be useful antigens for vaccines or diagnostics.

### EXAMPLE 276

[1812] A DNA sequence (GBSx0302) was identified in S. agalactiae <SEQ ID 883> which encodes the amino acid sequence <SEQ ID 884>. Analysis of this protein sequence reveals the following:

```
Possible site: 38
>>> Seems to have a cleavable N-term signal seq.
----- Final Results -----
    bacterial outside --- Certainty = 0.3000 (Affirmative) <succ>
  bacterial membrane --- Certainty = 0.0000 (Not Clear) <succ>
bacterial cytoplasm --- Certainty = 0.0000 (Not Clear) <succ>
```

[1813] The protein has homology with the following sequences in the GENPEPT database:

| !GB:AE004818 hypothetical protein [Pseudomonas aerug . . . | | |
|---|---|---|
| !GB:AE004818 hypothetical protein [Pseudomonas aerug . . . | | |
| !GB:AE004818 hypothetical protein [Pseudomonas aerug . . . | | |
| !GB:AE004818 hypothetical protein [Pseudomonas aerug . . . | | |
| !GB:AE004818 hypothetical protein [Pseudomonas aerug . . . | | |
| >GP:AAG07403 GB:AE004818 hypothetical protein [Pseudomonas aeruginosa] | | |
| Identities = 33/80 (41%), Positives = 50/80 (62%) | | |
| Query: 45 | KYVGSIVNHHMTGKGKLTYENGDYYKGDFVNGVFEGKGTFVSVHGWSYTGDFKKGQPDGQ | 104 |
| | +Y G +V+ + G+G+L Y+NG +Y G F +G+ G GT+ G Y+G F G DGQ | |
| Sbjct: 39 | RYRGELVDGRLEGQGRLDYDNGAWYAGRFEHGLLHGHGTWQGADGSRYSGGFAAGLFDGQ | 98 |
| Query: 105 | GRLNAKNKKVYKGTFKQGIY | 124 |
| | GRL + VY+G F+QG+ | |
| Sbjct: 99 | GRLAMADGSVYQGGFRQGLF | 118 |
| Identities = 31/91 (34%), Positives = 46/91 (50%), Gaps = 2/91 (2%) | | |
| Query: 34 | QGVFSYDGGKIKYVGSIVNHHMTGKGKLTYENGDYYKGDFVNGVFEGKGTFVSVHGWSYT | 93 |
| | QG YD G Y G + + G G +G Y G F G+F+G+G G Y | |
| Sbjct: 52 | QGRLDYDNGAW-YAGRFEHGLLHGHGTWQGADGSRYSGGFAAGLFDGQGRLAMADGSVYQ | 110 |
| Query: 94 | GDFKKGQPDGQGRLNAKNKKVYKGTFKQGIY | 124 |
| | G F++G DG+G L + + Y+G F++G+Y | |
| Sbjct: 111 | GGFRQGLFDGEGSLEQQGTR-YRGGFRKGLY | 140 |
| Identities = 31/91 (34%), Positives = 42/91 (46%), Gaps = 1/91 (1%) | | |
| Query: 32 | SSQGVFSYDGGKIKYVGSIVNHHMTGKGKLTYENGDYYKGDFVNGVFEGKGTFVSVHGWS | 91 |
| | S QG G +Y GS + G+G + G+ Y G F +G GKG + G | |
| Sbjct: 141 | SGQGTLDGSDGS-RYQGSFRQGRLEGEGSFSDSQGNQYAGTFRDGQLNGKGRWSGPDGDR | 199 |
| Query: 92 | YTGDFKKGQPDGQGRLNAKNKKVYKGTFKQG | 122 |
| | Y G FK Q GQGR + + V+ G F +G | |
| Sbjct: 200 | YVGQFKDNQFHGQGRYESASGDVWIGRFSEG | 230 |
| Identities = 31/91 (34%), Positives = 45/91 (49%), Gaps = 4/91 (4%) | | |
| Query: 34 | QGVFSYDGGK----IKYVGSIVNHHMTGKGKLTYENGDYYKGDFVNGVFEGKGTFVSVHG | 89 |
| | QG+F +G +Y G +G+G L +G Y+G F G EG+G+F G | |
| Sbjct: 115 | QGLFDGEGSLEQQGTRYRGGFRKGLYSGQGTLDGSDGSRYQGSFRQGRLEGEGSFSDSQG | 174 |
| Query: 90 | WSYTGDFKKGQPDGQGRLNAKNKKVYKGTFK | 120 |
| | Y G F +GQ +G+GR + + Y G FK | |
| Sbjct: 175 | NQYAGTFRDGQLNGKGRWSGPDGDRYVGQFK | 205 |
| Identities = 28/87 (32%), Positives = 45/87 (51%), Gaps = 1/87 (1%) | | |
| Query: 34 | QGVFSYDGGKIKYVGSIVNHHMTGKGKLTYENGDYYKGDFVNGVFEGKGTFVSVHGWSYT | 93 |
| | +G FS G +Y G+ + + GKG+ + +GD Y G F + F G+G + S G + | |
| Sbjct: 166 | EGSFSDSQGN-QYAGTFRDGQLNGKGRWSGPDGDRYVGQFKDNQFHGQGRYESASGDVWI | 224 |
| Query: 94 | GDFKKGQPDGQGRLNAKNKKVYKGTFK | 120 |
| | G F +G +G G L + Y+G F+ | |
| Sbjct: 225 | GRFSEGALNGPGELLGADGSRYRGGFQ | 251 |
| Identities = 28/89 (31%), Positives = 43/89 (47%), Gaps = 2/89 (2%) | | |
| Query: 34 | QGVFSYDGGKIKYVGSIVNHHMTGKGKLTYENGDYYKGDFVNGVFEGKGTFVSVHGWSYT | 93 |
| | QG + G + Y G G+G L + G Y+G F G++ G+GT G Y | |
| Sbjct: 98 | QGRLAMADGSV-YQGGFRQGLFDGEGSLE-QQGTRYRGGFRKGLYSGQGTLDGSDGSRYQ | 155 |
| Query: 94 | GDFKKGQPDGQGRLNAKNKKVYKGTFKQG | 122 |
| | G F++G+ +G+G + Y GTF+ G | |
| Sbjct: 156 | GSFRQGRLEGEGSFSDSQGNQYAGTFRDG | 184 |
| Identities = 25/80 (31%), Positives = 37/80 (46%) | | |
| Query: 45 | KYVGSIVNHHMTGKGKLTYENGDYYKGDFVNGVFEGKGTFVSVHGWSYTGDFKKGQPDGQ | 104 |
| | +YVG ++ G+G+ +GD + G F G G G + G Y G F+ + GQ | |
| Sbjct: 199 | RYVGQFKDNQFHGQGRYESASGDVWIGRFSEGALNGPGELLGADGSRYRGGFQFWRFHGQ | 258 |
| Query: 105 | GRLNAKNKKVYKGTFKQGIY | 124 |
| | G L + Y+G F G Y | |
| Sbjct: 259 | GLLEQLDGTRYEGGFAAGAY | 278 |

[1814] A related DNA sequence was identified in S. pyogenes <SEQ ID 885> which encodes the amino acid sequence <SEQ ID 886>. Analysis of this protein sequence reveals the following:

| Possible site: 35 | | |
|---|---|---|
| >>> Seems to have an uncleavable N-term signal seq | | |
| INTEGRAL | Likelihood = −13.16 | Transmembrane 20-36 (12-41) |

```
----- Final Results -----
  bacterial membrane --- Certainty = 0.6265 (Affirmative) <succ>
    bacterial outside --- Certainty = 0.0000 (Not Clear) <succ>
bacterial cytoplasm --- Certainty = 0.0000 (Not Clear) <succ>
```

[1815] The protein has homology with the following sequences in the databases:

| >GP:BAA16606 GB:D90899 hypothetical protein [Synechocystis sp.] | | |
|---|---|---|
| Identities = 37/89 (41%), Positives = 49/89 (54%), Gaps = 6/89 (6%) | | |
| Query: 48 | KGRMHYT------GYVINHKMNGEGKLVYPNGDIYEGTFKDGLFEGKGTFTAKTGWLYNG | 101 |
| | KG YT G V+ ++NG GK Y NGD YEGT K+G +G+G F G Y G | |
| Sbjct: 141 | KGTFIYTNGDRCSGTVVQGELNGSGKCEYNNGDQYEGTLKNGQPDGEGIFRFAAGGEYEG | 200 |
| Query: 102 | EFHKGQANGKGVLKAKNNKVYKGIFKQGI | 130 |
| | EF G+ +G+G N ++G FKQG+ | |
| Sbjct: 201 | EFQSGEFSGQGTRIFANGNRFQGQFKQGL | 229 |

[1816] An alignment of the GAS and GBS proteins is shown below:

| Identities = 68/126 (53%), Positives = 93/126 (72%) | | |
|---|---|---|
| Query: 1 | MKNFKITRTHLEILSLIIIVVFGLSVFTLTTSSQGVFSYDGGKIKYVGSIVNHHMTGKGK | 60 |
| | +K + ITR LEI+S+I+I+V +SVF++ S++ +YD G++ Y G ++NH M G+GK | |
| Sbjct: 8 | VKKWSITRAKLEIVSVIVILVCAISVFSVRISNKTSLTYDKGRMHYTGYVINHKMNGEGK | 67 |
| Query: 61 | LTYENGDYYKGDFVNGVFEGKGTFVSVHGWSYTGDFKKGQPDGQGRLNAKNKKVYKGTFK | 120 |
| | L Y NGD Y+G F +G+FEGKGTF + GW Y G+F KGQ +G+G L AKN KVYKG FK | |
| Sbjct: 68 | LVYPNGDIYEGTFKDGLFEGKGTFTAKTGWLYNGEFHKGQANGKGVLKAKNNKVYKGIFK | 127 |
| Query: 121 | QGIYQK | 126 |
| | QGI+QK | |
| Sbjct: 128 | QGIFQK | 133 |

[1817] SEQ ID 884 (GBS139) was expressed in E. coli as a His-fusion product. SDS-PAGE analysis of total cell extract is shown in FIG. 19 (lane 3; MW 13 kDa). It was also expressed in E. coli as a GST-fusion product. SDS-PAGE analysis of total cell extract is shown in FIG. 22 (lane 2; MW 38.2 kDa), in FIG. 24 (lane 7; MW 38 kDa) and in FIG. 33 (lane 7; MW 38.2 kDa).

[1818] The GBS139-GST fusion product was purified (FIG. 200, lane 2) and used to immunise mice. The resulting antiserum was used for FACS (FIG. 287), which confirmed that the protein is immunoaccessible on GBS bacteria.

[1819] Based on this analysis, it was predicted that these proteins and their epitopes could be useful antigens for vaccines or diagnostics.

### EXAMPLE 277

[1820] A DNA sequence (GBSx0303) was identified in S. agalactiae <SEQ ID 887> which encodes the amino acid sequence <SEQ ID 888>. This protein is predicted to be holliday junction dna helicase ruvb (ruvB). Analysis of this protein sequence reveals the following:

```
Possible site: 59
>>> Seems to have no N-terminal signal sequence
----- Final Results -----
bacterial cytoplasm --- Certainty = 0.4386 (Affirmative) <succ>
  bacterial membrane --- Certainty = 0.0000 (Not Clear) <succ>
    bacterial outside --- Certainty = 0.0000 (Not Clear) <succ>
```

[1821] The protein has homology with the following sequences in the GENPEPT database:

| >GP:CAB75331 GB:Y15896 RuvB protein [Bacillus subtilis] | | |
|---|---|---|
| Identities = 196/322 (60%), Positives = 254/322 (78%) | | |
| Query: 3 | RFLDSDAMGDEELVERTLRPQYLREYIGQDKVKDQLKIFIEAAKLRDESLDHVLLFGPPG | 62 |
| | R + S+A E ++E++LRPQ L +YIGQ KVK+ L++FI+AAK+R E+LDHVLL+GPPG | |
| Sbjct: 4 | RLVSSEADNHESVIEQSLRPQNLAQYIGQHKVKENLRVFIDAAKMRQETLDHVLLYGPPG | 63 |
| Query: 63 | LGKTTMAFVIANELGVNLKQTSGPAIEKSGDLVAILNDLEPGDVLFIDEIHRMPMAVEEV | 122 |
| | LGKTT+A ++ANE+GV L+ TSGPAIE+ GDL AlL LEPGDVLFIDEIHR+ ++EEV | |
| Sbjct: 64 | LGKTTLASIVANEMGVELRTTSGPAIERPGDLAAILTALEPGDVLFIDEIHRLHRSIEEV | 123 |
| Query: 123 | LYSAMEDFYIDIMIGAGETSRSVHLDLPPFTLIGATTRAGMLSNPLRARFGITGHMEYYE | 182 |
| | LY AMEDF +DI+IG G ++RSV LDLPPFTL+GATTR G+L+ PLR RFG+ +EYY | |
| Sbjct: 124 | LYPAMEDFCLDIVIGKGPSARSVRLDLPPFTLVGATTRVGLLTAPLRDRFGVMSRLEYYT | 183 |
| Query: 183 | ENDLTEIIERTADIFEMKITYEAASELARRSRGTPRIANRLLKRVRDYAQIMGDGLIDDN | 242 |
| | + +L +I+ RTAD+FE++I +A E+ARRSRGTPR+ANRLL+RVRD+AQ++GD I ++ | |
| Sbjct: 184 | QEELADIVTRTADVFEVEIDKPSALEIARRSRGTPRVANRLLRRVRDFAQVLGDSRITED | 243 |
| Query: 243 | ITDKALTMLDVDHEGLDYVDQKILRTMIEMYNGGPVGLGTLSVNIAEERDTVEDMYEPYL | 302 |
| | I+ AL L VD GLD++D K+L MIE +NGGPVGL T+S I EE T+ED +YEPYL | |
| Sbjct: 244 | ISQNALERLQVDRLGLDHIDHKLLMGMIEKFNGGPVGLDTISATIGEESHTIEDVYEPYL | 303 |
| Query: 303 | IQKGFIMRTRTGRVATVKAYEH | 324 |
| | +Q GFI RT GR+ T Y H | |
| Sbjct: 304 | LQIGFIQRTPRGRIVTPAVYHH | 325 |

[1822] A related GBS nucleic acid sequence <SEQ ID 10943> which encodes amino acid sequence <SEQ ID 10944> was also identified.

[1823] A related DNA sequence was identified in S. pyogenes <SEQ ID 889> which encodes the amino acid sequence <SEQ ID 890>. Analysis of this protein sequence reveals the following:

```
Possible site: 26
>>> Seems to have no N-terminal signal sequence
----- Final Results -----
bacterial cytoplasm --- Certainty = 0.0686 (Affirmative) <succ>
  bacterial membrane --- Certainty = 0.0000 (Not Clear) <succ>
    bacterial outside --- Certainty = 0.0000 (Not Clear) <succ>
```

[1824] An alignment of the GAS and GBS proteins is shown below:

| Identities = 282/327 (86%), Positives = 306/327 (93%) | | |
|---|---|---|
| Query: 1 | MTRFLDSDAMGDEELVERTLRPQYLREYIGQDKVKDQLKIFIEAAKLRDESLDHVLLFGP | 60 |
| | M R LD++ MG+EE +RTLRPQYL EYIGQDKVK+Q IFIEAAK RDESLDHVLLFGP | |
| Sbjct: 25 | MARILDNNVMGNEEFSDRTLRPQYLHEYIGQDKVKEQFAIFIEAAKRRDESLDHVLLFGP | 84 |
| Query: 61 | PGLGKTTMAFVIANELGVNLKQTSGPAIEKSGDLVAILNDLEPGDVLFIDEIHRMPMAVE | 120 |
| | PGLGKTTMAFVIANELGVNLKQTSGPA+EK+GDLVAILN+LEPGD+LFIDEIHRMPM+VE | |
| Sbjct: 85 | PGLGKTTMAFVIANELGVNLKQTSGPAVEKAGDLVAILNELEPGDILFIDEIHRMPMSVE | 144 |
| Query: 121 | EVLYSAMEDFYIDIMIGAGETSRSVHLDLPPFTLIGATTRAGMLSNPLRARFGITGHMEY | 180 |
| | EVLYSAMEDFYIDIMIGAG+TSRS+HLDLPPFTLIGATTRAGMLSNPLRARFGITGHMEY | |
| Sbjct: 145 | EVLYSAMEDFYIDIMIGAGDTSRSIHLDLPPFTLIGATTRAGMLSNPLRARFGITGHMEY | 204 |
| Query: 181 | YEENDLTEIIERTADIFEMKITYEAASELARRSRGTPRIANRLLKRVRDYAQIMGDGLID | 240 |
| | Y+E DLTEI+ERTA IFE+KI +EAA +LA RSRGTPRIANRLLKRVRDYAQI+GDG+I | |
| Sbjct: 205 | YQEKDLTEIVERTATIFEIKIDHEAARKLACRSRGTPRIANRLLKRVRDYAQIIGDGIIT | 264 |
| Query: 241 | DNITDKALTMLDVDHEGLDYVDQKILRTMIEMYNGGPVGLGTLSVNIAEERDTVEDMYEP | 300 |
| | ITD+ALTMLDVD EGLDY+DQKILRTMIEMY GGPVGLGTLSVNIAEER+TVE+MYEP | |
| Sbjct: 265 | AQITDRALTMLDVDREGLDYIDQKILRTMIEMYQGGPVGLGTLSVNIAEERNTVEEMYEP | 324 |
| Query: 301 | YLIQKGFIMRTRTGRVATVKAYEHLGY | 327 |
| | YLIQKGF+MRTRTGRVAT KAY HLGY | |
| Sbjct: 325 | YLIQKGFLMRTRTGRVATQKAYRHLGY | 351 |

[1825] Based on this analysis, it was predicted that these proteins and their epitopes could be useful antigens for vaccines or diagnostics.

### EXAMPLE 278

[1826] A DNA sequence (GBSx0304) was identified in S. agalactiae <SEQ ID 891> which encodes the amino acid sequence <SEQ ID 892>. Analysis of this protein sequence reveals the following:

| Possible site: 43 | | |
|---|---|---|
| >>> Seems to have no N-terminal signal sequence | | |
| INTEGRAL | Likelihood = −2.87 | Transmembrane 157-173 (157-174) |
| INTEGRAL | Likelihood = −1.49 | Transmembrane 205-221 (205-222) |

```
----- Final Results -----
  bacterial membrane --- Certainty = 0.2147 (Affirmative) <succ>
    bacterial outside --- Certainty = 0.0000 (Not Clear) <succ>
bacterial cytoplasm --- Certainty = 0.0000 (Not Clear) <succ>
```

[1827] The protein has no significant homology with any sequences in the GENPEPT database.

[1828] A related DNA sequence was identified in S. pyogenes <SEQ ID 893> which encodes the amino acid sequence <SEQ ID 894>. Analysis of this protein sequence reveals the following:

```
Possible site: 56
>>> Seems to have no N-terminal signal sequence
----- Final Results -----
bacterial cytoplasm --- Certainty = 0.3097 (Affirmative) <succ>
  bacterial membrane --- Certainty = 0.0000 (Not Clear) <succ>
    bacterial outside --- Certainty = 0.0000 (Not Clear) <succ>
```

[1829] An alignment of the GAS and GBS proteins is shown below:

| Identities = 130/303 (42%), Positives = 202/303 (65%) | | |
|---|---|---|
| Query: 1 | MLKHFGSKVRNLRVTRNITREDFCGDETELSVRQLARIESGQSIPNLTKAHYIAKQLNVK | 60 |
| | ML+HFG KV+ LR+ + I+RED CGDE+ELSVRQLARIE GQSIP+L+K +IAK LNV | |
| Sbjct: 1 | MLEHFGGKVKVLRLEKRISREDLCGDESELSVRQLARIELGQSIPSLSKVIFIAKALNVS | 60 |
| Query: 61 | LDILTGGESLELPKRYKELKYLILRIPTYADAERLKLRECQFDHIFEEFYDNLPEDECLA | 120 |
| | + LT G LELPKRYKELKYLILR PTY D +L++RE QFD IFE++YD LPE+E + | |
| Sbjct: 61 | VGYLTDGADLELPKRYKELKYLILRTPTYMDDGKLQVREEQFDEIFEDYYDKLPEEEKII | 120 |
| Query: 121 | IDSLQAKFEVYQTGDINFGVEVLCECFDKVKYKEKYTLNDLIIIDLFLTCAVVSKFNNRA | 180 |
| | ID LQA + + + NFG+++L E F+++K K ++ NDLI+++L+L + + + | |
| Sbjct: 121 | IDCLQATLDTLLSENTNFGIDLLQEYFNQIKTKVRFRQNDLILLELYLAYLDIEGMDGQY | 180 |
| Query: 181 | FTKEVFQTICKTLISQNHKLTAEDLFWFNHVLLNCVFVGLCLNSEECLAEMLEVSRQTMV | 240 |
| | K + ++ L Q + ++LF N ++++ + L N + L + +E+S++`M | |
| Sbjct: 181 | SDKIFYDSLLDNLSEQFEQFELDELFIVNKIIIDISSLSLKNNRLDNLEKAIEMSQKIMA | 240 |
| Query: 241 | STHDFHKMPLYFMYQWKYFITIDNDIKSAENAYQQSIMFSKMIDDKHLIKKLELEWQEDI | 300 |
| | D+++MP+ + +WKYF+ DI AE ++ ++ +F++M D++L KL EW++D+ | |
| Sbjct: 241 | KIQDWNRMPILKLIEWKYFLIKQKDIIKAEQSFMKACLFAQMTADQYLENKLIQEWEKDV | 300 |
| Query: 301 | TGH | 303 |
| | + | |
| Sbjct: 301 | KSY | 303 |

[1830] SEQ ID 892 (GBS319) was expressed in E. coli as a His-fusion product. SDS-PAGE analysis of total cell extract is shown in FIG. 40 (lane 4; MW 37 kDa). It was also expressed in E. coli as a GST-fusion product. SDS-PAGE analysis of total cell extract is shown in FIG. 46 (lane 7; MW 62 kDa).

[1831] Based on this analysis, it was predicted that these proteins and their epitopes could be useful antigens for vaccines or diagnostics.

### EXAMPLE 279

[1832] A DNA sequence (GBSx0305) was identified in S. agalactiae <SEQ ID 895> which encodes the amino acid sequence <SEQ ID 896>. This protein is predicted to be adenylosuccinate lyase (purB). Analysis of this protein sequence reveals the following:

```
Possible site: 35
>>> Seems to have no N-terminal signal sequence
----- Final Results -----
bacterial cytoplasm --- Certainty = 0.3358 (Affirmative) <succ>
  bacterial membrane --- Certainty = 0.0000 (Not Clear) <succ>
    bacterial outside --- Certainty = 0.0000 (Not Clear) <succ>
```

[1833] The protein has homology with the following sequences in the GENPEPT database:

| >GP:BAB04344 GB:AP001509 adenylosuccinate lyase [Bacillus halodurans] | | |
|---|---|---|
| Identities = 326/430 (75%), Positives = 366/430 (84%) | | |
| Query: 1 | MIERYSRPEMAAIWTEENKYRAWLEVEILADEAWAELGEIPKEDVAKIREKADFDIDRIL | 60 |
| | MIERY+RPEM AIWTEEN+Y+AWLEVEI+A EAWAELGEIPKEDV KIRE A FD++RIL | |
| Sbjct: 1 | MIERYTRPEMGAIWTEENRYQAWLEVEIVACEAWAELGEIPKEDVKKIREHASFDVERIL | 60 |
| Query: 61 | EIEQDTRHDVVAFTRAVSETLGEERKWVHYGLTSTDVVDTAYGYLYKQANDIIRRDLENF | 120 |
| | EIEQ+TRHDVVAFTRAVSETLGEERKWVHYGLTSTDVVDTA YL KQAN+II DL F | |
| Sbjct: 61 | EIEQETRHDVVAFTRAVSETLGEERKWVHYGLTSTDVVDTALSYLLKQANEIIEADLVRF | 120 |
| Query: 121 | TNIVADKAKEHKFTIMMGRTHGVHAEPTTFGLKLATWYSEMKRNIERFEHAAAGVEAGKI | 180 |
| | +I+ +KA EHK+T+MMGRTHGVHAEPTTFGLKLA WY EMKRN+ERF AA GV GK+ | |
| Sbjct: 121 | LDILKEKALEHKYTVMMGRTHGVHAEPTTFGLKLALWYEEMKRNLERFRLAAEGVRVGKL | 180 |
| Query: 181 | SGAVGNFANIPPFVEQYVCDKLGIRPQEISTQVLPRDLHAEYFAVLASIATSIERMATEI | 240 |
| | SGAVG +ANI PFVEQYVC+KLG+ ISTQ L RD HAEY A LA IATSIE+ A EI | |
| Sbjct: 181 | SGAVGTYANIDPFVEQYVCEKLGLERAPISTQTLQRDRHAEYMATLALIATSIEKFAVEI | 240 |
| Query: 241 | RGLQKSEQREVEEFFAKGQKGSSAMPHKRNPIGSENMTGLARVIRGHMVTAYENVALWHE | 300 |
| | RGLQKSE REVEE+FAKGQKGSSAMPHKRNPIGSENMTG+ARV+RGHM+ AYENV LWHE | |
| Sbjct: 241 | RGLQKSETREVEEYFAKGQKGSSAMPHKRNPIGSENMTGIARVVRGHMLAAYENVPLWHE | 300 |
| Query: 301 | RDISHSSAERIITPDTTILIDYMLNRFGNIVKNLTVFPENMMRNMESTFGLIYSQRVMLK | 360 |
| | RDISHSSAERII PD TI I+YMLNRFGNIVKNLTVFPENM RNM T+GLIYSQRV+L | |
| Sbjct: 301 | RDISHSSAERIILPDATIAINYMLNRFGNIVKNLTVFPENMKRNMTRTYGLIYSQRVLLS | 360 |
| Query: 361 | LIEKGMTREEAYDLVQPKTAYSWDNQVDFKPLLEEDTKVTSCLTQEEIDELFNPIYYTKR | 420 |
| | LI+KGM REEAYDLVQPK +W+ V F+ L+E++ ++TS L+ EEI+ F+ ++ K | |
| Sbjct: 361 | LIDKGMVREEAYDLVQPKAMEAWEKGVQFRELVEQEERITSVLSPEEIEACFDYNHHLKH | 420 |
| Query: 421 | VDDIFERLGL | 430 |
| | VD IFERLGL | |
| Sbjct: 421 | VDTIFERLGL | 430 |

[1834] A related DNA sequence was identified in S. pyogenes <SEQ ID 897> which encodes the amino acid sequence <SEQ ID 898>. Analysis of this protein sequence reveals the following:

```
Possible site: 35
>>> Seems to have no N-terminal signal sequence
----- Final Results -----
                            bacterial cytoplasm --- Certainty = 0.3358(Affirmative) < succ>
                              bacterial membrane --- Certainty = 0.0000(Not Clear) < succ>
                                bacterial outside --- Certainty = 0.0000(Not Clear) < succ>
```

[1835] An alignment of the GAS and GBS proteins is shown below:

| Identities = 422/430 (98%), Positives = 428/430 (99%) | | | |
|---|---|---|---|
| Query: | 1 | MIERYSRPEMAAIWTEENKYRAWLEVEILADEAWAELGEIPKEDVAKIREKADFDIDRIL | 60 |
| | | M+ERYSRPEMAAIWTEENKY AWLEVEILADEAWAELGEIPKEDVAKIREKADFDIDRIL | |
| Sbjct: | 1 | MLERYSRPEMAAIWTEENKYHAWLEVEILADEAWAELGEIPKEDVAKIREKADFDIDRIL | 60 |
| Query: | 61 | EIEQDTRHDVVAFTRAVSETLGEERKWVHYGLTSTDVVDTAYGYLYKQANDIIRRDLENF | 120 |
| | | EIEQDTRHDVVAFTRAVSETLGEERKWVHYGLTSTDVVDTAYGYLYKQANDIIRRDLENF | |
| Sbjct: | 61 | EIEQDTRHDVVAFTRAVSETLGEERKWVHYGLTSTDVVDTAYGYLYKQANDIIRRDLENF | 120 |
| Query: | 121 | TNIVADKAKEHKFTIMMGRTHGVHAEPTTFGLKLATWYSEMKRNIERFEHAAAGVEAGKI | 180 |
| | | TNIVADKA+EHK TIMMGRTHGVHAEPTTFGLKLATWYSEMKRNIERFEHAAAGVEAGKI | |
| Sbjct: | 121 | TNIVADKAREHKMTIMMGRTHGVHAEPTTFGLKLATWYSEMKRNIERFEHAAAGVEAGKI | 180 |
| Query: | 181 | SGAVGNFANIPPFVEQYVCDKLGIRPQEISTQVLPRDLHAEYFAVLASIATSIERMATEI | 240 |
| | | SGAVGNFANIPPFVE+YVCDKLGIRPQEISTQVLPRDLHAEYFAVLASIATSIERMATEI | |
| Sbjct: | 181 | SGAVGNFANIPPFVEEYVCDKLGIRPQEISTQVLPRDLHAEYFAVLASIATSIERMATEI | 240 |
| Query: | 241 | RGLQKSEQREVEEFFAKGQKGSSAMPHKRNPIGSENMTGLARVIRGHMVTAYENVALWHE | 300 |
| | | RGLQKSEQREVEEFFAKGQKGSSAMPHKRNPIGSENMTGLARVIRGHMVTAYENV+LWHE | |
| Sbjct: | 241 | RGLQKSEQREVEEFFAKGQKGSSAMPHKRNPIGSENMTGLARVIRGHMVTAYENVSLWHE | 300 |
| Query: | 301 | RDISHSSAERIITPDTTILIDYMLNRFGNIVKNLTVFPENMMRNMESTFGLIYSQRVMLK | 360 |
| | | RDISHSSAERIITPDTTILIDYMLNRFGNIVKNLTVFPENMMRNMESTFGLIYSQRVMLK | |
| Sbjct: | 301 | RDISHSSAERIITPDTTILIDYMLNRFGNIVKNLTVFPENMMRNMESTFGLIYSQRVMLK | 360 |
| Query: | 361 | LIEKGMTREEAYDLVQPKTAYSWDNQVDFKPLLEEDTKVTSCLTQEEIDELFNPIYYTKR | 420 |
| | | LIEKGMTREEAYDLVQPKTAYSWDNQVDFKPLLEEDTKVTSCLTQEEIDELFNPIYYTKR | |
| Sbjct: | 361 | LIEKGMTREEAYDLVQPKTAYSWDNQVDFKPLLEEDTKVTSCLTQEEIDELFNPIYYTKR | 420 |
| Query: | 421 | VDDIFERLGL | 430 |
| | | VDDIF+RLG+ | |
| Sbjct: | 421 | VDDIFKRLGI | 430 |

[1836] Based on this analysis, it was predicted that these proteins and their epitopes could be useful antigens for vaccines or diagnostics.

### EXAMPLE 280

[1837] A DNA sequence (GBSx0306) was identified in S. agalactiae <SEQ ID 899> which encodes the amino acid sequence <SEQ ID 900>. Analysis of this protein sequence reveals the following:

| Possible site: 45 | | | | |
|---|---|---|---|---|
| >>> Seems to have no N-terminal signal sequence | | | | |
| | INTEGRAL | Likelihood = −16.24 | Transmembrane | 145-161 (119-167) |
| | INTEGRAL | Likelihood = −9.98 | Transmembrane | 125-141 (119-144) |
| | INTEGRAL | Likelihood = −9.29 | Transmembrane | 28-44 (23-51) |
| | INTEGRAL | Likelihood = −7.01 | Transmembrane | 196-212 (193-220) |
| | INTEGRAL | Likelihood = −6.21 | Transmembrane | 96-112 (88-116) |
| | INTEGRAL | Likelihood = −5.79 | Transmembrane | 249-265 (246-266) |
| | INTEGRAL | Likelihood = −2.87 | Transmembrane | 222-238 (222-238) |
| | INTEGRAL | Likelihood = −2.28 | Transmembrane | 279-295 (278-295) |

```
----- Final Results -----
                              bacterial membrane --- Certainty = 0.7456(Affirmative) < succ>
                                bacterial outside --- Certainty = 0.0000(Not Clear) < succ>
                            bacterial cytoplasm --- Certainty= 0.0000(Not Clear) < succ>
```

[1838] The protein has homology with the following sequences in the GENPEPT database:

| >GP: BAB13498 GB: AB028634 RNA polymerase [Flammulina velutipes] | | | |
|---|---|---|---|
| Identities = 83/336 (24%), Positives = 150/336 (43%), Gaps = 40/336 (11%) | | | |
| Query: | 152 | ILLLIAFVSIGKNR-VYNFVQNLNYFEEVIWNYFEENPVKIKEKSLIIK-----FLLTIS | 205 |
| | | IL L SI NR + ++ N ++ N+F+ + +K K L+I F++ +S | |
| Sbjct: | 133 | ILFLYLIYSILINRFILKWLDNSGIIYKININWFKNHMIKHINKMLVINIKFFNFIIKLS | 192 |
| Query: | 206 | FVFVIDFAMVRL-----LNFNIKFSTILACSAILLAWLYQN-----------KSVTEPFL | 249 |
| | | + +I +++ L +NF+I+ I I ++ S+ F | |
| Sbjct: | 193 | IITIIGISIMELFGIFGINFDIRIIIINYLKTINSGKIHLTIINMDQYSVLENSIHTIFY | 252 |
| Query: | 250 | LKKLVIYFIFFIATLIGNLKN-ELSILETPLLFISIFFTMDRIIALSKEMRDLI--ISKS | 306 |
| | | + L+I+ IF L N+KN + +I +L+I IF I ++DL+ ++K | |
| Sbjct: | 253 | INLLIIFLIFISLILYRNVKNIDTNIKRWIILYILIFLINIIFIFNHIYIKDLMDNLNKY | 312 |
| Query: | 307 | ILFYYDHENIKPSILLSEIKEIKYLENVDIGE---LELVRQMVIRLRLELEEEFLILSDI | 363 |
| | | IL Y D I S+ L ++K L+ ++I + V+ + I+ ++E L + I | |
| Sbjct: | 313 | ILDYMDLHIIVNSLFLFNKFDVK-LKRINIYKSYSTVTVKDLEIKSKIEERSNELDIKLI | 371 |
| Query: | 364 | YMKNG-YEKYIQFVQGNVYFINLE--LDKIPNYTNLKLILESIFD----HNNQKIFIPKL | 416 |
| | | K G YE YI ++ N+ ++ E L P Y N +E + + + F+ K+ | |
| Sbjct: | 372 | IAKYGSYENYINSIE-NINIVDEEFILKNYPEYINDSKFIEFLMELEPLFRDHTEFVKKI | 430 |
| Query: | 417 | YEEYIYILISLGEVEKAKEIL---KEVSDYLTEESL | 449 |
| | | YE L + K+IL KE+ DY+ + +L | |
| Sbjct: | 431 | YENLNSTNEKLEFLLANKDILSENKEIFDYVLQLNL | 466 |

[1839] Based on this analysis, it was predicted that this protein and its epitopes, could be useful antigens for vaccines or diagnostics.

### EXAMPLE 281

[1840] A DNA sequence (GBSx0308) was identified in S. agalactiae <SEQ ID 901> which encodes the amino acid sequence <SEQ ID 902>. Analysis of this protein sequence reveals the following:

Possible site: 37
>>> Seems to have no N-terminal signal sequence
----- Final Results -----
bacterial cytoplasm --- Certainty = 0.3307 (Affirmative) < succ>
bacterial membrane --- Certainty = 0.0000 (Not Clear) < succ>
bacterial outside --- Certainty = 0.0000 (Not Clear) < succ>

[1841] The protein has no significant homology with any sequences in the GENPEPT database.

[1842] No corresponding DNA sequence was identified in S. pyogenes.

[1843] Based on this analysis, it was predicted that this protein and its epitopes, could be useful antigens for vaccines or diagnostics.

### EXAMPLE 282

[1844] A DNA sequence (GBSx0309) was identified in S. agalactiae <SEQ ID 903> which encodes the amino acid sequence <SEQ ID 904>. This protein is predicted to be purK (purK). Analysis of this protein sequence reveals the following:

Possible site: 34
>>> Seems to have no N-terminal signal sequence
----- Final Results -----
bacterial cytoplasm --- Certainty = 0.0334 (Affirmative) < succ>
bacterial membrane --- Certainty = 0.0000 (Not Clear) < succ>
bacterial outside --- Certainty = 0.0000 (Not Clear) < succ>

[1845] A related GBS nucleic acid sequence <SEQ ID 9461> which encodes amino acid sequence <SEQ ID 9462> was also identified.

[1846] The protein has homology with the following sequences in the GENPEPT database:

| >GP: CAA04376 GB: AJ000883 purk [Lactococcus lactis] | | | |
|---|---|---|---|
| Identities = 208/347 (59%), Positives = 258/347 (73%), Gaps = 3/347 (0%) | | | |
| Query: | 14 | NSFKTIGIIGGGQLGQMMAIAAIYMGHKVITLDPASDCPASRVS-EVIVAPYDDVEALGT | 72 |
| | | N+ +TIGIIGGGQLGQMMAIAA YMGHKVITLDP +C A++VS E+IVAPYDDVE L | |
| Sbjct: | 4 | NTKQTIGIIGGGQLGQMMAIAAQYMGHKVITLDPNPNCSAAKVSDELIVAPYDDVENLLR | 63 |
| Query: | 73 | LAARCDVLTYEFENVDADGLDAVVSAGQLPQGTDLLRISQNRIFEKDFLANKAGVTVAPY | 132 |
| | | LA CDV+TYEFENV A L + ++PQG LL I+QNR FEK+FL N+A V VAP+ | |
| Sbjct: | 64 | LAYACDVITYEFENVSAKALHEIEGCVRIPQGIRLLEITQNRRFEKEFLTNEAKVNVAPW | 123 |
| Query: | 133 | KVVTSSLDLEGLDLTKTYVLKTATGGYDGHGQKVIRSAEDLPEAQQLANSAQCVLEEFVN | 192 |
| | | ++V S+ L +T+ VLKT TGGYDGHGQ V+ + E L A+ L ++CVLE+F++ | |
| Sbjct: | 124 | QLVDSAEKLPET-VTRKQVLKTTTGGYDGHGQVVLNTDEKLSAAKSLTELSECVLEDFIS | 182 |
| Query: | 193 | FDLEISVIVSGNGQDVTVFPVQENIHRNNILSKTIVPARISDQLADKAKEMAVQIAKKLQ | 252 |
| | | F+ EISVI+SGNG + VFP+ EN HR NIL +TI PARIS ++ + A ++A IA+KL+ | |
| Sbjct: | 183 | FEREISVIISGNGHEYVVFPLAENEHRENILHQTISPARISAEITENAYKIATSIAEKLE | 242 |
| Query: | 253 | LSGTLCVEMFATAD-DIIVNEIAPRPHNSGHYSIEACDFSQFDTHILGVLGAPLPPIKLH | 311 |
| | | LSG LCVEMF TAD I VNE+APRPHNSGH++IEACDF+QFD HI G+LG LP KL | |
| Sbjct: | 243 | LSGVLCVEMFLTADGQIYVNELAPRPHNSGHFTIEACDFNQFDLHIKGILGEDLPEPKLL | 302 |
| Query: | 312 | APAVMFNVLGQHVQQAIDHVAQNPSAHLHMYGKLEAKHNRKMGHVTV | 358 |
| | | PA+M NVLGQHV+ ++ H H YGK +AKHNRKMGHVT+ | |
| Sbjct: | 303 | KPAIMLNVLGQHVEAVKKLNHEHADWHQHDYGKADAKHNRKMGHVTI | 349 |

[1847] A related DNA sequence was identified in S. pyogenes <SEQ ID 905> which encodes the amino acid sequence <SEQ ID 906>. Analysis of this protein sequence reveals the following:

Possible site: 34
>>> Seems to have no N-terminal signal sequence
----- Final Results -----
bacterial cytoplasm --- Certainty = 0.0334 (Affirmative) < succ>
bacterial membrane --- Certainty = 0.0000 (Not Clear) < succ>
bacterial outside --- Certainty = 0.0000 (Not Clear) < succ>

[1848] An alignment of the GAS and GBS proteins is shown below:

| Identities = 344/369 (93%), Positives = 353/369 (95%) | | | |
|---|---|---|---|
| Query: | 1 | MRNKEKSQRSQAMNSFKTIGIIGGGQLGQMMAIAAIYMGHKVITLDPASDCPASRVSEVI | 60 |
| | | MRNKEKSQRSQ +NSFKTIGIIGGGQLGQMMAIAAIYMGHKVITLDPASD PASRVSEVI | |
| Sbjct: | 1 | MRNKEKSQRSQVVNSFKTIGIIGGGQLGQMMAIAAIYMGHKVITLDPASDSPASRVSEVI | 60 |
| Query: | 61 | VAPYDDVEALGTLAARCDVLTYEFENVDADGLDAVVSAGQLPQGTDLLRISQNRIFEKDF | 120 |
| | | VAPYDDVEALG LAARCDVLTYEFENVDADGLDAVVSA QLPQGTDLLRISQNRI EKDF | |
| Sbjct: | 61 | VAPYDDVEALGQLAARCDVLTYEFENVDADGLDAVVSACQLPQGTDLLRISQNRIVEKDF | 120 |
| Query: | 121 | LANKAGVTVAPYKVVTSSLDLEGLDLTKTYVLRTATGGYDGHGQKVIRSAEDLPEAQQLA | 180 |
| | | LANKAGVTVAPYKVVTSSLDL GLDLTKTYVLKT TGGYDGHGQK+IRSAEDLPEAQQLA | |
| Sbjct: | 121 | LANKAGVTVAPYKVVTSSLDLGGLDLTKTYVLKTETGGYDGHGQKIIRSAEDLPEAQQLA | 180 |
| Query: | 181 | NSAQCVLEEFVNFDLEISVIVSGNGQDVTVFPVQENIHRNNILSKTIVPARISDQLADKA | 240 |
| | | NSAQCVLEEFVNFDLEISVIVSGNG+DVTVFPVQENIHRNNILSKTIVPARISDQLADKA | |
| Sbjct: | 181 | NSAQCVLEEFVNFDLEISVIVSGNGKDVTVFPVQENIHRNNILSKTIVPARISDQLADKA | 240 |
| Query: | 241 | KEMAVQIAKKLQLSGTLCVEMFATADDIIVNEIAPRPHNSGHYSIEACDFSQFDTHILGV | 300 |
| | | K+ AVQIAKKLQLSGTLCVEMF TADDIIVNEIAPRPHNSG YSIEACDFSQFDTHILGV | |
| Sbjct: | 241 | KKTAVQIAKKLQLSGTLCVEMFTTADDIIVNEIAPRPHNSGRYSIEACDFSQFDTHILGV | 300 |
| Query: | 301 | LGAPLPPIKLHAPAVMFNVLGQHVQQAIDHVAQNPSAHLHMYGKLEAKHNRKMGHVTVFS | 360 |
| | | LGAPLP I+LHAPAVM NVLGQHVQQA D+VA+NPSAHLHMYGKLEAKHNRKMGHVTVF+ | |
| Sbjct: | 301 | LGAPLPQIQLHAPAVMLNVLGQHVQQATDYVAKNPSAHLHMYGKLEAKHNRKMGHVTVFA | 360 |
| Query: | 361 | DVPDEVEEF | 369 |
| | | DEV+EF | |
| Sbjct: | 361 | KDADEVKEF | 369 |

[1849] Based on this analysis, it was predicted that these proteins and their epitopes could be useful antigens for vaccines or diagnostics.

### EXAMPLE 283

[1850] A DNA sequence (GBSx0310) was identified in S. agalactiae <SEQ ID 907> which encodes the amino acid sequence <SEQ ID 908>. This protein is predicted to be phosphoribosylaminoimidazole carboxylase catalytic subunit (purE). Analysis of this protein sequence reveals the following:

```
Possible site: 45
>>> Seems to have no N-terminal signal sequence
----- Final Results -----
                            bacterial cytoplasm --- Certainty = 0.3572(Affirmative) < succ>
                              bacterial membrane --- Certainty = 0.0000(Not Clear) < succ>
                                bacterial outside --- Certainty = 0.0000(Not Clear) < succ>
```

[1851] The protein has homology with the following sequences in the GENPEPT database:

| >GP: CAB12462 GB: Z99107 phosphoribosylaminoimidazole carboxylase I | | | |
|---|---|---|---|
| [Bacillus subtilis] | | | |
| Identities = 106/162 (65%), Positives = 128/162 (78%) | | | |
| Query: | 33 | MQPIISIIMGSKSDWTTMQKTAEVLDNFGIAYEKKVVSAHRTPDLMFKHAEEARGRGIKI | 92 |
| | | MQP++ IIMGS SDW TM+ ++LD + YEKKVVSAHRTPD MF++AE AR RGIK+ | |
| Sbjct: | 1 | MQPLVGIIMGSTSDWETMKHACDILDELNVPYEKKVVSAHRTPDFMFEYAETARERGIKV | 60 |
| Query: | 93 | IIAGAGGAAHLPGMVAAKTTLPVIGVPVKSRALSGLDSLYSIVQMPGGVPVATMAIGEAG | 152 |
| | | IIAGAGGAAHLPGM AAKTTLPVIGVPV+S+AL+G+DSL SIVQMPGGVPVAT +IG+AG | |
| Sbjct: | 61 | IIAGAGGAAHLPGMTAAKTTLPVIGVPVQSKALNGMDSLLSIVQMPGGVPVATTSIGKAG | 120 |
| Query: | 153 | ATNAALTALRILSIEDQNLADALAHFHEEQGKIAEESSNELI | 194 |
| | | A NA L A +ILS D++LA L E + ESS++L+ | |
| Sbjct: | 121 | AVNAGLLAAQILSAFDEDLARKLDERRENTKQTVLESSDQLV | 162 |

[1852] A related DNA sequence was identified in S. pyogenes <SEQ ID 909> which encodes the amino acid sequence <SEQ ID 910>. Analysis of this protein sequence reveals the following:

| Possible site: 57 | | | | |
|---|---|---|---|---|
| >>> Seems to have no N-terminal signal sequence | | | | |
| | INTEGRAL | Likelihood = −3.08 | Transmembrane | 36-52 (34-52) |

```
----- Final Results -----
                              bacterial membrane --- Certainty = 0.2232(Affirmative) < succ>
                                bacterial outside --- Certainty = 0.0000(Not Clear) < succ>
                            bacterial cytoplasm --- Certainty = 0.0000(Not Clear) < succ>
```

[1853] The protein has homology with the following sequences in the databases:

| >GP: CAA04375 GB: AJ000883 purE [Lactococcus lactis] | | | |
|---|---|---|---|
| Identities = 105/158 (66%), Positives = 131/158 (82%) | | | |
| Query: | 46 | ISIIMGSKSDWATMQKTAEVLDNFGIAYEKKVVSAHRTPDLMFKHAEEARGRGIKIIIAG | 105 |
| | | ++IIMG SDWATM++TA++LD+FG+AYEKKVVSAHRTP LM + + +AR RG K+IIAG | |
| Sbjct: | 4 | VAIIMGCSSDWATMKETAKILDDFGLAYEKKVVSAHRTPALMAEFSSQARERGYKVIIAG | 63 |
| Query: | 106 | AGGAAHLPGMVAAKTTLPVIGVPVKSRALSGLDSLYSIVQMPGGVPVATMAIGEAGATNA | 165 |
| | | AGGAAHLPGMV+A+T +PVIGVP+KSRALSGLDSLYSIVQMP GVPVATMAIGEAGA NA | |
| Sbjct: | 64 | AGGAAHLPGMVSAQTLVPVIGVPIKSRALSGLDSLYSIVQMPAGVPVATMAIGEAGAKNA | 123 |
| Query: | 166 | ALTALRILSIEDQNLADALAHFHEEQGKIAEESSGELI | 203 |
| | | AL AL++L+ ++NL L + ++ EES+ L+ | |
| Sbjct: | 124 | ALFALQLLANTNENLIQKLLVYRAAAQEMVEESNKALL | 161 |

[1854] An alignment of the GAS and GBS proteins is shown below:

| Identities = 162/169 (95%), Positives = 164/169 (96%), Gaps = 1/169 (0%) | | | |
|---|---|---|---|
| Query: | 27 | PLYLNIMQ-PIISIIMGSKSDWTTMQKTAEVLDNFGIAYEKKVVSAHRTPDLMFKHAEEA | 85 |
| | | PL + IM+ PIISIIMGSKSDW TMQKTAEVLDNFGIAYEKKVVSAHRTPDLMFKHAEEA | |
| Sbjct: | 35 | PLCILIMKTPIISIIMGSKSDWATMQKTAEVLDNFGIAYEKKVVSAHRTPDLMFKHAEEA | 94 |
| Query: | 86 | RGRGIKIIIAGAGGAAHLPGMVAAKTTLPVIGVPVKSRALSGLDSLYSIVQMPGGVPVAT | 145 |
| | | RGRGIKIIIAGAGGAAHLPGMVAAKTTLPVIGVPVKSRALSGLDSLYSIVQMPGGVPVAT | |
| Sbjct: | 95 | RGRGIKIIIAGAGGAAHLPGMVAAKTTLPVIGVPVKSRALSGLDSLYSIVQMPGGVPVAT | 154 |
| Query: | 146 | MAIGEAGATNAALTALRILSIEDQNLADALAHFHEEQGKIAEESSNELI | 194 |
| | | MAIGEAGATNAALTALRILSIEDQNLADALAHFHEEQGKIAEESS ELI | |
| Sbjct: | 155 | MAIGEAGATNAALTALRILSIEDQNLADALAHFHEEQGKIAEESSGELI | 203 |

[1855] Based on this analysis, it was predicted that these proteins and their epitopes could be useful antigens for vaccines or diagnostics.

### EXAMPLE 284

[1856] A DNA sequence (GBSx0311) was identified in S. agalactiae <SEQ ID 911> which encodes the amino acid sequence <SEQ ID 912>. This protein is predicted to be phosphoribosylglycinamide synthetase (purD). Analysis of this protein sequence reveals the following:

```
Possible site: 16
>>> Seems to have no N-terminal signal sequence
----- Final Results -----
                            bacterial cytoplasm --- Certainty = 0.1966(Affirmative) < succ>
                              bacterial membrane --- Certainty = 0.0000(Not Clear) < succ>
                                bacterial outside --- Certainty = 0.0000(Not Clear) < succ>
```

[1857] The protein has homology with the following sequences in the GENPEPT database:

| >GP: CAA04374 GB: AJ000883 purD [Lactococcus lactis] | | | |
|---|---|---|---|
| Identities = 236/419 (56%), Positives = 298/419 (70%), Gaps = 7/419 (1%) | | | |
| Query: | 1 | MKLLVVGSGGREHAIAKKLLASKDVDQVFVAPGNDGMTLDGLDLVNIGISEHSRLIDFVK | 60 |
| | | MK+LV+GSGGREHA+AKK + S V++VFVAPGN GM DG+ +V+I + +L+ F + | |
| Sbjct: | 1 | MKILVIGSGGREHALAKKFMESPQVEEVFVAPGNSGMEKDGIQIVHISELSNDKLVKFAQ | 60 |
| Query: | 61 | ENEIAWTLIGPDDALAAGIVDGFNSAGLRAFGPTKAAAELEWSKDFAKEIMVKYNVPTAA | 120 |
| | | I T +GP+ AL G+VD F A L FGP K AAELE SKDFAK IM KY VPTA | |
| Sbjct: | 61 | NQNIGLTFVGPETALMNGVVDAFIKAELPIFGPNKMAAELEGSKDFAKSIMKKYGVPTAD | 120 |
| Query: | 121 | YGTFSDFEKAKAYIEEQGAPIVVKADGLALGKGVVVAETVEQAVEAAQEMLLDNKFGDSG | 180 |
| | | Y TF E A AY++E+G P+V+KADGLA GKGV VA +E A A ++ F S | |
| Sbjct: | 121 | YATFDSLEPALAYLDEKGVPLVIKADGLAAGKGVTVAFDIETAKSALADI-----FSGSQ | 175 |
| Query: | 181 | ARVVIEEFLDGEEFSLFAFANGDKFYIMPTAQDHKRAYDGDKGLNTGGMGAYAPVPHLPQ | 240 |
| | | +VVIEEFLDGEEFSLF+F + K Y MP AQDHKRA+D DKG NTGGMGAY+PV H+ + | |
| Sbjct: | 176 | GKVVIEEFLDGEEFSLFSFIHDGKIYPMPIAQDHKRAFDEDKGPNTGGMGAYSPVLHISK | 235 |
| Query: | 241 | SVVDTAVETIVKPVLEGMIAEGRPYLGVLYAGLILTADGPKVIEFNSRFGDPETQIILPR | 300 |
| | | VV+ A+E +VKP + GMI EG+ + GVLYAGLILT DG K IEFN+RFGDPETQ++LPR | |
| Sbjct: | 236 | EVVNEALEKVVKPTVAGMIEEGKSFTGVLYAGLILTEDGVKTIEFNARFGDPETQVVLPR | 295 |
| Query: | 301 | LTSDFAQNIDDIMMGIEPYITWQKDGVTLGVVVASEGYPLDYEKGVPLPEKTDGDIITYY | 360 |
| | | L SD AQ I DI+ G EP + W + GVTLGVVVA+EGYP + G+ LPE +G + YY | |
| Sbjct: | 296 | LKSDLAQAIIDILAGNEPTLEWLESGVTLGVVVAAEGYPSQAKLGLILPEIPEG-LNVYY | 354 |
| Query: | 361 | AGAKFAENSKALLSNGGRVYMLVTTEDSVKAGQDKIYTQLAQQDTTGLFYRNDIGSKAI | 419 |
| | | AG EN++ L+S+GGRVY++ T + VK+ Q +Y +L + + G FYR+DIGS+AI | |
| Sbjct: | 355 | AGVSKNENNQ-LISSGGRVYLVSETGEDVKSTQKLLYEKLDKLENDGFFYRHDIGSRAI | 412 |

[1858] A related DNA sequence was identified in S. pyogenes <SEQ ID 913> which encodes the amino acid sequence <SEQ ID 914>. Analysis of this protein sequence reveals the following:

| Possible site: 35 | | | | |
|---|---|---|---|---|
| >>> Seems to have no N-terminal signal sequence | | | | |
| | INTEGRAL | Likelihood = −0.80 | Transmembrane | 5-21 (5-21) |

```
----- Final Results -----
                              bacterial membrane --- Certainty = 0.1319(Affirmative) < succ>
                                bacterial outside --- Certainty = 0.0000(Not Clear) < succ>
                            bacterial cytoplasm --- Certainty = 0.0000(Not Clear) < succ>
```

[1859] The protein has homology with the following sequences in the databases:

| >GP: CAA04374 GB: AJ000883 purD [Lactococcus lactis] | | | |
|---|---|---|---|
| Identities = 236/419 (56%), Positives = 301/419 (71%), Gaps = 7/419 (1%) | | | |
| Query: | 50 | LKLLVVGSGGREHAIAKKLLASKGVDQVFVAPGNDGMTLDGLDLVNIVVSEHSRLIAFAK | 109 |
| | | +K+LV+GSGGREHA+AKK + S V++VFVAPGN GM DG+ +V+I + +L+ FA+ | |
| Sbjct: | 1 | MKILVIGSGGREHALAKKFMESPQVEEVFVAPGNSGMEKDGIQIVHISELSNDKLVKFAQ | 60 |
| Query: | 110 | ENEISWAFIGPDDALAAGIVDDFNSAGLRAFGPTKAAAELEWSKDFAKEIMVKYNVPTAA | 169 |
| | | I F+GP+ AL G+VD F A L FGP K AAELE SKDFAK IM KY VPTA | |
| Sbjct: | 61 | NQNIGLTFVGPETALMNGVVDAFIKAELPIFGPNKMAAELEGSKDFAKSIMKKYGVPTAD | 120 |
| Query: | 170 | YGTFSDFEKAKAYIEEQGAPIVVKADGLALGKGVVVAETVEQAVEAAQEMLLDNKFGDSG | 229 |
| | | Y TF E A AY++E+G P+V+KADGLA GKGV VA +E A A ++ F S | |
| Sbjct: | 121 | YATFDSLEPALAYLDEKGVPLVIKADGLAAGKGVTVAFDIETAKSALADI-----FSGSQ | 175 |
| Query: | 230 | ARVVIEEFLDGEEFSLFAFANGDKFYIMPTAQDHKRAFDGDKGPNTGGMGAYAPVPHLPQ | 289 |
| | | +VVIEEFLDGEEFSLF+F + K Y MP AQDHKRAFD DKGPNTGGMGAY+PV H+ + | |
| Sbjct: | 176 | GKVVIEEFLDGEEFSLFSFIHDGKIYPMPIAQDHKRAFDEDKGPNTGGMGAYSPVLHISK | 235 |
| Query: | 290 | SVVDTAVEMIVRPVLEGMVAEGRPYLGVLYVGLILTADGPKVIEFNSRFGDPETQIILPR | 349 |
| | | VV+ A+E +V+P + GM+ EG+ + GVLY GLILT DG K IEFN+RFGDPETQ++LPR | |
| Sbjct: | 236 | EVVNEALEKVVKPTVAGMIEEGKSFTGVLYAGLILTEDGVKTIEFNARFGDPETQVVLPR | 295 |
| Query: | 350 | LTSDFAQNIDDIMMGIEPYITWQKDGVTLGVVVASEGYPFDYEKGVPLPEKTDGDIITYY | 409 |
| | | L SD AQ I DI+ G EP + W + GVTLGVVVA+EGYP + G+ LPE +G + YY | |
| Sbjct: | 296 | LKSDLAQAIIDILAGNEPTLEWLESGVTLGVVVAAEGYPSQAKLGLILPEIPEG-LNVYY | 354 |
| Query: | 410 | AGVKFSENSELLLSNGGRVYMLVTTEDSVKAGQDKIYTQLAQQDTTGLFYRNDIGSKAI | 468 |
| | | AGV +EN++ L+S+GGRVY++ T + VK+ Q +Y +L + + G FYR+DIGS+AI | |
| Sbjct: | 355 | AGVSKNENNQ-LISSGGRVYLVSETGEDVKSTQKLLYEKLDKLENDGFFYRHDIGSRAI | 412 |

[1860] An alignment of the GAS and GBS proteins is shown below:

| Identities = 399/421 (94%), Positives = 408/421 (96%) | | | |
|---|---|---|---|
| Query: | 1 | MKLLVVGSGGREHAIAKKLLASKDVDQVFVAPGNDGMTLDGLDLVNIGISEHSRLIDFVK | 60 |
| | | +KLLVVGSGGREHAIAKKLLASK VDQVFVAPGNDGMTLDGLDLVNI +SEHSRLI F K | |
| Sbjct: | 50 | LKLLVVGSGGREHAIAKKLLASKGVDQVFVAPGNDGMTLDGLDLVNIVVSEHSRLIAFAK | 109 |
| Query: | 61 | ENEIAWTLIGPDDALAAGIVDGFNSAGLRAFGPTKAAAELEWSKDFAKEIMVKYNVPTAA | 120 |
| | | ENEI+W IGPDDALAAGIVD FNSAGLRAFGPTKAAAELEWSKDFAKEIMVKYNVPTAA | |
| Sbjct: | 110 | ENEISWAFIGPDDALAAGIVDDFNSAGLRAFGPTKAAAELEWSKDFAKEIMVKYNVPTAA | 169 |
| Query: | 121 | YGTFSDFEKAKAYIEEQGAPIVVKADGLALGKGVVVAETVEQAVEAAQEMLLDNKFGDSG | 180 |
| | | YGTFSDFEKAKAYIEEQGAPIVVKADGLALGKGVVVAETVEQAVEAAQEMLLDNKFGDSG | |
| Sbjct: | 170 | YGTFSDFEKAKAYIEEQGAPIVVKADGLALGKGVVVAETVEQAVEAAQEMLLDNKFGDSG | 229 |
| Query: | 181 | ARVVIEEFLDGEEFSLFAFANGDKFYIMPTAQDHKRAYDGDKGLNTGGMGAYAPVPHLPQ | 240 |
| | | ARVVIEEFLDGEEFSLFAFANGDKFYIMPTAQDHKRA+DGDKG NTGGMGAYAPVPHLPQ | |
| Sbjct: | 230 | ARVVIEEFLDGEEFSLFAFANGDKFYIMPTAQDHKRAFDGDKGPNTGGMGAYAPVPHLPQ | 289 |
| Query: | 241 | SVVDTAVETIVKPVLEGMIAEGRPYLGVLYAGLILTADGPKVIEFNSRFGDPETQIILPR | 300 |
| | | SVVDTAVE IV+PVLEGM+AEGRPYLGVLY GLILTADGPKVIEFNSRFGDPETQIILPR | |
| Sbjct: | 290 | SVVDTAVEMIVRPVLEGMVAEGRPYLGVLYVGLILTADGPKVIEFNSRFGDPETQIILPR | 349 |
| Query: | 301 | LTSDFAQNIDDIMMGIEPYITWQKDGVTLGVVVASEGYPLDYEKGVPLPEKTDGDIITYY | 360 |
| | | LTSDFAQNIDDIMMGIEPYITWQKDGVTLGVVVASEGYP DYEKGVPLPEKTDGDIITYY | |
| Sbjct: | 350 | LTSDFAQNIDDIMMGIEPYITWQKDGVTLGVVVASEGYPFDYEKGVPLPEKTDGDIITYY | 409 |
| Query: | 361 | AGAKFAENSKALLSNGGRVYMLVTTEDSVKAGQDKIYTQLAQQDTTGLFYRNDIGSKAIKE | 421 |
| | | AG KF+ENS+ LLSNGGRVYMLVTTEDSVKAGQDKIYTQLAQQDTTGLFYRNDIGSKAI+E | |
| Sbjct: | 410 | AGVKFSENSELLLSNGGRVYMLVTTEDSVKAGQDKIYTQLAQQDTTGLFYRNDIGSKAIRE | 470 |

[1861] Based on this analysis, it was predicted that these proteins and their epitopes could be useful antigens for vaccines or diagnostics.

### EXAMPLE 285

[1862] A DNA sequence (GBSx0312) was identified in S. agalactiae <SEQ ID 915> which encodes the amino acid sequence <SEQ ID 916>. Analysis of this protein sequence reveals the following:

| Possible site: 36 | | | | |
|---|---|---|---|---|
| >>> Seems to have no N-terminal signal sequence | | | | |
| | INTEGRAL | Likelihood = −1.28 | Transmembrane | 235-251 (235-251) |

```
----- Final Results -----
                              bacterial membrane --- Certainty = 0.1510(Affirmative) < succ>
                                bacterial outside --- Certainty = 0.0000(Not Clear) < succ>
                            bacterial cytoplasm --- Certainty = 0.0000(Not Clear) < succ>
```

[1863] The protein has homology with the following sequences in the GENPEPT database:

| >GP: AAA23257 GB: M81878 unknown [Clostridium perfringens] | | | |
|---|---|---|---|
| Identities = 66/258 (25%), Positives = 119/258 (45%), Gaps = 9/258 (3%) | | | |
| Query: | 1 | MTIYDQIESALDLMTDLEREIACYFMGQPISKDALASTIVTKQLHISQAALTRFAKKCGF | 60 |
| | | M I +Q+E+ T E+ + Y + + +I+ K+ + +A +TRF KK GF | |
| Sbjct: | 1 | MGILEQLENPKFKATKSEKTLIEYIKSDLDNIIYKSISIIAKESGVGEATITRFTKKLGF | 60 |
| Query: | 61 | KGYREFVFEYLKS-HETISQQLYGLQNDNTKKVFMNYQEMISKSADI-------IDEEQL | 112 |
| | | G+++F K + + L + V +M+ S +I ID + + | |
| Sbjct: | 61 | NGFQDFKVTLAKEISNKKNTSIINLHVHRDESVTETANKMLKSSINILEQTVKQIDLDLM | 120 |
| Query: | 113 | LEVSHMIEQADRVYFYGKGSSSLVAKEFKIRLMRLGVICEALDDTDSFSWTNSIVNDRCL | 172 |
| | | + +I A RVYF G G S + A + + MR+G + D+ + +SI ND + | |
| Sbjct: | 121 | CKCRDLIMNAKRVYFIGIGYSGIAATDINYKFMRIGFTTVPVTDSHTMVIMSSITNDDDV | 180 |
| Query: | 173 | VIAFSLSGNTNSVIGALKIASCHGAKTVLFTK-QPHTIDYAFDKIIQVASARHLDYGNRI | 231 |
| | | ++A S SG T VI +K A +G K + T+ + + D + SA + I | |
| Sbjct: | 181 | IVAISNSGTTKEVIKTVKQAKENGTKIITLTEDSDNPLRKLSDYELTYTSAETIFETGSI | 240 |
| Query: | 232 | SPQIPMLIMVDIIYAQFL | 249 |
| | | S +IP + ++D++Y + + | |
| Sbjct: | 241 | SSKIPQIFLLDLLYTEVI | 258 |

[1864] A related DNA sequence was identified in S. pyogenes <SEQ ID 917> which encodes the amino acid sequence <SEQ ID 918>. Analysis of this protein sequence reveals the following:

| Possible site: 60 | | | | |
|---|---|---|---|---|
| >>> Seems to have no N-terminal signal sequence | | | | |
| | INTEGRAL | Likelihood = −4.88 | Transmembrane | 243-259 (242-261) |

```
----- Final Results -----
                              bacterial membrane --- Certainty = 0.2954(Affirmative) < succ>
                                bacterial outside --- Certainty = 0.0000(Not Clear) < succ>
                            bacterial cytoplasm --- Certainty = 0.0000(Not Clear) < succ>
```

[1865] A related sequence was also identified <SEQ ID 9093> which encodes the amino acid sequence <SEQ ID 9094>. Analysis of this protein sequence reveals the following:

| Possible cleavage site: 56 | | | | |
|---|---|---|---|---|
| >>> Seems to have no N-terminal signal sequence | | | | |
| | INTEGRAL | Likelihood = −4.88 | Transmembrane | 239-255 (238-257) |

```
----- Final Results -----
                              bacterial membrane --- Certainty = 0.295(Affirmative) < succ>
                                bacterial outside --- Certainty = 0.000(Not Clear) < succ>
                            bacterial cytoplasm --- Certainty = 0.000(Not Clear) < succ>
```

[1866] An alignment of the GAS and GBS proteins is shown below:

| Identities = 138/263 (52%), Positives = 189/263 (71%), Gaps = 2/263 (0%) | | | |
|---|---|---|---|
| Query: | 6 | QIESALDLMTDLEREIACYFMGQPISKDALASTIVTKQLHISQAALTRFAKKCGFKGYRE | 65 |
| | | +IE++L+ MT LE+ IA +F+ ++ L ++ + K+LHISQAALTRFAKKCGF GYR | |
| Sbjct: | 14 | KIEASLEHMTSLEKGIAHFFITTDLTPQELTASEIVKRLHISQAALTRFAKKCGFTGYRA | 73 |
| Query: | 66 | FVFEYLKSHETISQQLYGLQNDNTKKVFMNYQEMISKSADIIDEEQLLEVSHMIEQADRV | 125 |
| | | F F+YL S + + + + TK+V M+Y +I+K+ ++++EE+LL ++ +I+ ++RV | |
| Sbjct: | 74 | FAFDYLHSLQESQETFQSIHLELTKRVLMDYDALINKTYELVNEEKLLNLAKLIDSSERV | 133 |
| Query: | 126 | YFYGKGSSSLVAKEFKIRLMRLGVICEALDDTDSFSWTNSIVNDRCLVIAFSLSGNTNSV | 185 |
| | | YF+GKGSS LVA+E K+R MRLG+IC+A DTD F+W NS+VN+ CLV FSLSG TNSV | |
| Sbjct: | 134 | YFFGKGSSGLVAREMKLRFMRLGLICDAYSDTDGFTWANSLVNENCLVFGFSLSGRTNSV | 193 |
| Query: | 186 | IGALKIASCHGAKTVLFTKQPHT-IDYAFDKIIQVASARHLDYGNRISPQIPMLIMVDII | 244 |
| | | I AL AS GAKTVL T T D + D II V+S L YGNR+SPQ P+LIM+DII | |
| Sbjct: | 194 | ITALHQASQRGAKTVLLTTDNQTEFDDSLD-IIPVSSTHQLHYGNRVSPQFPLLIMMDII | 252 |
| Query: | 245 | YAQFLDINKIEKERIFRETIIQR | 267 |
| | | YA L I+K KE+IF+ TII + | |
| Sbjct: | 253 | YAYVLAIDKPHKEKIFKNTIIDK | 275 |

[1867] SEQ ID 916 (GBS320) was expressed in E. coli as a His-fusion product. SDS-PAGE analysis of total cell extract is shown in FIG. 40 (lane 5; MW 33 kDa). It was also expressed in E. coli as a GST-fusion product. SDS-PAGE analysis of total cell extract is shown in FIG. 85 (lane 7; MW 58 kDa) and in FIG. 160 (lane 7 & 8; MW 58 kDa).

[1868] GBS320-GST was purified as shown in FIG. 224, lane 3-4.

[1869] Based on this analysis, it was predicted that these proteins and their epitopes could be useful antigens for vaccines or diagnostics.

### EXAMPLE 286

[1870] A DNA sequence (GBSx0313) was identified in S. agalactiae <SEQ ID 919> which encodes the amino acid sequence <SEQ ID 920>. This protein is predicted to be xylan esterase 1 (cephalosporin-C). Analysis of this protein sequence reveals the following:

```
Possible site: 54
>>> Seems to have no N-terminal signal sequence
----- Final Results -----
                            bacterial cytoplasm --- Certainty = 0.4981(Affirmative) < succ>
                              bacterial membrane --- Certainty = 0.0000(Not Clear) < succ>
                                bacterial outside --- Certainty = 0.0000(Not Clear) < succ>
```

[1871] The protein has homology with the following sequences in the GENPEPT database:

| >GP: AAB68821 GB: AF001926 xylan esterase 1 [Thermoanaerobacterium sp. | | | |
|---|---|---|---|
| ‘JW/SL YS485’] | | | |
| Identities = 133/299 (44%), Positives = 188/299 (62%), Gaps = 1/299 (0%) | | | |
| Query: | 5 | MSLDDMREYLGQDQIPEDFDDFWKKQTMKYQG-NIEYRLDKKDFNITFAQAYDLHFKGSN | 63 |
| | | M L +REY G + PEDFD++W + + + + + L + F ++FA+ YDL+F G | |
| Sbjct: | 6 | MPLQKLREYTGTNPCPEDFDEYWNRALDEMRSVDPKIELKESSFQVSFAECYDLYFTGVR | 65 |
| Query: | 64 | NSIVYAKCLFPKTNKPYPVVFYFHGYQNQSPDWSDQLNYVAAGYGVVSMDVRGQAGQSQD | 123 |
| | | + ++AK + PKT +P + FHGY + S DW+D+LNYVAAG+ VV+MDVRGQ GQSQD | |
| Sbjct: | 66 | GARIHAKYIKPKTEGKHPALIRFHGYSSNSGDWNDKLNYVAAGFTVVAMDVRGQGGQSQD | 125 |
| Query: | 124 | KGHFDGITVKGQIVRGMISGPNHLFYKDIYLDVFQLIDIIATLESVDSNQLYSYGWSQGG | 183 |
| | | G G T+ G I+RG+ +++ ++ I+LD QL I+ + VD +++ G SQGG | |
| Sbjct: | 126 | VGGVTGNTLNGHIIRGLDDDADNMLFRHIFLDTAQLAGIVMNMPEVDEDRVGVMGPSQGG | 185 |
| Query: | 184 | ALALIAAALNPKIVKTVAVYPFLSDFRRVLDLGGVSEPYDELFRYFKYSDPFHKTENNVL | 243 |
| | | L+L AAL P++ K V+ YPFLSD++RV DL Y E+ YF+ DP H+ EN V | |
| Sbjct: | 186 | GLSLACAALEPRVRKVVSEYPFLSDYKRVWDLDLAKNAYQEITDYFRLFDPRHERENEVF | 245 |
| Query: | 244 | KTLAYIDVKNFAHRISCPVVLLTALKDDICPPSTQFAIFNRLTSTKKHLLLPDYGHDPM | 302 |
| | | L YIDVKN A RI V++ L D +CPPST FA +N + S K + PDYGH+PM | |
| Sbjct: | 246 | TKLGYIDVKNLAKRIKGDVLMCVGLMDQVCPPSTVFAAYNNIQSKKDIKVYPDYGHEPM | 304 |

[1872] No corresponding DNA sequence was identified in S. pyogenes.

[1873] Based on this analysis, it was predicted that this protein and its epitopes, could be useful antigens for vaccines or diagnostics.

### EXAMPLE 287

[1874] A DNA sequence (GBSx0314) was identified in S. agalactiae <SEQ ID 921> which encodes the amino acid sequence <SEQ ID 922>. Analysis of this protein sequence reveals the following:

| Possible site: 35 | | | | |
|---|---|---|---|---|
| >>> Seems to have no N-terminal signal sequence | | | | |
| | INTEGRAL | Likelihood = −5.73 | Transmembrane | 128-144 (126-145) |

```
----- Final Results -----
                              bacterial membrane --- Certainty = 0.3293(Affirmative) < succ>
                                bacterial outside --- Certainty = 0.0000(Not Clear) < succ>
                            bacterial cytoplasm --- Certainty = 0.0000(Not Clear) < succ>
```

[1875] The protein has homology with the following sequences in the GENPEPT database:

| >GP: AAA23256 GB: M81878 unknown [Clostridium perfringens] | | | |
|---|---|---|---|
| Identities = 78/160 (48%), Positives = 110/160 (68%) | | | |
| Query: | 131 | CLTIGTGIGGCLIIDKTVFHGFSNSACEVGYMHLSDGDFQDLASTTALIADVAKAHGDEI | 190 |
| | | CLTIGTGIGG LIID V HGFSNSA E+GYM ++ + QD+AS +AL+ +VA G E | |
| Sbjct: | 18 | CLTIGTGIGGALIIDGKVLHGFSNSAGEIGYMMVNGENIQDIASASALVKNVALRKGVEP | 77 |
| Query: | 191 | SRWDGRRIFQEAKKGNEKCIASIDRMINYLGQGIANMVYVVNPEKVVLGGGIMAQKDYLQ | 250 |
| | | S DGR + + G+ C ++++ + L GI+N+VY++NPE VVLGGGIMA+++ + | |
| Sbjct: | 78 | SSIDGRYVLDNYENGDLICKEEVEKLADNLALGISNIVYLINPEVVVLGGGIMAREEVFR | 137 |
| Query: | 251 | DKLSESLKRNLVTSLAEKTAIVFAQHENQAGMLGAYYHFK | 290 |
| | | + SL++ L+ S+ T I FA+ +N AGM GAYY+FK | |
| Sbjct: | 138 | PLIENSLRKYLIESVYNNTKIAFAKLKNTAGMKGAYYNFK | 177 |

[1876] A related DNA sequence was identified in S. pyogenes <SEQ ID 923> which encodes the amino acid sequence <SEQ ID 924>. Analysis of this protein sequence reveals the following:

| Possible site: 22 | | | | |
|---|---|---|---|---|
| >>> Seems to have no N-terminal signal sequence | | | | |
| | INTEGRAL | Likelihood = −4.30 | Transmembrane | 128-144 (127-145) |
| | INTEGRAL | Likelihood = −0.11 | Transmembrane | 227-243 (227-243) |

```
----- Final Results -----
                              bacterial membrane --- Certainty = 0.2720(Affirmative) < succ>
                                bacterial outside --- Certainty = 0.0000(Not Clear) < succ>
                            bacterial cytoplasm --- Certainty = 0.0000(Not Clear) < succ>
```

[1877] The protein has homology with the following sequences in the databases:

| >GP: BAB04516 GB: AP001509 glucose kinase [Bacillus halodurans] | | | |
|---|---|---|---|
| Identities = 97/291 (33%), Positives = 155/291 (52%), Gaps = 14/291 (4%) | | | |
| Query: | 5 | LAIDIGGTAIKYGLISETGDLLEKEEMATEAYKGGPSILEKVKGLVKTYQDQMDLAGVAI | 64 |
| | | + ID+GGT IK L+S+ G+++ +E TEA +G ++ K+ L + D AG+ I | |
| Sbjct: | 3 | VGIDLGGTKIKAALVSDAGEIISVQECPTEAAQGPEEVMNKMMSLTEKVTDHQPFAGIGI | 62 |
| Query: | 65 | SSAGMVNPDEGEIFYAGPQIPNYAGTQFKKEIEETFGLPCEVENDVNCAGLAEAISGSAK | 124 |
| | | + G ++ EG I + P +P + +E F P +++ND N A LAEA+ GS + | |
| Sbjct: | 63 | GAPGPLSSTEGTIL-SPPNLPGWDHIHLVDRFQEQFQCPVKLDNDANVAALAEALLGSGQ | 121 |
| Query: | 125 | DYPVALCLTIGTGIGGCLLFNSQVFHGSSHSACEVG----------YLHLSDGQFQDLAS | 174 |
| | | + LTI TGIGG + + + HG+S A E+G + +L+ G + LAS | |
| Sbjct: | 122 | GFTSVFYLTISTGIGGGYVLDGSIVHGASDYAGEIGNMIVQPNGYQHANLNPGSLEGLAS | 181 |
| Query: | 175 | TTALVQEVVLAYGDDISQWDGRRIFEQAKAGDAICIAAISKQVDYLGQGIANICYVVNPN | 234 |
| | | TA+ + +G + R +F+Q + GD + + +DYL GIANI + +NP+ | |
| Sbjct: | 182 | GTAIGRMARERFG---VEGGTREVFDQIRRGDHDMQRLVEEAMDYLAIGIANIAHTINPD | 238 |
| Query: | 235 | VVVLGGGIMAQKDYLADKLKTALDSYLVSSLAKKTQLKFASHGNNAGILGA | 285 |
| | | V VLGGG+M D + +K + YL LA+ T + A G ++G+LGA | |
| Sbjct: | 239 | VFVLGGGVMNADDLILPIVKEKVSRYLYPGLAQSTTIVKAKLGGDSGVLGA | 289 |

[1878] An alignment of the GAS and GBS proteins is shown below:

| Identities = 192/292 (65%), Positives = 237/292 (80%) | | | |
|---|---|---|---|
| Query: | 1 | MTRTVAIDIGGTMIKHGIVDNLGCIVEASELATEAYKGGPGILQKVCQIIDNYLAEGSID | 60 |
| | | M +AIDIGGT IK+G++ G ++E E+ATEAYKGGP IL+KV ++ Y + + | |
| Sbjct: | 1 | MKHYLAIDIGGTAIKYGLISETGDLLEKEEMATEAYKGGPSILEKVKGLVKTYQDQNDLA | 60 |
| Query: | 61 | GIAISSAGMVDPDEGCIFYSGPQIPNYAGTQFKKVLEDTYQVRTEIENDVNCAGLAEAVS | 120 |
| | | G+AISSAGMV+PDEG IFY+GPQIPNYAGTQFKK +E+T+ + E+ENDVNCAGLAEA+S | |
| Sbjct: | 61 | GVAISSAGMVNPDEGEIFYAGPQIPNYAGTQFKKEIEETFGLPCEVENDVNCAGLAEAIS | 120 |
| Query: | 121 | GSAKDSSIALCLTIGTGIGGCLIIDKTVFHGFSNSACEVGYMHLSDGDFQDLASTTALIA | 180 |
| | | GSAKD +ALCLTIGTGIGGCL+ + VFHG S+SACEVGY+HLSDG FQDLASTTAL+ | |
| Sbjct: | 121 | GSAKDYPVALCLTIGTGIGGCLLFNSQVFHGSSHSACEVGYLHLSDGQFQDLASTTALVQ | 180 |
| Query: | 181 | DVAKAHGDEISRWDGRRIFQEAKKGNEKCIASIDRMINYLGQGIANMVYVVNPEKVVLGG | 240 |
| | | +V A+GD+IS+WDGRRIF++AK G+ CIA+I + ++YLGQGIAN+ YVVNP VVLGG | |
| Sbjct: | 181 | EVVLAYGDDISQWDGRRIFEQAKAGDAICIAAISKQVDYLGQGIANICYVVNPNVVVLGG | 240 |
| Query: | 241 | GIMAQKDYLQDKLSESLKRNLVTSLAEKTAIVFAQHENQAGMLGAYYHFKNR | 292 |
| | | GIMAQKDYL DKL +L LV+SLA+KT + FA H N AG+LGAYYHFK + | |
| Sbjct: | 241 | GIMAQKDYLADKLKTALDSYLVSSLAKKTQLKFASHGNNAGILGAYYHFKQK | 292 |

[1879] SEQ ID 922 (GBS331) was expressed in E. coli as a His-fusion product. SDS-PAGE analysis of total cell extract is shown in FIG. 60 (lane 2; MW 35.9 kDa). It was also expressed in E. coli as a GST-fusion product. SDS-PAGE analysis of total cell extract is shown in FIG. 67 (lane 3; MW 61 kDa).

[1880] The GBS331-GST fusion product was purified (FIG. 209, lane 3) and used to immunise mice. The resulting antiserum was used for FACS (FIG. 309), which confirmed that the protein is immunoaccessible on GBS bacteria.

[1881] Based on this analysis, it was predicted that these proteins and their epitopes could be useful antigens for vaccines or diagnostics.

### EXAMPLE 288

[1882] A DNA sequence (GBSx0315) was identified in S. agalactiae <SEQ ID 925> which encodes the amino acid sequence <SEQ ID 926>. This protein is predicted to be a acylneuraminate lyase (nanA). Analysis of this protein sequence reveals the following:

```
Possible site: 18
>>> Seems to have no N-terminal signal sequence
----- Final Results -----
                            bacterial cytoplasm --- Certainty = 0.0894(Affirmative) < succ>
                              bacterial membrane --- Certainty = 0.0000(Not Clear) < succ>
                                bacterial outside --- Certainty = 0.0000(Not Clear) < succ>
```

[1883] The protein has homology with the following sequences in the GENPEPT database:

| >GP: CAA69950 GB: Y08695 putative acylneuraminate lyase [Clostridium | | | |
|---|---|---|---|
| tertium] | | | |
| Identities = 162/225 (72%), Positives = 191/225 (84%) | | | |
| Query: | 1 | MKDLQKYQGIIPAFYACYDDKGDICPERVKALTNYFIDKGVQGLYVNGSSGECIYQSVAD | 60 |
| | | M++L+KY+GIIPAFYACYDD+G I PER + T Y IDKGV+GLYV GSSGECIYQS + | |
| Sbjct: | 1 | MRNLEKYKGIIPAFYACYDDEGKISPERTQMFTQYLIDKGVKGLYVCGSSGECIYQSKEE | 60 |
| Query: | 61 | RKLVLENVMSVAKGKLTVIAHVACNNTKDSVELAMHAEAIGVDAIAAIPPIYPRLPEYAI | 120 |
| | | RK+ LENVM VAKGK+T+IAHV CNNT+DS ELA HAE+IGVDAIA+IPPIYF LP+Y+I | |
| Sbjct: | 61 | RKITLENVMKVARGKITIIAHVGCNNTRDSEELAEHAESIGVDAIASIFPIYFHLPDYSI | 120 |
| Query: | 121 | ADYWNTISQAAPQTDFIIYNIPQLAGVALTSDLYRKMLQNPQVIGVKNSSMPVQDIQNFV | 180 |
| | | A+YWN IS AAP TDFIIYNIPQLAGV L +LY++ML+NP+VIGVKNSSMPVQDIQ F | |
| Sbjct: | 121 | AEYWNDISNAAPNTDFIIYNIPQLAGVGLGINLYKQMLKNPRVIGVKNSSMPVQDIQMFK | 180 |
| Query: | 181 | AIGGENHIVFNGPDEQFLGGRLMGAAAGIGGTYGVMPELYLTLNQ | 225 |
| | | I G+ +VFNGPDEQF+ GR+MGA GIGGTY VMPEL+L ++ | |
| Sbjct: | 181 | DISGDESVVFNGPDEQFVAGRIMGADGGIGGTYAVMPELFLAADK | 225 |

[1884] A related DNA sequence was identified in S. pyogenes <SEQ ID 927> which encodes the amino acid sequence <SEQ ID 928>. Analysis of this protein sequence reveals the following:

```
Possible site: 15
>>> Seems to have no N-terminal signal sequence
----- Final Results -----
                            bacterial cytoplasm --- Certainty = 0.0981(Affirmative) < succ>
                              bacterial membrane --- Certainty = 0.0000(Not Clear) < succ>
                                bacterial outside --- Certainty = 0.0000(Not Clear) < succ>
```

[1885] An alignment of the GAS and GBS proteins is shown below:

| Identities = 238/304 (78%), Positives = 263/304 (86%) | | | |
|---|---|---|---|
| Query: | 1 | MKDLQKYQGIIPAFYACYDDKGDICPERVKALTNYFIDKGVQGLYVNGSSGECIYQSVAD | 60 |
| | | M DL KYQGIIPAFYACYDD+G+I PERV+ALT Y+IDKGVQGLY+NGSSGECIYQSV D | |
| Sbjct: | 1 | MTDLTKYQGIIPAFYACYDDQGNISPERVRALTQYYIDKGVQGLYINGSSGECIYQSVFD | 60 |
| Query: | 61 | RKLVLENVMSVAKGKLTVIAHVACNNTKDSVELANHAEAIGVDAIAAIPPIYFRLPEYAI | 120 |
| | | R+LVLENVM+VAKGKLT+I HVACNNTKDS+ELA H+E +GVDAIAAIPPIYFRLPEYA+ | |
| Sbjct: | 61 | RQLVLENVMAVAKGKLTIINHVACNNTKDSIELAAHSERLGVDAIAAIPPIYFRLPEYAV | 120 |
| Query: | 121 | ADYWNTISQAAPQTDFIIYNIPQLAGVALTSDLYRKMLQNPQVIGVKNSSMPVQDIQNFV | 180 |
| | | ADYWN IS AAP TDFIIYNIPQLAGVALT LY+ ML N +VIGVKNSSMFVQDIQ F | |
| Sbjct: | 121 | ADYWNAISSAAPHTDFIIYNIPQLAGVALTPSLYKTMLANKRVIGVKNSSMPVQDIQTFC | 180 |
| Query: | 181 | AIGGENHIVFNGPDEQFLGGRLMGAAAGIGGTYGVMPELYLTLNQLIVDKDLEKARELQF | 240 |
| | | AIGG++HIVFNGPDEQFLGGRLMGAAAGIGGTYG MPEL+L LNQLI DKDLEKA+ LQ+ | |
| Sbjct: | 181 | AIGGDDHIVFNGPDEQFLGGRLMGAAAGIGGTYGAMPELFLRLNQLIADKDLEKAKALQY | 240 |
| Query: | 241 | TINDIITKLCSGHGNMYAVIKAVLEINEQLTIGSVRLPLASVTEEDKPIIKEAAEMIRHA | 300 |
| | | TIN+II L S HGNMY VIK VL INE L IGSVR PLA + EED+ I + AA +I A | |
| Sbjct: | 241 | TINEIIGVLVSAHGNMYGVIKEVLRINEGLDIGSVRSPLAELVEEDRVICQRAAALINQA | 300 |
| Query: | 301 | KKQF | 304 |
| | | K+ F | |
| Sbjct: | 301 | KETF | 304 |

[1886] Based on this analysis, it was predicted that these proteins and their epitopes could be useful antigens for vaccines or diagnostics.

### EXAMPLE 289

[1887] A DNA sequence (GBSx0317) was identified in S. agalactiae <SEQ ID 929> which encodes the amino acid sequence <SEQ ID 930>. Analysis of this protein sequence reveals the following:

| Possible site: 46 | | | | |
|---|---|---|---|---|
| >>> Seems to have an uncleavable N-term signal seq | | | | |
| | INTEGRAL | Likelihood = −9.45 | Transmembrane | 82-98 (79-111) |
| | INTEGRAL | Likelihood = −6.85 | Transmembrane | 24-40 (21-52) |
| | INTEGRAL | Likelihood = −5.26 | Transmembrane | 180-196 (172-200) |
| | INTEGRAL | Likelihood = −5.10 | Transmembrane | 160-176 (158-179) |
| | INTEGRAL | Likelihood = −4.35 | Transmembrane | 110-126 (106-130) |

```
----- Final Results -----
                              bacterial membrane --- Certainty = 0.4779(Affirmative) < succ>
                                bacterial outside --- Certainty = 0.0000(Not Clear) < succ>
                            bacterial cytoplasm --- Certainty = 0.0000(Not Clear) < succ>
```

[1888] The protein has homology with the following sequences in the GENPEPT database:

| >GP: BAB05827 GB: AP001514 unknown conserved protein in B. subtilis | | | |
|---|---|---|---|
| [Bacillus halodurans] | | | |
| Identities = 40/148 (27%), Positives = 74/148 (49%), Gaps = 4/148 (2%) | | | |
| Query: | 14 | VNNPFMQGCNVVFDLALLNLLFMI-TCLPLVTIG--AAKISLYRTLWQKLEGD-QTNLLI | 69 |
| | | +++ F Q C+ ++ LA +NLL++ T L LV +G A +++ L + G+ + | |
| Sbjct: | 6 | MSSRFYQTCDWIWKLAYINLLWLSGTLLGLVVLGFLPATTAMFTVLRKWFTGNPDVAITR | 65 |
| Query: | 70 | LYIKHLKKEWFQGMLLGLVELSILVVIIFDLTILHYQIGFIVSFLKITCYAFLLLTVMTS | 129 |
| | | + + K E+ + LLG V L ++ F+ L G + L + YAFL+L ++T | |
| Sbjct: | 66 | TFFQAYKNEFLKINLLGAVLLLGAYILYFNYMYLGTVEGTVHMVLSLGWYAFLILYIITL | 125 |
| Query: | 130 | IYLFPMAARYEMSLLDTVKKSFIMACLN | 157 |
| | | Y+ P Y + L +K + I+ +N | |
| Sbjct: | 126 | FYIIPAYVHYNLKLFQYIKTALIIGFVN | 153 |

[1889] A related DNA sequence was identified in S. pyogenes <SEQ ID 931> which encodes the amino acid sequence <SEQ ID 932>. Analysis of this protein sequence reveals the following:

| Possible site: 24 | | | | |
|---|---|---|---|---|
| >>> Seems to have no N-terminal signal sequence | | | | |
| | INTEGRAL | Likelihood = −14.86 | Transmembrane | 117-133 (108-139) |
| | INTEGRAL | Likelihood = −7.48 | Transmembrane | 30-46 (21-54) |
| | INTEGRAL | Likelihood = −6.90 | Transmembrane | 88-104 (83-105) |
| | INTEGRAL | Likelihood = −6.26 | Transmembrane | 165-181 (151-187) |
| | INTEGRAL | Likelihood = −5.89 | Transmembrane | 189-205 (182-207) |

```
----- Final Results -----
                              bacterial membrane --- Certainty = 0.6944(Affirmative) < succ>
                                bacterial outside --- Certainty = 0.0000(Not Clear) < succ>
                            bacterial cytoplasm --- Certainty = 0.0000(Not Clear) < succ>
```

[1890] The protein has homology with the following sequences in the databases:

| >GP: BAB05582 GB: AP001513 unknown conserved protein in bacilli | | | |
|---|---|---|---|
| [Bacillus halodurans] | | | |
| Identities = 59/194 (30%), Positives = 93/194 (47%), Gaps = 11/194 (5%) | | | |
| Query: | 17 | SKWMRASAALFDLLVFNLLFVL-SCLPLLTIGV--AKMALYASLLDWREGQVS-QLVTTY | 72 |
| | | +K M+ + L+ NLL++L S + + +GV A +L+A W + + L TY | |
| Sbjct: | 8 | TKIMKLFEWIMRLVYLNLLWLLFSFIGGIILGVMPATASLFAVFRKWYQKEDDFPLFQTY | 67 |
| Query: | 73 | SSHFKYYFKSGLRLGLIELGIMTICLLDLFLIRNQSGLVFQGFKVLCVAVLFLVVILFLY | 132 |
| | | + FK FK +GL + I I LD+ L+ S + Q + A+ F+ ++ LY | |
| Sbjct: | 68 | LNEFKRSFKIANLVGLTLVLIGGILYLDVLLLLGTSHWIGQLLLMGVGALSFIYLVTLLY | 127 |
| Query: | 133 | AYPQAVKRDLSLSTLFKRSFLLAGLFFPWSFAFLAFICLTIFSLQL----SLLTLFGGVS | 188 |
| | | +P V DLS FK SFLL G+ P+ L I L++ +L LL LF S | |
| Sbjct: | 128 | IFPTLVHFDLSYKQYFKHSFLL-GVLQPFR-TLLLMITLSLSALLFLTFPILLPLF-AAS | 184 |
| Query: | 189 | LLAIIGISSLTYLY | 202 |
| | | +A + + S + Y | |
| Sbjct: | 185 | FMAALTMWSFLFGY | 198 |

[1891] An alignment of the GAS and GBS proteins is shown below:

| Identities = 68/210 (32%), Positives = 117/210 (55%) | | |
|---|---|---|
| Query: 3 | KANQLIAAIFDVNNPFMQGCNVVFDLALLNLLFMITCLPLVTIGAAKISLYRTLWQKLEG | 62 |
| | K L+ ++F +++ +M+ +FDL + NLLF+++CLPL+TIG AK++LY +L EG | |
| Sbjct: 4 | KKQGLLHSLFKLDSKWMRASAALFDLLVFNLLFVLSCLPLLTIGVAKMALYASLLDWREG | 63 |
| Query: 63 | DQTNLLILYIKHLKKEWFQGMLLGLVELSILVVIIFDLTILHYQIGFIVSFLKITCYAFL | 122 |
| | + L+ Y H K + G+ LGL+EL I+ + + DL ++ Q G + K+ C A L | |
| Sbjct: 64 | QVSQLVTTYSSHFKYYFKSGLRLGLIELGIMTICLLDLFLIRNQSGLVFQGFKVLCVAVL | 123 |
| Query: 123 | LLTVMTSIYLFPMAARYEMSLLDTVKKSFIMACLNLKWTGVLMFLLIMTWFIMVQSSLLF | 182 |
| | L V+ +Y +P A + ++SL K+SF++A L W+ + + +T F + S L | |
| Sbjct: 124 | FLVVILFLYAYPQAVKRDLSLSTLFKRSFLLAGLFFPWSFAFLAFICLTIFSLQLSLLTL | 183 |
| Query: 183 | MLTVSAIFIFAYTAFAYFKIIILQKQFAYF | 212 |
| | VS + I ++ Y +II++ F | |
| Sbjct: 184 | FGGVSLLAIIGISSLTYLYLIIMESLLRRF | 213 |

[1892] A related GBS gene <SEQ ID 8535> and protein <SEQ ID 8536> were also identified. Analysis of this protein sequence reveals the following:

| | | |
|---|---|---|
| Lipop: | Possible site: −1 | Crend: 2 |
| McG: | Discrim Score: 3.27 | |
| GvH: | Signal Score (−7.5): −4.23 | |

| Possible site: 46 | | |
|---|---|---|
| >>> Seems to have an uncleavable N-term signal seq | | |
| ALOM program count: 5 value: −9.45 threshold: 0.0 | | |
| INTEGRAL | Likelihood = −9.45 | Transmembrane 82-98 (79-111) |
| INTEGRAL | Likelihood = −6.85 | Transmembrane 24-40 (21-52) |
| INTEGRAL | Likelihood = −5.26 | Transmembrane 180-196 (172-200) |
| INTEGRAL | Likelihood = −5.10 | Transmembrane 160-176 (158-179) |
| INTEGRAL | Likelihood = −4.35 | Transmembrane 110-126 (106-130) |
| PERIPHERAL | Likelihood = 5.89 | 142 |

```
modified ALOM score: 2.39
*** Reasoning Step: 3
----- Final Results -----
  bacterial membrane --- Certainty = 0.4779 (Affirmative) <succ>
    bacterial outside --- Certainty = 0.0000 (Not Clear) <succ>
bacterial cytoplasm --- Certainty = 0.0000 (Not Clear) <succ>
```

[1893] The protein has homology with the following sequences in the databases:

[chemical structure]

[1894] Based on this analysis, it was predicted that these proteins and their epitopes could be useful antigens for vaccines or diagnostics.

### EXAMPLE 290

[1895] A DNA sequence (GBSx0318) was identified in S. agalactiae <SEQ ID 933> which encodes the amino acid sequence <SEQ ID 934>. Analysis of this protein sequence reveals the following:

```
Possible site: 51
>>> Seems to have no N-terminal signal sequence
----- Final Results -----
bacterial cytoplasm --- Certainty = 0.1827 (Affirmative) <succ>
  bacterial membrane --- Certainty = 0.0000 (Not Clear) <succ>
    bacterial outside --- Certainty = 0.0000 (Not Clear) <succ>
```

[1896] The protein has homology with the following sequences in the GENPEPT database:

| >GP: AAC44392 GB: U43526 ORF-1 [Streptococcus pneumoniae] | | | |
|---|---|---|---|
| Identities = 48/151 (31%), Positives = 66/151 (42%), Gaps = 5/151 (3%) | | | |
| Query: | 1 | MIYDHLLNLTHYKDINPNLDLAIDYLLSHDLRNLDIGTYHISPEVILMVQSNQLSES-FD | 59 |
| | | MI + L Y +NP+ ID+L L NL G+ I + L++ | |
| Sbjct: | 1 | MIITKISRLGTYVGVNPHFATLIDFLEKTGLENLTEGSIAIDGNRLFGNCFTYLADGQAG | 60 |
| Query: | 60 | HIFEYHKKYLDIHYVIEGHEVIKLGKGDKVEV-EEY--LGDIGFIKCSEETSFDLRDNYI | 116 |
| | | FE H+KYLDIH V+E E + + + V V +EY DI E LR | |
| Sbjct: | 61 | AFFETHQKYLDIHLVLENEEAMAVTSPENVSVTQEYDEEKDIELYTGKVEQLVHLRAGEC | 120 |
| Query: | 117 | AFFFPEEAHQPNGMGSLGNYVKKGVLKVLMA | 147 |
| | | FPE+ HQP + VKK V KV ++ | |
| Sbjct: | 121 | LITFPEDLHQPK-VRINDEPVKKVVFKVAIS | 150 |

[1897] No corresponding DNA sequence was identified in S. pyogenes.

[1898] Based on this analysis, it was predicted that this protein and its epitopes, could be useful antigens for vaccines or diagnostics.

### EXAMPLE 291

[1899] A DNA sequence (GBSx0319) was identified in S. agalactiae <SEQ ID 935> which encodes the amino acid sequence <SEQ ID 936>. This protein is predicted to be sugar ABC transporter, permease protein (araQ). Analysis of this protein sequence reveals the following:

| Possible site: 35 | | | | |
|---|---|---|---|---|
| >>> Seems to have a cleavable N-term signal seq. | | | | |
| | INTEGRAL | Likelihood = −7.38 | Transmembrane | 245-261 (239-265) |
| | INTEGRAL | Likelihood = −3.72 | Transmembrane | 140-156 (139-158) |
| | INTEGRAL | Likelihood = −3.61 | Transmembrane | 76-92 (71-94) |
| | INTEGRAL | Likelihood = −2.81 | Transmembrane | 112-128 (107-128) |
| | INTEGRAL | Likelihood = −1.59 | Transmembrane | 188-204 (186-204) |

```
----- Final Results -----
                              bacterial membrane --- Certainty = 0.3951(Affirmative) < succ>
                                bacterial outside --- Certainty = 0.0000(Not Clear) < succ>
                            bacterial cytoplasm --- Certainty = 0.0000(Not Clear) < succ>
```

[1900] The protein has homology with the following sequences in the GENPEPT database:

| >GP: AAD35515 GB: AE001721 sugar ABC transporter, permease protein | | | |
|---|---|---|---|
| [Thermotoga maritima] | | | |
| Identities = 94/262 (35%), Positives = 158/262 (59%), Gaps = 1/262 (0%) | | | |
| Query: | 15 | LILCLLTVLFIFPFYWIMTGAFKSQPDTIIIPPQWWPKAPTLENFKALTVQNPALRWLWN | 74 |
| | | + + + V+F+ P ++ + +FK + PP +PK P+LE + + + L +L N | |
| Sbjct: | 9 | IFIVFMLVVFMLPVFYAVVSSFKPMSEIYSYPPTIFPKKPSLEGYINVIKEYDLLTYLRN | 68 |
| Query: | 75 | SVFISIMTMFLVCCTSSMAGYVLAKKRFYGQKILFSLFIAAMALPKQVVLVPLVRIINFM | 134 |
| | | ++F++ + + S M GY LAK +F+G + + S+F M + QV++VPL +I + | |
| Sbjct: | 69 | TLFVATVATVITVLVSVMTGYGLAKGKFWGIRPVNSMFTMTMFVSAQVIMVPLFVVIRSL | 128 |
| Query: | 135 | GIHDTLWAVILPLVGWPFGVFLMKQFSENIPTELLESAKIDGCGEIRTFINVAFPIVKPG | 194 |
| | | G+ ++LW +I+P V P G+F+ Q+ ++IP ELLESAKIDG E + F + FP+ KP | |
| Sbjct: | 129 | GLINSLWGLIIPAVYTPTGMFMAVQYMKDIPDELLESAKIDGANEWQIFWRIVFPLSKPL | 188 |
| Query: | 195 | FAALAIFTFINTWNDYFMQLVMLTSRNNLTISLGVATMQAEM-ATNYGLIMAGAALAAVP | 253 |
| | | AALAIF+F WND+ + L+++ RN T+ L +AT+Q E + I+A + L +P | |
| Sbjct: | 189 | VAALAIFSFTWRWNDFVLPLLVVNRRNLYTLQLALATIQEEYGGAEWNTILAFSTLTIIP | 248 |
| Query: | 254 | IVTVFLVFQKSFTQGITMGAVK | 275 |
| | | + +FL+FQ+ F +GI G +K | |
| Sbjct: | 249 | TLIIFLLFQRLFMKGIMAGGLK | 270 |

[1901] A related DNA sequence was identified in S. pyogenes <SEQ ID 937> which encodes the amino acid sequence <SEQ ID 938>. Analysis of this protein sequence reveals the following:

| Possible site: 40 | | | | |
|---|---|---|---|---|
| >>> Seems to have a cleavable N-term signal seq. | | | | |
| | INTEGRAL | Likelihood = −6.37 | Transmembrane | 245-261 (240-265) |
| | INTEGRAL | Likelihood = −5.15 | Transmembrane | 140-156 (139-158) |
| | INTEGRAL | Likelihood = −2.97 | Transmembrane | 111-127 (107-128) |
| | INTEGRAL | Likelihood = −2.87 | Transmembrane | 76-92 (75-93) |
| | INTEGRAL | Likelihood = −1.59 | Transmembrane | 188-204 (186-204) |

```
----- Final Results -----
                              bacterial membrane --- Certainty = 0.3548(Affirmative) < succ>
                                bacterial outside --- Certainty = 0.0000(Not Clear) < succ>
                            bacterial cytoplasm --- Certainty = 0.0000(Not Clear) < succ>
```

[1902] The protein has homology with the following sequences in the databases:

| >GP: CAB59597 GB: AL132662 probable sugar transport inner membrane | | | |
|---|---|---|---|
| protein [Streptomyces coelicolor A3(2)] | | | |
| Identities = 88/262 (33%), Positives = 147/262 (55%) | | | |
| Query: | 15 | VMLCVLTILFIFPFYWIMTGAFKAQADTIMIPPQWWPKAPTIENFKALVVQNPALKWLWN | 74 |
| | | ++L L ++F P W++ + + A+ PP WP + ++ ++ +W N | |
| Sbjct: | 38 | LLLAPLALVFAVPLVWLVLSSVMSNAEINRFPPALWPSGIDLGGYRYVLGNAMFPRWFVN | 97 |
| Query: | 75 | SVFISVATMFLVCGTSSLAGYALAKKRFYGQRLLFSIFIAAMALPKQVVLVPLVRIVNFM | 134 |
| | | S+ +S T+ SLAGYA A+ RF G R+L + +A MA+P Q+ ++P ++ + | |
| Sbjct: | 98 | SLIVSAVTVAANLVFGSLAGYAFARMRFAGSRVLMGLMLATMAVPFQLTMIPTFLVMKKL | 157 |
| Query: | 135 | GIHDTLAAVILPLVGWPFGVFLMKQFSENIPTELLESAKIDGCGEIRTFFNVAFPIVKPG | 194 |
| | | G+ DTL A+I+P + PF VFL++QF ++P EL E+A IDGC +R + + P+ +P | |
| Sbjct: | 158 | GLIDTLGALIVPSLVTPFAVFLLRQFFLSLPRELEEAAWIDGCSRLRVLWRIVLPLSRPA | 217 |
| Query: | 195 | FAALAIFTFINTWNDYFMQLVMLTSRENLTISLGVATMQAEMATNYGLIMAGAAMAAVPI | 254 |
| | | A +A+ TF+ TWND L+ + T+ LG+ T Q + T + +MAG + +P+ | |
| Sbjct: | 218 | LATVAVLTFLTTWNDLTWPLIAINHDTQYTLQLGLTTFQGQHHTQWAAVMAGNVITVLPV | 277 |
| Query: | 255 | VTVFLVFQKSFTQGITMGAVKG | 276 |
| | | + FL QK+F Q IT +KG | |
| Sbjct: | 278 | LLAFLGAQKTFIQSITSSGLKG | 299 |

[1903] An alignment of the GAS and GBS proteins is shown below:

| Identities = 245/276 (88%), Positives = 262/276 (94%) | | | |
|---|---|---|---|
| Query: | 1 | MKKKTFSAYNFLTALILCLLTVLFIFPFYWIMTGAFKSQPDTIIIPPQWWPKAPTLENFK | 60 |
| | | M KK +A + LT ++LC+LT+LFIFPFYWIMTGAFK+Q DTI+IPPQWWPKAPT+ENFK | |
| Sbjct: | 1 | MTKKKLTASDILTTVMLCVLTILFIFPFYWIMTGAFKAQADTIMIPPQWWPKAPTIENFK | 60 |
| Query: | 61 | ALTVQNPALRWLWNSVFISIMTMFLVCCTSSMAGYVLAKKRFYGQKILFSLFIAAMALPK | 120 |
| | | AL VQNPAL+WLWNSVFIS+ TMFLVC TSS+AGY LAKKRFYGQ++LFS+FIAAMALPK | |
| Sbjct: | 61 | ALVVQNPALKWLWNSVFISVATMFLVCGTSSLAGYALAKKRFYGQRLLFSIFIAAMALPK | 120 |
| Query: | 121 | QVVLVPLVRIINFMGIHDTLWAVILPLVGWPFGVFLMKQFSENIPTELLESAKIDGCGEI | 180 |
| | | QVVLVPLVRI+NFMGIHDTL AVILPLVGWPFGVFLMKQFSENIPTELLESAKIDGCGEI | |
| Sbjct: | 121 | QVVLVPLVRIVNFMGIHDTLAAVILPLVGWPFGVFLMKQFSENIPTELLESAKIDGCGEI | 180 |
| Query: | 181 | RTFINVAFPIVKPGFAALAIFTFINTWNDYFMQLVMLTSRNNLTISLGVATMQAEMATNY | 240 |
| | | RTF NVAFPIVKPGFAALAIFTFINTWNDYFMQLVMLTSR NLTISLGVATMQAEMATNY | |
| Sbjct: | 181 | RTFFNVAFPIVKPGFAALAIFTFINTWNDYFMQLVMLTSRENLTISLGVATMQAEMATNY | 240 |
| Query: | 241 | GLIMAGAALAAVPIVTVFLVFQKSFTQGITMGAVKG | 276 |
| | | GLIMAGAA+AAVPIVTVFLVFQKSFTQGITMGAVKG | |
| Sbjct: | 241 | GLIMAGAAMAAVPIVTVFLVFQKSFTQGITMGAVKG | 276 |

[1904] Based on this analysis, it was predicted that these proteins and their epitopes could be useful antigens for vaccines or diagnostics.

### EXAMPLE 292

[1905] A DNA sequence (GBSx0320) was identified in S. agalactiae <SEQ ID 939> which encodes the amino acid sequence <SEQ ID 940>. Analysis of this protein sequence reveals the following:

| Possible site: 31 | | | | |
|---|---|---|---|---|
| >>> Seems to have a cleavable N-term signal seq. | | | | |
| | INTEGRAL | Likelihood = −10.83 | Transmembrane | 74-90 (64-96) |
| | INTEGRAL | Likelihood = −6.37 | Transmembrane | 108-124 (107-126) |
| | INTEGRAL | Likelihood = −5.84 | Transmembrane | 270-286 (265-290) |
| | INTEGRAL | Likelihood = −5.20 | Transmembrane | 161-177 (156-182) |
| | INTEGRAL | Likelihood = −0.16 | Transmembrane | 219-235 (219-235) |

```
----- Final Results -----
                              bacterial membrane --- Certainty = 0.5331(Affirmative) < succ>
                                bacterial outside --- Certainty = 0.0000(Not Clear) < succ>
                            bacterial cytoplasm --- Certainty = 0.0000(Not Clear) < succ>
```

[1906] The protein has homology with the following sequences in the GENPEPT database:

| >GP: BAB05584 GB: AP001513 sugar transport system (permease) (binding | | | |
|---|---|---|---|
| protein dependent transporter) [Bacillus halodurans] | | | |
| Identities = 106/289 (36%), Positives = 168/289 (57%), Gaps = 6/289 (2%) | | | |
| Query: | 9 | RETMIAYAFLAPILLFFLIFVFAPMVMGFVTSFFNYSM-TQFTFIGLANYNRMF-HDSIF | 66 |
| | | +E Y F+AP ++ F IF PM+ SF ++ + + + G NY R+F D +F | |
| Sbjct: | 25 | KEYFWGYLFIAPPIIGFAIFALGPMLYSIYVSFTDFDLYNEPVWTGADNYYRLFVTDDLF | 84 |
| Query: | 67 | MKSLINTVIIVIGSVPVVVFFSLFVAANTYEKNVFSRSFYRCVFFLPVVTGSVAVTVVWK | 126 |
| | | K++ NT +G +P+ + SL +A +K V + +R FFLP V+ VA+T++W+ | |
| Sbjct: | 85 | RKTVFNTFYAALG-IPIGMAVSLGIAVALNQK-VKGIALFRTAFFLPAVSSVVAITLLWR | 142 |
| Query: | 127 | WIYDPMSGILNYILKSGHVIEQNISWLGDKHWALLAIIIILLTTSVGQPIILYIAAMGNI | 186 |
| | | WI++ G+LN +L +V WL D+ WA+ A+II + +G +ILY+AA+ + | |
| Sbjct: | 143 | WIFNADFGLLNIMLN--YVGIHGPGWLSDEKWAMPAMIIQGVWGGLGINMILYLAALQGV | 200 |
| Query: | 187 | DNSLCEAARVDGANEMQVFWQIKWPSLLPTTLYIAVITTINSFQCFALIQLLTSGGPNYS | 246 |
| | | + +L EAA +DG N Q F I PS+ PTT +I + +TI + Q F ++T GGPNYS | |
| Sbjct: | 201 | NPALYEAADIDGGNAWQKFIHITVPSISPTTFFILITSTIGALQDFQRFMIMTEGGPNYS | 260 |
| Query: | 247 | TSTLMYYLYEKAFKLSEYGYANTMGVFLAVMIALISFAQFKILGNDVEY | 295 |
| | | T+T++YYL+ AF+ E GYA+ M L ++I +I+ FK+ V Y | |
| Sbjct: | 261 | TTTVVYYLFLNAFRYMEMGYASAMAWVLGIIILIITIINFKLAKKWVHY | 309 |

[1907] A related DNA sequence was identified in S. pyogenes <SEQ ID 941> which encodes the amino acid sequence <SEQ ID 942>. Analysis of this protein sequence reveals the following:

| Possible site: 13 | | | | |
|---|---|---|---|---|
| >>> Seems to have no N-terminal signal sequence | | | | |
| | INTEGRAL | Likelihood = −12.74 | Transmembrane | 55-71 (44-78) |
| | INTEGRAL | Likelihood = −10.83 | Transmembrane | 109-125 (98-130) |
| | INTEGRAL | Likelihood = −6.21 | Transmembrane | 304-320 (299-324) |
| | INTEGRAL | Likelihood = −6.00 | Transmembrane | 142-158 (141-160) |
| | INTEGRAL | Likelihood = −5.04 | Transmembrane | 196-212 (190-216) |
| | INTEGRAL | Likelihood = −0.16 | Transmembrane | 253-269 (253-269) |

```
----- Final Results -----
                              bacterial membrane --- Certainty = 0.6095(Affirmative) < succ>
                                bacterial outside --- Certainty = 0.0000(Not Clear) < succ>
                            bacterial cytoplasm --- Certainty = 0.0000(Not Clear) < succ>
```

[1908] The protein has homology with the following sequences in the databases:

| >GP: BAB05584 GB: AP001513 sugar transport system (permease) (binding | | | |
|---|---|---|---|
| protein dependent transporter) [Bacillus halodurans] | | | |
| Identities = 113/310 (36%), Positives = 176/310 (56%), Gaps = 9/310 (2%) | | | |
| Query: | 25 | KVEQKKEVFQVNVNKLKMR---ETLISYAFLAPVLVFFVIFVLIPMIMGFVTSFFNYSM- | 80 |
| | | +VE +E K K R E Y F+AP ++ F IF L PM+ SF ++ + | |
| Sbjct: | 4 | EVETPRETKTTKARKQKRRLNKEYFWGYLFIAPPIIGFAIFALGPMLYSIYVSFTDFDLY | 63 |
| Query: | 81 | TEFTFVGFANYARMF-QDPIFMKSLINTLIIVIGSVPVVVFFSLFVAAKTYDKNVVARSF | 139 |
| | | E + G NY R+F D +F K++ NT +G +P+ + SL +A K V + | |
| Sbjct: | 64 | NEPVWTGADNYYRLFVTDDLFRKTVFNTFYAALG-IPIGMAVSLGIAVALNQK-VKGIAL | 121 |
| Query: | 140 | YRAVFFLPVVTGSVAVTVVWKWIYDPMSGILNYVLKYAHVIEQNISWLGDKHWALLAIIV | 199 |
| | | +R FFLP V+ VA+T++W+WI++ G+LN +L Y + WL D+ WA+ A+I+ | |
| Sbjct: | 122 | FRTAFFLPAVSSVVAITLLWRWIFNADFGLLNIMLNYVGI--HGPGWLSDEKWAMPAMII | 179 |
| Query: | 200 | ILLTTSVGQPIILYIAAMGNIDNSLVEAARVDGATEFQVFWNIKWPSLLPTTLYIAVITT | 259 |
| | | + +G +ILY+AA+ ++ +L EAA +DG +Q F +I PS+ PTT +I + +T | |
| Sbjct: | 180 | QGVWGGLGINMILYLAALQGVNPALYEAADIDGGNAWQKFIHITVPSISPTTFFILITST | 239 |
| Query: | 260 | INSFQCFALIQLLTSGGPNYSTSTLMYYLYEKAFKLSEYGYANTMGVFLAVMIAIISFAQ | 319 |
| | | I + Q F ++T GGPNYST+T++YYL+ AF+ E GYA+ M L ++I II+ | |
| Sbjct: | 240 | IGALQDFQRFMIMTEGGPNYSTTTVVYYLFLNAFRYMEMGYASAMAWVLGIIILIITIIN | 299 |
| Query: | 320 | FKILGNDVEY | 329 |
| | | FK+ V Y | |
| Sbjct: | 300 | FKLAKKWVHY | 309 |

[1909] An alignment of the GAS and GBS proteins is shown below:

| Identities = 263/295 (89%), Positives = 278/295 (94%) | | |
|---|---|---|
| Query: 1 | MRTNKLKMRETMIAYAFLAPILLFFLIFVFAPMVMGFVTSFFNYSMTQFTFIGLANYNRM | 60 |
| | + NKLKMRET+I+YAFLAP+L+FF+IFV PM+MGFVTSFFNYSMT+FTF+G ANY RM | |
| Sbjct: 35 | VNVNKLRMRETLISYAFLAPVLVFFVIFVLIPMIMGFVTSFFNYSMTEFTFVGFANYARM | 94 |
| Query: 61 | FHDSIFMKSLINTVIIVIGSVPVVVFFSLFVAANTYEKNVFSRSFYRCVFFLPVVTGSVA | 120 |
| | F D IFMKSLINT+IIVIGSVPVVVFFSLFVAA TY+KNV +RSFYR VFFLPVVTGSVA | |
| Sbjct: 95 | FQDPIFMKSLINTLIIVIGSVPVVVFFSLFVAAKTYDKNVVARSFYRAVFFLPVVTGSVA | 154 |
| Query: 121 | VTVVWKWIYDPMSGILNYILKSGHVIEQNISWLGDKHWALLAIIIILLTTSVGQPIILYI | 180 |
| | VTVVWKWIYDPMSGILNY+LK HVIEQNISWLGDKHWALLAII+ILLTTSVGQPIILYI | |
| Sbjct: 155 | VTVVWKWIYDPMSGILNYVLKYAHVIEQNISWLGDKHWALLAIIVILLTTSVGQPIILYI | 214 |
| Query: 181 | AAMGNIDNSLCEAARVDGANEMQVFWQIKWPSLLPTTLYIAVITTINSFQCFALIQLLTS | 240 |
| | AAMGNIDNSL EAARVDGA E QVFW IKWPSLLPTTLYIAVITTINSFQCFALIQLLTS | |
| Sbjct: 215 | AAMGNIDNSLVEAARVDGATEFQVFWNIKWPSLLPTTLYIAVITTINSFQCFALIQLLTS | 274 |
| Query: 241 | GGPNYSTSTLMYYLYEKAFKLSEYGYANTMGVFLAVMIALISFAQFKILGNDVEY | 295 |
| | GGPNYSTSTLMYYLYEKAFKLSEYGYANTMGVFLAVMIA+ISFAQFKILGNDVEY | |
| Sbjct: 275 | GGPNYSTSTLMYYLYEKAFKLSEYGYANTMGVFLAVMIAIISFAQFKILGNDVEY | 329 |

[1910] Based on this analysis, it was predicted that these proteins and their epitopes could be useful antigens for vaccines or diagnostics.

### EXAMPLE 293

[1911] A DNA sequence (GBSx0321) was identified in S. agalactiae <SEQ ID 943> which encodes the amino acid sequence <SEQ ID 944>. Analysis of this protein sequence reveals the following:

```
Possible site: 31
>>> Seems to have a cleavable N-term signal seq.
----- Final Results -----
    bacterial outside --- Certainty = 0.3000 (Affirmative) <succ>
  bacterial membrane --- Certainty = 0.0000 (Not Clear) <succ>
bacterial cytoplasm --- Certainty = 0.0000 (Not Clear) <succ>
```

[1912] The protein has homology with the following sequences in the GENPEPT database:

| >GP:CAB12516 GB:Z99107 similar to sugar-binding protein [Bacillus subtilis] | | |
|---|---|---|
| Identities = 54/187 (28%), Positives = 90/187 (47%), Gaps = 14/187 (7%) | | |
| Query: 19 | MFACVDSSQSVMAAEKD-KVEITWWAFPTFTQEKAKDGVGTYEKKVIKAFEKKNPNIKVK | 77 |
| | MF+ + + ++D + I WW + D Y KVI+ +EKKNP++ ++ | |
| Sbjct: 1 | MFSGCSAGEEASGKKEDVTLRIAWWG-----GQPRHD----YTTKVIELYEKKNPHVHIE | 51 |
| Query: 78 | LETIDFTSGPEKITTAIEAGTAPDVLFDAPGRIIQYGKNGKLADLNDLFTDQFIKDVN-- | 135 |
| | E ++ +K+ AG PDV+ + QYGK +L DL D I DV+ | |
| Sbjct: 52 | AEFANWDDYWKKLAPMSAAGQLPDVIQMDTAYLAQYGKKNQLEDLTPYTKDGTI-DVSSI | 110 |
| Query: 136 | NKNIIQASKSGDKAYMYPISSAPFYMAFNKKMLKDAGVLKLVKEGWTTSDFEKVLKALKN | 195 |
| | ++N++ K +K Y + + + N+ +LK AGV + +E WT D+EK+ L+ | |
| Sbjct: 111 | DENMLSGGKIDNKLYGFTLGVNVLSVIANEDLLKKAGV-SINQENWTWEDYEKLAYDLQE | 169 |
| Query: 196 | KGYTPGS | 202 |
| | K GS | |
| Sbjct: 170 | KAGVYGS | 176 |

[1913] A related DNA sequence was identified in S. pyogenes <SEQ ID 945> which encodes the amino acid sequence <SEQ ID 946>. Analysis of this protein sequence reveals the following:

```
Possible site: 20
>>> May be a lipoprotein
----- Final Results -----
  bacterial membrane --- Certainty = 0.0000 (Not Clear) <succ>
    bacterial outside --- Certainty = 0.0000 (Not Clear) <succ>
bacterial cytoplasm --- Certainty = 0.0000 (Not Clear) <succ>
```

[1914] The protein has homology with the following sequences in the databases:

| !GB:Z99107 similar to sugarbinding protein [Bacillu. . . 82 2e-14 | | |
|---|---|---|
| >GP:CAB12516 GB:Z99107 similar to sugar-binding protein [Bacillus subtilis] | | |
| Identities = 105/446 (23%), Positives = 176/446 (38%), Gaps = 71/446 (15%) | | |
| Query: 24 | GKSQKEAGASKSDTAKTEITWWAFPVFTQEKAEDGVGTYEKKLIAAFEKANPEIKVKLET | 83 |
| | G S E + K + I WW + D Y K+I +EK NP + ++ E | |
| Sbjct: 4 | GCSAGEEASGKKEDVTLRIAWWG-----GQPRHD----YTTKVIELYEKKNPHVHIEAEF | 54 |
| Query: 84 | IDFTSGPEKITTAIEAGTAPDVLFDAPGRIIQYGKNGKLADLNDLFTEEFTKDVN--NDK | 141 |
| | ++ +K+ AG PDV+ + QYGK +L DL +T++ T DV+ ++ | |
| Sbjct: 55 | ANWDDYWKKLAPMSAAGQLPDVIQMDTAYLAQYGKKNQLEDLTP-YTKDGTIDVSSIDEN | 113 |
| Query: 142 | LIQASKAGDTAYMYPISSAPFYMALNKKMLKDAGVLDLVKEGWTTDDFEKVLKALKDK-- | 199 |
| | ++ K + Y + + + N+ +LK AGV + +E WT +D+EK+ L++K | |
| Sbjct: 114 | MLSGGKIDNKLYGFTLGVNVLSVIANEDLLKKAGV-SINQENWTWEDYEKLAYDLQEKAG | 172 |
| Query: 200 | -----GYNPGSFFANGQGGDQGPRAFFANLYSSHITDDKV---------------TKYTT | 239 |
| | G +P F +G R+ + DD++ T T | |
| Sbjct: 173 | VYGSNGMHPPDIFFPYYLRTKGERFYKEDGTGLAYQDDQLFVDYFERQLRLVKAKTSPTP | 232 |
| Query: 240 | DDANSIKAMTKISNWIKDGLMMNGSQYDGSADIQNFANGQTSFTILWAPAQPGIQAKLLE | 299 |
| | D++ IK M +D ++ G SA N++N F A+L+ | |
| Sbjct: 233 | DESAQIKGM-------EDDFIVKGK----SAITWNYSNQYLGF------------ARLTD | 269 |
| Query: 300 | ASKVDYLEIPFPSDDGKPELEYLVNGFAVFNNKDEQKVAASKTFIQFIADDKEWGPKNVV | 359 |
| | + YL P + L + E K A+K FI F +++E + + | |
| Sbjct: 270 | SPLSLYLP---PEQMQEKALTLKPSMLFSIPKSSEHKKEAAK-FINFFVNNEE-ANQLIK | 324 |
| Query: 360 | RTGAFPVRTSYGDLYKDKRMEK---IAEWTKFYSPYYNTID-----GFAEMRTLWFPMVQ | 411 |
| | PV D K K E+ I E+ + S + D G AE+ L | |
| Sbjct: 325 | GERGVPVSDKVADAIKPKLNEEETNIVEYVETASKNISKADPPEPVGSAEVIKLLKDTSD | 384 |
| Query: 412 | AVSNGDEKPEDALKAFTEKANKTIKK | 437 |
| | + PE A K F +KAN+ +++ | |
| Sbjct: 385 | QILYQKVSPEKAAKTFRKKANEILER | 410 |

[1915] An alignment of the GAS and GBS proteins is shown below:

| Identities = 352/438 (80%), Positives = 384/438 (87%), Gaps = 4/438 (0%) | | |
|---|---|---|
| Query: 1 | MSIKKSVIGFCLGAAALSMFACVDSSQSVMAAEKD---KVEITWWAFPTFTQEKAKDGVG | 57 |
| | M++KK LGA+ L + AC SQ A K K EITWWAFP FTQEKA+DGVG | |
| Sbjct: 1 | MNMKKLASLAMLGASVLGLAACGGKSQKEAGASKSDTAKTEITWWAFPVFTQEKAEDGVG | 60 |
| Query: 58 | TYEKKVIKAFEKKNPNIKVKLETIDFTSGPEKITTAIEAGTAPDVLFDAPGRIIQYGKNG | 117 |
| | TYEKK+I AFEK NP IKVKLETIDFTSGPEKITTAIEAGTAPDVLFDAPGRIIQYGKNG | |
| Sbjct: 61 | TYEKKLIAAFEKANPEIKVKLETIDFTSGPEKITTAIEAGTAPDVLFDAPGRIIQYGKNG | 120 |
| Query: 118 | KLADLNDLFTDQFIKDVNNKNIIQASKSGDKAYMYPISSAPFYMAFNKKMLKDAGVLKLV | 177 |
| | KLADLNDLFT++F KDVUN +IQASK+GD AYMYPISSAPFYMA NKKMLKDAGVL LV | |
| Sbjct: 121 | KLADLNDLFTEEFTKDVNNDKLIQASKAGDTAYMYPISSAPFYMALNKKMLKDAGVLDLV | 180 |
| Query: 178 | KEGWTTSDFEKVLKALKNKGYTPGSFFANGQGGDQGPRAFFANLYSAPITDKEVTKYTTD | 237 |
| | KEGWTT DFEKVLKALK+KGY PGSFFANGQGGDQGPRAFFANLYS+ ITD +VTKYTTD | |
| Sbjct: 181 | KEGWTTDDFEKVLKALKDKGYNPGSFFANGQGGDQGPRAFFANLYSSHITDDKVTKYTTD | 240 |
| Query: 238 | TKNSVKSMKKIVEWIKKGYLMNGSQYDGSADIQNFANGQTAFTILWAPAQPKTQAKLLES | 297 |
| | NS+K+M KI WIK G +MNGSQYDGSADIQNFANGQT+FTILWAPAQP QAKLLE+ | |
| Sbjct: 241 | DANSIKANTKISNWIKDGLMNNGSQYDGSADIQNFANGQTSFTILWAPAQPGIQAKLLEA | 300 |
| Query: 298 | SKVDYLEVPFPSEDGKPDLEYLVNGFAVFNNKDENKVKASKKFITFIADDKKWGPKDVIR | 357 |
| | SKVDYLE+PFPS+DGKP+LEYLVNGFAVFNNKDE KV ASK FI FIADDK+WGPK+V+R | |
| Sbjct: 301 | SKVDYLEIPFPSDDGKPELEYLVNGFAVFNNKDEQKVAASKTFIQFIADDKEWGPKNVVR | 360 |
| Query: 358 | TGAFPVRTSFGDLYKGDKRNNKISKWTQYYSPYYNTIDGFSEMRTLWFPNVQSVSNGDEK | 417 |
| | TGAFPVRTS+GDLYK DKRN KI++WT++YSPYYNTIDGF+EMRTLWFPNVQ+VSNGDEK | |
| Sbjct: 361 | TGAFPVRTSYGDLYK-DKRNEKIAEWTKFYSPYYNTIDGFAEMRTLWFPMVQAVSNGDEK | 419 |
| Query: 418 | PADALKDFTQKANDTIKK | 435 |
| | P DALK FT+KAN TIKK | |
| Sbjct: 420 | PEDALKAFTEKANKTIKK | 437 |

[1916] A related GBS gene <SEQ ID 8537> and protein <SEQ ID 8538> were also identified. Analysis of this protein sequence reveals the following:

```
Lipop: Possible site: −1 Crend: 4
McG: Discrim Score: 5.05
GvH: Signal Score (−7.5): 4.69
          Possible site: 31
>>> Seems to have a cleavable N-term signal seq.
ALOM program count: 0  value: 7.69  threshold: 0.0
      PERIPHERAL Likelihood = 7.69 90
  modified ALOM score: −2.04
*** Reasoning Step: 3
----- Final Results -----
                                bacterial outside --- Certainty = 0.3000(Affirmative) < succ>
                              bacterial membrane --- Certainty = 0.0000(Not Clear) < succ>
                            bacterial cytoplasm --- Certainty = 0.0000(Not Clear) < succ>
```

[1917] The protein has homology with the following sequences in the databases:

[chemical structure]

[1918] SEQ ID 944 (GBS16) was expressed in E. coli as a His-fusion product. SDS-PAGE analysis of total cell extract is shown in FIG. 3 (lane 9; MW 49 kDa).

[1919] The GBS16-His fusion product was purified (FIG. 92A; see also FIG. 189, lane 9) and used to immunise mice (lane 1+2 product; 20 μg/mouse). The resulting antiserum was used for Western blot (FIG. 92B), FACS (FIG. 92C), and in the in vivo passive protection assay (Table III). These tests confirm that the protein is immunoaccessible on GBS bacteria and that it is an effective protective immunogen.

[1920] Based on this analysis, it was predicted that these proteins and their epitopes could be useful antigens for vaccines or diagnostics.

### EXAMPLE 294

[1921] A DNA sequence (GBSx0322) was identified in S. agalactiae <SEQ ID 947> which encodes the amino acid sequence <SEQ ID 948>. Analysis of this protein sequence reveals the following:

Possible site: 49
>>> Seems to have no N-terminal signal sequence
----- Final Results -----
bacterial membrane --- Certainty = 0.0000 (Not Clear) < succ>
bacterial outside --- Certainty = 0.0000 (Not Clear) < succ>
bacterial cytoplasm --- Certainty = 0.0000 (Not Clear) < succ>

[1922] A related GBS nucleic acid sequence <SEQ ID 9459> which encodes amino acid sequence <SEQ ID 9460> was also identified.

[1923] The protein has homology with the following sequences in the GENPEPT database:

| >GP:AAC66999 GB:AE001166 conserved hypothetical protein | | | |
|---|---|---|---|
| [Borrelia burgdorferi] | | | |
| Identities = 107/225 (47%), Positives = 147/225 (64%), Gaps = 6/225 (2%) | | | |
| Query: | 12 | QIKNGIIVSCQALPGEPLYTESGGVMPLLALAAQEAGAVGIRANSVRDIKEIQEVTNLPI | 71 |
| | | +IK G+IVSCQAL EPL+ S +M +ALAA+ GA+GIRAN V DI +I+ +LPI | |
| Sbjct: | 6 | KIKRGLIVSCQALENEPLH--SSFIMSKMALAAKIGGAIGIRANGVNDISQIKLEVDLPI | 63 |
| Query: | 72 | IGIIKREYPPQEPFITATMTEVDQLASLDIAVIALDCTLRERHDGLSVVEFIQKIKRKYP | 131 |
| | | IGIIK+ Y + FIT TM E+D+L + + +IALD T R R DG+ + +F + IK+KYP | |
| Sbjct: | 64 | IGIIKKNYNNCDVFITPTMKEIDELCNEGVDIIALDATFRNRPDGVLLDDFFENIKKKYP | 123 |
| Query: | 132 | EQLLMADISTFEEGKNAFEAGVDFVGTTLSGYTDYSR--QEEGPDIELLNKLCQAGI--D | 187 |
| | | +Q LMADIS+ +E NA + G DF+GTTL GYT + D L L + + | |
| Sbjct: | 124 | KQCLMADISSLDEAINADKLGFDFIGTTLYGYTKNTNGLNIADNDFNFLRTLLNSNLKST | 183 |
| Query: | 188 | VIAEGKIHTPKQANEINHIGVAGIVVGGAITRPKEIAERFISGLS | 232 |
| | | +I EGKI TP +A + +GV +VVGGAITRP EI ++F+ ++ | |
| Sbjct: | 184 | LIVEGKIDTPLKAQKCFEMGVDLVVVGGAITRPAEITKKFVEKIN | 228 |

[1924] A related DNA sequence was identified in S. pyogenes <SEQ ID 949> which encodes the amino acid sequence <SEQ ID 950>. Analysis of this protein sequence reveals the following:

| Possible site: 44 | | | | |
|---|---|---|---|---|
| >>> Seems to have no N-terminal signal sequence | | | | |
| INTEGRAL | Likelihood = −1.49 | Transmembrane | 175-191 | (175-192) |

----- Final Results -----
bacterial membrane --- Certainty = 0.1595 (Affirmative) < succ>
bacterial outside --- Certainty = 0.0000 (Not Clear) < succ>
bacterial cytoplasm --- Certainty = 0.0000 (Not Clear) < succ>

[1925] The protein has homology with the following sequences in the databases:

| >GP:AAD28762 GB:AF130859 putative N-acetylmannosamine-6-P epimerase | | | |
|---|---|---|---|
| [Clostridium perfringens] | | | |
| Identities = 113/225 (50%), Positives = 148/225 (65%), Gaps = 5/225 (2%) | | | |
| Query: | 10 | LMEQLKGGIIVSCQALPGEPLYSETGGIMPLMAKAAQEAGAVGIRANSVRDIKEIQAITD | 69 |
| | | +++ +KG +IVSCQAL EPL+S IM MA AA++ GA IRA + DI EI+ +T | |
| Sbjct: | 1 | MLDVVKGNLIVSCQALSDEPLHSSF--IMGRMAIAAKQGGAAAIRAQGIDDINEIKEVTK | 58 |
| Query: | 70 | LPIIGIIKKDYPPQEPFITATMTEVDQLAALNIAVIAMDCTKRDRHDGLDIASFIRQVKE | 129 |
| | | LPIIGIIK++Y E +IT TM EVD+L + +I +D TKR R +G +I + + | |
| Sbjct: | 59 | LPIIGIIKRNYDDSEIYITPTMKEVDELLKTDCEMIGLDATKRKRPNGENIKDLVDAIHA | 118 |
| Query: | 130 | KYPNQLLMADISTFDEGLVAHQAGIDFVGTTLSGYTPYSRQEAGPDVALIEALCK-AGIA | 188 |
| | | K +L MADIST +EG+ A + G D V TTLSGYTPYS+Q D L+E L K I | |
| Sbjct: | 119 | K--GRLAMADISTLEEGIEAEKLGFDCVSTTLSGYTPYSKQSNSVDFELLEELVKTVKIP | 176 |
| Query: | 189 | VIAEGKIHSPEEAKKINDLGVAGIVVGGAITRPKEIAERFIEALK | 233 |
| | | VI EG+I++PEE KK DLG VVGGAITRP++I +RF + LK | |
| Sbjct: | 177 | VICEGRINTPEELKKALDLGAYSAVVGGAITRPQQITKRFTDILK | 221 |

[1926] An alignment of the GAS and GBS proteins is shown below:

| Identities = 172/227 (75%), Positives = 202/227 (88%) | | | |
|---|---|---|---|
| Query: | 5 | SKEAFKKQIKNGIIVSCQALPGEPLYTESGGVMPLLALAAQEAGAVGIRANSVRDIKEIQ | 64 |
| | | +KE +Q+K GIIVSCQALPGEPLY+E+GG+MPL+A AAQEAGAVGIRANSVRDIKEIQ | |
| Sbjct: | 6 | TKEKLMEQLKGGIIVSCQALPGEPLYSETGGIMPLMAKAAQEAGAVGIRANSVRDIKEIQ | 65 |
| Query: | 65 | EVTNLPIIGIIKREYPPQEPFITATMTEVDQLASLDIAVIALDCTLRERHDGLSVVEFIQ | 124 |
| | | +T+LPIIGIIK++YPPQEPFITATMTEVDQLA+L+IAVIA+DCT R+RHDGL + FI+ | |
| Sbjct: | 66 | AITDLPIIGIIKKDYPPQEPFITATMTEVDQLAALNIAVIAMDCTKRDRHDGLDIASFIR | 125 |
| Query: | 125 | KIKRKYPEQLLMADISTFEEGKNAFEAGVDFVGTTLSGYTDYSRQEEGPDIELLNKLCQA | 184 |
| | | ++K KYP QLLMADISTF+EG A +AG+DFVGTTLSGYT YSRQE GPD+ L+ LC+A | |
| Sbjct: | 126 | QVKEKYPNQLLMADISTFDEGLVAHQAGIDFVGTTLSGYTPYSRQEAGPDVALIEALCKA | 185 |
| Query: | 185 | GIDVIAEGKIHTPKQANEINHIGVAGIVVGGAITRPKEIAERFISGL | 231 |
| | | GI VIAEGKIH+P++A +IN +GVAGIVVGGAITRPKEIAERFI L | |
| Sbjct: | 186 | GIAVIAEGKIHSPEEAKKINDLGVAGIVVGGAITRPKEIAERFIEAL | 232 |

[1927] Based on this analysis, it was predicted that these proteins and their epitopes could be useful antigens for vaccines or diagnostics.

### EXAMPLE 295

[1928] A DNA sequence (GBSx0323) was identified in S. agalactiae <SEQ ID 951> which encodes the amino acid sequence <SEQ ID 952>. This protein is predicted to be group B streptococcal surface immunogenic protein. Analysis of this protein sequence reveals the following:

Possible site: 25
>>> Seems to have a cleavable N-term signal seq.
----- Final Results -----
bacterial outside --- Certainty = 0.3000 (Affirmative) < succ>
bacterial membrane --- Certainty = 0.0000 (Not Clear) < succ>
bacterial cytoplasm --- Certainty = 0.0000 (Not Clear) < succ>

[1929] A related DNA sequence was identified in S. pyogenes <SEQ ID 953> which encodes the amino acid sequence <SEQ ID 954>. Analysis of this protein sequence reveals the following:

Possible site: 25
>>> Seems to have a cleavable N-term signal seq.
----- Final Results -----
bacterial outside --- Certainty = 0.3000 (Affirmative) < succ>
bacterial membrane --- Certainty = 0.0000 (Not Clear) < succ>
bacterial cytoplasm --- Certainty = 0.0000 (Not Clear) < succ>

[1930] An alignment of the GAS and GBS proteins is shown below:

| Identities = 182/437 (41%), Positives = 240/437 (54%), | | | |
|---|---|---|---|
| Gaps = 53/437 (12%) | | | |
| Query: | 1 | MKMNKKVLLTSTMAASLLSVASVQAQETDTTWTARTVSEVKADLVKQDNKSSYTVKYGDT | 60 |
| | | M + KK L +++A SL+ +A+ QAQE WT R+V+E+K++LV DN +YTVKYGDT | |
| Sbjct: | 1 | MIITKKSLFVTSVALSLVPLATAQAQE----WTPRSVTEIKSELVLVDNVFTYTVKYGDT | 56 |
| Query: | 61 | LSVISEAMSIDMNVLAKINNIADINLIYPETTLTVTYDQKSHTATSMKIETPATNAAGQT | 120 |
| | | LS I+EAM ID++VL IN+IA+I+LI+P+T LT Y+Q AT++ ++ PA++ A + | |
| Sbjct: | 57 | LSTIAEAMGIDVHVLGDINHIANIDLIFPDTILTANYNQHGQ-ATNLTVQAPASSPASVS | 115 |
| Query: | 121 | TATVDLKTNQVSVADQKVSLNTISEGMTP-EAATTIVSPMKTYSSAPALKSKEVLAQEQA | 179 |
| | | Q S Q ++ TP + TT + K SS A S E+ + | |
| Sbjct: | 116 | HVPSSEPLPQASATSQPTV--PMAPPATPSDVPTTPFASAKPDSSVTA--SSELTSSTND | 171 |
| Query: | 180 | VSQAAANEQVSPAPVKSITSEVPAAKEEVKPTQTSVSQSTTVSPASVAAETPAPVAKVAP | 239 |
| | | VS ++E V P A E T V T +S A +A P P + | |
| Sbjct: | 172 | VSTELSSESQKQPEVPQEAVPTPKAAE-----TTEVEPKTDISEAPTSANRPVPNESASE | 226 |
| Query: | 240 | VRTVAAPRVASVKVVTPKVETGASPEHVSAPAVP---VTTTSPATDSKLQATEVKSVPVA | 296 |
| | | + AAP + A E SAPA TTS AT + L | |
| Sbjct: | 227 | EVSSAAP-----------AQAPAEKEETSAPAAQKAVADTTSVATSNGL----------- | 264 |
| Query: | 297 | QKAPTATPVAQPASTTNAVAAHPENAGLQPHVAAYKEKVASTYGVNEFSTYRAGDPGDHG | 356 |
| | | AP A +P NAGLQP AA+KE+VAS +G+ FS YR GDPGDHG | |
| Sbjct: | 265 | SYAPNH-------------AYNPMNAGLQPQTAAFKEEVASAFGITSFSGYRPGDPGDHG | 311 |
| Query: | 357 | KGLAVDFIVGTNQALGNKVAQYSTQNMAANNISYVIWQQKFYSNTNSIYGPANTWNAMPD | 416 |
| | | KGLA+DF+V N ALG++VAQY+ +MA ISYVIW+Q+FY+ SIYGPA TWN MPD | |
| Sbjct: | 312 | KGLAIDFMVPENSALGDQVAQYAIDHMAERGISYVIWKQRFYAPFASIYGPAYTWNPMPD | 371 |
| Query: | 417 | RGGVTANHYDHVHVSFN | 433 |
| | | RG +T NHYDHVHVSFN | |
| Sbjct: | 372 | RGSITENHYDHVHVSFN | 388 |

[1931] A related GBS gene <SEQ ID 8539> and protein <SEQ ID 8540> were also identified. Analysis of this protein sequence reveals the following:

| Lipop: Possible site: −1 Crend: 3 | | |
|---|---|---|
| SRCFLG: 0 | | |
| McG: Length of UR: 20 | | |
| Peak Value of UR: 1.96 | | |
| Net Charge of CR: 2 | | |
| McG: Discrim Score: 2.95 | | |
| GvH: Signal Score (−7.5): 3.84 | | |
| Possible site: 23 | | |
| >>> Seems to have a cleavable N-term signal seq. | | |
| Amino Acid Composition: calculated from 24 | | |
| ALOM program | count: 0 value: | 4.29 threshold: 0.0 |

| | |
|---|---|
| PERIPHERAL | Likelihood = 4.29 58 |

modified ALOM score: −1.36
*** Reasoning Step: 3
Rule gpo1
----- Final Results -----
bacterial outside --- Certainty = 0.3000 (Affirmative) < succ>
bacterial membrame --- Certainty = 0.0000 (Not Clear) < succ>
bacterial cytoplasm --- Certainty = 0.0000 (Not Clear) < succ>

[1932] SEQ ID 8540 (GBS322) was expressed in E. coli as a His-fusion product. SDS-PAGE analysis of total cell extract is shown in FIG. 77 (lane 9; MW 52 kDa). The GBS322-His fusion product was purified (FIG. 214, lane 10) and used to immunise mice. The resulting antiserum was used for FACS (FIG. 267), which confirmed that the protein is immunoaccessible on GBS bacteria.

[1933] Based on this analysis, it was predicted that these proteins and their epitopes could be useful antigens for vaccines or diagnostics.

### EXAMPLE 296

[1934] A DNA sequence (GBSx0324) was identified in S. agalactiae <SEQ ID 955> which encodes the amino acid sequence <SEQ ID 956>. Analysis of this protein sequence reveals the following:

| Possible site: 23 | | |
|---|---|---|
| >>> Seems to have an uncleavable N-term signal seq | | |
| INTEGRAL | Likelihood = −1.86 | Transmembrane 5-21 (4-21) |

```
----- Final Results -----
  bacterial membrane --- Certainty = 0.1744 (Affirmative) <succ>
    bacterial outside --- Certainty = 0.0000 (Not Clear) <succ>
bacterial cytoplasm --- Certainty = 0.0000 (Not Clear) <succ>
```

[1935] The protein has homology with the following sequences in the GENPEPT database:

| >GP:AAC46072 GB:U50357 zoocin A endopeptidase [Streptococcus | | |
|---|---|---|
| zooepidemicus] | | |
| Identities = 163/274 (59%), Positives = 196/274 (71%), Gaps = 11/274 (4%) | | |
| Query: 25 | VLADTYVRPIDNGRITTGFNGYPGHCGVDYAVPTGTIIRAVADGTVKFAGAGANFSWMTD | 84 |
| | V A TY RP+D G ITTGFNGYPGH GVDYAVP GT +RAVA+GTVKFAG GAN WM | |
| Sbjct: 21 | VSAATYTRPLDTGNITTGFNGYPGHVGVDYAVPVGTPVRAVANGTVKFAGNGANHPWMLW | 80 |
| Query: 85 | LAGNCVMIQHADGMHSGYAHMSRVVARTGEKVKQGDIIGYVGATGMATGPHLHFEFLPAN | 144 |
| | +AGNCV+IQHADGMH+GYAH+S++ T VKQG IIGY GATG TGPHLHFE LPAN | |
| Sbjct: 81 | MAGNCVLIQHADGMHTGYAHLSKISVSTDSTVKQGQIIGYTGATGQVTGPHLHFEMLPAN | 140 |
| Query: 145 | PNFQNGFHGRINPTSLIANVATFSGKTQASAPSIKPLQSAPVQNQSSKLKVYRVDELQKV | 204 |
| | PN+QNGF GRI+PT IAN F+G T + P N LK+Y+VD+LQK+ | |
| Sbjct: 141 | PNWQNGFSGRIDPTGYIANAPVFNGTTPTE-------PTTPTTN----LKIYKVDDLQKI | 189 |
| Query: 205 | NGVWLVKNNTLTPTGFDWNDNGIPASEIDEVDANGNLTADQVLQKGGYFIFNPKTLKTVE | 264 |
| | NG+W V+NN L PT F W DNGI A ++ EV +NG T+DQVLQKGGYF+ NP +K+V | |
| Sbjct: 190 | NGIWQVRNNILVPTDFTWVDNGIAADDVIEVTSNGTRTSDQVLQKGGYFVINPNNVKSVG | 249 |
| Query: 265 | KPIQGTAGLTWAKTRFANGSSVWLRVDNSQELLY | 298 |
| | P++G+ GL+WA+ F G +VWL + LLY | |
| Sbjct: 250 | TPMKGSGGLSWAQVNFTTGGNVWLNTTSKDNLLY | 283 |

[1936] No corresponding DNA sequence was identified in S. pyogenes.

[1937] A related GBS gene <SEQ ID 8541> and protein <SEQ ID 8542> were also identified. Analysis of this protein sequence reveals the following:

| | | |
|---|---|---|
| Lipop: | Possible site: −1 | Crend: 6 |
| McG: | Discrim Score: 6.63 | |
| GvH: | Signal Score (−7.5): −2.97 | |

| Possible site: 23 | | |
|---|---|---|
| >>> Seems to have an uncleavable N-term signal seq | | |
| ALOM program count: 1 value: −1.86 threshold: 0.0 | | |
| INTEGRAL | Likelihood = −1.86 | Transmembrane 5-21 (4-21) |
| PERIPHERAL | Likelihood = 5.57 | 50 |

```
modified ALOM score: 0.87
*** Reasoning Step: 3
----- Final Results -----
  bacterial membrane --- Certainty = 0.1744 (Affirmative) <succ>
    bacterial outside --- Certainty = 0.0000 (Not Clear) <succ>
bacterial cytoplasm --- Certainty = 0.0000 (Not Clear) <succ>
```

[1938] The protein has homology with the following sequences in the databases:

[chemical structure]

[1939] SEQ ID 8542 (GBS36) was expressed in E. coli as a His-fusion product. SDS-PAGE analysis of total cell extract is shown in FIG. 11 (lane 4; MW 34.1 kDa).

[1940] GBS36-His was purified as shown in FIG. 192, lane 7.

[1941] Based on this analysis, it was predicted that these proteins and their epitopes could be useful antigens for vaccines or diagnostics.

### EXAMPLE 297

[1942] A DNA sequence (GBSx0325) was identified in S. agalactiae <SEQ ID 957> which encodes the amino acid sequence <SEQ ID 958>. This protein is predicted to be phosphoribosylaminoimidazolecarboxamide formyltransferase/IMP cyclohyd. Analysis of this protein sequence reveals the following:

```
Possible site: 48
>>> Seems to have no N-terminal signal sequence
----- Final Results -----
                            bacterial cytoplasm --- Certainty = 0.2815(Affirmative) < succ>
                              bacterial membrane --- Certainty = 0.0000(Not Clear) < succ>
                                bacterial outside --- Certainty = 0.0000(Not Clear) < succ>
```

[1943] The protein has homology with the following sequences in the GENPEPT database:

| >GP:BAB04352 GB:AP001509 phosphoribosylaminoimidazolecarboxamide | | |
|---|---|---|
| formyltransferase/IMP cyclohydrolase [Bacillus halodurans] | | |
| Identities = 310/515 (60%), Positives = 390/515 (75%), Gaps = 4/515 (0%) | | |
| Query: 1 | MTKRALISVSDKSGIIDFAKELKNLGWDIISTGGTKVALDDAGVETIAIDDVTGFPEMMD | 60 |
| | M +RAL+SVS+K GI+ FAK L +I+STGGTK AL +AG+ I DVTGFPE++D | |
| Sbjct: 1 | MKRRALVSVSNREGIVPFAKALVEHEVEIVSTGGTKRALQEAGIPVTGISDVTGFPEILD | 60 |
| Query: 61 | GRVKTLHPNIHGGLLARRDADSHLQAAKDNNIELIDLVVVNLYPFKETILRPDVTYDLAV | 120 |
| | GRVKTLHPNIHGGLLA R+ D HL +++I ID VVVNLYPF++TI +P+ T+ A+ | |
| Sbjct: 61 | GRVKTLHPNIHGGLLAMRERDEHLAQLNEHHIRPIDFVVVNLYPFQQTIAKPEATFADAI | 120 |
| Query: 121 | ENIDIGGPSMLRSAAKNHASVTVVVDSADYATVLGELADASQTTFKTRQRLAAKAFRHTA | 180 |
| | ENIDIGGPSMLR+AAKNH VTVVVD DY TVL ELAD +T++RLAAK FRHTA | |
| Sbjct: 121 | ENIDIGGPSMLRAAAKNHQHVTVVVDPVDYETVLKELADQGMVATETKRRLAAKVFRHTA | 180 |
| Query: 181 | AYDALIAEYFTAQVGEAKPEKLTITYDLKQAMRYGENPQQDADFYQKALPTDYSIASAKQ | 240 |
| | AYDA+IAEY T VGE PE LT+T++ KQ +RYGENP Q A FYQE L SIA AKQ | |
| Sbjct: 181 | AYDAMIAEYLTDAVGEESPESLTVTFE-KQDLRYGENPHQKATFYQKPLGAKASIAHAKQ | 240 |
| Query: 241 | LNGKELSFNNIRDADAAIRIIRDFKDSPTVVALKHMNPCGIGQADDIETAWDYAYEADPV | 300 |
| | L+GKELS+NNI DADAA+I+++FK+ P VA+KHMNPCG+G + I+ A+D AYEADPV | |
| Sbjct: 241 | LHGKELSYNNINDADAALSIVKEFKE-PAAVAVKHMNPCGVGTGETIKEAFDRAYEADPV | 299 |
| Query: 301 | SIFGGIVVLNREVDAATAEKMHPIFLEIIIAPSYSEEALAILTNKKKNLRILELPFDAQA | 360 |
| | SIFGGI+LNREVD TA+ + IFLEIIIAPS+SEEAL +LT+ KKNLR+L LP + + | |
| Sbjct: 300 | SIFGGIIALNREVDVETAKTLKEIFLEIIIAPSFSEEALDVLTS-KKNLRLLTLPLNEE- | 357 |
| Query: 361 | ASEVEAEYTGVVGGLLVQNQDVVAENPSDWQVVTDRQPTEQEATALEFAWKAIKYVKSNG | 420 |
| | ++ E T + GG LVQ +D ++ ++ T R+PTE E AL+ AW+ +K+VKSN | |
| Sbjct: 358 | -NQAEKRITSIHGGALVQEEDTYGFEEAEIKIPTKREPTEAEWEALKLAWRVVKHVRSNA | 416 |
| Query: 421 | IIITNDHMTLGLGAGQTMRVGSVKIAIEQAKDHLDGAVLASDAFFPFADNIEEIAAAGIK | 480 |
| | I++ + MT+G+GAGQ NRVG+ KIAIEQA + G+V+ SDAFFP D +E A AGI | |
| Sbjct: 417 | IVLADGQMTVGVGAGQMNRVGAAKIAIEQAGEKAAGSVMGSDAFFPMGDTVELAAKAGIT | 476 |
| Query: 481 | AIIQPGGSVRDQESIDAANKHGLTMIFTGVRHFRH | 515 |
| | AIIQPGGS+RD+ESI+ A+KHG+ M+FTGVRHF+H | |
| Sbjct: 477 | AIIQPGGSIRDEESIENADKHGIAMVFTGVRHFKH | 511 |

[1944] A related DNA sequence was identified in S. pyogenes <SEQ ID 959> which encodes the amino acid sequence <SEQ ID 960>. Analysis of this protein sequence reveals the following:

```
Possible site: 48
>>> Seems to have no N-terminal signal sequence
----- Final Results -----
                            bacterial cytoplasm --- Certainty = 0.2932(Affirmative) < succ>
                              bacterial membrane --- Certainty = 0.0000(Not Clear) < succ>
                                bacterial outside --- Certainty = 0.0000(Not Clear) < succ>
```

[1945] An alignment of the GAS and GBS proteins is shown below:

| Identities = 500/515 (97%), Positives = 507/515 (98%) | | |
|---|---|---|
| Query: 1 | MTKRALISVSDKSGIIDFAKELKNLGWDIISTGGTKVALDDAGVETIAIDDVTGFPEMMD | 60 |
| | MTKRALISVSDKSGI+DFAKELKNLGWDIISTGGTKV LDDAGVETIAIDDVT FPEMMD | |
| Sbjct: 1 | MTKRALISVSDKSGIVDFAKELKNLGWDIISTGGTKVTLDDAGVETIAIDDVTRFPEMMD | 60 |
| Query: 61 | GRVKTLHPNIHGGLLARRDADSHLQAAKDNNIELIDLVVVNLYPFKETILRPDVTYDLAV | 120 |
| | GRVKTLHPNIHGGLLARRDADSHLQAAKDNNIELIDLVVVNLYPFKETILRPD+TYDLAV | |
| Sbjct: 61 | GRVKTLHPNIHGGLLARRDADSHLQAAKDNNIELIDLVVVNLYPFKETILRPDITYDLAV | 120 |
| Query: 121 | ENIDIGGPSMLRSAAKNHASVTVVVDSADYATVLGELADASQTTFKTRQRLAAKAFRHTA | 180 |
| | ENIDIGGPSNLRSAAKNHASVTVVVD ADYATVLGELADA QTTF+TRQRLAAK FRHTA | |
| Sbjct: 121 | ENIDIGGPSMLRSAAKNHASVTVVVDPADYATVLGELADAGQTTFETRQRLAAKVFRHTA | 180 |
| Query: 181 | AYDALIAEYFTAQVGEAKPEKLTITYDLKQAMRYGENPQQDADFYQKALPTDYSIASAKQ | 240 |
| | AYDALIAEYFT QVGEAKPEKLTITYDLKQAMRYGENPQQDADFYQKALPTDYSIASAKQ | |
| Sbjct: 181 | AYDALIAEYFTTQVGEAKPEKLTITYDLKQAMRYGENPQQOADFYQKALPTDYSIASAKQ | 240 |
| Query: 241 | LNGKELSFNNIRDADAAIRIIRDFKDSPTVVALKHMNPCGIGQADDIETAWDYAYEADPV | 300 |
| | LNGKELSFNNIRDADAAIRIIRDFKD PTVVALKHMNPCGIGQADDIETAWDY Y+ADPV | |
| Sbjct: 241 | LNGKELSFNNIRDADAAIRIIRDFKDRPTVVALKHMNPCGIGQADDIETAWDYTYKADPV | 300 |
| Query: 301 | SIFGGIVVLNREVDAATAEKMHPIFLEIIIAPSYSEEALAILTNKKKNLRILELPFDAQA | 360 |
| | SIFGGI+VLNREVDAATA+KMHPIFLEIIIAPSYSEEALAILTNKKKNLRILELPFDAQA | |
| Sbjct: 301 | SIFGGIIVLNREVDAATAKKMHPIFLEIIIAPSYSEEALAILTNKKKNLRILELPFDAQA | 360 |
| Query: 361 | ASEVEAEYTGVVGGLLVQNQDVVAENPSDWQVVTDRQPTEQEATALEFAWKAIKYVKSNG | 420 |
| | ASEVEAEYTGVVGGLLVQNQDVVAENPSDWQVVTDRQPTEQEATALEFAWKAIKYVKSNG | |
| Sbjct: 361 | ASEVEAEYTGVVGGLLVQNQDVVAENPSDWQVVTDRQPTEQEATALEFAWKAIKYVKSNG | 420 |
| Query: 421 | IIITNDHMTLGLGAGQTNRVGSVKIAIEQAKDHLDGAVLASDAFFPFADNIEEIAAAGIK | 480 |
| | IIITNDHMTLGLGAGQTNRVGSVKIAIEQAKDHLDGAVLASDAFFPFADNIEEIAAAGIK | |
| Sbjct: 421 | IIITNDHMTLGLGAGQTNRVGSVKIAIEQAKDHLDGAVLASDAFFPFADNIEEIAAAGIK | 480 |
| Query: 481 | AIIQPGGSVRDQESIDAANKHGLTMIFTGVRHFRH | 515 |
| | AIIQPGGSVRDQ+SIDAANKHGLTMIFTGVRHFRH | |
| Sbjct: 481 | AIIQPGGSVRDQDSIDAANKHGLTMIFTGVRHFRH | 515 |

[1946] Based on this analysis, it was predicted that these proteins and their epitopes could be useful antigens for vaccines or diagnostics.

### EXAMPLE 298

[1947] A DNA sequence (GBSx0326) was identified in S. agalactiae <SEQ ID 961> which encodes the amino acid sequence <SEQ ID 962>. This protein is predicted to be similar to antibiotic resistance protein. Analysis of this protein sequence reveals the following:

```
Possible site: 46
>>> Seems to have no N-terminal signal sequence
----- Final Results -----
                            bacterial cytoplasm --- Certainty = 0.1842(Affirmative) < succ>
                              bacterial membrane --- Certainty = 0.0000(Not Clear) < succ>
                                bacterial outside --- Certainty = 0.0000(Not Clear) < succ>
```

[1948] The protein has homology with the following sequences in the GENPEPT database:

| >GP: CAB12342 GB: Z99106 similar to antibiotic resistance protein | | | |
|---|---|---|---|
| [Bacillus subtilis] | | | |
| Identities = 65/263 (24%), Positives = 117/263 (43%), Gaps = 34/263 (12%) | | | |
| Query: | 5 | KNLEIVESIFGD-WDETIIWSCV-QGIMGEVFVDSLDQPKSSLAKLGRKSSFGFLAGQPT | 62 |
| | | K ++++F D + T ++S + Q I G V+ D PKS +G +S F+AG | |
| Sbjct: | 10 | KKYSSLKTMFDDKYCPTFVYSILDQTIPGAVYADDQTFPKSFF--IGTESGIYFIAGDQG | 67 |
| Query: | 63 | ----------LFLLEVCSGEDIILVPQHKGWSDLIESTYGQNAHSFKRYATKKDTLFERS | 112 |
| | | + +V S + L W +++ + + +R A + | |
| Sbjct: | 68 | NRDFHDFIAGYYEEQVKSSKRFTLFSSSDTWDSVLKPILKDDLNQMRRAAFSY-----QP | 122 |
| Query: | 113 | RLEKFVTQLPNGFELRAIDEKV------YNSCLEKEWSQDLVANYATYQYYKKQGIGYVV | 166 |
| | | + K QLP G L+ IDE + +NS +E+ + + + +G G+ V | |
| Sbjct: | 123 | KSFKKTLQLPKGLVLKRIDEDIISHSTAFNSAYYEEY-------WNSVSQFASKGFGFAV | 175 |
| Query: | 167 | YYQGNIIAGASSYSTYKNGIEIEVDTHPDFRRRGLATIVAAQLILTCLDKGIYPSWDAH- | 225 |
| | | + ++++ +S N E+++ T ++R GLA VA + I C++ GI PSWD | |
| Sbjct: | 176 | LHGNHVVSECTSIFLGHNRAEMDIYTLEEYRGLGLAYCVANRFIAFCMENGIVPSWDCDI | 235 |
| Query: | 226 | -TRTSLNLSEKLGYEFSHEYIAY | 247 |
| | | +S+ L+ KLG++ EY Y | |
| Sbjct: | 236 | CNNSSIALAAKLGFKTVTEYTIY | 258 |

[1949] No corresponding DNA sequence was identified in S. pyogenes.

[1950] Based on this analysis, it was predicted that this protein and its epitopes, could be useful antigens for vaccines or diagnostics.

### EXAMPLE 299

[1951] A DNA sequence (GBSx0328) was identified in S. agalactiae <SEQ ID 963> which encodes the amino acid sequence <SEQ ID 964>. This protein is predicted to be phosphoribosylglycinamide formyltransferase homolog (purN). Analysis of this protein sequence reveals the following:

```
Possible site: 48
>>> Seems to have no N-terminal signal sequence
----- Final Results -----
                            bacterial cytoplasm --- Certainty = 0.0736(Affirmative) < succ>
                              bacterial membrane --- Certainty = 0.0000(Not Clear) < succ>
                                bacterial outside --- Certainty = 0.0000(Not Clear) < succ>
```

[1952] A related DNA sequence was identified in S. pyogenes <SEQ ID 965> which encodes the amino acid sequence <SEQ ID 966>. Analysis of this protein sequence reveals the following:

| Possible site: 48 | | | | |
|---|---|---|---|---|
| >>> Seems to have no N-terminal signal sequence | | | | |
| | INTEGRAL | Likelihood = −0.53 | Transmembrane | 75-91 (75-91) |

```
----- Final Results -----
                              bacterial membrane --- Certainty = 0.1213(Affirmative) < succ>
                                bacterial outside --- Certainty = 0.0000(Not Clear) < succ>
                            bacterial cytoplasm --- Certainty = 0.0000(Not Clear) < succ>
```

[1953] The protein has homology with the following sequences in the databases:

| >GP: CAA04374 GB: AJ000883 purD [Lactococcus lactis] | | | |
|---|---|---|---|
| Identities = 236/419 (56%), Positives = 301/419 (71%), Gaps = 7/419 (1%) | | | |
| Query: | 50 | LKLLVVGSGGREHAIAKKLLASKGVDQVFVAPGNDGMTLDGLDLVNIVVSEHSRLIAFAK | 109 |
| | | +K+LV+GSGGREHA+AKK + S V++VFVAPGN GM DG+ +V+I + +L+ FA+ | |
| Sbjct: | 1 | MKILVIGSGGREHALAKKFMESPQVEEVFVAPGNSGMEKDGIQIVHISELSNDKLVKFAQ | 60 |
| Query: | 110 | ENEISWAFIGPDDALAAGIVDDFNSAGLRAFGPTKAAAELEWSKDFAKEIMVKYNVPTAA | 169 |
| | | I F+GP+ AL G+VD F A L FGP K AAELE SKDFAK IM KY VPTA | |
| Sbjct: | 61 | NQNIGLTFVGPETALMNGVVDAFIKAELPIFGPNKMAAELEGSKDFAKSIMKKYGVPTAD | 120 |
| Query: | 170 | YGTFSDFEKAKAYIEEQGAPIVVKADGLALGKGVVVAETVEQAVEAAQEMLLDNKFGDSG | 229 |
| | | Y TF E A AY++E+G P+V+KADGLA GKGV VA +E A A ++ F S | |
| Sbjct: | 121 | YATFDSLEPALAYLDEKGVPLVIKADGLAAGKGVTVAFDIETAKSALADI-----FSGSQ | 175 |
| Query: | 230 | ARVVIEEFLDGEEFSLFAFANGDKFYIMPTAQDHKRAFDGDKGPNTGGMGAYAPVPHLPQ | 289 |
| | | +VVIEEFLDGEEFSLF+F + K Y MP AQDHKRAFD DKGPNTGGMGAY+PV H+ + | |
| Sbjct: | 176 | GKVVIEEFLDGEEFSLFSFIHDGKIYPMPIAQDHKRAFDEDKGPNTGGMGAYSPVLHISK | 235 |
| Query: | 290 | SVVDTAVEMIVRPVLEGMVAEGRPYLGVLYVGLILTADGPKVIEFNSRFGDPETQIILPR | 349 |
| | | VV+ A+E +V+P + GM+ EG+ + GVLY GLILT DG K IEFN+RFGDPETQ++LPR | |
| Sbjct: | 236 | EVVNEALEKVVKPTVAGMIEEGKSFTGVLYAGLILTEDGVKTIEFNARFGDPETQVVLPR | 295 |
| Query: | 350 | LTSDFAQNIDDIMMGIEPYITWQKDGVTLGVVVASEGYPFDYEKGVPLPEKTDGDIITYY | 409 |
| | | L SD AQ I DI+ G EP + W + GVTLGVVVA+EGYP + G+ LPE +G + YY | |
| Sbjct: | 296 | LKSDLAQAIIDILAGNEPTLEWLESGVTLGVVVAAEGYPSQAKLGLILPEIPEG-LNVYY | 354 |
| Query: | 410 | AGVKFSENSELLLSNGGRVYMLVTTEDSVKAGQDKIYTQLAQQDTTGLFYRNDIGSKAI | 468 |
| | | AGV +EN++ L+S+GGRVY++ T + VK+ Q +Y +L + + G FYR+DIGS+AI | |
| Sbjct: | 355 | AGVSKNENNQ-LISSGGRVYLVSETGEDVKSTQKLLYEKLDKLENDGFFYRHDIGSRAI | 412 |

[1954] An alignment of the GAS and GBS proteins is shown below:

| Identities = 172/182 (94%), Positives = 176/182 (96%) | | | |
|---|---|---|---|
| Query: | 1 | MKIAVFASGNGSNFQVIAEQFQVSFVFSDHRDAYVLERAQNLAIPSFAFELKEFENKAAY | 60 |
| | | MKIAVFASGNGSNFQVIAEQF VSFVFSDHRDAYVLERAQNLAIPSFAFELKEFENK AY | |
| Sbjct: | 1 | MKIAVFASGNGSNFQVIAEQFPVSFVFSDHRDAYVLERAQNLAIPSFAFELKEFENKVAY | 60 |
| Query: | 61 | EQAVVDLLDKHEIDLVCLAGYMKIVGETLLSAYEGRIINIHPTYLPEFPGAHGIKDAWEA | 120 |
| | | EQA+VDLLDKHEIDLVCLAGYMKIVGETLL AYE RIINIHP YLPEFPGAHGI+DAWEA | |
| Sbjct: | 61 | EQAIVDLLDKHEIDLVCLAGYMKIVGETLLLAYERRIINIHPAYLPEFPGAHGIEDAWEA | 120 |
| Query: | 121 | GVDQSGVTIHWVDSGVDTGQVIQQVHVPRLADDSLESFETRIHETEYQLYPAVLDSLGIK | 180 |
| | | GVDQSGVTIHWVDSGVDTGQVIQQV VPRLADDSLESFETRIHETEYQLYPAVLDSLG++ | |
| Sbjct: | 121 | GVDQSGVTIHWVDSGVDTGQVIQQVRVPRLADDSLESFETRIHETEYQLYPAVLDSLGVE | 180 |
| Query: | 181 | RK | 182 |
| | | RK | |
| Sbjct: | 181 | RK | 182 |

[1955] Based on this analysis, it was predicted that these proteins and their epitopes could be useful antigens for vaccines or diagnostics.

### EXAMPLE 300

[1956] A DNA sequence (GBSx0329) was identified in S. agalactiae <SEQ ID 967> which encodes the amino acid sequence <SEQ ID 968>. Analysis of this protein sequence reveals the following:

| Possible site: 52 | | | | |
|---|---|---|---|---|
| >>> Seems to have no N-terminal signal sequence | | | | |
| | INTEGRAL | Likelihood = −0.59 | Transmembrane | 121-137 (121-137) |

```
----- Final Results -----
                              bacterial membrane --- Certainty = 0.1235(Affirmative) < succ>
                                bacterial outside --- Certainty = 0.0000(Not Clear) < succ>
                            bacterial cytoplasm --- Certainty = 0.0000(Not Clear) < succ>
```

[1957] The protein has homology with the following sequences in the GENPEPT database:

| >GP: AAC16901 GB: AF016634 phosphoribosylformylglycinamide | | | |
|---|---|---|---|
| cyclo-ligase [Lactococcus lactis subsp. cremoris] | | | |
| Identities = 253/338 (74%), Positives = 288/338 (84%), Gaps = 4/338 (1%) | | | |
| Query: | 4 | KNAYAQSGVDVEAGYEVVERIKKHVARTERAGVMGALGGFGGMFDLSQTGVKEPVLISGT | 63 |
| | | +NAYA+SGVDVEAGYEVV RIKKHVA+TER GV+GALGGFGG FDLS VKEPVLISGT | |
| Sbjct: | 5 | ENAYAKSGVDVEAGYEVVSRIKKHVAKTERLGVLGALGGFGGSFDLSVLDVKEPVLISGT | 64 |
| Query: | 64 | DGVGTKLMLAIKYDKHDTIGQDCVAMCVNDIIAAGAEPLYFLDYVATGKNEPAKLEQVVA | 123 |
| | | DGVGTKLMLAI+ DKHDTIG DCVAMCVNDIIAAGAEPLYFLDY+ATGKN P KLEQVVA | |
| Sbjct: | 65 | DGVGTKLMLAIRADKHDTIGIDCVAMCVNDIIAAGAEPLYFLDYIATGKNIPEKLEQVVA | 124 |
| Query: | 124 | GVAEGCVQASAALIGGETAEMPGMYGEDDYDLAGFAVGVAEKSQIIDGSK-VKEGDILLG | 182 |
| | | GVAEGC+QA AALIGGETAEMPGMY EDDYDLAGFAVGVAEKSQ+IDG K V+ GD+LLG | |
| Sbjct: | 125 | GVAEGCLQAGAALIGGETAEMPGMYDEDDYDLAGFAVGVAEKSQLIDGEKDVEAGDVLLG | 184 |
| Query: | 183 | LASSGIHSNGYSLVRRVFADYTGDEVLPELEGKQLKDVLLEPTRIYVKAALPLIKEELVN | 242 |
| | | LASSGIHSNGYSLVR+VFAD+ +E LPEL+ + L D LL PT+IYVK LPLIK+ + | |
| Sbjct: | 185 | LASSGIHSNGYSLVRKVFADFDLNESLPELD-QSLIDTLLTPTKIYVKELLPLIKQNKIK | 243 |
| Query: | 243 | GIAHITGGGFIENVPRMFADDLAAEIDEDKVPVLPIFKALEKYGDIKHEEMFEIFNMGVG | 302 |
| | | GIAHITGGGF EN+PRMF + L+AEI E VLPIFKALEKYG IKHEEM+EIFNMG+G | |
| Sbjct: | 244 | GIAHITGGGFHENLPRMFGNSLSAEIVEGSWDVLPIFKALEKYGSIKHEEMYEIFNMGIG | 303 |
| Query: | 303 | LMLDVNPENVDRVKELLDEPVYEIGRIIKKADDSVVIK | 340 |
| | | +++ V PEN +K+ L+ +EIG+++ + + VVIK | |
| Sbjct: | 304 | MVIAVAPENAAALKKELN--AFEIGQMVNRQEAPVVIK | 339 |

[1958] A related DNA sequence was identified in S. pyogenes <SEQ ID 969> which encodes the amino acid sequence <SEQ ID 970>. Analysis of this protein sequence reveals the following:

```
Possible site: 38
>>> Seems to have no N-terminal signal sequence
----- Final Results -----
                            bacterial cytoplasm --- Certainty = 0.3236(Affirmative) < succ>
                              bacterial membrane --- Certainty = 0.0000(Not Clear) < succ>
                                bacterial outside --- Certainty = 0.0000(Not Clear) < succ>
```

[1959] An alignment of the GAS and GBS proteins is shown below:

| Identities = 321/340 (94%), Positives = 332/340 (97%) | | | |
|---|---|---|---|
| Query: | 1 | MSEKNAYAQSGVDVEAGYEVVERIKKHVARTERAGVMGALGGFGGMFDLSQTGVKEPVLI | 60 |
| | | MSEKNAYA+SGVDVEAGYEVVERIKKHVARTERAGVMGALGGFGGMFDLS+TGVKEPVL+ | |
| Sbjct: | 1 | MSEKNAYAKSGVDVEAGYEVVERIKKHVARTERAGVMGALGGFGGMFDLSKTGVKEPVLV | 60 |
| Query: | 61 | SGTDGVGTKLMLAIKYDKHDTIGQDCVAMCVNDIIAAGAEPLYFLDYVATGKNEPAKLEQ | 120 |
| | | SGTDGVGTKLMLAIKYDKHDTIGQDCVAMCVNDIIAAGAEPLYFLDY+ATGKN P KLE+ | |
| Sbjct: | 61 | SGTDGVGTKLMLAIKYDKHDTIGQDCVAMCVNDIIAAGAEPLYFLDYIATGKNNPVKLEE | 120 |
| Query: | 121 | VVAGVAEGCVQASAALIGGETAEMPGMYGEDDYDLAGFAVGVAEKSQIIDGSKVKEGDIL | 180 |
| | | VV+GVAEGCVQA AALIGGETAEMPGMYG+DDYDLAGFAVGVAEKSQIIDGSKVKEGDIL | |
| Sbjct: | 121 | VVSGVAEGCVQAGAALIGGETAEMPGMYGQDDYDLAGFAVGVAEKSQIIDGSKVKEGDIL | 180 |
| Query: | 181 | LGLASSGIHSNGYSLVRRVFADYTGDEVLPELEGKQLKDVLLEPTRIYVKAALPLIKEEL | 240 |
| | | LGLASSGIHSNGYSLVRRVFADYTG E+LPELEGKQLKDVLLEPTRIYVKAALPLIKEEL | |
| Sbjct: | 181 | LGLASSGIHSNGYSLVRRVFADYTGKELLPELEGKQLKDVLLEPTRIYVKAALPLIKEEL | 240 |
| Query: | 241 | VNGIAHITGGGFIENVPRMFADDLAAEIDEDKVPVLPIFKALEKYGDIKHEEMFEIFNMG | 300 |
| | | V GI HITGGGFIEN+PRMFADDLAAEIDEDKVPVLPIFKALEKYGDIKHEEMFEIFNMG | |
| Sbjct: | 241 | VKGIGHITGGGFIENIPRMFADDLAAEIDEDKVPVLPIFKALEKYGDIKHEEMFEIFNMG | 300 |
| Query: | 301 | VGLMLDVNPENVDRVKELLDEPVYEIGRIIKKADDSVVIK | 340 |
| | | VGLML V+PENV+RVKELLDEPVYEIGRIIKKAD SVVIK | |
| Sbjct: | 301 | VGLMLAVSPENVNRVKELLDEPVYEIGRIIKKADASVVIK | 340 |

[1960] Based on this analysis, it was predicted that these proteins and their epitopes could be useful antigens for vaccines or diagnostics.

### EXAMPLE 301

[1961] A DNA sequence (GBSx0330) was identified in S. agalactiae <SEQ ID 971> which encodes the amino acid sequence <SEQ ID 972>. This protein is predicted to be phosphoribosylpyrophosphate amidotransferase (purF). Analysis of this protein sequence reveals the following:

```
Possible site: 25
>>> Seems to have no N-terminal signal sequence
----- Final Results -----
                            bacterial cytoplasm --- Certainty = 0.1112(Affirmative) < succ>
                              bacterial membrane --- Certainty = 0.0000(Not Clear) < succ>
                                bacterial outside --- Certainty = 0.0000(Not Clear) < succ>
```

[1962] The protein has homology with the following sequences in the GENPEPT database:

| >GP: AAD12627 GB: U64311 phosphoribosylpyrophosphate amidotransferase | | | |
|---|---|---|---|
| [Lactococcus lactis] | | | |
| Identities = 340/470 (72%), Positives = 404/470 (85%), Gaps = 6/470 (1%) | | | |
| Query: | 3 | YEVKSLNEECGVFGIWGYPQAAQVTYFGLHSLQHRGQEGAGIISNDNGKLYGYRNVGLLS | 62 |
| | | +E K+LNEECG+FG+WG+P AA++TYFGLH+LQHRGQEGAGI+ N+NGKL +R +GL++ | |
| Sbjct: | 37 | FEAKTLNEECGLFGVWGHPDAARLTYFGLHALQHRGQEGAGILVNNNGKLNRHRGLGLVT | 96 |
| Query: | 63 | EVFKNQSELDNLTGNAAIGHVRYATAGSADIRNIQPFLYKFHDGQFALCHNGNLTNAISS | 122 |
| | | EVF+++ +L+ LTG++AIGHVRYATAGSA+I NIQPF ++FHDG L HNGNLTNA S | |
| Sbjct: | 97 | EVFRHEKDLEELTGSSAIGHVRYATAGSANINNIQPFQFEFHDGSLGLAHNGNLTNAQSL | 156 |
| Query: | 123 | RKELEKQGAIFNASSDTEILMHLIRRSHNPSFMGKVKEALSTVKGGFAYLLMTEDKLIAA | 182 |
| | | R ELEK GAIF+++SDTEILMHLIRRSH+P FMG+VKEAL+TVKGGFAYL+MTE+ ++AA | |
| Sbjct: | 157 | RCELEKSGAIFSSNSDTEILMHLIRRSHHPEFMGRVKEALNTVKGGFAYLIMTENSIVAA | 216 |
| Query: | 183 | LDPNAFRPLSIGQMQNGAWVISSETCAFEVVGAKWVRDVEPGEVILIDDSGIQCDRYTDE | 242 |
| | | LDPN FRPLSIG+M NGA V++SETCAF+VVGA W++DV+PGE+I I+D GI D++TD | |
| Sbjct: | 217 | LDPNGFRPLSIGKMSNGALVVASETCAFDVVGATWIQDVQPGEIIEINDDGIHVDQFTDS | 276 |
| Query: | 243 | TQLAICSMEYVYFARPDSTIHGVNVHTARKNMGKRLAQEFKQDADIVIGVPNSSLSAAMG | 302 |
| | | T + ICSMEY+YFARPDS I GVNVHTARK GK LAQE K DADIVIGVPNSSLSAA G | |
| Sbjct: | 277 | TNMTICSMEYIYFARPDSNIAGVNVHTARKRSGKILAQEAKIDADIVIGVPNSSLSAASG | 336 |
| Query: | 303 | FAEESGLPNEMGLVKNQYTQRTFIQPTQELREQGVRMKLSAVSGVVKGKRVVMIDDSIVR | 362 |
| | | +AEESGLP EMGL+KNQY RTFIQPTQELREQGVRMKLSAV GVV+GKRV+M+DDSIVR | |
| Sbjct: | 337 | YAEESGLPYEMGLIKNQYVARTFIQPTQELREQGVRMKLSAVRGVVEGKRVIMVDDSIVR | 396 |
| Query: | 363 | GTTSRRIVGLLREAGATEVHVAIASPELKYPCFYGIDIQTRRELISANHAVDEVCDIIGA | 422 |
| | | GTTSRRIV LL++AGA EVHVAIASP LKYPCFYGIDIQ R ELI+A H DE+ + IGA | |
| Sbjct: | 397 | GTTSRRIVKLLKDAGAAEVHVAIASPALKYPCFYGIDIQDRDELIAATHTTDEIREAIGA | 456 |
| Query: | 423 | DSLTYLSIDGLIKSIGLETKAPNGGLCVAYFDGHYPTPLYDYEEEYLRSL | 472 |
| | | DSLTYLS GL+++IG + LC++YFDG YPTPLYDYE +YL SL | |
| Sbjct: | 457 | DSLTYLSQSGLVEAIG------HDKLCLSYFDGEYPTPLYDYEADYLESL | 500 |

[1963] A related DNA sequence was identified in S. pyogenes <SEQ ID 973> which encodes the amino acid sequence <SEQ ID 974>. Analysis of this protein sequence reveals the following:

```
Possible site: 21
>>> Seems to have no N-terminal signal sequence
----- Final Results -----
                            bacterial cytoplasm --- Certainty = 0.0610(Affirmative) < succ>
                              bacterial membrane --- Certainty = 0.0000(Not Clear) < succ>
                                bacterial outside --- Certainty = 0.0000(Not Clear) < succ>
```

[1964] An alignment of the GAS and GBS proteins is shown below:

| Identities = 473/484 (97%), Positives = 481/484 (98%) | | |
|---|---|---|
| Query: 1 | MTYEVKSLNEECGVFGIWGYPQAAQVTYFGLHSLQHRGQEGAGIISNDNGKLYGYRNVGL | 60 |
| | MTYEVKSLNEECGVFGIWG+PQAAQVTYFGLHSLQHRGQEGAGI+SNDNGKLYGYRNVGL | |
| Sbjct: 20 | MTYEVKSLNEECGVFGIWGHPQAAQVTYFGLHSLQHRGQEGAGIVSNDNGKLYGYRNVGL | 79 |
| Query: 61 | LSEVFKNQSELDNLTGNAAIGHVRYATAGSADIRNIQPFLYKFHDGQFALCHNGNLTNAI | 120 |
| | LSEVFKNQSELDNLTGNAAIGHVRYATAGSADIRNIQPFLYKFHDGQFALCHNGNLTNAI | |
| Sbjct: 80 | LSEVFKNQSELDNLTGNAAIGHVRYATAGSADIRNIQPFLYKFHDGQFALCHNGNLTNAI | 139 |
| Query: 121 | SSRKELEKQGAIFNASSDTEILMHLIRRSHNPSFMGKVKEALSTVKGGFAYLLMTEDKLI | 180 |
| | S RKELEKQGAIFNASSDTEILMHLIRRSHN SFMGKVKEAL+TVKGGFAYLLMTE+KLI | |
| Sbjct: 140 | SLRKELEKQGAIFNASSDTEILMHLIRRSHNSSFMGKVKEALNTVKGGFAYLLMTEWKLI | 199 |
| Query: 181 | AALDPNAFRPLSIGQMQNGAWVISSETCAFEVVGAKWVRDVEPGEVILIDDSGIQCDRYT | 240 |
| | AALDPNAFRPLSIGQMQNGAWVISSETCAFEVVGARWVRDVEPGEVILIDD GIQCDRYT | |
| Sbjct: 200 | AALDPNAFRPLSIGQMQNGAWVISSETCAFEVVGAKWVROVEPGEVILIDDRGIQCDRYT | 259 |
| Query: 241 | DETQLAICSMEYVYFARPDSTIHGVNVHTARKNMGKRLAQEFKQDADIVIGVFNSSLSAA | 300 |
| | DETQLAICSMEYVYFARPDSTIHGVNVHTARKNMGKRLAQEFKQDADIVIGVPNSSLSAA | |
| Sbjct: 260 | DETQLAICSMEYVYFARPDSTIHGVNVHTARKNMGKRLAQEFKQDADIVIGVPNSSLSAA | 319 |
| Query: 301 | MGFAEESGLPNEMGLVKNQYTQRTFIQPTQSLREQGVRMKLSAVSGVVKGKRVVMIDDSI | 360 |
| | MGFAEESGLPNEMGLVKNQYTQRTFIQPTQELREQGVPMKLSAVSGVVKGKRVVMIDDSI | |
| Sbjct: 320 | MGFAEESGLPNEMGLVKNQYTQRTFIQPTQELREQGVRMKLSAVSGVVKGKRVVMIDDSI | 379 |
| Query: 361 | VRGTTSRRIVGLLREAGATEVHVAIASPELKYPCFYGIDIQTRRELISANHAVDEVCDII | 420 |
| | VRGTTSRRIVGLLREAGA+EVHVAIASPELKYPCFYGIDIQTRRELISANH+VDEVCDII | |
| Sbjct: 380 | VRGTTSRRIVGLLREAGASEVHVAIASPELKYPCFYGIDIQTRRELISANHSVDEVCDII | 439 |
| Query: 421 | GADSLTYLSIDGLIKSIGLETKAPNGGLCVAYFDGHYPTPLYDYEEEYLRSLEEKTSFYI | 480 |
| | GADSLTYLS+DGLI+SIGLETKAPNGGLCVAYFDGHYPTPLYDYEEEYLRSLEEKTSFYI | |
| Sbjct: 440 | GADSLTYLSLDGLIESIGLSTKAPNGGLCVAYFDGHYPTPLYDYEEEYLRSLEEKTSFYI | 499 |
| Query: 481 | QKVK | 484 |
| | QKVK | |
| Sbjct: 500 | QKVK | 503 |

[1965] Based on this analysis, it was predicted that these proteins and their epitopes could be useful antigens for vaccines or diagnostics.

### EXAMPLE 302

[1966] A DNA sequence (GBSx0331) was identified in S. agalactiae <SEQ ID 975> which encodes the amino acid sequence <SEQ ID 976>. Analysis of this protein sequence reveals the following:

```
Possible site: 28
>>> Seems to have no N-terminal signal sequence
----- Final Results -----
                            bacterial cytoplasm --- Certainty = 0.4797(Affirmative) < succ>
                              bacterial membrane --- Certainty = 0.0000(Not Clear) < succ>
                                bacterial outside --- Certainty = 0.0000(Not Clear) < succ>
```

[1967] The protein has no significant homology with any sequences in the GENPEPT database.

[1968] No corresponding DNA sequence was identified in S. pyogenes.

[1969] Based on this analysis, it was predicted that this protein and its epitopes, could be useful antigens for vaccines or diagnostics.

### EXAMPLE 303

[1970] A DNA sequence (GBSx0332) was identified in S. agalactiae <SEQ ID 977> which encodes the amino acid sequence <SEQ ID 978>. Analysis of this protein sequence reveals the following:

```
Possible site: 13
>>> Seems to have no N-terminal signal sequence
----- Final Results -----
                            bacterial cytoplasm --- Certainty = 0.3489(Affirmative) < succ>
                              bacterial membrane --- Certainty = 0.0000(Not Clear) < succ>
                                bacterial outside --- Certainty = 0.0000(Not Clear) < succ>
```

[1971] The protein has no significant homology with any sequences in the GENPEPT database.

[1972] No corresponding DNA sequence was identified in S. pyogenes.

[1973] Based on this analysis, it was predicted that this protein and its epitopes, could be useful antigens for vaccines or diagnostics.

### EXAMPLE 304

[1974] A DNA sequence (GBSx0333) was identified in S. agalactiae <SEQ ID 979> which encodes the amino acid sequence <SEQ ID 980>. Analysis of this protein sequence reveals the following:

```
Possible site: 14
>>> Seems to have no N-terminal signal sequence
----- Final Results -----
                            bacterial cytoplasm --- Certainty = 0.1690(Affirmative) < succ>
                              bacterial membrane --- Certainty = 0.0000(Not Clear) < succ>
                                bacterial outside --- Certainty = 0.0000(Not Clear) < succ>
```

[1975] The protein has homology with the following sequences in the GENPEPT database:

| >GP:CAC12194 GB:AL445066 phosphoribosylformylglycinamidine synthase | | |
|---|---|---|
| related protein [Thermoplasma acidophilum] | | |
| Identities = 199/746 (26%), Positives = 329/746 (43%), Gaps = 103/746 (13%) | | |
| Query: 202 | ADD--FAAYKAEQGLAMEVDDLLFIQDYFKSIGRVPTETELKVLDTYWSDHCRHTTFETE | 259 |
| | ADD A GLA+ +D++ ++ YF+ +GR P + E+ + WS+HC + + + | |
| Sbjct: 11 | ADDARLKAISKRLGLALSLDEMKAVRSYFERLGRDPIDAEIHAVAQSWSEHCSYKSSKYY | 70 |
| Query: 260 | LKNIDFSASKFQKQLQATYDKYIAMRDELGRSEKPQTLMDMATIFGRYERANGRLDDMEV | 319 |
| | LK K+ L+ Y +AM D+ G | |
| Sbjct: 71 | LK-------KYLGSLKTDYT-ILAMEDDAG------------------------------ | 92 |
| Query: 320 | SDEINACSVEIEVDVDGVKEPWLLMFKNETHNHPTEIEPFGGAATCIGGAIRDPLSGRSY | 379 |
| | VD DG + + K E+HNHP+ +EP+GGAAT IGG +RD L + | |
| Sbjct: 93 | -----------VVDFDG---EYAYVLKMESHNHPSAVEPYGGAATGIGGIVRDVLCMGAQ | 138 |
| Query: 380 | VYQAMRISGAGDITTPIAETRAGKLPQQVISKTAAHGYSSYGNQIGLATTYVREYFHPGF | 439 |
| | + GD+++ E G L + I G YGN+IG+ YF + | |
| Sbjct: 139 | PVALIDSLFLGDVSSDRYE---GLLSPRYIFGGVVGGIRDYGNRIGIPNVAGSLYFDKLY | 195 |
| Query: 440 | VAKRMELGAVVGAAPKENVVREKP-EAGDVVVLLGGKTGRDGVGGATGSSKVQTVESVET | 498 |
| | + + VG ++ +VR K + GDV+VL+GGKTGRDG+ G +S + ++ | |
| Sbjct: 196 | NSNPLVNAGCVGIVRRDRIVRSKSYKPGDVLVLMGGKTGRDGIHGVNFASTTLG-KVTKS | 254 |
| Query: 499 | AGAEVQKGNAIEERKIQRLFRDGNVTRLIKKSNDFGAGGVCVAIGELAD----GLEIDLD | 554 |
| | + +Q GN I E+ + + + N LI+ D G GG+ A E+ G EI LD | |
| Sbjct: 255 | SRLAIQLGNPIVEQPMIKAVLEANDAGLIRAMKDLGGGGLSSAATEMVYAGGFGAEITLD | 314 |
| Query: 555 | KVPLKYQGLNGTEIAISESQERMSVVVGPSDVDAFIAACNKENIDAVVVATVTEKPNLVM | 614 |
| | + LK ++G EI ISESQERM + P DV+ K N+D V+ VT + + | |
| Sbjct: 315 | DIKLKESNMSGWEIWISESQERMLMECYPEDVEKIRQIAEKWNLDFSVIGQVTADRRIRV | 374 |
| Query: 615 | TWNGETIVDLERCFLDTNGV-RVVVDAKVVDKDLTVPEARTTSAETLEADMLKVLSDLNH | 673 |
| | + I+D++ FLD + V + K V+K +TVP+ E L + + ++ LN | |
| Sbjct: 375 | YYKKRKIIDMDIEFLDDSPVYQRPYRIKEVEKSVTVPQ----EPEDLNSFVRDFMARLNT | 430 |
| Query: 674 | ASQKGLQTIFDSSVGRSTVNHPIGGR-YQITPTESSVQKLPVQYGVTTTASVMAQGYNPY | 732 |
| | ++ + +D +V ST+ P GR + T +++V K P++ + V+ G P | |
| Sbjct: 431 | CARFNVVRQYDHTVRGSTIVTPFVGRPNKETHADATVIK-PLENSM--RGLVLTSGSRPN | 487 |
| Query: 733 | IAEWSPYHGAAYAVIEATARLVATGADWSRARFSYQEYFERMDKQAERFGQPVSALLGSI | 792 |
| | + PY G + EA +++TG R ++ E GQ V ++ | |
| Sbjct: 488 | MVSVDPYAGTLLTLAEAYKNILSTG---GRPHSVVDALNFGNPEREEIMGQFVESVRAIG | 544 |
| Query: 793 | EAQIQFGLPSIGGKDSMSGTFEELTVPPTLVAFGVTTADS-RKVLSPEFKAAGENIY--- | 848 |
| | + + GLP + G S + + + PT V D R+ + K +G IY | |
| Sbjct: 545 | DFCRKMGLPVVAGNVSFYNEYRKTDIMPTPTIMMVGLIDDVRRSRTTYMKGSGNAIYLIG | 604 |
| Query: 849 | ----------------YIPGQAISEDIDFDLIKANF--SQFEAIQAQHKITAASAVKYGG | 890 |
| | Y G + D+D +F S+ + I + H +++ GG | |
| Sbjct: 605 | EPCDNLTGSEYSRMHGYTDGFLPAPDLDELTRIRDFLSSKADMILSSHDVSS------GG | 658 |
| Query: 891 | VLESLALMTFGNRIGASVEIAELDSS | 916 |
| | + +L+ M+FG+ IG V+I+ + ++ | |
| Sbjct: 659 | LFAALSEMSFGSGIGFHVDISNVSAA | 684 |

[1976] A related DNA sequence was identified in S. pyogenes <SEQ ID 981> which encodes the amino acid sequence <SEQ ID 982>. Analysis of this protein sequence reveals the following:

```
Possible site: 51
>>> Seems to have no N-terminal signal sequence
----- Final Results -----
                            bacterial cytoplasm --- Certainty = 0.1415(Affirmative) < succ>
                              bacterial membrane --- Certainty = 0.0000(Not Clear) < succ>
                                bacterial outside --- Certainty = 0.0000(Not Clear) < succ>
```

[1977] An alignment of the GAS and GBS proteins is shown below:

| Identities = 1219/1256 (97%), Positives = 1226/1256 (97%) | | |
|---|---|---|
| Query: 11 | SSYFRVAPLSDLVSYMNKRIFVEKKADFGIKSASLVKELTHNLQLASLKDLRIVQVYDVF | 70 |
| | SSYF VAPLSDLVSYMNKRIFVEKKADFGIKSASLVKELTHNLQL SLK LRIVQVYDVF | |
| Sbjct: 2 | SSYFPVAPLSDLVSYMNKRIFVEKKADFGIKSASLVKELTHNLQLTSLKALRIVQVYDVF | 61 |
| Query: 71 | NLAEDLLARAEKHIFSEQVTDRLLTEAEITAELDKVAFFAIEALPGQFDQRAASSQEALL | 130 |
| | NLAEDLLARAEKHIFSEQVTD LLTE EITAELDKVAFFAIEALPGQFDQRAASSQEALL | |
| Sbjct: 62 | NLAEDLLARAEKHIFSEQVTDCLLTETEITAELDKVAFFAIEALPGQFDQRAASSQEALL | 121 |
| Query: 131 | LLGSDSQVKVNTAQLYLVNKDIAEAELEAVKNYLLNPVDSRFKDITLPLEVQAFSVSDKT | 190 |
| | L GSDSQVKVNTAQLYLVNKDI EAELEAVKNYLLNPVDSRFKDITLPLE QAFSVSDKT | |
| Sbjct: 122 | LFGSDSQVKVNTAQLYLVNKDITEAELEAVKNYLLNPVDSRFKDITLPLEEQAFSVSDKT | 181 |
| Query: 191 | ISNLDFFETYQADDFAAYKAEQGLAMEVDDLLFIQDYFKSIGRVPTETELKVLDTYWSDH | 250 |
| | I NLDFFETYQADDFA YKAEQGLAMEVDDLLFIQ+YFKSIG VPTETELKVLDTYWSDH | |
| Sbjct: 182 | IPNLDFFETYQADDFATYKAEQGLAMEVDDLLFIQNYFKSIGCVPTETELKVLDTYWSDH | 241 |
| Query: 251 | CRHTTFETELKNIDFSASKFQKQLQATYDKYIAMRDELGRSEKPQTLMDMATIFGRYERA | 310 |
| | CRHTTFETELKNIDFSASKFQKQLQ TYDKYIAMRDELGRSEKPQTLMDMATIFGRYERA | |
| Sbjct: 242 | CRHTTFETELKNIDFSASKFQKQLQTTYDKYIAMRDELGRSEKPQTLMDMATIFGRYERA | 301 |
| Query: 311 | NGRLDDMEVSDEINACSVEIEVDVDGVKEPWLLMFKNETHNHPTEIEPFGGAATCIGGAI | 370 |
| | NGRLDDMEVSDEINACSVEIEVDVDGVKEPWLLMFKNETHNHPTEIEPFGGAATCIGGAI | |
| Sbjct: 302 | NGRLDDMEVSDEINACSVEIEVDVDGVKEPWLLMFKNETHNHPTEIEPFGGAATCIGGAI | 361 |
| Query: 371 | RDPLSGRSYVYQAMRISGAGDITTPIAETRAGKLPQQVISKTAAHGYSSYGNQIGLATTY | 430 |
| | RDPLSGRSYVYQAMRISGAGDITTPIAETRAGKLPQQVISKTAAHGYSSYGNQIGLATTY | |
| Sbjct: 362 | RDPLSGRSYVYQAMRISGAGDITTPIAETRAGKLPQQVISKTAAHGYSSYGNQIGLATTY | 421 |
| Query: 431 | VREYFHPGFVAKRMELGAVVGAAPKENVVREKPEAGDVVVLLGGKTGRDGVGGATGSSKV | 490 |
| | VREYFHPGFVAKRMELGAVVGAAPKENVVREKPEAGDVV+LLGGKTGRDGVGGATGSSKV | |
| Sbjct: 422 | VREYFHPGFVAKRMELGAVVGAAPKENVVREKPEAGDVVILLGGKTGRDGVGGATGSSKV | 481 |
| Query: 491 | QTVESVETAGAEVQKGNAIEERKIQRLFRDGNVTRLIKKSNDFGAGGVCVAIGELADGLE | 550 |
| | QTVESVETAGAEVQKGNAIEERKIQRLFRDGNVTRLIKKSNDFGAGGVCVAIGELADGLE | |
| Sbjct: 482 | QTVESVETAGAEVQKGNAIEERKIQRLFRDGNVTRLIKKSNDFGAGGVCVAIGELADGLE | 541 |
| Query: 551 | IDLDKVPLKYQGLNGTEIAISESQERMSVVVGPSDVDAFIAACNKENIDAVVVATVTEKP | 610 |
| | IDLDKVPLKYQGLNGTEIAISESQERMSVVV P+DVDAFIAACNKENIDAVVVATVTEKP | |
| Sbjct: 542 | IDLDKVPLKYQGLNGTEIAISESQERMSVVVRPNDVDAFIAACNKENIDAVVVATVTEKP | 601 |
| Query: 611 | NLVMTWNGETIVDLERCFLDTNGVRVVVDAKVVDKDLTVPEARTTSAETLEADMLKVLSD | 670 |
| | NLVMTWNGE IVDLER FLDTNGVRVVVDAKVVDKDLTVPEARTTSAETLEAD LKVLSD | |
| Sbjct: 602 | NLVMTWNGEIIVDLERRFLDTNGVRVVVDAKVVDKDLTVPEARTTSAETLEADTLKVLSD | 661 |
| Query: 671 | LNHASQKGLQTIFDSSVGRSTVNHPIGGRYQITPTESSVQKLPVQYGVTTTASVMAQGYN | 730 |
| | LNHASQKGLQTIFDSSVGRSTVNHPIGGRYQITPTESSVQKLPVQ+GVTTTASVMAQGYN | |
| Sbjct: 662 | LNHASQKGLQTIFDSSVGRSTVNHPIGGRYQITPTESSVQKLPVQHGVTTTASVMAQGYN | 721 |
| Query: 731 | PYIAEWSPYHGAAYAVIEATARLVATGADWSRARFSYQEYFERMDKQAERFGQPVSALLG | 790 |
| | PYIAEWSPYHGAAYAVIEATARLVATGADWSRARFSYQEYFERMDKQAERFGQPVSALLG | |
| Sbjct: 722 | PYIAEWSPYHGAAYAVIEATARLVATGADWSRARFSYQEYFERMDKQAERFGQPVSALLG | 781 |
| Query: 791 | SIEAQIQFGLPSIGGKDSMSGTFEELTVPPTLVAFGVTTADSRKVLSPEFKAAGENIYYI | 850 |
| | SIEAQIQ GLPSIGGKDSMSGTFE+LTVPPTLVAFGVTTADSRKVLSPEFKAAGENIYYI | |
| Sbjct: 782 | SIEAQIQLGLPSIGGKDSMSGTFEDLTVPPTLVAFGVTTADSRKVLSPEFKAAGENIYYI | 841 |
| Query: 851 | PGQAISEDIDFDLIKANFSQFEAIQAQHKITAASAVKYGGVLESLALMTFGNRIGASVEI | 910 |
| | PGQAISEDIDFDLIK NFSQFEAIQAQHKITAASA KYGGVLESLALMTFGNRIGASVEI | |
| Sbjct: 842 | PGQAISEDIDFDLIKDNFSQFEAIQAQHKITAASAAKYGGVLESLALMTFGNRIGASVEI | 901 |
| Query: 911 | AELDSSLTAQLGGFVFTSVEEIADVVKIGQTQADFTVTVNGNDLAGASLLSAFEGKLEEV | 970 |
| | AELDSSLTAQLGGFVFTS EEIAD VKIGQTQADFTVTVNGNDLAGASLL+AFEGKLEEV | |
| Sbjct: 902 | AELDSSLTAQLGGFVFTSAEEIADVVKIGQTQADFTVTVNGNDLAGASLLAAFEGKLEEV | 961 |
| Query: 971 | YPTEFEQVDAIEEVPAVVSDVVIKAKEIIEKPVVYIPVFPGTNSEYDSAKAFEQVGASVN | 1030 |
| | YPTEFEQ D +EEVPAVVSD VIKAKE IEKPVVYIPVFPGTNSEYDSAKAFEQVGASVN | |
| Sbjct: 962 | YPTEFEQTDVIEEVPAVVSDTVIKAKETIEKPVVYIPVFPGTNSEYDSAKAFEQVGASVN | 1081 |
| Query: 1031 | LVPFVTLNEAAIAESVDTMVANIAKANIIFFAGGFSAADEPDGSAKFIVNILLNEKVRAA | 1150 |
| | LVPFVTLNE AIAESVDTMVANIAKANIIFFAGGFSAADEPDGSAKFIVNILLNEKVRAA | |
| Sbjct: 1022 | LVPFVTLNEVAIAESVDTMVANIAKANIIFFAGGFSAADEPDGSAKFIVNILLNEKVRAA | 1081 |
| Query: 1091 | IDSFIEKGGLIIGICNGFQALVKSGLLPYGNFEEAGETSPTLFYNDANQHVAKMVETRIA | 1150 |
| | IDSFIEKGGLIIGICNGFQALVKSGLLPYGNFEEAGETSPTLFYNDANQHVAKMVETRIA | |
| Sbjct: 1082 | IDSFIEKGGLIIGICNGFQALVKSGLLPYGNFEEAGETSPTLFYNDANQHVAKMVETRIA | 1141 |
| Query: 1151 | NTNSPWLAGVEVGDIHVIPVSHGEGKFVVSASEFAELRDNGQIWSQYVDFDGQPSMDSKY | 1210 |
| | NTNSPWLAGVEVGDIH IPVSHGEGK VVSASEFAELRDNGQIWSQYVDFDGQPSMDSKY | |
| Sbjct: 1142 | NTNSPWLAGVEVGDIHAIPVSHGEGKLVVSASEFAELRDNGQIWSQYVDFDGQPSMDSKY | 1201 |
| Query: 1211 | NPNGSVNAIEGITSKNGQIIGKMGHSERWEDGLFQNIPGNKDQKLFESAVKYFTGK | 1266 |
| | NPNGSVNAIEGITSKNGQIIGKMGHSERWEDGLFQNIPGNKDQ LF SAVKYFTGK | |
| Sbjct: 1202 | NPNGSVNAIEGITSKNGQIIGKMGHSERWEDGLFQNIPGNKDQILFASAVKYFTGK | 1257 |

[1978] Based on this analysis, it was predicted that these proteins and their epitopes could be useful antigens for vaccines or diagnostics.

### EXAMPLE 305

[1979] A DNA sequence (GBSx0334) was identified in S. agalactiae <SEQ ID 983> which encodes the amino acid sequence <SEQ ID 984>. This protein is predicted to be phosphoribosylaminoimidazole-succinocarboxamide synthase (purC). Analysis of this protein sequence reveals the following:

```
Possible site: 41
>>> Seems to have no N-terminal signal sequence
----- Final Results -----
                            bacterial cytoplasm --- Certainty = 0.4783(Affirmative) < succ>
                              bacterial membrane --- Certainty = 0.0000(Not Clear) < succ>
                                bacterial outside --- Certainty = 0.0000(Not Clear) < succ>
```

[1980] The protein has homology with the following sequences in the GENPEPT database:

| >GP:AAA03540 GB:L15190 SAICAR synthetase [Streptococcus pneumoniae] | | |
|---|---|---|
| Identities = 183/231 (79%), Positives = 203/231 (87%) | | |
| Query: 1 | MTNQLIYTGKAKDIYSTKDENVIRTVYKDQATMLNGARKETIDGKGALNNQISSLIFEKL | 60 |
| | M+ QLIY+GKAKDIY+T+DEN+I + YRDQAT NG +KE I GKG LNNQISS IFEKL | |
| Sbjct: 1 | MSKQLIYSGKAKDIYTTEDENLIISTYKDQATAFNGVKKEQIAGKGVLNNQISSFIFEKL | 60 |
| Query: 61 | NMAGVVTHYIEQISKNEQLNKKVDIIPLEVVLRNVTAGSFSKRFGVEEGHVLETPIVEFY | 120 |
| | N AGV TH++E++S EQLNKKV IIPLEVVLRN TAGSFSKRFGV+EG LETFIVEFY | |
| Sbjct: 61 | NAAGVATHFVEKLSDTEQLNKKVKIIPLEVVLRNYTAGSFSKRFGVDEGIALETPIVEFY | 120 |
| Query: 121 | YKNDNLNDPFINDENVKFLGIVNDEEIAYLKGETRHINELLKDWFAQIGLNLIDFKLEFG | 180 |
| | YKND+L+DPFINDENVKFL I +D++IAYLK E R INELLK WFA+IGL LIDFKLEFG | |
| Sbjct: 121 | YKNDDLDDPFINDEHVKFLQIADDQQIAYLKEEARRINELLKVWFAEIGLKLIDFKLEFG | 180 |
| Query: 181 | FDKDGKIILADEFSPDNCRLWDADGNHMDKDVFRRDLGSLTDVYQVVLEKL | 231 |
| | FDKDGKIILADEFSPDNCRLWDADGNHMDKDVFRR LG LTDVY++V EKL | |
| Sbjct: 181 | FDKDGKIILADEFSPDNCRLWDADGNHMDKDVFRRGLGELTDVYEIVWEKL | 231 |

[1981] A related DNA sequence was identified in S. pyogenes <SEQ ID 985> which encodes the amino acid sequence <SEQ ID 986>. Analysis of this protein sequence reveals the following:

```
Possible site: 51
>>> Seems to have no N-terminal signal sequence
----- Final Results -----
                            bacterial cytoplasm --- Certainty = 0.3935(Affirmative) < succ>
                              bacterial membrane --- Certainty = 0.0000(Not Clear) < succ>
                                bacterial outside --- Certainty = 0.0000(Not Clear) < succ>
```

[1982] An alignment of the GAS and GBS proteins is shown below:

| Identities = 221/234 (94%), Positives = 228/234 (96%) | | |
|---|---|---|
| Query: 1 | MTNQLIYTGKAKDIYSTKDENVIRTVYKDQATMLNGARKETIDGKGALNNQISSLIFEKL | 60 |
| | +TNQLIY GKAKDIYSTKDENVIRTVYKDQATMLNGARKETIDGKGALNNQISSLIFEKL | |
| Sbjct: 11 | VTNQLIYKGRAKDIYSTKDENVIRTVYRDQATMLNGARKETIDGKGALNNQISSLIFEKL | 70 |
| Query: 61 | NMAGVVTHYIEQISKNEQLNKKVDIIPLEVVLRNVTAGSFSKRFGVEEGHVLETPIVEFY | 120 |
| | N AGVVTHYIEQISKNEQLNKKVDIIPLEVVLRNVTAGSFSKRFGVEEGHVLETPIVEFY | |
| Sbjct: 71 | NKAGVVTHYIEQISKNEQLNKKVDIIPLEVVLRNVTAGSFSKRFGVEEGHVLETPIVEFY | 130 |
| Query: 121 | YKNDNLNDPFINDEHVKFLGIVNDEEIAYLKGETRHINELLKDWFAQIGLNLIDFKLEFG | 180 |
| | YKND+L+DPFINDEHVKFLGIVNDEEIAYLKGETR INELLK WFAQIGLNLIDFKLEFG | |
| Sbjct: 131 | YKNDDLDDPFINDEHVKFLGIVNDEEIAYLKGETRRINELLKGWFAQIGLNLIDFKLEFG | 190 |
| Query: 181 | FDKDGKIILADEFSPDNCRLWDADGNHMDKDVFRRDLGSLTDVYQVVLEKLIAL | 234 |
| | FD++G IILADEFSPDNCRLWD +GNHMDKDVFRRDLG+LTDVYQVVLEKLIAL | |
| Sbjct: 191 | FDQEGTIILADEFSPDNCRLWDKNGNHMDKDVFRRDLGNLTDVYQVVLEKLIAL | 244 |

[1983] Based on this analysis, it was predicted that these proteins and their epitopes could be useful antigens for vaccines or diagnostics.

### EXAMPLE 306

[1984] A DNA sequence (GBSx0335) was identified in S. agalactiae <SEQ ID 987> which encodes the amino acid sequence <SEQ ID 988>. Analysis of this protein sequence reveals the following:

```
Possible site: 13
>>> Seems to have no N-terminal signal sequence
----- Final Results -----
                            bacterial cytoplasm --- Certainty = 0.2779(Affirmative) < succ>
                              bacterial membrane --- Certainty = 0.0000(Not Clear) < succ>
                                bacterial outside --- Certainty = 0.0000(Not Clear) < succ>
```

[1985] A related GBS nucleic acid sequence <SEQ ID 9457> which encodes amino acid sequence <SEQ ID 9458> was also identified.

[1986] The protein has homology with the following sequences in the GENPEPT database:

| >GP:AAC35700 GB:AF041468 acyl carrier protein [Guillardia theta] | | |
|---|---|---|
| Identities = 27/75 (36%), Positives = 52/75 (69%) | | |
| Query: 12 | MSRDEVFEKMLELLRQQLGDPQLDITPESSLHDDLAIDSIALTEFIINLEDVFHLEIPDE | 71 |
| | M+ E+FEK+ ++ +QLG + +T +++ +DL DS+ E ++ +E+ F++EIPD | |
| Sbjct: 1 | MNEQEIFEKVQTIISEQLGVDKSQVTKDANFANDLGADSLDTVELVMAIEEAFNIEIPDD | 60 |
| Query: 72 | AVEHMSSVQQLLDYI | 86 |
| | A E +S++QQ +D+I | |
| Sbjct: 61 | AAEQISNLQQAVDFI | 75 |

[1987] A related DNA sequence was identified in S. pyogenes <SEQ ID 989> which encodes the amino acid sequence <SEQ ID 990>. Analysis of this protein sequence reveals the following:

```
Possible site: 24
>>> Seems to have no N-terminal signal sequence
----- Final Results -----
                            bacterial cytoplasm --- Certainty = 0.1917(Affirmative) < succ>
                              bacterial membrane --- Certainty = 0.0000(Not Clear) < succ>
                                bacterial outside --- Certainty = 0.0000(Not Clear) < succ>
```

[1988] An alignment of the GAS and GBS proteins is shown below:

| Identities = 36/77 (46%), Positives = 57/77 (73%) | | |
|---|---|---|
| Query: 12 | MSRDEVFSKMLELLRQQLGDPQLDITPESSLHDDLAIDSIALTEFIINLEDVFHLEIPDE | 71 |
| | M+R E+FE+++ L+++Q + IT ++ L +DLA+DSI L EFIIN+ED FH+ IPDE | |
| Sbjct: 1 | MTRQEIFERLINLIQKQRSYLSVAITEQTHLRNDLAVDSIELVEFIINVEDEFHIAIPDE | 60 |
| Query: 72 | AVEHMSSVQQLLDYIIE | 88 |
| | VE M ++ +LDY+++ | |
| Sbjct: 61 | DVEDMVFMRDILDYLVQ | 77 |

[1989] Based on this analysis, it was predicted that these proteins and their epitopes could be useful antigens for vaccines or diagnostics.

### EXAMPLE 307

[1990] A DNA sequence (GBSx0336) was identified in S. agalactiae <SEQ ID 991> which encodes the amino acid sequence <SEQ ID 992>. This protein is predicted to be fatty acid/phospholipid synthesis protein (plsX). Analysis of this protein sequence reveals the following:

| Possible site: 21 | | | | | |
|---|---|---|---|---|---|
| >>> Seems to have no N-terminal signal sequence | | | | | |
| | INTEGRAL | Likelihood = −0.64 | Transmembrane | 101-117 | (101-117) |

```
----- Final Results -----
                              bacterial membrane --- Certainty = 0.1256(Affirmative) < succ>
                                bacterial outside --- Certainty = 0.0000(Not Clear) < succ>
                            bacterial cytoplasm --- Certainty = 0.0000(Not Clear) < succ>
```

[1991] A related GBS nucleic acid sequence <SEQ ID 9455> which encodes amino acid sequence <SEQ ID 9456> was also identified.

[1992] The protein has homology with the following sequences in the GENPEPT database:

| >GP:CAB13462 GB:Z99112 alternate gene name: ylpD [Bacillus subtilis] | | |
|---|---|---|
| Identities = 174/329 (52%), Positives = 238/329 (71%), Gaps = 2/329 (0%) | | |
| Query: 8 | KIAIDAMGGDYAPKAIVEGVNQAISDFSDIEVQLYGDQKKIEKYLTVT-ERVSIIHTEEK | 66 |
| | +IA+DAMGGD+APKA+++GV + I F D+ + L GD+ IE +LT T +R++++H +E | |
| Sbjct: 2 | RIAVDAMGGDHAPKAVIDGVIKGIEAFDDLHITLVGDKTTIESHLTTTSDRITVLHADEV | 61 |
| Query: 67 | INSDDEPAKAVRRKKQSSMVLGAKAVKDGVAQAFISAGNTGALLAAGLFVVGRIKGVDRP | 126 |
| | I DEP +AVRRKK SSMVL A+ V + A A ISAGNTGAL+ AGLF+VGRIKG+DRP | |
| Sbjct: 62 | IEPTDEPVRAVRRKKNSSMVLMAQEVAENRADACISAGNTGALMTAGLFIVGRIRGIDRP | 121 |
| Query: 127 | GLMSTMPTLDGVGFDMLDLGANAENTASHLHQYAILGSFYAKNVRGIEVPRVGLLNNGTE | 186 |
| | L T+PT+ G GF +LD+GAN + HL QYAI+GS Y++ VRG+ PRVGLLN GTE | |
| Sbjct: 122 | ALAPTLPTVSGDGFLLLDVGANVDAKPEHLVQYAIMGSVYSQQVRGVTSPRVGLLNVGTE | 181 |
| Query: 187 | ETKGDSLHKEAYELLAAEPSINFIGNIEARDLMSSVADVVVTDGFTGNAVLRTMEGTAMS | 246 |
| | + KG+ L K+ +++L +INFIGN+EARDL+ VADVVVTDGFTGN LKT+EG+A+S | |
| Sbjct: 182 | DKKGNELTRQTFQILKETANINFIGNVEARDLLDDVADVVVTDGETGNVTLKTLEGSALS | 241 |
| Query: 247 | IMGSLKSSIKSGGVKAKLGALLLKDSLYQLKDSMDYSSAGGAVLFGLKAPIVKCHGSSDS | 306 |
| | I ++ + + + +KL A +LK L ++K M+YS+ GGA LFGLKAP++K HGSSDS | |
| Sbjct: 242 | IFKMMR-DVMTSTLTSKLAAAVLKPKLKEMKMKMEYSNYGGASLFGLKAPVIKAHGSSDS | 300 |
| Query: 307 | KAVYSTLKQVRTMLETQVVDQLVDAFTDE | 335 |
| | AV+ ++Q R M+ V + + +E | |
| Sbjct: 301 | NAVFHAIRQAREMVSQNVAALIQEEVKEE | 329 |

[1993] A related DNA sequence was identified in S. pyogenes <SEQ ID 993> which encodes the amino acid sequence <SEQ ID 994>. Analysis of this protein sequence reveals the following:

| Possible site: 36 | | | | | |
|---|---|---|---|---|---|
| >>> Seems to have no N-terminal signal sequence | | | | | |
| | INTEGRAL | Likelihood = −2.07 | Transmembrane | 121-137 | (120-138) |

```
----- Final Results -----
                              bacterial membrane --- Certainty = 0.1829(Affirmative) < succ>
                                bacterial outside --- Certainty = 0.0000(Not Clear) < succ>
                            bacterial cytoplasm --- Certainty = 0.0000(Not Clear) < succ>
```

[1994] A related sequence was also identified in GAS <SEQ ID 9127> which encodes the amino acid sequence <SEQ ID 9128>. Analysis of this protein sequence reveals the following:

| Possible cleavage site: 16 | | | | | |
|---|---|---|---|---|---|
| >>> Seems to have no N-terminal signal sequence | | | | | |
| | INTEGRAL | Likelihood = −2.07 | Transmembrane | 95-111 | (94-112) |

```
------ Final Results -----
                                bacterial membrane --- Certainty = 0.183(Affirmative) < succ>
                                  bacterial outside --- Certainty = 0.000(Not Clear) < succ>
                              bacterial cytoplasm --- Certainty = 0.000(Not Clear) < succ>
```

[1995] An alignment of the GAS and GBS proteins is shown below:

| Identities = 254/330 (76%), Positives = 290/330 (86%) | | | |
|---|---|---|---|
| Query: | 6 | MKKIAIDAMGGDYAPKAIVEGVNQAISDFSDIEVQLYGDQKKIEKYLTVTERVSIIHTEE | 65 |
| | | MK+IAIDAMGGD APKAIVEGVNQAI FSDIE+QLYGDQ KI YL ++RV+IIHT+E | |
| Sbjct: | 27 | MKRIAIDAMGGDNAPKAIVEGVNQAIEAFSDIEIQLYGDQTKINSYLIQSDRVAIIHTDE | 86 |
| Query: | 66 | KINSDDEPAKAVRRKKQSSMVLGAKAVKDGVAQAFISAGNTGALLAAGLFVVGRIKGVDR | 125 |
| | | KI SDDEPAKAVRRKK++SMVL AKAVK+G A A ISAGNTGALLA GLFVVGRIKGVDR | |
| Sbjct: | 87 | KIMSDDEPAKAVRRKKKASMVLAAKAVKEGKADAIISAGNTGALLAVGLFVVGRIKGVDR | 146 |
| Query: | 126 | PGLMSTMPTLDGVGFDMLDLGANAENTASHLHQYAILGSFYAKNVRGIEVPRVGLLNNGT | 185 |
| | | PGL+ST+PT+ G+GFDMLDLGANAENTA HLHQYAILGSFYAKNVRGI PRVGLLNNGT | |
| Sbjct: | 147 | PGLLSTIPTVTGLGFDMLDLGANAENTAKHLHQYAILGSFYAKNVRGIANPRVGLLNNGT | 206 |
| Query: | 186 | EETKGDSLHKEAYELLAAEPSINFIGNIEARDLMSSVADVVVTDGFTGNAVLKTMEGTAM | 245 |
| | | EETKGD L K YELL A+ +I+F+GN+EAR+LMS VADV+V+DGFTGNAVLK++EGTA+ | |
| Sbjct: | 207 | EETKGDPLRKATYELLTADNTISFVGNVEARELMSGVADVIVSDGFTGNAVLKSIEGTAI | 266 |
| Query: | 246 | SIMGSLKSSIKSGGVKAKLGALLLKDSLYQLKDSMDYSSAGGAVLFGLKAPIVKCHGSSD | 305 |
| | | SIMG LK I SGG+K K+GA LLK SLY++K ++DYSSAGGAVLFGLKAP+VK HGSSD | |
| Sbjct: | 267 | SIMGQLKQIINSGGIKTKIGASLLKSSLYEMKKTLDYSSAGGAVLFGLKAPVVKSHGSSD | 326 |
| Query: | 306 | SKAVYSTLKQVRTMLETQVVDQLVDAFTDE | 335 |
| | | KA++ST+KQVRTML+T VV QLV+ F E | |
| Sbjct: | 327 | VKAIFSTIKQVRTMLDTNVVGQLVEEFAKE | 356 |

[1996] Based on this analysis, it was predicted that these proteins and their epitopes could be useful antigens for vaccines or diagnostics.

### EXAMPLE 308

[1997] A DNA sequence (GBSx0337) was identified in S. agalactiae <SEQ ID 995> which encodes the amino acid sequence <SEQ ID 996>. Analysis of this protein sequence reveals the following:

```
Possible site: 27
>>> Seems to have no N-terminal signal sequence
----- Final Results -----
                            bacterial cytoplasm --- Certainty = 0.4668(Affirmative) < succ>
                              bacterial membrane --- Certainty = 0.0000(Not Clear) < succ>
                                bacterial outside --- Certainty = 0.0000(Not Clear) < succ>
```

[1998] The protein has no significant homology with any sequences in the GENPEPT database.

[1999] No corresponding DNA sequence was identified in S. pyogenes.

[2000] Based on this analysis, it was predicted that this protein and its epitopes, could be useful antigens for vaccines or diagnostics.

### EXAMPLE 309

[2001] A DNA sequence (GBSx0338) was identified in S. agalactiae <SEQ ID 997> which encodes the amino acid sequence <SEQ ID 998>. Analysis of this protein sequence reveals the following:

| Possible site: 32 | | | | |
|---|---|---|---|---|
| >>> Seems to have no N-terminal signal sequence | | | | |
| | INTEGRAL | Likelihood = −12.84 | Transmembrane | 61-77 (55-82) |
| | INTEGRAL | Likelihood = −10.14 | Transmembrane | 26-42 (19-51) |
| | INTEGRAL | Likelihood = −9.77 | Transmembrane | 192-208 (186-211) |
| | INTEGRAL | Likelihood = −5.79 | Transmembrane | 267-283 (262-286) |
| | INTEGRAL | Likelihood = −3.77 | Transmembrane | 100-116 (99-116) |

```
----- Final Results -----
                              bacterial membrane --- Certainty = 0.6137(Affirmative) < succ>
                                bacterial outside --- Certainty = 0.0000(Not Clear) < succ>
                            bacterial cytoplasm --- Certainty = 0.0000(Not Clear) < succ>
```

[2002] A related GBS nucleic acid sequence <SEQ ID 9453> which encodes amino acid sequence <SEQ ID 9454> was also identified.

[2003] The protein has homology with the following sequences in the GENPEPT database:

| >GP: CAA22372 GB: AL034446 putative transmembrane protein | | | |
|---|---|---|---|
| [Streptomyces coelicolor A3(2)] | | | |
| Identities = 47/154 (30%), Positives = 69/154 (44%), | | | |
| Gaps = 12/154 (7%) | | | |
| Query: | 120 | SGFVEISSSNSFSFGPFFFLFLAYFIQSLTEEILFRGYVMTTVTKFKGSFAGVLCNSMLF | 179 |
| | | SG+ E+ S F+A + TEE++FRG + + + G++ + ++F | |
| Sbjct: | 118 | SGYYEVDGLGSVQGAIGLVGFMA--AAAATEEVVFRGVLFRIIEEHIGTYLALGLTGLVF | 175 |
| Query: | 180 | SFIHFRN-----YGITAIALFNLFLLGIIFSILFNMTKNILFVTGVHTTWNFTMGCVLGN | 234 |
| | | +H N +G AIA+ F+L ++ T+N+ GVH WNF G V | |
| Sbjct: | 176 | GLMHLLNEDATLWGALAIAIEAGFMLAAAYAA----TRNLWLTIGVHFGWNFAAGGVFST | 231 |
| Query: | 235 | KVSGGDSPVSLFRITENSSFALWNGGDFGFEGGV | 268 |
| | | VSG L T S L GGDFG EG V | |
| Sbjct: | 232 | VVSGNGDSEGLLDAT-MSGPKLLTGGDFGPEGSV | 264 |

[2004] No corresponding DNA sequence was identified in S. pyogenes.

[2005] Based on this analysis, it was predicted that these proteins and their epitopes could be useful antigens for vaccines or diagnostics.

### EXAMPLE 310

[2006] A DNA sequence (GBSx0339) was identified in S. agalactiae <SEQ ID 999> which encodes the amino acid sequence <SEQ ID 1000>. Analysis of this protein sequence reveals the following:

```
Possible site: 55
>>> Seems to have no N-terminal signal sequence
----- Final Results -----
                            bacterial cytoplasm --- Certainty = 0.2665(Affirmative) < succ>
                              bacterial membrane --- Certainty = 0.0000(Not Clear) < succ>
                                bacterial outside --- Certainty = 0.0000(Not Clear) < succ>
```

[2007] A related GBS nucleic acid sequence <SEQ ID 9451> which encodes amino acid sequence <SEQ ID 9452> was also identified.

[2008] The protein has homology with the following sequences in the GENPEPT database:

| >GP:BAB05088 GB:AP001511 unknown conserved protein [Bacillus halodurans] | | |
|---|---|---|
| Identities = 81/242 (33%), Positives = 124/242 (50%), Gaps = 3/242 (1%) | | |
| Query: 8 | GLVLYNRNYREDDKLVKIFTETEGKRMFFVKHAS--KSKFNAVLQPLTIAHFILKINDNG | 65 |
| | G+V+ +Y E +K+V +FT GK + A KS+ AV Q T + + N G | |
| Sbjct: 7 | GIVIRTVDYGESNKIVTVFTREYGKIALMARGAKRPKSRLTAVTQLFTYGMMMFQKNA-G | 65 |
| Query: 66 | LSYIDDYKEVLAFQETNSDLFKLSYASYITSLADVAISDNVADAQLFIFLKKTLELIEDG | 125 |
| | L + + + +F+E +DLF+ SY SY+T L+ D + LF L +T+ + +G | |
| Sbjct: 66 | LGTLTQGEIIQSFREVRNDLFRASYVSYVTDLTNKLTEDEKRNPYLFELLYQTIHYMNEG | 125 |
| Query: 126 | LDYEILTNIFEVQLLERFGVALNFHDCVFCHRVGLPFDFSHKYSGLLCPNHYYKDERRNH | 185 |
| | +D ++LT IFEV++ G+ CV C +P FS K +G LC KD | |
| Sbjct: 126 | MDPDVLTRIFEVKMFTVAGIKPELDQCVSCRSTDVPVGFSIKEAGFLCKRCIEKDPHAYK | 185 |
| Query: 186 | LDPNMLYLINRFQSIQFDDLQTISVKPEMKLKIRQFLDMIYDEYVGIHLKSKKFIDDLSSWG | 247 |
| | + + L+ F L TIS+KPE K ++ + YDEY G+HLKS++F+D L S G | |
| Sbjct: 186 | ITAQVAKLLRLFYHFDLQRLGTISLKPETKATLKTIIHQYYDEYSGLHLKSRRFLDQLESMG | 247 |

[2009] A related DNA sequence was identified in S. pyogenes <SEQ ID 1001> which encodes the amino acid sequence <SEQ ID 1002>. Analysis of this protein sequence reveals the following:

```
Possible site: 46
>>> Seems to have no N-terminal signal sequence
----- Final Results -----
bacterial cytoplasm --- Certainty = 0.1566 (Affirmative) <succ>
  bacterial membrane --- Certainty = 0.0000 (Not Clear) <succ>
    bacterial outside --- Certainty = 0.0000 (Not Clear) <succ>
```

[2010] An alignment of the GAS and GBS proteins is shown below:

| Identities = 159/251 (63%), Positives = 210/251 (83%) | | |
|---|---|---|
| Query: 1 | MRVSQTYGLVLYNRNYREDDKLVKIFTETEGKRMFFVKHASKSKFNAVLQPLTIAHFILK | 60 |
| | M+++++ G+VL+NRNYREDDKLVKIFTE GK+MFFVKH S+SK ++++QPLTIA FI K | |
| Sbjct: 1 | MQLTESLGIVLFNRNYREDDKLVKIFTEVAGKQMFFVKHISRSKMSSIIQPLTIADFIFK | 60 |
| Query: 61 | INDNGLSYIDDYKEVLAFQETNSDLFKLSYASYITSLADVAISDNVADAQLFIFLKKTLE | 120 |
| | +ND GLSY+ DY V ++ N+D+F+L+YASY+ +LAD AI+DN +D+ LF FLKKTL+ | |
| Sbjct: 61 | LNDTGLSYVVDYSNVNTYRYINNDIFRLAYASYVLALADAAIADNESDSHLFTFLKKTLD | 120 |
| Query: 121 | LIEDGLDYEILTNIFEVQLLERFGVALNFHDCVFCHRVGLPFDFSHKYSGLLCPNHYYKD | 180 |
| | L+E+GLDYEILTNIFE+Q+L+RFG++LNFH+C CHR LP DFSH++S +LC HYYKD | |
| Sbjct: 121 | LMEEGLDYEILTNIFEIQILDRFGISLNFHECAICHRTDLPLDFSHRFSAVLCSEHYYKD | 180 |
| Query: 181 | ERRNHLDPNMLYLINRFQSIQFDDLQTISVKPEMKLKIRQFLDMIYDEYVGIHLKSKKFI | 240 |
| | RRNHLDPN++YL++RFQ I FDDL+TIS+ ++K K+RQF+D +Y +YVGI LKSK FI | |
| Sbjct: 181 | NRRNHLDPNVIYLLSRFQKITFDDLRTISLNKDIKKKLRQFIDELYHDYVGIKLKSKTFI | 240 |
| Query: 241 | DDLSSWGSIMK | 251 |
| | D+L WG IMK | |
| Sbjct: 241 | DNLVKWGDIMK | 251 |

[2011] Based on this analysis, it was predicted that these proteins and their epitopes could be useful antigens for vaccines or diagnostics.

### EXAMPLE 311

[2012] A DNA sequence (GBSx0340) was identified in S. agalactiae <SEQ ID 1003> which encodes the amino acid sequence <SEQ ID 1004>. This protein is predicted to be aromatic amino acid aminotransferase (patA). Analysis of this protein sequence reveals the following:

| Possible site: 14 | | |
|---|---|---|
| >>> Seems to have no N-terminal signal sequence | | |
| INTEGRAL | Likelihood = −3.13 | Transmembrane 141-157 (140-159) |

```
----- Final Results -----
  bacterial membrane --- Certainty = 0.2253 (Affirmative) <succ>
    bacterial outside --- Certainty = 0.0000 (Not Clear) <succ>
bacterial cytoplasm --- Certainty = 0.0000 (Not Clear) <succ>
```

[2013] A related GBS nucleic acid sequence <SEQ ID 9449> which encodes amino acid sequence <SEQ ID 9450> was also identified.

[2014] The protein has homology with the following sequences in the GENPEPT database:

| >GP:AAF06954 GB:AF146529 aromatic amino acid aminotransferase | | |
|---|---|---|
| [Lactococcus lactis subsp. cremoris] | | |
| Identities = 261/391 (66%), Positives = 323/391 (81%) | | |
| Query: 38 | MTLEKRFNKYLDRIEVSLIRQFDQSISDIPGMVKLTLGEPDFTTPDHVKEAAKSAIDANQ | 97 |
| | M L K+FN LD+IE+SLIRQFDQ +S IP ++KLTLGEPDF TP+HVK+A +AI+ NQ | |
| Sbjct: 1 | MDLLKKFNPNLDKIEISLIRQFDQQVSSIPDIIKLTLGEPDFYTPEHVKQAGIAAIENNQ | 60 |
| Query: 98 | SYYTGMSGLLALRQAAADFAKDKYNLTYNPDCEILVTIGATEALSASLIAILEAGDVVLL | 157 |
| | S+YTGM+GLL LRQAA++F KY L+Y + EILVT+G TEA+S+ L++IL AGD VL+ | |
| Sbjct: 61 | SHYTGMAGLLELRQAASEFLLKKYGLSYAAEDEILVTVGVTEAISSVLLSILVAGDEVLI | 120 |
| Query: 158 | PAPAYPGYEPIVNLVGADIVEIDTRENDFRLTPEMLETAIIQQGEKLKAVLLNYPTNPTG | 217 |
| | PAPAYPGYEP++ L G +VEIDTR NDF LTPEML+ AII++ K+KAV+LNYP NPTG | |
| Sbjct: 121 | PAPAYPGYEPLITLAGGSLVEIDTRANDFVLTPEMLDQAIIEREGKVKAVILNYPANPTG | 180 |
| Query: 218 | ITYSRQEIAALAEVLKKYDIFVISDEVYSELTYTGQQHVSIAEYLPNQTILINGLSKSHA | 277 |
| | +TY+R++I LAEVLKK+++FVI+DEVYSEL YT Q HVSIAEY P QTI++NGLSKSHA | |
| Sbjct: 181 | VTYNREQIKDLAEVLKKHEVFVIADEVYSELNYTDQPHVSIAEYAPEQTIVLNGLSKSHA | 240 |
| Query: 278 | MTGWRVGLVYAPEAFIAQIIKSHQYMVTAASTISQFAGVEALSVGKNDTLPMRQGYIKRR | 337 |
| | MTGWR+GL++A +AQIIK+HQY+VT+AST SQFA +EAL G +D LPM++ Y+KRR | |
| Sbjct: 241 | MTGWRIGLIFAARELVAQIIKTHQYLVTSASTQSQFAAIEALKNGADDALPMKKEYLKRR | 300 |
| Query: 338 | DYIIDKMSKLGFKIIKPSGAFYIFAKIPDSYPQDSFKFCQDFAYQQAVAIIPGVAFGKYG | 397 |
| | DYII+KMS LGFKII+P GAFYIFAKIP QDSFKF DFA + AVAIIPG+AFG+YG | |
| Sbjct: 301 | DYIIEKMSALGFKIIEPDGAFYIFAKIPADLEQDSFKFAVDFAKENAVAIIPGIAFGQYG | 360 |
| Query: 398 | EGYIRLSYAASMEVIETAMARLKVFMESYEG | 428 |
| | EG++RLSYAASM+VIE AMARL ++ G | |
| Sbjct: 361 | EGFVRLSYAASMDVIEQAMARLTDYVTKKRG | 391 |

[2015] There is also homology to SEQ ID 1006.

[2016] SEQ ID 1004 (GBS332) was expressed in E. coli as a His-fusion product. SDS-PAGE analysis of total cell extract is shown in FIG. 60 (lane 3; MW 50.7 kDa). It was also expressed in E. coli as a GST-fusion product. SDS-PAGE analysis of total cell extract is shown in FIG. 67 (lane 4; MW 76 kDa).

[2017] Based on this analysis, it was predicted that these proteins and their epitopes could be useful antigens for vaccines or diagnostics.

### EXAMPLE 312

[2018] A DNA sequence (GBSx0341) was identified in S. agalactiae <SEQ ID 1007> which encodes the amino acid sequence <SEQ ID 1008>. This protein is predicted to be ribose-phosphate pyrophosphokinase (prsA). Analysis of this protein sequence reveals the following:

```
Possible site: 22
>>> Seems to have no N-terminal signal sequence
----- Final Results -----
                            bacterial cytoplasm --- Certainty = 0.3118(Affirmative) < succ>
                              bacterial membrane --- Certainty = 0.0000(Not Clear) < succ>
                                bacterial outside --- Certainty = 0.0000(Not Clear) < succ>
```

[2019] A related GBS nucleic acid sequence <SEQ ID 9447> which encodes amino acid sequence <SEQ ID 9448> was also identified.

[2020] The protein has homology with the following sequences in the GENPEPT database:

| >GP: AAA62181 GB: N92842 prs [Listeria monocytogenes] | | | |
|---|---|---|---|
| Identities = 209/312 (66%), Positives = 266/312 (84%), Gaps = 3/312 (0%) | | | |
| Query: | 10 | LKLFALSSNKELARKVSQTIGIPLGQSTVRQFSDGEIQVNIEESIRGHHVFILQSTSSPV | 69 |
| | | LK+F+L+SN+ELA+++++ +GI LG+S+V FSDGEIQ+NIEESIRG HV+++QSTS+PV | |
| Sbjct: | 10 | LKIFSLNSNRELAEEIAKEVGIELGKSSVTHFSDGEIQINIEESIRGCHVYVIQSTSNPV | 69 |
| Query: | 70 | NDNLMEILIMVDALKRASAESVSVVMPYYGYARQDRKARSREPITSKLVANNLEVAGVDR | 129 |
| | | N NLME+LIM+DALKRASA ++++VMPYYGYARQDRKARSREPIT+KLVAN++E AG R | |
| Sbjct: | 70 | NQNLNELLIMIDALRRASAATINIVMPYYGYARQDRKARSREPITAKLVANLIETAGATR | 129 |
| Query: | 130 | LLTVDLHAAQIQGFFDIPVDHLMGAPLIADYFDRQGLVGDDVVVVSPDHGGVTRARKLAQ | 189 |
| | | ++T+D+HA QIQGFFDIP+DHL L++DYF + L GDD+VVVSPDHGGVTRARK+A | |
| Sbjct: | 130 | MITLDMHAPQIQGFFDIPIDHLNAVRLLSDYFSERHL-GDDLVVVSPDHGGVTRARKMAD | 188 |
| Query: | 190 | CLKTPIAIIDKRRSVTKMNTSEVMNIIGNIKGKKCILIDDMIDTAGTICHAADALAEAGA | 249 |
| | | LK PIAIIDKRR + N +EVMNI+GN++GK CI+IDD+IDTAGTI AA AL EAGA | |
| Sbjct: | 189 | RLKAPIAIIDKRR--PRPNVAEVMNIVGNVEGKVCIIIDDIIDTAGTITLAAKALREAGA | 246 |
| Query: | 250 | TAVYASCTHPVLSGPALDNIQNSAIEKLIVLDTIYLPEERLIDKIEQISIAELIGEAIIR | 309 |
| | | T VYA C+HPVLSGPA+ I+ S IEKL+V ++I LPEE+ IDK+EQ+S+A L+GEAI+R | |
| Sbjct: | 247 | TKVYACCSHPVLSGPAMKRIEESPIEKLVVTNSIALPEEKWIDKMEQLSVAALLGEAIVR | 306 |
| Query: | 310 | IHEKRPLSPLFE | 321 |
| | | +HE +S LFE | |
| Sbjct: | 307 | VHENASVSSLFE | 318 |

[2021] A related DNA sequence was identified in S. pyogenes <SEQ ID 1009> which encodes the amino acid sequence <SEQ ID 1010>. Analysis of this protein sequence reveals the following:

```
Possible site: 22
>>> Seems to have no N-terminal signal sequence
----- Final Results -----
                            bacterial cytoplasm --- Certainty = 0.2685(Affirmative) < succ>
                              bacterial membrane --- Certainty = 0.0000(Not Clear) < succ>
                                bacterial outside --- Certainty = 0.0000(Not Clear) < succ>
```

[2022] An alignment of the GAS and GBS proteins is shown below:

| Identities = 298/322 (92%), Positives = 311/322 (96%) | | | |
|---|---|---|---|
| Query: | 1 | MEEIMSYSNLKLFALSSNKELAKKVSQTIGIPLGQSTVRQFSDGEIQVNIEESIRGHHVF | 60 |
| | | +EE MSYS+LKLFALSSNKELA+KV+ +GI LG+STVRQFSDGEIQVNIEESIRGHHVF | |
| Sbjct: | 1 | LEEKMSYSDLKLFALSSNKELAEKVASAMGIQLGKSTVRQFSDGEIQVNIEESIRGHHVF | 60 |
| Query: | 61 | ILQSTSSPVNDNLMEILIMVDALKRASAESVSVVMPYYGYARQDRKARSREPITSKLVAN | 120 |
| | | ILQSTSSPVNDNLMEILIMVDALKRASAE +SVVMPYYGYARQDRKARSREPITSKLVAN | |
| Sbjct: | 61 | ILQSTSSPVNDNLMEILIMVDALKRASAEKISVVMPYYGYARQDRKARSREPITSKLVAN | 120 |
| Query: | 121 | MLEVAGVDRLLTVDLHAAQIQGFFDIPVDHLMGAPLIADYFDRQGLVGDDVVVVSPDHGG | 180 |
| | | MLEVAGVDRLLTVDLHAAQIQGFFDIPVDHLMGAPLIADYFDR GLVG+DVVVVSPDHGG | |
| Sbjct: | 121 | MLEVAGVDRLLTVDLHAAQIQGFFDIPVDHLMGAPLIADYFDRHGLVGEDVVVVSPDHGG | 180 |
| Query: | 181 | VTRARKLAQCLKTPIAIIDKRRSVTKMNTSEVMNIIGNIKGKKCILIDDMIDTAGTICHA | 240 |
| | | VTRARKLAQ L+TPIAIIDKRRSV KMNTSEVMNIIGN+ GKKCILIDDMIDTAGTICHA | |
| Sbjct: | 181 | VTRARKLAQFLQTPIAIIDKRRSVDKMNTSEVMNIIGNVSGKKCILIDDMIDTAGTICHA | 240 |
| Query: | 241 | ADALAEAGATAVYASCTHPVLSGPALDNIQNSAIEKLIVLDTIYLPEERLIDKIEQISIA | 300 |
| | | ADALAEAGATAVYASCTHPVLSGPALDNIQ SAIEKLIVLDTIYLP+ERLIDKIEQISIA | |
| Sbjct: | 241 | ADALAEAGATAVYASCTHPVLSGPALDNIQRSAIEKLIVLDTIYLPKERLIDKIEQISIA | 300 |
| Query: | 301 | ELIGEAIIRIHEKRPLSPLFEM | 322 |
| | | +L+ EAIIRIHEKRPLSPLFEM | |
| Sbjct: | 301 | DLVAEAIIRIHEKRPLSPLFEM | 322 |

[2023] Based on this analysis, it was predicted that these proteins and their epitopes could be useful antigens for vaccines or diagnostics.

### EXAMPLE 313

[2024] A DNA sequence (GBSx0342) was identified in S. agalactiae <SEQ ID 1011> which encodes the amino acid sequence <SEQ ID 1012>. This protein is predicted to be a secreted protein. Analysis of this protein sequence reveals the following:

```
Possible site: 20
>>> Seems to have no N-terminal signal sequence
----- Final Results -----
                            bacterial cytoplasm --- Certainty = 0.3751(Affirmative) < succ>
                              bacterial membrane --- Certainty = 0.0000(Not Clear) < succ>
                                bacterial outside --- Certainty = 0.0000(Not Clear) < succ>
```

[2025] A related GBS nucleic acid sequence <SEQ ID 9277> which encodes amino acid sequence <SEQ ID 9278> was also identified.

[2026] The protein has homology with the following sequences in the GENPEPT database:

| >GP: AAD00288 GB: U78607 putative secreted protein [Streptococcus mutans] | | | |
|---|---|---|---|
| Identities = 111/157 (70%), Positives = 130/157 (82%), Gaps = 1/157 (0%) | | | |
| Query: | 1 | MTAIKGQVGALESQQSELEAQNAQLEAVSQQLGQEIQTLSNKIVARNESLKKQVRSAQKG | 60 |
| | | + I+GQV AL++QQ+EL+A+N +LEA S LGQ+IQTLS+KIVARNESLK+Q RSAQK | |
| Sbjct: | 55 | LITIQGQVSALQTQQAELQAENQRLEAQSATLGQQIQTLSSKIVARNESLKQQARSAQKS | 114 |
| Query: | 61 | NL-TNYINTILNSKSVSDAVNRVVAIREVVSANEKMLAQQEADKAALEAKQIENQNAINT | 119 |
| | | N T+YIN I+NSKSVSDA+NRV AIREVVSANEKML QQE DKAA+E KQ ENQ AINT | |
| Sbjct: | 115 | NAATSYINAIINSKSVSDAINRVSAIREVVSANEKMLQQQEQDKAAVEQKQQENQAAINT | 174 |
| Query: | 120 | VAANKQAIENNKAALATQRAQLEAAQLELSAQLTTVQ | 156 |
| | | VAAN++ I N AL TQ+AQLEAAQL L A+LTT Q | |
| Sbjct: | 175 | VAANQETIAQNTNALNTQQAQLEAAQLNLQAELTTAQ | 211 |

[2027] A related GBS gene <SEQ ID 8543> and protein <SEQ ID 8544> were also identified. Analysis of this protein sequence reveals the following:

| Lipop: Possible site: −1 Crend: 3 | | | |
|---|---|---|---|
| McG: Discrim Score: 8.29 | | | |
| GvH: Signal Score (−7.5): 0.8 | | | |
| Possible site: 49 | | | |
| >>> Seems to have a cleavable N-term signal seq. | | | |
| ALOM program | count: 0 | value: 6.74 | threshold: 0.0 |

| | | |
|---|---|---|
| PERIPHERAL | Likelihood = 6.74 | 400 |

modified ALOM score: −1.85
*** Reasoning Step: 3
----- Final Results -----
bacterial outside --- Certainty = 0.3000 (Affirmative) < succ>
bacterial membrane --- Certainty = 0.0000 (Not Clear) < succ>
bacterial cytoplasm --- Certainty = 0.0000 (Not Clear)

[2028] The protein has homology with the following sequences in the databases:

[chemical structure]

[2029] SEQ ID 8544 (GBS65) was expressed in E. coli as a His-fusion product. SDS-PAGE analysis of total cell extract is shown in FIG. 5 (lane 6; MW 47.5 kDa). It was also expressed in E. coli as a GST-fusion product. SDS-PAGE analysis of total cell extract is shown in FIG. 13 (lane 3; MW 72 kDa) and in FIG. 175 (lane 2 & 3; MW 72 kDa).

[2030] The GBS65-GST fusion product was purified (FIG. 102A; see also FIG. 191, lane 4) and used to immunise mice (lane 1 product; 20 kg/mouse). The resulting antiserum was used for Western blot (FIG. 102B), FACS, and in the in vivo passive protection assay (Table III). These tests confirm that the protein is immunoaccessible on GBS bacteria and that it is an effective protective immunogen.

[2031] Based on this analysis, it was predicted that these proteins and their epitopes could be useful antigens for vaccines or diagnostics.

### EXAMPLE 314

[2032] A DNA sequence (GBSx0343) was identified in S. agalactiae <SEQ ID 1015> which encodes the amino acid sequence <SEQ ID 1016>. Analysis of this protein sequence reveals the following:

Possible site: 18
>>> Seems to have no N-terminal signal sequence
----- Final Results -----
bacterial cytoplasm --- Certainty = 0.1184 (Affirmative) < succ>
bacterial membrane --- Certainty = 0.0000 (Not Clear) < succ>
bacterial outside --- Certainty = 0.0000 (Not Clear) < succ>

[2033] The protein has no significant homology with any sequences in the GENPEPT database.

[2034] No corresponding DNA sequence was identified in S. pyogenes.

[2035] Based on this analysis, it was predicted that this protein and its epitopes, could be useful antigens for vaccines or diagnostics.

### EXAMPLE 315

[2036] A DNA sequence (GBSx0344) was identified in S. agalactiae <SEQ ID 1017> which encodes the amino acid sequence <SEQ ID 1018>. Analysis of this protein sequence reveals the following:

Possible site: 23
>>> Seems to have no N-terminal signal sequence
----- Final Results -----
bacterial cytoplasm --- Certainty = 0.4736 (Affirmative) < succ>
bacterial membrane --- Certainty = 0.0000 (Not Clear) < succ>
bacterial outside --- Certainty = 0.0000 (Not Clear) < succ>

[2037] The protein has no significant homology with any sequences in the GENPEPT database.

[2038] No corresponding DNA sequence was identified in S. pyogenes.

[2039] Based on this analysis, it was predicted that this protein and its epitopes, could be useful antigens for vaccines or diagnostics.

### EXAMPLE 316

[2040] A DNA sequence (GBSx0345) was identified in S. agalactiae <SEQ ID 1019> which encodes the amino acid sequence <SEQ ID 1020>. This protein is predicted to be elongation factor Tu (tufA). Analysis of this protein sequence reveals the following:

Possible site: 43
>>> Seems to have no N-terminal signal sequence
----- Final Results -----
bacterial cytoplasm --- Certainty = 0.3012 (Affirmative) < succ>
bacterial membrane --- Certainty = 0.0000 (Not Clear) < succ>
bacterial outside --- Certainty = 0.0000 (Not Clear) < succ>

[2041] A related GBS nucleic acid sequence <SEQ ID 9737> which encodes amino acid sequence <SEQ ID 9738> was also identified.

[2042] The protein has homology with the following sequences in the GENPEPT database:

| >GP: BAB03851 GB: AP001507 translation elongation factor Tu (EF-Tu) | | | |
|---|---|---|---|
| [Bacillus halodurans] | | | |
| Identities = 302/397 (76%), Positives = 350/397 (88%), Gaps = 2/397 (0%) | | | |
| Query: | 7 | MAKEKYDRSKPHVNIGTIGHVDHGKTTLTAAITTVLARRLPTSVNQPKDYASIDAAPEER | 66 |
| | | MAKEK+DRSK H NIGTIGHVDHGKTTLTAAITTVLA+R V Y +ID APEER | |
| Sbjct: | 1 | MAKEKFDRSKTHANIGTIGHVDHGKTTLTAAITTVLAKRSGKGVAMA--YDAIDGAPEER | 58 |
| Query: | 67 | ERGITINTAHVEYETEKRHYAHIDAPGHADYVKNMITGAAQMDGAILVVASTDGPMPQTR | 126 |
| | | ERGITI+TAHVEYET+ RHYAH+D PGHADYVKNMITGAAQMDG ILVV++ DGPMPQTR | |
| Sbjct: | 59 | ERGITISTAHVEYETDNRHYAHVDCPGHADYVKNMITGAAQMDGGILVVSAADGPMPQTR | 118 |
| Query: | 127 | EHILLSRQVGVKHLIVFMNKVDLVDDEELLELVEMEIRDLLSEYDFPGDDLPVIQGSALK | 186 |
| | | EHILLSRQVGV +L+VF+NK D+VDDEELLELVEME+RDLLSEYDFPGDD+PVI+GSALK | |
| Sbjct: | 119 | EHILLSRQVGVPYLVVFLNKCDMVDDEELLELVEMEVRDLLSEYDFPGDDVPVIRGSALK | 178 |
| Query: | 187 | ALEGDEKYEDIIMELMSTVDEYIPEPERDTDKPLLLPVEDVFSITGRGTVASGRIDRGTV | 246 |
| | | ALEGD ++E+ I+ELM+ VD+YIP PERDT+KP ++PVEDVFSITGRGTVA+GR++RG + | |
| Sbjct: | 179 | ALEGDAEWEEKIIELMAAVDDYIPTPERDTEKPFMMPVEDVFSITGRGTVATGRVERGQL | 238 |
| Query: | 247 | RVNDEVEIVGIKEDIQKAVVTGVEMFRKQLDEGLAGDNVGVLLRGVQRDEIERGQVLAKP | 306 |
| | | V DEVEI+G++E+ +K VTGVEMFRK LD AGDN+G LLRGV R+E++RGQVLAKP | |
| Sbjct: | 239 | NVGDEVEIIGLEEEAKKTTVTGVEMFRKLLDYAEAGDNIGALLRGVSREEVQRGQVLAKP | 298 |
| Query: | 307 | GSINPHTRFKGEVYILSKEEGGRHTPFFNNYRPQFYFRTTDVTGSIELPAGTEMVMPGDN | 366 |
| | | G+I PHT FK EVY+LSKEEGGRHTPFF+NYRPQFYFRTTDVTG I+LP G EMVMPGDN | |
| Sbjct: | 299 | GTITPHTNFKAEVYVLSKEEGGRHTPFFSNYRPQFYFRTTDVTGIIQLPDGVEMVMPGDN | 358 |
| Query: | 367 | VTIEVELIHPIAVEQGTTFSIREGGRTVGSGIVSEIE | 403 |
| | | V + VELI PIA+E+GT FSIREGGRTVG+G+V+ I+ | |
| Sbjct: | 359 | VEMTVELIAPIAIEEGTKFSIREGGRTVGAGVVASIQ | 395 |

[2043] A related DNA sequence was identified in S. pyogenes <SEQ ID 1021> which encodes the amino acid sequence <SEQ ID 1022>. Analysis of this protein sequence reveals the following:

```
Possible site: 19
>>> Seems to have no N-terminal signal sequence
----- Final Results -----
                            bacterial cytoplasm --- Certainty = 0.1367(Affirmative) < succ>
                              bacterial membrane --- Certainty = 0.0000(Not Clear) < succ>
                                bacterial outside --- Certainty = 0.0000(Not Clear) < succ>
```

[2044] An alignment of the GAS and GBS proteins is shown below:

| Identities = 386/404 (95%), Positives = 396/404 (97%) | | | |
|---|---|---|---|
| Query: | 1 | MEAFPKMAKEKYDRSKPHVNIGTIGHVDHGKTTLTAAITTVLARRLPTSVNQPKDYASID | 60 |
| | | +EAFPKMAKEKYDRSKPHVNIGTIGHVDHGKTTLTAAITTVLARRLP+SVNQPKDYASID | |
| Sbjct: | 12 | LEAFPKMAKEKYDRSKPHVNIGTIGHVDHGKTTLTAAITTVLARRLPSSVNQPKDYASID | 71 |
| Query: | 61 | AAPEERERGITINTAHVEYETEKRHYAHIDAPGHADYVKNMITGAAQMDGAILVVASTDG | 120 |
| | | AAPEERERGITINTAHVEYET RHYAHIDAPGHADYVKNMITGAAQMDGAILVVASTDG | |
| Sbjct: | 72 | AAPEERERGITINTAHVEYETATRHYAHIDAPGHADYVKNMITGAAQMDGAILVVASTDG | 131 |
| Query: | 121 | PMPQTREHILLSRQVGVKHLIVFMNKVDLVDDEELLELVEMEIRDLLSEYDFPGDDLPVI | 180 |
| | | PMPQTREHILLSRQVGVKHLIVFMNKVDLVDDEELLELVEMEIRDLLSEYDFPGDDLPVI | |
| Sbjct: | 132 | PMPQTREHILLSRQVGVKHLIVFMNKVDLVDDEELLELVEMEIRDLLSEYDFPGDDLPVI | 191 |
| Query: | 181 | QGSALKALEGDEKYEDIIMELMSTVDEYIPEPERDTDKPLLLPVEDVFSITGRGTVASGR | 240 |
| | | QGSALKALEGD K+EDIIMELM TVD YIPEPERDTDKPLLLPVEDVFSITGRGTVASGR | |
| Sbjct: | 192 | QGSALKALEGDTKFEDIIMELMDTVDSYIPEPERDTDKPLLLPVEDVFSITGRGTVASGR | 251 |
| Query: | 241 | IDRGTVRVNDEVEIVGIKEDIQKAVVTGVEMFRKQLDEGLAGDNVGVLLRGVQRDEIERG | 300 |
| | | IDRGTVRVNDE+EIVGIKE+ +KAVVTGVEMFRKQLDEGLAGDNVG+LLRGVQRDEIERG | |
| Sbjct: | 252 | IDRGTVRVNDEIEIVGIKEETKKAVVTGVEMFRKQLDEGLAGDNVGILLRGVQRDEIERG | 311 |
| Query: | 301 | QVLAKPGSINPHTRFKGEVYILSKEEGGRHTPFFNNYRPQFYFRTTDVTGSIELPAGTEM | 360 |
| | | QV+AKP SINPHT+FKGEVYILSK+EGGRHTPFFNNYRPQFYFRTTDVTGSIELPAGTEM | |
| Sbjct: | 312 | QVIAKPSSINPHTKFKGEVYILSKDEGGRHTPFFNNYRPQFYFRTTDVTGSIELPAGTEM | 371 |
| Query: | 361 | VMPGDNVTIEVELIHPIAVEQGTTFSIREGGRTVGSGIVSEIEA | 404 |
| | | VMPGDNVTI VELIHPIAVEQGTTFSIREGGRTVGSGIVSEIEA | |
| Sbjct: | 372 | VMPGDNVTINVELIHPIAVEQGTTFSIREGGRTVGSGIVSEIEA | 415 |

[2045] Based on this analysis, it was predicted that these proteins and their epitopes could be useful antigens for vaccines or diagnostics.

### EXAMPLE 317

[2046] A DNA sequence (GBSx0346) was identified in S. agalactiae <SEQ ID 1023> which encodes the amino acid sequence <SEQ ID 1024>. Analysis of this protein sequence reveals the following:

| Possible site: 36 | | | | |
|---|---|---|---|---|
| >>> Seems to have a cleavable N-term signal seq. | | | | |
| | INTEGRAL | Likelihood = −0.64 | Transmembrane | 90-106 (90-106) |

```
----- Final Results -----
                              bacterial membrane --- Certainty = 0.1256(Affirmative) < succ>
                                bacterial outside --- Certainty = 0.0000(Not Clear) < succ>
                            bacterial cytoplasm --- Certainty = 0.0000(Not Clear) < succ>
```

[2047] The protein has no significant homology with any sequences in the GENPEPT database.

[2048] No corresponding DNA sequence was identified in S. pyogenes.

[2049] Based on this analysis, it was predicted that this protein and its epitopes, could be useful antigens for vaccines or diagnostics.

### EXAMPLE 318

[2050] A DNA sequence (GBSx0347) was identified in S. agalactiae <SEQ ID 1025> which encodes the amino acid sequence <SEQ ID 1026>. This protein is predicted to be ftsW. Analysis of this protein sequence reveals the following:

| Possible site: 38 | | | |
|---|---|---|---|
| >>> Seems to have no N-terminal signal sequence | | | |
| INTEGRAL | Likelihood = −11.15 | Transmembrane | 44-60 (35-70) |
| INTEGRAL | Likelihood = −4.73 | Transmembrane | 76-92 (74-98) |
| INTEGRAL | Likelihood = −3.86 | Transmembrane | 117-133 (113-134) |

----- Final Results -----
bacterial membrane --- Certainty = 0.5458 (Affirmative) < succ>
bacterial outside --- Certainty = 0.0000 (Not Clear) < succ>
bacterial cytoplasm --- Certainty = 0.0000 (Not Clear) < succ>

[2051] The protein has homology with the following sequences in the GENPEPT database:

| >GP: AAB39929 GB: U58049 putative cell division protein ftsW | | | |
|---|---|---|---|
| [Enterococcus hirae] | | | |
| Identities = 78/159 (49%), Positives = 107/159 (67%), Gaps = 4/159 (2%) | | | |
| Query: | 1 | MANSXYAMSNGGWFGRGLGNSIEKLGYLPEATTDFVFSIVIEELGVIGAGFILALVFFLI | 60 |
| | | M+NS YA+ NGG FGRG+GNSI K GYLPE+ TDF+FS++ EE G+IGA +L L+F L | |
| Sbjct: | 240 | MSNSYYALYNGGLFGRGMGNSITKKGYLPESETDFIFSVIAEEFGLIGALLVLFLLFLLC | 299 |
| Query: | 61 | LRIMHVGIKAKDPFNSMIALGIGAMLLMQVFVNIGGISGLIPSTGVTFPFLSQGGNSLLV | 120 |
| | | +RI K K+ ++I +G+G +L+Q +NIG I GLIP TGV PF+S GG S L+ | |
| Sbjct: | 300 | MRIFQKSTKQKNQQANLILIGVGTWILVQTSINIGSILGLIPMTGVPLPFVSYGGTSYLI | 359 |
| Query: | 121 | LSVAIGFVLNIDANEKKELIMKEAEEQYKPQEKNEKIIN | 159 |
| | | LS AIG LNI + + KE + ++ + Q K K++N | |
| Sbjct: | 360 | LSFAIGLALNISSRQVKE----KNKQVERLQLKKPKLLN | 394 |

[2052] A related DNA sequence was identified in S. pyogenes <SEQ ID 1027> which encodes the amino acid sequence <SEQ ID 1028>. Analysis of this protein sequence reveals the following:

| Possible site: 51 | | | |
|---|---|---|---|
| >>> Seems to have no N-terminal signal sequence | | | |
| INTEGRAL | Likelihood = −10.93 | Transmembrane | 312-328 (303-338) |
| INTEGRAL | Likelihood = −8.23 | Transmembrane | 22-38 (17-47) |
| INTEGRAL | Likelihood = −6.85 | Transmembrane | 192-208 (187-211) |
| INTEGRAL | Likelihood = −5.10 | Transmembrane | 218-234 (212-236) |
| INTEGRAL | Likelihood = −4.83 | Transmembrane | 86-102 (85-107) |
| INTEGRAL | Likelihood = −3.72 | Transmembrane | 385-401 (383-402) |
| INTEGRAL | Likelihood = −3.45 | Transmembrane | 61-77 (61-79) |
| INTEGRAL | Likelihood = −2.39 | Transmembrane | 344-360 (344-360) |

----- Final Results -----
bacterial membrane --- Certainty = 0.5373 (Affirmative) < succ>
bacterial outside --- Certainty = 0.0000 (Not Clear) < succ>
bacterial cytoplasm --- Certainty = 0.0000 (Not Clear) < succ>

[2053] The protein has homology with the following sequences in the databases:

| >GP: CAB59721 GB: AJ250603 FtsW protein [Enterococcus faecium] | | | |
|---|---|---|---|
| Identities = 131/397 (32%), Positives = 223/397 (55%), Gaps = 23/397 (5%) | | | |
| Query: | 15 | KRHLLNYSILLPYLILSVIGLIMVYSTTSVSLIQAHANPFKSVINQGVFWIISLVAITFI | 74 |
| | | KR +++ IL PYL LS+IGL+ VYS +S L+QA N ++ Q +F +S I | |
| Sbjct: | 3 | KRKKIDWWILGPYLTLSMIGLLEVYSASSYRLLQADENTKSLLLRQLIFIFLSWGVIFLA | 62 |
| Query: | 75 | YKLKLNFLTNTRVLTVVMLGEAFLLIIAR--FFTTAIKGAHGWIVIGPVSFQPAEYLKII | 132 |
| | | +KL++L + ++ + F LI+ R F + GA WI + + FQP+E + | |
| Sbjct: | 63 | RSIKLHYLLHPKIAGYGLALSIFFLILVRVGIFGVTVNGAQRWISLFGIQFQPSELANLF | 122 |
| Query: | 133 | MVWYLALTFAKIQKNISLYDYQALTRRKWWPTQWNDLRDWRVYSLLMVLLVAAQPDLGNA | 192 |
| | | +++YL+ F P + +L+ + ++ + LL+ QP + A | |
| Sbjct: | 123 | LIFYLSWFFRDGNN----------------PPK--NLKKPFLITVSITLLILFQPKIAGA | 164 |
| Query: | 193 | SIIVLTAIIMFSISGIGYRWFSAILVMITGLSTVFLGTIAVIGVERVAKIP-VFGYVAKR | 251 |
| | | +I+ A ++F + + ++ ++V + L G + +G + +P +F + +R | |
| Sbjct: | 165 | LMILSIAWVIFWAAAVPFKKGIYLIVTFSALLIGAAGGVLYLGNK--GWLPQMFNHAYER | 222 |
| Query: | 252 | FSAFFNPFHDLTDSGHQLANSYYAMSNGGWFGQGLGNSIEKRGYLPEAQTDFVFSVVIEE | 311 |
| | | + +PF D +G+Q+ +S+YA+ NGG +G+GLGNSI K+GYLPE +TDF+FS++ EE | |
| Sbjct: | 223 | IATLRDPFIDSHGAGYQMTHSFYALYNGGIWGRGLGNSITKKGYLPETETDFIFSIITEE | 282 |
| Query: | 312 | LGLIGAGFILALVFFLILRIMNVGIKAKNPFNAMMALGVGGMMLMQVFVNIGGISGLIPS | 371 |
| | | LGLIGA +L L+F L +RI + + KN + LG G ++ +Q +N+G I+GL+P | |
| Sbjct: | 283 | LGLIGALCVLFLLFSLCMRIFCLSSRCKNQQAGLFLLGFGTLLFVQTIMNVGSIAGLMPM | 342 |
| Query: | 372 | TGVTFPFLSQGGNSLLVLSVAVGFVLNIDASEKRDDI | 408 |
| | | TGV PF+S GG S L+LS+ +G LNI + + +++ | |
| Sbjct: | 343 | TGVPLPFVSYGGTSYLILSLGIGITLNISSKIQAEEL | 379 |

[2054] An alignment of the GAS and GBS proteins is shown below:

| Identities = 130/166 (78%), Positives = 152/166 (91%), Gaps = 2/166 (1%) | | | |
|---|---|---|---|
| Query: | 1 | MANSXYAMSNGGWFGRGLGNSIEKLGYLPEATTDFVFSIVIEELGVIGAGFILALVFFLI | 60 |
| | | +ANS YAMSNGGWFG+GLGNSIEK GYLPEA TDFVFS+VIEELG+IGAGFILALVFFLI | |
| Sbjct: | 269 | LANSYYAMSNGGWFGQGLGNSIEKRGYLPEAQTDFVFSVVIEELGLIGAGFILALVFFLI | 328 |
| Query: | 61 | LRIMHVGIKAKDPFNSMIALGIGAMLLMQVFVNIGGISGLIPSTGVTFPFLSQGGNSLLV | 120 |
| | | LRIM+VGIKAK+PFN+M+ALG+G M+LMQVFVNIGGISGLIPSTGVTFPFLSQGGNSLLV | |
| Sbjct: | 329 | LRIMNVGIKAKNPFNAMMALGVGGMMLMQVFVNIGGISGLIPSTGVTFPFLSQGGNSLLV | 388 |
| Query: | 121 | LSVAIGFVLNIDANEKKELIMKEAEEQYK--PQEKNEKIINLDAFK | 164 |
| | | LSVA+GFVLNIDA+EK++ I KEAE Y+ +++N K++N+ F+ | |
| Sbjct: | 389 | LSVAVGFVLNIDASEKRDDIFKEAELSYRKDTRKENSKVVNIKQFQ | 434 |

[2055] Based on this analysis, it was predicted that these proteins and their epitopes could be useful antigens for vaccines or diagnostics.

### EXAMPLE 319

[2056] A DNA sequence (GBSx0348) was identified in S. agalactiae <SEQ ID 1029> which encodes the amino acid sequence <SEQ ID 1030>. This protein is predicted to be probable cell division protein ftsw (ftsW). Analysis of this protein sequence reveals the following:

| Possible site: 34 | | | |
|---|---|---|---|
| >>> Seems to have an uncleavable N-term signal seq | | | |
| INTEGRAL | Likelihood = −9.77 | Transmembrane | 12-28 (7-37) |
| INTEGRAL | Likelihood = −7.22 | Transmembrane | 76-92 (74-97) |
| INTEGRAL | Likelihood = −6.53 | Transmembrane | 182-198 (178-201) |
| INTEGRAL | Likelihood = −4.62 | Transmembrane | 51-67 (46-69) |
| INTEGRAL | Likelihood = −2.87 | Transmembrane | 202-218 (202-218) |

----- Final Results -----
bacterial membrane --- Certainty = 0.4906 (Affirmative) < succ>
bacterial outside --- Certainty = 0.0000 (Not Clear) < succ>
bacterial cytoplasm --- Certainty = 0.0000 (Not Clear) < succ>

[2057] A related GBS nucleic acid sequence <SEQ ID 9327> which encodes amino acid sequence <SEQ ID 9328> was also identified.

[2058] The protein has homology with the following sequences in the GENPEPT database:

| >GP: CAA44490 GB: X62621 ORF2 N-terminal [Lactococcus lactis] | | | |
|---|---|---|---|
| Identities = 82/199 (41%), Positives = 122/199 (61%), Gaps = 9/199 (4%) | | | |
| Query: | 1 | MKIDKRHLLNYSILIPYLILSILGLIVIYSTTSATLIQLGANPFRSVINQGVFWAVSLVA | 60 |
| | | M ++K + LNYSILIPYLIL+ +G+++I+STT +Q G NP++ VINQ F +S++ | |
| Sbjct: | 1 | MNLNKNNFLNYSILIPYLILAGIGIVMIFSTTVPDQLQKGLNPYKLVINQTAFVLLSIIM | 60 |
| Query: | 61 | IIFIYKLKLNFLKNSKVLTMAVLVEVFLLLIARF------FTQEVNGAHGWIVIGPI-SF | 113 |
| | | I IY+LKL LKN K++ + +++ + L+ R T VNGA GWI I I + | |
| Sbjct: | 61 | IAVIYRLKLRALKNRKMIGIIMVILILSLIFCRIMPSSFALTAPVNGARGWIHIPGIGTV | 120 |
| Query: | 114 | QPAEYLKVIIVWYLAFTFARRQKKIEIYDYQALTKGRWLPRSLSDLKDWRFYSLFMIGLV | 173 |
| | | QPAE+ KV I+WYLA F+ +Q++IE D + KG+ L + L WR + ++ + | |
| Sbjct: | 121 | QPAEFAKVFIIWYLASVFSTKQEEIEKNDINEIFKGKTLTQKL--FGGWRLPVVAILLVD | 178 |
| Query: | 174 | IAQPDLGNGSIIVLTVIIM | 192 |
| | | + PDLGN II +IM | |
| Sbjct: | 179 | LIMPDLGNTMIIGAVALIM | 197 |

[2059] There is also homology to SEQ ID 1028.

[2060] A related GBS gene <SEQ ID 8545> and protein <SEQ ID 8546> were also identified. Analysis of this protein sequence reveals the following:

| Lipop: Possible site: −1 Crend: 6 | | | |
|---|---|---|---|
| McG: Discrim Score: 15.18 | | | |
| GvH: Signal Score (−7.5): −3.58 | | | |
| Possible site: 34 | | | |
| >>> Seems to have an uncleavable N-term signal seq | | | |
| ALOM program | count: 5 | value: −9.77 | threshold: 0.0 |

| | | | |
|---|---|---|---|
| INTEGRAL | Likelihood = −9.77 | Transmembrane | 12-28 (7-37) |
| INTEGRAL | Likelihood = 7.22 | Transmembrane | 76-92 (74-97) |
| INTEGRAL | Likelihood = 6.69 | Transmembrane | 210-226 (201-227) |
| INTEGRAL | Likelihood = 6.53 | Transmembrane | 182-198 (178-201) |
| INTEGRAL | Likelihood = 4.62 | Transmembrane | 51-67 (46-69) |

| | | |
|---|---|---|
| PERIPHERAL | Likelihood = 1.32 | 116 |

modified ALOM score: 2.45
*** Reasoning Step: 3
----- Final Results -----
bacterial membrane --- Certainty = 0.4906 (Affirmative) < succ>
bacterial outside --- Certainty = 0.0000 (Not Clear) < succ>
bacterial cytoplasm --- Certainty = 0.0000 (Not Clear) < succ>

[2061] The protein has homology with the following sequences in the databases:

[chemical structure]

[2062] Based on this analysis, it was predicted that these proteins and their epitopes could be useful antigens for vaccines or diagnostics.

### EXAMPLE 320

[2063] A DNA sequence (GBSx0349) was identified in S. agalactiae <SEQ ID 1031> which encodes the amino acid sequence <SEQ ID 1032>. Analysis of this protein sequence reveals the following:

```
Possible site: 22
>>> Seems to have no N-terminal signal sequence
----- Final Results -----
                            bacterial cytoplasm --- Certainty = 0.3665(Affirmative) < succ>
                              bacterial membrane --- Certainty = 0.0000(Not Clear) < succ>
                                bacterial outside --- Certainty = 0.0000(Not Clear) < succ>
```

[2064] The protein has no significant homology with any sequences in the GENPEPT database.

[2065] A related DNA sequence was identified in S. pyogenes <SEQ ID 1033> which encodes the amino acid sequence <SEQ ID 1034>. Analysis of this protein sequence reveals the following:

```
Possible site: 54
>>> Seems to have no N-terminal signal sequence
----- Final Results -----
                            bacterial cytoplasm --- Certainty = 0.2373(Affirmative) < succ>
                              bacterial membrane --- Certainty = 0.0000(Not Clear) < succ>
                                bacterial outside --- Certainty = 0.0000(Not Clear) < succ>
```

[2066] An alignment of the GAS and GBS proteins is shown below:

| Identities = 35/41 (85%), Positives = 37/41 (89%) | | | |
|---|---|---|---|
| Query: | 1 | MEKEAKQIIDLKRNLFKIDVRAQKDEEKVFMRTACCYSPFY | 41 |
| | | +EKEAKQ+IDLKRNLFKIDVRAQKDEEKVFMRTAC S Y | |
| Sbjct: | 1 | LEKEAKQMIDLKRNLFKIDVRAQKDEEKVFMRTACRQSRVY | 41 |

[2067] Based on this analysis, it was predicted that these proteins and their epitopes could be useful antigens for vaccines or diagnostics.

### EXAMPLE 321

[2068] A DNA sequence (GBSx0351) was identified in S. agalactiae <SEQ ID 1037> which encodes the amino acid sequence <SEQ ID 1038>. Analysis of this protein sequence reveals the following:

| Possible site: 49 | | | | |
|---|---|---|---|---|
| >>> Seems to have no N-terminal signal sequence | | | | |
| | INTEGRAL | Likelihood = −1.65 | Transmembrane | 78-94 (78-95) |
| | INTEGRAL | Likelihood = −1.33 | Transmembrane | 421-437 (420-437) |

```
----- Final Results -----
                              bacterial membrane --- Certainty = 0.1659(Affirmative) < succ>
                                bacterial outside --- Certainty = 0.0000(Not Clear) < succ>
                            bacterial cytoplasm --- Certainty = 0.0000(Not Clear) < succ>
```

[2069] The protein has homology with the following sequences in the GENPEPT database:

| >GP: CAA00827 GB: A09073 phosphoenol pyruvate carboxylase | | | |
|---|---|---|---|
| [Corynebacterium glutamicum] | | | |
| Identities = 335/958 (34%), Positives = 539/958 (55%), Gaps = 80/958 (8%) | | | |
| Query: | 22 | EIITEEVGLLKQLLDEATQKLIGSESFDKIE--KIVSLSLTD---DYTGLKETISALSNE | 76 |
| | | + + +++ L Q+L E + G E ++ +E ++ S + + L + ++ | |
| Sbjct: | 3 | DFLRDDIRFLGQILGEVIAEQEGQEVYELVEQARLTSFDIAKGNAEMDSLVQVFDGITPA | 62 |
| Query: | 77 | EMVIVSRYFSILPLLINISEDVDLAYEINYKNNLNQDYLGKLST----TIDVV------- | 125 |
| | | + ++R FS LL N++ED+ Y L + L T T+D | |
| Sbjct: | 63 | KATPIARAFSHFALLANLAEDL-------YDEELREQALDAGDTPPDSTLDATWLKLNEG | 115 |
| Query: | 126 | -AGHENAKDILEHVNVVPVLTAHPTQVQRKTVLELTSKIHDLLRKYRDVKAGIVNQ---- | 180 |
| | | G E D+L + V PVLTAHPT+ +R+TV + I +R+ +++ | |
| Sbjct: | 116 | NVGAEAVADVLRNAEVAPVLTAHPTETRRRTVFDAQKWITTHMRERHALQSAEPTARTQS | 175 |
| Query: | 181 | --EKWYADLRRYIGIIMQTDTIREKKLKVKNEITNVMEYYNRSLIKAVTKLTAEYKALAA | 238 |
| | | ++ ++RR I I+ QT IR + ++++EI + YY SL++ + ++ + | |
| Sbjct: | 176 | KLDEIEKNIRRRITILWQTALIRVARPRIEDEIEVGLRYYKLSLLEEIPRINRDVAVELR | 235 |
| Query: | 239 | KK---GIHLENPKPLTM-GMWIGGDRDGNPFVTAETLRLSAMVQSEVIINHYIEQLNELY | 294 |
| | | ++ G+ L KP+ G WIGGD DGNP+VTAET+ S +E ++ +Y QL+ L | |
| Sbjct: | 236 | ERFGEGVPL---KPVVKPGSWIGGDHDGNPYVTAETVEYSTHRAAETVLKYYARQLHSLE | 292 |
| Query: | 295 | RNMSLSINLTEVSPELVTLANQSQDNSVYRENEPYRKAFNFIQDKLVQTLLNLKVGSSPK | 354 |
| | | +SLS + +V+P+L+ LA+ ++ R +EPYR+A + ++ +++ T | |
| Sbjct: | 293 | HELSLSDRMNKVTPQLLALADAGHNDVPSRVDEPYRRAVHGVRGRILAT----------- | 341 |
| Query: | 355 | EKFVSRQESSDIVGRYIKSHIAQVASDIQTEELPAYATAEEFKQDLLLVKQSLVQYGQDS | 414 |
| | | +++++G + + YA+ EEF D L + SL + | |
| Sbjct: | 342 | --------TAELIGE-------DAVEGVWFKVFTPYASPEEFLNDALTIDHSLRESKDVL | 386 |
| Query: | 415 | LVDGELACLIQAVDIFGFYLATIDMRQDSSINEACVAELLKSANIVDDYSSLSEEEKCQL | 474 |
| | | + D L+ LI A++ FGF L +D+RQ+S E +EL + A + +Y LSE EK ++ | |
| Sbjct: | 387 | IADDRLSVLISAIESFGFNLYALDLRQNSESYEDVLTELFERAQVTANYRELSEAEKLEV | 446 |
| Query: | 475 | LLKELTEDPRTLSSTHAPKSELLQKELAIFQTARELKDQLGEDIINQHIISHTESVSDMF | 534 |
| | | LLKEL + SE+ +EL IF+TA E + G ++ IIS SV+D+ | |
| Sbjct: | 447 | LLKELRSPRPLIPHGSDEYSEVTDRELGIFRTASEAVKKFGPRMVPHCIISMASSVTDVL | 506 |
| Query: | 535 | ELAIMLKEVGLIDAN----QARIQIVPLFETIEDLDNSRDIMTQYLHYELVKKWIATNNN | 590 |
| | | E ++LKE GLI AN + + ++PLFETIEDL I+ + +L + ++ +N | |
| Sbjct: | 507 | EPMVLLKEFGLIAANGDNPRGTVDVIPLFETIEDLQAGAGILDELWKIDLYRNYLLQRDN | 566 |
| Query: | 591 | YQEIMLGYSDSNKDGGYLSSGWTLYKAQNELTKIGEENGIKITFFHGRGGTVGRGGGPSY | 650 |
| | | QE+MLGYSDSNKDGGY S+ W LY A+ +L ++ G+K+ FHGRGGTVGRGGGPSY | |
| Sbjct: | 567 | VQEVMLGYSDSNKDGGYFSANWALYDAELQLVELCRSAGVKLRLFHGRGGTVGRGGGPSY | 626 |
| Query: | 651 | EAITSQPFGSIKDRIRLTEQGEIIENKYGNQDAAYYNLEMLISASIDRMVTRMITNPNEI | 710 |
| | | +AI +QP G+++ +R+TEQGEII KYGN + A NLE L+SA+++ + + +E+ | |
| Sbjct: | 627 | DAILAQPRGAVQGSVRITEQGEIISAKYGNPETARRNLEALVSATLE----ASLLDVSEL | 682 |
| Query: | 711 | DNFRETMDGIVSESNAV----YRNLVFDNPYFYDYFFEASPIKEVSSLNIGSRPAARKTI | 766 |
| | | + + D I+SE + + Y +LV ++ F DYF +++P++E+ SLNIGSRP++RK | |
| Sbjct: | 683 | TDHQRAYD-IMSEISELSLKKYASLVHEDQGFIDYFTQSTPLQEIGSLNIGSRPSSRKQT | 741 |
| Query: | 767 | TEISGLRAIFWVFSWSQNRIMFPGWYGVGSAFKHFI---EQDEANLAKLQTMYQKWPFFN | 823 |
| | | + + LRAIPWV SWSQ+R+M PGW+GVG+A + +I EQ +A+LQT+ + WPFF | |
| Sbjct: | 742 | SSVEDLRAIPWVLSWSQSRVMLPGWFGVGTALSQWIGEGEQATQRIAELQTLNESWPFFT | 801 |
| Query: | 824 | SLLSNVDMVLSKSNMNIALQYAQLAGSKEVRD-VFNIILNEWQLTKDMILAIEQHDNLLE | 882 |
| | | S+L N+ V+SK+ + +A YA L EV + V+++I E+ LTK M I D+LL+ | |
| Sbjct: | 802 | SVLDNMAQVMSKAELRLAKLYADLIPDTEVAERVYSVIREEYFLTKKMFCVITGSDDLLD | 861 |
| Query: | 883 | ENPMLHASLDYRLPYFNVLNYVQIELIKRLRSNQLDEDYEKLIHITINGIATGLRNSG | 940 |
| | | +NP+L S+ R PY LN +Q+E+++R R E + I +T+NG++T LRNSG | |
| Sbjct: | 862 | DNPLLARSVQRRYPYLLPLNVIQVEMMRRYRKGDQSEQVSRNIQLTMNGLSTALRNSG | 919 |

[2070] A related GBS nucleic acid sequence <SEQ ID 10961> which encodes amino acid sequence <SEQ ID 10962> was also identified.

[2071] A related DNA sequence was identified in S. pyogenes <SEQ ID 1039> which encodes the amino acid sequence <SEQ ID 1040>. Analysis of this protein sequence reveals the following:

```
Possible site: 40
>>> Seems to have no N-terminal signal sequence
----- Final Results -----
                            bacterial cytoplasm --- Certainty = 0.1613(Affirmative) < succ>
                              bacterial membrane --- Certainty = 0.0000(Not Clear) < succ>
                                bacterial outside --- Certainty = 0.0000(Not Clear) < succ>
```

[2072] An alignment of the GAS and GBS proteins is shown below:

| Identities = 659/927 (71%), Positives = 779/927 (83%), Gaps = 11/927 (1%) | | | |
|---|---|---|---|
| Query: | 14 | KLESSSNKEIITEEVGLLKQLLDEATQKLIGSESFDKIEKIVSLSLTDDYTGLKETISAL | 73 |
| | | KLESS+N++II EEV LLK++L+ T+++IG ++F IE I+ LS DY L++ ++ + | |
| Sbjct: | 5 | KLESSNNQDIIAEEVALLKEMLENITRRMIGDDAFTVIESIMVLSEKQDYIELEKVVANI | 64 |
| Query: | 74 | SNEEMVIVSRYFSILPLLINISEDVDLAYEINYKNNLNQDYLGKLSTTIDVVAGHENAKD | 133 |
| | | SN+EM ++SRYFSILPLLINISEDVDLAYEINY+NN + DYLGKL+ TI +AG +N KD | |
| Sbjct: | 65 | SNQEMEVISRYFSILPLLINISEDVDLAYEINYQNNTDTDYLGKLALTIKDLAGKDNGKD | 124 |
| Query: | 134 | ILEHVNVVPVLTAHPTQVQRKTVLELTSKIHDLLRKYRDVKAGIVNQEKWYADLRRYIGI | 193 |
| | | ILE VNVVPVLTAHPTQVQRKT+LELT+ IH LLRKYRD KAG++N EKW +L RYI + | |
| Sbjct: | 125 | ILEQVNVVPVLTAHPTQVQRKTILELTTHIHKLLRKYRDAKAGVINLEKWRQELYRYIEM | 184 |
| Query: | 194 | IMQTDTIREKKLKVKNEITNVMEYYNRSLIKAVTKLTAEYKALAAKKGIHLENPKPLTMG | 253 |
| | | IMQTD IREKKL+VKNEI NVM+YY+ SLI+AVTKLT EYK LA K G+ L+NPKP+TMG | |
| Sbjct: | 185 | IMQTDIIREKKLQVKNEIKNVMQYYDGSLIQAVTKLTTEYKNLAQKHGLELDNPKPITMG | 244 |
| Query: | 254 | MWIGGDRDGNPFVTAETLRLSAMVQSEVIINHYIEQLNELYRNMSLSINLTEVSPELVTL | 313 |
| | | MWIGGDRDGNPFVTAETL LSA VQSEVI+N+YI++L LYR SLS L + + E+ L | |
| Sbjct: | 245 | MWIGGDRDGNPFVTAETLCLSATVQSEVILNYYIDELAALYRTFSLSSTLVQPNSEVERL | 304 |
| Query: | 314 | ANQSQDNSVYRENEPYRKAFNFIQDKLVQTLLNLKVGSSPKEKFVSRQESSDIVGRYIKS | 373 |
| | | A+ SQD S+YR NEPYR+AF++IQ +L QT + L + + SS + S | |
| Sbjct: | 305 | ASLSQDQSIYRGNEPYRRAFHYIQSRLKQTQIQLT------NQPAASMSSSVGLNTSAWS | 358 |
| Query: | 374 | HIAQVASDIQTEELPAYATAEEFKQDLLLVKQSLVQYGQDSLVDGELACLIQAVDIFGFY | 433 |
| | | A + + I AY + +FK DL ++QSL+ G +L++G+L ++QAVDIFGF+ | |
| Sbjct: | 359 | SPASLENPIL-----AYDSPVDFKADLKAIEQSLLDNGNSALIEGDLREVMQAVDIFGFF | 413 |
| Query: | 434 | LATIDMRQDSSINEACVAELLKSANIVDDYSSLSEEEKCQLLLKELTEDPRTLSSTHAPK | 493 |
| | | LA+IDMRQDSS+ EACVAELLK ANIVDDYSSLSE EKC +LL++L E+PRTLSS K | |
| Sbjct: | 414 | LASIDMRQDSSVQEACVAELLKGANIVDDYSSLSETEKCDVLLQQLMEEPRTLSSAAVAK | 473 |
| Query: | 494 | SELLQKELAIFQTARELKDQLGEDIINQHIISHTESVSDMFELAIMLKEVGLIDANQARI | 553 |
| | | S+LL+KELAI+ TARELKD+LGE++I QHIISHTESVSDMFELAIMLKEVGL+D +AR+ | |
| Sbjct: | 474 | SDLLEKELAIYTTARELKDKLGEEVIKQHIISHTESVSDMFELAIMLKEVGLVDQQRARV | 533 |
| Query: | 554 | QIVPLFETIEDLDNSRDIMTQYLHYELVKKWIATNNNYQEIMLGYSDSNKDGGYLSSGWT | 613 |
| | | QIVPLFETIEDLDN+RDIM YL +++VK WIATN NYQEIMLGYSDSNKDGGYL+SGWT | |
| Sbjct: | 534 | QIVPLFETIEDLDNARDIMAAYLSHDIVKSWIATNRNYQEIMLGYSDSNKDGGYLASGWT | 593 |
| Query: | 614 | LYKAQNELTKIGEENGIKITFFHGRGGTVGRGGGPSYEAITSQPFGSIKDRIRLTEQGEI | 673 |
| | | LYKAQNELT IGEE+G+KITFFHGRGGTVGRGGGPSY+AITSQPFGSIKDRIRLTEQGEI | |
| Sbjct: | 594 | LYKAQNELTAIGEEHGVKITFFHGRGGTVGRGGGPSYDAITSQPFGSIKDRIRLTEQGEI | 653 |
| Query: | 674 | IENKYGNQDAAYYNLEMLISASIDRMVTRMITNPNEIDNFRETMDGIVSESNAVYRNLVF | 733 |
| | | IENKYGN+D AYY+LEMLISASI+RMVT+MIT+PNEID+FRE MD IV++SN +YR LVF | |
| Sbjct: | 654 | IENKYGNKDVAYYHLEMLISASINRMVTQMITDPNEIDSFREIMDSIVADSNIIYRKLVF | 713 |
| Query: | 734 | DNPYFYDYFFEASPIKEVSSLNIGSRPAARKTITEISGLRAIPWVFSWSQNRIMFPGWYG | 793 |
| | | DNP+FYDYFFEASPIKEVSSLNIGSRPAARKTITEI+GLRAIPWVFSWSQNRIMFPGWYG | |
| Sbjct: | 714 | DNPHFYDYFFEASPIKEVSSLNIGSRPAARKTITEITGLRAIPWVFSWSQNRIMFPGWYG | 773 |
| Query: | 794 | VGSAFKHFIEQDEANLAKLQTMYQKWPFFNSLLSNVDMVLSKSNMNIALQYAQLAGSKEV | 853 |
| | | VGSAFK +I++ + NL +LQ MYQ WPFF+SLLSNVDMVLSKSNMNIA QYAQLA ++V | |
| Sbjct: | 774 | VGSAFKRYIDRAQGNLERLQHMYQTWPFFHSLLSNVDMVLSKSNMNIAFQYAQLAERQDV | 833 |
| Query: | 854 | RDVFNIILNEWQLTKDMILAIEQHDNLLEENPMLHASLDYRLPYFNVLNYVQIELIKRLR | 913 |
| | | RDVF IL+EWQLTK++ILAI+ HD+LLE+NP L SL RLPYFNVLNY+QIELIKR R | |
| Sbjct: | 834 | RDVFYEILDEWQLTKNVILAIQDHDDLLEDNPSLKHSLKSRLPYFNVLNYIQIELIKRWR | 893 |
| Query: | 914 | SNQLDEDYEKLIHITINGIATGLRNSG | 940 |
| | | +NQLDE+ EKLIH TINGIATGLRNSG | |
| Sbjct: | 894 | NNQLDENDEKLIHTTINGIATGLRNSG | 920 |

[2073] Based on this analysis, it was predicted that these proteins and their epitopes could be useful antigens for vaccines or diagnostics.

### EXAMPLE 322

[2074] A DNA sequence (GBSx0352) was identified in S. agalactiae <SEQ ID 1041> which encodes the amino acid sequence <SEQ ID 1042>. This protein is predicted to be Bacillus licheniformis Pz-peptidase homologue (pepF). Analysis of this protein sequence reveals the following:

Possible site: 61
>>> Seems to have no N-terminal signal sequence
----- Final Results -----
bacterial cytoplasm --- Certainty = 0.3012 (Affirmative) < succ>
bacterial membrane --- Certainty = 0.0000 (Not Clear) < succ>
bacterial outside --- Certainty = 0.0000 (Not Clear) < succ>

[2075] A related DNA sequence was identified in S. pyogenes <SEQ ID 1043> which encodes the amino acid sequence <SEQ ID 1044>. Analysis of this protein sequence reveals the following:

Possible site: 55
>>> Seems to have no N-terminal signal sequence
----- Final Results -----
bacterial cytoplasm --- Certainty = 0.3137 (Affirmative) < succ>
bacterial membrane --- Certainty = 0.0000 (Not Clear) < succ>
bacterial outside --- Certainty = 0.0000 (Not Clear) < succ>

[2076] An alignment of the GAS and GBS proteins is shown below:

| Identities = 512/593 (86%), Positives = 564/593 (94%) | | | |
|---|---|---|---|
| Query: | 1 | MKLKKRSEFPENELWDLTALYKDRQDFLLAIEKALEDIKVFKKNYEGKLNCVEDFTSALM | 60 |
| | | M+LKKRSEFPENELWDLTALYKDRQDFLLAIEKAL+DI +FK+NYEG+L V+DFT AL+ | |
| Sbjct: | 26 | MELKKRSEFPENELWDLTALYKDRQDFLLAIEKALQDIDLFKRNYEGRLTSVDDFTQALI | 85 |
| Query: | 61 | EIEHIYIQMSHIDTYAFMPQTTDFSNEEFAQISQAGSDFATKANVLLSFFNTALANADIK | 120 |
| | | EIEHIYIQMSHI TYAFMPQTTDFS+E FAQI+QAG DF TKA+V LSFF+TALANAD+ | |
| Sbjct: | 86 | EIEHIYIQMSHIGTYAFMPQTTDFSDESFAQIAQAGDDFMTKASVALSFFDTALANADLD | 145 |
| Query: | 121 | ILDSLENNPHFKATIRQAKIQKQHLLSPEVEKALTNLNEVLNTPYDIYTKMRAGDFDMED | 180 |
| | | +LD+LE NP+F A IR AKIQK+HLLSP+VEKAL NL EV+N PYDIYTKMRAGDFDM+D | |
| Sbjct: | 146 | VLDTLEKNPYFSAAIRMAKIQKEHLLSPDVEKALANLREVINAPYDIYTKMRAGDFDMDD | 205 |
| Query: | 181 | FEVDGKTYKNSFVTYENYFQNHENAEIREKSFRSFSKGLRKHQNAAAAAYLAKVKSEKLI | 240 |
| | | FEVDGKTYKNSFV+YEN++QNHENAEIREK+FRSFSKGLRKHQN AAAAYLAKVKSEKL+ | |
| Sbjct: | 206 | FEVDGKTYKNSFVSYENFYQNHENAEIREKAFRSFSKGLRKHQNTAAAAYLAKVKSEKLL | 265 |
| Query: | 241 | ADMRGYDSVFDYLLSEQEVDRSMFDRQIDLIMDEFGPVAQRFLKHIADVNGIEKMTFADW | 300 |
| | | ADM+GY SVFDYLL+EQEVDRS+FDRQIDLIM EFGPVAQ+FLKH+A VNG+EKMTFADW | |
| Sbjct: | 266 | ADMKGYASVFDYLLAEQEVDRSLFDRQIDLIMTEFGPVAQKFLKHVAQVNGLEKMTFADW | 325 |
| Query: | 301 | KLDIDNELNPEVSINDAYDLVMKSVAPLGKEYSQEVERYQKERWVDFAANANKDSGGYAA | 360 |
| | | KLDIDN+LNPEVSI+ AYDLVMKS+APLG+EY++E+ERYQ ERWVDFAANANKDSGGYAA | |
| Sbjct: | 326 | KLDIDNDLNPEVSIDGAYDLVMKSLAPLGQEYTKEIERYQTERWVDFAANANKDSGGYAA | 385 |
| Query: | 361 | DPYKVHPYVLMSWTGRMSDVYTLIHEIGHSGQFIFSDNHQSFFNTHMSTYYVEAPSTFNE | 420 |
| | | DPYKVHPYVLMSWTGRMSDVYTLIHEIGHSGQFIFSDNHQS+FNTHMSTYYVEAPSTFNE | |
| Sbjct: | 386 | DPYKVHPYVLMSWTGRMSDVYTLIHEIGHSGQFIFSDNHQSYFNTHMSTYYVEAPSTFNE | 445 |
| Query: | 421 | LLLSDYLENQFDTARQKRFALAHRLTDTYFHNFITHLLEAAFQRKVYTLIEEGGTFGAEQ | 480 |
| | | L+LSDYLE+QFD RQKRFALAHRLTDTYFHNFITHLLEAAFQRKVYTLIEEGGTFGA+Q | |
| Sbjct: | 446 | LMLSDYLEHQFDDPRQKRFALAHRLTDTYFHNFITHLLEAAFQRKVYTLIEEGGTFGADQ | 505 |
| Query: | 481 | LNAIMKEVLTQFWGDAIEIDDDAALTWMRQAHYYMGLYSYTYSAGLVISTAGYLNLKNNP | 540 |
| | | LNA+MKEVLT FWGDA++IDDDAALTWMRQAHYYMGLYSYTYSAGLVISTAGYLNLK+NP | |
| Sbjct: | 506 | LNAMMKEVLTDFWGDAVDIDDDAALTWMRQAHYYMGLYSYTYSAGLVISTAGYLNLKHNP | 565 |
| Query: | 541 | NGAKEWLAFLKSGGSRTPLETALLISADISTDKPLRDTINFLSNTVDQIINYS | 593 |
| | | NGAKEWL FLKSGGSRTPL+TA+LI ADI+T+KPLRDTI FLS+TVDQII+Y+ | |
| Sbjct: | 566 | NGAKEWLDFLKSGGSRTPLDTAMLIGADIATEKPLRDTIQFLSDTVDQIISYT | 618 |

[2077] Based on this analysis, it was predicted that these proteins and their epitopes could be useful antigens for vaccines or diagnostics.

### EXAMPLE 323

[2078] A DNA sequence (GBSx0353) was identified in S. agalactiae <SEQ ID 1045> which encodes the amino acid sequence <SEQ ID 1046>. Analysis of this protein sequence reveals the following:

Possible site: 19
>>> May be a lipoprotein
----- Final Results -----
bacterial membrane --- Certainty = 0.0000 (Not Clear) < succ>
bacterial outside --- Certainty = 0.0000 (Not Clear) < succ>
bacterial cytoplasm --- Certainty = 0.0000 (Not Clear) < succ>

[2079] The protein has no significant homology with any sequences in the GENPEPT database.

[2080] A related DNA sequence was identified in S. pyogenes <SEQ ID 1047> which encodes the amino acid sequence <SEQ ID 1048>. Analysis of this protein sequence reveals the following:

Possible site: 19
>>> May be a lipoprotein
----- Final Results -----
bacterial membrane --- Certainty = 0.0000 (Not Clear) < succ>
bacterial outside --- Certainty = 0.0000 (Not Clear) < succ>
bacterial cytoplasm --- Certainty = 0.0000 (Not Clear) < succ>

[2081] The protein has no significant homology with any sequences in the GENPEPT database.

[2082] An alignment of the GAS and GBS proteins is shown below:

| Identities = 72/127 (56%), Positives = 85/127 (66%) | | | |
|---|---|---|---|
| Query: | 1 | MKKYIKLFLLTVFATTLVACGQPSTSNKTTTSSTLEVGKVELVVKEDTNVLSEKVVYHKG | 60 |
| | | + K K L + A LVAC Q + +TT S V LVVKEDTN + EKV + KG | |
| Sbjct: | 1 | VNKRFKTGFLALVAMLLVACSQGTKQIQTTPSVPKADHHVRLVVKEDTNTVDEKVSFGKG | 60 |
| Query: | 61 | DTVLDVLKANYKVKEKDGFITSIDGISQDETKGLYWMFKVNNKLAPKAANQIKVKKNDKI | 120 |
| | | DTVL+VLK NY+VKEKDGFIT+IDGI QD YW+FKVN K+A K A+QI VK D I | |
| Sbjct: | 61 | DTVLEVLKDNYEVKEKDGFITAIDGIEQDTKANKYWLFKVNGKMADKGADQITVKDGDSI | 120 |
| Query: | 121 | EFYQEVY | 127 |
| | | EFYQEV+ | |
| Sbjct: | 121 | EFYQEVF | 127 |

[2083] SEQ ID 1046 (GBS185) was expressed in E. coli as a His-fusion product. SDS-PAGE analysis of total cell extract is shown in FIG. 28 (lane 6; MW 15.7 kDa).

[2084] GBS185-His was purified as shown in FIG. 199, lane 8.

[2085] Based on this analysis, it was predicted that these proteins and their epitopes could be useful antigens for vaccines or diagnostics.

### EXAMPLE 324

[2086] A DNA sequence (GBSx0354) was identified in S. agalactiae <SEQ ID 1049> which encodes the amino acid sequence <SEQ ID 1050>. Analysis of this protein sequence reveals the following:

| Possible site: 28 | | | |
|---|---|---|---|
| >>> Seems to have a cleavable N-term signal seq. | | | |
| INTEGRAL | Likelihood = −4.46 | Transmembrane | 75-91 (67-94) |
| INTEGRAL | Likelihood = −4.41 | Transmembrane | 33-49 (30-49) |
| INTEGRAL | Likelihood = −2.60 | Transmembrane | 53-69 (52-70) |
| INTEGRAL | Likelihood = −1.38 | Transmembrane | 108-124 (106-124) |
| INTEGRAL | Likelihood = −0.06 | Transmembrane | 149-165 (149-165) |

----- Final Results -----
bacterial membrane --- Certainty = 0.2784 (Affirmative) < succ>
bacterial outside --- Certainty = 0.0000 (Not Clear) < succ>
bacterial cytoplasm --- Certainty = 0.0000 (Not Clear) < succ>

[2087] A related GBS nucleic acid sequence <SEQ ID 9731> which encodes amino acid sequence <SEQ ID 9732> was also identified. A further related GBS nucleic acid sequence <SEQ ID 10929> which encodes amino acid sequence <SEQ ID 10930> was also identified.

[2088] The protein has no significant homology with any sequences in the GENPEPT database.

[2089] A related DNA sequence was identified in S. pyogenes <SEQ ID 1051> which encodes the amino acid sequence <SEQ ID 1052>. Analysis of this protein sequence reveals the following:

| Possible site: 48 | | | |
|---|---|---|---|
| >>> Seems to have a cleavable N-term signal seq. | | | |
| INTEGRAL | Likelihood = −7.96 | Transmembrane | 50-66 (49-71) |
| INTEGRAL | Likelihood = −5.73 | Transmembrane | 101-117 (99-124) |
| INTEGRAL | Likelihood = −4.41 | Transmembrane | 141-157 (139-159) |
| INTEGRAL | Likelihood = −4.25 | Transmembrane | 73-89 (67-92) |

----- Final Results -----
bacterial membrane --- Certainty = 0.4185 (Affirmative) < succ>
bacterial outside --- Certainty = 0.0000 (Not Clear) < succ>
bacterial cytoplasm --- Certainty = 0.0000 (Not Clear) < succ>

[2090] The protein has no significant homology with any sequences in the GENPEPT database.

[2091] An alignment of the GAS and GBS proteins is shown below:

| Identities = 82/163 (50%), Positives = 120/163 (73%), Gaps = 3/163 (1%) | | | |
|---|---|---|---|
| Query: | 10 | LTRVAILSALCVVLRYAFAPLPNIQPITAIFLITVVLFDLKEGVATVTITMLVSSFLMGF | 69 |
| | | ++R+AI+SALCVVLR F+ LPN+QP+TA L ++ F L E V + + + +S+FL+GF | |
| Sbjct: | 6 | MSRIAIMSALCVVLRMVFSSLPNVQPVTAFLLSYLLYFGLAEAVLVMMLCLFLSAFLLGF | 65 |
| Query: | 70 | GPWVFLQIISFTLILCLWKFLIYPLTKAVCFGKITEVVLQTFFAGGLGVVYGVIIDTCFA | 129 |
| | | GPWVF Q+ F L+L LW+F++YPL++ F K ++ Q F G++YGV+IDTCFA | |
| Sbjct: | 66 | GPWVFWQVTCFVLVLLLWRFVLYPLSQQ--FPKY-QLGCQAFLVALCGLLYGVLIDTCFA | 122 |
| Query: | 130 | WLYHMPWWTYVLAGLSFNMAHALSTCLFYPLLLPILRRFRNEK | 172 |
| | | +LY MPWW+YVLAG+ FN+AHALST +F+P+++ + RR E+ | |
| Sbjct: | 123 | YLYSMPWWSYVLAGMPFNIAHALSTLVFFPVVMMLFRRLIGEQ | 165 |

[2092] A related GBS gene <SEQ ID 8549> and protein <SEQ ID 8550> were also identified. Analysis of this protein sequence reveals the following:

| Lipop: Possible site: −1 Crend: 10 | | |
|---|---|---|
| McG: Discrim Score: 6.79 | | |
| GvH: Signal Score (−7.5): −0.91 | | |
| Possible site: 28 | | |
| >>> Seems to have a cleavable N-term signal seq. | | |
| ALOM program count: 3 | value: −4.46 | threshold: 0.0 |

| | | | |
|---|---|---|---|
| INTEGRAL | Likelihood = −4.46 | Transmembrane | 35-51 (29-54) |
| INTEGRAL | Likelihood = −1.38 | Transmembrane | 68-84 (66-84) |
| INTEGRAL | Likelihood = −0.06 | Transmembrane | 109-125 (109-125) |

| | | |
|---|---|---|
| PERIPHERAL | Likelihood = 7.53 | 88 |

modified ALOM score: 1.39
*** Reasoning Step: 3
----- Final Results -----
bacterial membrane --- Certainty = 0.2784 (Affirmative) < succ>
bacterial outside --- Certainty = 0.0000 (Not Clear) < succ>
bacterial cytoplasm --- Certainty = 0.0000 (Not Clear) < succ>

[2093] The protein has homology with the following sequences in the databases:

[chemical structure]

[2094] Based on this analysis, it was predicted that these proteins and their epitopes could be useful antigens for vaccines or diagnostics.

### EXAMPLE 325

[2095] A DNA sequence (GBSx0355) was identified in S. agalactiae <SEQ ID 1053> which encodes the amino acid sequence <SEQ ID 1054>. This protein is predicted to be endolysin. Analysis of this protein sequence reveals the following:

```
Possible site: 28
>>> Seems to have a cleavable N-term signal seq.
----- Final Results -----
                                bacterial outside --- Certainty = 0.3000(Affirmative) < succ>
                              bacterial membrane --- Certainty = 0.0000(Not Clear) < succ>
                            bacterial cytoplasm --- Certainty = 0.0000(Not Clear) < succ>
```

[2096] The protein has homology with the following sequences in the GENPEPT database:

| >GP: CAA72266 GB: Y11477 endolysin [Bacteriophage Bastille] | | | |
|---|---|---|---|
| Identities = 64/210 (30%), Positives = 95/210 (44%), Gaps = 15/210 (7%) | | | |
| Query: | 66 | KPIIDVSGWQLPKEIDYDTLSKNISGVVIRVFGGSKISKTNNAAYTTGIDKSFKTHIKEF | 125 |
| | | K I+D+S +ID+DT +S + R G + + +N +D+ +KT + | |
| Sbjct: | 12 | KTIVDISHHNA--DIDFDTAKNYVSMFIARTGDGHRYN--SNGELQGVVDRKYKTFVANM | 67 |
| Query: | 126 | QKRNIPVAVYSYALGSSVKEMKEEAQIFYKNAAPYKPTFYWIDVEEETMSNMNKGVQAFR | 185 |
| | | + R IP Y + S V K+EA+ F+ N T + D E T NM + +Q F | |
| Sbjct: | 68 | KARGIPFGNYMFNRFSGVASAKQEAEFFW-NYGDKDATVWVCDAEVSTAPNMKECIQVFI | 126 |
| Query: | 186 | KELKRLGAKNVGIYIGTYFMTEQGISVKGFDAVWIPTYGSDSGYYEAAPQTELKYDLHQY | 245 |
| | | LK LGAK VG+YIG + E G D WIP YG+ + DL Q+ | |
| Sbjct: | 127 | DRLKELGAKKVGLYIGHHKYQEFGGKDVNCDFTWIPRYGNKPAF---------ACDLWQW | 177 |
| Query: | 246 | TSQGYLPGFNQPLDLNQIAVNKDKKKTYEK | 275 |
| | | T G + G + D+N + +K EK | |
| Sbjct: | 178 | TEYGNIAGIGK-CDINVLYGDKPMSFFTEK | 206 |

[2097] A related DNA sequence was identified in S. pyogenes <SEQ ID 1055> which encodes the amino acid sequence <SEQ ID 1056>. Analysis of this protein sequence reveals the following:

```
Possible site: 31
>>> Seems to have an uncleavable N-term signal seq
      INTEGRAL Likelihood = −16.98 Transmembrane 8-24 ( 3-28)
----- Final Results -----
                              bacterial membrane --- Certainty = 0.7793(Affirmative) < succ>
                                bacterial outside --- Certainty = 0.0000(Not Clear) < succ>
                            bacterial cytoplasm --- Certainty = 0.0000(Not Clear) < succ>
```

[2098] An alignment of the GAS and GBS proteins is shown below:

| Identities = 198/278 (71%), Positives = 225/278 (84%) | | | |
|---|---|---|---|
| Query: | 1 | MRRRIKPIVVAVFFSLFGLLLIIGHLHSTNTLKKELVEAKKTIPSVKASKVPQKSTSSKD | 60 |
| | | MRR+IKPIVV VFF L ++LIIG + + +KE+ +AK IP ++ K+++S+ | |
| Sbjct: | 1 | MRRKIKPIVVLVFFILLAMVLIIGKRQANHAKQKEVEDAKSHIPIATSNPGKAKTSTSET | 60 |
| Query: | 61 | KEFVLKPIIDVSGWQLPKEIDYDTLSKNISGVVIRVFGGSKISKTNNAAYTTGIDKSFKT | 120 |
| | | ++F+L PI+DVSGWQLP+EIDYDTLS++ISG ++RV+GGS+I+ NNAA+TTGIDKSFKT | |
| Sbjct: | 61 | EDFILNPIVDVSGWQLPEEIDYDTLSRHISGAIVRVYGGSQITAHNNAAFTTGIDKSFKT | 120 |
| Query: | 121 | HIKEFQKRNIPVAVYSYALGSSVKEMKEEAQIFYKNAAPYKPTFYWIDVEEETMSNMNKG | 180 |
| | | HIKEFQKRN+PVAVYSYALG S KEMKEEA+ FYKNAAPY PT+YWIDVEE TM +MNKG | |
| Sbjct: | 121 | HIKEFQKRNVPVAVYSYALGRSTKEMKEEARAFYKNAAPYNPTYYWIDVEEATMKDMNKG | 180 |
| Query: | 181 | VQAFRKELKRLGAKNVGIYIGTYFMTEQGISVKGFDAVWIPTYGSDSGYYEAAPQTELKY | 240 |
| | | V AFR+ELK+LGA+NVG+YIGTYFM EW IS KGFD+VWIPTYGSDSGYYEAAP T L Y | |
| Sbjct: | 181 | VTAFREELKKLGAENVGLYIGTYFMAEQDISTKGFDSVWIPTYGSDSGYYEAAPNTTLDY | 240 |
| Query: | 241 | DLHQYTSQGYLPGFNQPLDLNQIAVNKDKKKTYELKFG | 278 |
| | | DLHQYTSQGYL GFN LDLNQIAV KD KKT+EKLFG | |
| Sbjct: | 241 | DLHQYTSQGYLSGFNNALDLNQIAVTKDTKKTFEKLFG | 278 |

[2099] A related GBS gene <SEQ ID 8551> and protein <SEQ ID 8552> were also identified. Analysis of this protein sequence reveals the following:

```
Lipop Possible site: −1 Crend: 5
McG: Discrim Score: 13.20
GvH: Signal Score (−7.5): −0.72
          Possible site: 28
>>> Seems to have a cleavable N-term signal seq.
ALOM program count: 0 value: 7.05 threshold: 0.0
      PERIPHERAL Likelihood = 7.05 196
  modified ALOM score: −1.91
*** Reasoning Step: 3
----- Final Results -----
                                bacterial outside --- Certainty = 0.3000(Affirmative) < succ>
                              bacterial membrane --- Certainty = 0.0000(Not Clear) < succ>
                            bacterial cytoplasm --- Certainty = 0.0000(Not Clear) < succ>
```

[2100] The protein has homology with the following sequences in the databases:

[chemical structure]

[2101] SEQ ID 8552 (GBS206) was expressed in E. coli as a His-fusion product. SDS-PAGE analysis of total cell extract is shown in FIG. 51 (lane 6; MW 31.7 kDa).

[2102] GBS206-His was purified as shown in FIG. 206, lane 6.

[2103] Based on this analysis, it was predicted that these proteins and their epitopes could be useful antigens for vaccines or diagnostics.

### EXAMPLE 326

[2104] A DNA sequence (GBSx0356) was identified in S. agalactiae <SEQ ID 1057> which encodes the amino acid sequence <SEQ ID 1058>. Analysis of this protein sequence reveals the following:

| Possible site: 41 | | | | |
|---|---|---|---|---|
| >>> Seems to have no N-terminal signal sequence | | | | |
| | INTEGRAL | Likelihood = −1.44 | Transmembrane | 183-199 (183-200) |

```
----- Final Results -----
                              bacterial membrane --- Certainty = 0.1574(Affirmative) < succ>
                                bacterial outside --- Certainty = 0.0000(Not Clear) < succ>
                          bacterial cytoplasm --- Certainty = 0.0000(Not Clear) < succ>
```

[2105] A related GBS nucleic acid sequence <SEQ ID 9729> which encodes amino acid sequence <SEQ ID 9730> was also identified.

[2106] The protein has homology with the following sequences in the GENPEPT database:

| >GP: AAG20117 GB: AE005090 NADH dehydrogenase/oxidoreductase-like | | | |
|---|---|---|---|
| protein; NolA [Halobacterium sp. NRC-1] | | | |
| Identities = 38/156 (24%), Positives = 83/156 (52%), Gaps = 13/156 (8%) | | | |
| Query: | 19 | TMEILIAGGSGFLGKQIIKAALTKGHKVAYLSRHEGKGDIFKDPRLTYIRGDITEADKIH | 78 |
| | | +M++L+ GG+GF+G + + +GH V +R + D +T I GD+T + + | |
| Sbjct: | 8 | SMDVLVTGGTGFIGTHLCRELDDRGHDVTAFAREPADAALPAD--VTRIVGDVTVKETVA | 65 |
| Query: | 79 | LEDRTFDILIDCIGA---IKPNQLD----ELNVKATQKAVALCHKNQIPKLVYISA---- | 127 |
| | | D +++ + KP+ D ++++ T+ VA + + ++ +SA | |
| Sbjct: | 66 | NAIDGHDAVVNLVALSPLFKPSGGDSRHLDVHLGGTENVVAAASEAGVEYILQLSALDAD | 125 |
| Query: | 128 | NSGYSAYIKSKRKAEQIIKASGLDYLFVRPGLMYGE | 163 |
| | | +G +AY+++K +AE+ +++S L + VRP +++G+ | |
| Sbjct: | 126 | PTGPTAYLRAKGRAEEAVRSSDLHHTIVRPSVVFGD | 161 |

[2107] No corresponding DNA sequence was identified in S. pyogenes.

[2108] A related GBS gene <SEQ ID 8553> and protein <SEQ ID 8554> were also identified. Analysis of this protein sequence reveals the following:

| Lipop Possible site: −1 Crend: 5 | | | | |
|---|---|---|---|---|
| McG: Discrim Score: −7.99 | | | | |
| GvH: Signal Score (−7.5): −6.34 | | | | |
| Possible site: 41 | | | | |
| >>> Seems to have no N-terminal signal sequence | | | | |
| ALOM program count: 1 value: −1.44 threshold: 0.0 | | | | |
| | INTEGRAL | Likelihood = −1.44 | Transmembrane | 183-199 (183-200) |
| | PERIPHERAL | Likelihood = 4.29 | 20 | |

```
modified ALOM score: 0.79
*** Reasoning Step: 3
----- Final Results -----
                              bacterial membrane --- Certainty = 0.1574(Affirmative) < succ>
                                bacterial outside --- Certainty = 0.0000(Not Clear) < succ>
                          bacterial cytoplasm --- Certainty = 0.0000(Not Clear) < succ>
RGD motif 68-70
```

[2109] The protein has homology with the following sequences in the databases:

[chemical structure]

[2110] SEQ ID 8554 (GBS303) was expressed in E. coli as a His-fusion product. SDS-PAGE analysis of total cell extract is shown in FIG. 51 (lane 5; MW 28.3 kDa). It was also expressed in E. coli as a GST-fusion product. SDS-PAGE analysis of total cell extract is shown in FIG. 55 (lane 5; MW 53.2 kDa).

[2111] The GBS303-GST fusion product was purified (FIG. 207, lane 6) and used to immunise mice. The resulting antiserum was used for FACS (FIG. 275), which confirmed that the protein is immunoaccessible on GBS bacteria.

[2112] Based on this analysis, it was predicted that these proteins and their epitopes could be useful antigens for vaccines or diagnostics.

### EXAMPLE 327

[2113] A DNA sequence (GBSx0357) was identified in S. agalactiae <SEQ ID 1059> which encodes the amino acid sequence <SEQ ID 1060>. Analysis of this protein sequence reveals the following:

```
Possible site: 4
>>> Seems to have no N-terminal signal sequence
----- Final Results -----
                            bacterial cytoplasm --- Certainty = 0.2850(Affirmative) < succ>
                              bacterial membrane --- Certainty = 0.0000(Not Clear) < succ>
                                bacterial outside --- Certainty = 0.0000(Not Clear) < succ>
```

[2114] The protein has homology with the following sequences in the GENPEPT database:

| >GP: AAC36853 GB: L23802 regulatory protein [Enterococcus faecalis] | | | |
|---|---|---|---|
| Identities = 61/164 (37%), Positives = 96/164 (58%), Gaps = 13/164 (7%) | | | |
| Query: | 1 | MSKKNKIKKTLVDQILDKAKIEH---------DSLQLDALQGDLPNGIQKQDIFKTLALI | 51 |
| | | M+KK +KT +++++ K+ + D L +++ L GI+K IFKTL + | |
| Sbjct: | 1 | MAKKKTQQKTNAMRMVEQHKVPYKEYEFAWSEDHLSAESVAESL--GIEKGRIFKTLVTV | 58 |
| Query: | 52 | GDKTGPIIGILPLTEHLSEKKLAKISGNKKVQMIPQKDLQKITGYIHGANNPIGIRQKHN | 111 |
| | | G+KTGP++ ++P + L KKLAK SGNKKV+M+ KDL+ TGIY G +P G+ K | |
| Sbjct: | 59 | GNKTGPVVAVIPGNQELDLKKLAKSAGNKKVEMLHLKDLEATTGYIRGGCSPTGM--KKQ | 116 |
| Query: | 112 | YPIFIDTIALEKQELIVSAGEIGRSIRINSEVLADFVNAKFADI | 155 |
| | | +P ++ A + +IVSAG+ G I + E + N +FA+I | |
| Sbjct: | 117 | FPTYLAEEAQQYSAIIVSAGKRGMQIELAPEAILSLTNGQFAEI | 160 |

[2115] A related DNA sequence was identified in S. pyogenes <SEQ ID 1061> which encodes the amino acid sequence <SEQ ID 1062>. Analysis of this protein sequence reveals the following:

```
Possible site: 30
>>> Seems to have no N-terminal signal sequence
----- Final Results -----
                            bacterial cytoplasm --- Certainty = 0.2651(Affirmative) < succ>
                              bacterial membrane --- Certainty = 0.0000(Not Clear) < succ>
                                bacterial outside --- Certainty = 0.0000(Not Clear) < succ>
```

[2116] An alignment of the GAS and GBS proteins is shown below:

| Identities = 114/157 (72%), Positives = 139/157 (87%) | | | |
|---|---|---|---|
| Query: | 1 | MSKKNKIKKTLVDQILDKAKIEHDSLQLDALQGDLPNGIQKQDIFKTLALIGDKTGPIIG | 60 |
| | | M+KK K+VVTLV+QILDKA I H L+L+AL+GD P+ +Q DI+KTLAL GD+TGP+IG | |
| Sbjct: | 1 | MAKKTKLKKTLVEQILDKANIAHQGLKLNALEGDFPDDLQPSDIYKTLALTGDQTGPLIG | 60 |
| Query: | 61 | ILPLTEHLSEKKLAKISGNKKVQMIPQKDLQKITGYIHGANNPIGIRQKHNYPIFIDTIA | 120 |
| | | I+PLTEHLSEK+LAK+SGNKKV M+PQKDLQK TGYIHGANNP+GIRQKH+YPIFID A | |
| Sbjct: | 61 | IIPLTEHLSEKQLAKVSGNKKVSMVPQKDLQKTTGYIHGANNPVGIRQKHSYPIFIDQTA | 120 |
| Query: | 121 | LEKQELIVSAGEIGRSIRINSEVLADFVNAKFADIKE | 157 |
| | | LEK ++IVSAGE+GRSI+I+S+ LADFV A FAD+K+ | |
| Sbjct: | 121 | LEKGQIIVSAGEVGRSIKISSQALADFVGASFADLKK | 157 |

[2117] Based on this analysis, it was predicted that these proteins and their epitopes could be useful antigens for vaccines or diagnostics.

### EXAMPLE 328

[2118] A DNA sequence (GBSx0358) was identified in S. agalactiae <SEQ ID 1063> which encodes the amino acid sequence <SEQ ID 1064>. Analysis of this protein sequence reveals the following:

```
Possible site: 28
>>> Seems to have no N-terminal signal sequence
----- Final Results -----
                            bacterial cytoplasm --- Certainty = 0.4719(Affirmative) < succ>
                              bacterial membrane --- Certainty = 0.0000(Not Clear) < succ>
                                bacterial outside --- Certainty = 0.0000(Not Clear) >c succ>
```

[2119] A related GBS nucleic acid sequence <SEQ ID 8555> which encodes amino acid sequence <SEQ ID 8556> was also identified. This protein belongs to the glycolysis/gluconeogenesis pathway, and such proteins have been experimentally detected as surface-exposed in Streptococci. The protein has homology with the following sequences in the GENPEPT database:

| >GP: AAD36444 GB: AE001791 phosphoglycerate mutase [Thermotoga maritima] | | | |
|---|---|---|---|
| Identities = 65/191 (34%), Positives = 93/191 (48%), Gaps = 13/191 (6%) | | | |
| Query: | 5 | MKFYLVRHGKTQWNLEGRFQGANGDSPLLEEAIEELEELGQYLSSIHFDAVYSSDLGRAR | 64 |
| | | MK YL+RHG+T WN +G +QG D PL E E+ +L L + DA+YSS R+ | |
| Sbjct: | 1 | MKLYLIRHGETIWNEKGLWQGVT-DVPLNERGREQARKLANSLKRV--DAIYSSPLKRSL | 57 |
| Query: | 65 | DTVNILNDANSCPKEIHYTPQLREWALGTLEGCKIATMQAIYPRQMTAFYQNPLQFKHDM | 124 |
| | | +T + A KEI LRE + G + YP + + +P M | |
| Sbjct: | 58 | ETAEEI--ARRFEKEIIVEEDLRECEISLWNGLTVEEAIREYPVEFKKWSSDP---NFGM | 112 |
| Query: | 125 | FGAESLYQTTHRVESFLRSLASK----NYDKVLIVGHGANLTASIRSLLGYQYGSLHYKD | 180 |
| | | G ES+ +RV + + S+ + V+IV H +L A I +LG LH | |
| Sbjct: | 113 | EGLESMRNVQNRVVKAIMKIVSQEKLNGSENVVIVSHSLSLRAFICWILGLPL-YLHRNF | 171 |
| Query: | 181 | KLDNASLTIIE | 191 |
| | | KLDNASL+++E | |
| Sbjct: | 172 | KLDNASLSVVE | 182 |

[2120] A related DNA sequence was identified in S. pyogenes <SEQ ID 1065> which encodes the amino acid sequence <SEQ ID 1066>. Analysis of this protein sequence reveals the following:

```
Possible site: 24
>>> Seems to have no N-terminal signal sequence
----- Final Results -----
                            bacterial cytoplasm --- Certainty = 0.3628(Affirmative) < succ>
                              bacterial membrane --- Certainty = 0.0000(Not Clear) < succ>
                                bacterial outside --- Certainty = 0.0000(Not Clear) < succ>
```

[2121] An alignment of the GAS and GBS proteins is shown below:

| Identities = 127/205 (61%), Positives = 152/205 (73%) | | | |
|---|---|---|---|
| Query: | 5 | MKFYLVRHGKTQWNLEGRFQGANGDSPLLEEAIEELEELGQYLSSIHFDAVYSSDLGRAR | 64 |
| | | MK Y VRHGKT WNLEGRFQGA GDSPLLEEA +E+ LG+ L+ + FDAVY+SDL RA | |
| Sbjct: | 1 | MKLYFVRHGKTLWNLEGRFQGAGGDSPLLEEAKDEIHLLGKELAKVAFDAVYTSDLQRAM | 60 |
| Query: | 65 | DTVNILNDANSCPKEIHYTPQLREWALGTLEGCKIATMQAIYPRQMTAFYQNPLQFKHDM | 124 |
| | | T I+ DA ++++T QLREW LG LEG KIATM AIYP+QM AF +N QFK D | |
| Sbjct: | 61 | ATAAIILDAFDQQPKLYHTDQLREWRLGKLEGAKIATMAAIYPQQMLAFRENLAQFKPDQ | 120 |
| Query: | 125 | FGAESLYQTTHRVESFLRSLASKNYDKVLIVGHGANLTASIRSLLGYQYGSLHYKDKLDN | 184 |
| | | F AES+YQTT RV ++S K+Y VLIVGHGANLTA+IRSLLG++ L K LDN | |
| Sbjct: | 121 | FEAESIYQTTQRVCHLIQSFKDKHYQNVLIVGHGANLTATIRSLLGFEPALLLAKGGLDN | 180 |
| Query: | 185 | ASLTIIETHDFKDFNCLTWNDKSYL | 209 |
| | | ASLTI+ET D+ ++CL WNDKS+L | |
| Sbjct: | 181 | ASLTILETKDYLTYDCLIWNDKSFL | 205 |

[2122] Based on this analysis, it was predicted that these proteins and their epitopes could be useful antigens for vaccines or diagnostics.

### EXAMPLE 329

[2123] A DNA sequence (GBSx0359) was identified in S. agalactiae <SEQ ID 1067> which encodes the amino acid sequence <SEQ ID 1068>. Analysis of this protein sequence reveals the following:

```
Possible site: 56
>>> Seems to have no N-terminal signal sequence
----- Final Results -----
                            bacterial cytoplasm --- Certainty = 0.3014(Affirmative) < succ>
                              bacterial membrane --- Certainty = 0.0000(Not Clear) < succ>
                                bacterial outside --- Certainty = 0.0000(Not Clear) < succ>
```

[2124] The protein has homology with the following sequences in the GENPEPT database:

| >GP: CAB12562 GB: Z99108 similar to hypothetical proteins | | | |
|---|---|---|---|
| [Bacillus subtilis] | | | |
| Identities = 69/232 (29%), Positives = 108/232 (45%), Gaps = 9/232 (3%) | | | |
| Query: | 4 | SIVFDVDDTIYDQQAPYRIAVEKCFPDFDMSAINQAYIRFRHYSDIGFPRVMAGEWTTEY | 63 |
| | | +++FDVDDTI D QA +A+ F D ++ N +++ + + G+ T + | |
| Sbjct: | 6 | TLLFDVDDTILDFQAAEALALRLLFEDQNIPLTNDMKAQYKTINQGLWRAFEEGKMTRDE | 65 |
| Query: | 64 | FRFWRCKETLLEFGYREIDEATGIYFQEIYEHELENITMLDEMRMTLDFLKSKNVPMGII | 123 |
| | | R L E+GY EA G ++ Y LE L + L + + I+ | |
| Sbjct: | 66 | VVNTRFSALLKEYGY----EADGALLEQKYRRFLEEGHQLIDGAFDLISNLQQQFDLYIV | 121 |
| Query: | 124 | TNGPTEHQLKKVKKLGLYDYVDPKRVIVSQATGFQKPEKEIFNLAAEQF-DMNPSTTLYV | 182 |
| | | TNG + Q K+++ GL+ + K + VS+ TGFQKP KE FN E+ + TL + | |
| Sbjct: | 122 | TNGVSHTQYKRLRDSGLFPFF--KDIFVSEDTGFQKPMKEYFNYVFERIPQFSAEHTLII | 179 |
| Query: | 183 | GDSYDNDIMGAFNGGWHSMWFNHRGRSLKPGIKPVYDVAIDNFEQLFGAVKV | 234 |
| | | GDS DI G G + W N + P I P Y+ I E+L+ + + | |
| Sbjct: | 180 | GDSLTADIKGGQLAGLDTCWMNPDMKPNVPEIIPTYE--IRKLEELYHILNI | 229 |

[2125] A related DNA sequence was identified in S. pyogenes <SEQ ID 1069> which encodes the amino acid sequence <SEQ ID 1070>. Analysis of this protein sequence reveals the following:

```
Possible site: 56
>>> Seems to have no N-terminal signal sequence
----- Final Results -----
                            bacterial cytoplasm --- Certainty = 0.3216(Affirmative) < succ>
                              bacterial membrane --- Certainty = 0.0000(Not Clear) < succ>
                                bacterial outside --- Certainty = 0.0000(Not Clear) < succ>
```

[2126] An alignment of the GAS and GBS proteins is shown below:

| Identities = 276/300 (92%), Positives = 292/300 (97%) | | | |
|---|---|---|---|
| Query: | 1 | MITSIVFDVDDTIYDQQAPYRIAVEKCFPDFDMSAINQAYIRFRHYSDIGFPRVMAGEWT | 60 |
| | | MIT+IVFDVDDTIYDQQAPYRIA+EKCFPDFDMS +NQAYIRFRHYSD+GFPRVMAGEWT | |
| Sbjct: | 1 | MITAIVFDVDDTIYDQQAPYRIAMEKCFPDFDMSVMNQAYIRFRHYSDVGFPRVMAGEWT | 60 |
| Query: | 61 | TEYFRFWRCKETLLEFGYREIDEATGIYFQEIYEHELENITMLDEMRMTLDFLKSKNVPM | 120 |
| | | TEYFRFWRCKETLLEFGYREIDEA G++FQE+YEHELENITMLDEMRMTLDFLKSKNVPM | |
| Sbjct: | 61 | TEYFRFWRCKETLLEFGYREIDEAAGVHFQEVYEHELENITMLDEMRMTLDFLKSKNVPM | 120 |
| Query: | 121 | GIITNGPTEHQLKKVKKLGLYDYVDPKRVIVSQATGFQKPEKEIFNLAAEQFDMNPSTTL | 180 |
| | | GIITNGPTEHQLKKV+KLGLYDY+D KRVIVSQATGFQKPEKEIFNLAAEQFDMNP TTL | |
| Sbjct: | 121 | GIITNGPTEHQLKKVRKLGLYDYIDAKRVIVSQATGFQKPEKEIFNLAAEQFDMNPQTTL | 180 |
| Query: | 181 | YVGDSYDNDIMGAFNGGWHSMWFNHRGRSLKPGIKPVYDVAIDNFEQLFGAVKVLFDLPD | 240 |
| | | YVGDSYDNDIMGAFNGGWHSMWFNHRGR LKPG KPVYDVAIDNFEQLFGAVKVLFDLPD | |
| Sbjct: | 181 | YVGDSYDNDIMGAFNGGWHSMWFNHRGRQLKPGTKPVYDVAIDNFEQLFGAVKVLFDLPD | 240 |
| Query: | 241 | NKFIFDINDKSNPVLEMGLNNGLMMAAERLLESNMSVDKVVILLRLTAKQEKVLRMKYAR | 300 |
| | | NKFIFD+NDK NP+L+MG+NNGLMMAAERLLESNMS+DKVVILLRLT +QEKVLR+KYAR | |
| Sbjct: | 241 | NKFIFDVNDKKNPILQMGINNGLMMAAERLLESNMSIDKVVILLRLTKQQEKVLRLKYAR | 300 |

[2127] Based on this analysis, it was predicted that these proteins and their epitopes could be useful antigens for vaccines or diagnostics.

### EXAMPLE 330

[2128] A DNA sequence (GBSx0360) was identified in S. agalactiae <SEQ ID 1071> which encodes the amino acid sequence <SEQ ID 1072>. Analysis of this protein sequence reveals the following:

```
Possible site: 34
>>> Seems to have no N-terminal signal sequence
----- Final Results -----
                            bacterial cytoplasm --- Certainty = 0.2451(Affirmative) < succ>
                              bacterial membrane --- Certainty = 0.0000(Not Clear) < succ>
                                bacterial outside --- Certainty = 0.0000(Not Clear) < succ>
```

[2129] A related GBS nucleic acid sequence <SEQ ID 9727> which encodes amino acid sequence <SEQ ID 9728> was also identified.

[2130] The protein has homology with the following sequences in the GENPEPT database:

| >GP: CAB11858 GB: Z99104 lysyl-tRNA synthetase [Bacillus subtilis] | | | |
|---|---|---|---|
| Identities = 318/490 (64%), Positives = 390/490 (78%), Gaps = 1/490 (0%) | | | |
| Query: | 44 | EELNDQQIVRREKMAALTEQGIDPFGKRFERTATSGQLNEKYADKSKEDLHDIEETATIA | 103 |
| | | EELNDQ VRR+KM L + GIDPFG RFERT S ++ Y D +KE+L + TIA | |
| Sbjct: | 9 | EELNDQLQVRRDKMNQLRDNGIDPFGARFERTHQSQEVISAYQDLTKEELEEKAIEVTIA | 68 |
| Query: | 104 | GRLMTKRGKGKVGFAHIQDREGQIQIYVRKDSVGEENYEIFKKADLGDFLGVEGQVMRTD | 163 |
| | | GR+MTKRGKGK GFAH+QD EGQIQIYVRKDSVG++ YEIFK +DLGD +GV G+V +T+ | |
| Sbjct: | 69 | GRMMTKRGKGKAGFAHLQDLEGQIQIYVRKDSVGDDQYEIFKSSDLGDLIGVTGKVFKTN | 128 |
| Query: | 164 | MGELSIKATHITHLSKALRPLPEKFHGLTDIETIYRKRHLDLISNRDSFDRFVTRSKIIS | 223 |
| | | +GELS+KAT L+KALRPLP+K+HGL D+E YR+R+LDLI N DS F+TRSKII | |
| Sbjct: | 129 | VGELSVKATSFELLTKALRPLPDKYHGLKDVEQRYRQRYLDLIVNPDSKHTFITRSKIIQ | 188 |
| Query: | 224 | EIRRFMDSNGFLEVETPVLHNEAGGASARPFITHHNAQDIDMVLRIATELHLKRLIVGGM | 283 |
| | | +RR++D +G+LEVETP +H+ GGASARPFITHHNA DI + +RIA ELHLKRLIVGG+ | |
| Sbjct: | 189 | AMRRYLDDHGYLEVETPTMHSIPGGASARPFITHHNALDIPLYMRIAIELHLKRLIVGGL | 248 |
| Query: | 284 | ERVYEIGRIFRNEGMDATHNPEFTSIEAYQAYADYQDIMDLTEGIIQHVTKTVKGDGPIN | 343 |
| | | E+VYEIGR+FRNEG+ HNPEFT IE Y+AYADY+DIM LTE ++ H+ + V G I | |
| Sbjct: | 249 | EKVYEIGRVFRNEGVSTRHNPEFTMIELYEAYADYKDIMSLTENLVAHIAQEVLGTTTIQ | 308 |
| Query: | 344 | YQGTEIKINEPFKRVHMVDAVKEITGIDFWKEMTLEEAQALAQEKNVPLEKHFTTVGHII | 403 |
| | | Y +I + +KR+HMVDAVKE TG+DFW+E+T+E+A+ A+E V + K TVGHII | |
| Sbjct: | 309 | YGEEQIDLKPEWKRIHMVDAVKEATGVDFWEEVTVEQAREYAKEHEVEI-KDSMTVGHII | 367 |
| Query: | 404 | NAFFEEFVEDTLIQPTFVFGHPVEVSPLAKKNDTDPRFTDRFELFIMTKEYANAFTELND | 463 |
| | | N FFE+ +E+TLIQPTF++GHPVE+SPLAKKN DPRFTDRFELFI+ +E+ANAFTELND | |
| Sbjct: | 368 | NEFFEQKIEETLIQPTFIYGHPVEISPLAKKNPEDPRFTDRFELFIVGREHANAFTELND | 427 |
| Query: | 464 | PIDQLSRFEAQASAKELGDDEATGVDYDYVEALEYGMPPTGGLGIGIDRLCMLLTDTTTI | 523 |
| | | PIDQ RFEAQ +E G+DEA +D D+VEALEYGMPPTGGLGIGIDRL MLLT+ +I | |
| Sbjct: | 428 | PIDQRERFEAQLKEREAGNDEAHLMDEDFVEALEYGMPPTGGLGIGIDRLVMLLTNAPSI | 487 |
| Query: | 524 | RDVLLFPTMK | 533 |
| | | RDVLLFP M+ | |
| Sbjct: | 488 | RDVLLFPQMR | 497 |

[2131] A related DNA sequence was identified in S. pyogenes <SEQ ID 1073> which encodes the amino acid sequence <SEQ ID 1074>. Analysis of this protein sequence reveals the following:

```
Possible site: 45
>>> Seems to have no N-terminal signal sequence
----- Final Results -----
                            bacterial cytoplasm --- Certainty = 0.4694(Affirmative) < succ>
                              bacterial membrane --- Certainty = 0.0000(Not Clear) < succ>
                                bacterial outside --- Certainty = 0.0000(Not Clear) < succ>
```

[2132] An alignment of the GAS and GBS proteins is shown below:

| Identities = 439/500 (87%), Positives = 474/500 (94%) | | | |
|---|---|---|---|
| Query: | 34 | LEEIMSNQHIEELNDQQIVRREKMAALTEQGIDPFGKRFERTATSGQLNEKYADKSKEDL | 93 |
| | | LEE MSNQHIEELNDQQIVRREKM AL EQGIDPFGKRF+RTA S +L EKYADK+KE+L | |
| Sbjct: | 1 | LEENMSNQHIEELNDQQIVRREKMTALAEQGIDPFGKRFDRTANSAELKEKYADKTKEEL | 60 |
| Query: | 94 | HDIEETATIAGRLMTKRGKGKVGFAHIQDREGQIAIYVRKDSVGEENYEIFKKADLGDFL | 153 |
| | | H++ ETA +AGRLMTKRGKGKVGFAH+QDREGQIQ+YVRKDSVGE+NYEIFKKADLGDF+ | |
| Sbjct: | 61 | HELNETAIVAGRLMTKRGKGKVGFAHLQDREGQIQLYVRKDSVGEDNYEIFKKADLGDFI | 120 |
| Query: | 154 | GVEGQVMRTDMGELSIKATHITHLSKALRPLPEKFHGLTDIETIYRKRHLDLISNRDSFD | 213 |
| | | GVEG+VMRTDMGELSIKAT +THLSK+LRPLPEKFHGLTDIETIYRKRHLDLISNR+SFD | |
| Sbjct: | 121 | GVEGEVMRTDMGELSIKATKLTHLSKSLRPLPEKFHGLTDIETIYRKRHLDLISNRESFD | 180 |
| Query: | 214 | RFVTRSKIISEIRRFMDSNGFLEVETPVLHNEAGGASARPFITHHNAQDIDMVLRIATEL | 273 |
| | | RFVTRSK+ISEIRR++D FLEVETPVLHNEAGGA+ARPF+THHNAQ+IDMVLRIATEL | |
| Sbjct: | 181 | RFVTRSKMISEIRRYLDGLDFLEVETPVLHNEAGGAAARPFVTHHNAQNIDMFLRIATEL | 240 |
| Query: | 274 | HLKRLIVGGMERVYEIGRIFRNEGMDATHNPEFTSIEAYQAYADYQDIMDLTEGIIQHVT | 333 |
| | | HLKRLIVGGMERVYEIGRIFRNEGMDATHNPEFTSIE YQAYADY DIM+LTEGIIQH | |
| Sbjct: | 241 | HLKRLIVGGMERVYEIGRIFRNEGMDATHNPEFTSIEVYQAYADYLDIMNLTEGIIQHAA | 300 |
| Query: | 334 | KTVKGDGPINYQGTEIKINEPFKRVHMVDAVKEITGIDFWKEMTLEEAQALAQEKNVPLE | 393 |
| | | K V+GDGPI+YQGTEI+INEPFKRVHMVDA+KE+TG DFW EMT+EEA ALA+EK VPLE | |
| Sbjct: | 301 | KAVRGDGPIDYQGTEIRINEPFKRVHMVDAIKEVTGADFWPEMTVEEAIALAKEKQVPLE | 360 |
| Query: | 394 | KHFTTVGHIINAFFEEFVEDTLIQPTFVFGHPVEVSPLAKKNDTDPRFTDRFELFIMTKE | 453 |
| | | KHF +VGHIINAFFEEFVE+TL+QPTFVFGHPVEVSPLAKKN D RFTDRFELFIMTKE | |
| Sbjct: | 361 | KHFISVGHIINAFFEEFVEETLVQPTFVFGHPVEVSPLAKKNPEDTRFTDRFELFIMTKE | 420 |
| Query: | 454 | YANAFTELNDPIDQLSRFEAQASAKELGDDEATGVDYDYVEALEYGMPPTGGLGIGIDRL | 513 |
| | | YANAFTELNDPIDQLSRFEAQA AKELGDDEATG+DYD+VEALEYGMPPTGGLGIGIDRL | |
| Sbjct: | 421 | YANAFTELNDPIDQLSRFEAQAQAKELGDDEATGIDYFDVEALEYGMPPTGGLGIGIDRL | 480 |
| Query: | 514 | CMLLTDTTTIRDVLLRPTMK | 533 |
| | | CMLLT+TTTIRDVLLFPTMK | |
| Sbjct: | 481 | CMLLTNTTTIRDVLLFPTMK | 500 |

[2133] Based on this analysis, it was predicted that these proteins and their epitopes could be useful antigens for vaccines or diagnostics.

### EXAMPLE 331

[2134] A DNA sequence (GBSx0361) was identified in S. agalactiae <SEQ ID 1075> which encodes the amino acid sequence <SEQ ID 1076>. This protein is predicted to be 6,7-dimethyl-8-ribityllumazine synthase (ribH). Analysis of this protein sequence reveals the following:

```
Possible site: 34
>>> Seems to have no N-terminal signal sequence
----- Final Results -----
                            bacterial cytoplasm --- Certainty = 0.1042(Affirmative) < succ>
                              bacterial membrane --- Certainty = 0.0000(Not Clear) < succ>
                                bacterial outside --- Certainty = 0.0000(Not Clear) < succ>
```

[2135] The protein has homology with the following sequences in the GENPEPT database:

>GP: CAB14257 GB: Z99116 riboflavin synthase (beta subunit)
[Bacillus subtilis]
Identities = 103/151 (68%), Positives = 120/151 (79%)

| | | | |
|---|---|---|---|
| Query: | 1 | MTIIEGQLVANEMKIGIVVSRFNELITSKLLSGAVDGLLRHGVSEEDIDIVWVPGAFEIP | 60 |
| | | M II+G LV +KIGIVV RFN+ ITSKLLSGA D LLRHGV DID+ WVPGAFEIP | |
| Sbjct: | 1 | MNIIQGNLVGTGLKIGIVVGRFNDFITSKLLSGAEDALLRHGVDTNDIDVAWVPGAFEIP | 60 |
| Query: | 61 | YMARKMALYKDYDAIICLGVVIKGSTDHYDYVCNEVTKGIGHLNSQSDIPHIFGVLTTDN | 120 |
| | | + A+KMA K YDAII LG VI+G+T HYDYVCNE KGI + + +P IFG++TT+N | |
| Sbjct: | 61 | FAAKKMAETKKYDAIITLGTVIRGATTHYDYVCNEAAKGIAQAANTTGVPVIFGIVTTEN | 120 |
| Query: | 121 | IEQAIERAGTKAGNKGYDCALSAIEMVNLDK | 151 |
| | | IEQAIERAGTKAGNKG DCA+SAIEM NL++ | |
| Sbjct: | 121 | IEQAIERAGTKAGNKGVDCAVSAIEMANLNR | 151 |

[2136] No corresponding DNA sequence was identified in S. pyogenes.

[2137] Based on this analysis, it was predicted that this protein and its epitopes, could be useful antigens for vaccines or diagnostics.

### EXAMPLE 332

[2138] A DNA sequence (GBSx0362) was identified in S. agalactiae <SEQ ID 1077> which encodes the amino acid sequence <SEQ ID 1078>. This protein is predicted to be GTP cyclohydrolase ii (ribA/B). Analysis of this protein sequence reveals the following:

```
Possible site: 20
>>> Seems to have no N-terminal signal sequence
----- Final Results -----
                            bacterial cytoplasm --- Certainty = 0.1918(Affirmative) < succ>
                              bacterial membrane --- Certainty = 0.0000(Not Clear) < succ>
                                bacterial outside --- Certainty = 0.0000(Not Clear) < succ>
```

[2139] A related GBS nucleic acid sequence <SEQ ID 9725> which encodes amino acid sequence <SEQ ID 9726> was also identified.

[2140] The protein has homology with the following sequences in the GENPEPT database:

| >GP: AAA86524 GB: U27202 GTP cyclohydrase II/ | | | |
|---|---|---|---|
| 3,4-dihydroxy-2-butanone-4-phosphate synthase | | | |
| [Actinobacillus pleuropneumoniae] | | | |
| Identities = 230/395 (58%), Positives = 307/395 (77%) | | | |
| Query: | 19 | FSPIKKLLQDIKSGKMVVLMDDENRENEGDLICAAEMVTKESINFMAKFGKGLICLPLSN | 78 |
| | | FS ++ ++ I+ GK++++ DDE+RENEGD ICAAE T E+INFMA +GKGLIC P+S | |
| Sbjct: | 6 | FSKVEDAIEAIRQGKIILVTDDEDRENEGDFICAAEFATPENINFMATYGKGLICTPIST | 65 |
| Query: | 79 | YYAEKLELAQMASHNTDNHETAFTISIDHLSTSTGISAEDRALTAKMVANDSSKAKFDRR | 138 |
| | | A+KL M + N DNHETAFT+S+DH+ T TGISA +R++TA + +D++KA DFRR | |
| Sbjct: | 66 | EIAKKLNFHPMVAVNQDNHETAFTVSVDHIDTGTGISAFERSITAMKIVDDNAKATDFRR | 125 |
| Query: | 139 | PGHLFPLLAKEGGVLARNGHTEATVDLCRLAGLKECGLCCEIMAEDGSMMRKDELLAFAQ | 198 |
| | | PGH+FPL+AKEGGVL RNGHTEATVDL RLAGLK GLCCEIMA+DG+MM +L FA | |
| Sbjct: | 126 | PGHMFPLIAKEGGVLVRNGHTEATVDLARLAGLKHAGLCCEIMADDGTMMTMPDLQKFAV | 185 |
| Query: | 199 | KHDLAIATIKQLQDYRRQEEGGVVREIEIQLPTQFGHFTAYGYSEVVANKEHVALVKGDI | 258 |
| | | +H++ TI+QLQ+YRR+ + V + +++PT++G F A+ + EV++ KEHVALVKGD+ | |
| Sbjct: | 186 | EHNMPFITIQQLQEYRRKHDSLVKQISVVKMPTKYGEFMAHSFVEVISGKEHVALVKGDL | 245 |
| Query: | 259 | SSGEDVLCRLHSECLTGDVFHSLRCDCGEQLANALQQIEAEGRGVLLYMRQEGRGIGLIN | 318 |
| | | + GE VL R+HSECLTGD F S RCDCG+Q A A+ QIE EGRGV+LY+RQEGRGIGLIN | |
| Sbjct: | 246 | TDGEQVLARIHSECLTGDAFGSQRCDCGQQFAAAMTQIEQEGRGVILYLRQEGRGIGLIN | 305 |
| Query: | 319 | KLKAYHLQEEGLDTLEANLALGFEGDERDYGVSAQLLKDLGINSINLLTNNPDKIQQLEA | 378 |
| | | KL+AY LQ++G+DT+EAN+ALGF+ DER+Y + AQ+ + LG+ SI LLTNNP KI+ L+ | |
| Sbjct: | 306 | KLRAYELQDKGMDTVEANVALGFKEDEREYYIGAQMFQQLGVKSIRLLTNNPAKIEGLKE | 365 |
| Query: | 379 | EGICVKNRVPLQVAVTAYDLNYLKTKKEKMGHLLD | 413 |
| | | +G+ + R P+ V D++YLK K+ KMGH+ + | |
| Sbjct: | 366 | QGLNIVAREPIIVEPNKNDIDYLKVKQIKMGHMFN | 400 |

[2141] No corresponding DNA sequence was identified in S. pyogenes.

[2142] Based on this analysis, it was predicted that these proteins and their epitopes could be useful antigens for vaccines or diagnostics.

### EXAMPLE 333

[2143] A DNA sequence (GBSx0363) was identified in S. agalactiae <SEQ ID 1079> which encodes the amino acid sequence <SEQ ID 1080>. This protein is predicted to be riboflavin synthase alpha chain (ribE). Analysis of this protein sequence reveals the following:

```
Possible site: 59
>>> Seems to have no N-terminal signal sequence
----- Final Results -----
                            bacterial cytoplasm --- Certainty = 0.3517(Affirmative) < succ>
                              bacterial membrane --- Certainty = 0.0000(Not Clear) < succ>
                                bacterial outside --- Certainty = 0.0000(Not Clear) < succ>
```

[2144] A related GBS nucleic acid sequence <SEQ ID 9723> which encodes amino acid sequence <SEQ ID 9724> was also identified.

[2145] The protein has homology with the following sequences in the GENPEPT database:

| >GP: BAB05274 GB: AP001512 riboflavin synthase alpha subunit | | | |
|---|---|---|---|
| [Bacillus halodurans] | | | |
| Identities = 98/216 (45%), Positives = 147/216 (67%), Gaps = 2/216 (0%) | | | |
| Query: | 1 | MFTGIIEEMGQVSRIRNGIKSQQLSIDAPKLVPLLRKGDSVAVNGVCLTVLDKSETAFIA | 60 |
| | | MFTGIIE++G + I+ ++ ++I + K+V ++ GDS+AVNGVCLTV ++T F | |
| Sbjct: | 1 | MFTGIIEDVGTIDAIQQTGEAIVMTITSKKIVSDVQLGDSIAVNGVCLTVTSFTDTQFTV | 60 |
| Query: | 61 | DVMPESMMRTSLAALRLHSKVNLELALRSDSRLGGHFVLGHVDGVGKIEKIQKDDIAVRF | 120 |
| | | D+MPE++ TSL L S+VNLE A+ ++ R GGH V GHVDG+G I K ++ D AV + | |
| Sbjct: | 61 | DLMPETVRATSLRLLSKGSRVNLERAMVANGRFGGHIVSGHVDGIGTIRKKERKDNAVYY | 120 |
| Query: | 121 | SIDAPPSIMSYIIEKGSVALDGISLTVVSFTEHSFEVSVIPHTMAQTNLSLKKVGDLLNI | 180 |
| | | +I+ S+ Y+I KGSVA+DG SLT+ ++ +F +S+IPHTM +T + LKK GD++NI | |
| Sbjct: | 121 | TIEVSSSLRRYMIHKGSVAVDGTSLTIFDVSDKTFTISIIPHTMEETIIGLKKAGDIVNI | 180 |
| Query: | 181 | EVDLVGKYAEKFLAPTNRTNHTSSVMDWSFLSENGY | 216 |
| | | E D++GKY E+F+ N + +FL+E+GY | |
| Sbjct: | 181 | ECDLIGKYIEQFVQQGKPVNEGG--LTKAFLTEHGY | 214 |

[2146] No corresponding DNA sequence was identified in S. pyogenes.

[2147] Based on this analysis, it was predicted that these proteins and their epitopes could be useful antigens for vaccines or diagnostics.

### EXAMPLE 334

[2148] A DNA sequence (GBSx0364) was identified in S. agalactiae <SEQ ID 1081> which encodes the amino acid sequence <SEQ ID 1082>. This protein is predicted to be riboflavin-specific deaminase (ribD). Analysis of this protein sequence reveals the following:

```
Possible site: 30
>>> Seems to have no N-terminal signal sequence
      INTEGRAL Likelihood = −1.01 Transmembrane 307-323 ( 307-323)
----- Final Results -----
                              bacterial membrane --- Certainty = 0.1404(Affirmative) < succ>
                                bacterial outside --- Certainty = 0.0000(Not Clear) < succ>
                            bacterial cytoplasm --- Certainty = 0.0000(Not Clear) < succ>
```

[2149] The protein has homology with the following sequences in the GENPEPT database:

| >GP: AAA86522 GB: U27202 riboflavin-specific deaminase | | | |
|---|---|---|---|
| [Actinobacillus pleuropneumoniae] | | | |
| Identities = 182/353 (51%), Positives = 259/353 (72%) | | | |
| Query: | 6 | DYMALALKEAEKGMGFVAPNPLVGAVIVKDDRIISKGYHKRFGDLHAERQAIKNADEDIS | 65 |
| | | DYM A+ A++G+G+ PVPLVG VIVK+ I+++GYH++ G HAER A+ + ED+S | |
| Sbjct: | 51 | DYMRRAIALAKQGLGWTNPNPLVGCVIVKNGEIVAEGYHEKIGGWHAERNAVLHCKEDLS | 110 |
| Query: | 66 | GSTLYVTLEPCCHVGKQPPCTEALIKSGIKKVVVGSLDPNPLVSGKGIALLRKEGLNVEV | 125 |
| | | G+T YVTLEPCCH G+ PPC++ LI+ GIKKV +GS DPNPLV+G+G LR+ G+ V | |
| Sbjct: | 111 | GATAYVTLEPCCHHGRTPPCSDLLIERGIKKVFIGSSDPNPLVAGRGANQLRQAGVEVVE | 170 |
| Query: | 126 | GILREECDALNERFIFHMTYKQPFVYLKYAMTLDGKIATKTGDSKWISNEHSRQSVQKLR | 185 |
| | | G+L+EECDALN F ++ K+P+V +KYAMT DGKIAT +G+SKWI+ E +R VQ+ R | |
| Sbjct: | 171 | GLLKEECDALNPIFFHYIQTKRPYVLMKYAMTADGKIATGSGESKWITGESARARVQQTR | 230 |
| Query: | 186 | QKCSAIMVGINTVLADNPRLTCRIPKGEALVRIVCDSQLKIPLDSYLVKSAKTIPTWIAT | 245 |
| | | + SAIMVG++TVLADNP L R+P + VRIVCDSQL+ PLD LV++AK T IAT | |
| Sbjct: | 231 | HQYSAIMVGVDTVLADNPMLNSRMPNAKQPVRIVCDSQLRTPLDCQLVQTAKEYRTVIAT | 290 |
| Query: | 246 | CSDNLAQQQTLKEMGCRLIKVPRKDGKLDLKVLMTILGQEGIDSLLIEGGSSLHFSALKA | 305 |
| | | SD+L + + + +G ++ ++ ++DL+ L+ LG+ IDSLL+EGGSSL+FSAL++ | |
| Sbjct: | 291 | VSDDLQKIEQFRPLGVDVLVCKARNKRVDLQDLLQKLGEMQIDSLLLEGGSSLNFSALES | 350 |
| Query: | 306 | GIVNRLIVFIAPKIIGGLKAKTAISGEGLDWLNQARFVKDIELSRMDSDVVIE | 358 |
| | | GIVNR+ +IAPK++GG +AKT I GEG+ ++QA ++K + D++++ | |
| Sbjct: | 351 | GIVNRVHCYIAPKLVGGKQAKTPIGGEGIQQIDQAVKLKLKSTELIGEDILLD | 403 |

[2150] A related DNA sequence was identified in S. pyogenes <SEQ ID 1083> which encodes the amino acid sequence <SEQ ID 1084>. Analysis of this protein sequence reveals the following:

```
Possible site: 25
>>> Seems to have no N-terminal signal sequence
      INTEGRAL Likelihood = −1.17 Transmembrane 88-104 ( 88-105)
----- Final Results -----
                              bacterial membrane --- Certainty = 0.1468(Affirmative) < succ>
                                bacterial outside --- Certainty = 0.0000(Not Clear) < succ>
                            bacterial cytoplasm --- Certainty = 0.C000(Not Clear) < succ>
```

[2151] The protein has homology with the following sequences in the databases:

| >GP: CAB11794 GB: Z99104 similar to hypothetical proteins | | | |
|---|---|---|---|
| [Bacillus subtilis] | | | |
| Identities = 71/161 (44%), Positives = 109/161 (67%) | | | |
| Query: | 13 | LEEQTYFMQEALKEAEKSLQKAEIPIGCVIVKDGEIIGRGHNAREESNQAIMHAEMMAIN | 72 |
| | | + + +M+EA+KEA+K+ +K E+PIG V+V +GEII R HN RE ++I AHEM+ I+ | |
| Sbjct: | 1 | MTQDELYMKEAIKEAKKAEEKGEVPIGAVLVINGEIIARAHNLRETEQRSIAHAEMLVID | 60 |
| Query: | 73 | EANAHEGNWRLLDTTLFVTEIPCVMCSGAIGLARIPHVIYGASNQKFGGVDSLYQILTDE | 132 |
| | | EA G WRL TL+VT+EPC MC+GA+ L+R+ V++GA + K G +L +L +E | |
| Sbjct: | 61 | EACKALGTWRLEGATLYVTLEPCPMCAGAVVLSRVEKVVFGAFDPKGGCSGTLMNLLQEE | 120 |
| Query: | 133 | RLNHRVQVERGLLAADCANIMQTFFRQGRERKKIAKHLIKE | 173 |
| | | R NH+ +V G+L +C ++ FFR+ R++KK A+ + E | |
| Sbjct: | 121 | RFNHQAEVVSGVLEEECGGMLSAFFRELRKKKKAARKNLSE | 161 |

[2152] An alignment of the GAS and GBS proteins is shown below:

| Identities = 48/146 (32%), Positives = 71/146 (47%), Gaps = 21/146 (14%) | | | |
|---|---|---|---|
| Query: | 7 | YMALALKEAEKGMGFVAPNPLVGAVIVKDDRIISKGYHKRFGD----LHAERQAIKNADE | 62 |
| | | +M ALKEAEK + A P +G VIVKD II +G++ R +HAE AI A+ | |
| Sbjct: | 19 | FMQEALKEAEKSLQ-KAEIP-IGCVIVKDGEIIGRGHNAREESNQAIMHAEMMAINEANA | 76 |
| Query: | 63 | D-----ISGSTLYVTLEPCCHVGKQPPCTEALIKSGIKKVVVGSLDPNPLVSGKGIALLR | 117 |
| | | + +TL+VT+EPC C+ A+ + I V+ G+ + +L | |
| Sbjct: | 77 | HEGNWRLLDTTLFVTIEPCV------MCSGAIGLARIPHVIYGASNQKFGGVDSLYQILT | 130 |
| Query: | 118 | KEGLN----VEVGILREECDALNERF | 139 |
| | | E LN----VE G+L +C + + F | |
| Sjbct: | 131 | DERLNHRVQVERGLLAADCANIMQTF | 156 |

[2153] Based on this analysis, it was predicted that these proteins and their epitopes could be useful antigens for vaccines or diagnostics.

### EXAMPLE 335

[2154] A DNA sequence (GBSx0365) was identified in S. agalactiae <SEQ ID 1085> which encodes the amino acid sequence <SEQ ID 1086>. This protein is predicted to be Nramp metal ion transporter. Analysis of this protein sequence reveals the following:

```
Possible site: 43
>>> Seems to have no N-terminal signal sequence
      INTEGRAL Likelihood = −11.89 Transmembrane 169-185 ( 160-191)
      INTEGRAL Likelihood = −11.09 Transmembrane 140-156 ( 128-165)
      INTEGRAL Likelihood = −6.85 Tranamembrane 359-375 ( 354-379)
      INTEGRAL Likelihood = −6.48 Transmernbrane 269-285 ( 263-287)
      INTEGRAL Likelihood = −6.16 Transmembrane 426-442 ( 423-445)
      INTEGRAL Likelihood = −5.57 Transmembrane 62-78 ( 58-80)
      INTEGRAL Likelihood = −4.94 Transmembrane 107-123 ( 103-127)
      INTEGRAL Likelihood = −4.46 Transmembrane 391-407 ( 389-408)
      INTEGRAL Likelihood = −4.35 Transmembrane 310-326 ( 307-328)
----- Final Results -----
                              bacterial membrane --- Certainty = 0.5755(Affirmative) < succ>
                                bacterial outside --- Certainty = 0.0000(Not Clear) < succ>
                            bacterial cytoplasm --- Certainty = 0.0000(Not Clear) < succ>
```

[2155] The protein has homology with the following sequences in the GENPEPT database:

| >GP: AAF83825 GB: AE003939 manganese transport protein | | | |
|---|---|---|---|
| [Xylella fastidiosa] | | | |
| Identities = 192/436 (44%), Positives = 274/436 (62%), | | | |
| Gaps = 14/436 (3%) | | | |
| Query: | 10 | SLSEVNQSVEVPHNSSFWNTLRAFLGPGALVAVGYMDPGNWITSVIGGATYRYLLLFVVL | 69 |
| | | SL E++ SV V + L AFLGPG +V+VGYMDPGNW T + GG+ + Y+LL V+L | |
| Sbjct: | 39 | SLGEMHASVAVSRRGHWGFRLLAFLGPGYMVSVGYMDPGNWATGLAGGSRFGYMLLSVIL | 98 |
| Query: | 70 | VSSLMAMQLQQMAGKLGIVTRQDLAQATASRLPKPLRYLLFIIIELALIATDLAEVIGSA | 129 |
| | | +S++MA+ LQ +A +LGI + DLAQA +R + L+++ ELA+IA DLAEVIG+A | |
| Sbjct: | 99 | LSNVMAIVLQALAARLGIASDMDLAQACRARYSRGTTLALWVVCELAIIACDLAEVIGTA | 158 |
| Query: | 130 | IALHLLFGWPLLLSIMITILDVFLLLLLMKLGVQKIEAFVSVLILTILIIFTYLVVLSQP | 189 |
| | | IAL+LL G P++ ++IT +DV L+LLLM G + +EAFV L+L I F +VL+ P | |
| Sbjct: | 159 | IALNLLLGVPIIWGVVITAVDVVLVLLLMHRGFRALEAFVIALLLVIFGCFVVQIVLAAP | 218 |
| Query: | 190 | DLDAMFKGFLPHHELFNISHEGKNSPLTLALGIIGATVMPHNLYLHSSLSQTRRVDYHNK | 249 |
| | | L + GF+P ++ L LA+GI+GATVMPHNLYLHSS+ QTR | |
| Sbjct: | 219 | PLQEVLGGFVPRWQVV-----ADPQALYLAIGIVGATVMPHNLYLHSSIVQTRAYP-RTP | 272 |
| Query: | 250 | SSIKKAVRFMTLDSNIQLSLAFVVNSLLLVLGASLFYG-HANDISAFSQMYLALSDKTIT | 308 |
| | | + A+R+ DS + L LA +N+ +L+L A++F+ H D+ Q Y L+ | |
| Sbjct: | 273 | VGRRSALRWAVADSTLALMLALFINASILILAAAVFHAQHHFDVEEIEQAYQLLAPVLGV | 332 |
| Query: | 309 | GAVASSFLSTLFAVALLASGQNSTITGTLTGQIVMEGFLHFKLPQWLIRLCTRLLTLLPI | 368 |
| | | G A TLFA ALLASG NST+T TL GQIVMEGFL +L WL R+ TR L ++P+ | |
| Sbjct: | 333 | GVAA-----TLFATALLASGINSTVTATLAGQIVMEGFLRLRLRPWLRRVLTRGLAIVPV | 387 |
| Query: | 369 | FVIALLVGGEENTLDQLIVYSQVFLSLALPFSIFPLIYFTSQKSIMGEHANAKWNTYLAY | 428 |
| | | V+ L G E +L++ SQV LS+ LPF++ PL+ + + +MG +W +A+ | |
| Sbjct: | 388 | IVVVALYG--EQGTGRLLLLSQVILSMQLPFAVIPLLRCVADRKVMGALVAPRWLMVVAW | 445 |
| Query: | 429 | LVAIILTLLNLKLIMD | 444 |
| | | L+A ++ +LN+KL+ D | |
| Sbjct: | 446 | LIAGVIVVLNVKLLGD | 461 |

[2156] Based on this analysis, it was predicted that this protein and its epitopes, could be useful antigens for vaccines or diagnostics.

### EXAMPLE 336

[2157] A DNA sequence (GBSx0366) was identified in S. agalactiae <SEQ ID 1087> which encodes the amino acid sequence <SEQ ID 1088>. Analysis of this protein sequence reveals the following:

| Possible site: 54 | | | | |
|---|---|---|---|---|
| >>> Seems to have a cleavable N-term signal seq. | | | | |
| | INTEGRAL | Likelihood = −14.12 | Transmembrane | 113-129 (98-132) |
| | INTEGRAL | Likelihood = −12.15 | Transmembrane | 228-244 (220-249) |
| | INTEGRAL | Likelihood = −10.83 | Transmembrane | 175-191 (167-195) |
| | INTEGRAL | Likelihood = −5.04 | Transmembrane | 57-73 (55-75) |
| | INTEGRAL | Likelihood = −3.93 | Transmembrane | 146-162 (142-166) |
| | INTEGRAL | Likelihood = −1.38 | Transmembrane | 199-215 (199-215) |
| | INTEGRAL | Likelihood = −0.32 | Transmembrane | 82-98 (82-98) |

```
----- Final Results -----
                              bacterial membrane --- Certainty = 0.6647(Affirmative) < succ>
                                bacterial outside --- Certainty = 0.0000(Not Clear) < succ>
                            bacterial cytoplasm --- Certainty = 0.0000(Not Clear) < succ>
```

[2158] The protein has homology with the following sequences in the GENPEPT database:

| >GP: AAF11325 GB: AE002018 hypothetical protein | | | |
|---|---|---|---|
| [Deinococcus radiodurans] | | | |
| Identities = 63/215 (29%), Positives = 108/215 (49%), | | | |
| Gaps = 13/215 (6%) | | | |
| Query: | 11 | LLLVFILTIIVNYLSATGFLTGNSQKSLSDRYQTLLTPAPLAFSIWSVIYL-LTFLVILR | 69 |
| | | LL +LT++VNYLS L GNS +SDR TPA L F++W I+L L + + | |
| Sbjct: | 10 | LLAATVLTLVVNYLSNALPLFGNSNAEVSDRLPNAFTPAGLTFTVWGPIFLGLLVFAVYQ | 69 |
| Query: | 70 | AIFSKSQSYQDNFASIFPYFLGLLLVNNIWTVFFTSNLIGLSTIIIFAYCILLV-IIIKI | 128 |
| | | A+ ++ + D +P+ LG LL N W + F S IGLS +I+ A +LV + + + | |
| Sbjct: | 70 | ALPAQRGARLDRL--FWPFLLGNLL-NVAWLLAFQSLNIGLSVVIMLALLAVLVRLYLSV | 126 |
| Query: | 129 | LS---KNKSKLLLRITFGIHAGWLLVASLVNLAVYLVKI----DFNYPLPKVYIAIIALI | 181 |
| | | S + + L++ ++ W+ VA++ N+ +LV F V+ A++ ++ | |
| Sbjct: | 127 | RSLPPQGAERWTLQLPVSLYLAWISVATIANITAFLVSAGVTQSFLGIAGPVWSALLLVV | 186 |
| Query: | 182 | FITVLSLYLARVLQNAYLILSVFWAWLMVFKAHLE | 216 |
| | | + +L R A+ + + WA+ V+ A E | |
| Sbjct: | 187 | AAAIGVFFLWRFRDYAFAAV-LLWAFYGVYVARPE | 220 |

[2159] No corresponding DNA sequence was identified in S. pyogenes.

[2160] Based on this analysis, it was predicted that this protein and its epitopes, could be useful antigens for vaccines or diagnostics.

### EXAMPLE 337

[2161] A DNA sequence (GBSx0367) was identified in S. agalactiae <SEQ ID 1089> which encodes the amino acid sequence <SEQ ID 1090>. Analysis of this protein sequence reveals the following:

```
Possible site: 36
>>> Seems to have no N-terminal signal sequence
----- Final Results -----
                            bacterial cytoplasm --- Certainty = 0.3401(Affirmative) < succ>
                              bacterial membrane --- Certainty = 0.0000(Not Clear) < succ>
                                bacterial outside --- Certainty = 0.0000(Not Clear) < succ>
```

[2162] The protein has homology with the following sequences in the GENPEPT database:

| >GP: AAC65352 GB: AE001215 T. pallidum predicted coding region | | | |
|---|---|---|---|
| TP0352 [Treponema pallidum] | | | |
| Identities = 28/64 (43%), Positives = 41/64 (63%) | | | |
| Query: | 3 | EFTFEIVEKLLVLSENEKGWTKELNRVSFNGAPAKFDLRTWSPDHTKMGKGITLSNEEFK | 62 |
| | | +F +E+ LS + GW+ EL +S+NG P K+D+R WSPD +KMGKG+TL+ E | |
| Sbjct: | 12 | DFHYEVTRNWGTLSTSGNGWSLELKSISWNGRPEKYDIRAWSPDKSKMGKGVTLTRAEIV | 71 |
| Query: | 63 | VILD | 66 |
| | | + D | |
| Sbjct: | 72 | ALRD | 75 |

[2163] A related DNA sequence was identified in S. pyogenes <SEQ ID 1091> which encodes the amino acid sequence <SEQ ID 1092>. Analysis of this protein sequence reveals the following:

```
Possible site: 36
>>> Seems to have no N-terminal signal sequence
----- Final Results -----
                            bacterial cytoplasm --- Certainty = 0.4021(Affirmative) < succ>
                              bacterial membrane --- Certainty = 0.0000(Not Clear) < succ>
                                bacterial outside --- Certainty = 0.0000(Not Clear) < succ>
```

[2164] An alignment of the GAS and GBS proteins is shown below:

| Identities = 59/70 (84%), Positives = 64/70 (91%) | | | |
|---|---|---|---|
| Query: | 1 | MSEFTFEIVEKLLVLSENEKGWTKELNRVSFNGAPAKFDLRTWSPDHTKMGKGITLSNEE | 60 |
| | | M+EFTF I E LL LSEN+KGWTKELNRVSFNGA AK+D+RTWSPDHTKMGKGITL+NEE | |
| Sbjct: | 1 | MAEFTFNIEEHLLTLSENDKGWTKELNRVSFNGAEAKWDIRTWSPDHTKNGKGITLTNEE | 60 |
| Query: | 61 | FKVILDAFRK | 70 |
| | | FK ILDAFRK | |
| Sbjct: | 61 | FKTILDAFRK | 70 |

[2165] Based on this analysis, it was predicted that these proteins and their epitopes could be useful antigens for vaccines or diagnostics.

### EXAMPLE 338

[2166] A DNA sequence (GBSx0368) was identified in S. agalactiae <SEQ ID 1093> which encodes the amino acid sequence <SEQ ID 1094>. Analysis of this protein sequence reveals the following:

| Possible site: 61 | | | | |
|---|---|---|---|---|
| >>> Seems to have no N-terminal signal sequence | | | | |
| | INTEGRAL | Likelihood = −2.66 | Transmembrane | 92-108 (92-110) |

```
----- Final Results -----
                              bacterial membrane --- Certainty = 0.2062(Affirmative) < succ>
                                bacterial outside --- Certainty = 0.0000(Not Clear) < succ>
                            bacterial cytoplasm --- Certainty = 0.0000(Not Clear) < succ>
```

[2167] The protein has homology with the following sequences in the GENPEPT database:

| >GP: CAB14676 GB: Z99117 similar to protease [Bacillus subtilis] | | | |
|---|---|---|---|
| Identities = 201/407 (49%), Positives = 277/407 (67%), Gaps = 2/407 (0%) | | | |
| Query: | 4 | VKKRPEVLSPAGTLEKLKVAIDYGADAVFVGGQAYGLRSRAGNFSMEELQEGINYAHARD | 63 |
| | | + K+PE+L+PAG LEKLK+A+ YGADAVF+GGQ YGLRS A NF++EE+ EG+ +A | |
| Sbjct: | 18 | ITKKPELLAPAGNLEKLKIAVHYGADAVFIGGQEYGLRSNADNFTIEEIAEGVEFAKKYG | 77 |
| Query: | 64 | AKVYVAANMVTHEGNELGAGPWFRELRDMGLDAVIVSDPALIVICATEAPGLEIHLSTQA | 123 |
| | | AK+YV N+ H N G + + L D + +IV+DP +I C AP +E+HLSTQ | |
| Sbjct: | 78 | AKIYVTTNIFAHNENMDGLEDYLKALGDANVAGIIVADPLIIETCRRVAPNVEVHLSTQQ | 137 |
| Query: | 124 | SSTNYETFEFWKEMGLTRVVLAREVTMAELAEIRKRTDVEIEAFVHGAMCISYSGRCVLS | 183 |
| | | S +N++ +FWKE GL RVVLARE + E+ E++++ D+EIE+F+HGAMCI+YSGRCVLS | |
| Sbjct: | 138 | SLSNWKAVQFWKEEGLDRVVLARETSALEIREMKEKVDIEIESFIHGAMCIAYSGRCVLS | 197 |
| Query: | 184 | NHMSHRDANRGGCSQSCRWKYDLYDMPFGQERQSLKGEIPEPFSMSAVDMCMIEHIPDMI | 243 |
| | | NHM+ RD+NRGGC QSCRW YDLY G +L GE PF+MS D+ +IE IP MI | |
| Sbjct: | 198 | NHMTARDSNRGGCCQSCRWDYDLYQTD-GANAVALYGEEDAPFAMSPKDLKLIESIPKMI | 256 |
| Query: | 244 | ENGVDSLKIEGRMKSIHYVSTVTNCYKAAVDAYMESPEAFEAIKEDLIDELWKVAQRELA | 303 |
| | | E G+DSLKIEGRMKSIHYV+TV + Y+ +DAY PE F I+++ ++EL K A R+ A | |
| Sbjct: | 257 | EMGIDSLKIEGRMKSIHYVATVVSVYRKVIDAYCADPENF-VIQKEWLEELDKCANRDTA | 315 |
| Query: | 304 | TGFYYHTPTENEQLFGARRKIPQYKFVGEVVSFDNAKMEATIRQRNVIMEGDRVEFYGPG | 363 |
| | | T F+ TP EQ+FG K Y FVG V+++D T++QRN +GD VEF+GP | |
| Sbjct: | 316 | TAFFEGTPGYEEQMFGEHAKKTTYDFVGLVLNYDEDTQMVTLQQRNFFKKGDEVEFFGPE | 375 |
| Query: | 364 | FRHFECFIDGLRDAEGNKIDRAPNPMELLTITLPNPVKKGDMIRACK | 410 |
| | | +F I+ + D +GN++D A +P++++ L + +M+R K | |
| Sbjct: | 376 | IENFTHTIETIWDEDGNELDAARHPLQIVKFKLDKKIYPSNMMRKGK | 422 |

[2168] A related DNA sequence was identified in S. pyogenes <SEQ ID 1095> which encodes the amino acid sequence <SEQ ID 1096>. Analysis of this protein sequence reveals the following:

| Possible site: 61 | | | | |
|---|---|---|---|---|
| >>> Seems to have no N-terminal signal sequence | | | | |
| | INTEGRAL | Likelihood = −2.66 | Transmembrane | 92-108 (92-110) |

```
----- Final Results -----
                              bacterial membrane --- Certainty = 0.2062(Affirmative) < succ>
                                bacterial outside --- Certainty = 0.0000(Not Clear) < succ>
                            bacterial cytoplasm --- Certainty = 0.0000(Not Clear) < succ>
```

[2169] The protein has homology with the following sequences in the databases:

| >GP: BAB04993 GB: AP001511 protease [Bacillus halodurans] | | | |
|---|---|---|---|
| Identities = 201/403 (49%), Positives = 280/403 (68%), Gaps = 4/403 (0%) | | | |
| Query: | 6 | KRPEVLSPAGTLEKLKVAIDYGADAVFVGGQAYGLRSRAGNFSMEELQEGIDYAHARGAK | 65 |
| | | K+PE+L+PAG+LEKLKVAI YGADAV++GGQ +GLRS A NFS+EE++EG+++A+ GAK | |
| Sbjct: | 17 | KKPELLAPAGSLEKLKVAIHYGADAVYIGGQEFGLRSNADNFSIEEMREGVEFANKYGAK | 76 |
| Query: | 66 | VYVAANMVTHEGNEIGAGEWFRQLRDMGLDAVIVSDPALIVICSTEAPGLEIHLSTQASS | 125 |
| | | VYV N+ H N G E+ L+++G+ +IV+DP +I C AP +E+HLSTQ S | |
| Sbjct: | 77 | VYVTTNIYAHNENMDGLEEYLSALQEVGVTGIIVADPLIIETCKRVAPKVEVHLSTQQSL | 136 |
| Query: | 126 | TNYETFEFWKAMGLTRVVLAREVNMAELAEIRKRTDVEIEAFVHGAMCISYSGRCVLSNH | 185 |
| | | +N+ +FWK GL RVVLAREV + E+ E++K D+EIE FVHGAMCISYSGRCVLSNH | |
| Sbjct: | 137 | SNWLAVKFWKEEGLHRVVLAREVGLEEMLEMKKHVDIEIETFVHGAMCISYSGRCVLSNH | 196 |
| Query: | 186 | MSHRDANRGGCSQSCRWKYDLYDMPFGGE-RRSLKGEIPEDYSMSSVDMCMIDHIPDLIE | 244 |
| | | M+ RD+NRGGC QSCRW YDLY+ E +G++P Y+MS D+ +I IP LIE | |
| Sbjct: | 197 | MTARDSNRGGCCQSCRWDYDLYEQQDSAEIPLFAEGDVP--YTMSPKDLNLIQAIPQLIE | 254 |
| Query: | 245 | NGVDSLKIEGRMKSIHYVSTVTNCYKAAVGAYMESPEAFYAIKEELIDELWKVAQRELAT | 304 |
| | | G+DSLK+EGRMKSIHYV+TVT+ Y+ + AY P+ F IK E ++EL K A R+ A | |
| Sbjct: | 255 | AGIDSLKVEGRMKSIHYVATVTSVYRKVIDAYCSDPDNF-KIKREWLEELEKCANRDFAP | 313 |
| Query: | 305 | GFYYGIPTENEQLFGARRKIPQYKFVGEVVAFDSASMTATIRQRNVIMEGDRIECYGPGF | 364 |
| | | F+ G PT EQ++G K +Y FVG V+ ++ + T++QRN +GD +E +GP | |
| Sbjct: | 314 | QFFEGTPTYKEQMYGIHPKRTKYDFVGLVLDYNEKTGIVTLQQRNHFKQGDEVEFFGPEI | 373 |
| Query: | 365 | RHFETVVKDLHDADGQKIDRAPNPMELLTISLPREVKPGDMIR | 407 |
| | | F V+ + D DG ++D A +P++++ + ++V P +M+R | |
| Sbjct: | 374 | NRFTQTVEKIWDEDGNELDAARHPLQIVKFKVDQKVYPQNMMR | 416 |

[2170] An alignment of the GAS and GBS proteins is shown below:

| Identities = 386/427 (90%), Positives = 404/427 (94%) | | | |
|---|---|---|---|
| Query: | 1 | MSNVKKRPEVLSPAGTLEKLKVAIDYGADAVFVGGQAYGLRSRAGNFSMEELQEGINYAH | 60 |
| | | MS++KKRPEVLSPAGTLEKLKVAIDYGADAVFVGGQAYGLRSRAGNFSMEELQEGI+YAH | |
| Sbjct: | 1 | MSHMKKRPEVLSPAGTLEKLKVAIDYGADAVFVGGQAYGLRSRAGNFSMEELQEGIDYAH | 60 |
| Query: | 61 | ARDAKVYVAANMVTHEGNELGAGPWFRELRDMGLDAVIVSDPALIVICATEAPGLEIHLS | 120 |
| | | AR AKVYVAANMVTHEGNE+GAG WFR+LRDMGLDAVIVSDPALIVIC+TEAPGLEIHLS | |
| Sbjct: | 61 | ARGAKVYVAANMVTHEGNEIGAGEWFRQLRDMGLDAVIVSDPALIVICSTEAPGLEIHLS | 120 |
| Query: | 121 | TQASSTNYETFEFWKEMGLTRVVLAREVTMAELAEIRKRTDVEIEAFVHGAMCISYSGRC | 180 |
| | | TQASSTNYETFEFWK MGLTRVVLAREV MAELAEIRKRTDVEIEAFVHGAMCISYSGRC | |
| Sbjct: | 121 | TQASSTNYETFEFWKAMGLTRVVLAREVNMAELAEIRKRTDVEIEAFVHGAMCISYSGRC | 180 |
| Query: | 181 | VLSNHMSHRDANRGGCSQSCRWKYDLYDMPFGQERQSLRGEIPEPFSMSAVDMCMIEHIP | 240 |
| | | VLSNHMSHRDANRGGCSQSCRWKYDLYDMPFG ER+SLKGEIPE +SMS+VDMCMI+HIP | |
| Sbjct: | 181 | VLSNHMSHRDANRGGCSQSCRWKYDLYDMPFGGERRSLKGEIPEDYSMSSVDMCMIDHIP | 240 |
| Query: | 241 | DMIENGVDSLKIEGRMKSIHYVSTVTNCYKAAVDAYMESPEAFEAIKEDLIDELWKVAQR | 300 |
| | | D+IENGVDSLKIEGRNKSIHYVSTVTNCYKAAV AYMESPEAF AIKE+LIDELWKVAQR | |
| Sbjct: | 241 | DLIENGVDSLKIEGRMKSIHYVSTVTNCYKAAVGAYMESPEAFYAIKEELIDELWKVAQR | 300 |
| Query: | 301 | ELATGFYYHTPTENEQLFGARRKIPQYKFVGEVVSFDNAKMEATIRQRNVIMEGDRVEFY | 360 |
| | | ELATGFYY PTENEQLFGARRKIPQYKFVGEVV+FD+A M ATIRQRNVIMEGDR+E Y | |
| Sbjct: | 301 | ELATGFYYGIPTENEQLFGARRKIPQYKFVGEVVAFDSASMTATIRQRNVIMEGDRIECY | 360 |
| Query: | 361 | GPGFRHFECFIDGLRDAEGNKIDPAPNPMELLTITLPNPVKKGDMIRACKEGLVNLYQND | 420 |
| | | GPGFRHFE + L DA+G KIDRAPNPMELLTI+LP VK GDMIRACKEGLVNLYQ D | |
| Sbjct: | 361 | GPGFRHFETVVRDLHDADGQKIDRAPNPMELLTISLPREVKPGDMIRACKEGLVNLYQKD | 420 |
| Query: | 421 | GTSKTVR | 427 |
| | | GTSKTVR | |
| Sbjct: | 421 | GTSKTVR | 427 |

[2171] SEQ ID 1094 (GBS385) was expressed in E. coli as a His-fusion product. SDS-PAGE analysis of total cell extract is shown in FIG. 69 (lane 3; MW 50 kDa). It was also expressed in E. coli as a GST-fusion product. SDS-PAGE analysis of total cell extract is shown in FIG. 72 (lane 7; MW 75.7 kDa).

[2172] The GBS385-GST fusion product was purified (FIG. 213, lane 7) and used to immunise mice. The resulting antiserum was used for FACS (FIG. 312), which confirmed that the protein is immunoaccessible on GBS bacteria.

[2173] Based on this analysis, it was predicted that these proteins and their epitopes could be useful antigens for vaccines or diagnostics.

### EXAMPLE 339

[2174] A DNA sequence (GBSx0369) was identified in S. agalactiae <SEQ ID 1097> which encodes the amino acid sequence <SEQ ID 1098>. This protein is predicted to be collagenase. Analysis of this protein sequence reveals the following:

```
Possible site: 43
>>> Seems to have no N-terminal signal sequence
----- Final Results -----
                            bacterial cytoplasm --- Certainty = 0.2208(Affirmative) < succ>
                              bacterial membrane --- Certainty = 0.0000(Not Clear) < succ>
                                bacterial outside --- Certainty = 0.0000(Not Clear) < succ>
```

[2175] The protein has homology with the following sequences in the GENPEPT database:

| >GP: CAB14677 GB: Z99117 similar to protease [Bacillus subtilis] | | | |
|---|---|---|---|
| Identities = 92/304 (30%), Positives = 161/304 (52%), Gaps = 5/304 (1%) | | | |
| Query: | 1 | MEKIILTATAESIEQVKQLLAIGIDRIYVGEENYGLRLPHSFSDDELREIAKLVHDAGKE | 60 |
| | | M+K L T S + L+ G VGE+ YGLRL FS +++ + ++ H G + | |
| Sbjct: | 1 | MKKPELLVTPTSTADILPLIQAGATAFLVGEQRYGLRLAGEFSREDVTKAVEIAHKEGAK | 60 |
| Query: | 61 | LTVACNALMHQEMMDNIKPFLELMKEINVDYLVVGDAGVFYINKRDGYNFKLIYDTSVFV | 120 |
| | | + VA NA+ H + + + +L + E VD V GD V + + KL + T | |
| Sbjct: | 61 | VYVAVNAIFHNDKVGELGEYLAFLAEAGVDAAVFGDPAVLMAARESAPDLKLHWSTETTG | 120 |
| Query: | 121 | TSSRQVNFWGQHGAVETVLAREIPSEELFKMSENLEFPAEILVYGASVIHHSKRPLLQNY | 180 |
| | | T+ N+WG+ GA +VLARE+ + + ++ EN E EI V+G + + SKR L+ NY | |
| Sbjct: | 121 | TNYYTCNYWGRKGAARSVLARELNMDSIVEIKENAEVEIEIQVHGMTCMFQSKRSLIGNY | 180 |
| Query: | 181 | YNF---THITDEKTRERGLFLAEPGOFESHYSIYEDKHGTHIFINNDINMMTKVTELVEH | 237 |
| | | + + + K +E G+FL + + ++ Y I+ED++GTHI ND+ ++ ++ EL++ | |
| Sbjct: | 181 | FEYQGKVMDIERKKKESGMFLHDK-ERDNKYPIFEDENGTHIMSPNDVCIIDELEELIDA | 239 |
| Query: | 238 | HFTHWKLDGIYCPGDNFVAIAEIFVETARL-IENGTFTQDQAFLFDERIRKLHPKGRGLD | 296 |
| | | +K+DG+ + + + +++ E L +EN + + + ERI + P R +D | |
| Sbjct: | 240 | GIDSFKIDGVLKMPEYLIEVTKMYREAIDLCVENRDEYEAKKEDWIERIESIQPVNRKID | 299 |
| Query: | 297 | TGFY | 300 |
| | | TGF+ | |
| Sbjct: | 300 | TGFF | 303 |

[2176] A related GBS nucleic acid sequence <SEQ ID 10949> which encodes amino acid sequence <SEQ ID 10950> was also identified.

[2177] A related DNA sequence was identified in S. pyogenes <SEQ ID 1099> which encodes the amino acid sequence <SEQ ID 1100>. Analysis of this protein sequence reveals the following:

```
Possible site: 31
>>> Seems to have no N-terminal signal sequence
----- Final Results -----
                            bacterial cytoplasm --- Certainty = 0.1716(Affirmative) < succ>
                              bacterial membrane --- Certainty = 0.0000(Not Clear) < succ>
                                bacterial outside --- Certainty = 0.0000(Not Clear) < succ>
```

[2178] An alignment of the GAS and GBS proteins is shown below:

| Identities = 245/308 (79%), Positives = 273/308 (88%) | | | |
|---|---|---|---|
| Query: | 1 | MEKIILTATAESIEQVKQLLAIGIDRIYVGEENYGLRLPHSFSDDELREIAKLVHDAGKE | 60 |
| | | MEKII+TATAESIEQVK LLA G+DRIYVGE NYGLRLPH+FS DELR+IAKLVHDAGKE | |
| Sbjct: | 1 | MEKIIITATAESIEQVKALLAAGVDRIYVGEANYGLRLPHNFSYDELRQIAKLVHDAGKE | 60 |
| Query: | 61 | LTVACNALMHQEMMDNIKPFLELMKEINVDYLVVGDAGVFYINKRDGYNFKLIYDTSVFV | 120 |
| | | LTVACNALMHQ+MMD IKPFL+LM EI VDYLVVGDAGVFY+NKRDGYNFKLIYDTSVFV | |
| Sbjct: | 61 | LTVACNALMHQDMMDQIKPFLDLMIEIAVDYLVVGDAGVFYVNKRDGYNFKLIYDTSVFV | 120 |
| Query: | 121 | TSSRQVNFWGQHGAVETVLAREIPSEELFKMSENLEFPAEILVYGASVIHHSKRPLLQNY | 180 |
| | | TSSRQVNFWGQHGAVE+VLAREIPS ELF ++ENLEFPAE+LVYGASVIHHSKRPLL+NY | |
| Sbjct: | 121 | TSSRQVNFWGQHGAVESVLAREIPSAELFTLAENLEFPAEVLVYGASVIHHSKRPLLENY | 180 |
| Query: | 181 | YNFTHITDEKTRERGLFLAEPGDPESHYSIYEDKHGTHIFINNDINMMTKVTELVEHHFT | 240 |
| | | Y+FT I DE +RERGLFLAEPGD SHYSIYED HGTHIFINNDI+MM+K+ EL H T | |
| Sbjct: | 181 | YHFTKIDDEVSRERGLFLAEPGDASSHYSIYEDNHGTHIFINNDIDMMSKLGELYAHGLT | 240 |
| Query: | 241 | HWKLDGIYCPGDNFVAIAEIFVETARLIENGTFTQDQAFLFDERIRKLHPKGRGLDTGFY | 300 |
| | | HWKLDGIYCPGD+FVAI ++F++ L+E G FTQ++A D+ + HP GRGLDTGFY | |
| Sbjct: | 241 | HWKLDGIYCPGDDFVAITKLFIQAKTLLEAGQFTQEEAEKLDQAVHAHHPAGRGLDTGFY | 300 |
| Query: | 301 | DFDPSTVK | 308 |
| | | +FDP TVK | |
| Sbjct: | 301 | EFDPKTVK | 308 |

[2179] Based on this analysis, it was predicted that these proteins and their epitopes could be useful antigens for vaccines or diagnostics.

### EXAMPLE 340

[2180] A DNA sequence (GBSx0371) was identified in S. agalactiae <SEQ ID 1101> which encodes the amino acid sequence <SEQ ID 1102>. This protein is predicted to be cDNA EST yk542c12.5 comes from this gene. Analysis of this protein sequence reveals the following:

```
Possible site: 16
>>> Seems to have a cleavable N-term signal seq.
----- Final Results -----
                                bacterial outside --- Certainty = 0.3000(Affirmative) < succ>
                              bacterial membrane --- Certainty = 0.0000(Not Clear) < succ>
                            bacterial cytoplasm --- Certainty = 0.0000(Not Clear) < succ>
```

[2181] The protein has homology with the following sequences in the GENPEPT database:

| >GP: AAD15622 GB: U75480 unknown [Streptococcus mutans] | | | |
|---|---|---|---|
| Identities = 69/152 (45%), Positives = 101/152 (66%), Gaps = 12/152 (7%) | | | |
| Query: | 1 | MSKLFKTLVISAASGAAAAYFLTTKKGKELRKNAEKFYGEYKENPEEYHQIAKDKASEYS | 60 |
| | | MSK KT +I A +GAAAAYFL+T KGK+ +K + + +YKENP+EYHQ A DK +EY | |
| Sbjct: | 1 | MSKFLKTAIIGAGTGAAAAYFLSTDKGKQFKKKIHQTFTDYKENPKEYHQYAADKVNEYK | 60 |
| Query: | 61 | NLAVDTFKDYKGKFESGELTTEDIVSAVKEKSGEVVDFANDFVNQAKSKFSDEDTAKKED | 120 |
| | | ++AV +FKDYK KFE+GELT ++I+S+VKEK+ + FAN ++Q K + T +K + | |
| Sbjct: | 61 | DVAVHSFKDYKDKFETGELTKDNIISSVKEKASQAGKFANSKLSQVKDHLA--QTVEKAE | 118 |
| Query: | 121 | KAP----------ETKVEDIVIDYKENTEDKE | 142 |
| | | + + +V+DIVIDY+ + K+ | |
| Sbjct: | 119 | ASTNDAGIPLGEMKAQVDDIVIDYQAEEKTKK | 150 |

[2182] A related DNA sequence was identified in S. pyogenes <SEQ ID 1103> which encodes the amino acid sequence <SEQ ID 1104>. Analysis of this protein sequence reveals the following:

| Possible site: 26 | | | | |
|---|---|---|---|---|
| >>> Seems to have no N-terminal signal sequence | | | | |
| | INTEGRAL | Likelihood = −1.81 | Transmembrane | 15-31 (14-31) |

```
----- Final Results -----
                              bacterial membrane --- Certainty = 0.1723(Affirmative) < succ>
                                bacterial outside --- Certainty = 0.0000(Not Clear) < succ>
                            bacterial cytoplasm --- Certainty = 0.0000(Not Clear) < succ>
```

[2183] A related sequence was also identified in GAS <SEQ ID 9117> which encodes the amino acid sequence <SEQ ID 9118>. Analysis of this protein sequence reveals the following:

```
Possible cleavage site: 19
>>> Seems to have a cleavable N-term signal seq.
----- Final Results -----
                                bacterial outside --- Certainty = 0.300(Affirmative) < succ>
                              bacterial membrane --- Certainty = 0.000(Not Clear) < succ>
                            bacterial cytoplasm --- Certainty = 0.000(Not Clear) < succ>
```

[2184] An alignment of the GAS and GBS proteins is shown below:

| Identities = 69/140 (49%), Positives = 91/140 (64%), Gaps = 8/140 (5%) | | | |
|---|---|---|---|
| Query: | 1 | MSKLFKTLVISAASGAAAAYFLTTKKGKELRKNAEKFYGEYKENPEEYHQIAKDKASEYS | 60 |
| | | M+K FK LVI A SG AAAYFL+T+KGK L+ AEK Y YKE+P++YHQ AK+K SEYS | |
| Sbjct: | 8 | MNKSFKNLVIGAVSGVAAAYFLSTEKGKALKNPAEKAYQAYKESPDDYHQFAKEKGSEYS | 67 |
| Query: | 61 | NLAVDTFKDYKGKFESGELTTEDIVSAVKEKSGEVVDFANDFVNQAKSKFSD-EDTAKKE | 119 |
| | | +LA DTF D K K SG+LT ED++ +K+K+ FV + K ++ E K++ | |
| Sbjct: | 68 | HLARDTFYDVKDKLASGDLTKEDMLDLLKDKT-------TAFVQKTKETLAEVEAKEKQD | 120 |
| Query: | 120 | DKAPETKVEDIVIDYKENTE | 139 |
| | | D + EDI+IDY E E | |
| Sbjct: | 121 | DVIIDLNEEDIIIDYTEQDE | 140 |

[2185] SEQ ID 1102 (GBS164) was expressed in E. coli as a His-fusion product. SDS-PAGE analysis of total cell extract is shown in FIG. 30 (lane 4; MW 17.4 kDa).

[2186] The GBS164-His fusion product was purified (FIG. 115A; see also FIG. 200, lane 4) and used to immunise mice (lane 1+2+3 product; 20 μg/mouse). The resulting antiserum was used for Western blot, FACS (FIG. 115B), and in the in vivo passive protection assay (Table III). These tests confirm that the protein is immunoaccessible on GBS bacteria and that it is an effective protective immunogen.

[2187] Based on this analysis, it was predicted that these proteins and their epitopes could be useful antigens for vaccines or diagnostics.

### EXAMPLE 341

[2188] A DNA sequence (GBSx0372) was identified in S. agalactiae <SEQ ID 1105> which encodes the amino acid sequence <SEQ ID 1106>. Analysis of this protein sequence reveals the following:

| Possible site: 19 | | | | |
|---|---|---|---|---|
| >>> Seems to have an uncleavable N-term signal seq | | | | |
| | INTEGRAL | Likelihood = −16.93 | Transmembrane | 6-22 (1-31) |

```
----- Final Results -----
                              bacterial membrane --- Certainty = 0.7771(Affirmative) < succ>
                                bacterial outside --- Certainty = 0.0000(Not Clear) < succ>
                            bacterial cytoplasm --- Certainty = 0.0000(Not Clear) < succ>
```

[2189] The protein has homology with the following sequences in the GENPEPT database:

| >GP: AAD15621 GB: U75480 unknown [Streptococcus mutans] | | | |
|---|---|---|---|
| Identities = 88/129 (68%), Positives = 112/129 (86%) | | | |
| Query: | 1 | MIEIAVLIIAIAFVVLVLGILFVLKKVSETIEETKQTIKVLTSDVNVTLYQTNEILAKAN | 60 |
| | | M EIA+LI+AIAF VLV+ ++ +L+K+S+T++E++QT+K+LTSDVNVTLYQTNE+LAKAN | |
| Sbjct: | 1 | MWEIALLIVAIAFAVLVIYLILLLRKISDTVDESRQTLKILTSDVNVTLYQTNELLAKAN | 60 |
| Query: | 61 | VLVDDVNGKVSTIDPLFVAIADLSESVSDLNLQARHIGQKASSATSSVTKAGSALAIGKA | 120 |
| | | VLV+DVNGKV TIDPLF AIADLS SVSDLN QAR+ G+K +T++V KAG+A GK | |
| Sbjct: | 61 | VLVEDVNGKVETIDPLFTAIADLSVSVSDLNRQARYFGKKTRKSTANVGKAGAAYTFGKV | 120 |
| Query: | 121 | ASKIFRKKG | 129 |
| | | ASK+FRKKG | |
| Sbjct: | 121 | ASKLFRKKG | 129 |

[2190] A related DNA sequence was identified in S. pyogenes <SEQ ID 1107> which encodes the amino acid sequence <SEQ ID 1108>. Analysis of this protein sequence reveals the following:

| Possible Site: 16 | | | | |
|---|---|---|---|---|
| >>> Seems to have a cleavable N-term signal seq. | | | | |
| | INTEGRAL | Likelihood = −0.85 | Transmembrane | 18-34 (17-34) |

```
----- Final Results -----
                              bacterial membrane --- Certainty = 0.1341(Affirmative) < succ>
                                bacterial outside --- Certainty = 0.0000(Not Clear) < succ>
                            bacterial cytoplasm --- Certainty = 0.0000(Not Clear) < succ>
```

[2191] The protein has homology with the following sequences in the databases:

| >GP: AAD15621 GB: U75480 unknown [Streptococcus mutans] | | | |
|---|---|---|---|
| Identities = 83/128 (64%), Positives = 110/128 (85%) | | | |
| Query: | 6 | ISLMIIALAFVALVIFLIIVLKKVSETIDEAKKTISVLTSDVNVTLHQTNDILAKANILV | 65 |
| | | I+L+I+A+AF LVI+LI++L+K+S+T+DE+++T+ +LTSDVNVTL+QTN++LAKAN+LV | |
| Sbjct: | 4 | IALLIVAIAFAVLVIYLILLLRKISDTVDESRQTLKILTSDVNVTLYQTNELLAKANVLV | 63 |
| Query: | 66 | EDVNGKVATIDPLFVAIADLSESLSDLNSQARHFGQKATNATGNVSKAGKLALVGKVASK | 125 |
| | | EDVNGKV TIDPLF AIADLS S+SDLN QAR+FG+K +T NV KAG GKVASK | |
| Sbjct: | 64 | EDVNGKVETIDPLFTAIADLSVSVSDLNRQARYFGKKTRKSTANVGKAGAAYTFGKVASK | 123 |
| Query: | 126 | VFGKKGEK | 133 |
| | | +F KKG++ | |
| Sbjct: | 124 | LFRKKGKQ | 131 |

[2192] An alignment of the GAS and GBS proteins is shown below:

| Identities = 92/131 (70%), Positives = 116/131 (88%) | | | |
|---|---|---|---|
| Query: | 1 | MIEIAVLIIAIAFVVLVLGILFVLKKVSETIEETKQTIKVLTSDVNVTLYQTNEILAKAN | 60 |
| | | ++ I+++IIA+AFV LV+ ++ VLKKVSETI+E K+TI VLTSDVNVTL+QTN+ILAKAN | |
| Sbjct: | 3 | LVGISLMIIALAFVALVIFLIIVLKKVSETIDEAKKTISVLTSDVNVTLHQTNDILAKAN | 62 |
| Query: | 61 | VLVDDVNGKVSTIDPLFVAIADLSESVSDLNLQARHIGQKASSATSSVTKAGSALAIGKA | 120 |
| | | +LV+DVNGKV+TIDPLFVAIADLSES+SDLN QARH GQKA++AT +V+KAG +GK | |
| Sbjct: | 63 | ILVEDVNGKVATIDPLFVAIADLSESLSDLNSQARHFGQKATNATGNVSKAGKLALVGKV | 122 |
| Query: | 121 | ASKIFRKKGDK | 131 |
| | | ASK+F KKG+K | |
| Sbjct: | 123 | ASKVFGKKGEK | 133 |

[2193] Based on this analysis, it was predicted that these proteins and their epitopes could be useful antigens for vaccines or diagnostics.

### EXAMPLE 342

[2194] A DNA sequence (GBSx0373) was identified in S. agalactiae <SEQ ID 1109> which encodes the amino acid sequence <SEQ ID 1110>. Analysis of this protein sequence reveals the following:

```
Possible site: 13
>>> Seems to have no N-terminal signal sequence
----- Final Results -----
                            bacterial cytoplasm --- Certainty = 0.0462(Affirmative) < succ>
                              bacterial membrane --- Certainty = 0.0000 (Not Clear) < succ>
                                bacterial outside --- Certainty = 0.0000 (Not Clear) < succ>
```

[2195] The protein has no significant homology with any sequences in the GENPEPT database.

[2196] No corresponding DNA sequence was identified in S. pyogenes.

[2197] Based on this analysis, it was predicted that this protein and its epitopes, could be useful antigens for vaccines or diagnostics.

### EXAMPLE 343

[2198] A DNA sequence (GBSx0374) was identified in S. agalactiae <SEQ ID 1111> which encodes the amino acid sequence <SEQ ID 1112>. This protein is predicted to be prolipoprotein diacylglyceryl transferase (Igt). Analysis of this protein sequence reveals the following:

| Possible site: 29 | | | | |
|---|---|---|---|---|
| >>> Seems to have an uncleavable N-term signal seq | | | | |
| | INTEGRAL | Likelihood = −8.39 | Transmembrane | 231-247 (225-251) |
| | INTEGRAL | Likelihood = −7.64 | Transmembrane | 89-105 (87-107) |
| | INTEGRAL | Likelihood = −5.20 | Transmembrane | 18-34 (13-36) |
| | INTEGRAL | Likelihood = −1.86 | Transmembrane | 46-62 (46-64) |

```
----- Final Results -----
                              bacterial membrane --- Certainty = 0.4354(Affirmative) < succ>
                                bacterial outside --- Certainty = 0.0000(Not Clear) < succ>
                            bacterial cytoplasm --- Certainty = 0.0000(Not Clear) < succ>
```

[2199] A related GBS nucleic acid sequence <SEQ ID 9721> which encodes amino acid sequence <SEQ ID 9722> was also identified.

[2200] The protein has homology with the following sequences in the GENPEPT database:

| >GP: AAC80171 GB: U75480 putative prolipoprotein diacylglycerol | | | |
|---|---|---|---|
| transferase [Streptococcus mutans] (ver 3) | | | |
| Identities = 184/257 (71%), Positives = 226/257 (87%) | | | |
| Query: | 2 | MINPVAIRLGPFSIRWYAICIVSGMLLAVYLAMKEAPRKNIKSDDILDFILMAFPLSIVG | 61 |
| | | MINP+AI+LGP +IRWY+ICIV+G++LAVYL ++EAP+KNIKSDD+LDFIL+AFPL+IVG | |
| Sbjct: | 1 | MINPIAIKLGPLTIRWYSICIVTGLILAVYLTIREAPKKNIKSDDVLDFILIAFPLAIVG | 60 |
| Query: | 62 | ARIYYVIFEWAYYSKHPVEIIAIWNGGIAIYGGLITGAILLVIFSYRRLINPIDFLDIAA | 121 |
| | | AR+YYVIF+W YY K+P EI IW+GGIAIYGGL+TGA++L IFSY R+I PIDFLD+AA | |
| Sbjct: | 61 | ARLYYVIFDWDYYLKNPSEIPVIWHGGIAIYGGLLTGALVLFIFSYYRMIKPIDFLDVAA | 120 |
| Query: | 122 | PGVMIAQAIGRWGNFINQEAYGRAVKNLNYVPNFIKNQMYIDGAYRVPTFLYESLWNFLG | 181 |
| | | PGVM+AQ+IGRWGNF+NQEAYG+ V LNY+P+FI+ QMYIDG YR PTFLYESLWN LG | |
| Sbjct: | 121 | PGVMLAQSIGRWGNFVNQEAYGKTVTQLNYLPDFIRKQMYIDGHYRTPTFLYESLWNLLG | 180 |
| Query: | 182 | FVIIMSIRHRPRTLKQGEVACFYLVWYGCGRFIIEGMRTDSLYLAGLRVSQWLSVILVII | 241 |
| | | F+IIM +R RP LK+GEVA FYL+WYG GRF+IEGMRTDSL A LRVSQWLSV+LV++ | |
| Sbjct: | 181 | FIIIMILRRRPNLLKEGEVAFFYLIWYGSGRFVIEGMRTDSLMFASLRVSQWLSVLLVVV | 240 |
| Query: | 242 | GIVMIIYRRREQHISYY | 258 |
| | | G+++++ RRR I YY | |
| Sbjct: | 241 | GVILMVIRRRNHAIPYY | 257 |

[2201] A related DNA sequence was identified in S. pyogenes <SEQ ID 1113> which encodes the amino acid sequence <SEQ ID 1114>. Analysis of this protein sequence reveals the following:

| Possible site: 28 | | | | |
|---|---|---|---|---|
| >>> Seems to have an uncleavable N-term signal seq | | | | |
| | INTEGRAL | Likelihood = −7.01 | Transmembrane | 229-245 (222-249) |
| | INTEGRAL | Likelihood = −6.90 | Transmembrane | 45-61 (40-68) |
| | INTEGRAL | Likelihood = −4.41 | Transmembrane | 17-33 (11-35) |
| | INTEGRAL | Likelihood = −4.14 | Transmembrane | 87-103 (86-106) |
| | INTEGRAL | Likelihood = −0.27 | Transmembrane | 170-186 (170-186) |

```
----- Final Results -----
                              bacterial membrane --- Certainty = 0.3803(Affirmative) < succ>
                                bacterial outside --- Certainty = 0.0000(Not Clear) < succ>
                            bacterial cytoplasm --- Certainty = 0.0000(Not Clear) < succ>
```

[2202] The protein has homology with the following sequences in the databases:

| >GP: AAC80171 GB: U75480 putative prolipoprotein diacylglycerol | | | |
|---|---|---|---|
| transferase [Streptococcus mutans] (ver 3) | | | |
| Identities = 176/258 (68%), Positives = 217/258 (83%) | | | |
| Query: | 1 | MINPIALKCGPLAIHWYALCILSGLVLAVYLASKEAPKKGISSDAIFDFILIAFPLAIVG | 60 |
| | | MINPIA+K GPL I WY++CI++GL+LAVYL +EAPKK I SD + DFILIAFPLAIVG | |
| Sbjct: | 1 | MINPIAIKLGPLTIRWYSICIVTGLILAVYLTIREAPKKNIKSDDVLDFILIAFPLAIVG | 60 |
| Query: | 61 | ARIYYVIFEWSYYVKHLDEIIAIWNGGIAIYGGLITGALVLLAYCYNKVLNPIHFLDIAA | 120 |
| | | AR+YYVIF+W YY+K+ EI IW+GGIAIYGGL+TGALVL + Y +++ PI FLD+AA | |
| Sbjct: | 61 | ARLYYVIFDWDYYLKNPSEIPVIWHGGIAIYGGLLTGALVLFIFSYYRMIKPIDFLDVAA | 120 |
| Query: | 121 | PSVMVAQAIGRWGNFINQEAYGKAVSQLNYLPSFIQKQMFIEGSYRIPTFLYESLWNLLG | 180 |
| | | P VM+AQ+IGRWGNF+NQEAYGK V+QLNYLP FI+KQM+I+G YR PTFLYESLWNLLG | |
| Sbjct: | 121 | PGVMLAQSIGRWGNFVNQEAYGKTVTQLNYLPDFIRKQMYIDGHYRTPTFLYESLWNLLG | 180 |
| Query: | 181 | FVIIMMWRRKPKSLLDGEIFAFYLIWYGSGRLVIEGMRTDSLMFLGIRISQYVSALLIII | 240 |
| | | F+IIM+ RR+P L +GE+ FYLIWYGSGR VIEGMRTDSLMF +R+SQ++S LL+++ | |
| Sbjct: | 181 | FIIIMILRRRPNLLKEGEVAFFYLIWYGSGRFVIEGMRTDSLMFASLRVSQWLSVLLVVV | 240 |
| Query: | 241 | GLIFVIKRRRQKGISYYQ | 258 |
| | | G+I ++ RRR I YYQ | |
| Sbjct: | 241 | GVILMVIRRRNHAIPYYQ | 258 |

[2203] An alignment of the GAS and GBS proteins is shown below:

| Identities = 176/257 (68%), Positives = 221/257 (85%) | | | |
|---|---|---|---|
| Query: | 2 | MINPVAIRLGPFSIRWYAICIVSGMLLAVYLAMKEAPRKNIKSDDILDFILMAFPLSIVG | 61 |
| | | MINP+A++ GP +I WYA+CI+SG++LAVYLA KEAP+K I SD I DFIL+AFPL+IVG | |
| Sbjct: | 1 | MINPIALKCGPLAIHWYALCILSGLVLAVYLASKEAPKKGISSDAIFDFILIAFPLAIVG | 60 |
| Query: | 62 | ARIYYVIFEWAYYSKHPVEIIAIWNGGIAIYGGLITGAILLVIFSYRRLINPIDFLDIAA | 121 |
| | | ARIYYVIFEW+YY KH EIIAIWNGGIAIYGGLITGA++L+ + Y +++NPI FLDIAA | |
| Sbjct: | 61 | ARIYYVIFEWSYYVKHLDEIIAIWNGGIAIYGGLITGALVLLAYCYNKVLNPIHFLDIAA | 120 |
| Query: | 122 | PGVMIAQAIGRWGNFINQEAYGRAVKNLNYVFNFIKHQMYIDGAYRVPTFLYESLWNFLG | 181 |
| | | P VM+AQAIGRWGNFINQEAYG+AV LNY+P+FI+ QM+I+G+YR+PTFLYESLWN LG | |
| Sbjct: | 121 | PSVMVAQAIGRWGNFINQEAYGKAVSQLNYLPSFIQKQMFIEGSYRIPTFLYESLWNLLG | 180 |
| Query: | 182 | FVIIMSIRHRPRTLKQGEVACFYLVWYGCGRFIIEGMRTDSLYLAGLRVSQWLSVILVII | 241 |
| | | FVIIM R +P++L GE+ FYL+WYG GR +IEGMRTDSL G+R+SQ++S +L+II | |
| Sbjct: | 181 | FVIIMMWRRKPKSLLDGEIFAFYLIWYGSGRLVIEGMRTDSLMFLGIRISQYVSALLIII | 240 |
| Query: | 242 | GIVMIIYRRREQHISYY | 258 |
| | | G++ +I RRR++ ISYY | |
| Sbjct: | 241 | GLIFVIKRRRQKGISYY | 257 |

[2204] A related GBS gene <SEQ ID 8557> and protein <SEQ ID 8558> were also identified. Analysis of this protein sequence reveals the following:

| Lipop: Possible site: −1 Crend: 0 | | | | |
|---|---|---|---|---|
| McG: Discrim Score: 2.45 | | | | |
| GvH: Signal Score (−7.5): −2.9 | | | | |
| Possible site: 39 | | | | |
| >>> Seems to have an uncleavable N-term signal seq | | | | |
| ALOM program count: 3 value: −8.39 threshold: 0.0 | | | | |
| | INTEGRAL | Likelihood = −8.39 | Transmembrane | 209-225 (203-229) |
| | INTEGRAL | Likelihood = −7.64 | Transmembrane | 67-83 (65-85) |
| | INTEGRAL | Likelihood = −1.86 | Transmembrane | 24-40 (24-42) |

| | |
|---|---|
| PERIPHERAL | Likelihood = 0.79 92 |

```
modified ALOM score: 2.18
*** Reasoning Step: 3
----- Final Results -----
                              bacterial membrane --- Certainty = 0.4354(Affirmative) < succ>
                                bacterial outside --- Certainty = 0.0000(Not Clear) < succ>
                            bacterial cytoplasm --- Certainty = 0.0000(Not Clear) < succ>
```

[2205] The protein has homology with the following sequences in the databases:

[chemical structure]

[2206] Based on this analysis, it was predicted that these proteins and their epitopes could be useful antigens for vaccines or diagnostics.

### EXAMPLE 344

[2207] A DNA sequence (GBSx0375) was identified in S. agalactiae <SEQ ID 1115> which encodes the amino acid sequence <SEQ ID 1116>. Analysis of this protein sequence reveals the following:

```
Possible site: 31
>>> Seems to have no N-terminal signal sequence
----- Final Results -----
                            bacterial cytoplasm --- Certainty = 0.2817(Affirmative) < succ>
                              bacterial membrane --- Certainty = 0.0000(Not Clear) < succ>
                                bacterial outside --- Certainty = 0.0000(Not Clear) < succ>
```

[2208] The protein has homology with the following sequences in the GENPEPT database:

| >GP: BAA77782 GB: AB027460 Hpr kinase [Streptococcus bovis] | | | |
|---|---|---|---|
| Identities = 264/309 (85%), Positives = 292/309 (94%) | | | |
| Query: | 1 | MAVTVQMLVDRLRLNVIYGDEHLLSKRITTADISRPGLEMTGYFDYYAPERLQLVGMKEW | 60 |
| | | M+VTV+MLVD++KL+VIYGD+ LLSK ITT+DISRPGLEMTGYFDYY+PERLQL+GMKEW | |
| Sbjct: | 1 | MSVTVKMLVDKVKLDVIYGDDDLLSKEITTSDISRPGLEMTGYFDYYSPERLQLLGMKEW | 60 |
| Query: | 61 | SYLMAMTGHNRYQVLREMFQKETPAIVVARDLEIPEEMYEAAKDTGIAILQSKAPTSRLS | 120 |
| | | SYL MT HNR VLREM + ETPAI+VAR+L IPEEM AAK+ GIAILQS PTSRLS | |
| Sbjct: | 61 | SYLTRMTSHNRRHVLREMIKPETPAIIVARNLAIPEEMISAAKEKGIAILQSHVPTSRLS | 120 |
| Query: | 121 | GEVSWYLDSCLAERTSVHGVLMDIYGMGVLIQGDSGIGKSETGLELVKRGHRLVADDRVD | 180 |
| | | GE+SWYLDSCLAERTSVHGVLMDIYGMGVLIQGDSGIGKSETGLELVKRGHRLVADDRVD | |
| Sbjct: | 121 | GEMSWYLDSCLAERTSVHGVLMDIYGMGVLIQGDSGIGKSETGLELVKRGHRLVADDRVD | 180 |
| Query: | 181 | VYAKDEETLWGEPAEILRHLLEIRGVGIIDIMSLYGASAVKDSSQVQLAIYLENFETGKV | 240 |
| | | V+AKDEETLWGEPAEILRHLLEIRGVGIID+MSLYGASAVKDSSQVQLAIYLEN+E+GKV | |
| Sbjct: | 181 | VFAKDEETLWGEPAEILRHLLEIRGVGIIDVMSLYGASAVKDSSQVQLAIYLENYESGKV | 240 |
| Query: | 241 | FDRLGNGNEEIELSGVKVPRIRIPVRTGRNVSVVIEAAAMNHRAKQMGFDATQTFEDRLT | 300 |
| | | FDRLGNGNEE+ELSGVK+PR+RIPV+TGRN+SVVIEAAAMN+RAKQMGFDAT+TFE+RLT | |
| Sbjct: | 241 | FDRLGNGNEELELSGVKIPRLRIPVQTGRNMSVVIEAAAMNYRAKQMGFDATKTFEERLT | 300 |
| Query: | 301 | HLISQNEVN | 309 |
| | | LI++NE N | |
| Sbjct: | 301 | QLITKNEGN | 309 |

[2209] A related DNA sequence was identified in S. pyogenes <SEQ ID 1117> which encodes the amino acid sequence <SEQ ID 1118>. Analysis of this protein sequence reveals the following:

```
Possible site: 13
>>> Seems to have no N-terminal signal sequence
----- Final Results -----
                            bacterial cytoplasm --- Certainty = 0.2391(Affirmative) < succ>
                              bacterial membrane --- Certainty = 0.0000(Not Clear) < succ>
                                bacterial outside --- Certainty = 0.0000(Not Clear) < succ>
```

[2210] An alignment of the GAS and GBS proteins is shown below:

| Identities = 255/309 (82%), Positives = 288/309 (92%) | | | |
|---|---|---|---|
| Query: | 1 | MAVTVQMLVDRLKLNVIYGDEHLLSKRITTADISRPGLEMTGYFDYYAPERLQLVGMKEW | 60 |
| | | M VTV+MLV ++KL+V+Y ++LLSK ITT+DISRPGLEMTGYFDYYAPERLQL GMKEW | |
| Sbjct: | 32 | MTVTVKMLVQKVKLDVVYATDNLLSKEITTSDISRPGLEMTGYFDYYAPERLQLFGMKEW | 91 |
| Query: | 61 | SYLMAMTGHNRYQVLREMFQKETPAIVVARDLEIPEEMYEAAKDTGIAILQSKAPTSRLS | 120 |
| | | SYL MT HNRY VL+EMF+K+TPA+VV+R+L IP+EM +AAK+ GI++L S+ TSRL+ | |
| Sbjct: | 92 | SYLTQMTSHNRYSVLKEMFKKDTPAVVVSRNLAIPKEMVQAAKEEGISLLSSRVSTSRLA | 151 |
| Query: | 121 | GEVSWYLDSCLAERTSVHGVLMDIYGMGVLIQGDSGIGKSETGLELVKRGHRLVADDRVD | 180 |
| | | GE+S++LD+ LAERTSVHGVLMDIYGMGVLIQGDSGIGKSETGLELVKRGHRLVADDRVD | |
| Sbjct: | 152 | GEMSYFLDASLAERTSVHGVLMDIYGMGVLIQGDSGIGKSETGLELVKRGHRLVADDRVD | 211 |
| Query: | 181 | VYAKDEETLWGEPAEILRHLLEIRGVGIIDIMSLYGASAVKDSSQVQLAIYLENFETGKV | 240 |
| | | VYAKDEETLWGEPAEILRHLLEIRGVGIID+MSLYGASAVKDSSQVQLAIYLENFE GKV | |
| Sbjct: | 212 | VYAKDEETLWGEPAEILRHLLEIRGVGIIDVMSLYGASAVKDSSQVQLAIYLENFEAGKV | 271 |
| Query: | 241 | FDRLGNGNEEIELSGVKVPRIRIPVKTGRNVSVVIEAAAMNHRAKQMGFDATQTFEDRLT | 300 |
| | | FDRLGNGNEEI SGV++PRIRIPVKTGRNVSVVIEAAAMNHRAK+MGFDAT+TFEDRLT | |
| Sbjct: | 272 | FDRLGNGNEEITFSGVRIPRIRIPVKTGRNVSVVIEAAAMNHRAKEMGFDATKTFEDRLT | 331 |
| Query: | 301 | HLISQNEVN | 309 |
| | | LI++NEV+ | |
| Sbjct: | 332 | QLITKNEVS | 340 |

[2211] Based on this analysis, it was predicted that these proteins and their epitopes could be useful antigens for vaccines or diagnostics.

### EXAMPLE 345

[2212] A DNA sequence (GBSx0376) was identified in S. agalactiae <SEQ ID 1119> which encodes the amino acid sequence <SEQ ID 1120>. Analysis of this protein sequence reveals the following:

```
Possible site: 28
>>> Seems to have no N-terminal signal sequence
----- Final Results -----
                            bacterial cytoplasm --- Certainty = 0.1836(Affirmative) < succ>
                              bacterial membrane --- Certainty = 0.0000(Not Clear) < succ>
                                bacterial outside --- Certainty = 0.0000(Not Clear) < succ>
```

[2213] A related GBS nucleic acid sequence <SEQ ID 9719> which encodes amino acid sequence <SEQ ID 9720> was also identified.

[2214] The protein has no significant homology with any sequences in the GENPEPT database.

[2215] No corresponding DNA sequence was identified in S. pyogenes.

[2216] Based on this analysis, it was predicted that these proteins and their epitopes could be useful antigens for vaccines or diagnostics.

### EXAMPLE 346

[2217] A DNA sequence (GBSx0377) was identified in S. agalactiae <SEQ ID 1121> which encodes the amino acid sequence <SEQ ID 1122>. Analysis of this protein sequence reveals the following:

| Possible site: 37 | | | | |
|---|---|---|---|---|
| >>> Seems to have an uncleavable N-term signal seq | | | | |
| | INTEGRAL | Likelihood = −4.88 | Transmembrane | 35-51 (31-59) |

```
----- Final Results -----
                              bacterial membrane --- Certainty = 0.2954(Affirmative) < succ>
                                bacterial outside --- Certainty = 0.0000(Not Clear) < succ>
                            bacterial cytoplasm --- Certainty = 0.0000(Not Clear) < succ>
```

[2218] The protein has homology with the following sequences in the GENPEPT database:

| >GP: AAC67275 GB: AF017113 YvlC [Bacillus subtilis] | | | |
|---|---|---|---|
| Identities = 21/63 (33%), Positives = 36/63 (56%), Gaps = 2/63 (3%) | | | |
| Query: | 3 | SSFYKQRKGKLVCGVVAGLADKYNWDLALSRVLIALILYFTKF--GLLLYILLAVFLPYK | 60 |
| | | + Y+ K K + GV+ GLA+ +NWD +L RV+ ++ T LL+YI+ +P + | |
| Sbjct: | 2 | NKLYRSEKNKKIAGVIGGLAEYFNWDASLLRVITVILAIMTSVLPVLLIYIIWIFIVPSE | 61 |
| Query: | 61 | EDI | 63 |
| | | D+ | |
| Sbjct: | 62 | RDM | 64 |

[2219] A related DNA sequence was identified in S. pyogenes <SEQ ID 1123> which encodes the amino acid sequence <SEQ ID 1124>. Analysis of this protein sequence reveals the following:

| Possible site: 32 | | | | |
|---|---|---|---|---|
| >>> Seems to have an uncleavable N-term signal seq | | | | |
| | INTEGRAL | Likelihood = −5.26 | Transmembrane | 39-55 (31-61) |

```
----- Final Results -----
                              bacterial membrane --- Certainty = 0.3102(Affirmative) < succ>
                                bacterial outside --- Certainty = 0.0000(Not Clear) < succ>
                            bacterial cytoplasm --- Certainty = 0.0000(Not Clear) < succ>
```

[2220] An alignment of the GAS and GBS proteins is shown below:

| Identities = 60/90 (66%), Positives = 77/90 (84%), Gaps = 3/90 (3%) | | | |
|---|---|---|---|
| Query: | 1 | MKSSFYKQRKGKLVCGVVAGLADKYNWDLALSRVLIALILYFTKFGLLLYILLAVFLPYK | 60 |
| | | +++ FYKQRK +LV GV+AGLADKY WDLAL+RVL AL++Y T FG+LLYILLA+FLPYK | |
| Sbjct: | 1 | VETKFYKQRKNRLVAGVIAGLADKYGWDLALARVLAALLIYGTGFGVLLYILLAIFLPYK | 60 |
| Query: | 61 | EDIIETR-RQGPRRRKDAEPV--DDDGWFW | 87 |
| | | ED++E R +GPRRRKDA+ + ++DGWFW | |
| Sbjct: | 61 | EDLLEERYGRGPRRRKDADVLNEEEDGWFW | 90 |

[2221] Based on this analysis, it was predicted that these proteins and their epitopes could be useful antigens for vaccines or diagnostics.

### EXAMPLE 347

[2222] A DNA sequence (GBSx0378) was identified in S. agalactiae <SEQ ID 1125> which encodes the amino acid sequence <SEQ ID 1126>. Analysis of this protein sequence reveals the following:

```
Possible site: 19
>>> Seems to have no N-terminal signal sequence
----- Final Results -----
                            bacterial cytoplasm --- Certainty = 0.3577(Affirmative) < succ>
                              bacterial membrane --- Certainty = 0.0000(Not Clear) < succ>
                                bacterial outside --- Certainty = 0.0000(Not Clear) < succ>
```

[2223] A related GBS nucleic acid sequence <SEQ ID 9717> which encodes amino acid sequence <SEQ ID 9718> was also identified.

[2224] The protein has homology with the following sequences in the GENPEPT database:

| >GP: BAB04250 GB: AP001508 unknown conserved protein | | | |
|---|---|---|---|
| [Bacillus halodurans] | | | |
| Identities = 379/729 (51%), Positives = 515/729 (69%), Gaps = 25/729 (3%) | | | |
| Query: | 29 | ENLNITQIAIDLGIKASQIEKVLELTDEGNTIPFIARYRKEMTGNLDEVQIKSIIDLDKS | 88 |
| | | E I +A +L +K + I++V++L EGNT+PFIARYRKE+TG +DEV+I+ + + | |
| Sbjct: | 8 | EEHTIKTLAKELSLKPNYIKQVIQLLHEGNTVPFIARYRKELTGGMDEVKIREVSEKWTY | 67 |
| Query: | 89 | MTALSDRKTTVLAKIEEQGKLTQELKKAIEEATKLADVEELYLPYKEKRRTKATIAREAG | 148 |
| | | L +RK V+ +EEQGKLT E KK +E+A KL +VE+LY PYK+KRRT+AT+A+E G | |
| Sbjct: | 68 | ANQLHERKEEVIRLVEEQGKLTDEWKKTVEQAQKLQEVEDLYRPYKQKRRTRATVAKEKG | 127 |
| Query: | 149 | LFPLARLI--LQNKDNLEEEAQNYLTDGFETTT--KALSGAVDILIEAFSEDNKLRSWTY | 204 |
| | | L PLA + L + +EA+ YL+ E T L GA DI+ E ++D LR | |
| Sbjct: | 128 | LEPLAEWLFSLPRDGDPLQEAEVYLSVEHELTKVEDVLQGAQDIIAEWIADDADLRKRIR | 187 |
| Query: | 205 | NEIWNYSSITAVVKDESLDEKQVFKIYYDFSEKISKLHGYQVLALNRGEKMGVLKVNFEH | 264 |
| | | + + S+ A VK E LDEK V+++YYD+ E + L ++ LALNRGEK VL+V | |
| Sbjct: | 188 | SLGFKEGSVIAKVKKEELDEKGVYEMYYDYEEPVRTLVPHRTLALNRGEKEDVLRVTIRF | 247 |
| Query: | 265 | NLEKMFRF----FAVRFKETS-QYIDDLIVQTVKKKIVPAMERRIRTELSEGAEDGAISL | 319 |
| | | ++++ F RF + Y+ I K+ I P++ER IR EL+E AE+ AI + | |
| Sbjct: | 248 | PVDRIIEMSEKTFIRRFGSPAVPYVKAAIEDGYKRLIEPSIEREIRHELTEKAEEQAIHI | 307 |
| Query: | 320 | FSENLRNLLLVSPLKGKMVLGFDPAFRTGAKLAVVDQTGKLMTTQVIYPVPPANQAKIEQ | 379 |
| | | F+ENLR+LLL P+KGK+VLG DPA+RTG KLA+VD+TGK++ QVIYP PP N+ + | |
| Sbjct: | 308 | FAENLRSLLLQPPIKGKVVLGLDPAYRTGCKLAIVDETGKVLDIQVIYPTPPKNE--VAA | 365 |
| Query: | 380 | SKIELAKLIKEFNIEIIAIGNGTASRESEAFVAEVLQDFPD-VSYVIVNESGASVYSASE | 438 |
| | | +K + KLI ++ +E+IAIGNGTASRESE F+A++++D P + Y+IVNE+GASVYSASE | |
| Sbjct: | 366 | AKKIVKKLIADYGVEMIAIGNGTASRESEQFIADLIKDLPQTIYYLIVNEAGASVYSASE | 425 |
| Query: | 439 | LARHEFPDLTVEKRSAISIARRLQDPLAELVKIDPKSIGVGQYQHDVSQKKLAENLDFVV | 498 |
| | | + R EFPDL VE+RSA+SIARRLQDPLAELVKIDPKS+GVGQYQHDVSQK+L E+L FVV | |
| Sbjct: | 426 | IGREEFPDLQVEERSAVSIARRLQDPLAELVKIDPKSVGVGQYQHDVSQKRLNESLTFVV | 485 |
| Query: | 499 | ETVVNQVGVNVNTASPALLAHVSGLNKTISENIVKYREENGQIKSRAEIKKVPRLGAKAF | 558 |
| | | ETVVNQVGVNVNTASP+LL +V+GL+KT+++NIVK REE G+ +RA++K +PRLGAK + | |
| Sbjct: | 486 | ETVVNQVGVNVNTASPSLLQYVAGLSKTVAKNIVKKREEAGRFTARAQLKDIPRLGAKTY | 545 |
| Query: | 559 | EQAAGFLRIPNAKNFLDNTGVHPESYEAVKKLLDQLTIKELD---DLAKEKLQNLDLIAT | 615 |
| | | EQ GFLRI + N LD T +HPESY+ KLL ++ D + K+KLQ LD+ A | |
| Sbjct: | 546 | EQCIGFLRIMDGDNLLDATAIHPESYKVTDKLLSEVGATAADVGIEDLKKKLQALDVSAM | 605 |
| Query: | 616 | AESIGVGQETLKDIIEDLLKPGRDLRDDFEAPVLRHDVLDVSDLKVGQELQGTVRNVVDF | 675 |
| | | A ++ VG TLKD+I+ L++P RD RD+ P+L+ DVL + DL G ELQGTVRNVVDF | |
| Sbjct: | 606 | AATLDVGVPTLKDMIDALIRPTRDPRDEVAKPLLKQDVLQLEDLLPGMELQGTVRNVVDF | 665 |
| Query: | 676 | GAFVDIGVHEDGLIHQSRLIKRKRDKKTRKMPPLQHPSKYLSVGDIVTVWVVEVDAERSR | 735 |
| | | G FVDIGV +DGL+H S+L R ++HP + ++VG+IVTVWV +VD ++ R | |
| Sbjct: | 666 | GVFVDIGVKQDGLVHISKLANRY----------IKHPLEVVTVGEIVTVWVEDVDIKKGR | 715 |
| Query: | 736 | IGLSLIKPD | 744 |
| | | I L++++P+ | |
| Sbjct: | 716 | IALTMLRPE | 724 |

[2225] A related DNA sequence was identified in S. pyogenes <SEQ ID 1127> which encodes the amino acid sequence <SEQ ID 1128>. Analysis of this protein sequence reveals the following:

```
Possible site: 25
>>> Seems to have no N-terminal signal sequence
----- Final Results -----
                            bacterial cytoplasm --- Certainty = 0.2207(Affirmative) < succ>
                              bacterial membrane --- Certainty = 0.0000(Not Clear) < succ>
                                bacterial outside --- Certainty = 0.0000(Not Clear) < succ>
```

[2226] An alignment of the GAS and GBS proteins is shown below:

| Identities = 532/716 (74%), Positives = 619/716 (86%), Gaps = 10/716 (1%) | | | |
|---|---|---|---|
| Query: | 28 | MENLNITQIAIDLGIKASQIEKVLELTDEGNTIPFIARYRKEMTGNLDEVQIKSIIDLDK | 87 |
| | | MEN N IA L + QIE+VL LT +GNTIPFIARYRKE+TGNLDEV IKSIID+DK | |
| Sbjct: | 1 | MENNNNHNIAEALSVSLHQIEQVLALTAQGNTIPFIARYRKEVTGNLDEVVIKSIIDMDK | 60 |
| Query: | 88 | SMTALSDRKTTVLAKIEEQGKLTQELKKAIEEATKLADVEELYLPYKEKRRTKATIAREA | 147 |
| | | S+T L++RK T+LAKIEEQGKLT +L+ +IE KLAD+EELYLPYKEKRRTKATIAREA | |
| Sbjct: | 61 | SLTTLNERKATILAKIEEQGKLTDQLRTSIEATEKLADLEELYLPYKEKRRTKATIAREA | 120 |
| Query: | 148 | GLFPLARLILQNKDNLEEEAQNYLTDGFETTTKALSGAVDILIEAFSEDNKLRSWTYNEI | 207 |
| | | GLFPLARLILQN NLE A+ ++T+GF + +AL+GAVDIL+EA SED KLRSWTYNEI | |
| Sbjct: | 121 | GLFPLARLILQNAQNLETAAEPFVTEGFASPQEALAGAVDILVEAMSEDAKLRSWTYNEI | 180 |
| Query: | 208 | WNYSSITAVVKDESLDEKQVFKIYYDFSEKISKLHGYQVLALNRGEKMGVLKVNFEHNLE | 267 |
| | | W YS + + +KDE LDEK+VF+IYYDFS+++S + GY+ LALNRGEK+G+LKV+FEHNLE | |
| Sbjct: | 181 | WQYSRLVSTLKDEQLDEKKVFQIYYDFSDQVSNMQGYRTLALNRGEKLGILKVSFEHNLE | 240 |
| Query: | 268 | KMFRFFAVRFKETSQYIDDLIVQTVKKKIVPAMERRIRTELSEGAEDGAISLFSENLRNL | 327 |
| | | KM RFF+VRFKET+ YI+++I QT+KKKIVPAMERR+R+ELS+ AEDGAI LFSENLR+L | |
| Sbjct: | 241 | KMQRFFSVRFKETNPYIEEVINQTIKKKIVPAMERRVRSELSDAAEDGAIHLFSENLRHL | 300 |
| Query: | 328 | LLVSPLKGKMVLGFDPAFRTGAKLAVVDQTGKLMTTQVIYPVPPANQAKIEQSKIELAKL | 387 |
| | | LLVSPLKGKMVLGFDPAFRTGAKLA+VDQTGKL+TTQVIYPV PA+Q KI+ +K L +L | |
| Sbjct: | 301 | LLVSPLKGKMVLGFDPAFRTGAKLAIVDQTGKLLTTQVIYPVAPASQTKIQAAKETLTQL | 360 |
| Query: | 388 | IKEFNIEIIAIGNGTASRESEAFVAEVLQDFPDVSYVIVNESGASVYSASELARHEFPDL | 447 |
| | | I+ + I+IIAIGNGTASRESEAFVA+VL+DFP+ SYVIVNESGASVYSASELARHEFPDL | |
| Sbjct: | 361 | IETYQIDIIAIGNGTASRESEAFVADVLKDFPNTSYVIVNESGASVYSASELARHEFPDL | 420 |
| Query: | 448 | TVEKRSAISIARRLQDPLAELVKIDPKSIGVGQYQHDVSQKKLAENLDFVVETVVNQVGV | 507 |
| | | TVEKRSAISIARRLQDPLAELVKIDPKSIGVGQYQHDVSQKKL+ENL FVV+TVVNQVGV | |
| Sbjct: | 421 | TVEKRSAISIARRLQDPLAELVKIDPKSIGVGQYQHDVSQKKLSENLGFVVDTVVNQVGV | 480 |
| Query: | 508 | NVNTASPALLAHVSGLNKTISENIVKYREENGQIKSRAEIKKVPRLGAKAFEQAAGFLRI | 567 |
| | | NVNTASP+LLAHVSGLNKTISENIVKYREENG + SRA+IKKVPRLGAKAFEQAAGFLRI | |
| Sbjct: | 481 | NVNTASPSLLAHVSGLNKTISENIVKYREENGALTSRADIKKVPRLGAKAFEQAAGFLRI | 540 |
| Query: | 568 | PNAKNFLDNTGVHPESYEAVKKLLDQLTIKELDDLAKEKLQNLDLIATAESIGVGQETLK | 627 |
| | | P AKN LDNTGVHPESY AVK+L L I++LDD AK L + + AE++ +GQETLK | |
| Sbjct: | 541 | PGAKNILDNTGVHPESYPAVKELFKVLGIQDLDDAAKATLAAVQVPQMAETLAIGQETLK | 600 |
| Query: | 628 | DIIEDLLKPGRDLRDDFEAPVLRHDVLDVSDLKVGQELQGTVRNVVDFGAFVDIGVHEDG | 687 |
| | | DII DLLKPGRDLRDDFEAP+LR D+LD+ DL++GQ+L+GTVRNVVDFGAFVDIGVHEDG | |
| Sbjct: | 601 | DIIADLLKPGRDLRDDFEAPILRQDILDLKDLEIGQKLEGTVRNVVDFGAFVDIGVHEDG | 660 |
| Query: | 688 | LIHQSRLIKRKRDKKTRKMPPLQHPSKYLSVGDIVTVWVVEVDAERSRIGLSLIKP | 743 |
| | | LIH S + K + HPS+ +SVGD+VTVWV ++D +R ++ LSL+ P | |
| Sbjct: | 661 | LIHISEMSKTF----------VNHPSQVVSVGDLVTVWVSKIDLDRHKVNLSLLPP | 706 |

[2227] Based on this analysis, it was predicted that these proteins and their epitopes could be useful antigens for vaccines or diagnostics.

### EXAMPLE 348

[2228] A DNA sequence (GBSx0379) was identified in S. agalactiae <SEQ ID 1129> which encodes the amino acid sequence <SEQ ID 1130>. This protein is predicted to be N5,N10-methylenetetrahydromethanopterin reductase homolog. Analysis of this protein sequence reveals the following:

```
Possible site: 60
>>> Seems to have no N-terminal signal sequence
----- Final Results -----
                            bacterial cytoplasm --- Certainty = 0.4864(Affirmative) < succ>
                              bacterial membrane --- Certainty = 0.0000(Not Clear) < succ>
                                bacterial outside --- Certainty = 0.0000(Not Clear) < succ>
```

[2229] The protein has homology with the following sequences in the GENPEPT database:

| >GP: AAB94650 GB: U96107 N5,N10-methylenetetrahydromethanopterin | | | |
|---|---|---|---|
| reductase homolog [Staphylococcus carnosus] | | | |
| Identities = 164/300 (54%), Positives = 217/300 (71%), Gaps = 1/300 (0%) | | | |
| Query: | 45 | VYGIGEHHREDFAVSAPEIVLAAGAVRTNNIRLSSAVTILSSNDPIRVYQQFSTIDALSN | 104 |
| | | +YG+GEHHR D+AVS P VLAA A T I+LSSAVT+LSS+DP+ VY++F+T+DA+SN | |
| Sbjct: | 1 | MYGLGEHHRSDYAVSDPVTVLAAAASLTQRIKLSSAVTVLSSDDPVCVYERFATLDAVSN | 60 |
| Query: | 105 | GRAEIMAGRGSFIESFPLFGYDLADYDDLFNEKMDMLLAINSATNLDWKGHLTQTVNERP | 164 |
| | | GRAEIM GRGSFIESFPLFGYDL DYD LF EK+++L IN + W+G + + | |
| Sbjct: | 61 | GRAEIMVGRGSFIESFPLFGYDLDDYDRLFVEKLELLKEINQHEVVTWEGTMRPAIKGLG | 120 |
| Query: | 165 | IYPRALQRQLPIWVATGGNVDSTIRIAEQGLPIVYATIGGNPKAFRQLVHIYKEVGSRNG | 224 |
| | | +YPRA+Q ++PIW+ATGG +S+IR AE GLPI YA IGGNPK F++ + IY+ V G | |
| Sbjct: | 121 | VYPRAVQDEIPIWLATGGTPESSIRAAEFGLPITYAIIGGNPKRFKRNIAIYRAVAESRG | 180 |
| Query: | 225 | HKPEQLKVAAHSWGWIEEDNQTAIDRYFFPTKQTVDNIAKGRPHWSEMTKEQYLRSVGPE | 284 |
| | | + + VA HSWG+I + ++ A ++ PTK + IAK R +W T+ + R + E | |
| Sbjct: | 181 | YDLADMPVAVHSWGYIADTDEQAQREFYEPTKVHHEIIAKER-NWPPYTEAHFQREISDE | 239 |
| Query: | 285 | GAIFVGSPEVVAHKIIGLVEALELDRFMLHLPVGSMPHKDVLNAIKLYGKEVAPIVRKYF | 344 |
| | | GA+FVGSPE VA K+I ++E L L+RFMLH+PVGSMPH+ ++ AIKLYGK V PI+ YF | |
| Sbjct: | 240 | GAMFVGSPETVARKMIKVIEELGLNRFMLHIPVGSMPHERIMKAIKLYGKRVKPIIEDYF | 299 |

[2230] No corresponding DNA-sequence was identified in S. pyogenes.

[2231] Based on this analysis, it was predicted that this protein and its epitopes, could be useful antigens for vaccines or diagnostics.

### EXAMPLE 349

[2232] A DNA sequence (GBSx0380) was identified in S. agalactiae <SEQ ID 1131> which encodes the amino acid sequence <SEQ ID 1132>. Analysis of this protein sequence reveals the following:

```
Possible site: 22
>>> Seems to have no N-terminal signal sequence
----- Final Results -----
                            bacterial cytoplasm --- Certainty = 0.1310(Affirmative) < succ>
                              bacterial membrane --- Certainty = 0.0000(Not Clear) < succ>
                                bacterial outside --- Certainty = 0.0000(Not Clear) < succ>
```

[2233] A related GBS nucleic acid sequence <SEQ ID 9715> which encodes amino acid sequence <SEQ ID 9716> was also identified.

[2234] The protein has no significant homology with any sequences in the GENPEPT database.

[2235] A related DNA sequence was identified in S. pyogenes <SEQ ID 1133> which encodes the amino acid sequence <SEQ ID 1134>. Analysis of this protein sequence reveals the following:

```
Possible site: 25
>>> Seems to have no N-terminal signal sequence
----- Final Results -----
                            bacterial cytoplasm --- Certainty = 0.0915(Affirmative) < succ>
                              bacterial membrane --- Certainty = 0.0000(Not Clear) < succ>
                                bacterial outside --- Certainty = 0.0000(Not Clear) < succ>
```

[2236] An alignment of the GAS and GBS proteins is shown below:

| Identities = 20/40 (50%), Positives = 27/40 (67%), Gaps = 3/40 (7%) | | | |
|---|---|---|---|
| Query: | 4 | MAITHKRQDDLESMFASFAKVP---KPKKVDSDSKPEQKD | 40 |
| | | MAITHK+ D+LE M A FA +P KP +V++D K K+ | |
| Sbjct: | 1 | MAITHKKNDELEKMLAGFASIPSFDKPLEVNTDGKLATKE | 40 |

[2237] Based on this analysis, it was predicted that these proteins and their epitopes could be useful antigens for vaccines or diagnostics.

### EXAMPLE 350

[2238] A DNA sequence (GBSx0381) was identified in S. agalactiae <SEQ ID 1135> which encodes the amino acid sequence <SEQ ID 1136>. Analysis of this protein sequence reveals the following:

```
Possible site: 56
>>> Seems to have no N-terminal signal sequence
----- Final Results -----
                            bacterial cytoplasm --- Certainty = 0.1453(Affirmative) < succ>
                              bacterial membrane --- Certainty = 0.0000(Not Clear) < succ>
                                bacterial outside --- Certainty = 0.0000(Not Clear) < succ>
```

[2239] The protein has no significant homology with any sequences in the GENPEPT database.

[2240] No corresponding DNA sequence was identified in S. pyogenes.

[2241] Based on this analysis, it was predicted that this protein and its epitopes, could be useful antigens for vaccines or diagnostics.

### EXAMPLE 351

[2242] A DNA sequence (GBSx0382) was identified in S. agalactiae <SEQ ID 1137> which encodes the amino acid sequence <SEQ ID 1138>. Analysis of this protein sequence reveals the following:

| Possible site: 37 | | | | |
|---|---|---|---|---|
| >>> Seems to have an uncleavable N-term signal seq | | | | |
| | INTEGRAL | Likelihood = −11.15 | Transmembrane | 216-232 (210-240) |
| | INTEGRAL | Likelihood = −9.18 | Transmembrane | 15-31 (10-39) |
| | INTEGRAL | Likelihood = −9.02 | Transmembrane | 283-299 (276-299) |
| | INTEGRAL | Likelihood = −8.76 | Transmembrane | 128-144 (119-150) |
| | INTEGRAL | Likelihood = −4.62 | Transmembrane | 243-259 (237-265) |
| | INTEGRAL | Likelihood = −2.44 | Transmembrane | 65-81 (65-81) |
| | INTEGRAL | Likelihood = −2.44 | Transmembrane | 94-110 (93-111) |

```
----- Final Results -----
                              bacterial membrane --- Certainty = 0.5458(Affirmative) < succ>
                                bacterial outside --- Certainty = 0.0000(Not Clear) < succ>
                            bacterial cytoplasm --- Certainty = 0.0000(Not Clear) < succ>
```

[2243] The protein has homology with the following sequences in the GENPEPT database:

| >GP: CAB12119 GB: Z99105 ycgR [Bacillus subtilis] | | | |
|---|---|---|---|
| Identities = 141/283 (49%), Positives = 198/283 (69%), Gaps = 3/283 (1%) | | | |
| Query: | 10 | SVLQWFAIFISIIIEALPFVLLGTILSGIIEVFITPDIVNKFLPKNKFLRVLFGTFVGFV | 69 |
| | | S LQ +IFISI+IEA+PF+L+G ILSGII++F++ +++ + +PKN+FL VLFG G + | |
| Sbjct: | 6 | SFLQLNSIFISILIEAIPFILIGVILSGIIQMFVSEEMIARIMPKNRFLAVLFGALAGVL | 65 |
| Query: | 70 | FPSCECGIIPIINRFLEKKVPSYTAVPFLATAPIINPIVLFATYSAFGNSIRFLILRFVG | 129 |
| | | FP+CECGIIPI R L K VP + V F+ TAPIINPIVLF+TY AFGN + R | |
| Sbjct: | 66 | FPACECGIIPITRRLLLKGVPLHAGVAFMLTAPIINPIVLFSTYIAFGNRWSVVFYRGGL | 125 |
| Query: | 130 | ATIVAIALGVMLAFLVDDNILKEDAKPTHFHDYSDKKWYQKIFLALAHAIDEFFDTGRYL | 189 |
| | | A V++ +GV+L++ DN L + +P H H + QK+ L HAIDEFF G+YL | |
| Sbjct: | 126 | ALAVSLIIGVILSYQFKDNQLLKPDEPGHHHHHHGTL-LQKLGGTLRHAIDEFFSVGKYL | 184 |
| Query: | 190 | VFGTLIASAMQIYLPTRVLTTIGHSPITAILVMMLLAFILSLCSEADAFIGASLLSTFGI | 249 |
| | | + G IA+AMQ Y+ T L IG + +++ LVMM LAF+LSLCSE DAFI +S STF + | |
| Sbjct: | 185 | IIGAFIAAAMQTYVKTSTLLAIGQNDVSSSLVMMGLAFVLSLCSEVDAFIASSFSSTFSL | 244 |
| Query: | 250 | APVMAFLLIGPMIDIKNLMMMVNSFKTRFIVQFISVSSLIIII | 292 |
| | | ++AFL+ G M+DIKNL+MM+ +FK RF+ F+ ++ +++I+ | |
| Sbjct: | 245 | GSLIAFLVFGAMVDIKNLLMMLAAFKKRFV--FLLITYIVVIV | 285 |

[2244] A related DNA sequence was identified in S. pyogenes <SEQ ID 1139> which encodes the amino acid sequence <SEQ ID 1140>. Analysis of this protein sequence reveals the following:

| Possible site: 25 | | | | |
|---|---|---|---|---|
| >>> Seems to have an uncleavable N-term signal seq | | | | |
| | INTEGRAL | Likelihood = −9.92 | Transmembrane | 216-232 (211-237) |
| | INTEGRAL | Likelihood = −9.45 | Transmembrane | 283-299 (276-299) |
| | INTEGRAL | Likelihood = −8.76 | Transmembrane | 128-144 (119-150) |
| | INTEGRAL | Likelihood = −7.80 | Transmembrane | 15-31 (10-39) |
| | INTEGRAL | Likelihood = −5.47 | Transmembrane | 243-259 (237-265) |
| | INTEGRAL | Likelihood = −2.44 | Transmembrane | 65-81 (65-81) |
| | INTEGRAL | Likelihood = −2.44 | Transmembrane | 94-110 (93-111) |

```
----- Final Results -----
                              bacterial membrane --- Certainty = 0.4970(Affirmative) < succ>
                                bacterial outside --- Certainty = 0.0000(Not Clear) < succ>
                            bacterial cytoplasm --- Certainty = 0.0000(Not Clear) < succ>
```

[2245] The protein has homology with the following sequences in the databases:

| >GP: CAB12119 GB: Z99105 ycgR [Bacillus subtilis] | | | |
|---|---|---|---|
| Identities = 143/288 (49%), Positives = 196/288 (67%), Gaps = 1/288 (0%) | | | |
| Query: | 10 | SVLQWFAIFMSIIIEALPFVLLGTILSGCIEVFVTPELVQKYLPKQKCLRILFGTFVGFV | 69 |
| | | S LQ +IF+SI+IEA+PF+L+G ILSG I++FV+ E++ + +PK + L +LFG G + | |
| Sbjct: | 6 | SFLQLNSIFISILIEAIPFILIGVILSGIIQMFVSEEMIARIMPKNRFLAVLFGALAGVL | 65 |
| Query: | 70 | FPSCECGIIPIINRFLEKKVPSYTAVPFLATAPIINPIVLFATYSAFGNSLRFLILRLVG | 129 |
| | | FP+CECGIIPI R L K VP + V F+ TAPIINPIVLF+TY AFGN + R | |
| Sbjct: | 66 | FPACECGIIPITRRLLLKGVPLHAGVAFMLTAPIINPIVLFSTYIAFGNRWSVVFYRGGL | 125 |
| Query: | 130 | AALVAITLGVMLAFIVDDNILKDNAQPVHFHDYSHESLPKRIYLALVHAIDEFFDTGRYL | 189 |
| | | A V++ +GV+L++ DN L +P H H + H +L +++ L HAIDEFF G+YL | |
| Sbjct: | 126 | ALAVSLIIGVILSYQFKDNQLLKPDEPGH-HHHHHGTLLQKLGGTLRHAIDEFFSVGKYL | 184 |
| Query: | 190 | VFGTLIASAMQIYVPTRVLTTIGHNPLTAILIMMLMAFILSLCSEADAFIGASLLSTFGV | 249 |
| | | + G IA+AMQ YV T L IG N +++ L+MM +AF+LSLCSE DAFI +S STF + | |
| Sbjct: | 185 | IIGAFIAAAMQTYVKTSTLLAIGQNDVSSSLVMMGLAFVLSLCSEVDAFIASSFSSTFSL | 244 |
| Query: | 250 | APVLAFLLIGPMVDIKNLMMMVKAFKGRFIVQFIGVSVLMIAVYCLLV | 297 |
| | | ++AFL+ G MVDIKNL+MM+ AFK RF+ I V+++ LLV | |
| Sbjct: | 245 | GSLIAFLVFGAMVDIKNLLMMLAAFKKRFVFLLITYIVVIVLAGSLLV | 292 |

[2246] An alignment of the GAS and GBS proteins is shown below:

| Identities = 248/300 (82%), Positives = 278/300 (92%) | | | |
|---|---|---|---|
| Query: | 1 | MDIFNQLPDSVLQWFAIFISIIIEALPFVLLGTILSGIIEVFITPDIVNKFLPKNKFLRV | 60 |
| | | M +F+ LP SVLQWFAIF+SIIIEALPFVLLGTILSG IEVF+TP++V K LPK K LR+ | |
| Sbjct: | 1 | MSLFSNLPPSVLQWFAIFMSIIIEALPFVLLGTILSGCIEVFVTPELVQKYLPKQKCLRI | 60 |
| Query: | 61 | LFGTFVGFVFPSCECGIIPIINRFLEKKVPSYTAVPFLATAPIINPIVLFATYSAFGNSI | 120 |
| | | LFGTFVGFVFPSCECGIIPIINRFLEKKVPSYTAVPFLATAPIINPIVLFATYSAFGNS+ | |
| Sbjct: | 61 | LFGTFVGFVFPSCECGIIPIINRFLEKKVPSYTAVPFLATAPIINPIVLFATYSAFGNSL | 120 |
| Query: | 121 | RFLILRFVGATIVAIALGVMLAFLVDDNILKEDAKPTHFHDYSDKKWYQKIFLALAHAID | 180 |
| | | RFLILR VGA +VAI LGVMLAF+VDDNILK++A+P HFHDYS + ++I+LAL HAID | |
| Sbjct: | 121 | RFLILRLVGAALVAITLGVMLAFIVDDNILKDNAQPVHFHDYSHESLPKRIYLALVHAID | 180 |
| Query: | 181 | EFFDTGRYLVFGTLIASAMQIYLPTRVLTTIGHSPITAILVMMLLAFILSLCSEADAFIG | 240 |
| | | EFFDTGRYLVFGTLIASAMQIY+PTRVLTTIGH+P+TAIL+MML+AFILSLCSEADAFIG | |
| Sbjct: | 181 | EFFDTGRYLVFGTLIASAMQIYVPTRVLTTIGHNPLTAILIMMLMAFILSLCSEADAFIG | 240 |
| Query: | 241 | ASLLSTFGIAPVMAFLLIGPMIDIKNLMMMVNSFKTRFIVQFISVSSLIIIIYCLFVGVI | 300 |
| | | ASLLSTFG+APV+AFLLIGPM+DIKNLMMMV +FK RFIVQFI VS L+I +YCL VGV+ | |
| Sbjct: | 241 | ASLLSTFGVAPVLAFLLIGPMVDIKNLMMMVKAFKGRFIVQFIGVSVLMIAVYCLLVGVL | 300 |

[2247] Based on this analysis, it was predicted that these proteins and their epitopes could be useful antigens for vaccines or diagnostics.

### EXAMPLE 352

[2248] A DNA sequence (GBSx0383) was identified in S. agalactiae <SEQ ID 1141> which encodes the amino acid sequence <SEQ ID 1142>. Analysis of this protein sequence reveals the following:

```
Possible site: 13
>>> Seems to have no N-terminal signal sequence
----- Final Results -----
                            bacterial cytoplasm --- Certainty = 0.4703(Affirmative) < succ>
                              bacterial membrane --- Certainty = 0.0000(Not Clear) < succ>
                                bacterial outside --- Certainty = 0.0000(Not Clear) < succ>
```

[2249] The protein has no significant homology with any sequences in the GENPEPT database.

[2250] No corresponding DNA sequence was identified in S. pyogenes.

[2251] Based on this analysis, it was predicted that this protein and its epitopes, could be useful antigens for vaccines or diagnostics.

### EXAMPLE 353

[2252] A DNA sequence (GBSx0384) was identified in S. agalactiae <SEQ ID 1143> which encodes the amino acid sequence <SEQ ID 1144>. Analysis of this protein sequence reveals the following:

| Possible site: 50 | | | | |
|---|---|---|---|---|
| >>> Seems to have an uncleavable N-term signal seq | | | | |
| | INTEGRAL | Likelihood = −8.44 | Transmembrane | 45-61 (39-65) |
| | INTEGRAL | Likelihood = −8.12 | Transmembrane | 83-99 (77-101) |
| | INTEGRAL | Likelihood = −0.00 | Transmembrane | 2-18 (1-19) |

```
----- Final Results -----
                              bacterial membrane --- Certainty = 0.4376(Affirmative) < succ>
                                bacterial outside --- Certainty = 0.0000(Not Clear) < succ>
                            bacterial cytoplasm --- Certainty = 0.0000(Not Clear) < succ>
```

[2253] A related GBS nucleic acid sequence <SEQ ID 8559> which encodes amino acid sequence <SEQ ID 8560> was also identified. Analysis of this protein sequence reveals the following:

| Lipop Possible site: −1 Crend: 2 | | | | |
|---|---|---|---|---|
| SRCFLG: 0 | | | | |
| McG: Length of UR: 8 | | | | |
| Peak Value of UR: 2.23 | | | | |
| Net Charge of CR: 1 | | | | |
| McG: Discrim Score: 0.46 | | | | |
| GvH: Signal Score (−7.5): −3.54 | | | | |
| Possible site: 42 | | | | |
| >>> Seems to have an uncleavable N-term signal seq | | | | |
| Amino Acid Composition: calculated from 1 | | | | |
| ALOM program count: 2 value: −8.44 threshold: 0.0 | | | | |
| | INTEGRAL | Likelihood = −8.44 | Transmembrane | 37-53 (31-57) |
| | INTEGRAL | Likelihood = −8.12 | Transmembrane | 75-91 (69-93) |
| | PERIPHERAL | Likelihood = 2.76 | 200 | |

```
modified ALOM score: 2.19
icm1 HYPID: 7 CFP: 0.438
*** Reasoning Step: 3
----- Final Results -----
                              bacterial membrane --- Certainty = 0.4376(Affirmative) < succ>
                                bacterial outside --- Certainty = 0.0000(Not Clear) < succ>
                            bacterial cytoplasm --- Certainty = 0.0000(Not Clear) < succ>
```

[2254] The protein has homology with the following sequences in the GENPEPT database:

| >GP: CAB12118 GB: Z99105 ycgQ [Bacillus subtilis] | | | |
|---|---|---|---|
| Identities = 100/290 (34%), Positives = 159/290 (54%), Gaps = 25/290 (8%) | | | |
| Query: | 9 | MIRFLILAGYFELSMYLKLSGKLNQYINTHYTYLAYISMVLSFILAIVQLIIWVKNMKMH | 68 |
| | | M R L+L G+ +L SG L +YIN Y YL++I++ L IL VQ +++K+ + | |
| Sbjct: | 1 | MFRLLVLMGFTFFFYHLHASGNLTKYINMKYAYLSFIAIFLLAILTAVQAYLFIKSPEKS | 60 |
| Query: | 69 | SHLHGKIA----------KSTSP--------MILVFPVLVGLLVPTVSLDSTTVSAKGYN | 110 |
| | | H H + P ++ +FP++ G+ P +LDS+ V KG++ | |
| Sbjct: | 61 | GHHHDHDCGCGHDHEHDHEQNKPFYQRYLIYVVFLFPLVSGIFFPIATLDSSIVKTKGFS | 120 |
| Query: | 111 | FPLAAGSTGTVSQDGTRVQYLKPDTSTYFTSSAYEKEMQKELKKYKGSGTLTITTENYME | 170 |
| | | F A S SQ QYL+PD S Y+ +Y+K+M++ KY +++T +++++ | |
| Sbjct: | 121 | FK-AMESGDHYSQ----TQYLRPDASLYYAQDSYDKQMKQLFNKYSSKKEISLTDDDFLK | 175 |
| Query: | 171 | VMELIYLYPEQFMDRQIQYTGFVY-NEPKHEGYQFIFRFGIIHCIADSGVYGLLTT-GNQ | 228 |
| | | ME IY YP +F+ R I++ GF Y ++ F+ RFGIIHCIADSGVYG+L | |
| Sbjct: | 176 | GMETIYNYPGEFLGRTIEFHGFAYKGNAINKNQLFVLRFGIIHCIADSGVYGMLVEFPKD | 235 |
| Query: | 229 | KSYPDNTWVTVRGTIKSEYNQLLQQNLPVLHIEESRQVSKANNPYVYRVF | 278 |
| | | D+ W+ ++GT+ SEY Q + LPV+ + + + K ++PYVYR F | |
| Sbjct: | 236 | MDIKDDEWIHIKGTLASEYYQPFKSTLPVVKVTDWNTIKKPDDPYVYRGF | 285 |

[2255] A related DNA sequence was identified in S. pyogenes <SEQ ID 1145> which encodes the amino acid sequence <SEQ ID 1146>. Analysis of this protein sequence reveals the following:

| Possible site: 60 | | | | |
|---|---|---|---|---|
| >>> Seems to have an uncleavable N-term signal seq | | | | |
| | INTEGRAL | Likelihood = −8.33 | Transmembrane | 83-99 (74-101) |
| | INTEGRAL | Likelihood = −6.21 | Transmembrane | 42-58 (39-62) |

```
----- Final Results -----
                              bacterial membrane --- Certainty = 0.4333(Affirmative) < succ>
                                bacterial outside --- Certainty = 0.0000(Not Clear) < succ>
                            bacterial cytoplasm --- Certainty = 0.0000(Not Clear) < succ>
```

[2256] A related sequence was also identified in GAS <SEQ ID 9115> which encodes the amino acid sequence <SEQ ID 9116>. Analysis of this protein sequence reveals the following:

| Possible cleavage site: 54 | | | | |
|---|---|---|---|---|
| >>> Seems to have an uncleavable N-term signal seq | | | | |
| | INTEGRAL | Likelihood = −8.33 | Transmembrane | 75-91 (66-93) |
| | INTEGRAL | Likelihood = −6.21 | Transmembrane | 34-50 (31-54) |
| | PERIPHERAL | Likelihood = 2.76 | | |

```
----- Final Results -----
                              bacterial membrane --- Certainty = 0.433(Affirmative) < succ>
                                bacterial outside --- Certainty = 0.000(Not Clear) < succ>
                            bacterial cytoplasm --- Certainty = 0.000(Not Clear) < succ>
```

[2257] An alignment of the GAS and GBS proteins is shown below:

| Identities = 208/279 (74%), Positives = 244/279 (86%), Gaps = 1/279 (0%) | | | |
|---|---|---|---|
| Query: | 1 | MFICGGNIMIRFLILAGYFELSMYLKLSGKLNQYINTHYTYLAYISMVLSFILAIVQLII | 60 |
| | | +F CGG +MIRFLILAGYFEL+MYL+LSGKL+QYIN Y+YLAYISM+LSFILA+VQL | |
| Sbjct: | 1 | LFTCGGALMIRFLILAGYFELTMYLQLSGKLDQYINVRYSYLAYISMILSFILALVQLYT | 60 |
| Query: | 61 | WVKNMKMHSHLHGKIAKSTSPMILVFPVLVGLLVPTVSLDSTTVSAKGYNFPLAAGSTGT | 120 |
| | | W+KN+K+HSHL GKIA+ TSP ILVFPVL+GLLVPTV+LDSTTVSAKGY FPLAAG++ T | |
| Sbjct: | 61 | WMKNIKVHSHLTGKIARLTSPFILVFPVLIGLLVPTVTLDSTTVSAKGYTFPLAAGASKT | 120 |
| Query: | 121 | -VSQDGTRVQYLKPDTSTYFTSSAYEKEMQKELKKYKGSGTLTITTENYMEVMELIYLYP | 179 |
| | | VS DGT +QYLKPDTS YFT SAY+KEM++EL KYKG +TITTENYMEVMELIYLYP | |
| Sbjct: | 121 | GVSDDGTTIQYLKPDTSLYFTKSAYQKEMRQELHKYKGKKPVTITTENYMEVMELIYLYP | 180 |
| Query: | 180 | EQFMDRQIQYTGFVYNEPKHEGYQFIFRGIIHCIADSGVYGLLTTGNQKSYPDNTWVTV | 239 |
| | | ++F+DR IQYTGFVYNEP H+ YQF+FRFGIIHCIADSGVYGLLTTGNQ SYP+NTW+TV | |
| Sbjct: | 181 | DEFLDRDIQYTGFVYNEPGHDNYQFLFRFGIIHCIADSGVYGLLTTGNQTSYPNNTWLTV | 240 |
| Query: | 240 | RGTIKSEYNQLLQQNLPVLHIEESRQVSKANNPYVYRVF | 278 |
| | | +G + EY++ L+Q+LPVL + E Q + NNPYVYRVF | |
| Sbjct: | 241 | KGRLHMEYDKNLEQHLPVLQLAEVHQTKEPNNPYVYRVF | 279 |

[2258] SEQ ID 8560 (GBS235d) was expressed in E. coli as a GST-fusion product. SDS-PAGE analysis of total cell extract is shown in FIG. 146 (lane 14 & 15; MW 48.5 kDa). It was also expressed in E. coli as a His-fusion product. SDS-PAGE analysis of total cell extract is shown in FIG. 146 (lane 17 & 18; MW 23.4 kDa), in FIG. 150 (lane 15; MW 23 kDa) and in FIG. 182 (lane 5; MW 23 kDa).

[2259] GBS235d-His was purified as shown in FIG. 235, lane 6-7.

[2260] Based on this analysis, it was predicted that these proteins and their epitopes could be useful antigens for vaccines or diagnostics.

### EXAMPLE 354

[2261] A DNA sequence (GBSx0385) was identified in S. agalactiae <SEQ ID 1147> which encodes the amino acid sequence <SEQ ID 1148>. This protein is predicted to be signal recognition particle (ftsY). Analysis of this protein sequence reveals the following:

```
Possible site: 57
>>> Seems to have no N-terminal signal sequence
----- Final Results -----
                            bacterial cytoplasm --- Certainty = 0.3301(Affirmative) < succ>
                              bacterial membrane --- Certainty = 0.0000(Not Clear) < succ>
                                bacterial outside --- Certainty = 0.0000(Not Clear) < succ>
```

[2262] The protein has homology with the following sequences in the GENPEPT database:

| >GP: BAB06205 GB: AP001515 signal recognition particle (docking | | | |
|---|---|---|---|
| protein) [Bacillus halodurans] | | | |
| Identities = 175/304 (57%), Positives = 227/304 (74%) | | | |
| Query: | 233 | EKYNRSLKKTRTGFSARLNAFLSNFRRVDEEFFEELEEMLILSDVGVNVATQLTEDLRYE | 292 |
| | | EK+ L+KTR F+ ++N + +R VDE+FFEELEE+LI +DVGV L E+L+ E | |
| Sbjct: | 20 | EKFKAGLEKTRDSFAGKMNDLVYKYRSVDEDFFEELEEILIGADVGVTTVMDLVEELKDE | 79 |
| Query: | 293 | AKLENAKKSEDLKRVIVEKLVEIYEKDGIYNEAINFQEGLTVMLFVGVNGVGKTTSIGKL | 352 |
| | | + +N K S+D++ +I EKL E+ EK+G E GL+V+L VGVNGVGKTTSIGKL | |
| Sbjct: | 80 | VRRQNIKDSKDIQPIISEKLAELLEKEGGETEVNLQPAGLSVILVVGVNGVGKTTSIGKL | 139 |
| Query: | 353 | AHQYKSQGKKVMLVAADTFRAGAVAQLVEWGRRVDVPVVTGEEKADPASVVFDGMEKAVA | 412 |
| | | AH YK QGKKV+L A DTFRAGA+ QL WG R V V+ E +DPA+V+FD ++ A + | |
| Sbjct: | 140 | AHMYKQQGKKVILAAGDTFRAGAIEQLEVWGERAGVDVIKQSEGSDPAAVMFDAIQAAKS | 199 |
| Query: | 413 | QGVDVLLIDTAGRLQNKENLMAELEKIGRIIKRVVPDAPHETLLALDASTGQNALSQAKE | 472 |
| | | + D+L+ DTAGRLQNK NLM ELEK+ R+I R +P APHE L+ALDA+TGQNA+SQAK | |
| Sbjct: | 200 | READILICDTAGRLQNKVNLMKELEKVKRVISREIPGAPHEVLIALDATTGQNAMSQAKT | 259 |
| Query: | 473 | FSKITPLTGLILTKIDGTAKGGVVLAIRQELDIPVKFIGFGEKIDDIGEFNSEDFMRGLL | 532 |
| | | F + T +TG+ILTK+DGTAKGG+VLAIR ELDIPVKF+G GEKIDD+ F+SE F+ GL | |
| Sbjct: | 260 | FKETTDVTGIILTKLDGTAKGGIVLAIRHELDIPVKFVGLGEKIDDLQPFDSEQFVYGLF | 319 |
| Query: | 533 | EGIL | 536 |
| | | + ++ | |
| Sbjct: | 320 | KDMV | 323 |

[2263] A related DNA sequence was identified in S. pyogenes <SEQ ID 1149> which encodes the amino acid sequence <SEQ ID 1150>. Analysis of this protein sequence reveals the following:

```
Possible site: 60
>>> Seems to have no N-terminal signal sequence
----- Final Results -----
                            bacterial cytoplasm --- Certainty = 0.4384(Affirmative) < succ>
                              bacterial membrane --- Certainty = 0.0000(Not Clear) < succ>
                                bacterial outside --- Certainty = 0.0000(Not Clear) < succ>
```

[2264] An alignment of the GAS and GBS proteins is shown below:

| Identities = 339/549 (61%), Positives = 404/549 (72%), Gaps = 46/549 (8%) | | | |
|---|---|---|---|
| Query: | 1 | MGLFDRLFGHKKKDKEPEIEASESVVLEDEDSVIDKEEGSNFSKESTLNRTSEVPVAEDD | 60 |
| | | MGLFDRLFG K+ K E + E+++ E KEE S + E ++ + + | |
| Sbjct: | 1 | MGLFDRLFGKKETPKVAEEKLEENLLTE----TTQKEELSEKANEQ-----DKIEAVQQE | 51 |
| Query: | 61 | SFLELERDTALSESHQPVTSEIHPLESEDTDEIPVKEDDSFLELEDRAKTKVADTSEVEN | 120 |
| | | ++ + A S + P + ++ L E+T D + DT+E | |
| Sbjct: | 52 | ---DVSSEGAGSVENGPEAASVNALVEEETG--------------DNSNHPSEDTNEF-- | 92 |
| Query: | 121 | VVPDSTTLSDNVSAKSEASFSDKEQLSDSQASDQFSETPLQEEMS--SGKTEVQTESEDT | 178 |
| | | D T L VS S+++ S+ + L D +QF Q + S S E S++ | |
| Sbjct: | 93 | -AADKTDLK--VSELSQSTASEPKDLVDQPVVEQFPTKQAQADASNDSANEEAVDTSKEQ | 149 |
| Query: | 179 | SAADAFLADYYAKRKAIEKEISSNSLST---------DESEFSEAQEVLSQSQA--DTIK | 227 |
| | | S++ + DYY ++ A+EK + + +T E++ S + E SQ++A DTI | |
| Sbjct: | 150 | SSSQQVMEDYYRRKAALEKSLQEKAAATVPVMPEEVPQENQASTSAEA-SQNKATHDTIP | 208 |
| Query: | 228 | AESQEEKYNRSLKKTRTGFSARLNAFLSNFRRVDEEFFEELEEMLILSDVGVNVATQLTE | 287 |
| | | E+ +EKY RSLKKTRTGFSARLN+F +NFRRVDEEFFE+LEEMLILSDVGV+VAT LTE | |
| Sbjct: | 209 | -ETDQEKYKRSLKKTRTGFSARLNSFFANFRRVDEEFFEDLEEMLILSDVGVHVATTLTE | 267 |
| Query: | 288 | DLRYEAKLENAKKSEDLKRVIVEKLVEIYEKDGIYNEAINFQEGLTVMLFVGVNGVGKTT | 347 |
| | | +LRYEAKLENAKK + LKRVIVEKLV+IYEKDG YNEAIN+Q+GLTVMLFVGVNGVGKTT | |
| Sbjct: | 268 | ELRYEAKLENAKKPDALKRVIVEKLVDIYEKDGRYNEAINYQDGLTVMLFVGVNGVGKTT | 327 |
| Query: | 348 | SIGKLAHQYKSQGKKVMLVAADTFRAGAVAQLVEWGRRVDVPVVTGEEKADPASVVFDGM | 407 |
| | | SIGKLA++YK +GKKVMLVAADTFRAGAVAQLVEWGRRVDVPV+TG EKADPASVVFDGM | |
| Sbjct: | 328 | SIGKLAYRYKQEGKKVMLVAADTFRAGAVAQLVEWGRRVDVPVITGPEKADPASVVFDGM | 387 |
| Query: | 408 | EKAVAQGVDVLLIDTAGRLQNKENLMAELEKIGRIIKRVVPDAPHETLLALDASTGQNAL | 467 |
| | | EKAVA+GVD+LLIDTAGRLQNKENLMAELEK+GRIIKRV+PDAPHETLLALDASTGQNAL | |
| Sbjct: | 388 | EKAVAKGVDILLIDTAGRLQNKENLMAELEKMGRIIKRVLPDAPHETLLALDASTGQNAL | 447 |
| Query: | 468 | SQAKEFSKITPLTGLILTKIDGTAKGGVVLAIRQELDIPVKFIGFGEKIDDIGEFNSEDF | 527 |
| | | SQAKEFSKITPLTGLILTKIDGTAKGGVVLAIRQELDIPVKFIGFGEK+DDIGEF+SEDF | |
| Sbjct: | 448 | SQAKEFSKITPLTGLILTKIDGTAKGGVVLAIRQELDIPVKFIGFGEKVDDIGEFHSEDF | 507 |
| Query: | 528 | MRGLLEGIL | 536 |
| | | M+GLLEGIL | |
| Sbjct: | 508 | MKGLLEGIL | 516 |

[2265] Based on this analysis, it was predicted that these proteins and their epitopes could be useful antigens for vaccines or diagnostics.

### EXAMPLE 355

[2266] A DNA sequence (GBSx0386) was identified in S. agalactiae <SEQ ID 1151> which encodes the amino acid sequence <SEQ ID 1152>. Analysis of this protein sequence reveals the following:

```
Possible site: 52
>>> Seems to have no N-terminal signal sequence
----- Final Results -----
                            bacterial cytoplasm --- Certainty = 0.3592(Affirmative) < succ>
                              bacterial membrane --- Certainty = 0.0000(Not Clear) < succ>
                                bacterial outside --- Certainty = 0.0000(Not Clear) < succ>
```

[2267] The protein has homology with the following sequences in the GENPEPT database:

| >GP: AAA62048 GB: L10328 f270 [Escherichia coli] | | | |
|---|---|---|---|
| Identities = 101/273 (36%), Positives = 160/273 (57%), Gaps = 10/273 (3%) | | | |
| Query: | 4 | IKILALDLDGTLFTTDKKVSEENKVALKAAREKGIKVVITTGRPLKAIGNLLEDLELVSD | 63 |
| | | IK++A+D+DGTL D +S K A+ AAR +G+ VV+TTGRP + N L++L + | |
| Sbjct: | 3 | IKLIAIDMDGTLLLPDHTISPAVKNAIAAARARGVNVVLTTGRPYAGVHNYLKELHMEQP | 62 |
| Query: | 64 | EDYSITFNGGLVQQNT-GKILAKTAMTRQEVEDIHEELYQVGLPTDILSEGTVYS----I | 118 |
| | | DY IT+NG LVQ+ G +A+TA++ + + + +VG L T+Y+ I | |
| Sbjct: | 63 | GDYCITYNGALVQKAADGSTVAQTALSYDDYRXLEKLSREVGSHFHALDRTTLYTANRDI | 122 |
| Query: | 119 | ANKGHHSQYHLANPLLEFIEVDDLEQVPKDVVYNKIVSVIDATYLDQQIAKLPDRLKVDY | 178 |
| | | + H + PL+ F E E++ + + K++ + + LDQ IA++P +K Y | |
| Sbjct: | 123 | SYYTVHESFVATIPLV-FCEA---EKMDPNTQFLKVMMIDEPAILDQAIARIPQXVKEKY | 178 |
| Query: | 179 | EMFKSRDIILELMPKGVHKAVGLELLTKHLGLDSSQVMAMGDEANDLSMLEWAGLGVAMA | 238 |
| | | + KS LE++ K V+K G++ L LG+ ++MA+GD+ ND++M+E+AG+GVAM | |
| Sbjct: | 179 | TVLKSAPYFLEILDKRVNKGTGVKSLADVLGIKPEEIMAIGDQENDIAMIEYAGVGVAMD | 238 |
| Query: | 239 | NGIPEAKAIAKATTICNNDESGVAEAIGKYILS | 271 |
| | | N IP K +A T +N E GVA AI KY+L+ | |
| Sbjct: | 239 | NAIPSVKEVANFVT-KSNLEDGVAFAIEKYVLN | 270 |

[2268] A related DNA sequence was identified in S. pyogenes <SEQ ID 1153> which encodes the amino acid sequence <SEQ ID 1154>. Analysis of this protein sequence reveals the following:

```
Possible site: 32
>>> Seems to have no N-terminal signal sequence
----- Final Results -----
                            bacterial cytoplasm --- Certainty = 0.3502(Affirmative) < succ>
                              bacterial membrane --- Certainty = 0.0000(Not Clear) < succ>
                                bacterial outside --- Certainty = 0.0000(Not Clear) < succ>
```

[2269] An alignment of the GAS and GBS proteins is shown below:

| Identities = 180/273 (65%), Positives = 218/273 (78%), Gaps = 1/273 (0%) | | | |
|---|---|---|---|
| Query: | 3 | DIKILALDLDGTLFTTDKKVSEENKVALKAAREKGIKVVITTGRPLKAIGNLLEDLELVS | 62 |
| | | +I+ILALDLDGTL+ T+K V++ NK AL AAREKG+KVVITTGRPLKAIGNLLE+L+L+ | |
| Sbjct: | 2 | NIRILALDLDGTLYNTEKIVTDANKKALAAAREKGVKVVITTGRPLKAIGNLLEELDLLD | 61 |
| Query: | 63 | DEDYSITFNGGLVQQNTGKILAKTAMTRQEVEDIHEELYQVGLPTDILSEGTVYSIANK- | 121 |
| | | +DYSITFNGGLVQ+NTG++L K++++ +V I + L VGLPTDI+S G VYSI +K | |
| Sbjct: | 62 | HDDYSITFNGGLVQRNTGEVLDKSSLSFDQVCQIQQALEAVGLPTDIISGGDVYSIPSKD | 121 |
| Query: | 122 | GHHSQYHLANPLLEFIEVDDLEQVPKDVVYNKIVSVIDATYLDQQIAKLPDRLKVDYEMF | 181 |
| | | G HSQYHLANPLL FIEV + ++PKD+ YNKIV+V D +LDQQI KL L D+E F | |
| Sbjct: | 122 | GRHSQYHLANPLLTFIEVTSVAELPKDITYNKIVTVTDPDFLDQQIIKLSPSLFEDFEAF | 181 |
| Query: | 182 | KSRDIILELMPKGVHKAVGLELLTKHLGLDSSQVMAMGDEANDLSMLEWAGLGVAMANGI | 241 |
| | | KSRDII E+MPKG+ KA GL LL +HLGLD+ VMAMGDEAND +MLEWAGLGVAMANG+ | |
| Sbjct: | 182 | KSRDIIFEIMPKGIDKAFGLNLLCQHLGLDARHVMAMGDEANDFAMLEWAGLGVAMANGV | 241 |
| Query: | 242 | PEAKAIAKATTICNNDESGVAEAIGKYILSEEN | 274 |
| | | AKA A A T NDESGVAEA+ +IL EE+ | |
| Sbjct: | 242 | SGAKADADAVTTLTNDESGVAEAVKTFILEEES | 274 |

[2270] Based on this analysis, it was predicted that these proteins and their epitopes could be useful antigens for vaccines or diagnostics.

### EXAMPLE 356

[2271] A DNA sequence (GBSx0387) was identified in S. agalactiae <SEQ ID 1155> which encodes the amino acid sequence <SEQ ID 1156>. Analysis of this protein sequence reveals the following:

```
Possible site: 49
>>> Seems to have no N-terminal signal sequence
----- Final Results -----
                            bacterial cytoplasm --- Certainty = 0.4648(Affirmative) < succ>
                              bacterial membrane --- Certainty = 0.0000(Not Clear) < succ>
                                bacterial outside --- Certainty = 0.0000 (Not Clear) < succ>
```

[2272] The protein has homology with the following sequences in the GENPEPT database:

| >GP: BAA35556 GB: D90723 Hypothetical 30.2 kd protein in idh-deoR | | | |
|---|---|---|---|
| intergenic region. [Escherichia coli] | | | |
| Identities = 91/264 (34%), Positives = 146/264 (54%), Gaps = 4/264 (1%) | | | |
| Query: | 2 | IKLVATDMDGTFLDENGTYDKKRLANVLKKFKEQGIVFTAASGRSLLSLEQLFADFRDQM | 61 |
| | | IKL+A DMDGTFL + TY+++R ++ K QGI F ASG L F + +++ | |
| Sbjct: | 4 | IKLIAVDMDGTFLSDQKTYNRERFMAQYQQMKAQGIRFVVASGNQYYQLISFFPEIANEI | 63 |
| Query: | 62 | AFIAENGSAAVLFNRLAYEQHLSREQYLDIIDHLSKSPYMENNEYVLSGKDGAYILSDAN | 121 |
| | | AF+AENG V + + LS++ + +++HL P + E + GK+ AY L + | |
| Sbjct: | 64 | AFVAENGGWVVSEGKDVFNGELSKDAFATVVEHLLTRPEV---EIIACGKNSAYTLKKYD | 120 |
| Query: | 122 | PDYIEFITHYYDNLQKVSHFEDVDDIIFKVTANFTEETVRQAEEWVNQAI-PYATAVTTG | 180 |
| | | YY L+ V +F++++DI FK N ++E + Q ++ +++AI +V TG | |
| Sbjct: | 121 | DAMKTVAEMYYHRLEYVDNFDNLEDIFFKFGLNLSDELIPQVQKALHEAIGDIMVSVHTG | 180 |
| Query: | 181 | FKSIDIILSSVNKRNGLEHLCEQYGIRAEEVLSFGDNINDLEMLEWSGKAIATENARPEV | 240 |
| | | SID+I+ V+K NGL L + +GI EV+ FGD ND+EML +G + A ENA V | |
| Sbjct: | 181 | NGSIDLIIPGVHKANGLRQLQKLWGIDDSEVVVFGDGGNDIEMLRQAGFSFAMENAGSAV | 240 |
| Query: | 241 | KEIADCIIGHHNNQAVMAYLESMV | 264 |
| | | A G +N + V+ ++ ++ | |
| Sbjct: | 241 | VAAAKYRAGSNNREGVLDVIDKVL | 264 |

[2273] A related DNA sequence was identified in S. pyogenes <SEQ ID 1157> which encodes the amino acid sequence <SEQ ID 1158>. Analysis of this protein sequence reveals the following:

```
Possible site: 49
>>> Seems to have no N-terminal signal sequence
----- Final Results -----
                            bacterial cytoplasm --- Certainty = 0.3401(Affirmative) < succ>
                              bacterial membrane --- Certainty = 0.0000(Not Clear) < succ>
                                bacterial outside --- Certainty = 0.0000(Not Clear) < succ>
```

[2274] An alignment of the GAS and GBS proteins is shown below:

| Identities = 138/265 (52%), Positives = 193/265 (72%), Gaps = 1/265 (0%) | | | |
|---|---|---|---|
| Query: | 1 | MIKLVATDMDGTFLDENGTYDKKRLANVLKKFKEQGIVFTAASGRSLLSLEQLFADFRDQ | 60 |
| | | MIKL+ATDMDGTFL E+GTY++++LA +L K E+GI+F +SGRSLL+++QLF F DQ | |
| Sbjct: | 1 | MIKLIATDMDGTFLAEDGTYNQEQLAALLPKLAEKGILFAVSSGRSLLAIDQLFEPFLDQ | 60 |
| Query: | 61 | MAFIAENGSAAVLFNRLAYEQHLSREQYLDIIDHLSKSPYMENNEYVLSGKDGAYILSDA | 120 |
| | | +A IAENGS + + +++EQY ++ + +P+ V SG+ AYIL A | |
| Sbjct: | 61 | IAVIAENGSVVQYRGEILFADMMTKEQYTEVAKKILANPHYVETGMVFSGQKAAYILKGA | 120 |
| Query: | 121 | NPDYIEFITHYYDNLQKVSHFEDVD-DIIFKVTANFTEETVRQAEEWVNQAIPYATAVTT | 179 |
| | | + +YI+ HYY N++ ++ FED++ D IFKV+ NFT TV + +W+NQA+PYATAVTT | |
| Sbjct: | 121 | SEEYIQKTKHYYANVKVINGFEDMENDAIFKVSTNFTGHTVLEGSDWLNQALPYATAVTT | 180 |
| Query: | 180 | GFKSIDIILSSVNKRNGLEHLCEQYGIRAEEVLSFGDNINDLEMLEWSGKAIATENARPE | 239 |
| | | GF SIDIIL VNK G+EHLC+ GI+ E ++FGDN ND +MLE++G+AIATENARPE | |
| Sbjct: | 181 | GFDSIDIILKEVNKGFGMEHLCQALGIKKAETIAFGDNFNDYQMLEFAGRAIATENARPE | 240 |
| Query: | 240 | VKEIADCIIGHHNNQAVMAYLESMV | 264 |
| | | +K I+D +IGH N+ AV+ YL+ +V | |
| Sbjct: | 241 | IKVISDQVIGHCNDGAVLTYLKGLV | 265 |

[2275] Based on this analysis, it was predicted that these proteins and their epitopes could be useful antigens for vaccines or diagnostics.

### EXAMPLE 357

[2276] A DNA sequence (GBSx0388) was identified in S. agalactiae <SEQ ID 1159> which encodes the amino acid sequence <SEQ ID 1160>. Analysis of this protein sequence reveals the following:

```
Possible site: 18
>>> Seems to have no N-terminal signal sequence
----- Final Results -----
                            bacterial cytoplasm --- Certainty = 0.2428(Affirmative) < succ>
                              bacterial membrane --- Certainty = 0.0000(Not Clear) < succ>
                                bacterial outside --- Certainty = 0.0000(Not Clear) < succ>
```

[2277] The protein has no significant homology with any sequences in the GENPEPT database.

[2278] No corresponding DNA sequence was identified in S. pyogenes.

[2279] Based on this analysis, it was predicted that this protein and its epitopes, could be useful antigens for vaccines or diagnostics.

### EXAMPLE 358

[2280] A DNA sequence (GBSx0389) was identified in S. agalactiae <SEQ ID 1161> which encodes the amino acid sequence <SEQ ID 1162>. This protein is predicted to be p115 protein (smc). Analysis of this protein sequence reveals the following:

| Possible site: 55 | | | | |
|---|---|---|---|---|
| >>> Seems to have no N-terminal signal sequence | | | | |
| | INTEGRAL | Likelihood = −4.99 | Transmembrane | 1092-1108 (1088-1110) |

```
----- Final Results -----
                              bacterial membrane --- Certainty = 0.2996(Affirmative) < succ>
                                bacterial outside --- Certainty = 0.0000(Not Clear) < succ>
                            bacterial cytoplasm --- Certainty = 0.0000(Not Clear) < succ>
```

[2281] A related GBS nucleic acid sequence <SEQ ID 9713> which encodes amino acid sequence <SEQ ID 9714> was also identified.

[2282] The protein has homology with the following sequences in the GENPEPT database:

| >GP: CAB13467 GB: Z99112 chromosome segregation SMC protein homolg | | | |
|---|---|---|---|
| [Bacillus subtilis] | | | |
| Identities = 458/1193 (38%), Positives = 728/1193 (60%), Gaps = 27/1193 (2%) | | | |
| Query: | 1 | MFLKEIEMQGFKSFADKTKVEFDQGVTAVVGPNGSGKSNITESLRWALGESSAKSLRGGK | 60 |
| | | MFLK +++ GFKSFA++ V+F +GVTAVVGPNGSGKSNIT+++RW LGE SA+SLRGGK | |
| Sbjct: | 1 | MFLKRLDVIGFKSFAERISVDFVKGVTAVVGPNGSGKSNITDAIRWVLGEQSARSLRGGK | 60 |
| Query: | 61 | MPDVIFAGTENRKPLNYAQVSVTLDNSDHFIENIADEVRVERRIFRNGDSEYLIDGRKVR | 120 |
| | | M D+IFAG+++RK LN A+V++TLDN DHF+ EV V RR++R+G+SE+LI+ + R | |
| Sbjct: | 61 | MEDIIFAGSDSRKRLNLAEVTLTLDNDDHFLPIDFHEVSVTRRVYRSGESEFLINNQPCR | 120 |
| Query: | 121 | LRDIHDLFMDTGLGRDSFSIISQGRVEAIFNSKPEERRAIFEEAAGVLKYKTRKKETQSK | 180 |
| | | L+DI DLFMD+GLG+++FSIISQG+VE I +SK E+RR+IFEEAAGVLKYKTRKK+ ++K | |
| Sbjct: | 121 | LKDIIDLFMDSGLGKEAFSIISQGKVEEILSSKAEDRRSIFEEAAGVLKYKTRKKKAENK | 180 |
| Query: | 181 | LEQTQGNLDRLEDIIYELDMQVQPLEKQASIAKRFLVLDEERQGLHLSILIEDILQHQSD | 240 |
| | | L +TQ NL+R+EDI++EL+ QV+PL+ QASIAK +L +E + + +++ DI + | |
| Sbjct: | 181 | LFETQDNLNRVEDILHELEGQVEPLKIQASIAKDYLEKKKELEHVEIALTAYDIEKLHGK | 240 |
| Query: | 241 | LTTVEEKLLTVRKELATYYQQRQSLEDENQSLKQKRHHLSEEIEAKQLALLDVTKLKSDL | 300 |
| | | +T++EK+ ++E + E + + + K L E + Q LL ++ L | |
| Sbjct: | 241 | WSTLKEKVQMAKEEELAESSAISAKEAKIEDTRDKIQALDESVNELQQVLLVTSEELEKL | 300 |
| Query: | 301 | ERQIDLIRLESNQKAEKKEEAGQRLAELEIKAKDCSDQITQKNIELTTLSEKIAQIRSEI | 360 |
| | | E + ++++ + +E+ + + + + K ++++++ TL ++ Q+R+++ | |
| Sbjct: | 301 | EGRKEVLKERKKNAVQNQEQLEEAIVQFQQKETVLKEELSKQEAVFETLQAEVKQLRAQV | 360 |
| Query: | 361 | VSTESSLERFSTNPDQIIEKLREDFVTLMQEEADTSNALTALLADIENQKQASQAKSQEI | 420 |
| | | + +L + N ++ IE+L+ D+ L+ +A N L LL D +Q + + + | |
| Sbjct: | 361 | KEKQQALSLHNENVEEKIEQLKSDYFELLWSQASIRNEL-QLLDDQMSQSAVTLQRLADN | 419 |
| Query: | 421 | QEVSKNLEVLKSNAKVALE-RFEAAKKNVRQLLSHYQDLGQTLQNLEGEYKWQQSILFDH | 479 |
| | | E S K A E F ++ + + Y+D+ + + +Y+ +S L+ | |
| Sbjct: | 420 | NEKHLQERHDISARKAACETEFARIEQEIHSQVGAYRDMQTKYEQKKRQYEKNESALYQA | 479 |
| Query: | 480 | LDEIKSKQARISSLESILKNHSNFYAGVKSVLQAKDQLGGIIGAVSEHLSFDKHYQTALE | 539 |
| | | ++ +++ LE++ + S FY GVK VL+AK++LGGI GAV E +S ++ Y+TA+E | |
| Sbjct: | 480 | YQYVQQARSKKDMLETMQGDFSGFYQGVKEVLKAKERLGGIRGAVLELISTEQKYETAIE | 539 |
| Query: | 540 | IALGGSSQHIIVEDESAAKRSIAFLKKNRQGRATFLPLTTIKPRELAQHYLSKLQSSQGF | 599 |
| | | IALG S+QH++ +DE +A+++I +LK+N GRATFLPL+ I+ R+L F | |
| Sbjct: | 540 | IALGASAQHVVTDDEQSARKAIQYLKQNSFGRATFLPLSVIRDRQLQSRDAETAARHSSF | 599 |
| Query: | 600 | LGIASELVTYDQRLSNIFKNNLGLTAIFDTVDNANVAARQLNYQVRLVTLDGTELRPGGS | 659 |
| | | LG+ASELVT+D ++ +N LG I + + AN A+ L ++ R+VTL+G + PGGS | |
| Sbjct: | 600 | LGVASELVTFDPAYRSVIQNLLGTVLITEDLKGANELAKLLGHRYRIVTLEGDVVNPGGS | 659 |
| Query: | 660 | YSGGANRQNNTVFI--KPELDNLKKELKQAQSKQLIQEKEVATLLEQLKEKQETLAQLKN | 717 |
| | | +GGA ++ N + EL+++ K L + + K + E+EV TL +++ ++ LA L+ | |
| Sbjct: | 660 | MTGGAVKKKNNSLLGRSRELEDVTKRLAEMEEKTALLEQEVKTLKHSIQDMEKKLADLRE | 719 |
| Query: | 718 | DGEQARLEEQRADIEYQQLSEKLADLNKLYNGLQLSSGALEQTTSENE--KNRLEKELEQ | 775 |
| | | GE RL++Q + +L ++N AL ++ E + K +LE+EL | |
| Sbjct: | 720 | TGEGLRLKQQDVKGQLYELQVAEKNINTHLELYDQEKSALSESDEERKVRKRKLEEELSA | 779 |
| Query: | 776 | FAIKKEELTTSIAQIKEDKDSIQEKVNNLTTLLSEAQLEERDLLNEQKFERANCTRL--- | 832 |
| | | + K ++L I ++ + K + +L+ L+E ++ K E N RL | |
| Sbjct: | 780 | VSEKMKQLEEDIDRLTKQKQTQSSTKESLSNELTELKIAAAKKEQACKGEEDNLARLKKE | 839 |
| Query: | 833 | ----EITLSEIKRDISNLQTLLSHQDSQLDKEELPRIEKQLLQVNNRRENDEEKLVSLRF | 888 |
| | | E+ L E K D+S L + +S S E++L + + ND+ K + L | |
| Sbjct: | 840 | LTETELALKEAKEDLSFLTSEMSSSTSG---------EEKLEEAAKHKLNDKTKTIELIA | 890 |
| Query: | 889 | ELEDCEAALDDLAASLAKEGQKNESLIRQQAQL----ESQCEQLSQQLMIFSRQLSEDYQ | 944 |
| | | D L + +E ++ + L +Q+ L E + ++ +L + L E+Y | |
| Sbjct: | 891 | LRRDQRIKLQHGLDTYERELKEMKRLYKQKTTLLKDEEVKLGRMEVELDNLLQYLREEYS | 950 |
| Query: | 945 | MTLDEAKVKANVLEDILMAREQLKSLQAKIKALGPVNIDAIAQFEEVHERLTFLNTQRDD | 1004 |
| | | ++ + AK K + D AR+++K ++ I+ LG VN+ +I +FE V+ER FL+ Q++D | |
| Sbjct: | 951 | LSFEGAKEKYQLETDPEEARKRVKLIKLAIEELGTVNLGSIDEFERVNERYKFLSEQKED | 1010 |
| Query: | 1005 | LVHAKNLLLETITDMDDEVKTRFKSTFEAIRHSFKETFVQMFGGGSADLILTE-GDLLSA | 1063 |
| | | L AKN L + I +MD+E+ RF TF IR F + F +FGGG A+L LT+ DLL + | |
| Sbjct: | 1011 | LTEAKNTLFQVIEEMDEEMTKRFNDTFVQIRSHFDQVFRSLFGGGRAELRLTDPNDLLHS | 1070 |
| Query: | 1064 | GVDISVQPPGKKIQSLNLMSGGEKALSALALLFAIIRVKTIPFVILDEVEAALDEANVKR | 1123 |
| | | GV+I QPPGKK+Q+LNL+SGGE+AL+A+ALLF+I++V+ +PF +LDEVEAALDEANV R | |
| Sbjct: | 1071 | GVEIIAQPPGKKLQNLNLLSGGERALTAIALLFSILKVRPVPFCVLDEVEAALDEANVFR | 1130 |
| Query: | 1124 | FGDYLNRFDKSSQFIVVTHRKGTMSAADSIYGVTMQESGVSKIVSVKLKEAQE | 1176 |
| | | F YL ++ +QFIV+THRKGTM AD +YGVTMQESGVSK++SVKL+E +E | |
| Sbjct: | 1131 | FAQYLKKYSSDTQFIVITHRKGTMEEADVLYGVTMQESGVSKVISVKLEETKE | 1183 |

[2283] A related DNA sequence was identified in S. pyogenes <SEQ ID 1163> which encodes the amino acid sequence <SEQ ID 1164>. Analysis of this protein sequence reveals the following:

| Possible site: 15 | | | | |
|---|---|---|---|---|
| >>> Seems to have no N-terminal signal sequence | | | | |
| | INTEGRAL | Likelihood = −4.99 | Transmembrane | 1092-1108 (1088-1110) |

```
----- Final Results -----
                              bacterial membrane --- Certainty = 0.2996(Affirmative) < succ>
                                bacterial outside --- Certainty = 0.0000(Not Clear) < succ>
                            bacterial cytoplasm --- Certainty = 0.0000(Not Clear) < succ>
```

[2284] The protein has homology with the following sequences in the databases:

| >GP: CAB13467 GB: Z99112 chromosome segregation SMC protein homolg | | | |
|---|---|---|---|
| [Bacillus subtilis] | | | |
| Identities = 441/1192 (36%), Positives = 729/1192 (60%), Gaps = 25/1192 (2%) | | | |
| Query: | 1 | MFLKEIEMEGFKSFADKTKIEFDKGVTAVVGPNGSGKSNITESLRWALGESSAKNLRGGK | 60 |
| | | MFLK +++ GFKSFA++ ++F KGVTAVVGPNGSGKSNIT+++RW LGE SA++LRGGK | |
| Sbjct: | 1 | MFLKRLDVIGFKSFAERISVDFVKGVTAVVGPNGSGKSNITDAIRWVLGEQSARSLRGGK | 60 |
| Query: | 61 | MPDVIFAGTQNRNPLNYAKVAVVLDNSDHFIKTAKKEIRVERHIYRNGDSDYLIDGRKVR | 120 |
| | | M D+IFAG+ +R LN A+V + LDN DHF+ E+ V R +YR+G+S++LI+ + R | |
| Sbjct: | 61 | MEDIIFAGSDSRKRLNLAEVTLTLDNDDHFLPIDFHEVSVTRRVYRSGESEFLINNQPCR | 120 |
| Query: | 121 | LRDIHDLFMDTGLGRDSFSIISQGRVEEIFNSKPEERRAIFEEAAGVLKYKTRKKETQIK | 180 |
| | | L+DI DLFMD+GLG+++FSIISQG+VEEI +SK E+RR+IFEEAAGVLKYKTRKK+ + K | |
| Sbjct: | 121 | LKDIIDLFMDSGLGKEAFSIISQGKVEEILSSKAEDRRSIFEEAAGVLKYKTRKKKAENK | 180 |
| Query: | 181 | LNQTQDNLDRLEDIIYELDTQLAPLEKQAKVAKQFLELDANRKQLQLDILVKDIDIAQER | 240 |
| | | L +TQDNL+R+EDI++EL+ Q+ PL+ QA +AK +LE + +++ + DI+ + | |
| Sbjct: | 181 | LFETQDNLNRVEDILHELEGQVEPLKIQASIAKDYLEKKKELEHVEIALTAYDIEKLHGK | 240 |
| Query: | 241 | QTKDTEALAALQQDLASYYAKRQSMEEDYQKFKQKKQVLSQESDQTQTTLLELTKLIADL | 300 |
| | | + E + +++ + + + E + + K Q L + ++ Q LL ++ + L | |
| Sbjct: | 241 | WSTLKEKVQMAKEEELAESSAISAKEAKIEDTRDKIQALDESVNELQQVLLVTSEELEKL | 300 |
| Query: | 301 | EKQIELVKLESGQSAEKKAEAKKHLEQLQEQLDGFQAEEKQCTEQLLH-------IDQQL | 353 |
| | | E + E++K E+K A ++ EQL+E + FQ +E E+L + ++ | |
| Sbjct: | 301 | EGRKEVLK-------ERKKNAVQNQEQLEEAIVQFQQKETVLKEELSKQEAVFETLQAEV | 353 |
| Query: | 354 | CDVKQQLNELSNALERFSSDPDQLMETLREEFVLLMQKEAALSNQLTALKAHLDKEKQAR | 413 |
| | | ++ Q+ E AL + + ++ +E L+ ++ L+ +A++ N+L L + + | |
| Sbjct: | 354 | KQLRAQVKEKQQALSLHNENVEEKIEQLKSDYFELLNSQASIRNELQLLDDQMSQSAVTL | 413 |
| Query: | 414 | QHKAQEYQLLVTKLDQLNDESQKAQAHYKAQKEQVEMLLQNYQEGDKRVQELERDYQLNQ | 473 |
| | | Q A + + + ++ + + ++++ + Y++ + ++ +R Y+ N+ | |
| Sbjct: | 414 | QRLADNNEKHLQERHDISARKAACETEFARIEQEIHSQVGAYRDMQTKYEQKKRQYEKNE | 473 |
| Query: | 474 | ERLFDLLDQKKGKEARKASLESIQKSHSQFYAGVRAVLQSQKKLGGIIGAVSEHLSFDSD | 533 |
| | | L+ + ++K LE++Q S FY GV+ VL+++++LGGI GAV E +S + | |
| Sbjct: | 474 | SALYQAYQYVQQARSKKDMLETMQGDFSGFYQGVKEVLKAKERLGGIRGAVLELISTEQK | 533 |
| Query: | 534 | YQTALEVALGANSQHIIVTDEAAAKRAIAYLKKNRQGRATFLPLTTIKARSLSEHYHRQL | 593 |
| | | Y+TA+E+ALGA++QH++ DE +A++AI YLK+N GRATFLPL+ I+ R L | |
| Sbjct: | 534 | YETAIEIALGASAQHVVTDDEQSARKAIQYLKQNSFGRATFLPLSVIRDRQLQSRDAETA | 593 |
| Query: | 594 | ATCEGYLGTAESLIRYDDSLSAIIQNLLSSTAIFETIDQANIAARLLGYKVRIVTLDGTE | 653 |
| | | A +LG A L+ +D + ++IQNLL + I E + AN A+LLG++ RIVTL+G | |
| Sbjct: | 594 | ARHSSFLGVASELVTFDPAYRSVIQNLLGTVLITEDLKGANELAKLLGHRYRIVTLEGDV | 653 |
| Query: | 654 | LRPGGSFSGGANRQSNTTFI--KPELEQISEELTRLVEQLKITEKEVAALQSDLIAKKEE | 711 |
| | | + PGGS +GGA ++ N + + ELE +++ L + E+ + E+EV L+ + +++ | |
| Sbjct: | 654 | VNPGGSMTGGAVKRKNNSLLGRSRELEDVTKRLAEMEEKTALLEQEVKTLKHSIQDMEKK | 713 |
| Query: | 712 | LTQLKLAGDQARLAEQ--RAQMAYQQLQEKQEDSKALLAALDQSQTTHSDESLLAEQARI | 769 |
| | | L L+ G+ RL +Q + Q+ Q+ EK ++ L ++S + SDE + ++ | |
| Sbjct: | 714 | LADLRETGEGLRLRQQDVKGQLYELQVAEKNINTHLELYDQEKSALSESDEERKVRKRKL | 773 |
| Query: | 770 | EEALTAIAKKKNALTCDIDDIKENKDLIRQKTQNIHQALSQARLQERDLLNEKKFEQANQ | 829 |
| | | EE L+A+++K L DID + + K +++ L++ ++ K E+ N | |
| Sbjct: | 774 | EEELSAVSEKMKQLEEDIDRLTKQKQTQSSTKESLSNELTELKIAAAKKEQACKGEEDNL | 833 |
| Query: | 830 | SRLRTQLKQCQQNILKLESILNNNVSQDSIQRLPQWQKQLQDATEHKSGAQKRLVQLRFE | 889 |
| | | +RL+ +L + + + + + L+ S+ S +++L++A +HK + + ++L | |
| Sbjct: | 834 | ARLKKELTETELALKEAKEDLSFLTSEMSSS--TSGEEKLEEAAKHKLNDKTKTIELIAL | 891 |
| Query: | 890 | IEDYEARLEETAEKITKESEKNDTFIRRQTKL----ETHLEQVANRLRAYAKSLSEDFQM | 945 |
| | | D +L+ + +E ++ +++T L E L ++ L + L E++ + | |
| Sbjct: | 892 | RRDQRIKLQHGLDTYERELKEMKRLYKQKTTLLKDEEVKLGRMEVELDNLLQYLREEYSL | 951 |
| Query: | 946 | TLADAKEVTNSIDHLESAKEKLHHLQKTIRALGPINSDAINQYEEVHERLTFLTSQKTDL | 1005 |
| | | + AKE E A++++ ++ I LG +N +I+++E V+ER FL+ QK DL | |
| Sbjct: | 952 | SFEGAKEKYQLETDPEEARKRVKLIKLAIEELGTVNLGSIDEFERVNERYKFLSEQKEDL | 1011 |
| Query: | 1006 | TKAKNLLLETINSMDSEVKARFKVTFEAIQKSFKETFTQMFGGGSADLVLTE-TDLLSAG | 1064 |
| | | T+AKN L + I MD E+ RF TF I+ F + F +FGGG A+L LT+ DLL +G | |
| Sbjct: | 1012 | TEAKNTLFQVIEEMDEEMTKRFNDTFVQIRSHFDQVFRSLFGGGRAELRLTDPNDLLHSG | 1071 |
| Query: | 1065 | IEISVQPPGKKIQSLNLMSGGEKALSALALLFAIIRVKTIPFVILDEVEAALDEANVKRF | 1124 |
| | | +EI QPPGKK+Q+LNL+SGGE+AL+A+ALLF+I++V+ +PF +LDEVEAALDSANV RF | |
| Sbjct: | 1072 | VEIIAQPPGKKLQNLNLLSGGERALTAIALLFSILKVRPVPFCVLDEVEAALDEANVFRF | 1131 |
| Query: | 1125 | GDFLNRFDKDSQFIVVTHRKGTMAAADSIYGITMQESGVSKIVSVKLKEAQE | 1176 |
| | | +L ++ D+QFIV+THRKGTM AD +YG+TMQESGVSK++SVKL+E +E | |
| Sbjct: | 1132 | AQYLKKYSSDTQFIVITHRKGTMEEADVLYGVTMQESGVSKVISVKLEETKE | 1183 |

[2285] An alignment of the GAS and GBS proteins is shown below:

| Identities = 732/1179 (62%), Positives = 911/1179 (77%) | | | |
|---|---|---|---|
| Query: | 1 | MFLKEIEMQGFKSFADKTKVEFDQGVTAVVGPNGSGKSNITESLRWALGESSAKSLRGGK | 60 |
| | | MFLKEIE++GFKSFADKTK+EFD+GVTAVVGPNGSGKSNITESLRWALGESSAK+LRGGK | |
| Sbjct: | 1 | MFLKEIELEGFKSFADKTKIEFDKGVTAVVGPNGSGKSNITESLRWALGESSAKNLRGGK | 60 |
| Query: | 61 | MPDVIFAGTENRKPLNYAQVSVTLDNSDHFIENIADEVRVERRIFRNGDSEYLIDGRKVR | 120 |
| | | MPDVIFAGT+NR PLNYA+V+V LDNSDHFI+ E+RVER I+RNGDS+YLIDGRKVR | |
| Sbjct: | 61 | MPDVIFAGTQNRNPLNYAKVAVVLDNSDHFIKTAKKEIRVERHIYRNGDSDYLIDGRKVR | 120 |
| Query: | 121 | LRDIHDLFMDTGLGRDSFSIISQGRVEAIFNSKPEERRAIFEEAAGVLKYKTRKKETQSK | 180 |
| | | LRDIHDLFMDTGLGRDSFSIISQGRVE IFNSKPEERRAIFEEAAGVLKYKTRKKETQ K | |
| Sbjct: | 121 | LRDIHDLFMDTGLGRDSFSIISQGRVEEIFNSKPEERRAIFEEAAGVLKYKTRKKETQIK | 180 |
| Query: | 181 | LEQTQGNLDRLEDIIYELDMQVQPLEKQASIAKRFLVLDEERQGLHLSILIEDILQHQSD | 240 |
| | | L QTQ NLDRLEDIIYELD Q+ PLEKQA +AK+FL LD R+ L L IL++DI Q | |
| Sbjct: | 181 | LNQTQDNLDRLEDIIYELDTQLAPLEKQAKVAKQFLELDANRKQLQLDILVKDIDIAQER | 240 |
| Query: | 241 | LTTVEEKLLTVRKELATYYQQRQSLEDENQSLKQKRHHLSEEIEAKQLALLDVTKLKSDL | 300 |
| | | T E L ++++LA+YY +RQS+E++ Q KQK+ LS+E + Q LL++TKL +DL | |
| Sbjct: | 241 | QTKDTEALAALQQDLASYYAKRQSMEEDYQKFKQKKQVLSQESDQTQTTLLELTKLIADL | 300 |
| Query: | 301 | ERQIDLIRLESNQKAEKKEEAGQRLAELEIKAKDCSDQITQKNIELTTLSEKIAQIRSEI | 360 |
| | | E+QI+L++LES Q+AEKK EA + L +L+ + + Q +L + +++ ++ ++ | |
| Sbjct: | 301 | EKQIELVKLESGQEAEKKAEAKKHLEQLQEQLDGFQAEEKQCTEQLLHIDQQLCDVKQQL | 360 |
| Query: | 361 | VSTESSLERFSTNPDQIIEKLREDFVTLMQEEADTSNALTALLADIENQKQASQAKSQEI | 420 |
| | | ++LERFS++PDQ++E LRE+FV LMQ+EA SN LTAL A ++ +KQA Q K+QE | |
| Sbjct: | 361 | NELSNALERFSSDPDQLMETLREEFVLLMQKEAALSNQLTALKAHLDKEKQARQHKAQEY | 420 |
| Query: | 421 | QEVSKNLEVLKSNAKVALERFEAAKKNVRQLLSHYQDLGQTLQNLEGEYKNQQSILFDHL | 480 |
| | | Q + L+ L ++ A ++A K+ V LL +YQ+ + +Q LE +Y+ Q LFD L | |
| Sbjct: | 421 | QLLVTKLDQLNDESQKAQAHYKAQKEQVEMLLQNYQEGDKRVQELERDYQLNQERLFDLL | 480 |
| Query: | 481 | DEIKSKQARISSLESILKNHSNFYAGVKSVLQAKDQLGGIIGAVSEHLSFDKHYQTALEI | 540 |
| | | D+ K K+AR +SLESI K+HS FYAGV++VLQ++ +LGGIIGAVSEHLSFD YQTALE+ | |
| Sbjct: | 481 | DQKKGKEARKASLESIQKSHSQFYAGVRAVLQSQKKLGGIIGAVSEHLSFDSDYQTALEV | 540 |
| Query: | 541 | ALGGSSQHIIVEDESAAKRSIAFLKKNRQGRATFLPLTTIKPRELAQHYLSKLQSSQGFL | 600 |
| | | ALG +SQHIIV DE+AAKR+IA+LKKNRQGRATFLPLTTIK R L++HY +L + +G+L | |
| Sbjct: | 541 | ALGANSQHIIVTDEAAAKRAIAYLKKNRQGRATFLPLTTIKARSLSEHYHRQLATCEGYL | 600 |
| Query: | 601 | GIASELVTYDQRLSNIFKNNLGLTAIFDTVDNANVAARQLNYQVRLVTLDGTELRPGGSY | 660 |
| | | G A L+ YD LS I +N L TAIF+T+D AN+AAR L Y+VR+VTLDGTELRPGGS+ | |
| Sbjct: | 601 | GTAESLIRYDDSLSAIIQNLLSSTAIFETIDQANIAARLLGYKVRIVTLDGTELRPGGSF | 660 |
| Query: | 661 | SGGANRQNNTVFIKPELDNLKKELKQAQSKQLIQEKEVATLLEQLKEKQETLAQLKNDGE | 720 |
| | | SGGANRQ+NT FIKPEL+ + +EL + + I EKEVA L L K+E L QLK G+ | |
| Sbjct: | 661 | SGGANRQSNTTFIKPELEQISEELTRLVEQLKITEKEVAALQSDLIAKKEELTQLKLAGD | 720 |
| Query: | 721 | QARLEEQRADIEYQQLSEKLADLNKLYNGLQLSSGALEQTTSENEKNRLEKELEQFAIKK | 780 |
| | | QARL EQRA + YQQL EK D L L S + E+ R+E+ L A KK | |
| Sbjct: | 721 | QARLAEQRAQMAYQQLQEKQEDSKALLAALDQSQTTHSDESLLAEQARIEEALTAIAKKK | 780 |
| Query: | 781 | EELTTSIAQIKEDKDSIQEKVNNLTTLLSEAQLEERDLLNEQKFERANCTRLEITLSEIK | 840 |
| | | LT I IKE+KD I++K N+ LS+A+L+ERDLLNE+KFE+AN +RL L + + | |
| Sbjct: | 781 | NALTCDIDDIKENKDLIRQKTQNIHQALSQARLQERDLLNEKKFEQANQSRLRTQLKQCQ | 840 |
| Query: | 841 | RDISNLQTLLSHQDSQLDKEELPRIEKQLLQVNNRRENDEEKLVSLRFELEDCEAALDDL | 900 |
| | | ++I L+++L++ SQ + LP+ +KQL + +++LV LRFE+ED EA L++ | |
| Sbjct: | 841 | QNILKLESILNNNVSQDSIQRLPQWQKQLQDATEHKSGAQKRLVQLRFEIEDYEARLEET | 900 |
| Query: | 901 | AASLAKEGQKNESLIRQQAQLESQCEQLSQQLMIFSRQLSEDYQMTLDEAKVKANVLEDI | 960 |
| | | A + KE +KN++ IR+Q +LE+ EQ++ +L +++ LSED+QMTL +AK N ++ + | |
| Sbjct: | 901 | AEKITKESEKNDTFIRRQTKLETHLEQVANRLRAYAKSLSEDFQMTLADAKEVTNSIDHL | 960 |
| Query: | 961 | LMAREQLKSLQAKIKALGPVNIDAIAQFEEVHERLTFLNTQRDDLVHAKNLLLETITDMD | 1020 |
| | | A+E+L LQ I+ALGP+N DAI Q+EEVHERLTFL +Q+ DL AKNLLLETI MD | |
| Sbjct: | 961 | ESAKEKLHHLQKTIRALGPINSDAINQYEEVHERLTFLTSQKTDLTKAKNLLLETINSMD | 1020 |
| Query: | 1021 | DEVKTRFKSTFEAIRHSFKETFVQMFGGGSADLILTEGDLLSAGVDISVQPPGKKIQSLN | 1080 |
| | | EVK RFK TFEAI+ SFKETF QMFGGGSADL+LTE DLLSAG++ISVQPPGKKIQSLN | |
| Sbjct: | 1021 | SEVKARFKVTFEAIQKSFKETFTQMFGGGSADLVLTETDLLSAGIEISVQPPGKKIQSLN | 1080 |
| Query: | 1081 | LMSGGEKALSALALLFAIIRVKTIPFVILDEVEAALDEANVKRFGDYLNRFDKSSQFIVV | 1140 |
| | | LMSGGEKALSALALLFAIIRVKTIPFVILDEVEAALDEANVKRFGD+LNRFDK SQFIVV | |
| Sbjct: | 1081 | LMSGGEKALSALALLFAIIRVKTIPFVILDEVEAALDEANVKRFGDFLNRFDKDSQFIVV | 1140 |
| Query: | 1141 | THRKGTMSAADSIYGVTMQESGVSKIVSVKLKEAQEMTN | 1179 |
| | | THRKGTM+AADSIYG+TMQESGVSKIVSVKLKEAQEMTN | |
| Sbjct: | 1141 | THRKGTMAAADSIYGITMQESGVSKIVSVKLKEAQEMTN | 1179 |

[2286] SEQ ID 1162 (GBS199) was expressed in E. coli as a GST-fusion product. SDS-PAGE analysis of total cell extract is shown in FIG. 52 (lane 2; MW 75 kDa).

[2287] GBS199-GST was purified as shown in FIG. 208, lane 3.

[2288] Based on this analysis, it was predicted that these proteins and their epitopes could be useful antigens for vaccines or diagnostics.

### EXAMPLE 359

[2289] A DNA sequence (GBSx0390) was identified in S. agalactiae <SEQ ID 1165> which encodes the amino acid sequence <SEQ ID 1166>. This protein is predicted to be ribonuclease III (rnc). Analysis of this protein sequence reveals the following:

```
Possible site: 46
>>> Seems to have no N-terminal signal sequence
----- Final Results -----
                            bacterial cytoplasm --- Certainty = 0.3372(Affirmative) < succ>
                              bacterial membrane --- Certainty = 0.0000(Not Clear) < succ>
                                bacterial outside --- Certainty = 0.0000(Not Clear) < succ>
```

[2290] A related GBS nucleic acid sequence <SEQ ID 9711> which encodes amino acid sequence <SEQ ID 9712> was also identified.

[2291] The protein has homology with the following sequences in the GENPEPT database:

| >GP: CAB13466 GB: Z99112 ribonuclease III [Bacillus subtilis] | | | |
|---|---|---|---|
| Identities = 115/230 (50%), Positives = 154/230 (66%), Gaps = 1/230 (0%) | | | |
| Query: | 13 | KKMKELRSKLEKDYGIVFANQELLDTAFTHTSYANEHRLLNISHNERLEFLGDAVLQLLI | 72 |
| | | KK+++ + E+ + F N++LL AFTH+SY NEHR NERLEFLGDAVL+L I | |
| Sbjct: | 15 | KKVEQFKEFQER-ISVHFQNEKLLYQAFTHSSYVNEHRKKPYEDNERLEFLGDAVLELTI | 73 |
| Query: | 73 | SQYLFTKYPQKAEGDLSKLRSMIVREESLAGFSRLCGFDHYIKLGKGEEKSGGRNRDTIL | 132 |
| | | S++LF KYP +EGDL+KLR+ IV E SL + F + LGKGEE +GGR R +L | |
| Sbjct: | 74 | SRFLFAKYPAMSEGDLTKLRAAIVCEPSLVSLAHELSFGDLVLLGKGEEMTGGRKRPALL | 133 |
| Query: | 133 | GDLFEAFLGALLLDKGVEVVHAFVNKVMIPHVEKGTYERVKDYKTSLQELLQSHGDVKID | 192 |
| | | D+FEAF+GAL LD+G+E V +F+ + P + G + V D+K+ LQE +Q G ++ | |
| Sbjct: | 134 | ADVFEAFIGALYLDQGLEPVESFLKVYVFPKINDGAFSHVMDFKSQLQEYVQRDGKGSLE | 193 |
| Query: | 193 | YQVTNESGPAHAKEFEVTVSVNQENLSQGIGRSKKAAEQDAAKNALATLQ | 242 |
| | | Y+++NE GPAH +EFE VS+ E L G GRSKK AEQ AA+ ALA LQ | |
| Sbjct: | 194 | YKISNEKGPAHNREFEAIVSLKGEPLGVGNGRSKKEAEQHAAQEALAKLQ | 243 |

[2292] A related DNA sequence was identified in S. pyogenes <SEQ ID 1167> which encodes the amino acid sequence <SEQ ID 1168>. Analysis of this protein sequence reveals the following:

```
Possible site: 32
>>> Seems to have no N-terminal signal sequence
----- Final Results -----
                            bacterial cytoplasm --- Certainty = 0.1414(Affirmative) < succ>
                              bacterial membrane --- Certainty = 0.0000(Not Clear) < succ>
                                bacterial outside --- Certainty = 0.0000(Not Clear) < succ>
```

[2293] An alignment of the GAS and GBS proteins is shown below:

| Identities = 170/227 (74%), Positives = 192/227 (83%) | | | |
|---|---|---|---|
| Query: | 15 | MKELRSKLEKDYGIVFANQELLDTAFTHTSYANEHRLLNISHNERLEFLGDAVLQLLISQ | 74 |
| | | MK+L L + I F + LL+TAFTHTSYANEHRLLN+SHNERLEFLGDAVLQL+IS+ | |
| Sbjct: | 1 | MKQLEELLSTSFDIQFNDLTLLETAFTHTSYANEHRLLNVSHNERLEFLGDAVLQLIISE | 60 |
| Query: | 75 | YLFTKYPQKAEGDLSKLRSMIVREESLAGFSRLCGFDHYIKLGKGEEKSGGRNRDTILGD | 134 |
| | | YLF KYP+K EGD+SKLRSMIVREESLAGFSR C FD YIKLGKGEEKSGGR RDTILGD | |
| Sbjct: | 61 | YLFAKYPKKTEGDMSKLRSMIVREESLAGFSRFCSFDAYIKLGKGEEKSGGRRRDTILGD | 120 |
| Query: | 135 | LFEAFLGALLLDKGVEVVHAFVNKVMIPHVEKGTYERVKDYKTSLQELLQSHGDVKIDYQ | 194 |
| | | LFEAFLGALLLDKG++ V F+ +VMIP VEKG +ERVKDYKT LQE LQ+ GDV IDYQ | |
| Sbjct: | 121 | LFEAFLGALLLDKGIDAVRRFLKQVMIPQVEKGNFERVKDYKTCLQEFLQTKGDVAIDYQ | 180 |
| Query: | 195 | VTNESGPAHAKEFEVTVSVNQENLSQGIGRSKKAAEQDAAKNALATL | 241 |
| | | V +E GPAHAK+FEV++ VN LS+G+G+SKK AEQDAAKNALA L | |
| Sbjct: | 181 | VISEKGPAHAKQFEVSIVVNGAVLSKGLGKSKKLAEQDAAKNALAQL | 227 |

[2294] Based on this analysis, it was predicted that these proteins and their epitopes could be useful antigens for vaccines or diagnostics.

### EXAMPLE 360

[2295] A DNA sequence (GBSx0391) was identified in S. agalactiae <SEQ ID 1169> which encodes the amino acid sequence <SEQ ID 1170>. Analysis of this protein sequence reveals the following:

| Possible site: 43 | | | | |
|---|---|---|---|---|
| >>> Seems to have a cleavable N-term signal seq. | | | | |
| | INTEGRAL | Likelihood = −4.19 | Transmembrane | 100-116 (99-117) |
| | INTEGRAL | Likelihood = −2.44 | Transmembrane | 81-97 (81-97) |

```
----- Final Results -----
                              bacterial membrane --- Certainty = 0.2678(Affirmative) < succ>
                                bacterial outside --- Certainty = 0.0000(Not Clear) < succ>
                            bacterial cytoplasm --- Certainty = 0.0000(Not Clear) < succ>
```

[2296] The protein has homology with the following sequences in the GENPEPT database:

| >GP: CAC12789 GB: AJ279090 hypothetical protein [Staphylococcus | | | |
|---|---|---|---|
| carnosus] | | | |
| Identities = 50/114 (43%), Positives = 72/114 (62%) | | | |
| Query: | 3 | KIFYISLGFISLGIGIAGIVLPVVPTTPLVLLSAFCFSRSSEKFDIWLRQTKVYKYYAAD | 62 |
| | | K ++LG I GIG GIV+P++PTTP +LL+A CFSRSS+KF+ WL TK++ Y | |
| Sbjct: | 2 | KYVLMTLGLIFAGIGFVGIVVPLLPTTPFLLLAAICFSRSSKKFNRWLVNTKIHDEYVES | 61 |
| Query: | 63 | FVESRSIAPARKKSMIWQIYILMGISIYFAPLMWLKLGLLIGTIVGTYVLFYVV | 116 |
| | | F + +K ++ +YILMGISI+ +++++ LLI V T VLF V | |
| Sbjct: | 62 | FKRDKGFTLKKKFKLLTSLYILMGISIFIIDNLYIRITLLIMLFVQTVVLFTFV | 115 |

[2297] No corresponding DNA sequence was identified in S. pyogenes.

[2298] Based on this analysis, it was predicted that this protein and its epitopes, could be useful antigens for vaccines or diagnostics.

### EXAMPLE 361

[2299] A DNA sequence (GBSx0392) was identified in S. agalactiae <SEQ ID 1171> which encodes the amino acid sequence <SEQ ID 1172>. Analysis of this protein sequence reveals the following:

```
Possible site: 45
>>> Seems to have no N-terminal signal sequence
----- Final Results -----
                            bacterial cytoplasm --- Certainty = 0.1908(Affirmative) < succ>
                              bacterial membrane --- Certainty = 0.0000(Not Clear) < succ>
                                bacterial outside --- Certainty = 0.0000(Not Clear) < succ>
```

[2300] A related DNA sequence was identified in S. pyogenes <SEQ ID 1173> which encodes the amino acid sequence <SEQ ID 1174>. Analysis of this protein sequence reveals the following:

```
Possible site: 45
>>> Seems to have no N-terminal signal sequence
----- Final Results -----
                            bacterial cytoplasm --- Certainty = 0.1610(Affirmative) < succ>
                              bacterial membrane --- Certainty = 0.0000(Not Clear) < succ>
                                bacterial outside --- Certainty = 0.0000(Not Clear) < succ>
```

[2301] An alignment of the GAS and GBS proteins is shown below:

| Identities = 225/269 (83%), Positives = 248/269 (91%) | | | |
|---|---|---|---|
| Query: | 1 | MSEIGFKYSILASGSTGNCFYIETPQKRLLIDAGLTGKKVTSLLAEINRKPEDLDAILVT | 60 |
| | | M+E GFKYSILASGSTGNCFY+ETP+KRLLIDAGLTGKK+TSLLAEI+RKPEDLDAIL+T | |
| Sbjct: | 1 | MNESGFKYSILASGSTGNCFYLETPKKRLLIDAGLTGKKITSLLAEIDRKPEDLDAILIT | 60 |
| Query: | 61 | HEHSDHIKGVGVLARKYHLDIYANEQTWKVMDERNMLGKVDVSQKHVFGRGKTLTFGDLD | 120 |
| | | HEHSDHIKGVGV+ARKYHLDIYANE+TW++MDE NMLGK+D SQKH+F R K LTFGD+D | |
| Sbjct: | 61 | HEHSDHIKGVGVMARKYHLDIYANEKTWQLMDECNMLGKLDASQKHIFQRDKVLTFGDVD | 120 |
| Query: | 121 | IESFGVSHDAVDPQFYRMMKDDKSFVMLTDTGYVSDRMAGLIENADGYLIESNHDIEILR | 180 |
| | | IESFGVSHDA+DPQFYR+MKD+KSFVMLTDTGYVSDRM G+IENADGYLIESNHDIEILR | |
| Sbjct: | 121 | IESFGVSHDAIDPQFYRIMKDNKSFVMLTDTGYVSDRMTGIIENADGYLIESNHDIEILR | 180 |
| Query: | 181 | SGSYPWTLKQRILSDKGHLSNEDGSETMIRTIGNRTKHIYLGHLSKENNIKELAHMTMEN | 240 |
| | | SGSYPW+LKQRILSD GHLSNEDG+ MIR++G TK IYLGHLSKENNIKELAHMTM N | |
| Sbjct: | 181 | SGSYPWSLKQRILSDLGHLSNEDGAGAMIRSLGYNTKKIYLGHLSKENNIKELAHMTMVN | 240 |
| Query: | 241 | NLMRADFGVGTDFSVHDTSPDSATPLTRI | 269 |
| | | L AD VGTDF+VHDTSPD+A PLT I | |
| Sbjct: | 241 | QLAMADLAVGTDFTVHDTSPDTACPLTDI | 269 |

[2302] Based on this analysis, it was predicted that these proteins and their epitopes could be useful antigens for vaccines or diagnostics.

### EXAMPLE 362

[2303] A DNA sequence (GBSx0393) was identified in S. agalactiae <SEQ ID 1175> which encodes the amino acid sequence <SEQ ID 1176>. Analysis of this protein sequence reveals the following:

| Possible site: 26 | | | | |
|---|---|---|---|---|
| >>> Seems to have an uncleavable N-term signal seq | | | | |
| | INTEGRAL | Likelihood = −11.94 | Transmembrane | 15-31 (5-34) |

```
----- Final Results -----
                              bacterial membrane --- Certainty = 0.5776(Affirmative) < succ>
                                bacterial outside --- Certainty = 0.0000(Not Clear) < succ>
                            bacterial cytoplasm --- Certainty = 0.0000(Not Clear) < succ>
```

[2304] A related DNA sequence was identified in S. pyogenes <SEQ ID 1177> which encodes the amino acid sequence <SEQ ID 1178>. Analysis of this protein sequence reveals the following:

```
Possible site: 26
>>> Seems to have a cleavable N-term signal seq.
----- Final Results -----
                                bacterial outside --- Certainty = 0.3000(Affirmative) < succ>
                              bacterial membrane --- Certainty = 0.0000(Not Clear) < succ>
                            bacterial cytoplasm --- Certainty = 0.0000(Not Clear) < succ>
```

[2305] An alignment of the GAS and GBS proteins is shown below:

| Identities = 335/443 (75%), Positives = 392/443 (87%) | | | |
|---|---|---|---|
| Query: | 7 | NIRSFELALLFLLVFVAVYFVYLAVRDFKMSKNIRLLNWKVRDLIAGNYSDSILIQGDAD | 66 |
| | | N+ +FELA+L LLVFVA YF++LAVRD++ ++ IR+++ K+RDLI G Y+D I + D + | |
| Sbjct: | 8 | NLSTFELAILILLVFVAFYFIHLAVRDYRNARIIRMMSHKIRDLINGRYTDIIDEKADIE | 67 |
| Query: | 67 | LVELGESLNDLSDVFRMAHDNLEQEKNRLASILTYMTDGVLATDRSGKIVMINETAQQQF | 126 |
| | | L+EL + LNDLSDVFR+ H+NL QEKNRLASIL YM+DGVLATDRSGKI+MINETA++Q | |
| Sbjct: | 68 | LMELSDQLNDLSDVFRLTHENLAQEKNRLASILAYMSDGVLATDRSGKIIMINETARKQL | 127 |
| Query: | 127 | NLAYDEALSMNIVDMLGSGSPYSFQDLVSKTPEVVLNRRDENGEFVTLRIRFALNRRESG | 186 |
| | | NL+ +EAL NI D+L + Y+++DLVSKTP V +N R++ GEFV+LR+RFALNRRESG | |
| Sbjct: | 128 | NLSKEEALKKNITDLLEGDTSYTYRDLVSKTPVVTVNSRNDMGEFVSLRLRFALNRRESG | 187 |
| Query: | 187 | FISGLVAVSHDATEQEKEERERRLFVSNVSHELRTPLTSVKSYLEALDEGALNEEVAPSF | 246 |
| | | FISGLV V HD TEQEKEERERRLFVSNVSHELRTPLTSVKSYLEALDEGAL E++APSF | |
| Sbjct: | 188 | FISGLVVVLHDTTEQEKEERERRLFVSNVSHELRTPLTSVKSYLEALDEGALKEDIAPSF | 247 |
| Query: | 247 | IKVSLDETNRMMRMISDLLSLSRIDNEVTHLDVEMTNFTAFMTSILNRFDQIRNQKTVTG | 306 |
| | | IKVSLDETNRMMRMISDLL+LSRIDN+VT L VEMTNFTAF+TSILNRFD ++NQ T TG | |
| Sbjct: | 248 | IKVSLDETNRMMRMISDLLNLSRIDNQVTQLAVEMTNFTAFITSILNRFDLVKNQHTGTG | 307 |
| Query: | 307 | KVYEIVRDYPLKSIWVEIDTDKMTQVIDNILNNAVKYSPDGGKITVNLRTTKTQMILSIS | 366 |
| | | KVYEIVRDYP+ S+W+EID DKMTQVI+NILNNA+KYSPDGGKITV ++TT TQ+I+SIS | |
| Sbjct: | 308 | KVYEIVRDYPITSVWIEIDNDKMTQVIENILNNAIKYSPDGGKITVRMKTTDTQLIISIS | 367 |
| Query: | 367 | DQGLGIPKKDLPLIFDRFYRVDKARSRKQGGTGLGLSIAKEIVKQHKGFIWAKSEYGKGS | 426 |
| | | DQGLGIPK DLPLIFDRFYRVDKARSR QGGTGLGL+IAKEI+KQH GFIWAKS+YGKGS | |
| Sbjct: | 368 | DQGLGIPKTDLPLIFDRFYRVDKARSRAQGGTGLGLAIAKEIIKQHHGFIWAKSDYGKGS | 427 |
| Query: | 427 | TFTIVLPYDKDAVTYEEWEDVED | 449 |
| | | TFTIVLPY+KDA YEEWE+ D | |
| Sbjct: | 428 | TFTIVLPYEKDAAIYEEWEEDVD | 450 |

[2306] A related GBS gene <SEQ ID 8561> and protein <SEQ ID 8562> were also identified. Analysis of this protein sequence reveals the following:

| Lipop: Possible site: −1 Crend: 8 | | | | |
|---|---|---|---|---|
| McG: Discrim Score: 8.59 | | | | |
| GvH: Signal Score (−7.5): −3.38 | | | | |
| Possible site: 26 | | | | |
| >>> Seems to have an uncleavable N-term signal seq | | | | |
| ALOM program count: 1 value: −11.94 threshold: 0.0 | | | | |
| | INTEGRAL | Likelihood = −11.94 | Transmembrane | 15-31 (5-34) |
| | PERIPHERAL | Likelihood = 8.27 | 178 | |

```
modified ALOM score: 2.89
*** Reasoning Step: 3
----- Final Results -----
                              bacterial membrane --- Certainty = 0.5776(Affirmative) < succ>
                                bacterial outside --- Certainty = 0.0000(Not Clear) < succ>
                            bacterial cytoplasm --- Certainty = 0.0000(Not Clear) < succ>
```

[2307] The protein has homology with the following sequences in the databases:

[chemical structure]

[2308] SEQ ID 1176 (GBS41) was expressed in E. coli as a His-fusion product. SDS-PAGE analysis of total cell extract is shown in FIG. 4 (lane 7; MW 50 kDa), in FIG. 168 (lane 24; MW 65 kDa—thioredoxin fusion) and in FIG. 238 (lane 4; MW 65 kDa). It was also expressed in E. coli as a GST-fusion product. SDS-PAGE analysis of total cell extract is shown in FIG. 13 (lane 7; MW 75 kDa).

[2309] Purified Thio-GBS41-His is shown in FIG. 244, lane 10.

[2310] Based on this analysis, it was predicted that these proteins and their epitopes could be useful antigens for vaccines or diagnostics.

### EXAMPLE 363

[2311] A DNA sequence (GBSx0394) was identified in S. agalactiae <SEQ ID 1179> which encodes the amino acid sequence <SEQ ID 1180>. This protein is predicted to be VicR protein (regX3). Analysis of this protein sequence reveals the following:

```
Possible site: 60
>>> Seems to have no N-terminal signal sequence
----- Final Results -----
                            bacterial cytoplasm --- Certainty = 0.2754(Affirmative) < succ>
                              bacterial membrane --- Certainty = 0.0000(Not Clear) < succ>
                                bacterial outside --- Certainty = 0.0000(Not Clear) < succ>
```

[2312] A related DNA sequence was identified in S. pyogenes <SEQ ID 1181> which encodes the amino acid sequence <SEQ ID 1182>. Analysis of this protein sequence reveals the following:

```
Possible site: 60
>>> Seems to have no N-terminal signal sequence
----- Final Results -----
                            bacterial cytoplasm --- Certainty = 0.2754(Affirmative) < succ>
                              bacterial membrane --- Certainty = 0.0000(Not Clear) < succ>
                                bacterial outside --- Certainty = 0.0000(Not Clear) < succ>
```

[2313] An alignment of the GAS and GBS proteins is shown below:

| Identities = 205/236 (86%), Positives = 221/236 (92%) | | | |
|---|---|---|---|
| Query: | 1 | MKKILIVDDEKPISDIIKFNLTKEGYETATAFDGREALVQYAEFQPDLIILDLMLPELDG | 60 |
| | | MKKILIVDDEKPISDIIKFNLTKEGY+ TAFDGREA+ + E +PDLIILDLMLPELDG | |
| Sbjct: | 1 | MKKILIVDDEKPISDIIKFNLTKEGYDIVTAFDGREAVTIFEEEKPDLIILDLMLPELDG | 60 |
| Query: | 61 | LEVAKEVRKTSHIPIIMLSAKDSEFDKVIGLEIGADDYVTKPFSNRELLARVKAHLRRTE | 120 |
| | | LEVAKE+RKTSH+PIIMLSAKDSEFDKVIGLEIGADDYVTKPFSNRELLARVKAHLRRTE | |
| Sbjct: | 61 | LEVAKEIRKTSHVPIIMLSAKDSEFDKVIGLEIGADDYVTKPWSNRELLARVKAHLRRTE | 120 |
| Query: | 121 | NIETAVAEESAQNASSDITIGELQILPDAFIAKKRGEEIELTHREFELLHHLATHIGQVM | 180 |
| | | IETAVAEE+A + + ++TIG LQILPDAF+AKK G+E+ELTHREFELLHHLA H+GQVM | |
| Sbjct: | 121 | TIETAVAEENASSGTQELTIGNLQILPDAFVAKKHGQEVELTHREFELLHHLANHMGQVM | 180 |
| Query: | 181 | TREHLLETVWGYDYFGDVRTVDVTVRRLREKIEDTPGRPEYILTRRGVGYYMKSYE | 236 |
| | | TREHLLE VWGYDYFGDVRTVDVTVRRLREKIEDTP RPEYILTRRGVGYYMKSY+ | |
| Sbjct: | 181 | TREHLLEIVWGYDYFGDVRTVDVTVRRLREKIEDTPSRFEYILTRRGVGYYMKSYD | 236 |

[2314] Based on this analysis, it was predicted that these proteins and their epitopes could be useful antigens for vaccines or diagnostics.

### EXAMPLE 364

[2315] A DNA sequence (GBSx0395) was identified in S. agalactiae <SEQ ID 1183> which encodes the amino acid sequence <SEQ ID 1184>. This protein is predicted to be amino acid ABC transporter, ATP-binding protein. Analysis of this protein sequence reveals the following:

```
Possible site: 43
>>> Seems to have no N-terminal signal sequence
----- Final Results -----
                            bacterial cytoplasm --- Certainty = 0.3791(Affirmative) < succ>
                              bacterial membrane --- Certainty = 0.0000(Not Clear) < succ>
                                bacterial outside --- Certainty = 0.0000(Not Clear) < succ>
```

[2316] The protein has homology with the following sequences in the GENPEPT database:

| >GP: CAB14701 GB: Z99118 glutamine ABC transporter (ATP-binding | | | |
|---|---|---|---|
| protein) [Bacillus subtilis] | | | |
| Identities = 149/244 (61%), Positives = 200/244 (81%), Gaps = 2/244 (0%) | | | |
| Query: | 3 | LISYKNVNKYYGDYHALRQINLEIEPGQVVVLLGPSGSGKSTLIRTMNALESIDDGSLVV | 62 |
| | | +I+++NVNK+YGD+H L+QINL+IE G+VVV++GPSGSGKSTL+R +N LESI++G L V | |
| Sbjct: | 1 | MITFQNVNKHYGDFHVLRQINLQIEKGEVVVIIGPSGSGKSTLLRCINRLESINEGVLTV | 60 |
| Query: | 63 | NGHELANISSKELVNLRKEVGMVFQHFNLYPHKTVLENITLAPIKVLKQSKKEAMEIASK | 122 |
| | | NG + N ++ +R+ +GMVFQHF+LYPHKTVL+NI LAP+KVL+QS ++A E A | |
| Sbjct: | 61 | NGTAI-NDRKTDINQVRQNIGMVFQHFHLYPHKTVLQNIMLAPVKVLRQSPEQAKETARY | 119 |
| Query: | 123 | YLKFVNMWERKDSYPSMLSGGQKQRIAIARGLAMHPKLLLFDEPTSALDPETIGDVLSVM | 182 |
| | | YL+ V + ++ D+YPS LSGGQ+QR+AIARGLAM P+++LFDEPTSALDPE IG+VL VM | |
| Sbjct: | 120 | YLEKVGIPDKADAYPSQLSGGQQQRVAIARGLAMKPEVMLFDEPTSALDPEMIGEVLDVM | 179 |
| Query: | 183 | QKLANDGMNMVVVTHEMGFAREVADRIIFMADGEILVDTTDVQDFFDNPREPRAKQFLSN | 242 |
| | | + LA +GM MVVVTHEMGFA+EVADRI+F+ +G+IL + +F+ NP+E RA+ FLS | |
| Sbjct: | 180 | KTLAKEGMTMVVVTHEMGFAKEVADRIVFIDEGKILEEAVPA-EFYANPKEERARLFLSR | 238 |
| Query: | 243 | IINH | 246 |
| | | I+NH | |
| Sbjct: | 239 | ILNH | 242 |

[2317] A related DNA sequence was identified in S. pyogenes <SEQ ID 1185> which encodes the amino acid sequence <SEQ ID 1186>. Analysis of this protein sequence reveals the following:

```
Possible site: 51
>>> Seems to have no N-terminal signal sequence
----- Final Results -----
                            bacterial cytoplasm --- Certainty = 0.3763(Affirmative) < succ>
                              bacterial membrane --- Certainty = 0.0000(Not Clear) < succ>
                                bacterial outside --- Certainty = 0.0000(Not Clear) < succ>
```

[2318] An alignment of the GAS and GBS proteins is shown below:

| Identities = 131/243 (53%), Positives = 179/243 (72%), Gaps = 2/243 (0%) | | | |
|---|---|---|---|
| Query: | 2 | SLISYKNVNKYYGDYHALRQINLEIEPGQVVVLLGPSGSGKSTLIRTMNALESIDDGSLV | 61 |
| | | ++IS K+++KYYG L+ I+L+I PG+VVV++GPSGSGKSTL+RTMN LE G + | |
| Sbjct: | 5 | AIISIKDLHKYYGHNEVLKGIDLDIMPGEVVVIIGPSGSGKSTLLRTMNLLEVPTKGQIR | 64 |
| Query: | 62 | VNGHELANISSKELVNLRKEVGMVFQHFNLYPHKTVLENITLAPIKVLKQSKKEAMEIAE | 121 |
| | | G ++ + ++ ++R+++GMVFQ FNL+P+ T+LENITL+PIK +K EA + A | |
| Sbjct: | 65 | FEGIDITD-KKNDIFSMREKMGMVFQQFNLFPNMTILENITLSPIKTKGMAKAEADKTAL | 123 |
| Query: | 122 | KYLKFVNMWERKDSYPSMLSGGQKQRIAIARGLAMHPKLLLFDEPTSALDPETIGDVLSV | 181 |
| | | L V + E+ +YP+ LSGGQ+QRIAIARGLAM P +LLFDEPTSALDPE +G+VL+V | |
| Sbjct: | 124 | SLLDKVGLSEKAKAYPASLSGGQQQRIAIARGLAMDPDVLLFDEPTSALDPEMVGEVLAV | 183 |
| Query: | 182 | MQKLANDGMNMVVVTHEMGFAREVADRIIFMADGEILVDTTDVQDFFDNPREPRAKQFLS | 241 |
| | | MQ LA GM MV+VTHEMGFA+EVADR++FM DG ++V+ FD +E R K FLS | |
| Sbjct: | 184 | MQDLAKSGMTMVIVTHEMGFAKEVADRVMFM-DGGVIVEEGSPNQLFDLTKEERTKDFLS | 242 |
| Query: | 242 | NII | 244 |
| | | ++ | |
| Sbjct: | 243 | RVL | 245 |

[2319] Based on this analysis, it was predicted that these proteins and their epitopes could be useful antigens for vaccines or diagnostics.

### EXAMPLE 365

[2320] A DNA sequence (GBSx0396) was identified in S. agalactiae <SEQ ID 1187> which encodes the amino acid sequence <SEQ ID 1188>. This protein is predicted to be glutamine-binding. Analysis of this protein sequence reveals the following:

```
Possible site: 27
>>> Seems to have a cleavable N-term signal seq.
----- Final Results -----
                              bacterial outside --- Certainty = 0.3000(Affirmative) < succ>
                            bacterial membrane --- Certainty = 0.0000(Not Clear) < succ>
                          bacterial cytoplasm --- Certainty = 0.0000(Not Clear) < succ>
```

[2321] The protein has homology with the following sequences in the GENPEPT database:

| >GP: CAB73178 GB: AL139076 probable ABC-type aminoacid transporter | | | |
|---|---|---|---|
| periplasmic solute-binding protein [Campylobacter jejuni] | | | |
| Identities = 99/240 (41%), Positives = 141/240 (58%), Gaps = 3/240 (1%) | | | |
| Query: | 1 | MLRRKRLTFYLLSCIFIFLLFYPNSTSANQLSEIKKSGVLKVGVKQDVPNFGYYNAETNQ | 60 |
| | | M+ RK L + + + F + + +L IK G L VGVK DVP++ + T + | |
| Sbjct: | 1 | MVFRKSLLKLAVFALGACVAFSNANAAEGKLESIKSKGQLIVGVKNDVPHYALLDQATGE | 60 |
| Query: | 61 | YEGMEIDIAKKIAKSL---GVKPVFVPTTAQTREPLMDNGQIDILIATYTITPERKANYN | 117 |
| | | +G E+D+AK +AKS+ K V A+TR PL+DNG +D +IAT+TITPERK YN | |
| Sbjct: | 61 | IKGFEVDVAKLLAKSILGDDKKIKLVAVNAKTRGPLLDNGSVDAVIATFTITPERKRIYN | 120 |
| Query: | 118 | ISKAYYHDEIGFLVRKNSHIKTIKELDGKHIGVAQGATTKVNLEKYAKEHKLKFSYAQLG | 177 |
| | | S+ YY D IG LV K K++ ++ G +IGVAQ ATTK + + AK+ + +++ | |
| Sbjct: | 121 | FSEPYYQDAIGLLVLKEKKYKSLADMKGANIGVAQAATTKKAIGEAAKKIGIDVKFSEFP | 180 |
| Query: | 178 | SFPELAISLYANRIDAFSVDKSILSGYLSPHTTILKEGFNTQEYGIATSKQDKVLIPYVN | 237 |
| | | +P + +L A R+DAFSVDKSIL GY+ + IL + F Q YGI T K D YV+ | |
| Sbjct: | 181 | DYPSIKAALDAKRVDAFSVDKSILLGYVDDKSEILPDSFEPQSYGIVTKKDDPAFAKYVD | 240 |

[2322] A related DNA sequence was identified in S. pyogenes <SEQ ID 1189> which encodes the amino acid sequence <SEQ ID 1190>. Analysis of this protein sequence reveals the following:

| Possible site: 30 | | | | |
|---|---|---|---|---|
| >>> Seems to have no N-terminal signal sequence | | | | |
| | INTEGRAL | Likelihood = 6.16 | Transmembrane | 17-33 (15-35) |

```
----- Final Results -----
                              bacterial membrane --- Certainty = 0.3463(Affirmative) < succ>
                                bacterial outside --- Certainty = 0.0000(Not Clear) < succ>
                            bacterial cytoplasm --- Certainty = 0.0000(Not Clear) < succ>
```

[2323] A related sequence was also identified in GAS <SEQ ID 9097> which encodes the amino acid sequence <SEQ ID 9098>. Analysis of this protein sequence reveals the following:

```
>>> May be a lipoprotein
----- Final Results -----
                              bacterial membrane --- Certainty = 0.000(Not Clear) < succ>
                                bacterial outside --- Certainty = 0.000(Not Clear) < succ>
                            bacterial cytoplasm --- Certainty = 0.000(Not Clear) < succ>
```

[2324] An alignment of the GAS and GBS proteins is shown below:

| Identities = 66/251 (26%), Positives = 111/251 (43%), | | | |
|---|---|---|---|
| Gaps = 27/251 (10%) | | | |
| Query: | 23 | PNSTSANQLSEIKKSGVLKVGVKQDVPNFGYYNAETNQYEGMEIDIAKKIAKSLGVKPVF | 82 |
| | | P+ + + IK+ GVLKV +YN + N+ G E+D+ K+I K L +K F | |
| Sbjct: | 34 | PHQSQKSSWDTIKEKGVLKVATPGTYQPTSFYN-DNNELVGYEVDMVKEIGKRLNIKVKF | 92 |
| Query: | 83 | VPTTAQTREPLMDNGQIDILIATYTITPERKANYNISKAYYHDEIGFLVR----KNSHIK | 138 |
| | | V T +D+G++DI + + ITP+R+ YNIS Y + G +VR N K | |
| Sbjct: | 93 | VETGFDQAFTSVDSGRVDISLNNFDITPKRQKKYNISTPYKYGVGGMIVRADGSSNIAKK | 152 |
| Query: | 139 | TIKELDGKHIGVAQGATTKVNLEKYAKEHKLKFSYAQLGSFPELAISLYANRI------- | 191 |
| | | + + GK A G +K A+L ++ + +Y N + | |
| Sbjct: | 153 | DLSDWKGKKAAGASGTEYMKVAQKQG---------AELVTYDNVTGDVYLNDVANGRTDF | 203 |
| Query: | 192 | --DAFSVDKSILSGYLSPHTTILKE----GFNTQEYGIATSKQDKVLIPYVNKLLVSWEK | 245 |
| | | + + K + LS + + + +N E GI +K+D L ++ ++ K | |
| Sbjct: | 204 | IPNDYPAQKLFVDYMLSQNPNLNVKMSDVQYNPTEQGIVMNKKDDSLKKKIDAVIKDMIK | 263 |
| Query: | 246 | DGSLKHIYQKF | 256 |
| | | DGSLK I + + | |
| Sbjct: | 264 | DGSLKKISETY | 274 |

[2325] SEQ ID 1188 (GBS136) was expressed in E. coli as a His-fusion product. SDS-PAGE analysis of total cell extract is shown in FIG. 29 (lane 5; MW 29.9 kDa).

[2326] The GBS136-His fusion product was purified (FIG. 200, lane 6) and used to immunise mice. The resulting antiserum was used for FACS (FIG. 284), which confirmed that the protein is immunoaccessible on GBS bacteria.

[2327] Based on this analysis, it was predicted that these proteins and their epitopes could be useful antigens for vaccines or diagnostics.

### EXAMPLE 366

[2328] A DNA sequence (GBSx0397) was identified in S. agalactiae <SEQ ID 1191> which encodes the amino acid sequence <SEQ ID 1192>. This protein is predicted to be integral membrane. Analysis of this protein sequence reveals the following:

| Possible site: 55 | | | | |
|---|---|---|---|---|
| >>> Seems to have no N-terminal signal sequence | | | | |
| | INTEGRAL | Likelihood = −9.34 | Transmembrane | 32-48 (27-55) |
| | INTEGRAL | Likelihood = −5.04 | Transmembrane | 200-216 (196-219) |
| | INTEGRAL | Likelihood = −3.13 | Transmembrane | 93-109 (93-113) |
| | INTEGRAL | Likelihood = −2.02 | Transmembrane | 74-90 (74-92) |

```
----- Final Results -----
                              bacterial membrane --- Certainty = 0.4736(Affirmative) < succ>
                                bacterial outside --- Certainty = 0.0000(Not Clear) < succ>
                            bacterial cytoplasm --- Certainty = 0.0000(Not Clear) < succ>
```

[2329] The protein has homology with the following sequences in the GENPEPT database:

| >GP: CAB73177 GB: AL139076 putative ABC-type amino-acid transporter | | | |
|---|---|---|---|
| permease protein [Campylobacter jejuni] | | | |
| Identities = 112/226 (49%), Positives = 160/226 (70%), Gaps = 3/226 (1%) | | | |
| Query: | 5 | NISPFAISRWGAFFNHFDLFFKGFLYTLGISFGALLLALILGILSGGLSTSKSKVGKLIS | 64 |
| | | +ISPFA+ ++ ++ D F GF+YTL +S ALL+A I G + G ++TS+ K+ + + | |
| Sbjct: | 25 | SISPFAVWKFLDALDNKDAFINGFIYTLEVSILALLIATIFGTIGGVMATSRFKIIRAYT | 84 |
| Query: | 65 | RIYVEVFQNTPLLVQMVFVYYGLAIISNGHVMISAFFTAVLCVGLYHGAYISEVIRSGIE | 124 |
| | | RIYVE+FQN PL++Q+ F++Y L ++ + + F VL VG YHGAY+SEV+RSGI | |
| Sbjct: | 85 | RIYVELFQNVPLVIQIFFLFYALPVLG---IRLDIFTIGVLGVGAYHGAYVSEVVRSGIL | 141 |
| Query: | 125 | AVPKGQTEAALAQGFTANQTMQLIILPQAVRTILPPMTNQVVNLIKNTSTVAIISGADIM | 184 |
| | | AVP+GQ EA+ +QGFT Q M+ II+PQ +R ILPPMTNQ+VNLIKNTS + I+ GA++M | |
| Sbjct: | 142 | AVPRGQFEASASQGFTYIQQMRYIIVPQTIRIILPPMTNQMVNLIKNTSVLLIVGGAELM | 201 |
| Query: | 185 | FVAKAWAYDTTNYIPAFAGAAIFYFVICFPLASWARKQEELNKKTY | 230 |
| | | A ++A D NY PA+ AA+ YF+IC+PLA +A+ E KK + | |
| Sbjct: | 202 | HSADSYAADYGNYAPAYIFAAVLYFIICYPLAYFAKAYENKLKKAH | 247 |

[2330] A related DNA sequence was identified in S. pyogenes <SEQ ID 1193> which encodes the amino acid sequence <SEQ ID 1194>. Analysis of this protein sequence reveals the following:

```
Possible site: 28
>>> Seems to have a cleavable N-term signal seq.
INTEGRAL Likelihood = −6.26 Transmembrane 307-323 ( 303-327)
INTEGRAL Likelihood = −5.89 Transmembrane 485-501 ( 479-502)
INTEGRAL Likelihood = −1.12 Transmembrane 375-391 ( 375-391)
----- Final Results -----
                            bacterial membrane --- Certainty = 0.3506(Affirmative) < succ>
                              bacterial outside --- Certainty = 0.0000(Not Clear) < succ>
                          bacterial cytoplasm --- Certainty = 0.0000(Not Clear) < succ>
```

[2331] The protein has homology with the following sequences in the databases:

| >GP:BAA17584 GB:D90907 glutamine binding periplasmic protein [Synechocystis sp.] | | | |
|---|---|---|---|
| Identities = 146/532 (27%), Positives = 244/532 (45%), Gaps = 59/532 (11%) | | | |
| Query: | 6 | YMKKLILSCLVALALLFGGMSRAQANQYLRVGMEAAYAPFNWTQDDASNGAVPIEGTSQY | 65 |
| | | Y L L L+A+A+ + Q + V E + PF T E T Q | |
| Sbjct: | 16 | YYLLLALGVLLAIAIPLLPAFSQVSRQTIIVATEPTFPPFEMTD----------EATGQL | 65 |
| Query: | 66 | ANGYDVQVAKKVAKAMNKELLVVKTSWTGLIPALTSGKIDMIAAGMSPTKERRNEISFSN | 125 |
| | | G+DV + + + +A + + + G+IPAL S + + ++ T ER +SFS+ | |
| Sbjct: | 66 | T-GFDVDLIQAIGEAAQVTVDIQGYPFDGIIPALQSNTVGAAISAITITPERAQSVSFSS | 124 |
| Query: | 126 | SSYTSQPVLVVTANGRYADATSLKDFSGAKVTAQQGVWHVNLLTQLKGAKLQTPMGDFSQ | 185 |
| | | + S VL + +LKD G ++ G + T + GAK+ T + | |
| Sbjct: | 125 | PYFKS--VLAIAVQDGNDTIKNLKDLEGKRLAVAIGTTGAMVATNVPGAKV-TNFDSITS | 181 |
| Query: | 186 | MRQALTSGVIDAYISERPEAMTAEAADSRLKMITLKKGFAVAESDAAIAVGMKKNDDRMA | 245 |
| | | Q L +G DA I++RP + A D+L+ + + +E IA+ + + | |
| Sbjct: | 182 | ALQELVNGNADAVINDRPVLLYA-IKDAGLRNVKISADVG-SEDYYGIAMPLAPPGE--- | 236 |
| Query: | 246 | TVNQVLEGFSQTDRMALMDDMVTKQPVEKKAEDAKASFLGQMWAIFKGN----------- | 294 |
| | | +NQ E +Q ++++ EK + FL + G | |
| Sbjct: | 237 | -INQTREVLNQ-GLFQIIENGTYNAIYEKWFGEKNPPFLPLVAPSLVGKVGTAQSLTERS | 294 |
| Query: | 295 | ------------WKQFLRGTGMTLLISMVGTITGLFIGLLIGIFRTAPKAKHKVAALGQK | 342 |
| | | ++ +G+ +T+L++ GL G + I + K | |
| Sbjct: | 295 | QANPNDNFLITLFRNLFKGSILTVLLTAFSVFFGLIGGTGVAIALISDI-----------K | 344 |
| Query: | 343 | LFGWLLTIYIEIFRGTPMIVQSMVIYYGTAQAF-----GISIDRTLAAIFIVSINTGAYM | 397 |
| | | + IY+E FRGTPM+VQ +IY+G F GI+IDR AAI +S+N AY+ | |
| Sbjct: | 345 | PLQLIFRIYVEFFRGTPMLVQLFIIYFGLPALFKEIGLGITIDRFPAAIIALSLNVAAYL | 404 |
| Query: | 398 | SEIVRGGIFAVDKGQFKAATALGFTHGQTMRKIVLPQVVRNILPATGNEFVINIKDTSVL | 457 |
| | | +EI+RGGI ++D+GQ++A +LG + QTM++++ PQ R ILP GNEF+ IKDTS+ | |
| Sbjct: | 405 | AEIIRGGIQSIDQGQWEACESLGMSPWQTMKEVIFPQAFRRILPPLGNEFITLIKDTSLT | 464 |
| Query: | 458 | NVISVVELYFSGNTVATQTYQYFQTFTIIAIIYFVLTFTVTRILRYIERRFD | 509 |
| | | VI EL+ G + TY+ F+ + +A++Y +LT + + +++E D | |
| Sbjct: | 465 | AVIGFQELFREGQLIVATTYRAFEVYIAVALVYLLLTTISSFVFKWLENYMD | 516 |

[2332] An alignment of the GAS and GBS proteins is shown below:

| Identities = 82/210 (39%), Positives = 113/210 (53%), Gaps = 12/210 (5%) | | | |
|---|---|---|---|
| Query: | 14 | WGAFFNHFDLFFKGFLYTLGISFGALLLALILGILSGGLSTS---KSKVGKL-------I | 63 |
| | | W F ++ F +G TL IS + L +G+L G T+ K KV L + | |
| Sbjct: | 288 | WAIFKGNWKQFLRGTGMTLLISMVGTITGLFIGLLIGIFRTAPKAKHKVAALGQKLFGWL | 347 |
| Query: | 64 | SRIYVEVFQNTPLLVQMVFVYYGLAIISNGHVMISAFFTAVLCVGLYHGAYISEVIRSGI | 123 |
| | | IY+E+F+ TP++VQ + +YYG A + I A+ V + GAY+SE++R GI | |
| Sbjct: | 348 | LTIYIEIFRGTPMIVQSMVIYYGTAQAFG--ISIDRTLAAIFIVSINTGAYMSEIVRGGI | 405 |
| Query: | 124 | EAVPKGQTEAALAQGFTANQTMQLIILPQAVRTILPPMTNQVVNLIKNTSTVAIISGADI | 183 |
| | | AV KGQ +AA A GFT QTM+ I+LPQ VR ILP N+ V IK+TS + +IS ++ | |
| Sbjct: | 406 | FAVDKGQFKAATALGFTHGQTMRKIVLPQVVRNILPATGNEFVINIKDTSVLNVISVVEL | 465 |
| Query: | 184 | MFVAKAWAYDTTNYIPAFAGAAIFYFVICF | 213 |
| | | F A T Y F AI YFV+ F | |
| Sbjct: | 466 | YFSGNTVATQTYQYFQTFTIIAIIYFVLTF | 495 |

[2333] Based on this analysis, it was predicted that these proteins and their epitopes could be useful antigens for vaccines or diagnostics.

### EXAMPLE 367

[2334] A DNA sequence (GBSx0398) was identified in S. agalactiae <SEQ ID 1195> which encodes the amino acid sequence <SEQ ID 1196>. This protein is predicted to be amino acid ABC transporter, permease protein. Analysis of this protein sequence reveals the following:

```
Possible site: 39
>>> Seems to have an uncleavable N-term signal seq
INTEGRAL Likelihood = −6.95 Transmembrane 25-41 ( 16-42)
INTEGRAL Likelihood = −3.61 Transmembrane 66-82 ( 65-86)
INTEGRAL Likelihood = −2.44 Transmembrane 184-200 ( 182-201)
INTEGRAL Likelihood = −0.59 Transmembrane 119-135 ( 119-135)
----- Final Results -----
                            bacterial membrane --- Certainty = 0.3781(Affirmative) < succ>
                              bacterial outside --- Certainty = 0.0000(Not Clear) < succ>
                          bacterial cytoplasm --- Certainty = 0.0000(Not Clear) < succ>
```

[2335] The protein has homology with the following sequences in the GENPEPT database:

| >GP: CAB14704 GB: Z99118 glutamine ABC transporter (integral membrane | | | |
|---|---|---|---|
| protein) [Bacillus subtilis] | | | |
| Identities = 84/206 (40%), Positives = 129/206 (61%), Gaps = 6/206 (2%) | | | |
| Query: | 10 | ILFLLQGFGLTLYISFISILLSMFFGTLLAIMRNSKNPIWKLIASIYIEFVRNVPNLLWI | 69 |
| | | + FL GF +TLY++FISI+LS FFG + +R +K P+ + ++ +E +RN+P LL I | |
| Sbjct: | 12 | LAFLWDGFLVTLYVAFISIILSFFFGLIAGTLRYAKVPVLSQLIAVLVETIRNLPLLLII | 71 |
| Query: | 70 | FIIFLVF-----QMKSVSAGITSFTIFTSAALAEIIRGGLNGVDKGQTEAGLSQGFTYLQ | 124 |
| | | F F +++ +A IT+ TIF SA L+EIIR GL +DKGQ EA S G +Y Q | |
| Sbjct: | 72 | FFTFFALPEIGIKLEITAAAITALTIFESAMLSEIIRSGLKSIDKGQIEAARSSGLSYTQ | 131 |
| Query: | 125 | VFIIIIFPQAFRKMLPAIISQFVTVIKDTSLLYSVIAIQEIFGKSQILMGRYFEAGQVFT | 184 |
| | | I+ PQA R+M+P I+SQF++++KDTSL VIA+ E+ +QI+ G+ + F | |
| Sbjct: | 132 | TLFFIVMPQALRRMVPPIVSQFISLLKDTSLAV-VIALPELIHNAQIINGQSADGSYFFP | 190 |
| Query: | 185 | LYAIITAVYFITNFIISSFSRKLSKR | 210 |
| | | ++ + +YF N+ +S +R+L R | |
| Sbjct: | 191 | IFLLAALMYFAVNYSLSLAARRLEVR | 216 |

[2336] A related DNA sequence was identified in S. pyogenes <SEQ ID 1197> which encodes the amino acid sequence <SEQ ID 1198>. Analysis of this protein sequence reveals the following:

| Possible site: 20 | | | | |
|---|---|---|---|---|
| >>> Seems to have a cleavable N-term signal seq. | | | | |
| | INTEGRAL | Likelihood = −10.51 | Transmembrane | 529-545 (517-551) |
| | INTEGRAL | Likelihood = −10.30 | Transmembrane | 697-713 (693-719) |
| | INTEGRAL | Likelihood = −4.41 | Transmembrane | 560-576 (555-585) |
| | INTEGRAL | Likelihood = −0.32 | Transmembrane | 662-678 (662-678) |

```
----- Final Results -----
                              bacterial membrane --- Certainty = 0.5203(Affirmative) < succ>
                                bacterial outside --- Certainty = 0.0000(Not Clear) < succ>
                            bacterial cytoplasm --- Certainty = 0.0000(Not Clear) < succ>
```

[2337] The protein has homology with the following sequences in the databases:

| >GP: BAA17584 GB: D90907 glutamine binding periplasmic protein | | | |
|---|---|---|---|
| [Synechocystis sp.] | | | |
| Identities = 153/475 (32%), Positives = 251/475 (52%), Gaps = 27/475 (5%) | | | |
| Query: | 273 | IVSDSSFAPFEFQN-GKGKYVGIDIELIKAIAKQQGFKIEIANPGFDAALNAVQSSQADG | 331 |
| | | + ++ +F PFE + G+ G D++LI+AI + ++I FD + A+QS+ | |
| Sbjct: | 46 | VATEPTFPPFEMTDEATGQLTGFDVDLIQAIGEAAQVTVDIQGYPFDGIIPALQSNTVGA | 105 |
| Query: | 332 | VIAGATITDARKAIFDFSDPYYTSNIILAVKAGKN-IKNYEDLDRKTVGAKNGTSSYSWL | 390 |
| | | I+ TIT R FS PY+ S + +AV+ G + IKN +DL+ K + GT+ + + | |
| Sbjct: | 106 | AISAITITPERAQSVSFSSPYFKSVLAIAVQDGNDTIKNLKDLEGKRLAVAIGTTG-AMV | 164 |
| Query: | 391 | KENAPKYGYNVKAFDDGSSMYDSLNSGSVDAIMDDEAVLKYAISQG--RRFETPLEGIST | 448 |
| | | N P G V FD +S L +G+ DA+++D VL YAI R + + S | |
| Sbjct: | 165 | ATNVP--GAKVTNFDSITSALQELVNGNADAVINDRPVLLYAIKDAGLRNVKISADVGSE | 222 |
| Query: | 449 | GEVGFAVKKGTNPELI---EMFNNGLAALKKSGQYDDIIDKYLDSKKA-----ATPSEKG | 500 |
| | | G A+ E+ E+ N GL + ++G Y+ I +K+ K PS G | |
| Sbjct: | 223 | DYYGIAMPLAPPGEINQTREVLNQGLFQIIENGTYNAIYEKWFGEKNPPFLPLVAPSLVG | 282 |
| Query: | 501 | -----------ADESTISGLLSNNYKQLLAGLGTTLSLTLISFAIAIIIGIIFGMMAVSP | 549 |
| | | + + L ++ L G T+ LT S +I G + +S | |
| Sbjct: | 283 | KVGTAQSLTERSQANPNDNFLITLFRNLFKGSILTVLLTAFSVFFGLIGGTGVAIALISD | 342 |
| Query: | 550 | TKSLRLISTVFVDVVRGIPLMIVAAFIFWGVPNLIESMTGHQSPINDFLAATIALSLNGG | 609 |
| | | K L+LI ++V+ RG P+++ I++G+P L + + G I+ F AA IALSLN | |
| Sbjct: | 343 | IKPLQLIFRIYVEFFRGTPMLVQLFIIYFGLPALFKEI-GLGITIDRFPAAIIALSLNVA | 401 |
| Query: | 610 | AYIAEIVRGGIEAVPAGQMEASRSLGLSYGTTMRKVILPQAVKLMLPNFINQFVISLKDT | 669 |
| | | AY+AEI+RGGI+++ GQ EA SLG+S TM++VI PQA + +LP N+F+ +KDT | |
| Sbjct: | 402 | AYLAEIIRGGIQSIDQGQWEACESLGMSPWQTMKEVIFPQAFRRILPPLGNEFITLIKDT | 461 |
| Query: | 670 | TIVSAIGLVELFQTGKIIIARNYQSFRMYAILAIIYLIMIILLTRLAKRLEKRLN | 724 |
| | | ++ + IG ELF+ G++I+A Y++F +Y +A++YL++ + + + K LE ++ | |
| Sbjct: | 462 | SLTAVIGFQELFREGQLIVATTYRAFEVYIAVALVYLLLTTISSFVFKWLENYMD | 516 |
| Identities = 68/247 (27%), Positives = 106/247 (42%), Gaps = 11/247 (4%) | | | |
| Query: | 7 | VLLLAIMSIFLTCNIASAETIAIVSDTAYAPFEFKD--SDQIYKGIDVDIINEVAKRQSW | 64 |
| | | VLL + + + S +TI + ++ + PFE D + Q+ G DVD+I + + | |
| Sbjct: | 24 | VLLAIAIPLLPAFSQVSRQTIIVATEPTFPPFEMTDEATGQL-TGFDVDLIQAIGEAAQV | 82 |
| Query: | 65 | DFSMSFPGFDAAVNAVQSGQASALMAGTTITNARKKVFHFSEPYYDTKIVIATRKAN-AI | 123 |
| | | + FD + A+QS A ++ TIT R + FS PY+ + + IA + N I | |
| Sbjct: | 83 | TVDIQGYPFDGIIPALQSNTVGAAISAITITPERAQSVSFSSPYFKSVLAIAVQDGNDTI | 142 |
| Query: | 124 | KKYSDLKGKTVGVKNGTAAQAFLNNYKKKYDYTVKTFDTGDLMYNSLSAGSIAAVMDDEA | 183 |
| | | K DL+GK + V GT N V FD+ L G+ AV++D | |
| Sbjct: | 143 | KNLKDLEGKRLAVAIGTTGAMVATNVP---GAKVTNFDSITSALQELVNGNADAVINDRP | 199 |
| Query: | 184 | VIQYAIS----QNQDIAINMKGEPIGSFGFAVKKGSGYDYLVNDFNTALKAMKADGTYQA | 239 |
| | | V+ YAI +N I+ ++ E + + N L + +GTY A | |
| Sbjct: | 200 | VLLYAIKDAGLRNVKISADVGSEDYYGIAMPLAPPGEINQTREVLNQGLFQIIENGTYNA | 259 |
| Query: | 240 | IMTKWLG | 246 |
| | | I KW G | |
| Sbjct: | 260 | IYEKWFG | 266 |

[2338] An alignment of the GAS and GBS proteins is shown below:

| Identities = 68/210 (32%), Positives = 113/210 (53%), Gaps = 16/210 (7%) | | | |
|---|---|---|---|
| Query: | 13 | LLQGFGLTLYISFISILLSMFFGTLLAIMRNSKNPIWKLIASIYIEFVRNVPNLLWIFII | 72 |
| | | LL G G TL ++ IS +++ G + +M S +LI++++++ VR +P ++ I | |
| Sbjct: | 517 | LLAGLGTTLSLTLISFAIAIIIGIIFGMMAVSPTKSLRLISTVFVDVVRGIPLMIVAAFI | 576 |
| Query: | 73 | F-----LVFQMKSVSAGITSFTIFT-------SAALAEIIRGGLNGVDKGQTEAGLSQGF | 120 |
| | | F L+ M + I F T A +AEI+RGG+ V GQ EA S G | |
| Sbjct: | 577 | FWGVPNLIESMTGHQSPINDFLAATIALSLNGGAYIAEIVRGGIEAVPAGQMEASRSLGL | 636 |
| Query: | 121 | TYLQVFIIIIFPQAFRKMLPAIISQFVTVIKDTSLLYSVIAIQEIFGKSQILMGRYFEAG | 180 |
| | | +Y +I PQA + MLP I+QFV +KDT+++ S I + E+F +I++ R + | |
| Sbjct: | 637 | SYGTTMRKVILPQAVKLMLPNFINQFVISLKDTTIV-SAIGLVELFQTGKIIIARNY--- | 692 |
| Query: | 181 | QVFTLYAIITAVYFITNFIISSFSRKLSKR | 210 |
| | | Q F +YAI+ +Y I +++ +++L KR | |
| Sbjct: | 693 | QSFRMYAILAIIYLIMIILLTRLAKRLEKR | 722 |

[2339] Based on this analysis, it was predicted that these proteins and their epitopes could be useful antigens for vaccines or diagnostics.

### EXAMPLE 368

[2340] A DNA sequence (GBSx0399) was identified in S. agalactiae <SEQ ID 1199> which encodes the amino acid sequence <SEQ ID 1200>. Analysis of this protein sequence reveals the following:

| Possible site: 39 | | | | |
|---|---|---|---|---|
| >>> Seems to have an uncleavable N-term signal seq | | | | |
| | INTEGRAL | Likelihood = −12.21 | Transmembrane | 7-23 (1-30) |

```
----- Final Results -----
                              bacterial membrane --- Certainty = 0.5883(Affirmative) < succ>
                                bacterial outside --- Certainty = 0.0000(Not Clear) < succ>
                            bacterial cytoplasm --- Certainty = 0.0000(Not Clear) < succ>
```

[2341] The protein has homology with the following sequences in the GENPEPT database:

| >GP:BAB04094 GB:AP001508 unknown conserved protein in B. subtilis | | | |
|---|---|---|---|
| [Bacillus halodurans] | | | |
| Identities = 43/157 (27%), Positives = 83/157 (52%), Gaps = 9/157 (5%) | | | |
| Query: | 26 | YQSQFQKTTNQALAIAYKDAKVAKK--DVIHQKIDKEFENFRGSYEIEFNTKSAEYSYHV | 83 |
| | | +Q++ N+L+A ++ + + + +K+ +N R YEIE EY++ | |
| Sbjct: | 38 | HQAESVSADNEGLTLAEASDIALERAGNGVVTEAEKDRDNGRVVYEIEVKNDDDEYDFKI | 97 |
| Query: | 84 | DVKTGQILERDMDNNGFSKSTSQSSSSSSQKSHKISQEEAKKIAFKDANIEESEVSNLKI | 143 |
| | | D +TG+IL+ + SK SSS ++ IS +EAK+IA K+ + ++ ++++ | |
| Sbjct: | 98 | DQQTGEILKEKQEQRKGSKPREGHSSSKGSEAVISMDEAKEIALKEVS----GKIDDIEL | 153 |
| Query: | 144 | KEEIENGKSVYDIDF-VDLKNKNEVDYQIDAETGKII | 179 |
| | | E ENG VY+++ D + ++V +DA TG ++ | |
| Sbjct: | 154 | --ERENGSLVYEVEIESDHYDODDVTVYVDANTGNVL | 188 |

[2342] A related DNA sequence was identified in S. pyogenes <SEQ ID 1201> which encodes the amino acid sequence <SEQ ID 1202>. Analysis of this protein sequence reveals the following:

```
Possible site: 57
>>> Seems to have no N-terminal signal sequence
INTEGRAL Likelihood = −5.15 Transmembrane 42-58 ( 41-60)
----- Final Results -----
                            bacterial membrane --- Certainty = 0.3060(Affirmative) < succ>
                              bacterial outside --- Certainty = 0.0000(Not Clear) < succ>
                          bacterial cytoplasm --- Certainty = 0.0000(Not Clear) < succ>
```

[2343] The protein has no significant homology with any sequences in the GENPEPT database.

[2344] An alignment of the GAS and GBS proteins is shown below:

| Identities = 37/96 (38%), Positives = 63/96 (65%), Gaps = 5/96 (5%) | | | |
|---|---|---|---|
| Query: | 94 | DMDNNGFSKSTSQSSSSSSQKSHKISQEEAKKIAFKDANIEESEVSNLKIKEEIENGKSV | 153 |
| | | DMD+ +Q +S + K K+S+++AK IA KDA++E++ L + ++ E+GK+V | |
| Sbjct: | 59 | DMDDKD-DHMDNQPKTSQTSKKVKLSEDKAKSIALKDASVTEADAQMLSVTQDNEDGKAV | 117 |
| Query: | 154 | YDIDWVDLKNKN-EVDYQIDAETGKIIERSRDHMND | 188 |
| | | Y+I+F +NK+ E Y IDA +G I+E+S + +ND | |
| Sbjct: | 118 | YEIEF---QNKDQEYSYTIDANSGDIVEKSSEPIND | 150 |
| Identities = 23/62 (37%), Positives = 37/62 (59%) | | | |
| Query: | 35 | NQALAIAYKDAKVAKKDVIHQKIDKEFENFRGSYEIEFNTKSAEYSYHVDVKTGQILERD | 94 |
| | | ++A +IA KDA V + D + ++ E+ + YEIEF K EYSY +D +G I+E+ | |
| Sbjct: | 85 | DKAKSIALKDASVTEADAQMLSVTQDNEDGKAVYEISFQNKDQEYSYTIDANSGDIVEKS | 144 |
| Query: | 95 | MD | 96 |
| | + | | |
| Sbjct: | 145 | SE | 146 |

[2345] A related GBS gene <SEQ ID 8563> and protein <SEQ ID 8564> were also identified. Analysis of this protein sequence reveals the following:

| | |
|---|---|
| Lipop: possible site: = −1 Crend: 9 | |
| McG: Discrim Score: 14.45 | |
| GyM: Signal Score (−7.5): −5.92 | |
| Possible site: 39 | |
| >>> Seems to have an uncleavable N-term signal seq | |
| ALOM program count: 1 value: −8.92 threshold: 0.0 | |
| INTEGRAL Likelihood = −8.92 Transmembrane 7-23 ( 2-28) | |
| PERIPHERAL Likelihood = 10.93 37 | |
| modified ALOM score: | 2.28 |
| *** Reasoning Step: 3 | |
| ----- Final Results ----- | |
| bacterial membrane --- Certainty = 0.4567(Affirmative) < succ> | |
| bacterial outside --- Certainty = 0.0000(Not Clear) < succ> | |
| bacterial cytoplasm --- Certainty = 0.0000(Not Clear) < succ> | |

[2346] The protein has homology with the following sequences in the databases:

[chemical structure]

[2347] SEQ ID 8564 (GBS37) was expressed in E. coli as a His-fusion product. SDS-PAGE analysis of total cell extract is shown in FIG. 14 (lane 4; MW 22 kDa). It was also expressed in E. coli as a GST-fusion product. SDS-PAGE analysis of total cell extract is shown in FIG. 16 (lane 10; MW 47 kDa).

[2348] Based on this analysis, it was predicted that these proteins and their epitopes could be useful antigens for vaccines or diagnostics.

### EXAMPLE 369

[2349] A DNA sequence (GBSx0400) was identified in S. agalactiae <SEQ ID 1203> which encodes the amino acid sequence <SEQ ID 1204>. Analysis of this protein sequence reveals the following:

```
Possible site: 53
>>> Seems to have no N-terminal signal sequence
----- Final Results -----
                            bacterial cytoplasm --- Certainty = 0.1499(Affirmative) < succ>
                              bacterial membrane --- Certainty = 0.0000(Not Clear) < succ>
                                bacterial outside --- Certainty = 0.0000(Not Clear) < succ>
```

[2350] A related GBS nucleic acid sequence <SEQ ID 9709> which encodes amino acid sequence <SEQ ID 9710> was also identified.

[2351] The protein has no significant homology with any sequences in the GENPEPT database.

[2352] A related DNA sequence was identified in S. pyogenes <SEQ ID 1205> which encodes the amino acid sequence <SEQ ID 1206>. Analysis of this protein sequence reveals the following:

```
Possible site: 42
>>> Seems to have no N-terminal signal sequence
----- Final Results -----
                            bacterial cytoplasm --- Certainty = 0.2808(Affirmative) < succ>
                              bacterial membrane --- Certainty = 0.0000(Not Clear) < succ>
                                bacterial outside --- Certainty = 0.0000(Not Clear) < succ>
```

[2353] An alignment of the GAS and GBS proteins is shown below:

| Identities = 128/297 (43%), Positives = 180/297 (60%), Gaps = 9/297 (3%) | | | |
|---|---|---|---|
| Query: | 54 | IDDIKVGSPIFKYFWT-SLSLQAPLKALEFVLEQAKMPTELSGELSETQYLVAQFSDELA | 112 |
| | | I D ++GSP F W Q+ + L F+L+ +MP ELSG+L ETQ L+ +F L | |
| Sbjct: | 46 | IIDNRLGSPTFWVIWPIEKENQSAKQLLTFLLDLVEMPFELSGQLHETQTLLTRFHPSLL | 105 |
| Query: | 113 | PHDDFWIALSQVIYDSFPGNSLAEDTVLNRKLHQFRYLISSQQAQYVRRYFKDVGMTDRD | 172 |
| | | P FW L+ ++ +FPG +L++ L ++LHQFRY+ISSQQAQ +R ++K + MTD | |
| Sbjct: | 106 | PDHMFWKELASLVDQAFPGKTLSQAGELEKRLHQFRYVISSQQAQSIRNHYKMIEMTDAQ | 165 |
| Query: | 173 | ALVNYL-----SCL-REPDSIAYYESARLHNKRRRNGEIFGFPDDEPVINSKLLISFHTE | 226 |
| | | AL +L CL R+ +SARLHNK R FP E N K+L+ FHTE | |
| Sbjct: | 166 | ALALFLRSKKGPCLWRQAPDYTLMDSARLHNKLRFEDNKVIFPSQEVSYNIKVLLWFHTE | 225 |
| Query: | 227 | FIIDDKGNFLNEIDAEVITRNGIINGASFNYAFKNNTRHKELDVDPVK-LDPKFRNDMTR | 285 |
| | | F +D G FLNE+DAEV+T GI+NGASFNY + RH +LDVDP+ DP+FR D + | |
| Sbjct: | 226 | FTLDSTGFFLNEVDAEVVTEKGIVNGASFNYG-TDGPRHWDLDVDPISHHDPQFRRDTLK | 284 |
| Query: | 286 | GYRSPNLSRRKWFFFKEEDYDCSYFNKKGYYAFGRRSAKQSVDKQVKYLKKAVQKMR | 342 |
| | | G+RSP R+WF +++D+ SYFN KG +A+ +S+ V K K K+ + ++ | |
| Sbjct: | 285 | GFRSPKRVFRQWFRAQKDDFMFSYFNAKGLFAYHNKSSFARVKKSAKQFKRQIHPIK | 341 |

[2354] Based on this analysis, it was predicted that these proteins and their epitopes could be useful antigens for vaccines or diagnostics.

### EXAMPLE 370

[2355] A DNA sequence (GBSx0401) was identified in S. agalactiae <SEQ ID 1207> which encodes the amino acid sequence <SEQ ID 1208>. This protein is predicted to be similar to two-component response regulator [YcbM] (ompr-likeprotei). Analysis of this protein sequence reveals the following:

```
Possible site: 31
>>> Seems to have no N-terminal signal sequence
----- Final Results -----
                            bacterial cytoplasm --- Certainty = 0.3129(Affirmative) < succ>
                              bacterial membrane --- Certainty = 0.0000(Not Clear) < succ>
                                bacterial outside --- Certainty = 0.0000(Not Clear) < succ>
```

[2356] The protein has homology with the following sequences in the GENPEPT database:

| >GP: CAA55264 GB: X78502 gtcR [Brevibacillus brevis] | | | |
|---|---|---|---|
| Identities = 99/228 (43%), Positives = 149/228 (64%), Gaps = 3/228 (1%) | | | |
| Query: | 2 | RTVLVVQGDDETIELLRSYLEGALYKVVMASDGEEAFSLFQQHQIDLAIIDITLPKIDGY | 61 |
| | | +T+L+ + E IELL+ +LE Y+++ A DGE+A++ +QH +DLAIIDI +P +DG+ | |
| Sbjct: | 3 | KTILIADDEPEIIELLKLFLERESYRIIEAYDGEQAWNYIRQHPVDLAIIDIMMPALDGF | 62 |
| Query: | 62 | ELTRLIRQDSQIPIIMLAAKTTDMDRILGLNIGADDFITKPFNSLEVLARINSQLRRYYE | 121 |
| | | +L + + + ++P+I+L+AK D D+ILGL +GADDFI+KPFN LE +ARI +QLRR +E | |
| Sbjct: | 63 | QLIKRLTNEYKLPVIILSAKNRDSDKILGLGLGADDFISKPFNPLEAVARIQAQLRRAFE | 122 |
| Query: | 122 | FNSLAKP--KNQFIKIGELELDEEHVELTKNGKHIKLTATEFKILHILMS-SPGRIYTKT | 178 |
| | | FN + Q +G L L + + + +T E+++L+ M S I+TK | |
| Sbjct: | 123 | FNEPEEKAISTQSTTVGRLTLLHTACVVYRGDETYSVTPLEYRLLNTFMQCSRTSIFTKQ | 182 |
| Query: | 179 | QLYEKINGRYLEGDETTIMVHISNIRDKIEDDSKYPKYIKTLRGVGYK | 226 |
| | | QL+E+ D+ TIMV IS +RDKIED + P YIKT+RG+GYK | |
| Sbjct: | 183 | QLFEQAWSETYWEDDNTIMVQISRLRDKIEDQPRQPVYIKTVRGLGYK | 230 |

[2357] There is also homology to SEQ ID 1182:

| Identities = 87/230 (37%), Positives = 144/230 (61%), Gaps = 5/230 (2%) | | | |
|---|---|---|---|
| Query: | 1 | MRTVLVVQGDDETIELLRSYLEGALYKVVMASDGEEAFSLFQQHQIDLAIIDITLPKIDG | 60 |
| | | M+ +L+V + ++++ L Y +V A DG EA ++F++ + DL I+D+ LP++DG | |
| Sbjct: | 1 | MKKILIVDDEKPISDIIKFNLTKEGYDIVTAFDGREAVTIFEEEKPDLIILDLMLPELDG | 60 |
| Query: | 61 | YELTRLIRQDSQIPIIMLAAKTTDMDRILGLNIGADDFITKPFNSLEVLARINSQLRRYY | 120 |
| | | E+ + IR+ S +PIIML+AK ++ D+++GL IGADD++TKPF++ E+LAR+ + LRR | |
| Sbjct: | 61 | LEVAKEIRKTSHVPIIMLSAKDSEFDKVIGLEIGADDYVTKPFSNRELLARVKAHLRRTE | 120 |
| Query: | 121 | EFNSLAKPKN-----QFIKIGELELDEEHVELTKNGKHIKLTATEFKILHILMSSPGRIY | 175 |
| | | + +N Q + IG L++ + K+G+ ++LT EF++LH L + G++ | |
| Sbjct: | 121 | TIETAVAEENASSGTQELTIGNLQILPDAFVAKKHGQEVELTHREFELLHHLANHMGQVM | 180 |
| Query: | 176 | TKTQLYEKINGRYLEGDETTIMVHISNIRDKIEDDSKYPKYIKTLRGVGY | 225 |
| | | T+ L E + G GD T+ V + +R+KIED P+YI T RGVGY | |
| Sbjct: | 181 | TREHLLEIVWGYDYFGDVRTVDVTVRRLREKIEDTPSRPEYILTRRGVGY | 230 |

[2358] Based on this analysis, it was predicted that this protein and its epitopes, could be useful antigens for vaccines or diagnostics.

### EXAMPLE 371

[2359] A DNA sequence (GBSx0402) was identified in S. agalactiae <SEQ ID 1209> which encodes the amino acid sequence <SEQ ID 1210>. This protein is predicted to be threonyl-tRNA synthetase 1 (thrS). Analysis of this protein sequence reveals the following:

```
Possible site: 32
>>> Seems to have no N-terminal signal sequence
----- Final Results -----
                            bacterial cytoplasm --- Certainty = 0.2353(Affirmative) < succ>
                              bacterial membrane --- Certainty = 0.0000(Not Clear) < succ>
                                bacterial outside --- Certainty = 0.0000(Not Clear) < succ>
```

[2360] The protein has homology with the following sequences in the GENPEPT database:

| >GP: BAB06860 GB: AP001517 threonyl-tRNA synthetase 1 | | | |
|---|---|---|---|
| [Bacillus halodurans] | | | |
| Identities = 413/638 (64%), Positives = 506/638 (78%), Gaps = 7/638 (1%) | | | |
| Query: | 1 | MIKITFPDGAIREFESGITTFEIAQSISNSLAKKALAGKFNGQLIDTTRAIEEDGSIEIV | 60 |
| | | MI ITFPDGA++EF G TT EIA SIS L KKALAG +G L+D IE+DG+I IV | |
| Sbjct: | 4 | MINITFPDGAVKEFPKGTTTAEIAGSISPGLKKKALAGMLDGTLLDLNTPIEQDGTITIV | 63 |
| Query: | 61 | TPDHEDALGVLRHSAAHLFAQAAKRLFPD--LCLGVGPAIQDGFYYDTDNKSGQISNDDL | 118 |
| | | TP+ ++AL VLRHS AH+ AQA KRLF D + LGVGP I+ GFYYD D ++ +DL | |
| Sbjct: | 64 | TPESDEALEVLRHSTAHVMAQALKRLFKDRNVKLGVGPVIEGGFYYDVDMDES-LTPEDL | 122 |
| Query: | 119 | PRIEEEMKKIVKENHPCIREEISKEEALELFKD--DPYKVELISEHAEDG-LTVYRQGEF | 175 |
| | | P+IE+EMKKI+ EN P R +S+EEAL +++ DPYK+ELI++ ED +T+Y QGEF | |
| Sbjct: | 123 | PKIEKEMKKIIGENLPIERVVVSREEALARYEEVGDPYKIELINDLPEDETITIYEQGEF | 182 |
| Query: | 176 | VDLCRGPHVPSTGRIQVFHLLNVAGAYWRGNSDNAMMQRVYGTAWFDKKDLKAYLKRREE | 235 |
| | | DLCRG HVPSTG+++ F LLN+AGAYWRG+S N M+QR+YGTA+F K DL +L+ EE | |
| Sbjct: | 183 | FDLCRGVHVPSTGKLKEFKLLNLAGAYWRGDSSNKMLQRIYGTAFFKKADLDEHLRLLEE | 242 |
| Query: | 236 | AKERDHRKLGKELDLFMVNPEVGQGLPFWLPNGATIRRELERYIVDKEIASGYQHVYTPP | 295 |
| | | AKERDHRKLGKEL +F ++ +VGQGLP WLP GATIRR +ERYIVDKE GYQHVYTP | |
| Sbjct: | 243 | AKERDHRKLGKELGIFALSQKVGQGLPLWLPKGATIRRIIERYIVDKEEKLGYQHVYTPV | 302 |
| Query: | 296 | MASVEFYKTSGHWDHYREDMFPTMDMGDGEEFVLRPMNCPHHIEVYKHHVHSYRELPIRI | 355 |
| | | +AS E YKTSGHWDHY++DMFPTM+M + EE VLRPMNCPHH+ VYK + SYR+LP+RI | |
| Sbjct: | 303 | LASSELYKTSGHWDHYKDDMFPTMEM-ENEELVLRPMNCPHHMMVYKTEMRSYRQLPLRI | 361 |
| Query: | 356 | AELGMMHRYEKSGALTGLQRVREMTLNDAHIFVTPEQIKDEFLKALNLIAEIYEDFNLTD | 415 |
| | | AELG+MHRYE SGA++GLQRVR MTLNDAHIF P+QIKDEF++ + LI +YEDF L + | |
| Sbjct: | 362 | AELGLMHRYEMSGAVSGLQRVRGMTLNDAHIFCRPDQIKDEFVRVVRLIQAVYEDFGLKN | 421 |
| Query: | 416 | YRFRLSYRDPEDKHKYYDNDEMWENAQAMLKEAMDDFGLDYFEAEGEAAFYGPKLDIQVK | 475 |
| | | Y FRLSYRDPEDK KY+D+D MW AQ MLKEAMD+ L+YFEAEGEAAFYGPKLD+QV+ | |
| Sbjct: | 422 | YSFRLSYRDPEDKEKYFDDDNMWNKAQGMLKEAMDELELEYFEAEGEAAFYGPKLDVQVR | 481 |
| Query: | 476 | TALGNEETLSTIQLDFLLPERFDLKYIGADGEEHRPIMIHRGGISTMERFTAILIETYKG | 535 |
| | | TALG +ETLST+QLDFLLPERFDL Y+G DG+ HRP+++HRG +STMERF A L+E YKG | |
| Sbjct: | 482 | TALGKDETLSTVQLDFLLPERFDLTYVGEDGQPHRPVVVHRGVVSTMERFVAFLLEEYKG | 541 |
| Query: | 536 | AFPTWLAPQQVSVIPISNEAHIDYAWEVARVLKDRGIRAEVDDRNEKMQYKIRAAQTQKI | 595 |
| | | AFPTWLAP QV VIP+S EAH++YA V L+ GIR E+D+R+EK+ YKIR AQ QKI | |
| Sbjct: | 542 | AFPTWLAPVQVQVIPVSPEAHLEYAKNVQETLQQAGIRVEIDERDEKIGYKIREAQMQKI | 601 |
| Query: | 596 | PYQLIVGDKEMEEKAVNVRRYGSKATETKSIEEFVESI | 633 |
| | | PY L++GDKE+E VNVR+YG K + + ++EFV + | |
| Sbjct: | 602 | PYMLVLGDKEVEANGVNVRKYGEKDSSSMGLDEFVRHV | 639 |

[2361] A related DNA sequence was identified in S. pyogenes <SEQ ID 1211> which encodes the amino acid sequence <SEQ ID 1212>. Analysis of this protein sequence reveals the following:

```
Possible site: 32
>>> Seems to have no N-terminal signal sequence
----- Final Results -----
                            bacterial cytoplasm --- Certainty = 0.2566(Affirmative) < succ>
                              bacterial membrane --- Certainty = 0.0000(Not Clear) < succ>
                                bacterial outside --- Certainty = 0.0000(Not Clear) < succ>
```

[2362] An alignment of the GAS and GBS proteins is shown below:

| Identities = 564/644 (87%), Positives = 608/644 (93%) | | | |
|---|---|---|---|
| Query: | 1 | MIKITFPDGAIREFESGITTFEIAQSISNSLAKKALAGKFNGQLIDTTRAIEEDGSIEIV | 60 |
| | | MIKITFPDGA+REFESG+TTF+IA+SIS SLAKKALAGKFN QLIDTTRAIEEDGSIEIV | |
| Sbjct: | 1 | MIKITFPDGAVREFESGVTTFDIAESISKSLAKKALAGKFNDQLIDTTRAIEEDGSIEIV | 60 |
| Query: | 61 | TPDHEDALGVLRHSAAHLFAQAAKRLFPDLCLGVGPAIQDGFYYDTDNKSGQISNDDLPR | 120 |
| | | TPDH+DA VLRHSAAHLFAQAAKRLFP+L LGVGPAI +GFYYDTDN GQISN+DLPR | |
| Sbjct: | 61 | TPDHKDAYEVLRHSAAHLFAQAAKRLFPNLHLGVGPAIAEGFYYDTDNAEGQISNEDLPR | 120 |
| Query: | 121 | IEEEMKKIVKENHPCIREEISKEEALELFKDDPYKVELISEHAEDGLTVYRQGEFVDLCR | 180 |
| | | IE EM+KIV EN+PCIREE++KEEALELFKDDPYKVELI+EHA GLTVYRQGEFVDLCR | |
| Sbjct: | 121 | IEAEMQKIVTENYPCIREEVTKEEALELFKDDPYKVELINEHAGAGLTVYRQGEFVDLCR | 180 |
| Query: | 181 | GPHVPSTGRIQVFHLLNVAGAYWRGNSDNAMMQRVYGTAWFDKKDLKAYLKRREEAKERD | 240 |
| | | GPHVPSTGRIQVFHLLNVAGAYWRGNSDN MMQR+YGTAWFDKKDLKAYL R EEAKERD | |
| Sbjct: | 181 | GPHVPSTGRIQVFHLLNVAGAYWRGNSDNNMMQRIYGTAWFDKKDLKAYLTRLEEAKERD | 240 |
| Query: | 241 | HRKLGKELDLFMVNPEVGQGLPFWLPNGATIRRELERYIVDKEIASGYQHVYTPPMASVE | 300 |
| | | HRKLGKELDLFM++ EVGQGLPFWLP+GATIRR LERYI DKE+ASGYQHVYTPP+ASVE | |
| Sbjct: | 241 | HRKLGKELDLFMISQEVGQGLPFWLPDGATIRRTLERYITDKELASGYQHVYTPPLASVE | 300 |
| Query: | 301 | FYKTSGHWDHYREDMFPTMDMGDGEEFVLRPMNCPHHIEVYKHHVHSYRELPIRIAELGM | 360 |
| | | YKTSGHWDHY+EDMFP MDMGDGEEFVLRPMNCPHHI+VYK+HV SYRELPIRIAELGM | |
| Sbjct: | 301 | LYKTSGHWDHYQEDMFPVMDMGDGEEFVLRPMNCPHHIQVYKNHVRSYRELPIRIAELGM | 360 |
| Query: | 361 | MHRYEKSGALTGLQRVREMTLNDAHIFVTPEQIKDEFLKALNLIAEIYEDFNLTDYRFRL | 420 |
| | | MHRYEKSGAL+GLQRVREMTLND HIFVTPEQI++EF +AL LI ++Y DFNLTDYRFRL | |
| Sbjct: | 361 | MHRYEKSGALSGLQRVREMTLNDGHIFVTPEQIQEEFQRALQLIIDVYADFNLTDYRFRL | 420 |
| Query: | 421 | SYRDPEDKHKYYDNDEMWENAQAMLKEAMDDFGLDYFEAEGEAAFYGPKLDIQVKTALGN | 480 |
| | | SYRDP D HKYYDNDEMWENAQ+MLK A+D+ G+DYFEAEGEAAFYGPKLDIQVKTALGN | |
| Sbjct: | 421 | SYRDPNDTHKYYDNDEMWENAQSMLKAALDEMGVDYFEAEGEAAFYGPKLDIQVKTALGN | 480 |
| Query: | 481 | EETLSTIQLDFLLPERFDLKYIGADGEEHRPIMIHRGGISTMERFTAILIETYKGAFPTW | 540 |
| | | EETLSTIQLDFLLPERFDLKYIGADGEEHRP+MIHRG ISTMERFTAILIETYKGAFPTW | |
| Sbjct: | 481 | EETLSTIQLDFLLPERFDLKYIGADGEEHRPVMIHRGVISTMERFTAILIETYKGAFPTW | 540 |
| Query: | 541 | LAPQQVSVIPISNEAHIDYAWEVARVLKDRGIRAEVDDRNEKMQYKIRAAQTQKIPYQLI | 600 |
| | | LAP QV+VIPISNEAHIDYAWEVA+ L+DRG+RA+VDDRNEKMQYKIRA+QT KIPYQLI | |
| Sbjct: | 541 | LAPHQVTVIPISNEAHIDYAWEVAKTLRDRGVRADVDDRNEKMQYKIRASQTSKIPYQLI | 600 |
| Query: | 601 | VGDKEMEEKAVNVRRYGSKATETKSIEEFVESILADIARKSRPD | 644 |
| | | VGDKEME+K+VNVRRYGSK T T+S+EEFVE+ILADIARKSRPD | |
| Sbjct: | 601 | VGDKEMEDKSVNVRRYGSKTTHTESVEEFVENILADIARKSRPD | 644 |

[2363] Based on this analysis, it was predicted that these proteins and their epitopes could be useful antigens for vaccines or diagnostics.

### EXAMPLE 372

[2364] A DNA sequence (GBSx0403) was identified in S. agalactiae <SEQ ID 1213> which encodes the amino acid sequence <SEQ ID 1214>. Analysis of this protein sequence reveals the following:

```
Possible site: 16
>>> Seems to have no N-terminal signal sequence
----- Final Results -----
                            bacterial cytoplasm --- Certainty = 0.1985(Affirmative) < succ>
                              bacterial membrane --- Certainty = 0.0000(Not Clear) < succ>
                                bacterial outside --- Certainty = 0.0000(Not Clear) < succ>
```

[2365] The protein has homology with the following sequences in the GENPEPT database:

| >GP:CAA72250 GB:Y11463 ORF5 [Streptococcus pneuinoniae] | | | |
|---|---|---|---|
| Identities = 189/290 (65%), Fesitives = 234/290 (80%) | | | |
| Query: | 1 | MRIGLFTDTYFFQVSGVSTSIRTLKEGLEKEGHEVYIFTTTDRNVKRFEDPTIIRLPSVP | 60 |
| | | MRIGLFTDTYFPQVSGV+TSIRTLK LEK+GH V+IFTTTD++V R+ED IIR+PSVP | |
| Sbjct: | 1 | MRIGLFTDTYFPQVSGVATSIRTLKTELEKQGHAVFIFTTTDKDVNRYEDWQIIRIPSVP | 60 |
| Query: | 61 | FISFTDRRVVYRGLISAYRIAKDYELDIIHTQTEFSLGLLGRLVAKALRIPVVHTYHTQY | 120 |
| | | F +F DRR YRG A IAK Y+LDIIHTQTEFSLGLLG +A+ L+IPV+HTYHTQY | |
| Sbjct: | 61 | FFAFKDRRFAYRGFSKALEIAKQYQLDIIHTQTEFSLGLLGIWIARELKIPVIHTYHTQY | 120 |
| Query: | 121 | EDYVGYIAKGKLIKPSDVKYIMRTYLSDLDGVICPSRIVLNLLDGYGVKIPKQVIPTGIP | 180 |
| | | EDYV YIAKG LI+PSMVKY++R +L D+DGVICPS IV +LL Y VK+ K+VIPTGI | |
| Sbjct: | 121 | EDYVHYIAKGMLIRPSMVKYLVRGFLHDVDGVICPSEIVRDLLSDYKVKVEKRVIPTGIE | 180 |
| Query: | 181 | VENYRREDISEETIKNLRTELGLADNDTMLLSLSRVSFERNIQAILMHLSAVVDENPHVK | 240 |
| | | + + R +I +E +K LR++LG+ D + LLSLSR+S+EKNIQA+L+ + V+ E VK | |
| Sbjct: | 181 | LAKFERPEIKQENLKELRSKLGIQDGEKTLLSLSRISYEKNIQAVLVAFADVLKEEDKVK | 240 |
| Query: | 241 | LVIVGDGPYLSDLKELVHSLELENSVIFTGMVEHSQVAIYYKACDFFISA | 290 |
| | | LV+ GDGPYL+DLKE +LE+++SVIFTGM+ S+ A+YYKA DFFISA | |
| Sbjct: | 241 | LVVAGDGPYLNDLKEQAQNLEIQDSVIFTGMIAPSETALYYKAADFFISA | 290 |

[2366] A related DNA sequence was identified in S. pyogenes <SEQ ID 1215> which encodes the amino acid sequence <SEQ ID 1216>. Analysis of this protein sequence reveals the following:

```
Possible site: 17
>>> Seems to have no N-terminal signal sequence
----- Final Results -----
                            bacterial cytoplasm --- Certainty = 0.1074(Affirmative) < succ>
                              bacterial membrane --- Certainty = 0.0000(Not Clear) < succ>
                                bacterial outside --- Certainty = 0.0000(Not Clear) < succ>
```

[2367] An alignment of the GAS and GBS proteins is shown below:

| Identities = 309/444 (69%), Positives = 370/444 (82%) | | | |
|---|---|---|---|
| Query: | 1 | MRIGLFTDTYFPQVSGVSTSIRTLKEGLEKEGHEVYIFTTTDRNVKRFEDPTIIRLPSVP | 60 |
| | | MRIGLFTDTYWPQVSGV+TSIRTLKE LEKEGHEVYIFTTTDR+VKRFSDPTIIRLPSVP | |
| Sbjct: | 1 | MRIGLFTDTYFPQVSGVATSIRTLKEELEKEGHEVYIFTTTDRDVKRFSDPTIIRLPSVP | 60 |
| Query: | 61 | FISFTDRRVVYRGLISAYRIAKDYELDIIHTQTEFSLGLLGKLVAKALRIPVVHTYHTQY | 120 |
| | | F+SFTDRRVVYRGLIS+Y+IAK Y LDIIHTQTEFSLGLLGK++ KALRIPVVHTYHTQY | |
| Sbjct: | 61 | FVSFTDRRVVYRGLISSYKIAKHYNLDIIHTQTEFSLGLLGKMIGKALRIPVVHTYHTQY | 120 |
| Query: | 121 | EDYVGYIAKGKLTKPSMVRYIMRTYLSDLDGVICPSRIVLNLLDGYGVKIPKQVIPTGIP | 180 |
| | | EDYV YIA GK+I+PSMVK ++R YL DLDGVICPSRIVLNLL+GY V IPK+VIPTGIP | |
| Sbjct: | 121 | EDYVSYIANGKIIRPSMVKFLLRGYLKOLDGVICPSRIVLNLLEGYEVTIPKRVIPTGIP | 180 |
| Query: | 181 | VENYRREDISEETIKNLRTELGLADNDTMLLSLSRVSFEKNIQAILMHLSAVVDENPHVK | 240 |
| | | +E Y R+DI+ E + NL+ ELG+A ++TMLLSLSR+S+EKNIQAI+ + A++ EN +K | |
| Sbjct: | 181 | LEKYIRDDITAEEVTNLKAELGIAGDETMLLSLSRISYEKNIQAIINQMPAILAENAKIK | 240 |
| Query: | 241 | LVIVGDGPYLSDLKELVHSLELENSVIFTGMVEHSQVAIYYKACDFFISASTSETQGLTY | 300 |
| | | L+IVG+GPYL DLK L LE++ V FTGMV H +VA+YYKACDFFISASTSETQGLTY | |
| Sbjct: | 241 | LIIVGNGPYLQDLKHLAMQLEVDKHVTFTGMVPHDKVALYYKACDFFISASTSETQGLTY | 300 |
| Query: | 301 | IESLASGRPIIAQSNPYLDDVISDKMFGTLYKKESDLADAILDAIAETPKMTQEAYEQKL | 360 |
| | | IESLASG PIIA NPYLDDV++DKMFGTLY E+DL DAI+DAI +TP M + +K | |
| Sbjct: | 301 | IESLASGTPIIAHGNPYLDDVVTDKMFGTLYYAETDLTDAIIDAILKTPVMDKRLLAKKR | 360 |
| Query: | 361 | YEISAENFSKSVYAFYLDFLISQKASVKEKVSLTIGNKDSHSTLRFVRKAVYLPKKVFTF | 420 |
| | | YEISA++F KS+Y FYLD LI++ + +K+SL + + S+L+ V+ A++LPK+ | |
| Sbjct: | 361 | YEISAQHFGKSIYTFYLDTLIARNSKEAQKLSLYLNHSGKSSSLKLVQGAIHLPKRAAKV | 420 |
| Query: | 421 | TGPASKKVVKAPKRRISSIRDFLD | 444 |
| | | T S KVVKAP + + +I+DFLD | |
| Sbjct: | 421 | TAITSVKVVKAPIRLVHAIKDFLD | 444 |

[2368] Based on this analysis, it was predicted that these proteins and their epitopes could be useful antigens for vaccines or diagnostics.

### EXAMPLE 373

[2369] A DNA sequence (GBSx0404) was identified in S. agalactiae <SEQ ID 1217> which encodes the amino acid sequence <SEQ ID 1218>. This protein is predicted to be lipopolysaccharide biosynthesis protein-related protein. Analysis of this protein sequence reveals the following:

```
Possible site: 61
>>> Seems to have no N-terminal signal sequence
----- Final Results -----
                            bacterial cytoplasm --- Certainty = 0.4076(Affirmative) < succ>
                              bacterial membrane --- Certainty = 0.0000(Not Clear) < succ>
                                bacterial outside --- Certainty = 0.0000(Not Clear) < succ>
```

[2370] The protein has homology with the following sequences in the GENPEPT database:

| >GP: AAG19110 GB: AE005009 Vng0600c [Halobacterium sp. NRC-1] | | | |
|---|---|---|---|
| Identities = 117/350 (33%), Positives = 178/350 (50%), | | | |
| Gaps = 29/350 (8%) | | | |
| Query: | 1 | MKVLLYLEAEEYLKKSGIGRAIKHQEKALQIAGIDYTTNPT------------------- | 41 |
| | | M+ L YLEA E L+ G+ A Q AL+ ++ P | |
| Sbjct: | 2 | MRALNYLEAAEALR-GGMVTATNQQRAALETTDVEVVETPWRAGDPVRSIGSLAAGGSCF | 60 |
| Query: | 42 | DDFDLVHMNTYGIRSWLLMSKAKKTGKKVIMHGHSTEEDFRNSFIGSNLVSPLFKWYLCR | 101 |
| | | FD+ H N G S + A++T +++H H T EDF SF GS+ ++P + YL | |
| Sbjct: | 61 | TAFDVAHCNLVGPGSVAVARHARRTDTPLVLHAHLTREDFAQSFRGSSTIAPALEPYLRW | 120 |
| Query: | 102 | FYQKADAIITPTDYSKQLIKAYGIKKPIFVLSNGIDLSRYQRSEKKESAFRHYFHLSKDD | 161 |
| | | FY +AD ++ P++Y+K +++AY + PI LSNG+DL Q E + R F L D | |
| Sbjct: | 121 | FYSQADLVLCPSEYTKDVLRAYPVDAPIRQLSNGVDLESMQGYESFRADTRARFDL--DG | 178 |
| Query: | 162 | KVVMGAGLYFMRKGIDQFVEVAAKMPDIRFIWFGETNKWVIPRKVRQIVTKQHPSNVTFA | 221 |
| | | VV G F RKG+ F E+ AK D F WFG ++ + P+NVTF | |
| Sbjct: | 179 | TVVYAVGEVFERKGLTMFCEL-AKATDHEFAWFGPYDEGPQAGAATRKWVADPPANVTFT | 237 |
| Query: | 222 | GYIKGDVYEGAMSASDAFFFPSREETEGIVVLEALASHQHVVLRDIPVYHGWVTE-DSVE | 280 |
| | | GY++ A A D + FP++ E +GI VLEA+A + VVLRDIPV+ + T+ + | |
| Sbjct: | 238 | GYMEDK--RAAFGAGDIYLFPAKVENQGIAVLEAMACGKPVVLRDIPVFREFFTDGEDCL | 295 |
| Query: | 281 | LATDVDGFVEKLDKVLSGKSDKIKEGYH---VAESRSIERIAHELASVYQ | 327 |
| | | + + + F + +D++ + + G + AES S++RI ELAS+Y+ | |
| Sbjct: | 296 | MCSTFEAFRDAIDRLADDPELRTRLGENARETAESHSLDRIGEELASIYE | 345 |

[2371] A related-DNA sequence was identified in S. pyogenes <SEQ ID 1219> which encodes the amino acid sequence <SEQ ID 1220>. Analysis of this protein sequence reveals the following:

```
Possible site: 61
>>> Seems to have no N-terminal signal sequence
----- Final Results -----
                            bacterial cytoplasm --- Certainty = 0.4088(Affirmative) < succ>
                              bacterial membrane --- Certainty = 0.0000(Not Clear) < succ>
                                bacterial outside --- Certainty = 0.0000(Not Clear) < succ>
```

[2372] An alignment of the GAS and GBS proteins is shown below:

| Identities = 236/332 (71%), Positives = 276/332 (83%) | | | |
|---|---|---|---|
| Query: | 1 | MKVLLYLEAEEYLKKSGIGRAIKHQEKALQIAGIDYTTNPTDDFDLVHMNTYGIRSWLLM | 60 |
| | | MKVLLYLEAE YL+KSGIGRAIKHQ KAL + G +TTNP + +DLVH+NTYG++SWLLM | |
| Sbjct: | 1 | MKVLLYLEAENYLRKSGIGRAIKHQAKALSLVGQHFTTNPRETYDLVHLNTYGLKSWLLM | 60 |
| Query: | 61 | SKAKKTGKKVIMHGHSTEEDFRNSFIGSNLVSPLFKWYLCRFYQKADAIITPTDYSKQLI | 120 |
| | | KA+K GKKVIMHGHSTEEDFRNSFI SNL+SP FK YLC FY KADAIITPT YSK LI | |
| Sbjct: | 61 | IKAQKAGKKVIMHGHSTEEDFRNSFIFSNLLSPWFKKYLCHFYNKADAIITPTLYSKSLI | 120 |
| Query: | 121 | KAYGIKKPIFVLSNGIDLSRYQRSEKKESAFRHYFHLSKDDKVVMGAGLYFMRKGIDQFV | 180 |
| | | ++YG+K PIF +SNGIDL +Y KKE+AFR YF + + +KVVMGAGL+F+RKGID FV | |
| Sbjct: | 121 | ESYGVKSPIFAVSNGIDLEQYGADPKKEAAFRRYFDIKEGEKVVMGAGLFFLRKGIDDFV | 180 |
| Query: | 181 | EVAAKMPDIRFIWFGETNKWVIPRKVRQIVTKQHPSNVTFAGYIKGDVYEGAMSASDAFF | 240 |
| | | +VA MPD+RFIWFGETNKWVIP +VRQ+V HP N+ F GYIKGDVYEGAM+ +DAFF | |
| Sbjct: | 181 | KVAQAMPDVRFIWFGETNKWVIPAQVRQMVNGNHPKNLIFPGYIKGDVYEGAMTGADAFF | 240 |
| Query: | 241 | FPSREETEGIVVLEALASHQHVVLRDIPVYHGWVTEDSVELATDVDGFVEKLDKVLSGKS | 300 |
| | | FPSREETEGIVVLEALAS QH+VLRDIPVY+GWV + S ELATD+ GF+E L KV SG S | |
| Sbjct: | 241 | FPSREETEGIVVLEALASRQHLVLRDIPVYYGWVDQSSAELATDIPGFIEALKKVFSGAS | 300 |
| Query: | 301 | DKIKEGYHVAESRSIERIAHELASVYQKVMEL | 332 |
| | | +K++ GY VA+SR +E + H L VY+KVMEL | |
| Sbjct: | 301 | NKVEAGYKVAQSRRLETVGHALVDVYKKVMEL | 332 |

[2373] Based on this analysis, it was predicted that these proteins and their epitopes could be useful antigens for vaccines or diagnostics.

### EXAMPLE 374

[2374] A DNA sequence (GBSx0405) was identified in S. agalactiae <SEQ ID 1221> which encodes the amino acid sequence <SEQ ID 1222>. Analysis of this protein sequence reveals the following:

```
Possible site: 16
>>> Seems to have no N-terminal signal sequence
----- Final Results -----
                            bacterial cytoplasm --- Certainty = 0.5487(Affirmative) < succ>
                              bacterial membrane --- Certainty = 0.0000(Not Clear) < succ>
                                bacterial outside --- Certainty = 0.0000(Not Clear) < succ>
```

[2375] The protein has homology with the following sequences in the GENPEPT database:

| >GP: AAC35010 GB: AF055987 intracellular a-amylase | | | |
|---|---|---|---|
| [Streptococcus mutans] | | | |
| Identities = 308/483 (63%), Positives = 378/483 (77%) | | | |
| Query: | 1 | MTNELIMQAFEWYLPSDGNHWKKLEESISDLKKLGISKIWLPPAFKGTSSDDVGYGVYDL | 60 |
| | | MTNE +MQ FEWYLP+DG HW+L E S LK +GISK+W+PPAFKGT S+DVGYGVYDL | |
| Sbjct: | 1 | MTNETMMQYFEWYLPNDGKHWQHLAEDASHLKNIGISKVWMPPAFKGTGSNDVGYGVYDL | 60 |
| Query: | 61 | FDLGEFDQNGTIRTKYGRKEEYLKLIKSLKANGIKPFADIVLNHKANGDHKEKFQVIKVN | 120 |
| | | +DLGEF+QNGT+RTKYG +E+YL + +LK I P +DIVLNHKANGD KE+FQV+KVN | |
| Sbjct: | 61 | YDLGEFNQNGTVRTKYGSREDYLNAVNALKEQEIMPISDIVLNHKANGDAKERFQVVKVN | 120 |
| Query: | 121 | PENRQEALSEPYEIEGWTGFDFPGRQGEYNDFKWHWYHFTGLDYDAKNNETDIFMIVGDN | 180 |
| | | P NRQE +SEPYEIEGWT F+FPGRQ Y+DFKWHWYHFTG+DYDA +NE I+MI+GDN | |
| Sbjct: | 121 | PSNRQEKISEPYEIEGWTQFNFPGRQDNYSDFKWHWYHFTGVDYDALHNENGIYMILGDN | 180 |
| Query: | 181 | KGWADDDLIDDENGNFDYLMYNDIDFKHPEVIKNLQDWAKWFIETTGIEGFRLDAVKHID | 240 |
| | | KGWA + ID ENGN+DYLMY+DIDFKHPEV ++L+DW WF+ET+G+ GFRLDA+KHID | |
| Sbjct: | 181 | KGWASQENIDQENGNYDYLMYDDIDFKHPEVQEHLRDWVAWFLETSGVGGFRLDAIKHID | 240 |
| Query: | 241 | SYFIQTFINDIRTKIKPDLEVFGEYWKSDQTSMKDYLEATQFQFSLVDVTLHMNFFDASH | 300 |
| | | F+ FI IR +K DL VFGEYWK + DYL + QF L+DV LHM+ F+A | |
| Sbjct: | 241 | KTFMAQFIRYIREHLKADLYVFGEYWKDSHFDITDYLHSVDLQFDLIDVMLHMSLFEAGQ | 300 |
| Query: | 301 | QNRDFDMRTIFDDSLVIDNPEYAVTFVENHDTQSGQALESRVEDWFKPLAYGLILLRQQG | 360 |
| | | + DFD+ TI DDSL+ +P++AVTFV+NHD+Q GQALES V +WFKPLAYGLILLRQ+G | |
| Sbjct: | 301 | KGSDFDLSTILDDSLMKSHPDEAVTFVDNHDSQRGQALESTVAEWFKPLAYGLILLRQEG | 360 |
| Query: | 361 | TPCLFYGDYYGIQGEFGQPSFKEVIDKMAELRQNYVFGKQVDYFTHSNCIGWTCLGDEEH | 420 |
| | | PC+FYGDYYGI GEF Q SF+ V+DK+ +RQ +V+G + T NCIGWTCLGDEEH | |
| Sbjct: | 361 | IPCVFYGDYYGISGEFAQESFQTVLDKLLYIRQYHVYGSKKIILTMPNCIGWTCLGDEEH | 420 |
| Query: | 421 | NSCLAVVLTNGDQGWKHMEVGEIYAGKTFVDYLGNCEQEVVIGDDGWGDFLVESASISAW | 480 |
| | | +AV+++NG+ K M +GE K FVDYL NC +EV++ D GWGDF V+ AS+SAW | |
| Sbjct: | 421 | PDGVAVIISNGEANCKRMNMGEFNRNKVFVDYLNNCTEEVILDDQGWGDFPVQEASLSAW | 480 |
| Query: | 481 | VPK | 483 |
| | | V K | |
| Sbjct: | 481 | VNK | 483 |

[2376] A related DNA sequence was identified in S. pyogenes <SEQ ID 1223> which encodes the amino acid sequence <SEQ ID 1224>. Analysis of this protein sequence reveals the following:

```
Possible site: 30
>>> Seems to have a cleavable N-term signal seq.
----- Final Results -----
                                bacterial outside --- Certainty = 0.3000(Affirmative) < succ>
                              bacterial membrane --- Certainty = 0.0000(Not Clear) < succ>
                            bacterial cytoplasm --- Certainty = 0.0000(Not Clear) < succ>
```

[2377] The protein has homology with the following sequences in the databases:

| >GP: AAB00845 GB: M57692 alpha-cyclodextrin glycosyltransferase | | | |
|---|---|---|---|
| [Thermoanaerobacterium thermosulfurigenes] | | | |
| Identities = 356/710 (50%), Positives = 468/710 (65%), Gaps = 16/710 (2%) | | | |
| Query: | 7 | KTYKLLTKSAVLLGLISFPLT--VSAADNASVTNKADFSTDTIYQIVTDRFNDGNTSNNG | 64 |
| | | KT+KL+ + L L+ F LT + AA + +V+N ++STD IYQIVTDRF DGNTSNN | |
| Sbjct: | 3 | KTFKLILVLMLSLTLV-FGLTAPIQAASDTAVSNVVNYSTDVIYQIVTDRFVDGNTSNNP | 61 |
| Query: | 65 | KTDVFDKN--DLKKYHGGDWQGIIAKIKDGYLTDMGISAIWISSPVENIDSIDPSN---G | 119 |
| | | D++D LKKY GGDWQGII KI DGYLT MG++AIWIS PVENI ++ P + G | |
| Sbjct: | 62 | TGDLYDPTHTSLKKYFGGDWQGIINKINDGYLTGMGVTAIWISQPVENIYAVLPDSTFGG | 121 |
| Query: | 120 | SAAYHGYWAKDFFKTNQHFGTEADFQQLVKVAHQHHIKVVIDFAPNHTSTAEKEGTTFKE | 179 |
| | | S +YHGYWA+DF +TN +FG+ DFQ L+ AH H+IKV+IDFAPNHTS A + T+ E | |
| Sbjct: | 122 | STSYHGYWARDFKRTNPYFGSFTDFQNLINTAHAHNIKVIIDFAPNHTSPASETDPTYAE | 181 |
| Query: | 180 | DGALYKNGKLVGKFSDDKDKIFNHESWTDFSTYENSIYHSMYGLADLNNINPKVDQYMKE | 239 |
| | | +G LY NG L+G +++D + F+H TDFS+YE+ IY +++ LADLN N +D Y+K | |
| Sbjct: | 182 | NGRLYDNGTLLGGYTNDTNGYFHHYGGTDFSSYEDGIYRNLFDLADLNQQNSTIDSYLKS | 241 |
| Query: | 240 | AIDKWLDLGVDGIRVDAVKHMSQGWQKNWLSHIYEKHNVFVFGEWFSGHTDDDYDMTTFA | 299 |
| | | AI WLD+G+DGIR+DAVKHM GWQKN++ I VF FGEWF G + D + T FA | |
| Sbjct: | 242 | AIKVWLDMGIDGIRLDAVKHMPFGWQKNFMDSILSYRPVFTFGEWFLGTNEIDVNNTYFA | 301 |
| Query: | 300 | NNSGMGLLDFRFANAIRQLYTGFSTFTMRDFYKVLENRDQVTNEVTDQVTFIDNHDMERF | 359 |
| | | N SGM LLDFRF+ +RQ++ +T TM ++++ N + D VTFIDNHDM+RF | |
| Sbjct: | 302 | NESGMSLLDFRFSQKVRQVFRD-NTDTMYGLDSMIQSTASDYNFINDMVTFIDNHDMDRF | 360 |
| Query: | 360 | ATKVANNQTAVNQAYALLLTSRGVPNIYYGTEQYATGDKDPNNRGDMPSFNKESQAYKVI | 419 |
| | | + V QA A LTSRGVP IYYGTEQY TG+ DP NR M SFN + AY VI | |
| Sbjct: | 361 | YN--GGSTRPVEQALAFTLTSRGVPAIYYGTEQYMTGNGDPYNRAMMTSFNTSTTAYNVI | 418 |
| Query: | 420 | SKLAPLRKQNQALAYGTTEQRWISDHVLVFERKFGNHVALVAINRDQTNGYTITNAKTAL | 479 |
| | | KLAPLRK N A+AYGTT+QRWI++ V ++ERKFGN+VALVAINR+ + Y IT TAL | |
| Sbjct: | 419 | KKLAPLRKSNPAIAYGTTQQRWINNDVYIYERKFGNNVALVAINRNLSTSYNITGLYTAL | 478 |
| Query: | 480 | PQNSYKDKLEGLLGGQELIVGADGTISSFELGAGQVAVWTYEGEDKTPQLGDVDASVGIA | 539 |
| | | P +Y D L GLL G + V +DG+++ F L AG+VAVW Y +P +G V ++ A | |
| Sbjct: | 479 | PAGTYTDVLGGLLNGNSISVASDGSVTPFTLSAGEVAVWQYVSSSNSPLIGHVGPTMTKA | 538 |
| Query: | 540 | GNKITISGQGFGNSKGQVTFGEISAEILSWSDTLITLKVPTVPANYYNISVTTADKQTSN | 599 |
| | | G ITI G+GFG + GQV FG + I+SW DT + +KVP+V YNIS+ T+ TSN | |
| Sbjct: | 539 | GQTITIDGRGFGTTSGQVLFGSTAGTIVSWDDTEVKVKVPSVTPGKYNISLKTSSGATSN | 598 |
| Query: | 600 | SYQAFEVLTDKQIPVRLLINDFKTVPGEQLYLMGDVFEMGANDAKNAVGPLFNNTQTIAK | 659 |
| | | +Y +LT QI VR ++N+ TV GE +YL G+V E+G D A+GP+FN Q + + | |
| Sbjct: | 599 | TYNNINILTGNQICVRFVVNNASTVYGENVYLTGNVAELGNWDTSKAIGPMFN--QVVYQ | 656 |
| Query: | 660 | YPNWFFDTHLPINKEIAVKLVKKDSIGNVLWT--SPETYSIKTGHEAQTI | 707 |
| | | YP W++D +P I K +KK+ + W S TY++ + I | |
| Sbjct: | 657 | YPTWYYDVSVPAGTTIQFKFIKKNG-NTITWEGGSNHTYTVPSSSTGTVI | 705 |

[2378] An alignment of the GAS and GBS proteins is shown below:

| Identities = 112/509 (22%), Positives = 193/509 (37%), | | | |
|---|---|---|---|
| Gaps = 103/509 (20%) | | | |
| Query: | 18 | GNHWKKLEESISD--LKKLGISKIWLPPAFKGTSSDDV--------GYGVYDLFDLGEFD | 67 |
| | | G W+ + I D L +GIS IW+ + S D GY D F + | |
| Sbjct: | 79 | GGDWQGIIAKIKDGYLTDMGISAIWISSPVENIDSIDPSNGSAAYHGYWAKDFFKTNQH- | 137 |
| Query: | 68 | QNGTIRTKYGRKEEYLKLIKSLKANGIKPFADIVLNHKANGDHKEKFQVIKVNPENRQEA | 127 |
| | | +G + ++ +L+K + IK D NH + + + | |
| Sbjct: | 138 | --------FGTEADFQQLVKVAHQHHIKVVIDFAPNHTSTAEKE---------------- | 173 |
| Query: | 128 | LSEPYEIEGWTGFDFPGRQGEYNDFKWHWYHFTGLDYDAKNNETDIFMIVGDNKGWADDD | 187 |
| | | G F Y + K G D K+ + +++ W D | |
| Sbjct: | 174 | -----------GTTFKEDGALYKNGK-----LVGKFSDDKDK-------IFNHESWTDFS | 210 |
| Query: | 188 | LIDDE--NGNFDYLMYNDIDFKHPEVIKNLQDWAKWFIETTGIEGFRLDAVKHIDSYFIQ | 245 |
| | | ++ + + N+I+ K + +K D KW G++G R+DAVKH+ + + | |
| Sbjct: | 211 | TYENSIYHSMYGLADLNNINPKVDQYMKEAID--KWL--DLGVDGIRVDAVKHMSQGWQK | 266 |
| Query: | 246 | TFINDIRTKIKPDLEVFGEYWKSDQTSMKDYLEATQFQFSLVDVTLHMNFFDASHQ-NRD | 304 |
| | | +++ I K ++ VFGE W S T D + T F + L F +A Q | |
| Sbjct: | 267 | NWLSHIYE--KHNVFVFGE-WFSGHTD--DDYDMTTFANNSGMGLLDFRFANAIRQLYTG | 321 |
| Query: | 305 | FDMRTIFDDSLVIDNPEYA-------VTFVENHDTQSGQALESRVEDWFKPLAYGLILLR | 357 |
| | | F T+ D V++N + VTF++NHD + + + AY L LL | |
| Sbjct: | 322 | FSTFTMRDFYKVLENRDQVTNEVTDQVTFIDNHDMERFATKVANNQTAVNQ-AYAL-LLT | 379 |
| Query: | 358 | QQGTPCLFYGDYYGIQGE------FGQPSFK------EVIDKMAELR---QNYVFGKQVD | 402 |
| | | +G P ++YG G+ PSF +VI K+A LR Q +G | |
| Sbjct: | 380 | SRGVPNIYYGTEQYATGDKDPNNRGDMPSFNKESQAYKVISKLAPLRKQNQALAYGTTEQ | 439 |
| Query: | 403 | YFTHSNCIGWTCLGDEEHNSCLAVVLTWGDQ--GWKHMEVGEIYAGKTFVDYLGNC--EQ | 458 |
| | | + + + + + + + +A+V N DQ G+ ++ D L Q | |
| Sbjct: | 440 | RWISDHVL----VFERKFGNHVALVAINRDQTNGYTITNAKTALPQNSYKDKLEGLLGGQ | 495 |
| Query: | 459 | EVVIGDDGW-GDFLVESASISAWVPKIEE | 486 |
| | | E+++G DG F + + ++ W + E+ | |
| Sbjct: | 496 | ELIVGADGTISSFELGAGQVAVWTYEGED | 524 |

[2379] Based on this analysis, it was predicted that these proteins and their epitopes could be useful antigens for vaccines or diagnostics.

### EXAMPLE 375

[2380] A DNA sequence (GBSx0406) was identified in S. agalactiae <SEQ ID 1225> which encodes the amino acid sequence <SEQ ID 1226>. This protein is predicted to be catabolite control protein A. Analysis of this protein sequence reveals the following:

```
Possible site: 29
>>> Seems to have no N-terminal signal sequence
----- Final Results -----
                            bacterial cytoplasm --- Certainty = 0.2154(Affirmative) < succ>
                              bacterial membrane --- Certainty = 0.0000(Not Clear) < succ>
                                bacterial outside --- Certainty = 0.0000(Not Clear) < succ>
```

[2381] A related GBS nucleic acid sequence <SEQ ID 9707> which encodes amino acid sequence <SEQ ID 9708> was also identified.

[2382] The protein has homology with the following sequences in the GENPEPT database:

| >GP: BAA88121 GB: AB028599 catabolite control protein A [Streptococcus | | | |
|---|---|---|---|
| bovis] (ver 3) | | | |
| Identities = 304/332 (91%), Positives = 320/332 (95%) | | | |
| Query: | 1 | MNTDDTITIYDVAREAGVSMATVSRVVNGNKNVKENTRKKVLEVIDRLDYRPNAVARGLA | 60 |
| | | MNTDDTITIYDVAREAGVSMATVSRVVNGNKNVKENTRKKVLEVIDRLDYRPNAVARGLA | |
| Sbjct: | 1 | MNTDDTITIYDVAREAGVSMATVSRVVNGNKNVKENTRKKVLEVIDRLDYRPNAVARGLA | 60 |
| Query: | 61 | SKKTTTVGVVIPNIANSYFSILARGIDDIAAMYKYNIVLASSDEDDDKEVNVVNTLFAKQ | 120 |
| | | SKKTTTVGVVIPNIANSYFSILA+GIDDIAAMYKYNIVLASSDEDDDKEVNVVNTLFAKQ | |
| Sbjct: | 61 | SKKTTTVGVVIPNIANSYFSILAKGIDDIAAMYKYNIVLASSDEDDDKEVNVVNTLFAKQ | 120 |
| Query: | 121 | VDGIIFMGHHLTEKIRAEFSRSRTPIVLAGTVDLEHQLPSVNIDYKAAAVDVIDILAGNH | 180 |
| | | VDGIIFMGHHLTEKIRAEFSRSRTP+VLAGTVDLEHQLPSVNIDYKAA DV+DILA N+ | |
| Sbjct: | 121 | VDGIIFMGHHLTEKIRAEFSRSRTPVVLAGTVDLEHQLPSVNIDYKAAVADVVDILAKNN | 180 |
| Query: | 181 | KDIAFVSGPLIDDINGKVRLAGYKEGLKKNGLNFKEGLVFEANYRYAEGFALAQRVINAG | 240 |
| | | KDIAFVSGPLIDDINGKVRLAGYKEGL+KN L+FKEGLVFEANY Y +G+ LAQRV+N+G | |
| Sbjct: | 181 | KDIAFVSGPLIDDINGKVRLAGYKEGLEKNNLSFKEGLVFEANYNYKDGYELAQRVMNSG | 240 |
| Query: | 241 | ATAAYVAEDELAAGLLNGLFEAGKRVPEDFEIITSNDSPIAQYTRPNLTSISQPVYDLGA | 300 |
| | | ATAAYVAEDELAAGLLNGLF AGK+VPEDFEI+TSNDSPI YTRPNL+SISQPVYDLGA | |
| Sbjct: | 241 | ATAAYVAEDELAAGLLNGLFAAGKKVPEDFEILTSNDSPITSYTRPNLSSISQPVYDLGA | 300 |
| Query: | 301 | VSMRMLTKIMHKEELEEKEIVLNHGIVKRGTT | 332 |
| | | VSMRMLTKIM+KEELEEKEI+LNHG+ RGTT | |
| Sbjct: | 301 | VSMRMLTKIMNKEELEEKEIILNHGLKLRGTT | 332 |

[2383] A related DNA sequence was identified in S. pyogenes <SEQ ID 1227> which encodes the amino acid sequence <SEQ ID 1228>. Analysis of this protein sequence reveals the following:

```
Possible site: 29
>>> Seems to have no N-terminal signal sequence
----- Final Results -----
                            bacterial cytoplasm --- Certainty = 0.2154(Affirmative) < succ>
                              bacterial membrane --- Certainty = 0.0000(Not Clear) < succ>
                                bacterial outside --- Certainty = 0.0000(Not Clear) < succ>
```

[2384] An alignment of the GAS and GBS proteins is shown below:

| Identities = 307/332 (92%), Positives = 320/332 (95%) | | | |
|---|---|---|---|
| Query: | 1 | MNTDDTITIYDVAREAGVSMATVSRVVNGNKNVKENTRKKVLEVIDRLDYRPNAVARGLA | 60 |
| | | MNTDD +TIYDVAREAGVSMATVSRVVNGNKNVKENTRKKVLEVIDRLDYRPNAVARGLA | |
| Sbjct: | 1 | MNTDDPLTIYDVAREAGVSMATVSRVVNGNKNVKENTRKKVLEVIDRLDYRPNAVARGLA | 60 |
| Query: | 61 | SKKTTTVGVVIPNIANSYFSILARGIDDIAAMYKYNIVLASSDEDDDKEVNVVNTLFAKQ | 120 |
| | | SKKTTTVGVVIPNIANSYFSILA+GIDDIAAMYKYNIVLASSDEDDDKEVNVVNTLFAKQ | |
| Sbjct: | 61 | SKKTTTVGVVIPNIANSYFSILAKGIDDIAAMYKYNIVLASSDEDDDKEVNVVNTLFAKQ | 120 |
| Query: | 121 | VDGIIFMGHHLTEKIRAEFSRSRTPIVLAGTVDLEHQLPSVNIDYKAAAVDVIDILAGNH | 180 |
| | | VDGIIFMGHHLTEKIRAEFSRSRTP+VLAGTVDL+HQLPSVNIDY+AA +V+DILA NH | |
| Sbjct: | 121 | VDGIIFMGHHLTEKIRAEFSRSRTPVVLAGTVDLDHQLPSVNIDYRAAVSNVVDILAENH | 180 |
| Query: | 181 | KDIAFVSGPLIDDINGKVRLAGYKEGLKKNGLNFKEGLVFEANYRYAEGFALAQRVINAG | 240 |
| | | K IAFVSGPLIDDINGKVRLAGYKEGLK N L+FKEGLVFEANY Y EGF LAQRVIN+G | |
| Sbjct: | 181 | KCIAFVSGPLIDDINGKVRLAGYKEGLKHNKLDFKEGLVFEANYSYKEGFELAQRVINSG | 240 |
| Query: | 241 | ATAAYVAEDELAAGLLNGLFEAGKRVPEDFEIITSNDSPIAQYTRPNLTSISQPVYDLGA | 300 |
| | | ATAAYVAEDELAAGLLNGLFEAGKRVPEDFEIITSNDSP+ QYTRPNL+SISQPVYDLGA | |
| Sbjct: | 241 | ATAAYVAEDELAAGLLNGLFEAGKRVPEDFEIITSNDSPVVQYTRPNLSSISQPVYDLGA | 300 |
| Query: | 301 | VSMRMLTKIMHKEELEEKEIVLNHGIVKRGTT | 332 |
| | | VSMRMLTKIM+KEELEEKEI+LNHGI KRGTT | |
| Sbjct: | 301 | VSMRMLTKIMNKEELEEKEILLNHGIKKRGTT | 332 |

[2385] Based on this analysis, it was predicted that these proteins and their epitopes could be useful antigens for vaccines or diagnostics.

### EXAMPLE 376

[2386] A DNA sequence (GBSx0407) was identified in S. agalactiae <SEQ ID 1229> which encodes the amino acid sequence <SEQ ID 1230>. This protein is predicted to be PepQ (pepQ-2). Analysis of this protein sequence reveals the following:

```
Possible site: 22
>>> Seems to have no N-terminal signal sequence
----- Final Results -----
                            bacterial cytoplasm --- Certainty = 0.1118(Affirmative) < succ>
                              bacterial membrane --- Certainty = 0.0000(Not Clear) < succ>
                                bacterial outside --- Certainty = 0.0000(Not Clear) < succ>
```

[2387] The protein has homology with the following sequences in the GENPEPT database:

| >GP:AAC46293 GB:AF014460 PepQ [Streptococcus mutans] | | | |
|---|---|---|---|
| Identities = 257/359 (71%), Positives = 304/359 (84%) | | | |
| Query: | 1 | MSKLNRIRHHLHSVQAELAVFSDPVTVNYLTGFFCDPHERQMFLFVYEDRDPILFVPALE | 60 |
| | | MSKL +I L E AV SDPV++NYLTGF+ DPHER MFLF++ D++ +LF+P L+ | |
| Sbjct: | 1 | MSKLAQIVQKLKKQGIEAAVLSDPVSINYLTGFYSDPHERLMFLFLFADQETLLFLPELD | 60 |
| Query: | 61 | VSRAKQSVPFPVFGYIDSENPWQKIASNLPSFSVSKVLAEFDNLNVTKFQGLQTVFDGHF | 120 |
| | | RAK + V GY+D ENP +KI + LP + SK+ EFDNLNVTKF+GL+T+F G F | |
| Sbjct: | 61 | ALRAKSILDISVTGYLDFENPLEKIKTLLPKTNYSKIALEFDNLNVTKFKGLETIFSGQF | 120 |
| Query: | 121 | ENLTPYIQNMRLIKSRDEIEKNLVAGEFADKAVQVGFDNISLNNTETDIIAQIEFEMKKQ | 180 |
| | | NLTP I MRLIKS DEI+K+L+AGE ADKAVQ+GFD+ISLN TETDIIAQIEFEMKK | |
| Sbjct: | 121 | TNLTPLINRNRLIKSADEIQKLLIAGELADKAVQIGFDSISLNATETDIIAQIEFEMKKL | 180 |
| Query: | 181 | GINKNSFDTMVLTGNNAANPHGIPGTNKIENNALLLFDLGVETLGYTSDMTRTVAVGKPD | 240 |
| | | G++KMSF+TMVLTG+NAANPHG+P ++KIENN LLLFDLGVE+ GY SDMTRTVAVG+PD | |
| Sbjct: | 181 | GVDKMSFETNVLTGSNAANPHGLPASHKIENNHLLLFDLGVESTGYVSDMTRTVAVGQPD | 240 |
| Query: | 241 | QFKKDIYHLCLEANQAAIDFIKPGVLASEVDAAARNVIEKAGYGQYFNHRLGHGLGMDVH | 300 |
| | | QFKKDIY++CLEA A+DFIKPGV A++VDAAAR+VIEKAGYG YFNHRLGHG+GM +H | |
| Sbjct: | 241 | QFKKDIYNICLEAQLTALDFIKPGVSAAQVDAAARSVIEKAGYGDYFNHRLGHGIGMGLH | 300 |
| Query: | 301 | EFPSIMAGNDMEIQEGMCFSVEPGIYIPDKVGVRIEDCGYVTKTGFEVFTKTPKELLYF | 359 |
| | | EFPSIMAGNDM ++EGMCFSVEPGIYIP+KVGVRIEDCG+VTK GFEVFT+TPKELLYF | |
| Sbjct: | 301 | SFPSIMAGNDMLLEEGMCFSVEPGIYIPSKVGVRIEDCGHVTKNGFEVFTQTPKELLYF | 359 |

[2388] A related DNA sequence was identified in S. pyogenes <SEQ ID 1231> which encodes the amino acid sequence <SEQ ID 1232>. Analysis of this protein sequence reveals the following:

```
Possible site: 58
>>> Seems to have no N-terminal signal sequence
INTEGRAL Likelihood =−0.90 Transmernbrane 42-58 ( 42-59)
----- Final Results -----
                            bacterial membrane --- Certainty = 0.1362(Atfirmative) < succ>
                              bacterial outside --- Certainty = 0.0000(Not Clear) < succ>
                          bacterial cytoplasm --- Certainty = 0.0000(Not Clear) < succ>
```

[2389] The protein has homology with the following sequences in the databases:

>GP:AAC46293 GB:AF014460 PepQ [Streptococcus mutans]
Identities = 264/359 (73%) , Positives = 304/359 (84%)

| | | | |
|---|---|---|---|
| Query: | 1 | MTKLDQIRLYLDQKGAELAIFSDPVTINYLTGFFCDPHERQLFLFVYHDLAPVLFVPALE | 60 |
| | | M+KL QI L ++G S A+ SDPV+INYLTGF+ DPHER +FLF++ D +LF+P L+ | |
| Sbjct: | 1 | MSKLAQIVQKLKKQGIEAAVLSDPVSINYLTGFYSDPHERLMFLFLFADQETLLFLPELD | 60 |
| Query: | 61 | VARASQAISFPVFGYVDSENPWEKIKAVLPNTAAKTIYAEFDHLNVNKFHGLQTIFSGQF | 120 |
| | | RA + V GY+D ENP EKIK +LP T+ I EFD+LNV KF GL+TIFSGQF | |
| Sbjct: | 61 | ALRAKSILDISVTGYLDFENPLEKIKTLLPSTNYSKIALEFDNLNVTKFKGLETIFSGQF | 120 |
| Query: | 121 | NNLTPYVQGMRLVKSADEINKMMIAGQFADKAVQVGFDNISLDATETDVIAQIEFEMKKQ | 180 |
| | | NLTP + MRL+KSADEI K++IAG+ ADKAVQ+GFD+ISL+ATETD+IAQIEFEMKK | |
| Sbjct: | 121 | TNLTPLINRMRLIKSADEIQKLLIAGELADKAVQIGFDSISLHATETDIIAQIEFEMKKL | 180 |
| Query: | 181 | GIHKMSFDTMVLTGNNAANPHGIPGTNNIENNALLLFDLGVETLGYTSDMTRTVAVGQPD | 240 |
| | | G+ KMSF+TMVLTG+NAANPHG+P ++ IENN LLLFDLGVE+GY SDMTRTVAVGQPD | |
| Sbjct: | 181 | GVDKMSFETMVLTGSNAANPHGLPASHKIENNHLLLFDLGVESTGYVSDMTRTVAVGQPD | 240 |
| Query: | 241 | QFKIDIYNLCLSAQLAAIDFIKPGVTAAQVDAAARQVIEKAGYGEYFNHRLGHGIGMDVH | 300 |
| | | QFK DIYN+CLEAQL A+DFIKPGV+AAQVDAAAR VIEKAGYG+YFNHRLGHGIGM +H | |
| Sbjct: | 241 | QFKKDIYNICLEAQLTALDFIKPGVSAAQVDAAARSVIEKAGYGDYFNHRLGHGIGMGLH | 300 |
| Query: | 301 | EFPSIMAGNDLVLEEGMCFSVEPGIYIPGKVGVRIEDCGHVTKNGFEVFTHTPKELLYF | 359 |
| | | EFPSIMAGND++LEEGMCFSVEPGIYIP KVGVRIEDCGHVTKNGFEVFT TPKELLYF | |
| Sbjct: | 301 | EFPSIMAGNDMLLEEGMCFSVEPGIYIPEKVGVRIEDCGHVTKNGFEVFTQTPKELLYF | 359 |

[2390] An alignment of the GAS and GBS proteins is shown below:

| Identities = 288/361 (79%), Positives = 325/361 (89%) | | | |
|---|---|---|---|
| Query: | 1 | MSKLNRIRHHLHSVQAELAVFSDPVTVNYLTGFFCDPHERQMFLFVYEDRDPILFVPALE | 60 |
| | | M+KL++IR +L AELA+FSDPVT+NYLTGFFCDPHERQ+FLFVY D P+LFVPALE | |
| Sbjct: | 1 | MTKLDQIRLYLDQKGAELAIFSDPVTINYLTGFFCDPHERQLFLFVYHDLAPVLFVPALE | 60 |
| Query: | 61 | VSRAKQSVPFPVFGYIDSENPWQKIASNLPSFSVSKVLAEFDNLNVTKFQGLQTVFDGHF | 120 |
| | | V+RA Q++ FPVFGY+DSENPW+KI + LP+ + + AEFD+LNV KF GLQT+F G F | |
| Sbjct: | 61 | VARASQAISFPVFGYVDSENPWEKIKAVLPNTAAKTIYAEFDHLNVNKFHGLQTIFSGQF | 120 |
| Query: | 121 | ENLTPYIQNMRLIKSRDEIEKMLVAGEFADKAVQVGFDNISLNNTETDIIAQIEFEMKKQ | 180 |
| | | NLTPY+Q MRL+KS DEI KM++AG+FADKAVQVGFDNISL+ TETD+IAQIEFEMKKQ | |
| Sbjct: | 121 | NNLTPYVQGMRLVKSADEINKMMIAGQFADKAVQVGFDNISLDATETDVIAQIEFEMKKQ | 180 |
| Query: | 181 | GINKMSFDTMVLTGNNAANPHGIPGTNKIENNALLLFDLGVETLGYTSDMTRTVAVGKPD | 240 |
| | | GI+KMSFDTMVLTGNNAANPHGIPGTN IENNALLLFDLGVETLGYTSDMTRTVAVG+PD | |
| Sbjct: | 181 | GIHKMSFDTMVLTGNNAANPHGIPGTNNIENNALLLFDLGVETLGYTSDMTRTVAVGQPD | 240 |
| Query: | 241 | QFKKDIYHLCLEAHQAAIDFIKPGVLASEVDAAARNVIEKAGYGQYFNHRLGHGLGMDVH | 300 |
| | | QFK DIY+LCLEA AAIDFIKPGV A++VDAAAR VIEKAGYG+YFNHRLGHG+GMDVH | |
| Sbjct: | 241 | QFKIDIYNLCLEAQLAAIDFIKPGVTAAQVDAAARQVIEKAGYGEYFNHRLGHGIGMDVH | 300 |
| Query: | 301 | EFPSIMAGNDMEIQEGMCFSVEPGIYIPDKVGVRIEDCGYVTKTGFEVFTKTPKELLYFEG | 361 |
| | | EFPSIMAGND+ ++EGMCFSVEPGIYIP KVGVRIEDCG+VTK GFEVFT TPKELLYFEG | |
| Sbjct: | 301 | EFPSIMAGNDLVLEEGMCFSVEPGIYIPGKVGVRIEDCGHVTKNGFEVFTHTPKELLYFEG | 361 |

[2391] Based on this analysis, it was predicted that these proteins and their epitopes could be useful antigens for vaccines or diagnostics.

### EXAMPLE 377

[2392] A DNA sequence (GBSx0408) was identified in S. agalactiae <SEQ ID 1233> which encodes the amino acid sequence <SEQ ID 1234>. Analysis of this protein sequence reveals the following:

```
Possible site: 14
>>> Seems to have no N-terminal signal sequence
----- Final Results -----
                            bacterial cytoplasm --- Certainty = 0.3629(Affirmative) < succ>
                              bacterial membrane --- Certainty = 0.0000(Not Clear) < succ>
                                bacterial outside --- Certainty = 0.0000(Not Clear) < succ>
```

[2393] The protein has no significant homology with any sequences in the GENPEPT database.

[2394] No corresponding DNA sequence was identified in S. pyogenes.

[2395] Based on this analysis, it was predicted that this protein and its epitopes, could be useful antigens for vaccines or diagnostics.

### EXAMPLE 378

[2396] A DNA sequence (GBSx0409) was identified in S. agalactiae <SEQ ID 1235> which encodes the amino acid sequence <SEQ ID 1236>. This protein is predicted to be beta-hexosamidase A precursor. Analysis of this protein sequence reveals the following:

```
Possible site: 47
>>> Seems to have no N-terminal signal sequence
----- Final Results -----
                            bacterial cytoplasm --- Certainty = 0.3279(Affirmative) < succ>
                              bacterial membrane --- Certainty = 0.0000(Not Clear) < succ>
                                bacterial outside --- Certainty = 0.0000(Not Clear) < succ>
```

[2397] The protein has homology with the following sequences in the GENPEPT database:

| >GP: CAB11942 GB: Z99104 alternate gene name: yzbA~similar to | | | |
|---|---|---|---|
| beta-hexosaminidase [Bacillus subtilis] | | | |
| Identities = 151/602 (25%), Positives = 268/602 (44%), | | | |
| Gaps = 69/602 (11%) | | | |
| Query: | 26 | INEMTLDEKIGQLF------FNMGASRSEEYLTDVLDRYHIAAVRYNRGSSSEIYDQNL- | 78 |
| | | +N M+LDEK+GQ+ + S + LT + D +Y G ++ +N+ | |
| Sbjct: | 39 | VNRMSLDEKLGQMLMPDFRNWQKEGESSPQALTKMNDEVASLVKKYQFGGII-LFAENVK | 97 |
| Query: | 79 | -----------ILQTKSKLPMLIAANTEAGGDGAVTDGTKVGDEIKVAATNDPKYAYEMG | 127 |
| | | + K+P++++ + E G + +GT + + A AY+ G | |
| Sbjct: | 98 | TTKQTVQLTDDYQKASPKIPLMLSIDQEGGIVTRLGEGTNFPGNMALGAARSRINAYQTG | 157 |
| Query: | 128 | RIAGMEASAVGCNASFSPIVDLTRNWRNPIIASRNWGANVDQIISLSKEYMKGIMQYNIV | 187 |
| | | I G E SA+G N FSP+VD+ N NP+I R++ +N + L MKG+ + +I | |
| Sbjct: | 158 | SIIGKELSALGINTDFSPVVDINNNPDNPVIGVRSFSSNRELTSRLGLYTMKGLQRQDIA | 217 |
| Query: | 188 | PFAKHFPGDGIDERDHHLSFASNPMSKEEWMSTFGRIYGELADAGLPGVMAGHIHLPNVE | 247 |
| | | KHFPG G + D H +E + + DAG VM H+ P + | |
| Sbjct: | 218 | SALKHFPGHGDTDVDSHYGLPLVSHGQERLREVELYPFQKAIDAGADMVMTAHVQFPAFD | 277 |
| Query: | 248 | KEMHPER--DLDDMLPASLNKTLLDELLRGELGYNGAIVTDASHMVGMTASMARRDLLPT | 305 |
| | | + + D ++PA+L+K ++ LLR E+G+NG IVTDA +M + + + + | |
| Sbjct: | 278 | DTTYKSKLDGSDILVPATLSKKVMTGLLRQEMGFNGVIVTDALNMKAIADHFGQEEAVVM | 337 |
| Query: | 306 | AIEAGCDLFLF---FNDPDED------IQWMKEGYEKGILTEERLHDALRRTLGLKAKLG | 356 |
| | | A++AG D+ L E+ IQ+ KE + G+ E+++++++ R + LK K G | |
| Sbjct: | 338 | AVKAGVDIALMPASVTSLKEEQKFARVIQALKEAVKNGDIPEQQINNSVERIISLKIKRG | 397 |
| Query: | 357 | LHNYEGRRQELFMPK-DKAMALINTLESQKIADEVADKAVTLVKDKQKDIFPVNPERYRH | 415 |
| | | + Y R + K KA ++ + + K ++A+KAVT++K++Q + P P++ | |
| Sbjct: | 398 | M--YPARNSDSTKEKIAKAKKIVGSKQHLKAEKKLAEKAVTVLKNEQHTL-PFKPKKGSR | 454 |
| Query: | 416 | ILLVNVSGYKGGFGAMIAGNKQRASDYMKE------LLEARGHEVTVWESTEERIMKLPQ | 469 |
| | | IL+V + A +Q D +K L V+++ E+ +K | |
| Sbjct: | 455 | ILIV------APYEEQTASIEQTIHDLIKRKKIKPVSLSKMNFASQVFKTEHEKQVK--- | 505 |
| Query: | 470 | EERAAAIANVYAQK-QPIANLTEHYDLIINLVDVNAGGTTQRIIWPAAKGTPDQPFYVHE | 528 |
| | | E I Y K P+ N D +I+ D + + ++P A + H | |
| Sbjct: | 506 | -EADYIITGSYVVKNDPVVN-----DGVID--DTISDSSKWATVFPRA---VMKAALQHN | 554 |
| Query: | 529 | IPSIVISVQHAFALADMPQVGTYINAYD--------GLPSTISAVVAKLAGESEFTGVSP | 580 |
| | | P +++S+++ + A+ + I Y L I A V + G+++ G P | |
| Sbjct: | 555 | KPFVLMSLRNPYDAANFEEAKALIAVYGFKGYANGRYLQPNIPAGVMAIFGQAKPKGTLP | 614 |
| Query: | 581 | VD | 582 |
| | | VD | |
| Sbjct: | 615 | VD | 616 |

[2398] No corresponding DNA sequence was identified in S. pyogenes.

[2399] A related GBS gene <SEQ ID 8565> and protein <SEQ ID 8566> were also identified. Analysis of this protein sequence reveals the following homology to a lipoprotein, with homology with the following sequences in the databases:

[chemical structure]

[2400] SEQ ID 1236 (GBS50) was expressed in E. coli as a His-fusion product. SDS-PAGE analysis of total cell extract is shown in FIG. 11 (lane 8; MW 69.2 kDa).

[2401] GBS50-His was purified as shown in FIG. 192, lane 5.

[2402] The GBS50-His fusion product was purified (FIG. 192, lane 5) and used to immunise mice. The resulting antiserum was used for FACS (FIG. 264), which confirmed that the protein is immunoaccessible on GBS bacteria.

[2403] Based on this analysis, it was predicted that these proteins and their epitopes could be useful antigens for vaccines or diagnostics.

### EXAMPLE 379

[2404] A DNA sequence (GBSx0410) was identified in S. agalactiae <SEQ ID 1237> which encodes the amino acid sequence <SEQ ID 1238>. Analysis of this protein sequence reveals the following:

```
Possible site: 20
>>> Seems to have no N-terminal signal sequence
----- Final Results -----
                            bacterial cytoplasm --- Certainty = 0.2266(Affirmative) < succ>
                              bacterial membrane --- Certainty = 0.0000(Not Clear) < succ>
                                bacterial outside --- Certainty = 0.0000(Not Clear) < succ>
```

[2405] The protein has no significant homology with any sequences in the GENPEPT database.

[2406] No corresponding DNA sequence was identified in S. pyogenes.

[2407] Based on this analysis, it was predicted that this protein and its epitopes, could be useful antigens for vaccines or diagnostics.

### EXAMPLE 380

[2408] A DNA sequence (GBSx0411) was identified in S. agalactiae <SEQ ID 1239> which encodes the amino acid sequence <SEQ ID 1240>. Analysis of this protein sequence reveals the following:

```
Possible site: 49
>>> Seems to have no N-terminal signal sequence
----- Final Results -----
                            bacterial cytoplasm --- Certainty = 0.2279(Affirmative) < succ>
                              bacterial membrane --- Certainty = 0.0000(Not Clear) < succ>
                                bacterial outside --- Certainty = 0.0000(Not Clear) < succ>
```

[2409] A related GBS nucleic acid sequence <SEQ ID 9705> which encodes amino acid sequence <SEQ ID 9706> was also identified.

[2410] The protein has homology with the following sequences in the GENPEPT database:

>GP:AAC21726 GB:U32690 oxidoreductase [Haemophilus influenzae Rd]
Identities = 197/271 (72%), Positives = 229/271 (83%)

| | | | | |
|---|---|---|---|---|
| Query: | 26 | NKVVVITGAGGVLCGYMAKEFAKAGAKVALLDLNQEAAQTFADEIVEEGGIAKAYKANVL | 85 | |
| | | NK+++ITGAGGVLC ++AK+ A A +ALLDLN EAA A EI + GG AKAYK NVL | | |
| Sbjct: | 15 | NKLIIITGAGGVLCSFLAKQLAYTKANIALLDLNFEAADKVAKEINQSGGKAKAYKTNVL | 74 | |
| Query: | 86 | SKENLEEVHQAVLEDLGPTDILVNGAGGNNPKATTDNEFHELDLPSETKTFFELDEAGIS | 145 | |
| | | EN++EV + D G DIL+NGAGGNNPKATTDNEFH+ DL T+TFF+LD++GI | | |
| Sbjct: | 75 | ELENIKEVRNQIETDFGTCDILINGAGGNNPKATTDNEFHQFDLNETTRTFFDLDKSGIE | 134 | |
| Query: | 146 | FVFNLNYLGTLLPTQVFAQDMVGREGANIINISSMNAFTPLTKIPAYSGAKAAISNFTQW | 205 | |
| | | FVFNLNYLG+LLPTQVFA+DM+G++GANIINISSMNAFTPLTKIPAYSGAKAAISNFTQW | | |
| Sbjct: | 135 | FVFNLNYLGSLLPTQVFAKDMLGKQGANIINISSMNAFTPLTKIPAYSGAKAAISNFTQW | 194 | |
| Query: | 206 | LAVHFSKVGIRCNAIAFGFLVTNQNRSLLFTEDGQPTARAEKILNNTPMGRFGEASELIG | 265 | |
| | | LAV+FSKVGIRCNAIAPGFLV+NQN +LLF +G+PT RA KIL NTPMGRFGE+ EL+G | | |
| Sbjct: | 195 | LAVYFSKVGIRCNAIAPGFLVSNQNLALLFDTEGKPTDRANKILTNTPMGRFGESEELLG | 254 | |
| Query: | 266 | GLFFLADEKSSSFVNGVVLPIDGGFAAYSGV | 296 | |
| | | L FL DE S+FVNGVVLP+DGGF+AYSGV | | |
| Sbjct: | | 255 | ALLFLIDENYSAFVNGVVLPVDGGFSAYSGV | 285 |

[2411] A related DNA sequence was identified in S. pyogenes <SEQ ID 1241> which encodes the amino acid sequence <SEQ ID 1242>. Analysis of this protein sequence reveals the following:

```
Possible site: 32
>>> Seems to have no N-terminal signal sequence
----- Final Results -----
                            bacterial cytoplasm --- Certainty = 0.0358(Affirmative) < succ22
                              bacterial membrane --- Certainty = 0.0000(Not Clear) < succ>
                                bacterial outside --- Certainty = 0.0000(Not Clear) < succ>
```

[2412] An alignment of the GAS and GBS proteins is shown below:

| Identities = 77/279 (27%), Positives = 125/279 (44%), Gaps = 19/279 (6%) | | | |
|---|---|---|---|
| Query: | 18 | MSKTITFTNKVVVITGAGGVLCGYMAKEFAKAGARVALLDLNQEAAQTFADEIVEEGGIA | 77 |
| | | M + K+ +ITGA + +AK +A+AGA + D+ QE E G A | |
| Sbjct: | 1 | MENMFSLQGKIALITGASYGIGFEIAKAYAQAGATIVFNDIKQELVDKGLAAYRELGIEA | 60 |
| Query: | 78 | KAYKANVLSKENLEEVHQAVLEDLGPTDILVNGAGGNNPKATTDNEFHELDLPSETKTFF | 137 |
| | | Y +V + ++++ + +++G DILVN AG | |
| Sbjct: | 61 | HGYVCDVTDEAGIQQMVSQIEDEVGAIDILVNNAG-----------------IIRRTPML | 103 |
| Query: | 138 | ELDEAGISFVFNLNYLGTLLPTQVFAQDMVGREGANIINISSMNAFTPLTKIPAYSGAKA | 197 |
| | | E+ V +++ + ++ M+ + IINI SM + + AY+ AK | |
| Sbjct: | 104 | EMAAEDFRQVIDIDLMAPFIVSKAVLPSMIAKGHGKIINICSMMSELGRETVSAYAAAKG | 163 |
| Query: | 198 | AISNFTQWLAVHFSKVGIRCNAIAPGFLVTNQNRSLLFTE-DGQPTARAEKILNNTPMGR | 256 |
| | | + T+ +A F + I+CN I PG++ T Q L + DG + I+ TP R | |
| Sbjct: | 164 | GLKNLTKNIASEFGEANIQCNGIGPGYIATPQTAPLRERQADGSRHPFDQFIIAKTPAAR | 223 |
| Query: | 257 | FGEASELIGGLFFLADEKSSSFVNGVVLPIDGGFAAYSG | 295 |
| | | +G +L G FLA + +S+FVNG +L +DGG AY G | |
| Sbjct: | 224 | WGTTEDLAGPAVFLASD-ASNFVNGHILYVDGGILAYIG | 261 |

[2413] Based on this analysis, it was predicted that these proteins and their epitopes could be useful antigens for vaccines or diagnostics.

### EXAMPLE 381

[2414] A DNA sequence (GBSx0412) was identified in S. agalactiae <SEQ ID 1243> which encodes the amino acid sequence <SEQ ID 1244>. This protein is predicted to be D-mannonate dehydrolase (uxuA). Analysis of this protein sequence reveals the following:

```
Possible site: 42
>>> Seems to have no N-terminal signal sequence
----- Final Results -----
                            bacterial cytoplasm --- Certainty = 0.3188(Affirmative) < succ>
                              bacterial membrane --- Certainty = 0.0000(Not Clear) < succ>
                                bacterial outside --- Certainty = 0.0000(Not Clear) < succ>
```

[2415] The protein has homology with the following sequences in the GENPEPT database:

| >GP:BAB04425 GB:AP001509 D-mannonate dehydrolase [Bacillus halodurans] | | | |
|---|---|---|---|
| Identities = 202/343 (58%), Positives = 261/343 (75%) | | | |
| Query: | 1 | MEMSFRWYGEDDPVTLENIGQIPTMKGIVTAIYDVPVGEVWSRERIQQLKEKVEAAGLKI | 60 |
| | | M ++ RW+G D V LE I QIP MKGIV+AIYDV VG VW +E+I LK +E GL + | |
| Sbjct: | 1 | MRLTMRWFGPSDKVKLEYIKQIPGMKGIVSAIYDVAVGGVWPKEKILALKNNIERHGLTL | 60 |
| Query: | 61 | SVIESVPVHEDIKLGRPTRDLLIDNYIQTVKNLAAEGIDTICYNFMPVFDWTRTDLAYQY | 120 |
| | | VIESVPVHEDIKLG+PTRD I+NY QT+++LA GIDT+CYNFMPVFDWTR+ L ++ | |
| Sbjct: | 61 | DVIESVPVHEDIKLGKPTRDRYIENYKQTLRHLAECGIDTVCYNFMPVFDWTRSQLDFKL | 120 |
| Query: | 121 | PDGSTALIFDETVSKKMDPVNGELSLPGWDASYSKEEMKAIMDAYAEIDEEKLWENLTYF | 180 |
| | | DGS ALI++E V + +P++GEL LPGWD SY E +K ++ AY +I EE LW++LTYF | |
| Sbjct: | 121 | EDGSEALIYEEDVISRTNPLSGELELPGWDTSYENESLKGVLQAYKKISEEDLWDHLTYF | 180 |
| Query: | 181 | IKRIIPEAEAVGVKMAIHPDDPPYSIFGLPRIITGLEAIERFVKLYDSKSNGITLCVGSY | 240 |
| | | ++ I+P A+ VG+KMAIHPDDPP+SIFGLPRI+T +ER + LYDS ++GIT+C GS | |
| Sbjct: | 181 | VQAIMPVADEVGIKMAIHPDDPPWSIEGLPRIVTNKANLERLLSLYDSPNHGITMCSGSL | 240 |
| Query: | 241 | ASDPQNDVLEISRRAFELDRVNFVHARNIKLGDGKSFKESAHPSEYGSIDMYEVIKLCHE | 300 |
| | | ++ ND+ E+ R R++F HARNIK +SF+ESAH SE GS++M ++K H+ | |
| Sbjct: | 241 | GANEANDLPEMIRHFGGQGRIHFAHARNIKRTGPRSFQESAHLSEAGSVNMVAMLKAYHD | 300 |
| Query: | 301 | FGFEGAIRPDHGRMIWGETGRPGYGLYDRALGATYVSGLYEAV | 343 |
| | | GF G +RPDHGRMIWGE GRPGYGLYDRALGATY++G++EAV | |
| Sbjct: | 301 | IGFTGPLRPDHGRMIWGEKGRPGYGLYDRALGATYLNGIWEAV | 343 |

[2416] No corresponding DNA sequence was identified in S. pyogenes.

[2417] Based on this analysis, it was predicted that this protein and its epitopes, could be useful antigens for vaccines or diagnostics.

### EXAMPLE 382

[2418] A DNA sequence (GBSx0413) was identified in S. agalactiae <SEQ ID 1245> which encodes the amino acid sequence <SEQ ID 1246>. Analysis of this protein sequence reveals the following:

```
Possible site: 14
>>> Seems to have no N-terminal signal sequence
----- Final Results -----
                            bacterial cytoplasm --- Certainty = 0.2447(Affirmative) < succ>
                              bacterial membrane --- Certainty = 0.0000(Not Clear) < succ>
                                bacterial outside --- Certainty = 0.0000(Not Clear) < succ>
```

[2419] The protein has no significant homology with any sequences in the GENPEPT database.

[2420] No corresponding DNA sequence was identified in S. pyogenes.

[2421] Based on this analysis, it was predicted that this protein and its epitopes, could be useful antigens for vaccines or diagnostics.

### EXAMPLE 383

[2422] A DNA sequence (GBSx0414) was identified in S. agalactiae <SEQ ID 1247> which encodes the amino acid sequence <SEQ ID 1248>. This protein is predicted to be uronate isomerase. Analysis of this protein sequence reveals the following:

```
Possible site: 14
>>> Seems to have no N-terminal signal sequence
----- Final Results -----
                            bacterial cytoplasm --- Certainty = 0.3066(Affirmative) < succ>
                              bacterial membrane --- Certainty = 0.0000(Not Clear) < succ>
                                bacterial outside --- Certainty = 0.0000(Not Clear) < succ>
```

[2423] The protein has homology with the following sequences in the GENPEPT database:

| >GP:BAB04424 GB:AP001509 uronate isomerase [Bacillus halodurans] | | | |
|---|---|---|---|
| Identities = 215/465 (46%), Positives = 294/465 (62%), Gaps = 7/465 (1%) | | | |
| Query: | 3 | FNTETFMLKNQAAIQLYEE-VKRQPIFDYHCHLDPKDIFEDHIFDNIVDLWLGGDHYKWR | 61 |
| | | F +E F+L N+ +LY K PI DYHCHL P++I+E+ F+N+ WLGGDHYKWR | |
| Sbjct: | 4 | FLSEDFLLMNEYDRELYYTFAKNMPICDYHCHLSPQEIWENKPFENMTKAWLGGDHYKWR | 63 |
| Query: | 62 | LMRANGISEAEITGPASNLEKFKAFARTLERAYGNPVYHWSAMELKNVFGVNEILTESNA | 121 |
| | | MR NG+ E ITG A + KF A+A+T+ + GNP+YHW+ MELK F ++ L E+N | |
| Sbjct: | 64 | AMRLNGVREEFITGGAPDKEKFLAWAKTVPKTIGNPLYHWTHMELKTYFHFHQPLDETNG | 123 |
| Query: | 122 | EEIYHRLNHFLKEHKISPRRLIADSKVMFIGTTDHPLDTLEWHKKLAADESFKTVVAPTF | 181 |
| | | E ++ N L++ +PR LI S V IGTTD P D+L +H+KL AD++F V PTF | |
| Sbjct: | 124 | ENVWDACNRLLQQEAFTPRALIERSNVRAIGTTDDPTDSLLYHQKLQADDTFHVKVIPTF | 183 |
| Query: | 182 | RPDEAF-IEHRHFVDFITKLGDITQKEITDFSTFIAAMEERIAYFAQNGCRASDISFTEI | 240 |
| | | RPD A IE F D++ KL D+T + + F+ A++ER+ +F ++GCR+SD TE+ | |
| Sbjct: | 184 | RPDGALKIEQDSFADWVAKLSDVTGESLDTLDAFLHALKERLTFFDEHGCRSSDHDMTEV | 243 |
| Query: | 241 | VFEQTDELELNDLFNKVCEGYIPNQSEISKWQTAVFMELCRLYKKYGFVTQVHFGALRNN | 300 |
| | | F + +E E +F K + E K++T + L + Y G+V Q H G +RNN | |
| Sbjct: | 244 | PFVEVNEQEAQHIFRKRLANEGLTKVENEKYKTFLMTWLGKEYAARGWVMQWHIGVMRNN | 303 |
| Query: | 301 | HSTIFEKLGADVGVDSLGD-QVALTVNMNRLLDSLVKKDSLPKMIWYNLNPAYNIAVANT | 359 |
| | | +S + KLG D G DS+GD Q+A +LLD L K+ +LPK I Y +NP N A+ | |
| Sbjct: | 304 | NSRMLHKLGPDTGFDSIGDGQIAHAT--AKLLDLLDKQGALPKTILYCVNPNANYILASM | 361 |
| Query: | 360 | LANFQANELGVRSYLQFGAGWWFADTKLGMISQMNALAEQGMLANFIGMLTDSRSFLSYQ | 419 |
| | | + NF E GVR +QFG+ WWF D GM Q+ LA G+L+NFIGMLTDSRSFLSY | |
| Sbjct: | 362 | IGNF-TESGVRGKVQFGSAWWFNDHIDGMRRQLTDLASVGLLSNFIGMLTDSRSFLSYP | 419 |
| Query: | 420 | RHDYFRRILCTYLGEWIEEGEVPEDYQALGSMAKDIAYQNAVNYF | 464 |
| | | RHDYFRRILC +G WI+EG++P D + G + +DI Y N V+YF | |
| Sbjct: | 420 | RHDYFRRILCQLIGSWIKEGQLPPDMERWGQIVQDICYNNVVDYF | 464 |

[2424] No corresponding DNA sequence was identified in S. pyogenes.

[2425] Based on this analysis, it was predicted that this protein and its epitopes, could be useful antigens for vaccines or diagnostics.

### EXAMPLE 384

[2426] A DNA sequence (GBSx0415) was identified in S. agalactiae <SEQ ID 1249> which encodes the amino acid sequence <SEQ ID 1250>. This protein is predicted to be 2-dehydro-3-deoxyphosphogluconate aldolase/4-hydroxy-2-oxoglutarate al. Analysis of this protein sequence reveals the following:

```
Possible site: 43
>>> Seems to have no N-terminal signal sequence
----- Final Results -----
                            bacterial cytoplasm --- Certainty = 0.3883(Affirmative) < succ>
                              bacterial membrane --- Certainty = 0.0000(Not Clear) < succ>
                                bacterial outside --- Certainty = 0.0000(Not Clear) < succ>
```

[2427] A related GBS nucleic acid sequence <SEQ ID 9703> which encodes amino acid sequence <SEQ ID 9704> was also identified.

[2428] The protein has homology with the following sequences in the GENPEPT database:

| >GP: AAD35160 GB: AE001693 2-dehydro-3-deoxyphosphogluconate | | | |
|---|---|---|---|
| aldolase/4-hydroxy-2-oxoglutarate aldolase [Thermotoga maritima] | | | |
| Identities = 93/199 (46%), Positives = 125/199 (62%), Gaps = 6/199 (3%) | | | |
| Query: | 37 | KNNYFFAVIRGKSSEDALEIAKHAILGGIRNIEVTFSTPEASKVIKQLSDDFKNNKEIIV | 96 |
| | | K + AV+R S E+A E A GG+ IE+TF+ P+A VIK+LS F K I+ | |
| Sbjct: | 8 | KKHKIVAVLRANSVEEAKEKALAVFEGGVHLIEITFTVPDADTVIKELS--FLKEKGAII | 65 |
| Query: | 97 | GAGTVMTTELAKEAIDAGAKFLVSPHFDSDIANLANENKVYYFPGCATATEIVVARKYKC | 156 |
| | | GAGTV + E ++A+++GA+F+VSPH D +I+ E V+Y PG T TE+V A K | |
| Sbjct: | 66 | GAGTVTSVEQCRKAVESGAEFIVSPHLDEEISQFCKEKGVFYMPGVMTPTELVKAMKLGH | 125 |
| Query: | 157 | QIIKLFPGGVVGPGFIKDIHGPIPDVDLMPSGGVSVSNVVEWRKAGAVAVGVGSALSSKV | 216 |
| | | I+KLFPG VVGP F+K + GP P+V +P+GGV++ NV EW KAG +AVGVGSAL | |
| Sbjct: | 126 | TILKLFPGEVVGPQFVKAMKGPFPNVKFVPTGGVNLDNVCEWFKAGVLAVGVGSALVKGT | 185 |
| Query: | 217 | ATEGYDSVTKIAKQFVSAL | 235 |
| | | D V + AK FV + | |
| Sbjct: | 186 | P----DEVREKAKAFVEKI | 200 |

[2429] A related DNA sequence was identified in S. pyogenes <SEQ ID 1251> which encodes the amino acid sequence <SEQ ID 1252>. Analysis of this protein sequence reveals the following:

```
Possible site: 29
>>> Seems to have no N-terminal signal sequence
----- Final Results -----
                            bacterial cytoplasm --- Certainty = 0.1039(Affirmative) < succ>
                              bacterial membrane --- Certainty = 0.0000(Not Clear) < succ>
                                bacterial outside --- Certainty = 0.0000(Not Clear) < succ>
```

[2430] An alignment of the GAS and GBS proteins is shown below:

| Identities = 82/204 (40%), Positives = 132/204 (64%) | | | |
|---|---|---|---|
| Query: | 32 | MLNQLKNNYFFAVIRGKSSEDALEIAKHAILGGIRNIEVTFSTPEASKVIKQLSDDFKNN | 91 |
| | | +L +LK N V+RG+SSE+AL + +I GGI+ IEVT++ P AS+VI QL++ FK + | |
| Sbjct: | 6 | ILTKLKANRLVLVVRGESSEEALACSLASIEGGIKTIEVTYTNPFASEVIGQLAERFKED | 65 |
| Query: | 92 | KEIIVGAGTVMTTELAKEAIDAGAKFLVSPHFDSDIANLANENKVYYFPGCATATEIVVA | 151 |
| | | E+++GAGTV+ A++AI AGA+F+V P+F+ +A + + + Y PGC T E+V A | |
| Sbjct: | 66 | PEVLIGAGTVLDDVTARQAILAGAQFIVGPNFNRAVALICHRYSIPYLPGCMTVNEVVTA | 125 |
| Query: | 152 | RKYKCQIIKLFPGGVVGPGFIKDIHGPIPDVDLMPSGGVSVSNVVEWRKAGAVAVGVGSA | 211 |
| | | + ++K+FPG VG FI+ I P+P V++M +GGVS N+ +W AG +G+G | |
| Sbjct: | 126 | LESGVDMVKIFPGSTVGISFIRAIKSPLPQVEVMVTGGVSSDNLKDWLAAGVDVLGIGGE | 185 |
| Query: | 212 | LSSKVATEGYDSVTKIAKQFVSAL | 235 |
| | | + + + Y+ +TK A ++ +L | |
| Sbjct: | 186 | FNQLASQKQYNLITKKAAHYIKSL | 209 |

[2431] Based on this analysis, it was predicted that these proteins and their epitopes could be useful antigens for vaccines or diagnostics.

### EXAMPLE 385

[2432] A DNA sequence (GBSx0416) was identified in S. agalactiae <SEQ ID 1253> which encodes the amino acid sequence <SEQ ID 1254>. This protein is predicted to be pyruvate dehydrogenase complex repressor. Analysis of this protein sequence reveals the following:

```
Possible site: 26
>>> Seems to have no N-terminal signal sequence
----- Final Results -----
                            bacterial cytoplasm --- Certainty = 0.2827(Affirmative) < succ>
                              bacterial membrane --- Certainty = 0.0000(Not Clear) < succ>
                                bacterial outside --- Certainty = 0.0000(Not Clear) < succ>
```

[2433] The protein has homology with the following sequences in the GENPEPT database:

| >GP:CAB12044 GB:Z99105 similar to transcriptional regulator (GntR | | | |
|---|---|---|---|
| family) [Bacillus subtilis] | | | |
| Identities = 67/225 (29%), Positives = 119/225 (52%), Gaps = 17/225 (7%) | | | |
| Query: | 3 | RPLVEQTADRLLHLILEREYPVGAKLPNEYELAEDLDVGRSTIREAVRSLATRNILEVRQ | 62 |
| | | + L +Q +R++HL+ + G KLP E EL + L V R +REA+ SL T ++ + | |
| Sbjct: | 16 | KTLAKQVIERIVHLLSSGQLRAGDKLPTEMELMDILHVSRPVLREALSSLETLGVITRKT | 75 |
| Query: | 63 | GSGTYISSKKGVSEDPLGFSLIKDTDRLTSDLFELRLLLEPRIAELVAYRITDDQLQLLE | 122 |
| | | GTY + K G+ P L TD L + + E R+ LE + + A +I +++LQ L+ | |
| Sbjct: | 76 | RGGTYFNDKIGM--QPFSVMLALATDNLPA-IIEARMALELGLVTIAAEKINEEELQRLQ | 132 |
| Query: | 123 | KLVGDIEDAV--HAGDPKHLLLDVEFHSMLAKYSGNIAMDSLLPVINQSIHLINANYTNR | 180 |
| | | K + DI ++ H G+ D EFH ++A + N ++ ++ QS+ + +A ++ | |
| Sbjct: | 133 | KTIDDIANSTDNHYGE-----ADKEFHRIIALSANNPVVEGMI----QSLLITHAKIDSQ | 183 |
| Query: | 181 | ---QMKSDSLEAHREIIKAIREKNPVAAHDAMLMHIMSVRRSALK | 222 |
| | | + + ++E H++I A+ +++P AH M H+ VR LK | |
| Sbjct: | 184 | IPYRERDVTVEYHKKIYDALAQRDPYKAHYHMYEHLKFVRDKILK | 228 |

[2434] A related DNA sequence was identified in S. pyogenes <SEQ ID 1255> which encodes the amino acid sequence <SEQ ID 1256>. Analysis of this protein sequence reveals the following:

```
Possible site: 54
>>> Seems to have no N-terminal signal sequence
----- Final Results -----
                            bacterial cytoplasm --- Certainty = 0.2161(Affirmative) < succ>
                              bacterial membrane --- Certainty = 0.0000(Not Clear) < succ>
                                bacterial outside --- Certainty = 0.0000(Not Clear) < succ>
```

[2435] An alignment of the GAS and GBS proteins is shown below:

| Identities = 24/51 (47%), Positives = 35/51 (68%) | | | |
|---|---|---|---|
| Query: | 22 | YPVGAKLPNEYELAEDLDVGRSTIREAVRSLATRNILEVRQGSGTYISSKK | 72 |
| | | +P+G++LP+E LAE V R T+R+A+ L ILE R GSGTY++S + | |
| Sbjct: | 30 | WPIGSRLPSERHLAEHFTVSRMTLRQAITLLVEEGILERRIGSGTYVASHR | 80 |

[2436] Based on this analysis, it was predicted that these proteins and their epitopes could be useful antigens for vaccines or diagnostics.

### EXAMPLE 386

[2437] A DNA sequence (GBSx0417) was identified in S. agalactiae <SEQ ID 1257> which encodes the amino acid sequence <SEQ ID 1258>. Analysis of this protein sequence reveals the following:

```
Possible site: 31
>>> Seems to have no N-terminal signal sequence
----- Final Results -----
                            bacterial cytoplasm --- Certainty = 0.2178(Affirmative) < succ>
                              bacterial membrane --- Certainty = 0.0000(Not Clear) < succ>
                                bacterial outside --- Certainty = 0.0000(Not Clear) < succ>
```

[2438] A related GBS nucleic acid sequence <SEQ ID 9701> which encodes amino acid sequence <SEQ ID 9702> was also identified.

[2439] The protein has homology with the following sequences in the GENPEPT database:

| >GP:CAA58911 GB:X84105 gluceronidase [synthetic construct] | | | |
|---|---|---|---|
| Identities = 258/602 (42%), Positives = 357/602 (58%), Gaps = 31/602 (5%) | | | |
| Query: | 23 | MLYPLLTKTRNTYDLGGIWNFKLGEHNPN-------ELLPSDEVMVIPTSFNDLMVSKEK | 75 |
| | | ML P+ T TR L G+W F L N L + +P SFND + | |
| Sbjct: | 1 | MLRPVETPTREIKKLDGLWAFSLDRENCGIDQRWWESALQESRAIAVPGSFNDQFADADI | 60 |
| Query: | 76 | RDYIGDFWYEKVIEVPKVSEDEEMVLRFGSVTHQAKIYVDGVLVGEHKGGFTPFEVLVPE | 135 |
| | | R+Y G+ WY++ + +PK + +VLRF +VTH K++V+ V EH+GG+TPFE V | |
| Sbjct: | 61 | RNYAGNVWYQREVFIPKGWAGQRIVLRFDAVTHYGKVWVNNQEVMEHQGGYTPFEADVTP | 120 |
| Query: | 136 | CKYNNEKIKVSICANNVLDYTTLPVGNYSEIIQEDGSIKKKVRENFDFFNYAGVHRPLKL | 195 |
| | | + +++++C NN L++ T+P G I E+G KKK DFFNYAG+HR + L | |
| Sbjct: | 121 | YVIAGKSVRITVCVNNELNWQTIPPGMV--ITDENG--KKKQSYFHDFFNYAGIHRSVML | 176 |
| Query: | 196 | MIRPKNHIFDITITSRLSDDLQSADLHFLVETNQKVDEVRISVFDEDNKLV--GETKDSR | 253 |
| | | P + DIT+ + ++ D A + + V N +V + + D D ++V G+ | |
| Sbjct: | 177 | YTTPNTWVDDITVVTHVAQDCNHASVDWQVVAN---GDVSVELRDADQQVVATGQGTSGT | 233 |
| Query: | 254 | LFLSDVHLWEVLNAYLYTARVEIFVDNQLQDVYEENFGLREIEVTNGQFLLNRKPIYFKG | 313 |
| | | L + + HLW+ YLY V + D+Y G+R + V QFL+N KP YF G | |
| Sbjct: | 234 | LQVVNPHLWQPGEGYLYELCVTAKSQTEC-DIYPLRVGIRSVAVKGEQFLINHKPFYFTG | 292 |
| Query: | 314 | FGKHEDTFINGRGLNEAANLMDLNLLKDMGANSFRTSHYPYSEEMMRLADRMGVLVIDEV | 373 |
| | | FG+HED + G+G + + D L+ +GANS+RTSHYPY+EEM+ AD G++VIDE | |
| Sbjct: | 293 | FGRHEDADLRGKGFDNVLMVHDHALMDWIGANSYRTSHYFYAEEMLDWADEHGIVVIDET | 352 |
| Query: | 374 | PAVGLFQNFNASLDLS------PKDNGTWNLM--QTKAAHEQAIQELVKRDKNHPSVVMW | 425 |
| | | AVG FN SL + PK+ + + +T+ AH QAI+EL+ RDKNHPSVVMW | |
| Sbjct: | 353 | AAVG----FNLSLGIGFEAGNKPKELYSEEAVNGETQQAHLQAIKELIARDKNHPSVVMW | 408 |
| Query: | 426 | VVANEPASHEAGAHDYFEPLVKLYKDLDPQKRPVTLVNILMATPDRDQVMDLVDVVCLNR | 485 |
| | | +ANEP + GA +YF PL + + LDP RP+T VN++ D + DL DV+CLNR | |
| Sbjct: | 409 | SIANEPDTRPQGAREYFAPLAEATRKLDPT-RPITCVNVMFCDAHTDTISDLFDVLCLNR | 467 |
| Query: | 486 | YYGWYVDHGDLTNAEVGIRKELLEWQDKFPDKPIIITEYGADTLPGLHSTWNIPYTEEFQ | 545 |
| | | YYGWYV GDL AE + KELL WQ+K +PIIITEYG DTL GLHS + ++EE+Q | |
| Sbjct: | 468 | YYGWYVQSGDLETAEKVLEKELLAWQEKL-HQPIIITEYGVDTLAGLHSMYTDMWSEEYQ | 526 |
| Query: | 546 | CDFYEMSHRVFDGIPNLVGEQVWNFADFETNLMILRVQGNHKGLFSRNRQPKQVVKEFKK | 605 |
| | | C + +M HRVFD + +VGEQVWNFADF T+ ILRV GN KG+F+R+R+PK +K | |
| Sbjct: | 527 | CAWLDMYHRVFDRVSAVVGEQVWNFADFATSQGILRVGGNKKGIFTRDRKPKSAAFLLQK | 586 |
| Query: | 606 | RW | 607 |
| | | RW | |
| Sbjct: | 587 | RW | 588 |

[2440] A related DNA sequence was identified in S. pyogenes <SEQ ID 1259> which encodes the amino acid sequence <SEQ ID 1260>. Analysis of this protein sequence reveals the following:

```
Possible site: 23
>>> Seems to have no N-terminal signal sequence
      INTEGRAL Likelihood = −4.04 Transmembrane 1131 − 1147 (1130 − 1147)
----- Final Results -----
                            bacterial membrane --- Certainty = 0.2614(Affirmative) < succ>
                              bacterial outside --- Certainty = 0.0000(Not Clear) < succ>
                          bacterial cytoplasm --- Certainty = 0.0000(Not Clear) < succ>
```

[2441] The protein has homology with the following sequences in the databases:

| >GP:AAF97242 GB:AF282987 beta-galactosidase precursor [Streptococcus pneumoniae] | | | |
|---|---|---|---|
| Identities = 303/921 (32%), Positives = 463/921 (49%), Gaps = 86/921 (9%) | | | |
| Query: | 5 | QKSSEIVT----RTITKPSRATSNVKQEIDMTPDSKEQTVTGYQYHYIDQ--EGRKQPFN | 58 |
| | | +K E VT + KP ++ + ++ ++Q E RK FN | |
| Sbjct: | 96 | KKEDEAVTPKEEKVSAKPEEKAPRIESQASNQEKPLKEDAKAVTNEEVNQMIEDRKVDFN | 155 |
| Query: | 59 | QGWRF-LMADVACAQDPSFDDSNWQVIHLPHDFSLTQPYTRNGEA--ESAYKLGGVGWYR | 115 |
| | | Q W F L A+ A P D S W+ + LP+D+S+ + A E GG WYR | |
| Sbjct: | 156 | QNWYFKLNANSKEAIKPDADVSTWKKLDLPYDWSIFNDFDHESPAQNEGGQLNGGEAWYR | 215 |
| Query: | 116 | HYLVLDEVLAGCHVAITFEGSYMETEIYVNGQFIGKHLNGYQEFTYDISDVVTF-GAENL | 174 |
| | | LDE +V +TF+G YM++++YVNGQ +G + NGY +F+YDI+ + G EN+ | |
| Sbjct: | 216 | KTFKLDEKDLKKNVRLTFDGVYMDSQVYVNGQLVGHYPNGYNQFSYDITKYLQKDGRENV | 275 |
| Query: | 175 | LAVRVENKVPSSRWYSGSGLYREVSLSVLPQLHFVADQVAMTLADTAVQEKGQQKVDLRF | 234 |
| | | +AV NK PSSRWYSGSG+YR+V+L V ++H + + Q+ G+ + + | |
| Sbjct: | 276 | IAVHAVNKQPSSRWYSGSGIYRDVTLQVTDKVHVEKNGTTILTPKLEEQQHGEVETHVTS | 335 |
| Query: | 235 | ALNQSIQTCHYQLSLCLWEQSHCSKDKKLLYQETEVPLADLAFQRQYGLT--LSLEELQL | 292 |
| | | + + H ++ E + + L L L +E +L | |
| Sbjct: | 336 | KIVNTDDKDHELVA----EYQIVERGGHAVTGLVRTASRTLKAHESTSLDAILSVERPKL | 391 |
| Query: | 293 | WSP--DNPHLYDLELTLYYQGQVIDCFCLETGFRQLTFMANQGLFVNGRAVKLKGVCLHH | 350 |
| | | W+ D P LY+L +Y GQ++D G+R + N+G +NG +K GV LHH | |
| Sbjct: | 392 | WTVLNDKPALYELITRVYRDGQLVDAKKDLFGYRYYHWTPNEGFSLNGERIKFHGVSLHH | 451 |
| Query: | 351 | DQGGLGACAYEDALARQLVLLKDMGANTIRSTHNPSSPKLRQLANRLGFFVIEEAFDTWT | 410 |
| | | D G LGA A R+L +K+MG N+IR+THNP+S + Q+A LG V EEAFDTW | |
| Sbjct: | 452 | DHGALGAEENYKAEYRRLKQMKEMGVNSIRTTHNPASEQTLQIAAELGLLVQEEAFDTWY | 511 |
| Query: | 411 | YAKNGNVNDFSNYFHQTIGTENANYLQRVRSPETSWAQYSIEAMVWSAKNDPSVLMWSIG | 470 |
| | | K D+ +F + A ++ W+ + + MV KN+P++ MWSIG | |
| Sbjct: | 512 | GGK--KPYDYGRFFEKDATHPEARKGEK-------WSDFDLRTMVERGKNNPAIFMWSIG | 562 |
| Query: | 471 | NELMEGFSADVSHYPELTRQMCQWITAIDTSRPITFGDNKLKEADFC-WHEEVSQMATLL | 529 |
| | | NE+ G + +H +++ + I +D +R +T G +K + + HE+++ | |
| Sbjct: | 563 | NEI--GEANGDAHSLATVKRLVKVIKDVDKTRYVTMGADKFRFGNGSGGHEKIA------ | 614 |
| Query: | 530 | SQLDHPQGLIGLNYADGKDYDRLHEEHSDWLLYGSETVSAITSR-AYYKETKKVLDS--- | 585 |
| | | +LD +G NY++ +Y L +H WL+YGSET SA +R +YY+ +++ S | |
| Sbjct: | 615 | DELD----AVGFNYSE-DNYKALRAKHPKWLIYGSETSSATRTRGSYYRPERELKHSNGP | 669 |
| Query: | 586 | --GYHLTSYDHAKVDWGAFASQAWYDTITRDFV--AGECVWTGFDYLGEPTPWNKTDSGV | 641 |
| | | Y + Y + +V WG A+ +W T RD AG+ +WTG DY+GEPTPW+ + | |
| Sbjct: | 670 | ERNYEQSDYGNDRVGWGKTATASW--TFDRDNAGYAGQFIWTGTDYIGEPTPWHNQNQTP | 727 |
| Query: | 642 | VGLWPSPKNAYFGILDTAGFPKDSYYFYQSQW--AQGQTTLHLLPVWQKD-----QLCFD | 694 |
| | | V K++YFGI+DTAG PK +Y YQSQW + + +HLLP W + D | |
| Sbjct: | 728 | V------KSSYFGIVDTAGIPKHDFYLYQSQWVSVKKKPMVHLLPHWNWENKELASKVAD | 781 |
| Query: | 695 | EQGLVEVVVYSNAASVQLMFEDEQGNLTDYGRKAFHTYSTPTGHTYQLYQGADAAKNPHE | 754 |
| | | +G + V YSNA+SV+L N G K F+ T G TYQ +GA+A | |
| Sbjct: | 782 | SEGKIPVRAYSNASSVELFL-----NGKSLGLKTFNKKQTSDGRTYQ--EGANA-----N | 829 |
| Query: | 755 | NLYLTWRVPYQKGLLRAVAYDISGKSIPKTSGRSQVRTYGSVAKLSWKAFEAPIDAPW-E | 813 |
| | | LYL W+V YQ G L A+A D SGK I R ++ T G A + + I A + | |
| Sbjct: | 830 | ELYLEWKVAYQPGTLEAIARDESGKEI----ARDKITTAGKPAAVRLIKEDHAIAADGKD | 885 |
| Query: | 814 | LLYLDLSLLDSRGELVSHAQDWLQVQVEGPARLLALDNGNPTDHTPYQEP-----LRQAY | 868 |
| | | L Y+ ++DS+G +V A + ++ Q+ G +L+ +DNG Y+ +R+A+ | |
| Sbjct: | 886 | LTYIYYEIVDSQGNVVPTANNLVRFQLHGQGQLVGVDNGEQASRERYEAQADGSWIRKAF | 945 |
| Query: | 869 | GGKLLAILALTGEAGHIKVTA 889 | |
| | | GK +AI+ T +AG +TA | |
| Sbjct: | 946 | NGKGVAIVKSTEQAGKFTLTA | 966 |

[2442] An alignment of the GAS and GBS proteins is shown below:

| Identities = 98/414 (23%), Positives = 175/414 (41%), Gaps = 64/414 (15%) | | | |
|---|---|---|---|
| Query: | 54 | LPSDEVMVIPTSFNDLMVSKEKRDYIGDFWYEKVIEVPKVSEDEEMVLRFGSVTHQAKIY | 113 |
| | | LP D + P + N S K +G WY + + +V + + F + +IY | |
| Sbjct: | 86 | LPHDFSLTQPYTRNGEAESAYKLGGVG-WYRHYLVLDEVLAGCHVAITFEGSYMETEIY | 143 |
| Query: | 114 | VDGVLVGEHKGGFTPFEVLVPECKYNNEKIKVSICANNVLDYTTLPVGNYSEIIQEDGSI | 173 |
| | | V+G +G+H G+ F + + V+ A N+L + | |
| Sbjct: | 144 | VNGQFIGKHLNGYQEFTYDISDV--------VTFGAENLLAVR----------------V | 179 |
| Query: | 174 | KKKVRENFDFFNYAGVHRPLKLMIRPKNHIFDITITSRLSDDL------QSADLHFLVET | 227 |
| | | + KV + +++ +G++R + L + P+ H + L+D Q DL F + | |
| Sbjct: | 180 | ENKVPSS-RWYSGSGLYREVSLSVLPQLHFVADQVAMTLADTAVQEKGQQKVDLRFALNQ | 238 |
| Query: | 228 | NQKVDEVRISVF-------DEDNKLVGETKDS-------------RLFLSDVNLWEVLNA | 267 |
| | | + + ++S+ +D KL+ + + L L ++ LW N | |
| Sbjct: | 239 | SIQTCHYQLSLCLWEQSHCSKDKKLLYQETEVPLADLAFQRQYGLTLSLEELQLWSPDNP | 298 |
| Query: | 268 | YLYTARVEIFVDNQLQDVYEENFGLREIE-VTNGQFLLNRKPIYFKGFGKHEDTFINGRG | 326 |
| | | +LY + ++ Q+ D + G R++ + N +N + + KG H D G | |
| Sbjct: | 299 | HLYDLELTLYYQGQVIDCFCLETGFRQLTFMANQGLFVNGRAVKLKGVCLHHDQGGLGAC | 358 |
| Query: | 327 | LNEAANLMDLNLLKDMGANSFRTSHYPYSEEMMRLADRMGVLVIDEVPAVGLFQ---NFN | 383 |
| | | E A L LLKDMGAN+ R++H P S ++ +LA+R+G VI+E + N N | |
| Sbjct: | 359 | AYEDALARQLVLLKDMGANTIRSTHNPSSPKLRQLANRLGFFVIEEAFDTWTYAKNGNVN | 418 |
| Query: | 384 | ASLDLSPKDNGTWN---LMQTKAAH----EQAIQELVKRDKNHPSVVMWVVANE | 430 |
| | | + + GT N L + ++ + +I+ +V KN PSV+MW + NE | |
| Sbjct: | 419 | DFSNYFHQTIGTENANYLQRVRSPETSWAQYSIEAMVWSAKNDPSVLMWSIGNE | 472 |

[2443] Based on this analysis, it was predicted that these proteins and their epitopes could be useful antigens for vaccines or diagnostics.

### EXAMPLE 387

[2444] A DNA sequence (GBSx0418) was identified in S. agalactiae <SEQ ID 1261> which encodes the amino acid sequence <SEQ ID 1262>. This protein is predicted to be 2-keto-3-deoxygluconate kinase. Analysis of this protein sequence reveals the following:

```
Possible site: 13
>>> Seems to have no N-terminal signal sequence
      INTEGRAL Likelihood = −0.53 Transmembrane 197 − 213 (197 − 213)
----- Final Results -----
                            bacterial membrane --- Certainty = 0.1213(Affirmative) < succ>
                              bacterial outside --- Certainty = 0.0000(Not Clear) < succ>
                          bacterial cytoplasm --- Certainty = 0.0000(Not Clear) < succ>
```

[2445] A related GBS nucleic acid sequence <SEQ ID 9699> which encodes amino acid sequence <SEQ ID 9700> was also identified.

[2446] The protein has homology with the following sequences in the GENPEPT database:

| >GP:AAD35161 GB:AE001693 2-keto-3-deoxygluconate kinase [Thermotoga maritima] | | | |
|---|---|---|---|
| Identities = 115/342 (33%), Positives = 180/342 (52%), Gaps = 16/342 (4%) | | | |
| Query: | 14 | KIISLGEVLLRLSPPQYHTLMQANHLKCQFGGSELNVLASLAQLGYHVGLVSALPDNDLG | 73 |
| | | K+++ GE++LRLSPP + + Q + +GG+E NV A LAQ+G V+ LP+N LG | |
| Sbjct: | 2 | KVVTFGEIMLRLSPPDHKRIFQTDSFDVTYGGAEANVAAFLAQMGLDAYFVTKLPNNPLG | 61 |
| Query: | 74 | KMASQFILSQQISPAAIIKKEGRLGIYYYEQGFSVRTNKVIYDRNYSSFWESTLSDYDFT | 133 |
| | | A+ + + I + R+GIY+ E G S R +KV+YDR +S+ E+ D+D+ | |
| Sbjct: | 62 | DAAAGHLRKFGVKTDYIARGGNRIGIYFLEIGASQRPSKVVYDRAHSAISEAKREDFDWE | 121 |
| Query: | 134 | SIFKGVDWFHVSGITPALTKDLYEVTRFLMTKAKEGGVKVSIDLNFRESLWSSFQEAREQ | 193 |
| | | I G WFH SGITP L K+L + + A E GV VS DLN+R LW+ +EA++ | |
| Sbjct: | 122 | KILDGARWFHFSGITPPLGKELPLILEDALKVANEKGVTVSCDLNYRARLWTK-EEAQKV | 180 |
| Query: | 194 | LSPLLGLLDVCFGLEPIYLAGESEDLKDELGLSRPYLDI-------ELLEKITQKIVQEY | 246 |
| | | + P + +DV L ED++ LG+S LD+ E KI +++ ++Y | |
| Sbjct: | 181 | MIPFMEYVDV--------LIANEEDIEKVLGISVEGLDLKTGKLNREAYAKIAEEVTRKY | 232 |
| Query: | 247 | GLDYIAFTQREMEYTNQYMLKSYLYHNNMLYQTDKTGVEVLDRVGTGDAFAAGLIHALLE | 306 |
| | | + T RE ++ N + +++ + ++DRVG GD+FA LI+ L | |
| Sbjct: | 233 | NFKTVGITLRESISATVNYWSVMVFENGQPHFSNRYEIHIVDRVGAGDSFAGALIYGSLM | 292 |
| Query: | 307 | KETPQRALEIAMATFKYKHTIQGDINIMTRDDIAYLIEKETN | 348 |
| | | Q+ E A A KHTI GD +++ ++I L T+ | |
| Sbjct: | 293 | GFDSQKKAEFAAAASCLKHTIPGDFVVLSIEEIEKLASGATS | 334 |

[2447] A related DNA sequence was identified in S. pyogenes <SEQ ID 1263> which encodes the amino acid sequence <SEQ ID 1264>. Analysis of this protein sequence reveals the following:

```
Possible site: 38
>>> Seems to have no N-terminal signal sequence
----- Final Results -----
                            bacterial cytoplasm --- Certainty = 0.0708(Affirmative) < succ>
                              bacterial membrane --- Certainty = 0.0000(Not Clear) < succ>
                                bacterial outside --- Certainty = 0.0000(Not Clear) < succ>
```

[2448] An alignment of the GAS and GBS proteins is shown below:

| Identities = 111/319 (34%), Positives = 168/319 (51%), Gaps = 7/319 (2%) | | | |
|---|---|---|---|
| Query: | 12 | MAKIISLGEVLLRLSPPQYHTLMQANHLKCQFGGSELNVLASLAQLGYHVGLVSALPDND | 71 |
| | | M+K++ +GE L+R+SP Q+ L A + FGGSE+N+ +L G L +ALPDN | |
| Sbjct: | 14 | MSKLLLVGEPLIRVSPNQFQPLTNACEAQLFFGGSEVNIARTLGGFGLEARLFTALPDNP | 73 |
| Query: | 72 | LGKMASQFILSQQISPAAIIKKEGRLGIYYYEQGFSVRTNKVIYDRNYSSFWESTLSDYD | 131 |
| | | +G QF+ + + + R+G+YY E GF R ++V YDR SSF D | |
| Sbjct: | 74 | VGHAFHQFLKQSGVDMSLTAWQGHRVGLYYLENGFGCRASQVYYDRCGSSFSALDKDSLD | 133 |
| Query: | 132 | FTSIFKGVDWFHVSGITPALTKDLYEVTRFLMTKAKEGGVKVSIDLNFRESLWSSFQEAR | 191 |
| | | +IF+G+ FH SGI+ AL K ++ L+ +AK+ + +S DLNFR S+ + +A+ | |
| Sbjct: | 134 | LAAIFEGISHFHFSGISLALGKKTQDLIEVLVREAKKRDICISFDLNFRSSM-IAVADAK | 192 |
| Query: | 192 | EQLSPLLGLLDVCFGLEPIYLAGESEDLKDELGLSRPYLDIELLEKITQKIVQEYGLDYI | 251 |
| | | S D+ FG+EP+ L + D+ D R D + + + Q Y L I | |
| Sbjct: | 193 | RLFSHFAQYADIIFGMEPLLLDSDDFDMFD-----RKKADTTTIRERLAGLYQRYQLQAI | 247 |
| Query: | 252 | AFTQREMEYTNQYMLKSYLYHNNMLYQTDKTGVEVLDRVGTGDAFAAGLIHALLEKETPQ | 311 |
| | | T+R + K+Y Y + Y++ + VL RVG+GDAF AGL++ LLE Q | |
| Sbjct: | 248 | YHTERSNDAQGSNHFKAYAY-DRQFYESCEVTTPVLQRVGSGDAFVAGLLYQLLEGNEKQ | 306 |
| Query: | 312 | RALEIAMATFKYKHTIQGD | 330 |
| | | R L+ A+AT K T+ D | |
| Sbjct: | 307 | RNLDFAVATASLKCTVAED | 325 |

[2449] Based on this analysis, it was predicted that these proteins and their epitopes could be useful antigens for vaccines or diagnostics.

### EXAMPLE 388

[2450] A DNA sequence (GBSx0419) was identified in S. agalactiae <SEQ ID 1265> which encodes the amino acid sequence <SEQ ID 1266>. Analysis of this protein sequence reveals the following:

```
Possible Site: 15
>>> Seems to have an uncleavable N-term signal seq
      INTEGRAL Likelihood = −1.17 Transmembrane 5 − 21 (5 − 21)
----- Final Results -----
                              bacterial membrane --- Certainty = 0.1468(Affirmative) < succ>
                                bacterial outside --- Certainty = 0.0000(Not Clear) < succ>
                            bacterial cytoplasm --- Certainty = 0.0000(Not Clear) < succ>
```

[2451] The protein has no significant homology with any sequences in the GENPEPT database.

[2452] No corresponding DNA sequence was identified in S. pyogenes.

[2453] Based on this analysis, it was predicted that this protein and its epitopes, could be useful antigens for vaccines or diagnostics.

### EXAMPLE 389

[2454] A DNA sequence (GBSx0420) was identified in S. agalactiae <SEQ ID 1267> which encodes the amino acid sequence <SEQ ID 1268>. Analysis of this protein sequence reveals the following:

| Possible site: 53 | | | | | |
|---|---|---|---|---|---|
| >>> Seems to have no N-terminal signal sequence | | | | | |
| | INTEGRAL | Likelihood = −12.05 | Transmembrane | 198 − 214 | (191 − 220) |
| | INTEGRAL | Likelihood = −11.68 | Transmembrane | 446 − 462 | (437 − 467) |
| | INTEGRAL | Likelihood = −9.55 | Transmembrane | 94 − 110 | (91 − 116) |
| | INTEGRAL | Likelihood = −7.43 | Transmembrane | 291 − 307 | (283 − 309) |
| | INTEGRAL | Likelihood = −4.88 | Transmembrane | 265 − 281 | (257 − 282) |
| | INTEGRAL | Likelihood = −4.62 | Transmembrane | 321 − 337 | (318 − 339) |
| | INTEGRAL | Likelihood = −3.93 | Transmembrane | 406 − 422 | (405 − 426) |
| | INTEGRAL | Likelihood = −1.59 | Transmembrane | 121 − 137 | (121 − 137) |
| | INTEGRAL | Likelihood = −1.12 | Transmembrane | 345 − 361 | (345 − 362) |
| | INTEGRAL | Likelihood = −0.48 | Transmembrane | 43 − 59 | (43 − 59) |

```
----- Final Results -----
                            bacterial membrane --- Certainty = 0.5819(Affirmative) < succ>
                              bacterial outside --- Certainty = 0.0000(Not Clear) < succ>
                          bacterial cytoplasm --- Certainty = 0.0000(Not Clear) < succ>
```

[2455] The protein has homology with the following sequences in the GENPEPT database:

| >GP:CAB13641 GB:Z99113 similar to H+−symporter [Bacillus subtilis] | | | |
|---|---|---|---|
| Identities = 105/452 (23%), Positives = 182/452 (40%), Gaps = 37/452 (8%) | | | |
| Query: | 36 | IYLFTFMFVTYFSTGVLGSAAIFVSQIMGYIRIFDGFIDPAIGIMIDKTDTKFGKYRPIL | 95 |
| | | IY ++ +F T V G +A + +RI D DP IG ++D+T+++F ++RP L | |
| Sbjct: | 27 | IYATVSTYLLFFYTDVFGLSAAAAGTMFLVVRIIDALADPFIGTIVDRTNSRFARFRPYL | 86 |
| Query: | 96 | IIGNVITALSLIFLLALRGVDENIRFPLFILVLIIHKIGYSHQQTITKAGQTALTNDPKQ | 155 |
| | | + G A + L L + ++ I +G S+ T ALT+ | |
| Sbjct: | 87 | LFG----AFPFVILAILCFTTPDFSDMGKLIYAYITYVGLSLTYTTINVPYGALTS-AMT | 141 |
| Query: | 156 | RPIFNIVDAVMTTSLMTGGQFVVSVFLVPKFGNFTPQFFNVLIFGTILISAILAIV--AI | 213 |
| | | R +V L +V F VP + G L IL ++ + | |
| Sbjct: | 142 | RNNQEVVSITSVRMLFANLGGLVVAFFVPLLAAYLSDTSGNESLGWQLTMGILGMIGGCL | 201 |
| Query: | 214 | IGIWAKDRKEFFGLGENTQKTALKDYWKVLKGNKPLQILSIAAALVKFAIQFFGDSV-VM | 272 |
| | | + K KE L ++ +K D ++ + N+PL +LSI ++ F + +SV + | |
| Sbjct: | 202 | LIFCFKSTKERVTLQKSEEKIKFTDIFEQFRVNRPLVVLSIFFIII-FGVNSISNSVGIY | 260 |
| Query: | 273 | VLLFGI----LFGNYALSGQFSLLFIVPGVIINILFSTIARKKGLRFSYVRAIQIGMIGL | 328 |
| | | + + + L Y L G L I+P I L + +KK L + A+ + +IGL | |
| Sbjct: | 261 | YVTYNLEREDLVKWYGLIGSLPALVILP--FIPRLHQFLGKKKLLNY----ALLLNIIGL | 314 |
| Query: | 329 | LAFGAVLYVGKPGDLSLTSLNLYTILFIVTNIIARYASQAPASLVLTMGADISDYETSES | 388 |
| | | LA L + N+Y IL V +IA S + + + +Y + | |
| Sbjct: | 315 | LAL-----------LFVPPSNVYLIL--VCRLIAAAGSLTAGGYMWALIPETIEYGEYRT | 361 |
| Query: | 389 | GRYVSGMIGTIFSLTDSIASSFAPMVVGFVLAGIGFSKSFPTIETPLPPDLKMAAISILV | 448 |
| | | G+ + G+I I + +V G VL G+ P M + | |
| Sbjct: | 362 | GKRMGGLIYAIIGFFFKFGMALGGVVPGLVLDKFGY-----VANQAQTPAALMGILITTT | 416 |
| Query: | 449 | AIPFIALSIALLLMKFYKLDKEEMVRIQEKIQ | 480 |
| | | IP L +AL+ + FY LD+++ + +++ | |
| Sbjct: | 417 | IIPVFLLVLALIDINFYNLDEKKYKNMVRELE | 448 |

[2456] No corresponding DNA sequence was identified in S. pyogenes.

[2457] Based on this analysis, it was predicted that this protein and its epitopes, could be useful antigens for vaccines or diagnostics.

### EXAMPLE 390

[2458] A DNA sequence (GBSx0422) was identified in S. agalactiae <SEQ ID 1269> which encodes the amino acid sequence <SEQ ID 1270>. Analysis of this protein sequence reveals the following:

```
Possible site: 52
>>> Seems to have no N-terminal signal sequence
----- Final Results -----
                            bacterial cytoplasm --- Certainty = 0.3375(Affirmative) < succ>
                              bacterial membrane --- Certainty = 0.0000(Not Clear) < succ>
                                bacterial outside --- Certainty = 0.0000(Not Clear) < succ>
```

[2459] The protein has homology with the following sequences in the GENPEPT database:

| >GP:AAB17663 GB:U31175 D-specific D-2-hydroxyacid dehydrogenase [S. aureus] | | | |
|---|---|---|---|
| Identities = 165/331 (49%), Positives = 231/331 (68%), Gaps = 1/331 (0%) | | | |
| Query: | 1 | MMKLKVFNVREEEATLAQDWANRNHVELSMSEGPLTLETVNEVEGFDGIANAQIEPLDDA | 60 |
| | | M K+ F R+ E +A +W +N+VE++ S+ L+ TV++++ +DG+ Q L++ | |
| Sbjct: | 1 | MTKIMFFGTRDYEKEMALNWGKKNNVEVTTSKELLSSATVDQLKDYDGVTTMQFGKLEND | 60 |
| Query: | 61 | IYPLLKEMGIKQIAQRSAGVDMYNLELAKQHGIIISNVPSYSPESIAEFTVTIALNLIRK | 120 |
| | | +YP L+ GIKQIAQR+AG DMY+L+LAK+H I+ISNVPSYSPE+IAE++V+IAL L+R+ | |
| Sbjct: | 61 | VYPKLESYGIKQIAQRTAGFDMYDLDLAKKHNIVISNVPSYSPETIAEYSVSIALQLVRR | 120 |
| Query: | 121 | VELIRANVREQNFSWTLPIRGRVLGNMTVAIIGTGRIGLATAKIFKGFGCRVIGYDIYHN | 180 |
| | | I V+ +F+W I + + NMTVAIIGTGRIG ATAKI+ GFG + YD Y N | |
| Sbjct: | 121 | FPDIERRVQAHDFTWQAEIMSKPVKNMTVAIIGTGRIGAATAKIYAGFGATITAYDAYPN | 180 |
| Query: | 181 | PMADGILEYVNSVEEAVEEADLVSLHMPPTAENTHLFNLDMFKQFKKGAILMNMARGALV | 240 |
| | | D L Y +SV+EA+++AD++SLH+P E+ HLF+ MF KKGAIL+N ARGA++ | |
| Sbjct: | 181 | KDLD-FLTYKDSVKEAIKDADIISLHVPANKESYHLFDKAMFDHVKKGAILVNAARGAVI | 239 |
| Query: | 241 | ETKDLLEALDQGLLEGAGIDTYEFEGPYIPKNCQGQDISDKDFLRLINHPKVIYTPHAAY | 300 |
| | | T DL+ A++ G L GA IDTYE E Y + +DI DK L LI H +++ TPH A+ | |
| Sbjct: | 240 | NTPDLIAAVNDGTLLGAAIDTYENEAAYFTNDWTNKDIDDKTLLELIEHERILVTPHIAF | 299 |
| Query: | 301 | YTDEAVKNLVEGALNACVEVIETGTTTTKVN | 331 |
| | | ++DEAV+NLVEG LNA + VI TGT T++N | |
| Sbjct: | 300 | FSDEAVQNLVEGGLNAALSVINTGTCETRLN | 330 |

[2460] Based on this analysis, it was predicted that this protein and its epitopes, could be useful antigens for vaccines or diagnostics.

### EXAMPLE 391

[2461] A DNA sequence (GBSx0423) was identified in S. agalactiae <SEQ ID 1271> which encodes the amino acid sequence <SEQ ID 1272>. Analysis of this protein sequence reveals the following:

```
Possible site: 40
>>> Seems to have no N-terminal signal sequence
----- Final Results -----
                            bacterial cytoplasm --- Certainty = 0.2364(Affirmative) < succ>
                              bacterial membrane --- Certainty = 0.0000(Not Clear) < succ>
                                bacterial outside --- Certainty = 0.0000(Not Clear) < succ>
```

[2462] The protein has no significant homology with any sequences in the GENPEPT database.

[2463] No corresponding DNA sequence was identified in S. pyogenes.

[2464] Based on this analysis, it was predicted that this protein and its epitopes, could be useful antigens for vaccines or diagnostics.

### EXAMPLE 392

[2465] A DNA sequence (GBSx0424) was identified in S. agalactiae <SEQ ID 1273> which encodes the amino acid sequence <SEQ ID 1274>. This protein is predicted to be regulatory protein (pfoS/R). Analysis of this protein sequence reveals the following:

```
Possible site: 37
>>> Seems to have a cleavable N-term signal seq.
      INTEGRAL Likelihood = −12.90 Transmembrane 64 − 80 (53 − 89)
----- Final Results -----
                            bacterial membrane --- Certainty = 0.6158(Affirmative) < succ>
                              bacterial outside --- Certainty = 0.0000(Not Clear) < succ>
                          bacterial cytoplasm --- Certainty = 0.0000(Not Clear) < succ>
```

[2466] A related GBS nucleic acid sequence <SEQ ID 9325> which encodes amino acid sequence <SEQ ID 9326> was also identified.

[2467] The protein has homology with the following sequences in the GENPEPT database:

| >GP:AAC65034 GB:AE001189 regulatory protein (pfoS/R) [Treponema pallidum] | | | |
|---|---|---|---|
| Identities = 33/91 (36%), Positives = 55/91 (60%), Gaps = 1/91 (1%) | | | |
| Query: | 1 | MANVLAKPKIMLPMISSAAILGILGALFNIQGTPASAGFGISGLIGPINALNLAKGGWSV | 60 |
| | | M N + P + +P++ + + G+L LFN+QGTPASAGFG GL+GPINA L V | |
| Sbjct: | 250 | MPNWIRYPILNIPLLLNGLVCGVLAWLFNLQGTPASAGFGFIGLVGPINAYRLMAYTPMV | 309 |
| Query: | 61 | MNMLLIIIIFVAAPIILNFIFNYLFIKVLKI | 91 |
| | | +L ++ FV + + ++ +++ + LK+ | |
| Sbjct: | 310 | RAGILFLVYFVLS-FLAAYLIDFILVDRLKL | 339 |

[2468] A related DNA sequence was identified in S. pyogenes <SEQ ID 1275> which encodes the amino acid sequence <SEQ ID 1276>. Analysis of this protein sequence reveals the following:

| Possible site: 51 | | | | |
|---|---|---|---|---|
| >>> Seems to have a cleavable N-term signal seq. | | | | |
| | INTEGRAL | Likelihood = −12.31 | Transmembrane | 141-157 (133-166) |
| | INTEGRAL | Likelihood = −6.00 | Transmembrane | 92-108 (88-112) |

```
----- Final Results -----
                              bacterial membrane --- Certainty = 0.5925(Affirmative) < succ>
                                bacterial outside --- Certainty = 0.0000(Not Clear) < succ>
                            bacterial cytoplasm --- Certainty = 0.0000(Not Clear) < succ>
```

[2469] The protein has homology with the following sequences in the databases:

| >GP: AAC65034 GB: AE001189 regulatory protein (pfoS/R) [Treponema | | | |
|---|---|---|---|
| pallidum] | | | |
| Identities = 63/178 (35%), Positives = 107/178 (59%), Gaps = 10/178 (5%) | | | |
| Query: | 2 | IGQGIASLLGLQPILMSLLIAMIFCFLIVSPITTVGIALAINLSGIGSGAASFG------ | 55 |
| | | +G+ IA+ + LQP+LMS+L++M F +I+SP+++V + +A+ L+G+ SGAA+ G | |
| Sbjct: | 164 | VGRVIATFIALQPLLMSILLSMSFSLIIISPVSSVAVGIAVGLTGLASGAANIGVSSCAM | 223 |
| Query: | 56 | -LCLAGWAVNSKGTSLAHVLRSPKISMANVLSKPKIMLPMLCSAAVLGVIGAIFNIQGTP | 114 |
| | | L + VN G LA + K+ M N + P + +P+L + V GV+ +FN+QGTP | |
| Sbjct: | 224 | TLIVGTMRVNKIGVPLAMFAGAMKMLMPNWIRYPILNIPLLLNGLVCGVLAWLFNLQGTP | 283 |
| Query: | 115 | ASAGFGISGLIGPINALNLAKGGWCP-VNILLIIIIFVGAPIVLNMIFNYLFIKVLKV | 171 |
| | | ASAGFG GL+GPINA L + P V ++ +++ + + +++ + LK+ | |
| Sbjct: | 284 | ASAGFGFIGLVGPINAYRLM--AYTPMVRAGILFLVYFVLSFLAAYLIDFILVDRLKL | 339 |

[2470] An alignment of the GAS and GBS proteins is shown below:

| Identities = 86/101 (85%), Positives = 96/101 (94%) | | | |
|---|---|---|---|
| Query: | 1 | MANVLAKPKIMLPMISSAAILGILGALFNIQGTPASAGFGISGLIGPINALNLAKGGWSV | 60 |
| | | MANVL+KPKIMLPM+ SAA+LG++GA+FNIQGTPASAGFGISGLIGPINALNLAKGGW | |
| Sbjct: | 81 | MANVLSKPKIMLPMLCSAAVLGVIGAIFNIQGTPASAGFGISGLIGPINALNLAKGGWCP | 140 |
| Query: | 61 | MNMLLIIIIFVAAPIILNFIFNYLFIKVLKIIDPMDYKLDI | 101 |
| | | +N+LLIIIIFV API+LN IFNYLFIKVLK+IDPMDYKLDI | |
| Sbjct: | 141 | VNILLIIIIFVGAPIVLNMIFNYLFIKVLKVIDPMDYKLDI | 181 |

[2471] Based on this analysis, it was predicted that these proteins and their epitopes could be useful antigens for vaccines or diagnostics.

### EXAMPLE 393

[2472] A DNA sequence (GBSx0426) was identified in S. agalactiae <SEQ ID 1277> which encodes the amino acid sequence <SEQ ID 1278>. This protein is predicted to be regulatory protein (pfoS/R). Analysis of this protein sequence reveals the following:

| Possible site: 48 | | | | |
|---|---|---|---|---|
| >>> Seems to have no N-terminal signal sequence | | | | |
| | INTEGRAL | Likelihood = −6.58 | Transmembrane | 148-164 (145-169) |
| | INTEGRAL | Likelihood = −5.26 | Transmembrane | 33-49 (25-52) |
| | INTEGRAL | Likelihood = −4.73 | Transmembrane | 70-86 (62-88) |
| | INTEGRAL | Likelihood = −3.45 | Transmembrane | 124-140 (122-143) |
| | INTEGRAL | Likelihood = −1.33 | Transmembrane | 96-112 (96-112) |

```
----- Final Results -----
                              bacterial membrane --- Certainty = 0.3633(Affirmative) < succ>
                                bacterial outside --- Certainty = 0.0000(Not Clear) < succ>
                            bacterial cytoplasm --- Certainty = 0.0000(Not Clear) < succ>
```

[2473] A related GBS nucleic acid sequence <SEQ ID 9735> which encodes amino acid sequence <SEQ ID 9736> was also identified.

[2474] A related GBS nucleic acid sequence <SEQ ID 9697> which encodes amino acid sequence <SEQ ID 9698> was also identified.

[2475] The protein has homology with the following sequences in the GENPEPT database:

| >GP: AAC65034 GB: AE001189 regulatory protein (pfoS/R) [Treponema | | | |
|---|---|---|---|
| pallidum] | | | |
| Identities = 61/158 (38%), Positives = 92/158 (57%) | | | |
| Query: | 24 | KSFIMNVLNGLALGTVIVLIPGAILGELMKALLPMWSGFATLIAATAVATSMMGLVIGIM | 83 |
| | | + F+M +LNG + G VI L+P AI GEL +AL P+ FA L + +IG + | |
| Sbjct: | 9 | RQFMMKILNGSSAGIVIGLVPPAIAGELFRALAPLSPLFAALYHVVLPIQFSVPALIGTL | 68 |
| Query: | 84 | VGLNFKFNPIQSASLGLAVMFAGGAATFLKGAIMLKGTGDIINMGITAALGVLLIQFLSD | 143 |
| | | VGL F + + A+L + A G T GA ++ G GD+IN+ + +AL ++L++ L | |
| Sbjct: | 69 | VGLQFHCSAPEVATLAFVSVIASGNVTLQNGAWLITGIGDVINVMLISALAIILVRALRG | 128 |
| Query: | 144 | KTKSFTLIVIPTVTLLLVGGVGHVLLPYVKMITTIGQ | 181 |
| | | K S T+I +P + ++ GGVG LPYVKMIT +G+ | |
| Sbjct: | 129 | KLGSLTIIALPVIVAVVAGGVGSFSLPYVKMITLFVGR | 166 |

[2476] A related DNA sequence was identified in S. pyogenes <SEQ ID 1279> which encodes the amino acid sequence <SEQ ID 1280>. Analysis of this protein sequence reveals the following:

| Possible site: 48 | | | | |
|---|---|---|---|---|
| >>> Seems to have no N-terminal signal sequence | | | | |
| | INTEGRAL | Likelihood = −13.06 | Transmembrane | 314-330 (301-335) |
| | INTEGRAL | Likelihood = −11.30 | Transmembrane | 185-201 (178-215) |
| | INTEGRAL | Likelihood = −8.01 | Transmembrane | 22-38 (11-42) |
| | INTEGRAL | Likelihood = −3.29 | Transmembrane | 266-282 (265-285) |
| | INTEGRAL | Likelihood = −2.66 | Transmembrane | 141-157 (141-159) |
| | INTEGRAL | Likelihood = −2.13 | Transmembrane | 53-69 (53-69) |
| | INTEGRAL | Likelihood = −1.33 | Transmembrane | 114-130 (113-131) |
| | INTEGRAL | Likelihood = −0.80 | Transmembrane | 206-222 (206-222) |

```
----- Final Results -----
                              bacterial membrane --- Certainty = 0.6222(Affirmative) < succ>
                                bacterial outside --- Certainty = 0.0000(Not Clear) < succ>
                            bacterial cytoplasm --- Certainty = 0.0000(Not Clear) < succ>
```

[2477] The protein has homology with the following sequences in the databases:

| >GP: AAC65034 GB: AE00189 regulatory protein (pfoS/R) [Treponema | | | |
|---|---|---|---|
| pallidum] | | | |
| Identities = 137/346 (39%), Positives = 217/346 (62%), Gaps = 14/346 (4%) | | | |
| Query: | 12 | FMNKVLAGTAIAIVVALIPNAILATFLKPLLP-NMAAAEFLHIVQVFQFFTPIMAGFLIG | 70 |
| | | FM K+L G++ IV+ L+P AI + L P + A H+V QF P + G L+G | |
| Sbjct: | 11 | FMMKILNGSSAGIVIGLVPPAIAGELFRALAPLSPLFAALYHVVLPIQFSVPALIGTLVG | 70 |
| Query: | 71 | QQFKFNPMQQLAVGGAAYIGSGAWAYTEVIQKGVATGTFQLRGIGDLINMMITASLAVLA | 130 |
| | | QF + + + + I SG + G + + GIGD+IN+M+ ++LA++ | |
| Sbjct: | 71 | LQFHCSAPEVATLAFVSVIASG--------NVTLQNGAWLITGIGDVINVMLISALAIIL | 122 |
| Query: | 131 | VKYFGNKFGSLTIILLPITIGTGVGYIGWKFLPYVSYVTTLIGQGINSFTTLQPILMSIL | 190 |
| | | V+ K GSLTII LP+ + G +G LPYV +T +G+ I +F LQP+LMSIL | |
| Sbjct: | 123 | VRALRGKLGSLTIIALPVIVAVVAGGVGSFSLPYVKMITLFVGRVIATFIALQPLLMSIL | 182 |
| Query: | 191 | IAVAFSLIIVSPISTVAIGLAIGLNGMAAGAASMGIASTAAVLVWATLKVNKSGVPIAIA | 250 |
| | | ++++FSLII+SP+S+VA+G+A+GL G+A+GAA++G++S A L+ T++VNK GVP+A+ | |
| Sbjct: | 183 | LSMSFSLIIISPVSSVAVGIAVGLTGLASGAANIGVSSCAMTLIVGTMRVNKIGVPLAMF | 242 |
| Query: | 251 | LGAMKMMMPNFLKHPIMAIPMVFTAAISSLTVPLFNLVGTPASSGFGLVGAVGPIAS--L | 308 |
| | | GAMKM+MPN++++PI+ IP++ + + LFNL GTPAS+GFG +G VGPI + L | |
| Sbjct: | 243 | AGAMKMLMPNWIRYPILNIPLLLNGLVCGVLAWLFNLQGTPASAGFGFIGLVGPINAYRL | 302 |
| Query: | 309 | AGGSSIL---IIILAWIIVPFAVAFAAHKVSKDILKLYKEDIFVFE | 351 |
| | | + ++ I+ L + ++ F A+ + D LKLY+ ++F+ E | |
| Sbjct: | 303 | MAYTPMVRAGILFLVYFVLSFLAAYLIDFILVDRLKLYRRELFIPE | 348 |

[2478] An alignment of the GAS and GBS proteins is shown below:

| Identities = 65/172 (37%), Positives = 95/172 (54%), Gaps = 9/172 (5%) | | | |
|---|---|---|---|
| Query: | 19 | EKQTTKSFIMNVLNGLALGTVIVLIPGAILGELMKALLPMWSGFATLIAATAVATSMMGL | 78 |
| | | +K+T SF+ VL G A+ V+ LIP AIL +K LLP + A + V + | |
| Sbjct: | 5 | DKETFSSFMNKVLAGTAIAIVVALIPNAILATFLKPLLPNMAA-AEFLHIVQVFQFFTPI | 63 |
| Query: | 79 | VIGIMVGLNFKFNPIQSASLGLAVMFAGGAATFLK--------GAIMLKGTGDIINMGIT | 130 |
| | | + G ++G FKFNP+Q ++G A GA + + G L+G GD+INM IT | |
| Sbjct: | 64 | MAGFLIGQQFKFNPMQQLAVGGAAYIGSGAWAYTEVIQKGVATGTFQLRGIGDLINMMIT | 123 |
| Query: | 131 | AALGVLLIQFLSDKTKSFTLIVIPTVTLLLVGGVGHVLLPYVKMITTMIGQG | 182 |
| | | A+L VL +++ +K S T+I++P VG +G LPYV +TT+IGQG | |
| Sbjct: | 124 | ASLAVLAVKYFGNKFGSLTIILLPITIGTGVGYIGWKFLPYVSYVTTLIGQG | 175 |

[2479] A related GBS gene <SEQ ID 8567> and protein <SEQ ID 8568> were also identified. Analysis of this protein sequence reveals the following:

| Lipop: Possible site: −1 Crend: 10 | | | | |
|---|---|---|---|---|
| McG: Discrim Score: −13.49 | | | | |
| GvH: Signal Score (−7.5): −5.82 | | | | |
| Possible site: 48 | | | | |
| >>> Seems to have no N-terminal signal sequence | | | | |
| ALOM program count: 5 value: −6.58 threshold: 0.0 | | | | |
| | INTEGRAL | Likelihood = −6.58 | Transmembrane | 148-164 (145-169) |
| | INTEGRAL | Likelihood = −5.26 | Transmembrane | 33-49 (25-52) |
| | INTEGRAL | Likelihood = −4.73 | Transmembrane | 70-86 (62-88) |
| | INTEGRAL | Likelihood = −3.45 | Transmembrane | 124-140 (122-143) |
| | INTEGRAL | Likelihood = −1.33 | Transmembrane | 96-112 (96-112) |
| | PERIPHERAL | Likelihood = 1.85 | 51 | |

```
modified ALOM score: 1.82
*** Reasoning Step: 3
----- Final Results -----
                              bacterial membrane --- Certainty = 0.3633(Affirmative) < succ>
                                bacterial outside --- Certainty = 0.0000(Not Clear) < succ>
                            bacterial cytoplasm --- Certainty = 0.0000(Not Clear) < succ>
```

[2480] The protein has homology with the following sequences in the databases:

[chemical structure]

[2481] Based on this analysis, it was predicted that these proteins and their epitopes could be useful antigens for vaccines or diagnostics.

### EXAMPLE 394

[2482] A DNA sequence (GBSx0428) was identified in S. agalactiae <SEQ ID 1281> which encodes the amino acid sequence <SEQ ID 1282>. This protein is predicted to be cyn operon transcriptional activator. Analysis of this protein sequence reveals the following:

```
Possible site: 15
>>> Seems to have no N-terminal signal sequence
----- Final Results -----
                              bacterial membrane --- Certainty = 0.0000(Not Clear) < succ>
                                bacterial outside --- Certainty = 0.0000(Not Clear) < succ>
                            bacterial cytoplasm --- Certainty = 0.0000(Not Clear) < succ>
```

[2483] The protein has homology with the following sequences in the GENPEPT database:

| >GP: CAB15857 GB: Z99123 alternate gene name: ipa-24d~similar to | | | |
|---|---|---|---|
| transcriptional regulator (LysR family) [Bacillus subtilis] | | | |
| Identities = 87/282 (30%), Positives = 152/282 (53%), Gaps = 5/282 (1%) | | | |
| Query: | 1 | MDIRQLTYFIAVAEAKNYSRAAKSLFVTQPTLSQSIKKLEAELNTILFLQNGRQLALTEA | 60 |
| | | MDIR LTYF+ VA K++++A++SL+V+QPT+S+ IK LE EL LF +NGRQ+ LT+A | |
| Sbjct: | 1 | MDIRHLTYFLEVARLKSFTKASQSLYVSQPTISKMIKNLEEELGIELFYRNGRQVELTDA | 60 |
| Query: | 61 | GEILYEKGQLLMTNVNQMVTEIQQLNQEKKEGIRVGLTSLFAIQFMKQI-STFMATHSNV | 119 |
| | | G +Y + Q ++ + + +E+ + + KK +R+GL + F ++ F + NV | |
| Sbjct: | 61 | GHSMYVQAQEIIKSFQNLTSELNDIMEVKKGHVRIGLPPMIGSGFFPRVLGDFRENYPNV | 120 |
| Query: | 120 | EVSLIQDGSRKLQELLAKGKIDIGLLSFPSTRNDITIEPLQTSTKGYKVSIVMPKSHPLA | 179 |
| | | L++DGS K+QE + G +DIG++ P+ + + T + +V+ SH LA | |
| Sbjct: | 121 | TFQLVEDGSIKVQEGVGDGSLDIGVVVLPANEDIFHSFTIVKET----LMLVVHPSHRLA | 176 |
| Query: | 180 | TLPEIELNDLRDYKVASLNEHYMLGEMLPRKCRALGFDPHIVFKHNDWEVLIHSLQDLNA | 239 |
| | | E +L +L+D E ++L + +C GF PHI+++ + W+ + + | |
| Sbjct: | 177 | DEKECQLRELKDEPFIFFREDFVLHNRIMTECIKAGFRPHIIYETSQWDFISEMVSANLG | 236 |
| Query: | 240 | VTILPSEFESISQVQDLCWVPLKDKNNFYPIGIAYRNDTSFS | 281 |
| | | + +LP + + +PL D + + I +R D S | |
| Sbjct: | 237 | IGLLPERICRGLDPEKVKVIPLVDPVIPWHLAIIWRKDRYLS | 278 |

[2484] A related DNA sequence was identified in S. pyogenes <SEQ ID 1283> which encodes the amino acid sequence <SEQ ID 1284>. Analysis of this protein sequence reveals the following:

```
Possible site: 21
>>> Seems to have no N-terminal signal sequence
----- Final Results -----
                            bacterial cytoplasm --- Certainty = 0.1101(Affirmative) < succ>
                              bacterial membrane --- Certainty = 0.0000(Not Clear) < succ>
                                bacterial outside --- Certainty = 0.0000(Not Clear) < succ>
```

[2485] An alignment of the GAS and GBS proteins is shown below:

| Identities = 125/160 (78%), Positives = 144/160 (89%) | | | |
|---|---|---|---|
| Query: | 135 | LAKGKIDIGLLSFPSTRNDITIEPLQTSTKGYKVSIVMPKSHPLATLPEIELNDLRDYKV | 194 |
| | | L++GKIDIGLLSF S R DITIE LQTSTKGYKVSIV+ K HPLA P+++L DL+ YK+ | |
| Sbjct: | 1 | LSQGKIDIGLLSFLSIRKDITIELLQTSTKGYKVSIVLLKQHPLAQHPQLKLKDLKGYKI | 60 |
| Query: | 195 | ASLNEHYMLGEMLPRKCRALGFDPHIVFKHNDWEVLIHSLQDLNAVTILPSEFESISQVQ | 254 |
| | | ASLN+HYMLGEMLPRKCRALGF+P IVFKHNDWEVLIHSL DLN +TILPS+FES++QV | |
| Sbjct: | 61 | ASLNDHYMLGEMLPRKCRALGFEPDIVFKHNDWEVLIHSLHDLNTLTILPSDFESLNQVD | 120 |
| Query: | 255 | DLCWVPLKDKNNFYPIGIAYRNDTSFSPMIEEFLSLLKTN | 294 |
| | | +L W+PL+DKNNFYPIGIAYR+D SFSP+IEEFLSLLKTN | |
| Sbjct: | 121 | NLVWIPLQDKNNFYPIGIAYRDDASFSPVIEEFLSLLKTN | 160 |

[2486] Based on this analysis, it was predicted that these proteins and their epitopes could be useful antigens for vaccines or diagnostics.

### EXAMPLE 395

[2487] A DNA sequence (GBSx0429) was identified in S. agalactiae <SEQ ID 1285> which encodes the amino acid sequence <SEQ ID 1286>. Analysis of this protein sequence reveals the following:

```
Possible site: 47
>>> Seems to have no N-terminal signal sequence
----- Final Results -----
                            bacterial cytoplasm --- Certainty = 0.1833(Affirmative) < succ>
                              bacterial membrane --- Certainty = 0.0000(Not Clear) < succ>
                                bacterial outside --- Certainty = 0.0000(Not Clear) < succ>
Signal peptide: 1-21
```

[2488] A related GBS nucleic acid sequence <SEQ ID 8569> which encodes amino acid sequence <SEQ ID 8570> was also identified.

[2489] The protein has no significant homology with any sequences in the GENPEPT database.

[2490] No corresponding DNA sequence was identified in S. pyogenes.

[2491] SEQ ID 8570 (GBS271) was expressed in E. coli as a His-fusion product. SDS-PAGE analysis of total cell extract is shown in FIG. 51 (lane 8; MW 31.3 kDa). It was also expressed in E. coli as a GST-fusion product. SDS-PAGE analysis of total cell extract is shown in FIG. 55 (lane 6; MW 56.3 kDa) and in FIG. 62 (lane 10; MW 56.3 kDa).

[2492] GBS271-GST was purified as shown in FIG. 210, lane 8.

[2493] Based on this analysis, it was predicted that these proteins and their epitopes could be useful antigens for vaccines or diagnostics.

### EXAMPLE 396

[2494] A DNA sequence (GBSx0430) was identified in S. agalactiae <SEQ ID 1287> which encodes the amino acid sequence <SEQ ID 1288>. Analysis of this protein sequence reveals the following:

| Possible site: 22 | | | | |
|---|---|---|---|---|
| >>> Seems to have an uncleavable N-term signal seq | | | | |
| | INTEGRAL | Likelihood = −6.74 | Transmembrane | 9-25 (5-28) |
| | INTEGRAL | Likelihood = −5.84 | Transmembrane | 97-113 (92-122) |
| | INTEGRAL | Likelihood = −5.47 | Transmembrane | 37-53 (35-61) |
| | INTEGRAL | Likelihood = −2.55 | Transmembrane | 220-236 (220-238) |
| | INTEGRAL | Likelihood = −1.65 | Transmembrane | 64-80 (63-81) |
| | INTEGRAL | Likelihood = −1.28 | Transmembrane | 193-209 (192-209) |
| | INTEGRAL | Likelihood = −0.53 | Transmembrane | 125-141 (125-141) |

```
----- Final Results -----
                              bacterial membrane --- Certainty = 0.3697(Affirmative) < succ>
                                bacterial outside --- Certainty = 0.0000(Not Clear) < succ>
                            bacterial cytoplasm --- Certainty = 0.0000(Not Clear) < succ>
```

[2495] The protein has homology with the following sequences in the GENPEPT database:

| >GP: AAC73593 GB: AE000155 putative metal resistance protein | | | |
|---|---|---|---|
| [Escherichia coli K12] | | | |
| Identities = 128/252 (50%), Positives = 186/252 (73%) | | | |
| Query: | 5 | NSISLMSLLMASSLVLITLFFSYWQKLNLEKEVIISAIRAVIQLLAVGFLLDYIFGYQNP | 64 |
| | | ++I+ SL +A LV++ + S+ +KL LEK+++ S RA+IQL+ VG++L YIF + | |
| Sbjct: | 13 | HNITNESLALALMLVVVAILISHKEKLALEKDILWSVGRAIIQLIIVGYVLKYIFSVDDA | 72 |
| Query: | 65 | IFTALLMLFMIINASYNAAKRGKGINKGFVISFIAIGSGTIITLSVLIFSGILKFVPNQM | 124 |
| | | T L++LF+ NA++NA KR K I K F+ SFIAI G ITL+VLI SG ++F+P Q+ | |
| Sbjct: | 73 | SLTLLMVLFICFNAAWNAQKRSKYIAKAFISSFIAITVGAGITLAVLILSGSIEFIPMQV | 132 |
| Query: | 125 | IPVGGMIISNSMVAIGLCYKQLLSEFRSKQEEVETKLALGADILPASIDIIRDVIKTGMV | 184 |
| | | IP+ GMI N+MVA+GLCY L S+Q++++ KL+LGA AS +IRD I+ ++ | |
| Sbjct: | 133 | IPIAGMIAGNAMVAVGLCYNNLGQRVISEQQQIQEKLSLGATPKQASAILIRDSIRAALI | 192 |
| Query: | 185 | PTIDSAKTLGIVSLPGMMTGLILAGTSPIQAVKYQMMVTFMLLATTSIASFVATYLAYKI | 244 |
| | | PT+DSAKT+G+VSLPGMM+GLI AG P++A+KYQ+MVTFMLL+T S+++ +A YL Y+ | |
| Sbjct: | 193 | PTVDSAKTVGLVSLPGMMSGLIFAGIDPVKAIKYQIMVTFMLLSTASLSTIIACYLTYRK | 252 |
| Query: | 245 | FFNNRKQLVVTK | 256 |
| | | F+N+R QLVVT+ | |
| Sbjct: | 253 | FYNSRHQLVVTQ | 264 |

[2496] No corresponding DNA sequence was identified in S. pyogenes.

[2497] Based on this analysis, it was predicted that this protein and its epitopes, could be useful antigens for vaccines or diagnostics.

### EXAMPLE 397

[2498] A DNA sequence (GBSx0431) was identified in S. agalactiae <SEQ ID 1289> which encodes the amino acid sequence <SEQ ID 1290>. This protein is predicted to be SUGAR TRANSPORT ATP-BINDING PROTEIN. (b0490). Analysis of this protein sequence reveals the following:

```
Possible site: 56
>>> Seems to have no N-terminal signal sequence
----- Final Results -----
                            bacterial cytoplasm --- Certainty = 0.1903(Affirmative) < succ>
                              bacterial membrane --- Certainty = 0.0000(Not Clear) < succ>
                                bacterial outside --- Certainty = 0.0000(Not Clear) < succ>
```

[2499] The protein has homology with the following sequences in the GENPEPT database:

| >GP: AAC73592 GB: AE000155 putative ATP-binding component of a | | | |
|---|---|---|---|
| transport system [Escherichia coli K12] | | | |
| Identities = 95/202 (47%), Positives = 142/202 (70%), Gaps = 2/202 (0%) | | | |
| Query: | 4 | LTFKHVDFKTDDKLVLNDINFAIDEGDFVSIVGPSGSGKSTVLKLASGLMSPTAGHIFFD | 63 |
| | | L ++V + D +LN+INF++ G+F I GPSG GKST+LK+ + L+SPT+G + F+ | |
| Sbjct: | 8 | LQLQNVGYLAGDAKILNNINFSLRAGEFKLITGPSGCGKSTLLKIVASLISPTSGTLLFE | 67 |
| Query: | 64 | GKDLNQLEPIESRKMISYCFQTPHLFGNTVEDNISFPYHIRHEKVDYRRVDDLFQRFEMD | 123 |
| | | G+D++ L+P R+ +SYC QTP LFG+TV DN+ FP+ IR+ + D D +RF + | |
| Sbjct: | 68 | GEDVSTLKPEIYRQQVSYCAQTPTLFGDTVYDNLIFPWQIRNRQPDPAIFLDFLERFALP | 127 |
| Query: | 124 | QSYLKQDVKKLSGGEKQRIALIRQLLFEPKVLLLDEVTSALDNHNKAIVEKVI-KSLHDK | 182 |
| | | S L +++ +LSGGEKQRI+LIR L F PKVLLLDE+TSALD NK V ++I + + ++ | |
| Sbjct: | 128 | DSILTKNIAELSGGEKQRISLIRNLQFMPKVLLLDEITSALDESNKHNVNEMIHRYVREQ | 187 |
| Query: | 183 | GITILWITHDEEQSRRFANKVL | 204 |
| | | I +LW+THD+++ A+KV+ | |
| Sbjct: | 188 | NIAVLWVTHDKDEINH-ADKVI | 208 |

[2500] A related DNA sequence was identified in S. pyogenes <SEQ ID 1291> which encodes the amino acid sequence <SEQ ID 1292>. Analysis of this protein sequence reveals the following:

```
Possible site: 61
>>> Seems to have no N-terminal signal sequence
----- Final Results -----
                            bacterial cytoplasm --- Certainty = 0.2053(Affirmative) < succ>
                              bacterial membrane --- Certainty = 0.0000(Not Clear) < succ>
                                bacterial outside --- Certainty = 0.0000(Not Clear) < succ>
```

[2501] An alignment of the GAS and GBS proteins is shown below:

| Identities = 73/214 (34%), Positives = 133/214 (62%), Gaps = 9/214 (4%) | | | |
|---|---|---|---|
| Query: | 4 | LTFKHVD--FKTDDKLVLNDINFAIDEGDFVSIVGPSGSGKSTVLKLASGLMSPTAGHIF | 61 |
| | | +TF +V F+ VL +INF ++EG F +++G SGSGKST+L + +GL+ ++G I+ | |
| Sbjct: | 6 | ITFNNVSKTFEDSGTQVLKNINFDLEEGKFYTLLGASGSGKSTILNIMAGLLDASSGDIY | 65 |
| Query: | 62 | FDGKDLNQLEPIESRKMISYCFQTPHLFGN-TVEDNISFPYHIR--HEKVDYRRVDDLFQ | 118 |
| | | DG+ +N L PI R I FQ LF + TV +N++F ++ +K +RV + + | |
| Sbjct: | 66 | LDGERINDL-PINKRD-IHTVFQNYALFPHMTVFENVAFALKLKKVDKKEIAKRVKETLK | 123 |
| Query: | 119 | RFEMDQSYLKQDVKKLSGGEKQRIALIRQLLFEPKVLLLDEVTSALDNHNKAIVEKVIKS | 178 |
| | | ++ + + + ++KLSGG++QR+A+ R ++ +P+V+LLDE SALD + ++ ++ | |
| Sbjct: | 124 | MVQL-EGFENRSIQKLSGGQRQRVAIARAIINQPRVVLLDEPLSALDLKLRTEMQYELRE | 182 |
| Query: | 179 | LHDK-GITILWITHDEEQSRRFANKVLKVVNGSI | 211 |
| | | L + GIT +++THD+E++ ++ + + G I | |
| Sbjct: | 183 | LQQRLGITFVFVTHDQEEALAMSDWIFVMNEGEI | 216 |

[2502] Based on this analysis, it was predicted that these proteins and their epitopes could be useful antigens for vaccines or diagnostics.

### EXAMPLE 398

[2503] A DNA sequence (GBSx0432) was identified in S. agalactiae <SEQ ID 1293> which encodes the amino acid sequence <SEQ ID 1294>. Analysis of this protein sequence reveals the following:

```
Possible site: 32
>>> Seems to have no N-terminal signal sequence
----- Final Results -----
                            bacterial cytoplasm --- Certainty = 0.0658(Affirmative) < succ>
                              bacterial membrane --- Certainty = 0.0000(Not Clear) < succ>
                                bacterial outside --- Certainty = 0.0000(Not Clear) < succ>
```

[2504] The protein has no significant homology with any sequences in the GENPEPT database.

[2505] No corresponding DNA sequence was identified in S. pyogenes.

[2506] Based on this analysis, it was predicted that this protein and its epitopes, could be useful antigens for vaccines or diagnostics.

### EXAMPLE 399

[2507] A DNA sequence (GBSx0434) was identified in S. agalactiae <SEQ ID 1295> which encodes the amino acid sequence <SEQ ID 1296>. This protein is predicted to be deda protein (dedA). Analysis of this protein sequence reveals the following:

| Possible site: 58 | | | | |
|---|---|---|---|---|
| >>> Seems to have no N-terminal signal sequence | | | | |
| | INTEGRAL | Likelihood = −12.05 | Transmembrane | 186-202 (178-208) |
| | INTEGRAL | Likelihood = −8.81 | Transmembrane | 65-81 (61-89) |
| | INTEGRAL | Likelihood = −7.54 | Transmembrane | 26-42 (24-47) |
| | INTEGRAL | Likelihood = −0.37 | Transmembrane | 152-168 (152-168) |

```
----- Final Results -----
                              bacterial membrane --- Certainty = 0.5819(Affirmative) < succ>
                                bacterial outside --- Certainty = 0.0000(Not Clear) < succ>
                            bacterial cytoplasm --- Certainty = 0.0000(Not Clear) < succ>
```

[2508] The protein has homology with the following sequences in the GENPEPT database:

| >GP: AAC75377 GB: AE000320 orf, hypothetical protein | | | |
|---|---|---|---|
| [Escherichia coli K12] | | | |
| Identities = 91/211 (43%), Positives = 131/211 (61%), Gaps = 7/211 (3%) | | | |
| Query: | 2 | FLIDFILHIDTHIYAMANTVGNWTYLLLFLVIFVETGAVIFPFLPGDSLLFAAGALAANP | 61 |
| | | FLIDFILHID H+ + G W Y +LFL++F ETG V+ PFLPGDSLLF AGALA+ | |
| Sbjct: | 6 | FLIDFILHIDVHLAELVAEYGVWVYAILFLILFCETGLVVTPFLPGDSLLFVAGALASLE | 65 |
| Query: | 62 | KMSFNIVTFLIIFFIAAFIGDSCNFLIGRTFGYRFIKHP---FFRRFIKEKNIRDAELYF | 118 |
| | | N+ +++ IAA +GD+ N+ IGR FG + +P FRR +K ++ | |
| Sbjct: | 66 | TNDLNVHMMVVLMLIAAIVGDAVNYTIGRLFGEKLFSNPNSKIFRRSYLDK----THQFY | 121 |
| Query: | 119 | EKKGTAAIILGRYIPIIRTFVPFVAGISQLPPKVFIKRAFIAALSWSVIATGSGFLFGNI | 178 |
| | | EK G IIL R++PI+RTF PFVAG+ + + F I AL W ++ T +G+ FG I | |
| Sbjct: | 122 | EKHGGKTIILARFVPIVRTFAPFVAGMGHMSYRHFAAYNVIGALLWVLLFTYAGYFFGTI | 181 |
| Query: | 179 | PFVKQHFSLIILGIVFVTLIPVLISGVKSYR | 209 |
| | | P V+ + L+I+GI+ V+++P +I ++ R | |
| Sbjct: | 182 | PMVQDNLKLLIVGIIVVSILPGVIEIIRHKR | 212 |

[2509] No corresponding DNA sequence was identified in S. pyogenes.

[2510] Based on this analysis, it was predicted that this protein and its epitopes, could be useful antigens for vaccines or diagnostics.

### EXAMPLE 400

[2511] A DNA sequence (GBSx0435) was identified in S. agalactiae <SEQ ID 1297> which encodes the amino acid sequence <SEQ ID 1298>. Analysis of this protein sequence reveals the following:

```
Possible Site: 18
>>> Seems to have no N-terminal signal sequence
----- Final Results -----
                            bacterial cytoplasm --- Certainty = 0.3100(Affirmative) < succ>
                              bacterial membrane --- Certainty = 0.0000(Not Clear) < succ>
                                bacterial outside --- Certainty = 0.0000(Not Clear) < succ>
```

[2512] The protein has no significant homology with any sequences in the GENPEPT database.

[2513] No corresponding DNA sequence was identified in S. pyogenes.

[2514] Based on this analysis, it was predicted that this protein and its epitopes, could be useful antigens for vaccines or diagnostics.

### EXAMPLE 401

[2515] A DNA sequence (GBSx0436) was identified in S. agalactiae <SEQ ID 1299> which encodes the amino acid sequence <SEQ ID 1300>. This protein is predicted to be DNA-entry nuclease. Analysis of this protein sequence reveals the following:

```
Possible site: 51
>>> Seems to have no N-terminal signal sequence
----- Final Results -----
                            bacterial cytoplasm --- Certainty = 0.3990(Affirmative) < succ>
                              bacterial membrane --- Certainty = 0.0000(Not Clear) < succ>
                                bacterial outside --- Certainty = 0.0000(Not Clear) < succ>
```

[2516] A related GBS nucleic acid sequence <SEQ ID 9323> which encodes amino acid sequence <SEQ ID 9324> was also identified.

[2517] The protein has homology with the following sequences in the GENPEPT database:

| >GP: CAA38134 GB: X54225 membrane nuclease [Streptococcus pneumoniae] | | | |
|---|---|---|---|
| Identities = 87/157 (55%), Positives = 110/157 (69%), Gaps = 1/157 (0%) | | | |
| Query: | 1 | MLDRTIRQYQNRRDTTLPDANWKPLGWHQVAT-NDHYGHAVDKGHLIAYALAGNFKGWDA | 59 |
| | | +L + RQY+NR++T +W P GWHQV Y HAVD+GHL+ YAL G G+DA | |
| Sbjct: | 116 | LLSKATRQYKNRKETGNGSTSWTPPGWHQVKNLKGSYTHAVDRGHLLGYALIGGLDGFDA | 175 |
| Query: | 60 | SVSNPQNVVTQTAHSNQSNQKINRGQNYYESLVRKAVDQNKRVRYRVTPLYRNDTDLVPF | 119 |
| | | S SNP+N+ QTA +NQ+ + + GQNYYES VRKA+DQNKRVRYRVT Y ++ DLVP | |
| Sbjct: | 176 | STSNPKNIAVQTAWANQAQAEYSTGQNYYESKVRKALDQNKRVRYRVTLYYASNEDLVPS | 235 |
| Query: | 120 | AMHLEAKSQDGTLEFNVAIPNTQASYTMDYATGEITL | 156 |
| | | A +EAKS DG LEFNV +PN Q +DY TGE+T+ | |
| Sbjct: | 236 | ASQIEAKSSDGELEFNVLVPNVQKGLQLDYRTGEVTV | 272 |

[2518] A related DNA sequence was identified in S. pyogenes <SEQ ID 1301> which encodes the amino acid sequence <SEQ ID 1302>. Analysis of this protein sequence reveals the following:

```
Possible site: 42
>>> Seems to have a cleavable N-term signal seq.
----- Final Results -----
                                bacterial outside --- Certainty = 0.3000(Affirmative) < succ>
                              bacterial membrane --- Certainty = 0.0000(Not Clear) < succ>
                            bacterial cytoplasm --- Certainty = 0.0000(Not Clear) < succ>
```

[2519] The protein has homology with the following sequences in the databases:

| >GP: CAA38134 GB: X54225 membrane nuclease [Streptococcus pneumoniae] | | | |
|---|---|---|---|
| Identities = 89/135 (65%), Positives = 104/135 (76%), Gaps = 1/135 (0%) | | | |
| Query: | 25 | SPAGWHRLHHLKGSYDHAVDRGHLLGYALVGGLKGFDASTGNPDNIATQLSWANQANKPY | 84 |
| | | +P GWH++ +LKGSY HAVDRGHLLGYAL+GGL GFDAST NP NIA Q +WANQA Y | |
| Sbjct: | 138 | TPPGWHQVKNLKGSYTHAVDRGHLLGYALIGGLDGFDASTSNPKNIAVQTAWANQAQAEY | 197 |
| Query: | 85 | LTGQNYYEGLVRRALDKGHRVRYRVTLLY-DGDNLLASGSHLEAKSSDDSLTFNVFVPNV | 143 |
| | | TGQNYYE VR+ALD+ RVRYRVTL Y ++L+ S S +EAKSSD L FNV VPNV | |
| Sbjct: | 198 | STGQNYYESKVRKALDQNKRVRYRVTLYYASNEDLVPSASQIEAKSSDGELEFNVLVPNV | 257 |
| Query: | 144 | QAGLTADYRTGQIAI | 158 |
| | | Q GL DYRTG++ + | |
| Sbjct: | 258 | QKGLQLDYRTGEVTV | 272 |

[2520] An alignment of the GAS and GBS proteins is shown below:

| Identities = 73/135 (54%), Positives = 92/135 (68%), Gaps = 2/135 (1%) | | | |
|---|---|---|---|
| Query: | 24 | PLGWHQVA-TNDHYGHAVDKGHLIAYALAGNFKGWDASVSNPQNVVTQTAHSNQSNQKIN | 82 |
| | | P GWH++ Y HAVD+GHL+ YAL G KG+DAS NP N+ TQ + +NQ+N+ | |
| Sbjct: | 26 | PAGWHRLHHLKGSYDHAVDRGHLLGYALVGGLKGFDASTGNPDNIATQLSWANQANKPYL | 85 |
| Query: | 83 | RGQNYYESLVRKAVDQNKRVRYRVTPLYRNDTDLVPFAMHLEAKSQDGTLEFNVAIPNTQ | 142 |
| | | GQNYYE LVR+A+D+ RVRYRVT LY D +L+ HLEAKS D +L FNV +PN Q | |
| Sbjct: | 86 | TGQNYYEGLVRRALDKGHRVRYRVTLLYDGD-NLLASGSHLEAKSSDDSLTFNVFVPNVQ | 144 |
| Query: | 143 | ASYTMDYATGEITLN | 157 |
| | | A T DY TG+I +N | |
| Sbjct: | 145 | AGLTADYRTGQIAIN | 159 |

[2521] SEQ ID 9324 (GBS656) was expressed in E. coli as a GST-fusion product. SDS-PAGE analysis of total cell extract is shown in FIG. 186 (lane 10; MW 57 kDa).

[2522] GBS656-GST was purified as shown in FIG. 236, lane 4.

[2523] Based on this analysis, it was predicted that these proteins and their epitopes could be useful antigens for vaccines or diagnostics.

### EXAMPLE 402

[2524] A DNA sequence (GBSx0437) was identified in S. agalactiae <SEQ ID 1303> which encodes the amino acid sequence <SEQ ID 1304>. Analysis of this protein sequence reveals the following:

```
Possible site: 13
>>> Seems to have a cleavable N-term signal seq.
----- Final Results -----
                                bacterial outside --- Certainty = 0.3000(Affirmative) < succ>
                              bacterial membrane --- Certainty = 0.0000(Not Clear) < succ>
                            bacterial cytoplasm --- Certainty = 0.0000(Not Clear) < succ>
```

[2525] A related GBS nucleic acid sequence <SEQ ID 9321> which encodes amino acid sequence <SEQ ID 9322> was also identified.

[2526] The protein has no significant homology with any sequences in the GENPEPT database.

[2527] A related DNA sequence was identified in S. pyogenes <SEQ ID 1305> which encodes the amino acid sequence <SEQ ID 1306>. Analysis of this protein sequence reveals the following:

```
Possible site: 47
>>> Seems to have no N-terminal signal sequence
----- Final Results -----
                            bacterial cytoplasm --- Certainty = 0.5350(Affirmative) < succ>
                              bacterial membrane --- Certainty = 0.0000(Not Clear) < succ>
                                bacterial outside --- Certainty = 0.0000(Not Clear) < succ>
```

[2528] An alignment of the GAS and GBS proteins is shown below:

| Identities = 24/73 (32%), Positives = 37/73 (49%), | | | |
|---|---|---|---|
| Gaps = 2/73 (2%) | | | |
| Query: | 1 | MFYMKLANRLSLAATIVNEANANSPFGIIIHSDKAENVEWNDFETQFPDLFNSPKKEESP | 60 |
| | | + YMKLA L TI+ E + SPF I+H+D A N++ E N +++P | |
| Sbjct: | 80 | ILYMKLAKENHLPVTIITETHMTSPFAFILHTDHAINLKETRLEVILKQTKNDQLSKQTP | 139 |
| Query: | 61 | K--KSLWQHFFSQ | 71 |
| | | + KS W+ F + | |
| Sbjct: | 140 | EKTKSFWKRFLKK | 152 |

[2529] Based on this analysis, it was predicted that these proteins and their epitopes could be useful antigens for vaccines or diagnostics.

### EXAMPLE 403

[2530] A DNA sequence (GBSx0438) was identified in S. agalactiae <SEQ ID 1307> which encodes the amino acid sequence <SEQ ID 1308>. This protein is predicted to be Isopentenyl-diphosphate delta-isomerase. Analysis of this protein sequence reveals the following:

```
Possible site: 39
>>> Seems to have no N-terminal signal sequence
----- Final Results -----
                            bacterial cytoplasm --- Certainty = 0.1649(Affirmative) < succ>
                              bacterial membrane --- Certainty = 0.0000(Not Clear) < succ>
                                bacterial outside --- Certainty = 0.0000(Not Clear) < succ>
```

[2531] The protein has homology with the following sequences in the GENPEPT database:

| >GP: AAG20030 GB: AE005083 isopentenyl pyrophosphate isomerase; Idi | | | |
|---|---|---|---|
| [Halobacterium sp. NRC-1] | | | |
| Identities = 24/77 (31%), Positives = 40/77 (51%) | | | |
| Query: | 14 | TGLTLNRDQNIPQGLFHLVVDVILFHEDGDVLMMKRHPKKKAFPAYFEATAGGSALKGEN | 73 |
| | | TGL D + G+ H +LF EDG VL+ +R +K+ + +++ T ++G++ | |
| Sbjct: | 42 | TGLANRLDAHTGDGVRHRAFTCLLFDEDGRVLLAQRADRKRLWDTHWDGTVASHPIEGQS | 101 |
| Query: | 74 | AKQAILRELKEETGIVP | 90 |
| | | A + L EE GI P | |
| Sbjct: | 102 | QVDATRQRLAEELGIEP | 118 |

[2532] No corresponding DNA sequence was identified in S. pyogenes.

[2533] Based on this analysis, it was predicted that this protein and its epitopes, could be useful antigens for vaccines or diagnostics.

### EXAMPLE 404

[2534] A DNA sequence (GBSx0439) was identified in S. agalactiae <SEQ ID 1309> which encodes the amino acid sequence <SEQ ID 1310>. This protein is predicted to be phosphoserine phosphatase (serB). Analysis of this protein sequence reveals the following:

```
Possible site: 35
>>> Seems to have no N-terminal signal sequence
----- Final Results -----
                            bacterial cytoplasm --- Certainty = 0.0613(Affirmative) < succ>
                              bacterial membrane --- Certainty = 0.0000(Not Clear) < succ>
                                bacterial outside --- Certainty = 0.0000(Not Clear) < succ>
```

[2535] The protein has homology with the following sequences in the GENPEPT database:

| >GP: CAB50876 GB: AL096844 putative phosphoserine phosphatase | | | |
|---|---|---|---|
| [Streptomyces coelicolor A3(2)] | | | |
| Identities = 96/193 (49%), Positives = 132/193 (67%) | | | |
| Query: | 5 | LLVMDVDSTLIMEEAIDLLAIEAGVGKQVAALTDAAMRGELDFEEALKKRVALLKGLPVT | 64 |
| | | L+VMDVDSTLI +E I+L A AG +VA +T AAMRGELDFE++L RVALL GL + | |
| Sbjct: | 183 | LVVMDVDSTLIQDEVIELFAAHAGCEDEVAEVTAAAMRGELDFEQSLHARVALLAGLDAS | 242 |
| Query: | 65 | ILTDILSSIHFTPGAYELIKECHKRQMKVGLVSGGFHETIDILAKQLQVDYVKANRLGVK | 124 |
| | | ++ + + + TPGA LI+ + +VG+VSGGF + D L +QL +D+ +AN L + | |
| Sbjct: | 243 | VVDKVRAEVRLTPGARTLIRTLKRLGYQVGVVSGGFTQVTDALQEQLGLDFAQANTLEIV | 302 |
| Query: | 125 | GGFLTGEVEGEIVTKEVKKIKLKEWASENHLDLSQTIAMGDGANDLPMIKSAGVGIAFCA | 184 |
| | | G LTG V GEIV + K L+ +A+ + LSQT+A+GDGANDL M+ +AG+G+AF A | |
| Sbjct: | 303 | DGRLTGRVTGEIVDRAGKARLLRRFAAAAGVPLSQTVAIGDGANDLDMLNAAGLGVAFNA | 362 |
| Query: | 185 | KPIVREEAAYQIN | 197 |
| | | KP+VRE A +N | |
| Sbjct: | 363 | KPVVREAAHTAVN | 375 |

[2536] No corresponding DNA sequence was identified in S. pyogenes.

[2537] Based on this analysis, it was predicted that this protein and its epitopes, could be useful antigens for vaccines or diagnostics.

### EXAMPLE 405

[2538] A DNA sequence (GBSx0440) was identified in S. agalactiae <SEQ ID 1311> which encodes the amino acid sequence <SEQ ID 1312>. Analysis of this protein sequence reveals the following:

| Possible site: 23 | | | | |
|---|---|---|---|---|
| >>> Seems to have an uncleavable N-term signal seq | | | | |
| | INTEGRAL | Likelihood = −17.88 | Transmembrane | 5-21 (1-29) |

```
----- Final Results -----
                              bacterial membrane --- Certainty = 0.8153(Affirmative) < succ>
                                bacterial outside --- Certainty = 0.0000(Not Clear) < succ>
                            bacterial cytoplasm --- Certainty = 0.0000(Not Clear) < succ>
```

[2539] The protein has homology with the following sequences in the GENPEPT database:

| >GP: BAB06924 GB: AP001518 unknown conserved | | | |
|---|---|---|---|
| protein [Bacillus halodurans] | | | |
| Identities = 122/553 (22%), Positives = 265/553 (47%), | | | |
| Gaps = 12/553 (2%) | | | |
| Query: | 7 | LLLVAIVLLVIIAYVVGVVIRKRNDTLIANLETRKQELVDLPVQEEIEQVKLLHLIGQSQ | 66 |
| | | +++ ++++L + +V G + RK + LE K +++ P+ +EI +VK L + G+++ | |
| Sbjct: | 3 | IVVFSLLVLTVTFFVYGALRRKAFYKRVDKLEDWKNDILQRPIPDEIGKVKGLTMSGETE | 62 |
| Query: | 67 | STFREWNQKWTDLSTNSFKDIDFHLVEAENLNDSFNFVRAKHEIDNVDSQLTIIEEDIVS | 126 |
| | | F W W D+ +++ L + E+ + + F +AK +D ++ +L IEE + | |
| Sbjct: | 63 | EKFEVWRSDWDDIVGVILPNVEEQLFDVEDFANKYRFQKAKALLDTIEQRLHSIEEQLKI | 122 |
| Query: | 127 | IREALEVLKEQEEKNSARVTHALDLYETLQKSISEKEDNYGTTMPEIEKQLKNIEAEFSH | 186 |
| | | + + ++VL + EE+N + +L + L K + + ++ +++L+ | |
| Sbjct: | 123 | MVDDIQVLVQSEEQNRTEIGSVRELQQKLIKEAITRRGSLSSSAKVFDEKLEKANELLQA | 182 |
| Query: | 187 | FVTLNSTGDPIEASEVLNKAEEHTIALGQITEQIPAIVAKLEDDFPDQLDDLETGYRRLL | 246 |
| | | F G+ I+ASEVL +A+E + + + +P + +L+ + P +L +L+ G R + | |
| Sbjct: | 183 | FDERTEKGNYIQASEVLEEAKELLGQIEHLLKIVPGLFVELQTNIPAELTNLKNGLRDME | 242 |
| Query: | 247 | EENYHFPEKDIEQRFQEVREAIRSNSDGLVSLDLDRARDENEHIQEKIDKLYDIFEREIA | 306 |
| | | E + I+ + + + E + L L+ + +E I+E +++++++ E+E+ | |
| Sbjct: | 243 | EAGFFLETFAIDSQMERLEEKRVELLEQLTVLECNGMEEEINFIEESMEQMFELLEKEVE | 302 |
| Query: | 307 | AYKVAHKDSKIIPQFLAHAKSNNEQLGH---EIKRLSAKYILNENESLSLRSFTNDLEEI | 363 |
| | | A ++ + ++P E+L H E + + Y L E E + + +L+E+ | |
| Sbjct: | 303 | A---KNEITILLPNLREDLTKTEEKLTHLKEETESVQLSYRLAEEELVFQQKLGKELKEL | 359 |
| Query: | 364 | ETKVLPSVENFGQEASPYTHLQILFERTLKTLTTVEENQMEVFEAVKTIESVETRARQNM | 423 |
| | | ++ E ++ ++ ++ + E + LT + + E++ ++ E +A++ + | |
| Sbjct: | 360 | RQQLQVIDEVTEEQKQTFSSVRSMLEEWREGLTACQNKIEQAQESLNSLRKDELKAKEEL | 419 |
| Query: | 424 | DKYVNKLHMIKRFMEKRNLPGIPQDFLSTFFTTSSQIEALINELSRGRIDIEAVSRLNDV | 483 |
| | | + KL KR ++K N+PG+P+ L ++ I +LS +++ V+ L D | |
| Sbjct: | 420 | KQLKEKLLEDKRLVQKSNIPGLPETLLHRLEDGEQKLAQAIAKLSDVPLEMGRVTALVDE | 479 |
| Query: | 484 | TTNAIANLEQATYLVVQDATLTEQLLQYSNRYRSFEQNVQKSFEQALYLFEVEHNYKASF | 543 |
| | | I + ++ A L E ++QY NRYRS V+K A LF + | |
| Sbjct: | 480 | AQGLIHENSSILHETIEKARLAEHVIQYGNRYRSRSAEVKKRLSNAEELFRA-----FEY | 534 |
| Query: | 544 | DE-ISYALETVEP | 555 |
| | | DE I A++ +EP | |
| Sbjct: | 535 | DEAIEMAVQAIEP | 547 |

[2540] A related DNA sequence was identified in S. pyogenes <SEQ ID 1313> which encodes the amino acid sequence <SEQ ID 1314>. Analysis of this protein sequence reveals the following:

| Possible site: 23 | | | | |
|---|---|---|---|---|
| >>> Seems to have an uncleavable N-term signal seq | | | | |
| | INTEGRAL | Likelihood = −18.04 | Transmembrane | 5-21 (1-29) |

```
----- Final Results -----
                              bacterial membrane --- Certainty = 0.8217(Affirmative) < succ>
                                bacterial outside --- Certainty = 0.0000(Not Clear) < succ>
                            bacterial cytoplasm --- Certainty = 0.0000(Not Clear) < succ>
```

[2541] The protein has homology with the following sequences in the databases:

| >GP: BAB06924 GB: AP001518 unknown conserved | | | |
|---|---|---|---|
| protein [Bacillus halodurans] | | | |
| Identities = 131/555 (23%), Positives = 269/555 (47%), | | | |
| Gaps = 16/555 (2%) | | | |
| Query: | 7 | LLIVAIVLLVIIAYLVGVIIRKRNDSLITSLEERKQALFALPVNDEIEEVKSLHLIGQSQ | 66 |
| | | +++ ++++L + ++ G + RK + LE+ K + P+ DEI +VK L + G+++ | |
| Sbjct: | 3 | IVVFSLLVLTVTFFVYGALRRKAFYKRVDKLEDWKNDILQRPIPDEIGKVKGLTMSGETE | 62 |
| Query: | 67 | TSFREWNQKWVDLTVNSFADIENHIFEAENLNDTFNFIRAKHEINSVESQLNLVEEDIAS | 126 |
| | | F W W D+ ++E +F+ E+ + + F +AK ++++E +L+ +EE + | |
| Sbjct: | 63 | EKFEVWRSDWDDIVGVILPNVEEQLFDVEDFANKYRFQKAKALLDTIEQRLHSIEEQLKI | 122 |
| Query: | 127 | IREALNILKEQEEKNSARVTHALDLYEKLQASISENEDNFGSTMPEIDKQMKNIETEFSQ | 186 |
| | | + + + +L + EE+N + +L +KL + S+ D++++ | |
| Sbjct: | 123 | MVDDIQVLVQSEEQNRTEIGSVRELQQKLIKEAITRRGSLSSSAKVFDEKLEKANELLQA | 182 |
| Query: | 187 | FVALNSSGDPVEASEVLDRAEEHTIALGQITEQIPAIVAKLEDDFPDQLDDLETGYRRLL | 246 |
| | | F G+ ++ASEVL+ A+E + + + +P + +L+ + P +L +L+ G R + | |
| Sbjct: | 183 | FDERTEKGNYIQASEVLEEAKELLGQIEHLLKIVPGLFVELQTNIPAELTNLKNGLRDME | 242 |
| Query: | 247 | EENYHFPEKNIEARFQEIRESIRANSSELVTLDLDRAREENTHIQERIDSLYEVFEREIA | 306 |
| | | E + I+++ + + E +L L+ + EE I+E ++ ++E+ E+E | |
| Sbjct: | 243 | EAGFFLETFAIDSQMERLEEKRVELLEQLTVLECNGMEEEINFIEESMEQMFELLEKE-- | 300 |
| Query: | 307 | AYKVAAKN--SKMLPRYLEHVKRNNEQ---LKDEIARLSRKYILSETESLTVKAFEKDIK | 361 |
| | | V AKN + +LP E + + E+ LK+E + Y L+E E + + K++K | |
| Sbjct: | 301 | ---VEAKNEITILLPNLREDLTKTEEKLTHLKEETESVQLSYRLAEEELVFQQKLGKELK | 357 |
| Query: | 362 | EIEDSTLAVAEQFGLQEKPFSELQVTFERSIKTLTNVESGQMDVFAAVKDIEKIESQARH | 421 |
| | | E+ + E Q++ FS ++ E + LT ++ ++ + K E +A+ | |
| Sbjct: | 358 | ELRQQLQVIDEVTEEQKQTFSSVRSMLEEWREGLTACQNKIEQAQESLNSLRKDELKAKE | 417 |
| Query: | 422 | NLDVYVTQLHMIKRYMEKRHLPGIPQDFLSAFFTTSSQLEALMDELSRGRINIEAVSRLS | 481 |
| | | L +L KR ++K ++PG+P+ L +L + +LS + + V+ L | |
| Sbjct: | 418 | ELKQLKEKLLEDKRLVQKSNIPGLPETLLHRLEDGEQKLAQAIAKLSDVPLEMGRVTALV | 477 |
| Query: | 482 | EVATVAIANLEDLTYQVVQNATLTEQLLQYSNRYRSFEAGVQSSFEHALRLFEVENDYQA | 541 |
| | | + A I + ++ ++ A L E ++QY NRYRS A V+ +A LF | |
| Sbjct: | 478 | DEAQGLIHENSSILHETIEKARLAEHVIQYGNRYRSRSAEVKKRLSNAEELFRA-----F | 532 |
| Query: | 542 | SFDE-ISYALETVEP | 555 |
| | | +DE I A++ +EP | |
| Sbjct: | 533 | EYDEAIEMAVQAIEP | 547 |

[2542] An alignment of the GAS and GBS proteins is shown below:

| Identities = 429/574 (74%), Positives = 503/574 (86%) | | | |
|---|---|---|---|
| Query: | 1 | MSSGIILLLVAIVLLVIIAYVVGVVIRKRNDTLIANLETRKQELVDLPVQEEIEQVKLLH | 60 |
| | | MSSGIILL+VAIVLLVIIAY+VGV+IRKRND+LI +LE RKQ L LPV +EIE+VK LH | |
| Sbjct: | 1 | MSSGIILLIVAIVLLVIIAYLVGVIIRKRNDSLITSLEERKQALFALPVNDEIEEVKSLH | 60 |
| Query: | 61 | LIGQSQSTFREWNQKWTDLSTNSFKDIDFHLVEAENLNDSFNFVRAKHEIDNVDSQLTII | 120 |
| | | LIGQSQ++FREWNQKW DL+ NSF DI+ H+ EAENLND+FNF+RAKHEI++V+SQL ++ | |
| Sbjct: | 61 | LIGQSQTSFREWNQKWVDLTVNSFADIENHIFEAENLNDTFNFIRAKHEINSVESQLNLV | 120 |
| Query: | 121 | EEDIVSIREALEVLKEQEEKNSARVTHALDLYETLQKSISEKEDNYGTTMPEIEKQLKNI | 180 |
| | | EEDI SIREAL +LKEQEEKNSARVTHALDLYE LQ SISE EDN+G+TMPEI+KQ+KNI | |
| Sbjct: | 121 | EEDIASIREALNILKEQEEKNSARVTHALDLYEKLQASISENEDNFGSTMPEIDKQMKNI | 180 |
| Query: | 181 | EAEFSHFVTLNSTGDPIEASEVLNKAEEHTIALGQITEQIPAIVAKLEDDFPDQLDDLET | 240 |
| | | E EFS FV LNS+GDP+EASEVL++AEEHTIALGQITEQIPAIVAKLEDDFPDQLDDLET | |
| Sbjct: | 181 | ETEFSQFVALNSSGDPVEASEVLDRAEEHTIALGQITEQIPAIVAKLEDDFPDQLDDLET | 240 |
| Query: | 241 | GYRRLLEENYHFPEKDIEQRFQEVREAIRSNSDGLVSLDLDRARDENEHIQEKIDKLYDI | 300 |
| | | GYRRLLEENYHFPEK+IE RFQE+RE+IR+NS LV+LDLDRAR+EN HIQE+ID LY++ | |
| Sbjct: | 241 | GYRRLLEENYHFPEKNIEARFQEIRESIRANSSELVTLDLDRAREENTHIQERIDSLYEV | 300 |
| Query: | 301 | FEREIAAYKVAHKDSKIIPQFLAHAKSNNEQLGHEIKRLSAKYILNENESLSLRSFTNDL | 360 |
| | | FEREIAAYKVA K+SK++P++L H K NNEQL EI RLS KYIL+E ESL++++F D+ | |
| Sbjct: | 301 | FEREIAAYKVAAKNSKMLPRYLEHVKRNNEQLKDEIARLSRKYILSETESLTVKAFEKDI | 360 |
| Query: | 361 | EEIETKVLPSVENFGQEASPYTHLQILFERTLKTLTTVEENQMEVFEAVKTIESVETRAR | 420 |
| | | +EIE L E FG + P++ LQ+ FER++KTLT VE QM+VF AVK IE +E++AR | |
| Sbjct: | 361 | KEIEDSTLAVAEQFGLQEKPFSELQVTFERSIKTLTNVESGQMDVFAAVKDIEKIESQAR | 420 |
| Query: | 421 | QNMDKYVNKLHMIKRFMEKRNLPGIPQDFLSTFFTTSSQIEALINELSRGRIDIEAVSRL | 480 |
| | | N+D YV +LHMIKR+MEKR+LPGIPQDFLS FFTTSSQ+EAL++ELSRGRI+IEAVSRL | |
| Sbjct: | 421 | HNLDVYVTQLHMIKRYMEKRHLPGIPQDFLSAFFTTSSQLEALMDELSRGRINIEAVSRL | 480 |
| Query: | 481 | NDVTTNAIANLEQATYLVVQDATLTEQLLQYSNRYRSFEQNVQKSFEQALYLFEVEHNYK | 540 |
| | | ++V T AIANLE TY VVQ+ATLTEQLLQYSNRYRSFE VQ SFE AL LFEVE++Y+ | |
| Sbjct: | 481 | SEVATVAIANLEDLTYQVVQNATLTEQLLQYSNRYRSFEAGVQSSFEHALRLFEVENDYQ | 540 |
| Query: | 541 | ASFDEISYALETVEPGVTDRFVTSYEKTQERIRF | 574 |
| | | ASFDEISYALETVEPGVTDRFV SYEKT+E IRF | |
| Sbjct: | 541 | ASFDEISYALETVEPGVTDRFVNSYEKTREHIRF | 574 |

[2543] SEQ ID 1312 (GBS642) was expressed in E. coli as a GST-fusion product. SDS-PAGE analysis of total cell extract is shown in FIG. 142 (lane 24; MW 27 kDa).

[2544] Based on this analysis, it was predicted that these proteins and their epitopes could be useful antigens for vaccines or diagnostics.

### EXAMPLE 406

[2545] A DNA sequence (GBSx0441) was identified in S. agalactiae <SEQ ID 1315> which encodes the amino acid sequence <SEQ ID 1316>. Analysis of this protein sequence reveals the following:

```
Possible site: 41
>>> Seems to have no N-terminal signal sequence
----- Final Results -----
                            bacterial cytoplasm --- Certainty = 0.2471(Affirmative) < succ>
                              bacterial membrane --- Certainty = 0.0000(Not Clear) < succ>
                                bacterial outside --- Certainty = 0.0000(Not Clear) < succ>
```

[2546] A related GBS nucleic acid sequence <SEQ ID 9671> which encodes amino acid sequence <SEQ ID 9672> was also identified.

[2547] The protein has homology with the following sequences in the GENPEPT database:

| >GP: CAA91553 GB: Z67740 DNA gyrase [Streptococcus pneumoniae] | | | |
|---|---|---|---|
| Identities = 574/650 (88%), Positives = 618/650 (94%), Gaps = 2/650 (0%) | | | |
| Query: | 1 | MTEETKNMEQRAQEYDASQIQVLEGLEAVRMRPGMYIGSTSKEGLHHLVWEIVDNSIDEA | 60 |
| | | MTEE KN++ AQ+YDASQIQVLEGLEAVRMRPGMYIGSTSKEGLHHLVWEIVDNSIDEA | |
| Sbjct: | 1 | MTEEIKNLQ--AQDYDASQIQVLEGLEAVRMRPGMYIGSTSKEGLHHLVWEIVDNSIDEA | 58 |
| Query: | 61 | LAGFAGHIKVYIEPDNSITVVDDGRGIPVDIQEKTGRPAVETVFTVLHAGGKFGGGGYKV | 120 |
| | | LAGFA HI+V+IEPD+SITVVDDGRGIPVDIQEKTGRPAVETVFTVLHAGGKFGGGGYKV | |
| Sbjct: | 59 | LAGFASHIQVFIEPDDSITVVDDGRGIPVDIQEKTGRPAVETVFTVLHAGGKFGGGGYKV | 118 |
| Query: | 121 | SGGLHGVGSSVVNALSTQLDVKVYKNGKVHYQEYQRGVVVNDLEIIGDTDLSGTTVHFTP | 180 |
| | | SGGLHGVGSSVVNALSTQLDV V+KNGK+HYQEY+RG VV DLE++GDTD +GTTVHFTP | |
| Sbjct: | 119 | SGGLHGVGSSVVNALSTQLDVHVHKNGKIHYQEYRRGHVVADLEVVGDTDRTGTTVHFTP | 178 |
| Query: | 181 | DPEIFTETTVFDFDKLAKRIQELAFLNRGLRISISDKREGQEVEKEYHYEGGIGSYVEFI | 240 |
| | | DPEIFTETT+FDFDKL KRIQELAFLNRGL+ISI+DKR+G E K YHYEGGI SYVE+I | |
| Sbjct: | 179 | DPEIFTETTIFDFDKLNKRIQELAFLNRGLQISITDKRQGLEQTKHYHYEGGIASYVEYI | 238 |
| Query: | 241 | NENKEVIFENPIYTDGELDGISVEVAMQYTTGYQETVMSFANNIHTHEGGTHEQGFRTAL | 300 |
| | | NENK+VIF+ PIYTDGE+D I+VEVAMQYTTGY E VMSFANNIHTHEGGTHEQGFRTAL | |
| Sbjct: | 239 | NENKDVIFDTPIYTDGEMDDITVEVAMQYTTGYHENVMSFANNIHTHEGGTHEQGFRTAL | 298 |
| Query: | 301 | TRVINDYAKKNKILKENEDNLTGEDVREGLTAVISVKHPNPQFEGQTKTKLGNSEVVKIT | 360 |
| | | TRVINDYA+KNK+LK+NEDNLTGEDVREGLTAVISVKHPNPQFEGQTKTKLGNSEVVKIT | |
| Sbjct: | 299 | TRVINDYARKNKLLKDNEDNLTGEDVREGLTAVISVKHPNPQFEGQTKTKLGNSEVVKIT | 358 |
| Query: | 361 | NRLFSEAFNRFLLENPQVAKKIVEKGILASKARIAAKRAREVTRKKSGLEISNLPGKLAD | 420 |
| | | NRLFSEAF+ FL+ENPQ+AK+IVEKGILA+KAR+AAKRAREVTRKKSGLEISNLPGKLAD | |
| Sbjct: | 359 | NRLFSEAFSDFLMENPQIAKRIVEKGILAAKARVAAKRAREVTRKKSGLEISNLPGKLAD | 418 |
| Query: | 421 | CSSNNAEMNELFIVEGDSAGGSAKSGRNREFQAILPIRGKILNVEKATMDKILANEEIRS | 480 |
| | | CSSNN ELFIVEGDSAGGSAKSGRNREFQAILPIRGKILNVEKA+MDKILANEEIRS | |
| Sbjct: | 419 | CSSNNPAETELFIVEGDSAGGSAKSGRNREFQAILPIRGKILNVEKASMDKILANEEIRS | 478 |
| Query: | 481 | LFTAMGTGFGADFDVSKVRYQKLVIMTDADVDGAHIRTLLLTLIYRFMRPVLEAGYVYIA | 540 |
| | | LFTAMGTGFGA+FDVSK RYQKLV+MTDADVDGAHIRTLLLTLIYR+M+P+LEAGYVYIA | |
| Sbjct: | 479 | LFTAMGTGFGAEFDVSKARYQKLVLMTDADVDGAHIRTLLLTLIYRYMKPILEAGYVYIA | 538 |
| Query: | 541 | QPPIYGVKVGSEIKAYIQPGVNQEEELRQALDTYSSGRSKPTVQRYKGLGEMDDHQLWET | 600 |
| | | QPPIYGVKVGSEIK YIQPG +QE +L++AL YS GR+KPT+QRYKGLGEMDDHQLWET | |
| Sbjct: | 539 | QPPIYGVKVGSEIKEYIQPGADQEIKLQEALARYSEGRTKPTIQRYKGLGEMDDHQLWET | 598 |
| Query: | 601 | TMDPENRLMARVSVDDAAEADKIFDMLMGDRVEPRREFIEANAVYSNLDI | 650 |
| | | TMDPE+RLMARVSVDDAAEADKIFDMLMGDRVEPRREFIE NAVYS LD+ | |
| Sbjct: | 599 | TMDPEHRLMARVSVDDAAEADKIFDMLMGDRVEPRREFIEENAVYSTLDV | 648 |

[2548] A related DNA sequence was identified in S. pyogenes <SEQ ID 1317> which encodes the amino acid sequence <SEQ ID 1318>. Analysis of this protein sequence reveals the following:

```
Possible site: 41
>>> Seems to have no N-terminal signal sequence
----- Final Results -----
                            bacterial cytoplasm --- Certainty = 0.1698(Affirmative) < succ>
                              bacterial membrane --- Certainty = 0.0000(Not Clear) < succ>
                                bacterial outside --- Certainty = 0.0000(Not Clear) < succ>
```

[2549] An alignment of the GAS and GBS proteins is shown below:

| Identities = 584/650 (89%), Positives = 618/650 (94%) | | | |
|---|---|---|---|
| Query: | 1 | MTEETKNMEQRAQEYDASQIQVLEGLEAVRMRPGMYIGSTSKEGLHHLVWEIVDNSIDEA | 60 |
| | | M EE K+ E++ QEYDASQIQVLEGLEAVRMRPGMYIGST+KEGLHHLVWEIVDNSIDEA | |
| Sbjct: | 1 | MIEENKHFEKKMQEYDASQIQVLEGLEAVRMRPGMYIGSTAKEGLHHLVWEIVDNSIDEA | 60 |
| Query: | 61 | LAGFAGHIKVYIEPDNSITVVDDGRGIPVDIQEKTGRPAVETVFTVLHAGGKFGGGGYKV | 120 |
| | | LAGFA HIKV+IE DNSITVVDDGRGIPVDIQ KTGRPAVETVFTVLHAGGKFGGGGYKV | |
| Sbjct: | 61 | LAGFASHIKVFIEADNSITVVDDGRGIPVDIQAKTGRPAVETVFTVLHAGGKFGGGGYKV | 120 |
| Query: | 121 | SGGLHGVGSSVVNALSTQLDVKVYKNGKVHYQEYQRGVVVNDLEIIGDTDLSGTTVHFTP | 180 |
| | | SGGLHGVGSSVVNALSTQLDV+VYKNG++HYQE++RG VV DLE+IG TD++GTTVHFTP | |
| Sbjct: | 121 | SGGLHGVGSSVVNALSTQLDVRVYKNGQIHYQEFKRGAVVADLEVIGTTDVTGTTVHFTP | 180 |
| Query: | 181 | DPEIFTETTVFDFDKLAKRIQELAFLNRGLRISISDKREGQEVEKEYHYEGGIGSYVEFI | 240 |
| | | DPEIFTETT FD+ LAKRIQELAFLNRGL+ISI+DKR G E E+ + YEGGIGSYVEF+ | |
| Sbjct: | 181 | DPEIFTETTQFDYSVLAKRIQELAFLNRGLKISITDKRSGMEQEEHFLYEGGIGSYVEFL | 240 |
| Query: | 241 | NENKEVIFENPIYTDGELDGISVEVAMQYTTGYQETVMSFANNIHTHEGGTHEQGFRTAL | 300 |
| | | N+ K+VIFE PIYTDGEL+GI+VEVAMQYTT YQETVMSFANNIHTHEGGTHEQGFR AL | |
| Sbjct: | 241 | NDKKDVIFETPIYTDGELEGIAVEVAMQYTTSYQETVMSFANNIHTHEGGTHEQGFRAAL | 300 |
| Query: | 301 | TRVINDYAKKNKILKENEDNLTGEDVREGLTAVISVKHPNPQFEGQTKTKLGNSEVVKIT | 360 |
| | | TRVINDYAKKNKILKENEDNLTGEDVREGLTAVISVKHPNPQFEGQTKTKLGNSEVVKIT | |
| Sbjct: | 301 | TRVINDYAKKNKILKENEDNLTGEDVREGLTAVISVKHPNPQFEGQTKTKLGNSEVVKIT | 360 |
| Query: | 361 | NRLFSEAFNRFLLENPQVAKKIVEKGILASKARIAAKRAREVTRKKSGLEISNLPGKLAD | 420 |
| | | NRLFSEAF RFLLENPQVA+KIVEKGILASKARIAAKRAREVTRKKSGLEISNLPGKLAD | |
| Sbjct: | 361 | NRLFSEAFQRFLLENPQVARKIVEKGILASKARIAAKRAREVTRKKSGLEISNLPGKLAD | 420 |
| Query: | 421 | CSSNNAEMNELFIVEGDSAGGSAKSGRNREFQAILPIRGKILNVEKATMDKILANEEIRS | 480 |
| | | CSSN+A NELFIVEGDSAGGSAKSGRNREFQAILPIRGKILNVEKATMDKILANEEIRS | |
| Sbjct: | 421 | CSSNDANQNELFIVEGDSAGGSAKSGRNREFQAILPIRGKILNVEKATMDKILANEEIRS | 480 |
| Query: | 481 | LFTAMGTGFGADFDVSKVRYQKLVIMTDADVDGAHIRTLLLTLIYRFMRPVLEAGYVYIA | 540 |
| | | LFTAMGTGFGADFDVSK RYQKLVIMTDADVDGAHIRTLLLTLIYRFMRPVLEAGYVYIA | |
| Sbjct: | 481 | LFTAMGTGFGADFDVSKARYQKLVIMTDADVDGAHIRTLLLTLIYRFMRPVLEAGYVYIA | 540 |
| Query: | 541 | QPPIYGVKVGSEIKAYIQPGVNQEEELRQALDTYSSGRSKPTVQRYKGLGEMDDHQLWET | 600 |
| | | QPPIYGVKVGSEIK YIQPG++QE++L+ AL+ YS GRSKPTVQRYKGLGEMDDHQLWET | |
| Sbjct: | 541 | QPPIYGVKVGSEIKEYIQPGIDQEDQLKTALEKYSIGRSKPTVQRYKGLGEMDDHQLWET | 600 |
| Query: | 601 | TMDPENRLMARVSVDDAAEADKIFDMLMGDRVEPRREFIEANAVYSNLDI | 650 |
| | | TMDPENRLMARV+VDDAAEADK+FDMLMGDRVEPRR+FIE NAVYS LDI | |
| Sbjct: | 601 | TMDPENRLMARVTVDDAAEADKVFDMLMGDRVEPRRDFIEENAVYSTLDI | 650 |

[2550] Based on this analysis, it was predicted that these proteins and their epitopes could be useful antigens for vaccines or diagnostics.

### EXAMPLE 407

[2551] A DNA sequence (GBSx0442) was identified in S. agalactiae <SEQ ID 1319> which encodes the amino acid sequence <SEQ ID 1320>. Analysis of this protein sequence reveals the following:

```
Possible site: 26
>>> Seems to have no N-terminal signal sequence
----- Final Results -----
                            bacterial cytoplasm --- Certainty = 0.3186(Affirmative) < succ>
                              bacterial membrane --- Certainty = 0.0000(Not Clear) < succ>
                                bacterial outside --- Certainty = 0.0000(Not Clear) < succ>
```

[2552] The protein has homology with the following sequences in the GENPEPT database:

| >GP: CAA91552 GB: Z67740 unidentified [Streptococcus pneumoniae] | | | |
|---|---|---|---|
| Identities = 82/142 (57%), Positives = 105/142 (73%) | | | |
| Query: | 45 | LKESTADAIAYFIPEEADFLKEYKANEAKVLETPILFQGAKELLAKIQRQGSRNFLVSHR | 104 |
| | | LK ST AI F P +FL++YK NEA+ LE PILF+G +LL I QG R+FLVSHR | |
| Sbjct: | 2 | LKVSTPFAIETFAPNLENFLEKYKENEARELEHPILFEGVSDLLEDILNQGGRHFLVSHR | 61 |
| Query: | 105 | DNQVIVILEKTEIIDYFTEVVTADNGFSRKPSPESMLYLKEKYQIDNCLVIGDRDIDKQA | 164 |
| | | ++QV+ ILEKT I YFTEVVT+ +GF RKP+PESMLYL+ERYQI + LVIGDR ID +A | |
| Sbjct: | 62 | NDQVLEILEKTSIAAYFTEVVTSSSGFKRKPNPESMLYLREKYQISSGLVIGDRPIDIEA | 121 |
| Query: | 165 | GESAGFDTLLVDGSKSLMEIIE | 186 |
| | | G++AG DT L +L ++++ | |
| Sbjct: | 122 | GQAAGLDTHLFTSIVNLRQVLD | 143 |

[2553] A related DNA sequence was identified in S. pyogenes <SEQ ID 1321> which encodes the amino acid sequence <SEQ ID 1322>. Analysis of this protein sequence reveals the following:

```
Possible site: 59
>>> Seems to have no N-terminal signal sequence
----- Final Results -----
                            bacterial cytoplasm --- Certainty = 0.2472(Affirmative) < succ>
                              bacterial membrane --- Certainty = 0.0000(Not Clear) < succ>
                                bacterial outside --- Certainty = 0.0000(Not Clear) < succ>
```

[2554] An alignment of the GAS and GBS proteins is shown below:

| Identities = 122/185 (65%), Positives = 145/185 (77%) | | | |
|---|---|---|---|
| Query: | 1 | MNYHDYIWDLGGTLLDNYESSTRAFVETLKEFGYQADHDSVYQKLKESTADAIAYFIPEE | 60 |
| | | MNY DYIWDLGGTLLDNYE ST+AFV+TL F DHD+VYQKLKESTA A+A F P E | |
| Sbjct: | 4 | MNYQDYIWDLGGTLLDNYELSTQAFVQTLAFFSLPGDHDAVYQKLKESTAIAVAMFAPNE | 63 |
| Query: | 61 | ADFLKEYKANEAKVLETPILFQGAKELLAKIQRQGSRNFLVSHRDNQVIVILEKTEIIDY | 120 |
| | | +FL Y+ EA L PI GAKE+L KI GSRNFL+SHRD QV +LE+ ++ Y | |
| Sbjct: | 64 | PEFLHVYRLREADKLAQPIWCLGAKEILGKIATSGSRNFLISHRDCQVNQLLEQAGLLIY | 123 |
| Query: | 121 | FTEVVTADNGFSRKPSPESMLYLKEKYQIDNCLVIGDRDIDKQAGESAGFDTLLVDGSKS | 180 |
| | | FTEVVTA NGF+RKP+PES+ YLKEKY I++ LVIGDR IDKQAG++AGF+TLLVDG K+ | |
| Sbjct: | 124 | FTEVVTASNGFARKPNPESLFYLKEKYDINSGLVIGDRLIDKQAGQAAGFNTLLVDGRKN | 183 |
| Query: | 181 | LMEII | 185 |
| | | L+EI+ | |
| Sbjct: | 184 | LLEIV | 188 |

[2555] Based on this analysis, it was predicted that these proteins and their epitopes could be useful antigens for vaccines or diagnostics.

### EXAMPLE 408

[2556] A DNA sequence (GBSx0443) was identified in S. agalactiae <SEQ ID 1323> which encodes the amino acid sequence <SEQ ID 1324>. This protein is predicted to be stage V sporulation protein E (rodA). Analysis of this protein sequence reveals the following:

| Possible site: 42 | | | | |
|---|---|---|---|---|
| >>> Seems to have a cleavable N-term signal seq. | | | | |
| | INTEGRAL | Likelihood = −11.15 | Transmembrane | 206-222 (177-226) |
| | INTEGRAL | Likelihood = −10.14 | Transmembrane | 58-74 (50-82) |
| | INTEGRAL | Likelihood = −9.34 | Transmembrane | 182-198 (177-205) |
| | INTEGRAL | Likelihood = −8.55 | Transmembrane | 158-174 (156-177) |
| | INTEGRAL | Likelihood = −8.12 | Transmembrane | 300-316 (299-324) |
| | INTEGRAL | Likelihood = −2.66 | Transmembrane | 86-102 (83-102) |
| | INTEGRAL | Likelihood = −2.34 | Transmembrane | 338-354 (338-357) |

```
----- Final Results -----
                              bacterial membrane --- Certainty = 0.5458(Affirmative) < succ>
                                bacterial outside --- Certainty = 0.0000(Not Clear) < succ>
                            bacterial cytoplasm --- Certainty = 0.0000(Not Clear) < succ>
```

[2557] A related GBS nucleic acid sequence <SEQ ID 9669> which encodes amino acid sequence <SEQ ID 9670> was also identified.

[2558] The protein has homology with the following sequences in the GENPEPT database:

| >GP: CAB15838 GB: Z99123 alternate gene name: ipa-42d~similar to | | | |
|---|---|---|---|
| cell-division protein [Bacillus subtilis] | | | |
| Identities = 142/392 (36%), Positives = 237/392 (60%), Gaps = 23/392 (5%) | | | |
| Query: | 10 | QKSNYFKGQIDYAVVIPVFFLLMIGLASIYVA-TMNDYPSNIYIAMFQQVSWIIMGCIIA | 68 |
| | | Q+S +++G D + VFF+ I + SIY A Y + +I QQ+ + ++G + | |
| Sbjct: | 7 | QQSPFYQG--DLIFIFGVFFI--ISVVSIYAAGQFGQYGNTDWI---QQIVFYLLGAVAI | 59 |
| Query: | 69 | FVVMLFSTEFLWKATPYLYALGLTLMVLPLIFYSPQLFAAT--GAKNWVTIGSVTLFQPS | 126 |
| | | V++ F E L K + Y++ +G+ +++ I SP+ A GAK+W IG +T+ QPS | |
| Sbjct: | 60 | TVLLYFDLEQLEKLSLYIFIIGILSLIILKI--SPESIAPVIKGAKSWFRIGRITI-QPS | 116 |
| Query: | 127 | EFMKISYILMLSRITVSFHQKNRKTFQDDWKLL-GLFGLVTLPVMILLMLQKDLGTALVF | 185 |
| | | EFMK+ I+ML+ + + K +T +DD LL + G+ +PV ++LM +D GTA + | |
| Sbjct: | 117 | EFMKVGLIMMLASVIGKANPKGVRTLRDDIHLLLKIAGVAVIPVGLILM--QDAGTAGIC | 174 |
| Query: | 186 | LAILSGLILLSGISWWIILPILSTIVLFIASFLMIFISPNGKEWFYNLGMDTYQINRLSA | 245 |
| | | + I+ ++ +SGI+W +I I + +L I+ L++ I N + ++G+ YQI R+++ | |
| Sbjct: | 175 | MFIVLVMVFMSGINWKLIAIIAGSGILLISLILLVMI--NFPDVAKSVGIQDYQIKRVTS | 232 |
| Query: | 246 | WIDPFSFAD---SIAYQQTQGMVSIGSGGVTGKGFNILELSVPVRESDMIFTVIAENFGF | 302 |
| | | W+ + + ++Q Q +++IGSGG+ G G + L++ VP +D IF++I E+FGF | |
| Sbjct: | 233 | WVSASNETQEDSNDSWQVDQAIMAIGSGGILGNGISNLKVYVPESTTDFIFSIIGESFGF | 292 |
| Query: | 303 | IGSAIVLGLYLIIIYRMLRIT--IESNNQFYTFISTGFIMMIVFHVFENIGAAVGILPLT | 360 |
| | | IG AIV+ ++ +IYR++ + I N+F +F G+ +IV H F+NIG +GI+P+T | |
| Sbjct: | 293 | IGCAIVVIMFFFLIYRLVVLIDKIHPFNRFASFFCVGYTALIVIHTFQNIGMNIGIMPVT | 352 |
| Query: | 361 | GIPLPFISQGGSSLLSNLIGIGLVLSMSYQNT | 392 |
| | | GIPL F+S GGSS LS LIG G+V + S Q T | |
| Sbjct: | 353 | GIPLLFVSYGGSSTLSTLIGFGIVYNASVQLT | 384 |

[2559] There is also homology to SEQ ID 1028.

[2560] Based on this analysis, it was predicted that these proteins and their epitopes could be useful antigens for vaccines or diagnostics.

### EXAMPLE 409

[2561] A DNA sequence (GBSx0444) was identified in S. agalactiae <SEQ ID 1325> which encodes the amino acid sequence <SEQ ID 1326>. Analysis of this protein sequence reveals the following:

```
Possible site: 25
>>> Seems to have no N-terminal signal sequence
----- Final Results -----
                            bacterial cytoplasm --- Certainty = 0.3195(Affirmative) < succ>
                              bacterial membrane --- Certainty = 0.0000(Not Clear) < succ>
                                bacterial outside --- Certainty = 0.0000(Not Clear) < succ>
```

[2562] The protein has no significant homology with any sequences in the GENPEPT database.

[2563] A related DNA sequence was identified in S. pyogenes <SEQ ID 1327> which encodes the amino acid sequence <SEQ ID 1328>. Analysis of this protein sequence reveals the following:

```
Possible site: 22
>>> Seems to have no N-terminal signal sequence
----- Final Results -----
                            bacterial cytoplasm --- Certainty = 0.2735(Affirmative) < succ>
                              bacterial membrane --- Certainty = 0.0000(Not Clear) < succ>
                                bacterial outside --- Certainty = 0.0000(Not Clear) < succ>
```

[2564] An alignment of the GAS and GBS proteins is shown below:

| Identities = 38/55 (69%), Positives = 48/55 (87%) | | | |
|---|---|---|---|
| Query: | 8 | DEFKEAIDKGYISGNTVAIVRKNGKIFDYVLLHEEVREEEVVTVERVLDVLRKLS | 62 |
| | | DEFK+AID GYI+G+TVAIVRK+G+IFDYVL HE+V+ EVVT E+V +VL +LS | |
| Sbjct: | 5 | DEFKQAIDNGYIAGDTVAIVRKDGQIFDYVLPHEKVKNGEVVTKEKVEEVLVELS | 59 |

[2565] Based on this analysis, it was predicted that these proteins and their epitopes could be useful antigens for vaccines or diagnostics.

### EXAMPLE 410

[2566] A DNA sequence (GBSx0445) was identified in S. agalactiae <SEQ ID 1329> which encodes the amino acid sequence <SEQ ID 1330>. Analysis of this protein sequence reveals the following:

```
Possible site: 41
>>> Seems to have no N-terminal signal sequence
----- Final Results -----
                            bacterial cytoplasm --- Certainty = 0.4241(Affirmative) < succ>
                              bacterial membrane --- Certainty = 0.0000(Not Clear) < succ>
                                bacterial outside --- Certainty = 0.0000(Not Clear) < succ>
```

[2567] The protein has no significant homology with any sequences in the GENPEPT database.

[2568] A related DNA sequence was identified in S. pyogenes <SEQ ID 1331> which encodes the amino acid sequence <SEQ ID 1332>. Analysis of this protein sequence reveals the following:

```
Possible site: 41
>>> Seems to have no N-terminal signal sequence
----- Final Results -----
                            bacterial cytoplasm --- Certainty = 0.4551(Affirmative) < succ>
                              bacterial membrane --- Certainty = 0.0000(Not Clear) < succ>
                                bacterial outside --- Certainty = 0.0000(Not Clear) < succ>
```

[2569] An alignment of the GAS and GBS proteins is shown below:

| Identities = 57/66 (86%), Positives = 63/66 (95%) | | | |
|---|---|---|---|
| Query: | 1 | MSQEKLKSKLDQAKGGAKEGFGKITGDKELEAKGFIEKTIAKGKELADDAKDAVEGAVDA | 60 |
| | | MS+EKLKSK++QA GG KEG GK+TGDKELEAKGF+EKTIAKGKELADDAK+AVEGAVDA | |
| Sbjct: | 1 | MSEEKLKSKIEQASGGLKEGAGKLTGDKELEAKGFVEKTIAKGKELADDAKEAVEGAVDA | 60 |
| Query: | 61 | VKEKLK | 66 |
| | | VKEKLK | |
| Sbjct: | 61 | VKEKLK | 66 |

[2570] Based on this analysis, it was predicted that these proteins and their epitopes could be useful antigens for vaccines or diagnostics.

### EXAMPLE 411

[2571] A DNA sequence (GBSx0447) was identified in S. agalactiae <SEQ ID 1333> which encodes the amino acid sequence <SEQ ID 1334>. This protein is predicted to be TnpA (orfB). Analysis of this protein sequence reveals the following:

```
Possible site: 16
>>> Seems to have no N-terminal signal sequence
----- Final Results -----
                            bacterial cytoplasm --- Certainty = 0.3961(Affirmative) < succ>
                              bacterial membrane --- Certainty = 0.0000(Not Clear) < succ>
                                bacterial outside --- Certainty = 0.0000(Not Clear) < succ>
```

[2572] A related GBS nucleic acid sequence <SEQ ID 9667> which encodes amino acid sequence <SEQ ID 9668> was also identified.

[2573] A related DNA sequence was identified in S. pyogenes <SEQ ID 1335> which encodes the amino acid sequence <SEQ ID 1336>. Analysis of this protein sequence reveals the following:

```
Possible site: 55
>>> Seems to have no N-terminal signal sequence
----- Final Results -----
                            bacterial cytoplasm --- Certainty = 0.3365(Affirmative) < succ>
                              bacterial membrane --- Certainty = 0.0000(Not Clear) < succ>
                                bacterial outside --- Certainty = 0.0000(Not Clear) < succ>
```

[2574] An alignment of the GAS and GBS proteins is shown below:

| Identities = 152/160 (95%), Positives = 154/160 (96%) | | | |
|---|---|---|---|
| Query: | 1 | MKNMALPKMATVKTKTALKKTQKTYPQNLLNQKFNPDKPNQVWSTDFTYISIGYKKYVYL | 60 |
| | | MKNMALPKMATVK KTALK+TQKTYPQNLLNQKFNPDKPNQVWSTDFTYISIGYKKYVYL | |
| Sbjct: | 194 | MKNMALPKMATVKPKTALKRTQKTYPQNLLNQKFNPDKPNQVWSTDFTYISIGYKKYVYL | 253 |
| Query: | 61 | CAIIDLYSRKYIAWKLSHRMDAKLACDTLELALNKRKIEGTLLFHSDQGSQFKAREFRKI | 120 |
| | | CAI+DLYSRK IAWKLSHRMDAKLACDTLELALNKRKIEGTLLFHSDQGSQFKARE RKI | |
| Sbjct: | 254 | CAILDLYSRKCIAWKLSHRMDAKLACDTLELALNKRKIEGTLLFHSDQGSQFKARELRKI | 313 |
| Query: | 121 | IDDNNIMHSFSKPRYPYDNAVTEAFFKYLKHRQINQKNYQ | 160 |
| | | IDDN IMHSFSKP YPYDNAVTEAFFKYLKHRQINQK YQ | |
| Sbjct: | 314 | IDDNTIMHSFSKPGYPYDNAVTEAFFKYLKHRQINQKKYQ | 353 |

[2575] Based on this analysis, it was predicted that these proteins and their epitopes could be useful antigens for vaccines or diagnostics.

### EXAMPLE 412

[2576] A DNA sequence (GBSx0448) was identified in S. agalactiae <SEQ ID 1337> which encodes the amino acid sequence <SEQ ID 1338>. Analysis of this protein sequence reveals the following:

```
Possible site: 27
>>> Seems to have no N-terminal signal sequence
----- Final Results -----
                            bacterial cytoplasm --- Certainty = 0.1090(Affirmative) < succ>
                              bacterial membrane --- Certainty = 0.0000(Not Clear) < succ>
                                bacterial outside --- Certainty = 0.0000(Not Clear) < succ>
```

[2577] The protein has no significant homology with any sequences in the GENPEPT database.

[2578] No corresponding DNA sequence was identified in S. pyogenes.

[2579] Based on this analysis, it was predicted that this protein and its epitopes, could be useful antigens for vaccines or diagnostics.

### EXAMPLE 413

[2580] A DNA sequence (GBSx0449) was identified in S. agalactiae <SEQ ID 1339> which encodes the amino acid sequence <SEQ ID 1340>. This protein is predicted to be histidine kinase (resE). Analysis of this protein sequence reveals the following:

| Possible site: 40 | | | | |
|---|---|---|---|---|
| >>> Seems to have an uncleavable N-term signal seq | | | | |
| | INTEGRAL | Likelihood = −11.57 | Transmembrane | 17-33 (6-38) |
| | INTEGRAL | Likelihood = −4.67 | Transmembrane | 147-163 (142-166) |

```
----- Final Results -----
                              bacterial membrane --- Certainty = 0.5628(Affirmative) < succ>
                                bacterial outside --- Certainty = 0.0000(Not Clear) < succ>
                            bacterial cytoplasm --- Certainty = 0.0000(Not Clear) < succ>
```

[2581] The protein has homology with the following sequences in the GENPEPT database:

| >GP: AAD25109 GB: AF140356 VncS [Streptococcus pneumoniae] | | | |
|---|---|---|---|
| Identities = 178/435 (40%), Positives = 281/435 (63%), Gaps = 1/435 (0%) | | | |
| Query: | 1 | MKKLKIFPKMFIQIFSILGILIILVHSLFFFIFPKTYLETRKVKIHIMADEISKNMNGKE | 60 |
| | | MK+ +F K+FI FSI +L+I +H +F+FP TYL R+ I A I++++ GK+ | |
| Sbjct: | 1 | MKRTGLFAKIFIYTFSIFSVLVICLHLAIYFLFPSTYLSHRQETIGQKATAIAQSLEGKD | 60 |
| Query: | 61 | LKYLDQTLELYSKSSDIKVFIKKNNNKNELQINDNINVNVKSDSNSLIIEEREIKLHDGK | 120 |
| | | + ++Q L+LYS++SDIK +K +++L++ D++ ++ + SL IEERE+K DG | |
| Sbjct: | 61 | RQSIEQVLDLYSQTSDIKGTVKGEMTEDKLEVKDSLPLDTDRQTTSLFIEEREVKTQDGG | 120 |
| Query: | 121 | KIHLQFVSTADMQKDAKDLSLKFLPYSLSISFLFSIVISLIYAKSIKNNIQEITMVTDKM | 180 |
| | | + LQF+++ D+QK+A+ +SL+FLPY+L SFL S++++ IYA++I I EI VT +M | |
| Sbjct: | 121 | TMILQFLASMDLQKEAEQISLQFLPYTLLASFLISLLVAYIYARTIVAPILEIKRVTRRM | 180 |
| Query: | 181 | IKLDKETRLKISSNDEIGQLKQQINDLYCALLNTINDLEFKNKEILKLEKLKYDFFKGAS | 240 |
| | | + LD + RL++ S DEIG LK+QIN LY LL I DL KN+ IL+LEK+K +F +GAS | |
| Sbjct: | 181 | MDLDSQVRLRVDSKDEIGNLKEQINSLYQHLLTVIADLHEKNEAILQLEKMKVEFLRGAS | 240 |
| Query: | 241 | HELKTPLSSLKILLENMKYNIGKYKDRDFYISECINIVDNLTKNVSQILSFYSIKDLNND | 300 |
| | | HELKTPL+SLKIL+ENM+ NIG+YKDRD Y+ + IVD L +V QILS S+++L +D | |
| Sbjct: | 241 | HELKTPLASLKILIENMRENIGRYKDRDQYLGVALGIVDELNHHVLQILSLSSVQELRDD | 300 |
| Query: | 301 | EEYLNVGDTLDEVLEKYSILVNQKKININKELLDYNIYIGKTALNIVFSNLISNAVKYTN | 360 |
| | | E +++ +++ Y++L ++++ I+ L Y+ + + ++ SNLISNA+K++ | |
| Sbjct: | 301 | RETIDLLQMTQNLVKDYALLAKERELQIDNSLTHQQAYLNPSVMKLILSNLISNAIKHSV | 360 |
| Query: | 361 | RNGIINIKIANDWLLIENSYDKNKISKINKILDASFDLKLDNSNGLGLNIVKNILNKYNI | 420 |
| | | G++ I L IENS + K+ + + K+ S G+GL +VK++L + | |
| Sbjct: | 361 | PGGLVRIGEREGELFIENSCSSEEQEKLAQSFSDNASRKVKGS-GMGLFVVKSLLEHEKL | 419 |
| Query: | 421 | KYEILHGENYFIFKI | 435 |
| | | Y EN F I | |
| Sbjct: | 420 | AYRFEMEENSLTFFI | 434 |

[2582] A related DNA sequence was identified in S. pyogenes <SEQ ID 1341> which encodes the amino acid sequence <SEQ ID 1342>. Analysis of this protein sequence reveals the following:

| Possible site: 37 | | | | |
|---|---|---|---|---|
| >>> Seems to have an uncleavable N-term signal seq | | | | |
| | INTEGRAL | Likelihood = −11.83 | Transmembrane | 14-30 (6-35) |
| | INTEGRAL | Likelihood = −2.44 | Transmembrane | 157-173 (156-174) |

```
----- Final Results -----
                              bacterial membrane --- Certainty = 0.5734(Affirmative) < succ>
                                bacterial outside --- Certainty = 0.0000(Not Clear) < succ>
                            bacterial cytoplasm --- Certainty = 0.0000(Not Clear) < succ>
```

[2583] The protein has homology with the following sequences in the databases:

| >GP: AAD25109 GB: AF140356 VncS [Streptococcus pneumoniae] | | | |
|---|---|---|---|
| Identities = 123/455 (27%), Positives = 223/455 (48%), Gaps = 23/455 (5%) | | | |
| Query: | 3 | LIKKTFLVINGLIIVVVTSILLVLYFAMPIYYTKVKDKEVKCEFDQTSKQIKGKTVTEIR | 62 |
| | | L K F+ + V+V + L +YF P Y + + + + ++ ++GK I | |
| Sbjct: | 6 | LFAKIFIYTFSIFSVLVICLHLAIYFLFPSTYLSHRQETIGQKATAIAQSLEGKDRQSIE | 65 |
| Query: | 63 | DILTKKINKDNIWYSLVDSDNQLLYPSLQLLDGVSESKDSQNVNIVTTFDNSYSNVKVMS | 122 |
| | | +L +I ++ ++ L++ D + D Q ++ + | |
| Sbjct: | 66 | QVLDLYSQTSDIKGTV---KGEMTEDKLEVKDSLPLDTDRQTTSLF-----------IEE | 111 |
| Query: | 123 | QKVTLRDGKKMTLLGQSSLQPVTDASKVLLDLYPSLLIFSVTVGSIVAYLYSRTSSRRIL | 182 |
| | | ++V +DG M L +S+ +A ++ L P L+ S + +VAY+Y+RT IL | |
| Sbjct: | 112 | REVKTQDGGTMILQFLASMDLQKEAEQISLQFLPYTLLASFLISLLVAYIYARTIVAPIL | 171 |
| Query: | 183 | SMSQTAKKMVNLEPNLTCTIHGKDEIAMLASDINRLYASLSTSIKSLQKEYEKASDSERE | 242 |
| | | + + ++M++L+ + + KDEI L IN LY L T I L ++ E E+ | |
| Sbjct: | 172 | EIKRVTRRMMDLDSQVRLRVDSKDEIGNLKEQINSLYQHLLTVIADLHEKNEAILQLEKM | 231 |
| Query: | 243 | KSEFLRMTSHELKTPITSVIGMIDGMLYNVGDFADRDKYLRKCRDVLEGQAQLVQSILSL | 302 |
| | | K EFLR SHELKTP+ S+ +I+ M N+G + DRD+YL +++ V ILSL | |
| Sbjct: | 232 | KVEFLRGASHELKTPLASLKILIENMRENIGRYKDRDQYLGVALGIVDELNHHVLQILSL | 291 |
| Query: | 303 | SKIETLASQNQELFSLKSSLEEEMEVFLVLSELKHLKVTINLEEQFVKANKVYLLKAIKN | 362 |
| | | S ++ L ++E L + ++ + +L++ + L++ +L Q N + + N | |
| Sbjct: | 292 | SSVQEL-RDDRETIDLLQMTQNLVKDYALLAKERELQIDNSLTHQQAYLNPSVMKLILSN | 350 |
| Query: | 363 | IIDNAFHYTKSGGQVMIQLKDNQLVIKNEAETLLTQQQMKQLFQPFYRPDYSRNRKDGGT | 422 |
| | | +I NA ++ GG V I ++ +L I+N + ++ ++L Q F + +RK G+ | |
| Sbjct: | 351 | LISNAIKHSVPGGLVRIGEREGELFIENSC----SSEEQEKLAQSF---SDNASRKVKGS | 403 |
| Query: | 423 | GLGLFITHQILDQHHLAYRFVVLDQRWMVFTIDFP | 457 |
| | | G+GLF+ +L+ LAYRF +++ + F IDFP | |
| Sbjct: | 404 | GMGLFVVKSLLEHEKLAYRF-EMEENSLTFFIDFP | 437 |

[2584] An alignment of the GAS and GBS proteins is shown below:

| Identities = 108/454 (23%), Positives = 220/454 (47%), Gaps = 22/454 (4%) | | | |
|---|---|---|---|
| Query: | 4 | LKIFPKMFIQIFSILGILIILVHSLFFFIFPKTYLETRKVKIHIMADEISKNMNGKELKY | 63 |
| | | +++ K F+ I ++ +++ + + +F P Y + + ++ D+ SK + GK + | |
| Sbjct: | 1 | VRLIKKTFLVINGLIIVVVTSILLVLYFAMPIYYTKVKDKEVKCEFDQTSKQIKGKTVTE | 60 |
| Query: | 64 | LDQTLELYSKSSDIKVFIKKNNNK------------NELQINDNINVNVKSDSN--SLII | 109 |
| | | + L +I + ++N+ +E + + N+N+ D++ ++ + | |
| Sbjct: | 61 | IRDILTKKINKDNIWYSLVDSDNQLLYPSLQLLDGVSESKDSQNVNIVTTFDNSYSNVKV | 120 |
| Query: | 110 | EEREIKLHDGKKIHLQFVSTADMQKDAKDLSLKFLPYSLSISFLFSIVISLIYAKSIKNN | 169 |
| | | +++ L DGKK+ L S+ DA + L P L S +++ +Y+++ | |
| Sbjct: | 121 | MSQKVTLRDGKKMTLLGQSSLQPVTDASKVLLDLYPSLLIFSVTVGSIVAYLYSRTSSRR | 180 |
| Query: | 170 | IQEITMVTDKMIKLDKETRLKISSNDEIGQLKQQINDLYCALLNTINDLEFKNKEILKLE | 229 |
| | | I ++ KM+ L+ I DEI L IN LY +L +I L+ + ++ E | |
| Sbjct: | 181 | ILSMSQTAKKMVNLEPNLTCTIHGKDEIAMLASDINRLYASLSTSIKSLQKEYEKASDSE | 240 |
| Query: | 230 | KLKYDFFKGASHELKTPLSSLKILLENMKYNIGKYKDRDFYISECINIVDNLTKNVSQIL | 289 |
| | | + K +F + SHELKTP++S+ +++ M YN+G + DRD Y+ +C ++++ + V IL | |
| Sbjct: | 241 | REKSEFLRMTSHELKTPITSVIGMIDGMLYNVGDFADRDKYLRKCRDVLEGQAQLVQSIL | 300 |
| Query: | 290 | SFYSIKDL-NNDEEYLNVGDTLDEVLEKYSILVNQKKININKELLDYNIYIGKTALNIVF | 348 |
| | | S I+ L + ++E ++ +L+E +E + +L K + + L + + K L | |
| Sbjct: | 301 | SLSKIETLASQNQELFSLKSSLEEEMEVFLVLSELKHLKVTINLEEQFVKANKVYLLKAI | 360 |
| Query: | 349 | SNLISNAVKYTNRNGIINIKIANDWLLIENSYDKNKISKINKILDASF------DLKLDN | 402 |
| | | N+I NA YT G + I++ ++ L+I+N + + K L F + D | |
| Sbjct: | 361 | KNIIDNAFHYTKSGGQVMIQLKDNQLVIKNEAETLLTQQQMKQLFQPFYRPDYSRNRKDG | 420 |
| Query: | 403 | SNGLGLNIVKNILNKYNIKYE-ILHGENYFIFKI | 435 |
| | | GLGL I IL+++++ Y ++ + + +F I | |
| Sbjct: | 421 | GTGLGLFITHQILDQHHLAYRFVVLDQRWMVFTI | 454 |

[2585] Based on this analysis, it was predicted that these proteins and their epitopes could be useful antigens for vaccines or diagnostics.

### EXAMPLE 414

[2586] A DNA sequence (GBSx0450) was identified in S. agalactiae <SEQ ID 1343> which encodes the amino acid sequence <SEQ ID 1344>. This protein is predicted to be response regulator (regX3). Analysis of this protein sequence reveals the following:

| Possible site: 34 | | | | |
|---|---|---|---|---|
| >>> Seems to have no N-terminal signal sequence | | | | |
| | INTEGRAL | Likelihood = −0.80 | Transmembrane | 50-66 (50-66) |

```
----- Final Results -----
                              bacterial membrane --- Certainty = 0.1319(Affirmative) < succ>
                                bacterial outside --- Certainty = 0.0000(Not Clear) < succ>
                            bacterial cytoplasm --- Certainty = 0.0000(Not Clear) < succ>
```

[2587] A related GBS nucleic acid sequence <SEQ ID 9665> which encodes amino acid sequence <SEQ ID 9666> was also identified.

[2588] The protein has homology with the following sequences in the GENPEPT database:

| >GP: AAD25108 GB: AF140356 VncR [Streptococcus pneumoniae] | | | |
|---|---|---|---|
| Identities = 131/218 (60%), Positives = 176/218 (80%), Gaps = 1/218 (0%) | | | |
| Query: | 5 | MKILTVEDDKLIREGISEYLSEFGYTVIQAKDGREALSKFNS-DINLVILDIQIPFINGL | 63 |
| | | MKIL VED+++IREG+S+YL++ GY I+A DG+EAL +F+S ++ LV+LDIQ+P +NGL | |
| Sbjct: | 1 | MKILIVEDEEMIREGVSDYLTDCGYETIEAADGQEALEQFSSYEVALVLLDIQMPKLNGL | 60 |
| Query: | 64 | EVLKEIRKKSNLPILILTAFSDEEYKIDAFTNLVDGYVEKPFSLPVLKARIDSLIKKNFG | 123 |
| | | EVL EIRK S +P+L+LTAF DEEYK+ AF +L DGY+EKPFSL +LK R+D++ K+ + | |
| Sbjct: | 61 | EVLAEIRKTSQVPVLMLTAFQDEEYKMSAFASLADGYLEKPFSLSLLKVRVDAIFKRYYD | 120 |
| Query: | 124 | HLEKFEYKNLSVNFNSYTAKINDEKIDVNAKELEILKCLLDNDGQVLTRMQIIDYVWKDS | 183 |
| | | F YK+ V+F SY+A + +++ +NAKELEIL L+ N+G+ LTR QIID VWK + | |
| Sbjct: | 121 | TGRIFSYKDTKVDFESYSASLAGQEVPINAKELEILDYLVKNEGRALTRSQIIDAVWKAT | 180 |
| Query: | 184 | EEIPYDRVVDVYIKELRKKLQLDCITTIRNVGYKLERK | 221 |
| | | +E+P+DRV+DVYIKELRKKL LDCI T+RNVGYKLERK | |
| Sbjct: | 181 | DEVPFDRVIDVYIKELRKKLDLDCILTVRNVGYKLERK | 218 |

[2589] A related DNA sequence was identified in S. pyogenes <SEQ ID 1345> which encodes the amino acid sequence <SEQ ID 1346>. Analysis of this protein sequence reveals the following:

| Possible site: 60 | | | | |
|---|---|---|---|---|
| >>> Seems to have no N-terminal signal sequence | | | | |
| | INTEGRAL | Likelihood = −2.60 | Transmembrane | 48-64 (48-64) |

```
----- Final Results -----
                              bacterial membrane --- Certainty = 0.2041(Affirmative) < succ>
                                bacterial outside --- Certainty = 0.0000(Not Clear) < succ>
                            bacterial cytoplasm --- Certainty = 0.0000(Not Clear) < succ>
```

[2590] The protein has homology with the following sequences in the databases:

| >GP: AAF72358 GB: AF192329 VanRB [Enterococcus faecalis] | | | |
|---|---|---|---|
| Identities = 88/215 (40%), Positives = 128/215 (58%), Gaps = 2/215 (0%) | | | |
| Query: | 3 | KILVVEDDDTISQVICEFLKANNYDPDCVFDGQAALDKWQTTSYDLIILDIMLPSLSGLE | 62 |
| | | +IL+VEDDD I + FL Y D DG A K+ +Y L+ILDIMLP ++G E | |
| Sbjct: | 4 | RILLVEDDDHICNTVRGFLAEAGYQVDACTDGNEAYTKFYENTYQLVILDIMLPGMNGHE | 63 |
| Query: | 63 | VLKTIRKTSDVPIIMLTALDDEYTQLVSFNHLISDYVTKPFSPLILIKRIENVLRVSTPD | 122 |
| | | +L+ R +D PI+M+TAL D+ Q+ +F+ DYVTKPF IL+KR+E +LR S | |
| Sbjct: | 64 | LLREFRAKNDTPILMMTALSDDENQIRAFDAEADDYVTKPFKMQILLKRVEALLRRSGAL | 123 |
| Query: | 123 | EKR-QIGDLLVDETEHSVYWQGTLVKLTKKEYDIIDYLAKRHQKIVTRDQLMDDIWGYS- | 180 |
| | | K ++G L + + +V GT + LT+KE++I+ L + + +T + ++ IWGY | |
| Sbjct: | 124 | AKEIRVGRLTLLPEDFTVLCDGTELPLTRKEFEILLLLVQNKGRTLTHEIILSRIWGYDF | 183 |
| Query: | 181 | ELDTRVLDNHIKNLRKKMTGIPLKTITGMGYLLGE | 215 |
| | | E D + HIKNLR K+ +KTI G+GY L E | |
| Sbjct: | 184 | EGDGSTVHTHIKNLRAKLPENIIKTIRGVGYRLEE | 218 |

[2591] An alignment of the GAS and GBS proteins is shown below:

| Identities = 80/214 (37%), Positives = 126/214 (58%), Gaps = 4/214 (1%) | | | |
|---|---|---|---|
| Query: | 6 | KILTVEDDKLIREGISEYLSEFGYTVIQAKDGREALSKFNS-DINLVILDIQIPFINGLE | 64 |
| | | KIL VEDD I + I E+L Y DG+ AL K+ + +L+ILDI +P ++GLE | |
| Sbjct: | 3 | KILVVEDDDTISQVICEFLKANNYDPDCVFDGQAALDKWQTTSYDLIILDIMLPSLSGLE | 62 |
| Query: | 65 | VLKEIRKKSNLPILILTAFSDEEYKIDAFTNLVDGYVEKPFSLPVLKARIDSLIKKNFGH | 124 |
| | | VLK IRK S++PI++LTA DE ++ +F +L+ YV KPFS +L RI+++++ + | |
| Sbjct: | 63 | VLKTIRKTSDVPIIMLTALDDEYTQLVSFNHLISDYVTKPFSPLILIKRIENVLRVSTPD | 122 |
| Query: | 125 | LEKFEYKNLSVNFNSYTAKINDEKIDVNAKELEILKCLLDNDGQVLTRMQIIDYVWKDSE | 184 |
| | | EK + +L V+ ++ + + KE +I+ L +++TR Q++D +W SE | |
| Sbjct: | 123 | -EKRQIGDLLVDETEHSVYWQGTLVKLTKKEYDIIDYLAKRHQKIVTRDQLMDDIWGYSE | 181 |
| Query: | 185 | EIPYDRVVDVYIKELRKKLQLDCITTIRNVGYKL | 218 |
| | | RV+D +IK LRKK+ + TI +GY L | |
| Sbjct: | 182 | --LDTRVLDNHIKNLRKKMTGIPLKTITGMGYLL | 213 |

[2592] Based on this analysis, it was predicted that these proteins and their epitopes could be useful antigens for vaccines or diagnostics.

### EXAMPLE 415

[2593] A DNA sequence (GBSx0451) was identified in S. agalactiae <SEQ ID 1347> which encodes the amino acid sequence <SEQ ID 1348>. This protein is predicted to be Vexp3. Analysis of this protein sequence reveals the following:

| Possible site: 49 | | | | |
|---|---|---|---|---|
| >>> Seems to have an uncleavable N-term signal seq | | | | |
| | INTEGRAL | Likelihood = −12.68 | Transmembrane | 423-439 (413-447) |
| | INTEGRAL | Likelihood = −10.67 | Transmembrane | 16-32 (12-37) |
| | INTEGRAL | Likelihood = −9.77 | Transmembrane | 303-319 (301-326) |
| | INTEGRAL | Likelihood = −3.13 | Transmembrane | 343-359 (343-367) |

```
----- Final Results -----
                              bacterial membrane --- Certainty = 0.6074(Affirmative) < succ>
                                bacterial outside --- Certainty = 0.0000(Not Clear) < succ>
                            bacterial cytoplasm --- Certainty = 0.0000(Not Clear) < succ>
```

[2594] The protein has homology with the following sequences in the GENPEPT database:

| >GP: AAD47594 GB: AF140784 Vexp3 [Streptococcus pneumoniae] | | | |
|---|---|---|---|
| Identities = 280/458 (61%), Positives = 363/458 (79%), Gaps = 3/458 (0%) | | | |
| Query: | 1 | MIKNAFAYVTRKSLKSLIIILVILSMATLSIISLSIKDATDRASKETFANITNSFSMEIN | 60 |
| | | M+ NAFAYVTRK KS++I L+IL MA+LS++ LSIK AT +AS+ETF NITNSFSM+IN | |
| Sbjct: | 1 | MLHNAFAYVTRKFFKSIVIFLIILLMASLSLVGLSIKGATAKASQETFKNITNSFSMQIN | 60 |
| Query: | 61 | RQVNPGTPRGGGNVKGEDIKKISQTNSIDSYVKRINSVADLVDHDIIETQDTLANQSPER | 120 |
| | | R+VN GTPRG GN+KGEDIKKI++ +I+SYVKRIN++ DL +D+IET +T N + +R | |
| Sbjct: | 61 | RRVNQGTPRGAGNIKGEDIKKITENKAIESYVKRINAIGDLTGYDLIETPETKKNLTADR | 120 |
| Query: | 121 | AKNFKRTVMLTGVNDSAKETKFVSEAYKLVEGKHLENKDKNKILMHKDLAKKNNLKVGDK | 180 |
| | | AK F ++M+TGVNDS+KE KFVS +YKLVEG+HL N DK+KIL+HKDLA K+ KVGDK | |
| Sbjct: | 121 | AKRFGSSLMITGVNDSSKEDKFVSGSYKLVEGEHLTNDDKDKILLHKDLAAKHGWKVGDK | 180 |
| Query: | 181 | IKIKSNLFDADNEKVANETVEVEIKGLFDGHNSGGVSAAQELYENTLITDVHSAAKVYGN | 240 |
| | | +K+ SN++DADNEK A ETVEV IKGLFDGHN V+ +QELYENT ITD+H+AAK+YG | |
| Sbjct: | 181 | VKLDSNIYDADNEKGAKETVEVTIKGLFDGHNKSAVTYSQELYENTAITDIHTAAKLYGY | 240 |
| Query: | 241 | TEDTAVYQDATFFVKGDKNLDSVIKDL-GKLDINWREYNLIKSSSNYPALQQSISGIYSI | 299 |
| | | TEDTA+Y DATFFV DKNLD V+K+L G INW+ Y L+KSSSNYPAL+QSISG+Y + | |
| Sbjct: | 241 | TEDTAIYGDATFFVTADKNLDDVMKELNGISGINWKSYTLVKSSSNYPALEQSISGMYKM | 300 |
| Query: | 300 | SNKLFVGSLIFAGVVVSLLLFLWMNARKKEIAVLLSLGISKLEIFGQFIIEMVFISIPAL | 359 |
| | | +N LF GSL F+ ++++LLL LW+NAR+KE+ +LLS+G+ + I GQFI E + I+IPAL | |
| Sbjct: | 301 | ANLLFWGSLSFSVLLLALLLSLWINARRKEVGILLSIGLKQASILGQFITESILIAIPAL | 360 |
| Query: | 360 | LGSYFLAQYTADKLGNNILNKVTGDIAKQIARQSASSQLGGGAEAEGFNKTLSGLDINV- | 418 |
| | | + +YFLA YTA +GN +L VT +AKQ ++ + +S LGGGAE +GF+KTLS LDI++ | |
| Sbjct: | 361 | VSAYFLANYTARAIGNTVLANVTSGVAKQASKAAQASNLGGGAEVDGFSKTLSSLDISIQ | 420 |
| Query: | 419 | LPKFIIYVVIFMSFVLLVSLILSSIYTLRKNPKELLID | 456 |
| | | FII V+ + V+LV + L+S LRK PKELL+D | |
| Sbjct: | 421 | TSDFIIIFVLALVLVVLV-MALASSNLLRKQPKELLLD | 457 |

[2595] A related DNA sequence was identified in S. pyogenes <SEQ ID 1349> which encodes the amino acid sequence <SEQ ID 1350>. Analysis of this protein sequence reveals the following:

| Possible site: 31 | | | | |
|---|---|---|---|---|
| >>> Seems to have no N-terminal signal sequence | | | | |
| | INTEGRAL | Likelihood = −12.90 | Transmembrane | 19-35 (16-43) |
| | INTEGRAL | Likelihood = −7.27 | Transmembrane | 371-387 (359-392) |
| | INTEGRAL | Likelihood = −7.01 | Transmembrane | 335-351 (326-357) |
| | INTEGRAL | Likelihood = −6.21 | Transmembrane | 282-298 (276-308) |

```
----- Final Results -----
                              bacterial membrane --- Certainty = 0.6158(Affirmative) < succ>
                                bacterial outside --- Certainty = 0.0000(Not Clear) < succ>
                            bacterial cytoplasm --- Certainty = 0.0000(Not Clear) < succ>
```

[2596] The protein has homology with the following sequences in the databases:

| >GP: AAC24912 GB: AF012285 YknZ [Bacillus subtilis] | | | |
|---|---|---|---|
| Identities = 176/408 (43%), Positives = 250/408 (61%), | | | |
| Gaps = 16/408 (3%) | | | |
| Query: | 1 | MENWKFALSSIWGHKMRSILTMLGIIIGVAAVVIIMGLGNAMKNSVTSTFSSKQKDIQLY | 60 |
| | | +EN + ALSS+ HKMRSILTMLGIIIGV +V++++ +G + + + S ++LY | |
| Sbjct: | 4 | LENIRMALSSVLAHKMRSILTMLGIIIGVGSVIVVVAVGQGGEQMLKQSISGPGNTVELY | 63 |
| Query: | 61 | FQEKGEE--EDLYAGLHTHENNHEVKPEWLEQIVKDIDGIDSYYFTNSATSTISYEKKKV | 118 |
| | | + EE + A + +++K +K I+GI + S + Y +++ | |
| Sbjct: | 64 | YMPSDEELASNPNAAAESTFTENDIKG------LKGIEGIKQVVASTSESMKARYHEEET | 117 |
| Query: | 119 | DNASIIGVSKDYFNIKNYDIVAGRTLTDNDYSNFSRIILLDTVLADDLFGKGNYKSALNK | 178 |
| | | D A++ G++ Y N+ + I +GRT TDND+ +R+ ++ +A +LF K S L + | |
| Sbjct: | 118 | D-ATVNGINDGYMNVNSLKIESGRTFTDNDFLAGNRVGIISQKMAKELFDK---TSPLGE | 173 |
| Query: | 179 | VVSLSDKDYLVIGVYKTDQTPVSFDGLSGGAVMANTQVASEFGTKEIGSIYIHVNDIQNS | 238 |
| | | VV ++ + +IGV K +SFD LS V N + S FGT + ++ + V + | |
| Sbjct: | 174 | VVWINGQPVEIIGVLKKVTGLLSFD-LSEMYVPFN-MMKSSFGTSDFSNVSLQVESADDI | 231 |
| Query: | 239 | MNLGNQAADMLTNISHIKDGQYAVPDNSKIVEEINSQFSIMTTVIGSIAAISLLVGGIGV | 298 |
| | | + G +AA L N +H + Y V + +I I +IMTT+IGSIA ISLLVGGIGV | |
| Sbjct: | 232 | KSAGKEAAQ-LVNDNHGTEDSYQVMNMEEIAAGIGKVTAIMTTIIGSIAGISLLVGGIGV | 290 |
| Query: | 299 | MNIMLVSVTERTREIGLRKALGATRLKILSQFLIESVVLTVLGGLIGLLLAQLSVGALGN | 358 |
| | | MNIMLVSVTERTREIG+RK+LGATR +IL+QFLIESVVLT++GGL+G+ + AL + | |
| Sbjct: | 291 | MNIMLVSVTERTREIGIRKSLGATRGQILTQFLIESVVLTLIGGLVGIGIG-YGGAALVS | 349 |
| Query: | 359 | AMTLKGACISLDVALIAVLFSASIGVFFGMLPANKASKLDPIEALRYE | 406 |
| | | A+ + IS V VLFS IGV FGMLPANKA+KLDPIEALRYE | |
| Sbjct: | 350 | AIAGWPSLISWQVVCGGVLFSMLIGVIFGMLPANKAAKLDPIEALRYE | 397 |

[2597] An alignment of the GAS and GBS proteins is shown below:

| Identities = 56/247 (22%), Positives = 101/247 (40%), | | | |
|---|---|---|---|
| Gaps = 42/247 (17%) | | | |
| Query: | 147 | YKLVEGKHLENKDKNKI--------LMHKDLAKKNNLK--------VGDKIKIKSNLFDA | 190 |
| | | Y +V G+ L + D + ++ DL K N K + DK + ++ | |
| Sbjct: | 136 | YDIVAGRTLTDNDYSNFSRIILLDTVLADDLFGKGNYKSALNKVVSLSDKDYLVIGVYKT | 195 |
| Query: | 191 | DNEKVANETVEVEIKGLFDGHNSGGVSAAQELYENTLITDVHSAAKVYGNTEDTAVYQDA | 250 |
| | | D V+ FDG + G V A NT + A +G E ++Y | |
| Sbjct: | 196 | DQTPVS-----------FDGLSGGAVMA------NTQV------ASEFGTKEIGSIYIHV | 232 |
| Query: | 251 | TFFVKGDKNLDSVIKDL--GKLDINWREYNLIKSSSNYPALQQSISGIYSISNKLFVGSL | 308 |
| | | ++ NL + D+ I +Y + +S + S + ++ + SL | |
| Sbjct: | 233 | ND-IQNSMNLGNQAADMLTNISHIKDGQYAVPDNSKIVEEINSQFSIMTTVIGSIAAISL | 291 |
| Query: | 309 | IFAGVVVSLLLFLWMNARKKEIAVLLSLGISKLEIFGQFIIEMVFISIPALLGSYFLAQY | 368 |
| | | + G+ V ++ + + R +EI + +LG ++L+I QF+IE V +++ L LAQ | |
| Sbjct: | 292 | LVGGIGVMNIMLVSVTERTREIGLRKALGATRLKILSQFLIESVVLTVLGGLIGLLLAQL | 351 |
| Query: | 369 | TADKLGN | 375 |
| | | + LGN | |
| Sbjct: | 352 | SVGALGN | 358 |

[2598] Based on this analysis, it was predicted that these proteins and their epitopes could be useful antigens for vaccines or diagnostics.

### EXAMPLE 416

[2599] A DNA sequence (GBSx0452) was identified in S. agalactiae <SEQ ID 1351> which encodes the amino acid sequence <SEQ ID 1352>. This protein is predicted to be Vexp2 (b0879). Analysis of this protein sequence reveals the following:

```
Possible site: 16
>>> Seems to have no N-terminal signal sequence
----- Final Results -----
                            bacterial cytoplasm --- Certainty = 0.3194(Affirmative) < succ>
                              bacterial membrane --- Certainty = 0.0000(Not Clear) < succ>
                                bacterial outside --- Certainty = 0.0000(Not Clear) < succ>
```

[2600] The protein has homology with the following sequences in the GENPEPT database:

| >GP: AAD47593 GB: AF140784 Vexp2 [Streptococcus pneumoniae] | | | |
|---|---|---|---|
| Identities 142/207 (68%), Positives = 169/207 (81%) | | | |
| Query: | 1 | MDILEIKNVNYSYANSKEKVLSGVNQKFELGKFYAIVGKSGTGKSTLLSLLAGLDKVQTG | 60 |
| | | M +L++++V Y Y N+ E VL +N FE GKFY+I+G+SG GKSTLLSLLAGLD G | |
| Sbjct: | 1 | MTLLQLQDVTYRYKNTAEAVLYQINYNFEPGKFYSIIGESGAGKSTLLSLLAGLDSPVEG | 60 |
| Query: | 61 | KILFKNEDIEKKGYSNHRKNNISLVFQNYNLIDYLSPIENIRLVNKSVDESILFELGLDK | 120 |
| | | ILF+ EDI KKGYS HR ++ISLVFQNYNLIDYLSP+ENIRLVNK ++ L ELGLD+ | |
| Sbjct: | 61 | SILFQGEDIRKKGYSYHRMHHISLVFQNYNLIDYLSPLENIRLVNKKASKNTLLELGLDE | 120 |
| Query: | 121 | KQIKRNVMKLSGGQQQRVAIARALVSDAPIILADEPTGNLDSVTAGEIINILKELAQDRN | 180 |
| | | QIKRNV++LSGGQQQRVAIAR+LVS+AP+ILADEPTGNLD TAG+I+ +LK LAQ | |
| Sbjct: | 121 | SQIKRNVLQLSGGQQQRVAIARSLVSEAPVILADEPTGNLDPKTAGDIVELLKSLAQKTG | 180 |
| Query: | 181 | KCVIVVTHSKEVADSADIILELSGKKL | 207 |
| | | KCVIVVTHSKEVA ++DI LEL KKL | |
| Sbjct: | 181 | KCVIVVTHSKEVAQASDITLELKDKKL | 207 |

[2601] A related DNA sequence was identified in S. pyogenes <SEQ ID 1353> which encodes the amino acid sequence <SEQ ID 1354>. Analysis of this protein sequence reveals the following:

```
Possible site: 47
>>> Seems to have no N-terminal signal sequence
----- Final Results -----
                            bacterial cytoplasm --- Certainty = 0.2717(Affirmative) < succ>
                              bacterial membrane --- Certainty = 0.0000(Not Clear) < succ>
                                bacterial outside --- Certainty = 0.0000(Not Clear) < succ>
```

[2602] An alignment of the GAS and GBS proteins is shown below:

| Identities = 83/230 (36%), Positives = 135/230 (58%), Gaps = 13/230 (5%) | | | |
|---|---|---|---|
| Query: | 1 | MDILEIKNVNYSYANSKEKVLSGVNQKFEL--GKFYAIVGKSGTGKSTLLSLLAGLDKVQ | 58 |
| | | M +E+K V+ SY + V + FE+ G+ I+G SG GKST+L++L G+D V | |
| Sbjct: | 5 | MAFIELKQVSKSYQIGETTVFANHEVSFEINKGELVVILGASGAGKSTVLNILGGMDTVD | 64 |
| Query: | 59 | TGKILFKNEDIE---KKGYSNHRKNNISLVFQNYNLIDYLSPIENIRLVNKSVDES---- | 111 |
| | | G+++ +DI K + +R+N I VFQ YNL+ L+ EN+ L + V ++ | |
| Sbjct: | 65 | AGQVIIDGKDIAHYTSKALTQYRRNAIGFVFQFYNLVPNLTAKENVELAVEIVADALDPV | 124 |
| Query: | 112 | -ILFELGLDKKQIKRNVMKLSGGQQQRVAIARALVSDAPIILADEPTGNLDSVTAGEIIN | 170 |
| | | IL E+GL + + +LSGG+QQRV+IARAL + ++L DEPTG LD T +I+ | |
| Sbjct: | 125 | TILKEVGLSHR-LDHFPAQLSGGEQQRVSIARALAKNPKLLLCDEPTGALDYQTGKQILT | 183 |
| Query: | 171 | ILKELAQDRNKCVIVVTHSKEVADSADIILELSGKKLKK--VNKMNLEVE | 218 |
| | | +L+++AQ + V++VTH+ +A AD ++ + ++ K +NK +E | |
| Sbjct: | 184 | LLQDMAQTKGTTVVIVTHNAAIAPIADRVIFMHDAQVTKTVINKEPASIE | 233 |

[2603] Based on this analysis, it was predicted that these proteins and their epitopes could be useful antigens for vaccines or diagnostics.

### EXAMPLE 417

[2604] A DNA sequence (GBSx0453) was identified in S. agalactiae <SEQ ID 1355> which encodes the amino acid sequence <SEQ ID 1356>. Analysis of this protein sequence reveals the following:

| Possible site: 25 | | | | |
|---|---|---|---|---|
| >>> Seems to have an uncleavable N-term signal seq | | | | |
| | INTEGRAL | Likelihood = −3.35 | Transmembrane | 17-33 (17-34) |

```
----- Final Results -----
                              bacterial membrane --- Certainty = 0.2338(Affirmative) < succ>
                                bacterial outside --- Certainty = 0.0000(Not Clear) < succ>
                            bacterial cytoplasm --- Certainty = 0.0000(Not Clear) < succ>
```

[2605] The protein has no significant homology with any sequences in the GENPEPT database.

[2606] No corresponding DNA sequence was identified in S. pyogenes.

[2607] Based on this analysis, it was predicted that this protein and its epitopes, could be useful antigens for vaccines or diagnostics.

### EXAMPLE 418

[2608] A DNA sequence (GBSx0454) was identified in S. agalactiae <SEQ ID 1357> which encodes the amino acid sequence <SEQ ID 1358>. This protein is predicted to be Vexp1. Analysis of this protein sequence reveals the following:

| Possible site: 56 | | | | |
|---|---|---|---|---|
| >>> Seems to have an uncleavable N-term signal seq | | | | |
| | INTEGRAL | Likelihood = −11.52 | Transmembrane | 294-310 (285-312) |
| | INTEGRAL | Likelihood = −10.67 | Transmembrane | 396-412 (385-417) |
| | INTEGRAL | Likelihood = −8.76 | Transmembrane | 17-33 (14-38) |
| | INTEGRAL | Likelihood = −4.14 | Transmembrane | 335-351 (333-357) |

```
----- Final Results -----
                              bacterial membrane --- Certainty = 0.5607(Affirmative) < succ>
                                bacterial outside --- Certainty = 0.0000(Not Clear) < succ>
                            bacterial cytoplasm --- Certainty = 0.0000(Not Clear) < succ>
```

[2609] The protein has homology with the following sequences in the GENPEPT database:

| >GP: AAD47592 GB: AF140784 Vexpl [Streptococcus pneumoniae] | | | |
|---|---|---|---|
| Identities = 165/425 (38%), Positives = 271/425 (62%), Gaps = 4/425 (0%) | | | |
| Query: | 2 | IKNAIAYITRKKNRTLIIFAILTIVLSCLYSCLTIMKSSNEIEKALYESSNSSISITK-K | 60 |
| | | I+ + AY++RK+ R+ I+F IL ++L+ + +CLT+MKS+ +E LY+S N+S SI K + | |
| Sbjct: | 4 | IQRSWAYVSRKRLRSFILFLILLVLLAGISACLTLMKSNKTVESNLYKSLNTSFSIKKIE | 63 |
| Query: | 61 | DGKYFNINQFKNIEKIKEVEEKIFQYDGLAKLKDLKVVSGEQSINREDLSDEFKNVVSLE | 120 |
| | | +G+ F ++ ++ KIK +E + + +AKLKD + V+GEQS+ R+DLS N+VSL | |
| Sbjct: | 64 | NGQTFKLSDLASVSKIKGLENVSPELETVAKLKDKEAVTGEQSVERDDLSAADNNLVSLT | 123 |
| Query: | 121 | ATSNTKRNLLFSSGVFSFKEGKNIEENDKNSILVHEEFAKQNKLKLGDEIDLELLDTEKS | 180 |
| | | A ++ +++ F+S F+ KEG+++++ D IL+HEE AK+N L L D+I L+ +E S | |
| Sbjct: | 124 | ALEDSSKDVTFTSSAFNLKEGRHLQKGDSKKILIHEELAKKNGLSLHDKIGLDAGQSE-S | 182 |
| Query: | 181 | GKIKSHKFKIIGIFSGKKQETYTGLSSDFSENMVFVDYSTSQEILNKSENNRIANKILMY | 240 |
| | | GK ++ +F+IIGIFSGKKQE +TGLSSDFSEN VF DY +SQ +L SE A + Y | |
| Sbjct: | 183 | GKGQTVEFEIIGIFSGKKQEKFTGLSSDFSENQVFTDYESSQTLLGNSEAQVSAARF--Y | 240 |
| Query: | 241 | SGSLESTELALNKLKDFKIDKSKYSIKKDNKAFEESLESVSGIKHIIKIMTYSIMLGGIV | 300 |
| | | + + + + ++++ ++ Y ++K+NKAFE+ +SV+ + + I Y +++ G | |
| Sbjct: | 241 | VENPKEMDGLMKQVENLALENQGYQVEKENKAFEQIKDSVATFQTFLTIFLYGMLIAGAG | 300 |
| Query: | 301 | VLSLILILWLRERIYEIGIFLSIGTTKIQIIRQFIFELIFISIPSIISSLFLGNLLLKVI | 360 |
| | | L L+L LWLRER+YE+GI L++G K I QF E++ +S+ +++ + GN + + | |
| Sbjct: | 301 | ALILVLSLWLRERVYEVGILLALGKGKSSIFLQFCLEVVLVSLGALLPAFVAGNAITTYL | 360 |
| Query: | 361 | VEGFINSENSMIFGGSLINKSSFMLNITTLAESYLILISIIVLSVVMASSLILFKKPKEI | 420 |
| | | ++ + S + +L SS +I + AESY+ L+ + LSV + + K PKEI | |
| Sbjct: | 361 | LQTLLASGDQASLQDTLAKASSLSTSILSFAESYVFLVLLSCLSVALCFLFLFRKSPKEI | 420 |
| Query: | 421 | LSKIS | 425 |
| | | LS IS | |
| Sbjct: | 421 | LSSIS | 425 |

[2610] A related DNA sequence was identified in S. pyogenes <SEQ ID 1359> which encodes the amino acid sequence <SEQ ID 1360>. Analysis of this protein sequence reveals the following:

| Possible site: 15 | | | | |
|---|---|---|---|---|
| >>> Seems to have an uncleavable N-term signal seq | | | | |
| | INTEGRAL | Likelihood = −11.57 | Transmembrane | 23-39 (16-43) |
| | INTEGRAL | Likelihood = −11.36 | Transmembrane | 371-387 (362-396) |
| | INTEGRAL | Likelihood = −8.12 | Transmembrane | 331-347 (324-360) |
| | INTEGRAL | Likelihood = −7.70 | Transmembrane | 280-296 (277-308) |

```
----- Final Results -----
                              bacterial membrane --- Certainty = 0.5628(Affirmative) < succ>
                                bacterial outside --- Certainty = 0.0000(Not Clear) < succ>
                            bacterial cytoplasm --- Certainty = 0.0000(Not Clear) < succ>
```

[2611] The protein has homology with the following sequences in the databases:

| >GP: AAB97962 GB: U96166 ATP-binding cassette transporter-like protein | | | |
|---|---|---|---|
| [Streptococcus cristatus] | | | |
| Identities = 222/311 (71%), Positives = 278/311 (89%) | | | |
| Query: | 16 | MRSILTMLGIIIGIGAIIAIFSIIEGNTENTKRQLIGGSNNTINIVFNKKSSIDPKFPDK | 75 |
| | | MRS+LTMLGIIIGIGAIIAIFSIIEGNTENTKRQLIGGSNNTI +V++KKS+IDP P+K | |
| Sbjct: | 1 | MRSMLTMLGIIIGIGAIIAIFSIIEGNTENTKRQLIGGSNNTIKVVYDKKSAIDPSIPEK | 60 |
| Query: | 76 | SNAKKPDYLPFMAEEELSKIQQVKGVKNALISYGIDDKVYHLGQKSSAKISAITKNVAEV | 135 |
| | | S A+KP Y+PFM E+ LSKI+++ GVKNAL++YG D+K+Y+L QKSS+K+ A++++VA++ | |
| Sbjct: | 61 | SQAQKPSYIPFMGEDVLSKIKEIPGVKNALMTYGADEKIYYLSQKSSSKVQAVSQSVADI | 120 |
| Query: | 136 | RRMTFIKGSDFSDKDFIDQKQVIYLEKSLYESLFPKDDGLGKFVEVMGNPFRVIGVFESK | 195 |
| | | ++ ++G F + F +Q+QV YLEKSLY++LFPK DG+GK+VEV GNPF+VIGVFES | |
| Sbjct: | 121 | KQQRLLEGEGFDSEAFKNQEQVAYLEKSLYDTLFPKGDGIGKYVEVKGNPFKVIGVFEST | 180 |
| Query: | 196 | EQSGLTSGTEKIAYIPLHQWYNINGVVDATPEITIQTYRADDLKPVAKRVSDMLNQTIPK | 255 |
| | | EQSGLTSG+EK+AYIPL QW+ I ++ +PE+T+QT++ADDLK VAK+VSD LNQ +P+ | |
| Sbjct: | 181 | EQSGLTSGSEKVAYIPLQQWHRIFDTINVSPEVTVQTHKADDLKKVAKKVSDYLNQQMPQ | 240 |
| Query: | 256 | SDYMFGVMNLKEFERQLDNLNKSNFVLLAGIASISLIVGGIGVMNIMLVSVTERTREIGI | 315 |
| | | SDYMFGV+NL+EFERQLDNLN+SNFVLLAGIASISL+VGGIGVMNIMLVSVTERTREIGI | |
| Sbjct: | 241 | SDYMFGVLNLQEFERQLDNLNQSNFVLLAGIASISLLVGGIGVMNIMLVSVTERTREIGI | 300 |
| Query: | 316 | KKALGARRKLI | 326 |
| | | KKALGARRK++ | |
| Sbjct: | 301 | KKALGARRKIL | 311 |

[2612] An alignment of the GAS and GBS proteins is shown below:

| Identities = 79/386 (20%), Positives = 170/386 (43%), Gaps = 38/386 (9%) | | | |
|---|---|---|---|
| Query: | 5 | AIAYITRKKNRTLIIFAILTIVLSCLYSCLTIMKSSNE-IEKALYESSNSSISITKKDGK | 63 |
| | | A++ I K R+++ + I + + + +I++ + E ++ L SN++I+I | |
| Sbjct: | 7 | ALSSILSHKMRSILTMLGIIIGIGAIIAIFSIIEGNTENTKRQLIGGSNNTINIV----- | 61 |
| Query: | 64 | YFNINQFKNIEKIKEVEEKIFQYDGLAKLKDLKVVSGEQSINREDLSDEFKNVVSLEATS | 123 |
| | | FN K ++ K F AK D E+ +++ KN + | |
| Sbjct: | 62 | -FN--------KKSSIDPK-FPDKSNAKKPDYLPFMAEEELSKIQQVKGVKNALISYGID | 111 |
| Query: | 124 | NTKRNLLFSSGVFSFKEGKNIEENDKNSILVHEEFAKQNKLKLGDEIDLELLDTE----- | 178 |
| | | + +L S KN+ E + + + +F+ ++ + I LE E | |
| Sbjct: | 112 | DKVYHLGQKSSAKISAITKNVAEVRRMTFIKGSDFSDKDFIDQKQVIYLEKSLYESLFPK | 171 |
| Query: | 179 | -----KSGKIKSHKFKIIGIFSGKKQETYTGLSSDFSENMVFVDYSTSQEILNKSENNRI | 233 |
| | | K ++ + F++IG+F K+Q +GL+S +E + ++ I + | |
| Sbjct: | 172 | DDGLGKFVEVMGNPFRVIGVFESKEQ---SGLTSG-TEKIAYIPLHQWYNINGVVDATPE | 227 |
| Query: | 234 | ANKILMYSGSLESTELALNKLKDFKIDKSKYSIKKDN-KAFEESLESVSGIKHIIK--IM | 290 |
| | | + L+ ++ + + I KS Y N K FE L++++ ++ I | |
| Sbjct: | 228 | ITIQTYRADDLKPVAKRVSDMLNQTIPKSDYMFGVMNLKEFERQLDNLNKSNFVLLAGIA | 287 |
| Query: | 291 | TYSIMLGGIVVLSLILILWLRERIYEIGIFLSIGTTKIQIIRQFIFELIFIS----IPSI | 346 |
| | | + S+++GGI V++++L+ + ER EIGI ++G + I++QF+ E + ++ + + | |
| Sbjct: | 288 | SISLIVGGIGVMNIMLVS-VTERTREIGIKKALGARRKLILKQFLIEAVILTLLGGVIGV | 346 |
| Query: | 347 | ISSLFLGNLLLKVIVEGFINSENSMI | 372 |
| | | IS + G ++ + + +I S S++ | |
| Sbjct: | 347 | ISGMVSGLIITRSLEYPYILSLFSVV | 372 |

[2613] A related GBS gene <SEQ ID 8571> and protein <SEQ ID 8572> were also identified. Analysis of this protein sequence reveals the following:

| Lipop Possible site: −1 Crend: 10 | | | | |
|---|---|---|---|---|
| McG: Discrim Score: 5.59 | | | | |
| GvH: Signal Score (−7.5): −5.97 | | | | |
| Possible site: 56 | | | | |
| >>> Seems to have an uncleavable N-term signal seq | | | | |
| ALOM program count: 4 value: −11.52 threshold: 0.0 | | | | |
| | INTEGRAL | Likelihood = −11.52 | Transmembrane | 294-310 (285-312) |
| | INTEGRAL | Likelihood = −10.67 | Transmembrane | 396-412 (385-417) |
| | INTEGRAL | Likelihood = −8.76 | Transmembrane | 17-33 (14-38) |
| | INTEGRAL | Likelihood = −4.14 | Transmembrane | 335-351 (333-357) |
| | PERIPHERAL | Likelihood = −4.51 | 315 | |

```
modified ALOM score: 2.80
*** Reasoning Step: 3
----- Final Results -----
                              bacterial membrane --- Certainty = 0.5607(Affirmative) < succ>
                                bacterial outside --- Certainty = 0.0000(Not Clear) < succ>
                            bacterial cytoplasm --- Certainty = 0.0000(Not Clear) < succ>
```

[2614] The protein has homology with the following sequences in the databases:

[chemical structure]

[2615] Based on this analysis, it was predicted that these proteins and their epitopes could be useful antigens for vaccines or diagnostics.

### EXAMPLE 419

[2616] A DNA sequence (GBSx0455) was identified in S. agalactiae <SEQ ID 1361> which encodes the amino acid sequence <SEQ ID 1362>. Analysis of this protein sequence reveals the following:

| Possible site: 42 | | | | |
|---|---|---|---|---|
| >>> Seems to have an uncleavable N-term signal seq | | | | |
| | INTEGRAL | Likelihood = −5.04 | Transmembrane | 19-35 (14-42) |

```
----- Final Results -----
                              bacterial membrane --- Certainty = 0.3011(Affirmative) < succ>
                                bacterial outside --- Certainty = 0.0000(Not Clear) < succ>
                            bacterial cytoplasm --- Certainty = 0.0000(Not Clear) < succ>
```

[2617] The protein has no significant homology with any sequences in the GENPEPT database.

[2618] No corresponding DNA sequence was identified in S. pyogenes.

[2619] Based on this analysis, it was predicted that this protein and its epitopes, could be useful antigens for vaccines or diagnostics.

### EXAMPLE 420

[2620] A DNA sequence (GBSx0456) was identified in S. agalactiae <SEQ ID 1363> which encodes the amino acid sequence <SEQ ID 1364>. Analysis of this protein sequence reveals the following:

```
Possible site: 26
>>> Seems to have an uncleavable N-term signal seq
----- Final Results -----
                              bacterial membrane --- Certainty = 0.0000(Not Clear) < succ>
                                bacterial outside --- Certainty = 0.0000(Not Clear) < succ>
                            bacterial cytoplasm --- Certainty = 0.0000(Not Clear) < succ>
```

[2621] The protein has no significant homology with any sequences in the GENPEPT database.

[2622] No corresponding DNA sequence was identified in S. pyogenes.

[2623] Based on this analysis, it was predicted that this protein and its epitopes, could be useful antigens for vaccines or diagnostics.

### EXAMPLE 421

[2624] A DNA sequence (GBSx0457) was identified in S. agalactiae <SEQ ID 1365> which encodes the amino acid sequence <SEQ ID 1366>. Analysis of this protein sequence reveals the following:

```
Possible site: 17
>>> Seems to have a cleavable N-term signal seq.
----- Final Results -----
                                bacterial outside --- Certainty = 0.3000(Affirmative) < succ>
                              bacterial membrane --- Certainty = 0.0000(Not Clear) < succ>
                            bacterial cytoplasm --- Certainty = 0.0000(Not Clear) < succ>
```

[2625] The protein has homology with the following sequences in the GENPEPT database:

| >GP: AAA74029 GB: U30715 ORFB [Bacillus anthracis] | | | |
|---|---|---|---|
| Identities = 33/76 (43%), Positives = 44/76 (57%), Gaps = 1/76 (1%) | | | |
| Query: | 11 | IRRVSHACTKAGDRFYEENILNREFTATAHNQKWCTDVTYLQYGLGAKAYLSAIKDLYNG | 70 |
| | | ++R R EN+LNR F A N+KW TD+TYL +G YL +I DLYN | |
| Sbjct: | 86 | VKRKRRTWINGESRIVVENLLNRNFQANKPNEKWVTDITYLPFGT-EMLYLLSIMDLYNN | 144 |
| Query: | 71 | SIIAYEISHNNEIHLL | 86 |
| | | IIAYEIS+ ++ L+ | |
| Sbjct: | 145 | EIIAYEISNRQDVTLV | 160 |

[2626] Based on this analysis, it was predicted that this protein and its epitopes, could be useful antigens for vaccines or diagnostics.

### EXAMPLE 422

[2627] A DNA sequence (GBSx0458) was identified in S. agalactiae <SEQ ID 1367> which encodes the amino acid sequence <SEQ ID 1368>. Analysis of this protein sequence reveals the following:

| Possible site: 27 | | | | |
|---|---|---|---|---|
| >>> Seems to have no N-terminal signal sequence | | | | |
| | INTEGRAL | Likelihood = −0.69 | Transmembrane | 10-26 (10-26) |

```
----- Final Results -----
                              bacterial membrane --- Certainty = 0.1277(Affirmative) < succ>
                                bacterial outside --- Certainty = 0.0000(Not Clear) < succ>
                            bacterial cytoplasm --- Certainty = 0.0000(Not Clear) < succ>
```

[2628] The protein has no significant homology with any sequences in the GENPEPT database.

[2629] No corresponding DNA sequence was identified in S. pyogenes.

[2630] Based on this analysis, it was predicted that this protein and its epitopes, could be useful antigens for vaccines or diagnostics.

### EXAMPLE 423

[2631] A DNA sequence (GBSx0459) was identified in S. agalactiae <SEQ ID 1369> which encodes the amino acid sequence <SEQ ID 1370>. Analysis of this protein sequence reveals the following:

```
Possible site: 47
>>> Seems to have no N-terminal signal sequence
----- Final Results -----
                            bacterial cytoplasm --- Certainty = 0.4170(Affirmative) < succ>
                              bacterial membrane --- Certainty = 0.0000(Not Clear) < succ>
                                bacterial outside --- Certainty = 0.0000(Not Clear) < succ>
```

[2632] The protein has homology with the following sequences in the GENPEPT database:

| >GP: AAA56999 GB: U09558 ORFA, putative Helix-Turn-Helix motif from | | | |
|---|---|---|---|
| amino acid 21 through 42 and from amino acid 78 through | | | |
| 99 [Lactobacillus johnsonii] | | | |
| Identities = 28/116 (24%), Positives = 59/116 (50%), Gaps = 6/116 (5%) | | | |
| Query: | 3 | YSTLAKEQGVQGYLDGKGSLRDICKWYDISSRSVLQKWIKRYTSGEDLKATSRGYSRMKQ | 62 |
| | | YST K + V YL+ + S++ + K Y+I +++++W+ + + L A S +++ | |
| Sbjct: | 4 | YSTELKIEIVSKYLNHEDSIKGLAKQYNIHW-TLIRRWVDK-AKCQGLAALSVKHTKTTY | 61 |
| Query: | 63 | GRQATFEERVEIVNYTIAHGKDYQAAIEKFGVSYQQIYSWVRKLEKNGSQGLVDRR | 118 |
| | | + ++ +V Y + H KF +S Q+Y+W +K + G GL+ ++ | |
| Sbjct: | 62 | SS----DFKLNVVRYYLTHSIGVSKVAAKFNISDSQVYNWAKKFNEEGYAGLLPKQ | 113 |

[2633] No corresponding DNA sequence was identified in S. pyogenes.

[2634] Based on this analysis, it was predicted that this protein and its epitopes, could be useful antigens for vaccines or diagnostics.

### EXAMPLE 424

[2635] A DNA sequence (GBSx0460) was identified in S. agalactiae <SEQ ID 1371> which encodes the amino acid sequence <SEQ ID 1372>. Analysis of this protein sequence reveals the following:

| Possible site: 23 | | | | |
|---|---|---|---|---|
| >>> Seems to have an uncleavable N-term signal seq | | | | |
| | INTEGRAL | Likelihood = −0.69 | Transmembrane | 2-18 (2-19) |

```
----- Final Results -----
                              bacterial membrane --- Certainty = 0.1277(Affirmative) < succ>
                                bacterial outside --- Certainty = 0.0000(Not Clear) < succ>
                            bacterial cytoplasm --- Certainty = 0.0000(Not Clear) < succ>
```

[2636] The protein has no significant homology with any sequences in the GENPEPT database.

[2637] No corresponding DNA sequence was identified in S. pyogenes.

[2638] Based on this analysis, it was predicted that this protein and its epitopes, could be useful antigens for vaccines or diagnostics.

### EXAMPLE 425

[2639] A DNA sequence (GBSx0461) was identified in S. agalactiae <SEQ ID 1373> which encodes the amino acid sequence <SEQ ID 1374>. This protein is predicted to be integrase (phage-relatedpr). Analysis of this protein sequence reveals the following:

```
Possible site: 28
>>> Seems to have no N-terminal signal sequence
----- Final Results -----
                              bacterial membrane --- Certainty = 0.0000(Not Clear) < succ>
                                bacterial outside --- Certainty = 0.0000(Not Clear) < succ>
                            bacterial cytoplasm --- Certainty = 0.0000(Not Clear) < succ>
```

[2640] The protein has homology with the following sequences in the GENPEPT database:

| >GP: AAC79517 GB: U88974 ORF1 [Streptococcus thermophilus temperate | | | |
|---|---|---|---|
| bacteriophage O1205] | | | |
| Identities = 104/172 (60%), Positives = 127/172 (73%), Gaps = 11/172 (6%) | | | |
| Query: | 10 | QHQSYAALYLIAKTGMRFAECLGLTVNDIDYTNKYLSINKTWDYHFNQRYLPTKNKSSIR | 69 |
| | | ++ SYAALY+I+KTG+RFAECLGLTV+DI LS+NKTWDY N ++PTK KSSIR | |
| Sbjct: | 186 | EYASYAALYIISKTGIRFAECLGLTVDDIKRDTGMLSVNKTWDYKNNTGFMPTKTKSSIR | 245 |
| Query: | 70 | NIPIDNDTLFFLHEFTKNKNDRLFDKLSNNAVNKTIRKITGREVRVHSLRHTFASY---- | 125 |
| | | IP+D++ + F+ + + RL LSNNAVNKT+RKI GREVRVHSLRHT+ASY | |
| Sbjct: | 246 | EIPLDDEFINFIDQLPPTDDGRLLPSLSNNAVNKTLRKIVGREVRVHSLRHTYASYLIAH | 305 |
| Query: | 126 | ---LISISQVLDHENLNITLEVYAHQLQEQKDRNDKLNQRNLGRIWGKIALN | 174 |
| | | LIS+SQVL HENLNITLEVYAHQLQEQK RND+ + ++W K N | |
| Sbjct: | 306 | DIDLISVSQVLGHENLNITLEVYAHQLQEQKSRNDE----KIKQMWTKCGQN | 353 |

[2641] There is also homology to SEQ ID 578 Based on this analysis, it was predicted that this protein and its epitopes, could be useful antigens for vaccines or diagnostics.

### EXAMPLE 426

[2642] A DNA sequence (GBSx0462) was identified in S. agalactiae <SEQ ID 1375> which encodes the amino acid sequence <SEQ ID 1376>. Analysis of this protein sequence reveals the following:

```
Possible site: 22
>>> Seems to have no N-terminal signal sequence
----- Final Results -----
                            bacterial cytoplasm --- Certainty = 0.3206(Affirmative) < succ>
                              bacterial membrane --- Certainty = 0.0000(Not Clear) < succ>
                                bacterial outside --- Certainty = 0.0000(Not Clear) < succ>
```

[2643] The protein has no significant homology with any sequences in the GENPEPT database, but there is homology to SEQ ID 1328.

[2644] Based on this analysis, it was predicted that this protein and its epitopes, could be useful antigens for vaccines or diagnostics.

### EXAMPLE 427

[2645] A DNA sequence (GBSx0463) was identified in S. agalactiae <SEQ ID 1377> which encodes the amino acid sequence <SEQ ID 1378>. Analysis of this protein sequence reveals the following:

```
Possible site: 45
>>> Seems to have no N-terminal signal sequence
----- Final Results -----
                            bacterial cytoplasm --- Certainty = 0.6542(Affirmative) < succ>
                              bacterial membrane --- Certainty = 0.0000(Not Clear) < succ>
                                bacterial outside --- Certainty = 0.0000(Not Clear) < succ>
```

[2646] The protein has homology with the following sequences in the GENPEPT database:

| >GP: CAB52541 GB: AJ131519 hypothetical protein [Lactobacillus | | | |
|---|---|---|---|
| bacteriophage phi adh] | | | |
| Identities = 24/55 (43%), Positives = 36/55 (64%) | | | |
| Query: | 12 | MDKELTPQEKANKKWAENNREHRTYLSKRSTARSFINKNATKEDLLELKQLIESK | 66 |
| | | M K + KANKKW E N+ + Y++KRSTA+SFI AT+EDL +++ + + | |
| Sbjct: | 1 | MAKITEARAKANKKWDEKNKARKLYINKRSTAKSFILNLATEEDLANIEEYVAER | 55 |

[2647] No corresponding DNA sequence was identified in S. pyogenes.

[2648] Based on this analysis, it was predicted that this protein and its epitopes, could be useful antigens for vaccines or diagnostics.

### EXAMPLE 428

[2649] A DNA sequence (GBSx0464) was identified in S. agalactiae <SEQ ID 1379> which encodes the amino acid sequence <SEQ ID 1380>. Analysis of this protein sequence reveals the following:

```
Possible site: 41
>>> Seems to have no N-terminal signal sequence
----- Final Results -----
                            bacterial cytoplasm --- Certainty = 0.4417(Affirmative) < succ>
                              bacterial membrane --- Certainty = 0.0000(Not Clear) < succ>
                                bacterial outside --- Certainty = 0.0000(Not Clear) < succ>
```

[2650] The protein has no significant homology with any sequences in the GENPEPT database, but there is homology to SEQ ID 1332.

[2651] Based on this analysis, it was predicted that this protein and its epitopes, could be useful antigens for vaccines or diagnostics.

### EXAMPLE 429

[2652] A DNA sequence (GBSx0465) was identified in S. agalactiae <SEQ ID 1381> which encodes the amino acid sequence <SEQ ID 1382>. Analysis of this protein sequence reveals the following:

```
Possible site: 28
>>> Seems to have a cleavable N-term signal seq.
----- Final Results -----
                                bacterial outside --- Certainty = 0.3000(Affirmative) < succ>
                              bacterial membrane --- Certainty = 0.0000(Not Clear) < succ>
                            bacterial cytoplasm --- Certainty = 0.0000(Not Clear) < succ>
```

[2653] The protein has no significant homology with any sequences in the GENPEPT database.

[2654] No corresponding DNA sequence was identified in S. pyogenes.

[2655] Based on this analysis, it was predicted that this protein and its epitopes, could be useful antigens for vaccines or diagnostics.

### EXAMPLE 430

[2656] A DNA sequence (GBSx0466) was identified in S. agalactiae <SEQ ID 1383> which encodes the amino acid sequence <SEQ ID 1384>. Analysis of this protein sequence reveals the following:

| Possible site: 47 | | | | |
|---|---|---|---|---|
| >>> Seems to have no N-terminal signal sequence | | | | |
| | INTEGRAL | Likelihood = −4.30 | Transmembrane | 205-221 (202-223) |
| | INTEGRAL | Likelihood = −3.56 | Transmembrane | 296-312 (294-312) |

```
----- Final Results -----
                              bacterial membrane --- Certainty = 0.2720(Affirmative) < succ>
                                bacterial outside --- Certainty = 0.0000(Not Clear) < succ>
                            bacterial cytoplasm --- Certainty = 0.0000(Not Clear) < succ>
```

[2657] A related GBS nucleic acid sequence <SEQ ID 9663> which encodes amino acid sequence <SEQ ID 9664> was also identified.

[2658] The protein has no significant homology with any sequences in the GENPEPT database.

[2659] No corresponding DNA sequence was identified in S. pyogenes.

[2660] A related GBS gene <SEQ ID 8573> and protein <SEQ ID 8574> were also identified. Analysis of this protein sequence reveals the following:

| Lipop: Possible site: −1 Crend: 8 | | | | |
|---|---|---|---|---|
| McG: Discrim Score: −8.80 | | | | |
| GvH: Signal Score (−7.5): −4.03 | | | | |
| Possible site: 47 | | | | |
| >>> Seems to have no N-terminal signal sequence | | | | |
| ALOM program count: 2 value: −4.30 threshold: 0.0 | | | | |
| | INTEGRAL | Likelihood = −4.30 | Transmembrane | 205-221 (202-223) |
| | INTEGRAL | Likelihood = −3.56 | Transmembrane | 296-312 (294-312) |
| | PERIPHERAL | Likelihood = 2.97 | 20 | |

```
modified ALOM score: 1.36
*** Reasoning Step: 3
----- Final Results -----
                              bacterial membrane --- Certainty = 0.2720(Affirmative) < succ>
                                bacterial outside --- Certainty = 0.0000(Not Clear) < succ>
                            bacterial cytoplasm --- Certainty = 0.0000(Not Clear) < succ>
```

[2661] SEQ ID 8574 (GBS366) was expressed in E. coli as a GST-fusion product. The purified fusion protein (FIG. 215, lane 5) was used to immunise mice. The resulting antiserum was used for FACS (FIG. 281), which confirmed that the protein is immunoaccessible on GBS bacteria.

[2662] Based on this analysis, it was predicted that these proteins and their epitopes could be useful antigens for vaccines or diagnostics.

### EXAMPLE 431

[2663] A DNA sequence (GBSx0467) was identified in S. agalactiae <SEQ ID 1385> which encodes the amino acid sequence <SEQ ID 1386>. This protein is predicted to be N-acetylmuramoyl-L-alanine amidase. Analysis of this protein sequence reveals the following:

```
Possible site: 31
>>> Seems to have no N-terminal signal sequence
----- Final Results -----
                            bacterial cytoplasm --- Certainty = 0.1471(Affirmative) < succ>
                              bacterial membrane --- Certainty = 0.0000(Not Clear) < succ>
                                bacterial outside --- Certainty = 0.0000(Not Clear) < succ>
```

[2664] A related GBS nucleic acid sequence <SEQ ID 8575> which encodes amino acid sequence <SEQ ID 8576> was also identified. This has an RGD motif at residues 81-83.

[2665] The protein has homology with the following sequences in the GENPEPT database:

| >GP: CAB07986 GB: Z93946 N-acetylmuramoyl-L-alanine amidase | | | |
|---|---|---|---|
| [bacteriophage Dp-1] | | | |
| Identities = 99/140 (70%), Positives = 120/140 (85%) | | | |
| Query: | 10 | MVINIEQAIAWMASRKGKVTYSMDYRNGPSSYDCSSSVYFALRSAGASDNGWAVNTEYEH | 69 |
| | | M ++IE+ +AWM +RKG+V+YSMD+R+GP SYDCSSS+Y+ALRSAGAS GWAVNTEY H | |
| Sbjct: | 1 | MGVDIEKGVAWMQARKGRVSYSMDFRDGPDSYDCSSSMYYALRSAGASSAGWAVNTEYMH | 60 |
| Query: | 70 | DWLIKNGYVLIAENTNWNAQRGDIFIWGKRGASAGAFGHTGMFVDPDNIIHCNYGYNSIT | 129 |
| | | WLI+NGY LI+EN W+A+RGDIFIWG++GASAGA GHTGMF+D DNIIHCNY Y+ I+ | |
| Sbjct: | 61 | AWLIENGYELISENAPWDAKRGDIFIWGRKGASAGAGGHTGMFIDSDNIIHCNYAYDGIS | 120 |
| Query: | 130 | VNNHDEIWGYNGQPYVYAYR | 149 |
| | | VN+HDE W Y GQPY Y YR | |
| Sbjct: | 121 | VNDHDERWYYAGQPYYYVYR | 140 |

[2666] A related DNA sequence was identified in S. pyogenes <SEQ ID 1387> which encodes the amino acid sequence <SEQ ID 1388>. Analysis of this protein sequence reveals the following:

| Possible site: 26 | | | | |
|---|---|---|---|---|
| >>> Seems to have no N-terminal signal sequence | | | | |
| | INTEGRAL | Likelihood = −1.06 | Transmembrane | 79-95 (77-95) |

```
----- Final Results -----
                              bacterial membrane --- Certainty = 0.1426(Affirmative) < succ>
                                bacterial outside --- Certainty = 0.0000(Not Clear) < succ>
                            bacterial cytoplasm --- Certainty = 0.0000(Not Clear) < succ>
```

[2667] An alignment of the GAS and GBS proteins is shown below:

| Identities = 56/91 (61%), Positives = 68/91 (74%) | | | |
|---|---|---|---|
| Query: | 158 | KVDNQSVVSKFEKELDVNTPLSNSNMPYYEATISEDYYVESKPDVNSTDKELLVAGTRVR | 217 |
| | | K+D F ++LD NT L NSN+PYYEAT+ DYYVESKP+ +S DKE + AGTRVR | |
| Sbjct: | 354 | KIDKPQSQLTFNQKLDTNTKLDNSNVPYYEATLRTDYYVESKPNASSADKEFIKAGTRVR | 413 |
| Query: | 218 | VYEKVKGWARIGAPQSNQWVEDAYLIDATDM | 248 |
| | | VYEKV GW+RI A QS+QWVED YL +AT + | |
| Sbjct: | 414 | VYEKVNGWSRINASQSDQWVEDKYLSNATQV | 444 |

[2668] SEQ ID 8576 (GBS301) was expressed in E. coli as a His-fusion product. SDS-PAGE analysis of total cell extract is shown in FIG. 44 (lane 9; MW 30 kDa). It was also expressed in E. coli as a GST-fusion product. SDS-PAGE analysis of total cell extract is shown in FIG. 49 (lane 3; MW 55 kDa).

[2669] The GBS301-GST fusion product was purified (FIG. 205, lane 4) and used to immunise mice. The resulting antiserum was used for FACS (FIG. 300), which confirmed that the protein is immunoaccessible on GBS bacteria.

[2670] Based on this analysis, it was predicted that these proteins and their epitopes could be useful antigens for vaccines or diagnostics.

### EXAMPLE 432

[2671] A DNA sequence (GBSx0468) was identified in S. agalactiae <SEQ ID 1389> which encodes the amino acid sequence <SEQ ID 1390>. Analysis of this protein sequence reveals the following:

| Possible site: 53 | | | | |
|---|---|---|---|---|
| >>> Seems to have an uncleavable N-term signal seq | | | | |
| | INTEGRAL | Likelihood = −6.53 | Transmembrane | 8-24 (3-25) |

```
----- Final Results -----
                              bacterial membrane --- Certainty = 0.3612(Affirmative) < succ>
                                bacterial outside --- Certainty = 0.0000(Not Clear) < succ>
                            bacterial cytoplasm --- Certainty = 0.0000(Not Clear) < succ>
```

[2672] The protein has no significant homology with any sequences in the GENPEPT database.

[2673] No corresponding DNA sequence was identified in S. pyogenes.

[2674] Based on this analysis, it was predicted that this protein and its epitopes, could be useful antigens for vaccines or diagnostics.

### EXAMPLE 433

[2675] A DNA sequence (GBSx0469) was identified in S. agalactiae <SEQ ID 1391> which encodes the amino acid sequence <SEQ ID 1392>. Analysis of this protein sequence reveals the following:

```
Possible site: 34
>>> Seems to have a cleavable N-term signal seq.
----- Final Results -----
                                bacterial outside --- Certainty = 0.3000(Affirmative) < succ>
                              bacterial membrane --- Certainty = 0.0000(Not Clear) < succ>
                            bacterial cytoplasm --- Certainty = 0.0000(Not Clear) < succ>
```

[2676] The protein has no significant homology with any sequences in the GENPEPT database.

[2677] No corresponding DNA sequence was identified in S. pyogenes.

[2678] Based on this analysis, it was predicted that this protein and its epitopes, could be useful antigens for vaccines or diagnostics.

### EXAMPLE 434

[2679] A DNA sequence (GBSx0470) was identified in S. agalactiae <SEQ ID 1393> which encodes the amino acid sequence <SEQ ID 1394>. Analysis of this protein sequence reveals the following:

```
Possible site: 36
>>> Seems to have no N-terminal signal sequence
----- Final Results -----
                            bacterial cytoplasm --- Certainty = 0.0120(Affirmative) < succ>
                              bacterial membrane --- Certainty = 0.0000(Not Clear) < succ>
                                bacterial outside --- Certainty = 0.0000(Not Clear) < succ>
```

[2680] The protein has no significant homology with any sequences in the GENPEPT database.

[2681] No corresponding DNA sequence was identified in S. pyogenes.

[2682] Based on this analysis, it was predicted that this protein and its epitopes, could be useful antigens for vaccines or diagnostics.

### EXAMPLE 435

[2683] A DNA sequence (GBSx0471) was identified in S. agalactiae <SEQ ID 1395> which encodes the amino acid sequence <SEQ ID 1396>. Analysis of this protein sequence reveals the following:

```
Possible site: 38
>>> Seems to have no N-terminal signal sequence
----- Final Results -----
                            bacterial cytoplasm --- Certainty = 0.4757(Affirmative) < succ>
                              bacterial membrane --- Certainty = 0.0000(Not Clear) < succ>
                                bacterial outside --- Certainty = 0.0000(Not Clear) < succ>
```

[2684] A related GBS nucleic acid sequence <SEQ ID 9661> which encodes amino acid sequence <SEQ ID 9662> was also identified.

[2685] The protein has no significant homology with any sequences in the GENPEPT database.

[2686] No corresponding DNA sequence was identified in S. pyogenes.

[2687] Based on this analysis, it was predicted that these proteins and their epitopes could be useful antigens for vaccines or diagnostics.

### EXAMPLE 436

[2688] A DNA sequence (GBSx0472) was identified in S. agalactiae <SEQ ID 1397> which encodes the amino acid sequence <SEQ ID 1398>. This protein is predicted to be a minor structural protein. Analysis of this protein sequence reveals the following:

| Possible site: 23 | | | | |
|---|---|---|---|---|
| >>> Seems to have no N-terminal signal sequence | | | | |
| | INTEGRAL | Likelihood = −2.39 | Transmembrane | 349-365 (347-366) |

```
----- Final Results -----
                              bacterial membrane --- Certainty = 0.1956(Affirmative) < succ>
                                bacterial outside --- Certainty = 0.0000(Not Clear) < succ>
                            bacterial cytoplasm --- Certainty = 0.0000(Not Clear) < succ>
```

[2689] The protein has homology with the following sequences in the GENPEPT database:

| >GP: AAF43531 GB: AF145054 ORF39 [Streptococcus thermophilus | | | |
|---|---|---|---|
| bacteriophage 7201] | | | |
| Identities = 212/666 (31%), Positives = 323/666 (47%), Gaps = 52/666 (7%) | | | |
| Query: | 10 | WGNNLTLEILSAWNKP---NIASNTSTVNVQVFL-----KMSSYGYISIGETRPLKITVD | 61 |
| | | W NN + W +I +NTS V +++ L + Y + E ++ | |
| Sbjct: | 5 | WSNNDRGYRIRLWVDQVGQDIQNNTSQVRLRLSLLNTTTTFAQYSCSAFVEFNGQRLNWS | 64 |
| Query: | 62 | GRAETINVNPSINYGQRKLLFAKDYIVNHNSDGNKPLFNISAYYPIN--FSNYGEATANQ | 119 |
| | | G + N +I L + V H DG+ +F + A++ + +S NQ | |
| Sbjct: | 65 | GSPSVLGWNQTIQ------LIDQTITVRHADDGSG-VFGVHAHFNGSGGWSPGNLDIGNQ | 117 |
| Query: | 120 | SISLPKINRLSVSSAISGVLGNAVTITINRYSTSFTHNLKYDFKGSTGTIATGVGTSYLW | 179 |
| | | I+L I R S G +GN V I+I+R TH L+Y ++ G IA VGTSY W | |
| Sbjct: | 118 | QITLTTIPRGSSVRVSDGFIGNQVDISIDRKIGGATHTLRYAWENKQGKIADNVGTSYKW | 177 |
| Query: | 180 | TIPPTFANLLPNELTGTGNLIVETMDGSAKIGETKYTLSITIPNTATYKPKLSSITLSDT | 239 |
| | | TIP FAN +PN +G G + V+T I TL+ ++ T KP + TL+DT | |
| Sbjct: | 178 | TIPEDFANDIPNSTSGRGTIYVDTYINGNFIQTQSTTLTASV-ITNNLKPSFTGFTLTDT | 236 |
| Query: | 240 | NTLTSSIVSG-NNFVRIISKVKVDFGSAIGNNGSTITSYNAEIVGKSNSIIGNGSVFDKL | 298 |
| | | N + IV G +FV I+S VKV F A +G+TI Y AEIVG +NSI NG V ++ | |
| Sbjct: | 237 | NPTSQRIVPGQTHFVSIMSLVKVVFNGAQAKSGATIVGYYAEIVGANNSISSNGGVLREV | 296 |
| Query: | 299 | DFFGSA--TIRATVTDSRGLTSEPVDTKINVIDYFLPIVTSAKVVRSQQNPDILQVLPFV | 356 |
| | | T+R V DSRG+ S+ V+TK+ + YF P + +V RS + DIL + F | |
| Sbjct: | 297 | SVNQDTEMTLRGRVQDSRGIWSDWVETKLTFLFYFSPAL-RFEVKRSDKKLDILTIKRFA | 355 |
| Query: | 357 | KIAPIIVGGIQKNQLKMSVSVAPYNTGIYAVDSGAATNTWSTISQMSGAPLNLGGTYDKS | 416 |
| | | KIAP+ V GIQ+N +K++ S A + VD+G A WS+IS+ + + LG +Y | |
| Sbjct: | 356 | KIAPLSVNGIQRNVMKLTFSTAKVGWDNFVVDNGQAGGVWSSISEFNASDAKLGNSYPAD | 415 |
| Query: | 417 | KSWLVKISVSDNLMSATPIIQPVASEFVLVTKAPSGVAFGKIWEHGIIDAKGDVYVDGTI | 476 |
| | | S++V + D S T V ++ V++T GV GK E G +D GD I | |
| Sbjct: | 416 | TSYVVIGKLEDEFTS-TSFQATVPTDEVIMTYDRQGVGIGKYRERGALDVNGD------I | 468 |
| Query: | 477 | YCGDKAIQQKPLALNNGGSFRHDDTDLNSLQDTGFYCVFRGANRPAGAGPGYVTVVRHET | 536 |
| | | Y + IQQ L NNG ++ N+++D G Y +F A P + + H + | |
| Sbjct: | 469 | YANNSPIQQYQLTNNNGSPKMTNNA--NTIEDPGQYYLFSAA--PGNPSGQWGHLFHHSS | 524 |
| Query: | 537 | ------ANYAYQQFYDRTNKTI-----FTRLLENGVWSGWSEYVKKD--SLQTTGWITIG | 583 |
| | | A Q F+ + ++R++++ W W E+ + D +L TGW G | |
| Sbjct: | 525 | YGKGSMYKEAIQIFWSNDGRLFSRHHRWSRIIDD--WEPWKEFARNDNTNLINTGWQPAG | 582 |
| Query: | 584 | -NGFKYKRKGDDIDLMYNFASNGLQRWSVGNMPSGLI--PQELMFAITGWTLAPDKSIHL | 640 |
| | | +G YKR GD + + +NF G + + ++P + PQ MF +TGW++ +K ++ | |
| Sbjct: | 583 | VDGSFYKRVGDVLTIKFNFTGTG-GDFLLASVPPEIFKAPQSYMFVVTGWSVWANKQYNV | 641 |
| Query: | 641 | QINASG | 646 |
| | | Q+N G | |
| Sbjct: | 642 | QVNEGG | 647 |

[2690] No corresponding DNA sequence was identified in S. pyogenes.

[2691] SEQ ID 1398 (GBS365) was expressed in E. coli as a GST-fusion product. SDS-PAGE analysis of total cell extract is shown in FIG. 82 (lane 2; MW 102 kDa).

[2692] GBS365-GST was purified as shown in FIG. 216, lane 11.

[2693] Based on this analysis, it was predicted that this protein and its epitopes, could be useful antigens for vaccines or diagnostics.

### EXAMPLE 437

[2694] A DNA sequence (GBSx0473) was identified in S. agalactiae <SEQ ID 1399> which encodes the amino acid sequence <SEQ ID 1400>. This protein is predicted to be a minor structural protein. Analysis of this protein sequence reveals the following:

```
Possible site: 59
>>> Seems to have no N-terminal signal sequence
----- Final Results -----
                            bacterial cytoplasm --- Certainty = 0.3481(Affirmative) < succ>
                              bacterial membrane --- Certainty = 0.0000(Not Clear) < succ>
                                bacterial outside --- Certainty = 0.0000(Not Clear) < succ>
```

[2695] The protein has homology with the following sequences in the GENPEPT database:

| >GP: AAC34413 GB: AF158600 putative minor structural protein | | | |
|---|---|---|---|
| [Streptococcus thermophilus bacteriophage Sfill] | | | |
| Identities = 504/998 (50%), Positives = 675/998 (67%), Gaps = 56/998 (5%) | | | |
| Query: | 1 | MLTIHGPDLKPVLFLDNDKQGALNYFNHKWYRKQKTGSSVLEFSVYKKDLLGDSPLSHKY | 60 |
| | | +LTIH +L+ V ++DN+KQ LN+FN KW R ++G+SV EFSV+KK + DS + Y | |
| Sbjct: | 2 | LLTIHDNNLQKVAYIDNEKQSTLNFFNDKWTRSLESGTSVFEFSVFKKSIKSDSKVEISY | 61 |
| Query: | 61 | HVLNDQAFVSFVHKGKVQLLNIMKIDEDEKQIDCYCENLNLELLNEYCNAYKATKAMSFE | 120 |
| | | LN++AFVSF HKGK L N+MKI+EDE+ I CYCENL+LELL EY AYKA+K M+F+ | |
| Sbjct: | 62 | KYLNERAFVSFKHKGKSYLFNVMKIEEDEQIIRCYCENLSLELLLEYRGAYKASKPMTFK | 121 |
| Query: | 121 | EYLVQFDILSWGALTVGTNEVKDKKLTLEWTSQETKLARLLSIANNFDAEIEFETKLNFN | 180 |
| | | EY + + + LT+G NEV D+K TLEW QET LARL+S+A NFDAEIEF+T+L N | |
| Sbjct: | 122 | EYFDDWGMGQFAKLTLGVNEVSDQKRTLEWEGQETTLARLISLARNFDAEIEFDTRLKPN | 181 |
| Query: | 181 | HTFKQLIINIYKEYEEGKSYGVDRDKTDVILRYQKNISGIRKTVDKRQIYNAIRPYGKK- | 239 |
| | | + ++N+YK Y+ GK+ GV R ++DVIL+Y KNI+GI+++VDK QIYN I PYG+K | |
| Sbjct: | 182 | SQLDEFVLNVYKAYD-GKNQGVGRRRSDVILKYGKNINGIKRSVDKTQIYNMITPYGRKS | 240 |
| Query: | 240 | -TVRGERVISNPVTRKVTKTVGSNRT---YLGGDLKYYGHTIKKANVQAIINYAVQYNIL | 295 |
| | | T + + IS+PVT + V S R Y GGDL Y GHT+ + VQ I N VQ N+L | |
| Sbjct: | 241 | DTKKETKRISDPVTIQNPVVVPSARVEKRYAGGDLTYAGHTLSASLVQTIFNLCVQRNLL | 300 |
| Query: | 296 | PSGIITQLYLESFWGDSTVGKRDNNWAGMSGGAQTRPSGVKVTTGMARPANEGGTYMHYA | 355 |
| | | PSG+I+QLYLESFWG S V +RDNNW+GM+GGAQTRPSGV VTTG RPA+EGGTYMHYA | |
| Sbjct: | 301 | PSGVISQLYLESFWGSSNVARRDNNWSGMTGGAQTRPSGVVVTTGSPRPASEGGTYMHYA | 360 |
| Query: | 356 | SVDDFLKDYTYLLAKQG-----IYNVVGKKNIADYTKGLFRAGGAKYDYAAAGYQSYTNL | 410 |
| | | SVDDF+KDYTYLLA Q +Y V GK+NI +YTKGLFR GGA YDYAAAGY Y L | |
| Sbjct: | 361 | SVDDFMKDYTYLLADQTSGGRKMYGVKGKQNIEEYTKGLFRIGGALYDYAAAGYNHYIYL | 420 |
| Query: | 411 | MTNIRNGINKVTGNILNTIDKLWQTPVKPITAVNVARRATKTIQA------INEATKLKG | 464 |
| | | M +IRNGIN+ GNIL+ +D LW+ P IT N ++ T+T++A +NE LKG | |
| Sbjct: | 421 | MRDIRNGINRSNGNILDKLDDLWRQPDNQITQPN--KQVTRTVKADRVIAVLNEMQGLKG | 478 |
| Query: | 465 | RRIGSGQCYALSGWYAKKLDGAWIDSSIGGIRGRIGGGMAAALIGTDYNWGAYGWKVDKS | 524 |
| | | RR+G+GQCYAL+ WY+ KL G + + + G G IG GMAAA IGTDY W +GW V + | |
| Sbjct: | 479 | RRVGNGQCYALAAWYSMKLGGPGLGAGVTGKSGVIGAGMAAAKIGTDYAWDRFGWSVVRP | 538 |
| Query: | 525 | PNAGNLKAGGIYNVRANRGAPFYTTGWGHTGIIKSVSKTRVTVLEQNFVGRMYVVENSYD | 584 |
| | | + LK G I N++A T+ WGH II S + + VTVLEQN+ GR YVV+NSY | |
| Sbjct: | 539 | TSVDQLKPGAIANIKAYNSY-LGTSVWGHVSIIISNNGSTVTVLEQNYAGRQYVVQNSYP | 597 |
| Query: | 585 | INSFASGLQTVCYPREIAQGMSVNGATTQQVSGGTQISYEEVVQEAQTESYEEEQIIYID | 644 |
| | | +++ ++T+CYP E+ +G +V G T + ++ E+ + E + ID | |
| Sbjct: | 598 | ASAYLGAVETLCYPPELKEGKTVEGRTETVSTPNVEVQKVEIPPIDVEVTTESTAALTID | 657 |
| Query: | 645 | NSIYKEWKDENGKVEYYLKNGFLYAPLSRDRYPSVLTGNETRDNWIRKDMEVETDSQEVL | 704 |
| | | + +EW++ENG+VE+YL+NG LYAP+S++ YPS+LTG E DNWIRKDME++TDS++VL | |
| Sbjct: | 658 | SKRKQEWRNENGQVEFYLENGSLYAPISKELYPSILTGKENGDNWIRKDMEIDTDSEDVL | 717 |
| Query: | 705 | MSTGLKDLKAHAYPAITYEVDGYVDLELGDVVRIQDDGYEPPLILTARVVEQEISITNPS | 764 |
| | | +ST L++L+ YPAITYEVDG++DL++GD V+IQD G+ P L+L ARV EQ+IS TNP | |
| Sbjct: | 718 | ISTALRNLRKFCYPAITYEVDGFLDLDIGDTVKIQDTGFSPMLMLEARVSEQQISFTNPV | 777 |
| Query: | 765 | SNKTKFSNFVEKESQLASDLISDMLRLYDESIPYEIKLATSNGVAFKNGTGESVLTPSLQ | 824 |
| | | NKT F+NF +++++ L+S M +L +E+IPYE+KL+T NG FKN TG+SVL +L+ | |
| Sbjct: | 778 | ENKTVFANFQTLQNKVSDSLLSRMTKLAEEAIPYELKLSTDNGTTFKNSTGQSVLKATLE | 837 |
| Query: | 825 | KNGKDYEAVYFYKNGDSLIDIGPSLIVKASDFNHVLNITVEAYLNEELVASTQISFTDTE | 884 |
| | | KNG+ Y+ ++F+KNGDS+I G L+VK +DF + L +TVEAYL++ELVAS +I+FTD | |
| Sbjct: | 838 | KNGEVYQPIFFFKNGDSIIGTGNQLVVKPTDFENTLQVTVEAYLDDELVASAEITFTDVS | 897 |
| Query: | 885 | DGADGKDGAPGPQGPPGVNGLQGPKGDQGIQGPAGADGKATYTHIAYALDENGSTGFSVS | 944 |
| | | DG QGPKGD G+ L S G+ | |
| Sbjct: | 898 | DGK------------------QGPKGDDGVS--------------PINLIIESSNGYQFK | 925 |
| Query: | 945 | DNVGKTYI--GMYVDDNIIDSNDPK-KYKWNLIKGADG | 979 |
| | | +N+ T +Y D+ ID + + Y W+ + ADG | |
| Sbjct: | 926 | NNIINTTFTAKLYQDNKEIDKDGTRYAYLWSKV-NADG | 962 |

[2696] A related DNA sequence was identified in S. pyogenes <SEQ ID 1401> which encodes the amino acid sequence <SEQ ID 1402>. Analysis of this protein sequence reveals the following:

| Possible site: 37 | | | | |
|---|---|---|---|---|
| >>> Seems to have a cleavable N-term signal seq. | | | | |
| | INTEGRAL | Likelihood = −3.56 | Transmembrane | 325-341 (323-343) |

```
----- Final Results -----
                              bacterial membrane --- Certainty = 0.2423(Affirmative) < succ>
                                bacterial outside --- Certainty = 0.0000(Not Clear) < succ>
                            bacterial Cytoplasm --- Certainty = 0.0000(Not Clear) < succ>
```

[2697] An alignment of the GAS and GBS proteins is shown below:

| Identities = 23/55 (41%), Positives = 27/55 (48%) | | | |
|---|---|---|---|
| Query: | 886 | GADGKDGAPGPQGPPGVNGLQGPKGDQGIQGPAGADGKATYTHIAYALDENGSTG | 940 |
| | | G GKDGAPG G PG G +G +G+ G QGP G G+ T G G | |
| Sbjct: | 181 | GEAGKDGAPGKDGAPGEKGEKGDRGETGAQGPVGPQGEKGETGAQGPAGPQGEAG | 235 |
| Identities = 48/151 (31%), Positives = 58/151 (37%), | | | |
| Gaps = 19/151 (12%) | | | |
| Query: | 852 | KASDFNHVLNITVEAYLNE--ELVASTQISFTDTEDGADGKDGAPGPQGPPGVNGLQGPK | 909 |
| | | K DF L E L E +L+ + I + G G G GPQG G G QGPK | |
| Sbjct: | 82 | KEEDFQKELKDFTEKRLKEILDLIGKSGIK---GDRGETGPAGPAGPQGKTGERGAQGPK | 138 |
| Query: | 910 | GD---QGIQGPAGADGKATYTHIAYALDENGSTGFS----VSDNVGKTYIGMYVDDNIID | 962 |
| | | GD QGIQG AG G+ E G G + GK D | |
| sbjct: | 139 | GDRGEQGIQGKAGEKGERGEKGDKGETGERGEKGEAGIQGPQGEAGK-------DGAPGK | 191 |
| Query: | 963 | SNDPKKYKWNLIKGADGARGIQGPAGADGKT | 993 |
| | | P + +G GA+G GP G G+T | |
| Sbjct: | 192 | DGAPGEKGEKGDRGETGAQGPVGPQGEKGET | 222 |
| Identities = 25/50 (50%), Positives = 29/50 (58%), | | | |
| Gaps = 9/50 (18%) | | | |
| Query: | 884 | EDGADGKDGAPGPQGPPGVNGL---------QGPKGDQGIQGPAGADGKA | 924 |
| | | +DGA GRDGAPG +G G G QG KG+ G QGPAG G+A | |
| Sbjct: | 185 | KDGAPGKDGAPGEKGEKGDRGETGAQGPVGPQGEKGETGAQGPAGPQGEA | 234 |

[2698] SEQ ID 1400 was expressed in four different forms. SDS-PAGE analysis of total cell extract is shown in FIG. 122 (GBS105dN—lane 5 & 7; MW 102 kDa), FIG. 122 (GBS105dC—lane 8-10; MW 81 kDa), FIG. 179 (GBS105d—lane 8; MW 102 kDa) and in FIG. 181 (GBS105C—lane 2; MW 56 kDa). GBS105dN-His was purified as shown in FIG. 232 (lanes 9 & 10). GBS105dC-His was purified as shown in FIG. 233 (lanes 3 & 4).

[2699] Based on this analysis, it was predicted that these proteins and their epitopes could be useful antigens for vaccines or diagnostics.

### EXAMPLE 438

[2700] A DNA sequence (GBSx0474) was identified in S. agalactiae <SEQ ID 1403> which encodes the amino acid sequence <SEQ ID 1404>. This protein is predicted to be a minor structural protein. Analysis of this protein sequence reveals the following:

```
Possible site: 32
>>> Seems to have no N-terminal signal sequence
----- Final Results -----
                            bacterial cytoplasm --- Certainty = 0.2502(Affirmative) < succ>
                              bacterial membrane --- Certainty = 0.0000(Not Clear) < succ>
                                bacterial outside --- Certainty = 0.0000(Not Clear) < succ>
```

[2701] The protein has homology with the following sequences in the GENPEPT database:

| >GP: AAC34412 GB: AF158600 putative minor structural protein | | | |
|---|---|---|---|
| [Streptococcus thermophilus bacteriophage Sfill] | | | |
| Identities = 163/433 (37%), Positives = 244/433 (55%), Gaps = 21/433 (4%) | | | |
| Query: | 80 | LSSKKPKMLMFSHIPGRYYLAVQVGDLNFKEIKMNGFGEIT--FIVADAYAHSTSYRRIK | 137 |
| | | L +KK L P RYYLA+ G+++ K I + + E T F+V D AHST+Y+R+ | |
| Sbjct: | 93 | LHTKKAVKLFLPTEPERYYLALVKGEVSLKGIS-DWYDEATIEFLVPDGVAHSTTYKRVT | 151 |
| Query: | 138 | DYTQDGNKMTFKIKNNGTAPAFPIFRIKHLGENGYIGITNETGAFAVGSPEEEDGTIVHR | 197 |
| | | DY + KM F I N G+ A+PI +K ENGY G+ ++ AF G+ EE DG I+ + | |
| Sbjct: | 152 | DYQEKDGKMIFSIDNEGSTDAYPIITLKANAENGYYGLVSDKFAFEAGNIEEADGKIISK | 211 |
| Query: | 198 | NETLFDY-SKAIAQAL-EGAPNVAKLNYMPPTFDSELKRMRLDNILGSGKGGEYVAIGAR | 255 |
| | | E L+D+ I QA +GA NV N + + + N+ G IG + | |
| Sbjct: | 212 | AEVLYDFRDDRIPQAFAKGAKNVGITNVTGDLHGT----LEIQNVWGRPH------IGLK | 261 |
| Query: | 256 | GTTPGYGE-HVGTRTFIINPDSNGEY-TLNEHLWWKQIFIATAQDQKGFLKLCVTGENDE | 313 |
| | | + + T I PDS+G LNE++WW+QIF A + Q GFLKL V+ + | |
| Sbjct: | 262 | NPNANINQLQTASLTLDIPPDSSGNVGALNEYIWWRQIFWAGSISQYGFLKLTVSDADGN | 321 |
| Query: | 314 | FLYGIETYKRKNGFETEYNFFALDDDGVGWRFYKQFEFQA-DRNYHNPFSMNRSRAVEIF | 372 |
| | | FLYG+ET+KR G E+EYN A D G G+RF KQ+ F A + HNPF+ R + +I | |
| Sbjct: | 322 | FLYGVETFKRSLGLESEYNALASDGYG-GFRFLKQWSFLATEYEDHNPFNEPRGWS-DIK | 379 |
| Query: | 373 | REEDKFRIYFNGAHHHVTVPSLKGKKSRKIHLAMGTCSDSSKYINYNLFEKVNFEKMGVS | 432 |
| | | RE+DK Y+ G ++ T+P +KGKKS KIHL + S ++ + F+++ + K + | |
| Sbjct: | 380 | REDDKVTFYWWGTYNTFTIPEIKGKKSAKIHLTISNI-PSKSFVTHAYFDQLLYIKTNNA | 438 |
| Query: | 433 | HYNNIVNKYQPGDEVIINFENDTVSTKDIDSIQDVVLGSKMISIPPGESELVVHLSSWVA | 492 |
| | | + +I N+Y G +IIN E+DT++ ++ ++ ++V GS IPPGES++ V S W | |
| Sbjct: | 439 | FFEDIPNRYIQGSNLIINSEDDTLTLNNLLNLDEIVDGSLWPVIPPGESQIEVVQSPWAK | 498 |
| Query: | 493 | ALPDISIDFEERY | 505 |
| | | P ++I+FEER+ | |
| Sbjct: | 499 | KKPSVTIEFEERW | 511 |

[2702] No corresponding DNA sequence was identified in S. pyogenes.

[2703] Based on this analysis, it was predicted that this protein and its epitopes, could be useful antigens for vaccines or diagnostics.

### EXAMPLE 439

[2704] A DNA sequence (GBSx0475) was identified in S. agalactiae <SEQ ID 1405> which encodes the amino acid sequence <SEQ ID 1406>. This protein is predicted to be PblA. Analysis of this protein sequence reveals the following:

| Possible site: 57 | | | | |
|---|---|---|---|---|
| >>> Seems to have no N-terminal signal sequence | | | | |
| | INTEGRAL | Likelihood = −7.11 | Transmembrane | 427-443 (424-445) |
| | INTEGRAL | Likelihood = −4.99 | Transmembrane | 449-465 (448-469) |
| | INTEGRAL | Likelihood = −2.71 | Transmembrane | 41-57 (38-57) |
| | INTEGRAL | Likelihood = −0.37 | Transmembrane | 361-377 (361-377) |
| | INTEGRAL | Likelihood = −0.22 | Transmembrane | 324-340 (324-340) |

```
----- Final Results -----
                              bacterial membrane --- Certainty = 0.3845(Affirmative) < succ>
                                bacterial outside --- Certainty = 0.0000(Not Clear) < succ>
                            bacterial cytoplasm --- Certainty = 0.0000(Not Clear) < succ>
```

[2705] The protein has homology with the following sequences in the GENPEPT database:

| >GP: AAG18638 GB: AY007505 Pb1A [Streptococcus mitis] | | | |
|---|---|---|---|
| Identities = 233/401 (58%), Positives = 296/401 (73%), Gaps = 17/401 (4%) | | | |
| Query: | 1 | MATNLGQAYVQIMPSAKGISGSISKTLDPEASSAGSSAGSLLGGKLIGILGSVIAAAKIG | 60 |
| | | MAT + QAYVQ++PSA+GI+G I L+PEAS+AG SAG LG L+G++ VIAAA IG | |
| Sbjct: | 1 | MATEIAQAYVQLIPSARGITGKIQSILNPEASAAGQSAGQSLGSSLVGVMTKVIAAAGIG | 60 |
| Query: | 61 | EMVTKAISSSISEGAALQQSLGGVETLFKSNANLVKKYADEAYKTTGLSANAYMESVTGF | 120 |
| | | KA S++ISEGAALQQSLGG+ETLFK +A+ VK YA+EAYKTTGLSANAYME+VTGF | |
| Sbjct: | 61 | ----KAFSAAISEGAALQQSLGGIETLFKGSADKVKGYANEAYKTTGLSANAYMENVTGF | 116 |
| Query: | 121 | SASLLQSLGGDTAKAAKVANMAMIDMADNSNKMGTSMESIQYAYQGFAKQNYTMLDNLKL | 180 |
| | | SASLLQSLGGDT KAA+ ANMAMIDM+DN+NKMGTSMESIQ AYQGFAKQNYTMLDNLKL | |
| Sbjct: | 117 | SASLLQSLGGDTNKAAETANMAMIDMSDNANKMGTSMESIQMAYQGFAKQNYTMLDNLKL | 176 |
| Query: | 181 | GYGGTQEEMKRLLSDAQKLTGKKYDISNLSDVYEAIHAIQGKIGITGTTAKEAATTFTGS | 240 |
| | | GYGGT++EM+RLL+DA+KLTG KYDI+NLSDVY AIHAIQ + ITGTTAKEAA+TF+GS | |
| Sbjct: | 177 | GYGGTKQEMQRLLADAEKLTGVKYDINNLSDVYSAIHAIQENLDITGTTAKEAASTFSGS | 236 |
| Query: | 241 | FEAMKAASKNLLGKMALGEDIKPSLKALFDTTSNFVLNNFIPMLTNVFKGFGSVISLTFS | 300 |
| | | FE+MKAA++N+LGK+ALGE+I PSL AL TTS F+ +NF+PM+ NVF G G V++ S | |
| Sbjct: | 237 | FESMKAAAQNVLGKLALGENILPSLHALLKTTSTFLFDNFLPMIGNVFSGLGLVLTEGIS | 296 |
| Query: | 301 | ELIPKIVGFMQTSGPSLMQSGISFIISFVNGFLTAYPAFLTVAGKIFTDFVSFVMQSIPG | 360 |
| | | ++ ++G S + +S + G + F + G + ++ +I G | |
| Sbjct: | 297 | QIASQLFG-------DAFGSAVFDQLSRITGIFETF--FDMIFGSLSKQDNIDILNTI-G | 346 |
| Query: | 361 | LLQAGATLVLNLIDGILANLPQIATS---AVSVISSFISML | 398 |
| | | + AT ++N+ D I I ++ V ++ F+ L | |
| Sbjct: | 347 | FSEEAATQIVNIADNIRVTFENIGSAIGDVVGIVGDFVGDL | 387 |
| Identities = 112/386 (29%), Positives = 172/386 (44%), Gaps = 18/386 (4%) | | | |
| Query: | 235 | TTFTGSFEAMKAASKNLLGKMA-LGEDIKPSLKA---LFDTTSNFVLNNFIPMLTNVFKG | 290 |
| | | TT+ E++KA ++ + L E IK + L T V+ FI N++ | |
| Sbjct: | 580 | TTWNAYVESLKAMWNAVVTFFSDLWESIKEAASTAWTLITTAVMMVVQPFIDGFMNIWNN | 639 |
| Query: | 291 | FGSVISLTFSELIPKIVGFMQTSGPSLMQSGISFIISFVNGFLTAYPAFLTVAGKIFTDF | 350 |
| | | ++ + + G + S+ I II V G A L++ + + | |
| Sbjct: | 640 | ISEGLTQVWEGIKLIFEGAWEFI-KSIFLGAILIIIDLVTGNFGQLGADLSLIWEGIKNG | 698 |
| Query: | 351 | VSFVMQSIPGLLQAGATLVLNLIDGILANLPQIATSAVSVISSFISMLQANYPAILKKGF | 410 |
| | | +S + + I +++ G+ N + ++ I + SM + I | |
| Sbjct: | 699 | ISLIWSGIKTYFSGVVDVIVGYATGVFENFSNVLSTIWEFIKTAASMA---WEWIKSTVS | 755 |
| Query: | 411 | EILSYLVQGIIARLPDIVITVGKL---IAILAGAIASNLPKVLALGVQLLITFVKGILSV | 467 |
| | | +++ L+QG + V + L I A A S L K L LG + V G + | |
| Sbjct: | 756 | NLITGLIQGAQNLWNNFVSFLSGLWENIKSTASAAWSGL-KSLVLG--FINGLVSGAQTA | 812 |
| Query: | 468 | IGKINETANNIGEK---LINAIKSIDLLSAGRAIMRGFLRGLEDVWGDIQNFVGDIAGWI | 524 |
| | | + + +++ K + N IK+I+L AG+AI+ GFL GL+ W + NFVG IA WI | |
| Sbjct: | 813 | WNNMKQAVSDLVTKVTNIFNGIKNINLWEAGKAILNGFLGGLKSAWEGVTNFVGGIANWI | 872 |
| Query: | 525 | KDHKGPISYDRRLLIPAGNAIMQGLHQGLVDKFKPVKNLVNGMAEEIQSSFGNPQLAFDM | 584 |
| | | +DHKGPI YDR+LLIPAGNAIM L GL D FK VK V GM+ EI F L + | |
| Sbjct: | 873 | RDHKGPIEYDRKLLIPAGNAIMGSLDNGLKDGFKDVKKTVGGMSGEISDVFSGDNLDLNS | 932 |
| Query: | 585 | DTNVNNGFE-RIGTLNKNLSSQVTST | 609 |
| | | +V E R+ + L Q + T | |
| Sbjct: | 933 | TASVTKNLEARLAMPSAQLEVQESKT | 958 |

[2706] A related DNA sequence was identified in S. pyogenes <SEQ ID 1407> which encodes the amino acid sequence <SEQ ID 1408>. Analysis of this protein sequence reveals the following:

| Possible site: 55 | | | | |
|---|---|---|---|---|
| >>> Seems to have no N-terminal signal sequence | | | | |
| | INTEGRAL | Likelihood = −2.76 | Transmembrane | 458-474 (458-474) |
| | INTEGRAL | Likelihood = −2.60 | Transmembrane | 483-499 (482-499) |
| | INTEGRAL | Likelihood = −2.02 | Transmembrane | 429-445 (429-445) |
| | INTEGRAL | Likelihood = −1.28 | Transmembrane | 397-413 (397-413) |
| | INTEGRAL | Likelihood = −0.53 | Transmembrane | 739-755 (738-755) |
| | INTEGRAL | Likelihood = −0.27 | Transmembrane | 356-372 (356-372) |

```
----- Final Results -----
                              bacterial membrane --- Certainty = 0.2105(Affirmative) < succ>
                                bacterial outside --- Certainty = 0.0000(Not Clear) < succ>
                            bacterial cytoplasm --- Certainty = 0.0000(Not Clear) < succ>
```

[2707] The protein has homology with the following sequences in the databases:

| >GP: AAB18717 GB: U38906 ORF42 [Bacteriophage rlt] | | | |
|---|---|---|---|
| Identities = 261/579 (45%), Positives = 359/579 (61%), Gaps = 63/579 (10%) | | | |
| Query: | 184 | MKRLLSDAEKLPAAMGKKFDLSNYADVVEAIHLVQDNMGIAGVAAEEAKTTFSGSLAAMK | 243 |
| | | M+RLL+DA+KL G+K+D+SN++D+ +AIH +Q M I G A+EA TTFSGS +MK | |
| Sbjct: | 1 | MQRLLTDAQKLT--GQKYDISNFSDITQAIHAIQTEMDITGTTAKEASTTFSGSFDSMK | 57 |
| Query: | 244 | SSFTNVMAGLSLGDDIRPALRGLAETTSNFLFGNFIPMVANIFKGLPSAIGTFIGAAAPI | 303 |
| | | ++ +NV+ LSLG D++ L L TTS FLF NFIPMV NIFK LP AI TF+ AA | |
| Sbjct: | 58 | AAMSNVLGNLSLGRDLQGPLNALVSTTSTFLFKNFIPMVGNIFKALPGAISTFVSAAGKE | 117 |
| Query: | 304 | ITSQ-------------------------------------FQGLMSSLG-ISIDLSPIT | 325 |
| | | ++SQ F L+SS+G IS + + | |
| Sbjct: | 118 | LSSQLGNGIGSGFSDFTAKFSSILSPLQGSFQTIVSGLKPVFDSLLSSIGPISTQIMGVF | 177 |
| Query: | 326 | AKFAQIGQNLQ----PVFNGLKTAFSQLPSFFTSIGSAVAPVIDTIISGLARLDFSGFEA | 381 |
| | | +K Q+ N+ PV + L AF QLPS F +I AV P+IDTI SG++RLDFSG +A | |
| Sbjct: | 178 | SKLPQLFSNVISAVIPVISTLSVAFGQLPSLFEAISVAVQPMIDTISSGISRLDFSGIQA | 237 |
| Query: | 382 | LISAILPALQAGFSNFAAIVGPAISGVVDSFVGMWNAAQPLISILSDALMPVFQILGSFL | 441 |
| | | +ISA++PA+ G + I+GP+I +V+SFV MWN+ QPL ++++ ALMP FQ+LG+F+ | |
| Sbjct: | 238 | IISALVPAITTGITTMMGIIGPSIDTLVNSFVKMWNSIQPLATVIAGALMPAFQVLGAFI | 297 |
| Query: | 442 | GGVVKGALMGVSFAFDAVKVAIQLVTPIIDLLVQGLNFVQPVLSVIAEWIGVAIGMFGNL | 501 |
| | | GGV+KGA++ +S FD ++V + +TPII ++ PVL+ +A+W+G AIG F N | |
| Sbjct: | 298 | GGVLKGAMLALSATFDTIRVVVGFLTPIIAAVLAKFQEFAPVLATVAQWVGTAIGFFANF | 357 |
| Query: | 502 | GTAGQGLSAFIKSAWTNIQTAISTAGTIISTVIDYIKLAFSGAGSAVGVLKNIFSLAWMA | 561 |
| | | G AG L I SAW I++ IS+ + I +I+ K F+G GSA G L+++ S AW | |
| Sbjct: | 358 | GAAGTSLKGLITSAWNGIKSIISSVVSGIGGIINTAKAIFTGLGSAGGALRSMISGAWSG | 417 |
| Query: | 562 | MGDAINVAKGIISSVINGIKSAFSSFS-------SLVSSVGSAVNGVIDSISSTIRG--- | 611 |
| | | + I+ G IS INGIKS FSS S++S V S + G+I SSTI G | |
| Sbjct: | 418 | IRSIISSVGGSISGTINGIKSFFSSLGGSGNGLRSVMSGVWSGITGIISGASSTISGIID | 477 |
| Query: | 612 | --------LANIDISGAGAAIMNGFLNGLKSAWGAVKSFVSGIANWIAEHKGPISYDRVL | 663 |
| | | L NID++GAG A+++GF+ GLKS W A K FV GIA+WI +HKGPISYDR + | |
| Sbjct: | 478 | GIKNIFNSLKNIDLAGAGRAVIDGFVGGLKSTWEAGKKFVGGIADWIKDHKGPISYDRKI | 537 |
| Query: | 664 | LKPAGKAIMGGLNTSLIDGFKEVKSNVSGMADDLASTMT | 702 |
| | | L PAG+AIMGG N SL++ FK V+ NVSG+A + S +T | |
| Sbjct: | 538 | LIPAGQAIMGGFNDSLMENFKAVQKNVSGIAKQIQSAIT | 576 |

[2708] An alignment of the GAS and GBS proteins is shown below:

| Identities = 272/701 (38%), Positives = 371/701 (52%), Gaps = 91/701 (12%) | | | |
|---|---|---|---|
| Query: | 1 | MATNLGQAYVQIMPSAKGISGSISKTLDPEASSAGSSAGSLLGGKLIGILGSVIAAAKIG | 60 |
| | | MAT LGQAYVQIMPSA+GISG+ISK LDPEA SAG SAGSL+GG L+ ++G IAAA IG | |
| Sbjct: | 1 | MATELGQAYVQIMPSARGISGAISKQLDPEARSAGLSAGSLIGGNLVKMIGGAIAAAGIG | 60 |
| Query: | 61 | EMVTKAISSSISEGAALQQSLGGVETLFKSNANLVKKYADEAYKTTGLSANAYMESVTGF | 120 |
| | | +M ISS++S GA LQQS GG++TL+K VK +A EAYK G+SAN Y E | |
| Sbjct: | 61 | KM----ISSALSAGADLQQSFGGIDTLYKGAETAVKGFAKEAYKA-GISANTYASQAVSM | 115 |
| Query: | 121 | SASLLQSLGGDTAKAAKVANMAMIDMADNSNKMGTSMESIQYAYQGFAKQNYTMLDNLKL | 180 |
| | | ASL QSLGGD AAK ANMA++DMADNS KMGT + SIQ AYQGFAKQNYTMLDNL+L | |
| Sbjct: | 116 | GASLKQSLGGDAVAAAKAANMAIMDMADNSAKMGTDITSIQMAYQGFAKQNYTMLDNLRL | 175 |
| Query: | 181 | GYGGTQEEMKRLLSDAQKL---TGKKYDISNLSDVYEAIHAIQGKIGITGTTAKEAATTF | 237 |
| | | GYGGT+EEMKRLLSDA+KL GKK+D+SN +DV EAIH +Q +GI G A+EA TTF | |
| Sbjct: | 176 | GYGGTKEEMKRLLSDAEKLPAAMGKKFDLSNYADVVEAIHLVQDNMGIAGVAAEEAKTTF | 235 |
| Query: | 238 | TGSFEAMKAASKNLLGKMALGEDIKPSLKALFDTTSNFVLNNFIPMLTNVFKGFGSVISL | 297 |
| | | +GS AMK++ N++ ++LG+DI+P+L+ L +TTSNF+ NFIPM+ N+FKG S I | |
| Sbjct: | 236 | SGSLAAMKSSFTNVMAGLSLGDDIRPALRGLAETTSNFLFGNFIPMVANIFKGLPSAIGT | 295 |
| Query: | 298 | TFSELIPKIV----GFMQTSGPSLMQSGISFIISFV--------NGFLTAY---PAFLTV | 342 |
| | | P I G M + G S+ S I+ + + NG TA+ P+F T | |
| Sbjct: | 296 | FIGAAAPIITSQFQGLMSSLGISIDLSPITAKFAQIGQNLQPVFNGLKTAFSQLPSFFTS | 355 |
| Query: | 343 | AGKIFTDFVSFVMQSIPGL----LQAGATLVLNLIDGILANLPQIATSAVS-VISSFISM | 397 |
| | | G + ++ + L +A + +L + +N I A+S V+ SF+ M | |
| Sbjct: | 356 | IGSAVAPVIDTIISGLARLDFSGFEALISAILPALQAGFSNFAAIVGPAISGVVDSFVGM | 415 |
| Query: | 398 | LQANYPAI------LKKGFEILSYLVQGI---------------------IARLPDIVIT | 430 |
| | | A P I L F+IL + G+ + + D+++ | |
| Sbjct: | 416 | WNAAQPLISILSDALMPVFQILGSFLGGVVKGALMGVSFAFDAVKVAIQLVTPIIDLLVQ | 475 |
| Query: | 431 | ----VGKLIAILAGAIASNLPKVLALGV--QLLITFVKGILSVIGKINETANNIGEKLIN | 484 |
| | | V +++++A I + LG Q L F+K + I TA I +I+ | |
| Sbjct: | 476 | GLNFVQPVLSVIAEWIGVAIGMFGNLGTAGQGLSAFIKSAWTNIQTAISTAGTIISTVID | 535 |
| Query: | 485 | AIKSI-----------------------DLLSAGRAIMRGFLRGLEDVWGDIQNFVGDIA | 521 |
| | | IK D ++ + I+ + G++ + + V + | |
| Sbjct: | 536 | YIKLAFSGAGSAVGVLKNIFSLAWMAMGDAINVAKGIISSVINGIKSAFSSFSSLVSSVG | 595 |
| Query: | 522 | GWIKDHKGPISYDRRLLI-----PAGNAIMQGLHQGLVDKFKPVKNLVNGMAEEIQSSFG | 576 |
| | | + IS R L AG AIM G GL + VK+ V+G+A I G | |
| Sbjct: | 596 | SAVNGVIDSISSTIRGLANIDISGAGAAIMNGFLNGLKSAWGAVKSFVSGIANWIAEHKG | 655 |
| Query: | 577 | NPQLAFDMDTMVNNGFERIGTLNKNLSSQVTSTDNYTSGNA | 617 |
| | | +++D G +G LN +L + SG A | |
| Sbjct: | 656 | --PISYDRVLLKPAGKAIMGGLNTSLIDGFKEVKSNVSGMA | 694 |

[2709] Based on this analysis, it was predicted that these proteins and their epitopes could be useful antigens for vaccines or diagnostics.

### EXAMPLE 440

[2710] A DNA sequence (GBSx0477) was identified in S. agalactiae <SEQ ID 1409> which encodes the amino acid sequence <SEQ ID 1410>. Analysis of this protein sequence reveals the following:

```
Possible site: 16
>>> Seems to have no N-terminal signal sequence
----- Final Results -----
                            bacterial cytoplasm --- Certainty = 0.2565(Affirmative) < succ>
                              bacterial membrane --- Certainty = 0.0000(Not Clear) < succ>
                                bacterial outside --- Certainty = 0.0000(Not Clear) < succ>
```

[2711] The protein has homology with the following sequences in the GENPEPT database:

| >GP: AAG18637 GB: AY007505 unknown [Streptococcus mitis] | | | |
|---|---|---|---|
| Identities = 64/119 (53%), Positives = 87/119 (72%), Gaps = 2/119 (1%) | | | |
| Query: | 1 | MLKMDEDALVCDLAETYHIYDYKQLPPLKVAVFSLGLREESRINRVISGNRVSFERRILA | 60 |
| | | M++ DEDAL+CDLAETY I+DY+QLP +VAVF+ GLR++SRI ++ ++V FE +LA | |
| Sbjct: | 1 | MIQTDEDALICDLAETYGIFDYRQLPADQVAVFAFGLRDDSRIKLAMTNSKVPFETFLLA | 60 |
| Query: | 61 | GMFDRLGMLIWMKTTDGQKGKNRPEMVSTMF--DNQQKDSEVVSFGSGKDFEETRNNIL | 117 |
| | | G+ DRL L+W KTTDGQKG N+P MV+ + K+S+ + F SG+DFEE R IL | |
| Sbjct: | 61 | GVLDRLSALVWFKTTDGQKGINKPLMVTEELTGKTKAKESKEMIFDSGEDFEEYRQKIL | 119 |

[2712] A related DNA sequence was identified in S. pyogenes <SEQ ID 1411> which encodes the amino acid sequence <SEQ ID 1412>. Analysis of this protein sequence reveals the following:

```
Possible site: 41
>>> Seems to have no N-terminal signal sequence
----- Final Results -----
                            bacterial cytoplasm --- Certainty = 0.2905(Affirmative) < succ>
                              bacterial membrane --- Certainty = 0.0000(Not Clear) < succ>
                                bacterial outside --- Certainty = 0.0000(Not Clear) < succ>
```

[2713] An alignment of the GAS and GBS proteins is shown below:

| Identities = 60/123 (48%), Positives = 82/123 (65%), Gaps = 2/123 (1%) | | | |
|---|---|---|---|
| Query: | 1 | MLKMDEDALVCDLAETYHIYDYKQLPPLKVAVFSLGLREESRINRVISGNRVSFERRILA | 60 |
| | | M+ D+DAL CDLAETY IYDY+QLP +VAVF++GLR SRI +SG + + +LA | |
| Sbjct: | 1 | MIAKDDDALTCDLAETYGIYDYRQLPAYQVAVFAVGLRSNSRIKMALSGETEALDTVLLA | 60 |
| Query: | 61 | GMFDRLGMLIWMKTTDGQKGKNRPEMV--STMFDNQQKDSEVVSFGSGKDFEETRNNILG | 118 |
| | | G++D +L W KT DGQ G+N+P+ V + QK ++V+SF SG+DFE R +LG | |
| Sbjct: | 61 | GIYDNTNLLFWSKTKDGQSGQNKPKSVVEAISGSKSQKANDVISFVSGEDFENARKQLLG | 120 |
| Query: | 119 | FGG | 121 |
| | | G | |
| Sbjct: | 121 | GDG | 123 |

[2714] Based on this analysis, it was predicted that these proteins and their epitopes could be useful antigens for vaccines or diagnostics.

### EXAMPLE 441

[2715] A DNA sequence (GBSx0478) was identified in S. agalactiae <SEQ ID 1413> which encodes the amino acid sequence <SEQ ID 1414>. Analysis of this protein sequence reveals the following:

```
Possible site: 36
>>> Seems to have no N-terminal signal sequence
----- Final Results -----
                            bacterial cytoplasm --- Certainty = 0.2280(Affirmative) < succ>
                              bacterial membrane --- Certainty = 0.0000(Not Clear) < succ>
                                bacterial outside --- Certainty = 0.0000(Not Clear) < succ>
```

[2716] The protein has homology with the following sequences in the GENPEPT database:

| >GP: AAG18636 GB: AY007505 unknown [Streptococcus mitis] | | | |
|---|---|---|---|
| Identities = 40/80 (50%), Positives = 62/80 (77%), Gaps = 1/80 (1%) | | | |
| Query: | 3 | TSSGFEYKIEESRLKNYELVEALADLESNPLSLPKVLRLLLGDQVESLKNHLRASDGTVS | 62 |
| | | TS+GF ++I + RL+NYEL+EA++++++NP LPKV++L+LG++ E LKNH+R +DG V | |
| Sbjct: | 24 | TSTGFPFEITKERLENYELLEAISEVDTNPAVLPKVVKLMLGNKSEDLKNHVRTADGIVP | 83 |
| Query: | 63 | TEALMEEVKEIFES-GQLKK | 81 |
| | | + + E+ EIF S QLKK | |
| Sbjct: | 84 | LDKMGAEISEIFSSQNQLKK | 103 |

[2717] A related DNA sequence was identified in S. pyogenes <SEQ ID 1415> which encodes the amino acid sequence <SEQ ID 1416>. Analysis of this protein sequence reveals the following:

```
Possible site: 56
>>> Seems to have no N-terminal signal sequence
----- Final Results -----
                            bacterial cytoplasm --- Certainty = 0.4365(Affirmative) < succ>
                              bacterial membrane --- Certainty = 0.0000(Not Clear) < succ>
                                bacterial outside --- Certainty = 0.0000(Not Clear) < succ>
```

[2718] An alignment of the GAS and GBS proteins is shown below:

| Identities = 42/75 (56%), Positives = 60/75 (80%) | | | |
|---|---|---|---|
| Query: | 2 | KTSSGFEYKIEESRLKNYELVEALADLESNPLSLPKVLRLLLGDQVESLKNHLRASDGTV | 61 |
| | | KT+SGFEY+I + RLKN+ELVEA+A+ E++P ++ K++ LLLGD +SLK H+R ++G V | |
| Sbjct: | 7 | KTTSGFEYEIPKKRLKNFELVEAIAEEETDPTAVVKIVNLLLGDAAKSLKEHVRDAEGIV | 66 |
| Query: | 62 | STEALMEEVKEIFES | 76 |
| | | EA+ E+KEIFES | |
| Sbjct: | 67 | DVEAIGVEIKEIFES | 81 |

[2719] Based on this analysis, it was predicted that these proteins and their epitopes could be useful antigens for vaccines or diagnostics.

### EXAMPLE 442

[2720] A DNA sequence (GBSx0479) was identified in S. agalactiae <SEQ ID 1417> which encodes the amino acid sequence <SEQ ID 1418>. This protein is predicted to be Structural protein. Analysis of this protein sequence reveals the following:

```
Possible site: 44
>>> Seems to have no N-terminal signal sequence
----- Final Results -----
                            bacterial cytoplasm --- Certainty = 0.3461(Affirmative) < succ>
                              bacterial membrane --- Certainty = 0.0000(Not Clear) < succ>
                                bacterial outside --- Certainty = 0.0000(Not Clear) < succ>
```

[2721] The protein has homology with the following sequences in the GENPEPT database:

| >GP: AAG18635 GB: AY007505 unknown [Streptococcus mitis] | | | |
|---|---|---|---|
| Identities = 114/183 (62%), Positives = 142/183 (77%) | | | |
| Query: | 2 | VANSSNVTTAKPKIGGAIYTAPLGTELPKDTASELNEAFKSLGYISEDGLSNEDKRESEE | 61 |
| | | +A +NVTTAKPKIGGA+Y+APLGT LP D ++L++AF++LGYIS+DG++N + ESE | |
| Sbjct: | 1 | MATEANVTTAKPKIGGAVYSAPLGTALPTDATTKLDQAFEALGYISDDGMTNSNSPESEN | 60 |
| Query: | 62 | IQAWGGDVVESAQKSKADKFTYTLIEALNIEVLKEIYGKDNVTGDLKTGITVKSNSKPLE | 121 |
| | | I+AWGG VV S QK K D F Y LIEALN+ VLKE+YG DNV+GDL +GIT+K+NSK L | |
| Sbjct: | 61 | IKAWGGVVVSSVQKEKTDTFKYMLIEALNLHVLKEVYGPDNVSGDLSSGITIKANSKELP | 120 |
| Query: | 122 | EHCLVIEMILKNNTVKRIVIPKGKVSEVGEIKYVDNEAAGYETTLQAFPDAEGNTHYEYI | 181 |
| | | HCLVIE +LK +KRIVIP GKV+ + EI Y D GY TT+ AFP+A +THYEYI | |
| Sbjct: | 121 | HHCLVIETVLKGGVLKRIVIPSGKVTAIDEITYNDGSVLGYGTTVTAFPNAADDTHYEYI | 180 |
| Query: | 182 | KGA | 184 |
| | | KGA | |
| Sbjct: | 181 | KGA | 183 |

[2722] A related DNA sequence was identified in S. pyogenes <SEQ ID 1419> which encodes the amino acid sequence <SEQ ID 1420>. Analysis of this protein sequence reveals the following:

```
Possible site: 13
>>> Seems to have no N-terminal signal sequence
----- Final Results -----
                            bacterial cytoplasm --- Certainty = 0.2379(Affirmative) < succ>
                              bacterial membrane --- Certainty = 0.0000(Not Clear) < succ>
                                bacterial outside --- Certainty = 0.0000(Not Clear) < succ>
```

[2723] An alignment of the GAS and GBS proteins is shown below:

| Identities = 119/182 (65%), Positives = 142/182 (77%) | | | |
|---|---|---|---|
| Query: | 4 | NSSNVTTAKPKIGGAIYTAPLGTELPKDTASELNEAFKSLGYISEDGLSNEDKRESEEIQ | 63 |
| | | ++ NVT+AKPK GGAIY+APLGTELPKD SELN FK+LGY+SEDG+ NED R SE I+ | |
| Sbjct: | 6 | DTKNVTSAKPKTGGAIYSAPLGTELPKDAKSELNTKFKNLGYVSEDGVVNEDTRSSENIK | 65 |
| Query: | 64 | AWGGDVVESAQKSKADKFTYTLIEALNIEVLKEIYGKDNVTGDLKTGITVKSNSKPLEEH | 123 |
| | | AWGGD+V + Q K DKFTY LIE+LN+EVLKE+YG NVTGDL GI +KSNSK LE H | |
| Sbjct: | 66 | AWGGDIVGAVQTEKEDKFTYKLIESLNVEVLKEVYGAVNVTGDLSGGIQIKSNSKELEAH | 125 |
| Query: | 124 | CLVIEMILKNNTVKRIVIPKGKVSEVGEIKYVDNEAAGYETTLQAFPDAEGNTHYEYIKG | 183 |
| | | +V++MI+ +KRIV+P KV EVGEIKYVD E GYETTL+ FPD +G+TH EYI | |
| Sbjct: | 126 | VIVVDMIMNGGILKRIVLPNAKVDEVGEIKYVDGEVVGYETTLKCFPDKDGDTHREYIVK | 185 |
| Query: | 184 | AG | 185 |
| | | G | |
| Sbjct: | 186 | PG | 187 |

[2724] Based on this analysis, it was predicted that these proteins and their epitopes could be useful antigens for vaccines or diagnostics.

### EXAMPLE 443

[2725] A DNA sequence (GBSx0480) was identified in S. agalactiae <SEQ ID 1421> which encodes the amino acid sequence <SEQ ID 1422>. Analysis of this protein sequence reveals the following:

```
Possible site: 58
>>> Seems to have no N-terminal signal sequence
----- Final Results -----
                            bacterial cytoplasm --- Certainty = 0.2214(Affirmative) < succ>
                              bacterial membrane --- Certainty = 0.0000(Not Clear) < succ>
                                bacterial outside --- Certainty = 0.0000(Not Clear) < succ>
```

[2726] The protein has homology with the following sequences in the GENPEPT database:

| >GP: AAB18710 GB: U38906 ORF35 [Bacteriophage rlt] | | | |
|---|---|---|---|
| Identities = 52/78 (66%), Positives = 66/78 (83%) | | | |
| Query: | 1 | MSKFKFKLNKAGVAELMKSSEMQQVLTTKATAIRERCGDGYAQDIHVGKNRANAMVSAKT | 60 |
| | | M+K FKLN++GVA +MKS EMQ +L KA+A+++RCG GY QD+HVGKNRANAMV A+T | |
| Sbjct: | 1 | MAKNLFKLNRSGVASMMKSPEMQAILKEKASAVKQRCGPGYGQDMHVGKNRANAMVFAET | 60 |
| Query: | 61 | IKAKKDNSKNNTLLKAVR | 78 |
| | | +AK+DN KNNT+LKAVR | |
| Sbjct: | 61 | YQAKRDNMKNNTILRAVR | 78 |

[2727] A related DNA sequence was identified in S. pyogenes <SEQ ID 1423> which encodes the amino acid sequence <SEQ ID 1424>. Analysis of this protein sequence reveals the following:

```
Possible site: 54
>>> Seems to have no N-terminal signal sequence
----- Final Results -----
                            bacterial cytoplasm --- Certainty = 0.2446(Affirmative) < succ>
                              bacterial membrane --- Certainty = 0.0000(Not Clear) < succ>
                                bacterial outside --- Certainty = 0.0000(Not Clear) < succ>
```

[2728] An alignment of the GAS and GBS proteins is shown below:

| Identities = 75/78 (96%), Positives = 76/78 (97%) | | | |
|---|---|---|---|
| Query: | 1 | MSKFKFKLNKAGVASLMKSSEMQQVLTTKATAIRERCGDGYAQDIHVGKNRANAMVSAKT | 60 |
| | | MSKFKFKLN+AGVAELMKSSEMQQVLTTKATAIRERCGDGY QDIHVGKNRANAMVS KT | |
| Sbjct: | 1 | MSKFKFKLNRAGVAELMKSSEMQQVLTTKATAIRERCGDGYVQDIHVGKNRANAMVSTKT | 60 |
| Query: | 61 | IKAKKDNSKNNTLLKAVR | 78 |
| | | IKAKKDNSKNNTLLKAVR | |
| Sbjct: | 61 | IKAKKDNSKNNTLLKAVR | 78 |

[2729] Based on this analysis, it was predicted that these proteins and their epitopes could be useful antigens for vaccines or diagnostics.

### EXAMPLE 444

[2730] A DNA sequence (GBSx0481) was identified in S. agalactiae <SEQ ID 1425> which encodes the amino acid sequence <SEQ ID 1426>. Analysis of this protein sequence reveals the following:

```
Possible site: 38
>>> Seems to have no N-terminal signal sequence
----- Final Results -----
                            bacterial cytoplasm --- Certainty = 0.2888(Affirmative) < succ>
                              bacterial membrane --- Certainty = 0.0000(Not Clear) < succ>
                                bacterial outside --- Certainty = 0.0000(Not Clear) < succ>
```

[2731] The protein has homology with the following sequences in the GENPEPT database:

| >GP: AAB18709 GB: U38906 ORF34 (Bacteriophage rlt] | | | |
|---|---|---|---|
| Identities = 41/59 (69%), Positives = 45/59 (75%) | | | |
| Query: | 1 | MTGKKVEYILAIPKGDKHDWEDKEVCFFDKKWRTVGLALEGIEELIPLEWNKKVMVERY | 59 |
| | | +TGKK Y LAIPK D HDWE+K+V FF K WRT G LEGIE LIPL+WNKKV VE Y | |
| Sbjct: | 56 | LTGKKAIYTLAIPKKDTHDWENKKVRFFGKTWRTFGEPLEGIEGLIPLDWNKKVTVEHY | 114 |

[2732] A related DNA sequence was identified in S. pyogenes <SEQ ID 1427> which encodes the amino acid sequence <SEQ ID 1428>. Analysis of this protein sequence reveals the following:

```
Possible site: 39
>>> Seems to have no N-terminal signal sequence
----- Final Results -----
                            bacterial cytoplasm --- Certainty = 0.2779(Affirmative) < succ>
                              bacterial membrane --- Certainty = 0.0000(Not Clear) < succ>
                                bacterial outside --- Certainty = 0.0000(Not Clear) < succ>
```

[2733] An alignment of the GAS and GBS proteins is shown below:

| Identities = 51/60 (85%), Positives = 57/60 (95%) | | | |
|---|---|---|---|
| Query: | 1 | MTGKKVEYILAIPKGDKHDWEDKEVCFFDKKWRTVGLALEGIEELIPLEWNKKVMVERYE | 60 |
| | | +TGKKVEY+LAIPKGD+HDWE+KEV FF KKWRTVG+ LEGIEELIPL+WNKKVMVERYE | |
| Sbjct: | 50 | LTGKKVEYVLAIPKGDEHDWENKEVRFFGKKWRTVGIPLEGIEELIPLDWNKKVMVERYE | 109 |

[2734] Based on this analysis, it was predicted that these proteins and their epitopes could be useful antigens for vaccines or diagnostics.

### EXAMPLE 445

[2735] A DNA sequence (GBSx0482) was identified in S. agalactiae <SEQ ID 1429> which encodes the amino acid sequence <SEQ ID 1430>. Analysis of this protein sequence reveals the following:

```
Possible site: 25
>>> Seems to have no N-terminal signal sequence
----- Final Results -----
                            bacterial cytoplasm --- Certainty = 0.2770(Affirmative) < succ>
                              bacterial membrane --- Certainty = 0.0000(Not Clear) < succ>
                                bacterial outside --- Certainty = 0.0000(Not Clear) < succ>
```

[2736] The protein has homology with the following sequences in the GENPEPT database:

| >GP: AAB18708 GB: U38906 ORF33 [Bacteriophage r1t] | | | |
|---|---|---|---|
| Identities = 89/130 (68%), Positives = 106/130 (81%), Gaps = 1/130 (0%) | | | |
| Query: | 1 | MTNFATTDDVILLWRQLSVDEIKRAEALLETVSDTLRLEASKVGKNLDEMILETP-YFAT | 59 |
| | | M FAT DD+ +LWR L DE +RAE LLE VSD+LR EA KVG++L MI E P YFA+ | |
| Sbjct: | 1 | MNPFATVDDLTMLWRPLKGDEKERAEKLLEIVSDSLREEADKVGRDLYAMIAEKPSYFAS | 60 |
| Query: | 60 | VLKSVTVDIVARTLMTATQGEPMSQESQSALGYTWSGTYLVPGGGLFIKDSELKRLGLKK | 119 |
| | | V+KSVTVDIVARTLMT+T EPM+Q ++SALGY+ SG+YLVPGGGLFIK+SEL RLGLKK | |
| Sbjct: | 61 | VVKSVTVDIVARTLMTSTDQEPMTQTTESALGYSVSGSYLVPGGGLFIKNSELSRLGLKK | 120 |
| Query: | 120 | QRYGGIELYG | 129 |
| | | QR+G I+ YG | |
| Sbjct: | 121 | QRFGVIDFYG | 130 |

[2737] A related DNA sequence was identified in S. pyogenes <SEQ ID 1431> which encodes the amino acid sequence <SEQ ID 1432>. Analysis of this protein sequence reveals the following:

```
Possible site: 37
>>> Seems to have no N-terminal signal sequence
----- Final Results -----
                            bacterial cytoplasm --- Certainty = 0.2061(Affirmative) < succ>
                              bacterial membrane --- Certainty = 0.0000(Not Clear) < succ>
                                bacterial outside --- Certainty = 0.0000(Not Clear) < succ>
```

[2738] An alignment of the GAS and GBS proteins is shown below:

| Identities = 116/138 (84%), Positives = 129/138 (93%) | | | |
|---|---|---|---|
| Query: | 3 | NFATTDDVILLWRQLSVDEIKRAEALLETVSDTLRLEASKVGKNLDEMILETPYFATVLK | 62 |
| | | NFATTDDVILLWR LSVDE+KRA ALL+ VSDTLR+EA KVGK+LD+ +++ PYF V+K | |
| Sbjct: | 3 | NFATTDDVILLWRPLSVDELKRANALLKVVSDTLRMEADKVGKDLDKTMVDKPYFVNVIK | 62 |
| Query: | 63 | SVTVDIVARTLMTATQGEPMSQESQSALGYTWSGTYLVPGGGLFIKDSELKRLGLKKQRY | 122 |
| | | SVTVDIVARTLMT+T+GEPM+QESQSALGYTWSGTYLVPGGGLFIKDSELKRLGLKKQRY | |
| Sbjct: | 63 | SVTVDIVARTLMTSTRGEPMAQESQSALGYTWSGTYLVPGGGLFIKDSELKRLGLKKQRY | 122 |
| Query: | 123 | GGIELYGEIERNNSYFSR | 140 |
| | | GGIELYGEIER+NS FSR | |
| Sbjct: | 123 | GGIELYGEIERDNSCFSR | 140 |

[2739] Based on this analysis, it was predicted that these proteins and their epitopes could be useful antigens for vaccines or diagnostics.

### EXAMPLE 446

[2740] A DNA sequence (GBSx0483) was identified in S. agalactiae <SEQ ID 1433> which encodes the amino acid sequence <SEQ ID 1434>. This protein is predicted to be Structural protein. Analysis of this protein sequence reveals the following:

```
Possible site: 30
>>> Seems to have no N-terminal signal sequence
----- Final Results -----
                            bacterial cytoplasm --- Certainty = 0.3015(Affirmative) < succ>
                              bacterial membrane --- Certainty = 0.0000(Not Clear) < succ>
                                bacterial outside --- Certainty = 0.0000(Not Clear) < succ>
```

[2741] The protein has homology with the following sequences in the GENPEPT database:

| >GP: AAB18706 GB: U38906 Structural protein [Bacteriophage r1t] | | | |
|---|---|---|---|
| Identities = 132/296 (44%), Positives = 189/296 (63%), Gaps = 8/296 (2%) | | | |
| Query: | 5 | IKAGTLFKPELVTEIMSKVKGHSTLAKLSGQTPIPFNGVEQFVFNLDGNAQIVGEGEQKL | 64 |
| | | + GTLF P LVT+++SKV G S++A+LS Q PIPFNG + F F +D +V E +K | |
| Sbjct: | 3 | LNKGTLFDPTLVTDLISKVAGKSSIARLSAQKPIPFNGEKVFTFTMDSEIDVVAESGKKT | 62 |
| Query: | 65 | GNTAKVTSKIIKPLKFVYQARMTDEFKYASEEKRLNFLKHYADGFAKKMAEAFDIAAIHG | 124 |
| | | + + + P+K Y AR++DEF YAS+E+++N L+ + DGFAKK+A D+ A HG | |
| Sbjct: | 63 | HGGVTLAPQTMVPIKVEYGARISDEFMYASDEEKINILQEFNDGFAKKVARGIDLMAFHG | 122 |
| Query: | 125 | LEPRTMTDASFKATNSFDGVVTGNVIKYEADK--IDDN--IDAAVTTIVANGNDVTGIAL | 180 |
| | | + PR T ++ TN FD VT K EA + D N I+ AV + DVTGIA+ | |
| Sbjct: | 123 | VNPRLGTASAVIGTNHFDSKVTQ---KVEAPRGIADPNGAIENAVELLTGVDADVTGIAI | 179 |
| Query: | 181 | SPQAGQDMSKRKDKFDNVMYPEFRFGQRPSNFFNMTLDINKTLTMKGGTAKDDHAIVGDF | 240 |
| | | +P ++K+KD DN ++PE ++G P + +D+NKT++ T + D AI+GDF | |
| Sbjct: | 180 | NPSFRSALAKQKDLQDNALFPELKWGATPDTINGLPVDVNKTVSDMSLTQR-DRAIIGDF | 238 |
| Query: | 241 | QNMFKWGYAENIPMEIIEYGDPDGSGRDLKAYNEILLRTEAFIGWGILDEKAFSRV | 296 |
| | | N FKWGYA+ +P+E+I+YGDPD SG DLK YN++ +R E F+GWGILD F+RV | |
| Sbjct: | 239 | ANGFKWGYAKEVPLEVIQYGDPDNSGLDLKGYNQVYIRAELFLGWGILDATKFARV | 294 |

[2742] A related DNA sequence was identified in S. pyogenes <SEQ ID 1435> which encodes the amino acid sequence <SEQ ID 1436>. Analysis of this protein sequence reveals the following:

```
Possible site: 30
>>> Seems to have no N-terminal signal sequence
----- Final Results -----
                            bacterial cytoplasm --- Certainty = 0.2772(Affirmative) < succ>
                              bacterial membrane --- Certainty = 0.0000(Not Clear) < succ>
                                bacterial outside --- Certainty = 0.0000(Not Clear) < succ>
```

[2743] An alignment of the GAS and GBS proteins is shown below:

| Identities = 133/298 (44%), Positives = 187/298 (62%), Gaps = 2/298 (0%) | | | |
|---|---|---|---|
| Query: | 1 | MAESIKAGTLFKPELVTEIMSKVKGHSTLAKLSGQTPIPFNGVEQFVFNLDGNAQIVGEG | 60 |
| | | M +LF LV+++++KVKGHS+LAKLS Q PIPFNG ++F F LD + +V E | |
| Sbjct: | 1 | MGTETSKASLFDKHLVSDLINKVKGHSSLAKLSSQKPIPFNGSKEFTFTLDSDIDVVAEN | 60 |
| Query: | 61 | EQKLGNTAKVTSKIIKPLKFVYQARMTDEFKYASEEKRLNFLKHYADGFAKKMAEAFDIA | 120 |
| | | +K + I P+K Y AR++DEF YA+EE++++ LK + +GFAKK+A D+ | |
| Sbjct: | 61 | GKKTHGGLSLEPVTIVPIKVEYGARLSDEFLYATEEEKIDILKAFNEGFAKKLARGIDLM | 120 |
| Query: | 121 | AIHGLEPRTMTDASFKATNSFDGVVTGNVIKYEADKIDDNIDAAVTTIVANGNDVTGIAL | 180 |
| | | A+HG+ PRT + TN FD VT V E++ D NI+AAV I + VTG+A+ | |
| Sbjct: | 121 | AMHGINPRTKKASDVIGTNHFDSKVTQVVKFTESEDADANIEAAVNLIQGSEGVVTGLAM | 180 |
| Query: | 181 | SPQAGQDMSK-RKDKFDNVMYPEFRFGQRPSNFFNMTLDINKTLTMKGGTAKD-DHAIVG | 238 |
| | | + ++K + MYPE +G P + + +N T+ A+ D I+G | |
| Sbjct: | 181 | DTEFSTALAKVTNGEMGPKMYPELAWGANPDSINGLKSSVNTTVGAGADEAESKDLVIIG | 240 |
| Query: | 239 | DFQNMFKWGYAENIPMEIIEYGDPDGSGRDLKAYNEILLRTEAFIGWGILDEKAFSRV | 296 |
| | | DF++MFKWGYA+ IPMEII+YGDPD SG+DLK YN+I LR EA+IGWGILD K+F+RV | |
| Sbjct: | 241 | DFESMFKWGYAKQIPMEIIKYGDPDNSGKDLKGYNQIYLRAEAYIGWGILDAKSFARV | 298 |

[2744] Based on this analysis, it was predicted that these proteins and their epitopes could be useful antigens for vaccines or diagnostics.

### EXAMPLE 447

[2745] A DNA sequence (GBSx0484) was identified in S. agalactiae <SEQ ID 1437> which encodes the amino acid sequence <SEQ ID 1438>. Analysis of this protein sequence reveals the following:

```
Possible site: 61
>>> Seems to have no N-terminal signal sequence
----- Final Results -----
                            bacterial cytoplasm --- Certainty = 0.2224(Affirmative) < succ>
                              bacterial membrane --- Certainty = 0.0000(Not Clear) < succ>
                                bacterial outside --- Certainty = 0.0000(Not Clear) < succ>
```

[2746] A related GBS nucleic acid sequence <SEQ ID 9659> which encodes amino acid sequence <SEQ ID 9660> was also identified.

[2747] The protein has homology with the following sequences in the GENPEPT database:

| >GP: AAB18705 GB: U38906 ORF30 [Bacteriophage rlt] | | | |
|---|---|---|---|
| Identities = 64/158 (40%), Positives = 101/158 (63%), Gaps = 8/158 (5%) | | | |
| Query: | 43 | MSEFKVIETQEELDTIVKARIARERE----KYQDYDQLKTRVEELETENSSLQTALNDAK | 98 |
| | | MSE + +TQEEL+ I++ R+AR++E + DYD+LKT++ LE +N++ Q + ++K | |
| Sbjct: | 1 | MSENNLPKTQEELNQIIETRLARQKETIEANFADYDELKTKIAALEADNTAYQATIEESK | 60 |
| Query: | 99 | SNTDSYTEKITTLENQIAGYEAANLRTKVALQYGLPIDLANRLQGDDEDGLKVDAERLAS | 158 |
| | | S + ++ E QI+GY+ L+ +A++ GLP+DLA+RL GDDE+ LK DAER + | |
| Sbjct: | 61 | S----WEQEKADYEKQISGYKTTQLKQSIAIKAGLPLDLADRLSGDDEESLKADAERFSG | 116 |
| Query: | 159 | FIKPSQPQPPTKSNEPIITDQKEAGWIEMARNLVNKGE | 196 |
| | | FIKP P P K EP + D K+ + ++ L +GE | |
| Sbjct: | 117 | FIKPKTPPAPLKDVEPNLGDGKDGAYRKLVDGLKTEGE | 154 |

[2748] A related DNA sequence was identified in S. pyogenes <SEQ ID 1439> which encodes the amino acid sequence <SEQ ID 1440>. Analysis of this protein sequence reveals the following:

```
Possible site: 59
>>> Seems to have no N-terminal signal sequence
----- Final Results -----
                            bacterial cytoplasm --- Certainty = 0.3476(Affirmative) < succ>
                              bacterial membrane --- Certainty = 0.0000(Not Clear) < succ>
                                bacterial outside --- Certainty = 0.0000(Not Clear) < succ>
```

[2749] An alignment of the GAS and GBS proteins is shown below:

| Identities = 128/149 (85%), Positives = 136/149 (90%) | | | |
|---|---|---|---|
| Query: | 43 | MSEFKVIETQEELDTIVKARIAREREKYQDYDQLKTRVEELETENSSLQTALNDAKSNTD | 102 |
| | | MSEFKVIETQEELDTIVKARIAREREKYQDYDQLKTRVEELETENSSLQTALNDAKSNTD | |
| Sbjct: | 1 | MSEFKVIETQEELDTIVKARIAREREKYQDYDQLKTRVEELETENSSLQTALNDAKSNTD | 60 |
| Query: | 103 | SYTEKITTLENQIAGYEAANLRTKVALQYGLPIDLANRLQGDDEDGLKVDAERLASFIKP | 162 |
| | | SYTE+I+TL+NQIA YE ANLRTKVALQYGLPIDLA+RLQGDDEDGLKVDAERLASFIKP | |
| Sbjct: | 61 | SYTEEISTLKNQIADYETANLRTKVALQYGLPIDLADRLQGDDEDGLKVDAERLASFIKP | 120 |
| Query: | 163 | SQPQPPTKSNEPIITDQKEAGWIEMARNL | 191 |
| | | SQPQPP KSNEP I +A + + + L | |
| Sbjct: | 121 | SQPQPPAKSNEPNIDSNADANYRALVQGL | 149 |

[2750] Based on this analysis, it was predicted that these proteins and their epitopes could be useful antigens for vaccines or diagnostics.

### EXAMPLE 448

[2751] A DNA sequence (GBSx0485) was identified in S. agalactiae <SEQ ID 1441> which encodes the amino acid sequence <SEQ ID 1442>. Analysis of this protein sequence reveals the following:

```
Possible site: 56
>>> Seems to have no N-terminal signal sequence
----- Final Results -----
                            bacterial cytoplasm --- Certainty = 0.2888(Affirmative) < succ>
                              bacterial membrane --- Certainty = 0.0000(Not Clear) < succ>
                                bacterial outside --- Certainty = 0.0000(Not Clear) < succ>
```

[2752] The protein has homology with the following sequences in the GENPEPT database:

| >GP: AAB18704 GB: U38906 ORF29 [Bacteriophage rlt] | | | |
|---|---|---|---|
| Identities = 322/461 (69%), Positives = 383/461 (82%) | | | |
| Query: | 8 | KLGNQRPTQSVNLHFAKTLAHEAINYYKKTGLSCYLWQENMLIPMMAINEDNLWVHQKYG | 67 |
| | | + GNQ PTQSV L F +T EAI Y+K+ CY WQ+N+L +MAI+ED LW HQK+G | |
| Sbjct: | 6 | RFGNQYPTQSVILPFTETKYQEAIEIYEKSKHECYPWQKNLLKEVMAIDEDGLWTHQKFG | 65 |
| Query: | 68 | YAIPRRNGKTEVVYILELWALHKGLKILHTAHRISTSHSSFEKVKKYLEMSGYVDGEDFI | 127 |
| | | Y+IPRRNGKTE+VYILELW+L +GL ILHTAHRISTSHSS+EK+KKYLE SGYV+GEDF | |
| Sbjct: | 66 | YSIPRRNGKTEIVYILELWSLVQGLSILHTAHRISTSHSSYEKLKKYLEDSGYVEGEDFK | 125 |
| Query: | 128 | SNKAKGQERIEFKSSGSVIQFRTRTSNGGLGEGFDLLIIDEAQEYTAEQESALKYTVTDS | 187 |
| | | S KAKGQER+E SG VIQFRTRTS+GGLGEGFD+L+IDEAQEYT EQESALKYTVTDS | |
| Sbjct: | 126 | SIKAKGQERLELIESGGVIQFRTRTSSGGLGEGFDILVIDEAQEYTTEQESALKYTVTDS | 185 |
| Query: | 188 | DNPMTIMCGTPPTMVSTGTVFESYRKECLKGDRRYSGWAEWSVDEMQPIHDVKSWYVANP | 247 |
| | | DNPMTIMCGTPPT VS+GTVF +YR + G +YSGWAEWSV++++ IHDV++WY +NP | |
| Sbjct: | 186 | DNPMTIMCGTPPTPVSSGTVFTNYRDNTIAGKAKYSGWAEWSVEDVKDIHDVEAWYNSNP | 245 |
| Query: | 248 | SMGYHLNERKIEAELGEDEIDHNIQRLGYWPSFNQKSVISEKEWAKLKVEQVPELKSKLF | 307 |
| | | SMGYHLNERKIEAELGED++DHN+QRLGYWP +NQKSVISE+EW LKV ++P +K KLF | |
| Sbjct: | 246 | SMGYHLNERKIEAELGEDKLDHNVQRLGYWPKYNQKSVISEQEWNALKVNRLPVIKGKLF | 305 |
| Query: | 308 | VGIKFGQDGNNVSLSIAARASENKVFVEAIDCLSVRNGTQWIINFLKSADIAKVVVDGAS | 367 |
| | | VGIK+G DG NV++SIA + KVFVE IDC S+RNG QWIINFLK AD+ KVV+DG S | |
| Sbjct: | 306 | VGIKYGNDGANVAMSIAVKTLSGKVFVETIDCQSIRNGNQWIINFLKKADVEKVVIDGQS | 365 |
| Query: | 368 | GQELLAQEMREHGLKKPELPKVAEIITANTMWEQGIMQETICHNDQPSLTAVVTNCEKRQ | 427 |
| | | GQ +L EM++ LK+P LP V EII AN++WEQGI Q+ CH+ QPSL+ VVTNC+KR | |
| Sbjct: | 366 | GQSILTSEMKDFKLKEPILPTVKEIINANSLWEQGIFQKNFCHSGQPSLSTVVTNCDKRN | 425 |
| Query: | 428 | IGSNGGFGYKSLYDDRDISLMDSALLAHWICYTTKPKRKQR | 468 |
| | | IG++GGFGYKS +DD DISLMDSALLAHW C KPK+KQ+ | |
| Sbjct: | 426 | IGTSGGFGYKSQFDDMDISLMDSALLAHWACSNNKPKKKQQ | 466 |

[2753] A related DNA sequence was identified in S. pyogenes <SEQ ID 1443> which encodes the amino acid sequence <SEQ ID 1444>. Analysis of this protein sequence reveals the following:

```
Possible site: 32
>>> Seems to have no N-terminal signal sequence
----- Final Results -----
                            bacterial cytoplasm --- Certainty = 0.3133(Affirmative) < succ>
                              bacterial membrane --- Certainty = 0.0000(Not Clear) < succ>
                                bacterial outside --- Certainty = 0.0000(Not Clear) < succ>
```

[2754] An alignment of the GAS and GBS proteins is shown below:

| Identities = 437/471 (92%), Positives = 459/471 (96%) | | | |
|---|---|---|---|
| Query: | 1 | MVTKTKAKLGNQRPTQSVNLHFAKTLAHEAINYYKKTGLSCYLWQENMLIPMMAINEDNL | 60 |
| | | MVTKTK KLGNQRPTQSVNLHFAK+LAHEAINYYKKTGLSCY WQ NMLIP+MAI+E+ L | |
| Sbjct: | 6 | MVTKTKTKLGNQRPTQSVNLHFAKSLAHEAINYYKKTGLSCYPWQVNMLIPIMAIDENGL | 65 |
| Query: | 61 | WVHQKYGYAIPRRNGKTEVVYILELWALHKGLKILHTAHRISTSHSSFEKVKKYLEMSGY | 120 |
| | | WVHQKYGYAIPRRNGKTEVVYI++LWALHKGLKILHTAHRISTSH+SFEKVKKYLEMSGY | |
| Sbjct: | 66 | WVHQKYGYAIPRRNGKTEVVYIVQLWALHKGLKILHTAHRISTSHASFEKVKKYLEMSGY | 125 |
| Query: | 121 | VDGEDFISNKAKGQERIEFKSSGSVIQFRTRTSNGGLGEGFDLLIIDEAQEYTAEQESAL | 180 |
| | | VDGEDFISNKAKGQERIEFK+SG+VIQFRTRTSNGGLGEGFDLLIIDEAQEYT+EQESAL | |
| Sbjct: | 126 | VDGEDFISNKAKGQERIEFKASGAVIQFRTRTSNGGLGEGFDLLIIDEAQEYTSEQESAL | 185 |
| Query: | 181 | KYTVTDSDNPMTIMCGTPPTMVSTGTVFESYRKECLKGDRRYSGWAEWSVDEMQPIHDVK | 240 |
| | | KYTVTDSDNPMTIMCGTPPTMVSTGTVFE+YRK+CLKG++RYSGWAEWSV EM I+DV | |
| Sbjct: | 186 | KYTVTDSDNPMTIMCGTPPTMVSTGTVFEAYRKDCLKGNKRYSGWAEWSVPEMVKINDVS | 245 |
| Query: | 241 | SWYVANPSMGYHLNERKIEAELGEDEIDHNIQRLGYWPSFNQKSVISEKEWAKLKVEQVP | 300 |
| | | SWY++NPSMG+HLNERKIEAELGEDEIDHNIQRLGYWPSFNQKSVISEKEWAKLKVEQVP | |
| Sbjct: | 246 | SWYISNPSMGFHLNERKIEAELGEDEIDHNIQRLGYWPSFNQKSVISEKEWAKLKVEQVP | 305 |
| Query: | 301 | ELKSKLFVGIKFGQDGNNVSLSIAARASENKVFVEAIDCLSVRNGTQWIINFLKSADIAK | 360 |
| | | ELKSKLFVGIKFGQDGNNVSLSIAAR SENKVFVE IDCLSVRNGTQWIINFLKSADIAK | |
| Sbjct: | 306 | ELKSKLFVGIKFGQDGNNVSLSIAARTSENKVFVETIDCLSVRNGTQWIINFLKSADIAK | 365 |
| Query: | 361 | VVVDGASGQELLAQEMREHGLKKPELPKVAEIITANTMWEQGIMQETICHNDQPSLTAVV | 420 |
| | | VV+DGASGQELLAQEM++ GLKKPELPKVAEIITAN MWEQGIMQETICH+DQPSLTAVV | |
| Sbjct: | 366 | VVIDGASGQELLAQEMKDQGLKKPELPKVAEIITANMMWEQGIMQETICHSDQPSLTAVV | 425 |
| Query: | 421 | TNCEKRQIGSNGGFGYKSLYDDRDISLMDSALLAHWICYTTKPKRKQRTSC | 471 |
| | | TNCEKRQIGSNGGFGYKSLYDDRDISLMDSALLAHWICYTTKPKRKQRTSC | |
| Sbjct: | 426 | TNCEKRQIGSNGGFGYKSLYDDRDISLMDSALLAHWICYTTKPKRKQRTSC | 476 |

[2755] Based on this analysis, it was predicted that these proteins and their epitopes could be useful antigens for vaccines or diagnostics.

### EXAMPLE 449

[2756] A DNA sequence (GBSx0486) was identified in S. agalactiae <SEQ ID 1445> which encodes the amino acid sequence <SEQ ID 1446>. Analysis of this protein sequence reveals the following:

```
Possible site: 32
>>> Seems to have no N-terminal signal sequence
----- Final Results -----
                            bacterial cytoplasm --- Certainty = 0.2745(Affirmative) < succ>
                              bacterial membrane --- Certainty = 0.0000(Not Clear) < succ>
                                bacterial outside --- Certainty = 0.0000(Not Clear) < succ>
```

[2757] The protein has no significant homology with any sequences in the GENPEPT database.

[2758] No corresponding DNA sequence was identified in S. pyogenes.

[2759] Based on this analysis, it was predicted that this protein and its epitopes, could be useful antigens for vaccines or diagnostics.

### EXAMPLE 450

[2760] A DNA sequence (GBSx0487) was identified in S. agalactiae <SEQ ID 1447> which encodes the amino acid sequence <SEQ ID 1448>. Analysis of this protein sequence reveals the following:

```
Possible site: 32
>>> Seems to have no N-terminal signal sequence
----- Final Results -----
                            bacterial cytoplasm --- Certainty = 0.2568(Affirmative) < succ>
                              bacterial membrane --- Certainty = 0.0000(Not Clear) < succ>
                                bacterial outside --- Certainty = 0.0000(Not Clear) < succ>
```

[2761] The protein has homology with the following sequences in the GENPEPT database:

| >GP: AAB18703 GB: U38906 ORF28 [Bacteriophage r1t] | | | |
|---|---|---|---|
| Identities = 124/250 (49%), Positives = 164/250 (65%), Gaps = 3/250 (1%) | | | |
| Query: | 2 | VDDVLPKLLKSVQQDFEKHFGKSEVVAKAFAELQAKKATYKTVNEFAVEVGRLLSLALAN | 61 |
| | | ++D+LP LL+ + QDF++ S+ + ++ L+ KKATY NEF VEVG++LS L | |
| Sbjct: | 1 | MEDILPPLLEKINQDFDERAANSKKLKQSMELLKTKKATYIQANEFGVEVGQILSDVLGT | 60 |
| Query: | 62 | SVISDELPDGKMYYNIANRLVNDTLRHNYKLISDYAGDVQQNLNKQAKISLKIQRPPLNQ | 121 |
| | | V D LPDGKMY+NIA+RL+N L+ N+ LIS Y+ DVQ LN+ A LK Q P LNQ | |
| Sbjct: | 61 | HVTVDVLPDGKMYFNIADRLLNSILKKNFDLISGYSTDVQSELNQLAGFKLKSQVPELNQ | 120 |
| Query: | 122 | DKIDGLVNRLASEPVFDDVKWLLDEPIVNFSQSIVDDCIRANADFHFKTGLKPTIERIST | 181 |
| | | D+IDG+VNR++SE F+ + WLL EPIV FSQS+VDD ++ N DF K GLKP I R | |
| Sbjct: | 121 | DRIDGIVNRISSEDDFEKILWLLKEPIVTFSQSVVDDTLKKNIDFQAKAGLKPKIVRKLV | 180 |
| Query: | 182 | GKCCDWCDRLAGRYVYHEEPKDFYKRHQHCQCVIDYHPK--NGKRQNSWSKKWTKETTDI | 239 |
| | | GK CDWC LAG Y Y P D Y RH+ C+C ++Y P+ + KRQ+ WSK W D | |
| Sbjct: | 181 | GKACDWCRNLAGSYDYPNVPSDVYHRHERCRCTVEYDPRDIDKKRQDVWSKNWVDPDKDA | 240 |
| Query: | 240 | -LERRKQMNI | 248 |
| | | + RK +N+ | |
| Sbjct: | 241 | KIAERKNLNL | 250 |

[2762] A related DNA sequence was identified in S. pyogenes <SEQ ID 1449> which encodes the amino acid sequence <SEQ ID 1450>. Analysis of this protein sequence reveals the following:

```
Possible site: 32
>>> Seems to have no N-terminal signal sequence
----- Final Results -----
                            bacterial cytoplasm --- Certainty = 0.3099(Affirmative) < succ>
                              bacterial membrane --- Certainty = 0.0000(Not Clear) < succ>
                                bacterial outside --- Certainty = 0.0000(Not Clear) < succ>
```

[2763] An alignment of the GAS and GBS proteins is shown below:

| Identities = 169/261 (64%), Positives = 207/261 (78%), Gaps = 2/261 (0%) | | | |
|---|---|---|---|
| Query: | 1 | MVDDVLPKLLKSVQQDFEKHFGKSEVVAKAFAELQAKKATYKTVNEFAVEVGRLLSLALA | 60 |
| | | MVDDVLPKLLKSV+QDFEK+FG+S+VV KAFAELQAKK TYKTVNEFA+EVGRLLSLAL | |
| Sbjct: | 1 | MVDDVLPKLLKSVRQDFEKYFGESDVVTKAFAELQAKKVTYKTVNEFAIEVGRLLSLALT | 60 |
| Query: | 61 | NSVISDELPDGKMYYNIANRLVNDTLRHNYKLISDYAGDVQQNLNKQAKISLKIQRPPLN | 120 |
| | | SV SD+LPDGKMYYNIA RL+++T+ NYKLIS YAGDVQ+ LN+ A+I LK+QRPPLN | |
| Sbjct: | 61 | GSVSSDKLPDGKMYYNIAKRLLDETMGRNYKLISGYAGDVQRILNENAQIGLKVQRPPLN | 120 |
| Query: | 121 | QDKIDGLVNRLASEPVFDDVKWLLDEPIVNFSQSIVDDCIRANADFHFKTGLKPTIERIS | 180 |
| | | +DKI+G+VNRL SE FDDVKWL EPIVNFSQSIVDD I+ANAD +KTG+ P + R | |
| Sbjct: | 121 | RDKINGMVNRLDSENTFDDVKWLFGEPIVNFSQSIVDDTIKANADLQYKTGMTPQVVRTE | 180 |
| Query: | 181 | TGKCCDWCDRLAGRYVYHEEPKDFYKRHQHCQCVIDYHPKNGKRQNSWSKKWTK--ETTD | 238 |
| | | +G CC+WC + G Y Y + PKD ++RHQ C+C +DY PKNGK Q++WSK W K +T + | |
| Sbjct: | 181 | SGNCCEWCREVVGTYSYPKVPKDVWRRHQRCRCTLDYDPKNGKVQSAWSKIWRKKEKTQE | 240 |
| Query: | 239 | ILERRKQMNIDIRDNNRKSDI | 259 |
| | | +ER ++ + K+DI | |
| Sbjct: | 241 | SIERVEKFKESALVESIKNDI | 261 |

[2764] Based on this analysis, it was predicted that these proteins and their epitopes could be useful antigens for vaccines or diagnostics.

### EXAMPLE 451

[2765] A DNA sequence (GBSx0488) was identified in S. agalactiae <SEQ ID 1451> which encodes the amino acid sequence <SEQ ID 1452>. This protein is predicted to be Structural protein. Analysis of this protein sequence reveals the following:

| Possible site: 58 | | | | |
|---|---|---|---|---|
| >>> Seems to have no N-terminal signal sequence | | | | |
| | INTEGRAL | Likelihood = −1.38 | Transmembrane | 93-109 (93-110) |

```
----- Final Results -----
                              bacterial membrane --- Certainty = 0.1553(Affirmative) < succ>
                                bacterial outside --- Certainty = 0.0000(Not Clear) < succ>
                            bacterial cytoplasm --- Certainty = 0.0000(Not Clear) < succ>
```

[2766] The protein has homology with the following sequences in the GENPEPT database:

| >GP: AAC39307 GB: AF022773 ORF5 [Lactococcus bacteriophage phi31] | | | |
|---|---|---|---|
| Identities = 271/410 (66%), Positives = 326/410 (79%), Gaps = 2/410 (0%) | | | |
| Query: | 1 | MNYMGMGYLQRKLALFKTGVDKRYRYYAMDDRDNTRSIVMPDNVREMYRSVIEWTAKGVD | 60 |
| | | M G+GYL+ KL++ K + RY YAM D + I +P + + YRS++ W AKGVD | |
| Sbjct: | 1 | MTEKGIGYLRFKLSVHKRRAEMRYEQYAMKHVDRFKGITIPQALSQQYRSILGWCAKGVD | 60 |
| Query: | 61 | SLADRIIFREFANDDFNAWEIFKANNPDIFFDTAIQSALIASCCFVYIMPGKEDSLPKMQ | 120 |
| | | SLADR+IFREF NDDF EIF+ NNPDIFFD+A+ SALIASC F+YI G+ D++ ++Q | |
| Sbjct: | 61 | SLADRLIFREFENDDFTVNEIFEENNPDIFFDSAVLSALIASCSFIYISKGENDAV-RLQ | 119 |
| Query: | 121 | VIEASKATGILDPTTFLLTEGYAVLESDSNENPTLEAYFTGEKTWYYPKDEKP-YSIDNS | 179 |
| | | VIEA ATGI+DP T LLTEGYAVLE D N N LEA+F ++T YY +D + SI N | |
| Sbjct: | 120 | VIEAVNATGIIDPITGLLTEGYAVLERDENNNVVLEAHFLPDRTDYYYRDSRNNISIANP | 179 |
| Query: | 180 | TGHPLLVPVIHRPDAVRPFGRSRITKAGMYHQKAAKRTLERAEVTAEFYSFPQKYVLGMD | 239 |
| | | TGHPLLVP+IHRPDAVRPFGRSRIT++GMY Q AKRTLERA+VTAEFYSFPQKYV G+ | |
| Sbjct: | 180 | TGHPLLVPIIHRPDAVRPFGRSRITRSGMYWQSNAKRTLERADVTAEFYSFPQKYVTGLS | 239 |
| Query: | 240 | PDAEPMEKWRATVSTLLEISKDEDGDKPTVGQFTTASMAPFMDHLKMYASLFAGGSGLTL | 299 |
| | | DAEPME W+ATVS++L+ +KDEDGDKPT+GQFT SM+PF + L+ A+ FAG +GLTL | |
| Sbjct: | 240 | DDAEPMETWKATVSSMLQFTKDEDGDKPTLGQFTQPSMSPFTEQLRTAAAGFAGETGLTL | 299 |
| Query: | 300 | DDLGFPSDNPSSVEAIKAAHENLRAAGRKAQRSFSSGFLNVAYIAVCLRDDFPYLRNQFM | 359 |
| | | DDLGF SDNPSSVEAIKA+HENLR AGRKAQRS +G LNVAY+A CLRDD PYLR QF | |
| Sbjct: | 300 | DDLGFVSDNPSSVEAIKASHENLRLAGRKAQRSLGAGLLNVAYLAACLRDDVPYLREQFS | 359 |
| Query: | 360 | DTEIKWEPLFEADANMLTLVGDGAIKLNQAIPGFMDADVIRDLTGVKGSD | 409 |
| | | T+ KWEPLFEADA+ML+L+GDGAIKLNQAIP F++ D IRDLTG+KG++ | |
| Sbjct: | 360 | KTKPKWEPLFEADASMLSLIGDGAIKLNQAIPEFINKDTIRDLTGIKGAE | 409 |

[2767] A related DNA sequence was identified in S. pyogenes <SEQ ID 1453> which encodes the amino acid sequence <SEQ ID 1454>. Analysis of this protein sequence reveals the following:

| Possible site: 58 | | | | |
|---|---|---|---|---|
| >>> Seems to have no N-terminal signal sequence | | | | |
| | INTEGRAL | Likelihood = −1.38 | Transmembrane | 93-109 (93-110) |

```
----- Final Results -----
                              bacterial membrane --- Certainty = 0.1553(Affirmative) < succ>
                                bacterial outside --- Certainty = 0.0000(Not Clear) < succ>
                            bacterial cytoplasm --- Certainty = 0.0000(Not Clear) < succ>
```

[2768] An alignment of the GAS and GBS proteins is shown below:

| Identities = 395/422 (93%), Positives = 407/422 (95%) | | | |
|---|---|---|---|
| Query: | 1 | MNYMGMGYLQRKLALFKTGVDKRYRYYAMDDRDNTRSIVMPDNVREMYRSVIEWTAKGVD | 60 |
| | | MNYMGMGYL+RKLALFKTGVDKRYRYYAMDDRD+TRSIVMP+NVREMYRSV+EWTAKGVD | |
| Sbjct: | 1 | MNYMGMGYLRRKLALFKTGVDKRYRYYAMDDRDDTRSIVMPNNVREMYRSVLEWTAKGVD | 60 |
| Query: | 61 | SLADRIIFREFANDDFNAWEIFKANNPDIFFDTAIQSALIASCCFVYIMPGKEDSLPKMQ | 120 |
| | | SLADRIIFREF NDDFNAWEIFKANNPDIFFDTAIQSALIASCCFVYIMPG ED LPKMQ | |
| Sbjct: | 61 | SLADRIIFREFTNDDFNAWEIFKANNPDIFFDTAIQSALIASCCFVYIMPGAEDGLPKMQ | 120 |
| Query: | 121 | VIEASKATGILDPTTFLLTEGYAVLESDSNENPTLEAYFTGEKTWYYPKDEKPYSIDNST | 180 |
| | | VIEASKATGILDPTTFLLTEGYA+LESDSN NPTLEAYFT + WYYPK KPY+I N T | |
| Sbjct: | 121 | VIEASKATGILDPTTFLLTEGYAILESDSNGNPTLEAYFTDKDIWYYPKKGKPYNIKNPT | 180 |
| Query: | 181 | GHPLLVPVIHRPDAVRPFGRSRITKAGMYHQKAAKRTLERAEVTAEFYSFPQKYVLGMDP | 240 |
| | | GHPLLVP+IHRPDAVRPFGRSRITKAGMYHQKAAKRTLERAEVTAEFYSFPQKYVLGMDP | |
| Sbjct: | 181 | GHPLLVPIIHRPDAVRPFGRSRITKAGMYHQKAAKRTLERAEVTAEFYSFPQKYVLGMDP | 240 |
| Query: | 241 | DAEPMEKWRATVSTLLEISKDEDGDKPTVGQFTTASMAPFMDHLKMYASLFAGGSGLTLD | 300 |
| | | DAEPMEKWRATVSTLLEISKDEDGDKPTVGQFTTASMAPFM+HLKMYASLFAGGSGLTLD | |
| Sbjct: | 241 | DAEPMEKWRATVSTLLEISKDEDGDKPTVGQFTTASMAPFMEHLKMYASLFAGGSGLTLD | 300 |
| Query: | 301 | DLGFPSDNPSSVEAIKAAHENLRAAGRKAQRSFSSGFLNVAYIAVCLRDDFPYLRNQFMD | 360 |
| | | DLGFPSDNPSSVE+IKAAHENLRAAGRKAQRSFSSGFLNVAYIAVCLRD+FPYLRNQFMD | |
| Sbjct: | 301 | DLGFPSDNPSSVESIKAAHENLRAAGRKAQRSFSSGFLNVAYIAVCLRDEFPYLRNQFMD | 360 |
| Query: | 361 | TEIKWEPLFEADANMLTLVGDGAIKLNQAIPGFMDADVIRDLTGVKGSDNPIPKATEVTT | 420 |
| | | T IKWEPLFEADANMLTLVGDGAIKLNQAIPGFMDADVIRDLTGVKG+D PIP TEVTT | |
| Sbjct: | 361 | TVIKWEPLFEADANMLTLVGDGAIKLNQAIPGFMDADVIRDLTGVKGADKPIPAITEVTT | 420 |
| Query: | 421 | DG | 422 |
| | | DG | |
| Sbjct: | 421 | DG | 422 |

[2769] SEQ ID 1452 (GBS364) was expressed in E. coli as a His-fusion product. SDS-PAGE analysis of total cell extract is shown in FIG. 73 (lane 6; MW 50 kDa). It was also expressed in E. coli as a GST-fusion product. SDS-PAGE analysis of total cell extract is shown in FIG. 81 (lane 11; MW 75 kDa).

[2770] GBS364-GST was purified as shown in FIG. 216, lane 10.

[2771] Based on this analysis, it was predicted that these proteins and their epitopes could be useful antigens for vaccines or diagnostics.

### EXAMPLE 452

[2772] A DNA sequence (GBSx0489) was identified in S. agalactiae <SEQ ID 1455> which encodes the amino acid sequence <SEQ ID 1456>. Analysis of this protein sequence reveals the following:

```
Possible site: 16
>>> Seems to have no N-terminal signal sequence
----- Final Results -----
                            bacterial cytoplasm --- Certainty = 0.4063(Affirmative) < succ>
                              bacterial membrane --- Certainty = 0.0000(Not Clear) < succ>
                                bacterial outside --- Certainty = 0.0000(Not Clear) < succ>
```

[2773] The protein has no significant homology with any sequences in the GENPEPT database.

[2774] A related DNA sequence was identified in S. pyogenes <SEQ ID 1457> which encodes the amino acid sequence <SEQ ID 1458>. Analysis of this protein sequence reveals the following:

```
Possible site: 16
>>> Seems to have no N-terminal signal sequence
----- Final Results -----
                            bacterial cytoplasm --- Certainty = 0.4120(Affirmative) < succ>
                              bacterial membrane --- Certainty = 0.0000(Not Clear) < succ>
                                bacterial outside --- Certainty = 0.0000(Not Clear) < succ>
```

[2775] An alignment of the GAS and GBS proteins is shown below:

| Identities = 101/118 (85%), Positives = 110/118 (92%) | | | |
|---|---|---|---|
| Query: | 1 | MKKKCLICKKTFQAKTNRSLYCSEECRKKGIREKQRKLMKQKRADKKKEKIKVLNTNADV | 60 |
| | | +KKKCLICKK FQAKTNR+LYCSEECRKKG REKQRKLMKQKRA+++KEK KVLN N DV | |
| Sbjct: | 1 | LKKKCLICKKNFQAKTNRTLYCSEECRKKGNREKQRKLMKQKRAEQRKEKKKVLNPNTDV | 60 |
| Query: | 61 | TEKPKKIRNLVQHYKKLKREILDNESEFGFTGIALVEGIDIHEENFVDLVMQKIKEQQ | 118 |
| | | TEKPKKIRNL QHYKKLK+EIL NESEFGFTGI L+EGID+HEENFVDLVMQKIKEQ+ | |
| Sbjct: | 61 | TEKPKKIRNLAQHYKKLKKEILANESEFGFTGITLIEGIDVHEENFVDLVMQKIKEQK | 118 |

[2776] Based on this analysis, it was predicted that these proteins and their epitopes could be useful antigens for vaccines or diagnostics.

### EXAMPLE 453

[2777] A DNA sequence (GBSx0490) was identified in S. agalactiae <SEQ ID 1459> which encodes the amino acid sequence <SEQ ID 1460>. Analysis of this protein sequence reveals the following:

```
Possible site: 19
>>> Seems to have no N-terminal signal sequence
----- Final Results -----
                            bacterial cytoplasm --- Certainty = 0.0633(Affirmative) < succ>
                              bacterial membrane --- Certainty = 0.0000(Not Clear) < succ>
                                bacterial outside --- Certainty = 0.0000(Not Clear) < succ>
```

[2778] The protein has homology with the following sequences in the GENPEPT database:

| >GP: AAC39305 GB: AF022773 ORF3 [Lactococcus bacteriophage phi31] | | | |
|---|---|---|---|
| Identities = 75/109 (68%), Positives = 87/109 (79%), | | | |
| Gaps = 1/109 (0%) | | | |
| Query: | 29 | LRADKKGTHRVAFEKNKRRLLKTAHLCGICGRPVDKSLKYPHPLSAAIDHIVPIAKGGHP | 88 |
| | | LRAD+ G HRVAF+KN++ LLKT + CGICG+P+DK LK P PLS +DHI+PI KGGHP | |
| Sbjct: | 3 | LRADRTGAHRVAFDKNRKILLKTQNTCGICGKPIDKRLKAPDPLSPVVDHIIPINKGGHP | 62 |
| Query: | 89 | SSIDNLQLTHWQCNRQKSDKLFINQTAVRATVVGNRNLPQSRDWSSYAS | 137 |
| | | S++DNLQL HW CNRQKSDKLF N V+GNRNLPQSRDWSSY S | |
| Sbjct: | 63 | SAMDNLQLAHWTCNRQKSDKLF-NVKQEEPKVLGNRNLPQSRDWSSYVS | 110 |

[2779] A related DNA sequence was identified in S. pyogenes <SEQ ID 1461> which encodes the amino acid sequence <SEQ ID 1462>. Analysis of this protein sequence reveals the following:

```
Possible site: 49
>>> Seems to have no N-terminal signal sequence
----- Final Results -----
                            bacterial cytoplasm --- Certainty = 0.4185(Affirmative) < succ>
                              bacterial membrane --- Certainty = 0.0000(Not Clear) < succ>
                                bacterial outside --- Certainty = 0.0000(Not Clear) < succ>
```

[2780] An alignment of the GAS and GBS proteins is shown below:

| Identities = 88/112 (78%), Positives = 102/112 (90%) | | | |
|---|---|---|---|
| Query: | 28 | KLRADKKGTHRVAFEKNKRRLLKTAHLCGICGRPVDKSLKYPHPLSAAIDHIVPIAKGGH | 87 |
| | | +LRADKKGTHRVAF++NK++LLK A +CGICG+PVDKSLKYPHPLSAAIDHIVPIAKGGH | |
| Sbjct: | 3 | QLRADKKGTHRVAFDRNKKKLLKAATVCGICGKPVDKSLKYPHPLSAAIDHIVPIAKGGH | 62 |
| Query: | 88 | PSSIDNLQLTHWQCNRQKSDKLFINQTAVRATVVGNRNLPQSRDWSSYASKE | 139 |
| | | PS+++NLQLTHWQCNRQKSDKLF NQ + +GNRNLPQSRDWSS+A K+ | |
| Sbjct: | 63 | PSALENLQLTHWQCNRQKSDKLFANQASNEPKTIGNRNLPQSRDWSSFAFKK | 114 |

[2781] Based on this analysis, it was predicted that these proteins and their epitopes could be useful antigens for vaccines or diagnostics.

### EXAMPLE 454

[2782] A DNA sequence (GBSx0491) was identified in S. agalactiae <SEQ ID 1463> which encodes the amino acid sequence <SEQ ID 1464>. Analysis of this protein sequence reveals the following:

```
Possible site: 33
>>> Seems to have no N-terminal signal sequence
----- Final Results -----
                            bacterial cytoplasm --- Certainty = 0.4481(Affirmative) < succ>
                              bacterial membrane --- Certainty = 0.0000(Not Clear) < succ>
                                bacterial outside --- Certainty = 0.0000(Not Clear) < succ>
```

[2783] Based on this analysis, it was predicted that this protein and its epitopes, could be useful antigens for vaccines or diagnostics.

### EXAMPLE 455

[2784] A DNA sequence (GBSx0492) was identified in S. agalactiae <SEQ ID 1465> which encodes the amino acid sequence <SEQ ID 1466>. Analysis of this protein sequence reveals the following:

```
Possible site: 28
>>> Seems to have no N-terminal signal sequence
----- Final Results -----
                            bacterial cytoplasm --- Certainty = 0.2907(Affirmative) < succ>
                              bacterial membrane --- Certainty = 0.0000(Not Clear) < succ>
                                bacterial outside --- Certainty = 0.0000(Not Clear) < succ>
```

[2785] The protein has homology with the following sequences in the GENPEPT database:

| >GP: AAF43508 GB: AF145054 ORF15 | | | |
|---|---|---|---|
| [Streptococcus thermophilus bacteriophage 7201] | | | |
| Identities = 61/187 (32%), Positives = 90/187 (47%), | | | |
| Gaps = 31/187 (16%) | | | |
| Query: | 1 | MNIEEAKKLIDKQSIGKGGVGDIPVVKTHIVKVLLDQIDQPQPEVPRFVADWYEKHKDSL | 60 |
| | | MN +EA K I K+ + + L D I +P VP++VADWYE+HKD | |
| Sbjct: | 1 | MNRDEAVKKIAKEGY----------ISIEHAEDLYDSIIT-KPVVPQYVADWYEEHKDEF | 49 |
| Query: | 61 | ECDL------YLYHMSIY--DEEVEKDDFYYWMQTSKNPVYTLINMHQFGYTIQKEKLYT | 112 |
| | | +L + H++ Y +E DF W +KN + L+NMHQFGY ++KEK YT | |
| Sbjct: | 50 | YLNLHRVVRDFFEHLNAYYFNENPIDYDFACWYYNTKNAIQILVNMHQFGYEVKKEKRYT | 109 |
| Query: | 113 | VEIPN--PNERQLSFVLMRQLSGNVSIKVMHRDNLDLLKTDNDLQLTESEIRKDFDWAWQ | 170 |
| | | V I N E L++ R+ + RDN D +T + T E+ ++ + W | |
| Sbjct: | 110 | VRIRNLDDEETYLNYDKFRE-----TWVFYSRDNTDRFRTIH----THKEL-EEGGFGWV | 159 |
| Query: | 171 | FREEVVE | 177 |
| | | F E +E | |
| Sbjct: | 160 | FDCEGIE | 166 |

[2786] A related GBS nucleic acid sequence <SEQ ID 10927> which encodes amino acid sequence <SEQ ID 10928> was also identified.

[2787] A related DNA sequence was identified in S. pyogenes <SEQ ID 1467> which encodes the amino acid sequence <SEQ ID 1468>. Analysis of this protein sequence reveals the following:

```
Possible site: 21
>>> Seems to have no N-terminal signal sequence
----- Final Results -----
                            bacterial cytoplasm --- Certainty = 0.3815(Affirmative) < succ>
                              bacterial membrane --- Certainty = 0.0000(Not Clear) < succ>
                                bacterial outside --- Certainty = 0.0000(Not Clear) < succ>
```

[2788] An alignment of the GAS and GBS proteins is shown below:

| Identities = 70/180 (38%), Positives = 98/180 (53%), Gaps = 30/180 (16%) | | | |
|---|---|---|---|
| Query: | 1 | MNIEEAKKLIDKQSI-GKGGVGDIPVVKTHIVKVLLDQIDQPQPEVPRFVADWYEKHKDS | 59 |
| | | MNIEEAK+L+D GK V+K V+ ++DQ++QP+PEVP+ VADW E+ K+ | |
| Sbjct: | 1 | MNIEEAKELVDNSKFYGKTS----SVIKAE-VRDIIDQLNQPKPEVPQCVADWIEECKEE | 55 |
| Query: | 60 | LECDLYLYHMSIYDEEVEKDDFYYWMQTSKNPVYTLINMHQFGYTIQKEKLYTVEIPN-- | 117 |
| | | DL L ++ + W+ S + GYT++KEKLYTV++PN | |
| Sbjct: | 56 | ---DLTL--KGLFSNSDMPAKIFDWIFGSDENCRLMAEAWINGYTVEKEKLYTVDLPNGQ | 110 |
| Query: | 118 | PNERQLSFVLMRQLSGNVSIKVMHRDNLDLLKTDNDLQLTESEIRKDFDWAWQFREEVVE | 177 |
| | | P R ++ + Q L T+N ++LTESEIRKDF+WAWQF EEV E | |
| Sbjct: | 111 | PLVRGINTLYFSQN----------------LATEN-VKLTESEIRKDFEWAWQFAEEVTE | 153 |

[2789] Based on this analysis, it was predicted that these proteins and their epitopes could be useful antigens for vaccines or diagnostics.

### EXAMPLE 456

[2790] A DNA sequence (GBSx0493) was identified in S. agalactiae <SEQ ID 1469> which encodes the amino acid sequence <SEQ ID 1470>. Analysis of this protein sequence reveals the following:

```
Possible site: 46
>>> Seems to have no N-terminal signal sequence
----- Final Results -----
                            bacterial cytoplasm --- Certainty = 0.5365(Affirmative) < succ>
                              bacterial membrane --- Certainty = 0.0000(Not Clear) < succ>
                                bacterial outside --- Certainty = 0.0000(Not Clear) < succ>
```

[2791] The protein has no significant homology with any sequences in the GENPEPT database.

[2792] No corresponding DNA sequence was identified in S. pyogenes.

[2793] Based on this analysis, it was predicted that this protein and its epitopes, could be useful antigens for vaccines or diagnostics.

### EXAMPLE 457

[2794] A DNA sequence (GBSx0494) was identified in S. agalactiae <SEQ ID 1471> which encodes the amino acid sequence <SEQ ID 1472>. Analysis of this protein sequence reveals the following:

| Possible site: 50 | | | | |
|---|---|---|---|---|
| >>> Seems to have no N-terminal signal sequence | | | | |
| | INTEGRAL | Likelihood = −8.55 | Transmembrane | 34-50 (31-54) |

```
----- Final Results -----
                              bacterial membrane --- Certainty = 0.4418(Affirmative) < succ>
                                bacterial outside --- Certainty = 0.0000(Not Clear) < succ>
                            bacterial cytoplasm --- Certainty = 0.0000(Not Clear) < succ>
```

[2795] A related GBS nucleic acid sequence <SEQ ID 9657> which encodes amino acid sequence <SEQ ID 9658> was also identified.

[2796] The protein has no significant homology with any sequences in the GENPEPT database.

[2797] A related DNA sequence was identified in S. pyogenes <SEQ ID 1473> which encodes the amino acid sequence <SEQ ID 1474>. Analysis of this protein sequence reveals the following:

| Possible site: 40 | | | | |
|---|---|---|---|---|
| >>> Seems to have no N-terminal signal sequence | | | | |
| | INTEGRAL | Likelihood = −11.25 | Transmembrane | 26-42 (20-49) |

```
----- Final Results -----
                              bacterial membrane --- Certainty = 0.5501(Affirmative) < succ>
                                bacterial outside --- Certainty = 0.0000(Not Clear) < succ>
                            bacterial cytoplasm --- Certainty = 0.0000(Not Clear) < succ>
```

[2798] The protein has no significant homology with any sequences in the GENPEPT database.

[2799] An alignment of the GAS and GBS proteins is shown below:

| Identities = 56/89 (62%), Positives = 71/89 (78%) | | | |
|---|---|---|---|
| Query: | 8 | MTEQQMIDCLLYELAKKDKLNIRRNNIITFLSIVLMAISILNVALQDHYKSQITELRTQL | 67 |
| | | MTE+QMIDCLLYEL KKDK +++ II L+++L+ +S L V+L+ +Y+ QI LRTQL | |
| Sbjct: | 1 | MTEEQMIDCLLYELVKKDKAIKKKSIIIAALTVMLIVVSGLCVSLKSYYEPQIYGLRTQL | 60 |
| Query: | 68 | SRTQKQLKRASDDRARQTKRIAELTGNGG | 96 |
| | | SRTQKQLKRAS+ RQTKRIA+LT NGG | |
| Sbjct: | 61 | SRTQKQLKRASEQNQRQTKRIADLTNNGG | 89 |

[2800] Based on this analysis, it was predicted that these proteins and their epitopes could be useful antigens for vaccines or diagnostics.

### EXAMPLE 458

[2801] A DNA sequence (GBSx0495) was identified in S. agalactiae <SEQ ID 1475> which encodes the amino acid sequence <SEQ ID 1476>. Analysis of this protein sequence reveals the following:

```
Possible site: 32
>>> Seems to have no N-terminal signal sequence
----- Final Results -----
                            bacterial cytoplasm --- Certainty = 0.2040(Affirmative) < succ>
                              bacterial membrane --- Certainty = 0.0000(Not Clear) < succ>
                                bacterial outside --- Certainty = 0.0000(Not Clear) < succ>
```

[2802] The protein has no significant homology with any sequences in the GENPEPT database.

[2803] No corresponding DNA sequence was identified in S. pyogenes.

[2804] Based on this analysis, it was predicted that this protein and its epitopes, could be useful antigens for vaccines or diagnostics.

### EXAMPLE 459

[2805] A DNA sequence (GBSx0496) was identified in S. agalactiae <SEQ ID 1477> which encodes the amino acid sequence <SEQ ID 1478>. Analysis of this protein sequence reveals the following:

```
Possible site: 34
>>> Seems to have no N-terminal signal sequence
----- Final Results -----
                            bacterial cytoplasm --- Certainty = 0.3044(Affirmative) < succ>
                              bacterial membrane --- Certainty = 0.0000(Not Clear) < succ>
                                bacterial outside --- Certainty = 0.0000(Not Clear) < succ>
```

[2806] The protein has homology with the following sequences in the GENPEPT database:

| >GP: AAD37108 GB: AF109874 unknown [Bacteriophage Tuc2009] | | | |
|---|---|---|---|
| Identities = 50/143 (34%), Positives = 67/143 (45%), Gaps = 29/143 (20%) | | | |
| Query: | 1 | MIPNFRAFNKETKKM-YG-VDGFELSVRKIYRCSLADDEFRCGRLETFHFVEDNFDDYIL | 58 |
| | | MIP RA++K+ ++M YG V+ F+ S+ YR HF +D | |
| Sbjct: | 1 | MIPKLRAWDKQDERMSYGEVEYFDDSIN--YRFD--------------HFCTGADEDVEF | 44 |
| Query: | 59 | MQSTGMFDKNGVEIFDGDIVLTTRL-------IDY-TYKNFKGVVKMLEGRWLIDTGKDA | 110 |
| | | MQSTG+ DKNGVEI++GDI+ + I Y Y G + EG L + | |
| Sbjct: | 45 | MQSTGIKDKNGVEIYEGDILKLHAIFLAPDDKIGYLEYSPKYGYSIICEGNRLY---RQE | 101 |
| Query: | 111 | VGLWTEVDENEAIGNIYQNSELL | 133 |
| | | T E IGHIY+N ELL | |
| Sbjct: | 102 | YWASTNKLNYEVIGNIYENPELL | 124 |

[2807] A related DNA sequence was identified in S. pyogenes <SEQ ID 1479> which encodes the amino acid sequence <SEQ ID 1480>. Analysis of this protein sequence reveals the following:

```
Possible site: 34
>>> Seems to have no N-terminal signal sequence
----- Final Results -----
                            bacterial cytoplasm --- Certainty = 0.4779(Affirmative) < succ>
                              bacterial membrane --- Certainty = 0.0000(Not Clear) < succ>
                                bacterial outside --- Certainty = 0.0000(Not Clear) < succ>
```

[2808] An alignment of the GAS and GBS proteins is shown below:

| Identities = 44/52 (84%), Positives = 47/52 (89%) | | | |
|---|---|---|---|
| Query: | 1 | MIPNFRAFNKETKKMYGVDGFELSVRKIYRCSLADDEFRCGRLETFHFVEDN | 52 |
| | | MIPNFR FNK+TKKMY +DGF+ S RKIYRCSLADDEFR GRLETFHFVEDN | |
| Sbjct: | 1 | MIPNFRGFNKKTKKMYSIDGFKSSERKIYRCSLADDEFRSGRLETFHFVEDN | 52 |

[2809] Based on this analysis, it was predicted that these proteins and their epitopes could be useful antigens for vaccines or diagnostics.

### EXAMPLE 460

[2810] A DNA sequence (GBSx0497) was identified in S. agalactiae <SEQ ID 1481> which encodes the amino acid sequence <SEQ ID 1482>. Analysis of this protein sequence reveals the following:

```
Possible site: 57
>>> Seems to have no N-terminal signal sequence
----- Final Results -----
                            bacterial cytoplasm --- Certainty = 0.3843(Affirmative) < succ>
                              bacterial membrane --- Certainty = 0.0000(Not Clear) < succ>
                                bacterial outside --- Certainty = 0.0000(Not Clear) < succ>
```

[2811] A related GBS nucleic acid sequence <SEQ ID 9655> which encodes amino acid sequence <SEQ ID 9656> was also identified.

[2812] The protein has no significant homology with any sequences in the GENPEPT database.

[2813] No corresponding DNA sequence was identified in S. pyogenes.

[2814] Based on this analysis, it was predicted that these proteins and their epitopes could be useful antigens for vaccines or diagnostics.

### EXAMPLE 461

[2815] A DNA sequence (GBSx0498) was identified in S. agalactiae <SEQ ID 1483> which encodes the amino acid sequence <SEQ ID 1484>. Analysis of this protein sequence reveals the following:

```
Possible site: 23
>>> Seems to have no N-terminal signal sequence
----- Final Results -----
                            bacterial cytoplasm --- Certainty = 0.5189(Affirmative) < succ>
                              bacterial membrane --- Certainty = 0.0000(Not Clear) < succ>
                                bacterial outside --- Certainty = 0.0000(Not Clear) < succ>
```

[2816] A related GBS nucleic acid sequence <SEQ ID 9653> which encodes amino acid sequence <SEQ ID 9654> was also identified.

[2817] The protein has homology with the following sequences in the GENPEPT database:

| >GP: AAF43503 GB: AF145054 ORF10 [Streptococcus thermophilus | | | |
|---|---|---|---|
| bacteriophage 7201] | | | |
| Identities = 92/147 (62%), Positives = 121/147 (81%) | | | |
| Query: | 15 | IEPKPQTRPKFSKFGTYEDPKMKRWRKEVSGWIEKNYDGPFFDDCIKVEVTFYMKAPKTL | 74 |
| | | IEPKPQTRP+FSKFGTYEDPKMK WR+E S IE+ YDG FF I V+VTFYMKAP ++ | |
| Sbjct: | 7 | IEPKPQTRPRFSKFGTYEDPKMKAWRRECSRLIEQEYDGQFFYGPISVDVTFYMKAPLSV | 66 |
| Query: | 75 | SKEPTQRSKGKTIQIYQNFVRELIWHAKKPDIDNLIKAVFDSISDAGYDRIQKSGIVWSD | 134 |
| | | SK+PT +++ KT ++ F+ E +WH++KPDIDNLIKA+FDSIS AGY+++ K GIVW+D | |
| Sbjct: | 67 | SKKPTPKARAKTWDAFKKFMAERLWHSRKPDIDNLIKALFDSISTAGYNKVDKKGIVWTD | 126 |
| Query: | 135 | DNIVCDLRAKKKYSQNPRIKVRIEEID | 161 |
| | | D+IVC L A+K+YS+NPRI+ I+E++ | |
| Sbjct: | 127 | DSIVCKLSAQKRYSENPRIEFEIKELE | 153 |

[2818] No corresponding DNA sequence was identified in S. pyogenes.

[2819] Based on this analysis, it was predicted that these proteins and their epitopes could be useful antigens for vaccines or diagnostics.

### EXAMPLE 462

[2820] A DNA sequence (GBSx0499) was identified in S. agalactiae <SEQ ID 1485> which encodes the amino acid sequence <SEQ ID 1486>. Analysis of this protein sequence reveals the following:

```
Possible site: 30
>>> Seems to have no N-terminal signal sequence
----- Final Results -----
                            bacterial cytoplasm --- Certainty = 0.4007(Affirmative) < succ>
                              bacterial membrane --- Certainty = 0.0000(Not Clear) < succ>
                                bacterial outside --- Certainty = 0.0000(Not Clear) < succ>
```

[2821] The protein has no significant homology with any sequences in the GENPEPT database.

[2822] No corresponding DNA sequence was identified in S. pyogenes.

[2823] Based on this analysis, it was predicted that this protein and its epitopes, could be useful antigens for vaccines or diagnostics.

### EXAMPLE 463

[2824] A DNA sequence (GBSx0500) was identified in S. agalactiae <SEQ ID 1487> which encodes the amino acid sequence <SEQ ID 1488>. This protein is predicted to be pXO1-07. Analysis of this protein sequence reveals the following:

```
Possible site: 26
>>> Seems to have no N-terminal signal sequence
----- Final Results -----
                            bacterial cytoplasm --- Certainty = 0.3664(Affirmative) < succ>
                              bacterial membrane --- Certainty = 0.0000(Not Clear) < succ>
                                bacterial outside --- Certainty = 0.0000(Not Clear) < succ>
```

[2825] The protein has homology with the following sequences in the GENPEPT database:

| >GP: AAC38715 GB: AF030367 maturase-related protein [Streptococcus pneumoniae] | | | |
|---|---|---|---|
| Identities = 146/373 (39%), Positives = 216/373 (57%), Gaps = 18/373 (4%) | | | |
| Query: | 35 | LYDKVYRKDILKVAWFYVKRNKGSAGIDDFTIEEIEAYGVQKFLDEIEDQLRNKKYQPKA | 94 |
| | | L DK+ ++ + A+ VK NKGSAGID TIEE++ Y Q + ++ ++ +KY+P+ | |
| Sbjct: | 4 | LLDKILSRENMLEAYNQVKSNKGSAGIDGMTIEEMDNYLRQNWR-LTKELIKQRKYKPQP | 62 |
| Query: | 95 | VKRVYIPKANGKKRPLGIPTVRDRVVQTAVKIVIEPIFEADFQEFSYGFRPKRSANQAIR | 154 |
| | | V +V IPK +G R LGIPTV DR++Q A+ V+ PI E F + SYGFRP RS +AI | |
| Sbjct: | 63 | VLKVEIPKPDGGIRQLGIPTVMDRMIQQAIVQVMSPICEPHFSDTSYGFRPNRSCEKAIM | 122 |
| Query: | 155 | EIYKYLNYGCEWVIDADLKGYFDTIPHDKLLLLVKERVTDKSIIKLLSLWLEAGIMEDNQ | 214 |
| | | ++ +YLN G EW++D DL+ +FDT+P D+L+ LV + D L+ +L +G++ + Q | |
| Sbjct: | 123 | KLLEYLNDGYEWIVDIDLEKFFDTVPQDRLMSLVHNIIEDGDTESLIRKYLHSGVIINGQ | 182 |
| Query: | 215 | VRSNILGTPQGGVISPLLANIYLNALDRYWKNNRLEGRGHDAHLIRYADDFVI-LCSNNP | 273 |
| | | ++GTPQGG +SPLL+NI LN LD+ LE RG +RYADD VI + S | |
| Sbjct: | 183 | RYKTLVGTPQGGNLSPLLSNIMLNELDK-----ELEKRG--LRFVRYADDCVITVGSEAA | 235 |
| Query: | 274 | KKYYQYAKQRI--DKLGLTLNEEKTRIVHATEGFDFLGYTLRKSKSHKSGKYKTYYYPSR | 331 |
| | | K Y+ R +LGL +N KT+I E +LG+ KS + P + | |
| Sbjct: | 236 | AKRVMYSVSRFIEKRLGLKVNMTKTKITRPRE-LKYLGFGFWKSSDGWKSR------PHQ | 288 |
| Query: | 332 | KSMKSIKGKVKDVIQTGQHLNLPDVMERLNPMLRGWANYFKAGNSKQHFKSIDNYVIYNL | 391 |
| | | S++ K K+K + Q ++L +E+LN +RGW NYF GN K SID + L | |
| Sbjct: | 289 | DSVRRFKLKLKKLTQRKWSIDLTRRIEQLNLSIRGWINYFSLGNMKSIVASIDERLRTRL | 348 |
| Query: | 392 | TIMLRKKHKKSGK | 404 |
| | | +++ K+ KK + | |
| Sbjct: | 349 | RMIIWKQWKKKSR | 361 |

[2826] No corresponding DNA sequence was identified in S. pyogenes.

[2827] Based on this analysis, it was predicted that this protein and its epitopes, could be useful antigens for vaccines or diagnostics.

### EXAMPLE 464

[2828] A DNA sequence (GBSx0501) was identified in S. agalactiae <SEQ ID 1489> which encodes the amino acid sequence <SEQ ID 1490>. Analysis of this protein sequence reveals the following:

```
Possible site: 27
>>> Seems to have no N-terminal signal sequence
----- Final Results -----
                            bacterial cytoplasm --- Certainty = 0.3833(Affirmative) < succ>
                              bacterial membrane --- Certainty = 0.0000(Not Clear) < succ>
                                bacterial outside --- Certainty = 0.0000(Not Clear) < succ>
```

[2829] A related GBS nucleic acid sequence <SEQ ID 9651> which encodes amino acid sequence <SEQ ID 9652> was also identified.

[2830] A further related DNA sequence (GBSx2517) was identified in S. agalactiae <SEQ ID 7217> which encodes the amino acid sequence <SEQ ID 7218>. Analysis of this protein sequence reveals the following:

```
Possible site: 27
>>> Seems to have no N-terminal signal sequence
----- Final Results -----
                            bacterial cytoplasm --- Certainty = 0.3833(Affirmative) < succ>
                              bacterial membrane --- Certainty = 0.0000(Not Clear) < succ>
                                bacterial outside --- Certainty = 0.0000(Not Clear) < succ>
```

[2831] A related DNA sequence was identified in S. pyogenes <SEQ ID 1491> which encodes the amino acid sequence <SEQ ID 1492>. Analysis of this protein sequence reveals the following:

```
Possible site: 27
>>> Seems to have no N-terminal signal sequence
----- Final Results -----
                            bacterial cytoplasm --- Certainty = 0.2299(Affirmative) < succ>
                              bacterial membrane --- Certainty = 0.0000(Not Clear) <succ>
                                bacterial outside --- Certainty = 0.0000(Not Clear) < succ>
```

[2832] An alignment of the GAS and GBS proteins is shown below:

| Identities = 113/163 (69%), Positives = 128/163 (78%), Gaps = 25/163 (15%) | | | |
|---|---|---|---|
| Query: | 1 | MINNIVLVGRMTKDAELRYTPSNQAVATFSLAVNRNFKNQSGEREADFINCVIWRQQAEN | 60 |
| | | MINN+VLVGRMTKDAELRYTPS AVATF+LAVNR FK+Q+GEREADFINCVIWRQ AEN | |
| Sbjct: | 1 | MINNVVLVGRMTKDAELRYTPSQVAVATFTLAVNRTFKSQNGEREADFINCVIWRQPAEN | 60 |
| Query: | 61 | LANWAKKGALVGITGRIQTRNYENQQGQRIYVTEVVAENFQLLESRNSQQ---------Q | 111 |
| | | LANWAKKGAL+G+TGRIQTRNYENQQGQR+YVTEVVA+NFQ+LESR +++ | |
| Sbjct: | 61 | LANWAKKGALIGVTGRIQTRNYENQQGQRVYVTEVVADNFQMLESRATREGGSTGSFNGG | 120 |
| Query: | 112 | TNQSGNSSNSY----------------FGNANKMDISDDDLPF | 138 |
| | | N + +SSNSY FGN+N MDISDDDLPF | |
| Sbjct: | 121 | FNNNTSSSNSYSAPAQQTPNFGRDDSPFGNSNPMDISDDDLPF | 163 |

[2833] Based on this analysis, it was predicted that these proteins and their epitopes could be useful antigens for vaccines or diagnostics.

### EXAMPLE 465

[2834] A DNA sequence (GBSx0502) was identified in S. agalactiae <SEQ ID 1493> which encodes the amino acid sequence <SEQ ID 1494>. Analysis of this protein sequence reveals the following:

```
Possible site: 26
>>> Seems to have an uncleavable N-term signal seq
      INTEGRAL Likelihood = −1.33 Transmembrane 17-33 ( 17-33)
----- Final Results -----
                              bacterial membrane --- Certainty = 0.1532(Affirmative) < succ>
                                bacterial outside --- Certainty = 0.0000(Not Clear) < succ>
                            bacterial cytoplasm --- Certainty = 0.0000(Not Clear) < succ>
```

[2835] The protein has no significant homology with any sequences in the GENPEPT database.

[2836] No corresponding DNA sequence was identified in S. pyogenes.

[2837] Based on this analysis, it was predicted that this protein and its epitopes, could be useful antigens for vaccines or diagnostics.

### EXAMPLE 466

[2838] A DNA sequence (GBSx0503) was identified in S. agalactiae <SEQ ID 1495> which encodes the amino acid sequence <SEQ ID 1496>. This protein is predicted to be p22 erf-like protein. Analysis of this protein sequence reveals the following:

```
Possible site: 52
>>> Seems to have no N-terminal signal sequence
----- Final Results -----
                            bacterial cytoplasm --- Certainty = 0.2469(Affirmative) < succ>
                              bacterial membrane --- Certainty = 0.0000(Not Clear) < succ>
                                bacterial outside --- Certainty = 0.0000(Not Clear) < succ>
```

[2839] The protein has homology with the following sequences in the GENPEPT database:

| >GP: BAA97824 GB: AB044554 orf 17 [Staphylococcus aureus prophage | | | |
|---|---|---|---|
| phiPV83] | | | |
| Identities = 93/183 (50%), Positives = 120/183 (64%), Gaps = 5/183 (2%) | | | |
| Query: | 1 | MRKSESITEYAKAFCKAQLEVKQPLKDKDNPFFKSKYVPLENVTEAITTAFANNGISFSQ | 60 |
| | | M KSE++ E KA + EVKQPLKDK+NPFFKSKYVPLENV EAI A +G+S++Q | |
| Sbjct: | 1 | MNKSETVVEINKAMVAFRKEVKQPLKDKNNPFFKSKYVPLENVVEAIDEAATPHGLSYTQ | 60 |
| Query: | 61 | DPTTNTENGYIDVATLVMHTSGEWVEYGPLSVKPTKNDVQGAGSAITYAKRYALSAIFGI | 120 |
| | | N +G + VAT++MH SGE++EY P+ + KN QGAGS I+Y KRY+LSAIFGI | |
| Sbjct: | 61 | W-ALNDVDGRVGVATMLMHESGEYIEYDPVFMNAEKNTPQGAGSLISYLKRYSLSAIFGI | 119 |
| Query: | 121 | TSDQDDDGNEDSKPNNSRQSPKATTKKTQKTGYQTPKISNIQIETYKSDLNDIAKATNQN | 180 |
| | | TSDQDDDGNE S NN +PK T +TQ +T I ++ ++ + K QN | |
| Sbjct: | 120 | TSDQDDDGNEASGKNN---NPKQQT-RTQWASSETIGILRKEVISFTKLIKGTDKEAPQN | 175 |
| Query: | 181 | VEE | 183 |
| | | + E | |
| Sbjct: | 176 | IVE | 178 |

[2840] No corresponding DNA sequence was identified in S. pyogenes.

[2841] Based on this analysis, it was predicted that this protein and its epitopes, could be useful antigens for vaccines or diagnostics.

### EXAMPLE 467

[2842] A DNA sequence (GBSx0504) was identified in S. agalactiae <SEQ ID 1497> which encodes the amino acid sequence <SEQ ID 1498>. This protein is predicted to be gp157. Analysis of this protein sequence reveals the following:

```
Possible site: 55
>>> Seems to have no N-terminal signal sequence
----- Final Results -----
                            bacterial cytoplasm --- Certainty = 0.3148(Affirmative) < succ>
                              bacterial membrane --- Certainty = 0.0000(Not Clear) < succ>
                                bacterial outside --- Certainty = 0.0000(Not Clear) < succ>
```

[2843] The protein has homology with the following sequences in the GENPEPT database:

| >GP: AAD44102 GB: AF115103 orf157 gp [Streptococcus thermophilus] | | | |
|---|---|---|---|
| bacteriophage Sfi21] | | | |
| Identities = 59/160 (36%), Positives = 100/160 (61%), Gaps = 3/160 (1%) | | | |
| Query: | 1 | MAYLYELEGIYAQLQSMDLDEETFQDTLDSIDFQSDLENNIEYFVKMLKNVQADAEKYKA | 60 |
| | | MA LYEL G + ++ +M++D+ET DTL++ID+ SD EN +E +VK++K+++AD E K | |
| Sbjct: | 1 | MATLYELTGQFLEIYNMEIDDETKLDTLEAIDWTSDYENKVEGYVKVIKSLEADIEARKN | 60 |
| Query: | 61 | EKEAFYKKQKQAEAKAEKYKETIRLAMELSQKKKVDAGMFKVSLRRSKKVEILDETKIPL | 120 |
| | | EK+ K ++K +K K + ++M + + +VD +FK+ +SK V +++E K+P | |
| Sbjct: | 61 | EKKRLDGLNKSDQSKIDKLKAALAISMTETGQTRVDTTLFKIGFHKSKAV-VVNEEKLPK | 119 |
| Query: | 121 | DYMQEKIEYKPMKAEISKALKSGIDISGVELIETESLQVK | 160 |
| | | +Y + YKP K + + LKSG I G L E +L ++ | |
| Sbjct: | 120 | EY--QIATYKPDKKTLKELLKSGKHIEGATLEERRNLNIR | 157 |

[2844] No corresponding DNA sequence was identified in S. pyogenes.

[2845] Based on this analysis, it was predicted that this protein and its epitopes, could be useful antigens for vaccines or diagnostics.

### EXAMPLE 468

[2846] A DNA sequence (GBSx0505) was identified in S. agalactiae <SEQ ID 1499> which encodes the amino acid sequence <SEQ ID 1500>. This protein is predicted to be tropomyosin 2. Analysis of this protein sequence reveals the following:

```
Possible site: 26
>>> Seems to have no N-terminal signal sequence
----- Final Results -----
                            bacterial cytoplasm --- Certainty = 0.4474(Affirmative) < succ>
                              bacterial membrane --- Certainty = 0.0000(Not Clear) < succ>
                                bacterial outside --- Certainty = 0.0000(Not Clear) < succ>
```

[2847] The protein has no significant homology with any sequences in the GENPEPT database.

[2848] No corresponding DNA sequence was identified in S. pyogenes.

[2849] Based on this analysis, it was predicted that this protein and its epitopes, could be useful antigens for vaccines or diagnostics.

### EXAMPLE 469

[2850] A DNA sequence (GBSx0506) was identified in S. agalactiae <SEQ ID 1501> which encodes the amino acid sequence <SEQ ID 1502>. Analysis of this protein sequence reveals the following:

```
Possible site: 21
>>> Seems to have no N-terminal signal sequence
----- Final Results -----
                            bacterial cytoplasm --- Certainty = 0.4114(Affirmative) < succ>
                              bacterial membrane --- Certainty = 0.0000(Not Clear) < succ>
                                bacterial outside --- Certainty = 0.0000(Not Clear) < succ>
```

[2851] A related GBS nucleic acid sequence <SEQ ID 9649> which encodes amino acid sequence <SEQ ID 9650> was also identified.

[2852] The protein has no significant homology with any sequences in the GENPEPT database.

[2853] No corresponding DNA sequence was identified in S. pyogenes.

[2854] Based on this analysis, it was predicted that these proteins and their epitopes could be useful antigens for vaccines or diagnostics.

### EXAMPLE 470

[2855] A DNA sequence (GBSx0507) was identified in S. agalactiae <SEQ ID 1503> which encodes the amino acid sequence <SEQ ID 1504>. Analysis of this protein sequence reveals the following:

```
Possible site: 17
>>> Seems to have no N-terminal signal sequence
----- Final Results -----
                            bacterial cytoplasm --- Certainty = 0.3799(Affirmative) < succ>
                              bacterial membrane --- Certainty = 0.0000(Not Clear) < succ>
                                bacterial outside --- Certainty = 0.0000(Not Clear) < succ>
```

[2856] The protein has no significant homology with any sequences in the GENPEPT database.

[2857] A related DNA sequence was identified in S. pyogenes <SEQ ID 1505> which encodes the amino acid sequence <SEQ ID 1506>. Analysis of this protein sequence reveals the following:

```
Possible site: 31
>>> Seems to have no N-terminal signal sequence
----- Final Results -----
                            bacterial cytoplasm --- Certainty = 0.3775(Affirmative) < succ>
                              bacterial membrane --- Certainty = 0.0000(Not Clear) < succ>
                                bacterial outside --- Certainty = 0.0000(Not Clear) < succ>
```

[2858] An alignment of the GAS and GBS proteins is shown below:

| Identities = 43/46 (93%), Positives = 46/46 (99%) | | | |
|---|---|---|---|
| Query: | 1 | MTKQHRETLIWYRASHQEREKLLDFGLVDKSQYVTLLRQLRKKYAI | 46 |
| | | MTKQHRETLIWYRASHQERE+LLDFGLVDK++YVTLLRQLRKKYAI | |
| Sbjct: | 1 | MTKQHRETLIWYRASHQERERLLDFGLVDKARYVTLLRQLRKKYAI | 46 |

[2859] Based on this analysis, it was predicted that these proteins and their epitopes could be useful antigens for vaccines or diagnostics.

### EXAMPLE 471

[2860] A DNA sequence (GBSx0508) was identified in S. agalactiae <SEQ ID 1507> which encodes the amino acid sequence <SEQ ID 1508>. Analysis of this protein sequence reveals the following:

```
Possible site: 61
>>> Seems to have no N-terminal signal sequence
----- Final Results -----
                            bacterial cytoplasm --- Certainty = 0.4308(Affirmative) < succ>
                              bacterial membrane --- Certainty = 0.0000(Not Clear) < succ>
                                bacterial outside --- Certainty = 0.0000(Not Clear) < succ>
```

[2861] The protein has no significant homology with any sequences in the GENPEPT database.

[2862] A related DNA sequence was identified in S. pyogenes <SEQ ID 1509> which encodes the amino acid sequence <SEQ ID 1510>. Analysis of this protein sequence reveals the following:

```
Possible site: 61
>>> Seems to have no N-terminal signal sequence
----- Final Results -----
                            bacterial cytoplasm --- Certainty = 0.4308(Affirmative) < succ>
                              bacterial membrane --- Certainty = 0.0000(Not Clear) < succ>
                                bacterial outside --- Certainty = 0.0000(Not Clear) < succ>
```

[2863] An alignment of the GAS and GBS proteins is shown below:

| Identities = 76/77 (98%), Positives = 76/77 (98%) | | | |
|---|---|---|---|
| Query: | 1 | MDQEIFNFFNKQIKKDFGKTASKETFAKFASYCAEGIEKNGVKPIFNWINLYAFGTGMTT | 60 |
| | | MDQEIFNFFNKQIKKDFGKTASKETFAKFASYCAEGIEKNGVKPIFNWINLYAFGTGMTT | |
| Sbjct: | 1 | MDQEIFNFFNKQIKKDFGKTASKETFAKFASYCAEGIEKNGVKPIFNWINLYAFGTGMTT | 60 |
| Query: | 61 | AEADRLRIERYKQENTL | 77 |
| | | AEADRLRIERYKQEN L | |
| Sbjct: | 61 | AEADRLRIERYKQENAL | 77 |

[2864] Based on this analysis, it was predicted that these proteins and their epitopes could be useful antigens for vaccines or diagnostics.

### EXAMPLE 472

[2865] A DNA sequence (GBSx0509) was identified in S. agalactiae <SEQ ID 1511> which encodes the amino acid sequence <SEQ ID 1512>. Analysis of this protein sequence reveals the following:

```
Possible site: 27
>>> Seems to have no N-terminal signal sequence
----- Final Results -----
                            bacterial cytoplasm --- Certainty = 0.2706(Affirmative) < succ>
                              bacterial membrane --- Certainty = 0.0000(Not Clear) < succ>
                                bacterial outside --- Certainty = 0.0000(Not Clear) < succ>
```

[2866] A related DNA sequence was identified in S. pyogenes <SEQ ID 1513> which encodes the amino acid sequence <SEQ ID 1514>. Analysis of this protein sequence reveals the following:

```
Possible site: 23
>>> Seems to have no N-terminal signal sequence
----- Final Results -----
                            bacterial cytoplasm --- Certainty = 0.3316(Affirmative) < succ>
                              bacterial membrane --- Certainty = 0.0000(Not Clear) < succ>
                                bacterial outside --- Certainty = 0.0000(Not Clear) < succ>
```

[2867] An alignment of the GAS and GBS proteins is shown below:

| Identities = 52/127 (40%), Positives = 75/127 (58%), Gaps = 1/127 (0%) | | | |
|---|---|---|---|
| Query: | 160 | EDRFVDVVEANLGRGLVKFEFDMINDYLIGQNVSKDLFLEAVKVAVANNVRKFNYIARIL | 219 |
| | | E + + + GR + FE + I ++ N+ ++ A++ AV NN + YI +IL | |
| Sbjct: | 3 | EKKLFENFQLTFGRMISPFEIEDIQKWIHEDNMPIEVVNLALREAVENNKISWKYINKIL | 62 |
| Query: | 220 | DNWINDGIKTPEQAYQAQRDFKAKKANKTMQSQSNVPSWSNPDYKGPDLKEFALGSIDDI | 279 |
| | | +W G T E+ + F K +++ + SNVPSWSNPDYK PDL+EFALGS+D I | |
| Sbjct: | 63 | VDWYKSGDTTVEKVRDRLQRFDDSKKQRSVTT-SNVPSWSNPDYKEPDLEEFALGSMDGI | 121 |
| Query: | 280 | EDGSGDF | 286 |
| | | EDGSGDF | |
| Sbjct: | 122 | EDGSGDF | 128 |

[2868] Based on this analysis, it was predicted that these proteins and their epitopes could be useful antigens for vaccines or diagnostics.

### EXAMPLE 473

[2869] A DNA sequence (GBSx0510) was identified in S. agalactiae <SEQ ID 1515> which encodes the amino acid sequence <SEQ ID 1516>. Analysis of this protein sequence reveals the following:

| Possible site: 26 | | | | |
|---|---|---|---|---|
| >>> Seems to have an uncleavable N-term signal seq | | | | |
| | INTEGRAL | Likelihood = −5.63 | Transmembrane | 13-29 (11-31) |

```
----- Final Results -----
                              bacterial membrane --- Certainty = 0.3251(Affirmative) < succ>
                                bacterial outside --- Certainty = 0.0000(Not Clear) < succ>
                            bacterial cytoplasm --- Certainty = 0.0000(Not Clear) < succ>
```

[2870] A related GBS nucleic acid sequence <SEQ ID 9647> which encodes amino acid sequence <SEQ ID 9648> was also identified.

[2871] The protein has no significant homology with any sequences in the GENPEPT database.

[2872] No corresponding DNA sequence was identified in S. pyogenes.

[2873] Based on this analysis, it was predicted that these proteins and their epitopes could be useful antigens for vaccines or diagnostics.

### EXAMPLE 474

[2874] A DNA sequence (GBSx0511) was identified in S. agalactiae <SEQ ID 1517> which encodes the amino acid sequence <SEQ ID 1518>. Analysis of this protein sequence reveals the following:

```
Possible site: 34
>>> Seems to have no N-terminal signal sequence
----- Final Results -----
                            bacterial cytoplasm --- Certainty = 0.5822(Affirmative) < succ>
                              bacterial membrane --- Certainty = 0.0000(Not Clear) < succ>
                                bacterial outside --- Certainty = 0.0000(Not Clear) < succ>
```

[2875] The protein has no significant homology with any sequences in the GENPEPT database.

[2876] No corresponding DNA sequence was identified in S. pyogenes.

[2877] Based on this analysis, it was predicted that this protein and its epitopes, could be useful antigens for vaccines or diagnostics.

### EXAMPLE 475

[2878] A DNA sequence (GBSx0512) was identified in S. agalactiae <SEQ ID 1519> which encodes the amino acid sequence <SEQ ID 1520>. Analysis of this protein sequence reveals the following:

```
Possible site: 13
>>> Seems to have no N-terminal signal sequence
----- Final Results -----
                            bacterial cytoplasm --- Certainty = 0.4175(Affirmative) < succ>
                              bacterial membrane --- Certainty = 0.0000(Not Clear) < succ>
                                bacterial outside --- Certainty = 0.0000(Not Clear) < succ>
```

[2879] The protein has no significant homology with any sequences in the GENPEPT database.

[2880] No corresponding DNA sequence was identified in S. pyogenes.

[2881] Based on this analysis, it was predicted that this protein and its epitopes, could be useful antigens for vaccines or diagnostics.

### EXAMPLE 476

[2882] A DNA sequence (GBSx0513) was identified in S. agalactiae <SEQ ID 1521> which encodes the amino acid sequence <SEQ ID 1522>. This protein is predicted to be P1-antirepressor homolog. Analysis of this protein sequence reveals the following:

```
Possible site: 37
>>> Seems to have no N-terminal signal sequence
----- Final Results -----
                            bacterial cytoplasm --- Certainty = 0.3411(Affirmative) < succ>
                              bacterial membrane --- Certainty = 0.0000(Not Clear) < succ>
                                bacterial outside --- Certainty = 0.0000(Not Clear) < succ>
```

[2883] A related GBS nucleic acid sequence <SEQ ID 9645> which encodes amino acid sequence <SEQ ID 9646> was also identified.

[2884] The protein has homology with the following sequences in the GENPEPT database:

| >GP: AAG31333 GB: AF182207 ORF 169a [Bacteriophage mv4] | | | |
|---|---|---|---|
| Identities = 88/167 (52%), Positives = 122/167 (72%) | | | |
| Query: | 100 | MLQRNEKSKQVRKYFIQVEKDFNSPEKIMARALLMADKKITNLTMENNQLQLDLKEAQKQ | 159 |
| | | M+ + K K++R+YFIQVEK++NSPE I+ RAL +++ +I L +N L L L+E+ K+ | |
| Sbjct: | 1 | MMSKTAKGKEIRQYFIQVEKNWNSPEMIIQRALEISNARIQELQAQNKSLTLQLEESNKK | 60 |
| Query: | 160 | ARYLDLIIESKGALRVTQIAADYGMSVNKFNKTLLEFGVQHKVNGQWILYKRHMGKGYTD | 219 |
| | | A YLD+I+ + L TQIAADYG S FN+ L E G+QHKVNGQWILYK +MGKGY | |
| Sbjct: | 61 | ASYLDIILGTPDLLATTQIAADYGYSARTFNQLLKEVGIQHKVNGQWILYKAYMGKGYVQ | 120 |
| Query: | 220 | SHTFDYQDKNGHTRANVTTTWTQKGRLFLYELLKDNNILPLIEQEDI | 266 |
| | | S +F ++D+ GH R+ +T WTQKGR +Y++LK+N LPLIE++DI | |
| Sbjct: | 121 | SKSFAFKDRKGHDRSKPSTYWTQKGRKLIYDVLKENGTLPLIERDDI | 167 |

[2885] A related DNA sequence was identified in S. pyogenes <SEQ ID 1523> which encodes the amino acid sequence <SEQ ID 1524>. Analysis of this protein sequence reveals the following:

```
Possible site: 19
>>> Seems to have no N-terminal signal sequence
----- Final Results -----
                            bacterial cytoplasm --- Certainty = 0.4214(Affirmative) < succ>
                              bacterial membrane --- Certainty = 0.0000(Not Clear) < succ>
                                bacterial outside --- Certainty = 0.0000(Not Clear) < succ>
```

[2886] An alignment of the GAS and GBS proteins is shown below:

| Identities = 130/249 (52%), Positives = 163/249 (65%), Gaps = 14/249 (5%) | | | |
|---|---|---|---|
| Query: | 19 | MNQLINITLNENQEPVVSGRDLHNVLNIKTQYTKWLERMSEYGFEENVDYIAISQKRLTA | 78 |
| | | MNQLIN+TLNENQEPVVSGRDLH VL IKTQYTKWLERMSEYGF EN D++AISQKRLTA | |
| Sbjct: | 1 | MNQLINVTLNENQEPVVSGRDLHKVLEIKTQYTKWLERMSEYGFVENEDFMAISQKRLTA | 60 |
| Query: | 79 | QGNRTEYIDHVLKLDMAKEIAMLQRNEKSKQVRKYFIQVEKDFNSPEKIMARALLMADKK | 138 |
| | | QGN+TEY DHVLKLDMAKEIAMLQRNEKSK+VRKYFIQVEKDFNSPEKIMARALLMADKK | |
| Sbjct: | 61 | QGNQTEYTDHVLKLDMAKEIAMLQRNEKSKEVRKYFIQVEKDFNSPEKIMARALLMADKK | 120 |
| Query: | 139 | ITNLTMENNQLQLDLKEAQKQARYLDLIIESKGALRVTQIAA-----DYGMSVNKFNKTL | 193 |
| | | + ++L+ ++ + + + D + S ++ V ++A + + L | |
| Sbjct: | 121 | V-------HKLEAQIEADRPKVLFADAVSASHTSILVGELAKLLKQNGVNIGATRLFTWL | 173 |
| Query: | 194 | LEFGVQHKVNGQ-WIL-YKRHMGKGYTDSHTFDYQDKNGHTRANVTTTWTQKGRLFLYEL | 251 |
| | | + G K NG+ W + ++ + G +GH + T T KG+ + | |
| Sbjct: | 174 | RKHGYLIKRNGRDWNMPTQKSVELGLIRVKETSITHSDGHITVSKTPLVTGKGQQYFINK | 233 |
| Query: | 252 | LKDNNILPL | 260 |
| | | + LP+ | |
| Sbjct: | 234 | FLNQEYLPV | 242 |

[2887] Based on this analysis, it was predicted that these proteins and their epitopes could be useful antigens for vaccines or diagnostics.

### EXAMPLE 477

[2888] A DNA sequence (GBSx0514) was identified in S. agalactiae <SEQ ID 1525> which encodes the amino acid sequence <SEQ ID 1526>. Analysis of this protein sequence reveals the following:

```
Possible site: 44
>>> Seems to have no N-terminal signal sequence
----- Final Results -----
                            bacterial cytoplasm --- Certainty = 0.4205(Affirmative) < succ>
                              bacterial membrane --- Certainty = 0.0000(Not Clear) < succ>
                                bacterial outside --- Certainty = 0.0000(Not Clear) < succ>
```

[2889] The protein has no significant homology with any sequences in the GENPEPT database.

[2890] A related DNA sequence was identified in S. pyogenes <SEQ ID 1527> which encodes the amino acid sequence <SEQ ID 1528>. Analysis of this protein sequence reveals the following:

```
Possible site: 32
>>> Seems to have no N-terminal signal sequence
----- Final Results -----
                              bacterial membrane --- Certainty = 0.0000(Not Clear) < succ>
                                bacterial outside --- Certainty = 0.0000(Not Clear) < succ>
                            bacterial Cytoplasm --- Certainty = 0.0000(Not Clear) < succ>
```

[2891] An alignment of the GAS and GBS proteins is shown below:

| Identities = 21/63 (33%), Positives = 31/63 (48%), Gaps = 1/63 (1%) | | | |
|---|---|---|---|
| Query: | 1 | MQQFNLKQLREKKGFTQNELADKANVSRSLVVGLETGSYSETSTASLKKLAKALDVKIKD | 60 |
| | | M+ LK R K +Q LAD VSR + +E G Y+ T + + + LD + D | |
| Sbjct: | 1 | MKNLKLKAARAGKDLSQQALADLVGVSRQTIAAVEKGDYNPTINLCI-AICRVLDKTLDD | 59 |
| Query: | 61 | LFF | 63 |
| | | LF+ | |
| Sbjct: | 60 | LFW | 62 |

[2892] Based on this analysis, it was predicted that these proteins and their epitopes could be useful antigens for vaccines or diagnostics.

### EXAMPLE 478

[2893] A DNA sequence (GBSx0515) was identified in S. agalactiae <SEQ ID 1529> which encodes the amino acid sequence <SEQ ID 1530>. Analysis of this protein sequence reveals the following:

```
Possible site: 26
>>> Seems to have no N-terminal signal sequence
----- Final Results -----
                            bacterial cytoplasm --- Certainty = 0.0396(Affirmative) < succ>
                              bacterial membrane --- Certainty = 0.0000(Not Clear) < succ>
                                bacterial outside --- Certainty = 0.0000(Not Clear) < succ>
```

[2894] The protein has homology with the following sequences in the GENPEPT database:

| >GP: BAA17582 GB: D90907 hypothetical protein [Synechocystis sp.] | | | |
|---|---|---|---|
| Identities = 45/164 (27%), Positives = 79/164 (47%), Gaps = 33/164 (20%) | | | |
| Query: | 102 | EEEELRNLFTKLIASSMDKSKNEFNHPSFIEIIKQFDKIDAQNFKIISDLYFKKGFVATG | 161 |
| | | ++E L+ L+ L+AS++ +S + SF+E++KQ D +DA+ ++ L+ + | |
| Sbjct: | 97 | DDENLQTLWANLLASALTESDRTNSTKSFVEVLKQVDIVDAELLNVLYLLHLRV------ | 150 |
| Query: | 162 | TYYTTIIGQDKPLEHIASHVFVDNLEQNDIAIQSSSLTNLERLGLIQINY--KAHVDEKE | 219 |
| | | KP E ++ D+ + N + I S +L NLERLGL+ I+ VDE+ | |
| Sbjct: | 151 | --------MAKPDEFTYAN---DSRKYNIVQI-SVALNNLERLGLLIIHKYDDTPVDEEA | 198 |
| Query: | 220 | YYNILNNSFITKKNSELKEQNKRVLTNLGMITLTLFGVRFSKTC | 263 |
| | | +I ++ N K ++LTLFG+ F + C | |
| Sbjct: | 199 | RISIW---YMQDGNRSFKAH----------VSLTLFGIHFMRVC | 229 |

[2895] A related DNA sequence was identified in S. pyogenes <SEQ ID 1531> which encodes the amino acid sequence <SEQ ID 1532>. Analysis of this protein sequence reveals the following:

```
Possible site: 19
>>> Seems to have no N-terminal signal sequence
----- Final Results -----
                            bacterial cytoplasm --- Certainty = 0.0151(Affirmative) < succ>
                              bacterial membrane --- Certainty = 0.0000(Not Clear) < succ>
                                bacterial outside --- Certainty = 0.0000(Not Clear) < succ>
```

[2896] An alignment of the GAS and GBS proteins is shown below:

| Identities = 64/215 (29%), Positives = 105/215 (48%), Gaps = 23/215 (10%) | | | |
|---|---|---|---|
| Query: | 65 | QKLAKEIQDVVSKNIE-NLQEPSLSIAGPALEASKFYLEEEELRNLFTKLIASSMDKSKN | 123 |
| | | +K EI SK + +L+EP I PA+ S+ YL E LRN+F + IAS+ ++ K | |
| Sbjct: | 72 | EKFKNEIDCEFSKIPQTSLKEPVEYILYPAINESEQYLSNETLRNMFARTIASTFNQDKE | 131 |
| Query: | 124 | EFNHPSFIEIIKQFDKIDAQNFKIISDLYFKKGFVATGTYYTTIIGQDKPLEHI------ | 177 |
| | | + H +F++IIKQ +DAQN +I+ IG E++ | |
| Sbjct: | 132 | KDLHSAFVQIIKQMTPLDAQNLLLINQ-------EGNNLIANLQIGVHYSKENLSGTVNK | 184 |
| Query: | 178 | ASHVFVDNLEQNDIAIQSSSLTNLERLGLIQINYKAHVDEKEYYNILNNSFITKKNSELK | 237 |
| | | A+++++ L+ + I +SS+ NL RLGLI+++Y + + Y +I + SE+ | |
| Sbjct: | 185 | ANNIYLSKLDYSPDII-ASSIDNLTRLGLIKVDYLHYPLDSNYESIKQTTIYKSLESEIN | 243 |
| Query: | 238 | EQNKRVLTNL--------GMITLTLFGVRFSKTCL | 264 |
| | | N +N G ++LT FG +F CL | |
| Sbjct: | 244 | TLNLFKTSNTKYDIKIEKGKVSLTDFGKKFISVCL | 278 |

[2897] Based on this analysis, it was predicted that these proteins and their epitopes could be useful antigens for vaccines or diagnostics.

### EXAMPLE 479

[2898] A DNA sequence (GBSx0516) was identified in S. agalactiae <SEQ ID 1533> which encodes the amino acid sequence <SEQ ID 1534>. Analysis of this protein sequence reveals the following:

| Possible site: 16 | | | | |
|---|---|---|---|---|
| >>> Seems to have an uncleavable N-term signal seq | | | | |
| | INTEGRAL | Likelihood = −8.55 | Transmembrane | 3-19 (1-26) |

```
----- Final Results -----
                              bacterial membrane --- Certainty = 0.4418(Affirmative) < succ>
                                bacterial outside --- Certainty = 0.0000(Not Clear) < succ>
                            bacterial cytoplasm --- Certainty = 0.0000(Not Clear) < succ>
```

[2899] The protein has no significant homology with any sequences in the GENPEPT database.

[2900] No corresponding DNA sequence was identified in S. pyogenes.

[2901] Based on this analysis, it was predicted that this protein and its epitopes, could be useful antigens for vaccines or diagnostics.

### EXAMPLE 480

[2902] A DNA sequence (GBSx0517) was identified in S. agalactiae <SEQ ID 1535> which encodes the amino acid sequence <SEQ ID 1536>. Analysis of this protein sequence reveals the following:

| Possible site: 47 | | | | |
|---|---|---|---|---|
| >>> Seems to have no N-terminal signal sequence | | | | |
| | INTEGRAL | Likelihood = −4.99 | Transmembrane | 35-51 (30-51) |

```
----- Final Results -----
                              bacterial membrane --- Certainty = 0.2996(Affirmative) < succ>
                                bacterial outside --- Certainty = 0.0000(Not Clear) < succ>
                            bacterial cytoplasm --- Certainty = 0.0000(Not Clear) < succ>
```

[2903] The protein has no significant homology with any sequences in the GENPEPT database.

[2904] A related DNA sequence was identified in S. pyogenes <SEQ ID 1537> which encodes the amino acid sequence <SEQ ID 1538>. Analysis of this protein sequence reveals the following:

| Possible site: 47 | | | | |
|---|---|---|---|---|
| >>> Seems to have no N-terminal signal sequence | | | | |
| | INTEGRAL | Likelihood = −4.94 | Transmembrane | 31-47 (30-51) |

```
----- Final Results -----
                              bacterial membrane --- Certainty = 0.2975(Affirmative) < succ>
                                bacterial outside --- Certainty = 0.0000(Not Clear) < succ>
                            bacterial cytoplasm --- Certainty = 0.0000(Not Clear) < succ>
```

[2905] An alignment of the GAS and GBS proteins is shown below:

| Identities = 45/52 (86%), Positives = 48/52 (91%) | | | |
|---|---|---|---|
| Query: | 1 | MNWKKLMLGDLEHTFTSRDGKEKTSVEFEGGVLPALLVLGGITWLIAWLITK | 52 |
| | | MNWKKLM GDLEHTFT+ DGKEKTS+EFEGGVLPALLVLGGI W+IAW ITK | |
| Sbjct: | 1 | MNWKKLMFGDLEHTFTNHDGKEKTSIEFEGGVLPALLVLGGIAWMIAWFITK | 52 |

[2906] Based on this analysis, it was predicted that these proteins and their epitopes could be useful antigens for vaccines or diagnostics.

### EXAMPLE 481

[2907] A DNA sequence (GBSx0518) was identified in S. agalactiae <SEQ ID 1539> which encodes the amino acid sequence <SEQ ID 1540>. Analysis of this protein sequence reveals the following:

```
Possible site: 35
>>> Seems to have no N-terminal signal sequence
----- Final Results -----
                            bacterial cytoplasm --- Certainty = 0.3445(Affirmative) < succ>
                              bacterial membrane --- Certainty = 0.0000(Not Clear) < succ>
                                bacterial outside --- Certainty = 0.0000(Not Clear) < succ>
```

[2908] The protein has no significant homology with any sequences in the GENPEPT database.

[2909] No corresponding DNA sequence was identified in S. pyogenes.

[2910] Based on this analysis, it was predicted that this protein and its epitopes, could be useful antigens for vaccines or diagnostics.

### EXAMPLE 482

[2911] A DNA sequence (GBSx0519) was identified in S. agalactiae <SEQ ID 1541> which encodes the amino acid sequence <SEQ ID 1542>. Analysis of this protein sequence reveals the following:

```
Possible site: 37
>>> Seems to have no N-terminal signal sequence
----- Final Results -----
                            bacterial cytoplasm --- Certainty = 0.3934(Affirmative) < succ>
                              bacterial membrane --- Certainty = 0.0000(Not Clear) < succ>
                                bacterial outside --- Certainty = 0.0000(Not Clear) < succ>
```

[2912] The protein has no significant homology with any sequences in the GENPEPT database.

[2913] No corresponding DNA sequence was identified in S. pyogenes.

[2914] Based on this analysis, it was predicted that this protein and its epitopes, could be useful antigens for vaccines or diagnostics.

### EXAMPLE 483

[2915] A DNA sequence (GBSx0520) was identified in S. agalactiae <SEQ ID 1543> which encodes the amino acid sequence <SEQ ID 1544>. This protein is predicted to be repressor protein. Analysis of this protein sequence reveals the following:

```
Possible site: 61
>>> Seems to have no N-terminal signal sequence
----- Final Results -----
                            bacterial cytoplasm --- Certainty = 0.0905(Affirmative) < succ>
                              bacterial membrane --- Certainty = 0.0000(Not Clear) < succ>
                                bacterial outside --- Certainty = 0.0000(Not Clear) < succ>
```

[2916] A related GBS nucleic acid sequence <SEQ ID 9643> which encodes amino acid sequence <SEQ ID 9644> was also identified.

[2917] A related DNA sequence was identified in S. pyogenes <SEQ ID 1545> which encodes the amino acid sequence <SEQ ID 1546>. Analysis of this protein sequence reveals the following:

```
Possible site: 55
>>> Seems to have no N-terminal signal sequence
----- Final Results -----
                            bacterial cytoplasm --- Certainty = 0.3117(Affirmative) < succ>
                              bacterial membrane --- Certainty = 0.0000(Not Clear) < succ>
                                bacterial outside --- Certainty = 0.0000(Not Clear) < succ>
```

[2918] An alignment of the GAS and GBS proteins is shown below:

| Identities = 175/264 (66%), Positives = 207/264 (78%), Gaps = 19/264 (7%) | | | |
|---|---|---|---|
| Query: | 34 | LGKYIKKYRDTNNLSMAEFAKESGISKAY--VSILEKNRDPRNGKEIIPSIPIIKKVSDT | 91 |
| | | LG I+K R+ N++ E ++ G+ K Y VS EKN + GK++ KK+++ | |
| Sbjct: | 24 | LGDRIRKLREGRNMTQTELSEILGM-KTYTTVSKWEKNENFPKGKDL-------KKLAEI | 75 |
| Query: | 92 | IGISFDDLLNSLDENQIVALNETKTEKNLTSSTLQKITSTSSQLEQPRQEKVLSFANEQL | 151 |
| | | ++ D LL L ++K K + +I S +QLEQPRQEKVL+FANEQL | |
| Sbjct: | 76 | FNVTSDYLLG---------LTDSKLGKITIQNEQPEIVSIYNQLEQPRQEKVLNFANEQL | 126 |
| Query: | 152 | EEQNKVVSMFDRKVEETENYITDYVEGLVAAGLGAYQEDNLHMEVKLRADDVPDKYDTIA | 211 |
| | | EEQNK VS+FD+K EETE+YITDYVEGLVAAGLGAYQEDNLHM+VKLR+DDVPD+YDTIA | |
| Sbjct: | 127 | EEQNKTVSIFDKKSEETEDYITDYVEGLVAAGLGAYQEDNLHMKVKLRSDDVPDEYDTIA | 186 |
| Query: | 212 | KVAGNSMEPLIQDNDLLFVKVSSQVDMNDIGIFQVNGKNFVKKLKRDYDGAWYLQSLNKS | 271 |
| | | KVAG+SMEPLIQDNDLLF+KVSSQVDMNDIGIFQVNGKNFVKKLKRDYDGAWYLQSLNKS | |
| Sbjct: | 187 | KVAGDSMEPLIQDNDLLFIKVSSQVDMNDIGIFQVNGKNFVKKLKRDYDGAWYLQSLNKS | 246 |
| Query: | 272 | YEEIYLSENDNIRTIGEVVDIYRE | 295 |
| | | YEEIYLS++D+IRTIGEVVDIYRE | |
| Sbjct: | 247 | YEEIYLSKDDDIRTIGEVVDIYRE | 270 |

[2919] Based on this analysis, it was predicted that these proteins and their epitopes could be useful antigens for vaccines or diagnostics.

### EXAMPLE 484

[2920] A DNA sequence (GBSx0521) was identified in S. agalactiae <SEQ ID 1547> which encodes the amino acid-sequence <SEQ ID 1548>. Analysis of this protein sequence reveals the following:

```
Possible site: 45
>>> Seems to have no N-terminal signal sequence
----- Final Results -----
                            bacterial cytoplasm --- Certainty = 0.3760(Affirmative) < succ>
                              bacterial membrane --- Certainty = 0.0000(Not Clear) < succ>
                                bacterial outside --- Certainty = 0.0000(Not Clear) < succ>
```

[2921] The protein has no significant homology with any sequences in the GENPEPT database.

[2922] No corresponding DNA sequence was identified in S. pyogenes.

[2923] Based on this analysis, it was predicted that this protein and its epitopes, could be useful antigens for vaccines or diagnostics.

### EXAMPLE 485

[2924] A DNA sequence (GBSx0522) was identified in S. agalactiae <SEQ ID 1549> which encodes the amino acid sequence <SEQ ID 1550>. This protein is predicted to be integrase (ripX). Analysis of this protein sequence reveals the following:

```
Possible site: 20
>>> Seems to have no N-terminal signal sequence
----- Final Results -----
                            bacterial cytoplasm --- Certainty = 0.2719(Affirmative) < succ>
                              bacterial membrane --- Certainty = 0.0000(Not Clear) < succ>
                                bacterial outside --- Certainty = 0.0000(Not Clear) < succ>
```

[2925] The protein has homology with the following sequences in the GENPEPT database:

| >GP: CAB96616 GB: AJ400629 integrase [Streptococcus pneumoniae | | | |
|---|---|---|---|
| bacteriophage MM1] | | | |
| Identities = 36/59 (61%), Positives = 48/59 (81%), Gaps = 1/59 (1%) | | | |
| Query: | 2 | KIYGDYHTHLFRHSHISFLAEKGIPLNAIMDRVGHSDPKTTLSIYSHTTVNMKE-IINK | 59 |
| | | KI + +H+FRHSHISFLAE G+P+ +IMDRVGHS+ K TL IYSHTT +M++ ++NK | |
| Sbjct: | 312 | KIEKNLSSHIFRHSHISFLAESGLPIKSIMDRVGHSNAKMTLEIYSHTTEDMEDKLVNK | 370 |

[2926] A related DNA sequence was identified in S. pyogenes <SEQ ID 1551> which encodes the amino acid sequence <SEQ ID 1552>. Analysis of this protein sequence reveals the following:

```
Possible site: 20
>>> Seems to have no N-terminal signal sequence
----- Final Results -----
                            bacterial cytoplasm --- Certainty = 0.2719(Affirmative) < succ>
                              bacterial membrane --- Certainty = 0.0000(Not Clear) < succ>
                                bacterial outside --- Certainty = 0.0000(Not Clear) < succ>
```

[2927] An alignment of the GAS and GBS proteins is shown below:

| Identities = 63/71 (88%), Positives = 66/71 (92%) | | | |
|---|---|---|---|
| Query: | 1 | MKIYGDYHTHLFRHSHISFLAEKGIPLNAIMDRVGHSDPKTTLSIYSHTTVNMKEIINKQ | 60 |
| | | +KIYGDYHTHLFRHSHISFLAEKGIPLNAIMDRVGHSDPKTTLSIYSHTTVNMKEIINKQ | |
| Sbjct: | 1 | LKIYGDYHTHLFRHSHISFLAEKGIPLNAIMDRVGHSDPKTTLSIYSHTTVNMKEIINKQ | 60 |
| Query: | 61 | TAPFVPLLKSE | 71 |
| | | T PF +K + | |
| Sbjct: | 61 | TDPFKTGIKQK | 71 |

[2928] Based on this analysis, it was predicted that these proteins and their epitopes could be useful antigens for vaccines or diagnostics.

### EXAMPLE 486

[2929] A DNA sequence (GBSx0523) was identified in S. agalactiae <SEQ ID 1553> which encodes the amino acid sequence <SEQ ID 1554>. This protein is predicted to be 50S ribosomal protein L19 (rplS). Analysis of this protein sequence reveals the following:

```
Possible site: 54
>>> Seems to have no N-terminal signal sequence
----- Final Results -----
                            bacterial cytoplasm --- Certainty = 0.3331(Affirmative) < succ>
                              bacterial membrane --- Certainty = 0.0000(Not Clear) < succ>
                                bacterial outside --- Certainty = 0.0000(Not Clear) < succ>
```

[2930] A related GBS nucleic acid sequence <SEQ ID 9641> which encodes amino acid sequence <SEQ ID 9642> was also identified.

[2931] The protein has homology with the following sequences in the GENPEPT database:

| >GP: AAC01534 GB: U88973 ribosomal protein L19 | | | |
|---|---|---|---|
| [Streptococcus thermophilus] | | | |
| Identities = 110/115 (95%), Positives = 112/115 (96%) | | | |
| Query: | 25 | MNPLIQSLTEGQLRSDIPEFRAGDTVRVHAKVVEGTRERIQIFEGVVISRKGQGISEMYT | 84 |
| | | MNPLIQSLTEGQLR+DIP FR GDTVRVHAKVVEGTRERIQIFEGVVISRKGQGISEMYT | |
| Sbjct: | 1 | MNPLIQSLTEGQLRTDIPSFRPGDTVRVHAKVVEGTRERIQIFEGVVISRKGQGISEMYT | 60 |
| Query: | 85 | VRKISGGIGVERTFPIHTPRVDKIEVVRYGKVRRAKLYYLRALQGKAARIKEIRR | 139 |
| | | VRKIS GIGVERTFPIHTPRVDKIEVVRYGKVRRAKLYYLRALQGKAARIKEIR+ | |
| Sbjct: | 61 | VRKISSGIGVERTFPIHTPRVDKIEVVRYGKVRRAKLYYLRALQGKAARIKEIRK | 115 |

[2932] A related DNA sequence was identified in S. pyogenes <SEQ ID 1555> which encodes the amino acid sequence <SEQ ID 1556>. Analysis of this protein sequence reveals the following:

```
Possible site: 15
>>> Seems to have no N-terminal signal sequence
----- Final Results -----
                            bacterial cytoplasm --- Certainty = 0.4849(Affirmative) < succ>
                              bacterial membrane --- Certainty = 0.0000(Not Clear) < succ>
                                bacterial outside --- Certainty = 0.0000(Not Clear) < succ>
```

[2933] An alignment of the GAS and GBS proteins is shown below:

| Identities = 111/115 (96%), Positives = 113/115 (97%) | | | |
|---|---|---|---|
| Query: | 25 | MNPLIQSLTEGQLRSDIPEFRAGDTVRVHAKVVEGTRERIQIFEGVVISRKGQGISEMYT | 84 |
| | | MNPLIQSLTEGQLRSDIP FR GDTVRVHAKVVEGTRERIQIFEGVVISRKGQGISEMYT | |
| Sbjct: | 1 | MNPLIQSLTEGQLRSDIPNFRPGDTVRVHAKVVEGTRERIQIFEGVVISRKGQGISEMYT | 60 |
| Query: | 85 | VRKISGGIGVERTFPIHTPRVDKIEVVRYGKVRRAKLYYLRALQGKAARIKEIRR | 139 |
| | | VRKISGGIGVERTFPIHTPRVDKIEV+R+GKVRRAKLYYLRALQGKAARIKEIRR | |
| Sbjct: | 61 | VRKISGGIGVERTFPIHTPRVDKIEVIRHGKVRRAKLYYLRALQGKAARIKEIRR | 115 |

[2934] Based on this analysis, it was predicted that these proteins and their epitopes could be useful antigens for vaccines or diagnostics.

### EXAMPLE 487

[2935] A DNA sequence (GBSx0524) was identified in S. agalactiae <SEQ ID 1557> which encodes the amino acid sequence <SEQ ID 1558>. This protein is predicted to be ISL2 protein. Analysis of this protein sequence reveals the following:

```
Possible site: 58
>>> Seems to have an uncleavable N-term signal seq
----- Final Results -----
                              bacterial membrane --- Certainty = 0.0000(Not Clear) < succ>
                                bacterial outside --- Certainty = 0.0000(Not Clear) < succ>
                            bacterial cytoplasm --- Certainty = 0.0000(Not Clear) < succ>
```

[2936] The protein has homology with the following sequences in the GENPEPT database:

| >GP: CAC18596 GB: AJ278419 IS1381 transposase [Streptococcus pneumoniae] | | | |
|---|---|---|---|
| Identities = 111/129 (86%), Positives = 117/129 (90%) | | | |
| Query: | 1 | MKAQAIVTSQGRIVSLDIAVNYCHDMKLFKMSRRNIGQAAKILADSGYQGIMKNYSQAQT | 60 |
| | | MK QAIVTSQGRIVSLDI VNYCHDMKLFKMSRRNIGQA KILADSGYQG+MK+Y QAQT | |
| Sbjct: | 1 | MKTQAIVTSQGRIVSLDITVNYCHDMKLFKMSRRNIGQAGKILADSGYQGLMKIYPQAQT | 60 |
| Query: | 61 | PRKSSKLKPLTLEDKTYNHTLSKERIKVENIFAKVKTFKIFSTTYRNRRKRFGLRMNLIA | 120 |
| | | RKSSKLKPLT+EDK NH LSKER KVENIFAKVKTFK+FSTTYR+ RKRFGLRMNL A | |
| Sbjct: | 61 | SRKSSKLKPLTVEDKACNHALSKERSKVENIFAKVKTFKMFSTTYRSHRKRFGLRMNLSA | 120 |
| Query: | 121 | GMINRELGF | 129 |
| | | G+IN ELGF | |
| Sbjct: | 121 | GIINHELGF | 129 |

[2937] No corresponding DNA sequence was identified in S. pyogenes.

[2938] Based on this analysis, it was predicted that this protein and its epitopes, could be useful antigens for vaccines or diagnostics.

### EXAMPLE 488

[2939] A DNA sequence (GBSx0526) was identified in S. agalactiae <SEQ ID 1559> which encodes the amino acid sequence <SEQ ID 1560>. Analysis of this protein sequence reveals the following:

| Possible site: 61 | | | | |
|---|---|---|---|---|
| >>> Seems to have an uncleavable N-term signal seq | | | | |
| | INTEGRAL | Likelihood = −10.99 | Transmembrane | 81-97 (67-107) |
| | INTEGRAL | Likelihood = -6.32 | Transmembrane | 8-24 (6-25) |
| | INTEGRAL | Likelihood = -2.76 | Transmembrane | 120-136 (120-136) |

```
----- Final Results -----
                              bacterial membrane --- Certainty = 0.5394(Affirmative) < succ>
                                bacterial outside --- Certainty = 0.0000(Not Clear) < succ>
                            bacterial cytoplasm --- Certainty = 0.0000(Not Clear) < succ>
```

[2940] The protein has homology with the following sequences in the GENPEPT database:

| >GP: BAB04382 GB: AP001509 unknown conserved protein in others | | | |
|---|---|---|---|
| [Bacillus halodurans] | | | |
| Identities = 53/150 (35%), Positives = 82/150 (54%), Gaps = 1/150 (0%) | | | |
| Query: | 1 | MLNPYKRIFTLGLLATFLLFIFHFGRYSGLGTNLIEASFTNKNLYDYDWLLKLCLTVITL | 60 |
| | | M N R F GL+ L +I Y+G G +++E SFT +++ Y +L KL T +T+ | |
| Sbjct: | 251 | MKNHTVRAFVGGLIIVALTYIIGSYDYNGRGLDMLEDSFT-QDVPPYAFLAKLVFTAVTM | 309 |
| Query: | 61 | AAGYQGGEVTPLFAIGASLGVIIAPILGLPVILVAALGYTSVFGSATNTLLGPILIGGEV | 120 |
| | | G+ GGE PLF +GA+LG + + LP+ +AALG FG NT + L+G E+ | |
| Sbjct: | 310 | GMGFVGGEAIPLFFVGATLGNTLHAFIDLPLSFLAALGMIVTFGGGANTPIAAFLLGVEM | 369 |
| Query: | 121 | FGFANTPYFVIVCLVAYSISHAHTIYGAQS | 150 |
| | | F +F + CL +Y S H ++ +Q+ | |
| Sbjct: | 370 | FNGKGIEFFFVACLTSYLFSGHHGLNPSQT | 399 |

[2941] A related DNA sequence was identified in S. pyogenes <SEQ ID 1561> which encodes the amino acid sequence <SEQ ID 1562>. Analysis of this protein sequence reveals the following:

| Possible site: 35 | | | | |
|---|---|---|---|---|
| >>> Seems to have no N-terminal signal sequence | | | | |
| | INTEGRAL | Likelihood = −11.99 | Transmembrane | 56-72 (53-76) |
| | INTEGRAL | Likelihood = −7.17 | Transmembrane | 337-353 (327-355) |
| | INTEGRAL | Likelihood = −6.74 | Transmembrane | 264-280 (260-282) |
| | INTEGRAL | Likelihood = −6.16 | Transmembrane | 167-183 (161-187) |
| | INTEGRAL | Likelihood = −5.26 | Transmembrane | 223-239 (217-242) |
| | INTEGRAL | Likelihood = −5.10 | Transmembrane | 20-36 (19-42) |
| | INTEGRAL | Likelihood = −0.37 | Transmembrane | 102-118 (102-119) |
| | INTEGRAL | Likelihood = −0.16 | Transmembrane | 300-316 (300-316) |

```
----- Final Results -----
                              bacterial membrane --- Certainty = 0.5798(Affirmative) < succ>
                                bacterial outside --- Certainty = 0.0000(Not Clear) < succ>
                            bacterial cytoplasm --- Certainty = 0.0000(Not Clear) < succ>
```

[2942] The protein has homology with the following sequences in the databases:

| >GP: BAB04382 GB: AP001509 unknown conserved protein in others | | | |
|---|---|---|---|
| [Bacillus halodurans] | | | |
| Identities = 129/397 (32%), Positives = 210/397 (52%), Gaps = 14/397 (3%) | | | |
| Query: | 20 | VLGLVGLALPIGGAVGVVDVIFGKGLLFLSEYRDHHLFLLLPFLALAGLVIVFLYDKLG- | 78 |
| | | +L + + IG VG + L E R++ + +L FL LAGL + +LY K G | |
| Sbjct: | 9 | LLTWIFFGIMIGAIVGSATALLLTVNDHLGETRENRPWFVL-FLPLAGLALGYLYMKAGT | 67 |
| Query: | 79 | ---KEVRQGMGLVFQVGHGQKNQIPPMLIPLILFSTWVTHLFGASAGREGVAVQIGATIS | 135 |
| | | E+ +G LV + G K ++ L PL+ T++T LFG S GREG A+Q+G +++ | |
| Sbjct: | 68 | SAGNELYKGNNLVIESVQG-KGKMLLRLGPLVYLGTFMTILFGGSTGREGAAIQMGGSVA | 126 |
| Query: | 136 | HYCRR-FVTSQEAARHLLIMGMAAGFAGLFQTPIAAVVFALEVLLVGTLRYSALLPSLVA | 194 |
| | | + F R LL+ G++AGF F TPI A +F +E+ +G L++ AL+P LVA | |
| Sbjct: | 127 | EAVNKLFKVKLIDTRILLMGGISAGFGAAFGTPITAAIFGMEMASLGRLKFEALVPCLVA | 186 |
| Query: | 195 | AYVASWTSHALG-LEKFTIVLEETLTITPLTLVKLIGLGLIFGLVGNSFAYLL-GWFKPY | 252 |
| | | ++V +T+ +E ++ ++ LT K+I L ++F LV + L G K | |
| Sbjct: | 187 | SFVGHYTTEKFWHVEHEKFIIATVPEVSALTFSKVILLAIVFSLVSVLYCQLRHGIHKLS | 246 |
| Query: | 253 | LSQKLPNPYFRIAFIGALLSICL--MIGHVGRYSGLGTNLIAAAFSGQTILTYDWLLKMI | 310 |
| | | + N R AF+G L+ + L +IG Y+G G +++ +F+ Q + Y +L K++ | |
| Sbjct: | 247 | EKYTMKNHTVR-AFVGGLIIVALTYIIGSYD-YNGRGLDMLEDSFT-QDVPPYAFLAKLV | 303 |
| Query: | 311 | VTVISLSAGFQGGEVTPLFAIGASLGIVLAPYLGLPVLLVAALGYTTVFGSATNTFWAPI | 370 |
| | | T +++ GF GGE PLF +GA+LG L ++ LP+ +AALG FG NT A | |
| Sbjct: | 304 | FTAVTMGMGFVGGEAIPLFFVGATLGNTLHAFIDLPLSFLAALGMIVTFGGGANTPIAAF | 363 |
| Query: | 371 | FIGIEVFGPENALAYFVTSAAAYMVSHRHSIYSYQKV | 407 |
| | | +G+E+F + +FV +Y+ S H ++ Q + | |
| Sbjct: | 364 | LLGVEMFNGKGIEFFFVACLTSYLFSGHHGLWPSQTI | 400 |

[2943] An alignment of the GAS and GBS proteins is shown below:

| Identities = 91/147 (61%), Positives = 111/147 (74%) | | | |
|---|---|---|---|
| Query: | 3 | NPYKRIFTLGLLATFLLFIFHFGRYSGLGTNLIEASFTNKNLYDYDWLLKLCLTVITLAA | 62 |
| | | NPY RI +G L + L I H GRYSGLGTNLI A+F+ + + YDWLLK+ +TVI+L+A | |
| Sbjct: | 259 | NPYFRIAFIGALLSICLMIGHVGRYSGLGTNLIAAAFSGQTILTYDWLLKMIVTVISLSA | 318 |
| Query: | 63 | GYQGGEVTPLFAIGASLGVIIAPILGLPVILVAALGYTSVFGSATNTLLGPILIGGEVFG | 122 |
| | | G+QGGEVTPLFAIGASLG+++AP LGLPV+LVAALGYT+VFGSATNT PI IG EVFG | |
| Sbjct: | 319 | GFQGGEVTPLFAIGASLGIVLAPYLGLPVLLVAALGYTTVFGSATNTFWAPIFIGIEVFG | 378 |
| Query: | 123 | FANTPYFVIVCLVAYSISHAHTIYGAQ | 149 |
| | | N + + AY +SH H+IY Q | |
| Sbjct: | 379 | PENALAYFVTSAAAYMVSHRHSIYSYQ | 405 |

[2944] Based on this analysis, it was predicted that these proteins and their epitopes could be useful antigens for vaccines or diagnostics.

### EXAMPLE 489

[2945] A DNA sequence (GBSx0527) was identified in S. agalactiae <SEQ ID 1563> which encodes the amino acid sequence <SEQ ID 1564>. Analysis of this protein sequence reveals the following:

| Possible site: 27 | | | | |
|---|---|---|---|---|
| >>> Seems to have a cleavable N-term signal seq. | | | | |
| | INTEGRAL | Likelihood = −8.65 | Transmembrane | 47-63 (45-70) |
| | INTEGRAL | Likelihood = −5.04 | Transmembrane | 219-235 (208-237) |
| | INTEGRAL | Likelihood = −3.35 | Transmembrane | 168-184 (168-187) |
| | INTEGRAL | Likelihood = −0.48 | Transmembrane | 141-157 (141-157) |

```
----- Final Results -----
                              bacterial membrane --- Certainty = 0.4461(Affirmative) < succ>
                                bacterial outside --- Certainty = 0.0000(Not Clear) < succ>
                            bacterial cytoplasm --- Certainty = 0.0000(Not Clear) < succ>
```

[2946] A related GBS nucleic acid sequence <SEQ ID 9317> which encodes amino acid sequence <SEQ ID 9318> was also identified.

[2947] The protein has homology with the following sequences in the GENPEPT database:

| >GP: BAB04382 GB: AP001509 unknown conserved protein in others | | | |
|---|---|---|---|
| [Bacillus halodurans] | | | |
| Identities = 75/223 (33%), Positives = 119/223 (52%), Gaps = 18/223 (8%) | | | |
| Query: | 17 | FSLLIGGVVGAITAVFGRVLLFLTAFRSDYIAYLLPFLSIVGLFIVFVYQKFGGKS---- | 72 |
| | | F ++IG +VG+ TA+ V L R + ++L FL + GL + ++Y K G + | |
| Sbjct: | 15 | FGIMIGAIVGSATALLLTVNDHLGETRENRPWFVL-FLPLAGLALGYLYMKAGTSAGNEL | 73 |
| Query: | 73 | VKGMGLVFEVGHGNEETIPKRLVPLVILTTWLTHLFGGSAGREGVAVQIGATVSHYFQKY | 132 |
| | | KG LV E G + + RL PLV L T++T LFGGS GREG A+Q+G +V+ K | |
| Sbjct: | 74 | YKGNNLVIESVQGKGKML-LRLGPLVYLGTFMTILFGGSTGREGAAIQMGGSVAEAVNKL | 132 |
| Query: | 133 | CRLQNASQLFLVM-GMAAGFAGLFQTPLAATFFAIEVLVVGRLMVSYVLPSLIAALTANF | 191 |
| | | +++ L+M G++AGF F TP+ A F +E+ +GRL ++P L+A+ ++ | |
| Sbjct: | 133 | FKVKLIDTRILLMGGISAGFGAAFGTPITAAIFGMEMASLGRLKFEALVPCLVASFVGHY | 192 |
| Query: | 192 | VSHSLGLEKFSH------SIATSMALTPDIILKLLVLGLCFGL | 228 |
| | | + EKF H IAT ++ K+++L + F L | |
| Sbjct: | 193 | TT-----EKFWHVEHEKFIIATVPEVSALTFSKVILLAIVFSL | 230 |

[2948] There is also homology to SEQ ID 1562.

[2949] A related GBS gene <SEQ ID 8577> and protein <SEQ ID 8578> were also identified. Analysis of this protein sequence reveals the following:

| Lipop: Possible site: −1 Crend: 5 | | | | |
|---|---|---|---|---|
| McG: Discrim Score: 9.66 | | | | |
| GvH: Signal Score (−7.5): −1.12 | | | | |
| Possible site: 27 | | | | |
| >>> Seems to have a cleavable N-term signal seq. | | | | |
| ALOM program count: 7 value: −10.99 threshold: 0.0 | | | | |
| | INTEGRAL | Likelihood = −10.99 | Transmembrane | 328-344 (314-354) |
| | INTEGRAL | Likelihood = −8.65 | Transmembrane | 47-63 (45-70) |
| | INTEGRAL | Likelihood = −6.32 | Transmembrane | 255-271 (253-272) |
| | INTEGRAL | Likelihood = −4.41 | Transmembrane | 214-230 (208-238) |
| | INTEGRAL | Likelihood = −3.35 | Transmembrane | 168-184 (168-187) |
| | INTEGRAL | Likelihood = −2.76 | Transmembrane | 367-383 (367-383) |
| | INTEGRAL | Likelihood = −0.48 | Transmembrane | 141-157 (141-157) |
| | PERIPHERAL | Likelihood = 0.42 | 94 | |

```
modified ALOM score: 2.70
*** Reasoning Step: 3
----- Final Results -----
                              bacterial membrane --- Certainty = 0.5394(Affirmative) < succ>
                                bacterial outside --- Certainty = 0.0000(Not Clear) < succ>
                            bacterial cytoplasm --- Certainty = 0.0000(Not Clear) < succ>
```

[2950] The protein has homology with the following sequences in the databases:

[chemical structure]

[2951] Based on this analysis, it was predicted that these proteins and their epitopes could be useful antigens for vaccines or diagnostics.

### EXAMPLE 490

[2952] A DNA sequence (GBSx0528) was identified in S. agalactiae <SEQ ID 1565> which encodes the amino acid sequence <SEQ ID 1566>. Analysis of this protein sequence reveals the following:

```
Possible site: 33
>>> Seems to have no N-terminal signal sequence
----- Final Results -----
                            bacterial cytoplasm --- Certainty = 0.3568(Affirmative) < succ>
                              bacterial membrane --- Certainty = 0.0000(Not Clear) < succ>
                                bacterial outside --- Certainty = 0.0000(Not Clear) < succ>
```

[2953] The protein has homology with the following sequences in the GENPEPT database:

| >GP: AAB98234 GB: U67480 chorismate mutase/prephenate dehydratase | | | |
|---|---|---|---|
| (pheA) [Methanococcus jannaschii] | | | |
| Identities = 26/85 (30%), Positives = 46/85 (53%), GapS = 1/85 (1%) | | | |
| Query: | 2 | ELEEIRQEIDEIDQQLVSLLETRMGLILEVIAFKKKHRLPVLDNNRENEVLNNVLKKVQN | 61 |
| | | +L EIR++IDEID +++ L+ R L +V K + +P+ D RE + + + K + | |
| Sbjct: | 4 | KLAEIRKKIDEIDNKILKLIAERNSLAKDVAEIKNQLGIPINDPEREKYIYDRIRKLCKE | 63 |
| Query: | 62 | HQFDDVIRATFKDIMTE-SRVYQKE | 85 |
| | | H D+ I I+ E ++ QK+ | |
| Sbjct: | 64 | HNVDENIGIKIFQILIEHNKALQKQ | 88 |

[2954] A related DNA sequence was identified in S. pyogenes <SEQ ID 1567> which encodes the amino acid sequence <SEQ ID 1568>. Analysis of this protein sequence reveals the following:

```
Possible site: 37
>>> Seems to have no N-terminal signal sequence
----- Final Results -----
                            bacterial cytoplasm --- Certainty = 0.2356(Affirmative) < succ>
                              bacterial membrane --- Certainty = 0.0000(Not Clear) < succ>
                                bacterial outside --- Certainty = 0.0000(Not Clear) < succ>
```

[2955] An alignment of the GAS and GBS proteins is shown below:

| Identities = 45/91 (49%), Positives = 62/91 (67%) | | | |
|---|---|---|---|
| Query: | 1 | MELEEIRQEIDEIDQQLVSLLETRMGLILEVIAFKKKHRLPVLDNNRENEVLNNVLKKVQ | 60 |
| | | M LE+IRQEI+ ID LV+LLE RM L+ +V A+K + LPVLD REN++L+ V V+ | |
| Sbjct: | 1 | MRLEKIRQEINGIDHHLVALLEKRMALVEQVTAYKLANHLPVLDQARENQILDRVSYLVK | 60 |
| Query: | 61 | NHQFDDVIRATFKDIMTESRVYQKENIVDGD | 91 |
| | | + F+ I TFK IM+ SR YQ +++ GD | |
| Sbjct: | 61 | DQAFEPAIHETFKTIMSLSRQYQTQHLTGGD | 91 |

[2956] Based on this analysis, it was predicted that these proteins and their epitopes could be useful antigens for vaccines or diagnostics.

### EXAMPLE 491

[2957] A DNA sequence (GBSx0529) was identified in S. agalactiae <SEQ ID 1569> which encodes the amino acid sequence <SEQ ID 1570>. This protein is predicted to be neuramimidase. Analysis of this protein sequence reveals the following:

| Possible site: 19 | | | | |
|---|---|---|---|---|
| >>> Seems to have no N-terminal signal sequence | | | | |
| | INTEGRAL | Likelihood = −3.35 | Transmembrane | 28-44 (28-47) |

```
----- Final Results -----
                              bacterial membrane --- Certainty = 0.2338(Affirmative) < succ>
                                bacterial outside --- Certainty = 0.0000(Not Clear) < succ>
                            bacterial cytoplasm --- Certaimty = 0.0000(Not Clear) < succ>
```

[2958] A related GBS nucleic acid sequence <SEQ ID 10191> which encodes amino acid sequence <SEQ ID 10192> was also identified.

[2959] The protein has homology with the following sequences in the GENPEPT database:

| >GP: CAA51473 GB: X72967 neuraminidase [Streptococcus pneumoniae] | | | |
|---|---|---|---|
| Identities = 294/504 (58%), Positives = 380/504 (75%), Gaps = 10/504 (1%) | | | |
| Query: | 303 | EDIKSYFQYYCHLNHQLKLPKGAILSAKTEVYRGGDFGRKNKDNVFGYRIPSLLKTEKGT | 362 |
| | | E+++ Q + + + KLP+GA L+ KT+++ G G+ NKD + YRIP+LLKT+KGT | |
| Sbjct: | 299 | EEVQKRSQLFKRSDLEKKLPEGAALTEKTDIFESGRNGKPNKDGIKSYRIPALLKTDKGT | 358 |
| Query: | 363 | LLVGADERIEQACDWGNIGMVIRRSEDDGVTWGKRETIVNLRNNPRVPLVTSGDYSGSPI | 422 |
| | | L+ GADER + DWG+IGMVIRRSED+G TWG R TI NLR+NP+ S GSP+ | |
| Sbjct: | 359 | LIAGADERRLHSSDWGDIGMVIRRSEDNGKTWGDRVTITNLRDNPKA----SDPSIGSPV | 414 |
| Query: | 423 | NMDMALVQDTSSKTKRIFSIYDMFPEGRGVISIANTPEKEYTQIGGQSYLNLYNNGKKSK | 482 |
| | | N+DM LVQD +TKRIFSIYDMFPEG+G+ +++ E+ Y +I G++Y LY G+K | |
| Sbjct: | 415 | NIDMVLVQDP--ETKRIFSIYDMFPEGKGIFGMSSQKEEAYKKIDGKTYQILYREGEKG- | 471 |
| Query: | 483 | VFTIRDKGIVYNFKGKKTDYHVITETTKSDHSNLGDIYKGKQLLGNIYFTKHKTSPFRLA | 542 |
| | | +TIR+ G VY GK TDY V+ + K +S+ GD+YKG QLLGNIYFT +KTSPFR+A | |
| Sbjct: | 472 | AYTIRENGTVYTPDGKATDYRVVVDPVKPAYSDKGDLYKGNQLLGNIYFTTNKTSPFRIA | 531 |
| Query: | 543 | KSSYVWMSYSDDDGRTWSSPRDITASLRQKGMKFLGIGPGKGIVLKWGPHAGRIIIPAYS | 602 |
| | | K SY+WMSYSDDDG+TWS+P+DIT ++ MKFLG+GPG GIVL+ GPH GRI+IP Y+ | |
| Sbjct: | 532 | KDSYLWMSYSDDDGKTWSAPQDITPMVKADWMKFLGVGPGTGIVLRNGPHKGRILIPVYT | 591 |
| Query: | 603 | TNWKSHLRGSQSSRLIYSDDHGKTWHTGKAVNDNRILSNGEKIHSLTMDNKKEQNTESVP | 662 |
| | | TN SHL GSQSSR+IYSDDHGKTWH G+AVNDNR + +G+KIHS TM+N++ QNTES | |
| Sbjct: | 592 | TNNVSHLNGSQSSRIIYSDDHGKTWHAGEAVNDNRQV-DGQKIHSSTMNNRRAQNTESTV | 650 |
| Query: | 663 | VQLKNGDIKLFMRNLTGNLEVATSKDGGETWQNHVKRYKEVHDAYVQLSAIRFEHDKKEY | 722 |
| | | VQL NGD+KLFMR LTG+L+VATSKDGG TW+ +KRY +V D YVQ+SAI H+ KEY | |
| Sbjct: | 651 | VQLNNGDVKLFMRGLTGDLQVATSKDGGVTWEKDIKRYPQVKDVYVQMSAIHTMHEGKEY | 710 |
| Query: | 723 | ILLVNANGPGKKRQDGYARLAQVNRNGSFKWLYHHHIQDGSFAYNSVQQLNNDKFGVLYE | 782 |
| | | I+L NA GP KR++G LA+V NG WL H+ IQ G FAYNS+Q+L N ++G+LYE | |
| Sbjct: | 711 | IILSNAGGP--KRENGMVHLARVEENGELTWLKHNPIQKGEFAYNSLQELGNGEYGILYE | 768 |
| Query: | 783 | HREKHQNSFTLNYKVFNWSFLSQN | 806 |
| | | H EK QN++TL+++ FNW FLS++ | |
| Sbjct: | 769 | HTEKGQNAYTLSFRKFNWDFLSKD | 792 |

[2960] No corresponding DNA sequence was identified in S. pyogenes.

[2961] Based on this analysis, it was predicted that these proteins and their epitopes could be useful antigens for vaccines or diagnostics.

### EXAMPLE 492

[2962] A DNA sequence (GBSx0530) was identified in S. agalactiae <SEQ ID 1571> which encodes the amino acid sequence <SEQ ID 1572>. This protein is predicted to be unnamed protein product (gatC). Analysis of this protein sequence reveals the following:

| Possible site: 34 | | | | |
|---|---|---|---|---|
| >>> Seems to have an uncleavable N-term signal seq | | | | |
| | INTEGRAL | Likelihood = −12.63 | Transmembrane | 154-170 (149-178) |
| | INTEGRAL | Likelihood = −11.99 | Transmembrane | 103-119 (98-123) |
| | INTEGRAL | Likelihood = −7.91 | Transmembrane | 21-37 (14-40) |
| | INTEGRAL | Likelihood = −6.53 | Transmembrane | 448-464 (444-467) |
| | INTEGRAL | Likelihood = −5.89 | Transmembrane | 47-63 (45-68) |
| | INTEGRAL | Likelihood = −5.10 | Transmembrane | 356-372 (352-373) |
| | INTEGRAL | Likelihood = −4.78 | Transmembrane | 330-346 (328-350) |
| | INTEGRAL | Likelihood = −4.41 | Transmembrane | 376-392 (375-393) |
| | INTEGRAL | Likelihood = −3.72 | Transmembrane | 243-259 (235-266) |
| | INTEGRAL | Likelihood = −2.55 | Transmembrane | 277-293 (275-293) |

```
----- Final Results -----
                              bacterial membrane --- Certainty = 0.6052(Affirmative) < succ>
                                bacterial outside --- Certainty = 0.0000(Not Clear) < succ>
                            bacterial cytoplasm --- Certainty = 0.0000(Not Clear) < succ>
```

[2963] A related DNA sequence was identified in S. pyogenes <SEQ ID 1573> which encodes the amino acid sequence <SEQ ID 1574>. Analysis of this protein sequence reveals the following:

| Possible site: 35 | | | | |
|---|---|---|---|---|
| >>> Seems to have an uncleavable N-term signal seq | | | | |
| | INTEGRAL | Likelihood = −12.31 | Transmembrane | 154-170 (150-179) |
| | INTEGRAL | Likelihood = −11.68 | Transmembrane | 104-120 (99-124) |
| | INTEGRAL | Likelihood = −9.82 | Transmembrane | 447-463 (442-469) |
| | INTEGRAL | Likelihood = −7.91 | Transmembrane | 22-38 (11-41) |
| | INTEGRAL | Likelihood = −7.11 | Transmembrane | 377-393 (375-403) |
| | INTEGRAL | Likelihood = −5.89 | Transmembrane | 48-64 (46-69) |
| | INTEGRAL | Likelihood = −4.78 | Transmembrane | 331-347 (329-351) |
| | INTEGRAL | Likelihood = −3.88 | Transmembrane | 357-373 (353-373) |
| | INTEGRAL | Likelihood = −2.55 | Transmembrane | 278-294 (276-294) |
| | INTEGRAL | Likelihood = −1.22 | Transmembrane | 240-256 (240-257) |

```
----- Final Results -----
                              bacterial membrane --- Certainty = 0.5925(Affirmative) < succ>
                                bacterial outside --- Certainty = 0.0000(Not Clear) < succ>
                            bacterial cytoplasm --- Certainty = 0.0000(Not Clear) < succ>
```

[2964] An alignment of the GAS and GBS proteins is shown below:

| Identities = 419/482 (86%) , Positives = 447/482 (91%) | | | |
|---|---|---|---|
| Query: | 1 | MQVFLNIVNKFFDPIIHMGSGVVMLIVMTGLAMIFGVKFSKALEGGIKLAIALTGIGAII | 60 |
| | | MQ FL+I+NK I +GSGVVMLIVMTGLAMIFGVKF+KALEGGIKLAIALTGIGAII | |
| Sbjct: | 2 | MQPFLDIINKILGFPIQLGSGVVMLIVMTGLAMIFGVKFTKALEGGIKLAIALTGIGAII | 61 |
| Query: | 61 | GILTGAFSESLQAFVKNTGINLSIIDVGWAPLATITWGSPYTLYFLLIMLIVNIVMIVMK | 120 |
| | | GILTGAFSESLQAFVKNTGI+L+IIDVGWAPLATITWGSPYTLYFLL+ML+VNIVMIVMK | |
| Sbjct: | 62 | GILTGAFSESLQAFVKNTGISLNIIDVGWAPLATITWGSPYTLYFLLVMLVVNIVMIVMK | 121 |
| Query: | 121 | KTDTLDVDIFDIWHLSITGLLIMWYAKKNNLPTLLSVIIATVAIIFVGVLKIINSDLMKP | 180 |
| | | KTDTLDVDIFDIWHLSITGLLIMWYA +N+LP +S++IATVA+I VGVLKIINSDLMKP | |
| Sbjct: | 122 | KTDTLDVDIFDIWHLSITGLLIMWYAARNHLPVFVSLLIATVAVILVGVLKIINSDLMKP | 181 |
| Query: | 181 | TFDDLLGTGPTSPMTSTHMNYMMNPIIMVLDKLFDKVFPGLDKYDFDAAKLNKAIGFWGS | 240 |
| | | TFDDLLGTGP SPMTSTHMNYMMNPIIMVLDK+FDKVFPGLDKYDFDAAKLNK IGFWGS | |
| Sbjct: | 182 | TFDDLLGTGPQSPMTSTHMNYMMNPIIMVLDKIFDKVFPGLDKYDFDAAKLNKKIGFWGS | 241 |
| Query: | 241 | KFFIGMILGLVIGIMGNPVFSFAALGGWFSLGFTAGACLELFSLIGSWFIAAVEPLSQGI | 300 |
| | | KFFIGM LG VIGIMG+P F+ ++ WF LGFTAGACLELFSLIGSWFIAAVEPLSQGI | |
| Sbjct: | 242 | KFFIGMALGFVIGIMGDPHFTVESIKNWFGLGFTAGACLELFSLIGSWFIAAVEPLSQGI | 301 |
| Query: | 301 | TNFANGKMHGRRFNIGLDWPFIAGRAEIWACANILAPIMLVEAILLSKVGNGILPLAGII | 360 |
| | | TNFAN +MHGRRFNIGLDWPFIAGRAEIWACANILAPIML+EA+LLSKVGNGILPLAGII | |
| Sbjct: | 302 | TNFANARMHGRRFNIGLDWPFIAGRAEIWACANILAPIMLIEAVLLSKVGNGILPLAGII | 361 |
| Query: | 361 | AMGVTPALLVVTRGRLIRMITFGTLLLPLFLLSGTMIAPFATELAKKVGAFPAGARAGSL | 420 |
| | | AMG+TPALLVVTRGRLIRMI FG+LLLPLFLLSGTMIAPFATELAKKVGAFPAG AGSL | |
| Sbjct: | 362 | AMGMTPALLVVTRGRLIRMIIFGSLLLPLFLLSGTMIAPFATELAKKVGAFPAGTSAGSL | 421 |
| Query: | 421 | ITHSTLEGPMEKIFGYVIGKATTGQLSAIITLIIFATAYLGLFMWYAKQMKRRNAEYAAN | 480 |
| | | ITHSTLEGPMEKIFGYVIG+ATTGQ+++IITLIIF YL LF WYA QMK RNAEYA | |
| Sbjct: | 422 | ITHSTLEGPMEKIFGYVIGQATTGQIASIITLIIFVAIYLSLFAWYANQMKARNAEYAKT | 481 |
| Query: | 481 | QK | 482 |
| | | K | |
| Sbict: | 482 | MK | 483 |

[2965] A related GBS gene <SEQ ID 8579> and protein <SEQ ID 8580> were also identified. Analysis of this protein sequence reveals the following:

| Lipop: Possible site: −1 Crend: 9 | | | | |
|---|---|---|---|---|
| McG: Discrim Score: 4.31 | | | | |
| GvH: Signal Score (−7.5): −2.64 | | | | |
| Possible site: 34 | | | | |
| >>> Seems to have an uncleavable N-term signal seq | | | | |
| ALOM program count: 6 value: −12.63 threshold: 0.0 | | | | |
| | INTEGRAL | Likelihood = −12.63 | Transmembrane | 154-170 (149-178) |
| | INTEGRAL | Likelihood = −11.99 | Transmembrane | 103-119 (98-123) |
| | INTEGRAL | Likelihood = −7.91 | Transmembrane | 21-37 (14-40) |
| | INTEGRAL | Likelihood = −5.89 | Transmembrane | 47-63 (45-68) |
| | INTEGRAL | Likelihood = −4.88 | Transmembrane | 243-259 (235-265) |
| | INTEGRAL | Likelihood = −1.22 | Transmembrane | 268-284 (268-284) |
| | PERIPHERAL | Likelihood = 0.85 | 127 | |

```
modified ALOM score: 3.03
*** Reasoning Step: 3
----- Final Results -----
                              bacterial membrane --- Certainty = 0.6052(Affirmative) < succ>
                                bacterial outside --- Certainty = 0.0000(Not Clear) < succ>
                            bacterial cytoplasm --- Certainty = 0.0000(Not Clear) < succ>
```

[2966] The protein has homology with the following sequences in the databases:

[chemical structure]

[2967] Based on this analysis, it was predicted that these proteins and their epitopes could be useful antigens for vaccines or diagnostics.

### EXAMPLE 493

[2968] A DNA sequence (GBSx0531) was identified in S. agalactiae <SEQ ID 1575> which encodes the amino acid sequence <SEQ ID 1576>. Analysis of this protein sequence reveals the following:

```
Possible site: 14
>>> Seems to have no N-terminal signal sequence
----- Final Results -----
                            bacterial cytoplasm --- Certainty = 0.0302(Affirmative) < succ>
                              bacterial membrane --- Certainty = 0.0000(Not Clear) < succ>
                                bacterial outside --- Certainty = 0.0000(Not Clear) < succ>
```

[2969] The protein has no significant homology with any sequences in the GENPEPT database.

[2970] A related DNA sequence was identified in S. pyogenes <SEQ ID 1577> which encodes the amino acid sequence <SEQ ID 1578>. Analysis of this protein sequence reveals the following:

```
Possible site: 14
>>> Seems to have no N-terminal signal sequence
----- Final Results -----
                            bacterial cytoplasm --- Certainty = 0.0302(Affirmative) < succ>
                              bacterial membrane --- Certainty = 0.0000(Not Clear) < succ>
                                bacterial outside --- Certainty = 0.0000(Not Clear) < succ>
```

[2971] An alignment of the GAS and GBS proteins is shown below:

| Identities = 85/100 (85%), Positives = 96/100 (96%) | | | |
|---|---|---|---|
| Query: | 1 | MIKILAACGAGVNSSHQIKDAIETQLGDRGYNVHCDAVMVKDITEEMVNKYDIFTPIAKT | 60 |
| | | MIKILAACGAGVNSSHQIKDAIETQ+ DRGY+VHCDAVMVKDITEE+V++YDIFTPIAKT | |
| Sbjct: | 1 | MIKILAACGAGVNSSHQIKDAIETQMSDRGYDVHCDAVMVKDITEELVSRYDIFTPIAKT | 60 |
| Query: | 61 | DLGFNVPIPVVEAGPILYRIPVMSEPVFTALEQVIKEHNL | 100 |
| | | DLGF +PIP+VEAGPILYRIP+MSEPVF LE+VIKE++L | |
| Sbjct: | 61 | DLGFEMPIPIVEAGPILYRIPIMSEPVFAELERVIKENHL | 100 |

[2972] Based on this analysis, it was predicted that these proteins and their epitopes could be useful antigens for vaccines or diagnostics.

### EXAMPLE 494

[2973] A DNA sequence (GBSx0532) was identified in S. agalactiae <SEQ ID 1579> which encodes the amino acid sequence <SEQ ID 1580>. This protein is predicted to be GatA. Analysis of this protein sequence reveals the following:

```
Possible site: 15
>>> Seems to have no N-terminal signal sequence
----- Final Results -----
                            bacterial cytoplasm --- Certainty = 0.2078(Affirmative) < succ>
                              bacterial membrane --- Certainty = 0.0000(Not Clear) < succ>
                                bacterial outside --- Certainty = 0.0000(Not Clear) < succ>
```

[2974] A related GBS nucleic acid sequence <SEQ ID 10193> which encodes amino acid sequence <SEQ ID 10194> was also identified.

[2975] The protein has homology with the following sequences in the GENPEPT database:

| >GP: AAG09977 GB: AF248038 GatA [Streptococcus agalactiae] | | | |
|---|---|---|---|
| Identities = 39/135 (28%), Positives = 76/135 (55%), Gaps = 9/135 (6%) | | | |
| Query: | 16 | QEELFDLVSKALIKQHYVSPNYRQAVKEREREFPTGLKIDLKDGTPIQYVAIPHTETQYC | 75 |
| | | Q L +++S+ L+++ YV + +A+ +RE+++PTGL+++ VAIPHT ++Y | |
| Sbjct: | 20 | QTNLLEVLSQYLLQKGYVKTEFSKAILQREKDYPTGLQLE------NMAVAIPHTYSEYV | 73 |
| Query: | 76 | LVDRIFYVKNSQPITFKHMINPEEECRVQDFFFIINSRN-SNQSDILSNLITFFITKGNL | 134 |
| | | L I+ K +PI+F M E+E + + ++ N +Q+ +L+ L+T F + | |
| Sbjct: | 74 | LKPFIYINKLKEPISFIQM-GTEDEIVMARYVIVLGISNPKDQAGLLAELMTLFSNPKIV | 132 |
| Query: | 135 | DRLHELGDNKEKINH | 149 |
| | | +L E KE + + | |
| Sbjct: | 133 | QQL-EMAQTKEALKN | 146 |

[2976] A related DNA sequence was identified in S. pyogenes <SEQ ID 1581> which encodes the amino acid sequence <SEQ ID 1582>. Analysis of this protein sequence reveals the following:

```
Possible site: 33
>>> Seems to have no N-terminal signal sequence
----- Final Results -----
                            bacterial cytoplasm --- Certainty = 0.3130(Affirmative) < succ>
                              bacterial membrane --- Certainty = 0.0000(Not Clear) < succ>
                                bacterial outside --- Certainty = 0.0000(Not Clear) < succ>
```

[2977] An alignment of the GAS and GBS proteins is shown below:

| Identities = 102/154 (66%), Positives = 122/154 (78%) | | | |
|---|---|---|---|
| Query: | 4 | VTQDILFIDAHSQEELFDLVSKALIKQHYVSPNYRQAVKEREREFPTGLKIDLKDGTPIQ | 63 |
| | | V +ILF +A +Q ELFDLV+ L K YV+ Y QA+ ERE FPTGLK+DLKDG+ I | |
| Sbjct: | 1 | VFPNILFTEARTQPELFDLVASHLEKVGYVTQEYHQALVEREAVFPTGLKVDLKDGSDIL | 60 |
| Query: | 64 | YVAIPHTETQYCLVDRIFYVKNSQPITFKHMINPEEECRVQDFFFIINSRNSNQSDILSN | 123 |
| | | Y AIPHTET+YCLVD++ YV+NSQ +TFKHMINPEE+C V DFFFIINS+N Q+ ILSN | |
| Sbjct: | 61 | YAAIPHTETKYCLVDQVVYVRNSQALTFKHMINPEEDCLVTDFFFIINSQNEGQTTILSN | 120 |
| Query: | 124 | LITFFITKGNLDRLHELGDNKEKINHYLIEKGVF | 157 |
| | | LITFFITKGNL L L D+K+ I++YLIEKGVF | |
| Sbjct: | 121 | LITFFITKGNLSYLASLKDDKQAISNYLIEKGVF | 154 |

[2978] Based on this analysis, it was predicted that these proteins and their epitopes could be useful antigens for vaccines or diagnostics.

### EXAMPLE 495

[2979] A DNA sequence (GBSx0533) was identified in S. agalactiae <SEQ ID 1583> which encodes the amino acid sequence <SEQ ID 1584>. Analysis of this protein sequence reveals the following:

```
Possible site: 61
>>> Seems to have no N-terminal signal sequence
----- Final Results -----
                            bacterial cytoplasm --- Certainty = 0.1429(Affirmative) < succ>
                              bacterial membrane --- Certainty = 0.0000(Not Clear) < succ>
                                bacterial outside --- Certainty = 0.0000(Not Clear) < succ>
```

[2980] The protein has homology with the following sequences in the GENPEPT database:

>GP:AAA25176 GB:M60447 repressor protein [Lactococcus lactis]
Identities = 139/255 (54%), Positives = 189/255 (73%), Gaps = 6/255 (2%)

| | | | |
|---|---|---|---|
| Query: | 1 | MLKRERLQKIIEKVNINGIVTVNEIMEELDVSDMTVRRDLDELDKAGLLIRIHGGAQKVN | 60 |
| | | M K+ RL+KI++ + I+G +T+ EI++ELD+SDMT RRDLD L+ GLL R HGGAQ ++ | |
| Sbjct: | 7 | MNKKRRLEKILDMLKIDGTITIREIIDELDISDMTARRDLDALEADGLLTRTHGGAQLLS | 66 |
| Query: | 61 | ASPTPQNYEKSNTEKYDIQTNEKLEIAQFAKQFINDGETIFIGPGTTLEKLATQLLD--- | 117 |
| | | + + EK++ EK + T EK++IA+ A I DG+TIFIGPGTTL +LA +L | |
| Sbjct: | 67 | SK---KPLEKTHIEKKSLNTKEKIDIAKKACSLIKDGDTIFIGPGTTLVQLALELKGRKG | 123 |
| Query: | 118 | FKIRVVTNSLPVFNILNQSSTLDLILVGGEYREITGAFVGSVTINSIKSLNFSKAFVSSN | 177 |
| | | +KIRV+TNSLPVF ILN S T+DL+L+GGEYREITGAFVGS+ ++K++ F+KAFV +N | |
| Sbjct: | 124 | YKIRVITNSLPVFLILNDSETIDLLLLGGEYREITGAFVGSMASTNLKAMRFAKAFVRAN | 183 |
| Query: | 178 | GVFEKSIATYDEGEGEIQRIALNNSFEKFLLVDSQKFGKYDFYTFYQLDDIDFVLTDHNI | 237 |
| | | V SIATY + EG IQ++ALNN+ EKFLLVDS EF +YDF+ FY LD +D ++TD+ I | |
| Sbjct: | 184 | AVTHNSIATYSDKEGVIQQLALNNAVEKFLLVDSTKFDRYDFFNFYNLDQLDTIITDNQI | 243 |
| Query: | 238 | DNVVKEQYSSFTKIL 252 | |
| | | E++S +T IL | |
| Sbjct: | 244 | SPQHLEEFSQYTTIL 258 | |

[2981] A related DNA sequence was identified in S. pyogenes <SEQ ID 1585> which encodes the amino acid sequence <SEQ ID 1586>. Analysis of this protein sequence reveals the following:

```
Possible site: 60
>>> Seems to have no N-terminal signal sequence
----- Final Results -----
                            bacterial cytoplasm --- Certainty = 0.0740(Affirmative) < succ>
                              bacterial membrane --- Certainty = 0.0000(Not Clear) < succ>
                                bacterial outside --- Certainty = 0.0000(Not Clear) < succ>
```

[2982] An alignment of the GAS and GBS proteins is shown below:

| Identities = 161/252 (63%), Positives = 195/252 (76%), Gaps = 3/252 (1%) | | | |
|---|---|---|---|
| Query: | 1 | MLKRERLQKIIEKVNINGIVTVNEIMEELDVSDMTVRRDLDELDKAGLLIRIHGGAQKVN | 60 |
| | | MLKRERL KI E VN GIVTVN+I++ L+VSDNTVRRDLDEL+KAG LIRIHGGAQ + | |
| Sbjct: | 1 | MLKRERLLKITEIVNEQGIVTVNDIIQTLNVSDMTVRRDLDELEKAGRLIRIHGGAQSIT | 60 |
| Query: | 61 | ASPTPQNYEKSNTEKYDIQTNEKLEIAQFAKQFINDGETIFIGPGTTLEKLATQLLDWKI | 120 |
| | | P E+SN EK +QT EK E+A +A Q +NDGETIFIGPGTTLE A QL ++I | |
| Sbjbt: | 61 | M---PNKKERSNIEKQTVQTKEKWELASYATQLVNDGETIFIGPGTTLECFAEQLKNRQI | 117 |
| Query: | 121 | RVVTNSLPVFNILNQSSTLDLILVGGEYREITGAFVGSVTINSIRSLNFSKAFVSSNGVF | 180 |
| | | R+VTNSLPVFNIL S T+DLIL+GGEYR ITGAFVGS+ +I SL F+KAF+S NG++ | |
| Sbjct: | 118 | RIVTNSLPVFNILQDSETIDLILIGGEYRSITGAFVGSLASQNISSLKFAKAFISCNGIY | 177 |
| Query: | 181 | EKSIATYDEGEGEIQRIALNNSFEKFLLVDSQKFGKYDFYTFYQLDDIDFVLTDHNIDNV | 240 |
| | | + IATY E EGEIQ++A NNS EK+LLVD+QKF YDF+ FY L++ID V+TD I | |
| Sbjct: | 178 | KNDIATYSETEGEIQKLAFNNSIEKYLLVDNQKFNAYDFFIFYHLNNIDAVVTDSQITED | 237 |
| Query: | 241 | VKEQYSSFTKIL 252 | |
| | | V E+YS FT++L | |
| Sbjct: | 238 | VIERYSQFTQLL 249 | |

[2983] Based on this analysis, it was predicted that these proteins and their epitopes could be useful antigens for vaccines or diagnostics.

### EXAMPLE 496

[2984] A DNA sequence (GBSx0534) was identified in S. agalactiae <SEQ ID 1587> which encodes the amino acid sequence <SEQ ID 1588>. Analysis of this protein sequence reveals the following:

```
Possible site: 19
>>> Seems to have no N-terminal signal sequence
----- Final Results -----
                            bacterial cytoplasm --- Certainty = 0.3436(Affirmative) < succ>
                              bacterial membrane --- Certainty = 0.0000(Not Clear) < succ>
                                bacterial outside --- Certainty = 0.0000(Not Clear) < succ>
```

[2985] The protein has homology with the following sequences in the GENPEPT database:

>GP:AAD13797 GB:AF062533 unknown [Streptococcus agalactiae]
Identities = 86/371 (23%), Positives = 136/371 (36%), Gaps = 79/371 (21%)

| | | | |
|---|---|---|---|
| Query: | 11 | DLSESELKAAQEFLSGKSEANQDKPKTGKTAQEIYEAIEPKAIVKPEDLLFGIAQATDYK | 70 |
| | | DL++ + L K D TG IEP+ V L AT | |
| Sbjct: | 526 | DLTQIAFAEQELMLKDKKHYRYDIVDTG---------IEPRLAVDVSSLPHHAGHATYDT | 576 |
| Query: | 71 | NGTFVIPHKDHYHYVELKWFDEEKDLLADSDKTYSLEDYLATAKYYMMHPSKRPKVEGWG | 130 |
| | | +FVIPH DH H V W + +AT KY M HPE RP V W | |
| Sbjct: | 577 | GSSFVIPHIDHIHVVPYSWLTRNQ---------------IATIKYVMQHPEVRPDV--IS | 619 |
| Query: | 131 | KDAEIYKEKDSNKADKPSPAPTDNKSTSNSSDKNLSAAEVFKQAKPEKIVPLDKIAAHMA | 190 |
| | | K + + + P+ P D ++ + SA EV +K + + AA | |
| Sbjct: | 620 | KPGH-----EESGSVIPNVTPLDKRAGMPHWQIIHSAEEV------QKALAEGRFAA--- | 665 |
| Query: | 191 | YAVGFEDDQLIVPHHDHYHNVPMAWFDKGGLWKAPEGYTLQQLFST--IKYYMEHPHELP | 248 |
| | | D I D W D +G +L+ + + + + EL | |
| Sbjct: | 666 | ------PDGYIFDPRDVLAKETFVWKDGSFSIPRADGSSLRTINKSDLSQAEWQQAQELL | 719 |
| Query: | 249 | KEKGWGHDSDHNKGSNKDNKAKNYAPDEEPEDSGKVTHNYGFYDVNKGSDEEEP-EKQED | 307 |
| | | +K G +D +K P+E+ + +K ++ ++P E ++ | |
| Sbjct: | 720 | AKKHAGDATDTDK------------PEEKQQ-------------ADKSNENQQPSEASKE | 754 |
| Query: | 308 | ESELDEYELGMAQNAKKYGMDRQSFEKQLIQLSNKYSVSFESFNYIHGSQVQVTKKDGSK | 367 |
| | | E E D++ + YG+DR + E + QL+ K ++ + VQ K+G | |
| Sbjct: | 755 | EKESDDF----IDSLPDYGLDRATLEDHIHQLAQKANID-PKYLIFQPEGVQFYNKHGEL | 809 |
| Query: | 368 | VLVDIKTLTEV | 378 |
| | | V DIKTL ++ | |
| Sbjct: | 810 | VTYDIKTLQQI | 820 |

[2986] A related DNA sequence was identified in S. agalactiae <SEQ ID 6983> which encodes the amino acid sequence <SEQ ID 6984>. Analysis of this protein sequence reveals the following:

```
Possible site: 26
>>> Seems to have an uncleavable N-term signal seq
----- Final Results -----
                            bacterial membrane --- Certainty = 0.0000(Not Clear) < succ>
                              bacterial outside --- Certainty = 0.0000(Not Clear) < succ>
                          bacterial cytoplasm --- Certainty = 0.0000(Not Clear) < succ>
```

[2987] A related GBS gene <SEQ ID 8581> and protein <SEQ ID 8582> were also identified. Analysis of this protein sequence reveals the following:

```
Lipop Possible site: −1 Crend: 2
McG: Discrim Score: 6.06
GvH: Signal Score (−7.5): −5.61
          Possible site: 26
>>> Seems to have an uncleavable N-term signal seq
ALOM program count: 0 value: 2.23 threshold: 0.0
PERIPHERAL Likelihood = 2.23 6
modified ALOM score: −0.95
*** Reasoning Step: 3
----- Final Results -----
                              bacterial membrane --- Certainty = 0.0000(Not Clear) < succ>
                                bacterial outside --- Certainty = 0.0000(Not Clear) < succ>
                            bacterial cytoplasm --- Certainty = 0.0000(Not Clear) < succ>
```

[2988] A related DNA sequence was identified in S. pyogenes <SEQ ID 1589> which encodes the amino acid sequence <SEQ ID 1590>. Analysis of this protein sequence reveals the following:

```
Possible site: 26
>>> Seems to have an uncleavable N-term signal seq
----- Final Results -----
                              bacterial membrane --- Certainty = 0.0000(Not Clear) < succ>
                                bacterial outside --- Certainty = 0.0000(Not Clear) < succ>
                            bacterial cytoplasm --- Certainty = 0.0000(Not Clear) < succ>
```

[2989] An alignment of the GAS and GBS proteins is shown below.

| Identities = 808/825 (97%), Positives = 816/825 (97%), | | | |
|---|---|---|---|
| Gaps = 3/825 (0%) | | | |
| Query: | 2 | KKTYGYIGSVAAILLATHIGSYQLGKHHMGLATKDNQIAYIDDSKGKVKAPKTNKTMDQ | 60 |
| | | KKTYGYIGSVAAILLATHIGSYQLGKHHMG ATKDNQIAYIDDSKGK KAPKTNKTMDQ | |
| Sbjct: | 2 | KKTYGYIGSVAAILLATHIGSYQLGKHHMGSATKDNQIAYIDDSKGKAKAPKTNKTMDQ | 60 |
| Query: | 61 | ISAEEGISAEQIVVKITDQGYVTSHGDHYHFYNGKVPYDAIISEELLMTDPNYHFKQSDV | 120 |
| | | ISAEEGISAEQIVVKITDQGYVTSHGDHYHFYNGKVPYDAIISEELLMTDPNY FKQSDV | |
| Sbjct: | 61 | ISAEEGISAEQIVVKITDQGYVTSHGDHYHFYNGKVPYDAIISEELLMTDPNYRFKQSDV | 120 |
| Query: | 121 | INEILDGYVIKVNGNYYVYLKPGSKRKNIRTKQQIAEQVAKGTKEAKEKGLAQVAHLSKE | 180 |
| | | INEILDGYVIKVNGNYYVYLKPGSKRKNIRTKQQIAEQVAKGTKEAKEKGLAQVAHLSKE | |
| Sbjct: | 121 | INEILDGYVIKVNGNYYVYLKPGSKRKNIRTKQQIAEQVAKGTKEAKEKGLAQVAHLSKE | 180 |
| Query: | 181 | EVAAVNEAKRQGRYTTDDGYIFSPTDIIDDLGDAYLVPHGNHYHYIPKKDLSPSELAAAQ | 240 |
| | | EVAAVNEAKRQGRYTTDDGYIFSPTDIIDDLGDAYLVPHGNHYHYIPKKDLSPSELAAAQ | |
| Sbjct: | 181 | EVAAVNEAKRQGRYTTDDGYIFSPTDIIDDLGDAYLVPHGNHYHYIPKKDLSPSELAAAQ | 240 |
| Query: | 241 | AYWSQKQGRGARPSDYRPTPAP--GRRKAPIPDVTPNPGQGHQPDNGGYHPAPPRPNDAS | 298 |
| | | AYWSQKQGRGARPSDYRPTPAP GRRKAPIPDVTPNPGQGHQPDNGGYHPAPPRPNDAS | |
| Sbjct: | 241 | AYWSQKQGRGARPSDYRPTPAPAPGRRKAPIPDVTPNPGQGHQPDNGGYHPAPPRPNDAS | 300 |
| Query: | 299 | QNKHQRDEFKGKTFKELLDQLHRLDLKYRHVEEDGLIFEPTQVIKSNAFGYVVPHGDHYH | 358 |
| | | QNKHQRDEFKGKTFKELLDQLHRLDLKYRHVEEDGLIFEPTQVIKSNAFGYVVPHGDHYH | |
| Sbjct: | 301 | QNKHQRDEFKGKTFKELLDQLHRLDLKYRHVEEDGLIFEPTQVIKSNAFGYVVPHGDHYH | 360 |
| Query: | 359 | IIPRSQLSPLEMELADRYLAGQTDDNDSGSDHSKPSDKEVTHTFLGHRIKAYGKGLDGKP | 418 |
| | | IIPRSQLSPLEMELADRYLAGQT+D+DSGSDHSKPSDKEVTHTFLGHRIKAYGKGLDGKP | |
| Sbjct: | 361 | IIPRSQLSPLEMELADRYLAGQTEDDDSGSDHSKPSDKEVTHTFLGHRIKAYGKGLDGKP | 420 |
| Query: | 419 | YDTSDAYVFSKESIHSVDKSGVTAKHGDHFHYIGFGELEQYELDEVANWVKAKGQADELV | 478 |
| | | YDTSDAYVFSKESIHSVDKSGVTAKHGDHFHYIGFGELEQYELDEVANWVKAKGQADEL | |
| Sbjct: | 421 | YDTSDAYVFSKESIHSVDKSGVTAKHGDHFHYIGFGELEQYELDEVANWVKAKGQADELA | 480 |
| Query: | 479 | AALDQEQGKEKPLFDTKKVSRKVTKDGKVGYIMPKDGKDYFYARYQLDLTQIAFAEQELM | 538 |
| | | AALDQEQGKEKPLFDTKKVSRKVTKDGKVGY+MPKDGKDYFYAR QLDLTQIAFAEQELM | |
| Sbjct: | 481 | AALDQEQGKEKPLFDTKKVSRKVTKDGKVGYMMPKDGKDYFYARDQLDLTQIAFAEQELM | 540 |
| Query: | 539 | LKDKKHYRYDIVDTGIEPRLAVDLSSLPMHAGNATYDTGSSFVIPHIDHIHVVPYSWLTR | 598 |
| | | LKDKKHYRYDIVDTGIEPRLAVD+SSLPMHAGNATYDTGSSFVIPHIDHIHVVPYSWLTR | |
| Sbjct: | 541 | LKDKKHYRYDIVDTGIEPRLAVDVSSLPMHAGNATYDTGSSFVIPHIDHIHVVPYSWLTR | 600 |
| Query: | 599 | NQIATIKYVMQHPEVRPDVWSKPGHEESGSVIPNVTPLDKRAGMPNWQIIHSAEEVQKAL | 658 |
| | | +QIATIKYVMQHPEVRPD+WSKPGHEESGSVIPNVTPLDKRAGMPNWQIIHSAEEVQKAL | |
| Sbjct: | 601 | DQIATIKYVMQHPEVRPDIWSKPGHEESGSVIPNVTPLDKRAGMPNWQIIHSAEEVQKAL | 660 |
| Query: | 659 | AEGRFAAPDGYIFDPRDVLAKETFVWKDGSFSIPRADGSSLRTINKSDLSQAEWQQAQEL | 718 |
| | | AEGRFA PDGYIFDPRDVLAKETFVWKDGSFSIPRADGSSLRTINKSDLSQAEWQQAQEL | |
| Sbjct: | 661 | AEGRFATPDGYIFDPRDVLAKETFVWKDGSFSIPRADGSSLRTINKSDLSQAEWQQAQEL | 720 |
| Query: | 719 | LAKKNAGDATDTDKPEEKQQADKSNENQQPSEASK-EEKESDDFIDSLPDYGLDRATLED | 777 |
| | | LAKKNAGDATDTDKP+EKQQADKSNENQQPSEASK EEKESDDFIDSLPDYGLDRATLED | |
| Sbjct: | 721 | LAKKNAGDATDTDKPKEKQQADKSNENQQPSEASKEEEKESDDFIDSLPDYGLDRATLED | 780 |
| Query: | 778 | HINQLAQKANIDPKYLIFQPEGVQFYNKNGELVTYDIKTLQQINP | 822 |
| | | HINQLAQKANIDPKYLIFQPEGVQFYNKNGELVTYDIKTLQQINP | |
| Sbjct: | 781 | HINQLAQKANIDPKYLIFQPEGVQFYNKNGELVTYDIKTLQQINP | 825 |

[2990] SEQ ID 8582 was expressed in E. coli in two different forms. GBS293dNterm was expressed in E. coli as a GST-fusion product. SDS-PAGE analysis of total cell extract is shown in FIG. 147 (lane 14; MW 74 kDa+lanes 17 & 18; MW 48.8 kDa). GBS293C was expressed in E. coli as a GST-fusion product. SDS-PAGE analysis of total cell extract is shown in FIGS. 148 (lane 24; MW 71 kDa+lanes 5 & 7; MW 46 kDa) and 182 (lane 7; MW 46 kDa). Purified GBS293C-His is shown in FIG. 241, lanes 8& 9.

[2991] Based on this analysis, it was predicted that these proteins and their epitopes could be useful antigens for vaccines or diagnostics.

### EXAMPLE 497

[2992] A DNA sequence (GBSx0535) was identified in S. agalactiae <SEQ ID 1591> which encodes the amino acid sequence <SEQ ID 1592>. Analysis of this protein sequence reveals the following:

```
Possible site: 23
>>> Seems to have a cleavable N-term signal seq.
----- Final Results -----
                                bacterial outside --- Certainty = 0.3000(Affirmative) < succ>
                              bacterial membrane --- Certainty = 0.0000(Not Clear) < succ>
                            bacterial cytoplasm --- Certainty = 0.0000(Not Clear) < succ>
```

[2993] The protein has homology with the following sequences in the GENPEPT database:

| >GP: AAD13797 GB: AF062533 unknown [Streptococcus agalactiae] | | | |
|---|---|---|---|
| Identities = 213/463 (46%), Positives = 277/463 (59%), Gaps = 41/463 (8%) | | | |
| Query: | 4 | KKTV-IISALSVALFGTGVGAYQLGSYNA--QKSDNSVSYVKTDKSDSKAQATAVNKTPD | 60 |
| | | KKT I +++ L T +G+YQLG ++ DN ++Y+ D S K +A NKT D | |
| Sbjct: | 2 | KKTYGYIGSVAAILLATHIGSYQLGKHHMGLATKDNQIAYI--DDSKGKVKAPKTNKTMD | 59 |
| Query: | 61 | QISKEEGISAEQIVVKITDDGYVTSHGDHYHYYNGKVPYDAIISEELIMKDPSYVFNKAD | 120 |
| | | QIS EEGISAEQIVVKITD GYVTSHGDHYH+YNGKVPYDAIISEEL+M DP+Y F ++D | |
| Sbjct: | 60 | QISAEEGISAEQIVVKITDQGYVTSHGDHYHFYNGKVPYDAIISEELLMTDPNYHFKQSD | 119 |
| Query: | 121 | VINEVKDGYIIKVNGKYYLYLKEGSKRTNVRTKEQIQKQREEWSKGGSKGESGKHSSAKT | 180 |
| | | VINE+ DGY+IKVNG YY+YLK GSKR N+RTK+QI +Q + +K E+ + A+ | |
| Sbjct: | 120 | VINEILDGYVIKVNGNYYVYLKPGSKRKNIRTKQQIAEQVAKGTK-----EAKEKGLAQV | 174 |
| Query: | 181 | QALS----ASVREAKASGRYTTDDGYVFSPTDVIDDMGDAFLVPHGDHFHYIPKADLSPS | 236 |
| | | LS A+V EAK GRYTTDDGY+FSPTD+IDD+GDA+LVPHG+H+HYIPK DLSPS | |
| Sbjct: | 175 | AHLSKEEVAAVNEAKRQGRYTTDDGYIFSPTDIIDDLGDAYLVPHGNHYHYIPKKDLSPS | 234 |
| Query: | 237 | ELSAAQAYWNRKTGRSGNSS--KPSNSSSYIHASAPSGNVSTGRHANAPISIPRVTHANH | 294 |
| | | EL+AAQAYW++K GR S +P+ + A P + G+ H | |
| Sbjct: | 235 | ELAAAQAYWSQKQGRGARPSDYRPTPAPGRRKAPIPDVTPNPGQGHQPD------NGGYH | 288 |
| Query: | 295 | WSKPAGNHATAPKHHAPTTKPINKDSALDKMLKRLYAQPLYARHVESDGLVYDPAQVNAF | 354 |
| | | + P N A+ KH + K ++L +L+ L RHVE DGL+++P QV | |
| Sbjct: | 289 | PAPPRPNDASQNKHQ----RDEFKGKTFKELLDQLHRLDLKYRHVEEDGLIFEPTQVIKS | 344 |
| Query: | 355 | TAIGVSIPHGNHFHFIHYKDMSPLELE-ATRMVAEHRGHHIDALGKKDSTEKPKHISHEP | 413 |
| | | A G +PHG+H+H I +SPLE+E A R +A G+ D + S | |
| Sbjct: | 345 | NAFGYVVPHGDHYHIIPRSQLSPLEMELADRYLA----------GQTDDNDSGSDHSKPS | 394 |
| Query: | 414 | NKE-PHTEEEHHAVTPKDQRKGKP---NSQIVYSAQEIEEAKK | 452 |
| | | +KE HT H GKP + V+S + I K | |
| Sbjct: | 395 | DKEVTHTFLGHRIKAYGKGLDGKPYDTSDAYVFSKESIHSVDK | 437 |

[2994] There is also homology to SEQ ID 1590.

[2995] SEQ ID 1592 (GBS94) was expressed in E. coli as a His-fusion product. SDS-PAGE analysis of total cell extract is shown in FIG. 17 (lane 3; MW 52.5 kDa).

[2996] GBS94-His was purified as shown in FIG. 194, lane 8.

[2997] Based on this analysis, it was predicted that this protein and its epitopes, could be useful antigens for vaccines or diagnostics.

### EXAMPLE 498

[2998] A DNA sequence (GBSx0536) was identified in S. agalactiae <SEQ ID 1593> which encodes the amino acid sequence <SEQ ID 1594>. This protein is predicted to be Lmb. Analysis of this protein sequence reveals the following:

```
Possible site: 24
>>> May be a lipoprotein
----- Final Results -----
                              bacterial membrane --- Certainty = 0.0000(Not Clear) < succ>
                                bacterial outside --- Certainty = 0.0000(Not Clear) < succ>
                            bacterial cytoplasm --- Certainty = 0.0000(Not Clear) < succ>
```

[2999] There is also homology to SEQ IDs 1596 and 5548.

[3000] A related GBS gene <SEQ ID 8583> and protein <SEQ ID 8584> were also identified. Analysis of this protein sequence reveals the following:

```
Lipop: Possible site: 22 Crend: 5
McG: Discrim Score: 13.64
GvH: Signal Score (−7.5): −5.75
          Possible site: 24
>>> May be a lipoprotein
ALOM program count: 0 value: 4.83 threshold: 0.0
      PERIPHERAL Likelihood = 4.83 33
modified ALOM score: −1.47
----- Final Results -----
                              bacterial membrane --- Certainty = 0.0000(Not Clear) < succ>
                                bacterial outside --- Certainty = 0.0000(Not Clear) < succ>
                            bacterial cytoplasm --- Certainty = 0.0000(Not Clear) < succ>
```

[3001] SEQ ID 8584 (GBS22) was expressed in E. coli as a His-fusion product. SDS-PAGE analysis of total cell extract is shown in FIG. 14 (lane 6; MW 35 kDa).

[3002] The GBS22-His fusion product was purified (FIG. 94A; see also FIG. 193, lane 4) and used to immunise mice (lane 2 product; 20 μg/mouse). The resulting antiserum was used for Western blot (FIG. 94B), FACS (FIG. 94C), and in the in vivo passive protection assay (Table III). These tests confirm that the protein is immunoaccessible on GBS bacteria and that it is an effective protective immunogen.

[3003] SEQ ID 9584 (GBS22) was expressed in E. coli as a His-fusion product. SDS-PAGE analysis of total cell extract is shown in FIG. 183 (lane 7 & 8; MW 35 kDa).

[3004] Based on this analysis, it was predicted that these proteins and their epitopes could be useful antigens for vaccines or diagnostics.

### EXAMPLE 499

[3005] A DNA sequence (GBSx0537) was identified in S. agalactiae <SEQ ID 1597> which encodes the amino acid sequence <SEQ ID 1598>. Analysis of this protein sequence reveals the following:

| Possible site: 39 | | | | |
|---|---|---|---|---|
| >>> Seems to have no N-terminal signal sequence | | | | |
| | INTEGRAL | Likelihood = −0.59 | Transmembrane | 19-35 (19-35) |

```
----- Final Results -----
                              bacterial membrane --- Certainty = 0.1235(Affirmative) < succ>
                                bacterial outside --- Certainty = 0.0000(Not Clear) < succ>
                            bacterial cytoplasm --- Certainty = 0.0000(Not Clear) < succ>
```

[3006] The protein has homology with the following sequences in the GENPEPT database:

| >GP: CAA51352 GB: X72832 ORF1 [Streptococcus equisimilis] | | | |
|---|---|---|---|
| Identities = 104/145 (71%), Positives = 126/145 (86%) | | | |
| Query: | 1 | MKIIIQRVNQASVSIEDDVVGSIEKGLVLLVGIAPEDTTEDIAYAVRKITSMRIFSDDEG | 60 |
| | | MK+++QRV +ASVSI+ + G+I +GL+LLVG+ P+D ED+AYAVRKI +MRIFSD +G | |
| Sbjct: | 1 | MKLVLQRVKEASVSIDGKIAGAINQGLLLLVGVGPDDAAEDLAYAVRKIVNMRIFSDADG | 60 |
| Query: | 61 | KMNLSIQDIKGSVLSISQFTLFADTKKGNRPAFTGAADPVKANQFYDIFNQELANHVSVE | 120 |
| | | KMN SIQDIKGS+LS+SQFTL+ADTKKGNRPAFTGAA P A+QFYD FN++LA+ V VE | |
| Sbjct: | 61 | KMNQSIQDIKGSILSVSQFTLYADTKKGNRPAFTGAAKPDMASQFYDRFNEQLADFVPVE | 120 |
| Query: | 121 | TGQFGADMQVSLINDGPVTIVLDTK | 145 |
| | | G FGADMQVSLINDGPVTI+LDTK | |
| Sbjct: | 121 | RGVFGADMQVSLINDGPVTIILDTK | 145 |

[3007] A related DNA sequence was identified in S. pyogenes <SEQ ID 1599> which encodes the amino acid sequence <SEQ ID 1600>. Analysis of this protein sequence reveals the following:

```
Possible site: 39
>>> Seems to have no N-terminal signal sequence
----- Final Results -----
                            bacterial cytoplasm --- Certainty = 0.1430(Affirmative) < succ>
                              bacterial membrane --- Certainty = 0.0000(Not Clear) < succ>
                                bacterial outside --- Certainty = 0.0000(Not Clear) < succ>
```

[3008] An alignment of the GAS and GBS proteins is shown below:

| Identities = 103/145 (71%), Positives = 124/145 (85%) | | | |
|---|---|---|---|
| Query: | 1 | MKIIIQRVNQASVSIEDDVVGSIEKGLVLLVGIAPEDTTEDIAYAVRKITSMRIFSDDEG | 60 |
| | | MK+++QRV +ASVSI+ + G+I +GL+LLVG+ P+D ED+AYAVRKI +MRIFSD +G | |
| Sbjct: | 1 | MKLVLQRVKEASVSIDGKIAGAINQGLLLLVGVGPDDNAEDLAYAVRKIVNMRIFSDADG | 60 |
| Query: | 61 | KMNLSIQDIKGSVLSISQFTLFADTKKGNRPAFTGAADPVKANQFYDIFNQELANHVSVE | 120 |
| | | KMN SIQDIKGS+LS+SQFTL+ADTKKGNRPAFTGAA P A+Q YD FN++LA V VE | |
| Sbjct: | 61 | KMNQSIQDIKGSILSVSQFTLYADTKKGNRPAFTGAAKPDLASQLYDSFNEQLAEFVPVE | 120 |
| Query: | 121 | TGQFGADMQVSLINDGPVTIVLDTK | 145 |
| | | G FGADMQVSLINDGPVTI+LDTK | |
| Sbjct: | 121 | RGVFGADMQVSLINDGPVTIILDTK | 145 |

[3009] SEQ ID 1598 (GBS368) was expressed in E. coli as a His-fusion product. SDS-PAGE analysis of total cell extract is shown in FIG. 64 (lane 4; MW 20 kDa). It was also expressed in E. coli as a GST-fusion product. SDS-PAGE analysis of total cell extract is shown in FIG. 70 (lane 4; MW 45 kDa).

[3010] GBS368-GST was purified as shown in FIG. 215, lane 6.

[3011] Based on this analysis, it was predicted that these proteins and their epitopes could be useful antigens for vaccines or diagnostics.

### EXAMPLE 500

[3012] A DNA sequence (GBSx0538) was identified in S. agalactiae <SEQ ID 1601> which encodes the amino acid sequence <SEQ ID 1602>. This protein is predicted to be stringent response-like protein (rel) (relA). Analysis of this protein sequence reveals the following:

| Possible site: 37 | | | | |
|---|---|---|---|---|
| >>> Seems to have no N-terminal signal sequence | | | | |
| | INTEGRAL | Likelihood = −0.32 | Transmembrane | 60-76 (60-76) |

```
----- Final Results -----
                              bacterial membrane --- Certainty = 0.1128(Affirmative) < succ>
                                bacterial outside --- Certainty = 0.0000(Not Clear) < succ>
                            bacterial cytoplasm --- Certainty = 0.0000(Not Clear) < succ>
```

[3013] The protein has homology with the following sequences in the GENPEPT database:

| >GP: CAA51353 GB: X72832 stringent response-like protein | | | |
|---|---|---|---|
| [Streptococcus equisimilis] | | | |
| Identities = 647/739 (87%), Positives = 696/739 (93%), Gaps = 1/739 (0%) | | | |
| Query: | 1 | MVKEINLTGEEVVAITSQYMSETDVAFVKFALNYATAAHYYQARKSGEPYIIHPIQVAGI | 60 |
| | | M KEINLTGEEVVA+ ++YM+ETD AFVK AL+YATAAH+YQ RKSGEPYI+HPIQVAGI | |
| Sbjct: | 1 | MAKEINLTGEEVVALAAKYMNETDAAFVKKALDYATAAHFYQVRKSGEPYIVHPIQVAGI | 60 |
| Query: | 61 | LADLHLDAVTVACGFLHDVVEDTEITLDEIETDFGKDVRDIIDGVTKLGKVEYKSHEEQL | 120 |
| | | LADLHLDAVTVACGFLHDVVEDT+ITLD IE DFGKDVRDI+DGVTKLGKVEYKSHEEQL | |
| Sbjct: | 61 | LADLHLDAVTVACGFLHDVVEDTDITLDNIEFDFGKDVRDIVDGVTKLGKVEYKSHEEQL | 120 |
| Query: | 121 | AENHRKMLMAMSKDIRVILVKLADRLHNMRTLKHLRKDKQERISRETMEIYAPLAHRLGI | 180 |
| | | AENHRKMLMAMSKDIRVILVKLADRLHNMRTLKHLRKDKQERISRETMEIYAPLAHRLGI | |
| Sbjct: | 121 | AENHRKMLMAMSKDIRVILVKLADRLHNMRTLKHLRKDKQERISRETMEIYAPLAHRLGI | 180 |
| Query: | 181 | SRIKWELEDLSFRYLNETEFYKISHMMSEKRREREELVDIIVDKIRSYTEEQGLYGDIYG | 240 |
| | | SRIKWELEDL+FRYLNETEFYKISHMM+EKRRERE LVD IV KI+SYT EQGL+GD+YG | |
| Sbjct: | 181 | SRIKWELEDLAFRYLNETEFYKISHMMNEKRREREALVDDIVTKIKSYTTEQGLFGDVYG | 240 |
| Query: | 241 | RPKHIYSIYRKMRDKKKRFDQIYDLIAIRCIMETASDVYAMVGYIHELWRPMPGRFKDYI | 300 |
| | | RPKHIYSIYRKMRDKKKRFDQI+DLIAIRC+MET SDVYAMVGYIHELWRPMPGRFKDYI | |
| Sbjct: | 241 | RPKHIYSIYRKMRDKKKRFDQIFDLIAIRCVMETQSDVYAMVGYIHELWRPMPGRFKDYI | 300 |
| Query: | 301 | AAPKANGYQSIHTTVYGPKGPIEIQIRTKEMHQVAEFGVAAHWAYKKGITSKVNQAEQSV | 360 |
| | | AAPKANGYQSIHTTVYGPKGPIEIQIRTKEMHQVAE+GVAAHWAYKKG+ KVNQAEQ V | |
| Sbjct: | 301 | AAPKANGYQSIHTTVYGPKGPIEIQIRTKEMHQVAEYGVAAHWAYKKGVRGKVNQAEQKV | 360 |
| Query: | 361 | GMGWIQELVELQDESK-DAKDFVDSVKEDIFTERIYVFTPNGAVQELPRESGPIDFAYAI | 419 |
| | | GM WI+ELVELQD S DA DFVDSVKEDIF+ERIYVFTP GAVQELP++SGPIDFAYAI | |
| Sbjct: | 361 | GMNWIKELVELQDASNGDAVDFVDSVKEDIFSERIYVFTPTGAVQELPKDSGPIDFAYAI | 420 |
| Query: | 420 | HTQVGEKATGAKVNGRMVPLTAKLKTGDVVEIITNPNSFGPSRDWIKIVKTNKARNKIRQ | 479 |
| | | HTQVGEKA GAKVNGRMVPLTAKLKTGDVVEI+TNPNSFGPSRDWIK+VKTNKARNKIRQ | |
| Sbjct: | 421 | HTQVGEKAIGAKVNGRMVPLTAKLKTGDVVEIVTNPNSFGPSRDWIKLVKTNKARNKIRQ | 480 |
| Query: | 480 | FFKNQDKETSINKGRELLVDYFQEQGYVPNKYLDKKHIEEILPRVSVKSEEALYAAVGFG | 539 |
| | | FFKNQDKE S+NKGR++LV YFQEQGYV NKYLDKK IE ILP+VSVKSEE+LYAAVGFG | |
| Sbjct: | 481 | FFKNQDKELSVNKGRDMLVSYFQEQGYVANKYLDKKRIEAILPKVSVKSEESLYAAVGFG | 540 |
| Query: | 540 | DLSPISIFNKLTEKERREEERAKAKAEADELINGGEIKTDKRDVLKVKSENGVIIQGASG | 599 |
| | | D+SP+S+FNKLTEKERREEERAKAKAEA+EL+NGGEIK + +DVLKV+SENGVIIQGASG | |
| Sbjct: | 541 | DISPVSVFNKLTEKERREEERAKAKAEAEELVNGGEIKHENKDVLKVRSENGVIIQGASG | 600 |
| Query: | 600 | LLMRIAKCCNPVPGDLIEGYITKGRGVAIHRSDCQNLKSQENYEQRLIDVEWDDDGSKKE | 659 |
| | | LLMRIAKCCNPVPGD IEGYITKGRG+AIHR+DC N+KSQ+ Y++RLI+VEWD D S K+ | |
| Sbjct: | 601 | LLMRIAKCCNPVPGDPIEGYITKGRGIAIHRADCNNIKSQDGYQERLIEVEWDLDNSSKD | 660 |
| Query: | 660 | YMAEIDIYGLNRSGLLNDVLQTLSNATKLVSTVNAQPTKDMKFANIHVSFGISNLAQLTT | 719 |
| | | Y AEIDIYGLNR GLLNDVLQ LSN+TK +STVNAQPTKDMKFANIHVSFGI NL LTT | |
| Sbjct: | 661 | YQAEIDIYGLNRRGLLNDVLQILSNSTKSISTVNAQPTKDMKFANIHVSFGIPNLTHLTT | 720 |
| Query: | 720 | VVDKIKIIPDVYSVKRTNG | 738 |
| | | VV+KIK +PDVYSVKRTNG | |
| Sbjct: | 721 | VVEKIKAVPDVYSVKRTNG | 739 |

[3014] A related DNA sequence was identified in S. pyogenes <SEQ ID 1603> which encodes the amino acid sequence <SEQ ID 1604>. Analysis of this protein sequence reveals the following:

Possible site: 41
>>> Seems to have no N-terminal signal sequence

| | | | |
|---|---|---|---|
| INTEGRAL | Likelihood = −0.32 | Transmembrane | 64-80 (64-80) |

```
----- Final Results -----
                              bacterial membrane --- Certainty = 0.1128(Affirmative) < succ>
                                bacterial outside --- Certainty = 0.0000(Not Clear) < succ>
                            bacterial cytoplasm --- Certainty = 0.0000(Not Clear) < succ>
```

[3015] The protein has homology with the following sequences in the databases:

| >GP: CAA51353 GB: X72832 stringent response-like protein | | | |
|---|---|---|---|
| [Streptococcus equisimilis] | | | |
| Identities = 700/739 (94%), Positives = 721/739 (96%) | | | |
| Query: | 5 | MAKIMNVTGEEVIALAATYMTKADVAFVAKALAYATAAHFYQVRKSGEPYIVHPIQVAGI | 64 |
| | | MAK +N+TGEEV+ALAA YM + D AFV KAL YATAAHFYQVRKSGEPYIVHPIQVAGI | |
| Sbjct: | 1 | MAKEINLTGEEVVALAAKYMNETDAAFVKKALDYATAAHFYQVRKSGEPYIVHPIQVAGI | 60 |
| Query: | 65 | LADLHLDAVTVACGFLHDVVEDTDITLDEIEADFGHDARDIVDGVTKLGEVEYKSHEEQL | 124 |
| | | LADLHLDAVTVACGFLHDVVEDTDITLD IE DFG D RDIVDGVTKLG+VEYKSHEEQL | |
| Sbjct: | 61 | LADLHLDAVTVACGFLHDVVEDTDITLDNIEFDFGKDVRDIVDGVTKLGKVEYKSHEEQL | 120 |
| Query: | 125 | AENHRKMLMAMSKDIRVILVKLADRLHNMRTLKHLRKDKQERISRETMEIYAPLAHRLGI | 184 |
| | | AENHRKMLMAMSKDIRVILVKLADRLHNMRTLKHLRKDKQERISRETMEIYAPLAHRLGI | |
| Sbjct: | 121 | AENHRKMLMAMSKDIRVILVKLADRLHNMRTLKHLRKDKQERISRETMEIYAPLAHRLGI | 180 |
| Query: | 185 | SRIKWELEDLAFRYLNETEFYKISHMMKEKRREREALVEAIVSKVKTYTTQQGLFGDVYG | 244 |
| | | SRIKWELEDLAFRYLNETEFYKISHMM EKRREREALV+ IV+K+K+YTT+QGLFGDVYG | |
| Sbjct: | 181 | SRIKWELEDLAFRYLNETEFYKISHMMNEKRREREALVDDIVTKIKSYTTEQGLFGDVYG | 240 |
| Query: | 245 | RPKHIYSIYRKMRDKKKRFDQIFDLIAIRCVMETQSDVYAMVGYIHELWRPMPGRFKDYI | 304 |
| | | RPKHIYSIYRKMRDKKKRFDQIFDLIAIRCVMETQSDVYAMVGYIHELWRPMPGRFKDYI | |
| Sbjct: | 241 | RPKHIYSIYRKMRDKKKRFDQIFDLIAIRCVMETQSDVYAMVGYIHELWRPMPGRFKDYI | 300 |
| Query: | 305 | AAPKANGYQSIHTTVYGPKGPIEIQIRTKDMHQVAEYGVAAHWAYKKGVRGKVNQAEQAV | 364 |
| | | AAPKANGYQSIHTTVYGPKGPIEIQIRTK+MHQVAEYGVAAHWAYKKGVRGKVNQAEQ V | |
| Sbjct: | 301 | AAPKANGYQSIHTTVYGPKGPIEIQIRTKEMHQVAEYGVAAHWAYKKGVRGKVNQAEQKV | 360 |
| Query: | 365 | GMNWIKELVELQDASNGDAVDFVDSVKEDIFSERIYVFTPTGAVQELPKESGPIDFAYAI | 424 |
| | | GMNWIKELVELQDASNGDAVDFVDSVKEDIFSERIYVFTPTGAVQELPK+SGPIDFAYAI | |
| Sbjct: | 361 | GMNWIKELVELQDASNGDAVDFVDSVKEDIFSERIYVFTPTGAVQELPKDSGPIDFAYAI | 420 |
| Query: | 425 | HTQIGEKATGAKVNGRMVPLTAKLKTGDVVEIITNANSFGPSRDWVKLVKTNKARNKIRQ | 484 |
| | | HTQ+GEKA GAKVNGRMVPLTAKLKTGDVVEI+TN NSFGPSRDW+KLVKTNKARNKIRQ | |
| Sbjct: | 421 | HTQVGEKAIGAKVNGRMVPLTAKLKTGDVVEIVTNPNSFGPSRDWIKLVKTNKARNKIRQ | 480 |
| Query: | 485 | FFKNQDKELSVNKGRDLLVSYFQEQGYVANKYLDKKRIEAILPKVSVKSEESLYAAVGFG | 544 |
| | | FFKNQDKELSVNKGRD+LVSYFQEQGYVANKYLDKKRIEAILPKVSVKSEESLYAAVGFG | |
| Sbjct: | 481 | FFKNQDKELSVNKGRDMLVSYFQEQGYVANKYLDKKRIEAILPKVSVKSEESLYAAVGFG | 540 |
| Query: | 545 | DISPISVFNKLTEKERREEERAKAKAEAEELVKGGEVKHENKDVLKVRSENGVIIQGASG | 604 |
| | | DISP+SVFNKLTEKERREEERAKAKAEAEELV GGE+KHENKDVLKVRSENGVIIQGASG | |
| Sbjct: | 541 | DISPVSVFNKLTEKERREEERAKAKAEAEELVNGGEIKHENKDVLKVRSENGVIIQGASG | 600 |
| Query: | 605 | LLMRIAKCCNPVPGDPIDGYITKGRGIAIHRSDCHNIKSQDGYQERLIEVEWDLDNSSKD | 664 |
| | | LLMRIAKCCNPVPGDPI+GYITKGRGIAIHR+DC+NIKSQDGYQERLIEVEWDLDNSSKD | |
| Sbjct: | 601 | LLMRIAKCCNPVPGDPIEGYITKGRGIAIHRADCNNIKSQDGYQERLIEVEWDLDNSSKD | 660 |
| Query: | 665 | YQAEIDIYGLNRSGLLNDVLQILSNSTKSISTVNAQPTKDMKFANIHVSFGIPNLTHLTT | 724 |
| | | YQAEIDIYGLNR GLLNDVLQILSNSTKSISTVNAQPTKDMKFANIHVSFGIPNLTHLTT | |
| Sbjct: | 661 | YQAEIDIYGLNRRGLLNDVLQILSNSTKSISTVNAQPTKDMKFANIHVSFGIPNLTHLTT | 720 |
| Query: | 725 | VVEKIKAVPDVYSVKRTNG | 743 |
| | | VVEKIKAVPDVYSVKRTNG | |
| Sbjct: | 721 | VVEKIKAVPDVYSVKRTNG | 739 |

[3016] An alignment of the GAS and GBS proteins is shown below:

| Identities = 635/739 (85%), Positives = 691/739 (92%), Gaps = 1/739 (0%) | | | |
|---|---|---|---|
| Query: | 1 | MVKEINLTGEEVVAITSQYMSETDVAFVKFALNYATAAHYYQARKSGEPYIIHPIQVAGI | 60 |
| | | M K +N+TGEEV+A+ + YM++ DVAFV AL YATAAH+YQ RKSGEPYI+HPIQVAGI | |
| Sbjct: | 5 | MAKIMNVTGEEVIALAATYMTKADVAFVAKALAYATAAHFYQVRKSGEPYIVHPIQVAGI | 64 |
| Query: | 61 | LADLHLDAVTVACGFLHDVVEDTEITLDEIETDFGKDVRDIIDGVTKLGKVEYKSHEEQL | 120 |
| | | LADLHLDAVTVACGFLHDVVEDT+ITLDEIE DFG D RDI+DGVTKLG+VEYKSHEEQL | |
| Sbjct: | 65 | LADLHLDAVTVACGFLHDVVEDTDITLDEIEADFGHDARDIVDGVTKLGEVEYKSHEEQL | 124 |
| Query: | 121 | AENHRKMLMAMSKDIRVILVKLADRLHNMRTLKHLRKDKQERISRETMEIYAPLAHRLGI | 180 |
| | | AENHRKMLMAMSKDIRVILVKLADRLHNMRTLKHLRKDKQERISRETMEIYAPLAHRLGI | |
| Sbjct: | 125 | AENHRKMLMAMSKDIRVILVKLADRLHNMRTLKHLRKDKQERISRETMEIYAPLAHRLGI | 184 |
| Query: | 181 | SRIKWELEDLSFRYLNETEFYKISHMMSEKRREREELVDIIVDKIRSYTEEQGLYGDIYG | 240 |
| | | SRIKWELEDL+FRYLNETEFYKISHMM EKRRERE LV+ IV K+++YT +QGL+GD+YG | |
| Sbjct: | 185 | SRIKWELEDLAFRYLNETEFYKISHMMKEKRREREALVEAIVSKVKTYTTQQGLFGDVYG | 244 |
| Query: | 241 | RPKHIYSIYRKMRDKKKRFDQIYDLIAIRCIMETASDVYAMVGYIHELWRPMPGRFKDYI | 300 |
| | | RPKHIYSIYRKMRDKKKRFDQI+DLIAIRC+MET SDVYAMVGYIHELWRPMPGRFKDYI | |
| Sbjct: | 245 | RPKHIYSIYRKMRDKKKRFDQIFDLIAIRCVMETQSDVYAMVGYIHELWRPMPGRFKDYI | 304 |
| Query: | 301 | AAPKANGYQSIHTTVYGPKGPIEIQIRTKEMHQVAEFGVAAHWAYKKGITSKVNQAEQSV | 360 |
| | | AAPKANGYQSIHTTVYGPKGPIEIQIRTK+MHQVAE+GVAAHWAYKKG+ KVNQAEQ+V | |
| Sbjct: | 305 | AAPKANGYQSIHTTVYGPKGPIEIQIRTKDMHQVAEYGVAAHWAYKKGVRGKVNQAEQAV | 364 |
| Query: | 361 | GMGWIQELVELQDESK-DAKDFVDSVKEDIFTERIYVFTPNGAVQELPRESGPIDFAYAI | 419 |
| | | GM WI+ELVELQD S DA DFVDSVKEDIF+ERIYVFTP GAVQELP+ESGPIDFAYAI | |
| Sbjct: | 365 | GMNWIKELVELQDASNGDAVDFVDSVKEDIFSERIYVFTPTGAVQELPKESGPIDFAYAI | 424 |
| Query: | 420 | HTQVGEKATGAKVNGRMVPLTAKLKTGDVVEIITNPNSFGPSRDWIKIVKTNKARNKIRQ | 479 |
| | | HTQ+GEKATGAKVNGRMVPLTAKLKTGDVVEIITN NSFGPSRDW+K+VKTNKARNKIRQ | |
| Sbjct: | 425 | HTQIGEKATGAKVNGRMVPLTAKLKTGDVVEIITNANSFGPSRDWVKLVKTNKARNKIRQ | 484 |
| Query: | 480 | FFKNQDKETSINKGRELLVDYFQEQGYVPNKYLDKKHIEEILPRVSVKSEEALYAAVGFG | 539 |
| | | FFKNQDKE S+NKGR+LLV YFQEQGYV NKYLDKK IE ILP+VSVKSEE+LYAAVGFG | |
| Sbjct: | 485 | FFKNQDKELSVNKGRDLLVSYFQEQGYVANKYLDKKRIEAILPKVSVKSEESLYAAVGFG | 544 |
| Query: | 540 | DLSPISIFNKLTEKERREEERAKAKAEADELINGGEIKTDKRDVLKVKSENGVIIQGASG | 599 |
| | | D+SPIS+FNKLTEKERREEERAKAKAEA+EL+ GGE+K + +DVLKV+SENGVIIQGASG | |
| Sbjct: | 545 | DISPISVFNKLTEKERREEERAKAKAEAEELVKGGEVKHENKDVLKVRSENGVIIQGASG | 604 |
| Query: | 600 | LLMRIAKCCNPVPGDLIEGYITKGRGVAIHRSDCQNLKSQENYEQRLIDVEWDDDGSKKE | 659 |
| | | LLMRIAKCCNPVPGD I+GYITKGRG+AIHRSDC N+KSQ+ Y++RLI+VEWD D S K+ | |
| Sbjct: | 605 | LLMRIAKCCNPVPGDPIDGYITKGRGIAIHRSDCHNIKSQDGYQERLIEVEWDLDNSSKD | 664 |
| Query: | 660 | YMAEIDIYGLNRSGLLNDVLQTLSNATKLVSTVNAQPTKDMKFANIHVSFGISNLAQLTT | 719 |
| | | Y AEIDIYGLNRSGLLNDVLQ LSN+TK +STVNAQPTKDMKFANIHVSFGI NL LTT | |
| Sbjct: | 665 | YQAEIDIYGLNRSGLLNDVLQILSNSTKSISTVNAQPTKDMKFANIHVSFGIPNLTHLTT | 724 |
| Query: | 720 | VVDKIKIIPDVYSVKRTNG | 738 |
| | | VV+KIK +PDVYSVKRTNG | |
| Sbjct: | 725 | VVEKIKAVPDVYSVKRTNG | 743 |

[3017] Based on this analysis, it was predicted that these proteins and their epitopes could be useful antigens for vaccines or diagnostics.

### EXAMPLE 501

[3018] A DNA sequence (GBSx0539) was identified in S. agalactiae <SEQ ID 1605> which encodes the amino acid sequence <SEQ ID 1606>. This protein is predicted to be 2′,3′-cyclic-nucleotide 2′-phosphodiesterase precursor (cpdB). Analysis of this protein sequence reveals the following:

| Possible site: 28 | | | | |
|---|---|---|---|---|
| >>> Seems to have a cleavable N-term signal seq. | | | | |
| | INTEGRAL | Likelihood = −5.79 | Transmembrane | 779-795 (778-797) |

```
----- Final Results -----
                              bacterial membrane --- Certainty = 0.3314(Affirmative) < succ>
                                bacterial outside --- Certainty = 0.0000(Not Clear) < succ>
                            bacterial cytoplasm --- Certainty = 0.0000(Not Clear) < succ>
```

[3019] The protein has homology with the following sequences in the GENPEPT database:

| >GP: CAB12613 GB: Z99108 similar to 2′,3′-cyclic-nucleotide | | | |
|---|---|---|---|
| 2′-phosphodiesterase [Bacillus subtilis] | | | |
| Identities = 297/630 (47%), Positives = 419/630 (66%), Gaps = 21/630 (3%) | | | |
| Query: | 102 | KVDLRIMSTTDLHTNLVNYDYYQDKESQKIGLAKTAVLIEEAKKENPNTVLVDNGDVIQG | 161 |
| | | +V L I++TTD+H N+++YDYY DKE+ GLA+TA LI++ +++NPNT+LVDNGD+IQG | |
| Sbjct: | 42 | QVHLSILATTDIHANMMDYDYYSDKETADFGLARTAQLIQKHREQNPNTLLVDNGDLIQG | 101 |
| Query: | 162 | TPLGTYKAIVKP---VAENEEHPMYQAMNALGYDASTLGNHEFNYGLDYLKKIIATANLP | 218 |
| | | PLG Y + ++ + HP+ MNAL YDA TLGNHEFNYGLD+L I A+ P | |
| Sbjct: | 102 | NPLGEYAVKYQKDDIISGTKTHPIISVMNALKYDAGTLGNHEFNYGLDFLDGTIKGADFP | 161 |
| Query: | 219 | ILNANVLDFKTHQPVFKTYDIITKTFKDSTGRAVALNIGITGIVPPQILNWDKANLEGKV | 278 |
| | | I+NANV + + + Y I KT D G + +G G VPPQI+ WDK NLEG+V | |
| Sbjct: | 162 | IVNANVKT-TSGENRYTPYVINEKTLIDENGNEQKVKVGYIGFVPPQIMTWDKKNLEGQV | 220 |
| Query: | 279 | IVKDSVKAIEEIVPTMRAKGADVILVLSHSGIGDDRYEEGEENVGYQIAS-IKGVDAVVT | 337 |
| | | V+D V++ E +P M+A+GADVI+ L+H+GI G EN + +A+ KG+DA+++ | |
| Sbjct: | 221 | QVQDIVESANETIPKMKAEGADVIIALAHTGIEKQAQSSGAENAVFDLATKTKGIDAIIS | 280 |
| Query: | 338 | GHSHAEFPSGNGTGFYEKYTGVDGIN---GKINGTPVTMAGKYGDHLGIIDLGLSYTNGK | 394 |
| | | GH H FPS +Y GV N G ING PV M +G +LG+IDL L +G | |
| Sbjct: | 281 | GHQHGLFPSA-------EYAGVAQFNVEKGTINGIPVVMPSSWGKYLGVIDLKLEKADGS | 333 |
| Query: | 395 | WQVSESSAKIRKIDMNSTTADERIIALAKEAHDGTINYVRQQVGTTTAPITSYFALVKDD | 454 |
| | | W+V++S I I N T+ +E + ++ H T+ YVR+ VG T A I S+FA VKDD | |
| Sbjct: | 334 | WKVADSKGSIESIAGNVTSRNETVTNTIQQTHQNTLEYVRKPVGKTEADINSFFAQVKDD | 393 |
| Query: | 455 | PSVQIVNNAQRWYVANELKGTPEANLPLLSAAAPFKAGTRGDATAYTDIPAGPVAIKNVA | 514 |
| | | PS+QIV +AQ+WY E+K T NLP+LSA APFKAG R A YT+IPAG +AIKNV | |
| Sbjct: | 394 | PSIQIVTDAQKWYAEKEMKDTEYKNLPILSAGAPFKAGGRNGANYYTNIPAGDLAIKNVG | 453 |
| Query: | 515 | DLYLYDNVTALLKVTGADLREWLEMSAGQFNQIDPNNKAPQNIINTEYRTYNFDVIDGLT | 574 |
| | | DLYLYDN ++K+TG+++++WLEMSAGQFNQIDP Q ++N +R+YNFDVIDG+T | |
| Sbjct: | 454 | DLYLYDNTVQIVKLTGSEVKDWLEMSAGQFNQIDPAKGGDQALLNENFRSYNFDVIDGVT | 513 |
| Query: | 575 | YKFDITQPNKYNKDGKVVNSQASRVRDLMYNGKPVADKQEFMIVTNNYRASGTFPGAKNA | 634 |
| | | Y+ D+T+P KYN++GKV+N+ +SR+ +L Y GKP++ QEF++VTNNYRASG G + | |
| Sbjct: | 514 | YQVDVTKPAKYNENGKVINADSSRIINLSYEGKPISPSQEFLVVTNNYRASGG-GGFPHL | 572 |
| Query: | 635 | TMNRLLN---LENRQTIINYIISEKTINPTADNNWGFTESIKDLDLRFQTADKAKNLVTN | 691 |
| | | T +++++ +ENRQ +++YII +KT+NP ADNNW + +L F+++ AK | |
| Sbjct: | 573 | TSDKIVHGSAVENRQVLMDYIIEQKTVNPKADNNWSIA-PVSGTNLTFESSLLAKPFADK | 631 |
| Query: | 692 | SKDIQYIASSTKDEGFGDYRFVYTEQEKVD | 721 |
| | | + D+ Y+ S +EG+G Y+ + + D | |
| Sbjct: | 632 | ADDVAYVGKSA-NEGYGVYKLQFDDDSNPD | 660 |
| Identities = 133/567 (23%), Positives = 214/567 (37%), Gaps = 147/567 (25%) | | | |
| Query: | 104 | DLRIMSTTDLHTNLVNYDYYQDKESQKIGLAKTAVLIEEAKKENPNTVLVDNGDVIQGTP | 163 |
| | | DL +M T D H +L + A+ I E + E + +L+D GDV G | |
| Sbjct: | 668 | DLTVMHTNDTHAHLDD-------------AARRMTKINEVRSETNHNILLDAGDVFSGD- | 713 |
| Query: | 164 | LGTYKAIVKPVAENEEHPMYQAMNALGYDASTLGNHEFNYG----LDYLKKIIATAN--- | 216 |
| | | Y +A+ + MN +GYDA T GNHEF+ G D+L AT + | |
| Sbjct: | 714 | --LYFTKWNGLAD------LKMMNMMGYDAMTFGNHEFDKGPTVLSDFLSGNSATVDPAN | 765 |
| Query: | 217 | --------LPILNANVLDFKTHQPVFKTYDIITKTF----KDSTGRAVALNIGITG--IV | 262 |
| | | PI++ANV +++P K++ +TF K G + + + G + | |
| Sbjct: | 766 | RYHFEAPEFPIVSANV--DVSNEPKLKSFVKKPQTFTAGEKKEAGIHPYILLDVDGEKVA | 823 |
| Query: | 263 | PPQILNWDKANLE--GKVIV--------KDSVKAIEEIVPTMRAKGADVILVLSHSGIGD | 312 |
| | | + D A GK IV +++VKAI+E + + I+ L+H G | |
| Sbjct: | 824 | VFGLTTEDTATTSSPGKSIVFNDAFETAQNTVKAIQE------EEKVNKIIALTHIG--- | 874 |
| Query: | 313 | DRYEEGEENVGYQIA-SIKGVDAVVTGHSHAEFPSGNGTGFYEKYTGVDGINGKINGTP- | 370 |
| | | N ++A +KG+D ++ GH+H T VD + N P | |
| Sbjct: | 875 | -------HNRDLELAKKVKGIDLIIGGHTH---------------TLVDKMEVVNNEEPT | 912 |
| Query: | 371 | -VTMAGKYGDHLGIIDLGLSYTNGKWQVSESSAKIRKIDMNSTTADERIIALAKEAHDGT | 429 |
| | | V A +YG LG +D+ G Q +S+ + ID ++ E AK+ D | |
| Sbjct: | 913 | IVAQAKEYGQFLGRVDVAFD-EKGVVQTDKSNLSVLPIDEHTEENPE-----AKQELDQF | 966 |
| Query: | 430 | INYV----RQQVGTTTAPITSYFALVKDDPSVQIVNNAQRWYVANELKGTPEANLPLLSA | 485 |
| | | N + ++VG T + + QR +V + + A | |
| Sbjct: | 967 | KNELEDVKNEKVGYT-----------------DVALDGQREHVRTKETNLGNFIADGMLA | 1009 |
| Query: | 486 | AAPFKAGTRGDAT----AYTDIPAGPVAIKNVADLYLYDNVTALLKVTGADLREWLEMSA | 541 |
| | | A AG R T I G + + V ++ + N + +TG ++E LE | |
| Sbjct: | 1010 | KAKEAAGARIAITNGGGIRAGIDKGDITLGEVLNVMPFGNTLYVADLTGKQIKEALE--- | 1066 |
| Query: | 542 | GQFNQIDPNNKAPQNIINTEYRTYNFDVIDGLTYKFDITQPNKYNKDGKVVNSQASRVRD | 601 |
| | | Q + N E F + G+ Y F + NK G + V+ | |
| Sbjct: | 1067 | -------------QGLSNVENGGGAFPQVAGIEYTFTLN-----NKPG----HRVLEVKI | 1104 |
| Query: | 602 | LMYNGKPVADKQE--FMIVTNNYRASG | 626 |
| | | NG VA + + + TNN+ +G | |
| Sbjct: | 1105 | ESPNGDKVAINTDDTYRVATNNFVGAG | 1131 |

[3020] There is also homology to SEQ ID 1608. A related sequence was also identified in GAS <SEQ ID 9129> which encodes the amino acid sequence <SEQ ID 9130>. Analysis of this protein sequence reveals the following:

| Possible cleavage site: 27 | | | |
|---|---|---|---|
| >>> Seems to have an uncleavable N-term signal seq | | | |
| INTEGRAL | Likelihood = −4.67 | Transmembrane | 649-665 (648-666) |
| INTEGRAL | Likelihood = −2.02 | Transmembrane | 6-22 (5-22) |
| PERIPHERAL | Likelihood = 1.85 | | |

[3021] Based on this analysis, it was predicted that these proteins and their epitopes could be useful antigens for vaccines or diagnostics.

[3022] A related GBS gene <SEQ ID 8585> and protein <SEQ ID 8586> were also identified. Analysis of this protein sequence reveals the following:

| Lipop: Possible site: −1 Crend: 7 | | | | |
|---|---|---|---|---|
| McG: Discrim Score: 6.68 | | | | |
| GvH: Signal Score (−7.5): 0.87 | | | | |
| Possible site: 28 | | | | |
| >>> Seems to have a cleavable N-term signal seq. | | | | |
| ALOM program count: 1 value: −5.79 threshold: 0.0 | | | | |
| | INTEGRAL | Likelihood = −5.79 | Transmembrane | 779-795 (778-797) |
| | PERIPHERAL | Likelihood = 0.53 | 251 | |

```
modified ALOM score: 1.66
*** Reasoning Step: 3
----- Final Results -----
                              bacterial membrane --- Certainty = 0.3314(Affirmative) < succ>
                                bacterial outside --- Certainty = 0.0000(Not Clear) < succ>
                            bacterial cytoplasm --- Certainty = 0.0000(Not Clear) < succ>
LPXTG motif: 769-773
```

[3023] The protein has homology with the following sequences in the databases:

[chemical structure]

[3024] SEQ ID 8586 (GBS53) was expressed in E. coli as a His-fusion product. The purified protein is shown in FIG. 196, lane 9.

### EXAMPLE 502

[3025] A DNA sequence (GBSx0540) was identified in S. agalactiae <SEQ ID 1609> which encodes the amino acid sequence <SEQ ID 1610>. Analysis of this protein sequence reveals the following:

```
Possible site: 24
>>> Seems to have no N-terminal signal sequence
----- Final Results -----
                            bacterial cytoplasm --- Certainty = 0.0296(Affirmative) < succ>
                              bacterial membrane --- Certainty = 0.0000(Not Clear) < succ>
                                bacterial outside --- Certainty = 0.0000(Not Clear) < succ>
```

[3026] The protein has no significant homology with any sequences in the GENPEPT database.

[3027] No corresponding DNA sequence was identified in S. pyogenes.

[3028] Based on this analysis, it was predicted that this protein and its epitopes, could be useful antigens for vaccines or diagnostics.

### EXAMPLE 503

[3029] A DNA sequence (GBSx0541) was identified in S. agalactiae <SEQ ID 1611> which encodes the amino acid sequence <SEQ ID 1612>. Analysis of this protein sequence reveals the following:

```
Possible site: 18
>>> Seems to have no N-terminal signal sequence
----- Final Results -----
                            bacterial cytoplasm --- Certainty = 0.1504(Affirmative) < succ>
                              bacterial membrane --- Certainty = 0.0000(Not Clear) < succ>
                                bacterial outside --- Certainty = 0.0000(Not Clear) < succ>
```

[3030] A related GBS nucleic acid sequence <SEQ ID 10195> which encodes amino acid sequence <SEQ ID 10196> was also identified.

[3031] The protein has homology with the following sequences in the GENPEPT database:

| >GP: CAB12860 GB: Z99109 similar to glucanase [Bacillus subtilis] | | | |
|---|---|---|---|
| Identities = 212/345 (61%), Positives = 268/345 (77%), Gaps = 1/345 (0%) | | | |
| Query: | 30 | SMETTLNYIKTLTSIPSPTGFTQTIMTYIIKELEAFGYSPIRTNKGGVMVSLKGKNDTKH | 89 |
| | | S+ T+ IK L SIPSPTG T ++ YI L+ + +R +KGG++ +L G++ ++H | |
| Sbjct: | 3 | SVRKTMELIKELVSIPSPTGNTYEVINYIESLLKEWKVETVRNHKGGLIATLPGRDTSRH | 62 |
| Query: | 90 | RMITAHLDTLGAMVRAIKPDGRLKIDLIGGYTYNAIEGENCTIHLSKNGKEISGTALIHQ | 149 |
| | | RM+TAH+DTLGAMV+ IK DGRLKIDLIGG+ YN+IEGE C I + +GK +GT L+HQ | |
| Sbjct: | 63 | RMLTAHVDTLGAMVKEIKADGRLKIDLIGGFRYNSIEGEYCQIETA-SGKMYTGTILMHQ | 121 |
| Query: | 150 | TSVHVYKDAGTAERNQTNMEIRLDEKVTTADETRALGIQVGDFISFDPRTIITDSGFIKS | 209 |
| | | TSVHVYKDAG AERNQ NMEIRLDE V +T LGI VGDF+SFDPR IT SGFIKS | |
| Sbjct: | 122 | TSVHVYKDAGKAERNQENMEIRLDEPVHCRKDTEELGIGVGDFVSFDPRVEITSSGFIKS | 181 |
| Query: | 210 | RYLDDKVSAGILMELLSVYKKEDIQLPYTTHFYFSAFEELGHGANSSIPNETVEYLAVDM | 269 |
| | | R+LDDK S +L+ L+ + EDI+LPYTTHF S EE+G+G NS+IP ETVEYLAVDM | |
| Sbjct: | 182 | RHLDDKASVALLLRLIHEIQTEDIELPYTTHFLISNNEEIGYGGNSNIPPETVEYLAVDM | 241 |
| Query: | 270 | GAMGDDQETDEYTVSICVKDASGPYHYELRQHLVSLAENNNIPYKLDIYPYYGSDASAAM | 329 |
| | | GA+GD Q TDEY+VSICVKDASGPYHY+LR+HLV LAE ++I YKLDIYPYYGSDASAA+ | |
| Sbjct: | 242 | GAIGDGQATDEYSVSICVKDASGPYHYQLRKHLVQLAEKHHIDYKLDIYPYYGSDASAAI | 301 |
| Query: | 330 | RAGAEVKHALLGAGIESSHSYERTHIDSIQATELLVDAYLKSNMV | 374 |
| | | ++G ++ H L+G GI++SH++ERTH S++ T L+ Y++S MV | |
| Sbjct: | 302 | KSGHDIVHGLIGPGIDASHAFERTHKSSLRHTAKLLYYYVQSPMV | 346 |

[3032] There is also homology to SEQ ID 424.

[3033] Based on this analysis, it was predicted that these proteins and their epitopes could be useful antigens for vaccines or diagnostics.

### EXAMPLE 504

[3034] A DNA sequence (GBSx0542) was identified in S. agalactiae <SEQ ID 1613> which encodes the amino acid sequence <SEQ ID 1614>. Analysis of this protein sequence reveals the following:

```
Possible site: 20
>>> Seems to have no N-terminal signal sequence
----- Final Results -----
                            bacterial cytoplasm --- Certainty = 0.3157(Affirmative) < succ>
                              bacterial membrane --- Certainty = 0.0000(Not Clear) < succ>
                                bacterial outside --- Certainty = 0.0000(Not Clear) < succ>
```

[3035] The protein has homology with the following sequences in the GENPEPT database:

| >GP: AAF11472 GB: AE002031 conserved hypothetical protein | | | |
|---|---|---|---|
| [Deinococcus radiodurans] | | | |
| Identities = 55/150 (36%), Positives = 85/150 (56%), Gaps = 2/150 (1%) | | | |
| Query: | 5 | LIIIRGNSASGKSTIAKQLQAELGENTLLLSQDYLRREMLGTKDGENTTTIPLLINLLNY | 64 |
| | | LI++RGNS SGKS++A+ L+ G + QDYLRR +L D I L+ + Y | |
| Sbjct: | 23 | LIVLRGNSGSGKSSVARALRERFGYGLAWVEQDYLRRVLLREHDVAGGKNIGLIETNVRY | 82 |
| Query: | 65 | GYHNCSYIILEGILRSDWYTPVWKHILKHNPNNTYAYYYDLSFQETVKRHSTRLKSLEFG | 124 |
| | | S +LEGIL S Y P+ + + H + +Y+DL F+ETV+RH+TR ++ +FG | |
| Sbjct: | 83 | CLSAGSVTVLEGILFSRHYGPMLERL--HADFGGHWFYFDLPFEETVRRHATRPQAADFG | 140 |
| Query: | 125 | EDSLARWWLEKDFLKEIPEKILTKAMSLED | 154 |
| | | + W+ +D L + E+++ A SL D | |
| Sbjct: | 141 | VQDMQAWFQARDVLPFVQEQLIGPASSLAD | 170 |

[3036] No corresponding DNA sequence was identified in S. pyogenes.

[3037] Based on this analysis, it was predicted that this protein and its epitopes, could be useful antigens for vaccines or diagnostics.

### EXAMPLE 505

[3038] A DNA sequence (GBSx0543) was identified in S. agalactiae <SEQ ID 1615> which encodes the amino acid sequence <SEQ ID 1616>. This protein is predicted to be periplasmic-iron-binding protein BitC. Analysis of this protein sequence reveals the following:

| Possible site: 29 | | | | |
|---|---|---|---|---|
| >>> Seems to have an uncleavable N-term signal seq | | | | |
| | INTEGRAL | Likelihood = −11.46 | Transmembrane | 9-25 (5-30) |

```
----- Final Results -----
                              bacterial membrane --- Certainty = 0.5585(Affirmative) < succ>
                                bacterial outside --- Certainty = 0.0000(Not Clear) < succ>
                            bacterial cytoplasm --- Certainty = 0.0000(Not Clear) < succ>
```

[3039] The protein has homology with the following sequences in the GENPEPT database:

| >GP: AAD18094 GB: U75349 periplasmic-iron-binding protein BitA | | | |
|---|---|---|---|
| [Brachyspira hyodysenteriae] (ver 2) | | | |
| Identities = 114/331 (34%), Positives = 184/331 (55%), Gaps = 3/331 (0%) | | | |
| Query: | 11 | YILLVVSIIFISVFTYSISQPSKLLPPKELVILSPNSQAILTGTIPAFEEKY-GIKVKLI | 69 |
| | | +I+ + ++ +++F S SK LVI + ++ + F+ K I V+++ | |
| Sbjct: | 4 | FIIFCMLMLSMTLFYSCSSGDSK--NANSLVIYCSHPLDLMNTILDDFKAKNPDINVEVV | 61 |
| Query: | 70 | QGGTGQLIDRLSKEGKQLKADIFFGGNYTQFESHKALFESYVSKNVHTVIPDYIHPSDTA | 129 |
| | | GTG+L+ R+ E D+ +GG +S LFE+Y S N ++ ++ + | |
| Sbjct: | 62 | TAGTGELLKRVEAEKMNPLGDVLWGGTLNSVKSKTDLFENYTSTNEANILDEFKNTEGPF | 121 |
| Query: | 130 | TPYTINGSVLIVNNELAKGLTIKSYEDLLQPSLKGKIAFADPNTSSSAFSQLTNILLAKG | 189 |
| | | T ++ S+L+VN LA + I+ YEDLL P LKGKIA ADP+ SSSAF L N+L A G | |
| Sbjct: | 122 | TRFSAIPSILMVNTNLAGNIKIEGYEDLLNPELKGKIAAADPSASSSAFEHLVNMLYAMG | 181 |
| Query: | 190 | GYTNPKAWNYVKKLQHNINAIKSSSSSEVYQSVAEGKMIVGLTYEDPSVNLQKSGANVSI | 249 |
| | | K W+YV+KL N++ S SS VY+ VA+G+ VGLTYE+P ++ SG+ V + | |
| Sbjct: | 182 | KGDPEKGWDYVQKLCANLDGKLLSGSSAVYKGVADGEYTVGLTYEEPGISYMSSGSPVKV | 241 |
| Query: | 250 | VYPTEGTVFVPSSVAIIKNAPSMKEAKLFINFMLSLDVQNAFGQSTSNRPIRKDAQTSNG | 309 |
| | | +Y EG + P V IIK +++ AK FI++ +SLD QN + S R IR DA ++ | |
| Sbjct: | 242 | IYMKEGVISKPDGVYIIKGGKNLENAKKFIDYCVSLDAQNMLVEKLSRRSIRSDAVVTDM | 301 |
| Query: | 310 | MKALKDIATLKEDYRYVTKHKGQILKTYNRI | 340 |
| | | +K + +I ++ ++ V + + + L + I | |
| Sbjct: | 302 | VKPMSEIYSITDNADVVEESRQKWLDKFKDI | 332 |

[3040] A related DNA sequence was identified in S. pyogenes <SEQ ID 1617> which encodes the amino acid sequence <SEQ ID 1618>. Analysis of this protein sequence reveals the following:

| Possible site: 33 | | | | |
|---|---|---|---|---|
| >>> Seems to have an uncleavable N-term signal seq | | | | |
| | INTEGRAL | Likelihood = −13.16 | Transmembrane | 9-25 (4-33) |

```
----- Final Results -----
                              bacterial membrane --- Certainty = 0.6265(Affirmative) < succ>
                                bacterial outside --- Certainty = 0.0000(Not Clear) < succ>
                            bacterial cytoplasm --- Certainty = 0.0000(Not Clear) < succ>
```

[3041] The protein has homology with the following sequences in the databases:

| >GP: AAB95371 GB: U75349 periplasmic-iron-binding protein BitC | | | |
|---|---|---|---|
| [Brachyspira hyodysenteriae] | | | |
| Identities = 115/324 (35%), Positives = 177/324 (54%), | | | |
| Gaps = 8/324 (2%) | | | |
| Query: | 15 | VIIILAIVNVAMYIF-----SSSKKDSAKELVILTPNSQTILTGTIPAFEEKY-GVKVRL | 68 |
| | | +++I + ++++IF S S S LVI P+ + + F+ K G+ V + | |
| Sbjct: | 4 | IVLIFTSLLLSVFIFYSCSSSESGAQSGNSLVIYCPHPLEFINPLVDDFKAKNPGINVDI | 63 |
| Query: | 69 | IQGGTGQLIDQL-GRKDKPLNADIFFGGNYTQFESHKDLFESYVSPQVSTVISDYQLPSH | 127 |
| | | I GTG+L+ ++ KD PL DI +GG + + DLFESY S + Y+ | |
| Sbjct: | 64 | IAAGTGELLKRVESEKDNPLG-DILWGGTISMAKPKIDLFESYTSTNEENIAEIYKNTEG | 122 |
| Query: | 128 | RATPYTINGSVLIVNNELARGLHITSYEDLLQPALKGKIAFADPNSSSSAFSQLTNILLA | 187 |
| | | T T S+L+VN LA + I YEDLL P LKGKIAFADP++SSS+F L N+L A | |
| Sbjct: | 123 | ALTRCTAVPSILMVNTNLAGDIKIEGYEDLLNPELKGKIAFADPSASSSSFEHLVNMLYA | 182 |
| Query: | 188 | KGGYTNADAWAYMKRLLVNMNSIRATSSSEVYQSVAEGKMIVGLTYEDPCINLQKSGANV | 247 |
| | | G W Y+ +L N++ + SS VY+ VA+G+ VGLT+E+ N +G+ V | |
| Sbjct: | 183 | IGKGDPEKGWDYVSKLCANLDGKLLSGSSAVYKGVADGEYTVGLTFEEGGANYVSAGSPV | 242 |
| Query: | 248 | SIVYPKEGTVFVPSSVAIIKHAPNMTEAKLFINFMLSRDVQNAFGQSTSNRPIRQDAQTS | 307 |
| | | +VY KEG + P + IIK+A N+ AK F+++ S D Q + R +R D S | |
| Sbjct: | 243 | KLVYMKEGVIIKPDGIYIIKNAKNLENAKKFVDYATSYDAQKTITDKLNRRSVRGDLPPS | 302 |
| Query: | 308 | HDMKALETIATLKEDYAYVTKHKK | 331 |
| | | +++++TI + +D A V ++K+ | |
| Sbjct: | 303 | AILQSVDTINVITDDEAVVDQNKQ | 326 |

[3042] An alignment of the GAS and GBS proteins is shown below:

| Identities = 257/345 (74%), Positives = 295/345 (85%), | | | |
|---|---|---|---|
| Gaps = 1/345 (0%) | | | |
| Query: | 1 | MKEKQSKRLIYILLVVSIIFISVFTYSISQPSKLLPPKELVILSPNSQAILTGTIPAFEE | 60 |
| | | +K K+ L ++L+++ + ++V Y S SK KELVIL+PNSQ ILTGTIPAFEE | |
| Sbjct: | 2 | LKLKRKWLLSFLLVIIILAIVNVAMYIFSS-SKKDSAKELVILTPNSQTILTGTIPAFEE | 60 |
| Query: | 61 | KYGIKVKLIQGGTGQLIDRLSKEGKQLKADIFFGGNYTQFESHKALFESYVSKNVHTVIP | 120 |
| | | KYG+KV+LIQGGTGQLID+L ++ K L ADIFFGGNYTQFESHK LFESYVS V TVI | |
| Sbjct: | 61 | KYGVKVRLIQGGTGQLIDQLGRKDKPLNADIFFGGNYTQFESHKDLFESYVSPQVSTVIS | 120 |
| Query: | 121 | DYIHPSDTATPYTINGSVLIVNNELAKGLTIKSYEDLLQPSLKGKIAFADPNTSSSAFSQ | 180 |
| | | DY PS ATPYTINGSVLIVNNELA+GL I SYEDLLQP+LKGKIAFADPN+SSSAFSQ | |
| Sbjct: | 121 | DYQLPSHRATPYTINGSVLIVNNELARGLHITSYEDLLQPALKGKIAFADPNSSSSAFSQ | 180 |
| Query: | 181 | LTNILLAKGGYTNPKAWNYVKKLQHNINAIKSSSSSEVYQSVAEGKMIVGLTYEDPSVNL | 240 |
| | | LTNILLAKGGYTN AW Y+K+L N+N+I+++SSSEVYQSVAEGKMIVGLTYEDP +NL | |
| Sbjct: | 181 | LTNILLAKGGYTNADAWAYMKRLLVNMNSIRATSSSEVYQSVAEGKMIVGLTYEDPCINL | 240 |
| Query: | 241 | QKSGANVSIVYPTEGTVFVPSSVAIIKNAPSMKEAKLFINFMLSLDVQNAFGQSTSNRPI | 300 |
| | | QKSGANVSIVYP EGTVFVPSSVAIIK+AP+M EAKLFINFMLS DVQNAFGQSTSNRPI | |
| Sbjct: | 241 | QKSGANVSIVYPKEGTVFVPSSVAIIKHAPNMTEAKLFINFMLSRDVQNAFGQSTSNRPI | 300 |
| Query: | 301 | RKDAQTSNGMKALKDIATLKEDYRYVTKHKGQILKTYNRIRRNAD | 345 |
| | | R+DAQTS+ MKAL+ IATLKEDY YVTKHK +I+ TYN++R+ + | |
| Sbjct: | 301 | RQDAQTSHDMKALETIATLKEDYAYVTKHKKKIVATYNQLRQRLE | 345 |

[3043] SEQ ID 1616 (GBS263) was expressed in E. coli as a GST-fusion product. SDS-PAGE analysis of total cell extract is shown in FIG. 49 (lane 4; MW 63 kDa).

[3044] The GBS263-GST fusion product was purified (FIG. 205, lane 5) and used to immunise mice. The resulting antiserum was used for FACS (FIG. 301), which confirmed that the protein is immunoaccessible on GBS bacteria.

[3045] Based on this analysis, it was predicted that these proteins and their epitopes could be useful antigens for vaccines or diagnostics.

### EXAMPLE 506

[3046] A DNA sequence (GBSx0544) was identified in S. agalactiae <SEQ ID 1619> which encodes the amino acid sequence <SEQ ID 1620>. This protein is predicted to be response regulator. Analysis of this protein sequence reveals the following:

```
Possible site: 37
>>> Seems to have no N-terminal signal sequence
----- Final Results -----
                            bacterial cytoplasm --- Certainty = 0.4733(Affirmative) < succ>
                              bacterial membrane --- Certainty = 0.0000(Not Clear) < succ>
                                bacterial outside --- Certainty = 0.0000(Not Clear) < succ>
```

[3047] The protein has homology with the following sequences in the GENPEPT database:

| >GP: AAF31452 GB: AF221126 putative response | | | |
|---|---|---|---|
| regulator [Streptococcus pneumoniae] | | | |
| Identities = 85/252 (33%), Positives = 147/252 (57%), | | | |
| Gaps = 17/252 (6%) | | | |
| Query: | 2 | YRLLIVEDEHLIRKWLRYAIDYQSLNILVVGEAKDGKEGAQLIQEEQPDIVLSDINMPIM | 61 |
| | | Y +LIVEDE+L+R+ L ++ + ++ ++G+A++G++ +LIQ++ PDI+L+DINMP + | |
| Sbjct: | 3 | YTILIVEDEYLVRQGLTKLVNVAAYDMEIIGQAENGRQAWELIQKQVPDIILTDINMPHL | 62 |
| Query: | 62 | TAFDMFEATKGQSYAK---IILSGYADFPNAQSAIHYGVLEFLTKPLEKQALIDCLKTIM | 118 |
| | | + + ++Y + + L+GY DF A SA+ GV ++L KP +Q + + L I | |
| Sbjct: | 63 | NGIQLASLVR-ETYPQVHLVFLTGYDDFDYALSAVKLGVDDYLLKPFSRQDIEEMLGKIK | 121 |
| Query: | 119 | ARIE-EHKEKHLQEHTELYLPLPQANDQVPEVIKDMLAWIHSHFHGKIVISQLAHDLGYS | 177 |
| | | +++ E KE+ LQ+ L + + + I+ LA + + LA DLG+S | |
| Sbjct: | 122 | QKLDKEEKEEQLQD-----LLTNRFEGNMAQKIQSHLA------DSQFSLKSLASDLGFS | 170 |
| Query: | 178 | ESYLYTVTKKHLHITLSDYINQYRINQAIQLMFREPDLMVYQIAEAVGIYDYRYFDRVFK | 237 |
| | | +YL ++ KK L + DY+ + R+ QA +L+ DL +Y+IAE VG D YF + FK | |
| Sbjct: | 171 | PTYLSSLIKKELGLPFQDYLVRERVKQA-KLLLLTTDLKIYEIAEKVGFEDMNYFTQRFK | 229 |
| Query: | 238 | KYLGQTVKAFKE | 249 |
| | | + G T + FK+ | |
| Sbjct: | 230 | QIAGVTPRQFKK | 241 |

[3048] A related DNA sequence was identified in S. pyogenes <SEQ ID 1621> which encodes the amino acid sequence <SEQ ID 1622>. Analysis of this protein sequence reveals the following:

```
Possible site: 36
>>> Seems to have no N-terminal signal sequence
----- Final Results -----
                            bacterial cytoplasm --- Certainty = 0.4239(Affirmative) < succ>
                              bacterial membrane --- Certainty = 0.0000(Not Clear) < succ>
                                bacterial outside --- Certainty = 0.0000(Not Clear) < succ>
```

[3049] An alignment of the GAS and GBS proteins is shown below:

| Identities = 193/257 (75%), Positives = 226/257 (87%) | | | |
|---|---|---|---|
| Query: | 1 | MYRLLIVEDEHLIRKWLRYAIDYQSLNILVVGEAKDGKEGAQLIQEEQPDIVLSDINMPI | 60 |
| | | MY+L+I+EDEH+IRKWLRYAIDY++L+ILV+GEAKDGKEGA LI+E QPDIVL+DINMPI | |
| Sbjct: | 1 | MYKLVIIEDEHIIRKWLRYAIDYKALDILVIGEAKDGKEGAVLIKESQPDIVLTDINMPI | 60 |
| Query: | 61 | MTAFDMFEATKGQSYAKIILSGYADFPNAQSAIHYGVLEFLTKPLEKQALIDCLKTIMAR | 120 |
| | | MTAFDMFE TK Q+YAKIILSGYADFPNA+SAIHYGVLEFLTKP+EK AL +CL+TI+A+ | |
| Sbjct: | 61 | MTAFDMFEVTKDQTYAKIILSGYADFPNARSAIHYGVLEFLTKPIEKAALWECLQTIIAK | 120 |
| Query: | 121 | IEEHKEKHLQEHTELYLPLPQANDQVPEVIKDMLAWIHSHFHGKIVISQLAHDLGYSESY | 180 |
| | | IE+ K + + +Y+PLPQ DQ+PEV+KD+L W+H+HF KI S+LAHDLGYSESY | |
| Sbjct: | 121 | IEKQKGSNQKTDACVYIPLPQMTDQIPEVVKDILEWVHAHFQDKISTSRLAHDLGYSESY | 180 |
| Query: | 181 | LYTVTKKHLHITLSDYINQYRINQAIQLMFREPDLMVYQIAEAVGIYDYRYFDRVFKKYL | 240 |
| | | +Y KKHL + LSDYINQYRINQAIQLM +EPDLMVY+IA+AVGIYDYRYFDRVFKKYL | |
| Sbjct: | 181 | IYQNIKKHLQMPLSDYINQYRINQAIQLMQQEPDLMVYEIAQAVGIYDYRYFDRVFKKYL | 240 |
| Query: | 241 | GQTVKAFKEEHIFKQMD | 257 |
| | | GQTVKAFKEEH K D | |
| Sbjct: | 241 | GQTVKAFKEEHFMKDTD | 257 |

[3050] Based on this analysis, it was predicted that these proteins and their epitopes could be useful antigens for vaccines or diagnostics.

### EXAMPLE 507

[3051] A DNA sequence (GBSx0545) was identified in S. agalactiae <SEQ ID 1623> which encodes the amino acid sequence <SEQ ID 1624>. Analysis of this protein sequence reveals the following:

```
Possible site: 14
>>> Seems to have no N-terminal signal sequence
----- Final Results -----
                            bacterial cytoplasm --- Certainty = 0.2964(Affirmative) < succ>
                              bacterial membrane --- Certainty = 0.0000(Not Clear) < succ>
                                bacterial outside --- Certainty = 0.0000(Not Clear) < succ>
```

[3052] The protein has no significant homology with any sequences in the GENPEPT database.

[3053] No corresponding DNA sequence was identified in S. pyogenes.

[3054] Based on this analysis, it was predicted that this protein and its epitopes, could be useful antigens for vaccines or diagnostics.

### EXAMPLE 508

[3055] A DNA sequence (GBSx0546) was identified in S. agalactiae <SEQ ID 1625> which encodes the amino acid sequence <SEQ ID 1626>. This protein is predicted to be two-component sensor histidine kinase. Analysis of this protein sequence reveals the following:

| Possible site: 45 | | | | |
|---|---|---|---|---|
| >>> Seems to have no N-terminal signal sequence | | | | |
| | INTEGRAL | Likelihood = −13.80 | Transmembrane | 266-282 (257-285) |
| | INTEGRAL | Likelihood = −12.90 | Transmembrane | 29-45 (24-51) |

```
----- Final Results -----
                              bacterial membrane --- Certainty = 0.6519(Affirmative) < succ>
                                bacterial outside --- Certainty = 0.0000(Not Clear) < succ>
                            bacterial cytoplasm --- Certainty = 0.0000(Not Clear) < succ>
```

[3056] A related GBS nucleic acid sequence <SEQ ID 10197> which encodes amino acid sequence <SEQ ID 10198> was also identified.

[3057] The protein has homology with the following sequences in the GENPEPT database:

| >GP: BAB05628 GB: AP001513 two-component sensor histidine kinase | | | |
|---|---|---|---|
| [Bacillus halodurans] | | | |
| Identities = 84/258 (32%), Positives = 138/258 (52%), Gaps = 23/258 (8%) | | | |
| Query: | 298 | SSAINQMVLDMDAISRQEKSSIELDSQDEFQYLSVQINQMVSRLKDLHEKTLDLETQKLL | 357 |
| | | S INQ+ S K+ I +D +DE LSVQ NQMV+ L+ L + + QK L | |
| Sbjct: | 327 | SERINQVA------SGDLKTKIVVDGKDEIGQLSVQFNQMVANLRSLIHQVHETNRQKRL | 380 |
| Query: | 358 | FEK-------RMLEAQFNPHFLYNTLETILITSHYDSQL-TERIVIQLTKLLRYSLSGST | 409 |
| | | EK +ML +Q NPHFL+NTLE+I + SH + ++V QL KL+R SL + | |
| Sbjct: | 381 | LEKSQNEIKLKMLASQINPHFLFNTLESIRMKSHMKGETEIAKVVKQLGKLMRKSLEVTG | 440 |
| Query: | 410 | EAAVLKDDLAIIESYLLINQVRF-EELTYTISVSPELEHMRVPKLFLLPLIENAIKYGLK | 468 |
| | | L+++L ++ YL I R+ + L Y + + P+ E + + L + PL+ENA+ +GL+ | |
| Sbjct: | 441 | HHIPLRNELDMVRCYLEIQTFRYGDRLHYELYIDPQSEMVEILPLIIQPLVENAVIHGLE | 500 |
| Query: | 469 | ERHD-VAINIDIWQDSDGIWFTVSNNGSGISLARQQAIRTMLRSTH----SHHGLINSYR | 523 |
| | | D + I + + + V+++G G+ + +AI+ ML + GL+N ++ | |
| Sbjct: | 501 | RTEDGGTVTISTIVNGNDLTVIVNDDGCGMDEEKLEAIQNMLHHPQEVDGNKIGLLNVHK | 560 |
| Query: | 524 | RLQYQF---STVLLEFTK | 538 |
| | | RLQ + S +++E K | |
| Sbjct: | 561 | RLQLTYGKTSGLIIESAK | 578 |

[3058] A related DNA sequence was identified in S. pyogenes <SEQ ID 1627> which encodes the amino acid sequence <SEQ ID 1628>. Analysis of this protein sequence reveals the following:

| Possible site: 43 | | | | |
|---|---|---|---|---|
| >>> Seems to have no N-terminal signal sequence | | | | |
| | INTEGRAL | Likelihood = −10.88 | Transmembrane | 27-43 (22-49) |
| | INTEGRAL | Likelihood = −9.08 | Transmembrane | 263-279 (258-282) |

```
----- Final Results -----
                              bacterial membrane --- Certainty = 0.5352(Affirmative) < succ>
                                bacterial outside --- Certainty = 0.0000(Not Clear) < succ>
                            bacterial cytoplasm --- Certainty = 0.0000(Not Clear) < succ>
```

[3059] The protein has homology with the following sequences in the databases:

| >GP: BAB05628 GB: AP001513 two-component sensor histidine kinase | | | |
|---|---|---|---|
| [Bacillus halodurans] | | | |
| Identities = 85/270 (31%), Positives = 139/270 (51%), Gaps = 20/270 (7%) | | | |
| Query: | 276 | IFVILQRKSSGLANRIAAKNSRAINQMVRDMSAISRQEKRRIDLESQDEFQYLSDQINQM | 335 |
| | | + V+L S L ++ + S INQ+ S K +I ++ +DE LS Q NQM | |
| Sbjct: | 307 | VAVLLIVHFSWLISKRLSHLSERINQVA------SGDLKTKIVVDGKDEIGQLSVQFNQM | 360 |
| Query: | 336 | VERLQQLHDKTLDLETQKLLFEK-------RMLEAQFNPHFLYNTLETILITSHYDSAL- | 387 |
| | | V L+ L + + QK L EK +ML +Q NPHFL+NTLE+I + SH | |
| Sbjct: | 361 | VANLRSLIHQVHETNRQKRLLEKSQNEIKLKMLASQINPHFLFNTLESIRMKSHMKGETE | 420 |
| Query: | 388 | TEKIVIQLTKLLRYSLTDSSKPVLLKDDLSVIESYLVINQVRF-EELQYSINLSPDLDSL | 446 |
| | | K+V QL KL+R SL + + L+++L ++ YL I R+ + L Y + + P + + | |
| Sbjct: | 421 | IAKVVKQLGKLMRKSLEVTGHHIPLRNELDMVRCYLEIQTFRYGDRLHYELYIDPQSEMV | 480 |
| Query: | 447 | EVPKLFLLPLIENAIKYGLKERHD-VKINIACYYQDDHIIFSVRDNGSGIDAHHQKVIRE | 505 |
| | | E+ L + PL+ENA+ +GL+ D + I+ + + V D+G G+D + I+ | |
| Sbjct: | 481 | EILPLIIQPLVENAVIHGLERTEDGGTVTISTIVNGNDLTVIVNDDGCGMDEEKLEAIQN | 540 |
| Query: | 506 | QL----EAGESHHGLINSYRRLKYHFSEVS | 531 |
| | | L E + GL+N ++RL+ + + S | |
| Sbjct: | 541 | MLHHPQEVDGNKIGLLNVHKRLQLTYGKTS | 570 |

[3060] An alignment of the GAS and GBS proteins is shown below:

| Identities = 369/549 (67%), Positives = 449/549 (81%) | | | |
|---|---|---|---|
| Query: | 3 | MRGYRNEERFKKRLQDDISKHFSRQSLILSLLLIALFVLFSLAPQQIGLYKDVNSVSYSY | 62 |
| | | MRG ++EE FKK+LQDDIS+HFS QSL+LSLLLI LF++FSLAPQQ+GLY+D+N+ + Y | |
| Sbjct: | 1 | MRGEQVEEHFKKQLQDDISRHFSYQSLMLSLLLIGLFIIFSLAPQQLGLYRDINATATRY | 60 |
| Query: | 63 | KQLIQKHDTLLDDLGKNSLKPFVSGHLGSADLSKQYYHLRNHLQSQTELLVFSPNQELLF | 122 |
| | | +LI K + LLDDLGKNSL PF++ +L +ADLSK Y+HLR+ Q+ ELL+FSP+Q+LLF | |
| Sbjct: | 61 | HRLISKQEALLDDLGKNSLLPFLNKNLSTADLSKHYFHLRHSSQTSPELLLFSPSQDLLF | 120 |
| Query: | 123 | ASNSHLGNFFSKSIYISEVLDKAKINQRLLKIIVDSEGGHYLALIKPIIVNKKVSGYAFL | 182 |
| | | ASM HLGN FSKS+YI EVL + L K +DSE GHYL +I P+I ++ GYAFL | |
| Sbjct: | 121 | ASNPHLGNVFSKSVYIQEVLRATHSPKTLFKDAMDSEDGHYLMIIMPMIDQNQLKGYAFL | 180 |
| Query: | 183 | LMNGKDFLLPTKAINSDLIIADQLNNSFTFTNRDFISSSLDKVDSQFLTRYFSFHDHRAF | 242 |
| | | +M+GKDFL PTK + S+L+IAD+L+N+FTF+NR+FI+SSLDK++SQ+L YF F D+RAF | |
| Sbjct: | 181 | VMSGKDFLHPTKTLTSELVIADKLDNTFTFSNRSFIASSLDKINSQYLHHYFVFQDNRAF | 240 |
| Query: | 243 | VVRKVALQDNILLYMYRPLIPVTLVVLFSLVSSVIIFVILRQKSRVLADRIAVKNSSAIN | 302 |
| | | + RKVALQ + LYMYRPLIP+ V+LFSL+SS +IFVIL++KS LA+RIA KNS AIN | |
| Sbjct: | 241 | ITRKVALQGGLWLYMYRPLIPMVSVMLFSLISSAVIFVILQRKSSGLANRIAAKNSRAIN | 300 |
| Query: | 303 | QMVLDMDAISRQEKSSIELDSQDEFQYLSVQINQMVSRLKDLHEKTLDLETQKLLFEKRM | 362 |
| | | QMV DM AISRQEK I+L+SQDEFQYLS QINQMV RL+ LH+KTLDLETQKLLFEKRM | |
| Sbjct: | 301 | QMVRDMSAISRQEKRRIDLESQDEFQYLSDQINQMVERLQQLHDKTLDLETQKLLFEKRM | 360 |
| Query: | 363 | LEAQFNPHFLYNTLETILITSHYDSQLTERIVIQLTKLLRYSLSGSTEAAVLKDDLAIIE | 422 |
| | | LEAQFNPHFLYNTLETILITSHYDS LTE+IVIQLTKLLRYSL+ S++ +LKDDL++IE | |
| Sbjct: | 361 | LEAQFNPHFLYNTLETILITSHYDSALTEKIVIQLTKLLRYSLTDSSKPVLLKDDLSVIE | 420 |
| Query: | 423 | SYLLINQVRFEELTYTISVSPELEHMRVPKLFLLPLIENAIKYGLKERHDVAINIDIWQD | 482 |
| | | SYL+INQVRFEEL Y+I++SF+L+ + VPKLFLLPLIENAIKYGLKERHDV INI + | |
| Sbjct: | 421 | SYLVINQVRFEELQYSINLSPDLDSLEVPKLFLLPLIENAIKYGLKERHDVKINIACYYQ | 480 |
| Query: | 483 | SDGIWFTVSNNGSGISLARQQAIRTMLRSTHSHHGLINSYRRLQYQFSTVLLEFTKTDDA | 542 |
| | | D I F+V +NGSGI Q+ IR L + SHHGLINSYRRL+Y FS V L F + D | |
| Sbjct: | 481 | DDHIIFSVRDNGSGIDAHHQKVIREQLEAGESHHGLINSYRRLKYHFSEVSLVFDQGDKQ | 540 |
| Query: | 543 | FRVSYIVKE | 551 |
| | | F VSY VKE | |
| Sbjct: | 541 | FNVSYHVKE | 549 |

[3061] A related GBS gene <SEQ ID 8587> and protein <SEQ ID 8588> were also identified. Analysis of this protein sequence reveals the following:

```
Lipop: Possible site: −1 Crend: 10
McG: Discrim Score: 6.23
GvH: Signal Score (−7.5): −0.0500002
Possible site: 38
>>> Seems to have a cleavable N-term signal seq.
ALOM program count: 1 value: −13.80 threshold: 0.0
INTEGRAL Likelihood − −13.80 Transmernbrane 259-275 ( 250-278)
PERIPHERAL Likelihood − 2.70 404
modified ALOM score: 3.26
*** Reasoning Step: 3
----- Final Results -----
                            bacterial membrane --- Certainty = 0.6519(Affirmative) < succ>
                              bacterial outside --- Certainty = 0.0000(Not Clear) < succ>
                          bacterial cytoplasm --- Certainty = 0.0000(Not Clear) < succ>
```

[3062] The protein has homology with the following sequences in the databases:

[chemical structure]

[3063] SEQ ID 8588 (GBS47) was expressed in E. coli as a GST-fusion product. SDS-PAGE analysis of total cell extract is shown in FIG. 14 (lane 2; MW 84 kDa). It was also expressed in E. coli as a His-fusion product. SDS-PAGE analysis of total cell extract is shown in FIG. 85 (lane 4; MW 59.3 kDa).

[3064] GBS47-His was purified as shown in FIG. 221, lane 4-5.

[3065] Based on this analysis, it was predicted that these proteins and their epitopes could be useful antigens for vaccines or diagnostics.

### EXAMPLE 509

[3066] A DNA sequence (GBSx0547) was identified in S. agalactiae <SEQ ID 1629> which encodes the amino acid sequence <SEQ ID 1630>. This protein is predicted to be phosphotransferase enzyme II, D component. Analysis of this protein sequence reveals the following:

```
Possible site: 32
>>> Seems to have no N-terminal signal sequence
INTEGRAL Likelihood = −10.46 Transmembrane 258-274 ( 252-274)
INTEGRAL Likelihood = −9.13 Transmembrane 232-248 ( 227-251)
INTEGRAL Likelihood = −5.31 Transmembrane 142-158 ( 140-161)
INTEGRAL Likelihood = −2.50 Transmembrane 119-135 ( 118-139)
----- Final Results -----
                            bacterial membrane --- Certainty = 0.5182(Affirmative) < succ>
                              bacterial outside --- Certainty = 0.0000(Not Clear) < succ>
                          bacterial cytoplasm --- Certainty = 0.0000(Not Clear) < succ>
```

[3067] The protein has homology with the following sequences in the GENPEPT database:

>GP:AAC74889 GB:AE000276 PTS en yme IID, mannoses--pecific
[Escherichia coli K12]
Identities = 94/280 (33%), Positives = 156/280 (55%), Gaps = 13/280 (4%)

| | | | |
|---|---|---|---|
| Query: | 3 | SQDNLTKEDRKHLRSVFWRSWTMNASRTGATQYHAVGVIYTLLPVINRFYKTDKD-KAEA | 61 |
| | | ++ LT+ D +R VF RS S + A+G ++++P I R Y + + + +A | |
| Sbjct: | 12 | TEKKLTQSD---IRGVFLRSNLFQGS-WNFERMQALGFCFSMVPAIRRLYPENNEARKQA | 67 |
| Query: | 62 | LVRHTTWFNATMHINNFIMGLVASMEKKNSEDPDFDASAITAVKASLMGPISGVGDSFFW | 121 |
| | | + RH +FN + I+G+ ++E++ + + D AI +K LMGP++GVGD FW | |
| Sbjct: | 68 | IRRHLEFFNTQPFVAAPILGVTLALEEQRANGAEIDDGAINGIKVGLMGPLAGVGDPIFW | 127 |
| Query: | 122 | GILRVIAAGIGISLASTGSAMGAVVFLLLYNIPAFLIHYYSLYGGYSVGAGFIKKLYESG | 181 |
| | | G +R + A +G +A +GS +G ++F +L+N+ YY + GYS G +K + G | |
| Sbjct: | 128 | GTVRPVFAALGAGIAMSGSLLGPLLFFILFNLVRLATRYYGVAYGYSKGIDIVKDM-GGG | 186 |
| Query: | 182 | GIKIVTKTSSMLGLMNVGSM----TASNVKFKTILTVAAKGAKEAASIQSYLDQLFVGVV | 237 |
| | | ++ +T+ +S+LGL ++G++ T N+ G + ++Q+ LDQL G+V | |
| Sbjct: | 187 | FLQKLTEGASILGLFVMGALVNKWTHVNIPLVVSRITDQTGKEHVTTVQTILDQLMPGLV | 246 |
| Query: | 238 | PLLVTILAFWLLRKRVNINWIMFGIMVLGI---VLGLLGI | 274 |
| | | PLL+T WLLRKKVN WI+ G V+GI GLLG+ | |
| Sbjct: | 247 | PLLLTFACMWLLRKKVNPLWIIVGFFVIGIAGYACGLLGL | 286 |

[3068] A related DNA sequence was identified in S. pyogenes <SEQ ID 1631> which encodes the amino acid sequence <SEQ ID 1632>. Analysis of this protein sequence reveals the following:

| Possible site: 32 | | | | |
|---|---|---|---|---|
| >>> Seems to have no N-terminal signal sequence | | | | |
| | INTEGRAL | Likelihood = −9.98 | Transmembrane | 255-271 (251-274) |
| | INTEGRAL | Likelihood = −7.01 | Transmembrane | 232-248 (228-250) |
| | INTEGRAL | Likelihood = −5.68 | Transmembrane | 142-158 (140-161) |
| | INTEGRAL | Likelihood = −2.50 | Transmembrane | 119-135 (118-139) |

```
----- Final Results -----
                              bacterial membrane --- Certainty = 0.4991(Affirmative) < succ>
                                bacterial outside --- Certainty = 0.0000(Not Clear) < succ>
                            bacterial cytoplasm --- Certainty = 0.0000(Not Clear) < succ>
```

[3069] The protein has homology with the following sequences in the databases:

| >GP: AAC74889 GB: AE000276 PTS enzyme IID, mannose-specific | | | |
|---|---|---|---|
| [Escherichia coli] | | | |
| Identities = 94/281 (33%), Positives = 157/281 (55%), Gaps = 13/281 (4%) | | | |
| Query: | 2 | TSQDNLTKEDRKMLRSVFWRSWTMNASRTGATQYHAVGVIYTLLPVINRFYKTDKD-KAE | 60 |
| | | T++ LT+ D +R VF RS S + A+G ++++P I R Y + + + + | |
| Sbjct: | 11 | TTEKKLTQSD---IRGVFLRSNLFQGS-WNFERMQALGFCFSMVPAIRRLYPENNEARKQ | 66 |
| Query: | 61 | ALVRHTTWFNATMHINNFIMGLVASMEKKNSEDPDFDASAITAVKASLMGPISGVGDSFF | 120 |
| | | A+ RH +FN + I+G+ ++E++ + + D AI +K LMGP++GVGD F | |
| Sbjct: | 67 | AIRRHLEFFNTQPFVAAPILGVTLALEEQRANGAEIDDGAINGIKVGLMGPLAGVGDPIF | 126 |
| Query: | 121 | WGILRVIAAGIGISLASAGSAMGAVVFLLLYNIPAFIIHYYSLYGGYSVGAGFIKKLYES | 180 |
| | | WG +R + A +G +A +GS +G ++F +L+N+ YY + GYS G +K + | |
| Sbjct: | 127 | WGTVRPVFAALGAGIAMSGSLLGPLLFFILFNLVRLATRYYGVAYGYSKGIDIVKDM-GG | 185 |
| Query: | 181 | GGIKIVTKTSSMLGLMMVGSM----TASNVKFKTILTVAAKGAKEAASIQDYLDQLFIGI | 236 |
| | | G ++ +T+ +S+LGL ++G++ T N+ G + ++Q LDQL G+ | |
| Sbjct: | 186 | GFLQKLTEGASILGLFVMGALVNKWTHVNIPLVVSRITDQTGKEHVTTVQTILDQLMPGL | 245 |
| Query: | 237 | VPLMVTLAAFWLLRKKVNIIWIMFGIMFLGI---ILGLLGI | 274 |
| | | VPL++T A WLLRKKVN +WI+ G +GI GLLG+ | |
| Sbjct: | 246 | VPLLLTFACMWLLRKKVNPLWIIVGFFVIGIAGYACGLLGL | 286 |

[3070] An alignment of the GAS and GBS proteins is shown below:

| Identities = 263/275 (95%), Positives = 269/275 (97%) | | | |
|---|---|---|---|
| Query: | 1 | MKSQDNLTKEDRKMLRSVFWRSWTMNASRTGATQYHAVGVIYTLLPVINRFYKTDKDKAE | 60 |
| | | M SQDNLTKEDRKMLRSVFWRSWTMNASRTGATQYHAVGVIYTLLPVINRFYKTDKDKAE | |
| Sbjct: | 1 | MTSQDNLTKEDRKMLRSVFWRSWTMNASRTGATQYHAVGVIYTLLPVINRFYKTDKDKAE | 60 |
| Query: | 61 | ALVRHTTWFNATMHINNFIMGLVASMEKKNSEDPDFDASAITAVKASLMGPISGVGDSFF | 120 |
| | | ALVRHTTWFNATMHINNFIMGLVASMEKKNSEDPDFDASAITAVKASLMGPISGVGDSFF | |
| Sbjct: | 61 | ALVRHTTWFNATMHINNFIMGLVASMEKKNSEDPDFDASAITAVKASLMGPISGVGDSFF | 120 |
| Query: | 121 | WGILRVIAAGIGISLASTGSAMGAVVFLLLYNIPAFLIHYYSLYGGYSVGAGFIKKLYES | 180 |
| | | WGILRVIAAGIGISLAS GSAMGAVVFLLLYNIPAF+IHYYSLYGGYSVGAGFIKKLYES | |
| Sbjct: | 121 | WGILRVIAAGIGISLASAGSAMGAVVFLLLYNIPAFIIHYYSLYGGYSVGAGFIKKLYES | 180 |
| Query: | 181 | GGIKIVTKTSSMLGLMMVGSMTASNVKFKTILTVAAKGAKEAASIQSYLDQLFVGVVPLL | 240 |
| | | GGIKIVTKTSSMLGLMMVGSMTASNVKFKTILTVAAKGAKEAASIQ YLDQLF+G+VPL+ | |
| Sbjct: | 181 | GGIKIVTKTSSMLGLMMVGSMTASNVKFKTILTVAAKGAKEAASIQDYLDQLFIGIVPLM | 240 |
| Query: | 241 | VTILAFWLLRKKVNINWIMFGIMVLGIVLGLLGIC | 275 |
| | | VT+ AFWLLRKKVNI WIMFGIM LGI+LGLLGIC | |
| Sbjct: | 241 | VTLAAFWLLRKKVNIIWIMFGIMFLGIILGLLGIC | 275 |

[3071] There is also homology to SEQ ID 5236.

[3072] A further related DNA sequence was identified in S. pyogenes <SEQ ID 9077> which encodes the amino acid sequence <SEQ ID 9078>. An alignment of the GAS and GBS sequences follows:

| Score = 178 bits (448), Expect = 3e−47 | | | |
|---|---|---|---|
| Identities = 83/136 (61%), Positives = 108/136 (79%) | | | |
| Query: | 2 | IMEEITIYHNPNCGTSRNVLAMIRHAGIEPTIIEYLQTPPNRETLIELLQSMGISARELL | 61 |
| | | +ME+I IYHNPNCGTSRNVLA+IRH GIEP II YL+TPP+R L+ELL M +SARELL | |
| Sbjct: | 1 | MMEKIRIYHNPNCGTSRNVLAIIRHCGIEPEIIYYLKTPPSRMELVELLLEMKLSARELL | 60 |
| Query: | 62 | RTNVPEFEAYGLANQAVAEKDIINAMLADPILINRPIVVTRKGVKLCRPSETLLDILPVP | 121 |
| | | RT+VP +E + L + +V ++++I+AM+ DPILINRPIVVT KG KLCRP E +L ILPV | |
| Sbjct: | 61 | RTDVPAYEKFNLESSSVTDEEMIDAMIQDPILINRPIVVTSKGAKLCRPCEAILTILPVK | 120 |
| Query: | 122 | LPSPYIKEDGESVNPI | 137 |
| | | + ++KEDG+ + + | |
| Sbjct: | 121 | MEKDFVKEDGQIIQSL | 136 |

[3073] Based on this analysis, it was predicted that these proteins and their epitopes could be useful antigens for vaccines or diagnostics.

### EXAMPLE 510

[3074] A DNA sequence (GBSx0548) was identified in S. agalactiae <SEQ ID 1633> which encodes the amino acid sequence <SEQ ID 1634>. This protein is predicted to be PTS permease for mannose subunit IIPMan. Analysis of this protein sequence reveals the following:

| Possible site: 56 | | | | |
|---|---|---|---|---|
| >>> Seems to have an uncleavable N-term signal seq | | | | |
| | INTEGRAL | Likelihood = −8.70 | Transmembrane | 144-160 (140-165) |
| | INTEGRAL | Likelihood = −8.07 | Transmembrane | 220-236 (215-239) |
| | INTEGRAL | Likelihood = −7.27 | Transmembrane | 95-111 (91-116) |
| | INTEGRAL | Likelihood = −3.77 | Transmembrane | 2-18 (1-18) |
| | INTEGRAL | Likelihood = −1.44 | Transmembrane | 180-196 (179-196) |
| | INTEGRAL | Likelihood = −1.33 | Transmembrane | 32-48 (30-49) |
| | INTEGRAL | Likelihood = −0.53 | Transmembrane | 198-214 (198-214) |

```
----- Final Results -----
                              bacterial membrane --- Certainty = 0.4482(Affirmative) < succ>
                                bacterial outside --- Certainty = 0.0000(Not Clear) < succ>
                            bacterial cytoplasm --- Certainty = 0.0000(Not Clear) < succ>
```

[3075] The protein has homology with the following sequences in the GENPEPT database:

| >GP: AAC44680 GB: U65015 PTS permease for mannose subunit IIPMan | | | |
|---|---|---|---|
| [Vibrio furnissii] | | | |
| Identities = 70/251 (27%), Positives = 132/251 (51%), Gaps = 6/251 (2%) | | | |
| Query: | 2 | IMPATMAALAVLICFGGNYLTGQSMMERPLVVGLVTGMLLGDIKVGILMGASLEALFLGN | 61 |
| | | + A M L + G + G + RP+V+G + G++LGD+ GIL+G +LE +++G | |
| Sbjct: | 5 | LFQALMLGLLAFLA-GLDLFNGLTHFHRPVVLGPLVGLILGDLHTGILVGGTLELIWMGL | 63 |
| Query: | 62 | VNIGGVIAAEPVTATAMATTFTIISNIDQKAAMTLAVPIGMLAAFVVMFLKNVFMNIFAP | 121 |
| | | + G + T + TTF I +N++ A+ +AVP + + L + + + | |
| Sbjct: | 64 | APLAGAQPPNVIIGTIVGTTFAITTNVEPNVAVGVAVPFAVAVQMGITLLFSAMSAVMSK | 123 |
| Query: | 122 | MVDKAAAANHQGKLVMLHYGTWII--YYLIIASISFIGILVGSGPVNSFVHHIPQNLMNG | 179 |
| | | + A A+ +G + ++ ++ +Y + A F+ I +G+ + V +P+ L++G | |
| Sbjct: | 124 | CDEYAKNADTRGIERVNYFALAVLGSFYFLCA---FLPIYLGADHAGAMVAALPKALIDG | 180 |
| Query: | 180 | LSAAGGLLPAVGFAMLMKLLWTNKLAVFYLLGFVLTAYLKLPAVAVAALGAVICVISSQR | 239 |
| | | L AGG++PA+GFA+LMK++ N +++LGFV A+L+LP +A+ + +I R | |
| Sbjct: | 181 | LGVAGGIMPAIGFAVLMKIMMKNAYIPYFILGFVAAAWLQLPILAIRCAATAMAIIDFMR | 240 |
| Query: | 240 | DIELDAITRGA | 250 |
| | | E + A | |
| Sbjct: | 241 | KSEPTPVNASA | 251 |

[3076] A related DNA sequence was identified in S. pyogenes <SEQ ID 1635> which encodes the amino acid sequence <SEQ ID 1636>. Analysis of this protein sequence reveals the following:

| Possible site: 56 | | | | |
|---|---|---|---|---|
| >>> Seems to have an uncleavable N-term signal seq | | | | |
| | INTEGRAL | Likelihood = −8.70 | Transmembrane | 144-160 (140-165) |
| | INTEGRAL | Likelihood = −8.07 | Transmembrane | 220-236 (215-239) |
| | INTEGRAL | Likelihood = −7.27 | Transmembrane | 95-111 (91-116) |
| | INTEGRAL | Likelihood = −4.62 | Transmembrane | 2-18 (1-19) |
| | INTEGRAL | Likelihood = −1.44 | Transmembrane | 180-196 (179-196) |
| | INTEGRAL | Likelihood = −0.96 | Transmembrane | 32-48 (31-49) |
| | INTEGRAL | Likelihood = −0.53 | Transmembrane | 198-214 (198-214) |

```
----- Final Results -----
                              bacterial membrane --- Certainty = 0.4482(Affirmative) < succ>
                                bacterial outside --- Certainty = 0.0000(Not Clear) < succ>
                            bacterial cytoplasm --- Certainty = 0.0000(Not Clear) < succ>
```

[3077] The protein has homology with the following sequences in the databases:

| >GP: AAC44680 GB: U65015 PTS permease for mannose subunit IIPMan | | | |
|---|---|---|---|
| [Vibrio furnissii] | | | |
| Identities = 72/251 (28%), Positives = 132/251 (51%), Gaps = 6/251 (2%) | | | |
| Query: | 2 | LVPATMAALAVLICFGGNYLTGQSMMERPLVVGLVTGLLLGDMKVGILMGASLEALFLGN | 61 |
| | | L A M L + G + G + RP+V+G + GL+LGD+ GIL+G +LE +++G | |
| Sbjct: | 5 | LFQALMLGLLAFLA-GLDLFNGLTHFHRPVVLGPLVGLILGDLHTGILVGGTLELIWMGL | 63 |
| Query: | 62 | VNIGGVIAAEPVTATAMATTFTIISHIDQKAAMTLAVPIGMLAAFVVMFLKNVFMNIFAP | 121 |
| | | + G + T + TTF I ++++ A+ +AVP + + L + + + | |
| Sbjct: | 64 | APLAGAQPPNVIIGTIVGTTFAITTNVEPNVAVGVAVPFAVAVQMGITLLFSAMSAVMSK | 123 |
| Query: | 122 | MVDKAAAANHQGKLVMLHYGTWII--YYLIIASISFIGILVGSGPVNAFVEHIPQNLMNG | 179 |
| | | + A A+ +G + ++ ++ +Y + A F+ I +G+ A V +P+ L++G | |
| Sbjct: | 124 | CDEYAKNADTRGIERVNYFALAVLGSFYFLCA---FLPIYLGADHAGAMVAALPKALIDG | 180 |
| Query: | 180 | LSAAGGLLPAVGFAMLMKLLWTNKLAVFYLLGFVLTAYLKLPAVAVAALGAVICVISSQR | 239 |
| | | L AGG++PA+GFA+LMK++ N +++LGFV A+L+LP +A+ + +I R | |
| Sbjct: | 181 | LGVAGGIMPAIGFAVLMKIMMKNAYIPYFILGFVAAAWLQLPILAIRCAATAMAIIDFMR | 240 |
| Query: | 240 | DLELDAITRGA | 250 |
| | | E + A | |
| Sbjct: | 241 | KSEPTPVNASA | 251 |

[3078] An alignment of the GAS and GBS proteins is shown below:

| Identities = 261/269 (97%), Positives = 268/269 (99%) | | | |
|---|---|---|---|
| Query: | 1 | MIMPATMAALAVLICFGGNYLTGQSMMERPLVVGLVTGMLLGDIKVGILMGASLEALFLG | 60 |
| | | M++PATMAALAVLICFGGNYLTGQSMMERPLVVGLVTG+LLGD+KVGILMGASLEALFLG | |
| Sbjct: | 1 | MLVPATMAALAVLICFGGNYLTGQSMMERPLVVGLVTGLLLGDMKVGILMGASLEALFLG | 60 |
| Query: | 61 | NVNIGGVIAAEPVTATAMATTFTIISNIDQKAAMTLAVPIGMLAAFVVMFLKNVFMNIFA | 120 |
| | | NVNIGGVIAAEPVTATAMATTFTIIS+IDQKAAMTLAVPIGMLAAFVVMFLKNVFMNIFA | |
| Sbjct: | 61 | NVNIGGVIAAEPVTATAMATTFTIISHIDQKAAMTLAVPIGMLAAFVVMFLKNVFMNIFA | 120 |
| Query: | 121 | PMVDKAAAANHQGKLVMLHYGTWIIYYLIIASISFIGILVGSGPVNSFVHHIPQNLMNGL | 180 |
| | | PMVDKAAAANHQGKLVMLHYGTWIIYYLIIASISFIGILVGSGPVN+FV HIPQNLMNGL | |
| Sbjct: | 121 | PMVDKAAAANHQGKLVMLHYGTWIIYYLIIASISFIGILVGSGPVNAFVEHIPQNLMNGL | 180 |
| Query: | 181 | SAAGGLLPAVGFAMLMKLLWTNKLAVFYLLGFVLTAYLKLPAVAVAALGAVICVISSQRD | 240 |
| | | SAAGGLLPAVGFAMLMKLLWTNKLAVFYLLGFVLTAYLKLPAVAVAALGAVICVISSQRD | |
| Sbjct: | 181 | SAAGGLLPAVGFAMLMKLLWTNKLAVFYLLGFVLTAYLKLPAVAVAALGAVICVISSQRD | 240 |
| Query: | 241 | IELDAITRGAISKQTTFDSKESEEEDFFA | 269 |
| | | +ELDAITRGAISKQTTFDSKESEEEDFFA | |
| Sbjct: | 241 | LELDAITRGAISKQTTFDSKESEEEDFFA | 269 |

[3079] Based on this analysis, it was predicted that these proteins and their epitopes could be useful antigens for vaccines or diagnostics.

### EXAMPLE 511

[3080] A DNA sequence (GBSx0549) was identified in S. agalactiae <SEQ ID 1637> which encodes the amino acid sequence <SEQ ID 1638>. This protein is predicted to be pts system, sorbose-specific iib component. Analysis of this protein sequence reveals the following:

```
Possible site: 36
>>> Seems to have no N-terminal signal sequence
----- Final Results -----
                            bacterial cytoplasm --- Certainty = 0.1874(Affirmative) < succ>
                              bacterial membrane --- Certainty = 0.0000(Not Clear) < succ>
                                bacterial outside --- Certainty = 0.0000(Not Clear) < succ>
```

[3081] The protein has homology with the following sequences in the GENPEPT database:

| >GP: CAA46858 GB: X66059 EIII-B Sor PTS [Klebsiella pneumoniae] | | | |
|---|---|---|---|
| Identities = 49/158 (31%), Positives = 94/158 (59%), Gaps = 8/158 (5%) | | | |
| Query: | 2 | ITQIRVDDRLIHGQVAVVWTKELNAPLLVVANDEAAKNEITQMTLKMAVPNGMKLLIRSV | 61 |
| | | IT R+DDRLIHGQV VW+K NA +++ ND+ +E+ + L+ A P GMK+ + S+ | |
| Sbjct: | 3 | ITLARIDDRLIHGQVTTVWSKVANAQRIIICNDDVFNDEVRRTLLRQAAPPGMKVNVVSL | 62 |
| Query: | 62 | EESIALFKDPRATDKRIFVIVNSVKDACTIAKNITDLEAVNVANVGRFDKSDPATKVKLT | 121 |
| | | E+++A++ +P+ D+ +F + + D T+ + + +N+ + + K +LT | |
| Sbjct: | 63 | EKAVAVYHNPQYQDETVFYLFTNPHDVLTMVRQGVQIATLNIGGM-----AWRPGKKQLT | 117 |
| Query: | 122 | SSLLLNTEELEAAKELASL-PDLDVFNQVLPSNTKVNL | 158 |
| | | ++ L+ ++++A +EL L LD+ +V+ S+ VN+ | |
| Sbjct: | 118 | KAVSLDPQDIQAFRELDKLGVKLDL--RVVASDPSVNI | 153 |

[3082] A related DNA sequence was identified in S. pyogenes <SEQ ID 1639> which encodes the amino acid sequence <SEQ ID 1640>. Analysis of this protein sequence reveals the following:

```
Possible site: 36
>>> Seems to have no N-terminal signal sequence
----- Final Results -----
                            bacterial cytoplasm --- Certainty = 0.1874(Affirmative) < succ>
                              bacterial membrane --- Certainty = 0.0000(Not Clear) < succ>
                                bacterial outside --- Certainty = 0.0000(Not Clear) < succ>
```

[3083] An alignment of the GAS and GBS proteins is shown below:

| Identities = 145/162 (89%), Positives = 152/162 (93%) | | | |
|---|---|---|---|
| Query: | 1 | MITQIRVDDRLIHGQVAVVWTKELNAPLLVVANDEAAKNEITQMTLKMAVPNGMKLLIRS | 60 |
| | | MITQIRVDDRLIHGQVAVVWTKELNAPLLVVANDEAAKNEITQMTLKMAVPNGMKLLIRS | |
| Sbjct: | 1 | MITQIRVDDRLIHGQVAVVWTKELNAPLLVVANDEAAKNEITQMTLKMAVPNGMKLLIRS | 60 |
| Query: | 61 | VEESIALFKDPRATDKRIFVIVNSVKDACTIAKNITDLEAVNVANVGRFDKSDPATKVKL | 120 |
| | | VE+SI LF DPRA DKRIFVIVNSVKDAC IAK + DLEAVNVANVGRFDKSDPA+KVK+ | |
| Sbjct: | 61 | VEDSIKLFNDPRAKDKRIFVIVNSVKDACAIAKEVPDLEAVNVANVGRFDKSDPASKVKV | 120 |
| Query: | 121 | TSSLLLNTEELEAAKELASLPDLDVFNQVLPSNTKVNLSQLV | 162 |
| | | T SLLLN EE+ AAKEL SLP+LDVFNQVLPSNTKV+LSQLV | |
| Sbjct: | 121 | TPSLLLNPEEMAAAKELVSLPELDVFNQVLPSNTKVHLSQLV | 162 |

[3084] Based on this analysis, it was predicted that these proteins and their epitopes could be useful antigens for vaccines or diagnostics.

### EXAMPLE 512

[3085] A DNA sequence (GBSx0550) was identified in S. agalactiae <SEQ ID 1641> which encodes the amino acid sequence <SEQ ID 1642>. Analysis of this protein sequence reveals the following:

| Possible site: 46 | | | | |
|---|---|---|---|---|
| >>> Seems to have no N-terminal signal sequence | | | | |
| | INTEGRAL | Likelihood = −1.22 | Transmembrane | 87-103 (87-104) |

```
----- Final Results -----
                              bacterial membrane --- Certainty = 0.1489(Affirmative) < succ>
                                bacterial outside --- Certainty = 0.0000(Not Clear) < succ>
                            bacterial cytoplasm --- Certainty = 0.0000(Not Clear) < succ>
```

[3086] The protein has no significant homology with any sequences in the GENPEPT database.

[3087] A related DNA sequence was identified in S. pyogenes <SEQ ID 1643> which encodes the amino acid sequence <SEQ ID 1644>. Analysis of this protein sequence reveals the following:

| Possible site: 33 | | | | |
|---|---|---|---|---|
| >>> Seems to have no N-terminal signal sequence | | | | |
| | INTEGRAL | Likelihood = −1.44 | Transmembrane | 87-103 (87-104) |

```
----- Final Results -----
                              bacterial membrane --- Certainty = 0.1574(Affirmative) < succ>
                                bacterial outside --- Certainty = 0.0000(Not Clear) < succ>
                            bacterial cytoplasm --- Certainty = 0.0000(Not Clear) < succ>
```

[3088] The protein has no significant homology with any sequences in the GENPEPT database.

[3089] An alignment of the GAS and GBS proteins is shown below:

| Identities = 115/141 (81%), Positives = 125/141 (88%) | | | |
|---|---|---|---|
| Query: | 1 | MKRKFLIGSHGKLASGLQSSIDILTGKGQEIQTIDAYIDDSDYTKSIVEFIDEIAPDEQG | 60 |
| | | MKRKFLIGSHG+LASGLQSSIDIL G GQ ++TIDAY+DDSDYT I +FI +A DEQG | |
| Sbjct: | 1 | MKRKFLIGSHGRLASGLQSSIDILAGMGQALETIDAYVDDSDYTSQIDDFIAGVAADEQG | 60 |
| Query: | 61 | LIFTDLLGGSVNQKMATAVMNSGKNNIFLITNSNLATLLSLLFLKPEEELTKEEIVTVIN | 120 |
| | | LIFTDLLGGSVNQKM TAVMNSGK+NIFLITNSNLATLLSL+FLKP E LTK+EIVTVIN | |
| Sbjct: | 61 | LIFTDLLGGSVNQKMVTAVMNSGKDNIFLITNSNLATLLSLVFLKPGEALTKDEIVTVIN | 120 |
| Query: | 121 | ESQVQLVDLSFKAGSEDDFFD | 141 |
| | | ESQVQLVDL + SEDDFFD | |
| Sbjct: | 121 | ESQVQLVDLVPETNSEDDFFD | 141 |

[3090] Based on this analysis, it was predicted that these proteins and their epitopes could be useful antigens for vaccines or diagnostics.

### EXAMPLE 513

[3091] A DNA sequence (GBSx0551) was identified in S. agalactiae <SEQ ID 1645> which encodes the amino acid sequence <SEQ ID 1646>. Analysis of this protein sequence reveals the following:

```
Possible site: 25
>>> Seems to have no N-terminal signal sequence
----- Final Results -----
                            bacterial cytoplasm --- Certainty = 0.2469(Affirmative) < succ>
                              bacterial membrane --- Certainty = 0.0000(Not Clear) < succ>
                                bacterial outside --- Certainty = 0.0000(Not Clear) < succ>
```

[3092] The protein has no significant homology with any sequences in the GENPEPT database.

[3093] No corresponding DNA sequence was identified in S. pyogenes.

[3094] Based on this analysis, it was predicted that this protein and its epitopes, could be useful antigens for vaccines or diagnostics.

### EXAMPLE 514

[3095] A DNA sequence (GBSx0552) was identified in S. agalactiae <SEQ ID 1647> which encodes the amino acid sequence <SEQ ID 1648>. This protein is predicted to be racemase. Analysis of this protein sequence reveals the following:

| Possible site: 41 | | | | |
|---|---|---|---|---|
| >>> Seems to have no N-terminal signal sequence | | | | |
| | INTEGRAL | Likelihood = −8.65 | Transmembrane | 319-335 (316-339) |
| | INTEGRAL | Likelihood = −6.10 | Transmembrane | 18-34 (17-37) |
| | INTEGRAL | Likelihood = −5.68 | Transmembrane | 230-246 (227-248) |
| | INTEGRAL | Likelihood = −3.98 | Transmembrane | 254-270 (254-271) |
| | INTEGRAL | Likelihood = −3.56 | Transmembrane | 110-126 (110-129) |
| | INTEGRAL | Likelihood = −3.19 | Transmembrane | 161-177 (156-177) |
| | INTEGRAL | Likelihood = −1.97 | Transmembrane | 132-148 (132-153) |
| | INTEGRAL | Likelihood = −1.33 | Transmembrane | 286-302 (286-302) |
| | INTEGRAL | Likelihood = −0.59 | Transmembrane | 53-69 (52-69) |

```
----- Final Results -----
                              bacterial membrane --- Certainty = 0.4461(Affirmative) < succ>
                                bacterial outside --- Certainty = 0.0000(Not Clear) < succ>
                            bacterial cytoplasm --- Certainty = 0.0000(Not Clear) < succ>
```

[3096] The protein has homology with the following sequences in the GENPEPT database:

| >GP: AAF71283 GB: AF253562 racemase [Enterococcus faecalis] | | | |
|---|---|---|---|
| Identities = 78/262 (29%), Positives = 129/262 (48%), Gaps = 29/262 (11%) | | | |
| Query: | 13 | KQHNTSMISLLQYLFSILVILVHSGRLFS-QDVIHFTFKSFLGRMAVPYFLICTAFFLRG | 71 |
| | | K + S I +++ ++L++ +H+ LFS + +F F + +AVP+F + + FFL | |
| Sbjct: | 3 | KNESYSGIDYFRFIAALLIVAIHTSPLFSFSETGNFIFTRIVAPVAVPFFFMTSGFFL-- | 60 |
| Query: | 72 | RIQQGLCNHSYFRKLIKK----YSMWTIIYLPY----GYFFFESLNIAKIYLLPGFIVAF | 123 |
| | | I + CN IKK Y + ++Y+P GYF ++L LP I | |
| Sbjct: | 61 | -ISRYTCNAEKLGAFIKKTTLIYGVAILLYIPINVYNGYFKMDNL-------LPNIIKDI | 112 |
| Query: | 124 | LYLGMSHTLWYIPAVILGWVIIQGLLKYVGTRGTFITVVVLYCIGAV-ETYSVFIQSTKF | 182 |
| | | ++ G + LWY+PA I+G I L+K V R F+ +LY IG ++Y ++S | |
| Sbjct: | 113 | VFDGTLYHLWYLPASIIGAAIAWYLVKKVHYRKAFLIASILYIIGLFGDSYYGIVKSVSC | 172 |
| Query: | 183 | YPLMSTYMSIFQT---TRNGLFYTPVYLLAGYLLYDYFNTDLFTKSRGLK-YILFLLLLA | 238 |
| | | L Y IFQ TRNG+F+ P++ + G + D + + + K ++ Y LF L+ | |
| Sbjct: | 173 | --LNVFYNLIFQLTDYTRNGIFFAFIFFVLGGYISD--SPNRYRKKNYIRIYSLFCLMFG | 228 |
| Query: | 239 | LENVLIYFN-QGLDKNFFLLAP | 259 |
| | | L +F+ Q D + LL P | |
| Sbjct: | 229 | KTLTLQHFDIQKHDSMYVLLLP | 250 |

[3097] No corresponding DNA sequence was identified in S. pyogenes.

[3098] A related GBS gene <SEQ ID 8589> and protein <SEQ ID 8590> were also identified. Analysis of this protein sequence reveals the following:

| Lipop: Possible site: −1 Crend: 7 | | | | |
|---|---|---|---|---|
| McG: Discrim Score: 0.23 | | | | |
| GvH: Signal Score (−7.5): −5.77 | | | | |
| Possible site: 34 | | | | |
| >>> Seems to have an uncleavable N-term signal seq | | | | |
| ALOM program count: 3 value: −5.68 threshold: 0.0 | | | | |
| | INTEGRAL | Likelihood = −5.68 | Transmembrane | 41-57 (38-59) |
| | INTEGRAL | Likelihood = −3.98 | Transmembrane | 65-81 (65-82) |
| | INTEGRAL | Likelihood = −1.33 | Transmembrane | 97-113 (97-113) |
| | PERIPHERAL | Likelihood = 5.78 | 10 | |

```
modified ALOM score: 1.64
*** Reasoning Step: 3
----- Final Results -----
                              bacterial membrane --- Certainty = 0.3272(Affirmative) < succ>
                                bacterial outside --- Certainty = 0.0000(Not Clear) < succ>
                            bacterial cytoplasm = Certainty = 0.0000(Not Clear) < succ>
```

[3099] A related GBS gene <SEQ ID 8591> and protein <SEQ ID 8592> were also identified. Analysis of this protein sequence reveals the following:

```
Lipop: Possible site: −1 Crend: 5
McG: Discrim Score: 11.50
GvH: Signal Score (−7.5): −2.69
Possible site: 32
>>> Seems to have an uncleavable N-term signal seq
ALOM program count: 9 value: −8.65 threshold: 0.0
INTEGRAL Likelihood = −8.65 Transmembrane 310-326 ( 307-330)
INTEGRAL Likelihood = −6.10 Transmembrane 9-25 ( 8-28)
INTEGRAL Likelihood = −5.68 Transmembrane 221-237 ( 218-239)
INTEGRAL Likelihood = −3.98 Transmembrane 245-261 ( 245-262)
INTEGRAL Likelihood = −3.56 Transmembrane 101-117 ( 101-120)
INTEGRAL Likelihood = −3.19 Transmembrane 152-168 ( 147-168)
INTEGRAL Likelihood = −1.97 Transmembrane 123-139 ( 123-144)
INTEGRAL Likelihood = −1.33 Transmembrane 277-293 ( 277-293)
INTEGRAL Likelihood = −0.59 Transmembrane 44-60 ( 43-60)
PERIPHERAL Likelihood = 5.78 190
modified ALOM score: 2.23
*** Reasoning Step: 3
----- Final Results -----
                            bacterial membrane --- Certainty = 0.4461(Affirmative) < succ>
                              bacterial outside --- Certainty = 0.0000(Not Clear) < succ>
                          bacterial cytoplasm --- Certainty = 0.0000(Not Clear) < succ>
```

[3100] The protein has homology with the following sequences in the databases:

[chemical structure]

[3101] Based on this analysis, it was predicted that these proteins and their epitopes could be useful antigens for vaccines or diagnostics.

### EXAMPLE 515

[3102] A DNA sequence (GBSx0553) was identified in S. agalactiae <SEQ ID 1649> which encodes the amino acid sequence <SEQ ID 1650>. Analysis of this protein sequence reveals the following:

```
Possible site: 43
>>> Seems to have no N-terminal signal sequence
----- Final Results -----
                            bacterial cytoplasm --- Certainty = 0.3088(Affirmative) < succ>
                              bacterial membrane --- Certainty = 0.0000(Not Clear) < succ>
                                bacterial outside --- Certainty = 0.0000(Not Clear) < succ>
```

[3103] The protein has no significant homology with any sequences in the GENPEPT database.

[3104] No corresponding DNA sequence was identified in S. pyogenes.

[3105] Based on this analysis, it was predicted that this protein and its epitopes, could be useful antigens for vaccines or diagnostics.

### EXAMPLE 516

[3106] A DNA sequence (GBSx0554) was identified in S. agalactiae <SEQ ID 1651> which encodes the amino acid sequence <SEQ ID 1652>. Analysis of this protein sequence reveals the following:

```
Possible site: 35
>>> Seems to have no N-terminal signal sequence
----- Final Results -----
                            bacterial cytoplasm --- Certainty = 0.1446(Affirmative) < succ>
                              bacterial membrane --- Certainty = 0.0000(Not Clear) < succ>
                                bacterial outside --- Certainty = 0.0000(Not Clear) < succ>
```

[3107] The protein has no significant homology with any sequences in the GENPEPT database.

[3108] No corresponding DNA sequence was identified in S. pyogenes.

[3109] Based on this analysis, it was predicted that this protein and its epitopes, could be useful antigens for vaccines or diagnostics.

### EXAMPLE 517

[3110] A DNA sequence (GBSx0555) was identified in S. agalactiae <SEQ ID 1653> which encodes the amino acid sequence <SEQ ID 1654>. Analysis of this protein sequence reveals the following:

| Lipop: Possible site: −1 Crend: 10 | | | | |
|---|---|---|---|---|
| McG: Discrim Score: 8.28 | | | | |
| GvH: Signal Score (−7.5): −2.11 | | | | |
| Possible site: 20 | | | | |
| >>> Seems to have a cleavable N-term signal seq. | | | | |
| ALOM program count: 6 value: −8.33 threshold: 0.0 | | | | |
| | INTEGRAL | Likelihood = −8.33 | Transmembrane | 358-374 (354-376) |
| | INTEGRAL | Likelihood = −8.23 | Transmembrane | 264-280 (257-290) |
| | INTEGRAL | Likelihood = −6.37 | Transmembrane | 210-226 (206-232) |
| | INTEGRAL | Likelihood = −5.95 | Transmembrane | 163-179 (160-180) |
| | INTEGRAL | Likelihood = −5.10 | Transmembrane | 23-39 (21-40) |
| | INTEGRAL | Likelihood = −1.70 | Transmembrane | 297-313 (296-314) |
| | PERIPHERAL | Likelihood = 1.75 | 322 | |

```
modified ALOM score: 2.17
*** Reasoning Step: 3
----- Final Results -----
                              bacterial membrane --- Certainty = 0.4333(Affirmative) < succ>
                                bacterial outside --- Certainty = 0.0000(Not Clear) < succ>
                            bacterial cytoplasm --- Certainty = 0.0000(Not Clear) < succ>
```

[3111] The protein has no significant homology with any sequences in the GENPEPT database.

[3112] No corresponding DNA sequence was identified in S. pyogenes.

[3113] Based on this analysis, it was predicted that this protein and its epitopes, could be useful antigens for vaccines or diagnostics.

### EXAMPLE 518

[3114] A DNA sequence (GBSx0556) was identified in S. agalactiae <SEQ ID 1655> which encodes the amino acid sequence <SEQ ID 1656>. This protein is predicted to be ABC transporter (ATP-bindingprot). Analysis of this protein sequence reveals the following:

```
Possible site: 59
>>> Seems to have no N-terminal signal sequence
----- Final Results -----
                            bacterial cytoplasm --- Certainty = 0.1510(Affirmative) < succ>
                              bacterial membrane --- Certainty = 0.0000(Not Clear) < succ>
                                bacterial outside --- Certainty = 0.0000(Not Clear) < succ>
```

[3115] A related GBS nucleic acid sequence <SEQ ID 10199> which encodes amino acid sequence <SEQ ID 10200> was also identified.

[3116] The protein has homology with the following sequences in the GENPEPT database:

| >GP: CAB88481 GB: AL353816 putative ABC transport system ATP-binding | | | |
|---|---|---|---|
| protein [Streptomyces coelicolor A3(2)] | | | |
| Identities = 104/284 (36%), Positives = 159/284 (55%), Gaps = 18/284 (6%) | | | |
| Query: | 6 | TMLLQLDNITKSYGKKIVLNQISYQFTPGLYGLLGANGTGKTTLLNLMSHFTLADSGNIY | 65 |
| | | T + ++ YG+ L+ +S + TPG+ GLLG NG GKTTLL +++ AD G | |
| Sbjct: | 2 | TPTVSASGLSLHYGRTRALDDVSLRLTPGVTGLLGPNGAGKTTLLRVLATAVPADRGAFT | 61 |
| Query: | 66 | WNGQEQS-----EEFYRHIGFLPQHFRYYDQFTGIAFLNYIATLKGV-DKKKAKQEIPRL | 119 |
| | | G + +E R +G+LPQ ++ FT F++Y+A LK + D+++ +E+ R+ | |
| Sbjct: | 62 | VLGHDPGSSRGRQEVRRRLGYLPQTPGFHPDFTAFEFVDYVAILKELADRRERHREVRRV | 121 |
| Query: | 120 | LELVGLGDVGKKKISSYSGGMKQRLGIAQALINDPEILILDEPTVGLDPKERVKFRHILS | 179 |
| | | LE V LG+V ++I SGGM+QR+ +A AL+ DP L+LDEPTVGLDP++R++FR +++ | |
| Sbjct: | 122 | LEEVDLGEVRGRRIKKLSGGMRQRVALAAALVGDPGFLVLDEPTVGLDPEQRMRFRELIA | 181 |
| Query: | 180 | QLSTNKIIILSTHIVSDVEAVAKEIIVLKNGKFIEHGNTAQLLKTIEGKVWEIT-TEPGL | 238 |
| | | + ++LSTH DV + +IV+ G G A+L G+VW T +PG | |
| Sbjct: | 182 | GAGEGRTVLLSTHQTEDVAMLCHRVIVMAAGAVRFDGTPAELTARAAGRVWSSTEKDPG- | 240 |
| Query: | 239 | SQIPNIAIVNEKVFSDSRVFRVVSDICPSDSAQLVVPTLEDFYI | 282 |
| | | A + + S FR V D P A+ PTLED Y+ | |
| Sbjct: | 241 | ------AKAGWRTGTGS--FRNVGD--PPPGAEPAEPTLEDGYL | 274 |

[3117] There is also homology to SEQ ID 686.

[3118] Based on this analysis, it was predicted that these proteins and their epitopes could be useful antigens for vaccines or diagnostics.

### EXAMPLE 519

[3119] A DNA sequence (GBSx0557) was identified in S. agalactiae <SEQ ID 1657> which encodes the amino acid sequence <SEQ ID 1658>. This protein is predicted to be response regulator. Analysis of this protein sequence reveals the following:

```
Possible site: 38
>>> Seems to have no N-terminal signal sequence
----- Final Results -----
                            bacterial cytoplasm --- Certainty = 0.3781(Affirmative) < succ>
                              bacterial membrane --- Certainty = 0.0000(Not Clear) < succ>
                                bacterial outside --- Certainty = 0.0000(N0t Clear) < succ>
```

[3120] The protein has homology with the following sequences in the GENPEPT database:

| >GP: CAC10170 GB: AJ278301 response regulator [Streptococcus pneumoniae] | | | |
|---|---|---|---|
| Identities = 136/242 (56%), Positives = 183/242 (75%) | | | |
| Query: | 1 | MNIFILEDDFVQQAHFEKIIKEIRVQYNLHFKTVETFAKPVQLLESIYEIGLHNLFFLDI | 60 |
| | | M IF+LEDDF QQ E I+++ ++++ + E F KP QLL ++E G H LFFLDI | |
| Sbjct: | 1 | MRIFVLEDDFSQQTRIETTIEKLLKEHHITLSSFEVFGKPDQLLAEVHEKGAHQLFFLDI | 60 |
| Query: | 61 | EIKNDSQMGLSVAKQIRQVDPYAQIVFVTTHSELMPLTFRYQVSALDYIDKGLSQEEFSQ | 120 |
| | | EI+N+E GLEVA++IR+ DPYA IVFVTTHSE MPL+FRYQVSALDYIDK LS EEF | |
| Sbjct: | 61 | EIRNEEMKGLEVARKIREQDPYALIVFVTTHSEFMPLSFRYQVSALDYIDKALSAEEFES | 120 |
| Query: | 121 | RIEEVLLYVDGICNKPLVENSFYFKSRYSQVQLPFNDLLYIETSSRSHRVVLYTEKDRME | 180 |
| | | RIE LLY + +K L E+ FYFKS+++Q Q PF ++ Y+ETS R HRV+LYT+ DR+E | |
| Sbjct: | 121 | RIETALLYANSQDSKSLAEDCFYFKSKFAQFQYPFKEVYYLETSPRPHRVILYTKTDRLE | 180 |
| Query: | 181 | FTATLGDILKQEPRLFQCHRSFLVNPLNIFKVDRIDRLVYFQNGTTCLVSRNKVRDIVSI | 240 |
| | | FTA+L ++ KQEPRL QCHRSFL+NP N+ +D+ ++L++F NG +CL++R KVR++ | |
| Sbjct: | 181 | FTASLEEVFKQEPRLLQCHRSFLINPANVVHLDKKEKLLFFPNGGSCLIARYKVREVSEA | 240 |
| Query: | 241 | VD | 242 |
| | | ++ | |
| Sbjct: | 241 | IN | 242 |

[3121] A related DNA sequence was identified in S. pyogenes <SEQ ID 1659> which encodes the amino acid sequence <SEQ ID 1660>. Analysis of this protein sequence reveals the following:

```
Possible site: 44
>>> Seems to have no N-terminal signal sequence
----- Final Results -----
                            bacterial cytoplasm --- Certainty = 0.2098(Affirmative) < succ>
                              bacterial membrane --- Certainty = 0.0000(Not Clear) < succ>
                                bacterial outside --- Certainty = 0.0000(Not Clear) < succ>
```

[3122] An alignment of the GAS and GBS proteins is shown below:

| Identities = 106/235 (45%), Positives = 159/235 (67%) | | | |
|---|---|---|---|
| Query: | 1 | MNIFILEDDFVQQAHFEKIIKEIRVQYNLHFKTVETFAKPVQLLESIYEIGLHNLFFLDI | 60 |
| | | MNIFILEDDF+QQ E I+ I + + +E F+ P +L ESI E G H L+FLDI | |
| Sbjct: | 2 | MNIFILEDDFIQQTRIESIVVGILKETRIPCNQLEVFSTPQKLFESIQERGDHQLYFLDI | 61 |
| Query: | 61 | EIKNDEQMGLEVAKQIRQVDPYAQIVFVTTHSELMPLTFRYQVSALDYIDKGLSQEEFSQ | 120 |
| | | EI + GLE+A IRQ DP A IVFVTTHSE P++F+Y+VSALD+IDK Q++F + | |
| Sbjct: | 62 | EIGEYTRCGLELAAAIRQKDPNAVIVFVTTHSEFAPISFKYKVSALDFIDKAGGQKQFKE | 121 |
| Query: | 121 | RIEEVLLYVDGICNKPLVENSFYFKSRYSQVQLPFNDLLYIETSSRSHRVVLYTEKDRME | 180 |
| | | +IEE + Y + + ++ F F++ ++++LP+ D+LY T++ H+V L+T+ +R+E | |
| Sbjct: | 122 | QIEECIRYTYDMMSSRESKDMFLFETPQTRLKLPYKDILYFATATTPHKVCLWTQTERLE | 181 |
| Query: | 181 | FTATLGDILKQEPRLFQCHRSFLVNPLNIFKVDRIDRLVYFQNGTTCLVSRNKVR | 235 |
| | | F L +I P+LF CHRS+LVN + ++D+ +L+YF+NG +C+VSR K++ | |
| Sbjct: | 182 | FYGNLSEIQAVAPKLFLCHRSYLVNLDKVVRIDKSKQLLYFENGDSCMVSRLKMK | 236 |

[3123] Based on this analysis, it was predicted that these proteins and their epitopes could be useful antigens for vaccines or diagnostics.

### EXAMPLE 520

[3124] A DNA sequence (GBSx0558) was identified in S. agalactiae <SEQ ID 1661> which encodes the amino acid sequence <SEQ ID 1662>. Analysis of this protein sequence reveals the following:

```
Possible site: 57
>>> Seems to have no N-terminal signal sequence
----- Final Results -----
                            bacterial cytoplasm --- Certainty = 0.2651(Affirmative) < succ>
                              bacterial membrane --- Certainty = 0.0000(Not Clear) < succ>
                                bacterial outside --- Certainty = 0.0000(Not Clear) < succ>
```

[3125] The protein has no significant homology with any sequences in the GENPEPT database.

[3126] A related DNA sequence was identified in S. pyogenes <SEQ ID 1663> which encodes the amino acid sequence <SEQ ID 1664>. Analysis of this protein sequence reveals the following:

```
Possible site: 25
>>> Seems to have no N-terminal signal sequence
----- Final Results -----
                            bacterial cytoplasm --- Certainty = 0.0535(Affirmative) < succ>
                              bacterial membrane --- Certainty = 0.0000(Not Clear) < succ>
                                bacterial outside --- Certainty = 0.0000(Not Clear) < succ>
```

[3127] An alignment of the GAS and GBS proteins is shown below:

| Identities = 177/269 (65%), Positives = 219/269 (80%) | | | |
|---|---|---|---|
| Query: | 6 | MAKCLTLNTHSWMEVNALKKLFDLAEHIFREKYDIICLQEVNQSISSPLAKSSPNYHPIE | 65 |
| | | M K LTLNTHSWM+ N LKKL LAEHI EKYDIICLQE+NQ I S LA P Y + | |
| Sbjct: | 1 | MTKVLTLNTHSWMQANTLKKLVALAEHILAEKYDIICLQEINQLIESELATDLPRYQALS | 60 |
| Query: | 66 | GTPALHQDNFALQLVHYLNLQGLHYHWTWAYNHIGYSKYHEGVAILSLKPLKPEDILVSA | 125 |
| | | GTP++H+D+FAL L+HYL +G HY+W+WAYNHIGY Y EGVAILS +P+ DILVSA | |
| Sbjct: | 61 | GTPSIHKDHFALLLIHYLQKRGQHYYWSWAYNHIGYDIYQEGVAILSKQPIHVSDILVSA | 120 |
| Query: | 126 | VDDETDYHTRRALVAETTLNDKVVTVVSLHFSWFEKGFAEEWKRLETTLLEVETPLLLMG | 185 |
| | | +DDETDYHTRR+L+A+TTL+ K V VV++H SWF+KGF EW++LE LL + PLLLMG | |
| Sbjct: | 121 | MDDETDYHTRRSLIAKTTLDGKEVAVVNVHLSWFDKGFLGEWEKLEKELLTLNCPLLLMG | 180 |
| Query: | 186 | DFNNPTGNQGYELVLNSPLALKDSHQIANHVFGDHTIMADIDGWEGNKKALKVDHIFTSE | 245 |
| | | DFNNPT GY++++ SPL L+DSH+ A+HVFGDH+I+ADIDGW+GNK+ALKVDH+FTS+ | |
| Sbjct: | 181 | DFNNPTDQDGYQVMMGSPLDLQDSHKGADHVFGDHSIVADIDGWQGNKEALKVDHVFTSK | 240 |
| Query: | 246 | DLSISSSQVVFEGGEAPVVSDHYGLEITM | 274 |
| | | D I SS++ FEGG+APVVSDHYGLE+T+ | |
| Sbjct: | 241 | DFIIRSSKITFEGGDAPVVSDHYGLEVTL | 269 |

[3128] Based on this analysis, it was predicted that these proteins and their epitopes could be useful antigens for vaccines or diagnostics.

### EXAMPLE 521

[3129] A DNA sequence (GBSx0559) was identified in S. agalactiae <SEQ ID 1665> which encodes the amino acid sequence <SEQ ID 1666>. This protein is predicted to be PTS system, glucose-specific enzyme 11, A component (ptsG). Analysis of this protein sequence reveals the following:

| Possible site: 37 | | | | |
|---|---|---|---|---|
| >>> Seems to have no N-terminal signal sequence | | | | |
| | INTEGRAL | Likelihood = −8.07 | Transmembrane | 193-209 (189-217) |
| | INTEGRAL | Likelihood = −7.86 | Transmembrane | 28-44 (24-48) |
| | INTEGRAL | Likelihood = −6.48 | Transmembrane | 431-447 (421-449) |
| | INTEGRAL | Likelihood = −2.92 | Transmembrane | 153-169 (153-170) |
| | INTEGRAL | Likelihood = −2.81 | Transmembrane | 93-109 (93-111) |
| | INTEGRAL | Likelihood = −2.39 | Transmembrane | 370-386 (370-388) |
| | INTEGRAL | Likelihood = −2.28 | Transmembrane | 68-84 (68-84) |

```
----- Final Results -----
                              bacterial membrane --- Certainty = 0.4227(Affirmative) < succ>
                                bacterial outside --- Certainty = 0.0000(Not Clear) < succ>
                            bacterial cytoplasm --- Certainty = 0.0000(Not Clear) < succ>
```

[3130] A related GBS nucleic acid sequence <SEQ ID 10201> which encodes amino acid sequence <SEQ ID 10202> was also identified.

[3131] The protein has homology with the following sequences in the GENPEPT database:

>GP: AAD00281 GB: U78600 putative ptsG protein [Streptococcus mutans]
Identities = 294/409 (71%), Positives = 342/409 (82%),
Gaps = 7/409 (1%)

| | | | |
|---|---|---|---|
| Query: | 293 | DLINLKGS-NSSQYHHLLTSVTPARFKVGQMIGASGILMGLSYAMYRNVDKDKKLKYKSM | 351 |
| | | DLI+LKG+ + SQYHHLLTSVTPARFKVGQMIG+SGILMGL+ AMYRNVD DKK KYK M | |
| Sbjct: | 3 | DLIHLKGAGHMSQYHHLLTSVTPARFKVGQMIGSSGILMGLTLAMYRNVDPDKKEKYKGM | 62 |
| Query: | 352 | FISAAAATFLTGVTEPIEYMFMFAAMPLYLVYAVVQGCAFAMADIVNLRVHSFGNIEFLT | 411 |
| | | F+SAA A FLTGVTEP+EYMFMFAA+PLYLVYAVVQG AFA AD+++LRVHSFGNIEFLT | |
| Sbjct: | 63 | FLSAAVAVFLTGVTEPLEYMFMFAALPLYLVYAVVQGLAFASADLIHLRVHSFGNIEFLT | 122 |
| Query: | 412 | RVPMGIKAGLGGDIFNFVWVTLLFAVLMYFIANFMIKKFNLATAGRNGNYDNEEVDNAPS | 471 |
| | | + PM IKAGL DI NF+ V+++F V MYFI NFMIKKFNLAT+GRNGNYD + D + | |
| Sbjct: | 123 | KTPMAIKAGLAMDIVNFIVVSVVFGVAMYFITNFMIKKFNLATSGRNGNYDTGD-DASDE | 181 |
| Query: | 472 | TAS----GSADANSQVVQVINLLGGRDNIEDVDACMTRLRVTVKDGNSVGSEAAWKKAGA | 527 |
| | | TAS G+A+ANSQ+V++INLLGG++NI DVDACMTRLR+TV D VG EAAWKKAGA | |
| Sbjct: | 182 | TASNSNAGTANANSQIVKIINLLGGKENISDVDACMTRLRITVTDVAKVGDEAAWKKAGA | 241 |
| Query: | 528 | MGLVLKGNGVQAIYGPKADVLKSDIQDLLDSGTVIPIVDLETGQPVAAAPVTTYKGITEE | 587 |
| | | MGL++KGNGVQA+YGPKADVLKSDIQDLLDSG IP D+ + A V ++KG+TEE | |
| Sbjct: | 242 | MGLIVKGNGVQAVYGPKADVLKSDIQDLLDSGVDIPKTDVTAPEEDKTADV-SFKGVTEE | 300 |
| Query: | 588 | IVSVANGQVEALDVVKDPVFSQKMMGDGFAVEPTDGNIYVPVSGTVTSVFPTKHAFGLLT | 647 |
| | | + +VA+GQV + V DPVFSQKMMGDGFAVEP +GNIY PV+G VTSVFPTKHA GLLT | |
| Sbjct: | 301 | VATVADGQVLPITQVHDPVFSQKMMGDGFAVEPENGNIYSPVAGLVTSVFPTKHALGLLT | 360 |
| Query: | 648 | ESGLEVLVHIGLDTVALDGQPFEVKISSGQKVVAGDLAVVADLEAIKAA | 696 |
| | | + GLEVLVH+GLDTVAL+G PF K+ GQ+V GDL +VADLEAIK+A | |
| Sbjct: | 361 | DDGLEVLVHVGLDTVALNGAPFSAKVKDGQRVALGDLLLVADLEAIKSA | 409 |

[3132] A related DNA sequence was identified in S. pyogenes <SEQ ID 1667> which encodes the amino acid sequence <SEQ ID 1668>. Analysis of this protein sequence reveals the following:

| Possible site: 33 | | | | |
|---|---|---|---|---|
| >>> Seems to have a cleavable N-term signal seq. | | | | |
| | INTEGRAL | Likelihood = −13.43 | Transmembrane | 186-202 (181-213) |
| | INTEGRAL | Likelihood = −6.79 | Transmembrane | 419-435 (412-442) |
| | INTEGRAL | Likelihood = −5.52 | Transmembrane | 61-77 (57-82) |
| | INTEGRAL | Likelihood = −3.56 | Transmembrane | 363-379 (363-381) |
| | INTEGRAL | Likelihood = −1.97 | Transmembrane | 143-159 (142-160) |
| | INTEGRAL | Likelihood = −0.16 | Transmembrane | 343-359 (343-359) |

```
----- Final Results -----
                              bacterial membrane --- Certainty = 0.6371(Affirmative) < succ>
                                bacterial outside --- Certainty = 0.0000(Not Clear) < succ>
                            bacterial cytoplasm --- Certainty = 0.0000(Not Clear) < succ>
```

[3133] The protein has homology with the following sequences in the databases:

| >GP: AAD00281 GB: U78600 putative ptsG protein [Streptococcus mutans] | | | |
|---|---|---|---|
| Identities = 288/407 (70%), Positives = 331/407 (80%), Gaps = 2/407 (0%) | | | |
| Query: | 286 | DLVHLKGSD-ASAYSHLMDSVTPARFKVGQHIGATGTLMGVALAMYRNVDADKKHTYKMM | 344 |
| | | DL+HLKG+ S Y HL+ SVTPARFKVGQMIG++G LMG+ LAMYRNVD DKK YK M | |
| Sbjct: | 3 | DLIHLKGAGHMSQYHHLLTSVTPARFKVGQMIGSSGILMGLTLAMYRNVDPDKKEKYKGM | 62 |
| Query: | 345 | FISAAAAVFLTGVTEPLEYLFMFAAMPLYIVYALVQGASFAMADLVNLRVHSFGNIELLT | 404 |
| | | F+SAA AVFLTGVTEPLEY+FMFAA+PLY+VYA+VQG +FA ADL++LRVHSFGNIE LT | |
| Sbjct: | 63 | FLSAAVAVFLTGVTEPLEYMFMFAALPLYLVYAVVQGLAFASADLIHLRVHSFGNIEFLT | 122 |
| Query: | 405 | RTPMALKAGLGMDVINFVWVSVLFAVIMYFIADMMIKKMHLATAGRLGNYDA-DILGDRN | 463 |
| | | +TPMA+KAGL MD++NF+ VSV+F V MYFI + MIKK +LAT+GR GNYD D D | |
| Sbjct: | 123 | KTPMAIKAGLAMDIVNFIVVSVVFGVANMFITNFMIKKFNLATSGRNGNYDTGDDASDET | 182 |
| Query: | 464 | TQTRPTQVADSNSQVVQIVNLLGGAGNIDDVDACMTRLRVTVKDPAKVGAEDDWKKAGAI | 523 |
| | | A++NSQ+V+I+NLLGG NI DVDACMTRLR+TV D AKVG E WKKAGA+ | |
| Sbjct: | 183 | ASNSNAGTANANSQIVKIINLLGGKENISDVDACMTRLRITVTDVAKVGDEAAWKKAGAM | 242 |
| Query: | 524 | GLIQKGNGVQAVYGPKADILKSDIQDLLDSGALIPEVNMSQLTSKPTPAKDFKHVTEDVL | 583 |
| | | GLI KGNGVQAVYGPKAD+LKSDIQDLLDSG IP+ +++ T FK VTE+V | |
| Sbjct: | 243 | GLIVKGNGVQAVYGPKADVLKSDIQDLLDSGVDIPKTDVTAPEEDKTADVSFKGVTEEVA | 302 |
| Query: | 584 | SVADGMVLPITGVKDQVFAAKMMGDGFAVEPTHGNIYAPVAGLVTSVFPTKHAFGLLTDN | 643 |
| | | +VADG VLPIT V D VF+ KMMGDGFAVEP +GNIY+PVAGLVTSVFPTKHA GLLTD+ | |
| Sbjct: | 303 | TVADGQVLPITQVHDPVFSQKMMGDGFAVEPENGNIYSPVAGLVTSVFPTKHALGLLTDD | 362 |
| Query: | 644 | GLEVLVHVGLDTVALNGVPFSVKVSEGQRVHAGDLLVVADLAAIKSA | 690 |
| | | GLEVLVHVGLDTVALNG PFS KV +GQRV GDLL+VADL AIKSA | |
| Sbjct: | 363 | GLEVLVHVGLDTVALNGAPFSAKVKDGQRVALGDLLLVADLEAIKSA | 409 |

[3134] An alignment of the GAS and GBS proteins is shown below:

| Identities = 517/731 (70%), Positives = 606/731 (82%), Gaps = 7/731 (0%) | | | |
|---|---|---|---|
| Query: | 8 | MKNNVKQLFSFEFWQKFGKALMVVIAVMPAAGLMVSIGNSISLLDPSNVLLGRIANVIAQ | 67 |
| | | MK + KQLF FEFWQKFGK LMVVIAVNPAAGLM+SIGNSI +++ + L + N+IAQ | |
| Sbjct: | 1 | MKTSFKQLFRFEFWQKFGKCLMVVIAVMPAAGLMINIGMSIPMINHDSAFLASLGNIIAQ | 60 |
| Query: | 68 | IGWGVIGNLHILFALAIGGSWAKERAGGAFAAGLSFILINLITGNFFGVKTDMLADSKAT | 127 |
| | | IGW VI NLH+LFALAIGGSWAKERAGGAFA+GL+F+LIN ITG F+GV + MLAD +A | |
| Sbjct: | 61 | IGWAVIVNLHLLFALAIGGSWAKERAGGAFASGLAFVLINRITGAFYGVSSTMLADPEAK | 120 |
| Query: | 128 | VQTVFGATIRVSDYFVNVLGQPALNMGVFVGIISGFVGATAFNKYYNYRKLPDALTFFNG | 187 |
| | | + ++ G + V DYF +VL PALN GVFVGII+GFVGATA+NKYYNYRKLP+ LTFFNG | |
| Sbjct: | 121 | ITSLLGTQMIVKDYFTSVLESPALNTGVFVGIIAGFVGATAYNKYYNYRKLPEVLTFFNG | 180 |
| Query: | 188 | KRFVPFVVIYRSVIVALILSVFWPVVQSGINGFGKWIASSQDSAPILAPFVYGTLERLLL | 247 |
| | | KRFVPFVVI RS+ VALIL V WPV+QSGIN FG WIASSQDSAPILAPF+YGTLERLLL | |
| Sbjct: | 181 | KRFVPFVVILRSIFVALILVVVWPVIQSGINSFGMWIASSQDSAPILAPFLYGTLERLLL | 240 |
| Query: | 248 | PFGLHHMLTIPMNYTQLGGTYTVLTGATKGAQVLGQDPLWLAWVGDLINLKGSNSSQYHH | 307 |
| | | PFGLHHMLTIPMNYT LGGTY V+TGA G +V GQDPLWLAWV DL++LKGS++S Y H | |
| Sbjct: | 241 | PFGLHHMLTIPMNYTALGGTYEVMTGAAAGTKVFGQDPLWLAWVTDLVHLKGSDASAYSH | 300 |
| Query: | 308 | LLTSVTPARFKVGQMIGASGILMGLSYAMYRNVDKDKKLKYKSMFISAAAATFLTGVTEP | 367 |
| | | L+ SVTPARFKVGQMIGA+G LMG++ AMYRNVD DKK YK MFISAAAA FLTGVTEP | |
| Sbjct: | 301 | LMDSVTPARFKVGQMIGATGTLMGVALAMYRNVDADKKHTYKMMFISAAAAVFLTGVTEP | 360 |
| Query: | 368 | IEYMFMFAAMPLYLVYAVVQGCAFAMADIVNLRVHSFGNIEFLTRVPMGIKAGLGGDIFN | 427 |
| | | +EY+FMFAAMPLY+VYA+VQG +FAMAD+VNLRVHSFGNIE LTR PM +KAGLG D+ N | |
| Sbjct: | 361 | LEYLFMFAAMPLYIVYALVQGASFAMADLVNLRVHSFGNIELLTRTPMALKAGLGMDVIN | 420 |
| Query: | 428 | FVWVTLLFAVLMYFIANFMIKKFNLATAGRNGNYDNEEVD--NAPSTASGSADANSQVVQ | 485 |
| | | FVWV++LFAV+MYFIA+ MIKK +LATAGR GNYD + + N + + AD+NSQVVQ | |
| Sbjct: | 421 | FVWVSVLFAVIMYFIADMMIRKMHLATAGRLGNYDADILGDRNTQTRPTQVADSNSQVVQ | 480 |
| Query: | 486 | VINLLGGRDNIEDVDACMTRLRVTVKDGNSVGSEAAWKKAGAMGLVLKGNGVQAIYGPKA | 545 |
| | | ++NLLGG NI+DVDACMTRLRVTVKD VG+E WKKAGA+GL+ KGNGVQA+YGPKA | |
| Sbjct: | 481 | IVNLLGGAGNIDDVDACMTRLRVTVKDPAKVGAEDDWKKAGAIGLIQKGNGVQAVYGPKA | 540 |
| Query: | 546 | DVLKSDIQDLLDSGTVIPIVDLE--TGQPVAAAPVTTYKGITEEIVSVANGQVEALDVVK | 603 |
| | | D+LKSDIQDLLDSG +IP V++ T +P P +K +TE+++SVA+G V + VK | |
| Sbjct: | 541 | DILKSDIQDLLDSGALIPEVNMSQLTSKP---TPAKDFKHVTEDVLSVADGMVLPITGVK | 597 |
| Query: | 604 | DPVFSQKMMGDGFAVEPTDGNIYVPVSGTVTSVFPTKHAFGLLTESGLEVLVHIGLDTVA | 663 |
| | | D VF+ KMMGDGFAVEPT GNIY PV+G VTSVFPTKHAFGLLT++GLEVLVH+GLDTVA | |
| Sbjct: | 598 | DQVFAAKMMGDGFAVEPTHGNIYAPVAGLVTSVFPTKHAFGLLTDNGLEVLVHVGLDTVA | 657 |
| Query: | 664 | LDGQPFEVKISSGQKVVAGDLAVVADLEAIKAAGKETSVIIVFTNVSDIKTVKLEKSGPQ | 723 |
| | | L+G PF VK+S GQ+V AGDL VVADL AIK+A +ET +++ FTN ++I+ V L G Q | |
| Sbjct: | 658 | LNGVPFSVKVSEGQRVHAGDLLVVADLAAIKSAERETIIVVAFTNTTEIQDVTLTSLGAQ | 717 |
| Query: | 724 | IAKTVVAKVEL | 734 |
| | | AKT VA VEL | |
| Sbjct: | 718 | PAKTKVATVEL | 728 |

[3135] Based on this analysis, it was predicted that these proteins and their epitopes could be useful antigens for vaccines or diagnostics.

### EXAMPLE 522

[3136] A DNA sequence (GBSx0560) was identified in S. agalactiae <SEQ ID 1669> which encodes the amino acid sequence <SEQ ID 1670>. Analysis of this protein sequence reveals the following:

```
Possible site: 14
>>> Seems to have no N-terminal signal sequence
----- Final Results -----
                            bacterial cytoplasm --- Certainty = 0.2266(Affirmative) < succ>
                              bacterial membrane --- Certainty = 0.0000(Not Clear) < succ>
                                bacterial outside --- Certainty = 0.0000(Not Clear) < succ>
```

[3137] The protein has no significant homology with any sequences in the GENPEPT database.

[3138] No corresponding DNA sequence was identified in S. pyogenes.

[3139] Based on this analysis, it was predicted that this protein and its epitopes, could be useful antigens for vaccines or diagnostics.

### EXAMPLE 523

[3140] A DNA sequence (GBSx0561) was identified in S. agalactiae <SEQ ID 1671> which encodes the amino acid sequence <SEQ ID 1672>. This protein is predicted to be alkaline phosphatase synthesis sensor protein phor (hpyA). Analysis of this protein sequence reveals the following:

```
Possible site: 34
>>> Seems to have an uncleavable N-term signal seq
INTEGRAL Likelihood = −13.96 Transmernbrane 160-176 ( 148-183)
INTEGRAL Likelihood = −8.65 Transmembrane 20-36 ( 13-41)
----- Final Results -----
                            bacterial membrane --- Certainty = 0.6583(Affirmative) < succ>
                              bacterial outside --- Certainty = 0.0000(Not Clear) < succ>
                          bacterial cytoplasm --- Certainty = 0.0000(Not Clear) < succ>
```

[3141] A related GBS nucleic acid sequence <SEQ ID 8595> which encodes amino acid sequence <SEQ ID 8596> was also identified. Analysis of this protein sequence reveals the following:

```
Lipop: Possible site: −1 Crend: 6
SRCFLG: 0
McG: Length of UR: 26
Peak Value of UR: 3.27
Net Charge of CR: 3
McG: Discrim Score: 14.63
GvH: Signal Score (−7.5): −5.64
Possible site: 26
>>> Seems to have an uncleavable N-term signal seq
Amino Acid Composition: calculated from 1
ALOM program count: 2 value: −13.96 threshold: 0.0
INTEGRAL Likelihood = −13.96 Transmembrane 152-168 ( 140-175)
INTEGRAL Likelihood = −8.65 Transmembrane 12-28 ( 5-33)
PERIPHERAL Likelihood = −1.59 135
modified ALOM score: 3.29
icml HYPID: 7 CFP: 0.658
*** Reasoning Step: 3
----- Final Results -----
                            bacterial membrane --- Certainty = 0.6583(Affirmative) < succ>
                              bacterial outside --- Certainty = 0.0000(Not Clear) < succ>
                          bacterial cytoplasm --- Certainty = 0.0000(Not Clear) < succ>
```

[3142] A related GBS gene <SEQ ID 8593> and protein <SEQ ID 8594> were also identified. Analysis of this protein sequence reveals the following:

```
Lipop: Possible site: −1 Crend: 6
McG: Discrim Score: 14.63
GvH: Signal Score (−7.5): −5.64
Possible site: 26
>>> Seems to have an uncleavable N-term signal seq
ALOM program count: 2 value: −13.96 threshold: 0.0
INTEGRAL Likelihood = −13.96 Transmembrane 152-168 ( 140-175)
INTEGRAL Likelihood = −8.65 Transmembrane 12-28 ( 5-33)
PERIPHERAL Likelihood = −1.59 135
modified ALOM score: 3.29
*** Reasoning Step: 3
----- Final Results -----
                            bacterial membrane --- Certainty = 0.6583(Affirmative) < succ>
                              bacterial outside --- Certainty = 0.0000(Not Clear) < succ>
                          bacterial cytoplasm --- Certainty = 0.0000(Not Clear) < succ>
```

[3143] The protein has homology with the following sequences in the databases:

[chemical structure]

[3144] The protein has homology with the following sequences in the GENPEPT database:

| >GP: BAB06875 GB: AP001517 two-component sensor histidine kinase | | | |
|---|---|---|---|
| involved in phosphate regulation [Bacillus halodurans] | | | |
| Identities = 176/589 (29%), Positives = 315/589 (52%), Gaps = 47/589 (7%) | | | |
| Query: | 9 | MTKKIFRTTLSASLGIVLVTILMIMG------------FLYNYFNHIQREQLRTQTALAS | 56 |
| | | MTK +R L+ ++ VT+L++ G +L N + +++E + + + | |
| Sbjct: | 1 | MTKFRYRLVLA----VLTVTLLVMAGLGLVIGQIFKNVYLENLTDRLKKETYLAASMVEN | 56 |
| Query: | 57 | QGISF-EGKDYFENLKTS-NVRITWVDNKGQVLYDTQSDAKHMKNHANRQEIKEAIKSGY | 114 |
| | | + + F E + E + + R+T + G V+ ++ +D M+NHA+R E E ++ G | |
| Sbjct: | 57 | EAVLFNEVQTLTEEISQKLDARVTIILADGTVVGESAADPAEMENHADRPEFTE-LEEGI | 115 |
| Query: | 115 | GESTRWSATL-TEKSIYAAQRLN--NGTI--VRLSVAQQTIFYLLLGMISPLAIIILLAI | 169 |
| | | R+S T+ TE YA N N TI VRL + + + + + + L + +A | |
| Sbjct: | 116 | ---VRYSTTVETELLFYAVPIQNEANETIGYVRLGLPIEAVNSVNRTLWAILIVSFTIAF | 172 |
| Query: | 170 | ILSVLIARYIAKKVSEPLNNI----------DLDHPLSNDSYEEITPLLRRLDSHQAKIQ | 219 |
| | | ++ V + IA ++ P+ + D S +S +E+ L R ++ ++ | |
| Sbjct: | 173 | LVIVSVTYRIANQMIRPIESATVVANKLAEGDYQARTSEESRDEVGQLNRSINVLAYNLE | 232 |
| Query: | 220 | HQKLLLQKRQKEFDTIISKIKEGMILLDDQARIVSINAEALKLFQINDD-WHGRFMMEVS | 278 |
| | | Q +++ +T+I + G+IL++ + I IN +FQ + D W + +V | |
| Sbjct: | 233 | QLTKRHQVQKERLETLIENMGSGLILINTRGDISLINKTCHDIFQEDTDLWLHQLYHDVI | 292 |
| Query: | 279 | RDLTLKDLIDQGLKGKKKEAN-----IGIENNHYRVLVRPTT-DNNRVTGLVVLLFDVTD | 332 |
| | | + + ++ +K++ I +E H+ V P +N ++ G+ ++ D+T+ | |
| Sbjct: | 293 | KHKEIIKIVQDIFLTEKRQRRQVKLPIHLEYRHFDVHGAPIVRENGKLKGIALVFHDITE | 352 |
| Query: | 333 | QLQMEQLQREFTANVSHELKTPLHVISGYSELLANQMVPNEEV-PQFAAKIHKESERLVK | 391 |
| | | ++EQ++++F ANVSHELKTP+ I G++E L + + +E++ QF I KESERL | |
| Sbjct: | 353 | LKKLEQVRKDFVANVSHELKTPVTSIKGFTETLLDGAMHDEQLRDQFLHIIWKESERLQS | 412 |
| Query: | 392 | LVEDIINLSHLDEQE-KLPQETVNLYDLTQKVLEGLQAKADKKHIQINFNGEEAI-LRGN | 449 |
| | | L+ D++ LS +++ +L + NL+ + +V+ L+ KA++K I I+ + E + L G+ | |
| Sbjct: | 413 | LIHDLLELSKIEQNYFQLNWQQTNLFAVVSEVMTLLKGKAEEKGIDISLSAEGSFDLEGD | 472 |
| Query: | 450 | PVLLNSLVYNLCDNAITYNHEKGQVNVTLKNSPDTITLEVSDTGLGIAEKDKKRIFERFY | 509 |
| | | P L + NL +NAITY G++++ LK+ D + EV+DTG+GI E + RIFERFY | |
| Sbjct: | 473 | PERLKQIAINLVNNAITYTSNGGRIDLALKDHGDVVEFEVNDTGIGIRESEIPRIFERFY | 532 |
| Query: | 510 | RVDKSRSKIVGGTGLGLSIVKSALDFHNGSIKVDSHLGQGTTMTVLLHK | 558 |
| | | RVD++RS+ GGTGLGL+IVK ++ H G I V+S G+GTT T+ H+ | |
| Sbjct: | 533 | RVDRARSRNSGGTGLGLAIVKHLVEAHQGKILVESEFGKGTTFTIQFHR | 581 |

[3145] There is also homology to SEQ ID 1178.

[3146] SEQ ID 8594 (GBS340) was expressed in E. coli as a GST-fusion product. SDS-PAGE analysis of total cell extract is shown in FIG. 173 (lane 10; MW 86 kDa). It was also expressed in E. coli as a His-fusion product. SDS-PAGE analysis of total cell extract is shown in FIG. 11 (lane 7; MW 61.5 kDa) and in FIG. 77 (lane 10; MW 62 kDa).

[3147] Purified GBS340-GST is shown in FIG. 223, lane 2; purified GBS340-His is shown in FIG. 191, lane 9.

[3148] The purified GBS340-GST fusion product was used to immunise mice. The resulting antiserum was used for Western blot (FIG. 254A), FACS (FIG. 254B), and in the in vivo passive protection assay (Table III). These tests confirm that the protein is immunoaccessible on GBS bacteria and that it is an effective protective immunogen.

[3149] Based on this analysis, it was predicted that these proteins and their epitopes could be useful antigens for vaccines or diagnostics.

### EXAMPLE 524

[3150] A DNA sequence (GBSx0562) was identified in S. agalactiae <SEQ ID 1673> which encodes the amino acid sequence <SEQ ID 1674>. This protein is predicted to be phosphate regulon transcriptional regulatory protein phob (phoB). Analysis of this protein sequence reveals the following:

```
Possible site: 28
>>> Seems to have no N-terminal signal sequence
----- Final Results -----
                            bacterial cytoplasm --- Certainty = 0.2617(Affirmative) < succ>
                              bacterial membrane --- Certainty = 0.0000(Not Clear) < succ>
                                bacterial outside --- Certainty = 0.0000(Not Clear) < succ>
```

[3151] A related GBS nucleic acid sequence <SEQ ID 10203> which encodes amino acid sequence <SEQ ID 10204> was also identified.

[3152] The protein has homology with the following sequences in the GENPEPT database:

| >GP: AAC73502 GB: AE000146 positive response regulator for pho | | | |
|---|---|---|---|
| regulon, sensor is PhoR (or CreC) [Escherichia coli K12] | | | |
| Identities = 98/224 (43%), Positives = 138/224 (60%), Gaps = 2/224 (0%) | | | |
| Query: | 2 | IYCVEDDADIREMMLYTLQMAGFKAQGFSSSELFWEAIQEKVPDLILLDIMLPGDDGLTI | 61 |
| | | I VED+A IREM+ + L+ GF+ + + E PDLILLD MLPG G+ | |
| Sbjct: | 5 | ILVVEDEAPIREMVCFVLEQNGFQPVEAEDYDSAVNQLNEPWPDLILLDWMLPGGSGIQF | 64 |
| Query: | 62 | LERLRRKHQTEMIPVIMTTAKGSEYDKVKGLDLGADDYLVKPFGMMEMISRIKAVLRRSR | 121 |
| | | ++ L+R+ T IPV+M TA+G E D+V+GL+ GADDY+ KPF E+++RIKAV+RR | |
| Sbjct: | 65 | IKHLKRESMTRDIPVVMLTARGEEEDRVRGLETGADDYITKPFSPKELVARIKAVMRRIS | 124 |
| Query: | 122 | QVDSKAHIIIGNLEIDPTNYWVKRGTEKIHLTLKEFELLVLFFRNPNRVFTRQELLDKVW | 181 |
| | | + + I + L +DPT++ V G E + + EF+LL F +P RV++R++LL+ VW | |
| Sbjct: | 125 | PMAVEEVIEMQGLSLDPTSHRVMAGEEPLEMGPTEFKLLHFFMTHPERVYSREQLLNHVW | 184 |
| Query: | 182 | GEQFLGETRTVDVHIGTLRTKLGEDGY--LIATVRGVGYRLEER | 223 |
| | | G E RTVDVHI LR L G+ ++ TVRG GYR R | |
| Sbjct: | 185 | GTNVYVEDRTVDVHIRRLRKALEPGGHDRMVQTVRGTGYRFSTR | 228 |

[3153] There is also homology to SEQ ID 1182.

[3154] Based on this analysis, it was predicted that these proteins and their epitopes could be useful antigens for vaccines or diagnostics.

### EXAMPLE 525

[3155] A DNA sequence (GBSx0563) was identified in S. agalactiae <SEQ ID 1675> which encodes the amino acid sequence <SEQ ID 1676>. This protein is predicted to be phosphate transport system regulatory protein (phoU). Analysis of this protein sequence reveals the following:

```
Possible site: 33
>>> Seems to have no N-terminal signal sequence
----- Final Results -----
                            bacterial cytoplasm --- Certainty = 0.1188(Affirmative) < succ>
                              bacterial membrane --- Certainty = 0.0000(Not Clear) < succ>
                                bacterial outside --- Certainty = 0.0000(Not Clear) < succ>
```

[3156] The protein has homology with the following sequences in the GENPEPT database:

| >GP: AAG08750 GB: AE004948 phosphate uptake regulatory protein PhoU | | | |
|---|---|---|---|
| [Pseudomonas aeruginosa] | | | |
| Identities = 66/213 (30%), Positives = 119/213 (54%), Gaps = 4/213 (1%) | | | |
| Query: | 2 | IRSRFASQLNDLNKEIIFMGALCEDIIGKSLGALTNSNDVYLDDISETYHKIEQMERDIE | 61 |
| | | I +F ++L D+ ++ MG L E + ++ AL +++ + E +I QMER+I+ | |
| Sbjct: | 11 | ISQQFNAELEDVRSHLLAMGGLVEKQVNDAVNALIDADSGLAQQVREIDDQINQMERNID | 70 |
| Query: | 62 | ERCLKLLLRQQPVAKDLRRISSALKMVYDMKRIGAQAYEIAEIVSLGHIIQGSGSERD-- | 119 |
| | | E C+++L R+QP A DLR I S K V D++RIG +A ++A + + S R | |
| Sbjct: | 71 | EECVRILARRQPAASDLRLIISISKSVIDLERIGDEASKVARRAI--QLCEEGESPRGYV | 128 |
| Query: | 120 | QLNSMSNNVISMLTKSIDAFIYDNEEQAHQVIEQDRTVNQEFDTIKKQLVLYFSVQDVDG | 179 |
| | | ++ + + V M+ +++DAF + + A V + D+TV++E+ T ++LV Y | |
| Sbjct: | 129 | EVRHIGSQVQKMVQEALDAFARFDADLALSVAQYDKTVDREYKTALRELVTYMMEDPRAI | 188 |
| Query: | 180 | EYPIDVLMIAKYLERIGDHTVNIAKWVLFSITG | 212 |
| | | ++++ + LERIGDH NIA+ V++ + G | |
| Sbjct: | 189 | SRVLNIIWALRSLERIGDHARNIAELVIYLVRG | 221 |

[3157] There is also homology to SEQ ID 1678.

[3158] Based on this analysis, it was predicted that this protein and its epitopes, could be useful antigens for vaccines or diagnostics.

### EXAMPLE 526

[3159] A DNA sequence (GBSx0564) was identified in S. agalactiae <SEQ ID 1679> which encodes the amino acid sequence <SEQ ID 1680>. This protein is predicted to be ATP-binding cassette protein PstB (pstB-2). Analysis of this protein sequence reveals the following:

```
Possible site: 52
>>> Seems to have no N-terminal signal sequence
----- Final Results -----
                            bacterial cytoplasm --- Certainty = 0.2432(Affirmative) < succ>
                              bacterial membrane --- Certainty = 0.0000(Not Clear) < succ>
                                bacterial outside --- Certainty = 0.0000(Not Clear) < succ>
```

[3160] A related GBS nucleic acid sequence <SEQ ID 10205> which encodes amino acid sequence <SEQ ID 10206> was also identified.

[3161] The protein has homology with the following sequences in the GENPEPT database:

| >GP: AAD22041 GB: AF118229 ATP-binding cassette protein PstB | | | |
|---|---|---|---|
| [Streptococcus pneumoniae] | | | |
| Identities = 166/245 (67%), Positives = 211/245 (85%), Gaps = 1/245 (0%) | | | |
| Query: | 10 | INNLDLYYGEFHALKDVNLDIEEKEITAFIGPSGCGKSTLLKSINRMNDLVKNCKITGDI | 69 |
| | | + +LDL+YG+F ALK++++ + E++ITA IGPSGCGKST LK++NRMNDLV +C I G + | |
| Sbjct: | 6 | VRHLDLFYGDFQALKNISIQLPERQITALIGPSGCGKSTFLKTLNRMNDLVPSCHIEGQV | 65 |
| Query: | 70 | TLEGEDVYR-QLDINQLRKKVGMVFQKPNPFPMSIYDNVAFGPRTHGIHSKAELDDIVER | 128 |
| | | L+ +D+Y + ++NQLRK+VGMVFQ+PNPF MSIYDNVA+GPRTHGI K +LD +VE+ | |
| Sbjct: | 66 | LLDEQDIYSSKFNLNQLRKRVGMVFQQPNPFAMSIYDNVAYGPRTHGIRDKKQLDALVEK | 125 |
| Query: | 129 | SLKQAALWDEVKDRLHKSALGMSGGQQQRLCIARALAIEPDVLLMDEPTSALDPISTAKI | 188 |
| | | SLK AA+W+EVKD L KSA+ +SGGQQQRLCIARALA+EPD+LLMDEPTSALDPIST KI | |
| Sbjct: | 126 | SLKGAAIWEEVKDDLKKSAMSLSGGQQQRLCIARALAVEPDILLMDEPTSALDPISTLKI | 185 |
| Query: | 189 | EELVIQLKKNYTIVIVTHNMQQAVRISDKTAFFLMGEVVEYNKTSQLFSLPQDERTENYI | 248 |
| | | E+L+ QLKK+YTI+IVTHNMQQA RISDKTAFFL GE+ E+ T +F+ P+D+RTE+YI | |
| Sbjct: | 186 | EDLIQQLKKDYTIIIVTHNMQQASRISDKTAFFLTGEICEFGDTVDVFTNPKDQRTEDYI | 245 |
| Query: | 249 | TGRFG | 253 |
| | | +GRFG | |
| Sbjct: | 246 | SGRFG | 250 |

[3162] There is also homology to SEQ ID 1682.

[3163] Based on this analysis, it was predicted that these proteins and their epitopes could be useful antigens for vaccines or diagnostics.

### EXAMPLE 527

[3164] A DNA sequence (GBSx0565) was identified in S. agalactiae <SEQ ID 1683> which encodes the amino acid sequence <SEQ ID 1684>. This protein is predicted to be transmembrane protein PstA (pstA-2). Analysis of this protein sequence reveals the following:

| Possible site: 38 | | | | |
|---|---|---|---|---|
| >>> Seems to have a cleavable N-term signal seq. | | | | |
| | INTEGRAL | Likelihood = −13.11 | Transmembrane | 265-281 (255-286) |
| | INTEGRAL | Likelihood = −8.81 | Transmembrane | 79-95 (68-100) |
| | INTEGRAL | Likelihood = −4.78 | Transmembrane | 195-211 (192-213) |
| | INTEGRAL | Likelihood = −4.67 | Transmembrane | 147-163 (143-164) |
| | INTEGRAL | Likelihood = −2.92 | Transmembrane | 122-138 (120-138) |
| | INTEGRAL | Likelihood = −0.90 | Transmembrane | 40-56 (39-56) |

```
----- Final Results -----
                              bacterial membrane --- Certainty = 0.6243(Affirmative) < succ>
                                bacterial outside --- Certainty = 0.0000(Not Clear) < succ>
                            bacterial cytoplasm --- Certainty = 0.0000(Not Clear) < succ>
```

[3165] The protein has homology with the following sequences in the GENPEPT database:

| >GP: AAD22040 GB: AF118229 transmembrane protein PstA [Streptococcus pneumoniae] | | | |
|---|---|---|---|
| Identities = 135/263 (51%), Positives = 203/263 (76%) | | | |
| Query: | 23 | FFLFAIVYLGAILSFATIAFVVIYILVKGLPHVNTGLFAWTYNTQNVSLLPAFINTIFII | 82 |
| | | + L +VY + L+F ++ ++ +IL+KGLPH++ LF+WTY ++N+SL+PA I+T+ ++ | |
| Sbjct: | 4 | YLLKLLVYCFSALTFGSLFLIIGFILIKGLPHLSLSLFSWTYTSENISLMPAIISTVILV | 63 |
| Query: | 83 | ALTLLFAVPLGIGGSIYLTEYARRDNPYLKIIRVATETLAGIPSIIYGLFGALFFVKYTH | 142 |
| | | LL A+P+GI YL EY ++D+ +KI+R+A++TL+GIPSI++GLFG LFFV + | |
| Sbjct: | 64 | FGALLLALPIGIFAGFYLVEYTKKDSLCVKIMRLASDTLSGIPSIVFGLFGMLFFVVFLG | 123 |
| Query: | 143 | LGLSLISGSLTLSIMILPLIMRTTEEALLSVPDSYREGAFALGAGKLRTIFKIVLPSAMS | 202 |
| | | SL+SG LT IM+LP+I+R+TEEALLSV DS R+ ++ LGAGKLRT+F+IVLP AM | |
| Sbjct: | 124 | FQYSLLSGILTSVIMVLPVIIRSTEEALLSVSDSMRQASYGLGAGKLRTVFRIVLPVAMP | 183 |
| Query: | 203 | GIFAGIILAVGRIIGESAALIFTAGTVAKVAHSVFSSSRTLAVHMYAISGEGLYVDQTYA | 262 |
| | | GI AG+ILA+GRI+GE+AAL++T GT S+ SS R+LA+HMY +S EGL+V++ YA | |
| Sbjct: | 184 | GILAGVILAIGRIVGETAALMYTLGTSTNTPSSLMSSGRSLALHMYMLSSEGLHVNEAYA | 243 |
| Query: | 263 | TAVILLLLVIIVNFVSGLVAKRL | 285 |
| | | T VIL++ V+++N +S L++++L | |
| Sbjct: | 244 | TGVILIITVLMINTLSSLLSRKL | 266 |

[3166] There is also homology to SEQ ID 1686.

[3167] Based on this analysis, it was predicted that this protein and its epitopes, could be useful antigens for vaccines or diagnostics.

### EXAMPLE 528

[3168] A DNA sequence (GBSx0566) was identified in S. agalactiae <SEQ ID 1687> which encodes the amino acid sequence <SEQ ID 1688>. Analysis of this protein sequence reveals the following:

```
Possible site: 39
>>> Seems to have no N-terminal signal sequence
----- Final Results -----
                            bacterial cytoplasm --- Certainty = 0.2687(Affirmative) < succ>
                              bacterial membrane --- Certainty = 0.0000(Not Clear) < succ>
                                bacterial outside --- Certainty = 0.0000(Not Clear) < succ>
```

[3169] The protein has no significant homology with any sequences in the GENPEPT database.

[3170] No corresponding DNA sequence was identified in S. pyogenes.

[3171] Based on this analysis, it was predicted that this protein and its epitopes, could be useful antigens for vaccines or diagnostics.

### EXAMPLE 529

[3172] A DNA sequence (GBSx0567) was identified in S. agalactiae <SEQ ID 1689> which encodes the amino acid sequence <SEQ ID 1690>. This protein is predicted to be transmembrane protein PstC (pstC-2). Analysis of this protein sequence reveals the following:

| Possible site: 23 | | | | |
|---|---|---|---|---|
| >>> Seems to have a cleavable N-term signal seq. | | | | |
| | INTEGRAL | Likelihood = −10.67 | Transmembrane | 256-272 (251-279) |
| | INTEGRAL | Likelihood = −8.86 | Transmembrane | 141-157 (133-162) |
| | INTEGRAL | Likelihood = −4.99 | Transmembrane | 111-127 (109-132) |
| | INTEGRAL | Likelihood = −4.30 | Transmembrane | 76-92 (72-95) |
| | INTEGRAL | Likelihood = −1.86 | Transmembrane | 25-41 (24-42) |
| | INTEGRAL | Likelihood = −1.33 | Transmembrane | 59-75 (59-75) |
| | INTEGRAL | Likelihood = −0.27 | Transmembrane | 203-219 (202-219) |

```
--- Final Results -----
                              bacterial membrane --- Certainty = 0.5267(Affirmative) < succ>
                                bacterial outside --- Certainty = 0.0000(Not Clear) < succ>
                            bacterial cytoplasm --- Certainty = 0.0000(Not Clear) < succ>
```

[3173] The protein has homology with the following sequences in the GENPEPT database:

| >GP: AAD22039 GB: AF118229 transmembrane protein PstC | | | |
|---|---|---|---|
| [Streptococcus pneumoniae] | | | |
| Identities = 162/266 (60%), Positives = 212/266 (78%), Gaps = 3/266 (1%) | | | |
| Query: | 15 | ITACVSVISAILICLFLFSSGLPAITKIGWGNFIFGKVWHPSN--NIFGIFPMIVGSLYV | 72 |
| | | ++A V+V++ +LIC F+FS+GLP I G+ F+ G W P+N +GI PMIVGSL + | |
| Sbjct: | 1 | MSATVAVVAILLICFFIFSNGLPFIANYGFARFLLGSDWSPTNIPASYGILPMIVGSLLI | 60 |
| Query: | 73 | TAGALLLGGPIGILTAVFMAYFCPENIYKPLKSAINLMAGIPSVVYGFFGLVVIVPMIRQ | 132 |
| | | T GA+++G P GILT+VFM Y+CP+ +Y LKSAINLMA IPS+VYGFFGL ++VP IR | |
| Sbjct: | 61 | TLGAIVIGVPTGILTSVFMVYYCPKPVYGFLKSAINLMAAIPSIVYGFFGLQLLVPWIRS | 120 |
| Query: | 133 | YIGGFGMGVLAASILLGIMILPTIVSISESSLRAVPESYYEGGIALGASHERSVFFAVLP | 192 |
| | | ++G GM VL AS+LLGIMILPTI+S+SES++R VP++YY G +ALGASHERS+F +LP | |
| Sbjct: | 121 | FLGN-GMSVLTASLLLGIMILPTIISLSESAIRTVPKTYYSGSLALGASHERSIFSVILP | 179 |
| Query: | 193 | AAKRGILASVVLGIGRAIGETMAVIMVAGNQAVLPQSLTSGVRTLTTNIVMEMGYSSGLH | 252 |
| | | AA+ GIL++V+LGIGRA+GETMAVI+VAGNQ ++P L SG RTLTTNIV+EM Y+SG H | |
| Sbjct: | 180 | AARSGILSAVILGIGRAVGETMAVILVAGNQPIIPSGLFSGTRTLTTNIVLEMAYASGQH | 239 |
| Query: | 253 | RQALIGTAVVLFIFILMINISFSALQ | 278 |
| | | R+ALI T+ VLF IL+IN F+ L+ | |
| Sbjct: | 240 | REALIATSAVLFFLILLINAYFAYLK | 265 |

[3174] There is also homology to SEQ ID 1692.

[3175] Based on this analysis, it was predicted that this protein and its epitopes, could be useful antigens for vaccines or diagnostics.

### EXAMPLE 530

[3176] A DNA sequence (GBSx0568) was identified in S. agalactiae <SEQ ID 1693> which encodes the amino acid sequence <SEQ ID 1694>. This protein is predicted to be probable hemolysin precursor (pstS). Analysis of this protein sequence reveals the following:

```
Possible site: 34
>>> May be a lipoprotein
----- Final Results -----
                              bacterial membrane --- Certainty = 0.0000(Not Clear) < succ>
                                bacterial outside --- Certainty = 0.0000(Not Clear) < succ>
                            bacterial cytoplasm --- Certainty = 0.0000(Not Clear) < succ>
```

[3177] The protein has homology with the following sequences in the GENPEPT database:

| >GP: AAD22038 GB: AF118229 phosphate binding protein PstS | | | |
|---|---|---|---|
| [Streptococcus pneuxnoniae] | | | |
| Identities = 134/295 (45%), Positives = 185/295 (62%), Gaps = 9/295 (3%) | | | |
| Query: | 1 | MKKHKMLSLLAVSGLMGIGILAGCSNDSSSSSK---GTINIVSREEGSGTRGAFIELFGI | 57 |
| | | MK KML+L A+ GL G G++A C N S++S + GTI ++SRE GSGTRGAF E+ GI | |
| Sbjct: | 1 | MKFKKMLTLAAI-GLSGFGLVA-CGNQSAASKQSASGTIEVISRENGSGTRGAFTEITGI | 58 |
| Query: | 58 | ESKNKKGEKVDHTSDAATVTNSTSVMLTTVSKDPSAIGYSSLGSLNSSVKVLKIDGKNAT | 117 |
| | | K+ +K+D+T+ A + NST +L+ V + +AIGY SLGSL SVK L+IDG A+ | |
| Sbjct: | 59 | LKKDGD-KKIDNTAKTAVIQNSTEGVLSAVQGNANAIGYISLGSLTKSVKALEIDGVKAS | 117 |
| Query: | 118 | VKDIKSGSYKISRPFNIVTKEGKEKEATKDFIDYILSKDGQAVVEKNGYIPL-DNAKAYQ | 176 |
| | | + G Y + RPFNIV K +DFI +I SK GQ VV N +I Y | |
| Sbjct: | 118 | RDTVLDGEYPLQRPFNIVWSSNLSK-LGQDFISFIHSKQGQQVVTDNKFIEAKTETTEYT | 176 |
| Query: | 177 | AKVSSGKVVIAGSSSVTPVMEKIKEAYHKVNAKVDVEIQQSDSSTGITSAIDGSADIGMA | 236 |
| | | ++ SGK+ + GS+SV+ +MEK+ EAY K N +V ++I + SS GIT+ + +ADIGM | |
| Sbjct: | 177 | SQHLSGKLSVVGSTSVSSLMEKLAEAYKKENPEVTIDITSNGSSAGITAVKEKTADIGMV | 236 |
| Query: | 237 | SRELDKTESSKGVKATVIATDGIAVVVNKKNKVNDLSTKQVKDIFTGKTTSWSDL | 291 |
| | | SREL E K + IA DGIAVVVN NK + +S ++ D+F+GK T+W + | |
| Sbjct: | 237 | SREL-TPEEGKSLTHDAIALDGIAVVVNNDNKASQVSMAELADVFSGKLTTWDKI | 290 |

[3178] There is also homology to SEQ ID 1696.

[3179] Based on this analysis, it was predicted that this protein and its epitopes, could be useful antigens for vaccines or diagnostics.

[3180] A related GBS gene <SEQ ID 8597> and protein <SEQ ID 8598> were also identified. Analysis of this protein sequence reveals the following:

```
Lipop: Possible site: 23 Crend: 4
McG: Discrim Score: 7.91
GvH: Signal Score (−7.5): −3.72
          Possible site: 34
>>> May be a lipoprotein
ALOM program count: 0 value: 2.44 threshold: 0.0
      PERIPHERAL Likelihood = 2.44 248
modified ALOM score: −0.99
*** Reasoning Step: 3
----- Final Results -----
                              bacterial membrane --- Certainty = 0.0000(Not Clear) < succ>
                                bacterial outside --- Certainty = 0.0000(Not Clear) < succ>
                            bacterial cytoplasm --- Certainty = 0.0000(Not Clear) < succ>
```

[3181] SEQ ID 1694 (GBS24) was expressed in E. coli as a His-fusion product. SDS-PAGE analysis of total cell extract is shown in FIG. 14 (lane 9; MW 33 kDa).

[3182] GBS24-His was purified as shown in FIG. 194, lane 10.

### EXAMPLE 531

[3183] A DNA sequence (GBSx0569) was identified in S. agalactiae <SEQ ID 1697> which encodes the amino acid sequence <SEQ ID 1698>. Analysis of this protein sequence reveals the following:

```
Possible site: 30
>>> Seems to have no N-terminal signal sequence
----- Final Results -----
                            bacterial cytoplasm --- Certainty = 0.1725(Affirmative) < succ>
                              bacterial membrane --- Certainty = 0.0000(Not Clear) < succ>
                                bacterial outside --- Certainty = 0.0000(Not Clear) < succ>
```

[3184] The protein has no significant homology with any sequences in the GENPEPT database.

[3185] No corresponding DNA sequence was identified in S. pyogenes.

[3186] Based on this analysis, it was predicted that this protein and its epitopes, could be useful antigens for vaccines or diagnostics.

### EXAMPLE 532

[3187] A DNA sequence (GBSx0570) was identified in S. agalactiae <SEQ ID 1699> which encodes the amino acid sequence <SEQ ID 1700>. Analysis of this protein sequence reveals the following:

```
Possible site: 58
>>> Seems to have no N-terminal signal sequence
----- Final Results -----
                            bacterial cytoplasm --- Certainty = 0.2741(Affirmative) < succ>
                              bacterial membrane --- Certainty = 0.0000(Not Clear) < succ>
                                bacterial outside --- Certainty = 0.0000(Not Clear) < succ>
```

[3188] The protein has homology with the following sequences in the GENPEPT database:

| >GP: BAB05069 GB: AP001511 unknown conserved protein | | | |
|---|---|---|---|
| [Bacillus halodurans] | | | |
| Identities = 119/250 (47%), Positives = 149/250 (59%), Gaps = 9/250 (3%) | | | |
| Query: | 1 | MQQYFVNGE--AGAYVTIEDKDTIKHMFNVMRLTEDDQVVLVFDDAIKRLAKVVDSSAHR | 58 |
| | | MQ+YFV E YVTI D +KH+ VMR+T D+ L+ D R + A+ | |
| Sbjct: | 1 | MQRYFVPKEQMTDTYVTITGDD-VKHIIKVMRMTIGDE--LICSDGHGRTVRCEIEKAND | 57 |
| Query: | 59 | FQIL----EELDNNVEMPVQVTIASGFPKGDKLDFVTQKATELGAAAIWGFPADWSVVKW | 114 |
| | | ++L E L N E+P++VTIA PKGDKLD++ QK TELGA A W F A S+VKW | |
| Sbjct: | 58 | SEVLARVIEPLIPNTELPIRVTIAQALPKGDKLDYIVQKGTELGAQAFWPFSASRSIVKW | 117 |
| Query: | 115 | DGKKLAKKEDKLAKIALGAAEQSKRNRLPQVRLFEKKADFQAELAGFDKIFIAYEESAKE | 174 |
| | | D KK KK ++L KIA AAEQS R R+P + + E++GF K +AYEE AKE | |
| Sbjct: | 118 | DEKKGRKKTERLMKIAKEAAEQSYRERIPSIETPLAFSKLLQEISGFTKTIVAYEEEAKE | 177 |
| Query: | 175 | GELSALAQNLQTVKAGDKLLFIFGPEGGISPKEIAAFEEVGAIKVGLGPRIMRTETAPLY | 234 |
| | | G L A L + GD LL I GPEGG + +EI A + G GLGPRI+RTETA LY | |
| Sbjct: | 178 | GRLMTFAACLNELHHGDSLLVIIGPEGGFTTEEIDAIQRAGGAPAGLGPRILRTETASLY | 237 |
| Query: | 235 | ALSVISYSAE | 244 |
| | | AL+ ISY E | |
| Sbjct: | 238 | ALAAISYHFE | 247 |

[3189] A related DNA sequence was identified in S. pyogenes <SEQ ID 1701> which encodes the amino acid sequence <SEQ ID 1702>. Analysis of this protein sequence reveals the following:

```
Possible site: 56
>>> Seems to have no N-terminal signal sequence
----- Final Results -----
                            bacterial cytoplasm --- Certainty = 0.2274(Affirmative) < succ>
                              bacterial membrane --- Certainty = 0.0000(Not Clear) < succ>
                                bacterial outside --- Certainty = 0.0000(Not Clear) < succ>
```

[3190] An alignment of the GAS and GBS proteins is shown below:

| Identities = 173/245 (70%), Positives = 202/245 (81%) | | | |
|---|---|---|---|
| Query: | 1 | MQQYFVNGEAGAYVTIEDKDTIKHMFNVMRLTEDDQVVLVFDDAIKRLAKVVDSSAHRFQ | 60 |
| | | MQQYF+ G+A VTI DKDTIKHMF VMRL ++ +VVLVFDD +K LAKV +S AN + | |
| Sbjct: | 1 | NQQYFIKGKAEKKVTITDKDTIKHMFQVMRLADEAEVVLVFDDGVKYLAKVTNSMAHELE | 60 |
| Query: | 61 | ILEELDNNVEMPVQVTIASGFPKGDKLDFVTQKATELGAAAIWGFPADWSVVKWDGKKLA | 120 |
| | | I+E L + VE+PV+VTIASGFPKGDKLD + QK TELGA+A+WG+PADWSVVKWDGKKLA | |
| Sbjct: | 61 | IIEALPDQVELPVKVTIASGFPKGDKLDTIAQKVTELGASALWGYPADWSVVKWDGKKLA | 120 |
| Query: | 121 | KKEDKLAKIALGAAEQSKRNRLPQVRLFEKKADFQAELAGFDKIFIAYEESAKEGELSAL | 180 |
| | | KKEDKLAKI LGAAEQSKRNR+P+V LFE KA+F L+ FD IFIAYEE+AK G+L+ L | |
| Sbjct: | 121 | KKEDKLAKIVLGAAEQSKRNRVPEVHLFEHKAEFLKSLSSFDHIFIAYEETAKAGQLATL | 180 |
| Query: | 181 | AQNLQTVKAGDKLLFIFGPEGGISPKEIAAFEEVGAIKVGLGPRIMRTETAPLYALSVIS | 240 |
| | | A+ ++ VK G K+LFIFGPEGGISP EI FE AIKVGLGPRIMR ETAPLYALS +S | |
| Sbjct: | 181 | AREVKEVKPGAKILFIFGPEGGISPTEITQFEAASAIKVGLGPRIMRAETAPLYALSALS | 240 |
| Query: | 241 | YSAEL | 245 |
| | | Y+ EL | |
| Sbjct: | 241 | YALEL | 245 |

[3191] Based on this analysis, it was predicted that these proteins and their epitopes could be useful antigens for vaccines or diagnostics.

### EXAMPLE 533

[3192] A DNA sequence (GBSx0571) was identified in S. agalactiae <SEQ ID 1703> which encodes the amino acid sequence <SEQ ID 1704>. Analysis of this protein sequence reveals the following:

| Possible site: 34 | | | | |
|---|---|---|---|---|
| >>> Seems to have no N-terminal signal sequence | | | | |
| | INTEGRAL | Likelihood = −2.28 | Transmembrane | 238-254 (237-254) |

```
----- Final Results -----
                              bacterial membrane --- Certainty = 0.1914(Affirmative) < succ>
                                bacterial outside --- Certainty = 0.0000(Not Clear) < succ>
                            bacterial cytoplasm --- Certainty = 0.0000(Not Clear) < succ>
```

[3193] The protein has homology with the following sequences in the GENPEPT database:

| >GP: BAA82791 GB: AB023064 orf35 [Listeria monocytogenes] | | | |
|---|---|---|---|
| Identities = 138/309 (44%), Positives = 193/309 (61%), Gaps = 5/309 (1%) | | | |
| Query: | 4 | WNELTVHVNREAEEAVSNLLIETGSQGVAISDSADYLGQ-EDRFGELYP---EVEQSDMI | 59 |
| | | W+E+ VH EA E V+N+L E G+ GV+I D AD+L + ED+FGE+Y E D + | |
| Sbjct: | 3 | WSEVEVHTTNEAVEPVANVLTEFGAAGVSIEDVADFLREREDKFGEIYALRREDYPEDGV | 62 |
| Query: | 60 | AITAYYPDTLDIEAVKADLADRLANFEGFGLATGSVNLDSQELVEEDWADNWKKYYEPAR | 119 |
| | | I AY+ T + ++ L N F + G ++ +E+WA WKKYY P + | |
| Sbjct: | 63 | IIKAYFLKTTEFVEQIPEIEQTLKNLSTFDIPLGKFQFVVNDVDDEEWATAWKKYYHPVQ | 122 |
| Query: | 120 | ITHDLTIVPSWTDYEAKAGEKIIKMDPGMAFGTGTHPTTKMSLFALEQVLRGGETVIDVG | 179 |
| | | IT +TIVPSW Y A E II++DPGMAFGTGTHPTT++ + AL L+ G+ VIDVG | |
| Sbjct: | 123 | ITDRITIVPSWESYTPSANEIIIELDPGMAFGTGTHPTTQLCIRALSNYLQPGDEVIDVG | 182 |
| Query: | 180 | TGSGVLSIASSLLGAKDIYAYDLDDVAVRVAQENIDMNPGTENIHVAAGDLLKGVQQ-EV | 238 |
| | | TGSGVLSIAS+ LGAK I A DLD++A R A+ENI +N I V +LL+ + + V | |
| Sbjct: | 183 | TGSGVLSIASAKLGAKSILATDLDEIATRAAEENITLNKTEHIITVKQNNLLQDINKTNV | 242 |
| Query: | 239 | DVIVANILADILIHLTDDAYRLVKDEGYLIMSGIISEKWDMVRESAEKAGFFLETHMVQG | 298 |
| | | D++VANILA++++ +D Y+ +K G I SGII +K +V E+ + AG +E QG | |
| Sbjct: | 243 | DIVVANILAEVILLFPEDVYKALKPGGVFIASGIIEDKAKVVEEALKNAGLIIEKMEQQG | 302 |
| Query: | 299 | EWNACVFKK | 307 |
| | | +W A + K+ | |
| Sbjct: | 303 | DWVAIISKR | 311 |

[3194] A related DNA sequence was identified in S. pyogenes <SEQ ID 1705> which encodes the amino acid sequence <SEQ ID 1706>. Analysis of this protein sequence reveals the following:

| Possible site: 34 | | | | |
|---|---|---|---|---|
| >>> Seems to have no N-terminal signal sequence | | | | |
| | INTEGRAL | Likelihood = −4.57 | Transmembrane | 238-254 (237-257) |

```
----- Final Results -----
                              bacterial membrane --- Certainty = 0.2826(Affirmative) < succ>
                                bacterial outside --- Certainty = 0.0000(Not Clear) < succ>
                            bacterial cytoplasm --- Certainty = 0.0000(Not Clear) < succ>
```

[3195] The protein has homology with the following sequences in the databases:

| >GP: BAA82791 GB: AB023064 orf35 [Listeria monocytogenes] | | | |
|---|---|---|---|
| Identities = 139/309 (44%), Positives = 203/309 (64%), Gaps = 5/309 (1%) | | | |
| Query: | 4 | WQEVTVHVHRDAQEAVSHVLIETGSQGVAIADSADYIGQK-DRFGELYP---DVEQSDMI | 59 |
| | | W EV VH +A E V++VL E G+ GV+I D AD++ ++ D+FGE+Y + D + | |
| Sbjct: | 3 | WSEVEVHTTNEAVEPVANVLTEFGAAGVSISDVADFLREREDKFGEIYALRREDYPEDGV | 62 |
| Query: | 60 | AITAYYPSSTNLADIIATINEQLAELASFGLQVGQVTVDSQELAEEDWADNWKKYYEPAR | 119 |
| | | I AY+ +T + I I + L L++F + +G+ ++ + E+WA WKKYY P+ | |
| Sbjct: | 63 | IIKAYFLKTTEFVEQIPEIEQTLKNLSTFDIPLGKFQFVVNDVDDEEWATAWKKYYHPVQ | 122 |
| Query: | 120 | ITHDLTIVPSWTDYDASAGEKVIKLDPGMAFGTGTHPTTKMSLFALEQILRGGETVIDVG | 179 |
| | | IT +TIVPSW Y SA E +I+LDPGMAFGTGTHPTT++ + AL L+ G+ VIDVG | |
| Sbjct: | 123 | ITDRITIVPSWESYTPSANEIIIELDPGMAFGTGTHPTTQLCIRALSNYLQPGDEVIDVG | 182 |
| Query: | 180 | TGSGVLSIASSLLGAKTIYAYDLDDVAVRVAQDNIDLNQGTDNIHVAAGDLLKGVSQ-EA | 238 |
| | | TGSGVLSIAS+ LGAK+I A DLD++A R A++NI LN+ I V +LL+ +++ | |
| Sbjct: | 183 | TGSGVLSIASAKLGAKSILATDLDEIATRAAEENITLNKTEHIITVKQNNLLQDINKTNV | 242 |
| Query: | 239 | DVIVANILADILVLLTDDAYRLVKKEGYLILSGIISEKLDMVLEAAFSAGFFLETHMVQG | 298 |
| | | D++VANILA++++L +D Y+ +K G I SGII +K +V EA +AG +E QG | |
| Sbjct: | 243 | DIVVANILAEVILLFPEDVYKALKPGGVFIASGIIEDKAKVVEEALKNAGLIIEKMEQQG | 302 |
| Query: | 299 | EWNALVFKK | 307 |
| | | +W A++ K+ | |
| Sbjct: | 303 | DWVAIISKR | 311 |

[3196] An alignment of the GAS and GBS proteins is shown below:

| Identities = 259/317 (81%), Positives = 287/317 (89%) | | | |
|---|---|---|---|
| Query: | 1 | MNTWNELTVHVNREAEEAVSNLLIETGSQGVAISDSADYLGQEDRFGELYPEVEQSDMIA | 60 |
| | | M TW E+TVHV+R+A+EAVS++LIETGSQGVAI+DSADY+GQ+DRFGELYP+VEQSDMIA | |
| Sbjct: | 1 | METWQEVTVHVHRDAQEAVSHVLIETGSQGVAIADSADYIGQKDRFGELYPDVEQSDMIA | 60 |
| Query: | 61 | ITAYYPDTLDIEAVKADLADRLANFEGFGLATGSVNLDSQELVEEDWADNWKKYYEPARI | 120 |
| | | ITAYYP + ++ + A + ++LA FGL G V +DSQEL EEDWADNWKKYYEPARI | |
| Sbjct: | 61 | ITAYYPSSTNLADIIATINEQLAELASFGLQVGQVTVDSQELAEEDWADNWKKYYEPARI | 120 |
| Query: | 121 | THDLTIVPSWTDYEAKAGEKIIKMDPGMAFGTGTHPTTKMSLFALEQVLRGGETVIDVGT | 180 |
| | | THDLTIVPSWTDY+A AGEK+IK+DPGMAFGTGTHPTTKMSLFALEQ+LRGGETVIDVGT | |
| Sbjct: | 121 | THDLTIVPSWTDYDASAGEKVIKLDPGMAFGTGTHPTTKMSLFALEQILRGGETVIDVGT | 180 |
| Query: | 181 | GSGVLSIASSLLGAKDIYAYDLDDVAVRVAQENIDMNPGTENIHVAAGDLLKGVQQEVDV | 240 |
| | | GSGVLSIASSLLGAK IYAYDLDDVAVRVAQ+NID+N GT+NIHVAAGDLLKGV QE DV | |
| Sbjct: | 181 | GSGVLSIASSLLGAKTIYAYDLDDVAVRVAQDNIDLNQGTDNIHVAAGDLLKGVSQEADV | 240 |
| Query: | 241 | IVANILADILIHLTDDAYRLVKDEGYLIMSGIISEKWDMVRESAEKAGFFLETHMVQGEW | 300 |
| | | IVANILADIL+ LTDDAYRLVK EGYLI+SGIISEK DMV E+A AGFFLETHMVQGEW | |
| Sbjct: | 241 | IVANILADILVLLTDDAYRLVKKEGYLILSGIISEKLDMVLEAAFSAGFFLETHMVQGEW | 300 |
| Query: | 301 | NACVFKKTDDISGVIGG | 317 |
| | | NA VFKKTDDISGVIGG | |
| Sbjct: | 301 | NALVFKKTDDISGVIGG | 317 |

[3197] Based on this analysis, it was predicted that these proteins and their epitopes could be useful antigens for vaccines or diagnostics.

### EXAMPLE 534

[3198] A DNA sequence (GBSx0572) was identified in S. agalactiae <SEQ ID 1707> which encodes the amino acid sequence <SEQ ID 1708>. Analysis of this protein sequence reveals the following:

```
Possible site: 61
>>> Seems to have no N-terminal signal sequence
----- Final Results -----
                            bacterial cytoplasm --- Certainty = 0.4198(Affirmative) < succ>
                              bacterial membrane --- Certainty = 0.0000(Not Clear) < succ>
                                bacterial outside --- Certainty = 0.0000(Not Clear) < succ>
```

[3199] The protein has no significant homology with any sequences in the GENPEPT database.

[3200] No corresponding DNA sequence was identified in S. pyogenes.

[3201] Based on this analysis, it was predicted that this protein and its epitopes, could be useful antigens for vaccines or diagnostics.

### EXAMPLE 535

[3202] A DNA sequence (GBSx0573) was identified in S. agalactiae <SEQ ID 1709> which encodes the amino acid sequence <SEQ ID 1710>. This protein is predicted to be transcriptional activator tipa. Analysis of this protein sequence reveals the following:

```
Possible site: 33
>>> Seems to have no N-terminal signal sequence
----- Final Results -----
                            bacterial cytoplasm --- Certainty = 0.0683(Affirmative) < succ>
                              bacterial membrane --- Certainty = 0.0000(Not Clear) < succ>
                                bacterial outside --- Certainty = 0.0000(Not Clear) < succ>
```

[3203] The protein has homology with the following sequences in the GENPEPT database:

| >GP: CAB15677 GB: Z99122 transcriptional regulator [Bacillus subtilis] | | | |
|---|---|---|---|
| Identities = 87/246 (35%), Positives = 139/246 (56%), Gaps = 13/246 (5%) | | | |
| Query: | 4 | VKEVSILSGVSVRTLHHYDKIGLFPPTALSEAGYRLYDDEALIRLQEILLFRELEFPLKD | 63 |
| | | VK+V+ +SGVS+RTLHHYD I L P+AL++AGYRLY D L RLQ+IL F+E+ F L + | |
| Sbjct: | 5 | VKQVAEISGVSIRTLHHYDNIELLNPSALTDAGYRLYSDADLERLQQILFFKEIGFRLDE | 64 |
| Query: | 64 | IKYLLEQAKEERQDLLAQQIKLLEWKRSHLEQVITHAKR--LQEKGDDYMN----FDVYN | 117 |
| | | IK +L+ +R+ L Q ++L K+ ++++I R L G + MN F + | |
| Sbjct: | 65 | IKEMLDHPNFDRKAALQSQKEILMKKKQRMDEMIQTIDRTLLSVDGGETMNKRDLFAGLS | 124 |
| Query: | 118 | KTELEQLQA----EAKEKWGQTAA--YKEFAQKHASDDFAQISQEMAKIMVQFGQLKTQN | 171 |
| | | ++E+ Q E ++ +G+ A ++ +++DD+ I E I + | |
| Sbjct: | 125 | MKDIEEHQQTYADEVRKLYGKEIAEETEKRTSAYSADDWRTIMAEFDSIYRRIAARMKHG | 184 |
| Query: | 172 | VSDESVQMCVKRLQDYISQNFYTCTNEILAGLGQMYQSDDRFSQSIDKAGGAGTSEFVSQ | 231 |
| | | D +Q V +D+I Q Y CT +I GLG++Y +D+RF+ SI++ G G + F+ + | |
| Sbjct: | 185 | PDDAEIQAAVGAFRDHICQYHYDCTLDIFRGLGEVYITDERFTDSINQY-GEGLAAFLRE | 243 |
| Query: | 232 | AIAYYC | 237 |
| | | AI YC | |
| Sbjct: | 244 | AIIIYC | 249 |

[3204] A related DNA sequence was identified in S. pyogenes <SEQ ID 1711> which encodes the amino acid sequence <SEQ ID 1712>. Analysis of this protein sequence reveals the following:

| Possible site: 48 | | | | |
|---|---|---|---|---|
| >>> Seems to have no N-terminal signal sequence | | | | |
| | INTEGRAL | Likelihood = −8.28 | Transmembrane | 146-162 (143-167) |
| | INTEGRAL | Likelihood = −2.92 | Transmembrane | 172-188 (171-190) |

```
----- Final Results -----
                              bacterial membrane --- Certainty = 0.4312(Affirmative) < succ>
                                bacterial outside --- Certainty = 0.0000(Not Clear) < succ>
                            bacterial cytoplasm --- Certainty = 0.0000(Not Clear) < succ>
```

[3205] The protein has homology with the following sequences in the databases:

| >GP: CAB15677 GB: Z99122 transcriptional regulator [Bacillus subtilis] | | | |
|---|---|---|---|
| Identities = 40/107 (37%), Positives = 69/107 (64%), Gaps = 6/107 (5%) | | | |
| Query: | 7 | YSTGELANLAGVSIRTVQYYDQRGILIPTALTAGGRRLYTDSDLEQLRMICFLRDLGFSI | 66 |
| | | Y ++A ++GVSIRT+ +YD +L P+ALT G RLY+D+DLE+L+ I F +++GF + | |
| Sbjct: | 3 | YQVKQVAEISGVSIRTLHHYDNIELLNPSALTDAGYRLYSDADLERLQQILFFKEIGFRL | 62 |
| Query: | 67 | EQIRKVLAEENAAQVLELLLVDHIATAKEDLAAKEQQVDIAVKILDR | 113 |
| | | ++I+++L N + L + KE L K+Q++D ++ +DR | |
| Sbjct: | 63 | DEIKEMLDHPNFDRKAAL------QSQKEILMKKKQRMDEMIQTIDR | 103 |

[3206] An alignment of the GAS and GBS proteins is shown below:

| Identities = 40/133 (30%), Positives = 71/133 (53%), | | | |
|---|---|---|---|
| Gaps = 6/133 (4%) | | | |
| Query: | 6 | EVSILSGVSVRTLHHYDKIGLFPPTALSEAGYRLYDDEALIRLQEILLFRELEFPLKDIK | 65 |
| | | E++ L+GVS+RT+ +YD+ G+ PTAL+ G RLY D L +L+ I R+L F ++ I+ | |
| Sbjct: | 11 | ELANLAGVSIRTVQYYDQRGILIPTALTAGGRRLYTDSDLEQLRMICFLRDLGFSIEQIR | 70 |
| Query: | 66 | YLL--EQAKEERQDLLAQQIKL----LEWKRSHLEQVITHAKRLQEKGDDYMNFDVYNKT | 119 |
| | | +L E A + + LL I L K ++ + RL+++ ++F + | |
| Sbjct: | 71 | KVLAEENAAQVLELLLVDHIATAKEDLAAKEQQVDIAVKILDRLRKQDPQSLDFLMDISL | 130 |
| Query: | 120 | ELEQLQAEAKEKW | 132 |
| | | ++ +A K +W | |
| Sbjct: | 131 | SMKNQKAWKKLQW | 143 |

[3207] Based on this analysis, it was predicted that these proteins and their epitopes could be useful antigens for vaccines or diagnostics.

### EXAMPLE 536

[3208] A DNA sequence (GBSx0575) was identified in S. agalactiae <SEQ ID 1713> which encodes the amino acid sequence <SEQ ID 1714>. Analysis of this protein sequence reveals the following:

| Possible site: 24 | | | | |
|---|---|---|---|---|
| >>> Seems to have no N-terminal signal sequence | | | | |
| | INTEGRAL | Likelihood = −0.06 | Transmembrane | 57-73 (57-73) |

```
----- Final Results -----
                              bacterial membrane --- Certainty = 0.1022(Affirmative) < succ>
                                bacterial outside --- Certainty = 0.0000(Not Clear) < succ>
                            bacterial cytoplasm --- Certainty = 0.0000(Not Clear) < succ>
```

[3209] The protein has homology with the following sequences in the GENPEPT database:

| >GP: CAB14586 GB: Z99117 yrkN [Bacillus subtilis] | | | |
|---|---|---|---|
| Identities = 38/136 (27%), Positives = 60/136 (43%), | | | |
| Gaps = 3/136 (2%) | | | |
| Query: | 2 | ITLQKAEASDLEKIIA-IQRASFKAVYEKYHDQYDPYVEEVEQIRWKLVERPDCFYHFVL | 60 |
| | | + L+ A+ SDL + +Q A AV E + D D + ++ + P + +L | |
| Sbjct: | 9 | VILELAKESDLPEFQKKLQEAFAIAVIETFGDCEDGPIPSDNDVQ-ESFNAPGAVVYHIL | 67 |
| Query: | 61 | VDETIVGFLRLVIKDEEKRAWLGTAAILPQYQGQGYGSAAMALLEKTYPKLTKWDLCTIA | 120 |
| | | D VG + I + L + P+Y QG G +A +E YP W+ T | |
| Sbjct: | 68 | QDGKNVGGAVVRINSQTNHNSLDLFYVSPEYHSQGIGLSAWKAIEAQYPDTVLWETVTPY | 127 |
| Query: | 121 | QEKLMVSFY-EKCGYH | 135 |
| | | EK ++FY KCG+H | |
| Sbjct: | 128 | FEKRNINFYVNKCGFH | 143 |

[3210] No corresponding DNA sequence was identified in S. pyogenes.

[3211] Based on this analysis, it was predicted that this protein and its epitopes, could be useful antigens for vaccines or diagnostics.

### EXAMPLE 537

[3212] A DNA sequence (GBSx0576) was identified in S. agalactiae <SEQ ID 1715> which encodes the amino acid sequence <SEQ ID 1716>. This protein is predicted to be Bacterial mutT protein. Analysis of this protein sequence reveals the following:

```
Possible site: 13
>>> Seems to have no N-terminal signal sequence
----- Final Results -----
                            bacterial cytoplasm --- Certainty = 0.2417(Affirmative) < succ>
                              bacterial membrane --- Certainty = 0.0000(Not Clear) < succ>
                                bacterial outside --- Certainty = 0.0000(Not Clear) < succ>
```

[3213] The protein has homology with the following sequences in the GENPEPT database:

| >GP: AAG06568 GB: AE004742 hypothetical protein | | | |
|---|---|---|---|
| [Pseudomonas aeruginosa] | | | |
| Identities = 57/131 (43%), Positives = 82/131 (62%) | | | |
| Query: | 10 | FSGAKIALFCEGKILTSLRDDFPDLPYAGFWDLPGGGREDNETPLECLFREVDEELSLTL | 69 |
| | | FSGAK+ALF ++ RD+ P +P+ G+WD PGGGRE ETP EC RE++EE S+ L | |
| Sbjct: | 7 | FSGAKLALFYGDHLVVYKRDEKPGIPFPGYWDFPGGGREGLETPAECALRELEEEFSIRL | 66 |
| Query: | 70 | TRNHIDWVKTYRGMLKPDKLSVFMVGHISQKEYDSIVLGDEGQDYKLMSIDEFLSHKKVI | 129 |
| | | I+W + Y + F+V + +E+++I GDEGQ ++LM +D +L+H + | |
| Sbjct: | 67 | EEPRIEWQRQYPSTSGSAPFAYFLVARLEDREFEAIRFGDEGQYWRLMEVDAYLAHAMAV | 126 |
| Query: | 130 | PQLQERLRDYL | 140 |
| | | P LQ RL DYL | |
| Sbjct: | 127 | PYLQSRLGDYL | 137 |

[3214] No corresponding DNA sequence was identified in S. pyogenes.

[3215] Based on this analysis, it was predicted that this protein and its epitopes, could be useful antigens for vaccines or diagnostics.

### EXAMPLE 538

[3216] A DNA sequence (GBSx0577) was identified in S. agalactiae <SEQ ID 1717> which encodes the amino acid sequence <SEQ ID 1718>. Analysis of this protein sequence reveals the following:

```
Possible site: 46
>>> Seems to have no N-terminal signal sequence
----- Final Results -----
                            bacterial cytoplasm --- Certainty = 0.3299(Affirmative) < succ>
                              bacterial membrane --- Certainty = 0.0000(Not Clear) < succ>
                                bacterial outside --- Certainty = 0.0000(Not Clear) < succ>
```

[3217] The protein has no significant homology with any sequences in the GENPEPT database.

[3218] A related DNA sequence was identified in S. pyogenes <SEQ ID 1719> which encodes the amino acid sequence <SEQ ID 1720>. Analysis of this protein sequence reveals the following:

```
Possible site: 41
>>> Seems to have no N-terminal signal sequence
----- Final Results -----
                            bacterial cytoplasm --- Certainty = 0.5527(Affirmative) < succ>
                              bacterial membrane --- Certainty = 0.0000(Not Clear) < succ>
                                bacterial outside --- Certainty = 0.0000(Not Clear) < succ>
```

[3219] An alignment of the GAS and GBS proteins is shown below:

| Identities = 111/156 (71%), Positives = 128/156 (81%) | | | |
|---|---|---|---|
| Query: | 1 | MAKFGFLSVLEEELDKHLQYDFAMDWDKKNHTVEVTFILEAQNSSAIETVDDQGETSSED | 60 |
| | | MA +GFLSVLEEE+DKH QYD+AMDWDKKNH VEVTF+LEAQN AI+T+DD GE + +D | |
| Sbjct: | 1 | MATYGFLSVLEEEMDKHFQYDYAMDWDKKNHAVEVTFVLEAQNKEAIKTIDDSGEVTQDD | 60 |
| Query: | 61 | IVFEDYVLFYNPVKSRFDAEDYLVTIPYEPKKGLSREFLAYFAETLNEVATEGLSDLMDF | 120 |
| | | IVFEDYVLFYNP KS+FDA DYLVTIP++ KKG SREFLAYFA+ LN+VA EG SDLMDF | |
| Sbjct: | 61 | IVFEDYVLFYNPAKSQFDAADYLVTIPFDAKKGFSREFLAYFAQFLNDVAIEGHSDLMDF | 120 |
| Query: | 121 | LTDDSIEEFGLSWDTDAFENGRAELKETEFYPYPRY | 156 |
| | | L DDS +F L W+ AFE G+ L+E YPYPRY | |
| Sbjct: | 121 | LADDSKADFFLEWNAQAFEEGQQGLEEAASYPYPRY | 156 |

[3220] Based on this analysis, it was predicted that these proteins and their epitopes could be useful antigens for vaccines or diagnostics.

### EXAMPLE 539

[3221] A DNA sequence (GBSx0578) was identified in S. agalactiae <SEQ ID 1721> which encodes the amino acid sequence <SEQ ID 1722>. Analysis of this protein sequence reveals the following:

```
Possible site: 26
>>> Seems to have no N-terminal signal sequence
----- Final Results -----
                            bacterial cytoplasm --- Certainty = 0.2846(Affirmative) < succ>
                              bacterial membrane --- Certainty = 0.0000(Not Clear) < succ>
                                bacterial outside --- Certainty = 0.0000(Not Clear) < succ>
```

[3222] The protein has homology with the following sequences in the GENPEPT database:

| >GP: CAB51273 GB: AL096872 putative acetyltransferase [Streptomyces | | | |
|---|---|---|---|
| coelicolor A3(2)] | | | |
| Identities = 35/109 (32%), Positives = 62/109 (56%), Gaps = 1/109 (0%) | | | |
| Query: | 51 | VAEVDDKIAGVLDFGPYYPFPAGKHVATF-GILIAEPYQGQGLGKALLKALLTEAKAQGY | 109 |
| | | VAE+D + G + G P + HV G+ +A +G G+G+AL++A + EA+ +G+ | |
| Sbjct: | 56 | VAELDGAVVGYVRLGFPTPLASNTHVRQIRGLAVAGAARGHGVGRALVRAAVEEARHEGF | 115 |
| Query: | 110 | IKIAMHVMGNNSRAISLYQKYGFTEEARITKAFFIENHYVDALIFAKDL | 158 |
| | | +I + V+G+N+ A LY+ GF E + F ++ YVD ++ + L | |
| Sbjct: | 116 | RRITLRVLGHNTAARGLYESEGFVVEGVQPEEFHLDGRYVDDVLMGQML | 164 |

[3223] A related DNA sequence was identified in S. pyogenes <SEQ ID 1723> which encodes the amino acid sequence <SEQ ID 1724>. Analysis of this protein sequence reveals the following:

```
Possible site: 18
>>> Seems to have no N-terminal signal sequence
----- Final Results -----
                            bacterial cytoplasm --- Certainty = 0.0229(Affirmative) < succ>
                              bacterial membrane --- Certainty = 0.0000(Not Clear) < succ>
                                bacterial outside --- Certainty = 0.0000(Not Clear) < succ>
```

[3224] An alignment of the GAS and GBS proteins is shown below:

| Identities = 34/108 (31%), Positives = 59/108 (54%), Gaps = 7/108 (6%) | | | |
|---|---|---|---|
| Query: | 35 | TESDLEKNLANGMSFFV-----AEVDDKIAGVLDFGPYYPFPAGKHVATFGILIAEPYQG | 89 |
| | | T +L L+ + F+ A +D+K+ G+L+ G+ A +L+A+ Y+G | |
| Sbjct: | 43 | TPQELSDFLSRSQTSFIDFCLLARLDEKVVGLLNLSGEV-LSQGQAEADVFMLVAKTYRG | 101 |
| Query: | 90 | QGLGKALLKALLTEAKAQGYIK-IAMHVMGNNSRAISLYQKYGFTEEA | 136 |
| | | G+G+ LL+ L A+ YI+ + + V N++AI LY+KYGF E+ | |
| Sbjct: | 102 | YGIGQLLLEIALDWAEENPYIESLKLDVQVRNTKAIYLYKKYGFRIES | 149 |

[3225] Based on this analysis, it was predicted that these proteins and their epitopes could be useful antigens for vaccines or diagnostics.

### EXAMPLE 540

[3226] A DNA sequence (GBSx0579) was identified in S. agalactiae <SEQ ID 1725> which encodes the amino acid sequence <SEQ ID 1726>. Analysis of this protein sequence reveals the following:

```
Possible site: 46
>>> Seems to have no N-terminal signal sequence
----- Final Results -----
                            bacterial cytoplasm --- Certainty = 0.2056(Affirmative) < succ>
                              bacterial membrane --- Certainty = 0.0000(Not Clear) < succ>
                                bacterial outside --- Certainty = 0.0000(Not Clear) < succ>
```

[3227] The protein has homology with the following sequences in the GENPEPT database:

| >GP: CAB14712 GB: Z99118 similar to hypothetical proteins [Bacillus subtilis] | | | |
|---|---|---|---|
| Identities = 248/417 (59%), Positives = 314/417 (74%), Gaps = 4/417 (0%) | | | |
| Query: | 5 | LALRMRPRNINEVIGQQHLVGNGKIIDRMVAANMLSSMILYGPPGIGKTSIASAIAGTTK | 64 |
| | | LA RMRP I ++IGQQHLV KII RMV A LSSMILYGPPGIGKTSIA+AIAG+T | |
| Sbjct: | 4 | LAYRMRPTKIEDIIGQQHLVAEDKIIGRMVQAKHLSSMILYGPPGIGKTSIATAIAGSTS | 63 |
| Query: | 65 | YAFRTFNATVDSKKRLQEIAEEAKFSGGLVLLLDEIHRLDKTKQDFLLPLLENGNIIMIG | 124 |
| | | AFR NA +++KK ++ +A+EAK SG ++L+LDE+HRLDK KQDFLLP LENG II+IG | |
| Sbjct: | 64 | IAFRKLNAVINNKKDMEIVAQEAKMSGQVILILDEVHRLDKGKQDFLLPYLENGMIILIG | 123 |
| Query: | 125 | ATTENPFFSVTPAIRSRVQIFELEPLSNEDIKKAIQLAISDKERGF-PFLVTIDDEALDF | 183 |
| | | ATT NP+ ++ PAIRSR QIFELEPL+ E IK+A++ A+ D+ RG + V+IDD+A++ | |
| Sbjct: | 124 | ATTANPYHAINPAIRSRTQIFELEPLTPELIKQALERALHDEHRGLGTYSVSIDDQAMEH | 183 |
| Query: | 184 | IVTATNGDLRSAYNSLDLAVMSTSPNEDGSRHISLETMENSLQCSYITMDKNGDGHYDIL | 243 |
| | | GD+RSA N+L+LAV+ST + DG HI+LET E LQ + DK+GD HYD+L | |
| Sbjct: | 184 | FAHGCGGDVRSALNALELAVLSTKESADGEIHITLETAEECLQKKSFSHDKDGDAHYDVL | 243 |
| Query: | 244 | SALQKSIRGSDVNASLHYAARLVEAGDLPSLARRLTIIAYEDIGLANPEAQIHTVTALEA | 303 |
| | | SA QKSIRGSD NA+LHY ARL+EAGDL S+ARRL +IAYEDIGLA+P+A + A++ | |
| Sbjct: | 244 | SAFQKSIRGSDANAALHYLARLIEAGDLESIARRLLVIAYEDIGLASPQAGPRVLNAIQT | 303 |
| Query: | 304 | AQRIGFPEARILIANIVVDLALSPKSNSAYLAMDAALADLRRSGNLPIPRHLRDGHYSGS | 363 |
| | | A+R+GFPEART +AN V++L LSPKSNSA LA+D ALAD+R +P+HL+D HY G+ | |
| Sbjct: | 304 | AERVGFPEARIPLANAVIELCLSPKSNSAILAIDEALADIRAGKIGDVPKHLKDAHYKGA | 363 |
| Query: | 364 | KTLGNARDYKYPHAYPEKWVKQQYLPDKLVGHNYFEANETGKYERALGSNKERIDKL | 420 |
| | | + LG DYKYPH Y WV+QQYLPD L Y++ +TGK+E AL K+ DKL | |
| Sbjct: | 364 | QELGRGIDYKYPHNYDNGWVEQQYLPDPLKNKQYYKPKQTGKFESAL---KQVYDKL | 417 |

[3228] A related DNA sequence was identified in S. pyogenes <SEQ ID 1727> which encodes the amino acid sequence <SEQ ID 1728>. Analysis of this protein sequence reveals the following:

```
Possible site: 60
>>> Seems to have no N-terminal signal sequence
----- Final Results -----
                            bacterial cytoplasm --- Certainty = 0.2374(Affirmative) < succ>
                              bacterial membrane --- Certainty = 0.0000(Not Clear) < succ>
                                bacterial outside --- Certainty = 0.0000(Not Clear) < succ>
```

[3229] An alignment of the GAS and GBS proteins is shown below:

| Identities = 394/422 (93%), Positives = 409/422 (96%) | | | |
|---|---|---|---|
| Query: | 1 | MADNLALRMRPRNINEVIGQQHLVGNGKIIDRMVAANMLSSMILYGPPGIGKTSIASAIA | 60 |
| | | M D+LALRMRP+ I+EVIGQ+HLVG GKII RMV AN LSSMILYGPPGIGKTSIASAIA | |
| Sbjct: | 1 | MPDHLALRMRPKTISEVIGQKHLVGEGKIIRRMVEANRLSSMILYGPPGIGKTSIASAIA | 60 |
| Query: | 61 | GTTKYAFRTFNATVDSKKRLQEIAEEAKFSGGLVLLLDEIHRLDKTKQDFLLPLLENGNI | 120 |
| | | GTT+YAFRTFNAT+DSKKRLQEIAEEAKFSGGLVLLLDEIHRLDKTKQDFLLPLLENG I | |
| Sbjct: | 61 | GTTRYAFRTFNATIDSKKRLQEIAEEAKFSGGLVLLLDEIHRLDKTKQDFLLPLLENGTI | 120 |
| Query: | 121 | IMIGATTENPFFSVTPAIRSRVQIFELEPLSNEDIKKAIQLAISDKERGFPFLVTIDDEA | 180 |
| | | IMIGATTENPFFSVTPAIRSRVQIFELEPLSNEDIK AIQLAISDKERGFPFLVTIDDEA | |
| Sbjct: | 121 | IMIGATTENPFFSVTPAIRSRVQIFELEPLSNEDIKTAIQLAISDKERGFPFLVTIDDEA | 180 |
| Query: | 181 | LDFIVTATNGDLRSAYNSLDLAVMSTSPNEDGSRHISLETMENSLQCSYITMDKNGDGHY | 240 |
| | | LDFIVTATNGDLRSAYNSLDLAVMSTSPNEDGSRHISLETMENSLQ SYITMDKNGDGHY | |
| Sbjct: | 181 | LDFIVTATNGDLRSAYNSLDLAVMSTSPNEDGSRHISLETMENSLQRSYITMDKNGDGHY | 240 |
| Query: | 241 | DILSALQKSIRGSDVNASLHYAARLVEAGDLPSLARRLTIIAYEDIGLANPEAQIHTVTA | 300 |
| | | D+LSALQKSIRGSDVNASLHYAARLVEAGDLPSLARRLTIIAYEDIGLANP+AQ+HTVTA | |
| Sbjct: | 241 | DVLSALQKSIRGSDVNASLHYAARLVEAGDLPSLARRLTIIAYEDIGLANPDAQVHTVTA | 300 |
| Query: | 301 | LEAAQRIGFPEARILIANIVVDLALSPKSNSAYLAMDAALADLRRSGNLPIPRHLRDGHY | 360 |
| | | L+AAQRIGFPEARI IAN+V+DLALSPKSNSAYLAMDAALADLR SGNLPIPRHLRDGHY | |
| Sbjct: | 301 | LDAAQRIGFPEARIPIANVVIDLALSPKSNSAYLAMDAALADLRTSGNLPIPRHLRDGHY | 360 |
| Query: | 361 | SGSKTLGNARDYKYPHAYPEKWVKQQYLPDKLVGHNYFEANETGKYERALGSNKERIDKL | 420 |
| | | +GSK LGNA+DY YPHAYPEKWVKQQYLPDKLVGH+YFEANETGKYERALGSNKERIDKL | |
| Sbjct: | 361 | AGSKDLGNAKDYLYPHAYPEKWVKQQYLPDKLVGHHYFEANETGKYERALGSNKERIDKL | 420 |
| Query: | 421 | SD | 422 |
| | | SD | |
| Sbjct: | 421 | SD | 422 |

[3230] Based on this analysis, it was predicted that these proteins and their epitopes could be useful antigens for vaccines or diagnostics.

### EXAMPLE 541

[3231] A DNA sequence (GBSx0580) was identified in S. agalactiae <SEQ ID 1729> which encodes the amino acid sequence <SEQ ID 1730>. Analysis of this protein sequence reveals the following:

```
Possible site: 16
>>> Seems to have no N-terminal signal sequence
----- Final Results -----
                            bacterial cytoplasm --- Certainty = 0.2991(Affirmative) < succ>
                              bacterial membrane --- Certainty = 0.0000(Not Clear) < succ>
                                bacterial outside --- Certainty = 0.0000(Not Clear) < succ>
```

[3232] A related GBS nucleic acid sequence <SEQ ID 10207> which encodes amino acid sequence <SEQ ID 10208> was also identified.

[3233] The protein has no significant homology with any sequences in the GENPEPT database.

[3234] No corresponding DNA sequence was identified in S. pyogenes.

[3235] Based on this analysis, it was predicted that these proteins and their epitopes could be useful antigens for vaccines or diagnostics.

### EXAMPLE 542

[3236] A DNA sequence (GBSx0581) was identified in S. agalactiae <SEQ ID 1731> which encodes the amino acid sequence <SEQ ID 1732>. Analysis of this protein sequence reveals the following:

```
Possible site: 29
>>> Seems to have no N-terminal signal sequence
----- Final Results -----
                            bacterial cytoplasm --- Certainty = 0.2402(Affirmative) < succ>
                              bacterial membrane --- Certainty = 0.0000(Not Clear) < succ>
                                bacterial outside --- Certainty = 0.0000(Not Clear) < succ>
```

[3237] The protein has no significant homology with any sequences in the GENPEPT database.

[3238] No corresponding DNA sequence was identified in S. pyogenes.

[3239] Based on this analysis, it was predicted that this protein and its epitopes, could be useful antigens for vaccines or diagnostics.

### EXAMPLE 543

[3240] A DNA sequence (GBSx0582) was identified in S. agalactiae <SEQ ID 1733> which encodes the amino acid sequence <SEQ ID 1734>. Analysis of this protein sequence reveals the following:

| Possible site: 49 | | | | |
|---|---|---|---|---|
| >>> Seems to have an uncleavable N-term signal seq | | | | |
| | INTEGRAL | Likelihood = −10.40 | Transmembrane | 231-247 (225-250) |
| | INTEGRAL | Likelihood = −9.92 | Transmembrane | 159-175 (151-179) |
| | INTEGRAL | Likelihood = −9.08 | Transmembrane | 21-37 (18-43) |
| | INTEGRAL | Likelihood = −9.08 | Transmembrane | 181-197 (176-201) |
| | INTEGRAL | Likelihood = −3.35 | Transmembrane | 111-127 (110-130) |
| | INTEGRAL | Likelihood = −2.81 | Transmembrane | 74-90 (74-93) |

```
----- Final Results -----
                              bacterial membrane --- Certainty = 0.5161(Affirmative) < succ>
                                bacterial outside --- Certainty = 0.0000(Not Clear) < succ>
                            bacterial cytoplasm --- Certainty = 0.0000(Not Clear) < succ>
```

[3241] The protein has homology with the following sequences in the GENPEPT database:

| >GP: CAB15891 GB: Z99123 yxlG [Bacillus subtilis] | | | |
|---|---|---|---|
| Identities = 54/203 (26%), Positives = 100/203 (48%), Gaps = 7/203 (3%) | | | |
| Query: | 1 | MTGLIPMLKKEWLENSRSHKALALLLISIIFGILGPLTALLMPEIMA--GILPKKLQEAI | 58 |
| | | M ++ +L+KEWLE +S K + L + +I G+ PLT MPEI+A G LP ++ + | |
| Sbjct: | 1 | MKVMMALLQKEWLEGWKSGKLIWLPIAMMIVGLTQPLTIYYMPEIIAHGGNLPDGMKISF | 60 |
| Query: | 59 | PDPTYLDSYSQYFKNINQLGLILLVFLFSGSLTQEFTRGTLINLITKGLSKKAIILAKFI | 118 |
| | | P+ + N LG+ L++F GS+ E +G ++++ ++ I++K++ | |
| Sbjct: | 61 | TMPSGSEVMVSTLSQFNTLGMALVIFSVMGSVANERNQGVTALIMSRPVTAAHYIVSKWL | 120 |
| Query: | 119 | MMTLIWSISYILGSLTQYAYTLYYFNNHGQHKLIV-YGTSWIFGLLLLSLILFYSVIFRK | 177 |
| | | + ++I +S+ G Y Y F + + G ++ + +++ L S IFR | |
| Sbjct: | 121 | IQSVIGIMSFAAGYGLAYYYVRLLFEDASFSRFAASLGLYALWVIFIVTAGLAGSTIFR- | 179 |
| Query: | 178 | TAGVLIAC---LMTIVAFFISGF | 197 |
| | | + G AC L V+F + F | |
| Sbjct: | 180 | SVGAAAACGIGLTAAVSFAVHYF | 202 |

[3242] No corresponding DNA sequence was identified in S. pyogenes.

[3243] Based on this analysis, it was predicted that this protein and its epitopes, could be useful antigens for vaccines or diagnostics.

### EXAMPLE 544

[3244] A DNA sequence (GBSx0583) was identified in S. agalactiae <SEQ ID 1735> which encodes the amino acid sequence <SEQ ID 1736>. This protein is predicted to be ABC transporter, ATP-binding protein. Analysis of this protein sequence reveals the following:

```
Possible site: 61
>>> Seems to have no N-terminal signal sequence
----- Final Results -----
                            bacterial cytoplasm --- Certainty = 0.1344(Affirmative) < succ>
                              bacterial membrane --- Certainty = 0.0000(Not Clear) < succ>
                                bacterial outside --- Certainty = 0.0000(Not Clear) < succ>
```

[3245] The protein has homology with the following sequences in the GENPEPT database:

| >GP: CAB15892 GB: Z99123 similar to ABC transporter (ATP-binding | | | |
|---|---|---|---|
| protein) [Bacillus subtilis] | | | |
| Identities = 116/303 (38%), Positives = 175/303 (57%), Gaps = 18/303 (5%) | | | |
| Query: | 4 | ISLQNLSKSFGDQIILNQVSLELEENKIYGFVGPNGAGKTTTIKMILGLLKVDSGTISVM | 63 |
| | | +S+++L KS+ + VS + EN+ +GPNGAGKTTT++M+ GLL SGTI ++ | |
| Sbjct: | 2 | LSIESLCKSYRHHEAVKNVSFHVNENECVALLGPNGAGKTTTLQMLAGLLSPTSGTIKLL | 61 |
| Query: | 64 | GNPVTFGQTKSNQVIGYLPDVPEFYDYMTAQEYLQLC---AGLAQNKTSLPIADLLEQVG | 120 |
| | | G + ++IGYLP P FY +MTA E+L +GL++ K I ++LE VG | |
| Sbjct: | 62 | GE-----KKLDRRLIGYLPQYPAFYSWMTANEFLTFAGRLSGLSKRKCQEKIGEMLEFVG | 116 |
| Query: | 121 | LADN-QQRISTYSRGMKQRLGLAQALIHNPKILICDEPTSALDPQGRQEILSIISQLRGQ | 179 |
| | | L + +RI YS GMKQRLGLAQAL+H PK LI DEP SALDP GR E+L ++ +L+ | |
| Sbjct: | 117 | LHEAAHKRIGGYSGGMKQRLGLAQALLHKPKFLILDEPVSALDPTGRFEVLDMMRELKKH | 176 |
| Query: | 180 | KTVIFSTHILSDVEKVCDQVLILTKSGIH---NLEDLRDKASASVNQLNLLIKVSDNEAQ | 236 |
| | | V+FSTH+L D E+VCDQV+I+ I L++L+ + +V L++ K+ + | |
| Sbjct: | 177 | MAVLFSTHVLHDAEQVCDQVVIMKNGEISWKGELQELKQQQQTNVFTLSVKEKLEGWLEE | 236 |
| Query: | 237 | KLALRFPLNQKDQYYKVHLELSEANNREQALASFYRYLVEQEITPYFIELLEDSLEDFYL | 296 |
| | | K + + + + EL + + L+ + + +T E +SLED YL | |
| Sbjct: | 237 | KPYVSAIVYKNPS--QAVFELPDIHAGRSLLSD----CIRKGLTVTRFEQKTESLEDVYL | 290 |
| Query: | 297 | EVI | 299 |
| | | +V+ | |
| Sbjct: | 291 | KVV | 293 |

[3246] There is also homology to SEQ ID 686.

[3247] Based on this analysis, it was predicted that this protein and its epitopes, could be useful antigens for vaccines or diagnostics.

### EXAMPLE 545

[3248] A DNA sequence (GBSx0584) was identified in S. agalactiae <SEQ ID 1737> which encodes the amino acid sequence <SEQ ID 1738>. Analysis of this protein sequence reveals the following:

```
Possible site: 32
>>> Seems to have no N-terminal signal sequence
----- Final Results -----
                            bacterial cytoplasm --- Certainty = 0.4383(Affirmative) < succ>
                              bacterial membrane --- Certainty = 0.0000(Not Clear) < succ>
                                bacterial outside --- Certainty = 0.0000(Not Clear) < succ>
```

[3249] The protein has homology with the following sequences in the GENPEPT database:

| >GP: AAB71491 GB: U53767 ORF6 [Bacillus pumilus] | | | |
|---|---|---|---|
| Identities = 25/60 (41%), Positives = 41/60 (67%) | | | |
| Query: | 2 | IGDTILFERTRLGMTQEKLSDYLHLTKATISKWENNQAKPDIDYLILMAKLFDMTLDELV | 61 |
| | | +G I +R L ++QE +++ L +++ ISKWE NQ++P +D LI +A+LFD + ELV | |
| Sbjct: | 4 | LGSNISNKRKSLKLSQEYVAEQLGVSRQAISKWETNQSEPSMDNLIRLAELFDSDIKELV | 63 |

[3250] There is also homology to SEQ ID 1740.

[3251] Based on this analysis, it was predicted that this protein and its epitopes, could be useful antigens for vaccines or diagnostics.

### EXAMPLE 546

[3252] A DNA sequence (GBSx0585) was identified in S. agalactiae <SEQ ID 1741> which encodes the amino acid sequence <SEQ ID 1742>. Analysis of this protein sequence reveals the following:

```
Possible site: 41
>>> Seems to have no N-terminal signal sequence
----- Final Results -----
                            bacterial cytoplasm --- Certainty = 0.4241(Affirmative) < succ>
                              bacterial membrane --- Certainty = 0.0000(Not Clear) < succ>
                                bacterial outside --- Certainty = 0.0000(Not Clear) < succ>
```

[3253] The protein has homology with the following sequences in the GENPEPT database:

| >GP: CAB15470 GB: Z99121 yvdC [Bacillus subtilis] | | | |
|---|---|---|---|
| Identities = 59/104 (56%), Positives = 76/104 (72%) | | | |
| Query: | 1 | MDITAYQKWVSEFYKKRNWYQYNSFIRSNFLCEEVGELAQAIRKYEIGRDRPDEIEKSNN | 60 |
| | | M + +KW+ EFY+KR W +Y FIR FL EE GELA+A+R YEIGRDRPDE E S | |
| Sbjct: | 1 | MQLADAEKWMKEFYEKRGWTEYGPFIRVGFLMEEAGELARAVRAYEIGRDRPDEKESSRA | 60 |
| Query: | 61 | ENLNDIKEELGDVLDNIFILADQYNISLEEIIEAHKNKLEKRFE | 104 |
| | | E ++ EE+GDV+ NI ILAD Y +SLE++++AH+ KL KRFE | |
| Sbjct: | 61 | EQKQELIEEMGDVIGNIAILADMYGVSLEDVMKAHQEKLTKRFE | 104 |

[3254] No corresponding DNA sequence was identified in S. pyogenes.

[3255] Based on this analysis, it was predicted that this protein and its epitopes, could be useful antigens for vaccines or diagnostics.

### EXAMPLE 547

[3256] A DNA sequence (GBSx0586) was identified in S. agalactiae <SEQ ID 1743> which encodes the amino acid sequence <SEQ ID 1744>. Analysis of this protein sequence reveals the following:

```
Possible site: 61
>>> Seems to have no N-terminal signal sequence
----- Final Results -----
                            bacterial cytoplasm --- Certainty = 0.0453(Affirmative) < succ>
                              bacterial membrane --- Certainty = 0.0000(Not Clear) < succ>
                                bacterial outside --- Certainty = 0.0000(Not Clear) < succ>
```

[3257] The protein has homology with the following sequences in the GENPEPT database:

| >GP: BAB06803 GB: AP001517 unknown conserved protein [Bacillus halodurans] | | | |
|---|---|---|---|
| Identities = 87/187 (46%), Positives = 125/187 (66%) | | | |
| Query: | 1 | MKITVFCGASNGNNPIYSQKIVELGEWMIKNNHDLVYGGGKVGLMGVIADTVINNGGQAI | 60 |
| | | MKI VFCG+SNG + +Y + +LG+ + + LVYGG VG+MG +AD+V+ GG+ I | |
| Sbjct: | 1 | MKIAVFCGSSNGASDVYKEGARQLGKELARRGITLVYGGASVGIMGAVADSVLEAGGEVI | 60 |
| Query: | 61 | GVIPTFLKDREIAHTNLSKLIVVENMPQRKGKMMSLGEAYIALPGGPGTLEEISEVISWS | 120 |
| | | GV+P FL++ EI+H +L+KLIVVE M +RK KM L + ++ALPGGPGTLEE E+ +W+ | |
| Sbjct: | 61 | GVMPRFLEEPEISHPHLTKLIVVETMHERKAKMAELADGFLALPGGPGTLEEFFEIFTWA | 120 |
| Query: | 121 | RIGQNDSPCILYNINGYFNHLESMFDHMVSEGFLSQNDRNNVLFSDDIIEIEKFIKDYQS | 180 |
| | | +IG + PC L NIN YF+ L ++ HM +E FL + R+ L D I + Y+ | |
| Sbjct: | 121 | QIGLHQKPCGLLNINHYFDPLVTLLHHMSNEQFLHEKYRSMALVHTDPILLLDQFSTYEP | 180 |
| Query: | 181 | PTIRKYS | 187 |
| | | PT++ YS | |
| Sbjct: | 181 | PTVKAYS | 187 |

[3258] No corresponding DNA sequence was identified in S. pyogenes.

[3259] Based on this analysis, it was predicted that this protein and its epitopes, could be useful antigens for vaccines or diagnostics.

### EXAMPLE 548

[3260] A DNA sequence (GBSx0587) was identified in S. agalactiae <SEQ ID 1745> which encodes the amino acid sequence <SEQ ID 1746>. Analysis of this protein sequence reveals the following:

```
Possible site: 16
>>> Seems to have no N-terminal signal sequence
----- Final Results -----
                            bacterial cytoplasm --- Certainty = 0.5288(Affirmative) < succ>
                              bacterial membrane --- Certainty = 0.0000(Not Clear) < succ>
                                bacterial outside --- Certainty = 0.0000(Not Clear) < succ>
```

[3261] The protein has no significant homology with any sequences in the GENPEPT database.

[3262] No corresponding DNA sequence was identified in S. pyogenes.

[3263] Based on this analysis, it was predicted that this protein and its epitopes, could be useful antigens for vaccines or diagnostics.

### EXAMPLE 549

[3264] A DNA sequence (GBSx0588) was identified in S. agalactiae <SEQ ID 1747> which encodes the amino acid sequence <SEQ ID 1748>. This protein is predicted to be integrase. Analysis of this protein sequence reveals the following:

```
Possible site: 38
>>> Seems to have no N-terminal signal sequence
----- Final Results -----
                            bacterial cytoplasm --- Certainty = 0.3685(Affirmative) < succ>
                              bacterial membrane --- Certainty = 0.0000(Not Clear) < succ>
                                bacterial outside --- Certainty = 0.0000(Not Clear) < succ>
```

[3265] The protein has homology with the following sequences in the GENPEPT database:

| >GP: AAF12706 GB: AF066865 integrase [bacteriophage TPW22] | | | |
|---|---|---|---|
| Identities = 106/377 (28%), Positives = 199/377 (52%), Gaps = 31/377 (8%) | | | |
| Query: | 4 | ARYRRRGNQNLWAYEIREEGKTVAYNS----GFKTKKLAEAEAEPILQKLRTGSIITKNI | 59 |
| | | A +R+RG W + + + Y G+KTKK AEA A+ ++L S +I | |
| Sbjct: | 2 | ANFRKRGKT--WQFRLSYKDNNGEYKKFEKGGYKTKKEAEAAADEAKKRLNNHSEFDNDI | 59 |
| Query: | 60 | SLPELYQEWLDLKIMPSNRSDVTKKKYLSRKVTLEKLFGDKPISQIRPSEYQRIMNNYGQ | 119 |
| | | SL + +++W + P + ++ T + Y ++K DKPI++I P+ YQ ++N | |
| Sbjct: | 60 | SLYDFFEKWAKVYKKP-HVTEATWRTYKRTLNLIDKYIKDKPIAEITPTFYQAVLNKMSL | 118 |
| Query: | 120 | RVSRNFLGRLNTGVKQSLQMAIADKVMIEDFTQNVELFSTVKSQDADSKYLHSEKAYLDL | 179 |
| | | + L + +K ++++A+ +KV+ E+F + S + ++ + KYLH+++ YL L | |
| Sbjct: | 119 | LYRQESLDKFYFQIKSAMKIAVHEKVISENFADFTKAKSKLAARPVEEKYLHADE-YLKL | 177 |
| Query: | 180 | INAVKDKFNYKKSVVPYIIYFLLKTGMRYGELIALTWEDIDFDKGIFKTYRRFN-SETSQ | 238 |
| | | + ++K Y + Y TGMR+ EL+ LTW +DFDK R ++ S T+ | |
| Sbjct: | 178 | LAIAEEKMEYTSY---FACYLTAVTGMRFAELLGLTWSHVDFDKKEISIQRTWDYSITNN | 234 |
| Query: | 239 | FVPPKNKTSIRIVPVDNECLEILKNLKIEQNQSNKELGLQNTNNMVFQHFGYPNSVPSTN | 298 |
| | | F KN++S R +P+ ++ +++LK K KE +N + V + S N | |
| Sbjct: | 235 | FAETKNESSKRKIPISSKTIKLLKKYK-------KEYWHENKYDRVIYNL-------SNN | 280 |
| Query: | 299 | GTNKVLRGIVQELNIEPIITTKGARHTYGSFLWHRGYDLGIIAKILGHKDISMLIEVYGH | 358 |
| | | G NK ++ ++ + P RH++ S+L ++G DL ++K+LGH+++++ ++VY H | |
| Sbjct: | 281 | GLNKTIK-VIAGRKVHP----HSLRHSFASYLIYKGIDLLTVSKLLGHENLNVTLKVYAH | 335 |
| Query: | 359 | TLEEKIQEEYNEIKQLW | 375 |
| | | L+E QE + I++++ | |
| Sbjct: | 336 | QLKEMEQENNDVIRKIF | 352 |

[3266] There is also homology to SEQ ID 578.

[3267] Based on this analysis, it was predicted that this protein and its epitopes, could be useful antigens for vaccines or diagnostics.

### EXAMPLE 550

[3268] A DNA sequence (GBSx0589) was identified in S. agalactiae <SEQ ID 1749> which encodes the amino acid sequence <SEQ ID 1750>. Analysis of this protein sequence reveals the following:

```
Possible site: 54
>>> Seems to have no N-terminal signal sequence
----- Final Results -----
                            bacterial cytoplasm --- Certainty = 0.2710(Affirmative) < succ>
                              bacterial membrane --- Certainty = 0.0000(Not Clear) < succ>
                                bacterial outside --- Certainty = 0.0000(Not Clear) < succ>
```

[3269] The protein has no significant homology with any sequences in the GENPEPT database.

[3270] No corresponding DNA sequence was identified in S. pyogenes.

[3271] Based on this analysis, it was predicted that this protein and its epitopes, could be useful antigens for vaccines or diagnostics.

### EXAMPLE 551

[3272] A DNA sequence (GBSx0590) was identified in S. agalactiae <SEQ ID 1751> which encodes the amino acid sequence <SEQ ID 1752>. Analysis of this protein sequence reveals the following:

```
Possible site: 51
>>> Seems to have no N-terminal signal sequence
----- Final Results -----
                            bacterial cytoplasm --- Certainty = 0.2534(Affirmative) < succ>
                              bacterial membrane --- Certainty = 0.0000(Not Clear) < succ>
                                bacterial outside --- Certainty = 0.0000(Not Clear) < succ>
```

[3273] The protein has homology with the following sequences in the GENPEPT database:

| >GP: BAA06248 GB: D29979 ORF3 [Bacillus stearothermophilus] | | | |
|---|---|---|---|
| Identities = 81/263 (30%), Positives = 135/263 (50%), Gaps = 14/263 (5%) | | | |
| Query: | 65 | MGVHVELKGQGCRQYEEFIEGNDNNWTSLVKRLI-DNNSNFTRLDIANDIFDESLNVQRL | 123 |
| | | MG+HVE+ GQGCR +E NW L RL+ + N TRLD+A D F + L | |
| Sbjct: | 1 | MGIHVEMTGQGCRLFELH---TSINWYELFYRLVYEYEVNITRLDVAVDDFKGYFKINTL | 57 |
| Query: | 124 | YEYSKKGLCITTARHAEYHEKFVIDSGELVGETVVFGARGNQQWCVYNKLMEQNGKLQTD | 183 |
| | | + K + + A + E VI+ GE +G T+ FGA + + + E+N ++ D | |
| Sbjct: | 58 | VKKLKDDEVTSRFKKARHIENIVIEGGETIGHTLYFGAPSSD---IQVRFYEKNVQMGMD | 114 |
| Query: | 184 | IDINSWVRAELRCWQEKANLIAHQL-NDMRPLASIYFEAINGHYRFVSPKARDKNKRRRE | 242 |
| | | ID+ W R E++ ++A+++A + +D+ PL I + + +F + KA DKNK+R | |
| Sbjct: | 115 | IDV--WNRTEIQLRDDRAHVVAQIIADDVLPLGEIVAGLLRNYIQFRTRKATDKNKKRWP | 172 |
| Query: | 243 | SVRWWQNYINTEEKTRLSIVREKPTLRQSEAWTDKQVSKTIAKVYMAKYEAYGIDQAEVF | 302 |
| | | R+W N++ + R++ K ++ + W D QVSK+ +Y E ++ + F | |
| Sbjct: | 173 | LARFWLNFLGDVQPLRIAKQMPKTSIEKKYRWIDSQVSKSFFMIYYCLNE----EEKQRF | 228 |
| Query: | 303 | LQDLLRRGVEKFTDNDEKEIEQY | 325 |
| | | + D+L G K T D + I Q+ | |
| Sbjct: | 229 | IDDVLAEGASKLTKADLQVINQF | 251 |

[3274] No corresponding DNA sequence was identified in S. pyogenes.

[3275] Based on this analysis, it was predicted that this protein and its epitopes, could be useful antigens for vaccines or diagnostics.

### EXAMPLE 552

[3276] A DNA sequence (GBSx0591) was identified in S. agalactiae <SEQ ID 1753> which encodes the amino acid sequence <SEQ ID 1754>. Analysis of this protein sequence reveals the following:

```
Possible site: 13
>>> Seems to have no N-terminal signal sequence
----- Final Results -----
                            bacterial cytoplasm --- Certainty = 0.2700(Affirmative) < succ>
                              bacterial membrane --- Certainty = 0.0000(Not Clear) < succ>
                                bacterial outside --- Certainty = 0.0000(Not Clear) < succ>
```

[3277] The protein has no significant homology with any sequences in the GENPEPT database.

[3278] No corresponding DNA sequence was identified in S. pyogenes.

[3279] Based on this analysis, it was predicted that this protein and its epitopes, could be useful antigens for vaccines or diagnostics.

### EXAMPLE 553

[3280] A DNA sequence (GBSx0592) was identified in S. agalactiae <SEQ ID 1755> which encodes the amino acid sequence <SEQ ID 1756>. Analysis of this protein sequence reveals the following:

```
Possible site: 50
>>> Seems to have no N-terminal signal sequence
----- Final Results -----
                            bacterial cytoplasm --- Certainty = 0.3121(Affirmative) < succ>
                              bacterial membrane --- Certainty = 0.0000(Not Clear) < succ>
                                bacterial outside --- Certainty = 0.0000(Not Clear) < succ>
```

[3281] The protein has no significant homology with any sequences in the GENPEPT database.

[3282] A related DNA sequence was identified in S. pyogenes <SEQ ID 1757> which encodes the amino acid sequence <SEQ ID 1758>. Analysis of this protein sequence reveals the following:

```
Possible site: 24
>>> Seems to have no N-terminal signal sequence
----- Final Results -----
                            bacterial cytoplasm --- Certainty = 0.2913(Affirmative) < succ>
                              bacterial membrane --- Certainty = 0.0000(Not Clear) < succ>
                                bacterial outside --- Certainty = 0.0000(Not Clear) < succ>
```

[3283] An alignment of the GAS and GBS proteins is shown below:

| Identities = 19/52 (36%), Positives = 33/52 (62%) | | | |
|---|---|---|---|
| Query: | 8 | FGPNLTRLRKERGISQVELSNQLQIGKQSISDYEKQKAFPTFANLDKIAEYF | 59 |
| | | F NL L ++ I Q+++ N+L I K +I+ Y K ++ PT N+ K+A++F | |
| Sbjct: | 15 | FSTNLNMLMAKKNIKQIDIHNKLGIPKSTITGYVKGRSLPTAGNVQKLADFF | 66 |

[3284] Based on this analysis, it was predicted that these proteins and their epitopes could be useful antigens for vaccines or diagnostics.

### EXAMPLE 554

[3285] A DNA sequence (GBSx0593) was identified in S. agalactiae <SEQ ID 1759> which encodes the amino acid sequence <SEQ ID 1760>. Analysis of this protein sequence reveals the following:

```
Possible site: 54
>>> Seems to have a cleavable N-term signal seq.
----- Final Results -----
                            bacterial outside --- Certainty = 0.3000(Affirmative) < succ>
                              bacterial membrane --- Certainty = 0.0000(Not Clear) < succ>
                                bacterial cytoplasm --- Certainty = 0.0000(Not Clear) < succ>
```

[3286] The protein has homology with the following sequences in the GENPEPT database:

| >GP:AAA98584 GB:L44593 ORF536; putative [Lactococcus phage BK5-T] | | | |
|---|---|---|---|
| Identities = 248/532 (46%), Positives = 359/532 (66%), Gaps = 16/532 (3%) | | | |
| Query: | 1 | MNFIEQISENNQFPIIFVGSGITQRYFENAPTWEKLLKDIWLELFDEESYYAK--AFELR | 58 |
| | | MNFIE I +NNQFPIIFVGSG+T+RYF+N WE+LL ++W + +E+++Y + FE | |
| Sbjct: | 1 | MNFIENIKDNNQFPIIFVGSGVTKRYFKNGLKWEQLLLELWNLVEEEKAFYTQYHVFENL | 60 |
| Query: | 59 | ERFEN-----NDFDIYTNLASLLEKEVSKAFINGNIQVDNLDLKTAYELNISPFKQLVAN | 113 |
| | | + +N +F+I +A +LE++++ AF + + +DNL L A+ +ISPF+Q +AN | |
| Sbjct: | 61 | LKSKNLSKSDKEFEINLMMAGILEEKINNAFYSDELNIDNLTLAQAHTENISPFRQCIAN | 120 |
| Query: | 114 | RFSNLKIREEKIEEIKQFSQMLSKARIIITTNYDNFIEECLKTINVSVKINVGNKGLFLK | 173 |
| | | FSNL ++ EEI FS+ML KAR I+TTNYDNFIEEC NVS+K+NVGN GLF+K | |
| Sbjct: | 121 | TFSNLDRKKGFDEEIISFSKMLVKARFIVTTNYDNFIEECFSKRNVSIKVNVGNSGLFVK | 180 |
| Query: | 174 | SSDYGELYKIHGTVDDASTITITKEDYEKNVTKSALINAKILSNLVESPILFLGYSLTDE | 233 |
| | | S+DYGELYKIHG+V + +TI IT EDY+N +K AL+NAKILSNL ESPILF+GYSLTD+ | |
| Sbjct: | 181 | SNDYGELYKIHGSVKNPNTICITSEDYKNNESKLALVNAKILSNLTESPILFIGYSLTDK | 240 |
| Query: | 234 | NIRKLLTDFAENSPFDISESAQKIGVVEYLPDSESIETVVSSLPDLSVYYSCLKTDNFTN | 293 |
| | | NIR+LLT ++EN P++ISE+A +IGVVEY PD I+ +VS++PDL ++Y+ +TDN+ | |
| Sbjct: | 241 | NIRELLTSYSENLPYEISEAAARIGVVEYTPDKIEIQDIVSNIPDLGIHYTKISTDNYKK | 300 |
| Query: | 294 | IYRLISKINQGFLPSEIAKYENVFRRIIEVKGESKDLKTVLTSYEDLANLTEDEIRSKNI | 353 |
| | | IY IS+I QG+LPSEIAK+E FRKIIEVKG+ K+L TVLTS+ D++ + +E+++KNI | |
| Sbjct: | 301 | IYDEISQIEQGYLPSEIAKFEGAFRKIIEVKGKEKELDTVLTSFIDISKINTEELKNKNI | 360 |
| Query: | 354 | VVAFGDERYIYKFPDFKEYVRSYFLDKETIPQEIVIRFIATQPVASHLPIKKYMFAMSEY | 413 |
| | | VVAFGD +YIYK P +K+Y+R YF + + I + F+ + +P KK+M + + | |
| Sbjct: | 361 | VVAFGDSKYIYRMPTYKDYIREYFSNSMELDTRIALLFLKKRSANYPVPYKKHMGVIESW | 420 |
| Query: | 414 | --ISKDSNKYTENIKKRLSKEEELSLDDFTSSIGVPLL--HSKTLERQTEIVGILE-ADV | 468 |
| | | I D + E++K R+S E + ++ L + L + + I ++ ++V | |
| Sbjct: | 421 | GSIPNDLVQEVESLKTRISNFPESIVRTYSIKANKDLAKKYLPYLNKTSTIEDVMSLSNV | 480 |
| Query: | 469 | PDNVRYNFIATHIKNFPKEELFLLVEKIID----EGIFETSRRRFLKAFDLL | 516 |
| | | P + FI I F EEL +K ID +GI T R+ + ++ ++ | |
| Sbjct: | 481 | PLYNKLRFILFKIDKFKVEELKDFIVKNIDMGEGKGISSTLYRKIVMSYSII | 532 |

[3287] A related GBS gene <SEQ ID 8599> and protein <SEQ ID 8600> were also identified. Analysis of this protein sequence reveals the following:

```
Lipop: Possible site: −1 Crend: 8
McG: Discrim Score: 1.55
GvH: Signal Score (−7.5): 0.27
Possible site: 54
>>> Seems to have a cleavable N-term signal seq.
ALOM program count: 0 value: 2.44 threshold: 0.0
PERIPHERAL Likelihood = 2.44 214
modified ALON score: −0.99
*** Reasoning Step: 3
----- Final Results -----
                            bacterial outside --- Certainty = 0.3000(Affirmative) < succ>
                          bacterial membrane --- Certainty = 0.0000(Not Clear) < succ>
                        bacterial cytoplasm --- Certainty = 0.0000(Not Clear) < succ>
```

[3288] The protein has homology with the following sequences in the databases:

[chemical structure]

[3289] No corresponding DNA sequence was identified in S. pyogenes.

[3290] SEQ ID 8600 (GBS142) was expressed in E. coli as a His-fusion product. SDS-PAGE analysis of total cell extract is shown in FIG. 18 (lane 5; MW 54 kDa). It was also expressed in E. coli as a GST-fusion product. SDS-PAGE analysis of total cell extract is shown in FIG. 33 (lane 6; MW 79.8 kDa).

[3291] The GBS142-GST fusion product was purified (FIG. 195, lane 3) and used to immunise mice. The resulting antiserum was used for Western blot (FIG. 249). These tests confirm that the protein is immunoaccessible on GBS bacteria.

[3292] Based on this analysis, it was predicted that these proteins and their epitopes could be useful antigens for vaccines or diagnostics.

### EXAMPLE 555

[3293] A DNA sequence (GBSx0594) was identified in S. agalactiae <SEQ ID 1761> which encodes the amino acid sequence <SEQ ID 1762>. This protein is predicted to be integrase. Analysis of this protein sequence reveals the following:

```
Possible site: 37
>>> Seems to have no N-terminal signal sequence
----- Final Results -----
                            bacterial cytoplasm --- Certainty = 0.2933(Affirmative) < succ>
                              bacterial membrane --- Certainty = 0.0000(Not Clear) < succ>
                                bacterial outside --- Certainty = 0.0000(Not Clear) < succ>
```

[3294] The protein has homology with the following sequences in the GENPEPT database:

| <GP: AAA98585 GB: L44593 integrase [Lactococcus phage BK5-T] | | | |
|---|---|---|---|
| Identities = 124/382 (32%), Positives = 202/382 (52%), Gaps = 21/382 (5%) | | | |
| Query: | 1 | MATYRQRGKKKLWDYRIFNEKSELVA-SGSGFKTKREAMNEAMRIE---QQKLLVNSISS | 56 |
| | | MATY++RGK W Y I K L + GF TK +A EAM IE ++ +V+ I | |
| Sbjct: | 1 | MATYQKRGKT--WQYSISRTKQGLPRLTKGGFSTKSDAQAEAMDIESKLKKGFIVDPIKQ | 58 |
| Query: | 57 | DITLYDL-WFEWYSLIIKPSNLAETTKNKYFTRGSVIRKLFGNQKVNKIKHSAYQRKLNT | 115 |
| | | +I+ Y W E Y K + + E T Y ++ N +++I S+YQR LN | |
| Sbjct: | 59 | EISEYFKDWMELY----KKNAIDEMTYKGYEQTLKYLKTYMPNVLISEITASSYQRALNK | 114 |
| Query: | 116 | YAEKYTKNHVRRLNSDIKKAIQFAKRDGVLLSDFTDGVVIAGRKFVKDADDKYLHSIFD- | 174 |
| | | +AE + K + ++ ++ +IQ +G L DFT V+ G K DK+++ FD | |
| Sbjct: | 115 | FAETHAKASTKGFHTRVRASIQPLIEEGRLQKDFTTRAVVKGNGNDKAEQDKFVN--FDE | 172 |
| Query: | 175 | YKKVISYLENNLD--YSNSIVYYLLLVLFKTGLRVGEALALTWDDVNFEDLEIKTYR--R | 230 |
| | | YK+++ Y N L+ YS+ + +++ + TG+R EA L WDD++F + IK R | |
| Sbjct: | 173 | YKQLVDYFRNRLNPNYSSPTMLFIISI---TGMRASEAFGLVWDDIDFNNNTIKCRRTWN | 229 |
| Query: | 231 | FSGDKGTFSPPKTKTSIRTIPISQSLALILRDLKDDQQVMLKNLKIVNMNNQIFYDYRYG | 290 |
| | | + G F PKT IR I I +L+D ++ Q+ + ++L I +++ + Y | |
| Sbjct: | 230 | YRNKVGGFKKPKTDAGIRDIVIDDESMQLLKDFREQQKTLFESLGIKPIHDFVCYHPYRK | 289 |
| Query: | 291 | VSTNSAINKSLKNVLKILNINSKMTATGARHTYGSYLLAKGVDIWVVARLMGHKDITQLL | 350 |
| | | + T SA+ +L + LK LNI++ +T G RHT+ S LL GVDI V++ +GH + | |
| Sbjct: | 290 | IITLSALQNTLDHALKKLNISTPLTIHGLRHTHASVLLYHGVDIMTVSKRLGHASVAITQ | 349 |
| Query: | 351 | ETYGHVLTEVINKEYETVRSLV | 372 |
| | | +TY H++ E+ NK+ + + L+ | |
| Sbjct: | 350 | QTYIHIIKELENKDKDKIIELL | 371 |

[3295] There is also homology to SEQ ID 578.

[3296] Based on this analysis, it was predicted that this protein and its epitopes, could be useful antigens for vaccines or diagnostics.

### EXAMPLE 556

[3297] A DNA sequence (GBSx0595) was identified in S. agalactiae <SEQ ID 1763> which encodes the amino acid sequence <SEQ ID 1764>. Analysis of this protein sequence reveals the following:

```
Possible site: 54
>>> Seems to have no N-terminal signal sequence
----- Final Results -----
                            bacterial cytoplasm --- Certainty = 0.1603(Affirmative) < succ>
                              bacterial membrane --- Certainty = 0.0000(Not Clear) < succ>
                                bacterial outside --- Certainty = 0.0000(Not Clear) < succ>
```

[3298] A related GBS nucleic acid sequence <SEQ ID 10209> which encodes amino acid sequence <SEQ ID 10210> was also identified.

[3299] The protein has homology with the following sequences in the GENPEPT database:

| >GP: BAB07266 GB: AP001519 unknown conserved protein in others | | | |
|---|---|---|---|
| [Bacillus halodurans] | | | |
| Identities = 26/71 (36%), Positives = 39/71 (54%), Gaps = 6/71 (8%) | | | |
| Query: | 37 | WWDIDNLQELLGIGRSKLINDILLNPDIKKEVDLSINPNGFIVYPKGKGSRYKILATK-- | 94 |
| | | WW + +L+E G L +ILL+P K +D I GF+ YP+ KG R+ +A+ | |
| Sbjct: | 4 | WWSMQDLKERTGYSEDWLKENILLHPRYKPMLD--IENGGFVYYPEKKGERWCFIASSME | 61 |
| Query: | 95 | --ARKYFEDNF | 103 |
| | | +KYF+D F | |
| Sbjct: | 62 | EFLKKYFKDIF | 72 |

[3300] No corresponding DNA sequence was identified in S. pyogenes.

[3301] Based on this analysis, it was predicted that these proteins and their epitopes could be useful antigens for vaccines or diagnostics.

### EXAMPLE 557

[3302] A DNA sequence (GBSx0596) was identified in S. agalactiae <SEQ ID 1765> which encodes the amino acid sequence <SEQ ID 1766>. Analysis of this protein sequence reveals the following:

| Possible site: 14 | | | | |
|---|---|---|---|---|
| >>> Seems to have an uncleavable N-term signal seq | | | | |
| | INTEGRAL | Likelihood = −3.88 | Transmembrane | 12-28 (11-29) |

```
----- Final Results -----
                              bacterial membrane --- Certainty = 0.2550(Affirmative) < succ>
                                bacterial outside --- Certainty = 0.0000(Not Clear) < succ>
                            bacterial cytoplasm --- Certainty = 0.0000(Not Clear) < succ>
```

[3303] The protein has homology with the following sequences in the GENPEPT database:

| >GP: AAB99663 GB: U67604 chromosome segretation protein (smc1) | | | |
|---|---|---|---|
| [Methanococcus jannaschii] | | | |
| Identities = 53/210 (25%), Positives = 95/210 (45%), | | | |
| Gaps = 33/210 (15%) | | | |
| Query: | 20 | IFTNVGVLISNSRDNKAIQRELELLEEGQEKLVDEFSKISTNQYDKYV----------LI | 69 |
| | | +F +G+L N + + + + + K++DE S I+ K LI | |
| Sbjct: | 133 | LFRRLGLLGDNVISQGDLLKIINISPIERRKIIDEISGIAEFDEKKKKAEEELKKARELI | 192 |
| Query: | 70 | Q------SNLSNNIEKNKQELVQKNSYVK--EDTKYIRDEMLIEKKSK-----EEVYNHV | 116 |
| | | + S + NN++K K+E Y+K E+ K + ++++K S E + N + | |
| Sbjct: | 193 | EMIDIRISEVENNLKKLKKEKEDAEKYIKLNEELKAAKYALILKKVSYLNVLLENIQNDI | 252 |
| Query: | 117 | KNGDKLIEKMAFANELILKFGEVSRENQMLGLKVNSLEEKIVDLSNQPKNDEISKLRKSI | 176 |
| | | KN ++L NE + K E+ E + L L++N+ I++ N+ N+E+ +L KSI | |
| Sbjct: | 253 | KNLEEL------KNEFLSKVREIDVEIENLKLRLNN----IINELNEKGNEEVLELHKSI | 302 |
| Query: | 177 | SSFERELSRFEDVGYSEAEEIKSTLRRILN | 206 |
| | | E E+ + V S E+K I N | |
| Sbjct: | 303 | KELEVEIENDKKVLDSSINELKKVEVEIEN | 332 |

[3304] Based on this analysis, it was predicted that these proteins and their epitopes could be useful antigens for vaccines or diagnostics.

### EXAMPLE 558

[3305] A DNA sequence (GBSx0597) was identified in S. agalactiae <SEQ ID 1767> which encodes the amino acid sequence <SEQ ID 1768>. This protein is predicted to be surface protein. Analysis of this protein sequence reveals the following:

| Possible site: 26 | | | | |
|---|---|---|---|---|
| >>> Seems to have a cleavable N-term signal seq. | | | | |
| | INTEGRAL | Likelihood = −7.70 | Transmembrane | 229-245 (226-248) |

```
----- Final Results -----
                              bacterial membrane --- Certainty = 0.4079(Affirmative) < succ>
                                bacterial outside --- Certainty = 0.0000(Not Clear) < succ>
                            bacterial cytoplasm --- Certainty = 0.0000(Not Clear) < succ>
```

[3306] The protein has homology with the following sequences in the GENPEPT database:

| >GP: CAA47097 GB: X66468 orf iota [Streptococcus pyogenes] | | | |
|---|---|---|---|
| Identities = 90/262 (34%), Positives = 138/262 (52%), | | | |
| Gaps = 26/262 (9%) | | | |
| Query: | 4 | VKVLSLITV-SGLFLMAGNLSASADVVISGGDTIMLSGVDAGVSDSIMPPPSSINPV--- | 59 |
| | | +K L+L+T+ S L++ + + AD S D +L+ D V P + ++PV | |
| Sbjct: | 1 | MKKLALLTLFSTTLLVSAPIVSFADETASSSDINILADDDPVVPVEPTDPTTPVDPVDPV | 60 |
| Query: | 60 | -----------TDTTEPSAPTPSTDPI--TDTTEPSAPTPSTDPI--TDTTEPSAPTPST | 104 |
| | | T+ TEP+ PT T+P T+ TEP+ PT T+P T+ TEP+ PT T | |
| Sbjct: | 61 | DPVDPVDPVDPTEPTEPTEPTEPTEPTEPTEPTEPTEPTEPTEPTEPTEPTEPTEPTEPT | 120 |
| Query: | 105 | DQTTGTTDSS-TPSSSTTNPVDGITDNGTKPNAGIDKPSTNKPSDHSESSI--KPVTKPT | 161 |
| | | + T T + T S T P + T+P + +PS +E ++ KPV | |
| Sbjct: | 121 | EPTEPTEPTEPTEPSKPTEPTE--PSKPTEPTEPTEPSKPTEPSKPTEPTVPNKPVDTNP | 178 |
| Query: | 162 | INQPITTVTGDQVIGTQDGKVLVQTPSGTQLK-DAAEVGGNVQKDGTVAIKKSDGKIEVL | 220 |
| | | I P+ T TG ++ +D K ++Q GT K +A E+G +VQKDGTV +K SDGK++VL | |
| Sbjct: | 179 | IENPVNTDTGVVIVAVEDSKPIIQLADGTTKKVEAKEIGADVQKDGTVTVKGSDGKMKVL | 238 |
| Query: | 221 | PKTGEGKTI-FTIVGLLLIAGA | 241 |
| | | PKTGE I +++G L++ G+ | |
| Sbjct: | 239 | PKTGETANIALSVLGSLMVLGS | 260 |

[3307] There is also homology to SEQ ID 760.

[3308] SEQ ID 1768 (GBS141) was expressed in E. coli as a His-fusion product. SDS-PAGE analysis of total cell extract is shown in FIG. 19 (lane 4; MW 35 kDa). The GBS141-His fusion product was purified (FIG. 194, lane 3) and used to immunise mice. The resulting antiserum was used for FACS (FIG. 295), which confirmed that the protein is immunoaccessible on GBS bacteria.

[3309] Based on this analysis, it was predicted that this protein and its epitopes, could be useful antigens for vaccines or diagnostics.

### EXAMPLE 559

[3310] A DNA sequence (GBSx0598) was identified in S. agalactiae <SEQ ID 1769> which encodes the amino acid sequence <SEQ ID 1770>. Analysis of this protein sequence reveals the following:

```
Possible site: 18
>>> Seems to have a cleavable N-term signal seq.
----- Final Results -----
                                bacterial outside --- Certainty = 0.3000(Affirmative) < succ>
                              bacterial membrane --- Certainty = 0.0000(Not Clear) < succ>
                            bacterial cytoplasm --- Certainty = 0.0000(Not Clear) < succ>
```

[3311] The protein has no significant homology with any sequences in the GENPEPT database.

[3312] No corresponding DNA sequence was identified in S. pyogenes.

[3313] Based on this analysis, it was predicted that this protein and its epitopes, could be useful antigens for vaccines or diagnostics.

[3314] A related GBS gene <SEQ ID 8601> and protein <SEQ ID 8602> were also identified. Analysis of this protein sequence reveals the following:

```
Lipop: Possible site: −1 Crend: 4
McG: Discrim Score: 14.39
GvH: Signal Score (−7.5): −1.23
          Possible site: 18
>>> Seems to have a cleavable N-term signal seq.
ALOM program count: 0 value: 8.96 threshold: 0.0
PERIPHERAL Likelihood = 8.96 104
modified ALOM score: −2.29
*** Reasoning Step: 3
----- Final Results -----
                                bacterial outside --- Certainty = 0.3000(Affirmative) < succ>
                              bacterial membrane --- Certainty = 0.0000(Not Clear) < succ>
                            bacterial cytoplasm --- Certainty = 0.0000(Not Clear) < succ>
```

[3315] SEQ ID 1770 (GBS17) was expressed in E. coli as a His-fusion product. SDS-PAGE analysis of total cell extract is shown in FIG. 4 (lane 2; MW 24 kDa).

[3316] The His-fusion protein was purified as shown in FIG. 189, lane 10.

### EXAMPLE 560

[3317] A DNA sequence (GBSx0599) was identified in S. agalactiae <SEQ ID 1771> which encodes the amino acid sequence <SEQ ID 1772>. Analysis of this protein sequence reveals the following:

```
Possible site: 23
>>> Seems to have a cleavable N-term signal seq.
----- Final Results -----
                                bacterial outside --- Certainty = 0.3000(Affirmative) < succ>
                              bacterial membrane --- Certainty = 0.0000(Not Clear) < succ>
                            bacterial cytoplasm --- Certainty = 0.0000(Not Clear) < succ>
```

[3318] A related GBS gene <SEQ ID 10779> and protein <SEQ ID 10780> were also identified. A further related GBS nucleic acid sequence <SEQ ID 10957> which encodes amino acid sequence <SEQ ID 10958> was also identified.

[3319] The protein has no significant homology with any sequences in the GENPEPT database.

[3320] No corresponding DNA sequence was identified in S. pyogenes.

[3321] SEQ ID 1772 (GBS643) was expressed in E. coli as a GST-fusion product. SDS-PAGE analysis of total cell extract is shown in FIG. 129 (lane 2-4; MW 79 kDa) and in FIG. 186 (lane 2; MW 79 kDa). It was also expressed in E. coli as a His-fusion product. SDS-PAGE analysis of total cell extract is shown in FIG. 129 (lane 5-7; MW 54 kDa) and in FIG. 176 (lane 5; MW 54 kDa).

[3322] GBS643-GST was purified as shown in FIG. 236, lane 7.

[3323] Based on this analysis, it was predicted that these proteins and their epitopes could be useful antigens for vaccines or diagnostics.

### EXAMPLE 561

[3324] A DNA sequence (GBSx0600) was identified in S. agalactiae <SEQ ID 1773> which encodes the amino acid sequence <SEQ ID 1774>. Analysis of this protein sequence reveals the following:

```
Possible site: 27
>>> Seems to have no N-terminal signal sequence
----- Final Results -----
                            bacterial cytoplasm --- Certainty = 0.5815(Affirmative) < succ>
                              bacterial membrane --- Certainty = 0.0000(Not Clear) < succ>
                                bacterial outside --- Certainty = 0.0000(Not Clear) < succ>
```

[3325] The protein has no significant homology with any sequences in the GENPEPT database.

[3326] No corresponding DNA sequence was identified in S. pyogenes.

[3327] Based on this analysis, it was predicted that this protein and its epitopes, could be useful antigens for vaccines or diagnostics.

### EXAMPLE 562

[3328] A DNA sequence (GBSx0601) was identified in S. agalactiae <SEQ ID 1775> which encodes the amino acid sequence <SEQ ID 1776>. This protein is predicted to be membrane protein. Analysis of this protein sequence reveals the following:

| Possible site: 33 | | | | |
|---|---|---|---|---|
| >>> Seems to have no N-terminal signal sequence | | | | |
| | INTEGRAL | Likelihood = −13.32 | Transmembrane | 311-327 (282-332) |
| | INTEGRAL | Likelihood = −10.46 | Transmembrane | 293-309 (282-310) |
| | INTEGRAL | Likelihood = −8.55 | Transmembrane | 390-406 (388-410) |
| | INTEGRAL | Likelihood = −7.64 | Transmembrane | 49-65 (40-69) |
| | INTEGRAL | Likelihood = −5.68 | Transmembrane | 100-116 (98-122) |
| | INTEGRAL | Likelihood = −4.35 | Transmembrane | 130-146 (127-148) |
| | INTEGRAL | Likelihood = −3.88 | Transmembrane | 344-360 (342-363) |

```
----- Final Results -----
                              bacterial membrane --- Certainty = 0.6328(Affirmative) < succ>
                                bacterial outside --- Certainty = 0.0000(Not Clear) < succ>
                            bacterial cytoplasm --- Certainty = 0.0000(Not Clear) < succ>
```

[3329] The protein has homology with the following sequences in the GENPEPT database:

| >GP: CAB70618 GB: AJ243106 membrane protein | | | |
|---|---|---|---|
| [Streptococcus thermophilus] | | | |
| Identities = 234/665 (35%), Positives = 379/665 (56%), | | | |
| Gaps = 59/665 (8%) | | | |
| Query: | 13 | FAKVKDVDIFALKAYMEITH-GAETGAQSILLDVFVNFPFFLLNLIVGLFSVILRFFENF | 71 |
| | | FAK+K VDIF+LK+YME T+ G+ GA ++ ++FVN FF+LN +VG FS+++R E | |
| Sbjct: | 5 | FAKLKGVDIFSLKSYMEPTNFGSFNGAWVLINELFVNLFFFILNAVVGFFSLLIRILEKI | 64 |
| Query: | 72 | SLYDTYKQTVYHSSQKLWENLSGN--GSYTS-SLLYLLVAISAFSIFISYLFSKGDFSKR | 128 |
| | | LY TYK V+H + +W +G+ G+ T+ SL+ L+ + AF +F Y FSKG FS+ | |
| Sbjct: | 65 | DLYATYKTYVFHGASSIWHGFTGSNTGNITNKSLVGTLLLVLAFYLFYQYFFSKGSFSRT | 124 |
| Query: | 129 | LIHLFVVIILGMGYFGTIQSTSGGIYILDTVHQLAGSFSDAVTNLSLDNPSGGKTKITQK | 188 |
| | | L+H+ +V++L +GYFGT+ TSGG+Y+LDTV+ ++ + + + +D KI + | |
| Sbjct: | 125 | LLHVCLVLLLALGYFGTVAGTSGGLYLLDTVNNVSKDVTKKIAGIKVDYAKDKSIKIGK- | 183 |
| Query: | 189 | SSVADNYVMKTSYTAYLFVNTGQLNGKFHNNQTGKEEKFDNEQVLGKYDKSGKFITPKQK | 248 |
| | | S++D+Y+ +TSY AY+FVNTGQ NGK+ N+Q GKEE FD+ +VLG DK+G F K K | |
| Sbjct: | 184 | -SMSDSYIAETSYKAYVFVNTGQENGKYKNSQDGKEEAFDDSKVLGTSDKNGNFKAVKAK | 242 |
| Query: | 249 | DILNYTDNLGDKATEGEEKNRWLSAVNDYLWIKSGYVILKIFEAVILAVPLILIQLIAFM | 308 |
| | | + Y D+LG+ A + EKNRW+SA+ D+++ + YVI KI EA +LAVP+ILIQL+ + | |
| Sbjct: | 243 | ERSKYLDDLGEGANDDGEKNRWVSAMPDFIFTRVFYVIFKIVEAFVLAVPIILIQLLNVV | 302 |
| Query: | 309 | ADVLVIILMFIFPLALLVSFLPRMQDIIFNVLKVMFGAVSFPALAGFLTLIVFYTQTLIA | 368 |
| | | A +LV+ ++ +FP+ LL+SF+PRMQ+++F VLKVMFG + FPA+ LTL++FY + +I | |
| Sbjct: | 303 | AQILVLTMILLFPVVLLMSFVPRMQELVFGVLKVMFGGLIFPAITTLLTLLIFYIEKMIE | 362 |
| Query: | 369 | TFVKKKFTDGSLLSGSNFKGQAILFMLLITVFVQGCVFWGIWKYKETFLRLIIGSRASQV | 428 |
| | | V F DG L + + ++F LL++V +G +++ IW++K L+ I+GS+A V | |
| Sbjct: | 363 | NIVTNGF-DGVLKTLPSLLLFGLVFKLLVSVVSKGVIYFLIWRFKGQLLQFILGSKARMV | 421 |
| Query: | 429 | -------INQSVDKINEKAENLGITPKSIYERAHDMSSLAMMGAGYGVGTMMNAQ---DN | 478 |
| | | + V K E A + P A + + + GAG+G G MMNA+ N | |
| Sbjct: | 422 | ATDIGTKVEHGVTKSKEVASQV---PTRSLATAQHLGNFTLAGAGFGTGVMMNAKSHFQN | 478 |
| Query: | 479 | WNAFKERQQANLDDGQSKTNDADKYDEANADDTVISKEAELTNEGEYQSELPKEASKRIE | 538 |
| | | +F R++ + + + + + + +I ++ P + K I | |
| Sbjct: | 479 | AGSFFTRKEPSQPETVMPSGPTEAPITPESPEPIIP-----------PTQTPPDNFKTIG | 527 |
| Query: | 539 | QLGKESSYELSFISEGNSTEEILKNVKSDNHTFQEGDGDTSLTNQDMITNDIENHSNNYT | 598 |
| | | + + +SEG + E ++ + + | |
| Sbjct: | 528 | EEKPTPPSDSPIMSEGTPSSE----------------------------DEFQTLKEEWM | 559 |
| Query: | 599 | SPLKQRKLNKLEGELSQFNSDVSMTKNHGKNAFEKGFNASKTKEVRKQHNLERQSKVLEE | 658 |
| | | SP KQ ++N LE L + +M K G NAF + + + T++ + + N+ER+ ++ + | |
| Sbjct: | 560 | SPFKQHRINTLERRLDAYKDPQAMYKAQGSNAFTRAYRKTLTRDDKIRANIERRDRLTQR | 619 |
| Query: | 659 | LEKLR | 663 |
| | | L +LR | |
| Sbjct: | 620 | LNQLR | 624 |

[3330] No corresponding DNA sequence was identified in S. pyogenes.

[3331] Based on this analysis, it was predicted that this protein and its epitopes, could be useful antigens for vaccines or diagnostics.

### EXAMPLE 563

[3332] A DNA sequence (GBSx0602) was identified in S. agalactiae <SEQ ID 1777> which encodes the amino acid sequence <SEQ ID 1778>. This protein is predicted to be conjugative protein. Analysis of this protein sequence reveals the following:

```
Possible site: 28
>>> Seems to have no N-terminal signal sequence
----- Final Results -----
                            bacterial cytoplasm --- Certainty = 0.3714(Affirmative) < succ>
                              bacterial membrane --- Certainty = 0.0000(Not Clear) < succ>
                                bacterial outside --- Certainty = 0.0000(Not Clear) < succ>
```

[3333] The protein has homology with the following sequences in the GENPEPT database:

| >GP: CAB70617 GB: AJ243106 conjugative protein [Streptococcus thermophilus] | | | |
|---|---|---|---|
| Identities = 515/757 (68%), Positives = 612/757 (80%), Gaps = 1/757 (0%) | | | |
| Query: | 1 | MSDFEADLADDVKELGLETLDFTVDTLTHEMEIPYQFDWLIGVDLGKGQYNANIKEFIYN | 60 |
| | | M DF LADD +ELG E L +TVD LT EMEIPYQFDW+IGV L K + A +K+ Y | |
| Sbjct: | 78 | MRDFSEALADDSRELGEELLLYTVDRLTDEMEIPYQFDWVIGVTLRKQNHGATVKDLAYE | 137 |
| Query: | 61 | QFESIASNFASLAGYEVEVDEDWYKEHSEEELLVYSLLSTLKAKRLTDVDLFYYQRMQFL | 120 |
| | | F + A GYE + WY ++ +E ++ S L+AKRLT+ +LFYYQRMQ+L | |
| Sbjct: | 138 | SFNEFSEKIAKGLGYEYALSPTWYDDYRSDEFTIFQAFSVLRAKRLTNEELFYYQRMQYL | 197 |
| Query: | 121 | RYVPHTKSEVIANRNMLNVTDTLIKSLEGGFLKLESAYGSSFVSVLPVGRFSTIFNGFHL | 180 |
| | | RY+PH K EV+ANR+ N+TDTLIK L+GGFL+LES YGSSFV++LPVG+F FNGFHL | |
| Sbjct: | 198 | RYIPHYKKEVLANRSQFNITDTLIKVLKGGFLELESPYGSSFVTILPVGKFPVQFNGFHL | 257 |
| Query: | 181 | GELVQRMSFPVELRFKAEFIDKTKLGGTMGRSNTRYDQIMKEAYNTNTVQQDDILMGAYS | 240 |
| | | GE VQR++FPVELR KAEFID K+ G MGRSNTRY IM+EA NT+TVQQD+I+MG+ S | |
| Sbjct: | 258 | GEFVQRLNFPVELRIKAEFIDTNKIKGRMGRSNTRYRNIMEEAENTDTVQQDEIIMGSIS | 317 |
| Query: | 241 | LKDLMKKVGNKEEIIEYGCYLVVAGSSLNQLKQRRYAILSYFDDMKVNVYEASHDTPYLF | 300 |
| | | LKDLMKKVGNKE+IIEYG YL+V+ SS+NQL+QRR IL+YFDDM V + EAS D PYLF | |
| Sbjct: | 318 | LKDLMKKVGNKEDIIEYGAYLIVSASSVNQLRQRRQVILNYFDDMGVEISEASQDGPYLF | 377 |
| Query: | 301 | QALLYGQDLQKTTRKWNHLVTARGFSELMLFTNTQSGNRIGWYIGRVDNRLTAWDSIDEA | 360 |
| | | QALLYG++LQK TR W H+VTARGFSELM FTNT SGNRIGWYIGRVDN + WDSI +A | |
| Sbjct: | 378 | QALLYGENLQKKTRTWTHMVTARGFSELMPFTNTSSGNRIGWYIGRVDNWIGRWDSIAKA | 437 |
| Query: | 361 | IMGSKNLVLFNATVANKEDVAGKVTKNPHVIITGATGQGKSYLAQMIFLHTAQQNVRVLY | 420 |
| | | I SKN+VL+NATV NKED+AGK+TKNPH+IITGATGQGKS+LAQ+IFL A QNV+ LY | |
| Sbjct: | 438 | IDSSKNIVLYNATVGNKEDIAGKITKNPHIIITGATGQGKSFLAQIIFLSVALQNVKTLY | 497 |
| Query: | 421 | VDPKRELRQHYLKVVSDPEYARKFPLRKKQIEETNFVTLDSSVKENHGVLDPIVILDKEG | 480 |
| | | +DPKRELR HY +V++ PE+AR++P RKKQI+ NFVTLDSS+ NHGVLDPIV+LDKE | |
| Sbjct: | 498 | IDPKRELRNHYQEVINSPEFARRYPERKKQIDNFNFVTLDSSLPSNHGVLDPIVVLDKEQ | 557 |
| Query: | 481 | ASSTAKNMLLYLLKNATEIKLDQTTALTEAISQVIAKREAGEVVGFNQVIEVLIDSESDE | 540 |
| | | A AKNML +LL+ ++ +DQ TA+TEAI+ ++ +R AGE VGF V+E L ++ S E | |
| Sbjct: | 558 | AVEVAKNMLEFLLQAVDDVTMDQKTAITEAINTIVERRVAGENVGFKHVLETLRNASSSE | 617 |
| Query: | 541 | VQSVGRYFKAIIQNSILELAFSDGDVAGLSYEERVTVLEVADLSLPKDGSDHISDHESNS | 600 |
| | | + SVGRY +I+ NSILELAFSDG GL+YE RVT+LEV +L LPKD S ISDHE NS | |
| Sbjct: | 618 | IASVGRYLTSIVTNSILELAFSDGTTPGLNYESRVTILEVNNLKLPKDDSTKISDHERNS | 677 |
| Query: | 601 | IALMFALGAFCKHFGERSDDE-TVEIFDEAWVLMQSSEGKAVIKSMRRVGRSKYNVLMLV | 659 |
| | | IALMFALGAFC HFGER+++E T+E FDEAW+LM+S+EGKAVIK+MRR+GRSK N L L+ | |
| Sbjct: | 678 | IALMFALGAFCTHFGERNENEDTIEFFDEAWILMKSAEGKAVIKNMRRIGRSKNNTLALI | 737 |
| Query: | 660 | SQSVHDAENDDDTTGFGTIFSFYEKSEREDILSHVGLEVTPKNLEWIDNMISGQCLYYDV | 719 |
| | | +QSVHDAENDDDTTGFGTIF+FYEKSEREDIL HV LEVT NLEWIDNMISGQCLYYDV | |
| Sbjct: | 738 | TQSVHDAENDDDTTGFGTIFAFYEKSEREDILRHVNLEVTESNLEWIDNMISGQCLYYDV | 797 |
| Query: | 720 | YGNLNMISIHNIHPDIDPLLKPMKKTVSSHLENKYAS | 756 |
| | | YGNLNMIS+HN+ DID LLKPMK TVSS LENKYAS | |
| Sbjct: | 798 | YGNLNMISVHNLFEDIDMLLKPMKATVSSSLENKYAS | 834 |

[3334] No corresponding DNA sequence was identified in S. pyogenes.

[3335] Based on this analysis, it was predicted that this protein and its epitopes, could be useful antigens for vaccines or diagnostics.

### EXAMPLE 564

[3336] A DNA sequence (GBSx0604) was identified in S. agalactiae <SEQ ID 1779> which encodes the amino acid sequence <SEQ ID 1780>. This protein is predicted to be ISL2 protein. Analysis of this protein sequence reveals the following:

```
Possible site: 26
>>> Seems to have no N-terminal signal sequence
----- Final Results -----
                            bacterial cytoplasm --- Certainty = 0.3469(Affirmative) < succ>
                              bacterial membrane --- Certainty = 0.0000(Not Clear) < succ>
                                bacterial outside --- Certainty = 0.0000(Not Clear) < succ>
```

[3337] The protein has homology with the following sequences in the GENPEPT database:

| >GP: CAC18595 GB: AJ278419 IS1381 transposase [Streptococcus pneumoniae] | | | |
|---|---|---|---|
| Identities = 110/125 (88%), Positives = 119/125 (95%) | | | |
| Query: | 81 | MNYEASKQLTDVRFKRLVGVQRTTFEEMLAVLKTAYQRKHAKGGRTPKLSLEDLLMATLQ | 140 |
| | | MNYEASKQLTD RFKRLVGVQRTTFEEMLAVLKTAYQ KHAKGGR PKLSLEDLLMATLQ | |
| Sbjct: | 1 | MNYEASKQLTDARFKRLVGVQRTTFEEMLAVLKTAYQLKHAKGGRKPKLSLEDLLMATLQ | 60 |
| Query: | 141 | YMREYRTYEQIAADFGIHESNLIRRSQWVESTLIQSGFTISKTHLSAEDTVIVDATEVKI | 200 |
| | | Y+REYRTYE+IAADFG+HESNL+RRSQWVE TL+QSG TIS+T LS+EDTV++DATEVKI | |
| Sbjct: | 61 | YVREYRTYEEIAADFGVHESNLLRRSQWVEVTLVQSGVTISRTPLSSEDTVMIDATEVKI | 120 |
| Query: | 201 | NRPKK | 205 |
| | | NRPKK | |
| Sbjct: | 121 | NRPKK | 125 |

[3338] No corresponding DNA sequence was identified in S. pyogenes.

[3339] Based on this analysis, it was predicted that this protein and its epitopes, could be useful antigens for vaccines or diagnostics.

### EXAMPLE 565

[3340] A DNA sequence (GBSx0605) was identified in S. agalactiae <SEQ ID 1781> which encodes the amino acid sequence <SEQ ID 1782>. Analysis of this protein sequence reveals the following:

| Possible site: 61 | | | | |
|---|---|---|---|---|
| >>> Seems to have no N-terminal signal sequence | | | | |
| | INTEGRAL | Likelihood = −12.58 | Transmembrane | 39-55 (32-66) |

```
----- Final Results -----
                              bacterial membrane --- Certainty = 0.6031(Affirmative) < succ>
                                bacterial outside --- Certainty = 0.0000(Not Clear) < succ>
                            bacterial cytoplasm --- Certainty = 0.0000(Not Clear) < succ>
```

[3341] The protein has no significant homology with any sequences in the GENPEPT database.

[3342] No corresponding DNA sequence was identified in S. pyogenes.

[3343] Based on this analysis, it was predicted that this protein and its epitopes, could be useful antigens for vaccines or diagnostics.

### EXAMPLE 566

[3344] A DNA sequence (GBSx0606) was identified in S. agalactiae <SEQ ID 1783> which encodes the amino acid sequence <SEQ ID 1784>. This protein is predicted to be Cag-W. Analysis of this protein sequence reveals the following:

| Possible site: 59 | | | | |
|---|---|---|---|---|
| >>> Seems to have no N-terminal signal sequence | | | | |
| | INTEGRAL | Likelihood = −3.82 | Transmembrane | 50-66 (49-66) |
| | INTEGRAL | Likelihood = −3.72 | Transmembrane | 25-41 (23-45) |

```
----- Final Results -----
                              bacterial membrane --- Certainty = 0.2529(Affirmative) < succ>
                                bacterial outside --- Certainty = 0.0000(Not Clear) < succ>
                            bacterial cytoplasm --- Certainty = 0.0000(Not Clear) < succ>
```

[3345] The protein has no significant homology with any sequences in the GENPEPT database.

[3346] No corresponding DNA sequence was identified in S. pyogenes.

[3347] Based on this analysis, it was predicted that this protein and its epitopes, could be useful antigens for vaccines or diagnostics.

### EXAMPLE 567

[3348] A DNA sequence (GBSx0607) was identified in S. agalactiae <SEQ ID 1785> which encodes the amino acid sequence <SEQ ID 1786>. Analysis of this protein sequence reveals the following:

| Possible site: 55 | | | | |
|---|---|---|---|---|
| >>> Seems to have no N-terminal signal sequence | | | | |
| | INTEGRAL | Likelihood = −7.80 | Transmembrane | 36-52 (32-60) |

```
----- Final Results -----
                              bacterial membrane --- Certainty = 0.4121(Affirmative) < succ>
                                bacterial outside --- Certainty = 0.0000(Not Clear) < succ>
                            bacterial cytoplasm --- Certainty = 0.0000(Not Clear) < succ>
```

[3349] The protein has homology with the following sequences in the GENPEPT database:

| >GP: CAB12298 GB: Z99106 similar to transposon protein | | | |
|---|---|---|---|
| [Bacillus subtilis] | | | |
| Identities = 68/339 (20%), Positives = 133/339 (39%), Gaps = 49/339 (14%) | | | |
| Query: | 16 | KKEEGGKQPKTKEVKQRTANFIV--YGILGLLFIVGFFGSLRAIGLSNQVQHLKETVIAV | 73 |
| | | K+ E ++ K K + R+ V + +G L + L +I +Q+ +K+ | |
| Sbjct: | 24 | KRIERPEKDKQKVPRDRSKLIAVTLWSCVGSLLFICLLAVLLSINTRSQLNDMKDETNKP | 83 |
| Query: | 74 | EKKSKHKKTDDSLDISRIQYYMNNFVYYYINYS--QDTADQRKTELENY--------YSF | 123 |
| | | K K + ++ + +++ F+ Y+N Q++ ++R LE+Y + | |
| Sbjct: | 84 | TNDDKQK-----ISVTAAENFLSGFINEYMNVKNDQESIEKRMQSLESYMVKQEDNHFED | 138 |
| Query: | 124 | STASMTDDVRKSRTLQTQRLISVEKEKDYYIALMRIGYEV-------------------- | 163 |
| | | D ++ R L+ L +V++ + ++ YE | |
| Sbjct: | 139 | EERFNVDGLKGDRELKGYSLYNVKEGDKNSLFQYKVTYENLYPVEKEVEKEVKDGKKKKK | 198 |
| Query: | 164 | --------DKKSYQMNLAVPFQMQRGLLAIVSQPYTVAEDLYLGKSKAFEKKTLDQVKEL | 215 |
| | | +K QM L +P + A+ + PY +Y K K + E | |
| Sbjct: | 199 | VKEKVKTNEKYEKQMLLNIPVTNKGDSFAVSAVPYFT--QIYDLKGDIAFKGKEETRDEY | 256 |
| Query: | 216 | SKEQVSSIQKFLPVFFNKYALINKTDLKLLMKTPELMGKGFKVSELDLNNAIYYQEKKHQ | 275 |
| | | + E+ SI+ FL FF KYA K ++ +MK PE + E + + ++ KK | |
| Sbjct: | 257 | AGEKKESIESFLQNFFEKYASEKKEEMVYMMKKPEALEGNLLFGE--VQSVKIFETKKGF | 314 |
| Query: | 276 | VVQLSVTFEDLVTGGTRSENFTLYLFKADNGWYVEEMYH | 314 |
| | | V +V F++ +E F+L + + +YV ++ H | |
| Sbjct: | 315 | EVFCAVRFKEKENDIPVNEKFSLEITENSGQFYVNKLKH | 353 |

[3350] Based on this analysis, it was predicted that this protein and its epitopes, could be useful antigens for vaccines or diagnostics.

### EXAMPLE 568

[3351] A DNA sequence (GBSx0608) was identified in S. agalactiae <SEQ ID 1787> which encodes the amino acid sequence <SEQ ID 1788>. Analysis of this protein sequence reveals the following:

```
Possible site: 54
>>> Seems to have no N-terminal signal sequence
----- Final Results -----
                            bacterial cytoplasm --- Certainty = 0.4177(Affirmative) < succ>
                              bacterial membrane --- Certainty = 0.0000(Not Clear) < succ>
                                bacterial outside --- Certainty = 0.0000(Not Clear) < succ>
```

[3352] The protein has homology with the following sequences in the GENPEPT database:

| >GP: CAB38326 GB: Y17736 hypothetical protein [Streptomyces | | | |
|---|---|---|---|
| coelicolor A3(2)] | | | |
| Identities = 45/80 (56%), Positives = 56/80 (69%) | | | |
| Query: | 4 | FTEEAWKDYVSWQQEDKKILKRINRLIEDIKRDPFEGIGKPEPLKYHYSGAWSRRITEEH | 63 |
| | | FT W+DYV W + D+K+ KRINRLI DI RDPF+G+GKPEPLK SG WSRRI + H | |
| Sbjct: | 5 | FTSHGWEDYVHWAESDRKVTKRINRLIADIARDPFKGVGKPEPLKGDLSGYWSRRIDDTH | 64 |
| Query: | 64 | RLIYMIEDGEIYFLSFRDHY | 83 |
| | | RL+Y D ++ + R HY | |
| Sbjct: | 65 | RLVYKPTDDQLVIVQARYHY | 84 |

[3353] No corresponding DNA sequence was identified in S. pyogenes.

[3354] Based on this analysis, it was predicted that this protein and its epitopes, could be useful antigens for vaccines or diagnostics.

### EXAMPLE 569

[3355] A DNA sequence (GBSx0609) was identified in S. agalactiae <SEQ ID 1789> which encodes the amino acid sequence <SEQ ID 1790>. Analysis of this protein sequence reveals the following:

```
Possible site: 53
>>> Seems to have no N-terminal signal sequence
----- Final Results -----
                            bacterial cytoplasm --- Certainty = 0.5669(Affirmative) < succ>
                              bacterial membrane --- Certainty = 0.0000(Not Clear) < succ>
                                bacterial outside --- Certainty = 0.0000(Not Clear) < succ>
```

[3356] A related GBS nucleic acid sequence <SEQ ID 10211> which encodes amino acid sequence <SEQ ID 10212> was also identified.

[3357] The protein has homology with the following sequences in the GENPEPT database:

| >GP: AAD17306 GB: AF121418 putative Phd protein [Francisella | | | |
|---|---|---|---|
| tularensis subsp. novicida] | | | |
| Identities = 26/84 (30%), Positives = 45/84 (52%) | | | |
| Query: | 4 | MEAIVYSHFRNNLKDYMKKVNDEFEPLIVVNKNPDENIVVLSQDSWESLQETIRLMENDY | 63 |
| | | M+ + YS FRN L D M +V P+IV + E +V++S + +++ +ET LM + | |
| Sbjct: | 1 | MQTVNYSTFRNELSDSMDRVTKNHSPMIVTRGSKKEAVVMMSLEDFKAYEETAYLMRSMN | 60 |
| Query: | 64 | LSHKVINGISQVKEKQVTKHGLIE | 87 |
| | | ++ N I +V+ + LIE | |
| Sbjct: | 61 | NYKRLQNSIDEVESGLAIQKELIE | 84 |

[3358] Based on this analysis, it was predicted that these proteins and their epitopes could be useful antigens for vaccines or diagnostics.

### EXAMPLE 570

[3359] A DNA sequence (GBSx0610) was identified in S. agalactiae <SEQ ID 1791> which encodes the amino acid sequence <SEQ ID 1792>. Analysis of this protein sequence reveals the following:

```
Possible site: 55
>>> Seems to have no N-terminal signal sequence
----- Final Results -----
                            bacterial cytoplasm --- Certainty = 0.2407(Affirmative) < succ>
                              bacterial membrane --- Certainty = 0.0000(Not Clear) < succ>
                                bacterial outside --- Certainty = 0.0000(Not Clear) < succ>
```

[3360] The protein has no significant homology with any sequences in the GENPEPT database.

[3361] No corresponding DNA sequence was identified in S. pyogenes.

[3362] Based on this analysis, it was predicted that this protein and its epitopes, could be useful antigens for vaccines or diagnostics.

### EXAMPLE 571

[3363] A DNA sequence (GBSx0611) was identified in S. agalactiae <SEQ ID 1793> which encodes the amino acid sequence <SEQ ID 1794>. Analysis of this protein sequence reveals the following:

```
Possible site: 28
>>> Seems to have no N-terminal signal sequence
----- Final Results -----
                            bacterial cytoplasm --- Certainty = 0.1274(Affirmative) < succ>
                              bacterial membrane --- Certainty = 0.0000(Not Clear) < succ>
                                bacterial outside --- Certainty = 0.0000(Not Clear) < succ>
```

[3364] A related GBS nucleic acid sequence <SEQ ID 10213> which encodes amino acid sequence <SEQ ID 10214> was also identified.

[3365] The protein has homology with the following sequences in the GENPEPT database:

| >GP: AAB60015 GB: U09422 ORF18 [Enterococcus faecalis] | | | |
|---|---|---|---|
| Identities = 41/140 (29%), Positives = 73/140 (51%), Gaps = 3/140 (2%) | | | |
| Query: | 23 | FPVEMSELKLALGLREEDDLEYIIADSDCQL-LKEHDSIEMINQFVELVENVDSELVKAV | 81 |
| | | FP++ E+K +GL +E + EY I D + + E+ SI +N+ E+V + EL + | |
| Sbjct: | 26 | FPIDFEEVKEKIGLNDEYE-EYAIHDYELPFTVDEYTSIGELNRLWEMVSELPEELQSEL | 84 |
| Query: | 82 | HQVIGYTASDFVDYDFNFGDCCLLSDVTTRRELGEYYFDELGVQGVGKEALEMYFDHEAY | 141 |
| | | ++ + +S + + D + SD ++ YY +E G G +L+ Y D++AY | |
| Sbjct: | 85 | SALLTHFSS-IEELSEHQEDIIIHSDCDDMYDVARYYIEETGALGEVPASLQNYIDYQAY | 143 |
| Query: | 142 | GRDIDLESQGGFSDYGYVEI | 161 |
| | | GRD+DL +++G EI | |
| Sbjct: | 144 | GRDLDLSGTFISTNHGIFEI | 163 |

[3366] No corresponding DNA sequence was identified in S. pyogenes.

[3367] Based on this analysis, it was predicted that these proteins and their epitopes could be useful antigens for vaccines or diagnostics.

### EXAMPLE 572

[3368] A DNA sequence (GBSx0612) was identified in S. agalactiae <SEQ ID 1795> which encodes the amino acid sequence <SEQ ID 1796>. Analysis of this protein sequence reveals the following:

```
Possible site: 31
>>> Seems to have no N-terminal signal sequence
----- Final Results -----
                            bacterial cytoplasm --- Certainty = 0.1366(Affirmative) < succ>
                              bacterial membrane --- Certainty = 0.0000(Not Clear) < succ>
                                bacterial outside --- Certainty = 0.0000(Not Clear) < succ>
```

[3369] The protein has no significant homology with any sequences in the GENPEPT database.

[3370] No corresponding DNA sequence was identified in S. pyogenes.

[3371] Based on this analysis, it was predicted that this protein and its epitopes, could be useful antigens for vaccines or diagnostics.

### EXAMPLE 573

[3372] A DNA sequence (GBSx0613) was identified in S. agalactiae <SEQ ID 1797> which encodes the amino acid sequence <SEQ ID 1798>. Analysis of this protein sequence reveals the following:

```
Possible site: 41
>>> Seems to have no N-terminal signal sequence
----- Final Results -----
                            bacterial cytoplasm --- Certainty = 0.1484(Affirmative) < succ>
                              bacterial membrane --- Certainty = 0.0000(Not Clear) < succ>
                                bacterial outside --- Certainty = 0.0000(Not Clear) < succ>
```

[3373] The protein has no significant homology with any sequences in the GENPEPT database.

[3374] No corresponding DNA sequence was identified in S. pyogenes.

[3375] Based on this analysis, it was predicted that this protein and its epitopes, could be useful antigens for vaccines or diagnostics.

### EXAMPLE 574

[3376] A DNA sequence (GBSx0614) was identified in S. agalactiae <SEQ ID 1799> which encodes the amino acid sequence <SEQ ID 1800>. This protein is predicted to be abortive phage resistance protein. Analysis of this protein sequence reveals the following:

```
Possible site: 58
>>> Seems to have no N-terminal signal sequence
----- Final Results -----
                            bacterial cytoplasm --- Certainty = 0.2205(Affirmative) < succ>
                              bacterial membrane --- Certainty = 0.0000(Not Clear) < succ>
                                bacterial outside --- Certainty = 0.0000(Not Clear) < succ>
```

[3377] A related GBS nucleic acid sequence <SEQ ID 10215> which encodes amino acid sequence <SEQ ID 10216> was also identified.

[3378] The protein has homology with the following sequences in the GENPEPT database:

| >GP: AAB53710 GB: U94520 abortive phage resistance protein | | | |
|---|---|---|---|
| [Lactococcus lactis] | | | |
| Identities = 131/499 (26%), Positives = 210/499 (41%), | | | |
| Gaps = 97/499 (19%) | | | |
| Query: | 3 | MFSKIEFKNFMSFSNLT------------------FDLLNRGKCKDIIAIYGENGSGKTN | 44 |
| | | M F+NF+SF L+ D+ N K + IYG N SGK++ | |
| Sbjct: | 1 | MLVNFRFENFLSFDKLSTFSMAPGKSRQHMEDLIELDIKNNQKLLKLSTIYGANASGKSS | 60 |
| Query: | 45 | IVEAF---KLLVL-----SLQSMESLNENTRLQSLLKEQTNKE---ENQKTNFGDISEIL | 93 |
| | | V+A K L++ L S N+NT SL + + E E++ ++G S IL | |
| Sbjct: | 61 | FVDAIGISKSLIIRGFYNGLVLSNSYNKNTVDNSLNETKFEYEIVIEDKVYSYG-FSVIL | 119 |
| Query: | 94 | DKISFFTTFKGIAKNTHRIASEGNTILKYYFNIEKDNGYYLLEYNENNELVKEELVFKIK | 153 |
| | | F + + N ++ Y KDN YN N+E L + | |
| Sbjct: | 120 | SLKKFMSEWLYDITNDEKM---------IYTIDRKDN-----SYNINDEF----LNLDEQ | 161 |
| Query: | 154 | SNKGVHFSITNIDGLSQSLNKTIFKNTIFKDLTEQIEKYWGKHTFLSIFN--NYCLEV-- | 209 |
| | | SN + I + S + N +F N++ D + IE F +FN N LEV | |
| Sbjct: | 162 | SNNRISIYIDD----SANDNTQLFLNSL-NDGKKTIESKDNSTIFKKVFNWFNNTLEVLG | 216 |
| Query: | 210 | ---------------NEEF---INEQVSINFQKVVDEFDKIFIWSGNFRGPFHSTELLLK | 251 |
| | | EEF + + + +N V+D N P E +L | |
| Sbjct: | 217 | PGDEARGSIASLTQEEEEFKEDLGKYLELNDTGVIDIVQVPVDNLSNV--PAKLQERILD | 274 |
| Query: | 252 | DISKGKIDKSEKEKLSYTEEIIYKYFSALYIDIKDVKYKQDAQGQEIKYELMIRKNIGGD | 311 |
| | | +I+ I K +KE+ E I F+ + +++ Q+ Q +EL K+ G | |
| Sbjct: | 275 | NITT-DIKKKKKER-----EDIEISFNTILNTSQNIYIIQNNDEQFEYFELKF-KHKNGT | 327 |
| Query: | 312 | LLDVPISLESQGTKNLLDLLKV-FNNVLDGKICIVDEIDSGIHDLLMNSILNDLK--GSV | 368 |
| | | L +S ES GT L++L V F+N D K+ ++DEID +H LL + + K S+ | |
| Sbjct: | 328 | LYS--LSEESDGTVRLIELFSVLFHN--DEKVFVIDEIDRSLHPLLTYNFIESFKKQKSI | 383 |
| Query: | 369 | NGQLIFTTHDTTLL--KELSPSSAYFLNVDIKGNKVIISGNEADKKIGVNNNLEKLYLSG | 426 |
| | | N QLI TTH+ +L + L +F++ + +GN + S E ++ + ++ YL+G | |
| Sbjct: | 384 | N-QLIVTTHEDYILNFELLRRDEVWFVDKNFEGNSSMFSLEEFKERF--DKDINTSYLNG | 440 |
| Query: | 427 | FFGAVPDPLDIDFSDLFLD | 445 |
| | | +G +P+ L FS+ D | |
| Sbjct: | 441 | RYGGIPN-LSCLFSEFAKD | 458 |

[3379] No corresponding DNA sequence was identified in S. pyogenes.

[3380] Based on this analysis, it was predicted that these proteins and their epitopes could be useful antigens for vaccines or diagnostics.

### EXAMPLE 575

[3381] A DNA sequence (GBSx0615) was identified in S. agalactiae <SEQ ID 1801> which encodes the amino acid sequence <SEQ ID 1802>. This protein is predicted to be repressor (rstR-1). Analysis of this protein sequence reveals the following:

```
Possible site: 37
>>> Seems to have no N-terminal signal sequence
----- Final Results -----
                            bacterial cytoplasm --- Certainty = 0.3724(Affirmative) < succ>
                              bacterial membrane --- Certainty = 0.0000(Not Clear) < succ>
                                bacterial outside --- Certainty = 0.0000(Not Clear) < succ>
```

[3382] The protein has homology with the following sequences in the GENPEPT database:

| >GP: AAB84427 GB: AF027868 transcription regulator [Bacillus subtilis] | | | |
|---|---|---|---|
| Identities = 31/81 (38%), Positives = 53/81 (65%), Gaps = 2/81 (2%) | | | |
| Query: | 9 | QKLKELRKEKKLTQTELASKLNISQKSYSNWESGKAEPTLDNIIKLANILDVTVDYLLGR | 68 |
| | | Q+L++LRK KLT +LA K+ I++ SY +E+ +P LD ++ LA + DV+VDY+LG | |
| Sbjct: | 4 | QRLRQLRKAHKLTMEQLAEKIGIAKSSYGGYEAESKKPPLDKLVILARLYDVSVDYILGL | 63 |
| Query: | 69 | SDNFSNTIVLSKNNMKSFSKR | 89 |
| | | +D+ + + N+K F ++ | |
| Sbjct: | 64 | TDDPDPKV--ERKNLKEFLEK | 82 |

[3383] There is also homology to SEQ ID 1740.

[3384] Based on this analysis, it was predicted that this protein and its epitopes, could be useful antigens for vaccines or diagnostics.

### EXAMPLE 576

[3385] A DNA sequence (GBSx0616) was identified in S. agalactiae <SEQ ID 1803> which encodes the amino acid sequence <SEQ ID 1804>. Analysis of this protein sequence reveals the following:

```
Possible site: 13
>>> Seems to have no N-terminal signal sequence
----- Final Results -----
                            bacterial cytoplasm --- Certainty = 0.3607(Affirmative) < succ>
                              bacterial membrane --- Certainty = 0.0000(Not Clear) < succ>
                                bacterial outside --- Certainty = 0.0000(Not Clear) < succ>
```

[3386] The protein has no significant homology with any sequences in the GENPEPT database.

[3387] No corresponding DNA sequence was identified in S. pyogenes.

[3388] Based on this analysis, it was predicted that this protein and its epitopes; could be useful antigens for vaccines or diagnostics.

### EXAMPLE 577

[3389] A DNA sequence (GBSx0617) was identified in S. agalactiae <SEQ ID 1805> which encodes the amino acid sequence <SEQ ID 1806>. Analysis of this protein sequence reveals the following:

```
Possible site: 22
>>> Seems to have no N-terminal signal sequence
----- Final Results -----
                            bacterial cytoplasm --- Certainty = 0.0564(Affirmative) < succ>
                              bacterial membrane --- Certainty = 0.0000(Not Clear) < succ>
                                bacterial outside --- Certainty = 0.0000(Not Clear) < succ>
```

[3390] A related GBS nucleic acid sequence <SEQ ID 10217> which encodes amino acid sequence <SEQ ID 10218> was also identified.

[3391] The protein has homology with the following sequences in the GENPEPT database:

| >GP:CAB12294 GB:Z99106 similar to transposon protein [Bacillus subtilis] | | | |
|---|---|---|---|
| Identities = 93/348 (26%), Positives = 164/348 (46%), Gaps = 28/348 (8%) | | | |
| Query: | 81 | SRLQVMIDYVRITLKDVRDLEFFCRNFLHCAFKEFQPFESKLMNYNHLWKRGDIWIFDFA | 140 |
| | | S L M+DY+R++ K D++ LH + +S Y ++ I +F A | |
| Sbjct: | 26 | SPLVSMVDYIRVSFK-THDVDRIIEEVLHLSKDFMTEKQSGFYGYVGTYELDYIKVFYSA | 84 |
| Query: | 141 | DKHETGNFQITVQLSGRGCRQLELLMETEKFTWHDWLSYLRNSYRDDMNVTRFDIAIDEL | 200 |
| | | G + +++SG+GCRQ E +E K TW+D + ++ + + TRFD+AID+ | |
| Sbjct: | 85 | PDDNRG---VLIEMSGQGCRQFESFLECRKKTWYD---FFQDCMQQGGSFTRFDLAIDD- | 137 |
| Query: | 201 | YLGKDRENEQFHLSDMISKYYRHELDFESLRTWNYIGGGSLNFSDMEEIEQNRQGISLYF | 260 |
| | | + F + +++ K + E R ++ GS + SD G ++YF | |
| Sbjct: | 138 | ------KRTYFSIPELLKKAQKGEC-ISRFRKSDF-NGSFDLSD------GITGGTTIYF | 183 |
| Query: | 261 | GSRQSEMYFNFYEKRYEIAKQEGITVEEALEIFELWNRYEIRLSQSKANAAVDEFISGVP | 320 |
| | | GS++SE Y FYEK YE A++ I +EE + WNRYE+RL +A A+D + | |
| Sbjct: | 184 | GSKKSEAYLCFYEKNYEQAEKYNIPLEELGD----WNRYELRLKNERAQVAIDALLKTKD | 239 |
| Query: | 321 | IGEISRGLIVSKIDVYDGKNEY--GSFQADRKWQLMFGGVEPLKFVTKPEAYSIERTLRW | 378 |
| | | + I+ +I + + D ++ W G V L KP+ +++ W | |
| Sbjct: | 240 | LTLIAMQIINNYVRFVDADENITREHWKTSLFWSDFIGDVGRLPLYVKPQKDFYQKSRNW | 299 |
| Query: | 379 | LSDSVSPSLAMIREYDMIVDGDYLQTILNSGEVNERGEKILDSIKASL | 426 |
| | | L +S +P++ M+ E D + L ++ E+ ++ +K+LD A + | |
| Sbjct: | 300 | LRNSCAPTMKMVLEADEHLGKTDLSDMIAEAELADKHKKMLDVYMADV | 347 |

[3392] No corresponding DNA sequence was identified in S. pyogenes.

[3393] A related GBS gene <SEQ ID 8603> and protein <SEQ ID 8604> were also identified. Analysis of this protein sequence reveals a RGD motif at residues 131-133.

[3394] The protein has homology with the following sequences in the databases:

[chemical structure]

[3395] SEQ ID 8604 (GBS294) was expressed in E. coli as a His-fusion product. SDS-PAGE analysis of total cell extract is shown in FIG. 167 (lane 6 & 7; MW 65 kDa—thioredoxin fusion), in FIG. 238 (lane 2; MW 65 kDa) and in FIG. 40 (lane 6; MW 37 kDa). It was also expressed in E. coli as a GST-fusion product. SDS-PAGE analysis of total cell extract is shown in FIG. 47 (lane 3; MW 76 kDa).

[3396] Purified Thio-GBS294-His is shown in FIG. 244, lane 2.

[3397] Based on this analysis, it was predicted that these proteins and their epitopes could be useful antigens for vaccines or diagnostics.

### EXAMPLE 578

[3398] A DNA sequence (GBSx0618) was identified in S. agalactiae <SEQ ID 1807> which encodes the amino acid sequence <SEQ ID 1808>. Analysis of this protein sequence reveals the following:

| Possible site: 40 | | | | | |
|---|---|---|---|---|---|
| >>> Seems to have no N-terminal signal sequence | | | | | |
| | INTEGRAL | Likelihood = −3.61 | Transmembrane | 24 − 40 | (20 − 41) |
| | INTEGRAL | Likelihood = −1.97 | Transmembrane | 53 − 69 | (52 − 72) |

```
----- Final Results -----
                            bacterial membrane --- Certainty = 0.2444(Affirmative) < succ>
                              bacterial outside --- Certainty = 0.0000(Not Clear) < succ>
                          bacterial cytoplasm --- Certainty = 0.0000(Not Clear) < succ>
```

[3399] The protein has homology with the following sequences in the GENPEPT database:

| >GP:AAB60012 GB:U09422 ORF21 [Enterococcus faecalis] | | | |
|---|---|---|---|
| Identities = 136/473 (28%), Positives = 228/473 (47%), Gaps = 40/473 (8%) | | | |
| Query: | 9 | RGIKVKPYMRYMSYYL-FSFLFILFLTPVGVYSYYYLDL-------LKMMDKMSM----I | 56 |
| | | RG +++P + + ++ + L +FL VG++ + L DK+ + I | |
| Sbjct: | 4 | RGKRIRPSGKDLVFHFTIASLLPVFLLVVGLFHVKTIQQINWQDFNLSQADKIDIPYLII | 63 |
| Query: | 57 | SVGTGLFLAFFVSWYLTWFLQEANPLFNKLDRLKRMSKFLYENGYVYEKR-------KKS | 109 |
| | | S + + V++ F + +L ++++K + EN + ++ K S | |
| Sbjct: | 64 | SFSVAILICLLVAFV---FKRVRYDTVKQLYHRQKLAKMILENKWYESEQVKTEGFFKDS | 120 |
| Query: | 110 | NKKTKTKYR-FPKVYVKQGKYDLSVSFEMAGGKFQKKFKDIGGELEDTFFMDFMEKTDDP | 168 |
| | | +TK K FPK+Y + + + E+ GK+Q + + +LE + + +K | |
| Sbjct: | 121 | AGRTKEKITYFPKMYYRLKNGLIQIRVEITLGRYQDQLLHLEKKLESGLYCELTDKELKD | 180 |
| Query: | 169 | RFKIYKLAYSAFLSRITVKDVIWNKDKGIKLMDGYYWDFINDPHLLVAGGTGGGKTVLLR | 228 |
| | | + Y L Y SRI++ D + KD ++LM +W++ PH+L+AGGTGGGKT + | |
| Sbjct: | 181 | SYVEYTLLYDTIASRISI-DEVEAKDGKLRLMKNVWWEYDKLPHMLIAGGTGGGKTYFIL | 239 |
| Query: | 229 | SILRCLAEI-GVCDICDPKRADFVTMSDLSAFEGRIAFEKADIIEKFENAVTIMFARYDF | 287 |
| | | +++ L I DPK AD ++DL + + + K D++ E M R + | |
| Sbjct: | 240 | TLIEALLHTDSKLYILDPKNAD---LADLGSVMANVYYRKEDLLSCIETFYEEMMKRSE- | 295 |
| Query: | 288 | VRNEMKRLGHKDMKKFYDY-GLEPYFFVCDEYNALMSSLSYQEREIVDNAFTQYILLGRQ | 346 |
| | | EMK++ + K Y Y GL +F + DEY A M L +E V N Q ++LGRQ | |
| Sbjct: | 296 | ---EMKQMKNYKTGKNYAYLGLPAHFLIFDEYVAFMEMLGTKENTAVMNKLKQIVMLGRQ | 352 |
| Query: | 347 | VGCNAIIAMQKPSADDLPTKIRSNMMHHISVGRLDDGGYVMMFGDENRNKEFRFIKYLAG | 406 |
| | | G I+A Q+P A L IR +++GR+ + GY MMFG + + K+F F+K | |
| Sbjct: | 353 | AGFFLILACQRPDAKYLGDGIRDQFNFRVALGRMSEMGYGMMFGSDVQ-KDF-FLK---- | 406 |
| Query: | 407 | RRVYGRGYSAVFGEVAREFYSPLLPKNFSFYDAFEKINRHENPFDPTENQEVS | 459 |
| | | R+ GRGY V V EFY+PL+PK + F + +K++ T EV+ | |
| Sbjct: | 407 | -RIKGRGYVDVGTSVISEFYTPLVFKGYDFLEEIKKLSNSRQSTQATCEAEVA | 458 |

[3400] No corresponding DNA sequence was identified in S. pyogenes.

[3401] A related GBS gene <SEQ ID 8605> and protein <SEQ ID 8606> were also identified. Analysis of this protein sequence reveals the following:

| Lipop Possible site: −1 Crend: 8 | | | | | |
|---|---|---|---|---|---|
| McG: Discrim Score: −10.05 | | | | | |
| GvH: Signal Score (−7.5): −3.42 | | | | | |
| Possible site: 40 | | | | | |
| >>> Seems to have no N-terminal signal sequence | | | | | |
| ALOM program count: 2 value: −3.61 threshold: 0.0 | | | | | |
| | INTEGRAL | Likelihood = −3.61 | Transmembrane | 24 − 40 | (20 − 41) |
| | INTEGRAL | Likelihood = −1.97 | Transmembrane | 53 − 69 | (52 − 72) |
| | PERIPHERAL | Likelihood − 1.01 | 224 | | |

```
  modified ALOM score: 1.22
*** Reasoning Step: 3
----- Final Results -----
                            bacterial membrane --- Certainty = 0.2444(Affirmative) < succ>
                              bacterial outside --- Certainty = 0.0000(Not Clear) < succ>
                          bacterial cytoplasm --- Certainty = 0.0000(Not Clear) < succ>
```

[3402] The protein has homology with the following sequences in the databases:

[chemical structure]

[3403] SEQ ID 8606 (GBS216) was expressed in E. coli as a His-fusion product. SDS-PAGE analysis of total cell extract is shown in FIG. 42 (lane 3; MW 66.6 kDa). It was also expressed in E. coli as a GST-fusion product. SDS-PAGE analysis of total cell extract is shown in FIG. 47 (lane 2; MW 91 kDa).

[3404] Based on this analysis, it was predicted that these proteins and their epitopes could be useful antigens for vaccines or diagnostics.

### EXAMPLE 579

[3405] A DNA sequence (GBSx0619) was identified in S. agalactiae <SEQ ID 1809> which encodes the amino acid sequence <SEQ ID 1810>. Analysis of this protein sequence reveals the following:

```
Possible site: 14
>>> Seems to have no N-terminal signal sequence
----- Final Results -----
                            bacterial cytoplasm --- Certainty = 0.4095(Affirmative) < succ>
                              bacterial membrane --- Certainty = 0.0000(Not Clear) < succ>
                                bacterial outside --- Certainty = 0.0000(Not Clear) < succ>
```

[3406] The protein has no significant homology with any sequences in the GENPEPT database.

[3407] No corresponding DNA sequence was identified in S. pyogenes.

[3408] Based on this analysis, it was predicted that this protein and its epitopes, could be useful antigens for vaccines or diagnostics.

### EXAMPLE 580

[3409] A DNA sequence (GBSx0620) was identified in S. agalactiae <SEQ ID 1811> which encodes the amino acid sequence <SEQ ID 1812>. Analysis of this protein sequence reveals the following:

```
Possible site: 28
>>> Seems to have no N-terminal signal sequence
----- Final Results -----
                            bacterial cytoplasm --- Certainty = 0.0944(Affirmative) < succ>
                              bacterial membrane --- Certainty = 0.0000(Not Clear) < succ>
                                bacterial outside --- Certainty = 0.0000(Not Clear) < succ>
```

[3410] A related GBS nucleic acid sequence <SEQ ID 10219> which encodes amino acid sequence <SEQ ID 10220> was also identified.

[3411] The protein has no significant homology with any sequences in the GENPEPT database.

[3412] No corresponding DNA sequence was identified in S. pyogenes.

[3413] Based on this analysis, it was predicted that this protein and its epitopes, could be useful antigens for vaccines or diagnostics.

### EXAMPLE 581

[3414] A DNA sequence (GBSx0621) was identified in S. agalactiae <SEQ ID 1813> which encodes the amino acid sequence <SEQ ID 1814>. Analysis of this protein sequence reveals the following:

| Possible site: 60 | | | | |
|---|---|---|---|---|
| >>> Seems to have no N-terminal signal sequence | | | | |
| | INTEGRAL | Likelihood = −4.94 | Transmembrane | 810-826 (808-830) |

```
----- Final Results -----
                              bacterial membrane --- Certainty = 0.2975(Affirmative) < succ>
                                bacterial outside --- Certainty = 0.0000(Not Clear) < succ>
                            bacterial cytoplasm --- Certainty = 0.0000(Not Clear) < succ>
```

[3415] The protein has homology with the following sequences in the GENPEPT database:

| !GB: D90354 surface protein antigen precursor [Strept . . . | | | |
|---|---|---|---|
| >GP: BAA14368 GB: D90354 surface protein antigen precursor | | | |
| [Streptococcus sobrinus] | | | |
| Identities = 151/408 (37%), Positives = 219/408 (53%), Gaps = 27/408 (6%) | | | |
| Query: | 451 | PSKAVIDEAGQSVNGKTVLPNAELNYVAKQDFSQYKGMTASQGKIAKNFVFIDDYKDDAL | 510 |
| | | P K +E G ++GK+VL Y D QYKG +++ I K F ++DDY ++AL | |
| Sbjct: | 1162 | PHKVNKNENGVVIDGKSVLAGTTNYYELTWDLDQYKGDKSAKETIQKGFFYVDDYPEEAL | 1221 |
| Query: | 511 | DGKSMKVNSIKASDGTDVSQL-LEMRHVLSTDTLDEKLQTLIKEAGISPVGEFYMWTAKD | 569 |
| | | D ++ + IK +D + + + S + +Q ++K+A I+P G F ++TA D | |
| Sbjct: | 1222 | D---LRTDLIKLTDANGKAVTGVSVADYASLEAAPAAVQDMLKKANITPKGAFQVFTADD | 1278 |
| Query: | 570 | PQAFYKAYVQKGLDVTYNLSFKVKKEFTK--GQIQNGVAQIDFGNGYTGNIVVNDLTTPE | 627 |
| | | PQAFY AYV G D+T VK E K G +N QIDFGNGY NIV+N++ | |
| Sbjct: | 1279 | PQAFYDAYVVTGTDLTIVTPMTVKAEMGKIGGSYENKAYQIDFGNGYESNIVINNVPQIN | 1338 |
| Query: | 628 | IHKDV---LDKEDGKSINNGTVKLGDEVTYKLEGWVVPTGRSYDLFEYKFVDQLQRTPDL | 684 |
| | | KDV +D D +++ T+ L Y+L G ++P + +LFEY F D +T D | |
| Sbjct: | 1339 | PEKDVTLTMDPADSTNVDGQTIALNQVFNYRLIGGIIPADHAEELFEYSFSDDYDQTGDQ | 1398 |
| Query: | 685 | YLRD-KVVAKVDVTLKDGTVIKKGTNLGEYTETVYNKKTGLYELVFKKDFLEKVARSSEF | 743 |
| | | Y K AKVD+TLKDGT+IK GT+L YTE ++ G + FK+DFL V+ S F | |
| Sbjct: | 1399 | YTGQYKAFAKVDLTLKDGTIIKAGTDLTSYTEAQVDEANGQIVVTFKEDFLRSVSVDSAF | 1458 |
| Query: | 744 | GADDFVVVKRIKAGDVYNTADFFINGNKVKTETVVTHTPE--KPKPVEPQ---------- | 791 |
| | | A+ ++ +KRI G NT +NG + TV T TPE +P PV+P+ | |
| Sbjct: | 1459 | QAEVYLQMKRIAVGTFANTYVNTVNGITYSSNTVRTSTPEPKQPSPVDPKTTTTVVFQPR | 1518 |
| Query: | 792 | --KATPKAPAKG--LPQTGEASVAPLTALGAIILSA-IGLAGFKKRKE | 834 |
| | | KA AP G LP TG++S A L LG + L+A L G +++++ | |
| Sbjct: | 1519 | QGKAYQPAPPAGAQLPATGDSSNAYLPLLGLVSLTAGFSLLGLRRKQD | 1566 |
| Identities = 75/242 (30%), Positives = 120/242 (48%), Gaps = 33/242 (13%) | | | |
| Query: | 11 | SADQVTTQATTQTVTQNQAETVTSTQLDKAVATAKKAAVAVTTTAAVNHATTTDAQADLA | 70 |
| | | S+ T+QA T + V++++LD+A +A++A V V+ A VN T + D A | |
| Sbjct: | 73 | SSQAETSQAQAGQKTGAMSVDVSTSELDEAAKSAQEAGVTVSQDATVNKGTVETS--DEA | 130 |
| Query: | 71 | NQTQT-VKDVTAKAQANTQAIKDATAENAKIDAENKAESQRVSQLNAQTKAKID---AEN | 126 |
| | | NQ +T +KD +K A+ I+ T + A N+AE+ R++Q NA KA+ + A N | |
| Sbjct: | 131 | NQKETEIKDDYSKQAAD---IQKTTEDYKAAVAANQAETDRITQENAAKKAQYEQDLAAN | 187 |
| Query: | 127 | KDAQAKADATNAQLQKDYQAKLAKIKSVEAYNAGVRQRNKDAQA--------------KA | 172 |
| | | K + NAQ + DY+AKLA+ + A V+Q N D+QA + | |
| Sbjct: | 188 | KAEVERITNENAQAKADYEAKLAQYQKDLA---AVQQANNDSQAAYAAAKEAYDKELARV | 244 |
| Query: | 173 | DATNAQLQKDYQAKLA---LYNQALKAKAEADKQSINNVAFDIKAQ----AKGVDNAEYG | 225 |
| | | A NA +K+Y+ LA N+ +KA+ A +Q D +A+ K + A+ G | |
| Sbjct: | 245 | QAANAAAKKEYEEALAANTTKNEQIKAENAAIQQRNAQAKADYEAKLAQYEKDLAAAQSG | 304 |
| Query: | 226 | NS | 227 |
| | | N+ | |
| Sbjct: | 305 | NA | 306 |
| Identities = 63/223 (28%), Positives = 100/223 (44%), Gaps = 31/223 (13%) | | | |
| Query: | 2 | ITTLQTSQVSADQVTTQATTQTVTQNQAETVTSTQLDKAVATAK-----------KAAVA | 50 |
| | | + +Q + +A + +A T+N+ + + + A AK K A | |
| Sbjct: | 241 | LARVQAANAAAKKEYEEALAANTTKNEQIKAENAAIQQRNAQAKADYEAKLAQYEKDLAA | 300 |
| Query: | 51 | VTTTAAVNHATTTDAQADLANQTQTVKDVTAKA-QANTQAIKDATAENAKIDAENKAESQ | 109 |
| | | + A N A +A + V+ A A QA QA+ TA+NA+I AEN+A Q | |
| Sbjct: | 301 | AQSGNATNEADYQAKKAAYEQELARVQAANAAAKQAYEQALAANTAKNAQITAENEAIQQ | 360 |
| Query: | 110 | RVSQLNAQTKAKIDAENKDAQAKADATNAQLQKDYQAKLA----KIKSVEAYNAGVRQRN | 165 |
| | | R +Q A +AK+ KD A A + NA + DYQ KLA ++ V+A NA +Q | |
| Sbjct: | 361 | RNAQAKANYEAKLAQYQKDL-AAAQSGNAANEADYQEKLAAYEKELARVQAANAAAKQEY | 419 |
| Query: | 166 | KDAQAKADATNAQL--------------QKDYQAKLALYNQAL | 194 |
| | | + +A+A NA++ + DY+ KL+ Y + L | |
| Sbjct: | 420 | EQKVQEANAKNAEITEANRAIRERNAKAKTDYELKLSKYQEEL | 462 |
| Identities = 75/243 (30%), Positives = 101/243 (40%), Gaps = 56/243 (23%) | | | |
| Query: | 8 | SQVSAD-QVTTQATTQTVTQNQAETVTSTQLDKAVATAKKAAVAVTTTAAVNHATTTDAQ | 66 |
| | | S+ +AD Q TT+ V NQAET TQ + A A+ A V T +AQ | |
| Sbjct: | 142 | SKQAADIQKTTEDYKAAVAANQAETDRITQ-ENAAKKAQYEQDLAANKAEVERITNENAQ | 200 |
| Query: | 67 | ADL---ANQTQTVKDVTAKAQANT--------------------------------QAIK | 91 |
| | | A A Q KD+ A QAN +A+ | |
| Sbjct: | 201 | AKADYEAKLAQYQKDLAAVQQANNDSQAAYAAAKEAYDKELARVQAANAAAKKEYEEALA | 260 |
| Query: | 92 | DATAENAKIDAENKAESQRVSQLNAQTKAKIDAENKDAQAKADATNAQLQKDYQAKLA-- | 149 |
| | | T +N +I AEN A QR +Q A +AK+ KD A A + NA + DYQAK A | |
| Sbjct: | 261 | ANTTKNEQIKAENAAIQQRNAQAKADYEAKLAQYEKDL-AAAQSGNATNEADYQAKKAAY | 319 |
| Query: | 150 | --KIKSVEAYNAGVRQRNKDAQAKADATNAQL--------------QKDYQAKLALYNQA | 193 |
| | | ++ V+A NA +Q + A A A NAQ+ + +Y+AKLA Y + | |
| Sbjct: | 320 | EQELARVQAANAAAKQAYEQALAANTAKNAQITAENEAIQQRNAQAKANYEAKLAQYQKD | 379 |
| Query: | 194 | LKA | 196 |
| | | L A | |
| Sbjct: | 380 | LAA | 382 |

[3416] There is also homology to SEQ ID 598.

[3417] SEQ ID 1814 (GBS191) was expressed in E. coli as a His-fusion product. SDS-PAGE analysis of total cell extract is shown in FIG. 176 (lane 2; MW 91 kDa).

[3418] Based on this analysis, it was predicted that this protein and its epitopes, could be useful antigens for vaccines or diagnostics.

### EXAMPLE 582

[3419] A DNA sequence (GBSx0622) was identified in S. agalactiae <SEQ ID 1815> which encodes the amino acid sequence <SEQ ID 1816>. This protein is predicted to be TnpA. Analysis of this protein sequence reveals the following:

```
Possible site: 34
>>> Seems to have no N-terminal signal sequence
----- Final Results -----
                            bacterial cytoplasm --- Certainty = 0.2935(Affirmative) < succ>
                              bacterial membrane --- Certainty = 0.0000(Not Clear) < succ>
                                bacterial outside --- Certainty = 0.0000(Not Clear) < succ>
```

[3420] A related GBS nucleic acid sequence <SEQ ID 10221> which encodes amino acid sequence <SEQ ID 10222> was also identified.

[3421] A related GBS nucleic acid sequence <SEQ ID 9921> which encodes amino acid sequence <SEQ ID 9922> was also identified.

[3422] The protein has homology with the following sequences in the GENPEPT database:

| >GP: AAC82523 GB: AF027768 TnpA [Serratia marcescens] | | | |
|---|---|---|---|
| Identities = 168/385 (43%), Positives = 232/385 (59%), | | | |
| Gaps = 13/385 (3%) | | | |
| Query: | 26 | MMFKVEAVGPPERCPECGFD-KLYKHSSRNQLIMDLPIRLKRVGLHLNRRRYKCRECGST | 84 |
| | | M F+V+ V P C ECG + + R+ DLPI KRV L + RRRY CR C +T | |
| Sbjct: | 1 | MHFQVD-VPDPIACEECGVQGEFVRFGKRDVPYRDLPIHGKRVTLWVVRRRYTCRACKTT | 59 |
| Query: | 85 | IS------VDEKRSMTKRLLKSIQEQSMSKTFVEVAESVGVDEKTIRNVFKDYVALKERE | 138 |
| | | VD R MT RL + ++++S + + VA G+DEKT+R++F R | |
| Sbjct: | 60 | FRPQLPEMVDGFR-MTLRLHEYVEKESFNHPYTFVAAQTGLDEKTVRDIFNARAEFLGRW | 118 |
| Query: | 139 | YQFETPKWLGIDEIHIIRRPRLVLTNIERRTIYDIKPNRNKETVIQRLSEISDRTYIEYV | 198 |
| | | ++FETP+ LGIDE+++ +R R +LTNIE RT+ D+ R ++ V L ++ DR +E V | |
| Sbjct: | 119 | HRFETPRILGIDELYLNKRYRCILTNIEERTLLDLLATRRQDVVTNYLMKLKDRQKVEIV | 178 |
| Query: | 199 | TMDMWKPYKDAVNTILPQAKVVVDKFHVVRMANQALDNVRKSLKAHMSQKERRTLMRERF | 258 |
| | | +MDMW PY+ AV +LPQA++VVDKFHVVRMAN AL+ VRK L+ + + RTL +R | |
| Sbjct: | 179 | SMDMWNPYRAAVKAVLPQARIVVDKFHVVRMANDALERVRKGLRKELKPSQSRTLKGDRK | 238 |
| Query: | 259 | ILLKRKHDLNERESFLLDTWLGNLPALKEAYELKEEFYWIWDTPDPDEGHLRYSQWRHRC | 318 |
| | | ILLKR H++++RE +++TW G P L AYE KE FY IWD + +W | |
| Sbjct: | 239 | ILLKRAHEVSDRERLIMETWTGAFPQLLAAYEHKERFYGIWDATTRLQAEAALDEWI-AT | 297 |
| Query: | 319 | MSSNSKDAYKDLVRAVDNWHVEIFNYF--DKRLTNAYTESINSIIRQVERMGRGYSFDAL | 376 |
| | | + K+ + DLVRAV NW E YF D +TNAYTESIN + + R GRGYSF+ + | |
| Sbjct: | 298 | IPKGQKEVWSDLVRAVGNWREETMTYFETDMPVTNAYTESINRLAKDKNREGRGYSFEVM | 357 |
| Query: | 377 | RAKILFNEKLHKKRKPRFNSSAFNK | 401 |
| | | RA++L+ K HKK+ P S F K | |
| Sbjct: | 358 | RARMLYTTK-HKKKAPTAKVSPFYK | 381 |

[3423] No corresponding DNA sequence was identified in S. pyogenes.

[3424] Based on this analysis, it was predicted that these proteins and their epitopes could be useful antigens for vaccines or diagnostics.

### EXAMPLE 583

[3425] A DNA sequence (GBSx0623) was identified in S. agalactiae <SEQ ID 1817> which encodes the amino acid sequence <SEQ ID 1818>. This protein is predicted to be mercuric reductase. Analysis of this protein sequence reveals the following:

```
Possible site: 53
>>> Seems to have no N-terminal signal sequence
----- Final Results -----
                            bacterial cytoplasm --- Certainty = 0.2115(Affirmative) < succ>
                              bacterial membrane --- Certainty = 0.0000(Not Clear) < succ>
                                bacterial outside --- Certainty = 0.0000(Not Clear) < succ>
```

[3426] The protein has homology with the following sequences in the GENPEPT database:

| >GP: CAA70224 GB: Y09024 mercuric reductase | | | |
|---|---|---|---|
| [Bacillus cereus] | | | |
| Identities = 411/546 (75%), Positives = 483/546 (88%) | | | |
| Query: | 1 | MNKFKVNISGMTCTGCEKHVESALEKIGAKNIESSYRRGEAVFELPDDIEVESAIKAIDE | 60 |
| | | M K++V++ GMTCTGCE+HV ALE +GA IE +RRGEAVFELP+ + VE+A KAI + | |
| Sbjct: | 1 | MKKYRVDVQGMTCTGCEEHVAVALENMGATGIEVDFRRGEAVFELPNALGVETAKKAISD | 60 |
| Query: | 61 | ANYQAGEIEEVSSLENVALINEDNYDLLIIGSGAAAFSSAIKAIEYGAKVGMIERGTVGG | 120 |
| | | A YQ G+ EEV S E V L NE +YD +IIGSG AAFSSAI+A++YGAKV MIERGT+GG | |
| Sbjct: | 61 | AKYQPGKAEEVQSQEMVQLGNEGDYDYIIIGSGGAAFSSAIEAVKYGAKVAMIERGTIGG | 120 |
| Query: | 121 | TCVNIGCVPSKTLLRAGEINHLSKDNPFIGLQTSAGEVDLASLITQKDKLVSELRNQKYM | 180 |
| | | TCVNIGCVPSKTLLRAGEINHL+K+NPF+GL TSAGEVDLA LI QK++LV+ELRN KY+ | |
| Sbjct: | 121 | TCVNIGCVPSKTLLRAGEINHLAKNNPFVGLHTSAGEVDLAPLIKQKNELVTELRNSKYV | 180 |
| Query: | 181 | DLIDEYNFDLIKGEAKFVDASTVEVNGTKLSAKRFLIATGASPSLPQISGLEKMDYLTST | 240 |
| | | DLID+Y F+LI+GEAKFVD TVEVNG +SAKRFLIATGASP+ P I GL ++DYLTST | |
| Sbjct: | 181 | DLIDDYGFELIEGEAKFVDEKTVEVNGAPISAKRFLIATGASPAKPNIPGLNEVDYLTST | 240 |
| Query: | 241 | TLLELKKIPKRLTVIGSGYIGMELGQLFHHLGSEITLMQRSERLLKEYDPEISESVEKAL | 300 |
| | | +LLELKK+PKRL VIGSGYIGMELGQLFH+LGSE+TL+QRSERLLKEYDPEISESVEK+L | |
| Sbjct: | 241 | SLLELKKVPKRLVVIGSGYIGMELGQLFHNLGSEVTLIQRSERLLKEYDPEISESVEKSL | 300 |
| Query: | 301 | IEQGINLVKGATFERVEQSGEIKRVYVTVNGSREVIESDQLLVATGRKPNTDSLNLSAAG | 360 |
| | | +EQGINLVKGAT+ER+EQ+G+IK+V+V VNG + +IE+DQLLVATGR PNT +LNL AAG | |
| Sbjct: | 301 | VEQGINLVKGATYERIEQNGDIKKVHVEVNGKKRIIEADQLLVATGRTPNTATLNLRAAG | 360 |
| Query: | 361 | VETGKNNEILINDFGQTSNEKIYAAGDVTLGPQFVYVAAYEGGIITDNAIGGLNKKIDLS | 420 |
| | | VE G EI+I+D+ +T+N +IYAAGDVTLGPQFVYVAAY+GG+ NAIGGLNKK++L | |
| Sbjct: | 361 | VEIGSRGEIIIDDYSRTTNTRIYAAGDVTLGPQFVYVAAYQGGVAAPNAIGGLNKKLNLE | 420 |
| Query: | 421 | VVPAVTFTNPTVATVGLTEEQAKEKGYDVKTSVLPLGAVPRAIVNRETTGVFKLVADAET | 480 |
| | | VVP VTFT P +ATVGLTE+QAKE GY+VKTSVLPL AVPRA+VNRETTGVFKLVAD++T | |
| Sbjct: | 421 | VVPGVTFTAPAIATVGLTEQQAKENGYEVKTSVLPLDAVPRALVNRETTGVFKLVADSKT | 480 |
| Query: | 481 | LKVLGVHIVSENAGDVIYAASLAVKFGLTIEDLTETLAPYLTMAEGLKLVALTFDKDISK | 540 |
| | | +KVLG H+V+ENAGDVIYAA+LAVKFGLT++D+ ETLAPYLTMAEGLKL ALTFDKDISK | |
| Sbjct: | 481 | MKVLGAHVVAENAGDVIYAATLAVKFGLTVDDIRETLAPYLTMAEGLKLAALTFDKDISK | 540 |
| Query: | 541 | LSCCAG | 546 |
| | | LSCCAG | |
| Sbjct: | 541 | LSCCAG | 546 |

[3427] There is also homology to SEQ ID 1820.

[3428] Based on this analysis, it was predicted that this protein and its epitopes, could be useful antigens for vaccines or diagnostics.

### EXAMPLE 584

[3429] A DNA sequence (GBSx0624) was identified in S. agalactiae <SEQ ID 1821> which encodes the amino acid sequence <SEQ ID 1822>. This protein is predicted to be regulatory protein. Analysis of this protein sequence reveals the following:

```
Possible site: 36
>>> Seems to have no N-terminal signal sequence
----- Final Results -----
                            bacterial cytoplasm --- Certainty = 0.4529(Affirmative) < succ>
                              bacterial membrane --- Certainty = 0.0000(Not Clear) < succ>
                                bacterial outside --- Certainty = 0.0000(Not Clear) < succ>
```

[3430] The protein has homology with the following sequences in the GENPEPT database:

| >GP: AAA83973 GB: AF138877 mercury resistance operon negative | | | |
|---|---|---|---|
| regulator MerR1 [Bacillus sp. RC607] | | | |
| Identities = 84/129 (65%), Positives = 105/129 (81%) | | | |
| Query: | 1 | MIYRISEFADKCGVNKETIRYYERKNLLQEPHRTEAGYRIYSYDDVKRVGFIKRIQELGF | 60 |
| | | M +RI E ADKCGVNKETIRYYER L+ EP RTE GYR+YS V R+ FIKR+QELGF | |
| Sbjct: | 1 | MKFRIGELADKCGVNKETIRYYERLGLIPEPERTEKGYRMYSQQTVDRLHFIKRMQELGF | 60 |
| Query: | 61 | SLSEIYKLLGVVDKDEVRCQDMFEFVSKKQKEVQKQIEDLKRIETMLDDLKQRCPDEKKL | 120 |
| | | +L+EI KLLGVVD+DE +C+DM++F K +++Q++IEDLKRIE ML DLK+RCP+ K + | |
| Sbjct: | 61 | TLNEIDKLLGVVDRDEAKCRDMYDFTILKIEDIQRKIEDLKRIERMLMDLKERCPENKDI | 120 |
| Query: | 121 | HSCPIIETL | 129 |
| | | + CPIIETL | |
| Sbjct: | 121 | YECPIIETL | 129 |

[3431] There is also homology to SEQ ID 1712.

[3432] Based on this analysis, it was predicted that this protein and its epitopes, could be useful antigens for vaccines or diagnostics.

### EXAMPLE 585

[3433] A DNA sequence (GBSx0625) was identified in S. agalactiae <SEQ ID 1823> which encodes the amino acid sequence <SEQ ID 1824>. This protein is predicted to be Nramp metal ion transporter. Analysis of this protein sequence reveals the following:

| Possible site: 53 | | | | |
|---|---|---|---|---|
| >>> Seems to have no N-terminal signal sequence | | | | |
| | INTEGRAL | Likelihood = −13.85 | Transmembrane | 175-191 (169-201) |
| | INTEGRAL | Likelihood = −11.94 | Transmembrane | 150-166 (132-173) |
| | INTEGRAL | Likelihood = −9.45 | Transmembrane | 491-507 (481-509) |
| | INTEGRAL | Likelihood = −8.92 | Transmembrane | 375-391 (374-396) |
| | INTEGRAL | Likelihood = −8.39 | Transmembrane | 72-88 (69-93) |
| | INTEGRAL | Likelihood = −7.96 | Transmembrane | 280-296 (274-299) |
| | INTEGRAL | Likelihood = −7.17 | Transmembrane | 413-429 (411-431) |
| | INTEGRAL | Likelihood = −6.79 | Transmembrane | 327-343 (322-346) |
| | INTEGRAL | Likelihood = −3.40 | Transmembrane | 444-460 (443-462) |
| | INTEGRAL | Likelihood = −3.24 | Transmembrane | 132-148 (132-149) |
| | INTEGRAL | Likelihood = −0.96 | Transmembrane | 115-131 (114-131) |

```
----- Final Results -----
                              bacterial membrane --- Certainty = 0.6540(Affirmative) < succ>
                                bacterial outside --- Certainty = 0.0000(Not Clear) < succ>
                            bacterial cytoplasm --- Certainty = 0.0000(Not Clear) < succ>
```

[3434] The protein has homology with the following sequences in the GENPEPT database:

| >GP: AAF83825 GB: AE003939 manganese transport protein [Xylella | | | |
|---|---|---|---|
| fastidiosa] | | | |
| Identities = 185/450 (41%), Positives = 278/450 (61%), | | | |
| Gaps = 29/450 (6%) | | | |
| Query: | 16 | ANGPSLEEINGTIEVPKDLSFFKTLLAYSGPGALVAVGYMDPGNWSTSITGGQNFQYLLI | 75 |
| | | ++ PSL E++ ++ V + + LLA+ GPG +V+VGYMDPGNW+T + GG F Y+L+ | |
| Sbjct: | 35 | SDSPSLGEMHASVAVSRRGHWGFRLLAFLGPGYMVSVGYMDPGNWATGLAGGSRFGYMLL | 94 |
| Query: | 76 | SIILMSSLIAMLLQYMSAKLGIVTQMDLAQAIRARTSKQLGIVLWILTELAIMATDIAEV | 135 |
| | | S+IL+S+++A++LQ ++A+LGI + MDLAQA RAR S+ + LW++ ELAI+A D+AEV | |
| Sbjct: | 95 | SVILLSNVMAIVLQALAARLGIASDMDLAQACRARYSRGTTLALWVVCELAIIACDLAEV | 154 |
| Query: | 136 | IGGAIALYLLFHIPLAIAVFITVFDVLLLLLLTKIGFRKIEALVVALILVIFLVFAYQVA | 195 |
| | | IG AIAL LL +P+ V IT DV+L+LLL GFR +EA V+AL+LVIF F Q+ | |
| Sbjct: | 155 | IGTAIALNLLLGVPIIWGVVITAVDVVLVLLLMHRGFRALEAFVIALLLVIFGCFVVQIV | 214 |
| Query: | 196 | LSHPIWTDIFKGLVPTSEAFSTSHTVNGQTPLSGALGIIGATVMPHNLYLHSSVVQSRKL | 255 |
| | | L+ P ++ G VP + V L A+GI+GATVMPHNLYLHSS+VQ+R | |
| Sbjct: | 215 | LAAPPLQEVLGGFVPRWQ------VVADPQALYLAIGIVGATVMPHNLYLHSSIVQTRAY | 268 |
| Query: | 256 | DHNNKKDIAR--AIRFSTFDSNIQLTVAFFVNSLLLIMGVAVFKTGSVTDPSFFGLFKAL | 313 |
| | | + + R A+R++ DS + L +A F+N+ +LI+ AVF D | |
| Sbjct: | 269 | P---RTPVGRRSALRWAVADSTLALMLALFINASILILAAAVFHAQHHFD---------- | 315 |
| Query: | 314 | SNSTIMSNSILAHIASSGILSLLFAIALLASGQNSTITGTLTGQIIMEGFIHMKVPIWFR | 373 |
| | | + +LA + G+ + LFA ALLASG NST+T TL GQI+MEGF+ +++ W R | |
| Sbjct: | 316 | VEEIEQAYQLLAPVLGVGVAATLFATALLASGINSTVTATLAGQIVMEGFLRLRLRPWLR | 375 |
| Query: | 374 | RIITRLISVIPVMICVLVTSGRSTVEEHIAINNLMNNSQVFLAFALPFSMLPLLIFTNSK | 433 |
| | | R++TR ++++PV++ V + + T L+ SQV L+ LPF+++PLL + | |
| Sbjct: | 376 | RVLTRGLAIVPVIVVVALYGEQGT-------GRLLLLSQVILSMQLPFAVIPLLRCVADR | 428 |
| Query: | 434 | VEMDDDFKNTWIIKILGWLSVIGLIYLNMK | 463 |
| | | M W++ ++ WL ++ LN+K | |
| Sbjct: | 429 | KVMGALVAPRWLM-VVAWLIAGVIVVLNVK | 457 |

[3435] No corresponding DNA sequence was identified in S. pyogenes.

[3436] Based on this analysis, it was predicted that this protein and its epitopes, could be useful antigens for vaccines or diagnostics.

### EXAMPLE 586

[3437] A DNA sequence (GBSx0626) was identified in S. agalactiae <SEQ ID 1825> which encodes the amino acid sequence <SEQ ID 1826>. Analysis of this protein sequence reveals the following:

```
Possible site: 20
>>> Seems to have no N-terminal signal sequence
----- Final Results -----
                            bacterial cytoplasm --- Certainty = 0.2590(Affirmative) < succ>
                              bacterial membrane --- Certainty = 0.0000(Not Clear) < succ>
                                bacterial outside --- Certainty = 0.0000(Not Clear) < succ>
```

[3438] The protein has no significant homology with any sequences in the GENPEPT database.

[3439] No corresponding DNA sequence was identified in S. pyogenes.

[3440] Based on this analysis, it was predicted that this protein and its epitopes, could be useful antigens for vaccines or diagnostics.

### EXAMPLE 587

[3441] A DNA sequence (GBSx0627) was identified in S. agalactiae <SEQ ID 1827> which encodes the amino acid sequence <SEQ ID 1828>. Analysis of this protein sequence reveals the following:

| Possible site: 53 | | | | |
|---|---|---|---|---|
| >>> Seems to have no N-terminal signal sequence | | | | |
| | INTEGRAL | Likelihood = −9.82 | Transmembrane | 212-228 (204-233) |
| | INTEGRAL | Likelihood = −8.39 | Transmembrane | 98-114 (94-125) |
| | INTEGRAL | Likelihood = −7.22 | Transmembrane | 132-148 (122-154) |
| | INTEGRAL | Likelihood = −6.42 | Transmembrane | 159-175 (155-188) |
| | INTEGRAL | Likelihood = −4.78 | Transmembrane | 54-70 (51-72) |
| | INTEGRAL | Likelihood = −2.97 | Transmembrane | 18-34 (15-36) |

```
----- Final Results -----
                              bacterial membrane --- Certainty = 0.4927(Affirmative) < succ>
                                bacterial outside --- Certainty = 0.0000(Not Clear) < succ>
                            bacterial cytoplasm --- Certainty = 0.0000(Not Clear) < succ>
```

[3442] The protein has homology with the following sequences in the GENPEPT database:

| >GP: CAB16051 GB: Z99124 yydJ [Bacillus subtilis] | | | |
|---|---|---|---|
| Identities = 97/239 (40%), Positives = 154/239 (63%), | | | |
| Gaps = 3/239 (1%) | | | |
| Query: | 4 | LEFRKSIRGRTLFYIISTVALTYVLGYILPVGIDKIRHLTLGEFYFSTYTVFTQFGFLIF | 63 |
| | | LEF+KSI + + + + ++LGY L VGIDK+ ++T F+FS+YTV TQFG ++F | |
| Sbjct: | 3 | LEFKKSISNKVIIILGAMFVFLFLLGYFLLVGIDKVSNVTPEMFFFSSYTVATQFGLMLF | 62 |
| Query: | 64 | GFVIVYFFNKDYSDKCILYHYFSGYHLTKYFYTKLLVLFSEFFIAIIVCNILASLLWGYS | 123 |
| | | FVI +F N++YS+K IL++ G ++ +FY K+ VLF E F I + ++ SL++ + | |
| Sbjct: | 63 | SFVIAFFINREYSNKNILFYKLIGENIYTFFYKKIAVLFLECFAFITLGLLIISLMY-HD | 121 |
| Query: | 124 | LFYFLTTTILFSLVVLQYLLVVSTISILFSNMLVSIGVTIFYWITSIILVAIGG-IFKVS | 182 |
| | | +F LFS V+LQY+L++ TIS+L N+L+SIGV+I YW+TS+ILVAI F | |
| Sbjct: | 122 | FSHFALLLFLFSAVILQYILIIGTISVLCPNILISIGVSIVYWMTSVILVAISNKTFGFI | 181 |
| Query: | 183 | AIFDASNSLYKIIGK-LFSHPMTIDLTDFFIIVPYMICLSVISFLIVCLSNRRWLLNGM | 240 |
| | | A F+A N++Y I + L S MT+ D I+ Y++ + +I+ +++ S RW+ G+ | |
| Sbjct: | 182 | APFEAGNTMYPRIERVLQSDNMTLGSNDVLFIILYLVSIIIINAIVLRFSKTRWIKMGL | 240 |

[3443] No corresponding DNA sequence was identified in S. pyogenes.

[3444] Based on this analysis, it was predicted that this protein and its epitopes, could be useful antigens for vaccines or diagnostics.

### EXAMPLE 588

[3445] A DNA sequence (GBSx0628) was identified in S. agalactiae <SEQ ID 1829> which encodes the amino acid sequence <SEQ ID 1830>. This protein is predicted to be antibiotic epidermin immunity protein F. Analysis of this protein sequence reveals the following:

```
Possible site: 43
>>> Seems to have no N-terminal signal sequence
----- Final Results -----
                            bacterial cytoplasm --- Certainty = 0.2901(Affirmative) < succ>
                              bacterial membrane --- Certainty = 0.0000(Not Clear) < succ>
                                bacterial outside --- Certainty = 0.0000(Not Clear) < succ>
```

[3446] The protein has homology with the following sequences in the GENPEPT database:

| >GP:CAB16052 GB:Z99124 similar to ABC transporter (ATP-binding | | | |
|---|---|---|---|
| protein) [Bacillus subtilis] | | | |
| Identities = 100/209 (47%), Positives = 150/209 (70%), Gaps = 4/209 (1%) | | | |
| Query: | 1 | MFINNYTLKIGNRILLENTNLDFEEGEINHLLGRNGSGKSQLAKDFIINRGNYFSNDIYE | 60 |
| | | M I NYTLK+ + LL++T+L F G+INH++G+NG GKSQLAKDF++N DI + | |
| Sbjct: | 1 | MNIANYTLKVKGKTLLQDTDLHFSSGKINHVVGKNGVGKSQLAKDFLLNNSERIGRDIRQ | 60 |
| Query: | 61 | DTLIISSYSNLPSDVT----INDLERTIPWKLSKEIYQLLNINQISKTVKLKQLSDGQKQ | 116 |
| | | + +ISS SN+P+DV+ ++ L + K+ +I LLN++ I V +K LSDGQKQ | |
| Sbjct: | 61 | NVSLISSSSNIPNDVSKDFLLHFLSKKFDAKMIDKIAYLLNLDNIDGKVLIKNLSDGQKQ | 120 |
| Query: | 117 | KVKLLVLLSLDKHIIILDEITNALDKKSVDEINVFLQNYIQYYPEKIIINISHDINNIRS | 176 |
| | | K+KLL L DK+II+LDEITN+LDKK+V EI+ FL YIQ PEKIIINI+HD++++++ | |
| Sbjct: | 121 | KLKLLSFLLEDKNIIVLDEITNSLDKKTVIEIHGFLNKYIQENPEKIIINITHDLSDLKA | 180 |
| Query: | 177 | LKGNYFLIDNQKICKVDTLDDAISWYLGE | 205 |
| | | ++G+Y++ ++Q+I + ++D I Y+ E | |
| Sbjct: | 181 | IEGDYYIFNHQEIQQYHSVDKLIEVYINE | 209 |

[3447] A related DNA sequence was identified in S. pyogenes <SEQ ID 1831> which encodes the amino acid sequence <SEQ ID 1832>. Analysis of this protein sequence reveals the following:

```
Possible site: 13
>>> Seems to have no N-terminal signal sequence
----- Final Results -----
                            bacterial cytoplasm --- Certainty = 0.2760(Affirmative) < succ>
                              bacterial membrane --- Certainty = 0.0000(Not Clear) < succ>
                                bacterial outside --- Certainty = 0.0000(Not Clear) < succ>
```

[3448] An alignment of the GAS and GBS proteins is shown below:

| Identities = 49/174 (28%), Positives = 82/174 (46%), Gaps = 27/174 (15%) | | | |
|---|---|---|---|
| Query: | 3 | INNYTLKIGNRILLENTNLDFEEGEINHLLGRNGSGKSQLAK----------DFIINRGN | 52 |
| | | I N G R +L N N++ +G++ L+G NG+GKS + K II G | |
| Sbjct: | 23 | IQNLKKSYGKRTILNNVNMNIPKGKVYALIGPNGAGKSTIMKILTGLVSKTSGSIIFEGR | 82 |
| Query: | 53 | YFS-------NDIYEDTLI---ISSYSNLPSDVTINDL-ERTIPWKLSKEIYQLLNINQI | 101 |
| | | +S I E+ + +S+Y N+ T+ + E TI L+K + + I | |
| Sbjct: | 83 | EWSRRDLRKIGSIIEEPPLYKNLSAYDNMKVVTTMLGVSESTILPLLNK-----VGLGNI | 137 |
| Query: | 102 | SKTVKLKQLSDGQKQKVKLLVLLSLDKHIIILDEITNALDKKSVDEINVFLQNY | 155 |
| | | K +KQ S G KQ++ + + L ++ILDE TN LD + E+ ++++ | |
| Sbjct: | 138 | DKR-PVKQFSLGMKQRLGIAISLINSPKLLILDEPTNGLDPIGIQELREIIESF | 190 |

[3449] Based on this analysis, it was predicted that these proteins and their epitopes could be useful antigens for vaccines or diagnostics.

### EXAMPLE 589

[3450] A DNA sequence (GBSx0629) was identified in S. agalactiae <SEQ ID 1833> which encodes the amino acid sequence <SEQ ID 1834>. This protein is predicted to be aminoglycoside 6-adenylyltransferase. Analysis of this protein sequence reveals the following:

```
Possible site: 33
>>> Seems to have no N-terminal signal sequence
----- Final Results -----
                            bacterial cytoplasm --- Certainty = 0.1780(Affirmative) < succ>
                              bacterial membrane --- Certainty = 0.0000(Not Clear) < succ>
                                bacterial outside --- Certainty = 0.0000(Not Clear) < succ>
```

[3451] The protein has homology with the following sequences in the GENPEPT database:

| >GP:CAA29839 GB:X06627 ORF (str) [Staphylococcus aureus] | | | |
|---|---|---|---|
| Identities = 91/289 (31%), Positives = 146/289 (50%), Gaps = 14/289 (4%) | | | |
| Query: | 1 | MRDEQEIYNLVLNIANQDKRIEAVLLNGSRANPNVPKDDFQDYDIVFVTNFIEDIISDTN | 60 |
| | | MR E+EI NLV A Q ++ + L GSR N N+ KD FQDYD F + IE + + | |
| Sbjct: | 1 | MRTEKEILNLVSEFAYQRSNVKIIALEGSRTNENIKKDKFQDYDFAFFVSDIEYFTHEES | 60 |
| Query: | 61 | YHKKFGDILIMQKPNE---FRNKTEYNCFAYLMQFQDLTRIDLRLIKPEFLEDYLDDA-- | 115 |
| | | + FG++L +QKP + F +Y ++Y+M F+D ++D+ LI + L Y D+ | |
| Sbjct: | 61 | WLSLFGELLFIQKPEDMELFPPDLDYG-YSYIMYFKDGIKMDITLINLKDLNRYFSDSDG | 119 |
| Query: | 116 | FSKVLLDKKNKYLDYNFERSSLYETKQLSEDEINKILNEIYWVSTYVVKGIARNDIIYSE | 175 |
| | | K+L+DK N S Y K+ +E E NE + VSTYV KG+ R +I+++ | |
| Sbjct: | 120 | LVKILVDKDNLVTQEIVPDDSNYWLKKPTEREFYDCCNEFWSVSTYVARGVFRREILFAL | 179 |
| Query: | 176 | FMISNPIKNAFIKLLKQKILIEKELDSLSFGKLDKDILQYITDKD--QLLKIFSNKSLKD | 233 |
| | | +N ++ ++++ I + D S GK K I +Y+TDK+ LL F + | |
| Sbjct: | 180 | DHFNNILRPELLRMISWYIGFNRGFD-FSLGKNYKFINKYLTDKEFNMLLATFEMNGYRK | 238 |
| Query: | 234 | IEANLRFLLDETNQMAKYISINRKLNLNQGEYQSAMKFMNIFLSNSYQN | 282 |
| | | + + ++ KY S N+ L Y + K + F+ N+Y+N | |
| Sbjct: | 239 | TYQSFKLCC----ELFKYYS-NKVSCLGNYNYPNYEKNIENFIRNNYEN | 282 |

[3452] No corresponding DNA sequence was identified in S. pyogenes.

[3453] A related GBS gene <SEQ ID 8607> and protein <SEQ ID 8608> were also identified. Analysis of this protein sequence reveals the following:

```
Lipop: Possible site: −1 Crend: 5
McG: Discrim Score: −5.26
GvH: Signal Score (−7.5): −6.14
          Possible site: 33
>>> Seems to have no N-terminal signal sequence
ALOM program count: 0 value: 6.10 threshold: 0.0
      PERIPHERAL Likelihood = 6.10 151
modified ALOM score: −1.72
*** Reasoning Step: 3
----- Final Results -----
                            bacterial cytoplasm --- Certainty = 0.1780(Affirmative) < succ>
                              bacterial membrane --- Certainty = 0.0000(Not Clear) < succ>
                                bacterial outside --- Certainty = 0.0000(Not Clear) < succ>
```

[3454] The protein has homology with the following sequences in the databases:

[chemical structure]

[3455] Based on this analysis, it was predicted that these proteins and their epitopes could be useful antigens for vaccines or diagnostics.

### EXAMPLE 590

[3456] A DNA sequence (GBSx0630) was identified in S. agalactiae <SEQ ID 1835> which encodes the amino acid sequence <SEQ ID 1836>. Analysis of this protein sequence reveals the following:

```
Possible site: 29
>>> Seems to have no N-terminal signal sequence
----- Final Results -----
                            bacterial cytoplasm --- Certainty = 0.1179(Affirmative) < succ>
                              bacterial membrane --- Certainty = 0.0000(Not Clear) < succ>
                                bacterial outside --- Certainty = 0.0000(Not Clear) < succ>
```

[3457] The protein has no significant homology with any sequences in the GENPEPT database.

[3458] No corresponding DNA sequence was identified in S. pyogenes.

[3459] Based on this analysis, it was predicted that this protein and its epitopes, could be useful antigens for vaccines or diagnostics.

### EXAMPLE 591

[3460] A DNA sequence (GBSx0631) was identified in S. agalactiae <SEQ ID 1837> which encodes the amino acid sequence <SEQ ID 1838>. Analysis of this protein sequence reveals the following:

| Possible site: 44 | | | | |
|---|---|---|---|---|
| >>> Seems to have no N-terminal signal sequence | | | | |
| | INTEGRAL | Likelihood = −2.81 | Transmembrane | 177-193 (177-194) |
| | INTEGRAL | Likelihood = −0.27 | Transmembrane | 129-145 (129-145) |

```
----- Final Results -----
                              bacterial membrane --- Certainty = 0.2126(Affirmative) < succ>
                                bacterial outside --- Certainty = 0.0000(Not Clear) < succ>
                            bacterial cytoplasm --- Certainty = 0.0000(Not Clear) < succ>
```

[3461] A related GBS nucleic acid sequence <SEQ ID 8609> which encodes amino acid sequence <SEQ ID 8610> was also identified. Analysis of this protein sequence reveals the following:

| Lipop: Possible site: −1 Crend: 9 | | | | |
|---|---|---|---|---|
| McG: Discrim Score: −19.59 | | | | |
| GvH: Signal Score (−7.5): −4.49 | | | | |
| Possible site: 44 | | | | |
| >>> Seems to have no N-terminal signal sequence | | | | |
| ALOM program count: 2 value: −2.81 threshold: 0.0 | | | | |
| | INTEGRAL | Likelihood = −2.81 | Transmembrane | 172-188 (172-189) |
| | INTEGRAL | Likelihood = −0.27 | Transmembrane | 124-140 (124 140) |
| | PERIPHERAL | Likelihood = 8.01 | 30 | |

```
modified ALOM score: 1.06
*** Reasoning Step: 3
----- Final Results -----
                              bacterial membrane --- Certainty = 0.2126(Affirmative) < succ>
                                bacterial outside --- Certainty = 0.0000(Not Clear) < succ>
                            bacterial cytoplasm --- Certainty = 0.0000(Not Clear) < succ>
```

[3462] The protein has no significant homology with any sequences in the GENPEPT database.

[3463] No corresponding DNA sequence was identified in S. pyogenes.

[3464] Based on this analysis, it was predicted that these proteins and their epitopes could be useful antigens for vaccines or diagnostics.

### EXAMPLE 592

[3465] A DNA sequence (GBSx0632) was identified in S. agalactiae <SEQ ID 1839> which encodes the amino acid sequence <SEQ ID 1840>. Analysis of this protein sequence reveals the following:

```
Possible site: 27
>>> Seems to have an uncleavable N-term signal seq
----- Final Results -----
                              bacterial membrane --- Certainty = 0.0000(Not Clear) < succ>
                                bacterial outside --- Certainty = 0.0000(Not Clear) < succ>
                            bacterial cytoplasm --- Certainty = 0.0000(Not Clear) < succ>
```

[3466] A related GBS nucleic acid sequence <SEQ ID 10223> which encodes amino acid sequence <SEQ ID 10224> was also identified.

[3467] The protein has homology with the following sequences in the GENPEPT database:

| >GP: CAB49414 GB: AJ248284 hypothetical protein [Pyrococcus abyssi] | | | |
|---|---|---|---|
| Identities = 29/86 (33%), Positives = 52/86 (59%), Gaps = 4/86 (4%) | | | |
| Query: | 14 | TYYILLALFE--EAHGYAIMQKVEEMSGGDVRIAAGTMYGAIENLLKQKWIKSIPSD--D | 69 |
| | | +Y ILL L E + HGYAI +++EE++ G + + G +Y ++ L K K ++ ++ | |
| Sbjct: | 19 | SYLILLILNENEKLHGYAIRKRLEELTDGKLVPSEGALYSILKMLKKYKLVEDYWAEVGG | 78 |
| Query: | 70 | RRRKVYIITETGKEIVELETNRLRKL | 95 |
| | | R R+ Y ITE GKE+++ +R++ | |
| Sbjct: | 79 | RVRRYYQITELGKEVLDEIKEEIREI | 104 |

[3468] No corresponding DNA sequence was identified in S. pyogenes.

[3469] Based on this analysis, it was predicted that these proteins and their epitopes could be useful antigens for vaccines or diagnostics.

### EXAMPLE 593

[3470] A DNA sequence (GBSx0633) was identified in S. agalactiae <SEQ ID 1841> which encodes the amino acid sequence <SEQ ID 1842>. Analysis of this protein sequence reveals the following:

```
Possible site: 23
>>> Seems to have no N-terminal signal sequence
----- Final Results -----
                            bacterial cytoplasm --- Certainty = 0.0510(Affirmative) < succ>
                              bacterial membrane --- Certainty = 0.0000(Not Clear) < succ>
                                bacterial outside --- Certainty = 0.0000(Not Clear) < succ>
```

[3471] A related GBS nucleic acid sequence <SEQ ID 10225> which encodes amino acid sequence <SEQ ID 10226> was also identified.

[3472] The protein has homology with the following sequences in the GENPEPT database:

| >GP: AAF22299 GB: AF185571 putative N-acetyltransferase Camello 2 | | | |
|---|---|---|---|
| [Homo sapiens] | | | |
| Identities = 32/110 (29%), Positives = 54/110 (49%), Gaps = 4/110 (3%) | | | |
| Query: | 67 | IKMAEQDDIFQIENYYQNRKGQ-FWIALENERVVGSIALLRIDDKTAVLKKFFTYPKYRG | 125 |
| | | + +A + D+ I Y + G FW+A EKVVG++ L +DD T K+ + | |
| Sbjct: | 86 | VDIALRTDHSDITKSYLSECGSCFWVAESEEKVVGTVGALPVDDFTLREKRLQLFHLSVD | 145 |
| Query: | 126 | NPVR---LGRKLFERFMLFARASKFTRIVLDTPEKEKRSHFFYENQGFKQ | 172 |
| | | N R + + L + FAR ++ +VLDT + + Y++ GFK+ | |
| Sbjct: | 146 | NEHRGQGIAKALVRTVLQFARDQGYSEVVLDTSNIQLSAMGLYQSLGFKK | 195 |

[3473] No corresponding DNA sequence was identified in S. pyogenes.

[3474] Based on this analysis, it was predicted that these proteins and their epitopes could be useful antigens for vaccines or diagnostics.

### EXAMPLE 594

[3475] A DNA sequence (GBSx0634) was identified in S. agalactiae <SEQ ID 1843> which encodes the amino acid sequence <SEQ ID 1844>. Analysis of this protein sequence reveals the following:

| Possible site: 47 | | | | |
|---|---|---|---|---|
| >>> Seems to have a cleavable N-term signal seq. | | | | |
| | INTEGRAL | Likelihood = −11.94 | Transmembrane | 159-175 (151-180) |
| | INTEGRAL | Likelihood = −11.62 | Transmembrane | 231-247 (225-251) |
| | INTEGRAL | Likelihood = −9.98 | Transmembrane | 182-198 (177-203) |
| | INTEGRAL | Likelihood = −7.11 | Transmembrane | 118-134 (106-136) |
| | INTEGRAL | Likelihood = −1.49 | Transmembrane | 74-90 (74-93) |

```
----- Final Results -----
                              bacterial membrane --- Certainty = 0.5776(Affirmative) < succ>
                                bacterial outside --- Certainty = 0.0000(Not Clear) < succ>
                            bacterial cytoplasm --- Certainty = 0.0000(Not Clear) < succ>
```

[3476] A related GBS nucleic acid sequence <SEQ ID 10227> which encodes amino acid sequence <SEQ ID 10228> was also identified.

[3477] The protein has homology with the following sequences in the GENPEPT database:

| >GP:CAB15891 GB:Z99123 yxlG [Bacillus subtilis] | | | |
|---|---|---|---|
| Identities = 42/188 (22%), Positives = 94/188 (49%), Gaps = 4/188 (2%) | | | |
| Query: | 1 | MKSLAVMLKKEWMENVRTYKVISILITCSIFGILGPLTALMMPDIMA--GILPKKLQGAI | 58 |
| | | MK + +L+KEW+E ++ K+I + I I G+ PLT MP+I+A G LP ++ + | |
| Sbjct: | 1 | MKVMMALLQKEWLEGWKSGKLIWLPIAMMIVGLTQPLTIYYMPEIIANGGNLPDGMKISF | 60 |
| Query: | 59 | PEPTYIDSYIQYFKNMNQLGLVILVFLFSSTLTQEFSKGTLINLVTKGLAKKVIILAKFI | 118 |
| | | P+ + + N LG+ +++F ++ E ++G ++++ + I++K++ | |
| Sbjct: | 61 | TMPSGSEVMVSTLSQFNTLGMALVIFSVMGSVANERNQGVTALIMSRPVTAAHYIVSKWL | 120 |
| Query: | 119 | VITLLWTVSYLLSVVIHFSYTLYYFSNEGSHKLMVYGATWFIGILFI-SLILFFSVLFRK | 177 |
| | | + +++ +S+ + + Y F + + + + ++FI + L S +FR | |
| Sbjct: | 121 | IQSVIGIMSFAAGYGLAYYYVRLLFEDASFSRFAASLGLYALWVIFIVTAGLAGSTIFR- | 179 |
| Query: | 178 | TLGGLLGC | 185 |
| | | ++G C | |
| Sbjct: | 180 | SVGAAAAC | 187 |

[3478] No corresponding DNA sequence was identified in S. pyogenes.

[3479] Based on this analysis, it was predicted that these proteins and their epitopes could be useful antigens for vaccines or diagnostics.

### EXAMPLE 595

[3480] A DNA sequence (GBSx0635) was identified in S. agalactiae <SEQ ID 1845> which encodes the amino acid sequence <SEQ ID 1846>. This protein is predicted to be ABC transporter, ATP-binding protein. Analysis of this protein sequence reveals the following:

```
Possible site: 14
>>> Seems to have no N-terminal signal sequence
----- Final Results -----
                            bacterial cytoplasm --- Certainty = 0.3431(Affirmative) < succ>
                              bacterial membrane --- Certainty = 0.0000(Not Clear) < succ>
                                bacterial outside --- Certainty = 0.0000(Not Clear) < succ>
```

[3481] A related GBS nucleic acid sequence <SEQ ID 10229> which encodes amino acid sequence <SEQ ID 10230> was also identified.

[3482] The protein has homology with the following sequences in the GENPEPT database:

| >GP:CAB12736 GB:Z99108 similar to ABC transporter (ATP-binding | | | |
|---|---|---|---|
| protein) [Bacillus subtilis] | | | |
| Identities = 105/299 (35%), Positives = 175/299 (58%), Gaps = 11/299 (3%) | | | |
| Query: | 4 | ISFQNVTKSFGPKKILNNVSFDLEENMIYGFVGPNGAGKTTTIKMILGLLKFDTGFITIF | 63 |
| | | + +NVTK+ + I++++SF + E ++GF+GPNGAGKTTTI+N++GL+K G + I | |
| Sbjct: | 5 | LELKNVTKNIRGRTIIDDLSFTIREGEVFGFLGPNGAGKTTTIRMMVGLMKLSKGDVLIC | 64 |
| Query: | 64 | GKKVNFGRTDTNQLIGYLPDVPEYYDYMTALEYLDLCSGLARSKHKLSNKELLRSVGLDD | 123 |
| | | G+ + + IG + + PE Y +++ + L + + + K E++ VGLD | |
| Sbjct: | 65 | GQSITKEYAKAIKHIGAIVENPELYKFLSGYKNLQQFARMVKGVTKEKIDEVVELVGLTD | 124 |
| Query: | 124 | N-HQKIATYSRGMKQRLGLAQALVHDPKIIICDEPTSALDPKGRQDILDIISNLRGEK-- | 180 |
| | | H K+ TYS GM+QRLGLAQ L+HDPK++I DEPT+ LDP G ++I D + L E+ | |
| Sbjct: | 125 | RIHDKVKTYSLGMRQRLGLAQCLLHDPKVLILDEPTNGLDPAGIREIRDHLKKLTRERGM | 184 |
| Query: | 181 | TVIFSTHILSDVEKICDHVLVLTKCGIYSLEELKGKKSEENYSVRILIKVTKSEAKVLSH | 240 |
| | | VI S+H+LS++E +CD + +L K + ++ +K + +EN + ++ SEA ++ | |
| Sbjct: | 185 | AVIVSSHLLSEMELMCDRIAILQKGKLIDIQNVKDENIDENDTYFFQVE-QPSEAATVLN | 243 |
| Query: | 241 | NYQIEKKDNEYALTLKGSKMDNKADLLAGFYQDLVSLKISPSAIEVIDNSLEELYLEVT | 299 |
| | | Y + K N + L ++ +L LV +I ++VI SLE+ +LE+T | |
| Sbjct: | 244 | QYDLLSKTNGVEIKLAKEEVPAVIEL-------LVMQQIRIYEVKVITKSLEDRFLEMT | 295 |

[3483] There is also homology to SEQ ID 686.

[3484] Based on this analysis, it was predicted that these proteins and their epitopes could be useful antigens for vaccines or diagnostics.

### EXAMPLE 596

[3485] A DNA sequence (GBSx0636) was identified in S. agalactiae <SEQ ID 1847> which encodes the amino acid sequence <SEQ ID 1848>. Analysis of this protein sequence reveals the following:

```
Possible site: 34
>>> Seems to have no N-terminal signal sequence
----- Final Results -----
                            bacterial cytoplasm --- Certainty = 0.4040(Affirmative) < succ>
                              bacterial membrane --- Certainty = 0.0000(Not Clear) < succ>
                                bacterial outside --- Certainty = 0.0000(Not Clear) < succ>
```

[3486] The protein has homology with the following sequences in the GENPEPT database:

| >GP:AAB71491 GB:U53767 ORF6 [Bacillus pumilus] | | | |
|---|---|---|---|
| Identities = 39/134 (29%), Positives = 71/134 (52%), Gaps = 16/134 (11%) | | | |
| Query: | 2 | LGENIYLQRTQIGMTQENLSDYLHLTKTTISKWENNQAKPDIDYLILMANLFDISLDDLV | 61 |
| | | LG NI +R + ++QE +++ L +++ ISKWE NQ++P +D LI +A LFD + +LV | |
| Sbjct: | 4 | LGSNISNKRKSLKLSQEYVAEQLGVSRQAISKWETNQSEPSMDNLIRLAELFDSDIKELV | 63 |
| Query: | 62 | GYQKTLSDDQRNQLIKDLKIKANVLSERDFFQEVKELSKQFPNDFKTLLIMINM--VLSN | 119 |
| | | S +Q ++ KDL+ + K++ Q F +L++I+ + | |
| Sbjct: | 64 | ------SPEQYSEEQKDLETRIE--------HGQKDIKMQNSAVFGRILMLISFFGYIGA | 109 |
| Query: | 120 | LTNLNDSEMKEWSL | 133 |
| | | L +L+ ++ W L | |
| Sbjct: | 110 | LFDLSSYQLPIWXL | 123 |

[3487] There is also homology to SEQ ID 1740.

[3488] Based on this analysis, it was predicted that this protein and its epitopes, could be useful antigens for vaccines or diagnostics.

### EXAMPLE 597

[3489] A DNA sequence (GBSx0637) was identified in S. agalactiae <SEQ ID 1849> which encodes the amino acid sequence <SEQ ID 1850>. Analysis of this protein sequence reveals the following:

| Possible site: 20 | | | | | |
|---|---|---|---|---|---|
| >>> Seems to have an uncleavable N-term signal seq | | | | | |
| | INTEGRAL | Likelihood = −13.59 | Transmembrane | 152 − 168 | (145 − 173) |
| | INTEGRAL | Likelihood = −9.71 | Transmembrane | 7 − 23 | (3 − 27) |
| | INTEGRAL | Likelihood = −6.95 | Transmembrane | 125 − 141 | (122 − 146) |
| | INTEGRAL | Likelihood = −4.51 | Transmembrane | 85 − 101 | (83 − 102) |
| | INTEGRAL | Likelihood = −3.35 | Transmembrane | 55 − 71 | (54 − 75) |

```
----- Final Results -----
                            bacterial membrane --- Certainty = 0.6434(Affirmative) < succ>
                              bacterial outside --- Certainty = 0.0000(Not Clear) < succ>
                          bacterial cytoplasm --- Certainty = 0.0000(Not Clear) < succ>
```

[3490] The protein has homology with the following sequences in the GENPEPT database:

| >GP:CAA79986 GB:Z21972 ORF2 [Bacillus megaterium] | | | |
|---|---|---|---|
| Identities = 51/186 (27%), Positives = 106/186 (56%), Gaps = 5/186 (2%) | | | |
| Query: | 5 | SFFQCVILLVSFLVLTLAVKSQSDMISYLDNITSAFFQSIRNPDLTNLMTIISTVVSPLT | 64 |
| | | +F V+ L+ F + + S ++ + + +++ S Q +P LT++M + + S + | |
| Sbjct: | 10 | AFIISVLSLIGFSFMAFTI-SANEYLKFDEDVIS-LVQGWESPLLTDIMKFFTYIGSTAS | 67 |
| Query: | 65 | TSLIALVILGYQY-FLNQRIAVWLFM-LFFGTNALALLLKDIIARHRP-MNQLVFDSGYS | 121 |
| | | +++LVIL + Y L R+ + LF + G+ L L++K R RP +++L+ GYS | |
| Sbjct: | 68 | LIILSLVILFFLYRILKHRLELVLFTAVMVGSPLLNLMVKLFFQRARPDLHRLIDIGGYS | 127 |
| Query: | 122 | FPSGHTISAFLLMILVLVVARQRLRRVLSQVVFVIFALVILASVIFSRLYLENHFLTDIL | 181 |
| | | FPSGH ++AF L ++ + + + ++++ ++F+++++ S+ SR+YL H+ +DI+ | |
| Sbjct: | 128 | FPSGHAMNAFSLYGILTFLLWRHITARWARILLILFSMLMILSIGISRIYLGVHYPSDII | 187 |
| Query: | 182 | GSLLLG | 187 |
| | | L G | |
| Sbjct: | 188 | AGYLAG | 193 |

[3491] There is also homology to SEQ ID 1852.

[3492] A related GBS gene <SEQ ID 8611> and protein <SEQ ID 8612> were also identified. Analysis of this

| Lipop: Possible site: −1 Crend: 3 | | | | | |
|---|---|---|---|---|---|
| McG: Discrim Score: 11.91 | | | | | |
| GvH: Signal Score (−7.5): −4.6 | | | | | |
| Possible site: 20 | | | | | |
| >>> Seems to have an uncleavable N-term signal seq | | | | | |
| ALOM program count: 5 value: −13.59 threshold: 0.0 | | | | | |
| | INTEGRAL | Likelihood = −13.59 | Transmembrane | 152 − 168 | (145 − 173) |
| | INTEGRAL | Likelihood = −9.71 | Transmembrane | 7 − 23 | (3 − 27) |
| | INTEGRAL | Likelihood = −6.95 | Transmembrane | 125 − 141 | (122 − 146) |
| | INTEGRAL | Likelihood = −4.51 | Transmembrane | 85 − 101 | (83 − 102) |
| | INTEGRAL | Likelihood = −3.35 | Transmembrane | 55 − 71 | (54 − 75) |
| | PERIPHERAL | Likelihood = −1.16 | 184 | | |

```
modified ALOM score: 3.22
*** Reasoning Step: 3
----- Final Results -----
                            bacterial membrane --- Certainty = 0.6434(Affirmative) < succ>
                              bacterial outside --- Certainty = 0.0000(Not Clear) < succ>
                          bacterial cytoplasm --- Certainty = 0.0000(Not Clear) < succ>
```

[3493] The protein has homology with the following sequences in the databases:

[chemical structure]

[3494] Based on this analysis, it was predicted that these proteins and their epitopes could be useful antigens for vaccines or diagnostics.

### EXAMPLE 598

[3495] A DNA sequence (GBSx0638) was identified in S. agalactiae <SEQ ID 1853> which encodes the amino acid sequence <SEQ ID 1854>. Analysis of this protein sequence reveals the following:

```
Possible Site: 41
>>> Seems to have no N-terminal signal sequence
----- Final Results -----
                            bacterial cytoplasm --- Certainty = 0.4288(Affirmative) < succ>
                              bacterial membrane --- Certainty = 0.0000(Not Clear) < succ>
                                bacterial outside --- Certainty = 0.0000(Not Clear) < succ>
```

[3496] The protein has homology with the following sequences in the GENPEPT database:

| >GP:CAB15470 GB:Z99121 yvdC [Bacillus subtilis] | | | |
|---|---|---|---|
| Identities = 53/96 (55%), Positives = 70/96 (72%) | | | |
| Query: | 1 | MDITDYQKWVSEFYKKRNWYQYNSFIRSNFLSEEVGELAQAIRKYEIGRDRPDETEQTDL | 60 |
| | | M + D +KW+ EFY+KR W +Y FIR FL EE GELA+A+R YEIGRDRPDE E + | |
| Sbjct: | 1 | MQLADAEKWMKEFYEKRGWTEYGPFIRVGFLMEEAGELARAVRAYEIGRDRPDEKESSRA | 60 |
| Query: | 61 | ENLNDIKEELGDVLDNIFILADQYNISLEEIISAHR | 96 |
| | | E ++ EE+GDV+ NI ILAD Y +SLE+++ AH+ | |
| Sbjct: | 61 | EQKQELIEEMGDVIGNIAILADMYGVSLEDVMKAHQ | 96 |

[3497] No corresponding DNA sequence was identified in S. pyogenes.

[3498] Based on this analysis, it was predicted that this protein and its epitopes, could be useful antigens for vaccines or diagnostics.

### EXAMPLE 599

[3499] A DNA sequence (GBSx0639) was identified in S. agalactiae <SEQ ID 1855> which encodes the amino acid sequence <SEQ ID 1856>. Analysis of this protein sequence reveals the following:

```
Possible Site: 54
>>> Seems to have no N-terminal signal sequence
----- Final Results -----
                            bacterial cytoplasm --- Certainty = 0.0635(Affirmative) < succ>
                              bacterial membrane --- Certainty = 0.0000(Not Clear) < succ>
                                bacterial outside --- Certainty = 0.0000(Not Clear) < succ>
```

[3500] The protein has homology with the following sequences in the GENPEPT database:

| >GP:BAB06803 GB:AP001517 unknown conserved protein [Bacillus halodurans] | | | |
|---|---|---|---|
| Identities = 83/186 (44%), Positives = 117/186 (62%) | | | |
| Query: | 1 | MRITIFCGASTGENPVYSEKTVALAQWMAQNKHSLVYGGGKVGLMGVMADTVIANGGYTT | 60 |
| | | M+I +FCG+S G + VY E L + +A+ +LVYGG VG+MG +AD+V+ GG | |
| Sbjct: | 1 | MKIAVFCGSSNGASDVYKEGARQLGKELARRGITLVYGGASVGIMGAVADSVLEAGGEVI | 60 |
| Query: | 61 | GVIPTFLRDREIAHENLSELIIVNNMPERKAKMMLLGDAFIALPGGPGTLEEISEVISWS | 120 |
| | | GV+P FL + EI+H +L++LI+V M ERKAKM L D F+ALPGGPGTLEE E+ +W+ | |
| Sbjct: | 61 | GVMPRFLEEPEISHPHLTKLIVVETMHERKAKMAELADGFLALPGGPGTLEEFFEIFTWA | 120 |
| Query: | 121 | RIGQNDNPCILYNVNGYFNDLKNMFDHMVGEGFLSLEDRENVLFSDDITEIEDFITNYKV | 180 |
| | | +IG + PC L N+N YF+ L + HM E FL + R L D + D + Y+ | |
| Sbjct: | 121 | QIGLHQKPCGLLNINHYFDPLVTLLHHMSNEQFLHEKYRSMALVHTDPILLLDQFSTYEP | 180 |
| Query: | 181 | PSTRQY | 186 |
| | | P+ + Y | |
| Sbjct: | 181 | PTVKAY | 186 |

[3501] No corresponding DNA sequence was identified in S. pyogenes.

[3502] Based on this analysis, it was predicted that this protein and its epitopes, could be useful antigens for vaccines or diagnostics.

### EXAMPLE 600

[3503] A DNA sequence (GBSx0640) was identified in S. agalactiae <SEQ ID 1857> which encodes the amino acid sequence <SEQ ID 1858>. Analysis of this protein sequence reveals the following:

```
Possible site: 19
>>> Seems to have a cleavable N-term signal seq.
      INTEGRAL Likelihood = −7.86 Transmembrane 222-238 (214-239)
      INTEGRAL Likelihood = −6.69 Transmembrane 39-55 (36-58)
      INTEGRAL Likelihood = −4.25 Transmembrane 266-282 (266-284)
      INTEGRAL Likelihood = −1.28 Transmembrane 166-182 (166-182)
      INTEGRAL Likelihood = −1.01 Transmembrane 190-206 (190-206)
      INTEGRAL Likelihood = −0.96 Transmembrane 70-86 (70-86)
----- Final Results -----
                              bacterial membrane --- Certainty = 0.4142(Affirmative) < succ>
                                bacterial outside --- Certainty = 0.0000(Not Clear) < succ>
                            bacterial cytoplasm --- Certainty = 0.0000(Not Clear) < succ>
```

[3504] The protein has homology with the following sequences in the GENPEPT database:

| >GP: CAB12420 GB: Z99107 ydiL [Bacillus subtilis] | | | |
|---|---|---|---|
| Identities = 40/132 (30%), Positives = 63/132 (47%), Gaps = 8/132 (6%) | | | |
| Query: | 107 | ESQNYDATFNI-----LMISYSVVVGPFFEEVLYRGIVLNLL-SKYGKWFAIITSGILFG | 160 |
| | | ES+N A ++ LMI S +VGP EE+++R I+ L K +FA + S ++FG | |
| Sbjct: | 114 | ESENTQAILDVIQAVPLMIIVSSIVGPILEEIIFRKIIFGALYEKTNFFFAGLISSVIFG | 173 |
| Query: | 161 | LMHQDISQLLTTSIAGIIMGFI-AYHYSFKVALLLHICNNFIVEIFTQLSTVNELYGTYF | 219 |
| | | ++H D+ LL + G F+ A V + H+ N V + QL V | |
| Sbjct: | 174 | IVHADLKHLLLYTAMGFTFAFLYARTKRIWVPIFAHLMMNTFV-VIMQLEPVRNYLEQQS | 232 |
| Query: | 220 | ENILLILAILFI | 231 |
| | | + LI+ LF | |
| Sbjct: | 233 | TQMQLIIGGLFL | 244 |

[3505] No corresponding DNA sequence was identified in S. pyogenes.

[3506] A related GBS gene <SEQ ID 8613> and protein <SEQ ID 8614> were also identified. Analysis of this protein sequence reveals the following:

```
Lipop: Possible site: −1 Crend: 6
McG: Discrim Score: 12.52
GvH: Signal Score (−7.5): −1.74
          Possible site: 19
>>> Seems to have a cleavable N-term signal seq.
ALOM program count: 2 value: −6.69 threshold: 0.0
      INTEGRAL Likelihood = −6.69 Transmembrane 39-55 ( 36-58)
      INTEGRAL Likelihood = −0.96 Transmembrane 70-86 ( 70-86)
      PERIPHERAL Likelihood = 4.56 21
  modified ALOM score: 1.84
***Reasoning Step: 3
----- Final Results -----
                              bacterial membrane --- Certainty = 0.3675(Affirmative) < succ>
                                bacterial outside --- Certainty = 0.0000(Not Clear) < succ>
                            bacterial cytoplasm --- Certainty = 0.0000(Not Clear) < succ>
```

[3507] The protein has homology with the following sequences in the databases:

| | | | |
|---|---|---|---|
| Query: | 10 | LIGLILLAQAIVLSLATTLFAEILQNDVWIGIASTLIALLIPCF | 53 |
| | | L+ L LL ++++LS++ +L +W+ +A+ L+A ++ CF | |
| Sbjct: | 21 | LLCLCLLVRSLLLSVSLYSALILLVLILWVTVATPLLAFVVSCF | 64 |

[3508] Based on this analysis, it was predicted that these proteins and their epitopes could be useful antigens for vaccines or diagnostics.

### EXAMPLE 601

[3509] A DNA sequence (GBSx0641) was identified in S. agalactiae <SEQ ID 1859> which encodes the amino acid sequence <SEQ ID 1860>. This protein is predicted to be capa protein. Analysis of this protein sequence reveals the following:

```
Possible site: 50
>>> Seems to have no N-terminal signal sequence
      INTEGRAL Likelihood = −13.80 Transmembrane 27-43 ( 22-50)
----- Final Results -----
                              bacterial membrane --- Certainty = 0.6519(Affirmative) < succ>
                                bacterial outside --- Certainty = 0.0000(Not Clear) < succ>
                            bacterial cytoplasm --- Certainty = 0.0000(Not Clear) < succ>
```

[3510] A related GBS nucleic acid sequence <SEQ ID 9385> which encodes amino acid sequence <SEQ ID 9386> was also identified.

[3511] The protein has homology with the following sequences in the GENPEPT database:

| >GP: AAF13661 GB: AF188935 pXO2-56 [Bacillus anthracis] | | | |
|---|---|---|---|
| Identities = 68/224 (30%), Positives = 118/224 (52%), Gaps = 10/224 (4%) | | | |
| Query: | 95 | FKEVKSWIESADLAIGDYEGTISSE----YPLAGYPL-FNAPNEIATTMKETGYDVVDLA | 149 |
| | | F+ V +++++D G++E + E Y A + +A E +KE G+ V++LA | |
| Sbjct: | 87 | FRHVSPYLKNSDYVSGNFEHPVLLEDKKNYQKADKNIHLSAKEETVKAVKEAGFTVLNLA | 146 |
| Query: | 150 | HNHILDSQLAGAINTVKTFNRLGLKTIGVYLKDRNKEDILIKHVNGIKIAILGYSYGY-N | 208 |
| | | +NH+ D G +Y+K F LD +G ++ ++I+ ++VNG+++A G++ + | |
| Sbjct: | 147 | NNHMTDYGAKGTKDTIKAFKEADLDYVGAGENFKDVKNIVYQNVNGVRVATLGFTDAFVA | 206 |
| Query: | 209 | GMEANVSKSDYEKHMSDLDTKKIKQDIKKAEKEADITIVMPQMGIEYQKKPTTEQVMLYH | 268 |
| | | G A + D+ K+I + + AD+ +V G EY KP+ Q L | |
| Sbjct: | 207 | GAIATKEQPGSLSMNPDVLLKQISKAKDPKKGNADLVVVNTHWGEEYDNKPSPRQEALAK | 266 |
| Query: | 269 | SMIKWGADIIFGGHPHVVEPSEVIKKDGQKKFIIYSMGNFISNQ | 312 |
| | | +M+ GADII G HPHV++ +V K+ I YS+GNF+ +Q | |
| Sbjct: | 267 | AMVDAGADIIVGHHPHVLQSFDVYKQG----IIFYSLGNFVGDQ | 306 |

[3512] A related DNA sequence was identified in S. pyogenes <SEQ ID 1861> which encodes the amino acid sequence <SEQ ID 1862>. Analysis of this protein sequence reveals the following:

```
Possible site: 45
>>> Seems to have no N-terminal signal sequence
      INTEGRAL Likelihood = −12.05 Transmembrane 44-60 ( 40-68)
----- Final Results -----
                              bacterial membrane --- Certainty = 0.5819(Affirmative) < succ>
                                bacterial outside --- Certainty = 0.0000(Not Clear) < succ>
                            bacterial cytoplasm --- Certainty = 0.0000(Not Clear) < succ>
```

[3513] A related sequence was also identified in GAS <SEQ ID 9119> which encodes the amino acid sequence <SEQ ID 9120>. Analysis of this protein sequence reveals the following:

```
Possible cleavage site: 31
>>> Seems to have no N-terminal signal sequence
----- Final Results -----
                              bacterial membrane --- Certainty = 0.582(Affirmative) < succ>
                                bacterial outside --- Certainty = 0.000(Not Clear) < succ>
                            bacterial cytoplasm --- Certainty = 0.000(Not Clear) < succ>
```

[3514] An alignment of the GAS and GBS proteins is shown below:

| Identities = 232/334 (69%), Positives = 273/334 (81%), Gaps = 4/334 (1%) | | | |
|---|---|---|---|
| Query: | 24 | YQKTLIFCVAVIIAIFILGLSKDLAQSKGQKVANNNT----VKTARVVANGDILLHDVLY | 79 |
| | | Y+KT+ VA+I+A+ + GL DL + ++A + VKTARVVANGDIL+HD+LY | |
| Sbjct: | 40 | YKKTMATVVALIVALLLFGLIYDLLGVQKNELAAQKSAQPKVKTARVVANGDILIHDILY | 99 |
| Query: | 80 | ASARQPDGTYNFTPYFKEVKSWIESADLAIGDYEGTISSEYPLAGYPLFNAPNEIATTMK | 139 |
| | | SAR+ D TY+FTPYF+ VK WI ADLAIGDYEGTIS +YPLAGYPLFNAP EIA +K | |
| Sbjct: | 100 | MSARKADDTYDFTPYFEYVKDWISGADLAIGDYEGTISPDYPLAGYPLFNAPEEIAGALK | 159 |
| Query: | 140 | ETGYDVVDLAHNHILDSQLAGAINTVKTFNRLGLDTIGVYLKDRNKEDILIKHVNGIKIA | 199 |
| | | TGYDVVDLAHNHILDSQL GA+NT K F++LG+D+IG+Y KDR+KE LIK+VNGIKIA | |
| Sbjct: | 160 | NTGYDVVDLAHNHILDSQLDGALNTKKVFHQLGIDSIGIYDKDRSKEDFLIKNVNGIKIA | 219 |
| Query: | 200 | ILGYSYGYNGMEANVSKSDYEKHMSDLDTKKIKQDIKKAEKEADITIVMPQMGIEYQKKP | 259 |
| | | ILGYSYGYNGMEA +S+ DYEKHMSDLD KIK++++ AEK+AD+TIVMPQMG EY +P | |
| Sbjct: | 220 | ILGYSYGYNGMEATLSQEDYEKHMSDLDEAKIKKELQLAEKKADVITVMPQMGTEYALEP | 279 |
| Query: | 260 | TTEQVMLYHSMIKWGADIIFGGHPHVVEPSEVIKKDGQKKFIIYSMGNFISNQRLETVDD | 319 |
| | | T EQ LYH MI WGAD++ GGHPHV+EPSE + K QKKFIIYSMGNFISNQRLETVDD | |
| Sbjct: | 280 | TAEQKELYHKMIDWGADVVLGGHPHVIEPSETVIKGRQKKFIIYSMGNFISNQRLETVDD | 339 |
| Query: | 320 | IWTERGLLMDVTIEKKGQKTVIKKVKAHPTLVEA | 353 |
| | | IWTERGLLMD+T EKK KT IK V+AHPT+V A | |
| Sbjct: | 340 | IWTERGLLMDLTFEKKDNKTKIKTVEAHPTMVLA | 373 |

[3515] A related GBS gene <SEQ ID 8615> and protein <SEQ ID 8616> were also identified. Analysis of this protein sequence reveals the following:

```
Lipop Possible site: −1 Crend: 7
SRCFLG: 0
McG: Length of UR: 18
          Peak Value of UR: 3.83
          Net Charge of CR: 2
McG: Discrim Score: 15.36
GvH: Signal Score (−7.5): −1.52
          Possible site: 32
>>> Seems to have a cleavable N-term signal seq.
Amino Acid Composition: calculated from 33
ALOM program count: 0 value: 4.35 threshold: 0.0
      PERIPHERAL Likelihood = 4.35 170
  modified ALOM score: −1.37
*** Reasoning Step: 3
Rule gpol
----- Final Results -----
                                bacterial outside --- Certainty = 0.3000(Affirmative) < succ>
                              bacterial membrane --- Certainty = 0.0000(Not Clear) < succ>
                            bacterial cytoplasm --- Certainty = 0.0000(Not Clear) < succ>
```

[3516] The protein has homology with the following sequences in the databases:

[chemical structure]

[3517] SEQ ID 8616 (GBS289) was expressed in E. coli as a His-fusion product. SDS-PAGE analysis of total cell extract is shown in FIG. 57 (lane 5; MW 40 kDa), in FIG. 181 (lane 6; MW 47 kDa), in FIG. 169 (lane 13 & 14; MW 54.5 kDa—thioredoxin fusion) and in FIG. 239 (lane 3; MW 54.5 kDa). It was also expressed in E. coli as a GST-fusion product. SDS-PAGE analysis of total cell extract is shown in FIG. 61 (lane 5; MW 65 kDa).

[3518] SEQ ID 8616 (GBS289L) was expressed in E. coli as a GST-fusion product. SDS-PAGE analysis of total cell extract is shown in FIG. 126 (lane 2; MW 72 kDa) and in FIG. 184 (lane 5; MW 72 kDa). It was also expressed in E. coli as a His-fusion product. SDS-PAGE analysis of total cell extract is shown in FIG. 126 (lane 5-7; MW 47 kDa).

[3519] GBS289L-His was purified as shown in FIG. 234, lane 9-10. Purified GBS289L-GST is shown in FIG. 245, lane 10.

[3520] Based on this analysis, it was predicted that these proteins and their epitopes could be useful antigens for vaccines or diagnostics.

### EXAMPLE 602

[3521] A DNA sequence (GBSx0642) was identified in S. agalactiae <SEQ ID 1863> which encodes the amino acid sequence <SEQ ID 1864>. This protein is predicted to be thiamin biosynthesis protein ThiI (thiI). Analysis of this protein sequence reveals the following:

```
Possible site: 55
>>> Seems to have no N-terminal signal sequence
----- Final Results -----
                              bacterial cytoplasm --- Certainty = 0.2720(Affirmative) < succ>
                                bacterial membrane --- Certainty = 0.0000(Not Clear) < succ>
                                  bacterial outside --- Certainty = 0.0000(Not Clear) < succ>
```

[3522] A related GBS nucleic acid sequence <SEQ ID 9971> which encodes amino acid sequence <SEQ ID 9972> was also identified.

[3523] The protein has homology with the following sequences in the GENPEPT database:

>GP: AAC00308 GB: AF008220 YtbJ [Bacillus subtilis]
Identities 184/354 (51%), Positives = 249/354 (69%)

| | | | |
|---|---|---|---|
| Query: | 11 | MQYSEIMIRYGELSTKKKNRMRFINKLKNNMEHVLSIYPDVSVKTDRDRGHVYLNGTDYH | 70 |
| | | M Y I+IR+GE+STK KNR FI +LK N+ VL YP++ ++RDR + LNG D | |
| Sbjct: | 1 | MNYDHILIRFGEISTKGKNRKSFIERLKQNIRLVLKDYPNLKYFSNRDRMTITLNGEDPE | 60 |
| Query: | 71 | EVAESLKEIFGIQAFSPSFKVEKNVDTLVKAVQEIMTSVYKDGMTFKITAKRSDHSFELD | 130 |
| | | + LK++FGIQ+FS + K + +D + + + YK G TFK+ KR+ FELD | |
| Sbcjt: | 61 | ALFPHLKQVFGIQSFSLAIKCDSRLDDIKATALKAIKDQYKPGDTFKVATKRAYKQFELD | 120 |
| Query: | 131 | SRALNHTLGDAVFSVLPNIKAQMKQPDINLKVEIRDEAAYISYEDIRGAGGLPVGTSGKG | 190 |
| | | + +N +G + + ++ PDI L++EIR+EA +++ D +GAGGLPVG++GK | |
| Sbjct: | 121 | TNQMNAEIGGHILRNTEGLTVDVRNPDIPLRIEIREEATFLTIRDEKGAGGLPVGSAGKA | 180 |
| Query: | 191 | MLMLSGGIDSPVAGYLALKRGVDIEAVHFASPPYTSPGALKKAHDLTRKLTKFGGNIQFI | 250 |
| | | MLMLSGG DSPVAG+ A+KRG+ +EAVHF SPPYTS A +K DL + L++FGG++ | |
| Sbjct: | 181 | MLMLSGGFDSPVAGFYAMKRGLSVEAVHFFSPPYTSERAKQKVMDLAKCLSRFGGSMTLH | 240 |
| Query: | 251 | EVPFTEIQEEIKAKAPEAYLMTLTRRFMMRITDRIREDRNGLVIINGESLGQVASQTLES | 310 |
| | | VPFT+ QE I+ + PE Y MT TRR M++I DRIRE RNGL II GESLGQVASQTLES | |
| Sbjct: | 241 | IVPFTKTQELIQKQIPENYTMTATRRLMLQIADRIREKRNGLAIITGESLGQVASQTLES | 300 |
| Query: | 311 | MQAINAVTATPIIRPVVTMDKLEIIDIAQKIDTFDISIQPFEDCCTIFAPDRPK | 364 |
| | | M AINAVT+TPI+RP++ MDK EII+ +++I T++ SIQPFEDCCTIF +P+ | |
| Sbjct: | 301 | MYAINAVTSTPILRPLIAMDKTEIIEKSREIGTYETSIQPFEDCCTIFTTAKPR | 354 |

[3524] A related DNA sequence was identified in S. pyogenes <SEQ ID 1865> which encodes the amino acid sequence <SEQ ID 1866>. Analysis of this protein sequence reveals the following:

```
Possible site: 42
>>> Seems to have no N-terminal signal sequence
----- Final Results -----
                            bacterial cytoplasm --- Certainty = 0.4897(Affirmative) <succ>
                              bacterial membrane --- Certainty = 0.0000(Not Clear) < succ>
                                bacterial outside --- Certainty = 0.0000(Not Clear) < succ>
```

[3525] An alignment of the GAS and GBS proteins is shown below:

| Identities = 316/404 (78%), Positives = 362/404 (89%) | | | |
|---|---|---|---|
| Query: | 11 | MQYSEIMIRYGELSTKKKNRMRFINKLKNNMEHVLSIYPDVSVKTDRDRGHVYLNGTDYH | 70 |
| | | M YSEIM+R+GELSTK KNRMRFINKLKNN++ VL+ +P ++V++DRDR HV LNGTDY | |
| Sbjct: | 1 | MDYSEIMVRHGELSTKGKNRMRFINKLKNNIQDVLAPFPAITVRSDRDRTHVSLNGTDYQ | 60 |
| Query: | 71 | EVAESLKEIFGQQAFSPSFKVEKNVDTLVKAVQEIMTSVYKDGMTFKITAKRSDHSFELD | 130 |
| | | + E+LK +FG+QA SP +K+EK+V LV AVQ+IMTS+Y+DG+TFKI KRSDH+FELD | |
| Sbjct: | 61 | PIVEALKLVFGVQALSPVYKLEKSVPLLVTAVQDIMTSLYRDGLTFKIATKRSDHAFELD | 120 |
| Query: | 131 | SRALNHTLGDAVFSVLPNIAKQMKQPDINLKVEIRDEAAYISYEDIRGAGGLPVGTSGKG | 190 |
| | | SR LN LG AVF VLPNI+AQMK PD+ LKVEIRDEAAYISYE+I+GAGGLPVGTSGKG | |
| Sbjct: | 121 | SRELNSLLGGAVFEVLPNIQAQMKHPDVTLKVEIRDEAAYISYEEIKGAGGLPVGTSGKG | 180 |
| Query: | 191 | MLMLSGGIDSPVAGYLALKRGVDIEAVHFASPPYTSPGALKKAHDLTRKLTKFGGNIQFI | 250 |
| | | MLMLSGGIDSPVAGYLALKRG+DIE VHFASPPYTSPGAL KA DLTR+LT+FGGNIQFI | |
| Sbjct: | 181 | MLMLSGGIDSPVAGYLALKRGDLIEVVHFASPPYTSPGALAKAQDLTRRLTRFGGNIQFI | 240 |
| Query: | 251 | EVPFTEIQEEIKAKAPEAYLMTLTRRFMMRITDRIREDRNGLVIINGESLGQVASQTLES | 310 |
| | | EVPFTEIQEEIK KAPEAYLMTLTRRFMMRITD IRE R GLVI+NGESLGQVASQTLES | |
| Sbjct: | 241 | EVPFTEIQEEIKNKAPEAYLMTLTRRFMMRITDAIREQRKGLVIVNGESLGQVASQTLES | 300 |
| Query: | 311 | MQAINAVTATPIIRPVVTMDKLEIIDIAQKIDTFDISIQPFEDCCTIFAPDRPKTNPKIK | 370 |
| | | MQAINAVT+TPIIRPVVTMDKLEII++AQ IDTFDISIQPFEDCCTIFAPDRPKTNPK+ | |
| Sbjct: | 301 | MQAINAVTSTPIIRPVVTMDKLEIIEMAQAIDTFDISIQPFEDCCTIFAPDRPKTNPKLG | 360 |
| Query: | 371 | NTEQYEKRMDVEGLVERAVAGIMVTTIQPQADSDDVDDLIDDLL | 414 |
| | | N E+YE+ D++GLV+RAV+GI+VT I P+ +D+V++LID LL | |
| Sbjct: | 361 | NAEKYEECFDIDGLVQRAVSGIVVTEITPEIVNDEVENLIDALL | 404 |

[3526] Based on this analysis, it was predicted that these proteins and their epitopes could be useful antigens for vaccines or diagnostics.

### EXAMPLE 603

[3527] A DNA sequence (GBSx0643) was identified in S. agalactiae <SEQ ID 1867> which encodes the amino acid sequence <SEQ ID 1868>. This protein is predicted to be nifs protein homolog, fragment. Analysis of this protein sequence reveals the following:

| Possible site: 47 | | | |
|---|---|---|---|
| >>> Seems to have no N-terminal signal sequence | | | |
| INTEGRAL | Likelihood = −0.27 | Transmembrane | 131-147 (131-147) |

----- Final Results -----
bacterial membrane --- Certainty = 0.1107 (Affirmative) < succ>
bacterial outside --- Certainty = 0.0000 (Not Clear) < succ>
bacterial cytoplasm --- Certainty = 0.0000 (Not Clear) < succ>

[3528] The protein has homology with the following sequences in the GENPEPT database:

| >GP: CAA43493 GB: X61190 nifS-like gene [Lactobacillus delbrueckii] | | | |
|---|---|---|---|
| Identities = 177/353 (50%), Positives = 234/353 (66%), Gaps = 1/353 (0%) | | | |
| Query: | 14 | PEVLRTYQEVASKIYGNPSSLHELGTTSSRILEASRKQIASLLELKANEIFFTSGGTEAD | 73 |
| | | P+ L TY +V +KI+GNPSSLH+LG + +LEASRKQ+A LL + +EI+FTSGGTE++ | |
| Sbjct: | 3 | PKALETYSQVVTKIWGNPSSLHKLGDRAHGLLEASRKQVADLLGVNTDEIYFTSGGTESN | 62 |
| Query: | 74 | NWVIKGLAFEKQHFGNHIIVSDIEHPAVKESAKWLGEYGFEIDYAPVDDKGFVDVEALVK | 133 |
| | | N IKG A+ K+ FG HII S +EH +V + L GF + PVD +G V+ E L | |
| Sbjct: | 63 | NTAIKGTAWAKREFGKHIITSSVEHASVANTFTELENLGFRVTRLPVDKEGRVNPEDLKA | 122 |
| Query: | 134 | LIKPETILISIMAINNEIGSIQPIKAISDLLSDKPTISFHVDAVQAIGKIPTKDYLTERV | 193 |
| | | + +T L+SIM +NNEIG+IQPIK IS++L+D P I FHVD VQA+GK T RV | |
| Sbjct: | 123 | ALDKDTTLVSIMGVNNEIGTIQPIKEISEILADYPNIHFHVDNVQALGKGIWDQVFTSRV | 182 |
| Query: | 194 | DFASFSSHKFHGVRGVGFLYIKEGKRISPLLTGGGQETDLRSTTENVAGIAATAKALRMV | 253 |
| | | D SFSSHKFHG RG+G LY K G+ + PL GGGQE LRS TEN+A IAA AKA R++ | |
| Sbjct: | 183 | DMMSFSSHKFHGPRGIGILYKKRGRMLMPLCEGGGQEKGLRSGTENLAAIAAMAKAARLL | 242 |
| Query: | 254 | MDKEVVAIPKISKMKTIIHDELAKYEDITLFSG-KEDFSPNIITFGIKGVRGEVLVHAFE | 312 |
| | | + E + +K I LA I +FS K DF+P+I+ F ++G+RGE LVH E | |
| Sbjct: | 243 | LTDEKEKADREYAIKEKISKYLAGKPGIHIFSPLKADFAPHILCFALEGIRGETLVHTLE | 302 |
| Query: | 313 | GHDIFISTTSACSSKAGKPAGTLIAMGISTKLAQTAVRISLDDDNDMGQVEQF | 365 |
| | | DI+ISTTSAC+SK A TL+AM +A +AVR+S D+ N + + ++F | |
| Sbjct: | 303 | DQDIYISTTSACASKKADEASTLVAMKTPDAIATSAVRLSFDESNTLEEADEF | 355 |

[3529] A related DNA sequence was identified in S. pyogenes <SEQ ID 1869> which encodes the amino acid sequence <SEQ ID 1870>. Analysis of this protein sequence reveals the following:

Possible site: 41
>>> Seems to have no N-terminal signal sequence
----- Final Results -----
bacterial cytoplasm --- Certainty = 0.3067 (Affirmative) < succ>
bacterial membrane --- Certainty = 0.0000 (Not Clear) < succ>
bacterial outside --- Certainty = 0.0000 (Not Clear) < succ>

[3530] An alignment of the GAS and GBS proteins is shown below:

| Identities = 268/370 (72%), Positives = 322/370 (86%) | | | |
|---|---|---|---|
| Query: | 1 | MIYFDNSATTIPYPEVLRTYQEVASKIYGNPSSLHELGTTSSRILEASRKQIASLLELKA | 60 |
| | | MIYFDN+ATTIPY E L+TYQEVA+KIYGNPSSLH+LGT +SRILEASRKQIA LL +K+ | |
| Sbjct: | 1 | MIYFDNAATTIPYGEALKTYQEVATKIYGNPSSLHQLGTNASRILEASRKQIAGLLGVKS | 60 |
| Query: | 61 | NEIFFTSGGTEADNWVIKGLAFEKQHFGNHIIVSDIEHPAVKESAKWLGEYGFEIDYAPV | 120 |
| | | EIFFTSGGTE+ NW IKG+AFEK FG HII+S IEHPAV ES KWL GFE+ YAPV | |
| Sbjct: | 61 | EEIFFTSGGTESANWAIKGIAFEKNAFGKHIIISAIEHPAVSESVKWLLTQGFEVSYAPV | 120 |
| Query: | 121 | DDKGFVDVEALVKLIKPETILISIMAINNEIGSIQPIKAISDLLSDKPTISFHVDAVQAI | 180 |
| | | +G VDV AL +LI+P+TILISIMA+NNE+G+IQPI+AIS+LL+++PTI+FHVDAVQAI | |
| Sbjct: | 121 | TTQGVVDVNALAELIRPDTILISIMAVNNEMGAIQPIRAISNLLANQPTITFHVDAVQAI | 180 |
| Query: | 181 | GKIPTKDYLTERVDFASFSSHKFHGVRGVGFLYIKEGKRISPLLTGGGQETDLRSTTENV | 240 |
| | | GKIP DY+T RVD ASFS HKFH VRGVGFLY K GKR++PLL+GGGQE +LRSTTENV | |
| Sbjct: | 181 | GKIPLCDYMTNRVDLASFSGHKFHSVRGVGFLYKKAGKRLNPLLSGGGQEQELRSTTENV | 240 |
| Query: | 241 | AGIAATAKALRMVMDKEVVAIPKISKMKTIIHDELAKYEDITLFSGKEDFSPNIITFGIK | 300 |
| | | AGIA+ AKALR+V +K+V +PK++ M+ +I+ L+ Y D+T+FS +E F+PNI+TFGI+ | |
| Sbjct: | 241 | AGIASMAKALRIVTEKQVSVLPKLTAMRDVIYKSLSAYPDVTVFSAQEGFAPNILTFGIR | 300 |
| Query: | 301 | GVRGEVLVHAFEGHDIFISTTSACSSKAGKPAGTLIAMGISTKLAQTAVRISLDDDNDMG | 360 |
| | | GVRGEV+VHAFE ++I+ISTTSACSSKAG+PAG+L+AMGI K AQTAVRISLDDDNDMG | |
| Sbjct: | 301 | GVRGEVIVHAFEKYEIYISTTSACSSKAGEPAGSLVAMGIPVKTAQTAVRISLDDDNDMG | 360 |
| Query: | 361 | QVEQFLTIFK | 370 |
| | | QVEQFLTIF+ | |
| Sbjct: | 361 | QVEQFLTIFQ | 370 |

[3531] Based on this analysis, it was predicted that these proteins and their epitopes could be useful antigens for vaccines or diagnostics.

### EXAMPLE 604

[3532] A DNA sequence (GBSx0644) was identified in S. agalactiae <SEQ ID 1871> which encodes the amino acid sequence <SEQ ID 1872>. Analysis of this protein sequence reveals the following:

Possible site: 29
>>> Seems to have no N-terminal signal sequence
----- Final Results -----
bacterial cytoplasm --- Certainty = 0.1539 (Affirmative) < succ>
bacterial membrane --- Certainty = 0.0000 (Not Clear) < succ>
bacterial outside --- Certainty = 0.0000 (Not Clear) < succ>

[3533] The protein has no significant homology with any sequences in the GENPEPT database.

[3534] No corresponding DNA sequence was identified in S. pyogenes.

[3535] Based on this analysis, it was predicted that this protein and its epitopes, could be useful antigens for vaccines or diagnostics.

### EXAMPLE 605

[3536] A DNA sequence (GBSx0645) was identified in S. agalactiae <SEQ ID 1873> which encodes the amino acid sequence <SEQ ID 1874>. This protein is predicted to be glutathione reductase (gor). Analysis of this protein sequence reveals the following:

| Possible site: 23 | | | |
|---|---|---|---|
| >>> Seems to have no N-terminal signal sequence | | | |
| INTEGRAL | Likelihood = −4.25 | Transmembrane | 170-186 (169-187) |

----- Final Results -----
bacterial membrane --- Certainty = 0.2699 (Affirmative) < succ>
bacterial outside --- Certainty = 0.0000 (Not Clear) < succ>
bacterial cytoplasm --- Certainty = 0.0000 (Not Clear) < succ>

[3537] The protein has homology with the following sequences in the GENPEPT database:

| >GP: BAA76640 GB: AB019579 glutathione reductase (GR) [Streptococcus | | | |
|---|---|---|---|
| mutans] | | | |
| Identities = 274/450 (60%), Positives = 346/450 (76%), Gaps = 1/450 (0%) | | | |
| Query: | 1 | MSKQYDYIVIGGGSAGSGTANRAAMYGAKVLLIEGGQVGGTCVNLGCVPKKIMWYGAQVS | 60 |
| | | M+KQYDYIVIGGGS G +ANRAAM+GAKV+L EG QVGGTCVN+GCVPKK+MWYGAQV+ | |
| Sbjct: | 1 | MTKQYDYIVIGGGSGGIASANRAAMHGAKVILFEGKQVGGTCVNVGCVPKKVMWYGAQVA | 60 |
| Query: | 61 | ETLHKYSSGYGFEVNNLNFDFTTLKANRDAYVQRSRQSYAANFERNGVEKIDGFARFIDN | 120 |
| | | ET++ Y++ YGF+V F F LK NR AY+ R + SY F+ NGVE++ +A F+D | |
| Sbjct: | 61 | ETINNYAADYGFDVTTQTFHFDALKQNRQAYIDRIQDSYERGFDSNGVERVYSYATFVDA | 120 |
| Query: | 121 | HTIEVNGQQYKAPHITIATGGHPLYPDIIGSELGETSDDFFGWETLPDSILIVGAGYIAA | 180 |
| | | HT+EV G+ Y APHI IATGGH L PDI GSE G TSD FF + +P +VGAGYIA | |
| Sbjct: | 121 | HTVEVAGEHYTAPHILIATGGHALLPDIPGSEYGITSDGFFELDAIPKRTAVVGAGYIAV | 180 |
| Query: | 181 | ELAGVVNELGVETHLAFRKDHILRGFDDMVTSEVMAEMEKSGISLHANHVPKSLKRDEGG | 240 |
| | | E++GV++ LG ETHL R+D LR FD + ++ EM+K G LH VPK + ++ | |
| Sbjct: | 181 | EISGVLHALGGETHLFVRRDRPLRKFDKEIVGTLVDEMKKDGPHLHTFSVPKEVIKNTDN | 240 |
| Query: | 241 | KLIFEAENGKTLVVDRVIWAIGRGPNV-DMGLENTDIVLNDKGYIKADEFENTSVDGVYA | 299 |
| | | L ENG+ VD +IWAIGR N LE T + L+ +G+I D FENT+V+G+YA | |
| Sbjct: | 241 | SLTLILENGEEYTVDTLIWAIGRAANTKGFNLEVTGVTLDSRGFIATDAFENTNVEGLYA | 300 |
| Query: | 300 | IGDVNGKIALTPVAIAAGRRLSERLFNHKDNEKLDYHNVPSVIFTHPVIGTVGLSEAAAI | 359 |
| | | +GDVNGK+ LTPVA+ AGR+LSERLFNHK K+DY +V +VIF+HPVIG++GLSE A+ | |
| Sbjct: | 301 | LGDVNGKLELTPVAVKAGRQLSERLFNHKPQAKMDYKDVATVIFSHPVIGSIGLSEEVAL | 360 |
| Query: | 360 | EQFGEDNIKVYTSTFTSMYTAVTTNRQAVKMKLITLGKEEKVIGLHGVGYGIDEMIQGFS | 419 |
| | | +Q+GE+N+ VY STFTSMYTAVT++RQA KMKL+T+G++EK++GLHG+GYG+DEMIQGF+ | |
| Sbjct: | 361 | DQYGEENVTVYRSTFTSMYTAVTSHRQACKMKLVTVGEDEKIVGLHGIGYGVDEMIQGFA | 420 |
| Query: | 420 | VAIKMGATKADFDDTVAIHPTGSEEFVTMR | 449 |
| | | VAIKMGATKADFD+TVAIHPTGSEEFVTMR | |
| Sbjct: | 421 | VAIKMGATKADFDNTVAIHPTGSEEFVTMR | 450 |

[3538] A related DNA sequence was identified in S. pyogenes <SEQ ID 1875> which encodes the amino acid sequence <SEQ ID 1876>. Analysis of this protein sequence reveals the following:

| Possible site: 23 | | | |
|---|---|---|---|
| >>> Seems to have no N-terminal signal sequence | | | |
| INTEGRAL | Likelihood = −1.33 | Transmembrane | 173-189 (173-191) |

----- Final Results -----
bacterial membrane --- Certainty = 0.1532 (Affirmative) < succ>
bacterial outside --- Certainty = 0.0000 (Not Clear) < succ>
bacterial cytoplasm --- Certainty = 0.0000 (Not Clear) < succ>

[3539] An alignment of the GAS and GBS proteins is shown below:

| Identities = 268/446 (60%), Positives = 340/446 (76%), Gaps = 1/446 (0%) | | | |
|---|---|---|---|
| Query: | 5 | YDYIVIGGGSAGSGTANRAAMYGAKVLLIEGGQVGGTCVNLGCVPKKIMWYGAQVSETLH | 64 |
| | | YDYIVIGGGSAG +ANRAAM+GAKVLL EG ++GGTCVNLGCVPKK+MWYGAQV++ L | |
| Sbjct: | 8 | YDYIVIGGGSAGIASANRAAMHGAKVLLAEGKEIGGTCVNLGCVPKKVMWYGAQVADILG | 67 |
| Query: | 65 | KYSSGYGFEVNNLNFDFTTLKANRDAYVQRSRQSYAANFERNGVEKIDGFARFIDNHTIE | 124 |
| | | Y+ YGF+ FDF LKANR AY+ R SY FE+NGV++I +A F D HT+E | |
| Sbjct: | 68 | TYAKDYGFDFKEKAFDFKQLKANRQAYIDRIHASYERGFEQNGVDRIYDYAVFKDAHTVE | 127 |
| Query: | 125 | VNGQQYKAPHITIATGGHPLYPDIIGSELGETSDDFFGWETLPDSILIVGAGYIAAELAG | 184 |
| | | + GQ Y APHI IATGGHP++PDI G++ G +SD FF + +P +VGAGYIA ELAG | |
| Sbjct: | 128 | IAGQLYTAPHILIATGGHPVFPDIEGAQYGISSDGFFALDEVPKRTAVVGAGYIAVELAG | 187 |
| Query: | 185 | VVNELGVETHLAFRKDHILRGFDDMVTSEVMAEMEKSGISLHANHVPKSLKRDEGGKLIF | 244 |
| | | V++ LG +T L R D LR FD + ++ EM +G LH + + ++ L | |
| Sbjct: | 188 | VLHALGSKTDLFIRHDRPLRSFDKTIVDVLVDEMAVNGPRLHTHAEVAKVVKNTDESLTL | 247 |
| Query: | 245 | EAENGKTLVVDRVIWAIGRGPNVD-MGLENTDIVLNDKGYIKADEFENTSVDGVYAIGDV | 303 |
| | | ++G+ + VD++IWAIGR PN++ L+ T + LNDKGYI+ D +ENTSV G+YA+GDV | |
| Sbjct: | 248 | YLKDGQEVEVDQLIWAIGRKPNLEGFSLDKTGVTLNDKGYIETDAYENTSVKGIYAVGDV | 307 |
| Query: | 304 | NGKIALTPVAIAAGRRLSERLFNHKDNEKLDYHNVPSVIFTHPVIGTVGLSEAAAIEQFG | 363 |
| | | NGK+ALTPVA+AAGRRLSERLFN K +EKLDY NV +VIF+HPVIG+VGLSE AA++Q+G | |
| Sbjct: | 308 | NGKLALTPVAVAAGRRLSERLFNGKTDEKLDYQNVATVIFSHPVIGSVGLSEEAAVKQYG | 367 |
| Query: | 364 | EDNIKVYTSTFTSMYTAVTTNRQAVKMKLITLGKEEKVIGLHGVGYGIDEMIQGFSVAIK | 423 |
| | | ++ +K Y S FTSM+TA+T +RQ MKL+T+G EK++GLHG+GYG+DEMIQGF+VAIK | |
| Sbjct: | 368 | QEAVKTYQSRFTSMFTAITNHRQPCLMKLVTVGDTEKIVGLHGIGYGVDEMIQGFAVAIK | 427 |
| Query: | 424 | MGATKADFDDTVAIHPTGSEEFVTMR | 449 |
| | | MGATKADFD+TVAIHPTGSEEFVTMR | |
| Sbjct: | 428 | MGATKADFDNTVAIHPTGSEEFVTMR | 453 |

[3540] SEQ ID 1874 (GBS417) was expressed in E. coli as a His-fusion product. SDS-PAGE analysis of total cell extract is shown in FIG. 79 (lane 5; MW 53 kDa).

[3541] GBS417-His was purified as shown in FIG. 216, lane 2.

[3542] Based on this analysis, it was predicted that these proteins and their epitopes could be useful antigens for vaccines or diagnostics.

### EXAMPLE 606

[3543] A DNA sequence (GBSx0646) was identified in S. agalactiae <SEQ ID 1877> which encodes the amino acid sequence <SEQ ID 1878>. Analysis of this protein sequence reveals the following:

Possible site: 35
>>> Seems to have no N-terminal signal sequence
----- Final Results -----
bacterial cytoplasm --- Certainty = 0.3122 (Affirmative) < succ>
bacterial membrane --- Certainty = 0.0000 (Not Clear) < succ>
bacterial outside --- Certainty = 0.0000 (Not Clear) < succ>

[3544] The protein has homology with the following sequences in the GENPEPT database:

| >GP: AAC62417 GB: AF084104 hypothetical protein [Bacillus firmus] | | | |
|---|---|---|---|
| Identities = 33/110 (30%), Positives = 66/110 (60%) | | | |
| Query: | 1 | MANVYDLANELERAVRALPEYQAVLTAKSAIESDADAQVLWQDFLATQSKVQEMMQSGQM | 60 |
| | | M+NVYD A+EL++A+ E+ A+ + IE+D A+ + ++F Q ++Q+ G | |
| Sbjct: | 1 | MSNVYDKAHELKKAIAESEEFSALKSMHEEIEADEIAKKMLENFRNLQLELQQKQMQGIQ | 60 |
| Query: | 61 | PSQEEQDEMSKLGEKIESNDLLKVYFDQQQRLSVYMSDIEKIVFAPMQDL | 110 |
| | | ++EE + + E ++ ++L+ + +QRLSV + DI KI+ P++++ | |
| Sbjct: | 61 | ITEEEAQKAQQQFELVQQHELISKLMEAEQRLSVIIGDINKIITEPLEEI | 110 |

[3545] A related DNA sequence was identified in S. pyogenes <SEQ ID 1879> which encodes the amino acid sequence <SEQ ID 1880>. Analysis of this protein sequence reveals the following:

Possible site: 38
>>> Seems to have no N-terminal signal sequence
----- Final Results -----
bacterial cytoplasm --- Certainty = 0.4058 (Affirmative) < succ>
bacterial membrane --- Certainty = 0.0000 (Not Clear) < succ>
bacterial outside --- Certainty = 0.0000 (Not Clear) < succ>

[3546] An alignment of the GAS and GBS proteins is shown below:

| Identities = 68/108 (62%), Positives = 86/108 (78%) | | | |
|---|---|---|---|
| Query: | 4 | VYDLANELERAVRALPEYQAVLTAKSAIESDADAQVLWQDFLATQSKVQEMMQSGQMPSQ | 63 |
| | | +YD AN+LERAVRALPEYQ VL K AI++D A L+ +F+A Q K+Q MMQSGQMP+ | |
| Sbjct: | 5 | IYDYANQLERAVRALPEYQKVLEVKEAIQADVSASELFDEFVAMQEKIQGMMQSGQMPTA | 64 |
| Query: | 64 | EEQDEMSKLGEKIESNDLLKVYFDQQQRLSVYMSDIEKIVFAPMQDLM | 111 |
| | | EEQ + +L +KIE+ND LK YF+ QQ LSVYMSDIE+IVFAP++DL+ | |
| Sbjct: | 65 | EEQTSIQELSQKIEANDQLKAYFEAQQALSVYMSDIERIVFAPLKDLV | 112 |

[3547] Based on this analysis, it was predicted that these proteins and their epitopes could be useful antigens for vaccines or diagnostics.

### EXAMPLE 607

[3548] A DNA sequence (GBSx0647) was identified in S. agalactiae <SEQ ID 1881> which encodes the amino acid sequence <SEQ ID 1882>. This protein is predicted to be chorismate synthase (aroC). Analysis of this protein sequence reveals the following:

| Possible site: 15 | | | |
|---|---|---|---|
| >>> Seems to have no N-terminal signal sequence | | | |
| INTEGRAL | Likelihood = −4.67 | Transmembrane | 343-359 (341-364) |

----- Final Results -----
bacterial membrane --- Certainty = 0.2869 (Affirmative) < succ>
bacterial outside --- Certainty = 0.0000 (Not Clear) < succ>
bacterial cytoplasm --- Certainty = 0.0000 (Not Clear) < succ>

[3549] The protein has homology with the following sequences in the GENPEPT database:

| >GP: BAB05375 GB: AP001512 chorismate synthase [Bacillus halodurans] | | | |
|---|---|---|---|
| Identities = 227/381 (59%), Positives = 282/381 (73%), Gaps = 2/381 (0%) | | | |
| Query: | 1 | MRYLTAGESHGPSLTAIIEGIPAGLKLSAKDINEDLKRRQGGYGRGNRMKIETDQVIISS | 60 |
| | | MRYLTAGESHGP LT IIEG PA L+L A DIN DL RRQGG+GRG RM+IE DQV I | |
| Sbjct: | 1 | MRYLTAGESHGPQLTTIIEGAPAQLELVADDINVDLARRQGGHGRGRRMQIEKDQVQIVG | 60 |
| Query: | 61 | GVRHGKTLGSPITLTVTNKDHSKWLDIMSVEDI--EERLKQKRRIKHPRPGHADLVGGIK | 118 |
| | | G+RHGKT G+PI L V NKD W IM E + +E + KR+I PRPGHADL G IK | |
| Sbjct: | 61 | GIRHGKTTGAPIALVVENKDWKHWTKIMGAEPLTGDEEKEIKRKITRPRPGHADLNGAIK | 120 |
| Query: | 119 | YRFDDLRNALERSSARETTMRVAIGAIAKRILKEIGIEIANHIVVFGGKEITVPDKLTVQ | 178 |
| | | Y D+RN LERSSARETT+RVA GA+AK+IL+ GIE+ +H++ GG + + | |
| Sbjct: | 121 | YGHRDMRNVLERSSARETTVRVAAGAVAKKILRTFGIEVGSHVLEIGGVKAEKTSYDQLS | 180 |
| Query: | 179 | QIKVLSSQSQVAIVNPSFEQEIKDYIDSVKKAGDTIGGVVETIVGGVPVGLGSYVHWDRK | 238 |
| | | +K L+ S V ++ EQE+ ID K+ GD+IGGVVE IV GVP+GLGS+VH+DRK | |
| Sbjct: | 181 | NLKELAEASPVRCLDKEAEQEMIAAIDQAKENGDSIGGVVEVIVEGVPIGLGSHVHYDRK | 240 |
| Query: | 239 | LDAKIAQAVVSINAFKGVEFGLGFKSGFLKGSQVMDSISWTKDQGYIRQSNNLGGFEGGM | 298 |
| | | LDAKIA AV+SINAFKGVEFG+GF++ GS+V D I+W +++GY R+SNNLGGFEGGM | |
| Sbjct: | 241 | LDAKIAAAVMSINAFKGVEFGIGFEAASKPGSEVHDEIAWDEERGYYRKSNNLGGFEGGM | 300 |
| Query: | 299 | TNGEPIIVRGVMKPIPTLYKPLMSVDIDTHEPYRATVERSDPTALPAAGVVMEAVVATVL | 358 |
| | | TNG PI+VRGVMKPIPTLYKPL SVDI T EP+ A++ERSD A+PAA VV EAVVA + | |
| Sbjct: | 301 | TNGMPIVVRGVMKPIPTLYKPLQSVDIATKEPFAASIERSDSCAVPAAAVVAEAVVAWEV | 360 |
| Query: | 359 | VTEVLEKFSSDNMYELKEAVK | 379 |
| | | +LE+F +D + E+++ ++ | |
| Sbjct: | 361 | ANALLERFGADQVEEIEKNIR | 381 |

[3550] A related DNA sequence was identified in S. pyogenes <SEQ ID 1883> which encodes the amino acid sequence <SEQ ID 1884>. Analysis of this protein sequence reveals the following:

| Possible site: 15 | | | |
|---|---|---|---|
| >>> Seems to have no N-terminal signal sequence | | | |
| INTEGRAL | Likelihood = −0.75 | Transmembrane | 342-358 (342-359) |
| INTEGRAL | Likelihood = −0.16 | Transmembrane | 155-171 (155-171) |

----- Final Results -----
bacterial membrane --- Certainty = 0.1298 (Affirmative) < succ>
bacterial outside --- Certainty = 0.0000 (Not Clear) < succ>
bacterial cytoplasm --- Certainty = 0.0000 (Not Clear) < succ>

[3551] The protein has homology with the following sequences in the databases:

| >GP: BAB05375 GB: AP001512 chorismate synthase [Bacillus halodurans] | | | |
|---|---|---|---|
| Identities = 213/390 (54%), Positives = 277/390 (70%), Gaps = 2/390 (0%) | | | |
| Query: | 1 | LRYLTAGESHGPSLTAIIEGIPAGLTLHPADIDHELQRRQGGYGRGARMSIETDRVQISS | 60 |
| | | +RYLTAGESHGP LT IIEG PA L L DI+ +L RRQGG+GRG RM IE D+VQI | |
| Sbjct: | 1 | MRYLTAGESHGPQLTTIIEGAPAQLELVADDINVDLARRQGGHGRGRRMQIEKDQVQIVG | 60 |
| Query: | 61 | GVRHGKTTGAPITLTVINKDHQKWLDVMAVGDI--EETLKLKRRVKHPRPGHADLVGGIK | 118 |
| | | G+RHGKTTGAPI L V NKD + W +M + +E ++KR++ PRPGHADL G IK | |
| Sbjct: | 61 | GIRHGKTTGAPIALVVENKDWKHWTKIMGAEPLTGDEEKEIKRKITRPRPGHADLNGAIK | 120 |
| Query: | 119 | YHFNDLRDALERSSARETTMRVAVGAVAKRILAELGIDMLHHILIFGGITITIPSKLSFR | 178 |
| | | Y D+R+ LERSSARETT+RVA GAVAK+IL GI++ H+L GG+ S | |
| Sbjct: | 121 | YGHRDMRNVLERSSARETTVRVAAGAVAKKILRTFGIEVGSHVLEIGGVKAEKTSYDQLS | 180 |
| Query: | 179 | ELQERALHSELSIVNPKQEEEIKTYIDKIKKEGDTIGGIIETIVQGVPAGLGSYVQWDKK | 238 |
| | | L+E A S + ++ + E+E+ ID+ K+ GD+IGG++E IV+GVP GLGS+V +D+K | |
| Sbjct: | 181 | NLKELAEASPVRCLDKEAEQEMIAAIDQAKENGDSIGGVVEVIVEGVPIGLGSHVHYDRK | 240 |
| Query: | 239 | LDAKLAQAVLSINAFKGVEFGAGFDMGFQKGSQVMDEITWTPTQGYGRQTNHLGGFEGGM | 298 |
| | | LDAK+A AV+SINAFKGVEFG GF+ + GS+V DEI W +GY R++N+LGGFEGGM | |
| Sbjct: | 241 | LDAKIAAAVMSINAFKGVEFGIGFEAASKPGSEVHDEIAWDEERGYYRKSNNLGGFEGGM | 300 |
| Query: | 299 | TTGQPLVVKGVMKPIPTLYKPLMSVDIDSHEPYKATVERSDPTALPAAGVIMENVVATVL | 358 |
| | | T G P+VV+GVMKPIPTLYKPL SVDI + EP+ A++ERSD A+PAA V+ E VVA + | |
| Sbjct: | 301 | TNGMPIVVRGVMKPIPTLYKPLQSVDIATKEPFAASIERSDSCAVPAAAVVAEAVVAWEV | 360 |
| Query: | 359 | AKEILETFSSTTMSELQKAFSDYRAYVKQF | 388 |
| | | A +LE F + + E++K ++ + F | |
| Sbjct: | 361 | ANALLERFGADQVEEIEKNIREFNEKARLF | 390 |

[3552] An alignment of the GAS and GBS proteins is shown below:

| Identities = 284/388 (73%), Positives = 333/388 (85%) | | | |
|---|---|---|---|
| Query: | 1 | MRYLTAGESHGPSLTAIIEGIPAGLKLSAKDINEDLKRRQGGYGRGNRMKIETDQVIISS | 60 |
| | | +RYLTAGESHGPSLTAIIEGIPAGL L DI+ +L+RRQGGYGRG RM IETD+V ISS | |
| Sbjct: | 1 | LRYLTAGESHGPSLTAIIEGIPAGLTLHPADIDHELQRRQGGYGRGARMSIETDRVQISS | 60 |
| Query: | 61 | GVRHGKTLGSPITLTVTNKDHSKWLDIMSVEDIEERLKQKRRIKHPRPGHADLVGGIKYR | 120 |
| | | GVRHGKT G+PITLTV NKDH KWLD+M+V DIEE LK KRR+KHPRPGHADLVGGIKY | |
| Sbjct: | 61 | GVRHGKTTGAPITLTVINKDHQKWLDVMAVGDIEETLKLKRRVKHPRPGHADLVGGIKYH | 120 |
| Query: | 121 | FDDLRNALERSSARETTMRVAIGAIAKRILKEIGIEIANHIVVFGGKEITVPDKLTVQQI | 180 |
| | | F+DLR+ALERSSARETTMRVA+GA+AKRIL E+GI++ +HI++FGG IT+P KL+ +++ | |
| Sbjct: | 121 | FNDLRDALERSSARETTMRVAVGAVAKRILAELGIDMLHHILIFGGITITIPSKLSFREL | 180 |
| Query: | 181 | KVLSSQSQVAIVNPSFEQEIKDYIDSVKKAGDTIGGVVETIVGGVPVGLGSYVHWDRKLD | 240 |
| | | + + S+++IVNP E+EIK YID +KK GDTIGG++ETIV GVP GLGSYV WD+KLD | |
| Sbjct: | 181 | QERALHSELSIVNPKQEEEIKTYIDKIKKEGDTIGGIIETIVQGVPAGLGSYVQWDKKLD | 240 |
| Query: | 241 | AKIAQAVVSINAFKGVEFGLGFKSGFLKGSQVMDSISWTKDQGYIRQSNNLGGFEGGMTN | 300 |
| | | AK+AQAV+SINAFKGVEFG GF GF KGSQVMD I+WT QGY RQ+N+LGGFEGGMT | |
| Sbjct: | 241 | AKLAQAVLSINAFKGVEFGAGFDMGFQKGSQVMDEITWTPTQGYGRQTNHLGGFEGGMTT | 300 |
| Query: | 301 | GEPIIVRGVMKPIPTLYKPLMSVDIDTHEPYRATVERSDPTALPAAGVVMEAVVATVLVT | 360 |
| | | G+P++V+GVMKPIPTLYKPLMSVDID+HEPY+ATVERSDPTALPAAGV+ME VVATVL | |
| Sbjct: | 301 | GQPLVVKGVMKPIPTLYKPLMSVDIDSHEPYKATVERSDPTALPAAGVIMENVVATVLAK | 360 |
| Query: | 361 | EVLEKFSSDNMYELKEAVKLYRNYVDHF | 388 |
| | | E+LE FSS M EL++A YR YV F | |
| Sbjct: | 361 | EILETFSSTTMSELQKAFSDYRAYVKQF | 388 |

[3553] A related GBS gene <SEQ ID 8617> and protein <SEQ ID 8618> were also identified. Analysis of this protein sequence reveals the following:

| Lipop: Possible site: −1 Crend: 9 | | | |
|---|---|---|---|
| McG: Discrim Score: −2.42 | | | |
| GvH: Signal Score (−7.5): −3.23 | | | |
| Possible site: 15 | | | |
| >>> Seems to have no N-terminal signal sequence | | | |
| ALOM program | count: 1 | value: −4.67 | threshold: 0.0 |

| | | | |
|---|---|---|---|
| INTEGRAL | Likelihood = −4.67 | Transmembrane | 343-359 (341-364) |

| | | |
|---|---|---|
| PERIPHERAL | Likelihood = 0.69 | 214 |

modified ALOM score: 1.43
*** Reasoning Step: 3
----- Final Results -----
bacterial membrane --- Certainty = 0.2869 (Affirmative) < succ>
bacterial outside --- Certainty = 0.0000 (Not Clear) < succ>
bacterial cytoplasm --- Certainty = 0.0000 (Not Clear) < succ>

[3554] The protein has homology with the following sequences in the databases:

[chemical structure]

[3555] Based on this analysis, it was predicted that these proteins and their epitopes could be useful antigens for vaccines or diagnostics.

### EXAMPLE 608

[3556] A DNA sequence (GBSx0648) was identified in S. agalactiae <SEQ ID 1885> which encodes the amino acid sequence <SEQ ID 1886>. This protein is predicted to be 3-dehydroquinate synthase (aroB). Analysis of this protein sequence reveals the following:

| Possible site: 24 | | | |
|---|---|---|---|
| >>> Seems to have no N-terminal signal sequence | | | |
| INTEGRAL | Likelihood = −3.82 | Transmembrane | 99-115 (98-116) |

----- Final Results -----
bacterial membrane --- Certainty = 0.2529 (Affirmative) < succ>
bacterial outside --- Certainty = 0.0000 (Not Clear) < succ>
bacterial cytoplasm --- Certainty = 0.0000 (Not Clear) < succ>

[3557] The protein has homology with the following sequences in the GENPEPT database:

| >GP: BAA18068 GB: D90911 3-dehydroquinate synthase [Synechocystis sp.] | | | |
|---|---|---|---|
| Identities = 138/351 (39%), Positives = 200/351 (56%), Gaps = 4/351 (1%) | | | |
| Query: | 3 | VEVDLPNHPYHIKIEEGCFSEAGDWVSHLWQKQMITIITDSNVEILYGESLVNQLKKQGF | 62 |
| | | + V LP PY ++I G + D ++ L + I ++++ + YGE ++ L++ G+ | |
| Sbjct: | 5 | IPVPLPQSPYQVQIVPGGLAAIADHLAPLGLGKKIMVVSNPEIYDYYGEVVIQALQRAGY | 64 |
| Query: | 63 | TVHVFSFAAGEASKTLEVANRIYAFLAKHHMTRSDGIIALGGGVVGDLAAFVASTYMRGI | 122 |
| | | V AGE KTL N +Y + ++ R+ +++LGGGV+GD+ F A+T++RGI | |
| Sbjct: | 65 | EVFQHLIPAGETHKTLASINELYDVAFQANLERNSTLLSLGGGVIGDMTGFGAATWLRGI | 124 |
| Query: | 123 | HFLQIPTSLTAQVDSSIGGKTGVNTSFAKNMVGTFAQPDGVLIDPVTLKTLGNRELVEGM | 182 |
| | | +F+Q+PTSL A VD+SIGGKTGVN KN++G F QP V IDPV LKTL RE GM | |
| Sbjct: | 125 | NFVQVPTSLLAMVDASIGGKTGVNHPQGKNLIGAFYQPRLVYIDPVVLKTLPEREFRAGM | 184 |
| Query: | 183 | GEVIKYGLIDDIKLWHILEEMD--GTIDSILDNALA-IIYHSCQVKRKHVLADQYDKGLR | 239 |
| | | EVIKYG+I D +L+ LEE + +ID + D L II SCQ K V D+ + GLR | |
| Sbjct: | 185 | AEVIKYGVIWDSELFTALEEAEDLSSIDRLPDELLTKIIQRSCQAKVDVVSQDEKEAGLR | 244 |
| Query: | 240 | MHLNFGHTIGHAIEVHAGYGEIMHGEAVAIGMIQLSRVAERKNLMPRGISQDIYNMCLKF | 299 |
| | | LN+GHT+GH +E GYG I HGEAVAIGM +++A L + + + LK | |
| Sbjct: | 245 | AILNYGHTVGHGVESLTGYGVINHGEAVAIGMEAAAKIAHYLGLCDQSLGDRQRQLLLKT | 304 |
| Query: | 300 | GLPVHY-AEWDKDVLFDILSHDKKASGQFIKIVILPQLGSATVHQIPLEEM | 349 |
| | | LP + L L HDKK ++ ++ +G T+ +E+ | |
| Sbjct: | 305 | KLPTEMPPTLAVENLLASLLHDKKVKAGKVRFILPTAIGQVTISDAVTDEV | 355 |

[3558] A related DNA sequence was identified in S. pyogenes <SEQ ID 1887> which encodes the amino acid sequence <SEQ ID 1888>. Analysis of this protein sequence reveals the following:

| Possible site: 60 | | | |
|---|---|---|---|
| >>> Seems to have no N-terminal signal sequence | | | |
| INTEGRAL | Likelihood = −0.43 | Transmembrane | 97-113 (97-114) |

----- Final Results -----
bacterial membrane --- Certainty = 0.1171 (Affirmative) < succ>
bacterial outside --- Certainty = 0.0000 (Not Clear) < succ>
bacterial cytoplasm --- Certainty = 0.0000 (Not Clear) < succ>

[3559] The protein has homology with the following sequences in the databases:

| >GP: BAA18068 GB: D90911 3-dehydroquinate synthase [Synechocystis sp.] | | | |
|---|---|---|---|
| Identities = 123/349 (35%), Positives = 190/349 (54%), Gaps = 9/349 (2%) | | | |
| Query: | 1 | MPQTLHVHSRVKDYDILFTDHVLKTLADCLGERKQ-RKLLFITDQTVYHLYQTLFEEFAQ | 59 |
| | | M T+ V Y + L +AD L +K++ +++ +Y Y + + Q | |
| Sbjct: | 1 | MATTIPVPLPQSPYQVQIVPGGLAAIADHLAPLGLGKKIMVVSNPEIYDYYGEVVIQALQ | 60 |
| Query: | 60 | Q--YNAFVHVCPPGGQSKSLERVSAIYDQLIAENFSKKDMIVTIGGGVVGDLGGFVAATY | 117 |
| | | + Y F H+ P G K+L ++ +YD N + ++++GGGV+GD+ GF AAT+ | |
| Sbjct: | 61 | RAGYEVFQHLIPAGETHKTLASINELYDVAFQANLERNSTLLSLGGGVIGDMTGFGAATW | 120 |
| Query: | 118 | YRGIPYIQIPTTLLSQVDSSIGGKVGVHFKGLTNMIGSIYPPEAIIISTTFLETLPQREF | 177 |
| | | RGI ++Q+PT+LL+ VD+SIGGK GV+ N+IG+ Y P + I L+TLP+REF | |
| Sbjct: | 121 | LRGINFVQVPTSLLAMVDASIGGKTGVNHPQGKNLIGAFYQPRLVYIDPVVLKTLPEREF | 180 |
| Query: | 178 | SCGISEMLKIGFIHDRPLFQQLRDFQ-----KETDKQGLERLIYQSISNKKRIVEQDEFE | 232 |
| | | G++E++K G I D LF L + + + L ++I +S K +V QDE E | |
| Sbjct: | 181 | RAGMAEVIKYGVIWDSELFTALEEAEDLSSIDRLPDELLTKIIQRSCQAKVDVVSQDEKE | 240 |
| Query: | 233 | NGLRMSLNFGHTLGHAIESLCHHDFYHHGEAIAIGMVVDAKLAVSKGLLPKEDLDSLLQV | 292 |
| | | GLR LN+GHT+GH +ESL + +HGEA+AIGM AK+A GL + D Q+ | |
| Sbjct: | 241 | AGLRAILNYGHTVGHGVESLTGYGVINHGEAVAIGMEAAAKIAHYLGLCDQSLGDRQRQL | 300 |
| Query: | 293 | FERYQLPTTLERADVSATSLFDVFKTDKKNSEQHIIFILPTETGFTTLA | 341 |
| | | + +LPT + ++ +L DKK + FILPT G T++ | |
| Sbjct: | 301 | LLKTKLPTEMP-PTLAVENLLASLLHDKKVKAGKVRFILPTAIGQVTIS | 348 |

[3560] An alignment of the GAS and GBS proteins is shown below:

| Identities = 121/332 (36%), Positives = 182/332 (54%), Gaps = 7/332 (2%) | | | |
|---|---|---|---|
| Query: | 12 | YHIKIEEGCFSEAGDWVSHLWQKQMITIITDSNVEILYGESLVNQLKKQGFTVHVFSFAA | 71 |
| | | Y I + D + Q++++ ITD V LY ++L + +Q + V | |
| Sbjct: | 14 | YDILFTDHVLKTLADCLGERKQRKLL-FITDQTVYHLY-QTLFEEFAQQ-YNAFVHVCPP | 70 |
| Query: | 72 | GEASKTLEVANRIYAFLAKHHMTRSDGIIALGGGVVGDLAAFVASTYMRGIHFLQIPTSL | 131 |
| | | G SK+LE + IY L + ++ D I+ +GGGVVGDL FVA+TY RGI ++QIPT+L | |
| Sbjct: | 71 | GGQSKSLERVSAIYDQLIAENFSKKDMIVTIGGGVVGDLGGFVAATYYRGIPYIQIPTTL | 130 |
| Query: | 132 | TAQVDSSIGGKTGVNTSFAKNMVGTFAQPDGVLIDPVTLKTLGNRELVEGMGEVIKYGLI | 191 |
| | | +QVDSSIGGK GV+ NM+G+ P+ ++I L+TL RE G+ E++K G I | |
| Sbjct: | 131 | LSQVDSSIGGKVGVHFKGLTNMIGSIYPPEAIIISTTFLETLPQREFSCGISEMLKIGFI | 190 |
| Query: | 192 | DDIKLWHILEEMDGTIDSILDNALAIIYHSCQVKRKHVLADQYDKGLRMHLNFGHTIGHA | 251 |
| | | D L+ L + D +IY S K++ V D+++ GLRM LNFGHT+GHA | |
| Sbjct: | 191 | HDRPLFQQLRDFQKETDK--QGLERLIYQSISNKKRIVEQDEFENGLRMSLNFGHTLGHA | 248 |
| Query: | 252 | IEVHAGYGEIMHGEAVAIGMIQLSRVAERKNLMPRGISQDIYNMCLKFGLP--VHYAEWD | 309 |
| | | IE + HGEA+AIGM+ +++A K L+P+ + + ++ LP + A+ | |
| Sbjct: | 249 | IESLCHHDFYHHGEAIAIGMVVDAKLAVSKGLLPKEDLDSLLQVFERYQLPTTLERADVS | 308 |
| Query: | 310 | KDVLFDILSHDKKASGQFIKIVILPQLGSATV | 341 |
| | | LFD+ DKK S Q I ++ + G T+ | |
| Sbjct: | 309 | ATSLFDVFKTDKKNSEQHIIFILPTETGFTTL | 340 |

[3561] SEQ ID 1886 (GBS336) was expressed in E. coli as a His-fusion product. SDS-PAGE analysis of total cell extract is shown in FIG. 62 (lane 2; MW 42.7 kDa). It was also expressed in E. coli as a GST-fusion product. SDS-PAGE analysis of total cell extract is shown in FIG. 67 (lane 5; MW 68 kDa).

[3562] The GBS336-GST fusion product was purified (FIG. 209, lane 4) and used to immunise mice. The resulting antiserum was used for FACS (FIG. 310), which confirmed that the protein is immunoaccessible on GBS bacteria.

[3563] Based on this analysis, it was predicted that these proteins and their epitopes could be useful antigens for vaccines or diagnostics.

### EXAMPLE 609

[3564] A DNA sequence (GBSx0649) was identified in S. agalactiae <SEQ ID 1889> which encodes the amino acid sequence <SEQ ID 1890>. Analysis of this protein sequence reveals the following:

Possible site: 47
>>> Seems to have no N-terminal signal sequence
----- Final Results -----
bacterial cytoplasm --- Certainty = 0.3884 (Affirmative) < succ>
bacterial membrane --- Certainty = 0.0000 (Not Clear) < succ>
bacterial outside --- Certainty = 0.0000 (Not Clear) < succ>

[3565] A related GBS nucleic acid sequence <SEQ ID 9973> which encodes amino acid sequence <SEQ ID 9974> was also identified.

[3566] The protein has homology with the following sequences in the GENPEPT database:

| >GP: CAB14240 GB: Z99116 3-dehydroquinate dehydratase [Bacillus subtilis] | | | |
|---|---|---|---|
| Identities = 70/233 (30%), Positives = 127/233 (54%), Gaps = 12/233 (5%) | | | |
| Query: | 2 | KIVVPVMPRSLEEA-QEIDLSKFDSVDIIEWRADALPK----DDIINVAPAIFEKFAGHE | 56 |
| | | KI++P+M ++ ++ E + K + DI+EWR D K + + + + + | |
| Sbjct: | 17 | KIIIPLMGKTEKQILNEAEAVKLLNPDIVEWRVDVFEKANDREAVTKLISKLRKSLEDKL | 76 |
| Query: | 57 | IIFTLRTTREGGNIVLSDAEYVELIQKINSIYNPDYIDFEYFSHKEVFQEMLEFPN---- | 112 |
| | | +FT RT +EGG++ + ++ Y+ L++ + D ID E FS + ++ | |
| Sbjct: | 77 | FLFTFRTHKEGGSMEMDESSYLALLESAIQTKDIDLIDIELFSGDANVKALVSLAEENNV | 136 |
| Query: | 113 | -LVLSYHNFQETP--ENIMEIFSELTALAPRVVKIAVMPKNEQDVLDVMNYTRGFKTINP | 169 |
| | | +V+S H+F++TP + I+ ++ L + K+AVMP + D+L +++ T KTI | |
| Sbjct: | 137 | YVVMSNHDFEKTPVKDEIISRLRKMQDLGAHIPKMAVMPNDTGDLLTLLDATYTMKTIYA | 196 |
| Query: | 170 | DQVYATVSMSKIGRISRFAGDVTGSSWTFAYLDSSIAPGQITISEMKRVKALL | 222 |
| | | D+ T+SM+ G ISR +G+V GS+ TF + + APGQI +SE++ V +L | |
| Sbjct: | 197 | DRPIITMSMAATGLISRLSGEVFGSACTFGAGEEASAPGQIPVSELRSVLDIL | 249 |

[3567] A related DNA sequence was identified in S. pyogenes <SEQ ID 1891> which encodes the amino acid sequence <SEQ ID 1892>. Analysis of this protein sequence reveals the following:

Possible site: 17
>>> Seems to have no N-terminal signal sequence
----- Final Results -----
bacterial cytoplasm --- Certainty = 0.3248 (Affirmative) < succ>
bacterial membrane --- Certainty = 0.0000 (Not Clear) < succ>
bacterial outside --- Certainty = 0.0000 (Not Clear) < succ>

[3568] An alignment of the GAS and GBS proteins is shown below:

| Identities = 160/225 (71%), Positives = 198/225 (87%) | | | |
|---|---|---|---|
| Query: | 1 | MKIVVPVMPRSLEEAQEIDLSKFDSVDIIEWRADALPKDDIINVAPAIFEKFAGHEIIFT | 60 |
| | | M+IV PVMPR +EAQ ID+SK++ V++IEWRAD LPKD+I+ VAPAIFEKFAG EIIFT | |
| Sbjct: | 1 | MRIVAPVMPRHFDEAQAIDISKYEDVNLIEWRADFLPKDEIVAVAPAIFEKFAGKEIIFT | 60 |
| Query: | 61 | LRTTREGGNIVLSDAEYVELIQKINSIYNPDYIDFEYFSHKEVFQEMLEFPNLVLSYHNF | 120 |
| | | LRT +EGGNI LS EYV++I++IN+IYNPDYIDFEYF+HK VFQEML+FPNL+LSYHNF | |
| Sbjct: | 61 | LRTVQEGGNITLSSQEYVDIIKEINAIYNPDYIDFEYFTHKSVFQEMLDFPNLILSYHNF | 120 |
| Query: | 121 | QETPENIMEIFSELTALAPRVVKIAVMPKNEQDVLDVMNYTRGFKTINPDQVYATVSMSK | 180 |
| | | +ETPEN+ME FSE+T LAPRVVKIAVMP++EQDVLD+MNYTRGFKT+NP+Q +AT+SM K | |
| Sbjct: | 121 | EETPENLMEAFSEMTKLAPRVVKIAVMPQSEQDVLDLMNYTRGFKTLNPEQEFATISMGK | 180 |
| Query: | 181 | IGRISRFAGDVTGSSWTFAYLDSSIAPGQITISEMKRVKALLDAD | 225 |
| | | +GR+SRFAGDV GSSWT+ LD PGQ+T+++MKR+ +L+ D | |
| Sbjct: | 181 | LGRLSRFAGDVIGSSWTYVSLDHVSGPGQVTLNDMKRIIEVLEMD | 225 |

[3569] Based on this analysis, it was predicted that these proteins and their epitopes could be useful antigens for vaccines or diagnostics.

### EXAMPLE 610

[3570] A DNA sequence (GBSx0650) was identified in S. agalactiae <SEQ ID 1893> which encodes the amino acid sequence <SEQ ID 1894>. Analysis of this protein sequence reveals the following:

Possible site: 17
>>> Seems to have no N-terminal signal sequence
----- Final Results -----
bacterial cytoplasm --- Certainty = 0.1195 (Affirmative) < succ>
bacterial membrane --- Certainty = 0.0000 (Not Clear) < succ>
bacterial outside --- Certainty = 0.0000 (Not Clear) < succ>

[3571] The protein has no significant homology with any sequences in the GENPEPT database.

[3572] No corresponding DNA sequence was identified in S. pyogenes.

[3573] Based on this analysis, it was predicted that this protein and its epitopes, could be useful antigens for vaccines or diagnostics.

### EXAMPLE 611

[3574] A DNA sequence (GBSx0651) was identified in S. agalactiae <SEQ ID 1895> which encodes the amino acid sequence <SEQ ID 1896>. Analysis of this protein sequence reveals the following:

Possible site: 41
>>> Seems to have no N-terminal signal sequence
----- Final Results -----
bacterial cytoplasm --- Certainty = 0.3431 (Affirmative) < succ>
bacterial membrane --- Certainty = 0.0000 (Not Clear) < succ>
bacterial outside --- Certainty = 0.0000 (Not Clear) < succ>

[3575] The protein has homology with the following sequences in the GENPEPT database:

| >GP: CAB15862 GB: Z99123 alternate gene name: ipa-19d~similar to | | | |
|---|---|---|---|
| hypothetical proteins [Bacillus subtilis] | | | |
| Identities = 161/396 (40%), Positives = 235/396 (58%), Gaps = 11/396 (2%) | | | |
| Query: | 1 | MNKLKVNSVVERKIKSGAQLLEKKDFDTSLVNQ----LVQLFSQSN-QFLGMAYLSPQNK | 55 |
| | | M L + KIK G L+EK+ S + LV + S+S +FL Y QNK | |
| Sbjct: | 1 | MKLLTLKKAHAAKIKKGYPLIEKEALAGSAGHMKEGDLVDIVSESGGEFLARGYYGLQNK | 60 |
| Query: | 56 | GIGWLLSRQVFD-FNHDYFVSLFEKSREKRQKFEKSSQTTAYRLFNQDGDNFGGLTIDFY | 114 |
| | | G+GW L+R + + +F+S K+ + R K ++ TTA+RLFN +GD GG+TID+Y | |
| Sbjct: | 61 | GVGWTLTRNKHEQIDQAFFLSKLTKAAQARAKLFEAQDTTAFRLFNGEGDGVGGVTIDYY | 120 |
| Query: | 115 | SDYALFSWYNEFVYTNRQMIVAAFKQVYPNIKGAYEKIRFKGLDF---ESAHLYGQEAPE | 171 |
| | | Y L WY++ +YT + M+++A ++ + K YEK RF + + G+ | |
| Sbjct: | 121 | DGYLLIQWYSKGIYTFKDMLISALDEMDLDYKAIYEKKRFDTAGQYVEDDDFVKGRRGEF | 180 |
| Query: | 172 | SFLILENNIKYSVFLNDGLMTGIFLDQHDVRKALATNLSEGKKVLNMFSYTAAFSVAAAV | 231 |
| | | +I EN I+Y+V LN+G MTGIFLDQ VRKA+ ++GK VLN FSYT AFSVAAA+ | |
| Sbjct: | 181 | PIIIQENGIQYAVDLNEGAMTGIFLDQRHVRKAIRDRYAKGKTVLNTFSYTGAFSVAAAL | 240 |
| Query: | 232 | GGALETTSVDLAKRSRELSKAHFDANQIVTDNHRFIVMDVFEYYKYAKRKHLSYDVIVID | 291 |
| | | GGA +TTSVD+A RS + F N++ + H VMDVF Y+ YA +K L +D+I++D | |
| Sbjct: | 241 | GGAEKTTSVDVANRSLAKTIEQFSVNKLDYEAHDIKVMDVFNYFSYAAKKDLRFDLIILD | 300 |
| Query: | 292 | PPSFARNKKQTFSVTKDYYKLIEQALDILTPGGTIIASTNAANLTVSQFKKQLEKGFGKA | 351 |
| | | PPSFAR KK+TFS KDY L+++ + I G I+ASTN++ + +FK ++ F + | |
| Sbjct: | 301 | PPSFARTKKRTFSAAKDYKNLLKETIAITADKGVIVASTNSSAFGMKKFKGFIDAAFKET | 360 |
| Query: | 352 | SHNYISLQQ-LPEDFTINDKDQQSNYLKVFTIKVK | 385 |
| | | + Y +++ LPEDF + NYLKV ++ K | |
| Sbjct: | 361 | NERYTIIEEFTLPEDFKTISAFPEGNYLKVVLLQKK | 396 |

[3576] A related DNA sequence was identified in S. pyogenes <SEQ ID 1897> which encodes the amino acid sequence <SEQ ID 1898>. Analysis of this protein sequence reveals the following:

Possible site: 29
>>> Seems to have no N-terminal signal sequence
----- Final Results -----
bacterial cytoplasm --- Certainty = 0.2699 (Affirmative) < succ>
bacterial membrane --- Certainty = 0.0000 (Not Clear) < succ>
bacterial outside --- Certainty = 0.0000 (Not Clear) < succ>

[3577] An alignment of the GAS and GBS proteins is shown below:

| Identities = 259/386 (67%), Positives = 315/386 (81%), Gaps = 1/386 (0%) | | | |
|---|---|---|---|
| Query: | 1 | MNKLKVNSVVERKIKSGAQLLEKKDFDT-SLVNQLVQLFSQSNQFLGMAYLSPQNKGIGW | 59 |
| | | MNKL ++S VE+K+ +G QLL++KDF NQLVQL ++SN+ +G AY+S QNKGIGW | |
| Sbjct: | 1 | MNKLYIDSFVEKKLTAGVQLLDEKDFSNIKEKNQLVQLVTKSNRPIGTAYISKQNKGIGW | 60 |
| Query: | 60 | LLSRQVFDFNHDYFVSLFEKSREKRQKFEKSSQTTAYRLFNQDGDNFGGLTIDFYSDYAL | 119 |
| | | L + D + YFVSLF ++ KRQ F +S +T AYRLFNQ+GD FGG+TID Y D+A+ | |
| Sbjct: | 61 | YLGPEKIDLSISYFVSLFSVAKAKRQDFAQSDETNAYRLFNQEGDGFGGVTIDLYKDFAV | 120 |
| Query: | 120 | FSWYNEFVYTNRQMIVAAFKQVYPNIKGAYEKIRFKGLDFESAHLYGQEAPESFLILENN | 179 |
| | | FSWYN FVY ++MI+ AF+QV+P +KGAYEK RFKG D E+AHLYG+ A E+F ILEN | |
| Sbjct: | 121 | FSWYNAFVYDKKEMIMEAFQQVFPEVKGAYEKCRFKGPDTETAHLYGELAQETFSILENG | 180 |
| Query: | 180 | IKYSVFLNDGLMTGIFLDQHDVRKALATNLSEGKKVLNMFSYTAAFSVAAAVGGALETTS | 239 |
| | | I Y VFLN+GLMTGIFLDQHDVR+AL L+ GK +LN+FSYTAAFSVAAA+GGA+ETTS | |
| Sbjct: | 181 | IAYQVFLNEGLMTGIFLDQHDVRRALVDGLAMGKSLLNLFSYTAAFSVAAAMGGAIETTS | 240 |
| Query: | 240 | VDLAKRSRELSKAHFDANQIVTDNHRFIVMDVFEYYKYAKRKHLSYDVIVIDPPSFARNK | 299 |
| | | VDLAKRSRELS AHF+ NQ+ +H F+VMDVFEY+KYAKRK L +DVIVIDPPSFARNK | |
| Sbjct: | 241 | VDLAKRSRELSLAHFEHNQLNLASHHFVVMDVFEYFKYAKRKKLIFDVIVIDPPSFARNK | 300 |
| Query: | 300 | KQTFSVTKDYYKLIEQALDILTPGGTIIASTNAANLTVSQFKKQLEKGFGKASHNYISLQ | 359 |
| | | KQTFSV++DY+KLI +ALDIL+P GTIIASTNAAN+TVSQFKKQ+ KGFG ++LQ | |
| Sbjct: | 301 | KQTFSVSRDYHKLITEALDILSPKGTIIASTNAANMTVSQFKKQIIKGFGSRRPESMTLQ | 360 |
| Query: | 360 | QLPEDFTINDKDQQSNYLKVFTIKVK | 385 |
| | | QLP DFTIN D++SNYLKVFTIKV+ | |
| Sbjct: | 361 | QLPSDFTINKADERSNYLKVFTIKVR | 386 |

[3578] Based on this analysis, it was predicted that these proteins and their epitopes could be useful antigens for vaccines or diagnostics.

### EXAMPLE 612

[3579] A DNA sequence (GBSx0652) was identified in S. agalactiae <SEQ ID 1899> which encodes the amino acid sequence <SEQ ID 1900>. This protein is predicted to be minimal change nephritis transmembrane glycoprotein. Analysis of this protein sequence reveals the following:

| Possible site: 30 | | | |
|---|---|---|---|
| >>> Seems to have an uncleavable N-term signal seq | | | |
| INTEGRAL | Likelihood = −6.85 | Transmembrane | 129-145 (126-152) |
| INTEGRAL | Likelihood = −4.88 | Transmembrane | 48-64 (46-69) |
| INTEGRAL | Likelihood = −4.83 | Transmembrane | 75-91 (74-97) |
| INTEGRAL | Likelihood = −4.62 | Transmembrane | 16-32 (15-34) |
| INTEGRAL | Likelihood = −2.28 | Transmembrane | 163-179 (163-182) |

----- Final Results -----
bacterial membrane --- Certainty = 0.3739 (Affirmative) < succ>
bacterial outside --- Certainty = 0.0000 (Not Clear) < succ>
bacterial cytoplasm --- Certainty = 0.0000 (Not Clear) < succ>

[3580] The protein has homology with the following sequences in the GENPEPT database:

| >GP: CAB12545 GB: Z99107 alternate gene name: yetP~similar to | | | |
|---|---|---|---|
| hypothetical proteins [Bacillus subtilis] | | | |
| Identities = 299/676 (44%), Positives = 415/676 (61%), Gaps = 33/676 (4%) | | | |
| Query: | 2 | KKIKDFASRAINTRLGFILLLVVIYWLKTIWAYHTDFNLGLENSYQLFLTIINPIPLGLL | 61 |
| | | KK++ + + +L F +L V+++W KT +Y T+FNLG++ + Q L I NP + | |
| Sbjct: | 9 | KKVEVAMKKLFSYKLSFFVLAVILFWAKTYLSYKTEFNLGVKGTTQEILLIFNPFSSAVF | 68 |
| Query: | 62 | IIGLALYVKRTKAFYITAFITYAIVNILLIANAIYYREFSDFITVSAVLASSKTSAGLGD | 121 |
| | | +GLAL K K+ I I + ++ +L AN ++YR F DF+T + S +GD | |
| Sbjct: | 69 | FLGLALLAKGRKSAIIMLIIDF-LMTFVLYANILFYRFFDDFLTFPNIKQSGNVG-NMGD | 126 |
| Query: | 122 | SALNLLRIWDLVYVFDFIILIFLFATKKIHLDDRPFNKRASFSITALSGL-LFSINLFLA | 180 |
| | | +++ D+ Y D IILI + + L + KR + S+ LSG+ LF INL A | |
| Sbjct: | 127 | GIFSIMAGHDIFYFLDIIILIAVLIWRP-ELKEYKMKKRFA-SLVILSGIALFFINLHYA | 184 |
| Query: | 181 | EIDRPELLSRGFSNTYIVKALGLPSFSIYSGNQTYQAQKERNGATAQELATAKKYVAEHY | 240 |
| | | E DRP+LL+R F YIVK LGL +++IY G QT Q + +R A++ +L + + Y HY | |
| Sbjct: | 185 | EKDRPQLLTRTFDRHYIVKYLGLYNYTIYDGVQTAQTETQRAYASSDDLTSVENYTTSHY | 244 |
| Query: | 241 | AKPNPEYYGIGKGRNVIMIHLESFQQFLIDYRLNIDGKEHVVTPFINSLYHSKETVS-FS | 299 |
| | | AKPN EY+G KG+N+I IHLESFQ FLIDYKLN G+E VTPF+N L H E V+F | |
| Sbjct: | 245 | AKPNAEYFGSARGKNIIKIHLESFQSFLIDYKLN--GEE--VTPFLNKLAHGGEDVTYFD | 300 |
| Query: | 300 | NFFHQVKAGKTSDAETLMENSLFGLSSGSFMVNYGGENTQFAAPHILAQNGGYSSAVFHG | 359 |
| | | NFFHQ GKTSDAE M+NS+FGL GS V GENT + P IL Q GY+SAV HG | |
| Sbjct: | 301 | NFFHQTGQGKTSDAELTMDNSIFGLPEGSAFVT-KGENTYQSLPAILDQKEGYTSAVLHG | 359 |
| Query: | 360 | NVGTFWNRNNAYKQWGYDYFFDSSYFSKQTKDNSFQYGLNDKYMFADSIKYLEHMQQPFY | 419 |
| | | + +FWNR+ YK GYD FFD+S + + +N GL DK F +SI LE ++QPFY | |
| Sbjct: | 360 | DYKSFWNRDQIYKHIGYDKFFDASTYD-MSDENVINMGLKDKPFFTESIPKLESLKQPFY | 418 |
| Query: | 420 | TKFITVSNHYPYTSLKGESDEEGFPLAKTNDETINGYFATANYLDTALKSFFEYLKAAGV | 479 |
| | | IT++NHYP+ + + A T D T++ YF TA YLD AL+ FF+ LK AG+ | |
| Sbjct: | 419 | AHLITLTNHYPFNL---DEKDASLKKATTGDNTVDSYFQTARYLDEALEQFFKELKEAGL | 475 |
| Query: | 480 | YDNSIIVMYGDHYGISNTRNPSLAELLGKDPETWSEYDNAMLQRVPYMIHIPGYSKGFIS | 539 |
| | | YDNS+I++YGDH GIS N ++ E+LGK+ ++Y NA QRVP MI +PG KG ++ | |
| Sbjct: | 476 | YDNSVIMIYGDHNGISENHNRAMKEILGKE---ITDYQNAQNQRVPLMIRVPG-KKGGVN | 531 |
| Query: | 540 | NTYGGEVDNLPTLLHILGIDTSKYTQLGQDLLSKDNKQMVAMRTTGQYITPKYTNYSGHL | 599 |
| | | +TYGGE+D +PTLLH+ GID+ KY G DL SKD+ VA R G ++TPKYT+ + | |
| Sbjct: | 532 | HTYGGEIDVMPTLLHLEGIDSQKYINFGTDLFSKDHDDTVAFR-NGDFVTPKYTSVDNII | 590 |
| Query: | 600 | YYTDSGQEITNPDETTKAEIKAIRDATNKQLSTSDSIQTGDLLRFDENNGLKTVEVEKFN | 659 |
| | | Y T +G+++ +ET K ++ N+QLS SDS+ DLLRF + N K V+ ++ | |
| Sbjct: | 591 | YDTKTGEKLKANEET-----KNLKTRVNQQLSLSDSVLYKDLLRFHKLNDFKAVDPSDYH | 645 |
| Query: | 660 | YTHSLKALKAKERKLK | 675 |
| | | Y KE+++K | |
| Sbjct: | 646 | Y--------GKEKEIK | 653 |

[3581] A related DNA sequence was identified in S. pyogenes <SEQ ID 1901> which encodes the amino acid sequence <SEQ ID 1902>. Analysis of this protein sequence reveals the following:

| Possible site: 48 | | | |
|---|---|---|---|
| >>> Seems to have no N-terminal signal sequence | | | |
| INTEGRAL | Likelihood = −6.85 | Transmembrane | 90-106 (88-112) |
| INTEGRAL | Likelihood = −5.68 | Transmembrane | 146-162 (139-165) |
| INTEGRAL | Likelihood = −4.99 | Transmembrane | 63-79 (60-84) |
| INTEGRAL | Likelihood = −3.98 | Transmembrane | 178-194 (176-197) |
| INTEGRAL | Likelihood = −0.59 | Transmembrane | 31-47 (31-47) |

----- Final Results -----
bacterial membrane --- Certainty = 0.3739 (Affirmative) < succ>
bacterial outside --- Certainty = 0.0000 (Not Clear) < succ>
bacterial cytoplasm --- Certainty = 0.0000 (Not Clear) < succ>

[3582] An alignment of the GAS and GBS proteins is shown below:

| Identities = 533/713 (74%), Positives = 603/713 (83%) | | | |
|---|---|---|---|
| Query: | 1 | MKKIKDFASRAINTRLGFILLLVVIYWLKTIWAYHTDFNLGLENSYQLFLTIINPIPLGL | 60 |
| | | +KK K + INTRLGFI+ L+ YW+KT+WAYHTDF+L L N YQ+FLTIINPIPL | |
| Sbjct: | 16 | VKKFKTLITGFINTRLGFIITLLFCYWIKTLWAYHTDFSLDLGNIYQVFLTIINPIPLAF | 75 |
| Query: | 61 | LIIGLALYVKRTKAFYITAFITYAIVNILLIANAIYYREFSDFITVSAVLASSKTSAGLG | 120 |
| | | L++G+ALYVK T+AFYI +++ Y I+NILLI+N+IYYREFSDFITVSA+LASSK SAGLG | |
| Sbjct: | 76 | LLLGVALYVKNTRAFYICSWVVYIILNILLISNSIYYREFSDFITVSAMLASSKVSAGLG | 135 |
| Query: | 121 | DSALNLLRIWDLVYVFDFIILIFLFATKKIHLDDRPFNKRASFSITALSGLLFSINLFLA | 180 |
| | | DSALNLLRIWD++Y+ DFIILI L KKI D RPFNKRA+F+ITALS LL SINLFLA | |
| Sbjct: | 136 | DSALNLLRIWDIIYILDFIILISLSIAKKIKNDQRPFNKRAAFAITALSSLLLSINLFLA | 195 |
| Query: | 181 | EIDRPELLSRGFSNTYIVKALGLPSFSIYSGNQTYQAQKERNGATAQELATAKKYVAEHY | 240 |
| | | EIDRPELL+RGFSNTYIV+ALGLP+F++YSGNQTYQAQKERNGATA+EL K YV HY | |
| Sbjct: | 196 | EIDRPELLTRGFSNTYIVRALGLPAFTLYSGNQTYQAQKERNGATAEELIDVKTYVKGHY | 255 |
| Query: | 241 | AKPNPEYYGIGKGRNVIMIHLESFQQFLIDYKLNIDGKEHVVTPFINSLYHSKETVSFSN | 300 |
| | | A P+P+Y+GIGKG+N+I++HLESFQQFLIDYKL KE+ VTPFINSLYHS T++F N | |
| Sbjct: | 256 | AAPDPQYFGIGKGKNIIVLHLESFQQFLIDYKLKEGDKEYEVTPFINSLYHSNATLAFPN | 315 |
| Query: | 301 | FFHQVKAGKTSDAETLMENSLFGLSSGSFMVNYGGENTQFAAPHILAQNGGYSSAVFHGN | 360 |
| | | FFHQVKAGKTSDAET+MENSLFGL+SGSFMVNYGGENTQFA P ILAQ GGY+SAVFHGN | |
| Sbjct: | 316 | FFHQVKAGKTSDAETMMENSLFGLNSGSFMVNYGGENTQFATPSILAQKGGYTSAVFHGN | 375 |
| Query: | 361 | VGTFWNRNNAYKQWGYDYFFDSSYFSKQTKDNSFQYGLNDKYMFADSIKYLEHMQQPFYT | 420 |
| | | VGTFWNRNNAYKQWGY+YFFDSSYFSKQ NSFQYGLNDKYMF DSIKYLE MQQPFYT | |
| Sbjct: | 376 | VGTFWNRNNAYKQWGYNYFFDSSYFSKQNSKNSFQYGLNDKYMFKDSIKYLEQMQQPFYT | 435 |
| Query: | 421 | KFITVSNHYPYTSLKGESDEEGFPLAKTNDETINGYFATANYLDTALKSFFEYLKAAGVY | 480 |
| | | KFITVSNHYPYTSLKGES EEGFPLAKT+DETINGYFATANYLD ALKSFF+YLKA G+Y | |
| Sbjct: | 436 | KFITVSNHYPYTSLKGESSEEGFPLAKTDDETINGYFATANYLDAALKSFFDYLKATGLY | 495 |
| Query: | 481 | DNSIIVMYGDHYGISNTRNPSLAELLGKDPETWSEYDNAMLQRVPYMIHIPGYSKGFISN | 540 |
| | | DNSI V+YGDHYGISN+RN SLA LLGKD ETWSEYDNAMLQRVPYMIHIPGY+ G I | |
| Sbjct: | 496 | DNSIFVLYGDHYGISNSRNSSLAPLLGKDSETWSEYDNAMLQRVPYMIHIPGYTNGSIKE | 555 |
| Query: | 541 | TYGGEVDNLPTLLHILGIDTSKYTQLGQDLLSKDNKQMVAMRTTGQYITPKYTNYSGHLY | 600 |
| | | T+GGE+D LPTLLHILGIDTS++ QLGQDLLS N Q+VA RT+G Y+TP+YTNYSG LY | |
| Sbjct: | 556 | TFGGEIDALPTLLHILGIDTSQFVQLGQDLLSPQNSQIVAQRTSGTYMTPEYTNYSGRLY | 615 |
| Query: | 601 | YTDSGQEITNPDETTKAEIKAIRDATNKQLSTSDSIQTGDLLRFDENNGLKTVEVEKFNY | 660 |
| | | T +G EITNPDE T A+ K IR A +QL+ SD+IQTGDLLRFD NGLK ++ +F Y | |
| Sbjct: | 616 | NTQTGLEITNPDEMTIAKTKEIRSAVAQQLAASDAIQTGDLLRFDTQNGLKAIDPNQFIY | 675 |
| Query: | 661 | THSLKALKAKERKLKDRSTSIYSKHNNKSTVDLFHAPSYLELQDPNKTHKTSK | 713 |
| | | T LK LK KL STS+YSK+ +KST LF APSYLEL TS+ | |
| Sbjct: | 676 | TKQLKQLKDISAKLGSESTSLYSKNGHKSTQKLFKAPSYLELNPVEADAATSE | 728 |

[3583] A related GBS gene <SEQ ID 8619> and protein <SEQ ID 8620> were also identified. Analysis of this protein sequence reveals the following:

| Lipop Possible site: −1 Crend: 9 | | | |
|---|---|---|---|
| McG: Discrim Score: 12.63 | | | |
| GvH: Signal Score (−7.5): −2.99 | | | |
| Possible site: 30 | | | |
| >>> Seems to have an uncleavable N-term signal seq | | | |
| ALOM program | count: 5 | value: −6.85 | threshold: 0.0 |

| | | | |
|---|---|---|---|
| INTEGRAL | Likelihood = −6.85 | Transmembrane | 129-145 (126-152) |
| INTEGRAL | Likelihood = −4.88 | Transmembrane | 48-64 (46-69) |
| INTEGRAL | Likelihood = −4.83 | Transmembrane | 75-91 (74-97) |
| INTEGRAL | Likelihood = −4.62 | Transmembrane | 16-32 (15-34) |
| INTEGRAL | Likelihood = −2.28 | Transmembrane | 163-179 (163-182) |

| | | |
|---|---|---|
| PERIPHERAL | Likelihood = 3.76 | 103 |

modified ALOM score: 1.87
*** Reasoning Step: 3
----- Final Results -----
bacterial membrane --- Certainty = 0.3739 (Affirmative) < succ>
bacterial outside --- Certainty = 0.0000 (Not Clear) < succ>
bacterial cytoplasm --- Certainty = 0.0000 (Not Clear) < succ>

[3584] The protein has homology with the following sequences in the databases:

[chemical structure]

[3585] Based on this analysis, it was predicted that these proteins and their epitopes could be useful antigens for vaccines or diagnostics.

### EXAMPLE 613

[3586] A DNA sequence (GBSx0653) was identified in S. agalactiae <SEQ ID 1903> which encodes the amino acid sequence <SEQ ID 1904>. This protein is predicted to be 50S ribosomal protein L20 (rplT). Analysis of this protein sequence reveals the following:

Possible site: 37
>>> Seems to have no N-terminal signal sequence
----- Final Results -----
bacterial cytoplasm --- Certainty = 0.3392 (Affirmative) < succ>
bacterial membrane --- Certainty = 0.0000 (Not Clear) < succ>
bacterial outside --- Certainty = 0.0000 (Not Clear) < succ>

[3587] A related GBS nucleic acid sequence <SEQ ID 9387> which encodes amino acid sequence <SEQ ID 9388> was also identified.

[3588] The protein has homology with the following sequences in the GENPEPT database:

| >GP: CAB14845 GB: Z99118 ribosomal protein L20 [Bacillus subtilis] | | | |
|---|---|---|---|
| Identities = 70/89 (78%), Positives = 78/89 (86%) | | | |
| Query: | 1 | MFRTAKEQVMNSYYYAYRDRRQKKRDFRKLWITRINAAARMNGLSYSQLMHGLKLAEIEV | 60 |
| | | +++ A +QVM S YA+RDRRQKKRDFRKLWITRINAAARMNGLSYS+LMHGLKL+ IEV | |
| Sbjct: | 31 | LYKVANQQVMKSGNYAFRDRRQKKRDFRKLWITRINAAARMNGLSYSRLMHGLKLSGIEV | 90 |
| Query: | 61 | NRKMLADLAVNDAAAFTALADAAKAKLGK | 89 |
| | | NRKMLADLAVND AF LADAAKA+L K | |
| Sbjct: | 91 | NRKMLADLAVNDLTAFNQLADAAKAQLNK | 119 |

[3589] A related DNA sequence was identified in S. pyogenes <SEQ ID 1905> which encodes the amino acid sequence <SEQ ID 1906>. Analysis of this protein sequence reveals the following:

| Possible site: 27 | | | |
|---|---|---|---|
| >>> Seems to have no N-terminal signal sequence | | | |
| INTEGRAL | Likelihood = −0.06 | Transmembrane | 94-110 (94-110) |

----- Final Results -----
bacterial membrane --- Certainty = 0.1022 (Affirmative) < succ>
bacterial outside --- Certainty = 0.0000 (Not Clear) < succ>
bacterial cytoplasm --- Certainty = 0.0000 (Not Clear) < succ>

[3590] An alignment of the GAS and GBS proteins is shown below:

| Identities = 87/89 (97%), Positives = 88/89 (98%) | | | |
|---|---|---|---|
| Query: | 1 | MFRTAKEQVMNSYYYAYRDRRQKKRDFRKLWITRINAAARMNGLSYSQLMHGLKLAEIEV | 60 |
| | | +FRTAKEQVMNSYYYAYRDRRQKKRDFRKLWITRINAAARMNGLSYSQLMHGLKLAEIEV | |
| Sbjct: | 31 | LFRTAKEQVMNSYYYAYRDRRQKKRDFRKLWITRINAAARMNGLSYSQLMHGLKLAEIEV | 90 |
| Query: | 61 | NRKMLADLAVNDAAAFTALADAAKAKLGK | 89 |
| | | NRKMLADLAV DAAAFTALADAAKAKLGK | |
| Sbjct: | 91 | NRKMLADLAVADAAAFTALADAAKAKLGK | 119 |

[3591] Based on this analysis, it was predicted that these proteins and their epitopes could be useful antigens for vaccines or diagnostics.

### EXAMPLE 614

[3592] A DNA sequence (GBSx0654) was identified in S. agalactiae <SEQ ID 1907> which encodes the amino acid sequence <SEQ ID 1908>. Analysis of this protein sequence reveals the following:

| Possible site: 21 | | | |
|---|---|---|---|
| >>> Seems to have an uncleavable N-term signal seq | | | |
| INTEGRAL | Likelihood = −0.64 | Transmembrane | 32-48 (32-48) |
| INTEGRAL | Likelihood = −0.32 | Transmembrane | 3-19 (3-19) |

----- Final Results -----
bacterial membrane --- Certainty = 0.1256 (Affirmative) < succ>
bacterial outside --- Certainty = 0.0000 (Not Clear) < succ>
bacterial cytoplasm --- Certainty = 0.0000 (Not Clear) < succ>

[3593] The protein has no significant homology with any sequences in the GENPEPT database.

[3594] No corresponding DNA sequence was identified in S. pyogenes.

[3595] Based on this analysis, it was predicted that this protein and its epitopes, could be useful antigens for vaccines or diagnostics.

### EXAMPLE 615

[3596] A DNA sequence (GBSx0655) was identified in S. agalactiae <SEQ ID 1909> which encodes the amino acid sequence <SEQ ID 1910>. Analysis of this protein sequence reveals the following:

| Possible site: 33 | | | |
|---|---|---|---|
| >>> Seems to have a cleavable N-term signal seq. | | | |
| INTEGRAL | Likelihood = −12.63 | Transmembrane | 747-763 (743-772) |
| INTEGRAL | Likelihood = −12.52 | Transmembrane | 840-856 (835-856) |
| INTEGRAL | Likelihood = −11.20 | Transmembrane | 447-463 (440-466) |
| INTEGRAL | Likelihood = −5.79 | Transmembrane | 351-367 (346-372) |
| INTEGRAL | Likelihood = −4.25 | Transmembrane | 517-533 (516-537) |
| INTEGRAL | Likelihood = −1.49 | Transmembrane | 397-413 (396-413) |
| INTEGRAL | Likelihood = −0.96 | Transmembrane | 799-815 (799-817) |

----- Final Results -----
bacterial membrane --- Certainty = 0.6052 (Affirmative) < succ>
bacterial outside --- Certainty = 0.0000 (Not Clear) < succ>
bacterial cytoplasm --- Certainty = 0.0000 (Not Clear) < succ>

[3597] A related GBS nucleic acid sequence <SEQ ID 9349> which encodes amino acid sequence <SEQ ID 9350> was also identified.

[3598] The protein has homology with the following sequences in the GENPEPT database:

| >GP: AAB89436 GB: AE000977 A. fulgidus predicted coding region AF1820 | | | |
|---|---|---|---|
| [Archaeoglobus fulgidus] | | | |
| Identities = 100/483 (20%), Positives = 210/483 (42%), | | | |
| Gaps = 61/483 (12%) | | | |
| Query: | 351 | LFPIILYLVAALVTLTTMTRFVEEERTNAGILKALGYSDRQVIFKFIIYGFIAGTLGTTL | 410 |
| | | LFP LV+ +T ++R + N +++ALG++ +++ ++ Y + G +T | |
| Sbjct: | 276 | LFPAFFILVSIFMTYALLSRIFRLQLGNIAVMRALGFTRNEIMLHYLQYPLLMGFFASTA | 335 |
| Query: | 411 | GIIGGHYLLPRIISDIISKDLTIPNTQYHLFLNYSLLAFVFSLLSIVLPVFVI------- | 463 |
| | | G++ G + + S I+ L +P L L+ + L+ + F++ | |
| Sbjct: | 336 | GLVAGFFASQLLTSQYIT-FLNLPYYVSKPHLEVYSLSLMAGTLTPTISGFLVAYQASRV | 394 |
| Query: | 464 | ----TRRELKEKAAFLLLPKPPAKGSKIALEYINWIWKKLSFTQKVTARNIFRYKQRMIM | 519 |
| | | R E AA + + A S+I W ++ ++ RNIFR K+R + | |
| Sbjct: | 395 | DIVKALRGYAEVAAVSFIARIDALFSRI------W---RMRLIFRLALRNIFRSKRRTAI | 445 |
| Query: | 520 | TIFGVAGSVALLFSGLGIQSSLKQTVNEHFGRIMPYDILLTYNTNASPPKILELLSKDSK | 579 |
| | | +IF + +L+ + + S + FG++ YDI ++ E+L K K | |
| Sbjct: | 446 | SIFSIVACTSLILNSMVFVDSFDYVMQLQFGKVYAYDIKVSLEGYDGK----EVLEKVRK | 501 |
| Query: | 580 | IDKY--------QPIHLENLDESIPGQINKQSISLFITDKKQLLPFIYLQEATTNKSLHL | 631 |
| | | +D PI++E E++P +L I Q L +Y E + | |
| Sbjct: | 502 | MDGVLFAEPAVEMPIYVEKGGEAVP--------TLLIASNFQTLYNVYNAEG----EKLI | 549 |
| Query: | 632 | NNKGIIISKKLAQFYHVNTGDFIHL------SHSQTLPSRKLKITGVVNANVGHYIFMTK | 685 |
| | | ++GII SK + + G+ + + ++ + + V A++ | |
| Sbjct: | 550 | PSEGIIFSKTAMKNLSLVEGEKVSVYTEFGKLEAEVEDVEMIPLLSVATASL-------- | 601 |
| Query: | 686 | QYYRTIFKKEAKDNAFLVKLTKHKIANNLAEKLLEINGVESLTQNALQLASVEAVVRSLD | 745 |
| | | Y+ I + N +V + +IA +AEK+ +++GV+ ++ S+E ++ | |
| Sbjct: | 602 | DYFSRISGVDG-FNRIVVDADEGRIA-EIAEKIRQMDGVKKVSTVIEAQESIEELMGFFY | 659 |
| Query: | 746 | GSMTILVVVSLLLAIVILYNLTNINLAERKRELSTIKVLGFYNEEVTLYIYRETIILSTI | 805 |
| | | + + + L ++N T+I++ ER REL+T+++LG+ + E+ + + E + ++ + | |
| Sbjct: | 660 | AFIAFSLFFGVSLGFAAVFNTTSISVIERSRELATLRMLGYTSREIIISLILENLFVAIL | 719 |
| Query: | 806 | GVI | 808 |
| | | G++ | |
| Sbjct: | 720 | GLV | 722 |

[3599] A related DNA sequence was identified in S. pyogenes <SEQ ID 1911> which encodes the amino acid sequence <SEQ ID 1912>. Analysis of this protein sequence reveals the following:

| Possible site: 34 | | | | |
|---|---|---|---|---|
| >>> Seems to have no N-terminal signal sequence | | | | |
| | INTEGRAL | Likelihood = −14.33 | Transmembrane | 749-765 (739-775) |
| | INTEGRAL | Likelihood = −10.88 | Transmembrane | 845-861 (834-865) |
| | INTEGRAL | Likelihood = −6.64 | Transmembrane | 350-366 (344-369) |
| | INTEGRAL | Likelihood = −6.53 | Transmembrane | 22-38 (19-42) |
| | INTEGRAL | Likelihood = −6.32 | Transmembrane | 520-536 (515-537) |
| | INTEGRAL | Likelihood = −4.99 | Transmembrane | 446-462 (445-465) |
| | INTEGRAL | Likelihood = −2.92 | Transmembrane | 396-412 (395-413) |
| | INTEGRAL | Likelihood = −0.80 | Transmembrane | 800-816 (800-819) |

```
----- Final Results -----
                              bacterial membrane --- Certainty = 0.6731(Affirmative) < succ>
                                bacterial outside --- Certainty = 0.0000(Not Clear) < succ>
                            bacterial cytoplasm --- Certainty = 0.0000(Not Clear) < succ>
```

[3600] The protein has homology with the following sequences in the databases:

| >GP: AAB89436 GB: AE000977 A. fulgidus predicted coding region AF1820 | | | |
|---|---|---|---|
| [Archaeoglobus fulgidus] | | | |
| Identities = 101/542 (18%), Positives = 237/542 (43%), | | | |
| Gaps = 42/542 (7%) | | | |
| Query: | 350 | IFPVVLYLVAALVAFTTMTRYVDEERTSSGLLKAIGYSNKDISLKFLIYGLLASFLGTTL | 409 |
| | | +FP LV+ + + ++R + + +++A+G++ +I L +L Y LL F +T | |
| Sbjct: | 276 | LFPAFFILVSIFMTYALLSRIFRLQLGNIAVMRALGFTRNEIMLHYLQYPLLMGFFASTA | 335 |
| Query: | 410 | GIIGGTYLLSTLISEILTGA---LTIGKTHLYSYWFYNGIAYLLAMLSAVLPAYLIVKKE | 466 |
| | | G++ G + L S+ +T + K HL Y L +S L AY + + | |
| Sbjct: | 336 | GLVAGFFASQLLTSQYITFLNLPYYVSKPHLEVYSLSLMAGTLTPTISGFLVAYQASRVD | 395 |
| Query: | 467 | LFLN-------AAQLLLPKPPSKGAKIWLEHLTFVWKALSFTHKVTIRNIFRYKQRMLMT | 519 |
| | | + AA + + + ++IW L F ++ +RNIFR K+R ++ | |
| Sbjct: | 396 | IVKALRGYAEVAAVSFIARIDALFSRIWRMRLIF---------RLALRNIFRSKRRTAIS | 446 |
| Query: | 520 | IVGVAGSVALLFAGLGIQSSLAKVVEHQFGDLTTYDILAVGSAKATATEQTDLASYLKQE | 579 |
| | | I + +L+ + S V++ QFG + YDI + L Y +E | |
| Sbjct: | 447 | IFSIVACTSLILNSMVFVDSFDYVMQLQFGKVYAYDI------------KVSLEGYDGKE | 494 |
| Query: | 580 | PITGYQKVSYASLTLPVKGLP---DKQSISILSSS-ATSLSPYFNLLDSQEQKKVPIPTS | 635 |
| | | + +K+ P +P +K ++ + A++ +N+ +++ +K IP+ | |
| Sbjct: | 495 | VLEKVRKMDGVLFAEPAVEMPIYVEKGGEAVPTLLIASNFQTLYNVYNAEGEKL--IPSE | 552 |
| Query: | 636 | GVLISEKLASYYKVKPGDQLVLTDRKGQSYKVTIKQVIDMTVGHYLIMSDTYFKNHFKGL | 695 |
| | | G++ S+ + G+++ + G+ ++ ++ L+ T ++F + | |
| Sbjct: | 553 | GIIFSKTAMKNLSLVEGEKVSVYTEFGK-----LEAEVEDVEMIPLLSVATASLDYFSRI | 607 |
| Query: | 696 | EAAPAYLIKVKDKDSKHIKETASDLLTLKAIRAVSQNVNHIKSVQLVVTSLNQVMTLLVF | 755 |
| | | + V D D I E A + + ++ VS + +S++ ++ + +F | |
| Sbjct: | 608 | SGVDGFNRIVVDADEGRIAEIAEKIRQMDGVKKVSTVIEAQESIEELMGFFYAFIAFSLF | 667 |
| Query: | 756 | LSILLAIVILYNLTTINIAERIRELSTIKVLGFYDQEVTLYIYRETISLSLVGILLGIYL | 815 |
| | | + L ++N T+I++ ER REL+T+++LG+ +E+ + + E + ++++G++ + + | |
| Sbjct: | 668 | FGVSLGFAAVFNTTSISVIERSRELATLRMLGYTSREIIISLILENLFVAILGLVFALPI | 727 |
| Query: | 816 | GKGLHTYIMTMISTGDIQFGVKVDAYVYLVPILVILSLLAVLGIWVNRHLKKVDMLEALK | 875 |
| | | + + + + + + +L + +++ + + R + ++D+ + K | |
| Sbjct: | 728 | AYSTAYFFFSSFESELYYMPMVIYPRTFAATVLAVFAIILLALLPSARRVSEMDIAKVTK | 787 |
| Query: | 876 | SI | 877 |
| | | I | |
| Sbjct: | 788 | EI | 789 |

[3601] An alignment of the GAS and GBS proteins is shown below:

| Identities = 377/857 (43%), Positives = 543/857 (62%), Gaps = 7/857 (0%) | | | |
|---|---|---|---|
| Query: | 3 | KTFWKDIYRSITTSKGRFSSILLLMMLGSFAFIGLKVSAPNMQRTAQNYLAHHHVMDITV | 62 |
| | | KT WKDI R+I SKGRF S+ LM LGSFA +GLKV+ P+M+RTA YL H VMD+TV | |
| Sbjct: | 4 | KTLWKDILRAIKNSKGRFISLFFLMALGSFALVGLKVTGPDMERTASRYLERHQVMDLTV | 63 |
| Query: | 63 | FNSWGLDKHDQTVLESLKGSQVEFSYFVDTTPQQNSKSYRLYSNTKTISTFDLVKGRLPL | 122 |
| | | S + D+ L++LKG+ +E+ + +D + N KS RLYS K +S LVKG P | |
| Sbjct: | 64 | LASHQFSQADKQELDTLKGAHLEYGHLLDVSLTSNQKSLRLYSVPKKVSKPVLVKGSWPK | 123 |
| Query: | 123 | NKSEIALSFQERKKYAIGDKINFKQDKNKLFSNTGPLTIVGFVNSTEIWSKTNLGSSQTG | 182 |
| | | ++++ LS K Y IGD++ L + T +VGF NS+E+WSK+NLGSS TG | |
| Sbjct: | 124 | RETDLVLSSSLAKNYQIGDELAVTSPMEGLLTTTH-FQVVGFANSSEVWSKSNLGSSSTG | 182 |
| Query: | 183 | DGDLDSYGVLDKTAFHSPVYTMARVTFKDLRLINPFSISYKEKVAKYQEKVSRKLNIHNK | 242 |
| | | DG L +Y ++ F S + + R+ F LRL N FS Y+++V + Q + L + + | |
| Sbjct: | 183 | DGSLYAYAFVNPNVFKS-AFNLLRIRFSHLRLTNAFSKDYQKRVTQNQAHLDNLLKDNGQ | 241 |
| Query: | 243 | IRYTKTKKESLRKIDEEEKSLLKAQKQINRLDNDSLAMPLSQRQAIQMKIKQDRLSLLKR | 302 |
| | | RY + + + +L K ++ + + + S Q + +I+Q + +L K | |
| Sbjct: | 242 | KRYDDLQNQYDLALKNGRAALAKETVKLAASEENLTFLEGSALQEAKHQIEQGKQALAKE | 301 |
| Query: | 303 | TKELLKLRHNTQIMESPQIIVYNRTTFPGGQGYNTFDSSTNSTSKISNLFPIILYLVAAL | 362 |
| | | K+L +++ +E P + YNR+T PGG+GY+T+ +ST S S + N+FP++LYLVAAL | |
| Sbjct: | 302 | EKQLEQVQATKDKLEKPSYLTYNRSTLPGGEGYHTYATSTTSISNVGNIFPVVLYLVAAL | 361 |
| Query: | 363 | VTLTTMTRFVEEERTNAGILKALGYSDRQVIFKFIIYGFIAGTLGTTLGIIGGHYLLPRI | 422 |
| | | V TTMTR+V+EERT++G+LKA+GYS++ + KF+IYG +A LGTTLGIIGG YLL + | |
| Sbjct: | 362 | VAFTTMTRYVDEERTSSGLLKAIGYSNKDISLKFLIYGLLASFLGTTLGIIGGTYLLSTL | 421 |
| Query: | 423 | ISDIISKDLTIPNTQYHLFLNYSLLAFVFSLLSIVLPVFVITRRELKEKAAFLLLPKPPA | 482 |
| | | IS+I++ LTI T + + Y+ +A++ ++LS VLP ++I ++EL AA LLLPKPP+ | |
| Sbjct: | 422 | ISEILTGALTIGKTHLYSYWFYNGIAYLLAMLSAVLPAYLIVKKELFLNAAQLLLPKPPS | 481 |
| Query: | 483 | KGSKIALEYINWIWKKLSFTQKVTARNIFRYKQRMIMTIFGVAGSVALLFSGLGIQSSLK | 542 |
| | | KG+KI LE++ ++WK LSFT KVT RNIFRYKQRM+MTI GVAGSVALLF+GLGIQSSL | |
| Sbjct: | 482 | KGAKIWLEHLTFVWKALSFTHKVTIRNIFRYKQRMLMTIVGVAGSVALLFAGLGIQSSLA | 541 |
| Query: | 543 | QTVNEHFGRIMPYDILLTYNTNASPPKILELLS--KDSKIDKYQPIHLENLDESIPGQIN | 600 |
| | | + V FG + YDIL + A+ + +L S K I YQ + +L + G + | |
| Sbjct: | 542 | KVVEHQFGDLTTYDILAVGSAKATATEQTDLASYLKQEPITGYQKVSYASLTLPVKGLPD | 601 |
| Query: | 601 | KQSISLFITDKKQLLPFIYLQEATTNKSLHLNNKGIIISKKLAQFYHVNTGDFIHLSHSQ | 660 |
| | | KQSIS+ + L P+ L ++ K + + G++IS+KLA +Y V GD + L+ + | |
| Sbjct: | 602 | KQSISILSSSATSLSPYFNLLDSQEQKKVPIPTSGVLISEKLASYYKVKPGDQLVLTDRK | 661 |
| Query: | 661 | TLPSRKLKITGVVNANVGHYIFMTKQYYRTIFKKEAKDNAFLVKL--TKHKIANNLAEKL | 718 |
| | | S K+ I V++ VGHY+ M+ Y++ FK A+L+K+ K A L | |
| Sbjct: | 662 | G-QSYKVTIKQVIDMTVGHYLIMSDTYFKNHFKGLEAAPAYLIKVKDKDSKHIKETASDL | 720 |
| Query: | 719 | LEINGVESLTQNALQLASVEAVVRSLDGSMTILVVVSLLLAIVILYNLTNINLAERKREL | 778 |
| | | L + + +++QN + SV+ VV SL+ MT+LV +S+LLAIVILYNLT IN+AER REL | |
| Sbjct: | 721 | LTLKAIRAVSQNVNHIKSVQLVVTSLNQVMTLLVFLSILLAIVILYNLTTINIAERIREL | 780 |
| Query: | 779 | STIKVLGFYNEEVTLYIYRETIILSTIGVILGTISGTYLHRQMMLLIGSDQILFGEKVSP | 838 |
| | | STIKVLGFY++EVTLYIYRETI LS +G++LG G LH +M +I + I FG KV | |
| Sbjct: | 781 | STIKVLGFYDQEVTLYIYRETISLSLVGILLGIYLGKGLHTYIMTMISTGDIQFGVKVDA | 840 |
| Query: | 839 | TTFIIPISVVVIILXXL | 855 |
| | | +++PI V++ +L L | |
| Sbjct: | 841 | YVYLVPILVILSLLAVL | 857 |

[3602] Based on this analysis, it was predicted that these proteins and their epitopes could be useful antigens for vaccines or diagnostics.

### EXAMPLE 616

[3603] A DNA sequence (GBSx0656) was identified in S. agalactiae <SEQ ID 1913> which encodes the amino acid sequence <SEQ ID 1914>. This protein is predicted to be ABC transporter, ATP-binding protein. Analysis of this protein sequence reveals the following:

Possible site: 60
>>> Seems to have no N-terminal signal sequence
----- Final Results -----
bacterial cytoplasm --- Certainty = 0.2757 (Affirmative) < succ>
bacterial membrane --- Certainty = 0.0000 (Not Clear) < succ>
bacterial outside --- Certainty = 0.0000 (Not Clear) < succ>

[3604] The protein has homology with the following sequences in the GENPEPT database:

| >GP: AAB89431 GB: AE000977 ABC transporter, ATP-binding protein | | | |
|---|---|---|---|
| [Archaeoglobus fulgidus] | | | |
| Identities = 112/230 (48%), Positives = 167/230 (71%) | | | |
| Query: | 4 | IEMKHSYKRYQTGETEIVANNDISFSIERGELVVILGASGAGKSTVLNILGGMDSNSEGE | 63 |
| | | + ++ +K YQ G+ E+ A I+ IERGE +V+LG SG GK+T+LNI+GG+D + G | |
| Sbjct: | 2 | LRLEDVWKVYQMGKVEVSALRGINLEIERGEFMVVLGPSGCGKTTMLNIIGGIDRPTRGR | 61 |
| Query: | 64 | VLIDGKNIANYTIRELTRYRRYDVGFVFQFYNLVPNLTALENVELASEIVPKALDAQQAL | 123 |
| | | V+ DGK+I NY LT +RR +VGF +FQF+NL+P LTA ENVE+A+++V D + L | |
| Sbjct: | 62 | VIFDGKDITNYNEDRLTMHRRNNVGFIFQFFNLIPTLTARENVEIAADLVESPRDVDEVL | 121 |
| Query: | 124 | ENVGLGHRINHFPAQLSGGEQQRVAIARAIAKKPKLLLCDEPTGALDYQTGKQVLAILQK | 183 |
| | | + VGL R HFPA+LSGGEQQRVAIARA+ K P ++L DEPTG+LD++TGK VL ++++ | |
| Sbjct: | 122 | KMVGLADRAEHFPAELSGGEQQRVAIARALVKNPPIILADEPTGSLDFETGKAVLKVMRE | 181 |
| Query: | 184 | MAQSKETTVIIVTHNTALAPIANRVIHMHDSKISDIVINENPSDIQNIEY | 233 |
| | | + + + T ++VTHN+A+A IA+RV+++ D K+ + N +P+D I++ | |
| Sbjct: | 182 | INRKEGITFVLVTHNSAIAAIADRVVYLRDGKVERVERNLHPADPDEIQW | 231 |

[3605] There is also homology to SEQ ID 1354.

[3606] Based on this analysis, it was predicted that this protein and its epitopes, could be useful antigens for vaccines or diagnostics.

### EXAMPLE 617

[3607] A DNA sequence (GBSx0657) was identified in S. agalactiae <SEQ ID 1915> which encodes the amino acid sequence <SEQ ID 1916>. This protein is predicted to be DNA topoisomerase I (topA). Analysis of this protein sequence reveals the following:

Possible site: 34
>>> Seems to have no N-terminal signal sequence
----- Final Results -----
bacterial cytoplasm --- Certainty = 0.4716 (Affirmative) < succ>
bacterial membrane --- Certainty = 0.0000 (Not Clear) < succ>
bacterial outside --- Certainty = 0.0000 (Not Clear) < succ>

[3608] A related GBS nucleic acid sequence <SEQ ID 9821> which encodes amino acid sequence <SEQ ID 9822> was also identified.

[3609] The protein has homology with the following sequences in the GENPEPT database:

| >GP: CAB13485 GB: Z99112 DNA topoisomerase I [Bacillus subtilis] | | | |
|---|---|---|---|
| Identities = 442/690 (64%), Positives = 535/690 (77%), Gaps = 10/690 (1%) | | | |
| Query: | 27 | LVIVESPAKAKTIEKYLGRNYKVVASVGHIRDLKKSSMSIDFENNYEPQYINIRGKGPLI | 86 |
| | | LVIVESPAKAKTIE+YLG+ YKV AS+GH+RDL KS M +D E N+EP+YI IRGKGP++ | |
| Sbjct: | 5 | LVIVESPAKAKTIERYLGKKYKVKASMGHVRDLPKSQMGVDIEQNFEPKYITIRGKGPVL | 64 |
| Query: | 87 | NDLKKEAKKAKKVYLASDPDREGEAISWHLAHILDLDKEDRNRVVFNEITKDAVKNAFVE | 146 |
| | | +LK AKKAKKVYLA+DPDREGEAI+WHLAH LDLD RVVFNEITKDA+K +F | |
| Sbjct: | 65 | KELKTAAKKAKKVYLAADPDREGEAIAWHLAHSLDLDLNSDCRVVFNEITKDAIKESFKH | 124 |
| Query: | 147 | PRQINMDLVDAQQARRVLDRIVGYSISPILWKKVKKGLSAGRVQSVALKLIIDRENEIKA | 206 |
| | | PR INMDLVDAQQARR+LDR+VGY ISPILWKKVKKGLSAGRVQSVAL+LIIDRE EI | |
| Sbjct: | 125 | PRMINMDLVDAQQARRILDRLVGYKISPILWKKVKKGLSAGRVQSVALRLIIDREKEIND | 184 |
| Query: | 207 | FQPEEYWTIDGSFKKGTRKFNATFYGLDGKKFKLSNNEDVKTVLKRIKTDEFLVEKVEKK | 266 |
| | | F+PEEYWTIDG+F KG F A+F+G +GKK L++ DVK +L ++K +++ VEKV KK | |
| Sbjct: | 185 | FKPEEYWTIDGTFLKGQETFEASFFGKNGKKLPLNSEADVKEILSQLKGNQYTVEKVTKK | 244 |
| Query: | 267 | ERRRNAPLPYTTSSLQQDAANKINFRTRKTMMIAQQLYEGLSLGTAGHQGLITYMRTDST | 326 |
| | | ER+RN LP+TTS+LQQ+AA K+NFR +KTMMIAQQLYEG+ LG G GLITYMRTDST | |
| Sbjct: | 245 | ERKRNPALPFTTSTLQQEAARKLNFRAKKTMMIAQQLYEGIDLGREGTVGLITYMRTDST | 304 |
| Query: | 327 | RISPLAQNEATEFITNRFGANYSKHGNK-VKNASGAQDAHEAIRPSSVNHTPESIAKYLD | 385 |
| | | RIS A +EA FI +G + K K AQDAHEAIRP+SV P + L | |
| Sbjct: | 305 | RISNTAVDEAAAFIDQTYGKEFLGGKRKPAKKNENAQDAHEAIRPTSVLRKPSELKAVLG | 364 |
| Query: | 386 | KDQLKLYTLIWNRFIASQMTAAVFDTMKVNLTQNGVTFIANGSQVKFDGYMAVYND---- | 441 |
| | | +DQ++LY LIW RF+ASQM AV DTM V+LT NG+TF ANGS+VKF G+M VY + | |
| Sbjct: | 365 | RDQMRLYKLIWERFVASQMAPAVLDTMSVDLTNNGLTFRANGSKVKFSGFMKVYVEGKDD | 424 |
| Query: | 442 | --TDKNKMLPDMEEGESVKKVNTNPEQHFTQPPARFSEASLIKTLEENGVGRPSTYAPTL | 499 |
| | | +K++MLPD++EG++V + PEQHFTQPP R++EA L+KTLEE G+GRPSTYAPTL | |
| Sbjct: | 425 | QMEEKDRMLPDLQEGDTVLSKDIEPEQHFTQPPPRYTEARLVKTLEERGIGRPSTYAPTL | 484 |
| Query: | 500 | ETIQKRYYVKLAAKRFEPTELGEIVNSLIVEFFPDIVDVTFTAEMEGKLDEVEIGKEQWQ | 559 |
| | | +TIQ+R YV L KRF PTELG+IV LI+EFFP+I++V FTA+ME LD VE G +W | |
| Sbjct: | 485 | DTIQRRGYVALDNKRFVPTELGQIVLDLIMEFFPEIINVEFTAKMERDLDHVEEGNTEWV | 544 |
| Query: | 560 | KIIDEFYKPFEKELAKAETEMEKIQIKDEPAGFDCELCGSPMVIKLGRYGKFYACSNFPE | 619 |
| | | KIID FY FEK + KAE+EM++++I+ E AG DCELC SPMV K+GRYGKF ACSNFP+ | |
| Sbjct: | 545 | KIIDNFYTDFEKRVKKAESEMKEVEIEPEYAGEDCELCSSPMVYKMGRYGKFLACSNFPD | 604 |
| Query: | 620 | CHNTKAITKEIGVICPICQKGQVIERKTKRNRIFYGCDRYPECEFTSWDKPIGRTCPKSN | 679 |
| | | C NTK I K+IGV CP C +G ++ERK+K+ R+FYGCDRYP+CEF SWDKPI R CPK | |
| Sbjct: | 605 | CRNTKPIVKQIGVKCPSCGEGNIVERKSKKKRVFYGCDRYPDCEFVSWDKPIERKCPKCG | 664 |
| Query: | 680 | DFLVEKKVRGGGKQVVCSNEKCDYQEEKIK | 709 |
| | | LVEKK++ G QV C +CDY+EE K | |
| Sbjct: | 665 | KMLVEKKLK-KGIQVQC--VECDYKEEPQK | 691 |

[3610] A related DNA sequence was identified in S. pyogenes <SEQ ID 1917> which encodes the amino acid sequence <SEQ ID 1918>. Analysis of this protein sequence reveals the following:

Possible site: 35
>>> Seems to have no N-terminal signal sequence
----- Final Results -----
bacterial cytoplasm --- Certainty = 0.5445 (Affirmative) < succ>
bacterial membrane --- Certainty = 0.0000 (Not Clear) < succ>
bacterial outside --- Certainty = 0.0000 (Not Clear) < succ>

[3611] An alignment of the GAS and GBS proteins is shown below:

| Identities = 595/704 (84%), Positives = 656/704 (92%), Gaps = 1/704 (0%) | | | |
|---|---|---|---|
| Query: | 6 | TTTKTSTKKTSKKKSATAKKNLVIVESPAKAKTIEKYLGRNYKVVASVGHIRDLKKSSMS | 65 |
| | | T KT TKK++ KK +TAKKNLVIVESPAKAKTIEKYLGR+YKVVASVGHIRDLKKSSMS | |
| Sbjct: | 7 | TKPKTGTKKSTTKKKSTAKKNLVIVESPAKAKTIEKYLGRSYKVVASVGHIRDLKKSSMS | 66 |
| Query: | 66 | IDFENNYEPQYINIRGKGPLINDLKKEAKKAKKVYLASDPDREGEAISWHLAHILDLDKE | 125 |
| | | IDF+NNYEPQYINIRGKGPLIN LKKEAK AKKVYLASDPDREGEAISWHL+HIL LD + | |
| Sbjct: | 67 | IDFDNNYEPQYINIRGKGPLINSLKKEAKAAKKVYLASDPDREGEAISWHLSHILGLDPQ | 126 |
| Query: | 126 | DRNRVVFNEITKDAVKNAFVEPRQINMDLVDAQQARRVLDRIVGYSISPILWKKVKKGLS | 185 |
| | | D NRVVFNEITKDAVK+AFVEPRQI+MDLVD+QQARRVLDRIVGYSISPILWKKVKKGLS | |
| Sbjct: | 127 | DNNRVVFNEITKDAVKHAFVEPRQIDMDLVDSQQARRVLDRIVGYSISPILWKKVKKGLS | 186 |
| Query: | 186 | AGRVQSVALKLIIDRENEIKAFQPEEYWTIDGSFKKGTRKFNATFYGLDGKKFKLSNNED | 245 |
| | | AGRVQSVALKLIIDREN+IKAF P+EYW+IDG FKKGT+KF ATFYG++GKK KL NN D | |
| Sbjct: | 187 | AGRVQSVALKLIIDRENDIKAFVPKEYWSIDGLFKKGTKKFQATFYGINGKKTKLDNNND | 246 |
| Query: | 246 | VKTVLKRIKTDEFLVEKVEKKERRRNAPLPYTTSSLQQDAANKINFRTRKTMMIAQQLYE | 305 |
| | | VK VL ++ ++FLV KV+KKERRRNAPLPYTTSSLQQDAANKINFRTRKTMM+AQQLYE | |
| Sbjct: | 247 | VKEVLAKLTNEDFLVSKVDKKERRRNAPLPYTTSSLQQDAANKINFRTRKTMMVAQQLYE | 306 |
| Query: | 306 | GLSLGTAGHQGLITYMRTDSTRISPLAQNEATEFITNRFGANYSKHGNKVKNASGAQDAH | 365 |
| | | G+ LG G QGLITYMRTDSTRISP+AQN+A +FI NRFGANYSKHGN+VKN SG QDAH | |
| Sbjct: | 307 | GIHLGENGTQGLITYMRTDSTRISPVAQNDAAQFIINRFGANYSKHGNRVKNTSGVQDAH | 366 |
| Query: | 366 | EAIRPSSVNHTPESIAKYLDKDQLKLYTLIWNRFIASQMTAAVFDTMKVNLTQNGVTFIA | 425 |
| | | EAIRPSSVNHTP+SIAKYL+KDQLKLYTLIWNRF+ASQMTAAVFDT+KVNL QNGV F+A | |
| Sbjct: | 367 | EAIRPSSVNHTPDSIAKYLNKDQLKLYTLIWNRFVASQMTAAVFDTVKVNLEQNGVIFVA | 426 |
| Query: | 426 | NGSQVKFDGYMAVYNDTDKNKMLPDMEEGESVKKVNTNPEQHFTQPPARFSEASLIKTLE | 485 |
| | | NGSQ+KFDGYMAVYND+DKNKMLP+M EGE+VKK++T+PEQHFTQPPAR+SEA+LIKTLS | |
| Sbjct: | 427 | NGSQMKFDGYMAVYNDSDKNKMLPEMAEGETVKKISTSPEQHFTQPPARYSEATLIKTLE | 486 |
| Query: | 486 | ENGVGRPSTYAPTLETIQKRYYVKLAAKRFEPTELGEIVNSLIVEFFPDIVDVTFTAEME | 545 |
| | | ENGVGRPSTYAPTLE IQ+RYYVKL+AKRFEPTELGEIVN LIVEFFPDIVDV FTAEME | |
| Sbjct: | 487 | ENGVGRPSTYAPTLEVIQRRYYVKLSAKRFEPTELGEIVNKLIVEFFPDIVDVAFTAEME | 546 |
| Query: | 546 | GKLDEVEIGKEQWQKIIDEFYKPFEKELAKAETEMEKIQIKDEPAGFDCELCGSPMVIKL | 605 |
| | | GKLD+VEIG+EQWQ +ID+FY+PF KEL KAE+E+EKIQIKDEPAGFDC++CG PMVIKL | |
| Sbjct: | 547 | GKLDQVEIGEEQWQHVIDQFYQPFVKELNKAESEIEKIQIKDEPAGFDCDVCGHPMVIKL | 606 |
| Query: | 606 | GRYGKFYACSNFPECHNTKAITKEIGVICPICQKGQVIERKTKRNRIFYGCDRYPECEFT | 665 |
| | | GR+GKFYACSNFPEC NTKAITKEIGV CP+C KGQVIERKTK+NRIFYGCD+YP+CEF | |
| Sbjct: | 607 | GRFGKFYACSNFPECRNTKAITKEIGVTCPVCHKGQVIERKTKKNRIFYGCDQYPDCEFI | 666 |
| Query: | 666 | SWDKPIGRTCPKSNDFLVEKKVRGGGKQVVCSNEKCDYQEEKIK | 709 |
| | | SWD PIGR CPKS D+L+EKKVR GGKQV+CSNE CDY+EEKIK | |
| Sbjct: | 667 | SWDLPIGRACPKSGDYLIEKKVR-GGKQVMCSNETCDYKEEKIK | 709 |

[3612] Based on this analysis, it was predicted that these proteins and their epitopes could be useful antigens for vaccines or diagnostics.

### EXAMPLE 618

[3613] A DNA sequence (GBSx0658) was identified in S. agalactiae <SEQ ID 1919> which encodes the amino acid sequence <SEQ ID 1920>. Analysis of this protein sequence reveals the following:

Possible site: 43
>>> Seems to have no N-terminal signal sequence
----- Final Results -----
bacterial cytoplasm --- Certainty = 0.2578 (Affirmative) < succ>
bacterial membrane --- Certainty = 0.0000 (Not Clear) < succ>
bacterial outside --- Certainty = 0.0000 (Not Clear) < succ>

[3614] The protein has homology with the following sequences in the GENPEPT database:

| >GP: AAD35341 GB: AE001708 DNA processing chain A [Thermotoga maritima] | | | |
|---|---|---|---|
| Identities = 97/231 (41%), Positives = 149/231 (63%), Gaps = 2/231 (0%) | | | |
| Query: | 51 | FIENYKQLDLKKLRQEFKKFPV--LSILDSNYPLELKEIYNPPVLLFYQGNIELLSKPKL | 108 |
| | | F+E + +L++ ++ +K V +S + +YP L+EI PP +LF +G+ ELL + + | |
| Sbjct: | 41 | FLEKCGKEELERQKELIRKHNVKLVSFWEDDYPQHLREIRYPPAVLFVRGDAELLKEKCV | 100 |
| Query: | 109 | AVVGARQASQIGCQSVKKIIKETNNQFVIVSGLARGIDTAAHVSALKNGGSSIAVIGSGL | 168 |
| | | VVG R+ + G K+ +K + FVIVSG+A GID+ AH AL +GG ++AV+G+G+ | |
| Sbjct: | 101 | GVVGTRRPTSYGVNVTKRFVKLLSEYFVIVSGMAFGIDSVAHKEALSSGGKTVAVLGTGV | 160 |
| Query: | 169 | DVYYPTENKKLQEYMSYNHLVLSEYFTGEQPLKFHFPERNRIIAGLCQGIVVAEAKMRSG | 228 |
| | | DV YP N++L + N V+SEY G + K HFP RNRIIAGL I+V EA ++SG | |
| Sbjct: | 161 | DVVYPRSNERLFHEIVKNGCVVSEYPMGTRARKHHFPARNRIIAGLSDAIIVTEAPIKSG | 220 |
| Query: | 229 | SLITCERALEEGREVFAIPGNIIDGKSDGCHHLIQEGAKCIISGKDILSEY | 279 |
| | | +LIT + ALE GR+VFA+PG+I S+G ++LI+ GA + +D+ + + | |
| Sbjct: | 221 | ALITVKFALESGRDVFAVPGDIDRKTSEGTNYLIKSGAYPLTDEEDLETHF | 271 |

[3615] A related DNA sequence was identified in S. pyogenes <SEQ ID 1921> which encodes the amino acid sequence <SEQ ID 1922>. Analysis of this protein sequence reveals the following:

Possible site: 50
>>> Seems to have no N-terminal signal sequence
----- Final Results -----
bacterial cytoplasm --- Certainty = 0.2856 (Affirmative) < succ>
bacterial membrane --- Certainty = 0.0000 (Not Clear) < succ>
bacterial outside --- Certainty = 0.0000 (Not Clear) < succ>

[3616] An alignment of the GAS and GBS proteins is shown below:

| Identities = 185/279 (66%), Positives = 238/279 (84%), Gaps = 1/279 (0%) | | | |
|---|---|---|---|
| Query: | 1 | MNHFELFKLKKAGLTNLNIHNIINYLKKNSLTSLSVRNMAVVSKCKNPTFFIENYKQLDL | 60 |
| | | +NHFEL+KLKKAGLTN NI NI++Y +K+ SLS+R+MAVVS CK+P+ FIE YKQLD+ | |
| Sbjct: | 1 | VNHFELYKLKKAGLTNKNILNILDY-QKHQEKSLSLRDMAVVSGCKHPSHFIEAYKQLDI | 59 |
| Query: | 61 | KKLRQEFKKFPVLSILDSNYPLELKEIYNPPVLLFYQGNIELLSKPKLAVVGARQASQIG | 120 |
| | | + L+ EFK+FP +SILD +YP+ LKEIYNPPVLLF+QGN++LL KPKLA+VG+R++S G | |
| Sbjct: | 60 | QNLKMEFKQFPSISILDKHYPMALKEIYNPPVLLFFQGNLDLLEKPKLAIVGSRRSSDTG | 119 |
| Query: | 121 | CQSVKKIIKETNNQFVIVSGLARGIDTAAHVSALKNGGSSIAVIGSGLDVYYPTENKKLQ | 180 |
| | | +SV+KI+KE N+FVIVSGLARGIDT+AH++ LKNGG +IA+IG+GLD +YP EN++LQ | |
| Sbjct: | 120 | VKSVRKILKELGNRFVIVSGLARGIDTSAHLACLKNGGQTIAIIGTGLDRFYPKENRELQ | 179 |
| Query: | 181 | EYMSYNHLVLSEYFTGEQPLKFHFPERNRIIAGLCQGIVVAEAKMRSGSLITCERALEEG | 240 |
| | | ++ NHLVL+EY GE+ L +HFPERNRIIAGL +GI+V EAK RSGSLITC+ +EEG | |
| Sbjct: | 180 | TFLGKNHLVLTEYGPGEEALSYHFPERNRIIAGLSRGILVVEAKNRSGSLITCQIGIEEG | 239 |
| Query: | 241 | REVFAIPGNIIDGKSDGCHHLIQEGAKCIISGKDILSEY | 279 |
| | | R++FA+PGNI+DGKS+GC LI+EGA C+ SG DILSEY | |
| Sbjct: | 240 | RDIFAVPGNILDGKSEGCLQLIKEGATCVTSGMDILSEY | 278 |

[3617] Based on this analysis, it was predicted that these proteins and their epitopes could be useful antigens for vaccines or diagnostics.

### EXAMPLE 619

[3618] A DNA sequence (GBSx0659) was identified in S. agalactiae <SEQ ID 1923> which encodes the amino acid sequence <SEQ ID 1924>. This protein is predicted to be lipoprotein (ceuE). Analysis of this protein sequence reveals the following:

Possible site: 24
>>> Seems to have a cleavable N-term signal seq.
----- Final Results -----
bacterial outside --- Certainty = 0.3000 (Affirmative) < succ>
bacterial membrane --- Certainty = 0.0000 (Not Clear) < succ>
bacterial cytoplasm --- Certainty = 0.0000 (Not Clear) < succ>

[3619] The protein has homology with the following sequences in the GENPEPT database:

>GP: CAA06500 GB: AJ005352 lipoprotein [Staphylococcus aureus]
Identities = 122/348 (35%), Positives = 201/348 (57%), Gaps = 16/348 (4%)

| | | | |
|---|---|---|---|
| Query: | 1 | MTKKLIIAILALCTILTTSQAVLAKEKSQ--------TVTIKNNYSVYIKKEKRDKPDNK | 52 |
| | | M K ++ +LA+ +L KE+S+ TV I+NNY + + EK+D D K | |
| Sbjct: | 1 | MKKTVLYLVLAVMFLLAACGNNSDKEQSKSETKGSKDTVKIENNYKM--RGEKKDGSDAK | 58 |
| Query: | 53 | KQISETLKVPLKPKKVVVFDMGALDTITALGAEKSVIGIPKAKNALSLLPNNVKSVYKAK | 112 |
| | | K + ET++VP P+ VV D GALD + +G V +PK + SL PN ++S +K | |
| Sbjct: | 59 | K-VKETVEVPKNPENAVVLDYGALDVMKEMGLSDKVKALPKGEGGKSL-PNFLES-FKDD | 115 |
| Query: | 113 | RYQDVGSLFEPNFEAIARMQPDVVFLGARMASVDNIEKLKEAAPKAALVYAGVDSKKVFD | 172 |
| | | +Y +VG+L E NF+ IA +P+V+F+ R A+ N+++ K+AAPKA +VY G D K + | |
| Sbjct: | 116 | KYTNVGNLKEVNFDKIAATKPEVIFISGRTANQKNLDEFKKAAPKAKIVYVGADEKNLIG | 175 |
| Query: | 173 | KGVAERVTMLGKIFDQNKKAKTFNKDIAQAVLKLQKTIEKKGKPTALFVMANSGELLTQS | 232 |
| | | + + +GKI+D+ KAK NKD+ + ++ + K T ++++ N GEL T | |
| Sbjct: | 176 | S-MKQNTENIGKIYDKEVKAKELNKDLDNKIASMKDKTKNFNK-TVMYLLVNEGELSTFG | 233 |
| Query: | 233 | PSGRFGW-IFSVGGFKAVNENEKLSSHGTPVSYEYIAEKNPNYLFVLDRGATIGQGASSK | 291 |
| | | P GRFG ++ GF AV++ S+HG VS EY+ ++NP+ + +DRG + +++K | |
| Sbjct: | 234 | PKGRFGGLVYDTLGFNAVDKKVSNSNHGQNVSNEYVNKENPDVILAMDRGQAVSGKSTAK | 293 |
| Query: | 292 | ELFNNDVIKATDAVKNKRVHEVDGKDWYINSGGSRVTLRMIKDVQNFV | 339 |
| | | + NN V+K A+K +V+ +D K WY +G + T++ I+++ V | |
| Sbjct: | 294 | QALNNPVLKNVKAIKEDKVYNLDPKLWYFAAGSTTTTIKQIEELDKVV | 341 |

[3620] A related DNA sequence was identified in S. pyogenes <SEQ ID 1925> which encodes the amino acid sequence <SEQ ID 1926>. Analysis of this protein sequence reveals the following:

```
Possible site: 32
>>> May be a lipoprotein
----- Final Results -----
                              bacterial membrane --- Certainty = 0.0000(Not Clear) < succ>
                                bacterial outside --- Certainty = 0.0000(Not Clear) < succ>
                            bacterial cytoplasm --- Certainty = 0.0000(Not Clear) < succ>
```

[3621] An alignment of the GAS and GBS proteins is shown below:

| Identities = 57/255 (22%), Positives = 104/255 (40%), Gaps = 30/255 (11%) | | | |
|---|---|---|---|
| Query: | 66 | KKVVVFDMGALDTITALGAEKSVIGIPKAKNALSLLPNNVKSVYKAKRYQDVGSLFEPNF | 125 |
| | | +++V + +D L + ++G+ +K L LP +V + VG P+ | |
| Sbjct: | 45 | QRIVATSVAVVDICDRLNLD--LVGVCDSK--LYTLPKRYDAVKR------VGLPMNPDI | 94 |
| Query: | 126 | EAIARMQPDVVFLGARMASVDNIEKLKEAAPKAALVYAGVDSKKVFDKGVAERVTMLGKI | 185 |
| | | E IA ++P + + E L+ K Y ++ + V +G+ + + LG + | |
| Sbjct: | 95 | ELIASLKPTWILSPNSLQ-----EDLEPKYQKLDTEYGFLNLRSV--EGMYQSIDDLGNL | 147 |
| Query: | 186 | FDQNKKAKTFNKDIAQAVLKLQKTIEKKGKPTALFVMANSGELLTQSPSGRFGWIFSVGG | 245 |
| | | F + ++AK + Q + K KP L +M G L + G + + G | |
| Sbjct: | 148 | FQRQQEAKELRQQYQDYYRAFQAKRKGKKKPKVLILMGLPGSYLVATNQSYVGNLLDLAG | 207 |
| Query: | 246 | FKAV---NENEKLSSHGTPVSYEYIAEKNPNYLFVLDRGATIGQGAS---SKELFNNDVI | 299 |
| | | + V +E E LS++ E + K P+ +L I KE ND+ | |
| Sbjct: | 208 | GENVYQSDEKEFLSANP-----EDMLAKEPD--LILRTAHAIPDKVKVMFDKEFAENDIW | 260 |
| Query: | 300 | KATDAVKNKRVHEVD | 314 |
| | | K AVK +V+++D | |
| Sbjct: | 261 | KHFTAVKEGKVYDLD | 275 |

[3622] SEQ ID 1924 (GBS181) was expressed in E. coli as a His-fusion product. SDS-PAGE analysis of total cell extract is shown in FIG. 39 (lane 5; MW 38.7 kDa). It was also expressed in E. coli as a GST-fusion product. SDS-PAGE analysis of total cell extract is shown in FIG. 46 (lane 3; MW 64 kDa).

[3623] The GBS181-GST fusion product was purified (FIG. 204, lane 9) and used to immunise mice. The resulting antiserum was used for FACS (FIG. 299), which confirmed that the protein is immunoaccessible on GBS bacteria.

[3624] Based on this analysis, it was predicted that these proteins and their epitopes could be useful antigens for vaccines or diagnostics.

### EXAMPLE 620

[3625] A DNA sequence (GBSx0660) was identified in S. agalactiae <SEQ ID 1927> which encodes the amino acid sequence <SEQ ID 1928>. This protein is predicted to be iron(III) ABC transporter, ATP-binding protein. Analysis of this protein sequence reveals the following:

```
Possible site: 40
>>> Seems to have no N-terminal signal sequence
----- Final Results -----
                            bacterial cytoplasm --- Certainty = 0.3231(Affirmative) < succ>
                              bacterial membrane --- Certainty = 0.0000(Not Clear) < succ>
                                bacterial outside --- Certainty = 0.0000(Not Clear) < succ>
```

[3626] The protein has homology with the following sequences in the GENPEPT database:

| >GP: CAB12190 GB: Z99106 similar to ferrichrome ABC transporter | | | |
|---|---|---|---|
| (ATP-binding protein) [Bacillus subtilis] | | | |
| Identities = 125/247 (50%), Positives = 187/247 (75%) | | | |
| Query: | 1 | MIQINNLHKFYGQKEILKDINISIPKGKVTAILGPNGSGKSTLLSCISRLEPYDNGEIFL | 60 |
| | | M+++ N+ K YG K +L++ +++I KGK+T+ +GPNG+GKSTLLS +SRL D+GEI++ | |
| Sbjct: | 1 | MVEVRNVSKQYGGKVVLEETSVTIQKGKITSFIGPNGAGKSTLLSIMSRLIKKDSGEIYI | 60 |
| Query: | 61 | DKVPLAHYSSNDLAKTLAILRQSNHLTLKIKVRDLIGFGRFPYSKGRLSQKDKAVIESVI | 120 |
| | | D + S +LAK ++IL+Q+N + +++ ++DL+ FGRFPYS+GRL+++D I + | |
| Sbjct: | 61 | DGQEIGACDSKELAKKMSILKQANQINIRLTIKDLVSFGRFPYSQGRLTEEDWVHINQAL | 120 |
| Query: | 121 | SYMDLNDIADEFINNLSGGQIQRAFIAMTMAQDTQYICLDEPLNNLDMKYAVQMMDLIKR | 180 |
| | | SYM L DI D++++ LSGGQ QRAFIAM +AQDT YI LDEPLNNLDMK++V++M L+KR | |
| Sbjct: | 121 | SYMKLEDIQDKYLDQLSGGQCQRAFIAMVIAQDTDYIFLDEPLNNLDMKHSVEIMKLLKR | 180 |
| Query: | 181 | YAYEFNKTIVIIIHDINFATHYADNVVALKEGQVVTCGTVEDVMQEKILSHLFDMPIRIE | 240 |
| | | E KTIVI+IHDINFA+ Y+D +VALK G++V G E++++ +L ++DM I I+ | |
| Sbjct: | 181 | LVEELGKTIVIVIHDINFASVYSDYIVALKNGRIVKEGPPEEMIETSVLEEIYDMTIPIQ | 240 |
| Query: | 241 | TVDGKPI | 247 |
| | | T+D + I | |
| Sbjct: | 241 | TIDNQRI | 247 |

[3627] There is also homology to SEQ ID 1930.

[3628] Based on this analysis, it was predicted that this protein and its epitopes, could be useful antigens for vaccines or diagnostics.

### EXAMPLE 621

[3629] A DNA sequence (GBSx0661) was identified in S. agalactiae <SEQ ID 1931> which encodes the amino acid sequence <SEQ ID 1932>. Analysis of this protein sequence reveals the following:

| Possible site: 33 | | | | |
|---|---|---|---|---|
| >>> Seems to have a cleavable N-term signal seq. | | | | |
| | INTEGRAL | Likelihood = −12.74 | Transmembrane | 271-287 (266-295) |
| | INTEGRAL | Likelihood = −8.55 | Transmembrane | 49-65 (47-69) |
| | INTEGRAL | Likelihood = −8.07 | Transmembrane | 185-201 (178-207) |
| | INTEGRAL | Likelihood = −7.70 | Transmembrane | 112-128 (105-132) |
| | INTEGRAL | Likelihood = −7.38 | Transmembrane | 231-247 (227-261) |
| | INTEGRAL | Likelihood = −2.50 | Transmembrane | 139-155 (135-156) |
| | INTEGRAL | Likelihood = −1.97 | Transmembrane | 302-318 (301-319) |

```
----- Final Results -----
                              bacterial membrane --- Certainty = 0.6095(Affirmative) < succ>
                                bacterial outside --- Certainty = 0.0000(Not Clear) < succ>
                            bacterial cytoplasm --- Certainty = 0.0000(Not Clear) < succ>
```

[3630] The protein has homology with the following sequences in the GENPEPT database:

| >GP: CAB12189 GB: Z99106 similar to ferrichrome ABC transporter | | | |
|---|---|---|---|
| (permease) [Bacillus subtilis] | | | |
| Identities = 138/315 (43%), Positives = 222/315 (69%), Gaps = 6/315 (1%) | | | |
| Query: | 9 | KLLILLILLIAAIILFLIYGIPTDANEFLIIYILKTRYQKLIALILVGICIGSSSLIFQT | 68 |
| | | K+ +L+ L I I LFL Y + Y L R +K+ A++L G I S++IFQT | |
| Sbjct: | 6 | KIALLVGLAIVCIGLFLFYDLGNWD------YTLPRRIKKVAAIVLTGGAIAFSTMIFQT | 59 |
| Query: | 69 | LTNNRLLTPSIIGLDSLYILIQTGLMYLIGAQRVIKFSSFSSFLLSLLLMVGFAYLLFTI | 128 |
| | | +TNNR+LTPSI+GLDSLY+LIQTG+++L G+ ++ + +F++S+LLM+ F+ +L+ I | |
| Sbjct: | 60 | ITNNRILTPSILGLDSLYMLIQTGIIFLFGSANMVIMNKNINFIISVLLMILFSLVLYQI | 119 |
| Query: | 129 | LFRNKKQSLYFVLLAGLIFNTLFSSISSFIQAIMDPNDFMILQNQLFASFNAINTKILWI | 188 |
| | | +F+ + ++++F+LL G++F TLFSS+SSF+Q ++DPN+F ++Q+++FASFN INT +LW+ | |
| Sbjct: | 120 | MFKGEGRNIFFLLLIGIVFGTLFSSLSSFMQMLIDPNEFQVVQDKMFASFNNINTDLLWL | 179 |
| Query: | 189 | SFIIIVVSFVINWPFIKELDVLLLGKENAISLGISYQKLTTRFFLWLALMVAIATALVGP | 248 |
| | | +FII +++ V W F K DVL LG+E+A++LGI Y K+ + + +A++V+++TALVGP | |
| Sbjct: | 180 | AFIIFLLTGVYVWRFTKFFDVLSLGREHAVNLGIDYDKVVKQMLIVVAILVSVSTALVGP | 239 |
| Query: | 249 | ITFLGLLVAHITYHSFHTFRHQILVPIAIVICIFTLVLGQHLVQNLLHLTVQLSVLLNLI | 308 |
| | | I FLGLLV ++ T++H L+ ++ I I LV GQ +V+ + + LSV++N | |
| Sbjct: | 240 | IMFLGLLVVNLAREFLKTYKHSYLIAGSVFISIIALVGGQFVVEKVFTFSTTLSVIINFA | 299 |
| Query: | 309 | GGSYFIFTLIKGRKN | 323 |
| | | GG YFI+ L+K K+ | |
| Sbjct: | 300 | GGIYFIYLLLKENKS | 314 |

[3631] A related DNA sequence was identified in S. pyogenes <SEQ ID 1933> which encodes the amino acid sequence <SEQ ID 1934>. Analysis of this protein sequence reveals the following:

| Possible site: 58 | | | | |
|---|---|---|---|---|
| >>> Seems to have no N-terminal signal sequence | | | | |
| | INTEGRAL | Likelihood = −13.64 | Transmembrane | 33-49 (26-61) |
| | INTEGRAL | Likelihood = −8.97 | Transmembrane | 259-275 (246-286) |
| | INTEGRAL | Likelihood = −8.65 | Transmembrane | 296-312 (294-316) |
| | INTEGRAL | Likelihood = −8.39 | Transmembrane | 83-99 (78-104) |
| | INTEGRAL | Likelihood = −6.26 | Transmembrane | 212-228 (210-231) |
| | INTEGRAL | Likelihood = −4.04 | Transmembrane | 113-129 (110-132) |
| | INTEGRAL | Likelihood = −3.61 | Transmembrane | 140-156 (134-157) |
| | INTEGRAL | Likelihood = −2.71 | Transmembrane | 165-181 (165-181) |
| | INTEGRAL | Likelihood = −1.06 | Transmembrane | 327-343 (327-343) |
| | INTEGRAL | Likelihood = −0.22 | Transmembrane | 50-66 (50-66) |

```
----- Final Results -----
                              bacterial membrane --- Certainty = 0.6456(Affirmative) < succ>
                                bacterial outside --- Certainty = 0.0000(Not Clear) < succ>
                            bacterial cytoplasm --- Certainty = 0.0000(Not Clear) < succ>
```

[3632] A related sequence was also identified in GAS <SEQ ID 9175> which encodes the amino acid sequence <SEQ ID 9176>. Analysis of this protein sequence reveals the following:

| Possible site: 49 | | | | |
|---|---|---|---|---|
| >>> Seems to have no N-terminal signal sequence | | | | |
| | INTEGRAL | Likelihood = −13.64 | Transmembrane | 24-40 (17-52) |
| | INTEGRAL | Likelihood = −8.97 | Transmembrane | 250-266 (237-277) |
| | INTEGRAL | Likelihood = −8.65 | Transmembrane | 287-303 (285-307) |
| | INTEGRAL | Likelihood = −8.39 | Transmembrane | 74-90 (69-95) |
| | INTEGRAL | Likelihood = −6.26 | Transmembrane | 203-219 (201-222) |
| | INTEGRAL | Likelihood = −4.04 | Transmembrane | 104-120 (101-123) |
| | INTEGRAL | Likelihood = −3.61 | Transmembrane | 131-147 (125-148) |
| | INTEGRAL | Likelihood = −2.71 | Transmembrane | 156-172 (156-172) |
| | INTEGRAL | Likelihood = −1.06 | Transmembrane | 318-334 (318-334) |
| | INTEGRAL | Likelihood = −0.22 | Transmembrane | 41-57 (41-57) |

```
----- Final Results -----
                              bacterial membrane --- Certainty = 0.646(Affirmative) < succ>
                                bacterial outside --- Certainty = 0.0000(Not Clear) < succ>
                            bacterial cytoplasm --- Certainty = 0.0000(Not Clear) < succ>
```

[3633] An alignment of the GAS and GBS proteins is shown below:

| Identities = 80/326 (24%), Positives = 157/326 (47%), Gaps = 34/326 (10%) | | | |
|---|---|---|---|
| Query: | 10 | LLILLILLIAAIILFLIYGIPTDANEFL----------IIYILKTRYQKLIALILVGICI | 59 |
| | | +L++L LL A+I + G+ + + I R+ +++ +L G I | |
| Sbjct: | 34 | VLLILSLLFLAVIALSLGGLAVSYGAIVKGLFVAYDPQVALIYDLRFPRIVIALLAGAGI | 93 |
| Query: | 60 | GSSSLIFQTLTNNRLLTPSIIGL---DSLYILIQTGLMYLIGAQRVIKFSSFSSFL---L | 113 |
| | | S ++FQ + N + P+IIG+ S +L+ + L+ +++ + SFL + | |
| Sbjct: | 94 | AVSGVLFQAVLKNPISDPAIIGICSGASFMVLVSSLLL-----PQLLLYGPIVSFLGGGV | 148 |
| Query: | 114 | SLLLMVGFAYLLFTILFRNKKQSLYFVLLAGLIFNTLFSSISSFIQAIMDPNDFMILQNQ | 173 |
| | | S LL+ G A+ K + ++L G+ N LF +S+ + + M+ N | |
| Sbjct: | 149 | SFLLIYGLAW--------KKGLNPIRLILTGIAINALFMGLSTALTSFFTSASPMV--NA | 198 |
| Query: | 174 | LFASFNAINTKI-LWISFIIIVVSFVINWPFIKELDVLLLGKENAISLGISYQKLTTRFF | 232 |
| | | L A + T + + F + ++ K ++LLL + LGI L | |
| Sbjct: | 199 | LLAGHISQKTWADVGVLFPYTFIGLLLALLLSKTCNLLLLDDQVIRHLGIDATALRLGIS | 258 |
| Query: | 233 | LWLALMVAIATALVGPITFLGLLVAHITYHSFHTFRHQILVPIAIVICIFTLVLGQHLVQ | 292 |
| | | L L+ ++AT++VG ++FLGL+V H++ + +HQIL+P + ++ F +L L + | |
| Sbjct: | 259 | LVAVLLASVATSIVGVVSFLGLIVPHMSRLLVGS-KHQILIPFSALLGAFVFLLADTLGR | 317 |
| Query: | 293 | NLLH-LTVQLSVLLNLIGGSYFIFTL | 317 |
| | | +L + L + +++++++GG YFI+ L | |
| Sbjct: | 318 | SLAYPLEISPAIIMSIVGGPYFIYLL | 343 |

[3634] A related DNA sequence was identified in S. pyogenes <SEQ ID 2491> which encodes amino acid sequence <SEQ ID 2492>. An alignment of the GAS and GBS sequences follows:

| Score = 51.9 bits (122), Expect = 5e−08 | | | |
|---|---|---|---|
| Identities = 73/327 (22%), Positives = 137/327 (41%), Gaps = 38/327 (11%) | | | |
| Query: | 494 | IISSLGTAISTVAQGIGTGLAIAFRGLGAAIAMVPPTTWLALGTAILMVGAAFALAGTQA | 553 |
| | | +I L T + G L IA +GA + +V A+ L++ A | |
| Sbjct: | 573 | VILGLVTTAVMMLLGAIAPLVIAIGAIGAPVGIVVAAIVGAIAVITLIIQAIMNWGA--- | 629 |
| Query: | 554 | DGISQILRTIGDXXXXXXXXXTDSLATLLTIIANAIGSMLPIVAGAISQIVG-------A | 606 |
| | | I++ L++ D ++ T T A + ++G S +V + | |
| Sbjct: | 630 | --ITEWLQSTWDSCAAWXSELWTNIVTTAT---TAWSNFTAWLSGLWSSVVSTGQSLWSS | 684 |
| Query: | 607 | VAGGLSQLIIAVSTGVSLVIGAFTGLLGGI-SGVINSISAVIQSLTGVITAVFNGIATVI | 665 |
| | | LS + ++ TG + +FT L + SG++++ S + +L+ I+ +FNGI + | |
| Sbjct: | 685 | FTSSLSNIFSSLITGAQSLWSSFTSTLSNLWSGLVSTGSNLFNNLSSTISGIFNGILSTA | 744 |
| Query: | 666 | SSVGSTIKDVLTGLGTAFEGFGNGVKSALEGVGAVIESFGSAVR--------NVLDGVAN | 717 |
| | | S++ ++IK ++ A +G N V + GV A+ F ++ + G AN | |
| Sbjct: | 745 | SNIWNSIKSTIS---NAIDGAKNAVSN---GVNAIKNLFNFQIKWPHIPLPHFRVSGSAN | 798 |
| Query: | 718 | ILDSM--GTAALNAGRGVKEMAKGIKMLVDLSLGDLVATLAAVASGLGKMASSAGEMTTL | 775 |
| | | LD + G ++ G+ AKG ++ +L + A V G A +TL | |
| Sbjct: | 799 | PLDWLKGGLPSI----GIDWYAKG-GIMTKPTLFGMNGNRAMVGGEAGAEAILPLNKSTL | 853 |
| Query: | 776 | GSAMSKVANGMTRLATSATIAITGLTV | 802 |
| | | G+ +AN M + + + +G+T+ | |
| Sbjct: | 854 | GAIGQSIANTM-NTSNNINVNFSGVTI | 879 |
| Score = 33.2 bits (74), Expect = 0.019 | | | |
| Identities = 83/477 (17%), Positives = 175/477 (36%), | | | |
| Gaps = 103/477 (21%) | | | |
| Query: | 420 | GSFLDKISTKFGLFGKKAKEGTD--------------QAANGSRKSGGIISQIFNGLGNI | 465 |
| | | G + +++T+FGL G+K K ++ +A ++++ LG + | |
| Sbjct: | 313 | GDAVGELNTQFGLTGEKLKSASELLIKYAEINETDISSSAISAKQAIEAYGLTAEDLGMV | 372 |
| Query: | 466 | VKSAGTAISTAAKGIGTGIKTALSGAPPIISSLGTAISTVA--------QGIGTGLAIA- | 516 |
| | | + + A + + T ++ A+ GAP I LG + A G+ + A++ | |
| Sbjct: | 373 | LDNVTKAAQDTGQSVDTIVQKAIDGAPQ-IKGLGLSFEEGAALIGKFEKSGVDSSAALSS | 431 |
| Query: | 517 | ---------------FRGLGAAIAMVPPTT--WLALGTAILMVGAAFALAGTQA------ | 553 |
| | | GL ++ + +T AL A + G+ A A | |
| Sbjct: | 432 | LSKAAVIYAKDGKTLTDGLNETVSAIQNSTSETEALSIASEIFGSKAAPRMVDAIQRGAF | 491 |
| Query: | 554 | --DGISQILRTIGDXXXXXXXXXTDSLATLLTI-------IANAIGSMLPIVAGAISQIV | 604 |
| | | D +++ ++ D + L +A G +L V A+ ++ | |
| Sbjct: | 492 | SFDDLAEAAKSSSGTVSTTFDETLDPIDKLTQYSNQAKEGMAELGGKLLETVIPALEPLM | 551 |
| Query: | 605 | GAVAGGLS----------QLII---AVSTGVSLVIGAFTGL---LGGISGVINSISAVIQ | 648 |
| | | G + ++ Q I+ V+T V +++GA L +G I + + A I | |
| Sbjct: | 552 | GMLESSVNWFTSLNETDQQTIVILGLVTTAVMMLLGAIAPLVIAIGAIGAPVGIVVAAIV | 611 |
| Query: | 649 | SLTGVITAVFNGI-----------------ATVISSVGSTIKDVLTGLGTAFEGFGNGVK | 691 |
| | | VIT + I A S + + I T + F + +G+ | |
| Sbjct: | 612 | GAIAVITLIIQAIMNWGAITEWLQSTWDSCAAWXSELWTNIVTTATTAWSNFTAWLSGLW | 671 |
| Query: | 692 | SALEGVG-AVIESFGSAVRNV----LDGVANILDSMGTAALNAGRGVKEMAKGIKMLVDL | 746 |
| | | S++ G ++ SF S++ N+ + G ++ S + N G+ + | |
| Sbjct: | 672 | SSVVSTGQSLWSSFTSSLSNIFSSLITGAQSLWSSFTSTLSNLWSGLVSTGSNL------ | 725 |
| Query: | 747 | SLGDLVATLAAVASGLGKMASSAGEMTTLGSAMSKVANGMTRLATSATIAITGLTVF | 803 |
| | | +L +T++ + +G+ +++++ ++ S +S +G ++ AI L F | |
| Sbjct: | 726 | -FNNLSSTISGIFNGI--LSTASNIWNSIKSTISNAIDGAKNAVSNGVNAIKNLFNF | 779 |

[3635] Based on this analysis, it was predicted that these proteins and their epitopes could be useful antigens for vaccines or diagnostics.

### EXAMPLE 622

[3636] A DNA sequence (GBSx0662) was identified in S. agalactiae <SEQ ID 1935> which encodes the amino acid sequence <SEQ ID 1936>. Analysis of this protein sequence reveals the following:

Possible site: 13
>>> Seems to have no N-terminal signal sequence
----- Final Results -----
bacterial cytoplasm --- Certainty = 0.2277 (Affirmative) < succ>
bacterial membrane --- Certainty = 0.0000 (Not Clear) < succ>
bacterial outside --- Certainty = 0.0000 (Not Clear) < succ>

[3637] The protein has no significant homology with any sequences in the GENPEPT database.

[3638] No corresponding DNA sequence was identified in S. pyogenes.

[3639] Based on this analysis, it was predicted that this protein and its epitopes, could be useful antigens for vaccines or diagnostics.

### EXAMPLE 623

[3640] A DNA sequence (GBSx0663) was identified in S. agalactiae <SEQ ID 1937> which encodes the amino acid sequence <SEQ ID 1938>. This protein is predicted to be membrane protein (ceuB). Analysis of this protein sequence reveals the following:

| Possible site: 41 | | | |
|---|---|---|---|
| >>> Seems to have no N-terminal signal sequence | | | |
| INTEGRAL | Likelihood = −11.30 | Transmembrane | 241-257 (237-274) |
| INTEGRAL | Likelihood = −6.42 | Transmembrane | 127-143 (118-149) |
| INTEGRAL | Likelihood = −5.79 | Transmembrane | 152-168 (150-174) |
| INTEGRAL | Likelihood = −5.47 | Transmembrane | 312-328 (309-330) |
| INTEGRAL | Likelihood = −4.83 | Transmembrane | 289-305 (287-308) |
| INTEGRAL | Likelihood = −4.67 | Transmembrane | 24-40 (22-46) |
| INTEGRAL | Likelihood = −4.35 | Transmembrane | 69-85 (68-86) |
| INTEGRAL | Likelihood = −4.19 | Transmembrane | 200-216 (198-216) |
| INTEGRAL | Likelihood = −2.76 | Transmembrane | 107-123 (107-123) |
| INTEGRAL | Likelihood = −0.85 | Transmembrane | 258-274 (258-274) |

----- Final Results -----
bacterial membrane --- Certainty = 0.5522 (Affirmative) < succ>
bacterial outside --- Certainty = 0.0000 (Not Clear) < succ>
bacterial cytoplasm --- Certainty = 0.0000 (Not Clear) < succ>

[3641] A related GBS nucleic acid sequence <SEQ ID 8621> which encodes amino acid sequence <SEQ ID 8622> was also identified. Analysis of this protein sequence reveals the following:

| Lipop: Possible site: −1 Crend: 2 | | | |
|---|---|---|---|
| SRCFLG: 0 | | | |
| NcG: Length of UR: 23 | | | |
| Peak Value of UR: 2.64 | | | |
| Net Charge of CR: 2 | | | |
| McG: Discrim Score: 8.59 | | | |
| GvH: Signal Score (−7.5): −4.6 | | | |
| Possible site: 26 | | | |
| >>> Seems to have an uncleavable N-term signal seq | | | |
| Amino Acid Composition: calculated from 1 | | | |
| ALOM program | count: 9 | value: −11.30 | threshold: 0.0 |

| | | | |
|---|---|---|---|
| INTEGRAL | Likelihood = −11.30 | Transmembrane | 226-242 (222-259) |
| INTEGRAL | Likelihood = −6.42 | Transmembrane | 112-128 (103-134) |
| INTEGRAL | Likelihood = −5.79 | Transmembrane | 137-153 (135-159) |
| INTEGRAL | Likelihood = −4.67 | Transmembrane | 9-25 (7-31) |
| INTEGRAL | Likelihood = −4.35 | Transmembrane | 54-70 (53-71) |
| INTEGRAL | Likelihood = −4.19 | Transmembrane | 185-201 (183-201) |
| INTEGRAL | Likelihood = −3.08 | Transmembrane | 268-284 (265-284) |
| INTEGRAL | Likelihood = −2.76 | Transmembrane | 92-108 (92-108) |
| INTEGRAL | Likelihood = −0.85 | Transmembrane | 243-259 (243-259) |

| | | |
|---|---|---|
| PERIPHERAL | Likelihood = 5.73 | 203 |

modified ALOM score: 2.76
icml HYPID: 7 CFP: 0.552
*** Reasoning Step: 3
----- Final Results -----
bacterial membrane --- Certainty = 0.5522 (Affirmative) < succ>
bacterial outside --- Certainty = 0.0000 (Not Clear) < succ>
bacterial cytoplasm --- Certainty = 0.0000 (Not Clear) < succ>

[3642] The protein has homology with the following sequences in the GENPEPT database:

| >GP: CAB12188 GB: Z99106 similar to ferrichrome ABC transporter | | | |
|---|---|---|---|
| (permease) [Bacillus subtilis] | | | |
| Identities = 149/304 (49%), Positives = 234/304 (76%) | | | |
| Query: | 29 | LVILSLTSLFVGVKSIPLEQITHLDQSQVOIFLTSRLPRTISILISGASLSVCGLLMQQL | 88 |
| | | L+IL++TS+F+GV+ + + L + + SRLPR ISI+I+G S+S+CGL+MQQ+ | |
| Sbjct: | 10 | LIILAVTSVFIGVEDLSPLDLFDLSKQEASTLFASRLPRLISIVIAGLSMSICGLIMQQI | 69 |
| Query: | 89 | TQNKFVSPTTSGTMDWAKLGVVVTLIFFKNTSIFIQLCIASGFAILGSLLFVTILKMITF | 148 |
| | | ++NKFVSPTT+GTMDWA+LG++++L+ F + S I++ +A FA+ G+ LF+ IL+ I F | |
| Sbjct: | 70 | SRNKFVSPTTAGTMDWARLGILISLLLFTSASPLIKMLVAFVFALAGNFLFMKILERIKF | 129 |
| Query: | 149 | KDNIFIPLIGLMLGQIVAAATVFLGTHFQVLQSVNSWLQGNFSIMTSHRYEILYLALPCL | 208 |
| | | D IFIPL+GLMLG IV++ F+ + ++Q+V+SWLQG+FS++ RYE+LYL++P + | |
| Sbjct: | 130 | NDTIFIPLVGLMLGNIVSSIATFIAYKYDLIQNVSSWLQGDFSLVVKGRYELLYLSIPLV | 189 |
| Query: | 209 | FLVYFFAHQFTIVGLGESFAKNLGVAYEKMIYFGLVLVSIMTSLVIIIVGALPFLGLIVP | 268 |
| | | + Y +A +FT+ G+GESF+ NLG+ Y++++ GL++VS++TSLVI+ VG LPFLGLI+P | |
| Sbjct: | 190 | IIAYVYADKFTLAGMGESFSVNLGLKYKRVVNIGLIIVSLITSLVILTVGMLPFLGLIIP | 249 |
| Query: | 269 | NLISITKGDHMSSTILETSLLGACIVMICDLFGRLVIFPYEVSIGVTLGVLGSAFFLISI | 328 |
| | | N++SI +GD++ S++ T LLGA V+ CD+ GR++IFPYE+SIG+ +G++GS FL + | |
| Sbjct: | 250 | NIVSIYRGDNLKSSLPHTVLLGAVFVLFCDILGRIIIFPYEISIGLMVGIIGSGIFLFML | 309 |
| Query: | 329 | IRNE | 332 |
| | | +R + | |
| Sbjct: | 310 | LRRK | 313 |

[3643] There is also homology to SEQ ID 1940.

[3644] Based on this analysis, it was predicted that these proteins and their epitopes could be useful antigens for vaccines or diagnostics.

### EXAMPLE 624

[3645] A DNA sequence (GBSx0664) was identified in S. agalactiae <SEQ ID 1941> which encodes the amino acid sequence <SEQ ID 1942>. Analysis of this protein sequence reveals the following:

| Possible site: 35 | | | |
|---|---|---|---|
| >>> Seems to have no N-terminal signal sequence | | | |
| INTEGRAL | Likelihood = −0.90 | Transmembrane | 140-156 (140-156) |

----- Final Results -----
bacterial membrane --- Certainty = 0.1362 (Affirmative) < succ>
bacterial outside --- Certainty = 0.0000 (Not Clear) < succ>
bacterial cytoplasm --- Certainty = 0.0000 (Not Clear) < succ>

[3646] The protein has homology with the following sequences in the GENPEPT database:

| >GP: BAB06720 GB: AP001517 maltose transacetylase (maltose | | | |
|---|---|---|---|
| O-acetyltransferase) [Bacillus halodurans] | | | |
| Identities = 93/182 (51%), Positives = 125/182 (68%), Gaps = 2/182 (1%) | | | |
| Query: | 2 | TEKEKMLAGQYYRPSAPELRKDREVALKNMQAFNN--EDNSSKRNVILQKWFGATGKSIH | 59 |
| | | TEKEKMLAG+ Y+ PEL KDRE A + + FN E +R ++++ FG+ G+S++ | |
| Sbjct: | 3 | TEKEKMLAGERYKAWDPELVKDRERARRLTRLFNQTTETEEKQRTELIKELFGSMGESVN | 62 |
| Query: | 60 | MEQRFVCDYGCNIYVGENFYANFNQTFLDVCEIRIGDNCMFGPNCQLLTPLHPLDPIERN | 119 |
| | | +E F CDYG NI+VG NF+ANF+ LDVCE+RIG NCM P + T HP+ P+ER | |
| Sbjct: | 63 | IEPTFRCDYGYNIHVGNNFFANFDCVILDVCEVRIGANCMLAPGVHIYTATHPIHPLERV | 122 |
| Query: | 120 | SGLEYGAPIQIGNNVWLGGGVTILPGVVLGDNVVVGAGSVVTKSFENNVVIAGNPAKIIKKL | 182 |
| | | G EYG P+ I NNVW+GG + PGV +G+N V+ +GSVVTK NVV+AGNPAK+I+ + | |
| Sbjct: | 123 | EGPEYGKPVTIRNNVWIGGRAIVNPGVTIGNNAVIASGSVVTKDVPENVVVAGNPAKVIQTI | 184 |

[3647] A related DNA sequence was identified in S. pyogenes <SEQ ID 1943> which encodes the amino acid sequence <SEQ ID 1944>. Analysis of this protein sequence reveals the following:

Possible site: 61
>>> Seems to have no N-terminal signal sequence
----- Final Results -----
bacterial cytoplasm --- Certainty = 0.4052 (Affirmative) < succ>
bacterial membrane --- Certainty = 0.0000 (Not Clear) < succ>
bacterial outside --- Certainty = 0.0000 (Not Clear) < succ>

[3648] An alignment of the GAS and GBS proteins is shown below:

| Identities = 68/188 (36%), Positives = 101/188 (53%), Gaps = 13/188 (6%) | | | |
|---|---|---|---|
| Query: | 2 | TEKEKMLAGQYYRPSAPELRKDREVALKNMQAFN--------NEDNSSKRNVILQKWFGA | 53 |
| | | TE +KM G++Y + D E+ K M A + +R+ +L + FG | |
| Sbjct: | 3 | TEFDKMTRGEWY-----DANFDSELIQKRMMAQDLCFDLNQLKPSREEERSAVLNQLFGQ | 57 |
| Query: | 54 | TGKSIHMEQRFVCDYGCNIYVGENFYANFNQTFLDVCEIRIGDNCMFGPNCQLLTPLHPL | 113 |
| | | + + + + F+CDYG NI G+N + N N F+D +I +GDN GP+ T HPL | |
| Sbjct: | 58 | SFEGLVLLSPFICDYGKNITFGKNCFINSNCYFMDGAKIALGDNVFVGPSTGFYTANHPL | 117 |
| Query: | 114 | DPIERNSGLEYGAPIQIGNNVWLGGGVTILPGVVLGDNVVVGAGSVVTKSFENNVVIAGN | 173 |
| | | D RN GLE PI IG+NVW G V ++PGV +G V+ +GSVVT N + AG | |
| Sbjct: | 118 | DYKRRNEGLEKALPITIGDNVWFGANVNVMPGVTIGSGCVIASGSVVTHDIPVNSLAAGV | 177 |
| Query: | 174 | PAKIIKKL | 181 |
| | | P ++++K+ | |
| Sbjct: | 178 | PCQVVRKI | 185 |

[3649] Based on this analysis, it was predicted that these proteins and their epitopes could be useful antigens for vaccines or diagnostics.

### EXAMPLE 625

[3650] A DNA sequence (GBSx0665) was identified in S. agalactiae <SEQ ID 1945> which encodes the amino acid sequence <SEQ ID 1946>. This protein is predicted to be ribonuclease H (rnhB-2). Analysis of this protein sequence reveals the following:

| Possible site: 32 | | | |
|---|---|---|---|
| >>> Seems to have no N-terminal signal sequence | | | |
| INTEGRAL | Likelihood = −0.16 | Transmembrane | 79-95 (79-95) |

----- Final Results -----
bacterial membrane --- Certainty = 0.1065 (Affirmative) < succ>
bacterial outside --- Certainty = 0.0000 (Not Clear) < succ>
bacterial cytoplasm --- Certainty = 0.0000 (Not Clear) < succ>

[3651] A related GBS nucleic acid sequence <SEQ ID 9823> which encodes amino acid sequence <SEQ ID 9824> was also identified.

[3652] The protein has homology with the following sequences in the GENPEPT database:

| >GP: CAB13479 GB: Z99112 ribonuclease H [Bacillus subtilis] | | | |
|---|---|---|---|
| Identities = 128/249 (51%), Positives = 168/249 (67%) | | | |
| Query: | 4 | TIKEIKAILETIVDLKDKRWQEYQTDSRAGVQKAILQRKKNIQSDLDEEARLEQMLVYEK | 63 |
| | | T+K+IK L+ + D +D + + D R VQ + Q K + + + M YE+ | |
| Sbjct: | 5 | TVKDIKDRLQEVKDAQDPFIAQCENDPRKSVQTLVEQWLKKQAKEKALKEQWVNMTSYER | 64 |
| Query: | 64 | KLYIEHINLIAGIDEVGRGPLAGPVVAAAVILPPNCKIKHLNDSKKIPKKKHQEIYQNIL | 123 |
| | | + LIAG+DEVGRGPLAGPVVA+AVILP C+I L DSKK+ +KK +E Y+ I+ | |
| Sbjct: | 65 | LARNKGFRLIAGVDEVGRGPLAGPVVASAVILPEECEILGLTDSKKLSEKKREEYYELIM | 124 |
| Query: | 124 | DQALAVGIGIQDSQCIDDINIYEATKHAMIDAVSHLSVAPEHLLIDAMVLDLSIPQTKII | 183 |
| | | +ALAVGIGI ++ ID+INIYEA+K AM+ A+ LS P++LL+DAM L L Q II | |
| Sbjct: | 125 | KEALAVGIGIVEATVIDEINIYEASKMAMVKAIQDLSDTPDYLLVDAMTLPLDTAQASII | 184 |
| Query: | 184 | KGDANSLSIAAASIVAKVTRDKIMSDYDSTYPGYAFSKNAGYGTKEHLEGLQKYGITPIH | 243 |
| | | KGDA S+SIAA + +AKVTRD++MS Y TYP Y F KN GYGTKEHLE L YG T +H | |
| Sbjct: | 185 | KGDAKSVSIAAGACIAKVTRDRMMSAYAETYPMYGFEKNKGYGTKEHLEALAAYGPTELH | 244 |
| Query: | 244 | RKSFEPIKS | 252 |
| | | RK+F P++S | |
| Sbjct: | 245 | RKTFAPVQS | 253 |

[3653] A related DNA sequence was identified in S. pyogenes <SEQ ID 1947> which encodes the amino acid sequence <SEQ ID 1948>. Analysis of this protein sequence reveals the following:

| Possible site: 50 | | | | |
|---|---|---|---|---|
| >>> Seems to have no N-terminal signal sequence | | | | |
| | INTEGRAL | Likelihood = −0.53 | Transmembrane | 79-95 (79-95) |

```
----- Final Results -----
                              bacterial membrane --- Certainty = 0.1213(Affirmative) < succ>
                                bacterial outside --- Certainty = 0.0000(Not Clear) < succ>
                            bacterial cytoplasm --- Certainty = 0.0000(Not Clear) < succ>
```

[3654] The protein has homology with the following sequences in the databases:

| >GP: CAB13479 GB: Z99112 ribonuclease H [Bacillus subtilis] | | | |
|---|---|---|---|
| Identities = 130/252 (51%), Positives = 176/252 (69%), Gaps = 3/252 (1%) | | | |
| Query: | 4 | SIKAIKESLEAVTSLLDPLFQELATDTRSGVQKALKSRQKVIQAELAEEERLEAMLSYEK | 63 |
| | | ++K IK+ L+ V DP + D R VQ ++ K E A +E+ M SYE+ | |
| Sbjct: | 5 | TVKDIKDRLQEVKDAQDPFIAQCENDPRKSVQTLVEQWLKKQAKEKALKEQWVNMTSYER | 64 |
| Query: | 64 | ALYKKGYKAIAGIDEVGRGPLAGPVVAACVILPKYCKIKGLNDSKKIPKAKHETIYQAVK | 123 |
| | | KG++ IAG+DEVGRGPLAGPVVA+ VILP+ C+I GL DSKK+ + K E Y+ + | |
| Sbjct: | 65 | LARNKGFRLIAGVDEVGRGPLAGPVVASAVILPEECEILGLTDSKKLSEKKREEYYELIM | 124 |
| Query: | 124 | EKALAIGIGIIDNQLIDEVNIYEATKLAMLEAIKQLEGQLTQPDYLLIDAMTLDIAISQQ | 183 |
| | | ++ALA+GIGI++ +IDE+NIYEA+K+AM++AI+ L PDYLL+DAMTL + +Q | |
| Sbjct: | 125 | KEALAVGIGIVEATVIDEINIYEASKMAMVKAIQDLS---DTPDYLLVDAMTLPLDTAQA | 181 |
| Query: | 184 | SILKGDANSLSIAAASIVAKVTRDQMMANYDRIFPGYDFAKNAGYGTKEHLQGLKAYGIT | 243 |
| | | SI+KGDA S+SIAA + +AKVTRD+MM+ Y +P Y F KN GYGTKEHL+ L AYG T | |
| Sbjct: | 182 | SIIKGDAKSVSIAAGACIAKVTRDRMMSAYAETYPMYGFEKNKGYGTKEHLEALAAYGPT | 241 |
| Query: | 244 | PIHRKSFEPVKS | 255 |
| | | +HRK+F PV+S | |
| Sbjct: | 242 | ELHRKTFAPVQS | 253 |

[3655] An alignment of the GAS and GBS proteins is shown below:

| Identities = 168/256 (65%), Positives = 203/256 (78%), | | | |
|---|---|---|---|
| Gaps = 3/256 (1%) | | | |
| Query: | 1 | MMATIKEIKAILETIVDLKDKRWQEYQTDSRAGVQKAILQRKKNIQSDLDEEARLEQMLV | 60 |
| | | M +IK IK LE + L D +QE TD+R+GVQKA+ R+K IQ++L EE RLE ML | |
| Sbjct: | 1 | MPTSIKAIKESLEAVTSLLDPLFQELATDTRSGVQKALKSRQKVIQAELAEEERLEAMLS | 60 |
| Query: | 61 | YEKKLYIEHINLIAGIDEVGRGPLAGPVVAAAVILPPNCKIKHLNDSKKIPKKKHQEIYQ | 120 |
| | | YEK LY + IAGIDEVGRGPLAGPVVAA VILP CKIK LNDSKKIPK KH+ IYQ | |
| Sbjct: | 61 | YEKALYKKGYKAIAGIDEVGRGPLAGPVVAACVILPKYCKIKGLNDSKKIPKAKHETIYQ | 120 |
| Query: | 121 | NILDQALAVGIGIQDSQCIDDINIYEATKHAMIDAVSHLS---VAPEHLLIDAMVLDLSI | 177 |
| | | + ++ALA+GIGI D+Q ID++NIYEATK AM++A+ L P++LLIDAM LD++I | |
| Sbjct: | 121 | AVKEKALAIGIGIIDNQLIDEVNIYEATKLAMLEAIKQLEGQLTQPDYLLIDAMTLDIAI | 180 |
| Query: | 178 | PQTKIIKGDANSLSIAAASIVAKVTRDKIMSDYDSTYPGYAFSKNAGYGTKEHLEGLQKY | 237 |
| | | Q I+KGDANSLSIAAASIVAKVTRD++M++YD +PGY F+KNAGYGTKEHL+GL+ Y | |
| Sbjct: | 181 | SQQSILKGDANSLSIAAASIVAKVTRDQMMANYDRIFPGYDFAKNAGYGTKEHLQGLKAY | 240 |
| Query: | 238 | GITPIHRKSFEPIKSM | 253 |
| | | GITPIHRKSFEP+KSM | |
| Sbjct: | 241 | GITPIHRKSFEPVKSM | 256 |

[3656] Based on this analysis, it was predicted that these proteins and their epitopes could be useful antigens for vaccines or diagnostics.

### EXAMPLE 626

[3657] A DNA sequence (GBSx0666) was identified in S. agalactiae <SEQ ID 1949> which encodes the amino acid sequence <SEQ ID 1950>. Analysis of this protein sequence reveals the following:

```
Possible site: 16
>>> Seems to have no N-terminal signal sequence
----- Final Results -----
                            bacterial cytoplasm --- Certainty = 0.1865(Affirmative) < succ>
                              bacterial membrane --- Certainty = 0.0000(Not Clear) < succ>
                                bacterial outside --- Certainty = 0.0000(Not Clear) < succ>
```

[3658] The protein has no significant homology with any sequences in the GENPEPT database.

[3659] No corresponding DNA sequence was identified in S. pyogenes.

[3660] Based on this analysis, it was predicted that this protein and its epitopes, could be useful antigens for vaccines or diagnostics.

### EXAMPLE 627

[3661] A DNA sequence (GBSx0667) was identified in S. agalactiae <SEQ ID 1951> which encodes the amino acid sequence <SEQ ID 1952>. Analysis of this protein sequence reveals the following:

```
Possible site: 14
>>> Seems to have no N-terminal signal sequence
----- Final Results -----
                            bacterial cytoplasm --- Certainty = 0.3034(Affirmative) < succ>
                              bacterial membrane --- Certainty = 0.0000(Not Clear) < succ>
                                bacterial outside --- Certainty = 0.0000(Not Clear) < succ>
```

[3662] The protein has homology with the following sequences in the GENPEPT database:

| >GP: BAB06195 GB: AP001515 unknown conserved protein [Bacillus halodurans] | | | |
|---|---|---|---|
| Identities = 140/281 (49%), Positives = 195/281 (68%), Gaps = 5/281 (1%) | | | |
| Query: | 3 | TIQWFPGHMSKARRQVQENIKHVDFVTILVDARLPLSSQNPMLTKIVGDKPKLMILNKAD | 62 |
| | | TIQWFPGHM+KARR+V E +K +D V L+DAR+PLSS+NPM+ +IV KP+L++LNK D | |
| Sbjct: | 2 | TIQWFPGHMAKARREVTEKLKLIDVVIELLDARVPLSSRNPMMDEIVAHKPRLVLLNKDD | 61 |
| Query: | 63 | LADPIRTKEWRDFYESQGLKTLAINSKEQSTVKKVTDIAKILMSDKIANLRGRGIQKETL | 122 |
| | | LADP +TKEW F+E G L IN++ V +++ + L I R +G++ + | |
| Sbjct: | 62 | LADPSKTKEWTRFFEEGGATVLPINAQTGQGVSRISPACQTLAQALIEKQRAKGMKPRAI | 121 |
| Query: | 123 | RTMIIGIPNAGKSTLMNRLAGKKIAVVGNKPGVTKGQQWLKSNKELEILDTPGILWPKFE | 182 |
| | | R MI+GIPN GKSTL+NRLA K+IA VG++PG+TK QQW+K KELE+LDTPGILWPKF+ | |
| Sbjct: | 122 | RAMILGIPNVGKSTLINRLASKRIAKVGDRPGITKQQQWIKVGKELELLDTPGILWPKFD | 181 |
| Query: | 183 | DELVGLKLALTGAIKDQLLPMDEVTIFGLNYFKTYYPDRLKERFKSINLEDEAPEIIMAL | 242 |
| | | D+ G +LA TGAIKD+LL +V +F L Y + YPDRL +R+K L ++ + A+ | |
| Sbjct: | 182 | DQATGFRLAATGAIKDELLDFQDVALFVLRYMREMYPDRLMDRYKLNELPEDGVTLFDAI | 241 |
| Query: | 243 | TQKLGY-----RDDYDRFYNLFVKEVRDGKLGRYTLDIVGE | 278 |
| | | +K G+ DYD+ + ++E+R G LGR TL++ G+ | |
| Sbjct: | 242 | GKKRGHLLSGGYIDYDKTAEMILRELRAGTLGRITLEVPGK | 282 |

[3663] A related DNA sequence was identified in S. pyogenes <SEQ ID 1953> which encodes the amino acid sequence <SEQ ID 1954>. Analysis of this protein sequence reveals the following:

```
Possible site: 14
>>> Seems to have no N-terminal signal sequence
----- Final Results -----
                            bacterial cytoplasm --- Certainty = 0.2688(Affirmative) < succ>
                              bacterial membrane --- Certainty = 0.0000(Not Clear) < succ>
                                bacterial outside --- Certainty = 0.0000(Not Clear) < succ>
```

[3664] An alignment of the GAS and GBS proteins is shown below:

| Identities = 247/282 (87%), Positives = 265/282 (93%) | | | |
|---|---|---|---|
| Query: | 1 | MATIQWFPGHMSKARRQVQENIKHVDFVTILVDARLPLSSQNPMLTKIVGDKPKLMILNK | 60 |
| | | MA IQWFPGHMSKARRQVQEN+KHVDFVTILVDARLPLSSQNPMLTKIVGDKPKLMILNK | |
| Sbjct: | 1 | MAMIQWFPGHMSKARRQVQENVKHVDFVTILVDARLPLSSQNPMLTKIVGDKPKLMILNK | 60 |
| Query: | 61 | ADLADPIRTKEWRDFYESQGLKTLAINSKEQSTVKKVTDIAKILMSDKIANLRGRGIQKE | 120 |
| | | ADLAD RTKEW+ +YESQG+KTLAINSKEQSTVKKVT+ AK LM+DKI LR RGIQKE | |
| Sbjct: | 61 | ADLADATRTKEWKAYYESQGIKTLAINSKEQSTVKKVTEAAKELMADKIQRLRERGIQKE | 120 |
| Query: | 121 | TLRTMIIGIPNAGKSTLMNRLAGKKIAVVGNKPGVTKGQQWLKSNKELEILDTPGILWPK | 180 |
| | | TLRTMIIGIPNAGKSTLMNRLAGKKIAVVGNKPGVTKGQQWLKSNKELEILDTPGILWPK | |
| Sbjct: | 121 | TLRTMIIGIPNAGKSTLMNRLAGKKIAVVGNKPGVTKGQQWLKSNKELEILDTPGILWPK | 180 |
| Query: | 181 | FEDELVGLKLALTGAIKDQLLPMDEVTIFGLNYFKTYYPDRLKERFKSINLEDEAPEIIM | 240 |
| | | FEDELVGLKLALTGAIKDQLLPMDEVTIFGLNYF+ YYP+RL +RFK+I LE+EAPEIIM | |
| Sbjct: | 181 | FEDELVGLKLALTGAIKDQLLPMDEVTIFGLNYFREYYPNRLTKRFKNIPLEEEAPEIIM | 240 |
| Query: | 241 | ALTQKLGYRDDYDRFYNLFVKEVRDGKLGRYTLDIVGEHDGN | 282 |
| | | LT++LG++DDYDRFY LFVKEVRDGKLG+YTLD VG+ D + | |
| Sbjct: | 241 | TLTRQLGFKDDYDRFYTLFVKEVRDGKLGQYTLDQVGDMDAD | 282 |

[3665] Based on this analysis, it was predicted that these proteins and their epitopes could be useful antigens for vaccines or diagnostics.

### EXAMPLE 628

[3666] A DNA sequence (GBSx0668) was identified in S. agalactiae <SEQ ID 1955> which encodes the amino acid sequence <SEQ ID 1956>. Analysis of this protein sequence reveals the following:

```
Possible site: 24
>>> Seems to have a cleavable N-term signal seq.
----- Final Results -----
                                bacterial outside --- Certainty = 0.3000(Affirmative) < succ>
                              bacterial membrane --- Certainty = 0.0000(Not Clear) < succ>
                            bacterial cytoplasm --- Certainty = 0.0000(Not Clear) < succ>
```

[3667] A related GBS nucleic acid sequence <SEQ ID 9825> which encodes amino acid sequence <SEQ ID 9826> was also identified.

[3668] The protein has homology with the following sequences in the GENPEPT database:

| >GP: CAB12129 GB: Z99105 similar to hypothetical proteins [Bacillus | | | |
|---|---|---|---|
| subtilis] | | | |
| Identities = 69/173 (39%), Positives = 102/173 (58%), Gaps = 13/173 (7%) | | | |
| Query: | 29 | DKAKEKASV-----IKQASQTSQTSKKEVLQKKT----YPNLNKYSNLEIHVSSTRQTMT | 79 |
| | | D A+E AS+ ++ + +T+K + K YP++ K ++ I V+ Q | |
| Sbjct: | 22 | DHAEEHASINTKKTVENITDVRKTAKTSIDWTKPSGGEYPDI-KQKHVWIDVNVKEQKAY | 80 |
| Query: | 80 | ITSNDKVIFKTIVSTG---AKESPTPKGTFVIEPERGDFFYNASSKEGAYYWVSFKEHGI | 136 |
| | | I I+ ++S+G K+ TPKGTF +EPERG++F++ +EGA YWVS+K HG | |
| Sbjct: | 81 | IKEGSNTIYTMMISSGLDQTKDDATPKGTFYVEPERGEWFFSEGYQEGAEYWVSWKNHGE | 140 |
| Query: | 137 | YLFHSVPTDQQGNEIPEEAKQLGKAASHGCVRMSRADAKWFYENIPQGTTVTI | 189 |
| | | +LFHSVP + I EA++LG SHGC+R++ DAKW YENIP+ T V I | |
| Sbjct: | 141 | FLFHSVPMTKDQKVIKTEAEKLGTKVSHGCIRLTIPDAKWVYENIPEHTKVVI | 193 |

[3669] No corresponding DNA sequence was identified in S. pyogenes.

[3670] SEQ ID 1956 (GBS644) was expressed in E. coli as a GST-fusion product. SDS-PAGE analysis of total cell extract is shown in FIG. 130 (lane 2 & 3; MW 49.6 kDa) and in FIG. 186 (lane 3; MW 50 kDa). It was also expressed in E. coli as a His-fusion product. SDS-PAGE analysis of total cell extract is shown in FIG. 130 (lane 5-7; MW 24.6 kDa) and in FIG. 177 (lane 3; MW 25 kDa).

[3671] GBS644-GST was purified as shown in FIG. 236, lane 9.

[3672] Based on this analysis, it was predicted that these proteins and their epitopes could be useful antigens for vaccines or diagnostics.

### EXAMPLE 629

[3673] A DNA sequence (GBSx0669) was identified in S. agalactiae <SEQ ID 1957> which encodes the amino acid sequence <SEQ ID 1958>. This protein is predicted to be carbon starvation protein A. Analysis of this protein sequence reveals the following:

| Possible site: 19 | | | |
|---|---|---|---|
| >>> Seems to have an uncleavable N-term signal seq | | | |
| INTEGRAL | Likelihood = −11.25 | Transmembrane | 129-145 (122-151) |
| INTEGRAL | Likelihood = −9.92 | Transmembrane | 316-332 (305-342) |
| INTEGRAL | Likelihood = −6.42 | Transmembrane | 164-180 (157-181) |
| INTEGRAL | Likelihood = −5.73 | Transmembrane | 443-459 (441-466) |
| INTEGRAL | Likelihood = −5.57 | Transmembrane | 416-432 (414-435) |
| INTEGRAL | Likelihood = −4.88 | Transmembrane | 190-206 (183-209) |
| INTEGRAL | Likelihood = −4.83 | Transmembrane | 78-94 (70-95) |
| INTEGRAL | Likelihood = −3.13 | Transmembrane | 362-378 (359-379) |
| INTEGRAL | Likelihood = −2.34 | Transmembrane | 228-244 (227-245) |
| INTEGRAL | Likelihood = −2.02 | Transmembrane | 2-18 (1-18) |
| INTEGRAL | Likelihood = −1.28 | Transmembrane | 393-409 (393-410) |

----- Final Results -----
bacterial membrane --- Certainty = 0.5501 (Affirmative) < succ>
bacterial outside --- Certainty = 0.0000 (Not Clear) < succ>
bacterial cytoplasm --- Certainty = 0.0000 (Not Clear) < succ>

[3674] The protein has homology with the following sequences in the GENPEPT database:

| >GP: AAF93852 GB: AE004154 carbon starvation protein A, putative | | | |
|---|---|---|---|
| [Vibrio cholerae] | | | |
| Identities = 220/470 (46%), Positives = 311/470 (65%), Gaps = 16/470 (3%) | | | |
| Query: | 1 | MVTFLGGVALLIVGYFTYGRYIEKNFQIDENRQTPAEALRDGYDFVPMPKWKNGMIELLN | 60 |
| | | M+ FL VA L+ GYF YG ++EK F I+E RQTPA DG D+VPM K +++LLN | |
| Sbjct: | 1 | MLWFLTCVAALVGGYFIYGAFVEKVFGINEKRQTPAHTKTDGVDYVPMSTPKVYLVQLLN | 60 |
| Query: | 61 | IAGTGPIFGPILGALYGPVAYIWIVLGCIFAGAVHDYMIGMISLRNNGAYLPELASRYLG | 120 |
| | | IAG GPIFGPI+GALYGP A +WIV+GCIFAGAVHDY GM+S+RN GA +P + RYLG | |
| Sbjct: | 61 | IAGVGPIFGPIMGALYGPAAMLWIVVGCIFAGAVHDYFSGMLSIRNGGASVPSITGRYLG | 120 |
| Query: | 121 | KSMKHVINIFSMLLLILVATVFVVTPANLILSILPAG---TLSLPWIIGLIFVYYLISTV | 177 |
| | | KH +NIF+++LL+LV VFV PA +I +++ T+S+ ++ +IF YY+++T+ | |
| Sbjct: | 121 | NGAKHFMNIFAIVLLLLVGVVFVSAPAGMITNLINQQTDFTVSMTTMVVIIFAYYILATI | 180 |
| Query: | 178 | LPIDKALGKVYPVF-------CVILMVSTAAVGFRLLTGGFDMPNLTFETFKNMHPAGLG | 230 |
| | | +P+DK +G+ YP+F V LM + A + GGF++ ++ KN++P + | |
| Sbjct: | 181 | VPVDKIIGRFYPLFGALLIFMSVGLMTAIAFSSEHQVLGGFEISDMV----KNLNPNDMP | 236 |
| Query: | 231 | IFPALFFTISCGAISGFHATQAPMVSRTTVNEREGRFTFYGMMIAEGVIAMIWAGASMSL | 290 |
| | | ++PALF TI+CGAISGFHATQ+P+++R NE+ GRF FYG MI EG+IA+IW ++S | |
| Sbjct: | 237 | LWPALFITIACGAISGFHATQSPLMARCMENEKNGRFVFYGAMIGEGIIALIWCTVALSF | 296 |
| Query: | 291 | FKG-QNLYEMIAAGTPSAVVNQVMLMLLGSVIGTIAIIGVIVLPVSSGLSAFRSLRTIVA | 349 |
| | | F + L E + G P VV LLG G IA +GV++LP++SG +AFRS R I+A | |
| Sbjct: | 297 | FGSLEALSEAVKNGGPGNVVYGASFGLLGVFGGVIAFLGVVILPITSGDTAFRSSRLILA | 356 |
| Query: | 350 | DYIHVKQDTLPKIFAVTIPLYVISFVLTHVDFNLLWRYFNWANQVTAVIGLLVATRYLIL | 409 |
| | | +Y +++Q TL + +PL+VI VLT VDF ++WRYF +ANQ TAV+ L AT YL+ | |
| Sbjct: | 357 | EYFNMEQKTLRNRLLMAVPLFVIGAVLTQVDFGIIWRYFGFANQATAVMMLWTATAYLMR | 416 |
| Query: | 410 | KRRNYWVTFVPAMFMLYAVVVYIL-SQPIGFNMGLGILTYSLALVLTGIL | 458 |
| | | + +W+ VPA+FM + +IL S +GF + + I T + L G L | |
| Sbjct: | 417 | HNKLHWICTVPALFMTTVCISFILNSSTLGFGLPMQISTIAGVLASLGAL | 466 |

[3675] No corresponding DNA sequence was identified in S. pyogenes.

[3676] A related GBS gene <SEQ ID 8623> and protein <SEQ ID 8624> were also identified. Analysis of this protein sequence reveals the following:

| Lipop: Possible site: −1 Crend: 0 | | | |
|---|---|---|---|
| McG: Discrim Score: 6.07 | | | |
| GvH: Signal Score (−7.5): −3.54 | | | |
| Possible site: 19 | | | |
| >>> Seems to have an uncleavable N-term signal seq | | | |
| ALOM program | count: 11 | value: −11.25 | threshold: 0.0 |

| | | | |
|---|---|---|---|
| INTEGRAL | Likelihood = −11.25 | Transmembrane | 129-145 (122-157) |
| INTEGRAL | Likelihood = −9.92 | Transmembrane | 316-332 (305-342) |
| INTEGRAL | Likelihood = −6.42 | Transmembrane | 164-180 (157-181) |
| INTEGRAL | Likelihood = −5.57 | Transmembrane | 416-432 (414-435) |
| INTEGRAL | Likelihood = −4.88 | Transmembrane | 190-206 (183-209) |
| INTEGRAL | Likelihood = −4.83 | Transmembrane | 78-94 (70-95) |
| INTEGRAL | Likelihood = −4.67 | Transmembrane | 445-461 (441-463) |
| INTEGRAL | Likelihood = −3.13 | Transmembrane | 362-378 (359-379) |
| INTEGRAL | Likelihood = −2.34 | Transmembrane | 228-244 (227-245) |
| INTEGRAL | Likelihood = −2.02 | Transmembrane | 2-18 (1-18) |
| INTEGRAL | Likelihood = −1.28 | Transmembrane | 393-409 (393-410) |

| | | |
|---|---|---|
| PERIPHERAL | Likelihood = 0.21 | 272 |

modified ALOM score: 2.75
*** Reasoning Step: 3
----- Final Results -----
bacterial membrane --- Certainty = 0.5501 (Affirmative) < succ>
bacterial outside --- Certainty = 0.0000 (Not Clear) < succ>
bacterial cytoplasm --- Certainty = 0.0000 (Not Clear) < succ>

[3677] The protein has homology with the following sequences in the databases:

[chemical structure]

[3678] Based on this analysis, it was predicted that these proteins and their epitopes could be useful antigens for vaccines or diagnostics.

### EXAMPLE 630

[3679] A DNA sequence (GBSx0670) was identified in S. agalactiae <SEQ ID 1959> which encodes the amino acid sequence <SEQ ID 1960>. This protein is predicted to be lytR (lytT). Analysis of this protein sequence reveals the following:

| Possible site: 30 | | | |
|---|---|---|---|
| >>> Seems to have no N-terminal signal sequence | | | |
| INTEGRAL | Likelihood = −0.80 | Transmembrane | 27-43 (27-43) |

----- Final Results -----
bacterial membrane --- Certainty = 0.1319 (Affirmative) < succ>
bacterial outside --- Certainty = 0.0000 (Not Clear) < succ>
bacterial cytoplasm --- Certainty = 0.0000 (Not Clear) < succ>

[3680] The protein has homology with the following sequences in the GENPEPT database:

| >GP: AAB48183 GB: L42945 lytR [Staphylococcus aureus] | | | |
|---|---|---|---|
| Identities = 93/245 (37%), Positives = 150/245 (60%), Gaps = 3/245 (1%) | | | |
| Query: | 1 | MKVLVVDDEPVARNELIYLLNKYDSNLVIAEAHDMATALAILLRETFDVALLDIHLRDDS | 60 |
| | | MK L++DDEP+ARNEL YLLN+ I EA ++ L LL +D+ LD++L D++ | |
| Sbjct: | 1 | MKALIIDDEPLARNELTYLLNEIGGFEEINEAENVKETLEALLINQYDIIFLDVNLMDEN | 60 |
| Query: | 61 | GLQLAEYINKMPKPPLLIFATAYDQYAIQAFEHDARDYLLKPYDFDRLKQAMDRVKGALS | 120 |
| | | G++L I KM +PP +IFATA+DQYA+QAFE +A DY+LKP+ R++QA+++V+ + | |
| Sbjct: | 61 | GIELGAKIQKMKEPPAIIFATAHDQYAVQAFELNATDYILKPFGQKRIEQAVNKVRATKA | 120 |
| Query: | 121 | TSTIIESVTSGPL---FKQQYPLTVEDRIYLVSADDILLIEAMQGKLIIQTPDKNYEIDG | 177 |
| | | S + + F Q P+ ++D+I+++ +I+ I G I T + YE | |
| Sbjct: | 121 | KDDNNASAIANDMSANFDQSLPVEIDDKIHMLKQQNIIGIGTHNGITTIHTTNHKYETTE | 180 |
| Query: | 178 | SLQQWQDKLPSSQFVRVHRSYIVNINAIKTIEPWFNQTLQLHLCNKITVPVSRANVKPLK | 237 |
| | | L +++ +L + F+R+HRSYI+N IK ++ WFN T + L N + + V R+ +K K | |
| Sbjct: | 181 | PLNRYEKRLNPTYFIRIHRSYIINTKHIKEVQQWFNYTYMVILTNGVKMQVGRSFMKDFK | 240 |
| Query: | 238 | QMLGI | 242 |
| | | +G+ | |
| Sbjct: | 241 | ASIGL | 245 |

[3681] There is also homology to SEQ ID 460.

[3682] SEQ ID 1960 (GBS399) was expressed in E. coli as a His-fusion product. SDS-PAGE analysis of total cell extract is shown in FIG. 75 (lane 7; MW 30.4 kDa). It was also expressed in E. coli as a GST-fusion product. SDS-PAGE analysis of total cell extract is shown in FIG. 84 (lane 2; MW 55 kDa). Purified GBS399-GST is shown in FIG. 217, lane 9; purified GBS399d-GST is shown in FIG. 236, lane 3.

[3683] Based on this analysis, it was predicted that this protein and its epitopes, could be useful antigens for vaccines or diagnostics.

### EXAMPLE 631

[3684] A DNA sequence (GBSx0671) was identified in S. agalactiae <SEQ ID 1961> which encodes the amino acid sequence <SEQ ID 1962>. Analysis of this protein sequence reveals the following:

| Possible site: 51 | | | |
|---|---|---|---|
| >>> Seems to have a cleavable N-term signal seq. | | | |
| INTEGRAL | Likelihood = −7.59 | Transmembrane | 95-111 (86-116) |
| INTEGRAL | Likelihood = −5.95 | Transmembrane | 155-171 (152-176) |
| INTEGRAL | Likelihood = −2.28 | Transmembrane | 189-205 (187-206) |
| INTEGRAL | Likelihood = −1.49 | Transmembrane | 122-138 (121-138) |

----- Final Results -----
bacterial membrane --- Certainty = 0.4036 (Affirmative) < succ>
bacterial outside --- Certainty = 0.0000 (Not Clear) < succ>
bacterial cytoplasm --- Certainty = 0.0000 (Not Clear) < succ>

[3685] The protein has homology with the following sequences in the GENPEPT database:

| >GP: AAB48182 GB: L42945 lytS [Staphylococcus aureus] | | | |
|---|---|---|---|
| Identities = 264/570 (46%), Positives = 389/570 (67%), Gaps = 2/570 (0%) | | | |
| Query: | 1 | MTLFLIMMERAGLIILLAYAFVHIPFIKQTLKQPELKKHQYILLILFSLFAIISNFTGVE | 60 |
| | | ++L ++++ER GLII+LAY ++IP+ K + + K ++ L I+FSLFA++SN TG+ | |
| Sbjct: | 2 | LSLTMLLLERVGLIIILAYVLMNIPYFKNLMNRRRTWKARWQLCIIFSLFALMSNLTGIV | 61 |
| Query: | 61 | IQSDLSIIPQTLNHIADQSSVANTRVLTIGVSGLIGGPIVGIIVGLLSVFVRYLQGGLAP | 120 |
| | | I S+ + D S+ANTRVLTIGV+GL+GGP VG+ VG++S R GG | |
| Sbjct: | 62 | IDHQHSLSGSVYFRLDDDVSLANTRVLTIGVAGLVGGPFVGLFVGVISGIFRVYMGGADA | 121 |
| Query: | 121 | HIYVISSLLIGLCSGLSGNYLRKNYNKIRVLDAMVVGFGMEILQMICILIFSVDFNQALR | 180 |
| | | +Y+ISS+ IG+ +G G ++ + + ++G ME++QM+ IL FS D A+ | |
| Sbjct: | 122 | QVYLISSIFIGIIAGYFGLQAQRRKRYPSIAKSAMIGIVMEMIQMLSILTFSHDKAYAVD | 181 |
| Query: | 181 | LVSFISMPMILSNTLGLGIFISIISSTQKLEEHAKAFQTHQVLELANLTLPYLRKGLTTE | 240 |
| | | L+S I++PMI+ N++G IF+SII T K E+ K QTH VL+L N T PY ++GL E | |
| Sbjct: | 182 | LISLIALPMIIVNSVGPAIFIMSIIIPTLKQEDQMKPVQTHDVLQLMNQTFPYFKEGLNRE | 241 |
| Query: | 241 | SCQPVAEIIHKHMDVSAVSLTSQSAILAYVGDGADHHLPNTQILTKLAKRAIDTGKVSVA | 300 |
| | | S Q +A II M VS+V++TS++ IL++VG G+DHH+P +ILT L+K + +GK+ | |
| Sbjct: | 242 | SAQQIAMIIKNLMKVSSVAITSKNEILSHVGGGSDHHIPTNEILTSLSKDVLKSGKLKEV | 301 |
| Query: | 301 | TDKSEIECDHKNCPLSSAIVIPLHIHDVIVGTLKLYFSDAQHMTYVDRQLAEGLGNIFST | 360 |
| | | K EI C H NCPL +AIVIPL +H IVGTLK+YF++ +T+V+RQLAEGL NIFS+ | |
| Sbjct: | 302 | HTKEEIGCSHPNCPLRAAIVIPLEMHGSIVGTLKMYFTNPNDLTFVERQLAEGLANIFSS | 361 |
| Query: | 361 | QLALGQAEEATRLLQDAEMKSLQAQVNPHFLFNALNTIYGLIRMDSEKARKLVQDFSKVI | 420 |
| | | Q+ LG+AE ++LL+DAE+KSLQAQV+PHF FN++N I L+R++SEKAR+L+ + S | |
| Sbjct: | 362 | QIELGEAETQSKLLKDAEIKSLQAQVSPHFFFNSINPISALVRINSEKARELLLELSYFF | 421 |
| Query: | 421 | RANLQRAKQNLIPLHDELEQVNAYLALEEARFPNMVAFNLDNQTNSDDNLMIPPFTLQVL | 480 |
| | | RANLQ +KQ+ I L EL QV AYL+LE+AR+P N++ + D +++PPF +Q+L | |
| Sbjct: | 422 | RANLQGSKQHTITLDKELSQVRAYLSLEQARYPGRFNININVEDKYRD-VLVPPFLIQIL | 480 |
| Query: | 481 | IENSYKHAFKHVNKNNQLKVTIARNN-DRLHIIVQDNGIGIPKEKLITLGKKTQISKQGS | 539 |
| | | +EN+ KHAF + + N + V++ + + IIVQDNG GI K+K+ LG+ + S+ G+ | |
| Sbjct: | 481 | VENAIKHAFTNRKQGNDIDVSVIKETATHVRIIVQDNGQGISKDKMHLLGETSVESESGT | 540 |
| Query: | 540 | GTAIENLVRRLNIIYDGQASLKFESNDSGT | 569 |
| | | G+A+ENL RL ++ A+L+FES SGT | |
| Sbjct: | 541 | GSALENLNLRLKGLFGKSAALQFESTSSGT | 570 |

[3686] A related DNA sequence was identified in S. pyogenes <SEQ ID 1963> which encodes the amino acid sequence <SEQ ID 1964>. Analysis of this protein sequence reveals the following:

| Possible site: 39 | | | |
|---|---|---|---|
| >>> Seems to have no N-terminal signal sequence | | | |
| INTEGRAL | Likelihood = −6.79 | Transmembrane | 283-299 (276-307) |
| INTEGRAL | Likelihood = −5.57 | Transmembrane | 27-43 (24-48) |

----- Final Results -----
bacterial membrane --- Certainty = 0.3718 (Affirmative) < succ>
bacterial outside --- Certainty = 0.0000 (Not Clear) < succ>
bacterial cytoplasm --- Certainty = 0.0000 (Not Clear) < succ>

[3687] The protein has homology with the following sequences in the databases:

| >GP: CAB54576 GB: AJ006396 histidine kinase [Streptococcus pneumoniae] | | | |
|---|---|---|---|
| Identities = 115/231 (49%), Positives = 159/231 (68%), Gaps = 7/231 (3%) | | | |
| Query: | 351 | MLASIKAYIDEVYVLEVEQRDAQMRALQSQINPHFLYNTLEYIRMYALSCQQEELADVIY | 410 |
| | | ML ++ I ++Y LE+ Q+DA MRALQ+QINPHF+YNTLE++RMYA+ Q+ELAD+IY | |
| Sbjct: | 1 | MLDRLEKNIHDIYQLELSQRDANMRALQAQINPHFMYNTLEFLRMYAVMQSQDELADIIY | 60 |
| Query: | 411 | AFASLLRNNISQDKMTTLKEELAFCEKYIYLYQMRYPDSFAYHVKIDESVADLAIPKFVI | 470 |
| | | F+SLLRNNIS ++ T LK+EL FC KY YL +RYP S AY KID + ++ IPKF + | |
| Sbjct: | 61 | EFSSLLRNNISDERETLLKQELEFCRKYSYLCMVRYPKSIAYGFKIDPELENMKIPKFTL | 120 |
| Query: | 471 | QPLVENYFVHGIDYSRHDNALSIKALDETDHLLIQVLDNGRGISQERLADMEKRLQ---- | 526 |
| | | QPLVENYF HG+D+ R DN +SIKAL + + I V+DNGRG+S E+LA++ ++L | |
| Sbjct: | 121 | QPLVENYFAHGVDHRRTDNVISIKALKQDGFVEILVVDNGRGMSAEKLANIREKLSQRYF | 180 |
| Query: | 527 | EHQTT---GNSSIGLQNVYLRLFHHFRDRVSWSMAKEPNGGFIIQIRIRKD | 574 |
| | | EHQ + SIG+ NV+ R +F DR + ++ G +I I+ + | |
| Sbjct: | 181 | EHQASYSDQRQSIGIVNVHERFVLYFGDRYAITIESAEQAGVQYRITIQDE | 231 |

[3688] An alignment of the GAS and GBS proteins is shown below:

| Identities = 59/180 (32%), Positives = 97/180 (53%), Gaps = 8/180 (4%) | | | |
|---|---|---|---|
| Query: | 375 | QDAEMKSLQAQVNPHFLFNALNTI--YGLIRMDSEKARKLVQDFSKVIRANLQRAKQNLI | 432 |
| | | +DA+M++LQ+Q+NPHFL+N L I Y L E A ++ F+ ++R N+ + K + | |
| Sbjct: | 370 | RDAQMRALQSQINPHFLYNTLEYIRMYALSCQQEELA-DVIYAFASLLRNNISQDK--MT | 426 |
| Query: | 433 | PLHDELEQVNAYLALEEARFPNMVAFNLDNQTNSDDNLMIPPFTLQVLIENSYKHAFKHV | 492 |
| | | L +EL Y+ L + R+P+ A+++ + D L IP F +Q L+EN + H + | |
| Sbjct: | 427 | TLKEELAFCEKYIYLYQMRYPDSFAYHVKIDESVAD-LAIPKFVIQPLVENYFVHGIDYS | 485 |
| Query: | 493 | NKNNQLKVTIARNNDRLHIIVQDNGIGIPKEKLITLGKKTQISKQ--GSGTAIENLVRRL | 550 |
| | | +N L + D L I V DNG GI +E+L + K+ Q + S ++N+ RL | |
| Sbjct: | 486 | RHDNALSIKALDETDHLLIQVLDNGRGISQERLADMEKRLQEHQTTGNSSIGLQNVYLRL | 545 |

[3689] Based on this analysis, it was predicted that these proteins and their epitopes could be useful antigens for vaccines or diagnostics.

### EXAMPLE 632

[3690] A DNA sequence (GBSx0672) was identified in S. agalactiae <SEQ ID 1965> which encodes the amino acid sequence <SEQ ID 1966>. Analysis of this protein sequence reveals the following:

Possible site: 24
>>> May be a lipoprotein
----- Final Results -----
bacterial membrane --- Certainty = 0.0000 (Not Clear) < succ>
bacterial outside --- Certainty = 0.0000 (Not Clear) < succ>
bacterial cytoplasm --- Certainty = 0.0000 (Not Clear) < succ>

[3691] A related GBS nucleic acid sequence <SEQ ID 9827> which encodes amino acid sequence <SEQ ID 9828> was also identified.

[3692] The protein has no significant homology with any sequences in the GENPEPT database.

[3693] No corresponding DNA sequence was identified in S. pyogenes.

[3694] Based on this analysis, it was predicted that these proteins and their epitopes could be useful antigens for vaccines or diagnostics.

### EXAMPLE 633

[3695] A DNA sequence (GBSx0673) was identified in S. agalactiae <SEQ ID 1967> which encodes the amino acid sequence <SEQ ID 1968>. Analysis of this protein sequence reveals the following:

| Possible site: 57 | | | |
|---|---|---|---|
| >>> Seems to have no N-terminal signal sequence | | | |
| INTEGRAL | Likelihood = −9.55 | Transmembrane | 52-68 (45-74) |
| INTEGRAL | Likelihood = −9.18 | Transmembrane | 83-99 (76-106) |
| INTEGRAL | Likelihood = −8.76 | Transmembrane | 126-142 (118-146) |
| INTEGRAL | Likelihood = −7.48 | Transmembrane | 174-190 (170-191) |
| INTEGRAL | Likelihood = −3.66 | Transifiembrane | 195-211 (193-212) |
| INTEGRAL | Likelihood = −1.28 | Transmembrane | 24-40 (24-40) |

----- Final Results -----
bacterial membrane --- Certainty = 0.4821 (Affirmative) < succ>
bacterial outside --- Certainty = 0.0000 (Not Clear) < succ>
bacterial cytoplasm --- Certainty = 0.0000 (Not Clear) < succ>

[3696] The protein has no significant homology with any sequences in the GENPEPT database.

[3697] No corresponding DNA sequence was identified in S. pyogenes.

[3698] A related GBS gene <SEQ ID 8625> and protein <SEQ ID 8626> were also identified. Analysis of this protein sequence reveals the following:

| Lipop: Possible site: −1 Crend: 8 | | | |
|---|---|---|---|
| McG: Discrim Score: −8.54 | | | |
| GvH: Signal Score (−7.5): −5.6 | | | |
| Possible site: 57 | | | |
| >>> Seems to have no N-terminal signal sequence | | | |
| ALOM program | count: 6 | value: −9.55 | threshold: 0.0 |

| | | | |
|---|---|---|---|
| INTEGRAL | Likelihood = −9.55 | Transmembrane | 52-68 (45-74) |
| INTEGRAL | Likelihood = −9.18 | Transmembrane | 83-99 (76-106) |
| INTEGRAL | Likelihood = −8.76 | Transmembrane | 126-142 (118-146) |
| INTEGRAL | Likelihood = −7.48 | Transmembrane | 174-190 (170-191) |
| INTEGRAL | Likelihood = −3.66 | Transmembrane | 195-211 (193-212) |
| INTEGRAL | Likelihood = −1.28 | Transmembrane | 24-40 (24-40) |

| | | |
|---|---|---|
| PERIPHERAL | Likelihood = 13.05 | 100 |

modified ALOM score: 2.41
*** Reasoning Step: 3
----- Final Results -----
bacterial membrane --- Certainty = 0.4821 (Affirmative) < succ>
bacterial outside --- Certainty = 0.0000 (Not Clear) < succ>
bacterial cytoplasm --- Certainty = 0.0000 (Not Clear) < succ>

[3699] Based on this analysis, it was predicted that these proteins and their epitopes could be useful antigens for vaccines or diagnostics.

### EXAMPLE 634

[3700] A DNA sequence (GBSx0674) was identified in S. agalactiae <SEQ ID 1969> which encodes the amino acid sequence <SEQ ID 1970>. Analysis of this protein sequence reveals the following:

| Possible site: 51 | | | |
|---|---|---|---|
| >>> Seems to have no N-terminal signal sequence | | | |
| INTEGRAL | Likelihood = −0.53 | Transmembrane | 83-99 (83-99) |

----- Final Results -----
bacterial membrane --- Certainty = 0.1213 (Affirmative) < succ>
bacterial outside --- Certainty = 0.0000 (Not Clear) < succ>
bacterial cytoplasm --- Certainty = 0.0000 (Not Clear) < succ>

[3701] The protein has no significant homology with any sequences in the GENPEPT database.

[3702] No corresponding DNA sequence was identified in S. pyogenes.

[3703] Based on this analysis, it was predicted that this protein and its epitopes, could be useful antigens for vaccines or diagnostics.

### EXAMPLE 635

[3704] A DNA sequence (GBSx0675) was identified in S. agalactiae <SEQ ID 1971> which encodes the amino acid sequence <SEQ ID 1972>. Analysis of this protein sequence reveals the following:

Possible site: 23
>>> Seems to have no N-terminal signal sequence
----- Final Results -----
bacterial cytoplasm --- Certainty = 0.1902 (Affirmative) < succ>
bacterial membrane --- Certainty = 0.0000 (Not Clear) < succ>
bacterial outside --- Certainty = 0.0000 (Not Clear) < succ>

[3705] The protein has no significant homology with any sequences in the GENPEPT database.

[3706] No corresponding DNA sequence was identified in S. pyogenes.

[3707] Based on this analysis, it was predicted that this protein and its epitopes, could be useful antigens for vaccines or diagnostics.

### EXAMPLE 636

[3708] A DNA sequence (GBSx0676) was identified in S. agalactiae <SEQ ID 1973> which encodes the amino acid sequence <SEQ ID 1974>. Analysis of this protein sequence reveals the following:

Possible site: 20
>>> Seems to have no N-terminal signal sequence
----- Final Results -----
bacterial cytoplasm --- Certainty = 0.4763 (Affirmative) < succ>
bacterial membrane --- Certainty = 0.0000 (Not Clear) < succ>
bacterial outside --- Certainty = 0.0000 (Not Clear) < succ>

[3709] The protein has no significant homology with any sequences in the GENPEPT database.

[3710] No corresponding DNA sequence was identified in S. pyogenes.

[3711] Based on this analysis, it was predicted that this protein and its epitopes, could be useful antigens for vaccines or diagnostics.

### EXAMPLE 637

[3712] A DNA sequence (GBSx0677) was identified in S. agalactiae <SEQ ID 1975> which encodes the amino acid sequence <SEQ ID 1976>. Analysis of this protein sequence reveals the following:

Possible site: 20
>>> Seems to have no N-terminal signal sequence
----- Final Results -----
bacterial cytoplasm --- Certainty = 0.5089 (Affirmative) < succ>
bacterial membrane --- Certainty = 0.0000 (Not Clear) < succ>
bacterial outside --- Certainty = 0.0000 (Not Clear) < succ>

[3713] The protein has no significant homology with any sequences in the GENPEPT database.

[3714] No corresponding DNA sequence was identified in S. pyogenes.

[3715] Based on this analysis, it was predicted that this protein and its epitopes, could be useful antigens for vaccines or diagnostics.

### EXAMPLE 638

[3716] A DNA sequence (GBSx0678) was identified in S. agalactiae <SEQ ID 1977> which encodes the amino acid sequence <SEQ ID 1978>. Analysis of this protein sequence reveals the following:

Possible site: 25
>>> May be a lipoprotein
----- Final Results -----
bacterial membrane --- Certainty = 0.0000 (Not Clear) < succ>
bacterial outside --- Certainty = 0.0000 (Not Clear) < succ>
bacterial cytoplasm --- Certainty = 0.0000 (Not Clear) < succ>

[3717] The protein has no significant homology with any sequences in the GENPEPT database.

[3718] No corresponding DNA sequence was identified in S. pyogenes.

[3719] SEQ ID 1978 (GBS184) was expressed in E. coli as a His-fusion product. SDS-PAGE analysis of total cell extract is shown in FIG. 26 (lane 7; MW 21 kDa), in FIG. 168 (lane 14-16; MW 36 kDa—thioredoxin fusion) and in FIG. 238 (lane 9; MW 36 kDa). It was also expressed in E. coli as a GST-fusion product. SDS-PAGE analysis of total cell extract is shown in FIG. 37 (lane 7; MW 46.4 kDa).

[3720] Based on this analysis, it was predicted that this protein and its epitopes, could be useful antigens for vaccines or diagnostics.

### EXAMPLE 639

[3721] A DNA sequence (GBSx0679) was identified in S. agalactiae <SEQ ID 1979> which encodes the amino acid sequence <SEQ ID 1980>. Analysis of this protein sequence reveals the following:

```
Possible site: 52
>>> Seems to have no N-terminal signal sequence
----- Final Results -----
                            bacterial cytoplasm --- Certainty = 0.2179(Affirmative) < succ>
                              bacterial membrane --- Certainty = 0.0000(Not Clear) < succ>
                                bacterial outside --- Certainty = 0.0000(Not Clear) < succ>
```

[3722] The protein has no significant homology with any sequences in the GENPEPT database.

[3723] No corresponding DNA sequence was identified in S. pyogenes.

[3724] Based on this analysis, it was predicted that this protein and its epitopes, could be useful antigens for vaccines or diagnostics.

### EXAMPLE 640

[3725] A DNA sequence (GBSx0680) was identified in S. agalactiae <SEQ ID 1981> which encodes the amino acid sequence <SEQ ID 1982>. This protein is predicted to be immunogenic secreted protein precursor. Analysis of this protein sequence reveals the following:

```
Possible site: 34
>>> Seems to have no N-terminal signal sequence
----- Final Results -----
                            bacterial cytoplasm --- Certainty = 0.2166(Affirmative) < succ>
                              bacterial membrane --- Certainty = 0.0000(Not Clear) < succ>
                                bacterial outside --- Certainty = 0.0000(Not Clear) < succ>
```

[3726] A related GBS nucleic acid sequence <SEQ ID 9351> which encodes amino acid sequence <SEQ ID 9352> was also identified.

[3727] A related DNA sequence was identified in S. pyogenes <SEQ ID 1983> which encodes the amino acid sequence <SEQ ID 1984>. Analysis of this protein sequence reveals the following:

| Possible site: 19 | | | | |
|---|---|---|---|---|
| >>> Seems to have an uncleavable N-term signal seq | | | | |
| | INTEGRAL | Likelihood = −3.77 | Transmembrane | 9-25 (5-27) |

```
----- Final Results -----
                              bacterial membrane --- Certainty = 0.2508(Affirmative) < succ>
                                bacterial outside --- Certainty = 0.0000(Not Clear) < succ>
                            bacterial cytoplasm --- Certainty = 0.0000(Not Clear) < succ>
```

[3728] An alignment of the GAS and GBS proteins is shown below:

| Identities = 64/86 (74%), Positives = 76/86 (87%) | | | |
|---|---|---|---|
| Query: | 1 | MGNGGDWKNKPGYQTTHEAKTGYAISFSPGQAGADRTYGHVAIVEDVKEDGSIPISESNV | 60 |
| | | MGNGGDW+ KPG+ TTH+ K GY +SF+PGQAGAD TYGHVA+VE +KEDGSI ISESNV | |
| Sbjct: | 452 | MGNGGDWQRKPGFVTTHKPKVGYVVSFAPGQAGADATYGHVAVVEQIKEDGSILISESNV | 511 |
| Query: | 61 | LGLGTISYRTFSAAEAAQLTYVVGEK | 86 |
| | | +GLGTISYRTF+A +A+ LTYVVG+K | |
| Sbjct: | 512 | MGLGTISYRTFTAEQASLLTYVVGDK | 537 |

[3729] Based on this analysis, it was predicted that these proteins and their epitopes could be useful antigens for vaccines or diagnostics.

### EXAMPLE 641

[3730] A DNA sequence (GBSx0681) was identified in S. agalactiae <SEQ ID 1985> which encodes the amino acid sequence <SEQ ID 1986>. This protein is predicted to be immunogenic secreted protein precursor. Analysis of this protein sequence reveals the following:

```
Possible site: 40
>>> Seems to have no N-terminal signal sequence
----- Final Results -----
                            bacterial cytoplasm --- Certainty = 0.2495(Affirmative) < succ>
                              bacterial membrane --- Certainty = 0.0000(Not Clear) < succ>
                                bacterial outside --- Certainty = 0.0000(Not Clear) < succ>
```

[3731] The protein has homology with the following sequences in the GENPEPT database:

| AAB52379 GB: U31811 immunogenic secreted protein | | | |
|---|---|---|---|
| precursor [Streptococcus pyogenes] | | | |
| Identities = 133/259 (51%), Positives = 170/259 (65%), Gaps = 4/259 (1%) | | | |
| Query: | 3 | PSQPQVTATPQKSEVVTPAITSGIDLPDVAIPTAMASAAYVKHWIGNDAYTHNLLSHRYG | 62 |
| | | P QP + A + V P S DL + P++ +SAAYV+HW G+ AYTHNLLS RYG | |
| Sbjct: | 174 | PIQPPLGAA---APVFAPWRESDKDLSKLK-PSSRSSAAYVRHWTGDSAYTHNLLSRRYG | 229 |
| Query: | 63 | ITAAQLDGFLQSTGITYDSSRIDGQKILDREKSSGLDARAIIAIAIAESSLGTQGVATAP | 122 |
| | | ITA QLDGFL S GI YD R++G+++L+ EK +GLD RAI+AIA+AESSLGTQGVA | |
| Sbjct: | 230 | ITAEQLDGFLNSLGIHYDKERLNGKRLLEWEKLTGLDVRAIVAIAMAESSLGTQGVAKEK | 289 |
| Query: | 123 | GANMFGFGAVDNNTTNAQNFSDDKAVIKMTQETIIQNQNTSFAIQDQKAQFLSTGNLNVA | 182 |
| | | G+NMFG+GA D N NA+ +SD+ A+ M ++TII N+N +F QD KA+ S G L+ | |
| Sbjct: | 290 | GSNMFGYGAFDFNPNNAKKYSDEVAIRHMVEDTIIANKNQTFERQDLKAKKWSLGQLDTL | 349 |
| Query: | 183 | ARGGVYFTDASGSGKRRAAIMESIDKWIDAHGGISEISKELLNTSSVAMMAVPTSYSVSR | 242 |
| | | GGVYFTD SGSG+RRA IM +D+WID HG +I + L TS VP Y S+ | |
| Sbjct: | 350 | IDGGVYFTDTSGSGQRRADIMTKLDQWIDDHGNTPDIPEHLKITSGTQFSEVPVGYKRSQ | 409 |
| Query: | 243 | ANQAGNYVAGTYPWGQRTW | 261 |
| | | Y + TY +GQ TW | |
| Sbjct: | 410 | PQNVLTYKSETYSFGQCTW | 428 |

[3732] A related DNA sequence was identified in S. pyogenes <SEQ ID 1987> which encodes the amino acid sequence <SEQ ID 1988>. Analysis of this protein sequence reveals the following:

```
Possible site: 22
>>> Seems to have a cleavable N-term signal seq.
----- Final Results -----
                                bacterial outside --- Certainty = 0.3000(Affirmative) < succ>
                              bacterial membrane --- Certainty = 0.0000(Not Clear) < succ>
                            bacterial cytoplasm --- Certainty = 0.0000(Not Clear) < succ>
```

[3733] An alignment of the GAS and GBS proteins is shown below:

| Identities = 143/265 (53%), Positives = 184/265 (68%), Gaps = 5/265 (1%) | | | |
|---|---|---|---|
| Query: | 2 | VPSQPQVTATPQKSEVVTPA-----ITSGIDLPDVAIPTAMASAAYVKHWIGNDAYTHNL | 56 |
| | | V + P + + Q E TP S +DL ++ IP+ AAYV+HW G +AYTH+L | |
| Sbjct: | 135 | VDTAPASSLSKQLPEARTPIQSLSPYVSDLDLSEIDIPSVNTYAAYVEHWSGKNAYTHHL | 194 |
| Query: | 57 | LSHRYGITAAQLDGFLQSTGITYDSSRIDGQKILDREKSSGLDARAIIAIAIAESSLGTQ | 116 |
| | | LS RYGI A Q+D +L+STGI YDS+RI+G+K+L EK SGLD RAI+AIA++ESSLGTQ | |
| Sbjct: | 195 | LSRRYGIKADQIDSYLKSTGIAYDSTRINGEKLLQWEKKSGLDVRAIVAIAMSESSLGTQ | 254 |
| Query: | 117 | GVATAPGANMFGFGAVDNNTTNAQNFSDDKAVIKMTQETIIQNQNTSFAIQDQKAQFLST | 176 |
| | | G+AT GANMFG+ A D + T A F+DD A++KMTQ+TII+N+N++FA+QD KA S | |
| Sbjct: | 255 | GIATLLGANMFGYAAFDLDPTQASKFNDDSAIVKMTQDTIIKNKNSNFALQDLKAAKFSR | 314 |
| Query: | 177 | GNLNVAARGGVYFTDASGSGKRRAAIMESIDKWIDAHGGISEISKELLNTSSVAMMAVPT | 236 |
| | | G LN A+ GGVYFTD +GSGKRRA IME +DKWID HGG I EL SS + +VP | |
| Sbjct: | 315 | GQLNFASDGGVYFTDTTGSGKRRAQIMEDLDKWIDDHGGTPAIPAELKVQSSASFASVPA | 374 |
| Query: | 237 | SYSVSRANQAGNYVAGTYPWGQRTW | 261 |
| | | Y +S++ Y A +Y WGQ TW | |
| Sbjct: | 375 | GYKLSKSYDVLGYQASSYAWGQCTW | 399 |

[3734] Based on this analysis, it was predicted that these proteins and their epitopes could be useful antigens for vaccines or diagnostics.

### EXAMPLE 642

[3735] A DNA sequence (GBSx0682) was identified in S. agalactiae <SEQ ID 1989> which encodes the amino acid sequence <SEQ ID 1990>. Analysis of this protein sequence reveals the following:

```
Possible site: 27
>>> Seems to have a cleavable N-term signal seq.
----- Final Results -----
                                bacterial outside --- Certainty = 0.3000(Affirmative) < succ>
                              bacterial membrane --- Certainty = 0.0000(Not Clear) < succ>
                            bacterial cytoplasm --- Certainty = 0.0000(Not Clear) < succ>
```

[3736] The protein has no significant homology with any sequences in the GENPEPT database.

[3737] No corresponding DNA sequence was identified in S. pyogenes.

[3738] A related GBS gene <SEQ ID 8627> and protein <SEQ ID 8628> were also identified. Analysis of this protein sequence reveals the following:

```
Lipop: Possible site: −1 Crend: 4
McG: Discrim Score: 11.56
GvH: Signal Score (−7.5): 0.870001
          Possible site: 27
>>> Seems to have a cleavable N-term signal seq.
ALOM program count: 0 value: 11.88 threshold: 0.0
      PERIPHERAL Likelihood = 11.88 63
modified ALOM score: −2.88
*** Reasoning Step: 3
----- Final Results -----
                                bacterial outside --- Certainty = 0.3000(Affirmative) < succ>
                              bacterial membrane --- Certainty = 0.0000(Not Clear) < succ>
                            bacterial cytoplasm --- Certainty = 0.0000(Not Clear) < succ>
```

[3739] SEQ ID 8628 (GBS159) was expressed in E. coli as a His-fusion product. SDS-PAGE analysis of total cell extract is shown in FIG. 28 (lane 4; MW 26 kDa). It was also expressed in E. coli as a GST-fusion product. SDS-PAGE analysis of total cell extract is shown in FIG. 34 (lane 2; MW 41 kDa).

[3740] GBS159-GST was purified as shown in FIG. 198, lane 9.

[3741] Based on this analysis, it was predicted that these proteins and their epitopes could be useful antigens for vaccines or diagnostics.

### EXAMPLE 643

[3742] A DNA sequence (GBSx0683) was identified in S. agalactiae <SEQ ID 1991> which encodes the amino acid sequence <SEQ ID 1992>. Analysis of this protein sequence reveals the following:

```
Possible site: 32
>>> Seems to have no N-terminal signal sequence
----- Final Results -----
                            bacterial cytoplasm --- Certainty = 0.2668(Affirmative) < succ>
                              bacterial membrane --- Certainty = 0.0000(Not Clear) < succ>
                                bacterial outside --- Certainty = 0.0000(Not Clear) < succ>
```

[3743] The protein has homology with the following sequences in the GENPEPT database:

| >GP: BAB04699 GB: AP001510 unknown conserved protein [Bacillus halodurans] | | | |
|---|---|---|---|
| Identities = 32/76 (42%), Positives = 54/76 (70%) | | | |
| Query: | 7 | LGSVIELKNDSQKVMITSRFPLYDNEGQLGYFDYSGCIFPISIVGNETYFFNLEDIDKVL | 66 |
| | | +GS++ LK + K+MI +R P+ + G+ FDYSGC +P +V ++ ++FN E+ID+V+ | |
| Sbjct: | 4 | IGSIVYLKEGTSKLMILNRGPILEANGENKMFDYSGCFYPQGLVPDKVFYFNHENIDEVV | 63 |
| Query: | 67 | FEGYYDENEEEMQKIF | 82 |
| | | FEG+ D+ E+ QK+F | |
| Sbjct: | 64 | FEGFQDDEEQRFQKLF | 79 |

[3744] No corresponding DNA sequence was identified in S. pyogenes.

[3745] Based on this analysis, it was predicted that this protein and its epitopes, could be useful antigens for vaccines or diagnostics.

### EXAMPLE 644

[3746] A DNA sequence (GBSx0684) was identified in S. agalactiae <SEQ ID 1993> which encodes the amino acid sequence <SEQ ID 1994>. Analysis of this protein sequence reveals the following:

| Possible site: 32 | | | |
|---|---|---|---|
| >>> Seems to have no N-terminal signal sequence | | | |
| INTEGRAL | Likelihood = −14.81 | Transmembrane | 75-91 (69-99) |
| INTEGRAL | Likelihood = −14.38 | Transmembrane | 134-150 (129-179) |
| INTEGRAL | Likelihood = −8.49 | Transmembrane | 157-173 (151-179) |
| INTEGRAL | Likelihood = −1.17 | Transmembrane | 50-66 (46-67) |

----- Final Results -----
bacterial membrane --- Certainty = 0.6922 (Affirmative) < succ>
bacterial outside --- Certainty = 0.0000 (Not Clear) < succ>
bacterial cytoplasm --- Certainty = 0.0000 (Not Clear) < succ>

[3747] The protein has no significant homology with any sequences in the GENPEPT database.

[3748] No corresponding DNA sequence was identified in S. pyogenes.

[3749] Based on this analysis, it was predicted that this protein and its epitopes, could be useful antigens for vaccines or diagnostics.

### EXAMPLE 645

[3750] A DNA sequence (GBSx0685) was identified in S. agalactiae <SEQ ID 1995> which encodes the amino acid sequence <SEQ ID 1996>. Analysis of this protein sequence reveals the following:

| Possible site: 35 | | | |
|---|---|---|---|
| >>> Seems to have no N-terminal signal sequence | | | |
| INTEGRAL | Likelihood = −0.11 | Transmembrane | 40-56 (40-56) |

----- Final Results -----
bacterial membrane --- Certainty = 0.1044 (Affirmative) < succ>
bacterial outside --- Certainty = 0.0000 (Not Clear) < succ>
bacterial cytoplasm --- Certainty = 0.0000 (Not Clear) < succ>

[3751] The protein has no significant homology with any sequences in the GENPEPT database.

[3752] No corresponding DNA sequence was identified in S. pyogenes.

[3753] SEQ ID 1996 (GBS204) was expressed in E. coli as a His-fusion product. SDS-PAGE analysis of total cell extract is shown in FIG. 49 (lane 13; MW 32 kDa) and FIG. 53 (lane 2; MW 14.7 kDa). It was also expressed in E. coli as a GST-fusion product. SDS-PAGE analysis of total cell extract is shown in FIG. 54 (lane 6; MW 39.7 kDa).

[3754] Based on this analysis, it was predicted that this protein and its epitopes, could be useful antigens for vaccines or diagnostics.

### EXAMPLE 646

[3755] A DNA sequence (GBSx0686) was identified in S. agalactiae <SEQ ID 1997> which encodes the amino acid sequence <SEQ ID 1998>. Analysis of this protein sequence reveals the following:

Possible site: 38
>>> Seems to have no N-terminal signal sequence (or signal = aa 1-26)
----- Final Results -----
bacterial membrane --- Certainty = 0.0000 (Not Clear) < succ>
bacterial outside --- Certainty = 0.0000 (Not Clear) < succ>
bacterial cytoplasm --- Certainty = 0.0000 (Not Clear) < succ>

[3756] The protein has homology with the following sequences in the GENPEPT database:

| >GP: CAC16670 GB: AJ302698 hypothetical protein [Staphylococcus | | | |
|---|---|---|---|
| haemolyticus] | | | |
| Identities = 60/254 (23%), Positives = 109/254 (42%), Gaps = 14/254 (5%) | | | |
| Query: | 2 | VKVSVSSVGTQASTVAISMFSRVSALNDAITKLSSFAEAATLQGTAYSNAKSYATGTLTP | 61 |
| | | + + V +Q+S V ++ S S + + F A+ LQG AY + K + + + P | |
| Sbjct: | 3 | IDMYVGKSKSQSSDVGSTVKSISSGYDSLQKGIMQFVGASELQGQAYDSGKQFFSAVIAP | 62 |
| Query: | 62 | MLQGMILFSETLSEKCTELQTLYVSICGDEDLDSVVLESKLASDRASLKIAEALLEHLND | 121 |
| | | + + + E + C + Y S + L L + + EA+ L | |
| Sbjct: | 63 | LTESIKTLGELTEQACNDFVDQYQSEVDSQSLKESELLEDIEELNKQISQLEAMNASLKH | 122 |
| Query: | 122 | DPEPSKSAISSTKSNIKKLKKRIKSNQKKLDNLNEFNAHSATVFADISNAQSTVNQALAA | 181 |
| | | + S +S I L+++ K ++KL L +F+A S +F ++ + Q TV Q + | |
| Sbjct: | 123 | KSSKNSSLLSGNHQMISSLEQQKKELEEKLRKLRQFDAKSPNIFKEVESFQKTVQQGINQ | 182 |
| Query: | 182 | VSTGFSGYNSKTGAFGKPTSGQMEWTKTVKKNWKEREDAKAEELKSKKAEESKKASKIEN | 241 |
| | | T ++ F P MEW K ++ E K +++ ++KA++ KK SK + | |
| Sbjct: | 183 | AKT---AWDPGKQTFNIPAGKDMEWAKVSQQKALE---VKMDKI-NQKAKDGKKLSKNDI | 235 |
| Query: | 242 | TT-------KKSNV | 248 |
| | | T KKSN+ | |
| Sbjct: | 236 | FTIIAYQQQKKSNI | 249 |

[3757] No corresponding DNA sequence was identified in S. pyogenes.

[3758] SEQ ID 1998 (GBS270) was expressed in E. coli as a His-fusion product. SDS-PAGE analysis of total cell extract is shown in FIG. 51 (lane 2; MW 34.3 kDa). It was also expressed in E. coli as a GST-fusion product. SDS-PAGE analysis of total cell extract is shown in FIG. 54 (lane 7; MW 59.2 kDa).

[3759] The GBS270-GST fusion product was purified (FIG. 206, lane 3) and used to immunise mice. The resulting antiserun was used for FACS (FIG. 265), which confirmed that the protein is immunoaccessible on GBS bacteria.

[3760] Based on this analysis, it was predicted that this protein and its epitopes, could be useful antigens for vaccines or diagnostics.

### EXAMPLE 647

[3761] A DNA sequence (GBSx0687) was identified in S. agalactiae <SEQ ID 1999> which encodes the amino acid sequence <SEQ ID 2000>. This protein is predicted to be outer surface protein F. Analysis of this protein sequence reveals the following:

```
Possible site: 23
>>> Seems to have no N-terminal signal sequence
----- Final Results -----
                            bacterial cytoplasm --- Certainty = 0.3323(Affirmative) < succ>
                              bacterial membrane --- Certainty = 0.0000(Not Clear) < succ>
                                bacterial outside --- Certainty = 0.0000(Not Clear) < succ>
```

[3762] The protein has no significant homology with any sequences in the GENPEPT database.

[3763] No corresponding DNA sequence was identified in S. pyogenes.

[3764] SEQ ID 2000 (GBS316) was expressed in E. coli as a His-fusion product. SDS-PAGE analysis of total cell extract is shown in FIG. 51 (lane 3; MW 23 kDa). It was also expressed in E. coli as a GST-fusion product. SDS-PAGE analysis of total cell extract is shown in FIG. 55 (lane 2; MW 41.8 kDa).

[3765] GBS316-GST was purified as shown in FIG. 206, lane 4.

[3766] Based on this analysis, it was predicted that this protein and its epitopes, could be useful antigens for vaccines or diagnostics.

### EXAMPLE 648

[3767] A DNA sequence (GBSx0688) was identified in S. agalactiae <SEQ ID 2001> which encodes the amino acid sequence <SEQ ID 2002>. This protein is predicted to be actin-like protein arp3 (act4). Analysis of this protein sequence reveals the following:

```
Possible site: 17
>>> Seems to have no N-terminal signal sequence
----- Final Results -----
                            bacterial cytoplasm --- Certainty = 0.0217(Affirmative) < succ>
                              bacterial membrane --- Certainty = 0.0000(Not Clear) < succ>
                                bacterial outside --- Certainty = 0.0000(Not Clear) < succ>
```

[3768] The protein has no significant homology with any sequences in the GENPEPT database.

[3769] No corresponding DNA sequence was identified in S. pyogenes.

[3770] Based on this analysis, it was predicted that this protein and its epitopes, could be useful antigens for vaccines or diagnostics.

### EXAMPLE 649

[3771] A DNA sequence (GBSx0689) was identified in S. agalactiae <SEQ ID 2003> which encodes the amino acid sequence <SEQ ID 2004>. This protein is predicted to be diarrheal toxin. Analysis of this protein sequence reveals the following:

| Possible site: 25 | | | | |
|---|---|---|---|---|
| >>> Seems to have no N-terminal signal sequence | | | | |
| | INTEGRAL | Likelihood = −8.65 | Transmembrane | 65-81 (61-84) |
| | INTEGRAL | Likelihood = −3.98 | Transmembrane | 89-105 (85-106) |

```
----- Final Results -----
                              bacterial membrane --- Certainty = 0.4461(Affirmative) < succ>
                                bacterial outside --- Certainty = 0.0000(Not Clear) < succ>
                            bacterial cytoplasm --- Certainty = 0.0000(Not Clear) < succ>
```

[3772] The protein has homology with the following sequences in the GENPEPT database:

| >GP: CAB15175 GB: Z99120 alternate gene name: yueA~similar to | | | |
|---|---|---|---|
| hypothetical proteins [Bacillus subtilis] | | | |
| Identities = 452/1058 (42%), Positives = 664/1058 (62%), | | | |
| Gaps = 39/1058 (3%) | | | |
| Query: | 98 | VTMIFSITGYFKNRKQYKQDLQERIDSYHDYLSDKSIELQKLAKEQKRGQHYHYPTIEGL | 157 |
| | | +T+I S YF+++ Q K+ ++R Y YL +K ELQ LA++QK+ +H+P+ E + | |
| Sbjct: | 1 | MTLITSTVQYFRDKNQRKKREEKRERVYKLYLDNKRKELQALAEKQKQVLEFHFPSFEQM | 60 |
| Query: | 158 | QEMADTYHHRIYEKTPLHFDFLYYRLGLGEVPTSYNIHYSQPERSGKK-DPLENEGYNLY | 216 |
| | | + + RI+EK+ D+L RLG G VP+SY I+ S + + + D L + ++ | |
| Sbjct: | 61 | KYLTSEISDRIWEKSLESKDYLQLRLGTGTVPSSYEINMSGGDLANRDIDDLMEKSQHMQ | 120 |
| Query: | 217 | FNNRYIKNMPIVANLSHGPVGYIGPRGLVLEQLQLMVNQLAFFHSYHDVQFITIVPEEEM | 276 |
| | | + I+N P+ +L+ GP+G +G +V ++ ++ QL+FF+SYHD++F+ I EEE | |
| Sbjct: | 121 | RVYKDIRNAPVTVDLAEGPMGLVGKSQIVKNEIHQLIGQLSFFNSYHDLRFVFIFHEEEY | 180 |
| Query: | 277 | DKWSWMRWLPHETLQDVNVRGFVYNQRSRDQVLNSLNQILKLRRTQREDKSAKEGTLFSP | 336 |
| | | W WM+ +P + + +GF+YN+++RDQ+L+SL ++++ +R+ + KE F P | |
| Sbjct: | 181 | KDWEWMKCVPQFQMPHIYAKGFIYNEQTRDQLLSSLYELIR----ERDLEDDKEKLQFKP | 236 |
| Query: | 337 | HYVVIVTDEKLILDHVIMEFFTEDPTELGCSLIFVQDVMSSLSENIKTIINIKDRNTGQL | 396 |
| | | H+V ++T+++LI +HVI+E+ LG S I + SLSENI T++ + + G + | |
| Sbjct: | 237 | HFVFVITNQQLISEHVILEYLEGQHEHLGISTIVAAETKESLSENITTLVRYINEHEGDI | 296 |
| Query: | 397 | VIEEGELKETDFELDHFLEDYDKENISRRLAPLNHLQNLKSSIPEAVTFMEMYQAEEFED | 456 |
| | | +I++ + F LDH + D E SR L LNH + +SIPE V+F+E++ A+E ++ | |
| Sbjct: | 297 | LIQKKKAVRIPFRLDHHQRE-DNERFSRTLRTLNHQVGITNSIPETVSFLELFHAKEVKE | 355 |
| Query: | 457 | LHVQERWISHAPYKSSAVPLGLRGQDDIVYLNLHEKAHGPHGLVAGTTGSGKSEIIQSYI | 516 |
| | | + +Q+RW++ KS +VP+G +G+DDIVYLNLHEKAHGPHGL+AGTTGSGKSE +Q+YI | |
| Sbjct: | 356 | IGIQQRWLTSESSKSLSVPIGYKGKDDIVYLNLHEKAHGPHGLLAGTTGSGKSEFLQTYI | 415 |
| Query: | 517 | LSLAVNFHPHDVAFLLIDYKGGGMANLFKDLPHLLGTITNLDGAQ--SMRALVSINAELK | 574 |
| | | LSLAV+FHPH+ AFLLIDYKGGGMA F+++PHLLGTITN++G++ SMRAL SI +ELK | |
| Sbjct: | 416 | LSLAVHFHPHEAAFLLIDYKGGGMAQPFRNIPHLLGTITNIEGSKNFSMRALASIKSELK | 475 |
| Query: | 575 | RRQRLFAKADVNHINQYQKKYKLGEVSEPMPHLFLISDEFAELKSNQPEFMKELVSTARI | 634 |
| | | +RQRLF + VNHIN Y K YK G+ MPHLFLISDEFAELKS +P+F++ELVS ARI | |
| Sbjct: | 476 | KRQRLFDQYQVNHINDYTKLYKQGKAEVAMPHLFLISDEFAELKSEEPDFIRELVSAARI | 535 |
| Query: | 635 | GRSLGIHLILATQKPSGVVDDQIWSNSRFKLALKVADRGDSMEMLHTPDAAEITQAGRAY | 694 |
| | | GRSLG+HLILATQKP G++DDQIWSNSRFK+ALKV D DS E+L DAA IT GR Y | |
| Sbjct: | 536 | GRSLGVHLILATQKPGGIIDDQIWSNSRFKVALKVQDATDSKEILKNSDAANITVTGRGY | 595 |
| Query: | 695 | LQVGNNEVYELFQSAWSGADYQPEKDDQGIEDHTIYSINDLGQYEILNDDLSGLDQAENI | 754 |
| | | LQVGNNEVYELFQSAWSGA Y E G ED I + D G LS +D +N | |
| Sbjct: | 596 | LQVGNNEVYELFQSAWSGAPYLEEV--YGTEDE-IAIVTDTGLI-----PLSEVDTEDNA | 647 |
| Query: | 755 | -KEVPTELDAIVENIQALTKEMGISDLPQPWLPPLSNQIAVTDLRKEGSVDLWSKAPSYK | 813 |
| | | K+V TE++A+V+ I+ + EMGI LP PWLPPL+ +I T L+ | |
| Sbjct: | 648 | KKDVQTEIEAVVDEIERIQDEMGIEKLPSPWLPPLAERIPRT---------LFPSNEKDH | 698 |
| Query: | 814 | AVLGFMDIPSQQAQEVAYHDFEDDGHLSIFAGPSMGKSTALQTVTMDLARHNSPEFLNLY | 873 |
| | | ++D P Q Q + +DG++ IF GKS A T M A +PE L++Y | |
| Sbjct: | 699 | FHFAYVDEPDLQRQAPIAYKMMEDGNIGIFGSSGYGKSIAAATFLMSFADVYTPEELHVY | 758 |
| Query: | 874 | LFDFGTNGLLPLRRLPHVADFFTIDDDEKIAKFIARIKVEMSDRKKALSRYNVATAKLYR | 933 |
| | | +FDFG LLPL +LPH AD+F +D KI KF+ RIK E+ RK+ ++ K+Y | |
| Sbjct: | 759 | IFDFGNGTLLPLAKLPHTADYFLMDQSRKIEKFMIRIKEEIDRRKRLFREKEISHIKMYN | 818 |
| Query: | 934 | QVSGETMPQILIVIDSYEGLREAQTPTNLEACFQNISRDGSSLGISLVISAGRTAALRSS | 993 |
| | | +S E +P I I ID+++ +++ LE+ F +SRDG SLGI +++A R A+R S | |
| Sbjct: | 819 | ALSEEELPFIFITIDNFDIVKDEM--HELESEFVQLSRDGQSLGIYFMLTATRVNAVRQS | 876 |
| Query: | 994 | LMANLKERIALKLTDDSESRTLVGRHQHIMEDIPGRGLIKRDDIEVLQVALSTEGTETFD | 1053 |
| | | L+ NLK +I L D SE ++ GR + +E IPGR +I+++++ Q+ L + + | |
| Sbjct: | 877 | LLNNLKTKIVHYLMDQSEGYSIYGRPKFNLEPIPGRVIIQKEELYFAQMFLPVDADDDIG | 936 |
| Query: | 1054 | IINNIQNESDAMNSKWTG-PRPKAIPIVPEELTFDDFMATDSVQADLSANRL--PLGLEM | 1110 |
| | | + N ++++ + ++ +P IP++PE L+ + S++ L L P+GL | |
| Sbjct: | 937 | MFNELKSDVQKLQGRFASMEQPAPIPMLPESLSTREL----SIRFKLERKPLSVPIGLHE | 992 |
| Query: | 1111 | VDVESYSLALNRFKHMLYMSDSDESLEAVGSHIIKVLL | 1148 |
| | | V L + KH L + + ++++KV+L | |
| Sbjct: | 993 | ETVSPVYFDLGKHKHCLILGQTQRG----KTNVLKVML | 1026 |

[3773] There is also homology to SEQ ID 24.

[3774] A related GBS gene <SEQ ID 8629> and protein <SEQ ID 8630> were also identified. Analysis of this protein sequence reveals the following:
[3775] Homology to a bacterial toxin

[3776] The protein has homology with the following sequences in the databases:

| >OMNI\|NT01BS3725 diarrheal toxin | | | |
|---|---|---|---|
| Score = 203 bits (511), Expect = 4e−51 | | | |
| Identities = 123/377 (32%), Positives = 198/377 (51%), | | | |
| Gaps = 22/377 (5%) | | | |
| Query: | 1 | MGISDLPQPWLPPLSNQIAVTDLRKEGSVDLWSKAPSYKAVLGFMDIPSQQAQEVAYHDF | 60 |
| | | MGI LP PWLPPL+ +I T L+ ++D P Q Q + | |
| Sbjct: | 704 | MGIEKLPSPWLPPLAERIPRT---------LFPSNEKDHFHFAYVDEPDLQRQAPIAYEM | 754 |
| Query: | 61 | EDDGHLSIFAGPSMGKSTALQTVTMDLARHNSPEFLNLYLFDFGTNGLLPLRRLPHVADF | 120 |
| | | +DG++ IF GKS A T M A +PE L++Y+FDFG LLPL +LPH AD+ | |
| Sbjct: | 755 | MEDGNIGIFGSSGYGKSIAAATFLMSFADVYTPEELHVYIFDFGNGTLLPLAKLPHTADY | 814 |
| Query: | 121 | FTIDDDEKIAKFIARIKVEMSDRKKALSRYNVATAKLYRQVSGETMPQILIVIDSYEGLR | 180 |
| | | F +D KI KF+ RIK E+ RK+ ++ K+Y +S E +P I I ID+++ ++ | |
| Sbjct: | 815 | FLMDQSRKIEKFMIRIKEEIDRRKRLFREKEISHIKMYNALSEEELPFIFITIDNFDIVK | 874 |
| Query: | 181 | EAQTPTNLEACFQNISRDGSSLGISLVISAGRTAALRSSLMANLKERIALKLTDDSESRT | 240 |
| | | + LE+ F +SRDG SLGI +++A R A+R SL+ NLK +I L D SE + | |
| Sbjct: | 875 | DEM--HELESEFVQLSRDGQSLGIYFMLTATRVNAVRQSLLNNLKTKIVHYLMDQSEGYS | 932 |
| Query: | 241 | LVGRHQHIMEDIPGRGLIKRDDIEVLQVALSTEGTETFDIINNIQNESDAMNSKWTG-PR | 299 |
| | | + GR + +E IPGR +I+++++ Q+ L + + + N ++++ + ++ + | |
| Sbjct: | 933 | IYGRPKFNLEPIPGRVIIQKEELYFAQMFLPVDADDDIGMFNELKSDVQKLQGRFASMEQ | 992 |
| Query: | 300 | PKAIPIVPEELTFDDFMATDSVQADLSANRL--PLGLEMVDVESYSLALNRFKHMLYMSD | 357 |
| | | P IP++PE L+ + S++ L L P+GL V L + KH L + | |
| Sbjct: | 993 | PAPIPMLPESLSTREL----SIRFKLERKPLSVPIGLHEETVSPVYFDLGKHKHCLILGQ | 1048 |
| Query: | 358 | SDESLEAVGSHIIKVLL | 374 |
| | | + ++++KV+L | |
| Sbjct: | 1049 | TQRG----KTNVLKVML | 1061 |

[3777] SEQ ID 8630 (GBS326) was expressed in E. coli as a His-fusion product. SDS-PAGE analysis of total cell extract is shown in FIG. 65 (lane 5; MW 66 kDa). It was also expressed in E. coli as a GST-fusion product. SDS-PAGE analysis of total cell extract is shown in FIG. 71 (lane 5; MW 91 kDa).

[3778] GBS326-GST was purified as shown in FIG. 212, lane 5.

[3779] GBS326LN was expressed in E. coli as a GST-fusion product. SDS-PAGE analysis of total cell extract is shown in FIG. 127 (lane 24; MW 114 kDa). It was also expressed in E. coli as a GST-fusion product. SDS-PAGE analysis of total cell extract is shown in FIG. 184 (lane 6; MW 114 kDa). The purified protein is shown in FIG. 236, lane 12.

[3780] Based on this analysis, it was predicted that these proteins and their epitopes could be useful antigens for vaccines or diagnostics.

### EXAMPLE 650

[3781] A DNA sequence (GBSx0690) was identified in S. agalactiae <SEQ ID 2005> which encodes the amino acid sequence <SEQ ID 2006>. Analysis of this protein sequence reveals the following:

Possible site: 16
>>> Seems to have no N-terminal signal sequence
----- Final Results -----
bacterial cytoplasm --- Certainty = 0.2693 (Affirmative) < succ>
bacterial membrane --- Certainty = 0.0000 (Not Clear) < succ>
bacterial outside --- Certainty = 0.0000 (Not Clear) < succ>

[3782] The protein has no significant homology with any sequences in the GENPEPT database.

[3783] No corresponding DNA sequence was identified in S. pyogenes.

[3784] Based on this analysis, it was predicted that this protein and its epitopes, could be useful antigens for vaccines or diagnostics.

### EXAMPLE 651

[3785] A DNA sequence (GBSx0691) was identified in S. agalactiae <SEQ ID 2007> which encodes the amino acid sequence <SEQ ID 2008>. Analysis of this protein sequence reveals the following:

Possible site: 38
>>> Seems to have no N-terminal signal sequence
----- Final Results -----
bacterial cytoplasm --- Certainty = 0.3933 (Affirmative) < succ>
bacterial membrane --- Certainty = 0.0000 (Not Clear) < succ>
bacterial outside --- Certainty = 0.0000 (Not Clear) < succ>

[3786] The protein has no significant homology with any sequences in the GENPEPT database.

[3787] No corresponding DNA sequence was identified in S. pyogenes.

[3788] Based on this analysis, it was predicted that this protein and its epitopes, could be useful antigens for vaccines or diagnostics.

### EXAMPLE 652

[3789] A DNA sequence (GBSx0692) was identified in S. agalactiae <SEQ ID 2009> which encodes the amino acid sequence <SEQ ID 2010>. Analysis of this protein sequence reveals the following:

| Possible site: 55 | | | |
|---|---|---|---|
| >>> Seems to have no N-terminal signal sequence | | | |
| INTEGRAL | Likelihood = −7.32 | Transmembrane | 225-241 (219-246) |

----- Final Results -----
bacterial membrane --- Certainty = 0.3930 (Affirmative) < succ>
bacterial outside --- Certainty = 0.0000 (Not Clear) < succ>
bacterial cytoplasm --- Certainty = 0.0000 (Not Clear) < succ>

[3790] The protein has homology with the following sequences in the GENPEPT database:

| >GP: BAB04693 GB: AP001510 unknown conserved protein | | | |
|---|---|---|---|
| [Bacillus halodurans] | | | |
| Identities = 83/320 (25%), Positives = 162/320 (49%), Gaps = 1/320 (0%) | | | |
| Query: | 103 | VNFILHPSNLFLTKNATAKIAYRSLPGIMRPEKFGPEEFLYQFKCFVFALLTQHDYIELY | 162 |
| | | ++ I+ P N+ ++ + + + P + PE + + + LL + Y | |
| Sbjct: | 106 | LHLIVSPENVLVSDGLDVTFIHYGVKDSIPPYETDPERLFLELRATLLVLLDGNHRFHEY | 165 |
| Query: | 163 | NGAISVIEVSDFLKSIYHAETIQAVRDIITIDYEQQVEVETHTLAKVSRAKYKLYKYISV | 222 |
| | | +++S KS+ T++ +R++I + Q+ E + L KV + K+ + K+ + | |
| Sbjct: | 166 | MNYHDTLKLSPEAKSLVQQTTLEGLRELIR-HWIQEHEQQEKQLHKVPKTKWTIQKWAGI | 224 |
| Query: | 223 | WLGALSTILLIPLVYLVFIHNPFKEKMLAADTSFIKVDYNQVINRLEHVKVSKLPYTQKY | 282 |
| | | L A +I +VY++ P +E A+ +++ +Y+QVI+ LE + +P KY | |
| Sbjct: | 225 | GLIAALVPAIIYIVYVLAFLQPRQEAFTASHAAYLNENYSQVIDTLEPYSPNSMPRVVKY | 284 |
| Query: | 283 | ELAYSYINGMSFSEEQREVILNNVTLKTDELYLDYWINIGRGLDDDAIDAAKRLDDSDLV | 342 |
| | | +LA SY+ RE + N + L+ E Y DYWI IGRG ++ AID A+ L D + + | |
| Sbjct: | 285 | QLAQSYVAIEPLQAYHRENLKNVLVLQAAESYFDYWIAIGRGENEKAIDIARGLQDKEWL | 344 |
| Query: | 343 | IYAIVQKMDQVRKDNSLSGKDREQKLSELQTDYDKYWKDRKTALTDEESKSKNSNNHSTN | 402 |
| | | +YA V++ ++V+ D +LSGK+RE + E++ + D Y ++ + + E+ N+ ++N | |
| Sbjct: | 345 | VYANVKRREEVKSDENLSGKEREDLIKEIEAEIDDYMRELEELAEEGEAFQPNAEPAASN | 404 |
| Query: | 403 | SNKESSESSSTTASTSSKTK | 422 |
| | | +E + S + + K | |
| Sbjct: | 405 | ELEEDEGDTEEDDSDNQEAK | 424 |

[3791] No corresponding DNA sequence was identified in S. pyogenes.

[3792] SEQ ID 2010 (GBS337) was expressed in E. coli as a His-fusion product. SDS-PAGE analysis of total cell extract is shown in FIG. 62 (lane 3; MW 50.3 kDa).

[3793] Based on this analysis, it was predicted that this protein and its epitopes, could be useful antigens for vaccines or diagnostics.

### EXAMPLE 653

[3794] A DNA sequence (GBSx0693) was identified in S. agalactiae <SEQ ID 2011> which encodes the amino acid sequence <SEQ ID 2012>. Analysis of this protein sequence reveals the following:

| Possible site: 27 | | | |
|---|---|---|---|
| >>> Seems to have a cleavable N-term signal seq. | | | |
| INTEGRAL | Likelihood = −14.01 | Transmembrane | 131-147 (122-153) |

----- Final Results -----
bacterial membrane --- Certainty = 0.6604 (Affirmative) < succ>
bacterial outside --- Certainty = 0.0000 (Not Clear) < succ>
bacterial cytoplasm --- Certainty = 0.0000 (Not Clear) < succ>

[3795] A related GBS nucleic acid sequence <SEQ ID 8631> which encodes amino acid sequence <SEQ ID 8632> was also identified. Analysis of this protein sequence reveals the following:

| Lipop: Possible site: −1 Crend: 8 | | | | |
|---|---|---|---|---|
| McG: Discrim Score: 13.38 | | | | |
| GvH: Signal Score (−7.5): −1.25 | | | | |
| Possible site: 23 | | | | |
| >>> Seems to have a cleavable N-term signal seq. | | | | |
| ALOM program count: 1 value: −14.01 threshold: 0.0 | | | | |
| | INTEGRAL | Likelihood = −14.01 | Transmembrane | 127-143 (118-149) |
| | PERIPHERAL | Likelihood = 16.13 | 113 | |

```
modified ALOM score: 3.30
*** Reasoning Step: 3
----- Final Results -----
                              bacterial membrane --- Certainty = 0.6604(Affirmative) < succ>
                                bacterial outside --- Certainty = 0.0000(Not Clear) < succ>
                            bacterial cytoplasm --- Certainty = 0.0000(Not Clear) < succ>
```

[3796] The protein has no significant homology with any sequences in the GENPEPT database.

[3797] No corresponding DNA sequence was identified in S. pyogenes.

[3798] SEQ ID 8632 (GBS140) was expressed in E. coli as a GST-fusion product. SDS-PAGE analysis of total cell extract is shown in FIG. 32 (lane 3; MW 43 kDa). It was also expressed in E. coli as a His-fusion product. SDS-PAGE analysis of total cell extract is shown in FIG. 49 (lane 8; MW 18 kDa).

[3799] Based on this analysis, it was predicted that these proteins and their epitopes could be useful antigens for vaccines or diagnostics.

### EXAMPLE 654

[3800] A DNA sequence (GBSx0694) was identified in S. agalactiae <SEQ ID 2013> which encodes the amino acid sequence <SEQ ID 2014>. Analysis of this protein sequence reveals the following:

```
Possible site: 15
>>> Seems to have no N-terminal signal sequence
----- Final Results -----
                            bacterial Cytoplasm --- Certainty = 0.1486(Affirmative) < succ>
                              bacterial membrane --- Certainty = 0.0000(Not Clear) < succ>
                                bacterial outside --- Certainty = 0.0000(Not Clear) < succ>
```

[3801] The protein has no significant homology with any sequences in the GENPEPT database.

[3802] No corresponding DNA sequence was identified in S. pyogenes.

[3803] Based on this analysis, it was predicted that this protein and its epitopes, could be useful antigens for vaccines or diagnostics.

### EXAMPLE 655

[3804] A DNA sequence (GBSx0695) was identified in S. agalactiae <SEQ ID 2015> which encodes the amino acid sequence <SEQ ID 2016>. Analysis of this protein sequence reveals the following:

| Possible site: 32 | | | | |
|---|---|---|---|---|
| >>> Seems to have an uncleavable N-term signal seq | | | | |
| | INTEGRAL | Likelihood = −14.59 | Transmembrane | 984-1000 (976-1009) |
| | INTEGRAL | Likelihood = −9.71 | Transmembrane | 19-35 (15-42) |
| | INTEGRAL | Likelihood = −9.50 | Transmembrane | 872-888 (865-890) |
| | INTEGRAL | Likelihood = −6.37 | Transmembrane | 927-943 (924-951) |
| | INTEGRAL | Likelihood = −4.19 | Transmembrane | 831-847 (828-847) |
| | INTEGRAL | Likelihood = −2.87 | Transmembrane | 899-915 (899-916) |

```
----- Final Results -----
                              bacterial membrane --- Certainty = 0.6838(Affirmative) < succ>
                                bacterial outside --- Certainty = 0.0000(Not Clear) < succ>
                            bacterial cytoplasm --- Certainty = 0.0000(Not Clear) < succ>
```

[3805] A related GBS nucleic acid sequence <SEQ ID 8633> which encodes amino acid sequence <SEQ ID 8634> was also identified. Analysis of this protein sequence reveals the following:

| Lipop Possible site: −1 Crend: 6 | | | | |
|---|---|---|---|---|
| SRCFLG: 0 | | | | |
| McG: Length of UR: 20 | | | | |
| Peak Value of UR: 3.40 | | | | |
| Net Charge of CR: 3 | | | | |
| McG: Discrim Score: 13.67 | | | | |
| GvH: Signal Score (−7.5): −3.27 | | | | |
| Possible site: 21 | | | | |
| >>> Seems to have an uncleavable N-term signal seq | | | | |
| Amino Acid Composition: calculated from 1 | | | | |
| ALOM program count: 6 value: −14.59 threshold: 0.0 | | | | |
| | INTEGRAL | Likelihood = −14.59 | Transmembrane | 973-989 (965-998) |
| | INTEGRAL | Likelihood = −9.71 | Transmembrane | 8-24 (4-31) |
| | INTEGRAL | Likelihood = −9.50 | Transmembrane | 861-877 (854-879) |
| | INTEGRAL | Likelihood = −6.37 | Transmembrane | 916-932 (913-940) |
| | INTEGRAL | Likelihood = −4.19 | Transmembrane | 820-836 (817-836) |
| | INTEGRAL | Likelihood = −2.87 | Transmembrane | 888-904 (888-905) |
| | PERIPHERAL | Likelihood = 3.82 | 936 | |

```
modified ALOM score: 3.42
icm1 HYPID: 7 CFP: 0.684
*** Reasoning Step: 3
----- Final Results -----
                              bacterial membrane --- Certainty = 0.6838(Affirmative) < succ>
                                bacterial outside --- Certainty = 0.0000(Not Clear) < succ>
                            bacterial cytoplasm --- Certainty = 0.0000(Not Clear) < succ>
```

[3806] The protein has homology with the following sequences in the GENPEPT database:

| >GP: AAB86324 GB: AE000938 phage infection protein homolog | | | |
|---|---|---|---|
| [Methanothermobacter thermoautotrophicus] | | | |
| Identities = 96/454 (21%), Positives = 190/454 (41%), | | | |
| Gaps = 63/454 (13%) | | | |
| Query: | 1 | MLKIKYILGRIMKR-NNFRILWYIIAVALFLVAIAGLNLKLQGDHAKENKTTQSATNTKL | 59 |
| | | M K I + MK N ++ ++IAV + + A+ + +Q ++T+ + | |
| Sbjct: | 1 | MRKALEIFWKDMKTVKNSPVVLFVIAVIICIPALYAV-FNIQATLDPYSRTSS------I | 53 |
| Query: | 60 | NIALVNEDQNVSNGKESYNLGASYIKSIERDNSQNWSVVSRGTAQNGLDKGDYQLMVIIP | 119 |
| | | +A+VNED N+GA ++ + ++ + +W V R A +GL KG Y ++IIP | |
| Sbjct: | 54 | EVAVVNEDMGADFNGTHLNVGAEFVSELRKNRNFDWQFVDRSDAMDGLRKGKYYAVLIIP | 113 |
| Query: | 120 | NNFSQKLLDVNKANAEQTTISYKVNAKGNLALEKKATEKEKDIVSELNSHLVNMYMASIL | 179 |
| | | NFS LL + Q +I Y VN K N + + +++NS +V + | |
| Sbjct: | 114 | GNFSSDLLSIKNGTPRQASIKYMVNDKLNPVAPRITNAGADALQAKINSEVVKTIDGIVF | 173 |
| Query: | 180 | SNLYTAQENVQA----------MVNVQSGNISNYQKNLLDSATNF---QNIFPAL----- | 221 |
| | | + A E +A VN +GN+ + L + ++ QN++ +L | |
| Sbjct: | 174 | GKISEAGELARANRDDILRTKRFVNELNGNLGKIDETLSTANSDLEKGQNLWSSLKTDLP | 233 |
| Query: | 222 | -VNQSSSSITANESLKKS------------LEASDNMFNDLVTTQTNTGKDLSSL----- | 263 |
| | | + +++ + SL +S +++ ++ ++ +T+ L+SL | |
| Sbjct: | 234 | EIRDNANFVKEKYSLLESYIGKDPAKALSTVQSMESHLSEAITSMKYLRAVLASLYSATG | 293 |
| Query: | 264 | -------IEQRHQDSISYEAFSTSLLEMNNELLEKQLSDIITQAQKDQETLSSQLNSIMG | 316 |
| | | I+Q + + L + ++L K +D I + + + + S LN +M | |
| Sbjct: | 294 | DPKLKTAIDQIDTNIEKASSVLGILQTIESDLKTKGTTDRIVKLKASIDRMDSALNKLMD | 353 |
| Query: | 317 | D-DNNHNHKENSSAYLNVARQKIQELSEALKSQDNIAKDQSEQLDKIVREGLASYFAKNN | 375 |
| | | D +++SA L +A + + A+ +D S +L+ I + L S + | |
| Sbjct: | 354 | SRDEIDAAMQDASAKLGIANARWPTMRSAI-------QDASRKLNMISDDDLNSLVKLAD | 406 |
| Query: | 376 | KDNITLLELLKSHSTNEK----TLKDFKAKVADF | 405 |
| | | D + E +S EK +K++ + +A F | |
| Sbjct: | 407 | IDPSAVREYFRSPVRMEKEHIYPVKNYGSALAPF | 440 |

[3807] SEQ ID 8634 (GBS250) was expressed in E. coli as a GST-fusion product. SDS-PAGE analysis of total cell extract is shown in FIG. 47 (lane 4; MW 136 kDa).

[3808] GBS250-GST was purified as shown in FIG. 203, lane 4.

[3809] Based on this analysis, it was predicted that these proteins and their epitopes could be useful antigens for vaccines or diagnostics.

### EXAMPLE 656

[3810] A DNA sequence (GBSx0696) was identified in S. agalactiae <SEQ ID 2019> which encodes the amino acid sequence <SEQ ID 2020>. Analysis of this protein sequence reveals the following:

```
Possible site: 39
>>> Seems to have no N-terminal signal sequence
----- Final Results -----
                            bacterial cytoplasm --- Certainty = 0.5009(Affirmative) < succ>
                              bacterial membrane --- Certainty = 0.0000(Not Clear) < succ>
                                bacterial outside --- Certainty = 0.0000(Not Clear) < succ>
```

[3811] The protein has homology with the following sequences in the GENPEPT database:

| >GP: CAA46375 GB: X65276 ORFA1 [Clostridium acetobutylicum] | | | |
|---|---|---|---|
| Identities = 35/91 (38%), Positives = 53/91 (57%) | | | |
| Query: | 1 | MAQIKLTPEELRSSAQKYTAGSQQVTEVLNLLTQEQAVIDENWDGSTFDSFEAQFNELSP | 60 |
| | | MAQI +TPEEL+S AQ Y +++ + + + + I E W G F ++ Q+N+L | |
| Sbjct: | 1 | MAQISVTPEELKSQAQVYIQSKEEIDQAIQKVNSMNSTIAEEWKGQAFQAYLEQYNQLHQ | 60 |
| Query: | 61 | KITEFAQLLEDINQQLLKVADIIEQTDADIA | 91 |
| | | + +F LLE +NQQL K AD + + DA A | |
| Sbjct: | 61 | TVVQFENLLESVNQQLNKYADTVAERDAQDA | 91 |

[3812] No corresponding DNA sequence was identified in S. pyogenes.

[3813] Based on this analysis, it was predicted that this protein and its epitopes, could be useful antigens for vaccines or diagnostics.

### EXAMPLE 657

[3814] A DNA sequence (GBSx0697) was identified in S. agalactiae <SEQ ID 2021> which encodes the amino acid sequence <SEQ ID 2022>. Analysis of this protein sequence reveals the following:

```
Possible site: 22
>>> Seems to have no N-terminal signal sequence
----- Final Results -----
                            bacterial cytoplasm --- Certainty = 0.3741(Affirmative) < succ>
                              bacterial membrane --- Certainty = 0.0000(Not Clear) < succ>
                                bacterial outside --- Certainty = 0.0000(Not Clear) < succ>
```

[3815] The protein has no significant homology with any sequences in the GENPEPT database.

[3816] No corresponding DNA sequence was identified in S. pyogenes.

[3817] Based on this analysis, it was predicted that this protein and its epitopes, could be useful antigens for vaccines or diagnostics.

### EXAMPLE 658

[3818] A repeated DNA sequence (GBSx0698) was identified in S. agalactiae <SEQ ID 2023> which encodes the amino acid sequence <SEQ ID 2024>. This protein is predicted to be carbamoylphosphate synthetase (carB). Analysis of this protein sequence reveals the following:

| Possible site: 23 | | | | |
|---|---|---|---|---|
| >>> Seems to have a cleavable N-term signal seq. | | | | |
| | INTEGRAL | Likelihood = −1.33 | Transmembrane | 807-823 (807-823) |

```
----- Final Results -----
                              bacterial membrane --- Certainty = 0.1532(Affirmative) < succ>
                                bacterial outside --- Certainty = 0.0000(Not Clear) < succ>
                            bacterial cytoplasm --- Certainty = 0.0000(Not Clear) < succ>
```

[3819] The protein has homology with the following sequences in the GENPEPT database:

| >GP: CAA03928 GB: AJ000109 carbamoylphosphate synthetase [Lactococcus lactis] | | | |
|---|---|---|---|
| Identities = 771/1062 (72%), Positives = 901/1062 (84%), Gaps = 5/1062 (0%) | | | |
| Query: | 1 | MPKRTDIRKIMVIGSGPIVIGQAAEFDYSGTQACLSLKEEGYQVVLVNSNPATIMTDKDI | 60 |
| | | MPKR DI+KIM+IGSGPI+IGQAAEFDY+GT+ACL+LKEEGY+VVLVNSNPATIMTD++I | |
| Sbjct: | 1 | MPKRNDIKKIMIIGSGPIIIGQAAEFDYAGTEACLALKEEGYEVVLVNSNPATIMTDREI | 60 |
| Query: | 61 | ADKVYIEPITLEFVTRILRKERPDALLPTLGGQTGLNMAMALSKNGILEELNVELLGTKL | 120 |
| | | AD VYIEPITLEFV++ILRKERPDALLPTLGGQTGLNMAM LSK GILEELNVELLGTKL | |
| Sbjct: | 61 | ADTVYIEPITLEFVSKILRKERPDALLPTLGGQTGLNMAMELSKTGILEELNVELLGTKL | 120 |
| Query: | 121 | SAIDKAEDRDLFKQLMEELNQPIPESEIVNSVEEAIQFAEQIGYPLIVRPAFTLGGTGGG | 180 |
| | | SAID+AEDR+LFK+L E +N+P+ S+I +VEEAI A++IGYP+IV PAFT+GGTGGG | |
| Sbjct: | 121 | SAIDQAEDRELFKELCESINEPLCASDIATTVEEAINIADKIGYPIIVGPAFTMGGTGGG | 180 |
| Query: | 181 | MCDNQEQLVDITTKGLKLSPVTQCLIERSIAGFKEIEYEVMRDAADNALVVCNMENFDPV | 240 |
| | | +CD +E+L +I GLKLSPVTQCLIE SIAG+KEIEYEVMRD+ADNA+VVCNMENFDPV | |
| Sbjct: | 181 | ICDTEEELREIVANGLKLSPVTQCLIEESIAGYKEIEYEVMRDSADNAIVVCNMENFDPV | 240 |
| Query: | 241 | GIHTGDSIVFAPAQTLSDVENQLLRDASLDIIRALKIEGGCNVQLALDPNSFKYYVIEVN | 300 |
| | | G+HTGDSIVFAP+QTLSD E Q+LRDASL+IIRALKIEGGCNVQLALDPNS++Y VIEVN | |
| Sbjct: | 241 | GVHTGDSIVFAPSQTLSDNEYQMLRDASLNIIRALKIEGGCNVQLALDPNSYEYRVIEVN | 300 |
| Query: | 301 | PRVSRSSALASKATGYPIAKLAAKIAVGLTLDEVINPITKTTYAMFEPALDYVVAKMPRF | 360 |
| | | PRVSRSSALASKATGYPIAK++AKIA+G+TLDE+INP+T TYAMFEPALDYVVAK+ RF | |
| Sbjct: | 301 | PRVSRSSALASKATGYPIAKMSAKIAIGMTLDEIINPVTNKTYAMFEPALDYVVAKIARF | 360 |
| Query: | 361 | PFDKFESGDRKLGTQMKATGEVMAIGRNIEESLLKACRSLEIGVDHIKIADLDNVSDDVL | 420 |
| | | PFDKFE+GDR LGTQMKATGEVMAIGRNIEESLLKA RSLEIGV H ++ + D+ L | |
| Sbjct: | 361 | PFDKFENGDRHLGTQMKATGEVMAIGRNIEESLLKAVRSLEIGVFHNEMTEAIEADDEKL | 420 |
| Query: | 421 | LEKIRKAEDDRLFYLAEALRRHYSIEKLASLTSIDSFFLDKLRVIVELEDLLSKNRLDIN | 480 |
| | | EK+ K +DDRLFY++EA+RR IE++A LT ID FFLDKL IVE+E+ L N + | |
| Sbjct: | 421 | YEKMVKTQDDRLFYVSEAIRRGIPIEEIADLTKIDIFFLDKLLYIVEIENQLKVNIFEPE | 480 |
| Query: | 481 | ILKKVKNKGFSDKAIASLWQINEDQVRNMRKEAGILPVYKMVDTCASEFDSATPYFYSTY | 540 |
| | | +LK K GFSD+ IA LW + ++VR R+E I+PVYKMVDTCA+EF+S+TPYFYSTY | |
| Sbjct: | 481 | LLKTAKKNGFSDREIAKLWNVTPEEVRRRRQENKIIPVYKMVDTCAAEFESSTPYFYSTY | 540 |
| Query: | 541 | AVENESLISDKASILVLGSGPIRIGQGVEFDYATVHSVKAIRESGFEAIIMNSNPETVST | 600 |
| | | ENES SDK I+VLGSGPIRIGQGVEFDYATVH VKAI+ G EAI++NSNPETVST | |
| Sbjct: | 541 | EWENESKRSDKEKIIVLGSGPIRIGQGVEFDYATVHCVKAIQALGKEAIVINSNPETVST | 600 |
| Query: | 601 | DFSISDKLYFEPLTFEDVMNVIDLEKPEGVILQFGGQTAINLAKDLNKAGVKILGTQLED | 660 |
| | | DFSISDKLYFEPLTFEDVMNVIDLE+P VI+QFGGQTAINLA+ L+KAGVKILGTQ+ED | |
| Sbjct: | 601 | DFSISDKLYFEPLTFEDVMNVIDLEEPLVVIVQFGGQTAINLAEHLSKAGVKILGTQVED | 660 |
| Query: | 661 | LDRAENRKQFEATLQALNIPQPPGFTATTEEEAVNAAQKIGYPVLVRPSYVLGGRAMKIV | 720 |
| | | LDRAE+R FE LQ L+IPQPPG TAT EEEAV A KIGYPVL+RPS+VLGGRAM+I+ | |
| Sbjct: | 661 | LDRAEDRDLFEKALQDLDIPQPPGATATNEEEAVANANKIGYPVLIRPSFVLGGRAMEII | 720 |
| Query: | 721 | ENEEDLRHYMTTAVKASPDHPVLIDAYLIGKECEVDAISDGQNILIPGIMEHIERSGVHS | 780 |
| | | NE+DLR YM AVKASP+HPVL+D+YL G+ECEVDAI DG+ +L+PGIMEHIER+GVHS | |
| Sbjct: | 721 | NNEKDLRDYMNRAVKASPEHPVLVDSYLQGQECEVDAICDGKEVLLPGIMEHIERAGVHS | 780 |
| Query: | 781 | GDSMAVYPPQTLSETIIETIVDYTKRLAIGLNCIGMMNIQFVIKDQKVYVIEVNPRASRT | 840 |
| | | GDSMAVYPPQ LS+ II+TIVDYTKRLAIGLNCIGMMNIQFVI +++VYVIEVNPRASRT | |
| Sbjct: | 781 | GDSMAVYPPQNLSQAIIDTIVDYTKRLAIGLNCIGMMNIQFVIYEEQVYVIEVNPRASRT | 840 |
| Query: | 841 | LPFLSKVTHIPMAQVATKVILGDKLCNFTYGYDLYPASDMVHIKAPVFSFTKLAKVDSLL | 900 |
| | | +PFLSKVT+IPMAQ+AT++ILG+ L + Y L P DMVH+KAPVFSFTKLAKVDSLL | |
| Sbjct: | 841 | VPFLSKVTNIPMAQLATQMILGENLKDLGYEAGLAPTPDMVHVKAPVFSFTKLAKVDSLL | 900 |
| Query: | 901 | GPEMKSTGEVMGSDINLQKALYKAFEAAYLHMPDYGNIVFTVDDTDKEEALELAKVYQSI | 960 |
| | | GPEMKSTG MGSD+ L+KALYK+FEAA LHM DYG+++FTV D DKEE L LAK + I | |
| Sbjct: | 901 | GPEMKSTGLAMGSDVTLEKALYKSFEAAKLHMADYGSVLFTVADEDKEETLALAKDFAEI | 960 |
| Query: | 961 | GYRIYATQGTAIYFDANGLETVLVGKL--GENDRNHIPDLIKNGKIQAVINTVGQNNID- | 1017 |
| | | GY + AT GTA + NGL V KL GE++ + + I+ G++QAV+NT+G | |
| Sbjct: | 961 | GYSLVATAGTAAFLKENGLYVREVEKLAGGEDEEGTLVEDIRQGRVQAVVNTMGNTRASL | 1020 |
| Query: | 1018 | --NHDALIIRRSAIEQGVPLFTSLDTAHAMFKVLESRAFTLK | 1057 |
| | | D IR+ AI +G+PLFTSLDT A+ KV++SR+FT K | |
| Sbjct: | 1021 | TTATDGFRIRQEAISRGIPLFTSLDTVAAILKVMQSRSFTTK | 1062 |

[3820] A related DNA sequence was identified in S. pyogenes <SEQ ID 2025> which encodes the amino acid sequence <SEQ ID 2026>. Analysis of this protein sequence reveals the following:

| Possible site: 21 | | | | |
|---|---|---|---|---|
| >>> Seems to have no N-terminal signal sequence | | | | |
| | INTEGRAL | Likelihood = −1.17 | Transmembrane | 773-789 (773-789) |

```
----- Final Results -----
                              bacterial membrane --- Certainty = 0.1468(Affirmative) < succ>
                                bacterial outside --- Certainty = 0.0000(Not Clear) < succ>
                            bacterial cytoplasm --- Certainty = 0.0000(Not Clear) < succ>
```

[3821] The protein has homology with the following sequences in the databases:

| >GP: CAA03928 GB: AJ000109 carbamoylphosphate synthetase [Lactococcus | | | |
|---|---|---|---|
| lactis] | | | |
| Identities = 753/1030 (73%), Positives = 876/1030 (84%), Gaps = 6/1030 (0%) | | | |
| Query: | 1 | LALKEEGYKVILVNSNPATIMTDKEIADKVYIEPLTLEFVNRIIRKERPDAILPTLGGQT | 60 |
| | | LALKEEGY+V+LVNSNPATIMTD+EIAD VYIEP+TLEFV++I+RKERPDA+LPTLGGQT | |
| Sbjct: | 35 | LALKEEGYEVVLVNSNPATIMTDREIADTVYIEPITLEFVSKILRKERPDALLPTLGGQT | 94 |
| Query: | 61 | GLNMAMALSKAGILDDLEIELLGTKLSAIDQAEDRDLFKQLMQELDQPIPESTIVKTVDE | 120 |
| | | GLNMAM LSK GIL++L +ELLGTKLSAIDQAEDR+LFK+L + +++P+ S I TV+E | |
| Sbjct: | 95 | GLNMAMELSKTGILEELNVELLGTKLSAIDQAEDRELFKELCESINEPLCASDIATTVEE | 154 |
| Query: | 121 | AVTFARDIGYPVIVRPAFTLGGTGGGICSSEEELCEITENGLKLSPVTQCLIERSIAGFK | 180 |
| | | A+ A IGYP+IV PAFT+GGTGGGIC +EEEL EI NGLKLSPVTQCLIE SIAG+K | |
| Sbjct: | 155 | AINIADKIGYPIIVGPAFTMGGTGGGICDTEEELREIVANGLKLSPVTQCLIEESIAGYK | 214 |
| Query: | 181 | EIEYEVMRDSADNALVVCNMENFDPVGIHTGDSIVFAPTQTLSDIENQMLRDASLKIIRA | 240 |
| | | EIEYEVMRDSADNA+VVCNMENFDPVG+HTGDSIVFAP+QTLSD E QMLRDASL IIRA | |
| Sbjct: | 215 | EIEYEVMRDSADNAIVVCNMENFDPVGVHTGDSIVFAPSQTLSDNEYQMLRDASLNIIRA | 274 |
| Query: | 241 | LKIEGGCNVQLALDPYSFKYYVIEVNPRVSRSSALASKATGYPIAKLAAKIAVGLTLDEM | 300 |
| | | LKIEGGCNVQLALDP S++Y VIEVNPRVSRSSALASKATGYPIAK++AKIA+G+TLDE+ | |
| Sbjct: | 275 | LKIEGGCNVQLALDPNSYEYRVIEVNPRVSRSSALASKATGYPIAKMSAKIAIGMTLDEI | 334 |
| Query: | 301 | INPITGTTYAMFEPALDYVVAKIPRFPFDKFEHGERQLGTQMKATGEVMAIGRNLEESLL | 360 |
| | | INP+T TYAMFEPALDYVVAKI RFPFDKFE+G+R LGTQMKATGEVMAIGRN+EESLL | |
| Sbjct: | 335 | INPVTNKTYAMFEPALDYVVAKIARFPFDKFENGDRHLGTQMKATGEVMAIGRNIEESLL | 394 |
| Query: | 361 | KACRSLEIGVCHNEMTSLSNISDEELVTKVIKAQDDRLFYLSEAIRRGYSIEELESLTKI | 420 |
| | | KA RSLEIGV HNEMT DE+L K++K QDDRLFY+SEAIRRG IEE+ LTKI | |
| Sbjct: | 395 | KAVRSLEIGVFHNEMTEAIEADDEKLYEKMVKTQDDRLFYVSEAIRRGIPIEEIADLTKI | 454 |
| Query: | 421 | DLFFLDKLLHIVEIEQELQMHVDHLESLKKAKRYGFSDQKIAEIWQKDESDIRAMRHSHS | 480 |
| | | D+FFLDKLL+IVEIE +L++++ E LK AK+ GFSD++IA++W ++R R + | |
| Sbjct: | 455 | DIFFLDKLLYIVEIENQLKVNIFEPELLKTAKKNGFSDREIAKLWNVTPEEVRRRRQENK | 514 |
| Query: | 481 | LYPVYKMVDTCAAEFDAKTPYFYSTYELENESVQSNKESILVLGSGPIRIGQGVEFDYAT | 540 |
| | | + PVYKMVDTCAAEF++ TPYFYSTYE ENES +S+KE I+VLGSGPIRIGQGVEFDYAT | |
| Sbjct: | 515 | IIPVYKMVDTCAAEFESSTPYFYSTYEWENESKRSDKEKIIVLGSGPIRIGQGVEFDYAT | 574 |
| Query: | 541 | VHSVKAIQKAGYEAIIMNSNPETVSTDFSVSDKLYFEPLTFEDVMNVIDLEQPKGVIVQF | 600 |
| | | VH VKAIQ G EAI++NSNPETVSTDFS+SDKLYFEPLTFEDVMNVIDLE+P VIVQF | |
| Sbjct: | 575 | VHCVKAIQALGKEAIVINSNPETVSTDFSISDKLYFEPLTFEDVMNVIDLEEPLVVIVQF | 634 |
| Query: | 601 | GGQTAINLAQALSEAGVTILGTQVEDLDRAEDRDLFEKALKELGIPQPQGQTATNEEEAL | 660 |
| | | GGQTAINLA+ LS+AGV ILGTQVEDLDRAEDRDLFEKAL++L IPQP G TATNEEEA+ | |
| Sbjct: | 635 | GGQTAINLAEHLSKAGVKILGTQVEDLDRAEDRDLFEKALQDLDIPQPPGATATNEEEAV | 694 |
| Query: | 661 | EAAKKIGFPVLVRPSYVLGGRAMEIVENKEDLREYIRTAVKASPEHPILVDSYIFGKECE | 720 |
| | | A KIG+PVL+RPS+VLGGRAMEI+ N++DLR+Y+ AVKASPEHP+LVDSY+ G+ECE | |
| Sbjct: | 695 | ANANKIGYPVLIRPSFVLGGRAMEIINNEKDLRDYMNRAVKASPEHPVLVDSYLQGQECE | 754 |
| Query: | 721 | VDAISDGKSVLIPGIMEHIERAGVHSGDSMAVYPPQQLSKQIQETIAEYTKRLAIGLNCI | 780 |
| | | VDAI DGK VL+PGIMEHIERAGVHSGDSMAVYPPQ LS+ I +TI +YTKRLAIGLNCI | |
| Sbjct: | 755 | VDAICDGKEVLLPGIMEHIERAGVHSGDSMAVYPPQNLSQAIIDTIVDYTKRLAIGLNCI | 814 |
| Query: | 781 | GMMNVQFVIKNEQVYVIEVNPRASRTVPFLSKVTGIPMAQIATKLILGQTLKDLGYEDGL | 840 |
| | | GMMN+QFVI EQVYVIEVNPRASRTVPFLSKVT IPMAQ+AT++ILG+ LKDLGYE GL | |
| Sbjct: | 815 | GMMNIQFVIYEEQVYVIEVNPRASRTVPFLSKVTNIPMAQLATQMILGENLKDLGYEAGL | 874 |
| Query: | 841 | YPQSPLVHIKAPVFSFTKLAQVDSLLGPEMKSTGEVMGSDTSLEKALYKAFEANNSHLSE | 900 |
| | | P +VH+KAPVFSFTKLA+VDSLLGPEMKSTG MGSD +LEKALYK+FEA H+++ | |
| Sbjct: | 875 | APTPDMVHVKAPVFSFTKLAKVDSLLGPEMKSTGLAMGSDVTLEKALYKSFEAAKLHMAD | 934 |
| Query: | 901 | FGQIVFTIADDSKAEALSLARRFKAIGYQIMATQGTAAYFAEQGLSACLVGKIGDAANDI | 960 |
| | | +G ++FT+AD+ K E L+LA+ F IGY ++AT GTAA+ E GL V K+ ++ | |
| Sbjct: | 935 | YGSVLFTVADEDKEETLALAKDFAEIGYSLVATAGTAAFLKENGLYVREVEKLAGGEDEE | 994 |
| Query: | 961 | PTLV---RHGHVQAIVNTVGIKR---TADKDGQMIRSSAIEQGVPLFTALDTAKAMLTVL | 1014 |
| | | TLV R G VQA+VNT+G R T DG IR AI +G+PLFT+LDT A+L V+ | |
| Sbjct: | 995 | GTLVEDIRQGRVQAVVNTMGNTRASLTTATDGFRIRQEAISRGIPLFTSLDTVAAILKVM | 1054 |
| Query: | 1015 | ESRCFNIEAI | 1024 |
| | | +SR F + I | |
| Sbjct: | 1055 | QSRSFTTKNI | 1064 |
| Identities = 141/389 (36%), Positives = 222/389 (56%), Gaps = 16/389 (4%) | | | |
| Query: | 518 | ESILVLGSGPIRIGQGVEFDYATVHSVKAIQKAGYEAIIMNSNPETVSTDFSVSDKLYFE | 577 |
| | | + I+++GSGPI IGQ EFDYA + A+++ GYE +++NSNP T+ TD ++D +Y E | |
| Sbjct: | 8 | KKIMIIGSGPIIIGQAAEFDYAGTEACLALKEEGYEVVLVNSNPATIMTDREIADTVYIE | 67 |
| Query: | 578 | PLTFEDVMNVIDLEQPKGVIVQFGGQTAINLAQALSEAG------VTILGTQVEDLDRAE | 631 |
| | | P+T E V ++ E+P ++ GGQT +N+A LS+ G V +LGT++ +D+AE | |
| Sbjct: | 68 | PITLEFVSKILRKERPDALLPTLGGQTGLNMAMELSKTGILEELNVELLGTKLSAIDQAE | 127 |
| Query: | 632 | DRDLFEKALKELGIPQPQGQTATNEEEALEAAKKIGFPVLVRPSYVLGGRAMEIVENKED | 691 |
| | | DR+LF++ + + P AT EEA+ A KIG+P++V P++ +GG I + +E+ | |
| Sbjct: | 128 | DRELFKELCESINEPLCASDIATTVEEAINIADKIGYPIIVGPAFTMGGTGGGICDTEEE | 187 |
| Query: | 692 | LREYIRTAVKASPEHPILVDSYIFG-KECEVDAISD-GKSVLIPGIMEHIERAGVHSGDS | 749 |
| | | LRE + +K SP L++ I G KE E + + D + ++ ME+ + GVH+GDS | |
| Sbjct: | 188 | LREIVANGLKLSPVTQCLIEESIAGYKEIEYEVMRDSADNAIVVCNMENFDPVGVHTGDS | 247 |
| Query: | 750 | MAVYPPQQLSKQIQETIAEYTKRLAIGLNCIGMMNVQFVI--KNEQVYVIEVNPRASRTV | 807 |
| | | + P Q LS + + + + + L G NVQ + + + VIEVNPR SR+ | |
| Sbjct: | 248 | IVFAPSQTLSDNEYQMLRDASLNIIRALKIEGGCNVQLALDPNSYEYRVIEVNPRVSRSS | 307 |
| Query: | 808 | PFLSKVTGIPMAQIATKLILGQTLKDL--GYEDGLY----PQSPLVHIKAPVFSFTKLAQ | 861 |
| | | SK TG P+A+++ K+ +G TL ++ + Y P V K F F K | |
| Sbjct: | 308 | ALASKATGYPIAKMSAKIAIGMTLDEIINPVTNKTYAMFEPALDYVVAKIARFPFDKFEN | 367 |
| Query: | 862 | VDSLLGPEMKSTGEVMGSDTSLEKALYKA | 890 |
| | | D LG +MK+TGEVM ++E++L KA | |
| Sbjct: | 368 | GDRHLGTQMKATGEVMAIGRNIEESLLKA | 396 |

[3822] An alignment of the GAS and GBS proteins is shown below:

| Identities = 777/1025 (75%), Positives = 896/1025 (86%), Gaps = 1/1025 (0%) | | | |
|---|---|---|---|
| Query: | 35 | LSLKEEGYQVVLVNSNPATIMTDKDIADKVYIEPITLEFVTRILRKERPDALLPTLGGQT | 94 |
| | | L+LKEEGY+V+LVNSNPATIMTDK+IADKVYIEP+TLEFV RI+RKERPDA+LPTLGGQT | |
| Sbjct: | 1 | LALKEEGYKVILVNSNPATIMTDKEIADKVYIEPLTLEFVNRIIRKERPDAILPTLGGQT | 60 |
| Query: | 95 | GLNMAMALSKNGILEELNVELLGTKLSAIDKAEDRDLFKQLMEELNQPIPESEIVNSVEE | 154 |
| | | GLNMAMALSK GIL++L +ELLGTKLSAID+AEDRDLFKQLM+EL+QPIPES IV +V+E | |
| Sbjct: | 61 | GLNMAMALSKAGILDDLEIELLGTKLSAIDQAEDRDLFKQLMQELDQPIPESTIVKTVDE | 120 |
| Query: | 155 | AIQFAEQIGYPLIVRPAFTLGGTGGGMCDNQEQLVDITTKGLKLSPVTQCLIERSIAGFK | 214 |
| | | A+ FA IGYP+IVRPAFTLGGTGGG+C ++E+L +IT GLKLSPVTQCLIERSIAGFK | |
| Sbjct: | 121 | AVTFARDIGYPVIVRPAFTLGGTGGGICSSEEELCEITENGLKLSPVTQCLIERSIAGFK | 180 |
| Query: | 215 | EIEYEVMRDAADNALVVCNMENFDPVGIHTGDSIVFAPAQTLSDVENQLLRDASLDIIRA | 274 |
| | | EIEYEVMRD+ADNALVVCNMENFDPVGIHTGDSIVFAP QTLSD+ENQ+LRDASL IIRA | |
| Sbjct: | 181 | EIEYEVMRDSADNALVVCNMENFDPVGIHTGDSIVFAPTQTLSDIENQMLRDASLKIIRA | 240 |
| Query: | 275 | LKIEGGCNVQLALDPNSFKYYVIEVNPRVSRSSALASKATGYPIAKLAAKIAVGLTLDEV | 334 |
| | | LKIEGGCNVQLALDP SFKYYVIEVNPRVSRSSALASKATGYPIAKLAAKIAVGLTLDE+ | |
| Sbjct: | 241 | LKIEGGCNVQLALDPYSFKYYVIEVNPRVSRSSALASKATGYPIAKLAAKIAVGLTLDEM | 300 |
| Query: | 335 | INPITKTTYAMFEPALDYVVAKMPRFPFDKFESGDRKLGTQMKATGEVMAIGRNIEESLL | 394 |
| | | INPIT TTYAMFEPALDYVVAK+PRFPFDKFE G+R+LGTQMKATGEVMAIGRN+EESLL | |
| Sbjct: | 301 | INPITGTTYAMFEPALDYVVAKIPRFPFDKFEHGERQLGTQMKATGEVMAIGRNLEESLL | 360 |
| Query: | 395 | KACRSLEIGVDHIKIADLDNVSDDVLLEKIRKAEDDRLFYLAEALRRHYSIEKLASLTSI | 454 |
| | | KACRSLEIGV H ++ L N+SD+ L+ K+ KA+DDRLFYL+EA+RR YSIE+L SLT I | |
| Sbjct: | 361 | KACRSLEIGVCHNEMTSLSNISDEELVTKVIKAQDDRLFYLSEAIRRGYSIEELESLTKI | 420 |
| Query: | 455 | DSFFLDKLRVIVELEDLLSKNRLDINILKKVKNKGFSDKAIASLWQINEDQVRNMRKEAG | 514 |
| | | D FFLDKL IVE+E L + + LKK K GFSD+ IA +WQ +E +R MR | |
| Sbjct: | 421 | DLFFLDKLLHIVEIEQELQMHVDHLESLKKAKRYGFSDQKIAEIWQKDESDIRAMRHSHS | 480 |
| Query: | 515 | ILPVYKMVDTCASEFDSATPYFYSTYAVENESLISDKASILVLGSGPIRIGQGVEFDYAT | 574 |
| | | + PVYKMVDTCA+EFD+ TPYFYSTY +ENES+ S+K SILVLGSGPIRIGQGVEFDYAT | |
| Sbjct: | 481 | LYPVYKMVDTCAAEFDAKTPYFYSTYELENESVQSNKESILVLGSGPIRIGQGVEFDYAT | 540 |
| Query: | 575 | VHSVKAIRESGFEAIIMNSNPETVSTDFSISDKLYFEPLTFEDVMNVIDLEKPEGVILQF | 634 |
| | | VHSVKAI+++G+EAIIMNSNPETVSTDFS+SDKLYFEPLTFEDVMNVIDLE+P+GVI+QF | |
| Sbjct: | 541 | VHSVKAIQKAGYEAIIMNSNPETVSTDFSVSDKLYFEPLTFEDVMNVIDLEQPKGVIVQF | 600 |
| Query: | 635 | GGQTAINLAKDLNKAGVKILGTQLEDLDRAENRKQFEATLQALNIPQPPGFTATTEEEAV | 694 |
| | | GGQTAINLA+ L++AGV ILGTQ+EDLDRAE+R FE L+ L IPQP G TAT EEEA+ | |
| Sbjct: | 601 | GGQTAINLAQALSEAGVTILGTQVEDLDRAEDRDLFEKALKELGIPQPQGQTATNEEEAL | 660 |
| Query: | 695 | NAAQKIGYPVLVRPSYVLGGRAMKIVENEEDLRHYMTTAVKASPDHPVLIDAYLIGKECE | 754 |
| | | AA+KIG+PVLVRPSYVLGGRAM+IVEN+EDLR Y+ TAVKASP+HP+L+D+Y+ GKECE | |
| Sbjct: | 661 | EAAKKIGFPVLVRPSYVLGGRAMEIVENKEDLREYIRTAVKASPEHPILVDSYIFGKECE | 720 |
| Query: | 755 | VDAISDGQNILIPGIMEHIERSGVHSGDSMAVYPPQTLSETIIETIVDYTKRLAIGLNCI | 814 |
| | | VDAISDG+++LIPGIMEHIER+GVHSGDSMAVYPPQ LS+ I ETI +YTKRLAIGLNCI | |
| Sbjct: | 721 | VDAISDGKSVLIPGIMEHIERAGVHSGDSMAVYPPQQLSKQIQETIAEYTKRLAIGLNCI | 780 |
| Query: | 815 | GMMNIQFVIKDQKVYVIEVNPRASRTLPFLSKVTHIPMAQVATKVILGDKLCNFTYGYDL | 874 |
| | | GMMN+QFVIK+++VYVIEVNPRASRT+PFLSKVT IPMAQ+ATK+ILG L + Y L | |
| Sbjct: | 781 | GMMNVQFVIKNEQVYVIEVNPRASRTVPFLSKVTGIPMAQIATKLILGQTLKDLGYEDGL | 840 |
| Query: | 875 | YPASDMVHIKAPVFSFTKLAKVDSLLGPEMKSTGEVMGSDINLQKALYKAFEAAYLHMPD | 934 |
| | | YP S +VHIKAPVFSFTKLA+VDSLLGPEMKSTGEVMGSD +L+KALYKAFEA H+ + | |
| Sbjct: | 841 | YPQSPLVHIKAPVFSFTKLAQVDSLLGPEMKSTGEVMGSDTSLEKALYKAFEANNSHLSE | 900 |
| Query: | 935 | YGNIVFTVDDTDKEEALELAKVYQSIGYRIYATQGTAIYFDANGLETVLVGKLGENDRNH | 994 |
| | | +G IVFT+ D K EAL LA+ +++IGY+I ATQGTA YF GL LVGK+G+ N | |
| Sbjct: | 901 | FGQIVFTIADDSKAEALSLARRFKAIGYQIMATQGTAAYFAEQGLSACLVGKIGD-AAND | 959 |
| Query: | 995 | IPDLIKNGKIQAVINTVGQNNIDNHDALIIRRSAIEQGVPLFTSLDTAHAMFKVLESRAF | 1054 |
| | | IP L+++G +QA++NTVG + D +IR SAIEQGVPLFT+LDTA AM VLESR F | |
| Sbjct: | 960 | IPTLVRHGHVQAIVNTVGIKRTADKDGQMIRSSAIEQGVPLFTALDTAKAMLTVLESRCF | 1019 |
| Query: | 1055 | TLKVL | 1059 |
| | | ++ + | |
| Sbjct: | 1020 | NIEAI | 1024 |
| Identities = 145/387 (37%), Positives = 229/387 (58%), Gaps = 16/387 (4%) | | | |
| Query: | 10 | IMVIGSGPIVIGQAAEFDYSGTQACLSLKEEGYQVVLVNSNPATIMTDKDIADKVYIEPI | 69 |
| | | I+V+GSGPI IGQ EFDY+ + ++++ GY+ +++NSNP T+ TD ++DK+Y EP+ | |
| Sbjct: | 520 | ILVLGSGPIRIGQGVEFDYATVHSVKAIQKAGYEAIIMNSNPETVSTDFSVSDKLYFEPL | 579 |
| Query: | 70 | TLEFVTRILRKERPDALLPTLGGQTGLNMAMALSKNGILEELNVELLGTKLSAIDKAEDR | 129 |
| | | T E V ++ E+P ++ GGQT +N+A ALS+ G V +LGT++ +D+AEDR | |
| Sbjct: | 580 | TFEDVMNVIDLEQPKGVIVQFGGQTAINLAQALSEAG------VTILGTQVEDLDRAEDR | 633 |
| Query: | 130 | DLFKQLMEELNQPIPESEIVNSVEEAIQFAEQIGYPLIVRPAFTLGGTGGGMCDNQEQLV | 189 |
| | | DLF++ ++EL P P+ + + EEA++ A++IG+P++VRP++ LGG + +N+E L | |
| Sbjct: | 634 | DLFEKALKELGIPQPQGQTATNEEEALEAAKKIGFPVLVRPSYVLGGRAMEIVENKEDLR | 693 |
| Query: | 190 | DITTKGLKLSPVTQCLIERSIAGFKEIEYEVMRDAADNALVVCNMENFDPVGIHTGDSIV | 249 |
| | | + +K SP L++ I G KE E + + D + L+ ME+ + G+H+GDS+ | |
| Sbjct: | 694 | EYIRTAVKASPEHPILVDSYIFG-KECEVDAISD-GKSVLIPGIMEHIERAGVHSGDSMA | 751 |
| Query: | 250 | FAPAQTLSDVENQLLRDASLDIIRALKIEGGCNVQLALDPNSFKYYVIEVNPRVSRSSAL | 309 |
| | | P Q LS + + + + + L G NVQ + + + YVIEVNPR SR+ | |
| Sbjct: | 752 | VYPPQQLSKQIQETIAEYTKRLAIGLNCIGMMNVQFVI--KNEQVYVIEVNPRASRTVPF | 809 |
| Query: | 310 | ASKATGYPIAKLAAKIAVGLTLDEVINPITKTTYAMFEPALDYVVAKMPRFPFDKFESGD | 369 |
| | | SK TG P+A++A K+ +G TL ++ Y P V K P F F K D | |
| Sbjct: | 810 | LSKVTGIPMAQIATKLILGQTLKDL--GYEDGLY----PQSPLVHIKAPVFSFTKLAQVD | 863 |
| Query: | 370 | RKLGTQMKATGEVMAIGRNIEESLLKA | 396 |
| | | LG +MK+TGEVM ++E++L KA | |
| Sbjct: | 864 | SLLGPEMKSTGEVMGSDTSLEKALYKA | 890 |

[3823] Based on this analysis, it was predicted that these proteins and their epitopes could be useful antigens for vaccines or diagnostics.

### EXAMPLE 659

[3824] A DNA sequence (GBSx0699) was identified in S. agalactiae <SEQ ID 2027> which encodes the amino acid sequence <SEQ ID 2028>. This protein is predicted to be carbamoyl phosphate synthetase small subunit (carA). Analysis of this protein sequence reveals the following:

Possible site: 19
>>> Seems to have no N-terminal signal sequence
----- Final Results -----
bacterial cytoplasm --- Certainty = 0.2401 (Affirmative) < succ>
bacterial membrane --- Certainty = 0.0000 (Not Clear) < succ>
bacterial outside --- Certainty = 0.0000 (Not Clear) < succ>

[3825] The protein has homology with the following sequences in the GENPEPT database:

| >GP: CAB89872 GB: AJ132624 carbamoyl phosphate synthetase small | | | |
|---|---|---|---|
| subunit [Lactococcus lactis] | | | |
| Identities = 242/355 (68%), Positives = 305/355 (85%) | | | |
| Query: | 2 | KRLLLLEDGSVFEGEAFGADVETSGEIVFSTGMTGYQESITDQSYNGQIITFTYPLIGNY | 61 |
| | | KRLL+LEDG++FEGEA GA+++ +GE+VF+TGMTGYQESITDQSYNGQI+TFTYP++GNY | |
| Sbjct: | 3 | KRLLILEDGTIFEGEALGANLDVTGELVFNTGMTGYQESITDQSYNGQILTFTYPIVGNY | 62 |
| Query: | 62 | GINRDDYESIRPTCKGVVIYEWAEYPSNWRQQMTLDEFLKLKGIPGISGIDTRALTKIIR | 121 |
| | | G+NRDDYESI PTCK VV++E A PSNWR QM+ DEFLK K IPGI+G+DTRA+TKI+R | |
| Sbjct: | 63 | GVNRDDYESIHPTCKAVVVHEAARRPSNWRMQMSFDEFLKSKNIPGITGVDTRAITKIVR | 122 |
| Query: | 122 | KHGTMKACLINEGNSIHEALENLQKSVLLNDQIEQVSTKLAYASPGVGKNIVLVDFGLKH | 181 |
| | | +HGTMKA L+ + + + LQ +VL +Q+E ST AY SP G+ +V+VDFGLKH | |
| Sbjct: | 123 | EHGTMKASLVQARDEVDHQMSQLQATVLPTNQVETSSTATAYPSPNTGRKVVVVDFGLKH | 182 |
| Query: | 182 | SILRELSQRQCHITVVPHTTTAQEILNLNPDGVLLSNGPGNPEQLPNALQMIQEIQGKIP | 241 |
| | | SILRELS+R+C++TVVP+ T+A+EIL + PDGV+L+NGPG+P +P A++MI+E+QGKIP | |
| Sbjct: | 183 | SILRELSKRECNLTVVPYNTSAKEILEMEPDGVMLTNGPGDPTDVPEAIEMIKEVQGKIP | 242 |
| Query: | 242 | IFGICMGHQLFAKANGAKTYKMTFGHRGFNHAVRHLQTGQVDFTSQNHGYAVSREDFPEA | 301 |
| | | IFGIC+GHQLF+ ANGA TYKM FGHRGFNHAVR + TG++DFTSQNHGYAVS E+ PE | |
| Sbjct: | 243 | IFGICLGHQLFSLANGATTYKMKFGHRGFNHAVREVATGRIDFTSQNHGYAVSSENLPED | 302 |
| Query: | 302 | LFITHEEINDKTVEGVRHKYYPAFSVQFHPDAAPGPHDTSYLFDEFINMIDDFQQ | 356 |
| | | L ITH EIND +VEGVRHKY+PAFSVQFHPDAAPGPHD SYLFD+F++++D+F++ | |
| Sbjct: | 303 | LMITHVEINDNSVEGVRHKYFPAFSVQFHPDAAPGPHDASYLFDDFMDLMDNFKK | 357 |

[3826] A related DNA sequence was identified in S. pyogenes <SEQ ID 2029> which encodes the amino acid sequence <SEQ ID 2030>. Analysis of this protein sequence reveals the following:

Possible site: 43
>>> Seems to have no N-terminal signal sequence
----- Final Results -----
bacterial cytoplasm --- Certainty = 0.3534 (Affirmative) < succ>
bacterial membrane --- Certainty = 0.0000 (Not Clear) < succ>
bacterial outside --- Certainty = 0.0000 (Not Clear) < succ>

[3827] An alignment of the GAS and GBS proteins is shown below:

| Identities = 265/354 (74%), Positives = 309/354 (86%) | | | |
|---|---|---|---|
| Query: | 2 | KRLLLLEDGSVFEGEAFGADVETSGEIVFSTGMTGYQESITDQSYNGQIITFTYPLIGNY | 61 |
| | | KRLL+LEDG++FEGE FGAD++ +GEIVF+TGMTGYQESITDQSYNGQI+TFTYPLIGNY | |
| Sbjct: | 3 | KRLLILEDGTIFEGEPFGADIDVTGEIVFNTGMTGYQESITDQSYNGQILTFTYPLIGNY | 62 |
| Query: | 62 | GINRDDYESIRPTCKGVVIYEWAEYPSNWRQQMTLDEFLKLKGIPGISGIDTRALTKIIR | 121 |
| | | GINRDDYESI PTCKGVV+ E + SNWR+QMTLD FLK+KGIPGISGIDTRALTKIIR | |
| Sbjct: | 63 | GINRDDYESISPTCKGVVVSEVSRLASNWRKQMTLDAFLKIKGIPGISGIDTRALTKIIR | 122 |
| Query: | 122 | KHGTMKACLINEGNSIHEALENLQKSVLLNDQIEQVSTKLAYASPGVGKNIVLVDFGLKH | 181 |
| | | +HGTMKA + ++G+SI + L+ +VL + IEQVSTK AY +PG+GKNIVLVDFGLKH | |
| Sbjct: | 123 | QHGTMKATMADDGDSIQHLKDQLRATVLPTNTIEQVSTKTAYPAPGIGKNIVLVDFGLKH | 182 |
| Query: | 182 | SILRELSQRQCHITVVPHTTTAQEILNLNPDGVLLSNGPGNPEQLPNALQMIQEIQGKIP | 241 |
| | | SILRE S+RQC+ITVVP TA+E+L LNPDG++LSNGPGNPE LP AL MI+ +QGKIP | |
| Sbjct: | 183 | SILREFSKRQCNITVVPFNITAEEVLQLNPDGLMLSNGPGNPEDLPEALDMIRGVQGKIP | 242 |
| Query: | 242 | IFGICMGHQLFAKANGAKTYKMTFGHRGFNHAVRHLQTGQVDFTSQNHGYAVSREDFPEA | 301 |
| | | IFGICMGHQLF+ ANGAKT KMTFGHRGFNHAVR + TG++DFTSQNHGYAV R P+ | |
| Sbjct: | 243 | IFGICMGHQLFSLANGAKTCKMTFGHRGFNHAVREIATGRIDFTSQNHGYAVERSSLPDT | 302 |
| Query: | 302 | LFITHEEINDKTVEGVRHKYYPAFSVQFHPDAAPGPHDTSYLFDEFINMIDDFQ | 355 |
| | | L +THE+INDKTVEGV+H+ +PAFSVQFHPDAAPGPHD SYLFDEF+ MID ++ | |
| Sbjct: | 303 | LMVTHEDINDKTVEGVKHRDFPAFSVQFHPDAAPGPHDASYLFDEFLEMIDSWR | 356 |

[3828] Based on this analysis, it was predicted that these proteins and their epitopes could be useful antigens for vaccines or diagnostics.

### EXAMPLE 660

[3829] A DNA sequence (GBSx0700) was identified in S. agalactiae <SEQ ID 2031> which encodes the amino acid sequence <SEQ ID 2032>. This protein is predicted to be aspartate carbamoyltransferase (pyrB). Analysis of this protein sequence reveals the following:

Possible site: 26
>>> Seems to have no N-terminal signal sequence
----- Final Results -----
bacterial cytoplasm --- Certainty = 0.3260 (Affirmative) < succ>
bacterial membrane --- Certainty = 0.0000 (Not Clear) < succ>
bacterial outside --- Certainty = 0.0000 (Not Clear) < succ>

[3830] The protein has homology with the following sequences in the GENPEPT database:

| >GP: AAF72727 GB: AF264709 aspartate transcarbamoylase [Enterococcus | | | |
|---|---|---|---|
| faecalis] | | | |
| Identities = 197/303 (65%), Positives = 250/303 (82%) | | | |
| Query: | 5 | TQTLSLEHFVSLEELSNQEVMSLIKRSIEVKENPSNIGFDKDYYVSNLFFENSTRTHKSF | 64 |
| | | ++ +SL+H ++ E L+++EVM LI+R+ E K+ ++ Y+ +NLFFENSTRTHKSF | |
| Sbjct: | 5 | SERISLKHLLTAEALTDREVMGLIRRAGEFKQGAKWHPEERQYFATNLFFENSTRTHKSF | 64 |
| Query: | 65 | EMAELKLGLKTIEFNADTSSVNKGETLYDTILTMSALGLDVCVIRHPDIDYYKELIASPN | 124 |
| | | E+AE KLGL+ IEF A SSV KGETLYDT+LTMSA+G+DV VIRH +YY ELI S | |
| Sbjct: | 65 | EVAEKKLGLEVIEFEASRSSVQKGETLYDTVLTMSAIGVDVAVIRHGKENYYDELIQSKT | 124 |
| Query: | 125 | IHSAIVNGGDGSGQHPSQSLLDLVTIYEEFGYFKGLKIAIVGDLTHSRVAKSNMQVLKRL | 184 |
| | | I +I+NGGDGSGQHP+Q LLDL+TIYEEFG F+GLK+AIVGD+THSRVAKSNMQ+L RL | |
| Sbjct: | 125 | IQCSIINGGDGSGQHPTQCLLDLMTIYEEFGGFEGLKVAIVGDITHSRVAKSNMQLLNRL | 184 |
| Query: | 185 | GAEIFFSGPKEWYSSQFDEYGQYLPIDQLVDQIDVLMLLRVQHERHDGKGVFSKESYHQQ | 244 |
| | | GAEI+FSGP+EWY QFD YGQY+P+D++V+++DV+MLLRVQHERHDGK FSKE YH + | |
| Sbjct: | 185 | GAEIYFSGPEEWYDHQFDVYGQYVPLDEIVEKVDVMMLLRVQHERHDGKESFSKEGYHLE | 244 |
| Query: | 245 | FGLTKERYKHLRDTAIIMHPAPVNRDVEIASDLVEADKARIVKQMSNGVYARIAILEAVL | 304 |
| | | +GLT ER L+ AIIMHPAPVNRDVE+A +LVE+ ++RIV QMSNGV+ R+AILEA+L | |
| Sbjct: | 245 | YGLTNERATRLQKHAIIMHPAPVNRDVELADELVESLQSRIVAQMSNGVFMRMAILEAIL | 304 |
| Query: | 305 | NSR | 307 |
| | | + + | |
| Sbjct: | 305 | HGK | 307 |

[3831] A related DNA sequence was identified in S. pyogenes <SEQ ID 2033> which encodes the amino acid sequence <SEQ ID 2034>. Analysis of this protein sequence reveals the following:

```
Possible site: 38
>>> Seems to have a cleavable N-term signal seq.
----- Final Results -----
                                bacterial outside --- Certainty = 0.3000(Affirmative) < succ>
                              bacterial membrane --- Certainty = 0.0000(Not Clear) < succ>
                            bacterial cytoplasm --- Certainty = 0.0000(Not Clear) < succ>
```

[3832] An alignment of the GAS and GBS proteins is shown below:

| Identities = 208/300 (69%), Positives = 249/300 (82%) | | | |
|---|---|---|---|
| Query: | 8 | LSLEHFVSLEELSNQEVMSLIKRSIEVKENPSNIGFDKDYYVSNLFFENSTRTHKSFEMA | 67 |
| | | ++L + VS+E L+ +EV+ LI R E K I + V+NLFFENSTRTHKSFE+A | |
| Sbjct: | 26 | VALTNLVSMEALTTEEVLGLINRGSEYKAGKVVISDHQKDLVANLFFENSTRTHKSFEVA | 85 |
| Query: | 68 | ELKLGLKTIEFNADTSSVNKGETLYDTILTMSALGLDVCVIRHPDIDYYKELIASPNIHS | 127 |
| | | E KLGL ++FNAD S+VNKGE+LYDT+LTMSALG D+CVIRHP+ DYYKEL+ SP I + | |
| Sbjct: | 86 | EKKLGLTVLDFNADASAVNKGESLYDTVLTMSALGTDICVIRHPEDDYYKELVESPTITA | 145 |
| Query: | 128 | AIVNGGDGSGQHPSQSLLDLVTIYEEFGYFKGLKIAIVGDLTHSRVAKSNMQVLKRLGAE | 187 |
| | | +IVNGGDGSGQHPSQ LLDL+TIYEEFG F+GLKIAI GDLTHSRVAKSNMQ+LKRLGAE | |
| Sbjct: | 146 | SIVNGGDGSGQHPSQCLLDLLTIYEEFGRFEGLKIAIAGDLTHSRVAKSNMQILKRLGAE | 205 |
| Query: | 188 | IFFSGPKEWYSSQFDEYGQYLPIDQLVDQIDVLMLLRVQHERHDGKGVFSKESYHQQFGL | 247 |
| | | ++F GP+EWYS F+ YG Y+ IDQ++ ++DVLMLLRVQHERHDG FSKE YHQ FGL | |
| Sbjct: | 206 | LYFYGPEEWYSEAFNAYGTYIAIDQIIKELDVLMLLRVQHERHDGHQSFSKEGYHQAFGL | 265 |
| Query: | 248 | TKERYKHLRDTAIIMHPAPVNRDVEIASDLVEADKARIVKQMSNGVYARIAILEAVLNSR | 307 |
| | | T+ERY+ L+D+AIIMHPAPVNRDVEIA LVEA KARIV QM+NGV+ R+AI+EA+LN R | |
| Sbjct: | 266 | TQERYQQLKDSAIIMHPAPVNRDVEIADSLVEAPKARIVSQMANGVFVRMAIIEAILNGR | 325 |

[3833] Based on this analysis, it was predicted that these proteins and their epitopes could be useful antigens for vaccines or diagnostics.

### EXAMPLE 661

[3834] A DNA sequence (GBSx0701) was identified in S. agalactiae <SEQ ID 2035> which encodes the amino acid sequence <SEQ ID 2036>. Analysis of this protein sequence reveals the following:

```
Possible site: 30
>>> Seems to have no N-terminal signal sequence
----- Final Results -----
                            bacterial cytoplasm --- Certainty = 0.2392(Affirmative) < succ>
                              bacterial membrane --- Certainty = 0.0000(Not Clear) < succ>
                                bacterial outside --- Certainty = 0.0000(Not Clear) < succ>
```

[3835] The protein has homology with the following sequences in the GENPEPT database:

| >GP: AAC06948 GB: AE000708 dihydroorotase [Aquifex aeolicus] | | | |
|---|---|---|---|
| Identities = 176/422 (41%), Positives = 255/422 (59%), Gaps = 8/422 (1%) | | | |
| Query: | 11 | IIKNGLIIDPQSGFNQVSDMLIDQGKIKQISKEIDIKGIPIIDASNKIVAPGLVDIHVHF | 70 |
| | | I+KNG +IDP D+L++ GKIK+I K I + IIDA IV PG +DIHVH | |
| Sbjct: | 5 | IVKNGYVIDPSQNLEGEFDILVENGKIKKIDKNILVPEAEIIDAKGLIVCPGFIDIHVHL | 64 |
| Query: | 71 | REPGQTHKENIHTGALSAAVGGFTTVLMMANTNPTISSPEIVKQVKESAAKEAI-KIETV | 129 |
| | | R+PGQT+KE+I +G+ A GGFTT++ M NTNP I + +V + + + + ++ | |
| Sbjct: | 65 | RDPGQTYKEDIESGSRCAVAGGFTTIVCMPNTNPPIDNTTVVNYILQKSKSVGLCRVLPT | 124 |
| Query: | 130 | ATITKSLNGKDLVNFEELLEAGVAGFSDDGIPLTDTKVLQEAMNLARKHDVVLSLHEEDP | 189 |
| | | TITK GK++ +F L EAG F+DDG P+ D+ V+++A+ LA + V + H ED | |
| Sbjct: | 125 | GTITKGRKGKEIADFYSLKEAGCVAFTDDGSPVMDSSVMRKALELASQLGVPIMDHCEDD | 184 |
| Query: | 190 | SLN-GVLGINEHIAQKIYHVCGASGLAEYSMIARDAMIAYQTQAKVHIQHLSSSESVEVV | 248 |
| | | L GV INE + + + AE IARD ++A +T VHIQH+S+ S+E++ | |
| Sbjct: | 185 | KLAYGV--INEGEVSALLGLSSRAPEAEEIQIARDGILAQRTGGHVHIQHVSTKLSLEII | 242 |
| Query: | 249 | DFAQKLGANLTAEVTPQHFSKTENLLLTKGANAKLNPPLRLEKDRQALIDGLKSGVISII | 308 |
| | | +F ++ G +T EV P H TE +L GANA++NPPLR ++DR ALI+G+K G+I | |
| Sbjct: | 243 | EFFKEKGVKITCEVNPNHLLFTEREVLNSGANARVNPPLRKKEDRLALIEGVKRGIIDCF | 302 |
| Query: | 309 | ASDHAPHHIMEKAADNISQAPSGMTGLETSLALGITYLVSTKELSMIDFLAKMTCNPAQL | 368 |
| | | A+DHAPH EK + + A G+ GL+T+L + L +S+ + T NPA++ | |
| Sbjct: | 303 | ATDHAPHQTFEK--ELVEFAMPGIIGLQTALPSALE-LYRKGIISLKKLIEMFTINPARI | 359 |
| Query: | 369 | YGFDAGYLREGGPADIVIFDQAEERIIKAEF-ASKSSNSPFIGDKLKGVIHYTICNGEIV | 427 |
| | | G D G L+ G PADI IFD +E I+ E SKS N+P G LKG + YTI +G++V | |
| Sbjct: | 360 | IGVDLGTLKLGSPADITIFDPNKEWILNEETNLSKSRNTPLWGKVLKGKVIYTIKDGKMV | 419 |
| Query: | 428 | YQ | 429 |
| | | Y+ | |
| Sbjct: | 420 | YK | 421 |

[3836] A related DNA sequence was identified in S. pyogenes <SEQ ID 2037> which encodes the amino acid sequence <SEQ ID 2038>. Analysis of this protein sequence reveals the following:

| Possible site: 35 | | | | |
|---|---|---|---|---|
| >>> Seems to have no N-terminal signal sequence | | | | |
| | INTEGRAL | Likelihood = −0.80 | Transmembrane | 76-92 (76-92) |
| | INTEGRAL | Likelihood = −0.00 | Transmembrane | 286-302 (286-302) |

```
----- Final Results -----
                              bacterial membrane --- Certainty = 0.132(Affirmative) < succ>
                                bacterial outside --- Certainty = 0.000(Not Clear) < succ>
                            bacterial cytoplasm --- Certainty = 0.000(Not Clear) < succ>
```

[3837] The protein has homology with the following sequences in the databases:

| !GB: AE000708 dihydroorotase [Aquifex aeolicus] 316 3e−85 | | | |
|---|---|---|---|
| >GP: AAC06948 GB: AE000708 dihydroorotase [Aquifex aeolicus] | | | |
| Score = 316 bits (801), Expect = 3e−85 | | | |
| Identities = 177/422 (41%), Positives = 254/422 (59%), Gaps = 8/422 (1%) | | | |
| Query: | 2 | ILIKNGRVMDPKSQRDQVADVLIDGKQIVKIASAIECQEAQVIDASGLIVAPGLVDIHVH | 61 |
| | | +++KNG V+DP + D+L++ +I KI I EA++IDA GLIV PG +DIHVH | |
| Sbjct: | 4 | LIVKNGYVIDPSQNLEGEFDILVENGKIKKIDKNILVPEAEIIDAKGLIVCPGFIDIHVH | 63 |
| Query: | 62 | FREPGQTHKEDIHTGALAAAAGGVTTVVMMANTNPVISDVETLQEVLASAAKEKI-HIYT | 120 |
| | | R+PGQT+KEDI +G+ A AGG TT+V M NTNP I + + +L + + + | |
| Sbjct: | 64 | LRDPGQTYKEDIESGSRCAVAGGFTTIVCMPNTNPPIDNTTVVNYILQKSKSVGLCRVLP | 123 |
| Query: | 121 | NASVTQAFNGKDVTDFKALLEAGAVSFSDDGIPLESSKVLKEAFDLANANQTFISLHEED | 180 |
| | | ++T+ GK++ DF +L EAG V+F+DDG P+ S V+++A +LA+ I H ED | |
| Sbjct: | 124 | TGTITKGRKGKEIADFYSLKEAGCVAFTDDGSPVMDSSVMRKALELASQLGVPIMDHCED | 183 |
| Query: | 181 | PQL-NGVLGFNEGIAEEHFHFCGATGVAEYSMIARDVMIAYDRQAHVHIQHLSKAESVQV | 239 |
| | | +L GV+ NEG AE IARD ++A HVHIQH+S S+++ | |
| Sbjct: | 184 | DKLAYGVI--NEGEVSALLGLSSRAPEAEEIQIARDGILAQRTGGHVHIQHVSTKLSLEI | 241 |
| Query: | 240 | VAFAQQLGAKVTAEVSPQHFSTTEDLLLIAGTSAKMNPPLRTQRDRLAVIEGLKSGVITV | 299 |
| | | + F ++ G K+T EV+P H TE +L +G +A++NPPLR + DRLA+IEG+K G+I | |
| Sbjct: | 242 | IEFFKEKGVKITCEVNPNHLLFTEREVLNSGANARVNPPLRKKEDRLALIEGVKRGIIDC | 301 |
| Query: | 300 | IATDHAPHHKDEKTVDDMTKAPSGMTGLETSLSLGLTHLVEPGHLTLMSLLEKMTLNPAL | 359 |
| | | ATDHAPH EK + + A G+ GL+T+L L L G ++L L+E T+NPA | |
| Sbjct: | 302 | FATDHAPHQTFEKELVEF--AMPGIIGLQTALPSAL-ELYRKGIISLKKLIEMFTINPAR | 358 |
| Query: | 360 | LYGFDAGYLAENGPADLVIFADKQERLITENF-ASKASNSPFIGNKLKGVVKYTIADGEV | 418 |
| | | + G D G L PAD+ IF +E ++ E SK+ N+P G LKG V YTI DG++ | |
| Sbjct: | 359 | IIGVDLGTLKLGSPADITIFDPNKEWILNEETNLSKSRNTPLWGKVLKGKVIYTIKDGKM | 418 |
| Query: | 419 | VY | 420 |
| | | VY | |
| Sbjct: | 419 | VY | 420 |

[3838] An alignment of the GAS and GBS proteins is shown below:

| Identities = 269/420 (64%), Positives = 338/420 (80%) | | | |
|---|---|---|---|
| Query: | 9 | MYIIKNGLIIDPQSGFNQVSDMLIDQGKIKQISKEIDIKGIPIIDASNKIVAPGLVDIHV | 68 |
| | | M +IKNG ++DP+S +QV+D+LID +I +I+ I+ + +IDAS IVAPGLVDIHV | |
| Sbjct: | 1 | MILIKNGRVMDPKSQRDQVADVLIDGKQIVKIASAIECQEAQVIDASGLIVAPGLVDIHV | 60 |
| Query: | 69 | HFREPGQTHKENIHTGALSAAVGGFTTVLMMANTNPTISSPEIVKQVKESAAKEAIKIET | 128 |
| | | HFREPGQTHKE+IHTGAL+AA GG TTV+MMANTNP IS E +++V SAAKE I I T | |
| Sbjct: | 61 | HFREPGQTHKEDIHTGALAAAAGGVTTVVMMANTNPVISDVETLQEVLASAAKEKIHIYT | 120 |
| Query: | 129 | VATITKSLNGKDLVNFEELLEAGVAGFSDDGIPLTDTKVLQEAMNLARKHDVVLSLHEED | 188 |
| | | A++T++ NGKD+ +F+ LLEAG FSDDGIPL +KVL+EA +LA + +SLHEED | |
| Sbjct: | 121 | NASVTQAFNGKDVTDFKALLEAGAVSFSDDGIPLESSKVLKEAFDLANANQTFISLHEED | 180 |
| Query: | 189 | PSLNGVLGINEHIAQKIYHVCGASGLAEYSMIARDAMIAYQTQAKVHIQHLSSSESVEVV | 248 |
| | | P LNGVLG NE IA++ +H CGA+G+AEYSMIARD MIAY QA VHIQHLS +ESV+VV | |
| Sbjct: | 181 | PQLNGVLGFNEGIAEEHFHFCGATGVAEYSMIARDVMIAYDRQAHVHIQHLSKAESVQVV | 240 |
| Query: | 249 | DFAQKLGANLTAEVTPQHFSKTENLLLTKGANAKLNPPLRLEKDRQALIDGLKSGVISII | 308 |
| | | FAQ+LGA +TAEV+PQHFS TE+LLL G +AK+NPPLR ++DR A+I+GLKSGVI++I | |
| Sbjct: | 241 | AFAQQLGAKVTAEVSPQHFSTTEDLLLIAGTSAKMNPPLRTQRDRLAVIEGLKSGVITVI | 300 |
| Query: | 309 | ASDHAPHHIMEKAADNISQAPSGMTGLETSLALGITYLVSTKELSMIDFLAKMTCNPAQL | 368 |
| | | A+DHAPHH EK D++++APSGMTGLETSL+LG+T+LV L+++ L KMT NPA L | |
| Sbjct: | 301 | ATDHAPHHKDEKTVDDMTKAPSGMTGLETSLSLGLTHLVEPGHLTLMSLLEKMTLNPALL | 360 |
| Query: | 369 | YGFDAGYLREGGPADIVIFDQAEERIIKAEFASKSSNSPFIGDKLKGVIHYTICNGEIVY | 428 |
| | | YGFDAGYL E GPAD+VIF +ER+I FASK+SNSPFIG+KLKGV+ YTI +GE+VY | |
| Sbjct: | 361 | YGFDAGYLAENGPADLVIFADKQERLITENFASKASNSPFIGNKLKGVVKYTIADGEVVY | 420 |

[3839] Based on this analysis, it was predicted that these proteins and their epitopes could be useful antigens for vaccines or diagnostics.

### EXAMPLE 662

[3840] A DNA sequence (GBSx0702) was identified in S. agalactiae <SEQ ID 2039> which encodes the amino acid sequence <SEQ ID 2040>. This protein is predicted to be orotate phosphoribosyltransferase PyrE (pyrE). Analysis of this protein sequence reveals the following:

```
Possible site: 28
>>> Seems to have no N-terminal signal sequence
----- Final Results -----
                            bacterial cytoplasm --- Certainty = 0.2214(Affirmative) < succ>
                              bacterial membrane --- Certainty = 0.0000(Not Clear) < succ>
                                bacterial outside --- Certainty = 0.0000(Not Clear) < succ>
```

[3841] The protein has homology with the following sequences in the GENPEPT database:

| >GP: AAC95453 GB: AF068902 orotate phosphoribosyltransferase PyrE | | | |
|---|---|---|---|
| [Streptococcus pneumoniae] | | | |
| Identities = 152/208 (73%), Positives = 180/208 (86%) | | | |
| Query: | 1 | MDLARQIAMELLDIQAVYLRPQQPFTWASGVKSPIYTDNRVTLSYPETRTLIENGFVKQI | 60 |
| | | M LA+ IA LL IQAVYL+P++PFTWASG+KSPIYTDNRVTL+YPETRTLIENGFV I | |
| Sbjct: | 1 | MTLAKDIASHLLKIQAVYLKPEEPFTWASGIKSPIYTDNRVTLAYPETRTLIENGFVDAI | 60 |
| Query: | 61 | QKHFPNVDIIAGTATAGIPHGAIIADKMNLPFAYIRSKAKDHGVGNQIEGRVYSGQKMVI | 120 |
| | | ++ FP V++IAGTATAGIPHGAIIADKMNLPFAYIRSK KDHG GNQIEGRV GQKMV+ | |
| Sbjct: | 61 | KEAFPEVEVIAGTATAGIPHGAIIADKMNLPFAYIRSKPKDHGAGNQIEGRVAQGQKMVV | 120 |
| Query: | 121 | IEDLISTGGSVLEAVTAAQSQGIEVLGVVAIFTYQLAKAEQAFREADIPLVTLTDYNQLI | 180 |
| | | +EDLISTGGSVLEAV AA+ +G +VLGVVAIF+YQL KA++ F +A + LVTL++Y++LI | |
| Sbjct: | 121 | VEDLISTGGSVLEAVAAAKREGADVLGVVAIFSYQLPKADKNFADAGVKLVTLSNYSELI | 180 |
| Query: | 181 | KVAKVNGYITADQLVLLKKFKEDQMNWQ | 208 |
| | | +A+ GYIT + L LLK+FKEDQ NWQ | |
| Sbjct: | 181 | HLAQEEGYITPEGLDLLKRFKEDQENWQ | 208 |

[3842] A related DNA sequence was identified in S. pyogenes <SEQ ID 2041> which encodes the amino acid sequence <SEQ ID 2042>. Analysis of this protein sequence reveals the following:

```
Possible site: 28
>>> Seems to have no N-terminal signal sequence
----- Final Results -----
                            bacterial cytoplasm --- Certainty = 0.1612(Affirmative) < succ>
                              bacterial membrane --- Certainty = 0.0000(Not Clear) < succ>
                                bacterial outside --- Certainty = 0.0000(Not Clear) < succ>
```

[3843] An alignment of the GAS and GBS proteins is shown below:

| Identities = 158/208 (75%), Positives = 179/208 (85%) | | | |
|---|---|---|---|
| Query: | 1 | MDLARQIAMELLDIQAVYLRPQQPFTWASGVKSPIYTDNRVTLSYPETRTLIENGFVKQI | 60 |
| | | M LA QIA +LLDI+AVYL+P+ PFTWASG+KSPIYTDNRVTLSYP+TR LIENGFV+ I | |
| Sbjct: | 1 | MTLASQIATQLLDIKAVYLKPEDPFTWASGIKSPIYTDNRVTLSYPKTRDLIENGFVETI | 60 |
| Query: | 61 | QKHFPNVDIIAGTATAGIPHGAIIADKMNLPFAYIRSKAKDHGVGNQIEGRVYSGQKMVI | 120 |
| | | + HFP V++IAGTATAGIPHGAIIADKM LPFAYIRSK KDHG GNQIEGRV GQKMVI | |
| Sbjct: | 61 | KAHFPEVEVIAGTATAGIPHGAIIADKMTLPFAYIRSKPKDHGAGNQIEGRVLKGQKMVI | 120 |
| Query: | 121 | IEDLISTGGSVLEAVTAAQSQGIEVLGVVAIFTYQLAKAEQAFREADIPLVTLTDYNQLI | 180 |
| | | IEDLISTGGSVL+A AA +G +VLGVVAIFTY+L KA Q F+EA I L+TL++Y +LI | |
| Sbjct: | 121 | IEDLISTGGSVLDAAAAASREGADVLGVVAIFTYELPKASQNFKEAGIKLITLSNYTELI | 180 |
| Query: | 181 | KVAKVNGYITADQLVLLKKFKEDQMNWQ | 208 |
| | | VAK+ GYIT D L LLKKFKEDQ+NWQ | |
| Sbjct: | 181 | AVAKLQGYITNDGLHLLKKFKEDQVNWQ | 208 |

[3844] Based on this analysis, it was predicted that these proteins and their epitopes could be useful antigens for vaccines or diagnostics.

### EXAMPLE 663

[3845] A DNA sequence (GBSx0703) was identified in S. agalactiae <SEQ ID 2043> which encodes the amino acid sequence <SEQ ID 2044>. This protein is predicted to be orotidine 5′-phosphate decarboxylase (pyrF). Analysis of this protein sequence reveals the following:

```
Possible site: 40
>>> Seems to have an uncleavable N-term signal seq
----- Final Results -----
                              bacterial membrane --- Certainty = 0.0000(Not Clear) < succ>
                                bacterial outside --- Certainty = 0.0000(Not Clear) < succ>
                            bacterial cytoplasm --- Certainty = 0.0000(Not Clear) < succ>
```

[3846] A related GBS nucleic acid sequence <SEQ ID 9829> which encodes amino acid sequence <SEQ ID 9830> was also identified.

[3847] The protein has homology with the following sequences in the GENPEPT database:

| >GP: AAC95452 GB: AF068902 orotidine-5′-decarboxylase PyrF | | | |
|---|---|---|---|
| [Streptococcus pneumoniae] | | | |
| Identities = 149/231 (64%), Positives = 176/231 (75%), | | | |
| Gaps = 1/231 (0%) | | | |
| Query: | 19 | MLEKCPIIALDFSDLASVTTFLEHFPKEELLFVKIGMELYYSEGPSIIRYIKSLGHRIFL | 78 |
| | | M E PIIALDF +V FL FP EE L++K+GMELYY+ GP I+ Y+K LGH +FL | |
| Sbjct: | 1 | MREHRPIIALDFPSFEAVKEFLALFPAEESLYLKVGMELYYAAGPEIVSYLKGLGHSVFL | 60 |
| Query: | 79 | DLKLHDIPNTVRSSMSVLAKLGIDMTNVHAAGGVEMMKAAREGLGKGPILLAVTQLTSTS | 138 |
| | | DLKLHDIPNTV+S+M VL++LG+DMTNVHAAGGVEMMKAAREGLG L+AVTQLTSTS | |
| Sbjct: | 61 | DLKLHDIPNTVKSAMKVLSQLGVDMTNVHAAGGVEMMKAAREGLGSQAKLIAVTQLTSTS | 120 |
| Query: | 139 | QEQMQVDQHINLSVVDSVCHYAQKAQEAGLDGVVASAQEGMQIKKQTNEHFICLTPGIRP | 198 |
| | | + QMQ Q+I S+ +SV HYA+K EAGLDGVV SAQE IK+ TN FICLTPGIRP | |
| Sbjct: | 121 | EAQMQEFQNIQTSLQESVIHYAKKTAEAGLDGVVCSAQEVQVIKQATNPDFICLTPGIRP | 180 |
| Query: | 199 | PQTNQLDDQKRTMTPEQARIVGADYIVVGRPITKAENPYQAYLEIKEEWNR | 249 |
| | | + DQKR MTP A +G+DYIVVGRPIT+AE+P AY IK+EW + | |
| Sbjct: | 181 | AGV-AVGDQKRVMTPADAYQIGSDYIVVGRPITQAEDPVAAYHAIKDEWTQ | 230 |

[3848] A related DNA sequence was identified in S. pyogenes <SEQ ID 2045> which encodes the amino acid sequence <SEQ ID 2046>. Analysis of this protein sequence reveals the following:

```
Possible site: 44
>>> Seems to have no N-terminal signal sequence
----- Final Results -----
                            bacterial cytoplasm --- Certainty = 0.1934(Affirmative) < succ>
                              bacterial membrane --- Certainty = 0.0000(Not Clear) < succ>
                                bacterial outside --- Certainty = 0.0000(Not Clear) < succ>
```

[3849] An alignment of the GAS and GBS proteins is shown below:

| Identities = 149/229 (65%), Positives = 180/229 (78%), Gaps = 1/229 (0%) | | | |
|---|---|---|---|
| Query: | 19 | MLEKCPIIALDFSDLASVTTFLEHFPKEELLFVKIGMELYYSEGPSIIRYIKSLGHRIFL | 78 |
| | | M E+ PIIALDFS FL+ FP EE L+VKIGMELYY++GP I+RYIKSLGH +FL | |
| Sbjct: | 1 | MKEERPIIALDFSSFEETKAFLDLFPAEEKLYVKIGMELYYAQGPDIVRYIKSLGHNVFL | 60 |
| Query: | 79 | DLKLHDIPNTVRSSMSVLAKLGIDMTNVHAAGGVEMMKAAREGLGKGPILLAVTQLTSTS | 138 |
| | | DLKLHDIPNTVR++M+VL +L IDM VHAAGGVEM+KAAREGLG+GP L+AVTQLTSTS | |
| Sbjct: | 61 | DLKLHDIPNTVRAAMAVLKELDIDMATVHAAGGVEMLKAAREGLGQGPTLIAVTQLTSTS | 120 |
| Query: | 139 | QEQMQVDQHINLSVVDSVCHYAQKAQEAGLDGVVASAQEGMQIKKQTNEHFICLTPGIRP | 198 |
| | | ++QM+ DQ+I S+++SV HY++ A +A LDG V SAQE IK T F CLTPGIRP | |
| Sbjct: | 121 | EDQMRGDQNIQTSLLESVLHYSKGAAKAQLDGAVCSAQEVEAIKAVTPTGFTCLTPGIRP | 180 |
| Query: | 199 | PQTNQLDDQKRTMTPEQARIVGADYIVVGRPITKAENPYQAYLEIKEEW | 247 |
| | | +N + DQKR MTP QAR +G+DYIVVGRPIT+A++P AY IK EW | |
| Sbjct: | 181 | KGSN-IGDQKRVMTPNQARRIGSDYIVVGRPITQAKDPVAAYQAIKAEW | 228 |

[3850] Based on this analysis, it was predicted that these proteins and their epitopes could be useful antigens for vaccines or diagnostics.

### EXAMPLE 664

[3851] A DNA sequence (GBSx0704) was identified in S. agalactiae <SEQ ID 2047> which encodes the amino acid sequence <SEQ ID 2048> in others. Analysis of this protein sequence reveals the following:

| Possible site: 52 | | | | |
|---|---|---|---|---|
| >>> Seems to have no N-terminal signal sequence | | | | |
| | INTEGRAL | Likelihood = −8.70 | Transmembrane | 192-208 (190-211) |
| | INTEGRAL | Likelihood = −7.64 | Transmembrane | 226-242 (218-250) |
| | INTEGRAL | Likelihood = −3.77 | Transmembrane | 388-404 (378-404) |
| | INTEGRAL | Likelihood = −3.08 | Transmembrane | 293-309 (292-311) |
| | INTEGRAL | Likelihood = −2.87 | Transmembrane | 165-181 (162-182) |
| | INTEGRAL | Likelihood = −2.13 | Transmembrane | 267-283 (267-284) |
| | INTEGRAL | Likelihood = −0.90 | Transmembrane | 114-130 (114-130) |
| | INTEGRAL | Likelihood = −0.75 | Transmembrane | 318-334 (318-334) |
| | INTEGRAL | Likelihood = −0.53 | Transmembrane | 140-156 (140-156) |

```
----- Final Results -----
                              bacterial membrane --- Certainty = 0.4482(Affirmative) < succ>
                                bacterial outside --- Certainty = 0.0000(Not Clear) < succ>
                            bacterial cytoplasm --- Certainty = 0.0000(Not Clear) < succ>
```

[3852] The protein has homology with the following sequences in the GENPEPT database:

| >GP: BAB03800 GB: AP001507 unknown conserved protein in others | | | |
|---|---|---|---|
| [Bacillus halodurans] | | | |
| Identities = 63/243 (25%), Positives = 120/243 (48%) | | | |
| Query: | 5 | MSVVLRAGKLLIESGAEVYRVEDTMKHFAKALQIENFEAYVVSSSIIASGINRYGKQEAK | 64 |
| | | M + + AG++++ +GAE YRVE+T++ AKA Q N ++V ++ I S + | |
| Sbjct: | 8 | MDICMLAGEIMLINGAETYRVEETLERMAKAGQFRNVHSFVTTTGIFLSFEEEGAGDVMQ | 67 |
| Query: | 65 | VCNTDGVTANLGRLEAVNNLSRQIAKQDLVSPEEIVKQLDLIEHQKDYSLLVTLISYFCG | 124 |
| | | + D +L ++ VN +SR+ ++ + E + K ++ + +YS L+ + | |
| Sbjct: | 68 | MIRVDDRMQDLNKVTLVNQVSREFVNGEIDAAEALTKLQNIAKQPMNYSPLLLHTASGVA | 127 |
| Query: | 125 | AGSFSLALGSSLLDSFSAAVTGLILGYFLNLMESRIHTGFLLTILGSSVVALSANLLYFS | 184 |
| | | G+FS G +L D+ A + G + + ++S + F + + A LL | |
| Sbjct: | 128 | GGAFSYLFGGNLFDTLPAFIAGFVASMAVVHLQSYLKVRFFAEFMAAFTGGAVAILLVLI | 187 |
| Query: | 185 | GLGEHRSIIILGALMVMVPGAAFVNSVREFSQNNFSTGLALIMSALLICISISAGVAITI | 244 |
| | | GLGE+ +I+G LM +VPG N+VR+ + G+ + +SI+ G+A+ I | |
| Sbjct: | 188 | GLGENVDQVIIGTLMPLVPGIPLTNAVRDLISGDLLAGVTRGAECFVTSLSIATGIALAI | 247 |
| Query: | 245 | EII | 247 |
| | | ++ | |
| Sbjct: | 248 | ALL | 250 |

[3853] No corresponding DNA sequence was identified in S. pyogenes.

[3854] Based on this analysis, it was predicted that this protein and its epitopes, could be useful antigens for vaccines or diagnostics.

### EXAMPLE 665

[3855] A DNA sequence (GBSx0705) was identified in S. agalactiae <SEQ ID 2049> which encodes the amino acid sequence <SEQ ID 2050>. This protein is predicted to be ABC transporter. Analysis of this protein sequence reveals the following:

```
Possible site: 40
>>> Seems to have no N-terminal signal sequence
----- Final Results -----
                            bacterial cytoplasm --- Certainty = 0.5134(Affirmative) < succ>
                              bacterial membrane --- Certainty = 0.0000(Not Clear) < succ>
                                bacterial outside --- Certainty = 0.0000(Not Clear) < succ>
```

[3856] A related GBS nucleic acid sequence <SEQ ID 9353> which encodes amino acid sequence <SEQ ID 9354> was also identified.

[3857] The protein has homology with the following sequences in the GENPEPT database:

| >GP: CAB12571 GB: Z99108 similar to ABC transporter (ATP-binding | | | |
|---|---|---|---|
| protein) [Bacillus subtilis] | | | |
| Identities = 193/288 (67%), Positives = 231/288 (80%) | | | |
| Query: | 1 | MNDVINIVYHVENQDLVRYSGDYTNFESVYAMKKAQLEAAYERQQKEIADLQDFVNRNKA | 60 |
| | | +N VIN++YHVENQ+L RY GDY F VY +KK QLEAAY++QQ+E+A+L+DFV RNKA | |
| Sbjct: | 222 | LNSVINLIYHVENQELTRYVGDYHQFMEVYEVKKQQLEAAYKKQQQEVAELKDFVARNKA | 281 |
| Query: | 61 | RVATRNMAMSRQKKLDKMDIIELQAEKPKPSFEFKESRTPGRFIFQAKDLQIGYDRALTK | 120 |
| | | RV+TRNMAMSRQKKLDKMD+IEL AEKPKP F FK +RT G+ IF+ KDL IGYD L++ | |
| Sbjct: | 282 | RVSTRNMAMSRQKKLDKMDMIELAAEKPKPEFHFKPARTSGKLIFETKDLVIGYDSPLSR | 341 |
| Query: | 121 | PLNLTFERNQKIAIVGANGIGKTTLLKSLLGIIPPISGNVERGDFIDLGYFEQEVPGGNR | 180 |
| | | PLNL ER QKIA+ GANGIGKTTLLKSLLG I P+ G+VERG+ I GYFEQEV N | |
| Sbjct: | 342 | PLNLRMERGQKIALYGANGIGKTTLLKSLLGEIQPLEGSVERGEHIYTGYFEQEVKETNN | 401 |
| Query: | 181 | QTPLEAVWDAFPALNQAEVRAALARCGLTSKHIESQIQVLSGGEQSKVRFCLLMNRENNV | 240 |
| | | T +E VW FP+ Q E+RAA A+CGLT+KHIES++ VLSGGE++KVR C L+N E N+ | |
| Sbjct: | 402 | NTCIEEVWSEFPSYTQYEIRAAPAKCGLTTKHIESRVSVLSGGEKAKVRLCKLINSETNL | 461 |
| Query: | 241 | LVLDEPTNHLDVDAKDELKRALKAYKGSILMVCHEPDFYEGWMDDVWD | 288 |
| | | LVLDEPTNHLD DAK+ELKRALK YKGSIL++ HEPDFY + W+ | |
| Sbjct: | 462 | LVLDEPTNHLDADAKEELKRALKEYKGSILLISHEPDFYMDIATETWN | 509 |
| Identities = 56/219 (25%), Positives = 97/219 (43%), Gaps = 44/219 (20%) | | | |
| Query: | 104 | IFQAKDLQIGY-DRALTKPLNLTFERNQKIAIVGANGIGKTTLLKSLLGIIPPISGNVER | 162 |
| | | I KDL G+ DRA+ ++ + + + ++GANG GK+T + + G + P G VE | |
| Sbjct: | 3 | ILSVKDLSHGFGDRAIFNNVSFRLLKGEHVGLIGANGEGKSTFMNIITGKLEPDEGKVEW | 62 |
| Query: | 163 | GDFIDLGYFEQEVPGGNRQTPLEAVWDAFPALNQAE------------------------ | 198 |
| | | + +GY +Q ++ + + DAF L E | |
| Sbjct: | 63 | SKNVRVGYLDQHTVLEKGKSIRDVLKDAFHYLFAMEEEMNEIYNKMGEADPDELEKLLEE | 122 |
| Query: | 199 | ---VRAALAR----------------CGLTSKHIESQIQVLSGGEQSKVRFCLLMNRENN | 239 |
| | | ++ AL GL+ +E + LSGG+++KV L+ + | |
| Sbjct: | 123 | VGVIQDALTNNDFYVIDSKVEEIARGLGLSDIGLERDVTDLSGGQRTKVLLAKLLLEKPE | 182 |
| Query: | 240 | VLVLDEPTNHLDVDAKDELKRALKAYKGSILMVCHEPDF | 278 |
| | | +L+LDEPTN+LD + LKR L+ Y+ + +++ H+ F | |
| Sbjct: | 183 | ILLLDEPTNYLDEQHIEWLKRYLQEYENAFILISHDIPF | 221 |

[3858] A related DNA sequence was identified in S. pyogenes <SEQ ID 2051> which encodes the amino acid sequence <SEQ ID 2052>. Analysis of this protein sequence reveals the following:

Possible site: 14
>>> Seems to have no N-terminal signal sequence
----- Final Results -----
bacterial cytoplasm --- Certainty = 0.2794 (Affirmative) < succ>
bacterial membrane --- Certainty = 0.0000 (Not Clear) < succ>
bacterial outside --- Certainty = 0.0000 (Not Clear) < succ>

[3859] An alignment of the GAS and GBS proteins is shown below:

| Identities = 246/294 (83%), Positives = 274/294 (92%), Gaps = 1/294 (0%) | | | |
|---|---|---|---|
| Query: | 1 | MNDVINIVYHVENQDLVRYSGDYTNFESVYAMKKAQLEAAYERQQKEIADLQDFVNRNKA | 60 |
| | | +NDVINIVYHVENQ LVRY+GDY F++VY MK++QLEAAYERQQKEIA+LQDFVNRNKA | |
| Sbjct: | 233 | LNDVINIVYHVENQSLVRYTGDYYQFQAVYEMKQSQLEAAYERQQKEIANLQDFVNRNKA | 292 |
| Query: | 61 | RVATRNMAMSRQKKLDKMDIIELQAEKPKPSFEFKESRTPGRFIFQAKDLQIGYDRALTK | 120 |
| | | RVATRNMAMSRQKKLDKMDIIELQAEKPKP+FEFK++RTP RFIFQ K+L IGYD LTK | |
| Sbjct: | 293 | RVATRNMAMSRQKKLDKMDIIELQAEKPKPNFEFKQARTPSRFIFQTKNLVIGYDYPLTK | 352 |
| Query: | 121 | -PLNLTFERNQKIAIVGANGIGKTTLLKSLLGIIPPISGNVERGDFIDLGYFEQEVPGGN | 179 |
| | | PLN+TFERNQKIAIVGANGIGK+TLLKSLLG+I P+ G++ GDF+++GYFEQEV G N | |
| Sbjct: | 353 | EPLNITFERNQKIAIVGANGIGKSTLLKSLLGVIEPLEGHIVTGDFLEVGYFEQEVTGVN | 412 |
| Query: | 180 | RQTPLEAVWDAFPALNQAEVRAALARCGLTSKHIESQIQVLSGGEQSKVRFCLLMNRENN | 239 |
| | | RQTPLE VWDAFPALNQAEVRAALARCGLTSKHIESQIQVLSGGEQ+KVRFCLLMNRENN | |
| Sbjct: | 413 | RQTPLEVVWDAFPALNQAEVRAALARCGLTSKHIESQIQVLSGGEQAKVRFCLLMNRENN | 472 |
| Query: | 240 | VLVLDEPTNHLDVDAKDELKRALKAYKGSILMVCHEPDFYEGWMDDVWDFNQLS | 293 |
| | | VL+LDEPTNHLD+DAK+ELKRALKAYKGSILMVCHEPDFY GW+ D WDF++L+ | |
| Sbjct: | 473 | VLILDEPTNHLDIDAKNELKRALKAYKGSILMVCHEPDFYNGWVTDTWDFSKLT | 526 |
| Identities = 60/218 (27%), Positives = 102/218 (46%), Gaps = 43/218 (19%) | | | |
| Query: | 104 | IFQAKDLQIGY-DRALTKPLNLTFERNQKIAIVGANGIGKTTLLKSLLGIIPPISGNVER | 162 |
| | | I + K L G+ DRA+ + ++ + + I +VGANG GK+T + + G + P G VE | |
| Sbjct: | 15 | ILEVKQLSHGFGDRAIFENVSFRLLKGEHIGLVGANGEGKSTFMSIVTGHLQPDEGKVEW | 74 |
| Query: | 163 | GDFIDLGYFEQEVPGGNRQTPLEAVWDAFPALNQAEVR-----AALA------------- | 204 |
| | | ++ GY +Q + QT + + AF L + E R A++A | |
| Sbjct: | 75 | SKYVTAGYLDQHTVLESGQTVRDVLRTAFDELFKTENRINEIYASMADDKADIAVLMEEV | 134 |
| Query: | 205 | ------------------------RCGLTSKHIESQIQVLSGGEQSKVRFCLLMNRENNV | 240 |
| | | G+ +ES + LSGG+++KV L+ + ++ | |
| Sbjct: | 135 | GELQDRLESRDFYTLDAKIDEVARALGVMDFGMESDVTSLSGGQRTKVLLAKLLLEKPDI | 194 |
| Query: | 241 | LVLDEPTNHLDVDAKDELKRALKAYKGSILMVCHEPDF | 278 |
| | | L+LDEPTNHLD + + LKR L+ Y+ + +++ H+ F | |
| Sbjct: | 195 | LLLDEPTNHLDAEHIEWLKRYLQHYENAFVLISHDISF | 232 |

[3860] Based on this analysis, it was predicted that these proteins and their epitopes could be useful antigens for vaccines or diagnostics.

### EXAMPLE 666

[3861] A DNA sequence (GBSx0706) was identified in S. agalactiae <SEQ ID 2053> which encodes the amino acid sequence <SEQ ID 2054>. This protein is predicted to be lipoprotein Nlp1 precursor (pstS). Analysis of this protein sequence reveals the following:

Possible site: 32
>>> Seems to have no N-terminal signal sequence
----- Final Results -----
bacterial cytoplasm --- Certainty = 0.2637 (Affirmative) < succ>
bacterial membrane --- Certainty = 0.0000 (Not Clear) < succ>
bacterial outside --- Certainty = 0.0000 (Not Clear) < succ>

[3862] The protein has homology with the following sequences in the GENPEPT database:

| >GP: CAB14429 GB: Z99116 alternate gene name: yzmB~similar to | | | |
|---|---|---|---|
| phosphate ABC transporter (binding protein) [Bacillus subtilis] | | | |
| Identities = 42/62 (67%), Positives = 49/62 (78%) | | | |
| Query: | 15 | SITSVGSTALQPLVEAAADEFGKTNLGKTINVQGGGSGTGLSQVQSGAVQIGNSDLFAEE | 74 |
| | | S+T GS+A+QPLV AAA++F + N I VQ GGSGTGLSQV GAVQIGNSD+FAEE | |
| Sbjct: | 45 | SLTISGSSAMQPLVLAAAEKFMEENPDADIQVQAGGSGTGLSQVSEGAVQIGNSDVFAEE | 104 |
| Query: | 75 | KE | 76 |
| | | KE | |
| Sbjct: | 105 | KE | 106 |

[3863] A related DNA sequence was identified in S. pyogenes <SEQ ID 1695> which encodes the amino acid sequence <SEQ ID 1696>. Analysis of this protein sequence reveals the following:

Possible site: 24
>>> May be a lipoprotein
----- Final Results -----
bacterial membrane --- Certainty = 0.0000 (Not Clear) < succ>
bacterial outside --- Certainty = 0.0000 (Not Clear) < succ>
bacterial cytoplasm --- Certainty = 0.0000 (Not Clear) < succ>

[3864] An alignment of the GAS and GBS proteins is shown below:

| Identities = 63/74 (85%), Positives = 71/74 (95%) | | | |
|---|---|---|---|
| Query: | 3 | LSGCANWIDKGQSITSVGSTALQPLVEAAADEFGKTNLGKTINVQGGGSGTGLSQVQSGA | 62 |
| | | LS C++WIDKG+SIT+VGSTALQPLVEA ADEFG +NLGKT+NVQGGGSGTGLSQVQSGA | |
| Sbjct: | 20 | LSACSSWIDKGESITAVGSTALQPLVEAVADEFGSSNLGKTVNVQGGGSGTGLSQVQSGA | 79 |
| Query: | 63 | VQIGNSDLFAEEKE | 76 |
| | | VQIGNSD+FAEEK+ | |
| Sbjct: | 80 | VQIGNSDVFAEEKD | 93 |

[3865] Based on this analysis, it was predicted that these proteins and their epitopes could be useful antigens for vaccines or diagnostics.

### EXAMPLE 667

[3866] A DNA sequence (GBSx0707) was identified in S. agalactiae <SEQ ID 2055> which encodes the amino acid sequence <SEQ ID 2056>. This protein is predicted to be lipoprotein Nlp1 precursor (pstS). Analysis of this protein sequence reveals the following:

Possible site: 60
>>> Seems to have an uncleavable N-term signal seq
----- Final Results -----
bacterial membrane --- Certainty = 0.0000 (Not Clear) < succ>
bacterial outside --- Certainty = 0.0000 (Not Clear) < succ>
bacterial cytoplasm --- Certainty = 0.0000 (Not Clear) < succ>

[3867] A related GBS nucleic acid sequence <SEQ ID 9343> which encodes amino acid sequence <SEQ ID 9344> was also identified.

[3868] The protein has homology with the following sequences in the GENPEPT database:

| >GP: CAB14429 GB: Z99116 alternate gene name: yzmB~similar to | | | |
|---|---|---|---|
| phosphate ABC transporter (binding protein) [Bacillus subtilis] | | | |
| Identities = 95/184 (51%), Positives = 126/184 (67%), Gaps = 1/184 (0%) | | | |
| Query: | 3 | DHQVAVAGLAVIVNKKVNVKNLTTHQLRDIFAGKIKINWKEVGGQDLDISIINRAASSGSR | 62 |
| | | DHQVAV G+A VN VK+++ +L+ IF GKIKNWKE+GG+D I+++NR SSG+R | |
| Sbjct: | 115 | DHQVAVVGMAAAVNPDAGVKDISKDELKKIFTGKIKNWKELGGKDQKITLVNRPDSSGTR | 174 |
| Query: | 63 | ATFDNTIMGNVAPIQSQEQDSNGMVKSIVSQTPGAISYLAFAYV-DKSVGTLKLNGFAPT | 121 |
| | | ATF + P + +DS+ VK I++ TPGAI YLAF+Y+ D V L ++G P | |
| Sbjct: | 175 | ATFVKYALDGAEPAEGITEDSSNTVKKIIADTPGAIGYLAFSYLTDDKVTALSIDGVKPE | 234 |
| Query: | 122 | AKNVTTDNWKLWSYEHMYTKGNETGLTKEFLDYMKSDKVQSSIVQHMGYISINDMKVVKD | 181 |
| | | AKNV T + +W+Y+H YTKG TGL KEFLDY+KS+ +Q SIV GYI + DMKV +D | |
| Sbjct: | 235 | AKNVATGEYPIWAYQHSYTKGEATGLAKEFLDYLKSEDIQKSIVTDQGYIPVTDMKVTRD | 294 |
| Query: | 182 | AEGK | 185 |
| | | A GK | |
| Sbjct: | 295 | ANGK | 298 |

[3869] There is also homology to SEQ ID 1696.

[3870] SEQ ID 9344 (GBS659) was expressed in E. coli as a GST-fusion product. SDS-PAGE analysis of total cell extract is shown in FIG. 135 (lane 2 & 3; MW 60 kDa). It was also expressed in E. coli as a His-fusion product. SDS-PAGE analysis of total cell extract is shown in FIG. 135 (lane 5-7; MW 35 kDa) and in FIG. 178 (lane 11; MW 35 kDa).

[3871] GBS659-His was purified as shown in FIG. 228, lane 6-8.

[3872] Based on this analysis, it was predicted that these proteins and their epitopes could be useful antigens for vaccines or diagnostics.

### EXAMPLE 668

[3873] A DNA sequence (GBSx0708) was identified in S. agalactiae <SEQ ID 2057> which encodes the amino acid sequence <SEQ ID 2058>. This protein is predicted to be phosphate transporter permease PstC (pstC-2). Analysis of this protein sequence reveals the following:

| Possible site: 47 | | | |
|---|---|---|---|
| >>> Seems to have no N-terminal signal sequence | | | |
| INTEGRAL | Likelihood = −15.50 | Transmembrane | 35-51 (27-61) |
| INTEGRAL | Likelihood = −7.64 | Transmembrane | 167-183 (154-186) |
| INTEGRAL | Likelihood = −6.37 | Transmembrane | 282-298 (277-302) |
| INTEGRAL | Likelihood = −5.52 | Transmembrane | 85-101 (81-116) |
| INTEGRAL | Likelihood = −3.24 | Transmembrane | 133-149 (131-155) |

----- Final Results -----
bacterial membrane --- Certainty = 0.7198 (Affirmative) < succ>
bacterial outside --- Certainty = 0.0000 (Not Clear) < succ>
bacterial cytoplasm --- Certainty = 0.0000 (Not Clear) < succ>

[3874] A related GBS nucleic acid sequence <SEQ ID 8635> which encodes amino acid sequence <SEQ ID 8636> was also identified. Analysis of this protein sequence reveals the following:

| Lipop: Possible site: −1 Crend: 8 | | | |
|---|---|---|---|
| SRCFLG: 0 | | | |
| NcG: Length of UR: 5 | | | |
| Peak Value of UR: −0.12 | | | |
| Net Charge of CR: 2 | | | |
| McG: Discrim Score: −16.22 | | | |
| GvH: Signal Score (−7.5): −4.26 | | | |
| Possible site: 41 | | | |
| >>> Seems to have no N-terminal signal sequence | | | |
| Amino Acid Composition: calculated from 1 | | | |
| ALOM program | count: 5 | value: −15.50 | threshold: 0.0 |

| | | | |
|---|---|---|---|
| INTEGRAL | Likelihood = −15.50 | Transmembrane | 29-45 (21-55) |
| INTEGRAL | Likelihood = −7.64 | Transmembrane | 161-177 (148-180) |
| INTEGRAL | Likelihood = −6.37 | Transmembrane | 276-292 (271-296) |
| INTEGRAL | Likelihood = −5.52 | Transmembrane | 79-95 (75-110) |
| INTEGRAL | Likelihood = −3.24 | Transmembrane | 127-143 (125-149) |

| | | |
|---|---|---|
| PERIPHERAL | Likelihood = 0.69 | 205 |

modified ALOM score: 3.60
icm1 HYPID: 7 CFP: 0.720
*** Reasoning Step: 3
----- Final Results -----
bacterial membrane --- Certainty = 0.7198 (Affirmative) < succ>
bacterial outside --- Certainty = 0.0000 (Not Clear) < succ>
bacterial cytoplasm --- Certainty = 0.0000 (Not Clear) < succ>

[3875] The protein has homology with the following sequences in the GENPEPT database:

| >GP: CAB14428 GB: Z99116 alternate gene name: yzmC~similar to | | | |
|---|---|---|---|
| phosphate ABC transporter (permease) [Bacillus subtilis] | | | |
| Identities = 145/303 (47%), Positives = 209/303 (68%), Gaps = 4/303 (1%) | | | |
| Query: | 8 | KNQELAKKLTSPSKNSRLEKFGKGITFLSLALIVFIVAM-ILIFVAQKGLSTFFVDGVKL | 66 |
| | | +N ++++L S +N +L++ + + ALI+ ++ I IF+ KGL +F V+GV | |
| Sbjct: | 6 | ENMSVSERLISSRQNRQLDEVRGRMIVTACALIMIAASVAITIFLGVKGLQSFLVNGVSP | 65 |
| Query: | 67 | TDFLFNTKWEP--SAKSFGAFPMIAGSFIVTILSAIIATPFAIGAAVFMTEISPKYGSKI | 124 |
| | | +FL + W P S +G P I GSF VTILSA+IA P I +FMTEI+P +G K+ | |
| Sbjct: | 66 | IEFLTSLNWNPTDSDPKYGVLPFIFGSFAVTILSALIAAPLGIAGPIFMTEIAPNWGKKV | 125 |
| Query: | 125 | LQPAVELLVGIPSVVYGFIGLQIIVPFVRSI-FGGTGFGILSGVCVLFVMILPTVTFMTV | 183 |
| | | LQP +ELLVGIPSVVYGFIGL ++VPF+ GTG +L+G VL VMILPT+T ++ | |
| Sbjct: | 126 | LQPVIELLVGIPSVVYGFIGLTVLVPFIAQFKSSGTGHSLLAGTIVLSVMILPTITSISA | 185 |
| Query: | 184 | DSLRAVPRHYKEASLAMGATRWQTIWRVILNAARPGIFTAIVFGMARAFGEALAIQMVVG | 243 |
| | | D++ ++P+ +E S A+GATRWQTI +V++ AA P + TA+V GMARAFGEALA+QMV+G | |
| Sbjct: | 186 | DAMASLPKSLREGSYALGATRWQTIRKVLVPAAFPTLMTAVVLGMARAFGEALAVQMVIG | 245 |
| Query: | 244 | NSAILPTSLTTPAATLTSVLTMGIGNTVMGTVQNNVLWSLALVLLIMSLAFNTVIKLITR | 303 |
| | | N+ +LP S A TLT+++T+ +G+T G+V+NN LWS+ LVLL+MS F +I+ ++ | |
| Sbjct: | 246 | NTRVLPESPFDTAGTLTTIITLNMGHTTYGSVENNTLWSMGLVLLVMSFLFILLIRYLSS | 305 |
| Query: | 304 | EGK | 306 |
| | | K | |
| Sbjct: | 306 | RRK | 308 |

[3876] A related DNA sequence was identified in S. pyogenes <SEQ ID 1691> which encodes the amino acid sequence <SEQ ID 1692>. Analysis of this protein sequence reveals the following:

| Possible site: 41 | | | |
|---|---|---|---|
| >>> Seems to have no N-terminal signal sequence | | | |
| INTEGRAL | Likelihood = −17.25 | Transmembrane | 29-45 (21-55) |
| INTEGRAL | Likelihood = −7.22 | Transmernbrane | 162-178 (154-84) |
| INTEGRAL | Likelihood = −5.57 | Transmembrane | 282-298 (277-302) |
| INTEGRAL | Likelihood = −5.41 | Transmembrane | 96-112 (81-116) |
| INTEGRAL | Likelihood = −3.08 | Transmembrane | 133-149 (131-152) |

----- Final Results -----
bacterial membrane --- Certainty = 0.7899 (Affirmative) < succ>
bacterial outside --- Certainty = 0.0000 (Not Clear) < succ>
bacterial cytoplasm --- Certainty = 0.0000 (Not Clear) < succ>

[3877] An alignment of the GAS and GBS proteins is shown below:

| Identities = 266/311 (85%), Positives = 290/311 (92%), Gaps 6/311 (1%) | | | |
|---|---|---|---|
| Query: | 7 | MKNQELAKKLTSPSKNSRLEKFGKGITFLSLALIVFIVAMILIFVAQKGLSTFFVDGVKL | 66 |
| | | M+NQELAKKL SPSKNSRLE FG+ ITFL LALIVFIVAMILIVAQKGLSTFFVD V L | |
| Sbjct: | 1 | MENQELAKKLASPSKNSRLETFGRTITFLCLALIVFIVAMILIFVAQKGLSTFFVDKVNL | 60 |
| Query: | 67 | TDFLFNTKWEPSAKS------FGAFPMIAGSFIVTILSAIIATPFAIGAAVFMTEISPKY | 120 |
| | | DFLF +W+PS K+ GA PMI GSF+VTILSAIIATPFAIGAAVFMTEISPKY | |
| Sbjct: | 61 | FDFLFGKEWQPSVKNAAGIPYLGALPMITGSFLVTILSAIIATPFAIGAAVFMTEISPKY | 120 |
| Query: | 121 | GSKILQPAVELLVGIPSVVYGFIGLQIIVPFVRSIFGGTGFGILSGVCVLFVMILPTVTF | 180 |
| | | G+K+LQPAVELLVGIPSVVYGFIGLQ+IVPF+RSIFGGTGFGILSGVCVLFVMILPTVTF | |
| Sbjct: | 121 | GAKLLQPAVELLVGIPSVVYGFIGLQVIVPFMRSIFGGTGFGILSGVCVLFVMILPTVTF | 180 |
| Query: | 181 | MTVDSLRAVPRHYKEASLAMGATRWQTIWRVILNAARPGIFTAIVFGMARAFGEALAIQM | 240 |
| | | MT DSLRAVPRHY+EAS+AMGATRWQTIWRV+LNAARPGIFTA++FGMARAFGEALAIQM | |
| Sbjct: | 181 | MTTDSLRAVPRHYREASMAMGATRWQTIWRVVLNAARPGIFTAVIFGMARAFGEALAIQM | 240 |
| Query: | 241 | VVGNSAILPTSLTTPAATLTSVLTMGIGNTVMGTVQNNVLWSLALVLLIMSLAFNTVIKL | 300 |
| | | VVGNSA++P+SLTTPAATLTSVLTMGIGNTVMGTVQNNVLWSLALVLL+MSLAFN+++KL | |
| Sbjct: | 241 | VVGNSAVMPSSLTTPAATLTSVLTMGIGNTVMGTVQNNVLWSLALVLLLMSLAFNSLVKL | 300 |
| Query: | 301 | ITREGKKNYER | 311 |
| | | IT+E K+NYER | |
| Sbjct: | 301 | ITKERKRNYER | 311 |

[3878] Based on this analysis, it was predicted that these proteins and their epitopes could be useful antigens for vaccines or diagnostics.

### EXAMPLE 669

[3879] A DNA sequence (GBSx0709) was identified in S. agalactiae <SEQ ID 2059> which encodes the amino acid sequence <SEQ ID 2060>. Analysis of this protein sequence reveals the following:

Possible site: 13
>>> Seems to have no N-terminal signal sequence
----- Final Results -----
bacterial cytoplasm --- Certainty = 0.2469 (Affirmative) < succ>
bacterial membrane --- Certainty = 0.0000 (Not Clear) < succ>
bacterial outside --- Certainty = 0.0000 (Not Clear) < succ>

[3880] The protein has no significant homology with any sequences in the GENPEPT database.

[3881] No corresponding DNA sequence was identified in S. pyogenes.

[3882] Based on this analysis, it was predicted that this protein and its epitopes, could be useful antigens for vaccines or diagnostics.

### EXAMPLE 670

[3883] A DNA sequence (GBSx0710) was identified in S. agalactiae <SEQ ID 2061> which encodes the amino acid sequence <SEQ ID 2062>. This protein is predicted to be probable abc transporter permease protein in soda-comga intergenic reg. Analysis of this protein sequence reveals the following:

| Possible site: 18 | | | |
|---|---|---|---|
| >>> Seems to have a cleavable N-term signal seq. | | | |
| INTEGRAL | Likelihood = −9.24 | Transmembrane | 20-36 (19-41) |
| INTEGRAL | Likelihood = −8.28 | Transmembrane | 66-82 (57-88) |
| INTEGRAL | Likelihood = −6.90 | Transmembrane | 260-276 (258-285) |
| INTEGRAL | Likelihood = −5.47 | Transmembrane | 109-125 (106-129) |
| INTEGRAL | Likelihood = −2.87 | Transmembrane | 181-197 (178-198) |

----- Final Results -----
bacterial membrane --- Certainty = 0.4694 (Affirmative) < succ>
bacterial outside --- Certainty = 0.0000 (Not Clear) < succ>
bacterial cytoplasm --- Certainty = 0.0000 (Not Clear) < succ>

[3884] The protein has homology with the following sequences in the GENPEPT database:

| >GP: CAB14427 GB: Z99116 alternate gene name: yzmD~similar to | | | |
|---|---|---|---|
| phosphate ABC transporter (permease) [Bacillus subtilis] | | | |
| Identities = 157/294 (53%), Positives = 225/294 (76%) | | | |
| Query: | 1 | MNAKKADKLATTILYSIAAIIVTILASLLIFILVRGLPHVSWSFLTGKSSSYEAGGGIGI | 60 |
| | | MN K DKLAT + AAII IL L +I++ G+ +S+ F+T KSS+ AGGGI | |
| Sbjct: | 1 | MNRKITDKLATGMFGLCAAIIAAILVGLFSYIIINGVSQLSFQFITTKSSAIAAGGGIRD | 60 |
| Query: | 61 | QLYNSFFLLIVTLIISIPLSLGAGIYLSEYAKKGRLTNFVRTCIEILSSLPSVVVGLFGY | 120 |
| | | QL+NSF++L +T++I+IPL +G G++++EYA ++T+F+RTCIE+LSSLPS+V+G+FG | |
| Sbjct: | 61 | QLFNSFYILFITMLITIPLGVGGGVFMAEYAPNNKVTDFIRTCIEVLSSLPSIVIGMFGL | 120 |
| Query: | 121 | LIFVVQFQYGFSIISGALALTVFNLPQMTRSVEDSLQNVHHTQREAGLALGISRWETVIY | 180 |
| | | L+FV +G++II GALALTVFNLP M R ED++++V +EA LALG+SRW TV | |
| Sbjct: | 121 | LMFVNLTGWGYTIIGGALALTVFNLPVMVRVTEDAIRSVPKDLKEASLALGVSRWHTVKT | 180 |
| Query: | 181 | VVVPEALPSIVTGVVLASGRIFGEAAALIYTAGQSAPALDWSNWNVLSVTSPISIFRQAE | 240 |
| | | V++P A+PSI+TG +LASGR+FGEAAAL++TAG + P L+++ WN S TSP++IFR AE | |
| Sbjct: | 181 | VLIPSAIPSIITGAILASGRVFGEAAALLFTAGLTTPRLNFTEWNPFSETSPLNIFRPAE | 240 |
| Query: | 241 | TLAVHIWKVNSEGTIPDATQVSAGSAAVLLVVILIFNLSARSIGKKLHSKLTSS | 294 |
| | | TLAVHIW VN++G IPDA ++ G + VL++ +L+FNL+AR +G ++ KLT++ | |
| Sbjct: | 241 | TLAVHIWNVNTQGMIPDAEAIANGGSPVLVISVLVFNLAARWLGTMIYKKLTAN | 294 |

[3885] A related DNA sequence was identified in S. pyogenes <SEQ ID 1685> which encodes the amino acid sequence <SEQ ID 1686>. Analysis of this protein sequence reveals the following:

| Possible site: 56 | | | |
|---|---|---|---|
| >>> Seems to have an uncleavable N-term signal seq | | | |
| INTEGRAL | Likelihood = −11.89 | Transmembrane | 17-33 (8-40) |
| INTEGRAL | Likelihood = −10.19 | Transmembrane | 260-276 (257-285) |
| INTEGRAL | Likelihood = −5.89 | Transmembrane | 66-82 (57-87) |
| INTEGRAL | Likelihood = −5.47 | Transmembrane | 109-125 (106-129) |
| INTEGRAL | Likelihood = −2.02 | Transmembrane | 181-197 (180-197) |

----- Final Results -----
bacterial membrane --- Certainty = 0.5755 (Affirmative) < succ>
bacterial outside --- Certainty = 0.0000 (Not Clear) < succ>
bacterial cytoplasm --- Certainty = 0.0000 (Not Clear) < succ>

[3886] An alignment of the GAS and GBS proteins is shown below:

| Identities = 257/294 (87%), Positives = 278/294 (94%) | | | |
|---|---|---|---|
| Query: | 1 | MNAKKADKLATTILYSIAAIIVTILASLLIFILVRGLPHVSWSFLTGKSSSYEAGGGIGI | 60 |
| | | MNAKK DK+AT LY+IA IIV ILASL+++ILVRGLPH+SWSFLTGKSSSYEAGGGIGI | |
| Sbjct: | 1 | MNAKKVDKVATGTLYTIAGIIVAILASLILYILVRGLPHISWSFLTGKSSSYEAGGGIGI | 60 |
| Query: | 61 | QLYNSFFLLIVTLIISIPLSLGAGIYLSEYAKKGRLTNFVRTCIEILSSLPSVVVGLFGY | 120 |
| | | QLYNSFFLLIVTLIISIPLS GAGIYL+EYAKKG +TNF+RTCIEILSSLPSVVVGLFGY | |
| Sbjct: | 61 | QLYNSFFLLIVTLIISIPLSTGAGIYLAEYAKKGPVTNFIRTCIEILSSLPSVVVGLFGY | 120 |
| Query: | 121 | LIFVVQFQYGFSIISGALALTVFNLPQMTRSVEDSLQNVHHTQREAGLALGISRWETVIY | 180 |
| | | LIFVVQF+YGFSIISGALALTVFNLPQMTR+VEDSL +VHHTQREAGLALG+SRWETV Y | |
| Sbjct: | 121 | LIFVVQFEYGFSIISGALALTVFNLPQMTRNVEDSLLHVHHTQREAGLALGLSRWETVFY | 180 |
| Query: | 181 | VVVPEALPSIVTGVVLASGRIFGEAAALIYTAGQSAPALDWSNWNVLSVTSPISIFRQAE | 240 |
| | | VV+PEALP +VTG+VLASGRIFGEAAALIYTAGQSAPALDWSNWN LSVTSPISIFRQ+E | |
| Sbjct: | 181 | VVIPEALPGMVTGIVLASGRIFGEAAALIYTAGQSAPALDWSNWNPLSVTSPISIFRQSE | 240 |
| Query: | 241 | TLAVHIWKVNSEGTIPDATQVSAGSAAVLLVVILIFNLSARSIGKKLHSKLTSS | 294 |
| | | TLAVHIWKVNSEGTIPDAT VSAGSAAVLL+ ILIFN SA IGKKLHSK+T++ | |
| Sbjct: | 241 | TLAVHIWKVNSEGTIPDATLVSAGSAAVLLIFILIFNFSAHFIGKKLHSKMTAA | 294 |

[3887] Based on this analysis, it was predicted that these proteins and their epitopes could be useful antigens for vaccines or diagnostics.

### EXAMPLE 671

[3888] A DNA sequence (GBSx0711) was identified in S. agalactiae <SEQ ID 2063> which encodes the amino acid sequence <SEQ ID 2064>. This protein is predicted to be phosphate ABC transporter, ATP-binding protein (pstB) (pstB-2). Analysis of this protein sequence reveals the following:

Possible site: 60
>>> Seems to have no N-terminal signal sequence
----- Final Results -----
bacterial cytoplasm --- Certainty = 0.4506 (Affirmative) < succ>
bacterial membrane --- Certainty = 0.0000 (Not Clear) < succ>
bacterial outside --- Certainty = 0.0000 (Not Clear) < succ>

[3889] The protein has homology with the following sequences in the GENPEPT database:

| >GP: AAB99016 GB: U67544 phosphate specific transport complex | | | |
|---|---|---|---|
| component (pstB) [Methanococcus jannaschii] | | | |
| Identities = 154/247 (62%), Positives = 204/247 (82%) | | | |
| Query: | 21 | LTTKDLHVYYGEKEAIKGIDMQFEKNKITALIGPSGCGKSTYLRSLNRMNDTIDIARVTG | 80 |
| | | + TK+L+++YGEK+A+ I++ +NKITALIGPSGCGKST+LR LNR+ND I R+ G | |
| Sbjct: | 6 | METKNLNLWYGEKQALFDINLPIYENKITALIGPSGCGKSTFLRCLNRLNDLIPNVRIEG | 65 |
| Query: | 81 | QIMYEGIDVNAQDINVYEMRKHIGMVFQRPNPFAKSIYKNITFAYERAGVKDKKFLDEVV | 140 |
| | | +++ +G ++ +D++VYE+RK +GMVFQPNPFA SIY N+ F G+KDKK LD++V | |
| Sbjct: | 66 | EVLLDGKNIYDKDVDVYELRKRVGMVFQKPNPFAMSIYDNVAFGPRIHGIKDKKELDKIV | 125 |
| Query: | 141 | ETSLKQAALWDQVKDDLHKSAFTLSGGQQQRLCIARAIAVKPEILLMDEPASALDPIATM | 200 |
| | | E +LK+AALWD+VKD+LHK+A +LSGGQQQRLCIARAIAVKPE+LLMDEP SALDPI+T+ | |
| Sbjct: | 126 | EWALKKAALWDEVKDELHKNALSLSGGQQQRLCIARAIAVKPEVLLMDEPTSALDPISTL | 185 |
| Query: | 201 | QLEETMFELKKNYTIIIVTHNMQQAARASDYTAFFYLGDLIEYDKTNNIFQNAKCQSTSD | 260 |
| | | ++EE M EL K+YTI++VTHNMQQA+R SDYTAFF +G LIE+ +T IF N + + T D | |
| Sbjct: | 186 | KIEELMVELAKDYTIVVVTHNMQQASRVSDYTAFFLMGKLIEFGETEQIFLNPQKKETDD | 245 |
| Query: | 261 | YVSGRFG | 267 |
| | | Y+SGRFG | |
| Sbjct: | 246 | YISGRFG | 252 |

[3890] A related DNA sequence was identified in S. pyogenes <SEQ ID 1681> which encodes the amino acid sequence <SEQ ID 1682>. Analysis of this protein sequence reveals the following:

Possible site: 20
>>> Seems to have no N-terminal signal sequence
----- Final Results -----
bacterial cytoplasm --- Certainty = 0.2796 (Affirmative) < succ>
bacterial membrane --- Certainty = 0.0000 (Not Clear) < succ>
bacterial outside --- Certainty = 0.0000 (Not Clear) < succ>

[3891] An alignment of the GAS and GBS proteins is shown below:

| Identities = 242/267 (90%), Positives = 258/267 (95%) | | | |
|---|---|---|---|
| Query: | 1 | MAEYNWDERHIITFPEENSALTTKDLHVYYGEKEAIKGIDMQFEKNKITALIGPSGCGKS | 60 |
| | | M EYNW+ERHIITFPEE AL TKDLHVYYG KEAIKGIDMQFEK+KITALIGPSGCGKS | |
| Sbjct: | 1 | MTEYNWNERHIITFPEETLALATKDLHVYYGAKEAIKGIDMQFEKHKITALIGPSGCGKS | 60 |
| Query: | 61 | TYLRSLNRMNDTIDIARVTGQIMYEGIDVNAQDINVYEMRKHIGMVFQRPNPFAKSIYKN | 120 |
| | | TYLRSLNRMNDTIDIARVTG+I+Y+GIDVN +D+NVYE+RKH+GMVFQRPNPFAKSIYKN | |
| Sbjct: | 61 | TYLRSLNRMNDTIDIARVTGEILYQGIDVNRKDMNVYEIRKHLGMVFQRPNPFAKSIYKN | 120 |
| Query: | 121 | ITFAYERAGVKDKKFLDEVVETSLKQAALWDQVKDDLHKSAFTLSGGQQQRLCIARAIAV | 180 |
| | | ITFA+ERAGVKDKK LDE+VETSLKQAALWDQVKDDLHKSAFTLSGGQQQRLCIARAI+V | |
| Sbjct: | 121 | ITFAHERAGVKDKKVLDEIVETSLKQAALWDQVKDDLHKSAFTLSGGQQQRLCIARAISV | 180 |
| Query: | 181 | KPEILLMDEPASALDPIATMQLEETMFELKKNYTIIIVTHNMQQAARASDYTAFFYLGDL | 240 |
| | | KP+ILLMDEPASALDPIATMQLEETMFELKKNYTIIIVTHNMQQAARASDYTAFFYLG+L | |
| Sbjct: | 181 | KPDILLMDEPASALDPIATMQLEETMFELKKNYTIIIVTHNMQQAARASDYTAFFYLGNL | 240 |
| Query: | 241 | IEYDKTNNIFQNAKCQSTSDYVSGRFG | 267 |
| | | IEYDKT NIFQNA+CQST+DYVSG FG | |
| Sbjct: | 241 | IEYDKTRNIFQNAQCQSTNDYVSGHFG | 267 |

[3892] Based on this analysis, it was predicted that these proteins and their epitopes could be useful antigens for vaccines or diagnostics.

### EXAMPLE 672

[3893] A DNA sequence (GBSx0712) was identified in S. agalactiae <SEQ ID 2065> which encodes the amino acid sequence <SEQ ID 2066>. This protein is predicted to be phosphate ABC transporter, ATP-binding protein (pstB-1). Analysis of this protein sequence reveals the following:

Possible site: 50
>>> Seems to have no N-terminal signal sequence
----- Final Results -----
bacterial cytoplasm --- Certainty = 0.3806 (Affirmative) < succ>
bacterial membrane --- Certainty = 0.0000 (Not Clear) < succ>
bacterial outside --- Certainty = 0.0000 (Not Clear) < succ>

[3894] A related GBS nucleic acid sequence <SEQ ID 9815> which encodes amino acid sequence <SEQ ID 9816> was also identified.

[3895] The protein has homology with the following sequences in the GENPEPT database:

| >GP: CAB14426 GB: Z99116 alternate gene name: yzmE~similar to | | | |
|---|---|---|---|
| phosphate ABC transporter (ATP-binding protein) | | | |
| [Bacillus subtilis] | | | |
| Identities = 148/248 (59%), Positives = 189/248 (75%) | | | |
| Query: | 5 | ILQVSDLSVYYNKKKALKEVSMDFYPNEITALIGPSGSGKSTLLRAINRMGDLNPEVTLT | 64 |
| | | +L+V DLS+YY K+A+ V+MD N +TALIGPSG GKST LR INRM DL P | |
| Sbjct: | 22 | VLEVKDLSIYYGNKQAVHHVNMDIEKNAVTALIGPSGCGKSTFLRNINRMNDLIPSARAE | 81 |
| Query: | 65 | GAVMYNGHNVYSPRTDTVELRKEIGMVFQQPNPFPMSVFENVVYGLRLKGIKDKATLDEA | 124 |
| | | G ++Y G N+ + V LR+EIGMVFQ+PNPFP S++ N+ + L+ G ++KA LDE | |
| Sbjct: | 82 | GEILYEGLNILGGNINVVSLRREIGMVFQKPNPFPKSIYANITHALKYAGERNKAVLDEI | 141 |
| Query: | 125 | VETSLKGASIWDEVKDRLHDSALGLSGGQQQRVCIARTLATKPKIILLDEPTSALDPISA | 184 |
| | | VE SL A++WDEVKDRLH SAL LSGGQQQR+CIARTLA KP ++LLDEP SALDPIS | |
| Sbjct: | 142 | VEESLTKAALWDEVKDRLHSSALSLSGGQQQRLCIARTLAMKPAVLLLDEPASALDPISN | 201 |
| Query: | 185 | GKIEETLHGLKDQYTMLLVTRSMQQASRISDRTGFFLDGNLIEYGNTKEMFMNPKHKETE | 244 |
| | | KIEE + GLK +Y++++VT +MQQA R+SDRT FFL+G L+EYG T+++F +PK ++TE | |
| Sbjct: | 202 | AKIEELITGLKREYSIIIVTHNMQQALRVSDRTAFFLNGELVEYGQTEQIFTSPKKQKTE | 261 |
| Query: | 245 | DYITGKFG | 252 |
| | | DYI GKFG | |
| Sbjct: | 262 | DYINGKFG | 269 |

[3896] A related DNA sequence was identified in S. pyogenes <SEQ ID 2067> which encodes the amino acid sequence <SEQ ID 2068>. Analysis of this protein sequence reveals the following:

Possible site: 46
>>> Seems to have no N-terminal signal sequence
----- Final Results -----
bacterial cytoplasm --- Certainty = 0.3590 (Affirmative) < succ>
bacterial membrane --- Certainty = 0.0000 (Not Clear) < succ>
bacterial outside --- Certainty = 0.0000 (Not Clear) < succ>

[3897] An alignment of the GAS and GBS proteins is shown below:

| Identities = 208/252 (82%), Positives = 235/252 (92%) | | | |
|---|---|---|---|
| Query: | 1 | MTQPILQVSDLSVYYNKKKALKEVSMDFYPNEITALIGPSGSGKSTLLRAINRMGDLNPE | 60 |
| | | MT+PILQ+ DLSVYYN+KK LK+VS+D YPNEITALIGPSGSGKSTLLR+INRN DLNPE | |
| Sbjct: | 2 | MTEPILQIRDLSVYYNQKKTLKDVSLDLYPNEITALIGPSGSGKSTLLRSINRMNDLNPE | 61 |
| Query: | 61 | VTLTGAVMYNGHNVYSPRTDTVELRKEIGMVFQQPNPFPHSVFENVVYGLRLKGIKDKAT | 120 |
| | | VT+TG+++YNGHN+YSPRTDTV+LRKEIGMVFQQPNPFPMS++ENVVYGLRLKGI+DK+ | |
| Sbjct: | 62 | VTITGSIVYNGHNIYSPRTDTVDLRKEIGMVFQQPNPFPMSIYENVVYGLRLKGIRDKSI | 121 |
| Query: | 121 | LDEAVETSLKGASIWDEVKDRLHDSALGLSGGQQQRVCIARTLATKPKIILLDEPTSALD | 180 |
| | | LD AVE+SLKGASIW+EVKDRLHDSA+GLSGGQQQRVCIAR LAT P+IILLDEPTSALD | |
| Sbjct: | 122 | LDHAVESSLKGASIWNEVKDRLHDSAVGLSGGQQQRVCIARVLATSPRIILLDEPTSALD | 181 |
| Query: | 181 | PISAGKIEETLHGLKDQYTMLLVTRSMQQASRISDRTGFFLDGNLIEYGNTKEMFMNPKH | 240 |
| | | PISAGKIEETL LK YT+ +VTRSMQQASR+SDRTGFFL+G+L+E G TK MFMNPK | |
| Sbjct: | 182 | PISAGKIEETLLLLKKDYTLAIVTRSMQQASRLSDRTGFFLEGDLLECGPTKAMFMNPKR | 241 |
| Query: | 241 | KETEDYITGKFG | 252 |
| | | KETEDYI+GKFG | |
| Sbjct: | 242 | KETEDYISGKFG | 253 |

[3898] Based on this analysis, it was predicted that these proteins and their epitopes could be useful antigens for, vaccines or diagnostics.

### EXAMPLE 673

[3899] A DNA sequence (GBSx0713) was identified in S. agalactiae <SEQ ID 2069> which encodes the amino acid sequence <SEQ ID 2070>. Analysis of this protein sequence reveals the following:

Possible site: 21
>>> Seems to have no N-terminal signal sequence
----- Final Results -----
bacterial cytoplasm --- Certainty = 0.1937 (Affirmative) < succ>
bacterial membrane --- Certainty = 0.0000 (Not Clear) < succ>
bacterial outside --- Certainty = 0.0000 (Not Clear) < succ>

[3900] The protein has homology with the following sequences in the GENPEPT database:

| >GP: AAD22042 GB: AF118229 PhoU [Streptococcus pneumoniae] | | | |
|---|---|---|---|
| Identities = 75/216 (34%), Positives = 126/216 (57%), Gaps = 1/216 (0%) | | | |
| Query: | 2 | LRSKFDEELDKLHNQFYAMGIEAIGQIKKTVRAFVSHDRELAKEVIEDDVTLNNFETKLE | 61 |
| | | +R++FD EL +L F +G + K + A S D+E+A+ +I D +N ++ +E | |
| Sbjct: | 1 | MRNQFDLELHELEQSFLGLGQLVLETASKALLALASKDKEMAELIINKDHAINQGQSAIE | 60 |
| Query: | 62 | KKSLEIIALQQPVSQDLRTVITVLKATSDVERMGDHAAAVAKATIRMKGEERIPAVELEI | 121 |
| | | ++ALQQP DLR VI+++ + SD+ERMGDH A +AKA +++K E ++ E ++ | |
| Sbjct: | 61 | LTCARLLALQQPQVSDLRFVISIMSSCSDLERMGDHMAGIAKAVLQLK-ENQLAPDEEQL | 119 |
| Query: | 122 | NNMGKAVKNMLEEALTAYINGDDEKAYEVAAMDEIVDDYFRDIQKMVVETIQKHPDVAFA | 181 |
| | | + MGK +ML + L A+ KA +A DE +D Y+ + K ++ ++ | |
| Sbjct: | 120 | HQMGKLSLSMLADLLVAFPLHQASKAISIAQKDEQIDQYYYALSKEIIGLMKDQETSIPN | 179 |
| Query: | 182 | AKEYFQVLMHLERIGDYGKNICEWIVYLKTGKIIEL | 217 |
| | | +Y ++ HLER DY NICE +VYL+TG++++L | |
| Sbjct: | 180 | GTQYLYIIGHLERFADYIANICERLVYLETGELVDL | 215 |

[3901] A related DNA sequence was identified in S. pyogenes <SEQ ID 1677> which encodes the amino acid sequence <SEQ ID 1678>. Analysis of this protein sequence reveals the following:

Possible site: 21
>>> Seems to have no N-terminal signal sequence
----- Final Results -----
bacterial cytoplasm --- Certainty = 0.2229 (Affirmative) < succ>
bacterial membrane --- Certainty = 0.0000 (Not Clear) < succ>
bacterial outside --- Certainty = 0.0000 (Not Clear) < succ>

[3902] An alignment of the GAS and GBS proteins is shown below:

| Identities = 174/217 (80%), Positives = 194/217 (89%) | | | |
|---|---|---|---|
| Query: | 1 | MLRSKFDEELDKLHNQFYAMGIEAIGQIKKTVRAFVSHDRELAKEVIEDDVTLNNFETKL | 60 |
| | | MLR+KF+EELDKLHNQFY+MG+E + QI KTVRAFVSHDRELAKEVIE+D T+NNFETKL | |
| Sbjct: | 1 | MLRTKFEEELDKLHNQFYSMGMEVLAQINKTVRAFVSHDRELAKEVIEEDDTINNFETKL | 60 |
| Query: | 61 | EKKSLEIIALQQPVSQDLRTVITVLKATSDVERMGDHAAAVAKATIRMKGEERIPAVELE | 120 |
| | | EKKSLEIIALQQPVS DLR VITVLKA+SD+ERMGDHAA++AKATIRMKGEERIP VE + | |
| Sbjct: | 61 | EKKSLEIIALQQPVSNDLRMVITVLKASSDIERMGDHAASIAKATIRMKGEERIPVVEEQ | 120 |
| Query: | 121 | INNMGKAVKNMLEEALTAYINGDDEKAYEVAAMDEIVDDYFRDIQKMVVETIQKHPDVAF | 180 |
| | | IN MGKAVK M+EEAL AYIN DD KAYE+AA DEI+D YFR+IQ + VE I+K PD F | |
| Sbjct: | 121 | INLMGKAVKQMVEEALNAYINADDTKAYEIAASDEIIDQYFRNIQTLAVEEIRKSPDAVF | 180 |
| Query: | 181 | AAKEYFQVLMHLERIGDYGKNICEWIVYLKTGKIIEL | 217 |
| | | A KEYFQVLM+LERIGDY +NICEWIVYLKTGKIIEL | |
| Sbjct: | 181 | AGKEYFQVLMYLERIGDYARNICEWIVYLKTGKIIEL | 217 |

[3903] Based on this analysis, it was predicted that these proteins and their epitopes could be useful antigens for vaccines or diagnostics.

### EXAMPLE 674

[3904] A DNA sequence (GBSx0714) was identified in S. agalactiae <SEQ ID 2071> which encodes the amino acid sequence <SEQ ID 2072>. This protein is predicted to be aminopeptidase N. Analysis of this protein sequence reveals the following:

```
Possible site: 30
>>> Seems to have no N-terminal signal sequence
----- Final Results -----
                            bacterial cytoplasm --- Certainty = 0.2845(Affirmative) < succ>
                              bacterial membrane --- Certainty = 0.0000(Not Clear) < succ>
                                bacterial outside --- Certainty = 0.0000(Not Clear) < succ>
```

[3905] The protein has homology with the following sequences in the GENPEPT database:

| >GP: CAB50785 GB: AJ007700 aminopeptidase N [Streptococcus thermophilus] | | | |
|---|---|---|---|
| Identities = 556/847 (65%), Positives = 673/847 (78%), Gaps = 4/847 (0%) | | | |
| Query: | 3 | TVEHFVTKFVPENYNLFLDINRQTKTFSGNVAVSGEALDNNISFHQKGLTIKSVLLDNQP | 62 |
| | | +V F+ F+PENYNLFLDINR KTF+GNVA++GEA+DN+IS HQK LTI SVLLDN+ | |
| Sbjct: | 4 | SVARFIESFIPENYNLFLDINRSEKTFTGNVAITGEAIDNHISLHQKDLTINSVLLDNES | 63 |
| Query: | 63 | LDFQLDEDNEAMHIQLHETGSMVLVFEFSGHITDNMTGMYPSYYTVNGIKKEVISTQFES | 122 |
| | | L+FQ+D+ NEA HI+L ETG + + EFSG ITDNMTG+YPSYYT NG KKE+ISTQFES | |
| Sbjct: | 64 | LNFQMDDANEAFHIELPETGVLTIFIEFSGRITDNMTGIYPSYYTYNGEKKEIISTQFES | 123 |
| Query: | 123 | HFAREVFPSIDEPEAKATFDLSLKFDQKEGEIALSNMPEINAEQRQETGLWTFDTTPKMS | 182 |
| | | HFARE FP +DEPEAKATFDLSLKFD +EG+ ALSNMPEIN+ R+ETG+WTF+TTP+MS | |
| Sbjct: | 124 | HFAREAFPCVDEPEAKATFDLSLKFDAEEGDTALSNMPEINSHLREETGVWTFETTPRMS | 183 |
| Query: | 183 | SYLLAFALGELHGKTTHTKNGTLVGSYATKAHQLNELDFSLDIVVRVIEFYEDYFGVRYP | 242 |
| | | +YLLAF G LHGKT TKNGT VG +AT A N +DF+LDI VRVIEFYEDYF V+YP | |
| Sbjct: | 184 | TYLLAFGFGALHGKTAKTKNGTEVGVFATVAQAENSVDFALDIAVRVIEFYEDYFQVKYP | 243 |
| Query: | 243 | IPQSLHVALPDFSAGAMENWGLVTYREVYLLVDENSSVSSRQQVALVVAHEIAHQWFGNL | 302 |
| | | IP S H+ALPD SAGAMENWGLVTYREVYLLVDENSS +SRQQVALVVAHE+AHQWFGNL | |
| Sbjct: | 244 | IPLSYHLALPDLSAGAMENWGLVTYREVYLLVDENSSAASRQQVALVVAHELAHQWFGNL | 303 |
| Query: | 303 | VTMKWWDDLWLNESFANMMEYVSIDYIEPKLNIFEDFQTG-GLPLALKRDATDGVQSVHV | 361 |
| | | VTMKWWDDLWLNESFANMMEYVS++ IEP NIFE F G+P AL+RDATDGVQSVH+ | |
| Sbjct: | 304 | VTMKWWDDLWLNESFANMMEYVSVNAIEPSWNIFEGFPNKLGVPNALQRDATDGVQSVHM | 363 |
| Query: | 362 | EVNHPDEINTLFDPAIVYAKGSRLMHMLRRWLGDTDFAAGLKIYFEKHQYQNTIGRDLWN | 421 |
| | | EVNHPDEINTLFD AIVYAKGSRLMHMLRRWLGD FA GLK YFEKHQY NT+GRDLWN | |
| Sbjct: | 364 | EVNHPDEINTLFDSAIVYAKGSRLMHMLRRWLGDEAFAKGLKAYFEKHQYNNTVGRDLWN | 423 |
| Query: | 422 | ALSQTSGKDVAAFMDSWLEQPGYPVMAAKIEEDELILTQKQFFIGEHEDKSRLWQIPLNS | 481 |
| | | ALS+ SGKDV++FMD+WLEQPGYPV++A++ +D LIL+QKQFFIGEHEDK RLW+IPLN+ | |
| Sbjct: | 424 | ALSEASGKDVSSFMDTWLEQPGYPVVSAEVVDDTLILSQKQFFIGEHEDKGRLWEIPLNT | 483 |
| Query: | 482 | NWEGIPEILTEETVVIPNFSQLAEKNKENGALRFNTENTAHYITNYQGQLLEHIISDLPL | 541 |
| | | NW G+P+ L+EE + IPN+SQLA +N NG LR NT NTAHYIT+YQGQLL++I+ D | |
| Sbjct: | 484 | NWNGLPDTLSEERIEIPNYSQLATEN--NGVLRLNTANTAHYITDYQGQLLDNILEDFAN | 541 |
| Query: | 542 | MDNISKLQIVQERHLLAESGMISYSSLIPLVSLLSQETSYLVNSAIKSVIDGLSLFVQED | 601 |
| | | +D +SKLQI+QER LLAESG ISY+SL+ L+ L+ +E S+L++ A ++ GL F+ ED | |
| Sbjct: | 542 | LDTVSKLQILQERRLLAESGRISYASLVGLLDLVEKEESFLISQAKSQILAGLKRFIDED | 601 |
| Query: | 602 | SQDEFDFKEFVNKLSAFNFNRLGFEKREGEGDDSEMVRHLSLSLALYSDNEHAIEEAHHI | 661 |
| | | ++ E +K V++ +F RLGF+ +EGE D+ EMVR +LS + +D + + A ++ | |
| Sbjct: | 602 | TEAEVHYKALVSRQFQNDFERLGFDAKEGESDEDEMVRQTALSYLIEADYQPTVLAAANV | 661 |
| Query: | 662 | FKAHENNIAAIPAAIRLLVLTNEMKHFESKELSHLLLETYSTTTDGNFKRQLASALSHTT | 721 |
| | | F+AH+ NI +IPA+IR LVL N+MK S L + Y T D NF+RQL ALS+ | |
| Sbjct: | 662 | FQAHKENIESIPASIRGLVLINQMKQENSLSLVEEYINAYVATNDSNFRRQLTQALSYLK | 721 |
| Query: | 722 | DSKTLKKLLSDWKNKDIVKPQDLAMSWYATFLKNSFTQESVWEWAQENWEWIKATLGGDM | 781 |
| | | + + L +L K+K++VKPQDL + WY FL SF QE+VW+WA+ENWEWIKA LGGDM | |
| Sbjct: | 722 | NQEGLDYVLGQLKDKNVVKPQDLYL-WYMNFLSKSFAQETVWDWAKENWEWIKAALGGDM | 780 |
| Query: | 782 | SFDKFVIYPSSSFKTEERLEQYKNFFEPQLSDMAISRNISMGIKEISARVLLITKQKEEV | 841 |
| | | SFD FV P+ FK +ERL+QY FFEPQ SD A+ RNI MGIK I+ARV LI K+K V | |
| Sbjct: | 781 | SFDSFVNIPAGIFKNQERLDQYIAFFEPQTSDKALERNILMGIKTIAARVDLIEKEKAAV | 840 |
| Query: | 842 | INTIKKY | 848 |
| | | + +K Y | |
| Sbjct: | 841 | ESALKDY | 847 |

[3906] A related DNA sequence was identified in S. pyogenes <SEQ ID 2073> which encodes the amino acid sequence <SEQ ID 2074>. Analysis of this protein sequence reveals the following:

```
Possible site: 50
>>> Seems to have no N-terminal signal sequence
----- Final Results -----
                            bacterial cytoplasm --- Certainty = 0.1098(Affirmative) < succ>
                              bacterial membrane --- Certainty = 0.0000(Not Clear) < succ>
                                bacterial outside --- Certainty = 0.0000(Not Clear) < succ>
```

[3907] An alignment of the GAS and GBS proteins is shown below:

| Identities = 576/848 (67%), Positives = 692/848 (80%), Gaps = 3/848 (0%) | | | |
|---|---|---|---|
| Query: | 1 | MKTVEHFVTKFVPENYNLFLDINRQTKTFSGNVAVSGEALDNNISFHQKGLTIKSVLLDN | 60 |
| | | MKTVEH + FVPENYN+FLDINRQTKTF+GNVA++GEALDN+++FHQK L IKS+LLDN | |
| Sbjct: | 21 | MKTVEHLIETFVPENYNIFLDINRQTKTFTGNVAINGEALDNHVAFHQKDLDIKSILLDN | 80 |
| Query: | 61 | QPLDFQLDEDNEAMHIQLHETGSMVLVFEFSGHITDNMTGMYPSYYTVNGIKKEVISTQF | 120 |
| | | + + +Q+D DNE + ++L ETG M LV EFSG ITDNMTG+YPSYYT NG KKEVISTQF | |
| Sbjct: | 81 | EAVIYQVDNDNEVVRVELPETGMMTLVIEFSGSITDNMTGIYPSYYTKNGEKKEVISTQF | 140 |
| Query: | 121 | ESHFAREVFPSIDEPEAKATFDLSLKFDQKEGEIALSNMPEINAEQRQETGLWTFDTTPK | 180 |
| | | ESHFARE FP IDEP+AKATFDLSL FDQ+ GEIALSNMPE+N ++R+ETGLWTFDTT + | |
| Sbjct: | 141 | ESHFAREAFPCIDEPQAKATFDLSLTFDQEIGEIALSNMPEVNIDRREETGLWTFDTTLR | 200 |
| Query: | 181 | MSSYLLAFALGELHGKTTHTKNGTLVGSYATKAHQLNELDFSLDIVVRVIEFYEDYFGVR | 240 |
| | | MSSYLLAFALGELHGKT +K GT VG YAT AH L+ LDFSLDI VRVI FYEDYFGV | |
| Sbjct: | 201 | MSSYLLAFALGELHGKTVESKKGTTVGVYATTAHPLSSLDFSLDIAVRVINFYEDYFGVH | 260 |
| Query: | 241 | YPIPQSLHVALPDFSAGAMENWGLVTYREVYLLVDENSSVSSRQQVALVVAHEIAHQWFG | 300 |
| | | YPIPQSL++ALPDFS+GAMENWGL+TYRE+YLLVDENS+V SRQQVALV+AHEIAHQWFG | |
| Sbjct: | 261 | YPIPQSLNIALPDFSSGAMENWGLITYREIYLLVDENSTVQSRQQVALVIAHEIAHQWFG | 320 |
| Query: | 301 | NLVTMKWWDDLWLNESFANMMEYVSIDYIEPKLNIFEDFQTGGLPLALKRDATDGVQSVH | 360 |
| | | NLVTMKWWDDLWLNESFANMMEYVSI+ IEP I EDFQTGG+PLALKRDATDGVQSVH | |
| Sbjct: | 321 | NLVTMKWWDDLWLNESFANMMEYVSIEAIEPSWKIIEDFQTGGIPLALKRDATDGVQSVH | 380 |
| Query: | 361 | VEVNHPDEINTLFDPAIVYAKGSRLMHMLRRWLGDTDFAAGLKIYFEKHQYQNTIGRDLW | 420 |
| | | VEVNHPDEINTLFDPAIVYAKGSRLMHMLRR++GD DFA GL YFEK+QY+NT+GRDLW | |
| Sbjct: | 381 | VEVNHPDEINTLFDPAIVYAKGSRLMHMLRRFIGDRDFAIGLHHYFEKYQYRNTVGRDLW | 440 |
| Query: | 421 | NALSQTSGKDVAAFMDSWLEQPGYPVMAAKIEEDELILTQKQFFIGEHEDKSRLWQIPLN | 480 |
| | | N LS TSGKDVAAFMD+WLEQPGYPV+ A++E D+LIL+QKQFFIG+ E+K RLW IPLN | |
| Sbjct: | 441 | NILSDTSGKDVAAFMDAWLEQPGYPVLTARLENDQLILSQKQFFIGKGEEKGRLWPIPLN | 500 |
| Query: | 481 | SNWEGIPEILTEETVVIPNFSQLAEKNKENGALRFNTENTAHYITNYQGQLLEHIISDLP | 540 |
| | | +NW G+PE LTE +VIPNFSQLA +N+ GALRFN +NTAHYIT+YQG LL+ ++++L | |
| Sbjct: | 501 | TNWHGLPETLTEAEMVIPNFSQLAAENE--GALRFNIDNTAHYITDYQGSLLDALVTELA | 558 |
| Query: | 541 | LMDNISKLQIVQERHLLAESGMISYSSLIPLVSLLSQETSYLVNSAIKSVIDGLSLFVQE | 600 |
| | | +DN S LQ++QER LLA+SG+ISY+ L+ L++ L SY+V A++ V+ GL F+ E | |
| Sbjct: | 559 | QLDNTSALQVIQERRLLADSGLISYAELVDLIAQLDDSKSYMVAEAVQQVVSGLKRFIDE | 618 |
| Query: | 601 | DSQDEFDFKEFVNKLSAFNFNRLGFEKREGEGDDSEMVRHLSLSLALYSDNEHAIEEAHH | 660 |
| | | S E F V + +FN+ GFEK+ E D+ EMVR ++L ++N+ I+ | |
| Sbjct: | 619 | GSLAEKSFNRLVTTIYQEDFNQHGFEKKADESDEDEMVRQVALGRLWLAENQTIIDGLRT | 678 |
| Query: | 661 | IFKAHENNIAAIPAAIRLLVLTNEMKHFESKELSHLLLETYSTTTDGNFKRQLASALSHT | 720 |
| | | IF+A++NNIA+IPAA+R LVL N+MK+FE+ L + ETY TTD N + L A S T | |
| Sbjct: | 679 | IFEAYQNNIASIPAAVRRLVLANQMKYFETDSLVDIYFETYVATTDNNLRSDLTVAFSQT | 738 |
| Query: | 721 | TDSKTLKKLLSDWKNKDIVKPQDLAMSWYATFLKNSFTQESVWEWAQENWEWIKATLGGD | 780 |
| | | T++++L K+KDI+KPQDL+ WY L SFTQ+ +WEWA+ENW+WIK+ LGGD | |
| Sbjct: | 739 | KQPTTIRRILVSLKDKDIIKPQDLSY-WYNALLGQSFTQDIIWEWARENWDWIKSALGGD | 797 |
| Query: | 781 | MSFDKFVIYPSSSFKTEERLEQYKNFFEPQLSDMAISRNISMGIKEISARVLLITKQKEE | 840 |
| | | MSFDKFVIYP+S+FKT + L +YK+FFEP+L DMAISRNI+MGI EI ARV LITK+KE | |
| Sbjct: | 798 | MSFDKFVIYPASNFKTPKHLAEYKSFFEPKLDDMAISRNITMGINEIEARVALITKEKEA | 857 |
| Query: | 841 | VINTIKKY | 848 |
| | | VI + Y | |
| Sbjct: | 858 | VIAALSHY | 865 |

[3908] Based on this analysis, it was predicted that these proteins and their epitopes could be useful antigens for vaccines or diagnostics.

### EXAMPLE 675

[3909] A DNA sequence (GBSx0715) was identified in S. agalactiae <SEQ ID 2075> which encodes the amino acid sequence <SEQ ID 2076>. This protein is predicted to be response regulator (trcR). Analysis of this protein sequence reveals the following:

```
Possible site: 59
>>> Seems to have no N-terminal signal sequence
----- Final Results -----
                            bacterial cytoplasm --- Certainty = 0.2741(Affirmative) < succ>
                              bacterial membrane --- Certainty = 0.0000(Not Clear) < succ>
                                bacterial outside --- Certainty = 0.0000(Not Clear) < succ>
```

[3910] The protein has homology with the following sequences in the GENPEPT database:

| >GP: CAA54465 GB: X77249 response regulator [Streptococcus pneumoniae] | | | |
|---|---|---|---|
| Identities = 198/224 (88%), Positives = 213/224 (94%) | | | |
| Query: | 1 | MIKILLIEDDLSLSNSVFDFLDDFADVMQIFDGEEGLYEAESGVYDLILLDLMLPEKNGF | 60 |
| | | MIKILL+EDDL LSNSVFDFLDDFADVMQ+FDGEEGLYEAESGVYDLILLDLMLPEKNGF | |
| Sbjct: | 1 | MIKILLVEDDLGLSNSVFDFLDDFADVMQVFDGEEGLYEAESGVYDLILLDLMLPEKNGF | 60 |
| Query: | 61 | QVLKELREKGITTPVLIMTAKESIDDKGQGFDLGADDYLTKPFYLEELKMRIQALLKRSG | 120 |
| | | QVLKELREKGITTPVLIMTAKES+DDKG GF+LGADDYLTKPFYLEELKMRIQALLKRSG | |
| Sbjct: | 61 | QVLKELREKGITTPVLIMTAKESLDDKGHGFELGADDYLTKPFYLEELKMRIQALLKRSG | 120 |
| Query: | 121 | KFNDNSLIYGDIRVDMSTNSTFVNQTEVELLGKEFDLLVYFLQNQNVILPKSQIFDRIWG | 180 |
| | | KFN+N+L YG+I V++STN+ V T VELLGKEFDLLVYFLQNQNVILPK+QIFDR+WG | |
| Sbjct: | 121 | KFNENTLTYGNIVVNLSTNTVKVEDTPVELLGKEFDLLVYFLQNQNVILPKTQIFDRLWG | 180 |
| Query: | 181 | FDSDTTISVVEVYVSKVRKKLKGTLFSENLQTLRSVGYILKHVE | 224 |
| | | FDSDTTISVVEVYVSKVRKKLKGT F+ENLQTLRSVGY+LK V+ | |
| Sbjct: | 181 | FDSDTTISVVEVYVSKVRKKLKGTTFAENLQTLRSVGYLLKDVQ | 224 |

[3911] A related DNA sequence was identified in S. pyogenes <SEQ ID 2077> which encodes the amino acid sequence <SEQ ID 2078>. Analysis of this protein sequence reveals the following:

```
Possible site: 59
>>> Seems to have no N-terminal signal sequence
----- Final Results -----
                            bacterial cytoplasm --- Certainty = 0.2689(Affirmative) < succ>
                              bacterial membrane --- Certainty = 0.0000(Not Clear) < succ>
                                bacterial outside --- Certainty = 0.0000(Not Clear) < succ>
```

[3912] An alignment of the GAS and GBS proteins is shown below:

| Identities = 180/224 (80%), Positives = 200/224 (88%) | | | |
|---|---|---|---|
| Query: | 1 | MIKILLIEDDLSLSNSVFDFLDDFADVMQIFDGEEGLYEAESGVYDLILLDLMLPEKNGF | 60 |
| | | MIKILL+EDDLSLSNS+FDFLDDFADVMQ+FDG+EGLYEAESG+YDLILLDLMLPEKNGF | |
| Sbjct: | 1 | MIKILLVEDDLSLSNSIFDFLDDFADVMQVFDGDEGLYEAESGIYDLILLDLMLPEKNGF | 60 |
| Query: | 61 | QVLKELREKGITTPVLIMTAKESIDDKGQGFDLGADDYLTKPFYLEELKMRIQALLKRSG | 120 |
| | | QVLKELREK I PVLIMTAKE +DDKG GF+LGADDYLTKPFYLEELKMRIQALLKR+G | |
| Sbjct: | 61 | QVLKELREKDIKIPVLIMTAKEGLDDKGHGFELGADDYLTKPFYLEELKMRIQALLKRTG | 120 |
| Query: | 121 | KFNDNSLIYGDIRVDMSTNSTFVNQTEVELLGKEFDLLVYFLQNQNVILPKSQIFDRIWG | 180 |
| | | KF D ++ +G++ VD++ V VELLGKEFDLLVY LQNQNVILPK+QIFDR+WG | |
| Sbjct: | 121 | KFADKNISFGNLVVDLARKEVKVEGKVVELLGKEFDLLVYLLQNQNVILPKTQIFDRLWG | 180 |
| Query: | 181 | FDSDTTISVVEVYVSKVRKKLKGTLFSENLQTLRSVGYILKHVE | 224 |
| | | FDSDTTISVVEVY+SK+RKKLKGT F LQTLRSVGYILK+ E | |
| Sbjct: | 181 | FDSDTTISVVEVYISKIRKKLKGTCFVNRLQTLRSVGYILKNNE | 224 |

[3913] Based on this analysis, it was predicted that these proteins and their epitopes could be useful antigens for vaccines or diagnostics.

### EXAMPLE 676

[3914] A DNA sequence (GBSx0716) was identified in S. agalactiae <SEQ ID 2079> which encodes the amino acid sequence <SEQ ID 2080>. This protein is predicted to be histidine kinase. Analysis of this protein sequence reveals the following:

| Possible site: 34 | | | | |
|---|---|---|---|---|
| >>> Seems to have no N-terminal signal sequence | | | | |
| | INTEGRAL | Likelihood = −9.18 | Transmembrane | 22-38 (17-46) |
| | INTEGRAL | Likelihood = −4.94 | Transmembrane | 182-198 (178-201) |

```
----- Final Results -----
                              bacterial membrane --- Certainty = 0.4673(Affirmative) < succ>
                                bacterial outside --- Certainty = 0.0000(Not Clear) < succ>
                            bacterial cytoplasm --- Certainty = 0.0000(Not Clear) < succ>
```

[3915] The protein has homology with the following sequences in the GENPEPT database:

| >GP: CAA54466 GB: X77249 histidine kinase [Streptococcus pneumoniae] | | | |
|---|---|---|---|
| Identities = 218/420 (51%), Positives = 305/420 (71%), Gaps = 4/420 (0%) | | | |
| Query: | 17 | SHFIHFFTVFSGIFLVMTVIILQVMRYGVYSSVDSSLKYISTHPKNYINMVMSRTAAY-- | 74 |
| | | S+FI F VF+ IF MT+IILQVM +Y+SVD L +S +P+ I + ++R | |
| Sbjct: | 15 | SYFIRNFGVFTLIFSTMTLIILQVMHSSLYTSVDDKLHGLSENPQAVIQLAINRATEEIK | 74 |
| Query: | 75 | -LDNSNIASVKLKPGGQTVANTDIILFTSEEEVINYFDAFSNYQFLKPNKKNLGGISELT | 133 |
| | | L+N+ + K++ +NT++ILF + + + F +K KK LG I ++ | |
| Sbjct: | 75 | DLENARADASKVEIKPNVSSNTEVILFDKDFTQLLSGNRFLGLDKIKLEKKELGHIYQIQ | 134 |
| Query: | 134 | LTNIFGQDETYHAVTVKVN-NPAYPNVTYMTAIVNIDQLVNAKERYEKIIIFVMTTFWII | 192 |
| | | + N +GQ+E Y + ++ N + N+ Y ++N QL A +++E++I+ VM +FWI+ | |
| Sbjct: | 135 | VFNSYGQEEIYRVILMETNISSVSTNIKYAAVLINTSQLEQASQKHEQLIVVVMASFWIL | 194 |
| Query: | 193 | SIGASIYLAKWAQKPIIENYERQKAFVENASHELRTPLAVLQNRLETLFRKPNATILENS | 252 |
| | | S+ AS+YLA+ + +P++E+ ++Q++FVENASHELRTPLAVLQNRLETLFRKP ATI++ S | |
| Sbjct: | 195 | SLLASLYLARVSVRPLLESMQKQQSFVENASHELRTPLAVLQNRLETLFRKPEATIMDVS | 254 |
| Query: | 253 | ENIASSLDEVRNMRILTTNLLNLARRDDGIKPELAVIKPTLFDSIFENYDLITQENGKNF | 312 |
| | | E+IASSL+EVRNMR LTT+LLNLARRDDGIKPELA + + F++ F NY++I EN + F | |
| Sbjct: | 255 | ESIASSLEEVRNMRFLTTSLLNLARRDDGIKPELAEVPTSFFNTTFTNYEMIASENNRVF | 314 |
| Query: | 313 | TGHNMIQDSFKTDKTLLKQLMTILFDNAIKYTDNDGSIDFTISETDKYLFLEIADNGPGI | 372 |
| | | N I + TD+ LLKQLMTILFDNA+KYT+ DG IDF IS TD+ L+L ++DNG GI | |
| Sbjct: | 315 | RFENRIHRTIVTDQLLLKQLMTILFDNAVKYTEEDGEIDFLISATDRNLYLLVSDNGIGI | 374 |
| Query: | 373 | SEEDKVRIFDRFYRVDKARTRQQGGFGLGLSLAQQIVNSLRGNITVIDNKPRGSIFKIKL | 432 |
| | | S EDK +IFDRFYRVDKARTRQ+GGFGLGLSLA+QIV++L+G +TV DNKP+G+IF++K+ | |
| Sbjct: | 375 | STEDKKKIFDRFYRVDKARTRQKGGFGLGLSLAKQIVDALKGTVTVKDNKPKGTIFEVKI | 434 |

[3916] A related DNA sequence was identified in S. pyogenes <SEQ ID 2081> which encodes the amino acid sequence <SEQ ID 2082>. Analysis of this protein sequence reveals the following:

| Possible site: 57 | | | | |
|---|---|---|---|---|
| >>> Seems to have an uncleavable N-term signal seq | | | | |
| | INTEGRAL | Likelihood = −11.09 | Transmembrane | 19-35 (14-44) |
| | INTEGRAL | Likelihood = −10.24 | Transmembrane | 185-201 (182-206) |

```
----- Final Results -----
                              bacterial membrane --- Certainty = 0.5437(Affirmative) < succ>
                                bacterial outside --- Certainty = 0.0000(Not Clear) < succ>
                            bacterial cytoplasm --- Certainty = 0.0000(Not Clear) < succ>
```

[3917] The protein has homology with the following sequences in the databases:

| >GP: CAA54466 GB: X77249 histidine kinase [Streptococcus pneumoniae] | | | |
|---|---|---|---|
| Identities = 223/436 (51%), Positives = 313/436 (71%), | | | |
| Gaps = 5/436 (1%) | | | |
| Query: | 2 | NKLKKEILSDNYNHFFHFFAVFTGIFVIMTIIILQIMRFGVYSSVDSSLVSVSNNASSYA | 61 |
| | | +KLKK +D++++F F VFT IF MT+IILQ+M +Y+SVD L +S N + | |
| Sbjct: | 3 | SKLKKTWYADDFSYFIRNFGVFTLIFSTMTLIILQVMHSSLYTSVDDKLHGLSENPQAVI | 62 |
| Query: | 62 | NRTMARISSFYFDTENNIIKALPDSDSSKLLGTPAANTDIILFSANGTILNAFDAFSNYQ | 121 |
| | | + R + D EN A D+ ++ ++NT++ILF + T L + + F | |
| Sbjct: | 63 | QLAINRATEEIKDLEN----ARADASKVEIKPNVSSNTEVILFDKDFTQLLSGNRFLGLD | 118 |
| Query: | 122 | NFHLDKRRLGSIETTSLMNFYGQEEKYHTITVGVHIKNYPA-VAYMMAVVNVEQLDRANE | 180 |
| | | L+K+ LG I + N YGQEE Y I + +I + + Y ++N QL++A++ | |
| Sbjct: | 119 | KIKLEKKELGHIYQIQVFNSYGQEEIYRVILMETNISSVSTNIKYAAVLINTSQLEQASQ | 178 |
| Query: | 181 | RYERIIIIVMSVFWLISILASIYLAKWSRKPILESYEKQKMFVENASHELRTPLAVLQNR | 240 |
| | | ++E++I++VM+ FW++S+LAS+YLA+ S +P+LES +KQ+ FVENASHELRTPLAVLQNR | |
| Sbjct: | 179 | KHEQLIVVVMASFWILSLLASLYLARVSVRPLLESMQKQQSFVENASHELRTPLAVLQNR | 238 |
| Query: | 241 | LESLFRKPNETILENSEHLASSLDEVRNMRILTTNLLNLARRDDGINPQWTHLDTDFFNA | 300 |
| | | LE+LFRKP TI++ SE +ASSL+EVRNMR LTT+LLNLARRDDGI P+ + T FFN | |
| Sbjct: | 239 | LETLFRKPEATIMDVSESIASSLEEVRNMRFLTTSLLNLARRDDGIKPELAEVPTSFFNT | 298 |
| Query: | 301 | IFENYELVAKEYGKIFYFQNQVNRSLRMDKALLKQLITILFDNAIKYTDKNGIIEIIVKT | 360 |
| | | F NYE++A E ++F F+N+++R++ D+ LLKQL+TILFDNA+KYT+++G I+ ++ | |
| Sbjct: | 299 | TFTNYEMIASENNRVFRFENRIHRTIVTDQLLLKQLMTILFDNAVKYTEEDGEIDFLISA | 358 |
| Query: | 361 | TDKNLLISVIDNGPGITDEEKKKIFDRFYRVDKARTRQTGGFGLGLALAQQIVMSLKGNI | 420 |
| | | TD+NL + V DNG GI+ E+KKKIFDRFYRVDKARTRQ GGFGLGL+LA+QIV +LKG + | |
| Sbjct: | 359 | TDRNLYLLVSDNGIGISTEDKKKIFDRFYRVDKARTRQKGGFGLGLSLAKQIVDALKGTV | 418 |
| Query: | 421 | TVKDNDPKGSIFEVKL | 436 |
| | | TVKDN PKG+IFEVK+ | |
| Sbjct: | 419 | TVKDNKPKGTIFEVKI | 434 |

[3918] An alignment of the GAS and GBS proteins is shown below:

| Identities = 265/436 (60%), Positives = 334/436 (75%), | | | |
|---|---|---|---|
| Gaps = 10/436 (2%) | | | |
| Query: | 7 | ISKFKKNV-SDS--HFIHFFTVFSGIFLVMTVIILQVMRYGVYSSVDSSLKYISTHPKNY | 63 |
| | | ++K KK + SD+ HF HFF VF+GIF++MT+IILQ+MR+GVYSSVDSSL +S + +Y | |
| Sbjct: | 1 | MNKLKKEILSDNYNHFFHFFAVFTGIFVIMTIIILQIMRFGVYSSVDSSLVSVSNNASSY | 60 |
| Query: | 64 | INMVMSRTAAYLDNSNIASVKLKPG-------GQTVANTDIILFTSEEEVINYFDAFSNY | 116 |
| | | N M+R +++ ++ +K P G ANTDIILF++ ++N FDAFSNY | |
| Sbjct: | 61 | ANRTMARISSFYFDTENNIIKALPDSDSSKLLGTPAANTDIILFSANGTILNAFDAFSNY | 120 |
| Query: | 117 | QFLKPNKKNLGGISELTLTNIFGQDETYHAVTVKVNNPAYPNVTYMTAIVNIDQLVNAKE | 176 |
| | | Q +K+ LG I +L N +GQ+E YH +TV V+ YP V YM A+VN++QL A E | |
| Sbjct: | 121 | QNFHLDKRRLGSIETTSLMNFYGQEEKYHTITVGVHIKNYPAVAYMMAVVNVEQLDRANE | 180 |
| Query: | 177 | RYERIIIFVMTTFWIISIGASIYLAKWAQKPIIENYERQKAFVENASHELRTPLAVLQNR | 236 |
| | | RYE+III VM+ FW+ISI ASIYLAKW++KPI+E+YE+QK FVENASHELRTPLAVLQNR | |
| Sbjct: | 181 | RYERIIIIVMSVFWLISILASIYLAKWSRKPILESYEKQKMFVENASHELRTPLAVLQNR | 240 |
| Query: | 237 | LETLFRKPNATILENSENIASSLDEVRNMRILTTNLLNLARRDDGIKPELAVIKPTLFDS | 296 |
| | | LE+LFRKPN TILENSE++ASSLDEVRNMRILTTNLLNLARRDDGI P+ + F++ | |
| Sbjct: | 241 | LESLFRKPNETILENSEHLASSLDEVRNMRILTTNLLNLARRDDGINPQWTHLDTDFFNA | 300 |
| Query: | 297 | IFENYDLITQENGKNFTGHNMIQDSFKTDKTLLKQLMTILFDNAIKYTDNDGSIDFTISE | 356 |
| | | IFENY+L+ +E GK F N + S + DK LLKQL+TILFDNAIKYTD +G I+ + | |
| Sbjct: | 301 | IFENYELVAKEYGKIFYFQNQVNRSLRMDKALLKQLITILFDNAIKYTDKNGIIEIIVKT | 360 |
| Query: | 357 | TDKYLFLEIADNGPGISEEDKVRIFDRFYRVDKARTRQQGGFGLGLSLAQQIVNSLRGNI | 416 |
| | | TDK L + + DNGPGI++E+K +IFDRFYRVDKARTRQ GGFGLGL+LAQQIV SL+GNI | |
| Sbjct: | 361 | TDKNLLISVIDNGPGITDEEKKKIFDRFYRVDKARTRQTGGFGLGLALAQQIVMSLKGNI | 420 |
| Query: | 417 | TVIDNKPRGSIFKIKL | 432 |
| | | TV DN P+GSIF++KL | |
| Sbjct: | 421 | TVKDNDPKGSIFEVKL | 436 |

[3919] Based on this analysis, it was predicted that these proteins and their epitopes could be useful antigens for vaccines or diagnostics.

### EXAMPLE 677

[3920] A DNA sequence (GBSx0717) was identified in S. agalactiae <SEQ ID 2083> which encodes the amino acid sequence <SEQ ID 2084>. Analysis of this protein sequence reveals the following:

```
Possible site: 39
>>> Seems to have no N-terminal signal sequence
----- Final Results -----
                            bacterial cytoplasm --- Certainty = 0.1783(Affirmative) < succ>
                              bacterial membrane --- Certainty = 0.0000(Not Clear) < succ>
                                bacterial outside --- Certainty = 0.0000(Not Clear) < succ>
```

[3921] A related GBS nucleic acid sequence <SEQ ID 9813> which encodes amino acid sequence <SEQ ID 9814> was also identified.

[3922] The protein has homology with the following sequences in the GENPEPT database:

| >GP: AAB48049 GB: U88582 YlxM [Streptococcus mutans] | | | |
|---|---|---|---|
| Identities = 95/110 (86%), Positives = 103/110 (93%) | | | |
| Query: | 1 | MEIEKTNRMNALFEFYAALLTDKQMNYIELYYADDYSLAEIAEESGVSRQAVYDNIKRTE | 60 |
| | | MEIEKTNRMNALFEFYAALLTDKQMNYIELYYADDYSLAEIAEE VSRQAVYDNIKRTE | 60 |
| Sbjct: | 1 | MEIEKTNRMNALFEFYAALLTDKQMNYIELYYADDYSLAEIAEEFDVSRQAVYDNIKRTE | 60 |
| Query: | 61 | KILEAYEMKLHMYSDYIVRSQIFDDILEKYTDDAFLQEKISILSSIDNRD | 110 |
| | | KILE YEMKLHMYSDY+VRS+IFD I++KY +D +LQ KISIL++IDNRD | |
| Sbjct: | 61 | KILEDYEMKLHMYSDYVVRSEIFDAIMKKYPNDPYLQNKISILTTIDNRD | 110 |

[3923] A related DNA sequence was identified in S. pyogenes <SEQ ID 2085> which encodes the amino acid sequence <SEQ ID 2086>. Analysis of this protein sequence reveals the following:

```
Possible site: 54
>>> Seems to have no N-terminal signal sequence
----- Final Results -----
                            bacterial cytoplasm --- Certainty = 0.1767(Affirmative) < succ>
                              bacterial membrane --- Certainty = 0.0000(Not Clear) < succ>
                                bacterial outside --- Certainty = 0.0000(Not Clear) < succ>
```

[3924] An alignment of the GAS and GBS proteins is shown below:

| Identities = 95/110 (86%), Positives = 103/110 (93%) | | | |
|---|---|---|---|
| Query: | 1 | MEIEKTNRMNALFEFYAALLTDKQMNYIELYYADDYSLAEIAEESGVSRQAVYDNIKRTE | 60 |
| | | MEIEKTNRMNALFEFYAALLTDKQMNYIELYYADDYSLAEIA+E GVSRQAVYDNIKRTE | |
| Sbjct: | 4 | MEIEKTNRMNALFEFYAALLTDKQMNYIELYYADDYSLAEIADEFGVSRQAVYDNIKRTE | 63 |
| Query: | 61 | KILEAYEMKLHMYSDYIVRSQIFDDILEKYTDDAFLQEKISILSSIDNRD | 110 |
| | | KILE YEMKLHMYSDY+VRS+IFDD++ Y D +LQEKISIL+SIDNR+ | |
| Sbjct: | 64 | KILETYEMKLHMYSDYVVRSEIFDDMIAHYPHDEYLQEKISILTSIDNRE | 113 |

[3925] Based on this analysis, it was predicted that these proteins and their epitopes could be useful antigens for vaccines or diagnostics.

### EXAMPLE 678

[3926] A DNA sequence (GBSx0719) was identified in S. agalactiae <SEQ ID 2087> which encodes the amino acid sequence <SEQ ID 2088>. This protein is predicted to be signal recognition particle protein (ffh). Analysis of this protein sequence reveals the following:

| Possible site: 51 | | | | |
|---|---|---|---|---|
| >>> Seems to have no N-terminal signal sequence | | | | |
| | INTEGRAL | Likelihood = −0.22 | Transmembrane | 37-53 (37-53) |

```
----- Final Results -----
                              bacterial membrane --- Certainty = 0.1086(Affirmative) < succ>
                                bacterial outside --- Certainty = 0.0000(Not Clear) < succ>
                            bacterial cytoplasm --- Certainty = 0.0000(Not Clear) < succ>
```

[3927] The protein has homology with the following sequences in the GENPEPT database:

| >GP: AAB48050 GB: U88582 Ffh [Streptococcus mutans] | | | |
|---|---|---|---|
| Identities = 437/522 (83%), Positives = 484/522 (92%), Gaps = 7/522 (1%) | | | |
| Query: | 1 | MAFESLTERLQGVFKNIRGKKKLSEKDVQEVTKEIRLALLEADVALPVVKTFIKHVRERA | 60 |
| | | MAFESLTERLQGVFKN+RGK+KLSEKDVQEVTKEIRLALLEADVALPVVK FIK VR+RA | |
| Sbjct: | 1 | MAFESLTERLQGVFKNLRGKRKLSEKDVQEVTKEIRLALLEADVALPVVKEFIKRVRKRA | 60 |
| Query: | 61 | VGHEIIDTLDPTQQIVKIVNEELTDLLGAETSEIEKSPKIPTIIMMVGLQGAGKTTFAGK | 120 |
| | | VGHE+IDTLDP+QQI+KIVNEELT +LG+ET+EIEKS KIPTIIMMVGLQGAGKTTFAGK | |
| Sbjct: | 61 | VGHEVIDTLDPSQQIIKIVNEELTAVLGSETAEIEKSSKIPTIIMMVGLQGAGKTTFAGK | 120 |
| Query: | 121 | LANKLIKEDNARPMMIAADIYRPAAIDQLKTLGSQINVPVFDMGTNHSAVEIVTKGLEQA | 180 |
| | | LANKL+KE+NARP+MIAADIYRPAAIDQLK LG QINVPVFDMGT HSAVEIV++GL QA | |
| Sbjct: | 121 | LANKLVKEENARPLMIAADIYRPAAIDQLKILGQQINVPVFDMGTEHSAVEIVSQGLAQA | 180 |
| Query: | 181 | RENRNDYVLIDTAGRLQIDATLMQELHDVKAIAQPNEILLVVDSMIGQEAANVAEEFNRQ | 240 |
| | | +ENRNDYVLIDTAGRLQID LM EL D+KA+A PNEILLVVDSMIGQEAANVA EFN+Q | |
| Sbjct: | 181 | KENRNDYVLIDTAGRLQIDEKLMTELRDIKALANPNEILLVVDSMIGQEAANVAREFNQQ | 240 |
| Query: | 241 | LSISGVVLTKIDGDTRGGAALSVREITGKPIKFTGTGEKITDIETFHPDRMASRILGMGD | 300 |
| | | L ++GV+LTKIDGDTRGGAALSVR+ITGKPIKFTGTGEKITDIETFHPDRM+SRILGMGD | |
| Sbjct: | 241 | LEVTGVILTKIDGDTRGGAALSVRQITGKPIKFTGTGEKITDIETFHPDRMSSRILGMGD | 300 |
| Query: | 301 | LLTLIERASQEYDEKRSMELAEKMRENTFDFNDFIDQLDQVQNMGPMEDLLKMLPGMANN | 360 |
| | | LLTLIE+ASQ+YDE++S ELAEKMREN+FDFNDFI+QLDQVQNMG MED+LKM+PGMANN | |
| Sbjct: | 301 | LLTLIEKASQDYDEQKSAELAEKMRENSFDFNDFIEQLDQVQNMGSMEDILKMIPGMANN | 360 |
| Query: | 361 | PAMKNFKVDENEIARKRAIVSSMTPEERENPDLLNPSRRRRIAAGSGNTFVDVNKFIKDF | 420 |
| | | PA+ N +VDE EIARKRAIVSSMTPEERENPDLL PSRRRRIA+GSGNTFV+VNKFIKDF | |
| Sbjct: | 361 | PALANVEVDEGEIARKRAIVSSMTPEERENPDLLTPSRRRRIASGSGNTFVNVNKFIKDF | 420 |
| Query: | 421 | NQAKQMMQGVMSGDMNKMMKKMGIDPNNLPKDMPGMDGMDMSNLEGMMGQNGMPDLSSL- | 479 |
| | | NQAK+MMQGVMSGDMNK+MK+MGI+PNN+P + MD S LEGMMGQ GMPD+S L | |
| Sbjct: | 421 | NQAKKMMQGVMSGDMNKVMKQMGINPNNMP------NNMDSSALEGMMGQGGMPDMSGLS | 474 |
| Query: | 480 | GGDMDFSQMFGGGLKGKVGAFAAKQSMKRMANKMKKAKKKRK | 521 |
| | | G +MD SQMFGGGLKGKVG FA KQSMK+MA +MKKAKK++K | |
| Sbjct: | 475 | GANMDVSQMFGGGLKGKVGEFAMKQSMKKMAKRMKKAKKRKK | 516 |

[3928] A related DNA sequence was identified in S. pyogenes <SEQ ID 2089> which encodes the amino acid sequence <SEQ ID 2090>. Analysis of this protein sequence reveals the following:

| Possible site: 53 | | | | |
|---|---|---|---|---|
| >>> Seems to have no N-terminal signal sequence | | | | |
| | INTEGRAL | Likelihood = −0.22 | Transmembrane | 39-55 (39-55) |

```
----- Final Results -----
                              bacterial membrane --- Certainty = 0.1086(Affirmative) < succ>
                                bacterial outside --- Certainty = 0.0000(Not Clear) < succ>
                            bacterial cytoplasm --- Certainty = 0.0000(Not Clear) < succ>
```

[3929] An alignment of the GAS and GBS proteins is shown below:

| Identities = 458/522 (87%), Positives = 489/522 (92%), Gaps = 4/522 (0%) | | | |
|---|---|---|---|
| Query: | 1 | MAFESLTERLQGVFKNIRGKKKLSEKDVQEVTKEIRLALLEADVALPVVKTFIKHVRERA | 60 |
| | | MAFESLT+RLQ VFK+IRGKKKLSE DVQEVTKEIRLALLEADVALPVVKTFIK VRERA | |
| Sbjct: | 3 | MAFESLTQRLQDVFKHIRGKKKLSESDVQEVTKEIRLALLEADVALPVVKTFIKRVRERA | 62 |
| Query: | 61 | VGHEIIDTLDPTQQIVKIVNEELTDLLGAETSEIEKSPKIPTIIMMVGLQGAGKTTFAGK | 120 |
| | | +GHEIIDTLDPTQQI+KIVNEELT +LG+ET+EI+KSPKIPTIIMMVGLQGAGKTTFAGK | |
| Sbjct: | 63 | IGHEIIDTLDPTQQILKIVNEELTSILGSETAEIDKSPKIPTIIMMVGLQGAGKTTFAGK | 122 |
| Query: | 121 | LANKLIKEDNARPMMIAADIYRPAAIDQLKTLGSQINVPVFDMGTNHSAVEIVTKGLEQA | 180 |
| | | LANKLIKE+NARP+MIAADIYRPAAIDQLKTLG QINVPVFDMGT+HSAV+IV KGLEQA | |
| Sbjct: | 123 | LANKLIKEENARPLMIAADIYRPAAIDQLKTLGQQINVPVFDMGTDHSAVDIVRKGLEQA | 182 |
| Query: | 181 | RENRNDYVLIDTAGRLQIDATLMQELHDVKAIAQPNEILLVVDSMIGQEAANVAEEFNRQ | 240 |
| | | REN NDYVLIDTAGRLQID LM EL DVKA+AQPNEILLVVDSMIGQEAANVA EFN Q | |
| Sbjct: | 183 | RENHNDYVLIDTAGRLQIDEKLMGELRDVKALAQPNEILLVVDSMIGQEAANVAYEFNHQ | 242 |
| Query: | 241 | LSISGVVLTKIDGDTRGGAALSVREITGKPIKFTGTGEKITDIETFHPDRMASRILGMGD | 300 |
| | | LSI+GVVLTKIDGDTRGGAALSVREITGKPIKFTG GEKITDIETFHPDRM+SRILGMGD | |
| Sbjct: | 243 | LSITGVVLTKIDGDTRGGAALSVREITGKPIKFTGIGEKITDIETFHPDRMSSRILGMGD | 302 |
| Query: | 301 | LLTLIERASQEYDEKRSMELAEKMRENTFDFNDFIDQLDQVQNMGPMEDLLKMLPGMANN | 360 |
| | | LLTLIE+ASQEYDEK+S+ELAEKMRENTFDFNDFI+QLDQVQNMGPMEDLLKM+PGMA N | |
| Sbjct: | 303 | LLTLIEKASQEYDEKKSLELAEKMRENTFDFNDFIEQLDQVQNMGPMEDLLKMIPGMAGN | 362 |
| Query: | 361 | PAMKNFKVDENEIARKRAIVSSMTPEERENPDLLNPSRRRRIAAGSGNTFVDVNKFIKDF | 420 |
| | | PA+ N KVDEN+IARKRAIVSSMTP ERENPDLLNPSRRRRIAAGSGN+FVD NKFIKDF | |
| Sbjct: | 363 | PALANIKVDENQIARKRAIVSSMTPAERENPDLLNPSRRRRIAAGSGNSFVD-NKFIKDF | 421 |
| Query: | 421 | NQAKQMMQGVMSGDMNKMMKKMGIDPNNLPKDMPGMDGM-DMSNLEGMMGQNGMPDLSSL | 479 |
| | | NQAK MMQGVMSGDM+KMMK MGI+PNNLPK+MP GM DMS+LEGMMGQ GMPDLS L | |
| Sbjct: | 422 | NQAKSMMQGVMSGDMSKMMKDMGINPNNLPKNMPA--GMPDMSSLEGMMGQGGMPDLSGL | 479 |
| Query: | 480 | GGDMDFSQMFGGGLKGKVGAFAAKQSMKRMANKMKKAKKKRK | 521 |
| | | GGDMD SQ+FG G KGK+G FA KQ+MKR ANK+KKAKKKRK | |
| Sbjct: | 480 | GGDMDMSQLFGKGFKGKIGQFAMKQAMKRQANKLKKAKKKRK | 521 |

[3930] Based on this analysis, it was predicted that these proteins and their epitopes could be useful antigens for vaccines or diagnostics.

### EXAMPLE 679

[3931] A DNA sequence (GBSx0721) was identified in S. agalactiae <SEQ ID 2091> which encodes the amino acid sequence <SEQ ID 2092>. This protein is predicted to be SatD. Analysis of this protein sequence reveals the following:

| Possible site: 49 | | | | |
|---|---|---|---|---|
| >>> Seems to have an uncleavable N-term signal seq | | | | |
| | INTEGRAL | Likelihood = −1.28 | Transmembrane | 3-19 (2-19) |

```
----- Final Results -----
                              bacterial membrane --- Certainty = 0.1510(Affirmative) < succ>
                                bacterial outside --- Certainty = 0.0000(Not Clear) < succ>
                            bacterial cytoplasm --- Certainty = 0.0000(Not Clear) < succ>
```

[3932] A related GBS nucleic acid sequence <SEQ ID 9811> which encodes amino acid sequence <SEQ ID 9812> was also identified.

[3933] The protein has homology with the following sequences in the GENPEPT database:

| >GP: AAG28336 GB: U88582 SatD [Streptococcus mutans] | | | |
|---|---|---|---|
| Identities = 106/222 (47%), Positives = 162/222 (72%), Gaps = 2/222 (0%) | | | |
| Query: | 13 | MYLALIGDIINSKQILERETFQQSFQQLMTELSDVYGEELISPFTITAGDEFQALLKPSK | 72 |
| | | +Y+A+IGD+I+SK I R Q+ + L+ +++ Y E L S FTIT GDEFQALL P+ | |
| Sbjct: | 2 | IYIAIIGDLISSKAITNRPKSQKQLKNLLNQINKKYKELLKSAFTITTGDEFQALLVPNP | 61 |
| Query: | 73 | KVFQIIDHIQLALKPVNVRFGLGTGNIITSINSNESIGADGPAYWHARSAINHIHDKNDY | 132 |
| | | ++FQIID I L KP +RFG+G+G+I+T IN +SIG+DGPAYWHAR+AI++IHDKNDY | |
| Sbjct: | 62 | QIFQIIDEIALGFKPYQIRFGVGSGSILTEINPEQSIGSDGPAYWHARAAIDYIHDKNDY | 121 |
| Query: | 133 | GTVQVAICLDDEDQNLELTLNSLISAGDFIKSKWTTNHFQMLEHLILQDNYQEQFQHQKL | 192 |
| | | G+ +A+ L+D + + + +N++++A +FIKSKWT +++++ L+ Y+E+F H+K+ | |
| Sbjct: | 122 | GSNHLAVDLEDTETSQQ--INAILAACEFIKSKWTVTQYEVIDGLLQAGIYEEKFSHKKM | 179 |
| Query: | 193 | AQLENIEPSALTKRLKASGLKIYLRTRTQAADLLVKSCTQTK | 234 |
| | | A+ ++ PS+ KRLK+SGLKIYLR + A LL+ + + K | |
| Sbjct: | 180 | AEKLDLSPSSFNKRLKSSGLKIYLRNKKVATTLLLNAIRKEK | 221 |

[3934] A related DNA sequence was identified in S. pyogenes <SEQ ID 2093> which encodes the amino acid sequence <SEQ ID 2094>. Analysis of this protein sequence reveals the following:

```
Possible site: 38
>>> Seems to have no N-terminal signal sequence
----- Final Results -----
                            bacterial cytoplasm --- Certainty = 0.3744(Affirmative) < succ>
                              bacterial membrane --- Certainty = 0.0000(Not Clear) < succ>
                                bacterial outside --- Certainty = 0.0000(Not Clear) < succ>
```

[3935] An alignment of the GAS and GBS proteins is shown below:

| Identities = 94/213 (44%), Positives = 137/213 (64%), Gaps = 3/213 (1%) | | | |
|---|---|---|---|
| Query: | 14 | YLALIGDIINSKQILERETFQQSFQQLMTELSDVYGEELISPFTITAGDEFQALLKPSKK | 73 |
| | | Y+ALIGDII SKQ+ +R Q++ + +L+ + +IS ++T GDEFQ L + | |
| Sbjct: | 3 | YIALIGDIIQSKQLTDRSKVQKTLAAYLDDLNKTFAPYIISKLSLTLGDEFQGLFQVDTP | 62 |
| Query: | 74 | VFQIIDHIQLALKPVNVRFGLGTGNIITSINSNESIGADGPAYWHARSAINHIHDKNDYG | 133 |
| | | +F +ID I + + +RFG+G G+I+T IN + SIGADGPAYWHAR AI +IH KNDYG | |
| Sbjct: | 63 | IFHLIDLINHHMD-IPIRFGVGVGSILTDINPDISIGADGPAYWHAREAIRYIHQKNDYG | 121 |
| Query: | 134 | TVQVAICLDDEDQNLELTLNSLISAGDFIKSKWTTNHFQMLEHLILQDNYQEQFQHQKLA | 193 |
| | | +A L N + LNSL++AGD IK+ W + +++ + L+ Y+E F Q+L | |
| Sbjct: | 122 | NTTLA--LRTGHHNQDDVLNSLLAAGDAIKANWRASQWEIFDTLLDLGIYEEYFDQQRLG | 179 |
| Query: | 194 | QLENIEPSALTKRLKASGLKIYLRTRTQAADLL | 226 |
| | | + ++ SAL+KRLK+S +KIYLRTR A + L | |
| Sbjct: | 180 | KQLSLSSSALSKRLKSSHVKIYLRTRQSALNCL | 212 |

[3936] A related GBS gene <SEQ ID 8637> and protein <SEQ ID 8638> were also identified. Analysis of this protein sequence reveals the following:

| Lipop: Possible site: −1 Crend: 7 | | | | |
|---|---|---|---|---|
| McG: Discrim Score: 4.96 | | | | |
| GvH: Signal Score (−7.5): −5.46 | | | | |
| Possible site: 49 | | | | |
| >>> Seems to have an uncleavable N-term signal seq | | | | |
| ALOM program count: 1 value: −1.28 threshold: 0.0 | | | | |
| | INTEGRAL | Likelihood = −1.28 | Transmembrane | 3-19 (1-19) |
| | PERIPHERAL | Likelihood = 5.99 | 74 | |

```
modified ALOM score: 0.76
*** Reasoning Step: 3
----- Final Results -----
                              bacterial membrane --- Certainty = 0.1510(Affirmative) < succ>
                                bacterial outside --- Certainty = 0.0000(Not Clear) < succ>
                            bacterial cytoplasm --- Certainty = 0.0000(Not Clear) < succ>
```

[3937] SEQ ID 8638 (GBS338) was expressed in E. coli as a His-fusion product. SDS-PAGE analysis of total cell extract is shown in FIG. 62 (lane 5; MW 30 kDa). It was also expressed in E. coli as a GST-fusion product. SDS-PAGE analysis of total cell extract is shown in FIG. 68 (lane 11; MW 55 kDa).

[3938] GBS338-GST was purified as shown in FIG. 215, lane 3.

[3939] Based on this analysis, it was predicted that these proteins and their epitopes could be useful antigens for vaccines or diagnostics.

### EXAMPLE 680

[3940] A DNA sequence (GBSx0722) was identified in S. agalactiae <SEQ ID 2095> which encodes the amino acid sequence <SEQ ID 2096>. Analysis of this protein sequence reveals the following:

Possible site: 14
>>> Seems to have no N-terminal signal sequence
----- Final Results -----
bacterial cytoplasm --- Certainty = 0.6082 (Affirmative) < succ>
bacterial membrane --- Certainty = 0.0000 (Not Clear) < succ>
bacterial outside --- Certainty = 0.0000 (Not Clear) < succ>

[3941] The protein has no significant homology with any sequences in the GENPEPT database.

[3942] No corresponding DNA sequence was identified in S. pyogenes.

[3943] Based on this analysis, it was predicted that this protein and its epitopes, could be useful antigens for vaccines or diagnostics.

### EXAMPLE 681

[3944] A DNA sequence (GBSx0723) was identified in S. agalactiae <SEQ ID 2097> which encodes the amino acid sequence <SEQ ID 2098>. Analysis of this protein sequence reveals the following:

| Possible site: 30 | | | |
|---|---|---|---|
| >>> Seems to have a cleavable N-term signal seq. | | | |
| INTEGRAL | Likelihood = −9.87 | Transmembrane | 126-142 (124-154) |
| INTEGRAL | Likelihood = −8.23 | Transmembrane | 45-61 (41-66) |
| INTEGRAL | Likelihood = −5.10 | Transmembrane | 241-257 (236-257) |
| INTEGRAL | Likelihood = −4.04 | Transmembrane | 199-215 (198-218) |
| INTEGRAL | Likelihood = −0.22 | Transmembrane | 96-112 (96-112) |

----- Final Results -----
bacterial membrane --- Certainty = 0.4949 (Affirmative) < succ>
bacterial outside --- Certainty = 0.0000 (Not Clear) < succ>
bacterial cytoplasm --- Certainty = 0.0000 (Not Clear) < succ>

[3945] The protein has homology with the following sequences in the GENPEPT database:

| >GP: AAG28337 GB: U88582 SatE [Streptococcus mutans] | | | |
|---|---|---|---|
| Identities = 54/103 (52%), Positives = 70/103 (67%), Gaps = 2/103 (1%) | | | |
| Query: | 1 | MISDFLRDNPILTLLFCAHFLADFQWQSQSLADSKSHSWRGLWRHLLIVFLPLAALMILI | 60 |
| | | +IS FL NP+LTLL AHFLADFQWQSQ +AD KS +W L RHL+IV LPL L ++I | |
| Sbjct: | 6 | VISQFLSGNPVLTLLLIAHFLADFQWQSQKMADLKSSNWTYLIRHLIIVALPLILLSVVI | 65 |
| Query: | 61 | PETTLLNLSIWGSHIVIDSIKKLSYPWVEEGHF--QKAAFIID | 101 |
| | | P + L+ I+ SH++IDS K L + ++ F KA F+ID | |
| Sbjct: | 66 | PHSFLVLSLIFLSHVLIDSGKLLLNSFYKDRSFIKTKAVFLID | 108 |

[3946] A related DNA sequence was identified in S. pyogenes <SEQ ID 2099> which encodes the amino acid sequence <SEQ ID 2100>. Analysis of this protein sequence reveals the following:

| Possible site: 16 | | | | |
|---|---|---|---|---|
| >>> Seems to have an uncleavable N-term signal seq | | | | |
| | INTEGRAL | Likelihood = −7.59 | Transmembrane | 125-141 (120-144) |
| | INTEGRAL | Likelihood = −6.58 | Transmembrane | 222-238 (215-238) |
| | INTEGRAL | Likelihood = −5.04 | Transmembrane | 47-63 (45-77) |
| | INTEGRAL | Likelihood = −4.62 | Transmembrane | 179-195 (178-199) |
| | INTEGRAL | Likelihood = −0.43 | Transmembrane | 67-83 (67-83) |

```
----- Final Results -----
                              bacterial membrane --- Certainty = 0.4036(Affirmative) < succ>
                                bacterial outside --- Certainty = 0.0000(Not Clear) < succ>
                            bacterial cytoplasm --- Certainty = 0.0000(Not Clear) < succ>
```

[3947] The protein has no significant homology with any sequences in the GENPEPT database.

[3948] An alignment of the GAS and GBS proteins is shown below:

| Identities = 109/256 (42%), Positives = 146/256 (56%), | | | |
|---|---|---|---|
| Gaps = 28/256 (10%) | | | |
| Query: | 2 | ISDFLRDNPILTLLFCAHFLADFQWQSQSLADSKSHSWRGLWRHLLIVFLPLAALMILIP | 61 |
| | | +S +L P LTL H L+D+Q QSQ +AD K L HL+ V +PL L ++IP | |
| Sbjct: | 5 | VSHYLAQTPTLTLFLICHVLSDYQLQSQQVADLKEKHLTYLGYHLIGVSIPLICLTLIIP | 64 |
| Query: | 62 | ETTLLNLSIWGSHIVIDSIKKL---SYPWVEEGHFQKAAFIIDQLAHYTCIIVFYHALPT | 118 |
| | | + L++L + SH +ID +K S W E F++DQ H L | |
| Sbjct: | 65 | QAWLMSLLVMISHALIDWLKPKMANSLKWKREW-----IFLLDQCLHIAISSFAGLRLAG | 119 |
| Query: | 119 | YLPPNHWLLPIKHFIVIALVFIIITKPINIVFKIFFNKFQAKELSSLLTQEKTKIMKEKS | 178 |
| | | PN WL PI ++ L ++ITKP NIVFK+FF K+Q + + | |
| Sbjct: | 120 | VTLPN-WL-PIS-ILMTVLFILLITKPTNIVFKLFFIKYQPDQGEKM------------- | 163 |
| Query: | 179 | EDHEETIEGAGAMIGNLERLIMAILLISGQYAAIGLVFTAKSIARYDKISKSQVFAEYYL | 238 |
| | | +TI GAGA IG LER+++ + +I GQ+A+IGLVFTAKSIARY+KIS+S FAEYYL | |
| Sbjct: | 164 | ----DTIIGAGATIGILERIVIGVCMIMGQFASIGLVFTAKSIARYNKISESPAFAEYYL | 219 |
| Query: | 239 | IGSLFSIISVLITHWL | 254 |
| | | IGSLFSI+SV I W+ | |
| Sbjct: | 220 | IGSLFSILSVFIAAWI | 235 |

[3949] Based on this analysis, it was predicted that these proteins and their epitopes could be useful antigens for vaccines or diagnostics.

### EXAMPLE 682

[3950] A DNA sequence (GBSx0724) was identified in S. agalactiae <SEQ ID 2101> which encodes the amino acid sequence <SEQ ID 2102>. Analysis of this protein sequence reveals the following:

```
Possible site: 30
>>> May be a lipoprotein
----- Final Results -----
                              bacterial membrane --- Certainty = 0.0000(Not Clear) < succ>
                                bacterial outside --- Certainty = 0.0000(Not Clear) < succ>
                            bacterial cytoplasm --- Certainty = 0.0000(Not Clear) < succ>
```

[3951] The protein has homology with the following sequences in the GENPEPT database:

| >GP: AAD17886 GB: AF100456 hyaluronate-associated protein precursor | | | |
|---|---|---|---|
| [Streptococcus equi] | | | |
| Identities = 358/521 (68%), Positives = 426/521 (81%), Gaps = 2/521 (0%) | | | |
| Query: | 1 | MSSFNRKKLKFLGISLATLTATTVTLVACGNESKNSGDNKV-INWYIPTEISTLDISKNT | 59 |
| | | M+ K K LG++ TL A+ L+ACGN+ S D K INWY PTEI TLDISKNT | |
| Sbjct: | 1 | MTVLGTKACKRLGLAAVTL-ASVAALMACGNKQSASTDKKSEINWYTPTEIITLDISKNT | 59 |
| Query: | 60 | DAYSNLAIGNSGSNLLRIDKEGKPKPDLAKKVSVSSDGLTYTATLRDNLKWSDGSKLSAE | 119 |
| | | D YS LAIGNSGSNLLR D +GK +PDLA+KV VS DGLTYTATLRD LKWSDGS L+AE | |
| Sbjct: | 60 | DTYSALAIGNSGSNLLRADAKGKLQPDLAEKVDVSEDGLTYTATLRDGLKWSDGSDLTAE | 119 |
| Query: | 120 | DFVYTWRRIVDPKTASEYAYLATESHLLNADKINSGDIKDLNKLGVTAKGNQVTFKLTSP | 179 |
| | | DFVY+W+R+VDPKTASEYAYLATESHL NA+ INSG DL+ LGV A GN+V F LT P | |
| Sbjct: | 120 | DFVYSWQRMVDPKTASEYAYLATESHLKNAEDINSGKNPDLDSLGVKADGNKVIFTLTEP | 179 |
| Query: | 180 | CPQFKYYLAFSNFMPQKQSYVEKVGKDYGTTSKNQIYSGPYLVKDWNGSNGKFKLVKNKY | 239 |
| | | PQFK L+FSNF+PQK+S+V+ GKDYGTTS+ QIYSGPY+VKDWNG++G FKLVKNK | |
| Sbjct: | 180 | APQFKSLLSFSNFVPQKESFVKDAGKDYGTTSEKQIYSGPYIVKDWNGTSGTFKLVKNKN | 239 |
| Query: | 240 | YWDSKHVKTNSVIVQTIKKPDTAVQMYKQGQIDFAEISGTSAIYQANKNNKDVVDASDAR | 299 |
| | | YWD+K+VKT +V VQT+KKPDTAVQMYKQG++DFA ISGTSAIY ANK +KDVV +A | |
| Sbjct: | 240 | YWDAKNVKTETVNVQTVKKPDTAVQMYKQGKLDFANISGTSAIYNANKKHKDVVPVLEAT | 299 |
| Query: | 300 | TTYIIYNQTGSVKALTNQKIRQALNLATDRKGVVKAAVDTGSTPAESLVPKKLAKLPNGE | 359 |
| | | T YI+YNQTG+++ L + KIRQALNLATDRKG+V AAVDTGS PA +LVP LAKL +G | |
| Sbjct: | 300 | TAYIVYNQTGAIEGLNSLKIRQALNLATDRKGIVSAAVDTGSKPATALVPTGLAKLSDGT | 359 |
| Query: | 360 | DLSKYTAPGYTYNTSKAQKLFKEGLAEVGQSSLKLTITADSDSPAAKNAVDYVKSTWESA | 419 |
| | | DL+++ APGY Y+ +A KLFKEGLAE+G+ +L +TITAD+D+PAAK+AVDY+K TWE+A | |
| Sbjct: | 360 | DLTEHVAPGYKYDDKEAAKLFKEGLAELGKDALTITITADADAPAAKSAVDYIKETWETA | 419 |
| Query: | 420 | LPGLTVEEKFVTFKQRLEDAKNENFDVVLFSWGGDYPEGSTFYGLFTTNSAYNYGKFSSK | 479 |
| | | LPGLTVEEKFV FKQRLED KN+NF+V + WGGDYP+GSTFYGLF + SAYNYGKF++ | |
| Sbjct: | 420 | LPGLTVEEKFVPFKQRLEDTKNQNFEVAVVLWGGDYPKGSTFYGLFKSGSAYNYGKFTNA | 479 |
| Query: | 480 | EYDNAYQKAITTDALKPGDAANDYKTAEKALFDQSYYNPVY | 520 |
| | | +YD AY KA+TTDAL AA+DYK AEKAL+D + YNP+Y | |
| Sbjct: | 480 | DYDAAYNKALTTDALNTDAAADDYKAAEKALYDNALYNPLY | 520 |

[3952] There is also homology to SEQ ID 318. An alignment of the GAS and GBS proteins is shown below:

| Identities = 138/524 (26%), Positives = 222/524 (42%), | | | |
|---|---|---|---|
| Gaps = 73/524 (13%) | | | |
| Query: | 7 | KKLKFLG-ISLATLTATTVTLVACGNESKNSGDN--KVINWYIPTEISTLDISKNTDAYS | 63 |
| | | KK K+L +S+A L+ + L ACGN++ + G K + + +LD + | |
| Sbjct: | 5 | KKSKWLAAVSVAILSVSA--LAACGNKNASGGSEATKTYKYVFVNDPKSLDYILTNGGGT | 62 |
| Query: | 64 | NLAIGNSGSNLLRIDKEGKPKPDLAKKVSVSSDGLTYTATLRDNLKW--SDGSK---LSA | 118 |
| | | I LL D+ G P LAK VS DGLTYT TLRD + W +DG + ++A | |
| Sbjct: | 63 | TDVITQMVDGLLENDEYGNLVPSLAKDWKVSKDGLTYTYTLRDGVSWYTADGEEYAPVTA | 122 |
| Query: | 119 | EDFVYTWRRIVDPKTASEYAYLATESHLLNADKINSGDIKDLNKLGVTAKGNQ-VTFKLT | 177 |
| | | EDFV + VD K+ + Y E + N +G++ D ++GV A ++ V + L | |
| Sbjct: | 123 | EDFVTGLKHAVDDKSDALY---VVEDSIKNLKAYQNGEV-DFKEVGVKALDDKTVQYTLN | 178 |
| Query: | 178 | SPCPQFKYYLAFSNFMPQKQSYVEKVGKDYGTTSKNQI-YSGPYLVKDWNGSNGKFKLVK | 236 |
| | | P + +S P +++ GKD+GTT + I +G Y + + S + K | |
| Sbjct: | 179 | KPESYWNSKTTYSVLFPVNAKFLKSKGKDFGTTDPSSILVNGAYFLSAFT-SKSSMEFHK | 237 |
| Query: | 237 | NKYYWDSKHVKTNSV--IVQTIKKPDTAVQMYKQGQIDFAEISGTSAIYQ-ANKNNKDVV | 293 |
| | | N+ YWD+K+V SV P + + + +G+ A + Y+ A KN D + | |
| Sbjct: | 238 | NENYWDAKNVGIESVKLTYSDGSDPGSFYKNFDKGEFSVARLYPNDPTYKSAKKNYADNI | 297 |
| Query: | 294 | D----ASDARTTYIIYN---------------QTGSVKALTNQKIRQALNLATDRKG--- | 331 |
| | | D R ++ +N Q KAL N+ RQA+ A DR | |
| Sbjct: | 298 | TYGMLTGDIR--HLTWNLNRTSFKNTKKDPAQQDAGKKALNNKDFRQAIQFAFDRASFQA | 355 |
| Query: | 332 | ----------------VVKAAVDTGSTPAESLVPKKLAKL-PNGEDLSKYTAPGYTYNTS | 374 |
| | | V V G + S V K++AKL +D++ A YN | |
| Sbjct: | 356 | QTAGQDAKTKALRNMLVPPTFVTIGESDFGSEVEKEMAKLGDEWKDVNLADAQDGFYNPE | 415 |
| Query: | 375 | KAQKLF---KEGLAEVGQS-SLKLTITADSDSPAAKNAVDYVKSTWESALPGLTV----- | 425 |
| | | KA+ F KE L G + ++L D + A K + E++L V | |
| Sbjct: | 416 | KAKAEFAKAKEALTAEGVTFPVQLDYPVDQANAATVQEAQSFKQSVEASLGKENVIVNVL | 475 |
| Query: | 426 | EEKFVTFKQR---LEDAKNENFDVVLFSWGGDYPEGSTFYGLFT | 466 |
| | | E + T + + E + +++D++ WG DY + T+ + + | |
| Sbjct: | 476 | ETETSTHEAQGFYAETPEQQDYDIISSWWGPDYQDPRTYLDIMS | 519 |

[3953] SEQ ID 2102 (GBS323) was expressed in E. coli as a His-fusion product. SDS-PAGE analysis of total cell extract is shown in FIG. 62 (lane 4; MW 61.3 kDa).

[3954] The GBS323-His fusion product was purified (FIG. 209, lane 5) and used to immunise mice. The resulting antiserum was used for FACS (FIG. 306), which confirmed that the protein is immunoaccessible on GBS bacteria.

[3955] Based on this analysis, it was predicted that these proteins and their epitopes could be useful antigens for vaccines or diagnostics.

### EXAMPLE 683

[3956] A DNA sequence (GBSx0725) was identified in S. agalactiae <SEQ ID 2103> which encodes the amino acid sequence <SEQ ID 2104>. Analysis of this protein sequence reveals the following:

| Possible site: 60 | | | | |
|---|---|---|---|---|
| >>> Seems to have no N-terminal signal sequence | | | | |
| | INTEGRAL | Likelihood = −1.54 | Transmembrane | 199-215 (198-215) |

```
----- Final Results -----
                              bacterial membrane --- Certainty = 0.1617(Affirmative) < succ>
                                bacterial outside --- Certainty = 0.0000(Not Clear) < succ>
                            bacterial cytoplasm --- Certainty = 0.0000(Not Clear) < succ>
```

[3957] The protein has homology with the following sequences in the GENPEPT database:

| >GP: AAC17173 GB: AF065141 unknown [Streptococcus mutans] | | | |
|---|---|---|---|
| Identities = 304/356 (85%), Positives = 334/356 (93%) | | | |
| Query: | 1 | MKRELLLEKIDELKEIMPWYVLEYYQSKLSVPYSFTTLYEYLKEYRRFLEWLLDSGVANC | 60 |
| | | M+RELLLEKIDELKE+MPWYVLEYYQSKL+VPYSFTTLYEYLKEYRRF EWL+DSGV+N | |
| Sbjct: | 1 | MRRELLLEKIDELKELMPWYVLEYYQSKLTVPYSFTTLYEYLKEYRRFFEWLIDSGVSNA | 60 |
| Query: | 61 | HHIAEIELSVLENLTKKDMEAFILYLRERPLLNANTRQNGVSQTTINRTLSALSSLFKYL | 120 |
| | | + +A+I L LE+L+KKDME+FILYLRER LLN ++ GVSQTTINRTLSALSSL+KYL | |
| Sbjct: | 61 | NKLADIPLETLEHLSKKDMESFILYLRERTLLNTKNKRQGVSQTTINRTLSALSSLYKYL | 120 |
| Query: | 121 | TEEVENADGEPYFYRNVMKKVSTKKKKETLASRAENIKQKLFLGNETIEFLEYIDCEYQN | 180 |
| | | TEEVENADGEPYFYRNVMKKVSTKKKKETLA+RAENIKQKLFLGNET+EFLEY+DCEY+ | |
| Sbjct: | 121 | TEEVENADGEPYFYRNVMKKVSTKKKKETLAARAENIKQKLFLGNETMEFLEYVDCEYEQ | 180 |
| Query: | 181 | KLSKRALAFFNKNKERDLAIIALLLASGVRLSEAVNLDLKDINLNVMVIDVTRKGGKRDS | 240 |
| | | KLSKRAL+ F KNKERDLAIIALLLASGVRLSEAVNLDLKD+NLN+M+I+VTRKGGK DS | |
| Sbjct: | 181 | KLSKRALSSFRKNKERDLAIIALLLASGVRLSEAVNLDLKDVNLNMMIIEVTRKGGKHDS | 240 |
| Query: | 241 | VNVASFAKPYLANYLDIRKNRYKAENQDIALFLSEYRGVPNRIDASSVEKMVAKYSQDFK | 300 |
| | | VNVA FAKPYL NY+ IR+ RYKA+ D+A FLSEYRGVPNR+DASS+EKMVAKYSQDFK | |
| Sbjct: | 241 | VNVAGFAKPYLENYITIRRGRYKAKKTDLAFFLSEYRGVPNRMDASSIEKMVAKYSQDFK | 300 |
| Query: | 301 | VRVTPHKLRHTLATRLYDATKSQVLVSHQLGHASTQVTDLYTHIVNDEQKNALDKL | 356 |
| | | +RVTPHKLRHTLATRLYDATKSQVLVSHQLGHASTQVTDLYTHIVNDEQKNALDKL | |
| Sbjct: | 301 | IRVTPHKLRHTLATRLYDATKSQVLVSHQLGHASTQVTDLYTHIVNDEQKNALDKL | 356 |

[3958] A related DNA sequence was identified in S. pyogenes <SEQ ID 2105> which encodes the amino acid sequence <SEQ ID 2106>. Analysis of this protein sequence reveals the following:

| Possible site: 48 | | | | |
|---|---|---|---|---|
| >>> Seems to have no N-terminal signal sequence | | | | |
| | INTEGRAL | Likelihood = −1.54 | Transmembrane | 211-227 (210-227) |

```
----- Final Results -----
                              bacterial membrane --- Certainty = 0.1617(Affirmative) < succ>
                                bacterial outside --- Certainty = 0.0000(Not Clear) < succ>
                            bacterial cytoplasm --- Certainty = 0.0000(Not Clear) < succ>
```

[3959] A related sequence was also identified in GAS <SEQ ID 9139> which encodes the amino acid sequence <SEQ ID 9140>. Analysis of this protein sequence reveals the following:

| Possible cleavage site: 60 | | | | |
|---|---|---|---|---|
| >>> Seems to have no N-terminal signal sequence | | | | |
| | INTEGRAL | Likelihood = −1.54 | Transmembrane | 199-215 (198-215) |

```
----- Final Results -----
                              bacterial membrane --- Certainty = 0.162(Affirmative) < succ>
                                bacterial outside --- Certainty = 0.000(Not Clear) < succ>
                            bacterial cytoplasm --- Certainty = 0.000(Not Clear) < succ>
```

[3960] An alignment of the GAS and GBS proteins is shown below:

| Identities = 283/356 (79%), Positives = 321/356 (89%) | | | |
|---|---|---|---|
| Query: | 1 | MKRELLLEKIDELKEIMPWYVLEYYQSKLSVPYSFTTLYEYLKEYRRFLEWLLDSGVANC | 60 |
| | | M+RELLLEKI+ K IMPWYVL+YYQSKL+VPYSFTTLYEYLKEY+RF +WL+D+ + | |
| Sbjct: | 13 | MRRELLLEKIETYKAIMPWYVLDYYQSKLAVPYSFTTLYEYLKEYKRFFDWLMDADLTQA | 72 |
| Query: | 61 | HHIAEIELSVLENLTKKDMEAFILYLRERPLLNANTRQNGVSQTTINRTLSALSSLFKYL | 120 |
| | | IA+I+LS LE+LTKKD+EAF+LYLRERP LN + + G+SQTTINRTLSALSSL+KYL | |
| Sbjct: | 73 | PKIADIDLSTLEHLTKKDLEAFVLYLRERPSLNTYSTKEGLSQTTINRTLSALSSLYKYL | 132 |
| Query: | 121 | TEEVENADGEPYFYRNVMKKVSTKKKKETLASRAENIKQKLFLGNETIEFLEYIDCEYQN | 180 |
| | | TEEVEN GEPYFYRNVMKKVSTKKKKETLASRAENIKQKLFLG+ET+ FL+Y+D EY+ | |
| Sbjct: | 133 | TEEVENDQGEPYFYRNVMKKVSTKKKKETLASRAENIKQKLFLGDETLAFLDYVDKEYEQ | 192 |
| Query: | 181 | KLSKRALAFFNKNKERDLAIIALLLASGVRLSEAVNLDLKDINLNVMVIDVTRKGGKRDS | 240 |
| | | KLS RA + F KNKERDLAIIALLLASGVRLSEAVNLDLKD+NLN+M+I+V REGGERDS | |
| Sbjct: | 193 | KLSNRAKSSFRKNKERDLAIIALLLASGVRLSEAVNLDLKDVNLNMMIIEVIRKGGKRDS | 252 |
| Query: | 241 | VNVASFAKPYLANYLDIRKNRYKAENQDIALFLSEYRGVPNRIDASSVEKMVAKYSQDFK | 300 |
| | | VNVA FAK YL +YL +R+ RYKAE QD+A FL+EYRGVPNR+DASS+EKMV KYS+DFK | |
| Sbjct: | 253 | VNVAGFAKGYLESYLAVRQRRYKAEKQDLAFFLTEYRGVPNRMDASSIEKMVGKYSEDFK | 312 |
| Query: | 301 | VRVTPHKLRHTLATRLYDATKSQVLVSHQLGHASTQVTDLYTHIVNDEQKNALDKL | 356 |
| | | +RVTPHKLRHTLATRLYDATKSQVLVSHQLGH+STQVTDLYTHIVNDEQKNALD L | |
| Sbjct: | 313 | IRVTPHKLRHTLATRLYDATKSQVLVSHQLGHSSTQVTDLYTHIVNDEQKNALDNL | 368 |

[3961] SEQ ID 2104 (GBS420) was expressed in E. coli as a GST-fusion product. SDS-PAGE analysis of total cell extract is shown in FIG. 172 (lane 5; MW 68 kDa).

[3962] GBS420-GST was purified as shown in FIG. 219, lane 9-10.

[3963] Based on this analysis, it was predicted that these proteins and their epitopes could be useful antigens for vaccines or diagnostics.

### EXAMPLE 684

[3964] A DNA sequence (GBSx0726) was identified in S. agalactiae <SEQ ID 2107> which encodes the amino acid sequence <SEQ ID 2108>. This protein is predicted to be a sensor-like histidine kinase in idh 3′region. Analysis of this protein sequence reveals the following:

| Possible site: 24 | | | | |
|---|---|---|---|---|
| >>> Seems to have an uncleavable N-term signal seq | | | | |
| | INTEGRAL | Likelihood = −7.75 | Transmembrane | 10-26 (8-34) |
| | INTEGRAL | Likelihood = −3.93 | Transmembrane | 37-53 (35-54) |

```
----- Final Results -----
                              bacterial membrane --- Certainty = 0.4100(Affirmative) < succ>
                                bacterial outside --- Certainty = 0.0000(Not Clear) < succ>
                            bacterial cytoplasm --- Certainty = 0.0000(Not Clear) < succ>
```

[3965] The protein has homology with the following sequences in the GENPEPT database:

| >GP: CAB16001 GB: Z99124 similar to two-component sensor histidine | | | |
|---|---|---|---|
| kinase [YxdJ] [Bacillus subtilis] | | | |
| Identities = 96/320 (30%), Positives = 172/320 (53%), Gaps = 16/320 (5%) | | | |
| Query: | 2 | IRQFLREHLIWYILYIM--MFVLFFISFYLYHLPMPYLFNSLGLNVIVLLGISIWQYSRY | 59 |
| | | ++ FLR H + +L+++ +FV F+ F H +LF LG+ +++L G +++ + | |
| Sbjct: | 1 | MKLFLRSHAVLILLFLLQGLFVFFYYWFAGLH-SFSHLFYILGVQLLILAGYLAYRWYKD | 59 |
| Query: | 60 | RKKMLHLKYFNSSQDPSFELQPSDYAYFNIITQLEA--REAQKVSETIEQTNHVALMIKM | 117 |
| | | R L D + L S + Q+E + QK+ ET + + + | |
| Sbjct: | 60 | RGVYHWLSSGQEGTDIPY-LGSSVFCSELYEKQMELIRLQHQKLHETEAKLDARVTYMNQ | 118 |
| Query: | 118 | WSHQMKVPLAAISLMAQTNHLDP--KEVEQQLLKLQHYLETLLAFLKFRQYRDDFRFEAV | 175 |
| | | W HQ+K PL+ I+L+ Q +P +++++++ +++ LETLL + + DF+ EAV | |
| Sbjct: | 119 | WVHQVKTPLSVINLIIQEED-EPVFEQIKKEVRQIEFGLETLLYSSRLDLFERDFKIEAV | 177 |
| Query: | 176 | SLREVVVEIIKSYKVICLSKSL--SIIIEGDNIWKTDKKWLTFALSQVLDNAIKYSNPES | 233 |
| | | SL E++ +I+SYK + + + + D+ TD KWL FA+ QV+ NA+KYS +S | |
| Sbjct: | 178 | SLSELLQSVIQSYKRFFIQYRVYPKMNVCDDHQIYTDAKWLKFAIGQVVTNAVKYSAGKS | 237 |
| Query: | 234 | -----KIIISIGEESIRIQDYGIGILEEDIPRLFEDGFTGYNGHEHQKATGMGLYMTKEV | 288 |
| | | + + ++DYG+GI +DI R+F+ +TG NG Q++TG+GL++ KE+ | |
| Sbjct: | 238 | DRLELNVFCDEDRTVLEVKDYGVGIPSQDIKRVFDPYYTGENGRRFQESTGIGLHLVKEI | 297 |
| Query: | 289 | LSSLNLSISVDSKINYGTAV | 308 |
| | | LN ++ + S GT+V | |
| Sbjct: | 298 | TDKLNHTVDISSSPGEGTSV | 317 |

[3966] SEQ ID 2108 (GBS421) was expressed in E. coli as a GST-fusion product. SDS-PAGE analysis of total cell extract is shown in FIG. 172 (lane 6; MW 63 kDa).

[3967] GBS421-GST was purified as shown in FIG. 219, lane 11.

[3968] Based on this analysis, it was predicted that this protein and its epitopes, could be useful antigens for vaccines or diagnostics.

### EXAMPLE 685

[3969] A DNA sequence (GBSx0727) was identified in S. agalactiae <SEQ ID 2111> which encodes the amino acid sequence <SEQ ID 2112>. Analysis of this protein sequence reveals the following:

Possible site: 37
>>> Seems to have no N-terminal signal sequence
----- Final Results -----
bacterial cytoplasm --- Certainty = 0.1310 (Affirmative) < succ>
bacterial membrane --- Certainty = 0.0000 (Not Clear) < succ>
bacterial outside --- Certainty = 0.00000 (Not Clear) < succ>

[3970] The protein has homology with the following sequences in the GENPEPT database:

| >GP: AAD10258 GB: AF036964 putative response regulator [Lactobacillus | | | |
|---|---|---|---|
| sakei] | | | |
| Identities = 94/222 (42%), Positives = 140/222 (62%), Gaps = 8/222 (3%) | | | |
| Query: | 7 | KIYIVEDDMTIVSLLKDHLSASYHVSSV--SNFRDVKQEIIAFQPDLILMDITLPYFNGF | 64 |
| | | +I IVEDD TI +L+ ++L + + ++ +F + + +P L+L+DI LP ++GF | |
| Sbjct: | 3 | EIMIVEDDPTIANLIAENLE-KWQLKAIIPDDFDTIFDRFLTDKPHLVLLDINLPVYDGF | 61 |
| Query: | 65 | YWTAELRKFLTIPIIFISSSNDEMDMVMALNMGGDDFISKPFSLAVLDAKLTAILRRSQQ | 124 |
| | | YW ++R+ +PIIFISS + MDMVM++NMGGDDF++KPFS+ VL AK+ A+LRR+ | |
| Sbjct: | 62 | YWCRKIREVSKVPIIFISSRSTNMDMVMSMNMGGDDFVNKPFSMEVLIAKINALLRRTYN | 121 |
| Query: | 125 | FIQQE---LTFGGFTLT-REGLLSSQDKEVILSPTENRILSILLMHPKQVVSKESLLEKL | 180 |
| | | ++ Q + G + + G D V LS E K+L L+ Q+VS+E LL L | |
| Sbjct: | 122 | YVDQNTDVIEHNGLLINLQSGGAQVGDTVVDLSKNEYKLLQFLMRQHGQIVSREKLLRAL | 181 |
| Query: | 181 | WENDSFIDQNTLNVNMTRLRKKIVPIGF-DYIHTVRGVGYLL | 221 |
| | | W+++ F+D NTL VN+ RLRKKI G DYI T G GY++ | |
| Sbjct: | 182 | WDDERFVDDNTLTVNINRLRKKIEQAGLEDYIQTKIGQGYII | 223 |

[3971] There is also homology to SEQ ID 1182.

[3972] Based on this analysis, it was predicted that this protein and its epitopes, could be useful antigens for vaccines or diagnostics.

### EXAMPLE 686

[3973] A DNA sequence (GBSx0728) was identified in S. agalactiae <SEQ ID 2113> which encodes the amino acid sequence <SEQ ID 2114>. This protein is predicted to be permease OrfY. Analysis of this protein sequence reveals the following:

| Possible site: 37 | | | |
|---|---|---|---|
| >>> Seems to have no N-terminal signal sequence | | | |
| INTEGRAL | Likelihood = −11.62 | Transmembrane | 55-71 (49-75) |
| INTEGRAL | Likelihood = −10.30 | Transmembrane | 197-213 (192-218) |
| INTEGRAL | Likelihood = −9.13 | Transmembrane | 152-168 (141-172) |
| INTEGRAL | Likelihood = −8.70 | Transmembrane | 624-640 (619-645) |
| INTEGRAL | Likelihood = −8.44 | Transmembrane | 222-238 (219-250) |
| INTEGRAL | Likelihood = −7.75 | Transmembrane | 283-299 (280-307) |
| INTEGRAL | Likelihood = −7.70 | Transmembrane | 533-549 (526-552) |
| INTEGRAL | Likelihood = −6.95 | Transmembrane | 108-124 (99-140) |
| INTEGRAL | Likelihood = −4.88 | Transmembrane | 585-601 (581-610) |
| INTEGRAL | Likelihood = −3.82 | Transmembrane | 25-41 (21-47) |
| INTEGRAL | Likelihood = −0.48 | Transmembrane | 602-618 (602-618) |

----- Final Results -----
bacterial membrane --- Certainty = 0.5649 (Atfirmative) < succ>
bacterial outside --- Certainty = 0.0000 (Not Clear) < succ>
bacterial cytoplasm --- Certainty = 0.0000 (Not Clear) < succ>

[3974] A related GBS nucleic acid sequence <SEQ ID 9809> which encodes amino acid sequence <SEQ ID 9810> was also identified.

[3975] The protein has homology with the following sequences in the GENPEPT database:

| >GP: AAF99695 GB: AF267498 permease OrfY [Streptococcus mutans] | | | |
|---|---|---|---|
| Identities = 154/665 (23%), Positives = 299/665 (44%), Gaps = 40/665 (6%) | | | |
| Query: | 4 | MFYLKIAWHNLKHSIDQYIPFLLASLLLYSLTCSTLLILMSAVGRDMGTAAT---VLFLG | 60 |
| | | MF KI++HNL + +P+ + + L + ++ TA +L G | |
| Sbjct: | 1 | MFLPKISFHNLIVNKSLTLPYFAIMTIFSGFNYVLINFLTNPSFYNIPTARILIDILIFG | 60 |
| Query: | 61 | VIVLSIFAVVMEHYSYMILMKQRSSEFGLYNILGMNKRQVARVASLELFIIYIFLISIGS | 120 |
| | | I++S+ ++ Y+ + +R+S G++ +LGM K+Q+ ++ LE ++ G | |
| Sbjct: | 61 | FILISLLMLLYGRYANRFISDERNSNMGIFLMLGMGKRQLLKIIYLEKLYLFTGTFFGGL | 120 |
| Query: | 121 | LFSAFFAKFIYLIFVNIINYHALNLSLSLWPFIICIVIFTGIFLTLEVPVIRHVHLSSPL | 180 |
| | | +F ++K +L N+I + SL +++ I+ + + R + S | |
| Sbjct: | 121 | IFGFVYSKIFFLFIRNLIVIGDVREQYSLTAISWLLILTFFIYFIIYLSEYRLLKRQSIT | 180 |
| Query: | 181 | SLFRKKQQGEKEPKGNLILAILALVAIAIAYTMALTSGKAPALAVIY-RFFFAVLLVIAG | 239 |
| | | +F K + + K ++ + + L A+ + Y ALTS P + + RF +A LV G | |
| Sbjct: | 181 | VIFNSKAKRDNPRKTSVFVGLFGLFALLMGYHFALTS---PNVTTSFSRFIYAACLVTLG | 237 |
| Query: | 240 | TYLFYISFMTWYLKRLRQNKHYYYKSEHFVSTSQMIFRMKQNAVGLASITLLAVMALVTI | 299 |
| | | + + S + L +++ + YY FV + + R++ NA+ LA+I + + LV++ | |
| Sbjct: | 238 | IFCTFSSGVIMLLTVIKKRRAIYYNQRRFVVIASLFHRIRSNALSLATICIFSTATLVSL | 297 |
| Query: | 300 | ATTVSLYSNTQNVVTGLFPKSVSLSIDNSKGDAKNIFEEKILKKLGKSSKEAITYNQTMI | 359 |
| | | + SLY N+V P+ V++ S D E L + + +T Q | |
| Sbjct: | 298 | SVLASLYLAKDNMVRLSSPRDVTVL---STTDI-----EPNLMDIATKNHVTLTNRQ--- | 346 |
| Query: | 360 | SMPVSQSSELNITSKNVKHVDITKTGFNY------LITQNDFRRLGHQLPKLKDNQVAYF | 413 |
| | | ++ VSQS NI H+ + G M +I+ + F + +LK++++ + | |
| Sbjct: | 347 | NLKVSQSVYGNIKGS---HLSVDPNGGMANDYQITVISLDSFNASNNTHYRLKNHEILTY | 403 |
| Query: | 414 | VQKGDSRLKKINLLGNKFDVVKNLKEA-YVPETTNTYNPGLIIFANNKQI-DNIRKAYLP | 471 |
| | | V G + G K VK +K ++ + P I +N++I I K L | |
| Sbjct: | 404 | VSNGAAAPSSYTTNGVKLTNVKQIKRINFIFSPLRSMQPNFFIITDNREIIQTILKEELT | 463 |
| Query: | 472 | YTKNINTFPKTFKAYLDLNSQEINSISKNDIIEVDG--KYVGNISTKQSFLKEGYQMFGG | 529 |
| | | + T Y + +++N D +E ++ N+ + + +FGG | |
| Sbjct: | 464 | WG--------TMAGY-HVKGKKMNQKDFYDELETTNFRQFSANVVSIRQVKSMFNALFGG | 514 |
| Query: | 530 | LLFTGFLLGISFLLGIALIVYYKQYSEGHEDKRSYRILQEVGMSKKLVKRTINSQIMIFF | 589 |
| | | LLF G + G F + A+ +YY+Q SEG D+ Y+ + ++GM+ K ++ +I QI F | |
| Sbjct: | 515 | LLFVGIIFGTIFAILTAITIYYQQLSEGIRDRDDYKAMIKLGMTNKTIQDSIKVQINFVF | 574 |
| Query: | 590 | FQPLVVAVIHFGVAIPMLKQMLLVFGVLNSTIVYVVSGLTVLAISIIYFIIYRITSRTYY | 649 |
| | | P+ A+++ A+P+L +++ FG ++ + G ++ Y+ I TS+ YY | |
| Sbjct: | 575 | ILPIAFALLNLIFALPILYKIMTTFGFNDAGLFLRAVGTCLIVYLFFYWFICHCTSKLYY | 634 |
| Query: | 650 | HIIER | 654 |
| | | +I + | |
| Sbjct: | 635 | RLISK | 639 |

[3976] A related DNA sequence was identified in S. pyogenes <SEQ ID 2115> which encodes the amino acid sequence <SEQ ID 2116>. Analysis of this protein sequence reveals the following:

| Possible site: 35 | | | |
|---|---|---|---|
| >>> Seems to have a cleavable N-term signal seq. | | | |
| INTEGRAL | Likelihood = −13.59 | Transmembrane | 602-618 (592-630) |
| INTEGRAL | Likelihood = −12.26 | Transmembrane | 59-75 (50-81) |
| INTEGRAL | Likelihood = −12.21 | Transmembrane | 235-251 (224-262) |
| INTEGRAL | Likelihood = −9.82 | Transmembrane | 159-175 (146-177) |
| INTEGRAL | Likelihood = −9.02 | Transmembrane | 201-217 (198-223) |
| INTEGRAL | Likelihood = −8.97 | Transmembrane | 510-526 (507-540) |
| INTEGRAL | Likelihood = −6.42 | Transmembrane | 569-585 (564-589) |
| INTEGRAL | Likelihood = −5.95 | Transmembrane | 109-125 (102-138) |
| INTEGRAL | Likelihood = −4.09 | Transmembrane | 294-310 (290-315) |
| INTEGRAL | Likelihood = −1.86 | Transmembrane | 126-142 (126-142) |

----- Final Results -----
bacterial membrane --- Certainty = 0.6434 (Affirmative) < succ>
bacterial outside --- Certainty = 0.0000 (Not Clear) < succ>
bacterial cytoplasm --- Certainty = 0.0000 (Not Clear) < succ>

[3977] The protein has homology with the following sequences in the databases:

| >GP: BAB03337 GB: AB035452 ABC transporter [Staphylococcus aureus] | | | |
|---|---|---|---|
| Identities = 141/657 (21%), Positives = 289/657 (43%), | | | |
| Gaps = 66/657 (10%) | | | |
| Query: | 5 | ITKSNIKKNFSLYRIYFLATIGLLSIFIAFLNFISDKII--TEKIGDSGQALVIANGSL- | 61 |
| | | I N+++N Y +Y L S+F + + + S + T+ + + +I G+L | |
| Sbjct: | 6 | IVFKNLRQNLKHYAMY------LFSLFFSIVLYFSFTTLQFTKGVNNDDSMAIIKKGALV | 59 |
| Query: | 62 | --IFLIVFLVVFLIYFNNFFVKKRSQELGVLAILGFSKRELTKLLTLENLVILVLSYLVS | 119 |
| | | IFL + +V+FL+Y N+ FVK+R++E + ++G +++ + K+L LE +++ +++ +V | |
| Sbjct: | 60 | GSIFLFIIIVIFLMYANHLFVKRRTREFALFQLIGLTRQNILKMLALEQMIVFLITGVVG | 119 |
| Query: | 120 | LLLGPTLYFLAVLAITHLLNLTMEVQWFITVNEIIESLGILVVVFLINVITNGLIISKQS | 179 |
| | | +L G L + ++ L++L++ + ++ ++ +L++ +++ + + L + ++S | |
| Sbjct: | 120 | VLCGIAGAQLLLSIVSKLMSLSINLSIHFEPMALVLTIFMLIIAYVLILFQSALFLKRRS | 179 |
| Query: | 180 | LIEFVNFSRKAE----KKIKIRKVRAIIAITALLLSYILCLATVFSSTRNMLLSIGMVPV | 235 |
| | | ++ + S K + K + ++ I + L Y +AT T L P | |
| Sbjct: | 180 | ILSMMKDSIKTDATTAKVTTAEVISGVLGIAMIALGYY--MATEMFGTFKALTMAMTSP- | 236 |
| Query: | 236 | SLLIIVLVVLGTVFTIRYGLAFVVSLLKENKKRLYRPLSNIIYPKFNYRIATKNKLLTVL | 295 |
| | | +I+ L V+G R ++ + LK++K + YR+ LT++ | |
| Sbjct: | 237 | -FIILFLTVVGAYLFFRSSVSLIFKTLKKSKNGRVSITDVVFTSSIMYRMKKNAMSLTII | 295 |
| Query: | 296 | GGLLTVTVSVAGMMVMLYAYSLNGIERLTPSAIEYNVESENGQVNVTTILENDQVSL--- | 352 |
| | | + VTV+V + + + + + P+ E+NV + T L Q++ | |
| Sbjct: | 296 | AIISAVTVTVLCFAALSKSNTDQTLTSMAPN--EFNVVATQDAKQFETKLSQQQITFSKN | 353 |
| Query: | 353 | ----VDVGLLRLNTIPEVTITDSGQTIPYFDIINYSDYKELMKAQGRTNSIEGSKSLPLL | 408 |
| | | + V ++ I +DSG+T N K G I +KSLP + | |
| Sbjct: | 354 | AYETITVDNVKDQVITLENGSDSGRTNSILSANN--------KVTGNNAIITNTKSLPNI | 405 |
| Query: | 409 | INYYPTEISLGKTFNLGNAYDVT--VKQVSTNNVFSFSTSVTTLV--VSDKLYAKLSSRF | 464 |
| | | IN I L K + + T V Q V+ + S + V VS + Y +L + | |
| Sbjct: | 406 | IN-----IHLNKDLVVKGTKNETFRVTQEDKGRVYPLNLSFNSPVVEVSPEKYQQLKT-- | 458 |
| Query: | 465 | PEKEMTIRTFNGTSIR------SSEAFYNQFSMVPDVISSYSKEHTVKTANIATYIFIT- | 517 |
| | | + + TF G I+ ++A QF D + +Y + A IF+T | |
| Sbjct: | 459 | ---QNNVHTFYGYDIKQTSQKEKAQAIAKQFG---DKVITYDEMKKEVDATNGILIFVTS | 512 |
| Query: | 518 | FLSILFIICTGSILYFTSLIEIMENKEEYGYLSKLGYSKKMIHRILRYETGILFLIPVFI | 577 |
| | | FL + F++ G I+Y + E + + L ++G++ + + L + F +P+ I | |
| Sbjct: | 513 | FLGLAFLVAAGCIIYIKQMDETEDELSNFRILKRIGFTHTDMLKGLLLKITFNFGLPLLI | 572 |
| Query: | 578 | GIVNGGMLLIYYKYLFMDTLVAGNIIMLSLLLCLLFFLIIYGTFYVLTLRLVTSIIK | 634 |
| | | I++ I + L GNI + +++ ++ + +IY TF ++ +IK | |
| Sbjct: | 573 | AILHAVFAAIAFMKLM------GNISFMPVIVVIVVYTLIYITFALIAFVHSNKLIK | 623 |

[3978] An alignment of the GAS and GBS proteins is shown below:

| Identities = 145/678 (21%), Positives = 277/678 (40%), | | | |
|---|---|---|---|
| Gaps = 89/678 (13%) | | | |
| Query: | 13 | NLKHSIDQYIPFLLASLLLYSLTCSTL-----LILMSAVGRDMGTAATVLFLGVIVLSIF | 67 |
| | | N+K + Y + LA++ L S+ +L I+ +G D G A + +I L +F | |
| Sbjct: | 9 | NIKKNFSLYRIYFLATIGLLSIFIAFLNFISDKIITEKIG-DSGQALVIANGSLIFLIVF | 67 |
| Query: | 68 | AVVMEHYSYNILMKQRSSEFGLYNILGMNKRQVARVASLELFIIYIFLISIGSLFSAFFA | 127 |
| | | VV Y N +K+RS E G+ ILG +KR++ ++ +LE +I + + L S | |
| Sbjct: | 68 | LVVFLIYFNNFFVKKRSQELGVLAILGFSKRELTKLLTLENLVILV----LSYLVSLLLG | 123 |
| Query: | 128 | KFIYLIFVNIINYHALNLSLSLWPFIICIVIFTGIFLTLEVPVIRHV------HLSSPLS | 181 |
| | | +Y + V I H LNL++ + FI I + + + V +I + S + | |
| Sbjct: | 124 | PTLYFLAVLAIT-HLLNLTMEVQWFITVNEIIESLGILVVVFLINVITNGLIISKQSLIE | 182 |
| Query: | 182 | LFRKKQQGEKEPKGNLILAILALVAIAIAYTMAL------TSGKAPALAVIYRFFFAVLL | 235 |
| | | ++ EK+ K + AI+A+ A+ ++Y + L T ++ ++ ++L | |
| Sbjct: | 183 | FVNFSRKAEKKIKIRKVRAIIAITALLLSYILCLATVFSSTRNMLLSIGMVPVSLLIIVL | 242 |
| Query: | 236 | VIAGTYLFYISFMTWYLKRLRQNKHYYYKSEHFVSTSQMIFRMKQNAVGLASITLLAVMA | 295 |
| | | V+ GT + + + L++NK Y+ + + +R+ A +T+L + | |
| Sbjct: | 243 | VVLGTVFTIRYGLAFVVSLLKENKKRLYRPLSNIIYPKFNYRI---ATKNKLLTVLGGLL | 299 |
| Query: | 296 | LVTIATT---VSLYSNTQNVVTGLFPKSVSLSIDNSKGDAKNIFEEKILKKLGKSSKEAI | 352 |
| | | VT++ V LY+ + N + L P ++ ++++ G + I | |
| Sbjct: | 300 | TVTVSVAGMMVMLYAYSLNGIERLTPSAIEYNVESENGQV---------------NVTTI | 344 |
| Query: | 353 | TYNQTMISMPVSQSSELNITSKNVKHVDITKTG----FMYLITQNDFRRL------GHQL | 402 |
| | | N + + V + + V IT +G + +I +D++ L + + | |
| Sbjct: | 345 | LENDQVSLVDVGL-----LRLNTIPEVTITDSGQTIPYFDIINYSDYKELMKAQGRTNSI | 399 |
| Query: | 403 | PKLKDNQVAYFVQKGDSRLKKINLLGNKFDVVKNLKEAYVPETTNTYNPGLIIFANNKQI | 462 |
| | | K + + L K LGN +DV +K+ + + ++K | |
| Sbjct: | 400 | EGSKSLPLLINYYPTEISLGKTFNLGNAYDVT--VKQVSTNNVFSFSTSVTTLVVSDKLY | 457 |
| Query: | 463 | DNIRKAYLPYTKNINTFPKT-------FKAYLDLNSQEINSISKNDIIEVDGKYVGNIST | 515 |
| | | + + I TF T F + I+S SK ++ NI+T | |
| Sbjct: | 458 | AKLSSRFPEKEMTIRTFNGTSIRSSEAFYNQFSMVPDVISSYSKEHTVKT-----ANIAT | 512 |
| Query: | 516 | KQSFLKEGYQMFGGLLFTGFLLGISFLLGIALIVYYKQYSEGHEDKRSYRILQEVGMSKK | 575 |
| | | +F FL I F++ I+Y+ E E+K Y L ++G SKK | |
| Sbjct: | 513 | --------------YIFITFL-SILFIICTGSILYFTSLIEIMENKEEYGYLSKLGYSKK | 557 |
| Query: | 576 | LVKRTINSQIMIFFFQPLVVAVIHFGVAIPMLKQMLLVFGVLNSTIVYVVSGLTVLAISI | 635 |
| | | ++ R + + I F P+ + +++ G+ + K L + ++ I+ + L +L I | |
| Sbjct: | 558 | MIHRILRYETGILFLIPVFIGIVNGGMLLIYYK-YLFMDTLVAGNIIMLSLLLCLLFFLI | 616 |
| Query: | 636 | IYFIIYRITSRTYYHIIE | 653 |
| | | IY Y +T R II+ | |
| Sbjct: | 617 | IYGTFYVLTLRLVTSIIK | 634 |

[3979] A related GBS gene <SEQ ID 8639> and protein <SEQ ID 8640> were also identified. Analysis of this protein sequence reveals the following:

| Lipop: Possible site: −1 Crend: 7 | | | |
|---|---|---|---|
| McG: Discrim Score: −11.64 | | | |
| GvH: Signal Score (−7.5): −3.52 | | | |
| Possible site: 37 | | | |
| >>> Seems to have no N-terminal signal sequence | | | |
| ALOM program | count: 11 | value: −11.62 | threshold: 0.0 |

| | | | |
|---|---|---|---|
| INTEGRAL | Likelihood = −11.62 | Transmembrane | 55-71 (49-75) |
| INTEGRAL | Likelihood = −10.30 | Transmembrane | 197-213 (192-218) |
| INTEGRAL | Likelihood = −9.13 | Transmembrane | 152-168 (141-172) |
| INTEGRAL | Likelihood = −8.70 | Transmembrane | 624-640 (619-645) |
| INTEGRAL | Likelihood = −8.44 | Transmembrane | 222-238 (219-250) |
| INTEGRAL | Likelihood = −7.75 | Transmembrane | 283-299 (280-307) |
| INTEGRAL | Likelihood = −7.70 | Transmembrane | 533-549 (526-552) |
| INTEGRAL | Likelihood = −6.95 | Transmembrane | 108-124 (99-140) |
| INTEGRAL | Likelihood = −4.88 | Transmembrane | 585-601 (581-610) |
| INTEGRAL | Likelihood = −3.82 | Transmembrane | 25-41 (21-47) |
| INTEGRAL | Likelihood = −0.48 | Transmembrane | 602-618 (602-618) |

| | | |
|---|---|---|
| PERIPHERAL | Likelihood = 1.16 | 129 |

modified ALOM score: 2.82
*** Reasoning Step: 3
----- Final Results -----
bacterial membrane --- Certainty = 0.5649 (Affirmative) < succ>
bacterial outside --- Certainty = 0.0000 (Not Clear) < succ>
bacterial cytoplasm --- Certainty = 0.0000 (Not Clear) < succ>

[3980] The protein has homology with the following sequences in the databases:

[chemical structure]

[3981] Based on this analysis, it was predicted that these proteins and their epitopes could be useful antigens for vaccines or diagnostics.

### EXAMPLE 687

[3982] A DNA sequence (GBSx0729) was identified in S. agalactiae <SEQ ID 2117> which encodes the amino acid sequence <SEQ ID 2118>. This protein is predicted to be ABC transporter OrfX. Analysis of this protein sequence reveals the following:

Possible site: 58
>>> Seems to have no N-terminal signal sequence
----- Final Results -----
bacterial cytoplasm --- Certainty = 0.5121 (Affirmative) < succ>
bacterial membrane --- Certainty = 0.0000 (Not Clear) < succ>
bacterial outside --- Certainty = 0.0000 (Not Clear) < succ>

[3983] The protein has homology with the following sequences in the GENPEPT database:

| >GP: AAF99694 GB: AF267498 ABC transporter OrfX [Streptococcus mutans] | | | |
|---|---|---|---|
| Identities = 118/242 (48%), Positives = 175/242 (71%), Gaps = 1/242 (0%) | | | |
| Query: | 5 | INHLEKVFRTRFSKEETRALQDVDFKVEQGEFIAIMGESGSGKTTLLNILATLEKPTNGQ | 64 |
| | | ++HL+KV++T+ AL+D+ F V++GEFIAIMGESGSGK+TLLNILA ++ P++G | |
| Sbjct: | 6 | VSHLKKVYKTQEGLTN-EALKDITFSVQEGEFIAIMGESGSGKSTLLNILACMDYPSSGH | 64 |
| Query: | 65 | VILNGEDITKIKEAKLASFRLKNLGFVFQDFNLLDTLSVRDNIYLPLVLDRKRYKEMDHR | 124 |
| | | +I N + K+K+ + A FR +++GF+FQ+FNLL+ + +DN+ +P+++ + + R | |
| Sbjct: | 65 | IIFNNYQLEKVKDEEAAVFRSRHIGFIFQNFNLLNIFNNKDNLLIPVIISGSKVNSYEKR | 124 |
| Query: | 125 | LSELSSHLRIDDLLDKRPFELSGGQKQRVAIARSLITNPQILLADEPTAALDYRNSEDLL | 184 |
| | | L +L++ + I+ LL K P+ELSGGQ+QR+AIAR+LI NP ++LADEPT LD + S+ +L | |
| Sbjct: | 125 | LRDLAAVVGIESLLSKYPYELSGGQQQRLAIARALIMNPDLILADEPTGQLDSKTSQRIL | 184 |
| Query: | 185 | NLFETINLDGQTILMVTHSANAASHAKRVLFIKDGRIFHQLYRGNKNNSEFNKDISLTMS | 244 |
| | | NL IN +TILMVTHS AAS+A RVLFIKDG IF+QL RG K+ F I + + | |
| Sbjct: | 185 | NLLSNINAKRKTILMVTHSPKAASYANRVLFIKDGVIENQLVRGCKSREGFLDQIIMAQA | 244 |
| Query: | 245 | AI | 246 |
| | | ++ | |
| Sbjct: | 245 | SL | 246 |

[3984] A related DNA sequence was identified in S. pyogenes <SEQ ID 2119> which encodes the amino acid sequence <SEQ ID 2120>. Analysis of this protein sequence reveals the following:

Possible Site: 45
>>> Seems to have no N-terminal signal sequence
----- Final Results -----
bacterial cytoplasm --- Certainty = 0.2131 (Affirmative) < succ>
bacterial membrane --- Certainty = 0.0000 (Not Clear) < succ>
bacterial outside --- Certainty = 0.0000 (Not Clear) < succ>

[3985] An alignment of the GAS and GBS proteins is shown below:

| Identities = 91/222 (40%), Positives = 142/222 (62%), Gaps = 2/222 (0%) | | | |
|---|---|---|---|
| Query: | 2 | LLEINHLEKVFRTRFSKEETRALQDVDFKVEQGEFIAIMGESGSGKTTLLNILATLEKPT | 61 |
| | | LL + + K + EE L+ +D +V +G+F+AIMG SGSGK+TL+NI+ L+KP | |
| Sbjct: | 1 | LLNLKDIRKSYH--LGTEEFAILKGIDLEVNEGDFLAIMGPSGSGKSTLMNIIGCLDKPG | 58 |
| Query: | 62 | NGQVILNGEDITKIKEAKLASFRLKNLGFVFQDFNLLDTLSVRDNIYLPLVLDRKRYKEM | 121 |
| | | +G + G D++ + + +LA R + +GFVFQ+FNL+ L+ N+ LPL KE | |
| Sbjct: | 59 | SGSYAIEGRDVSSLSDNELADLRNQKIGFVFQNFNLMPKLTACQNVELPLTYMNVPKKER | 118 |
| Query: | 122 | DHRLSELSSHLRIDDLLDKRPFELSGGQKQRVAIARSLITNPQILLADEPTAALDYRNSE | 181 |
| | | R E+ + +++ + +P ELSGGQKQRVAIAR+L+TNP +L DEPT ALD + S | |
| Sbjct: | 119 | RKRALEMLKLVGLEERSEFKPMELSGGQKQRVAIARALVTNPSFILGDEPTGALDTKTSV | 178 |
| Query: | 182 | DLLNLFETINLDGQTILMVTHSANAASHAKRVLFIKDGRIFH | 223 |
| | | +++LF+ N +G+TI+++TH A+ K+ + ++DG I H | |
| Sbjct: | 179 | QIMDLFKQFNDNGKTIIIITHEPEVAALCKKTVILRDGNIEH | 220 |

[3986] Based on this analysis, it was predicted that these proteins and their epitopes could be useful antigens for vaccines or diagnostics.

### EXAMPLE 688

[3987] A DNA sequence (GBSx0730) was identified in S. agalactiae <SEQ ID 2121> which encodes the amino acid sequence <SEQ ID 2122>. This protein is predicted to be nisin-resistance protein. Analysis of this protein sequence reveals the following:

| Possible site: 18 | | | |
|---|---|---|---|
| >>> Seems to have an uncleavable N-term signal seq | | | |
| INTEGRAL | Likelihood = −13.16 | Transmembrane | 8-24 (1-31) |

----- Final Results -----
bacterial membrane --- Certainty = 0.6265 (Affirmative) < succ>
bacterial outside --- Certainty = 0.0000 (Not Clear) < succ>
bacterial cytoplasm --- Certainty = 0.0000 (Not Clear) < succ>

[3988] The protein has homology with the following sequences in the GENPEPT database:

| >GP: AAB08491 GB: U25181 nisin-resistance protein [Lactococcus lactis] | | | |
|---|---|---|---|
| Identities = 108/318 (33%), Positives = 190/318 (58%), Gaps = 8/318 (2%) | | | |
| Query: | 3 | RKIVLLFVVPMLIVLGILGVVVHYYGSALNIYLLPPSSERYGRVILDRVEQRGLYSQGRQ | 62 |
| | | ++I+L V + LGI ++++G NIYL+PPS ++Y RV L +++ GL++ ++ | |
| Sbjct: | 5 | KRILLGLVAVCALFLGI----IYFWGYKFNIYLVPPSPQKYVRVALKNMDELGLFTDSKE | 60 |
| Query: | 63 | WQIIRQRSEKKLKTSKSYQESRNIVQEAVRYGGGKHSQILSKETVRRDTLDSRYPEYRRL | 122 |
| | | W ++++ ++ +K+Y E+ +Q+A++ GGKHS I +E + + ++ + | |
| Sbjct: | 61 | WVETKKKTIEETSNAKNYAETIPFLQKAIKVAGGKHSFIEHEEDISKRSITKYIKPKAEI | 120 |
| Query: | 123 | NEDILLITIPSISKLDKRSISHYSGKLQNILMEKSYKGLILDLSNNTGGNMIPMIGGVAS | 182 |
| | | + L++TIP + D ++ S Y+ L++ + +Y G+I+DL N GG++ PM+ G++ | |
| Sbjct: | 121 | EGNTLILTIPEFTGNDSQA-SDYANFLESSFHKNNYNGVIVDLRGNRGGDLSPMVLGLSP | 179 |
| Query: | 183 | ILPNDTLFHYTDKYGNKKTITMKNIPLEALKISRKTINTKHV---PIAIITNHKTASSAE | 239 |
| | | +LP+ TLF Y DK + K + ++N + + S K + K + PIA++ ++ T SS E | |
| Sbjct: | 180 | LLPDGTLFTYVDKSSHSKPVELQNGEINSGGSSTKVSDNKKIKKAPIAVLIDNNTGSSGE | 239 |
| Query: | 240 | MTFLSFKGLPNVKSFGQATAGYTTVNETFMLYDGARLALTTGIVSDRQGYKYENTPILPD | 299 |
| | | +T L FKG+PNVK G +AGYT+ N+T LYDG+ L +T+ V DR Y+N PI PD | |
| Sbjct: | 240 | LTALCFKGIPNVKFLGSDSAGYTSANQTVYLYDGSTLQITSAFVKDRTNNIYKNFPISPD | 299 |
| Query: | 300 | QVTSLPLQESQSWLKSRI | 317 |
| | | T+ + W+KS+I | |
| Sbjct: | 300 | IQTNNAKSSAIEWIKSQI | 317 |

[3989] No corresponding DNA sequence was identified in S. pyogenes.

[3990] A related GBS gene <SEQ ID 8641> and protein <SEQ ID 8642> were also identified. Analysis of this protein sequence reveals the following:

| Lipop: Possible site: −1 Crend: 3 | | | |
|---|---|---|---|
| McG: Discrim Score: 12.71 | | | |
| GvH: Signal Score (−7.5): −5.64 | | | |
| Possible site: 18 | | | |
| >>> Seems to have an uncleavable N-term signal seq | | | |
| ALOM program | count: 1 | value: −13.16 | threshold: 0.0 |

| | | | |
|---|---|---|---|
| INTEGRAL | Likelihood = −13.16 | Transmembrane | 8-24 (1-31) |
| PERIPHERAL | Likelihood = 4.03 | 174 | |

modified ALOM score: 3.13
*** Reasoning Step: 3
----- Final Results -----
bacterial membrane --- Certainty = 0.6265 (Affirmative) < succ>
bacterial outside --- Certainty = 0.0000 (Not Clear) < succ>
bacterial cytoplasm --- Certainty = 0.0000 (Not Clear) < succ>

[3991] The protein has homology with the following sequences in the databases:

[chemical structure]

[3992] SEQ ID 2122 (GBS38) was expressed in E. coli as a His-fusion product. SDS-PAGE analysis of total cell extract is shown in FIG. 14 (lane 7; MW 37 kDa). It was also expressed in E. coli as a GST-fusion product. SDS-PAGE analysis of total cell extract is shown in FIG. 16 (lane 12; MW 62 kDa).

[3993] Based on this analysis, it was predicted that these proteins and their epitopes could be useful antigens for vaccines or diagnostics.

### EXAMPLE 689

[3994] A DNA sequence (GBSx0731) was identified in S. agalactiae <SEQ ID 2123> which encodes the amino acid sequence <SEQ ID 2124>. Analysis of this protein sequence reveals the following:

Possible site: 20
>>> Seems to have an uncleavable N-term signal seq
----- Final Results -----
bacterial membrane --- Certainty = 0.0000 (Not Clear) < succ>
bacterial outside --- Certainty = 0.0000 (Not Clear) < succ>
bacterial cytoplasm --- Certainty = 0.0000 (Not Clear) < succ>

[3995] The protein has no significant homology with any sequences in the GENPEPT database.

[3996] A related DNA sequence was identified in S. pyogenes <SEQ ID 2125> which encodes the amino acid sequence <SEQ ID 2126>. Analysis of this protein sequence reveals the following:

Possible site: 17
>>> Seems to have no N-terminal signal sequence
----- Final Results -----
bacterial cytoplasm --- Certainty = 0.1369 (Affirmative) < succ>
bacterial membrane --- Certainty = 0.0000 (Not Clear) < succ>
bacterial outside --- Certainty = 0.0000 (Not Clear) < succ>

[3997] An alignment of the GAS and GBS proteins is shown below:

| Identities = 31/49 (63%), Positives = 43/49 (87%) | | | |
|---|---|---|---|
| Query: | 6 | KKLTKSLGPIGKLISIIPDTTELIGKAIDNSRPIIEKELDRRHEKKTDL | 54 |
| | | K++ K+LG +GKL+SI+PDTTE+IGK IDNSRPIIEK ++++HEK+ L | |
| Sbjct: | 3 | KRIRKALGVVGKLMSIVPDTTEIIGKTIDNSRPIIEKRMEQKHEKEMQL | 51 |

[3998] Based on this analysis, it was predicted that these proteins and their epitopes could be useful antigens for vaccines or diagnostics.

### EXAMPLE 690

[3999] A DNA sequence (GBSx0732) was identified in S. agalactiae <SEQ ID 2127> which encodes the amino acid sequence <SEQ ID 2128>. Analysis of this protein sequence reveals the following:

Possible site: 54
>>> Seems to have no N-terminal signal sequence
----- Final Results -----
bacterial cytoplasm --- Certainty = 0.3644 (Affirmative) < succ>
bacterial membrane --- Certainty = 0.0000 (Not Clear) < succ>
bacterial outside --- Certainty = 0.0000 (Not Clear) < succ>

[4000] The protein has no significant homology with any sequences in the GENPEPT database, but there is homology to SEQ ID 2126.

[4001] Based on this analysis, it was predicted that this protein and its epitopes, could be useful antigens for vaccines or diagnostics.

### EXAMPLE 691

[4002] A DNA sequence (GBSx0733) was identified in S. agalactiae <SEQ ID 2129> which encodes the amino acid sequence <SEQ ID 2130>. This protein is predicted to be 28 kd outer membrane protein precursor (yaeC). Analysis of this protein sequence reveals the following:

Possible site: 16
>>> May be a lipoprotein
----- Final Results -----
bacterial membrane --- Certainty = 0.0000 (Not Clear) < succ>
bacterial outside --- Certainty = 0.0000 (Not Clear) < succ>
bacterial cytoplasm --- Certainty = 0.0000 (Not Clear) < succ>

[4003] The protein has homology with the following sequences in the GENPEPT database:

| >GP: CAB59827 GB: AJ012388 hypothetical protein [Lactococcus lactis] | | | |
|---|---|---|---|
| Identities = 123/290 (42%), Positives = 178/290 (60%), Gaps = 18/290 (6%) | | | |
| Query: | 1 | MKIKKLLGLTTTVVISALILGAC------GQSKNEDAKVVRVGTMVKSKTEKARWDKIEE | 54 |
| | | +K +++L +T +++ +I+G G +K+V++G M K E W ++++ | |
| Sbjct: | 3 | VKNRRIL-ITIIILVFIIIVGGIFAFSHSGNKSKVSSKIVKIGLMPGGKQEDVIWKQVQK | 61 |
| Query: | 55 | LVKKK-GVKLKFTEFTDYTQPNKALESDEIDINAFQHYNYLNNWNKANKTNLVSVAETYF | 113 |
| | | K + G+ LKF FTD +PNKAL + E+D+NAFQHY YL +WNKAN N+VS+ +T | |
| Sbjct: | 62 | NAKDQFGITLKFVNFTDGDEPNKALVNHEVDLNAFQHYAYLKSWNKANNGNIVSIGDTII | 121 |
| Query: | 114 | TSFRLYSGTKNGKGKYQTVSEIPNKATITIPNDAVNESRSLYLLQSAGLLKLKVSGDALA | 173 |
| | | T LYS KY+ V EIP+K+TI IPND NESR+LY+L++AGL+KL S LA | |
| Sbjct: | 122 | TPIHLYST------KYKKVDEIPDKSTIAIPNDITNESRALYVLKNAGLIKLDTSRGVLA | 175 |
| Query: | 174 | TMSDVVSNPKSLDLKEVDAAQTARSLDSTDAAVINNDFVTEAGINPKSAIFIEPKSKNAK | 233 |
| | | T+ D+ NPKSL +KE+DA+QT R+LDS AAVIN +F A + K +I+ EP ++++ | |
| Sbjct: | 176 | TVKDIRENPKSLIIKEIDASQTPRALDSVAAAVINYNFAISAKNSDKESIYQEPLNEDSA | 235 |
| Query: | 234 | QWYNLLVAQKGWQDKSKAKAIKEVVKAYHTDAVKKVIEKT-SQGLDQPVW | 282 |
| | | QW N + A Q K KEVVKAY + +I+K G + P W | |
| Sbjct: | 236 | QWINFIAAN---QSDKNNKVYKEVVKAYEQKNIADIIKKEYPDGGELPAW | 282 |

[4004] A related DNA sequence was identified in S. pyogenes <SEQ ID 2131> which encodes the amino acid sequence <SEQ ID 2132>. Analysis of this protein sequence reveals the following:

Possible site: 24
>>> Seems to have no N-terminal signal sequence
----- Final Results -----
bacterial cytoplasm --- Certainty = 0.1766 (Affirmative) < succ>
bacterial membrane --- Certainty = 0.0000 (Not Clear) < succ>
bacterial outside --- Certainty = 0.0000 (Not Clear) < succ>

[4005] An alignment of the GAS and GBS proteins is shown below:

| Identities = 145/264 (54%), Positives = 203/264 (75%), Gaps = 2/264 (0%) | | | |
|---|---|---|---|
| Query: | 20 | LGACGQSKNEDAKVVRVGTMVKSKTEKARWDKIEELVKKKGVKLKFTEFTDYTQPNKALE | 79 |
| | | L AC + K +D + +G M K+++++ARWDK+EEL+KK + LK+ EFTDY+QPNKA+ | |
| Sbjct: | 1 | LVACSE-KQDDKNTLTIGVMTKTESDQARWDKVEELLKKDNITLKYKEFTDYSQPNKAVA | 59 |
| Query: | 80 | SDEIDINAFQHYNYLNNWNKANKTNLVSVAETYFTSFRLYSGT-KNGKGKYQTVSEIPNK | 138 |
| | | + E+DINAFQHYN+LNNWNK NK +LV++A+TY + L+SGT ++GK KY++V+++PN | |
| Sbjct: | 60 | NGEVDINAFQHYNFLNNWNKENKEHLVAIADTYISPINLFSGTSQDGKAKYKSVADLPNG | 119 |
| Query: | 139 | ATITIPNDAVNESRSLYLLQSAGLLKLKVSGDALATMSDVVSNPKSLDLKEVDAAQTARS | 198 |
| | | I +PNDA NESR+LY+LQSAGL+KL VSGD LAT++++ N K LD+KE+DA+QTAR+ | |
| Sbjct: | 120 | TQIAVPNDATNESRALYVLQSAGLIKLNVSGDQLATIANISENKKKLDIKELDASQTARA | 179 |
| Query: | 199 | LDSTDAAVINNDFVTEAGINPKSAIFIEPKSKNAKQWYNLLVAQKGWQDKSKAKAIKEVV | 258 |
| | | L S DAAV+NN + A I+ K+++F E N+KQW N++ QK W+ KA AIK+++ | |
| Sbjct: | 180 | LVSADAAVVNNSYAVPAKIDYKTSLFKEKADDNSKQWINIIAGQKDWEKSEKADAIKKLI | 239 |
| Query: | 259 | KAYHTDAVKKVIEKTSQGLDQPVW | 282 |
| | | KAY TD VKKV+EKTS G+D VW | |
| Sbjct: | 240 | KAYQTDEVKKVVEKTSNGIDVSVW | 263 |

[4006] SEQ ID 2130 (GBS96) was expressed in E. coli as a His-fusion product. SDS-PAGE analysis of total cell extract is shown in FIG. 19 (lane 7; MW 32 kDa). It was also expressed in E. coli as a GST-fusion product. SDS-PAGE analysis of total cell extract is shown in FIG. 22 (lane 3; MW 57.2 kDa).

[4007] The GBS96-GST fusion product was purified (FIG. 195, lane 10) and used to immunise mice. The resulting antiserum was used for FACS (FIG. 290), which confirmed that the protein is immunoaccessible on GBS bacteria.

[4008] Based on this analysis, it was predicted that these proteins and their epitopes could be useful antigens for vaccines or diagnostics.

### EXAMPLE 692

[4009] A DNA sequence (GBSx0734) was identified in S. agalactiae <SEQ ID 2133> which encodes the amino acid sequence <SEQ ID 2134>. Analysis of this protein sequence reveals the following:

Possible site: 61
>>> Seems to have no N-terminal signal sequence
----- Final Results -----
bacterial cytoplasm --- Certainty = 0.5103 (Affirmative) < succ>
bacterial membrane --- Certainty = 0.0000 (Not Clear) < succ>
bacterial outside --- Certainty = 0.0000 (Not Clear) < succ>

[4010] A related GBS nucleic acid sequence <SEQ ID 9807> which encodes amino acid sequence <SEQ ID 9808> was also identified.

[4011] The protein has no significant homology with any sequences in the GENPEPT database.

[4012] No corresponding DNA sequence was identified in S. pyogenes.

[4013] Based on this analysis, it was predicted that these proteins and their epitopes could be useful antigens for vaccines or diagnostics.

### EXAMPLE 693

[4014] A DNA sequence (GBSx0735) was identified in S. agalactiae <SEQ ID 2135> which encodes the amino acid sequence <SEQ ID 2136>. This protein is predicted to be glucose-inhibited division protein (gid). Analysis of this protein sequence reveals the following:

Possible site: 18
>>> Seems to have no N-terminal signal sequence
----- Final Results -----
bacterial cytoplasm --- Certainty = 0.0656 (Affirmative) < succ>
bacterial membrane --- Certainty = 0.0000 (Not Clear) < succ>
bacterial outside --- Certainty = 0.0000 (Not Clear) < succ>

[4015] The protein has homology with the following sequences in the GENPEPT database:

| >GP: CAB13486 GB: Z99112 glucose-inhibited division protein | | | |
|---|---|---|---|
| [Bacillus subtilis] | | | |
| Identities = 289/439 (65%), Positives = 352/439 (79%), Gaps = 10/439 (2%) | | | |
| Query: | 1 | MSQSYINVIGAGLAGSEAAYQIAKRGIPVKLYEMRGVESTPQHKTDNFAELVCSNSFRGD | 60 |
| | | M+Q +NVIGAGLAGSEAA+Q+ARRGI VKLYEMR VR TP H TD FAELVCSNS R + | |
| Sbjct: | 1 | MNQQTVNVIGAGLAGSEAAWQLAKRGIQVKLYEMRPVKQTPAHHTDKFAELVCSNSLRSN | 60 |
| Query: | 61 | SLTNAVGLLKEEMRRLDSIIMRNGEAHRVPAGGAMAVDREGYSEAVTEEIHKHPLIEVIR | 120 |
| | | +L NAVG+LKEEMR LDS I+ + VPAGGA+AVDR ++ +VT + HP + VI | |
| Sbjct: | 61 | TLANAVGVLKEEMRALDSAIIAAADECSVPAGGALAVDRHEFAASVTNRVKNHPNVTVIN | 120 |
| Query: | 121 | DEITDIPGDAITVIATGPLTSDSLAAKIHELNGGDGFYFYDAAAPIVDKNTIDINKVYLK | 180 |
| | | +E+T+IP + T+IATGPLTS+SL+A++ EL G D YFYDAAAPIV+K+++D++KVYLK | |
| Sbjct: | 121 | EEVTEIP-EGPTIIATGPLTSESLSAQLKELTGEDYLYFYDAAAPIVEKDSLDMDKVYLK | 179 |
| Query: | 181 | SRYDKGEAAYLNCPMTKEEFMAFHEALTTAEEAPLNSFEKEKYFEGCMPIEVMAKRGIKT | 240 |
| | | SRYDKGEAAYLNCPMT+EEF FHEALT+AE PL FEKE +FEGCMPIEVMAKRG KT | |
| Sbjct: | 180 | SRYDKGEAAYLNCPMTEEEFDRFHEALTSAETVPLKEFEKEIFFEGCMPIEVMAKRGKKT | 239 |
| Query: | 241 | MLYGPMKPVGLEYPEDYKGPRDGEFKTPYAVVQLRQDNAAGSLYNIVGFQTHLKWGEQKR | 300 |
| | | ML+GPMKPVGLE+P K PYAVVQLRQD+AAG+LYNIVGFQTHLKWG+QK | |
| Sbjct: | 240 | MLFGPMKPVGLEHPVTGK--------RPYAVVQLRQDDAAGTLYNIVGFQTHLKWGDQKE | 291 |
| Query: | 301 | VFQMIPGLENAEFVRYGVMHRNSYMDSPNLLNQTFATRKNPNLFFAGQMTGVEGYVESAA | 360 |
| | | V ++IPGLEN E VRYGVMHRN++++SP+LL T+ + +LFFAGQMTGVEGYVESAA | |
| Sbjct: | 292 | VLKLIPGLENVEIVRYGVMHRNTFINSPSLLKPTYQFKNRSDLFFAGQMTGVEGYVESAA | 351 |
| Query: | 361 | SGLVAGINAVRRFNGESEVVFPQTTAIGALPHYITHTDSKHFQPMNVNFGIIKELEGPRI | 420 |
| | | SGLVAGINA + GE V+FPQ TAIG++ HYIT T+K+FQPMN NFG++KEL +I | |
| Sbjct: | 352 | SGLVAGINAAKLVLGEELVIFPQETAIGSMAHYITTTNQKNFQPMNANFGLLKELP-VKI | 410 |
| Query: | 421 | RDKKERYEAIATRALKDLE | 439 |
| | | ++KKER E A RA++ ++ | |
| Sbjct: | 411 | KNKKERNEQYANRAIETIQ | 429 |

[4016] A related DNA sequence was identified in S. pyogenes <SEQ ID 2137> which encodes the amino acid sequence <SEQ ID 2138>. Analysis of this protein sequence reveals the following:

| Possible site: 30 | | | |
|---|---|---|---|
| >>> Seems to have an uncleavable N-term signal seq | | | |
| INTEGRAL | Likelihood = −8.44 | Transmembrane | 12-28 (9-32) |

----- Final Results -----
bacterial membrane --- Certainty = 0.4376 (Affirmative) < succ>
bacterial outside --- Certainty = 0.0000 (Not Clear) < succ>
bacterial cytoplasm --- Certainty = 0.0000 (Not Clear) < succ>
RGD motif: 111-113

[4017] The protein has homology with the following sequences in the databases:

| >GP: CAB13486 GB: Z99112 glucose-inhibited division protein | | | |
|---|---|---|---|
| [Bacillus subtilis] | | | |
| Identities = 292/435 (67%), Positives = 350/435 (80%), Gaps = 10/435 (2%) | | | |
| Query: | 59 | INVIGAGLAGSEAAYQIAKRGIPVKLYEMRGVKATPQHKTTNFAELVCSNSFRGDSLTNA | 118 |
| | | +NVIGAGLAGSEAA+Q+AKRGI VKLYEMR VK TP H T FAELVCSNS R ++L NA | |
| Sbjct: | 6 | VNVIGAGLAGSEAAWQLAKRGIQVKLYEMRPVKQTPAHHTDKFAELVCSNSLRSNTLANA | 65 |
| Query: | 119 | VGLLKEEMRRLDSIIMRNGEANRVPAGGAMAVDREGYAESVTAELENHPLIEVIRGEITE | 178 |
| | | VG+LKEEMR LDS I+ + VPAGGA+AVDR +A SVT ++NHP + VI E+TE | |
| Sbjct: | 66 | VGVLKEEMRALDSAIIAAADECSVPAGGALAVDRHEFAASVTNRVKNHPNVTVINEEVTE | 125 |
| Query: | 179 | IPDDAITVIATGPLTSDALAEKIHALNGGDGFYFYDAAAPIIDKSTIDMSKVYLKSRYDK | 238 |
| | | IP+ T+IATGPLTS++L+ ++ L G D YFYDAAAPI++K ++DM KVYLKSRYDK | |
| Sbjct: | 126 | IPEGP-TIIATGPLTSESLSAQLKELTGEDYLYFYDAAAPIVEKDSLDMDKVYLKSRYDK | 184 |
| Query: | 239 | GEAAYLNCPMTKEEFMAFHEALTTAEEAPLNAFEKEKYFEGCMPIEVMAKRGIKTMLYGP | 298 |
| | | GEAAYLNCPMT+EEF FHEALT+AE PL FEKE +FEGCMPIEVMAKRG KTML+GP | |
| Sbjct: | 185 | GEAAYLNCPMTEEEFDRFHEALTSAETVPLKEFEKEIFFEGCMPIEVMAKRGKKTMLFGP | 244 |
| Query: | 299 | MKPVGLEYPDDYTGPRDGEFKTPYAVVQLRQDNAAGSLYNIVGFQTHLKWGEQKRVFQMI | 358 |
| | | MKPVGLE+P TG R PYAVVQLRQD+AAG+LYNIVGFQTHLKWG+QK V ++I | |
| Sbjct: | 245 | MKPVGLEHP--VTGKR------PYAVVQLRQDDAAGTLYNIVGFQTHLKWGDQKEVLKLI | 296 |
| Query: | 359 | PGLENAEFVRYGVMHRNSYMDSPNLLTETFQSRSNPNLFFAGQMTGVEGYVESAASGLVA | 418 |
| | | PGLEN E VRYGVMHRN++++SP+LL T+Q ++ +LFFAGQMTGVEGYVESAASGLVA | |
| Sbjct: | 297 | PGLENVEIVRYGVMHRNTFINSPSLLKPTYQFKNRSDLFFAGQMTGVEGYVESAASGLVA | 356 |
| Query: | 419 | GINAARLFKREEALIFPQTTAIGSLPHYVTHADSKHFQPMNVNFGIIKELEGPRIRDKKE | 478 |
| | | GINAA+L EE +IFPQ TAIGS+ HY+T + K+FQPMN NFG++KEL +I++KKE | |
| Sbjct: | 357 | GINAAKLVLGEELVIFPQETAIGSMAHYITTTNQKNFQPMNANFGLLKELP-VKIKNKKE | 415 |
| Query: | 479 | RYEAIASRALADLDT | 493 |
| | | R E A+RA+ + T | |
| Sbjct: | 416 | RNEQYANRAIETIQT | 430 |

[4018] An alignment of the GAS and GBS proteins is shown below:

| Identities = 395/439 (89%), Positives = 417/439 (94%) | | | |
|---|---|---|---|
| Query: | 4 | SYINVIGAGLAGSEAAYQIAKRGIPVKLYEMRGVKSTPQHKTDNFAELVCSNSFRGDSLT | 63 |
| | | +YINVIGAGLAGSEAAYQIAKRGIPVKLYEMRGVK+TPQHKT NFAELVCSNSFRGDSLT | |
| Sbjct: | 57 | TYINVIGAGLAGSEAAYQIAKRGIPVKLYEMRGVKATPQHKTTNFAELVCSNSFRGDSLT | 116 |
| Query: | 64 | NAVGLLKEEMRRLDSIIMRNGEAHRVPAGGAMAVDREGYSEAVTEEIHKHPLIEVIRDEI | 123 |
| | | NAVGLLKEEMRRLDSIIMRNGEA+RVPAGGAMAVDREGY+E+VT E+ HPLIEVIR EI | |
| Sbjct: | 117 | NAVGLLKEEMRRLDSIIMRNGEANRVPAGGAMAVDREGYAESVTAELENHPLIEVIRGEI | 176 |
| Query: | 124 | TDIPGDAITVIATGPLTSDSLAAKIHELNGGDGFYFYDAAAPIVDKNTIDINKVYLKSRY | 183 |
| | | T+IP DAITVIATGPLTSD+LA KIH LNGGDGFYFYDAAAPI+DK+TID++KVYLKSRY | |
| Sbjct: | 177 | TEIPDDAITVIATGPLTSDALAEKIHALNGGDGFYFYDAAAPIIDKSTIDMSKVYLKSRY | 236 |
| Query: | 184 | DKGEAAYLNCPMTKEEFMAFHEALTTAEEAPLNSFEKEKYFEGCMPIEVMAKRGIKTMLY | 243 |
| | | DKGEAAYLNCPMTKEEFMAFHEALTTAEEAPLN+FEKEKYFEGCMPIEVMAKRGIKTMLY | |
| Sbjct: | 237 | DKGEAAYLNCPMTKEEFMAFHEALTTAEEAPLNAFEKEKYFEGCMPIEVMAKRGIKTMLY | 296 |
| Query: | 244 | GPMKPVGLEYPEDYKGPRDGEFKTPYAVVQLRQDNAAGSLYNIVGFQTHLKWGEQKRVFQ | 303 |
| | | GPMKPVGLEYP+DY GPRDGEFKTPYAVVQLRQDNAAGSLYNIVGFQTHLKWGEQKRVFQ | |
| Sbjct: | 297 | GPMKPVGLEYPDDYTGPRDGEFKTPYAVVQLRQDNAAGSLYNIVGFQTHLKWGEQKRVFQ | 356 |
| Query: | 304 | MIPGLENAEFVRYGVMHRNSYMDSPNLLNQTFATRKNPNLFFAGQMTGVEGYVESAASGL | 363 |
| | | MIPGLENAEFVRYGVMHRNSYMDSPNLL +TF +R NPNLFFAGQMTGVEGYVESAASGL | |
| Sbjct: | 357 | MIPGLENAEFVRYGVMHRNSYMDSPNLLTETFQSRSNPNLFFAGQMTGVEGYVESAASGL | 416 |
| Query: | 364 | VAGINAVRRFNGESEVVFPQTTAIGALPHYITHTDSKHFQPMNVNFGIIKELEGPRIRDK | 423 |
| | | VAGINA R F E ++FPQTTAIG+LPHY+TH DSKHFQPMNVNFGIIKELEGPRIRDK | |
| Sbjct: | 417 | VAGINAARLFKREEALIFPQTTAIGSLPHYVTHADSKHFQPMNVNFGIIKELEGPRIRDK | 476 |
| Query: | 424 | KERYEAIATRALKDLEKFL | 442 |
| | | KERYEAIA+RAL DL+ L | |
| Sbjct: | 477 | KERYEAIASRALADLDTCL | 495 |

[4019] Based on this analysis, it was predicted that these proteins and their epitopes could be useful antigens for vaccines or diagnostics.

### EXAMPLE 694

[4020] A DNA sequence (GBSx0736) was identified in S. agalactiae <SEQ ID 2139> which encodes the amino acid sequence <SEQ ID 2140>. This protein is predicted to be transcriptional regulator (GntRfamily). Analysis of this protein sequence reveals the following:

```
Possible site: 13
>>> Seems to have no N-terminal signal sequence
----- Final Results -----
                            bacterial cytoplasm --- Certainty = 0.5103(Affirmative) < succ>
                              bacterial membrane --- Certainty = 0.0000(Not Clear) < succ>
                                bacterial outside --- Certainty = 0.0000(Not Clear) < succ>
```

[4021] The protein has homology with the following sequences in the GENPEPT database:

| >GP: BAB04138 GB: AP001508 transcriptional regulator (GntR family) | | | |
|---|---|---|---|
| [Bacillus halodurans] | | | |
| Identities = 83/229 (36%), Positives = 133/229 (57%), Gaps = 1/229 (0%) | | | |
| Query: | 2 | LPAYIKIHDAIKKEIDKGTWKIGQRLPSERDLADDYSVSRMTLRQSITLLVEEGILERRV | 61 |
| | | LP Y +I + IK++I+ G K G L SER+ A+ Y VSRMT+RQ+I LV +G + ++ | |
| Sbjct: | 8 | LPIYYQIEEQIKQQIESGVLKPGDMLKSEREYAEYYDVSRMTVRQAINNLVNQGYIYKKK | 67 |
| Query: | 62 | GSGTYVASHRVQEKMRGTTSFTEIVNSQGRKPSSKLISFQRKLANETEIQKLNLSQSDYV | 121 |
| | | GSGTYV ++++ + G TSFTE + +G +PSS+L+ F+ A ++LNL ++ V | |
| Sbjct: | 68 | GSGTYVQEKKIEQALNGLTSFTEDMRKRGMEPSSRLLKFELIPATAKIAKELNLKENTPV | 127 |
| Query: | 122 | VRMERVRYADKVPLVYEVASIPENLIKGFEQSEVTEHFFKTLTEN-GYEIGKSQQTIYAR | 180 |
| | | ++R+RY D VP+ E +P NL+KG + + + ++ + E I + Q I A | |
| Sbjct: | 128 | TEIKRIRYGDGVPIAIERNLLPANLVKGLNEEIINQSLYQYIEEELNLRIADALQVIEAS | 187 |
| Query: | 181 | NASERVASHLEVNAGHAILALTQVSYFTDGKPFEYVHGQYVGDRFEFYL | 229 |
| | | AS+ A LE+ G IL + + ++ DG E V Y DR++F + | |
| Sbjct: | 188 | TASKTEADLLEIQKGSPILLIERKTFLADGTVLELVKSAYRADRYKFMI | 236 |

[4022] There is also homology to SEQ ID 1256.

[4023] Based on this analysis, it was predicted that this protein and its epitopes, could be useful antigens for vaccines or diagnostics.

### EXAMPLE 695

[4024] A DNA sequence (GBSx0737) was identified in S. agalactiae <SEQ ID 2141> which encodes the amino acid sequence <SEQ ID 2142>. This protein is predicted to be GMP synthase (guaA). Analysis of this protein sequence reveals the following:

| Possible site: 46 | | | | |
|---|---|---|---|---|
| >>> Seems to have no N-terminal signal sequence | | | | |
| | INTEGRAL | Likelihood = −0.96 | Transmembrane | 228-244 (228-245) |

```
----- Final Results -----
                              bacterial membrane --- Certainty = 0.1383(Affirmative) < succ>
                                bacterial outside --- Certainty = 0.0000(Not Clear) < succ>
                            bacterial cytoplasm --- Certainty = 0.0000(Not Clear) < succ>
```

[4025] The protein has homology with the following sequences in the GENPEPT database:

| >GP: AAD15805 GB: AF058326 GMP synthase [Lactococcus lactis] | | | |
|---|---|---|---|
| Identities = 416/511 (81%), Positives = 467/511 (90%), Gaps = 3/511 (0%) | | | |
| Query: | 10 | IQKIIVLDYGSQYNQLIARRIREFGVFSELKSHKITADEIRDINPIGIVLSGGPNSVYAD | 69 |
| | | ++KIIVLDYGSQYNQLIARRIRE GVFSEL SHK+TA EIR+INPIGI+LSGGPNSVY + | |
| Sbjct: | 6 | LEKIIVLDYGSQYNQLIARRIREIGVFSELMSHKVTAKEIREINPIGIILSGGPNSVYDE | 65 |
| Query: | 70 | GAFGIDEEIFELGIPILGICYGMQLITHKLGGKVLPAGEAGHREYGQSALRLRSESALFA | 129 |
| | | G+F ID EIFELG+P+LGICYGMQL+++KLGG V AGE REYG + L+L +SALFA | |
| Sbjct: | 66 | GSFDIDPEIFELGLPVLGICYGMQLMSYKLGGMVEAAGE---REYGVAPLQLTEKSALFA | 122 |
| Query: | 130 | GTPQEQLVLMSHGDAVTEIPEGFHLVGDSVDCPFAAMENTEKQFYGIQFHPEVRHSVYGN | 189 |
| | | GTP+ Q VLMSHGD VT IPEGFH+VG S + PFAA+ENTE+ YGIQFHPEVRHSV+G | |
| Sbjct: | 123 | GTPEVQDVLMSHGDRVTAIPEGFHVVGTSPNSPFAAVENTERNLYGIQFHPEVRHSVHGT | 182 |
| Query: | 190 | DILKNFAVNICGARGDWSMDNFIDMEIAKIRETVGDRKVLLGLSGGVDSSVVGVLLQRAI | 249 |
| | | ++L+NFA+NICGA+G+WSM+NFIDM+I IRE VGD+KVLLGLSGGVDSSVVGVLLQRAI | |
| Sbjct: | 183 | EMLRNFALNICGAKGNWSMENFIDMQIKDIREKVGDKKVLLGLSGGVDSSVVGVLLQRAI | 242 |
| Query: | 250 | GDQLTCIFVDHGLLRKNEGDQVMDMLGGKFGLNIIRVDASKRFLDLLSGVEDPERKRKII | 309 |
| | | GDQLT IFVDHG LRK E DQVM+ LGGKFGLNII+VDA KRF+D L G+ DPE +RKII | |
| Sbjct: | 243 | GDQLTSIFVDHGFLRKGEADQVMETLGGKFGLNIIKVDAQKRFMDKLVGLSDPETQRKII | 302 |
| Query: | 310 | GNEFVYVFDDEASKLKGVDFLAQGTLYTDIIESGTETAQTIKSHHNVGGLPEDMQFELIE | 369 |
| | | GNEFVYVFDDEA+KL+GVDFLAQGTLYTD+IESGT+TAQTIKSHHNVGGLPEDMQF+LIE | |
| Sbjct: | 303 | GNEFVYVFDDEANKLEGVDFLAQGTLYTDVIESGTDTAQTIKSHHNVGGLPEDMQFQLIE | 362 |
| Query: | 370 | PLNTLFKDEVRALGTALGMPDEVVWRQPFPGPGLAIRVMGEITEEKLETVRESDAILREE | 429 |
| | | PLNTLFKDEVRALGT LGMPDE+VWRQPFPGPGLAIRV+G++TEEKLETVRESDAILREE | |
| Sbjct: | 363 | PLNTLFKDEVRALGTQLGMPDEIVWRQPFPGPGLAIRVLGDLTEEKLETVRESDAILREE | 422 |
| Query: | 430 | IAKAGLDRDVWQYFTVNTGVRSVGVMGDGRTYDYTIAIRAITSIDGMTADFAQLPWDVLK | 489 |
| | | IA +GL+RDVWQYFTVNT V+SVGVMGD RTYDYT+AIRAITSIDGMTADFAQLPWD+L+ | |
| Sbjct: | 423 | IAASGLERDVWQYFTVNTDVKSVGVMGDQRTYDYTLAIRAITSIDGMTADFAQLPWDLLQ | 482 |
| Query: | 490 | KISTRIVNEVDHVNRIVYDITSKPPATVEWE | 520 |
| | | KIS RIVNEVDHVNRIVYDITSKPPATVEW+ | |
| Sbjct: | 483 | KISKRIVNEVDHVNRIVYDITSKPPATVEWQ | 513 |

[4026] A related DNA sequence was identified in S. pyogenes <SEQ ID 2143> which encodes the amino acid sequence <SEQ ID 2144>. Analysis of this protein sequence reveals the following:

| Possible site: 46 | | | | |
|---|---|---|---|---|
| >>> Seems to have no N-terminal signal sequence | | | | |
| | INTEGRAL | Likelihood = −0.96 | Transmembrane | 228-244 (228-245) |

```
----- Final Results -----
                              bacterial membrane --- Certainty = 0.1383(Affirmative) < succ>
                                bacterial outside --- Certainty = 0.0000(Not Clear) < succ>
                            bacterial cytoplasm --- Certainty = 0.0000(Not Clear) < succ>
RGD motif: 203-205
```

[4027] The protein has homology with the following sequences in the databases:

| >GP: AAD15805 GB: AF058326 GMP synthase [Lactococcus lactis] | | | |
|---|---|---|---|
| Identities = 411/511 (80%), Positives = 464/511 (90%), Gaps = 3/511 (0%) | | | |
| Query: | 10 | VQKIIVLDYGSQYNQLIARRIREFGVFSELKSHKITAQELREINPIGIVLSGGPNSVYAD | 69 |
| | | ++KIIVLDYGSQYNQLIARRIRE GVFSEL SHK+TA+E+REINPIGI+LSGGPNSVY + | |
| Sbjct: | 6 | LEKIIVLDYGSQYNQLIARRIREIGVFSELMSHKVTAKEIREINPIGIILSGGPNSVYDE | 65 |
| Query: | 70 | NAFGIDPEIFELGIPILGICYGMQLITHKLGGKVVPAGQAGNREYGQSTLHLRETSKLFS | 129 |
| | | +F IDPEIFELG+P+LGICYGMQL+++KLGG V AG+ REYG + L L E S LF+ | |
| Sbjct: | 66 | GSFDIDPEIFELGLPVLGICYGMQLMSYKLGGMVEAAGE---REYGVAPLQLTEKSALFA | 122 |
| Query: | 130 | GTPQEQLVLMSHGDAVTEIPEGFHLVGDSNDCPYAAIENTEKNLYGIQFHPEVRHSVYGN | 189 |
| | | GTP+ Q VLMSHGD VT IPEGFH+VG S + P+AA+ENTE+NLYGIQFHPEVRHSV+G | |
| Sbjct: | 123 | GTPEVQDVLMSHGDRVTAIPEGFHVVGTSPNSPFAAVENTERNLYGIQFHPEVRHSVHGT | 182 |
| Query: | 190 | DILKNFAISICGARGDWSMDNFIDMEIAKIRETVGDRKVLLGLSGGVDSSVVGVLLQKAI | 249 |
| | | ++L+NFA++ICGA+G+WSM+NFIDM+I IRE VGD+KVLLGLSGGVDSSVVGVLLQ+AI | |
| Sbjct: | 183 | EMLRNFALNICGAKGNWSMENFIDMQIKDIREKVGDKKVLLGLSGGVDSSVVGVLLQRAI | 242 |
| Query: | 250 | GDQLTCIFVDHGLLRKDEGDQVMGMLGGKFGLNIIRVDASKRFLDLLADVEDPEKKRKII | 309 |
| | | GDQLT IFVDHG LRK E DQVM LGGKFGLNII+VDA KRF+D L + DPE +RKII | |
| Sbjct: | 243 | GDQLTSIFVDHGFLRKGEADQVMETLGGKFGLNIIKVDAQKRFMDKLVGLSDPETQRKII | 302 |
| Query: | 310 | GNEFVYVFDDEASKLKGVDFLAQGTLYTDIIESGTETAQTIKSHHNVGGLPEDMQFELIE | 369 |
| | | GNEFVYVFDDEA+KL+GVDFLAQGTLYTD+IESGT+TAQTIKSHHNVGGLPEDMQF+LIE | |
| Sbjct: | 303 | GNEFVYVFDDEANKLEGVDFLAQGTLYTDVIESGTDTAQTIKSHHNVGGLPEDMQFQLIE | 362 |
| Query: | 370 | PLNTLFKDEVRALGIALGMPEEIVWRQPFPGPGLAIRVMGAITEEKLETVRESDAILREE | 429 |
| | | PLNTLFKDEVRALG LGMP+EIVWRQPFPGPGLAIRV+G +TEEKLETVRESDAILREE | |
| Sbjct: | 363 | PLNTLFKDEVRALGTQLGMPDEIVWRQPFPGPGLAIRVLGDLTEEKLETVRESDAILREE | 422 |
| Query: | 430 | IAKAGLDRDVWQYFTVNTGVRSVGVMGDGRTYDYTIAIRAITSIDGMTADFAQLPWDVLK | 489 |
| | | IA +GL+RDVWQYFTVNT V+SVGVMGD RTYDYT+AIRAITSIDGMTADFAQLPWD+L+ | |
| Sbjct: | 423 | IAASGLERDVWQYFTVNTDVKSVGVMGDQRTYDYTLAIRAITSIDGMTADFAQLPWDLLQ | 482 |
| Query: | 490 | KISTRIVNEVDHVNRIVYDITSKPPATVEWE | 520 |
| | | KIS RIVNEVDHVNRIVYDITSKPPATVEW+ | |
| Sbjct: | 483 | KISKRIVNEVDHVNRIVYDITSKPPATVEWQ | 513 |

[4028] An alignment of the GAS and GBS proteins is shown below:

| Identities = 487/520 (93%), Positives = 505/520 (96%) | | | |
|---|---|---|---|
| Query: | 1 | MTDISILNDIQKIIVLDYGSQYNQLIARRIREFGVFSELKSHKITADEIRDINPIGIVLS | 60 |
| | | MT+ISILND+QKIIVLDYGSQYNQLIARRIREFGVFSELKSHKITA E+R+INPIGIVLS | |
| Sbjct: | 1 | MTEISILNDVQKIIVLDYGSQYNQLIARRIREFGVFSELKSHKITAQELREINPIGIVLS | 60 |
| Query: | 61 | GGPNSVYADGAFGIDEEIFELGIPILGICYGMQLITHKLGGKVLPAGEAGHREYGQSALR | 120 |
| | | GGPNSVYAD AFGID EIFELGIPILGICYGMQLITHKLGGKV+PAG+AG+REYGQS L | |
| Sbjct: | 61 | GGPNSVYADNAFGIDPEIFELGIPILGICYGMQLITHKLGGKVVPAGQAGNREYGQSTLH | 120 |
| Query: | 121 | LRSESALFAGTPQEQLVLMSHGDAVTEIPEGFHLVGDSVDCPFAAMENTEKQFYGIQFHP | 180 |
| | | LR S LF+GTPQEQLVLMSHGDAVTEIPEGFHLVGDS DCP+AA+ENTEK YGIQFHP | |
| Sbjct: | 121 | LRETSKLFSGTPQEQLVLMSHGDAVTEIPEGFHLVGDSNDCPYAAIENTEKNLYGIQFHP | 180 |
| Query: | 181 | EVRHSVYGNDILKNFAVNICGARGDWSMDNFIDMEIAKIRETVGDRKVLLGLSGGVDSSV | 240 |
| | | EVRHSVYGNDILKNFA++ICGARGDWSMDNFIDMEIAKIRETVGDRKVLLGLSGGVDSSV | |
| Sbjct: | 181 | EVRHSVYGNDILKNFAISICGARGDWSMDNFIDMEIAKIRETVGDRKVLLGLSGGVDSSV | 240 |
| Query: | 241 | VGVLLQRAIGDQLTCIFVDHGLLRKNEGDQVMDMLGGKFGLNIIRVDASKRFLDLLSGVE | 300 |
| | | VGVLLQ+AIGDQLTCIFVDHGLLRK+EGDQVM MLGGKFGLNIIRVDASKRFLDLL+ VE | |
| Sbjct: | 241 | VGVLLQKAIGDQLTCIFVDHGLLRKDEGDQVMGMLGGKFGLNIIRVDASKRFLDLLADVE | 300 |
| Query: | 301 | DPERKRKIIGNEFVYVFDDEASKLKGVDFLAQGTLYTDIIESGTETAQTIKSHHNVGGLP | 360 |
| | | DPE+KRKIIGNEFVYVFDDEASKLKGVDFLAQGTLYTDIIESGTETAQTIKSHHNVGGLP | |
| Sbjct: | 301 | DPEKKRKIIGNEFVYVFDDEASKLKGVDFLAQGTLYTDIIESGTETAQTIKSHHNVGGLP | 360 |
| Query: | 361 | EDMQFELIEPLNTLFKDEVRALGTALGMPDEVVWRQPFPGPGLAIRVMGEITEEKLETVR | 420 |
| | | EDMQFELIEPLNTLFKDEVRALG ALGMP+E+VWRQPFPGPGLAIRVMG ITEEKLETVR | |
| Sbjct: | 361 | EDMQFELIEPLNTLFKDEVRALGIALGMPEEIVWRQPFPGPGLAIRVMGAITEEKLETVR | 420 |
| Query: | 421 | ESDAILREEIAKAGLDRDVWQYFTVNTGVRSVGVMGDGRTYDYTIAIRAITSIDGMTADF | 480 |
| | | ESDAILREEIAKAGLDRDVWQYFTVNTGVRSVGVMGDGRTYDYTIAIRAITSIDGMTADF | |
| Sbjct: | 421 | ESDAILREEIAKAGLDRDVWQYFTVNTGVRSVGVMGDGRTYDYTIAIRAITSIDGMTADF | 480 |
| Query: | 481 | AQLPWDVLKKISTRIVNEVDHVNRIVYDITSKPPATVEWE | 520 |
| | | AQLPWDVLKKISTRIVNEVDHVNRIVYDITSKPPATVEWE | |
| Sbjct: | 481 | AQLPWDVLKKISTRIVNEVDHVNRIVYDITSKPPATVEWE | 520 |

[4029] Based on this analysis, it was predicted that these proteins and their epitopes could be useful antigens for vaccines or diagnostics.

### EXAMPLE 696

[4030] A DNA sequence (GBSx0740) was identified in S. agalactiae <SEQ ID 2145> which encodes the amino acid sequence <SEQ ID 2146>. This protein is predicted to be branched chain amino acid ABC transporter, periplasmic amino acid-bind. Analysis of this protein sequence reveals the following:

```
Possible site: 58
>>> Seems to have no N-terminal signal sequence
----- Final Results -----
                            bacterial cytoplasm --- Certainty = 0.0957(Affirmative) < succ>
                              bacterial membrane --- Certainty = 0.0000(Not Clear) < succ>
                                bacterial outside --- Certainty = 0.0000(Not Clear) < succ>
```

[4031] A related GBS nucleic acid sequence <SEQ ID 9409> which encodes amino acid sequence <SEQ ID 9410> was also identified.

[4032] The protein has homology with the following sequences in the GENPEPT database:

| >GP: AAD36211 GB: AE001771 branched chain amino acid ABC transporter, | | | |
|---|---|---|---|
| periplasmic amino acid-binding protein [Thermotoga maritima] | | | |
| Identities = 31/92 (33%), Positives = 51/92 (54%), Gaps = 4/92 (4%) | | | |
| Query: | 26 | AKAFHDHYVKAYGEEPSMFSALSYDAVYMAAKSAKGAKTSID---IKKALAKLKDFKGVT | 82 |
| | | AK F + Y + YG+EP+ +AL YDA YM A S D I + + K ++F G + | |
| Sbjct: | 275 | AKKFVEVYKEKYGKEPAALNALGYDA-YMVLLDAIERAGSFDREKIAEEIRKTRNFNGAS | 333 |
| Query: | 83 | GKMSIDKNHNVVKSAYVVKLEDGKTSSVNIIS | 114 |
| | | G ++ID+N + +KS V +++G +I+ | |
| Sbjct: | 334 | GIINIDENGDAIKSVVVNIVKNGSVDFEAVIN | 365 |

[4033] Based on this analysis, it was predicted that these proteins and their epitopes could be useful antigens for vaccines or diagnostics.

### EXAMPLE 697

[4034] A DNA sequence (GBSx0741) was identified in S. agalactiae <SEQ ID 2147> which encodes the amino acid sequence <SEQ ID 2148>. Analysis of this protein sequence reveals the following:

| Possible site: 27 | | | | |
|---|---|---|---|---|
| >>> Seems to have a cleavable N-term signal seq. | | | | |
| | INTEGRAL | Likelihood = −10.61 | Transmembrane | 140-156 (129-158) |
| | INTEGRAL | Likelihood = −9.55 | Transmembrane | 60-76 (53-80) |
| | INTEGRAL | Likelihood = −7.59 | Transmembrane | 264-280 (257-285) |
| | INTEGRAL | Likelihood = −5.79 | Transmembrane | 232-248 (219-251) |
| | INTEGRAL | Likelihood = −2.23 | Transmembrane | 190-206 (190-207) |
| | INTEGRAL | Likelihood = −1.75 | Transmembrane | 90-106 (90-110) |

```
----- Final Results -----
                              bacterial membrane --- Certainty = 0.5246(Affirmative) < succ>
                                bacterial outside --- Certainty = 0.0000(Not Clear) < succ>
                            bacterial cytoplasm --- Certainty = 0.0000(Not Clear) < succ>
```

[4035] A related GBS nucleic acid sequence <SEQ ID 10059> which encodes amino acid sequence <SEQ ID 10060> was also identified.

[4036] The protein has homology with the following sequences in the GENPEPT database:

| >GP: AA036212 GB: AE001771 branched chain amino acid ABC transporter, | | | |
|---|---|---|---|
| permease protein [Thermotoga maritima] | | | |
| Identities = 140/295 (47%), Positives = 200/295 (67%), Gaps = 7/295 (2%) | | | |
| Query: | 2 | LQQLVNGLILGSIYALLALGYTMVYGIIKLINFAHGDIYMMGAFMGYYLINHLHLNFFLA | 61 |
| | | LQ L NG++LG +YAL+A+GYTMVYGI++LINFAHGD+ MMG + +Y L LN + | |
| Sbjct: | 5 | LQNLFNGIMLGGLYALIAIGYTMVYGILRLINFAHGDVMMMGVYFAFYAATLLSLNPLFS | 64 |
| Query: | 62 | LLIAMLGSAFLGVVIEYLAYRPLRKSTRIAALITAIGVSFLLEYGMVYLVGADTRAFPQA | 121 |
| | | ++A+LG+A LG +I+ +AY+PLR + RI+ALITAIGVSF LE V + GA ++F + | |
| Sbjct: | 65 | AIVAILGAALLGFLIDRVAYKPLRNAPRISALITAIGVSFFLESLAVVVFGAIPKSFLKV | 124 |
| Query: | 122 | IHTVKYNLGPITITNVQL-----IILGIALLLMLTLQFIVQKTKMGKAMRALSVDSDAAQ | 176 |
| | | +T+ ++ +++ I ++++ L FIV +TK+G AMRA+S+D | |
| Sbjct: | 125 | FKDRTILNKVLTVAGARIPLLTFLVIFITAVILIVLFFIVYRTKIGMAMRAISMDIPTTA | 184 |
| Query: | 177 | LMGINVNRTISFTFALGSALAGAGGVLIGLYYNSVQPLMGVTPGLKAFVAAVLGGIGIIP | 236 |
| | | LMG+NV+ I FTFALGSALA A G++ + + +V P MG PGLKAF+AAV GGIG IP | |
| Sbjct: | 185 | LMGVNVDAVIGFTFALGSALAAASGIMWAMRFPNVHPYMGFMPGLKAFIAAVFGGIGSIP | 244 |
| Query: | 237 | GAAIGGFVIGILETLATAL--GVSDFRDGIVYAILILIFLIRPAGILGKNIKEKV | 289 |
| | | GA +GG ++G++E A V +RD + ILI+I L++P+G+LGK I EKV | |
| Sbjct: | 245 | GAVLGGVLLGLIEIFLAAYFPAVMGYRDAFAFIILIIILLVKPSGLLGKKIVEKV | 299 |

[4037] There is also homology to SEQ ID 2150. A related sequence was also identified in GAS <SEQ ID 9171> which encodes the amino acid sequence <SEQ ID 9172>. Analysis of this protein sequence reveals the following:

| Possible site: 30 | | | | |
|---|---|---|---|---|
| >>> Seems to have an uncleavable N-term signal seq | | | | |
| | INTEGRAL | Likelihood = −12.74 | Transmembrane | 196-212 (191-219) |
| | INTEGRAL | Likelihood = −12.42 | Transmembrane | 12-28 (5-36) |
| | INTEGRAL | Likelihood = −7.22 | Transmembrane | 106-122 (102-126) |
| | INTEGRAL | Likelihood = −4.78 | Transmembrane | 242-258 (240-260) |
| | INTEGRAL | Likelihood = −2.50 | Transmembrane | 61-77 (60-77) |
| | INTEGRAL | Likelihood = −2.34 | Transmembrane | 293-309 (291-309) |
| | INTEGRAL | Likelihood = −1.44 | Transmembrane | 139-155 (138-156) |
| | INTEGRAL | Likelihood = −1.33 | Transmembrane | 317-333 (317-333) |

```
----- Final Results -----
                              bacterial membrane --- Certainty = 0.609(Affirmative) < succ>
                                bacterial outside --- Certainty = 0.0000(Not Clear) < succ>
                            bacterial cytoplasm --- Certainty = 0.0000(Not Clear) < succ>
```

[4038] An alignment of the GAS and GBS proteins is shown below:

| Identities = 35/147 (23%), Positives = 71/147 (47%), Gaps = 6/147 (4%) | | | |
|---|---|---|---|
| Query: | 134 | ITNVQLIILGI--ALLLMLTLQFIVQKTKMGKAMRALSVDSDAAQLMGINVNRTISFTFA | 191 |
| | | +TN I +GI A++ + + F++ KT +G +R++ ++ A++ G++ RTI + | |
| Sbjct: | 197 | LTNNSRINIGIFFAIIAIALIWFLLNKTTLGFEIRSVGLNPHASEYAGMSSKRTIILSMI | 256 |
| Query: | 192 | LGSALAGAGGVL--IGLYYNSVQPLMGVTPGLKAFVAAVLGGIGIIPGAAIGGFVIGILE | 249 |
| | | + ALAG GGV+ +G + N + G ++L + G F+ G+L | |
| Sbjct: | 257 | ISGALAGLGGVVEGLGTFENVFVQGSSLAVGFDGMAVSLLAANSPL-GIFFSSFLFGVLN | 315 |
| Query: | 250 | TLATALGVSDFRDGIVYAILI-LIFLI | 275 |
| | | A + ++ +V + +IF + | |
| Sbjct: | 316 | IGAPGMNIAGIPPELVKVVTASIIFFV | 342 |

[4039] Based on this analysis, it was predicted that these proteins and their epitopes could be useful antigens for vaccines or diagnostics.

### EXAMPLE 698

[4040] A DNA sequence (GBSx0742) was identified in S. agalactiae <SEQ ID 2151> which encodes the amino acid sequence <SEQ ID 2152>. This protein is predicted to be branched chain amino acid ABC transporter, permease protein (livM). Analysis of this protein sequence reveals the following:

| Possible site: 29 | | | | |
|---|---|---|---|---|
| >>> Seems to have an uncleavable N-term signal seq | | | | |
| | INTEGRAL | Likelihood = −8.76 | Transmembrane | 90-106 (84-113) |
| | INTEGRAL | Likelihood = −8.23 | Transmembrane | 12-28 (5-33) |
| | INTEGRAL | Likelihood = −8.17 | Transmembrane | 205-221 (200-224) |
| | INTEGRAL | Likelihood = −7.86 | Transmembrane | 276-292 (273-300) |
| | INTEGRAL | Likelihood = −6.32 | Transmembrane | 159-175 (154-176) |
| | INTEGRAL | Likelihood = −6.05 | Transmembrane | 236-252 (232-264) |
| | INTEGRAL | Likelihood = −5.95 | Transmembrane | 42-58 (38-60) |
| | INTEGRAL | Likelihood = −5.84 | Transmembrane | 120-136 (119-138) |
| | INTEGRAL | Likelihood = −4.35 | Transmembrane | 255-271 (253-274) |
| | INTEGRAL | Likelihood = −1.59 | Transmembrane | 66-82 (66-85) |

```
----- Final Results -----
                              bacterial membrane --- Certainty = 0.4503(Affirmative) < succ>
                                bacterial outside --- Certainty = 0.0000(Not Clear) < succ>
                            bacterial cytoplasm --- Certainty = 0.0000(Not Clear) < succ>
```

[4041] The protein has homology with the following sequences in the GENPEPT database:

| >GP: AAD36213 GB: AE001771 branched chain amino acid ABC transporter, | | | |
|---|---|---|---|
| permease protein [Thermotoga maritima] | | | |
| Identities = 119/332 (35%), Positives = 191/332 (56%), Gaps = 33/332 (9%) | | | |
| Query: | 12 | LAIVVLDYLLISVLISMGIFNLYHIQIIETIGINVILAVGLNLIVGCSGQFSLGHAGFMA | 71 |
| | | L +V L ++ + + ++ + Y ++++ I I I+AV LNLI G +G FSLGHAGF+ | |
| Sbjct: | 16 | LTVVFLIFMALLLYLADRYMDSYKLRVVRLIAIYGIMAVSLNLINGITGIFSLGHAGFIL | 75 |
| Query: | 72 | IGAYAVAIIGVKMP-----------------TYVGFLIAILVGTLVAGGIALGVGIPTLR | 114 |
| | | IGAY +++ + + F A + G ++A A +G P LR | |
| Sbjct: | 76 | IGAYTASLLTLSPEQKAMSFIIEPIVPWLANAHTDFFTATVAGGVLAAVFAFLIGWPVLR | 135 |
| Query: | 115 | LKGDYLAIATLGVAEIIRILLVNGGDITNGAAGIMGIPPFTTWSLVYGVAVVSLILAMNF | 174 |
| | | L GDYLAIA+LG AE+IRI+ +N ITNG G+ GIP ++ YG V+++ + | |
| Sbjct: | 136 | LSGDYLAIASLGFAEVIRIIALNAISITNGPLGLKGIPEYSNIWWCYGWLFVTVLFMASL | 195 |
| Query: | 175 | LRSPLGRNTIAIREDEIAAESMGVDTTKVKVIVFVFGAILASIAGSLQAGYVGTVMPKDF | 234 |
| | | + S GR AIRED IAAE+MG++ K +++ FV GA A ++GSL A ++ T+ P+ | |
| Sbjct: | 196 | VNSSYGRALKAIREDRIAAEAMGINVFKHQLLSFVIGAFFAGVSGSLYAHWLTTIDPRTT | 255 |
| Query: | 235 | SF--MMSVNVLIIVVLGGLGSMTGTVLAAILLGLLNMLLQD--------------YASVR | 278 |
| | | + M++ VLI++VLGGLGS++G+++ A L +L L+D +R | |
| Sbjct: | 256 | TLGPMLTFYVLIMIVLGGLGSISGSLIGAALFAILFEWLRDLEEPFTFFGIHVPGIKGMR | 315 |
| Query: | 279 | MIIYALALILIMIFRPSGLLGTKELTLSHLFR | 310 |
| | | +++ + IL+MIF G++G +ELT ++L+R | |
| Sbjct: | 316 | ILVISAIFILVMIFWQRGIMGREELTWNNLYR | 347 |

[4042] No corresponding DNA sequence was identified in S. pyogenes.

[4043] Based on this analysis, it was predicted that this protein and its epitopes, could be useful antigens for vaccines or diagnostics.

### EXAMPLE 699

[4044] A DNA sequence (GBSx0743) was identified in S. agalactiae <SEQ ID 2153> which encodes the amino acid sequence <SEQ ID 2154>. This protein is predicted to be branched chain amino acid ABC transporter, ATP-binding protein (livG). Analysis of this protein sequence reveals the following:

```
Possible site: 58
>>> Seems to have no N-terminal signal sequence
----- Final Results -----
                            bacterial cytoplasm --- Certainty = 0.2057(Affirmative) < succ>
                              bacterial membrane --- Certainty = 0.0000(Not Clear) < succ>
                                bacterial outside --- Certainty = 0.0000(Not Clear) < succ>
```

[4045] The protein has homology with the following sequences in the GENPEPT database:

| >GP: AAD36214 GB: AE001771 branched chain amino acid ABC transporter, | | | |
|---|---|---|---|
| ATP-binding protein [Thermotoga maritima] | | | |
| Identities = 136/271 (50%), Positives = 189/271 (69%), Gaps = 21/271 (7%) | | | |
| Query: | 3 | LLEVKNLSKHFGGLTAVGDVSMKLHKGELIGLIGPNGAGKTTLFNLLTGVYLPSKGTISI | 62 |
| | | LL + +++ FGGL AV D + ++ +GEL+GLIGPNGAGKTT+FN++TG+Y P+KG I | |
| Sbjct: | 11 | LLLLDHVTMQFGGLVAVDDFTNEIREGELVGLIGPNGAGKTTVFNVITGIYTPTKGRIVF | 70 |
| Query: | 63 | DGKILNGRKPAKIASLGLGRTFQNIRLFKNMTVLDNVLVGLSNHHLSHPIASFLRLPK-- | 120 |
| | | + + G +P +I LG+ RTFQNIRLF +MTVL+NVLV +H LS+P A + + | |
| Sbjct: | 71 | NDIDITGLRPYQITHLGIARTFQNIRLFSDMTVLENVLVA-QHHVLSNPDADRILVKHGK | 129 |
| Query: | 121 | ------------------YYHSEKALRKKALELLEIFGLKAYQDALAKNLPYGKQRRLEI | 162 |
| | | Y EK + ++A +L++ GL+ A +LPYG+QR+LEI | |
| Sbjct: | 130 | PRKGHGRFWFWRAVTRIGYLKKEKEMVERAKDLIKRVGLEKVMYEKASSLPYGEQRKLEI | 189 |
| Query: | 163 | VRALATEPKILFLDEPAAGMNPQETAELTQLISQIKSDFDITIMLIEHDMNLVMQVTERI | 222 |
| | | RALATEPK++ LDEPAAGMNP+ET +L + I QI+ DF++T++LIEHDM +VM + ERI | |
| Sbjct: | 190 | ARALATEPKLILLDEPAAGMNPKETEDLMEFIKQIRKDFNLTVLLIEHDMKVVMGICERI | 249 |
| Query: | 223 | YVLEYGRLIAHGTPEEIKNNKRVIEAYLGGE | 253 |
| | | V++YGR+IA GTP+EI+N+ RVIEAYLG E | |
| Sbjct: | 250 | IVMDYGRIIAEGTPKEIQNDPRVIEAYLGRE | 280 |

[4046] There is also homology to SEQ ID 644.

[4047] Based on this analysis, it was predicted that this protein and its epitopes, could be useful antigens for vaccines or diagnostics.

### EXAMPLE 700

[4048] A DNA sequence (GBSx0744) was identified in S. agalactiae <SEQ ID 2155> which encodes the amino acid sequence <SEQ ID 2156>. Analysis of this protein sequence reveals the following:

```
Possible site: 61
>>> Seems to have no N-terminal signal sequence
----- Final Results -----
                            bacterial cytoplasm --- Certainty = 0.2216(Affirmative) < succ>
                              bacterial membrane --- Certainty = 0.0000(Not Clear) < succ>
                                bacterial outside --- Certainty = 0.0000(Not Clear) < succ>
```

[4049] The protein has homology with the following sequences in the GENPEPT database:

| >GP: CAB52068 GB: AL109732 putative branched chain amino acid | | | |
|---|---|---|---|
| transport ATP-binding protein [Streptomyces coelicolor | | | |
| A3(2)] | | | |
| Identities = 136/233 (58%), Positives = 181/233 (77%) | | | |
| Query: | 3 | MLKVENLSIHYGVIQAVNDVSFEVNQGEVVTLIGANGAGKTSILRTISGLVRPSQGSISF | 62 |
| | | +L+VE+L + YG I+AV +SF+V+ GEVVTLIG NGAGKT+ LRT+SGL++P G I F | |
| Sbjct: | 4 | LLEVEDLRVAYGKIEAVKGISFKVDAGEVVTLIGTNGAGKTTTLRTLSGLLKPVGGQIRF | 63 |
| Query: | 63 | MGKPIHKLAARKIVGNGLAQVPEGRHVFSSLSVMENLEMGAFLQKDREQNQKMLKKVFDR | 122 |
| | | GK + K+ A +IV GLA PEGRH+F +++ +NL +GAFL+ DR +K +++ +D | |
| Sbjct: | 64 | GGKSLKKVPAHQIVSLGLAHSPEGRHIFPRMTIEDNLRLGAFLRSDRPGIEKDIQRAYDL | 123 |
| Query: | 123 | FPRLEERKNQDAATLSGGEQQMLAMGRALMSRPKLLLLDEPSMGLAPIFIQEIFNIIEDI | 182 |
| | | FP L ER+ Q A TLSGGEQQMLAMGRALMS+PKLL+LDEPSMGL+PI +Q+I I ++ | |
| Sbjct: | 124 | FPILGERRKQAAGTLSGGEQQMLAMGRALMSQPKLLMLDEPSMGLSPIMMQKIMATIAEL | 183 |
| Query: | 183 | KKQGTTVLLVEQNANKALTIADKAYVLETGKVVLSGTGKELLVSDQVRKAYLG | 235 |
| | | K QGTT+LLVEQNA AL++AD +V+E G +VLSG+G++LL + VRKAYLG | |
| Sbjct: | 184 | KSQGTTILLVEQNAQAALSLADHGHVMEVGNIVLSGSGQDLLHDESVRKAYLG | 236 |

[4050] Based on this analysis, it was predicted that this protein and its epitopes, could be useful antigens for vaccines or diagnostics.

### EXAMPLE 701

[4051] A DNA sequence (GBSx0745) was identified in S. agalactiae <SEQ ID 2159> which encodes the amino acid sequence <SEQ ID 2160>. Analysis of this protein sequence reveals the following:

```
Possible site: 23
>>> Seems to have no N-terminal signal sequence
----- Final Results -----
                            bacterial cytoplasm --- Certainty = 0.0415(Affirmative) < succ>
                              bacterial membrane --- Certainty = 0.0000(Not Clear) < succ>
                                bacterial outside --- Certainty = 0.0000(Not Clear) < succ>
```

[4052] The protein has homology with the following sequences in the GENPEPT database:

| >GP: AAD36216 GB: AE001771 conserved hypothetical protein | | | |
|---|---|---|---|
| [Thermotoga maritima] | | | |
| Identities = 72/166 (43%), Positives = 116/166 (69%), Gaps = 2/166 (1%) | | | |
| Query: | 1 | MPVKDFMTKKLVYVSPDTTVAEAADLLREHHLRRLPVVENDQLVGLVTEGTMAEAQPSKA | 60 |
| | | M VRDFMT+ + ++P+T+ +EA L++++ ++RL V++N+++VG+VTE + A PSKA | |
| Sbjct: | 1 | MLVKDFMTRNPITIAPETSFSEALKLMKQNKIKRLIVMKNEKIVGIVTEKDLLYASPSKA | 60 |
| Query: | 61 | TSLSIYEMNYLLNKTKIRDIMIKDIVTVSQYASLEDAIYLMMSRKIGVLPVVDN-GQLYG | 119 |
| | | T+L+I+E++YLL+K KI +IM KD+VTV++ +EDA +M + I LPVVD+ G+L G | |
| Sbjct: | 61 | TTLNIWELHYLLSKLKIEEIMTKDVVTVNENTPIEDAARIMEEKDISGLPVVDDAGRLVG | 120 |
| Query: | 120 | IVTDRDVFKAFLEIAGYGQE-SYRLVILADEGIGVLSKVLNRLSSA | 164 |
| | | I+T D+FK F+EI G +E + R + + G L +V R+ A | |
| Sbjct: | 121 | IITQTDIFKVFVEIFGTKREGTIRYTMEMPDKPGELLEVAKRIYEA | 166 |

[4053] Based on this analysis, it was predicted that this protein and its epitopes, could be useful antigens for vaccines or diagnostics.

### EXAMPLE 702

[4054] A DNA sequence (GBSx0746) was identified in S. agalactiae <SEQ ID 2163> which encodes the amino acid sequence <SEQ ID 2164>. Analysis of this protein sequence reveals the following:

```
Possible site: 41
>>> Seems to have no N-terminal signal sequence
----- Final Results -----
                            bacterial cytoplasm --- Certainty = 0.5585(Affirmative) < succ>
                              bacterial membrane --- Certainty = 0.0000(Not Clear) < succ>
                                bacterial outside --- Certainty = 0.0000(Not Clear) < succ>
```

[4055] The protein has no significant homology with any sequences in the GENPEPT database.

[4056] No corresponding DNA sequence was identified in S. pyogenes.

[4057] Based on this analysis, it was predicted that this protein and its epitopes, could be useful antigens for vaccines or diagnostics.

### EXAMPLE 703

[4058] A DNA sequence (GBSx0747) was identified in S. agalactiae <SEQ ID 2165> which encodes the amino acid sequence <SEQ ID 2166>. This protein is predicted to be a transposase. Analysis of this protein sequence reveals the following:

| Possible site: 38 | | | | |
|---|---|---|---|---|
| >>> Seems to have no N-terminal signal sequence | | | | |
| | INTEGRAL | Likelihood = −1.65 | Transmembrane | 53-69 (53-70) |

```
----- Final Results -----
                              bacterial membrane --- Certainty = 0.1659(Affirmative) < succ>
                                bacterial outside --- Certainty = 0.0000(Not Clear) < succ>
                            bacterial cytoplasm --- Certainty = 0.0000(Not Clear) < succ>
```

[4059] The protein has homology with the following sequences in the GENPEPT database:

| >GP: AAA85003 GB: U28972 SpV1 ORF3; putative transposase | | | |
|---|---|---|---|
| [Spiroplasma citri] | | | |
| Identities = 49/154 (31%), Positives = 80/154 (51%), Gaps = 11/154 (7%) | | | |
| Query: | 39 | WLEMDTVIGRIGGKVLLTFNVAFCNFIFAKLMDSKTAIETAKHIQ--VIKRTLYDNKRDF | 96 |
| | | WLEMDTV+G+ +L FA +++ TA E K + +IK L + | |
| Sbjct: | 174 | WLEMDTVVGKDHKSAILVLVEQLSKKYFAIKLENHTAREVEKKFKDIIIKNNLIGKIKG- | 232 |
| Query: | 97 | FELFPVILTDNGGEFARVDDIEIDVCGQSQLFFCDPNRSDQKARIEKNHTLVRDILPKGT | 156 |
| | | I+TD G EF++ ++EI ++Q++FCD QK IE ++ +R PKGT | |
| Sbjct: | 233 | ------IITDRGKEFSKWREMEI--FAETQVYFCDAGSPQQKPLIEYMNSELRHWFPKGT | 284 |
| Query: | 157 | SFDNLTQEDINLALSHINSVKRQALNGKTAYELF | 190 |
| | | F+ ++Q+ I+ ++ IN R LN ++ E+F | |
| Sbjct: | 285 | DFNKVSQKQIDWVVNVINDKLRPCLNWISSKEMF | 318 |

[4060] No corresponding DNA sequence was identified in S. pyogenes.

[4061] Based on this analysis, it was predicted that this protein and its epitopes, could be useful antigens for vaccines or diagnostics.

### EXAMPLE 704

[4062] A DNA sequence (GBSx0748) was identified in S. agalactiae <SEQ ID 2167> which encodes the amino acid sequence <SEQ ID 2168>. Analysis of this protein sequence reveals the following:

```
Possible site: 45
>>> Seems to have no N-terminal signal sequence
----- Final Results -----
                            bacterial cytoplasm --- Certainty = 0.3116(Affirmative) < succ>
                              bacterial membrane --- Certainty = 0.0000(Not Clear) < succ>
                                bacterial outside --- Certainty = 0.0000(Not Clear) < succ>
```

[4063] A related GBS nucleic acid sequence <SEQ ID 10055> which encodes amino acid sequence <SEQ ID 10056> was also identified.

[4064] The protein has no significant homology with any sequences in the GENPEPT database.

[4065] No corresponding DNA sequence was identified in S. pyogenes.

[4066] Based on this analysis, it was predicted that this protein and its epitopes, could be useful antigens for vaccines or diagnostics.

### EXAMPLE 705

[4067] A DNA sequence (GBSx0749) was identified in S. agalactiae <SEQ ID 2169> which encodes the amino acid sequence <SEQ ID 2170>. This protein is predicted to be thymidylate kinase (tmk). Analysis of this protein sequence reveals the following:

```
Possible site: 39
>>> Seems to have no N-terminal signal sequence
----- Final Results -----
                            bacterial cytoplasm --- Certainty = 0.1876(Affirmative) < succ>
                              bacterial membrane --- Certainty = 0.0000(Not Clear) < succ>
                                bacterial outside --- Certainty = 0.0000(Not Clear) < succ>
```

[4068] A related GBS nucleic acid sequence <SEQ ID 10053> which encodes amino acid sequence <SEQ ID 10054> was also identified.

[4069] The protein has homology with the following sequences in the GENPEPT database:

| >GP: BAB03761 GB: AP001507 thymidylate kinase [Bacillus halodurans] | | | |
|---|---|---|---|
| Identities = 112/210 (53%), Positives = 148/210 (70%), Gaps = 1/210 (0%) | | | |
| Query: | 17 | MKKGLMISFEGPDGAGKTTVLEAVLPLLREKLSQDILTTREPGGVTISEEIRHIILDVKH | 76 |
| | | M KG I+ EG +GAGKT+ L+A+ +LRE ++ TREPGG+ I+E+IR IILDV H | |
| Sbjct: | 1 | MTKGCFITVEGGEGAGKTSALDAIEEMLREN-GLSVVRTREPGGIPIAEQIRSIILDVDH | 59 |
| Query: | 77 | TQMDKKTELLLYMAARRQHLVEKVLPALEEGKIVLMDRFIDSSVAYQGSGRGLDKSHIKW | 136 |
| | | T+MD +TE LLY AARRQHLVEKVLPALE G +VL DRFIDSS+AYQG RG+ I | |
| Sbjct: | 60 | TRMDPRTEALLYAAARRQHLVEKVLPALEAGHVVLCDRFIDSSLAYQGYARGIGFEDILA | 119 |
| Query: | 137 | LNDYATDSHKPDLTLYFDVPSEVGLERIQKSVQREVNRLDLEQLDMHQRVRQGYLELADS | 196 |
| | | +N++A + PDLTL F V +VGL RI + RE NRLD E L HQ+V++GY + ++ | |
| Sbjct: | 120 | INEFAIEGRYPDLTLLFRVDPDVGLSRIHRDQSREQNRLDQEALTFHQKVKEGYERIVET | 179 |
| Query: | 197 | EPNRIVTIDASQQLDEVIAETFSIILDRIN | 226 |
| | | P R+V IDA+Q D+V+A+ +I R++ | |
| Sbjct: | 180 | YPERVVEIDANQSFDQVVADAVRMIKQRLS | 209 |

[4070] A related DNA sequence was identified in S. pyogenes <SEQ ID 2171> which encodes the amino acid sequence <SEQ ID 2172>. Analysis of this protein sequence reveals the following:

| Possible site: 56 | | | | |
|---|---|---|---|---|
| >>> Seems to have no N-terminal signal sequence | | | | |
| | INTEGRAL | Likelihood = −0.75 | Transmembrane | 215-231 (215-231) |

```
----- Final Results -----
                              bacterial membrane --- Certainty = 0.1298(Affirmative) < succ>
                                bacterial outside --- Certainty = 0.0000(Not Clear) < succ>
                            bacterial cytoplasm --- Certainty = 0.0000(Not Clear) < succ>
```

[4071] The protein has homology with the following sequences in the databases:

| >GP: BAB03761 GB: AP001507 thymidylate kinase [Bacillus halodurans] | | | |
|---|---|---|---|
| Identities = 109/205 (53%), Positives = 148/205 (72%), Gaps = 1/205 (0%) | | | |
| Query: | 22 | MITGKLITVEGPDGAGKTTVLEQLIPLLKQKVAQDILTTREPGGVAISEHIRELILDINH | 81 |
| | | M G ITVEG +GAGKT+ L+ + +L++ ++ TREPGG+ I+E IR +ILD++H | |
| Sbjct: | 1 | MTKGCFITVEGGEGAGKTSALDAIEEMLREN-GLSVVRTREPGGIPIAEQIRSIILDVDH | 59 |
| Query: | 82 | TAMDPKTELLLYIAARRQHLVEKVLPALEAGQLVFIDRFIDSSVAYQGAGRGLIKADIQW | 141 |
| | | T MDP+TE LLY AARRQHLVEKVLPALEAG +V DRFIDSS+AYQG RG+ DI | |
| Sbjct: | 60 | TRMDPRTEALLYAAARRQHLVEKVLPALEAGHVVLCDRFIDSSLAYQGYARGIGFEDILA | 119 |
| Query: | 142 | LNEFATDGLEPDLTLYFDVPSEIGLARINANQQREVNRLDLETIEIHQRVRKGYLALAKE | 201 |
| | | +NEFA +G PDLTL F V ++GL+RI+ +Q RE NRLD E + HQ+V++GY + + | |
| Sbjct: | 120 | INEFAIEGRYPDLTLLFRVDPDVGLSRIHRDQSREQNRLDQEALTFHQKVKEGYERIVET | 179 |
| Query: | 202 | HPKRIVTIDATKPLKEVVSVALEHV | 226 |
| | | +P+R+V IDA + +VV+ A+ + | |
| Sbjct: | 180 | YPERVVEIDANQSFDQVVADAVRMI | 204 |

[4072] An alignment of the GAS and GBS proteins is shown below:

| Identities = 145/219 (66%), Positives = 181/219 (82%) | | | |
|---|---|---|---|
| Query: | 4 | FDRIVVIINKGCTMKKGLMISFEGPDGAGKTTVLEAVLPLLREKLSQDILTTREPGGVTI | 63 |
| | | FD+I ++ ++G M G +I+ EGPDGAGKTTVLE ++PLL++K++QDILTTREPGGV I | |
| Sbjct: | 9 | FDKIELLKSEGNKMITGKLITVEGPDGAGKTTVLEQLIPLLKQKVAQDILTTREPGGVAI | 68 |
| Query: | 64 | SEEIRHIILDVKHTQMDKKTELLLYMAARRQHLVEKVLPALEEGKIVLMDRFIDSSVAYQ | 123 |
| | | SE IR +ILD+ HT MD KTELLLY+AARRQHLVEKVLPALE G++V +DRFIDSSVAYQ | |
| Sbjct: | 69 | SEHIRELILDINHTAMDPKTELLLYIAARRQHLVEKVLPALEAGQLVFIDRFIDSSVAYQ | 128 |
| Query: | 124 | GSGRGLDKSHIKWLNDYATDSHKPDLTLYFDVPSEVGLERIQKSVQREVNRLDLEQLDMH | 183 |
| | | G+GRGL K+ I+WLN++ATD +PDLTLYFDVPSE+GL RI + QREVNRLDLE +++H | |
| Sbjct: | 129 | GAGRGLIKADIQWLNEFATDGLEPDLTLYFDVPSEIGLARINANQQREVNRLDLETIEIH | 188 |
| Query: | 184 | QRVRQGYLELADSEPNRIVTIDASQQLDEVIAETFSIIL | 222 |
| | | QRVR+GYL LA P RIVTIDA++ L EV++ +L | |
| Sbjct: | 189 | QRVRKGYLALAKEHPKRIVTIDATKPLKEVVSVALEHVL | 227 |

[4073] Based on this analysis, it was predicted that these proteins and their epitopes could be useful antigens for vaccines or diagnostics.

### EXAMPLE 706

[4074] A DNA sequence (GBSx0750) was identified in S. agalactiae <SEQ ID 2173> which encodes the amino acid sequence <SEQ ID 2174>. This protein is predicted to be DNA polymerase III delta′ subunit (dnaZX). Analysis of this protein sequence reveals the following:

```
Possible site: 26
>>> Seems to have no N-terminal signal sequence
----- Final Results -----
                            bacterial cytoplasm --- Certainty = 0.2603(Affirmative) < succ>
                              bacterial membrane --- Certainty = 0.0000(Not Clear) < succ>
                                bacterial outside --- Certainty = 0.0000(Not Clear) < succ>
```

[4075] The protein has homology with the following sequences in the GENPEPT database:

| >GP: BAB03763 GB: AP001507 DNA polymerase III delta' subunit | | | |
|---|---|---|---|
| [Bacillus halodurans] | | | |
| Identities = 78/189 (41%), Positives = 113/189 (59%), Gaps = 3/189 (1%) | | | |
| Query: | 2 | DLKRTQPKLLEKFNTILQSDRMSHAYLFSGNFAS--LDMALYLAQSQFCEKRQSGLPCQE | 59 |
| | | +L + QP + L R++HAY+F GN + MAL+LA+S FC +R PCQ | |
| Sbjct: | 5 | NLAKNQPFVATMLKNSLAKGRLAHAYIFDGNRGTGKKRMALHLAKSFFCAQRAGVEPCQT | 64 |
| Query: | 60 | CRACRLIANGEFSDVKIIEPQGQLIKTETIKELTKDFSRSGFEGKSQVFIIKDCEKMHVN | 119 |
| | | C+ C+ I +G DV IEP GQ IK ++ L K+FS G E +V+I+ +KM + | |
| Sbjct: | 65 | CKECKRIEHGNHPDVHFIEPDGQSIKKHQVEHLQKEFSYRGMESAKKVYIVNHADKMTTS | 124 |
| Query: | 120 | AANSLLKFIEEPQSSSYVILLTNDENNVLPTIKSRTQIFRF-PKQLDMLVHQAEQAGLLK | 178 |
| | | AANSLLKF+EEP + + ILLT N+LPTIKSR+Q+ F P ++ E+ G+ + | |
| Sbjct: | 125 | AANSLLKFLEEPLADTVAILLTEQLQNMLPTIKSRSQVLSFAPLEVQAFAKLLEEEGISE | 184 |
| Query: | 179 | SQASLLAQV | 187 |
| | | S ++LLA + | |
| Sbjct: | 185 | SVSNLLASL | 193 |

[4076] A related DNA sequence was identified in S. pyogenes <SEQ ID 2175> which encodes the amino acid sequence <SEQ ID 2176>. Analysis of this protein sequence reveals the following:

```
Possible site: 39
>>> Seems to have no N-terminal signal sequence
----- Final Results -----
                            bacterial cytoplasm --- Certainty = 0.2685(Affirmative) < succ>
                              bacterial membrane --- Certainty = 0.0000(Not Clear) < succ>
                                bacterial outside --- Certainty = 0.0000(Not Clear) < succ>
```

[4077] An alignment of the GAS and GBS proteins is shown below:

| Identities = 151/290 (52%), Positives = 213/290 (73%), | | | |
|---|---|---|---|
| Gaps = 3/290 (1%) | | | |
| Query: | 1 | MDLKRTQPKLLEKFNTILQSDRMSHAYLFSGNFASLDMALYLAQSQFCEKRQSGLPCQEC | 60 |
| | | MDL + P + + F TIL+ DR++HAYLFSG+FA+ +MAL+LA+ FCE+++ PC C | |
| Sbjct: | 1 | MDLAQKAPNVYQAFQTILKKDRLNHAYLFSGDFANEEMALFLAKVIFCEQKKDQTPCGHC | 60 |
| Query: | 61 | RACRLIANGEFSDVKIIEPQGQLIKTETIKELTKDFSRSGFEGKSQVFIIKDCEKMHVNA | 120 |
| | | R+C+LI G+F+DV ++EP GQ+IKT+ +KE+ +FS++G+E K QVFIIKDC+KMH+NA | |
| Sbjct: | 61 | RSCQLIEQGDFADVTVLEPTGQVIKTDVVKEMMANFSQTGYENKRQVFIIKDCDKMHINA | 120 |
| Query: | 121 | ANSLLKFIEEPQSSSYVILLTNDENNVLPTIKSRTQIFRFPKQLDMLVHQAEQAGLLKSQ | 180 |
| | | ANSLLK+IEEPQ +Y+ LLTND+N VLPTIKSRTQ+F+FPK L A++ GLL Q | |
| Sbjct: | 121 | ANSLLKYIEEPQGEAYIFLLTNDDNKVLPTIKSRTQVFQFPKNEAYLYQLAQEKGLLNHQ | 180 |
| Query: | 181 | ASLLAQVADDPKHLEILLTNKKLLDYLNLSQQFVTTLAKDRQTAYLEVSRLTSQVVDKND | 240 |
| | | A L+A++A + HLE LL KLL+ + +++FV+ KD+ AYL ++RL +K + | |
| Sbjct: | 181 | AKLVAKLATNTSHLERLLQTSKLLELITQAERFVSIWLKDQLQAYLALNRLVQLATEKEE | 240 |
| Query: | 241 | QAFVFQWLTIMLAKE---GQLYDLENTYRAQQMWKSNVSFQNSLEYMVLS | 287 |
| | | Q V LT++LA+E L LE Y+A+ MW+SNV+FQN+LEYMV+S | |
| Sbjct: | 241 | QDLVLTLLTLLLARERAQTPLTQLEAVYQARLMWQSNVNFQNTLEYMVMS | 290 |

[4078] Based on this analysis, it was predicted that these proteins and their epitopes could be useful antigens for vaccines or diagnostics.

### EXAMPLE 707

[4079] A DNA sequence (GBSx0751) was identified in S. agalactiae <SEQ ID 2177> which encodes the amino acid sequence <SEQ ID 2178>. Analysis of this protein sequence reveals the following:

```
Possible site: 28
>>> Seems to have no N-terminal signal sequence
----- Final Results -----
                            bacterial cytoplasm --- Certainty = 0.2016(Affirmative) < succ>
                              bacterial membrane --- Certainty = 0.0000(Not Clear) < succ>
                                bacterial outside --- Certainty = 0.0000(Not Clear) < succ>
```

[4080] The protein has homology with the following sequences in the GENPEPT database:

| >GP: BAB03765 GB: AP001507 unknown conserved protein in B. subtilis | | | |
|---|---|---|---|
| [Bacillus halodurans] | | | |
| Identities = 45/116 (38%), Positives = 62/116 (52%), Gaps = 8/116 (6%) | | | |
| Query: | 1 | MDKKDLFDAFDDFSQNLLVGLSEIETMKKQIQKLLEENTVLRIENGKLRERLSVIEAET- | 59 |
| | | M+KK +F + + E+ +K+Q+ L+EEN L IEN LRERL E E | |
| Sbjct: | 1 | MNKKAIFTQVSQLEERIGELHRELGGLKEQLAYLIEENHFLTIENEHLRERLGEPELEET | 60 |
| Query: | 60 | ---ETAVKNSK----QGRELLEGIYNDGFHICNTFYGQRRENDEECAFCIELLYRD | 108 |
| | | E K K +G + L +Y +GFHICNT YG R+N E+C FC+ L +D | |
| Sbjct: | 61 | EEKEQVTKERKPFVGEGYDNLARLYQEGFHICNTHYGSLRKNGEDCLFCLSFLNQD | 116 |

[4081] A related DNA sequence was identified in S. pyogenes <SEQ ID 2179> which encodes the amino acid sequence <SEQ ID 2180>. Analysis of this protein sequence reveals the following:

```
Possible site: 22
>>> Seems to have no N-terminal signal sequence
----- Final Results -----
                            bacterial cytoplasm --- Certainty = 0.0700(Affirmative) < succ>
                              bacterial membrane --- Certainty = 0.0000(Not Clear) < succ>
                                bacterial outside --- Certainty = 0.0000(Not Clear) < succ>
```

[4082] An alignment of the GAS and GBS proteins is shown below:

| Identities = 75/107 (70%), Positives = 89/107 (83%), Gaps = 1/107 (0%) | | | |
|---|---|---|---|
| Query: | 1 | MDKKDLFDAFDDFSQNLLVGLSEIETMKKQIQKLLEENTVLRIENGKLRERLSVIEAETE | 60 |
| | | ++KK+LFDAFD FSQNL+V L+EIE MKKQ+Q L+EENT+LR+EN KLRERLS +E ET | |
| Sbjct: | 1 | VNKKELFDAFDGFSQNLMVTLAEIEAMKKQVQSLVEENTILRLENTKLRERLSHLEHET- | 59 |
| Query: | 61 | TAVKNSKQGRELLEGIYNDGFHICNTFYGQRRENDEECAFCIELLYR | 107 |
| | | A SKQ ++ LEGIY++GFHICN FYGQRRENDEEC FC ELL R | |
| Sbjct: | 60 | VAKNPSKQRKDHLEGIYDEGFHICNFFYGQRRENDEECMFCRELLDR | 106 |

[4083] Based on this analysis, it was predicted that these proteins and their epitopes could be useful antigens for vaccines or diagnostics.

### EXAMPLE 708

[4084] A DNA sequence (GBSx0752) was identified in S. agalactiae <SEQ ID 2181> which encodes the amino acid sequence <SEQ ID 2182>. Analysis of this protein sequence reveals the following:

| Possible site: 48 | | | | |
|---|---|---|---|---|
| >>> Seems to have no N-terminal signal sequence | | | | |
| | INTEGRAL | Likelihood = −1.28 | Transmembrane | 119-135 (119-135) |

```
----- Final Results -----
                              bacterial membrane --- Certainty = 0.1510(Affirmative) < succ>
                                bacterial outside --- Certainty = 0.0000(Not Clear) < succ>
                            bacterial cytoplasm --- Certainty = 0.0000(Not Clear) < succ>
```

[4085] A related GBS nucleic acid sequence <SEQ ID 10051> which encodes amino acid sequence <SEQ ID 10052> was also identified.

[4086] The protein has homology with the following sequences in the GENPEPT database:

| >GP: BAB03768 GB: AP001507 unknown conserved protein [Bacillus halodurans] | | | |
|---|---|---|---|
| Identities = 138/287 (48%), Positives = 189/287 (65%), Gaps = 2/287 (0%) | | | |
| Query: | 4 | MQVQKSFKSNIHYGTLYLVPTPIGNLDDMTFRAIRILREVDFICAEDTRNTGLLLKHFDI | 63 |
| | | M+ Q+S++ GTLYLV TPIGNL+D+TFRAIR L+E D I AEDTR T LL HFDI | |
| Sbjct: | 1 | MKTQQSYQQRDDKGTLYLVATPIGNLEDVTFRAIRTLKEADQIAAEDTRQTKKLLNHFDI | 60 |
| Query: | 64 | TTKQISFHEHNAYDKISGLIDLLKEGKSLAQVSDAGMPSISDPGHDLVKAAIEGDIPVVS | 123 |
| | | TK +S+HEHN LID L EG+++A VSDAGMP+ISDPG++LV +AI+ I V+ | |
| Sbjct: | 61 | ATKLVSYHEHNKETMGKRLIDDLIEGRTIALVSDAGMPAISDPGYELVVSAIKEGIAVIP | 120 |
| Query: | 124 | IPGASAGITALIASGLAPQPHIFYGFLPRKKGQQITFFETKQDYPETQIFYESPFRVSDT | 183 |
| | | IPGA+A +TALIASGL + F GFLPR+K Q+ E + T IFYESP R+ DT | |
| Sbjct: | 121 | IPGANAAVTALIASGLPTESFQFIGFLPRQKKQRRQALEETKPTKATLIFYESPHRLKDT | 180 |
| Query: | 184 | LKHMKEIYGDRQVVLVRELTKLYEEYQRGTISQLLEHIEKVPLKGECLIIVDGKRDTERV | 243 |
| | | L M I G+R V + RELTK YEE+ RGT+ + + + +KGE +IV+G + | |
| Sbjct: | 181 | LDDMLLILGNRHVSICRELTKTYEEFLRGTLEEAVHWAREATIKGEFCLIVEGNGEKVEP | 240 |
| Query: | 244 | KDS--SQQDPLVLVKEYIANGDKTNQAIKKVAKEFNLNRQELYASFH | 288 |
| | | ++ P+ V+ YIA G ++ +AIK+VA + + ++++Y +H | |
| Sbjct: | 241 | EEVWWESLSPVQHVEHYIALGFRSKEAIKQVATDRGVPKRDIYNIYH | 287 |

[4087] A related DNA sequence was identified in S. pyogenes <SEQ ID 2183> which encodes the amino acid sequence <SEQ ID 2184>. Analysis of this protein sequence reveals the following:

| Possible site: 35 | | | | |
|---|---|---|---|---|
| >>> Seems to have no N-terminal signal sequence | | | | |
| | INTEGRAL | Likelihood = −4.09 | Transmembrane | 116-132 (116-134) |

```
----- Final Results -----
                              bacterial membrane --- Certainty = 0.2635(Affirmative) < succ>
                                bacterial outside --- Certainty = 0.0000(Not Clear) < succ>
                            bacterial cytoplasm --- Certainty = 0.0000(Not Clear) < succ>
```

[4088] The protein has homology with the following sequences in the databases:

| >GP: BAB03768 GB: AP001507 unknown conserved protein [Bacillus halodurans] | | | |
|---|---|---|---|
| Identities = 139/287 (48%), Positives = 189/287 (65%), Gaps = 2/287 (0%) | | | |
| Query: | 1 | MQVQKSFKDKKTSGTLYLVPTPIGNLQDMTFRAVATLKEVDFICAEDTRNTGLLLKHFDI | 60 |
| | | M+ Q+S++ + GTLYLV TPIGNL+D+TFRA+ TLKE D I AEDTR T LL HFDI | |
| Sbjct: | 1 | MKTQQSYQQRDDKGTLYLVATPIGNLEDVTFRAIRTLKEADQIAAEDTRQTKKLLNHFDI | 60 |
| Query: | 61 | ATKQISFHEHNAYEKIPDLIDLLISGRSLAQVSDAGMPSISDPGHDLVKAAIDSDIAVVA | 120 |
| | | ATK +S+HEHN LID LI GR++A VSDAGMP+ISDPG++LV +AI IAV+ | |
| Sbjct: | 61 | ATKLVSYHEHNKETMGKRLIDDLIEGRTIALVSDAGMPAISDPGYELVVSAIKEGIAVIP | 120 |
| Query: | 121 | LPGASAGITALIASGLAPQPHVFYGFLPRKAGQQKAFFEDKHHYPETQMFYESPYRIKDT | 180 |
| | | +PGA+A +TALIASGL + F GFLPR+ Q++ E+ T +FYESP+R+KDT | |
| Sbjct: | 121 | IPGANAAVTALIASGLPTESFQFIGFLPRQKKQRRQALEETKPTKATLIFYESPHRLKDT | 180 |
| Query: | 181 | LTNMLACYGDRQVVLVRELTKLFEEYQRGSISEILSYLEETPLKGECLLIVA--GAQADS | 238 |
| | | L +ML G+R V + RELTK +EE+ RG++ E + + E +KGE LIV G + + | |
| Sbjct: | 181 | LDDMLLILGNRHVSICRELTKTYEEFLRGTLEEAVHWAREATIKGEFCLIVEGNGEKVEP | 240 |
| Query: | 239 | EVELTADVDLVSLVQKEIQAGAKPNQAIKTIAKAYQVNRQELYQQFH | 285 |
| | | E + V V+ I G + +AIK +A V ++++Y +H | |
| Sbjct: | 241 | EEVWWESLSPVQHVEHYIALGFRSKEAIKQVATDRGVPKRDIYNIYH | 287 |

[4089] An alignment of the GAS and GBS proteins is shown below:

| Identities = 208/287 (72%), Positives = 238/287 (82%) | | | |
|---|---|---|---|
| Query: | 4 | MQVQKSFKSNIHYGTLYLVPTPIGNLDDMTFRAIRILREVDFICAEDTRNTGLLLKHFDI | 63 |
| | | MQVQKSFK GTLYLVPTPIGNL DMTFRA+ L+EVDFICAEDTRNTGLLLKHFDI | |
| Sbjct: | 1 | MQVQKSFKDKKTSGTLYLVPTPIGNLQDMTFRAVATLKEVDFICAEDTRNTGLLLKHFDI | 60 |
| Query: | 64 | TTKQISFHEHNAYDKISGLIDLLKEGKSLAQVSDAGMPSISDPGHDLVKAAIEGDIPVVS | 123 |
| | | TKQISFHEHNAY+KI LIDLL G+SLAQVSDAGMPSISDPGHDLVKAAI+ DI VV+ | |
| Sbjct: | 61 | ATKQISFHEHNAYEKIPDLIDLLISGRSLAQVSDAGMPSISDPGHDLVKAAIDSDIAVVA | 120 |
| Query: | 124 | IPGASAGITALIASGLAPQPHIFYGFLPRKKGQQITFFETKQDYPETQIFYESPFRVSDT | 183 |
| | | +PGASAGITALIASGLAPQPH+FYGFLPRK GQQ FFE K YPETQ+FYESP+R+ DT | |
| Sbjct: | 121 | LPGASAGITALIASGLAPQPHVFYGFLPRKAGQQKAFFEDKHHYPETQMFYESPYRIKDT | 180 |
| Query: | 184 | LKHMKEIYGDRQVVLVRELTKLYEEYQRGTISQLLEHIEKVPLKGECLIIVDGKRDTERV | 243 |
| | | L +M YGDRQVVLVRELTKL+EEYQRG+IS++L ++E+ PLKGECL+IV G + V | |
| Sbjct: | 181 | LTNMLACYGDRQVVLVRELTKLFEEYQRGSISEILSYLEETPLKGECLLIVAGAQADSEV | 240 |
| Query: | 244 | KDSSQQDPLVLVKEYIANGDKTNQAIKKVAKEFNLNRQELYASFHDL | 290 |
| | | + ++ D + LV++ I G K NQAIK +AK + +NRQELY FHDL | |
| Sbjct: | 241 | ELTADVDLVSLVQKEIQAGAKPNQAIKTIAKAYQVNRQELYQQFHDL | 287 |

[4090] A related GBS gene <SEQ ID 8643> and protein <SEQ ID 8644> were also identified. Analysis of this protein sequence reveals the following:

| Lipop: Possible site: −1 Crend: 10 | | |
|---|---|---|
| McG: Discrim Score: −6.92 | | |
| GvH: Signal Score (−7.5): −9.26 | | |
| Possible site: 48 | | |
| >>> Seems to have no N-terminal signal sequence | | |
| ALOM program count: 1 | value: −1.28 | threshold: 0.0 |

| | | | |
|---|---|---|---|
| INTEGRAL | Likelihood = −1.28 | Transmembrane | 118-134 (118-134) |

| | | |
|---|---|---|
| PERIPHERAL | Likelihood = 6.89 | 32 |

modified ALOM score: 0.76
*** Reasoning Step: 3
----- Final Results -----
bacterial membrane --- Certainty = 0.1510 (Affirmative) < succ>
bacterial outside --- Certainty = 0.0000 (Not Clear) < succ>
bacterial cytoplasm --- Certainty = 0.0000 (Not Clear) < succ>

[4091] The protein has homology with the following sequences in the databases:

[chemical structure]

[4092] SEQ ID 8644 (GBS343) was expressed in E. coli as a His-fusion product. SDS-PAGE analysis of total cell extract is shown in FIG. 72 (lane 11; MW 35.4 kDa).

[4093] The GBS343-His fusion product was purified (FIG. 215, lane 4) and used to immunise mice. The resulting antiserum was used for FACS (FIG. 277), which confirmed that the protein is immunoaccessible on GBS bacteria.

[4094] Based on this analysis, it was predicted that these proteins and their epitopes could be useful antigens for vaccines or diagnostics.

### EXAMPLE 709

[4095] A DNA sequence (GBSx0753) was identified in S. agalactiae <SEQ ID 2185> which encodes the amino acid sequence <SEQ ID 2186>. This protein is predicted to be bA483F11.3 (cutC). Analysis of this protein sequence reveals the following:

Possible site: 41
>>> Seems to have no N-terminal signal sequence
----- Final Results -----
bacterial cytoplasm --- Certainty = 0.2568 (Affirmative) < succ>
bacterial membrane --- Certainty = 0.0000 (Not Clear) < succ>
bacterial outside --- Certainty = 0.0000 (Not Clear) < succ>

[4096] The protein has homology with the following sequences in the GENPEPT database:

| >GP: CAB88199 GB: AL133353 bA483F11.3 (CGI-32 protein) [Homo sapiens] | | | |
|---|---|---|---|
| Identities = 79/203 (38%), Positives = 116/203 (56%), Gaps = 7/203 (3%) | | | |
| Query: | 3 | LREFCAENLTDLTRLDKAIISRVELCDNLAVGGTTPSYGVIKEANQYLHEKGISVAVMIR | 62 |
| | | L E C +++ ++ R+ELC L+ GGTTPS GV++ Q + I V VMIR | |
| Sbjct: | 27 | LMEVCVDSVESAVNAERGGADRIELCSGLSEGGTTPSMGVLQVVKQSVQ---IPVFVMIR | 83 |
| Query: | 63 | PRGGNFVYNDLELRIMEEDILRAVELESDALVLGILTSNNHIDTEAIEQLLPATQGLPLV | 122 |
| | | PRGG+F+Y+D E+ +M+ DI A +D LV G LT + HID E L+ + LP+ | |
| Sbjct: | 84 | PRGGDFLYSDREIEVMKADIRLAKLYGADGLVFGALTEDGHIDKELCMSLMAICRPLPVT | 143 |
| Query: | 123 | FHMAFDVIPKSDQKKSIDQLVALGFTRILLHGSSNGEPIIENIKHIKALVEYANNRIEIM | 182 |
| | | FH AFD++ D +++ L+ LGF R+L G + +E + IK L+E A RI +M | |
| Sbjct: | 144 | FHRAFDMV--HDPMAALETLLTLGFERVLTSGCDSS--ALEGLPLIKRLIEQAKGRIVVM | 199 |
| Query: | 183 | VGGGVTAENYQYICQETGVKQAH | 205 |
| | | GGG+T N Q I + +G + H | |
| Sbjct: | 200 | PGGGITDRNLQRILEGSGATEFH | 222 |

[4097] A related DNA sequence was identified in S. pyogenes <SEQ ID 2187> which encodes the amino acid sequence <SEQ ID 2188>. Analysis of this protein sequence reveals the following:

Possible site: 57
>>> Seems to have no N-terminal signal sequence
----- Final Results -----
bacterial cytoplasm --- Certainty = 0.2372 (Affirmative) < succ>
bacterial membrane --- Certainty = 0.0000 (Not Clear) < succ>
bacterial outside --- Certainty = 0.0000 (Not Clear) < succ>

[4098] An alignment of the GAS and GBS proteins is shown below:

| Identities = 143/208 (68%), Positives = 168/208 (80%) | | | |
|---|---|---|---|
| Query: | 2 | ILREFCAENLTDLTRLDKAIISRVELCDNLAVGGTTPSYGVIKEANQYLHEKGISVAVMI | 61 |
| | | +++EFCAENLT L LD ISRVELCDNLAVGGTTPSYGVIKEA Q LH+K ISVA MI | |
| Sbjct: | 1 | MIKEFCAENLTLLPTLDAGQISRVELCDNLAVGGTTPSYGVIKEACQLLHDKKISVATMI | 60 |
| Query: | 62 | RPRGGNFVYNDLELRIMEEDILRAVELESDALVLGILTSNNHIDTEAIEQLLPATQGLPL | 121 |
| | | RPRGG+FVYNDLEL+ MEEDIL+AVE SDALVLG+LT+ N +DT+AIEQLLPATQGLPL | |
| Sbjct: | 61 | RPRGGDFVYNDLELKAMEEDILKAVEAGSDALVLGLLTTENQLDTDAIEQLLPATQGLPL | 120 |
| Query: | 122 | VFHMAFDVIPKSDQKKSIDQLVALGFTRILLHGSSNGEPIIENIKHIKALVEYANNRIEI | 181 |
| | | VFHMAFD IP Q +++DQL+ GF R+L HGS PI +N++ +K+LV YAN RIEI | |
| Sbjct: | 121 | VFHMAFDRIPTDHQHQALDQLIDYGFVRVLTHGSPEATPITDNVEQLKSLVTYANKRIEI | 180 |
| Query: | 182 | MVGGGVTAENYQYICQETGVKQAHGTRI | 209 |
| | | M+GGG+TAEN Q + Q TG HGT+I | |
| Sbjct: | 181 | MIGGGITAENCQSLSQLTGTAIVHGTKI | 208 |

[4099] Based on this analysis, it was predicted that these proteins and their epitopes could be useful antigens for vaccines or diagnostics.

### EXAMPLE 710

[4100] A DNA sequence (GBSx0754) was identified in S. agalactiae <SEQ ID 2189> which encodes the amino acid sequence <SEQ ID 2190>. Analysis of this protein sequence reveals the following:

Possible site: 23
>>> Seems to have no N-terminal signal sequence
----- Final Results -----
bacterial cytoplasm --- Certainty = 0.1216 (Affirmative) < succ>
bacterial membrane --- Certainty = 0.0000 (Not Clear) < succ>
bacterial outside --- Certainty = 0.0000 (Not Clear) < succ>

[4101] The protein has homology with the following sequences in the GENPEPT database:

| >GP: BAA12206 GB: D84061 phosphoserine aminotransferase | | | |
|---|---|---|---|
| [Spinacia oleracea] | | | |
| Identities = 65/109 (59%), Positives = 79/109 (71%), Gaps = 1/109 (0%) | | | |
| Query: | 3 | IYNFSAGPAVLPKPVLVKAQSELLNYQGSSMSVLEVSHRSKEFDDIIKGAERYLRDLMGI | 62 |
| | | ++NF+AGPAVLP+ VL KAQSELLN++GS MSV+E+SHR KEF II AE LR L+ I | |
| Sbjct: | 69 | VFNFAAGPAVLPENVLQKAQSELLNWRGSGMSVMEMSHRGKEFTSIIDKAEADLRTLLNI | 128 |
| Query: | 63 | PDNYKVIFLQGGASLQFSMIPLNIARGRKAY-YHVAGSWGEKSLYRGCK | 110 |
| | | P +Y V+FLQGGAS QFS IPLN+ A Y V GSWG+K+ K | |
| Sbjct: | 129 | PSDYTVLFLQGGASTQFSAIPLNLCTPDSAVDYIVTGSWGDKAAKEAAK | 177 |

[4102] No corresponding DNA sequence was identified in S. pyogenes.

[4103] Based on this analysis, it was predicted that this protein and its epitopes, could be useful antigens for vaccines or diagnostics.

### EXAMPLE 711

[4104] A DNA sequence (GBSx0755) was identified in S. agalactiae <SEQ ID 2191> which encodes the amino acid sequence <SEQ ID 2192>. Analysis of this protein sequence reveals the following:

Possible site: 24
>>> Seems to have an uncleavable N-term signal seq
----- Final Results -----
bacterial membrane --- Certainty = 0.0000 (Not Clear) < succ>
bacterial outside --- Certainty = 0.0000 (Not Clear) < succ>
bacterial cytoplasm --- Certainty = 0.0000 (Not Clear) < succ>

[4105] The protein has no significant homology with any sequences in the GENPEPT database.

[4106] No corresponding DNA sequence was identified in S. pyogenes.

[4107] Based on this analysis, it was predicted that this protein and its epitopes, could be useful antigens for vaccines or diagnostics.

### EXAMPLE 712

[4108] A DNA sequence (GBSx0756) was identified in S. agalactiae <SEQ ID 2193> which encodes the amino acid sequence <SEQ ID 2194>. This protein is predicted to be phosphoserine aminotransferase (serC). Analysis of this protein sequence reveals the following:

Possible site: 50
>>> Seems to have no N-terminal signal sequence
----- Final Results -----
bacterial cytoplasm --- Certainty = 0.3380 (Affirmative) < succ>
bacterial membrane --- Certainty = 0.0000 (Not Clear) < succ>
bacterial outside --- Certainty = 0.0000 (Not Clear) < succ>

[4109] A related GBS nucleic acid sequence <SEQ ID 10049> which encodes amino acid sequence <SEQ ID 10050> was also identified.

[4110] The protein has homology with the following sequences in the GENPEPT database:

| >GP: AAF94318 GB: AE004196 phosphoserine aminotransferase | | | |
|---|---|---|---|
| [Vibrio cholerae] | | | |
| Identities = 104/210 (49%), Positives = 152/210 (71%), Gaps 3/210 (1%) | | | |
| Query: | 4 | NNTIEGTSLYDIPKTNEVPVIADMSSNILAVKYKVEDFAMIYAGAQKNIGPAGVTVVIIR | 63 |
| | | N TI+G + D+P T++ P++ADMSS IL+ + V + +IYAGAQKNIGPAG+ + I+R | |
| Sbjct: | 170 | NETIDGIEINDLPVTDK-PIVADMSSTILSREIDVSKYGVIYAGAQKNIGPAGICIAIVR | 228 |
| Query: | 64 | EDMIN-EEPTLSSMLDYKIQSDAGSLYNTPPAYSIYIAKLVFEWVKSLGGVDAMEKANRE | 122 |
| | | +D+++ L +L+YKI ++ S++NTPP ++ Y++ LVF+W+K+ GGV A+E+ NR | |
| Sbjct: | 229 | DDLLDLASDLLPGVLNYKILAEQESMFNTPPTFAWYLSGLVFQWLKAQGGVKAIEEVNRA | 288 |
| Query: | 123 | KSGLLYDYIDSSEFYSNPVRDKKSRSLCNIPFITINKDLDEKFVKEATERGFKNIKGHRS | 182 |
| | | K+ LLY YIDSS+FY N + +RSL N+PF +LD+ F++ A RG ++KGHR | |
| Sbjct: | 289 | KAALLYGYIDSSDFYRNEIH-PDNRSLMNVPFQLAKPELDDTFLELAEARGLVSLKGHRV | 347 |
| Query: | 183 | VGGMRASLYNAFPKQGVIELIDFMKTFEAE | 212 |
| | | VGGMRAS+YNA P +GV L+DFMK FEA+ | |
| Sbjct: | 348 | VGGMRASIYNAMPLEGVQALVDFMKEFEAQ | 377 |

[4111] No corresponding DNA sequence was identified in S. pyogenes.

[4112] Based on this analysis, it was predicted that these proteins and their epitopes could be useful antigens for vaccines or diagnostics.

### EXAMPLE 713

[4113] A DNA sequence (GBSx0757) was identified in S. agalactiae <SEQ ID 2195> which encodes the amino acid sequence <SEQ ID 2196>. Analysis of this protein sequence reveals the following:

Possible site: 27
>>> Seems to have no N-terminal signal sequence
----- Final Results -----
bacterial cytoplasm --- Certainty = 0.0466 (Affirmative) < succ>
bacterial membrane --- Certainty = 0.0000 (Not Clear) < succ>
bacterial outside --- Certainty = 0.0000 (Not Clear) < succ>

[4114] A related GBS nucleic acid sequence <SEQ ID 10047> which encodes amino acid sequence <SEQ ID 10048> was also identified.

[4115] The protein has homology with the following sequences in the GENPEPT database:

| >GP: CAB73701 GB: AL139079 putative acetyltransferase | | | |
|---|---|---|---|
| [Campylobacter jejuni] | | | |
| Identities = 46/170 (27%), Positives = 78/170 (45%), Gaps = 13/170 (7%) | | | |
| Query: | 7 | IRLAFPNEIDQIMLLIEEARAEIAKTGSDQWQKEDGYPNRNDIIDDILNGYAWVGIEDGM | 66 |
| | | I+ A +++ I+ + ++A + QW ++ YPN +DI +V E+ | |
| Sbjct: | 6 | IQKAVNKDLNSILEITKDALNAMKTMNFHQW--DENYPNEIVFQEDIQAQELYVFKENDE | 63 |
| Query: | 67 | LATYAAVIDGHE-EVYDAIYEGKWLHDNHRYLTFHRIAISNQFRGRGLAQTFLQGL---- | 121 |
| | | + + + + +E Y + K D YL HR+A+ +G+G+AQ L | |
| Sbjct: | 64 | ILGFICINEKFKPEFYKQVIFNKNYDDKAFYL--HRLAVKQNAKGKGVAQKLLNFCENFA | 121 |
| Query: | 122 | IEGHKGPDFRCDTHEKNVTMQHILNKLGYQYCGKVPLDGVR---LAYQKI | 168 |
| | | +E HK R DTH KN M + KL + +CG + + LAY+KI | |
| Sbjct: | 122 | LENHKA-SLRADTHSKNFPMNSLFKKLDFNFCGNFDIPNYQDPFLAYEKI | 170 |

[4116] No corresponding DNA sequence was identified in S. pyogenes.

[4117] Based on this analysis, it was predicted that these proteins and their epitopes could be useful antigens for vaccines or diagnostics.

### EXAMPLE 714

[4118] A DNA sequence (GBSx0758) was identified in S. agalactiae <SEQ ID 2197> which encodes the amino acid sequence <SEQ ID 2198>. Analysis of this protein sequence reveals the following:

Possible site: 28
>>> Seems to have no N-terminal signal sequence
----- Final Results -----
bacterial cytoplasm --- Certainty = 0.2968 (Affirmative) < succ>
bacterial membrane --- Certainty = 0.0000 (Not Clear) < succ>
bacterial outside --- Certainty = 0.0000 (Not Clear) < succ>

[4119] The protein has no significant homology with any sequences in the GENPEPT database.

[4120] No corresponding DNA sequence was identified in S. pyogenes.

[4121] Based on this analysis, it was predicted that this protein and its epitopes, could be useful antigens for vaccines or diagnostics.

### EXAMPLE 7151

[4122] A DNA sequence (GBSx0759) was identified in S. agalactiae <SEQ ID 2199> which encodes the amino acid sequence <SEQ ID 2200>. This protein is predicted to be D-3-phosphoglycerate dehydrogenase (serA). Analysis of this protein sequence reveals the following:

Possible site: 54
>>> Seems to have no N-terminal signal sequence
----- Final Results -----
bacterial cytoplasm --- Certainty = 0.3102 (Affirmative) < succ>
bacterial membrane --- Certainty = 0.0000 (Not Clear) < succ>
bacterial outside --- Certainty = 0.0000 (Not Clear) < succ>

[4123] A related GBS nucleic acid sequence <SEQ ID 10045> which encodes amino acid sequence <SEQ ID 10046> was also identified.

[4124] The protein has homology with the following sequences in the GENPEPT database:

| >GP: AAB99020 GB: U67544 phosphoglycerate dehydrogenase (serA) | | | |
|---|---|---|---|
| [Methanococcus jannaschii] | | | |
| Identities = 102/313 (32%), Positives = 168/313 (53%), Gaps = 21/313 (6%) | | | |
| Query: | 31 | ENPDAYIIRSQNLHNQDF---PSNLKAIARAGAGTNNIPIEEASAQGIVVFNTPGANANA | 87 |
| | | ++ D ++RS +D LK I RAG G +NI +E A+ +GI+V N P A++ + | |
| Sbjct: | 40 | KDADVLVVRSGTKVTRDVIEKAEKLKVIGRAGVGVDNIDVEAATEKGIIVVNAPDASSIS | 99 |
| Query: | 88 | VKEAVIAALLLSARDYLGANRWVNTLTGTDIPKQIEAGKKAFAGNEIAGKKLGVIGLGAI | 147 |
| | | V E + +L +AR N T K+ E +K F G E+ GK LGVIGLG I | |
| Sbjct: | 100 | VAELTMGLMLAAAR---------NIPQATASLKRGEWDRKRFKGIELYGKTLGVIGLGRI | 150 |
| Query: | 148 | GARIANDARRLGMTVLGYDPYVSIETAWNISSHVQRVKEIKDIFETCDYITIHVPLTNET | 207 |
| | | G ++ A+ GM ++GYDPY+ E A ++ V+ V +I ++ + D+IT+HVPLT +T | |
| Sbjct: | 151 | GQQVVKRAKAFGMNIIGYDPYIPKEVAESMG--VELVDDINELCKRADFITLHVPLTPKT | 208 |
| Query: | 208 | KHTFDAKAFSIMKKGTTIINFARAELVNNQELFEAIETGVVKRYITDFGDKE------LL | 261 |
| | | +H + ++MKK I+N AR L++ + L+EA++ G ++ D ++E LL | |
| Sbjct: | 209 | RHIIGREQIALMKKNAIIVNCARGGLIDEKALYEALKEGKIRAAALDVFEEEPPKDNPLL | 268 |
| Query: | 262 | NQKGITVFPHVGGSTDEAELNCAIMASQTIRCFMETGEITNSVNFPNVHQIQTAPFR-IT | 320 |
| | | + PH G ST+EA+ + ++ I+ + N VN PN+ Q + + | |
| Sbjct: | 269 | TLDNVIGTPHQGASTEEAQKAAGTIVAEQIKKVLRGELAENVVNMPNIPQEKLGKLKPYM | 328 |
| Query: | 321 | LINKNVPNIVAKI | 333 |
| | | L+ + + NIV ++ | |
| Sbjct: | 329 | LLAEMLGNIVMQV | 341 |

[4125] There is also homology to SEQ ID 124.

[4126] Based on this analysis, it was predicted that these proteins and their epitopes could be useful antigens for vaccines or diagnostics.

### EXAMPLE 716

[4127] A DNA sequence (GBSx0760) was identified in S. agalactiae <SEQ ID 2201> which encodes the amino acid sequence <SEQ ID 2202>. This protein is predicted to be methylated-DNA—protein-cysteine S-methyltransferase (ogt). Analysis of this protein sequence reveals the following:

```
Possible site: 18
>>> Seems to have no N-terminal signal sequence
----- Final Results -----
                            bacterial cytoplasm --- Certainty = 0.2460(Affirmative) < succ>
                              bacterial membrane --- Certainty = 0.0000(Not Clear) < succ>
                                bacterial outside --- Certainty = 0.0000(Not Clear) < succ>
```

[4128] The protein has homology with the following sequences in the GENPEPT database:

| >GP: AAF96913 GB: AE004427 methylated-DNA--protein-cysteine | | | |
|---|---|---|---|
| S-methyltransferase [Vibrio cholerae] | | | |
| Identities = 73/156 (46%), Positives = 99/156 (62%), Gaps = 9/156 (5%) | | | |
| Query: | 7 | YQSPLGEIRLLADNLGLSGLYFVGQKYDMLAVNQEEIVNMSNSYTLLGK--KWLDAYFSQ | 64 |
| | | Y SPLG + L A + GL G++F Q E + + +L K + LD YFS | |
| Sbjct: | 7 | YSSPLGPMTLQASSQGLLGVWFATQ-----TTQPEHLGDYVKECPILNKTIRQLDEYFSG | 61 |
| Query: | 65 | QNLP-SIPLSLRGTAFQTRVWQELQKIPFGDTKTYGELAKEL-NCQSAQAVGGAIGKNSI | 122 |
| | | Q +PL+ GTAFQ VW L KIP+G+ +Y +LA+ + N ++ +AVG A GKN I | |
| Sbjct: | 62 | QRTQFELPLAASGTAFQQSVWHALCKIPYGEIWSYQQLAEAIGNPKAVRAVGLANGKNPI | 121 |
| Query: | 123 | SLIIPCHRVLGRYGQLTGYAGGLERKSWLLEYEKEK | 158 |
| | | S+I+PCHRV+G+ GQLTGYAGGLERK++LLE EK + | |
| Sbjct: | 122 | SIIVPCHRVVGKNGQLTGYAGGLERKAFLLELEKRR | 157 |

[4129] No corresponding DNA sequence was identified in S. pyogenes.

[4130] Based on this analysis, it was predicted that this protein and its epitopes, could be useful antigens for vaccines or diagnostics.

### EXAMPLE 717

[4131] A DNA sequence (GBSx0761) was identified in S. agalactiae <SEQ ID 2203> which encodes the amino acid sequence <SEQ ID 2204>. Analysis of this protein sequence reveals the following:

```
Possible site: 42
>>> Seems to have no N-terminal signal sequence
----- Final Results -----
                            bacterial cytoplasm --- Certainty = 0.3137(Affirmative) < succ>
                              bacterial membrane --- Certainty = 0.0000(Not Clear) < succ>
                                bacterial outside --- Certainty = 0.0000(Not Clear) < succ>
```

[4132] The protein has homology with the following sequences in the GENPEPT database:

| >GP: BAB07204 GB: AP001518 arsenate reductase [Bacillus halodurans] | | | |
|---|---|---|---|
| Identities = 56/107 (52%), Positives = 74/107 (68%), Gaps = 1/107 (0%) | | | |
| Query: | 3 | TFYEYPKCTTCRSAKKELTELGLTFEAIDIKSNPPKVSLLKELLENSPYDLKKFFNTSGN | 62 |
| | | TFY+YPKC TC+ AKK L + G+ ++ I PP LK+L E S +LKKFFNTSG | |
| Sbjct: | 4 | TFYQYPKCGTCQKAKKWLDQHGIEVNSVHIVEQPPSKEELKQLYEQSGLELKKFFNTSGK | 63 |
| Query: | 63 | SYRELGLKDKFDDLTLDQALDLLASDGMLIKRPLLVKDNKILQIGYR | 109 |
| | | YRELGLKDK + + D+ L+ LASDGMLIKRP+L +K+ +G++ | |
| Sbjct: | 64 | KYRELGLKDKVKEASEDELLETLASDGMLIKRPILTDGDKV-TVGFK | 109 |

[4133] A related DNA sequence was identified in S. pyogenes <SEQ ID 2205> which encodes the amino acid sequence <SEQ ID 2206>. Analysis of this protein sequence reveals the following:

```
Possible site: 38
>>> Seems to have no N-terminal signal sequence
----- Final Results -----
                            bacterial cytoplasm --- Certainty = 0.3969(Affirmative) < succ>
                              bacterial membrane --- Certainty = 0.0000(Not Clear) < succ>
                                bacterial outside --- Certainty = 0.0000(Not Clear) < succ>
```

[4134] An alignment of the GAS and GBS proteins is shown below:

| Identities = 64/99 (64%), Positives = 79/99 (79%) | | | |
|---|---|---|---|
| Query: | 19 | ELTELGLTFEAIDIKSNPPKVSLLKELLENSPYDLKKFFNTSGNSYRELGLKDKFDDLTL | 78 |
| | | EL +L FEAIDIK+NPPK LK +E S Y +K FFNTSGNSYRELGLKDK D L+L | |
| Sbjct: | 3 | ELKQLVSDFEAIDIKANPPKAQDLKHWMETSGYTIKNFFNTSGNSYRELGLKDKIDQLSL | 62 |
| Query: | 79 | DQALDLLASDGMLIKRPLLVKDNKILQIGYRTKYKDLNL | 117 |
| | | D+A +LLA+DGMLIKRP+L+KD +LQ+GYR Y++L+L | |
| Sbjct: | 63 | DKAAELLATDGMLIKRPILIKDGNVLQVGYRKPYQELDL | 101 |

[4135] Based on this analysis, it was predicted that these proteins and their epitopes could be useful antigens for vaccines or diagnostics.

### EXAMPLE 718

[4136] A DNA sequence (GBSx0762) was identified in S. agalactiae <SEQ ID 2207> which encodes the amino acid sequence <SEQ ID 2208>. This protein is predicted to be exodeoxyribonuclease (exoA). Analysis of this protein sequence reveals the following:

```
Possible site: 22
>>> Seems to have no N-terminal signal sequence
----- Final Results -----
                            bacterial cytoplasm --- Certainty = 0.1859(Affirmative) < succ>
                              bacterial membrane --- Certainty = 0.0000(Not Clear) < succ>
                                bacterial outside --- Certainty = 0.0000(Not Clear) < succ>
```

[4137] The protein has homology with the following sequences in the GENPEPT database:

| >GP: AAA26879 GB: J04234 exodeoxyribonuclease [Streptococcus pneumoniae] | | | |
|---|---|---|---|
| Identities = 217/275 (78%), Positives = 245/275 (88%) | | | |
| Query: | 1 | MKLISWNIDSLNAALTSESTRALMSRQVIDTLVAEDADIIAIQETKLSAKGPTKKHLEVL | 60 |
| | | MKLISWNIDSLNAALTS+S RA +S++V+ TLVAE+ADIIAIQETKLSAKGPTKKH+E+L | |
| Sbjct: | 1 | MKLISWNIDSLNAALTSDSARAKLSQEVLQTLVAENADIIAIQETKLSAKGPTKKHVEIL | 60 |
| Query: | 61 | ETYFPEYDLVWRSSVEPARKGYAGTMFLYRKGLNPIVSFPEIDAPTTMDNEGRIITLELE | 120 |
| | | E FP Y+ WRSS EPARKGYAGTMFLY+K L P +SFPEI AP+TMD EGRIITLE + | |
| Sbjct: | 61 | EELFPGYENTWRSSQEPARKGYAGTMFLYKKELTPTISFPEIGAPSTMDLEGRIITLEFD | 120 |
| Query: | 121 | NCYITQVYTPNAGDGLKRLADRQIWDIKYAEYLATLDSQKPVLATGDYNVAHKEIDLANP | 180 |
| | | ++TQVYTPNAGDGLKRL +RQ+WD KYAEYLA LD +KPVLATGDYNVAH EIDLANP | |
| Sbjct: | 121 | AFFVTQVYTPNAGDGLKRLEERQVWDAKYAEYLAELDKEKPVLATGDYNVAHNEIDLANP | 180 |
| Query: | 181 | SSNRRSAGFTAEERQGFTNLLAKGFTDTFRYLHGDVPNVYSWWAQRSRTSKINNTGWRID | 240 |
| | | +SNRRS GFT EER GFTNLLA GFTDTFR++HGDVP Y+WWAQRS+TSKINNTGWRID | |
| Sbjct: | 181 | ASNRRSPGFTDEERAGFTNLLATGFTDTFRHVHGDVPERYTWWAQRSKTSKINNTGWRID | 240 |
| Query: | 241 | YWLTSNRVADKITKSEMIHSGDRQDHTPIILEIEL | 275 |
| | | YWLTSNR+ADK+TKS+MI SG RQDHTPI+LEI+L | |
| Sbjct: | 241 | YWLTSNRIADKVTKSDMIDSGARQDHTPIVLEIDL | 275 |

[4138] A related DNA sequence was identified in S. pyogenes <SEQ ID 2209> which encodes the amino acid sequence <SEQ ID 2210>. Analysis of this protein sequence reveals the following:

```
Possible site: 13
>>> Seems to have no N-terminal signal sequence
----- Final Results -----
                            bacterial cytoplasm --- Certainty = 0.2181(Affirmative) < succ>
                              bacterial membrane --- Certainty = 0.0000(Not Clear) < succ>
                                bacterial outside --- Certainty = 0.0000(Not Clear) < succ>
```

[4139] An alignment of the GAS and GBS proteins is shown below:

| Identities = 221/275 (80%), Positives = 251/275 (90%) | | | |
|---|---|---|---|
| Query: | 1 | MKLISWNIDSLNAALTSESTRALMSRQVIDTLVAEDADIIAIQETKLSAKGPTKKHLEVL | 60 |
| | | MKLISWNIDSLNAALT ES RAL+SR V+DTLVA+DADIIAIQETKLSAKGPTKKH+E L | |
| Sbjct: | 1 | MKLISWNIDSLNAALTGESPRALLSRAVLDTLVAQDADIIAIQETKLSAKGPTKKHIETL | 60 |
| Query: | 61 | ETYFPEYDLVWRSSVEPARKGYAGTMFLYRKGLNPIVSFPEIDAPTTMDNEGRIITLELE | 120 |
| | | +YFP Y VWRSSVEPARKGYAGTMFLY+ LNP+++FPEI APTTMD EGRIITLE E | |
| Sbjct: | 61 | LSYFPNYLHVWRSSVEPARKGYAGTMFLYKNTLNPVITFPEIGAPTTMDAEGRIITLEFE | 120 |
| Query: | 121 | NCYITQVYTPNAGDGLKRLADRQIWDIKYAEYLATLDSQKPVLATGDYNVAHKEIDLANP | 180 |
| | | + ++TQVYTPNAGDGL+RL DRQIWD KYA+YL LD+QKPVLATGDYNVAHKEIDLANP | |
| Sbjct: | 121 | DFFVTQVYTPNAGDGLRRLDDRQIWDHKYADYLTELDAQKPVLATGDYNVAHKEIDLANP | 180 |
| Query: | 181 | SSNRRSAGFTAEERQGFTNLLAKGFTDTFRYLHGDVPNVYSWWAQRSRTSKINNTGWRID | 240 |
| | | +SNRRS GFT EERQGFTNLLA+GFTDTFR++HGD+P+VY+WWAQRS+TSKINNTGWRID | |
| Sbjct: | 181 | NSNRRSPGFTDEERQGFTNLLARGFTDTFRHVHGDIPHVYTWWAQRSKTSKINNTGWRID | 240 |
| Query: | 241 | YWLTSNRVADKITKSEMIHSGDRQDHTPIILEIEL | 275 |
| | | YWL SNR+ DK+ +SEMI SG+RQDHTPI+L+I+L | |
| Sbjct: | 241 | YWLASNRLVDKVKRSEMISSGERQDHTPILLDIDL | 275 |

[4140] Based on this analysis, it was predicted that these proteins and their epitopes could be useful antigens for vaccines or diagnostics.

### EXAMPLE 719

[4141] A DNA sequence (GBSx0763) was identified in S. agalactiae <SEQ ID 2211> which encodes the amino acid sequence <SEQ ID 2212>. Analysis of this protein sequence reveals the following:

| Possible site: 39 | | | | |
|---|---|---|---|---|
| >>> Seems to have no N-terminal signal sequence | | | | |
| | INTEGRAL | Likelihood = −7.96 | Transmembrane | 28-44 (22-49) |

```
----- Final Results -----
                              bacterial membrane --- Certainty = 0.4185(Affirmative) < succ>
                                bacterial outside --- Certainty = 0.0000(Not Clear) < succ>
                            bacterial cytoplasm --- Certainty = 0.0000(Not Clear) < succ>
```

[4142] A related GBS nucleic acid sequence <SEQ ID 8645> which encodes amino acid sequence <SEQ ID 8646> was also identified. Analysis of this protein sequence reveals the following:

| Lipop Possible site: −1 Crend: 5 | | | | |
|---|---|---|---|---|
| McG: Discrim Score: 17.78 | | | | |
| GvH: Signal Score (−7.5): −4.56 | | | | |
| Possible site: 55 | | | | |
| >>> Seems to have an uncleavable N-term signal seq | | | | |
| ALOM program count: 1 value: −7.96 threshold: 0.0 | | | | |
| | INTEGRAL | Likelihood = −7.96 | Transmembrane | 8-24 (2-29) |
| | PERIPHERAL | Likelihood = 9.28 | 138 | |

```
modified ALOM score: 2.09
*** Reasoning Step: 3
----- Final Results -----
                              bacterial membrane --- Certainty = 0.4185(Affirmative) < succ>
                                bacterial outside --- Certainty = 0.0000(Not Clear) < succ>
                            bacterial cytoplasm --- Certainty = 0.0000(Not Clear) < succ>
```

[4143] The protein has homology with the following sequences in the GENPEPT database:

| >GP: AAD11512 GB: U60828 unknown [Lactococcus lactis] | | | |
|---|---|---|---|
| Identities = 53/240 (22%), Positives = 102/240 (42%), Gaps = 24/240 (10%) | | | |
| Query: | 65 | PTILIPGSSATQERFNSMLAQL----NQMGEKHSVLKLTVKKDNSIIYNGQISGNDHKPY | 120 |
| | | PTI I GS + ++ +L N +K V+ + K+ + GQIS ++ P | |
| Sbjct: | 64 | PTIYIGGSGGNVTSIDWLVERLLPIKNISSQKSLVMTSNITKNYELKVEGQISQDNKYPI | 123 |
| Query: | 121 | IVIGFENNEDGYSNIKKQTKWLQIAMNDLQKKYKFKRFNAIGHSNGGLSWTIFLEDYYDS | 180 |
| | | I G ++ + +K LQ + L + Y+ N +G+S+G ++ D ++ | |
| Sbjct: | 124 | IEFA---TVKGTNSGELFSKGLQKIIVYLTENYQVPWINLVGYSSGATGAVYYMMDTGNN | 180 |
| Query: | 181 | DEFD-MKSLLTMGTPFNFEES-----NTSN--------HTQMLKDLISNKGNIPSSLMVY | 226 |
| | | F + +++ +N E + + SN T+M + + N + S + | |
| Sbjct: | 181 | PNFPPVNKYVSLDGEYNNETNLQLGESLSNVLKEGPIVKTEMYQYIADNYQKVSSKTQML | 240 |
| Query: | 227 | NLAGT--NSYDGDKIVPFASVETGKYIFQETAKHYTQLTVTGNNATHSDLPDNPEVIQYV | 284 |
| | | L G + D +P+A + ++F++ T T+ +HS P NP V++YV | |
| Sbjct: | 241 | LLEGNFNSEKQTDSAIPWADSFSIYHLFKKNGNEITT-TLYPTKTSHSQAPKNPTVVKYV | 299 |

[4144] No corresponding DNA sequence was identified in S. pyogenes.

[4145] SEQ ID 8646 (GBS219) was expressed in E. coli as a His-fusion product. SDS-PAGE analysis of total cell extract is shown in FIG. 43 (lane 3; MW 31.6 kDa). It was also expressed in E. coli as a GST-fusion product. SDS-PAGE analysis of total cell extract is shown in FIG. 47 (lane 7; MW 56 kDa).

[4146] GBS219-GST was purified as shown in FIG. 203, lane 5.

[4147] Based on this analysis, it was predicted that these proteins and their epitopes could be useful antigens for vaccines or diagnostics.

### EXAMPLE 720

[4148] A DNA sequence (GBSx0764) was identified in S. agalactiae <SEQ ID 2213> which encodes the amino acid sequence <SEQ ID 2214>. This protein is predicted to be PTS system, cellobiose-specific IIC component. Analysis of this protein sequence reveals the following:

| Possible site: 46 | | | | |
|---|---|---|---|---|
| >>> Seems to have no N-terminal signal sequence | | | | |
| | INTEGRAL | Likelihood = −7.64 | Transmembrane | 263-279 (260-282) |
| | INTEGRAL | Likelihood = −6.26 | Transmembrane | 200-216 (197-226) |
| | INTEGRAL | Likelihood = −5.95 | Transmembrane | 157-173 (156-175) |
| | INTEGRAL | Likelihood = −5.79 | Transmembrane | 307-323 (306-332) |
| | INTEGRAL | Likelihood = −5.68 | Transmembrane | 131-147 (126-148) |
| | INTEGRAL | Likelihood = −4.73 | Transmembrane | 375-391 (370-396) |
| | INTEGRAL | Likelihood = −3.61 | Transmembrane | 101-117 (98-119) |
| | INTEGRAL | Likelihood = −1.75 | Transmembrane | 326-342 (324-342) |
| | INTEGRAL | Likelihood = −0.37 | Transmembrane | 25-41 (25-41) |
| | INTEGRAL | Likelihood = −0.16 | Transmembrane | 71-87 (71-88) |

```
----- Final Results -----
                              bacterial membrane --- Certainty = 0.4057(Affirmative) < succ>
                                bacterial outside --- Certainty = 0.0000(Not Clear) < succ>
                            bacterial cytoplasm --- Certainty = 0.0000(Not Clear) < succ>
```

[4149] The protein has homology with the following sequences in the GENPEPT database:

| >GP: AAC74807 GB: AE000268 PEP-dependent phosphotransferase enzyme II | | | |
|---|---|---|---|
| for cellobiose, arbutin, and salicin [Escherichia coli K12] | | | |
| Identities = 60/197 (30%), Positives = 83/197 (41%), Gaps = 12/197 (6%) | | | |
| Query: | 209 | LAIFLTLSGLFVPDIL--FRPYSYFSVVSENLNAALSQHTDKIPYLYTFYTVKNSFAMFG | 266 |
| | | LA+ +G+ P L Y + V L A + H P L +SF G | |
| Sbjct: | 253 | LALTALDNGIMTPWALENIATYQQYGSVEAALAAGKTFHIWAKPML-------DSFIFLG | 305 |
| Query: | 267 | GIGILLSLFLAVLYESRKLQSKNYYKLTLLTLTPLIFDQNLPFLVGLPVILQPILFIPMV | 326 |
| | | G G L L LA+ SR+ +Y ++ L L IF N P L GLP+I+ P++FIP V | |
| Sbjct: | 306 | GSGATLGLILAIFIASRRA---DYRQVAKLALPSGIFQINEPILFGLPIIMNPVMFIPFV | 362 |
| Query: | 327 | LTTIFAEAFGALMLYLKFVDPAVYTVPSGTPSLLFGFLASNGDWRYLPVTAIILVVGFFI | 386 |
| | | L A Y+ + P P P+ L F +NG L V L + I | |
| Sbjct: | 363 | LVQPILAAITLAAYYMGIIPPVTNIAPWTMPTGLGAFFNTNGSVAALLVALFNLGIATLI | 422 |
| Query: | 387 | YRPFVKIAFAKEEQYEK | 403 |
| | | Y PFV +A + +K | |
| Sbjct: | 423 | YLPFVVVANKAQNAIDK | 439 |

[4150] Based on this analysis, it was predicted that this protein and its epitopes, could be useful antigens for vaccines or diagnostics.

### EXAMPLE 721

[4151] A DNA sequence (GBSx0765) was identified in S. agalactiae <SEQ ID 2217> which encodes the amino acid sequence <SEQ ID 2218>. Analysis of this protein sequence reveals the following:

```
Possible site: 14
>>> Seems to have no N-terminal signal sequence
----- Final Results -----
                            bacterial cytoplasm --- Certainty = 0.1991(Affirmative) < succ>
                              bacterial membrane --- Certainty = 0.0000(Not Clear) < succ>
                                bacterial outside --- Certainty = 0.0000(Not Clear) < succ>
```

[4152] The protein has no significant homology with any sequences in the GENPEPT database.

[4153] No corresponding DNA sequence was identified in S. pyogenes.

[4154] Based on this analysis, it was predicted that this protein and its epitopes, could be useful antigens for vaccines or diagnostics.

### EXAMPLE 722

[4155] A DNA sequence (GBSx0766) was identified in S. agalactiae <SEQ ID 2219> which encodes the amino acid sequence <SEQ ID 2220>. Analysis of this protein sequence reveals the following:

| Possible site: 39 | | | | |
|---|---|---|---|---|
| >>> Seems to have no N-terminal signal sequence | | | | |
| | INTEGRAL | Likelihood = −5.79 | Transmembrane | 188-204 (179-206) |
| | INTEGRAL | Likelihood = −5.36 | Transmembrane | 105-121 (104-127) |
| | INTEGRAL | Likelihood = −4.41 | Transmembrane | 212-228 (210-229) |
| | INTEGRAL | Likelihood = −3.45 | Transmembrane | 72-88 (69-89) |
| | INTEGRAL | Likelihood = −0.48 | Transmembrane | 124-140 (124-140) |

```
----- Final Results -----
                              bacterial membrane --- Certainty = 0.3314(Affirmative) < succ>
                                bacterial outside --- Certainty = 0.0000(Not Clear) < succ>
                            bacterial cytoplasm --- Certainty = 0.0000(Not Clear) < succ>
```

[4156] A related GBS nucleic acid sequence <SEQ ID 8647> which encodes amino acid sequence <SEQ ID 8648> was also identified. Analysis of this protein sequence reveals the following:

| Lipop Possible site: −1 Crend: 6 | | | | |
|---|---|---|---|---|
| SRCFLG: 0 | | | | |
| McG: Length of UR: 5 | | | | |
| Peak Value of UR: 2.99 | | | | |
| Net Charge of CR: 4 | | | | |
| McG: Discrim Score: 6.88 | | | | |
| GvH: Signal Score (−7.5): −2.86 | | | | |
| Possible site: 30 | | | | |
| >>> Seems to have an uncleavable N-term signal seq | | | | |
| Amino Acid Composition: calculated from 1 | | | | |
| ALOM program count: 5 value: −5.79 threshold: 0.0 | | | | |
| | INTEGRAL | Likelihood = −5.79 | Transmembrane | 179-195 (170-197) |
| | INTEGRAL | Likelihood = −5.36 | Transmembrane | 96-112 (95-118) |
| | INTEGRAL | Likelihood = −4.41 | Transmembrane | 203-219 (201-220) |
| | INTEGRAL | Likelihood = −3.45 | Transmembrane | 63-79 (60-80) |
| | PERIPHERAL | Likelihood = 0.10 | 18 | |

```
modified ALOM score: 1.66
icm1 HYPID: 7 CFP: 0.331
*** Reasoning Step: 3
----- Final Results -----
                              bacterial membrane --- Certainty = 0.3314(Affirmative) < succ>
                                bacterial outside --- Certainty = 0.0000(Not Clear) < succ>
        bacterial cytoplasm --- Certainty = 0.0000(Not Clear) < succ>
```

[4157] The protein has no significant homology with any sequences in the GENPEPT database.

[4158] A related DNA sequence was identified in S. pyogenes <SEQ ID 2221> which encodes the amino acid sequence <SEQ ID 2222>. Analysis of this protein sequence reveals the following:

| Possible site: 30 | | | | |
|---|---|---|---|---|
| >>> Seems to have a cleavable N-term signal seq. | | | | |
| | INTEGRAL | Likelihood = −11.20 | Transmembrane | 179-195 (173-201) |
| | INTEGRAL | Likelihood = −3.66 | Transmembrane | 96-112 (95-113) |
| | INTEGRAL | Likelihood = −1.44 | Transmembrane | 203-219 (203-219) |
| | INTEGRAL | Likelihood = −0.96 | Transmembrane | 115-131 (115-131) |
| | INTEGRAL | Likelihood = −0.64 | Transmembrane | 63-79 (63-79) |

```
----- Final Results -----
                              bacterial membrane --- Certainty = 0.5479(Affirmative) < succ>
                                bacterial outside --- Certainty = 0.0000(Not Clear) < succ>
                            bacterial cytoplasm --- Certainty = 0.0000(Not Clear) < succ>
```

[4159] The protein has no significant homology with any sequences in the GENPEPT database.

[4160] An alignment of the GAS and GBS proteins is shown below:

| Identities = 160/228 (70%), Positives = 185/228 (80%) | | | |
|---|---|---|---|
| Query: | 10 | MSKKSHRQYQIYEGLRCAVALCFISGYINAFTYVTQGKRFAGVQTGNLLSFAIHLSNKHY | 69 |
| | | MSKK + YQ+YEGLRCA+ LCFISGY+NAFTY+TQGKRFAGVQTGNLLSFAI LS + | |
| Sbjct: | 1 | MSKKKRKHYQVYEGLRCAMTLCFISGYVNAFTYMTQGKRFAGVQTGNLLSFAIRLSEQQL | 60 |
| Query: | 70 | SQALAFLLPIMVFMLGQSFTYFMNRWANKHQLHWYLLSSFALTQVAIVTIILTPFLPSSF | 129 |
| | | +AL FLLP++VFMLGQSFTYFM+RWA K LHWYLLSS LT +A T + TPFLPS+ | |
| Sbjct: | 61 | KEALQFLLPMIVFMLGQSFTYFMHRWATKKGLHWYLLSSVILTGIAFGTALFTPFLPSNV | 120 |
| Query: | 130 | TVAGLAFFASIQVDTFKSLRGAPYANMMMTGNIKNAAYLLTKGLYEKNSDIFLIARNTII | 189 |
| | | TVA LAFFASIQVDTFK+LRGA YAN+MMTGNIKNAAYLLTKGLYEKN ++ I RNT+I | |
| Sbjct: | 121 | TVAALAFFASIQVDTFKTLRGASYANVMMTGNIKNAAYLLTKGLYEKNHELTHIGRNTLI | 180 |
| Query: | 190 | IIGGFIFGVVCSTYFSSKLGEWSLSLILIPLLYVNLLLGHEFYNLQVE | 237 |
| | | +I F GVVCST GE++L IL+PLLYVN LL EFY++Q + | |
| Sbjct: | 181 | VILAFAVGVVCSTLLCIAYGEYALMPILMPLLYVNYLLAQEFYHIQTK | 228 |

[4161] Based on this analysis, it was predicted that these proteins and their epitopes could be useful antigens for vaccines or diagnostics.

### EXAMPLE 723

[4162] A DNA sequence (GBSx0767) was identified in S. agalactiae <SEQ ID 2223> which encodes the amino acid sequence <SEQ ID 2224>. This protein is predicted to be tellurite resistance protein. Analysis of this protein sequence reveals the following:

| Possible site: 20 | | | | |
|---|---|---|---|---|
| >>> Seems to have no N-terminal signal sequence | | | | |
| | INTEGRAL | Likelihood = −0.00 | Transmembrane | 190-206 (190-206) |

```
----- Final Results -----
                              bacterial membrane --- Certainty = 0.1001(Affirmative) < succ>
                                bacterial outside --- Certainty = 0.0000(Not Clear) < succ>
                            bacterial cytoplasm --- Certainty = 0.0000(Not Clear) < succ>
```

[4163] The protein has homology with the following sequences in the GENPEPT database:

| >GP: AAC22923 GB: U32807 tellurite resistance protein (tehB) | | | |
|---|---|---|---|
| [Haemophilus influenzae Rd] | | | |
| Identities = 164/282 (58%), Positives = 205/282 (72%), Gaps = 1/282 (0%) | | | |
| Query: | 7 | LLPYKTMPVWTAQSIPKAFLEKHNTKEGTWAKLTILSGSLVFYQLSPDGEEISRHIFDAS | 66 |
| | | L+ YK MPVWT ++P+ F EKHNTK GTW KLT+L G L FY+L+ +G+ I+ HIF | |
| Sbjct: | 5 | LICYKQMPVWTKDNLPQMFQEKHNTKVGTWGKLTVLKGKLKFYELTENGDVIAEHIFTPE | 64 |
| Query: | 67 | SDIPFVDPQVWHKVSPNSPDLSCYLTFYCQKEDYFHKKYGLTRTHSEVIASAPLLSEKSN | 126 |
| | | S IPFV+PQ WH+V S DL C L FYC+KEDYF KKY T H +V+ +A ++S | |
| Sbjct: | 65 | SHIPFVEPQAWHRVEALSDDLECTLGFYCKKEDYFSKKYNTTAIHGDVVDAAKIISP-CK | 123 |
| Query: | 127 | ILDLGCGQGRNSLYLSLLGHQVTSVDSNGQSLVALENMALEEELPYNIKRYDINTAAIEG | 186 |
| | | +LDLGCGQGRNSLYLSLLG+ VTS D N S+ L +E L + YDIN A I+ | |
| Sbjct: | 124 | VLDLGCGQGRNSLYLSLLGYDVTSWDHNENSIAFLNETKEKENLNISTALYDINAANIQE | 183 |
| Query: | 187 | HYDFILSTVVFMFLNPDCISDIILQMQSHTQIGGYNLIVSAMDTAENPCPLPFPFTFKEG | 246 |
| | | +YDFI+STVVFMFLN + + II M+ HT +GGYNLIV+AM T + PCPLPF FTF E | |
| Sbjct: | 184 | NYDFIVSTVVFMFLNRERVPSIIKNMKEHTNVGGYNLIVAAMSTDDVPCPLPFSFTFAEN | 243 |
| Query: | 247 | QLKSYYNDWEIIKYNENLGELHRVDENGNRLKLQFATLLARK | 288 |
| | | +LK YY DWE ++YNEN+GELH+ DENGNR+K++FAT+LARK | |
| Sbjct: | 244 | ELKEYYKDWEFLEYNENMGELHKTDENGNRIKMKFATMLARK | 285 |

[4164] No corresponding DNA sequence was identified in S. pyogenes.

[4165] SEQ ID 2224 (GBS95) was expressed in E. coli as a His-fusion product. SDS-PAGE analysis of total cell extract is shown in FIG. 5 (lane 3; MW 35.6 kDa) and in FIG. 12 (lane 4; MW 35.6 kDa). The GBS95-His fusion product was purified (FIG. 191, lane 7) and used to immunise mice. The resulting antiserum was used for FACS (FIG. 292), which confirmed that the protein is immunoaccessible on GBS bacteria.

[4166] Based on this analysis, it was predicted that this protein and its epitopes, could be useful antigens for vaccines or diagnostics.

### EXAMPLE 724

[4167] A DNA sequence (GBSx0768) was identified in S. agalactiae <SEQ ID 2225> which encodes the amino acid sequence <SEQ ID 2226>. This protein is predicted to be methionyl-tRNA synthetase (metS). Analysis of this protein sequence reveals the following:

| Possible site: 47 | | | | |
|---|---|---|---|---|
| >>> Seems to have no N-terminal signal sequence | | | | |
| | INTEGRAL | Likelihood = −0.32 | Transmembrane | 473-489 (473-489) |

```
----- Final Results -----
                              bacterial membrane --- Certainty = 0.1128(Affirmative) < succ>
                                bacterial outside --- Certainty = 0.0000(Not Clear) < succ>
                            bacterial cytoplasm --- Certainty = 0.0000(Not Clear) < succ>
```

[4168] A related GBS nucleic acid sequence <SEQ ID 10043> which encodes amino acid sequence <SEQ ID 10044> was also identified.

[4169] The protein has homology with the following sequences in the GENPEPT database:

| >GP: CAB11814 GB: Z99104 methionyl-tRNA synthetase [Bacillus subtilis] | | | |
|---|---|---|---|
| Identities = 395/667 (59%), Positives = 501/667 (74%), Gaps = 12/667 (1%) | | | |
| Query: | 20 | EKKSFYITTPIYYPSGKLHIGSAYTTIACDVLARYKRMMGFDVQYLTGLDEHGQKIQQKA | 79 |
| | | E +FYITTPIYYPSGKLHIG AYTT+A D +ARYKR+ GFDV+YLTG DEHGQKIQQKA | |
| Sbjct: | 4 | ENNTFYITTPIYYPSGKLHIGHAYTTVAGDAMARYKRLKGFDVRYLTGTDEHGQKIQQKA | 63 |
| Query: | 80 | EEAGITPQEYVDGMAESVKTLWELLDISYDKFIRTTDTYHEEAVAKIFEQLLAQGDIYLG | 139 |
| | | E+ ITPQEYVD A ++ LW+ L+IS D FIRTT+ H+ + K+F++LL GDIYL | |
| Sbjct: | 64 | EQENITPQEYVDRAAADIQKLWKQLEISNDDFIRTTEKRHKVVIEKVFQKLLDNGDIYLD | 123 |
| Query: | 140 | EYTGWYSVSDEEFFTESQLAEVYRDENGNMIGGVAP-SGHEVEKVSEESYFFRMSKYADR | 198 |
| | | EY GWYS+ DE F+TE+QL ++ R+E G +IGG +P SGH VE + EESYFFRM KYADR | |
| Sbjct: | 124 | EYEGWYSIPDETFYTETQLVDIERNEKGEVIGGKSPDSGHPVELIKEESYFFRMGKYADR | 183 |
| Query: | 199 | LKAYYAEHPEFIQPDGRMNEMLKNFIEPGLEDLAVSRTTYTWGVQVPSNPKHVIYVWIDA | 258 |
| | | L YY E+P FIQP+ R NEM+ NFI+PGLEDLAVSRTT+ WGV+VP NPKHV+YVWIDA | |
| Sbjct: | 184 | LLKYYEENPTFIQPESRKNEMINNFIKPGLEDLAVSRTTFDWGVKVPENPKHVVYVWIDA | 243 |
| Query: | 259 | LMNYISALGYGWSDDLSQYHKFWPADIHMIGKDILRFHSIYWPIMLMALDLPLPKRLVAH | 318 |
| | | L NY++ALGY +D Y K+WPAD+H++GK+I+RFH+IYWPIMLMALDLPLPK++ AH | |
| Sbjct: | 244 | LFNYLTALGYDTEND-ELYQKYWPADVHLVGKEIVRFHTIYWPIMLMALDLPLPKQVFAH | 302 |
| Query: | 319 | GWFVMQDGKMSKSKGNVVYPEMLVERFGLDPLRYYLMRSLPVGSDGTFTPEDYVGRINYE | 378 |
| | | GW +M+DGKMSKSKGNVV P L+ER+GLD LRYYL+R +P GSDG FTPE +V RINY+ | |
| Sbjct: | 303 | GWLLMKDGKMSKSKGNVVDPVTLIERYGLDELRYYLLREVPFGSDGVFTPEGFVERINYD | 362 |
| Query: | 379 | LANDLGNLLNRTIAMVNKYFDGEVPRF-AVATDFDADLASVATDSIENYHKQMEAVDFPR | 437 |
| | | LANDLGNLLNRT+AM+NKYFDG++ + T+FD L SVA ++++ Y K ME ++F | |
| Sbjct: | 363 | LANDLGNLLNRTVAMINKYFDGQIGSYKGAVTEFDHTLTSVAEETVKAYEKAMENMEFSV | 422 |
| Query: | 438 | ALEAVWNLISRTNKYIDETAPWVLAKDETDRDKLAAVMSHLVASLRVVAHLIQPFMMETS | 497 |
| | | AL +W LISRTNKYIDETAPWVLAKD ++L +VM HL SLR+ A L+QPF+ +T | |
| Sbjct: | 423 | ALSTLWQLISRTNKYIDETAPWVLAKDPAKEEELRSVMYHLAESLRISAVLLQPFLTKTP | 482 |
| Query: | 498 | DAIMEQLGL--GATFDLEKLT-FADLPEGVRVVAKGSPIFPRLDMEDEITYIKEQMNAGK | 554 |
| | | + + EQLG+ + + +T F L + V KG P+FPRL+ E+EI YIK +M G | |
| Sbjct: | 483 | EKMFEQLGITDESLKAWDSITAFGQLKD--TKVQKGEPLFPRLEAEEEIAYIKGKMQ-GS | 539 |
| Query: | 555 | APVEKEWVPEEVELTSSKGQIKFEDFDAVEIRVAEVIEVEKVEGSDKLLRFRLDAGDEGH | 614 |
| | | AP ++E EE + +I + F VE+RVAEVIE E V+ +D+LL+ +LD G E | |
| Sbjct: | 540 | APAKEETKEEEPQEVDRLPEITIDQFMDVELRVAEVIEAEPVKKADRLLKLQLDLGFE-K | 598 |
| Query: | 615 | RQILSGIAKFYPNEQELVGKKLQIVANLKPRKMMKKYVSQGMILSAEHDGKLTVLTVDSA | 674 |
| | | RQ++SGIAK Y E ELVGKKL V NLKP K ++ +SQGMIL+ E DG L V+++D + | |
| Sbjct: | 599 | RQVVSGIAKHYTPE-ELVGKKLVCVTNLKPVK-LRGELSQGMILAGEADGVLKVVSIDQS | 656 |
| Query: | 675 | VANGSII | 681 |
| | | + G+ I | |
| Sbjct: | 657 | LPKGTRI | 663 |

[4170] A related DNA sequence was identified in S. pyogenes <SEQ ID 2227> which encodes the amino acid sequence <SEQ ID 2228>. Analysis of this protein sequence reveals the following:

```
Possible site: 29
>>> Seems to have no N-terminal signal sequence
----- Final Results -----
                            bacterial cytoplasm --- Certainty = 0.1245(Affirmative) < succ>
                              bacterial membrane --- Certainty = 0.0000(Not Clear) < succ>
                                bacterial outside --- Certainty = 0.0000(Not Clear) < succ>
```

[4171] An alignment of the GAS and GBS proteins is shown below:

| Identities = 516/665 (77%), Positives = 573/665 (85%), Gaps = 4/665 (0%) | | | |
|---|---|---|---|
| Query: | 21 | KKSFYITTPIYYPSGKLHIGSAYTTIACDVLARYKRMMGFDVQYLTGLDEHGQKIQQKAE | 80 |
| | | KK FYITTPIYYPSGKLHIGSAYTTIACDVLARYKR+MG +V YLTGLDEHGQKIQ KA+ | |
| Sbjct: | 3 | KKPFYITTPIYYPSGKLHIGSAYTTIACDVLARYKRLMGHEVFYLTGLDEHGQKIQTKAK | 62 |
| Query: | 81 | EAGITPQEYVDGMAESVKTLWELLDISYDKFIRTTDTYHEEAVAKIFEQLLAQGDIYLGE | 140 |
| | | EAGITPQ YVD MA+ VK LW+LLDISYD FIRTTD YHEE VA +FE+LLAQ DIYLGE | |
| Sbjct: | 63 | EAGITPQTYVDNMAKDVKALWQLLDISYDTFIRTTDDYHEEVVAAVFEKLLAQDDIYLGE | 122 |
| Query: | 141 | YTGWYSVSDEEFFTESQLAEVYRDENGNMIGGVAPSGHEVEKVSEESYFFRMSKYADRLK | 200 |
| | | Y+GWYSVSDEEFFTESQL EV+RDE+G +IGG+APSGHEVE VSEESYF R+SKY DRL | |
| Sbjct: | 123 | YSGWYSVSDEEFFTESQLKEVFRDEDGQVIGGIAPSGHEVEWVSEESYFLRLSKYDDRLV | 182 |
| Query: | 201 | AYYAEHPEFIQPDGRMNEMLKNFIEPGLEDLAVSRTTYTWGVQVPSNPKHVIYVWIDALM | 260 |
| | | A++ E P+FIQPDGRMNEM+KNFIEPGLEDLAVSRTT+TWGV VPS+PKHV+YVWIDAL+ | |
| Sbjct: | 183 | AFFKERPDFIQPDGRMNEMVKNFIEPGLEDLAVSRTTFTWGVPVPSDPKHVVYVWIDALL | 242 |
| Query: | 261 | NYISALGYGWSDDLSQYHKFWPADI-HMIGKDILRFHSIYWPIMLMALDLPLPKRLVAHG | 319 |
| | | NY +ALGY ++ + + KFW + HM+GKDILRFHSIYWPI+LM LDLP+P RL+AHG | |
| Sbjct: | 243 | NYATALGYRQANH-ANFDKFWNGTVFHMVGKDILRFHSIYWPILLMMLDLPMPDRLIAHG | 301 |
| Query: | 320 | WFVMQDGKMSKSKGNVVYPEMLVERFGLDPLRYYLMRSLPVGSDGTFTPEDYVGRINYEL | 379 |
| | | WFVM+DGKMSKSKGNVVYPEMLVERFGLDPLRYYLMRSLPVGSDGTFTPEDYVGRINYEL | |
| Sbjct: | 302 | WFVMKDGKMSKSKGNVVYPEMLVERFGLDPLRYYLMRSLPVGSDGTFTPEDYVGRINYEL | 361 |
| Query: | 380 | ANDLGNLLNRTIAMVNKYFDGEVPRFA-VATDFDADLASVATDSIENYHKQMEAVDFPRA | 438 |
| | | ANDLGNLLNRT+AM+NKYFDG VP + T FDADL+ + + +YHK MEAVD+PRA | |
| Sbjct: | 362 | ANDLGNLLNRTVAMINKYFDGTVPAYVDNGTAFDADLSQLIDAQLADYHKHMEAVDYPRA | 421 |
| Query: | 439 | LEAVWNLISRTNKYIDETAPWVLAKDETDRDKLAAVMSHLVASLRVVAHLIQPFMMETSD | 498 |
| | | LEAVW +I+RTNKYIDETAPWVLAK++ D+ +LA+VM+HL ASLR+VAH+IQPFMMETS | |
| Sbjct: | 422 | LEAVWTIIARTNKYIDETAPWVLAKEDGDKAQLASVMAHLAASLRLVAHVIQPFMMETSA | 481 |
| Query: | 499 | AIMEQLGLGATFDLEKLTFADLPEGVRVVAKGSPIFPRLDMEDEITYIKEQMNAGKA-PV | 557 |
| | | AIM QLGL DL L AD P +VVAKG+PIFPRLDME EI YIK QM A | |
| Sbjct: | 482 | AIMAQLGLEPVSDLSTLALADFPANTKVVAKGTPIFPRLDMEAEIDYIKAQMGDSSAISQ | 541 |
| Query: | 558 | EKEWVPEEVELTSSKGQIKFEDFDAVEIRVAEVIEVEKVEGSDKLLRFRLDAGDEGHRQI | 617 |
| | | EKEWVPEEV L S K I FE FDAVEIRVAEV EV KVEGS+KLLRFR+DAGD RQI | |
| Sbjct: | 542 | EKEWVPEEVALKSEKDVITFETFDAVEIRVAEVKEVSKVEGSEKLLRFRVDAGDGQDRQI | 601 |
| Query: | 618 | LSGIAKFYPNEQELVGKKLQIVANLKPRKMMKKYVSQGMILSAEHDGKLTVLTVDSAVAN | 677 |
| | | LSGIAKFYPNEQELVGKKLQIVANLKPRKMMKKY+SQGMILSAEH +LTVLTVDS+V N | |
| Sbjct: | 602 | LSGIAKFYPNEQELVGKKLQIVANLKPRKMMKKYISQGMILSAEHGDQLTVLTVDSSVPN | 661 |
| Query: | 678 | GSIIG | 682 |
| | | GSIIG | |
| Sbjct: | 662 | GSIIG | 666 |

[4172] Based on this analysis, it was predicted that these proteins and their epitopes could be useful antigens for vaccines or diagnostics.

### EXAMPLE 725

[4173] A DNA sequence (GBSx0769) was identified in S. agalactiae <SEQ ID 2229> which encodes the amino acid sequence <SEQ ID 2230>. Analysis of this protein sequence reveals the following:

```
Possible site: 35
>>> Seems to have no N-terminal signal sequence
----- Final Results -----
                            bacterial cytoplasm --- Certainty = 0.2633(Affirmative) < succ>
                              bacterial membrane --- Certainty = 0.0000(Not Clear) < succ>
                                bacterial outside --- Certainty = 0.0000(Not Clear) < succ>
```

[4174] The protein has no significant homology with any sequences in the GENPEPT database.

[4175] No corresponding DNA sequence was identified in S. pyogenes.

[4176] Based on this analysis, it was predicted that this protein and its epitopes, could be useful antigens for vaccines or diagnostics.

### EXAMPLE 726

[4177] A DNA sequence (GBSx0770) was identified in S. agalactiae <SEQ ID 2231> which encodes the amino acid sequence <SEQ ID 2232>. This protein is predicted to be branched chain amino acid transport system II carrier protein (brnQ). Analysis of this protein sequence reveals the following:

| Possible site: 26 | | | | |
|---|---|---|---|---|
| >>> Seems to have a cleavable N-term signal seq. | | | | |
| | INTEGRAL | Likelihood = −14.91 | Transmembrane | 279-295 (269-303) |
| | INTEGRAL | Likelihood = −9.98 | Transmembrane | 82-98 (74-102) |
| | INTEGRAL | Likelihood = −6.58 | Transmembrane | 345-361 (340-364) |
| | INTEGRAL | Likelihood = −6.00 | Transmembrane | 157-173 (153-179) |
| | INTEGRAL | Likelihood = −4.30 | Transmembrane | 48-64 (45-66) |
| | INTEGRAL | Likelihood = −4.14 | Transmembrane | 251-267 (250-278) |
| | INTEGRAL | Likelihood = −4.09 | Transmembrane | 308-324 (305-326) |
| | INTEGRAL | Likelihood = −2.55 | Transmembrane | 218-234 (216-237) |
| | INTEGRAL | Likelihood = −1.38 | Transmembrane | 126-142 (126-142) |

```
----- Final Results -----
                              bacterial membrane --- Certainty = 0.6965(Affirmative) < succ>
                                bacterial outside --- Certainty = 0.0000(Not Clear) < succ>
                            bacterial cytoplasm --- Certainty = 0.0000(Not Clear) < succ>
```

[4178] A related GBS nucleic acid sequence <SEQ ID 9407> which encodes amino acid sequence <SEQ ID 9408> was also identified.

[4179] The protein has homology with the following sequences in the GENPEPT database:

| 22 GP: AAC00400 GB: AF008220 branch-chain amino acid transporter | | | |
|---|---|---|---|
| [Bacillus subtilis] | | | |
| Identities = 130/367 (35%), Positives = 204/367 (55%), Gaps = 12/367 (3%) | | | |
| Query: | 1 | MSEKFSPWFSLTFLVILYLTIGPLFAIPRTATVSFEIGVAPIVGHSP--IALLCFTACFF | 58 |
| | | +++K P F F V+LYL+IGPLFAIPRT TVS+EIG P + P ++LL FT FF | |
| Sbjct: | 73 | LADKAHPVFGTIFTVVLYLSIGPLFAIPRTGTVSYEIGAVPFLTGVPERLSLLIFTLIFF | 132 |
| Query: | 59 | AAAYYLAIRPNGILDSVGKILTPVFAFLILSLVVVGAIAYGNLESAKASADYAGKAFGSG | 118 |
| | | YYLA+ P+ ++D VGKILTP+ F I+ ++V+ AI + Y G G | |
| Sbjct: | 133 | GVTYYLALNPSKVVDRVGKILTPI-KFTIILIIVLKAIFTPMGGLGAVTEAYKGTPVFKG | 191 |
| Query: | 119 | VLAGYNTLDALAAVAFCLVATETLKKFGFKTKKEYLSTIWIVGIVTSLAFSILYIGLGFL | 178 |
| | | L GY T+DALA++ F +V +K G K + G++ +L + +Y+ L +L | |
| Sbjct: | 192 | FLEGYKTMDALASIVFGVVVVNAVKSKGVTQSKALAAACIKAGVIAALGLTFIYVSLAYL | 251 |
| Query: | 179 | GNKFPVPADILADPNVNKGAYVLSQASYKLFGNFGRYFLSIMVTLTCFTTTVGLIVSVSE | 238 |
| | | G A V +GA +LS +S+ LFG+ G L +T+ C TT++GL+ S + | |
| Sbjct: | 252 | G-----ATSTNAIGPVGEGAKILSASSHYLFGSLGNIVLGAAITVACLTTSIGLVTSCGQ | 306 |
| Query: | 239 | FFDKNFRFGNYKLFATVFTLIGFLIANLGLNAVITFSVPVLTLLYPIVIVIVLIILINKW | 298 |
| | | +F K +YK+ T+ TL +IAN GL +I FSVP+L+ +YP+ IVI+++ I+K | |
| Sbjct: | 307 | YFSKLIPALSYKIVVTIVTLFSLIIANFGLAQIIAFSVPILSAIYPLAIVIIVLSFIDKI | 366 |
| Query: | 299 | LPLSKK---GMSLTIGLVTLVSFVEVLAGQWQEKTLTQLVGFLPFHTISMGWLVPMLIGI | 355 |
| | | ++ + GL +++ ++ AG L LP +++ +GW++P ++G | |
| Sbjct: | 367 | FKERREVYIACLIGTGLFSILDGIKA-AGFSLGSLDVFLNANLPLYSLGIGWVLPGIVGA | 425 |
| Query: | 356 | VFSLVLS | 362 |
| | | V VL+ | |
| Sbjct: | 426 | VIGYVLT | 432 |

[4180] There is also homology to SEQ ID 2234.

[4181] A related GBS gene <SEQ ID 8649> and protein <SEQ ID 8650> were also identified. Analysis of this protein sequence reveals the following:

| Lipop: Possible site: −1 Crend: 3 | | | |
|---|---|---|---|
| SRCFLG: 0 | | | |
| McG: Length of UR: 30 | | | |
| Peak Value of UR: 2.99 | | | |
| Net Charge of CR: 2 | | | |
| McG: Discrim Score: 13.17 | | | |
| GvH: Signal Score (−7.5): −3.3 | | | |
| Possible site: 33 | | | |
| >>> Seems to have an uncleavable N-term signal seq | | | |
| Amino Acid Composition: calculated from 1 | | | |
| ALOM program | count: 11 | value: −14.91 | threshold: 0.0 |

| | | | |
|---|---|---|---|
| INTEGRAL | Likelihood = −14.91 | Transmembrane | 347-363 (337-371) |
| INTEGRAL | Likelihood = −9.98 | Transmembrane | 150-166 (142-170) |
| INTEGRAL | Likelihood = −7.54 | Transmembrane | 40-56 (36-61) |
| INTEGRAL | Likelihood = −6.64 | Transmembrane | 79-95 (76-97) |
| INTEGRAL | Likelihood = −6.00 | Transmembrane | 225-241 (221-247) |
| INTEGRAL | Likelihood = −4.30 | Transmembrane | 116-132 (113-134) |
| INTEGRAL | Likelihood = −4.14 | Transmembrane | 319-335 (318-346) |
| INTEGRAL | Likelihood = −4.09 | Transmembrane | 376-392 (373-394) |
| INTEGRAL | Likelihood = −2.92 | Transmembrane | 7-23 (6-28) |
| INTEGRAL | Likelihood = −2.55 | Transmembrane | 286-302 (284-305) |
| INTEGRAL | Likelihood = −1.38 | Transmembrane | 194-210 (194-210) |

| | | |
|---|---|---|
| PERIPHERAL | Likelihood = 2.49 | 402 |

modified ALOM score: 3.48
icm1 HYPID: 7 CFP: 0.696
*** Reasoning Step: 3
----- Final Results -----
bacterial membrane --- Certainty = 0.6965 (Affirmative) < succ>
bacterial outside --- Certainty = 0.0000 (Not Clear) < succ>
bacterial cytoplasm --- Certainty = 0.0000 (Not Clear) < succ>

[4182] The protein has homology with the following sequences in the databases:

[chemical structure]

[4183] Based on this analysis, it was predicted that these proteins and their epitopes could be useful antigens for vaccines or diagnostics.

### EXAMPLE 727

[4184] A DNA sequence (GBSx0771) was identified in S. agalactiae <SEQ ID 2235> which encodes the amino acid sequence <SEQ ID 2236>. Analysis of this protein sequence reveals the following:

Possible site: 36
>>> Seems to have no N-terminal signal sequence
----- Final Results -----
bacterial cytoplasm --- Certainty = 0.3291 (Affirmative) < succ>
bacterial membrane --- Certainty = 0.0000 (Not Clear) < succ>
bacterial outside --- Certainty = 0.0000 (Not Clear) < succ>

[4185] A related GBS nucleic acid sequence <SEQ ID 10041> which encodes amino acid sequence <SEQ ID 10042> was also identified.

[4186] The protein has no significant homology with any sequences in the GENPEPT database.

[4187] No corresponding DNA sequence was identified in S. pyogenes.

[4188] Based on this analysis, it was predicted that these proteins and their epitopes could be useful antigens for vaccines or diagnostics.

### EXAMPLE 728

[4189] A DNA sequence (GBSx0772) was identified in S. agalactiae <SEQ ID 2237> which encodes the amino acid sequence <SEQ ID 2238>. Analysis of this protein sequence reveals the following:

| Possible site: 39 | | | |
|---|---|---|---|
| >>> Seems to have a cleavable N-term signal seq. | | | |
| INTEGRAL | Likelihood = −8.33 | Transmembrane | 117-133 (112-136) |
| INTEGRAL | Likelihood = −3.77 | Transmembrane | 53-69 (53-70) |
| INTEGRAL | Likelihood = −3.40 | Transmembrane | 98-114 (97-115) |

----- Final Results -----
bacterial membrane --- Certainty = 0.4333 (Affirmative) < succ>
bacterial outside --- Certainty = 0.0000 (Not Clear) < succ>
bacterial cytoplasm --- Certainty = 0.0000 (Not Clear) < succ>

[4190] The protein has no significant homology with any sequences in the GENPEPT database.

[4191] No corresponding DNA sequence was identified in S. pyogenes.

[4192] Based on this analysis, it was predicted that this protein and its epitopes, could be useful antigens for vaccines or diagnostics.

### EXAMPLE 729

[4193] A DNA sequence (GBSx0773) was identified in S. agalactiae <SEQ ID 2239> which encodes the amino acid sequence <SEQ ID 2240>. Analysis of this protein sequence reveals the following:

| Possible site: 15 | | | |
|---|---|---|---|
| >>> Seems to have no N-terminal signal sequence | | | |
| INTEGRAL | Likelihood = −4.19 | Transmembrane | 22-38 (20-44) |

----- Final Results -----
bacterial membrane --- Certainty = 0.2678 (Affirmative) < succ>
bacterial outside --- Certainty = 0.0000 (Not Clear) < succ>
bacterial cytoplasm --- Certainty = 0.0000 (Not Clear) < succ>

[4194] A related GBS nucleic acid sequence <SEQ ID 8651> which encodes amino acid sequence <SEQ ID 8652> was also identified. Analysis of this protein sequence reveals the following:

| Lipop Possible site: −1 Crend: 3 | | | |
|---|---|---|---|
| SRCFLG: 0 | | | |
| McG: Length of UR: 21 | | | |
| Peak Value of UR: 3.11 | | | |
| Net Charge of CR: 2 | | | |
| McG: Discrim Score: 11.30 | | | |
| GvH: Signal Score (−7.5): −5.35 | | | |
| Possible site: 28 | | | |
| >>> Seems to have an uncleavable N-term signal seq | | | |
| Amino Acid Composition: calculated from 1 | | | |
| ALOM program | count: 1 | value: −4.19 | threshold: 0.0 |

| | | | |
|---|---|---|---|
| INTEGRAL | Likelihood = −4.19 | Transmembrane | 5-21 (3-27) |

| | | |
|---|---|---|
| PERIPHERAL | Likelihood = 6.74 | 53 |

modified ALOM score: 1.34
icm1 HYPID: 7 CFP: 0.268
*** Reasoning Step: 3
----- Final Results -----
bacterial membrane --- Certainty = 0.2678 (Affirmative) < succ>
bacterial outside --- Certainty = 0.0000 (Not Clear) < succ>
bacterial cytoplasm --- Certainty = 0.0000 (Not Clear) < succ>

[4195] The protein has homology with the following sequences in the GENPEPT database:

| >GP: CAB15623 GB: Z99122 spore coat protein (inner) [Bacillus subtilis] | | | |
|---|---|---|---|
| Identities = 71/359 (19%), Positives = 148/359 (40%), Gaps = 49/359 (13%) | | | |
| Query: | 127 | ISYRGNTSRYFDKKSLKVKFVTNKLKEKKHRLAGMPKESEWVLHGPFLDRTLLRNYLSYN | 186 |
| | | I+YRG+ R F KKS + F K + L+ + D +L+RN LS + | |
| Sbjct: | 47 | IAYRGSHIRDFKKKSYHISFYQPKTFRGAREIH---------LNAEYKDPSLMRNKLSLD | 97 |
| Query: | 187 | IAGEIMSYAPNVRYCELFVNGEYQGVYLAVENIEQGEQRVPIEKSDKKLHKTPYIVAWDR | 246 |
| | | E+ + +P + + +NG+ +GVYL +E++++ + +KL A D | |
| Sbjct: | 98 | FFSELGTLSPKAEFAFVKMNGKNEGVYLELESVDE------YYLAKRKLADGAIFYAVDD | 151 |
| Query: | 247 | EHKAKQKLDNYVHYTHQSGISALDVKYPGKQRLTSKQLEFINKD----INHIEKVLYSYD | 302 |
| | | + D + ++L++ Y +++ +++ +F +D IN + K + | |
| Sbjct: | 152 | DANFSLMSD-----LERETKTSLELGY--EKKTGTEEDDFYLQDMIFKINTVPKAQFK-- | 202 |
| Query: | 303 | FSQYPKYIDRESFANYFVINEFFRNVDAGKFSTYLYKDLRDRA-KLVVWDFNNAFDNQIE | 361 |
| | | S+ K++D + + + F N D + LY+ +++ WD++ + I | |
| Sbjct: | 203 | -SEVTKHVDVDKYLRWLAGIVFTSNYDGFVHNYALYRSGETGLFEVIPWDYDATWGRDIH | 261 |
| Query: | 362 | GRVDEADFTLTDAPWFNMLIKDKAFIDLVVHRYKELRKGVLATEYLSNYIDETRHFLGPA | 421 |
| | | G AD+ FN L YK L + L + + Y++ P | |
| Sbjct: | 262 | GERMAADYVRIQG--FNTLTARILDESEFRKSYKRLLEKTLQSLFTIEYME-------PK | 312 |
| Query: | 422 | IDRNYKKWGYVFDLKNTDPRNYLIPTERN-VTSYHKSVEQLKDFIKKRGRWMDRNIETL | 479 |
| | | I Y++ P + P ++N + + + + + ++IK R +++ ++ L | |
| Sbjct: | 313 | IMAMYER---------IRPFVLMDPYKKNDIERFDREPDVICEYIKNRSQYLKDHLSIL | 362 |

[4196] No corresponding DNA sequence was identified in S. pyogenes.

[4197] Based on this analysis, it was predicted that these proteins and their epitopes could be useful antigens for vaccines or diagnostics.

### EXAMPLE 730

[4198] A DNA sequence (GBSx0774) was identified in S. agalactiae <SEQ ID 2241> which encodes the amino acid sequence <SEQ ID 2242>. Analysis of this protein sequence reveals the following:

Possible site: 17
>>> Seems to have no N-terminal signal sequence
----- Final Results -----
bacterial membrane --- Certainty = 0.0000 (Not Clear) < succ>
bacterial outside --- Certainty = 0.0000 (Not Clear) < succ>
bacterial cytoplasm --- Certainty = 0.0000 (Not Clear) < succ>

[4199] The protein has no significant homology with any sequences in the GENPEPT database.

[4200] No corresponding DNA sequence was identified in S. pyogenes.

[4201] Based on this analysis, it was predicted that this protein and its epitopes, could be useful antigens for vaccines or diagnostics.

### EXAMPLE 731

[4202] A DNA sequence (GBSx0775) was identified in S. agalactiae <SEQ ID 2243> which encodes the amino acid sequence <SEQ ID 2244>. Analysis of this protein sequence reveals the following:

| Possible site: 21 | | | |
|---|---|---|---|
| >>> Seems to have an uncleavable N-term signal seq | | | |
| INTEGRAL | Likelihood = −4.62 | Transmembrane | 5-21 (3-24) |

----- Final Results -----
bacterial membrane --- Certainty = 0.2848 (Affirmative) < succ>
bacterial outside --- Certainty = 0.0000 (Not Clear) < succ>
bacterial cytoplasm --- Certainty = 0.0000 (Not Clear) < succ>

[4203] The protein has homology with the following sequences in the GENPEPT database:

| >GP: BAB05949 GB: AP001514 unknown [Bacillus halodurans] | | | |
|---|---|---|---|
| Identities = 199/697 (28%), Positives = 322/697 (45%), Gaps = 58/697 (8%) | | | |
| Query: | 57 | KPFVVKGVDVESSLAGYHHNDFPITQKTYREWFHLISNMGANTVRVKVPMNVAFYDALYH | 116 |
| | | K + GV++ G + I +K Y WF I MG N +RV FY AL | |
| Sbjct: | 414 | KKLQIHGVNLGMGKPGTFPGEAAIKEKDYYRWFEQIGEMGGNAIRVYTLHPPGFYHALKR | 473 |
| Query: | 117 | HNKASKRPLYLLQGIRIDSYRNNASITAFNDNYRGYLKREAKGVVDILHGRKQVWNTDLG | 176 |
| | | +N+ + P+YL G+ ID ++ AF++ ++E K +VD++HG V + + G | |
| Sbjct: | 474 | YNEQHENPIYLFHGVWIDEEPLEDTLDAFDEETNEEFQQEMKRIVDVIHGNAVV-DPNPG | 532 |
| Query: | 177 | SRH--YHYDLSPWVLGYVVGDDWNSGTVAYTNHQEKKT-QYKGRYFKTSVAANPFEVMLA | 233 |
| | | H Y D+SP+ +G+++G +W TV TN Y G+Y +T A PFE LA | |
| Sbjct: | 533 | HAHGVYQADVSPYTIGWIIGIEWYPHTVKATNKNNPDIGDYDGKYVETK-DAEPFEYWLA | 591 |
| Query: | 234 | QVMDELTHYETAKYGWQHLISFSNSPTTDPF-HYRKPFEAQAPKYVQLNVENIQANSNVK | 292 |
| | | D L YE +Y W +SF+N TTD H +P E + V NV +++ + + | |
| Sbjct: | 592 | NQFDILLSYEIEQYNWIRPVSFTNWVTTDLLTHPAEPNEDEDLVGVDPNVIHLKGPA-TE | 650 |
| Query: | 293 | AGMFAAYKAIDFHPRYKDYLLFDKENISKEDRQKIKELSLSQGYVKLLNAYHKIPVLVTG | 352 |
| | | FA+Y +P Y D+L ++++ I D + EL+ GY+K L+ H +P+L+ | |
| Sbjct: | 651 | TNQFASYHV---YPYYPDFLNYEEDYIHYVDHR--GELNNYAGYLKDLHDAHDLPILIAE | 705 |
| Query: | 353 | YGYSTARGIA-QKEIDKRPLPINEKEQGQRLLEDYESFISSGSFGATINAWQDDWNARAW | 411 |
| | | +G +RG+ + K ++E+EQG+ ++E +E I G I WQD+W R W | |
| Sbjct: | 706 | FGVPASRGLTHENPFGKNQGFLSEEEQGKIVVELFEDIIEEKLLGGLIFTWQDEWFKRTW | 765 |
| Query: | 412 | NTSFATNKHSQFLWGDAQVFNQGYGLLGFKNAKHHYQVDGKRGKG-----EWKHPLMTSA | 466 |
| | | NT N + W +AQ Q +GLL F K D + + E HP + | |
| Sbjct: | 766 | NTMDYDNPDRRPFWSNAQTNEQQFGLLSFDRLKVKVNGDDQDWEDASLLYEEDHPYVKR- | 824 |
| Query: | 467 | TGDDLYASSDESYLYLAIKTKPEKLKE-----KRLLPIDITPKSGSRKMNGSK-VTFSKS | 520 |
| | | LY DE YLY I K + +L +D P G+ + + VTF | |
| Sbjct: | 825 | ----LYMDHDERYLYFRIDMKSGSTDDFFKDGFPILVLDTLPGQGNEHIKEVEGVTFDHG | 880 |
| Query: | 521 | SDFVLSIDPNGKSELFVQERYNALKANYLRQLNGKDFYAFPPKKNSSNFEQINMVLRNTK | 580 |
| | | DF++ + +S + V Y+ Y + + + P+ N+ F++I+ L N + | |
| Sbjct: | 881 | IDFIIELKGYDESRVKVDAYYDFFTYQYSQIYQMIEETSIEPQNNTGVFQKIHYAL-NQE | 939 |
| Query: | 581 | IVEDMEKVKATERFLP--THPTGLLKTGTTDRHQKTFDSQTD--ISFGKDFIEVRIPWQL | 636 |
| | | I ++ +T +P + TG L+ G D +DS D ++ K IEVRIPW L | |
| Sbjct: | 940 | I-----RIPSTNEVIPFSYYETGELRHGNGDPEADDYDSLADFFVNEEKGMIEVRIPWLL | 994 |
| Query: | 637 | LNFSDPSSQKIHDDYFKHYGVKELE-IESI-ALGLGANSKENTLIKMAD----------- | 683 |
| | | L+F DPS +++ ++ G + E IE + A L K++ ++ D | |
| Sbjct: | 995 | LSFKDPSQREVMSAIYEGEGGETSEIIEGVRAAVLFVEPKDDDSYQVVDALPALDGDRLT | 1054 |
| Query: | 684 | ------YRLKNWERPDTKTFLKDSYYSIKKEWSKERE | 714 |
| | | Y + W+ P + LK SY +K+ ++ +E | |
| Sbjct: | 1055 | DEVMNMYTWETWDIPLYEERLKQSYDLVKEAFTSIKE | 1091 |

[4204] No corresponding DNA sequence was identified in S. pyogenes.

[4205] A related GBS gene <SEQ ID 8653> and protein <SEQ ID 8654> were also identified. Analysis of this protein sequence reveals the following:

| Lipop: Possible site: −1 Crend: 2 | | | |
|---|---|---|---|
| McG: Discrim Score: 12.00 | | | |
| GvH: Signal Score (−7.5): −5.46 | | | |
| Possible site: 21 | | | |
| >>> Seems to have an uncleavable N-term signal seq | | | |
| ALOM program | count: 1 | value: −4.62 | threshold: 0.0 |

| | | | |
|---|---|---|---|
| INTEGRAL | Likelihood = −4.62 | Transmembrane | 5-21 (3-24) |

| | | |
|---|---|---|
| PERIPHERAL | Likelihood = 7.32 | 223 |

modified ALOM score: 1.42
*** Reasoning Step: 3
----- Final Results -----
bacterial membrane --- Certainty = 0.2848 (Affirmative) < succ>
bacterial outside --- Certainty = 0.0000 (Not Clear) < succ>
bacterial cytoplasm --- Certainty = 0.0000 (Not Clear) < succ>

[4206] SEQ ID 2244 (GBS62) was expressed in E. coli as a His-fusion product. SDS-PAGE analysis of total cell extract is shown in FIG. 5 (lane 7; MW 80.5 kDa). It was also expressed in E. coli as a GST-fusion product. SDS-PAGE analysis of total cell extract is shown in FIG. 13 (lane 4; MW 105 kDa).

[4207] The GBS62-GST fusion product was purified (FIG. 100A; see also FIG. 193, lane 7) and used to immunise mice (lane 1 product; 20 μg/mouse). The resulting antiserum was used for Western blot (FIG. 100B), FACS (FIG. 100C), and in the in vivo passive protection assay (Table III). These tests confirm that the protein is immunoaccessible on GBS bacteria and that it is an effective protective immunogen.

[4208] Based on this analysis, it was predicted that these proteins and their epitopes could be useful antigens for vaccines or diagnostics.

### EXAMPLE 732

[4209] A DNA sequence (GBSx0778) was identified in S. agalactiae <SEQ ID 2245> which encodes the amino acid sequence <SEQ ID 2246> in others. Analysis of this protein sequence reveals the following:

| Possible site: 14 | | | |
|---|---|---|---|
| >>> Seems to have no N-terminal signal sequence | | | |
| INTEGRAL | Likelihood = −7.48 | Transmembrane | 310-326 (302-335) |
| INTEGRAL | Likelihood = −7.32 | Transmembrane | 362-378 (361-380) |
| INTEGRAL | Likelihood = −7.11 | Transmembrane | 334-350 (329-355) |
| INTEGRAL | Likelihood = −2.28 | Transmembrane | 381-397 (380-397) |

----- Final Results -----
bacterial membrane --- Certainty = 0.3994 (Affirmative) < succ>
bacterial outside --- Certainty = 0.0000 (Not Clear) < succ>
bacterial cytoplasm --- Certainty = 0.0000 (Not Clear) < succ>

[4210] A related GBS nucleic acid sequence <SEQ ID 10039> which encodes amino acid sequence <SEQ ID 10040> was also identified.

[4211] The protein has homology with the following sequences in the GENPEPT database:

| >GP: BAB05950 GB: AP001514 unknown conserved protein in others | | | |
|---|---|---|---|
| [Bacillus halodurans] | | | |
| Identities = 143/405 (35%), Positives = 226/405 (55%), Gaps = 5/405 (1%) | | | |
| Query: | 11 | IVPAYNESTTIVSSIDSLLHLDYEAYEIIVVDDGSSDNTSDVLKEEFALMKISNTIDSII | 70 |
| | | +VPAYNE T I+ ++ SLL L Y EI+VV+DGS+D T +V+ E F ++K+ I I | |
| Sbjct: | 69 | LVPAYNEETGIIETVRSLLSLKYPQTEIVVVNDGSTDQTLEVIIEHFQMVKVGKVIRKQI | 128 |
| Query: | 71 | ATQTCKDVFQRQVGKVKLTLIVKENGGKGDALNMGINAANYDYFLCLDADSMLQVDSLSQ | 130 |
| | | T+ K V+Q + L L+ K NGGK DALN G+N + Y YF +D DS+L+ D+L + | |
| Sbjct: | 129 | ETEPIKGVYQSTIFP-HLLLVDKSNGGKADALNAGLNVSKYPYFCSIDGDSILETDALLK | 187 |
| Query: | 131 | ISKSIQV----DPTVIAVGGLVQVAQGVKIEQGKVASYRLPWRIIPCAQALEYDSSFLGA | 186 |
| | | + K I + VIA GG V++A G I+ G V S +L + Q +EY +FL | |
| Sbjct: | 188 | VMKPIVTSRDDEDEVIASGGNVRIANGSDIQMGSVLSVQLAKNPLVVMQVIEYLRAFLMG | 247 |
| Query: | 187 | RIFLDYLRANLIISGAFGLFKKDLVKAVGGYDTQTLGEDMELVMKLHFFCRNNNIPYRIC | 246 |
| | | RI L LIISGAF +F K V GGY +T+GEDMELV++LH + + RI | |
| Sbjct: | 248 | RIGLSRHNMVLIISGAFSVFAKKWVMEAGGYSKKTVGEDMELVVRLHRLVKEKRLKKRIT | 307 |
| Query: | 247 | YETDAVCWSQAPTNLGDLRKQRRRWYLGLYQCLKKYKSIFANYRFGAVGSISYIYYILFE | 306 |
| | | + D VCW++AP L++QR RW+ GL + L ++ + N ++G VG+ S Y+ + E | |
| Sbjct: | 308 | FVPDPVCWTEAPATFRVLQRQRSRWHRGLMESLWLHRGMTFNPKYGLVGTASIPYFWIVE | 367 |
| Query: | 307 | LLTPFIECFGIVIIFLSLLFNQLNIPFFISLVSLYIFYCVLITLSSFLHRIYSQQLVIGI | 366 |
| | | P +E G + I + F L + F ++L L++ Y + ++++ + +S + + | |
| Sbjct: | 368 | FFGPVVELMGYLYIVFAFFFGGLYVEFALALFLLFVLYGTVFSMTAVILEGWSLKRYPKV | 427 |
| Query: | 367 | LDIVKVFYIAVFRYLILHPVLTFVKVASVIGYKNKKMVWGHITRE | 411 |
| | | D+ ++ ++F L P+ + ++I + WG +TR+ | |
| Sbjct: | 428 | SDMSRLMIFSLFEALWYRPLTVLWRFGAIIEALFRSKAWGEMTRK | 472 |

[4212] A related DNA sequence was identified in S. pyogenes <SEQ ID 2247> which encodes the amino acid sequence <SEQ ID 2248>. Analysis of this protein sequence reveals the following:

| Possible site: 60 | | | |
|---|---|---|---|
| >>> Seems to have no N-terminal signal sequence | | | |
| INTEGRAL | Likelihood = −11.04 | Transmembrane | 33-49 (24-57) |
| INTEGRAL | Likelihood = −10.77 | Transmembrane | 376-392 (370-399) |
| INTEGRAL | Likelihood = −7.86 | Transmembrane | 344-360 (342-372) |
| INTEGRAL | Likelihood = −4.94 | Transmembrane | 63-79 (55-81) |
| INTEGRAL | Likelihood = −2.07 | Transmembrane | 403-419 (403-419) |

----- Final Results -----
bacterial membrane --- Certainty = 0.5416 (Affirmative) < succ>
bacterial outside --- Certainty = 0.0000 (Not Clear) < succ>
bacterial cytoplasm --- Certainty = 0.0000 (Not Clear) < succ>

[4213] An alignment of the GAS and GBS proteins is shown below:

| Identities = 84/397 (21%), Positives = 173/397 (43%), Gaps = 71/397 (17%) | | | |
|---|---|---|---|
| Query: | 6 | FRRKSIVPAYNEST-TIVSSIDSLLHLDYEAYEIIVVDDGSSDNTSDVLKEEFALMKISN | 64 |
| | | ++ +++P+YNE +++ ++ S+L Y EI +VDDGSS+ + L EE+ ++ | |
| Sbjct: | 90 | YKVAAVIPSYNEDAESLLETLKSVLAQTYPLSEIYIVDDGSSNTDAIQLIEEY----VNR | 145 |
| Query: | 65 | TIDSIIATQTCKDVFQRQVGKVKLTLIVKENGGKGDALNMGINAANYDYFLCLDADSMLQ | 124 |
| | | +D C++V V +L+ N GK A ++ D FL +D+D+ + | |
| Sbjct: | 146 | EVD------ICRNVI------VHRSLV---NKGKRHAQAWAFERSDADVFLTVDSDTYIY | 190 |
| Query: | 125 | VDSLSQISKSIQVDPTVIAVGGLVQVAQGVKIEQGKVASYRLPWRIIPCAQALEYDSSFL | 184 |
| | | ++L ++ KS D TV A G + + ++ + YD++F | |
| Sbjct: | 191 | PNALEELLKSFN-DETVYAA-------------TGHLNARNRQTNLLTRLTDIRYDNAF- | 235 |
| Query: | 185 | GARIFLDYLRANLII-SGAFGLFKKD-LVKAVGGYDTQT-------LGEDMELVMKLHFF | 235 |
| | | G L N+++ SG +++++ ++ + Y QT +G+D L | |
| Sbjct: | 236 | GVERAAQSLTGNILVCSGPLSIYRREVIIPNLERYKNQTFLGLPVSIGDDRCLT------ | 289 |
| Query: | 236 | CRNNNIPY-RICYETDAVCWSQAPTNLGDLRKQRRRWYLGLY-QCLKKYKSIFANYRFGA | 293 |
| | | N I R Y++ A C + P L KQ+ RW + + + K I +N | |
| Sbjct: | 290 | --NYAIDLGRTVYQSTARCDTDVPFQLKSYLKQQNRWNKSFFKESIISVKKILSN----P | 343 |
| Query: | 294 | VGSISYIYYILFELLTPFIECFGIVIIFLSLLFNQLNIPFFISLVSLYIFYCV--LITLS | 351 |
| | | + ++ I+ ++ ++ +++ +LLFNQ + L+ L+ F + ++ L | |
| Sbjct: | 344 | IVALWTIFEVVMFMM--------LIVAIGNLLFNQ---AIQLDLIKLFAFLSIIFIVALC | 392 |
| Query: | 352 | SFLHRIYSQQLVIGILDIVKVFYIAVFRYLILHPVLT | 388 |
| | | +H + + + + ++ V + L L+ + T | |
| Sbjct: | 393 | RNVHYMIKHPASFLLSPLYGILHLFVLQPLKLYSLCT | 429 |

[4214] A related GBS gene <SEQ ID 8655> and protein <SEQ ID 8656> were also identified. Analysis of this protein sequence reveals the following:

| Lipop: Possible site: −1 Crend: 8 | | | | |
|---|---|---|---|---|
| McG: Discrim Score: −5.18 | | | | |
| GvH: Signal Score (−7.5): −4.91 | | | | |
| Possible site: 14 | | | | |
| >>> Seems to have no N-terminal signal sequence | | | | |
| ALOM program count: 4 value: −7.48 threshold: 0.0 | | | | |
| | INTEGRAL | Likelihood = −7.48 | Transmembrane | 310-326 (302-335) |
| | INTEGRAL | Likelihood = −7.32 | Transmembrane | 362-378 (361-380) |
| | INTEGRAL | Likelihood = −7.11 | Transmembrane | 334-350 (329-355) |
| | INTEGRAL | Likelihood = −2.28 | Transmembrane | 381-397 (380-397) |
| | PERIPHERAL | Likelihood = 1.22 | 140 | |

```
modified ALOM score: 2.00
*** Reasoning Step: 3
----- Final Results -----
                              bacterial membrane --- Certainty = 0.3994(Affirmative) < succ>
                                bacterial outside --- Certainty = 0.0000(Not Clear) < succ>
                            bacterial cytoplasm --- Certainty = 0.0000(Not Clear) < succ>
```

[4215] The protein has homology with the following sequences in the databases:

[chemical structure]

[4216] Based on this analysis, it was predicted that these proteins and their epitopes could be useful antigens for vaccines or diagnostics.

### EXAMPLE 733

[4217] A DNA sequence (GBSx0779) was identified in S. agalactiae <SEQ ID 2249> which encodes the amino acid sequence <SEQ ID 2250>. Analysis of this protein sequence reveals the following:

```
Possible site: 29
>>> Seems to have no N-terminal signal sequence
----- Final Results -----
                            bacterial cytoplasm --- Certainty = 0.2014(Affirmative) < succ>
                              bacterial membrane --- Certainty = 0.0000(Not Clear) < succ>
                                bacterial outside --- Certainty = 0.0000(Not Clear) < succ>
```

[4218] The protein has homology with the following sequences in the GENPEPT database:

| >GP: CAA22725 GB: AL035161 hypothetical protein SC9C7.13c | | | |
|---|---|---|---|
| [Streptomyces coelicolor A3(2)] | | | |
| Identities = 35/153 (22%), Positives = 64/153 (40%), Gaps = 5/153 (3%) | | | |
| Query: | 5 | IRRARLGDEVNLAYIQTESWKAAFGKILPEDIIQKTTEIEPAITMYQQLLHKEVGKGYIL | 64 |
| | | +R L D ++ I+ W++A+ ++P+ + A G+ ++ | |
| Sbjct: | 10 | VREMTLADCDRVSLIRVRGWQSAYRGLMPQPYLDAMDPAADAERRRSLFARPPEGRVNLV | 69 |
| Query: | 65 | EVDSNPHCMAWWD----KSREDGMLDYAELICIHSLKEGWGKGYGSQMMNHVLSEIQQAG | 120 |
| | | D + W + E D AEL ++ +G G G + + + AG | |
| Sbjct: | 70 | AEDEGGEVVGWACHGPYRDGEARTAD-AELYALYVDAARFGAGIGRALAGESVRRCRAAG | 128 |
| Query: | 121 | YNKVILWVFTENTRARKFYDRFGFSFKGKSKTY | 153 |
| | | + +++LWV N RAR+FYDR GF G + + | |
| Sbjct: | 129 | HARMLLWVLKGNVRARRFYDRAGFRPDGAEEPF | 161 |

[4219] No corresponding DNA sequence was identified in S. pyogenes.

[4220] Based on this analysis, it was predicted that this protein and its epitopes, could be useful antigens for vaccines or diagnostics.

### EXAMPLE 734

[4221] A DNA sequence (GBSx0780) was identified in S. agalactiae <SEQ ID 2251> which encodes the amino acid sequence <SEQ ID 2252>. This protein is predicted to be a DNA-binding protein. Analysis of this protein sequence reveals the following:

```
Possible site: 48
>>> Seems to have no N-terminal signal sequence
----- Final Results -----
                            bacterial cytoplasm --- Certainty = 0.1162(Affirmative) < succ>
                              bacterial membrane --- Certainty = 0.0000(Not Clear) < succ>
                                bacterial outside --- Certainty = 0.0000(Not Clear) < succ>
```

[4222] The protein has no significant homology with any sequences in the GENPEPT database.

[4223] No corresponding DNA sequence was identified in S. pyogenes.

[4224] Based on this analysis, it was predicted that this protein and its epitopes, could be useful antigens for vaccines or diagnostics.

### EXAMPLE 735

[4225] A DNA sequence (GBSx0781) was identified in S. agalactiae <SEQ ID 2253> which encodes the amino acid sequence <SEQ ID 2254>. Analysis of this protein sequence reveals the following:

```
Possible site: 56
>>> Seems to have no N-terminal signal sequence
----- Final Results -----
                            bacterial cytoplasm --- Certainty = 0.2589(Affirmative) < succ>
                              bacterial membrane --- Certainty = 0.0000(Not Clear) < succ>
                                bacterial outside --- Certainty = 0.0000(Not Clear) < succ>
```

[4226] A related GBS nucleic acid sequence <SEQ ID 10037> which encodes amino acid sequence <SEQ ID 10038> was also identified.

[4227] The protein has no significant homology with any sequences in the GENPEPT database.

[4228] A related DNA sequence was identified in S. pyogenes <SEQ ID 2255> which encodes the amino acid sequence <SEQ ID 2256>. Analysis of this protein sequence reveals the following:

```
Possible site: 53
>>> Seems to have no N-terminal signal sequence
----- Final Results -----
                            bacterial cytoplasm --- Certainty = 0.2767(Affirmative) < succ>
                              bacterial membrane --- Certainty = 0.0000(Not Clear) < succ>
                                bacterial outside --- Certainty = 0.0000(Not Clear) < succ>
```

[4229] An alignment of the GAS and GBS proteins is shown below:

| Identities = 80/86 (93%), Positives = 84/86 (97%) | | | |
|---|---|---|---|
| Query: | 6 | LKTIKENNMTFEEILPGLKAKKKYVRTGWGGAENYVQLFDTLEVNGKVLQATPYFLINVT | 65 |
| | | + +IKENNMTFEEILPGLKAKKKYVRTGWGGAENYVQLFDTLEV+GKVLQATPYFLI+VT | |
| Sbjct: | 3 | ISSIKENNMTFEEILPGLKAKKKYVRTGWGGAENYVQLFDTLEVDGKVLQATPYFLIHVT | 62 |
| Query: | 66 | GEGEGFSMWAPTPCDVLAEDWIEVND | 91 |
| | | G GEGFSMWAPTPCDVLAEDWIEVND | |
| Sbjct: | 63 | GAGEGFSMWAPTPCDVLAEDWIEVND | 88 |

[4230] Based on this analysis, it was predicted that these proteins and their epitopes could be useful antigens for vaccines or diagnostics.

### EXAMPLE 736

[4231] A DNA sequence (GBSx0782) was identified in S. agalactiae <SEQ ID 2257> which encodes the amino acid sequence <SEQ ID 2258>. Analysis of this protein sequence reveals the following:

```
Possible site: 19
>>> Seems to have an uncleavable N-term signal seq
----- Final Results -----
                              bacterial membrane --- Certainty = 0.0000(Not Clear) < succ>
                                bacterial outside --- Certainty = 0.0000(Not Clear) < succ>
                            bacterial cytoplasm --- Certainty = 0.0000(Not Clear) < succ>
```

[4232] The protein has homology with the following sequences in the GENPEPT database:

| >GP: BAA85256 GB: AB021978 3-oxoacyl-[acyl carrier protein] | | | |
|---|---|---|---|
| reductase homolog [Moritella marina] | | | |
| Identities = 82/239 (34%), Positives = 125/239 (51%), | | | |
| Gaps = 15/239 (6%) | | | |
| Query: | 2 | TKVVLVTGCASGIGYAQAQYFLKQGYQVYGVDKSDKPNLN-----GNFNF-IKLDLSSDL | 55 |
| | | +K VLVTG + GIG A A++F K G V G S + G+ F ++L+++S | |
| Sbjct: | 5 | SKTVLVTGASRGIGRAIAEHFAKLGATVIGTATSAQGAERIGAYLGDAGFGLELNVTSQD | 64 |
| Query: | 56 | S------PLFTMVPTVDILCNTAGILDAYKPLLEVSDEELEHLFDINFFVTVRLTRHYLR | 109 |
| | | S + T V +DIL N AGI A L + ++E ++ D N RL + LR | |
| Sbjct: | 65 | SVDALYAEIKTQVGHIDILVNNAGIT-ADNIFLRMKEDEWCNVIDTNLTSLYRLCKPCLR | 123 |
| Query: | 110 | RMVEKKSGIIINMCSIASFIAGGGGAAYTSSKHALAGFTRQLALDYAKDCIQIFGIAPGA | 169 |
| | | M++++ G IIN+ S+ GG A Y ++K L GFT+ LA + A I + +APG | |
| Sbjct: | 124 | GMMKQRHGRIINIGSVVGTTGNGGQANYAAAKSGLLGFTKSLASEVASRGITVNAVAPGF | 183 |
| Query: | 170 | VQTAMTASDFEPGGLAEWVASETPIGRWTKPSEVAELTGFLASGKARSMQGEIVKIDGG | 228 |
| | | ++T MTA E + + ++ P R +E+AE GFLAS A + GE + ++GG | |
| Sbjct: | 184 | IETDMTAELTEE--QKQTILAQVPTSRLGSTTEIAETVGFLASDGASYITGETIHVNGG | 240 |

[4233] There is also homology to SEQ IDs 2628 and 7170.

[4234] A related sequence was also identified in GAS <SEQ ID 9107> which encodes the amino acid sequence <SEQ ID 9108>. Analysis of this protein sequence reveals the following:

```
Possible site: 19
>>> Seems to have an uncleavable N-term signal seq
----- Final Results -----
                              bacterial membrane --- Certainty = 0.0000(Not Clear) < succ>
                                bacterial outside --- Certainty = 0.0000(Not Clear) < succ>
                            bacterial cytoplasm --- Certainty = 0.0000(Not Clear) < succ>
```

[4235] An alignment of the GAS and GBS proteins is shown below:

| Identities = 206/232 (88%), Positives = 224/232 (95%) | | | |
|---|---|---|---|
| Query: | 1 | MTKVVLVTGCASGIGYAQAQYFLKQGYQVYGVDKSDKPNLNGNFNFIKLDLSSDLSPLFT | 60 |
| | | MTKVVLVTGCASGIGYAQA+YFLKQG+ VYGVDKSDKP+L+GNF+FIKLDLSS+L+PLF | |
| Sbjct: | 4 | MTKVVLVTGCASGIGYAQARYFLKQGHHVYGVDKSDKPDLSGNFHFIKLDLSSELAPLFK | 63 |
| Query: | 61 | MVPTVDILCNTAGILDAYKPLLEVSDEELEHLFDINFFVTVRLTRHYLRRMVEKKSGIII | 120 |
| | | +VP+VDILCNTAGILDAYKPLL+VSDEE+EHLFDINFF TV+LTRHYLRRMVEK+SG+II | |
| Sbjct: | 64 | VVPSVDILCNTAGILDAYKPLLDVSDEEVEHLFDINFFATVKLTRHYLRRMVEKQSGVII | 123 |
| Query: | 121 | NMCSIASFIAGGGGAAYTSSKHALAGFTRQLALDYAKDCIQIFGIAPGAVQTAMTASDFE | 180 |
| | | NMCSIASFIAGGGG AYTSSKHALAGFTRQLALDYAKD I IFGIAPGAV+TAMTA+DFE | |
| Sbjct: | 124 | NMCSIASFIAGGGGVAYTSSKHALAGFTRQLALDYAKDQIHIFGIAPGAVKTAMTANDFE | 183 |
| Query: | 181 | PGGLAEWVASETPIGRWTKPSEVAELTGFLASGKARSMQGEIVKIDGGWSLK | 232 |
| | | PGGLA+WVA ETPIGRWTKP EVAELTGFLASGKARSMQGEIVKIDGGW+LK | |
| Sbjct: | 184 | PGGLADWVARETPIGRWTKPDEVAELTGFLASGKARSMQGEIVKIDGGWTLK | 235 |

[4236] A related DNA sequence was identified in S. pyogenes <SEQ ID 9063> which encodes amino acid sequence <SEQ ID 9064>. An alignment of the GAS and GBS sequences follows:

| Score = 83.1 bits (202), Expect = 4e−18 | | | |
|---|---|---|---|
| Identities = 72/258 (27%), Positives = 106/258 (40%), | | | |
| Gaps = 36/258 (13%) | | | |
| Query: | 6 | EVAFITGAASGIGKQIGETLLKEGKTVVFSDINQE-----KLDQVVADYTKEGYDAFSVV | 60 |
| | | +V +TG ASGIG + LK+G V D + + + + D + + F++V | |
| Sbjct: | 3 | KVVLVTGCASGIGYAQAQYFLKQGYQVYGVDKSDKPNLNGNFNFIKLDLSSDLSPLFTMV | 62 |
| Query: | 61 | CDVTKEEAINAAIDTVVEKYGRIDILVNNAG-LQHVAMIEDFPTEKFEFMIKIMLTAPFI | 119 |
| | | +DIL N AG L + + E+ E + I | |
| Sbjct: | 63 | --------------------PTVDILCNTAGILDAYKPLLEVSDEELEHLFDINFFVTVR | 102 |
| Query: | 120 | AIKRAFPTMKAQKHGRIINMASINGVIGFAGKSAYNSAKHGLIGLTKVTALEAADSGITV | 179 |
| | | + M +K G IINM SI I G +AY S+KH L G T+ AL+ A I + | |
| Sbjct: | 103 | LTRHYLRRMVEKKSGIIINMCSIASFIAGGGGAAYTSSKHALAGFTRQLALDYAKDCIQI | 162 |
| Query: | 180 | NAICPGYVDTPLVRGQFEDLSKTRGIPLENVLEEVLYPLVPQKRLIDVQEIADYVSFLAS | 239 |
| | | I PG V T + FE L E + P R E+A+ FLAS | |
| Sbjct: | 163 | FGIAPGAVQTAMTASDFE----------PGGLAEWVASETPIGRWTKPSEVAELTGFLAS | 212 |
| Query: | 240 | DKAKGVTGQACILDGGYT | 257 |
| | | KA+ + G+ +DGG++ | |
| Sbjct: | 213 | GKARSMQGEIVKIDGGWS | 230 |

[4237] A further related DNA sequence was identified in S. pyogenes <SEQ ID 2259> which encodes the amino acid sequence <SEQ ID 2260>. An alignment of the GAS and GBS sequences follows:

| Score = 427 bits (1086), Expect = e−122 | | | |
|---|---|---|---|
| Identities = 206/232 (88%), Positives = 224/232 (95%) | | | |
| Query: | 4 | MTKVVLVTGCASGIGYAQARYFLKQGHHVYGVDKSDKPDLSGNFHFIKLDLSSELAPLFK | 63 |
| | | MTKVVLVTGCASGIGYAQA+YFLKQG+ VYGVDKSDKP+L+GNF+FIKLDLSS+L+PLF | |
| Sbjct: | 1 | MTKVVLVTGCASGIGYAQAQYFLKQGYQVYGVDKSDKPNLNGNFNFIKLDLSSDLSPLFT | 60 |
| Query: | 64 | VVPSVDILCNTAGILDAYKPLLDVSDEEVEHLFDINFFATVKLTRHYLRRMVEKQSGVII | 123 |
| | | +VP+VDILCNTAGILDAYKPLL+VSDEE+EHLFDINFF TV+LTRHYLRRMVEK+SG+II | |
| Sbjct: | 61 | MVPTVDILCNTAGILDAYKPLLEVSDEELEHLFDINFFVTVRLTRHYLRRMVEKKSGIII | 120 |
| Query: | 124 | NMCSIASFIAGGGGVAYTSSKHALAGFTRQLALDYAKDQIHIFGIAPGAVKTAMTANDFE | 183 |
| | | NMCSIASFIAGGGG AYTSSKHALAGFTRQLALDYAKD I IFGIAPGAV+TAMTA+DFE | |
| Sbjct: | 121 | NMCSIASFIAGGGGAAYTSSKHALAGFTRQLALDYAKDCIQIFGIAPGAVQTAMTASDFE | 180 |
| Query: | 184 | PGGLADWVARETPIGRWTKPDEVAELTGFLASGKARSMQGEIVKIDGGWTLK | 235 |
| | | PGGLA+WVA ETPIGRWTKP EVAELTGFLASGKARSMQGEIVKIDGGW+LK | |
| Sbjct: | 181 | PGGLAEWVASETPIGRWTKPSEVAELTGFLASGKARSMQGEIVKIDGGWSLK | 232 |

[4238] SEQ ID 2258 (GBS251) was expressed in E. coli as a His-fusion product. SDS-PAGE analysis of total cell extract is shown in FIG. 43 (lane 2; MW 21.7 kDa). It was also expressed in E. coli as a GST-fusion product. SDS-PAGE analysis of total cell extract is shown in FIG. 47 (lane 6; MW 52 kDa).

[4239] Based on this analysis, it was predicted that these proteins and their epitopes could be useful antigens for vaccines or diagnostics.

### EXAMPLE 737

[4240] A DNA sequence (GBSx0783) was identified in S. agalactiae <SEQ ID 2261> which encodes the amino acid sequence <SEQ ID 2262>. Analysis of this protein sequence reveals the following:

| Possible site: 48 | | | | |
|---|---|---|---|---|
| >>> Seems to have no N-terminal signal sequence | | | | |
| | INTEGRAL | Likelihood = −3.82 | Transmembrane | 62-78 (62-79) |

```
----- Final Results -----
                              bacterial membrane --- Certainty = 0.2529(Affirmative) < succ>
                                bacterial outside --- Certainty = 0.0000(Not Clear) < succ>
                            bacterial cytoplasm --- Certainty = 0.0000(Not Clear) < succ>
```

[4241] The protein has no significant homology with any sequences in the GENPEPT database.

[4242] No corresponding DNA sequence was identified in S. pyogenes.

[4243] Based on this analysis, it was predicted that this protein and its epitopes, could be useful antigens for vaccines or diagnostics.

### EXAMPLE 738

[4244] A DNA sequence (GBSx0784) was identified in S. agalactiae <SEQ ID 2263> which encodes the amino acid sequence <SEQ ID 2264>. Analysis of this protein sequence reveals the following:

```
Possible site: 31
>>> Seems to have no N-terminal signal sequence
----- Final Results -----
                            bacterial cytoplasm --- Certainty = 0.1495(Affirmative) < succ>
                              bacterial membrane --- Certainty = 0.0000(Not Clear) < succ>
                                bacterial outside --- Certainty = 0.0000(Not Clear) < succ>
```

[4245] The protein has homology with the following sequences in the GENPEPT database:

| >GP: CAA20397 GB: AL031317 SC6G4.19c, unknown, len: 190 aa; contains | | | |
|---|---|---|---|
| Pro-Ser-rich domain at N-terminus [Streptomyces coelicolor A3(2)] | | | |
| Identities = 26/80 (32%), Positives = 44/80 (54%), Gaps = 5/80 (6%) | | | |
| Query: | 1 | MDSNDEAICIIEITKVDIVPFKDVSADHAFKEGEGDKTLEWWRKAHIDFF-----KPYFE | 55 |
| | | +DS + + +IE+T+V +VP +V HA EGEGD ++ WR H F+ + | |
| Sbjct: | 103 | VDSRERPVAVIEVTEVRVVPLAEVDLAHAVDEGEGDTSVAGWRAGHERFWHGAEMRAALG | 162 |
| Query: | 56 | EFGLMFSEDSRIVLEEFQVV | 75 |
| | | + G + + +VLE F++V | |
| Sbjct: | 163 | DPGFTVDDATPVVLERFRIV | 182 |

[4246] No corresponding DNA sequence was identified in S. pyogenes.

[4247] Based on this analysis, it was predicted that this protein and its epitopes, could be useful antigens for vaccines or diagnostics.

### EXAMPLE 739

[4248] A DNA sequence (GBSx0785) was identified in S. agalactiae <SEQ ID 2265> which encodes the amino acid sequence <SEQ ID 2266>. Analysis of this protein sequence reveals the following:

| Possible site: 40 | | | | |
|---|---|---|---|---|
| >>> Seems to have an uncleavable N-term signal seq | | | | |
| | INTEGRAL | Likelihood = −1.49 | Transmembrane | 3-19 (3-19) |

```
----- Final Results -----
                              bacterial membrane --- Certainty = 0.1595(Affirmative) < succ>
                                bacterial outside --- Certainty = 0.0000(Not Clear) < succ>
                            bacterial cytoplasm --- Certainty = 0.0000(Not Clear) < succ>
```

[4249] The protein has homology with the following sequences in the GENPEPT database:

| >GP: BAB06422 GB: AP001516 unknown conserved protein [Bacillus halodurans] | | | |
|---|---|---|---|
| Identities = 133/315 (42%), Positives = 191/315 (60%), Gaps = 4/315 (1%) | | | |
| Query: | 1 | MKLAVLGTGMIVKEVLPVLQKIEGIDLVAILSTVRSLETAKDLAKEYNMSLATSEYKAVL | 60 |
| | | MK+A +GTG IV+ L L I+G VA+ S R TAK LA +YN+ + + +L | |
| Sbjct: | 1 | MKIATVGTGPIVEAFLSALDDIDGPMCVAMYS--RKETTAKPLADQYNIPTIYTHFDHML | 58 |
| Query: | 61 | DNEEIDTVYIGLPNHLHFDYAKEALLAGKHVICEKPFTLEASQLEELVSIANTRQLILLE | 120 |
| | | + ++ VY+ PN LH+ +A +AL KHVICEKPFT A +LE L+S+A +L+L E | |
| Sbjct: | 59 | ADPNVEVVYVASPNSLHYQHALQALEHRKHVICEKPFTSTARELEHLISVARKNELMLFE | 118 |
| Query: | 121 | AITNQYLPNFDLVKEHLSNLGDIKIVECNYSQYSSRYDAFKRGEIAPAFNPEMGGGALRD | 180 |
| | | AIT +LPN+ L+KE++ LG IK+++CNYSQYSSRYD F GE FNP GGAL D | |
| Sbjct: | 119 | AITTIHLPNYQLIKENIHKLGSIKMIQCNYSQYSSRYDRFLSGETPNVFNPAFSGGALMD | 178 |
| Query: | 181 | LNIYNLHLVIGLFGEPITAQYLPNIE-RGIDTSGVLVLDYGHFKTVCIGAKDCSAEVKST | 239 |
| | | +N+YN+H V+ LFG P A Y+ N GIDTSGVLVL Y HF + C+G KD + | |
| Sbjct: | 179 | INVYNIHFVMNLFGPPEAAHYIANQHANGIDTSGVLVLKYPHFISECVGCKDTQSMNFVL | 238 |
| Query: | 240 | IQGDKGSIAILGPTNTMPKISLTMNGQESHVYQLNGDRHRMHDEFVIFEGIISNLDFKRA | 299 |
| | | IQG+KG I + N + + ++ Q S + D ++ +E + +F++ | |
| Sbjct: | 239 | IQGEKGYIHVENGANGCRNVKIYLDDQTSELNAQTNDNLLYYETRTFYE-MYQAKNFEKC | 297 |
| Query: | 300 | AQALEHSRTVMKVLD | 314 |
| | | + L +S +VM+V++ | |
| Sbjct: | 298 | YELLSYSHSVMRVME | 312 |

[4250] A related DNA sequence was identified in S. pyogenes <SEQ ID 719> which encodes the amino acid sequence <SEQ ID 720>. Analysis of this protein sequence reveals the following:

```
Possible site: 40
>>> Seems to have a cleavable N-term signal seq.
----- Final Results -----
                                bacterial outside --- Certainty = 0.3000(Affirmative) < succ>
                              bacterial membrane --- Certainty = 0.0000(Not Clear) < succ>
                            bacterial cytoplasm --- Certainty = 0.0000(Not Clear) < succ>
```

[4251] An alignment of the GAS and GBS proteins is shown below:

| Identities = 233/314 (74%), Positives = 269/314 (85%) | | | |
|---|---|---|---|
| Query: | 1 | MKLAVLGTGMIVKEVLPVLQKIEGIDLVAILSTVRSLETAKDLAKEYNMSLATSEYKAVL | 60 |
| | | MKLAVLGTGMIVKEVLPVLQKI+GIDLVAILSTVRSL TAKDLAK ++M LATS+Y+A+L | |
| Sbjct: | 1 | MKLAVLGTGMIVKEVLPVLQKIDGIDLVAILSTVRSLTTAKDLAKAHHMPLATSKYEAIL | 60 |
| Query: | 61 | DNEEIDTVYIGLPNHLHFDYAKEALLAGKHVICEKPFTLEASQLEELVSIANTRQLILLE | 120 |
| | | NEEIDTVYIGLPNHLHF YAKEALLAGKHVICEKPFT+ A +L+ELV IA R+LILLE | |
| Sbjct: | 61 | GNEEIDTVYIGLPNHLHFAYAKEALLAGKHVICEKPFTMTAGELDELVVIARKRKLILLE | 120 |
| Query: | 121 | AITNQYLPNFDLVKEHLSNLGDIKIVECNYSQYSSRYDAFKRGEIAPAFNPEMGGGALRD | 180 |
| | | AITNQYL N +KEHL LGDIKIVECNYSQYSSRYDAFKRG+IAPAFNP+MGGGALRD | |
| Sbjct: | 121 | AITNQYLSNMTFIKEHLDQLGDIKIVECNYSQYSSRYDAFKRGDIAPAFNPKMGGGALRD | 180 |
| Query: | 181 | LNIYNLHLVIGLFGEPITAQYLPNIERGIDTSGVLVLDYGHFKTVCIGAKDCSAEVKSTI | 240 |
| | | LNIYN+H V+GLFG P T QYL N+E+GIDTSG+LV+DY FK VCIGAKDC+AE+KSTI | |
| Sbjct: | 181 | LNIYNIHFVVGLFGRPKTVQYLANVEKGIDTSGMLVMDYEQFKVVCIGAKDCTAEIKSTI | 240 |
| Query: | 241 | QGDKGSIAILGPTNTMPKISLTMNGQESHVYQLNGDRHRMHDEFVIFEGIISNLDFKRAA | 300 |
| | | QG+KGS+A+LG TNT+P++ L+++G E V N HRM++EFV F +I DF++ | |
| Sbjct: | 241 | QGNKGSLAVLGATNTLPQVQLSLHGHEPQVINHNKHDHRMYEEFVAFRDMIDQRDFEKVN | 300 |
| Query: | 301 | QALEHSRTVMKVLD | 314 |
| | | QALEHSR VM VL+ | |
| Sbjct: | 301 | QALEHSRAVMAVLE | 314 |

[4252] SEQ ID 2266 (GBS342) was expressed in E. coli as a His-fusion product. SDS-PAGE analysis of total cell extract is shown in FIG. 72 (lane 10; MW 36.6 kDa). It was also expressed in E. coli as a GST-fusion product. SDS-PAGE analysis of total cell extract is shown in FIG. 81 (lane 2; MW 61 kDa).

[4253] GBS342-GST was purified as shown in FIG. 226, lane 3.

[4254] Based on this analysis, it was predicted that these proteins and their epitopes could be useful antigens for vaccines or diagnostics.

### EXAMPLE 740

[4255] A DNA sequence (GBSx0786) was identified in S. agalactiae <SEQ ID 2267> which encodes the amino acid sequence <SEQ ID 2268>. Analysis of this protein sequence reveals the following:

```
Possible site: 19
>>> Seems to have no N-terminal signal sequence
----- Final Results -----
                            bacterial cytoplasm --- Certainty = 0.0499(Affirmative) < succ>
                              bacterial membrane --- Certainty = 0.0000(Not Clear) < succ>
                                bacterial outside --- Certainty = 0.0000(Not Clear) < succ>
```

[4256] The protein has homology with the following sequences in the GENPEPT database:

| >GP: CAB12535 GB: Z99107 similar to hypothetical proteins [Bacillus subtilis] | | | |
|---|---|---|---|
| Identities = 41/127 (32%), Positives = 63/127 (49%), Gaps = 11/127 (8%) | | | |
| Query: | 1 | MISSIGQVMLYVSNVEASADFWKNKVGFERVEKQTQGDYVTYI-VAPKLDSEVSFVLHDK | 59 |
| | | MI IG V +YV + + + FW KVGF+ G +++ VAPK +E V++ K | |
| Sbjct: | 1 | MIKQIGTVAVYVEDQQKAKQFWTEKVGFDIAADHPMGPEASWLEVAPK-GAETRLVIYPK | 59 |
| Query: | 60 | AIIAQMSPELDLATPSILFETTDIDSTYQELTAN--EVMTNP-IVDMGSMRVFNFSDNDN | 116 |
| | | A M + SI+FE DI TY+++ N E + P ++ G+ F D D | |
| Sbjct: | 60 | A----MMKGSEQMKASIVFECEDIFGTYEKMKTNGVEFLGEPNQMEWGTF--VQFKDEDG | 113 |
| Query: | 117 | NYFAIRE | 123 |
| | | N F ++E | |
| Sbjct: | 114 | NVFLLKE | 120 |

[4257] No corresponding DNA sequence was identified in S. pyogenes.

[4258] Based on this analysis, it was predicted that this protein and its epitopes, could be useful antigens for vaccines or diagnostics.

### EXAMPLE 741

[4259] A DNA sequence (GBSx0787) was identified in S. agalactiae <SEQ ID 2269> which encodes the amino acid sequence <SEQ ID 2270>. Analysis of this protein sequence reveals the following:

```
Possible site: 37
>>> Seems to have no N-terminal signal sequence
----- Final Results -----
                            bacterial cytoplasm --- Certainty = 0.3402(Affirmative) < succ>
                              bacterial membrane --- Certainty = 0.0000(Not Clear) < succ>
                                bacterial outside --- Certainty = 0.0000(Not Clear) < succ>
```

[4260] The protein has homology with the following sequences in the GENPEPT database:

| >GP: BAB04569 GB: AP001510 unknown conserved protein in others | | | |
|---|---|---|---|
| [Bacillus halodurans] | | | |
| Identities = 46/144 (31%), Positives = 83/144 (56%), Gaps = 10/144 (6%) | | | |
| Query: | 1 | MVKALETYIVTNGNGRQAVDFYKDVFQADLVNMMTWEEM--DPNC--LEDRKDLIINAQL | 56 |
| | | M+ + Y++ +G+G+ A++FY+D A+++ + T+ ++ PN KDLI++A L | |
| Sbjct: | 1 | MILTMNPYLMLDGDGQAAIEFYQDALNAEVITIQTYGDLPEQPNSPMASVNKDLILHAHL | 60 |
| Query: | 57 | IFDGIRLQISDENPD-----FVYQAGKNVTAAIIVGSVEEAREIYEKLKKSAQEVQLELQ | 111 |
| | | + L ISD+ D F +G VT A+ +VE E+++KL +E+ L+ | |
| Sbjct: | 61 | KLGEMDLMISDQCLDVDPERFPQHSGSPVTIALTTNNVEMTTEVFQKLASGGEEIA-PLE | 119 |
| Query: | 112 | ETFWSPAYANLVDQFGVMWQISTE | 135 |
| | | +TF+SP Y + D+FG+ W +ST+ | |
| Sbjct: | 120 | KTFFSPLYGQVTDKFGITWHVSTQ | 143 |

[4261] No corresponding DNA sequence was identified in S. pyogenes.

[4262] Based on this analysis, it was predicted that this protein and its epitopes, could be useful antigens for vaccines or diagnostics.

### EXAMPLE 742

[4263] A DNA sequence (GBSx0788) was identified in S. agalactiae <SEQ ID 2271> which encodes the amino acid sequence <SEQ ID 2272>. Analysis of this protein sequence reveals the following:

```
Possible site: 42
>>> Seems to have no N-terminal signal sequence
----- Final Results -----
                              bacterial membrane --- Certainty = 0.0000(Not Clear) < succ>
                                bacterial outside --- Certainty = 0.0000(Not Clear) < succ>
                            bacterial cytoplasm --- Certainty = 0.0000(Not Clear) < succ>
```

[4264] The protein has homology with the following sequences in the GENPEPT database:

| >GP: BAB03784 GB: AP001507 UDP-N-acetylglucosamine pyrophosphorylase | | | |
|---|---|---|---|
| [Bacillus halodurans] | | | |
| Identities = 238/453 (52%), Positives = 322/453 (70%), Gaps = 1/453 (0%) | | | |
| Query: | 1 | MSN-YAIILAAGKGTRMKSDLPKVMHKVSGITMLEHVFRSVQAIEPSKIVTVIGHKAELV | 59 |
| | | MSN +A+ILAAG+GTRMKS L KV+H V G M++HV V A+ +IVT+IGH A+ V | |
| Sbjct: | 1 | MSNRFAVILAAGQGTRMKSKLYKVLHSVCGKPMVQHVVDQVSALGFDEIVTIIGHGADAV | 60 |
| Query: | 60 | RDVLGDKSEFVMQTEQLGTGHAVMMAEEELATSKGHTLVIAGDTPLITGESLKNLIDFHV | 119 |
| | | + LG++ + +Q EQLGTGHAV+ AE L +G T+V+ GDTPL+T E++ +++ +H | |
| Sbjct: | 61 | KSQLGERVSYALQEEQLGTGHAVLQAESALGGRRGVTIVLCGDTPLLTAETIDHVMSYHE | 120 |
| Query: | 120 | NHKNVATILTADAANPFGYGRIIRNSDDEVTKIVEQKDANDFEQQVKEINTGTYVFDNQS | 179 |
| | | + AT+LTA+ A+P GYGRI+RN V +IVE KDA E+Q+ E+NTGTY FDN++ | |
| Sbjct: | 121 | EEQAKATVLTAELADPTGYGRIVRNDKGLVERIVEHKDATSEEKQITEVNTGTYCFDNEA | 180 |
| Query: | 180 | LFEALKDINTNNAQGEYYLTDVIGIFKEAGKKVGAYKLRDFDESLGVNDRVALATAEKVM | 239 |
| | | LF+ALK++ NNAQGEYYL DVI I + G+KV AYK +E+LGVNDRVALA AE+VM | |
| Sbjct: | 181 | LFQALKEVGNNNAQGEYYLPDVIQILQTKGEKVAAYKTAHVEETLGVNDRVALAQAEQVM | 240 |
| Query: | 240 | RHRIARQHMVNGVTVVNPDSAYIDIDVEIGEESVIEPNVTLKGQTKIGKGTLLTNGSYLV | 299 |
| | | + RI M GVT ++P+ Y+ D IG+++VI P + GQT IG+G +L + L | |
| Sbjct: | 241 | KRRINEAWMRKGVTFIDPEQTYVSPDATIGQDTVIYPGTMVLGQTTIGEGCVLGPHTELK | 300 |
| Query: | 300 | DAQVGNDVTITNSMVEESIISDGVTVGPYAHIRPGTSLAKGVHIGNFVEVKGSQIGENTK | 359 |
| | | D+++GN + S+V S + + V++GP++HIRP + + V IGNFVEVK S IG+ +K | |
| Sbjct: | 301 | DSKIGNKTAVKQSVVHNSEVGERVSIGPFSHIRPASMIHDDVRIGNFVEVKKSTIGKESK | 360 |
| Query: | 360 | AGHLTYIGNAEVGCDVNFGAGTITVNYDGQNKFKTEIGSNVFIGSNSTLIAPLEIGDNAL | 419 |
| | | A HL+YIG+AEVG VNF G+ITVNYDG+NKF T+I + FIG NS LIAP+ IG AL | |
| Sbjct: | 361 | ASHLSYIGDAEVGERVNFSCGSITVNYDGKNKFLTKIEDDAFIGCNSNLIAPVTIGKGAL | 420 |
| Query: | 420 | TAAGSTITDNVPIDSIAIGRGRQVNKEGYANKK | 452 |
| | | AAGSTIT++VP D+++I R RQ NKE Y KK | |
| Sbjct: | 421 | IAAGSTITEDVPSDALSIARARQTNKEHYVTKK | 453 |

[4265] A related DNA sequence was identified in S. pyogenes <SEQ ID 2273> which encodes the amino acid sequence <SEQ ID 2274>. Analysis of this protein sequence reveals the following:

```
Possible site: 42
>>> Seems to have no N-terminal signal sequence
----- Final Results -----
                            bacterial cytoplasm --- Certainty = 0.0461(Affirmative) < succ>
                              bacterial membrane --- Certainty = 0.0000(Not Clear) < succ>
                                bacterial outside --- Certainty = 0.0000(Not Clear) < succ>
```

[4266] An alignment of the GAS and GBS proteins is shown below:

| Identities = 345/458 (75%), Positives = 398/458 (86%) | | | |
|---|---|---|---|
| Query: | 1 | MSNYAIILAAGKGTRMKSDLPKVMHKVSGITMLEHVFRSVQAIEPSKIVTVIGHKAELVR | 60 |
| | | M+NYAIILAAGKGTRM SDLPKV+HKVSG+TMLEHVFRSV+AI P K VTVIGHK+E+VR | |
| Sbjct: | 1 | MTNYAIILAAGKGTRMTSDLPKVLHKVSGLTMLEHVFRSVKAISPEKSVTVIGHKSEMVR | 60 |
| Query: | 61 | DVLGDKSEFVMQTEQLGTGHAVMMAEEELATSKGHTLVIAGDTPLITGESLKNLIDFHVN | 120 |
| | | VL D+S FV QTEQLGTGHAVMMAE +L +GHTLVIAGDTPLITGESLK+LIDFHVN | |
| Sbjct: | 61 | AVLADQSAFVHQTEQLGTGHAVMMAETQLEGLEGHTLVIAGDTPLITGESLKSLIDFHVN | 120 |
| Query: | 121 | HKNVATILTADAANPFGYGRIIRNSDDEVTKIVEQKDANDFEQQVKEINTGTYVFDNQSL | 180 |
| | | HKNVATILTA A +PFGYGRI+RN D EV KIVEQKDAN++EQQ+KEINTGTYVFDN+ L | |
| Sbjct: | 121 | HKNVATILTATAQDPFGYGRIVRNKDGEVIKIVEQKDANEYEQQLKEINTGTYVFDNKRL | 180 |
| Query: | 181 | FEALKDINTNNAQGEYYLTDVIGIFKEAGKKVGAYKLRDFDESLGVNDRVALATAEKVMR | 240 |
| | | FEALK I TNNAQGEYYLTDV+ IF+ +KVGAY LRDF+ESLGVNDRVALA AE VMR | |
| Sbjct: | 181 | FEALKCITTNNAQGEYYLTDVVAIFRANKEKVGAYILRDFNESLGVNDRVALAIAETVMR | 240 |
| Query: | 241 | HRIARQHMVNGVTVVNPDSAYIDIDVEIGEESVIEPNVTLKGQTKIGKGTLLTNGSYLVD | 300 |
| | | RI ++HMVNGVT NP++ YI+ DVEI + +IE NVTLKG+T IG GT+LTNG+Y+VD | |
| Sbjct: | 241 | QRITQKHMVNGVTFQNPETVYIESDVEIAPDVLIEGNVTLKGRTHIGSGTVLTNGTYIVD | 300 |
| Query: | 301 | AQVGNDVTITNSMVEESIISDGVTVGPYAHIRPGTSLAKGVHIGNFVEVKGSQIGENTKA | 360 |
| | | +++G++ +TNSM+E S+++ GVTVGPYAH+RPGT+L + VHIGNFVEVKGS IGE TKA | |
| Sbjct: | 301 | SEIGDNCVVTNSMIESSVLAAGVTVGPYAHLRPGTTLDREVHIGNFVEVKGSHIGEKTKA | 360 |
| Query: | 361 | GHLTYIGNAEVGCDVNFGAGTITVNYDGQNKFKTEIGSNVFIGSNSTLIAPLEIGDNALT | 420 |
| | | GHLTYIGNA+VG VN GAGTITVNYDGQNK++T IG + FIGSNSTLIAPLE+GD+ALT | |
| Sbjct: | 361 | GHLTYIGNAQVGSSVNVGAGTITVNYDGQNKYETVIGDHAFIGSNSTLIAPLEVGDHALT | 420 |
| Query: | 421 | AAGSTITDNVPIDSIAIGRGRQVNKEGYANKKPHHPSQ | 458 |
| | | AAGSTI+ VPIDSIAIGR RQV KEGYA + HHPS+ | |
| Sbjct: | 421 | AAGSTISKTVPIDSIAIGRSRQVTKEGYAKRLAHHPSR | 458 |

[4267] Based on this analysis, it was predicted that these proteins and their epitopes could be useful antigens for vaccines or diagnostics.

### EXAMPLE 743

[4268] A DNA sequence (GBSx0790) was identified in S. agalactiae <SEQ ID 2275> which encodes the amino acid sequence <SEQ ID 2276>. Analysis of this protein sequence reveals the following:

```
Possible site: 52
>>> Seems to have no N-terminal signal sequence
----- Final Results -----
                            bacterial cytoplasm --- Certainty = 0.1366(Affirmative) < succ>
                              bacterial membrane --- Certainty = 0.0000(Not Clear) < succ>
                                bacterial outside --- Certainty = 0.0000(Not Clear) < succ>
```

[4269] The protein has homology with the following sequences in the GENPEPT database:

| >GP: CAB14293 GB: Z99116 similar to hypothetical proteins [Bacillus | | | |
|---|---|---|---|
| subtilis] | | | |
| Identities = 92/177 (51%), Positives = 124/177 (69%), Gaps = 4/177 (2%) | | | |
| Query: | 4 | EEKTINRQTVFDGQIIKVAVDDVELPNGLGQSKRELVFHGGAVATLAVTPEHKIVLVKQY | 63 |
| | | EEKTI ++ +F G++I + V+DVELPNG SKRE+V H GAVA LAVT E KI++VKQ+ | |
| Sbjct: | 5 | EEKTIAKEQIFSGKVIDLYVEDVELPNGKA-SKREIVKHPGAVAVLAVTDEGKIIMVKQF | 63 |
| Query: | 64 | RKAIEGISYEIPAGKLETGESGSKEEAALRELEEETGYTG-NLEILYSFYTAIGFCNEKI | 122 |
| | | RK +E EIPAGKLE GE E ALRELEEETGYT L + +FYT+ GF +E + | |
| Sbjct: | 64 | RKPLERTIVEIPAGKLEKGE--EPEYTALRELEEETGYTAKKLTKITAFYTSPGFADEIV | 121 |
| Query: | 123 | VLYLATDLQKVENPRPQDDDEVLELLELSYEDCMQMVEKGMIQDAKTIIALQYYGLK | 179 |
| | | ++LA +L +E R D+DE +E++E++ ED +++VE + DAKT A+QY LK | |
| Sbjct: | 122 | HVFLAEELSVLEEKRELDEDEFVEVMEVTLEDALKLVESREVYDAKTAYAIQYLQLK | 178 |

[4270] A related DNA sequence was identified in S. pyogenes <SEQ ID 2277> which encodes the amino acid sequence <SEQ ID 2278>. Analysis of this protein sequence reveals the following:

Possible site: 50
>>> Seems to have no N-terminal signal sequence
----- Final Results -----
bacterial cytoplasm --- Certainty = 0.1120 (Affirmative) < succ>
bacterial membrane --- Certainty = 0.0000 (Not Clear) < succ>
bacterial outside --- Certainty = 0.0000 (Not Clear) < succ>

[4271] An alignment of the GAS and GBS proteins is shown below:

| Identities = 136/182 (74%), Positives = 153/182 (83%) | | | |
|---|---|---|---|
| Query: | 1 | MDFEEKTINRQTVFDGQIIKVAVDDVELPNGLGQSKRELVFHGGAVATLAVTPEHKIVLV | 60 |
| | | M FEEKT+ RQTVFDG I KV VDDVELPN LGQSKREL+FH GAVA LA+TPE KIVLV | |
| Sbjct: | 1 | MKFEEKTLKRQTVFDGHIFKVVVDDVELPNNLGQSKRELIFHRGAVAVLAITPERKIVLV | 60 |
| Query: | 61 | KQYRKAIEGISYEIPAGKLETGESGSKEEAALRELEEETGYTGNLEILYSFYTAIGFCNE | 120 |
| | | KQYRKAIE +SYEIPAGKLE GE GSK +AA RELEEET YTG L LY FYTAIGFCNE | |
| Sbjct: | 61 | KQYRKAIERVSYEIPAGKLEIGEEGSKLKAAARELEEETAYTGTLTFLYEFYTAIGFCNE | 120 |
| Query: | 121 | KIVLYLATDLQKVENPRPQDDDEVLELLELSYEDCMQMVEKGMIQDAKTIIALQYYGLKM | 180 |
| | | KI L+LATDL +V NP+PQDDDEV+E+LEL+Y++CM +V +G + DAKT+IALQYY L | |
| Sbjct: | 121 | KITLFLATDLIQVANPKPQDDDEVIEVLELTYQECMDLVAQGKLADAKTLIALQYYALHF | 180 |
| Query: | 181 | GG | 182 |
| | | GG | |
| Sbjct: | 181 | GG | 182 |

[4272] Based on this analysis, it was predicted that these proteins and their epitopes could be useful antigens for vaccines or diagnostics.

### EXAMPLE 744

[4273] A DNA sequence (GBSx0791) was identified in S. agalactiae <SEQ ID 2279> which encodes the amino acid sequence <SEQ ID 2280>. Analysis of this protein sequence reveals the following:

| Possible site: 16 | | | |
|---|---|---|---|
| >>> Seems to have no N-terminal signal sequence | | | |
| INTEGRAL | Likelihood = −15.44 | Transmembrane | 70-86 (64-88) |

----- Final Results -----
bacterial membrane --- Certainty = 0.7177 (Affirmative) < succ>
bacterial outside --- Certainty = 0.0000 (Not Clear) < succ>
bacterial cytoplasm --- Certainty = 0.0000 (Not Clear) < succ>

[4274] The protein has no significant homology with any sequences in the GENPEPT database.

[4275] A related DNA sequence was identified in S. pyogenes <SEQ ID 2281> which encodes the amino acid sequence <SEQ ID 2282>. Analysis of this protein sequence reveals the following:

| Possible site: 35 | | | |
|---|---|---|---|
| >>> Seems to have no N-terminal signal sequence | | | |
| INTEGRAL | Likelihood = −15.60 | Transmembrane | 65-81 (58-83) |

----- Final Results -----
bacterial membrane --- Certainty = 0.7241 (Affirmative) < succ>
bacterial outside --- Certainty = 0.0000 (Not Clear) < succ>
bacterial cytoplasm --- Certainty = 0.0000 (Not Clear) < succ>

[4276] An alignment of the GAS and GBS proteins is shown below:

| Identities = 39/89 (43%), Positives = 61/89 (67%), Gaps = 6/89 (6%) | | | |
|---|---|---|---|
| Query: | 1 | MGKPLLTDDMIERSNRGEKVSGQTILDQETKIISTEDGMEQLTDENGKHIYKSRRIENAK | 60 |
| | | MG+PLLTDD+IE++ R E ++ +TK+++ + ++ IYKSRRIENAK | |
| Sbjct: | 2 | MGRPLLTDDIIEKARRMETFEPDDAVNFDTKVMTLPE------KDDKARIYKSRRIENAK | 55 |
| Query: | 61 | RNEFQRKLNLVLFILLILLALLFYAIFKL | 89 |
| | | R++ Q KLN++L +++L+A+L YAIF L | |
| Sbjct: | 56 | RSQLQSKLNVILIAVMLLIAILVYAIFYL | 84 |

[4277] Based on this analysis, it was predicted that these proteins and their epitopes could be useful antigens for vaccines or diagnostics.

### EXAMPLE 745

[4278] A DNA sequence (GBSx0792) was identified in S. agalactiae <SEQ ID 2283> which encodes the amino acid sequence <SEQ ID 2284>. This protein is predicted to be pfs protein (pfs). Analysis of this protein sequence reveals the following:

| Possible site: 55 | | | |
|---|---|---|---|
| >>> Seems to have no N-terminal signal sequence | | | |
| INTEGRAL | Likelihood = −0.32 | Transmembrane | 56-72 (56-72) |

----- Final Results -----
bacterial membrane --- Certainty = 0.1128 (Affirmative) < succ>
bacterial outside --- Certainty = 0.0000 (Not Clear) < succ>
bacterial cytoplasm --- Certainty = 0.0000 (Not Clear) < succ>

[4279] The protein has homology with the following sequences in the GENPEPT database:

| >GP: AAC22869 GB: U32801 pfs protein (pfs) [Haemophilus influenzae Rd] | | | |
|---|---|---|---|
| Identities = 100/229 (43%), Positives = 144/229 (62%) | | | |
| Query: | 1 | MKIGIIAAMEEELKLLVENLEDKSQETVLSNVYYSGRYGEHELVLVQSGVGKVMSAMSVA | 60 |
| | | MKIGI+ AM +E+++L + D+++ V S V + G+ ++ L+QSG+GKV +A+ | |
| Sbjct: | 1 | MKIGIVGAMAQEVEILKNLMADRTETRVASAVIFEGKINGKDVALLQSGIGKVAAAIGTT | 60 |
| Query: | 61 | ILVESFKVDAIINTGSAGAVATGLNVGDVVVADTLVYHDVDLTAFGYDYGQMSMQPLYFH | 120 |
| | | L++ K D +INTGSAG VA GL VGD+V++D YHD D+TAFGY+ GQ+ P F | |
| Sbjct: | 61 | ALLQLAKPDCVINTGSAGGVAKGLKVGDIVISDETRYHDADVTAFGYEKGQLPANPAAFL | 120 |
| Query: | 121 | SDKTFVSTFEAVLSKEEMISKVGLIATGDSFIAGQEKIDVIKGHFPQVLAVEMEGAAIAQ | 180 |
| | | SDK + + K+ K GLI +GDSFI ++KI IK FP V VEME AIAQ | |
| Sbjct: | 121 | SDKKLADLAQEIAEKQGQSVKRGLICSGDSFINSEDKIAQIKADFPNVTGVEMEATAIAQ | 180 |
| Query: | 181 | AAQATGKPFVVVRAMSDTAAHDANITFDEFIIEAGKRSAQVLMAFLKAL | 229 |
| | | A PFVVVRA+SD A+++F+EF+ A K+S+ +++ + L | |
| Sbjct: | 181 | VCYAFNVPFVVVRAISDGGDGKASMSFEEFLPLAAKQSSALVLGMIDRL | 229 |

[4280] A related DNA sequence was identified in S. pyogenes <SEQ ID 2285> which encodes the amino acid sequence <SEQ ID 2286>. Analysis of this protein sequence reveals the following:

Possible site: 23
>>> Seems to have no N-terminal signal sequence
----- Final Results -----
bacterial cytoplasm --- Certainty = 0.1245 (Affirmative) < succ>
bacterial membrane --- Certainty = 0.0000 (Not Clear) < succ>
bacterial outside --- Certainty = 0.0000 (Not Clear) < succ>

[4281] An alignment of the GAS and GBS proteins is shown below:

| Identities = 169/229 (73%), Positives = 189/229 (81%) | | | |
|---|---|---|---|
| Query: | 1 | MKIGIIAAMEEELKLLVENLEDKSQETVLSNVYYSGRYGEHELVLVQSGVGKVMSAMSVA | 60 |
| | | MKIGIIAAMEEEL LL+ NL D + VLS YY+GR+G+HEL+LVQSGVGKVMSAM+VA | |
| Sbjct: | 1 | MKIGIIAAMEEELSLLLANLLDAQEHQVLSKTYYTGRFGKHELILVQSGVGKVMSAMTVA | 60 |
| Query: | 61 | ILVESFKVDAIINTGSAGAVATGLNVGDVVVADTLVYHDVDLTAFGYDYGQMSMQPLYFH | 120 |
| | | ILVE FK AIINTGSAGAVA+ L +GDVVVAD LVYHDVD TAFGY YGQM+ QPLY+ | |
| Sbjct: | 61 | ILVEHFKAQAIINTGSAGAVASHLAIGDVVVADRLVYHDVDATAFGYAYGQMAGQPLYYD | 120 |
| Query: | 121 | SDKTFVSTFEAVLSKEEMISKVGLIATGDSFIAGQEKIDVIKGHFPQVLAVEMEGAAIAQ | 180 |
| | | D FV+ F+ VL E+ +VGLIATGDSF+AGQ+KID IK F VLAVEMEGAAIAQ | |
| Sbjct: | 121 | CDPQFVAIFKQVLKHEKTNGQVGLIATGDSFVAGQDKIDQIKTAFSDVLAVEMEGAAIAQ | 180 |
| Query: | 181 | AAQATGKPFVVVRAMSDTAAHDANITFDEFIIEAGKRSAQVLMAFLKAL | 229 |
| | | AA GKPF+VVRAMSDTAAHDANITFD+FIIEAGKRSAQ LM FL+ L | |
| Sbjct: | 181 | AAHTAGKPFIVVRAMSDTAAHDANITFDQFIIEAGKRSAQTLMTFLENL | 229 |

[4282] Based on this analysis, it was predicted that these proteins and their epitopes could be useful antigens for vaccines or diagnostics.

### EXAMPLE 746

[4283] A DNA sequence (GBSx0793) was identified in S. agalactiae <SEQ ID 2287> which encodes the amino acid sequence <SEQ ID 2288>. This protein is predicted to be SloR. Analysis of this protein sequence reveals the following:

Possible site: 53
>>> Seems to have no N-terminal signal sequence
----- Final Results -----
bacterial cytoplasm --- Certainty = 0.3777 (Affirmative) < succ>
bacterial membrane --- Certainty = 0.0000 (Not Clear) < succ>
bacterial outside --- Certainty = 0.0000 (Not Clear) < succ>

[4284] A related GBS nucleic acid sequence <SEQ ID 9405> which encodes amino acid sequence <SEQ ID 9406> was also identified.

[4285] The protein has homology with the following sequences in the GENPEPT database:

| >GP: AAF81675 GB: AF232688 SloR [Streptococcus mutans] | | | |
|---|---|---|---|
| Identities = 97/175 (55%), Positives = 134/175 (76%) | | | |
| Query: | 1 | MSEMIKKMISEQLIVKDKDLGYYLTKQGLLVVSDLYRKHRLVEVFLVNHLHYTADDIHEE | 60 |
| | | +SEM+KK++ E L++KDK GY LTK+G ++ S LYRKHRL+EVFL+NHL+YTAD+IHEE | |
| Sbjct: | 38 | VSEMVKKLLLEDLVLKDKQAGYLLTKKGQILASSLYRKHRLIEVFLMNHLNYTADEIHEE | 97 |
| Query: | 61 | AEVLEHTVSTTFVDQLEKLLDFPQFCPHGGTIPKKGEFLVEINQMTLDQISQLGTYVISR | 120 |
| | | AEVLEHTVS FV++L+K L++P+ CPHGGTIP+ G+ LVE + TL ++++G Y++ R | |
| Sbjct: | 98 | AEVLEHTVSDVFVERLDKFLNYPKVCPHGGTIPQHGQPLVERYRTTLKGVTEMGVYLLKR | 157 |
| Query: | 121 | VHDDFQLLKYLEQHRLHINDTIELTQIDPYAKTYHITYNDENLTIPERIASQIYV | 175 |
| | | V D+FQLLKY+EQH L I D + L + D +A Y I + E L + +ASQIY+ | |
| Sbjct: | 158 | VQDNFQLLKYMEQHHLKIGDELRLLEYDAFAGAYTIEKDGEQLQVTSAVASQIYI | 212 |

[4286] A related DNA sequence was identified in S. pyogenes <SEQ ID 2289> which encodes the amino acid sequence <SEQ ID 2290>. Analysis of this protein sequence reveals the following:

Possible site: 39
>>> Seems to have no N-terminal signal sequence
----- Final Results -----
bacterial cytoplasm --- Certainty = 0.2910 (Affirmative) < succ>
bacterial membrane --- Certainty = 0.0000 (Not Clear) < succ>
bacterial outside --- Certainty = 0.0000 (Not Clear) < succ>

[4287] An alignment of the GAS and GBS proteins is shown below:

| Identities = 44/75 (58%), Positives = 59/75 (78%) | | | |
|---|---|---|---|
| Query: | 1 | MSEMIKKMISEQLIVKDKDLGYYLTKQGLLVVSDLYRKHRLVEVFLVNHLHYTADDIHEE | 60 |
| | | +SEMIKKMIS+ IVKDK GY L +G +V++LYRK RL+EVFL++ L Y ++H+E | |
| Sbjct: | 38 | VSEMIKKMISQGWIVKDKAKGYLLKDKGYALVANLYRKLRLIEVFLIHQLGYNTQEVHQE | 97 |
| Query: | 61 | AEVLEHTVSTTFVDQ | 75 |
| | | AEVLEHTVS +F+D+ | |
| Sbjct: | 98 | AEVLEHTVSDSFIDR | 112 |

[4288] Based on this analysis, it was predicted that these proteins and their epitopes could be useful antigens for vaccines or diagnostics.

### EXAMPLE 747

[4289] A DNA sequence (GBSx0794) was identified in S. agalactiae <SEQ ID 2291> which encodes the amino acid sequence <SEQ ID 2292>. This protein is predicted to be undecaprenyl pyrophosphate synthetase (uppS). Analysis of this protein sequence reveals the following:

Possible site: 46
>>> Seems to have no N-terminal signal sequence
----- Final Results -----
bacterial cytoplasm --- Certainty = 0.3569 (Affirmative) < succ>
bacterial membrane --- Certainty = 0.0000 (Not Clear) < succ>
bacterial outside --- Certainty = 0.0000 (Not Clear) < succ>

[4290] A related GBS nucleic acid sequence <SEQ ID 9435> which encodes amino acid sequence <SEQ ID 9436> was also identified.

[4291] The protein has homology with the following sequences in the GENPEPT database:

| >GP: CAB13526 GB: Z99112 similar to hypothetical proteins [Bacillus | | | |
|---|---|---|---|
| subtilis] | | | |
| Identities = 88/165 (53%), Positives = 118/165 (71%), Gaps = 4/165 (2%) | | | |
| Query: | 1 | MNLPVKFFDKYVPELDKNNVRVQVIGDTHKLPKATYDAMQRACLRTKHNSGLVLNFALNY | 60 |
| | | M LP +F + Y+PEL + NV+V++IGD LP T A+++A T N G++LNFALNY | |
| Sbjct: | 100 | MKLPEEFLNTYLPELVEENVQVRIIGDETALPAHTLRAIEKAVQDTAQNDGMILNFALNY | 159 |
| Query: | 61 | GGRSEITNAIKEIAQDVLEAKLNPDDITEDLVANHLMTNSLPYLYRDPDLIIRTSGELRL | 120 |
| | | GGR+EI +A K +A+ V E LN +DI E L + +LMT SL +DP+L+IRTSGE+RL | |
| Sbjct: | 160 | GGRTEIVSAAKSLAEKVKEGSLNIEDIDESLFSTYLMTESL----QDPELLIRTSGEIRL | 215 |
| Query: | 121 | SNFLPWQSAYSEFYFTPVLWPDFKKDELHKAIVDYNQRHRRFGSV | 165 |
| | | SNF+ WQ AYSEF FT VLWPDFK+D +A+ ++QR RRFG + | |
| Sbjct: | 216 | SNFMLWQVAYSEFVFTDVLWPDFKEDHFLQALGEFQQRGRRFGGI | 260 |

[4292] A related DNA sequence was identified in S. pyogenes <SEQ ID 2293> which encodes the amino acid sequence <SEQ ID 2294>. Analysis of this protein sequence reveals the following:

Possible site: 57
>>> Seems to have no N-terminal signal sequence
----- Final Results -----
bacterial cytoplasm --- Certainty = 0.2073 (Affirmative) < succ>
bacterial membrane --- Certainty = 0.0000 (Not Clear) < succ>
bacterial outside --- Certainty = 0.0000 (Not Clear) < succ>

[4293] An alignment of the GAS and GBS proteins is shown below:

| Identities = 125/165 (75%), Positives = 145/165 (87%) | | | |
|---|---|---|---|
| Query: | 1 | MNLPVKFFDKYVPELDKNNVRVQVIGDTHKLPKATYDAMQRACLRTKHNSGLVLNFALNY | 60 |
| | | MNLPV FFDKYVP L +NNV++Q+IG+T +LP+ T A+ A +TK N+GL+LNFALNY | |
| Sbjct: | 85 | MNLPVTFFDKYVPVLHENNVKIQMIGETSRLPEDTLAALNAAIDKTKRNTGLILNFALNY | 144 |
| Query: | 61 | GGRSEITNAIKEIAQDVLEAKLNPDDITEDLVANHLMTNSLPYLYRDPDLIIRTSGELRL | 120 |
| | | GGR+EIT+A++ IAQDVL+AKLNP DITEDL+AN+LMT+ LPYLYRDPDLIIRTSGELRL | |
| Sbjct: | 145 | GGRAEITSAVRFIAQDVLDAKLNPGDITEDLIANYLMTDHLPYLYRDPDLIIRTSGELRL | 204 |
| Query: | 121 | SNFLPWQSAYSEFYFTPVLWPDFKKDELHKAIVDYNQRHRRFGSV | 165 |
| | | SNFLPWQSAYSEFYFTPVLWPDFKK EL KAI DYN+R RRFG V | |
| Sbjct: | 205 | SNFLPWQSAYSEFYFTPVLWPDFKKAELLKAIADYNRRQRRFGKV | 249 |

[4294] Based on this analysis, it was predicted that these proteins and their epitopes could be useful antigens for vaccines or diagnostics.

### EXAMPLE 748

[4295] A DNA sequence (GBSx0795) was identified in S. agalactiae <SEQ ID 2295> which encodes the amino acid sequence <SEQ ID 2296>. This protein is predicted to be phosphatidate cytidylyltransferase (cdsA). Analysis of this protein sequence reveals the following:

| Possible site: 22 | | | |
|---|---|---|---|
| >>> Seems to have a cleavable N-term signal seq. | | | |
| INTEGRAL | Likelihood = −8.65 | Transmembrane | 201-217 (194-222) |
| INTEGRAL | Likelihood = −7.96 | Transmembrane | 175-191 (170-197) |
| INTEGRAL | Likelihood = −5.89 | Transmembrane | 81-97 (74-99) |
| INTEGRAL | Likelihood = −3.03 | Transmembrane | 26-42 (23-42) |
| INTEGRAL | Likelihood = −2.92 | Transmembrane | 136-152 (135-153) |
| INTEGRAL | Likelihood = −2.02 | Transmembrane | 49-65 (47-66) |
| INTEGRAL | Likelihood = −0.64 | Transmembrane | 248-264 (248-264) |

----- Final Results -----
bacterial membrane --- Certainty = 0.4461 (Affirmative) < succ>
bacterial outside --- Certainty = 0.0000 (Not Clear) < succ>
bacterial cytoplasm --- Certainty = 0.0000 (Not Clear) < succ>

[4296] The protein has homology with the following sequences in the GENPEPT database:

| >GP: BAB06141 GB: AP001515 phosphatidate cytidylyltransferase | | | |
|---|---|---|---|
| [Bacillus halodurans] | | | |
| Identities = 116/266 (43%), Positives = 172/266 (64%), Gaps = 6/266 (2%) | | | |
| Query: | 1 | MKERVIWGAVALAIFIPFLVMGGLPFQFLVGLLAMIGVSELLRMRRLEIFSFEGALAMIG | 60 |
| | | MK+RV+ + +F+ F+V+GGLPF + ++A I +SELL+M+++ FS GA +++ | |
| Sbjct: | 1 | MKQRVVTAIIFGLVFLTFVVVGGLPFTMFIIVVATIAMSELLKMKKIAPFSPMGAFSLLP | 60 |
| Query: | 61 | AFVLTVPLDSYLSFLPVDASLSAYGIVIFMILAGTVLNSNSYSFEDAAFPIASSFYVGIG | 120 |
| | | ++L +P D + +P + + I +L TVL N+++F++A F I SS Y+G G | |
| Sbjct: | 61 | MWMLLLPNDWFKVVIPDFTKVEIFIFFILFLLLLTVLTKNTFTFDEAGFVILSSAYIGYG | 120 |
| Query: | 121 | FQNLVSARMA---GIDKVLLALFIVWATDIGAYMIGRQFGQRKLLPSVSPNKTIEGSLGG | 177 |
| | | F L+ +R G+ V LF++WATD GAY GR FG+ KL P +SPNKTIEGS+GG | |
| Sbjct: | 121 | FHFLLLSREIPEIGLPLVFFVLFVIWATDSGAYFAGRAFGKHKLWPHISPNKTIEGSIGG | 180 |
| Query: | 178 | IASAIVVAFFFMLFDKTVYAPHSFLVMLVLVAIFSIFGQFGDLVESSIKRHFGVKDSGKL | 237 |
| | | I A+++ F S+ V L ++ + S+FGQ GDLVES++KRH+ VKDSG + | |
| Sbjct: | 181 | IILAVIIGSLFYWIMPLF---SSYGVALAVIVVASVFGQLGDLVESALKRHYAVKDSGTV | 237 |
| Query: | 238 | IPGHGGILDRFDSMIFVFPIMHFFGL | 263 |
| | | +PGHGGILDRFDS+I+V PI+H L | |
| Sbjct: | 238 | LPGHGGILDRFDSLIYVMPILHLLHL | 263 |

[4297] A related DNA sequence was identified in S. pyogenes <SEQ ID 2297> which encodes the amino acid sequence <SEQ ID 2298>. Analysis of this protein sequence reveals the following:

| Possible site: 61 | | | |
|---|---|---|---|
| >>> Seems to have an uncleavable N-term signal seq | | | |
| INTEGRAL | Likelihood = −9.98 | Transmembrane | 175-191 (170-197) |
| INTEGRAL | Likelihood = −8.97 | Transmembrane | 5-21 (4-42) |
| INTEGRAL | Likelihood = −6.85 | Transmembrane | 201-217 (197-222) |
| INTEGRAL | Likelihood = −6.53 | Transmembrane | 81-97 (79-99) |
| INTEGRAL | Likelihood = −4.73 | Transmembrane | 49-65 (47-71) |
| INTEGRAL | Likelihood = −3.40 | Transmembrane | 136-152 (135-153) |
| INTEGRAL | Likelihood = −3.24 | Transmembrane | 26-42 (22-42) |
| INTEGRAL | Likelihood = −1.17 | Transmembrane | 248-264 (248-264) |

----- Final Results -----
bacterial membrane --- Certainty = 0.4991 (Afffirmative) < succ>
bacterial outside --- Certainty = 0.0000 (Not Clear) < succ>
bacterial cytoplasm --- Certainty = 0.0000 (Not Clear) < succ>

[4298] The protein has homology with the following sequences in the databases:

| >GP: BAB06141 GB: AP001515 phosphatidate cytidylyltransferase | | | |
|---|---|---|---|
| [Bacillus halodurans] | | | |
| Identities = 125/266 (46%), Positives = 177/266 (65%), Gaps = 6/266 (2%) | | | |
| Query: | 1 | MKERVVWGGVAVAIFLPFLIIGNLPFQLFVGVLAMIGVSELLKMKRLEVFSFEGVFAMLA | 60 |
| | | MK+RVV + +FL F+++G LPF +F+ V+A I +SELLKMK++ FS G F++L | |
| Sbjct: | 1 | MKQRVVTAIIFGLVFLTFVVVGGLPFTMFIIVVATIAMSELLKMKKIAPFSPMGAFSLLP | 60 |
| Query: | 61 | AFVLAVPMDHYLTFLPIDANVAFYSLMVFFILAGTVLNSRAYSFDDAAFPIATSFYVGIG | 120 |
| | | ++L +P D + +P V + + F+L TVL ++FD+A F I +S Y+G G | |
| Sbjct: | 61 | MWMLLLPNDWFKVVIPDFTKVEIFIFFILFLLLLTVLTKNTFTFDEAGFVILSSAYIGYG | 120 |
| Query: | 121 | FQHLINAR---LSGIDKVFLALFIVWATDIGAYLIGRQFGRRKLLPTVSPNKTIEGSLGG | 177 |
| | | F L+ +R G+ VF LF++WATD GAY GR FG+ KL P +SPNKTIEGS+GG | |
| Sbjct: | 121 | FHFLLLSREIPEIGLPLVFFVLFVIWATDSGAYFAGRAFGKHKLWPHISPNKTIEGSIGG | 180 |
| Query: | 178 | IACAVLVSFIFMVIDRSVYAPHHFLTMLVLVALFSIFAQFGDLVESALKRHFGVKDSGKL | 237 |
| | | I AV++ +F I +++ + +++VA S+F Q GDLVESALKRH+ VKDSG + | |
| Sbjct: | 181 | IILAVIIGSLFYWI-MPLFSSYGVALAVIVVA--SVFGQLGDLVESALKRHYAVKDSGTV | 237 |
| Query: | 238 | IPGHGGILDRFDSMIFVFPIMHLFGL | 263 |
| | | +PGHGGILDRFDS+I+V PI+HL L | |
| Sbjct: | 238 | LPGHGGILDRFDSLIYVMPILHLLHL | 263 |

[4299] An alignment of the GAS and GBS proteins is shown below:

| Identities = 204/264 (77%), Positives = 243/264 (91%) | | | |
|---|---|---|---|
| Query: | 1 | MKERVIWGAVALAIFIPFLVMGGLPFQFLVGLLAMIGVSELLRMRRLEIFSFEGALAMIG | 60 |
| | | MKERV+WG VA+AIF+PFL++G LPFQ VG+LAMIGVSELL+M+RLE+FSFEG AM+ | |
| Sbjct: | 1 | MKERVVWGGVAVAIFLPFLIIGNLPFQLFVGVLAMIGVSELLKMKRLEVFSFEGVFAMLA | 60 |
| Query: | 61 | AFVLTVPLDSYLSFLPVDASLSAYGIVIFMILAGTVLNSNSYSFEDAAFPIASSFYVGIG | 120 |
| | | AFVL VP+D YL+FLP+DA+++ Y +++F ILAGTVLNS +YSF+DAAFPIA+SFYVGIG | |
| Sbjct: | 61 | AFVLAVPMDHYLTFLPIDANVAFYSLMVFFILAGTVLNSRAYSFDDAAFPIATSFYVGIG | 120 |
| Query: | 121 | FQNLVSARMAGIDKVLLALFIVWATDIGAYMIGRQFGQRKLLPSVSPNKTIEGSLGGIAS | 180 |
| | | FQ+L++AR++GIDKV LALFIVWATDIGAY+IGRQFG+RKLLP+VSPNKTIEGSLGGIA | |
| Sbjct: | 121 | FQHLINARLSGIDKVFLALFIVWATDIGAYLIGRQFGRRKLLPTVSPNKTIEGSLGGIAC | 180 |
| Query: | 181 | AIVVAFFFMLFDKTVYAPHSFLVMLVLVAIFSIFGQFGDLVESSIKRHFGVKDSGKLIPG | 240 |
| | | A++V+F FM+ D++VYAPH FL MLVLVA+FSIF QFGDLVES++KRHFGVKDSGKLIPG | |
| Sbjct: | 181 | AVLVSFIFMVIDRSVYAPHHFLTMLVLVALFSIFAQFGDLVESALKRHFGVRDSGKLIPG | 240 |
| Query: | 241 | HGGILDRFDSMIFVFPIMHFFGLF | 264 |
| | | HGGILDRFDSMIFVFPIMH FGLF | |
| Sbjct: | 241 | HGGILDRFDSMIFVFPIMHLFGLF | 264 |

[4300] Based on this analysis, it was predicted that these proteins and their epitopes could be useful antigens for vaccines or diagnostics.

### EXAMPLE 749

[4301] A DNA sequence (GBSx0796) was identified in S. agalactiae <SEQ ID 2299> which encodes the amino acid sequence <SEQ ID 2300>. Analysis of this protein sequence reveals the following:

| Possible site: 46 | | | |
|---|---|---|---|
| >>> Seems to have an uncleavable N-term signal seq | | | |
| INTEGRAL | Likelihood = −11.09 | Transmembrane | 2-18 (1-25) |
| INTEGRAL | Likelihood = −9.39 | Transmembrane | 394-410 (390-415) |
| INTEGRAL | Likelihood = −8.01 | Transmembrane | 181-197 (173-198) |
| INTEGRAL | Likelihood = −2.97 | Transmembrane | 343-359 (342-360) |

----- Final Results -----
bacterial membrane --- Certainty = 0.5437 (Affirmative) < succ>
bacterial outside --- Certainty = 0.0000 (Not Clear) < succ>
bacterial cytoplasm --- Certainty = 0.0000 (Not Clear) < succ>

[4302] The protein has homology with the following sequences in the GENPEPT database:

| >GP: AAD47948 GB: AF152237 Eep [Enterococcus faecalis] | | | |
|---|---|---|---|
| Identities = 229/425 (53%), Positives = 298/425 (69%), Gaps = 9/425 (2%) | | | |
| Query: | 1 | MLGILTFIIIFGVIVVVHEFGHFYFAKKSGILVREFAIGMGPKIFSHIDKEGTTYTIRIL | 60 |
| | | M I+TFII+FG++V+VHEFGHFYFAK++GILVREFAIGMGPKIF+H K+GTTYTIR+L | |
| Sbjct: | 1 | MKTIITFIIVFGILVLVHEFGHFYFAKRAGILVREFAIGMGPKIFAHRGKDGTTYTIRLL | 60 |
| Query: | 61 | PLGGYVRMAGWGDDKTEIKTGTPASLTLNKEGIVTRINLSGKQLDNTSLPINVTAYDLED | 120 |
| | | P+GGYVRMAG G+D TEI G P S+ LN G V +IN S K S+P+ V +DLE | |
| Sbjct: | 61 | PIGGYVRMAGMGEDMTEITPGMPLSVELNAVGNVVKINTSKKVQLPHSIPMEVVDFDLEK | 120 |
| Query: | 121 | KLTITGLV---LSETKTYSVDHDATIIEEDGTEIRIAPLDMQYQNASVWGRLITNFAGPM | 177 |
| | | +L I G V E Y VDHDATIIE DGTE+RIAPLD+Q+Q+A + R++TNFAGPM | |
| Sbjct: | 121 | ELFIKGYVNGNEEEETVYKVDHDATIIESDGTEVRIAPLDVQFQSAKLSQRILTNFAGPM | 180 |
| Query: | 178 | NNFILGLVVFIALAFIQGGVQDLSTNQV-RVSENGPAASAGLKNNDRILQIGSHKVSNWE | 236 |
| | | NNFILG ++F F+QGGV DL+TNQ+ +V NGPAA AGLK ND++L I +K+ +E | |
| Sbjct: | 181 | NNFILGFILFTLAVFLQGGVTDLNTNQIGQVIPNGPAAEAGLKENDKVLSINNQKIKKYE | 240 |
| Query: | 237 | QLTAAVEKSTRHLEKKQKLALKIKSKEVVKTINVKPQKVDKSYI--IGIMPALKTSFKDK | 294 |
| | | T V+K+ EK ++ KE T+ + QKV+K I +G+ P +KT K | |
| Sbjct: | 241 | DFTTIVQKNP---EKPLTFVVERNGKEEQLTVTPEKQKVEKQTIGKVGVYPYMKTDLPSK | 297 |
| Query: | 295 | LLGGLKLAWESFFRILNELKKLIAHFSINKLGGPVALYQASSQAAKNGFVTVLNLMGLIS | 354 |
| | | L+GG++ S +I L L FS+NKLGGPV +++ S +A+ G TV+ LM ++S | |
| Sbjct: | 298 | LMGGIQDTLNSTTQIFKALGSLFTGFSLNKLGGPVMMFKLSEEASNAGVSTVVFLMAMLS | 357 |
| Query: | 355 | INLGIMNLIPIPALDGGKIVMNILEAIRRKPLKQETETYITLAGVAVMLVLMIAVTWNDI | 414 |
| | | +NLGI+NL+PIPALDGGKIV+NI+E +R KP+ E E ITL G ++VLM+ VTWNDI | |
| Sbjct: | 358 | MNLGIINLLPIPALDGGKIVLNIIEGVRGKPISPEKEGIITLIGFGFVMVLMVLVTWNDI | 417 |
| Query: | 415 | MRAFF | 419 |
| | | R FF | |
| Sbjct: | 418 | QRFFF | 422 |

[4303] A related DNA sequence was identified in S. pyogenes <SEQ ID 2301> which encodes the amino acid sequence <SEQ ID 2302>. Analysis of this protein sequence reveals the following:

| Possible site: 26 | | | |
|---|---|---|---|
| >>> Seems to have an uncleavable N-term signal seq | | | |
| INTEGRAL | Likelihood = −11.41 | Transmembrane | 2-18 (1-25) |
| INTEGRAL | Likelihood = −9.77 | Transmembrane | 394-410 (390-415) |
| INTEGRAL | Likelihood = −9.61 | Transmembrane | 180-196 (173-201) |
| INTEGRAL | Likelihood = −2.66 | Transmembrane | 347-363 (343-363) |

----- Final Results -----
bacterial membrane --- Certainty = 0.5564 (Affirmative) < succ>
bacterial outside --- Certainty = 0.0000 (Not Clear) < succ>
bacterial cytoplasm --- Certainty = 0.0000 (Not Clear) < succ>

[4304] The protein has homology with the following sequences in the databases:

| >GP: AAD47948 GB: AF152237 Eep [Enterococcus faecalis] | | | |
|---|---|---|---|
| Identities = 230/427 (53%), Positives = 298/427 (68%), Gaps = 13/427 (3%) | | | |
| Query: | 1 | MLGIITFIIIFGILVIVHEFGHFYFAKKSGILVREFAIGMGPKIFSHVDQGGTLYTLRML | 60 |
| | | M IITFII+FGILV+VHEFGHFYFAK++GILVREFAIGMGPKIF+H + GT YT+R+L | |
| Sbjct: | 1 | MKTIITFIIVFGILVLVHEFGHFYFAKRAGILVREFAIGMGPKIFAHRGKDGTTYTIRLL | 60 |
| Query: | 61 | PLGGYVRMAGWGDDKTEIKTGTPASLTLNEQGFVKRINLSQSKLDPTSLPMHVTGYDLED | 120 |
| | | P+GGYVRMAG G+D TEI G P S+ LN G V +IN S+ P S+PM V +DLE | |
| Sbjct: | 61 | PIGGYVRMAGMGEDMTEITPGMPLSVELNAVGNVVKINTSKKVQLPHSIPMEVVDFDLEK | 120 |
| Query: | 121 | QLSITGLV---LEETKTYKVAHDATIVEEDGTEIRIAPLDVQYQNASIGGRLITNFAGPM | 177 |
| | | +L I G V EE YKV HDATI+E DGTE+RIAPLDVQ+Q+A + R++TNFAGPM | |
| Sbjct: | 121 | ELFIKGYVNGNEEEETVYKVDHDATIIESDGTEVRIAPLDVQFQSAKLSQRILTNFAGPM | 180 |
| Query: | 178 | NNFILGIVVFILLVFLQGGMPDFSSNHV-RVQENGAAAKAGLRDNDQIVAINGYKVTSWN | 236 |
| | | NNFILG ++F L VFLQGG+ D ++N + +V NG AA+AGL++ND++++IN K+ + | |
| Sbjct: | 181 | NNFILGFILFTLAVFLQGGVTDLNTNQIGQVIPNGPAAEAGLKENDKVLSINNQKIKKYE | 240 |
| Query: | 237 | DLTEAVDLATRDLGPSQTIKVTYKSHQRLKTVAVKPQKH-AKTYTI---GVKASLKTGFK | 292 |
| | | D T V P + + + + + + + V P+K + TI GV +KT | |
| Sbjct: | 241 | DFTTIV-----QKNPEKPLTFVVERNGKEEQLTVTFPEKQKVEKQTIGKVGVYPYMKTDLP | 295 |
| Query: | 293 | DKLLGGLELAWSRAFTILNALKGLITGFSLNKLGGPVAMYDMSNQAAQNGLESVLSLMAM | 352 |
| | | KL+GG++ + I AL L TGFSLNKLGGPV M+ +S +A+ G+ +V+ LMAM | |
| Sbjct: | 296 | SKLMGGIQDTLNSTTQIFKALGSLFTGFSLNKLGGPVMMFKLSEEASNAGVSTVVFLMAM | 355 |
| Query: | 353 | LSINLGIFNLIPIPALDGGKILMNIIEAIRRKPIKQETEAYITLAGVAIMVVLMIAVTWN | 412 |
| | | LS+NLGI NL+PIPALDGGKI++NIIE +R KPI E E ITL G ++VLM+ VTWN | |
| Sbjct: | 356 | LSMNLGIINLLPIPALDGGKIVLNIIEGVRGKPISPEKEGIITLIGFGFVMVLMVLVTWN | 415 |
| Query: | 413 | DIMRVFF | 419 |
| | | DI R FF | |
| Sbjct: | 416 | DIQRFFF | 422 |

[4305] An alignment of the GAS and GBS proteins is shown below:

| Identities = 306/419 (73%), Positives = 359/419 (85%) | | | |
|---|---|---|---|
| Query: | 1 | MLGILTFIIIFGVIVVVHEFGHFYFAKKSGILVREFAIGMGPKIFSHIDKEGTTYTIRIL | 60 |
| | | MLGI+TFIIIFG++V+VHEFGHFYFAKKSGILVREFAIGMGPKIFSH+D+ GT YT+R+L | |
| Sbjct: | 1 | MLGIITFIIIFGILVIVHEFGHFYFAKKSGILVREFAIGMGPKIFSHVDQGGTLYTLRML | 60 |
| Query: | 61 | PLGGYVRMAGWGDDKTEIKTGTPASLTLNKEGIVTRINLSGKQLDNTSLPINVTAYDLED | 120 |
| | | PLGGYVRMAGWGDDKTEIKTGTPASLTLN++G V RINLS +LD TSLP++VT YDLED | |
| Sbjct: | 61 | PLGGYVRMAGWGDDKTEIKTGTPASLTLNEQGFVKRINLSQSKLDPTSLPMHVTGYDLED | 120 |
| Query: | 121 | KLTITGLVLSETKTYSVDHDATIIEEDGTEIRIAPLDMQYQNASVWGRLITNFAGPMNNF | 180 |
| | | +L+ITGLVL ETKTY V HDATI+EEDGTEIRIAPLD+QYQNAS+ GRLITNFAGPMNNF | |
| Sbjct: | 121 | QLSITGLVLEETKTYKVAHDATIVEEDGTEIRIAPLDVQYQNASIGGRLITNFAGPMNNF | 180 |
| Query: | 181 | ILGLVVFIALAFIQGGVQDLSTNQVRVSENGPAASAGLKNNDRILQIGSHKVSNWEQLTA | 240 |
| | | ILG+VVFI L F+QGG+ D S+N VRV ENG AA AGL++ND+I+ I +KV++W LT | |
| Sbjct: | 181 | ILGIVVFILLVFLQGGMPDFSSNHVRVQENGAAAKAGLRDNDQIVAINGYKVTSWNDLTE | 240 |
| Query: | 241 | AVEKSTRHLEKKQKLALKIKSKEVVKTINVKPQKVDKSYIIGIMPALKTSFKDKLLGGLK | 300 |
| | | AV+ TR L Q + + KS + +KT+ VKPQK K+Y IG+ +LKT FKDKLLGGL+ | |
| Sbjct: | 241 | AVDLATRDLGPSQTIKVTYKSHQRLKTVAVKPQKHAKTYTIGVKASLKTGFKDKLLGGLE | 300 |
| Query: | 301 | LAWESFFRILNELKKLIAHFSINKLGGPVALYQASSQAAKNGFVTVLNLMGLISINLGIM | 360 |
| | | LAW F ILN LK LI FS+NKLGGPVA+Y S+QAA+NG +VL+LM ++SINLGI | |
| Sbjct: | 301 | LAWSRAFTILNALKGLITGFSLNKLGGPVAMYDMSNQAAQNGLESVLSLMAMLSINLGIF | 360 |
| Query: | 361 | NLIPIPALDGGKIVMNILEAIRRKPLKQETETYITLAGVAVMLVLMIAVTWNDIMRAFF | 419 |
| | | NLIPIPALDGGKI+MNI+EAIRRKP+KQETE YITLAGVA+M+VLMIAVTWNDIMR FF | |
| Sbjct: | 361 | NLIPIPALDGGKILMNIIEAIRRKPIKQETEAYITLAGVAIMVVLMIAVTWWDIMRVFF | 419 |

[4306] Based on this analysis, it was predicted that these proteins and their epitopes could be useful antigens for vaccines or diagnostics.

### EXAMPLE 750

[4307] A DNA sequence (GBSx0797) was identified in S. agalactiae <SEQ ID 2303> which encodes the amino acid sequence <SEQ ID 2304>. This protein is predicted to be prolyl-tRNA synthetase (proS). Analysis of this protein sequence reveals the following:

| Possible site: 18 | | | |
|---|---|---|---|
| >>> Seems to have no N-terminal signal sequence | | | |
| INTEGRAL | Likelihood = −0.32 | Transmembrane | 473-489 (473-490) |

----- Final Results -----
bacterial membrane --- Certainty = 0.1128 (Affirmative) < succ>
bacterial outside --- Certainty = 0.0000 (Not Clear) < succ>
bacterial cytoplasm --- Certainty = 0.0000 (Not Clear) < succ>

[4308] A related GBS nucleic acid sequence <SEQ ID 10181> which encodes amino acid sequence <SEQ ID 10182> was also identified.

[4309] The protein has homology with the following sequences in the GENPEPT database:

| >GP: CAB13530 GB: Z99112 prolyl-tRNA synthetase [Bacillus subtilis] | | | |
|---|---|---|---|
| Identities = 301/608 (49%), Positives = 410/608 (66%), Gaps = 52/608 (8%) | | | |
| Query: | 1 | MKQSKMLIPTLREMPSDAQVISHALMVRAGYVRQVSAGIYAYLPLANRTIEKFKTIMRQE | 60 |
| | | M+QS LIPTLRE+P+DA+ SH L++RAG++RQ ++G+Y+Y+PLA + I+ + I+R+E | |
| Sbjct: | 1 | MRQSLTLIPTLREVPADAEAKSHQLLLRAGFIRQNTSGVYSYMPLAYKVIQNIQQIVREE | 60 |
| Query: | 61 | FEKIGAVEMLAPALLTADLWRESGRYETYGEDLYKLKNRDQSDFILGPTHEETFTTLVRD | 120 |
| | | EKI AVEML PAL A+ W+ESGR+ TYG +L +LK+R +F LG THEE T+LVRD | |
| Sbjct: | 61 | MEKIDAVEMLMPALQQAETWQESGRWYTYGPELMRLKDRHGREFALGATHEEVITSLVRD | 120 |
| Query: | 121 | AVKSYKQLPLNLYQIQSKYRDEKRPRNGLLRTREFIMKDGYSFHKDYEDLDVTYEDYREA | 180 |
| | | VKSYK+LPL LYQIQSK+RDEKRPR GLLR REFIMED YSFH E LD TY+ +A | |
| Sbjct: | 121 | EVKSYKRLPLTLYQIQSKFRDEKRPRFGLLRGREFIMKDAYSFHASAESLDETYQKMYEA | 180 |
| Query: | 181 | YEAIFTRAGLDFKGIIGDGGAMGGKDSQEFMAVTPNRTDLNRWLVLDKTIPSIDDIPEDV | 240 |
| | | Y IF R G++ + +I D GAMGGKD+ EFMA++ | |
| Sbjct: | 181 | YSNIFARCGINVRPVIADSGAMGGKDTHEFMALS-------------------------- | 214 |
| Query: | 241 | LEEIKVELSAWLVSGEDTIAYSTESSYAANLEMATNEYKPSTKAATFEEVTKVETPNCKS | 300 |
| | | GEDTIAYS ES YAAN+EMA ++ + + KV TPN K+ | |
| Sbjct: | 215 | ------------AIGEDTIAYSDESQYAANIEMAEVLHQEVPSDEEPKALEKVHTPHVKT | 262 |
| Query: | 301 | IDEVAGFLSIDENQTIKTLLFIADEQPVVALLVGNDQVNDVKLKNYLAADFLEPASEEQA | 360 |
| | | I+E+ FL + IK++LF AD++ V+ L+ G+ +VND+K+KN L A+ +E A+ E+ | |
| Sbjct: | 263 | IEELTAFLQVSAEACIKSVLFKADDRFVLVLVRGDHEVNDIKVKNLLHAEVVELATHEEV | 322 |
| Query: | 361 | KEIFGAGFGSLGPVNLPDSVKIIADRKVQDLANAVSGANQDGYHFTGVNPERDFTA-EYV | 419 |
| | | + G G +GPV + V++ AD+ V+ + NAV+GAN+ +H+ VN RD E+ | |
| Sbjct: | 323 | IQQLGTEPGFVGPVGIHQDVEVYADQAVKAMVNAVAGANEGDHHYKNVNVNRDAQIKEFA | 382 |
| Query: | 420 | DIREVKEGEISPDGKGTLKFARGIEIGHIFKLGTRYSDSMGANILDENGRSNPIVMGCYG | 479 |
| | | D+R +KEG+ SPDGKGT++FA GIE+G +FKLGTRYS++M A LDENGR+ P++MGCYG | |
| Sbjct: | 383 | DLRFIKEGDPSPDGKGTIRFAEGIEVGQVFKLGTRYSEAMNATYLDENGRAQPMLMGCYG | 442 |
| Query: | 480 | IGVSRILSAVIEQHARLFVNKTPKGAYRFAWGINFPEELAPFDVHLITVNVKDQESQDLT | 539 |
| | | IGVSR LSA+ EQH G+ +P+ +AP+D+H++ +N+K+ ++L | |
| Sbjct: | 443 | IGVSRTLSAIAEQH-------------HDEKGLIWPKSVAPYDLHILALNMKNDGQRELA | 489 |
| Query: | 540 | EKIEADLMLKGYEVLTDDRNERVGSKFSDSDLIGLPIRVTVGKKASEGIVEVKIKASGDT | 599 |
| | | EK+ ADL +GYEVL DDR ER G KF+DSDLIGLPIR+TVGK+A EGIVEVKI+ +G++ | |
| Sbjct: | 490 | EKLYADLKAEGYEVLYDDRAERAGVKFADSDLIGLPIRITVGKRADEGIVEVEIRQTGES | 549 |
| Query: | 600 | IEVHADNL | 607 |
| | | E+ D L | |
| Sbjct: | 550 | TEISVDEL | 557 |

[4310] A related DNA sequence was identified in S. pyogenes <SEQ ID 2305> which encodes the amino acid sequence <SEQ ID 2306>. Analysis of this protein sequence reveals the following:

| Possible site: 18 | | | |
|---|---|---|---|
| >>> Seems to have no N-terminal signal sequence | | | |
| INTEGRAL | Likelihood = 0.32 | Transmembrane | 473-489 (473-490) |

----- Final Results -----
bacterial membrane --- Certainty = 0.1128 (Affirmative) < succ>
bacterial outside --- Certainty = 0.0000 (Not Clear) < succ>
bacterial cytoplasm --- Certainty = 0.0000 (Not Clear) < succ>

[4311] An alignment of the GAS and GBS proteins is shown below:

| Identities = 535/617 (86%), Positives = 584/617 (93%) | | | |
|---|---|---|---|
| Query: | 1 | MKQSKMLIPTLREMPSDAQVISHALMVRAGYVRQVSAGIYAYLPLANRTIEKFKTIMRQE | 60 |
| | | MKQSK+LIPTLREMPSDAQVISHALMVRAGYVRQVSAGIYAYLPLANRTIEKFKTIMR+E | |
| Sbjct: | 1 | MKQSKLLIPTLREMPSDAQVISHALMVRAGYVRQVSAGIYAYLPLANRTIEKFKTMREE | 60 |
| Query: | 61 | FEKIGAVEMLAPALLTADLWRESGRYETYGEDLYKLKNRDQSDFILGPTHEETFTTLVRD | 120 |
| | | FEKIGAVEMLAPALLTADLWRESGRYETYGEDLYKLKNRD SDFILGPTHEETFTTLVRD | |
| Sbjct: | 61 | FEKIGAVEMLAPALLTADLWRESGRYETYGEDLYKLKNRDNSDFILGPTHEETFTTLVRD | 120 |
| Query: | 121 | AVKSYKQLPLNLYQIQSKYRDEKRPRNGLLRTREFIMKDGYSFHKDYEDLDVTYEDYRKA | 180 |
| | | AVKSYKQLPLNLYQIQSKYRDEKRPRNGLLRTREFIMKDGYSFH +YEDLDVTYEDYR+A | |
| Sbjct: | 121 | AVKSYKQLPLNLYQIQSKYRDEKRPRNGLLRTREFIMKDGYSFHHNYEDLDVTYEDYRQA | 180 |
| Query: | 181 | YEAIFTRAGLDFKGIIGDGGAMGGKDSQEFMAVTPNRTDLNRWLVLDKTIPSIDDIPEDV | 240 |
| | | YEAIFTRAGLDFKGIIGDGGAMGGKDSQEFMA+TP RTDL+RW+VLDK+I S+DDIP++V | |
| Sbjct: | 181 | YEAIFTRAGLDFKGIIGDGGAMGGKDSQEFMAITPNRTDLNRWVVLDKSIASMDDIPKEV | 240 |
| Query: | 241 | LEEIKVELSAWLVSGEDTIAYSTESSYAANLEMATNEYKPSTKAATFEEVTKVETPNCKS | 300 |
| | | LE+IK EL+AW++SGEDTIAYSTESSYAANLEMATNEYKPS+K A + + +VETP+CK+ | |
| Sbjct: | 241 | LEDIKAELAAWMISGEDTIAYSTESSYAANLEMATNEYKPSSKVAAEDALAEVETPHCKT | 300 |
| Query: | 301 | IDEVAGFLSIDENQTIKTLLFIADEQPVVALLVGNDQVNDVKLKNYLAADFLEPASEEQA | 360 |
| | | IDEVA FLS+DE QTIKTLLF+AD +PVVALLVGND +N VKLENYLAADFLEPASEE+A | |
| Sbjct: | 301 | IDEVAAFLSVDETQTIKTLLFVADNEPVVALLVGNDHINTVKLKNYLAADFLEPASEEEA | 360 |
| Query: | 361 | KEIFGAGFGSLGPVNLPDSVKIIADRKVQDLANAVSGANQDGYHFTGVNPERDFTAEYVD | 420 |
| | | + FGAGFGSLGPVNL +I+ADRKVQ+L NAV+GAN+DG+H TGVNP RDF AEYVD | |
| Sbjct: | 361 | RAFFGAGFGSLGPVNLAQGSRIVADRKVQNLTNAVAGANKDGFHMTGVNPGRDFQAEYVD | 420 |
| Query: | 421 | IREVKEGEISPDGKGTLKFARGIEIGHIFKLGTRYSDSMGANILDENGRSNPIVMGCYGI | 480 |
| | | IREVKEGE+SPDG G L+FARGIE+GHIFKLGTRYSDSMGA ILDENGR+ PIVMGCYGI | |
| Sbjct: | 421 | IREVEEGEMSPDGHGVLQFARGIEVGHIFKLGTRYSDSMGATILDENGRTVPIVMGCYGI | 480 |
| Query: | 481 | GVSRILSAVIEQHARLFVNKTPKGAYRFAWGINFPEELAPFDVHLITVNVKDQESQDLTE | 540 |
| | | GVSRILSAVIEQHARLFVNKTPKG YR+AWGINFP+ELAPFDVHLITVNVKDQ +QDLT | |
| Sbjct: | 481 | GVSRILSAVIEQHARLFVNKTPKGDYRYAWGINFPKELAPFDVHLITVNVKDQVAQDLTA | 540 |
| Query: | 541 | KIEADLMLKGYEVLTDDRNERVGSKFSDSDLIGLPIRVTVGKKASEGIVEVKIKASGDTI | 600 |
| | | K+EADLM KGY+VLTDDRNERVGSKFSDSDLIGLPIRVTVGKKA+EGIVE+KIKA+GD+I | |
| Sbjct: | 541 | KLEADLMAKGYDVLTDDRNERVGSKFSDSDLIGLPIRVTVGKKAAEGIVEIKIKATGDSI | 600 |
| Query: | 601 | EVHADNLIETLEILTKK | 617 |
| | | EV+A+NLIETLEILTK+ | |
| Sbjct: | 601 | EVNAENLIETLEILTKE | 617 |

[4312] Based on this analysis, it was predicted that these proteins and their epitopes could be useful antigens for vaccines or diagnostics.

### EXAMPLE 751

[4313] A DNA sequence (GBSx0798) was identified in S. agalactiae <SEQ ID 2307> which encodes the amino acid sequence <SEQ ID 2308>. This protein is predicted to be peptidoglycan hydrolase (flgJ). Analysis of this protein sequence reveals the following:

| Possible site: 21 | | | |
|---|---|---|---|
| >>> Seems to have an uncleavable N-term signal seq | | | |
| INTEGRAL | Likelihood = −1.86 | Transmembrane | 9-25 (9-25) |

----- Final Results -----
bacterial membrane --- Certainty = 0.1744 (Affirmative) < succ>
bacterial outside --- Certainty = 0.0000 (Not Clear) < succ>
bacterial cytoplasm --- Certainty = 0.0000 (Not Clear) < succ>

[4314] The protein has homology with the following sequences in the GENPEPT database:

| >GP: CAB94815 GB: AJ245582 peptidoglycan hydrolase [Streptococcus | | | |
|---|---|---|---|
| thermophilus] | | | |
| Identities = 101/201 (50%), Positives = 122/201 (60%), Gaps = 9/201 (4%) | | | |
| Query: | 2 | KSRKKDKLVLRLTT-----TLLVFGL----GGVWFYNYKNDNVEPTVTSASDQTTTFIQT | 52 |
| | | KS+KK K VL +L+ GL G + N+ +E +T +T FI | |
| Sbjct: | 16 | KSKKKKKSVLLFPKFFQKWSLIFIGLFSLLGLLASLNFPRLTMEKNMTPTDETTVAFIAE | 75 |
| Query: | 53 | ISPTAIEISKTYDLYASVLLAQAILESSSGQSDLSKAPNYNLFGIKGEYKGKSVQMPTLE | 112 |
| | | I T+ ++ DLYASV++AQAILES SGQS LS+ P YN FGIKGEY G+SV +PT E | |
| Sbjct: | 76 | IGETSRYLAARNDLYASVMIAQAILESDSGQSQLSQKPLYNFFGIKGEYNGQSVTLPTWE | 135 |
| Query: | 113 | DDGKGNMTQIQAPFRAYPNYSASLYDYAELVSSQKYASVWKSNTSSYKDATAALTGLYAT | 172 |
| | | DDGKGN I A FR+Y + SL DY E + Y V +S T SYKDATAALTG+YAT | |
| Sbjct: | 136 | DDGKGNPYHIDAAFRSYGSVENSLQDYVEFLEGSYYVGVHRSKTRSYKDATAALTGVYAT | 195 |
| Query: | 173 | DTAYASKLNQIIETYSLDAYD | 193 |
| | | DT Y KLN IIE Y L YD | |
| Sbjct: | 196 | DTTYGDKLNSIIEQYQLTIYD | 216 |

[4315] A related DNA sequence was identified in S. pyogenes <SEQ ID 2309> which encodes the amino acid sequence <SEQ ID 2310>. Analysis of this protein sequence reveals the following:

Possible site: 24
>>> Seems to have a cleavable N-term signal seq.
----- Final Results -----
bacterial outside --- Certainty = 0.3000 (Affirmative) < succ>
bacterial membrane --- Certainty = 0.0000 (Not Clear) < succ>
bacterial cytoplasm --- Certainty = 0.0000 (Not Clear) < succ>

[4316] The protein has homology with the following sequences in the databases:

| >GP: CAB94815 GB: AJ245582 peptidoglycan hydrolase [Streptococcus | | | |
|---|---|---|---|
| thermophilus] | | | |
| Identities = 103/189 (54%), Positives = 126/189 (66%), Gaps = 4/189 (2%) | | | |
| Query: | 4 | KKGKLVLISLFVLAACLGAYSAMRQSHKTSNVSAETIASSSTRHFIDEIGPTASTIGQER | 63 |
| | | +K L+ I LF L L + + R+ + + T +T FI EIG T+ + | |
| Sbjct: | 32 | QKWSLIFIGLFSLLGLLASLNFPRLTMEKNM----TPTDETTVAFIAEIGETSRYLAARN | 87 |
| Query: | 64 | DLYASVMIAQAILESSNGKSSLSQAPYYNFFGIKGAYNGSSVTMSTWEDDGNGNTYTIDQ | 123 |
| | | DLYASVMIAQAILES +G+S LSQ P YNFFGIKG YNG SVT+ TWEDDG GN Y ID | |
| Sbjct: | 88 | DLYASVMIAQAILESDSGQSQLSQKPLYNFFGIKGEYNGQSVTLPTWEDDGKGNPYHIDA | 147 |
| Query: | 124 | AFRAYPSIADSLNDYADLLSSSTYIGARKSNTLSYQDATAALTGLYATDTSYNLKLNNII | 183 |
| | | AFR+Y S+ +SL DY + L S Y+G +S T SY+DATAALTG+YATDT+Y KLN+II | |
| Sbjct: | 148 | AFRSYGSVENSLQDYVEFLEGSYYVGVHRSKTRSYKDATAALTGVYATDTTYGDKLNSII | 207 |
| Query: | 184 | ATYGLTAYD | 192 |
| | | Y LT YD | |
| Sbjct: | 208 | EQYQLTIYD | 216 |

[4317] An alignment of the GAS and GBS proteins is shown below:

| Identities = 108/192 (56%), Positives = 124/192 (64%), Gaps = 2/192 (1%) | | | |
|---|---|---|---|
| Query: | 3 | SRKKDKLVL-RLTTTLLVFGLGGVWFYNYKNDNVEPTVTSASDQTTTFIQTISPTAIEIS | 61 |
| | | ++KK KLVL L G ++K NV T AS T FI I PTA I | |
| Sbjct: | 2 | TKKKGKLVLISLFVLAACLGAYSAMRQSHKTSNVSAE-TIASSSTRHFIDEIGPTASTIG | 60 |
| Query: | 62 | KTYDLYASVLLAQAILESSSGQSDLSKAPNYNLFGIKGEYKGKSVQMPTLEDDGKGNMTQ | 121 |
| | | + DLYASV++AQAILESS+G+S LS+AP YN FGIKG Y G SV M T EDDG GN | |
| Sbjct: | 61 | QERDLYASVMIAQAILESSNGKSSLSQAPYYNFFGIKGAYNGSSVTMSTWEDDGNGNTYT | 120 |
| Query: | 122 | IQAPFRAYPNYSASLYDYAELVSSQKYASVWKSNTSSYKDATAALTGLYATDTAYASKLN | 181 |
| | | I FRAYP+ + SL DYA+L+SS Y KSNT SY+DATAALTGLYATDT+Y KLN | |
| Sbjct: | 121 | IDQAFRAYPSIADSLNDYADLLSSSTYIGARKSNTLSYQDATAALTGLYATDTSYNLKLN | 180 |
| Query: | 182 | QIIETYSLDAYD | 193 |
| | | II TY L AYD | |
| Sbjct: | 181 | NIIATYGLTAYD | 192 |

[4318] A further related DNA sequence was identified in S. pyogenes <SEQ ID 9073> which encodes the amino acid sequence <SEQ ID 9074>. Analysis of this protein sequence reveals the following:

Possible site: 58
>>> Seems to have a cleavable N-term signal seq.
----- Final Results -----
bacterial outside --- Certainty = 0.3000 (Affirmative) < succ>
bacterial membrane --- Certainty = 0.0000 (Not Clear) < succ>
bacterial cytoplasm --- Certainty=0.0000 (Not Clear) < succ>

[4319] An alignment of the GAS and GBS sequences follows:

| Score = 130 bits (323), Expect = 2e−32 | | | |
|---|---|---|---|
| Identities = 68/169 (40%), Positives = 96/169 (56%), Gaps = 3/169 (1%) | | | |
| Query: | 30 | MWTLKLGNQRLAPY---ADHETLTFVRKISHAAQSVAQKKQLYSSVMMAQAILESNNGKS | 86 |
| | | +W N + P A +T TF++ IS A +++ LY+SV++AQAILES++G+S | |
| Sbjct: | 25 | VWFYNYKNDNVEPTVTSASDQTTTFIQTISPTAIEISKTYDLYASVLLAQAILESSSGQS | 84 |
| Query: | 87 | QLSQKPYYNFFGIKGSYKERSVIFPTLEDDGQGNLYQIDAAFRSYGSLTACFLDYARVLN | 146 |
| | | LS+ P YN FGIKG YK +SV PTLEDDG+GN+ QI A FR+Y + +A DYA +++ | |
| Sbjct: | 85 | DLSKAPNYNLFGIKGEYKGKSVQMPTLEDDGKGNMTQIQAPFRAYPNYSASLYDYAELVS | 144 |
| Query: | 147 | DPLYDKTHKKFWSHYQXXXXXXXXXXXXXXXXXXKLNELIEWYQLTNFD | 195 |
| | | Y K S Y+ KLN++IE Y L +D | |
| Sbjct: | 145 | SQKYASVWKSNTSSYKDATAALTGLYATDTAYASKLNQIIETYSLDAYD | 193 |

[4320] A further related DNA sequence was identified in S. pyogenes <SEQ ID 9075> which encodes the amino acid sequence <SEQ ID 9076>. An alignment of the GAS and GBS sequences follows:

| Score = 69.1 bits (166), Expect = 1e−13 | | | |
|---|---|---|---|
| Identities = 52/151 (34%), Positives = 79/151 (51%), Gaps = 10/151 (6%) | | | |
| Query: | 2 | TFLDKIKQGCLDGWAKYKILPSLTAAQAILESGWGKH----APHNALFGIKADSSWTGKS | 57 |
| | | TF+ I ++ Y + S+ AQAILES G+ AP+ LFGIK + + GKS | |
| Sbjct: | 48 | TFIQTISPTAIEISKTYDLYASVLLAQAILESSSGQSDLSKAPNYNLFGIKGE--YKGKS | 105 |
| Query: | 58 | FDTKTQEEYQAGVVTDIVDRFRAYDSWDESIADHGQFLVDNPRYEAV--IGETDYKKACY | 115 |
| | | T E+ G +T I FRAY ++ S+ D+ +LV + +Y +V + YK A | |
| Sbjct: | 106 | VQMPTLEDDGKGNMTQIQAPFRAYPNYSASLYDYAE-LVSSQKYASVWKSNTSSYKDATA | 164 |
| Query: | 116 | AIKAAGYATASSYVELLIQLIEENDLQSWDR | 146 |
| | | A+ YAT ++Y L Q+IE L ++D+ | |
| Sbjct: | 165 | ALTGL-YATDTAYASKLNQIIETYSLDAYDK | 194 |

[4321] SEQ ID 2308 (GBS275) was expressed in E. coli as a His-fusion product. SDS-PAGE analysis of total cell extract is shown in FIG. 52 (lane 4; MW 22.6 kDa). It was also expressed in E. coli as a GST-fusion product. SDS-PAGE analysis of total cell extract is shown in FIG. 58 (lane 4; MW 47.5 kDa).

[4322] The GBS275-GST fusion product was purified (FIG. 208, lane 5) and used to immunise mice. The resulting antiserum was used for FACS (FIG. 276), which confirmed that the protein is immunoaccessible on GBS bacteria.

[4323] Based on this analysis, it was predicted that these proteins and their epitopes could be useful antigens for vaccines or diagnostics.

### EXAMPLE 752

[4324] A DNA sequence (GBSx0799) was identified in S. agalactiae <SEQ ID 2311> which encodes the amino acid sequence <SEQ ID 2312>. Analysis of this protein sequence reveals the following:

| Possible site: 27 | | | |
|---|---|---|---|
| >>> Seems to have no N-terminal signal sequence | | | |
| INTEGRAL | Likelihood = −0.16 | Transmembrane | 876-892 (876-892) |

----- Final Results -----
bacterial membrane --- Certainty = 0.1065 (Affirmative) < succ>
bacterial outside --- Certainty = 0.0000 (Not Clear) < succ>
bacterial cytoplasm --- Certainty = 0.0000 (Not Clear) < succ>

[4325] A related DNA sequence was identified in S. pyogenes <SEQ ID 2313> which encodes the amino acid sequence <SEQ ID 2314>. Analysis of this protein sequence reveals the following:

| Possible site: 48 | | | |
|---|---|---|---|
| >>> Seems to have no N-terminal signal sequence | | | |
| INTEGRAL | Likelihood = −0.16 | Transmembrane | 873-889 (873-889) |

----- Final Results -----
bacterial membrane --- Certainty = 0.1065 (Affirmative) < succ>
bacterial outside --- Certainty = 0.0000 (Not Clear) < succ>
bacterial cytoplasm --- Certainty = 0.0000 (Not Clear) < succ>

[4326] The protein has homology with the following sequences in the databases:

| >GP: CAB94815 GB: AJ245582 peptidoglycan hydrolase [Streptococcus | | | |
|---|---|---|---|
| thermophilus] | | | |
| Identities = 96/202 (47%), Positives = 127/202 (62%), Gaps = 10/202 (4%) | | | |
| Query: | 4 | KKRRRRAKSSV---------NRLVLGLV-LLNLIVSMWTLKLGNQRLAPYADHETLTFVR | 53 |
| | | KK +++ KS + + + +GL LL L+ S+ +L ++ D T+ F+ | |
| Sbjct: | 15 | KKSKKKKKSVLLFPKFFQKWSLIFIGLFSLLGLLASLNFPRLTMEKNMTPTDETTVAFIA | 74 |
| Query: | 54 | KISHAAQSVAQKKQLYSSVMMAQAILESNNGKSQLSQKPYYNFFGIKGSYKERSVIFPTL | 113 |
| | | +I ++ +A + LY+SVM+AQAILES++G+SQLSQKP YNFFGIKG Y +SV PT | |
| Sbjct: | 75 | EIGETSRYLAARNDLYASVMIAQAILESDSGQSQLSQKPLYNFFGIKGEYNGQSVTLPTW | 134 |
| Query: | 114 | EDDGQGNLYQIDAAFRSYGSLTACFLDYARVLNDPLYDKTHKKFWSHYQDATATLTGTYA | 173 |
| | | EDDG+GN Y IDAAFRSYGS+ DY L Y H+ Y+DATA LTG YA | |
| Sbjct: | 135 | EDDGKGNPYHIDAAFRSYGSVENSLQDYVEFLEGSYYVGVHRSKTRSYKDATAALTGVYA | 194 |
| Query: | 174 | TDTTYHTKLNELIEWYQLTNFD | 195 |
| | | TDTTY KLN +IE YQLT +D | |
| Sbjct: | 195 | TDTTYGDKLNSIIEQYQLTIYD | 216 |

[4327] An alignment of the GAS and GBS proteins is shown below:

| Identities = 1244/1468 (84%), Positives = 1351/1468 (91%), Gaps = 3/1468 (0%) | | | |
|---|---|---|---|
| Query: | 1 | MSELFKKLMDQIEMPLEIKNSSVFSSADIIEVKVHSLSRLWEFHFSFPELLPIEVYRELQ | 60 |
| | | MS+LF KLMDQIEMPL+++ SS FSSADIIEVKVHS+SRLWEFHF+F +LPI YREL | |
| Sbjct: | 1 | MSDLFAKLMDQIEMPLDMRRSSAFSSADIIEVKVHSVSRLWEFHFAFAAVLPIATYRELH | 60 |
| Query: | 61 | TRLVNSFEKADIKATFDIRAETIDFSDDLLQDYYQQAFCEPLCNSASFKSSFSQLKVHYN | 120 |
| | | RL+ +FE ADIK TFDI+A +D+SDDLLQ YYQ+AF CNSASFKSSFS+LKV Y | |
| Sbjct: | 61 | DRLIRTFEAADIKVTFDIQAAQVDYSDDLLQAYYQEAFEHAPCNSASFKSSFSKLKVTYE | 120 |
| Query: | 121 | GSQMIISAPQFVNNNHFRQNHLPRLEQQFSLFGFGKLAIDMVSDEQMTQDLKSSFETNRE | 180 |
| | | ++II+AP FVNN+HFR NHLP L +Q FGFG L IDMVSD++MT+ L +F ++R+ | |
| Sbjct: | 121 | DDKLIIAAPGFVNNDHFRNNHLPNLVKQLEAFGFGILTIDMVSDQEMTEHLTKNFVSSRQ | 180 |
| Query: | 181 | QLLEKANQEAMQALEAQKSLEDSAPPSEEVTPTQNYDFKERIKQRQAGFEKAEITPMIEV | 240 |
| | | L++KA Q+ LEAQKSLE PP EE TP +D+KER +RQAGFEKA ITPMIE+ | |
| Sbjct: | 181 | ALVKKAVQDN---LEAQKSLEAMMPPVEEATPAPKFDYKERAAKRQAGFEKATITPMIEI | 237 |
| Query: | 241 | TTEENRIVFEGMVFSVERKTTRTGRHIINFKMTDYTSSFAMQKWAKDDEELKKYDMISKG | 300 |
| | | TEENRIVFEGMVF VERKTTRTGRHIINFKMTDYTSSFA+QKWAKDDEEL+K+DMI+KG | |
| Sbjct: | 238 | ETEENRIVFEGMVFDVERKTTRTGRHIINFKMTDYTSSFALQKWAKDDEELRKFDMIAKG | 297 |
| Query: | 301 | SWLRVRGNIENNNFTKSLTMNVQDIKEIVHHERKDLMPADQKRVEFHAHTNMSTMDALPT | 360 |
| | | +WLRV+GNIE N FTKSLTMNVQ +KEIV HERKDLMP QKRVE HAHTNMSTMDALPT | |
| Sbjct: | 298 | AWLRVQGNIETNPFTKSLTMNVQQVKEIVRHERKDLMPEGQKRVELHAHTNMSTMDALPT | 357 |
| Query: | 361 | VESLIDTAAKWGHPAIAITDHANVQSFPHGYHRAKKAGIKAIFGLEANIVEDKVPISYNE | 420 |
| | | VESLIDTAAKWGH AIAITDHANVQSFPHGYHRA+KAGIKAIFGLEANIVEDKVPISY | |
| Sbjct: | 358 | VESLIDTAAKWGHKAIAITDHANVQSFPHGYHRARKAGIKAIFGLEANIVEDKVPISYEP | 417 |
| Query: | 421 | VDMNLHEATYVVFDVETTGLSAANNDLIQIAASKMFKGNIIEQFDEFIDPGHPLSAFTTE | 480 |
| | | VDM+LHEATYVVFDVETTGLSA NNDLIQIAASKMFKGNI+EQFDEFIDPGHPLSAFTTE | |
| Sbjct: | 418 | VDMDLHEATYVVFDVETTGLSAMNNDLIQIAASKMFKGNIVEQFDEFIDPGHPLSAFTTE | 477 |
| Query: | 481 | LTGITDNHVRGSKPILQVLQEFQNFCQGTVLVAHNATFDVGFMNANYERHNLPLITQPVI | 540 |
| | | LTGITD H++G+KP++ VL+ FQ+FC+ ++LVAHNA+FDVGFMNANYERH+LP ITQPVI | |
| Sbjct: | 478 | LTGITDKHLQGAKPLVTVLKAFQDFCKDSILVAHNASFDVGFMNANYERHDLPKITQPVI | 537 |
| Query: | 541 | DTLEFARNLYPEYKRHGLGPLTKRFQVALEHHHMANYDAEATGRLLFIFLKEARENRDVT | 600 |
| | | DTLEFARNLYPEYKRHGLGPLTKRFQV+L+HHHMANYDAEATGRLLFIFLK+ARE + | |
| Sbjct: | 538 | DTLEFARNLYPEYKRHGLGPLTKRFQVSLDHHHMANYDAEATGRLLFIFLKDAREKHGIK | 597 |
| Query: | 601 | NLMELNTKLVAEDSYKKARIKHATIYVQNQVGLKNIFKLVSLSNVKYFEGVARIPRSVLD | 660 |
| | | NL++LNT LVAEDSYKKARIKHATIYVQNQVGLKN+FKLVSLSN+KYFEGV RIPR+VLD | |
| Sbjct: | 598 | NLLQLNTDLVAEDSYKKARIKHATIYVQNQVGLKNMFKLVSLSNIKYFEGVPRIPRTVLD | 657 |
| Query: | 661 | AHREGLLLGTACSDGEVFDALLSNGIDAAVTLAKYYDFIEVMPPAIYRPLVVRDLIKDEV | 720 |
| | | AHREGLLLGTACSDGEVFDA+L+ GIDAAV LA+YYDFIE+MPPAIY+PLVVR+LIKD+ | |
| Sbjct: | 658 | AHREGLLLGTACSDGEVFDAVLTKGIDAAVDLARYYDFIEIMPPAIYQPLVVRELIKDQA | 717 |
| Query: | 721 | GIQQIIRDLIEVGRRLDKPVLATGNVHYIEPEDEIYREIIVRSLGQGAMINRTIGRGEDA | 780 |
| | | GI+Q+IRDLIEVG+R KPVLATGNVHY+EPE+EIYREIIVRSLGQGAMINRTIGRGE A | |
| Sbjct: | 718 | GIEQVIRDLIEVGKRAKKPVLATGNVHYLEPEEEIYREIIVRSLGQGAMINRTIGRGEGA | 777 |
| Query: | 781 | QPAPLPKAHFRTTNEMLDEFAFLGKDLAYEIVVTNTNTFADRFEDVEVVKGDLYTPFVDR | 840 |
| | | QPAPLPKAHFRTTNEMLDEFAFLGKDLAY++VV NT FADR E+VEVVKGDLYTP++D+ | |
| Sbjct: | 778 | QPAPLPKAHFRTTNEMLDEFAFLGKDLAYQVVVQNTQDFADRIEEVEVVKGDLYTPYIDK | 837 |
| Query: | 841 | AEERVAELTYAKAFEIYGNPLPDIIDLRIEKELASILGNGFAVIYLASQMLVQRSNERGY | 900 |
| | | AEE VAELTY KAFEIYGNPLPDIIDLRIEKEL SILGNGFAVIYLASQMLV RSNERGY | |
| Sbjct: | 838 | AEETVAELTYQKAFEIYGNPLPDIIDLRIEKELTSILGNGFAVIYLASQMLVNRSNERGY | 897 |
| Query: | 901 | LVGSRGSVGSSFVATMIGITEVNPMPPHYVCPNCQHSEFITDGSCGSGYDLPNKNCPKCG | 960 |
| | | LVGSRGSVGSSFVATMIGITEVNPMPPHYVCP+CQHSEFITDGS GSGYDLPNK CPKCG | |
| Sbjct: | 898 | LVGSRGSVGSSFVATMIGITEVNPMPPHYVCPSCQHSEFITDGSVGSGYDLPNKPCPKCG | 957 |
| Query: | 961 | TLYKKDGQDIPFETFLGFDGDKVPDIDLNFSGDDQPSAHLDVRDIFGEEYAFRAGTVGTV | 1020 |
| | | T Y+KDGQDIPFETFLGFDGDKVPDIDLNFSGDDQPSAHLDVRDIFG+EYAFRAGTVGTV | |
| Sbjct: | 958 | TPYQKDGQDIPFETFLGFDGDKVPDIDLNFSGDDQPSAHLDVRDIFGDEYAFRAGTVGTV | 1017 |
| Query: | 1021 | AEKTAFGFVKGYERDYNKFYNDAEVERLATGAAGVKRSTGQHPGGIVVIPNYMDVYDFTP | 1080 |
| | | AEKTA+GFVKGYERDY KFY DAEV+RLA GAAGVKR+TGQHPGGIVVIPNYMDVYDFTP | |
| Sbjct: | 1018 | AEKTAYGFVKGYERDYGKFYRDAEVDRLAAGAAGVKRTTGQHPGGIVVIPNYMDVYDFTP | 1077 |
| Query: | 1081 | VQYPADDMTAAWQTTHFNFHDIDENVLKLDILGHDDPTMIRKLQDLSGIDPSNILPDDPD | 1140 |
| | | VQYPADD+TA+WQTTHFNFHDIDENVLKLDILGHDDPTMIRKLQDLSGIDP I DDP | |
| Sbjct: | 1078 | VQYPADDVTASWQTTHFNFHDIDENVLKLDILGHDDPTMIRKLQDLSGIDPITIPADDPG | 1137 |
| Query: | 1141 | VMKLFSGTEVLGVTEEQIGTPTGMLGIPEFGTNFVRGMVNETHPTTFAELLQLSGLSHGT | 1200 |
| | | VM LFSGTEVLGVT EQIGTPTGMLGIPEFGTNFVRGMVNETHPTTFAELLQLSGLSHGT | |
| Sbjct: | 1138 | VMALFSGTEVLGVTPEQIGTPTGMLGIPEFGTNFVRGMVNETHPTTFAELLQLSGLSHGT | 1197 |
| Query: | 1201 | DVWLGNAQDLIKEGIATLSTVIGCRDDIMVYLMHAGLQPKMAFTIMERVRKGLWLKISED | 1260 |
| | | DVWLGNAQDLIKEGIATL TVIGCRDDIMVYLMHAGL+PKMAFTIMERVRKGLWLKISE+ | |
| Sbjct: | 1198 | DVWLGNAQDLIKEGIATLKTVIGCRDDIMVYLMHAGLEPKMAFTIMERVRKGLWLKISEE | 1257 |
| Query: | 1261 | ERNGYIQAMRDNNVPDWYIESCGKIKYMFPKAHAAAYVLMALRVAYFKVHYPIFYYCAYF | 1320 |
| | | ERNGYI AMR+NNVPDWYIESCGKIKYMFPKAHAAAYVLMALRVAYFKVH+PI YYCAYF | |
| Sbjct: | 1258 | ERNGYIDAMRENNVPDWYIESCGKIKYMFPKAHAAAYVLMALRVAYFKVHHPIMYYCAYF | 1317 |
| Query: | 1321 | SIRAKAFELRTMSAGLDAVKARMKDITEKRQRNEATNVENDLFTTLELVNEMLERGFKFG | 1380 |
| | | SIRAKAFEL+TMS GLDAVKARM+DIT KR+ NEATNVENDLFTTLE+VNEMLERGFKFG | |
| Sbjct: | 1318 | SIRAKAFELKTMSGGLDAVKARMEDITIKRKNNEATNVENDLFTTLEIVNEMLERGFKFG | 1377 |
| Query: | 1381 | KLDLYRSHATDFIIEEDTLIPPFVAMEGLGENVAKQIVRAREDGEFLSKTELRKRGGVSS | 1440 |
| | | KLDLY+S A +F I+ DTLIPPF+A+EGLGENVAKQIV+AR++GEFLSK ELRKRGG SS | |
| Sbjct: | 1378 | KLDLYKSDAIEFQIKGDTLIPPFIALEGLGENVAKQIVKARQEGEFLSKMELRKRGGASS | 1437 |
| Query: | 1441 | TLVEKFDEMGILGNLPEDNQLSLFDDFF | 1468 |
| | | TLVEK DEMGILGN+PEDNQLSLFDDFF | |
| Sbjct: | 1438 | TLVEKMDEMGILGNMPEDNQLSLFDDFF | 1465 |

[4328] Based on this analysis, it was predicted that these proteins and their epitopes could be useful antigens for vaccines or diagnostics.

### EXAMPLE 753

[4329] A DNA sequence (GBSx0800) was identified in S. agalactiae <SEQ ID 2315> which encodes the amino acid sequence <SEQ ID 2316>. Analysis of this protein sequence reveals the following:

Possible site: 24
>>> Seems to have no N-terminal signal sequence
----- Final Results -----
bacterial cytoplasm --- Certainty = 0.1505 (Affirmative) < succ>
bacterial membrane --- Certainty = 0.0000 (Not Clear) < succ>
bacterial outside --- Certainty = 0.0000 (Not Clear) < succ>

[4330] A related GBS nucleic acid sequence <SEQ ID 10179> which encodes amino acid sequence <SEQ ID 10180> was also identified.

[4331] The protein has homology with the following sequences in the GENPEPT database:

| >GP: CAB13207 GB: Z99111 similar to transcriptional regulator (MarR | | | |
|---|---|---|---|
| family) [Bacillus subtilis] | | | |
| Identities = 49/124 (39%), Positives = 73/124 (58%) | | | |
| Query: | 18 | VMRKAFRTIDGKVSESFKEFELTPTQFAVLDVLYAKGTMKIGELIENMLATSGNMTVVIK | 77 |
| | | V +AF+++ KE PT+FAVL++LY +G K+ ++ +L SGN+T VI | |
| Sbjct: | 20 | VFARAFKSVSEHSIRDSKEHGFNPTEFAVLELLYTRGPQKLQQIGSRLLLVSGNVTYVID | 79 |
| Query: | 78 | NMEKKGWVLRHSCPNDKRAFLVSLTTEGEEVIKKALPEHIKRVEDAFSVLTETEQEDLIN | 137 |
| | | +E+ G+++R P DKR+ LT +G E + K P H R+ AFS L+ EQ+ LI | |
| Sbjct: | 80 | KLERNGFLVREQDPKDKRSVYAHLTDKGNEYLDKIYPIHALRIARAFSGLSPDEQDQLIV | 139 |
| Query: | 138 | LLKK | 141 |
| | | LLKK | |
| Sbjct: | 140 | LLKK | 143 |

[4332] A related DNA sequence was identified in S. pyogenes <SEQ ID 2317> which encodes the amino acid sequence <SEQ ID 2318>. Analysis of this protein sequence reveals the following:

Possible site: 37
>>> Seems to have no N-terminal signal sequence
----- Final Results -----
bacterial cytoplasm --- Certainty = 0.0537 (Affirmative) < succ>
bacterial membrane --- Certainty = 0.0000 (Not Clear) < succ>
bacterial outside --- Certainty = 0.0000 (Not Clear) < succ>

[4333] An alignment of the GAS and GBS proteins is shown below:

| Identities = 80/145 (55%), Positives = 111/145 (76%), Gaps = 1/145 (0%) | | | |
|---|---|---|---|
| Query: | 2 | GDEMGNF-KNSAVKSMVVMRKAFRTIDGKVSESFKEFELTPTQFAVLDVLYAKGTMKIGE | 60 |
| | | G++M + KN+A+K+MVV RKA RT+D ++ FK+ +LT TQF+VL+VLY KG M+I | |
| Sbjct: | 8 | GNQMSHLDKNTALKAMVVFRKAQRTLDAFGADIFKKADLTATQFSVLEVLYTKGCMRINH | 67 |
| Query: | 61 | LIENMLATSGNMTVVIKNMEKKGWVLRHSCPNDKRAFLVSLTTEGEEVIKKALPEHIKRV | 120 |
| | | LI+++LATSGNMTVV+ NME+ GW+ + DKRA++V+LT +G +I+ LP+H+ RV | |
| Sbjct: | 68 | LIDSLLATSGNMTVVLNNMERNGWISKCKDKTDKRAYVVTLTDKGTRLIEAVLPKHVARV | 127 |
| Query: | 121 | EDAFSVLTETEQEDLINLLKKFKTL | 145 |
| | | E+AF+VLTE EQ LI LLKKFK L | |
| Sbjct: | 128 | EEAFAVLTEKEQLCLIELLKKFKQL | 152 |

[4334] Based on this analysis, it was predicted that these proteins and their epitopes could be useful antigens for vaccines or diagnostics.

### EXAMPLE 754

[4335] A DNA sequence (GBSx0801) was identified in S. agalactiae <SEQ ID 2319> which encodes the amino acid sequence <SEQ ID 2320>. Analysis of this protein sequence reveals the following:

Possible site: 46
>>> Seems to have no N-terminal signal sequence
----- Final Results -----
bacterial cytoplasm --- Certainty = 0.3741 (Affirmative) < succ>
bacterial membrane --- Certainty = 0.0000 (Not Clear) < succ>
bacterial outside --- Certainty = 0.0000 (Not Clear) < succ>

[4336] The protein has homology with the following sequences in the GENPEPT database.

| >GP: AAG05963 GB: AE004686 hypothetical protein [Pseudomonas aeruginosa] | | | |
|---|---|---|---|
| Identities = 115/203 (56%), Positives = 143/203 (69%), Gaps = 7/203 (3%) | | | |
| Query: | 2 | SFLEELKNRRSIYALGRNTEVSDEKIVEIIKEAVRQSPSAFNSQTSRVVILLNDEVTKFW | 61 |
| | | +FL +KNRR+IYAL + VS EKIVE++KEAV SPSAFNSQ+SRVV+L E +FW | |
| Sbjct: | 4 | AFLSSIKNRRTIYALDKQLPVSQEKIVELVKEAVSHSPSAFNSQSSRVVVLFGAEHEQFW | 63 |
| Query: | 62 | DELVANDLVETMKVQGAPETAIAGTKEKLASFGASKGTVLFFEDQDVVKSLQEQFVLYAD | 121 |
| | | + +A D E K+ P A A T+ KL SF A GTVLFFEDQ VV+ LQEQF LYAD | |
| Sbjct: | 64 | N--IAKD--ELKKI--VPADAFAATETKLNSFAAGAGTVLFFEDQTVVRQLQEQFALYAD | 117 |
| Query: | 122 | NFPVWSEQSTGIASVNTWTALSAELGLGGNLQHYNPVIDASVQAVYGVPASWKLRGQLNF | 181 |
| | | NFPVWSEQ++G+A WTAL AE +G +LQHYNP++DA + +P SWKLR Q+ F | |
| Sbjct: | 118 | NFPVWSEQASGMAQFAVWTAL-AEHKVGASLQHYNPLVDAQTHKTWNLPESWKLRAQMPF | 176 |
| Query: | 182 | GSIEAETGEKEFMNDDDRFKVIG | 204 |
| | | G+I A GEK F+ + +RFKV G | |
| Sbjct: | 177 | GAIAAPAGEKAFIAESERFKVFG | 199 |

[4337] No corresponding DNA sequence was identified in S. pyogenes.

[4338] Based on this analysis, it was predicted that this protein and its epitopes, could be useful antigens for vaccines or diagnostics.

### EXAMPLE 755

[4339] A DNA sequence (GBSx0802) was identified in S. agalactiae <SEQ ID 2321> which encodes the amino acid sequence <SEQ ID 2322>. Analysis of this protein sequence reveals the following:

Possible site: 58
>>> Seems to have no N-terminal signal sequence
----- Final Results -----
bacterial cytoplasm --- Certainty = 0.2730 (Affirmative) < succ>
bacterial membrane --- Certainty = 0.0000 (Not Clear) < succ>
bacterial outside --- Certainty = 0.0000 (Not Clear) < succ>

[4340] The protein has homology with the following sequences in the GENPEPT database.

| >GP: CAB62846 GB: AL035475 hypothetical protein [Plasmodium falciparum] | | | |
|---|---|---|---|
| (ver 2) | | | |
| Identities = 112/529 (21%), Positives = 217/529 (40%), Gaps = 67/529 (12%) | | | |
| Query: | 3 | NKKHKLLKNIEEFKTITQKRLTERGKFPYDTVHSTFEIKDENFIMERLKSSGLSNGKP-- | 60 |
| | | N K+ +K + ++ Q + E+ KF D H E + E FI E + + K | |
| Sbjct: | 1063 | NVKYNEMKGAKN-DSLNQNEIIEKEKF--DLQH---ENRSERFIEEEKQICIVDDKKNNI | 1116 |
| Query: | 61 | --VDYMGVNGIPIYTKTLSIVNKFAFENNSKDSSYSSNINISEDKIKENDQKILDLIVKS | 118 |
| | | VD + P Y + L + +N + YS+ DKI +N++ ++ K | |
| Sbjct: | 1117 | MNVDEKRKSDHPSYERVLKMEG-----SNKNEEGYSNT-----DKILKNEKNEKNVNEKK | 1166 |
| Query: | 119 | GANNQNLTDEEKVIAFTKYIGEITNYDNEAYRARNVDTEYYRASDLFSVTERKLAMCVGY | 178 |
| | | G N++ +E+K K + E + ++E D + F +C | |
| Sbjct: | 1167 | GENDEKNENEKKEENDEKNVNEKKDENDEKNENEKKDENDNNNNSYFYNNSDTFELCTNS | 1226 |
| Query: | 179 | SVTAARAFNIMGIPSYVVSGKSPQGISHAAVRAYYNRSWHIIDITASTYWKNGNYKTTYS | 238 |
| | | + N + IPS ++ +GI + N S I+ KN N ++ YS | |
| Sbjct: | 1227 | LIFINNKKNSILIPS-----ENEKGIIGSQKEEEQNISPVKINNKKKDLCKNIN-ESDYS | 1280 |
| Query: | 239 | DFIKEYCIDGYD--VYDPAKTNNRFK-VKYMESNEAFENWIHNNGSKSML-------FIN | 288 |
| | | D ++ + +Y +N++ + ++ + NE + + + N S++ L ++ | |
| Sbjct: | 1281 | DKQYSVLLNSIEKKIYKKCSSNSKIRGIEKKKINEDYVDLKNINCSRNTLEFFLTKKYLK | 1340 |
| Query: | 289 | ESAALKDKKPKDDFVPVTEKEKNELIDKYKKLLSQIPENTQNPGEKNIRDYLKNEYEEIL | 348 |
| | | S + ++ + V EK+K + K KKL +I N P + I + + +EY + | |
| Sbjct: | 1341 | SSELIINEHDCQNINNVYEKKKKKEQAK-KKLNRKI--NVNIPNDSIIEENMSSEYNFVK | 1397 |
| Query: | 349 | KKDN----LFEHEHAE-------FKESLNLNESFYLQLKKEE-------MKPSDNLKKEE | 390 |
| | | KK+N FE + ++ F N + L +E+ ++ +N K+ E | |
| Sbjct: | 1398 | KKNNNCMVKFETKRSKSILSSEIFAVKKNKKRATNLMRSEEQFISSIGLVEKGENKKRIE | 1457 |
| Query: | 391 | KPRENSVKERETPAENNDFVSVTEKNNLIDKYKELLSKIPENTQNPGEKNIRN--YLEKE | 448 |
| | | + E +KE+ + N+F KNNL ++ L K EN G N ++++ | |
| Sbjct: | 1458 | EKDEEYIKEK-IKNKKNEF-----KNNLTEQL--LFFKSAENINTSGSFNTEKIRHVKRT | 1509 |
| Query: | 449 | YEELLQKDKLFKHEYTEFTKSLNLNETFYSQLKEGEMKLSENPEKGETN | 497 |
| | | ++ + + ++ K L E ++ E + ++++N EKGE N | |
| Sbjct: | 1510 | KRKVNLSNNFILNNFSNILKKLQRMEEDKIKMDEQKKEINKNNEKGEFN | 1558 |

[4341] There is also homology to SEQ ID 598.

[4342] Based on this analysis, it was predicted that this protein and its epitopes, could be useful antigens for vaccines or diagnostics.

### EXAMPLE 756

[4343] A DNA sequence (GBSx0803) was identified in S. agalactiae <SEQ ID 2323> which encodes the amino acid sequence <SEQ ID 2324>. Analysis of this protein sequence reveals the following:

Possible site: 22
>>> Seems to have no N-terminal signal sequence
----- Final Results -----
bacterial cytoplasm --- Certainty = 0.1243 (Affirmative) < succ>
bacterial membrane --- Certainty = 0.0000 (Not Clear) < succ>
bacterial outside --- Certainty = 0.0000 (Not Clear) < succ>

[4344] The protein has no significant homology with any sequences in the GENPEPT database.

[4345] No corresponding DNA sequence was identified in S. pyogenes.

[4346] Based on this analysis, it was predicted that this protein and its epitopes, could be useful antigens for vaccines or diagnostics.

### EXAMPLE 757

[4347] A DNA sequence (GBSx0804) was identified in S. agalactiae <SEQ ID 2325> which encodes the amino acid sequence <SEQ ID 2326>. This protein is predicted to be 2-dehydro-3-deoxyphosphogluconate aldolase/4-hydroxy-2-oxoglutarate al. Analysis of this protein sequence reveals the following:

Possible site: 49
>>> Seems to have no N-terminal signal sequence
----- Final Results -----
bacterial cytoplasm --- Certainty = 0.1057 (Affirmative) < succ>
bacterial membrane --- Certainty = 0.0000 (Not Clear) < succ>
bacterial outside --- Certainty = 0.0000 (Not Clear) < succ>

[4348] The protein has homology with the following sequences in the GENPEPT database.

| >GP: AAD35160 GB: AE001693 2-dehydro-3-deoxyphosphogluconate | | | |
|---|---|---|---|
| aldolase/4-hydroxy-2-oxoglutarate aldolase [Thermotoga maritima] | | | |
| Identities = 78/192 (40%), Positives = 118/192 (60%), Gaps = 6/192 (3%) | | | |
| Query: | 14 | KIVAVIRGNSQEEAFQAAQACIKGGISAIEIAYTNSKASQVIEQLVTQYTNQEQVVVGAG | 73 |
| | | KIVAV+R NS EEA + A A +GG+ IEI +T A VI++L + ++ ++GAG | |
| Sbjct: | 11 | KIVAVLRANSVEEAKEKALAVFEGGVHLIEITFTVPDADTVIKEL--SFLKEKGAIIGAG | 68 |
| Query: | 74 | TVLDSETARMAILAGAKFIVSPAFNLQTAKLCNRYAIPYLPGCMTLSEVTTALEAGCEII | 133 |
| | | TV E R A+ +GA+FIVSP + + ++ C + Y+PG MT +E+ A++ G I+ | |
| Sbjct: | 69 | TVTSVEQCRKAVESGAEFIVSPHLDEEISQFCKEKGVFYMPGVMTPTELVKAMKLGHTIL | 128 |
| Query: | 134 | KIFPGGTLGTSFISSLKAPLPQVQIMVTGGVNLTNAKDWFLSGVTAIGIGGEFNKLAALG | 193 |
| | | K+FPG +G F+ ++K P P V+ + TGGVNL N +WF +GV A+G+G K G | |
| Sbjct: | 129 | KLFPGEVVGPQFVKAMKGPFPNVKFVPTGGVNLDNVCEWFKAGVLAVGVGSALVK----G | 184 |
| Query: | 194 | EFDKITEMAKQY | 205 |
| | | D++ E AK + | |
| Sbjct: | 185 | TPDEVREKAKAF | 196 |

[4349] There is also homology to SEQ ID 1252.

[4350] Based on this analysis, it was predicted that this protein and its epitopes, could be useful antigens for vaccines or diagnostics.

### EXAMPLE 758

[4351] A DNA sequence (GBSx0805) was identified in S. agalactiae <SEQ ID 2327> which encodes the amino acid sequence <SEQ ID 2328>. This protein is predicted to be 2-keto-3-deoxygluconate kinase. Analysis of this protein sequence reveals the following:

Possible site: 55
>>> Seems to have no N-terminal signal sequence
----- Final Results -----
bacterial cytoplasm --- Certainty = 0.4113 (Affirmative) < succ>
bacterial membrane --- Certainty = 0.0000 (Not Clear) < succ>
bacterial outside --- Certainty = 0.0000 (Not Clear) < succ>

[4352] The protein has homology with the following sequences in the GENPEPT database.

| >GP: AAD35161 GB: AE001693 2-keto-3-deoxygluconate kinase [Thermotoga | | | |
|---|---|---|---|
| maritima] | | | |
| Identities = 94/329 (28%), Positives = 169/329 (50%), Gaps = 7/329 (2%) | | | |
| Query: | 3 | KILFFGEPLIRITPKENDYFADSISTKLFYGGSEVNTARALQGFGQDTKLLSALPNNPIG | 62 |
| | | K++ FGE ++R++P ++ + S + YGG+E N A L G D ++ LPNNP+G | |
| Sbjct: | 2 | KVVTFGEIMLRLSPPDHKRIFQTDSFDVTYGGAEANVAAFLAQMGLDAYFVTKLPNNPLG | 61 |
| Query: | 63 | NSFLQFLKAQGIDTHSIQWVGERVGLYFLEDSFACRKGEVVYDRDHSSLHDFRINQIDFD | 122 |
| | | ++ L+ G+ T I G R+G+YFLE + R +VVYDR HS++ + + D++ | |
| Sbjct: | 62 | DAAAGHLRKFGVKTDYIARGGNRIGIYFLEIGASQRPSKVVYDRAHSAISEAKREDFDWE | 121 |
| Query: | 123 | QLFEGVSLFHFSGITLSLDESIQEITLLLLKEAKKREITISLDLNFRSKLISPKNAKILF | 182 |
| | | ++ +G FHFSGIT L + + I LK A ++ +T+S DLN+R++L + + A+ + | |
| Sbjct: | 122 | KILDGARWFHFSGITPPLGKELPLILEDALKVANEKGVTVSCDLNYRARLWTKEEAQKVM | 181 |
| Query: | 183 | SQFATFADICFG----IEPLMVDSQDTTFFNRDEATIEDVKERMISLINHFDFQVIFHTK | 238 |
| | | F + D+ IE ++ S + + E + + ++F+ + T | |
| Sbjct: | 182 | IPFMEYVDVLIANEEDIEKVLGISVEGLDLKTGKLNREAYAKIAEEVTRKYNFKTVGITL | 241 |
| Query: | 239 | RLQDEWGRNHYQAYI-ANRKQEFVTSKEITTAVNQRIGSGDAFVAGALYQLLQHSDSKTV | 297 |
| | | R N++ + N + F EI + R+G+GD+F +Y L DS+ | |
| Sbjct: | 242 | RESISATVNYWSVMVFENGQPHFSNRYEI--HIVDRVGAGDSFAGALIYGSLMGFDSQKK | 299 |
| Query: | 298 | IDFAVASASLKCALEGDNMFETVTAVNKV | 326 |
| | | +FA A++ LK + GD + ++ + K+ | |
| Sbjct: | 300 | AEFAAAASCLKHTIPGDFVVLSIEEIEKL | 328 |

[4353] There is also homology to SEQ ID 1264.

[4354] Based on this analysis, it was predicted that this protein and its epitopes, could be useful antigens for vaccines or diagnostics.

### EXAMPLE 759

[4355] A DNA sequence (GBSx0806) was identified in S. agalactiae <SEQ ID 2329> which encodes the amino acid sequence <SEQ ID 2330>. Analysis of this protein sequence reveals the following:

| Possible site: 16 | | | |
|---|---|---|---|
| >>> Seems to have no N-terminal signal sequence | | | |
| INTEGRAL | Likelihood = −0.22 | Transmembrane | 53-69 (53-70) |

----- Final Results -----
bacterial membrane --- Certainty = 0.1086 (Affirmative) < succ>
bacterial outside --- Certainty = 0.0000 (Not Clear) < succ>
bacterial cytoplasm --- Certainty = 0.0000 (Not Clear) < succ>

[4356] The protein has homology with the following sequences in the GENPEPT database.

| >GP: AAD36157 GB: AE001768 sugar-phosphate isomerase [Thermotoga maritima] | | | |
|---|---|---|---|
| Identities = 41/125 (32%), Positives = 61/125 (48%), Gaps = 10/125 (8%) | | | |
| Query: | 1 | MKIALINENSQASKNTIIYKELKAVSDEKGFEVFNYGMYGKEEESQLTYVQNGLLTAILL | 60 |
| | | MKIA+ ++++ + +++K KG EV ++G Y +E Y + ++ +IL | |
| Sbjct: | 1 | MKIAIASDHAAFE----LKEKVKNYLLGKGIEVEDHGTYSEESVDYPDYAKK-VVQSILS | 55 |
| Query: | 61 | NSGAADFVITGCGTGIGAMLACNSFPGVVCGFAADPVDAYLFSQVNGGNALSLPFAKGFG | 120 |
| | | N ADF I CGTG+G +A N + G+ P A L N N L LP G | |
| Sbjct: | 56 | NE--ADFGILLCGTGLGMSIAANRYRGIRAALCLFPDMARLARSHNNANILVLP---GRL | 110 |
| Query: | 121 | WGAEL | 125 |
| | | GAEL | |
| Sbjct: | 111 | IGAEL | 115 |

[4357] A related DNA sequence was identified in S. pyogenes <SEQ ID 2331> which encodes the amino acid sequence <SEQ ID 2332>. Analysis of this protein sequence reveals the following:

Possible site: 13
>>> Seems to have no N-terminal signal sequence
----- Final Results -----
bacterial cytoplasm --- Certainty = 0.2599 (Affirmative) < succ>
bacterial membrane --- Certainty = 0.0000 (Not Clear) < succ>
bacterial outside --- Certainty = 0.0000 (Not Clear) < succ>

[4358] An alignment of the GAS and GBS proteins is shown below.

| Identities = 159/212 (75%), Positives = 186/212 (87%) | | | |
|---|---|---|---|
| Query: | 1 | MKIALINENSQASKNTIIYKELKAVSDEKGFEVFNYGMYGKEEESQLTYVQNGLLTAILL | 60 |
| | | MKIALINENSQA+KN IIY L V+D+ G++VFNYGMYG E ESQLTYVQNGLL +ILL | |
| Sbjct: | 1 | MKIALINENSQAAKNGIIYDALTTVTDKHGYQVFNYGMYGTEGESQLTYVQNGLLASILL | 60 |
| Query: | 61 | NSGAADFVITGCGTGIGAMLACNSFPGVVCGFAADPVDAYLFSQVNGGNALSLPFAKGFG | 120 |
| | | + AADFV+TGCGTG+GAMLA NSFPGV CGFA++P +AYLFSQ+NGGNALS+PFAKGFG | |
| Sbjct: | 61 | TTKAADFVVTGCGTGVGAMLALNSFPGVTCGFASEPTEAYLFSQINGGNALSIPFAKGFG | 120 |
| Query: | 121 | WGAELNLRYLFERLFEDEKGGGYPKERAVPEQRNARILSEIKQITYRDLLSVLKEIDQDF | 180 |
| | | WGAELNL +FERLF + GGGYPKERA+PEQRNARILS++K+ITYRDLL+++K+IDQDF | |
| Sbjct: | 121 | WGAELNLTLIFERLFAEPMGGGYPKERAIPEQRNARILSDLKKITYRDLLAIVKDIDQDF | 180 |
| Query: | 181 | LKETISGEHFQEYFFANCQNQNIADYLKSVLD | 212 |
| | | LKETISG HFQEYFFAN + + YLKSVL+ | |
| Sbjct: | 181 | LKETISGAHFQEYFFANAEPSELVTYLKSVLE | 212 |

[4359] Based on this analysis, it was predicted that these proteins and their epitopes could be useful antigens for vaccines or diagnostics.

### EXAMPLE 760

[4360] A DNA sequence (GBSx0807) was identified in S. agalactiae <SEQ ID 2333> which encodes the amino acid sequence <SEQ ID 2334>. Analysis of this protein sequence reveals the following:

| Possible site: 23 | | | |
|---|---|---|---|
| >>> Seems to have no N-terminal signal sequence | | | |
| INTEGRAL | Likelihood = −0.37 | Transmembrane | 10-26 (8-26) |

----- Final Results -----
bacterial membrane --- Certainty = 0.1150 (Affirmative) < succ>
bacterial outside --- Certainty = 0.0000 (Not Clear) < succ>
bacterial cytoplasm --- Certainty = 0.0000 (Not Clear) < succ>

[4361] The protein has no significant homology with any sequences in the GENPEPT database.

[4362] No corresponding DNA sequence was identified in S. pyogenes.

[4363] Based on this analysis, it was predicted that this protein and its epitopes, could be useful antigens for vaccines or diagnostics.

### EXAMPLE 761

[4364] A DNA sequence (GBSx0808) was identified in S. agalactiae <SEQ ID 2335> which encodes the amino acid sequence <SEQ ID 2336>. This protein is predicted to be gluconate 5-dehydrogenase (fabG). Analysis of this protein sequence reveals the following:

Possible site: 35
>>> Seems to have no N-terminal signal sequence
----- Final Results -----
bacterial cytoplasm --- Certainty = 0.1117 (Affirmative) < succ>
bacterial membrane --- Certainty = 0.000 (Not Clear) < succ>
bacterial outside --- Certainty = 0.000 (Not Clear) < succ>

[4365] The protein has homology with the following sequences in the GENPEPT database.

| >GP: AAC77223 GB: AE000497 5-keto-D-gluconate 5-reductase [Escherichia | | | |
|---|---|---|---|
| coli K12] | | | |
| Identities = 116/260 (44%), Positives = 165/260 (62%), Gaps = 6/260 (2%) | | | |
| Query: | 6 | LKDNFSLEGKVALITGASYGIGFSIATAFARAGATIVFNDIKQELVDKGISAYKKLGIKA | 65 |
| | | + D FSL GK LITG++ GIGF +AT + GA I+ NDI E + + + GI+A | |
| Sbjct: | 1 | MNDLFSLAGKNILITGSAQGIGFLLATGLGKYGAQIIINDITAERAELAVEKLHQEGIQA | 60 |
| Query: | 66 | HGYVCDVTDEDGINEMVDKISQDVGVIDILVNNAGIIKRTPMLEMSAADFRQVIDIDLNA | 125 |
| | | +VT + I+ V+ I +D+G ID+LVNNAGI +R P E ++ VI ++ A | |
| Sbjct: | 61 | VAAPFNVTHKHEIDAAVEHIEKDIGPIDVLVNNAGIQRRHPFTEFPEQEWNDVIAVNQTA | 120 |
| Query: | 126 | PFIVSKAVLPGMIQKGHGKIINICSMMSELGRETVAAYAAAKGGLKMLTKNIASEYGSAN | 185 |
| | | F+VS+AV M+++ GK+INICSM SELGR+T+ YAA+KG +KMLT+ + E N | |
| Sbjct: | 121 | VFLVSQAVTRHMVERKAGRVINICSMQSELGRDTITPYAASKGAVKMLTRGMCVELARHN | 180 |
| Query: | 186 | IQCNGIGPGYIATPQTAPLRERQDDGSRHPFDQFIIAKTPAARWGEAEDLGAPAIFLASD | 245 |
| | | IQ NGI PGY T T L E + F ++ +TPAARWG+ ++L A+FL+S | |
| Sbjct: | 181 | IQVNGIAPGYFKTEMTKALVEDE------AFTAWLCKRTPAARWGDPQELIGAAVFLSSK | 234 |
| Query: | 246 | ASNFINGHILYVDGGILAYI | 265 |
| | | AS+F+NGH+L+VDGG+L + | |
| Sbjct: | 235 | ASDFVNGHLLFVDGGMLVAV | 254 |

[4366] There is also homology to SEQ ID 1242:

| Identities = 225/264 (85%), Positives = 246/264 (92%) | | | |
|---|---|---|---|
| Query: | 6 | LKDNFSLEGKVALITGASYGIGFSIATAFARAGATIVFNDIKQELVDKGISAYKKLGIKA | 65 |
| | | +++ FSL+GK+ALITGASYGIGF IA A+A+AGATIVFNDIKQELVDKG++AY++LGI+A | |
| Sbjct: | 1 | MENMFSLQGKIALITGASYGIGFEIAKAYAQAGATIVFNDIKQELVDKGLAAYRELGIEA | 60 |
| Query: | 66 | HGYVCDVTDEDGINEMVDKISQDVGVIDILVNNAGIIKRTPMLEMSAADFRQVIDIDLNA | 125 |
| | | HGYVCDVTDE GI +MV +I +VG IDILVNNAGII+RTPMLEM+A DFRQVIDIDLNA | |
| Sbjct: | 61 | HGYVCDVTDEAGIQQMVSQIEDEVGAIDILVNNAGIIRRTPMLEMAAEDFRQVIDIDLNA | 120 |
| Query: | 126 | PFIVSKAVLPGMIQRGHGKIINICSMMSELGRETVAAYAAAKGGLKMLTKNIASEYGSAN | 185 |
| | | PFIVSKAVLP MI KGHGKIINICSMMSELGRETV+AYAAAKGGLKMLTKNIASE+G AN | |
| Sbjct: | 121 | PFIVSKAVLPSMIAKGHGKIINICSMMSELGRETVSAYAAAKGGLKMLTKNIASEFGEAN | 180 |
| Query: | 186 | IQCNGIGPGYIATPQTAPLRERQDDGSRHPFDQFIIAKTPAARWGEAEDLGAPAIFLASD | 245 |
| | | IQCNGIGPGYIATPQTAPLRERQ DGSRHPFDQFIIAKTPAARWG EDL PA+FLASD | |
| Sbjct: | 181 | IQCNGIGPGYIATPQTAPLRERQADGSRHPFDQFIIAKTPAARWGTTEDLAGPAVFLASD | 240 |
| Query: | 246 | ASNFINGHILYVDGGILAYIGKQP | 269 |
| | | ASNF+NGHILYVDGGILAYIGKQP | |
| Sbjct: | 241 | ASNFVNGHILYVDGGILAYIGKQP | 264 |

[4367] Based on this analysis, it was predicted that this protein and its epitopes, could be useful antigens for vaccines or diagnostics.

### EXAMPLE 762

[4368] A DNA sequence (GBSx0809) was identified in S. agalactiae <SEQ ID 2337> which encodes the amino acid sequence <SEQ ID 2338>. This protein is predicted to be mannose-specific phosphotransferase system component IIAB. Analysis of this protein sequence reveals the following:

Possible site: 24
>>> Seems to have no N-terminal signal sequence
----- Final Results -----
bacterial cytoplasm --- Certainty = 0.0886 (Affirmative) < succ>
bacterial membrane --- Certainty = 0.0000 (Not Clear) < succ>
bacterial outside --- Certainty = 0.0000 (Not Clear) < succ>

[4369] The protein has homology with the following sequences in the GENPEPT database.

| >GP: AAD46485 GB: AF130465 mannose-specific phosphotransferase system | | | |
|---|---|---|---|
| component IIAB [Streptococcus salivarius] | | | |
| Identities = 43/107 (40%), Positives = 61/107 (56%), Gaps = 3/107 (2%) | | | |
| Query: | 2 | IKIIIVAHGNFPDGILSSLELIAGHQEYVVGINFIAGMSSNDVRVALQREVIDFK---EI | 58 |
| | | I III +HG F +GI S +I G QE V + F+ +D+ + F EI | |
| Sbjct: | 3 | IGIIIASHGKFAEGIHQSGSMIFGDQEKVQVVTFMPSEGPDDLYAHFNDAIAQFDADDEI | 62 |
| Query: | 59 | LVLTDLLGGTPFNVSSALSVEYTDKKIKVLSGLNLSMLMEAVLSRTM | 105 |
| | | LVL DL G+PFN +S ++ E D+KI +++GLNL ML++A R M | |
| Sbjct: | 63 | LVLADLWSGSPFNQASRIAGENPDRKIAIITGLNLPMLIQAYTERMM | 109 |

[4370] A related DNA sequence was identified in S. pyogenes <SEQ ID 2339> which encodes the amino acid sequence <SEQ ID 2340>. Analysis of this protein sequence reveals the following:

Possible site: 41
>>> Seems to have an uncleavable N-term signal seq
----- Final Results -----
bacterial membrane --- Certainty = 0.0000 (Not Clear) < succ>
bacterial outside --- Certainty = 0.0000 (Not Clear) < succ>
bacterial cytoplasm --- Certainty = 0.0000 (Not Clear) < succ>

[4371] The protein has homology with the following sequences in the databases:

| >GP: AAF81086 GB: AF228498 AgaF [Escherichia coli] | | | |
|---|---|---|---|
| Identities = 48/127 (37%), Positives = 71/127 (55%), Gaps = 6/127 (4%) | | | |
| Query: | 1 | MIAIIVMGNGHFASGIVSALELIAGKQEKVTAIDFTTEMTAADVQDQLSRALIP---EEE | 57 |
| | | M++II+ GHG FASG+ A++ I G+Q + AID + A + QL A+ E+ | |
| Sbjct: | 1 | MLSIILTGHGGFASGMEKAMKQILGEQSQFIAIDVPETSSTALLTSQLEEAIAQLDCEDG | 60 |
| Query: | 58 | TLVLCDLLGGTPFKVAATLMESLPNTTCNVLSGLNLAMLIEASFARQTAASFDDLVSGLI | 117 |
| | | + L DLLGGTPF+VA+TL P C V++G NL +L+E R+ + + V L | |
| Sbjct: | 61 | IVFLTDLLGGTPFRVASTLAMQKPG--CEVITGTNLQLLLEMVLEREGLSGEEFRVQAL- | 117 |
| Query: | 118 | TCSKEGI | 124 |
| | | C G+ | |
| Sbjct: | 118 | ECGHRGL | 124 |

[4372] An alignment of the GAS and GBS proteins is shown below.

| Identities = 73/146 (50%), Positives = 94/146 (64%), Gaps = 3/146 (2%) | | | |
|---|---|---|---|
| Query: | 1 | MIKIIIVAHGNFPDGILSSLELIAGHQEYVVGINFIAGMSSNDVRVALQREVIDFKEILV | 60 |
| | | MI II++ HG+F GI+S+LELIAG QE V I+F M++ DV+ L R +I +E LV | |
| Sbjct: | 1 | MIAIIVMGHGHFASGIVSALELIAGKQEKVTAIDFTTEMTAADVQDQLSRALIPEEETLV | 60 |
| Query: | 61 | LTDLLGGTPFNVSSALSVEYTDKKIKVLSGLNLSMLMEAVLSRTMFEHVDDLVDKVITSS | 120 |
| | | L DLLGGTPF V++ L + VLSGLNL+ML+EA +R DDLV +IT S | |
| Sbjct: | 61 | LCDLLGGTPFKVAATLMESLPNTTCNVLSGLNLAMLIEASFARQTAASFDDLVSGLITCS | 120 |
| Query: | 121 | HEGIVDFSTCLATQTAEATFE--GGI | 144 |
| | | EGIVD+ T L+ Q AT + GGI | |
| Sbjct: | 121 | KEGIVDWKT-LSQQEDGATDDELGGI | 145 |

[4373] Based on this analysis, it was predicted that these proteins and their epitopes could be useful antigens for vaccines or diagnostics.

### EXAMPLE 763

[4374] A DNA sequence (GBSx0811) was identified in S. agalactiae <SEQ ID 2341> which encodes the amino acid sequence <SEQ ID 2342>. This protein is predicted to be unsaturated glucuronyl hydrolase. Analysis of this protein sequence reveals the following:

| Possible site: 48 | | | |
|---|---|---|---|
| >>> Seems to have no N-terminal signal sequence | | | |
| INTEGRAL | Likelihood = −0.11 | Transmembrane | 172-188 (172-188) |

----- Final Results -----
bacterial membrane --- Certainty = 0.1044 (Affirmative) < succ>
bacterial outside --- Certainty = 0.0000 (Not Clear) < succ>
bacterial cytoplasm --- Certainty = 0.0000 (Not Clear) < succ>

[4375] The protein has homology with the following sequences in the GENPEPT database.

| >GP: BAB05773 GB: AP001514 unsaturated glucuronyl hydrolase [Bacillus | | | |
|---|---|---|---|
| halodurans] | | | |
| Identities = 156/370 (42%), Positives = 219/370 (59%), Gaps = 3/370 (0%) | | | |
| Query: | 30 | EEAIEKALKQLYINIDYFGEEYPTPATFNNIYKVMDNTEWTNGFWTGCLWLAYEYNQDKK | 89 |
| | | ++A+ ++ NI F +P + Y++ +N EWTNGFW+G LWL YEY D | |
| Sbjct: | 4 | KQAMTDVAEKTLTNIKRFNGRFPHVSEDGEHYELNNNNEWTNGFWSGILWLCYEYTNDPA | 63 |
| Query: | 90 | LKNIAHKNVLSFLNRINNRIALDHHDLGFLYTPSCTAEYRINGDVKALEATIKAADKLME | 149 |
| | | + A V SF R+ + LDHHD+GFLY+ S A++ I D +A + TI+AAD LM+ | |
| Sbjct: | 64 | FRQAAASTVRSFQQRMEQNLELDHHDIGFLYSLSSKAQWIIERDERAKQLTIEAADVLMK | 123 |
| Query: | 150 | RYQEKGGFIQAWGELG-YKEHYRLIIDCLLNIQLLFFAYEQTGDEKYRQVAVNHFYASAN | 208 |
| | | R++EK QAWG G R+I+DCL+N+ LLF+A E TG+ YR+ A+ H + | |
| Sbjct: | 124 | RWREKIELFQAWGPEGDLSNGGRIIVDCLMNLPLLFWASEVTGNPDYREAAIIHADKTRR | 183 |
| Query: | 209 | NVVRDDSSAFHTFYFDPETGEPLKGVTRQGYSDESSWARGQAWGIYGIPLSYRKMKDYQQ | 268 |
| | | +VR D S +HTFYF+ ETGE L+G T QGY D S+W+RGQAW IYG ++YR + + | |
| Sbjct: | 184 | FIVRGDDSTYHTFYFNQETGEALRGGTHQGYEDGSTWSRGQAWAIYGFAIAYRYTGNERY | 243 |
| Query: | 269 | IILFKGMTNYFLNRLPEDKVSYWDLIFTDGSGQPRDTSATATAVCGIHEMLKYLPEVDPD | 328 |
| | | + K YF+ LP D V+YWD RD+SA+A A CGI E+L +L E DPD | |
| Sbjct: | 244 | LETAKRTAKYFIENLPADYVAYWDFNAPITPDTKRDSSASAIASCGILELLSHLQETDPD | 303 |
| Query: | 329 | KETYKYAMHTMLRSLIEQYSNNELIAGRPLLLHGVYSWHSGKGVDEGNIWGDYYYLEALI | 388 |
| | | K ++ ++ + SL+E Y++ + G L+ G YS G D+ IWGDY+Y EAL+ | |
| Sbjct: | 304 | KAFFQQSVQKQMTSLVENYASEKDAQG--LIKRGSYSVRIGHAPDDYVIWGDYFYTEALM | 361 |
| Query: | 389 | RFYKDWELYW | 398 |
| | | R K YW | |
| Sbjct: | 362 | RLEKLRNGYW | 371 |

[4376] A related DNA sequence was identified in S. pyogenes <SEQ ID 2343> which encodes the amino acid sequence <SEQ ID 2344>. Analysis of this protein sequence reveals the following:

| Possible site: 33 | | | |
|---|---|---|---|
| >>> Seems to have no N-terminal signal sequence | | | |
| INTEGRAL | Likelihood = −0.37 | Transmembrane | 173-189 (173-189) |

----- Final Results -----
bacterial membrane --- Certainty = 0.1150 (Affirmative) < succ>
bacterial outside --- Certainty = 0.0000 (Not Clear) < succ>
bacterial cytoplasm --- Certainty = 0.0000 (Not Clear) < succ>

[4377] An alignment of the GAS and GBS proteins is shown below.

| Identities = 273/395 (69%), Positives = 336/395 (84%) | | | |
|---|---|---|---|
| Query: | 4 | IKPVKVESIENPKRFLNSRLLTKIEVEEAIEKALKQLYINIDYFGEEYPTPATFNNIYKV | 63 |
| | | +K + +E I+ P+RF L++ ++ +A++ ALKQ+ +N+DYF E++PTPAT +N Y + | |
| Sbjct: | 5 | LKTIALEPIKQPERFTKEDFLSQEDITQALDLALKQVRLNMDYFKEDFPTPATKDNQYAI | 64 |
| Query: | 64 | MDNTEWTNGFWTGCLWLAYEYNQDKKLKNIAHKNVLSFLNRINNRIALDHHDLGFLYTPS | 123 |
| | | MDNTEWTN FWTGCLWLAYEY+ D +K +A N LSFL+R+ I LDHHDLGFLYTPS | |
| Sbjct: | 65 | MDNTEWTNAFWTGCLWLAYEYSGDDAIKALAQANDLSFLDRVTRDIELDHHDLGFLYTPS | 124 |
| Query: | 124 | CTAEYRINGDVKALEATIKAADKLMERYQEKGGFIQAWGELGYKEHYRLIIDCLLNIQLL | 183 |
| | | C AE+++ ++ EA +KAADKL++RYQ+KGGFIQAWGELG KE YRLIIDCLLNIQLL | |
| Sbjct: | 125 | CMAEWKLLKTPESREAALKAADKLVQRYQDKGGFIQAWGELGKKEDYRLIIDCLLNIQLL | 184 |
| Query: | 184 | FFAYEQTGDEKYRQVAVNHFYASANNVVRDDSSAFHTFYFDPETGEPLKGVTRQGYSDES | 243 |
| | | FFA ++TGD +YR +A+NHFYASAN+V+RDD+SA+HTFYFDPETG+P+KGVTRQGYSD+S | |
| Sbjct: | 185 | FFASQETGDNRYRDMAINHFYASANHVIRDDASAYHTFYFDPETGDPVKGVTRQGYSDDS | 244 |
| Query: | 244 | SWARGQAWGIYGIPLSYRKMKDYQQIILFKGMTNYFLNRLPEDKVSYWDLIFTDGSGQPR | 303 |
| | | +WARGQAWGIYGIPL+YR +K+ + I LFKGMT+YFLNRLP+D+VSYWDLIF DGS Q R | |
| Sbjct: | 245 | AWARGQAWGIYGIPLTYRFLKEPELIQLFKGMTHYFLNRLPKDQVSYWDLIFGDGSEQSR | 304 |
| Query: | 304 | DTSATATAVCGIHEMLKYLPEVDPDKETYKYAMHTMLRSLIEQYSNNELIAGRPLLLHGV | 363 |
| | | D+SATA AVCGIHEMLK LP+ DPDK+TY+ AMH+MLR+LI+ Y+N +L G PLLLHGV | |
| Sbjct: | 305 | DSSATAIAVCGIHEMLKTLFDHDPDKKTYEAAMHSMLRALIKDYANKDLKPGAPLLLHGV | 364 |
| Query: | 364 | YSWHSGKGVDEGNIWGDYYYLEALIRFYKDWELYW | 398 |
| | | YSWHSGKGVDEGNIWGDYYYLEAL+RFYKDW YW | |
| Sbjct: | 365 | YSWHSGKGVDEGNIWGDYYYLEALLRFYKDWNPYW | 399 |

[4378] Based on this analysis, it was predicted that these proteins and their epitopes could be useful antigens for vaccines or diagnostics.

### EXAMPLE 764

[4379] A DNA sequence (GBSx0812) was identified in S. agalactiae <SEQ ID 2345> which encodes the amino acid sequence <SEQ ID 2346>. Analysis of this protein sequence reveals the following:

Possible site: 36
>>> Seems to have no N-terminal signal sequence
----- Final Results -----
bacterial cytoplasm --- Certainty = 0.3035 (Atfirmative) < succ>
bacterial membrane --- Certainty = 0.0000 (Not Clear) < succ>
bacterial outside --- Certainty = 0.0000 (Not Clear) < succ>

[4380] The protein has homology with the following sequences in the GENPEPT database.

| >GP: AAC44679 GB: U65015 PTS permease for mannose subunit IIIMan C | | | |
|---|---|---|---|
| terminal domain [Vibrio furnissii] | | | |
| Identities = 63/125 (50%), Positives = 89/125 (70%), Gaps = 1/125 (0%) | | | |
| Query: | 5 | PNIVMTRVDERLIHGQ-GQLWVKFLSCNTVIVANDDVSKDHLQQTLMKTVVPESIALRFF | 63 |
| | | PNIV++R+DERL+HGQ G WV F N V+VAND+V+ D +QQ LM+ V+ + IA+RF+ | |
| Sbjct: | 2 | PNIVLSRIDERLVHGQVGVQWVGFADANIVVVANDEVAADTIQQNLMEMVLADGIAIRFW | 61 |
| Query: | 64 | DIQKVIDIIHKANPAQTIFIIVKDLKDVYRLVAGGVPIKEINIGNIHNGEGKEQVSRSIF | 123 |
| | | +QK ID IHKA+ Q I ++ K D RLV GGVPI IN+GN+H +GK Q+S+++ | |
| Sbjct: | 62 | TVQKTIDTIHKASDRQRILLVCKTPHDFRRLVEGGVPIAAINVGNMHYIDGKTQISKTVS | 121 |
| Query: | 124 | LGMKD | 128 |
| | | + +D | |
| Sbjct: | 122 | VDAED | 126 |

[4381] A related DNA sequence was identified in S. pyogenes <SEQ ID 2347> which encodes the amino acid sequence <SEQ ID 2348>. Analysis of this protein sequence reveals the following:

Possible site: 58
>>> Seems to have no N-terminal signal sequence
----- Final Results -----
bacterial cytoplasm --- Certainty = 0.2511 (Affirmative) < succ>
bacterial membrane --- Certainty = 0.0000 (Not Clear) < succ>
bacterial outside --- Certainty = 0.0000 (Not Clear) < succ>

[4382] The protein has homology with the following sequences in the databases:

| >GP: BAA84216 GB: AB019619 unsaturated glucuronyl hydrolase [Bacillus | | | |
|---|---|---|---|
| sp. GL1] | | | |
| Identities = 161/369 (43%), Positives = 220/369 (58%), Gaps = 1/369 (0%) | | | |
| Query: | 32 | QALDLALKQVRLNMDYFKEDFPTPATKDNQYAIMDNTEWTNAFWTGCLWLAYEYSGDDAI | 91 |
| | | QA+ AL N+ F + FP + N+Y + DNT+WT+ FW+G LWL YEY+GD+ | |
| Sbjct: | 4 | QAIGDALGITARNLKKFGDRFPHVSDGSNKYVLNDNTDWTDGFWSGILWLCYEYTGDEQY | 63 |
| Query: | 92 | KALAQANDLSFLDRVTRDIELDHHDLGFLYTPSCMAEWKLLKTPESREAALKAADKLVQR | 151 |
| | | + A SF +R+ R LDHHD+GFLY+ S A+W + K +R+ AL AAD L++R | |
| Sbjct: | 64 | REGAVRTVASFRERLDRFENLDHHDIGFLYSLSAKAQWIVEKDESARKLALDAADVLMRR | 123 |
| Query: | 152 | YQDKGGFIQAWGELGKKEDY-RLIIDCLLNIQLLFFASQETGDNRYRDMAINHFYASANH | 210 |
| | | ++ G IQAWG G E+ R+IIDCLLN+ LL +A ++TGD YR +A H S | |
| Sbjct: | 124 | WRADAGIIQAWGPKGDPENGGRIIIDCLLNLPLLLWAGEQTGDPEYRRVAEAHALKSRRF | 183 |
| Query: | 211 | VIRDDASAYHTFYFDPETGDPVKGVTRQGYSDDSAWARGQAWGIYGIPLTYRFLKEPELI | 270 |
| | | ++R D S+YHTFYFDPE G+ ++G T QG +D S W RGQAWGIYG L R+L +L+ | |
| Sbjct: | 184 | LVRGDDSSYHTFYFDPENGNAIRGGTHQGNTDGSTWTRGQAWGIYGFALNSRYLGNADLL | 243 |
| Query: | 271 | QLFKGMTHYFLNRLPKDQVSYWDLIFGDGSEQSRDSSATAIAVCGIHEMLKTLPDHDPDK | 330 |
| | | + K M +FL R+P+D V YWD RDSSA+AI CG+ E+ L + DP++ | |
| Sbjct: | 244 | ETAKRMARHFLARVPEDGVVYWDFEVPQEPSSYRDSSASAITACGLLEIASQLDESDPER | 303 |
| Query: | 331 | KTYEAAMHSMLRALIKDYANKDLKPGAPLLLHGVYSWHSGKGVDEGNIWGDYYYLEALLR | 390 |
| | | + + A + + AL YA +D + G Y G D+ IWGDYYYLEALLR | |
| Sbjct: | 304 | QRFIDAAKTTVTALRDGYAERDDGEAEGFIRRGSYHVRGGISPDDYTIWGDYYYLEALLR | 363 |
| Query: | 391 | FYKDWNPYW | 399 |
| | | + YW | |
| Sbjct: | 364 | LERGVTGYW | 372 |

[4383] An alignment of the GAS and GBS proteins is shown below.

| Identities = 112/160 (70%), Positives = 132/160 (82%), Gaps = 1/160 (0%) | | | |
|---|---|---|---|
| Query: | 5 | PNIVMTRVDERLIHGQGQLWVKFLSCNTVIVANDDVSKDHLQQTLMKTVVPESIALRFFD | 64 |
| | | PNI+MTRVDERLIHGQGQLWVKFL+CNTVIVAND VS+D +QQ+LMKTV+P SIA+RFF | |
| Sbjct: | 4 | PNIIMTRVDERLIHGQGQLWVKFLNCNTVIVANDAVSEDKIQQSLMKTVIPSSIAIRFFS | 63 |
| Query: | 65 | IQKVIDIIHKANPAQTIFIIVKDLKDVYRLVAGGVPIKEINIGNIHNGEGKEQVSRSIFL | 124 |
| | | IQKVIDIIHKA+PAQ+IFI+VKDL+ D LV GGVPI EINIGNIH + K +++ I L | |
| Sbjct: | 64 | IQKVIDIIHKASPAQSIFIVVKDLQDAKLLVEGGVPITEINIGNIHKTDDKVAITQFISL | 123 |
| Query: | 125 | GMKDKEIIRKLNQEYHIAFNTKTTPTGNDGAVEVNILDYI | 164 |
| | | G DK IR L ++H+ FNTKTTP GN A +V+ILDYI | |
| Sbjct: | 124 | GETDKSAIRCLAHDHHVVFNTKTTPAGN-SASDVDILDYI | 162 |

[4384] Based on this analysis, it was predicted that these proteins and their epitopes could be useful antigens for vaccines or diagnostics.

### EXAMPLE 765

[4385] A DNA sequence (GBSx0813) was identified in S. agalactiae <SEQ ID 2349> which encodes the amino acid sequence <SEQ ID 2350>. This protein is predicted to be AgaW (agaC). Analysis of this protein sequence reveals the following:

| Possible site: 25 | | | |
|---|---|---|---|
| >>> Seems to have a cleavable N-term signal seq. | | | |
| INTEGRAL | Likelihood = −6.95 | Transmembrane | 251-267 (244-269) |
| INTEGRAL | Likelihood = −4.30 | Transmembrane | 213-229 (208-230) |
| INTEGRAL | Likelihood = −2.71 | Transmembrane | 149-165 (148-165) |
| INTEGRAL | Likelihood = −1.81 | Transmembrane | 31-47 (31-49) |
| INTEGRAL | Likelihood = −1.49 | Transmembrane | 173-189 (173-189) |

----- Final Results -----
bacterial membrane --- Certainty = 0.3781 (Affirmative) < succ>
bacterial outside --- Certainty = 0.0000 (Not Clear) < succ>
bacterial cytoplasm --- Certainty = 0.0000 (Not Clear) < succ>

[4386] The protein has homology with the following sequences in the GENPEPT database.

| >GP: AAF81084 GB: AF228498 AgaW [Escherichia coli] | | | |
|---|---|---|---|
| Identities = 93/295 (31%), Positives = 140/295 (46%), Gaps = 48/295 (16%) | | | |
| Query: | 1 | MDISILQAVLIGLWTAFCFSGMLLGL-YTNRCIVLSLGVGVILGDIQTALAVGAISELAY | 59 |
| | | M+IS+LQA +G+ M GL + +R +VL VG++LGD+ T + G EL + | |
| Sbjct: | 1 | MEISLLQAFALGIIAFIAGLDMFNGLTHMHRPVVLGPLVGLVLGDLHTGILTGGTLELVW | 60 |
| Query: | 60 | MGFGVGAGGTVPPNPIGPGIFGTLMAITTAGTKGKITPEAALALSTPIAVGIQFLQTATY | 119 |
| | | MG AG PPN I I GT AITT + P+ A+ ++ P AV +Q T + | |
| Sbjct: | 61 | MGLAPLAGAQ-PPNVIIGTIVGTAFAITTG-----VKPDVAVGVAVPFAVAVQMGITFLF | 114 |
| Query: | 120 | TAFAGAPETAKK--------ALQAGNFRGFKIAANGT-IWAFAGLGFGLGVLGALSTQTL | 170 |
| | | + +G + AL A N+ N + AF + FG A +T+ | |
| Sbjct: | 115 | SVMSGVMSRCARMPRTPILAALNACNYLALLALGNFYFLCAFLPIYFG-----AEHAKTI | 169 |
| Query: | 171 | TDLFALIPPVLLNGLTLAGKMLPAIGFAMILSVMAKKELIPYILLGYVLAVYFGLPVLTP | 230 |
| | | D+ +P L++GL +AG ++PAIGFA++L +M K IPY +LG+V A + LPVL | |
| Sbjct: | 170 | IDV---LPQRLIDGLGVAGGIMPAIGFAVLLKIMMKNVYIPYFILGFVAAAWLKLPVL-- | 224 |
| Query: | 231 | TANGDGVLTSVATNSVLGVPTIGVAIIATIFALLDIFRKPAAPTKETKTEGDNQD | 285 |
| | | +A A AL+D+ RK PT+ + + +D | |
| Sbjct: | 225 | ----------------------AIACPALAMALIDLLRKSPEPTQPAAQKEEFED | 257 |

[4387] A related DNA sequence was identified in S. pyogenes <SEQ ID 2351> which encodes the amino acid sequence <SEQ ID 2352>. Analysis of this protein sequence reveals the following:

| Possible site: 52 | | | |
|---|---|---|---|
| >>> Seems to have a cleavable N-term signal seq. | | | |
| INTEGRAL | Likelihood = −6.37 | Transmembrane | 220-236 (214-241) |
| INTEGRAL | Likelihood = −5.10 | Transmembrane | 146-162 (144-165) |
| INTEGRAL | Likelihood = −1.59 | Transmembrane | 184-200 (184-202) |

----- Final Results -----
bacterial membrane --- Certainty = 0.3548 (Affirmative) < succ>
bacterial outside --- Certainty = 0.0000 (Not Clear) < succ>
bacterial cytoplasm --- Certainty = 0.0000 (Not Clear) < succ>

[4388] The protein has homology with the following sequences in the databases:

| >GP: AAC44680 GB: U65015 PTS permease for mannose subunit IIPMan | | | |
|---|---|---|---|
| [Vibrio furnissii] | | | |
| Identities = 86/255 (33%), Positives = 137/255 (53%), Gaps = 11/255 (4%) | | | |
| Query: | 1 | MDINLLQALLIGLWTAFCFSGMLLGI-YTNRCIILSFGVGIILGDLPTALSMGAISELAY | 59 |
| | | M+I L QAL++GL + G+ + +R ++L VG+ILGDL T + +G EL + | |
| Sbjct: | 1 | MEIGLFQALMLGLLAFLAGLDLFNGLTHFHRPVVLGPLVGLILGDLHTGILVGGTLELIW | 60 |
| Query: | 60 | MGFGVGAGGTVPPNPIGPGIFGTLMAITSAGKVTPEAALALSTPIAVAIQFLQTFAYTAF | 119 |
| | | MG AG PPN I I GT AIT+ V P A+ ++ P AVA+Q T ++A | |
| Sbjct: | 61 | MGLAPLAGAQ-PPNVIIGTIVGTTFAITT--NVEPNVAVGVAVPFAVAVQMGITLLFSAM | 117 |
| Query: | 120 | AGAPETAKKQLQKGNIRGFK---FAANGTIWAFAFIGLGLGLLGALSMDTLLHLVDYIPP | 176 |
| | | + + + + RG + + A + +F F+ L + L D +V +P | |
| Sbjct: | 118 | SAVMSKCDEYAKNADTRGIERVNYFALAVLGSFYFLCAFLPIY--LGADHAGAMVAALPK | 175 |
| Query: | 177 | VLLNGLTVAGKMLPAIGFAMILSVMAKKELIPFVLIGYVCAAYLQIPTIGIAIIGIIFAL | 236 |
| | | L++GL VAG ++PAIGFA+++ +M K IP+ ++G+V AA+LQ+P + I A+ | |
| Sbjct: | 176 | ALIDGLGVAGGIMPAIGFAVLMKIMMKNAYIPYFILGFVAAAWLQLPILAIRCAATAMAI | 235 |
| Query: | 237 | NEFYNK--PKQVDAT | 249 |
| | | +F K P V+A+ | |
| Sbjct: | 236 | IDFMRKSEPTPVNAS | 250 |

[4389] An alignment of the GAS and GBS proteins is shown below.

| Identities = 203/288 (70%), Positives = 225/288 (77%), Gaps 28/288 (9%) | | | |
|---|---|---|---|
| Query: | 1 | MDISILQAVLIGLWTAFCFSGMLLGLYTNRCIVLSLGVGVILGDIQTALAVGAISELAYM | 60 |
| | | MDI++LQA+LIGLWTAFCFSGMLLG+YTNRCI+LS GVG+ILGD+ TAL++GAISELAYM | |
| Sbjct: | 1 | MDINLLQALLIGLWTAFCFSGMLLGIYTNRCIILSFGVGIILGDLPTALSMGAISELAYM | 60 |
| Query: | 61 | GFGVGAGGTVPPNPIGPGIFGTLMAITTAGTKGKITPEAALALSTPIAVGIQFLQTATYT | 120 |
| | | GFGVGAGGTVPPNPIGPGIFGTLMAIT+AG K+TPEAALALSTPIAV IQFLQT YT | |
| Sbjct: | 61 | GFGVGAGGTVPPNPIGPGIFGTLMAITSAG---KVTPEAALALSTPIAVAIQFLQTFAYT | 117 |
| Query: | 121 | AFAGAPETAKKALQAGNFRGFKIAANGTIWAFAGLGFGLGVLGALSTQTLTDLFALIPPV | 180 |
| | | AFAGAPETAKI LQ GN RGFK AANGTIWAFA +G GLG+LGALS TL L IPPV | |
| Sbjct: | 118 | AFAGAPETAKKQLQKGNIRGFKFAANGTIWAFAFIGLGLGLLGALSMDTLLHLVDYIPPV | 177 |
| Query: | 181 | LLNGLTLAGKMLPAIGFAMILSVMAKKELIPYILLGYVLAVYFGLPVLTPTANGDGVLTS | 240 |
| | | LLNGLT+AGKMLPAIGFAMILSVMAKKELIP++L+GYV A Y | |
| Sbjct: | 178 | LLNGLTVAGKMLPAIGFAMILSVMAKKELIPFVLIGYVCAAY------------------ | 219 |
| Query: | 241 | VATNSVLGVPTIGVAIIATIFALLDIFRKPAAPTKETKTEGDNQDDWI | 288 |
| | | L +PTIG+AII IFAL + + KP T +G QDDWI | |
| Sbjct: | 220 | ------LQIPTIGIAIIGIIFALNEFYNKP-KQVDATTVQGGQQDDWI | 260 |

[4390] Based on this analysis, it was predicted that these proteins and their epitopes could be useful antigens for vaccines or diagnostics.

### EXAMPLE 766

[4391] A DNA sequence (GBSx0814) was identified in S. agalactiae <SEQ ID 2353> which encodes the amino acid sequence <SEQ ID 2354>. Analysis of this protein sequence reveals the following:

Possible site: 31
>>> Seems to have no N-terminal signal sequence
----- Final Results -----
bacterial cytoplasm --- Certainty = 0.2442 (Affirmative) < succ>
bacterial membrane --- Certainty = 0.0000 (Not Clear) < succ>
bacterial outside --- Certainty = 0.0000 (Not Clear) < succ>

[4392] The protein has no significant homology with any sequences in the GENPEPT database.

[4393] No corresponding DNA sequence was identified in S. pyogenes.

[4394] Based on this analysis, it was predicted that this protein and its epitopes, could be useful antigens for vaccines or diagnostics.

### EXAMPLE 767

[4395] A DNA sequence (GBSx0815) was identified in S. agalactiae <SEQ ID 2355> which encodes the amino acid sequence <SEQ ID 2356>. This protein is predicted to be PTS permease for mannose subunit IIBMan. Analysis of this protein sequence reveals the following:

| Possible site: 43 | | | |
|---|---|---|---|
| >>> Seems to have no N-terminal signal sequence | | | |
| INTEGRAL | Likelihood = −8.28 | Transmembrane | 278-294 (272-294) |
| INTEGRAL | Likelihood = −3.45 | Transmembrane | 155-171 (155-174) |
| INTEGRAL | Likelihood = −1.59 | Transmembrane | 250-266 (250-267) |

----- Final Results -----
bacterial membrane --- Certainty = 0.4312 (Affirmative) < succ>
bacterial outside --- Certainty = 0.0000 (Not Clear) < succ>
bacterial cytoplasm --- Certainty = 0.0000 (Not Clear) < succ>

[4396] A related GBS nucleic acid sequence <SEQ ID 8657> which encodes amino acid sequence <SEQ ID 8658> was also identified. Analysis of this protein sequence reveals the following:

| Lipop: Possible site: −1 Crend: 10 | | | |
|---|---|---|---|
| McG: Discrim Score: −9.70 | | | |
| GvH: Signal Score (−7.5): −6.12 | | | |
| Possible site: 19 | | | |
| >>> Seems to have no N-terminal signal sequence | | | |
| ALOM program | count: 3 | value: −8.28 | threshold: 0.0 |

| | | | |
|---|---|---|---|
| INTEGRAL | Likelihood = −8.28 | Transmembrane | 254-270 (248-270) |
| INTEGRAL | Likelihood = −3.45 | Transmembrane | 131-147 (131-150) |
| INTEGRAL | Likelihood = −1.59 | Transmembrane | 226-242 (226-243) |

| | | |
|---|---|---|
| PERIPHERAL | Likelihood = 0.37 | 175 |

modified ALOM score: 2.16
*** Reasoning Step: 3
----- Final Results -----
bacterial membrane --- Certainty = 0.4312 (Affirmative) < succ>
bacterial outside --- Certainty = 0.0000 (Not Clear) < succ>
bacterial cytoplasm --- Certainty = 0.0000 (Not Clear) < succ>

[4397] The protein has homology with the following sequences in the GENPEPT database.

| >GP: AAA57943 GB: U18997 ORF_o290; Geneplot suggests frameshift | | | |
|---|---|---|---|
| linking to o267, not found [Escherichia coli] | | | |
| Identities = 101/278 (36%), Positives = 164/278 (58%), Gaps = 6/278 (2%) | | | |
| Query: | 17 | LRQKETTKMTGSKKLAKSDYTKTALRAFYLQNGFNYSNYQGLGYANVIYPALKKYYGDDK | 76 |
| | | ++ K+ T GS+ ++K D T+ R+ LQ FNY Q G+ + P LKK Y DDK | |
| Sbjct: | 19 | VKMKKRTTAMGSE-ISKKDITRLGFRSSLLQASFNYERMQAGGFTWAMLPILKKIYKDDK | 77 |
| Query: | 77 | KALAGALEENVEFYNTNPHFLPFVTSLHLAMLDNERPEEEIRGIKMALMGPLAGIGDSLS | 136 |
| | | L+ A+++N+EF NT+P+ + F+ L ++M + + I+G+K+AL GP+AGIGD++ | |
| Sbjct: | 78 | PGLSAAMKDNLEFINTHPNLVGFLMGLLISMEEKGENRDTIKGLKVALFGPIAGIGDAIF | 137 |
| Query: | 137 | QFCLAPLFSTIAASLATDGLVMGPILFFVAMNTILTGIKLVTGMYGYRLGTSFIDKLSEQ | 196 |
| | | F L P+ + I +S A+ G ++GPILFF A+ ++ +++ GY +G IDK+ E | |
| Sbjct: | 138 | WFTLLPIMAGICSSFASQGNLLGPILFF-AVYLLIFFLRVGWTHVGYSVGVKAIDKVREN | 196 |
| Query: | 197 | MSVISRAANIVGVTVISSLAATQVKLTIPYTFAPEKVTSTTQKIVTVQGMLDKIAPALLP | 256 |
| | | +I+R+A I+G+TVI L A+ V + + +FA T + Q DK+ P +LP | |
| Sbjct: | 197 | SQMIARSATILGITVIGGLIASYVHINVVTSFA----IDNTHSVALQQDFFDKVFPNILP | 252 |
| Query: | 257 | ALYTFLMFYLIKNKKWTTYKLVILTVIIGILGSWLGIL | 294 |
| | | YT LM+Y ++ KK L+ +T ++ I+ S GIL | |
| Sbjct: | 253 | MAYTLLMYYFLRVKKAHPVLLIGVTFVLSIVCSAFGIL | 290 |

[4398] A related DNA sequence was identified in S. pyogenes <SEQ ID 2357> which encodes the amino acid sequence <SEQ ID 2358>. Analysis of this protein sequence reveals the following:

| Possible site: 45 | | | |
|---|---|---|---|
| >>> Seems to have no N-terminal signal sequence | | | |
| INTEGRAL | Likelihood = −8.49 | Transmembrane | 276-292 (270-292) |
| INTEGRAL | Likelihood = −7.01 | Transmembrane | 151-167 (149-176) |
| INTEGRAL | Likelihood = −3.03 | Transmembrane | 202-218 (202-220) |
| INTEGRAL | Likelihood = −2.13 | Transmembrane | 249-265 (248-265) |

----- Final Results -----
bacterial membrane --- Certainty = 0.4397 (Affirmative) < succ>
bacterial outside --- Certainty = 0.0000 (Not Clear) < succ>
bacterial cytoplasm --- Certainty = 0.0000 (Not Clear) < succ>

[4399] The protein has homology with the following sequences in the databases:

| >GP: AAA57943 GB: U18997 ORF_o290; Geneplot suggests frameshift | | | |
|---|---|---|---|
| linking to o267, not found [Escherichia coli] | | | |
| Identities = 104/285 (36%), Positives = 162/285 (56%), Gaps = 7/285 (2%) | | | |
| Query: | 8 | NKSMQQLSKEANKMTGSNKLTKKDYLKTALRAFFLQNGFNYNNYQGIGYANVIYPALKKH | 67 |
| | | N+S + + ++++KKD + R+ LQ FNY Q G+ + P LKK | |
| Sbjct: | 13 | NRSPLPVKMKKRTTAMGSEISKKDITRLGFRSSLLQASFNYERMQAGGFTWAMLPILKKI | 72 |
| Query: | 68 | FGNDKKGLYQALEDNCEFYNTNPHFLPFITSLHLVMLENNRPEEETRNIKMALMGPLAGI | 127 |
| | | + +DK GL A++DN EF NT+P+ + F+ L + M E + + +K+AL GP+AGI | |
| Sbjct: | 73 | YKDDKPGLSAAMKDNLEFINTHPNLVGFLMGLLISMEEKGENRDTIKGLKVALFGPIAGI | 132 |
| Query: | 128 | GDSLSQFCLAPLFSTIAASLASDGLVLGPILFFLAMNIILTAIKIGSGLYGYKVGTSFID | 187 |
| | | GD++ F L P+ + I +S AS G +LGPILFF A+ +++ +++G GY VG ID | |
| Sbjct: | 133 | GDAIFWFTLLPIMAGICSSFASQGNLLGPILFF-AVYLLIFFLRVGWTHVGYSVGVKAID | 191 |
| Query: | 188 | KLSEQMAVVSRMANIVGVTVIAGLAATSVKITVPITFAAGKVDAANTAQKFVTIQGMLDK | 247 |
| | | K+ E +++R A I+G+TVI GL A+ V I V +FA + Q F DK | |
| Sbjct: | 192 | KVRENSQMIARSATILGITVIGGLIASYVHINVVTSFAIDNTHSVALQQDF------FDK | 245 |
| Query: | 248 | IAPALLPALFTLLMYYLIKNKKWTTYKLVILTVIIGVIGSWLGIL | 292 |
| | | + P +LP +TLLMYY ++ KK L+ +T ++ ++ S GIL | |
| Sbjct: | 246 | VFPNILPMAYTLLMYYFLRVKKAHPVLLIGVTFVLSIVCSAFGIL | 290 |

[4400] An alignment of the GAS and GBS proteins is shown below.

Identities = 224/288 (77%), Positives = 255/288 (87%), Gaps = 4/288 (1%)

| | | | |
|---|---|---|---|
| Query: | 12 | HLLKKLRQ--KETTKMTGSKKLAKSDYTKTALRAFYLQNGFNYSNYQGLGYANVIYPALK | 69 |
| | | +L K ++Q KE KMTGS KL K DY KTALRAF+LQNGFNY+NYQG+GYANVIYPALK | |
| Sbjct: | 6 | NLNKSMQQLSKEANKMTGSNKLTKKDYLKTALRAFFLQNGFNYNNYQGIGYANVIYPALK | 65 |
| Query: | 70 | KYYGDDKKALAGALEENVEFYNTNPHFLPFVTSLHLAMLDNERPEEEIRGIKMALMGPLA | 129 |
| | | K++G+DKK L ALE+N EFYNTNPHFLPF+TSLHL ML+N RPEEE R IKMALMGPLA | |
| Sbjct: | 66 | KHFGNDKKGLYQALEDNCEFYNTNPHFLPFITSLHLVMLENNRPEEETRNIKMALMGPLA | 125 |
| Query: | 130 | GIGDSLSQFCLAPLFSTIAASLATDGLVMGPILFFVAMNTILTGIKLVTGMYGYRLGTSF | 189 |
| | | GIGDSLSQFCLAPLFSTIAASLA+DGLV+GPILFF+AMN ILT IK+ +G+YGY++GTSF | |
| Sbjct: | 126 | GIGDSLSQFCLAPLFSTIAASLASDGLVLGPILFFLAMNIILTAIKIGSGLYGYKVGTSF | 185 |
| Query: | 190 | IDKLSEQMSVISRAANIVGVTVISSLAATQVKLTIPYTFAPEKV--TSTTQKIVTVQGML | 247 |
| | | IDKLSEQM+V+SR ANIVGVTVI+ LAAT VK+T+P TFA KV +T QK VT+QGML | |
| Sbjct: | 186 | IDKLSEQMAVVSRMANIVGVTVIAGLAATSVKITVPITFAAGKVDAANTAQKFVTIQGML | 245 |
| Query: | 248 | DKIAPALLPALYTFLMFYLIKNKKWTTYKLVILTVIIGILGSWLGILA | 295 |
| | | DKIAPALLPAL+T LM+YLIKNKKWTTYKLVILTVIIG++GSWLGILA | |
| Sbjct: | 246 | DKIAPALLPALFTLLMYYLIKNKKWTTYKLVILTVIIGVIGSWLGILA | 293 |

[4401] Based on this analysis, it was predicted that these proteins and their epitopes could be useful antigens for vaccines or diagnostics.

### EXAMPLE 768

[4402] A DNA sequence (GBSx0816) was identified in S. agalactiae <SEQ ID 2359> which encodes the amino acid sequence <SEQ ID 2360>. Analysis of this protein sequence reveals the following:

| Possible site: 58 | | | |
|---|---|---|---|
| >>> Seems to have no N-terminal signal sequence | | | |
| INTEGRAL | Likelihood = −0.37 | Transmembrane | 135-151 (135-151) |

----- Final Results -----
bacterial membrane --- Certainty = 0.1150 (Affirmative) < succ>
bacterial outside --- Certainty = 0.0000 (Not Clear) < succ>
bacterial cytoplasm --- Certainty = 0.0000 (Not Clear) < succ>

[4403] The protein has homology with the following sequences in the GENPEPT database.

| >GP: CAB01924 GB: Z79691 OrfA [Streptococcus pneumoniae] | | | |
|---|---|---|---|
| Identities = 76/206 (36%), Positives = 124/206 (59%), Gaps = 1/206 (0%) | | | |
| Query: | 428 | SWTYNSYPKCDYCQLTSKDRYHLVEGQLHVQRASDIYYHKRWLLTLPQAITLVIDKVSCP | 487 |
| | | SW Y YP +C ++ H +EG Y HKR +L L + + L++D + C | |
| Sbjct: | 2 | SWEYEYYPHSLFCHHKEREGMHYIEGAYWSAEPDLPYLHKRKILMLVEDVWLLVDDIRCQ | 61 |
| Query: | 488 | GEHVLTNQYILDDQVIYENGFVNDLKLVSPTTFNLEDCLISKRYNQLTESHKLVKKIKFV | 547 |
| | | G+H Q+ILD V Y++G +N L+L S F+LED +IS +YN+L S KL K+ F | |
| Sbjct: | 62 | GQHEALTQFILDKDVTYQDGKINQLRLWSEVDFDLEDTIISPKYNELERSSKLTKRQFFE | 121 |
| Query: | 548 | DEVMDYTLIVDRNCQVKYVPLVQTNSHKELSNSIAFDIRSQDFHYLIGVLMDDIIFGDKL | 607 |
| | | ++++DYT+I + ++ + QT+ +E+ N++AF++++ + LI +L +DI G+KL | |
| Sbjct: | 122 | NQMLDYTIIAHESFEIIRHSVYQTDD-REVENALAFEVKNDETDKLILLLSEDIRVGEKL | 180 |
| Query: | 608 | YLMQGIKCKGKVIVYDKNNGKMSRLK | 633 |
| | | L+ G K +GK +VYDK N +M RL+ | |
| Sbjct: | 181 | CLVDGTKMRGKCLVYDKINERMIRLQ | 206 |

[4404] A related DNA sequence was identified in S. pyogenes <SEQ ID 2361> which encodes the amino acid sequence <SEQ ID 2362>. Analysis of this protein sequence reveals the following:

| Possible site: 53 | | | |
|---|---|---|---|
| >>> Seems to have no N-terminal signal sequence | | | |
| INTEGRAL | Likelihood = −2.55 | Transmembrane | 477-493 (477-493) |

----- Final Results -----
bacterial membrane --- Certainty = 0.2020 (Affirmative) < succ>
bacterial outside --- Certainty = 0.0000 (Not Clear) < succ>
bacterial cytoplasm --- Certainty = 0.0000 (Not Clear) < succ>

[4405] The protein has homology with the following sequences in the databases:

| >GP: CAB01924 GB: Z79691 OrfA [Streptococcus pneumoniae] | | | |
|---|---|---|---|
| Identities = 75/207 (36%), Positives = 125/207 (60%), Gaps = 2/207 (0%) | | | |
| Query: | 434 | SWAYLSYPKSNYCHLRQNGHVYFIEGSYQTQFSDRNNYQHDRQILILPPGIFLIIDTIQA | 493 |
| | | SW Y YP S +CH ++ +++IEG+Y + D Y H R+IL+L ++L++D I+ | |
| Sbjct: | 2 | SWEYEYYPHSLFCHHKEREGMHYIEGAYWSAEPDLP-YLHKRKILMLVEDVWLLVDDIRC | 60 |
| Query: | 494 | QGNHCLVSQFILDNHLDVKTDHLSDLRLISDCPFTIEETILSKKYNQYLTSHKLIKRKPF | 553 |
| | | QG H ++QFILD + + ++ LRL S+ F +E+TI+S KYN+ S KL KR+ F | |
| Sbjct: | 61 | QGQHEALTQFILDKDVTYQDGKINQLRLWSEVDFDLEDTIISPKYNELERSSKLTKRQFF | 120 |
| Query: | 554 | KDKGCTSTLLVPDDTKVTPLTPLQTGKRNPIETALSWHLKGKQFDYSICVLQEDLIKGEK | 613 |
| | | +++ T++ + ++ + QT R +E AL++ +K + D I +L ED+ GEK | |
| Sbjct: | 121 | ENQMLDYTIIAHESFEIIRHSVYQTDDRE-VENALAFEVKNDETDKLILLLSEDIRVGEK | 179 |
| Query: | 614 | LVLLNSHKIRGKVVVINHITNEIIRLK | 640 |
| | | L L++ K+RGK +V + I +IRL+ | |
| Sbjct: | 180 | LCLVDGTKMRGKCLVYDKINERMIRLQ | 206 |

[4406] An alignment of the GAS and GBS proteins is shown below.

| Identities = 282/631 (44%), Positives = 414/631 (64%), Gaps = 2/631 (0%) | | | |
|---|---|---|---|
| Query: | 6 | YNKFKD-FDREFCQKYIKTYQSNAYQEMKASVNLMMRNTFVFNDNWDMEPCSKAYCLDPL | 64 |
| | | + +FK+ + +FC+ Y+ YQ+++Y + K +L++ NTF+F DNWDMEPC Y LDP+ | |
| Sbjct: | 11 | FARFKETVNPDFCRNYLLDYQTDSYADQKRIADLLLTNTFLFEDNWDMEPCHIPYHLDPI | 70 |
| Query: | 65 | EWDKPVTDDPEWLYMLNRQTYLFKFLVVYIVEGDKSYLRQMKYFMYHWIDCQFTLKPEGA | 124 |
| | | W + V DDPEW +MLNRQTYL K ++VY+VE D+ YL K F+ +WI+ L P+G | |
| Sbjct: | 71 | TWQEAVIDDPEWNFMLNRQTYLQKLILVYLVERDERYLLTAKGFILNWIESAIPLDPKGL | 130 |
| Query: | 125 | VSRTIDTGIRCMSWLKVLIFLDYFGLITETKKIKLLTSLREQITYMRDYYREKDSLSNWG | 184 |
| | | +RT+DTGIRC +W+K LI+L+ F +T+ ++ +L SL +Q+ ++ Y +K SLSNWG | |
| Sbjct: | 131 | ATRTLDTGIRCFAWVKCLIYLNLFNALTKQEESLILASLEKQLQFLHANYLDKYSLSNWG | 190 |
| Query: | 185 | ILQTTAILACLYYYEDELNLPEIQSFAEEELLLQIKLQILDDGSQYEQSIMYHVEVLKSL | 244 |
| | | ILQTTAIL Y+ +L++ +FA +EL QI LQIL+DGSQ+EQS MYHVEVLK+L | |
| Sbjct: | 191 | ILQTTAILLADAYFGSDLDIAAATAFARKELTQQIALQILEDGSQFEQSTMYHVEVLKAL | 250 |
| Query: | 245 | MELVILAPKYYLPLEETIEKMVTYLIAMTGPDYCQLAIGDSDVTDTRDILTLATLVLKSS | 304 |
| | | +EL L P Y L T+ M YL+ MTGPD+ Q+ +GDSDVTDTRDILTLA +L+ | |
| Sbjct: | 251 | LELTALVPDYLPQLRPTLLAMSDYLLKMTGPDHKQIPLGDSDVTDTRDILTLAATILEEP | 310 |
| Query: | 305 | KTKSFSFDNVNLETLLLFGKPSIYLFEEIPRATIGESAYLFPDSGHVCLRDDRRYIFFKN | 364 |
| | | K+ +F +++++LLL G+ ++ FE++P T+ A+ F SGH+ + + Y+FFKN | |
| Sbjct: | 311 | HLKAAAFPTLDIDSLLLLGEKGVHTFEQLPVQTLPTFAHHFEHSGHITINQENYYLFFKN | 370 |
| Query: | 365 | GPFGSAHTHSDNNSVCLYDKKKPIFIDAGRYTYKEEQLRYDFKRSTSHSTCTLDGQPLEM | 424 |
| | | GP GS+HTHSD NS+CLY K +P+F DAGRYTYKEE LRY K ++ HST L+ Q E | |
| Sbjct: | 371 | GPIGSSHTHSDQNSLCLYYKGQPLFCDAGRYTYKEEPLRYALKSASHHSTAFLEEQLPEQ | 430 |
| Query: | 425 | IKDSWTYNSYPKCDYCQLTSKDRYHLVEGQLHVQRAS-DIYYHKRWLLTLPQAITLVIDK | 483 |
| | | I SW Y SYPK +YC L + +EG Q + + Y H R +L LP I L+ID | |
| Sbjct: | 431 | IDSSWAYLSYPKSNYCHLRQNGHVYFIEGSYQTQFSDRNNYQHDRQILILPPGIFLIIDT | 490 |
| Query: | 484 | VSCPGEHVLTNQYILDDQVIYENGFVNDLKLVSPTTFNLEDCLISKRYNQLTESHKLVKK | 543 |
| | | + G H L +Q+ILD+ + + ++DL+L+S F +E+ ++SK+YNQ SHKL+K+ | |
| Sbjct: | 491 | IQAQGNHCLVSQFILDNHLDVKTDHLSDLRLISDCPFTIEETILSKKYNQYLTSHKLIKR | 550 |
| Query: | 544 | IKFVDEVMDYTLIVDRNCQVKYVPLVQTNSHKELSNSIAFDIRSQDFHYLIGVLMDDIIF | 603 |
| | | F D+ TL+V + +V + +QT + ++++ ++ + F Y I VL +D+I | |
| Sbjct: | 551 | KPFKDKGCTSTLLVPDDTKVTPLTPLQTGKRNPIETALSWHLKGKQFDYSICVLQEDLIK | 610 |
| Query: | 604 | GDKLYLMQGIKCKGKVIVYDKNNGKMSRLKN | 634 |
| | | G+KL L+ K +GKV+V + ++ RLK+ | |
| Sbjct: | 611 | GEKLVLLNSHKIRGKVVVINHITNEIIRLKH | 641 |

[4407] Based on this analysis, it was predicted that these proteins and their epitopes could be useful antigens for vaccines or diagnostics.

### EXAMPLE 769

[4408] A DNA sequence (GBSx0817) was identified in S. agalactiae <SEQ ID 2363> which encodes the amino acid sequence <SEQ ID 2364>. This protein is predicted to be RegR (kdgR). Analysis of this protein sequence reveals the following:

Possible site: 57
>>> Seems to have no N-terminal signal sequence
----- Final Results -----
bacterial cytoplasm --- Certainty = 0.2545 (Affirmative) < succ>
bacterial membrane --- Certainty = 0.0000 (Not Clear) < succ>
bacterial outside --- Certainty = 0.0000 (Not Clear) < succ>

[4409] The protein has homology with the following sequences in the GENPEPT database.

| >GP: CAB01925 GB: Z79691 RegR [Streptococcus pneumoniae] | | | |
|---|---|---|---|
| Identities = 222/333 (66%), Positives = 279/333 (83%) | | | |
| Query: | 1 | MSKKMTINDIAQLSKTSKTTVSFFLNQKFEKMSDETRQRIQEVIDETGYRPSTIARSLNS | 60 |
| | | M KK+TI DIA++++TSKTTVSF+LN K+EKMS ETR++I++VI ET Y+PS +ARSLNS | |
| Sbjct: | 1 | MEKKLTIKDIAEMAQTSKTTVSFYLNGKYEKMSQETREKIEKVIHETNYKPSIVARSLNS | 60 |
| Query: | 61 | KKTKLLGVLIGDITNTFSNQIVKGIEHITKQKGYQIIVGNSNYDAKSEEDYIENMLNLGV | 120 |
| | | K+TKL+GVLIGDITN+FSNQIVKGIE I Q GYQ+++GNSNY +SE+ YIE+ML LGV | |
| Sbjct: | 61 | KRTKLIGVLIGDITNSFSNQIVKGIEDIASQNGYQVMIGNSNYSQESEDRYIESMLLLGV | 120 |
| Query: | 121 | DGFIIQPTSNFRKYSRILKEKKKPMVFFDSQLYEHKTSWVKANNYDAVYDMTQECLNRGY | 180 |
| | | DGFIIQPTSNFRKYSRI+ EKKK MVFFDSQLYEH+TSWVK NNYDAVYDMTQ C+ +GY | |
| Sbjct: | 121 | DGFIIQPTSNFRKYSRIIDEKKKKMVFFDSQLYEHRTSWVKTNNYDAVYDMTQSCIEKGY | 180 |
| Query: | 181 | KKFIMITADTSLLSTRIERASGFMDALKDNGFGYDTLVIEDDDHSKSDIEDFLKAVVPDK | 240 |
| | | + F++ITADTS LSTRIERASGF+DAL D + +L IED + I++FL+ + | |
| Sbjct: | 181 | EYFLLITADTSRLSTRIERASGFVDALTDANMRHASLTIEDKHTNLEQIKEFLQKEIDPD | 240 |
| Query: | 241 | EETLVFAPNCWALPMVFTAMKNLNFDMPRVGLVGFDNIEWTDFSSPKVSTIVQPAYEEGE | 300 |
| | | E+TLVF PNCWALP+VFT +K LN+++P+VGL+GFDN EWT FSSP VST+VQP++EEG+ | |
| Sbjct: | 241 | EKTLVFIPNCWALPLVFTVIKELNYNLPQVGLIGFDNTEWTCFSSPSVSTLVQPSFEEGQ | 300 |
| Query: | 301 | QVAQILINRIEGDDSVDNQQIVDCQMFWKESTF | 333 |
| | | Q +ILI++IEG + + QQ++DC + WKESTF | |
| Sbjct: | 301 | QATKILIDQIEGRNQEERQQVLDCSVNWKESTF | 333 |

[4410] A related DNA sequence was identified in S. pyogenes <SEQ ID 2365> which encodes the amino acid sequence <SEQ ID 2366>. Analysis of this protein sequence reveals the following:

Possible site: 45
>>> Seems to have no N-terminal signal sequence
----- Final Results -----
bacterial cytoplasm --- Certainty = 0.2928 (Affirmative) < succ>
bacterial membrane --- Certainty = 0.0000 (Not Clear) < succ>
bacterial outside --- Certainty = 0.0000 (Not Clear) < succ>

[4411] An alignment of the GAS and GBS proteins is shown below.

| Identities = 214/333 (64%), Positives = 266/333 (79%), Gaps = 2/333 (0%) | | | |
|---|---|---|---|
| Query: | 1 | MSKKMTINDIAQLSKTSKTTVSFFLNQKFEKMSDETRQRIQEVIDETGYRPSTIARSLNS | 60 |
| | | M +K+TI DIA+L+KTSKTTVSF+LN +F+KMS+ET+ RI E I T Y+PS ARSLN+ | |
| Sbjct: | 13 | MQRKVTIKDIAELAKTSKTTVSFYLNGRFDKMSEETKNRISESIKATNYKPSIAARSLNA | 72 |
| Query: | 61 | KKTKLLGVLIGDITNTFSNQIVKGIEHITKQKGYQIIVGNSNYDAKSEEDYIENMLNLGV | 120 |
| | | K TKL+GV+IGDITN+FSNQIVKGIE ++ GYQII+GNSNYD E++ IE MLNLGV | |
| Sbjct: | 73 | KSTKLIGVVIGDITNSFSNQIVKGIESKAQEFGYQIIIGNSNYDPSREDELIEKMLNLGV | 132 |
| Query: | 121 | DGFIIQPTSNFRKYSRILKEKKKPMVFFDSQLYEHKTSWVKANNYDAVYDMTQECLNRGY | 180 |
| | | DGFIIQPTSNFRKYSRI+ KKK +VFFDSQLYEH+T+WVK NNYDAVYD Q+C+++GY | |
| Sbjct: | 133 | DGFIIQPTSNFRKYSRIIDIKKKKVVFFDSQLYEHRTNWVKTNNYDAVYDTIQQCIDKGY | 192 |
| Query: | 181 | KKFIMITADTSLLSTRIERASGFMDALKDNGFGYDTLVIEDDDHSKSDIEDFLKAVVPDK | 240 |
| | | + FIMIT + +LLSTRIERASGF+D L+ N + ++I+++ S I FL+ + K | |
| Sbjct: | 193 | EHFIMITGNPNLLSTRIERASGFIDVLEANHLTHQEMIIDENQTSSEAIAQFLQGSLTKK | 252 |
| Query: | 241 | EETLVFAPNCWALPMVFTAMKNLNFDMPRVGLVGFDNIEWTDFSSPKVSTIVQPAYEEGE | 300 |
| | | +LVF PNCWALP VFTAMK+L F++P +GLVGFDNIEWT FSSP ++TI+QPAYEEGE | |
| Sbjct: | 253 | --SLVFVPNCWALPKVFTAMKSLKFNIPEIGLVGFDNIEWTKFSSPTLTTIIQPAYEEGE | 310 |
| Query: | 301 | QVAQILINRIEGDDSVDNQQIVDCQMFWKESTF | 333 |
| | | Q +ILI+ IEG QQI DCQ+ W+ESTF | |
| Sbjct: | 311 | QATKILIDDIEGHSQEAKQQIFDCQVNWQESTF | 343 |

[4412] Based on this analysis, it was predicted that these proteins and their epitopes could be useful antigens for vaccines or diagnostics.

### EXAMPLE 770

[4413] A DNA sequence (GBSx0818) was identified in S. agalactiae <SEQ ID 2367> which encodes the amino acid sequence <SEQ ID 2368>. This protein is predicted to be polypeptide defromylase (def-1). Analysis of this protein sequence reveals the following:

Possible site: 56
>>> Seems to have no N-terminal signal sequence
----- Final Results -----
bacterial cytoplasm --- Certainty = 0.2339 (Affirmative) < succ>
bacterial membrane --- Certainty = 0.0000 (Not Clear) < succ>
bacterial outside --- Certainty = 0.0000 (Not Clear) < succ>

[4414] The protein has homology with the following sequences in the GENPEPT database.

| >GP: CAC15392 GB: AJ278785 polypeptide deformylase | | | |
|---|---|---|---|
| [Streptococcus pneumoniae] | | | |
| Identities = 169/204 (82%), Positives = 192/204 (93%), Gaps = 1/204 (0%) | | | |
| Query: | 1 | MSAIDKLVKASHLIDMNDIIREGNPTLRKVAEEVTFPLSEKEEILGEKMMQFLKHSQDPI | 60 |
| | | MSAI+++ KA+HLIDMNDIIREGNPTLR +AEEVTFPLS++E ILGEKMMQFLKHSQDP+ | |
| Sbjct: | 1 | MSAIERITKAAHLIDMNDIIREGNPTLRAIAEEVTFPLSDQEIILGEKMMQFLKHSQDPV | 60 |
| Query: | 61 | MAEKLGLRGGVGLAAPQLDISKRIIAVLVPNVEDAQGNPPKEAYSLQEVMYNPKVVSHSV | 120 |
| | | MAEK+GLRGGVGLAAPQLDISKRIIAVLVPN+ + +G P+EAY L+ +MYNPK+VSHSV | |
| Sbjct: | 61 | MAEKMGLRGGVGLAAPQLDISKRIIAVLVPNIVE-EGETPQEAYDLEAIMYNPKIVSHSV | 119 |
| Query: | 121 | QDAALSDGEGCLSVDREVPGYVVRHARVTIEYFDKTGEKHRLKLKGYNSIVVQHEIDHID | 180 |
| | | QDAAL +GEGCLSVDR VPGYVVRHARVT++YFDK GEKHR+KLKGYNSIVVQHEIDHI+ | |
| Sbjct: | 120 | QDAALGEGEGCLSVDRNVPGYVVRHARVTVDYFDKDGEKHRIKLKGYNSIVVQHEIDHIN | 179 |
| Query: | 181 | GIMFYDRINEKNPFAVKEGLLILE | 204 |
| | | GIMFYDRINEK+PFAVK+GLLILE | |
| Sbjct: | 180 | GIMFYDRINEKDPFAVKDGLLILE | 203 |

[4415] A related DNA sequence was identified in S. pyogenes <SEQ ID 2369> which encodes the amino acid sequence <SEQ ID 2370>. Analysis of this protein sequence reveals the following:

Possible site: 56
>>> Seems to have no N-terminal signal sequence
----- Final Results -----
bacterial cytoplasm --- Certainty = 0.1745 (Affirmative) < succ>
bacterial membrane --- Certainty = 0.0000 (Not Clear) < succ>
bacterial outside --- Certainty = 0.0000 (Not Clear) < succ>

[4416] An alignment of the GAS and GBS proteins is shown below.

| Identities = 160/204 (78%), Positives = 186/204 (90%) | | | |
|---|---|---|---|
| Query: | 1 | MSAIDKLVKASHLIDMNDIIREGNPTLRKVAEEVTFPLSEKEEILGEKMMQFLKHSQDPI | 60 |
| | | MSA DKL+K SHLI M+DIIREGNPTLR VA+EV+ PL +++ +LGEKMMQFLKHSQDP+ | |
| Sbjct: | 1 | MSAQDKLIKPSHLITMDDIIREGNPTLRAVAKEVSLPLCDEDILLGEKMMQFLKHSQDPV | 60 |
| Query: | 61 | MAEKLGLRGGVGLAAPQLDISKRIIAVLVPNVEDAQGNPPKEAYSLQEVMYNPKVVSHSV | 120 |
| | | MAEKLGLR GVGLAAPQ+D+SKRIIAVLVPN+ D +GNPPKEAYS QEV+YNPK+VSHSV | |
| Sbjct: | 61 | MAEKLGLRAGVGLAAPQIDVSKRIIAVLVPNLPDKEGNPPKEAYSWQEVLYNPKIVSHSV | 120 |
| Query: | 121 | QDAALSDGEGCLSVDREVPGYVVRHARVTIEYFDKTGEKHRLKLKGYNSIVVQHEIDHID | 180 |
| | | QDAALSDGEGCLSVDR V GYVVRHARVT++Y+DK G++HR+KLKGYN+IVVQHEIDHI+ | |
| Sbjct: | 121 | QDAALSDGEGCLSVDRVVEGYVVRHARVTVDYYDKEGQQHRIKLKGYNAIVVQHEIDHIN | 180 |
| Query: | 181 | GIMFYDRINEKNPFAVKEGLLILE | 204 |
| | | G++FYDRIN KNPF KE LLIL+ | |
| Sbjct: | 181 | GVLFYDRINAKNPFETKEELLILD | 204 |

[4417] Based on this analysis, it was predicted that these proteins and their epitopes could be useful antigens for vaccines or diagnostics.

### EXAMPLE 771

[4418] A DNA sequence (GBSx0819) was identified in S. agalactiae <SEQ ID 2371> which encodes the amino acid sequence <SEQ ID 2372>. Analysis of this protein sequence reveals the following:

Possible site: 46
>>> Seems to have no N-terminal signal sequence
----- Final Results -----
bacterial cytoplasm --- Certainty = 0.3620 (Affirmative) < succ>
bacterial membrane --- Certainty = 0.0000 (Not Clear) < succ>
bacterial outside --- Certainty = 0.0000 (Not Clear) < succ>

[4419] A related GBS nucleic acid sequence <SEQ ID 10177> which encodes amino acid sequence <SEQ ID 10178> was also identified.

[4420] The protein has homology with the following sequences in the GENPEPT database.

| >GP: AAC75224 GB: AE000305 putative transcriptional regulator | | | |
|---|---|---|---|
| [Escherichia coli K12] | | | |
| Identities = 58/191 (30%), Positives = 98/191 (50%) | | | |
| Query: | 37 | DLQVITLTAGQSVCKQGEQLEYLHYIVKGRFKIVRRLFNGKEHILDIKTKPTLIGDIELL | 96 |
| | | D ++ A + ++G+Q +L Y+ +GR ++ L NG+ ++D P IG+IEL+ | |
| Sbjct: | 17 | DTRLFHFLARDYIVQEGQQPSWLFYLTRGRARLYATLANGRVSLIDFFAAPCFIGEIELI | 76 |
| Query: | 97 | TNRQIVSSVIALEDLTVIQLSLKGRKEKLLTDATFLLKLSQELAQAFHDQNIKASTNLGY | 156 |
| | | +V A+E+ + L +K + LL D FL KL L+ + + + N + | |
| Sbjct: | 77 | DKDHEPRAVQAIEECWCLALPMKHYRPLLLNDTLFLRKLCVTLSHKNYRNIVSLTQNQSF | 136 |
| Query: | 157 | TVKELLASHILAIEEQGYFQLELSSLADSFGVSYRHLLRVIHDMVKEGLIQKEKPKYFIK | 216 |
| | | + LA+ IL +E + + + A+ GVSYRHLL V+ + +GL+ K K Y IK | |
| Sbjct: | 137 | PLVNRLAAFILLSQEGDLYHEKHTQAAEYLGVSYRHLLYVLAQFIHDGLLIKSKKGYLIK | 196 |
| Query: | 217 | NRFALESLNIQ | 227 |
| | | NR L L ++ | |
| Sbjct: | 197 | NRKQLSGLALE | 207 |

[4421] A related DNA sequence was identified in S. pyogenes <SEQ ID 2373> which encodes the amino acid sequence <SEQ ID 2374>. Analysis of this protein sequence reveals the following:

Possible site: 27
>>> Seems to have no N-terminal signal sequence
----- Final Results -----
bacterial cytoplasm --- Certainty = 0.3809 (Affirmative) < succ>
bacterial membrane --- Certainty = 0.0000 (Not Clear) < succ>
bacterial outside --- Certainty = 0.0000 (Not Clear) < succ>

[4422] An alignment of the GAS and GBS proteins is shown below.

| Identities = 23/63 (36%), Positives = 35/63 (55%), Gaps = 1/63 (1%) | | | |
|---|---|---|---|
| Query: | 146 | QNIKASTNLGYTVKELLASHILAIEEQGYFQLELSSLADSFGVSYRHLLRVIHDMVKEGL | 205 |
| | | QN+ N+ YTVKE AS+ L + L L+ LA+ FG S RHL V+ + + + | |
| Sbjct: | 3 | QNV-CQQNITYTVKERFASYTLEAQANQEVHLNLTLLANRFGTSDRHLKHVLKQPIFQRI | 61 |
| Query: | 206 | IQK | 208 |
| | | I++ | |
| Sbjct: | 62 | IER | 64 |

[4423] Based on this analysis, it was predicted that these proteins and their epitopes could be useful antigens for vaccines or diagnostics.

### EXAMPLE 772

[4424] A DNA sequence (GBSx0820) was identified in S. agalactiae <SEQ ID 2375> which encodes the amino acid sequence <SEQ ID 2376>. Analysis of this protein sequence reveals the following:

| Possible site: 54 | | | |
|---|---|---|---|
| >>> Seems to have a cleavable N-term signal seq. | | | |
| INTEGRAL | Likelihood = −9.24 | Transmembrane | 163-179 (159-185) |
| INTEGRAL | Likelihood = −8.49 | Transmembrane | 204-220 (201-226) |
| INTEGRAL | Likelihood = −7.80 | Transmembrane | 272-288 (269-296) |
| INTEGRAL | Likelihood = −6.00 | Transmembrane | 333-349 (331-352) |
| INTEGRAL | Likelihood = −5.41 | Transmembrane | 75-91 (73-92) |
| INTEGRAL | Likelihood = −4.94 | Transmernbrane | 245-261 (240-262) |
| INTEGRAL | Likelihood = −4.41 | Transmernbrane | 362-378 (359-380) |
| INTEGRAL | Likelihood = −4.14 | Transmembrane | 96-112 (95-113) |
| INTEGRAL | Likelihood = −2.44 | Transmembrane | 141-157 (141-158) |
| INTEGRAL | Likelihood = −1.81 | Transmembrane | 302-318 (301-320) |

----- Final Results -----
bacterial membrane --- Certainty = 0.4694 (Affirmative) < succ>
bacterial outside --- Certainty = 0.0000 (Not Clear) < succ>
bacterial cytoplasm --- Certainty = 0.0000 (Not Clear) < succ>

[4425] A related GBS nucleic acid sequence <SEQ ID 8659> which encodes amino acid sequence <SEQ ID 8660> was also identified. Analysis of this protein sequence reveals the following:

| Lipop: Possible site: −1 Crend: 7 | | | |
|---|---|---|---|
| McG: Discrim Score: −3.52 | | | |
| GvH: Signal Score (−7.5): 0.340001 | | | |
| Possible site: 25 | | | |
| >>> Seems to have no N-terminal signal sequence | | | |
| ALOM program | count: 11 | value: −9.24 | threshold: 0.0 |

| | | | |
|---|---|---|---|
| INTEGRAL | Likelihood = −9.24 | Transmembrane | 134-150 (130-156) |
| INTEGRAL | Likelihood = −8.60 | Transmembrane | 17-33 (13-37) |
| INTEGRAL | Likelihood = −8.49 | Transmembrane | 175-191 (172-197) |
| INTEGRAL | Likelihood = −7.80 | Transmembrane | 243-259 (240-267) |
| INTEGRAL | Likelihood = −6.00 | Transmembrane | 304-320 (302-323) |
| INTEGRAL | Likelihood = −5.41 | Transmembrane | 46-62 (44-63) |
| INTEGRAL | Likelihood = −4.94 | Transmembrane | 216-232 (211-233) |
| INTEGRAL | Likelihood = −4.41 | Transmembrane | 333-349 (330-351) |
| INTEGRAL | Likelihood = −4.14 | Transmembrane | 67-83 (66-84) |
| INTEGRAL | Likelihood = −2.44 | Transmembrane | 112-128 (112-129) |
| INTEGRAL | Likelihood = −1.81 | Transmembrane | 273-289 (272-291) |

| | | |
|---|---|---|
| PERIPHERAL | Likelihood = 3.45 | 193 |

modified ALOM score: 2.35
*** Reasoning Step: 3
----- Final Results -----
bacterial membrane --- Certainty = 0.4694 (Affirmative) < succ>
bacterial outside --- Certainty = 0.0000 (Not Clear) < succ>
bacterial cytoplasm --- Certainty = 0.0000 (Not Clear) < succ>

[4426] The protein has homology with the following sequences in the GENPEPT database.

| >GP: CAB50057 GB: AJ248286 TRANSPORT PROTEIN, permease [Pyrococcus abyssi] | | | |
|---|---|---|---|
| Identities = 94/382 (24%), Positives = 173/382 (44%), Gaps = 30/382 (7%) | | | |
| Query: | 5 | MEKLSLLSL-SLILLSTFSTSPALPQMISYY-RDKGLPSPQVELLFSIPSMAIIFILLIT | 62 |
| | | MEKL +L L SL + +S A+P + +D G+ + ++ LL + + I + | |
| Sbjct: | 1 | MEKLIILILISLGWIFNYSHRMAVPSLAPIIMKDLGINNAEIGLLMTSLLLPYSLIQVPA | 60 |
| Query: | 63 | PWLSKKLSEKHMIIFGLLLTALGGGLPVVSQNYLLVFVSRLLLGSGIGFINTRAISVISE | 122 |
| | | ++ K+ K ++ +L +L L V++++Y + R L G G A ++ISE | |
| Sbjct: | 61 | GYIGDKIGRKKLLTISILGYSLSSALIVLTRDYWDLVTVRALYGFFAGLYYAPATALISE | 120 |
| Query: | 123 | YYQGKERRKLLGLRGSFEVLGNA---GLTAL--VGLLLTFGWSKSFMIYFLALPILVLYL | 177 |
| | | ++ ++ L F ++G A G+T L V + LT W +F++ + I+ + L | |
| Sbjct: | 121 | LFRERKGSAL-----GFFMVGPAIGSGITPLIVVPVALTLSWRYAFLVLSIMSSIVGILL | 175 |
| Query: | 178 | VFAPKKVVKDTNDKIKTKGQKIPKADLTYIVALAILAGFVITINTGINLRIPLLVVEFGL | 237 |
| | | + A K + IK +G K ++++LA G + + LV G+ | |
| Sbjct: | 176 | MVAIK------GEPIKVEGVKFKIPRGVFLLSLANFLGLGAFFAM-LTFLVSYLVSR-GV | 227 |
| Query: | 238 | GTPAQASLVLSAMMLMGIIAGMSFGQLIAMFHKQLIPICLVLFS-LTLLGVGLPSNLNVL | 296 |
| | | G +ASL+ S + L+GI+ + G L K + + L S LT L + +PS L ++ | |
| Sbjct: | 228 | GME-KASLMFSMLSLVGILGSIIAGFLYDHLGKVSVLLAYALNSLLTFLVIVIPSPLFLI | 286 |
| Query: | 297 | TISAMASGFLYSL--MVTAVFSLVADRVEYSLVGSATTLVLVF-CNIGGASAAILLSCFD | 353 |
| | | + + LYS+ ++TA S A R +V +V F IG L+ | |
| Sbjct: | 287 | PLGLV----LYSVGGIMTAYTSEKASRENLGVVMGFVNMVGFFGATIGPYIVGFLIDRLG | 342 |
| Query: | 354 | HLLGQINAVFYVYAILSLAVGM | 375 |
| | | + L + +V Y + ++ +G+ | |
| Sbjct: | 343 | YSLALL-SVPLAYLVSAVIIGL | 363 |

[4427] There is also homology to SEQ ID 2378.

[4428] Based on this analysis, it was predicted that these proteins and their epitopes could be useful antigens for vaccines or diagnostics.

### EXAMPLE 773

[4429] A DNA sequence (GBSx0821) was identified in S. agalactiae <SEQ ID 2379> which encodes the amino acid sequence <SEQ ID 2380>. Analysis of this protein sequence reveals the following:

| Possible site: 23 | | | |
|---|---|---|---|
| >>> Seems to have no N-terminal signal sequence | | | |
| INTEGRAL | Likelihood = −1.38 | Transmembrane | 171-187 (171-187) |

----- Final Results -----
bacterial membrane --- Certainty = 0.1553 (Affirmative) < succ>
bacterial outside --- Certainty = 0.0000 (Not Clear) < succ>
bacterial cytoplasm --- Certainty = 0.0000 (Not Clear) < succ>

[4430] The protein has homology with the following sequences in the GENPEPT database.

| >GP: CAB61731 GB: AL133220 putative oxidoreductase. [Streptomyces | | | |
|---|---|---|---|
| coelicolor A3(2)] | | | |
| Identities = 101/327 (30%), Positives = 169/327 (50%), Gaps = 12/327 (3%) | | | |
| Query: | 8 | WATLGTGVIANEL-AQALEARGQKLYSVANRTYDKGLEFATKYGIQKVYDHIDQVFEDPE | 66 |
| | | W L TG +A A ++ ++ +VA+RT FA ++GI + Y + + D + | |
| Sbjct: | 11 | WGILATGGMAARFTADLVDLPDAEVVAVASRTEASAKTFAERFGIPRAYGGWETLARDED | 70 |
| Query: | 67 | VDIIYISTPHNTHISFLRKALANGKHVLCEKSITLNSTELKEAIDLAETNHVVLAEAMTI | 126 |
| | | VD++Y++TPH+ H + L G++VLCEK TLN+ E E + LA N V L EAM + | |
| Sbjct: | 71 | VDVVYVATPHSAHRTAAGLCLEAGRNVLCEKPFTLNAREAAELVALARENGVFLMEAMWM | 130 |
| Query: | 127 | FHMPIYRQLKTLVDSGKLGPLKMIQMNFGSYKEYDMTNRFFSRDLAGGALLDIGVYALSC | 186 |
| | | + P+ R+LK LV G +G ++ +Q FG + +R GGALLD+GVY +S | |
| Sbjct: | 131 | YCNPLVRRLKELVADGAIGEVRSLQADFGLAGPFPAAHRLRDPAQGGGALLDLGVYPVSF | 190 |
| Query: | 187 | IRWFMSEAPHNITSQVTFAPTGVDEQVGILLTNPANEMATVSLSLHAKQPKRATIAYDKG | 246 |
| | | + + E P ++ ++ + GVD Q G LL+ + +A++ S+ P A+I +G | |
| Sbjct: | 191 | AQLLLGE-PTDVAARAVLSEEGVDLQTGALLSYGNDALASIHCSITGGTPNSASITGSEG | 249 |
| Query: | 247 | YIEL---FEYPRGQKAVITYTEDGHQDIL--EAGKTENALQYEVADMEEAV-SGKTNH-- | 298 |
| | | I++ F +P V+ T Q+ A +L++E ++ A+ +G+T | |
| Sbjct: | 250 | RIDVPNGFFFP--DHFVLHRTGRDPQEFRADPADGPRESLRHEAEEVMRALRAGETESPL | 307 |
| Query: | 299 | MYLNYTKDVMDIMTQLRQEWGFTYPEE | 325 |
| | | + L+ T VM + +R G YP E | |
| Sbjct: | 308 | VPLDGTLAVMRTLDAIRDRVGVRYPGE | 334 |

[4431] Based on this analysis, it was predicted that this protein and its epitopes, could be useful antigens for vaccines or diagnostics.

### EXAMPLE 774

[4432] A DNA sequence (GBSx0822) was identified in S. agalactiae <SEQ ID 2381> which encodes the amino acid sequence <SEQ ID 2382>. This protein is predicted to be oligopeptidase. Analysis of this protein sequence reveals the following:

Possible site: 19
>>> Seems to have no N-terminal signal sequence
----- Final Results -----
bacterial cytoplasm --- Certainty = 0.2881 (Affirmative) < succ>
bacterial membrane --- Certainty = 0.0000 (Not Clear) < succ>
bacterial outside --- Certainty = 0.0000 (Not Clear) < succ>

[4433] The protein has homology with the following sequences in the GENPEPT database.

| >GP: CAC14579 GB: AJ249396 oligopeptidase [Streptococcus thermophilus] | | | |
|---|---|---|---|
| Identities = 504/631 (79%), Positives = 563/631 (88%) | | | |
| Query: | 1 | MIKYQDDFYQAVNGEWAKTAVIPDDKPRTGGFSDLADDIEALMLSTTDKWLADENKPSDT | 60 |
| | | M + QDDFY A+NGEW KTAVIPDDKP TGGFSDLAD+IE LML TTD+WLA EN P + | |
| Sbjct: | 1 | MTRLQDDFYHAINGEWEKTAVIPDDKPCTGGFSDLADEIEDLMLETTDQWLAGENVPDNA | 60 |
| Query: | 61 | ILNHFIAFHKMTADYQKREEVGVSPVLPLIEEYKGLQSFSEFASKVAEYELEGKPNEFPF | 120 |
| | | IL +FI FH+MTADY +RE VG+ PV PLIEEYK L SFSEFASK+AEYE+ GKPNEFPF | |
| Sbjct: | 61 | ILQNFIKFHRMTADYDRREAVGIEPVKPLIEEYKKLSSFSEFASKIAEYEMSGKPNEFPF | 120 |
| Query: | 121 | GVAPDFMNAQLNVLWAEAPGIILPDTTYYSEDNEKGKELLAFWRKSQEDLLPLFGLSEQE | 180 |
| | | V+PDFMNAQLNVLWA+APGIILPDTTYY+EDNEKGKELL WR+ QE+LL +G + +E | |
| Sbjct: | 121 | SVSPDFMNAQLNVLWADAPGIILPDTTYYTEDNEKGKELLEIWREMQEELLGKYGFTAEE | 180 |
| Query: | 181 | IKDILDKVLALDAKLAQYVLSREESSEYVKLYHPYNWEDFTKLAPELPLDAIFQKILGQK | 240 |
| | | IKD+LDKV+ LDAKLA+YVLS EESSEYV+LYHPY+W DFTKLAPELPLD+IF +ILGQ | |
| Sbjct: | 181 | IKDLLDKVIDLDAKLAKYVLSHEESSEYVELYHPYDWADFTKLAPELPLDSIFTEILGQV | 240 |
| Query: | 241 | PDKVIVPEERFWTEFASDYYSESNWELLKADLILSAANAYNAYLTDDIRIKSGVYSRALS | 300 |
| | | PDKVIV EE FWTEFA++YYSE+NWELLKA L++ A ++NAYLTD++R+ SG YSRALS | |
| Sbjct: | 241 | PDKVIVSEESFWTEFAAEYYSEANWELLKAVLLIDATTSWNAYLTDELRVLSGKYSRALS | 300 |
| Query: | 301 | GTPQAMDKKKAAYYLASGPYNQALGLWYAGEKFSPEAKADVEHKIATMIDVYKSRLEKAD | 360 |
| | | GTPQAMDKKKAA+YLA GPYNQALGLWYAGEKFSPEAKADVE K+ATMIDVYKSRL+ AD | |
| Sbjct: | 301 | GTPQAMDKKKAAFYLAQGPYNQALGLWYAGEKFSPEAKADVEAKVATMIDVYKSRLQTAD | 360 |
| Query: | 361 | WLAQSTREKAIMKLNVITPHIGYPEKLPETYTKKIIDPKLSLVENATNLDKISIAYGWSK | 420 |
| | | WLA TREKAI KLNVITPHIGYPEKLPETY KKIID LSLVENA L +ISIA+ WSK | |
| Sbjct: | 361 | WLAPETREKAITKLNVITPHIGYPEKLPETYDKKIIDENLSLVENAQKLVEISIAHSWSK | 420 |
| Query: | 421 | WNKPVDRSEWHMPAHMVNAYYDPQQNQIVFPAAILQEPFYALEQSSSANYGGIGAVIAHE | 480 |
| | | WNKPVDRSEWHMPAHMVNAYYDPQQNQIVFPAAILQ PFY + QSSSANYGGIGAVIAHE | |
| Sbjct: | 421 | WNKPVDRSEWHMPAHMVNAYYDPQQNQIVFPAAILQAPFYDIAQSSSANYGGIGAVIAHE | 480 |
| Query: | 481 | ISHAFDTNGASFDEHGSLNNWWTDEDFEAFKKLTDKVVEQFDGLESYGAKVNGKLTVSEN | 540 |
| | | ISHAFDTNGASFDE+GSL NWWT++D+ AFK+ TDK+V+QF+GL+SYGAKVNGKLTVSEN | |
| Sbjct: | 481 | ISHAFDTNGASFDENGSLKNWWTEDDYAAFKERTDKIVDQFEGLDSYGAKVNGKLTVSEN | 540 |
| Query: | 541 | VADLGGVACALEAAQRESDFSARDFFINFATIWRMKARDEYMQMLASVDVHAPAQWRTNI | 600 |
| | | VADLGGVACALEAA+R+ DFS R+FFINFATIWR KAR+EYMQMLASVDVHAPA+WRTN+ | |
| Sbjct: | 541 | VADLGGVACALEAAKRDEDFSVREFFINFATIWRTKAREEYMQMLASVDVHAPAKWRTNV | 600 |
| Query: | 601 | TVTNFEEFHKEFDVKDGDNMWRPVEKRVIIW | 631 |
| | | VTNF+EFHKEFDVK+GD MWR E RVIIW | |
| Sbjct: | 601 | IVTNFDEFHKEFDVKEGDGMWPAPEDRVIIW | 631 |

[4434] Endopeptidases are often exposed antigens.

[4435] A related DNA sequence was identified in S. pyogenes <SEQ ID 2383> which encodes the amino acid sequence <SEQ ID 2384>. Analysis of this protein sequence reveals the following:

Possible site: 51
>>> Seems to have no N-terminal signal sequence
----- Final Results -----
bacterial Cytoplasm --- Certainty = 0.2622 (Affirmative) < succ>
bacterial membrane --- Certainty = 0.0000 (Not Clear) < succ>
bacterial outside --- Certainty = 0.0000 (Not Clear) < succ>

[4436] An alignment of the GAS and GBS proteins is shown below.

| Identities = 504/631 (79%), Positives = 564/631 (88%) | | | |
|---|---|---|---|
| Query: | 1 | MIKYQDDFYQAVNGEWAKTAVIPDDKPRTGGFSDLADDIEALMLSTTDKWLADENKPSDT | 60 |
| | | M YQDDFYQAVNG+WA+TAVIPDDKPRTGGFSDLAD+IEALML TTD WLA EN P D | |
| Sbjct: | 1 | MTTYQDDFYQAVNGKWAETAVIPDDKPRTGGFSDLADEIEALMLDTTDAWLAGENIPDDA | 60 |
| Query: | 61 | ILNHFIAFHKMTADYQKREEVGVSPVLPLIEEYKGLQSFSEFASKVAEYELEGKPNEFPF | 120 |
| | | IL +F+ FH++ ADY KR+EVGVSP+LPLIEEY+ L+SFSEF + +A+YEL G PNEFPF | |
| Sbjct: | 61 | ILKNFVKFHRLVADYAKRDEVGVSPILPLIEEYQSLKSFSEFVANIAKYELAGLPNEFPF | 120 |
| Query: | 121 | GVAPDFMNAQLNVLWAEAPGIILPDTTYYSEDNEKGKELLAFWRKSQEDLLPLFGLSEQE | 180 |
| | | VAPDFMNAQLNVLWAEAP I+LPDTTYY E NEK +EL WR+SQE LLP FG S +E | |
| Sbjct: | 121 | SVAPDFMNAQLNVLWAEAPSILLPDTTYYEEGNEKAEELRGIWRQSQEKLLPQFGFSTEE | 180 |
| Query: | 181 | IKDILDKVLALDAKLAQYVLSREESSEYVKLYHPYNWEDFTKLAPELPLDAIFQKILGQK | 240 |
| | | IKD+LDKV+ LD +LA+YVLSREE SEY KLYHPY W DF KLAPELPLD+IF+KILGQ | |
| Sbjct: | 181 | IKDLLDKVIELDKQLAKYVLSREEGSEYAKLYHPYVWADFKKLAPELPLDSIFEKILGQV | 240 |
| Query: | 241 | PDKVIVPEERFWTEFASDYYSESNWELLKADLILSAANAYNAYLTDDIRIKSGVYSRALS | 300 |
| | | PDKVIVPEERFWTEFA+ YYSE+NW+LLKA+LI+ AANAYNAYLTDDIR++SG YSRALS | |
| Sbjct: | 241 | PDKVIVPEERFWTEFAATYYSEANWDLLKANLIVDAANAYNAYLTDDIRVESGAYSRALS | 300 |
| Query: | 301 | GTPQAMDKKKAAYYLASGPYNQALGLWYAGEKFSPEAKADVEHKIATMIDVYKSRLEKAD | 360 |
| | | GTPQAMDK+KAA+YLA GP++QALGLWYAG+KFSPEAKADVE K+A MI+VYKSRLE AD | |
| Sbjct: | 301 | GTPQAMDKQKAAFYLAQGPFSQALGLWYAGQKFSPEAKADVESKVARMIEVYKSRLETAD | 360 |
| Query: | 361 | WLAQSTREKAIMKLNVITPHIGYPEKLPETYTKKIIDPKLSLVENATNLDKISIAYGWSK | 420 |
| | | WLA +TREKAI KLNVITPHIGYPEKLPETY KK+ID LSLVENA NL KI+IA+ WSK | |
| Sbjct: | 361 | WLAPATREKAITKLNVITPHIGYPEKLPETYAKKVIDESLSLVENAQNLAKITIAHTWSK | 420 |
| Query: | 421 | WNKPVDRSEWHMPAHMVNAYYDPQQNQIVFPAAILQEPFYALEQSSSANYGGIGAVIAHE | 480 |
| | | WNKPVDRSEWHMPAH+VNAYYD QQNQIVFPAAILQEPFY+L+QSSSANYGGIGAVIAHE | |
| Sbjct: | 421 | WNKPVDRSEWHMPAHLVNAYYDLQQNQIVFPAAILQEPFYSLDQSSSANYGGIGAVIAHE | 480 |
| Query: | 481 | ISHAFDTNGASFDEHGSLNNWWTDEDFEAFKKLTDKVVEQFDGLESYGAKVNGKLTVSEN | 540 |
| | | ISHAFDTNGASFDEHGSLN+WWT ED+ AFK+ TDK+V QFDGLES+GAKVNGKLTVSEN | |
| Sbjct: | 481 | ISHAFDTNGASFDEHGSLNDWWTQEDYAAFKERTDKIVAQFDGLESHGAKVNGKLTVSEN | 540 |
| Query: | 541 | VADLGGVACALEAAQRESDFSARDFFINFATIWRMKARDEYMQMLASVDVHAPAQWRTNI | 600 |
| | | VADLGGVACALEAAQ E DFSARDFFINFATIWRMKAR+EYMQMLAS+DVHAP + RTN+ | |
| Sbjct: | 541 | VADLGGVACALEAAQSEEDFSARDFFINFATIWRMKAREEYMQMLASIDVHAPGELRTNV | 600 |
| Query: | 601 | TVTNFEEFHKEFDVKDGDNMWRPVEKRVIIW | 631 |
| | | T+TNF+ FH+ FD+K+GD MWR + RVIIW | |
| Sbjct: | 601 | TLTNFDAFHETFDIKEGDAMWRAPKDRVIIW | 631 |

[4437] SEQ ID 2382 (GBS193) was expressed in E. coli as a His-fusion product. SDS-PAGE analysis of total cell extract is shown in FIG. 23 (lane 3; MW 73 kDa).

[4438] The GBS193-His fusion product was purified (FIG. 196, lane 5) and used to immunise mice. The resulting antiserum was used for Western blot (FIG. 253). These tests confirm that the protein is immunoaccessible on GBS bacteria.

[4439] Based on this analysis, it was predicted that these proteins and their epitopes could be useful antigens for vaccines or diagnostics.

### EXAMPLE 775

[4440] A DNA sequence (GBSx0823) was identified in S. agalactiae <SEQ ID 2385> which encodes the amino acid sequence <SEQ ID 2386>. This protein is predicted to be immunity protein (mccF-1). Analysis of this protein sequence reveals the following:

Possible site: 36
>>> Seems to have no N-terminal signal sequence
----- Final Results -----
bacterial cytoplasm --- Certainty = 0.1627 (Affirmative) < succ>
bacterial membrane --- Certainty = 0.0000 (Not Clear) < succ>
bacterial outside --- Certainty = 0.0000 (Not Clear) < succ>

[4441] A related GBS nucleic acid sequence <SEQ ID 9433> which encodes amino acid sequence <SEQ ID 9434> was also identified.

[4442] The protein has homology with the following sequences in the GENPEPT database.

| >GP: AAB84435 GB: AF027868 YocD [Bacillus subtilis] | | | |
|---|---|---|---|
| Identities = 114/270 (42%), Positives = 170/270 (62%), Gaps = 4/270 (1%) | | | |
| Query: | 1 | MSFSKHYLENDILYSASITSRVEDLHEAFADPSVDAILATIGGFNSNELLPYLDYDLISK | 60 |
| | | ++ ++H E + S+SI SRV DLH AF DP V AIL T+GGFNSN+LL YLDY+ I + | |
| Sbjct: | 43 | VTIAEHANECNEFDSSSIESRVHDLHAAFFDPGVKAILTTLGGFNSNQLLRYLDYEKIKR | 102 |
| Query: | 61 | NPKIICGYSDSTAFLNAIFAKAKIQTYMGPAYSSFKMKEGQPYQTQAWLT-AMTENHYEL | 119 |
| | | +PKI+CGYSD TA NAI+ K + TY GP +S+F MK+G Y + +L+ +++ +E+ | |
| Sbjct: | 103 | HPKILCGYSDITALCNAIYQKTGLVTYSGPHFSTFAMKKGLDYTEEYFLSCCASDDPFEI | 162 |
| Query: | 120 | WPSEEWSSDPWYDPSKPRQFFPTEWK-IYNHGKASGTIIGGNLSTFGLLRGTPYAPKIER | 178 |
| | | PS EWS D W+ + R+F+P + G A GT+IGGNL T LL+GT Y P+ E | |
| Sbjct: | 163 | HPSSEWSDDRWFLDQENRRFYPNNGPVVIQEGYAEGTLIGGNLCTLNLLQGTEYFPETEH | 222 |
| Query: | 179 | YVLLIEEAEESNFYEFDRNLAAI--LQAYPHPQAILMGRFPKECGMTPQVFEYILSKHAI | 236 |
| | | +LLIE+ S+ + FDR+L ++ L A+ H +AIL+GRF K ++ + + ++ | |
| Sbjct: | 223 | TILLIEDDYMSDIHMFDRDLQSLIHLPAFSHVKAILIGRFQKASNVSIDLVKAMIETKKE | 282 |
| Query: | 237 | FKEIPVIYDMDFAHTQPLLTVTIGAELSVD | 266 |
| | | IP+I +++ HT P+ T IG ++ | |
| Sbjct: | 283 | LSGIPIIANINAGHTSPIATFPIGGTCRIE | 312 |

[4443] A related DNA sequence was identified in S. pyogenes <SEQ ID 2387> which encodes the amino acid sequence <SEQ ID 2388>. Analysis of this protein sequence reveals the following:

Possible site: 42
>>> Seems to have no N-terminal signal sequence
----- Final Results -----
bacterial cytoplasm --- Certainty = 0.1162 (Affirmative) < succ>
bacterial membrane --- Certainty = 0.0000 (Not Clear) < succ>
bacterial outside --- Certainty = 0.0000 (Not Clear) < succ>

[4444] An alignment of the GAS and GBS proteins is shown below.

| Identities = 75/252 (29%), Positives = 125/252 (48%), Gaps = 22/252 (8%) | | | |
|---|---|---|---|
| Query: | 34 | VDAILATIGGFNSNELLPYLDYDLISKNPKIICGYSDSTAFLNAIFAKAKIQTYMGPAYS | 93 |
| | | VD I+ +IGG+NSN +L Y+DYDL + I GYSD+TA A++ K TY+ + | |
| Sbjct: | 1 | VDVIMTSIGGYNSNSVLKYIDYDLFKQKFPIFIGYSDTTALALALYKKTGCITYLSQSVI | 60 |
| Query: | 94 | SFKMKEGQP----------YQTQAWLTAMTENHYELWPSEEWSSDPWYDPSKPRQFFPTE | 143 |
| | | S E +P + Q+ + ++W ++EW + W + ++ E | |
| Sbjct: | 61 | S-NFGEFEPFNELNYFYFDFMLQSKCETLMVQIPDVW-TDEWIN--WETYERTKKTNKNE | 116 |
| Query: | 144 | WKIYNHGKASGTIIGGNLSTFGLLRGTPYAPKIERYVLLIEEAEESNFYEFDRNLA--AI | 201 |
| | | W I+N G+ +GT+IGGNL T + GT Y PKI +L+ E ++ RN A+ | |
| Sbjct: | 117 | WIIFNKGEFNGTLIGGNLDTIVGIIGTEYMPKITEDTILLLEDVYTDLGRLYRNFTTLAL | 176 |
| Query: | 202 | LQAYPHPQAILMGRFPKECGMTPQVFEYILSKHAIFKEIPVIYDMDFAHTQPLLTVTIGA | 261 |
| | | + +++ +F + G V I+++ ++IP++ + D HT P + IG | |
| Sbjct: | 177 | HGIFDKIGGLIISKF-ETIGENSDVINDIINEFVGHRKIPILLNFDCGHTHPSCLMPIGG | 235 |
| Query: | 262 | ELSVDTTTLSLS | 273 |
| | | ++ TLSLS | |
| Sbjct: | 236 | KI-----TLSLS | 242 |

[4445] Based on this analysis, it was predicted that these proteins and their epitopes could be useful antigens for vaccines or diagnostics.

### EXAMPLE 776

[4446] A DNA sequence (GBSx0824) was identified in S. agalactiae <SEQ ID 2389> which encodes the amino acid sequence <SEQ ID 2390>. Analysis of this protein sequence reveals the following:

Possible site: 15
>>> Seems to have no N-terminal signal sequence
----- Final Results -----
bacterial cytoplasm --- Certainty = 0.3112 (Affirmative) < succ>
bacterial membrane --- Certainty = 0.0000 (Not Clear) < succ>
bacterial outside --- Certainty = 0.0000 (Not Clear) < succ>

[4447] The protein has no significant homology with any sequences in the GENPEPT database.

[4448] No corresponding DNA sequence was identified in S. pyogenes.

[4449] Based on this analysis, it was predicted that this protein and its epitopes, could be useful antigens for vaccines or diagnostics.

### EXAMPLE 777

[4450] A DNA sequence (GBSx0825) was identified in S. agalactiae <SEQ ID 2391> which encodes the amino acid sequence <SEQ ID 2392>. Analysis of this protein sequence reveals the following:

Possible site: 21
>>> Seems to have no N-terminal signal sequence
----- Final Results -----
bacterial cytoplasm --- Certainty = 0.6171 (Affirmative) < succ>
bacterial membrane --- Certainty = 0.0000 (Not Clear) < succ>
bacterial outside --- Certainty = 0.0000 (Not Clear) < succ>

[4451] A related GBS nucleic acid sequence <SEQ ID 10175> which encodes amino acid sequence <SEQ ID 10176> was also identified.

[4452] The protein has no significant homology with any sequences in the GENPEPT database.

[4453] No corresponding DNA sequence was identified in S. pyogenes.

[4454] Based on this analysis, it was predicted that these proteins and their epitopes could be useful antigens for vaccines or diagnostics.

### EXAMPLE 778

[4455] A DNA sequence (GBSx0826) was identified in S. agalactiae <SEQ ID 2393> which encodes the amino acid sequence <SEQ ID 2394>. Analysis of this protein sequence reveals the following:

| Possible site: 19 | | | |
|---|---|---|---|
| >>> Seems to have an uncleavable N-term signal seq | | | |
| INTEGRAL | Likelihood = −10.19 | Transmembrane | 83-99 (80-113) |
| INTEGRAL | Likelihood = −9.71 | Transmembrane | 4-20 (1-24) |
| INTEGRAL | Likelihood = −9.45 | Transmembrane | 315-331 (307-337) |
| INTEGRAL | Likelihood = −8.33 | Transmembrane | 186-202 (180-210) |
| INTEGRAL | Likelihood = −7.75 | Transmembrane | 233-249 (227-255) |
| INTEGRAL | Likelihood = −3.98 | Transmembrane | 390-406 (382-407) |
| INTEGRAL | Likelihood = −3.61 | Transmembrane | 27-43 (27-45) |
| INTEGRAL | Likelihood = −3.29 | Transmembrane | 107-123 (105-125) |
| INTEGRAL | Likelihood = −1.75 | Transmembrane | 273-289 (273-290) |

----- Final Results -----
bacterial membrane --- Certainty = 0.5076 (Affirmative) < succ>
bacterial outside --- Certainty = 0.0000 (Not Clear) < succ>
bacterial cytoplasm --- Certainty = 0.0000 (Not Clear) < succ>

[4456] The protein has homology with the following sequences in the GENPEPT database.

| >GP: CAB15347 GB: Z99121 similar to hypothetical proteins [Bacillus | | | |
|---|---|---|---|
| subtilis] | | | |
| Identities = 174/524 (33%), Positives = 275/524 (52%), Gaps = 13/524 (2%) | | | |
| Query: | 1 | MEETILIVSFLLFLILSNVINRIFPKLPLPFIQLVFGILSGLVFHKSQVHIDPELFLAFV | 60 |
| | | M+ ++++ L + +SN++NR P +P+P IQ+ GIL+ ++ ELF | |
| Sbjct: | 1 | MDIFLVVLVLLTIIAISNIVNRFIPFIPVPLIQVALGILAASFPQGLHFELNTELFFVLF | 60 |
| Query: | 61 | IAPLNFREGQESDIGSFIKYRAIILYLILPTVFLTAIVVGYVAGHLLPVSLPLAACFALG | 120 |
| | | IAPL F +G+ + RA IL L L VF T IV GY ++P ++PLAA F L | |
| Sbjct: | 61 | IAPLLFNDGKRTPRAELWNLRAPILLLALGLVFATVIVGGYTIHWMIP-AIPLAAAFGLA | 119 |
| Query: | 121 | AALGPTDAVAFISIAKRFQFPKRAENILKLEGLLNDASGLVSFQFALTALVTGYFSLAKA | 180 |
| | | A L PTD VA +++ R + PK +L+ EGL+NDASGLV+F+FA+ A VTG FSLA+A | |
| Sbjct: | 120 | AILSPTDVVAVSALSGRVKMPKGILRLLEGEGLMNDASGLVAFKFAIAAAVTGAFSLAQA | 179 |
| Query: | 181 | SLKLALAIMGGFLIGLLFAFLMRLCLTVLEKFDAADVTGALLLELTLPFVAYFVADLLGF | 240 |
| | | ++ +GG L G++ +FL+ L + DVT +L+++ PFV Y A+ +G | |
| Sbjct: | 180 | AVSFVFISLGGLLCGVVISFLIIRFRLFLRRLGMQDVTMHMLIQILTPFVIYLAAEEIGV | 239 |
| Query: | 241 | SAIIAVVVAGVMQANRLKKVTLFDAQVDRVTSVIWETLNFILNGLVFLIFGRELTRIIGP | 300 |
| | | S I+AVV G+ A ++ ++ V+S W + FILNGLVF+I G ++ +I | |
| Sbjct: | 240 | SGILAVVAGGITHAVEQDRLESTMIKLQIVSSSTWNIILFILNGLVFVILGTQIPDVISV | 299 |
| Query: | 301 | LLTSNAYSNFDLISIVVLVTCTLFLVRFLAVSCFY--AWRSFKYHKSFKKYWREIQLLTF | 358 |
| | | + A SN +I ++++T TL L+RFL V F+ W K +K R L++ | |
| Sbjct: | 300 | IFNDTAISNMKVIGYILVITFTLMLLRFLWVLFFWNGKWFFNKDQNIYKPGLRSTLLISI | 359 |
| Query: | 359 | SGVKGSVSIATILLLPKHSVIGE--LGYSLILFTVGAVTLMSFLTGLLVLPKLAPPLQVK | 416 |
| | | SGV+G+V++A +P G +LILF V L + + +VLP L + | |
| Sbjct: | 360 | SGVRGAVTLAGSFSIPYFLEDGTPFPERNLILFLAAGVILCTLVIATVVLPILTEKEEED | 419 |
| Query: | 417 | DD-----YLIRLSILTKVLSVLEEDGKSSENQASFYAVIDNYNSRIRHLILEQ--ESSDI | 469 |
| | | ++ R ++ L ++ED + AS AVI YN ++++L +Q S+ I | |
| Sbjct: | 420 | EERNKKLLTARRKLIKTALQTIKEDMNETNKTASL-AVIAEYNEKMKNLRFQQYTSSNRI | 478 |
| Query: | 470 | KKDLAELQLMMLSIESDGLEAAYRYGNISIKEYRIYQRYLKYLE | 513 |
| | | KK +++ + E + L G+I + + Q LE | |
| Sbjct: | 479 | KKHERKVRAQGVKAEQEALMKMLERGDIPEETANVLQERFNELE | 522 |

[4457] No corresponding DNA sequence was identified in S. pyogenes.

[4458] Based on this analysis, it was predicted that this protein and its epitopes, could be useful antigens for vaccines or diagnostics.

### EXAMPLE 779

[4459] A DNA sequence (GBSx0827) was identified in S. agalactiae <SEQ ID 2395> which encodes the amino acid sequence <SEQ ID 2396>. Analysis of this protein sequence reveals the following:

Possible site: 23
>>> Seems to have no N-terminal signal sequence
----- Final Results -----
bacterial cytoplasm --- Certainty = 0.3494 (Affirmative) < succ>
bacterial membrane --- Certainty = 0.0000 (Not Clear) < succ>
bacterial outside --- Certainty = 0.0000 (Not Clear) < succ>

[4460] The protein has no significant homology with any sequences in the GENPEPT database.

[4461] No corresponding DNA sequence was identified in S. pyogenes.

[4462] Based on this analysis, it was predicted that this protein and its epitopes, could be useful antigens for vaccines or diagnostics.

### EXAMPLE 780

[4463] A DNA sequence (GBSx0828) was identified in S. agalactiae <SEQ ID 2397> which encodes the amino acid sequence <SEQ ID 2398>. This protein is predicted to be integrase (phage-relatedpr). Analysis of this protein sequence reveals the following:

Possible site: 61
>>> Seems to have no N-terminal signal sequence
----- Final Results -----
bacterial cytoplasm --- Certainty = 0.5094 (Affirmative) < succ>
bacterial membrane --- Certainty = 0.0000 (Not Clear) < succ>
bacterial outside --- Certainty = 0.0000 (Not Clear) < succ>

[4464] A related GBS nucleic acid sequence <SEQ ID 10173> which encodes amino acid sequence <SEQ ID 10174> was also identified.

[4465] The protein has homology with the following sequences in the GENPEPT database.

| >GP: AAF12706 GB: AF066865 integrase [bacteriophage TPW22] | | | |
|---|---|---|---|
| Identities = 171/353 (48%), Positives = 253/353 (71%), Gaps = 1/353 (0%) | | | |
| Query: | 21 | MASYRKRENGLWEYRISYKTIDGKYKRKEKGGFKTKKLAQAAAIEIEKKLTQNILTNDEV | 80 |
| | | MA++RKR W++R+SYK +G+YK+ EKGG+KTKK A+AAA E +K+L + ++++ | |
| Sbjct: | 1 | MANFRKRGK-TWQFRLSYKDNNGEYKKFEKGGYKTKKEAEAAADEAKKRLNNHSEFDNDI | 59 |
| Query: | 81 | TLYDFVKTWSEVYKRPYVKDKTWETYSKNFKHIKNYFQELKVKDITPLYYQKKLNEFGEK | 140 |
| | | +LYDF + W++VYK+P+V + TW TY + I Y ++ + +ITP +YQ LN+ | |
| Sbjct: | 60 | SLYDFFEKWAKVYKKPHVTEATWRTYKRTLNLIDKYIKDKPIAEITPTFYQAVLNKMSLL | 119 |
| Query: | 141 | YAQETLEKFHYQIKGAMKVAVREQVVTFNFAEGAKVKSQVEPKNEEEDFLEEREYKALLA | 200 |
| | | Y QE+L+KF++QIK AMK+AV E+V++ NFA+ K KS++ + EE +L EY LLA | |
| Sbjct: | 120 | YRQESLDKFYFQIKSAMKIAVHEKVISENFADFTKAKSKLAARPVEEKYLHADEYLKLLA | 179 |
| Query: | 201 | LTRENIQYVSYFTLYLLAVTGLRFSEAMGLTWSDIDFKNGILDINKSFDYSNTQDFADLK | 260 |
| | | + E ++Y SYF YL AVTG+RF+E +GLTWS +DF + I +++DYS T +FA+ K | |
| Sbjct: | 180 | IAEEKMEYTSYFACYLTAVTGMRFAELLGLTWSHVDFDKKEISIQRTWDYSITNNFAETK | 239 |
| Query: | 261 | NESSKRKVPIDSNTIDILREYKKNHWQANIKNRVCFGVSNSACNKLIKKIVGRKVRNHSL | 320 |
| | | NESSKRK+PI S TI +L++YKK +W N +RV + +SN+ NK IK I GRKV HSL | |
| Sbjct: | 240 | NESSKRKIPISSKTIKLLKKYKKEYWHENKYDRVIYNLSNNGLNKTIKVIAGRKVHPHSL | 299 |
| Query: | 321 | RHTYASFLILNGVDIVTISKLLGHESPDITLKVYTHQMEALAERNFEKIKNIF | 373 |
| | | RH++AS+LI G+D++T+SKLLGHE+ ++TLKVY HQ++ + + N + I+ IF | |
| Sbjct: | 300 | RHSFASYLIYKGIDLLTVSKLLGHENLNVTLKVYAHQLKEMEQENNDVIRKIF | 352 |

[4466] There is also homology to SEQ ID 578.

[4467] Based on this analysis, it was predicted that these proteins and their epitopes could be useful antigens for vaccines or diagnostics.

### EXAMPLE 781

[4468] A DNA sequence (GBSx0829) was identified in S. agalactiae <SEQ ID 2399> which encodes the amino acid sequence <SEQ ID 2400>. Analysis of this protein sequence reveals the following:

Possible site: 56
>>> Seems to have no N-terminal signal sequence
----- Final Results -----
bacterial cytoplasm --- Certainty = 0.3377 (Affirmative) < succ>
bacterial membrane --- Certainty = 0.0000 (Not Clear) < succ>
bacterial outside --- Certainty = 0.0000 (Not Clear) < succ>

[4469] The protein has no significant homology with any sequences in the GENPEPT database.

[4470] No corresponding DNA sequence was identified in S. pyogenes.

[4471] Based on this analysis, it was predicted that this protein and its epitopes, could be useful antigens for vaccines or diagnostics.

### EXAMPLE 782

[4472] A DNA sequence (GBSx0830) was identified in S. agalactiae <SEQ ID 2401> which encodes the amino acid sequence <SEQ ID 2402>. This protein is predicted to be homology to cl-like repressor. Analysis of this protein sequence reveals the following:

Possible site: 28
>>> Seems to have no N-terminal signal sequence
----- Final Results -----
bacterial cytoplasm --- Certainty = 0.0827 (Affirmative) < succ>
bacterial membrane --- Certainty = 0.0000 (Not Clear) < succ>
bacterial outside --- Certainty = 0.0000 (Not Clear) < succ>

[4473] The protein has homology with the following sequences in the GENPEPT database.

| >GP: AAD44097 GB: AF115103 orf122 gp [Streptococcus thermophilus | | | |
|---|---|---|---|
| bacteriophage Sfi21] | | | |
| Identities = 57/125 (45%), Positives = 77/125 (61%), Gaps = 5/125 (4%) | | | |
| Query: | 3 | MKLDQLCKEFGVELCLFDASDWHSSGFYNPITKVLGVDVNLSEQEQKQVALHELQHKNHF | 62 |
| | | M +L ++FGV LC F +S W GF +P+ +V+ ++ +L + + +V LHEL H H | |
| Sbjct: | 1 | MNESELLEQFGVSLCEFSSSQWTRDGFLDPVNRVVYINRDLPTERRLKVLLHELGHLEHD | 60 |
| Query: | 63 | PYQYQLFRERCELDANRNMIHHLLKEELEIAEDHTQFNYLVFMEKYKLKTIADEAMIKEE | 122 |
| | | P QY+ RE+ E ANRNMIH LLK E+ FNY+ FMEKY L TI DE +K E | |
| Sbjct: | 61 | PKQYERLREKYEAQANRNMIHELLKN-----ENLDNFNYVHFMEKYNLTTICDETFVKNE | 115 |
| Query: | 123 | YLNLV | 127 |
| | | YL L+ | |
| Sbjct: | 116 | YLKLI | 120 |

[4474] No corresponding DNA sequence was identified in S. pyogenes.

[4475] Based on this analysis, it was predicted that this protein and its epitopes, could be useful antigens for vaccines or diagnostics.

### EXAMPLE 783

[4476] A DNA sequence (GBSx0831) was identified in S. agalactiae <SEQ ID 2403> which encodes the amino acid sequence <SEQ ID 2404>. This protein is predicted to be EpsR protein. Analysis of this protein sequence reveals the following:

Possible site: 37
>>> Seems to have no N-terminal signal sequence
----- Final Results -----
bacterial cytoplasm --- Certainty = 0.4692 (Affirmative) < succ>
bacterial membrane --- Certainty = 0.0000 (Not Clear) < succ>
bacterial outside --- Certainty = 0.0000 (Not Clear) < succ>

[4477] The protein has homology with the following sequences in the GENPEPT database.

| >GP: AAF12710 GB: AF066865 repressor protein [bacteriophage TPW22] | | | |
|---|---|---|---|
| Identities = 36/101 (35%), Positives = 62/101 (60%), Gaps = 7/101 (6%) | | | |
| Query: | 4 | LIDRIRELSNKKGMSLNDLEDTLGYSRNSLYSLNE-NSKMGKPKEIAQYFNVSLDYLLGL | 62 |
| | | L ++I+EL+++K +S+ +E+ LG++ ++ + N + K K++A+YFNVS+D+LLGL | |
| Sbjct: | 3 | LYEKIKELASQKNVSIRQVEEKLGFANGTIRQWGKKNPGINKVKDVAKYFNVSVDFLLGL | 62 |
| Query: | 63 | TDNPRIAS--DETAIIDGQVVDLREAAAHTMLFDGKPLDED | 101 |
| | | DN R D +D V+ E + FDGKPL ++ | |
| Sbjct: | 63 | DDNQRKKEPVDLADFVDDNKVNWDEWVS----FDGKPLSDE | 99 |

[4478] Based on this analysis, it was predicted that this protein and its epitopes, could be useful antigens for vaccines or diagnostics.

### EXAMPLE 784

[4479] A DNA sequence (GBSx0832) was identified in S. agalactiae <SEQ ID 2405> which encodes the amino acid sequence <SEQ ID 2406>. Analysis of this protein sequence reveals the following:

Possible site: 43
>>> Seems to have no N-terminal signal sequence
----- Final Results -----
bacterial cytoplasm --- Certainty = 0.4079 (Affirmative) < succ>
bacterial membrane --- Certainty = 0.0000 (Not Clear) < succ>
bacterial outside --- Certainty = 0.0000 (Not Clear) < succ>

[4480] The protein has no significant homology with any sequences in the GENPEPT database.

[4481] No corresponding DNA sequence was identified in S. pyogenes.

[4482] Based on this analysis, it was predicted that this protein and its epitopes, could be useful antigens for vaccines or diagnostics.

### EXAMPLE 785

[4483] A DNA sequence (GBSx0833) was identified in S. agalactiae <SEQ ID 2407> which encodes the amino acid sequence <SEQ ID 2408>. Analysis of this protein sequence reveals the following:

Possible site: 52
>>> Seems to have no N-terminal signal sequence
----- Final Results -----
bacterial cytoplasm --- Certainty = 0.2942 (Affirmative) < succ>
bacterial membrane --- Certainty = 0.0000 (Not Clear) < succ>
bacterial outside --- Certainty = 0.0000 (Not Clear) < succ>

[4484] A related GBS nucleic acid sequence <SEQ ID 10171> which encodes amino acid sequence <SEQ ID 10172> was also identified.

[4485] The protein has no significant homology with any sequences in the GENPEPT database.

[4486] No corresponding DNA sequence was identified in S. pyogenes.

[4487] Based on this analysis, it was predicted that these proteins and their epitopes could be useful antigens for vaccines or diagnostics.

### EXAMPLE 786

[4488] A DNA sequence (GBSx0834) was identified in S. agalactiae <SEQ ID 2409> which encodes the amino acid sequence <SEQ ID 2410>. This protein is predicted to be a replication initiation protein Rep (RC). Analysis of this protein sequence reveals the following:

Possible site: 54
>>> Seems to have no N-terminal signal sequence
----- Final Results -----
bacterial cytoplasm --- Certainty = 0.3335 (Affirmative) < succ>
bacterial membrane --- Certainty = 0.0000 (Not Clear) < succ>
bacterial outside --- Certainty = 0.0000 (Not Clear) < succ>

[4489] The protein has no significant homology with any sequences in the GENPEPT database.

[4490] No corresponding DNA sequence was identified in S. pyogenes.

[4491] Based on this analysis, it was predicted that this protein and its epitopes, could be useful antigens for vaccines or diagnostics.

### EXAMPLE 787

[4492] A DNA sequence (GBSx0835) was identified in S. agalactiae <SEQ ID 2411> which encodes the amino acid sequence <SEQ ID 2412>. This protein is predicted to be antirepressor. Analysis of this protein sequence reveals the following:

Possible site: 40
>>> Seems to have no N-terminal signal sequence
----- Final Results -----
bacterial cytoplasm --- Certainty = 0.3380 (Affirmative) < succ>
bacterial membrane --- Certainty = 0.0000 (Not Clear) < succ>
bacterial outside --- Certainty = 0.0000 (Not Clear) < succ>

[4493] The protein has homology with the following sequences in the GENPEPT database.

| >GP: BAA97816 GB: AB044554 antirepressor [Staphylococcus aureus | | | |
|---|---|---|---|
| prophage phiPV83] | | | |
| Identities = 70/153 (45%), Positives = 93/153 (60%), Gaps = 15/153 (9%) | | | |
| Query: | 3 | EIFVFHGQEVRTVTINNEPWFVGKDVADILGYSKSRNAIALHVDEDDALKQGITDNLGRM | 62 |
| | | + F F VRTV I NEP+FVGKD+A+ILGY+++ NAI HVD +D L + + G+ | |
| Sbjct: | 5 | QTFNFKELPVRTVEIENEPYFVGKDIAEILGYARTDNAIRNHVDSEDKLTHQFSAS-GQN | 63 |
| Query: | 63 | QETIIINESGLYSLIL----SSKLPQVKE----FKRWVTSEVLPQIRQQGAYVPENLSDE | 114 |
| | | + IIINESGLYSLI SK +++E FKRWVTS+VLP IR+ G Y +N+ ++ | |
| Sbjct: | 64 | RNMIIINESGLYSLIFDASKQSKNEKIRETARKFKRWVTSDVLPAIRKHGIYATDNVIEQ | 123 |
| Query: | 115 | A------FIALFTGQKKLKEHQLALAQDVDYLK | 141 |
| | | I + T KK KE L L Q V+ K | |
| Sbjct: | 124 | TLKDPDYIITVLTEYKKEKEQNLVLQQQVEVNK | 156 |

[4494] A related DNA sequence was identified in S. pyogenes <SEQ ID 2413> which encodes the amino acid sequence <SEQ ID 2414>. Analysis of this protein sequence reveals the following:

Possible site: 17
>>> Seems to have no N-terminal signal sequence
----- Final Results -----
bacterial cytoplasm --- Certainty = 0.4609 (Affirmative) < succ>
bacterial membrane --- Certainty = 0.0000 (Not Clear) < succ>
bacterial outside --- Certainty = 0.0000 (Not Clear) < succ>

[4495] An alignment of the GAS and GBS proteins is shown below.

| Identities = 54/142 (38%), Positives = 73/142 (51%), Gaps = 7/142 (4%) | | | |
|---|---|---|---|
| Query: | 11 | EVRTVTINNEPWFVGKDVADILGYSKSRNAIALHVDEDDALKQGITDNLGRMQETIIINE | 70 |
| | | EVRT TINN+ +F D IL S R I +++D I D+LGR Q+ INE | |
| Sbjct: | 13 | EVRTATINNQIYFNLNDCCQILELSNPRKTIE-RLNKDGVTTSDIIDSLGRTQQANFINE | 71 |
| Query: | 71 | SGLYSLILSSKLPQVKEFKRWVTSEVLPQIRQQGAYVPENLSDEA------FIALFTGQK | 124 |
| | | S Y L+ S+ P+ ++F WVTSEVLP IR+ GAY+ E ++A I L K | |
| Sbjct: | 72 | SNFYKLVFQSRKPEAEKFADWVTSEVLPSIRKHGAYMTEQTLEQALTSPDFLIRLANELK | 131 |
| Query: | 125 | KLKEHQLALAQDVDYLKNEQPI | 146 |
| | | + KE L + L E + | |
| Sbjct: | 132 | EEKERSRQLEAEKSILSVENMV | 153 |

[4496] Based on this analysis, it was predicted that these proteins and their epitopes could be useful antigens for vaccines or diagnostics.

### EXAMPLE 788

[4497] A DNA sequence (GBSx0836) was identified in S. agalactiae <SEQ ID 2415> which encodes the amino acid sequence <SEQ ID 2416>. This protein is predicted to be e11. Analysis of this protein sequence reveals the following:

Possible site: 58
>>> Seems to have no N-terminal signal sequence
----- Final Results -----
bacterial cytoplasm --- Certainty = 0.3281 (Affirmative) < succ>
bacterial membrane --- Certainty = 0.0000 (Not Clear) < succ>
bacterial outside --- Certainty = 0.0000 (Not Clear) < succ>

[4498] The protein has homology with the following sequences in the GENPEPT database.

| >GP: AAC27227 GB: AF009630 e11 [bacteriophage bIL170] | | | |
|---|---|---|---|
| Identities = 66/161 (40%), Positives = 93/161 (56%), Gaps = 13/161 (8%) | | | |
| Query: | 15 | YQVSNLGRVRSIGRTVNAKQRTRKTKGRILKQSL-SSGYAIVTLSVNGLRKSIRVHRLVA | 73 |
| | | Y+VSNLG+VR+I GRILK + +GY + L N +K++ +HR++A | |
| Sbjct: | 16 | YEVSNLGKVRNI------------KSGRILKPWIVPNGYLMHQLCENNKKKNLFLHRIIA | 63 |
| Query: | 74 | EAFIPNPINKRTINHIDENKLNNRVDNLEWATDKENANHGNRTTKSSLGRCKPVEQFTLE | 133 |
| | | AFI NP K +NHIDENKLNN ++NLEW T KEN HG R + + K V Q L | |
| Sbjct: | 64 | TAFIDNPEEKPQVNHIDENKLNNDLNNLEWCTVKENNIHGTRMKRIAEKHFKKVIQLDLN | 123 |
| Query: | 134 | GEFINTFDSIKSASMKTGISSQRITATAMGHQKQTHGYKWR | 174 |
| | | +N F+S+ A +TG+S + I++ G +K +KWR | |
| Sbjct: | 124 | DNVLNEFESMVQAEQETGVSRRNISSCCNGKRKSAGRFKWR | 164 |

[4499] No corresponding DNA sequence was identified in S. pyogenes.

[4500] Based on this analysis, it was predicted that this protein and its epitopes, could be useful antigens for vaccines or diagnostics.

### EXAMPLE 789

[4501] A DNA sequence (GBSx0837) was identified in S. agalactiae <SEQ ID 2417> which encodes the amino acid sequence <SEQ ID 2418>. Analysis of this protein sequence reveals the following:

Possible site: 21
>>> Seems to have no N-terminal signal sequence
----- Final Results -----
bacterial cytoplasm --- Certainty = 0.2357 (Affirmative) < succ>
bacterial membrane --- Certainty = 0.0000 (Not Clear) < succ>
bacterial outside --- Certainty = 0.0000 (Not Clear) < succ>

[4502] A related GBS nucleic acid sequence <SEQ ID 10169> which encodes amino acid sequence <SEQ ID 10170> was also identified.

[4503] The protein has no significant homology with any sequences in the GENPEPT database.

[4504] No corresponding DNA sequence was identified in S. pyogenes.

[4505] Based on this analysis, it was predicted that these proteins and their epitopes could be useful antigens for vaccines or diagnostics.

### EXAMPLE 790

[4506] A DNA sequence (GBSx0838) was identified in S. agalactiae <SEQ ID 2419> which encodes the amino acid sequence <SEQ ID 2420>. Analysis of this protein sequence reveals the following:

| Possible site: 57 | | | |
|---|---|---|---|
| >>> Seems to have an uncleavable N-term signal seq | | | |
| INTEGRAL | Likelihood = −5.47 | Transmembrane | 21-37 (19-38) |

----- Final Results -----
bacterial membrane --- Certainty = 0.3187 (Affirmative) < succ>
bacterial outside --- Certainty = 0.0000 (Not Clear) < succ>
bacterial cytoplasm --- Certainty = 0.0000 (Not Clear) < succ>

[4507] The protein has no significant homology with any sequences in the GENPEPT database.

[4508] No corresponding DNA sequence was identified in S. pyogenes.

[4509] Based on this analysis, it was predicted that this protein and its epitopes, could be useful antigens for vaccines or diagnostics.

### EXAMPLE 791

[4510] A DNA sequence (GBSx0839) was identified in S. agalactiae <SEQ ID 2421> which encodes the amino acid sequence <SEQ ID 2422>. This protein is predicted to be DNA polymerase III delta prime subunit (dnaB). Analysis of this protein sequence reveals the following:

Possible site: 55
>>> Seems to have no N-terminal signal sequence
----- Final Results -----
bacterial cytoplasm --- Certainty = 0.0544 (Affirmative) < succ>
bacterial membrane --- Certainty = 0.0000 (Not Clear) < succ>
bacterial outside --- Certainty = 0.0000 (Not Clear) < succ>

[4511] The protein has homology with the following sequences in the GENPEPT database.

| AAF98347 AF280763 DNA polymerase III delta prime subunit | | | |
|---|---|---|---|
| [Streptococcus pyogenes] | | | |
| Identities = 284/444 (63%), Positives = 357/444 (79%), Gaps = 4/444 (0%) | | | |
| Query: | 3 | ELKVLPHDIQAEQSVLGSIFIKPEKMIEVAEYLKPNDFYRPAHKILFKAMVSLADRGEAI | 62 |
| | | EL+V P D+ AEQSVLGSIFI P+K+I V E++ P+DFY+ AHKI+F+AM++L+DR +AI | |
| Sbjct: | 8 | ELRVQPQDLLAEQSVLGSIFISPDKLIAVREFISPDDFYKYAHKIIFRAMITLSDRNDAI | 67 |
| Query: | 63 | DIVTIKSTLESTDELGMVGGISYIAEIVNAVPTSSHAEHYAKIVAKKAQLRSIIDNLSDS | 122 |
| | | D TI++ L+ D+L +GG+SYI E+VN+VPTS++AE+YAKIVA+KA LR II L++S | |
| Sbjct: | 68 | DATTIRTILDDQDDLQSIGGLSYIVELVNSVPTSANAEYYAKIVAEKAMLRDIIARLTES | 127 |
| Query: | 123 | IGNAYDEDMDIDEIIAKAERSLIEVSQASNKSSFRPIHDVLLENHSKIEERSNNTSQITG | 182 |
| | | + AYDE + +E+IA ER+LIE+++ SN+S FR I DVL N+ +E RS TS +TG | |
| Sbjct: | 128 | VNLAYDEILKPEEVIAGVERALIELNEHSNRSGFRKISDVLKVNYEALEARSKQTSNVTG | 187 |
| Query: | 183 | IETGFYDFDKLITGLHEDQLIVLAARPAMGKTALALNIAQNVATKSNKAVAVFSLEMGAE | 242 |
| | | + TGF D DK+ TGLH DQL++LAARPA+GKTA LNIAQNV TK K VA+FSLEMGAE | |
| Sbjct: | 188 | LPTGFRDLDKITTGLHPDQLVILAARPAVGKTAFVLNIAQNVGTKQKKTVAIFSLEMGAE | 247 |
| Query: | 243 | SLVERMLSAEGTIINHHIRTGNLTVNEWQRLIYAQGQLAEAPIFIDDTAGVKITDIRARA | 302 |
| | | SLV+RML+AEG + +H +RTG LT +W + AQG LAEAPI+IDDT G+KIT+IRAR+ | |
| Sbjct: | 248 | SLVDRMLAAEGMVDSHSLRTGQLTDQDWNNVTIAQGALAEAPIYIDDTPGIKITEIRARS | 307 |
| Query: | 303 | RRLSQETD-GLGLIVIDYLQLIQGSRSDNRQQEVSEISRQLKIIAKELKVPVIALSQLSR | 361 |
| | | R+LSQE D GLGLIVIDYLQLI G++ +NRQQEVS+ISRQLKI+AKELKVPVIALSQLSR | |
| Sbjct: | 308 | RKLSQEVDGGLGLIVIDYLQLITGTKPENRQQEVSDISRQLKILAKELKVPVIALSQLSR | 367 |
| Query: | 362 | GVEQRNDKRPIMSDLRESGSIEQDADIVAFLYRDAYYQ---DKKEGQPENDITELIIRKN | 418 |
| | | GVEQR DKRP++SD+RESGSIEQDADIVAFLYRD YY+ D E E++ E+I+ KN | |
| Sbjct: | 368 | GVEQRQDKRPVLSDIRESGSIEQDADIVAFLYRDDYYRKECDDAEEAVEDNTIEVILEKN | 427 |
| Query: | 419 | RHGNLGTVKLYFHKEYTKFSSVEE | 442 |
| | | R G GTVKL F KEY KFSS+ + | |
| Sbjct: | 428 | RAGARGTVKLMFQKEYNKFSSIAQ | 451 |

[4512] There is also homology to SEQ ID 2424:

| Identities = 284/444 (63%), Positives = 357/444 (79%), Gaps = 4/444 (0%) | | | |
|---|---|---|---|
| Query: | 3 | ELKVLPHDIQAEQSVLGSIFIKPEKMIEVAEYLKPNDFYRPAHKILFKAMVSLADRGEAI | 62 |
| | | EL+V P D+ AEQSVLGSIFI P+K+I V E++ P+DFY+ AHKI+F+AM++L+DR +AI | |
| Sbjct: | 11 | ELRVQPQDLLAEQSVLGSIFISPDKLIAVREFISPDDFYKYAHKIIFRAMITLSDRNDAI | 70 |
| Query: | 63 | DIVTIKSTLESTDELGMVGGISYIAEIVNAVPTSSHAEHYAKIVAKKAQLRSIIDNLSDS | 122 |
| | | D TI++ L+ D+L +GG+SYI E+VN+VPTS++AE+YAKIVA+KA LR II L++S | |
| Sbjct: | 71 | DATTIRTILDDQDDLQSIGGLSYIVELVNSVPTSANAEYYAKIVAEKAMLRDIIARLTES | 130 |
| Query: | 123 | IGNAYDEDMDIDEIIAKAERSLIEVSQASNKSSFRPIHDVLLENHSKIEERSNNTSQITG | 182 |
| | | + AYDE + +E+IA ER+LIE+++ SN+S FR I DVL N+ +E RS TS +TG | |
| Sbjct: | 131 | VNLAYDEILKPEEVIAGVERALIELNEHSNRSGFRKISDVLKVNYEALEARSKQTSNVTG | 190 |
| Query: | 183 | IETGFYDFDKLITGLHEDQLIVLAARPAMGKTALALNIAQNVATKSNKAVAVFSLEMGAE | 242 |
| | | + TGF D DK+ TGLH DQL++LAARPA+GKTA LNIAQNV TK K VA+FSLEMGAE | |
| Sbjct: | 191 | LPTGFRDLDKITTGLHPDQLVILAARPAVGKTAFVLNIAQNVGTKQKKTVAIFSLEMGAE | 250 |
| Query: | 243 | SLVERMLSAEGTIINHHIRTGNLTVNEWQRLIYAQGQLAEAPIFIDDTAGVKITDIRARA | 302 |
| | | SLV+RML+AEG + +H +RTG LT +W + AQG LAEAPI+IDDT G+KIT+IRAR+ | |
| Sbjct: | 251 | SLVDRMLAAEGMVDSHSLRTGQLTDQDWNNVTIAQGALAEAPIYIDDTPGIKITEIRARS | 310 |
| Query: | 303 | RRLSQETD-GLGLIVIDYLQLIQGSRSDNRQQEVSEISRQLKIIAKELKVPVIALSQLSR | 361 |
| | | R+LSQE D GLGLIVIDYLQLI G++ +NRQQEVS+ISRQLKI+AKELKVPVIALSQLSR | |
| Sbjct: | 311 | RKLSQEVDGGLGLIVIDYLQLITGTKPENRQQEVSDISRQLKILAKELKVPVIALSQLSR | 370 |
| Query: | 362 | GVEQRNDKRPIMSDLRESGSIEQDADIVAFLYRDAYYQ---DKKEGQPENDITELIIRKN | 418 |
| | | GVEQR DKRP++SD+RESGSIEQDADIVAFLYRD YY+ D E E++ E+I+ KN | |
| Sbjct: | 371 | GVEQRQDKRPVLSDIRESGSIEQDADIVAFLYRDDYYRKECDDAEEAVEDNTIEVILEKN | 430 |
| Query: | 419 | RHGNLGTVKLYFHKEYTKFSSVEE | 442 |
| | | R G GTVKL F KEY KFSS+ + | |
| Sbjct: | 431 | RAGARGTVKLMFQKEYNKFSSIAQ | 454 |

[4513] Based on this analysis, it was predicted that this protein and its epitopes, could be useful antigens for vaccines or diagnostics.

### EXAMPLE 792

[4514] A DNA sequence (GBSx0840) was identified in S. agalactiae <SEQ ID 2425> which encodes the amino acid sequence <SEQ ID 2426>. Analysis of this protein sequence reveals the following:

Possible site: 19
>>> Seems to have no N-terminal signal sequence
----- Final Results -----
bacterial cytoplasm --- Certainty = 0.2146 (Affirmative) < succ>
bacterial membrane --- Certainty = 0.0000 (Not Clear) < succ>
bacterial outside --- Certainty = 0.0000 (Not Clear) < succ>

[4515] A related GBS nucleic acid sequence <SEQ ID 10167> which encodes amino acid sequence <SEQ ID 10168> was also identified.

[4516] The protein has no significant homology with any sequences in the GENPEPT database.

[4517] No corresponding DNA sequence was identified in S. pyogenes.

[4518] Based on this analysis, it was predicted that this protein and its epitopes, could be useful antigens for vaccines or diagnostics.

### EXAMPLE 793

[4519] A DNA sequence (GBSx0841) was identified in S. agalactiae <SEQ ID 2427> which encodes the amino acid sequence <SEQ ID 2428>. Analysis of this protein sequence reveals the following:

Possible site: 15
>>> Seems to have no N-terminal signal sequence
----- Final Results -----
bacterial cytoplasm --- Certainty = 0.2774 (Affirmative) < succ>
bacterial membrane --- Certainty = 0.0000 (Not Clear) < succ>
bacterial outside --- Certainty = 0.0000 (Not Clear) < succ>

[4520] The protein has no significant homology with any sequences in the GENPEPT database.

[4521] No corresponding DNA sequence was identified in S. pyogenes.

[4522] Based on this analysis, it was predicted that this protein and its epitopes, could be useful antigens for vaccines or diagnostics.

### EXAMPLE 794

[4523] A DNA sequence (GBSx0842) was identified in S. agalactiae <SEQ ID 2429> which encodes the amino acid sequence <SEQ ID 2430>. Analysis of this protein sequence reveals the following:

| Possible site: 28 | | | |
|---|---|---|---|
| >>> Seems to have no N-terminal signal sequence | | | |
| INTEGRAL | Likelihood = −1.91 | Transmembrane | 63-79 (62-79) |

----- Final Results -----
bacterial membrane --- Certainty = 0.1765 (Affirmative) < succ>
bacterial outside --- Certainty = 0.0000 (Not Clear) < succ>
bacterial cytoplasm --- Certainty = 0.0000 (Not Clear) < succ>

[4524] A related GBS nucleic acid sequence <SEQ ID 8661> which encodes amino acid sequence <SEQ ID 8662> was also identified. Analysis of this protein sequence reveals the following:

| Lipop: Possible site: −1 Crend: 10 | | |
|---|---|---|
| McG: Discrim Score: −11.31 | | |
| GvH: Signal Score (−7.5): −1.86 | | |
| Possible site: 28 | | |
| >>> Seems to have no N-terminal signal sequence | | |
| ALOM program count: 1 | value: −1.91 | threshold: 0.0 |

| | | | |
|---|---|---|---|
| INTEGRAL | Likelihood = −1.91 | Transmembrane | 61-77 (60-77) |

| | | |
|---|---|---|
| PERIPHERAL | Likelihood = 9.92 | 19 |

modified ALOM score: 0.88
*** Reasoning Step: 3
----- Final Results -----
bacterial membrane --- Certainty = 0.1765 (Affirmative) < succ>
bacterial outside --- Certainty = 0.0000 (Not Clear) < succ>
bacterial cytoplasm --- Certainty = 0.0000 (Not Clear) < succ>

[4525] The protein has homology with the following sequences in the GENPEPT database.

| >GP: AAB18686 GB: U38906 ORF11 [Bacteriophage r1t] | | | |
|---|---|---|---|
| Identities = 101/249 (40%), Positives = 157/249 (62%), Gaps = 21/249 (8%) | | | |
| Query: | 3 | MAQRRMFSRKITETDRFLEMPLSSQALYFHLNMGADDEGFIDKAKTIQRTIGASDDDMKL | 62 |
| | | MAQRRM ++ +T +FL +PL +QALYFHL + ADD+G ++ A + R +GA++D + L | |
| Sbjct: | 1 | MAQRRMIDKRTIQTQKFLRLPLETQALYFHLMLNADDDGVVE-AFPVVRMVGAAEDSLGL | 59 |
| Query: | 63 | LIAKGFLIPFDSGVV-VIRHWRIHNYIQSDRFQSTLYQSEKAQLEYDKSKTASLKPIGNC | 121 |
| | | L+ K F+ P + +V I ++ N I+ DR++++ Y AQL ++ ++P N | |
| Sbjct: | 60 | LVVKQFIKPLNEEMVYFIIDFKEQNTIKKDRYKASKY----AQLLTNEEFGTEMEPKRNQ | 115 |
| Query: | 122 | IQNVSKMETQVRLSKGSLDKDSLTTYPTVSDNEEEDIPYKEIISYLNEKANRNYRPNIQK | 181 |
| | | + K RL K LDK++ +S ++ IPY EI+ YLN+K R++R N++ | |
| Sbjct: | 116 | LGTSDKN----RLDKNRLDKNN-----NMSGKPDDVIPYSEILEYLNKKTGRSFR-NVEA | 165 |
| Query: | 182 | NKTLIKARWSEGFRLDDFKHVIDTTVKDWSGTKY-----EKYLRPETLFGSKFEGYLNQA | 236 |
| | | NK LIKARW+EG++L+DFK V+D V +WSG + E YL+P+TLF +KF+ YLNQ | |
| Sbjct: | 166 | NKKLIKARWNEGYKLEDFKTVVDNMVSNWSGKMFNGVPAENYLQPKTLFSNKFDSYLNQV | 225 |
| Query: | 237 | PRIKTETID | 245 |
| | | PRI+ + I+ | |
| Sbjct: | 226 | PRIEQKEIN | 234 |

[4526] No corresponding DNA sequence was identified in S. pyogenes.

[4527] SEQ ID 8662 (GBS344) was expressed in E. coli as a His-fusion product. SDS-PAGE analysis of total cell extract is shown in FIG. 72 (lane 12; MW 30.9 kDa). It was also expressed in E. coli as a GST-fusion product. SDS-PAGE analysis of total cell extract is shown in FIG. 81 (lane 3; MW 59 kDa).

[4528] The GBS344-GST fusion product was purified (FIG. 213, (lane 3; FIG. 226, lanes 4-6) and used to immunise mice. The resulting antiserum was used for FACS (FIG. 271), which confirmed that the protein is immunoaccessible on GBS bacteria.

[4529] Based on this analysis, it was predicted that these proteins and their epitopes could be useful antigens for vaccines or diagnostics.

### EXAMPLE 795

[4530] A DNA sequence (GBSx0843) was identified in S. agalactiae <SEQ ID 2431> which encodes the amino acid sequence <SEQ ID 2432>. Analysis of this protein sequence reveals the following:

Possible site: 47
>>> Seems to have no N-terminal signal sequence
----- Final Results -----
bacterial cytoplasm --- Certainty = 0.2549 (Affirmative) < succ>
bacterial membrane --- Certainty = 0.0000 (Not Clear) < succ>
bacterial outside --- Certainty = 0.0000 (Not Clear) < succ>

[4531] The protein has homology with the following sequences in the GENPEPT database:

| >GP: AAG31329 GB: AF182207 ORF 272 [Bacteriophage mv4] | | | |
|---|---|---|---|
| Identities = 70/241 (29%), Positives = 125/241 (51%), Gaps = 30/241 (12%) | | | |
| Query: | 12 | VLEETCEVHGCQLWLTKVPIKGRLEELKQCPECTKAAINIFENKLNSQSKINSKLADTYA | 71 |
| | | VLE+ C HG L +T +G E++ CP+C A+ + + + + +++ S +A | |
| Sbjct: | 16 | VLEQKCSKHGLNL-ITYKNHEG--EQVTCCPQCQAEALEVLQERFDQKAR-QSIIARK-- | 69 |
| Query: | 72 | VFERDSLVSDKLRAKSLENYE---------IKDEIDQHAINYAKRMEQFYRQDRTGNAII | 122 |
| | | F +SL + K+ + + +E IK ++ A+ +A + + A++ | |
| Sbjct: | 70 | -FRENSLANSKMWKCTFDTFEAQPGSAEELIKGQVRNAAVAFATKPVAHH-------AVL | 121 |
| Query: | 123 | TGPSGVGKSHLTYGLAKFMNEQFKAYESPKSVLFISLVSLFTKIKESFKVDNGY-RQADM | 181 |
| | | G G GKSHL A M ++ + K++ FI++ LF+KIK SF + Y + | |
| Sbjct: | 122 | YGQPGAGKSHL----AMAMMQEIHKHRPTKTMAFINISRLFSKIKNSFDDPSEYWTKEKA | 177 |
| Query: | 182 | IELLTRVDYLFLDDLGKESRKGDS--QNNEWTHQILYEILDNRSNTIINTNLSSKEIKALY | 240 |
| | | +E++ VD L +DDLG ES G + + +W ++Y++L+N+ II TNLS +E+K +Y | |
| Sbjct: | 178 | LEIMRGVDLLCIDDLGTESSMGRTGQEATKWAQDVIYDVLENQDRIIITTNLSERELKRVY | 238 |

[4532] No corresponding DNA sequence was identified in S. pyogenes.

[4533] Based on this analysis, it was predicted that this protein and its epitopes, could be useful antigens for vaccines or diagnostics.

### EXAMPLE 796

[4534] A DNA sequence (GBSx0844) was identified in S. agalactiae <SEQ ID 2433> which encodes the amino acid sequence <SEQ ID 2434>. This protein is predicted to be methyl transferase. Analysis of this protein sequence reveals the following:

Possible site: 47
>>> Seems to have no N-terminal signal sequence
----- Final Results -----
bacterial cytoplasm --- Certainty = 0.1241 (Affirmative) < succ>
bacterial membrane --- Certainty = 0.0000 (Not Clear) < succ>
bacterial outside --- Certainty = 0.0000 (Not Clear) < succ>

[4535] A related GBS nucleic acid sequence <SEQ ID 10165> which encodes amino acid sequence <SEQ ID 10166> was also identified.

[4536] The protein has homology with the following sequences in the GENPEPT database.

| >GP: AAC98421 GB: L29323 methyl transferase [Streptococcus pneumoniae] | | | |
|---|---|---|---|
| Identities = 262/474 (55%), Positives 313/474 (65%), Gaps = 71/474 (14%) | | | |
| Query: | 2 | MKFLDLFAGIGGFRLGMEQAGHECIGFCEINKFARASYKVIHDTEGEIELHDITRVSD-E | 60 |
| | | M+F+DLF+GIGGFRLGME GHECIGFCEI+KFAR SYK I TEGEIE HDI VSD E | |
| Sbjct: | 1 | MRFIDLFSGIGGFRLGMESVGHECIGFCEIDKFARESYKSIFQTEGEIEFHDIRDVSDDE | 60 |
| Query: | 61 | FIRGIGSVDVICGGFPCQAFSIAGNRRGFEDTRGTLFFEIARFASILRPKYLFLENVKGL | 120 |
| | | F + G VDVICGGFPCQAFSIAG R GFEDTRGTLFFEIAR A ++P++LFLENVKGL | |
| Sbjct: | 61 | FKKLRGKVDVICGGFPCQAFSIAGRRLGFEDTRGTLFFEIARAAKQIQPRFLFLENVKGL | 120 |
| Query: | 121 | LNHEGGATFETIIRTLDELGYNVEWQIFNSKNFGVPQNRERVFIIGHLRGEGTRPIFPFE | 180 |
| | | LNH+ G TF TI+ TLDELG++VEWQ+ NSK+FGVPQNRERVFIIGH R GTR FPF | |
| Sbjct: | 121 | LNHDKGRTFTTILTTLDELGFDVEWQMLNSKDFGVPQNRERVFIIGHSRKRGTRLGFPFR | 180 |
| Query: | 181 | SSITENYPIHTRKIGNVNPSGNGMNGEVYDSEGLSPTLTTNKGEGVKIAVN--------- | 231 |
| | | P + +GN+NPS +GM+G+VY SEGL+PTL KGEG KIA+ | |
| Sbjct: | 181 | REGQATNPETLKILGNLNPSKSGMSGKVYYSEGLAPTLVRGKGEGFKIAIPCMTPDRLDK | 240 |
| Query: | 232 | --------------------------VVGRLPGKFEMPNRVYDPDGLAPTIRTMQGGGLE | 265 |
| | | VVG LP F+ RVY +GL+PT+ TMQGG | |
| Sbjct: | 241 | RQNGRRFKDNQEPMFTLNTQDRHGIVVVGDLPTSFKETGRVYGSEGLSPTLTTMQGGDKI | 300 |
| Query: | 266 | PKIIQRGRGYNQGGEYEISPTVTCNSWQENNLLKIKEATKKGYSEAEAGDSVNLSHPNSE | 325 |
| | | PKI+ + LK++EATKKGY++AE GDS+NL P+S+ | |
| Sbjct: | 301 | PKILIP---------------------EPIQFLKVREATKKGYAQAEIGDSINLERPSSQ | 339 |
| Query: | 326 | TRRGRVGKGIANTLLTGEEQGVVV--YDLYNRRKKDIVGTLTASGHNGNTTTGTFGISNG | 383 |
| | | RRGRVGKGIANTL T + GVVV Y+ +++ + G L G | |
| Sbjct: | 340 | HRRGRVGKGIANTLTTSGQMGVVVASYEGEDKQVYQVAGVLID------------GQFYR | 387 |
| Query: | 384 | FRIRKLTPRECWRLQGFPDWAFDKASQVNSNSQLYKQAGNSVTVNVIAAIARRL | 437 |
| | | RIR++TP+EC+RLQGFPDWAF+ A +V+SNSQLYKQAGNSVTV VIAAIA++L | |
| Sbjct: | 388 | LRIRRITPKECFRLQGFPDWAFEAARKVSSNSQLYKQAGNSVTVPVIAAIAKKL | 441 |

[4537] There is also homology to SEQ ID 2436:

| Identities = 53/75 (70%), Positives = 62/75 (82%), Gaps = 1/75 (1%) | | | |
|---|---|---|---|
| Query: | 2 | MKFLDLFAGIGGFRLGMEQAGHECIGFCEINKFARASYKVIHDTEGEIELHDITRVSDEF | 61 |
| | | MKFLDLFAGIGGFRLG+ HECIGFCEI+KFAR SYK I++TEGEIE HDI +V+D+ | |
| Sbjct: | 4 | MKFLDLFAGIGGFRLGLINQCHECIGFCEIDKFARQSYKAIYETEGEIEFHDIRQVTDQD | 63 |
| Query: | 62 | IRGI-GSVDVICGGF | 75 |
| | | R + G VD+ICGGF | |
| Sbjct: | 64 | FRQLRGQVDIICGGF | 78 |

[4538] Based on this analysis, it was predicted that these proteins and their epitopes could be useful antigens for vaccines or diagnostics.

### EXAMPLE 797

[4539] A DNA sequence (GBSx0845) was identified in S. agalactiae <SEQ ID 2437> which encodes the amino acid sequence <SEQ ID 2438>. Analysis of this protein sequence reveals the following:

Possible site: 29
>>> Seems to have no N-terminal signal sequence
----- Final Results -----
bacterial cytoplasm --- Certainty = 0.2585 (Affirmative) < succ>
bacterial membrane --- Certainty = 0.0000 (Not Clear) < succ>
bacterial outside --- Certainty = 0.0000 (Not Clear) < succ>

[4540] The protein has no significant homology with any sequences in the GENPEPT database.

[4541] No corresponding DNA sequence was identified in S. pyogenes.

[4542] Based on this analysis, it was predicted that this protein and its epitopes, could be useful antigens for vaccines or diagnostics.

### EXAMPLE 798

[4543] A DNA sequence (GBSx0846) was identified in S. agalactiae <SEQ ID 2439> which encodes the amino acid sequence <SEQ ID 2440>. This protein is predicted to be arpR protein. Analysis of this protein sequence reveals the following:

Possible site: 46
>>> Seems to have no N-terminal signal sequence
----- Final Results -----
bacterial cytoplasm --- Certainty = 0.5070 (Affirmative) < succ>
bacterial membrane --- Certainty = 0.0000 (Not Clear) < succ>
bacterial outside --- Certainty = 0.0000 (Not Clear) < succ>

[4544] The protein has homology with the following sequences in the GENPEPT database.

| >GP: AAB09197 GB: U24159 orf12 [Bacteriophage HP1] | | | |
|---|---|---|---|
| Identities = 34/69 (49%), Positives = 47/69 (67%), Gaps = 1/69 (1%) | | | |
| Query: | 1 | MTKTMTLEEKVEQWFIDRNLHE-ANPVKQFQKLIEETGELYSGIAKGKSEIIRDSLGDMQ | 59 |
| | | M L + +EQW DRNL E + P KQF KL+EE GEL SG+AK K ++I+DS+GD | |
| Sbjct: | 1 | MADLQQLIKNIEQWAEDRNLVEDSTPQKQFIKLMEEFGELCSGVAKNKPDVIKDSIGDCF | 60 |
| Query: | 60 | VVLIGIEQQ | 68 |
| | | VV++ + +Q | |
| Sbjct: | 61 | VVMVILAKQ | 69 |

[4545] No corresponding DNA sequence was identified in S. pyogenes.

[4546] Based on this analysis, it was predicted that this protein and its epitopes, could be useful antigens for vaccines or diagnostics.

### EXAMPLE 799

[4547] A DNA sequence (GBSx0847) was identified in S. agalactiae <SEQ ID 2441> which encodes the amino acid sequence <SEQ ID 2442>. Analysis of this protein sequence reveals the following:

| Possible site: 58 | | | |
|---|---|---|---|
| >>> Seems to have an uncleavable N-term signal seq | | | |
| INTEGRAL | Likelihood = −5.10 | Transmembrane | 13-29 (10-36) |

----- Final Results -----
bacterial membrane --- Certainty = 0.3039 (Affirmative) < succ>
bacterial outside --- Certainty= 0.0000 (Not Clear) < succ>
bacterial cytoplasm --- Certainty= 0.0000 (Not Clear) < succ>

[4548] The protein has homology with the following sequences in the GENPEPT database.

| >GP: AAD21919 GB: AF085222 unknown [Streptococcus thermophilus | | | |
|---|---|---|---|
| bacteriophage DT1] | | | |
| Identities = 31/67 (46%), Positives = 49/67 (72%), Gaps = 1/67 (1%) | | | |
| Query: | 42 | HQEADRVIIYVADNAGAEMFGKITDKEIIEGRHTVTAGAYGKFLVTEEQYNEITVGDDIP | 101 |
| | | ++ + ++++ ADN E+ GK+T K ++ +T+ GAYGKFLV++EQY+ + VGD+IP | |
| Sbjct: | 34 | NRPVEAIVVHKADNF-VELHGKVTGKSMVGKLYTIDCGAYGKFLVSKEQYDSVQVGDEIP | 92 |
| Query: | 102 | DYLKGRG | 108 |
| | | YLKGRG | |
| Sbjct: | 93 | SYLKGRG | 99 |

[4549] No corresponding DNA sequence was identified in S. pyogenes.

[4550] Based on this analysis, it was predicted that this protein and its epitopes, could be useful antigens for vaccines or diagnostics.

### EXAMPLE 800

[4551] A DNA sequence (GBSx0848) was identified in S. agalactiae <SEQ ID 2443> which encodes the amino acid sequence <SEQ ID 2444>. This protein is predicted to be gene 17 protein. Analysis of this protein sequence reveals the following:

Possible Site: 55
>>> Seems to have no N-terminal signal sequence
----- Final Results -----
bacterial cytoplasm --- Certainty = 0.5428 (Affirmative) < succ>
bacterial membrane --- Certainty = 0.0000 (Not Clear) < succ>
bacterial outside --- Certainty = 0.0000 (Not Clear) < succ>

[4552] The protein has homology with the following sequences in the GENPEPT database.

| > GP: CAA24397 GB: V01146 gene 1.7 [Bacteriophage T7] | | | |
|---|---|---|---|
| Identities = 30/72 (41%), Positives = 40/72 (54%) | | | |
| Query: | 47 | DNVNYPSHYQGKYGLESIDVLRNFMTPEMLKGFYLGNALKYQLRYRKKNGLEDLKKARKN | 106 |
| | | + V PSHY +E+I+V+ MT E KG+ GN LKY+LR KK+ L L+K | |
| Sbjct: | 120 | EGVTKPSHYMLFDDIEAIEVIARSMTVEQFKGYCFGNILKYRLRAGKKSELAYLEKDLAK | 179 |
| Query: | 107 | LDWLIEEMEKEK | 118 |
| | | D+ E EK K | |
| Sbjct: | 180 | ADFYKELFEKHK | 191 |

[4553] No corresponding DNA sequence was identified in S. pyogenes.

[4554] Based on this analysis, it was predicted that this protein and its epitopes, could be useful antigens for vaccines or diagnostics.

### EXAMPLE 801

[4555] A DNA sequence (GBSx0849) was identified in S. agalactiae <SEQ ID 2445> which encodes the amino acid sequence <SEQ ID 2446>. Analysis of this protein sequence reveals the following:

Possible site: 28
>>> Seems to have no N-terminal signal sequence
----- Final Results -----
bacterial cytoplasm --- Certainty = 0.1375 (Affirmative) < succ>
bacterial membrane --- Certainty = 0.0000 (Not Clear) < succ>
bacterial outside --- Certainty = 0.0000 (Not Clear) < succ>

[4556] The protein has no significant homology with any sequences in the GENPEPT database.

[4557] No corresponding DNA sequence was identified in S. pyogenes.

[4558] Based on this analysis, it was predicted that this protein and its epitopes, could be useful antigens for vaccines or diagnostics.

### EXAMPLE 802

[4559] A DNA sequence (GBSx0850) was identified in S. agalactiae <SEQ ID 2447> which encodes the amino acid sequence <SEQ ID 2448>. Analysis of this protein sequence reveals the following:

```
Possible site: 31
>>> Seems to have no N-terminal signal sequence
----- Final Results -----
                            bacterial cytoplasm --- Certainty = 0.0087(Affirmative) < succ>
                              bacterial membrane --- Certainty = 0.0000(Not Clear) < succ>
                                bacterial outside --- Certainty = 0.0000(Not Clear) < succ>
```

[4560] A related GBS nucleic acid sequence <SEQ ID 10163> which encodes amino acid sequence <SEQ ID 10164> was also identified.

[4561] The protein has homology with the following sequences in the GENPEPT database.

| >GP: AAF26608 GB: AF145054 ORF9 [Streptococcus thermophilus | | | |
|---|---|---|---|
| bacteriophage 7201] | | | |
| Identities = 99/148 (66%), Positives = 116/148 (77%), Gaps = 10/148 (6%) | | | |
| Query: | 5 | MINNVVLIGRLTRDVELRYTPSNIANATFNLAVNRNFKNAAGDREADFINCVMWRQQAEN | 64 |
| | | MINN VL+GRLT+D E +YT SNIA A+F+LAVNRNFK+A G+READFINCV+WRQQAEN | |
| Sbjct: | 1 | MINNTVLVGRLTKDPEFKYTGSNIAVASFSLAVNRNFKDANGEREADFINCVIWRQQAEN | 60 |
| Query: | 65 | LANWTKKGMLIGITGRIQTRSYENQQGQRIYVTEVVADSFQILEKR----DNSTNQASMD | 120 |
| | | LANW KKG LIGITGRIQTRSYENQQGQR+YVTEVVA++FQ+LE R + N + | |
| Sbjct: | 61 | LANWAKKGALIGITGRIQTRSYENQQGQRVYVTEVVAENFQMLESRAAREGGNANNSYSQ | 120 |
| Query: | 121 | DQLP------PSFGNSQPMDISDDDLPF | 142 |
| | | Q+P + N QP+DIS DDLPF | |
| Sbjct: | 121 | QQVPNFARKNTEYSNKQPLDISSDDLPF | 148 |

[4562] There is also homology to SEQ ID 1492.

[4563] Based on this analysis, it was predicted that these proteins and their epitopes could be useful antigens for vaccines or diagnostics.

### EXAMPLE 803

[4564] A DNA sequence (GBSx0851) was identified in S. agalactiae <SEQ ID 2449> which encodes the amino acid sequence <SEQ ID 2450>. This protein is predicted to be puff C4B protein. Analysis of this protein sequence reveals the following:

```
Possible site: 19
>>> Seems to have no N-terminal signal sequence
----- Final Results -----
                            bacterial cytoplasm --- Certainty = 0.1203(Affirmative) < succ>
                              bacterial membrane --- Certainty = 0.0000(Not Clear) < succ>
                                bacterial outside --- Certainty = 0.0000(Not Clear) < succ>
```

[4565] A related GBS nucleic acid sequence <SEQ ID 10161> which encodes amino acid sequence <SEQ ID 10162> was also identified.

[4566] The protein has no significant homology with any sequences in the GENPEPT database.

[4567] No corresponding DNA sequence was identified in S. pyogenes.

[4568] Based on this analysis, it was predicted that these proteins and their epitopes could be useful antigens for vaccines or diagnostics.

### EXAMPLE 804

[4569] A DNA sequence (GBSx0852) was identified in S. agalactiae <SEQ ID 2451> which encodes the amino acid sequence <SEQ ID 2452>. This protein is predicted to be F5M15.19. Analysis of this protein sequence reveals the following:

| Possible site: 16 | | | | |
|---|---|---|---|---|
| >>> Seems to have an uncleavable N-term signal seq | | | | |
| | INTEGRAL | Likelihood = −2.34 | Transmembrane | 7-23 (6-23) |

```
----- Final Results -----
                              bacterial membrane --- Certainty = 0.1935(Affirmative) < succ>
                                bacterial outside --- Certainty = 0.0000(Not Clear) < succ>
                            bacterial cytoplasm --- Certainty = 0.0000(Not Clear) < succ>
```

[4570] The protein has no significant homology with any sequences in the GENPEPT database.

[4571] No corresponding DNA sequence was identified in S. pyogenes.

[4572] Based on this analysis, it was predicted that this protein and its epitopes, could be useful antigens for vaccines or diagnostics.

### EXAMPLE 805

[4573] A DNA sequence (GBSx0853) was identified in S. agalactiae <SEQ ID 2453> which encodes the amino acid sequence <SEQ ID 2454>. Analysis of this protein sequence reveals the following:

```
Possible site: 54
>>> Seems to have no N-terminal signal sequence
----- Final Results -----
                            bacterial cytoplasm --- Certainty = 0.4398(Affirmative) < succ>
                              bacterial membrane --- Certainty = 0.0000(Not Clear) < succ>
                                bacterial outside --- Certainty = 0.0000(Not Clear) < succ>
```

[4574] A related GBS nucleic acid sequence <SEQ ID 10159> which encodes amino acid sequence <SEQ ID 10160> was also identified.

[4575] The protein has no significant homology with any sequences in the GENPEPT database.

[4576] No corresponding DNA sequence was identified in S. pyogenes.

[4577] Based on this analysis, it was predicted that this protein and its epitopes, could be useful antigens for vaccines or diagnostics.

### EXAMPLE 806

[4578] A DNA sequence (GBSx0855) was identified in S. agalactiae <SEQ ID 2455> which encodes the amino acid sequence <SEQ ID 2456>. Analysis of this protein sequence reveals the following:

```
Possible site: 58
>>> Seems to have no N-terminal signal sequence
----- Final Results -----
                            bacterial cytoplasm --- Certainty = 0.2992(Affirmative) < succ>
                              bacterial membrane --- Certainty = 0.0000(Not Clear) < succ>
                                bacterial outside --- Certainty = 0.0000(Not Clear) < succ>
```

[4579] The protein has no significant homology with any sequences in the GENPEPT database.

[4580] No corresponding DNA sequence was identified in S. pyogenes.

[4581] Based on this analysis, it was predicted that this protein and its epitopes, could be useful antigens for vaccines or diagnostics.

### EXAMPLE 807

[4582] A DNA sequence (GBSx0856) was identified in S. agalactiae <SEQ ID 2457> which encodes the amino acid sequence <SEQ ID 2458>. Analysis of this protein sequence reveals the following:

```
Possible site: 54
>>> Seems to have no N-terminal signal sequence
----- Final Results -----
                            bacterial cytoplasm --- Certainty = 0.4639(Affirmative) < succ>
                              bacterial membrane --- Certainty = 0.0000(Not Clear) < succ>
                                bacterial outside --- Certainty = 0.0000(Not Clear) < succ>
```

[4583] The protein has homology with the following sequences in the GENPEPT database.

| >GP: BAB07758 GB: AP001520 unknown conserved protein | | | |
|---|---|---|---|
| [Bacillus halodurans] | | | |
| Identities = 65/184 (35%), Positives = 102/184 (55%), Gaps = 6/184 (3%) | | | |
| Query: | 1 | MNIVEPLRDKDDIQAMKDYLSSWNEKYYMLFLLGINTGFRVGDILKLKVKDVQGWHIKVR | 60 |
| | | M V P RD D IQA+K L + + Y+LF +GINTG R+ +L LK+KDV | |
| Sbjct: | 1 | MEYVVPFRDVDQIQAIKRSLKKKSPRDYLLFTIGINTGLRISQLLALKIKDVYDGQKPKD | 60 |
| Query: | 61 | EQKTGKYKSIKMTRPLKNELR---EFVKDKELHEYLFQSRVGKNKALSYKTVYWFLKRAA | 117 |
| | | + + + + +K L+ F++ +E H LF S ++ ++ + Y +K+AA | |
| Sbjct: | 61 | YLQLESGEIVYLNDQVKKALQFYAHFIEFQEQH-CLFAS-TNPDQPMTRQHAYRIIKQAA | 118 |
| Query: | 118 | EDLGI-DNVGTHTMRKTFGYHYYKKYKNVADLMSLFNHSSPAVTLIYICVRQDELDTKMS | 176 |
| | | +G+ D +GTHT+RKTFGYH Y++ ++ L FNH +PA TL YI + ++E | |
| Sbjct: | 119 | LQVGLTDQIGTHTLRKTFGYHAYRQGVALSLLQQRFNHQTPAQTLRYIDIAKNEQTIPRI | 178 |
| Query: | 177 | NFSL | 180 |
| | | N +L | |
| Sbjct: | 179 | NVNL | 182 |

[4584] No corresponding DNA sequence was identified in S. pyogenes.

[4585] Based on this analysis, it was predicted that this protein and its epitopes, could be useful antigens for vaccines or diagnostics.

### EXAMPLE 808

[4586] A DNA sequence (GBSx0857) was identified in S. agalactiae <SEQ ID 2459> which encodes the amino acid sequence <SEQ ID 2460>. Analysis of this protein sequence reveals the following:

```
Possible site: 33
>>> Seems to have no N-terminal signal sequence
----- Final Results -----
                            bacterial cytoplasm --- Certainty = 0.3582(Affirmative) < succ>
                              bacterial membrane --- Certainty = 0.0000(Not Clear) < succ>
                                bacterial outside --- Certainty = 0.0000(Not Clear) < succ>
```

[4587] The protein has no significant homology with any sequences in the GENPEPT database.

[4588] No corresponding DNA sequence was identified in S. pyogenes.

[4589] Based on this analysis, it was predicted that this protein and its epitopes, could be useful antigens for vaccines or diagnostics.

### EXAMPLE 809

[4590] A DNA sequence (GBSx0858) was identified in S. agalactiae <SEQ ID 2461> which encodes the amino acid sequence <SEQ ID 2462>. Analysis of this protein sequence reveals the following:

```
Possible site: 33
>>> Seems to have no N-terminal signal sequence
----- Final Results -----
                            bacterial cytoplasm --- Certainty = 0.2732(Affirmative) < succ>
                              bacterial membrane --- Certainty = 0.0000(Not Clear) < succ>
                                bacterial outside --- Certainty = 0.0000(Not Clear) < succ>
```

[4591] The protein has no significant homology with any sequences in the GENPEPT database.

[4592] No corresponding DNA sequence was identified in S. pyogenes.

[4593] Based on this analysis, it was predicted that this protein and its epitopes, could be useful antigens for vaccines or diagnostics.

### EXAMPLE 810

[4594] A DNA sequence (GBSx0859) was identified in S. agalactiae <SEQ ID 2463> which encodes the amino acid sequence <SEQ ID 2464>. Analysis of this protein sequence reveals the following:

```
Possible site: 27
>>> Seems to have no N-terminal signal sequence
----- Final Results -----
                            bacterial cytoplasm --- Certainty = 0.1720(Affirmative) < succ>
                              bacterial membrane --- Certainty = 0.0000(Not Clear) < succ>
                                bacterial outside --- Certainty = 0.0000(Not Clear) < succ>
```

[4595] The protein has no significant homology with any sequences in the GENPEPT database.

[4596] No corresponding DNA sequence was identified in S. pyogenes.

[4597] Based on this analysis, it was predicted that this protein and its epitopes, could be useful antigens for vaccines or diagnostics.

### EXAMPLE 811

[4598] A DNA sequence (GBSx0860) was identified in S. agalactiae <SEQ ID 2465> which encodes the amino acid sequence <SEQ ID 2466>. Analysis of this protein sequence reveals the following:

```
Possible site: 26
>>> Seems to have no N-terminal signal sequence
----- Final Results -----
                            bacterial cytoplasm --- Certainty = 0.2619(Affirmative) < succ>
                              bacterial membrane --- Certainty = 0.0000(Not Clear) < succ>
                                bacterial outside --- Certainty = 0.0000(Not Clear) < succ>
```

[4599] A related GBS nucleic acid sequence <SEQ ID 10157> which encodes amino acid sequence <SEQ ID 10158> was also identified.

[4600] The protein has no significant homology with any sequences in the GENPEPT database.

[4601] No corresponding DNA sequence was identified in S. pyogenes.

[4602] Based on this analysis, it was predicted that these proteins and their epitopes could be useful antigens for vaccines or diagnostics.

### EXAMPLE 812

[4603] A DNA sequence (GBSx0861) was identified in S. agalactiae <SEQ ID 2467> which encodes the amino acid sequence <SEQ ID 2468>. This protein is predicted to be terminase large subunit. Analysis of this protein sequence reveals the following:

```
Possible site: 13
>>> Seems to have no N-terminal signal sequence
----- Final Results -----
                            bacterial cytoplasm --- Certainty = 0.2753(Affirmative) < succ>
                              bacterial membrane --- Certainty = 0.0000(Not Clear) < succ>
                                bacterial outside --- Certainty = 0.0000(Not Clear) < succ>
```

[4604] The protein has homology with the following sequences in the GENPEPT database.

| >GP: AAC27181 GB: AF009630 putative terminase subunit [bacteriophage | | | |
|---|---|---|---|
| bIL170] | | | |
| Identities = 147/531 (27%), Positives = 261/531 (48%), Gaps = 26/531 (4%) | | | |
| Query: | 19 | IRICKLTMKSIRRVERYKEQYLFKQEEADKRIEFIEEECSNTKGLAGKLRLALPQKVWLE | 78 |
| | | I + K K+I++ R ++Y+++ + + IE+IE+ T G K++L QK W E | |
| Sbjct: | 16 | IELNKYMRKTIQKQIRIHKKYIYRYDRVTQAIEWIEDNFYLTTGNLMKIKLHPTQKYWYE | 75 |
| Query: | 79 | TTWGFYHTVEVTKTNPDTLEEYTDYEERRLIHEVPIIVPRGTGKTTLGSAIAEVGQIIDG | 138 |
| | | G+ D ++E + LI+E+ + + RG+GK++L + I+ G | |
| Sbjct: | 76 | LMLGY-----------DMVDEKG--VQVNLINEIFLNLGRGSGKSSLMATRVLNWMILGG | 122 |
| Query: | 139 | EWGADIQLLAYSREQAGYLFNASRAMLSNEESLLHYMREADILRSTKQGILYETTNSLMS | 198 |
| | | ++G + ++AY QA ++F+ R ++L Y E I +STKQG+ + + | |
| Sbjct: | 123 | QYGGESLVIAYDNTQARHVFDQVRNQTEASDTLRVY-NENKIFKSTKQGLEFTAFKTTFK | 181 |
| Query: | 199 | IKTSDYESLDGTNAHYNIFDEVHTYDDDFIKVVNDGSSRKRKNWITWYISTNGTKRDKLF | 258 |
| | | +T+D G N+ NIFDEVHTY +D + VN GS +K+ NW + YI++ G KRD L+ | |
| Sbjct: | 182 | KQTNDTLRAQGGNSSLNIFDEVHTYGEDITESVNKGSRQKQDNWQSIYITSGGLKRDGLY | 241 |
| Query: | 259 | DKYYNIWVDILDDKIINDSVMPWIYQLDDVSEIHDPDMWQKAMPLLGITTEKETIARDIE | 318 |
| | | DK + +++ ND +Y L++ ++ D W A+PL+G + + + E | |
| Sbjct: | 242 | DKLVERFKS--EEEFYNDRSFGLLYMLENHEQVKDKKNWTMALPLIGDVPKWSGVIEEYE | 299 |
| Query: | 319 | MSKNDPAQQAELMAKTFNLPVNNYLAYFSNEECKGWSDKFDESLFVGDDERNARCVIGID | 378 |
| | | +++ DPA Q + +A LP+ + YF+ ++ K +F+ S+F R +GID | |
| Sbjct: | 300 | LAQGDPALQNKFLAFNMGLPMQDTAYYFTPQDTK--LTEFNLSVF-----NKNRTYVGID | 352 |
| Query: | 379 | LSDVNDICSISFMVVRGEERHYLNKKFMPRHTIETLPKELRDKYTEWELSGMLHVHELDY | 438 |
| | | LS + D+ ++SF+ + + F R E L E ++ +TE+ G L + + +Y | |
| Sbjct: | 353 | LSLIGDLTAVSFVCELEGKTYSHTLTFSVRSQYEQLDTEQQELWTEFVDRGELILLDTEY | 412 |
| Query: | 439 | NDQAYIFEELRQFMSDNRILPVAVGYDRYNARELIRLFNDYYGDICHDIPQTVK---SLS | 495 |
| | | + + + F S +GYD L L Y+ D D + ++ S++ | |
| Sbjct: | 413 | INVNDLIPYINDFRSKTGCRLRKIGYDPARYEILKGLIERYFFDKDGDNQRAIRQGFSMN | 472 |
| Query: | 496 | NPLKVYKEKAKMGKIIFDDPVATWNHANVRVKIDANNNIFPNKEKAKEKID | 546 |
| | | + +K+ K K K+I + V W N VKI + + K+ K+KID | |
| Sbjct: | 473 | DYIKLLKSKLVENKLIHNQKVMQWALNNTAVKIGQSGDYMYTKKLEKDKID | 523 |

[4605] No corresponding DNA sequence was identified in S. pyogenes.

[4606] Based on this analysis, it was predicted that this protein and its epitopes, could be useful antigens for vaccines or diagnostics.

### EXAMPLE 813

[4607] A DNA sequence (GBSx0862) was identified in S. agalactiae <SEQ ID 2469> which encodes the amino acid sequence <SEQ ID 2470>. Analysis of this protein sequence reveals the following:

```
Possible site: 53
>>> Seems to have no N-terminal signal sequence
----- Final Results -----
                            bacterial cytoplasm --- Certainty = 0.3319(Affirmative) < succ>
                              bacterial membrane --- Certainty = 0.0000(Not Clear) < succ>
                                bacterial outside --- Certainty = 0.0000(Not Clear) < succ>
```

[4608] The protein has homology with the following sequences in the GENPEPT database.

| >GP: AAB41469 GB: L35061 orfL4 [Bacteriophage phi-41] | | | |
|---|---|---|---|
| Identities = 86/374 (22%), Positives = 166/374 (43%), Gaps = 38/374 (10%) | | | |
| Query: | 12 | FARIFRPNNRKSTRTYLQRSISYWRRNSIYLDNIYNKISTDTAQLRFKHVKITRNPGGVD | 71 |
| | | F+R N+ + + ++ Y S ++ NI+NKI+ + ++ F HVK ++ G D | |
| Sbjct: | 10 | FSRGKLNNDTQRVTAWQNEAVEY---TSAFVTNIHNKIANEITKVEFNHVKYKKSDVGSD | 66 |
| Query: | 72 | SMVWYEHSDLAEVLTVSPNPLEVPVVFWSNVTRAMLRDGVAVVVPRW--KNGRLVEIWLA | 129 |
| | | +++ SDL EVL S + FW V + +L + P + K G LV++ A | |
| Sbjct: | 67 | TLISMAGSDLDEVLNWSSKGERNSMEFWQKVIKKLLTTRYIDLYPIFDRKTGDLVDLLFA | 126 |
| Query: | 130 | KKTVTWTAESVELMLDDVAVELPLTDVWVFENPKLNVTAQLNQITELIDINLNALTEKLS | 189 |
| | | + E + ++ + N+ T ++D L + KL | |
| Sbjct: | 127 | DNKKEYKPEELVRLISPFYI---------------------NEDTSILDNALAGIQTKLE | 165 |
| Query: | 190 | DGNSSLRGFLKLPT---KAADEHLKQQARDRVDSMLDLAKNGGIAYLEQGEEFQELSKDY | 246 |
| | | G ++G LK+ D+ K +A + +M +++ G+ + E EL KDY | |
| Sbjct: | 166 | QGK--MKGLLKINAFIDTDNDQEFKDKAMLTIKNMQEMSNYNGLTPTDNKTEIVELKKDY | 223 |
| Query: | 247 | STASKEELEFLKSQLYNAHGINEKLFTCDYTEEQYRAYYSSVMKLYQRVYSEEINRKYFT | 306 |
| | | S +K+E++ +KS+L + +NE + ++EQ +Y+S + +E+ K + | |
| Sbjct: | 224 | SVLNKDEIDLIKSELLTGYFMNENILLGTASQEQQIYFYNSTIIPLLIQLEKELTYKLIS | 283 |
| Query: | 307 | KTAR--TQGN----KLLVFFDMADMISFKDLVEGGFKSKYAGLMNSNEFRETYLGLPGYE | 360 |
| | | R +GN +++V + + K+L++ ++ + N+ +G + | |
| Sbjct: | 284 | TNRRRVVKGNLYYERIIVDNQLFKFATLKELIDLYHENINGPIFTQNQLL-VKMGEQPIE | 342 |
| Query: | 361 | GGEVFETNLNAVRI | 374 |
| | | GG+V+ NLNAV + | |
| Sbjct: | 343 | GGDVYIANLNAVAV | 356 |

[4609] No corresponding DNA sequence was identified in S. pyogenes.

[4610] Based on this analysis, it was predicted that this protein and its epitopes, could be useful antigens for vaccines or diagnostics.

### EXAMPLE 814

[4611] A DNA sequence (GBSx0863) was identified in S. agalactiae <SEQ ID 2471> which encodes the amino acid sequence <SEQ ID 2472>. This protein is predicted to be a prohead protease. Analysis of this protein sequence reveals the following:

```
Possible site: 25
>>> Seems to have no N-terminal signal sequence
----- Final Results -----
                            bacterial cytoplasm --- Certainty = 0.3496(Affirmative) < succ>
                              bacterial membrane --- Certainty = 0.0000(Not Clear) < succ>
                                bacterial outside --- Certainty = 0.0000(Not Clear) < succ>
```

[4612] The protein has homology with the following sequences in the GENPEPT database.

| >GP: AAF31089 GB: AF069529 protease [Bacteriophage HK97] | | | |
|---|---|---|---|
| Identities = 52/142 (36%), Positives = 73/142 (50%), Gaps = 11/142 (7%) | | | |
| Query: | 21 | FEAYASTYDNTDREGDVMAKGCFDNTLKSKA-VVPMCLNHDR-NCVIGKHE-LSVDEKGL | 77 |
| | | FE YAS ++NTD +GD++ G F N L ++ V M NH +GK + L+ DEKGL | |
| Sbjct: | 26 | FEGYASVFNNTDSDGDIILPGAFKNALANQTRKVAMFFNHKTWELPVGKWDSLAEDEKGL | 85 |
| Query: | 78 | RTRSTFNLSDPEAKKTYDLMKMGALDSLSIGFFI--KDYEPIDAKQPYGGWIFKEVE-IF | 134 |
| | | R A M+ G ++ +S+GF + DY I G IFK ++ + | |
| Sbjct: | 86 | YVRGQLTPGHSGAADLKAAMQHGTVEGMSVGFSVAKDDYTIIPT-----GRIFKNIQALR | 140 |
| Query: | 135 | EISVVTVPANPQATVDNIKEFD | 156 |
| | | EISV T PAN QA + +K D | |
| Sbjct: | 141 | EISVCTFPANEQAGIAAMKSVD | 162 |

[4613] No corresponding DNA sequence was identified in S. pyogenes.

[4614] Based on this analysis, it was predicted that this protein and its epitopes, could be useful antigens for vaccines or diagnostics.

### EXAMPLE 815

[4615] A DNA sequence (GBSx0864) was identified in S. agalactiae <SEQ ID 2473> which encodes the amino acid sequence <SEQ ID 2474>. Analysis of this protein sequence reveals the following:

```
Possible site: 47
>>> Seems to have no N-terminal signal sequence
----- Final Results -----
                            bacterial cytoplasm --- Certainty = 0.2247(Affirmative) < succ>
                              bacterial membrane --- Certainty = 0.0000(Not Clear) < succ>
                                bacterial outside --- Certainty = 0.0000(Not Clear) < succ>
```

[4616] A related GBS nucleic acid sequence <SEQ ID 10155> which encodes amino acid sequence <SEQ ID 10156> was also identified.

[4617] The protein has homology with the following sequences in the GENPEPT database.

| >GP: AAC27185 GB: AF009630 16 [bacteriophage bIL170] | | | |
|---|---|---|---|
| Identities = 70/249 (28%), Positives = 121/249 (48%), Gaps = 23/249 (9%) | | | |
| Query: | 51 | LEQLKTDAESLVSQATA--IKETIAGLDSDIEETEEELSK-AAKIIK---------EKQK | 98 |
| | | L +LK + SL SQ +K I L ++E E+ LS+ + +IIK EK K | |
| Sbjct: | 13 | LAELKENNVSLKSQINGFEVKNAIEDLPK-VQELEKTLSENSIEIIKIENELNAQEEKPK | 71 |
| Query: | 99 | GNTPM-DYLKTKAAALDFVRILMDNEGSANSARKAWEANLVEKGV--TNLTKILPEPVLI | 155 |
| | | G M ++++++ A +F +L N G + + AW A L E GV T+ T LP ++ | |
| Sbjct: | 72 | GKAKMTNFIESQNAVTEFFDVLKKNSGKSE-IKNAWNAKLAENGVTITDTTFQLPRKLVE | 130 |
| Query: | 156 | AIQDAFTNYNGILN--HVSKDPRYAVRVALQTQVSQAKGHKAGKTKKDEDFTFLDFTINS | 213 |
| | | +I A N N + HV+ V + + ++A+ HK G+TK ++ T T+ | |
| Sbjct: | 131 | SINTALLNTNPVFKVFHVTNVGALLVSRSFDSS-AEAQVHKDGQTKTEQAATLTIDTLEP | 189 |
| Query: | 214 | ATVY-IKYAFEYSDLKKDTTGAYFNYVMKELAQGFI-RTIERAVVIGDGKSN-SAEDKIT | 270 |
| | | VY ++ E + + +N ++ EL Q + + ++ A+V GDG + + DK | |
| Sbjct: | 190 | VMVYKLQSLAERVKRLQMSYSELYNLIVAELTQAIVNKIVDLALVEGDGSNGFKSIDKEA | 249 |
| Query: | 271 | EIKSIAEET | 279 |
| | | ++K I + T | |
| Sbjct: | 250 | DVKKIKKIT | 258 |

[4618] No corresponding DNA sequence was identified in S. pyogenes.

[4619] Based on this analysis, it was predicted that these proteins and their epitopes could be useful antigens for vaccines or diagnostics.

### EXAMPLE 816

[4620] A DNA sequence (GBSx0865) was identified in S. agalactiae <SEQ ID 2475> which encodes the amino acid sequence <SEQ ID 2476>. Analysis of this protein sequence reveals the following:

```
Possible site: 39
>>> Seems to have no N-terminal signal sequence
----- Final Results -----
                            bacterial cytoplasm --- Certainty = 0.3068(Affirmative) < succ>
                              bacterial membrane --- Certainty = 0.0000(Not Clear) < succ>
                                bacterial outside --- Certainty = 0.0000(Not Clear) < succ>
```

[4621] The protein has no significant homology with any sequences in the GENPEPT database.

[4622] No corresponding DNA sequence was identified in S. pyogenes.

[4623] Based on this analysis, it was predicted that this protein and its epitopes, could be useful antigens for vaccines or diagnostics.

### EXAMPLE 817

[4624] A DNA sequence (GBSx0866) was identified in S. agalactiae <SEQ ID 2477> which encodes the amino acid sequence <SEQ ID 2478>. Analysis of this protein sequence reveals the following:

```
Possible site: 56
>>> Seems to have no N-terminal signal sequence
----- Final Results -----
                            bacterial cytoplasm --- Certainty = 0.0437(Affirmative) < succ>
                              bacterial membrane --- Certainty = 0.0000(Not Clear) < succ>
                                bacterial outside --- Certainty = 0.0000(Not Clear) < succ>
```

[4625] The protein has no significant homology with any sequences in the GENPEPT database.

[4626] No corresponding DNA sequence was identified in S. pyogenes.

[4627] Based on this analysis, it was predicted that this protein and its epitopes, could be useful antigens for vaccines or diagnostics.

### EXAMPLE 818

[4628] A DNA sequence (GBSx0867) was identified in S. agalactiae <SEQ ID 2479> which encodes the amino acid sequence <SEQ ID 2480>. Analysis of this protein sequence reveals the following:

```
Possible site: 14
>>> Seems to have no N-terminal signal sequence
----- Final Results -----
                            bacterial cytoplasm --- Certainty = 0.3181(Affirmative) < succ>
                              bacterial membrane --- Certainty = 0.0000(Not Clear) < succ>
                                bacterial outside --- Certainty = 0.0000(Not Clear) < succ>
```

[4629] A related GBS nucleic acid sequence <SEQ ID 10153> which encodes amino acid sequence <SEQ ID 10154> was also identified.

[4630] The protein has no significant homology with any sequences in the GENPEPT database.

[4631] No corresponding DNA sequence was identified in S. pyogenes.

[4632] Based on this analysis, it was predicted that these proteins and their epitopes could be useful antigens for vaccines or diagnostics.

### EXAMPLE 819

[4633] A DNA sequence (GBSx0869) was identified in S. agalactiae <SEQ ID 2481> which encodes the amino acid sequence <SEQ ID 2482>. This protein is predicted to be a major structural protein. Analysis of this protein sequence reveals the following:

```
Possible site: 29
>>> Seems to have no N-terminal signal sequence
----- Final Results -----
                            bacterial cytoplasm --- Certainty = 0.3364(Affirmative) < succ>
                              bacterial membrane --- Certainty = 0.0000(Not Clear) < succ>
                                bacterial outside --- Certainty = 0.0000(Not Clear) < succ>
```

[4634] The protein has homology with the following sequences in the GENPEPT database.

| >GP: AAA74331 GB: L33769 unidentified ORF28; putative [Bacteriophage bIL67] | | | |
|---|---|---|---|
| Identities = 55/201 (27%), Positives = 84/201 (41%), Gaps = 18/201 (8%) | | | |
| Query: | 9 | EVTHGNANGF-YAKIAKTDAGALDLQKPYPFTGLRSTSFETSQESNAYYAD-NVEHVRLQ | 66 |
| | | E+THG G + + + G P GLR ++ QE+ +YA N + + | |
| Sbjct: | 8 | ELTHGLGYGVVFTDLTGSKTGI-------PIAGLRGIETDSKQENKNFYAGFNAPYRTIA | 60 |
| Query: | 67 | GKKSTEGSITTYQIPKQFMIDHLGKKLTNSTPPALIDTGVNTN-FIWGYAETVTDEFGAE | 125 |
| | | G K T+ + +Y +P F LG S L D N + + YAE D+ G | |
| Sbjct: | 61 | GAKDTQIKVKSYDLPDDFATHALG---FGSVQGFLTDDVANYKPYGFAYAERYRDDDGTG | 117 |
| Query: | 126 | IEEFHIWTNVKASAPKGSTSTDETSATPKEIEIPCTASPNNFIVDSEKKPVSEIVWRDDS | 185 |
| | | + + +V+A+ P + DE S T KE E T + +F + +K+ + D | |
| Sbjct: | 118 | YKA-TFYPSVQATTPSDTAEADEESPTGKEYEHEATVTTGDFTLGDKKRLFVKFKVSDTE | 176 |
| Query: | 186 | KGT-VRGK---FDKLFADKSP | 202 |
| | | T GK F KLF D P | |
| Sbjct: | 177 | LATGTSGKALAFKKLFTDLKP | 197 |

[4635] No corresponding DNA sequence was identified in S. pyogenes.

[4636] Based on this analysis, it was predicted that this protein and its epitopes, could be useful antigens for vaccines or diagnostics.

### EXAMPLE 820

[4637] A DNA sequence (GBSx0870) was identified in S. agalactiae <SEQ ID 2483> which encodes the amino acid sequence <SEQ ID 2484>. Analysis of this protein sequence reveals the following:

```
Possible site: 61
>>> Seems to have no N-terminal signal sequence
----- Final Results -----
                            bacterial cytoplasm --- Certainty = 0.2531(Affirmative) < succ>
                              bacterial membrane --- Certainty = 0.0000(Not Clear) < succ>
                                bacterial outside --- Certainty = 0.0000(Not Clear) < succ>
```

[4638] The protein has no significant homology with any sequences in the GENPEPT database.

[4639] No corresponding DNA sequence was identified in S. pyogenes.

[4640] Based on this analysis, it was predicted that this protein and its epitopes, could be useful antigens for vaccines or diagnostics.

### EXAMPLE 821

[4641] A DNA sequence (GBSx0871) was identified in S. agalactiae <SEQ ID 2485> which encodes the amino acid sequence <SEQ ID 2486>. Analysis of this protein sequence reveals the following:

```
Possible site: 22
>>> Seems to have no N-terminal signal sequence
----- Final Results -----
                            bacterial cytoplasm --- Certainty = 0.2972(Affirmative) < succ>
                              bacterial membrane --- Certainty = 0.0000(Not Clear) < succ>
                                bacterial outside --- Certainty = 0.0000(Not Clear) < succ>
```

[4642] The protein has no significant homology with any sequences in the GENPEPT database.

[4643] No corresponding DNA sequence was identified in S. pyogenes.

[4644] Based on this analysis, it was predicted that this protein and its epitopes, could be useful antigens for vaccines or diagnostics.

### EXAMPLE 822

[4645] A DNA sequence (GBSx0872) was identified in S. agalactiae <SEQ ID 2487> which encodes the amino acid sequence <SEQ ID 2488>. Analysis of this protein sequence reveals the following:

```
Possible site: 49
>>> Seems to have no N-terminal signal sequence
----- Final Results -----
                            bacterial cytoplasm --- Certainty = 0.3860(Affirmative) < succ>
                              bacterial membrane --- Certainty = 0.0000(Not Clear) < succ>
                                bacterial outside --- Certainty = 0.0000(Not Clear) < succ>
```

[4646] The protein has no significant homology with any sequences in the GENPEPT database.

[4647] No corresponding DNA sequence was identified in S. pyogenes.

[4648] Based on this analysis, it was predicted that this protein and its epitopes, could be useful antigens for vaccines or diagnostics.

### EXAMPLE 823

[4649] A DNA sequence (GBSx0873) was identified in S. agalactiae <SEQ ID 2489> which encodes the amino acid sequence <SEQ ID 2490>. Analysis of this protein sequence reveals the following:

| Possible site: 16 | | | | |
|---|---|---|---|---|
| >>> Seems to have no N-terminal signal sequence | | | | |
| | INTEGRAL | Likelihood = −14.22 | Transmembrane | 605-621 (569-631) |
| | INTEGRAL | Likelihood = −8.12 | Transmembrane | 583-599 (569-604) |

```
----- Final Results -----
                              bacterial membrane --- Certainty = 0.6689(Affirmative) < succ>
                                bacterial outside --- Certainty = 0.0000(Not Clear) < succ>
                            bacterial cytoplasm --- Certainty = 0.0000(Not Clear) < succ>
```

[4650] The protein has homology with the following sequences in the GENPEPT database.

| >GP: AAB70053 GB: AF011378 unknown [Bacteriophage skl] | | | |
|---|---|---|---|
| Identities = 159/709 (22%), Positives = 285/709 (39%), Gaps = 112/709 (15%) | | | |
| Query: | 128 | SILNLNKELDNVAKELDIVNQKLELDPDNVELAEQKMKLLGKQSELAGDKVQELKKKQAA | 187 |
| | | S+ +N + + E + L+LDP N + Q K L Q L+ DK +LK++ ++ | |
| Sbjct: | 21 | SLKGVNTAMSGLRGEAKNLRDALKLDPTNTDKMAQLQKNLQTQLGLSRDKATKLKQELSS | 80 |
| Query: | 188 | LGDEK-IGTEEWRQLQNEIGQAEVEVLKIDRAMDILGESSRSATGDI--KEATSYLRADV | 244 |
| | | + G ++W QL ++G AE + +++ + + + S + DI K T + + + | |
| Sbjct: | 81 | VDKSSPAGQKKWLQLTRDLGTAETQANRLEGEIKQVEGAISSGSWDIDAKMDTKGVNSGI | 140 |
| Query: | 245 | MMDVADKAG----------QIGQKMVDAGKMTVDAWSEIDEALDTVTTKTGLTGD----- | 289 |
| | | + +G QIG V A + W + +A+DT L | |
| Sbjct: | 141 | DGMKSRFSGLREIAVGVFRQIGSSAVSAVGNGLKGW--VSDAMDTQKAMISLQNTLKFKG | 198 |
| Query: | 290 | -------ALAELQEIAKDIATG------MPTSFQNAGD----AVGEL------NTQFGLT | 326 |
| | | +Q +AKD + T+F GD AVG+ N FG T | |
| Sbjct: | 199 | NGQDFDYVSKSMQTLAKDTNANTEDTLKLSTTFIGLGDSAKTAVGKTEALVKANQAFGGT | 258 |
| Query: | 327 | GEKLKSASELL--------IKYAEINE-TD--------ISSSAISAKQAIEAYG--LTAE | 367 |
| | | GE+LK + + IN+ TD + S+ + A++ YG +A | |
| Sbjct: | 259 | GEQLKGVVQAYGQMSASGKVSAENINQLTDNNTALGSALKSTVMEMNPALKQYGSFASAS | 318 |
| Query: | 368 | DLGMV----LDNVTKAAQDTGQSVDTIVQKAIDGAPQIKGLGLSFEEGA------ALIGK | 417 |
| | | + G + LD + G T + A D + L L A ++I K | |
| Sbjct: | 319 | EKGAISVEMLDKAMQKLGGAGGGAVTTIGDAWDSFNETLSLALLPTLDALTPIISSIIDK | 378 |
| Query: | 418 | FEKSGVDSSAALSSLSKAAVIYAKD--GKTLTDGLNETVSAIQNSTSET--EALSIASEI | 473 |
| | | G + AL S+ K Y K+ G +G ++S I + T LSI ++ | |
| Sbjct: | 379 | MAGWGESAGKALDSIVK----YVKELWGALEKNGALSSLSKIWDGLKSTFGSVLSIIGQL | 434 |
| Query: | 474 | FGSKAAPRMVDAIQRGAFSFDDLAEAAKSSSGTVSTTFDETLDPIDKLTQYSNQAKEGMA | 533 |
| | | S A +D+ + A + ++ S T++ D I K+ ++ + E | |
| Sbjct: | 435 | IESFAG---IDS------KTGESAGSVENVSKTIANLAKGLADVIKKIADFAKKFSESKG | 485 |
| Query: | 534 | ELGGKLLETVIPALEPLMGMLESSVNWFTSLNETDQ-QTIVILGLVTTAVMMLLGAIAPL | 592 |
| | | + L+T + AL + T+++ + QT + G + AI P | |
| Sbjct: | 486 | AID--TLKTSLVALTAGFVAFKIGSGIITAISAFKKLQTAIQAGTGVMGAFNAVMAINPF | 543 |
| Query: | 593 | VIAIGAIGAPVGIVVAAIV-GAIAVITLIIQAIMNWGAITEWLQSTWDSCAA-------W | 644 |
| | | V +GI +AAIV G + T W + ++L+S WD + W | |
| Sbjct: | 544 | VA--------LGIAIAAIVAGLVYFFTQTETGKKAWASFVDFLKSAWDGIVSFFSGIGQW | 595 |
| Query: | 645 | LSELWTNIVTTATTAWSNFTAWLSGLWSSVVSTGQSLWSSFTSSLSNIFSSLITGAQSLW | 704 |
| | | +++W V A W W SG+ V Q++W+ T+ + ++++++TG Q+ W | |
| Sbjct: | 596 | FADIWNGAVDGAKGIWQGLVDWFSGIVQGV----QNIWNGITTFFTTLWTTVVTGIQTAW | 651 |
| Query: | 705 | SSFTSTLSNLWSGLVSTGSNLFNNLSSTISGIFNGILSTASNIWNSIKS | 753 |
| | | + T + LW G+V+ + +F +SS ++G +N ++T + + KS | |
| Sbjct: | 652 | AGVTGFFTGLWDGIVNVVTTVFTTISSLVTGAYNWFVTTFQPLISFYKS | 700 |

[4651] There is also homology to SEQ ID 2492.

[4652] A related GBS gene <SEQ ID 8663> and protein <SEQ ID 8664> were also identified. Analysis of this protein sequence reveals the following:

| Lipop: Possible site: −1 Crend: 10 | | | |
|---|---|---|---|
| McG: Discrim Score: −13.98 | | | |
| GvH: Signal Score (−7.5): −2.78 | | | |
| Possible site: 16 | | | |
| >>> Seems to have no N-terminal signal sequence | | | |
| ALOM program | count: 2 | value: −14.22 | threshold: 0.0 |

| | | | |
|---|---|---|---|
| INTEGRAL | Likelihood = −14.22 | Transmembrane | 605-621 (569-631) |
| INTEGRAL | Likelihood = −8.12 | Transmembrane | 583-599 (569-604) |

| | | |
|---|---|---|
| PERIPHERAL | Likelihood = 4.45 | 539 |

modified ALOM score: 3.34
*** Reasoning Step: 3
----- Final Results -----
bacterial membrane --- Certainty = 0.6689 (Affirmative) < succ>
bacterial outside --- Certainty = 0.0000 (Not Clear) < succ>
bacterial cytoplasm --- Certainty = 0.0000 (Not Clear)

[4653] The protein has homology with the following sequences in the databases:

[chemical structure]

[chemical structure]

[4654] SEQ ID 8664 (GBS58) was expressed in and purified from E. coli as a GST fusion. The purified protein is shown in lane 10 of FIG. 193.

[4655] Based on this analysis, it was predicted that these proteins and their epitopes could be useful antigens for vaccines or diagnostics.

### EXAMPLE 824

[4656] A DNA sequence (GBSx0874) was identified in S. agalactiae <SEQ ID 2493> which encodes the amino acid sequence <SEQ ID 2494>. Analysis of this protein sequence reveals the following:

Possible site: 43
>>> Seems to have no N-terminal signal sequence
----- Final Results -----
bacterial cytoplasm --- Certainty = 0.2732 (Affirmative) < succ>
bacterial membrane --- Certainty = 0.0000 (Not Clear) < succ>
bacterial outside --- Certainty = 0.0000 (Not Clear) < succ>

[4657] The protein has no significant homology with any sequences in the GENPEPT database.

[4658] No corresponding DNA sequence was identified in S. pyogenes.

[4659] Based on this analysis, it was predicted that this protein and its epitopes, could be useful antigens for vaccines or diagnostics.

### EXAMPLE 825

[4660] A DNA sequence (GBSx0875) was identified in S. agalactiae <SEQ ID 2495> which encodes the amino acid sequence <SEQ ID 2496>. Analysis of this protein sequence reveals the following:

Possible site: 18
>>> Seems to have no N-terminal signal sequence
----- Final Results -----
bacterial cytoplasm --- Certainty = 0.2467 (Affirmative) < succ>
bacterial membrane --- Certainty = 0.0000 (Not Clear) < succ>
bacterial outside --- Certainty = 0.0000 (Not Clear) < succ>

[4661] A related GBS nucleic acid sequence <SEQ ID 10151> which encodes amino acid sequence <SEQ ID 10152> was also identified. A further related GBS nucleic acid sequence <SEQ ID 10935> which encodes amino acid sequence <SEQ ID 10936> was also identified.

[4662] The protein has no significant homology with any sequences in the GENPEPT database.

[4663] A related DNA sequence was identified in S. pyogenes <SEQ ID 2497> which encodes the amino acid sequence <SEQ ID 2498>. Analysis of this protein sequence reveals the following:

Possible site: 40
>>> Seems to have no N-terminal signal sequence
----- Final Results -----
bacterial cytoplasm --- Certainty = 0.2136 (Affirmative) < succ>
bacterial membrane --- Certainty = 0.0000 (Not Clear) < succ>
bacterial outside --- Certainty = 0.0000 (Not Clear) < succ>

[4664] An alignment of the GAS and GBS proteins is shown below.

| Identities = 55/240 (22%), Positives = 92/240 (37%), Gaps = 20/240 (8%) | | | |
|---|---|---|---|
| Query: | 4 | INELTIDGVKTSSFKCDVLVETRPNVIVSSS--KTALLEHDGISGAVVQSNRHRGLIEKP | 61 |
| | | I ++ ID TSS VL I+S S + +G S + N + I | |
| Sbjct: | 2 | IPKVIIDDFDTSSIPNCVLTGYDVGDILSPSFVENEAYGMNGTSRELESYNESKPTIM-- | 59 |
| Query: | 62 | YHITLIEPSDEEIYRFSALLNREKFW-LENEQEPTIRLWCYKVDSFEIGKDEFGAWVVDV | 120 |
| | | +H++ + + I L + +FW + N ++ Y S +I +W V + | |
| Sbjct: | 60 | WHLSTFDDAVNLINHLDGLSKKIEFWHIPNS------IYYYDCLSVKINAVTMSSWRVTL | 113 |
| Query: | 121 | TFICHPTKFFKTTDIQTLTGNGVLRVQGSALAFPKITVVGQSASETSFTIGNQVIKLEKL | 180 |
| | | +P ++ K + GNG + G+ + PKI V G + + TIG QV++L L | |
| Sbjct: | 114 | KLALYPFRYAKGVSDVVIAGNGNINNAGNVFSEPKIVVEG--TGKGTLTIGKQVMEL-NL | 170 |
| Query: | 181 | SESLVMTNDPDNPSFKTASGKL---IKWAGDFITVDTAKGQNVGVVLGAGITSLKFETVW | 237 |
| | | S + A G + I+ G F + G+ + GIT W | |
| Sbjct: | 171 | SGKATIECKHGQQCVYDAEGNVKNSIRIRGSFFEIQPG---TQGIAVSGGITRTIISPRW | 227 |

[4665] Based on this analysis, it was predicted that these proteins and their epitopes could be useful antigens for vaccines or diagnostics.

### EXAMPLE 826

[4666] A DNA sequence (GBSx0876) was identified in S. agalactiae <SEQ ID 2499> which encodes the amino acid sequence <SEQ ID 2500>. This protein is predicted to be PblB. Analysis of this protein sequence reveals the following:

| Possible site: 27 | | | |
|---|---|---|---|
| >>> Seems to have no N-terminal signal sequence | | | |
| INTEGRAL | Likelihood = −0.00 | Transmembrane | 952-968 (952-968) |

----- Final Results -----
bacterial membrane --- Certainty = 0.1001 (Affirmative) < succ>
bacterial outside --- Certainty = 0.0000 (Not Clear) < succ>
bacterial cytoplasm --- Certainty = 0.0000 (Not Clear) < succ>

[4667] The protein has homology with the following sequences in the GENPEPT database.

| >GP: AAG18640 GB: AY007505 PblB [Streptococcus mitis] | | | |
|---|---|---|---|
| Identities = 145/542 (26%), Positives = 255/542 (46%), Gaps = 52/542 (9%) | | | |
| Query: | 1 | MLFLLDANVRTVKWNGIPLHEASSAIVKEETNGDFYLTVRYPITDSGIYQLIKEDMLIKS | 60 |
| | | M++L + N PL+ A + + +E N + LT R+P +D +++ +KE+ +K+ | |
| Sbjct: | 1 | MIYLTNGNT--------PLNAAYADKISQEANSTYQLTFRFPTSDV-LWEKLKEETFLKA | 51 |
| Query: | 61 | PVPVLGAQLFRIKKPIENDDSMDITAYHVSDDIMKRSITPVSVVGQGCAMALSQMVQNAK | 120 |
| | | + G Q F I + + + + A V + I P+S+ + ALS+ + | |
| Sbjct: | 52 | D-DLHGEQDFVIFEVQKKHGYIQVYANQVMTLLNNYVINPISLDRATGSTALSRFAGSI- | 109 |
| Query: | 121 | TGLGDFSFTSDIMDSRTFNTTETETLYSVLMDGKHSIVGTWEGELVRDNFALSIKRSRGA | 180 |
| | | T FSF SDI + TFNT + + D KHSI+G W G+LVR + + + ++ G+ | |
| Sbjct: | 110 | TRYNTFSFFSDIDERHTFNTDSVNAMVAFTKD-KHSILGQWGGDLVRHGYQVRLLKNGGS | 168 |
| Query: | 181 | DRGVVITTHKNLKSYQRTKNSQGVVTRIHARSTFKPDGAE-DEVTLRVSVDSPLINSYPY | 239 |
| | | + + KNL SYQ +++ + TRI ++T K +G + + V VDSPL+N Y | |
| Sbjct: | 169 | ENESLFMYKKNLSSYQHKTSTKSLKTRITFKATVKGEGEKAPDRKFSVVVDSPLVNKYSQ | 228 |
| Query: | 240 | INEKEYENNNAETVED--LRKWAEAKFTNEGIDKVSDAIEIEAYELDGQVVNLGDTVNLK | 297 |
| | | I E E N+ + ++ LRK+ E F D + D++EI+ V + D V+L | |
| Sbjct: | 229 | IYEDVIEVNDQDVKDEVGLRKYGEQYFRTTLCDMLEDSLEIQVEGKSDVPVQIFDIVSLF | 288 |
| Query: | 298 | SRKHSADLYKKAIAYEFNALTEEYISITFDDKPGVGGSGVSSGLSN-VADAILVASATAQ | 356 |
| | | + D+ KK Y ++ + ++ +SI F G SG+S+ LSN V+DA+ + Q | |
| Sbjct: | 289 | HDRFKMDVRKKITKYTYSPMAKKLLSIGF----GQFKSGLSNMLSNAVSDAVKNETQHLQ | 344 |
| Query: | 357 | D---VAVQRAVKNANAAFDAEFGKTKTKINDDIEIAKAKVESFKSELSNRMDNQLLP--- | 410 |
| | | + + +KNA+ AFD + + + D + AKAK E K L+ +D + | |
| Sbjct: | 345 | GQFATQLGKEIKNADLAFDRKKEELVNQFTDGLNAAKAKAEEVKKSLTETIDQRFRDFDS | 404 |
| Query: | 411 | ----------------------LATEAKNLASQAQADLTRKEIELRAELNRQVTSTEAVK | 448 |
| | | LA EAK ++ QA+ + K E + ++ + TS + | |
| Sbjct: | 405 | TGLNEIKQKAEEALQRVGANTLLAQEAKQISEQARQQMDSKFAEYKQSVDGRFTSLSSQL | 464 |
| Query: | 449 | ISLTNLSHNMDIIKQKALNDLRDAETRLKEADSVQQLATKRVEDKLTGLSTKLESFSVGG | 508 |
| | | NL +D + + ++L + E+D +++A + ++L + S +VGG | |
| Sbjct: | 465 | AGKANL---IDFQRVQEKSNLYERIIGSSESDIAEKVARMTLTNQLFQVEVGKYS-AVGG | 520 |
| Query: | 509 | YN | 510 |
| | | N | |
| Sbjct: | 521 | PN | 522 |
| Identities = 47/183 (25%), Positives = 83/183 (44%), Gaps = 22/183 (12%) | | | |
| Query: | 867 | VTTLRVTKGTIPADWSPSPDDLKAYSDTKLEQTANEIKASVTSLDHKTLKQTDITMTSEG | 926 |
| | | +T L +GT W P+P+D +D LE T QT +T+ | |
| Sbjct: | 667 | MTELDFYEGTTDRRWQPAPEDATLETDKTLEAT-----------------QTKLTLLQGS | 709 |
| Query: | 927 | IVLRAGKTSNDVARAIGSYFKVTPDAIALFSSLIKVSGNMLVDGSVTSRKLVTGAVETGH | 986 |
| | | ++ TS A +I S T + I + + I++ G L+D +T+ + G | |
| Sbjct: | 710 | FAIQ-NLTS---AGSIVSQINATNNQILIEAEKIRLKGKTLLD-ELTAIDGYFKRLFVGE | 764 |
| Query: | 987 | VKAGAITGVLLAAEAVTAEKLKVDQAFFNKLMANDAYLKQLFAKSAFITQVQSVTISASQ | 1046 |
| | | + ++ ++ +TA+KL +DQA +++D + L AK AFI +++SV +SA+ | |
| Sbjct: | 765 | GTFAKLNAEIIGSKTITADKLIMDQAMARLFVSSDIFTDTLAAKEAFINKLRSVVVSATL | 824 |
| Query: | 1047 | ISG | 1049 |
| | | G | |
| Sbjct: | 825 | FEG | 827 |

[4668] A related DNA sequence was identified in S. pyogenes <SEQ ID 2501> which encodes the amino acid sequence <SEQ ID 2502>. Analysis of this protein sequence reveals the following:

Possible site: 25
>>> Seems to have no N-terminal signal sequence
----- Final Results -----
bacterial cytoplasm --- Certainty = 0.2445 (Affirmative) < succ>
bacterial membrane --- Certainty = 0.0000 (Not Clear) < succ>
bacterial outside --- Certainty = 0.0000 (Not Clear) < succ>

[4669] An alignment of the GAS and GBS proteins is shown below.

| Identities = 143/552 (25%), Positives = 251/552 (44%), Gaps = 43/552 (7%) | | | |
|---|---|---|---|
| Query: | 11 | TVKWNGIPLHEASSAIVKEETNGDFYLTVRYPITDSGIYQLIKEDMLIKSPVPVLGAQLF | 70 |
| | | ++K + PL A + +E N D+ L +YP LIK+ +++++ + G+QLF | |
| Sbjct: | 3 | SIKDDNTPLVAAFEDEITQEANSDYKLNFKYPAKHE-YRPLIKKGIILEAD-DLHGSQLF | 60 |
| Query: | 71 | RIKKPIENDDSMDITAYHVSDDIMKRSITPVSVVGQGCAMALSQMVQNAKTGLGDFSFTS | 130 |
| | | RI + + +++ A V+DD+ +I +SV +S++ + K FSF S | |
| Sbjct: | 61 | RIFEITKRHGYINVYANQVADDLNGYAIDTISVDRVQGMTVMSELAGSIKRE-HPFSFFS | 119 |
| Query: | 131 | DIMDSRTFNTTETETLYSVLMDGKHSIVGTWEGELVRDNFALSIKRSRGADRGVVITTHK | 190 |
| | | DI TFN ++ + L +GKHSI+G W GELVR+ + +++ + G D + K | |
| Sbjct: | 120 | DIDGRHTFNQSDVSVM-DALANGKHSIMGQWGGELVRNKYQINLLKKAGKDTETLFMYKK | 178 |
| Query: | 191 | NLKSYQRTKNSQGVVTRIH----------ARSTFKPDG------AEDEVTLRVSVDSPLI | 234 |
| | | NLKSY+ T +G+V+ +H + DG + + T+RVSV+S L | |
| Sbjct: | 179 | NLKSYEETDTIKGLVSILHLVAEVEEEHEVETREASDGNIGHSESPKKKTIRVSVESKLK | 238 |
| Query: | 235 | NSYPYINEK--EYENNNAETVEDLRKWAEAKFTNEGIDKVSDAIEIEAYELDGQVVNLGD | 292 |
| | | +++P I EK + ++ + +T EDL + + F D ++++I+ V L D | |
| Sbjct: | 239 | DTHPIIVEKTIKVQDQDVKTEEDLLAYGKKYFEKTLCDIPGNSLKIDVTNNYEGAVRLFD | 298 |
| Query: | 293 | TVNLKSRKHSADLYKKAIAYEFNALTEEYISITFDDKPGVGGSGVSSGLSNVADAILVAS | 352 |
| | | T + + DL + Y F + SI F G + ++ +SN D + S | |
| Sbjct: | 299 | TAIVFHELYDRDLRMQITGYRFAPMANRLKSIIF----GEIKTNLAKQISNQIDNKVAES | 354 |
| Query: | 353 | ATAQDVA----VQRAVKNANAAFDAEFGKTKTKINDDIEIAKAKVESFKSELSNR-MDNQ | 407 |
| | | D A +Q+ + NAN FD + K + +I D I+ A+A E +E++ + ++ + | |
| Sbjct: | 355 | TAQHDAAFEAKLQKQIDNANRIFDTKEAKLREEIEDGIKKAEANAEVKVAEVNAKVLEAE | 414 |
| Query: | 408 | LLPLATEAK-----NLASQAQADLTRKEIELRAELNRQVTSTEAVKISLTNLSHNMDIIK | 462 |
| | | L A + + + A + D +K E R L + + +L + D + | |
| Sbjct: | 415 | ELAKAVDERLKKFLSDADTKEQDFDKKLEEFRTSLKDLEVDEKQIDDALAKAGFSKDSLA | 474 |
| Query: | 463 | QKALNDLRDAETRLKEADSVQQL-ATKRVEDKLTGLSTKLESFSVGGYNYVIDGGEPKEL | 521 |
| | | +ET A+ V T ++L G + K+ +F GY + GE E | |
| Sbjct: | 475 | DIKAKLEDTSETATVTANIVGSTGGTFYNRNRLDGDTDKVITFE-QGYIDIAHNGEGFE- | 532 |
| Query: | 522 | MANFYGKTYDIN | 533 |
| | | GKTY I+ | |
| Sbjct: | 533 | ----EGKTYTIS | 540 |

[4670] A related GBS gene <SEQ ID 8665> and protein <SEQ ID 8666> were also identified. Analysis of this protein sequence reveals the following:

| Lipop Possible site: −1 Crend: 3 | | | |
|---|---|---|---|
| SRCFLG: 0 | | | |
| McG: Length of UR: 11 | | | |
| Peak Value of UR: 1.54 | | | |
| Net Charge of CR: 1 | | | |
| McG: Discrim Score: −3.43 | | | |
| GvH: Signal Score (−7.5): −5.44 | | | |
| Possible site: 58 | | | |
| >>> Seems to have no N-terminal signal sequence | | | |
| Amino Acid Composition: calculated from 1 | | | |
| ALOM program | count: 1 | value: −0.00 | threshold: 0.0 |

| | | | |
|---|---|---|---|
| INTEGRAL | Likelihood = −0.00 | Transmembrane | 897-913 (897-913) |

| | | |
|---|---|---|
| PERIPHERAL | Likelihood = 1.48 | 932 |

modified ALOM score: 0.50
icml HYPID: 7 CFP: 0.100
*** Reasoning Step: 3
----- Final Results -----
bacterial membrane --- Certainty = 0.1001 (Affirmative) < succ>
bacterial outside --- Certainty = 0.0000 (Not Clear) < succ>
bacterial cytoplasm --- Certainty = 0.0000 (Not Clear) < succ>

[4671] The protein has homology with the following sequences in the databases:

[chemical structure]

[4672] A related DNA sequence was identified in S. pyogenes <SEQ ID 9059> which encodes amino acid sequence <SEQ ID 9060>. An alignment of the GAS and GBS sequences follows:

| Score = 87.8 bits (214), Expect = 4e−19 | | | |
|---|---|---|---|
| Identities = 88/273 (32%), Positives = 133/273 (48%), Gaps = 47/273 (17%) | | | |
| Query: | 370 | AINLNSRGVQIAGKNIALDGNTT----VNGAF-------GAKLGEFI--------KLRAD | 410 |
| | | AI L S ++++G N+ +DG+ T V GA GA G + KL+ D | |
| Sbjct: | 897 | AIALFSSLIKVSG-NMLVDGSVTSRKLVTGAVETGHVKAGAITGVLLAAEAVTAEKLKVD | 955 |
| Query: | 411 | QIIGGTIDANKINVINLKASSIVGLDANFIKARISYAIT-DLLEGKVIKARNGAMTIDLQ | 469 |
| | | Q + AN + L A S FI S I+ + G VIKA N AM I + | |
| Sbjct: | 956 | QAFFNKLMANDAYLKQLFAKSA------FITQVQSVTISASQISGGVIKALNNAMEIQMN | 1009 |
| Query: | 470 | SGQINHYTNESAMRRIDSSTASQFIKMTKSGFISEIGNMQAAMTVIGSNSDGSENHENKT | 529 |
| | | SGQI +YT+++A++R+ S +QF+K +G +S GN A +TVIGSN G+E+ + | |
| Sbjct: | 1010 | SGQILYYTDQAALKRVLSGYPTQFVKFA-TGTVSGKGN--AGVTVIGSNRYGTESTNDGG | 1066 |
| Query: | 530 | FGGIRIWNGKSSYQSTSFVELVGN--RVAIYGNKNRSPWLFDSTTSGYAYLIPQNDRGIK | 587 |
| | | F G+R WNG + ++LVG+ R+A N W + SG + P N | |
| Sbjct: | 1067 | FVGVRAWNG----SNIDSLDLVGDEIRLASSAFDNSDGWDVRTLDSGLK-ITPHN----- | 1116 |
| Query: | 588 | HVIGRADRKIDQIHVGDIYV-QGERVAMMLKDL | 619 |
| | | RA + +I VGD+++ +G L+D+ | |
| Sbjct: | 1117 | ----RAAERNSRIEVGDVWILKGNGSYSSLRDI | 1145 |
| Score = 31.3 bits (69), Expect = 0.038 | | | |
| Identities = 34/151 (22%), Positives = 62/151 (40%), Gaps = 13/151 (8%) | | | |
| Query: | 160 | QNADKKLSASYQLGIDGLKATMRSDKIGLQAEIQTTAQGLYQRYDNEIRKLSAKITTTSS | 219 |
| | | Q A K +A++ K + D +A++++ L R DN++ L+ + +S | |
| Sbjct: | 306 | QRAVKNANAAFDAEFGKTKTKINDDIEIAKAKVESFKSELSNRMDNQLLPLATEAKNLAS | 365 |
| Query: | 220 | GTTEAYESKLDGLRAEFTH---SNQGMRVELES--------KISGLQSTQQATARQISQE | 268 |
| | | K LRAE S + +++ L + K L + A R + + | |
| Sbjct: | 366 | QAQADLTRKEIELRAELNRQVTSTEAVKISLTNLSHNMDIIKQKALNDLRDAETR-LKEA | 424 |
| Query: | 269 | ISNREGAVSRVQQGLDSYQRRLQS-AEGNYN | 298 |
| | | S ++ A RV+ L +L+S + G YN | |
| Sbjct: | 425 | DSVQQLATKRVEDKLTGLSTKLESFSVGGYN | 455 |

[4673] SEQ ID 8666 (GBS202) was expressed in E. coli as a His-fusion product. SDS-PAGE analysis of total cell extract is shown in FIG. 50 (lane 5; MW 132 kDa).

[4674] Based on this analysis, it was predicted that these proteins and their epitopes could be useful antigens for vaccines or diagnostics.

### EXAMPLE 827

[4675] A DNA sequence (GBSx0877) was identified in S. agalactiae <SEQ ID 2503> which encodes the amino acid sequence <SEQ ID 2504>. This protein is predicted to be nuclear/mitotic apparatus protein. Analysis of this protein sequence reveals the following:

Possible site: 22
>>> Seems to have no N-terminal signal sequence
----- Final Results -----
bacterial cytoplasm --- Certainty = 0.2847 (Affirmative) < succ>
bacterial membrane --- Certainty = 0.0000 (Not Clear) < succ>
bacterial outside --- Certainty = 0.0000 (Not Clear) < succ>

[4676] The protein has no significant homology with any sequences in the GENPEPT database.

[4677] No corresponding DNA sequence was identified in S. pyogenes.

[4678] Based on this analysis, it was predicted that this protein and its epitopes, could be useful antigens for vaccines or diagnostics.

### EXAMPLE 828

[4679] A DNA sequence (GBSx0879) was identified in S. agalactiae <SEQ ID 2505> which encodes the amino acid sequence <SEQ ID 2506>. Analysis of this protein sequence reveals the following:

Possible site: 23
>>> Seems to have no N-terminal signal sequence
----- Final Results -----
bacterial cytoplasm --- Certainty = 0.3420 (Affirmative) < succ>
bacterial membrane --- Certainty = 0.0000 (Not Clear) < succ>
bacterial outside --- Certainty = 0.0000 (Not Clear) < succ>

[4680] The protein has no significant homology with any sequences in the GENPEPT database.

[4681] No corresponding DNA sequence was identified in S. pyogenes.

[4682] Based on this analysis, it was predicted that this protein and its epitopes, could be useful antigens for vaccines or diagnostics.

### EXAMPLE 829

[4683] A DNA sequence (GBSx0880) was identified in S. agalactiae <SEQ ID 2507> which encodes the amino acid sequence <SEQ ID 2508>. Analysis of this protein sequence reveals the following:

| Possible site: 13 | | | |
|---|---|---|---|
| >>> Seems to have an uncleavable N-term signal seq | | | |
| INTEGRAL | Likelihood = −7.54 | Transmembrane | 10-26 (2-28) |

----- Final Results -----
bacterial membrane --- Certainty = 0.4015 (Affirmative) < succ>
bacterial outside --- Certainty = 0.0000 (Not Clear) < succ>
bacterial cytoplasm --- Certainty = 0.0000 (Not Clear) < succ>

[4684] The protein has homology with the following sequences in the GENPEPT database.

| >GP: CAB07984 GB: Z93946 hypothetical protein [bacteriophage Dp-1] | | | |
|---|---|---|---|
| Identities = 67/136 (49%), Positives = 91/136 (66%) | | | |
| Query: | 1 | MPPWLIDSTVVVAMVTVLGGLFSTIITTSANRKDQLIKHQYEDIKEDLSGLIDKVKTIDH | 60 |
| | | MP WL D+ V+ ++T G+ + ++ K K EDI LS L +V ID | |
| Sbjct: | 1 | MPMWLNDTAVLTTIITACSGVLTVLLNKLFEWKSNKAKSVLEDISTTLSTLKQQVDGIDQ | 60 |
| Query: | 61 | TTTETKKISEITKDGTLKIQRYRLFHDLTKEISQGYTTIEHFRELSILFESYQLLGGNGE | 120 |
| | | TT +++ +DGT KIQRYRL+HDL +E+ GYTT++HFRELSILFESY+ LGGNGE | |
| Sbjct: | 61 | TTVAINHQNDVIQDGTRKIQRYRLYHDLKREVITGYTTLDHFRELSILFESYKNLGGNGE | 120 |
| Query: | 121 | IEALFEKFKQLPIEED | 136 |
| | | +EAL+EK+K+LPI E+ | |
| Sbjct: | 121 | VEALYEKYKKLPIREE | 136 |

[4685] Based on this analysis, it was predicted that this protein and its epitopes, could be useful antigens for vaccines or diagnostics.

### EXAMPLE 830

[4686] A DNA sequence (GBSx0882) was identified in S. agalactiae <SEQ ID 2509> which encodes the amino acid sequence <SEQ ID 2510>. Analysis of this protein sequence reveals the following:

Possible site: 53
>>> Seems to have a cleavable N-term signal seq.
----- Final Results -----
bacterial outside --- Certainty = 0.3000 (Affirmative) < succ>
bacterial membrane --- Certainty = 0.0000 (Not Clear) < succ>
bacterial cytoplasm --- Certainty = 0.0000 (Not Clear) < succ>

[4687] The protein has no significant homology with any sequences in the GENPEPT database.

[4688] No corresponding DNA sequence was identified in S. pyogenes.

[4689] A related GBS gene <SEQ ID 8667> and protein <SEQ ID 8668> were also identified. Analysis of this protein sequence reveals the following:

| Lipop: Possible site: −1 Crend: 5 | | | |
|---|---|---|---|
| McG: Discrim Score: 6.58 | | | |
| GvH: Signal Score (−7.5): −0.49 | | | |
| Possible site: 53 | | | |
| >>> Seems to have a cleavable N-term signal seq. | | | |
| ALOM program | count: 0 | value: 12.15 | threshold: 0.0 |

| | | |
|---|---|---|
| PERIPHERAL | Likelihood = 12.15 | 84 |

modified ALOM score: −2.93
*** Reasoning Step: 3
----- Final Results -----
bacterial outside --- Certainty = 0.3000 (Affirmative) < succ>
bacterial membrane --- Certainty = 0.0000 (Not Clear) < succ>
bacterial cytoplasm --- Certainty = 0.0000 (Not Clear)

[4690] SEQ ID 2510 (GBS56) was expressed in E. coli as a His-fusion product. SDS-PAGE analysis of total cell extract is shown in FIG. 17 (lane 8; MW 9.9 kDa). It was also expressed in E. coli as a GST-fusion product. SDS-PAGE analysis of total cell extract is shown in FIG. 21 (lane 10; MW 34.9 kDa).

[4691] GBS56-GST was purified as shown in FIG. 195, lane 7.

### EXAMPLE 831

[4692] A DNA sequence (GBSx0883) was identified in S. agalactiae <SEQ ID 2511> which encodes the amino acid sequence <SEQ ID 2512>. Analysis of this protein sequence reveals the following:

Possible site: 40
>>> Seems to have a cleavable N-term signal seq.
----- Final Results -----
bacterial outside --- Certainty = 0.3000 (Affirmative) < succ>
bacterial membrane --- Certainty = 0.0000 (Not Clear) < succ>
bacterial cytoplasm --- Certainty = 0.0000 (Not Clear) < succ>

[4693] The protein has no significant homology with any sequences in the GENPEPT database.

[4694] No corresponding DNA sequence was identified in S. pyogenes.

[4695] Based on this analysis, it was predicted that this protein and its epitopes, could be useful antigens for vaccines or diagnostics.

[4696] Based on this analysis, it was predicted that these proteins and their epitopes could be useful antigens for vaccines or diagnostics.

### EXAMPLE 832

[4697] A DNA sequence (GBSx0884) was identified in S. agalactiae <SEQ ID 2513> which encodes the amino acid sequence <SEQ ID 2514>. This protein is predicted to be N-acetylmuramoyl-L-alanine amidase. Analysis of this protein sequence reveals the following:

Possible site: 53
>>> Seems to have no N-terminal signal sequence
----- Final Results -----
bacterial cytoplasm --- Certainty = 0.0342 (Affirmative) < succ>
bacterial membrane --- Certainty = 0.0000 (Not Clear) < succ>
bacterial outside --- Certainty = 0.0000 (Not Clear) < succ>

[4698] The protein has homology with the following sequences in the GENPEPT database.

| >GP: CAB07986 GB: Z93946 N-acetylmuramoyl-L-alanine amidase | | | |
|---|---|---|---|
| [bacteriophage Dp-1] | | | |
| Identities = 96/141 (68%), Positives = 118/141 (83%) | | | |
| Query: | 1 | MEINTEIAIAWMSARQGKVSYSMDYRDGPNSYDCSSSVYYALRSAGASSAGWAVNTEYMH | 60 |
| | | M ++ E +AWM AR+G+VSYSMD+RDGP+SYDCSSS+YYALRSAGASSAGWAVNTEYMH | |
| Sbjct: | 1 | MGVDIEKGVAWMQARKGRVSYSMDFRDGPDSYDCSSSMYYALRSAGASSAGWAVNTEYMH | 60 |
| Query: | 61 | DWLIKNGYELIAENVDWNAVRGDIAIWGMRGHSSGAGGHVVMFIDPENIIHCNWANNGIT | 120 |
| | | WLI+NGYELI+EN W+A RGDI IWG +G S+GAGGH MFID +NIIHCN+A +GI+ | |
| Sbjct: | 61 | AWLIENGYELISENAPWDAKRGDIFIWGRKGASAGAGGHTGMFIDSDNIIHCNYAYDGIS | 120 |
| Query: | 121 | VNNYNQTAAASGWMYCYVYRL | 141 |
| | | VN++++ +G Y YVYRL | |
| Sbjct: | 121 | VNDHDERWYYAGQPYYYVYRL | 141 |

[4699] No corresponding DNA sequence was identified in S. pyogenes.

[4700] A related GBS gene <SEQ ID 8669> and protein <SEQ ID 8670> were also identified. Analysis of this protein sequence reveals the following:

RGD motif 81-83

[4701] The protein has homology with the following sequences in the databases:

[chemical structure]

[4702] SEQ ID 8670 (GBS302) was expressed in E. coli as a His-fusion product. SDS-PAGE analysis of total cell extract is shown in FIG. 50 (lane 6; MW 55 kDa).

[4703] The GBS302-His fusion product was purified (FIG. 205, lane 6) and used to immunise mice. The resulting antiserum was used for FACS (FIG. 302), which confirmed that the protein is immunoaccessible on GBS bacteria.

[4704] Based on this analysis, it was predicted that these proteins and their epitopes could be useful antigens for vaccines or diagnostics.

### EXAMPLE 833

[4705] A DNA sequence (GBSx0885) was identified in S. agalactiae <SEQ ID 2515> which encodes the amino acid sequence <SEQ ID 2516>. Analysis of this protein sequence reveals the following:

Possible site: 38
>>> Seems to have no N-terminal signal sequence
----- Final Results -----
bacterial cytoplasm --- Certainty = 0.1509 (Affirmative) < succ>
bacterial membrane --- Certainty = 0.0000 (Not Clear) < succ>
bacterial outside --- Certainty = 0.0000 (Not Clear) < succ>

[4706] The protein has no significant homology with any sequences in the GENPEPT database.

[4707] No corresponding DNA sequence was identified in S. pyogenes.

[4708] Based on this analysis, it was predicted that this protein and its epitopes, could be useful antigens for vaccines or diagnostics.

### EXAMPLE 834

[4709] A DNA sequence (GBSx0886) was identified in S. agalactiae <SEQ ID 2517> which encodes the amino acid sequence <SEQ ID 2518>. Analysis of this protein sequence reveals the following:

Possible site: 19
>>> Seems to have no N-terminal signal sequence
----- Final Results -----
bacterial cytoplasm --- Certainty = 0.1264 (Affirmative) < succ>
bacterial membrane --- Certainty = 0.0000 (Not Clear) < succ>
bacterial outside --- Certainty = 0.0000 (Not Clear) < succ>

[4710] The protein has homology with the following sequences in the GENPEPT database.

| >GP: CAB13473 GB: Z99112 similar to hypothetical proteins [Bacillus | | | |
|---|---|---|---|
| subtilis] | | | |
| Identities = 25/68 (36%), Positives = 41/68 (59%) | | | |
| Query: | 4 | IENLIIAIVKPLISQPDQLTIKIQDGPEFLEYHLDLDTQDIGRVIGKKGRTITAIRSIVY | 63 |
| | | +E+LI+ IV PL+ PD + + ++ + + L + D G+VIGK+GRT AIR+ V+ | |
| Sbjct: | 6 | LEDLIVHIVTPLVDHPDDIRVIREETDQKIALRLSVHKSDTGKVIGKQGRTAKAIRTAVF | 65 |
| Query: | 64 | SVPTQGKK | 71 |
| | | + Q K | |
| Sbjct: | 66 | AAGVQSSK | 73 |

[4711] A related DNA sequence was identified in S. pyogenes <SEQ ID 2519> which encodes the amino acid sequence <SEQ ID 2520>. Analysis of this protein sequence reveals the following:

Possible site: 19
>>> Seems to have no N-terminal signal sequence
----- Final Results -----
bacterial cytoplasm --- Certainty = 0.1012 (Affirmative) < succ>
bacterial membrane --- Certainty = 0.0000 (Not Clear) < succ>
bacterial outside --- Certainty = 0.0000 (Not Clear) < succ>

[4712] An alignment of the GAS and GBS proteins is shown below.

| Identities = 72/79 (91%), Positives = 75/79 (94%) | | | |
|---|---|---|---|
| Query: | 1 | MDTIENLIIAIVKPLISQPDQLTIKIQDGPEFLEYHLDLDTQDIGRVIGKKGRTITAIRS | 60 |
| | | MDTIENLIIAIVKPLISQPD LTIKI+D P+FLEYHLDLD QDIGRVIGKKGRTITAIRS | |
| Sbjct: | 1 | MDTIENLIIAIVKPLISQPDNLTIKIEDTPDFLEYHLDLDAQDIGRVIGKKGRTITAIRS | 60 |
| Query: | 61 | IVYSVPTQGKKVRLIIDEK | 79 |
| | | IVYSVPT GKKVRL+IDEK | |
| Sbjct: | 61 | IVYSVPTLGKKVRLVIDEK | 79 |

[4713] Based on this analysis, it was predicted that these proteins and their epitopes could be useful antigens for vaccines or diagnostics.

### EXAMPLE 835

[4714] A DNA sequence (GBSx0887) was identified in S. agalactiae <SEQ ID 2521> which encodes the amino acid sequence <SEQ ID 2522>. This protein is predicted to be ribosomal protein S116 (rpsP). Analysis of this protein sequence reveals the following:

Possible site: 45
>>> Seems to have no N-terminal signal sequence
----- Final Results -----
bacterial cytoplasm --- Certainty = 0.3654 (Affirmative) < succ>
bacterial membrane --- Certainty = 0.0000 (Not Clear) < succ>
bacterial outside --- Certainty = 0.0000 (Not Clear) < succ>

[4715] The protein has homology with the following sequences in the GENPEPT database.

| >GP: BAB06202 GB: AP001515 ribosomal protein S16 (BS17) [Bacillus halodurans] | | | |
|---|---|---|---|
| Identities = 62/90 (68%), Positives = 73/90 (80%) | | | |
| Query: | 1 | MAVKIRLTRMGSKKKPFYRINVADSRAPRDGRFIETVGTYNPLVAENQVTIKEERVLEWL | 60 |
| | | MAVKIRL RMGSKK PFYR+ VADSR+PRDGRFIE +GTYNPL +V +KE+R L+W+ | |
| Sbjct: | 1 | MAVKIRLKRMGSKKAPFYRVVVADSRSPRDGRFIEEIGTYNPLTQPAKVELKEDRALDWM | 60 |
| Query: | 61 | SKGAQPSDTVRNLLSKAGVMTKFHDQKFSK | 90 |
| | | KGA+PSDTVRNL SKAG+M K H+ K K | |
| Sbjct: | 61 | LKGAKPSDTVRNLFSKAGLMEKLHNAKNEK | 90 |

[4716] A related DNA sequence was identified in S. pyogenes <SEQ ID 2523> which encodes the amino acid sequence <SEQ ID 2524>. Analysis of this protein sequence reveals the following:

```
Possible site: 45
>>> Seems to have no N-terminal signal sequence
----- Final Results -----
                            bacterial cytoplasm --- Certainty = 0.3654(Affirmative) < succ>
                              bacterial membrane --- Certainty = 0.0000(Not Clear) < succ>
                                bacterial outside --- Certainty = 0.0000(Not Clear) < succ>
```

[4717] An alignment of the GAS and GBS proteins is shown below.

| Identities = 86/90 (95%), Positives = 89/90 (98%) | | | |
|---|---|---|---|
| Query: | 1 | MAVKIRLTRMGSKKKPFYRINVADSRAPRDGRFIETVGTYNPLVAENQVTIKEERVLEWL | 60 |
| | | MAVKIRLTRMGSKKKPFYRINVADSRAPRDGRFIETVGTYNPLVAENQ+TIKE+RVLEWL | |
| Sbjct: | 1 | MAVKIRLTRMGSKKKPFYRINVADSRAPRDGRFIETVGTYNPLVAENQITIKEDRVLEWL | 60 |
| Query: | 61 | SKGAQPSDTVRNLLSKAGVMTKFHDQKFSK | 90 |
| | | SKGAQPSDTVRN+LSKAGVM KFHDQKFSK | |
| Sbjct: | 61 | SKGAQPSDTVRNILSKAGVMAKFHDQKFSK | 90 |

[4718] Based on this analysis, it was predicted that these proteins and their epitopes could be useful antigens for vaccines or diagnostics.

### EXAMPLE 836

[4719] A DNA sequence (GBSx0888) was identified in S. agalactiae <SEQ ID 2525> which encodes the amino acid sequence <SEQ ID 2526>. Analysis of this protein sequence reveals the following:

| Possible site: 35 | | | | |
|---|---|---|---|---|
| >>> Seems to have no N-terminal signal sequence | | | | |
| | INTEGRAL | Likelihood = −11.09 | Transmembrane | 22-38 (16-42) |
| | INTEGRAL | Likelihood = −7.64 | Transmembrane | 382-398 (375-402) |
| | INTEGRAL | Likelihood = −7.59 | Transmembrane | 291-307 (284-317) |
| | INTEGRAL | Likelihood = −4.94 | Transmembrane | 340-356 (335-366) |

```
----- Final Results -----
                              bacterial membrane --- Certainty = 0.5437(Affirmative) < succ>
                                bacterial outside --- Certainty = 0.0000(Not Clear) < succ>
                            bacterial cytoplasm --- Certainty = 0.0000(Not Clear) < succ>
```

[4720] The protein has homology with the following sequences in the GENPEPT database.

| >GP: AAC24912 GB: AF012285 YknZ [Bacillus subtilis] | | | |
|---|---|---|---|
| Identities = 161/417 (38%), Positives = 241/417 (57%), Gaps = 25/417 (5%) | | | |
| Query: | 1 | MENWKFALSSILGHKMRAFLTMLGIIIGVASVVLIMALGKGMKDSVTNEITKSQKNLQIY | 60 |
| | | +EN + ALSS+L HKMR+ LTMLGIIIGV SV++++A+G+G + + I+ +++Y | |
| Sbjct: | 4 | LENIRMALSSVLAHKMRSILTMLGIIIGVGSVIVVVAVGQGGEQMLKQSISGPGNTVELY | 63 |
| Query: | 61 | YKTKEDQ-KNEDNFGAQGAFMQGSDTNRKEPIIQESWLKKIAKEVDGVSGYYVTNQTNAP | 119 |
| | | Y +++ + N A+ F + K K ++G+ + + | |
| Sbjct: | 64 | YMPSDEELASNPNAAAESTFTENDI--------------KGLKGIEGIKQVVASTSESMK | 109 |
| Query: | 120 | VAYLEKKAKTVNITGINRTYLGIKKFKIKSGRQFQEEDYNQFSRVILLEEKLAQRLFQTN | 179 |
| | | Y E++ + GIN Y+ + KI+SGR F + D+ +RV ++ +K+A+ LF | |
| Sbjct: | 110 | ARYHEEETDAT-VNGINDGYMNVNSLKIESGRTFTDNDFLAGNRVGIISQKMAKELFDKT | 168 |
| Query: | 180 | EAALNKVVTVKNKSYLVVGVYSDPEAGSGLYGSNSDGNAILTNTQLASEFGAKEAENIYF | 239 |
| | | + L +VV + + ++GV +GL + + N + S FG + N+ | |
| Sbjct: | 169 | -SPLGEVVWINGQPVEIIGVLKKV---TGLLSFDLSEMYVPFN-MMKSSFGTSDFSNVSL | 223 |
| Query: | 240 | HLNDVSQSNRIGKEIGKRLTDISHAKDGYYDNFDMTSIVKSINTQVGIMTGVIGAIAAIS | 299 |
| | | + GKE + + D +H + Y +M I I IMT +IG+IA IS | |
| Sbjct: | 224 | QVESADDIKSAGKEAAQLVND-NHGTEDSYQVMNMEEIAAGIGKVTAIMTTIIGSIAGIS | 282 |
| Query: | 300 | LLVGGIGVMNIMLVSVTERTREIGLRKALGATRRKILAQFLIESMVLTILGGLIGLLLAY | 359 |
| | | LLVGGIGVMNIMLVSVTERTREIG+RK+LGATR +IL QFLIES+VLT++GGL+G+ + Y | |
| Sbjct: | 283 | LLVGGIGVMNIMLVSVTERTREIGIRKSLGATRGQILTQFLIESVVLTLIGGLVGIGIGY | 342 |
| Query: | 360 | GGTMLIANAQDKITPS-VSLNVAIGSLIFSAFIGIIFGLLPANKASKLNPIDALRYE | 415 |
| | | GG L++ PS +S V G ++FS IG+IFG+LPANKA+KL+PI+ALRYE | |
| Sbjct: | 343 | GGAALVSAIAG--WPSLISWQVVCGGVLFSMLIGVIFGMLPANKAAKLDPIEALRYE | 397 |

[4721] There is also homology to SEQ ID 1350.

[4722] Based on this analysis, it was predicted that this protein and its epitopes, could be useful antigens for vaccines or diagnostics.

### EXAMPLE 837

[4723] A DNA sequence (GBSx0889) was identified in S. agalactiae <SEQ ID 2527> which encodes the amino acid sequence <SEQ ID 2528>. This protein is predicted to be ABC transporter (ATP-bindingprot). Analysis of this protein sequence reveals the following:

```
Possible site: 52
>>> Seems to have no N-terminal signal sequence
----- Final Results -----
                            bacterial cytoplasm --- Certainty = 0.4080(Affirmative) < succ>
                              bacterial membrane --- Certainty = 0.0000(Not Clear) < succ>
                                bacterial outside --- Certainty = 0.0000(Not Clear) < succ>
```

[4724] The protein has homology with the following sequences in the GENPEPT database.

| >GP: BAB06841 GB: AP001517 ABC transporter (ATP-binding protein) | | | |
|---|---|---|---|
| [Bacillus halodurans] | | | |
| Identities = 131/218 (60%), Positives = 169/218 (77%) | | | |
| Query: | 8 | LIRLHQIVKSYQNGDQKLQVLKNIDLTVYEGEFLAIMGPSGSGKSTLMNIIGLLDSPTSG | 67 |
| | | +I+L ++ KS++ G + +++L IDL + G+FLAIMGPSGSGKSTLMNIIG LD PTSG | |
| Sbjct: | 1 | MIKLERVTKSFRVGTEMVEILSAIDLEIASGDFLAIMGPSGSGKSTLMNIIGCLDQPTSG | 60 |
| Query: | 68 | DYSLNGKRVEELSQTKLAQVRNKEIGFVFQQFFLLSKLTALQNVELPLIYAGVPPKKRKN | 127 |
| | | Y +GK + S+ ++A++RN+ IGFVFQQF LL +LTALQNVELP++YAG+ K+R | |
| Sbjct: | 61 | RYMFDGKDLTNYSEQEIAKIRNRHIGFVFQQFHLLPRLTALQNVELPMVYAGMKKKERTE | 120 |
| Query: | 128 | LAKQFLDKVELRERMNHLPTELSGGQKQRVAIARALVNSPSIILADEPTGALDTKTGEQI | 187 |
| | | A L++V L ERM +LP LSGGQKQRVAIAR++VN P+IILADEPTGALDTKT E I | |
| Sbjct: | 121 | RAAHALERVGLAERMTYLPNSLSGGQKQRVAIARSIVNEPNIILADEPTGALDTKTSETI | 180 |
| Query: | 188 | MQFLTELNQEGKTIIMVTHEPEIADYATRKIVIRDGEI | 225 |
| | | M+ L LN EG TI +VTHEPEIA+Y + + +RDG+I | |
| Sbjct: | 181 | MELLCSLNNEGTTIALVTHEPEIAEYTQQTVFVRDGQI | 218 |

[4725] A related DNA sequence was identified in S. pyogenes <SEQ ID 2529> which encodes the amino acid sequence <SEQ ID 2530>. Analysis of this protein sequence reveals the following:

```
Possible site: 52
>>> Seems to have no N-terminal signal sequence
----- Final Results -----
                            bacterial cytoplasm --- Certainty = 0.1739(Affirmative) < succ>
                              bacterial membrane --- Certainty = 0.0000(Not Clear) < succ>
                                bacterial outside --- Certainty = 0.0000(Not Clear) < succ>
```

[4726] An alignment of the GAS and GBS proteins is shown below.

| Identities = 182/232 (78%), Positives = 207/232 (88%) | | | |
|---|---|---|---|
| Query: | 5 | RKELIRLHQIVKSYQNGDQKLQVLKNIDLTVYEGEFLAIMGPSGSGKSTLMNIIGLLDSP | 64 |
| | | +K+L++L IVKSYQNGDQ L+VLK I+LTVYEGEFLAIMGPSGSGKSTLMNIIGLLD P | |
| Sbjct: | 5 | KKQLMQLSNIVKSYQNGDQVLKVLKGINLTVYEGEFLAIMGPSGSGKSTLMNIIGLLDRP | 64 |
| Query: | 65 | TSGDYSLNGKRVEELSQTKLAQVRNKEIGFVFQQFFLLSKLTALQNVELPLIYAGVPPKK | 124 |
| | | TSGDY+L+ ++E L+ +LA+VRN EIGFVFQQFFLL+KLTALQNVELPLIYAGV K | |
| Sbjct: | 65 | TSGDYTLHNTKIEILNDRELAKVRNDEIGFVFQQFFLLAKLTALQNVELPLIYAGVNVSK | 124 |
| Query: | 125 | RKNLAKQFLDKVELRERMNHLPTELSGGQKQRVAIARALVNSPSIILADEPTGALDTKTG | 184 |
| | | R+ AKQFL+KV L R+ HLP+ELSGGQKQRVAIARALVN PSIILADEPTGALDTKTG | |
| Sbjct: | 125 | RREQAKQFLEKVGLGRRIKHLPSELSGGQKQRVAIARALVNDPSIILADEPTGALDTKTG | 184 |
| Query: | 185 | EQIMQFLTELNQEGKTIIMVTHEPEIADYATRKIVIRDGEITADTTDSIRID | 236 |
| | | +QIM+ LTELN+EGKTIIMVTHEPEIAD+ATRKI+IRDG+IT DTT S+ ID | |
| Sbjct: | 185 | QQIMELLTELNKEGKTIIMVTHEPEIADFATRKIIIRDGDITTDTTASVVID | 236 |

[4727] Based on this analysis, it was predicted that these proteins and their epitopes could be useful antigens for vaccines or diagnostics.

### EXAMPLE 838

[4728] A DNA sequence (GBSx0890) was identified in S. agalactiae <SEQ ID 2531> which encodes the amino acid sequence <SEQ ID 2532>. This protein is predicted to be ATP-binding cassette transporter-like protein. Analysis of this protein sequence reveals the following:

| Possible site: 37 | | | | |
|---|---|---|---|---|
| >>> Seems to have no N-terminal signal sequence | | | | |
| | INTEGRAL | Likelihood = −8.97 | Transmembrane | 17-33 (13-39) |

```
----- Final Results -----
                              bacterial membrane --- Certainty = 0.4588(Affirmative) < succ>
                                bacterial outside --- Certainty = 0.0000(Not Clear) < succ>
                            bacterial cytoplasm --- Certainty = 0.0000(Not clear) < succ>
```

[4729] A related GBS nucleic acid sequence <SEQ ID 9965> which encodes amino acid sequence <SEQ ID 9966> was also identified.

[4730] The protein has homology with the following sequences in the GENPEPT database.

| >GP: AAC24909 GB: AF012285 YknX [Bacillus subtilis] | | | |
|---|---|---|---|
| Identities = 104/391 (26%), Positives = 182/391 (45%), Gaps = 21/391 (5%) | | | |
| Query: | 13 | KKGAIISGLSVALIVVIGGFLWVQSQPNKSAVKTNYKVFNVREGSVSSSTLLTGKAKANQ | 72 |
| | | KK I G++V + + +G ++ + P + + +V E +SS+ ++ G K + | |
| Sbjct: | 2 | KKVWIGIGIAVIVALFVGINIYRSAAPTSGSAGKEVQTGSVEENEISSTVMVPGTLKFSN | 61 |
| Query: | 73 | EQYVYFDANKGNRATVTVKVGDKITAGQQLVQYDTTTAQAAYDTANRQLNKVARQINNLK | 132 |
| | | EQYV+++A+KG + VK GDK+ G LV Y T Q + + QL + ++ + | |
| Sbjct: | 62 | EQYVFYEADKGTLEDIKVKEGDKVKKGTALVTY--TNEQLSLEKEQNQLTSESNRLQIDQ | 119 |
| Query: | 133 | TTGSLPAMESSDQSSSSSQGQGTQSTSGATNRLQQNYQSQANASYNQQLQDLNDAYADAQ | 192 |
| | | L A++S ++ G+ + R + Q + +L Q | |
| Sbjct: | 120 | IQEKLKALDSKERELEKQVGKKEAEKQIESERTELQMQKKTAEI------ELKQTELQRQ | 173 |
| Query: | 193 | AEVNKAQKALNDTVITSDVSGTVVEVNSDIDPASKTSQV---LVHVATEGKLQVQGTMSE | 249 |
| | | + N+ ++D + S++ GTV+ VN + ASK S + ++H+ L V G +SE | |
| Sbjct: | 174 | SLANR----VSDLEVKSEIEGTVISVNQ--EAASKKSDIQEPVIHIGNPKDLVVSGKLSE | 227 |
| Query: | 250 | YDLANVKKDQAVKIKSKVYPDKEWEGKISYISNYPEAEANNNDSNNGSSAVNYKYKVDIT | 309 |
| | | YD VKK Q V + S V K W+G +S + P+ + + + AV Y +V I | |
| Sbjct: | 228 | YDTLKVKKGQKVTLTSDVIQGKTWKGTVSAVGLVPD-QQESAAAQGTEQAVQYPLQVKIK | 286 |
| Query: | 310 | SPLDALKQGFTVSVEV-VNGDKHLIVPTSSVINKDNKHFVWVYNDSNRKISKVEVKIGKA | 368 |
| | | L K GF + + + K +P+ +V +D++++V+ D K +V+VKIG+ | |
| Sbjct: | 287 | GNLPEGKPGFKFIMNIETDKRKANTLPSKAVKKEDDQYYVYTVKDG--KAKRVDVKIGEV | 344 |
| Query: | 369 | DAKTQEILSGLKAGQIVVTNPSKTFKDGQKI | 399 |
| | | EI GL V+ NPS DG ++ | |
| Sbjct: | 345 | TDDLTEIKEGLTQDDQVILNPSDQVTDGMEV | 375 |

[4731] A related DNA sequence was identified in S. pyogenes <SEQ ID 2533> which encodes the amino acid sequence <SEQ ID 2534>. Analysis of this protein sequence reveals the following:

| Possible site: 42 | | | | |
|---|---|---|---|---|
| >>> Seems to have an uncleavable N-term signal seq | | | | |
| | INTEGRAL | Likelihood = −9.61 | Transmembrane | 15-31 (11-36) |

```
----- Final Results -----
                              bacterial membrane --- Certainty = 0.4843(Affirmative) < succ>
                                bacterial outside --- Certainty = 0.0000(Not Clear) < succ>
                            bacterial cytoplasm --- Certainty = 0.0000(Not clear) < succ>
```

[4732] The protein has homology with the following sequences in the databases:

| >GP: AAC24909 GB: AF012285 YknX [Bacillus subtilis] | | | |
|---|---|---|---|
| Identities = 103/380 (27%), Positives = 180/380 (47%), Gaps = 21/380 (5%) | | | |
| Query: | 16 | ITASVITLVLIITGIVLWKQQRNTLTADIAKEPYSTVSVTEGSIASSTLLSGTVKALSEE | 75 |
| | | I + +V + GI +++ T + A + T SV E I+S+ ++ GT+K +E+ | |
| Sbjct: | 6 | IGIGIAVIVALFVGINIYRSAAPT--SGSAGKEVQTGSVEENEISSTVMVPGTLKFSNEQ | 63 |
| Query: | 76 | YIYFDANKGNDATVTVKVGDQVTQGQQLVQYNTTTAQSAYDTAVRSLNKIGRQINHLKTY | 135 |
| | | Y++++A+KG + VK GD+V +G LV Y T Q + + + N++ + N L+ | |
| Sbjct: | 64 | YVFYEADKGTLEDIKVKEGDKVKKGTALVTY--TNEQLSLE---KEQNQLTSESNRLQID | 118 |
| Query: | 136 | GVPAVSTETNRDEATGEETTTTVQPSAQ-QNANYKQQLQDLNDAYADAQAEVNKAQIA-- | 192 |
| | | + + E E+ + Q ++ + Q+Q Q E+ + +A | |
| Sbjct: | 119 | QIQEKLKALDSKERELEKQVGKKEAEKQIESERTELQMQKKTAEIELKQTELQRQSLANR | 178 |
| Query: | 193 | LNDTVVISSVSGTVVEVNND-IDPSSKNSQTLVHVATEGQLQVKGTLTEYDLANVKVGQS | 251 |
| | | ++D V S + GTV+ VN + S + ++H+ L V G L+EYD VK GQ | |
| Sbjct: | 179 | VSDLEVKSEIEGTVISVNQEAASKKSDIQEPVIHIGNPKDLVVSGKLSEYDTLKVKKGQK | 238 |
| Query: | 252 | VKIKSKVYSNQEWTGKISYVSNYPTESNAGSTTPAGSTGAGSSTGATYDYKIDIISPLNQ | 311 |
| | | V + S V + W G +S V P + + + G+ Y ++ I L + | |
| Sbjct: | 239 | VTLTSDVIQGKTWKGTVSAVGLVPDQQES-------AAAQGTEQAVQYPLQVKIKGNLPE | 291 |
| Query: | 312 | LKQGFTVSVEVVNEAKQA-LVPLTAVIKKDKKHYVWTYDDATGKAKKVEVTLGNADAOQQ | 370 |
| | | K GF + + + ++A +P AV K+D ++YV+T D GKAK+V+V +G | |
| Sbjct: | 292 | GKPGFKFIMNIETDKRKANTLPSKAVKKEDDQYYVYTVKD--GKAKRVDVKIGEVTDDLT | 349 |
| Query: | 371 | EIHKGVAVGDIVIANPDKNI | 390 |
| | | EI +G+ D VI NP + | |
| Sbjct: | 350 | EIKEGLTQDDQVILNPSDQV | 369 |

[4733] An alignment of the GAS and GBS proteins is shown below.

| Identities = 234/421 (55%), Positives = 301/421 (70%), Gaps = 19/421 (4%) | | | |
|---|---|---|---|
| Query: | 3 | MSKRQNLGISKKGAIISGLSVALIVVIGGF-LWVQSQPNKSA--VKTNYKVFNVREGSVS | 59 |
| | | MSKR + I+ K +I+ + L+++I G LW Q + +A K Y +V EGS++ | |
| Sbjct: | 1 | MSKRGKIKITTKTKLITASVITLVLIITGIVLWKQQRNTLTADIAKEPYSTVSVTEGSIA | 60 |
| Query: | 60 | SSTLLTGKAKANQEQYVYFDANKGNRATVTVKVGDKITAGQQLVQYDTTTAQAAYDTANR | 119 |
| | | SSTLL+G KA E+Y+YFDANKGN ATVTVKVGD++T GQQLVQY+TTTAQ+AYDTA R | |
| Sbjct: | 61 | SSTLLSGTVKALSEEYIYFDANKGNDATVTVKVGDQVTQGQQLVQYNTTTAQSAYDTAVR | 120 |
| Query: | 120 | QLNKVARQINNLKTTGSLPAMESSDQSSSSSQGQGTQSTSGATNRLQQNYQSQANASYNQ | 179 |
| | | LNK+ RQIN+LKT G +PA+ S++ + + G+ T +T + +Q NA+Y Q | |
| Sbjct: | 121 | SLNKIGRQINHLKTYG-VPAV-STETNRDEATGEETTTTVQPS--------AQQNANYKQ | 170 |
| Query: | 180 | QLQDLNDAYADAQAEVNKAQKALNDTVITSDVSGTVVEVNSDIDPASKTSQVLVHVATEG | 239 |
| | | QLQDLNDAYADAQAEVNKAQ ALNDTV+ S VSGTVVEVN+DIDP+SK SQ LVHVATEG | |
| Sbjct: | 171 | QLQDLNDAYADAQAEVNKAQIALNDTVVISSVSGTVVEVNNDIDPSSKNSQTLVHVATEG | 230 |
| Query: | 240 | KLQVQGTMSEYDLANVKKDQAVKIKSKVYPDKEWEGKISYISNYP-EAEANN-----NDS | 293 |
| | | +LQV+GT++EYDLANVK Q+VKIKSKVY ++EW GKISY+SNYP E+ A + + | |
| Sbjct: | 231 | QLQVKGTLTEYDLANVKVGQSVKIKSKVYSNQEWTGKISYVSNYPTESNAGSTTPAGSTG | 290 |
| Query: | 294 | NNGSSAVNYKYKVDITSPLDALKQGFTVSVEVVNGDKHLIVPTSSVINKDNKHFVWVYND | 353 |
| | | S+ Y YK+DI SPL+ LKQGFTVSVEVVN K +VP ++VI KD KH+VW Y+D | |
| Sbjct: | 291 | AGSSTGATYDYKIDIISPLNQLKQGFTVSVEVVNEAKQALVPLTAVIKKDKKHYVWTYDD | 350 |
| Query: | 354 | SNRKISKVEVKIGKADAKTQEILSGLKAGQIVVTNPSKTFKDGQKIDNIESIDLNSNKKSE | 414 |
| | | + K KVEV +G ADA+ QEI G+ G IV+ NP K K +K++ + SI N+ + + | |
| Sbjct: | 351 | ATGKAKKVEVTLGNADAQQQEIHKGVAVGDIVIANPDKNIKPDKKLEGVISIGTNTKPEKD | 411 |

[4734] Based on this analysis, it was predicted that these proteins and their epitopes could be useful antigens for vaccines or diagnostics.

### EXAMPLE 839

[4735] A DNA sequence (GBSx0891) was identified in S. agalactiae <SEQ ID 2535> which encodes the amino acid sequence <SEQ ID 2536>. Analysis of this protein sequence reveals the following:

```
Possible site: 29
>>> Seems to have no N-terminal signal sequence
----- Final Results -----
                            bacterial cytoplasm --- Certainty = 0.1832(Affirmative) < succ>
                              bacterial membrane --- Certainty = 0.0000(Not Clear) < succ>
                                bacterial outside --- Certainty = 0.0000(Not Clear) < succ>
```

[4736] The protein has no significant homology with any sequences in the GENPEPT database.

[4737] No corresponding DNA sequence was identified in S. pyogenes.

[4738] Based on this analysis, it was predicted that this protein and its epitopes, could be useful antigens for vaccines or diagnostics.

### EXAMPLE 840

[4739] A DNA sequence (GBSx0892) was identified in S. agalactiae <SEQ ID 2537> which encodes the amino acid sequence <SEQ ID 2538>. This protein is predicted to be carbamoyl-phosphate synthase, pyrimidine-specific, large chain, putati. Analysis of this protein sequence reveals the following:

| Possible site: 59 | | | |
|---|---|---|---|
| >>> Seems to have an uncleavable N-term signal seq | | | |
| INTEGRAL | Likelihood = −1.70 | Transmembrane | 486-502 (486-502) |

----- Final Results -----
bacterial membrane --- Certainty = 0.1680 (Affirmative) < succ>
bacterial outside --- Certainty = 0.0000 (Not Clear) < succ>
bacterial cytoplasm --- Certainty = 0.0000 (Not Clear) < succ>

[4740] The protein has homology with the following sequences in the GENPEPT database.

| >GP: CAA91005 GB: Z54240 carbamoyl-phosphate synthase [Lactobacillus | | | |
|---|---|---|---|
| plantarum] | | | |
| Identities = 117/417 (28%), Positives = 205/417 (49%), Gaps = 37/417 (8%) | | | |
| Query: | 122 | FVQVDCLVMRDSLNNCLYVSDLEYIES-NKTTGKSLAIVPSQTLSDAARQTIRDVAFDVC | 180 |
| | | + +++ VMRD+ +N + V ++E + TG S+ P QTL+D Q +RD A + | |
| Sbjct: | 213 | YKEIEFEVMRDAADNAMVVCNMENFDPVGIHTGDSIVYAPVQTLADREVQLLRDAALKII | 272 |
| Query: | 181 | RKANIIGVCYFSFLIDLNSLDYHIISLSSGLSHQSILFETITTYPVLEIATKLTVGYTFS | 240 |
| | | R I G C +D NS +Y+II ++ +S S L T YP+ ++A K+ VG | |
| Sbjct: | 273 | RALKIEGGCNVQLALDPNSFNYYIIEVNPRVSRSSALASKATGYPIAKMAAKIAVGLHLD | 332 |
| Query: | 241 | QLKHSYYPNTSAFLEPQLDYVATV--SFSFEKVDY---------------IFFARNIEQL | 283 |
| | | ++K+ T A EP LDYV + F+K + + RNIE+ | |
| Sbjct: | 333 | EIKNPVTGTTYAEFEPALDYVVCKIPRWPFDKFTHADRRLGTQMKATGEVMAIGRNIEEA | 392 |
| Query: | 284 | FLNLLEASS----HDHFPFLSDISEEDLMFALIQKKENRLAYLLEAFRRGFDLYDLSSVT | 339 |
| | | L + + H L + ++ L LI +++RL YL EA RRG+ + +L+ +T | |
| Sbjct: | 393 | TLKAVRSLEIGVHHVEESTLRSVDDDVLSDKLIHAQDDRLFYLTEAIRRGYQIDELAELT | 452 |
| Query: | 340 | KINPFYLDKCLHIVELYENLNKSQYNVDIYKEAKRYGFSDDYIASSWQISLIDMLEYRKK | 399 |
| | | KIN F+LDK LHI+E+ + L +++ AKR GF+D +A W ++ + ++R | |
| Sbjct: | 453 | KINVFFLDKLLHIIEIEQALRTHTDDIETLTVAKRNGFADQTVADYWHETIDQVRDFRLA | 512 |
| Query: | 400 | HSVAPVLKQVEQSSGVLTGHQIQYFRSYDWHSDYISSGCQKALIM----------VDKGY | 449 |
| | | H +APV K V+ +G Y+ +Y++ ++ I + L++ V+ Y | |
| Sbjct: | 513 | HKLAPVYKMVDTCAGEFASETPYYYGTYEFENESIVTKRPSVLVLGSGPIRIGQGVEFDY | 572 |
| Query: | 450 | SLVKLNELIKQIKQTHLELLIVTNQPLLIEQLNDTS--IIFDTIGIETILTIMGIEE | 504 |
| | | + V +K I++ E +I+ + P + S + F+ + IE +L ++ +E+ | |
| Sbjct: | 573 | ATV---HSVKAIQKAGYEAIIMNSNPETVSTDFSVSDKLYFEPLTIEDVLNVIELEK | 626 |

[4741] Based on this analysis, it was predicted that this protein and its epitopes, could be useful antigens for vaccines or diagnostics.

### EXAMPLE 841

[4742] A DNA sequence (GBSx0893) was identified in S. agalactiae <SEQ ID 2539> which encodes the amino acid sequence <SEQ ID 2540>. This protein is predicted to be carbamoyl phosphate synthetase small subunit (carA). Analysis of this protein sequence reveals the following:

Possible site: 27
>>> Seems to have no N-terminal signal sequence
----- Final Results -----
bacterial cytoplasm --- Certainty = 0.2709 (Affirmative) < succ>
bacterial membrane --- Certainty = 0.0000 (Not Clear) < succ>
bacterial outside --- Certainty = 0.0000 (Not Clear) < succ>

[4743] The protein has homology with the following sequences in the GENPEPT database.

| >GP: CAB89872 GB: AJ132624 carbamoyl phosphate synthetase small | | | |
|---|---|---|---|
| subunit [Lactococcus lactis] | | | |
| Identities = 188/352 (53%), Positives = 265/352 (74%) | | | |
| Query: | 1 | MAKKLLILEDGTVFEGLSFGSSLDVTGELVFCTGNTGYQEIITNPSHNGKILVFTSPLIG | 60 |
| | | M+K+LLILEDGT+FEG + G++LDVTGELVF TG TGYQE IT+ S+NG+IL FT P++G | |
| Sbjct: | 1 | MSKRLLILEDGTIFEGEALGANLDVTGELVFNTGMTGYQESITDQSYNGQILTFTYPIVG | 60 |
| Query: | 61 | NYGIHRSYSEAIIPTCLGVVVAEYSRCVSSDTSKMNLDEFLKMKKVPAMSGVDTRYLMQV | 120 |
| | | NYG++R E+I PTC VVV E +R S+ +M+ DEFLK K +P ++GVDTR + ++ | |
| Sbjct: | 61 | NYGVNRDDYESIHPTCKAVVVHEAARRPSNWRMQMSFDEFLKSKNIPGITGVDTRAITKI | 120 |
| Query: | 121 | IKEKGFVKATLAEAGDVLSHLQDQLIATVLPTNNVEQVSTKTAYPSPASGRNIVVLDFGL | 180 |
| | | ++E G +KA+L +A D + H QL ATVLPTN VE ST TAYPSP +GR +VV+DFGL | |
| Sbjct: | 121 | VREHGTMKASLVQARDEVDHQMSQLQATVLPTNQVETSSTATAYPSPNTGRKVVVVDFGL | 180 |
| Query: | 181 | KHSILRELSKRQCDVTVIPYNTSLEGIKNLYPEGIILSNGPGNPEKLQEILNTIKELQKS | 240 |
| | | KHSILRELSKR+C++TV+PYNTS + I + P+G++L+NGPG+P + E + IKE+Q | |
| Sbjct: | 181 | KHSILRELSKRECNLTVVPYNTSAKEILEMEPDGVMLTNGPGDPTDVPEAIEMIKEVQGK | 240 |
| Query: | 241 | VPMLGIGLGHQLIAMANGAEIMRLPVAKKGPNYPMRDIATGRLETVSQFNHFTVNRLNLP | 300 |
| | | +P+ GI LGHQL ++ANGA ++ +G N+ +R++ATGR++ SQ + + V+ NLP | |
| Sbjct: | 241 | IPIFGICLGHQLFSLANGATTYKMKFGHRGFNHAVREVATGRIDFTSQNHGYAVSSENLP | 300 |
| Query: | 301 | HDLLVTHEGLNDQEIVALRHRSFPVMSVQFYPEAAPGPHDVTYFFDEFLEMI | 352 |
| | | DL++TH +ND + +RH+ FP SVQF+P+AAPGPHD +Y FD+F++++ | |
| Sbjct: | 301 | EDLMITHVEINDNSVEGVRHKYFPAFSVQFHPDAAPGPHDASYLFDDFMDLM | 352 |

[4744] There is also homology to SEQ ID 2030.

[4745] Based on this analysis, it was predicted that this protein and its epitopes, could be useful antigens for vaccines or diagnostics.

### EXAMPLE 842

[4746] A DNA sequence (GBSx0894) was identified in S. agalactiae <SEQ ID 2541> which encodes the amino acid sequence <SEQ ID 2542>. Analysis of this protein sequence reveals the following:

Possible site: 57
>>> Seems to have no N-terminal signal sequence
----- Final Results -----
bacterial cytoplasm --- Certainty = 0.3646 (Affirmative) < succ>
bacterial membrane --- Certainty = 0.0000 (Not Clear) < succ>
bacterial outside --- Certainty = 0.0000 (Not Clear) < succ>

[4747] A related GBS nucleic acid sequence <SEQ ID 9967> which encodes amino acid sequence <SEQ ID 9968> was also identified.

[4748] The protein has homology with the following sequences in the GENPEPT database.

| >GP: CAB89869 GB: AJ132624 pyrimidine regulatory protein [Lactococcus | | | |
|---|---|---|---|
| lactis] | | | |
| Identities = 127/169 (75%), Positives = 147/169 (86%) | | | |
| Query: | 13 | MKRKEIIDDVTMKRAITRITYEIIERNKNLDNIVLAGIKTRGVFLAKRIQERLKQLENLD | 72 |
| | | M RKEIID++TMKRAITRITYEIIERNK LD +VL GIKTRGV+LAKRIQERL+QLE L+ | |
| Sbjct: | 1 | MARKEIIDEITMKRAITRITYEIIERNKELDKLVLIGIKTRGVYLAKRIQERLQQLEGLE | 60 |
| Query: | 73 | IPVGELDTKPFRDDMKVEVDTTTMPVDITDKDIILIDDVLYTGRTIRAAIDNLVSLGRPS | 132 |
| | | IP GELDT+PFRDD + + DTT + +DIT KD+IL+DDVLYTGRTIRAAID +V LGRP+ | |
| Sbjct: | 61 | IPFGELDTRPFRDDKQAQEDTTEIDIDITGKDVILVDDVLYTGRTIRAAIDGIVKLGRPA | 120 |
| Query: | 133 | RVSLAVLIDRGHRELPIRADYVGKNIPTSQFEEILVEVMEHDGYDRVSI | 181 |
| | | RV LAVL+DRGHRELPIRADYVGKNIPT EEI+V++ EHDG D + I | |
| Sbjct: | 121 | RVQLAVLVDRGHRELPIRADYVGKNIPTGHDEEIIVQMSEHDGNDSILI | 169 |

[4749] A related DNA sequence was identified in S. pyogenes <SEQ ID 2543> which encodes the amino acid sequence <SEQ ID 2544>. Analysis of this protein sequence reveals the following:

Possible site: 45
>>> Seems to have no N-terminal signal sequence
----- Final Results -----
bacterial cytoplasm --- Certainty = 0.3870 (Affirmative) < succ>
bacterial membrane --- Certainty = 0.0000 (Not Clear) < succ>
bacterial outside --- Certainty = 0.0000 (Not Clear) < succ>

[4750] An alignment of the GAS and GBS proteins is shown below.

| Identities = 147/171 (85%), Positives = 158/171 (91%) | | | |
|---|---|---|---|
| Query: | 13 | MKRKEIIDDVTMKRAITRITYEIIERNKNLDNIVLAGIKTRGVFLAKRIQERLKQLENLD | 72 |
| | | MK KEI+DDVTMKRAITRITYEIIERNK LDN+VLAGIKTRGVFLA+RIQERL QLE LD | |
| Sbjct: | 1 | MKTKEIVDDVTMKRAITRITYEIIERNKQLDNVVLAGIKTRGVFLARRIQERLHQLEGLD | 60 |
| Query: | 73 | IPVGELDTKPFRDDMKVEVDTTTMPVDITDKDIILIDDVLYTGRTIRAAIDNLVSLGRPS | 132 |
| | | +P+GELD KPFRDDM+VE DTT M VDIT KD+ILIDDVLYTGRTIRAAIDNLVSLGRP+ | |
| Sbjct: | 61 | LPIGELDIKPFRDDMRVEEDTTLMSVDITGKDVILIDDVLYTGRTIRAAIDNLVSLGRPA | 120 |
| Query: | 133 | RVSLAVLIDRGHRELPIRADYVGKNIPTSQFEEILVEVMEHDGYDRVSIID | 183 |
| | | RVSLAVL+DRGHRELPIRADYVGKNIPTS EEI+VEV+E DG DRVSIID | |
| Sbjct: | 121 | RVSLAVLVDRGHRELPIRADYVGKNIPTSSVEEIVVEVVEVDGRDRVSIID | 171 |

[4751] Based on this analysis, it was predicted that these proteins and their epitopes could be useful antigens for vaccines or diagnostics.

### EXAMPLE 843

[4752] A DNA sequence (GBSx0895) was identified in S. agalactiae <SEQ ID 2545> which encodes the amino acid sequence <SEQ ID 2546> (rluD). Analysis of this protein sequence reveals the following:

Possible site: 35
>>> Seems to have no N-terminal signal sequence
----- Final Results -----
bacterial cytoplasm --- Certainty = 0.0687 (Affirmative) < succ>
bacterial membrane --- Certainty = 0.0000 (Not Clear) < succ>
bacterial outside --- Certainty = 0.000 (Not Clear) < succ>

[4753] A related GBS nucleic acid sequence <SEQ ID 9969> which encodes amino acid sequence <SEQ ID 9970> was also identified.

[4754] The protein has homology with the following sequences in the GENPEPT database.

| >GP: BAB06261 GB: AP001515 unknown conserved protein [Bacillus halodurans] | | | |
|---|---|---|---|
| Identities = 178/290 (61%), Positives = 216/290 (74%), Gaps = 2/290 (0%) | | | |
| Query: | 17 | GVRLDKAL-ADNSELSRSQANEEIKKGIVLVNGQVKKAKYTVQEGDRITFDIPKEEVLDY | 75 |
| | | G R+DK L A E SR+Q + IK G VL+NG+ K+ Y V+ GD + +P+ EVL+ | |
| Sbjct: | 15 | GERIDKFLTAQGEEWSRTQVQQWIKDGHVLINGRTIKSNYKVETGDTLELFVPEPEVLEV | 74 |
| Query: | 76 | QAENIPLDIIYQDDDVAVVNKPQGMVVHPSAGHSSGTLVNALMYHIKDLSSINGVVRPGI | 135 |
| | | ENIP++IIY+D+DVAVVNKP+GMVVHP+ GH++GTLVNALMYH DLSSINGVVRPGI | |
| Sbjct: | 75 | VPENIPIEIIYEDEDVAVVNKPRGMVVHPAPGHTTGTLVNALMYHCNDLSSINGVVRPGI | 134 |
| Query: | 136 | VHRIDKDTSGLLMVAKNDRAHQVLAEELKDKKSLRKYLAIVHGNLPNDRGVIEAPIGRSD | 195 |
| | | VHRIDKDTSGLLM+AKNDRAH+ L +LK K + R Y AIVHGN+P+D G I+APIGR | |
| Sbjct: | 135 | VHRIDKDTSGLLMIAKNDRAHESLVNQLKAKTTERVYQAIVHGNIPHDHGTIDAPIGRDK | 194 |
| Query: | 196 | KDRKKQAVTAK-GKPAITRFHVLERFGDYTLVELSLETGRTHQIRVHMAYIGHPLAGDPV | 254 |
| | | DR+ VT + + A+T F VLERFGD+T VE LETGRTHQIRVH YIG PLAGDP | |
| Sbjct: | 195 | VDRQSMTVTEENSRDAVTHFTVLERFGDFTFVECQLETGRTHQIRVHFKYIGFPLAGDPK | 254 |
| Query: | 255 | YGPRKTLGGKGQFLHAQTLGFTHPSNGENLIFSVEVPEIFQTTLEKLRKN | 304 |
| | | YGP+KTL GQ LHAQ LGF HP GE + F VE+PE + + +L+ N | |
| Sbjct: | 255 | YGPKKTLSIDGQALHAQKLGFEHPRTGEFMRFKVEMPEEMKKLIRQLQNN | 304 |

[4755] A related DNA sequence was identified in S. pyogenes <SEQ ID 2547> which encodes the amino acid sequence <SEQ ID 2548>. Analysis of this protein sequence reveals the following:

Possible site: 27
>>> Seems to have no N-terminal signal sequence
----- Final Results -----
bacterial cytoplasm --- Certainty = 0.2455 (Affirmative) < succ>
bacterial membrane --- Certainty = 0.0000 (Not Clear) < succ>
bacterial outside --- Certainty = 0.0000 (Not Clear) < succ>

[4756] An alignment of the GAS and GBS proteins is shown below.

| Identities = 239/295 (81%), Positives = 265/295 (89%) | | | |
|---|---|---|---|
| Query: | 9 | MEITIKIAGVRLDKALADNSELSRSQANEEIKKGIVLVNGQVKKAKYTVQEGDRITFDIP | 68 |
| | | MEI + +G RLDKALAD S LSR QAN++IK+G+VLVNGQ KKAKYTVQ GD I F++P | |
| Sbjct: | 1 | MEINVITSGQRLDKALADLSPLSRGQANDQIKQGLVLVNGQQKKAKYTVQAGDVICFELP | 60 |
| Query: | 69 | KEEVLDYQAENIPLDIIYQDDDVAVVNKPQGMVVHPSAGHSSGTLVNALMYHIKDLSSIN | 128 |
| | | KEEVL+YQA+NIPLDIIY+DD +A++NKPQGMVVHPSAGH SGT+VNALMYHIKDLSSIN | |
| Sbjct: | 61 | KEEVLEYQAQNIPLDIIYEDDALAIINKPQGMVVHPSAGHPSGTMVNALMYHIKDLSSIN | 120 |
| Query: | 129 | GVVRPGIVHRIDKDTSGLLMVAKNDRAHQVLAEELKDKKSLRKYLAIVHGNLPNDRGVIE | 188 |
| | | GVVRPGIVHRIDKDTSGLLMVAK D AHQ LAEELK KKSLRKYLAIVHGNLPNDRG+IE | |
| Sbjct: | 121 | GVVRPGIVHRIDKDTSGLLMVAKTDAAHQALAEELKAKKSLRKYLAIVHGNLPNDRGMIE | 180 |
| Query: | 189 | APIGRSDKDRKKQAVTAKGKPAITRFHVLERFGDYTLVELSLETGRTHQIRVHMAYIGHP | 248 |
| | | APIGRS+KDRKKQAVTAKGK A+TRF VLERFGDY+LVEL LETGRTHQIRVHMAYIGHP | |
| Sbjct: | 181 | APIGRSEKDRKKQAVTAKGKEAVTRFTVLERFGDYSLVELQLETGRTHQIRVHMAYIGHP | 240 |
| Query: | 249 | LAGDPVYGPRKTLGGKGQFLHAQTLGFTHPSNGENLIFSVEVPEIFQTTLEKLRK | 303 |
| | | +AGDP+YGPRKTL G GQFLHA+TLG THP G+ +IF+VE PEIFQ L+ LRK | |
| Sbjct: | 241 | VAGDPLYGPRKTLSGHGQFLHAKTLGLTHPMTGKEMIFTVEAPEIFQKVLKLLRK | 295 |

[4757] Based on this analysis, it was predicted that these proteins and their epitopes could be useful antigens for vaccines or diagnostics.

### EXAMPLE 844

[4758] A DNA sequence (GBSx0896) was identified in S. agalactiae <SEQ ID 2549> which encodes the amino acid sequence <SEQ ID 2550>. Analysis of this protein sequence reveals the following:

Possible site: 33
>>> Seems to have no N-terminal signal sequence
----- Final Results -----
bacterial cytoplasm --- Certainty = 0.0496 (Affirmative) < succ>
bacterial membrane --- Certainty = 0.0000 (Not Clear) < succ>
bacterial outside --- Certainty = 0.0000 (Not Clear) < succ>

[4759] The protein has homology with the following sequences in the GENPEPT database.

| >GP: AAD53064 GB: AF163833 CpsY [Streptococcus agalactiae] | | | |
|---|---|---|---|
| Identities = 105/297 (35%), Positives = 163/297 (54%), Gaps = 4/297 (1%) | | | |
| Query: | 1 | MNIQQLRYVVAIANSGTFREAAAKLFVSQPSLSVAVRDLETELGFQIFTRTTTGAVLTNQ | 60 |
| | | M IQQL+YV+ I +G+ EAA +L+++QPSLS AVR+LETE+G QIF R G LT | |
| Sbjct: | 1 | MRIQQLQYVIKIVETGSMNEAAKQLYITQPSLSNAVRNLETEMGIQIFIRNPKGITLTKD | 60 |
| Query: | 61 | GMTFYENALEVVKSFDSFEKQFSQSEATEQEFSIASQHYDFLPPLITAFSKCNDNFSY-F | 119 |
| | | GM F A ++++ E+++ + + FS++SQHY F+ A D Y | |
| Sbjct: | 61 | GMEFLSYARQILEQTALLEERYKGDNTSRELFSVSSQHYAFVVNAFVALFNGTDMTQYEL | 120 |
| Query: | 120 | RIFESTTIRILDEVAQGNSEIGIIYINSQNKKGLLQRLDKLGLEFVELIPFKTHIYLGKD | 179 |
| | | + E+ T I+D+V SEIG++++NS N+ L + D L L HI++ K | |
| Sbjct: | 121 | FLRETRTWEIIDDVKNFRSEIGVLFLNSYNRDVLTKLFDDNSLIATTLFTTTPHIFVSKS | 180 |
| Query: | 180 | HPLASKTSLIMTDLEGLPTVRFTQDRDDYRYYSENFVEVLDSSVTYNVTDRATLNGILER | 239 |
| | | +PLA++ L M DLE P + + Q + Y+SE + + + V+DRATL ++ | |
| Sbjct: | 181 | NPLANRKKLSMKDLEDYPYLSYDQGLHNSFYFSEEMMSQIPHPKSIVVSDRATLFNLMIG | 240 |
| Query: | 240 | TQAYATGSGFLDSRSVNG--ITVIPLEDHLDNQMIYIKRKDRNLSQMALKFVAVMEE | 294 |
| | | Y +G L+S+ +NG I IPL+ ++YI+ NLS+M KF+ + E | |
| Sbjct: | 241 | LDGYTVATGILNSK-LNGDEIVAIPLDVDDVIDIVYIRHDKANLSKMGQKFIDYLLE | 296 |

[4760] A related DNA sequence was identified in S. pyogenes <SEQ ID 2551> which encodes the amino acid sequence <SEQ ID 2552>. Analysis of this protein sequence reveals the following:

Possible site: 13
>>> Seems to have no N-terminal signal sequence
----- Final Results -----
bacterial cytoplasm --- Certainty = 0.1252 (Affirmative) < succ>
bacterial membrane --- Certainty = 0.000 (Not Clear) < succ>
bacterial outside --- Certainty = 0.0000 (Not Clear) < succ>

[4761] An alignment of the GAS and GBS proteins is shown below.

| Identities = 217/296 (73%), Positives = 253/296 (85%) | | | |
|---|---|---|---|
| Query: | 1 | MNIQQLRYVVAIANSGTFREAAAKLFVSQPSLSVAVRDLETELGFQIFTRTTTGAVLTNQ | 60 |
| | | MNIQQLRYVVAIAN+GTFREAA+KLFVSQPSLSV+++DLE ELGFQIF RTT+G VLT+Q | |
| Sbjct: | 1 | MNIQQLRYVVAIANNGTFREAASKLFVSQPSLSVSIKDLEAELGFQIFNRTTSGTVLTSQ | 60 |
| Query: | 61 | GMTFYENALEVVKSFDSFEKQFSQSEATEQEFSIASQHYDFLPPLITAFSKCNDNFSYFR | 120 |
| | | G+ FYE ALEVVKSFDSFEK FSQ++ + EFSIASQHYDFLPPLITAFS+ D FR | |
| Sbjct: | 61 | GLVFYEKALEVVKSFDSFEKTFSQADLDQNEFSIASQHYDFLPPLITAFSQQYDGHRVFR | 120 |
| Query: | 121 | IFESTTIRILDEVAQGNSEIGIIYINSQNKKGLLQRLDKLGLEFVELIPFKTHIYLGKDH | 180 |
| | | IFESTTI+ILDEVAQGNSEIGIIY+N N+KGL QR+DKLGLE+V LIPF THIYL K H | |
| Sbjct: | 121 | IFESTTIQILDEVAQGNSEIGIIYLNVDNQKGLFQRMDKLGLEYVSLIPFTTHIYLSKTH | 180 |
| Query: | 181 | PLASKTSLIMTDLEGLPTVRFTQDRDDYRYYSENFVEVLDSSVTYNVTDRATLNGILERT | 240 |
| | | PLA++ +L + D++GLP VRFTQ+RD+Y YYSENFV+ + YNV+DRATLNGILERT | |
| Sbjct: | 181 | PLANREALYLNDIQGLPAVRFTQERDEYLYYSENFVDTSECPRIYNVSDRATLNGILERT | 240 |
| Query: | 241 | QAYATGSGFLDSRSVNGITVIPLEDHLDNQMIYIKRKDRNLSQMALKFVAVMEEYF | 296 |
| | | A+ATGSGFLD RSVNGI VIPL DH+DNQMIY+KRKD+NLS FV ++++YF | |
| Sbjct: | 241 | NAFATGSGFLDHRSVNGIKVIPLADHIDNQMIYVKRKDKNLSVAGATFVTILKDYF | 296 |

[4762] Based on this analysis, it was predicted that these proteins and their epitopes could be useful antigens for vaccines or diagnostics.

### EXAMPLE 845

[4763] A DNA sequence (GBSx0897) was identified in S. agalactiae <SEQ ID 2553> which encodes the amino acid sequence <SEQ ID 2554>. This protein is predicted to be 50S ribosomal protein L27 (rpmA). Analysis of this protein sequence reveals the following:

Possible site: 36
>>> Seems to have no N-terminal signal sequence
----- Final Results -----
bacterial cytoplasm --- Certainty = 0.0976 (Affirmative) < succ>
bacterial membrane --- Certainty = 0.0000 (Not Clear) < succ>
bacterial outside --- Certainty = 0.0000 (Not Clear) < succ>

[4764] The protein has homology with the following sequences in the GENPEPT database.

| >GP: CAB14754 GB: Z99118 ribosomal protein L27 (BL24) [Bacillus subtilis] | | | |
|---|---|---|---|
| Identities = 70/90 (77%), Positives = 80/90 (88%) | | | |
| Query: | 8 | NLQLFAHKKGGGSTSNGRDSQAKRLGAKAADGQTVSGGSILYRQRGTHIYPGANVGRGGD | 67 |
| | | +LQ FA KKG GST NGRDS+AKRLGAK ADGQ V+GGSILYRQRGT IYPG NVGRGGD | |
| Sbjct: | 5 | DLQFFASKKGVGSTKNGRDSEAKRLGAKRADGQFVTGGSILYRQRGTKIYPGENVGRGGD | 64 |
| Query: | 68 | DTLFAKVEGVVRFERKGRDKKQVSVYPIAK | 97 |
| | | DTLFAK++G V+FER GRD+K+VSVYP+A+ | |
| Sbjct: | 65 | DTLFAKIDGTVKFERFGRDRKKVSVYPVAQ | 94 |

[4765] A related DNA sequence was identified in S. pyogenes <SEQ ID 2555> which encodes the amino acid sequence <SEQ ID 2556>. Analysis of this protein sequence reveals the following:

Possible site: 36
>>> Seems to have no N-terminal signal sequence
----- Final Results -----
bacterial cytoplasm --- Certainty = 0.0976 (Affirmative) < succ>
bacterial membrane --- Certainty = 0.0000 (Not Clear) < succ>
bacterial outside --- Certainty = 0.0000 (Not Clear) < succ>

[4766] An alignment of the GAS and GBS proteins is shown below.

| Identities = 95/97 (97%), Positives = 96/97 (98%) | | | |
|---|---|---|---|
| Query: | 1 | MLKMNLANLQLFAHKKGGGSTSNGRDSQAKRLGAKAADGQTVSGGSILYRQRGTHIYPGA | 60 |
| | | MLKMNLANLQLFAHKKGGGSTSNGRDSQAKRLGAKAADGQTVSGGSILYRQRGTHIYPG | |
| Sbjct: | 1 | MLKMNLANLQLFAHKKGGGSTSNGRDSQAKRLGAKAADGQTVSGGSILYRQRGTHIYPGV | 60 |
| Query: | 61 | NVGRGGDDTLFAKVEGVVRFERKGRDKKQVSVYPIAK | 97 |
| | | NVGRGGDDTLFAKVEGVVRFERKGRDKKQVSVYP+AK | |
| Sbjct: | 61 | NVGRGGDDTLFAKVEGVVRFERKGRDKKQVSVYPVAK | 97 |

[4767] Based on this analysis, it was predicted that these proteins and their epitopes could be useful antigens for vaccines or diagnostics.

### EXAMPLE 846

[4768] A DNA sequence (GBSx0898) was identified in S. agalactiae <SEQ ID 2557> which encodes the amino acid sequence <SEQ ID 2558>. Analysis of this protein sequence reveals the following:

| Possible site: 25 | | | |
|---|---|---|---|
| >>> Seems to have no N-terminal signal sequence | | | |
| INTEGRAL | Likelihood = −0.75 | Transmembrane | 32-48 (32-48) |

----- Final Results -----
bacterial membrane --- Certainty = 0.1298 (Affirmative) < succ>
bacterial outside --- Certainty = 0.0000 (Not Clear) < succ>
bacterial cytoplasm --- Certainty = 0.0000 (Not Clear) < succ>

[4769] The protein has homology with the following sequences in the GENPEPT database.

| >GP: BAB06729 GB: AP001517 unknown conserved protein in B. subtilis | | | |
|---|---|---|---|
| [Bacillus halodurans] | | | |
| Identities = 33/107 (30%), Positives = 63/107 (58%), Gaps = 4/107 (3%) | | | |
| Query: | 1 | MIKATFTRNQSGYLYSAEISGHAGSGEYGFDVICAAVSTLSINFINSLEALTTCQAQLII | 60 |
| | | MI F RN+ + S +SGHA +G YG D++CA S +++ +N++ AL CQ +L+ | |
| Sbjct: | 1 | MIDVVFERNKQNDIVSFTMSGHADAGPYGQDLVCAGASAVALGTVNAIIAL--CQVELVT | 58 |
| Query: | 61 | N-DVEGGYMKIDL-SSIPQHKEDKVQLLFESYLLGMTNLSKDSSEFV | 105 |
| | | 10 + EGG+++ + + + + KVQLL E + + ++++ E + | |
| Sbjct: | 59 | EMENEGGFLRCRVPNDLEETTFEKVQLLLEGMNISLQSIAESYGEHI | 105 |

[4770] A related DNA sequence was identified in S. pyogenes <SEQ ID 2559> which encodes the amino acid sequence <SEQ ID 2560>. Analysis of this protein sequence reveals the following:

| Possible site: 52 | | | |
|---|---|---|---|
| >>> Seems to have no N-terminal signal sequence | | | |
| INTEGRAL | Likelihood = −0.59 | Transmembrane | 32-48 (32-48) |

----- Final Results -----
bacterial membrane --- Certainty = 0.1235 (Affirmative) < succ>
bacterial outside --- Certainty = 0.0000 (Not Clear) < succ>
bacterial cytoplasm --- Certainty = 0.0000 (Not Clear) < succ>

[4771] The protein has homology with the following sequences in the databases:

| >GP: BAB06729 GB: AP001517 unknown conserved protein in B. subtilis | | | |
|---|---|---|---|
| [Bacillus halodurans] | | | |
| Identities = 33/109 (30%), Positives = 60/109 (54%), Gaps = 4/109 (3%) | | | |
| Query: | 1 | MIKAIFTRQKNGQLSSVTLTGHAGSGKHGFDIVCASVSTLAINFVNSLEVLADCQALVDL | 60 |
| | | MI +F R K + S T++GHA +G +G D+VCA S +A+ VN++ L + + ++ | |
| Sbjct: | 1 | MIDVVFERNKQNDIVSFTMSGHADAGPYGQDLVCAGASAVALGTVNAIIALCQVELVTEM | 60 |
| Query: | 61 | NDVEGGYMAITIP---PHDNKEEVQLLFESFLLGMTSLAKDSSKFVNTQ | 106 |
| | | + EGG++ +P E+VQLL E + + S+A+ + + + | |
| Sbjct: | 61 | EN-EGGFLRCRVPNDLEETTFEKVQLLLEGMNISLQSIAESYGEHIQIE | 108 |

[4772] An alignment of the GAS and GBS proteins is shown below.

| Identities = 67/110 (60%), Positives = 90/110 (80%), Gaps = 2/110 (1%) | | | |
|---|---|---|---|
| Query: | 1 | MIKATFTRNQSGYLYSAEISGHAGSGEYGFDVICAAVSTLSINFINSLEALTTCQAQLII | 60 |
| | | MIKA FTR ++G L S ++GHAGSG++GFD++CA+VSTL+INF+NSLE L CQA + + | |
| Sbjct: | 1 | MIKAIFTRQKNGQLSSVTLTGHAGSGKHGFDIVCASVSTLAINFVNSLEVLADCQALVDL | 60 |
| Query: | 61 | NDVEGGYMKIDLSSIPQHKEDKVQLLFESYLLGMTNLSKDSSEFVSTVVM | 110 |
| | | NDVEGGYM I + P +++VQLLFES+LLGMT+L+KDSS+FV+T V+ | |
| Sbjct: | 61 | NDVEGGYMAITIP--PHDNKEEVQLLFESFLLGMTSLAKDSSKFVNTQVI | 108 |

[4773] Based on this analysis, it was predicted that these proteins and their epitopes could be useful antigens for vaccines or diagnostics.

### EXAMPLE 847

[4774] A DNA sequence (GBSx0899) was identified in S. agalactiae <SEQ ID 2561> which encodes the amino acid sequence <SEQ ID 2562>. This protein is predicted to be ribosomal protein L21 (rplU). Analysis of this protein sequence reveals the following:

Possible site: 57
>>> Seems to have no N-terminal signal sequence
----- Final Results -----
bacterial cytoplasm --- Certainty = 0.2972 (Affirmative) < succ>
bacterial membrane --- Certainty = 0.0000 (Not Clear) < succ>
bacterial outside --- Certainty = 0.0000 (Not Clear) < succ>

[4775] The protein has homology with the following sequences in the GENPEPT database.

| >GP: CAB14756 GB: Z99118 ribosomal protein L21 (BL20) [Bacillus subtilis] | | | |
|---|---|---|---|
| Identities = 67/101 (66%), Positives = 78/101 (76%) | | | |
| Query: | 4 | YAIIKTGGKQVKVEVGQAIYVEKLDVEAGAEVTFNEVVLVGGETTKVGTPVVEGATVVGT | 63 |
| | | YAIIKTGGKQ+KVE GQ +Y+EKL EAG VTF +V+ VGG+ KVG P VEGATV | |
| Sbjct: | 2 | YAIIKTGGKQIKVEEGQTVYIEKLAAEAGETVTFEDVLFVGGDNVKVGNPTVEGATVTAK | 61 |
| Query: | 64 | VEKQGKQKKVVSYKYKPKKGSHRKQGHRQPYTKVVINAINA | 104 |
| | | VEKQG+ KK+ ++YKPKK H+KQGHRQPYTKV I INA | |
| Sbjct: | 62 | VEKQGRAKKITVFRYKPKKNVHKKQGHRQPYTKVTIEKINA | 102 |

[4776] A related DNA sequence was identified in S. pyogenes <SEQ ID 2563> which encodes the amino acid sequence <SEQ ID 2564>. Analysis of this protein sequence reveals the following:

Possible site: 33
>>> Seems to have no N-terminal signal sequence
----- Final Results -----
bacterial cytoplasm --- Certainty = 0.3026 (Affirmative) < succ>
bacterial membrane --- Certainty = 0.0000 (Not Clear) < succ>
bacterial outside --- Certainty = 0.0000 (Not Clear) < succ>

[4777] An alignment of the GAS and GBS proteins is shown below.

| Identities = 97/104 (93%), Positives = 101/104 (96%) | | | |
|---|---|---|---|
| Query: | 1 | MSTYAIIKTGGKQVKVEVGQAIYVEKLDVEAGAEVTFNEVVLVGGETTKVGTPVVEGATV | 60 |
| | | MSTYAIIKTGGKQVKVEVGQAIYVEK+D EAGAEVTFNEVVLVGG+ T VGTPVVEGATV | |
| Sbjct: | 1 | MSTYAIIKTGGKQVKVEVGQAIYVEKIDAEAGAEVTFNEVVLVGGDKTVVGTPVVEGATV | 60 |
| Query: | 61 | VGTVEKQGKQKKVVSYKYKPKKGSHRKQGHRQPYTKVVINAINA | 104 |
| | | VGTVEKQGKQKKVV++KYKPKKGSHRKQGHRQPYTKVVINAINA | |
| Sbjct: | 61 | VGTVEKQGKQKKVVTFKYKPKKGSHRKQGHRQPYTKVVINAINA | 104 |

[4778] Based on this analysis, it was predicted that these proteins and their epitopes could be useful antigens for vaccines or diagnostics.

### EXAMPLE 848

[4779] A DNA sequence (GBSx0900) was identified in S. agalactiae <SEQ ID 2565> which encodes the amino acid sequence <SEQ ID 2566>. Analysis of this protein sequence reveals the following:

Possible site: 16
>>> Seems to have no N-terminal signal sequence
----- Final Results -----
bacterial cytoplasm --- Certainty = 0.1032 (Affirmative) < succ>
bacterial membrane --- Certainty = 0.0000 (Not Clear) < succ>
bacterial outside --- Certainty = 0.0000 (Not Clear) < succ>

[4780] A related GBS nucleic acid sequence <SEQ ID 9369> which encodes amino acid sequence <SEQ ID 9370> was also identified.

[4781] The protein has homology with the following sequences in the GENPEPT database.

| >GP: CAB14809 GB: Z99118 excinuclease ABC (subunit C) [Bacillus subtilis] | | | |
|---|---|---|---|
| Identities = 221/373 (59%), Positives = 288/373 (76%) | | | |
| Query: | 1 | MKSAAMTMEFERAAEYRDLIEAISLLRTKQRVIHQDMKDRDVFGYFVDKGWMCVQVFFVR | 60 |
| | | M AA +EFERA E RD I I KQ++ D+ DRDVF Y DKGWMCVQVFF+R | |
| Sbjct: | 206 | MHEAAENLEFERAKELRDQIAHIESTMEKQKMTMNDLVDRDVFAYAYDKGWMCVQVFFIR | 265 |
| Query: | 61 | NGKLIQRDVNMFPYYNEPEEDFLTYIGQFYQDTKHFLPKEVFIPQDIDAKSVETIVGCKI | 120 |
| | | GKLI+RDV+MFP Y E +E+FLT+IGQFY HFLPKE+ +P ID +E ++ + | |
| Sbjct: | 266 | QGKLIERDVSMFPLYQEADEEFLTFIGQFYSKNNHFLPKEILVPDSIDQSMIEQLLETNV | 325 |
| Query: | 121 | VKPQRGEKKQLVNLAIKNARVSLQQKFDLLEKDIRKTHGAIENLGNLLNIPKPVRIEAFD | 180 |
| | | +P++G KK+L+ LA KNA+++L++KF L+E+D ++ GA++ LG LNI P RI AFD | |
| Sbjct: | 326 | HQPKKGPKKELLMLAHKNAKIALKEKFSLIERDEERSIGAVQKLGEALNIYTPHRIVAFD | 385 |
| Query: | 181 | NSNIQGTSPVAAMVVFVNGKPSKKDYRKFKIKTVIGPDDYASMREVIHRRYSRVLKDGLT | 240 |
| | | NSNIQGT+PV+AM+VF++GKP KK+YRK+KIKTV GPDDY SMREV+ RRY+RVL++ L | |
| Sbjct: | 386 | NSNIQGTNPVSAMIVFIDGKPYKKEYRKYKIKTVTGPDDYGSMREVVRRRYTRVLRENLP | 445 |
| Query: | 241 | PPDLIVIDGGQGQVNIARDVIENQFGLAIPIAGLQKNDKHQTHELLFGDPLEVVELPRNS | 300 |
| | | PDLI+IDGG+GQ+N ARDVIEN+ GL IPIAGL K++KH+T LL GDPLEV L RNS | |
| Sbjct: | 446 | LPDLIIIDGGKGQINAARDVIENELGLDIPIAGLAKDEKHRTSNLLIGDPLEVAYLERNS | 505 |
| Query: | 301 | EEFFLLHRIQDEVHRFAITFHRQLRSKNSFSSKLDGITGLGPKRKQLLMKHFKSLPNIQK | 360 |
| | | +EF+LL RIQDEVHRFAI+FHRQ+R K++F S LD I G+G KRK++L+KHF S+ +++ | |
| Sbjct: | 506 | QEFYLLQRIQDEVHRFAISFHRQIRGKSAFQSVLDDIPGIGEKRKKMLLKHFGSVKKMKE | 565 |
| Query: | 361 | AEIEDIIMCGIPR | 373 |
| | | A +EDI G+P+ | |
| Sbjct: | 566 | ASLEDIKKAGVPQ | 578 |

[4782] A related DNA sequence was identified in S. pyogenes <SEQ ID 2567> which encodes the amino acid sequence <SEQ ID 2568>. Analysis of this protein sequence reveals the following:

Possible site: 53
>>> Seems to have no N-terminal signal sequence
----- Final Results -----
bacterial cytoplasm --- Certainty = 0.4332 (Affirmative) < succ>
bacterial membrane --- Certainty = 0.0000 (Not Clear) < succ>
bacterial outside --- Certainty = 0.0000 (Not Clear) < succ>

[4783] An alignment of the GAS and GBS proteins is shown below.

| Identities = 289/385 (75%), Positives = 334/385 (86%) | | | |
|---|---|---|---|
| Query: | 1 | MKSAAMTMEFERAAEYRDLIEAISLLRTKQRVIHQDMKDRDVFGYFVDKGWMCVQVFFVR | 60 |
| | | M +A+ M FERAAEYRDLI I+ +RTKQRV+ +D++DRD+FGY+VDKGWMCVQVFFVR | |
| Sbjct: | 206 | MLAASKEMAFERAAEYRDLISGIATMRTKQRVMSKDLQDRDIFGYYVDKGWMCVQVFFVR | 265 |
| Query: | 61 | NGKLIQRDVNMFPYYNEPEEDFLTYIGQFYQDTKHFLPKEVFIPQDIDAKSVETIVGCKI | 120 |
| | | GKLIQRDVN+FPYY + EEDFLTY+GQFYQD +HF+PKEVFIP+ ID + V IV RI | |
| Sbjct: | 266 | QGKLIQRDVNLFPYYTDAEEDFLTYMGQFYQDKQHFIPKEVFIPEAIDEELVAAIVPTKI | 325 |
| Query: | 121 | VKPQRGEKKQLVNLAIKNARVSLQQKFDLLEKDIRKTHGAIENLGNLLNIPKPVRIEAFD | 180 |
| | | +KP+RGEKKQLV LA KNARVSLQQKFDLLEKDI+KT GAIENLG LL I KPVRIEAFD | |
| Sbjct: | 326 | IKPKRGEKKQLVALATKNARVSLQQKFDLLEKDIKKTSGAIENLGQLLRIDKPVRIEAFD | 385 |
| Query: | 181 | NSNIQGTSPVAAMVVFVNGKPSKKDYRKFKIKTVIGPDDYASMREVIHRRYSRVLKDGLT | 240 |
| | | NSNIQGTSPVAAMVVFV+GKPSKKDYRKFKIKTV+GPDDYASMREV+ RRYSRV K+GL | |
| Sbjct: | 386 | NSNIQGTSPVAAMVVFVDGKPSKKDYRKFKIKTVVGPDDYASMREVLFRRYSRVKKEGLQ | 445 |
| Query: | 241 | PPDLIVIDGGQGQVNIARDVIENQFGLAIPIAGLQKNDKHQTHELLFGDPLEVVELPRNS | 300 |
| | | P+LI++DGG GQVN+A+DVIE Q GL IP+AGLQKNDKHQTH+LLFG+PLEVV LPR S | |
| Sbjct: | 446 | APNLIIVDGGVGQVNVAKDVIEKQLGLTIPVAGLQKNDKHQTHDLLFGNPLEVVPLPRRS | 505 |
| Query: | 301 | EEFFLLHRIQDEVHRFAITFHRQLRSKNSFSSKLDGITGLGPKRKQLLMKHFKSLPNIQK | 360 |
| | | EEFFLLHRIQDEVHRFA+TFHRQ+R KNSFSS LD I+GLGPKRKQLL++HFK++ I | |
| Sbjct: | 506 | EEFFLLHRIQDEVHRFAVTFHRQVRRKNSFSSTLDHISGLGPKRKQLLLRHFKTITAIAS | 565 |
| Query: | 361 | AEIEDIIMCGIPRTVAESLRDSLND | 385 |
| | | A E+I GIP+TV E+++ + D | |
| Sbjct: | 566 | ATSEEIQALGIPKTVVEAIQQQITD | 590 |

[4784] Based on this analysis, it was predicted that these proteins and their epitopes could be useful antigens for vaccines or diagnostics.

### EXAMPLE 849

[4785] A DNA sequence (GBSx0901) was identified in S. agalactiae <SEQ ID 2569> which encodes the amino acid sequence <SEQ ID 2570>. Analysis of this protein sequence reveals the following:

Possible site: 16
>>> Seems to have no N-terminal signal sequence
----- Final Results -----
bacterial cytoplasm --- Certainty = 0.2491 (Affirmative) < succ>
bacterial membrane --- Certainty = 0.0000 (Not Clear) < succ>
bacterial outside --- Certainty = 0.0000 (Not Clear) < succ>

[4786] The protein has no significant homology with any sequences in the GENPEPT database.

[4787] No corresponding DNA sequence was identified in S. pyogenes.

[4788] Based on this analysis, it was predicted that this protein and its epitopes, could be useful antigens for vaccines or diagnostics.

### EXAMPLE 850

[4789] A DNA sequence (GBSx0902) was identified in S. agalactiae <SEQ ID 2571> which encodes the amino acid sequence <SEQ ID 2572>. Analysis of this protein sequence reveals the following:

Possible site: 55
>>> Seems to have no N-terminal signal sequence
----- Final Results -----
bacterial cytoplasm --- Certainty = 0.3349 (Affirmative) < succ>
bacterial membrane --- Certainty = 0.0000 (Not Clear) < succ>
bacterial outside --- Certainty = 0.0000 (Not Clear) < succ>

[4790] The protein has homology with the following sequences in the GENPEPT database.

| >GP: BAA86651 GB: AB033763 glycerophosphoryl diester phosphodiesterase | | | |
|---|---|---|---|
| homologue [Staphylococcus aureus] | | | |
| Identities = 50/202 (24%), Positives = 96/202 (46%), Gaps = 15/202 (7%) | | | |
| Query: | 1 | MDVIMTKDHKLVVIHDDNLKRLSGMNKDVSKLTLDQVTKIPIHQ---GRFA-SHIPSFTE | 56 |
| | | +DV +TKD +L++IHDD L+R + M+ ++++L D++ +F H+P+F + | |
| Sbjct: | 36 | LDVAITKDEQLIIIHDDYLERTTNMSGEITELNYDEIKDASAGSWFGEKFKDEHLPTFDD | 95 |
| Query: | 57 | FMKTAQSLDQKIMIELKPY-NQNLDIYADEFIKEFKE----LRLSTKHKVMSLNLTLIEK | 111 |
| | | +K A + + +ELK N + +K+ +E L + + + S N+ L++ | |
| Sbjct: | 96 | VVKIANEYNMNLNVELKGITGPNGLALSKSMVKQVEEQLTNLNQNQEVLISSFNVVLVKL | 155 |
| Query: | 112 | VEKKLPQLDTGYLIPL-----HWGTLQNH-NVDFYGIEEFSYNDWIAYLAQEYNKQLYVW | 165 |
| | | E+ +PQ + + W TL ++ N E+ + +E +L VW | |
| Sbjct: | 156 | AEEIMPQYNRAVIFHTTSFREDWRTLLDYCNAKIVNTEDAKLTKAKVKMVKEAGYELNVW | 215 |
| Query: | 166 | TINRDNLMIRYLQSPVNGIITD | 187 |
| | | T+N+ + V+GI TD | |
| Sbjct: | 216 | TVNKPARANQLANWGVDGIFTD | 237 |

[4791] A related DNA sequence was identified in S. pyogenes <SEQ ID 2573> which encodes the amino acid sequence <SEQ ID 2574>. Analysis of this protein sequence reveals the following:

| Possible site: 36 | | | |
|---|---|---|---|
| >>> Seems to have no N-terminal signal sequence | | | |
| INTEGRAL | Likelihood = −12.26 | Transmembrane | 239-255 (227-260) |
| INTEGRAL | Likelihood = −9.45 | Transmembrane | 80-96 (78-108) |
| INTEGRAL | Likelihood = −9.13 | Transmembrane | 137-153 (131-160) |
| INTEGRAL | Likelihood = −4.94 | Transmembrane | 278-294 (277-295) |
| INTEGRAL | Likelihood = −3.56 | Transmembrane | 36-52 (33-55) |
| INTEGRAL | Likelihood = −3.56 | Transmembrane | 188-204 (185-206) |
| INTEGRAL | Likelihood = −3.35 | Transmembrane | 314-330 (310-331) |

----- Final Results -----
bacterial membrane --- Certainty = 0.5904 (Affirmative) < succ>
bacterial outside --- Certainty = 0.0000 (Not Clear) < succ>
bacterial cytoplasm --- Certainty = 0.0000 (Not Clear) < succ>

[4792] The protein has homology with the following sequences in the databases:

| >GP: CAB12801 GB: Z99109 similar to glycerophosphodiester | | | |
|---|---|---|---|
| phosphodiesterase [Bacillus subtilis] | | | |
| Identities = 67/244 (27%), Positives = 110/244 (44%), Gaps = 14/244 (5%) | | | |
| Query: | 344 | VIAHRGLVSAGVENSLEALEGAKKAGSDYVELDLILTKDNHFVVSHDNRLKRLAGVNKTI | 403 |
| | | +IAHRG EN++ A + A K +D +ELD+ LTKD VV HD+R+ R + + | |
| Sbjct: | 3 | IIAHRGASGYAPENTIAAFDLAVKMNADMIELDVQLTKDRQIVVIHDDRVDRTTNGSGFV | 62 |
| Query: | 404 | RNLTLKEVEHLTSHQGH---FSGRFVSFDTFYQKAKKLNMPLLIELKPIGTEPGNYVDLF | 460 |
| | | ++ TL+E++ L + + F G + K + LLIELK ++ G ++ | |
| Sbjct: | 63 | KDFTLEELQKLDAGSWYGPAFQGERIPTLEAVLKRYHKKIGLLIELKGHPSQVGIEEEVG | 122 |
| Query: | 461 | LETYHRLGISKDNKVMSLDLEVIEAIKKKNPSITTGYIIPIQFGFFG-------DEFVDF | 513 |
| | | + + S +N V S ++ ++ PSI T I FG F ++ | |
| Sbjct: | 123 | -QLLGQFSFSINNIVQSFQFRSVQRFRELYPSIPTAVITRPNFGMLSRNQMKAFRSFANY | 181 |
| Query: | 514 | YVIEDFSYRSYLSSQAFWNNKEIYVWTINDPKRIEHYLLKPIQGIITDQPALTNQLIKDL | 573 |
| | | I+ + N I+ WT+N+ K + GI+TD P + +IKD | |
| Sbjct: | 182 | VNIKHTRLNRLMIGSINKNGLNIFAWTVNNQKTAAKLQAMGVDGIVTDYP---DFIIKDG | 238 |
| Query: | 574 | KQDN | 577 |
| | | K +N | |
| Sbjct: | 239 | KHEN | 242 |

[4793] An alignment of the GAS and GBS proteins is shown below.

| Identities = 90/215 (41%), Positives = 136/215 (62%) | | | |
|---|---|---|---|
| Query: | 1 | MDVIMTKDHKLVVIHDDNLKRLSGMNKDVSKLTLDQVTKIPIHQGRFASHIPSFTEFMKT | 60 |
| | | +D+I+TKD+ VV HD+ LKRL+G+NK + LTL +V + HQG F+ SF F + | |
| Sbjct: | 375 | LDLILTKDNHFVVSHDNRLKRLAGVNKTIRNLTLKEVEHLTSHQGHFSGRFVSFDTFYQK | 434 |
| Query: | 61 | AQSLDQKIMIELKPYNQNLDIYADEFIKEFKELRLSTKHKVMSLNLTLIEKVEKKLPQLD | 120 |
| | | A+ L+ ++IELKP Y D F++ + L +S +KVMSL+L +IE ++KK P + | |
| Sbjct: | 435 | AKKLNMPLLIELKPIGTEPGNYVDLFLETYHRLGISKDNKVMSLDLEVIEAIKKKNPSIT | 494 |
| Query: | 121 | TGYLIPLHWGTLQNHNVDFYGIEEFSYNDWIAYLAQEYNKQLYVWTINRDNLMIRYLQSP | 180 |
| | | TGY+IP+ +G + VDFY IE+FSY +++ A NK++YVWTIN + YL P | |
| Sbjct: | 495 | TGYIIPIQFGFFGDEFVDFYVIEDFSYRSYLSSQAFWNNKEIYVWTINDPKRIEHYLLKP | 554 |
| Query: | 181 | VNGIITDELNLFKVINKDIKNSPNYYQRALQLIDS | 215 |
| | | + GIITD+ L + KD+K +Y+ R +++I S | |
| Sbjct: | 555 | IQGIITDQPALTNQLIKDLKQDNSYFSRLVRIISS | 589 |

[4794] Based on this analysis, it was predicted that these proteins and their epitopes could be useful antigens for vaccines or diagnostics.

### EXAMPLE 851

[4795] A DNA sequence (GBSx0903) was identified in S. agalactiae <SEQ ID 2575> which encodes the amino acid sequence <SEQ ID 2576>. Analysis of this protein sequence reveals the following:

| Possible site: 53 | | | |
|---|---|---|---|
| >>> Seems to have no N-terminal signal sequence | | | |
| INTEGRAL | Likelihood = −15.02 | Transmembrane | 84-100 (76-112) |
| INTEGRAL | Likelihood = −3.50 | Transmembrane | 139-155 (139-157) |
| INTEGRAL | Likelihood = −2.23 | Transmembrane | 41-57 (39-59) |
| INTEGRAL | Likelihood = −0.96 | Transmembrane | 179-195 (179-195) |

----- Final Results -----
bacterial membrane --- Certainty = 0.7007 (Affirmative) < succ>
bacterial outside --- Certainty = 0.0000 (Not Clear) < succ>
bacterial cytoplasm --- Certainty = 0.0000 (Not Clear) < succ>

[4796] A related GBS nucleic acid sequence <SEQ ID 9901> which encodes amino acid sequence <SEQ ID 9902> was also identified.

[4797] The protein has no significant homology with any sequences in the GENPEPT database, but there is homology to SEQ ID 2574.

[4798] A related GBS gene <SEQ ID 8671> and protein <SEQ ID 8672> were also identified. Analysis of this protein sequence reveals the following:

| Lipop: Possible site: −1 Crend: 10 | | | |
|---|---|---|---|
| McG: Discrim Score: −3.38 | | | |
| GvH: Signal Score (−7.5): −4.08 | | | |
| Possible site: 53 | | | |
| >>> Seems to have no N-terminal signal sequence | | | |
| ALOM program | count: 4 | value: −15.02 | threshold: 0.0 |

| | | | |
|---|---|---|---|
| INTEGRAL | Likelihood = −15.02 | Transmembrane | 84-100 (76-112) |
| INTEGRAL | Likelihood = −3.50 | Transmembrane | 139-155 (139-157) |
| INTEGRAL | Likelihood = −2.23 | Transmembrane | 41-57 (39-59) |
| INTEGRAL | Likelihood = −0.96 | Transmembrane | 179-195 (179-195) |

| | | |
|---|---|---|
| PERIPHERAL | Likelihood = 2.01 | 104 |

modified ALOM score: 3.50
*** Reasoning Step: 3
----- Final Results -----
bacterial membrane --- Certainty = 0.7007 (Affirmative) < succ>
bacterial outside --- Certainty = 0.0000 (Not Clear) < succ>
bacterial cytoplasm --- Certainty = 0.0000 (Not Clear) < succ>

[4799] Based on this analysis, it was predicted that these proteins and their epitopes could be useful antigens for vaccines or diagnostics.

### EXAMPLE 852

[4800] A DNA sequence (GBSx0904) was identified in S. agalactiae <SEQ ID 2577> which encodes the amino acid sequence <SEQ ID 2578>. Analysis of this protein sequence reveals the following:

Possible site: 61
>>> Seems to have no N-terminal signal sequence
----- Final Results -----
bacterial cytoplasm --- Certainty = 0.4150 (Affirmative) < succ>
bacterial membrane --- Certainty = 0.0000 (Not Clear) < succ>
bacterial outside --- Certainty = 0.0000 (Not Clear) < succ>

[4801] The protein has no significant homology with any sequences in the GENPEPT database.

[4802] No corresponding DNA sequence was identified in S. pyogenes.

[4803] Based on this analysis, it was predicted that this protein and its epitopes, could be useful antigens for vaccines or diagnostics.

### EXAMPLE 853

[4804] A DNA sequence (GBSx0905) was identified in S. agalactiae <SEQ ID 2579> which encodes the amino acid sequence <SEQ ID 2580>. Analysis of this protein sequence reveals the following:

| Possible site: 13 | | | |
|---|---|---|---|
| >>> Seems to have no N-terminal signal sequence | | | |
| INTEGRAL | Likelihood = −0.32 | Transmembrane | 2-18 (2-18) |

----- Final Results -----
bacterial membrane --- Certainty = 0.1128 (Affirmative) < succ>
bacterial outside --- Certainty = 0.0000 (Not Clear) < succ>
bacterial cytoplasm --- Certainty = 0.0000 (Not Clear) < succ>

[4805] The protein has no significant homology with any sequences in the GENPEPT database.

[4806] No corresponding DNA sequence was identified in S. pyogenes.

[4807] Based on this analysis, it was predicted that this protein and its epitopes, could be useful antigens for vaccines or diagnostics.

### EXAMPLE 854

[4808] A DNA sequence (GBSx0906) was identified in S. agalactiae <SEQ ID 2581> which encodes the amino acid sequence <SEQ ID 2582>. This protein is predicted to be nad(p)h nitroreductase ydgi. Analysis of this protein sequence reveals the following:

| Possible site: 38 | | | |
|---|---|---|---|
| >>> Seems to have no N-terminal signal sequence | | | |
| INTEGRAL | Likelihood = −1.81 | Transmembrane | 127-143 (126-143) |

----- Final Results -----
bacterial membrane --- Certainty = 0.1723 (Affirmative) < succ>
bacterial outside --- Certainty = 0.0000 (Not Clear) < succ>
bacterial cytoplasm --- Certainty = 0.0000 (Not Clear) < succ>

[4809] The protein has homology with the following sequences in the GENPEPT database.

| >GP: CAC09964 GB: AX033132 unnamed protein product [Bacillus subtilis] | | | |
|---|---|---|---|
| Identities = 62/204 (30%), Positives = 106/204 (51%), Gaps = 11/204 (5%) | | | |
| Query: | 3 | FLELNKKRHAVKHFNDKPVDFKDVRTAI-EIATLAPSANNIQPWKFVVVQ--EKKSALAE | 59 |
| | | F+E+ K R ++++++ K+ T I E AT APS+ N QPW+F+V+ E K LA | |
| Sbjct: | 7 | FMEIMKGRRSIRNYDPAVKISKEEMTEILEEATTAPSSVNAQPWRFLVIDSPEGKEKLAP | 66 |
| Query: | 60 | GLPESNCNQINQAQYVIALFTDTD----LGQRSRKIARIGRRSLPDDLIGYYMETLPPRY | 115 |
| | | L N Q+ + VIA+F D + L + K +G +P ++ + L + | |
| Sbjct: | 67 | -LASFNQTQVTTSSAVIAVFADMNNADYLEEIYSKAVELG--YMPQEVKDRQIAALTAHF | 123 |
| Query: | 116 | ALYSEKQTGEYLSLNAGIVAMNLVLALTDQGISSNMILGFDKAITNDVLEIDK-RFRPEI | 174 |
| | | + E + ++ G+V+M L+L G +N I G+DK + +DK R+ P + | |
| Sbjct: | 124 | EKLPAQVNRETILIDGGLVSMQLMLTARAHGYDTNPIGGYDKENIAETFGLDKERYVPVM | 183 |
| Query: | 175 | LITVGYSDEKVEPSYRLPVDHIIE | 198 |
| | | L+++G + ++ SYRLP+D I E | |
| Sbjct: | 184 | LLSIGKAADEGYASYRLPIDTIAE | 207 |

[4810] A related DNA sequence was identified in S. pyogenes <SEQ ID 2583> which encodes the amino acid sequence <SEQ ID 2584>. Analysis of this protein sequence reveals the following:

| Possible site: 38 | | | |
|---|---|---|---|
| >>> Seems to have no N-terminal signal sequence | | | |
| INTEGRAL | Likelihood = −2.18 | Transmembrane | 127-143 (126-143) |

----- Final Results -----
bacterial membrane --- Certainty = 0.1871 (Affirmative) < succ>
bacterial outside --- Certainty = 0.0000 (Not Clear) < succ>
bacterial cytoplasm --- Certainty = 0.0000 (Not Clear) < succ>

[4811] The protein has homology with the following sequences in the databases:

| >GP: CAC09964 GB: AX033132 unnamed protein product [Bacillus subtilis] | | | |
|---|---|---|---|
| Identities = 63/204 (30%), Positives = 109/204 (52%), Gaps = 11/204 (5%) | | | |
| Query: | 3 | FLELNKKRHAIKTFNDQ-PVDYEDLRTAIEIATLAPSANNIQPWKFVVVQ--EKKAELAK | 59 |
| | | F+E+ K R +I+ ++ + E++ +E AT APS+ N QPW+F+V+ E K +LA | |
| Sbjct: | 7 | FMEIMKGRRSIRNYDPAVKISKEEMTEILEEATTAPSSVNAQPWRFLVIDSPEGKEKLA- | 65 |
| Query: | 60 | GLPLA--NKVQVEQAQYVVALFSDTDLALRSRKIARIGVK--SLPDDLIGYYMETLPPRF | 115 |
| | | PLA N+ QV + V+A+F+D + A +I V+ +P ++ + L F | |
| Sbjct: | 66 | --PLASFNQTQVTTSSAVIAVFADMNNADYLEEIYSKAVELGYMPQEVKDRQIAALTAHF | 123 |
| Query: | 116 | AAFNEVQTGEYLAINAGIVAMNLVLSLTDQKIASNIILGFDKSTTNEILDID-PRFRPEL | 174 |
| | | E + I+ G+V+M L+L+ +N I G+DK E +D R+ P + | |
| Sbjct: | 124 | EKLPAQVNRETILIDGGLVSMQLMLTARAHGYDTNPIGGYDKENIAETFGLDKERYVPVM | 183 |
| Query: | 175 | LITVGYSDEKPEPSYRLPVDEVIE | 198 |
| | | L+++G + ++ SYRLP+D + E | |
| Sbjct: | 184 | LLSIGKAADEGYASYRLPIDTIAE | 207 |

[4812] An alignment of the GAS and GBS proteins is shown below.

| Identities = 157/200 (78%), Positives = 184/200 (91%) | | | |
|---|---|---|---|
| Query: | 1 | MKFLELNKKRHAVKHFNDKPVDFKDVRTAIEIATLAPSANNIQPWKFVVVQEKKSALAEG | 60 |
| | | MKFLELNKKRHA+K FND+PVD++D+RTAIEIATLAPSANNIQPWKFVVVQEKK+ LA+G | |
| Sbjct: | 1 | MKFLELNKKRHAIKTFNDQPVDYEDLRTAIEIATLAPSANNIQPWKFVVVQEKKAELAKG | 60 |
| Query: | 61 | LPESNCNQINQAQYVIALFTDTDLGQRSRKIARIGRRSLPDDLIGYYMETLPPRYALYSE | 120 |
| | | LP +N Q+ QAQYV+ALF+DTDL RSRKIARIG +SLPDDLIGYYMETLPPR+A ++E | |
| Sbjct: | 61 | LPLANKVQVEQAQYVVALFSDTDLALRSRKIARIGVKSLPDDLIGYYMETLPPRFAAFNE | 120 |
| Query: | 121 | KQTGEYLSLNAGIVAMNLVLALTDQGISSNMILGFDKAITNDVLEIDKRFRPEILITVGY | 180 |
| | | QTGEYL++NAGIVAMNLVL+LTDQ I+SN+ILGFDK+ TN++L+ID RFRPE+LITVGY | |
| Sbjct: | 121 | VQTGEYLAINAGIVAMNLVLSLTDQKIASNIILGFDKSTTNEILDIDPRFRPELLITVGY | 180 |
| Query: | 181 | SDEKVEPSYRLPVDHIIEKR | 200 |
| | | SDEK EPSYRLPVD +IE+R | |
| Sbjct: | 181 | SDEKPEPSYRLPVDEVIERR | 200 |

[4813] Based on this analysis, it was predicted that these proteins and their epitopes could be useful antigens for vaccines or diagnostics.

### EXAMPLE 855

[4814] A DNA sequence (GBSx0907) was identified in S. agalactiae <SEQ ID 2585> which encodes the amino acid sequence <SEQ ID 2586>. Analysis of this protein sequence reveals the following:

Possible site: 37
>>> Seems to have no N-terminal signal sequence
----- Final Results -----
bacterial cytoplasm --- Certainty = 0.2895 (Affirmative) < succ>
bacterial membrane --- Certainty = 0.0000 (Not Clear) < succ>
bacterial outside --- Certainty = 0.0000 (Not Clear) < succ>

[4815] The protein has homology with the following sequences in the GENPEPT database.

| >GP: AAC45369 GB: U78036 dipeptidase [Lactococcus lactis] | | | |
|---|---|---|---|
| Identities = 312/474 (65%), Positives = 370/474 (77%), Gaps = 11/474 (2%) | | | |
| Query: | 2 | TIDFRAEVDKRKDAIMDDLINLLRINSERDDSQADAEHPFGPGPVKALEFFLEMAERDGY | 61 |
| | | TIDF+AEV+KRKDALM+DL +LLRI+S D ADAE+PFGPGP KAL+ FL++AERDGY | |
| Sbjct: | 3 | TIDFKAEVEKRKDALMEDLFSLLRIDSAMDMEHADAENPFGPGPRKALDAFLKIAERDGY | 62 |
| Query: | 62 | ETKNVDNYAGHFTFGQGE----EELGIFGHLDVVPAGSGWDTDPYEPVIKDNRLYARGSS | 117 |
| | | TKN DNY GHF + G E LGI GHLDVVPAGSGWD++P+EP I++ LYARG+S | |
| Sbjct: | 63 | TTKNYDNYVGHFEYENGANADAEVLGIIGHLDVVPAGSGWDSNPFEPEIRNGNLYARGAS | 122 |
| Query: | 118 | DDKGPTMACYYALKIIKELGLPTSKKVRFVVGTDEESGWGDMDYYFEHVGLPKPDFGFSP | 177 |
| | | DDKGPT+ACYYALKI+KEL LP SKK+RF+VGT+EE+GW DMDYYFEH LP PDFGFSP | |
| Sbjct: | 123 | DDKGPTVACYYALKILKELNLPLSKKIRFIVGTNEETGWADMDYYFEHCELPLPDFGFSP | 182 |
| Query: | 178 | DAEFPIINGEKGNITEYLHFSGENKGAVRLHSFSGGLRENMVPESATARFTSHLDQTTLG | 237 |
| | | DAEFPIINGEKGNITEYLHFSG+N G V LHSF GL ENMVPESATA + D L | |
| Sbjct: | 183 | DAEFPIINGEKGNITEYLHFSGKNAGQVVLHSFKAGLAENMVPESATAVISGAKD---LE | 239 |
| Query: | 238 | ASLADFASKH---NLKAELSVEDEQYTATVYGKSAHGSTPQEGVNGATYLALYLSQFDFE | 294 |
| | | A+L F ++H NL+ +L D + T T+YGKSAHG+ P++G+NGATYL L+L+QFDF | |
| Sbjct: | 240 | AALEKFVAEHASKNLRFDLEEADGKATITLYGKSAHGAMPEKGINGATYLTLFLNQFDFA | 299 |
| Query: | 295 | GPARAFLDVTANIIHEDFSGEKLGVAYEDDCMGPLSMNAGVFQFDETNDDNTIALNFRYP | 354 |
| | | A AF+ V A + ED GEKLG A+ D+ M SMNAGV+ FDE N + IALNFR+P | |
| Sbjct: | 300 | DGAAAFIKVGAEKLLEDHEGEKLGTAFVDELMENTSMNAGVWSFDE-NGEGKIALNFRFP | 358 |
| Query: | 355 | QGTDAKTIQTKLEKLNGVEKVTLSDHEHTPHYVPMDDELVSTLLAVYEKQTGLKGHEQVI | 414 |
| | | QG + +Q L KL+GV +V LS H HTPHYVPM D LVSTL+ VYEK TGLKG+E +I | |
| Sbjct: | 359 | QGNSPERMQEILAKLDGVVEVELSKHLHTPHYVPMSDPLVSTLIDVYEKHTGLKGYETII | 418 |
| Query: | 415 | GGGTFGRLLERGVAYGAMFPGDENTMHQANEYMPLENIFRSAAIYAEAIYELIK | 468 |
| | | GGGTFGRLLERGVAYGAMF G+ ++MHQANE P+ENI+++A IYAEAIYEL K | |
| Sbjct: | 419 | GGGTFGRLLERGVAYGAMFEGEPDSMHQANEMKPVENIYKAAVIYAEAIYELAK | 472 |

[4816] A related DNA sequence was identified in S. pyogenes <SEQ ID 2587> which encodes the amino acid sequence <SEQ ID 2588>. Analysis of this protein sequence reveals the following:

Possible site: 14
>>> Seems to have no N-terminal signal sequence
----- Final Results -----
bacterial cytoplasm --- Certainty = 0.3107 (Affirmative) < succ>
bacterial membrane --- Certainty = 0.0000 (Not Clear) < succ>
bacterial outside --- Certainty = 0.0000 (Not Clear) < succ>

[4817] An alignment of the GAS and GBS proteins is shown below.

| Identities = 361/467 (77%), Positives = 403/467 (85%) | | | |
|---|---|---|---|
| Query: | 2 | TIDFRAEVDKRKDALMDDLINLLRINSERDDSQADAEHPFGPGPVKALEFFLEMAERDGY | 61 |
| | | TIDF+AEVDKRK A++ DL++LLRINSERDD AD +HPFGPGPVKALE FL MAERDGY | |
| Sbjct: | 20 | TIDFKAEVDKRKKAMLADLVDLLRINSERDDQLADDKHPFGPGPVKALEHFLAMAERDGY | 79 |
| Query: | 62 | ETKNVDNYAGHFTFGQGEEELGIFGHLDVVPAGSGWDTDPYEPVIKDNRLYARGSSDDKG | 121 |
| | | +T+N+DNYAG F FGQG+E LGIFGHLDVVPAGSGWDTDPYEPVIKD+R+YARGSSDDKG | |
| Sbjct: | 80 | KTRNIDNYAGDFEFGQGDEVLGIFGHLDVVPAGSGWDTDPYEPVIKDDRIYARGSSDDKG | 139 |
| Query: | 122 | PTMACYYALKIIKELGLPTSKKVRFVVGTDEESGWGDMDYYFEHVGLPKPDFGFSPDAEF | 181 |
| | | PTMACYYALKIIKELGLP SKKVRF+VGTDEESGWGDMDYYF H GL FDFGFSPDAEF | |
| Sbjct: | 140 | PTMACYYALKIIKELGLPVSKKVRFIVGTDEESGWGDMDYYFAHNGLKNPDFGFSPDAEF | 199 |
| Query: | 182 | PIINGEKGNITEYLHFSGENKGAVRLHSFSGGLRENMVPESATARFTSHLDQTTLGASLA | 241 |
| | | PIINGEKGNITEYLHF+G+NKGA LH F GGLRENMVPESATA T+ D L A+L | |
| Sbjct: | 200 | PIINGEKGNITEYLHFAGDNKGAFVLHRFQGGLRENMVPESATAVITAPHDLDVLEAALE | 259 |
| Query: | 242 | DFASKHNLKAELSVEDEQYTATVYGKSAHGSTPQEGVNGATYLALYLSQFDFEGPARAFL | 301 |
| | | F S+H +K + D + T+ GKSAHGSTP+ GVNGAT LA +L+QF FEG A+ +L | |
| Sbjct: | 260 | QFLSEHGVKGSMKATDGKIEVTIIGKSAHGSTPEAGVNGATLLAKFLNQFTFEGAAKDYL | 319 |
| Query: | 302 | DVTANIIHEDFSGEKLGVAYEDDCMGPLSMNAGVFQFDETNDDNTIALNFRYPQGTDAKT | 361 |
| | | V ++HEDF+ EKLG+AY DD MG LSMNAGVF FD + DNTIALNFRYP+GTDA T | |
| Sbjct: | 320 | HVAGEVLHEDFAAEKLGLAYTDDRMGALSMNAGVFTFDSQSADNTIALNFRYPKGTDAAT | 379 |
| Query: | 362 | IQTKLEKLNGVERVTLSDHEHTPHYVPMDDELVSTLLAVYEKQTGLKGHEQVIGGGTFGR | 421 |
| | | ++ LEKL G+ KV+LS+HEHTPHYVPMDDELV+TLLAVYEKQTGLKG+EQVIGGGTFGR | |
| Sbjct: | 380 | LKAGLEKLPGLTKVSLSEHEHTPHYVPMDDELVATLLAVYEKQTGLKGYEQVIGGGTFGR | 439 |
| Query: | 422 | LLERGVAYGAMFPGDENTMHQANEYMPLENIFRSAAIYAEAIYELIK | 468 |
| | | LLERGVA+GAMFPGDENTMHQANEYMPLENI+RSAAIYAEAIYELIK | |
| Sbjct: | 440 | LLERGVAFGAMFPGDENTMHQANEYMPLENIYRSAAIYAEAIYELIK | 486 |

[4818] Based on this analysis, it was predicted that these proteins and their epitopes could be useful antigens for vaccines or diagnostics.

### EXAMPLE 856

[4819] A DNA sequence (GBSx0908) was identified in S. agalactiae <SEQ ID 2589> which encodes the amino acid sequence <SEQ ID 2590>. Analysis of this protein sequence reveals the following:

Possible site: 30
>>> Seems to have no N-terminal signal sequence
----- Final Results -----
bacterial cytoplasm --- Certainty = 0.5598 (Affirmative) < succ>
bacterial membrane --- Certainty = 0.0000 (Not Clear) < succ>
bacterial outside --- Certainty = 0.0000 (Not Clear) < succ>

[4820] The protein has homology with the following sequences in the GENPEPT database.

| >GP: AAC21888 GB: U32707 H. influenzae predicted coding region | | | |
|---|---|---|---|
| HI0220.2 [Haemophilus influenzae Rd] | | | |
| Identities = 123/192 (64%), Positives = 160/192 (83%), Gaps = 1/192 (0%) | | | |
| Query: | 1 | MTDLEKIIKAIKSDSQNQNYTENGIDPLFAAPKTARINIVGQAPGLKTQEARLYWKDKSG | 60 |
| | | + +L++I +I +D QN+++TE GI PLF+APKTARINIVGQAPGLK +++RLYW DKSG | |
| Sbjct: | 21 | LKNLDEITSSIIADPQNKDFTERGIFPLFSAPKTARINIVGQAPGLKAEQSRLYWNDKSG | 80 |
| Query: | 61 | DRLRQWLGVDEETFYHSGKFAVLPLDFYYPGKGKSGDLSPRKGFAEKWHPLILKEMPNVQ | 120 |
| | | DRLR+WLGVD + FY+SG FAVLP+DFYYPG GKSGDL PR+GFAE+WHP+IL +PN+Q | |
| Sbjct: | 81 | DRLREWLGVDYDYFYNSGIFAVLPMDFYYPGYGKSGDLPPRQGFAERWHPMILGNLPNIQ | 140 |
| Query: | 121 | LTLLVGQYTQKYYLGSSAHKNLTETVKAYKDYLPDYLPLVHPSPRNQIWLKKNPWFEKDL | 180 |
| | | LT+L+GQY QKYYL + N+T TVK Y+ +LP ++PLVHPSPRNQ+W+ KNPWFE+ + | |
| Sbjct: | 141 | LTILIGQYAQKYYLPEN-KDNVTNTVKNYRQFLPHFMPLVHPSPRNQLWVTKNPWFEEQV | 199 |
| Query: | 181 | IVDLQKIVADIL | 192 |
| | | I +LQ +V I+ | |
| Sbjct: | 200 | IPELQILVKQII | 211 |

[4821] A related DNA sequence was identified in S. pyogenes <SEQ ID 2591> which encodes the amino acid sequence <SEQ ID 2592>. Analysis of this protein sequence reveals the following:

Possible site: 47
>>> Seems to have no N-terminal signal sequence
----- Final Results -----
bacterial cytoplasm --- Certainty = 0.3740 (Affirmative) < succ>
bacterial membrane --- Certainty = 0.0000 (Not Clear) < succ>
bacterial outside --- Certainty = 0.0000 (Not Clear) < succ>

[4822] An alignment of the GAS and GBS proteins is shown below.

| Identities = 122/189 (64%), Positives = 150/189 (78%) | | | |
|---|---|---|---|
| Query: | 4 | LEKIIKAIKSDSQNQNYTENGIDPLFAAPKTARINIVGQAPGLKTQEARLYWKDKSGDRL | 63 |
| | | ++ + KAI +D N +YTE GI PL+ AP+TARI IVGQAPG+ Q +LYW D+SG RL | |
| Sbjct: | 1 | MDDLTKAIMADEANLSYTERGIFPLYDAPQTARIIIVGQAPGIVAQGTKLYWNDRSGIRL | 60 |
| Query: | 64 | RQWLGVDEETFYHSGKFAVLPLDFYYPGKGKSGDLSPRKGFAEKWHPLILKEMPNVQLTL | 123 |
| | | R WLGVD +TFYHSG F ++P+DFYYPGKGKSGDL PR+GFA KWHP + MP V+LT+ | |
| Sbjct: | 61 | RDWLGVDNDTFYHSGLFGIIPMDFYYPGKGKSGDLPPREGFAAKWHPPLRALMPEVELTI | 120 |
| Query: | 124 | LVGQYTQKYYLGSSAHKNLTETVKAYKDYLPDYLPLVHPSPRNQIWLKKNPWFEKDLIVD | 183 |
| | | LVG+Y Q +YLG+ A+K LTETV+ ++DYLPDY PLVHPSPRNQ+WL KNPWFE+DL+ | |
| Sbjct: | 121 | LVGRYAQDFYLGNKAYKTLTETVRHFEDYLPDYFPLVHPSPRNQLWLAKNPWFEQDLLPI | 180 |
| Query: | 184 | LQKIVADIL | 192 |
| | | LQK V IL | |
| Sbjct: | 181 | LQKRVEAIL | 189 |

[4823] Based on this analysis, it was predicted that these proteins and their epitopes could be useful antigens for vaccines or diagnostics.

### EXAMPLE 857

[4824] A DNA sequence (GBSx0909) was identified in S. agalactiae <SEQ ID 2593> which encodes the amino acid sequence <SEQ ID 2594>. Analysis of this protein sequence reveals the following:

Possible Site: 16
>>> Seems to have no N-terminal signal sequence
----- Final Results -----
bacterial cytoplasm --- Certainty = 0.4178 (Affirmative) < succ>
bacterial membrane --- Certainty = 0.0000 (Not Clear) < succ>
bacterial outside --- Certainty = 0.0000 (Not Clear) < succ>

[4825] The protein has no significant homology with any sequences in the GENPEPT database.

[4826] No corresponding DNA sequence was identified in S. pyogenes.

[4827] Based on this analysis, it was predicted that this protein and its epitopes, could be useful antigens for vaccines or diagnostics.

### EXAMPLE 858

[4828] A DNA sequence (GBSx0910) was identified in S. agalactiae <SEQ ID 2595> which encodes the amino acid sequence <SEQ ID 2596>. Analysis of this protein sequence reveals the following:

Possible site: 45
>>> Seems to have no N-terminal signal sequence
----- Final Results -----
bacterial cytoplasm --- Certainty = 0.2779 (Affirmative) < succ>
bacterial membrane --- Certainty = 0.0000 (Not Clear) < succ>
bacterial outside --- Certainty = 0.0000 (Not Clear) < succ>

[4829] A related GBS nucleic acid sequence <SEQ ID 9899> which encodes amino acid sequence <SEQ ID 9900> was also identified.

[4830] The protein has homology with the following sequences in the GENPEPT database.

| >GP: AAD35886 GB: AE001748 conserved hypothetical protein [Thermotoga | | | |
|---|---|---|---|
| maritima] | | | |
| Identities = 36/124 (29%), Positives = 58/124 (46%), Gaps = 3/124 (2%) | | | |
| Query: | 19 | VPTKELLADYFNRMEFAIGRVEAHVLAHFDYGFRKLNLDVEDLKPFETQLKRIFIKMLSK | 78 |
| | | +P EL DY R F + RV+ H LAH DY R D K +++I + ++ | |
| Sbjct: | 98 | LPPDELARDYLERTLFVMERVKFHTLAHLDYPARYAKAD---FKANRDLIEKILVFLVKN | 154 |
| Query: | 79 | GLAFELNTKSLYLYGNEKLYRYALEILKQLGCKQYSIGSDGHIPEHFCYEFDRLQGLLKD | 138 |
| | | A E+NT L+ +G + +E+ LG + +IGSD H +H + + LK | |
| Sbjct: | 155 | EKALEINTAGLFKHGKPNPDYWIVEMYYDLGGRVVTIGSDAHESQHIGRGIEEVMRELKK | 214 |
| Query: | 139 | YQID | 142 |
| | | + + | |
| Sbjct: | 215 | FNFE | 218 |

[4831] No corresponding DNA sequence was identified in S. pyogenes.

[4832] Based on this analysis, it was predicted that these proteins and their epitopes could be useful antigens for vaccines or diagnostics.

### EXAMPLE 859

[4833] A DNA sequence (GBSx0911) was identified in S. agalactiae <SEQ ID 2597> which encodes the amino acid sequence <SEQ ID 2598>. This protein is predicted to be alkaline amylopullulanase (pulA). Analysis of this protein sequence reveals the following:

| Possible site: 41 | | | |
|---|---|---|---|
| >>> Seems to have no N-terminal signal sequence | | | |
| INTEGRAL | Likelihood = −10.08 | Transmembrane | 1225-1241 (1222-1247) |
| INTEGRAL | Likelihood = −2.44 | Transmembrane | 19-35 (18-36) |
| INTEGRAL | Likelihood = −0.11 | Transmembrane | 1146-1162 (1146-1162) |

----- Final Results -----
badterial membrane --- Certainty = 0.5034 (Affirmative) < succ>
bacterial outside --- Certainty = 0.0000 (Not Clear) < succ>
bacterial cytoplasm --- Certainty = 0.0000 (Not Clear) < succ>

[4834] The protein has homology with the following sequences in the GENPEPT database.

| >GP: AAG33958 GB: AF217414 pullulanase [Streptococcus pneumoniae] | | | |
|---|---|---|---|
| Identities = 641/1311 (48%), Positives = 854/1311 (64%), Gaps = 88/1311 (6%) | | | |
| Query: | 1 | MKRKDLFGDKQTQYTIRKLSVGVASVATGVCIFLHSPQVFAEEVSASPANTAIAESNINQ | 60 |
| | | M++ +K+ Y+IR L G SV G + L A+A I+ | |
| Sbjct: | 1 | MRKTPSHTEKKMVYSIRSLKNGTGSVLIGASLVL----------------LAMATPTISS | 44 |
| Query: | 61 | VDNQQSTNLKDDINSNSETVVTPSDMPDTKQLVSDETDTQKGVTEPDKATSLLEENKG-P | 119 |
| | | ++ +TN + N N+ T+ P + DT + + ++ P A + LE+ + P | |
| Sbjct: | 45 | DESTPTTN--EPNNRNTTTLAQP--LTDT---AAGSGKNESDISSPGNANASLEKTEEKP | 97 |
| Query: | 120 | VSDKNTLDLKVAPSTLQNTPDKTSQAIGAPSPTLKVANQAPRIENGYFRLHLKELPQGHP | 179 |
| | | ++ T A Q D++S+ + SP IE+ YFR+H+K+LP+ + | |
| Sbjct: | 98 | ATEPTTPAASPADPAPQTGQDRSSEPTTSTSPVTTETKAEEPIEDNYFRIHVKKLPEENK | 157 |
| Query: | 180 | VESTGLWIWGDVDQPSSNWPNGAIPMTDAKKDDYGYYVDFKLSEKQRKQISFLINNKAGT | 239 |
| | | ++ GLW W DV++PS NWPNGA+ DAKKDDYGYY+D KL +Q K+ISFLINN AG | |
| Sbjct: | 158 | -DAQGLWTWDDVEKPSENWPNGALSFKDAKKDDYGYYLDVKLKGEQAKKISFLINNTAGK | 216 |
| Query: | 240 | NLSGDHHIPLLRPEMNQVWIDEKYGTHTYQPLKEGYVRINYLSSSSNYDHLSAWLFKDVA | 299 |
| | | NL+GD + L P+MN+ W+D+ Y +Y+P G VR+NY + NYD S W + DV | |
| Sbjct: | 217 | NLTGDKSVEKLVPKMNEAWLDQDYKVFSYEPQPAGTVRVNYYRTDGNYDKKSLWYWGDVK | 276 |
| Query: | 300 | TPSTT-WPDGSNFVNQGLYGRYIDVSLKTNAKEIGFLILDESKTGDAVKVQPNDYVFRDL | 358 |
| | | PS+ WPDG++F G YGRYID+ L A+E GFL+LDESK GD VK++ +Y F DL | |
| Sbjct: | 277 | NPSSAQWPDGTDFTATGKYGRYIDIPLNEAAREFGFLLLDESKQGDDVKIRKENYKFTDL | 336 |
| Query: | 359 | ANHNQIFVKDKDPKVYNNPYYIDQVQLKDAQQIDLTSIQASFTTLDGVDKTEILKELKVT | 418 |
| | | NH+QIF+KD D +Y NPYY+ +++ AQ + +SI++SF+TL G K +ILK +T | |
| Sbjct: | 337 | KNHSQIFLKDDDESIYTNPYYVHDIRMTGAQHVGTSSIESSFSTLVGAKKEDILKHSNIT | 396 |
| Query: | 419 | DKNQNAIQISDITLDTSKSLLIIKGDFNPKQGHFNISYNGNNVMTRQSWEFKDQLYAYSG | 478 |
| | | + N + I+D+ +D + + GDF+ + + +SYN + T+ SW KD+ Y+Y G | |
| Sbjct: | 397 | NHLGNKVTITDVAIDEAGKKVTYSGDFSDTKHPYTVSYNSDQFTTKTSWRLKDETYSYDG | 456 |
| Query: | 479 | NLGAVLNQDGSKVEASLWSPSADSVTMIIYDKDNQNRVVATTPLMKNNKGVWQTILDT-- | 536 |
| | | LGA L ++G +V+ +LWSPSAD V++++YDK++ ++VV T L K +G W+ LD+ | |
| Sbjct: | 457 | KLGADLKEEGKQVDLTLWSPSADKVSVVVYDKNDPDKVVGTVALEKGERGTWKQTLDSTN | 516 |
| Query: | 537 | KLGIKNYTGYYYLYEIKRGKDKVKILDPYAKSLAEWDSNT--VNDDIKTAKAAFVNPSQL | 594 |
| | | KLGI ++TGYYY Y+I+R V LDPYAKSLA W+S+ ++D K AKAAFV+P++L | |
| Sbjct: | 517 | KLGITDFTGYYYQYQIERQGKTVLALDPYAKSLAAWNSDDAKIDDAHKVAKAAFVDPAKL | 576 |
| Query: | 595 | GPQNLSFAKIANFKGRQDAVIYEAHVRDFTSDRSLDGKLKNQFGTFAAFSEKLDYLQKLG | 654 |
| | | GPQ+L++ KI NFK R+DAVIYEAHVRDFTSD ++ L FGTF AF EKLDYL+ LG | |
| Sbjct: | 577 | GPQDLTYGKIHNFKTREDAVIYEAHVRDFTSDPAIAKDLTKPFGTFEAFIEKLDYLKDLG | 636 |
| Query: | 655 | VTHIQLLPVLSYFYVNEMDKSRSTA-YTSSDNNYNWGYDPQSYFALSGMYSEKPKDPSAR | 713 |
| | | VTHIQLLPVLSY++VNE+ + Y SS++NYNWGYDPQ+YF+L+GMYS PK+P R | |
| Sbjct: | 637 | VTHIQLLPVLSYYFVNELKNHEHLSDYASSNSNYNWGYDPQNYFSLTGMYSSDPKNPEKR | 696 |
| Query: | 714 | IAELKQLIHDIHKRGMGVILDVVYNHTAKTYLFEDIEPNYYHFMNEDGSPRESFGGGRLG | 773 |
| | | IAE K LI++IHKRGMG ILDVVYNHTAK +FED+EPNYYHFM+ DG+PR SFGGGRLG | |
| Sbjct: | 697 | IAEFKNLINEIHKRGMGAILDVVYNHTAKVDIFEDLEPNYYHFMDADGTPRTSFGGGRLG | 756 |
| Query: | 774 | TTHAMSRRVLVDSIKYLTSEFKVDGFRFDMMGDHDAAAIELAYKEAKAINPNMIMIGEGW | 833 |
| | | TTH M++R+LVDSIKYL +KVDGFRFDMMGDHDAA+IE AYK A+A+NPN+IM+GEGW | |
| Sbjct: | 757 | TTHHMTKRLLVDSIKYLVDTYKVDGFRFDMMGDHDAASIEEAYKAARALNPNLIMLGEGW | 816 |
| Query: | 834 | RTFQGDQGQPVKPADQDWMKSTDTVGVFSDDIRNSLKSGFPNEGTPAFITGGPQSLQGIF | 893 |
| | | RT+ GD+ P K ADQDWMK TDTV VFSDDIRN+LKSG+PNEG PAFITGG + + IF | |
| Sbjct: | 817 | RTYAGDENMPTKAADQDWMKHTDTVAVFSDDIRNNLKSGYPNEGQPAFITGGKRDVNTIF | 876 |
| Query: | 894 | KNIKAQPGNFEADSPGDVVQYIAAHDNLTLHDVIAKSINKDPKVAEE--EIHRRLRLGNV | 951 |
| | | KN+ AQP NFEADSPGDV+QYIAAHDNLTL D+IA+SI KDP AE EIHRRLRLGN+ | |
| Sbjct: | 877 | KNLIAQPTNFEADSPGDVIQYIAAHDNLTLFDIIAQSIKKDPSKAENYAEIHRRLRLGNL | 936 |
| Query: | 952 | MILTSQGTAFIHSGQEYGRTKRLLNPDYMTKVSDDKLPNKATLIEAVK----EYPYFIHD | 1007 |
| | | M+LT+QGT FIHSGQEYGRTK+ NP Y T V++DK+PNK+ L+ +YPYFIHD | |
| Sbjct: | 937 | MVLTAQGTPFIHSGQEYGRTKQFRNPAYRTPVAEDKVPNKSHLLRDKDGNPFDYPYFIHD | 996 |
| Query: | 1008 | SYDSSDAINHFDWAAATDNNKHPISTKTQAYTAGLITLRRSTDAFRKLSKAEIDREVSLI | 1067 |
| | | SYDSSDA+N FDW ATD +P + K++ Y GLI LR+STDAFR S +I V LI | |
| Sbjct: | 997 | SYDSSDAVNKFDWTKATDGKAYPENVKSRDYMKGLIALRQSTDAFRLKSLQDIKDRVHLI | 1056 |
| Query: | 1068 | TEVGQGDIKEKDLVIAYQTIDSKGDIYAVFVNADSKARNVLLGEKYKHLLKGQVIVDADQ | 1127 |
| | | T GQ ++++D+VI YQ GDIYAVFVNAD KAR LG + HL +V+ D +Q | |
| Sbjct: | 1057 | TVPGQNGVEKEDVVIGYQITAPNGDIYAVFVNADEKAREFNLGTAFAHLRNAEVLADENQ | 1116 |
| Query: | 1128 | AGIKPISTPRGVHFEKDSLLIDPLTAIVIKVGKVAPS---------------PKEELQAD | 1172 |
| | | AG I+ P+G+ + + L ++ LTA V++V + S P+ + +A | |
| Sbjct: | 1117 | AGSVGIANPKGLEWTEKGLKLNALTATVLRVSQNGTSHESTAEEKPDSTPSKPEHQNEAS | 1176 |
| Query: | 1173 | YPKTQ----------SFKESKTVEKVNRIANKT---------------SITPVVSKKADS | 1207 |
| | | +P Q + ++K + N+ + T S+ V K++ | |
| Sbjct: | 1177 | HPAHQDPAPEARPDSTKPDAKVADAENKPSQATADSQAEQPAQEAQASSVKEAVRKESVE | 1236 |
| Query: | 1208 | YLTNE----------ANLPKTGDKSSKILSVVGISILASLLALVGLSLKRNR | 1249 |
| | | + E A LP TG K+ L GIS+LA LL L G LK + | |
| Sbjct: | 1237 | NSSKENISATPDRQAELPNTGIKNENKLLFAGISLLA-LLGL-GFLLKNKK | 1285 |

[4835] A related DNA sequence was identified in S. pyogenes <SEQ ID 2599> which encodes the amino acid sequence <SEQ ID 2600>. Analysis of this protein sequence reveals the following:

| Possible site: 35 | | | |
|---|---|---|---|
| >>> Seems to have no N-terminal signal sequence | | | |
| INTEGRAL | Likelihood = −10.83 | Transmembrane | 1153-1169 (1148-1171) |
| INTEGRAL | Likelihood = −1.97 | Transmembrane | 29-45 (28-46) |

----- Final Results -----
bacterial membrane --- Certainty = 0.5331 (Affirmative) < succ>
bacterial outside --- Certainty = 0.0000 (Not Clear) < succ>
bacterial cytoplasm --- Certainty = 0.0000 (Not Clear) < succ>

[4836] A related sequence was also identified in GAS <SEQ ID 9125> which encodes the amino acid sequence <SEQ ID 9126>. Analysis of this protein sequence reveals the following:

Possible cleavage site: 26
>>> Seems to have an uncleavable N-term signal seq
----- Final Results -----
bacterial membrane --- Certainty = 0.533 (Affirmative) < succ>
bacterial outside --- Certainty = 0.000 (Not Clear) < succ>
bacterial cytoplasm --- Certainty = 0.000 (Not Clear) < succ>
LPXTG motif: 1133-1137

[4837] An alignment of the GAS and GBS proteins is shown below.

| Identities = 715/1097 (65%), Positives = 872/1097 (79%), Gaps = 21/1097 (1%) | | | |
|---|---|---|---|
| Query: | 156 | ANQAPRIENGYFRLHLKELPQGHPVESTGLWIWGDVDQPSSNWPNGAIPMTDAKKDDYGY | 215 |
| | | AN A E+ + R+H K LP G + S GLW+WGDVDQPS +WPNGAI MT AKKDDYGY | |
| Sbjct: | 95 | ANPASIAEH-HLRMHFKTLPAGESLGSLGLWVWGDVDQPSKDWPNGAITMTKAKKDDYGY | 153 |
| Query: | 216 | YVDFKLSEKQRKQISFLINNKAGTNLSGDHHIPLLRPEMNQVWIDEKYGTHTYQFLKEGY | 275 |
| | | Y+D L+ K R+Q+S+LINNKAG NLS D HI LL P+MN+VWIDE Y H Y+PLK+GY | |
| Sbjct: | 154 | YLDVPLAAKHRQQVSYLINNKAGENLSKDQHISLLTPKMNEVWIDENYHAHAYRPLKKGY | 213 |
| Query: | 276 | VRINYLSSSSNYDHLSAWLFKDVATPSTTWPDGSNFVNQGLYGRYIDVSLKTNAKEIGFL | 335 |
| | | +RINY + S +YD+L+ W FKDV TP+T WP+G + ++G YG Y+DV LK A EIGFL | |
| Sbjct: | 214 | LRINYHNQSGHYDNLAVWTFKDVKTPTTDWPNGLDLSHKGHYGAYVDVPLKEGANEIGFL | 273 |
| Query: | 336 | ILDESKTGDAVKVQPNDYVFRDLANHNQIFVKDKDPKVYNNPYYIDQVQLKDAQQIDLTS | 395 |
| | | ILD+SKTGDA+KVQP DY+F++L NH Q+FVKD DPKVYNNPYYIDQV LK A+Q | |
| Sbjct: | 274 | ILDKSKTGDAIKVQPKDYLFKELDNHTQVFVKDTDPKVYNNPYYIDQVSLKGAEQTTPNE | 333 |
| Query: | 396 | IQASFTTLDGVDKTEILKELKVTDKNQNAIQISDITLDTSKSLLIIKGDFNPKQGHFNIS | 455 |
| | | I+A FTTLDG+D+ + + +K+TDK + I ++TLD KS++ +KGDF + + ++ | |
| Sbjct: | 334 | IKAIFTTLDGLDEDAVKQNIKITDKAGKTVAIDELTLDRDKSVMTLKGDFKAQGAVYTVT | 393 |
| Query: | 456 | YNGNNVMTRQSWEFKDQLYAYSGNLGAVLNQDGSKVEASLWSPSADSVTMIIYDKDNQNR | 515 |
| | | + + + RQSW+ KD+LYAY G LGA L +DGS V+ +LWSPSAD+V +++YDK +Q R | |
| Sbjct: | 394 | FGEVSQVARQSWQLKDKLYAYDGELGATLAKDGS-VDLALWSPSADTVKVVVYDKQDQTR | 452 |
| Query: | 516 | VVATTPLMKNNKGVWQTIL--DTKLGIKNYTGYYYLYEIKRGKDKVKILDPYAKSLAEWD | 573 |
| | | VV L K++KGVW+ L D+ GI +YTGYYYLYEI RG++KV +LDPYAKSLA W+ | |
| Sbjct: | 453 | VVGQADLTKSDKGVWRAHLTSDSVKGISDYTGYYYLYEITRGQEKVMVLDPYAKSLAAWN | 512 |
| Query: | 574 | SNTVNDDIKTAKAAFVNPSQLGPQNLSFAKIANFKGRQDAVIYEAHVRDFTSDRSLDGKL | 633 |
| | | T DDIKTAKAAF++PS+LGP L FAKI NFK R+DA+IYEAHVRDFTSD++L+GKL | |
| Sbjct: | 513 | DATATDDIKTAKAAFIDPSKLGPTGLDFAKINNFKKREDAIIYEAHVRDFTSDKALEGKL | 572 |
| Query: | 634 | KNQFGTFAAFSEKLDYLQKLGVTHIQLLPVLSYFYVNEMDKSRSTAYTSSDNNYNWGYDP | 693 |
| | | + FGTF+AF E+LDYL+ LGVTH+QLLPVLSYFY NE+DKSRSTAYTSSDNNYNWGYDP | |
| Sbjct: | 573 | THPFGTFSAFVEQLDYLKDLGVTHVQLLPVLSYFYANELDKSRSTAYTSSDNNYNWGYDP | 632 |
| Query: | 694 | QSYFALSGMYSEKPKDPSARIAELKQLIHDIHKRGMGVILDVVYNHTAKTYLFEDIEPNY | 753 |
| | | Q YFALSGMYS P DP+ RIAELK L+++IHKRGMGVI DVVYNHTA+TYLFED+EPNY | |
| Sbjct: | 633 | QHYFALSGMYSANPNDPALRIAELKNLVNEIHKRGMGVIFDVVYNHTARTYLFEDLEPNY | 692 |
| Query: | 754 | YHFMNEDGSPRESFGGGRLGTTHAMSRRVLVDSIKYLTSEFKVDGFRFDMMGDHDAAAIE | 813 |
| | | YHFMN DG+ RESFGGGRLGTTHAMSRR+LVDSI YLT EFKVDGFRFDMMGDHDAAAIE | |
| Sbjct: | 693 | YHFMNADGTARESFGGGRLGTTHAMSRRILVDSITYLTREFKVDGFRFDMMGDHDAAAIE | 752 |
| Query: | 814 | LAYKEAKAINPNMIMIGEGWRTFQGDQGQPVKPADQDWMKSTDTVGVFSDDIRNSLKSGF | 873 |
| | | A+K AKAINPN IMIGEGWRT+QGD+G+ ADQDWMK+T+TVGVFSDDIRN+LKSGF | |
| Sbjct: | 753 | QAFKAAKAINPNTIMIGEGWRTYQGDEGKKEIAADQDWMKATNTVGVFSDDIRNTLKSGF | 812 |
| Query: | 874 | PNEGTPAFITGGPQSLQGIFKNIKAQPGNFEADSPGDVVQYIAAHDNLTLHDVIAKSINK | 933 |
| | | PNEGT AFITGG ++L+G+FK IKAQPGNFEAD+PGDVVQYIAAHDNLTLHDVIAKSINK | |
| Sbjct: | 813 | PNEGTAAFITGGAKNLEGLFKTIKAQPGNFEADAPGDVVQYIAAHDNLTLHDVIAKSINK | 872 |
| Query: | 934 | DPKVAEEEIHRRLRLGNVMILTSQGTAFIHSGQEYGRTKRLLNPDYMTKVSDDKLPNKAT | 993 |
| | | DPKVAEEEIH+R+RLGN MILT+QGTAFIHSGQEYGRTK+LLNPDY TK SDDK+PNKAT | |
| Sbjct: | 873 | DPKVAEEEIHKRIRLGNTMILTAQGTAFIHSGQEYGRTKQLLNPDYKTKASDDKVPNKAT | 932 |
| Query: | 994 | LIEAVKEYPYFIHDSYDSSDAINHFDWAAATDNNKHPISTKTQAYTAGLITLRRSTDAFR | 1053 |
| | | LI+AV +YPYFIHDSYDSSDA+NHFDWA ATD+ HPIS +T+AYT GLI LRRSTDAF | |
| Sbjct: | 933 | LIDAVAQYPYFIHDSYDSSDAVNHFDWAKATDSIAHPISNQTKAYTQGLIALRRSTDAFT | 992 |
| Query: | 1054 | KLSKAEIDREVSLITEVGQGDIKEKDLVIAYQTIDSKGDIYAVFVNADSKARNVLLGEKY | 1113 |
| | | K +KAE+DR+V+LIT+ GQ I+++DL++ YQT+ S GD YAVFVNAD+K R V+L + Y | |
| Sbjct: | 993 | KATKAEVDRDVTLITQAGQDGIQQEDLIMGYQTVASNGDRYAVFVNADNKTRKVVLPQAY | 1052 |
| Query: | 1114 | KHLLKGQVIVDADQAGIKPISTPRGVHFEKDSLLIDPLTAIVIKV-GKVAPSPKEELQAD | 1172 |
| | | ++LL QV+VDA+QAG+ I+ P+GV F K+ L I+ LTA+V+KV K A +++ Q D | |
| Sbjct: | 1053 | RYLLGAQVLVDAEQAGVTAIAKPKGVQFTKEGLTIEGLTALVLKVSSKTANPSQQKSQTD | 1112 |
| Query: | 1173 | YPKTQSFKESKTVEKVNRIANKTSITPVVSKKADSYLTNEANLPKTGDKSSKILSVVGIS | 1232 |
| | | +T++ SK ++K K + T LPKTG+ SSK L GI+ | |
| Sbjct: | 1113 | NHQTKTPDGSKDLDKSLMTRPKRAKT-------------NQKLPKTGEASSKGLLAAGIA | 1159 |
| Query: | 1233 | ILASLLALVGLSLKRNR | 1249 |
| | | + LL + L +KR + | |
| Sbjct: | 1160 | L---LLLAISLLMKRQK | 1173 |

[4838] A related GBS gene <SEQ ID 8673> and protein <SEQ ID 8674> were also identified. Analysis of this

| Lipop: Possible site: −1 Crend: 9 | | | |
|---|---|---|---|
| McG: Discrim Score: −0.88 | | | |
| GvH: Signal Score (−7.5): 4.13 | | | |
| Possible site: 41 | | | |
| >>> Seems to have no N-terminal signal sequence | | | |
| ALOM program | count: 3 | value: −10.08 | threshold: 0.0 |

| | | | |
|---|---|---|---|
| INTEGRAL | Likelihood = −10.08 | Transmembrane | 1225-1241 (1222-1247) |
| INTEGRAL | Likelihood = −2.44 | Transmembrane | 19-35 (18-36) |
| INTEGRAL | Likelihood = −0.11 | Transmembrane | 1146-1162 (1146-1162) |

| | | |
|---|---|---|
| PERIPHERAL | Likelihood = 2.44 | 653 |

modified ALOM score: 2.52
*** Reasoning Step: 3
----- Final Results -----
bacterial membrane --- Certainty = 0.5034 (Affirmative) < succ>
bacterial outside --- Certainty = 0.0000 (Not Clear) < succ>
bacterial cytoplasm --- Certainty = 0.0000 (Not Clear) < succ>
LPXTG motif: 1081-1085

[4839] The protein has homology with the following sequences in the databases:

[chemical structure]

[chemical structure]

[4840] SEQ ID 2598 (GBS5) was expressed in E. coli as a His-fusion product. SDS-PAGE analysis of total cell extract is shown in FIG. 3 (lane 7; MW 134 kDa).

[4841] The His-fusion protein was purified as shown in FIG. 190, lane 7.

[4842] Based on this analysis, it was predicted that these proteins and their epitopes could be useful antigens for vaccines or diagnostics.

### EXAMPLE 860

[4843] A DNA sequence (GBSx0912) was identified in S. agalactiae <SEQ ID 2601> which encodes the amino acid sequence <SEQ ID 2602>. Analysis of this protein sequence reveals the following:

| Possible site: 26 | | | |
|---|---|---|---|
| >>> Seems to have no N-terminal signal sequence | | | |
| INTEGRAL | Likelihood = −10.72 | Transmembrane | 231-247 (228-251) |
| INTEGRAL | Likelihood = −8.39 | Transmembrane | 50-66 (44-68) |
| INTEGRAL | Likelihood = −6.74 | Transmembrane | 23-39 (20-41) |
| INTEGRAL | Likelihood = −5.84 | Transmembrane | 173-189 (168-196) |
| INTEGRAL | Likelihood = −4.41 | Transmembrane | 299-315 (297-318) |
| INTEGRAL | Likelihood = −4.14 | Transmembrane | 115-131 (114-133) |
| INTEGRAL | Likelihood = −3.35 | Transmembrane | 80-96 (79-97) |
| INTEGRAL | Likelihood = −0.48 | Transmembrane | 97-113 (97-113) |

----- Final Results -----
bacterial membrane --- Certainty = 0.5288 (Affirmative) < succ>
bacterial outside --- Certainty = 0.0000 (Not Clear) < succ>
bacterial cytoplasm --- Certainty = 0.0000 (Not Clear) < succ>

[4844] A related GBS nucleic acid sequence <SEQ ID 8675> which encodes amino acid sequence <SEQ ID 8676> was also identified. Analysis of this protein sequence reveals the following:

| SRCFLG: 0 | | | |
|---|---|---|---|
| McG: Length of UR: 19 | | | |
| Peak Value of UR: 3.08 | | | |
| Net Charge of CR: 1 | | | |
| McG: Discrim Score: 9.76 | | | |
| GvH: Signal Score (−7.5): −4.57 | | | |
| Possible site: 22 | | | |
| >>> Seems to have an uncleavable N-term signal seq | | | |
| Amino Acid Composition: calculated from 1 | | | |
| ALOM program | count: 7 | value: −10.72 | threshold: 0.0 |

| | | | |
|---|---|---|---|
| INTEGRAL | Likelihood = −10.72 | Transmembrane | 217-233 (214-237) |
| INTEGRAL | Likelihood = −8.39 | Transmembrane | 36-52 (30-54) |
| INTEGRAL | Likelihood = −6.74 | Transmembrane | 9-25 (6-27) |
| INTEGRAL | Likelihood = −5.84 | Transmembrane | 159-175 (154-182) |
| INTEGRAL | Likelihood = −4.14 | Transmembrane | 101-117 (100-119) |
| INTEGRAL | Likelihood = −3.35 | Transmembrane | 66-82 (65-83) |
| INTEGRAL | Likelihood = −0.48 | Transmembrane | 83-99 (83-99) |

| | | |
|---|---|---|
| PERIPHERAL | Likelihood = 0.26 | 136 |

modified ALOM score: 2.64
icm1 HYPID: 7 CFP: 0.529
*** Reasoning Step: 3
----- Final Results -----
bacterial membrane --- Certainty = 0.5288 (Affirmative) < succ>
bacterial outside --- Certainty = 0.0000 (Not Clear) < succ>
bacterial cytoplasm --- Certainty = 0.0000 (Not Clear) < succ>

[4845] The protein has homology with the following sequences in the GENPEPT database.

| >GP: BAB08178 GB: AB036768 exfoliative toxin A [Staphylococcus hyicus] | | | |
|---|---|---|---|
| Identities = 134/298 (44%), Positives = 197/298 (65%) | | | |
| Query: | 22 | PLVMAGLVLGLLALGNLLEGYGTYVRYCLGLVALVFWIFLIKGILKNKKESRKELSNPLI | 81 |
| | | PLV +GLVLGLL LGNLL+ + G++A++ W+ L+ + N + +L++PL+ | |
| Sbjct: | 7 | PLVSSGLVLGLLGLGNLLKDVSLSLNALCGILAILVWLHLLYSMFNNVNHVKNQLNSPLV | 66 |
| Query: | 82 | ASVFTTFFMAGMILSTYILLFRSLGIWVAVLSKGVWWLSFIALIIHMAIFSWKYLRHFSM | 141 |
| | | +SVFTTFFM+G + +TY+ F S ++ L +W L I ++HM IFS KYL+ FS+ | |
| Sbjct: | 67 | SSVFTTFFMSGFLGTTYLNTFFSHISFIHHLITPLWLLCLIGILTHMIIFSHKYLKSFSL | 126 |
| Query: | 142 | ANLFPSWSVLYVGIGVASLTAPISGQFTIGKIVFWYGFIATLVLLPFLFIKAYKIGLPSA | 201 |
| | | N++PSW+VLY+GI +A LTAP+SG F IGK+ YGF+AT ++LP +F + L ++ | |
| Sbjct: | 127 | ENVYPSWTVLYIGIAIAGLTAPVSGYFFIGKLTVIYGFVATCIVLPLVFKRLKTYPLQTS | 186 |
| Query: | 202 | VKPNITTICAPMSLITAGYVNSFVSPNRGLLLLLIVMAQFLYFFILFQVPKLLIGDFTPG | 261 |
| | | +KPN +TICAP SL+ A YV +F + +++L ++++Q YF+I+FQ+PKLL F+P | |
| Sbjct: | 187 | IKPNTSTICAPFSLVAAAYVLAFPEAHDFVVILFLILSQVFYFYIVFQLPKLLREPFSPV | 246 |
| Query: | 262 | FSAFTFPLVISATSLKLSIQHLSLPVDIQGLVHFEIGTTTLIVMIVMVRYIFFLRRTI | 319 |
| | | FSAFTFPLVISAT+LK S+ L P GL+ FE T+IV V YI + + | |
| Sbjct: | 247 | FSAFTFPLVISATALKNSMPILIFPEIWNGLLMFETVLATVIVFRVFFGYIHLFLKPV | 304 |

[4846] A related DNA sequence was identified in S. pyogenes <SEQ ID 2603> which encodes the amino acid sequence <SEQ ID 2604>. Analysis of this protein sequence reveals the following:

| Possible site: 40 | | | |
|---|---|---|---|
| >>> Seems to have no N-terminal signal sequence | | | |
| INTEGRAL | Likelihood = −9.82 | Transmembrane | 169-185 (163-189) |
| INTEGRAL | Likelihood = −8.49 | Transmembrane | 50-66 (38-69) |
| INTEGRAL | Likelihood = −7.86 | Transmembrane | 228-244 (224-247) |
| INTEGRAL | Likelihood = −5.15 | Transmembrane | 288-304 (284-306) |
| INTEGRAL | Likelihood = −3.29 | Transmembrane | 108-124 (107-126) |
| INTEGRAL | Likelihood = −3.29 | Transmembrane | 140-156 (140-161) |
| INTEGRAL | Likelihood = −1.33 | Transmembrane | 84-100 (84-100) |

----- Final Results -----
bacterial membrane --- Certainty = 0.4927 (Affirmative) < succ>
bacterial outside --- Certainty = 0.0000 (Not Clear) < succ>
bacterial cytoplasm --- Certainty = 0.0000 (Not Clear) < succ>

[4847] An alignment of the GAS and GBS proteins is shown below.

| Identities = 138/305 (45%), Positives = 200/305 (65%), Gaps = 5/305 (1%) | | | |
|---|---|---|---|
| Query: | 12 | RYMMKNWEKPPLVMAGLVLGLLALGNLLEGYGTYVRYCLGLVALVFWIFLIKGILKNKKE | 71 |
| | | R +MK+ + PPLVM+GL LG L+ GNLL Y + Y L AL + L+ G+++N + | |
| Sbjct: | 12 | RTLMKHLKTPPLVMSGLALGTLSFGNLLATYVSIFNYLGILAALFIYGILLVGMVRNLND | 71 |
| Query: | 72 | SRKELSNPLIASVFTTFFMAGMILSTYILLFRSLGIWVAVLSKGVWWLSFIALIIHMAIF | 131 |
| | | ++ +L PLIASVF TFFM GM+LS+ L G W+ L+ WWL F+ ++ +A + | |
| Sbjct: | 72 | TKMQLRQPLIASVFPTFFMTGMLLSSLFLKVTG-GCWLGFLT---WWLFFLGNLVLIAYY | 127 |
| Query: | 132 | SWKYLRHFSMANLFPSWSVLYVGIGVASLTAPISGQFTIGKIVFWYGFIATLVLLPFLFI | 191 |
| | | ++++ FS N+FPSWSVL+VGI +A+LTAP S QF +G+++FW + T V+LPF+ | |
| Sbjct: | 128 | QYRFVFSFSWDNVFPSWSVLFVGIAMAALTAPASRQFLLGQVIFWVCLLLTAVILPFMAK | 187 |
| Query: | 192 | KAYKIGLPSAVKPNITTICAPMSLITAGYVNSFVSPNRGLLLLLIVMAQFLYFFILFQVP | 251 |
| | | K Y IGL AV PNI+T CAP+SL++A Y+ +F P G+++ L+V +Q LY F++ Q+P | |
| Sbjct: | 188 | KTYGIGLGQAVMPNISTFCAPLSLLSASYLATFPRPQVGMVIFLLVSSQLLYAFVVVQLP | 247 |
| Query: | 252 | KLLIGDFTPGFSAFTFPLVISATSLKLSIQHLSLP-VDIQGLVHFEIGTTTLIVMIVMVR | 310 |
| | | +LL F PGFSAFTFP VISATSLK+++ L + Q L+ E+ T +V V | |
| Sbjct: | 248 | RLLNRPFNPGFSAFTFPFVISATSLKMTLSFLGWQGLGWQVLLLGEVLLATALVTYVYGA | 307 |
| Query: | 311 | YIFFL | 315 |
| | | Y+ FL | |
| Sbjct: | 308 | YLRFL | 312 |

[4848] Based on this analysis, it was predicted that these proteins and their epitopes could be useful antigens for vaccines or diagnostics.

### EXAMPLE 861

[4849] A DNA sequence (GBSx0913) was identified in S. agalactiae <SEQ ID 2605> which encodes the amino acid sequence <SEQ ID 2606>. Analysis of this protein sequence reveals the following:

Possible site: 28
>>> Seems to have a cleavable N-term signal seq.
----- Final Results -----
bacterial outside --- Certainty = 0.3000 (Affirmative) < succ>
bacterial membrane --- Certainty = 0.0000 (Not Clear) < succ>
bacterial cytoplasm --- Certainty = 0.0000 (Not Clear) < succ>

[4850] The protein has no significant homology with any sequences in the GENPEPT database.

[4851] A related DNA sequence was identified in S. pyogenes <SEQ ID 2607> which encodes the amino acid sequence <SEQ ID 2608>. Analysis of this protein sequence reveals the following:

Possible site: 28
>>> Seems to have a cleavable N-term signal seq.
----- Final Results -----
bacterial outside --- Certainty = 0.3000 (Affirmative) < succ>
bacterial membrane --- Certainty = 0.0000 (Not Clear) < succ>
bacterial cytoplasm --- Certainty = 0.0000 (Not Clear) < succ>

[4852] An alignment of the GAS and GBS proteins is shown below.

| Identities = 45/57 (78%), Positives = 53/57 (92%) | | | |
|---|---|---|---|
| Query: | 1 | MVKKFAFAKGIATGVVATAATLAGAAFAIKKTIIEPEEEKIAFIEENRKKAARKRVS | 57 |
| | | MVKK+ F KG+ATGV+ATAAT+AGA FA+KKTII+PEEEK AFIEENRKKAAR+RV+ | |
| Sbjct: | 1 | MVKKYQFVKGLATGVLATAATVAGAVFAVKKTIIDPEEEKAAFIEENRKKAARRRVA | 57 |

[4853] Based on this analysis, it was predicted that these proteins and their epitopes could be useful antigens for vaccines or diagnostics.

### EXAMPLE 862

[4854] A DNA sequence (GBSx0914) was identified in S. agalactiae <SEQ ID 2609> which encodes the amino acid sequence <SEQ ID 2610>. This protein is predicted to be tRNA isopentenylpyrophosphate transferase (miaA). Analysis of this protein sequence reveals the following:

Possible site: 20
>>> Seems to have an uncleavable N-term signal seq
----- Final Results -----
bacterial membrane --- Certainty = 0.0000 (Not Clear) < succ>
bacterial outside --- Certainty = 0.0000 (Not Clear) < succ>
bacterial cytoplasm --- Certainty = 0.0000 (Not Clear) < succ>

[4855] A related GBS nucleic acid sequence <SEQ ID 9897> which encodes amino acid sequence <SEQ ID 9898> was also identified.

[4856] The protein has homology with the following sequences in the GENPEPT database.

| >GP: BAB06085 GB: AP001515 tRNA isopentenylpyrophosphate transferase | | | |
|---|---|---|---|
| [Bacillus halodurans] | | | |
| Identities = 139/311 (44%), Positives = 200/311 (63%), Gaps = 21/311 (6%) | | | |
| Query: | 7 | KIKLIAVVGPTAVGKTALGIELAKTFNGEIISGDSQQVYQKLDIGTAKASKEEQEQAYHH | 66 |
| | | K KL+A+VGPTAVGKT + LAK NGE+ISGDS QVY+ +DIGTAK + EE + HH | |
| Sbjct: | 2 | KEKLVAIVGPTAVGKTKTSVMLAKRLNGEVISGDSMQVYRGMDIGTAKITAEEMDGVPHH | 61 |
| Query: | 67 | LIDVREVNENYSVYDFVKEAKVAIDTIISKGKIPIIVGGTGLYLQSLFEGYHLGGEVNQE | 126 |
| | | LID+++ +E++SV DF A I I +G++P +VGGTGLY+ ++ ++LG E | |
| Sbjct: | 62 | LIDIKDPSESFSVADFQDLATPLITEIHERGRLPFLVGGTGLYVNAVIHQFNLGDIRADE | 121 |
| Query: | 127 | TLMAYREKLE----SLSDEDLFEKLT----EQSIIIPQVNRRRAIRALELAKF------- | 171 |
| | | YR +LE S + L +KL+ + + I N RR IRALE+ K | |
| Sbjct: | 122 | D---YRHELEAFVNSYGVQALHDKLSKIDPKAAAAIHPNNYRRVIRALEIIKLTGKTVTE | 178 |
| Query: | 172 | -GNDLQNSESPYDVLLIGLNDDRQVLYDRINRRVDLMMDNGLLDEAKWLYD-NYPSVQAS | 229 |
| | | + + SPY++++IGL +R VLYDRINRRVD M++ GL+DEAK LYD Q+ | |
| Sbjct: | 179 | QARHEEETPSPYNLVMIGLTMERDVLYDRINRRVDQMVEEGLIDEAKKLYDRGIRDCQSV | 238 |
| Query: | 230 | KGIGYKELFPYFSKQIPLEEAVDKLKQNTRRFAKRQLTWFRNRMNVEFIMVGEENYQQKI | 289 |
| | | + IGYKE++ Y + LEEA+D LK+N+RR+AKRQLTWFRN+ NV + + + ++ +KI | |
| Sbjct: | 239 | QAIGYKEMYDYLDGNVTLEEAIDTLKRNSRRYAKRQLTWFRNKANVTWFDMTDVDFDKKI | 298 |
| Query: | 290 | KRKVSDFLSSK | 300 |
| | | ++ +F++ K | |
| Sbjct: | 299 | -MEIHNFIAGK | 308 |

[4857] A related DNA sequence was identified in S. pyogenes <SEQ ID 2611> which encodes the amino acid sequence <SEQ ID 2612>. Analysis of this protein sequence reveals the following:

Possible site: 27
>>> Seems to have a cleavable N-term signal seq.
----- Final Results -----
bacterial outside --- Certainty = 0.3000 (Affirmative) < succ>
bacterial membrane --- Certainty = 0.0000 (Not Clear) < succ>
bacterial cytoplasm --- Certainty = 0.0000 (Not Clear) < succ>

[4858] An alignment of the GAS and GBS proteins is shown below.

| Identities = 202/296 (68%), Positives = 250/296 (84%) | | | |
|---|---|---|---|
| Query: | 5 | MRKIKLIAVVGPTAVGKTALGIELAKTFNGEIISGDSQQVYQKLDIGTAKASKEEQEQAY | 64 |
| | | M KIK++ +VGPTAVGKTALGI LAK FNGEIISGDSQQVY++LDIGTAKA++EEQE A | |
| Sbjct: | 1 | MTKIKIVVIVGPTAVGKTALGISLAKAFNGEIISGDSQQVYRQLDIGTAKATQEEQEAAV | 60 |
| Query: | 65 | HHLIDVREVNENYSVYDFVKEAKVAIDTIISKGKIPIIVGGTGLYLQSLFEGYHLGGEVN | 124 |
| | | HHLID+REV E+YS YDFV++A+ +I I+S+GK+PIIVGGTGLYLQSL EGYHLGG+V+ | |
| Sbjct: | 61 | HHLIDIREVTESYSAYDFVQDAQKSISDIVSRGKLPIIVGGTGLYLQSLLEGYHLGGQVD | 120 |
| Query: | 125 | QETLMAYREKLESLSDEDLFEKLTEQSIIIPQVNRRRAIRALELAKFGNDLQNSESPYDV | 184 |
| | | QE + AYR +LE L D DL+E+L +I I QVNRRRAIRALELA+F ++L+N+E+ Y+ | |
| Sbjct: | 121 | QEAVKAYRNELEQLDDHDLYERLQVNNITIEQVNRRRAIRALELAQFADELENAETAYEP | 180 |
| Query: | 185 | LLIGLNDDRQVLYDRINRRVDLMMDNGLLDEAKWLYDNYPSVQASKGIGYKELFPYFSKQ | 244 |
| | | L+IGLNDDRQV+YDRIN+RV+ M++NGLL+EAKWLY++YP+VQAS+GIGYKELFPYF + | |
| Sbjct: | 181 | LIIGLNDDRQVIYDRINQRVNRMIENGLLEEAKWLYEHYPTVQASRGIGYKELFPYFVGE | 240 |
| Query: | 245 | IPLEEAVDKLKQNTRRFARRQLTWFRNRMNVEFIMVGEENYQQKIKRKVSDFLSSK | 300 |
| | | + L EA D+LKQNTRRFAKRQLTWFRNRM V F + +Y Q + +V DFL K | |
| Sbjct: | 241 | MTLAEASDQLKQNTRRFAKRQLTWFRNRMAVSFTAITAPDYPQVVHDRVRDFLGQK | 296 |

[4859] Based on this analysis, it was predicted that these proteins and their epitopes could be useful antigens for vaccines or diagnostics.

### EXAMPLE 863

[4860] A DNA sequence (GBSx0915) was identified in S. agalactiae <SEQ ID 2613> which encodes the amino acid sequence <SEQ ID 2614>. This protein is predicted to be hflX (hflX). Analysis of this protein sequence reveals the following:

Possible site: 35
>>> Seems to have an uncleavable N-term signal seq
----- Final Results -----
bacterial membrane --- Certainty = 0.0000 (Not Clear) < succ>
bacterial outside --- Certainty = 0.0000 (Not Clear) < succ>
bacterial cytoplasm --- Certainty = 0.0000 (Not Clear) < succ>

[4861] The protein has homology with the following sequences in the GENPEPT database.

| >GP: BAB06081 GB: AP001515 unknown conserved protein [Bacillus halodurans] | | | |
|---|---|---|---|
| Identities = 182/406 (44%), Positives = 254/406 (61%), Gaps = 12/406 (2%) | | | |
| Query: | 9 | ERVILVGVELQDT--ENFEMSMEELASLAKTAGANVVNHYYQKRDKYDSKSFIGSGKLEE | 66 |
| | | ERV LV +L + E FE S+EEL +L TA V++ QKR+ + ++IG GKL+E | |
| Sbjct: | 10 | ERVFLVACQLPNMTDEQFEASLEELEALTLTAQGTVIDRLTQKREAIEPATYIGRGKLDE | 69 |
| Query: | 67 | IKAIVEADEIDTVVVNNRLTPRQNSNLEAELGVKVIDRMQLILDIFAMRARSHEGKLQVH | 126 |
| | | + +E E D V+VN L+ Q NL LGV+VIDR QLILDIFA RA+S EGKLQV | |
| Sbjct: | 70 | LAIKMEEQEADLVIVNGELSGSQVRNLTNRLGVRVIDRTQLILDIFAGRAKSREGKLQVE | 129 |
| Query: | 127 | LAQLKYMLPRLVGQGIMLSRQAGGIGSRGPGESQLELNRRSIRHQISDIERQLKIVEKNR | 186 |
| | | LAQL Y+LPR+VGQG LSR GGIG+RGPGE++LE +RR IR +++DI++QLK K+R | |
| Sbjct: | 130 | LAQLNYLLPRIVGQGQGLSRLGGGIGTRGPGETKLETDRRHIRKRMADIDKQLKHTVKHR | 189 |
| Query: | 187 | ETVRERRVDSTTFKIGLIGYTNAGKSTIMNVLTDDRQYEANELFATLDATTKQIYLQNQF | 246 |
| | | + R RR + TF+I L+GYTNAGKST++N LT YE + LFATLD T+++ L + | |
| Sbjct: | 190 | DRYRARRERNQTFRIALVGYTNAGKSTLLNRLTASDSYEEDLLFATLDPMTRKMRLPSGM | 249 |
| Query: | 247 | QVTLTDTVGFIQDLPTELVAAFKSTLEESRHVDLLFHVIDASDPNHEEHEKVVMEILKDL | 306 |
| | | +V L+DTVGFI LPT LVAAF+STLEE +H DLL HV+D S + H + V E+L L | |
| Sbjct: | 250 | EVILSDTVGFINQLPTTLVAAFRSTLEEVKHADLLLHVVDRSSEQLQAHMETVSELLHQL | 309 |
| Query: | 307 | DMIDIPRLAIYNKMDVTEQLNATTFP-----NVRIAAKKQGSKDLLRRLIVDEIRHIFDE | 361 |
| | | ++ L +YNK D + N P + ++A K+ LR++I + +F | |
| Sbjct: | 310 | EVDQSQMLVVYNKAD---KPNLPIIPVHQQNGIEMSAHKREDIQRLRQMIERTLVDLFTP | 366 |
| Query: | 362 | FSIRVHQNQAYKLYDLNKIALLDTYTFEEEYE--NITGYISPKQKW | 405 |
| | | + + ++ KL L + ++ ++E+ E + GY+ P W | |
| Sbjct: | 367 | YVTELASDEGNKLAKLRRETIMTEMKWDEDRECYQVKGYVHPNHAW | 412 |

[4862] A related DNA sequence was identified in S. pyogenes <SEQ ID 2615> which encodes the amino acid sequence <SEQ ID 2616>. Analysis of this protein sequence reveals the following:

Possible site: 48
>>> Seems to have an uncleavable N-term signal seq
----- Final Results -----
bacterial membrane --- Certainty = 0.0000 (Not Clear) < succ>
bacterial outside --- Certainty = 0.0000 (Not Clear) < succ>
bacterial cytoplasm --- Certainty = 0.0000 (Not Clear) < succ>

[4863] The protein has homology with the following sequences in the databases:

| >GP: BAB06081 GB: AP001515 unknown conserved protein [Bacillus halodurans] | | | |
|---|---|---|---|
| Identities = 185/403 (45%), Positives = 246/403 (60%), Gaps = 6/403 (1%) | | | |
| Query: | 13 | ERVILLGVEL--QTTEHFDMSMTELANLAKTAGVKVMASFSQKRERYDSKTFIGSGKLDE | 70 |
| | | ERV L+ +L T E F+ S+ EL L TA V+ +QKRE + T+IG GKLDE | |
| Sbjct: | 10 | ERVFLVACQLPNMTDEQFEASLEELEALTLTAQGTVIDRLTQKREAIEPATYIGRGKLDE | 69 |
| Query: | 71 | IKAIVEADEIDAVIVNNRLTARQNANLEAVLEVKVIDRMQLILDIFAMRARSHEGKLQVH | 130 |
| | | + +E E D VIVN L+ Q NL L V+VIDR QLILDIFA RA+S EGKLQV | |
| Sbjct: | 70 | LAIKMEEQEADLVIVNGELSGSQVRNLTNRLGVRVIDRTQLILDIFAGRAKSREGKLQVE | 129 |
| Query: | 131 | LAQLKYMLPRLVGQGIMLSRQAGGIGSRGPGESQLELNRRSIRHQIADIERQLTQVEKNR | 190 |
| | | LAQL Y+LPR+VGQG LSR GGIG+RGPGE++LE +RR IR ++ADI++QL K+R | |
| Sbjct: | 130 | LAQLNYLLPRIVGQGQGLSRLGGGIGTRGPGETKLETDRRHIRKRMADIDKQLKHTVKHR | 189 |
| Query: | 191 | QTIRDRRVGSDTFKIGLIGYTNAGKSTIMNLLTDDSHYEANELFATLDATTKQLYLENQF | 250 |
| | | R RR + TF+I L+GYTNAGKST++N LT YE + LFATLD T+++ L + | |
| Sbjct: | 190 | DRYRARRERNQTFRIALVGYTNAGKSTLLNRLTASDSYEEDLLFATLDPMTRKMRLPSGM | 249 |
| Query: | 251 | QATLTDTVGFIQDLPTELVAAFKSTLEESKYVDLLLHVIDASDPNHSEQEKVVLNLLKEL | 310 |
| | | + L+DTVGFI LPT LVAAF+STLEE K+ DLLLHV+D S + V LL +L | |
| Sbjct: | 250 | EVILSDTVGFINQLPTTLVAAFRSTLEEVKHADLLLHVVDRSSEQLQAHMETVSELLHQL | 309 |
| Query: | 311 | DMLNIPRLAIYNKVDIAEQ--FTATAFPNIRISARSKDSKILLRRLIIDQIRDQFVPFRI | 368 |
| | | ++ L +YNK D I +SA ++ LR++I + D F P+ | |
| Sbjct: | 310 | EVDQSQMLVVYNKADKPNLPIIPVHQQNGIEMSAHKREDIQRLRQMIERTLVDLFTPYVT | 369 |
| Query: | 369 | KVHQDKAYKLYDLNRVALLDHYTFDQEIE--DISGYISPKQQW | 409 |
| | | ++ D+ KL L R ++ +D++ E + GY+ P W | |
| Sbjct: | 370 | ELASDEGNKLAKLRRETIMTEMKWDEDRECYQVKGYVHPNHAW | 412 |

[4864] An alignment of the GAS and GBS proteins is shown below.

| Identities = 326/412 (79%), Positives = 375/412 (90%) | | | |
|---|---|---|---|
| Query: | 1 | MIETKEEQERVILVGVELQDTENFEMSMEELASLAKTAGANVVNHYYQKRDKYDSKSFIG | 60 |
| | | MIETK +QERVIL+GVELQ TE+F+MSM ELA+LAKTAG V+ + QKR++YDSK+FIG | |
| Sbjct: | 5 | MIETKRQQERVILLGVELQTTEHFDMSMTELANLAKTAGVKVMASFSQKRERYDSKTFIG | 64 |
| Query: | 61 | SGKLEEIKAIVEADEIDTVVVNNRLTPRQNSNLEAELGVKVIDRMQLILDIFAMRARSHE | 120 |
| | | SGKL+EIKAIVEADEID V+VNNRLT RQN+NLEA L VKVIDRMQLILDIFAMRARSHE | |
| Sbjct: | 65 | SGKLDEIKAIVEADEIDAVIVNNRLTARQNANLEAVLEVKVIDRMQLILDIFAMRARSHE | 124 |
| Query: | 121 | GKLQVHLAQLKYMLPRLVGQGIMLSRQAGGIGSRGPGESQLELNRRSIRHQISDIERQLK | 180 |
| | | GKLQVHLAQLKYMLPRLVGQGIMLSRQAGGIGSRGPGESQLELNRRSIRHQI+DIERQL | |
| Sbjct: | 125 | GKLQVHLAQLKYMLPRLVGQGIMLSRQAGGIGSRGPGESQLELNRRSIRHQIADIERQLT | 184 |
| Query: | 181 | IVEKNRETVRERRVDSTTFKIGLIGYTNAGKSTIMNVLTDDKQYEANELFATLDATTKQI | 240 |
| | | VEKNR+T+R+RRV S TFKIGLIGYTNAGKSTIMN+LTDD YEANELFATLDATTKQ+ | |
| Sbjct: | 185 | QVEKNRQTIRDRRVGSDTFKIGLIGYTNAGKSTIMNLLTDDSHYEANELFATLDATTKQL | 244 |
| Query: | 241 | YLQNQFQVTLTDTVGFIQDLPTELVAAFKSTLEESRHVDLLFHVIDASDPNHEEHEKVVM | 300 |
| | | YL+NQFQ TLTDTVGFIQDLPTELVAAFKSTLEES++VDLL HVIDASDPNH E EKVV+ | |
| Sbjct: | 245 | YLENQFQATLTDTVGFIQDLPTELVAAFKSTLEESKYVDLLLHVIDASDPNHSEQEKVVL | 304 |
| Query: | 301 | EILKDLDMIDIPRLAIYNKMDVTEQLNATTFPNVRIAAKKQGSKDLLRRLIVDEIRHIFD | 360 |
| | | +LK+LDM++IPRLAIYNK+D+ EQ AT FPN+RI+A+ + SK LLRRLI+D+IR F | |
| Sbjct: | 305 | NLLKELDMLNIPRLAIYNKVDIAEQFTATAFPNIRISARSKDSKILLRRLIIDQIRDQFV | 364 |
| Query: | 361 | EFSIRVHQNQAYKLYDLNKIALLDTYTFEEEYENITGYISPKQKWKLEEFYD | 412 |
| | | F I+VHQ++AYKLYDLN++ALLD YTF++E E+I+GYISPKQ+W+L++FY+ | |
| Sbjct: | 365 | PFRIKVHQDKAYKLYDLNRVALLDHYTFDQEIEDISGYISPKQQWRLDDFYE | 416 |

[4865] Based on this analysis, it was predicted that these proteins and their epitopes could be useful antigens for vaccines or diagnostics.

### EXAMPLE 864

[4866] A DNA sequence (GBSx0916) was identified in S. agalactiae <SEQ ID 2617> which encodes the amino acid sequence <SEQ ID 2618>. Analysis of this protein sequence reveals the following:

Possible site: 46
>>> Seems to have no N-terminal signal sequence
----- Final Results -----
bacterial cytoplasm --- Certainty = 0.2044 (Affirmative) < succ>
bacterial membrane --- Certainty = 0.0000 (Not Clear) < succ>
bacterial outside --- Certainty = 0.0000 (Not Clear) < succ>

[4867] The protein has no significant homology with any sequences in the GENPEPT database.

[4868] A related DNA sequence was identified in S. pyogenes <SEQ ID 2619> which encodes the amino acid sequence <SEQ ID 2620>. Analysis of this protein sequence reveals the following:

Possible site: 40
>>> Seems to have no N-terminal signal sequence
----- Final Results -----
bacterial cytoplasm --- Certainty = 0.3436 (Affirmative) < succ>
bacterial membrane --- Certainty = 0.0000 (Not Clear) < succ>
bacterial outside --- Certainty = 0.0000 (Not Clear) < succ>

[4869] An alignment of the GAS and GBS proteins is shown below.

| Identities = 124/209 (59%), Positives = 150/209 (71%) | | | |
|---|---|---|---|
| Query: | 1 | MIDYIDLALTYGGFTSLDKVYLEKKLDGLSKQQRLDFITPPPSVINAYFAEIYQKQGPEA | 60 |
| | | M +YIDLA TYGGFTSLD YL L L+ QQ+L FITPPPSVINAYFAEIYQKQ P+A | |
| Sbjct: | 5 | MNNYIDLAKTYGGFTSLDTNYLNHLLASLTDQQKLAFITPPPSVINAYFAEIYQKQSPQA | 64 |
| Query: | 61 | ATDYYFDLSKALGLFPKHLSFDEEKPFIRLNLSGKSFGFAYLNDQEEASVFSEVKEVITP | 120 |
| | | ATDYYF+LSKALGLF SF+EEKPF+RLNLSGK++GFAY NDQE A VFSE E P | |
| Sbjct: | 65 | ATDYYFNLSKALGLFTDQPSFEEEKPFVRLNLSGKAYGFAYQNDQEVALVFSEKAEPKKP | 124 |
| Query: | 121 | QLLLEIAQIFPQYKVYRDRSGIRMAKIDFDETESQNITPETSLLGNVLQLKKDIIKITSF | 180 |
| | | +L E+ QIFPQY VY D+ ++M F++ E ++ITP+ +LL + +L I + F | |
| Sbjct: | 125 | ELFFELTQIFPQYMVYEDKGQLKMQAKQFEQGECEDITPDDTLLSKIYRLANGITMLKGF | 184 |
| Query: | 181 | NQEELLELVKTKSGKYYYSSQGRESVIYI | 209 |
| | | N EEL L +T SG+ YY RE +IYI | |
| Sbjct: | 185 | NVEELWALSQTFSGQKYYDFAQREFMIYI | 213 |

[4870] Based on this analysis, it was predicted that these proteins and their epitopes could be useful antigens for vaccines or diagnostics.

### EXAMPLE 865

[4871] A DNA sequence (GBSx0917) was identified in S. agalactiae <SEQ ID 2621> which encodes the amino acid sequence <SEQ ID 2622>. Analysis of this protein sequence reveals the following:

Possible site: 16
>>> Seems to have no N-terminal signal sequence
----- Final Results -----
bacterial cytoplasm --- Certainty = 0.1060 (Affirmative) < succ>
bacterial membrane --- Certainty = 0.0000 (Not Clear) < succ>
bacterial outside --- Certainty = 0.0000 (Not Clear) < succ>

[4872] A related GBS nucleic acid sequence <SEQ ID 9895> which encodes amino acid sequence <SEQ ID 9896> was also identified.

[4873] The protein has homology with the following sequences in the GENPEPT database.

| >GP: CAB14316 GB: Z99116 similar to hypothetical proteins [Bacillus subtilis] | | | |
|---|---|---|---|
| Identities = 156/309 (50%), Positives = 210/309 (67%), Gaps = 5/309 (1%) | | | |
| Query: | 1 | MEIQFLGTGAGQPAKARNVSSLVLKLLDEINEVWMFDCGEGTQRQILETTIKPRKVKKIF | 60 |
| | | ME+ FLGTGAG PAKARNV+S+ LKLL+E VW+FDCGE TQ QIL TTIKPRK++KIF | |
| Sbjct: | 1 | MELLFLGTGAGIPAKARNVTSVALKLLEERRSVWLFDCGEATQHQILHTTIKPRKIEKIF | 60 |
| Query: | 61 | ITHMHGDHVFGLPGFLSSRAFQANEEQTDLDIYGPVGIKSFVMTALRTSGSRLPYRIHFH | 120 |
| | | ITHMHGDHV+GLPG L SR+FQ E++ L +YGP GIK+F+ T+L + + L Y + | |
| Sbjct: | 61 | ITHMHGDHVYGLPGLLGSRSFQGGEDE--LTVYGPKGIKAFIETSLAVTKTHLTYPLAIQ | 118 |
| Query: | 121 | EFDESSLGKIMETDKFTVYAEKLDHTIFCMGYRVVQKDLEGTLDAEALKLAGVPFGPLFG | 180 |
| | | E +E G + E D+F V A + H + GYRV +KD+ G+L A+ LK +P GP++ | |
| Sbjct: | 119 | EIEE---GIVFEDDQFIVTAVSVIHGVEAFGYRVQEKDVPGSLKADVLKEMNIPPGPVYQ | 175 |
| Query: | 181 | KVKNGENVTLEDGREIIAKDYISEPKKGKVITILGDTRKTDASIRLALGADVLVHESTYG | 240 |
| | | K+K GE VTLEDGR I D++ PKKG+ + GDTR +D LA DVLVHE+T+ | |
| Sbjct: | 176 | KIKKGETVTLEDGRIINGNDFLEPPKKGRSVVFSGDTRVSDKLKELARDCDVLVHEATFA | 235 |
| Query: | 241 | KGDERIAKSHGHSTNMQAADIAKQANAKRLLLNHVSARFMGRDCWQMEEDAKTIFSNTHL | 300 |
| | | K D ++A + HST QAA AK+A AK+L+L H+SAR+ G +++++A +F N+ | |
| Sbjct: | 236 | KEDRKLAYDYYHSTTEQAAVTAKEARAKQLILTHISARYQGDASLELQKEAVDVFPNSVA | 295 |
| Query: | 301 | VRDLEEVGI | 309 |
| | | D EV + | |
| Sbjct: | 296 | AYDFLEVNV | 304 |

[4874] A related DNA sequence was identified in S. pyogenes <SEQ ID 2623> which encodes the amino acid sequence <SEQ ID 2624>. Analysis of this protein sequence reveals the following:

Possible site: 16
>>> Seems to have no N-terminal signal sequence
----- Final Results -----
bacterial cytoplasm --- Certainty = 0.2352 (Affirmative) < succ>
bacterial membrane --- Certainty = 0.0000 (Not Clear) < succ>
bacterial outside --- Certainty = 0.0000 (Not Clear) < succ>

[4875] An alignment of the GAS and GBS proteins is shown below.

| Identities = 253/307 (82%), Positives = 285/307 (92%) | | | |
|---|---|---|---|
| Query: | 1 | MEIQFLGTGAGQPAKARNVSSLVLKLLDEINEVWMFDCGEGTQRQILETTIKPRKVKKIF | 60 |
| | | ME+QFLGTGAGQPAK RNVSSL LKLLDEINEVWMFDCGEGTQRQILETTIKPRK++KIF | |
| Sbjct: | 1 | MELQFLGTGAGQPAKQRNVSSLALKLLDEINEVWMFDCGEGTQRQILETTIKPRKIRKIF | 60 |
| Query: | 61 | ITHMHGDHVFGLPGFLSSRAFQANEEQTDLDIYGPVGIKSFVMTALRTSGSRLPYRIHFH | 120 |
| | | ITH+HGDH+FGLPGFLSSR+FQA+EEQTDLDIYGP+GIK++V+T+L+ SG+R+PY+IHFH | |
| Sbjct: | 61 | ITHLHGDHIFGLPGFLSSRSFQASEEQTDLDIYGPIGIKTYVLTSLKVSGARVPYQIHFH | 120 |
| Query: | 121 | EFDESSLGKIMETDKFTVYAEKLDHTIFCMGYRVVQKDLEGTLDAEALKLAGVPFGPLFG | 180 |
| | | EFD+ SLGKIMETDKF VYAE+L HTIFCMGYRVVQKDLEGTLDAEALK AGVPFGPLFG | |
| Sbjct: | 121 | EFDDKSLGKIMETDKFEVYAERLAHTIFCMGYRVVQKDLEGTLDAEALKAAGVPFGPLFG | 180 |
| Query: | 181 | KVKNGENVTLEDGREIIAKDYISEPKKGKVITILGDTRKTDASIRLALGADVLVHESTYG | 240 |
| | | K+KNG++V LEDGR I AKDYIS PKKGK+ITI+GDTRKT AS++LA ADVLVHESTYG | |
| Sbjct: | 181 | KIKNGQDVELEDGRLICAKDYISAPKKGKIITIIGDTRKTSASVKLAKDADVLVHESTYG | 240 |
| Query: | 241 | KGDERIAKSHGHSTNMQAADIAKQANAKRLLLNHVSARFMGRDCWQMEEDAKTIFSNTHL | 300 |
| | | KGDERIA++HGHSTNMQAA IA +A AKRLLLNHVSARF+GRDC QME+DA TIF N + | |
| Sbjct: | 241 | KGDERIARNHGHSTNMQAAQIAHEAGAKRLLLNHVSARFLGRDCRQMEKDAATIFENVKM | 300 |
| Query: | 301 | VRDLEEV | 307 |
| | | V+DLEEV | |
| Sbjct: | 301 | VQDLEEV | 307 |

[4876] Based on this analysis, it was predicted that these proteins and their epitopes could be useful antigens for vaccines or diagnostics.

### EXAMPLE 866

[4877] A DNA sequence (GBSx0918) was identified in S. agalactiae <SEQ ID 2625> which encodes the amino acid sequence <SEQ ID 2626>. This protein is predicted to be similar to ketoacyl reductase. Analysis of this protein sequence reveals the following:

Possible site: 17
>>> Seems to have no N-terminal signal sequence
----- Final Results -----
bacterial membrane --- Certainty = 0.0000 (Not Clear) < succ>
bacterial outside --- Certainty = 0.0000 (Not Clear) < succ>
bacterial cytoplasm --- Certainty = 0.0000 (Not Clear) < succ>

[4878] The protein has homology with the following sequences in the GENPEPT database.

| >GP: CAB14310 GB: Z99116 similar to ketoacyl reductase [Bacillus subtilis] | | | |
|---|---|---|---|
| Identities = 100/253 (39%), Positives = 152/253 (59%), Gaps = 2/253 (0%) | | | |
| Query: | 3 | RTILITGASGGLAQAIINQLPQDD-HLIVTGRSREKLEKLYGKRPNTLCLSLDITN-DNA | 60 |
| | | + I ITGASGGL + I + H++++ R ++L ++ K +I D | |
| Sbjct: | 7 | KRIWITGASGGLGERIAYLCAAEGAHVLLSARREDRLIEIKRKITEEWSGQCEIFPLDVG | 66 |
| Query: | 61 | VTNMIEKIYGEFGQIDILINNAGFGSFKEFWDYSDEEVKDMFAVNTFATMSIARQIGHKM | 120 |
| | | I ++ + G ID+LINNAGFG F+ D + +++K MF VN F ++ + + +M | |
| Sbjct: | 67 | RLEDIARVRDQIGSIDVLINNAGFGIFETVLDSTLDDMKAMFDVNVFGLIACTKAVLPQM | 126 |
| Query: | 121 | SLVKSGHIVNIASMAGLIATSKASVYGASKFAVVGFSNALRLELAEKNVYVTSVNPGPIK | 180 |
| | | K GHI+NIAS AG IAT K+S+Y A+K AV+G+SNALR+EL+ +YVT+VNPGPI+ | |
| Sbjct: | 127 | LEQKKGHIINIASQAGKIATPKSSLYSATKHAVLGYSNALRMELSGTGIYVTTVNPGPIQ | 186 |
| Query: | 181 | TGFFAQADPSGDYLASIGRFALTPEKVSKKVVSILGKNKRELNLPFILAFAHKYYSLFPK | 240 |
| | | T FF+ AD GDY ++GR+ L P+ V+ ++ + + KRE+NLP ++ K Y LFP | |
| Sbjct: | 187 | TDFFSIADKGGDYAKNVGRWMLDPDDVAAQITAAIFTKKREINLPRLMNAGTKLYQLFPA | 246 |
| Query: | 241 | TADYFARKVFNYK | 253 |
| | | + A + K | |
| Sbjct: | 247 | LVEKLAGRALMKK | 259 |

[4879] A related DNA sequence was identified in S. pyogenes <SEQ ID 2627> which encodes the amino acid sequence <SEQ ID 2628>. Analysis of this protein sequence reveals the following:

Possible site: 18
>>> Seems to have a cleavable N-term signal seq.
----- Final Results -----
bacterial outside --- Certainty = 0.3000 (Affirmative) < succ>
bacterial membrane --- Certainty = 0.0000 (Not Clear) < succ>
bacterial cytoplasm --- Certainty = 0.0000 (Not Clear) < succ>

[4880] The protein has homology with the following sequences in the databases:

| >GP: BAB05225 GB: AP001512 oxidoreductase [Bacillus halodurans] | | | |
|---|---|---|---|
| Identities = 107/259 (41%), Positives = 156/259 (59%), Gaps = 5/259 (1%) | | | |
| Query: | 1 | MAQRIIVITGASGGLAQAIVKQLPKEDSLI-LLGRNKERLEHCYQHI----DNKECLELD | 55 |
| | | M ++ I ITGAS GL + + E++++ L R++ERLE+ + + +D | |
| Sbjct: | 1 | MRKKTIFITGASSGLGRQLAIDFSWEETVLCLFARSQERLENVQRIVVENGGEAHIYPVD | 60 |
| Query: | 56 | ITNPVAIEKMVAQIYQRYGRIDVLINNAGYGAFKGFEEFSAQEIADMFQVNTLASIHFAC | 115 |
| | | + +P +I++ A+ G +DVLINNAGYG F+ F + E MF+VN + | |
| Sbjct: | 61 | LADPQSIDRSFAEAISAVGVVDVLINNAGYGVFEPFCDSQMDENERMFRVNVFGLMRATA | 120 |
| Query: | 116 | LIGQKMAEQGQGHLINIVSMAGLIASAKSSIYSATKFALIGFSNALRLELADKGVYVTTV | 175 |
| | | + M EQG GH+INI S AG IA+AKS+IYSATK A++GF+N+LR+EL G++V+ V | |
| Sbjct: | 121 | AVLPTMREQGSGHIINIASQAGKIATAKSAIYSATKHAVLGFTNSLRMELKGTGIHVSAV | 180 |
| Query: | 176 | NPGPIATKFFDQADPSGHYLESVGKFTLQPNQVAKRLVSIIGKNKRELNLPFSLAVTHQF | 235 |
| | | NPGPI T FFDQAD G Y V + L P V++++V + K KRELNLP+ + + | |
| Sbjct: | 181 | NPGPIQTPFFDQADKEGAYTSKVQRIMLDPEDVSEKIVQLTKKPKRELNLPWWMNIGATA | 240 |
| Query: | 236 | YTLFPKLSDYLARKVFNYK | 254 |
| | | Y + P+L + LA K F K | |
| Sbjct: | 241 | YQVAPRLLELLAGKQFRQK | 259 |

[4881] An alignment of the GAS and GBS proteins is shown below.

| Identities = 155/251 (61%), Positives = 200/251 (78%) | | | |
|---|---|---|---|
| Query: | 3 | RTILITGASGGLAQAIINQLPQDDHLIVTGRSREKLEKLYGKRPNTLCLSLDITNDNAVT | 62 |
| | | R I+ITGASGGLAQAI+ QLP++D LI+ GR++E+LE Y N CL LDITN A+ | |
| Sbjct: | 4 | RIIVITGASGGLAQAIVKQLPKEDSLILLGRNKERLEHCYQHIDNKECLELDITNPVAIE | 63 |
| Query: | 63 | NMIEKIYGEFGQIDILINNAGFGSFKEFWDYSDEEVKDMFAVNTFATMSIARQIGHKMSL | 122 |
| | | M+ +IY +G+ID+LINNAG+G+FK F ++S +E+ DMF VNT A++ A IG KM+ | |
| Sbjct: | 64 | KMVAQIYQRYGRIDVLINNAGYGAFKGFEEFSAQEIADMFQVNTLASIHFACLIGQKMAE | 123 |
| Query: | 123 | VKSGHIVNIASMAGLIATSKASVYGASKFAVVGFSNALRLELAEKNVYVTSVNPGPIKTG | 182 |
| | | GH++NI SMAGLIA++K+S+Y A+KFA++GFSNALRLELA+K VYVT+VNPGPI T | |
| Sbjct: | 124 | QGQGHLINIVSMAGLIASAKSSIYSATKFALIGFSNALRLELADKGVYVTTVNPGPIATK | 183 |
| Query: | 183 | FFAQADPSGDYLASIGRFALTPEKVSKKVVSILGKNKRELNLPFILAFAHKYYSLFPKTA | 242 |
| | | FF QADPSG YL S+G+F L P +V+K++VSI+GKNKRELNLPF LA H++Y+LFPK + | |
| Sbjct: | 184 | FFDQADPSGHYLESVGKFTLQPNQVAKRLVSIIGKNKRELNLPFSLAVTHQFYTLFPKLS | 243 |
| Query: | 243 | DYFARKVFNYK | 253 |
| | | DY ARKVFNYK | |
| Sbjct: | 244 | DYLARKVFNYK | 254 |

[4882] Based on this analysis, it was predicted that these proteins and their epitopes could be useful antigens for vaccines or diagnostics.

### EXAMPLE 867

[4883] A DNA sequence (GBSx0919) was identified in S. agalactiae <SEQ ID 2629> which encodes the amino acid sequence <SEQ ID 2630>. This protein is predicted to be single-stranded-DNA-specific exonuclease (recJ). Analysis of this protein sequence reveals the following:

| Possible site: 31 | | | |
|---|---|---|---|
| >>> Seems to have no N-terminal signal sequence | | | |
| INTEGRAL | Likelihood = −0.16 | Transmembrane | 197-213 (197-213) |

----- Final Results -----
bacterial membrane --- Certainty = 0.1065 (Affirmative) < succ>
bacterial outside --- Certainty = 0.0000 (Not Clear) < succ>
bacterial cytoplasm --- Certainty = 0.0000 (Not Clear) < succ>

[4884] The protein has homology with the following sequences in the GENPEPT database.

| >GP: CAB14721 GB: Z99118 similar to single-strand DNA-specific | | | |
|---|---|---|---|
| exonuclease [Bacillus subtilis] | | | |
| Identities = 276/772 (35%), Positives = 447/772 (57%), Gaps = 45/772 (5%) | | | |
| Query: | 1 | MISAKYSWVLNNQKPDAGFFEASKKE-KISEAVASLIYSRGIKTSAELHHFLQTNLENLH | 59 |
| | | M+++K W + Q+PD ++ ++ I+ VASL+ RG T+ FL T + + | |
| Sbjct: | 1 | MLASKMRWEI--QRPDQDKVKSLTEQLHITPLVASLLVKRGFDTAESARLFLHTKDADFY | 58 |
| Query: | 60 | DPYLLNDMDKAVNRIRRAIENNETILVYGDYDADGMTSASIMKEALDMMGAEVQVYLPNR | 119 |
| | | DP+ + M +A +RI++AI E I++YGDYDADG+TS S+M L + A+V Y+P+R | |
| Sbjct: | 59 | DPFEMKGMKEAADRIKQAISQQEKIMIYGDYDADGVTSTSVMLHTLQKLSAQVDFYIPDR | 118 |
| Query: | 120 | FTDGYGPNQSVYKYFIEQQDVSLIITVDNGVAGHEAITYAQNQGVDVVVTDHHSMPADLP | 179 |
| | | F +GYGPN+ ++ I+++ SLIITVD G+A A+ G+DV++TDHH +LP | |
| Sbjct: | 119 | FKEGYGPNEQAFRS-IKERGFSLIITVDTGIAAVHEAKVAKELGLDVIITDHHEPGPELP | 177 |
| Query: | 180 | CAYAIIHPEHPDANYPFPYLAGCGVAFKVACALLETIPTEMLDLVAIGTIADMVSLTDEN | 239 |
| | | AI+HP+ P YPF LAG GVAFK+A ALL +P E+LDL AIGTIAD+V L DEN | |
| Sbjct: | 178 | DVRAIVHPKQPGCTYPFKELAGVGVAFKLAHALLGELPDELLDLAAIGTIADLVPLHDEN | 237 |
| Query: | 240 | RIMVKAGLEVMKDSERIGLQELISLSNIDLKTLNEETIGFKIAPQLNALGRLDDPNPAIE | 299 |
| | | R++ GLE ++ + R+GL+ELI LS D+ NEET+GF++AP+LNA+GR++ +PA+ | |
| Sbjct: | 238 | RLIATLGLERLRRTNRLGLKELIKLSGGDIGEANEETVGFQLAPRLNAVGRIEQADPAVH | 297 |
| Query: | 300 | LLTGFDDEESQAIAQMIDQKNEERKEIVQTIFDQAMQMLDQ---TKPVQVLAKENWHPGV | 356 |
| | | LL D E++ +A IDQ N+ER+++V + D+A++M++Q + V+AK W+PGV | |
| Sbjct: | 298 | LLMSEDSFEAEELAAEIDQLNKERQKMVSKMTDEAIEMVEQQGLDQTAIVVAKAGWNPGV | 357 |
| Query: | 357 | LGIVAGRILERTGQPVIVLNI--EDGIAKGSARSVEALDIFQAFDQHRELFIAFGGHSGA | 414 |
| | | +GIVA ++++R +P IVL I E GIAKGSARS+ ++F++ + R++ FGGH A | |
| Sbjct: | 358 | VGIVASKLVDRFYRPAIVLGIDEEKGIAKGSARSIRGFNLFESLSECRDILPHFGGHPMA | 417 |
| Query: | 415 | AGMTLEESKVGDLSQVLCDYISKKQLDMSQKKTLTIDSELRFDELSLDTVRDFEKLAPFG | 474 |
| | | AGMTL+ V DL L + + +D ++++++++ + L+PFG | |
| Sbjct: | 418 | AGMTLKAEDVPDLRSRLNEIADNTLTEEDFIPVQEVDLVCGVEDITVESIAEMNMLSPFG | 477 |
| Query: | 475 | MDNKKPVFLLKDFKVSQARVMGQNGAHLKLKLEQDGQALDLVAFNMGSQLQEFQQAQHLE | 534 |
| | | M N KP L+++ + R +G N H+K+ + + LD V FN G + + | |
| Sbjct: | 478 | MLNPKPHVLVENAVLEDVRKIGANKTHVKMTIRNESSQLDCVGFNKGELQEGIVPGSRIS | 537 |
| Query: | 535 | LAVTLSVNQWNGATTLQLMLEDARVDGIQLFDIRSK------ASSLPHG----------- | 577 |
| | | + +S+N+WN QLM++DA V QLFD+R K S+LP | |
| Sbjct: | 538 | IVGEMSINEWNNRKKPQLMIKDAAVSEWQLFDLRGKRTWEDTVSALPSAKRAIVSFKEDS | 597 |
| Query: | 578 | ------------VPILSQEEQSKE-------VILLTVPDHPQELKQMTQGKQFDAIYFKN | 618 |
| | | V ++S ++Q+K ++LL P L ++ +GK + IYF | |
| Sbjct: | 598 | TTLLQTEDLRREVHVISSKDQAKAFDLDGAYIVLLDPPPSLDMLARLLEGKAPERIYFIF | 657 |
| Query: | 619 | EIPKNYFISGYGTRDQFASLYKTIYQFPEFDVRYKLKELSSYLHIPDILLIKMIQIFEEL | 678 |
| | | +++F+S + RD F Y + + FDV+ EL+ + + M ++F +L | |
| Sbjct: | 658 | LNHEDHFLSTFPARDHFKWYYAFLLKRGAFDVKKHGSELAKHKGWSVETINFMTKVFFDL | 717 |
| Query: | 679 | HFVTITEGIMTVNKEAEKRDISESQIYQELKETVKFQELMALGTPKEIYDFM | 730 |
| | | FV I G+++V A+KRD+++SQ YQ ++ ++ + + + +E+ +++ | |
| Sbjct: | 718 | GFVKIENGVLSVVSGAKKRDLTDSQTYQAKQQLMELDQKLNYSSAEELKEWL | 769 |

[4885] A related DNA sequence was identified in S. pyogenes <SEQ ID 2631> which encodes the amino acid sequence <SEQ ID 2632>. Analysis of this protein sequence reveals the following:

| Possible site: 31 | | | |
|---|---|---|---|
| >>> Seems to have no N-terminal signal sequence | | | |
| INTEGRAL | Likelihood = −0.16 | Transmembrane | 220-236 (220-236) |
| INTEGRAL | Likelihood = −0.11 | Transmembrane | 667-683 (667-683) |

----- Final Results -----
bacterial membrane --- Certainty = 0.1065 (Affirmative) < succ>
bacterial outside --- Certainty = 0.0000 (Not Clear) < succ>
bacterial cytoplasm --- Certainty = 0.0000 (Not Clear) < succ>

[4886] An alignment of the GAS and GBS proteins is shown below.

| Identities = 474/731 (64%), Positives = 594/731 (80%) | | | |
|---|---|---|---|
| Query: | 1 | MISAKYSWVLNNQKPDAGFFEASKKEKISEAVASLIYSRGIKTSAELHHFLQTNLENLHD | 60 |
| | | MI +KYSW + ++KPD GFF+ +K + +++ A LIY RGI+T L FL +L LHD | |
| Sbjct: | 1 | MIKSKYSWKIKDKKPDDGFFKLAKTKGLTQTAAQLIYDRGIRTEEALDEFLTADLSQLHD | 60 |
| Query: | 61 | PYLLNDMDKAVNRIRRAIENNETILVYGDYDADGMTSASIMKEALDMMGAEVQVYLPNRF | 120 |
| | | PYLL+DM KAV RIR+AIE E IL+YGDYDADGMTSASI+KE LDMMGAE VYLPNRF | |
| Sbjct: | 61 | PYLLHDMAKAVPRIRQAIEEGERILIYGDYDADGMTSASIVKETLDMMGAEPLVYLPNRF | 120 |
| Query: | 121 | TDGYGPNQSVYKYFIEQQDVSLIITVDNGVAGHEAITYAQNQGVDVVVTDHHSMPADLPC | 180 |
| | | TDGYGPNQSVYKYFIEQ+ VSLIITVDNGVAGHEAI YAQ Q VDV+VTDHHS+P +LP | |
| Sbjct: | 121 | TDGYGPNQSVYKYFIEQEAVSLIITVDNGVAGHEAIRYAQEQEVDVIVTDHHSLPEELPE | 180 |
| Query: | 181 | AYAIIHPEHPDANYPFPYLAGCGVAFKVACALLETIPTEMLDLVAIGTIADMVSLTDENR | 240 |
| | | A+AIIHPEHPDA+YPF +LAGCGVAFK+A ALLE++PT+ LDLVAIGTIADMVSLT ENR | |
| Sbjct: | 181 | AFAIIHPEHPDADYPFKHLAGCGVAFKLATALLESLPTDCLDLVAIGTIADMVSLTGENR | 240 |
| Query: | 241 | IMVKAGLEVMKDSERIGLQELISLSNIDLKTLNEETIGFKIAPQLNALGRLDDPNPAIEL | 300 |
| | | ++VK GL ++K +ER+GLQEL+SLS IDL+ NE+ IGF+IAPQLNALGRLDDPNPAIEL | |
| Sbjct: | 241 | VLVKNGLAMLKHTERVGLQELMSLSPIDLEHFNEDAIGFQIAPQLNALGRLDDPNPAIEL | 300 |
| Query: | 301 | LTGFDDEESQAIAQMIDQKNEERKEIVQTIFDQAMQMLDQTKPVQVLAKENWHPGVLGIV | 360 |
| | | LTGFDD+E+QAIA MI +KNEERK +VQ IFDQAM M+D KPVQVLA+ WHPGVLGIV | |
| Sbjct: | 301 | LTGFDDQEAQAIALMIKKKNEERKALVQDIFDQAMAMVDPQKPVQVLAQAGWHPGVLGIV | 360 |
| Query: | 361 | AGRILERTGQPVIVLNIEDGIAKGSARSVEALDIFQAFDQHRELFIAFGGHSGAAGMTLE | 420 |
| | | AGRI+E GQ V+VL I++G AKGSARS+EA++IF+A + RELF AFGGH+GAAGMTL | |
| Sbjct: | 361 | AGRIMETIGQTVVVLTIDNGFAKGSARSLEAINIFEALNGKRELFTAFGGHAGAAGMTLP | 420 |
| Query: | 421 | ESKVGDLSQVLCDYISKKQLDMSQKKTLTIDSELRFDELSLDTVRDFEKLAPFGMDNKKP | 480 |
| | | + LS LC ++ ++ LD + K TLTID L D+LSLD ++ +KLAP+GMD++KP | |
| Sbjct: | 421 | VDNLEALSDFLCQFVIERGLDQTAKNTLTIDERLSLDDLSLDILKSLDKLAPYGMDHQKP | 480 |
| Query: | 481 | VFLLKDFKVSQARVMGQNGAHLKLKLEQDGQALDLVAFNMGSQLQEFQQAQHLELAVTLS | 540 |
| | | VF +KD +VSQAR +GQ+ +HLK K+ Q + D++AF GSQLQEF+QA LELAVTLS | |
| Sbjct: | 481 | VFYVKDIRVSQARTIGQDQSHLKFKVSQGKASFDVLAFGQGSQLQEFRQATGLELAVTLS | 540 |
| Query: | 541 | VNQWNGATTLQLMLEDARVDGIQLFDIRSKASSLPHGVPILSQEEQSKEVILLTVPDHPQ | 600 |
| | | VN WNG T+LQ ML DARVDG+QL D+R+K + +P G+P + ++ ++ +++ +P+ + | |
| Sbjct: | 541 | VNHWNGNTSLQFMLVDARVDGVQLLDLRTKTAKVPEGIPTIEEDPNARVILINDIPEDFK | 600 |
| Query: | 601 | ELKQMTQGKQFDAIYFKNEIPKNYFISGYGTRDQFASLYKTIYQFPEFDVRYKLKELSSY | 660 |
| | | + K FDAIYFKN++ Y+++G+G+R+QFA LYKTIYQFPEFD+R+KL ELS Y | |
| Sbjct: | 601 | TWRNQFVHKDFDAIYFKNQMKHPYYLTGFGSREQFAKLYKTIYQFPEFDLRHKLTELSHY | 660 |
| Query: | 661 | LHIPDILLIKMIQIFEELHFVTITEGIMTVNKEAEKRDISESQIYQELKETVKFQELMAL | 720 |
| | | L+I +LLIK+IQIFEEL FVTI +G+MTVN +A+KR+ISES IYQ+LKE VKFQE+MAL | |
| Sbjct: | 661 | LNIEKLLLIKLIQIFEELSFVTIDDGLMTVNPQAQKREISESHIYQDLKELVKFQEIMAL | 720 |
| Query: | 721 | GTPKEIYDFMM | 731 |
| | | +PKE+YD+++ | |
| Sbjct: | 721 | ASPKEMYDYLV | 731 |

[4887] Based on this analysis, it was predicted that these proteins and their epitopes could be useful antigens for vaccines or diagnostics.

### EXAMPLE 868

[4888] A DNA sequence (GBSx0920) was identified in S. agalactiae <SEQ ID 2633> which encodes the amino acid sequence <SEQ ID 2634>. Analysis of this protein sequence reveals the following:

Possible site: 13
>>> Seems to have no N-terminal signal sequence
----- Final Results -----
bacterial cytoplasm --- Certainty = 0.4114 (Affirmative) < succ>
bacterial membrane --- Certainty = 0.0000 (Not Clear) < succ>
bacterial outside --- Certainty = 0.0000 (Not Clear) < succ>

[4889] The protein has no significant homology with any sequences in the GENPEPT database.

[4890] No corresponding DNA sequence was identified in S. pyogenes.

[4891] Based on this analysis, it was predicted that this protein and its epitopes, could be useful antigens for vaccines or diagnostics.

### EXAMPLE 869

[4892] A DNA sequence (GBSx0921) was identified in S. agalactiae <SEQ ID 2635> which encodes the amino acid sequence <SEQ ID 2636>. Analysis of this protein sequence reveals the following:

| Possible Site: 42 | | | |
|---|---|---|---|
| >>> Seems to have an uncleavable N-term signal seq | | | |
| INTEGRAL | Likelihood = −5.10 | Transmembrane | 15-31 (14-33) |

----- Final Results -----
bacterial membrane --- Certainty = 0.3039 (Affirmative) < succ>
bacterial outside --- Certainty = 0.0000 (Not Clear) < succ>
bacterial cytoplasm --- Certainty = 0.0000 (Not Clear) < succ>

[4893] The protein has homology with the following sequences in the GENPEPT database.

| >GP: AAA88584 GB: M18954 fructosyltransferase [Streptococcus mutans] | | | |
|---|---|---|---|
| Identities = 67/219 (30%), Positives = 106/219 (47%), Gaps 31/219 (14%) | | | |
| Query: | 1 | MRPIVRKKMYKKGKFWVVAGIVT-ILGGSAILGQDVKAEQAEAVTSTISEKTDSSQTISD | 59 |
| | | M VRKKMYKKGKFWVVA I T +L G + V+A++A + T SE + SQ + | |
| Sbjct: | 1 | METKVRKKMYKKGKFWVVATITTAMLTGIGL--SSVQADEANS-TQVSSELAERSQVQEN | 57 |
| Query: | 60 | TSKLTLPVNSSEAMKNSAEPLIKTAFATSVSSNPREIAATPVKTFDASSKVVVKASTAEH | 119 |
| | | T+ SS A +N A KT + S+NP AA V+ D ++KV+ + E | |
| Sbjct: | 58 | TTA------SSSAAENQA----KTEVQETPSTNP---AAATVENTDQTTKVITDNAAVES | 104 |
| Query: | 120 | SANQTN---SNVNQVANDSEVITQQN------STKQLPTVTYSAHVQDIGW----QKSVD | 166 |
| | | A++T + V + A + + Q N +TK+ T + + G +K | |
| Sbjct: | 105 | KASKTKDQAATVTKTAASTPEVGQTNEKDKAKATKEADITTPKNTIDEYGLTEQARKIAT | 164 |
| Query: | 167 | NATVSGTVGQEKQVEAIKLSIKAPEGITG-KLSYKTYVK | 204 |
| | | A ++ + +KQVEA+ + TG +++Y+ + K | |
| Sbjct: | 165 | EAGINLSSLTQKQVEALNKVKLTSDAQTGHQMTYQEFDK | 203 |

[4894] No corresponding DNA sequence was identified in S. pyogenes.

[4895] Based on this analysis, it was predicted that this protein and its epitopes, could be useful antigens for vaccines or diagnostics.

[4896] A related GBS gene <SEQ ID 8677> and protein <SEQ ID 8678> were also identified. Analysis of this protein sequence reveals the following:

| Lipop Possible site: −1 Crend: 5 | | | |
|---|---|---|---|
| McG: Discrim Score: 9.08 | | | |
| GvH: Signal Score (−7.5): −3.94 | | | |
| Possible site: 34 | | | |
| >>> Seems to have an uncleavable N-term signal seq | | | |
| ALOM program | count: 1 | value: −5.10 | threshold: 0.0 |

| | | | |
|---|---|---|---|
| INTEGRAL | Likelihood = −5.10 | Transmembrane | 7-23 (6-25) |
| PERIPHERAL | Likelihood = 4.03 | 694 | |

modified ALOM score: 1.52
*** Reasoning Step: 3
----- Final Results -----
bacterial membrane --- Certainty = 0.3039 (Affirmative) < succ>
bacterial outside --- Certainty = 0.0000 (Not Clear) < succ>
bacterial cytoplasm --- Certainty = 0.0000 (Not Clear) < succ>

[4897] The protein has homology with the following sequences in the databases:

[chemical structure]

[4898] SEQ ID 8678 (GBS243) was expressed in E. coli as a His-fusion product. SDS-PAGE analysis of total cell extract is shown in FIG. 57 (lane 7; MW 94 kDa).

[4899] GBS243-His was purified as shown in FIG. 208, lane 10.

### EXAMPLE 870

[4900] A DNA sequence (GBSx0922) was identified in S. agalactiae <SEQ ID 2637> which encodes the amino acid sequence <SEQ ID 2638>. This protein is predicted to be adenine phosphoribosyltransferase (apt). Analysis of this protein sequence reveals the following:

| Possible site: 59 | | | |
|---|---|---|---|
| >>> Seems to have no N-terminal signal sequence | | | |
| INTEGRAL | Likelihood = −1.86 | Transmembrane | 61-77 (59-77) |
| INTEGRAL | Likelihood = −0.64 | Transmembrane | 137-153 (137-153) |

----- Final Results -----
bacterial membrane --- Certainty = 0.1744 (Affirmative) < succ>
bacterial outside --- Certainty = 0.0000 (Not Clear) < succ>
bacterial cytoplasm --- Certainty = 0.0000 (Not Clear) < succ>

[4901] The protein has homology with the following sequences in the GENPEPT database.

| >GP: AAC46040 GB: U86377 adenine phosphoribosyltransferase; Apt | | | |
|---|---|---|---|
| [Bacillus subtilis] | | | |
| Identities = 110/170 (64%), Positives = 135/170 (78%) | | | |
| Query: | 1 | MDLNNYIASIENYPQEGITFRDISPLMADGKAYSYAVREIVQYAADKDIDMIVGPEARGF | 60 |
| | | MDL Y+ + +YP+EG+ F+DI+ LM G Y YA +IV+YA +K ID++VGPEARGF | |
| Sbjct: | 1 | MDLKQYVTIVPDYPKEGVQFKDITTLMDKGDVYRYATDQIVEYAKEKQIDLVVGPEARGF | 60 |
| Query: | 61 | IVGCPVAYALGIGFAPVRKPGKLPREVISADYEKEYGLDTLTMHADAIKPGQRVLIVDDL | 120 |
| | | I+GCPVAYALG+GFAPVRK GKLPREVI DY EYG D LT+H DAIKPGQRVLI DDL | |
| Sbjct: | 61 | IIGCPVAYALGVGFAPVRKEGKLPREVIKVDYGLEYGKDVLTIHKDAIKPGQRVLITDDL | 120 |
| Query: | 121 | LATGGTVKATIEMIEKLGGVVAGCAFLVELDGLNGRKAIEGYDTKVLMNF | 170 |
| | | LATGGT++ATI+++E+LGGVVAG AFL+EL L+GR +E YD LM + | |
| Sbjct: | 121 | LATGGTIEATIKLVEELGGVVAGIAFLIELSYLDGRNKLEDYDILTLMKY | 170 |

[4902] A related DNA sequence was identified in S. pyogenes <SEQ ID 2639> which encodes the amino acid sequence <SEQ ID 2640>. Analysis of this protein sequence reveals the following:

Possible site: 40
>>> Seems to have a cleavable N-term signal seq.
----- Final Results -----
bacterial outside --- Certainty = 0.300 (Affirmative) < succ>
bacterial membrane --- Certainty = 0.000 (Not Clear) < succ>
bacterial cytoplasm --- Certainty = 0.000 (Not Clear) < succ>

[4903] The protein has homology with the following sequences in the databases:

| !GB: Z99120 similar to opine catabolism [Bacillus sub . . . 231 1e−59 | | | |
|---|---|---|---|
| >GP: CAB15253 GB: Z99120 similar to opine catabolism [Bacillus subtilis] | | | |
| Score = 231 bits (583), Expect = 1e−59 | | | |
| Identities = 138/363 (38%), Positives = 212/363 (58%), Gaps = 11/363 (3%) | | | |
| Query: | 5 | IIGAGIVGSTAAYYLQQSGQKEVTIFDHGQ-GQATKAAAGIISPWFSKRRNKVWYRMARL | 63 |
| | | I+GAGI+G++ AY+L ++G + VT+ D + GQAT AAAGI+ PW S+RRN+ WY++A+ | |
| Sbjct: | 6 | IVGAGILGASTAYHLAKTGAR-VTVIDRKEPGQATDAAAGIVCPWLSQRRNQDWYQLAKG | 64 |
| Query: | 64 | GADFYQQLINDLKEDGFATDFYQQNGIYVLKKQEEKLRDLYELALARKVESPIIGELAIK | 123 |
| | | GA +Y+ LI+ L++DG + Y++ G + KL + E A R+ ++P IG++ | |
| Sbjct: | 65 | GARYYKDLIHQLEKDGESDTGYKRVGAISIHTDASKLDKMEERAYKRREDAPEIGDITRL | 124 |
| Query: | 124 | NRKELGNDFKGLIGFDNCLYASGAARVEGAALCETLLKAS---GYPVIRQKVTLKQQG-- | 178 |
| | | + E F L ++ SGAARV G ALC +LL A+ G VI+ +L + | |
| Sbjct: | 125 | SASETKKLFPILADGYESVHISGAARVNGRALCRSLLSAAEKRGATVIKGNASLLFENGT | 184 |
| Query: | 179 | -SGYEIAGHYF--DQVILAAGAWLPDLLRPLGYQVDVRPQKGQLLDYDVHHIISDTYPVV | 235 |
| | | +G + F D VI+ AGAW ++L+PLG V QK Q++ +++ + ++PVV | |
| Sbjct: | 185 | VTGVQTDTKQFAADAVIVTAGAWANEILKPLGIHFQVSFQKAQIMHFEMTDADTGSWPVV | 244 |
| Query: | 236 | MPEGEIDLIPFNQGKISVGTSHENDKGY-DLEPDWQVLKKLEMQALTYLPLLKEATQKTC | 294 |
| | | MP + ++ F+ G+I G +HEND G DL ++ +AL P L +A | |
| Sbjct: | 245 | MPPSDQYILSFDNGRIVAGATHENDAGLDDLRVTAGGQHEVLSKALAVAPGLADAAAVET | 304 |
| Query: | 295 | RVGIRAYTSDYSPFYGQVSGLKNLYTASGLGSSGLTVGPLIGYELAQLLLGHEGLLTPSD | 354 |
| | | RVG R +T + P G V ++ LY A+GLG+SGLT+GP +G ELA+L+LG + L S | |
| Sbjct: | 305 | RVGFRPFTPGFLPVVGAVPNVQGLYAANGLGASGLTMGPFLGAELAKLVLGKQTELDLSP | 364 |
| Query: | 355 | YSP | 357 |
| | | Y P | |
| Sbjct: | 365 | YDP | 367 |

[4904] An alignment of the GAS and GBS proteins is shown below.

| Identities = 150/172 (87%), Positives = 161/172 (93%) | | | |
|---|---|---|---|
| Query: | 1 | MDLNNYIASIENYPQEGITFRDISPLMADGKAYSYAVREIVQYAADKDIDMIVGPEARGF | 60 |
| | | MDL NYIASI++YP+ GITFRDISPLMADGKAYSYA+REI QYA DKDIDM+VGPEARGF | |
| Sbjct: | 1 | MDLTNYIASIKDYPKAGITFRDISPLMADGKAYSYAIREIAQYACDKDIDMVVGPEARGF | 60 |
| Query: | 61 | IVGCPVAYALGIGFAPVRKPGKLPREVISADYEKEYGLDTLTMHADAIKPGQRVLIVDDL | 120 |
| | | I+GCPVA LGIGFAPVRKPGKLPR+V+SADYEKEYGLDTLTMHADAIKPGQRVLIVDDL | |
| Sbjct: | 61 | IIGCPVAVELGIGFAPVRKPGKLPRDVVSADYEKEYGLDTLTMHADAIKPGQRVLIVDDL | 120 |
| Query: | 121 | LATGGTVKATIEMIEKLGGVVAGCAFLVELDGLNGRKAIEGYDTKVLMNFPG | 172 |
| | | LATGGTVKATIEMIEKLGG+VAGCAFL+EL+GLNGR AI YD KVLM FPG | |
| Sbjct: | 121 | LATGGTVKATIEMIEKLGGIVAGCAFLIELEGLNGRHAIRNYDYKVLMQFPG | 172 |

[4905] SEQ ID 2638 (GBS419) was expressed in E. coli as a His-fusion product. SDS-PAGE analysis of total cell extract is shown in FIG. 79 (lane 6; MW 22.6 kDa). It was also expressed in E. coli as a GST-fusion product. SDS-PAGE analysis of total cell extract is shown in FIG. 172 (lane 4; MW 47.5 kDa).

[4906] GBS419-GST was purified as shown in FIG. 219, lane 6-8.

[4907] Based on this analysis, it was predicted that these proteins and their epitopes could be useful antigens for vaccines or diagnostics.

### EXAMPLE 871

[4908] A DNA sequence (GBSx0923) was identified in S. agalactiae <SEQ ID 2641> which encodes the amino acid sequence <SEQ ID 2642>. Analysis of this protein sequence reveals the following:

Possible site: 29
>>> Seems to have no N-terminal signal sequence
----- Final Results -----
bacterial cytoplasm --- Certainty = 0.0847 (Affirmative) < succ>
bacterial membrane --- Certainty = 0.0000 (Not Clear) < succ>
bacterial outside --- Certainty = 0.0000 (Not Clear) < succ>

[4909] The protein has homology with the following sequences in the GENPEPT database.

| >GP: BAA11244 GB: D78182 ORF2 [Streptococcus mutans] | | | |
|---|---|---|---|
| Identities = 140/225 (62%), Positives = 178/225 (78%) | | | |
| Query: | 1 | MTYLEQYQSGQLTLPSALFFHFKSIFKTADDFLVWQFFYLQNTTNLSDLTPSRIATSLDK | 60 |
| | | M++L+ Y+SG L LPSAL FH+K IF ADDFLVWQFFY QNTT + D+ S+IAT++ K | |
| Sbjct: | 1 | MSFLQHYKSGNLVLPSALLFHYKDIFSNADDFLVWQFFYFQNTTKMEDIATSQIATAIGK | 60 |
| Query: | 61 | TVADINRSISNLTSQGLLDVKTIELNHEIEIIFDTSPVFAKLDKLFEEDNQVIIDNKTSD | 120 |
| | | TV ++NRS+SNL SQ LLD+KTIEL+ E E++FD + KLD L ++ + + | |
| Sbjct: | 61 | TVPEVNRSVSNLISQELLDMKTIELDGESEVLFDATLALKKLDDLLTAADETTVSSSKGT | 120 |
| Query: | 121 | SNRLKDLVGDFERELGRLLSPFELEDLQKTLQEDQTDPDIVRAALREAVFNGKTSWNYIN | 180 |
| | | SN LKDLV DFERELGR+LSPFELEDLQKT+ +D+TDPD+VR+ALREAVFNGKT+WNYI | |
| Sbjct: | 121 | SNALKDLVEDFERELGRMLSPFELEDLQKTVSDDKTDPDLVRSALREAVFNGKTNWNYIQ | 180 |
| Query: | 181 | AILRNWRREGLTTLRQIEERKQAREDNQMKDLAISDDFKNAMNLW | 225 |
| | | AILRNWRREG++TLRQ+EER++ RE ++ +SDDF +AMNLW | |
| Sbjct: | 181 | AILRNWRREGISTLRQVEERRKEREQANPANVTVSDDFLSAMNLW | 225 |

[4910] A related DNA sequence was identified in S. pyogenes <SEQ ID 2643> which encodes the amino acid sequence <SEQ ID 2644>. Analysis of this protein sequence reveals the following:

Possible site: 57
>>> Seems to have a cleavable N-term signal seq.
----- Final Results -----
bacterial outside --- Certainty = 0.3000 (Affirmative) < succ>
bacterial membrane --- Certainty = 0.0000 (Not Clear) < succ>
bacterial cytoplasm --- Certainty = 0.0000 (Not Clear) < succ>

[4911] The protein has homology with the following sequences in the databases:

| >GP: BAA11244 GB: D78182 ORF2 [Streptococcus mutans] | | | |
|---|---|---|---|
| Identities = 154/228 (67%), Positives = 188/228 (81%), Gaps = 1/228 (0%) | | | |
| Query: | 1 | MSFLEHYKSGNLVIPSALLFHYKDLFKSSDDFLVWQFFYLQNTTKRDDLAPSQIAHALGK | 60 |
| | | MSFL+HYKSGNLV+PSALLFHYKD+F ++DDFLVWQFFY QNTTK +D+A SQIA A+GK | |
| Sbjct: | 1 | MSFLQHYKSGNLVLPSALLFHYKDIFSNADDFLVWQFFYFQNTTKMEDIATSQIATAIGK | 60 |
| Query: | 61 | SVADINKIISSLTNQGLLDMRTIELTGEIEIIFDASPVLAKLDQLFVSQTATEIDKQE-T | 119 |
| | | +V ++N+ +S+L +Q LLDM+TIEL GE E++FDA+ L KLD L + T + + T | |
| Sbjct: | 61 | TVPEVNRSVSNLISQELLDMKTIELDGESEVLFDATLALKKLDDLLTAADETTVSSSKGT | 120 |
| Query: | 120 | PNHFKRLVDEFERELGRFLSPFELEDLEKTLRDDKTDPDLIREALKEAVFNGKTNWKYIQ | 179 |
| | | N K LV++FERELGR LSPFELEDL+KT+ DDKTDPDL+R AL+EAVFNGKTNW YIQ | |
| Sbjct: | 121 | SNALKDLVEDFERELGRMLSPFELEDLQKTVSDDKTDPDLVRSALREAVFNGKTNWNYIQ | 180 |
| Query: | 180 | AILRNWRKEGIVNLRQVEERRRVREGEDLSQVTISEDFLSAMNLWSDS | 227 |
| | | AILRNWR+EGI LRQVEERR+ RE + + VT+S+DFLSAMNLWSDS | |
| Sbjct: | 181 | AILRNWRREGISTLRQVEERRKEREQANPANVTVSDDFLSAMNLWSDS | 228 |

[4912] An alignment of the GAS and GBS proteins is shown below.

| Identities = 144/225 (64%), Positives = 179/225 (79%), Gaps = 1/225 (0%) | | | |
|---|---|---|---|
| Query: | 1 | MTYLEQYQSGQLTLPSALFFHFKSIFKTADDFLVWQFFYLQNTTNLSDLTPSRIATSLDK | 60 |
| | | M++LE Y+SG L +PSAL FH+K +FK++DDFLVWQFFYLQNTT DL PS+IA +L K | |
| Sbjct: | 1 | MSFLEHYKSGNLVIPSALLFHYKDLFKSSDDFLVWQFFYLQNTTKRDDLAPSQIAHALGK | 60 |
| Query: | 61 | TVADINRSISNLTSQGLLDVKTIELNHEIEIIFDTSPVFAKLDKLFEEDNQVIIDNKTSD | 120 |
| | | +VADIN+ IS+LT+QGLLD++TIEL EIEIIFD SPV AKLD+LF ID K | |
| Sbjct: | 61 | SVADINKIISSLTNQGLLDMRTIELTGEIEIIFDASPVLAKLDQLFVSQTATEID-KQET | 119 |
| Query: | 121 | SNRLKDLVGDFERELGRLLSPFELEDLQKTLQEDQTDPDIVRAALREAVFNGKTSWNYIN | 180 |
| | | N K LV +FERELGR LSPFELEDL+KTL++D+TDPD++R AL+EAVFNGKT+W YI | |
| Sbjct: | 120 | PNHFKRLVDEFERELGRFLSPFELEDLEKTLRDDKTDPDLIREALKEAVFNGKTNWKYIQ | 179 |
| Query: | 181 | AILRNWRREGLTTLRQIEERKQAREDNQMKDLAISDDFKNAMNLW | 225 |
| | | AILRNWR+EG+ LRQ+EER++ RE + + IS+DF +AMNLW | |
| Sbjct: | 180 | AILRNWRKEGIVNLRQVEERRRVREGEDLSQVTISEDFLSAMNLW | 224 |

[4913] Based on this analysis, it was predicted that these proteins and their epitopes could be useful antigens for vaccines or diagnostics.

### EXAMPLE 872

[4914] A DNA sequence (GBSx0924) was identified in S. agalactiae <SEQ ID 2645> which encodes the amino acid sequence <SEQ ID 2646>. Analysis of this protein sequence reveals the following:

Possible site: 47
>> Seems to have no N-terminal signal sequence
----- Final Results -----
bacterial cytoplasm --- Certainty = 0.1617 (Affirmative) < succ>
bacterial membrane --- Certainty = 0.0000 (Not Clear) < succ>
bacterial outside --- Certainty = 0.0000 (Not Clear) < succ>

[4915] The protein has homology with the following sequences in the GENPEPT database.

| >GP: BAA11245 GB: D78182 ORF3 [Streptococcus mutans] | | | |
|---|---|---|---|
| Identities = 134/226 (59%), Positives = 170/226 (74%) | | | |
| Query: | 2 | DLQLSKRLQKVANYVPKGARLLDVGSDHAYLPIFLLQMGYCDFAIAGEVVNGPYQSALKN | 61 |
| | | ++ LS RLQ+VA++VPKGARLLDVGSDHAYLPI+LL+ G DFA+AGE++ GPY+SA+ N | |
| Sbjct: | 7 | EVSLSHRLQEVASFVPKGARLLDVGSDHAYLPIYLLEQGLIDFAVAGEIIKGPYESAVAN | 66 |
| Query: | 62 | VSEHGLTSKIDVRLANGLSAFEEADNIDTITICGMGGRLIADILNNDIDKLQHVKTLVLQ | 121 |
| | | V+E GL+ +I VRLA+GL+A + D+ID ITICGMGGRLIADIL DKL VK L+LQ | |
| Sbjct: | 67 | VNESGLSGQIAVRLADGLAALNDNDDIDLITICGMGGRLIADILAAGSDKLNSVKQLILQ | 126 |
| Query: | 122 | PNNREDDLRKWLAANDFEIVAEDILTENDKRYEILVVKHGHMNLTAKELRFGPFLLSNNT | 181 |
| | | PNN EDDLR WL ANDF I AE ++ + K YEILVV+ G + L+ K+LRFGPFL + | |
| Sbjct: | 127 | PNNCEDDLRSWLVANDFMIKAEKMVKDRHKYYEILVVEKGKITLSDKDLRFGPFLRQERS | 186 |
| Query: | 182 | TVFKEKWQNELNKLTFALNSIPNSKMEERAILEDKIQDIKEVLDES | 227 |
| | | ++FKE+W+ EL KL AL +P K + L KI+ I+EVL ES | |
| Sbjct: | 187 | SIFKERWRKELAKLELALTRVPAKKKADNMFLSTKIEQIREVLYES | 232 |

[4916] A related DNA sequence was identified in S. pyogenes <SEQ ID 2647> which encodes the amino acid sequence <SEQ ID 2648>. Analysis of this protein sequence reveals the following:

Possible site: 47
>>> Seems to have no N-terminal signal sequence
----- Final Results -----
bacterial cytoplasm --- Certainty = 0.0803 (Affirmative) < succ>
bacterial membrane --- Certainty = 0.0000 (Not Clear) < succ>
bacterial outside --- Certainty = 0.0000 (Not Clear) < succ>

[4917] An alignment of the GAS and GBS proteins is shown below.

| Identities = 145/224 (64%), Positives = 173/224 (76%) | | | |
|---|---|---|---|
| Query: | 1 | MDLQLSKRLQKVANYVPKGARLLDVGSDHAYLPIFLLQMGYCDFAIAGEVVNGPYQSALK | 60 |
| | | MD QLS RL +VA YVPKG +LLDVGSDHAYLPIFL++ AIAGEVV GPY+SALK | |
| Sbjct: | 1 | MDSQLSNRLAQVAAYVPKGVKLLDVGSDHAYLPIFLVETNQISAAIAGEVVRGPYESALK | 60 |
| Query: | 61 | NVSEHGLTSKIDVRLANGLSAFEEADNIDTITICGMGGRLIADILNNDIDKLQHVKTLVL | 120 |
| | | NV++ GL I VRLANGL+AFEEAD++ ITICGMGGRLIADIL +KLQ ++ LVL | |
| Sbjct: | 61 | NVTQSGLAEHIQVRLANGLAAFEEADDVTAITICGMGGRLIADILEAGKEKLQGIERLVL | 120 |
| Query: | 121 | QPNNREDDLRKWLAANDFEIVAEDILTENDKRYEILVVKHGHMNLTAKELRFGPFLLSNN | 180 |
| | | QPNNREDDLR WL+ N F+IVAE I+ ENDK YEI+V +HG L+A ELRFGP+L | |
| Sbjct: | 121 | QPNNREDDLRAWLSVNAFKIVAETIMAENDKYYEIIVAEHGEKALSATELRFGPYLSQEK | 180 |
| Query: | 181 | TTVFKEKWQNELNKLTFALNSIPNSKMEERAILEDKIQDIKEVL | 224 |
| | | + VFKEKWQ E++KL +AL+ IP K +ER +L KIQ IKEV+ | |
| Sbjct: | 181 | SVVFKEKWQREMDKLAYALSCIPEEKTQERQLLLTKIQQIKEVI | 224 |

[4918] Based on this analysis, it was predicted that these proteins and their epitopes could be useful antigens for vaccines or diagnostics.

### EXAMPLE 873

[4919] A DNA sequence (GBSx0925) was identified in S. agalactiae <SEQ ID 2649> which encodes the amino acid sequence <SEQ ID 2650>. Analysis of this protein sequence reveals the following:

Possible site: 54
>>> Seems to have no N-terminal signal sequence
----- Final Results -----
bacterial cytoplasm --- Certainty = 0.3245 (Affirmative) < succ>
bacterial membrane --- Certainty = 0.0000 (Not Clear) < succ>
bacterial outside --- Certainty = 0.0000 (Not Clear) < succ>

[4920] A related GBS nucleic acid sequence <SEQ ID 9893> which encodes amino acid sequence <SEQ ID 9894> was also identified.

[4921] The protein has homology with the following sequences in the GENPEPT database.

| >GP: BAA11246 GB: D78182 ORF4 [Streptococcus mutans] | | | |
|---|---|---|---|
| Identities = 187/262 (71%), Positives = 224/262 (85%) | | | |
| Query: | 2 | MKARELIDVYETYCPQELSMEGDISGLQIGSLDKEIKTVMVALDVRETTVAEAIERQVDL | 61 |
| | | MKA ++I YE YCPQ+LS+EGDISGLQIG+LDKEIK +M+ALDVRETTVAEAIE++VDL | |
| Sbjct: | 1 | MKASQIIKRYEAYCPQDLSLEGDISGLQIGTLDKEIKRLMIALDVRETTVAEAIEKKVDL | 60 |
| Query: | 62 | LIVKHAPIFRPLKDLVATPQNKIYIDLLKSDIAVYVSHTNIDIVPNGLNDWFCELLDIQY | 121 |
| | | LIVKHAPIFRPLK+LV T QN IY +L+K DIAVYVSHTNIDIVP+GLNDWFC+LLDI+ | |
| Sbjct: | 61 | LIVKHAPIFRPLKNLVETAQNHIYFNLIKHDIAVYVSHTNIDIVPDGLNDWFCDLLDIKN | 120 |
| Query: | 122 | PDILSETSNGYGIGRIGDIRPQSFEFFAWKIKDVFGLDSVRLVSYDKSNPEIQRVAICGG | 181 |
| | | ILS + + YGIGR+GDI P SFE A K+K +F LDSVRLVSY ++NP I R+AICGG | |
| Sbjct: | 121 | RRILSPSKDDYGIGRVGDISPLSFEDLAKKVKKIFNLDSVRLVSYGENNPLISRIAICGG | 180 |
| Query: | 182 | SGQSFYKEAIAKGADVFVTGDIYYHTAQEMITNGLLAIDPGHHIEVLFVSKIATMIEQWK | 241 |
| | | SGQSFY+EA+ KGA V++TGDIYYHTAQEM+TNGLLA+DPGHHIEVLFV K+A + W | |
| Sbjct: | 181 | SGQSFYQEALTKGAQVYITGDIYYHTAQEMLTNGLLALDPGHHIEVLFVRKLAEKFQTWS | 240 |
| Query: | 242 | LEKGWDISVLESKAPTNPFYHM | 263 |
| | | ++ WDI++LES+ TNPFYH+ | |
| Sbjct: | 241 | CQENWDITILESQVNTNPFYHL | 262 |

[4922] A related DNA sequence was identified in S. pyogenes <SEQ ID 2651> which encodes the amino acid sequence <SEQ ID 2652>. Analysis of this protein sequence reveals the following:

Possible site: 53
>>> Seems to have no N-terminal signal sequence
----- Final Results -----
bacterial cytoplasm --- Certainty = 0.1804 (Affirmative) < succ>
bacterial membrane --- Certainty = 0.0000 (Not Clear) < succ>
bacterial outside --- Certainty = 0.0000 (Not Clear) < succ>

[4923] An alignment of the GAS and GBS proteins is shown below.

| Identities = 169/262 (64%), Positives = 214/262 (81%) | | | |
|---|---|---|---|
| Query: | 2 | MKARELIDVYETYCPQELSMEGDISGLQIGSLDKEIKTVMVALDVRETTVAEAIERQVDL | 61 |
| | | MKA+ LID YE +CP +LSMEGD+ GLQ+GSLDK+I+ VM+ LD+RE+TVAEAI+ +VDL | |
| Sbjct: | 3 | MKAKTLIDAYEAFCPLDLSMEGDVKGLQMGSLDKDIRKVMITLDIRESTVAEAIKNEVDL | 62 |
| Query: | 62 | LIVKHAPIFRPLKDLVATPQNKIYIDLLKSDIAVYVSHTNIDIVPNGLNDWFCELLDIQY | 121 |
| | | +I KHAPIF+PLKDLV++PQ I +DL+K DI+VYVSHTNIDIVP GLNDWFC+LL+I+ | |
| Sbjct: | 63 | IITKHAPIFKPLKDLVSSPQRDILLDLVKHDISVYVSHTNIDIVPGGLNDWFCDLLEIKE | 122 |
| Query: | 122 | PDILSETSNGYGIGRIGDIRPQSFEFFAWKIKDVFGLDSVRLVSYDKSNPEIQRVAICGG | 181 |
| | | LSET G+GIGRIG ++ Q+ E A K+K VF LD+VRL+ YDK NP I ++AICGG | |
| Sbjct: | 123 | ATYLSETKEGFGIGRIGTVKEQALEELASKVKRVFDLDTVRLIRYDKENPLISKIAICGG | 182 |
| Query: | 182 | SGQSFYKEAIAKGADVFVTGDIYYHTAQEMITNGLLAIDPGHHIEVLFVSKIATMIEQWK | 241 |
| | | SG FY++A+ KGADV++TGDIYYHTAQEM+T GL A+DPGHHIEVLF K+ ++ WK | |
| Sbjct: | 183 | SGGEFYQDAVQKGADVYITGDIYYHTAQEMLTEGLFAVDPGHHIEVLFTEKLKEKLQGWK | 242 |
| Query: | 242 | LEKGWDISVLESKAPTNPFYHM | 263 |
| | | E GWD+S++ SKA TNPF H+ | |
| Sbjct: | 243 | EENGWDVSIISSKASTNPFSHL | 264 |

[4924] Based on this analysis, it was predicted that these proteins and their epitopes could be useful antigens for vaccines or diagnostics.

### EXAMPLE 874

[4925] A DNA sequence (GBSx0926) was identified in S. agalactiae <SEQ ID 2653> which encodes the amino acid sequence <SEQ ID 2654>. This protein is predicted to be 0. Analysis of this protein sequence reveals the following:

Possible site: 41
>>> Seems to have a cleavable N-term signal seq.
----- Final Results -----
bacterial outside --- Certainty = 0.3000 (Affirmative) < succ>
bacterial membrane --- Certainty = 0.0000 (Not Clear) < succ>
bacterial cytoplasm --- Certainty = 0.0000 (Not Clear) < succ>

[4926] The protein has homology with the following sequences in the GENPEPT database.

| >GP: CAB15253 GB: Z99120 similar to opine catabolism [Bacillus subtilis] | | | |
|---|---|---|---|
| Identities = 148/368 (40%), Positives = 211/368 (57%), Gaps = 13/368 (3%) | | | |
| Query: | 1 | MKKIAIIGAGAVGATLAYYLSKEKDIQVTVFDYGV-GQATKAAAGIISPWFSKRRNKAWY | 59 |
| | | MK I+GAG +GA+ AY+L+K +VTV D GQAT AAAGI+ PW S+RRN+ WY | |
| Sbjct: | 1 | MKSYIIVGAGILGASTAYHLAKT-GARVTVIDRKEPGQATDAAAGIVCPWLSQRRNQDWY | 59 |
| Query: | 60 | RMARLGADFYSKLVTDLQKDGFETKFYQQTGVFLLKKDESQLESLFALADKRRLESPLIG | 119 |
| | | ++A+ GA +Y L+ L+KDG Y++ G + D S+L+ + A KRR ++P IG | |
| Sbjct: | 60 | QLAKGGARYYKDLIHQLEKDGESDTGYKRVGAISIHTDASKLDKMEERAYKRREDAPEIG | 119 |
| Query: | 120 | DLQILNKSEANTHFPEL-DGYEQLLYASGGARVEGADLTRILLEAS---GVNVIKDEVHF | 175 |
| | | D+ L+ SE FP L DGYE ++ SG ARV G L R LL A+ G VIK | |
| Sbjct: | 120 | DITRLSASETKKLFPILADGYES-VHISGAARVNGRALCRSLLSAAEKRGATVIKGNASL | 178 |
| Query: | 176 | -----TITDNGFRVQGIDFDKLVLASGAWLAKILDEHNYQVDVRPQKGQLRDYYFSNINT | 230 |
| | | T+T + D +++ +GAW +IL V QK Q+ + ++ +T | |
| Sbjct: | 179 | LFENGTVTGVQTDTKQFAADAVIVTAGAWANEILKPLGIHFQVSFQKAQIMHFEMTDADT | 238 |
| Query: | 231 | GKYPVVMPEGELDIIPFDNGKVSVGASHENDMAF-DLNIDFKVLDKFEEQAIGYFPQLKK | 289 |
| | | G +PVVMP + I+ FDNG++ GA+HEND DL + + +A+ P L | |
| Sbjct: | 239 | GSWPVVMPPSDQYILSFDNGRIVAGATHENDAGLDDLRVTAGGQHEVLSKALAVAPGLAD | 298 |
| Query: | 290 | ADTTSERVGIRAYTSDFSPFFGPVPCMEGAYAASGLGSTGLTVGPLIGYELCQLILNKEN | 349 |
| | | A RVG R +T F P G VP ++G YAA+GLG++GLT+GP +G EL +L+L K+ | |
| Sbjct: | 299 | AAAVETRVGFRPFTPGFLPVVGAVPNVQGLYAANGLGASGLTMGPFLGAELAKLVLGKQT | 358 |
| Query: | 350 | QLNLEDYD | 357 |
| | | +L+L YD | |
| Sbjct: | 359 | ELDLSPYD | 366 |

[4927] A related DNA sequence was identified in S. pyogenes <SEQ ID 2655> which encodes the amino acid sequence <SEQ ID 2656>. Analysis of this protein sequence reveals the following:

Possible site: 40
>>> Seems to have a cleavable N-term signal seq.
----- Final Results -----
bacterial outside --- Certainty = 0.3000 (Affirmative) < succ>
bacterial membrane --- Certainty = 0.0000 (Not Clear) < succ>
bacterial cytoplasm --- Certainty = 0.0000 (Not Clear) < succ>

[4928] An alignment of the GAS and GBS proteins is shown below.

| Identities = 211/360 (58%), Positives = 262/360 (72%) | | | |
|---|---|---|---|
| Query: | 3 | KIAIIGAGAVGATLAYYLSKEKDIQVTVFDYGVGQATKAAAGIISPWFSKRRNKAWYRMA | 62 |
| | | KIAIIGAG VG+T AYYL + +VT+FD+G GQATKAAAGIISPWFSKRRNK WYRMA | |
| Sbjct: | 2 | KIAIIGAGIVGSTAAYYLQQSGQKEVTIFDHGQGQATKAAAGIISPWFSKRRNKVWYRMA | 61 |
| Query: | 63 | RLGADFYSKLVTDLQKDGFETKFYQQTGVFLLKKDESQLESLFALADKRRLESPLIGDLQ | 122 |
| | | RLGADFY +L+ DL++DGF T FYQQ G+++LKK E +L L+ LA R++ESP+IG+L | |
| Sbjct: | 62 | RLGADFYQQLINDLKEDGFATDFYQQNGIYVLKKQEEKLRDLYELALARKVESPIIGELA | 121 |
| Query: | 123 | ILNKSEANTHFPELDGYEQLLYASGGARVEGADLTRILLEASGVNVIKDEVHFTITDNGF | 182 |
| | | I N+ E F L G++ LYASG ARVEGA L LL+ASG VI+ +V +G+ | |
| Sbjct: | 122 | IKNRKELGNDFKGLIGFDNCLYASGAARVEGAALCETLLKASGYPVIRQKVTLKQQGSGY | 181 |
| Query: | 183 | RVQGIDFDKLVLASGAWLAKILDEHNYQVDVRPQKGQLRDYYFSNINTGKYPVVMPEGEL | 242 |
| | | + G FD+++LA+GAWL +L YQVDVRPQKGQL DY +I + YPVVMPEGE+ | |
| Sbjct: | 182 | EIAGHYFDQVILAAGAWLPDLLRPLGYQVDVRPQKGQLLDYDVHHIISDTYPVVMPEGEI | 241 |
| Query: | 243 | DIIPFDNGKVSVGASHENDMAFDLNIDFKVLDKFEEQAIGYFPQLKKADTTSERVGIRAY | 302 |
| | | D+IPF+ GK+SVG SHEND +DL D++VL K E QA+ Y P LK+A + RVGIRAY | |
| Sbjct: | 242 | DLIPFNQGKISVGTSHENDKGYDLEPDWQVLKKLEMQALTYLPLLKEATQKTCRVGIRAY | 301 |
| Query: | 303 | TSDFSPFFGPVPCMEGAYAASGLGSTGLTVGPLIGYELCQLILNKENQLNLEDYDITKYV | 362 |
| | | TSD+SPF+G V ++ Y ASGLGS+GLTVGPLIGYEL QL+L E L DY Y+ | |
| Sbjct: | 302 | TSDYSPFYGQVSGLKNLYTASGLGSSGLTVGPLIGYELAQLLLGHEGLLTPSDYSPEPYL | 361 |

[4929] Based on this analysis, it was predicted that these proteins and their epitopes could be useful antigens for vaccines or diagnostics.

[4930] A related GBS gene <SEQ ID 8679> and protein <SEQ ID 8680> were also identified. Analysis of this protein sequence reveals the following:

| Lipop Possible site: −1 Crend: 2 | | |
|---|---|---|
| McG: Discrim Score: 4.44 | | |
| GvH: Signal Score (−7.5): 0.81 | | |
| Possible site: 41 | | |
| >>> Seems to have a cleavable N-term signal seq. | | |
| ALOM program count: 0 | value: 7.32 | threshold: 0.0 |

| | | |
|---|---|---|
| PERIPHERAL | Likelihood = 7.32 | 153 |

modified ALOM score: −1.96
*** Reasoning Step: 3
----- Final Results -----
bacterial outside --- Certainty = 0.3000 (Affirmative) < succ>
bacterial membrane --- Certainty = 0.0000 (Not Clear) < succ>
bacterial cytoplasm --- Certainty = 0.0000 (Not Clear) < succ>

[4931] The protein has homology with the following sequences in the databases:

[chemical structure]

[4932] SEQ ID 8680 (GBS290) was expressed in E. coli as a His-fusion product. SDS-PAGE analysis of total cell extract is shown in FIG. 57 (lane 6; MW 22 kDa). It was also expressed in E. coli as a GST-fusion product. SDS-PAGE analysis of total cell extract is shown in FIG. 77 (lane 4; MW 47 kDa).

[4933] GBS290-GST was purified as shown in FIG. 226, lane 9.

[4934] Based on this analysis, it was predicted that these proteins and their epitopes could be useful antigens for vaccines or diagnostics.

### EXAMPLE 875

[4935] A DNA sequence (GBSx0927) was identified in S. agalactiae <SEQ ID 2657> which encodes the amino acid sequence <SEQ ID 2658>. Analysis of this protein sequence reveals the following:

| Possible site: 20 | | | |
|---|---|---|---|
| >>> Seems to have no N-terminal signal sequence | | | |
| INTEGRAL | Likelihood = −2.18 | Transmembrane | 38-54 (36-54) |

----- Final Results -----
bacterial membrane --- Certainty = 0.1871 (Affirmative) < succ>
bacterial outside --- Certainty = 0.0000 (Not Clear) < succ>
bacterial cytoplasm --- Certainty = 0.0000 (Not Clear) < succ>

[4936] The protein has homology with the following sequences in the GENPEPT database.

| >GP: AAD19913 GB: AF105113 glucose-1-phosphate thymidylyl transferase | | | |
|---|---|---|---|
| [Streptococcus pneumoniae] | | | |
| Identities = 262/289 (90%), Positives = 276/289 (94%) | | | |
| Query: | 1 | MKGIILAGGSGTRLYPLTRAASKQLMPIYDKPMIYYPLSVLMLAGIKEILIISTPQDLPR | 60 |
| | | MKGIILAGGSGTRLYPLTRAASKQLMP+YDKPMIYYPLS LMLAGIK+ILIISTPQDLPR | |
| Sbjct: | 1 | MKGIILAGGSGTRLYPLTRAASKQLMPVYDKPMIYYPLSTLMLAGIKDILIISTPQDLPR | 60 |
| Query: | 61 | FEDMLGDGSELGISLSYAEQPSPDGLAQAFIIGEDFIGDDHVALVLGDNIYHGPGLSAML | 120 |
| | | F+D+L DGSE GI LSYAEQPSPDGLAQAF+IGE+FIGDD VAL+LGDNIYHGPGLS ML | |
| Sbjct: | 61 | FKDLLLDGSEFGIKLSYAEQPSPDGLAQAFLIGEEFIGDDSVALILGDNIYHGPGLSTML | 120 |
| Query: | 121 | QRAASKESGATVFGYQVKDPERFGVVEFDTDMNAISIEEKPAQPKSNYAVTGLYFYDNDV | 180 |
| | | Q+AA KE GATVFGYQVKDPERFGVVEFDTDMNAISIEEKP P+SNYAVTGLYFYDNDV | |
| Sbjct: | 121 | QKAAKKEKGATVFGYQVKDPERFGVVEFDTDMNAISIEEKPEYPRSNYAVTGLYFYDNDV | 180 |
| Query: | 181 | VEIAKNIKPSPRGELEITDVNKAYLDRGDLSVELMGRGFAWLDTGTHESLLEAAQYIETV | 240 |
| | | VEIAK IKPS RGELEITDVNKAYL+RGDLSVELMGRGFAWLDTGTHESLLEA+QYIETV | |
| Sbjct: | 181 | VEIAKQIKPSARGELEITDVNKAYLNRGDLSVELMGRGFAWLDTGTHESLLEASQYIETV | 240 |
| Query: | 241 | QRMQNVQVANLEEIAYRMGYITREQVLELAQPLKKNEYGQYLLRLIGEA | 289 |
| | | QRMQNVQVANLEEI+YRMGYI+RE VLELAQPLKKNEYG+YLLRLIGEA | |
| Sbjct: | 241 | QRMQNVQVANLEEISYRMGYISREDVLELAQPLKKNEYGRYLLRLIGEA | 289 |

[4937] A related DNA sequence was identified in S. pyogenes <SEQ ID 2659> which encodes the amino acid sequence <SEQ ID 2660>. Analysis of this protein sequence reveals the following:

Possible site: 20
>>> Seems to have no N-terminal signal sequence
----- Final Results -----
bacterial cytoplasm --- Certainty = 0.1585 (Affirmative) < succ>
bacterial membrane --- Certainty = 0.0000 (Not Clear) < succ>
bacterial outside --- Certainty = 0.0000 (Not Clear) < succ>
RGD motif: 207-209

[4938] The protein has homology with the following sequences in the databases:

| >GP: AAC69538 GB: AF057294 Cps23fO [Streptococcus pneumoniae] | | | |
|---|---|---|---|
| Identities = 263/289 (91%), Positives = 276/289 (95%) | | | |
| Query: | 1 | MKGIILAGGSGTRLYPLTRAASKQLMPIYDKPMIYYPLSTLMLAGIKDVLIISTPQDLPR | 60 |
| | | MKGIILAGGSGTRLYPLTRAASKQLMP+YDKPMIYYPLSTLMLAGI+D+LIISTPQDLPR | |
| Sbjct: | 1 | MKGIILAGGSGTRLYPLTRAASKQLMPVYDKPMIYYPLSTLMLAGIRDILIISTPQDLPR | 60 |
| Query: | 61 | FEELLGDGSEFGISLSYKEQPSPDGLAQAFIIGEEFIGDDRVALILGDNIYHGNGLTKML | 120 |
| | | F+ELL DGSEFGI LSY EQPSPDGLAQAFIIGEEFIGDD VALILGDNIYHG GL+ ML | |
| Sbjct: | 61 | FKELLQDGSEFGIKLSYAEQPSPDGLAQAFIIGEEFIGDDSVALILGDNIYHGPGLSTML | 120 |
| Query: | 121 | QKAAAKEKGATVFGYQVKDPERFGVVEFDENMNAISIEEKPEVPKSHFAVTGLYFYDNDV | 180 |
| | | QKAA KEKGATVFGY VKDPERFGVVEFDENMNAISIEEKPE P+S++AVTGLYFYDNDV | |
| Sbjct: | 121 | QKAAKKEKGATVFGYHVKDPERFGVVEFDENMNAISIEEKPEYPRSNYAVTGLYFYDNDV | 180 |
| Query: | 181 | VEIAKNIKPSARGELEITDVNKAYLERGDLSVELMGRGFAWLDTGTHESLLEAAQYIETV | 240 |
| | | VEIAK+IKPS RGELEITDVNKAYL+RGDLSVELMGRGFAWLDTGTHESLLEA+QYIETV | |
| Sbjct: | 181 | VEIAKSIKPSPRGELEITDVNKAYLDRGDLSVELMGRGFAWLDTGTHESLLEASQYIETV | 240 |
| Query: | 241 | QRLQNAQVANLEEIAYRMGYISKEDVHKLAQSLKKNEYGQYLLRLIGEA | 289 |
| | | QR+QN QVANLEEIAYRMGYIS+EDV LAQSLKKNEYGQYLLRLIGEA | |
| Sbjct: | 241 | QRMQNVQVANLEEIAYRMGYISREDVLALAQSLKKNEYGQYLLRLIGEA | 289 |

[4939] An alignment of the GAS and GBS proteins is shown below.

| Identities = 257/289 (88%), Positives = 274/289 (93%) | | | |
|---|---|---|---|
| Query: | 1 | MKGIILAGGSGTRLYPLTRAASKQLMPIYDKPMIYYPLSVLMLAGIKEILIISTPQDLPR | 60 |
| | | MKGIILAGGSGTRLYPLTRAASKQLMPIYDKPMIYYPLS LMLAGIK++LIISTPQDLPR | |
| Sbjct: | 1 | MKGIILAGGSGTRLYPLTRAASKQLMPIYDKPMIYYPLSTLMLAGIKDVLIISTPQDLPR | 60 |
| Query: | 61 | FEDMLGDGSELGISLSYAEQPSPDGLAQAFIIGEDFIGDDHVALVLGDNIYHGPGLSAML | 120 |
| | | FE++LGDGSE GISLSY EQPSPDGLAQAFIIGE+FIGDD VAL+LGDNIYHG GL+ ML | |
| Sbjct: | 61 | FEELLGDGSEFGISLSYKEQPSPDGLAQAFIIGEEFIGDDRVALILGDNIYHGNGLTKML | 120 |
| Query: | 121 | QRAASKESGATVFGYQVKDPERFGVVEFDTDMNAISIEEKPAQPKSNYAVTGLYFYDNDV | 180 |
| | | Q+AA+KE GATVFGYQVKDPERFGVVEFD +MNAISIEEKP PKS++AVTGLYFYDNDV | |
| Sbjct: | 121 | QKAAAKEKGATVFGYQVKDPERFGVVEFDENMNAISIEEKPEVPKSHFAVTGLYFYDNDV | 180 |
| Query: | 181 | VEIAKNIKPSPRGELEITDVNKAYLDRGDLSVELMGRGFAWLDTGTHESLLEAAQYIETV | 240 |
| | | VEIAKNIKPS RGELEITDVNKAYL+RGDLSVELMGRGFAWLDTGTHESLLEAAQYIETV | |
| Sbjct: | 181 | VEIAKNIKPSARGELEITDVNKAYLERGDLSVELMGRGFAWLDTGTHESLLEAAQYIETV | 240 |
| Query: | 241 | QRMQNVQVANLEEIAYRMGYITREQVLELAQPLKKNEYGQYLLRLIGEA | 289 |
| | | QR+QN QVANLEEIAYRMGYI++E V +LAQ LKKNEYGQYLLRLIGEA | |
| Sbjct: | 241 | QRLQNAQVANLEEIAYRMGYISKEDVHKLAQSLKKNEYGQYLLRLIGEA | 289 |

[4940] There is also homology to SEQ ID 858.

[4941] SEQ ID 2658 (GBS296) was expressed in E. coli as a His-fusion product. SDS-PAGE analysis of total cell extract is shown in FIG. 43 (lane 5; MW 35.4 kDa).

[4942] GBS296-His was purified as shown in FIG. 203, lane 7.

[4943] Based on this analysis, it was predicted that these proteins, and their epitopes could be useful antigens for vaccines or diagnostics.

### EXAMPLE 876

[4944] A DNA sequence (GBSx0929) was identified in S. agalactiae <SEQ ID 2661> which encodes the amino acid sequence <SEQ ID 2662>. Analysis of this protein sequence reveals the following:

Possible site: 18
>>> Seems to have no N-terminal signal sequence
----- Final Results -----
bacterial cytoplasm --- Certainty = 0.2635 (Affirmative) < succ>
bacterial membrane --- Certainty = 0.0000 (Not Clear) < succ>
bacterial outside --- Certainty = 0.0000 (Not Clear) < succ>

[4945] The protein has no significant homology with any sequences in the GENPEPT database.

[4946] No corresponding DNA sequence was identified in S. pyogenes.

[4947] Based on this analysis, it was predicted that this protein and its epitopes, could be useful antigens for vaccines or diagnostics.

### EXAMPLE 877

[4948] A DNA sequence (GBSx0930) was identified in S. agalactiae <SEQ ID 2663> which encodes the amino acid sequence <SEQ ID 2664>. This protein is predicted to be unnamed protein product. Analysis of this protein sequence reveals the following:

Possible site: 56
>>> Seems to have no N-terminal signal sequence
----- Final Results -----
bacterial cytoplasm --- Certainty = 0.1868 (Affirmative) < succ>
bacterial membrane --- Certainty = 0.0000 (Not Clear) < succ>
bacterial outside --- Certainty = 0.0000 (Not Clear) < succ>

[4949] A related DNA sequence was identified in S. pyogenes <SEQ ID 2665> which encodes the amino acid sequence <SEQ ID 2666>. Analysis of this protein sequence reveals the following:

Possible site: 30
>>> Seems to have no N-terminal signal sequence
----- Final Results -----
bacterial cytoplasm --- Certainty = 0.2818 (Affirmative) < succ>
bacterial membrane --- Certainty = 0.0000 (Not Clear) < succ>
bacterial outside --- Certainty = 0.0000 (Not Clear) < succ>
RGD motif: 29-31

[4950] The protein has homology with the following sequences in the databases:

| >GP: AAC69539 GB: AF057294 Cps23fP [Streptococcus pneumoniae] | | | |
|---|---|---|---|
| Identities = 168/197 (85%), Positives = 183/197 (92%) | | | |
| Query: | 1 | MTETFFDKPLACREIKEIPGLLEFDIPVRGDNRGWFKENFQKEKMLPIGFPERFFEEGKL | 60 |
| | | MT+ FF K LA R+++ IPG+LEFDIPV GDNRGWFKENFQKEKMLP+GFPE FF EGKL | |
| Sbjct: | 1 | MTDNFFGKTLAARKVEAIPGMLEFDIPVHGDNRGWFKENFQKEKMLPLGFPESFFAEGKL | 60 |
| Query: | 61 | QNNVSFSRQHVLRGLHAEPWDKYISVADDGKVLGAWVDLREGETFGNVYQTVIDASKGMF | 120 |
| | | QNNVSFSR++VLRGLHAEPWDKYISVAD GKVLG+WVDLREGETFGN YQTVIDASKG+F | |
| Sbjct: | 61 | QNNVSFSRKNVLRGLHAEPWDKYISVADGGKVLGSWVDLREGETFGNTYQTVIDASKGIF | 120 |
| Query: | 121 | VPRGVANGFQVLSETVSYSYLVNDYWALDLKPKYAFVNYADPSLGITWENLAAAEVSEAD | 180 |
| | | VPRGVANGFQVLS+TVSYSYLVNDYWAL+LKPKYAFVNYADPSLGI WEN+A AEVSEAD | |
| Sbjct: | 121 | VPRGVANGFQVLSDTVSYSYLVNDYWALELKPKYAFVNYADPSLGIEWENIAEAEVSEAD | 180 |
| Query: | 181 | KNHPLLSDVKPLKPKDL | 197 |
| | | K+HPLL DVKPLK +DL | |
| Sbjct: | 181 | KHHPLLKDVKPLKKEDL | 197 |

[4951] An alignment of the GAS and GBS proteins is shown below.

| Identities = 157/197 (79%), Positives = 180/197 (90%) | | | |
|---|---|---|---|
| Query: | 1 | MTEQFFDKELTCRPIEAIPGLLEFDIPVRGDNRGWFKENFQKEKMIPLGFPESFFEADKL | 60 |
| | | MTE FFDK L CR I+ IPGLLEFDIPVRGDNRGWFKENFQKEKM+P+GFPE FFE KL | |
| Sbjct: | 1 | MTETFFDKPLACREIKEIPGLLEFDIPVRGDNRGWFKENFQKEKMLPIGFPERFFEEGKL | 60 |
| Query: | 61 | QNNISFNKKNTLRGLHAEPWDKYVSIADEGRVIGTWVDLREGDSFGNVYQTIIDASKGIF | 120 |
| | | QNN+SF++++ LRGLHAEPWDKY+S+AD+G+V+G WVDLREG++FGNVYQT+IDASKG+F | |
| Sbjct: | 61 | QNNVSFSRQHVLRGLHAEPWDKYISVADDGKVLGAWVDLREGETFGNVYQTVIDASKGMF | 120 |
| Query: | 121 | VPRGVANGFQVLSDKAAYTYLVNDYWALELKPKYAFVNYADPNLGIQWENLEEAEVSEAD | 180 |
| | | VPRGVANGFQVLS+ +Y+YLVNDYWAL+LKPKYAFVNYADP+LGI WENL AEVSEAD | |
| Sbjct: | 121 | VPRGVANGFQVLSETVSYSYLVNDYWALDLKPKYAFVNYADPSLGITWENLAAAEVSEAD | 180 |
| Query: | 181 | KNHPLLKDVKPLKKEDL | 197 |
| | | KNHPLL DVKPLK +DL | |
| Sbjct: | 181 | KNHPLLSDVKPLKPKDL | 197 |

[4952] Based on this analysis, it was predicted that these proteins and their epitopes could be useful antigens for vaccines or diagnostics.

### EXAMPLE 878

[4953] A DNA sequence (GBSx0931) was identified in S. agalactiae <SEQ ID 2667> which encodes the amino acid sequence <SEQ ID 2668>. Analysis of this protein sequence reveals the following:

Possible site: 14
>>> Seems to have no N-terminal signal sequence
----- Final Results -----
bacterial cytoplasm --- Certainty = 0.3019 (Affirmative) < succ>
bacterial membrane --- Certainty = 0.0000 (Not Clear) < succ>
bacterial outside --- Certainty = 0.0000 (Not Clear) < succ>

[4954] The protein has no significant homology with any sequences in the GENPEPT database.

[4955] No corresponding DNA sequence was identified in S. pyogenes.

[4956] Based on this analysis, it was predicted that this protein and its epitopes, could be useful antigens for vaccines or diagnostics.

### EXAMPLE 879

[4957] A DNA sequence (GBSx0932) was identified in S. agalactiae <SEQ ID 2669> which encodes the amino acid sequence <SEQ ID 2670>. Analysis of this protein sequence reveals the following:

Possible site: 37
>>> Seems to have an uncleavable N-term signal seq
----- Final Results -----
bacterial membrane --- Certainty = 0.0000 (Not Clear) < succ>
bacterial outside --- Certainty = 0.0000 (Not Clear) < succ>
bacterial cytoplasm --- Certainty = 0.0000 (Not Clear) < succ>

[4958] The protein has no significant homology with any sequences in the GENPEPT database.

[4959] No corresponding DNA sequence was identified in S. pyogenes.

[4960] Based on this analysis, it was predicted that this protein and its epitopes, could be useful antigens for vaccines or diagnostics.

### EXAMPLE 880

[4961] A DNA sequence (GBSx0933) was identified in S. agalactiae <SEQ ID 2671> which encodes the amino acid sequence <SEQ ID 2672>. Analysis of this protein sequence reveals the following:

Possible site: 38
>>> Seems to have no N-terminal signal sequence
----- Final Results -----
bacterial cytoplasm --- Certainty = 0.0957 (Affirmative) < succ>
bacterial membrane --- Certainty = 0.0000 (Not Clear) < succ>
bacterial outside --- Certainty = 0.0000 (Not Clear) < succ>

[4962] A related GBS nucleic acid sequence <SEQ ID 9367> which encodes amino acid sequence <SEQ ID 9368> was also identified.

[4963] The protein is similar to the dTDP-glucose-4,6-dehydratase from S. mutans:

| >GP: BAA11249 GB: D78182 dTDP-glucose-4,6-dehydratase [Streptococcus | | | |
|---|---|---|---|
| mutans] | | | |
| Identities = 290/310 (93%), Positives = 304/310 (97%) | | | |
| Query: | 1 | MTYAGNRANIEAILGDRVELVVGDIADAELVDKLAAKADAIVHYAAESHNDNSLNDPSPF | 60 |
| | | +TYAGN AN+E ILGDRVELVVGDIAD+ELVDKLAAKADAIVHYAAESHNDNSL DPSPF | |
| Sbjct: | 39 | LTYAGNHANLEEILGDRVELVVGDIADSELVDKLAAKADAIVHYAAESHNDNSLKDPSPF | 98 |
| Query: | 61 | IHTNFIGTYTLLEAARKYDIRFHHVSTDEVYGDLPLREDLPGNGEGPGEKFTAETKYNPS | 120 |
| | | I+TNF+GTYTLLEAARKYDIRFHHVSTDEVYGDLPLREDLPG+GEGPGEKFTAETKYNPS | |
| Sbjct: | 99 | IYTNFVGTYTLLEAARKYDIRFHHVSTDEVYGDLPLREDLPGHGEGPGEKFTAETKYNPS | 158 |
| Query: | 121 | SPYSSTKAASDLIVKAWVRSFGVKATISNCSNNYGPYQHIEKFIPRQITNILAGIKPKLY | 180 |
| | | SPYSSTKAASDLIVKAWVRSFGVKATISNCSNNYGPYQHIEKFIPRQITNIL+GIKPKLY | |
| Sbjct: | 159 | SPYSSTKAASDLIVKAWVRSFGVKATISNCSNNYGPYQHIEKFIPRQITNILSGIKPKLY | 218 |
| Query: | 181 | GEGKNVRDWIHTNDHSTGVWAILTKGRIGETYLIGADGEKNNKEVLELILEKMGQPKDAY | 240 |
| | | GEGKNVRDWIHTNDHSTGVWAILTRGRIGETYLIGADGEKNNKEVLELILSKM QPKDAY | |
| Sbjct: | 219 | GEGKNVRDWIHTNDHSTGVWAILTKGRIGETYLIGADGEKNNKEVLELILEKMSQPKDAY | 278 |
| Query: | 241 | DHVTDRAGHDLRYAIDSTKLREELGWEPQFTNFSEGLEETINWYTENQDWWKAEKEAVEA | 300 |
| | | DHVTDRAGHDLRYAIDSTKLREELGW+PQFTNF EGLE+TI WYTE++DWWKAEKEAVEA | |
| Sbjct: | 279 | DHVTDRAGHDLRYAIDSTKLREELGWKPQFTNFEEGLEDTIKWYTEHEDWWKAEKEAVEA | 338 |
| Query: | 301 | NYAKTQEVIN | 310 |
| | | NYAKTQ+++N | |
| Sbjct: | 339 | NYAKTQKILN | 348 |

[4964] A related DNA sequence was identified in S. pyogenes <SEQ ID 2673> which encodes the amino acid sequence <SEQ ID 2674>. Analysis of this protein sequence reveals the following:

Possible site: 40
>>> Seems to have no N-terminal signal sequence
----- Final Results -----
bacterial cytoplasm --- Certainty = 0.1150 (Affirmative) < succ>
bacterial membrane --- Certainty = 0.0000 (Not Clear) < succ>
bacterial outside --- Certainty = 0.0000 (Not Clear) < succ>

[4965] An alignment of the GAS and GBS proteins is shown below.

| Identities = 300/309 (97%), Positives = 303/309 (97%) | | | |
|---|---|---|---|
| Query: | 1 | MTYAGNRANIEAILGDRVELVVGDIADAELVDKLAAKADAIVHYAAESHNDNSLNDPSPF | 60 |
| | | +TYAGNRANIEAILGDRVELVVGDIADAELVDKLAAK DAIVHYAAESHNDNSL DPSPF | |
| Sbjct: | 37 | LTYAGNRANIEAILGDRVELVVGDIADAELVDKLAAKTDAIVHYAAESHNDNSLEDPSPF | 96 |
| Query: | 61 | IHTNFIGTYTLLEAARKYDIRFHHVSTDEVYGDLPLREDLPGNGEGPGEKFTAETKYNPS | 120 |
| | | IHTNFIGTYTLLEAARKYDIRFHHVSTDEVYGDLPLREDLPG GEGPGEKFTAETKYNPS | |
| Sbjct: | 97 | IHTNFIGTYTLLEAARKYDIRFHHVSTDEVYGDLPLREDLPGQGEGPGEKFTAETKYNPS | 156 |
| Query: | 121 | SPYSSTKAASDLIVKAWVRSFGVKATISNCSNNYGPYQHIEKFIPRQITNILAGIKPKLY | 180 |
| | | SPYSSTKAASDLIVKAWVRSFGVKATISNCSNNYGPYQHIEKFIPRQITNILAGIKPKLY | |
| Sbjct: | 157 | SPYSSTKAASDLIVKAWVRSFGVKATISNCSNNYGPYQHIEKFIPRQITNILAGIKPKLY | 216 |
| Query: | 181 | GEGKNVRDWIHTNDHSTGVWAILTKGRIGETYLIGADGEKNNKEVLELILEKMGQPKDAY | 240 |
| | | GEGKNVRDWIHTNDHSTGVWAILTKGRIGETYLIGADGEKNNKEVLELILEKMGQPKDAY | |
| Sbjct: | 217 | GEGKNVRDWIHTNDHSTGVWAILTKGRIGETYLIGADGEKNNKEVLELILEKMGQPKDAY | 276 |
| Query: | 241 | DHVTDRAGHDLRYAIDSTKLREELGWEPQFTNFSEGLEETINWYTENQDWWKAEKEAVEA | 300 |
| | | DHVTDRAGHDLRYAIDSTKLREELGWEPQFTNFSEGLEETI WYTEN+ WWKAEK+AVEA | |
| Sbjct: | 277 | DHVTDRAGHDLRYAIDSTKLREELGWEPQFTNFSEGLEETIKWYTENETWWKAEKDAVEA | 336 |
| Query: | 301 | NYAKTQEVI | 309 |
| | | YAKTQEVI | |
| Sbjct: | 337 | KYAKTQEVI | 345 |

[4966] Based on this analysis, it was predicted that these proteins and their epitopes could be useful antigens for vaccines or diagnostics.

### EXAMPLE 881

[4967] A DNA sequence (GBSx0935) was identified in S. agalactiae <SEQ ID 2675> which encodes the amino acid sequence <SEQ ID 2676>. Analysis of this protein sequence reveals the following:

Possible site: 36
>>> Seems to have a cleavable N-term signal seq.
----- Final Results -----
bacterial outside --- Certainty = 0.3000 (Affirmative) < succ>
bacterial membrane --- Certainty = 0.0000 (Not Clear) < succ>
bacterial cytoplasm --- Certainty = 0.0000 (Not Clear) < succ>

[4968] The protein has no significant homology with any sequences in the GENPEPT database.

[4969] No corresponding DNA sequence was identified in S. pyogenes.

[4970] Based on this analysis, it was predicted that this protein and its epitopes, could be useful antigens for vaccines or diagnostics.

### EXAMPLE 882

[4971] A DNA sequence (GBSx0936) was identified in S. agalactiae <SEQ ID 2677> which encodes the amino acid sequence <SEQ ID 2678>. Analysis of this protein sequence reveals the following:

| Possible site: 35 | | | |
|---|---|---|---|
| >>> Seems to have an uncleavable N-term signal seq | | | |
| INTEGRAL | Likelihood = −15.55 | Transmembrane | 13-29 (3-40) |

----- Final Results -----
bacterial membrane --- Certainty = 0.7220 (Affirmative) < succ>
bacterial outside --- Certainty = 0.0000 (Not Clear) < succ>
bacterial cytoplasm --- Certainty = 0.0000 (Not Clear) < succ>

[4972] The protein has no significant homology with any sequences in the GENPEPT database.

[4973] No corresponding DNA sequence was identified in S. pyogenes.

[4974] Based on this analysis, it was predicted that this protein and its epitopes, could be useful antigens for vaccines or diagnostics.

### EXAMPLE 883

[4975] A DNA sequence (GBSx0937) was identified in S. agalactiae <SEQ ID 2679> which encodes the amino acid sequence <SEQ ID 2680>. Analysis of this protein sequence reveals the following:

Possible site: 15
>>> Seems to have no N-terminal signal sequence
----- Final Results -----
bacterial cytoplasm --- Certainty = 0.2882 (Affirmative) < succ>
bacterial membrane --- Certainty = 0.0000 (Not Clear) < succ>
bacterial outside --- Certainty = 0.0000 (Not Clear) < succ>

[4976] The protein has no significant homology with any sequences in the GENPEPT database.

[4977] No corresponding DNA sequence was identified in S. pyogenes.

[4978] Based on this analysis, it was predicted that this protein and its epitopes, could be useful antigens for vaccines or diagnostics.

### EXAMPLE 884

[4979] A DNA sequence (GBSx0938) was identified in S. agalactiae <SEQ ID 2681> which encodes the amino acid sequence <SEQ ID 2682>. This protein is predicted to be hyaluronate lyase. Analysis of this protein sequence reveals the following:

Possible site: 30
>>> Seems to have a cleavable N-term signal seq.
----- Final Results -----
bacterial outside --- Certainty = 0.3000 (Affirmative) < succ>
bacterial membrane --- Certainty = 0.0000 (Not Clear) < succ>
bacterial cytoplasm --- Certainty = 0.0000 (Not Clear) < succ>

[4980] A related DNA sequence was identified in S. pyogenes <SEQ ID 2683> which encodes the amino acid sequence <SEQ ID 2684>. Analysis of this protein sequence reveals the following:

Possible site: 46
>>> Seems to have a cleavable N-term signal seq.
----- Final Results -----
bacterial outside --- Certainty = 0.3000 (Affirmative) < succ>
bacterial membrane --- Certainty = 0.0000 (Not Clear) < succ>
bacterial cytoplasm --- Certainty = 0.0000 (Not Clear) < succ>

[4981] A related sequence was also identified in GAS <SEQ ID 9099> which encodes the amino acid sequence <SEQ ID 9100>. Analysis of this protein sequence reveals the following:

Possible cleavage site: 23
>>> Seems to have a cleavable N-term signal seq.
----- Final Results -----
bacterial outside --- Certainty = 0.300 (Affirmative) < succ>
bacterial membrane --- Certainty = 0.000 (Not Clear) < succ>
bacterial cytoplasm --- Certainty = 0.000 (Not Clear) < succ>

[4982] An alignment of the GAS and GBS proteins is shown below.

| Identities = 359/771 (46%), Positives = 492/771 (63%), Gaps = 50/771 (6%) | | | |
|---|---|---|---|
| Query: | 307 | PNAT--GSTTVKISDKSGKIIKEVPLSVTASTEDNFTKLLDKWNDVTIGNHVYDTNDSNM | 364 |
| | | PN T + T+ +D K+++ +D +T+LLD+WN + GN YD + +M | |
| Sbjct: | 65 | PNNTYFQTQTLTTTDSEKKVVQP-------QQKDYYTELLDQWNSIIAGNDAYDKTNPDM | 117 |
| Query: | 365 | QKLNQKLDETNAKNIEAIKL-----DSNRTFLWKDLDNLNNSAQLTATYRRLEDLAKQIT | 419 |
| | | + K E +A+NI IK NRT+LW+ + + SA +T TYR +E +AKQIT | |
| Sbjct: | 118 | VTFHNKA-EKDAQNI--IKSYQGPDHENRTYLWEHAKDYSASANITKTYRNIEKIAKQIT | 174 |
| Query: | 420 | NPHSTIYKNEKAIRTVKESLAWLHQNFYNVNKDI------EGSANWWDFEIGVPRSITGT | 473 |
| | | NP S Y++ KAI VK+ +A+++++ YN++++ E NWW +EIG PR+I T | |
| Sbjct: | 175 | NPESCYYQDSKAIAIVKDGMAFMYEHAYNLDRENHQTTGKENKENWWVYEIGTPRAINNT | 234 |
| Query: | 474 | LALMYNYFTDAEIKTYTDPIEHFVPDAGFFRKTLVN--PFKALGGNLVDMGRVKIIEGLL | 531 |
| | | L+LMY YFT EI YT PIE FVPD FR N PF+A GNL+DMGRVK+I G+L | |
| Sbjct: | 235 | LSLMYPYFTQEEILKYTAPIEKFVPDPTRFRVRAANFSPFEANSGNLIDMGRVKLISGIL | 294 |
| Query: | 532 | RKDNTIIEKTSHSLKNLFTTATKAEGFYADGSYIDHT-----------NVAYTGAYGNVL | 580 |
| | | RKD+ I T +++ +FT + GFY DGS IDH +AYTGAYGNVL | |
| Sbjct: | 295 | RKDDLEISDTIKAIEKVFTLVDEGNGFYQDGSLIDHVVTNAQSPLYKKGIAYTGAYGNVL | 354 |
| Query: | 581 | IDGLTQLLPIIQETDYKISNQELDMVYKWINQSFLPLIVKGELMDMSRGRSISREAASSH | 640 |
| | | IDGL+QL+PIIQ+T I ++ +Y WIN SF P+IV+GE+MDM+RGRSISR A SH | |
| Sbjct: | 355 | IDGLSQLIPIIQKTKSPIKADKMATIYHWINHSFFPIIVRGEMMDMTRGRSISRFNAQSH | 414 |
| Query: | 641 | AAAVEVLRGFLRLANMSNEERNLDLKSTIKTIITS-NKFYNVFNNLKSYSDIANMNKLLN | 699 |
| | | A +E LR LR+A+MS E L LK+ IKT++T N FYNV++NLK+Y DI M +LL+ | |
| Sbjct: | 415 | VAGIEALRAILRIADMSEEPHRLALKTRIKTLVTQGNAFYNVYDNLKTYHDIKLMKELLS | 474 |
| Query: | 700 | DSTVATKPLKSNLSTFNSMDRLAYYNAEKDFGFALSLHSKRTLNYEGMNDENTRGWYTGD | 759 |
| | | D++V + L S +++FNSMD+LA YN + DF F LS+ S RT NYE MN+EN GW+T D | |
| Sbjct: | 475 | DTSVPVQKLDSYVASFNSMDKLALYNNKHDFAFGLSMFSNRTQNYEAMNNENLHGWFTSD | 534 |
| Query: | 760 | GMFYLYNSDQSHYSNHFWPTVNPYKMAGTTEKDAKREDTTKDFMSKHSKDAKEKTGQVTG | 819 |
| | | GMFYLYN+D HYS ++W TVNPY++ GTTE + K + T + + K ++ G +TG | |
| Sbjct: | 535 | GMFYLYNNDLGHYSENYWATVNPYRLPGTTETEQKPLEGTPE----NIKTNYQQVG-MTG | 589 |
| Query: | 820 | ASD--FVGSVKLNDHFALAAMDFTNWDRTLTAQKGWVILNDKIVFLGSNIKNTNGIGNVS | 877 |
| | | SD FV S KLN+ ALAAM FTNW+++LT KGW IL +KI+F+GSNIKN + | |
| Sbjct: | 590 | LSDDAFVASKKLNNTSALAAMTFTNWNKSLTLNKGWFILGNKIIFVGSNIKNQSS-HKAY | 648 |
| Query: | 878 | TTIDQRKDDSKTPYTTYVNGKTVDLKQASSQQFTDTKSVFLESKEPGRNIGYIFFKNSTI | 937 |
| | | TTI+QRK++ K PY +YVN + VDL FT+TKS+FLES +P +NIGY FFK +T+ | |
| Sbjct: | 649 | TTIEQRKENQKYPYCSYVNNQPVDLNN-QLVDFTNTKSIFLESDDPAQNIGYYFFKPTTL | 707 |
| Query: | 938 | DIERKEQTGTWNSINRTSKNTSI---VSNPFITISQKHDNKGDSYDYMMVPNIDRTSFDK | 994 |
| | | I + QTG W +I K+ VSN FITI Q H GD Y YMM+PN+ R F+ | |
| Sbjct: | 708 | SISKALQTGKWQNIKADDKSPEAIKEVSNTFITIMQNHTQDGDRYAYMMLPNMTRQEFET | 767 |
| Query: | 995 | LANSKEVELLENSSKQQVIYDKNSQTWAVIKHDNQESLINNQFKMNKAGLY | 1045 |
| | | + +++LLEN+ K +YD +SQ VI + + ++ +N ++ G Y | |
| Sbjct: | 768 | YISKLDIDLLENNDKLAAVYDHDSQQMHVIHYGKKATMFSNH-NLSHQGFY | 817 |

[4983] SEQ ID 2682 (GBS89) was expressed in E. coli as a His-fusion product. SDS-PAGE analysis of total cell extract is shown in FIG. 6 (lane 3; MW 118 kDa).

[4984] The His-fusion protein was purified as shown in FIG. 190, lane 4.

[4985] Based on this analysis, it was predicted that these proteins and their epitopes could be useful antigens for vaccines or diagnostics.

### EXAMPLE 885

[4986] A DNA sequence (GBSx0939) was identified in S. agalactiae <SEQ ID 2685> which encodes the amino acid sequence <SEQ ID 2686>. This protein is predicted to be mutator mutt protein. Analysis of this protein sequence reveals the following:

Possible site: 42
>>> Seems to have no N-terminal signal sequence
----- Final Results -----
bacterial cytoplasm --- Certainty = 0.3781(Affirmative) < succ>
bacterial membrane --- Certainty = 0.0000(Not Clear) < succ>
bacterial outside --- Certainty = 0.0000(Not Clear) < succ>

[4987] The protein has homology with the following sequences in the GENPEPT database.

| >GP: BAA11250 GB: D78182 MutX [Streptococcus mutans] | | | |
|---|---|---|---|
| Identities = 132/160 (82%), Positives = 146/160 (90%), Gaps = 1/160 (0%) | | | |
| Query: | 1 | MTKLATICYIDNGKELLLLHRNKKENDVHEGKWISVGGKLEAGETPDECAKREILEETHL | 60 |
| | | M KLATICYIDNG+ELLL+HRNKK NDVHEGKWISVGGKLE GE+PDECA+REI EETHL | |
| Sbjct: | 1 | MIKLATICYIDNGRELLLMHRNKKPNDVHEGKWISVGGKLEKGESPDECARREIFEETHL | 60 |
| Query: | 61 | TVKKMDFKGVITFPEFTPGHDWYTYVFKVTDYEGELISDDESREGTLEWVPYDQVLSKPT | 120 |
| | | VK+MDFKG+ITFP+FTPGHDWYTYVFKV D+EG LISD +SREGTLEWVPY+QVL+KPT | |
| Sbjct: | 61 | IVKQMDFKGIITFPDFTPGHDWYTYVFKVRDFEGRLISDKDSREGTLEWVPYNQVLTKPT | 120 |
| Query: | 121 | WQGDYEIFKWILEDVPFFSAKFVYDEHQNLIEKTVNFYEK | 160 |
| | | W+GDYEIFKWILED PFFSAKFVY E Q L++K V FYEK | |
| Sbjct: | 121 | WEGDYEIFKWILEDAPFFSAKFVYQE-QKLVDKHVIFYEK | 159 |

[4988] A related DNA sequence was identified in S. pyogenes <SEQ ID 2687> which encodes the amino acid sequence <SEQ ID 2688>. Analysis of this protein sequence reveals the following:

Possible site: 42
>>> Seems to have no N-terminal signal sequence
----- Final Results -----
bacterial cytoplasm --- Certainty = 0.3399 (Affirmative) < succ>
bacterial membrane --- Certainty = 0.0000 (Not Clear) < succ>
bacterial outside --- Certainty = 0.0000 (Not Clear) < succ>

[4989] An alignment of the GAS and GBS proteins is shown below.

| Identities = 131/158 (82%), Positives = 146/158 (91%) | | | |
|---|---|---|---|
| Query: | 1 | MTKLATICYIDNGKELLLLHRNKKENDVHEGKWISVGGKLEAGETPDECAKREILEETHL | 60 |
| | | MT+LATICYIDNG LLLLHRNKKENDVH+GKWISVGGKLEAGETPDECA+REILEETHL | |
| Sbjct: | 1 | MTQLATICYIDNGDSLLLLHRNKKENDVHKGKWISVGGKLEAGETPDECARREILEETHL | 60 |
| Query: | 61 | TVKKMDFKGVITFPEFTPGHDWYTYVFKVTDYEGELISDDESREGTLEWVPYDQVLSKPT | 120 |
| | | TV +M FKG+ITFPEFTPGHDWYTYVFKVT +EG+LISD+ESREGTLEWVPYDQVL KPT | |
| Sbjct: | 61 | TVTEMAFKGIITFPEFTPGHDWYTYVFKVTGFEGDLISDEESREGTLEWVPYDQVLEKPT | 120 |
| Query: | 121 | WQGDYEIFKWILEDVPFFSAKFVYDEHQNLIEKTVNFY | 158 |
| | | W+GDY+IFKWILED FFSAKF YD++ L++K+V FY | |
| Sbjct: | 121 | WEGDYDIFKWILEDRSFFSAKFTYDQNNQLMDKSVTFY | 158 |

[4990] Based on this analysis, it was predicted that these proteins and their epitopes could be useful antigens for vaccines or diagnostics.

### EXAMPLE 886

[4991] A DNA sequence (GBSx0940) was identified in S. agalactiae <SEQ ID 2689> which encodes the amino acid sequence <SEQ ID 2690>. This protein is predicted to be MutT/nudix family protein. Analysis of this protein sequence reveals the following:

Possible site: 28
>>> Seems to have no N-terminal signal sequence
----- Final Results -----
bacterial cytoplasm --- Certainty = 0.1901 (Affirmative) < succ>
bacterial membrane --- Certainty = 0.0000 (Not Clear) < succ>
bacterial outside --- Certainty = 0.0000 (Not Clear) < succ>

[4992] The protein has homology with the following sequences in the GENPEPT database.

| >GP: AAF11817 GB: AE002059 MutT/nudix family protein [Deinococcus | | | |
|---|---|---|---|
| radiodurans] | | | |
| Identities = 40/135 (29%), Positives = 62/135 (45%), Gaps = 3/135 (2%) | | | |
| Query: | 22 | FGVRVSALIIENQKLLLIYAPHLDKYY-LPGGALQVGEDSNKAVAREVLEEIGLHSQVGD | 80 |
| | | F R + + +++ +LL + ++ LPGGA+Q GE S A RE EE GL + V | |
| Sbjct: | 33 | FQTRATLICVQDNRLLTCWDERFPDFFALPGGAVQTGESSAAAAQREWHEETGLRADVTR | 92 |
| Query: | 81 | LAYIIENQFNIKRHHYHSVEFLYFVNLLGQAPESIKEGTHKRHFVWLPIKELTKIDCNPN | 140 |
| | | A +E F+ + H F + V L G+ P ++ + H F WL + L P | |
| Sbjct: | 93 | CA-TLERFFHWEGRERHEFGFFFRVELTGELPATVLDNPHV-FFRWLAVDALDDHTLYPR | 150 |
| Query: | 141 | FLAQDLIEWPGHVVH | 155 |
| | | + Q L G + H | |
| Sbjct: | 151 | CVPQLLRLPAGEIGH | 165 |

[4993] A related DNA sequence was identified in S. pyogenes <SEQ ID 2691> which encodes the amino acid sequence <SEQ ID 2692>. Analysis of this protein sequence reveals the following:

Possible site: 55
>>> Seems to have no N-terminal signal sequence
----- Final Results -----
bacterial cytoplasm --- Certainty = 0.3832 (Affirmative) < succ>
bacterial membrane --- Certainty = 0.0000 (Not Clear) < succ>
bacterial outside --- Certainty = 0.0000 (Not Clear) < succ>

[4994] An alignment of the GAS and GBS proteins is shown below.

| Identities = 33/80 (41%), Positives = 50/80 (62%), Gaps = 1/80 (1%) | | | |
|---|---|---|---|
| Query: | 29 | LIIENQKLLLIYAPHLDKYYLPGGALQVGEDSNKAVAREVLEEIGLHSQVGDLAYIIENQ | 88 |
| | | LI+ N K L D+YY GG VGE +++ V RE LEE+G+ ++V LA+++EN | |
| Sbjct: | 1 | LIVRNGKNFLTRDAD-DQYYTIGGTSLVGEKTHETVLRETLEEVGIRAKVNQLAFMVENH | 59 |
| Query: | 89 | FNIKRHHYHSVEFLYFVNLL | 108 |
| | | F+I +H++EF Y V+ L | |
| Sbjct: | 60 | FDIDDVFWHNIEFHYLVSPL | 79 |

[4995] Based on this analysis, it was predicted that these proteins and their epitopes could be useful antigens for vaccines or diagnostics.

### EXAMPLE 887

[4996] A DNA sequence (GBSx0941) was identified in S. agalactiae <SEQ ID 2693> which encodes the amino acid sequence <SEQ ID 2694>. This protein is predicted to be unnamed protein product. Analysis of this protein sequence reveals the following:

| Possible site: 26 | | | |
|---|---|---|---|
| >>> Seems to have no N-terminal signal sequence | | | |
| INTEGRAL | Likelihood = −12.95 | Transmembrane | 24-40 (17-48) |
| INTEGRAL | Likelihood = −11.09 | Transmembrane | 88-104 (82-112) |
| INTEGRAL | Likelihood = −9.39 | Transmembrane | 294-310 (276-315) |
| INTEGRAL | Likelihood = −8.07 | Transmembrane | 242-258 (236-262) |
| INTEGRAL | Likelihood = −7.86 | Transmembrane | 50-66 (43-74) |
| INTEGRAL | Likelihood = −3.13 | Transmembrane | 337-353 (332-355) |
| INTEGRAL | Likelihood = −2.23 | Transmembrane | 185-201 (182-202) |
| INTEGRAL | Likelihood = −1.38 | Transmembrane | 269-285 (267-285) |

----- Final Results -----
bacterial membrane --- Certainty = 0.6180 (Affirmative) < succ>
bacterial outside --- Certainty = 0.0000 (Not Clear) < succ>
bacterial cytoplasm --- Certainty = 0.0000 (Not Clear) < succ>

[4997] A related DNA sequence was identified in S. pyogenes <SEQ ID 2695> which encodes the amino acid sequence <SEQ ID 2696>. Analysis of this protein sequence reveals the following:

| Possible site: 26 | | | |
|---|---|---|---|
| >>> Seems to have no N-terminal signal sequence | | | |
| INTEGRAL | Likelihood = −9.71 | Transmembrane | 88-104 (85-112) |
| INTEGRAL | Likelihood = −9.29 | Transmembrane | 24-40 (21-72) |
| INTEGRAL | Likelihood = −8.92 | Transmembrane | 47-63 (41-72) |
| INTEGRAL | Likelihood = −7.59 | Transmembrane | 243-259 (237-266) |
| INTEGRAL | Likelihood = −6.10 | Transmembrane | 181-197 (178-203) |
| INTEGRAL | Likelihood = −5.47 | Transmembrane | 278-294 (273-310) |
| INTEGRAL | Likelihood = −3.88 | Transmembrane | 338-354 (331-368) |
| INTEGRAL | Likelihood = −1.59 | Transmenbrane | 297-313 (297-314) |

----- Final Results -----
bacterial membrane --- Certainty = 0.4885 (Affirmative) < succ>
bacterial outside --- Certainty = 0.0000 (Not Clear) < succ>
bacterial cytoplasm --- Certainty = 0.0000 (Not Clear) < succ>

[4998] The protein has homology with the following sequences in the databases:

| >GP: AAD00285 GB: U78604 putative membrane protein [Streptococcus mutans] | | | |
|---|---|---|---|
| Identities = 244/382 (63%), Positives = 310/382 (80%), Gaps = 3/382 (0%) | | | |
| Query: | 12 | SLFYKWFLNNQATMALVITLLAFLTIFVFTKISFLFMPVISFFAVIMLPLVISTILYYLT | 71 |
| | | S F+KWFL+N+ L++ LL FL I VFTKIS +F P++SF AVIMLPLVIS +LYYL | |
| Sbjct: | 17 | SWFFKWFLDNKTVTVLLVLLLVFLDILVFTKISSIFKPLLSFLAVIMLPLVISALLYYLL | 76 |
| Query: | 72 | KPLVDLINHLGPNRTTSIFIVFGLITLLFVWAISGFVPMVQTQLTSFIEDLPKYVGKVNE | 131 |
| | | KP+VD I G +R +I IVF +I L VW I+ F PM+ QLTSFI+ LP YV V+ | |
| Sbjct: | 77 | KPIVDFIEIRGTSRVMAITIVFVIIAGLLVWGIANFFPMLNEQLTSFIKYLPSYVRSVDA | 136 |
| Query: | 132 | EANKLLENEWLVSYKPQLQDMLTHTSQKALDYAQSFSKNAIDWAGNFAGAIARITVAIII | 191 |
| | | + +KLL N+ L S++PQ+++ +T+ SQKA+DYA+ FSK A+ WAGNFA IAR+TVAIII | |
| Sbjct: | 137 | QVSKLLRNDLLASFRPQIENAVTNFSQKAVDYAEPFSKGAVTWAGNFASLIARVTVAIII | 196 |
| Query: | 192 | SPFILFYFLRDSSHMKNGLVNVLPLKLRVPMVRVLGDINKQLSGYVQGQVTVAIVVGFMF | 251 |
| | | SPFI+FY LRDSS MK V+ LP K+R P+ R+LGD+N+QL+GYVQ TVAI+VGFMF | |
| Sbjct: | 197 | SPFIVFYLLRDSSKMKEAFVSYLPTKMRQPIHRILGDVNRQLAGYVQRSSTVAIIVGFMF | 256 |
| Query: | 252 | SIMFSLVGLKYAITFGIIAGFLNMIPYLGSFLAMIPVVIMAMVQGPFMLVKVLVIFMIEQ | 311 |
| | | SIMF+++GL+YA+TFGIIAGFLNMIPYLGSFLA IPV I+A+V+GP +VKV ++F++EQ | |
| Sbjct: | 257 | SIMFTIIGLRYAVTFGIIAGFLNMIPYLGSFLATIPVFILALVEGPVKVVKVALVFIVEQ | 316 |
| Query: | 312 | TIEGRFVAPLVLGNKLSIHPITIMFLLLTAGSMFGVWGVFLVIPIYASVKVVIKELFDWY | 371 |
| | | TIEGRFV+PLVLG+KLSIHPITIMF+LLTAGSMFGVWGVFL IP+YAS+KVV+KE+F+WY | |
| Sbjct: | 317 | TIEGRFVSPLVLGSKLSIHPITIMFILLTAGSMFGVWGVFLGIPVYASIKVVVKEIFEWY | 376 |
| Query: | 372 | KKVSGLYDEEVLVIEEVKDHVK | 393 |
| | | K +SGLY++E E++K VK | |
| Sbjct: | 377 | KPISGLYEKEE---EDIKKDVK | 395 |

[4999] An alignment of the GAS and GBS proteins is shown below.

| Identities = 243/389 (62%), Positives = 306/389 (78%), Gaps = 2/389 (0%) | | | |
|---|---|---|---|
| Query: | 6 | EKEFKNSLFFKWILNNQAVIALMITFLVFLTIFIFTKISFMFKPVFDFLAVLILPLVISG | 65 |
| | | EK +SLF+KW LNNQA +AL+IT L FLTIF+FTKISF+F PV F AV++LPLVIS | |
| Sbjct: | 6 | EKSRTDSLFYKWFLNNQATMALVITLLAFLTIFVFTKISFLFMPVISFFAVIMLPLVIST | 65 |
| Query: | 66 | LLYYLLKPMVTFLEKRGIKRVTAILSVFTIIILLLIWAMSSFIPMMSNQLRHFMEDLPSY | 125 |
| | | +LYYL KP+V + G R T+I VF +I LL +WA+S F+PM+ QL F+EDLP Y | |
| Sbjct: | 66 | ILYYLTKPLVDLINHLGPNRTTSIFIVFGLITLLFVWAISGFVPMVQTQLTSFIEDLPKY | 125 |
| Query: | 126 | VNKVQMETSSFIDHNPWLKSYKGEISSMLSNISSQAVSYAEKFSKNILDWAGNLASTVAR | 185 |
| | | V KV E + ++ N WL SYK ++ ML++ S +A+ YA+ FSKN +DWAGN A +AR | |
| Sbjct: | 126 | VGKVNEEANKLLE-NEWLVSYKPQLQDMLTHTSQKALDYAQSFSKNAIDWAGNFAGAIAR | 184 |
| Query: | 186 | VTVATIMAPFILFYLLRDSRNMKNGFLMVLPTKLRQPTDRILREMNSQMSGYVQGQIIVA | 245 |
| | | +TVA I++PFILFY LRDS +MKNG + VLP KLR P R+L ++N Q+SGYVQGQ+ VA | |
| Sbjct: | 185 | ITVAIIISPFILFYFLRDSSHMKNGLVNVLPLKLRVPMVRVLGDINKQLSGYVQGQVTVA | 244 |
| Query: | 246 | ITVGVIFSIMYSIIGLRYGVTLGIIAGVLNMVPYLGSFVAQIPVFILALVAGPVMVVKVA | 305 |
| | | I VG +FSIM+S++GL+Y +T GIIAG LNM+PYLGSF+A IPV I+A+V GP M+VKV | |
| Sbjct: | 245 | IVVGFMFSIMFSLVGLKYAITFGIIAGFLNMIPYLGSFLAMIPVVIMAMVQGPFMLVKVL | 304 |
| Query: | 306 | IVFVIEQTLEGRFVSPLVLGNKLSIHPITIMFILLTSGAMFGVWGVFLSIPIYASIKVVV | 365 |
| | | ++F+IEQT+EGRFV+PLVLGNKLSIHPITIMF+LLT+G+MFGVWGVFL IPIYAS+KVV+ | |
| Sbjct: | 305 | VIFMIEQTIEGRFVAPLVLGNKLSIHPITIMFLLLTAGSMFGVWGVFLVIPIYASVKVVI | 364 |
| Query: | 366 | KELFDWYKAVSGLYTVDV-VTEERSEEVK | 393 |
| | | KELFDWYK VSGLY +V V EE + VK | |
| Sbjct: | 365 | KELFDWYKKVSGLYDEEVLVIEEVKDHVK | 393 |

[5000] Based on this analysis, it was predicted that these proteins and their epitopes could be useful antigens for vaccines or diagnostics.

### EXAMPLE 888

[5001] A DNA sequence (GBSx0942) was identified in S. agalactiae <SEQ ID 2697> which encodes the amino acid sequence <SEQ ID 2698>. Analysis of this protein sequence reveals the following:

Possible site: 58
>>> Seems to have no N-terminal signal sequence
----- Final Results -----
bacterial cytoplasm --- Certainty = 0.2715 (Affirmative) < succ>
bacterial membrane --- Certainty = 0.0000 (Not Clear) < succ>
bacterial outside --- Certainty = 0.0000 (Not Clear) < succ>

[5002] A related GBS nucleic acid sequence <SEQ ID 9891> which encodes amino acid sequence <SEQ ID 9892> was also identified.

[5003] The protein has homology with the following sequences in the GENPEPT database.

| >GP: AAA25160 GB: L16975 ORF1 [Lactococcus lactis] | | | |
|---|---|---|---|
| Identities = 132/345 (38%), Positives = 203/345 (58%), Gaps = 3/345 (0%) | | | |
| Query: | 79 | INLAQIVAEDGDIEQAFLYLDYISEDSQEYVSALLVMADLYDMEGLTDVAREKLLLASKL | 138 |
| | | +NLA+I ++G++++A YL I + + Y++AL+ +ADLY E + A KL A +L | |
| Sbjct: | 1 | VNLAEIAEDNGNLDEALNYLYQIPVNDENYIAALIKIADLYQFEVDFETAISKLEEAREL | 60 |
| Query: | 139 | SDDPLVTFGLAEMNLSLEHYQEAIEGYASLDNREILETTGVSTYQRIGKSYAIMGKFDAA | 198 |
| | | SD PL+TF LAE Y AI YA L R+IL T +S YQRIG SYA +G F+ A | |
| Sbjct: | 61 | SDSPLITFALAESYFEQGDYSAAITEYAKLSERKILHETKISIYQRIGDSYAQLGNFENA | 120 |
| Query: | 199 | IEFLEKAVDIEYDDLTVFELATILYDQEEYQKANLYFKQLDTINPDFAGYEYIYGLSLRE | 258 |
| | | I FLEK+++ + T++++A + + +A FK+L+ ++ +F YE Y +L | |
| Sbjct: | 121 | ISFLEKSLEFDEKPETLYKIALLYGETHNETRAIANFKRLEKMDVEFLNYELAYAQTLEA | 180 |
| Query: | 259 | EHKSEEALRLVQQGIRKNSFDGQLLLLASQLSYELHDVHSSESYLKQAEKVSENQDEIVM | 318 |
| | | + + AL + ++G++KN LL AS++ ++L D ++E YL A + E DE V | |
| Sbjct: | 181 | NQEFKAALEMAKKGMKKNPNAVPLLHFASKICFKLKDKAAAERYLVDALNLPELHDETVF | 240 |
| Query: | 319 | RLSNLYLEEERFEEVLELDN-DNLENILAKWNIAKAHKALEMDDSVD--YYQSLYNDLKD | 375 |
| | | L+NLY EE FE V+ L+ E++LAKW A AHKALE D Y + + +L + | |
| Sbjct: | 241 | LLANLYFNEEDFEAVINLEELLEDEHLLAKWLFAGAHKALENDSEAAALYEELIQTNLSE | 300 |
| Query: | 376 | NPEFLQDYAYILREFGYLDKAQEVGKAYLKLVPDDIEMSEWVNNI | 420 |
| | | NPEFL+DY L+E G + K + + + YL+LVPDD M + ++ | |
| Sbjct: | 301 | NPEFLEDYIDFLKEIGQISKTEPIIEQYLELVPDDENMRNLLTDL | 345 |

[5004] A related DNA sequence was identified in S. pyogenes <SEQ ID 2699> which encodes the amino acid sequence <SEQ ID 2700>. Analysis of this protein sequence reveals the following:

Possible site: 25
>>> Seems to have no N-terminal signal sequence
----- Final Results -----
bacterial cytoplasm --- Certainty = 0.2991 (Affirmative) < succ>
bacterial membrane --- Certainty = 0.0000 (Not Clear) < succ>
bacterial outside --- Certainty = 0.0000 (Not Clear) < succ>

[5005] An alignment of the GAS and GBS proteins is shown below.

| Identities = 267/409 (65%), Positives = 336/409 (81%), Gaps = 1/409 (0%) | | | |
|---|---|---|---|
| Query: | 13 | MLNSEKMIVSIQNQDLEHANKYFEKALKNDPEEVLLELGAYLESIGFLPQAKRLYDQIRP | 72 |
| | | MLNSEKMI S+ QDL HA KYF+KALK D + L+LG YLESIGFLP AKR+Y Q+ | |
| Sbjct: | 7 | MLNSEKMIASLDQQDLAHAEKYFQKALKEDDADSLIALGEYLESIGFLPHAKRIYLQLAD | 66 |
| Query: | 73 | NYPEVAINLAQIVAEDGDIEQAFLYLDYISEDSQEYVSALLVMADLYDMEGLTDVAREKL | 132 |
| | | +YPE+ INLAQI AED IE+AFLYLD +S+DS Y+SALLVMADLYDMEGLT+VAREKL | |
| Sbjct: | 67 | DYPELNINLAQIAAEDDAIEEAFLYLDKVSKDSPNYLSALLVMADLYDMEGLTEVAREKL | 126 |
| Query: | 133 | LLASKLSDDPLVTFGLAEMNLSLEHYQEAIEGYASLDNREILETTGVSTYQRIGKSYAIM | 192 |
| | | L A +S +PLV FGLAE+++SL+H++EAI+ YA LDNR+ILE TG+STYQRIG++YA + | |
| Sbjct: | 127 | LQAVGISPEPLVIFGLAEIDMSLQHFKEAIDYYAQLDNRQILELTGISTYQRIGRAYASL | 186 |
| Query: | 193 | GKFDAAIEFLEKAVDIEYDDLTVFELATILYDQEEYQKANLYFKQLDTINPDFAGYEYIY | 252 |
| | | GKF+AAIEFLEKAV IEY+D TVFELAT++YDQE YQKANLYFKQL+TINPD+ GYEY Y | |
| Sbjct: | 187 | GKFEAAIEFLEKAVAIEYEDETVFELATLMYDQENYQKANLYFKQLETINPDYPGYEYGY | 246 |
| Query: | 253 | GLSLREEHKSEEALRLVQQGIRKNSFDGQLLLLASQLSYELHDVHSSESYLKQAEKVSEN | 312 |
| | | LSL EEHK+ EALRLVQQG+RKN+FD QLLLLASQLSYELHD ++E+YL QA++V+ + | |
| Sbjct: | 247 | ALSLHEEHKTSEALRLVQQGLRKNAFDSQLLLLASQLSYELHDRQNAENYLLQAKEVAVD | 306 |
| Query: | 313 | QDEIVMRLSNLYLEEERFEEVLELDNDNLENILAKWNIAKAHKALEMDD-SVDYYQSLYN | 371 |
| | | +EI+MRL LY + ERFEEV+ L+ + ++N+L KW IAKA+ ALE ++ ++ Y + | |
| Sbjct: | 307 | DEEILMRLVTLYFDAERFEEVIALNRETIDNVLTKWTIAKAYHALEQEEVALALYNEISA | 366 |
| Query: | 372 | DLKDNPEFLQDYAYILREFGYLDKAQEVGKAYLKLVPDDIEMSEWVNNI | 420 |
| | | DL +NPEFLQDYAY+LREFG KA ++ AYL+ VPDD+M +++++I | |
| Sbjct: | 367 | DLAENPEFLQDYAYLLREFGQFHKAIQMATAYLRQVPDDVNMQDFLDHI | 415 |

[5006] Based on this analysis, it was predicted that these proteins and their epitopes could be useful antigens for vaccines or diagnostics.

### EXAMPLE 889

[5007] A DNA sequence (GBSx0943) was identified in S. agalactiae <SEQ ID 2701> which encodes the amino acid sequence <SEQ ID 2702>. This protein is predicted to be alpha-acetolactate synthase (ilvK). Analysis of this protein sequence reveals the following:

Possible site: 60
>>> Seems to have no N-terminal signal sequence
----- Final Results -----
bacterial cytoplasm --- Certainty = 0.2105 (Affirmative) < succ>
bacterial membrane --- Certainty = 0.0000 (Not Clear) < succ>
bacterial outside --- Certainty = 0.0000 (Not Clear) < succ>

[5008] The protein has homology with the following sequences in the GENPEPT database.

| >GP: CAA01700 GB: A23961 alpha-acetolactate synthase [Lactococcus | | | |
|---|---|---|---|
| lactis] | | | |
| Identities = 396/559 (70%), Positives = 466/559 (82%), Gaps 8/559 (1%) | | | |
| Query: | 4 | SHNQYGADLIVDSLINHDVKYVFGIPGAKIDRVFDTLE-DKGPELIVARHEQNATFMAQA | 62 |
| | | S Q+GA+L+VDSLINH VKYVFGIPGAKIDRVFD LE ++GP+++V RHEQ A FMAQA | |
| Sbjct: | 2 | SEKQFGANLVVDSLINHKVKYVFGIPGAKIDRVFDLLENEEGPQMVVTRHEQGAAFMAQA | 61 |
| Query: | 63 | VGRITGEPGVVIATSGPGISNLATGLVTATDEGDAVLAIGGQVKRGDLLKRAHQSMNNVA | 122 |
| | | VGR+TGEPGVV+ TSGPG+SNLAT L+TAT EGDA+LAIGGQVKR D LKRAHQSM+N | |
| Sbjct: | 62 | VGRLTGEPGVVVVTSGPGVSNLATPLLTATSEGDAILAIGGQVKRSDRLKRAHQSMDNAG | 121 |
| Query: | 123 | MLEPITKYSAEVHDPNTLSETVANAYRLAKSGKPGASFISIPQDVTDSPVSVKAIKPLSA | 182 |
| | | M++ TKYSAEV DPNTLSE++ANAYR+AKSG PGA+F+SIPQDVTD+ VS+KAI+PLS | |
| Sbjct: | 122 | MMQSATKYSAEVLDPNTLSESIANAYRIAKSGHPGATFLSIPQDVTDAEVSIKAIQPLSD | 181 |
| Query: | 183 | PKLGSASVLDINYLAQAINNAVLPVLLLGNGASSEGVTAAVRRLLDAVKLPVVETFQGAG | 242 |
| | | PK+G+AS+ DINYLAQAI NAVLPV+L+G GAS V +++R LL V +PVVETFQGAG | |
| Sbjct: | 182 | PKMGNASIDDINYLAQAIKNAVLPVILVGAGASDAKVASSLRNLLTHVNIPVVETFQGAG | 241 |
| Query: | 243 | IVSRELEDETFFGRVGLFRNQPGDMLLKRADLVIAIGYDPIEYEARNWNAEISARIIVID | 302 |
| | | ++S +LE TF+GR+GLFRNQPGDMLLKR+DLVIA+GYDPIEYEARNWNAEI +RIIVID | |
| Sbjct: | 242 | VISHDLE-HTFYGRIGLFRNQPGDMLLKRSDLVIAVGYDPIEYEARNWNAEIDSRIIVID | 300 |
| Query: | 303 | VEQAEIDTYFQPERELIGDMAHTLDLLLPAIKGYELPEGSKEYLKGLRNNIENVSDVKFD | 362 |
| | | AEIDTY+QPERELIGD+A TLD LLPA++GY++P+G+K+YL GL E +FD | |
| Sbjct: | 301 | NAIAEIDTYYQPERELIGDIAATLDNLLPAVRGYKIPKGTKDYLDGLH---EVAEQHEFD | 357 |
| Query: | 363 | RDSA-HGLVHPLDLIDVLQENTTDDMTVTVDVGSHYIWMARYFKSYEARHLLFSNGMQTL | 421 |
| | | ++ G +HPLDL+ QE DD TVTVDVGS YIWMAR+FKSYE RHLLFSNGMQTL | |
| Sbjct: | 358 | TENTEEGRMHPLDLVSTFQEIVKDDETVTVDVGSLYIWMARHFKSYEPRHLLFSNGMQTL | 417 |
| Query: | 422 | GVALPWAISAALLRPNTKVISVSGDGGFLFSAQSLETAVRLHLPIVHIIWNDGKYNMVEF | 481 |
| | | GVALPWAI+AALLRP KV S SGDGGFLF+ QELETAVRL+LPIV IIWNDG Y+MV+F | |
| Sbjct: | 418 | GVALPWAITAALLRPGKKVYSHSGDGGFLFTGQELETAVRLNLPIVQIIWNDGHYDMVKF | 477 |
| Query: | 482 | QEEMKYGRSSGVDFGPVDFVKYAESFGAKGYRVDSKDSFEETLKQALIDAENGPVLIDVP | 541 |
| | | QEEMKYGRS+ VDFG VD+VKYAE+ AKGYR SK+ E LK I GPV+IDVP | |
| Sbjct: | 478 | QEEMKYGRSAAVDFGYVDYVKYAEAMRAKGYRAHSKEELAEILKS--IPDTTGPVVIDVP | 535 |
| Query: | 542 | IDYKDNVTLGETILPDEFY | 560 |
| | | +DY DN+ L E +LP+EFY | |
| Sbjct: | 536 | LDYSDNIKLAEKLLPEEFY | 554 |

[5009] No corresponding DNA sequence was identified in S. pyogenes.

[5010] Based on this analysis, it was predicted that this protein and its epitopes, could be useful antigens for vaccines or diagnostics.

### EXAMPLE 890

[5011] A DNA sequence (GBSx0944) was identified in S. agalactiae <SEQ ID 2703> which encodes the amino acid sequence <SEQ ID 2704>. This protein is predicted to be alpha-acetolactate decarboxylase (aldC). Analysis of this protein sequence reveals the following:

Possible site: 43
>>> Seems to have no N-terminal signal sequence
----- Final Results -----
bacterial cytoplasm --- Certainty = 0.3096 (Affirmative) < succ>
bacterial membrane --- Certainty = 0.0000 (Not Clear) < succ>
bacterial outside --- Certainty = 0.0000 (Not Clear) < succ>

[5012] A related GBS nucleic acid sequence <SEQ ID 9889> which encodes amino acid sequence <SEQ ID 9890> was also identified.

[5013] The protein has homology with the following sequences in the GENPEPT database.

| >GP: CAA57941 GB: X82620 alpha-acetolactate decarboxylase [Lactococcus | | | |
|---|---|---|---|
| lactis] | | | |
| Identities = 139/239 (58%), Positives = 187/239 (78%), Gaps 3/239 (1%) | | | |
| Query: | 16 | MSETVKLFQYSTLSSLMAGLYKGSLTIGELLTHGDLGIGTVHMIDGELIVLDGKAYQAIG | 75 |
| | | MSE +LFQY+TL +LMAGLY+G++TIGELL HGDLGIGT+ IDGELIVLDGKAYQA | |
| Sbjct: | 1 | MSEITQLFQYNTLGALMAGLYEGTMTIGELLKHGDLGIGTLDSIDGELIVLDGKAYQA-- | 58 |
| Query: | 76 | TDGKAEIIQLSDDVTVPYAAVLPHHIQKQFDINAEIDNKDLEEMILKNFEGQNLFKSLKI | 135 |
| | | G I++L+DD+ VPYAAV+PH + F + +K+LE+ I F+GQNLF+S+KI | |
| Sbjct: | 59 | -KGDKTIVELTDDIKVPYAAVVPHQAEVVFKQKFTVSDKELEDRIESYFDGQNLFRSIKI | 117 |
| Query: | 136 | KGTFSRMHVRMIPKSPQHKRFADIASNQPEFTRENVSGTLVGIWTPELFHGVGVKGFHVH | 195 |
| | | G F +MHVRMIP++ +F +++ NQPE+T EN+ GT+VGIWTPE+FHGV V G+H+H | |
| Sbjct: | 118 | TGKFPKMHVRMIPRAKSGTKFVEVSQNQPEYTEENIKGTIVGIWTPEMFHGVSVAGYHLH | 177 |
| Query: | 196 | FISDDLTFGGHVMDYSLTQGKVEIGKVDQLDQCFPTQDQEFLKANFDLQKLREDIDLSE | 254 |
| | | FIS+D TFGGHV+D+ + G VEIG +DQL+Q FP QD++FL A+ D++ L++DID++E | |
| Sbjct: | 178 | FISEDFTFGGHVLDFIIDNGTVEIGAIDQLNQSFPVQDRKFLFADLDIEALKKDIDVAE | 236 |

[5014] No corresponding DNA sequence was identified in S. pyogenes.

[5015] Based on this analysis, it was predicted that these proteins and their epitopes could be useful antigens for vaccines or diagnostics.

### EXAMPLE 891

[5016] A DNA sequence (GBSx0945) was identified in S. agalactiae <SEQ ID 2705> which encodes the amino acid sequence <SEQ ID 2706>. This protein is predicted to be fibronectin-binding protein-like protein A. Analysis of this protein sequence reveals the following:

Possible site: 57
>>> Seems to have no N-terminal signal sequence
----- Final Results -----
bacterial cytoplasm --- Certainty = 0.5042 (Affirmative) < succ>
bacterial membrane --- Certainty = 0.0000 (Not Clear) < succ>
bacterial outside --- Certainty = 0.0000 (Not Clear) < succ>

[5017] The protein has homology with the following sequences in the GENPEPT database.

| >GP: CAA46282 GB: X65164 fibronectin-binding protein-like protein A | | | |
|---|---|---|---|
| [Streptococcus gordonii] | | | |
| Identities = 392/550 (71%), Positives = 462/550 (83%) | | | |
| Query: | 1 | MSFDGFFLHHLTNELQEQIEKGRIQKVNQPFDHELVLTIRNNRRNYKLLLSAHPVFGRIQ | 60 |
| | | MSFDGFFLHH+T EL+ ++ GRIQK+NQPF+ ELVL IR+NR++ KLLLSAH VFGR+Q | |
| Sbjct: | 1 | MSFDGFFLHHMTEELRHELVGGRIQKINQPFEQELVLQIRSNRKSLKLLLSAHSVFGRVQ | 60 |
| Query: | 61 | TTEANFQNPQNPNTFTMIMRKYLQGAVIETIQQIENDRILEIVVSNKNEIGDHIKATLVV | 120 |
| | | T+ F+NP PNTF M+MRKYLQGAVIE IQQ+ENDRILEI VSNKNEIGD + TLV+ | |
| Sbjct: | 61 | LTDTTFENPAVPNTFIMVMRKYLQGAVIEAIQQVENDRILEISVSNKNEIGDSVAVTLVI | 120 |
| Query: | 121 | EIMGKHSNIILIDKNEHKIIESIKHVGFSQNSYRTILPGSTYIAPPKTKAINPFDISDQT | 180 |
| | | EIMGKHSNIIL+DK KIIE+IKHVGFSQNSYRTILPGSTY+APP+T ++NPF + D+ | |
| Sbjct: | 121 | EIMGKHSNIILLDKASGKIIEAIKHVGFSQNSYRTILPGSTYVAPPQTGSLNPFTVGDEK | 180 |
| Query: | 181 | LFELLQTNDLSPKNLQQLLQGLGRDTALELSHCLKDNKLNDFRQFFSREYYPSLTEKSFS | 240 |
| | | LFE+LQT ++ PK L Q+ QGLGRDTA ELS L ++L FR FF+ PSLTEKSFS | |
| Sbjct: | 181 | LFEILQTEEIEPKRLLQIFQGLGRDTATELSGRLTTDRLKTFRAFFASPTQPSLTEKSFS | 240 |
| Query: | 241 | AVQFSSSHETFQSLGQLLDYYYQEKAEKDRIAQQASDLIHRVQSELEKNIKKLAKQQDEL | 300 |
| | | A+ FS S +L +LLD +Y++KAE+ R+ QQAS+LI RV++ELEKN KKL KQ+DEL | |
| Sbjct: | 241 | ALVFSDSKTQMSTLSELLDTFYKDKAERYRVNQQASELIRRVENELEKNRKKLGKQEDEL | 300 |
| Query: | 301 | LATENAEEFRQKGELLTTYLSMVPNNQDVVVLDNYYTNQTIEISLDRALTPNQNAQRYFK | 360 |
| | | LATE AEEFRQKGELLTT+L VPN+QD V LDNYYT + I I+LD+ALTPNQNAQRYFK | |
| Sbjct: | 301 | LATEKAEEFRQKGELLTTFLHQVPNDQDQVELDNYYTGEKILITLDKALTPNQNAQRYFK | 360 |
| Query: | 361 | KYQKLKEAVKHLKGIISDTENTITYLESVETSLNHASMEDINDIREELVETGFIKRRAHD | 420 |
| | | +YQKLKEAVKHL +I +T TI YLESVET+L AS+ +I +IREEL++TGFI+RR + | |
| Sbjct: | 361 | RYQKLKEAVKHLTSLIEETRTTILYLESVETALAQASLTEIAEIREELIQTGFIRRRQRE | 420 |
| Query: | 421 | KQHKRKKPEQYLASDGKTIIMVGRNNLQNDELTFKMARKGELWFHAKDIPGSHVLIRDNL | 480 |
| | | K KRKKPE+YLASDG+TII+VGRNNLQNDELTFKMA+K ELWFHAKDIPGSHV+I NL | |
| Sbjct: | 421 | KIQKRKKPEKYLASDGQTIILVGRNNLQNDELTFKMAKKDELWFHAKDIPGSHVVITGNL | 480 |
| Query: | 481 | NPSDEVKTDAAELAAYYSKARLSNLVQVDMIEAKKLNKPSGTKPGFVTYTGQKTLRVTPT | 540 |
| | | PSDEVKTDAAELAAY+SKARLSNLVQVDMIE KKLNKP+G KPGFVTYTGQKTLRVTP | |
| Sbjct: | 481 | QPSDEVKTDAAELAAYFSKARLSNLVQVDMIEIKKLNKPTGGKPGFVTYTGQKTLRVTPD | 540 |
| Query: | 541 | QEKIDSLELK | 550 |
| | | +KI S+K++ | |
| Sbjct: | 541 | ADKIKSMKIQ | 550 |

[5018] A related DNA sequence was identified in S. pyogenes <SEQ ID 2707> which encodes the amino acid sequence <SEQ ID 2708>. Analysis of this protein sequence reveals the following:

Possible site: 38
>>> Seems to have no N-terminal signal sequence
----- Final Results -----
bacterial cytoplasm --- Certainty = 0.5434 (Affirmative) < succ>
bacterial membrane --- Certainty = 0.0000 (Not Clear) < succ>
bacterial outside --- Certainty = 0.0000 (Not Clear) < succ>

[5019] The protein differs significantly from L28919 in its mid-region:

| | | |
|---|---|---|
| Query: | 223 | QHFQGLGRDTAKELAELLTTD |
| | | F L +T K + ELLTTD |
| Sbjct: | 121 | PAFSRLRGETPKRIGELLTTD |

[5020] An alignment of the GAS and GBS proteins is shown below.

| Identities = 421/549 (76%), Positives = 487/549 (88%) | | | |
|---|---|---|---|
| Query: | 1 | MSFDGFFLHHLTNELQEQIEKGRIQKVNQPFDHELVLTIRNNRRNYKLLLSAHPVFGRIQ | 60 |
| | | MSFDGFFLHHLTNEL+E + GRIQKVNQPF+ ELVLTIRN+R+NYKLLLSAHPVFGR+Q | |
| Sbjct: | 27 | MSFDGFFLHHLTNELKENLLYGRIQKVNQPFERELVLTIRNHRKNYKLLLSAHPVFGRVQ | 86 |
| Query: | 61 | TTEANFQNPQNPNTFTMIMRKYLQGAVIETIQQIENDRILEIVVSNKNEIGDHIKATLVV | 120 |
| | | T+A+FQNFQ PNTFTMIMRKYLQGAVIE ++QI+NDRI+EI VSNKNEIGD I+ATL++ | |
| Sbjct: | 87 | ITQADFQNPQVPNTFTMIMRKYLQGAVIEQLEQIDNDRIIEIKVSNKNEIGDAIQATLII | 146 |
| Query: | 121 | EIMGKHSNIILIDKNEHKIIESIKHVGFSQNSYRTILPGSTYIAPPKTKAINPFDISDQT | 180 |
| | | EIMGKHSNIIL+D+ E+KIIESIKHVGFSQNSYRTILPGSTYI PPKT A+NPF I+D | |
| Sbjct: | 147 | EIMGKHSNIILVDRAENKIIESIKHVGFSQNSYRTILPGSTYIEPPKTAAVNPFTITDVP | 206 |
| Query: | 181 | LFELLQTNDLSPKNLQQLLQGLGRDTALELSHCLKDNKLNDFRQFFSREYYPSLTEKSFS | 240 |
| | | LFE+LQT +L+ K+LQQ QGLGRDTA EL+ L +KL FR+FF+R +LT SF+ | |
| Sbjct: | 207 | LFEILQTQELTVKSLQQHFQGLGRDTAKELAELLTTDKLKRFREFFARPTQANLTTASFA | 266 |
| Query: | 241 | AVQFSSSHETFQSLGQLLDYYYQEKAEKDRIAQQASDLIHRVQSELEKNIKKLAKQQDEL | 300 |
| | | V FS SH TF++L +LD++YQ+KAE+DRI QQASDLIHRVQ+EL+KN KL+KQ+ EL | |
| Sbjct: | 267 | PVLFSDSHATFETLSDMLDHFYQDKAERDRINQQASDLIHRVQTELDKNRNKLSKQEAEL | 326 |
| Query: | 301 | LATENAEEFRQKGELLTTYLSMVPNNQDVVVLDNYYTNQTIEISLDRALTPNQNAQRYFK | 360 |
| | | LATENAE FRQKGELLTTYLS+VPNNQD V+LDNYYT + IEI+LD+ALTPNQNAQRYFK | |
| Sbjct: | 327 | LATENAELFRQKGELLTTYLSLVPNNQDSVILDNYYTGEKIEIALDKALTPNQNAQRYFK | 386 |
| Query: | 361 | KYQKLKEAVKHLKGIISDTENTITYLESVETSLNHASMEDINDIREELVETGFIKRRAHD | 420 |
| | | KYQKLKEAVKHL G+I+DT+ +ITY ESV+ +L+ AS++DI DIREEL + GF+K R D | |
| Sbjct: | 387 | KYQKLKEAVKHLSGLIADTKQSITYFESVDYNLSQASIDDIEDIREELYQAGFLKSRQRD | 446 |
| Query: | 421 | KQHKRKKPEQYLASDGKTIIMVGRNNLQNDELTFKMARKGELWFHAKDIPGSHVLIRDNL | 480 |
| | | K+HKRKKPEQYLASDG TI+MVGRNNLQN+ELTFKMA+KGELWFHAKDIPGSHV+I+DNL | |
| Sbjct: | 447 | KRHKRKKPEQYLASDGTTILMVGRNNLQNEELTFKMAKKGELWFHAKDIPGSHVIIKDNL | 506 |
| Query: | 481 | NPSDEVKTDAAELAAYYSKARLSNLVQVDMIEAKKLNKPSGTKPGFVTYTGQKTLRVTPT | 540 |
| | | +PSDEVKTDAAELAAYYSKARLSNLVQVDMIEAKKL+KPSG KPGFVTYTGQKTLRVTP | |
| Sbjct: | 507 | DPSDEVKTDAAELAAYYSKARLSNLVQVDMIEAKKLHKPSGAKPGFVTYTGQKTLRVTPD | 566 |
| Query: | 541 | QEKIDSLKL | 549 |
| | | Q KI S+KL | |
| Sbjct: | 567 | QAKILSMKL | 575 |

[5021] SEQ ID 2706 (GBS81) was expressed in E. coli as a His-fusion product. SDS-PAGE analysis of total cell extract is shown in FIG. 6 (lane 2; MW 64 kDa) and in FIG. 6 (lane 5; MW 64 kDa). The GBS81-His fusion product was purified (FIG. 190, lane 3) and used to immunise mice. The resulting antiserum was used for FACS (FIG. 319), which confirmed that the protein is immunoaccessible on GBS bacteria.

[5022] Based on this analysis, it was predicted that these proteins and their epitopes could be useful antigens for vaccines or diagnostics.

### EXAMPLE 892

[5023] A DNA sequence (GBSx0946) was identified in S. agalactiae <SEQ ID 2709> which encodes the amino acid sequence <SEQ ID 2710>. Analysis of this protein sequence reveals the following:

| Possible site: 53 | | | |
|---|---|---|---|
| >>> Seems to have an uncleavable N-term signal seq | | | |
| INTEGRAL | Likelihood = −9.08 | Transmembrane | 6-22 (1-24) |

----- Final Results -----
bacterial membrane --- Certainty = 0.4630 (Affirmative) < succ>
bacterial outside --- Certainty = 0.0000 (Not Clear) < succ>
bacterial cytoplasm --- Certainty = 0.0000 (Not Clear) < succ>

[5024] The protein has homology with the following sequences in the GENPEPT database.

| >GP: AAF94260 GB: AE004191 conserved hypothetical protein [Vibrio cholerae] | | | |
|---|---|---|---|
| Identities = 111/295 (37%), Positives = 184/295 (61%), Gaps = 1/295 (0%) | | | |
| Query: | 36 | QVVKIGILQYVTHDALDAIEKGVEDGLAQEGYK-GKKVKLTVLNAEADQSKIQAMSKQLV | 94 |
| | | + K+ + Q V H ALDA +G+ DGL +GY+GK ++ A+ + + +++Q V | |
| Sbjct: | 26 | KTAKVAVSQIVEHPALDATRQGLLDGLKAKGYEEGKNLEFDYKTAQGNPAIAVQIARQFV | 85 |
| Query: | 95 | NHHNDILIGIATPSAQGLAASTKDTPIIMGAVSDPLGAKLVTNMKKPTTNVTGLSNVVPT | 154 |
| | | + D+L+GIATP+AQ L ++TK PI+ AV+DP+GAKLV +++P NVTGLS++ P | |
| Sbjct: | 86 | GENPDVLVGIATPTAQALVSATKTIPIVFTAVTDPVGAKLVKQLEQPGKNVTGLSDLSPV | 145 |
| Query: | 155 | KQTVQLIKDITPNIKRIGILYASSEDNSVSQVTEFTKYAQKAGLEVLKYSVPSTNEIKTS | 214 |
| | | +Q V+LIK+I PN+K IG++Y E N+VS + A K G+++++ + + +++++ | |
| Sbjct: | 146 | EQHVELIKEILPNVKSIGVVYNPGEANAVSLMELLKLSAAKHGIKLVEATALKSADVQSA | 205 |
| Query: | 215 | MSVMTKKVDAVFVPQDNTIASAFRTVIVAANQANIPVYSSVDTMVEQGSIASVAQSQYGL | 274 |
| | | + +K D ++ DNT+ASA +IVAANQA PV+ + + VE+G+IAS+ Y + | |
| Sbjct: | 206 | TQAIAEKSDVIYALIDNTVASAIEGMIVAANQAKTPVFGAATSYVERGAIASLGFDYYQI | 265 |
| Query: | 275 | GLETAKQAIKVLRGKPVKDVPVKVIDTGKPSLNLKAAKHLGIKIPKKIMKQAEIT | 329 |
| | | G++TA +L GK + V+V +N AA+ LGI IP+ ++ +A T | |
| Sbjct: | 266 | GVQTADYVAAILEGKEPGSLDVQVAKGSDLVINKTAAEQLGITIPEAVLARATST | 320 |

[5025] A related DNA sequence was identified in S. pyogenes <SEQ ID 2711> which encodes the amino acid sequence <SEQ ID 2712>. Analysis of this protein sequence reveals the following:

| Possible site: 23 | | | |
|---|---|---|---|
| >>> Seems to have an uncleavable N-term signal seq | | | |
| INTEGRAL | Likelihood = −11.25 | Transmembrane | 6-22 (1-27) |

----- Final Results -----
bacterial membrane --- Certainty = 0.5501 (Affirmative) < succ>
bacterial outside --- Certainty = 0.0000 (Not Clear) < succ>
bacterial cytoplasm --- Certainty = 0.0000 (Not Clear) < succ>

[5026] The protein has homology with the following sequences in the databases:

| >GP: AAF94260 GB: AE004191 conserved hypothetical protein [Vibrio cholerae] | | | |
|---|---|---|---|
| Identities = 103/304 (33%), Positives = 178/304 (57%), Gaps = 1/304 (0%) | | | |
| Query: | 17 | VIGSLLSKGVSKENRDLANQQNITIGILQFVTHEALDDIKRGIEDQLK-KQMPQKQNVVI | 75 |
| | | VI + + G + + + + + Q V H ALD ++G+ D LK K + +N+ | |
| Sbjct: | 6 | VIATAVLAGAALLSSQSIMAKTAKVAVSQIVEHPALDATRQGLLDGLKAKGYEEGKNLEF | 65 |
| Query: | 76 | KVMNAEGDQSKIQTMSRQLVQSGSDIVIGIATPAAQGLAATSKDIPVVMSAVSDPVGSRL | 135 |
| | | A+G+ + ++RQ V D+++GIATP AQ L + +K IP+V +AV+DPVG++L | |
| Sbjct: | 66 | DYKTAQGNPAIAVQIARQFVGENPDVLVGIATPTAQALVSATKTIPIVFTAVTDPVGAKL | 125 |
| Query: | 136 | VMQLDQPEANVTGLSNKVPVKQTIDLMKKLTPHVKTVGILYASNEDNSLSQVKEFRRLAR | 195 |
| | | V QL+QP NVTGLS+ PV+Q ++L+K++ P+VK++G++Y E N++S ++ + A | |
| Sbjct: | 126 | VKQLEQPGKNVTGLSDLSPVEQHVELIKEILPNVKSIGVVYNPGEANAVSLMELLKLSAA | 185 |
| Query: | 196 | KKGYQVISYAVPSTNEVPATMSVMLGKVDAVFIPQDNTIASAFSSVMTTSKAAKIPVYTS | 255 |
| | | K G +++ + +V + + K D ++ DNT+ASA ++ + AK PV+ + | |
| Sbjct: | 186 | KHGIKLVEATALKSADVQSATQAIAEKSDVIYALIDNTVASAIEGMIVAANQAKTPVFGA | 245 |
| Query: | 256 | VDRMVEKGGLAAISQNQYDLGVQTANQVLKLIKGKRVVDVPVKVVDIGQPLINKNVAAEL | 315 |
| | | VE+G +A++ + Y +GVQTA+ V +++GK + V+V +INK A +L | |
| Sbjct: | 246 | ATSYVERGAIASLGFDYYQIGVQTADYVAAILEGKEPGSLDVQVAKGSDLVINKTAAEQL | 305 |
| Query: | 316 | GIAI | 319 |
| | | GI I | |
| Sbjct: | 306 | GITI | 309 |

[5027] An alignment of the GAS and GBS proteins is shown below.

| Identities = 181/322 (56%), Positives = 252/322 (78%), Gaps = 1/322 (0%) | | | |
|---|---|---|---|
| Query: | 1 | MKNKGLIATLILLTILVVGELFYNK-SEKRLNLSEKQVVKIGILQYVTHDALDAIEKGVE | 59 |
| | | MKNK LIATL++LT++V+G L S++ +L+ +Q + IGILQ+VTH+ALD I++G+E | |
| Sbjct: | 1 | MKNKSLIATLLVLTVIVIGSLLSKGVSKENRDLANQQNITIGILQFVTHEALDDIKRGIE | 60 |
| Query: | 60 | DGLAQEGYKGKKVKLTVLNAEADQSKIQAMSKQLVNHHNDILIGIATPSAQGLAASTKDT | 119 |
| | | D L ++ + + V + V+NAE DQSKIQ MS+QLV +DI+IGIATP+AQGLAA++KD | |
| Sbjct: | 61 | DQLKKQMPQKQNVVIKVMNAEGDQSKIQTMSRQLVQSGSDIVIGIATPAAQGLAATSKDI | 120 |
| Query: | 120 | PIIMGAVSDPLGAKLVTNMKKPTTNVTGLSNVVPTKQTVQLIKDITPNIKRIGILYASSE | 179 |
| | | P++M AVSDP+G++LV + +P NVTGLSN VP KQT+ L+K +TP++K +GILYAS+E | |
| Sbjct: | 121 | PVVMSAVSDPVGSRLVMQLDQPEANVTGLSNKVPVKQTIDLMKKLTPHVKTVGILYASNE | 180 |
| Query: | 180 | DNSVSQVTEFTKYAQKAGLEVLKYSVPSTNEIKTSMSVMTKKVDAVFVPQDNTIASAFRT | 239 |
| | | DNS+SQV EF + A+K G +V+ Y+VPSTNE+ +MSVM KVDAVF+PQDNTIASAF + | |
| Sbjct: | 181 | DNSLSQVKEFRRLARKKGYQVISYAVPSTNEVPATMSVMLGKVDAVFIPQDNTIASAFSS | 240 |
| Query: | 240 | VIVAANQANIPVYSSVDTMVEQGSIASVAQSQYGLGLETAKQAIKVLRGKPVKDVPVKVI | 299 |
| | | V+ + A IPVY+SVD MVE+G +A+++Q+QY LG++TA Q +K+++GK V DVPVKV+ | |
| Sbjct: | 241 | VMTTSKAAKIPVYTSVDRMVEKGGLAAISQNQYDLGVQTANQVLKLIKGKRVVDVPVKVV | 300 |
| Query: | 300 | DTGKPSLNLKAAKHLGIKIPKK | 321 |
| | | D G+P +N A LGI I K+ | |
| Sbjct: | 301 | DIGQPLINKNVAAELGIAIKKE | 322 |

[5028] SEQ ID 2710 (GBS254) was expressed in E. coli as a His-fusion product. SDS-PAGE analysis of total cell extract is shown in FIG. 43 (lane 4; MW 27 kDa). It was also expressed in E. coli as a GST-fusion product. SDS-PAGE analysis of total cell extract is shown in FIG. 48 (lane 3; MW 59.6 kDa).

[5029] GBS254-GST was purified as shown in FIG. 203, lane 6.

[5030] Based on this analysis, it was predicted that these proteins and their epitopes could be useful antigens for vaccines or diagnostics.

### EXAMPLE 893

[5031] A DNA sequence (GBSx0947) was identified in S. agalactiae <SEQ ID 2713> which encodes the amino acid sequence <SEQ ID 2714>. This protein is predicted to be probable permease of ABC transporter (rbsC). Analysis of this protein sequence reveals the following:

| Possible site: 24 | | | |
|---|---|---|---|
| >>> Seems to have an uncleavable N-term signal seq | | | |
| INTEGRAL | Likelihood = −15.12 | Transmembrane | 127-143 (119-151) |
| INTEGRAL | Likelihood = −8.81 | Transmembrane | 206-222 (200-227) |
| INTEGRAL | Likelihood = −6.48 | Transmembrane | 260-276 (258-282) |
| INTEGRAL | Likelihood = −5.84 | Transmembrane | 234-250 (231-257) |
| INTEGRAL | Likelihood = −4.78 | Transmembrane | 55-71 (54-72) |
| INTEGRAL | Likelihood = −3.61 | Transmembrane | 177-193 (176-194) |
| INTEGRAL | Likelihood = −3.35 | Transmembrane | 84-100 (83-102) |
| INTEGRAL | Likelihood = −1.91 | Transmembrane | 10-26 (10-26) |

----- Final Results -----
bacterial membrane --- Certainty = 0.7050 (Affirmative) < succ>
bacterial outside --- Certainty = 0.0000 (Not Clear) < succ>
bacterial cytoplasm --- Certainty = 0.0000 (Not Clear) < succ>

[5032] The protein has homology with the following sequences in the GENPEPT database.

| >GP: AAG07224 GB: AE004801 probable permease of ABC transporter | | | |
|---|---|---|---|
| [Pseudomonas aeruginosa] | | | |
| Identities = 116/288 (40%), Positives = 185/288 (63%), Gaps = 9/288 (3%) | | | |
| Query: | 2 | IISSVSQGLLWGILGLGIYLTFRILKFPDMTTEGSFPLGGAVCVTLMNQGVNPILATILG | 61 |
| | | + ++ GL++ ++ LG++++FR+L+FPD+T +GSFPLGGAVC TL+ G +P AT+ | |
| Sbjct: | 6 | LFGALEIGLIFSLVALGVFISFRLLRFPDLTVDGSFPLGGAVCATLIALGWDPYSATLAA | 65 |
| Query: | 62 | MLSGMLAGFVTGLLYTKGKIPTILAGILVMTSCHSIMLMVMKRANLGLNEIQTLKDFLPF | 121 |
| | | +G LAG TGLL K KI +LA IL+M + +SI L +M + N+ L TL L | |
| Sbjct: | 66 | TAAGALAGLATGLLNVKLKIMDLLASILMMIALYSINLRIMGKPNVPLIAEPTLFTLLQP | 125 |
| Query: | 122 | SNDLNLLVLGLIAILLVISA---LIYFLYTRLGQAYIATGDNPDMAKSFGIDTDKMEMLG | 178 |
| | | + + L+ + +VI+A L +F T+ G A ATG NP MA++ G++T M +LG | |
| Sbjct: | 126 | EWLSDYVFRPLLLVFIVIAAKLLLDWFFTTQKGLAIRATGSNPRMARAQGVNTGGMILLG | 185 |
| Query: | 179 | LIVSNGLIALSGALVSQQDGYADVSKGIGVIVIGLASIIIGE-VLYSTGLTLFERLIAIV | 237 |
| | | + +SN L+AL+GAL +Q G AD+S GIG IVIGLA++I+GE +L S L L +A++ | |
| Sbjct: | 186 | MAISNALVALAGALFAQTQGGADISMGIGTIVIGLAAVIVGESILPSRRLIL--ATLAVI | 243 |
| Query: | 238 | VGSILYQFLITAVI---ALGFNTNYLKLFSAIVLGICLMVPVLKTKIL | 282 |
| | | +G+I+Y+F I + +G L L +A+++ + L++P++K ++L | |
| Sbjct: | 244 | LGAIVYRFFIALALNSDFIGLQAQDLNLVTAVLVTVALVIPMMKKRLL | 291 |

[5033] A related DNA sequence was identified in S. pyogenes <SEQ ID 2715> which encodes the amino acid sequence <SEQ ID 2716>. Analysis of this protein sequence reveals the following:

| Possible site: 55 | | | |
|---|---|---|---|
| >>> Seems to have an uncleavable N-term signal seq | | | |
| INTEGRAL | Likelihood = −10.46 | Transmembrane | 131-147 (125-156) |
| INTEGRAL | Likelihood = −8.65 | Transmembrane | 210-226 (204-230) |
| INTEGRAL | Likelihood = −8.17 | Transmembrane | 265-281 (261-283) |
| INTEGRAL | Likelihood = −7.22 | Transmembrane | 238-254 (233-261) |
| INTEGRAL | Likelihood = −3.03 | Transmembrane | 89-105 (87-107) |
| INTEGRAL | Likelihood = −2.60 | Transmembrane | 63-79 (62-79) |
| INTEGRAL | Likelihood = −2.23 | Transmembrane | 180-196 (180-198) |
| INTEGRAL | Likelihood = −2.13 | Transmembrane | 14-30 (14-30) |

----- Final Results -----
bacterial membrane --- Certainty = 0.5182 (Affirmative) < succ>
bacterial outside --- Certainty = 0.0000 (Not Clear) < succ>
bacterial cytoplasm --- Certainty = 0.0000 (Not Clear) < succ>

[5034] The protein has homology with the following sequences in the databases:

| >GP: AAG07224 GB: AE004801 probable permease of ABC transporter | | | |
|---|---|---|---|
| [Pseudomonas aeruginosa] | | | |
| Identities = 118/285 (41%), Positives = 186/285 (64%), Gaps = 7/285 (2%) | | | |
| Query: | 6 | IISSVSQGLIWGVLGLGIYLTFRILNFPDMTTEGSFPLGGAVAVTAISLGWNPFLSTLLG | 65 |
| | | + ++ GLI+ ++ LG++++FR+L FPD+T +GSFPLGGAV T I+LGW+P+ +TL | |
| Sbjct: | 6 | LFGALEIGLIFSLVALGVFISFRLLRFPDLTVDGSFPLGGAVCATLIALGWDPYSATLAA | 65 |
| Query: | 66 | MLSGALAGFLTGLLYTKGKNPTLLAGILVMTSCNSIMLMVMGRANLGLHDHKRIQDCLPF | 125 |
| | | +GALAG TGLL K K+ LLA IL+M + SI L +MG+ N+ L + L | |
| Sbjct: | 66 | TAAGALAGLATGLLNVKLKIMDLLASILMMIALYSINLRIMGKPNVPLIAEPTLFTLLQP | 125 |
| Query: | 126 | SIDLNSLLTGLITVVIVIS---VLIYFLYTNLGQAYIATGDNKDMAKSFGINTDWMEVMG | 182 |
| | | + + L+ V IVI+ +L +F T G A ATG N MA++ G+NT M ++G | |
| Sbjct: | 126 | EWLSDYVFRPLLLVFIVIAAKLLLDWFFTTQKGLAIRATGSNPRMARAQGVNTGGMILLG | 185 |
| Query: | 183 | LVVSNSLIALSGALVSQQDGYADVSKGIGVIVIGLASIIVGEVLYSTGLTLLERLIAIVI | 242 |
| | | + +SN+L+AL+GAL +Q G AD+S GIG IVIGLA++IVGE + + +L L A+++ | |
| Sbjct: | 186 | MAISNALVALAGALFAQTQGGADISMGIGTIVIGLAAVIVGESILPSRRLILATL-AVIL | 244 |
| Query: | 243 | GSILYQFLISVVIT---LGFNTSYLKLISALVLALCLMIPVVKER | 284 |
| | | G+I+Y+F I++ + +G L L++A+++ + L+IP++K+R | |
| Sbjct: | 245 | GAIVYRFFIALALNSDFIGLQAQDLNLVTAVLVTVALVIPMMKKR | 289 |

[5035] An alignment of the GAS and GBS proteins is shown below.

| Identities = 227/287 (79%), Positives = 259/287 (90%) | | | |
|---|---|---|---|
| Query: | 1 | MIISSVSQGLLWGILGLGIYLTFRILKFPDMTTEGSFPLGGAVCVTLMNQGVNPILATIL | 60 |
| | | MIISSVSQGL+WG+LGLGIYLTFRIL FPDMTTEGSFPLGGAV VT ++ G NP L+T+L | |
| Sbjct: | 5 | MIISSVSQGLIWGVLGLGIYLTFRILNFPDMTTEGSFPLGGAVAVTAISLGWNPFLSTLL | 64 |
| Query: | 61 | GMLSGMLAGFVTGLLYTKGKIPTILAGILVMTSCHSIMLMVMKRANLGLNEIQTLKDFLP | 120 |
| | | GMLSG LAGF+TGLLYTKGK+PT+LAGILVMTSC+SIMLMVM RANLGL++ + ++D LP | |
| Sbjct: | 65 | GMLSGALAGFLTGLLYTKGKMPTLLAGILVMTSCNSIMLMVMGRANLGLHDHKRIQDCLP | 124 |
| Query: | 121 | FSNDLNLLVLGLIAILLVISALIYFLYTRLGQAYIATGDNPDMAKSFGIDTDKMEMLGLI | 180 |
| | | FS DLN L+ GLI +++VIS LIYFLYT LGQAYIATGDN DMAKSFGI+TD ME++GL+ | |
| Sbjct: | 125 | FSIDLNSLLTGLITVVIVISVLIYFLYTNLGQAYIATGDNKDMAKSFGINTDWMEVMGLV | 184 |
| Query: | 181 | VSNGLIALSGALVSQQDGYADVSKGIGVIVIGLASIIIGEVLYSTGLTLFERLIAIVVGS | 240 |
| | | VSN LIALSGALVSQQDGYADVSKGIGVIVIGLASII+GEVLYSTGLTL ERLIAIV+GS | |
| Sbjct: | 185 | VSNSLIALSGALVSQQDGYADVSKGIGVIVIGLASIIVGEVLYSTGLTLLERLIAIVIGS | 244 |
| Query: | 241 | ILYQFLITAVIALGFNTNYLKLFSAIVLGICLMVPVLKTKILKGVRL | 287 |
| | | ILYQFLI+ VI LGFNT+YLKL SA+VL +CLM+PV+K + KGVRL | |
| Sbjct: | 245 | ILYQFLISVVITLGFNTSYLKLISALVLALCLMIPVVKERFFKGVRL | 291 |

[5036] A related GBS gene <SEQ ID 8681> and protein <SEQ ID 8682> were also identified. Analysis of this protein sequence reveals the following:

| Lipop: Possible site: −1 Crend: 0 | | | |
|---|---|---|---|
| McG: Discrim Score: 4.24 | | | |
| GvH: Signal Score (−7.5): −6.43 | | | |
| Possible site: 24 | | | |
| >>> Seems to have an uncleavable N-term signal seq | | | |
| ALOM program | count: 8 | value: −15.12 | threshold: 0.0 |

| | | | |
|---|---|---|---|
| INTEGRAL | Likelihood = −15.12 | Transmernbrane | 127-143 (119-151) |
| INTEGRAL | Likelihood = −7.54 | Transmembrane | 206-222 (201-225) |
| INTEGRAL | Likelihood = −6.48 | Tranamembrane | 260-276 (258-282) |
| INTEGRAL | Likelihood = −5.84 | Transmembrane | 234-250 (231-257) |
| INTEGRAL | Likelihood = −4.78 | Transmembrane | 55-71 (54-72) |
| INTEGRAL | Likelihood = −3.61 | Transmembrane | 177-193 (176-194) |
| INTEGRAL | Likelihood = −3.35 | Transmembrane | 84-100 (83-102) |
| INTEGRAL | Likelihood = −1.91 | Transmembrame | 10-26 (10-26) |

| | | |
|---|---|---|
| PERIPHERAL | Likelihood = 4.77 | 36 |

modified ALOM score: 3.52
*** Reasoning Step: 3
----- Final Results -----
bacterial membrane --- Certainty = 0.7050 (Affirmative) < succ>
bacterial outside --- Certainty = 0.0000 (Not Clear) < succ>
bacterial cytoplasm --- Certainty = 0.0000 (Not Clear) < succ>

[5037] The protein has homology with the following sequences in the databases:

[chemical structure]

[5038] Based on this analysis, it was predicted that these proteins and their epitopes could be useful antigens for vaccines or diagnostics.

### EXAMPLE 894

[5039] A DNA sequence (GBSx0948) was identified in S. agalactiae <SEQ ID 2717> which encodes the amino acid sequence <SEQ ID 2718>. This protein is predicted to be ABC transporter (potA). Analysis of this protein sequence reveals the following:

Possible Site: 36
>>> Seems to have an uncleavable N-term signal seq
----- Final Results -----
bacterial membrane --- Certainty = 0.0000 (Not Clear) < succ>
bacterial outside --- Certainty = 0.0000 (Not Clear) < succ>
bacterial cytoplasm --- Certainty= 0.0000 (Not Clear) < succ>

[5040] A related GBS nucleic acid sequence <SEQ ID 9887> which encodes amino acid sequence <SEQ ID 9888> was also identified.

[5041] The protein has homology with the following sequences in the GENPEPT database.

| >GP: AAF86640 GB: AF162694 ABC transporter [Enterococcus gallinarum] | | | |
|---|---|---|---|
| Identities = 117/252 (46%), Positives = 167/252 (65%) | | | |
| Query: | 19 | MVMKIIELKEATVQVSNGLAEMKTILDHVNLSIYEHDFITILGGNGAGKSTLFNVIAGTL | 78 |
| | | M ++ + + G +L ++L++ DFITI+GGNGAGKSTL N IAGT+ | |
| Sbjct: | 1 | MTTPVLTISDLHQTFEKGTINENHVLRGIDLTMNSGDFITIIGGNGAGKSTLLNSIAGTI | 60 |
| Query: | 79 | MLSSGNIYIMGQDVTNLSAEKRAKYLSRVFQDPKMGTAPRMTVAENLLVAKFRGEKRPLV | 138 |
| | | G I + +++T S +R+K +SRVFQDP+MGTA R+TV ENL +A RG+ R | |
| Sbjct: | 61 | PTEQGKIVLGDKEITRHSVTRRSKEISRVFQDPRMGTAVRLTVEENLALAYKRGQVRGFS | 120 |
| Query: | 139 | PRKIINYTEEFQKLIARTGNGLDRHLETPTGLLSGGQRQALSLLMATLKKPNLLLLDEHT | 198 |
| | | + F++ +AR GL+ L T GLLSGGQRQA++LLMATL++P L+LLDEHT | |
| Sbjct: | 121 | SGVKGKHRAFFKEKLARLNLGLENRLTTEIGLLSGGQRQAITLLMATLQQPKLILLDEHT | 180 |
| Query: | 199 | AALDPRTSVSLMGLTDEFIKQDSLTALMITHHMEDALKYGNRVLVMKDGKIVRDLNQAQR | 258 |
| | | AALDP+TS+++M LTD+ I++ LTA M+TH MEDA++YGNR++++ GKIV D+ +K | |
| Sbjct: | 181 | AALDPKTSMTVMALTDQLIQEQQLTAFMVTHDMEDAIRYGNRLIMLHQGKIVVDITGEEK | 240 |
| Query: | 259 | NKMAIADYYQLF | 270 |
| | | + + D LF | |
| Sbjct: | 241 | QSLTVPDLMALF | 252 |

[5042] A related DNA sequence was identified in S. pyogenes <SEQ ID 2719> which encodes the amino acid sequence <SEQ ID 2720>. Analysis of this protein sequence reveals the following:

Possible site: 58
>>> Seems to have no N-terminal signal sequence
----- Final Results -----
bacterial cytoplasm --- Certainty = 0.2249 (Affirmative) < succ>
bacterial membrane --- Certainty = 0.0000 (Not Clear) < succ>
bacterial outside --- Certainty = 0.0000 (Not Clear) < succ>

[5043] An alignment of the GAS and GBS proteins is shown below.

| Identities = 186/250 (74%), Positives = 210/250 (83%) | | | |
|---|---|---|---|
| Query: | 22 | KIIELKEATVQVSNGLAEMKTILDHVNLSIYEHDFITILGGNGAGKSTLFNVIAGTLMLS | 81 |
| | | KIIEL ATV V NG + KTILD+V L+IYEHDF+TILGGNGAGKSTLFNVIAGTL L+ | |
| Sbjct: | 3 | KIIELINATVDVDNGFEDAKTILDNVTLTIYEHDFLTILGGNGAGKSTLFNVIAGTLSLT | 62 |
| Query: | 82 | SGNIYIMGQDVTNLSAEKRAKYLSRVFQDPKMGTAPRMTVAENLLVAKFRGEKRPLVPRK | 141 |
| | | G I I+GQDVT+ AEKRA YLSRVFQD KMGTAPRMTVAENLL+A+ RG KR L RK | |
| Sbjct: | 63 | RGQIRILGQDVTHWPAEKRALYLSRVFQDSKMGTAPRMTVAENLLIARQRGGKRSLASRK | 122 |
| Query: | 142 | IINYTEEFQKLIARTGNGLDRHLETPTGLLSGGQRQALSLLMATLKKPNLLLLDEHTAAL | 201 |
| | | I + F+ L+ RTGNGL++HLETP GLLSGGQRQALSLLMATLKKP LLLLDEHTAAL | |
| Sbjct: | 123 | ITEHLASFEDLVKRTGNGLEKHLETPAGLLSGGQRQALSLLMATLKKPALLLLDEHTAAL | 182 |
| Query: | 202 | DPRTSVSLMGLTDEFIKQDSLTALMITHHMEDALKYGNRVLVMKDGKIVRDLNQAQKNKM | 261 |
| | | DP+TS SLM LTDEF+ +D LTALMITHHMEDAL YGNR++VMKDG I++DLNQ +K ++ | |
| Sbjct: | 183 | DPKTSQSLMQLTDEFVTKDGLTALMITHHMEDALTYGNRLIVMKDGNIIKDLNQMEKEQL | 242 |
| Query: | 262 | AIADYYQLFD | 271 |
| | | I DYYQLFD | |
| Sbjct: | 243 | TITDYYQLFD | 252 |

[5044] Based on this analysis, it was predicted that these proteins and their epitopes could be useful antigens for vaccines or diagnostics.

### EXAMPLE 895

[5045] A DNA sequence (GBSx0949) was identified in S. agalactiae <SEQ ID 2721> which encodes the amino acid sequence <SEQ ID 2722>. Analysis of this protein sequence reveals the following:

Possible site: 33
>>> Seems to have no N-terminal signal sequence
----- Final Results -----
bacterial cytoplasm --- Certainty = 0.1930 (Affirmative) < succ>
bacterial membrane --- Certainty = 0.0000 (Not Clear) < succ>
bacterial outside --- Certainty = 0.0000 (Not Clear) < succ>
RGD motif: 415-417

[5046] The protein has homology with the following sequences in the GENPEPT database.

| >GP: BAB06117 GB: AP001515 unknown conserved protein [Bacillus halodurans] | | | |
|---|---|---|---|
| Identities = 236/549 (42%), Positives = 362/549 (64%), Gaps = 2/549 (0%) | | | |
| Query: | 4 | IKIMALGGVRENGKNLYVVEVNDSIFVLDAGLKYPENEQLGVDVVIPNLDYLIENKKRVQ | 63 |
| | | I++ ALGGV E GKN+YVVEV+D +FV+DAGL +P++E LGVDVVIP++ YL+EN++RV+ | |
| Sbjct: | 9 | IRVFALGGVGEIGKNMYVVEVDDDLFVIDAGLMFPDDEMLGVDVVIPDISYLVENEERVR | 68 |
| Query: | 64 | GIFLTHGHADAIGALPYIIAEVKAPVFGSPLTIELAKLFVKNSTAVKKFNNFHVIDSETE | 123 |
| | | I LTHGH D IG LPY++ ++ PV+G+ LT+ L + +K + ++ +IDS + | |
| Sbjct: | 69 | AILLTHGHEDHIGGLPYVLQKLNVPVYGTKLTLGLVEEKLKEAGLIRSAK-LKLIDSNSR | 127 |
| Query: | 124 | IEFQDAVISFFKTTHSIPESMGIVIGTKEGNIVYTGDFKFDQAARKYYQTDLARLAEIGR | 183 |
| | | ++ +SFF+T HSIP+S+GI I T +G IV+TGDFKFDQ Q ++ ++A IG | |
| Sbjct: | 128 | LKLGSTPVSFFRTNHSIPDSVGICIQTSQGFIVHTGDFKFDQTPVDGKQAEIGKMAAIGH | 187 |
| Query: | 184 | DGVLALLSDSANATSNEQVASEYEVGDEIKSVIEDAEGRVIVAAVASNLIRIQQVFDAAA | 243 |
| | | GVL LLSDS NA SE EVG I E +GR+IV ASN+ R+QQV AA | |
| Sbjct: | 188 | KGVLCLLSDSTNAERPGMTKSETEVGRGIAEAFEQTKGRIIVTTFASNVHRVQQVIHAAI | 247 |
| Query: | 244 | ENGRRVVLTGFDIENIVRTAIRMKRIHIADENMIIKPKDMTRYEDNELLILETGRMGEPI | 303 |
| | | R++ + G + +V A R+ + D+ + I +++++Y+D + I+ TG GEP+ | |
| Sbjct: | 248 | ATNRKLAVAGRSMVKVVSIAERLGYLEAPDD-LFIDIEEVSKYDDERVAIITTGSQGEPM | 306 |
| Query: | 304 | NGLQKMAIGRHRYVQIKDGDLVFIVTTPSIAKEAVVARVENLIYKAGGSVKLITQNLRVS | 363 |
| | | + L +MA G HR + I + D V I TP E V+ + +L+++ G V + S | |
| Sbjct: | 307 | SALSRMAKGAHRQITITENDTVIIAATPIPGNERSVSTIVDLLHRIGADVIFGHGKVHAS | 366 |
| Query: | 364 | GHANGRELQLLMNLLKPKYLFPIQGEYRDLSAHAGLAQEVGMSADDIYIVKRGDIMVLEK | 423 |
| | | GH + EL+L++NL++PK+ PI GE+R AH LA+ VG+ + I++V +G+++ | |
| Sbjct: | 367 | GNGSAEELKLMLNLMRPKFFVPIHGEFRMQHAHKELAKSVGIREEAIFLVDKGEVVEFRN | 426 |
| Query: | 424 | DGFFHSGSVPAGDVMIDGNAIGDVGNIVLRDRKVLSEDGIFIVVITVSKKEKKIISKARV | 483 |
| | | +G VP+G+V+IDG +GDVGNIVLRDR++LS+DGI +VV+T++K+ I+S + | |
| Sbjct: | 427 | GQGRKAGKVPSGNVLIDGLGVGDVGNIVLRDRRLLSKDGILVVVVTLNKQSGTILSGPNI | 486 |
| Query: | 484 | NTRGFVYVKKSRDILRESAELVNTTVEDYLSKDTFDWGELKGKVRDEVSKFLFDQTKRRP | 543 |
| | | +RGFVYV++S ++ E+ ELV T++ ++++ +W LK VR+ +S+FLF++TKRRP | |
| Sbjct: | 487 | ISRGFVYVRESEKLIEEANELVTETLKKCVTENVNEWSSLKSNVREVLSRFLFEKTKRRP | 546 |
| Query: | 544 | AILPVVMEV | 552 |
| | | ILP++MEV | |
| Sbjct: | 547 | MILPIIMEV | 555 |

[5047] A related DNA sequence was identified in S. pyogenes <SEQ ID 2723> which encodes the amino acid sequence <SEQ ID 2724>. Analysis of this protein sequence reveals the following:

Possible site: 33
>>> Seems to have no N-terminal signal sequence
----- Final Results -----
bacterial cytoplasm --- Certainty = 0.2204 (Affirmative) < succ>
bacterial membrane --- Certainty = 0.0000 (Not Clear) < succ>
bacterial outside --- Certainty = 0.0000 (Not Clear) < succ>

[5048] The protein has homology with the following sequences in the databases:

| >GP: BAB06117 GB: AP001515 unknown conserved protein [Bacillus halodurans] | | | |
|---|---|---|---|
| Identities = 232/549 (42%), Positives = 360/549 (65%), Gaps = 2/549 (0%) | | | |
| Query: | 4 | IKMIALGGVREYGKNFYLVEINDSMFILDAGLKYPENEQLGVDLVIPNLDYVIENKGKVQ | 63 |
| | | I++ ALGGV E GKN Y+VE++D +F++DAGL +P++E LGVD+VIP++ Y++EN+ +V+ | |
| Sbjct: | 9 | IRVFALGGVGEIGKNMYVVEVDDDLFVIDAGLMFPDDEMLGVDVVIPDISYLVENEERVR | 68 |
| Query: | 64 | GIFLSHGHADAIGALPYLLAEVSAPVFGSELTIELAKLFVKSNNSTKKFNNFHVVDSDTE | 123 |
| | | I L+HGH D IG LPY+L +++ PV+G++LT+ L + +K + ++DS++ | |
| Sbjct: | 69 | AILLTHGHEDHIGGLPYVLQKLNVPVYGTKLTLGLVEEKLKEAGLIRSAK-LKLIDSNSR | 127 |
| Query: | 124 | IEFKDGLVSFFRTTHSIPESMGIVIGTDKGNIIYTGDFKFDQAAREGYQTDLLRLAEIGK | 183 |
| | | ++ VSFFRT HSIP+S+GI I T +G I++TGDFKFDQ +G Q ++ ++A IG | |
| Sbjct: | 128 | LKLGSTPVSFFRTNHSIPDSVGICIQTSQGFIVHTGDFKFDQTPVDGKQAEIGKMAAIGH | 187 |
| Query: | 184 | EGVLALLSDSVNATSNDQIASESEVGEEMDSVISDADGRVIVAAVASNLVRIQQVFDSAT | 243 |
| | | +GVL LLSDS NA SE+EVG + GR+IV ASN+ R+QQV +A | |
| Sbjct: | 188 | KGVLCLLSDSTNAERPGMTKSETEVGRGIAEAFEQTKGRIIVTTFASNVHRVQQVIHAAI | 247 |
| Query: | 244 | AHGRRVVLTGTDAENIVRTALRLEKLMITDERLLIKPKDMSKFEDHELIILEAGRMGEPI | 303 |
| | | A R++ + G +V A RL L D+ L I +++SK++D + I+ G GEP+ | |
| Sbjct: | 248 | ATNRKLAVAGRSMVKVVSIAERLGYLEAPDD-LFIDIEEVSKYDDERVAIITTGSQGEPM | 306 |
| Query: | 304 | NSLQKMAAGRHRYVQIKEGDLVYIVTTPSTAKEAMVARVENLIYKAGGSVKLITQNLRVS | 363 |
| | | ++L +MA G HR + I E D V I TP E V+ + +L+++ G V + S | |
| Sbjct: | 307 | SALSRMAKGAHRQITITENDTVIIAATPIPGNERSVSTIVDLLHRIGADVIFGHGKVHAS | 366 |
| Query: | 364 | GHANGRDLQLLMNLLKPQYLFPVQGEYRDLAAHAKLAEEVGIFPENIHILKRGDIMVLND | 423 |
| | | GH + +L+L++NL++P++ P+ GE+R AH +LA+ VGI E I ++ +G+++ + | |
| Sbjct: | 367 | GHGSAEELKLMLNLMRPKFFVPIHGEFRMQHAHKELAKSVGIREEAIFLVDKGEVVEFRN | 426 |
| Query: | 424 | EGFLHEGGVPASDVMIDGNAIGDVGNIVLRDRKVLSEDGIFIVAITVSKKEKRIISKAKV | 483 |
| | | G VP+ +V+IDG +GDVGNIVLRDR++LS+DGI +V +T++K+ I+S + | |
| Sbjct: | 427 | GQGRKAGKVPSGNVLIDGLGVGDVGNIVLRDRRLLSKDGILVVVVTLNKQSGTILSGPNI | 486 |
| Query: | 484 | NTRGFVYVKKSHDILRESAELVNTTVGNYLKKDTFDWGELKGNVRDDLSKFLFEQTKRRP | 543 |
| | | +RGFVYV++S ++ E+ ELV T+ + ++ +W LK NVR+ LS+FLFE+TKRRP | |
| Sbjct: | 487 | ISRGFVYVRESEKLIEEANELVTETLKKCVTENVNEWSSLKSNVREVLSRFLFEKTKRRP | 546 |
| Query: | 544 | AILPVVMEV | 552 |
| | | ILP++MEV | |
| Sbjct: | 547 | MILPIIMEV | 555 |

[5049] An alignment of the GAS and GBS proteins is shown below.

| Identities = 446/553 (80%), Positives = 513/553 (92%) | | | |
|---|---|---|---|
| Query: | 1 | MSDIKIMALGGVRENGKNLYVVEVNDSIFVLDAGLKYPENEQLGVDVVIPNLDYLIENKK | 60 |
| | | M+DIK++ALGGVRE GKN Y+VE+NDS+F+LDAGLKYPENEQLGVD+VIPNLDY+IENK | |
| Sbjct: | 1 | MTDIKMIALGGVREYGKNFYLVEINDSMFILDAGLKYPENEQLGVDLVIPNLDYVIENKG | 60 |
| Query: | 61 | RVQGIFLTHGHADAIGALPYIIAEVKAPVFGSPLTIELAKLFVKNSTAVKKFNNFHVIDS | 120 |
| | | +VQGIFL+HGHADAIGALPY++AEV APVFGS LTIELAKLFVK++ + KKFNNFHV+DS | |
| Sbjct: | 61 | KVQGIFLSHGHADAIGALPYLLAEVSAPVFGSELTIELAKLFVKSNNSTKKFNNFHVVDS | 120 |
| Query: | 121 | ETEIEFQDAVISFFKTTHSIPESMGIVIGTKEGNIVYTGDFKFDQAARKYYQTDLARLAE | 180 |
| | | +TEIEF+D ++SFF+TTHSIPESMGIVIGT +GNI+YTGDFKFDQAAR+ YQTDL RLAE | |
| Sbjct: | 121 | DTEIEFKDGLVSFFRTTHSIPESMGIVIGTDKGNIIYTGDFKFDQAAREGYQTDLLRLAE | 180 |
| Query: | 181 | IGRDGVLALLSDSANATSNEQVASEYEVGDEIKSVIEDAEGRVIVAAVASNLIRIQQVFD | 240 |
| | | IG++GVLALLSDS NATSN+Q+ASE EVG+E+ SVI DA+GRVIVAAVASNL+RIQQVFD | |
| Sbjct: | 181 | IGKEGVLALLSDSVNATSNDQIASESEVGEEMDSVISDADGRVIVAAVASNLVRIQQVFD | 240 |
| Query: | 241 | AAAENGRRVVLTGFDIENIVRTAIRMKRIHIADENMIIKPKDMTRYEDNELLILETGRMG | 300 |
| | | +A +GRRVVLTG D ENIVRTA+R++++ I DE ++IKPKDM+++ED+EL+ILE GRMG | |
| Sbjct: | 241 | SATAHGRRVVLTGTDAENIVRTALRLEKLMITDERLLIKPKDMSKFEDHELIILEAGRMG | 300 |
| Query: | 301 | EPINGLQKMAIGRHRYVQIKDGDLVFIVTTPSIAKEAVVARVENLIYKAGGSVKLITQNL | 360 |
| | | EPIN LQKMA GRHRYVQIK+GDLV+IVTTPS AKEA+VARVENLIYKAGGSVKLITQNL | |
| Sbjct: | 301 | EPINSLQKMAAGRHRYVQIKEGDLVYIVTTPSTAKEAMVARVENLIYKAGGSVKLITQNL | 360 |
| Query: | 361 | RVSGHANGRELQLLMNLLKPKYLFPIQGEYRDLSAHAGLAQEVGMSADDIYIVKRGDIMV | 420 |
| | | RVSGHANGR+LQLLMNLLKP+YLFP+QGEYRDL+AHA LA+EVG+ ++I+I+KRGDIMV | |
| Sbjct: | 361 | RVSGHANGRDLQLLMNLLKPQYLFPVQGEYRDLAAHAKLAEEVGIFPENIHILKRGDIMV | 420 |
| Query: | 421 | LEKDGFFHSGSVPAGDVMIDGNAIGDVGNIVLRDRKVLSEDGIFIVVITVSKKEKKIISK | 480 |
| | | L +GF H G VPA DVMIDGNAIGDVGNIVLRDRKVLSEDGIFIV ITVSKKEK+IISK | |
| Sbjct: | 421 | LNDEGFLHEGGVPASDVMIDGNAIGDVGNIVLRDRKVLSEDGIFIVAITVSKKEKRIISK | 480 |
| Query: | 481 | ARVNTRGFVYVKKSRDILRESAELVNTTVEDYLSKDTFDWGELKGKVRDEVSKFLFDQTK | 540 |
| | | A+VNTRGFVYVKKS DILRESAELVNTTV +YL KDTFDWGELKG VRD++SKFLF+QTK | |
| Sbjct: | 481 | AKVNTRGFVYVKKSHDILRESAELVNTTVGNYLKKDTFDWGELKGNVRDDLSKFLFEQTK | 540 |
| Query: | 541 | RRPAILPVVMEVR | 553 |
| | | RRPAILPVVMEVR | |
| Sbjct: | 541 | RRPAILPVVMEVR | 553 |

[5050] There is also homology to SEQ ID 4910.

[5051] SEQ ID 2722 (GBS295) was expressed in E. coli as a GST-fusion product. SDS-PAGE analysis of total cell extract is shown in FIG. 48 (lane 2; MW 89.4 kDa). It was also expressed in E. coli as a His-fusion product. SDS-PAGE analysis of total cell extract is shown in FIG. 167 (lane 9 & 11; MW 79 kDa—thioredoxin fusion) and in FIG. 238 (lane 3; MW 79 kDa—thioredoxin fusion).

[5052] Purified Thio-GBS295-His is shown in FIG. 244, lane 3.

[5053] Based on this analysis, it was predicted that these proteins and their epitopes could be useful antigens for vaccines or diagnostics.

### EXAMPLE 896

[5054] A DNA sequence (GBSx0950) was identified in S. agalactiae <SEQ ID 2725> which encodes the amino acid sequence <SEQ ID 2726>. This protein is predicted to be tributyrin esterase. Analysis of this protein sequence reveals the following:

Possible site: 22
>>> Seems to have a cleavable N-term signal seq.
----- Final Results -----
bacterial outside --- Certainty = 0.3000 (Affirmative) < succ>
bacterial membrane --- Certainty = 0.0000 (Not Clear) < succ>
bacterial cytoplasm --- Certainty = 0.0000 (Not Clear) < succ>

[5055] A related GBS nucleic acid sequence <SEQ ID 9885> which encodes amino acid sequence <SEQ ID 9886> was also identified.

[5056] The protein has homology with the following sequences in the GENPEPT database.

| >GP: AAF62859 GB: AF157484 tributyrin esterase [Lactococcus lactis | | | |
|---|---|---|---|
| subsp. lactis] | | | |
| Identities = 154/262 (58%), Positives = 188/262 (70%), Gaps = 4/262 (1%) | | | |
| Query: | 21 | MAFFNIEYHSKVLGTERQVNVIYPDAFEMSDDKIDDCDIPVLYLLHGMGGNENSWQKRTN | 80 |
| | | MA NIEY+S+VLG R+VNVIYP++ ++ D DIPVLYLLHGM GNENSW R+ | |
| Sbjct: | 1 | MAVINIEYYSEVLGMNRKVNVIYPESSKVED--FTQTDIPVLYLLHGMSGNENSWIIRSG | 58 |
| Query: | 81 | IERLLRHTNLIVVMPSTDLAWYTNTKYGLDYFDAIAIELPKVLKRFFPNMSDKREKNFIA | 140 |
| | | IERL+RHTNL +VMPSTDL+Y NT YG++YFDAIA ELPKV+ FFPN+S KREKNFIA | |
| Sbjct: | 59 | IERLIRHTNLAIVMPSTDLGFYVNTTYGMNYFDAIAHELPKVINNFFPNLSTKREKNFIA | 118 |
| Query: | 141 | GLSMGGYGAYKIALLTNRFSHAASLSGALSFDFDLLFNNGNNNINYWSGIFGDLNNTDNI | 200 |
| | | GLSMGGYGAY++AL T+ FS+AASLSG L+FD + N N YW GIFG+ | |
| Sbjct: | 119 | GLSMGGYGAYRLALGTDYFSYAASLSGVLTFDG--MEENFKENPAYWGGIFGNWETFKGS | 176 |
| Query: | 201 | ERHSLRRYVESFDMKTKFYAWCGYEDFLFEANEVAIDELRQLGLTIDYFNDHGKHEWYYW | 260 |
| | | + L + K K YAWCG +DFLF NE A EL++LG I Y + G HEWYYW | |
| Sbjct: | 177 | DNEILSLADRKQENKPKLYAWCGKQDFLFPGNEYATAELKKLGFDITYESSDGVHEWYYW | 236 |
| Query: | 261 | NQQLEKVLEWLPVDYVKEERLS | 282 |
| | | Q++E VL+WLP++Y +EERLS | |
| Sbjct: | 237 | TQKIESVLKWLPINYKQEERLS | 258 |

[5057] A related DNA sequence was identified in S. pyogenes <SEQ ID 2727> which encodes the amino acid sequence <SEQ ID 2728>. Analysis of this protein sequence reveals the following:

Possible site: 14
>>> Seems to have no N-terminal signal sequence
----- Final Results -----
bacterial cytoplasm --- Certainty = 0.2183 (Affirmative) < succ>
bacterial membrane --- Certainty = 0.0000 (Not Clear) < succ>
bacterial outside --- Certainty = 0.0000 (Not Clear) < succ>

[5058] An alignment of the GAS and GBS proteins is shown below.

| Identities = 172/262 (65%), Positives = 199/262 (75%), Gaps = 1/262 (0%) | | | |
|---|---|---|---|
| Query: | 21 | MAFFNIEYHSKVLGTERQVNVIYPDAFEMSDDKIDDCDIPVLYLLHGMGGNENSWQKRTN | 80 |
| | | MA IEYHS VLG ER+VNVIYPD E+ D DIPVLYLLHGMGGNENSWQKRT | |
| Sbjct: | 1 | MASIAIEYHSVVLGMERKVNVIYPDQSEIPKKDQGDKDIPVLYLLHGMGGNENSWQKRTA | 60 |
| Query: | 81 | IERLLRHTNLIVVMPSTDLAWYTNTKYGLDYFDAIAIELPKVLKRFFPNMSDKREKNFIA | 140 |
| | | IERLLRHTNLIVVMPSTDL WYT+T YGL+Y+ A++ ELP+VL FFPNM+ KREK F+A | |
| Sbjct: | 61 | IERLLRHTNLIVVMPSTDLGWYTDTAYGLNYYRALSQELPQVLAAFFPNMTQKREKTFVA | 120 |
| Query: | 141 | GLSMGGYGAYKIALLTNRFSHAASLSGALSFDFDLLFNNGNNNINYWSGIFGDLNNTDNI | 200 |
| | | GLSMGGYGA+K AL +NRFS+AAS SGAL F + L + YW G+FG ++ D + | |
| Sbjct: | 121 | GLSMGGYGAFKWALKSNRFSYAASFSGALDFSPETLLEGKLGELAYWQGVFGQFDDPD-L | 179 |
| Query: | 201 | ERHSLRRYVESFDMKTKFYAWCGYEDFLFEANEVAIDELRQLGLTIDYFNDHGKHEWYYW | 260 |
| | | ++H L+ V D KTKFYAWCGYEDFLF NE AI + + GL IDY HGKHEWYYW | |
| Sbjct: | 180 | DKHYLKNMVAESDGKTKFYAWCGYEDFLFATNEKAIADFQAQGLDIDYHKGHGKHEWYYW | 239 |
| Query: | 261 | NQQLEKVLEWLPVDYVKEERLS | 282 |
| | | NQQLE +LEWLP++Y KEERLS | |
| Sbjct: | 240 | NQQLEVLLEWLPINYQKEERLS | 261 |

[5059] SEQ ID 2726 (GBS645) was expressed in E. coli as a GST-fusion product. SDS-PAGE analysis of total cell extract is shown in FIG. 129 (lanes 8 & 10; MW 60 kDa+lane 9; MW 27 kDa) and in FIG. 186 (lane 4; MW 60 kDa). It was also expressed in E. coli as a His-fusion product. SDS-PAGE analysis of total cell extract is shown in FIG. 129 (lane 12; MW 34.7 kDa), in FIG. 140 (lane 8; MW 35 kDa) and in FIG. 178 (lane 4; MW 35 kDa). Purified GBS645-GST is shown in FIG. 236, lane 11; purified GBS645-His is shown in FIG. 229, lanes 34.

[5060] Based on this analysis, it was predicted that these proteins and their epitopes could be useful antigens for vaccines or diagnostics.

### EXAMPLE 897

[5061] A DNA sequence (GBSx0951) was identified in S. agalactiae <SEQ ID 2729> which encodes the amino acid sequence <SEQ ID 2730>. Analysis of this protein sequence reveals the following:

| Possible site: 44 | | | |
|---|---|---|---|
| >>> Seems to have no N-terminal signal sequence | | | |
| INTEGRAL | Likelihood = −9.34 | Transmembrane | 22-38 (18-46) |

----- Final Results -----
bacterial membrane --- Certainty = 0.4736 (Affirmative) < succ>
bacterial outside --- Certainty = 0.0000 (Not Clear) < succ>
bacterial cytoplasm --- Certainty = 0.0000 (Not Clear) < succ>

[5062] The protein has no-significant homology with any sequences in the GENPEPT database.

[5063] A related DNA sequence was identified in S. pyogenes <SEQ ID 2731> which encodes the amino acid sequence <SEQ ID 2732>. Analysis of this protein sequence reveals the following:

| Possible site: 52 | | | |
|---|---|---|---|
| >>> Seems to have an uncleavable N-term signal seq | | | |
| INTEGRAL | Likelihood = −7.43 | Transmembrane | 25-41 (20-46) |
| INTEGRAL | Likelihood = −2.71 | Transmembrane | 4-20 (3-20) |

----- Final Results -----
bacterial membrane --- Certainty = 0.3972 (Affirmative) < succ>
bacterial outside --- Certainty = 0.0000 (Not Clear) < succ>
bacterial cytoplasm --- Certainty = 0.0000 (Not Clear) < succ>

[5064] The protein has no significant homology with any sequences in the GENPEPT database.

[5065] An alignment of the GAS and GBS proteins is shown below.

| Identities = 31/87 (35%), positives = 50/87 (56%), Gaps = 2/87 (2%) | | | |
|---|---|---|---|
| Query: | 1 | MRTLFRMIFAIPKFIFRLIWNIIWGIFKTVLVIAIILFGLYYYANHSQSEFANQLSDIIQ | 60 |
| | | M+ L +I +PK I ++ W++I G +T+L++ II+ GL YY+NHS S AN++S I | |
| Sbjct: | 1 | MKQLLAIILWLPKLIVKMFWHLIKGFLQTILLVTIIIIGLMYYSNHSDSVLANKIS--IV | 58 |
| Query: | 61 | TGKTFLNFADTNQLKNSFTNLATDNVH | 87 |
| | | T + F Q ++ T + N H | |
| Sbjct: | 59 | TEQVVQIFDILTQKPSAKTRHGSGNSH | 85 |

[5066] SEQ ID 2730 (GBS220d) was expressed in E. coli as a GST-fusion product. SDS-PAGE analysis of total cell extract is shown in FIG. 155 (lane 11-13; MW 50 kDa) and in FIG. 239 (lane 12; MW 50 kDa). It was also expressed in E. coli as a His-fusion product. SDS-PAGE analysis of total cell extract is shown in FIG. 155 (lane 14-16; MW 25.2 kDa) and in FIG. 184 (lane 7; MW 25 kDa). Purified GBS220d-GST is shown in FIG. 246, lanes 3 & 4.

[5067] Based on this analysis, it was predicted that these proteins and their epitopes could be useful antigens for vaccines or diagnostics.

### EXAMPLE 898

[5068] A DNA sequence (GBSx0953) was identified in S. agalactiae <SEQ ID 2733> which encodes the amino acid sequence <SEQ ID 2734>. This protein is predicted to be unnamed protein product (rpiA). Analysis of this protein sequence reveals the following:

Possible site: 33
>>> Seems to have no N-terminal signal sequence
----- Final Results -----
bacterial cytoplasm --- Certainty = 0.2538 (Affirmative) < succ>
bacterial membrane --- Certainty = 0.0000 (Not Clear) < succ>
bacterial outside --- Certainty = 0.0000 (Not Clear) < succ>

[5069] The protein has homology with the following sequences in the GENPEPT database.

| >GP: CAB69583 GB: A93589 unnamed protein product [Spinacia oleracea] | | | |
|---|---|---|---|
| Identities = 114/232 (49%), Positives = 147/232 (63%), Gaps = 11/232 (4%) | | | |
| Query: | 2 | DELKKLAGVTAAKYVKNGMIVGLGTGSTAYFFVEEIGRRVKEEGL-QVVGVTTSNRTTEQ | 60 |
| | | D+LKKLA A VK+GM++GLGTGSTA F V IG + L +VG+ TS RT EQ | |
| Sbjct: | 59 | DDLKKLAAEKAVDSVKSGMVLGLGTGSTAAFAVSRIGELLSAGKLTNIVGIPTSKRTAEQ | 118 |
| Query: | 61 | ARGLGIPLKSADDIDVIDVTVDGADEVDPDFNGIKGGGGALLMEKIVATPTKEYIWVVDE | 120 |
| | | A LGIPL DD ID+ +DGADEVDPD N +KG GGALL EK+V + ++I VVD+ | |
| Sbjct: | 119 | AASLGIPLSVLDDHPRIDLAIDGADEVDPDLNLVKGRGGALLREKMVEAASDKFIVVVDD | 178 |
| Query: | 121 | SKLVETLGAFKL--PVEVV----RYGSERLFRVFKSKGYCPSFRETEGDR--FITDMGNY | 172 |
| | | +KLV+ LG +L PVEVV +Y +RL +FK G C + EGD ++TD NY | |
| Sbjct: | 179 | TKLVDGLGGSRLAMPVEVVQFCWKYNLKRLQEIFKELG-CEAKLRMEGDSSPYVTDNSNY | 237 |
| Query: | 173 | IIDLDL-KKIEDPKQLANELDHTVGVVEHGLFNGMVNKVIVAGKNGLDILEK | 223 |
| | | I+DL I+D + E+ GVVEHGLF GM ++VI+AGK G+ + K | |
| Sbjct: | 238 | IVDLYFPTSIKDAEAAGREISALEGVVEHGLFLGMASEVIIAGKTGVSVKTK | 289 |

[5070] A related DNA sequence was identified in S. pyogenes <SEQ ID 2735> which encodes the amino acid sequence <SEQ ID 2736>. Analysis of this protein sequence reveals the following:

Possible site: 30
>>> Seems to have no N-terminal signal sequence
----- Final Results -----
bacterial cytoplasm --- Certainty = 0.1646 (Affirmative) < succ>
bacterial membrane --- Certainty = 0.0000 (Not Clear) < succ>
bacterial outside --- Certainty = 0.0000 (Not Clear) < succ>

[5071] An alignment of the GAS and GBS proteins is shown below.

| Identities = 166/222 (74%) , Positives = 190/222 (84%) | | | |
|---|---|---|---|
| Query: | 1 | MDELKKLAGVTAAKYVKNGMIVGLGTGSTAYFFVEEIGRRVKEEGLQVVGVTTSNRTTEQ | 60 |
| | | M+ LKK+AGVTAA+YV +GM +GLGTGSTAY+FVEEIGRRVK+EGLQVVGVTTS+ T++Q | |
| Sbjct: | 1 | MEALKKIAGVTAAQYVTDGMTIGLGTGSTAYYFVEEIGRRVKQEGLQVVGVTTSSVTSKQ | 60 |
| Query: | 61 | ARGLGIPLKSADDIDVIDVTVDGADEVDPDFNGIKGGGGALLMEKIVATPTKEYIWVVDE | 120 |
| | | A LGIPLKS DDID ID+TVDGADEVD +FNGIKGGG ALLMEKIVATPTKEYIWVVD | |
| Sbjct: | 61 | AEVLGIPLKSIDDIDSIDLTVDGADEVDKNFNGIKGGGAALLMEKIVATPTKEYIWVVDA | 120 |
| Query: | 121 | SKLVETLGAFKLPVEVVRYGSERLFRVFKSKGYCPSFRETEGDRFITDMGNYIIDLDLKK | 180 |
| | | SK+VE LGAFKLPVEVV+YG++RLFRVF+ GY PSFR R +TDM NYIIDLDL | |
| Sbjct: | 121 | SKMVEHLGAFKLPVEVVQYGADRLFRVFEKAGYKPSFRMKGDSRLVTDMQNYIIDLDLGC | 180 |
| Query: | 181 | IEDPKQLANELDHTVGVVEHGLFNGMVNKVIVAGKNGLDILE | 222 |
| | | I+DP + LD TVGVVEHGLFNGMV+KVIVA K+G+ +LE | |
| Sbjct: | 181 | IKDPVAFGHLLDGTVGVVEHGLFNGMVDKVIVASKDGVTVLE | 222 |

[5072] Based on this analysis, it was predicted that these proteins and their epitopes could be useful antigens for vaccines or diagnostics.

### EXAMPLE 899

[5073] A DNA sequence (GBSx0954) was identified in S. agalactiae <SEQ ID 2737> which encodes the amino acid sequence <SEQ ID 2738>. This protein is predicted to be phosphopentomutase (deoB). Analysis of this protein sequence reveals the following:

Possible site: 22
>>> Seems to have no N-terminal signal sequence
----- Final Results -----
bacterial cytoplasm --- Certainty = 0.0546 (Affirmative) < succ>
bacterial membrane --- Certainty = 0.0000 (Not Clear) < succ>
bacterial outside --- Certainty = 0.0000 (Not Clear) < succ>

[5074] The protein has homology with the following sequences in the GENPEPT database.

| >GP: AAC45496 GB: U80410 phosphopentomutase [Lactococcus lactis | | | |
|---|---|---|---|
| subsp. cremoris] | | | |
| Identities = 275/408 (67%), Positives = 325/408 (79%), Gaps = 7/408 (1%) | | | |
| Query: | 3 | QFDRIHLVVLDSVGIGAAPDANDFVNAGVP------DGASDTLGHISKTVGLAVPNMAKI | 56 |
| | | +F RIHLVV+DSVGIGAAPDA+ F N V D SDT+GHIS+ GL VPN+ K+ | |
| Sbjct: | 4 | KFGRIHLVVMDSVGIGAAPDADKFFNHDVETHEAINDVKSDTIGHISEIRGLDVPNLQKL | 63 |
| Query: | 57 | GLGNIPRPQALKTVPAEENPSGYATKLQEVSLGKDTMTGHWEIMGLNITEPFDTFWNGFP | 116 |
| | | G GNIPR LKT+PA + P+ Y TKL+E+S GKDTMTGHWEIMGLNI PF T+ G+P | |
| Sbjct: | 64 | GWGNIPRESPLKTIPAAQKPAAYVTKLEEISKGKDTMTGHWEIMGLNIQTPFPTYPEGYP | 123 |
| Query: | 117 | EDIITKIEDFSGRKVIREANKPYSGTAVIDDFGPRQMETGELIIYTSADPVLQIAAHEDI | 176 |
| | | ED++ KIE+FSGRK+IREANKPYSGTAVI+DFGPRQ+ETGELIIYTSADPVLQIAAHED+ | |
| Sbjct: | 124 | EDLLEKIEEFSGRKIIREANKPYSGTAVIEDFGPRQLETGELIIYTSADPVLQIAAHEDV | 183 |
| Query: | 177 | IPLEELYRICEYARSITMERPALL-GRIIARPYVGEPGNFTRTANRHDYAVSPFEDTVLN | 235 |
| | | I EELY+ICEY RSIT+E ++ GRIIARPYVGE GNF RT R DYA+SPF +TVL | |
| Sbjct: | 184 | ISREELYKICEYVRSITLEGSGIMIGRIIARPYVGEAGNFERTDGRRDYALSPFAETVLE | 243 |
| Query: | 236 | KLDQAGIDTYAVGKINDIFNGSGINHDMGHNKSNSHGIDTLIKTMGLSEFEKGFSFTNLV | 295 |
| | | KL +AGIDTY+VGKI+DIFN G+ +DMGHN ++ G+D L+K M +EF +GFSFTNLV | |
| Sbjct: | 244 | KLYKAGIDTYSVGKISDIFNTVGVKYDMGHNHNDMDGVDRLLKAMTKTEFTEGFSFTNLV | 303 |
| Query: | 296 | DFDALYGHRRDPHGYRDCLHEFDERLPEIISAMRDKDLLLITADHGNDPTYAGTDHTREY | 355 |
| | | DFDA YGHRRD GY + +FD RLPEII AM++ DLL+ITADHGNDP+Y GTDHTREY | |
| Sbjct: | 304 | DFDAKYGHRRDVEGYGKAIEDFDGRLPEIIDAMKEDDLLMITADHGNDPSYVGTDHTREY | 363 |
| Query: | 356 | IPLLAYSPSFTGNGLIPVGHFADISATVADNFGVDTAMIGESFLQDLV | 403 |
| | | IPL+ +S SF ++PVGHFADISAT+A+NF V A GESFL LV | |
| Sbjct: | 364 | IPLVIFSKSFKEPKVLPVGHFADISATIAENFSVKKAQTGESFLDALV | 411 |

[5075] A related DNA sequence was identified in S. pyogenes <SEQ ID 2739> which encodes the amino acid sequence <SEQ ID 2740>. Analysis of this protein sequence reveals the following:

```
Possible site: 22
>>> Seems to have no N-terminal signal sequence
----- Final Results -----
                            bacterial cytoplasm --- Certainty = 0.0185(Affirmative) < succ>
                              bacterial membrane --- Certainty = 0.0000(Not Clear) < succ>
                                bacterial outside --- Certainty = 0.0000(Not Clear) < succ>
```

[5076] An alignment of the GAS and GBS proteins is shown below.

| Identities = 348/402 (86%), Positives = 374/402 (92%) | | | |
|---|---|---|---|
| Query: | 1 | MSQFDRIHLVVLDSVGIGAAPDANDFVNAGVPDGASDTLGHISKTVGLAVPNMAKIGLGN | 60 |
| | | MS+F+RIHLVVLDSVGIGAAPDA+ F NAGV D SDTLGHIS+ GL+VPNMAKIGLGN | |
| Sbjct: | 1 | MSKFNRIHLVVLDSVGIGAAPDADKFFNAGVADTDSDTLGHISEAAGLSVPNMAKIGLGN | 60 |
| Query: | 61 | IPRPQALKTVPAEENPSGYATKLQEVSLGKDTMTGHWEIMGLNITEPFDTFWNGFPEDII | 120 |
| | | I RP LKTVP E+NP+GY TKL+EVSLGKDTMTGHWEIMGLNITEPFDTFWNGFPE+I+ | |
| Sbjct: | 61 | ISRPIPLKTVPTEDNPTGYVTKLEEVSLGKDTMTGHWEIMGLNITEPFDTFWNGFPEEIL | 120 |
| Query: | 121 | TKIEDFSGRKVIREANKPYSGTAVIDDFGPRQMETGELIIYTSADPVLQIAAHEDIIPLE | 180 |
| | | TKIE+FSGRK+IREANKPYSGTAVIDDFGPRQMETGELI+YTSADPVLQIAAHEDIIP+E | |
| Sbjct: | 121 | TKIEEFSGRKIIREANKPYSGTAVIDDFGPRQMETGELIVYTSADPVLQIAAHEDIIPVE | 180 |
| Query: | 181 | ELYRICEYARSITMERPALLGRIIARPYVGEPGNFTRTANRHDYAVSPFEDTVLNKLDQA | 240 |
| | | ELY+ICEYARSIT+ERPALLGRIIARPYVG+PGNFTRTANRHDYAVSPF+DTVLNKL A | |
| Sbjct: | 181 | ELYKICEYARSITLERPALLGRIIARPYVGDPGNFTRTANRHDYAVSPFQDTVLNKLADA | 240 |
| Query: | 241 | GIDTYAVGKINDIFNGSGINHDMGHNKSNSHGIDTLIKTMGLSEFEKGFSFTNLVDFDAL | 300 |
| | | G+ TYAVGKINDIFNGSGI +DMGHNKSNSHGIDTLIKT+ L EF KGFSFTNLVDFDA | |
| Sbjct: | 241 | GVPTYAVGKINDIFNGSGITNDMGHNKSNSHGIDTLIKTLQLPEFTKGFSFTNLVDFDAN | 300 |
| Query: | 301 | YGHRRDPHGYRDCLHEFDERLPEIISAMRDKDLLLITADHGNDPTYAGTDHTREYIPLLA | 360 |
| | | +GHRRDP GYRDCLHEFD RLPEII+ M++ DLLLITADHGNDPTYAGTDHTREYIPLLA | |
| Sbjct: | 301 | FGHRRDPEGYRDCLHEFDNRLPEIIANMKEDDLLLITADHGNDPTYAGTDHTREYIPLLA | 360 |
| Query: | 361 | YSPSFTGNGLIPVGHFADISATVADNFGVDTAMIGESFLQDL | 402 |
| | | YS SFTGNGLIP GHFADISATVA+NFGVDTAMIGESFL L | |
| Sbjct: | 361 | YSVSFTGNGLIPQGHFADISATVAENFGVDTAMIGESFLSHL | 402 |

[5077] Based on this analysis, it was predicted that these proteins and their epitopes could be useful antigens for vaccines or diagnostics.

### EXAMPLE 900

[5078] A DNA sequence (GBSx0955) was identified in S. agalactiae <SEQ ID 2741> which encodes the amino acid sequence <SEQ ID 2742>. This protein is predicted to be unnamed protein product (mtaP). Analysis of this protein sequence reveals the following:

| Possible site: 36 | | | | |
|---|---|---|---|---|
| >>> Seems to have no N-terminal signal sequence | | | | |
| | INTEGRAL | Likelihood = −1.44 | Transmembrane | 215-231 (215-231) |

```
----- Final Results -----
                              bacterial membrane --- Certainty = 0.1574(Affirmative) < succ>
                                bacterial outside --- Certainty = 0.0000(Not Clear) < succ>
                            bacterial cytoplasm --- Certainty = 0.0000(Not Clear) < succ>
```

[5079] A related DNA sequence was identified in S. pyogenes <SEQ ID 2743> which encodes the amino acid sequence <SEQ ID 2744>. Analysis of this protein sequence reveals the following:

| Possible site: 36 | | | | |
|---|---|---|---|---|
| >>> Seems to have no N-terminal signal sequence | | | | |
| | INTEGRAL | Likelihood = −1.44 | Transmembrane | 215-231 (215-231) |

```
----- Final Results -----
                              bacterial membrane --- Certainty = 0.1574(Affirmative) < succ>
                                bacterial outside --- Certainty = 0.0000(Not Clear) < succ>
                            bacterial cytoplasm --- Certainty = 0.0000(Not Clear) < succ>
```

[5080] An alignment of the GAS and GBS proteins is shown below.

| Identities = 225/269 (83%), Positives = 248/269 (91%) | | | |
|---|---|---|---|
| Query: | 1 | MTLLEKINETRDFLQAKGVTAPEFGLILGSGLGELAEEIENPIVVDYADIPNWGQSTVVG | 60 |
| | | M+L+ KINET+DFL KG+ PEFGLILGSGLGELAEE+EN IV+DYADIPNWG+STVVG | |
| Sbjct: | 1 | MSLMTKINETKDFLVTKGIETPEFGLILGSGLGELAEEVENAIVIDYADIPNWGKSTVVG | 60 |
| Query: | 61 | HAGKLVYGDLSGRKVLALQGRFHFYEGNTMEVVTFPVRIMRALACHSVLVTNAAGGIGYG | 120 |
| | | HAGKLVYGDL+GRKVLALQGRFHFYEGN +EVVTFPVR+M+AL C VLVTNAAGGIGYG | |
| Sbjct: | 61 | HAGKLVYGDLAGRKVLALQGRFHFYEGNPLEVVTFPVRVMKALGCEGVLVTNAAGGIGYG | 120 |
| Query: | 121 | PGTLMLIKDHINMIGTNPLIGENLEEFGPRFPDMSDAYTATYRQKAHQIAEKQNIKLEEG | 180 |
| | | PGTLM I DHINM G NPLIGENL+EFGPRFPDMSDAYT YR KAH++AEK NIKLE+G | |
| Sbjct: | 121 | PGTLMAITDHINMTGNNPLIGENLDEFGPRFPDMSDAYTKVYRNKAHEVAEKMNIKLEDG | 180 |
| Query: | 181 | VYLGVSGPTYETPAEIRAFQTMGAQAVGMSTVPEVIVAAHSGLKVLGISAITNFAAGFQS | 240 |
| | | VY+G++GPTYETPAEIRAF+ +GA AVGMSTVPEVIVAAHSGLKVLGISAITNFAAGFQS | |
| Sbjct: | 181 | VYMGLTGPTYETPAEIRAFKVLGADAVGMSTVPEVIVAAHSGLKVLGISAITNFAAGFQS | 240 |
| Query: | 241 | ELNHEEVVEVTQRIKEDFKGLVKSLVAEL | 269 |
| | | ELNHEEVVEVTQ IKEDFKGLVK+++AEL | |
| Sbjct: | 241 | ELNHEEVVEVTQHIKEDFKGLVKAILAEL | 269 |

[5081] Based on this analysis, it was predicted that these proteins and their epitopes could be useful antigens for vaccines or diagnostics.

### EXAMPLE 901

[5082] A DNA sequence (GBSx0956) was identified in S. agalactiae <SEQ ID 2745> which encodes the amino acid sequence <SEQ ID 2746>. Analysis of this protein sequence reveals the following:

| Possible site: 31 | | | | |
|---|---|---|---|---|
| >>> Seems to have a cleavable N-term signal seq. | | | | |
| | INTEGRAL | Likelihood = −9.34 | Transmembrane | 266-282 (263-289) |
| | INTEGRAL | Likelihood = −8.97 | Transmembrane | 231-247 (229-253) |
| | INTEGRAL | Likelihood = −7.70 | Transmembrane | 356-372 (352-376) |
| | INTEGRAL | Likelihood = −7.32 | Transmembrane | 303-319 (297-326) |
| | INTEGRAL | Likelihood = −5.57 | Transmembrane | 337-353 (334-355) |
| | INTEGRAL | Likelihood = −5.57 | Transmembrane | 391-407 (387-409) |
| | INTEGRAL | Likelihood = −2.44 | Transmembrane | 177-193 (177-193) |
| | INTEGRAL | Likelihood = −1.01 | Transmembrane | 159-175 (159-175) |
| | INTEGRAL | Likelihood = −0.43 | Transmembrane | 198-214 (196-215) |

```
----- Final Results -----
                              bacterial membrane --- Certainty = 0.4736(Affirmative) < succ>
                                bacterial outside --- Certainty = 0.0000(Not Clear) < succ>
                            bacterial cytoplasm --- Certainty = 0.0000(Not Clear) < succ>
```

[5083] A related GBS nucleic acid sequence <SEQ ID 9883> which encodes amino acid sequence <SEQ ID 9884> was also identified.

[5084] The protein has homology with the following sequences in the GENPEPT database.

| >GP: AAD53928 GB: AF179611 chloride channel protein [Zymomonas | | | |
|---|---|---|---|
| mobilis] | | | |
| Identities = 121/410 (29%), Positives = 213/410 (51%), Gaps = 19/410 (4%) | | | |
| Query: | 14 | VKFMIAVLFMTVMAGVGAILMHYVLMFTEWLAFGDSRENTLSLLN------SVTPIKRVL | 67 |
| | | +++ +A L + + G+G +L+ ++L + +A+G S ++ +S + + +P++R+ | |
| Sbjct: | 3 | IRYGLACLAVGCLTGLGGMLLSWILHAVQHIAYGYSLQHVISEESFLKGSMAASPLRRLE | 62 |
| Query: | 68 | SLTLVSFLASLSWYYLQIKPKQITSIKQQVVFKDFSVKKSPYWLHIGHAFLQLIYVGTGG | 127 |
| | | L + W L+ + SI Q V + P+W I H LQ++ VG G | |
| Sbjct: | 63 | VLVFCGAVVGGGWGLLRHFGSPLVSITQAVAANK---RVMPFWTTIIHVLLQIVTVGLGS | 119 |
| Query: | 128 | PIGKEGAPREFGAINAGKISDLLALKVLDKRLLIISGAAAGLSAVYQVPLASVFFAFETL | 187 |
| | | P+G+E APRE G++ + + L +R+L+ GA AG ++VY VPL+ FA E L | |
| Sbjct: | 120 | PLGREVAPRELGSLIGERFAFWGGLSENQRRILVACGAGAGFASVYNVPLSGALFALEAL | 179 |
| Query: | 188 | ALGISLKNIVTLLASTFGAASIAQLVISTAPLYHISKMSLNSQSLAFMFLIVLCVTPI-- | 245 |
| | | + + ++ L ++ +A +A +++ + +YH+ ++++ + L+ L PI | |
| Sbjct: | 180 | LMTWASPVVIVALLTSALSARMAWILLGNSMVYHVPAWPVDTR----LMLLALLAGPIFG | 235 |
| Query: | 246 | --AISFRYLNQKVTERRIK-NIKILLSLPVVSLIVSVLSIVYPQILGNGNALVQEVFKGT | 302 |
| | | A FR+ +QK+T RIK N ++ L + + +LS+ +P+ILGNG V F | |
| Sbjct: | 236 | IAAHYFRFWSQKITASRIKDNRRLALVAILCFAAIGLLSMWFPEILGNGKGPVSLAFNDN | 295 |
| Query: | 303 | TVSLIA-ILVVLKMIATLSTLYAGAYGGILTPSFSIGACLGFLLASISIPLLPHISIVTS | 361 |
| | | + A L K++A L+AGAYGG+LTP S GA L ++ + LP + I | |
| Sbjct: | 296 | LSGMKAGELFCFKILAVFLALWAGAYGGLLTPGISFGALLAVVIGHLWNMWLPPVPIGAF | 355 |
| Query: | 362 | MLVGAAIFLAITMRAPLTAVGLVISFTGQSVITIVPLTIAVLFATAYDYF | 411 |
| | | ++G A FLA +M+ P+TA+ LVI F ++P+ AV + A F | |
| Sbjct: | 356 | AIIGGAAFLASSMKMPITAMALVIEFARTGHDFLIPIAFAVAGSIAISQF | 405 |

[5085] A related DNA sequence was identified in S. pyogenes <SEQ ID 2747> which encodes the amino acid sequence <SEQ ID 2748>. Analysis of this protein sequence reveals the following:

| Possible site: 13 | | | | |
|---|---|---|---|---|
| >>> Seems to have no N-terminal signal sequence | | | | |
| | INTEGRAL | Likelihood = −5.41 | Transmembrane | 247-263 (245-267) |
| | INTEGRAL | Likelihood = −5.15 | Transmembrane | 326-342 (323-345) |
| | INTEGRAL | Likelihood = −5.04 | Transmembrane | 411-427 (407-429) |
| | INTEGRAL | Likelihood = −4.94 | Transmembrane | 39-55 (34-59) |
| | INTEGRAL | Likelihood = −4.46 | Transmembrane | 284-300 (282-307) |
| | INTEGRAL | Likelihood = −3.45 | Transmembrane | 380-396 (376-400) |
| | INTEGRAL | Likelihood = −2.13 | Transmembrane | 185-201 (184-201) |
| | INTEGRAL | Likelihood = −2.02 | Transmembrane | 88-104 (87-105) |
| | INTEGRAL | Likelihood = −1.12 | Transmembrane | 350-366 (350-367) |

```
----- Final Results -----
                              bacterial membrane --- Certainty = 0.3166(Affirmative) < succ>
                                bacterial outside --- Certainty = 0.0000(Not Clear) < succ>
                            bacterial cytoplasm --- Certainty = 0.0000(Not Clear) < succ>
```

[5086] The protein has homology with the following sequences in the databases:

| >GP: AAF41386 GB: AE002449 chloride channel protein-related protein | | | |
|---|---|---|---|
| [Neisseria meningitidis MC58] | | | |
| Identities = 137/373 (36%), Positives = 201/373 (53%), Gaps = 23/373 (6%) | | | |
| Query: | 59 | IHLIQSLSFGFSQG----SFSTMIASVPPQRRALSLLFAGLLAGLGWHLLAKKGKDIQSI | 114 |
| | | +H IQ ++G+ SF +A RR L G +AG GW LL + GK I | |
| Sbjct: | 1 | MHFIQHTAYGYGADGVYTSFREGVAQASGMRRVAVLTLCGAVAGSGWWLLKRFGKPQIEI | 60 |
| Query: | 115 | QQIIQDDISFSPW-TQFWHGWLQLTTVSMGAPVGREGASREVAVTLTSLWSQRCNLSKAD | 173 |
| | | + ++ + P+ T +H LQ+ TV +G+P+GRE A RE+ +R L + + | |
| Sbjct: | 61 | KAALKQPLQGLPFLTTVFHVLLQIITVGLGSPLGREVAPREMTAAFAFAGGKRLGLDEGE | 120 |
| Query: | 174 | QKLLLACASGAALGAVYNAPLATILFILEAILNRWSLKNIYAACLTSYVAVETVALLQGR | 233 |
| | | +LL+ACASGA L AVYN PLA+ LFILEA+L W+ + + AA LTS +A + G | |
| Sbjct: | 121 | MRLLIACASGAGLAAVYNVPLASTLFILEAMLGVWTQQAVAAALLTSVIATAVARI--GL | 178 |
| Query: | 234 | HEIQYLMPQQHWTLGT--LIGSVLAGLILSLFAHAYKHLLKHLPKADAKSQWFIPKVLIA | 291 |
| | | ++Q P + T+ T L S + G IL + A ++ + P + IP + | |
| Sbjct: | 179 | GDVQQYHP-ANLTVNTSLLWFSAVIGPILGVAAVFFQRTAQKFPFIKRDNIKIIPLAVCM | 237 |
| Query: | 292 | FSLIAGLSIFFPEILGNGKAG--LLF-FLHEEPH---LSYISWLLVAKAVAISLVFASGA | 345 |
| | | F+LI +S++FPEILGNGKAG L F L + H L+ + WL+V A+A+ GA | |
| Sbjct: | 238 | FALIGVISVWFPEILGNGKAGNQLTFGGLTDWQHSLGLTAVKWLVVLMALAV------GA | 291 |
| Query: | 346 | KGGKIAPSMMLGGASGLLLAILSQYLIPLSLSNTLAIMVGATIFLGVINKIPLAAPVFLV | 405 |
| | | GG I PSMMLG A + P +S+ A +VGA +FLGV K+PL A F++ | |
| Sbjct: | 292 | YGGLITPSMMLGSTIAFAAATAWNSVFP-EMSSESAAIVGAAVFLGVSLKMPLTAIAFIL | 350 |
| Query: | 406 | EITGQSLLMIIPL | 418 |
| | | E+T + +++PL | |
| Sbjct: | 351 | ELTYAPVALLMPL | 363 |

[5087] An alignment of the GAS and GBS proteins is shown below.

| Identities = 131/415 (31%), Positives = 215/415 (51%), Gaps = 9/415 (2%) | | | |
|---|---|---|---|
| Query: | 2 | LNFKMVSRLYYAVKFMIAVLFMT-VMAGVGAILMHYVLMFTEWLAFGDSRENTLSLLNSV | 60 |
| | | LNF S + + LF+T + AG+ A ++ + + L+FG S+ + +++ SV | |
| Sbjct: | 22 | LNFCYNSLMKRHFLLLTFYLFLTGLTAGLVAFILTKAIHLIQSLSFGFSQGSFSTMIASV | 81 |
| Query: | 61 | TPIKRVLSLTLVSFLASLSWYYLQIKPKQITSIKQQVVFKDFSVKKSPYWLHIGHAFLQL | 120 |
| | | P +R LSL LA L W+ L K K I SI QQ++ D S SP W H +LQL | |
| Sbjct: | 82 | PPQRRALSLLFAGLLAGLGWHLLAKKGKDIQSI-QQIIQDDISF--SP-WTQFWHGWLQL | 137 |
| Query: | 121 | IYVGTGGPIGKEGAPREFGAINAGKISDLLALKVLDKRLLIISGAAAGLSAVYQVPLASV | 180 |
| | | V G P+G+EGA RE S L D++LL+ + A L AVY PLA++ | |
| Sbjct: | 138 | TTVSMGAPVGREGASREVAVTLTSLWSQRCNLSKADQKLLLACASGAALGAVYNAPLATI | 197 |
| Query: | 181 | FFAFETLALGISLKNIVTLLASTFGAASIAQLVISTAPL-YHISKMSLNSQSLAFMFLIV | 239 |
| | | F E + SLKNI +++ A L+ + Y + + +L L | |
| Sbjct: | 198 | LFILEAILNRWSLKNIYAACLTSYVAVETVALLQGRHEIQYLMPQQHWTLGTLIGSVLAG | 257 |
| Query: | 240 | LCVTPIAISFRYLNQKVTERRIKNIKILLSLPVVSLIVSVLSIVYPQILGNGNA-LVQEV | 298 |
| | | L ++ A ++++L + + + K+ + + + +++ LSI +P+ILGNG A L+ + | |
| Sbjct: | 258 | LILSLFAHAYKHLLKHLPKADAKSQWFIPKVLIAFSLIAGLSIFFPEILGNGKAGLLFFL | 317 |
| Query: | 299 | FKGTTVSLIAILVVLKMIATLSTLYAGAYGGILTPSFSIGACLGFLLASISIPLLP-HIS | 357 |
| | | + +S I+ L+V K +A +GA GG + PS +G G LLA +S L+P +S | |
| Sbjct: | 318 | HEEPHLSYISWLLVAKAVAISLVFASGAKGGKIAPSMMLGGASGLLLAILSQYLIPLSLS | 377 |
| Query: | 358 | IVTSMLVGAAIFLAITMRAPLTAVGLVISFTGQSVITIVPLTIA-VLFATAYDYF | 411 |
| | | +++VGA IFL + + PL A ++ TGQS++ I+PL +A ++F +Y ++ | |
| Sbjct: | 378 | NTLAIMVGATIFLGVINKIPLAAPVFLVEITGQSLLMIIPLALANLIFYFSYQFY | 432 |

[5088] A related GBS gene <SEQ ID 8683> and protein <SEQ ID 8684> were also identified. Analysis of this protein sequence reveals the following:

| Lipop: Possible site: −1 Crend: 9 | | | | |
|---|---|---|---|---|
| SRCFLG: 0 | | | | |
| McG: Length of UR: 19 | | | | |
| Peak Value of UR: 2.96 | | | | |
| Net Charge of CR: 2 | | | | |
| McG: Discrim Score: 9.64 | | | | |
| GvH: Signal Score (−7.5): 1.15 | | | | |
| Possible site: 26 | | | | |
| >>> Seems to have a cleavable N-term signal seq. | | | | |
| Amino Acid Composition: calculated from 27 | | | | |
| ALOM program count: 9 value: −9.34 threshold: 0.0 | | | | |
| | INTEGRAL | Likelihood = −9.34 | Transmembrane | 261-277 (258-284) |
| | INTEGRAL | Likelihood = −8.97 | Transmembrane | 226-242 (224-248) |
| | INTEGRAL | Likelihood = −7.70 | Transmembrane | 351-367 (347-371) |
| | INTEGRAL | Likelihood = −7.32 | Transmembrane | 298-314 (292-321) |
| | INTEGRAL | Likelihood = −5.57 | Transmembrane | 332-348 (329-350) |
| | INTEGRAL | Likelihood = −5.57 | Transmembrane | 386-402 (382-404) |
| | INTEGRAL | Likelihood = −2.44 | Transmembrane | 172-188 (172-188) |
| | INTEGRAL | Likelihood = −1.01 | Transmembrane | 154-170 (154-170) |
| | INTEGRAL | Likelihood = −0.43 | Transmembrane | 193-209 (191-210) |
| | PERIPHERAL | Likelihood = 1.22 | 61 | |

```
modified ALOM score: 2.37
icm1 HYPID: 7 CFP: 0.474
*** Reasoning Step: 3
----- Final Results -----
                              bacterial membrane --- Certainty = 0.4736(Affirmative) < succ>
                                bacterial outside --- Certainty = 0.0000(Not Clear) < succ>
                            bacterial cytoplasm --- Certainty = 0.0000(Not Clear) < succ>
```

[5089] The protein has homology with the following sequences in the databases:

[chemical structure]

[5090] Based on this analysis, it was predicted that these proteins and their epitopes could be useful antigens for vaccines or diagnostics.

### EXAMPLE 902

[5091] A DNA sequence (GBSx0957) was identified in S. agalactiae <SEQ ID 2749> which encodes the amino acid sequence <SEQ ID 2750>. This protein is predicted to be purine nucleoside phosphorylase fragment (deoD-1). Analysis of this protein sequence reveals the following:

```
Possible site: 25
>>> Seems to have no N-terminal signal sequence
----- Final Results -----
                            bacterial cytoplasm --- Certainty = 0.2384(Affirmative) < succ>
                              bacterial membrane --- Certainty = 0.0000(Not Clear) < succ>
                                bacterial outside --- Certainty = 0.0000(Not Clear) < succ>
```

[5092] The protein has homology with the following sequences in the GENPEPT database.

| >GP: CAC18350 GB: Y17900 putative purine-nucleotide phosphorylase | | | |
|---|---|---|---|
| [Streptococcus salivarius] | | | |
| Identities = 200/236 (84%), Positives = 219/236 (92%) | | | |
| Query: | 1 | MSIHIEAKQGEIADKILLPGDPLRAKFIAENFLEDAVCFNTVRNMFGYTGTYKGHRVSVM | 60 |
| | | MSIHI AKQGEIADKILLPGDPLRAKFIAENFLEDAVCFN VRNMFGYTGTYKG RVSVM | |
| Sbjct: | 1 | MSIHIAAKQGEIADKILLPGDPLRAKFIAENFLEDAVCFNEVRNMFGYTGTYKGERVSVM | 60 |
| Query: | 61 | GTGMGMPSISIYARELIVDYGVKTLIRVGTAGAINPDIHVRELVLAQAAATNSNIIRNDW | 120 |
| | | GTGMGMPSISIYARELIVDYGVK LIRVGTAG++N D+HVRELVLAQAAATNSNIIRNDW | |
| Sbjct: | 61 | GTGMGMPSISIYARELIVDYGVKKLIRVGTAGSLNEDVHVRELVLAQAAATNSNIIRNDW | 120 |
| Query: | 121 | PEFDFPQIADFKLLDKAYHIAKEMDITTHVGSVLSSDVFYSNQPDRNMALGKLGVHAIEM | 180 |
| | | P++DFPQIA+F LLDKAYHIAK +TTHVG+VLSSDVFYSN ++N+ LGK GV A+EM | |
| Sbjct: | 121 | PQYDFPQIANFNLLDKAYHIAKNFGMTTHVGNVLSSDVFYSNYFEKNIELGKWGVKAVEM | 180 |
| Query: | 181 | EAAALYYLAAQHNVNALAMMTISDNLNNPEEDTSAEERQTTFTDMMKVGLETLISE | 236 |
| | | EAAALYYLAAQH V+ALA+MTISD+L NP+EDT+AEERQ TFTDMMKVGLETLI++ | |
| Sbjct: | 181 | EAAALYYLAAQHQVDALAIMTISDSLVNPDEDTTAEERQNTFTDMMKVGLETLIAD | 236 |

[5093] A related DNA sequence was identified in S. pyogenes <SEQ ID 2751> which encodes the amino acid sequence <SEQ ID 2752>. Analysis of this protein sequence reveals the following:

```
Possible site: 25
>>> Seems to have no N-terminal signal sequence
----- Final Results -----
                            bacterial cytoplasm --- Certainty = 0.2117(Affirmative) < succ>
                              bacterial membrane --- Certainty = 0.0000(Not Clear) < succ>
                                bacterial outside --- Certainty = 0.0000(Not Clear) < succ>
```

[5094] An alignment of the GAS and GBS proteins is shown below.

| Identities = 210/235 (89%), Positives = 226/235 (95%) | | | |
|---|---|---|---|
| Query: | 1 | MSIHIEAKQGEIADKILLPGDPLRAKFIAENFLEDAVCFNTVRNMFGYTGTYKGHRVSVM | 60 |
| | | MSIHI AK+G+IADKILLPGDPLRAKFIAENFLEDAVCFN VRNMFGYTGTYKGHRVSVM | |
| Sbjct: | 1 | MSIHISAKKGDIADKILLPGDPLRAKFIAENFLEDAVCFNEVRNMFGYTGTYKGHRVSVM | 60 |
| Query: | 61 | GTGMGMPSISIYARELIVDYGVKTLIRVGTAGAINPDIHVRELVLAQAAATNSNIIRNDW | 120 |
| | | GTGMGMPSISIYARELIVDYGVKTLIRVGTAGAI+P++HVRELVLAQAAATNSNIIRND+ | |
| Sbjct: | 61 | GTGMGMPSISIYARELIVDYGVRTLIRVGTAGAIDPEVHVRELVLAQAAATNSNIIRNDF | 120 |
| Query: | 121 | PEFDFPQIADFKLLDKAYHIAKEMDITTHVGSVLSSDVFYSNQPDRNMALGKLGVHAIEM | 180 |
| | | PEFDFPQIADF LLDKAYHIA+EM +TTHVG+VLSSDVFY+N P+RNMALGKLGV AIEM | |
| Sbjct: | 121 | PEFDFPQIADFGLLDKAYHIAREMGVTTHVGNVLSSDVFYTNMPERNMALGKLGVKAIEM | 180 |
| Query: | 181 | EAAALYYLAAQHNVNALAMMTISDNLNNPEEDTSAEERQTTFTDMMKVGLETLIS | 235 |
| | | EAAALYYLAAQH+V AL +MTISDNLN+P EDT+AEERQTTFTDMMKVGLETLI+ | |
| Sbjct: | 181 | EAAALYYLAAQHHVKALGIMTISDNLNDPTEDTTAEERQTTFTDMMKVGLETLIA | 235 |

[5095] Based on this analysis, it was predicted that these proteins and their epitopes could be useful antigens for vaccines or diagnostics.

### EXAMPLE 903

[5096] A DNA sequence (GBSx0958) was identified in S. agalactiae <SEQ ID 2753> which encodes the amino acid sequence <SEQ ID 2754>. Analysis of this protein sequence reveals the following:

Possible site: 36
>>> Seems to have no N-terminal signal sequence
----- Final Results -----
bacterial cytoplasm --- Certainty = 0.1710 (Affirmative) < succ>
bacterial membrane --- Certainty = 0.0000 (Not Clear) < succ>
bacterial outside --- Certainty = 0.0000 (Not Clear) < succ>

[5097] A related GBS nucleic acid sequence <SEQ ID 9881> which encodes amino acid sequence <SEQ ID 9882> was also identified.

[5098] The protein has no significant homology with any sequences in the GENPEPT database.

[5099] A related DNA sequence was identified in S. pyogenes <SEQ ID 2755> which encodes the amino acid sequence <SEQ ID 2756>. Analysis of this protein sequence reveals the following:

Possible site: 21
>>> Seems to have no N-terminal signal sequence
----- Final Results -----
bacterial cytoplasm --- Certainty = 0.1386 (Affirmative) < succ>
bacterial membrane --- Certainty = 0.0000 (Not Clear) < succ>
bacterial outside --- Certainty = 0.0000 (Not Clear) < succ>

[5100] An alignment of the GAS and GBS proteins is shown below.

| Identities = 126/253 (49%), Positives = 175/253 (68%), Gaps = 2/253 (0%) | | | |
|---|---|---|---|
| Query: | 3 | IEMTDFSTALKVLVDQYSYHNAFLLLQKHGPLNSDLLFLLEMMKERRELNIDFLFAHQEQ | 62 |
| | | + MT+ T L +L+D Y+Y++AF + + + L+LLEM+KERRELN+ FL H + | |
| Sbjct: | 1 | LPMTNNQT-LDILLDVYAYNHAFRIAKALPNIPKTALYLLEMLKERRELNLAFLAEHAAE | 59 |
| Query: | 63 | VVILQEKYNIKL-LHNPYDLELLANYIMDLEAKVKNGLIIDFVRSVSPILYRLFMILLAQ | 121 |
| | | ++++Y+ L L+ + E +ANYI+DLE KVKNG IIDFVRSVSPILYRLF+ L+ | |
| Sbjct: | 60 | NRTIEDQYHCSLWLNQSLEDEQIANYILDLEVKVKNGAIIDFVRSVSPILYRLFLRLITS | 119 |
| Query: | 122 | EVPHLHDYIHNARDDHYDTWKFKELKESNHPVLLAFSERWHDSRLTSKSLAECLQLTDLD | 181 |
| | | E+P+ YI + ++D YDTW F+ + ES+H V A+ + +T+KSLA+ L LT L | |
| Sbjct: | 120 | EIPNFKAYIFDTKNDQYDTWHFQAMLESDHEVFKAYLSQKQSRNVTTKSLADMLTLTSLP | 179 |
| Query: | 182 | EEVKSTIIQLRQFEKSVRNPLAHLIKPFDEQELYRTTQFSSQAFLDQIIFLAKVIGVEYD | 241 |
| | | +E+K + LR FEK+VRNPLAHLIKPFDE+EL+RTT FSSQAFL+ II LA GV Y | |
| Sbjct: | 180 | QEIKDLVFLLRHFEKAVRNPLAHLIKPFDEEELHRTTHFSSQAFLENIITLATFSGVIYR | 239 |
| Query: | 242 | TVNFHYDTVNKLI | 254 |
| | | F++D +N +I | |
| Sbjct: | 240 | REPFYFDDMNAII | 252 |

[5101] Based on this analysis, it was predicted that these proteins and their epitopes could be useful antigens for vaccines or diagnostics.

### EXAMPLE 904

[5102] A DNA sequence (GBSx0959) was identified in S. agalactiae <SEQ ID 2757> which encodes the amino acid sequence <SEQ ID 2758>. This protein is predicted to be CpsY protein. Analysis of this protein sequence reveals the following:

| Possible site: 35 | | | |
|---|---|---|---|
| >>> Seems to have no N-terminal signal sequence | | | |
| INTEGRAL | Likelihood = −0.59 | Transmembrane | 260-276 (260-276) |

----- Final Results -----
bacterial membrane --- Certainty = 0.1235 (Affirmative) < succ>
bacterial outside --- Certainty = 0.0000 (Not Clear) < succ>
bacterial cytoplasm --- Certainty = 0.0000 (Not Clear) < succ>

[5103] A related GBS nucleic acid sequence <SEQ ID 9879> which encodes amino acid sequence <SEQ ID 9880> was also identified.

[5104] A related DNA sequence was identified in S. pyogenes <SEQ ID 2759> which encodes the amino acid sequence <SEQ ID 2760>. Analysis of this protein sequence reveals the following:

Possible site: 35
>>> Seems to have no N-terminal signal sequence
----- Final Results -----
bacterial cytoplasm --- Certainty = 0.1958 (Affirmative) < succ>
bacterial membrane --- Certainty = 0.0000 (Not Clear) < succ>
bacterial outside --- Certainty = 0.0000 (Not Clear) < succ>

[5105] An alignment of the GAS and GBS proteins is shown below.

| Identities = 247/301 (82%), Positives = 274/301 (90%) | | | |
|---|---|---|---|
| Query: | 1 | MRIQQLQYVIKIVETGSMNEAAKQLYITQPSLSNAVRNLETEMGIQIFIRNPKGITLTKD | 60 |
| | | MRIQQL Y+IKIVE GSMNEAAKQL+ITQPSLSNAV++LE EMGI IF RNPKGITLTKD | |
| Sbjct: | 1 | MRIQQLHYIIKIVECGSMNEAAKQLFITQPSLSNAVKDLEMEMGITIFNRNPKGITLTKD | 60 |
| Query: | 61 | GMEFLSYARQILEQTALLEERYKGDNTSRELFSVSSQHYAFVVNAFVALFNGTDMTQYEL | 120 |
| | | G+EFLSYARQI+EQT+LLE+RYK NT RELFSVSSQHYAFVVNAFV+L TDMT+YEL | |
| Sbjct: | 61 | GVEFLSYARQIIEQTSLLEDRYKNHNTGRELFSVSSQHYAFVVNAFVSLLKRTDMTRYEL | 120 |
| Query: | 121 | FLRETRTWEIIDDVKNFRSEIGVLFLNSYNRDVLTKLFDDNSLIATTLFTTTPHIFVSKS | 180 |
| | | FLRETRTWEIIDDVKNFRSEIGVLF+N YNRDVLTKLFDDN L A+ LF PHIFVSKS | |
| Sbjct: | 121 | FLRETRTWEIIDDVKNFRSEIGVLFINDYNRDVLTKLFDDNHLTASPLFKAQPHIFVSKS | 180 |
| Query: | 181 | NPLANRKKLNMKDLEDYPYLSYDQGLHNSFYFSEEMMSQIPHPKSIVVSDRATLFNLMIG | 240 |
| | | NPLA + L+M DL D+PYLSYDQG+HNSFYFSEEMMSQ+PH KSIVVSDRATLFNLMIG | |
| Sbjct: | 181 | NPLATKSLLSMDDLRDFPYLSYDQGIHNSFYFSEEMMSQMPHNKSIVVSDRATLFNLMIG | 240 |
| Query: | 241 | LDGYTVATGILNSKLNGDEIVAIPLDVDDVIDIVYIRHDKANLSKMGQKFIDYLLEEVSFN | 301 |
| | | LDGYTVA+GILNS LNGD+IVAIPLDV D IDIV+I+H+KANLSKMG++FI+YLLEEV+F+ | |
| Sbjct: | 241 | LDGYTVASGILNSNLNGDQIVAIPLDVPDEIDIVFIKHEKANLSKMGERFIEYLLEEVTFD | 301 |

[5106] Based on this analysis, it was predicted that these proteins and their epitopes could be useful antigens for vaccines or diagnostics.

### EXAMPLE 905

[5107] A DNA sequence (GBSx0960) was identified in S. agalactiae <SEQ ID 2761> which encodes the amino acid sequence <SEQ ID 2762>. This protein is predicted to be CpsX protein. Analysis of this protein sequence reveals the following:

| Possible site: 32 | | | |
|---|---|---|---|
| >>> Seems to have an uncleavable N-term signal seq | | | |
| INTEGRAL | Likelihood = −14.91 | Transmembrane | 22-38 (13-42) |
| INTEGRAL | Likelihood = −14.65 | Transmembrane | 52-68 (44-77) |
| INTEGRAL | Likelihood = −6.74 | Transmembrane | 76-92 (73-97) |

----- Final Results -----
bacterial membrane --- Certainty = 0.6965 (Affirmative) < succ>
bacterial outside --- Certainty = 0.0000 (Not Clear) < succ>
bacterial cytoplasm --- Certainty = 0.0000 (Not Clear) < succ>

[5108] The protein has homology with the following sequences in the databases:

| >GP: AAC44935 GB: U56901 putative transcriptional regulator | | | |
|---|---|---|---|
| [Bacillus subtilis] | | | |
| Identities = 120/389 (30%), Positives = 196/389 (49%), Gaps = 17/389 (4%) | | | |
| Query: | 2 | KIGKKIVLMFTAIVLTTVLALGVYLTSAYTFSTGELSKTFKDFSTSSNKSDAIK-QTRAF | 60 |
| | | KI K+I+L+F A+ L V+ LG Y + E + S+ +++ + + + F | |
| Sbjct: | 19 | KILKRIMLLF-ALALLVVVGLGGYKLYKTINAADESYDALSRGNKSNLRNEVVDMKKKPF | 77 |
| Query: | 61 | SILLMGVDTGSSERASKWEGNSDSMILVTVNPKTKKTTMTSLERDTLTTLSGPKNNEMNG | 120 |
| | | SIL MG++ +++ +G SDS+I+VT++PK K M S+ RDT L+G + G | |
| Sbjct: | 78 | SILFMGIEDYATKGQ---KGRSDSLIVVTLDPKNKTMKMLSIPRDTRVQLAG----DTTG | 130 |
| Query: | 121 | VEAKLNAAYAAGGAQMAIMTVQDLLNITIDNYVQINMQGLIDLVNAVGGITVTNEFDFPI | 180 |
| | | + K+NAAY+ GG + TV++ L I ID YV ++ G D++N VGGI V FDF | |
| Sbjct: | 131 | SKTKINAAYSKGGKDETVETVENFLQIPIDRYVTVDFDGFKDVINEVGGIDVDVPFDFDE | 190 |
| Query: | 181 | SIAENEPEYQATVAPGTHKINGEQALVYARMRYDDPEGDYGRQKRQREVIQKVLKKILAL | 240 |
| | | +E + + G +NGE+AL YARMR D GD+GR RQ++++ ++ ++ + | |
| Sbjct: | 191 | KSDVDESK-RIYFKKGEMHLNGEEALAYARMRKQDKRGDFGRNDRQKQILNALIDRMSSA | 249 |
| Query: | 241 | DSISSYRKILSAVSSNMQTNIEISSRTIPSLLGYRDALRTIKTYQLKGEDATLSDGGSYQ | 300 |
| | | +I+ KI S N++TNI I+ + + I T + G D L +Y | |
| Sbjct: | 250 | SNIAKIDKIAEKASENVETNIRITEGLALQQIYSGFTSKKIDTLSITGSDLYLGPNNTYY | 309 |
| Query: | 301 | IVTSNHLLEIQNRIRTELGLHKVNQLKTNATVYENLYGSTKSQTVNNNYDSSGQAPSYSD | 360 |
| | | LE ++R L H ++ +T T S + + + S+G + | |
| Sbjct: | 310 | FEPDATNLE---KVRKTLQEH-LDYTPDTSTGTSGTEDGTDSSSSSGSTGSTGTTTDGTT | 365 |
| Query: | 361 | SHSSYANYSSGVDTGQSASTDQDSTASSH | 389 |
| | | + SSY+N SS T + ST +T SS+ | |
| Sbjct: | 366 | NGSSYSNDSS---TSSNNSTTNSTTDSSY | 391 |

[5109] There is also homology to SEQ ID 2764.

[5110] Based on this analysis, it was predicted that these proteins and their epitopes could be useful antigens for vaccines or diagnostics.

### EXAMPLE 906

[5111] A DNA sequence (GBSx0961) was identified in S. agalactiae <SEQ ID 2765> which encodes the amino acid sequence <SEQ ID 2766>. This protein is predicted to be CpsIaB. Analysis of this protein sequence reveals the following:

| Possible site: 41 | | | |
|---|---|---|---|
| >>> Seems to have no N-terminal signal sequence | | | |
| INTEGRAL | Likelihood = −0.75 | Transmembrane | 121-137 (121-137) |

----- Final Results -----
bacterial membrane --- Certainty = 0.1298 (Affirmative) < succ>
bacterial outside --- Certainty = 0.0000 (Not Clear) < succ>
bacterial cytoplasm --- Certainty = 0.0000 (Not Clear) < succ>

[5112] A related GBS nucleic acid sequence <SEQ ID 9877> which encodes amino acid sequence <SEQ ID 9878> was also identified.

[5113] No corresponding DNA sequence was identified in S. pyogenes.

[5114] Based on this analysis, it was predicted that these proteins and their epitopes could be useful antigens for vaccines or diagnostics.

### EXAMPLE 907

[5115] A DNA sequence (GBSx0962) was identified in S. agalactiae <SEQ ID 2767> which encodes the amino acid sequence <SEQ ID 2768>. This protein is predicted to be cpsb protein. Analysis of this protein sequence reveals the following:

| Possible site: 35 | | | |
|---|---|---|---|
| >>> Seems to have no N-terminal signal sequence | | | |
| INTEGRAL | Likelihood = −9.02 | Transmembrane | 182-198 (179-204) |
| INTEGRAL | Likelihood = −5.57 | Transmembrane | 30-46 (24-48) |

----- Final Results -----
bacterial membrane --- Certainty = 0.4609(Affirmative) < succ>
bacterial outside --- Certainty = 0.0000(Not Clear) < succ>
bacterial cytoplasm --- Certainty = 0.0000(Not Clear) < succ>

[5116] No corresponding DNA sequence was identified in S. pyogenes.

[5117] A related GBS gene <SEQ ID 10785> and protein <SEQ ID 10786> were also identified. Analysis of this protein sequence reveals the following:

| Lipop: Possible site: −1 Crend: 9 | | | |
|---|---|---|---|
| McG: Discrim Score: −8.96 | | | |
| GvH: Signal Score (−7.5): 0.11 | | | |
| Possible site: 35 | | | |
| >>> Seems to have no N-terminal signal sequence | | | |
| ALOM program | count: 2 | value: −9.02 | threshold: 0.0 |

| | | | |
|---|---|---|---|
| INTEGRAL | Likelihood = −9.02 | Transmembrane | 182-198 (179-204) |
| INTEGRAL | Likelihood = −5.57 | Transmembrane | 30-46 (24-48) |
| PERIPHERAL | Likelihood = 6.21 | 113 | |

modified ALOM score: 2.30
*** Reasoning Step: 3
----- Final Results -----
bacterial membrane --- Certainty = 0.4609 (Affirmative) < succ>
bacterial outside --- Certainty = 0.0000 (Not Clear) < succ>
bacterial cytoplasm --- Certainty = 0.0000 (Not Clear) < succ>

[5118] Based on this analysis, it was predicted that these proteins and their epitopes could be useful antigens for vaccines or diagnostics.

### EXAMPLE 908

[5119] A DNA sequence (GBSx0963) was identified in S. agalactiae <SEQ ID 2769> which encodes the amino acid sequence <SEQ ID 2770>. This protein is predicted to be CpsIaD. Analysis of this protein sequence reveals the following:

| Possible site: 61 | | | |
|---|---|---|---|
| >>> Seems to have no N-terminal signal sequence | | | |
| INTEGRAL | Likelihood = −2.44 | Transmembrane | 149-165 (149-166) |

----- Final Results -----
bacterial membrane --- Certainty = 0.1977 (Affirmative) < succ>
bacterial outside --- Certainty = 0.0000 (Not Clear) < succ>
bacterial cytoplasm --- Certainty = 0.0000 (Not Clear) < succ>

[5120] No corresponding DNA sequence was identified in S. pyogenes.

[5121] Based on this analysis, it was predicted that this protein and its epitopes, could be useful antigens for vaccines or diagnostics.

### EXAMPLE 909

[5122] A DNA sequence (GBSx0964) was identified in S. agalactiae <SEQ ID 2771> which encodes the amino acid sequence <SEQ ID 2772>. Analysis of this protein sequence reveals the following:

| Possible site: 25 | | | |
|---|---|---|---|
| >>> Seems to have an uncleavable N-term signal seq | | | |
| INTEGRAL | Likelihood = −12.26 | Transmembrane | 276-292 (270-297) |
| INTEGRAL | Likelihood = −4.62 | Transmembrane | 10-26 (9-28) |
| INTEGRAL | Likelihood = −4.14 | Transmembrane | 41-57 (39-58) |
| INTEGRAL | Likelihood = −3.24 | Transmembrane | 100-116 (100-116) |
| INTEGRAL | Likelihood = −3.08 | Transmembrane | 445-461 (443-461) |

----- Final Results -----
bacterial membrane --- Certainty = 0.5904 (Affirmative) < succ>
bacterial outside --- Certainty = 0.0000 (Not Clear) < succ>
bacterial cytoplasm --- Certainty = 0.0000 (Not Clear) < succ>

[5123] No corresponding DNA sequence was identified in S. pyogenes.

[5124] A related GBS gene <SEQ ID 8687> and protein <SEQ ID 8688> were also identified. Analysis of this protein sequence reveals the following:

| Lipop: Possible site: −1 Crend: 8 | | |
|---|---|---|
| McG: Discrim Score: 5.69 | | |
| GvH: Signal Score (−7.5) : −5.63 | | |
| Possible site: 25 | | |
| >>> Seems to have an uncleavable N-term signal seq | | |
| ALOM program count: 5 | value: −12.26 | threshold: 0.0 |

| | | | |
|---|---|---|---|
| INTEGRAL | Likelihood = −12.26 | Transmembrane | 276-292 (270-297) |
| INTEGRAL | Likelihood = −4.62 | Transmembrane | 10-26 (9-28) |
| INTEGRAL | Likelihood = −4.14 | Transmembrane | 41-57 (39-58) |
| INTEGRAL | Likelihood = −3.24 | Transmembrane | 100-116 (100-116) |
| INTEGRAL | Likelihood = −3.08 | Transmembrane | 445-461 (443-461) |
| PERIPHERAL | Likelihood = 2.23 | 221 | |

modified ALOM score: 2.95
*** Reasoning Step: 3
----- Final Results -----
bacterial membrane --- Certainty = 0.5904 (Affirmative) < succ>
bacterial outside --- Certainty = 0.0000 (Not Clear) < succ>
bacterial cytoplasm --- Certainty = 0.0000 (Not Clear) < succ>

[5125] Based on this analysis, it was predicted that these proteins and their epitopes could be useful antigens for vaccines or diagnostics.

### EXAMPLE 910

[5126] A DNA sequence (GBSx0965) was identified in S. agalactiae <SEQ ID 2773> which encodes the amino acid sequence <SEQ ID 2774>. This protein is predicted to be CpsF. Analysis of this protein sequence reveals the following:

| Possible site: 13 | | | |
|---|---|---|---|
| >>> Seems to have no N-terminal signal sequence | | | |
| INTEGRAL | Likelihood = −2.60 | Transmembrane | 79-95 (78-95) |

----- Final Results -----
bacterial membrane --- Certainty = 0.2041 (Affirmative) < succ>
bacterial outside --- Certainty = 0.0000 (Not Clear) < succ>
bacterial cytoplasm --- Certainty = 0.0000 (Not Clear) < succ>

[5127] No corresponding DNA sequence was identified in S. pyogenes.

[5128] Based on this analysis, it was predicted that this protein and its epitopes, could be useful antigens for vaccines or diagnostics.

### EXAMPLE 911

[5129] A DNA sequence (GBSx0966) was identified in S. agalactiae <SEQ ID 2775> which encodes the amino acid sequence <SEQ ID 2776>. This protein is predicted to be galactosyltransferase. Analysis of this protein sequence reveals the following:

Possible site: 39
>>> Seems to have no N-terminal signal sequence
----- Final Results -----
bacterial cytoplasm --- Certainty = 0.4634 (Affirmative) < succ>
bacterial membrane --- Certainty = 0.0000 (Not Clear) < succ>
bacterial outside --- Certainty = 0.0000 (Not Clear) < succ>

[5130] No corresponding DNA sequence was identified in S. pyogenes.

[5131] Based on this analysis, it was predicted that this protein and its epitopes, could be useful antigens for vaccines or diagnostics.

### EXAMPLE 912

[5132] A DNA sequence (GBSx0967) was identified in S. agalactiae <SEQ ID 2777> which encodes the amino acid sequence <SEQ ID 2778>. Analysis of this protein sequence reveals the following:

| Possible site: 23 | | | |
|---|---|---|---|
| >>> Seems to have an uncleavable N-term signal seq | | | |
| INTEGRAL | Likelihood = −12.47 | Transmembrane | 59-75 (54-82) |
| INTEGRAL | Likelihood = −10.88 | Transmembrane | 309-325 (307-332) |
| INTEGRAL | Likelihood = −8.07 | Transmembrane | 33-49 (28-53) |
| INTEGRAL | Likelihood = −6.48 | Transmembrane | 195-211 (187-212) |
| INTEGRAL | Likelihood = −6.16 | Transmembrane | 285-301 (283-306) |
| INTEGRAL | Likelihood = −4.09 | Transmembrane | 222-238 (221-240) |
| INTEGRAL | Likelihood = −3.50 | Transmembrane | 78-94 (77-96) |
| INTEGRAL | Likelihood = −2.71 | Transmembrane | 101-117 (99-117) |
| INTEGRAL | Likelihood = −2.44 | Transmembrane | 8-24 (7-25) |
| INTEGRAL | Likelihood = −1.59 | Transmembrane | 147-163 (147-164) |
| INTEGRAL | Likelihood = −0.48 | Transmembrane | 168-184 (168-184) |

----- Final Results -----
bacterial membrane --- Certainty = 0.5989 (Affirmative) < succ>
bacterial outside --- Certainty = 0.0000 (Not Clear) < succ>
bacterial cytoplasm --- Certainty = 0.0000 (Not Clear) < succ>

[5133] The protein has homology with the following sequences in the GENPEPT database.

| >GP: CAB43614 GB: AJ239004 polysaccharide polymerase [Streptococcus | | | |
|---|---|---|---|
| pneumoniae] | | | |
| Identities = 74/309 (23%), Positives = 137/309 (43%), Gaps = 36/309 (11%) | | | |
| Query: | 53 | FERRKLV---IIFLLFIATILNLFFVHKVTFILTLIFFLALKDI--SLKKAFSIIIGSRI | 107 |
| | | FE+RK II ++ I T+L + ++ +F+ + I L++ II | |
| Sbjct: | 61 | FEKRKYTLQFIISIILITTLLLYTSIQMQNYVYFTSWFMLIGTIHYDLRRVIKIIFIVS- | 119 |
| Query: | 108 | LGVLLNQIFVKLDLIEIKY-----VNFYRDGQFILRSDLGFGHPNFIHNFFALTIFLYIV | 162 |
| | | L ++ IF+ L + I Y +N R+ + + GF HPN + ++I | |
| Sbjct: | 120 | LSIMFISIFISLLMYIIDYKREILINIRRN-ETVRAFTFGFIHPNKFTIVLSNLCLMFIW | 178 |
| Query: | 163 | LNYKRLKPVVMVLFLTLNYLLYQYTFSRTGYYIVILFIVLIYVTKNSLIKRVFMKLAPYV | 222 |
| | | L RLK + L + Y +T +RT + I+ L+Y+ ++ + ++ Y | |
| Sbjct: | 179 | LIKDRLKYYHVTFCLFIQLFFYFFTQTRTALLVSIVIFALLYI--YMFVENLELRWIGYS | 236 |
| Query: | 223 | QFFLLVFTFLSSTIFFNSN--FVQKLDVLLTGRLHY-AHLQLVDGLTPFGNSFKE----- | 274 |
| | | F + F + + F+ SN F +D +LTGR+ A+ + G T +G + | |
| Sbjct: | 237 | FFCISTFLGVLAFQFYPSNNKFSIFIDNILTGRIKLAAYARTFFGYTFWGQYVDKEIVWD | 296 |
| Query: | 275 | -----TSVLFDNSYSMLLSMYGVVLTMFCMIIY-----YIYSKKIIIIELQLLLFIMSII | 324 |
| | | TS FD+ YS L+S G++ + +++ Y+ +K +I+ LL + M + | |
| Sbjct: | 297 | PIWGLTSFTFDSFYSFLMSNAGIIWLLILSVLFVKLQKYLDNKSLIL----LLAWSMYAV | 352 |
| Query: | 325 | LFTESFYPS | 333 |
| | | T+ +PS | |
| Sbjct: | 353 | TETDLIFPS | 361 |

[5134] No corresponding DNA sequence was identified in S. pyogenes.

[5135] Based on this analysis, it was predicted that this protein and its epitopes, could be useful antigens for vaccines or diagnostics.

### EXAMPLE 913

[5136] A DNA sequence (GBSx0968) was identified in S. agalactiae <SEQ ID 2779> which encodes the amino acid sequence <SEQ ID 2780>. This protein is predicted to be cap8J. Analysis of this protein sequence reveals the following:

Possible site: 57
>>> Seems to have no N-terminal signal sequence
----- Final Results -----
bacterial cytoplasm --- Certainty = 0.3424 (Affirmative) < succ>
bacterial membrane --- Certainty = 0.0000 (Not Clear) < succ>
bacterial outside --- Certainty = 0.0000 (Not Clear) < succ>

[5137] The protein has homology with the following sequences in the GENPEPT database.

| >GP: CAB43613 GB: AJ239004 cap8J [Streptococcus pneumoniae] | | | |
|---|---|---|---|
| Identities = 94/237 (39%), Positives = 135/237 (56%), Gaps = 10/237 (4%) | | | |
| Query: | 1 | MIPKVIHYCWFGGNPLPDNLKKYIKTWREQCPDYEIIEWNEHNYDVSKNVFMREAYTKKN | 60 |
| | | MIPK IHY WFGG+ PD + K I +W++ PDYEI+EWNE N+D+S + F + AY + | |
| Sbjct: | 1 | MIPKKIHYIWFGGSEKPDVVLKCINSWKKYMPDYEIVEWNEDNFDLSDSQFAKSAYESRK | 60 |
| Query: | 61 | FAYVSDYARLDIIYTYGGFYLDTDVELLKSL-DPLRIHECFLAREISCDVNTGLIIGAVK | 119 |
| | | +A+ SDYAR I+ YGG Y DTDVELLK++ D + H F E +VN GL+ + | |
| Sbjct: | 61 | WAFASDYARFKILSKYGGIYFDTDVELLKTISDDILAHSSFTGFEYIGEVNPGLVYACMP | 120 |
| Query: | 120 | GHHFLKSNMSIYDKS--DLTSLNKTCVEVTTNLLINRGLKNKNIIQKIDDITIYPRNYFN | 177 |
| | | K + Y+++ D+ L T + T+ L+ + N Q ID + IYP +YF | |
| Sbjct: | 121 | DDKIAKYMVQYYEQASFDINHL-VTVNTIITDYLLKNNFQKNNQFQIIDGLAIYPDDYFC | 179 |
| Query: | 178 | PKNLLTGKVDCLTSVTYSIHHYEGSWKSSSFISDSLKIRVRLIIDFLFGYGTYRMLL | 234 |
| | | + +V LT T SIHHY +WK+ +LK +V++I+ + G YR LL | |
| Sbjct: | 180 | GYDQEVKEVR-LTERTISIHHYSATWKTR-----TLKRKVQMIVKTIIGAENYRKLL | 230 |

[5138] No corresponding DNA sequence was identified in S. pyogenes.

[5139] Based on this analysis, it was predicted that this protein and its epitopes, could be useful antigens for vaccines or diagnostics.

### EXAMPLE 914

[5140] A DNA sequence (GBSx0969) was identified in S. agalactiae <SEQ ID 2781> which encodes the amino acid sequence <SEQ ID 2782>. Analysis of this protein sequence reveals the following:

Possible site: 44
>>> Seems to have no N-terminal signal sequence
----- Final Results -----
bacterial cytoplasm --- Certainty = 0.3897 (Affirmative) < succ>
bacterial membrane --- Certainty = 0.0000 (Not Clear) < succ>
bacterial outside --- Certainty = 0.0000 (Not Clear) < succ>

[5141] The protein has homology with the following sequences in the GENPEPT database.

| >GP: CAA87700 GB: Z47767 WbcL [Yersinia enterocolitica] | | | |
|---|---|---|---|
| Identities = 60/207 (28%), Positives = 101/207 (47%), Gaps = 22/207 (10%) | | | |
| Query: | 4 | IFTPTFNRGYRLSYLYDSLCNQTNKNFIWLIVDDGSEDSTKEIVSNYIKENKVSIVYLYK | 63 |
| | | +FTPTFNR + L Y S+ Q + WLIVDDGS D+T E+V ++ ENK++I Y+Y+ | |
| Sbjct: | 6 | VFTPTFNRAHVLKRCYLSILEQDRDDIEWLIVDDGSTDNTAEVVDSFKIENKLNIKYIYQ | 65 |
| Query: | 64 | RNGGKHSAYNLAMRYMQPSDYHVCVDSDDWLLEDAV------EIIFKDLESLTLSNRYVG | 117 |
| | | N GK +A+N A+ +Y + +DSDD + ++ +F D E + + | |
| Sbjct: | 66 | DNSGKQAAWNKAVENAS-GEYFIGLDSDDAFIAGSINKLLSMNAVFDDKEIIGIR----A | 120 |
| Query: | 118 | LVYPRYSLNQGNNWLNPKILEVNIPDLKYKYHLKIETCIVINNAYLVDFEFPCFEGENFL | 177 |
| | | + +L N +L+ + + + D ++ ++ E L + +P G NF+ | |
| Sbjct: | 121 | ISVSSETLKPNNYYLSNEDKKSSWFD-EFSSGIRGERIDFFKTELLRKYLYPVASGINFI | 179 |
| Query: | 178 | SEEIMYIYLSKKGYFCPQNRKIYCFDY | 204 |
| | | E Y ++K+ YCF Y | |
| Sbjct: | 180 | PEIWFYSTVAKE----------YCFYY | 196 |

[5142] No corresponding DNA sequence was identified in S. pyogenes.

[5143] Based on this analysis, it was predicted that this protein and its epitopes, could be useful antigens for vaccines or diagnostics.

### EXAMPLE 915

[5144] A DNA sequence (GBSx0970) was identified in S. agalactiae <SEQ ID 2783> which encodes the amino acid sequence <SEQ ID 2784>. This protein is predicted to be eps7. Analysis of this protein sequence reveals the following:

| Possible site: 32 | | | |
|---|---|---|---|
| >>> Seems to have an uncleavable N-term signal seq | | | |
| INTEGRAL | Likelihood = −2.18 | Transmembrane | 190-206 (189-206) |

----- Final Results -----
bacterial membrane --- Certainty = 0.1871 (Affirmative) < succ>
bacterial outside --- Certainty = 0.0000 (Not Clear) < succ>
bacterial cytoplasm --- Certainty = 0.0000 (Not Clear) < succ>

[5145] The protein has homology with the following sequences in the GENPEPT database.

| >GP: CAB59293 GB: AJ131984 putative galactosyl transferase | | | |
|---|---|---|---|
| [Streptococcus pneumoniae] | | | |
| Identities = 101/312 (32%), Positives = 172/312 (54%), Gaps = 4/312 (1%) | | | |
| Query: | 3 | LISIIVPVYNGEIYIGRCLDSILEQTYQNLEIIIIDDGSSDRTGDICEKYFLEDRRIKYF | 62 |
| | | +IS+IVPVYN Y+ LDS+LEQTY++ E+I+++DGS+D +G+IC++Y I F | |
| Sbjct: | 1 | MISVIVPVYNVADYLRFALDSLLEQTYKDFEVILVNDGSTDNSGEICDEYGKLYDNIHVF | 60 |
| Query: | 63 | YQENRGQSVARNNGVLRCTGDWIAFLDSDDVYLPYSIEVMYNIQKATNADIVLT--SIGN | 120 |
| | | +++N G S ARN G+ + G++I FLDSDD + PY++E++ IQK + DIV T I | |
| Sbjct: | 61 | HKKNGGLSDARNFGLEKSRGEFITFLDSDDYFEPYALELLITIQKKYDVDIVSTKGGITY | 120 |
| Query: | 121 | FNNTYNTSINSQYLKEIKLYTLEVALEEMYYGKTYGVSPLAKLYPRSNLLSNPYPEGKIH | 180 |
| | | ++ Y+ + ++ +K+ T + L +YY VS KLY R +L +P+GKI+ | |
| Sbjct: | 121 | SHDIYSKKLMAEDYLTVKILTNKEFLAAVYYNDEMTVSAWGKLYKR-DLFKTIFPKGKIY | 179 |
| Query: | 181 | EDMDTTFKLISCASKIAVCDIVTAVVYFSDNSTTRTKFNERMLYFFEAIQNNIVFINLNF | 240 |
| | | ED+ + + +A D+ Y S + F++R FF+AI +N I + | |
| Sbjct: | 180 | EDLYVVAERLLNIKTVAHTDLPIYHYYQRQGSIVNSTFSDRQYDFFDAIDHNEAIIKKFY | 239 |
| Query: | 241 | PHNTSLISAVIYNEVFGGIDICGKMIDFKLYDTVDYYRKKYRKYFKTILFNNRISVKEKV | 300 |
| | | + L++A+ V G I + + + + + Y+ ++ N +I +K KV | |
| Sbjct: | 240 | CGDKELLAALNAKRVIGSF-ILSNSAFYNSKNDITKIIRIIKPYYWEVIKNKKIPMKRKV | 298 |
| Query: | 301 | KYILFISSIRYF | 312 |
| | | + +LF+ S Y+ | |
| Sbjct: | 299 | QCVLFLLSPNYY | 310 |

[5146] Based on this analysis, it was predicted that this protein and its epitopes, could be useful antigens for vaccines or diagnostics.

### EXAMPLE 916

[5147] A DNA sequence (GBSx0971) was identified in S. agalactiae <SEQ ID 2785> which encodes the amino acid sequence <SEQ ID 2786>. This protein is predicted to be galactosyltransferase. Analysis of this protein sequence reveals the following:

Possible site: 26
>>> Seems to have an uncleavable N-term signal seq
----- Final Results -----
bacterial membrane --- Certainty = 0.0000 (Not Clear) < succ>
bacterial outside --- Certainty = 0.0000 (Not Clear) < succ>
bacterial cytoplasm --- Certainty = 0.0000 (Not Clear) < succ>

[5148] A related DNA sequence was identified in S. pyogenes <SEQ ID 2787> which encodes the amino acid sequence <SEQ ID 2788>. Analysis of this protein sequence reveals the following:

Possible site: 28
>>> Seems to have no N-terminal signal sequence
----- Final Results -----
bacterial cytoplasm --- Certainty = 0.2065 (Affirmative) < succ>
bacterial membrane --- Certainty = 0.0000 (Not Clear) < succ>
bacterial outside --- Certainty = 0.0000 (Not Clear) < succ>

[5149] An alignment of the GAS and GBS proteins is shown below.

| Identities = 37/111 (33%), Positives = 61/111 (54%), Gaps = 3/111 (2%) | | | |
|---|---|---|---|
| Query: | 1 | MDKVSIIIPVYNVQSFLNECIESVLAQ-TYSNLEIILVNDGSTDNSGDIC-DYYSEIDGR | 58 |
| | | M KVSII YN ++++ ++S L+Q T +EII+++D STD+S +I Y + G+ | |
| Sbjct: | 1 | MYKVSIICTNYNKAPWISDALDSFLSQVTDFEVEIIVIDDASTDDSREILKSYQKKSSGK | 60 |
| Query: | 59 | I-FVFHKNNGGLSDARNYGISRATGDYIYLLDSDDYLYKEDAIERMVEFSE | 108 |
| | | I +F++ N G++ A G YI D DDY +++ V+ E | |
| Sbjct: | 61 | IKLLFNETNIGITKTWIKACLYAKGKYIARCDGDDYWTDSFKLQKQVDVLE | 111 |

[5150] Based on this analysis, it was predicted that these proteins and their epitopes could be useful antigens for vaccines or diagnostics.

### EXAMPLE 917

[5151] A DNA sequence (GBSx0972) was identified in S. agalactiae <SEQ ID 2789> which encodes the amino acid sequence <SEQ ID 2790>. This protein is predicted to be CpsK. Analysis of this protein sequence reveals the following:

Possible site: 52
>>> Seems to have an uncleavable N-term signal seq
----- Final Results -----
bacterial membrane --- Certainty = 0.0000 (Not Clear) < succ>
bacterial outside --- Certainty = 0.0000 (Not Clear) < succ>
bacterial cytoplasm --- Certainty = 0.0000 (Not Clear) < succ>

[5152] No corresponding DNA sequence was identified in S. pyogenes.

[5153] Based on this analysis, it was predicted that this protein and its epitopes, could be useful antigens for vaccines or diagnostics.

### EXAMPLE 918

[5154] A DNA sequence (GBSx0973) was identified in S. agalactiae <SEQ ID 2791> which encodes the amino acid sequence <SEQ ID 2792>. Analysis of this protein sequence reveals the following:

Possible site: 31
>>> Seems to have no N-terminal signal sequence
----- Final Results -----
bacterial cytoplasm --- Certainty = 0.1956 (Affirmative) < succ>
bacterial membrane --- Certainty = 0.0000 (Not Clear) < succ>
bacterial outside --- Certainty = 0.0000 (Not Clear) < succ>

[5155] The protein has no significant homology with any sequences in the GENPEPT database.

[5156] No corresponding DNA sequence was identified in S. pyogenes.

[5157] Based on this analysis, it was predicted that this protein and its epitopes, could be useful antigens for vaccines or diagnostics.

### EXAMPLE 919

[5158] A DNA sequence (GBSx0974) was identified in S. agalactiae <SEQ ID 2793> which encodes the amino acid sequence <SEQ ID 2794>. This protein is predicted to be capsular polysaccharide. Analysis of this protein sequence reveals the following:

| Possible site: 36 | | | |
|---|---|---|---|
| >>> Seems to have an uncleavable N-term signal seq | | | |
| INTEGRAL | Likelihood = −8.81 | Transmembrane | 89-105 (80-112) |
| INTEGRAL | Likelihood = −7.01 | Transmembrane | 439-455 (428-460) |
| INTEGRAL | Likelihood = −6.74 | Transmembrane | 322-338 (317-342) |
| INTEGRAL | Likelihood = −4.88 | Transmembrane | 175-191 (174-195) |
| INTEGRAL | Likelihood = −3.45 | Transmembrane | 146-162 (145-166) |
| INTEGRAL | Likelihood = −3.08 | Transmembrane | 381-397 (375-398) |
| INTEGRAL | Likelihood = −2.50 | Transmembrane | 413-429 (412-430) |
| INTEGRAL | Likelihood = −1.91 | Transmembrane | 206-222 (205-222) |
| INTEGRAL | Likelihood = −1.59 | Transmembrane | 354-370 (354-372) |
| INTEGRAL | Likelihood = −1.54 | Transmembrane | 43-59 (43-61) |
| INTEGRAL | Likelihood = −0.22 | Transmembrane | 252-268 (252-268) |

----- Final Results -----
bacterial membrane --- Certainty = 0.4524 (Affirmative) < succ>
bacterial outside --- Certainty = 0.0000 (Not Clear) < succ>
bacterial cytoplasm --- Certainty = 0.0000 (Not Clear) < succ>

[5159] No corresponding DNA sequence was identified in S. pyogenes.

[5160] Based on this analysis, it was predicted that this protein and its epitopes, could be useful antigens for vaccines or diagnostics.

### EXAMPLE 920

[5161] A DNA sequence (GBSx0975) was identified in S. agalactiae <SEQ ID 2795> which encodes the amino acid sequence <SEQ ID 2796>. This protein is predicted to be NeuB. Analysis of this protein sequence reveals the following:

Possible site: 30
>>> Seems to have no N-terminal signal sequence
----- Final Results -----
bacterial cytoplasm --- Certainty = 0.2992 (Affirmative) < succ>
bacterial membrane --- Certainty = 0.0000 (Not Clear) < succ>
bacterial outside --- Certainty = 0.0000 (Not Clear) < succ>

[5162] No corresponding DNA sequence was identified in S. pyogenes.

[5163] Based on this analysis, it was predicted that this protein and its epitopes, could be useful antigens for vaccines or diagnostics.

### EXAMPLE 921

[5164] A DNA sequence (GBSx0976) was identified in S. agalactiae <SEQ ID 2797> which encodes the amino acid sequence <SEQ ID 2798>. This protein is predicted to be NeuC. Analysis of this protein sequence reveals the following:

Possible site: 41
>>> Seems to have no N-terminal signal sequence
----- Final Results -----
bacterial cytoplasm --- Certainty = 0.3150 (Affirmative) < succ>
bacterial membrane --- Certainty = 0.0000 (Not Clear) < succ>
bacterial outside --- Certainty = 0.0000 (Not Clear) < succ>

[5165] No corresponding DNA sequence was identified in S. pyogenes.

[5166] Based on this analysis, it was predicted that this protein and its epitopes, could be useful antigens for vaccines or diagnostics.

### EXAMPLE 922

[5167] A DNA sequence (GBSx0977) was identified in S. agalactiae <SEQ ID 2799> which encodes the amino acid sequence <SEQ ID 2800>. This protein is predicted to be neuD. Analysis of this protein sequence reveals the following:

Possible site: 16
>>> Seems to have no N-terminal signal sequence
----- Final Results -----
bacterial membrane --- Certainty = 0.0000 (Not Clear) < succ>
bacterial outside --- Certainty = 0.0000 (Not Clear) < succ>
bacterial cytoplasm --- Certainty = 0.0000 (Not Clear) < succ>

[5168] There is homology to SEQ ID 542.

[5169] Based on this analysis, it was predicted that this protein and its epitopes, could be useful antigens for vaccines or diagnostics.

### EXAMPLE 923

[5170] A DNA sequence (GBSx0979) was identified in S. agalactiae <SEQ ID 2801> which encodes the amino acid sequence <SEQ ID 2802>. Analysis of this protein sequence reveals the following:

Possible site: 33
>>> Seems to have no N-terminal signal sequence
----- Final Results -----
bacterial cytoplasm --- Certainty = 0.2576 (Affirmative) < succ>
bacterial membrane --- Certainty = 0.0000 (Not Clear) < succ>
bacterial outside --- Certainty = 0.0000 (Not Clear) < succ>

[5171] No corresponding DNA sequence was identified in S. pyogenes.

[5172] Based on this analysis, it was predicted that this protein and its epitopes, could be useful antigens for vaccines or diagnostics.

### EXAMPLE 924

[5173] A DNA sequence (GBSx0980) was identified in S. agalactiae <SEQ ID 2803> which encodes the amino acid sequence <SEQ ID 2804>. Analysis of this protein sequence reveals the following:

Possible site: 49
>>> Seems to have no N-terminal signal sequence
----- Final Results -----
bacterial cytoplasm --- Certainty = 0.1621 (Affirmative) < succ>
bacterial membrane --- Certainty = 0.0000 (Not Clear) < succ>
bacterial outside --- Certainty = 0.0000 (Not Clear) < succ>

[5174] A related GBS nucleic acid sequence <SEQ ID 9875> which encodes amino acid sequence <SEQ ID 9876> was also identified.

[5175] A related DNA sequence was identified in S. pyogenes <SEQ ID 2805> which encodes the amino acid sequence <SEQ ID 2806>. Analysis of this protein sequence reveals the following:

Possible site: 51
>>> Seems to have no N-terminal signal sequence
----- Final Results -----
bacterial cytoplasm --- Certainty = 0.1066 (Affirmative) < succ>
bacterial membrane --- Certainty = 0.0000 (Not Clear) < succ>
bacterial outside --- Certainty = 0.0000 (Not Clear) < succ>

[5176] An alignment of the GAS and GBS proteins is shown below.

| Identities = 83/139 (59%), Positives = 111/139 (79%) | | | |
|---|---|---|---|
| Query: | 6 | TETHDHQALIQKLLVSIHYLTLFRDEIILVEKTPSLLGKHFSIAIVQNELGEILSKIEAL | 65 |
| | | TE + HQ LIQKLLVSIHYLTLFRDE+ LVE+TPS+LG F +VQ+ELG+I++ I+ L | |
| Sbjct: | 4 | TEQNSHQILIQKLLVSIHYLTLFRDELKLVERTPSILGGEFPAHLVQSELGDIVAAIDTL | 63 |
| Query: | 66 | SKQKKLIRSIYWYDESSFKVMNKALAIVEEWIKGLDNLLEFCQSQTVFQAILGDERAHVF | 125 |
| | | Q++LI S +WY+ES+FK+MNK L IV+ WIKG+D+L++ CQS+ VFQ I+GD+R VF | |
| Sbjct: | 64 | DMQQRLIESTFWYEESAFKLMNKTLDIVDNWIKGVDHLIDLCQSKEVFQIIIGDKRIRVF | 123 |
| Query: | 126 | GILIDVYTSLNIINTSLKE | 144 |
| | | G+L DV++SL + SLKE | |
| Sbjct: | 124 | GVLSDVFSSLKVSALSLKE | 142 |

[5177] Based on this analysis, it was predicted that these proteins and their epitopes could be useful antigens for vaccines or diagnostics.

### EXAMPLE 925

[5178] A DNA sequence (GBSx0981) was identified in S. agalactiae <SEQ ID 2807> which encodes the amino acid sequence <SEQ ID 2808>. This protein is predicted to be uracil-DNA glycosylase (ung). Analysis of this protein sequence reveals the following:

Possible site: 34
>>> Seems to have no N-terminal signal sequence
----- Final Results -----
bacterial cytoplasm --- Certainty = 0.3427 (Affirmative) < succ>
bacterial membrane --- Certainty = 0.0000 (Not Clear) < succ>
bacterial outside --- Certainty = 0.0000 (Not Clear) < succ>

[5179] A related DNA sequence was identified in S. pyogenes <SEQ ID 2809> which encodes the amino acid sequence <SEQ ID 28110>. Analysis of this protein sequence reveals the following:

Possible site: 33
>>> Seems to have no N-terminal signal sequence
----- Final Results -----
bacterial cytoplasm --- Certainty = 0.4200 (Affirmative) < succ>
bacterial membrane --- Certainty = 0.0000 (Not Clear) < succ>
bacterial outside --- Certainty = 0.0000 (Not Clear) < succ>

[5180] An alignment of the GAS and GBS proteins is shown below.

| Identities = 160/216 (74%), Positives = 185/216 (85%) | | | |
|---|---|---|---|
| Query: | 1 | MKHSSWHDLIKRELPNHYYNKINTFMDAVYESGIVYPPRDKVFNAIQITPLENVKVVIIG | 60 |
| | | M HS WH+ IK LP HYY +IN F+D Y SG+VYPPR+ VF A+Q+TPLE KV+I+G | |
| Sbjct: | 1 | MAHSIWHEKIKSFLPEHYYGRINHFLDEAYASGLVYPPRENVFKALQVTPLEETKVLILG | 60 |
| Query: | 61 | QDPYHGPQQAQGLSFSVPDNLPAPPSLQNILKELAEDIGSRSHHDLTSWAQQGVLLLNAC | 120 |
| | | QDPYHGP+QAQGLSFSVP+ + APPSL NILKELA+DIG R HHDL++WA QGVLLLNAC | |
| Sbjct: | 61 | QDPYHGPKQAQGLSFSVPEEISAPPSLINILKELADDIGPRDHHDLSTWASQGVLLLNAC | 120 |
| Query: | 121 | LTVPEHQANGHAGLIWEPFTDAVIKVVNQKETPVVFILWGGYARKKKSLIDNPIHHIIES | 180 |
| | | LTVP QANGHAGLIWEPFTDAVIKV+N+K++PVVFILWG YARKKK+ I NP HHIIES | |
| Sbjct: | 121 | LTVPAGQANGHAGLIWEPFTDAVIKVLNEKDSPVVFILWGAYARKKKAFITNPKHHIIES | 180 |
| Query: | 181 | PHPSPLSAYRGFFGSRPFSRTNHFLEEEGINEIDWL | 216 |
| | | PHPSPLS+YRGFFGS+PFSRTN LE+EG+ +DWL | |
| Sbjct: | 181 | PHPSPLSSYRGFFGSKPFSRTNAILEKEGMTGVDWL | 216 |

[5181] Based on this analysis, it was predicted that these proteins and their epitopes could be useful antigens for vaccines or diagnostics.

### EXAMPLE 926

[5182] A DNA sequence (GBSx0982) was identified in S. agalactiae <SEQ ID 2811> which encodes the amino acid sequence <SEQ ID 2812>. Analysis of this protein sequence reveals the following:

| Possible site: 20 | | | |
|---|---|---|---|
| >>> Seems to have an uncleavable N-term signal seq | | | |
| INTEGRAL | Likelihood = −11.15 | Transmembrane | 147-163 (109-166) |
| INTEGRAL | Likelihood = −8.92 | Transmembrane | 124-140 (109-146) |
| INTEGRAL | Likelihood = −6.16 | Transmembrane | 167-183 (166-186) |
| INTEGRAL | Likelihood = −4.67 | Transmembrane | 3-19 (1-23) |
| INTEGRAL | Likelihood = −3.98 | Transmembrane | 72-88 (64-92) |
| INTEGRAL | Likelihood = −1.06 | Transmembrane | 106-122 (105-122) |
| INTEGRAL | Likelihood = −0.90 | Transmembrane | 54-70 (54-70) |

----- Final Results -----
bacterial membrane --- Certainty = 0.5458 (Affirmative) < succ>
bacterial outside --- Certainty = 0.0000 (Not Clear) < succ>
bacterial cytoplasm --- Certainty = 0.0000 (Not Clear) < succ>

[5183] A related GBS nucleic acid sequence <SEQ ID 9873> which encodes amino acid sequence <SEQ ID 9874> was also identified.

[5184] The protein has homology with the following sequences in the GENPEPT database.

| >GP: CAA91549 GB: Z67739 unidentified [Streptococcus pneumoniae] | | | |
|---|---|---|---|
| Identities = 134/212 (63%), Positives = 168/212 (79%) | | | |
| Query: | 1 | MNIIIMIIIAYLLGSIQTGLWIGKYFYQVNLRQHGSGNTGTTNTFRILGVKAGIVTLTID | 60 |
| | | M I+++I+AYLLGSI +GLWIG+ F+Q+NLR+HGSGNTGTTNTFRILG KAG+ T ID | |
| Sbjct: | 1 | MITIVLLILAYLLGSIPSGLWIGQVFFQINLREHGSGNTGTTNTFRILGKKAGMATFVID | 60 |
| Query: | 61 | ILKGTLATLIPIILGITTVSPFFIGFFAIIGHTFPIFAQFKGGKAVATSAGVLLGFAPSF | 120 |
| | | KGTLATL+PII + VSP G A+IGHTFPIFA FKGGKAVATSAGV+ GFAP F | |
| Sbjct: | 61 | FFKGTLATLLPIIFHLQGVSPLIFGLLAVIGHTFPIFAGFKGGKAVATSAGVIFGFAPIF | 120 |
| Query: | 121 | FLYLLVIFLLTLYLFSMISLSSITVAVVGILSVLIFPLVGFILTDYDWIFTTVVILMALT | 180 |
| | | LYL +IF LYL SMISLSS+T ++ ++ VL+FPL GFIL++YD++F +++ +A | |
| Sbjct: | 121 | CLYLAIIFFGALYLGSMISLSSVTASIAAVIGVLLFPLFGFILSNYDFLFIAIILALASL | 180 |
| Query: | 181 | IIIRHQDNIKRIRKRQENLVPFGLNLSKQKNK | 212 |
| | | IIIRH+DNI RI+ + ENLVP+GLNL+ Q K | |
| Sbjct: | 181 | IIIRHKDNIARIKNKTENLVPWGLNLTHQDPK | 212 |

[5185] A related DNA sequence was identified in S. pyogenes <SEQ ID 2813> which encodes the amino acid sequence <SEQ ID 2814>. Analysis of this protein sequence reveals the following:

| Possible site: 17 | | | |
|---|---|---|---|
| >>> Seems to have no N-terminal signal sequence | | | |
| INTEGRAL | Likelihood = −10.83 | Transmembrane | 194-210 (191-216) |
| INTEGRAL | Likelihood = −9.77 | Transmembrane | 146-162 (132-191) |
| INTEGRAL | Likelihood = −7.70 | Transmembrane | 165-181 (163-191) |
| INTEGRAL | Likelihood = −5.89 | Transmembrane | 23-39 (19-47) |
| INTEGRAL | Likelihood = −4.83 | Transmembrane | 95-111 (91-118) |

----- Final Results -----
bacterial membrane --- Certainty = 0.5331 (Affirmative) < succ>
bacterial outside --- Certainty = 0.0000 (Not Clear) < succ>
bacterial cytoplasm --- Certainty = 0.0000 (Not Clear) < succ>

[5186] The protein has homology with the following sequences in the databases:

| >GP: CAA91549 GB: Z67739 unidentified [Streptococcus pneumoniae] | | | |
|---|---|---|---|
| Identities = 138/213 (64%), Positives = 166/213 (77%) | | | |
| Query: | 28 | MKLLLFITIAYLLGSIPTGLWIGQYFYHINLREHGSGNTGTTNTFRILGVKAGTATLAID | 87 |
| | | M ++ + +AYLLGSIP+GLWIGQ F+ INLREHGSGNTGTTNTFRILG KAG AT ID | |
| Sbjct: | 1 | MITIVLLILAYLLGSIPSGLWIGQVFFQINLREHGSGNTGTTNTFRILGKKAGMATFVID | 60 |
| Query: | 88 | MFKGTLSILLPIIFGMTSISSIAIGFFAVLGHTFPIFANFKGGKAVATSAGVLLGFAPLY | 147 |
| | | FKGTL+ LLPIIF + +S + G AV+GHTFPIFA FKGGKAVATSAGV+ GFAP++ | |
| Sbjct: | 61 | FFKGTLATLLPIIFHLQGVSPLIFGLLAVIGHTFPIFAGFKGGKAVATSAGVIFGFAPIF | 120 |
| Query: | 148 | LFFLASIFVLVLYLFSMISLASVVSAIVGVLSVLTFPAIHFLLPNYDYFLTFIVILLAFI | 207 |
| | | +LA IF LYL SMISL+SV ++I V+ VL FP F+L NYD+ I++ LA + | |
| Sbjct: | 121 | CLYLAIIFFGALYLGSMISLSSVTASIAAVIGVLLFPLFGFILSNYDFLFIAIILALASL | 180 |
| Query: | 208 | IIIRHKDNISRIKHHTENLIPWGLNLSKQVPPK | 240 |
| | | IIIRHKDNI+RIK+ TENL+PWGLNL+ Q PKK | |
| Sbjct: | 181 | IIIRHKDNIARIKNKTENLVPWGLNLTHQDPKK | 213 |

[5187] An alignment of the GAS and GBS proteins is shown below.

| Identities = 143/212 (67%), Positives = 174/212 (81%) | | | |
|---|---|---|---|
| Query: | 1 | MNIIIMIIIAYLLGSIQTGLWIGKYFYQVNLRQHGSGNTGTTNTFRILGVKAGIVTLTID | 60 |
| | | M +++ I IAYLLGSI TGLWIG+YFY +NLR+HGSGNTGTTNTFRILGVKAG TL ID | |
| Sbjct: | 28 | MKLLLFITIAYLLGSIPTGLWIGQYFYHINLREHGSGNTGTTNTFRILGVKAGTATLAID | 87 |
| Query: | 61 | ILKGTLATLIPIILGITTVSPFFIGFFAIIGHTFPIFAQFKGGKAVATSAGVLLGFAPSF | 120 |
| | | + KGTL+ L+PII G+T++S IGFFA++GHTFPIFA FKGGKAVATSAGVLLGFAP + | |
| Sbjct: | 88 | MFKGTLSILLPIIFGMTSISSIAIGFFAVLGHTFPIFANFKGGKAVATSAGVLLGFAPLY | 147 |
| Query: | 121 | FLYLLVIFLLTLYLFSMISLSSITVAVVGILSVLIFPLVGFILTDYDWIFTTVVILMALT | 180 |
| | | +L IF+L LYLFSMISL+S+ A+VG+LSVL FP + F+L +YD+ T +VIL+A | |
| Sbjct: | 148 | LFFLASIFVLVLYLFSMISLASVVSAIVGVLSVLTFPAIHFLLPNYDYFLTFIVILLAFI | 207 |
| Query: | 181 | IIIRHQDNIKRIRKRQENLVPFGLNLSKQKNK | 212 |
| | | IIIRH+DNI RI+ ENL+P+GLNLSKQ K | |
| Sbjct: | 208 | IIIRHKDNISRIKHHTENLIPWGLNLSKQVPK | 239 |

[5188] Based on this analysis, it was predicted that these proteins and their epitopes could be useful antigens for vaccines or diagnostics.

### EXAMPLE 927

[5189] A DNA sequence (GBSx0983) was identified in S. agalactiae <SEQ ID 2815> which encodes the amino acid sequence <SEQ ID 2816>. Analysis of this protein sequence reveals the following:

Possible site: 18
>>> Seems to have an uncleavable N-term signal seq
----- Final Results -----
bacterial membrane --- Certainty = 0.0000 (Not Clear) < succ>
bacterial outside --- Certainty = 0.0000 (Not Clear) < succ>
bacterial cytoplasm --- Certainty = 0.0000 (Not Clear) < succ>

[5190] The protein has no significant homology with any sequences in the GENPEPT database.

[5191] No corresponding DNA sequence was identified in S. pyogenes.

[5192] Based on this analysis, it was predicted that this protein and its epitopes, could be useful antigens for vaccines or diagnostics.

### EXAMPLE 928

[5193] A DNA sequence (GBSx0984) was identified in S. agalactiae <SEQ ID 2817> which encodes the amino acid sequence <SEQ ID 2818>. Analysis of this protein sequence reveals the following:

Possible site: 56
>>> Seems to have no N-terminal signal sequence
----- Final Results -----
bacterial cytoplasm --- Certainty = 0.1585 (Affirmative) < succ>
bacterial membrane --- Certainty = 0.0000 (Not Clear) < succ>
bacterial outside --- Certainty = 0.0000 (Not Clear) < succ>

[5194] A related GBS nucleic acid sequence <SEQ ID 9871> which encodes amino acid sequence <SEQ ID 9872> was also identified.

[5195] The protein has homology with the following sequences in the GENPEPT database.

| >GP: CAA91550 GB: Z67739 DNA topoisomerase IV [Streptococcus | | | |
|---|---|---|---|
| pneumoniae] (ver 2) | | | |
| Identities = 574/649 (88%), Positives = 617/649 (94%), Gaps = 2/649 (0%) | | | |
| Query: | 5 | LAKQDITVTNYGDDAIQVLEGLDAVRKRPGMYIGSTDGTGLHHLVWEIVDNAVDEALSGF | 64 |
| | | ++K++I + NY DDAIQVLEGLDAVRKRPGMYIGSTDG GLHHLVWEIVDNAVDEALSGF | |
| Sbjct: | 1 | MSKKEININNYNDDAIQVLEGLDAVRKRPGMYIGSTDGAGLHHLVWEIVDNAVDEALSGF | 60 |
| Query: | 65 | GNRIDVIINKDGSITVTDHGRGMPTGMHAMGKPTVEVIFTVLHAGGKFGQGGYKTSGGLH | 124 |
| | | G+RIDV INKDGS+TV DHGRGMPTGMHAMG PTVEVIFT+LHAGGKFGQGGYKTSGGLH | |
| Sbjct: | 61 | GDRIDVTINKDGSLTVQDHGRGMPTGMHAMGIPTVEVIFTILHAGGKFGQGGYKTSGGLH | 120 |
| Query: | 125 | GVGSSVVNALSSWLEVEIIRDGAIYRQRFENGGKPVTTLKKIGTAPKSKSGTSVSFMPDQ | 184 |
| | | GVGSSVVNALSSWLEVEI RDGA+Y+QRFENGGKPVTTLKKIGTAPKSK+GT V+FMPD | |
| Sbjct: | 121 | GVGSSVVNALSSWLEVEITRDGAVYKQRFENGGKPVTTLKKIGTAPKSKTGTKVTFMPDA | 180 |
| Query: | 185 | SVFSTIDFKFNTIAERLKESAFLLKNVTLTLTDNRSEEAEHLEFHYENGVQDFVEYLNED | 244 |
| | | ++FST DFK+NTI+ERL ESAFLLKNVTL+LTD R++EA +EFHYENGVQDFV YLNED | |
| Sbjct: | 181 | TIFSTTDFKYNTISERLNESAFLLKNVTLSLTDKRTDEA--IEFHYENGVQDFVSYLNED | 238 |
| Query: | 245 | KETLTPIMFFEGEEQEFHIEVALQYNDGFSDNILSFVNNVRTKDGGTHETGLKSAITKSM | 304 |
| | | KE LTP+++FEGE+ F +EVALQYNDGFSDNILSFVNNVRTKDGGTHETGLKSAITK M | |
| Sbjct: | 239 | KEILTPVLYFEGEDNGFQVEVALQYNDGFSDNILSFVNNVRTKDGGTHETGLKSAITKVM | 298 |
| Query: | 305 | NDYARKTGLLKEKDKNLEGSDYREGLSAILSILVPEEHLQFEGQTKDKLGSPLARPIVDG | 364 |
| | | NDYARKTGLLKEKDKNLEGSDYREGL+A+LSILVPEEHLQFEGQTKDKLGSPLARP+VDG | |
| Sbjct: | 299 | NDYARKTGLLKEKDKNLEGSDYREGLAAVLSILVPEEHLQFEGQTKDKLGSPLARPVVDG | 358 |
| Query: | 365 | IVSEKLTYFLMENGDLASNLIRKAIKARDAREAARKARDESRNGKKSKKDKGLLSGKLTP | 424 |
| | | IV++KLT+FLMENG+LASNLIRKAIKARDAREAARKARDESRNGKK+KKDKGLLSGKLTP | |
| Sbjct: | 359 | IVADKLTFFLMENGELASNLIRKAIKARDAREAARKARDESRNGKKNKKDKGLLSGKLTP | 418 |
| Query: | 425 | AQSKNAKKNELYLVEGDSAGGSAKQGRDRKFQAILPLRGKVLNTAKAKMADIIKNEEINT | 484 |
| | | AQSKN KNELYLVEGDSAGGSAKQGRDRKFQAILPLRGKV+NTAKAKMADI+KNEEINT | |
| Sbjct: | 419 | AQSKNPAKNELYLVEGDSAGGSAKQGRDRKFQAILPLRGKVINTAKAKMADILKNEEINT | 478 |
| Query: | 485 | MHTIGAGVGPDFNLDDINYDKIIIMTDADTDGAHIQTLLLTFFYRYMRPLVEEGHVYIA | 544 |
| | | MI+TIGAGVG DF+++D NYDKIIIMTDADTDGAHIQTLLLTFFYRYMRPLVE GHVYIA | |
| Sbjct: | 479 | MIYTIGAGVGADFSIEDANYDKIIIMTDADTDGAHIQTLLLTFFYRYMRPLVEAGHVYIA | 538 |
| Query: | 545 | LPPLYKMSKGKGKKEIVEYAWTDIELEELRQKFGKGSLLQRYKGLGEMNADQLWETTMNP | 604 |
| | | LPPLYKMSKGKGKKE V YAWTD ELEELR++FGKG+ LQRYKGLGEMNADQLWETTMNP | |
| Sbjct: | 539 | LPPLYKMSKGKGKKEEVAYAWTDGELEELRKQFGKGATLQRYKGLGEMNADQLWETTMNP | 598 |
| Query: | 605 | ETRTLIRVTIEDLARAERRVNVLMGDKVPPRRQWIEDNVKFTLEENTVF | 653 |
| | | ETRTLIRVTIEDLARAERRVNVLMGDKV PRR+WIEDNVKFTLEE TVF | |
| Sbjct: | 599 | ETRTLIRVTIEDLARAERRVNVLMGDKVEPRRKWIEDNVKFTLEEATVF | 647 |

[5196] A related DNA sequence was identified in S. pyogenes <SEQ ID 2819> which encodes the amino acid sequence <SEQ ID 2820>. Analysis of this protein sequence reveals the following:

Possible site: 53
>>> Seems to have no N-terminal signal sequence
----- Final Results -----
bacterial cytoplasm --- Certainty = 0.1518 (Affirmative) < succ>
bacterial membrane --- Certainty = 0.0000 (Not Clear) < succ>
bacterial outside --- Certainty = 0.0000 (Not Clear) < succ>

[5197] An alignment of the GAS and GBS proteins is shown below.

| Identities = 560/649 (86%), Positives = 615/649 (94%) | | | |
|---|---|---|---|
| Query: | 5 | LAKQDITVTNYGDDAIQVLEGLDAVRKRPGMYIGSTDGTGLHHLVWEIVDNAVDEALSGF | 64 |
| | | L K++IT+ NY DDAIQVLEGLDAVRKRPGMYIGSTD TGLHHL+WEIVDNAVDEALSGF | |
| Sbjct: | 2 | LTKKEITINNYNDDAIQVLEGLDAVRKRPGMYIGSTDATGLHHLIWEIVDNAVDEALSGF | 61 |
| Query: | 65 | GNRIDVIINKDGSITVTDHGRGMPTGMHAMGKPTVEVIFTVLHAGGKFGQGGYKTSGGLH | 124 |
| | | G+ I V+INKDGS++V D GRGMPTG HAMG PTV+VIFT+LHAGGKFGQGGYKTSGGLH | |
| Sbjct: | 62 | GDDIKVVINKDGSVSVADSGRGMPTGQHAMGIPTVQVIFTILHAGGKFGQGGYKTSGGLH | 121 |
| Query: | 125 | GVGSSVVNALSSWLEVEIIRDGAIYRQRFENGGKPVTTLKKIGTAPKSKSGTSVSFMPDQ | 184 |
| | | GVGSSVVNALS+WLEVEI RDG++YRQRFENGGKPVTTLKK+GTAPKSKSGT V+FMPD | |
| Sbjct: | 122 | GVGSSVVNALSAWLEVEITRDGSVYRQRFENGGKPVTTLKKVGTAPKSKSGTVVTFMPDD | 181 |
| Query: | 185 | SVFSTIDFKFNTIAERLKESAFLLKNVTLTLTDNRSEEAEHLEFHYENGVQDFVEYLNED | 244 |
| | | +FSTIDFKFNTI+ERLKESAFLLKNV ++LTD R ++ EFHYENGVQDFVEYLNED | |
| Sbjct: | 182 | KIFSTIDFKFNTISERLKESAFLLKNVKMSLTDLRGDDPIIEEFHYENGVQDFVEYLNED | 241 |
| Query: | 245 | KETLTPIMFFEGEEQEFHIEVALQYNDGFSDNILSFVNNVRTKDGGTHETGLKSAITRSM | 304 |
| | | KETLTP+++ EG++Q+F +EVALQYNDGFSDNILSFVNNVRTKDGG+HETGLKSAITK+M | |
| Sbjct: | 242 | KETLTPVIYMEGQDQDFQVEVALQYNDGFSDNILSFVNNVRTKDGGSHETGLKSAITKAM | 301 |
| Query: | 305 | NDYARKTGLLKEKDKNLEGSDYREGLSAILSILVPEEHLQFEGQTKDKLGSPLARPIVDG | 364 |
| | | NDYARKT LLKEKDKNLEGSDYREGLSA+LSILVPE+HLQFEGQTKDKLGSPLARPIV+ | |
| Sbjct: | 302 | NDYARKTNLLKEKDKNLEGSDYREGLSAVLSILVPEQHLQFEGQTKDKLGSPLARPIVES | 361 |
| Query: | 365 | IVSEKLTYFLMENGDLASNLIRKAIKARDAREAARKARDESRNGKKSKKDKGLLSGKLTP | 424 |
| | | IVSEKLT+FL+ENG++AS+L+RKAIKARDAREAARKARD+SRNGKK+KKDKGLLSGKLTP | |
| Sbjct: | 362 | IVSEKLTFFLLENGEVASHLVRKAIKARDAREAARKARDDSRNGKKNKKDKGLLSGKLTP | 421 |
| Query: | 425 | AQSKNAKKNELYLVEGDSAGGSAKQGRDRKFQAILPLRGKVLNTAKAKMADIIKNEEINT | 484 |
| | | AQSKNAKKNELYLVEGDSAGGSAKQGRDRKFQAILPLRGKVLNT KAKMADI+KNEEINT | |
| Sbjct: | 422 | AQSKNAKKNELYLVEGDSAGGSAKQGRDRKFQAILPLRGKVLNTEKAKNADILKNEEINT | 481 |
| Query: | 485 | MIHTIGAGVGPDFNLDDINYDKIIIMTDADTDGAHIQTLLLTFFYRYMRPLVEEGHVYIA | 544 |
| | | M++TIGAGVG DFNL+DINYDKIIIMTDADTDGAHIQTLLLTFFYRYMRPLVE GHVYIA | |
| Sbjct: | 482 | MVYTIGAGVGADFNLEDINYDKIIIMTDADTDGAHIQTLLLTFFYRYMRPLVEAGHVYIA | 541 |
| Query: | 545 | LPPLYKMSKGKGKKEIVEYAWTDIELEELRQKFGKGSLLQRYKGLGEMNADQLWETTMNP | 604 |
| | | LPPLYKMSKGKGK E + YAWTD ELE+LR++FGKG++LQRYKGLGEMNA+QLWETTM+P | |
| Sbjct: | 542 | LPPLYKMSKGKGKTEKIAYAWTDGELEDLRREFGKGAILQRYKGLGEMNANQLWETTMDP | 601 |
| Query: | 605 | ETRTLIRVTIEDLARAERRVNVLMGDKVPPRRQWIEDNVKFTLEENTVF | 653 |
| | | ETRTLIRVTI+DLARAERRV+VLMGDK PRRQWIEDNVKFTLEENTVF | |
| Sbjct: | 602 | ETRTLIRVTIDDLARAERRVSVLMGDKAAPRRQWIEDNVKFTLEENTVF | 650 |

[5198] Based on this analysis, it was predicted that these proteins and their epitopes could be useful antigens for vaccines or diagnostics.

### EXAMPLE 929

[5199] A DNA sequence (GBSx0985) was identified in S. agalactiae <SEQ ID 2821> which encodes the amino acid sequence <SEQ ID 2822>. Analysis of this protein sequence reveals the following:

| Possible site: 49 | | | |
|---|---|---|---|
| >>> Seems to have no N-terminal signal sequence | | | |
| INTEGRAL | Likelihood = −0.80 | Transmembrane | 378-394 (378-394) |

----- Final Results -----
bacterial membrane --- Certainty = 0.1319 (Affirmative) < succ>
bacterial outside --- Certainty = 0.0000 (Not Clear) < succ>
bacterial cytoplasm --- Certainty = 0.0000 (Not Clear) < succ>

[5200] The protein has homology with the following sequences in the GENPEPT database.

| >GP: AAD34369 GB: AF129764 ParC [Streptococcus mitis] | | | |
|---|---|---|---|
| Identities = 640/820 (78%), Positives = 722/820 (88%), Gaps = 5/820 (0%) | | | |
| Query: | 1 | MSNIQNMSLEDIMGERFGRYSKYIIQERALPDIRDGLKPVQRRILYSMNKDGNTFEKGFR | 60 |
| | | MSNIQNMSLEDIMGERFGRYSKYIIQ+RALPDIRDGLKPVQRRILYSMNKDGNTF+K +R | |
| Sbjct: | 1 | MSNIQNMSLEDIMGERFGRYSKYIIQDRALPDIRDGLKPVQRRILYSMNKDGNTFDKSYR | 60 |
| Query: | 61 | KSAKSVGNVMGNFHPHGDSSIYDAMVRMSQDWKNRETLIEMHGNNGSMDGDPAAAMRYTE | 120 |
| | | KSAKSVGN+MGNFHPHGDSSIYDAMVRMSQDWKNRE L+EMHGNNGSMDGDP AAMRYTE | |
| Sbjct: | 61 | KSAKSVGNIMGNFHPHGDSSIYDAMVRMSQDWKNREILVEMHGNNGSMDGDPPAAMRYTE | 120 |
| Query: | 121 | ARLSEIAGYLLQDIDKNTVPFAWNFDDTEKEPTVLPAAFPNLLVNGATGISAGYATDIPP | 180 |
| | | ARLSEIAGYLLQDIDK TVPF+WNFDDTEKEPTVLPAAFPNLLVNG+TGISAGYATDTPP | |
| Sbjct: | 121 | ARLSEIAGYLLQDIDKKTVPFSWNFDDTEKEPTVLPAAFPNLLVNGSTGISAGYATDIPP | 180 |
| Query: | 181 | HNLAEVIDAVVYMIDHPKAKLDKLMEFLPGPDFPTGAIIQGKDEIRKAYETGKGRVAVRS | 240 |
| | | HNLAEVIDA VYMIDHP AK+DKLMEFLPGPDFPTG IIQG+DEI+KAYETGKGRV VRS | |
| Sbjct: | 181 | HNLAEVIDAAVYMIDHPTAKVDKLMEFLPGPDFPTGGIIQGRDEIKKAYETGKGRVVVRS | 240 |
| Query: | 241 | RTAIETLKGGKKQIIVTEIPYEVNKSVLVKRIDDVRVNNKVPGIAEVRDESDRDGLRIAI | 300 |
| | | +T IE LKGGK+QI++TEIPYE+NK+ LVK+IDDVRVN+KV GIAEVRDESDRDGLRIAI | |
| Sbjct: | 241 | KTEIEKLKGGKEQIVITEIPYEINKANLVKKIDDVRVNSKVAGIAEVRDESDRDGLRIAI | 300 |
| Query: | 301 | ELKKEADETIVLNYLFKYTDLQVNYNFNMVAIDDYTPKQVGLSRILTSYIAHRREIIIAR | 360 |
| | | ELKK+A+ +VLNYLFKYTDLQ+NYNFNMVAID++TP+QVG+ IL+SYIAHRRE+I+AR | |
| Sbjct: | 301 | ELKKDANTELVLNYLFKYTDLQINYNFNMVAIDNFTPRQVGIVPILSSYIAHRREVILAR | 360 |
| Query: | 361 | SKFDKEKAEKRLHIVEGLIRVLSILDEVIALIRASENKADAKENLKVSYEFSEAQAEAIV | 420 |
| | | S+FDKEKAEKRLHIVEGLIRV+SILDEVIALIRASENKADAKENLKVSY+F+E QAEAIV | |
| Sbjct: | 361 | SRFDKEKAEKRLHIVEGLIRVISILDEVIALIRASENKADAKENLKVSYDFTEEQAEAIV | 420 |
| Query: | 421 | TLQLYRLTNTDIVTLREEEEELRQQITMLKAIISDERTMYNVMKRELREVKKKFANTRRS | 480 |
| | | TLQLYRLTNTD+V L+EEE ELR++I ML AII DERTMYN+MK+ELREVKKKFA R S | |
| Sbjct: | 421 | TLQLYRLTNTDVVVLQEEEAELREKIAMLAAIIGDERTMYNLMKKELREVKKKFATPRLS | 480 |
| Query: | 481 | ELQELAETIEIDTASLIIEEDTYVSVTRGGYVKRTSPRSFNASTVDELGKREDDELIFVS | 540 |
| | | L++ A+ IEIDTASLI EEDTYVSVT+ GY+KRTSPRSF AST++E+GKR+DD LIFV | |
| Sbjct: | 481 | SLEDTAKAIEIDTASLIAEEDTYVSVTKAGYIKRTSPRSFAASTLEEIGKRDDDRLIFVQ | 540 |
| Query: | 541 | NAKTTQHLLMFTNLGNLAYRPVHELADIRWKDVGEHLSQNLVNFASNEEIIYAELVDDF- | 599 |
| | | +AKTTQHLLMFT LGN+ YRP+HELADIRWKD+GEHLSQ + NF +NEEI+Y E+VD F | |
| Sbjct: | 541 | SAKTTQHLLMFTTLGNVIYRPIHELADIRWKDIGEHLSQTITNFETNEEILYVEVVDQFD | 600 |
| Query: | 600 | TKETYFAVTSLGQIKRFERQEISPWRTYKSKTAKYAKLKSVEDYVVTVAPIQLEDVILVT | 659 |
| | | TYFA T LGQIKR ER+E +PWRTYKSK+ KYAKLK D +V VAPI+L+DV+L++ | |
| Sbjct: | 601 | DATTYFAATRLGQIKRVERKEFTPWRTYKSKSVKYAKLKDDTDQIVAVAPIKLDDVLLIS | 660 |
| Query: | 660 | YNGYALRFSINDVPVVGSKAAGVKAMNLKDRDHIVSAFIANTTSLYLLTHRGSLKRMAID | 719 |
| | | NGYALRF+I +VPVVG+KAAGVKAMNLK+ D + SAFI NT+S YLLT RGSLKR++ID | |
| Sbjct: | 661 | QNGYALRFNIEEVPVVGAKAAGVKAMNLKEDDTLQSAFICNTSSFYLLTQRGSLKRVSID | 720 |
| Query: | 720 | VIPTTSRANRGLQVLRELKSKPHRVFKAGPVYLEDSSFEFDLFSSVSNHEGDTFVLEIMS | 779 |
| | | IP TSRA RGLQVLRELK+KPHRVF AG V + F DLFS+ T L + S | |
| Sbjct: | 721 | EIPATSRAKRGLQVLRELKNKPHRVFLAGSV--AEQGFVGDLFSTEVEENDQT--LLVQS | 776 |
| Query: | 780 | KTGKVYDVDLSQWSFSERTSNGSFVSDKISDEEVFSVKIK | 819 |
| | | G +Y+ L + SERTSNGSF+SD ISDEEVF +K | |
| Sbjct: | 777 | NKGTIYESRLQDLNLSERTSNGSFISDTISDEEVFDAYLK | 816 |

[5201] A related DNA sequence was identified in S. pyogenes <SEQ ID 2823> which encodes the amino acid sequence <SEQ ID 2824>. Analysis of this protein sequence reveals the following:

| Possible site: 51 | | | |
|---|---|---|---|
| >>> Seems to have no N-terminal signal sequence | | | |
| INTEGRAL | Likelihood = −0.53 | Transmembrane | 376-392 (376-394) |

----- Final Results -----
bacterial membrane --- Certainty = 0.1213 (Affirmative) < succ>
bacterial outside --- Certainty = 0.0000 (Not Clear) < succ>
bacterial cytoplasm --- Certainty = 0.0000 (Not Clear) < succ>

[5202] An alignment of the GAS and GBS proteins is shown below.

| Identities = 633/819 (77%), Positives = 719/819 (87%) | | | |
|---|---|---|---|
| Query: | 1 | MSNIQNMSLEDIMGERFGRYSKYIIQERALPDIRDGLKPVQRRILYSMNKDGNTFEKGFR | 60 |
| | | MSNIQNMSLEDIMGERFGRYSKYIIQERALPDIRDGLKPVQRRILYSMNKDGNTFEKG+R | |
| Sbjct: | 3 | MSNIQNMSLEDIMGERFGRYSKYIIQERALPDIRDGLKPVQRRILYSMNKDGNTFEKGYR | 62 |
| Query: | 61 | KSAKSVGNVMGNFHPHGDSSIYDAMVRMSQDWKNRETLIEMHGNNGSMDGDPAAAMRYTE | 120 |
| | | KSAKSVGN+MGNFHPHGDSSIYDAMVRMSQDWKNRE L+EMHGNNGSMDGDP AAMRYTE | |
| Sbjct: | 63 | KSAKSVGNIMGNFHPHGDSSIYDAMVRMSQDWKNREILVEMHGNNGSMDGDPPAAMRYTE | 122 |
| Query: | 121 | ARLSEIAGYLLQDIDKNTVPFAWNFDDTEKEPTVLPAAFPNLLVNGATGISAGYATDIPP | 180 |
| | | ARLSEIAGYLLQDI+KNTV FAWNFDDTEKEPTVLPAAFPNLLVNG++GISAGYATDIPP | |
| Sbjct: | 123 | ARLSEIAGYLLQDIEKNTVSFAWNFDDTEKEPTVLPAAFPNLLVNGSSGISAGYATDIPP | 182 |
| Query: | 181 | HNLAEVIDAVVYMIDHPKAKLDKLMEFLPGPDFPTGAIIQGKDEIRKAYETGKGRVAVRS | 240 |
| | | HNL+EVIDAVVYMIDHPKA L+KLMEFLPGPDFPTG IIQG DEI+KAYETGKGRV VRS | |
| Sbjct: | 183 | HNLSEVIDAVVYMIDHPKASLEKLMEFLPGPDFPTGGIIQGADEIKKAYETGKGRVVVRS | 242 |
| Query: | 241 | RTAIETLKGGKKQIIVTEIPYEVNKSVLVKRIDDVRVNNKVPGIAEVRDESDRDGLRIAI | 300 |
| | | RT IE LKGGK+QIIVTEIPYEVNK+VLVK+IDDVRVNNKVPGI EVRDESDR GLRIAI | |
| Sbjct: | 243 | RTEIEELKGGKQQIIVTEIPYEVNKAVLVKKIDDVRVNNKVPGIVEVRDESDRTGLRIAI | 302 |
| Query: | 301 | ELKKEADETIVLNYLFKYTDLQVNYNFNMVAIDDYTPKQVGLSRILTSYIAHRREIIIAR | 360 |
| | | ELKKEAD +LNYL KYTDLQVNYNFNMVAID +TP+QVGL +IL+SYI+HR++III R | |
| Sbjct: | 303 | ELKKEADSQTILNYLLKYTDLQVNYNFNMVAIDHFTPRQVGLQKILSSYISHRKDIIIER | 362 |
| Query: | 361 | SKFDKEKAEKRLHIVEGLIRVLSILDEVIALIRASENKADAKENLKVSYEFSEAQAEAIV | 420 |
| | | SKFDK KAEKRLHIVEGLIRVLSILDE+IALIR+S+NKADAKENLKVSY+FSE QAEAIV | |
| Sbjct: | 363 | SKFDKAKAEKRLHIVEGLIRVLSILDEIIALIRSSDNKADAKENLKVSYDFSEEQAEAIV | 422 |
| Query: | 421 | TLQLYRLTNTDIVTLREEEEELRQQITMLKAIISDERTMYNVMKRELREVKKKFANTRRS | 480 |
| | | TLQLYRLTNTDIVTL+ EE +LR IT L AII DE TMYNVMKRELREVKKKFAN R S | |
| Sbjct: | 423 | TLQLYRLTNTDIVTLQNEENDLRDLITTLSAIIGDEATMYNVMKRELREVKKKFANPRLS | 482 |
| Query: | 481 | ELQELAETIEIDTASLIIEEDTYVSVTRGGYVKRTSPRSFNASTVDELGKREDDELIFVS | 540 |
| | | ELQ ++ IEIDTASLI EE+T+VSVTRGGY+KRTSPRSFNAS+++E+GKR+DDELIFV | |
| Sbjct: | 483 | ELQAESQIIEIDTASLIAEEETFVSVTRGGYLKRTSPRSFNASSLEEVGKRDDDELIFVK | 542 |
| Query: | 541 | NAKTTQHLLMFTNLGNLAYRPVHELADIRWKDVGEHLSQNLVNFASNEEIIYAELVDDFT | 600 |
| | | AKTT+HLL+FT LGN+ YRP+HEL D+RWKD+GEHLSQ + NFA+ EEI+YA++V F | |
| Sbjct: | 543 | QAKTTEHLLLFTTLGNVIYRPIHELTDLRWKDIGEHLSQTISNFATEEEILYADIVTSFD | 602 |
| Query: | 601 | KETYFAVTSLGQIKRFERQEISPWRTYKSKTAKYAKLKSVEDYVVTVAPIQLEDVILVTY | 660 |
| | | + Y AVT G IKRF+R+E+SPWRTYKSK+ KY KLK +D VVT++P+ +ED++LVT | |
| Sbjct: | 603 | QGLYVAVTQNGFIKRFDRKELSPWRTYKSKSTKYVKLKDDKDRVVTLSPVIMEDLLLVTK | 662 |
| Query: | 661 | NGYALRFSINDVPVVGSKAAGVKAMNLKDRDHIVSAFIANTTSLYLLTHRGSLKRMAIDV | 720 |
| | | NGYALRFS +VP+ G K+AGVK +NLK+ D + SAF + S ++LT RGSLKRMA+D | |
| Sbjct: | 663 | NGYALRFSSQEVPIQGLKSAGVKGINLKNDDSLASAFAVTSNSFFVLTQRGSLKRMAVDD | 722 |
| Query: | 721 | IPTTSRANRGLQVLRELKSKPHRVFKAGPVYLEDSSFEFDLFSSVSNHEGDTFVLEIMSK | 780 |
| | | IP TSRANRGL VLRELK+KPHRVF AG V + S+ +FDLF+ + E + +LE++SK | |
| Sbjct: | 723 | IPQTSRANRGLLVLRELKTKPHRVFLAGGVQSDTSAEQFDLFTDIPEEETNQQMLEVISK | 782 |
| Query: | 781 | TGKVYDVDLSQWSFSERTSNGSFVSDKISDEEVFSVKIK | 819 |
| | | TG+ Y++ L S SER SNGSF+SD ISD+EV + + | |
| Sbjct: | 783 | TGQTYEIALETLSLSERISNGSFISDTISDQEVLVARTR | 821 |

[5203] Based on this analysis, it was predicted that these proteins and their epitopes could be useful antigens for vaccines or diagnostics.

### EXAMPLE 930

[5204] A DNA sequence (GBSx0986) was identified in S. agalactiae <SEQ ID 2825> which encodes the amino acid sequence <SEQ ID 2826>. Analysis of this protein sequence reveals the following:

Possible site: 49
>>> Seems to have no N-terminal signal sequence
----- Final Results -----
bacterial cytoplasm --- Certainty = 0.3369 (Affirmative) < succ>
bacterial membrane --- Certainty = 0.0000 (Not Clear) < succ>
bacterial outside --- Certainty = 0.0000 (Not Clear) < succ>

[5205] The protein has homology with the following sequences in the GENPEPT database.

| >GP: AAF64593 GB: AF169649 branched-chain aminotransferase IlvE | | | |
|---|---|---|---|
| [Lactococcus lactis] | | | |
| Identities = 259/340 (76%), Positives = 294/340 (86%) | | | |
| Query: | 1 | MTVNLDWDNLGFAYRKLPFRYISHFKDGKWDDGKLTDDATLHISESSPALHYGQQAFEGL | 60 |
| | | M +NLDW+NLGF+YR LPFRYI+ FKDGKW G+LT D LHISESSPALHYGQQ FEGL | |
| Sbjct: | 1 | MAINLDWENLGFSYRNLPFRYIARFKDGKWSAGELTGDNQLHISESSPALHYGQQGFEGL | 60 |
| Query: | 61 | KAYRTKDGSIQLFRPDQNAERLQRTADRLLMPHVPTDKFIAAVKSVVRANEEFVPPYGTG | 120 |
| | | KAYRTKDGSIQLFRPDQNA RLQ+TA RL M V T+ FI AVK VV+AN++FVPPYGTG | |
| Sbjct: | 61 | KAYRTKDGSIQLFRPDQNAARLQKTARRLCMAEVSTEMFIDAVKQVVKANKDFVPPYGTG | 120 |
| Query: | 121 | ATLYIRPLLIGVGDIIGVKPAEEYIFTVFAMPVGSYFKGGLTPTNFIVSKEYDRAAPNGT | 180 |
| | | ATLY+RPLLIGVGD+IGVKPA+EYIF VFAMPVGSYFKGGL P+ F++S+EYDRAAP GT | |
| Sbjct: | 121 | ATLYLRPLLIGVGDVIGVKPADEYIFKVFAMPVGSYFKGGLAPSKFVISREYDRAAPLGT | 180 |
| Query: | 181 | GAAKVGGNYAASLLPGKYAHEKQFSDVIYLDPATHTKIEEVGAANFFGITKDNQFITPLS | 240 |
| | | G AKVGGNYAASL A ++D IYLDP+THTKIEEVGAANFFGIT DN+FITPLS | |
| Sbjct: | 181 | GGAKVGGNYAASLQAEVGAKASGYADAIYLDPSTHTKIEEVGAANFFGITADNEFITPLS | 240 |
| Query: | 241 | PSILPSITKYSLLYLAKERFGMEAIEGDVFVDELDKFTEAGACGTAAVISPIGGIQNGDD | 300 |
| | | PSILPSITKYSLLYLA+ R G++AIEG+V+ +L KF EAGACGTAA+ISPIG I +G+D | |
| Sbjct: | 241 | PSILPSITKYSLLYLAEHRLGLKAIEGEVYAKDLGKFVEAGACGTAAIISPIGRIDDGED | 300 |
| Query: | 301 | FHVFYSETEVGPATRKLYDELVGIQFGDVEAPEGWIYKVD | 340 |
| | | ++F+SETEVGP ++LYDELVGIQFGDVEAPEGWI KVD | |
| Sbjct: | 301 | SYIFHSETEVGPTVKRLYDELVGIQFGDVEAPEGWIVKVD | 340 |

[5206] A related DNA sequence was identified in S. pyogenes <SEQ ID 2827> which encodes the amino acid sequence <SEQ ID 2828>. Analysis of this protein sequence reveals the following:

Possible site: 61
>>> Seems to have no N-terminal signal sequence
----- Final Results -----
bacterial cytoplasm --- Certainty = 0.1208 (Affirmative) < succ>
bacterial membrane --- Certainty = 0.0000 (Not Clear) < succ>
bacterial outside --- Certainty = 0.0000 (Not Clear) < succ>

[5207] An alignment of the GAS and GBS proteins is shown below.

| Identities = 280/340 (82%), Positives = 308/340 (90%) | | | |
|---|---|---|---|
| Query: | 1 | MTVNLDWDNLGFAYRKLPFRYISHFKDGKWDDGKLTDDATLHISESSPALHYGQQAFEGL | 60 |
| | | MT+ +DWDNLGF Y KLPFRYIS++K+G+WD G+LT+DATLHISES+PALHYGQQAFEGL | |
| Sbjct: | 16 | MTIAIDWDNLGFEYHKLPFRYISYYKNGQWDKGQLTEDATLHISESAPALHYGQQAFEGL | 75 |
| Query: | 61 | KAYRTKDGSIQLFRPDQNAERLQRTADRLLMPHVPTDKFIAAVKSVVRANEEFVPPYGTG | 120 |
| | | KAYRTKDGSIQLFRPD+NA RLQ TADRLLMP V T++FI A K VV+ANE+FVPPYGTG | |
| Sbjct: | 76 | KAYRTKDGSIQLFRPDRNAVRLQATADRLLMPQVSTEQFIDAAKQVVKANEDFVPPYGTG | 135 |
| Query: | 121 | ATLYIRPLLIGVGDIIGVKPAEEYIFTVFAMPVGSYFKGGLTPTNFIVSKEYDRAAPNGT | 180 |
| | | ATLY+RPLLIGVGDIIGVKPAEEYIFT+FAMPVG+YFKGGL PTNFIVS+ +DRAAP GT | |
| Sbjct: | 136 | ATLYLRPLLIGVGDIIGVKPAEEYIFTIFAMPVGNYFKGGLAPTNFIVSEAFDRAAPYGT | 195 |
| Query: | 181 | GAAKVGGNYAASLLPGKYAHEKQFSDVIYLDPATHTKIEEVGAANFFGITKDNQFITPLS | 240 |
| | | GAAKVGGNYA SLLPGK A FSDVIYLDPATHTKIEEVGAANFFGIT +N+F+TPLS | |
| Sbjct: | 196 | GAAKVGGNYAGSLLPGKAAKSAGFSDVIYLDPATHTKIEEVGAANFFGITANNEFVTPLS | 255 |
| Query: | 241 | PSILPSITKYSLLYLAKERFGMEAIEGDVFVDELDKFTEAGACGTAAVISPIGGIQNGDD | 300 |
| | | PSILPSITKYSLL LA+ER GM IEGDV ++ELDKF EAGACGTAAVISPIGGIQ D+ | |
| Sbjct: | 256 | PSILPSITKYSLLQLAEERLGMTVIEGDVPINELDKFVEAGACGTAAVISPIGGIQYKDN | 315 |
| Query: | 301 | FHVFYSETEVGPATRKLYDELVGIQFGDVEAPEGWIYKVD | 340 |
| | | HVFYSETEVGP TR+LYDELVGIQFGD+EAPEGWI KVD | |
| Sbjct: | 316 | LHVFYSETEVGPVTRRLYDELVGIQFGDIEAPEGWIVKVD | 355 |

[5208] Based on this analysis, it was predicted that these proteins and their epitopes could be useful antigens for vaccines or diagnostics.

### EXAMPLE 931

[5209] A DNA sequence (GBSx0987) was identified in S. agalactiae <SEQ ID 2829> which encodes the amino acid sequence <SEQ ID 2830>. Analysis of this protein sequence reveals the following:

Possible site: 30
>>> Seems to have no N-terminal signal sequence
----- Final Results -----
bacterial cytoplasm --- Certainty = 0.3459 (Affirmative) < succ>
bacterial membrane --- Certainty = 0.0000 (Not Clear) < succ>
bacterial outside --- Certainty = 0.0000 (Not Clear) < succ>

[5210] A related GBS nucleic acid sequence <SEQ ID 9365> which encodes amino acid sequence <SEQ ID 9366> was also identified. A further related GBS nucleic acid sequence <SEQ ID 10915> which encodes amino acid sequence <SEQ ID 10916> was also identified.

[5211] The protein has no significant homology with any sequences in the GENPEPT database.

[5212] A related DNA sequence was identified in S. pyogenes <SEQ ID 2831> which encodes the amino acid sequence <SEQ ID 2832>. Analysis of this protein sequence reveals the following:

Possible site: 50
>>> Seems to have no N-terminal signal sequence
----- Final Results -----
bacterial cytoplasm --- Certainty = 0.3043 (Affirmative) < succ>
bacterial membrane --- Certainty = 0.0000 (Not Clear) < succ>
bacterial outside --- Certainty = 0.0000 (Not Clear) < succ>

[5213] An alignment of the GAS and GBS proteins is shown below.

Identities = 22/36 (61%), Positives = 30/36 (83%)

| | | | |
|---|---|---|---|
| Query: | 4 | IVSKKDKKIEIQISDAQVTVNGTKVDGYQLVMEKKL | 39 |
| | | ++SKKDKKIEIQ+ D +V VN TK+DGYQL + K++ | |
| Sbjct: | 1 | VMSKKDKKIEIQLIDHKVMVNETKIDGYQLQIGKRV | 36 |

[5214] Based on this analysis, it was predicted that these proteins and their epitopes could be useful antigens for vaccines or diagnostics.

### EXAMPLE 932

[5215] A DNA sequence (GBSx0988) was identified in S. agalactiae <SEQ ID 2833> which encodes the amino acid sequence <SEQ ID 2834>. This protein is predicted to be glycyl-tRNA synthetase beta subunit (glyS). Analysis of this protein sequence reveals the following:

Possible site: 14
>>> Seems to have no N-terminal signal sequence
----- Final Results -----
bacterial cytoplasm --- Certainty = 0.1617 (Affirmative) < succ>
bacterial membrane --- Certainty = 0.0000 (Not Clear) < succ>
bacterial outside --- Certainty = 0.0000 (Not Clear) < succ>

[5216] The protein has homology with the following sequences in the GENPEPT database.

| >GP: CAB73488 GB: AL139077 glycyl-tRNA synthetase beta chain | | | |
|---|---|---|---|
| [Campylobacter jejuni] | | | |
| Identities = 33/90 (36%), Positives = 49/90 (53%), Gaps = 2/90 (2%) | | | |
| Query: | 3 | RAFNLAEKVTHSVLVDSSLFENNQEKALYQAILSLELTEDMHDNLDKLFALSPIINDFFD | 62 |
| | | R N+A K H V D SLF E LY+A + + L+ LFAL P I++FF+ | |
| Sbjct: | 570 | RLANIATKNPHKV--DESLFVQEAESKLYKAFQEKTKANSLQEKLENLFALKPFIDEFFN | 627 |
| Query: | 63 | NTMVMTDDEKMKQNRLAILNSLVAKARTVA | 92 |
| | | M+ +DEK+K NR A++ + A+ +A | |
| Sbjct: | 628 | QVMINAEDEKLKNNRQALVYEIYAEFLKIA | 657 |

[5217] There is also homology to SEQ ID 2836.

[5218] Based on this analysis, it was predicted that this protein and its epitopes, could be useful antigens for vaccines or diagnostics.

### EXAMPLE 933

[5219] A DNA sequence (GBSx0989) was identified in S. agalactiae <SEQ ID 2837> which encodes the amino acid sequence <SEQ ID 2838>. Analysis of this protein sequence reveals the following:

Possible site: 30
>>> Seems to have no N-terminal signal sequence
----- Final Results -----
bacterial cytoplasm --- Certainty = 0.4825 (Affirmative) < succ>
bacterial membrane --- Certainty = 0.0000 (Not Clear) < succ>
bacterial outside --- Certainty = 0.0000 (Not Clear) < succ>

[5220] The protein has homology with the following sequences in the GENPEPT database.

| >GP: CAB13672 GB: Z99113 ynzC [Bacillus subtilis] | | | |
|---|---|---|---|
| Identities = 41/72 (56%), Positives = 56/72 (76%) | | | |
| Query: | 5 | KIARINELSKKKKTVGLTGEEKVEQAKLREEYIEGFRRSVRHHVEGIKLVDDEGNDVTPE | 64 |
| | | KIARINEL+ K K +T EEK EQ KLR+EY++GFR S+++ ++ +K++D EGNDVTPE | |
| Sbjct: | 6 | KIARINELAAKAKAGVITEEEKAEQQKLRQEYLKGFRSSMKNTLKSVKIIDPEGNDVTPE | 65 |
| Query: | 65 | KLRQVQREKGLH | 76 |
| | | KL++ QR LH | |
| Sbjct: | 66 | KLKREQRNNKLH | 77 |

[5221] A related DNA sequence was identified in S. pyogenes <SEQ ID 2839> which encodes the amino acid sequence <SEQ ID 2840>. Analysis of this protein sequence reveals the following:

Possible site: 30
>>> Seems to have no N-terminal signal sequence
----- Final Results -----
bacterial cytoplasm --- Certainty = 0.4303 (Affirmative) < succ>
bacterial membrane --- Certainty = 0.0000 (Not Clear) < succ>
bacterial outside --- Certainty = 0.0000 (Not Clear) < succ>

[5222] An alignment of the GAS and GBS proteins is shown below.

| Identities = 79/85 (92%), Positives = 83/85 (96%) | | | |
|---|---|---|---|
| Query: | 1 | MDPKKIARINELSKKKKTVGLTGEEKVEQAKLREEYIEGFRRSVRHHVEGIKLVDDEGND | 60 |
| | | MDPKKIARINEL+KKKKTVGLTG EKVEQAKLREEYIEG+RRSVRHH+EGIKLVD+EGND | |
| Sbjct: | 1 | MDPKKIARINELAKKKKTVGLTGPEKVEQAKLREEYIEGYRRSVRHHIEGIKLVDEEGND | 60 |
| Query: | 61 | VTPEKLRQVQREKGLHGRSLDDPNS | 85 |
| | | VTPEKLRQVQREKGLHGRSLDDP S | |
| Sbjct: | 61 | VTPEKLRQVQREKGLHGRSLDDPKS | 85 |

[5223] Based on this analysis, it was predicted that these proteins and their epitopes could be useful antigens for vaccines or diagnostics.

### EXAMPLE 934

[5224] A DNA sequence (GBSx0990) was identified in S. agalactiae <SEQ ID 2841> which encodes the amino acid sequence <SEQ ID 2842>. Analysis of this protein sequence reveals the following:

Possible site: 20
>>> Seems to have no N-terminal signal sequence
----- Final Results -----
bacterial cytoplasm --- Certainty = 0.2343 (Affirmative) < succ>
bacterial membrane --- Certainty = 0.0000 (Not Clear) < succ>
bacterial outside --- Certainty = 0.0000 (Not Clear) < succ>

[5225] The protein has homology with the following sequences in the GENPEPT database.

| >GP: AAB69985 GB: U94355 glycerol kinase [Enterococcus casseliflavus] | | | |
|---|---|---|---|
| Identities = 381/496 (76%), Positives = 439/496 (87%) | | | |
| Query: | 3 | SEEKYIMAIDQGTTSSRAIIFNKKGEKIASSQKEFPQIFPQAGWVEHNANQIWNSVQSVI | 62 |
| | | +E+ Y+MAIDQGTTSSRAIIF++ G+KI SSQKEFPQ FP++GWVEHNAN+IWNSVQSVI | |
| Sbjct: | 2 | AEKNYVMAIDQGTTSSRAIIFDRNGKKIGSSQKEFPQYFPKSGWVEHNANEIWNSVQSVI | 61 |
| Query: | 63 | AGAFIESSIKPGQIEAIGITNQRETTVVWDKKTGLPIYNAIVWQSRQTAPIADQLKQEGH | 122 |
| | | AGAFIES I+P I IGITNQRETTVVWDK TG PI NAIVWQSRQ++PIADQLK +GH | |
| Sbjct: | 62 | AGAFIESGIRPEAIAGIGITNQRETTVVWDKTTGQPIANAIVWQSRQSSPIADQLKVDGH | 121 |
| Query: | 123 | TNMIHEKTGLVIDAYFSATKVRWILDHVPGAQERAEKGELLFGTIDTWLVWKLTDGLVHV | 182 |
| | | T MIHEKTGLVIDAYFSATKVRW+LD++ GAQE+A+ GELLFGTID+WLVWKLTDG VHV | |
| Sbjct: | 122 | TEMIHEKTGLVIDAYFSATKVRWLLDNIEGAQEKADNGELLFGTIDSWLVWKLTDGQVHV | 181 |
| Query: | 183 | TDYSNAARTMLYNIKELKWDDEILELLNIPKAMLPEVKSNSEVYGKTTPFHFYGGEVPIS | 242 |
| | | TDYSNA+RTMLYNI +L+WD EIL+LLNIP +MLPEVKSNSEVYG T +HFYG EVPI+ | |
| Sbjct: | 182 | TDYSNASRTMLYNIHKLEWDQEILDLLNIPSSMLPEVKSNSEVYGHTRSYHFYGSEVPIA | 241 |
| Query: | 243 | GMAGDQQAALFGQLAFEPGMVKNTYGTGSFIIMNTGEEMQLSQNNLLTTIGYGINGKVHY | 302 |
| | | GMAGDQQAALFGQ+AFE GM+KNTYGTG+FI+MNTGEE QLS N+LLTTIGYGINGKV+Y | |
| Sbjct: | 242 | GMAGDQQAALFGQMAFEKGMIKNTYGTGAFIVMNTGEEPQLSDNDLLTTIGYGINGKVYY | 301 |
| Query: | 303 | ALEGSIFIAGSAIQWLRDGLRMIETSSESEGLAQSSTSDDEVYVVPAFTGLGAPYWDSNA | 362 |
| | | ALEGSIF+AGSAIQWLRDGLRMIETS +SE LA + D+EVYVVPAFTGLGAPYWDS A | |
| Sbjct: | 302 | ALEGSIFVAGSAIQWLRDGLRMIETSPQSEELAAKAKGDNEVYVVPAFTGLGAPYWDSEA | 361 |
| Query: | 363 | RGSVFGLTRGTSKEDFVKATLQSIAYQVRDVIDTMQVDSGIDIQQLRVDGGAAMNNLLMQ | 422 |
| | | RG+VFGLTRGT+KEDFV+ATLQ++AYQ +DVIDTM+ DSGIDI L+VDGGAA N+LLMQ | |
| Sbjct: | 362 | RGAVFGLTRGTTKEDFVRATLQAVAYQSKDVIDTMKKDSGIDIPLLKVDGGAAKNDLLMQ | 421 |
| Query: | 423 | FQADILGIDIARAKNLETTALGAAFLAGLSVGYWESMDELKELNATGQLFQATMNESRKE | 482 |
| | | FQADIL ID+ RA NLETTALGAA+LAGL+VG+W+ +DELK + GQ+F M ++ | |
| Sbjct: | 422 | FQADILDIDVQRAANLETTALGAAYLAGLAVGFWKDLDELKSMAEEGQMFTPEMPAEERD | 481 |
| Query: | 483 | KLYKGWRKAVKATQVF | 498 |
| | | LY+GW++AV ATQ F | |
| Sbjct: | 482 | NLYEGWKQAVAATQTF | 497 |

[5226] A related DNA sequence was identified in S. pyogenes <SEQ ID 2843> which encodes the amino acid sequence <SEQ ID 2844>. Analysis of this protein sequence reveals the following:

Possible site: 19
>>> Seems to have no N-terminal signal sequence
----- Final Results -----
bacterial cytoplasm --- Certainty = 0.2282 (Affirmative) < succ>
bacterial membrane --- Certainty = 0.0000 (Not Clear) < succ>
bacterial outside --- Certainty = 0.0000 (Not Clear) < succ>

[5227] An alignment of the GAS and GBS proteins is shown below.

| Identities = 464/500 (92%), Positives = 484/500 (96%) | | | |
|---|---|---|---|
| Query: | 3 | SEEKYIMAIDQGTTSSRAIIFNKKGEKIASSQKEFPQIFPQAGWVEHNANQIWNSVQSVI | 62 |
| | | S+EKYIMAIDQGTTSSRAIIFN+KGEK++SSQKEFPQIFP AGWVEHNANQIWNSVQSVI | |
| Sbjct: | 2 | SQEKYIMAIDQGTTSSRAIIFNQKGEKVSSSQKEFPQIFPHAGWVEHNANQIWNSVQSVI | 61 |
| Query: | 63 | AGAFIESSIKPGQIEAIGITNQRETTVVWDKKTGLPIYNAIVWQSRQTAPIADQLKQEGH | 122 |
| | | AGAFIESSIKP QIEAIGITNQRETTVVWDKKTG+PIYNAIVWQSRQTAPIA+QLKQ+GH | |
| Sbjct: | 62 | AGAFIESSIKPSQIEAIGITNQRETTVVWDKKTGVPIYNAIVWQSRQTAPIAEQLKQDGH | 121 |
| Query: | 123 | TNMIHEKTGLVIDAYFSATKVRWILDHVPGAQERAEKGELLFGTIDTWLVWKLTDGLVHV | 182 |
| | | T MIHEKTGLVIDAYFSATK+RWILDHVPGAQERAEKGELLFGTIDTWLVWKLTDG VHV | |
| Sbjct: | 122 | TKMIHEKTGLVIDAYFSATKIRWILDHVPGAQERAEKGELLFGTIDTWLVWKLTDGAVHV | 181 |
| Query: | 183 | TDYSNAARTMLYNIKELKWDDEILELLNIPKAMLPEVKSNSEVYGKTTPFHFYGGEVPIS | 242 |
| | | TDYSNAARTMLYNIK+L WDDEILELLNIPK MLPEVKSNSE+YGKT FHFYGGEVPIS | |
| Sbjct: | 182 | TDYSNAARTMLYNIKDLTWDDEILELLNIPKDMLPEVKSNSEIYGKTAAFHFYGGEVPIS | 241 |
| Query: | 243 | GMAGQQAALFGQLAFEPGMVKNTYGTGSFIIMNTGEEMQLSQNNLLTTIGYGINGKVHY | 302 |
| | | GMAGDQQAALFGQLAFEPGMVKNTYGTGSFIIMNTG+EMQLS NNLLTTIGYGINGKVHY | |
| Sbjct: | 242 | GMAGDQQAALFGQLAFEPGMVKNTYGTGSFIIMNTGDEMQLSSNNLLTTIGYGINGKVHY | 301 |
| Query: | 303 | ALEGSIFIAGSAIQWLRDGLRMIETSSESEGLAQSSTSDDEVYVVPAFTGLGAPYWDSNA | 362 |
| | | ALEGSIFIAGSAIQWLRDGL+MIETS ESE A +STSDDEVYVVPAFTGLGAPYWDSNA | |
| Sbjct: | 302 | ALEGSIFIAGSAIQWLRDGLKMIETSPESEQFALASTSDDEVYVVPAFTGLGAPYWDSNA | 361 |
| Query: | 363 | RGSVFGLTRGTSKEDFVKATLQSIAYQVRDVIDTMQVDSGIDIQQLRVDGGAAMNNLLMQ | 422 |
| | | RGSVFGLTRGTSKEDFVKATLQSIAYQVRDVIDTMQVDSGIDIQQLRVDGGAAMNN+LMQ | |
| Sbjct: | 362 | RGSVFGLTRGTSKEDFVKATLQSIAYQVRDVIDTMQVDSGIDIQQLRVDGGAAMNNMLMQ | 421 |
| Query: | 423 | FQADILGIDIARAKNLETTALGAAFLAGLSVGYWESMDELKELNATGQLFQATMNESRKE | 482 |
| | | FQADILGIDIARAKNLETTALGAAFLAGL+VGYWE MD LKELNATGQLF+A+MNESRKE | |
| Sbjct: | 422 | FQADILGIDIARAKNLETTALGAAFLAGLAVGYWEDMDALKELNATGQLFKASMNESRKE | 481 |
| Query: | 483 | KLYKGWRKAVKATQVFAQED | 502 |
| | | KLYKGW++AVKATQVF QE+ | |
| Sbjct: | 482 | KLYKGWKRAVKATQVFTQEE | 501 |

[5228] Based on this analysis, it was predicted that these proteins and their epitopes could be useful antigens for vaccines or diagnostics.

### EXAMPLE 935

[5229] A DNA sequence (GBSx0992) was identified in S. agalactiae <SEQ ID 2845> which encodes the amino acid sequence <SEQ ID 2846>. Analysis of this protein sequence reveals the following:

Possible site: 14
>>> Seems to have no N-terminal signal sequence
----- Final Results -----
bacterial cytoplasm --- Certainty = 0.3146 (Affirmative) < succ>
bacterial membrane --- Certainty = 0.0000 (Not Clear) < succ>
bacterial outside --- Certainty = 0.0000 (Not Clear) < succ>

[5230] The protein has no significant homology with any sequences in the GENPEPT database.

[5231] No corresponding DNA sequence was identified in S. pyogenes.

[5232] Based on this analysis, it was predicted that this protein and its epitopes, could be useful antigens for vaccines or diagnostics.

### EXAMPLE 936

[5233] A DNA sequence (GBSx0993) was identified in S. agalactiae <SEQ ID 2847> which encodes the amino acid sequence <SEQ ID 2848>. This protein is predicted to be alpha-glycerophosphate oxidase (glpD). Analysis of this protein sequence reveals the following:

| Possible site: 40 | | | |
|---|---|---|---|
| >>> Seems to have no N-terminal signal sequence | | | |
| INTEGRAL | Likelihood = −1.81 | Transmembrane | 20-36 (20-36) |

----- Final Results -----
bacterial membrane --- Certainty = 0.1723 (Affirmative) < succ>
bacterial outside --- Certainty = 0.0000 (Not Clear) < succ>
bacterial cytoplasm --- Certainty = 0.0000 (Not Clear) < succ>

[5234] The protein has homology with the following sequences in the GENPEPT database.

| >GP: AAC34740 GB: U94770 alpha-glycerophosphate oxidase [Streptococcus pneumoniae] | | | |
|---|---|---|---|
| Identities = 464/608 (76%), Positives = 539/608 (88%) | | | |
| Query: | 1 | MEFSRETRRLALQRMQDRTLDLLIIGGGITGAGVALQAAASGLDTGLIEMQDFAEGTSSR | 60 |
| | | MEFS++TR L++++MQ+RTLDLLIIGGGITGAGVALQAAASGL+TGLIEMQDFAEGTSSR | |
| Sbjct: | 1 | MEFSKKTRELSIKKMQERTLDLLIIGGGITGAGVALQAAASGLETGLIEMQDFAEGTSSR | 60 |
| Query: | 61 | STKLVHGGLRYLKQFDVEVVSDTVSERAVVQQIAPHIPKPDPMLLPVYDEPGSTFSMFRL | 120 |
| | | STKLVHGGLRYLKQFDVEVVSDTVSERAVVQQIAPHIPKPDPMLLPVYDE G+TFS+FRL | |
| Sbjct: | 61 | STKLVHGGLRYLKQFDVEVVSDTVSERAVVQQIAPHIPKPDPMLLPVYDEDGATFSLFRL | 120 |
| Query: | 121 | KVAMDLYDLLAGVTNTPAANKVLSAEDVLKREPDLQKEGLLGGGVYLDFRNNDARLVIEN | 180 |
| | | KVAMDLYDLLAGV+NTP ANKVLS + VL+R+P+L+KEGL+GGGVYLDFRNNDARLVIEN | |
| Sbjct: | 121 | KVAMDLYDLLAGVSNTPTANKVLSKDQVLERQPNLKKEGLVGGGVYLDFRNNDARLVIEN | 180 |
| Query: | 181 | IKRANRDGAYIASHVKAEDFLFDDNNQIIGVRARDLLTDQVIDIKARLVINTTGPWSDTV | 240 |
| | | IKRAN+DGA IA+HVKAE FLFD++ +I GV ARDLLTDQV +IKARLVINTTGPWSD V | |
| Sbjct: | 181 | IKRANQDGALIANHVKAEGFLFDESGKITGVVARDLLTDQVFEIKARLVINTTGPWSDKV | 240 |
| Query: | 241 | RNFSNEGKQIHQLRPTKGVHLVVDRQKLNISQPVYVDTGLNDGRMIFVLPREDKTYFGTT | 300 |
| | | RN SN+G Q Q+RPTKGVHLVVD K+ +SQPVY DTGL DGRM+FVLPRE+KTYFGTT | |
| Sbjct: | 241 | RNLSNKGTQFSQMRPTKGVHLVVDSSKIKVSQPVYFDTGLGDGRMVFVLPRENKTYFGTT | 300 |
| Query: | 301 | DTDYHGDLEHPTVTKEDVDYLLNIVNKRFPEAELTIDDIESSWAGLRPLLSGNSASDYNG | 360 |
| | | DTDY GDLEHP VT+EDVDYLL IVN RFPE+ +TIDDIESSWAGLRPL++GNSASDYNG | |
| Sbjct: | 301 | DTDYTGDLEHPKVTQEDVDYLLGIVNNRFPESNITIDDIESSWAGLRPLIAGNSASDYNG | 360 |
| Query: | 361 | GNSGKLSDESFEELIDSVKDYIAHKNHREDVEKAISHVESSTSEKELDPSAVSRGSSFER | 420 |
| | | GN+G +SDESF+ LI +V+ Y++ + REDVE A+S +ESSTSEK LDPSAVSRGSS +R | |
| Sbjct: | 361 | GNNGTISDESFDNLIATVESYLSKEKTREDVESAVSKLESSTSEKHLDPSAVSRGSSLDR | 420 |
| Query: | 421 | DDNGLLTLAGGKITDYRKMAEGAMETIINILDKEYNRKFKLINSKTYPVSGGEINPSNVD | 480 |
| | | DDNGLLTLAGGKITDYRKMAEGAME +++IL E++R FKLINSKTYPVSGGE+NP+NVD | |
| Sbjct: | 421 | DDNGLLTLAGGKITDYRKMAEGAMERVVDILKAEFDRSFKLINSKTYPVSGGELNPANVD | 480 |
| Query: | 481 | SEIEAYAQLGTLSGLSIEDARYIANLYGSNAPKLFALTRQITEAEGLSLVETLSLHYAMD | 540 |
| | | SEIEA+AQLG GL ++A Y+ANLYGSNAPK+FAL + +A GLSL +TLSLHYAM | |
| Sbjct: | 481 | SEIEAFAQLGVSRGLDSKEAHYLANLYGSNAPKVFALAHSLEQAPGLSLADTLSLHYAMR | 540 |
| Query: | 541 | YEMALSPTDFFLRRTNHMLFMRDNLDSLIQPVIDEMAKHYQWSDQDKTFYEEELHETLKD | 600 |
| | | E+ALSP DF LRRTNHMLFMRD+LDS+++PV+DEM + Y W++++K Y ++ L + | |
| Sbjct: | 541 | NELALSPVDFLLRRTNHMLFMRDSLDSIVEPVLDEMGRFYDWTEEEKATYRADVEAALAN | 600 |
| Query: | 601 | NDLAALKD | 608 |
| | | NDLA LK+ | |
| Sbjct: | 601 | NDLAELKN | 608 |

[5235] There is also homology to SEQ ID 128.

[5236] SEQ ID 2848 (GBS93) was expressed in E. coli as a His-fusion product. SDS-PAGE analysis of total cell extract is shown in FIG. 7 (lane 7; MW 70.6 kDa).

[5237] GBS93-His was purified as shown in FIG. 192, lane 4.

[5238] Based on this analysis, it was predicted that this protein and its epitopes, could be useful antigens for vaccines or diagnostics.

### EXAMPLE 937

[5239] A DNA sequence (GBSx0994) was identified in S. agalactiae <SEQ ID 2849> which encodes the amino acid sequence <SEQ ID 2850>. Analysis of this protein sequence reveals the following:

Possible site: 23
>>> Seems to have no N-terminal signal sequence
----- Final Results -----
bacterial cytoplasm --- Certainty = 0.0965 (Affirmative) < succ>
bacterial membrane --- Certainty = 0.0000 (Not Clear) < succ>
bacterial outside --- Certainty = 0.0000 (Not Clear) < succ>

[5240] The protein has no significant homology with any sequences in the GENPEPT database.

[5241] No corresponding DNA sequence was identified in S. pyogenes.

[5242] Based on this analysis, it was predicted that this protein and its epitopes, could be useful antigens for vaccines or diagnostics.

### EXAMPLE 938

[5243] A DNA sequence (GBSx0995) was identified in S. agalactiae <SEQ ID 2851> which encodes the amino acid sequence <SEQ ID 2852>. This protein is predicted to be glycerol uptake facilitator protein (glpF). Analysis of this protein sequence reveals the following:

| Possible Site: 55 | | | |
|---|---|---|---|
| >>> Seems to have a cleavable N-term signal seq. | | | |
| INTEGRAL | Likelihood = −7.43 | Transmembrane | 220-236 (216-236) |
| INTEGRAL | Likelihood = −6.48 | Transmembrane | 139-155 (136-158) |
| INTEGRAL | Likelihood = −3.88 | Transmembrane | 87-103 (83-107) |
| INTEGRAL | Likelihood = −3.03 | Transmembrane | 164-180 (162-183) |

----- Final Results -----
bacterial membrane --- Certainty = 0.3972 (Affirmative) < succ>
bacterial outside --- Certainty = 0.0000 (Not Clear) < succ>
bacterial cytoplasm --- Certainty = 0.0000 (Not Clear) < succ>

[5244] A related GBS nucleic acid sequence <SEQ ID 8689> which encodes amino acid sequence <SEQ ID 8690> was also identified. Analysis of this protein sequence reveals the following:

| Lipop: Possible site: −1 Crend: 5 | | |
|---|---|---|
| SRCFLG: 0 | | |
| McG: Length of UR: 21 | | |
| Peak Value of UR: 2.51 | | |
| Net Charge of CR: −2 | | |
| McG: Discrim Score: 4.43 | | |
| GvH: Signal Score (−7.5): −0.139999 | | |
| Possible site: 50 | | |
| >>> Seems to have a cleavable N-term signal seq. | | |
| Amino Acid Composition: calculated from 51 | | |
| ALOM program count: 4 | value: −7.43 | threshold: 0.0 |

| | | | |
|---|---|---|---|
| INTEGRAL | Likelihood = −7.43 | Transmembrane | 215-231 (211-231) |
| INTEGRAL | Likelihood = −6.48 | Transmembrane | 134-150 (131-153) |
| INTEGRAL | Likelihood = −3.88 | Transmembrane | 82-98 (78-102) |
| INTEGRAL | Likelihood = −3.03 | Transmembrane | 159-175 (157-178) |
| PERIPHERAL | Likelihood = 4.98 | 65 | |

modified ALOM score: 1.99
icm1 HYPID: 7 CFP: 0.397
*** Reasoning Step: 3
----- Final Results -----
bacterial membrane --- Certainty = 0.3972 (Affirmative) < succ>
bacterial outside --- Certainty = 0.0000 (Not Clear) < succ>
bacterial cytoplasm --- Certainty = 0.0000 (Not Clear) < succ>

[5245] The protein has homology with the following sequences in the GENPEPT database.

| >GP: AAA91618 GB: U12567 glycerol uptake facilitator | | | |
|---|---|---|---|
| [Streptococcus pneumoniae] | | | |
| Identities = 150/230 (65%), Positives = 194/230 (84%), Gaps 1/230 (0%) | | | |
| Query: | 7 | DIFGEFLGTALLVLLGNGVVAGVVLPKTKNHNSGWIVITFGWGLAVAIAALVSGNISPAH | 66 |
| | | ++FGEFLGT +L+LLGNGVVAGVVLPKTK+++SGWIVIT G+AVA+A VSG +SPAH | |
| Sbjct: | 4 | ELFGEFLGTLILILLGNGVVAGVVLPKTKSNSSGWIVITMV-GIAVAVAVFVSGKLSPAH | 62 |
| Query: | 67 | LNPAVSLAFAIKGDLAWGTAILYMIAQIIGAMLGSLLVYLQFRPHYEAAENRADILGTFA | 126 |
| | | LNPAV++ A+KG L W + + Y++AQ GAMLG +LV+LQF+PHYEA EN +IL TF+ | |
| Sbjct: | 63 | LNPAVTIGVALKGGLPWASVLPYILAQFAGAMLGQILVWLQFKPHYEAEENAGNILATFS | 122 |
| Query: | 127 | TGPALKDNFSNFLSEVLGTLVLVLTIFAIGKYNMPPGVGTMSVGMLVVGIGLSLGGTTGY | 186 |
| | | TGPA+KD SN +SE+LGT VLVLTIFA+G Y+ G+GT +VG L+VGIGLSLGGTTGY | |
| Sbjct: | 123 | TGPAIKDTVSNLISEILGTFVLVLTIFALGLYDFQAGIGTFAVGTLIVGIGLSLGGTTGY | 182 |
| Query: | 187 | AINPARDFGPRLLHALLPMKNKGDSDWTYSWIPIVGPMVGAILAALIFAM | 236 |
| | | A+NPARD GPR++H++LP+ NKGD DW+Y+WIP+VGP++GA LA L+F++ | |
| Sbjct: | 183 | ALNPARDLGPRIMHSILPIPNKGDGDWSYAWIPVVGPVIGAALAVLVFSL | 232 |

[5246] A related DNA sequence was identified in S. pyogenes <SEQ ID 2853> which encodes the amino acid sequence <SEQ ID 2854>. Analysis of this protein sequence reveals the following:

| Possible site: 50 | | | |
|---|---|---|---|
| >>> Seems to have a cleavable N-term signal seq. | | | |
| INTEGRAL | Likelihood = −9.13 | Transmembrane | 213-229 (209-232) |
| INTEGRAL | Likelihood = −5.52 | Transmembrane | 137-153 (132-157) |
| INTEGRAL | Likelihood = −4.35 | Transmembrane | 159-175 (155-178) |
| INTEGRAL | Likelihood = −1.17 | Transmembrane | 85-101 (85-101) |

----- Final Results -----
bacterial membrane --- Certainty = 0.4652 (Affirmative) < succ>
bacterial outside --- Certainty = 0.0000 (Not Clear) < succ>
bacterial cytoplasm --- Certainty = 0.0000 (Not Clear) < succ>

[5247] The protein has homology with the following sequences in the databases:

| >GP: AAA91618 GB: U12567 glycerol uptake facilitator | | | |
|---|---|---|---|
| [Streptococcus pneumoniae] | | | |
| Identities = 159/230 (69%), Positives = 196/230 (85%), Gaps = 1/230 (0%) | | | |
| Query: | 2 | DIFGEFLGTALLVLLGNGVVAGVVLPKTKTHASGWIVIATGWGIAVAVAVFISGKVAPAH | 61 |
| | | ++FGEFLGT +L+LLGNGVVAGVVLPKTK+++SGWIVI T GIAVAVAVF+SGK++PAH | |
| Sbjct: | 4 | ELFGEFLGTLILILLGNGVVAGVVLPKTKSNSSGWIVI-TMVGIAVAVAVFVSGKLSPAH | 62 |
| Query: | 62 | LNPAVSLAFAMSGTIAWSTAIAYSLAQLLGAMVGSTLVFLQFRPHYLAAESQADILGTFA | 121 |
| | | LNPAV++ A+ G + + W++ + Y LAQ GAM+G LV+LQF+PHY A E+ +IL TF+ | |
| Sbjct: | 63 | LNPAVTIGVALKGGLPWASVLPYILAQFAGAMLGQILVWLQFKPHYEAEENAGNILATFS | 122 |
| Query: | 122 | TGPAIRDTSSNLLSEIFGTFVLMLGILAFGLYDMPAGLGTLCVGTLVIGIGLSLGGTTGY | 181 |
| | | TGPAI+DT SNL+SEI GTFVL+L I A GLYD AG+GT VGTL++GIGLSLGGTTGY | |
| Sbjct: | 123 | TGPAIKDTVSNLISEILGTFVLVLTIFALGLYDFQAGIGTFAVGTLIVGIGLSLGGTTGY | 182 |
| Query: | 182 | AINPARDLGPRLVHAILPLNNKGDSDWSYAWIPVVGPIIGAVLAVLLFQV | 231 |
| | | A+NPARDLGPR++H+ILP+ NKGD DWSYAWIPVVGP+IGA LAVL+F + | |
| Sbjct: | 183 | ALNPARDLGPRIMHSILPIPNKGDGDWSYAWIPVVGPVIGAALAVLVFSL | 232 |

[5248] An alignment of the GAS and GBS proteins is shown below.

| Identities = 169/232 (72%), Positives = 202/232 (86%) | | | |
|---|---|---|---|
| Query: | 6 | MDIFGEFLGTALLVLLGNGVVAGVVLPKTKNHNSGWIVITFGWGLAVAIAALVSGNISPA | 65 |
| | | MDIFGEFLGTALLVLLGNGVVAGVVLPKTK H SGWIVI GWG+AVA+A +SG ++PA | |
| Sbjct: | 1 | MDIFGEFLGTALLVLLGNGVVAGVVLPKTKTHASGWIVIATGWGIAVAVAVFISGKVAPA | 60 |
| Query: | 66 | HLNPAVSLAFAIKGDLAWGTAILYMIAQIIGAMLGSLLVYLQFRPHYEAAENRADILGTF | 125 |
| | | HLNPAVSLAFA+ G +AW TAI Y +AQ++GAM+GS LV+LQFRPHY AAE++ADILGTF | |
| Sbjct: | 61 | HLNPAVSLAFAMSGTIAWSTAIAYSLAQLLGAMVGSTLVFLQFRPHYLAAESQADILGTF | 120 |
| Query: | 126 | ATGPALKDNFSNFLSEVLGTLVLVLTIFAIGKYNMPPGVGTMSVGMLVVGIGLSLGGTTG | 185 |
| | | ATGPA++D SN LSE+ GT VL+L I A G Y+MP G+GT+ VG LV+GIGLSLGGTTG | |
| Sbjct: | 121 | ATGPAIRDTSSNLLSEIFGTFVLMLGILAFGLYDMPAGLGTLCVGTLVIGIGLSLGGTTG | 180 |
| Query: | 186 | YAINPARDFGPRLLHALLPMKNKGDSDWTYSWIPIVGPMVGAILAALIFAMM | 237 |
| | | YAINPARD GPRL+HA+LP+ NKGDSDW+Y+WIP+VGP++GA+LA L+F +M | |
| Sbjct: | 181 | YAINPARDLGPRLVHAILPLNNKGDSDWSYAWIPVVGPIIGAVLAVLLFQVM | 232 |

[5249] Based on this analysis, it was predicted that these proteins and their epitopes could be useful antigens for vaccines or diagnostics.

### EXAMPLE 939

[5250] A DNA sequence (GBSx0996) was identified in S. agalactiae <SEQ ID 2855> which encodes the amino acid sequence <SEQ ID 2856>. This protein is predicted to be NADH oxidase. Analysis of this protein sequence reveals the following:

| Possible site: 23 | | | |
|---|---|---|---|
| >>> Seems to have a cleavable N-term signal seq. | | | |
| INTEGRAL | Likelihood = −2.87 | Transmembrane | 152-168 (152-168) |

----- Final Results -----
bacterial membrane --- Certainty = 0.2147 (Affirmative) < succ>
bacterial outside --- Certainty = 0.0000 (Not Clear) < succ>
bacterial cytoplasm --- Certainty = 0.0000 (Not Clear) < succ>

[5251] A related GBS nucleic acid sequence <SEQ ID 9523> which encodes amino acid sequence <SEQ ID 9524> was also identified.

[5252] The protein has homology with the following sequences in the GENPEPT database.

| >GP: CAA48728 GB: X68847 NADH oxidase [Enterococcus faecalis] | | | |
|---|---|---|---|
| Identities = 105/423 (24%), Positives = 197/423 (45%), Gaps = 15/423 (3%) | | | |
| Query: | 10 | IVILGASFAGMTCAQKLRQLNPNWDIVLIDKEIHPDYVPNGLNWYYRHEISGLNQAMWQT | 69 |
| | | +V++G + AG + + + +P ++ + ++ + ++ G+ Y + + | |
| Sbjct: | 3 | VVVVGCTHAGTSAVKSILANHPEAEVTVYERNDNISFLSCGIALYVGGVVKNAADLFYSN | 62 |
| Query: | 70 | EEEQRLQNIRCLFGLKVEKINKEDR-----ELMLSDGSSVYYDQLICAMGSQAESTYIDG | 124 |
| | | EE VE+IN +D+ L +V YD+L+ GS I G | |
| Sbjct: | 63 | PEELASLGATVKMEHNVEEINVDDKTVTAKNLQTGATETVSYDKLVMTTGSWPIIPPIPG | 122 |
| Query: | 125 | ADAQGVLTTKTYATSQNAKQVLDKSHKVAVVGAGIIGLDIAYSLHESGKAVTLLEAQERP | 184 |
| | | DA+ +L K Y+ + + + +V VVG G IG+++ + ESGK VTL++ +R | |
| Sbjct: | 123 | IDAENILLCKNYSQANVIIEKAKDAKRVVVVGGGYIGIELVEAFVESGKQVTLVDGLDRI | 182 |
| Query: | 185 | DFRHTDPDMSLPLLDAMAESKLHFFQNQKVEKITVTREEKLCLRTLTGDTFTVDAVILAV | 244 |
| | | ++ D + L + + ++ + V++ + K+ F D VI+ V | |
| Sbjct: | 183 | LNKYLDKPFTDVLEKELVDRGVNLALGENVQQFVADEQGKVAKVITPSQEFEADMVIMCV | 242 |
| Query: | 245 | NFRPDSRLLTGLVDLSVDNSVVVNDYFQTSDPNIYAIGDLIWSYFKGLNSAYYMPLINQA | 304 |
| | | FRP++ LL VD+ + ++ VN+Y QTS+P+I+A GD ++ + Y+PL A | |
| Sbjct: | 243 | GFRPNTELLKDKVDMLPNGAIEVNEYMQTSNPDIFAAGDSAVVHYNPSQTKNYIPLATNA | 302 |
| Query: | 305 | IRSAQMLAYHLSGHAVPKLKITRATGSKHFGYYRANIGLT---------ELEAGFYEDTV | 355 |
| | | +R ++ +L+ + +G FG+ + G+T ++EA +ED | |
| Sbjct: | 303 | VRQGMLVGRNLTEQKLAYRGTQGTSGLYLFGWKIGSTGVTKESAKLNGLDVEATVFEDNY | 362 |
| Query: | 356 | SVTYFPKEQYDLRIKLIANQKTGHLLGAQLISKENCLATANQLVQAISCDMTDFDLAFQD | 415 |
| | | + P + L ++L+ + T ++G QL+SK + +AN L A+ MT DLA D | |
| Sbjct: | 363 | RPEFMPTTEKVL-MELVYEKGTQRIVGGQLMSKYDITQSANTLSLAVQNKMTVEDLAISD | 421 |
| Query: | 416 | FIY | 418 |
| | | F + | |
| Sbjct: | 422 | FFF | 424 |

[5253] A related DNA sequence was identified in S. pyogenes <SEQ ID 2857> which encodes the amino acid sequence <SEQ ID 2858>. Analysis of this protein sequence reveals the following:

| Possible site: 16 | | | |
|---|---|---|---|
| >>> Seems to have an uncleavable N-term signal seq | | | |
| INTEGRAL | Likelihood = −3.35 | Transmembrane | 155-171 (155-173) |

----- Final Results -----
bacterial membrane --- Certainty = 0.2338 (Affirmative) < succ>
bacterial outside --- Certainty = 0.0000 (Not Clear) < succ>
bacterial cytoplasm --- Certainty = 0.0000 (Not Clear) < succ>
RGD motif: 54-56

[5254] The protein has homology with the following sequences in the databases:

| >GP: CAA44611 GB: X62755 NADH peroxidase [Enterococcus faecalis] | | | |
|---|---|---|---|
| Identities = 111/428 (25%), Positives = 202/428 (46%), Gaps = 24/428 (5%) | | | |
| Query: | 10 | VIGASFAGLAFVDKYKDLNPDSQIILIDKESCPNYIPNGINQLFRGDIQDLSDAMWGRAC | 69 |
| | | V+G+S G V++ +L+PD++I +K +++ G+ G ++D++ R | |
| Sbjct: | 5 | VLGSSHGGYEAVEELLNLHPDAEIQWYEKGDFISFLSCGMQLYLEGKVKDVNSV---RYM | 61 |
| Query: | 70 | LAAQIESN--HRFIQAEVLAIEAPSNTLLLKDS-QGRVFEEGYETLVCAMGASPQSHYIE | 126 |
| | | ++ES + F E+ AI+ + + +KD G E Y+L+ + GA P I | |
| Sbjct: | 62 | TGEKMESRGVNVFSNTEITAIQPKEHQVTVKDLVSGEERVENYDKLIISPGAVPFELDIP | 121 |
| Query: | 127 | TSQTNKVLVTKYYEESQASLKLIEASQE-----VLVIGAGLIGLDLAYSLSLQGKRVKLI | 181 |
| | | + + + + Q ++KL + + + V+VIG+G IG++ A + + GK+V +I | |
| Sbjct: | 122 | GKDLDNIYLMR---GRQWAIKLKQKTVDPEVNNVVVIGSGYIGIEAAEAFAKAGKKVTVI | 178 |
| Query: | 182 | EAAERPDFYQTDAELIAPVMAEMSTHHVTFINNKRVTAIHEIEGKVVAHTEQGDTFQGDL | 241 |
| | | + +RP D E + EM +++T + V +E +G+V + + DL | |
| Sbjct: | 179 | DILDRPLGVYLDKEFTDVLTEEMEANNITIATGETVER-YEGDGRVQKVVTDKNAYDADL | 237 |
| Query: | 242 | AILAINFRPNTHLLQGQVACALDKTILVNENLQTSQANIYAIGDMVSLHFGILGMDYYTP | 301 |
| | | ++A+ RPNT L+G + + I +E ++TS+ +++A+GD + + + | |
| Sbjct: | 238 | VVVAVGVRPNTAWLKGTLELHPNGLIKTDEYMRTSEPDVFAVGDATLIKYNPADTEVNIA | 297 |
| Query: | 302 | LINQAMKTGQALALHLAGYPIPPLQTVK-VLGSSHFDYYRASVGVTE-------EEAELY | 353 |
| | | L A K G+ +L P+ P V+ G + FDY AS G+ E +E + | |
| Sbjct: | 298 | LATNARKQGRFAVKNLE-EPVKPFPGVQGSSGLAVFDYKFASTGINEVMAQKLGKETKAV | 356 |
| Query: | 354 | MDTCSYLYQNGDSKNLFWLKLIARKTDGILIGAQLLSKTNALVIANQLGQALALKVTDAD | 413 |
| | | YL K W KL+ ++GAQL+SK + N + A+ K+T D | |
| Sbjct: | 357 | TVVEDYLMDFNPDKQKAWFKLVYDPETTQILGAQLMSKADLTANINAISLAIQAKMTIED | 416 |
| Query: | 414 | LAFQDFLF | 421 |
| | | LA+ DF F | |
| Sbjct: | 417 | LAYADFFF | 424 |

[5255] An alignment of the GAS and GBS proteins is shown below.

| Identities = 192/440 (43%), Positives = 276/440 (62%), Gaps = 7/440 (1%) | | | |
|---|---|---|---|
| Query: | 8 | KVIVILGASFAGMTCAQKLRQLNPNWDIVLIDKEIHPDYVPNGLNWYYRHEISGLNQAMW | 67 |
| | | K I ++GASFAG+ K + LNP+ I+LIDKE P+Y+PNG+N +R +I L+ AMW | |
| Sbjct: | 6 | KTIHVIGASFAGLAFVDKYKDLNPDSQIILIDKESCPNYIPNGINQLFRGDIQDLSDAMW | 65 |
| Query: | 68 | -QTEEEQRLQNIRCLFGLKVEKINKEDRELMLSDGSSVY----YDQLICAMGSQAESTYI | 122 |
| | | + ++++ +V I L+L D Y+ L+CAMG+ +S YI | |
| Sbjct: | 66 | GRACLAAQIESNHRFIQAEVLAIEAPSNTLLLKDSQGRVFEEGYETLVCAMGASPQSHYI | 125 |
| Query: | 123 | DGADAQGVLTTKTYATSQNAKQVLDKSHKVAVVGAGIIGLDIAYSLHESGKAVTLLEAQE | 182 |
| | | + + VL TK Y SQ + ++++ S +V V+GAG+IGLD+AYSL GK V L+EA E | |
| Sbjct: | 126 | ETSQTNKVLVTKYYEESQASLKLIEASQEVLVIGAGLIGLDLAYSLSLQGKRVKLIEAAE | 185 |
| Query: | 183 | RPDFRHTDPDMSLPLLDAMAESKLHFFQNQKVEKITVTREEKLCLRTLTGDTFTVDAVIL | 242 |
| | | RPDF TD ++ P++ M+ + F N++V I E K+ T GDTF D IL | |
| Sbjct: | 186 | RPDFYQTDAELIAPVMAEMSTHHVTFINNKRVTAIHEI-EGKVVAHTEQGDTFQGDLAIL | 244 |
| Query: | 243 | AVNFRPDSRLLTGLVDLSVDNSVVVNDYFQTSDPNIYAIGDLIWSYFKGLNSAYYMPLIN | 302 |
| | | A+NFRP++ LL G V ++D +++VN+ QTS NIYAIGD++ +F L YY PLIN | |
| Sbjct: | 245 | AINFRPNTHLLQGQVACALDKTILVNENLQTSQANIYAIGDMVSLHFGILGMDYYTPLIN | 304 |
| Query: | 303 | QAIRSAQMLAYHLSGHAVPKLKITRATGSKHFGYYRANIGLTELEAGFYEDTVSVTYFPK | 362 |
| | | QA+++ Q LA HL+G+ +P L+ + GS HF YYRA++G+TE EA Y DT S Y | |
| Sbjct: | 305 | QAMKTGQALALHLAGYPIPPLQTVKVLGSSHFDYYRASVGVTEEEAELYMDTCSYLYQNG | 364 |
| Query: | 363 | EQYDL-RIKLIANQKTGHLLGAQLISKENCLATANQLVQAISCDMTDFDLAFQDFIYTAR | 421 |
| | | + +L +KLIA + G L+GAQL+SK N L ANQL QA++ +TD DLAFQDF++ | |
| Sbjct: | 365 | DSKNLFWLKLIARKTDGILIGAQLLSKTNALVIANQLGQALALKVTDADLAFQDFLFLQG | 424 |
| Query: | 422 | ESEMAYMLHQAAINLYEKRI | 441 |
| | | S++AY LH+A + L+EKR+ | |
| Sbjct: | 425 | HSDLAYHLHEACLKLFEKRL | 444 |

[5256] There is also homology to SEQ IDs 1820, 1876, 4666.

[5257] Based on this analysis, it was predicted that these proteins and their epitopes could be useful antigens for vaccines or diagnostics.

### EXAMPLE 940

[5258] A DNA sequence (GBSx0998) was identified in S. agalactiae <SEQ ID 2859> which encodes the amino acid sequence <SEQ ID 2860>. Analysis of this protein sequence reveals the following:

Possible site: 31
>>> Seems to have no N-terminal signal sequence
----- Final Results -----
bacterial cytoplasm --- Certainty = 0.2980 (Affirmative) < succ>
bacterial membrane --- Certainty = 0.0000 (Not Clear) < succ>
bacterial outside --- Certainty = 0.0000 (Not Clear) < succ>

[5259] The protein has no significant homology with any sequences in the GENPEPT database.

[5260] No corresponding DNA sequence was identified in S. pyogenes.

[5261] Based on this analysis, it was predicted that this protein and its epitopes, could be useful antigens for vaccines or diagnostics.

### EXAMPLE 941

[5262] A DNA sequence (GBSx0999) was identified in S. agalactiae <SEQ ID 2861> which encodes the amino acid sequence <SEQ ID 2862>. Analysis of this protein sequence reveals the following:

Possible site: 23
>>> Seems to have no N-terminal signal sequence
----- Final Results -----
bacterial cytoplasm --- Certainty = 0.3548 (Affirmative) < succ>
bacterial membrane --- Certainty = 0.0000 (Not Clear) < succ>
bacterial outside --- Certainty = 0.0000 (Not Clear) < succ>

[5263] The protein has no significant homology with any sequences in the GENPEPT database.

[5264] No corresponding DNA sequence was identified in S. pyogenes.

[5265] Based on this analysis, it was predicted that this protein and its epitopes, could be useful antigens for vaccines or diagnostics.

### EXAMPLE 942

[5266] A DNA sequence (GBSx1000) was identified in S. agalactiae <SEQ ID 2863> which encodes the amino acid sequence <SEQ ID 2864>. Analysis of this protein sequence reveals the following:

Possible site: 29
>>> Seems to have no N-terminal signal sequence
----- Final Results -----
bacterial cytoplasm --- Certainty = 0.1685 (Affirmative) < succ>
bacterial membrane --- Certainty = 0.0000 (Not Clear) < succ>
bacterial outside --- Certainty = 0.0000 (Not Clear) < succ>

[5267] A related GBS nucleic acid sequence <SEQ ID 9525> which encodes amino acid sequence <SEQ ID 9526> was also identified.

[5268] The protein has no significant homology with any sequences in the GENPEPT database.

[5269] A related DNA sequence was identified in S. pyogenes <SEQ ID 2865> which encodes the amino acid sequence <SEQ ID 2866>. Analysis of this protein sequence reveals the following:

```
Possible site: 22
>>> Seems to have no N-terminal signal sequence
----- Final Results -----
                            bacterial cytoplasm --- Certainty = 0.3125(Affirmative) < succ>
                              bacterial membrane --- Certainty = 0.0000(Not Clear) < succ>
                                bacterial outside --- Certainty = 0.0000(Not Clear) < succ>
```

[5270] An alignment of the GAS and GBS proteins is shown below.

| Identities = 179/476 (37%), Positives = 279/476 (58%), Gaps = 5/476 (1%) | | | |
|---|---|---|---|
| Query: | 1 | MRIEALMEKERRVQYRLLSFLRGSPQAIALKLALLETGLSRATFLKYINNLNSYFEQEKV | 60 |
| | | M+IE LM+KERR QYRLL L + + + LK + + LS+ T LKYI+NLN ++ + | |
| Sbjct: | 21 | MKIEDLMDKERRAQYRLLVTLYHAKETLRLKDLMRLSNLSKVTLLKYIDNLNHLCREQGL | 80 |
| Query: | 61 | NCRIVYYKDKLFLEEDYNLSNQEVLKALMKDSIKYTILISLFNQRQFTIVGLSQELMVSE | 120 |
| | | C+++ KD L L+E+ ++++ L+K+S+ Y IL ++ F I LS ELMVSE | |
| Sbjct: | 81 | ACQLLLEKDSLSLKENGQFHWEDLVALLLKESVAYQILTYMYCHEHFNITNLSVELMVSE | 140 |
| Query: | 121 | ATLNRHLAHLNELLAEFDIAISQGKQIGDELQWRYFYYELFKQLWSYDKCQNMIKKLDLD | 180 |
| | | ATLNR LAHLN+LL+EFD+A+SQG+Q+G ELQWRYFY+ELF+ + ++ +LD | |
| Sbjct: | 141 | ATLNRQLAHLNQLLSEFDLALSQGRQLGSELQWRYFYFELFRHTLTRQGIDALVNQLDAS | 200 |
| Query: | 181 | SLILLIERLAQHTLTREAHQNLGLWFSICHHRLLAMEKISDNLKPIVKHYQCNAFYKRLD | 240 |
| | | L LIERL +L+ EA + L +W +I R+ + +D+ N F+KRL+ | |
| Sbjct: | 201 | HLATLIERLIGQSLSAEALEQLLIWLAISQARMSFQKSYNDHFLRDSDFMTSNIFFKRLE | 260 |
| Query: | 241 | AALVLYMSRFALEYREGEVLATFAFLHSQNILPINTMEYIMGFGGPIIDCVTETIIYFKK | 300 |
| | | + L+ Y+ R+ALE+ E + F FLH+ +LPI +M+Y +GFGGPI D ++E + KK | |
| Sbjct: | 261 | SMLLHYLRRYALEFDAFEAKSLFVFLHAYPLLPIASMKYSLGFGGPIADHISEALWLLKK | 320 |
| Query: | 301 | ESILADETSDQVIYQLGQLYSHYYFFKGHILVEQPDLEQTYRLIDHNMRDKLHHISKKII | 360 |
| | | ++ +T +++IY LG +S YFFKG IL + + + Y+L+ + R L I ++ | |
| Sbjct: | 321 | AHVIIHQTKEEIIYGLGIFFSKAYFFKGAILSQPTNSQYLYQLVGEDKRALLRVIINHLV | 380 |
| Query: | 361 | ANVNRIRPLTEDGCSLLTLHLLELLIFSKNSQKMPFRIGLDMTGNAVEQSLLEYRIRQHF | 420 |
| | | +++ D L+ +L LLIFS P +GL + N VE ++ E IR+H | |
| Sbjct: | 381 | LQMDQ----ETDFSQQLSDDILALLIFSIERHHEPLLVGLALGQNKVEAAIAELAIRRHL | 436 |
| Query: | 421 | SGNNSIQVEPYDEGKGFD-MVIYQSHSRPYKAKLTYCLNKGASERELQEIDSLIYD | 475 |
| | | Q+ PYD K +D ++ YQ+ P + Y L + +S EL +++ + D | |
| Sbjct: | 437 | GHRRDFQLMPYDHQKVYDCLITYQTVCLPRQDLPYYRLKQYSSPYELTALEAFLKD | 492 |

[5271] Based on this analysis, it was predicted that these proteins and their epitopes could be useful antigens for vaccines or diagnostics.

### EXAMPLE 943

[5272] A DNA sequence (GBSx1001) was identified in S. agalactiae <SEQ ID 2867> which encodes the amino acid sequence <SEQ ID 2868>. This protein is predicted to be transketolase (tktA-1). Analysis of this protein sequence reveals the following:

```
Possible site: 27
>>> Seems to have no N-terminal signal sequence
----- Final Results -----
                            bacterial cytoplasm --- Certainty = 0.2084(Affirmative) < succ>
                              bacterial membrane --- Certainty = 0.0000(Not Clear) < succ>
                                bacterial outside --- Certainty = 0.0000(Not Clear) < succ>
```

[5273] A related GBS nucleic acid sequence <SEQ ID 9527> which encodes amino acid sequence <SEQ ID 9528> was also identified.

[5274] The protein has homology with the following sequences in the GENPEPT database.

| >GP: BAB06071 GB: AP001515 transketolase [Bacillus halodurans] | | | |
|---|---|---|---|
| Identities = 403/661 (60%), Positives = 520/661 (77%), Gaps = 8/661 (1%) | | | |
| Query: | 6 | IDQLAVNTVRTLSIDAIQAANSGHPGLPMGAAPMAYVLWNKFLNVNPKTSRNWTNRDRFV | 65 |
| | | ++QLAVNT+RTLSID+++ ANSGHPG+PMGAAPMA+ LW KF+N NP + +W NRDRFV | |
| Sbjct: | 5 | VEQLAVNTIRTLSIDSVEKANSGHPGMPMGAAPMAFCLWTKFMNHNP-ANPDWVNRDRFV | 63 |
| Query: | 66 | LSAGHGSALLYSLLHLAGYDLSIDDLKQFRQWGSKTPGHPEVNHTDGVEATTGPLGQGIA | 125 |
| | | LSAGHGS LLYSLLHL GYDLS+++L+ FRQWGSKTPGHPE HT GVEATTGPLGQG+A | |
| Sbjct: | 64 | LSAGHGSMLLYSLLHLTGYDLSLEELQNFRQWGSKTPGHPEYGHTPGVEATTGPLGQGVA | 123 |
| Query: | 126 | NAVGMAMAEAHLAAKFNKPGFDLVDHYTYTLHGDGCLMEGVSQEAASLAGHLKLGKLVLL | 185 |
| | | AVGMAMAE HLAA +N+ G+++VDHYTYT+ GDG LMEGVS EAASLAGHLKLG+++LL | |
| Sbjct: | 124 | MAVGMAMAERHLAATYNRDGYNIVDHYTYTICGDGDLMEGVSAEAASLAGHLKLGRMILL | 183 |
| Query: | 186 | YDSNDISLDGPTSQSFTEDVKGRFESYGWQHILVKDGNDLEAIAAAIEAAKAETDKPTII | 245 |
| | | YDSNDISLDG SF+E V+ RF++YGW + V+DGN+L+ IA AIE AKA+ ++P++I | |
| Sbjct: | 184 | YDSNDISLDGDLHHSFSESVEDRFKAYGWHVVRVEDGNNLDEIAKAIEEAKAD-ERPSLI | 242 |
| Query: | 246 | EVKTIIGFGAEKQGTSSV-HGAPLGAEGITFAKKAYVWEYP-DFTVPAEVADRFASDLQA | 303 |
| | | EVKT IGFG+ +G SV HGAPLGA+ + K+AY W Y +F +P EVA + ++ | |
| Sbjct: | 243 | EVKTTIGFGSPNKGGKSVSHGAPLGADEVKLTKEAYEWTYENEFHIPEEVA-AYYEQVKQ | 301 |
| Query: | 304 | RGAKAEEAWNDLFAKYEVEYPELATEYKEAFAG---QAETVELKAHDLGSSVASRVSSQQ | 360 |
| | | +GA+ EE+WN+LFA+Y+ YPELA++++ A G + ++++G SVA+R SS + | |
| Sbjct: | 302 | QGAEKEESWNELFAQYKKAYPELASQFELAVHGDLPEGWDAVAPSYEVGKSVATRSSSGE | 361 |
| Query: | 361 | AIQQLSTQLPNLWGGSADLSASNNTMVAAETDFQASNYAGRNIWFGVREFAMAAAMNGIA | 420 |
| | | A+ + +P L+GGSADL++SN T++ E +F +Y+GRN+WFGVREFAM AAMNG+A | |
| Sbjct: | 362 | ALNAFAKTVPQLFGGSADLASSNKTLIKGEANFSRDDYSGRNVWFGVREFAMGAAMNGMA | 421 |
| Query: | 421 | LHGGTRVYGGTFFVFSNYLLPAVRMAALQNLPTVYVMTHDSIAVGEDGPTHEPIEQLASV | 480 |
| | | LHGG +V+G TFFVFS+YL PA+R+AAL LP +YV THDSIAVGEDGPTHEP+EQLAS+ | |
| Sbjct: | 422 | LHGGLKVFGATFFVFSDYLRPAIRLAALMQLPVIYVFTHDSIAVGEDGPTHEPVEQLASL | 481 |
| Query: | 481 | RSMPNLNVIRPADGNETNAAWQRAVSETDRPTMLVLTRQNLPVLEGTSELAQEGVNKGAY | 540 |
| | | R+MP L+VIRPADGNE+ AAW+ A+ D+PT LVL+RQNLP LEG + A +GV+KGAY | |
| Sbjct: | 482 | RAMPGLSVIRPADGNESVAAWKLALESKDQPTALVLSRQNLPTLEGAVDRAYDGVSKGAY | 541 |
| Query: | 541 | ILSEAKGELDGIIIATGSEVKLALDTQDKLESEGIHVRVVSMPAQNIFDEQEASYQEQVL | 600 |
| | | +L+ A G D +++A+GSEV LA++ ++ LE EGIH VVSMP+ + F+ Q A Y+E+VL | |
| Sbjct: | 542 | VLAPANGSADLLLLASGSEVSLAVNAKEALEKEGIHAAVVSMPSWDRFEAQSAEYKEEVL | 601 |
| Query: | 601 | PSAVTKRLAIEAGSSFGWGKYVGLNGLTLTIDTWGASAPGNRIFEEYGFTVENAVSLYKEL | 661 |
| | | PS VT RLAIE GSS GW KYVG G + ID +GASAPG RI EE+GFTV++ V+ K L | |
| Sbjct: | 602 | PSDVTARLAIEMGSSLGWAKYVGNQGDVVAIDRFGASAPGERIMEEFGFTVQHVVARAKAL | 662 |

[5275] There is also homology to SEQ ID 520.

[5276] Based on this analysis, it was predicted that these proteins and their epitopes could be useful antigens for vaccines or diagnostics.

### EXAMPLE 944

[5277] A DNA sequence (GBSx1002) was identified in S. agalactiae <SEQ ID 2869> which encodes the amino acid sequence <SEQ ID 2870>. Analysis of this protein sequence reveals the following:

```
Possible site: 39
>>> Seems to have no N-terminal signal sequence
----- Final Results -----
                            bacterial cytoplasm --- Certainty = 0.4477(Affirmative) < succ>
                              bacterial membrane --- Certainty = 0.0000(Not Clear) < succ>
                                bacterial outside --- Certainty = 0.0000(Not Clear) < succ>
```

[5278] A related GBS nucleic acid sequence <SEQ ID 9529> which encodes amino acid sequence <SEQ ID 9530> was also identified.

[5279] The protein has no significant homology with any sequences in the GENPEPT database.

[5280] A related DNA sequence was identified in S. pyogenes <SEQ ID 2871> which encodes the amino acid sequence <SEQ ID 2872>. Analysis of this protein sequence reveals the following:

```
Possible site: 42
>>> Seems to have no N-terminal signal sequence
----- Final Results -----
                            bacterial cytoplasm --- Certainty = 0.4581(Affirmative) < succ>
                              bacterial membrane --- Certainty = 0.0000(Not Clear) < succ>
                                bacterial outside --- Certainty = 0.0000(Not Clear) < succ>
```

[5281] An alignment of the GAS and GBS proteins is shown below.

| Identities = 27/79 (34%), Positives = 45/79 (56%) | | | |
|---|---|---|---|
| Query: | 3 | MKKECRDFYRQIQHTYNDISVREDAVLSSILLSASNGLIKTSDVPRVAYELTQQLENNEI | 62 |
| | | M+K+ + Y I+ Y+ RE+ LS +LL+ASN LIK S+ VAY+L Q ++N + | |
| Sbjct: | 1 | MEKKRQRLYDVIRQAYDYPENRENVALSQLLLAASNRLIKHSNPLLVAYQLNQDVDNYLL | 60 |
| Query: | 63 | EKSFESLATVKELKKSAKK | 81 |
| | | + ++ K+S +K | |
| Sbjct: | 61 | DNDILLPKSLCRFKQSLEK | 79 |

[5282] Based on this analysis, it was predicted that these proteins and their epitopes could be useful antigens for vaccines or diagnostics.

### EXAMPLE 945

[5283] A DNA sequence (GBSx1003) was identified in S. agalactiae <SEQ ID 2873> which encodes the amino acid sequence <SEQ ID 2874>. This protein is predicted to be ABC transporter, ATP-binding protein. Analysis of this protein sequence reveals the following:

```
Possible site: 56
>>> Seems to have no N-terminal signal sequence
----- Final Results -----
                            bacterial cytoplasm --- Certainty = 0.2610(Affirmative) < succ>
                              bacterial membrane --- Certainty = 0.0000(Not Clear) < succ>
                                bacterial outside --- Certainty = 0.0000(Not Clear) < succ>
```

[5284] The protein has homology with the following sequences in the GENPEPT database.

| >GP: CAB49925 GB: AJ248286 ABC transporter, ATP-binding protein | | | |
|---|---|---|---|
| [Pyrococcus abyssi] | | | |
| Identities = 96/243 (39%), Positives = 164/243 (66%), Gaps = 2/243 (0%) | | | |
| Query: | 1 | MIKFEHVSKVYGEKEALSDLTLSVKDGEIFGLIGHNGAGKTTTISILTSIIDATYGQVYI | 60 |
| | | MI E++ K +G KE L ++ +VKDGEI+GL+G NG+GK+TT+ IL+ II G+V + | |
| Sbjct: | 1 | MIIVENLRKRFGGKEVLKGISFTVKDGEIYGLLGPNGSGKSTTMRILSGIITDFEGKVIV | 60 |
| Query: | 61 | DDLLLTEHRDQIKKKIGYVPDSPDIFLNLTAEEYWYFLAKIYDVAPEDIEARITKLVDIF | 120 |
| | | + + + Q+K+ +GYVP++P ++ +LT E++ F+ + + + +E R+ KLV+ F | |
| Sbjct: | 61 | GGVEVAKDPLQVKRIVGYVPETPALYESLTPAEFFSFVGGVRGIPKDILEERVRKLVEAF | 120 |
| Query: | 121 | ELEEQRYNPIESFSHGMRQKVIVIGALLPNPDIWILDEPLTGLDPQASFDLKEMMKEHAK | 180 |
| | | E+++ I + S G +QK+ +I +LL +P + ILDE + GLDP+++ +E++ E + | |
| Sbjct: | 121 | EIKKYMNQLIGTLSFGTKQKISLISSLLHDPKVLILDEAMNGLDPKSARIFRELLYEFKE | 180 |
| Query: | 181 | NGKTVIFSTHVLAVAEQLCDRIGILKQGKLIFVGSLGELKMKYPDKDLETIYLELAGRQA | 240 |
| | | GK+++FSTHVLA+AE +CDR+GI +QG++I G++ ELK ++ LE ++L+L QA | |
| Sbjct: | 181 | EGKSIVFSTHVLALAELICDRVGIIYQGRIIAEGTVEELKEISKEERLEDVFLKLT--QA | 238 |
| Query: | 241 | SRE | 243 |
| | | E | |
| Sbjct: | 239 | KEE | 241 |

[5285] A related DNA sequence was identified in S. pyogenes <SEQ ID 2875> which encodes the amino acid sequence <SEQ ID 2876>. Analysis of this protein sequence reveals the following:

```
Possible site: 56
>>> Seems to have no N-terminal signal sequence
----- Final Results -----
                            bacterial cytoplasm --- Certainty = 0.2723(Affirmative) < succ>
                              bacterial membrane --- Certainty = 0.0000(Not Clear) < succ>
                                bacterial outside --- Certainty = 0.0000(Not Clear) < succ>
```

[5286] An alignment of the GAS and GBS proteins is shown below.

| Identities = 182/244 (74%), Positives = 215/244 (87%) | | | |
|---|---|---|---|
| Query: | 1 | MIKFEHVSKVYGEKEALSDLTLSVKDGEIFGLIGHNGAGKTTTISILTSIIDATYGQVYI | 60 |
| | | MI+F+HVSK+YG+KEALSDL +++ DGEIFGLIGHNGAGKTTTISILTSII+A+YG+V++ | |
| Sbjct: | 1 | MIEFKHVSKLYGDKEALSDLNVTINDGEIFGLIGHNGAGKTTTISILTSIIEASYGEVFV | 60 |
| Query: | 61 | DDLLLTEHRDQIKKKIGYVPDSPDIFLNLTAEEYWYFLAKIYDVAPEDIEARITKLVDIF | 120 |
| | | D LLTE+R+ IKK+I YVPDSPDIFLNLT EYW FLAKIY V+ ED E R+ +L +F | |
| Sbjct: | 61 | DGQLLTENREAIKKQIAYVPDSPDIFLNLTPNEYWQFLAKIYGVSDEDREERLAQLTTLF | 120 |
| Query: | 121 | ELEEQRYNPIESFSHGMRQKVIVIGALLPNPDIWILDEPLTGLDPQASFDLKEMMKEHAK | 180 |
| | | EL+E+ I+SFSHGMRQKVIVIGAL+ NP+IWILDEPLTGLDPQASFDLKEMMK HA | |
| Sbjct: | 121 | ELKEEVNQTIDSFSHGMRQKVIVIGALVSNPNIWILDEPLTGLDPQASFDLKEMMKAHAA | 180 |
| Query: | 181 | NGKTVIFSTHVLAVAEQLCDRIGILKQGKLIFVGSLGELKMKYPDKDLETIYLELAGRQA | 240 |
| | | +G TV+FSTHVL+VAEQLCDRIGILK+GKLIFVG++ ELK +PDKDLE+IYLELAGR+A | |
| Sbjct: | 181 | SGHTVLFSTHVLSVAEQLCDRIGILKKGKLIFVGTIDELKEHHPDKDLESIYLELAGRKA | 240 |
| Query: | 241 | SREG | 244 |
| | | EG | |
| Sbjct: | 241 | QEEG | 244 |

[5287] Based on this analysis, it was predicted that these proteins and their epitopes could be useful antigens for vaccines or diagnostics.

### EXAMPLE 946

[5288] A DNA sequence (GBSx1004) was identified in S. agalactiae <SEQ ID 2877> which encodes the amino acid sequence <SEQ ID 2878>. Analysis of this protein sequence reveals the following:

| Possible site: 55 | | | | |
|---|---|---|---|---|
| >>> Seems to have no N-terminal signal sequence | | | | |
| | INTEGRAL | Likelihood = −13.43 | Transmembrane | 504-520 (495-529) |
| | INTEGRAL | Likelihood = −12.58 | Transmembrane | 427-443 (400-449) |
| | INTEGRAL | Likelihood = −10.99 | Transmembrane | 151-167 (144-179) |
| | INTEGRAL | Likelihood = −8.44 | Transmembrane | 194-210 (189-214) |
| | INTEGRAL | Likelihood = −7.96 | Transmembrane | 48-64 (46-68) |
| | INTEGRAL | Likelihood = −7.32 | Transmembrane | 350-366 (348-378) |
| | INTEGRAL | Likelihood = −6.69 | Transmembrane | 475-491 (474-501) |
| | INTEGRAL | Likelihood = −6.00 | Transmembrane | 319-335 (318-337) |
| | INTEGRAL | Likelihood = −5.73 | Transmembrane | 252-268 (244-271) |
| | INTEGRAL | Likelihood = −4.78 | Transmembrane | 125-141 (121-148) |
| | INTEGRAL | Likelihood = −4.51 | Transmembrane | 76-92 (71-98) |
| | INTEGRAL | Likelihood = −3.56 | Transmembrane | 406-422 (400-426) |

```
----- Final Results -----
                              bacterial membrane --- Certainty = 0.6371(Affirmative) < succ>
                                bacterial outside --- Certainty = 0.0000(Not Clear) < succ>
                            bacterial cytoplasm --- Certainty = 0.0000(Not Clear) < succ>
```

[5289] The protein has no significant homology with any sequences in the GENPEPT database.

[5290] A related DNA sequence was identified in S. pyogenes <SEQ ID 2879> which encodes the amino acid sequence <SEQ ID 2880>. Analysis of this protein sequence reveals the following:

| Possible site: 37 | | | | |
|---|---|---|---|---|
| >>> Seems to have no N-terminal signal sequence | | | | |
| | INTEGRAL | Likelihood = −14.33 | Transmembrane | 167-183 (158-193) |
| | INTEGRAL | Likelihood = −12.52 | Transmembrane | 524-540 (508-546) |
| | INTEGRAL | Likelihood = −10.93 | Transmembrane | 63-79 (60-84) |
| | INTEGRAL | Likelihood = −8.39 | Transmembrane | 421-437 (414-456) |
| | INTEGRAL | Likelihood = −8.23 | Transmembrane | 208-224 (203-228) |
| | INTEGRAL | Likelihood = −8.23 | Transmembrane | 504-520 (493-521) |
| | INTEGRAL | Likelihood = −7.59 | Transmembrane | 139-155 (134-162) |
| | INTEGRAL | Likelihood = −6.64 | Transmembrane | 261-277 (257-287) |
| | INTEGRAL | Likelihood = −4.99 | Transmembrane | 446-462 (444-464) |
| | INTEGRAL | Likelihood = −4.25 | Transmembrane | 369-385 (367-387) |
| | INTEGRAL | Likelihood = −0.80 | Transmembrane | 87-103 (87-104) |
| | INTEGRAL | Likelihood = −0.11 | Transmembrane | 334-350 (334-350) |

```
----- Final Results -----
                              bacterial membrane --- Certainty = 0.6731(Affirmative) < succ>
                                bacterial outside --- Certainty = 0.0000(Not Clear) < succ>
                            bacterial cytoplasm --- Certainty = 0.0000(Not Clear) < succ>
```

[5291] A related sequence was also identified in GAS <SEQ ID 9173> which encodes the amino acid sequence <SEQ ID 9174>. Analysis of this protein sequence reveals the following:

| Possible site: 51 | | | | |
|---|---|---|---|---|
| >>> Seems to have no N-terminal signal sequence | | | | |
| | INTEGRAL | Likelihood = −14.33 | Transmembrane | 153-169 (144-179) |
| | INTEGRAL | Likelihood = −12.52 | Transmembrane | 510-526 (494-532) |
| | INTEGRAL | Likelihood = −10.93 | Transmembrane | 49-65 (46-70) |
| | INTEGRAL | Likelihood = −8.39 | Transmembrane | 407-423 (400-442) |
| | INTEGRAL | Likelihood = −8.23 | Transmembrane | 194-210 (189-214) |
| | INTEGRAL | Likelihood = −8.23 | Transmembrane | 490-506 (479-507) |
| | INTEGRAL | Likelihood = −7.59 | Transmembrane | 125-141 (120-148) |
| | INTEGRAL | Likelihood = −6.64 | Transmembrane | 247-263 (243-273) |
| | INTEGRAL | Likelihood = −4.99 | Transmembrane | 432-448 (430-450) |
| | INTEGRAL | Likelihood = −4.25 | Transmembrane | 355-371 (353-373) |
| | INTEGRAL | Likelihood = −0.80 | Transmembrane | 73-89 (73-90) |
| | INTEGRAL | Likelihood = −0.11 | Transmembrane | 320-336 (320-336) |

```
----- Final Results -----
                              bacterial membrane --- Certainty = 0.673(Affirmative) < succ>
                                bacterial outside --- Certainty = 0.0000(Not Clear) < succ>
                            bacterial cytoplasm --- Certainty = 0.0000(Not Clear) <succ>
```

[5292] An alignment of the GAS and GBS proteins is shown below.

| Identities = 255/542 (47%), Positives = 378/542 (69%), | | | |
|---|---|---|---|
| Gaps = 12/542 (2%) | | | |
| Query: | 1 | MNWSRIWELVKINILYSNPQTLSALRKKQEKHPKKEFSAYKSMFRNQLFQILLFSIIYVF | 60 |
| | | MNWS IWEL+KINILYSNPQ+L+ L+K+QEKHPK+ F AYKSM R Q I +F +IY+F | |
| Sbjct: | 15 | MNWSTIWELIKINILYSNPQSLANLKKRQEKHPKENFKAYKSMMRQQALMIAMFLVIYLF | 74 |
| Query: | 61 | LFVSLDFKEYPGYFTFYIGIFTLVSIIYSFIAMYSVFYESDDVKQYAYLPIKSEELYVAK | 120 |
| | | +F+ +DF YPG F+F + +F ++S + +F ++Y++FYES+D+K Y +LP+ SEELY+AK | |
| Sbjct: | 75 | MFIGVDFSHYPGLFSFDVAMFFIMSTLTAFSSLYTIFYESNDLKLYIHLPVTSEELYIAK | 134 |
| Query: | 121 | IFATFGMSVTFLMPILTLMIVAYWRIIGGPLAVLLAIINFAILFLSVTVISLYINSLIGR | 180 |
| | | I ++ GM FLMP+++L+++AYW+++G PL++L+AI+ F +L +S V+++YIN+ +G+ | |
| Sbjct: | 135 | IVSSLGMGAVFLMPLISLLLIAYWQLLGNPLSILVAIVLFLVLLVSSMVLAIYINAWVGK | 194 |
| Query: | 181 | AIIRSANRKLISTILISLATFGAIVPLLFVNMTSQK--MVQGKLQDIAPIPYVRGYYDIV | 238 |
| | | I+RS RKLISTI++ ++TFGA V + +N+++ K M G D IPY +G+YD+V | |
| Sbjct: | 195 | IIVRSRKRKLISTIMMFVSTFGAFVLIFAINISNNKRTMTDGVFTDYPTIPYFKGFYDVV | 254 |
| Query: | 239 | TAPFSMESLLNYYLPLLIILFLIGAIYKWVMPRYYQELLY----GQVKQRK--VHRQIDF | 292 |
| | | APFS +LLN++LPLL+IL ++ I VMP YY+E Y +VKQ K V+R | |
| Sbjct: | 255 | QAPFSTAALLNFWLPLLLILAMVYGIVTKVMPTYYREAFYISNENKVKQTKKPVNRP--- | 311 |
| Query: | 293 | SKRESINKTLVKHHLSSLQNATLLTNTFLMPLLYLAMFIVPILNNGKEIGRFFNENYFGI | 352 |
| | | + +S+ + L KHHL +LQNATLLT T+LMPL+Y+ +FI P L+ G + + +YFG+ | |
| Sbjct: | 312 | HQNQSLAQLLRKHHLLTLQNATLLTQTYLMPLMYVMLFIGPSLSRGTGFFKHISPDYFGV | 371 |
| Query: | 353 | AFLAGILIGSLCVMPASIVGVGISLEKSNFYFIKSLPISFSYFLKHKFVTLITLQLAVPT | 412 |
| | | A L G+ +G +C P S +GVGISLEK NF FIKSLPI+ FL KF L+ LQL VP | |
| Sbjct: | 372 | ALLFGVSLGVMCATPTSFIGVGISLEKDNFTFIKSLPITLKKFLMDKFCLLVGLQLIVPM | 431 |
| Query: | 413 | FIYFLVGFFLLKLSILVLLSFILGLVFMGLIEGQFIYRRDYKHLFLNWQEVTQLFNRGLG | 472 |
| | | IY + G F+L L L+ ++F LG +++G+ +YRRDY+ L L WQ++TQLF RG G | |
| Sbjct: | 432 | VIYLVFGLFVLHLHPLLTIAFCLGYALSLIVQGELMYRRDYRLLDLKWQDMTQLFTRGDG | 491 |
| Query: | 473 | QWLLVGSLFGMMIIGSFL-IGISIFWSMVWNTVAVNIIILIIGLLILSICQYLLLKNFWK | 531 |
| | | QWL +G +FG +I+ L G I +++ + ++I++ + L++L + Q + K FWK | |
| Sbjct: | 492 | QWLTMGLIFGNLIVAGVLGFGAVIIANIIQQPLLISILLSCLILMVLGLAQLWIQKTFWK | 551 |
| Query: | 532 | KL | 533 |
| | | L | |
| Sbjct: | 552 | SL | 553 |

[5293] Based on this analysis, it was predicted that these proteins and their epitopes could be useful antigens for vaccines or diagnostics.

### EXAMPLE 947

[5294] A DNA sequence (GBSx1005) was identified in S. agalactiae <SEQ ID 2881> which encodes the amino acid sequence <SEQ ID 2882>. Analysis of this protein sequence reveals the following:

| Possible site: 44 | | | | |
|---|---|---|---|---|
| >>> Seems to have no N-terminal signal sequence | | | | |
| | INTEGRAL | Likelihood = −8.12 | Transmembrane | 242-258 (239-265) |
| | INTEGRAL | Likelihood = −7.64 | Transmembrane | 430-446 (421-450) |
| | INTEGRAL | Likelihood = −5.84 | Transmembrane | 120-136 (113-139) |
| | INTEGRAL | Likelihood = −5.52 | Transmembrane | 212-228 (210-232) |
| | INTEGRAL | Likelihood = −5.20 | Transmembrane | 287-303 (283-313) |
| | INTEGRAL | Likelihood = −3.56 | Transmembrane | 148-164 (143-166) |
| | INTEGRAL | Likelihood = −0.48 | Transmembrane | 382-398 (382-398) |

```
----- Final Results -----
                              bacterial membrane --- Certainty = 0.4248(Affirmative) < succ>
                                bacterial outside --- Certainty = 0.0000(Not Clear) < succ>
                            bacterial cytoplasm --- Certainty = 0.0000(Not Clear) < succ>
```

[5295] The protein has homology with the following sequences in the GENPEPT database.

| >GP: CAB15963 GB: Z99124 phosphotransferase system (PTS) | | | |
|---|---|---|---|
| beta-glucoside-specific enzyme IIABC component [Bacillus subtilis] | | | |
| Identities = 175/447 (39%), Positives = 266/447 (59%), Gaps = 10/447 (2%) | | | |
| Query: | 4 | EYITLSKNIIKHLGGQNNINNVYHCQTRLRFSLNDPTKVNLEQLKTLKEVKTVVISGGQH | 63 |
| | | +Y LSK+I++ +GG+ N+ V HC TRLRF+L+D K + QL+ L V ISG Q | |
| Sbjct: | 2 | DYDKLSKDILQLVGGEENVQRVIHCMTRLRFNLHDNAKADRSQLEQLPGVMGTNISGEQF | 61 |
| Query: | 64 | QIVIGTHVAKVFEEI---NSLIETNSTTKIEQTKKAKAVSRIIDFVSGTFQPILPALSGA | 120 |
| | | QI+IG V KV++ I ++L + S Q K +S + D +SG F PILPA++GA | |
| Sbjct: | 62 | QIIIGNDVPKVYQAIVRHSNLSDEKSAGSSSQKKNV--LSAVFDVISGVFTPILPAIAGA | 119 |
| Query: | 121 | GMIKALLALLLVFKILTPSSQTYILLNLFADGVFYFLPILIAITAAQKLKANPILALGTV | 180 |
| | | GMIK L+AL + F + SQ +++L DG FYFLP+L+A++AA+K +NP +A | |
| Sbjct: | 120 | GMIKGLVALAVTFGWMAEKSQVHVILTAVGDGAFYFLPLLLAMSAARKFGSNPYVAAAIA | 179 |
| Query: | 181 | VMLLHPNWANLVASGKPVSLFHTIPFTLTNYASSVIPIILIICVQAYIEKYLKQIIPKSL | 240 |
| | | +LHP+ L+ +GKP+S F +P T Y+S+VIPI+L I + +Y+EK++ + SL | |
| Sbjct: | 180 | AAILHPDLTALLGAGKPIS-FIGLPVTAATYSSTVIPILLSIWIASYVEKWIDRFTHASL | 238 |
| Query: | 241 | RLVLVPMLIFLSMGILSFSILGPMGTIAGQYLAVIFTFLSKYASW-APAFLVGAFAPILI | 299 |
| | | +L++VP L + L+ +GP+G I G+YL+ +L +A A FL G F+ ++I | |
| Sbjct: | 239 | KLIVVPTFTLLIVVPLTLITVGPLGAILGEYLSSGVNYLFDHAGLVAMIFLAGTFS-LII | 297 |
| Query: | 300 | MFGVHSGIAALGITQLAKLGVDSIFGPGMLCSNIAQATAGTVVTLITKEKKLKEIAGPAA | 359 |
| | | M G+H + I +A+ G D + P M +N+ QA A V L ++ KK K +A + | |
| Sbjct: | 298 | MTGMHYAFVPIMINNIAQNGHDYLL-PAMFLANMGQAGASFAVFLRSRNKKFKSLALTTS | 356 |
| Query: | 360 | ITAYMGITEPILYGVNLPKRYPLIASLIGGGLGGLYAGIMNAHRFAV-GSSGLPGLFLYI | 418 |
| | | ITA MGITEP +YGVN+ + P A+LIGG GG + G+ + V G++GLP + ++I | |
| Sbjct: | 357 | ITALMGITEPAMYGVNMRLKKPFAAALIGGAAGGAFYGMTGVASYIVGGNAGLPSIPVFI | 416 |
| Query: | 419 | SHTSTHLFITMLIAVIITVSTTAILTF | 445 |
| | | T + I ++IA S +L F | |
| Sbjct: | 417 | GPTFIYAMIGLVIAFAAGTSAAYLLGF | 443 |

[5296] There is also homology to SEQ ID 2884.

[5297] Based on this analysis, it was predicted that this protein and its epitopes, could be useful antigens for vaccines or diagnostics.

### EXAMPLE 948

[5298] A DNA sequence (GBSx1006) was identified in S. agalactiae <SEQ ID 2885> which encodes the amino acid sequence <SEQ ID 2886>. This protein is predicted to be gamma-glutamyl kinase (proB). Analysis of this protein sequence reveals the following:

| Possible site: 58 | | | | |
|---|---|---|---|---|
| >>> Seems to have no N-terminal signal sequence | | | | |
| | INTEGRAL | Likelihood = −0.11 | Transmembrane | 160-176 (160-176) |

```
----- Final Results -----
                              bacterial membrane --- Certainty = 0.1044(Affirmative) < succ>
                                bacterial outside --- Certainty = 0.0000(Not Clear) < succ>
                            bacterial cytoplasm --- Certainty = 0.0000(Not Clear) < succ>
```

[5299] The protein has homology with the following sequences in the GENPEPT database.

| >GP: CAA63147 GB: X92418 gamma-glutamyl kinase [Streptococcus thermophilus] | | | |
|---|---|---|---|
| Identities = 200/265 (75%), Positives = 235/265 (88%) | | | |
| Query: | 1 | MKRHFETTRRIVIKVGTSSLVQTSGKINLSKIDHLAFVISSLMNRGMEVILVSSGAMGFG | 60 |
| | | MKR+F++ +R+VIK+GTSSLV SGKINL KID LAFVISSL N+G+EV+LVSSGAMGFG | |
| Sbjct: | 1 | MKRNFDSVKRLVIKIGTSSLVLPSGKINLEKIDQLAFVISSLHNKGIEVVLVSSGAMGFG | 60 |
| Query: | 61 | LDILKMDKRPQEISQQQAVSSVGQVAMMSLYSQIFSHYQTHVSQILLTRDVVVFPESLQN | 120 |
| | | L++L ++KRP E+ +QQAVSSVGQVAMMSLYSQ+FSHYQT VSQ+LLTRDVV + ESL N | |
| Sbjct: | 61 | LNVLDLEKRPAEVGKQQAVSSVGQVAMMSLYSQVFSHYQTKVSQLLLTRDVVEYSESLAN | 120 |
| Query: | 121 | VTNSFESLLSMGILPIVNENDAVSVDEMDHKTKFGDNDRLSAVVAKITKADLLIMLSDID | 180 |
| | | N+FESL +G++PIVNENDAVSVDEMDH TKFGDNDRLSA+VAK+ ADLLIMLSDID | |
| Sbjct: | 121 | AINAFESLFELGVVPIVNENDAVSVDEMDHATKFGDNDRLSAIVAKVVGADLLIMLSDID | 180 |
| Query: | 181 | GLFDKNPNIYDDAVLRSHVSEITDDIIKSAGGAGSKFGTGGMLSKIKSAQMVFDNNGQMI | 240 |
| | | GLFDKNPN+Y+DA LRS+V EIT++I+ SAGGAGSKFGTGGM+SKIKSAQMVF+N QM+ | |
| Sbjct: | 181 | GLFDKNPNVYEDATLRSYVPEITEEILASAGGAGSKFGTGGMMSKIKSAQMVFENQSQMV | 240 |
| Query: | 241 | LMNGANPRDILKVLDGHNIGTYFAQ | 265 |
| | | LMNG NPRDIL+VL+G IGT F Q | |
| Sbjct: | 241 | LMNGENPRDILRVLEGAKIGTLFKQ | 265 |

[5300] A related DNA sequence was identified in S. pyogenes <SEQ ID 2887> which encodes the amino acid sequence <SEQ ID 2888>. Analysis of this protein sequence reveals the following:

| Possible site: 61 | | | | |
|---|---|---|---|---|
| >>> Seems to have no N-terminal signal sequence | | | | |
| | INTEGRAL | Likelihood = −1.97 | Transmembrane | 163-179 (163-179) |
| | INTEGRAL | Likelihood = −0.06 | Transmembrane | 124-140 (124-140) |

```
----- Final Results -----
                              bacterial membrane --- Certainty = 0.1786(Affirmative) < succ>
                                bacterial outside --- Certainty = 0.0000(Not Clear) < succ>
                            bacterial cytoplasm --- Certainty = 0.0000(Not Clear) < succ>
```

[5301] The protein has homology with the following sequences in the databases:

| >GP: CAA63147 GB: X92418 gamma-glutamyl kinase [Streptococcus thermophilus] | | | |
|---|---|---|---|
| Identities = 212/265 (80%), Positives = 237/265 (89%) | | | |
| Query: | 4 | MKRQFEDVTRIVIKIGTSSLVLPTGKINLEKIDQLAFVISSLMNKGKEVILVSSGAMGFG | 63 |
| | | MKR F+ V R+VIKIGTSSLVLP+GKINLEKIDQLAFVISSL NKG EV+LVSSGAMGFG | |
| Sbjct: | 1 | MKRNFDSVKRLVIKIGTSSLVLPSGKINLEKIDQLAFVISSLHNKGIEVVLVSSGAMGFG | 60 |
| Query: | 64 | LDILKMEKRPTNLAKQQAVSSVGQVAMMSLYSQIFAYYQTNVSQILLTRDVVVFPESLAN | 123 |
| | | L++L +EKRP + KQQAVSSVGQVAMMSLYSQ+F++YQT VSQ+LLTRDVV + ESLAN | |
| Sbjct: | 61 | LNVLDLEKRPAEVGKQQAVSSVGQVAMMSLYSQVFSHYQTKVSQLLLTRDVVEYSESLAN | 120 |
| Query: | 124 | VTNAFESLISLGIVPIVNENDAVSVDEMDHATKFGDNDRLSAVVAGITKADLLIMLSDID | 183 |
| | | NAFESL LG+VPIVNENDAVSVDEMDHATKFGDNDRLSA+VA + ADLLIMLSDID | |
| Sbjct: | 121 | AINAFESLFELGVVPIVNENDAVSVDEMDHATKFGDNDRLSAIVAKVVGADLLIMLSDID | 180 |
| Query: | 184 | GLFDKNPTIYEDAQLRSHVANITQEIIASAGGAGSKFGTGGMLSKVQSAQMVFENKGQMV | 243 |
| | | GLFDKNP +YEDA LRS+V IT+EI+ASAGGAGSKFGTGGM+SK++SAQMVFEN+ QMV | |
| Sbjct: | 181 | GLFDKNPNVYEDATLRSYVPEITEEILASAGGAGSKFGTGGMMSKIKSAQMVFENQSQMV | 240 |
| Query: | 244 | LMNGANPRDILRVLEGQPLGTWFKQ | 268 |
| | | LMNG NPRDILRVLEG +GT FKQ | |
| Sbjct: | 241 | LMNGENPRDILRVLEGAKIGTLFKQ | 265 |

[5302] An alignment of the GAS and GBS proteins is shown below.

| Identities = 217/265 (81%), Positives = 242/265 (90%) | | | |
|---|---|---|---|
| Query: | 1 | MKRHFETTRRIVIKVGTSSLVQTSGKINLSKIDHLAFVISSLMNRGMEVILVSSGAMGFG | 60 |
| | | MKR FE RIVIK+GTSSLV +GKINL KID LAFVISSLMN+G EVILVSSGAMGFG | |
| Sbjct: | 4 | MKRQFEDVTRIVIKIGTSSLVLPTGKINLEKIDQLAFVISSLMNKGKEVILVSSGAMGFG | 63 |
| Query: | 61 | LDILKMDKRPQEISQQQAVSSVGQVAMMSLYSQIFSHYQTHVSQILLTRDVVVFPESLQN | 120 |
| | | LDILKM+KRP +++QQAVSSVGQVAMMSLYSQIF++YQT+VSQILLTRDVVVFPESL N | |
| Sbjct: | 64 | LDILKMEKRPTNLAKQQAVSSVGQVAMMSLYSQIFAYYQTNVSQILLTRDVVVFPESLAN | 123 |
| Query: | 121 | VTNSFESLLSMGILPIVNENDAVSVDEMDHKTKFGDNDRLSAVVAKITKADLLIMLSDID | 180 |
| | | VTN+FESL+S+GI+PIVNENDAVSVDEMDH TKFGDNDRLSAVVA ITKADLLIMLSDID | |
| Sbjct: | 124 | VTNAFESLISLGIVPIVNENDAVSVDEMDHATKFGDNDRLSAVVAGITKADLLIMLSDID | 183 |
| Query: | 181 | GLFDKNPNIYDDAVLRSHVSEITDDIIKSAGGAGSKFGTGGMLSKIKSAQMVFDNNGQMI | 240 |
| | | GLFDKNP IY+DA LRSHV+ IT +II SAGGAGSKFGTGGMLSK++SAQMVF+N GQM+ | |
| Sbjct: | 184 | GLFDKNPTIYEDAQLRSHVANITQEIIASAGGAGSKFGTGGMLSKVQSAQMVFENKGQMV | 243 |
| Query: | 241 | LMNGANPRDILKVLDGHNIGTYFAQ | 265 |
| | | LMNGANPRDIL+VL+G +GT+F Q | |
| Sbjct: | 244 | LMNGANPRDILRVLEGQPLGTWFKQ | 268 |

[5303] Based on this analysis, it was predicted that these proteins and their epitopes could be useful antigens for vaccines or diagnostics.

### EXAMPLE 949

[5304] A DNA sequence (GBSx1007) was identified in S. agalactiae <SEQ ID 2889> which encodes the amino acid sequence <SEQ ID 2890>. This protein is predicted to be unnamed protein product (proA). Analysis of this protein sequence reveals the following:

```
Possible site: 55
>>> Seems to have no N-terminal signal sequence
----- Final Results -----
                            bacterial cytoplasm --- Certainty = 0.3517(Affirmative) < succ>
                              bacterial membrane --- Certainty = 0.0000(Not Clear) < succ>
                                bacterial outside --- Certainty = 0.0000(Not Clear) < succ>
```

[5305] A related DNA sequence was identified in S. pyogenes <SEQ ID 2891> which encodes the amino acid sequence <SEQ ID 2892>. Analysis of this protein sequence reveals the following:

```
Possible site: 55
>>> Seems to have no N-terminal signal sequence
----- Final Results -----
                              bacterial membrane --- Certainty = 0.0000(Not Clear) < succ>
                                bacterial outside --- Certainty = 0.0000(Not Clear) < succ>
                            bacterial cytoplasm --- Certainty = 0.0000(Not Clear) < succ>
```

[5306] The protein has homology with the following sequences in the databases:

| >GP: CAA63148 GB: X92418 gamma-glutamyl phosphate reductase | | | |
|---|---|---|---|
| [Streptococcus thermophilus] | | | |
| Identities = 309/416 (74%), Positives = 355/416 (85%) | | | |
| Query: | 1 | MTDMRRLGQRAKQASLLIAPLSTQIKNRFLSTLAKALVDDTQTLLAANQKDLANAKEHGI | 60 |
| | | MT + LGQ+AK AS IA LST KN L+ +AKALV ++ + N KD+ANA E+GI | |
| Sbjct: | 1 | MTYVDTLGQQAKVASRQIAKLSTAAKNDLLNQVAKALVAESDYIFTENAKDMANASENGI | 60 |
| Query: | 61 | SDIMMDRLRLTSERIKAIAQGVQQVADLADPIGQVIKGYTNLDGLKILQKRVPLGVIAMI | 120 |
| | | S IM DRL LT +RI IA+GV+QVADL DPIGQV++GYTNLDGLKI+QKRVP+GVIAMI | |
| Sbjct: | 61 | SKIMQDRLLLTEDRIAGIAEGVRQVADLQDPIGQVVRGYTNLDGLKIVQKRVPMGVIAMI | 120 |
| Query: | 121 | FESRPNVSVDAFSLAFKTNNAIILRGGKDALHSNKALVKLIRQSLEKSGITPDAVQLVED | 180 |
| | | FESRPNVS+DAFSLAFKTNNAIILRGG+DA++SNKALV + R++L+ +GIT DAVQ VED | |
| Sbjct: | 121 | FESRPNVSIDAFSLAFKTNNAIILRGGRDAINSNKALVTVARKALKNAGITADAVQFVED | 180 |
| Query: | 181 | PSHAVAEELMQATDYVDVLIPRGGAKLIQTVKEKAKVPVIETGVGNVHIYVDAQADLDIA | 240 |
| | | SH VAEELM AT YVD+LIPRGGA+LIQTVKEKAKVPVIETGVGN HIYVD A+LD+A | |
| Sbjct: | 181 | TSHEVAEELMVATKYVDLLIPRGGARLIQTVKEKAKVPVIETGVGNCHIYVDKYANLDMA | 240 |
| Query: | 241 | TKIVINAKTKRPSVCNAAEGLVIHEAVAARFIPMLEKAINQVQPVEWRADDKALPLFEQA | 300 |
| | | T+IVINAKT+RPSVCNAAE LV+H + F+P LEKAI+++Q VE+RAD++AL L E+A | |
| Sbjct: | 241 | TQIVINAKTQRPSVCNAAESLVVHADIVEEFLPNLEKAISKIQSVEFRADERALKLMEKA | 300 |
| Query: | 301 | VPAKAEDFETEFLDYIMSVKVVSSLEEAISWINQYTSHHSEAIITRDIKAAETFQDLVDA | 360 |
| | | VPA EDF TEFLDYIMSVKVV SL+EAI+WIN YT+ HSEAI+T+DI AE FQD VDA | |
| Sbjct: | 301 | VPASPEDFATEFLDYIMSVKVVDSLDEAINWINTYTTSHSEAIVTQDISRAEQFQDDVDA | 360 |
| Query: | 361 | AAVYVNASTRFTDGFVFGLGAEIGISTQKMHARGPMGLEALTSTKFYINGDGHIRE | 416 |
| | | AAVYVNASTRFTDGFVFGLGAEIGISTQKMHARGPMGLEALTSTKFYING G IRE | |
| Sbjct: | 361 | AAVYVNASTRFTDGFVFGLGAEIGISTQKMHARGPMGLEALTSTKFYINGQGQIRE | 416 |

[5307] An alignment of the GAS and GBS proteins is shown below.

| Identities = 307/417 (73%), Positives = 353/417 (84%), Gaps = 1/417 (0%) | | | |
|---|---|---|---|
| Query: | 1 | MTYIEILGQNAKKASQSVARLSTASKNEILRDLARNIVADTETILTENARDVVKAKDNGI | 60 |
| | | MT + LGQ AK+AS +A LST KN L LA+ +V DT+T+L N +D+ AK++GI | |
| Sbjct: | 1 | MTDMRRLGQRAKQASLLIAPLSTQIKNRFLSTLAKALVDDTQTLLAANQKDLANAKEHGI | 60 |
| Query: | 61 | SEIMVDRLRLNKDRIQAIANGIYQVADLADPIGQVVSGYTNLDGLKILKKRVPLGVIAMI | 120 |
| | | S+IM+DRLRL +RI+AIA G+ QVADLADPIGQV+ GYTNLDGLKIL+KRVPLGVIAMI | |
| Sbjct: | 61 | SDIMMDRLRLTSERIKAIAQGVQQVADLADPIGQVIKGYTNLDGLKILQKRVPLGVIAMI | 120 |
| Query: | 121 | FESRPNVSVDAFSLAFKTGNAIILRGGKDAIFSNTALVNCMRQTLQDTGHNPDIVQLVED | 180 |
| | | FESRPNVSVDAFSLAFKT NAIILRGGKDA+ SN ALV +RQ+L+ +G PD VQLVED | |
| Sbjct: | 121 | FESRPNVSVDAFSLAFKTNNAIILRGGKDALHSNKALVKLIRQSLEKSGITPDAVQLVED | 180 |
| Query: | 181 | TSHVVAEELMQATDYVDVLIPRGGAKLIQTVKEKSKIPVIETGVGNVHIYIDEFADLDMA | 240 |
| | | SH VAEELMQATDYVDVLIPRGGAKLIQTVKEK+K+PVIETGVGNVHIY+D ADLD+A | |
| Sbjct: | 181 | PSHAVAEELMQATDYVDVLIPRGGAKLIQTVKEKAKVPVIETGVGNVHIYVDAQADLDIA | 240 |
| Query: | 241 | AKIVINAKTQRPSVCNAAEGLVVHQAIAKGFLSQLEKMLKESNQSVEFRADEEALQLLEN | 300 |
| | | KIVINAKT+RPSVCNAAEGLV+H+A+A F+ LEK + + Q VE+RAD++AL L E | |
| Sbjct: | 241 | TKIVINAKTKRPSVCNAAEGLVIHEAVAARFIPMLEKAINQV-QPVEWRADDKALPLFEQ | 299 |
| Query: | 301 | AVAASESDYATEFLDYIMSVKVVDSFEQAISWINKYSSHHSEAIITNNISRAEIFQDMVD | 360 |
| | | AV A D+ TEFLDYIMSVKVV S E+AISWIN+Y+SHHSEAIIT +I AE FQD+VD | |
| Sbjct: | 300 | AVPAKAEDFETEFLDYIMSVKVVSSLEEAISWINQYTSHHSEAIITRDIKAAETFQDLVD | 359 |
| Query: | 361 | AAAVYVNASTRFTDGFVFGLGAEIGISTQKLHARGPMGLEALTSTKYYINGTGQVRE | 417 |
| | | AAAVYVNASTRFTDGFVFGLGAEIGISTQK+HARGPMGLEALTSTK+YING G +RE | |
| Sbjct: | 360 | AAAVYVNASTRFTDGFVFGLGAEIGISTQKMHARGPMGLEALTSTKFYINGDGHIRE | 416 |

[5308] Based on this analysis, it was predicted that these proteins and their epitopes could be useful antigens for vaccines or diagnostics.

### EXAMPLE 950

[5309] A DNA sequence (GBSx1008) was identified in S. agalactiae <SEQ ID 2893> which encodes the amino acid sequence <SEQ ID 2894>. Analysis of this protein sequence reveals the following:

```
Possible site: 53
>>> Seems to have no N-terminal signal sequence
----- Final Results -----
                            bacterial cytoplasm --- Certainty = 0.1859(Affirmative) < succ>
                              bacterial membrane --- Certainty = 0.0000(Not Clear) < succ>
                                bacterial outside --- Certainty = 0.0000(Not Clear) < succ>
```

[5310] A related GBS nucleic acid sequence <SEQ ID 9531> which encodes amino acid sequence <SEQ ID 9532> was also identified.

[5311] A related DNA sequence was identified in S. pyogenes <SEQ ID 2895> which encodes the amino acid sequence <SEQ ID 2896>. Analysis of this protein sequence reveals the following:

```
Possible site: 23
>>> Seems to have no N-terminal signal sequence
----- Final Results -----
                            bacterial cytoplasm --- Certainty = 0.0853(Affirmative) < succ>
                              bacterial membrane --- Certainty = 0.0000(Not Clear) < succ>
                                bacterial outside --- Certainty = 0.0000(Not Clear) < succ>
```

[5312] An alignment of the GAS and GBS proteins is shown below.

| Identities = 259/315 (82%), Positives = 287/315 (90%) | | | |
|---|---|---|---|
| Query: | 1 | MTNDFHHITVLLHETVDMLDIKPDGIYVDATLGGAGHSEYLLSQLGPDGHLYAFDQDQKA | 60 |
| | | MT +FHH+TVLLHETVDMLDIKPDGIYVDATLGG+GHS YLLS+LG +GHLY FDQDQKA | |
| Sbjct: | 22 | MTKEFHHVTVLLHETVDMLDIKPDGIYVDATLGGSGHSAYLLSKLGEEGHLYCFDQDQKA | 81 |
| Query: | 61 | IDNAHIRLKKYVDTGQVTFIKDNFRNLSSNLKALGVSEINGICYDLGVSSPQLDERERGF | 120 |
| | | IDNA + LK Y+D GQVTFIKDNFR+L + L ALGV EI+GI YDLGVSSPQLDERERGF | |
| Sbjct: | 82 | IDNAQVTLKSYIDKGQVTFIKDNFRHLKARLTALGVDEIDGILYDLGVSSPQLDERERGF | 141 |
| Query: | 121 | SYKQDAPLDMRMNREQSLTAYDVVNTYSYHDLVRIFFKYGEDKFSKQIARKIEQVRAEKT | 180 |
| | | SYKQDAPLDMRM+R+ LTAY+VVNTY ++DLV+IFFKYGEDKFSKQIARKIEQ RA K | |
| Sbjct: | 142 | SYKQDAPLDMRMDRQSLLTAYEVVNTYPFNDLVKIFFKYGEDKFSKQIARKIEQARAIKP | 201 |
| Query: | 181 | ISTTTELAEIIKSSKSAKELKKKGHPAKQIFQAIRIEVNDELGAADESIQQAMDLLAVDG | 240 |
| | | I TTTELAE+IK++K AKELKKKGHPAKQIFQAIRIEVNDELGAADESIQ AM+LLA+DG | |
| Sbjct: | 202 | IETTTELAELIKAAKPAKELKKKGHPAKQIFQAIRIEVNDELGAADESIQDAMELLALDG | 261 |
| Query: | 241 | RISVITFHSLEDRLTKQLFKEASTVEVPKGLPFIPDDLQPKMELVNRKPILPSQEELEAN | 300 |
| | | RISVITFHSLEDRLTKQLFKEASTV+VPKGLP IP+D++PK ELV+RKPILPS EL AN | |
| Sbjct: | 262 | RISVITFHSLEDRLTKQLFKEASTVDVPKGLPLIPEDMKPKFELVSRKPILPSHSELTAN | 321 |
| Query: | 301 | NRAHSAKLRVARRIR | 315 |
| | | RAHSAKLRVA++IR | |
| Sbjct: | 322 | KRAHSAKLRVAKKIR | 336 |

[5313] Based on this analysis, it was predicted that these proteins and their epitopes could be useful antigens for vaccines or diagnostics.

### EXAMPLE 951

[5314] A DNA sequence (GBSx1009) was identified in S. agalactiae <SEQ ID 2897> which encodes the amino acid sequence <SEQ ID 2898>. This protein is predicted to be FtsL. Analysis of this protein sequence reveals the following:

| Possible site: 42 | | | | |
|---|---|---|---|---|
| >>> Seems to have no N-terminal signal sequence | | | | |
| | INTEGRAL | Likelihood = −8.92 | Transmembrane | 30-46 (24-49) |

```
----- Final Results -----
                              bacterial membrane --- Certainty = 0.4567(Affirmative) < succ>
                                bacterial outside --- Certainty = 0.0000(Not Clear) < succ>
                            bacterial cytoplasm --- Certainty = 0.0000(Not Clear) < succ>
```

[5315] The protein has homology with the following sequences in the GENPEPT database.

| >GP: AAC95455 GB: AF068903 YllD [Streptococcus pneumoniae] | | | |
|---|---|---|---|
| Identities = 44/99 (44%) , Positives = 71/99 (71%) | | | |
| Query: | 5 | KRTEAVTQTLQRHIKTFSRIEKAFYGAIVITAIIMAVGIIYLQSNSLQVKQEVNQLNSKI | 64 |
| | | ++ E Q LQ +K FSR+EKAFY +I +T +I+A+ II++Q+ LQV+ ++ ++N++I | |
| Sbjct: | 3 | EKMEKTGQILQMQLKRFSRVEKAFYFSIAVTTLIVAISIIFMQTKLLQVQNDLTKINAQI | 62 |
| Query: | 65 | NDKQTEFDNAKQEVNELSNRDRITKIAKDAGLTIQNDNI | 103 |
| | | +K+TE D+AKQEVNEL +R+ +IA L + N+NI | |
| Sbjct: | 63 | EEKKTELDDAKQEVNELLRAERLKEIANSHDLQLNNENI | 101 |

[5316] A related DNA sequence was identified in S. pyogenes <SEQ ID 2899> which encodes the amino acid sequence <SEQ ID 2900>. Analysis of this protein sequence reveals the following:

| Possible site: 50 | | | |
|---|---|---|---|
| >>> Seems to have no N-terminal signal sequence | | | |
| INTEGRAL | Likelihood = −5.79 | Transmembrane | 40-56 (37-58) |

----- Final Results -----
bacterial membrane --- Certainty= 0.3314 (Affirmative) < succ>
bacterial outside --- Certainty= 0.0000 (Not Clear) < succ>
bacterial cytoplasm --- Certainty= 0.0000 (Not Clear) < succ>

[5317] The protein has homology with the following sequences in the databases:

| >GP: AAC95455 GB: AF068903 YllD [Streptococcus pneumoniae] | | | |
|---|---|---|---|
| Identities = 45/94 (47%), Positives = 69/94 (72%) | | | |
| Query: | 24 | LQKRIKTFSRIEKAFYTAIIVTAITMAVSIIYLQSRKLQLQQEITSLNSHISDQKLELNN | 83 |
| | | LQ ++K FSR+EKAFY +I VT + +A+SII++Q++ LQ+Q ++T +N+ I ++K EL++ | |
| Sbjct: | 12 | LQMQLKRFSRVEKAFYFSIAVTTLIVAISIIFMQTKLLQVQNDLTKINAQIEEKKTELDD | 71 |
| Query: | 84 | AKQEVNELSRRDRIIDIAGKAGLSNRNNNIKKVE | 117 |
| | | AKQEVNEL R +R+ +IA L N NI+ E | |
| Sbjct: | 72 | AKQEVNELLRAERLKEIANSHDLQLNNENIRIAE | 105 |

[5318] An alignment of the GAS and GBS proteins is shown below.

| Identities = 71/108 (65%), Positives = 87/108 (79%), Gaps = 1/108 (0%) | | | |
|---|---|---|---|
| Query: | 1 | MTNEKRTEAVTQTLQRHIKTFSRIEKAFYGAIVITAIIMAVGIIYLQSNSLQVKQEVNQL | 60 |
| | | MTNEKRT+ VT LQ+ IKTFSRIEKAFY AI++TAI MAV IIYLQS LQ++QE+ L | |
| Sbjct: | 11 | MTNEKRTQVVTNALQKRIKTFSRIEKAFYTAIIVTAITMAVSIIYLQSRKLQLQQEITSL | 70 |
| Query: | 61 | NSKINDKQTEFDNAKQEVNELSNRDRITKIAKDAGLTIQNDNIYRKVD | 108 |
| | | NS I+D++ E +NAKQEVNELS RDRI IA AGL+ +N+NI +KV+ | |
| Sbjct: | 71 | NSHISDQKLELNNAKQEVNELSRRDRIIDIAGKAGLSNRNNNI-KKVE | 117 |

[5319] SEQ ID 2898 (GBS82) was expressed in E. coli as a GST-fusion product. SDS-PAGE analysis of total cell extract is shown in FIG. 15 (lane 2; 2 bands).

[5320] Based on this analysis, it was predicted that these proteins and their epitopes could be useful antigens for vaccines or diagnostics.

### EXAMPLE 952

[5321] A DNA sequence (GBSx1010) was identified in S. agalactiae <SEQ ID 2901> which encodes the amino acid sequence <SEQ ID 2902>. Analysis of this protein sequence reveals the following:

Possible site: 21
>>> Seems to have no N-terminal signal sequence
----- Final Results -----
bacterial cytoplasm --- Certainty = 0.1435 (Affirmative) < succ>
bacterial membrane --- Certainty = 0.0000 (Not Clear) < succ>
bacterial outside --- Certainty = 0.0000 (Not Clear) < succ>

[5322] The protein has no significant homology with any sequences in the GENPEPT database.

[5323] No corresponding DNA sequence was identified in S. pyogenes.

[5324] Based on this analysis, it was predicted that this protein and its epitopes, could be useful antigens for vaccines or diagnostics.

### EXAMPLE 953

[5325] A DNA sequence (GBSx1011) was identified in S. agalactiae <SEQ ID 2903> which encodes the amino acid sequence <SEQ ID 2904>. This protein is predicted to be unnamed protein product. Analysis of this protein sequence reveals the following:

| Possible site: 47 | | | |
|---|---|---|---|
| >>> Seems to have no N-terminal signal sequence | | | |
| INTEGRAL | Likelihood = −13.90 | Transmembrane | 37-53 (30-60) |

----- Final Results -----
bacterial membrane --- Certainty = 0.6562 (Affirmative) < succ>
bacterial outside --- Certainty = 0.0000 (Not Clear) < succ>
bacterial cytoplasm --- Certainty = 0.0000 (Not Clear) < succ>

[5326] A related DNA sequence was identified in S. pyogenes <SEQ ID 2905> which encodes the amino acid sequence <SEQ ID 2906>. Analysis of this protein sequence reveals the following:

| Possible site: 42 | | | |
|---|---|---|---|
| >>> Seems to have no N-terminal signal sequence | | | |
| INTEGRAL | Likelihood = −13.06 | Transmembrane | 33-49 (24-53) |

----- Final Results -----
bacterial membrane --- Certainty = 0.6222 (Affirmative) < succ>
bacterial outside --- Certainty = 0.0000 (Not Clear) < succ>
bacterial cytoplasm --- Certainty = 0.0000 (Not Clear) < succ>

[5327] An alignment of the GAS and GBS proteins is shown below.

| Identities = 480/753 (63%), Positives = 603/753 (79%), Gaps = 8/753 (1%) | | | |
|---|---|---|---|
| Query: | 5 | KKLKKIFLDYVIHIRDRRSPQKNRERVGQNLMILTIFLFFIFIINFVIIVGTDSKFGVNL | 64 |
| | | KK +K LDYV+ RDRR+P +NR RVGQN+M+LTIF+FFIFIINF+II+GTD KFGV+L | |
| Sbjct: | 2 | KKWQKYVLDYVV--RDRRTPVENRVRVGQNMMLLTIFIFFIFIINFMIIIGTDQKFGVSL | 59 |
| Query: | 65 | SKEAKKVYQQSMTVQAKRGTIYDRNGNPIAEDATTYSLYAIISKNYTTATGQKLYVQPSQ | 124 |
| | | S+ AKKVYQ+++T+QAKRGTIYDRNG IA D+TTYS+YAI+ K++ +A+ +KLYVQPSQ | |
| Sbjct: | 60 | SEGAKKVYQETVTIQAKRGTIYDRNGTAIAVDSTTYSIYAILDKSFVSASDEKLYVQPSQ | 119 |
| Query: | 125 | YEKVASILENKLGMKKNLVLKQLNQKKLFQVSFGSSGSGLSYTKMADIKKTMEKSDIKGI | 184 |
| | | YE VA IL+ LGMKK V+KQL +K LFQVSFG SGSG+SY+ M+ I+K ME + IKGI | |
| Sbjct: | 120 | YETVADILKKHLGMKKTDVIKQLKRKGLFQVSFGPSGSGISYSTMSTIQKAMEDAKIKGI | 179 |
| Query: | 185 | GFSTSPGRIYPNGIFASQFIGF-TLPQDDGDG-KKLVGNTGLEAALNKVLSGTDGKVTYE | 242 |
| | | F+TSPGR+YPNG FAS+FIG +L +D G K LVG TGLEA+ +K+LSG DG +TY+ | |
| Sbjct: | 180 | AFTTSPGRMYPNGTFASEFIGLASLTEDKKTGVKSLVGKTGLEASFDKILSGQDGVITYQ | 239 |
| Query: | 243 | KDRSGNVLLGTATTERRAVNGKDIYTTLSEPIQTVLETQMDVFAEKTKGKFASATVVNAK | 302 |
| | | KDR+G LLGT T ++A++GKDIYTTLSEPIQT LETQMDVF K+ G+ ASAT+VNAK | |
| Sbjct: | 240 | KDRNGTTLLGTGKTVKKAIDGKDIYTTLSEPIQTFLETQMDVFQAKSNGQLASATLVNAK | 299 |
| Query: | 303 | TGEILATSQRPTYNPSTLKGYDKKNLGTYNTLLYDNFFEPGSTMKVMTLASAIDSKHFNS | 362 |
| | | TGEILAT+QRPTYN TLKG + N Y+ L N FEPGSTMKVMTLA+AID K FN | |
| Sbjct: | 300 | TGEILATTQRPTYNADTLKGLENTNYKWYSALHQGN-FEPGSTMKVMTLAAAIDDKVFNP | 358 |
| Query: | 363 | TEVYNSAQ-YKIADAIIRDWDVNEGLSSGSYMTFPQGFAHSSNVGMVTLEQKMGRDKWLN | 421 |
| | | E +++A IADA I+DW +NEG+S+G YM + QGFA SSNVGM LEQKMG KW+N | |
| Sbjct: | 359 | NETFSNANGLTIADATIQDWSINEGISTGQYMNYAQGFAFSSNVGMTKLEQKMGNAKWMN | 418 |
| Query: | 422 | YLSKFKFGYPTRFGMLHESGGLFPSDNEVTIAMSSFGQGIGVTQVQMLRAFTSISNDGVM | 481 |
| | | YL+KF+FG+PTRFG+ E G+FPSDN VT AMS+FGQGI VTQ+QMLRAFT+ISN+G M | |
| Sbjct: | 419 | YLTKFRFGFPTRFGLKDEDAGIFPSDNIVTQAMSAFGQGISVTQIQMLRAFTAISNNGEM | 478 |
| Query: | 482 | LQPQFISSIYDPNTGTSRTARKEVVGKPVSKEAASKTRDYMVTVGTDPYYGTLYA-AGAP | 540 |
| | | L+PQFIS IYDPNT + RTA KE+VGKPVSK+AAS+TR YM+ VGTDP +GTLY+ P | |
| Sbjct: | 479 | LEPQFISQIYDPNTASFRTANKEIVGKPVSKKAASETRQYMIGVGTDPEFGTLYSKTFGP | 538 |
| Query: | 541 | VIQVGNQSVAVKSGTAQIAQEGGGGYLQ-GKNDTINSVVAMVPSENPDFIMYVTIQQPEK | 599 |
| | | +I+VG+ VAVKSGTAQI E G GY G + + SVVAMVP++ PDF+MYVT+ +P+ | |
| Sbjct: | 539 | IIKVGDLPVAVKSGTAQIGSEDGSGYQDGGLTNYVYSVVAMVPADKPDFLMYVTMTKPQH | 598 |
| Query: | 600 | FSITFWKDVVNPVLEQATAMKETILKPGLNDSEHQTKYKLSKIVGENPGHVAEELRRNLV | 659 |
| | | F FW+DVVNPVLE+A M++T+ KP ++D+ QT YKL VG+NPG + ELRRNLV | |
| Sbjct: | 599 | FGPLFWQDVVNPVLEEAYLMQDTLTKPVVSDANRQTTYKLPNFVGKNPGETSSELRRNLV | 658 |
| Query: | 660 | QPIILGNGSKVSKVSKRPGANLAENEQLLVLTNKLTELPDMYGWSKANVEQFAKWTGIKV | 719 |
| | | QP++LG GSK+ KVS +PG L EN+Q+L+L+++ E+PDMYGW+K+NV+ FAKWTGI + | |
| Sbjct: | 659 | QPVVLGTGSKIKKVSHQPGQTLTENQQVLILSDRFVEVPDMYGWTKSNVKTFAKWTGIDI | 718 |
| Query: | 720 | TYKGSTSGKVRKQSIDVGKSINKIKKIKITIGD | 752 |
| | | ++KG+ SG+V KQS+DVGKS+ KIKK+ IT+GD | |
| Sbjct: | 719 | SFKGTDSGRVMKQSVDVGKSLKKIKKMTITLGD | 751 |

[5328] A related GBS gene <SEQ ID 8691> and protein <SEQ ID 8692> were also identified. Analysis of this protein sequence reveals the following:

| Lipop: Possible site: −1 Crend: 8 | | | |
|---|---|---|---|
| McG: Discrim Score: −4.31 | | | |
| GvH: Signal Score (−7.5): −7.07 | | | |
| Possible site: 47 | | | |
| >>> Seems to have no N-terminal signal sequence | | | |
| ALOM program | count: 1 | value: −13.90 | threshold: 0.0 |

| | | | |
|---|---|---|---|
| INTEGRAL | Likelihood = −13.90 | Transmembrane | 37-53 (30-60) |

| | | |
|---|---|---|
| PERIPHERAL | Likelihood = 5.30 | 450 |

modified ALOM score: 3.28
*** Reasoning Step: 3
----- Final Results -----
bacterial membrane --- Certainty = 0.6562 (Affirmative) < succ>
bacterial outside --- Certainty = 0.0000 (Not Clear) < succ>
bacterial cytoplasm --- Certainty = 0.0000 (Not Clear) < succ>

[5329] The protein has homology with the following sequences in the databases:

[chemical structure]

[5330] SEQ ID 8692 (GBS352d) was expressed in E. coli as a GST-fusion product. SDS-PAGE analysis of total cell extract is shown in FIG. 145 (lane 15 & 16; MW 105.5 kDa). It was also expressed in E. coli as a His-fusion product. SDS-PAGE analysis of total cell extract is shown in FIG. 145 (lane 17 & 18; MW 80.5 kDa), in FIG. 182 (lane 3; MW 80 kDa) and in FIG. 185 (lane 4; MW 105 kDa). Purified GBS352d-GST is shown in lane 5 of FIG. 236.

[5331] Based on this analysis, it was predicted that these proteins and their epitopes could be useful antigens for vaccines or diagnostics.

### EXAMPLE 954

[5332] A DNA sequence (GBSx1012) was identified in S. agalactiae <SEQ ID 2907> which encodes the amino acid sequence <SEQ ID 2908>. Analysis of this protein sequence reveals the following:

Possible site: 36
>>>Seems to have no N-terminal signal sequence
----- Final Results -----
bacterial cytoplasm --- Certainty = 0.1950 (Affirmative) < succ>
bacterial membrane --- Certainty = 0.0000 (Not Clear) < succ>
bacterial outside --- Certainty = 0.0000 (Not Clear) < succ>

[5333] The protein has no significant homology with any sequences in the GENPEPT database.

[5334] No corresponding DNA sequence was identified in S. pyogenes.

[5335] Based on this analysis, it was predicted that this protein and its epitopes, could be useful antigens for vaccines or diagnostics.

### EXAMPLE 955

[5336] A DNA sequence (GBSx1013) was identified in S. agalactiae <SEQ ID 2909> which encodes the amino acid sequence <SEQ ID 2910>. This protein is predicted to be unnamed protein product (mraY). Analysis of this protein sequence reveals the following:

| Possible site: 18 | | | |
|---|---|---|---|
| >> Seems to have a cleavable N-term signal seq. | | | |
| INTEGRAL | Likelihood = −15.12 | Transmembrane | 56-72 (47-76) |
| INTEGRAL | Likelihood = −14.70 | Transmembrane | 203-219 (198-223) |
| INTEGRAL | Likelihood = −6.69 | Transmembrane | 318-334 (315-335) |
| INTEGRAL | Likelihood = −6.64 | Transmembrane | 83-99 (79-103) |
| INTEGRAL | Likelihood = −5.52 | Transmembrane | 179-195 (175-197) |
| INTEGRAL | Likelihood = −5.31 | Transmembrane | 232-248 (230-249) |
| INTEGRAL | Likelihood = −3.08 | Transmembrane | 119-135 (119-137) |
| INTEGRAL | Likelihood = −2.87 | Transmembrane | 151-167 (147-167) |
| INTEGRAL | Likelihood = −2.34 | Transmembrane | 254-270 (254-270) |

----- Final Results -----
bacterial membrane --- Certainty = 0.7050 (Affirmative) < succ>
bacterial outside --- Certainty = 0.0000 (Not Clear) < succ>
bacterial cytoplasm --- Certainty = 0.0000 (Not Clear) < succ>

[5337] A related DNA sequence was identified in S. pyogenes <SEQ ID 2911> which encodes the amino acid sequence <SEQ ID 2912>. Analysis of this protein sequence reveals the following:

| Possible site: 36 | | | |
|---|---|---|---|
| >>> Seems to have no N-terminal signal sequence | | | |
| INTEGRAL | Likelihood = −9.55 | Transmembrane | 52-68 (48-75) |
| INTEGRAL | Likelihood = −9.39 | Transmembrane | 175-191 (171-194) |
| INTEGRAL | Likelihood = −8.12 | Transmembrane | 30-46 (23-48) |
| INTEGRAL | Likelihood = −6.37 | Transmembrane | 121-137 (119-145) |
| INTEGRAL | Likelihood = −6.32 | Transmembrane | 293-309 (287-309) |
| INTEGRAL | Likelihood = −5.31 | Transmembrane | 204-220 (202-221) |
| INTEGRAL | Likelihood = −5.20 | Transmembrane | 151-167 (150-170) |
| INTEGRAL | Likelihood = −4.67 | Transmembrane | 226-242 (224-244) |
| INTEGRAL | Likelihood = −0.11 | Transmembrane | 91-107 (91-107) |

----- Final Results -----
bacterial membrane --- Certainty= 0.4821 (Affirmative) < succ>
bacterial outside --- Certainty= 0.0000 (Not Clear) < succ>
bacterial cytoplasm --- Certainty= 0.0000 (Not Clear) < succ>

[5338] The protein has homology with the following sequences in the databases:

| >GP: CAB70458 GB: A94911 unnamed protein product [unidentified] | | | |
|---|---|---|---|
| Identities = 244/309 (78%), Positives = 273/309 (87%), Gaps = 1/309 (0%) | | | |
| Query: | 1 | LKKIGGQQMHEDVKQHLAKAGTPTMGGTVFLLVATAVSLLVSLF-SIKNTQSLALISGIL | 59 |
| | | LKKIGGQQMHEDVKQHLAKAGTPTMGGTVFL+VA VSL+S+ S +N+ +L GIL | |
| Sbjct: | 28 | LKKIGGQQMHEDVKQHLAKAGTPTMGGTVFLVVALLVSLIFSIILSKENSGNLGATFGIL | 87 |
| Query: | 60 | SIVVIYGIIGFLDDFLKIFKQINEGLTAKQKLALQLVGGLMFYFLHVSPSGISSINVFGY | 119 |
| | | S+V+IYGIIGFLDDFLKIFKQINEGLT KQK++LQL+ GL+FYF+HV PSG S+IN+FG+ | |
| Sbjct: | 88 | SVVLIYGIIGFLDDFLKIFKQINEGLTPKQKMSLQLIAGLIFYFVHVLPSGTSAINIFGF | 147 |
| Query: | 120 | QLPLGIFYLFFVLFWVVGFSNAVNLTDGIDGLASISVVISLVTYGVIAYVQSQFDVLLLI | 179 |
| | | L +G Y FFVLFWVVGFSNAVNLTDGIDGLASISVVISL+TYG+IAY Q+QFD+LL+I | |
| Sbjct: | 148 | NLEVGYLYAFFVLFWVVGFSNAVNLTDGIDGLASISVVISLITYGIIAYNQTQFDILLII | 207 |
| Query: | 180 | GAMIGALLGFFCFNHKPAKVFMGDVGSLALGAMLAAISIALRQEWTLLIIGIVYVLETSS | 239 |
| | | MIGALLGFF FNHKPAKVFMGDVGSLALGAMLAAISIALRQEWTLL IG VYV ETSS | |
| Sbjct: | 208 | VIMIGALLGFFVFNHKPAKVFMGDVGSLALGAMLAAISIALRQEWTLLFIGFVYVFETSS | 267 |
| Query: | 240 | VMLQVSYFKYTKKKYGEGRRIFRMTPFHHHLELGGLSGKGKKWSEWQVDAFLWGVGSLAS | 299 |
| | | VMLQV+YFKYTKKK C G+RIFRMTPFHHHLELGG+SGKG KWSEW+VDAFLW +G S | |
| Sbjct: | 268 | VMLQVAYFKYTKKKTGVGKRIFRMTPFHHHLELGGVSGKGNKWSEWKVDAFLWAIGIFMS | 327 |
| Query: | 300 | LLVLAILYV | 308 |
| | | + LAILY+ | |
| Sbjct: | 328 | AITLAILYL | 336 |

[5339] An alignment of the GAS and GBS proteins is shown below.

| Identities = 244/309 (78%), Positives = 273/309 (87%), Gaps = 1/309 (0%) | | | |
|---|---|---|---|
| Query: | 28 | LKKIGGQQMHEDVKQHLAKAGTPTMGGTVFLIVALLVSLIFSIILSKENSGNLGATFGIL | 87 |
| | | LKKIGGQQMHEDVKQHLAKAGTPTMGGTVFL+VA VSL+S+ S +N+ +L GIL | |
| Sbjct: | 1 | LKKIGGQQMHEDVKQHLAKAGTPTMGGTVFLLVATAVSLLVSLF-SIKNTQSLALISGIL | 59 |
| Query: | 88 | SVVLIYGIIGFLDDFLKIFKQINEGLTPKQKMSLQLIAGLIFYFVHVLPSGTSAINIFGF | 147 |
| | | S+V+IYGIIGFLDDFLKIFKQINEGLT KQK++LQL+GL+FYF+HV PSG S+IN+FG+ | |
| Sbjct: | 60 | SIVVIYGIIGFLDDFLKIFKQINEGLTAKQKLALQLVGGLMFYFLHVSPSGISSINVFGY | 119 |
| Query: | 148 | YLEVGYLYAFFVLFWVVGFSNAVNLTDGIDGLASISVVISLITYGIIAYNQTQFDILLII | 207 |
| | | L +G Y FFVLFWVVGFSNAVNLTDGIDGLASISVVISL+TYG+IAY Q+QFD+LL+I | |
| Sbjct: | 120 | QLPLGIFYLFFVLFWVVGFSNAVNLTDGIDGLASISVVISLVTYGVIAYVQSQFDVLLLI | 179 |
| Query: | 208 | VIMIGALLGFFVFNHKPAKVFMGDVGSLALGAMLAAISIALRQEWTLLFIGFVYVFETSS | 267 |
| | | MIGALLGFF FNHKPAKVFMGDVGSLALGAMLAAISIALRQEWTLL IG VYV ETSS | |
| Sbjct: | 180 | GAMIGALLGFFCFNHKPAKVFMGDVGSLALGAMLAAISIALRQEWTLLIIGIVYVLETSS | 239 |
| Query: | 268 | VMLQVAYFKYTKKKTGVGKRIFRMTPFHHHLELGGVSGKGNKWSEWKVDAFLWAIGIFMS | 327 |
| | | VMLQV+YFKYTKKK G G+RIFRMTPFHHHLELGG+SGKG KWSEW+VDAFLW +G S | |
| Sbjct: | 240 | VMLQVSYFKYTKKKYGEGRRIFRMTPFHHHLELGGLSGKGKKWSEWQVDAFLWGVGSLAS | 299 |
| Query: | 328 | AITLAILYL | 336 |
| | | + LAILY+ | |
| Sbjct: | 300 | LLVLAILYV | 308 |

[5340] Based on this analysis, it was predicted that these proteins and their epitopes could be useful antigens for vaccines or diagnostics.

### EXAMPLE 956

[5341] A DNA sequence (GBSx1014) was identified in S. agalactiae <SEQ ID 2913> which encodes the amino acid sequence <SEQ ID 2914>. This protein is predicted to be autoaggregation-mediating protein (deaD). Analysis of this protein sequence reveals the following:

```
Possible site: 29
>>> Seems to have no N-terminal signal sequence
----- Final Results -----
                            bacterial cytoplasm --- Certainty = 0.3018(Affirmative) < succ>
                              bacterial membrane --- Certainty = 0.0000(Not Clear) < succ>
                                bacterial outside --- Certainty = 0.0000(Not Clear) < succ>
```

[5342] The protein has homology with the following sequences in the GENPEPT database.

| >GP:CAB14444 GB:Z99116 similar to ATP-dependent RNA helicase | | | |
|---|---|---|---|
| [Bacillus subtilis] | | | |
| Identities = 215/436 (49%), Positives = 310/436 (70%), Gaps = 5/436 (1%) | | | |
| Query: | 3 | FKDFNFKPYIQRALDELKFVDPTDVQAKLIPVVRSGRDLVGESKTGSGKTHTFLLPIFEK | 62 |
| | | F+ + KP+I A+ L F +PTD+Q +LIP V ++G+S+TG+GKTH +LLP+ K | |
| Sbjct: | 6 | FELYELKPFIIDAVHRLGFYEPTDIQKRLIPAVLKKESVIGQSQTGTGKTHAYLLPLLNK | 65 |
| Query: | 63 | LDESSDDVQVVITAPSRELGTQIYQATKQIAEHSE-QEIRVVNYVGGTDKLRQIEKLKVS | 121 |
| | | +D + D VQVVITAP+REL QIYQ +I + E +IR ++GGTDK + I+KLK+ | |
| Sbjct: | 66 | IDPAKDVVQVVITAPTRELANQIYQEALKITQGEEGSQIRSKCFIGGTDKQKSIDKLKI- | 124 |
| Query: | 122 | QPHIVIGTPGRIYDLVKSGDLAIHKAHTFVVDEADMTLDMGFLDTVDKIAGSLPKDVQIL | 181 |
| | | QPH+V+GTPGRI DL+K L++HKA + V+DEAD+ LDMGFL VD I +P+D+Q+L | |
| Sbjct: | 125 | QPHLVVGTPGRIADLIKEQALSVHKAESLVIDEADLMLDMGFLADVDYIGSRMPEDLQML | 184 |
| Query: | 182 | VFSATIPQKLQPFLKKYLTNPVMEKIKTATVIADTIDNWLLSTKGRDKNAQILELSKLMQ | 241 |
| | | VFSATIP+KL+PFLKKY+ NP ++ V A I++ L+ +K RDK+ + ++ + | |
| Sbjct: | 185 | VFSATIPEKLKPFLKKYMENPKYAHVEPKQVTAAKIEHILIPSKHRDKDKLLFDIMSHLN | 244 |
| Query: | 242 | PYLAMIFVNTKERADELHSYLSSNGLKVAKIHGGIAPRERKRIMNQVKNLEFEYIVATDL | 301 |
| | | PYL ++F NTK AD + YL+ G+K+ +HGG+ PRERK++M Q+ +LEF YI+ATDL | |
| Sbjct: | 245 | PYLGIVFANTKNTADHIAQYLTGKGMKIGLLHGGLTPRERKKVMKQINDLEFTYIIATDL | 304 |
| Query: | 302 | AARGIDIEGVSHVINDAIPQDLSFFVHRVGRTGRNGLSGTAITLYQPSDDSDIRELEKLG | 361 |
| | | AARGIDI+GVSHVIN +P DL F+VHRVGRT R G SG A+T+Y+ +D+ + LEK+G | |
| Sbjct: | 305 | AARGIDIKGVSHVINYELPDDLDFYVHRVGRTARAGSSGQAMTIYELTDEDALVRLEKMG | 364 |
| Query: | 362 | INFIPKVIKNGEFQDTYDRDRRNNREKSYQKLDTEMIGLVKKKKKKIKPGYKKKIQWKVD | 421 |
| | | I F ++ GE++ DR RR R+K+ + D E+ + KK KK+KPGYKKK+ ++++ | |
| Sbjct: | 365 | IEFEYLELEKGEWKKGDDRQRRKKRKKTPNEAD-EIAHRLVKKPKKVKPGYKKKMSYEME | 423 |
| Query: | 422 | EKRRKERRASNRAKGR | 437 |
| | | + ++K+RR N++K R | |
| Sbjct: | 424 | KIKKKQRR--NQSKKR | 437 |

[5343] A related DNA sequence was identified in S. pyogenes <SEQ ID 2915> which encodes the amino acid sequence <SEQ ID 2916>. Analysis of this protein sequence reveals the following:

Possible site: 54
>>> Seems to have no N-terminal signal sequence
----- Final Results -----
bacterial cytoplasm --- Certainty = 0.2315 (Affirmative) < succ>
bacterial membrane --- Certainty = 0.0000 (Not Clear) < succ>
bacterial outside --- Certainty = 0.0000 (Not Clear) < succ>

[5344] An alignment of the GAS and GBS proteins is shown below.

| Identities = 382/447 (85%), Positives = 420/447 (93%) | | | |
|---|---|---|---|
| Query: | 1 | MSFKDFNFKPYIQRALDELKFVDPTDVQAKLIPVVRSGRDLVGESKTGSGKTHTFLLPIF | 60 |
| | | MSFKD++FK Y+Q+AL+E+ FV+PT+VQ +LIP+V SGRDLVGESKTGSGKTHTFLLPIF | |
| Sbjct: | 1 | MSFKDYHFKQYVQQALEEIGFVNPTEVQKRLIPIVNSGRDLVGESKTGSGKTHTFLLPIF | 60 |
| Query: | 61 | EKLDESSDDVQVVITAPSRELGTQIYQATKQIAEHSEQEIRVVNYVGGTDKLRQIEKLKV | 120 |
| | | EKLDE+ +VQVVITAPSREL TQI+ A KQIA+H ++EIR+ NYVGGTDKLRQIEKLK | |
| Sbjct: | 61 | EKLDEAKAEVQVVITAPSRELATQIFDACKQIAKHFQEEIRLANYVGGTDKLRQIEKLKD | 120 |
| Query: | 121 | SQPHIVIGTPGRIYDLVKSGDLAIHKAHTFVVDEADMTLDMGFLDTVDKIAGSLPKDVQI | 180 |
| | | SQPHIVIGTPGRIYDLVKSGDLAIHKA TFVVDEADMT+DMGFLDTVDKIA SLPK VQI | |
| Sbjct: | 121 | SQPHIVIGTPGRIYDLVKSGDLAIHKATTFVVDEADMTMDMGFLDTVDKIAASLPKSVQI | 180 |
| Query: | 181 | LVFSATIPQKLQPFLKKYLTNPVMEKIKTATVIADTIDNWLLSTKGRDKNAQILELSKLM | 240 |
| | | LVFSATIPQKLQPFLKKYLTNPV+E+IKT TVIADTIDNWL+STKGRDKN Q+LE+ K M | |
| Sbjct: | 181 | LVFSATIPQKLQPFLKKYLTNPVIEQIKTKTVIADTIDNWLVSTKGRDKNGQLLEILKTM | 240 |
| Query: | 241 | QPYLAMIFVNTKERADELHSYLSSNGLKVAKIHGGIAPRERKRIMNQVKNLEFEYIVATD | 300 |
| | | QPY+AM+FVNTKERAD+LH++L++NGLKVAKIHGGI PRERKRIMNQVK L+FEYIVATD | |
| Sbjct: | 241 | QPYMAMLFVNTKERADDLHAFLTANGLKVAKIHGGIPPRERKRIMNQVKKLDFEYIVATD | 300 |
| Query: | 301 | LAARGIDIEGVSHVINDAIPQDLSFFVHRVGRTGRNGLSGTAITLYQPSDDSDIRELEKL | 360 |
| | | LAARGIDIEGVSHVINDAIPQDLSFFVHRVGRTGRNG++GTAITLYQPSDDSDI+ELEK+ | |
| Sbjct: | 301 | LAARGIDIEGVSHVINDAIPQDLSFFVHRVGRTGRNGMAGTAITLYQPSDDSDIKELEKM | 360 |
| Query: | 361 | GINFIPKVIKNGEFQDTYDRDRRNNREKSYQKLDTEMIGLVKKKKKKIKPGYKKKIQWKV | 420 |
| | | GI F PKV+KNGEFQDTYDRDRR NREK+YQKLDTEMIGLVKKKKKK+KPGYKKKIQW V | |
| Sbjct: | 361 | GIAFTPKVLKNGEFQDTYDRDRRQNREKAYQKLDTEMIGLVKKKKKKVKPGYKKKIQWAV | 420 |
| Query: | 421 | DEKRRKERRASNRAKGRAERKAKKQSF | 447 |
| | | DEKRRKERRA NRAKGRAERKAKKQ F | |
| Sbjct: | 421 | DEKRRKERRAENRAKGRAERKAKKQHF | 447 |

[5345] Based on this analysis, it was predicted that these proteins and their epitopes could be useful antigens for vaccines or diagnostics.

### EXAMPLE 957

[5346] A DNA sequence (GBSx1015) was identified in S. agalactiae <SEQ ID 2917> which encodes the amino acid sequence <SEQ ID 2918>. This protein is predicted to be unnamed protein product. Analysis of this protein sequence reveals the following:

Possible site: 19
>>> Seems to have a cleavable N-term signal seq.
----- Final Results -----
bacterial outside --- Certainty = 0.3000 (Affirmative) < succ>
bacterial membrane --- Certainty = 0.0000 (Not Clear) < succ>
bacterial cytoplasm --- Certainty = 0.0000 (Not Clear) < succ>

[5347] There is also homology to SEQ ID 2920.

[5348] A related GBS gene <SEQ ID 8693> and protein <SEQ ID 8694> were also identified. Analysis of this protein sequence reveals the following:

| Lipop: Possible site: −1 Crend: 3 | | |
|---|---|---|
| McG: Discrim Score: 8.85 | | |
| GvH: Signal Score (−7.5): −1.77 | | |
| Possible site: 19 | | |
| >>> Seems to have a cleavable N-term signal seq. | | |
| ALOM program count: 0 | value: 8.12 | threshold: 0.0 |

| | | |
|---|---|---|
| PERIPHERAL | Likelihood = 8.12 | 182 |

modified ALOM score: −2.12
*** Reasoning Step: 3
----- Final Results -----
bacterial outside --- Certainty = 0.3000 (Affirmative) < succ>
bacterial membrane --- Certainty = 0.0000 (Not Clear) < succ>

[5349] The protein has homology with the following sequences in the databases:

[chemical structure]

[5350] SEQ ID 8694 (GBS8) was expressed in E. coli as a His-fusion product. SDS-PAGE analysis of total cell extract is shown in FIG. 2 (lane 5; MW 31 kDa), FIG. 63 (lane 2; MW 31.3 kDa), FIG. 66 (lane 2 & 3; MW 31 kDa), in FIG. 178 (lane 2; MW 31 kDa), in FIG. 179 (lane 3 & 4; MW 31 kDa) and in FIG. 180 (lane 3; MW 31 kDa). It was also expressed in E. coli as a GST-fusion product, with SDS-PAGE shown in FIG. 66 (lanes 4 & 5; MW 56 kDa) and in FIG. 180 (lanes 4 & 5; MW 55 kDa).

[5351] GBS8-His was purified as shown in FIGS. 189 (lane 7), 211 (lane 3), 228 (lanes 4-5) and 230 (lanes 3-6). Purified GBS8-GST is shown in FIG. 209, lane 6.

[5352] The GBS8-His fusion product was purified (FIG. 90A) and used to immunise mice (lane 2 product; 12.9 μg/mouse). The resulting antiserum was used for Western blot (FIG. 90B), FACS (FIG. 90C), and in the in vivo passive protection assay (Table III). These tests confirm that the protein is immunoaccessible on GBS bacteria and that it is an effective protective immunogen.

[5353] Based on this analysis, it was predicted that these proteins and their epitopes could be useful antigens for vaccines or diagnostics.

### EXAMPLE 958

[5354] A DNA sequence (GBSx1016) was identified in S. agalactiae <SEQ ID 2921> which encodes the amino acid sequence <SEQ ID 2922>. Analysis of this protein sequence reveals the following:

Possible site: 30
>>> Seems to have no N-terminal signal sequence
----- Final Results -----
bacterial cytoplasm --- Certainty = 0.3991 (Affirmative) < succ>
bacterial membrane --- Certainty = 0.0000 (Not Clear) < succ>
bacterial outside --- Certainty = 0.0000 (Not Clear) < succ>

[5355] The protein has no significant homology with any sequences in the GENPEPT database.

[5356] No corresponding DNA sequence was identified in S. pyogenes.

[5357] Based on this analysis, it was predicted that this protein and its epitopes, could be useful antigens for vaccines or diagnostics.

### EXAMPLE 959

[5358] A DNA sequence (GBSx1017) was identified in S. agalactiae <SEQ ID 2923> which encodes the amino acid sequence <SEQ ID 2924>. This protein is predicted to be probable amino-acid abc transporter permease protein in idh-deor inter. Analysis of this protein sequence reveals the following:

| Possible site: 56 | | | | |
|---|---|---|---|---|
| >>> Seems to have no N-terminal signal sequence | | | | |
| INTEGRAL | Likelihood = −11.62 | Transmembrane | 50-66 | (41-74) |
| INTEGRAL | Likelihood = −0.90 | Transmembrane | 226-242 | (226-242) |
| INTEGRAL | Likelihood = −0.53 | Transmembrane | 80-96 | (80-96) |

----- Final Results -----
bacterial membrane --- Certainty = 0.5649 (Affirmative) < succ>
bacterial outside --- Certainty = 0.0000 (Not Clear) < succ>
bacterial cytoplasm --- Certainty = 0.0000 (Not Clear) < succ>

[5359] The protein has homology with the following sequences in the GENPEPT database.

| >GP:CAB15985 GB:Z99124 similar to amino acid ABC transporter | | | |
|---|---|---|---|
| (permease) [Bacillus subtilis] | | | |
| Identities = 90/224 (40%), Positives = 137/224 (60%), Gaps = 10/224 (4%) | | | |
| Query: | 28 | WKAVLDAIPSILERLPITLLLTVAGALFGLILALIFAVVKINRVKILYPIQALFVSFLRG | 87 |
| | | W+ ++ A P++++ LPITL + +A +F +I LI A++ N++ +L+ + L++SF RG | |
| Sbjct: | 6 | WEFMISAFPTLIQALPITLFMAIAAMIFAIIGGLILALITKNKIPVLHQLSKLYISFFRG | 65 |
| Query: | 88 | TPILVQLMLSYYGIPLFLKFLNQKYGFDWNINAIPASVFAITAFAFNEAAYTSETIRAAI | 147 |
| | | P LVQL L YYG+P +++ + A AI + AAY +E RAA+ | |
| Sbjct: | 66 | VPTLVQLFLIYYGLPQLFPEMSK----------MTALTAAIIGLSLKNAAYLAEIFRAAL | 115 |
| Query: | 148 | LSVDQGEIEAARSLGMTSAQVYRRVIIPNAAVVATPTLINTLIGLTKGTSLAFNAGIVEM | 207 |
| | | SVD G++EA S+GMT Q YRR+I+P A A P NT IGL K TSLAF G++EM | |
| Sbjct: | 116 | NSVDDGQLEACLSVGMTKFQAYRRIILPQAIRNAIPATGNTFIGLLKETSLAFTLGVMEM | 175 |
| Query: | 208 | FAQAQIMGGSDYRYFERYISVALVYWAVSFLIEQLGNAIERKMA | 251 |
| | | FAQ ++ + +YFE Y++VA+VYW ++ + L + ER M+ | |
| Sbjct: | 176 | FAQGKMYASGNLKYFETYLAVAIVYWVLTIIYSILQDLFERAMS | 219 |

[5360] A related DNA sequence was identified in S. pyogenes <SEQ ID 2925> which encodes the amino acid sequence <SEQ ID 2926>. Analysis of this protein sequence reveals the following:

| Possible site: 43 | | | | |
|---|---|---|---|---|
| >>> Seems to have no N-terminal signal sequence | | | | |
| | INTEGRAL | Likelihood = −7.27 | Transmembrane | 80-96 (74-104) |
| | INTEGRAL | Likelihood = −1.06 | Transmembrane | 207-223 (207-223) |
| | INTEGRAL | Likelihood = −0.90 | Transmembrane | 110-126 (110-126) |

```
----- Final Results -----
                              bacterial membrane --- Certainty = 0.3909(Affirmative) < succ>
                                bacterial outside --- Certainty = 0.0000(Not Clear) < succ>
                            bacterial cytoplasm --- Certainty = 0.0000(Not Clear) < succ>
```

[5361] A related sequence was also identified in GAS <SEQ ID 9167> which encodes the amino acid sequence <SEQ ID 9168>. Analysis of this protein sequence reveals the following:

| Possible site: 60 | | | | |
|---|---|---|---|---|
| >>> Seems to have no N-terminal signal sequence | | | | |
| | INTEGRAL | Likelihood = −7.27 | Transmembrane | 50-66 (44-74) |
| | INTEGRAL | Likelihood = −1.06 | Transmembrane | 177-193 (177-193) |
| | INTEGRAL | Likelihood = −0.90 | Transmembrane | 80-96 (80-96) |

```
----- Final Results -----
                              bacterial membrane --- Certainty = 0.391(Affirmative) < succ>
                                bacterial outside --- Certainty = 0.0000(Not Clear) < succ>
                            bacterial cytoplasm --- Certainty = 0.0000(Not Clear) < succ>
```

[5362] An alignment of the GAS and GBS proteins is shown below.

| Identities = 212/267 (79%), Positives = 238/267 (88%) | | | |
|---|---|---|---|
| Query: | 1 | MNQFILTGGWSWYNNLVSQVPAGKLFSWKAVLDAIPSILERLPITLLLTVAGALFGLILA | 60 |
| | | M LT GW++Y+ L+S +P GKLFSW AV DAIP+I++RLPITL LT++GA FGL+LA | |
| Sbjct: | 31 | MTSVFLTSGWAFYDYLISPIPHGKLFSWHAVFDAIPNIIQRLPITLGLTLSGATFGLVLA | 90 |
| Query: | 61 | LIFAVVKINRVKILYPIQALFVSFLRGTPILVQLMLSYYGIPLFLKFLNQKYGFDWNINA | 120 |
| | | LIFA+VKIN+VK+LYPIQA+FVSFLRGTPILVQLML+YYGIPLFLKFLNQKYGFDWN+NA | |
| Sbjct: | 91 | LIFALVKINKVKLLYPIQAIFVSFLRGTPILVQLMLTYYGIPLFLKFLNQKYGFDWNVNA | 150 |
| Query: | 121 | IPASVFAITAFAFNEAAYTSETIRAAILSVDQGEIEAARSLGMTSAQVYRRVIIPNAAVV | 180 |
| | | IPAS+FAITAFAFNEAAY SETIRAAILSVD GEIEAA+SLGMTS QVYRRVIIPNA VV | |
| Sbjct: | 151 | IPASIFAITAFAFNEAAYASETIRAAILSVDTGEIEAAKSLGMTSVQVYRRVIIPNATVV | 210 |
| Query: | 181 | ATPTLINTLIGLTKGTSLAFNAGIVEMFAQAQIMGGSDYRYFERYISVALVYWAVSFLIE | 240 |
| | | A PTLIN LIGLTKGTSLAFNAGIVEMFAQAQI+GGSDYRYFERYISVALVYW++S L+E | |
| Sbjct: | 211 | AIPTLINGLIGLTKGTSLAFNAGIVEMFAQAQILGGSDYRYFERYISVALVYWSISILME | 270 |
| Query: | 241 | QLGNAIERKMAIKAPRHLTDEIPGGVR | 267 |
| | | Q+G IE KMAIKAP +E G +R | |
| Sbjct: | 271 | QVGRLIENKMAIKAPEQARNEKLGELR | 297 |

[5363] There is also homology to SEQ ID 4794.

[5364] Based on this analysis, it was predicted that these proteins and their epitopes could be useful antigens for vaccines or diagnostics.

### EXAMPLE 960

[5365] A DNA sequence (GBSx1018) was identified in S. agalactiae <SEQ ID 2927> which encodes the amino acid sequence <SEQ ID 2928>. This protein is predicted to be amino acid ABC transporter, ATP-binding protein. Analysis of this protein sequence reveals the following:

```
Possible site: 46
>>> Seems to have no N-terminal signal sequence
----- Final Results -----
                            bacterial cytoplasm --- Certainty = 0.3205(Affirmative) < succ>
                              bacterial membrane --- Certainty = 0.0000(Not Clear) < succ>
                                bacterial outside --- Certainty = 0.0000(Not Clear) < succ>
```

[5366] The protein has homology with the following sequences in the GENPEPT database.

| >GP: AAC00329 GB: AF008220 putative amino acid | | | |
|---|---|---|---|
| transporter [Bacillus subtilis] | | | |
| Identities = 121/247 (48%), Positives = 176/247 (70%) | | | |
| Query: | 1 | MIKLRQLTKSFSGQKVLDKLDLDIEKGQVVALVGASGAGKSTFLRSMNYLEEPDYGTIEI | 60 |
| | | MI+++ + K F VL ++L + KG+VV ++G SG+GK+TFLR +N LE PD G I I | |
| Sbjct: | 1 | MIEIKNIHKQFGIHHVLKGINLTVRKGEVVTIIGPSGSGKTTFLRCLNLLERPDEGIISI | 60 |
| Query: | 61 | DDFKVDFKSISKDDILTLRRKLAMVFQQFNLFERRTALDNVKEGLKIVKKMSDQEATRIA | 120 |
| | | D ++ + SK ++ LR++ AMVFQQ++LF +T ++NV EGL I +KM Q+A +A | |
| Sbjct: | 61 | HDKVINCRFPSKKEVHWLRKQTAMVFQQYHLFAHKTVIENVMEGLTIARKMRKQDAYAVA | 120 |
| Query: | 121 | RDELAKVGLADREKYYPRHLSGGQKQRVALARALAMKPDVLLLDEPTSALDPELVGEVEK | 180 |
| | | +EL KVGL D+ YP LSGGQKQRV +ARALA+ PDVLL DEPT+ALDPELVGEV + | |
| Sbjct: | 121 | ENELRKVGLQDKLNAYPSQLSGGQKQRVGIARALAIHPDVLLFDEPTAALDPELVGEVLE | 180 |
| Query: | 181 | SIADAAKQGQTMVLVSHDMNFVYQVADKVLFLEKGRILESGTPEQLFNHPLEERTKEFFA | 240 |
| | | + + K G TM++V+H+M F +V+D+V+F+++G I+E GTPE++F H ++RT++F | |
| Sbjct: | 181 | VMLEIVKTGATMIVVTHEMEFARRVSDQVVFMDEGVIVEQGTPEEVFRHTKKDRTRQFLR | 240 |
| Query: | 241 | SYNKSYL | 247 |
| | | + YL | |
| Sbjct: | 241 | RVSPEYL | 247 |

[5367] A related DNA sequence was identified in S. pyogenes <SEQ ID 2929> which encodes the amino acid sequence <SEQ ID 2930>. Analysis of this protein sequence reveals the following:

```
Possible site: 13
>>> Seems to have no N-terminal signal sequence
----- Final Results -----
                            bacterial cytoplasm --- Certainty = 0.1840(Affirmative) < succ>
                              bacterial membrane --- Certainty = 0.0000(Not Clear) < succ>
                                bacterial outside --- Certainty = 0.0000(Not Clear) < succ>
```

[5368] An alignment of the GAS and GBS proteins is shown below.

| Identities = 199/247 (80%), Positives = 229/247 (92%) | | | |
|---|---|---|---|
| Query: | 1 | MIKLRQLTKSFSGQKVLDKLDLDIEKGQVVALVGASGAGKSTFLRSMNYLEEPDYGTIEI | 60 |
| | | MI +R L+K+FSGQKVLD L LDIEKGQV+ALVGASGAGKSTFLRS+NYLE+PD G+I I | |
| Sbjct: | 2 | MITIRNLSKTFSGQKVLDSLALDIEKGQVIALVGASGAGKSTFLRSLNYLEKPDSGSISI | 61 |
| Query: | 61 | DDFKVDFKSISKDDILTLRRKLAMVFQQFNLFERRTALDNVKEGLKIVKKMSDQEATRIA | 120 |
| | | DF VDF++I+ + +L LRRKLAMVFQQFNLFERRTAL+NVKSGLK+VKK+SDQEAT++A | |
| Sbjct: | 62 | GDFTVDFETITTEQVLILRRKLAMVFQQFNLFERRTALENVKEGLKVVKKLSDQEATKLA | 121 |
| Query: | 121 | RDELAKVGLADREKYYPRHLSGGQKQRVALARALAMKPDVLLLDEPTSALDPELVGEVEK | 180 |
| | | + ELAKVGLADR+ +YPRHLSGGQKQRVALARALAMKPDVLLLDEPTSALDPELVGEVEK | |
| Sbjct: | 122 | QAELAKVGLADRKHHYPRHLSGGQKQRVALARALAMKPDVLLLDEPTSALDPELVGEVEK | 181 |
| Query: | 181 | SIADAAKQGQTMVLVSHDMNFVYQVADKVLFLEKGRILESGTPEQLFNHPLEERTKEFFA | 240 |
| | | SI DAAK GQTMVLVSHDMNFVYQVAD+VLFL++G+ILE GTPE++F HP +ERTKEFFA | |
| Sbjct: | 182 | SITDAAKSGQTMVLVSHDMNFVYQVADRVLFLDQGKILEQGTPEEVFRHPQKERTKEFFA | 241 |
| Query: | 241 | SYNKSYL | 247 |
| | | SY+K+Y+ | |
| Sbjct: | 242 | SYSKTYI | 248 |

[5369] Based on this analysis, it was predicted that these proteins and their epitopes could be useful antigens for vaccines or diagnostics.

### EXAMPLE 961

[5370] A DNA sequence (GBSx1019) was identified in S. agalactiae <SEQ ID 2931> which encodes the amino acid sequence <SEQ ID 2932>. Analysis of this protein sequence reveals the following:

```
Possible site: 17
>>> Seems to have no N-terminal signal sequence
----- Final Results -----
                            bacterial cytoplasm --- Certainty = 0.831(Affirmative) < succ>
                              bacterial membrane --- Certainty = 0.0000(Not Clear) < succ>
                                bacterial outside --- Certainty = 0.0000(Not Clear) < succ>
```

[5371] The protein has homology with the following sequences in the GENPEPT database.

| >GP: BAB07290 GB: AP001519 thioredoxin reductase | | | |
|---|---|---|---|
| (NADPH) [Bacillus halodurans] | | | |
| Identities = 173/302 (57%), Positives = 234/302 (77%) | | | |
| Query: | 1 | MYDTLIIGSGPGGMTAALYAARSNLKVGLIEQGAPGGQMNNTAEIENYPGYDHISGPELS | 60 |
| | | +YD +I G+GP GMTAA+Y +R+NL ++E+G PGGQM NT ++ENYPG+DHI GPELS | |
| Sbjct: | 7 | VYDVVIAGAGPAGMTAAVYTSRANLSTVMVERGVPGGQMANTEDVENYPGFDHILGPELS | 66 |
| Query: | 61 | MKMYEPLEKFEVEHIYGIVQRVENDGDVKRVITEDESYEAKTVILATGAKNSLLGVPGEE | 120 |
| | | KM+E +KF E+ YG ++ + + GD+K V ++ Y+A+ VI+ATGA+ LGVPGE+ | |
| Sbjct: | 67 | TKMFEHAKKFGAEYAYGDIKEIIDQGDLKLVKAGNKEYKARAVIVATGAEYKKLGVPGEK | 126 |
| Query: | 121 | EYTSRGVSYCAVCDGAFFRDQDLLVVGGGDSAVEEAVFLTQFAKSVTIIHRRDQLRAQKV | 180 |
| | | E + RGVSYCAVCDGAFF+ ++L+VVGGGDSAVEEAV+LT+FA VTIIHRRDQLRAQK+ | |
| Sbjct: | 127 | ELSGRGVSYCAVCDGAFFKGKELVVVGGGDSAVEEAVYLTRFASKVTIIHRRDQLRAQKI | 186 |
| Query: | 181 | LQDRAFANEKIKFVWDSVVKEIKGNEIKVSGVTVENLKTGEISEMTFGGVFIYVGLKPHS | 240 |
| | | LQ RAF N+KI+F+WD VVK+I G + KVS VT+E+ KTGE + GVFIY+G+ P + | |
| Sbjct: | 187 | LQQRAFDNDKIEFIWDHVVKQINGTDGKVSSVTIEHAKTGEQQDFKTDGVFIYIGMLPLN | 246 |
| Query: | 241 | SMVSELGITDETGWVLTDTNMKTSIPGLYAIGDVRQKDLRQIATAVGEGAIAGQGVYNYI | 300 |
| | | V L I ++ G+++T+ M+TS+PG++A GDVR+K LRQI TA G+G++A Q V +YI | |
| Sbjct: | 247 | EAVKNLNILNDEGYIVTNEEMETSVPGIFAAGDVREKSLRQIVTATGDGSLAAQNVQHYI | 306 |
| Query: | 301 | TE | 302 |
| | | E | |
| Sbjct: | 307 | EE | 308 |

[5372] A related DNA sequence was identified in S. pyogenes <SEQ ID 2933> which encodes the amino acid sequence <SEQ ID 2934>. Analysis of this protein sequence reveals the following:

```
Possible site: 28
>>> Seems to have no N-terminal signal sequence
----- Final Results -----
                            bacterial cytoplasm --- Certainty = 0.386(Affirmative) < succ>
                              bacterial membrane --- Certainty = 0.0000(Not Clear) < succ>
                                bacterial outside --- Certainty = 0.0000(Not Clear) < succ>
```

[5373] An alignment of the GAS and GBS proteins is shown below.

| Identities = 236/300 (78%), Positives = 273/300 (90%) | | | |
|---|---|---|---|
| Query: | 1 | MYDTLIIGSGPGGMTAALYAARSNLKVGLIEQGAPGGQMNNTAEIENYPGYDHISGPELS | 60 |
| | | MYDTLIIGSGP GMTAALYAARSNL V +IEQGAPGGQMNNT +IENYPGYDHISGPEL+ | |
| Sbjct: | 1 | MYDTLIIGSGPAGMTAALYAARSNLSVAIIEQGAPGGQMNNTFDIENYPGYDHISGPELA | 60 |
| Query: | 61 | MKMYEPLEKFEVEHIYGIVQRVENDGDVKRVITEDESYEAKTVILATGAKNSLLGVPGEE | 120 |
| | | MKMYEPLEKF VE+IYGIVQ++EN GD K V+TED SYEAKTVI+ATGAK +LGVPGEE | |
| Sbjct: | 61 | MKMYEPLEKFNVENIYGIVQKIENFGDYKCVLTEDASYEAKTVIIATGAKYRVLGVPGEE | 120 |
| Query: | 121 | EYTSRGVSYCAVCDGAFFRDQDLLVVGGGDSAVEEAVFLTQFAKSVTIIHRRDQLRAQKV | 180 |
| | | YTSRGVSYCAVCDGAFFRDQDLLVVGGGDSAVEEA++LTQFAK VT++HRRDQLRAQK+ | |
| Sbjct: | 121 | YYTSRGVSYCAVCDGAFFRDQDLLVVGGGDSAVEEAIYLTQFAKKVTVVHRRDQLRAQKI | 180 |
| Query: | 181 | LQDRAFANEKIKFVWDSVVKEIKGNEIKVSGVTVENLKTGEISEMTFGGVFIYVGLKPHS | 240 |
| | | LQDRAFAN+K+ F+WDSVVKEI+GN+IKVS V +EN+KTG++++ FGGVFIYVG+ P + | |
| Sbjct: | 181 | LQDRAFANDKVDFIWDSVVKEIQGNDIKVSNVLIENVKTGQVTDHAFGGVFIYVGMNPVT | 240 |
| Query: | 241 | SMVSELGITDETGWVLTDTNMKTSIPGLYAIGDVRQKDLRQIATAVGEGAIAGQGVYNYI | 300 |
| | | MV +L ITD GW++TD +M+TSIPG++AIGDVRQKDLRQI TAVG+GAIAGQGVY+Y+ | |
| Sbjct: | 241 | GMVKDLEITDSEGWIITDDHMRTSIPGIFAIGDVRQKDLRQITTAVGDGAIAGQGVYHYL | 300 |

[5374] Based on this analysis, it was predicted that these proteins and their epitopes could be useful antigens for vaccines or diagnostics.

### EXAMPLE 962

[5375] A DNA sequence (GBSx1020) was identified in S. agalactiae <SEQ ID 2935> which encodes the amino acid sequence <SEQ ID 2936>. Analysis of this protein sequence reveals the following:

```
Possible site: 35
>>> Seems to have no N-terminal signal sequence
----- Final Results -----
                            bacterial cytoplasm --- Certainty = 0.3626(Affirmative) < succ>
                              bacterial membrane --- Certainty = 0.0000(Not Clear) < succ>
                                bacterial outside --- Certainty = 0.0000(Not Clear) < succ>
```

[5376] The protein has homology with the following sequences in the GENPEPT database.

| >GP: CAB15163 GB: Z99120 similar to nicotinate | | | |
|---|---|---|---|
| phosphoribosyltransferase [Bacillus subtilis] | | | |
| Identities = 309/476 (64%), Positives = 384/476 (79%), Gaps = 2/476 (0%) | | | |
| Query: | 2 | YKDDSLTLHTDLYQINMMQVYFNKGIHNKRAVFEAYFRKVPFENGYAVFAGLERIVRYLE | 61 |
| | | +KDDSL+LHTDLYQINM + Y+ GIH K+A+FE +FR++PFENGYAVFAGLE+ + YLE | |
| Sbjct: | 6 | FKDDSLSLHTDLYQINMAETYWRDGIHEKKAIFELFFRRLPFENGYAVFAGLEKAIEYLE | 65 |
| Query: | 62 | NLSFSDSDLSYLE-ELGYPEEFLDYLKNLKMELTVKSAKEGDLVFANEPLVQIEGPLAQC | 120 |
| | | N F+DSDLSYL+ ELGY E+F++YL+ L ++ S KEG+LVF NEP++++E PL + | |
| Sbjct: | 66 | NFKFTDSDLSYLQDELGYHEDFIEYLRGLSFTGSLYSMKEGELVFNNEPIMRVEAPLVEA | 125 |
| Query: | 121 | QLVETAILNIINYQTLVATKAARIRSVIEDEPLLEFGTRRAQEMDAAIWGTRAAIIGGAN | 180 |
| | | QL+ETA+LNI+NYQTL+ATKAARI+ VI DE LEFGTRRA EMDAA+WG RAA+IGG + | |
| Sbjct: | 126 | QLIETALLNIVNYQTLIATKAARIKGVIGDEVALEFGTRRAHEMDAAMWGARAALIGGFS | 185 |
| Query: | 181 | ATSNVRAGKIFNIPVSGTHAHALVQTYGDDYQAFKAYAETHKDCVFLVDTYDTLRVGVPN | 240 |
| | | ATSNVRAGK FNIPVSGTHAHALVQ Y D+Y AFK YAETHKDCVFLVDTYDTLR G+PN | |
| Sbjct: | 186 | ATSNVRAGKRFNIPVSGTHAHALVQAYRDEYTAFKKYAETHKDCVFLVDTYDTLRSGMPN | 245 |
| Query: | 241 | AIRVAKEMGEKINFLGVRLDSGDLAYLSKKVRQQLDDAGFPNAKIYASNDLDENTILNLK | 300 |
| | | AIRVAKE G++INF+G+RLDSGDLAYLSKK R+ LD+AGF +AK+ AS+DLDE+TI+NLK | |
| Sbjct: | 246 | AIRVAKEFGDRINFIGIRLDSGDLAYLSKKARKMLDEAGFTDAKVIASSDLDEHTIMNLK | 305 |
| Query: | 301 | MQKAKIDVWGVGTKLITAYDQPALGAVYKIVSIETDAGSMRDTIKLSNNAEKVSTPGKKQ | 360 |
| | | Q A+IDVWGVGTKLITAYDQPALGAVYK+V+IE D G M DTIK+S+N EKV+TPG+K+ | |
| Sbjct: | 306 | AQGARIDVWGVGTKLITAYDQPALGAVYKLVAIEED-GKMVDTIKISSNPEKVTTPGRKK | 364 |
| Query: | 361 | VWRITSRAKGKSEGDYITFADTDVTQLDEIEMFHPTYTYINKTVRDFDAVPLLVDIFDKG | 420 |
| | | V+RI +++ SEGDYI D V + MFHP +T+I+K V +F A L IF+KG | |
| Sbjct: | 365 | VYRIINQSNHHSEGDYIALYDEQVNDQKRLRMFHPVHTFISKFVTNFYAKDLHELIFEKG | 424 |
| Query: | 421 | KLVYQLPSLQEIQEYGRKEFDQLWDEYKRVLNPQDYPVDLARDVWQNKMDLIDRIR | 476 |
| | | L YQ P + +IQ+Y + LW+EYKR+ P++YPVDL+ D W NKM I ++ | |
| Sbjct: | 425 | ILCYQNPEISDIQQYVQDNLSLLWEEYKRISKPEEYPVDLSEDCWSNKMQRIHEVK | 480 |

[5377] A related DNA sequence was identified in S. pyogenes <SEQ ID 2937> which encodes the amino acid sequence <SEQ ID 2938>. Analysis of this protein sequence reveals the following:

```
Possible site: 32
>>> Seems to have no N-terminal signal sequence
----- Final Results -----
                            bacterial cytoplasm --- Certainty = 0.3192(Affirmative) < succ>
                              bacterial membrane --- Certainty = 0.0000(Not Clear) < succ>
                                bacterial outside --- Certainty = 0.0000(Not Clear) < succ>
```

[5378] An alignment of the GAS and GBS proteins is shown below.

| Identities = 409/484 (84%), Positives = 446/484 (91%) | | | |
|---|---|---|---|
| Query: | 1 | MYKDDSLTLHTDLYQINMMQVYFNKGIHNKRAVFEAYFRKVPFENGYAVFAGLERIVRYL | 60 |
| | | MYKDDSLTLHTDLYQINMMQVYF +GIHN+ AVFE YFRK PF NGYAVFAGL+R+V YL | |
| Sbjct: | 1 | MYKDDSLTLHTDLYQINMMQVYFEQGIHNRHAVFEVYFRKEPFNNGYAVFAGLQRMVEYL | 60 |
| Query: | 61 | ENLSFSDSDLSYLEELGYPEEFLDYLKNLKMELTVKSAKEGDLVFANEPLVQIEGPLAQC | 120 |
| | | E FS++DL+YLEELGYPE FL YLK L++ELT++SAKEGDLVFANEP+VQ+EGPL QC | |
| Sbjct: | 61 | EQFQFSETDLAYLEELGYPENFLTYLKELRLELTIRSAKEGDLVFANEPIVQVEGPLGQC | 120 |
| Query: | 121 | QLVETAILNIINYQTLVATKAARIRSVIEDEPLLEFGTRRAQEMDAAIWGTRAAIIGGAN | 180 |
| | | QLVETA+LNI+N+QTL+ATKAARIRSVIEDEPLLEFGTRRAQE+DAAIWGTRAA+IGGA+ | |
| Sbjct: | 121 | QLVETALLNIVNFQTLIATKAARIRSVIEDEPLLEFGTRRAQELDAAIWGTRAAMIGGAD | 180 |
| Query: | 181 | ATSNVRAGKIFNIPVSGTHAHALVQTYGDDYQAFKAYAETHKDCVFLVDTYDTLRVGVPN | 240 |
| | | ATSNVRAGK F+IPVSGTHAHALVQ YG+DY AF AYA+THKDCVFLVDTYDTL+VGVP | |
| Sbjct: | 181 | ATSNVRAGKRFDIPVSGTHAHALVQAYGNDYDAFMAYAKTHKDCVFLVDTYDTLKVGVPT | 240 |
| Query: | 241 | AIRVAKEMGEKINFLGVRLDSGDLAYLSKKVRQQLDDAGFPNAKIYASNDLDENTILNLK | 300 |
| | | AIRVAKEMG+KINFLGVRLDSGDLAYLSK VRQQLDDAGF AKIYASNDLDENTILNLK | |
| Sbjct: | 241 | AIRVAKEMGDKINFLGVRLDSGDLAYLSKTVRQQLDDAGFTEAKIYASNDLDENTILNLK | 300 |
| Query: | 301 | MQKAKIDVWGVGTKLITAYDQPALGAVYKIVSIETDAGSMRDTIKLSNNAEKVSTPGKKQ | 360 |
| | | MQKAKIDVWGVGTKLITAYDQPALGAVYKIVSIE + GSMRDTIKLSNNAEKVSTPGKKQ | |
| Sbjct: | 301 | MQKAKIDVWGVGTKLITAYDQPALGAVYKIVSIEQEDGSMRDTIKLSNNAEKVSTPGKKQ | 360 |
| Query: | 361 | VWRITSRAKGKSEGDYITFADTDVTQLDEIEMFHPTYTYINKTVRDFDAVPLLVDIFDKG | 420 |
| | | VWRITSR KGKSEGDYITF D +V +L EIEMFHPTYTYI KTV++FDA+PLLVDIF KG | |
| Sbjct: | 361 | VWRITSREKGKSEGDYITFTDINVNELTEIEMFHPTYTYIKKTVKEFDAIPLLVDIFVKG | 420 |
| Query: | 421 | KLVYQLPSLQEIQEYGRKEFDQLWDEYKRVLNPQDYPVDLARDVWQNKMDLIDRIRKEAL | 480 |
| | | +LVYQLP+L EI+ Y +KEFD+LWDEYKRVLNPQDYPVDLARDVWQNKM LID IRK+A | |
| Sbjct: | 421 | ELVYQLPTLAEIKAYAKKEFDKLWDEYKRVLNPQDYPVDLARDVWQNKMALIDNIRKDAY | 480 |
| Query: | 481 | AKGE | 484 |
| | | K E | |
| Sbjct: | 481 | GKSE | 484 |

[5379] Based on this analysis, it was predicted that these proteins and their epitopes could be useful antigens for vaccines or diagnostics.

### EXAMPLE 963

[5380] A DNA sequence (GBSx1021) was identified in S. agalactiae <SEQ ID 2939> which encodes the amino acid sequence <SEQ ID 2940>. Analysis of this protein sequence reveals the following:

```
Possible site: 56
>>> Seems to have no N-terminal signal sequence
----- Final Results -----
                            bacterial cytoplasm --- Certainty = 0.2744(Affirmative) < succ>
                              bacterial membrane --- Certainty = 0.0000(Not Clear) < succ>
                                bacterial outside --- Certainty = 0.0000(Not Clear) < succ>
```

[5381] The protein has homology with the following sequences in the GENPEPT database.

| >GP: AAC74810 GB: AE000269 NAD synthetase, prefers NH3 over glutamine | | | |
|---|---|---|---|
| [Escherichia coli K12] | | | |
| Identities = 173/274 (63%), Positives = 214/274 (77%), Gaps = 1/274 (0%) | | | |
| Query: | 1 | MTLQDQIIKELGVKPVINPSQEIRRSVEFLKDYLLKHSFLKTYVLGISGGQDSTLAGRLA | 60 |
| | | MTLQ QIIK LG KP IN +EIRRSV+FLK YL + F+K+ VLGISGGQDSTLAG+L | |
| Sbjct: | 1 | MTLQQQIIKALGAKPQINAEEEIRRSVDFLKSYLQTYPFIKSLVLGISGGQDSTLAGKLC | 60 |
| Query: | 61 | QLAVEELRADTG-ENYQFIAIRLPYGIQADEEDAQKALDFIKPDIALTINIKEAVDGQVR | 119 |
| | | Q+A+ ELR +TG E+ QFIA+RLPYG+QADE+D Q A+ FI+PD LT+NIK AV + | |
| Sbjct: | 61 | QMAINELRLETGNESLQFIAVRLPYGVQADEQDCQDAIAFIQPDRVLTVNIKGAVLASEQ | 120 |
| Query: | 120 | ALNAAGVEITDFNKGNIKARQRMISQYAVAGQYAGAVIGTDHAAENITGFFTKFGDGGAD | 179 |
| | | AL AG+E++DF +GN KAR+RM +QY++AG +G V+GTDHAAE ITGFFTK+GDGG D | |
| Sbjct: | 121 | ALREAGIELSDFVRGNEKARERMKAQYSIAGMTSGVVVGTDHAAEAITGFFTKYGDGGTD | 180 |
| Query: | 180 | LLPLFRLNKSQGKQLLAELGADKALYEKIPTADLEENKPGIADEIALGVTYQEIDAYLEG | 239 |
| | | + PL+RLNK QGKQLLA L + LY+K PTADLE+++P + DE+ALGVTY ID YLEG | |
| Sbjct: | 181 | INPLYRLNKRQGKQLLAALACPEHLYKKAPTADLEDDRPSLPDEVALGVTYDNIDDYLEG | 240 |
| Query: | 240 | KVVSDKSRGIIENWWYKGQHKRHLPITIFDDFWK | 273 |
| | | K V + IENW+ K +HKR PIT+FDDFWK | |
| Sbjct: | 241 | KNVPQQVARTIENWYLKTEHKRRPPITVFDDFWK | 274 |

[5382] A related DNA sequence was identified in S. pyogenes <SEQ ID 2941> which encodes the amino acid sequence <SEQ ID 2942>. Analysis of this protein sequence reveals the following:

```
Possible site: 18
>>> Seems to have no N-terminal signal sequence
----- Final Results -----
                            bacterial cytoplasm --- Certainty = 0.3482(Affirmative) < succ>
                              bacterial membrane --- Certainty = 0.0000(Not Clear) < succ>
                                bacterial outside --- Certainty = 0.0000(Not Clear) < succ>
```

[5383] An alignment of the GAS and GBS proteins is shown below.

| Identities = 213/274 (77%), Positives = 242/274 (87%), Gaps = 1/274 (0%) | | | |
|---|---|---|---|
| Query: | 1 | MTLQDQIIKELGVKPVINPSQEIRRSVEFLKDYLLKHSFLKTYVLGISGGQDSTLAGRLA | 60 |
| | | MTLQ++II++LGVK I+P +EIR++V+FLK YL KHSFLKTYVLGISGGQDSTLAG+LA | |
| Sbjct: | 15 | MTLQEEIIRQLGVKASIDPQEEIRKAVDFLKAYLRKHSFLKTYVLGISGGQDSTLAGKLA | 74 |
| Query: | 61 | QLAVEELRADTGEN-YQFIAIRLPYGIQADEEDAQKALDFIKPDIALTINIKEAVDGQVR | 119 |
| | | Q+A+ ELR + + YQFIA+RLPYG+QADE DAQKAL FI PD LTINIK AVDGQV | |
| Sbjct: | 75 | QMAIAELREEASDQAYQFIAVRLPYGVQADEADAQKALAFIAPDQTLTINIKAAVDGQVE | 134 |
| Query: | 120 | ALNAAGVEITDFNKGNIKARQRMISQYAVAGQYAGAVIGTDHAAENITGFFTKFGDGGAD | 179 |
| | | AL AAGVEI+DFNKGNIKARQRMISQYA+AGQ AGAVIGTDHAAENITGFFTKFGDGGAD | |
| Sbjct: | 135 | ALQAAGVEISDFNKGNIKARQRMISQYAIAGQMAGAVIGTDHAAENITGFFTKFGDGGAD | 194 |
| Query: | 180 | LLPLFRLNKSQGKQLLAELGADKALYEKIPTADLEENKPGIADEIALGVTYQEIDAYLEG | 239 |
| | | +LPLFRLNK QGK LL LGAD ALYEK+PTADLE+ KPG+ADE+ALGVTYQ+ID YLEG | |
| Sbjct: | 195 | ILPLFRLNKRQGKALLKVLGADAALYEKVPTADLEDQKPGLADEVALGVTYQDIDDYLEG | 254 |
| Query: | 240 | KVVSDKSRGIIENWWYKGQHKRHLPITIFDDFWK | 273 |
| | | K++S ++ IE WW+KGQHKRHLPITIFDDFWK | |
| Sbjct: | 255 | KLISKVAQATIEKWWHKGQHKRHLPITIFDDFWK | 288 |

[5384] Based on this analysis, it was predicted that these proteins and their epitopes could be useful antigens for vaccines or diagnostics.

### EXAMPLE 964

[5385] A DNA sequence (GBSx1022) was identified in S. agalactiae <SEQ ID 2943> which encodes the amino acid sequence <SEQ ID 2944>. Analysis of this protein sequence reveals the following:

```
Possible site: 28
>>> Seems to have no N-terminal signal sequence
----- Final Results -----
                            bacterial cytoplasm --- Certainty = 0.2718(Affirmative) < succ>
                              bacterial membrane --- Certainty = 0.0000(Not Clear) < succ>
                                bacterial outside --- Certainty = 0.0000(Not Clear) < succ>
```

[5386] The protein has homology with the following sequences in the GENPEPT database.

| >GP: CAA82960 GB: Z30315 aminopeptidase C [Streptococcus thermophilus] | | | |
|---|---|---|---|
| Identities = 363/444 (81%), Positives = 407/444 (90%) | | | |
| Query: | 1 | MSKLTQTFTDKLFADYQANTKFSAIENAVTHNGLLKSLETRQSEIENDYVFSIDLTKDEV | 60 |
| | | M+ L+ FT+KLFADY+AN K+ AIENAVTHNGLLKS+ETRQSE+END+VFSIDLTKDEV | |
| Sbjct: | 1 | MTSLSTDFTEKLFADYEANAKYGAIENAVTHNGLLKSIETRQSEVENDFVFSIDLTKDEV | 60 |
| Query: | 61 | SNQKQSGRCWMFAALNTFRHKLISDFKLENFELSQAHTFFWDKYEKSNWFMEQIIATANQ | 120 |
| | | SNQK SGRCWMFAALNTFRHKLISDFKLE+FELSQAHTFFWDKYEKSNWF+EQIIATA+Q | |
| Sbjct: | 61 | SNQKASGRCWMFAALNTFRHKLISDFKLESFELSQAHTFFWDKYEKSNWFLEQIIATADQ | 120 |
| Query: | 121 | ELSSRKVKFLLDVPQQDGGQWDMVVALFEKYGVVPKTVYPESVSSSASRELNQYLNKLLR | 180 |
| | | E+ SRKVKFLLD PQQDGGQWDMVV+LFEKYGVVPK+VYPESV+SS SRELNQYLNKLLR | |
| Sbjct: | 121 | EIGSRKVKFLLDTPQQDGGQWDMVVSLFEKYGVVPKSVYPESVASSNSRELNQYLNKLLR | 180 |
| Query: | 181 | QDAQILRELIAQGADGATVQNKKEELLQEIFNFLAMNLGLPPQSFDFAYRDKDNHYQSDK | 240 |
| | | QDAQILR+LIA GAD A VQ KKEE LQEIFN+LAM LGLPP+ FDFAYRDKD++Y+S+K | |
| Sbjct: | 181 | QDAQILRDLIASGADQAAVQAKKEEFLQEIFNYLAMTLGLPPRQFDFAYRDKDDNYRSEK | 240 |
| Query: | 241 | NITPKAFYQKYVNLDLSDYVSIINAPTVDKPYGQSYTVEMLGNVVGGPAVKYLNLDMKRF | 300 |
| | | ITP+AF++KYV L LSDYVS+INAPT DKPYG+SYTVEMLGNVVG P+V+Y+NL M RF | |
| Sbjct: | 241 | GITPRAFFEKYVGLKLSDYVSVINAPTADKPYGKSYTVEMLGNVVGAPSVRYINLPMDRF | 300 |
| Query: | 301 | KELAIAQMKSGETVWFGSDVGQVSNRQKGILATTTYDFNSSMDIKLSQDKAGRLDYSESL | 360 |
| | | KELAIAQMK+GE+VWFGSDVGQVS+RQKGILAT YDF +SMDI +QDKAGRLDYSESL | |
| Sbjct: | 301 | KELAIAQMKAGESVWFGSDVGQVSDRQKGILATNVYDFTASMDINWTQDKAGRLDYSESL | 360 |
| Query: | 361 | MTHAMVLTGVDLDESGQPLKWKVENSWGEKVGKDGYFVASDAWMDEYTYQIVVRKELLTK | 420 |
| | | MTHAMVLTGVDLD G+P+KWK+ENSWG+KVG+ GYFVASDAWMDEYTYQIVVRK+ LT | |
| Sbjct: | 361 | MTHAMVLTGVDLDADGKPIKWKIENSWGDKVGQKGYFVASDAWMDEYTYQIVVRKDFLTA | 420 |
| Query: | 421 | EELEAYNAEPITLAPWDPMGALAN | 444 |
| | | EEL AY A+P LAPWDPMG+LA+ | |
| Sbjct: | 421 | EELAAYEADPQVLAPWDPMGSLAS | 444 |

[5387] A related DNA sequence was identified in S. pyogenes <SEQ ID 2945> which encodes the amino acid sequence <SEQ ID 2946>. Analysis of this protein sequence reveals the following:

```
Possible site: 14
>>> Seems to have no N-terminal signal sequence
----- Final Results -----
                            bacterial cytoplasm --- Certainty = 0.3002(Affirmative) < succ>
                              bacterial membrane --- Certainty = 0.0000(Not Clear) < succ>
                                bacterial outside --- Certainty = 0.0000(Not Clear) < succ>
```

[5388] An alignment of the GAS and GBS proteins is shown below.

| Identities = 369/443 (83%), Positives = 407/443 (91%) | | | |
|---|---|---|---|
| Query: | 1 | MSKLTQTFTDKLFADYQANTKFSAIENAVTHNGLLKSLETRQSEIENDYVFSIDLTKDEV | 60 |
| | | MS LT+TFT++LFA Y+AN KFSAIENAVTHNGLLKSLETRQSE++ND+VFSIDLTKD+V | |
| Sbjct: | 1 | MSALTETFTEQLFAHYEANAKFSAIENAVTHNGLLKSLETRQSEVDNDFVFSIDLTKDKV | 60 |
| Query: | 61 | SNQKQSGRCWMFAALNTFRHKLISDFKLENFELSQAHTFFWDKYEKSNWFMEQIIATANQ | 120 |
| | | SNQK SGRCWMFAALNTFRHKLI++FKLENFELSQAHTFFWDKYEK+NWFMEQ+IATA+Q | |
| Sbjct: | 61 | SNQKASGRCWMFAALNTFRHKLITEFKLENFELSQAHTFFWDKYEKANWFMEQVIATADQ | 120 |
| Query: | 121 | ELSSRKVKFLLDVPQQDGGQWDMVVALFEKYGVVPKTVYPESVSSSASRELNQYLNKLLR | 180 |
| | | EL+SRKVKFLLDVPQQDGGQWDMVV+LFEKYGVVPK+VYPES+SSS SRELNQYLNKLLR | |
| Sbjct: | 121 | ELTSRKVKFLLDVPQQDGGQWDMVVSLFEKYGVVPKSVYPESISSSNSRELNQYLNKLLR | 180 |
| Query: | 181 | QDAQILRELIAQGADGATVQNKKEELLQEIFNFLAMNLGLPPQSFDFAYRDKDNHYQSDK | 240 |
| | | QDAQILR+LIA GA V+++K ELLQEIFNFLAM LGLPP+FDFAYRDKD+HY +K | |
| Sbjct: | 181 | QDAQILRDLIASGAKADQVEDRKAELLQEIFNFLAMTLGLPPRHFDFAYRDKDDHYHVEK | 240 |
| Query: | 241 | NITPKAFYQKYVNLDLSDYVSIINAPTVDKPYGQSYTVEMLGNVVGGPAVKYLNLDMKRF | 300 |
| | | +TP+AFY K+V L LSDYVS+INAPT DKPYG+SYTVEMLGNVVG V+YLNLDMKRF | |
| Sbjct: | 241 | GLTPQAFYDKFVGLKLSDYVSVINAPTADKPYGKSYTVEMLGNVVGSREVRYLNLDMKRF | 300 |
| Query: | 301 | KELAIAQMKSGETVWFGSDVGQVSNRQKGILATTTYDFNSSMDIKLSQDKAGRLDYSESL | 360 |
| | | KELAI QM++GE+VWFGSDVGQVS+RQKGILAT TYDF +SMDI LSQDKAGRLDYSESL | |
| Sbjct: | 301 | KELAIKQMQAGESVWFGSDVGQVSDRQKGILATNTYDFEASMDINLSQDKAGRLDYSESL | 360 |
| Query: | 361 | MTHAMVLTGVDLDESGQPLKWKVENSWGEKVGKDGYFVASDAWMDEYTYQIVVRKELLTK | 420 |
| | | MTHAMVLTGVDLDE+G+PLKWKVENSWGEKVG GYFVASDAWMDEYTYQIVVRKE LT | |
| Sbjct: | 361 | MTHAMVLTGVDLDETGKPLKWKVENSWGEKVGDKGYFVASDAWMDEYTYQIVVRKEFLTA | 420 |
| Query: | 421 | EELEAYNAEPITLAPWDPMGALA | 443 |
| | | +EL AY EP LAPWDPMGALA | |
| Sbjct: | 421 | DELAAYEKEPQVLAPWDPMGALA | 443 |

[5389] Based on this analysis, it was predicted that these proteins and their epitopes could be useful antigens for vaccines or diagnostics.

### EXAMPLE 965

[5390] A DNA sequence (GBSx1024) was identified in S. agalactiae <SEQ ID 2947> which encodes the amino acid sequence <SEQ ID 2948>. Analysis of this protein sequence reveals the following:

```
Possible site: 36
>>> Seems to have a cleavable N-term signal seq.
----- Final Results -----
                                bacterial outside --- Certainty = 0.3000(Affirmative) < succ>
                              bacterial membrane --- Certainty = 0.0000(Not Clear) < succ>
                            bacterial cytoplasm --- Certainty = 0.0000(Not Clear) < succ>
```

[5391] A related GBS nucleic acid sequence <SEQ ID 9533> which encodes amino acid sequence <SEQ ID 9534> was also identified.

[5392] The protein has homology with the following sequences in the GENPEPT database.

| >GP: AAF17262 GB: AF210752 penicillin-binding protein 1A | | | |
|---|---|---|---|
| [Streptococcus pneumoniae] | | | |
| Identities = 412/725 (56%), Positives = 544/725 (74%), Gaps = 14/725 (1%) | | | |
| Query: | 4 | IKKESVIKLLKYAFGIIMGFIILAIVIGGLLFAYYVSRSPKLTDQALKSVNSSLVYDGNN | 63 |
| | | + K ++++L+KY + +I AIV+GG +F YYVS++P L++ L + SS +YD N | |
| Sbjct: | 1 | MNKPTILRLIKYLSISFLSLVIAAIVLGGGVFFYYVSKAPSLSESKLVATTSSKIYDNKN | 60 |
| Query: | 64 | KLIADLGSEKRESVSADSIPLNLVNAITSIEDKRFFKHRGVDIYRILGAAWHNLVSSNTQ | 123 |
| | | +LIADLGSE+R + A+ IP +LV AI SIED RFF HRG+D RILGA NL S++ Q | |
| Sbjct: | 61 | QLIADLGSERRVNAQANDIPTDLVKAIVSIEDHRFFDHRGIDTIRILGAFLRNLQSNSLQ | 120 |
| Query: | 124 | GGSTLDQQLIKLAYFSTNKSDQTLKRKSQEVWLALQMERKYTKEEILTFYINKVYMGNGN | 183 |
| | | GGSTL QQLIKL YFST+ SDQT+ RK+QE WLA+Q+E+K TK+EILT+YINKVYM NGN | |
| Sbjct: | 121 | GGSTLTQQLIKLTYFSTSTSDQTISRKAQEAWLAIQLEQKATKQEILTYYINKVYMSNGN | 180 |
| Query: | 184 | YGMRTTAKSYFGKDLKELSIAQLALLAGIPQAPTQYDPYKNPESAQTRRNTVLQQMYQDK | 243 |
| | | YGM+T A++Y+GKDL LS+ QLALLAG+PQAP QYDPY +PE+AQ RRN VL +M | |
| Sbjct: | 181 | YGMQTAAQNYYGKDLNNLSLPQLALLAGMPQAPNQYDPYSHPEAAQDRRNLVLSEMKNQG | 240 |
| Query: | 244 | NISKKEYDQAVATPVTDGLKELKQKSTYPKYMDNYLKQVISEVKQKTGKDIFTAGLKVYT | 303 |
| | | IS ++Y++AV TP+TDGL+ LK S YP YMDNYLK+VI++V+++TG ++ T G+ VYT | |
| Sbjct: | 241 | YISAEQYEKAVNTPITDGLQSLKSASNYPAYMDNYLKEVINQVEEETGYNLLTTGMDVYT | 300 |
| Query: | 304 | NINTDAQKQLYDIYNSDTYIAYPNNELQIASTIMDATNGKVIAQLGGRHQNENISFGTNQ | 363 |
| | | N++ +AQK L+DIYN+D Y+AYP++ELQ+ASTI+D +NGKVIAQLG RHQ+ N+SFG NQ | |
| Sbjct: | 301 | NVDQEAQKHLWDIYNTDEYVAYPDDELQVASTIVDVSNGKVIAQLGARHQSSNVSFGINQ | 360 |
| Query: | 364 | SVLTDRDWGSTMKPISAYAPAIDSGVYNSTGQSLNDSVYYWPGTSTQLYDWDRQYMGWMS | 423 |
| | | +V T+RDWGSTMKPI+ YAPA++ GVY+ST ++D Y +PGT T +Y+WDR Y G ++ | |
| Sbjct: | 361 | AVETNRDWGSTMKPITDYAPALEYGVYDSTATIVHDEPYNYPGTDTPVYNWDRGYFGNIT | 420 |
| Query: | 424 | MQTAIQQSRNVPAVRALEAAGLDEAKSFLEKLGIYYPEMNYSNAISSNNSSSDAKYGASS | 483 |
| | | +Q A+QQSRNVPAV L GL+ AK+FL LGI YP ++YSNAISSN + SD KYGASS | |
| Sbjct: | 421 | LQYALQQSRNVPAVETLNKVGLNRAKTFLNGLGIDYPSLHYSNAISSNTTESDKKYGASS | 480 |
| Query: | 484 | EKMAAAYSAFANGGTYYKPQYVNKIEFSDGTNDTYAASGSRAMKETTAYMMTDMLKTVLT | 543 |
| | | EKMAAAY+AFANGGTYYKP Y++K+ FSDG+ ++ G+RAMKETTAYMMTDM+KTVL | |
| Sbjct: | 481 | EKMAAAYAAFANGGTYYKPMYIHKVVFSDGSEKEFSNVGTRAMKETTAYMMTDMMKTVLV | 540 |
| Query: | 544 | FGTGTKAAIPGVAQAGKTGTSNYTEDELAKIEATTGIYNSAVGTMAPDENFVGYTSKYTM | 603 |
| | | +G G A +P + QAGKTGTSNYT++E+ K Y G +APDE FVGYT KY M | |
| Sbjct: | 541 | YGIGRGAYLPWLPQAGKTGTSNYTDEEIEK-------YIKNTGYVAPDEMFVGYTRKYAM | 593 |
| Query: | 604 | AIWTGYKNRLTPLYGSQLDIATEVYRAMMSYLTGGYSA-DWTMPEGLYRSGSYLYINGTT | 662 |
| | | A+WTGY NRLTPL G L +A +VYR+MM+YL+ G + DW +PEGLYR+G +++NG | |
| Sbjct: | 594 | AVWTGYSNRLTPLVGDGLTVAAKVYRSMMTYLSEGSNPEDWNIPEGLYRNGEFVFKNGAR | 653 |
| Query: | 663 | TTGTYSSSVYKNIYQNSGQSSQSSSSTSSEKQKEDKNTANDANSSSPQVETPNNGNATTP | 722 |
| | | +T +SS + S +SS SSS +S+ + + N++ +++P T +TTP | |
| Sbjct: | 654 | ST--WSSFAPQQ--PPSTESSSSSSDSSTSQSNSTTPSTNNSTTTNPNNNTQQSN--TTP | 707 |
| Query: | 723 | NNSNQ | 727 |
| | | + NQ | |
| Sbjct: | 708 | DQQNQ | 712 |

[5393] A related DNA sequence was identified in S. pyogenes <SEQ ID 2949> which encodes the amino acid sequence <SEQ ID 2950>. Analysis of this protein sequence reveals the following:

| Possible site: 41 | | | | |
|---|---|---|---|---|
| >>> Seems to have an uncleavable N-term signal seq | | | | |
| | INTEGRAL | Likelihood = −13.96 | Transmembrane | 19-35 (9-43) |

```
----- Final Results -----
                              bacterial membrane --- Certainty = 0.6583(Affirmative) < succ>
                                bacterial outside --- Certainty = 0.0000(Not Clear) < succ>
                            bacterial cytoplasm --- Certainty = 0.0000(Not Clear) < succ>
```

[5394] The protein has homology with the following sequences in the databases:

| >GP: CAA88918 GB: Z49095 penicillin-binding protein 1a [Streptococcus pneumoniae] | | | |
|---|---|---|---|
| Identities = 422/712 (59%), Positives = 536/712 (75%), Gaps = 8/712 (1%) | | | |
| Query: | 4 | IKNPKILKWLKYVLSAILSLIILVIIIGGLLFTFYISSAPKLSEAQLKSTNSSLVYDGNN | 63 |
| | | + P IL+ +KY+ + LSL+I I++GG +F +Y+S AP LSE++L +T SS +YD N | |
| Sbjct: | 1 | MNKPTILRLIKYLSISFLSLVIAAIVLGGGVFFYYVSKAPSLSESKLVATTSSKIYDNKN | 60 |
| Query: | 64 | NLIADLGSEKRENVTADSIPINLVNAITSIEDKRFFNHRGVDLYRIFGAAFHNLTSQTTQ | 123 |
| | | LIADLGSE+R N A+ IP +LV AI SIED RFF+HRG+D RI GA NL S + Q | |
| Sbjct: | 61 | QLIADLGSERRVNAQANDIPTDLVKAIVSIEDHRFFDHRGIDTIRILGAFLRNLQSNSLQ | 120 |
| Query: | 124 | GGSTLDQQLIKLAYFSTNESDQTLKRKAQEVWLALQMERKYTKQEILTFYINKVYMGNGN | 183 |
| | | GGSTL QQLIKL YFST+ SDQT+ RKAQE WLA+Q+E+K TKQEILT+YINKVYM NGN | |
| Sbjct: | 121 | GGSTLTQQLIKLTYFSTSTSDQTISRKAQEAWLAIQLEQKATKQEILTYYINKVYMSNGN | 180 |
| Query: | 184 | YGMLTAAKSYYGKDLKDLSYAQLALLAGIPQAPSQYDPYLHPEAAQNRRNVVLQQMYMEK | 243 |
| | | YGM TAA++YYGKDL +LS QLALLAG+PQAP+QYDPY HPEAAQ+RRN+VL +M + | |
| Sbjct: | 181 | YGMQTAAQNYYGKDLNNLSLPQLALLAGMPQAPNQYDPYSHPEAAQDRRNLVLSEMKNQG | 240 |
| Query: | 244 | HLTKAEYETAIATPVAEGLQSLQQRSTYPKYMDNYLKQVIEEVKKETNKDIFTAGLKVYT | 303 |
| | | +++ +YE A+ TP+ +GLQSL+ S YP YMDNYLK+VI +V++ET ++ T G+ VYT | |
| Sbjct: | 241 | YISAEQYEKAVNTPITDGLQSLKSASNYPAYMDNYLKEVINQVEEETGYNLLTTGMDVYT | 300 |
| Query: | 304 | NIIPDAQQTLYNIYHSGDYVYYPDQDFQVASTIVDVTNGHVIAQLGGRNQDENVSFGTNQ | 363 |
| | | N+ +AQ+ L++IY+S YV YPD D QVAST+VDV+NG VIAQLG R+Q NVSFGTNQ | |
| Sbjct: | 301 | NVDQEAQKHLWDIYNSDQYVSYPDDDLQVASTVVDVSNGKVIAQLGARHQASNVSFGTNQ | 360 |
| Query: | 364 | AVLTDRDWGSTMKPITAYAPAIESGVYTSTAQSTNDSVYYWPGTTTQLFNWDLRYNGWMT | 423 |
| | | AV T+RDWGS+MKPIT YAPA+E GVY STA +D Y +PGT T L+NWD Y G +T | |
| Sbjct: | 361 | AVETNRDWGSSMKPITDYAPALEYGVYDSTASIVHDVPYNYPGTDTPLYNWDHVYFGNIT | 420 |
| Query: | 424 | IQAAIMLSRNVPAVRALEAAGLDYARSFLSSLGINYPEMHYSNAISSNNSSSDKKYGASS | 483 |
| | | IQ A+ SRNV AV L GLD A++FL+ LGI+YP MHY+NAISSN + S+KKYGASS | |
| Sbjct: | 421 | IQYALQQSRNVTAVETLNKVGLDRAKTFLNGLGIDYPSMHYANAISSNTTESNKKYGASS | 480 |
| Query: | 484 | EKMAAAYAAFANGGIYHKPRYVNKVEFSDGTSKTFDEKGKRAMKETTAYMMTDMLKTVLT | 543 |
| | | EKMAAAYAAFANGGIYHKP Y+NK+ FSDG+ K F + G RAMKETTAYMMT+M+KTVLT | |
| Sbjct: | 481 | EKMAAAYAAFANGGIYHKPMYINKIVFSDGSEKEFSDAGTRAMKETTAYMMTEMMKTVLT | 540 |
| Query: | 544 | YGTGTAAAIPGVAQAGKTGTSNYTDEELAKIGEKYGLYPDYVGTLAPDENFVGFTKRYAM | 603 |
| | | YGTG A +P + QAGKTGTSNYTDEE+ K Y G +APDE FVG+T++YAM | |
| Sbjct: | 541 | YGTGRGAYLPWLPQAGKTGTSNYTDEEIEK-------YIKNTGYVAPDEMFVGYTRKYAM | 593 |
| Query: | 604 | AVWTGYKNRLTPVYGSSLEIASDVYRSMMTYLT-NGYSEDWTMPNGLYRSGGFLYLSGTY | 662 |
| | | AVWTGY NRLTP+ G +A VYRSM+TYL+ + DWTMP+GLYR+G F++ +G | |
| Sbjct: | 594 | AVWTGYSNRLTPIIGDGFLVAGKVYRSMITYLSEDDQPGDWTMPDGLYRNGEFVFKNGAR | 653 |
| Query: | 663 | ASNTDYTNSVYNNLYSNNTTTASSQTTSDDTSSSNDTSNSTNTDNNGSHPST | 714 |
| | | ++ + + S+++++ SS + S+ T+ S + S +TN +NN +T | |
| Sbjct: | 654 | STWSSPAPQQPPSTESSSSSSDSSTSQSNSTTPSTNNSTTTNPNNNTQQSNT | 705 |

[5395] An alignment of the GAS and GBS proteins is shown below.

| Identities = 521/729 (71%), Positives = 621/729 (84%), Gaps = 10/729 (1%) | | | |
|---|---|---|---|
| Query: | 1 | MITIKKESVIKLLKYAFGIIMGFIILAIVIGGLLFAYYVSRSPKLTDQALKSVNSSLVYD | 60 |
| | | +ITIK ++K LKY I+ IIL I+IGGLLF +Y+S +PKL++ LKS NSSLVYD | |
| Sbjct: | 1 | VITIKNPKILKWLKYVLSAILSLIILVIIIGGLLFTFYISSAPKLSEAQLKSTNSSLVYD | 60 |
| Query: | 61 | GNNKLIADLGSEKRESVSADSIPLNLVNAITSIEDKRFFKHRGVDIYRILGAAWHNLVSS | 120 |
| | | GNN LIADLGSEKRE+V+ADSIP+NLVNAITSIEDKRFF HRGVD+YRI GAA+HNL S | |
| Sbjct: | 61 | GNNNLIADLGSEKRENVTADSIPINLVNAITSIEDKRFFNHRGVDLYRIFGAAFHNLTSQ | 120 |
| Query: | 121 | NTQGGSTLDQQLIKLAYFSTNKSDQTLKRKSQEVWLALQMERKYTKEEILTFYINKVYMG | 180 |
| | | TQGGSTLDQQLIKLAYFSTN+SDQTLKRK+QEVWLALQMERKYTK+EILTFYINKVYMG | |
| Sbjct: | 121 | TTQGGSTLDQQLIKLAYFSTNESDQTLKRKAQEVWLALQMERKYTKQEILTFYINKVYMG | 180 |
| Query: | 181 | NGNYGMRTTAKSYFGKDLKELSIAQLALLAGIPQAPTQYDPYKNPESAQTRRNTVLQQMY | 240 |
| | | NGNYGM T AKSY+GKDLK+LS AQLALLAGIPQAP+QYDPY +PE+AQ RRN VLQQMY | |
| Sbjct: | 181 | NGNYGMLTAAKSYYGKDLKDLSYAQLALLAGIPQAPSQYDPYLHPEAAQNRRNVVLQQMY | 240 |
| Query: | 241 | QDKNISKKEYDQAVATPVTDGLKELKQKSTYPKYMDNYLKQVISEVKQKTGKDIFTAGLK | 300 |
| | | +K+++K EY+ A+ATPV +GL+ L+Q+STYPKYMDNYLKQVI EVK++T KDIFTAGLK | |
| Sbjct: | 241 | MEKHLTKAEYETAIATPVAEGLQSLQQRSTYPKYMDNYLKQVIEEVKKETNKDIFTAGLK | 300 |
| Query: | 301 | VYTNINTDAQKQLYDIYNSDTYIAYPNNELQIASTIMDATNGKVIAQLGGRHQNENISFG | 360 |
| | | VYTNI DAQ+ LY+IY+S Y+ YP+ + Q+ASTI+D TNG VIAQLGGR+Q+EN+SFG | |
| Sbjct: | 301 | VYTNIIPDAQQTLYNIYHSGDYVYYPDQDFQVASTIVDVTNGHVIAQLGGRNQDENVSFG | 360 |
| Query: | 361 | TNQSVLTDRDWGSTMKPISAYAPAIDSGVYNSTGQSLNDSVYYWPGTSTQLYDWDRQYMG | 420 |
| | | TNQ+VLTDRDWGSTMKPI+AYAPAI+SGVY ST QS NDSVYYWPGT+TQL++WD +Y G | |
| Sbjct: | 361 | TNQAVLTDRDWGSTMKPITAYAPAIESGVYTSTAQSTNDSVYYWPGTTTQLFNWDLRYNG | 420 |
| Query: | 421 | WMSMQTAIQQSRNVPAVRALEAAGLDEAKSFLEKLGIYYPEMNYSNAISSNNSSSDAKYG | 480 |
| | | WM++Q AI SRNVPAVRALEAAGLD A+SFL LGI YPEM+YSNAISSNNSSSD KYG | |
| Sbjct: | 421 | WMTIQAAIMLSRNVPAVRALEAAGLDYARSFLSSLGINYPEMHYSNAISSNNSSSDKKYG | 480 |
| Query: | 481 | ASSEKMAAAYSAFANGGTYYKPQYVNKIEFSDGTNDTYAASGSRAMKETTAYMMTDMLKT | 540 |
| | | ASSEKMAAAY+AFANGG Y+KP+YVNK+EFSDGT+ T+ G RAMKETTAYMMTDMLKT | |
| Sbjct: | 481 | ASSEKMAAAYAAFANGGIYHKPRYVNKVEFSDGTSKTFDEKGKRAMKETTAYMMTDMLKT | 540 |
| Query: | 541 | VLTFGTGTKAAIPGVAQAGKTGTSNYTEDELAKIEATTGIYNSAVGTMAPDENFVGYTSK | 600 |
| | | VLT+GTGT AAIPGVAQAGKTGTSNYT++ELAKI G+Y VGT+APDENFVG+T + | |
| Sbjct: | 541 | VLTYGTGTAAAIPGVAQAGKTGTSNYTDEELAKIGEKYGLYPDYVGTLAPDENFVGFTKR | 600 |
| Query: | 601 | YTMAIWTGYKNRLTPLYGSQLDIATEVYRAMMSYLTGGYSADWTMPEGLYRSGSYLYING | 660 |
| | | Y MA+WTGYKNRLTP+YGS L+IA++VYR+MM+YLT GYS DWTMP GLYRSG +LY++G | |
| Sbjct: | 601 | YAMAVWTGYKNRLTPVYGSSLEIASDVYRSMMTYLTNGYSEDWTMPNGLYRSGGFLYLSG | 660 |
| Query: | 661 | TTTTGT-YSSSVYKNIYQNSGQSSQSSSSTSSEKQKEDKNTANDANSSSPQVETPNNGNA | 719 |
| | | T + T Y++SVY N+Y N ++++ SS+ +D +++ND ++S+ T NNG+ | |
| Sbjct: | 661 | TYASNTDYTNSVYNNLYSN------NTTTASSQTTSDDTSSSNDTSNST---NTDNNGSH | 711 |
| Query: | 720 | TTPNNSNQT | 728 |
| | | + ++ T | |
| Sbjct: | 712 | PSTDDKKTT | 720 |

[5396] A related GBS gene <SEQ ID 8695> and protein <SEQ ID 8696> were also identified. Analysis of this protein sequence reveals the following:

```
Lipop: Possible site: −1 Crend: 10
McG: Discrim Score: 6.55
GvH: Signal Score (−7.5): −1.98
          Possible site: 36
>>> Seems to have a cleavable N-term signal seq.
ALOM program count: 0 value: 4.03 threshold: 0.0
      PERIPHERAL Likelihood = 4.03 201
  modified ALOM score: −1.31
*** Reasoning Step: 3
----- Final Results -----
                                bacterial outside --- Certainty = 0.3000(Affirmative) < succ>
                              bacterial membrane --- Certainty = 0.0000(Not Clear) < succ>
                            bacterial cytoplasm --- Certainty = 0.0000(Not Clear) < succ>
```

[5397] The protein has homology with the following sequences in the databases:

[chemical structure]

[5398] SEQ ID 8696 (GBS146) was expressed in E. coli as a His-fusion product. SDS-PAGE analysis of total cell extract is shown in FIG. 23 (lane 4; MW 82 kDa), in FIG. 168 (lane 11-13; MW 96.5 kDa) and in FIG. 238 (lane 8; MW 96.5 kDa). It was also expressed in E. coli as a GST-fusion product. SDS-PAGE analysis of total cell extract is shown in FIG. 49 (lane 2; MW 107 kDa).

[5399] Purified Thio-GBS146-His is shown in FIG. 244, lane 4.

[5400] Based on this analysis, it was predicted that these proteins and their epitopes could be useful antigens for vaccines or diagnostics.

### EXAMPLE 966

[5401] A DNA sequence (GBSx1025) was identified in S. agalactiae <SEQ ID 2951> which encodes the amino acid sequence <SEQ ID 2952>. Analysis of this protein sequence reveals the following:

```
Possible site: 37
>>> Seems to have no N-terminal signal sequence
----- Final Results -----
                            bacterial cytoplasm --- Certainty = 0.3647(Affirmative) < succ>
                              bacterial membrane --- Certainty = 0.0000(Not Clear) < succ>
                                bacterial outside --- Certainty = 0.0000(Not Clear) < succ>
```

[5402] The protein has homology with the following sequences in the GENPEPT database.

| >GP: AAA26957 GB: M90528 ORF [Streptococcus oralis] | | | |
|---|---|---|---|
| Identities = 143/196 (72%), Positives = 165/196 (83%), Gaps = 1/196 (0%) | | | |
| Query: | 1 | MVNYPHQLIRKTTVTKSKKKKIDFANRGMSFEAAINATNDYYLSHELAVIHKKPTPVQIV | 60 |
| | | MVNYPH++ + + K +FANRGMSFE INATNDYYLSH LAVIHKKPTP+QIV | |
| Sbjct: | 1 | MVNYPHKISSQKRQAPPSQTK-NFANRGMSFEKMINATNDYYLSHGLAVIHKKPTPIQIV | 59 |
| Query: | 61 | KVDYPKRSRAKIVEAYFRQASTTDYSGVYKGYYIDFEAKETRQKTAMPMKNFHAHQIEHM | 120 |
| | | +VDYP+RSRAKIVEAYFRQASTTDYSGVY GYYIDFEAKETRQK A+PMKNFH HQI+HM | |
| Sbjct: | 60 | RVDYPQRSRAKIVEAYFRQASTTDYSGVYDGYYIDFEAKETRQKHAIPMKNFHHHQIQHM | 119 |
| Query: | 121 | ANVLQQKGICFVLLHFSTLKETYLLPANELISFYQIDKGNKSMPIDYIRKNGFFVKESAF | 180 |
| | | VL Q+GICFVLLHF++ +ETYLLPA +LI FY DKG KSMP+ YIR+NG+ ++ AF | |
| Sbjct: | 120 | EQVLAQRGICFVLLHFASQQETYLLPAVDLIRFYHQDKGQKSMPLGYIRENGYRIELGAF | 179 |
| Query: | 181 | PQVPYLDIIEEKLLGG | 196 |
| | | PQ+PYLDII+E LLGG | |
| Sbjct: | 180 | PQIPYLDIIKEHLLGG | 195 |

[5403] A related DNA sequence was identified in S. pyogenes <SEQ ID 2953> which encodes the amino acid sequence <SEQ ID 2954>. Analysis of this protein sequence reveals the following:

```
Possible site: 37
>>> Seems to have no N-terminal signal sequence
----- Final Results -----
                            bacterial cytoplasm --- Certainty = 0.5030(Affirmative) < succ>
                              bacterial membrane --- Certainty = 0.0000(Not Clear) < succ>
                                bacterial outside --- Certainty = 0.0000(Not Clear) < succ>
```

[5404] An alignment of the GAS and GBS proteins is shown below.

| Identities = 166/199 (83%), Positives = 177/199 (88%) | | | |
|---|---|---|---|
| Query: | 1 | MVNYPHQLIRKTTVTKSKKKKIDFANRGMSFEAAINATNDYYLSHELAVIHKKPTPVQIV | 60 |
| | | MVNYPH LIR+ + K+ K+DFANRGMSFEAAINATNDYYLS ++AVIHKKPTPVQIV | |
| Sbjct: | 1 | MVNYPHNLIRQKVSSVQKQNKVDFANRGMSFEAAINATNDYYLSRQIAVIHKKPTPVQIV | 60 |
| Query: | 61 | KVDYPKRSRAKIVEAYFRQASTTDYSGVYKGYYIDFEAKETRQKTAMPMKNFHAHQIEHM | 120 |
| | | KVDYPKRSRAKIVEAYFRQASTTDY GVYKG+Y+DFEAKETRQKTAMPMKNFH HQIEHM | |
| Sbjct: | 61 | KVDYPKRSRAKIVEAYFRQASTTDYCGVYKGHYVDFEAKETRQKTAMPMKNFHLHQIEHM | 120 |
| Query: | 121 | ANVLQQKGICFVLLHFSTLKETYLLPANELISFYQIDKGNKSMPIDYIRKNGFFVKESAF | 180 |
| | | A VL QKGICFVLLHFSTLKETY LPA LISFYQID G+KSMPIDYIRKNGF V AF | |
| Sbjct: | 121 | ACVLHQKGICFVLLHFSTLKETYYLPAQALISFYQIDNGSKSMPIDYIRKNGFKVAFGAF | 180 |
| Query: | 181 | PQVPYLDIIEEKLLGGDYN | 199 |
| | | PQVPYL+IIE+ LGGDYN | |
| Sbjct: | 181 | PQVPYLNIIEQNFLGGDYN | 199 |

[5405] Based on this analysis, it was predicted that these proteins and their epitopes could be useful antigens for vaccines or diagnostics.

### EXAMPLE 967

[5406] A DNA sequence (GBSx1026) was identified in S. agalactiae <SEQ ID 2955> which encodes the amino acid sequence <SEQ ID 2956>. Analysis of this protein sequence reveals the following:

```
Possible site: 61
>>> Seems to have no N-terminal signal sequence
----- Final Results -----
                            bacterial cytoplasm --- Certainty = 0.3227(Affirmative) < succ>
                              bacterial membrane --- Certainty = 0.0000(Not Clear) < succ>
                              bacterial outside --- Certainty = 0.0000(Not Clear) < succ>
```

[5407] The protein has homology with the following sequences in the GENPEPT database.

| >GP: CAB14136 GB: Z99115 similar to hypothetical proteins from | | | |
|---|---|---|---|
| B. subtilis [Bacillus subtilis] | | | |
| Identities = 74/174 (42%), Positives = 97/174 (55%), Gaps = 6/174 (3%) | | | |
| Query: | 5 | ILVTGYKNFELGIFQDKDPRITIIKKAIDKDFRRFLENGADWFIFMGNLGFEYWALEVAL | 64 |
| | | + +TGYK FELGIF+ D + IKKAI FL+ G +W + G LG E WA E A | |
| Sbjct: | 4 | LAITGYKPFELGIFKQDDKALYYIKKAIKNRLIAFLDEGLEWILISGQLGVELWAAEAAY | 63 |
| Query: | 65 | DLQKEY-DFQIATIFTFENHGQNWNEANKAKL-ALFKQVDF-VKYTFPSYENPGQFKQYN | 121 |
| | | DLQ+EY D ++A I F +NW E NK + A+ Q D+ T YE+P QFKQ N | |
| Sbjct: | 64 | DLQEEYPDLKVAVITPFYEQEKNWKEPNKEQYEAVLAQADYEASLTHRPYESPLQFKQKN | 123 |
| Query: | 122 | HFLINNTQGAYLFYDSENETNLKFLLEMMEKK---EAYDISFLTFDRLNEIYEE | 172 |
| | | F I+ + G L YD E E + K++L EK+ + Y I F+T D L EE | |
| Sbjct: | 124 | QFFIDKSDGLLLLYDPEKEGSPKYMLGTAEKRREQDGYPIYFITMDDLRVTVEE | 177 |

[5408] A related DNA sequence was identified in S. pyogenes <SEQ ID 2957> which encodes the amino acid sequence <SEQ ID 2958>. Analysis of this protein sequence reveals the following:

```
Possible site: 60
>>> Seems to have no N-terminal signal sequence
----- Final Results -----
                            bacterial cytoplasm --- Certainty = 0.3041(Affirmative) < succ>
                              bacterial membrane --- Certainty = 0.0000(Not Clear) < succ>
                                bacterial outside --- Certainty = 0.0000(Not Clear) < succ>
```

[5409] An alignment of the GAS and GBS proteins is shown below.

| Identities = 102/167 (61%), Positives = 127/167 (75%) | | | |
|---|---|---|---|
| Query: | 3 | STILVTGYKNFELGIFQDKDPRITIIKKAIDKDFRRFLENGADWFIFMGNLGFEYWALEV | 62 |
| | | + IL+TGY++FE+GIF KDPR++IIK+AI KD +LENG DWFIF GNLGFE WALEV | |
| Sbjct: | 2 | TAILITGYRSFEIGIFDHKDPRVSIIKQAIRKDLIGYLENGVDWFIFTGNLGFEQWALEV | 61 |
| Query: | 63 | ALDLQKEYDFQIATIFTFENHGQNWNEANKAKLALFKQVDFVKYTFPSYENPGQFKQYNH | 122 |
| | | A +L++EY QIATIF FE HG WNE NK L+ F+ VDFVKY FP+YE P QF QY | |
| Sbjct: | 62 | ANELKEEYPLQIATIFLFETHGDRWNEKNKEVLSQFRAVDFVKYYFPNYEQPTQFSQYYQ | 121 |
| Query: | 123 | FLINNTQGAYLFYDSENETNLKFLLEMMEKKEAYDISFLTFDRLNEI | 169 |
| | | FL+ T+GAY+FYD+ENETNLK+ L+ + Y + LTFDRLN++ | |
| Sbjct: | 122 | FLLEKTEGAYVFYDTENETNLKYFLKKAKDMPHYQLLLLTFDRLNDM | 168 |

[5410] Based on this analysis, it was predicted that these proteins and their epitopes could be useful antigens for vaccines or diagnostics.

### EXAMPLE 968

[5411] A DNA sequence (GBSx1027) was identified in S. agalactiae <SEQ ID 2959> which encodes the amino acid sequence <SEQ ID 2960>. Analysis of this protein sequence reveals the following:

```
Possible site: 23
>>> Seems to have no N-terminal signal sequence
----- Final Results -----
                            bacterial cytoplasm --- Certainty = 0.5188(Affirmative) < succ>
                              bacterial membrane --- Certainty = 0.0000(Not Clear) < succ>
                                bacterial outside --- Certainty = 0.0000(Not Clear) < succ>
```

[5412] The protein has no significant homology with any sequences in the GENPEPT database.

[5413] No corresponding DNA sequence was identified in S. pyogenes.

[5414] Based on this analysis, it was predicted that this protein and its epitopes, could be useful antigens for vaccines or diagnostics.

### EXAMPLE 969

[5415] A DNA sequence (GBSx1028) was identified in S. agalactiae <SEQ ID 2961> which encodes the amino acid sequence <SEQ ID 2962>. This protein is predicted to be cell division protein DivIVA. Analysis of this protein sequence reveals the following:

```
Possible site: 16
>>> Seems to have no N-terminal signal sequence
----- Final Results -----
                            bacterial cytoplasm --- Certainty = 0.2736(Affirmative) < succ>
                              bacterial membrane --- Certainty = 0.0000(Not Clear) < succ>
                                bacterial outside --- Certainty = 0.0000(Not Clear) < succ>
```

[5416] A related GBS nucleic acid sequence <SEQ ID 9535> which encodes amino acid sequence <SEQ ID 9536> was also identified.

[5417] The protein has homology with the following sequences in the GENPEPT database.

| >GP: CAB14135 GB: Z99115 YPsB [Bacillus subtilis] | | | |
|---|---|---|---|
| Identities = 46/102 (45%), Positives = 69/102 (67%), Gaps = 14/102 (13%) | | | |
| Query: | 14 | SPKDIFEQDFKVSMRGYDKKEVDVFLDDVIKDYENYLEQIEKLQMENRRLQQALDKKESE | 73 |
| | | S K+I E++FK +RGY +++VD FLD +IKDYE + ++IE+LQ EN +L++ L+ E | |
| Sbjct: | 9 | SAKEILEKEFKTGVRGYKQEDVDKFLDMIIKDYETFHQEIEELQQENLQLKKQLE----E | 64 |
| Query: | 74 | ASNVRNSGTAMYNQKPIAQSATNFDILKRISRLEKEVFGRQI | 115 |
| | | AS ++P+ + TNFDILKR+S LEK VFG ++ | |
| Sbjct: | 65 | AS----------KKQPVQSNTTNFDILKRLSNLEKHVFGSKL | 96 |

[5418] A related DNA sequence was identified in S. pyogenes <SEQ ID 2963> which encodes the amino acid sequence <SEQ ID 2964>. Analysis of this protein sequence reveals the following:

```
Possible site: 51
>>> Seems to have no N-terminal signal sequence
----- Final Results -----
                            bacterial cytoplasm --- Certainty = 0.4466(Affirmative) < succ>
                              bacterial membrane --- Certainty = 0.0000(Not Clear) < succ>
                                bacterial outside --- Certainty = 0.0000(Not Clear) < succ>
```

[5419] An alignment of the GAS and GBS proteins is shown below.

| Identities = 71/112 (63%), Positives = 85/112 (75%), Gaps = 6/112 (5%) | | | |
|---|---|---|---|
| Query: | 8 | MASIIYSPKDIFEQDFKVSMRGYDKKEVDVFLDDVIKDYENYLEQIEKLQMENRRLQQAL | 67 |
| | | M SIIYSPKDIFEQ+FK SMRG+DKKEVD FLD+VIKDYEN+ QIE L+ EN +AL | |
| Sbjct: | 1 | MTSIIYSPKDIFEQEFKTSMRGFDKKEVDEFLDNVIKDYENFNAQIEALKAEN----EAL | 56 |
| Query: | 68 | DKKESEASNVRNSGTAMYNQKP--IAQSATNFDILKRISRLEKEVFGRQIRE | 117 |
| | | K + +A N ++ +P +AQSATNFDILKRIS+LEKEVFG+QI E | |
| Sbjct: | 57 | KKAKFQARNTVSATVQQPVPQPTRVAQSATNFDILKRISKLEKEVFGKQIIE | 108 |

[5420] Based on this analysis, it was predicted that these proteins and their epitopes could be useful antigens for vaccines or diagnostics.

### EXAMPLE 970

[5421] A DNA sequence (GBSx1029) was identified in S. agalactiae <SEQ ID 2965> which encodes the amino acid sequence <SEQ ID 2966>. Analysis of this protein sequence reveals the following:

```
Possible site: 55
>>> Seems to have no N-terminal signal sequence (or aa 1-19)
----- Final Results -----
                            bacterial cytoplasm --- Certainty = 0.0655(Affirmative) < succ>
                              bacterial membrane --- Certainty = 0.0000(Not Clear) < succ>
                                bacterial outside --- Certainty = 0.0000(Not Clear) < succ>
```

[5422] The protein has homology with the following sequences in the GENPEPT database.

| >GP: CAB14134 GB: Z99115 similar to hypothetical proteins [Bacillus subtilis] | | | |
|---|---|---|---|
| Identities = 204/382 (53%), Positives = 274/382 (71%), Gaps = 3/382 (0%) | | | |
| Query: | 3 | ESFKLIATAAAGLEAIVGREIRNLGIDCQVENGRVRFHGDIKTIIETNLWLRAADRIKII | 62 |
| | | + + LIATA G+EA+V +E+R+LG +C+V+NG+V F GD I NLWLR ADRIK+ | |
| Sbjct: | 2 | KKYTLIATAPMGIEAVVAKEVRDLGYECKVDNGKVIFEGDALAICRANLWLRTADRIKVQ | 61 |
| Query: | 63 | VGEFPAPTFEELFQGVYGLDWENYLPLGAKFPIAKAKCVKSKLHNEPSVQAISKKAVAKK | 122 |
| | | V F A TF+ELF+ ++W +++P KFP+ K VKS L + P Q I KKA+ +K | |
| Sbjct: | 62 | VASFKAKTFDELFEKTKAINWRSFIPENGKFPVI-GKSVKSTLASVPDCQRIVKKAIVEK | 120 |
| Query: | 123 | LQKVFHRPEGVPLQENGAEFKIEVSILKDKATVMIDTTGSSLFKRGYRAEKGGAPIKENM | 182 |
| | | L K+ ++E GAE+K+E+S+LKD+A + +D++G+ L KRGYR ++GGAPIKE + | |
| Sbjct: | 121 | L-KLQSGKANDWIEETGAEYKVEISLLKDQALITLDSSGTGLHKRGYRVDQGGAPIKETL | 179 |
| Query: | 183 | AAAIIQLSNWFPDKPLIDPTCGSGTFCIEAAMIGMNIAPGFNRDFAFEAWPWVDQSQVQK | 242 |
| | | AAA++QL+NW PD+P +DP CGSGT IEAA+IG NIAPGFNRDF E W W+ + K | |
| Sbjct: | 180 | AAALVQLTNWTPDRPFVDPFCGSGTIAIEAALIGQNIAPGFNRDFVSEDWEWIGKDLWNK | 239 |
| Query: | 243 | VRDEAESKANYDIDLDISGFDLDGRMVEIARKNAEEAGLGDVIKLKQMRLQDLKTDKING | 302 |
| | | R E E KANYD L I D+D RMV+IA++NAEEAGLGD+I+ KQM+++D T+ G | |
| Sbjct: | 240 | ARLEVEEKANYDQPLTIFASDIDHRMVQIAKENAEEAGLGDLIQFKQMQVKDFTTNLEFG | 299 |
| Query: | 303 | VIISNPPYGERLLDDKAVDILYNEMGQTFAPLKTWSKFILTSDEGFEKKYGSQADKKRKL | 362 |
| | | VI+ NPPYGERL + KAV+ +Y EMGQ F PL TWS ++LTS+E FE+ YG +A KKRKL | |
| Sbjct: | 300 | VIVGNPPYGERLGEKKAVEQMYKEMGQAFEPLDTWSVYMLTSNENFEEAYGRKATKKRKL | 359 |
| Query: | 363 | YNGTLKVDLYQYYGERVRRQVK | 384 |
| | | +NG +K D YQY+ +VR Q K | |
| Sbjct: | 360 | FNGFIKTDYYQYW-SKVRPQRK | 380 |

[5423] A related DNA sequence was identified in S. pyogenes <SEQ ID 2967> which encodes the amino acid sequence <SEQ ID 2968>. Analysis of this protein sequence reveals the following:

```
Possible site: 14
>>> Seems to have no N-terminal signal sequence
----- Final Results -----
                            bacterial cytoplasm --- Certainty = 0.0324(Affirmative) < succ>
                              bacterial membrane --- Certainty = 0.0000(Not Clear) < succ>
                                bacterial outside --- Certainty = 0.0000(Not Clear) < succ>
```

[5424] An alignment of the GAS and GBS proteins is shown below.

| Identities = 317/383 (82%), Positives = 354/383 (91%) | | | |
|---|---|---|---|
| Query: | 1 | MKESFKLIATAAAGLEAIVGREIRNLGIDCQVENGRVRFHGDIKTIIETNLWLRAADRIK | 60 |
| | | MKE+F+L+ATAAAGLEA+VG+E+R LG DCQVENG+V F GD++ I++TNLWLRAADRIK | |
| Sbjct: | 1 | MKETFRLVATAAAGLEAVVGKEVRALGFDCQVENGKVYFEGDVEAIVKTNLWLRAADRIK | 60 |
| Query: | 61 | IIVGEFPAPTFEELFQGVYGLDWENYLPLGAKFPIAKAKCVKSKLHNEPSVQAISKKAVA | 120 |
| | | IIVG+FPA TFEELFQGV+ LDWENYLPLGAKFPI+KAKCVKSKLHNEPSVQAI+KKAV | |
| Sbjct: | 61 | IIVGQFPARTFEELFQGVFALDWENYLPLGAKFPISKAKCVKSKLHNEPSVQAITKKAVV | 120 |
| Query: | 121 | KKLQKVFHRPEGVPLQENGAEFKIEVSILKDKATVMIDTTGSSLFKRGYRAEKGGAPIKE | 180 |
| | | KKLQK FHRPEGVPLQE G+ F IEVSILKD+AT+MIDTTGSSLFKRGYR +KGGAPIKE | |
| Sbjct: | 121 | KKLQKHFHRPEGVPLQEVGSTFNIEVSILKDQATIMIDTTGSSLFKRGYRVQKGGAPIKE | 180 |
| Query: | 181 | NMAAAIIQLSNWFPDKPLIDPTCGSGTFCIEAAMIGMNIAPGFNRDFAFEAWPWVDQSQV | 240 |
| | | NMAAAI+ LSNWFPDKPL+DPTCGSGTFCIEAAMIGMNIAPGFNR FAFE W WVD+ V | |
| Sbjct: | 181 | NMAAAILALSNWFPDKPLVDPTCGSGTFCIEAAMIGMNIAPGFNRSFAFEEWSWVDKDMV | 240 |
| Query: | 241 | QKVRDEAESKANYDIDLDISGFDLDGRMVEIARKNAEEAGLGDVIKLKQMRLQDLKTDKI | 300 |
| | | Q+VRD+AE +ANY+I+LDISGFD+DGRM+EIA+ NAEEAGL DVI KQMRLQD +TDK+ | |
| Sbjct: | 241 | QQVRDDAEQEANYEIELDISGFDIDGRMIEIAKSNAEEAGLSDVITFKQMRLQDFRTDKV | 300 |
| Query: | 301 | NGVIISNPPYGERLLDDKAVDILYNEMGQTFAPLKTWSKFILTSDEGFEKKYGSQADKKR | 360 |
| | | NGV+ISNPPYGERLLDDKAVDILYNEMGQTFAPLKTWSKFILTSDE FE KYG +ADKKR | |
| Sbjct: | 301 | NGVVISNPPYGERLLDDKAVDILYNEMGQTFAPLKTWSKFILTSDELFELKYGQKADKKR | 360 |
| Query: | 361 | KLYNGTLKVDLYQYYGERVRRQV | 383 |
| | | KLYNGTLKVDLYQ+YGERV+R + | |
| Sbjct: | 361 | KLYNGTLKVDLYQFYGERVKRHL | 383 |

[5425] Based on this analysis, it was predicted that these proteins and their epitopes could be useful antigens for vaccines or diagnostics.

### EXAMPLE 971

[5426] A DNA sequence (GBSx030) was identified in S. agalactiae <SEQ ID 2969> which encodes the amino acid sequence <SEQ ID 2970>. Analysis of this protein sequence reveals the following:

| Possible site: 30 | | | | |
|---|---|---|---|---|
| >>> Seems to have no N-terminal signal sequence | | | | |
| | INTEGRAL | Likelihood = −15.02 | Transmembrane | 171-187 (167-193) |

```
----- Final Results -----
                              bacterial membrane --- Certainty = 0.7007(Affirmative) < succ>
                                bacterial outside --- Certainty = 0.0000(Not Clear) < succ>
                            bacterial cytoplasm --- Certainty = 0.0000(Not Clear) < succ>
```

[5427] The protein has homology with the following sequences in the GENPEPT database.

| >GP: AAD16120 GB: AF094508 dentin phosphoryn [Homo sapiens] | | | |
|---|---|---|---|
| Identities = 71/398 (17%), Positives = 152/398 (37%), Gaps = 16/398 (4%) | | | |
| Query: | 16 | TDGLEFKDAK-EMTVEEAVRKDSEIKAGITEEDSILDKYIKQHRDEVASQKFETKSSDFA | 74 |
| | | +D + D+K + + E+ DS+ K+ ++ +S D S S | |
| Sbjct: | 152 | SDSSDSSDSKSDSSKSESDSSDSDSKSDSSDSNSSDSSDNSDSSDSSNSSNSSDSSDSSD | 211 |
| Query: | 75 | NLDTASLDDFIKKQREELSAMLAAEELSKKLDNSVSQEQDTEANAVSPKEESSQEQENSV | 134 |
| | | + D++S D + S + S+ D+S S + D+ ++ S SS ++ | |
| Sbjct: | 212 | SSDSSSSSD--SSNSSDSSDSSDSSNSSESSDSSDSSDSDSSDSSDSSNSNSSDSDSSNS | 269 |
| Query: | 135 | TPVPPLNTEAEPTATEPDSTIADSEEYKSSSKKRGGIVGTLIALILLLIVAIFGYNYFKN | 194 |
| | | + + ++ + + S +DS + SS + + + N + | |
| Sbjct: | 270 | SDSSDSSNSSDSSDSSDSSNSSDSSDSSDSSNSSDSSDSSDSS------DSSDSSNSSDS | 323 |
| Query: | 195 | NNSTNSQTATSQSSSSKATTTSSEEDKKASQNLDNFNKSYANFFVDDKKTQLKNSEFDKL | 254 |
| | | N+S+NS ++ S SS ++ +S D S + D+ N S D +S+ | |
| Sbjct: | 324 | NDSSNSSDSSDSSDSSDSSNSSDSSDSSDSSDSDSSNSS-------DSSNSSDSSDSCNS | 376 |
| Query: | 255 | SELEKKVDALKGTKYYGKVKVKFDSLKRQIDAVKAVNDKFKSPAVVDGKKSEKLEVKDGA | 314 |
| | | S+ D+ G+ + + D+ + N S + + S + D + | |
| Sbjct: | 377 | SDSSDSSDSSDGSDSDSSNRSDSSNSSDSSDSSDSSNSSDSSDSSDSNESSNSSDSSDSS | 436 |
| Query: | 315 | NFDSLDSKTLNTGNASLDSLLHSIVSTGRNQVKQSEEQASSNKVSDTQITEQPNVTNGQS | 374 |
| | | N DS + + S DS S S N S SSN + ++ N ++ + | |
| Sbjct: | 437 | NSSDSDSSDSSNSSDSSDSSNSSDSSESSNSSDNSNSSDSSNSSDSSDSSDSSNSSDSSN | 496 |
| Query: | 375 | SSSAATINNQAAGTASGNLERNRSRVPYNNAAIADTGN | 412 |
| | | SS ++ ++ + +S + + + S +++ +D+ + | |
| Sbjct: | 497 | SSDSSNSSDSSDSNSSDSSDSSXSSDSSDSSDSSDSSD | 534 |
| Identities = 64/341 (18%), Positives = 140/341 (40%), Gaps = 35/341 (10%) | | | |
| Query: | 59 | DEVASQKFETKSSDFANLDTASLDDFIKKQREELS-AMLAAEELSKKLDNSVSQEQDTEA | 117 |
| | | D+ S K ++ SSD + D+++ D + S + +++ S D+S S + D+ | |
| Sbjct: | 76 | DKSDSGKGKSDSSDSDSSDSSNSSDSSDSSDSDSSDSNSSSDSDSSDSDSSDSSDSDSSD | 135 |
| Query: | 118 | NAVSPKEESSQEQENSVTPVPPLNTEAEPTATEPDSTIADSEEYKSSSKKRGGIVGTLIA | 177 |
| | | ++ S S + +S +++++ + +E DS+ +DS+ S S | |
| Sbjct: | 136 | SSNSSDSSDSSDSSDSSDSSDSSDSKSDSSKSESDSSDSDSKSDSSDSN----------- | 184 |
| Query: | 178 | LILLLIVAIFGYNYFKNNNSTNSQTATSQSSSSKATTTSSEEDKKASQNLDNFNKSYANF | 237 |
| | | +++S NS ++ S +SS+ + ++ S + +S + D+ N S ++ | |
| Sbjct: | 185 | ---------------SSDSSDNSDSSDSSNSSNSSDSSDSSDSSDSSSSSDSSNSSDSS- | 228 |
| Query: | 238 | FVDDKKTQLKNSEFDKLSELEKKVDALKGTKYYGKVKVKFDSLKRQIDAVKAVNDKFKSP | 297 |
| | | D +SE S+ D+ + DS D+ + N S | |
| Sbjct: | 229 | ---DSSDSSNSSESSDSSD-SSDSDSSDSSDSSNSNSSDSDS-SNSSDSSDSSNSSDSSD | 283 |
| Query: | 298 | AVVDGKKSEKLEVKDGANFDSLDSKTLNTGNASLDSLLHSIVSTGRNQVKQSEEQASSNK | 357 |
| | | + S+ + D +N S DS + + S DS S + N S+ SS+ | |
| Sbjct: | 284 | SSDSSNSSDSSDSSDSSN--SSDSSDSSDSSDSSDSSNSSDSNDSSNSSDSSDSSDSSDS | 341 |
| Query: | 358 | VSDTQITEQPNVTNGQSSSSAATINNQAAGTASGNLERNRS | 398 |
| | | + + ++ + ++ SS+S+ + N+ + + + + + S | |
| Sbjct: | 342 | SNSSDSSDSSDSSDSDSSNSSDSSNSSDSSDSCNSSDSSDS | 382 |

[5428] A related DNA sequence was identified in S. pyogenes <SEQ ID 2971> which encodes the amino acid sequence <SEQ ID 2972>. Analysis of this protein sequence reveals the following:

| Possible site: 28 | | | | |
|---|---|---|---|---|
| >>> Seems to have no N-terminal signal sequence | | | | |
| | INTEGRAL | Likelihood = −14.70 | Transmembrane | 180-196 (175-202) |

```
----- Final Results -----
                              bacterial membrane --- Certainty = 0.6880(Affirmative) < succ>
                                bacterial outside --- Certainty = 0.0000(Not Clear) < succ>
                            bacterial cytoplasm --- Certainty = 0.0000(Not Clear) < succ>
```

[5429] The protein has homology with the following sequences in the databases:

| >GP: AAF15293 GB: AF202180 erythrocyte membrane-associated giant | | | |
|---|---|---|---|
| protein antigen 332 [Plasmodium falciparum] | | | |
| Identities = 41/173 (23%), Positives = 87/173 (49%), Gaps = 10/173 (5%) | | | |
| Query: | 1 | VSEESKEVEVTKESQTLGLNEAKSMTIGEAVRKQSE----IKAGVTKDDSILDKYIKQHR | 56 |
| | | + E + V + KE + GL+ + + ++V +Q+E I + K+ S ++ ++ | |
| Sbjct: | 78 | IEEAEENVWIEKEVEEEGLDNEEVIDEEDSVSEQAEEEVYINEEILKESSDVEDVKVENE | 137 |
| Query: | 57 | ---DEVSSQKFDAKYTELDTASLDNFIKKQREALSKAGLVDDEPVSAESAEQDSTLVEEV | 113 |
| | | +EV+ + + LDN++ ++ E++++ +VD+ P S E E +S ++EE+ | |
| Sbjct: | 138 | LMNEEVNEETQSVAENNEEDKELDNYVVEETESVTEEVVVDEVPNSKEVQEIES-IIEEI | 196 |
| Query: | 114 | AEDLAPMETTAVVTGIPVEATVPVLDLDPSERVIPEPQMTKEEPKRDQFLSED | 166 |
| | | ED + G +E V + D SE ++ E +T+E K++ ++ED | |
| Sbjct: | 197 | VEDGLTTDDLVGQQGSVIEEVVEEVGSD-SEGIVEEASITEEVEKKES-VTED | 247 |

[5430] An alignment of the GAS and GBS proteins is shown below.

| Identities = 234/506 (46%), Positives = 304/506 (59%), Gaps = 36/506 (7%) | | | |
|---|---|---|---|
| Query: | 1 | MSEDQKHPFFEPKKETDGLEFKDAKEMTVEEAVRKDSEIKAGITEEDSILDKYIKQHRDE | 60 |
| | | +SE+ K E KE+ L +AK MT+ EAVRK SEIKAG+T++DSILDKYIKQHRDE | |
| Sbjct: | 1 | VSEESKE--VEVTKESQTLGLNEAKSMTIGEAVRKQSEIKAGVTKDDSILDKYIKQHRDE | 58 |
| Query: | 61 | VASQKFETKSSDFANLDTASLDDFIKKQREELSAMLAAEELSKKLDNSVSQEQDTEANAV | 120 |
| | | V+SQKF+ K + LDTASLD+FIKKQRE LS A + + ++ S EQD+ | |
| Sbjct: | 59 | VSSQKFDAK---YTELDTASLDNFIKKQREALSK---AGLVDDEPVSAESAEQDSTLVEE | 112 |
| Query: | 121 | SPKEESSQEQENSVTPVPPLNT--------------EAEPTATEP--DSTIADSEEYKSS | 164 |
| | | ++ + E VT +P T E + T EP D +++ + + | |
| Sbjct: | 113 | VAEDLAPMETTAVVTGIPVEATVPVLDLDPSERVIPEPQMTKEEPKRDQFLSEDSHHPAK | 172 |
| Query: | 165 | SKKRGGIVGTLIALILLLIVAIFGYNYFKNNNSTNSQTATSQSSSSKATTTSSEEDKKAS | 224 |
| | | + G + L L+L ++ +FG+N+F +S + S+ + + T S+++ + | |
| Sbjct: | 173 | QNTKKGWLIALFLLLLAILAVVFGWNHFLRQDSGKTTQTASKQTKTSLQTDSAKKATRLK | 232 |
| Query: | 225 | QNLDNFNKSYANFFVDDKKTQLKNSEFDKLSELEKKVDALKGTKYYGKVKVKFDSLKRQI | 284 |
| | | F K Y F+ D K++LKNS F L +LE + AL+G+ YY K K K DSLK+ I | |
| Sbjct: | 233 | AAAKAFEKLYGTFYTDATKSKLKNSAFATLPDLEAALKALEGSAYYDKAKAKVDSLKKAI | 292 |
| Query: | 285 | DAVKAVNDKFKSPAVVDGKKSEKLEVKDGANFDSLDSKTLNTGNASLDSLLHSIVSTGRN | 344 |
| | | A+ AVN KF S VVDG+K EVK ANFD L S TL GNA+LD++L + ++ GR | |
| Sbjct: | 293 | AAITAVNGKFVSDVVVDGEKVSA-EVKADANFDDLSSATLTIGNANLDAVLQASITEGRQ | 351 |
| Query: | 345 | QVKQSEEQASSNKVSDTQITEQPNVTNGQSSSSAATINNQAAGTAS---GNLERNRSRVP | 401 |
| | | Q+ E A K ++ Q Q GQS+S A + G S +L+R+ SRVP | |
| Sbjct: | 352 | QLASKAEAA---KAANEQAV-QDQAAQGQSTSVAPS----GYGLTSYDPASLQRHLSRVP | 403 |
| Query: | 402 | YNNAAIADTGNPAWIFNPGVLEKIVATSQARGYFSGNNYILEPVNIINGNGYYNMFKLDG | 461 |
| | | YN IAD NP+W FNPGVLEKIVATSQARGY SGN YILEPVNIINGNGYYNMFK DG | |
| Sbjct: | 404 | YNQDVIADRANPSWAFNPGVLEKIVATSQARGYISGNQYILEPVNIINGNGYYNMFKPDG | 463 |
| Query: | 462 | TYLFSINAKTGYFVGNAPGRADSLDY | 487 |
| | | TYLFSIN KTGYFVGN G AD+LDY | |
| Sbjct: | 464 | TYLFSINCKTGYFVGNGKGYADALDY | 489 |

[5431] SEQ ID 2970 (GBS351) was expressed in E. coli as a His-fusion product. SDS-PAGE analysis of total cell extract is shown in FIG. 73 (lane 2; MW 57 kDa). It was also expressed in E. coli as a GST-fusion product. SDS-PAGE analysis of total cell extract is shown in FIG. 81 (lane 5; MW 82 kDa).

[5432] GBS351-GST was purified as shown in FIG. 216, lane 4.

[5433] Based on this analysis, it was predicted that these proteins and their epitopes could be useful antigens for vaccines or diagnostics.

### EXAMPLE 972

[5434] A DNA sequence (GBSx1031) was identified in S. agalactiae <SEQ ID 2973> which encodes the amino acid sequence <SEQ ID 2974>. Analysis of this protein sequence reveals the following:

```
Possible site: 19
>>> Seems to have no N-terminal signal sequence
----- Final Results -----
                            bacterial cytoplasm --- Certainty = 0.3169(Affirmative) < succ>
                              bacterial membrane --- Certainty = 0.0000(Not Clear) < succ>
                                bacterial outside --- Certainty = 0.0000(Not Clear) < succ>
```

[5435] A related DNA sequence was identified in S. pyogenes <SEQ ID 2975> which encodes the amino acid sequence <SEQ ID 2976>. Analysis of this protein sequence reveals the following:

```
Possible site: 19
>>> Seems to have no N-terminal signal sequence
----- Final Results -----
                            bacterial cytoplasm --- Certainty = 0.3169(Affirmative) < succ>
                              bacterial membrane --- Certainty = 0.0000(Not Clear) < succ>
                                bacterial outside --- Certainty = 0.0000(Not Clear) < succ>
```

[5436] An alignment of the GAS and GBS proteins is shown below.

| Identities = 129/160 (80%), Positives = 149/160 (92%) | | | |
|---|---|---|---|
| Query: | 1 | MTKEVVVESFELDHTIVKAPYVRLISEEVGPVGDIITNFDIRLIQPNENAIDTAGLHTIE | 60 |
| | | MTKEV+VESFELDHTIVKAPYVRLISEE GP GD ITNFD+RL+QPN+N+I+TAGLHTIE | |
| Sbjct: | 1 | MTKEVIVESFELDHTIVKAPYVRLISESFGPKGDRITNFDVRLVQPNQNSIETAGLHTIE | 60 |
| Query: | 61 | HLLAKLIRQRINGLIDCSPFGCRTGFHMIMWGKQDATEIAKVIKSSLEAIAGGVTWEDVP | 120 |
| | | HLLAKLIRQRI+G+IDCSPFGCRTGFH+IMWGK +T+IAKVIKSSLE IA G+TWEDVP | |
| Sbjct: | 61 | HLLAKLIRQRIDGMIDCSPFGCRTGFHLIMWGKHSSTDIAKVIKSSLEEIATGITWEDVP | 120 |
| Query: | 121 | GTTIESCGNYKDHSLHSAQEWAKLILSQGISDNAFERHIV | 160 |
| | | GTT+ESCGNYKDHSL +A+EWA+LI+ QGISD+ F RH++ | |
| Sbjct: | 121 | GTTLESCGNYKDHSLFAAKEWAQLIIDQGISDDPFSRHVI | 160 |

[5437] Based on this analysis, it was predicted that these proteins and their epitopes could be useful antigens for vaccines or diagnostics.

### EXAMPLE 973

[5438] A DNA sequence (GBSx1032) was identified in S. agalactiae <SEQ ID 2977> which encodes the amino acid sequence <SEQ ID 2978>. Analysis of this protein sequence reveals the following:

```
Possible site: 32
>>> Seems to have a cleavable N-term signal seq.
----- Final Results -----
                                bacterial outside --- Certainty = 0.3000(Affirmative) < succ>
                              bacterial membrane --- Certainty = 0.0000(Not Clear) < succ>
                            bacterial cytoplasm --- Certainty = 0.0000(Not Clear) < succ>
```

[5439] The protein has homology with the following sequences in the GENPEPT database.

| >GP: AAF34762 GB: AF228345 unknown [Listeria monocytogenes] | | | |
|---|---|---|---|
| Identities = 302/532 (56%), Positives = 400/532 (74%), Gaps = 14/532 (2%) | | | |
| Query: | 4 | IILAMVCALIGLIIGYVAISMKMKSSKEAAELTLLNAEQDAVDLRGRAEIEAEHIRKAAE | 63 |
| | | I + ++ +L+ LI+G V S+ KSS E+ RG AE+ E +K AE | |
| Sbjct: | 3 | IAITIISSLLFLIVGLVVGSLIFKSS----------TEKKLAAARGTAELIVEDAKKEAE | 52 |
| Query: | 64 | RESKAHQKELLLEAKEEARKYREEIEKEFKSDRQELKQMEARLTDRASSLDRKDENLSNK | 123 |
| | | +KE LLEAKEE + R EIE E + R E ++ E RL R +LDRKD +LS + | |
| Sbjct: | 53 | TT----KKEALLEAKEENHRLRTEIENELRGRRTETQKAENRLLQREENLDRKDTSLSKR | 108 |
| Query: | 124 | EKMLDSKEQSLTDKSRHINEREQEIATLETKKVEELSRIAELSQEEAKDIILADTEKDLA | 183 |
| | | E L+ KE+S++ + + I E+E ++A + + EL RI+ LS+EEAK IIL E++L | |
| Sbjct: | 109 | EATLERKEESISKRQQQIEEKESKLAEMIQAEQTELERISALSKEEAKSIILNQVEEELT | 168 |
| Query: | 184 | HDIATRIKEAEREVKDRSIAKNKDLLAQAMQRLAGEYVTEQTITTVHLPDDNMKGRIIGR | 243 |
| | | HD A +KE+E K+ S+K AK++L+ A+QR A ++V E T++ V LP+D MKGRIIGR | |
| Sbjct: | 169 | HDTAIMVKESENRAKEESDKKAKNILSLAIQRCAADHVAETTVSVVTLPNDEMKGRIIGR | 228 |
| Query: | 244 | EGRNIRTLESLTGIDVIIDDTPEVVVLSGFDPIRREIARMTLESLIQDGRIHPARIEELV | 303 |
| | | EGRNIRTLE+LTGID+IIDDTPE V+LSGFDPIRREIAR+ LE L+QDGRIHPARIEE+V | |
| Sbjct: | 229 | EGRNIRTLETLTGIDLIIDDTPEAVILSGFDPIRREIARIALEKLVQDGRIHPARIEEMV | 288 |
| Query: | 304 | EKNRLEMDQRIREYGEAAAYEIGAPNLHPDLIKIMGRLQFRTSYGQNVLRHSVEVGKLAG | 363 |
| | | K+ R E+D+ IRE GE A +E+G ++HPDLIKI+GRL++RTSYGQNVL HS+EV KLAG | |
| Sbjct: | 289 | DKARKEVDEHIREVGEQATFEVGIHSIHPDLIKILGRLRYRTSYGQNVLNHSLEVSKLAG | 348 |
| Query: | 364 | ILAGELGENVDLARRAGFLHDMGKAIDREVEGSHVEIGMEFARKYKEHPIVVNTIASHHG | 423 |
| | | ILAGELGE+V LA+RAG LHD+GKAID E+EGSHVEIG+E A KYKE+ +V+N+IASHHG | |
| Sbjct: | 349 | ILAGELGEDVTLAKRAGLLHDIGKAIDHEIEGSHVEIGVELATKYKENDVVINSIASHHG | 408 |
| Query: | 424 | DVEPDSVIAVIVAAADALSSARPGARNESMENYIKRLRDLEEIANGFEGVQNAFALQAGR | 483 |
| | | D E SVIAV+VAAADALS+ARPGAR+E++ENYI+RL LEEI+ ++GV+ ++A+QAGR | |
| Sbjct: | 409 | DTEATSVIAVLVAAADALSAARPGARSETLENYIRRLEKLEEISESYDGVEKSYAIQAGR | 468 |
| Query: | 484 | EIRIMVQPGKVSDDQVVIMSHKVREKIEQNLDYPGNIKVTVIREMRAVDFAK | 535 |
| | | E+RI+V+P + D ++ +R++IE+ LDYPG+IKVTVIRE RAV++AK | |
| Sbjct: | 469 | EVRIIVEPDTIDDLSSYRLARDIRKRIEEELDYPGHIKVTVIRETRAVEYAK | 520 |

[5440] A related DNA sequence was identified in S. pyogenes <SEQ ID 2979> which encodes the amino acid sequence <SEQ ID 2980>. Analysis of this protein sequence reveals the following:

```
Possible site: 32
>>> Seems to have a cleavable N-term signal seq.
----- Final Results -----
                                bacterial outside --- Certainty = 0.3000(Affirmative) < succ>
                              bacterial membrane --- Certainty = 0.0000(Not Clear) < succ>
                            bacterial cytoplasm --- Certainty = 0.0000(Not Clear) < succ>
```

[5441] The protein has homology with the following sequences in the databases:

| >GP: AAF34762 GB: AF228345 unknown [Listeria monocytogenes] | | | |
|---|---|---|---|
| Identities = 299/534 (55%), Positives = 408/534 (75%), Gaps = 14/534 (2%) | | | |
| Query: | 2 | VNIILLIVSALIGLILGYALISIRLKSAKEAAELTLLNAEQEAVDIRGKAEVDAEHIKKT | 61 |
| | | + I + I+S+L+ LI+G + S+ KS+ E++ RG AE+ I + | |
| Sbjct: | 1 | MTIAITIISSLLFLIVGLVVGSLIFKSS----------TEKKLAAARGTAEL----IVED | 46 |
| Query: | 62 | AKRESKANRKELLLEAKEEARKYREEIEQEFKSERQELKQLETRLAERSLTLDRKDENLS | 121 |
| | | AK+E++ +KE LLEAKEE + R EIE E + R E ++ E RL +R LDRKD +LS | |
| Sbjct: | 47 | AKKEAETTKKEALLEAKEENHRLRTEIENELRGRRTETQKAENRLLQREENLDRKDTSLS | 106 |
| Query: | 122 | SKEKVLDSKEQSLTDKSKHIDERQLQVEKLEEEKKAELEKVAAMTIAEAREVILMETENK | 181 |
| | | +E L+ KE+S++ + + I+E++ ++ ++ + ++ ELE+++A++ EA+ +IL + E + | |
| Sbjct: | 107 | KREATLERKEESISKRQQQIEEKESKLAEMIQAEQTELERISALSKEEAKSIILNQVEEE | 166 |
| Query: | 182 | LTHEIATRIRDAERDIKDRTVKTAKDLLAQAMQRLAGEYVTEQTITSVHLPDDNMKGRII | 241 |
| | | LTH+ A ++++E K+ + K AK++L+ A+QR A ++V E T++ V LP+D MKGRII | |
| Sbjct: | 167 | LTHDTAIMVKESENRAKEESDKKAKNILSLAIQRCAADHVAETTVSVVTLPNDEMKGRII | 226 |
| Query: | 242 | GREGRNIRTLESLTGIDVIIDDTPEVVILSGFDPIRREIARMTLESLIADGRIHPARIEE | 301 |
| | | GREGRNIRTLE+LTGID+IIDDTPE VILSGFDPIRREIAR+ LE L+ DGRIHPARIEE | |
| Sbjct: | 227 | GREGRNIRTLETLTGIDLIIDDTPEAVILSGFDPIRREIARIALEKLVQDGRIHPARIEE | 286 |
| Query: | 302 | LVEKNRLEMDNRIREYGEAAAYEIGAPNLHPDLIKIMGRLQFRTSFGQNVLRHSVEVGKL | 361 |
| | | +V+K R E+D IRE GE A +E+G ++HPDLIKI+GRL++RTS+GQNVL HS+EV KL | |
| Sbjct: | 287 | MVDKARKEVDEHIREVGEQATFEVGIHSIHPDLIKILGRLRYRTSYGQNVLNHSLEVSKL | 346 |
| Query: | 362 | AGILAGELGENVALARRAGFLHDMGKAIDREVEGSHVEIGMEFARKYKEHPVVVNTIASH | 421 |
| | | AGILAGELGE+V LA+RAG LHD+GKAID E+EGSHVEIG+E A KYKE+ VV+N+IASH | |
| Sbjct: | 347 | AGILAGELGEDVTLAKRAGLLHDIGKAIDHEIEGSHVEIGVELATKYKENDVVINSIASH | 406 |
| Query: | 422 | HGDVEPDSVIAVLVAAADALSSARPGARNESMENYIKRLRDLEEIATSFDGVQNSFALQA | 481 |
| | | HGD E SVIAVLVAAADALS+ARPGAR+E++ENYI+RL LEEI+ S+DGV+ S+A+QA | |
| Sbjct: | 407 | HGDTEATSVIAVLVAAADALSAARPGARSETLENYIRRLEKLEEISESYDGVEKSYAIQA | 466 |
| Query: | 482 | GREIRIMVQPEKISDDQVVILSHKVREKIENNLDYPGNIKVTVIREMRAVDYAK | 535 |
| | | GRE+RI+V+P+ I D L+ +R++IE LDYPG+IKVTVIRE RAV+YAK | |
| Sbjct: | 467 | GREVRIIVEPDTIDDLSSYRLARDIRKRIEEELDYPGHIKVTVIRETRAVEYAK | 520 |

[5442] An alignment of the GAS and GBS proteins is shown below.

| Identities = 451/535 (84%), Positives = 503/535 (93%) | | | |
|---|---|---|---|
| Query: | 1 | MFNIILAMVCALIGLIIGYVAISMKMKSSKEAAELTLLNAEQDAVDLRGKAEIEAEHIRK | 60 |
| | | M NIIL +V ALIGLI+GY IS+++KS+KEAAELTLLNAEQ+AVD+RGKAE++AEHI+K | |
| Sbjct: | 1 | MVNIILLIVSALIGLILGYALISIRLKSAKEAAELTLLNAEQEAVDIRGKAEVDAEHIKK | 60 |
| Query: | 61 | AAERESKAHQKELLLEAKEEARKYREEIEKEFKSDRQELKQMEARLTDRASSLDRKDENL | 120 |
| | | A+RESKA++KELLLEAKEEARKYREEIE+EFKS+RQELKQ+E RL +R+ +LDRKDENL | |
| Sbjct: | 61 | TAKRESKANRKELLLEAKEEARKYREEIEQEFKSERQELKQLETRLAERSLTLDRKDENL | 120 |
| Query: | 121 | SNKEKMLDSKEQSLTDKSRHINEREQEIATLETKKVEELSRIAELSQEEAKDIILADTEK | 180 |
| | | S+KEK+LDSKEQSLTDKS+HI+ER+ ++ LE +K EL ++A ++ EA+++IL +TE | |
| Sbjct: | 121 | SSKEKVLDSKEQSLTDKSKHIDERQLQVEKLEEEKKAELEKVAAMTIAEAREVILMETEN | 180 |
| Query: | 181 | DLAHDIATRIKEAEREVKDRSNKIAKDLLAQAMQRLAGEYVTEQTITTVHLPDDNMKGRI | 240 |
| | | L H+IATRI++AER++KDR+ K AKDLLAQAMQRLAGEYVTEQTIT+VHLPDDNMKGRI | |
| Sbjct: | 181 | KLTHEIATRIRDAERDIKDRTVKTAKDLLAQAMQRLAGEYVTEQTITSVHLPDDNMKGRI | 240 |
| Query: | 241 | IGREGRNIRTLESLTGIDVIIDDTPEVVVLSGFDPIRREIARMTLESLIQDGRIHPARIE | 300 |
| | | IGREGRNIRTLESLTGIDVIIDDTPEVV+LSGFDPIRREIARMTLESLI DGRIHPARIE | |
| Sbjct: | 241 | IGREGRNIRTLESLTGIDVIIDDTPEVVILSGFDPIRREIARMTLESLIADGRIHPARIE | 300 |
| Query: | 301 | ELVEKNRLEMDQRIREYGEAAAYEIGAPNLHPDLIKIMGRLQFRTSYGQNVLRHSVEVGK | 360 |
| | | ELVEKNRLEMD RIREYGEAAAYEIGAPNLHPDLIKIMGRLQFRTS+GQNVLRHSVEVGK | |
| Sbjct: | 301 | ELVEKNRLEMDNRIREYGEAAAYEIGAPNLHPDLIKIMGRLQFRTSFGQNVLRHSVEVGK | 360 |
| Query: | 361 | LAGILAGELGENVDLARRAGFLHDMGKAIDREVEGSHVEIGMEFARKYKEHPIVVNTIAS | 420 |
| | | LAGILAGELGENV LARRAGFLHDMGKAIDREVEGSHVEIGMEFARKYKEHP+VVNTIAS | |
| Sbjct: | 361 | LAGILAGELGENVALARRAGFLHDMGKAIDREVEGSHVEIGMEFARKYKEHPVVVNTIAS | 420 |
| Query: | 421 | HHGDVEPDSVIAVIVAAADALSSARPGARNESMENYIKRLRDLEEIANGFEGVQNAFALQ | 480 |
| | | HHGDVEPDSVIAV+VAAADALSSARPGARNESMENYIKRLRDLEEIA F+GVQN+FALQ | |
| Sbjct: | 421 | HHGDVEPDSVIAVLVAAADALSSARPGARNESMENYIKRLRDLEEIATSFDGVQNSFALQ | 480 |
| Query: | 481 | AGREIRIMVQPGKVSDDQVVIMSHKVREKIEQNLDYPGNIKVTVIREMRAVDFAK | 535 |
| | | AGREIRIMVQP K+SDDQVVI+SHKVREKIE NLDYPGNIKVTVIREMRAVD+AK | |
| Sbjct: | 481 | AGREIRIMVQPEKISDDQVVILSHKVREKIENNLDYPGNIKVTVIREMRAVDYAK | 535 |

[5443] SEQ ID 2978 (GBS86) was expressed in E. coli as a His-fusion product. SDS-PAGE analysis of total cell extract is shown in FIG. 7 (lane 6; MW 59 kDa). It was also expressed in E. coli as a GST-fusion product. SDS-PAGE analysis of total cell extract is shown in FIG. 13 (lane 5; MW 84 kDa).

[5444] GBS86-GST was purified as shown in FIG. 192, lane 3.

[5445] Based on this analysis, it was predicted that these proteins and their epitopes could be useful antigens for vaccines or diagnostics.

### EXAMPLE 974

[5446] A DNA sequence (GBSx1033) was identified in S. agalactiae <SEQ ID 2981> which encodes the amino acid sequence <SEQ ID 2982>. Analysis of this protein sequence reveals the following:

```
Possible site: 28
>>> Seems to have no N-terminal signal sequence
----- Final Results -----
                            bacterial cytoplasm --- Certainty = 0.4984(Affirmative) < succ>
                              bacterial membrane --- Certainty = 0.0000(Not Clear) < succ>
                                bacterial outside --- Certainty = 0.0000(Not Clear) < succ>
```

[5447] The protein has no significant homology with any sequences in the GENPEPT database.

[5448] No corresponding DNA sequence was identified in S. pyogenes.

[5449] Based on this analysis, it was predicted that this protein and its epitopes, could be useful antigens for vaccines or diagnostics.

### EXAMPLE 975

[5450] A DNA sequence (GBSx1034) was identified in S. agalactiae <SEQ ID 2983> which encodes the amino acid sequence <SEQ ID 2984>. Analysis of this protein sequence reveals the following:

| Possible site: 37 | | | | |
|---|---|---|---|---|
| >>> Seems to have no N-terminal signal sequence | | | | |
| | INTEGRAL | Likelihood = −2.87 | Transmembrane | 146-162 (146-162) |

```
----- Final Results -----
                              bacterial membrane --- Certainty = 0.2147(Affirmative) < succ>
                                bacterial outside --- Certainty = 0.0000(Not Clear) < succ>
                            bacterial cytoplasm --- Certainty = 0.0000(Not Clear) < succ>
```

[5451] A related GBS nucleic acid sequence <SEQ ID 8697> which encodes amino acid sequence <SEQ ID 8698> was also identified. Analysis of this protein sequence reveals the following:

| Lipop: Possible site: −1 Crend: 9 | | | | |
|---|---|---|---|---|
| McG: Discrim Score: −10.72 | | | | |
| GvH: Signal Score (−7.5): −5.66 | | | | |
| Possible site: 29 | | | | |
| >>> Seems to have no N-terminal signal sequence | | | | |
| ALOM program count: 1 value: −2.87 threshold: 0.0 | | | | |
| | INTEGRAL | Likelihood = −2.87 | Transmembrane | 138-154 (138-154) |
| | PERIPHERAL | Likelihood = 3.76 | 51 | |

```
modified ALOM score: 1.07
*** Reasoning Step: 3
----- Final Results -----
                              bacterial membrane --- Certainty = 0.2147(Affirmative) < succ>
                                bacterial outside --- Certainty = 0.0000(Not Clear) < succ>
                            bacterial cytoplasm --- Certainty = 0.0000(Not Clear) < succ>
```

[5452] The protein has homology with the following sequences in the GENPEPT database.

| >GP: AAG21390 GB: AF302051 ABC transporter ATP binding subunit | | | |
|---|---|---|---|
| [Bacillus licheniformis] | | | |
| Identities = 84/218 (38%), Positives = 138/218 (62%), Gaps = 1/218 (0%) | | | |
| Query: | 12 | DIIKVDHIFKSIGQKTILEDISFSIASNQCVALIGPNGAGKTTLMSTLLGDISISSGSLT | 71 |
| | | +++ + ++ K+ QKT ++ I FSI + VA++GPNGAGKTT +S +LG + ++G++T | |
| Sbjct: | 3 | NVVSLTNVTKTFRQKTAVDQIDFSIKKGEIVAILGPNGAGKTTTISMILGLLKPTAGNIT | 62 |
| Query: | 72 | IFNLPAHHNRLKYKVAILPQE-NVLPSKFTVRELIDFQRCLFPEVLPMSLILDYLQWSDT | 130 |
| | | +F+ H R++ K+ + QE +V+P E+I+ R +P+ L + +D | |
| Sbjct: | 63 | LFDSMPHEKRVREKIGTMLQEVSVMPGLRCRVEIIELIRSYYPKPLSFQKLRTLTGLTDK | 122 |
| Query: | 131 | HLQQFTETLSGGQKRLLAFVLTLVGKPQLLFLDEPTSGMDTSTRQRFWELIATLKKEGVT | 190 |
| | | L+ E LSGGQKR L F L L G P+L+ DEPT GMD ++R RFW+ + +L ++G T | |
| Sbjct: | 123 | DLKTQAEKLSGGQKRRLGFALALAGDPELMIFDEPTVGMDITSRNRFWQTVQSLAEQGKT | 182 |
| Query: | 191 | IVYSSHYIEEVEHTADRILVLHKGKLLRDTTPLCHEAR | 228 |
| | | I++S+HY++E + A RIL+ GK++ D TPL ++R | |
| Sbjct: | 183 | IIFSTHYLQEADDAAQRILLFKDGKIVADGTPLQIKSR | 220 |

[5453] SEQ ID 8698 (GBS350) was expressed in E. coli as a His-fusion product. SDS-PAGE analysis of total cell extract is shown in FIG. 72 (lane 13; MW 28.9 kDa). It was also expressed in E. coli as a GST-fusion product. SDS-PAGE analysis of total cell extract is shown in FIG. 81 (lane 4; MW 54 kDa).

[5454] GBS350-GST was purified as shown in FIG. 226, lane 7.

[5455] Based on this analysis, it was predicted that these proteins and their epitopes could be useful antigens for vaccines or diagnostics.

### EXAMPLE 976

[5456] A DNA sequence (GBSx1035) was identified in S. agalactiae <SEQ ID 2985> which encodes the amino acid sequence <SEQ ID 2986>. Analysis of this protein sequence reveals the following:

```
Possible site: 35
>>> Seems to have no N-terminal signal sequence
----- Final Results -----
                            bacterial cytoplasm --- Certainty = 0.2913(Affirmative) < succ>
                              bacterial membrane --- Certainty = 0.0000(Not Clear) < succ>
                                bacterial outside --- Certainty = 0.0000(Not Clear) < succ>
```

[5457] The protein has no significant homology with any sequences in the GENPEPT database.

[5458] No corresponding DNA sequence was identified in S. pyogenes.

[5459] Based on this analysis, it was predicted that this protein and its epitopes, could be useful antigens for vaccines or diagnostics.

### EXAMPLE 977

[5460] A DNA sequence (GBSx1036) was identified in S. agalactiae <SEQ ID 2987> which encodes the amino acid sequence <SEQ ID 2988>. Analysis of this protein sequence reveals the following:

| Possible site: 31 | | | | |
|---|---|---|---|---|
| >>> Seems to have an uncleavable N-term signal seq | | | | |
| | INTEGRAL | Likelihood = −10.51 | Transmembrane | 222-238 (214-241) |
| | INTEGRAL | Likelihood = −6.90 | Transmembrane | 104-120 (101-125) |
| | INTEGRAL | Likelihood = −5.84 | Transmembrane | 140-156 (138-159) |
| | INTEGRAL | Likelihood = −5.20 | Transmembrane | 19-35 (18-41) |
| | INTEGRAL | Likelihood = −1.28 | Transmembrane | 164-180 (164-180) |

```
----- Final Results -----
                              bacterial membrane --- Certainty = 0.5203(Affirmative) < succ>
                                bacterial outside --- Certainty = 0.0000(Not Clear) < succ>
                            bacterial cytoplasm --- Certainty = 0.0000(Not Clear) < succ>
```

[5461] The protein has homology with the following sequences in the GENPEPT database.

| >GP: CAB69806 GB: AJ243712 YVFS protein [Bacillus cereus] | | | |
|---|---|---|---|
| Identities = 73/239 (30%), Positives = 127/239 (52%), Gaps = 4/239 (1%) | | | |
| Query: | 9 | KMEFLLTKRQLANLIMAIGMPVAFFLFFSGFMGEGLTKAIEAIYVRNYMITMAGFSSLSF | 68 |
| | | K+E L T R + ++ MPV F+ F+ + + +Y+I+MA FS + | |
| Sbjct: | 4 | KIEILRTFRNKLFIFFSLLMPVMFYYIFTNVVQ---VPQNGDAWKAHYLISMATFSIVGT | 60 |
| Query: | 69 | AFFTFPFSMKDDQLSNRMQLLRHSPVPMWQYYLAKIIRILFYYCLAITVVFLTGHILRQV | 128 |
| | | A F+F + ++ LL+ +P+P Y AKII +I V+F+ G ++ V | |
| Sbjct: | 61 | ALFSFGVRLSQERGQGWTHLLKITPLPEGAYLTAKIIAQTVVNAFSILVIFIAGILINHV | 120 |
| Query: | 129 | SMPIEQWMQSFLLLLGGATCFIPFGLLVSYFKNTELMSMVANICYMSLAVLGGMWMPITM | 188 |
| | | + I QW+ + L LL G T F+ G ++ K + + +ANI MSLA++GG+WMPI + | |
| Sbjct: | 121 | ELTIGQWIGAGLWLLLGVTPFLALGTVIGSIKKADAAAGLANILNMSLAIVGGLWMPIEV | 180 |
| Query: | 189 | FPKWLQALSKLTPTYHLTQVILSPFANSFAGF-SLIILIGYGIIMLVIAYLLSQKRHSI | 246 |
| | | FPK L+ + + TPTYH A G+ ++ +L GY +I +V++ + +++ ++ | |
| Sbjct: | 181 | FPKILRTIGEWTPTYHFGSGAWDIVAGKSIGWENIAVLGGYFLIFVVVSIYIRKRQEAV | 239 |

[5462] There is also homology to SEQ ID 682 and to SEQ ID 1628.

[5463] Based on this analysis, it was predicted that this protein and its epitopes, could be useful antigens for vaccines or diagnostics.

### EXAMPLE 978

[5464] A DNA sequence (GBSx1037) was identified in S. agalactiae <SEQ ID 2989> which encodes the amino acid sequence <SEQ ID 2990>. This protein is predicted to be histidine kinase. Analysis of this protein sequence reveals the following:

| Possible site: 49 | | | | |
|---|---|---|---|---|
| >>> Seems to have a cleavable N-term signal seq. | | | | |
| | INTEGRAL | Likelihood = −7.43 | Transmembrane | 105-121 (102-124) |
| | INTEGRAL | Likelihood = −6.95 | Transmembrane | 130-146 (129-149) |

```
----- Final Results -----
                              bacterial membrane --- Certainty = 0.3972(Affirmative) < succ>
                                bacterial outside --- Certainty = 0.0000(Not Clear) < succ>
                            bacterial cytoplasm --- Certainty = 0.0000(Not Clear) < succ>
```

[5465] A related GBS nucleic acid sequence <SEQ ID 9537> which encodes amino acid sequence <SEQ ID 9538> was also identified.

[5466] The protein has homology with the following sequences in the GENPEPT database.

| >GP: CAB54584 GB: AJ006400 histidine kinase [Streptococcus pneumoniae] | | | |
|---|---|---|---|
| Identities = 138/350 (39%), Positives = 212/350 (60%), Gaps = 3/350 (0%) | | | |
| Query: | 11 | MYFIPLVFLIYPIGGILYYHYPFWTLFFTLAFVGAYLYSVIIRGESKYHMIAWSTMLTYI | 70 |
| | | M++I L+F+I+PI ++ W L + FV AYL V+ + + W MLTY+ | |
| Sbjct: | 11 | MFWISLIFMIFPILSVVTGWLSAWHLLIDILFVVAYL-GVLTTKSQRLSWLYWGLMLTYV | 69 |
| Query: | 71 | FYMTIFINSGFIWYIYFLSNLLVYRFRDK-LKSFRFISFACTLATVVF-LCFFKASDFGD | 128 |
| | | T F+ +IW+ +FLSNLL Y F + LKS +F VV L F+ + | |
| Sbjct: | 70 | VGNTAFVAVNYIWFFFFLSNLLSYHFSVRSLKSLHVWTFLLAQVLVVGQLLIFQRIEVEF | 129 |
| Query: | 129 | RIMFLIVPIFCIGYMWIAIENRNSEEQREKIAEQNQYINILSAENERNRIGRDLHDSLGH | 188 |
| | | L++ F + + R E+ +E +QN IN+L AENER+RIG+DLHDSLGH | |
| Sbjct: | 130 | LFYLLVILTFVDLMTFGLVRIRIVEDLKEAQVKQNAQINLLLAENERSRIGQDLHDSLGH | 189 |
| Query: | 189 | TFAMMTLKTELALKLLEKRNYDKVQKELSELNHISHQSMSEVRQIVSNLKYRTVVEEIDE | 248 |
| | | TFAM+++KT+LAL+L + Y +V+KEL E++ IS SM+EVR IV NLK RT+ E++ | |
| Sbjct: | 190 | TFAMLSVKTDLALQLFQMEAYPQVEKELKEIHQISKDSMNEVRTIVENLKSRTLTSELET | 249 |
| Query: | 249 | LYRLFQLSNIKLTVVNKLETSQLSPVTQSTITMILKELSNNIVKHAEADSVELSLVRQGA | 308 |
| | | + ++ +++ I++ V N L+ S L+ +ST +MIL EL NI+KHA+A V L L R | |
| Sbjct: | 250 | VKKMLEIAGIEVQVENHLDKSSLTQELESTASMILLELVTNIIKHAKASKVYLKLERTEK | 309 |
| Query: | 309 | TINIEMIDNGCGFTNLDGDELHSIQERLTIVEGTLTILSRSKPTHIQVVL | 358 |
| | | + + + D+GCGF ++ GDELH+++ R+ G ++++S+ PT +QV L | |
| Sbjct: | 310 | ELILTVRDDGCGFASISGDELHTVRNRVFPFSGEVSVISQKHPTEVQVRL | 359 |

[5467] There is also homology to SEQ ID 2992.

[5468] A related GBS gene <SEQ ID 8699> and protein <SEQ ID 8700> were also identified. Analysis of this protein sequence reveals the following:

| Lipop: Possible site: −1 Crend: 8 | | | | |
|---|---|---|---|---|
| McG: Discrim Score: 10.90 | | | | |
| GvH: Signal Score (−7.5): −2.42 | | | | |
| Possible site: 49 | | | | |
| >>> Seems to have a cleavable N-term signal seq. | | | | |
| ALOM program count: 2 value: −7.43 threshold: 0.0 | | | | |
| | INTEGRAL | Likelihood = −7.43 | Transmembrane | 105-121 (102-124) |
| | INTEGRAL | Likelihood = −6.95 | Transmembrane | 130-146 (129-149) |
| | PERIPHERAL | Likelihood = 0.16 | 61 | |

```
modified ALOM score: 1.99
*** Reasoning Step: 3
----- Final Results -----
                              bacterial membrane --- Certainty = 0.3972(Affirmative) < succ>
                                bacterial outside --- Certainty = 0.0000(Not Clear) < succ>
                            bacterial cytoplasm --- Certainty = 0.0000(Not Clear) < succ>
```

[5469] Based on this analysis, it was predicted that these proteins and their epitopes could be useful antigens for vaccines or diagnostics.

### EXAMPLE 979

[5470] A DNA sequence (GBSx1038) was identified in S. agalactiae <SEQ ID 2993> which encodes the amino acid sequence <SEQ ID 2994>. This protein is predicted to be response regulator. Analysis of this protein sequence reveals the following:

| Possible site: 28 | | | | |
|---|---|---|---|---|
| >>> Seems to have no N-terminal signal sequence | | | | |
| | INTEGRAL | Likelihood = −0.16 | Transmembrane | 49-65 (49-65) |

```
----- Final Results -----
                              bacterial membrane --- Certainty = 0.1065(Affirmative) < succ>
                                bacterial outside --- Certainty = 0.0000(Not Clear) < succ>
                            bacterial cytoplasm --- Certainty = 0.0000(Not Clear) < succ>
```

[5471] The protein has homology with the following sequences in the GENPEPT database.

| >GP: CAB54585 GB: AJ006400 response regulator [Streptococcus pneumoniae] | | | |
|---|---|---|---|
| Identities = 95/153 (62%), Positives = 125/153 (81%), Gaps = 3/153 (1%) | | | |
| Query: | 1 | MKLLVAEDQSMLRDAMCQLLLMEESVSTIDQAGNGGEAIAILSNKAIDVAILDVEMPILS | 60 |
| | | MK+LVAEDQSMLRDAMCQLL+++ V ++ QA NG EAI +L +++D+AILDVEMP+ + | |
| Sbjct: | 1 | MKVLVAEDQSMLRDAMCQLLMLQPDVESVFQAKNGQEAIQLLEKESVDIAILDVEMPVKT | 60 |
| Query: | 61 | GLDVLEWVRKYQ-NVKVIIVTTFKRSGYFQRAIRSNVDAYVLKDRSVADLMKTIQKVLSG | 119 |
| | | GL+VLEW+R + KV++VTTFKR GYF+RA+++ VDAYVLK+R++ADLM+T+ VL G | |
| Sbjct: | 61 | GLEVLEWIRAEKLETKVVVVTTFKRPGYFERAVKAGVDAYVLKERNIADLMQTLHTVLEG | 120 |
| Query: | 120 | GKEYSPELMENVI--SNPLSEQEIKILSLIAQG | 150 |
| | | KEYSPELME V+ NPL+EQEI +L IAQG | |
| Sbjct: | 121 | RKEYSPELMEVVMMHPNPLTEQEIAVLKGIAQG | 153 |

[5472] There is also homology to SEQ ID 2996.

[5473] Based on this analysis, it was predicted that this protein and its epitopes, could be useful antigens for vaccines or diagnostics.

### EXAMPLE 980

[5474] A DNA sequence (GBSx1039) was identified in S. agalactiae <SEQ ID 2997> which encodes the amino acid sequence <SEQ ID 2998>. Analysis of this protein sequence reveals the following:

| Possible site: 34 | | | | |
|---|---|---|---|---|
| >>> Seems to have an uncleavable N-term signal seq | | | | |
| | INTEGRAL | Likelihood = −6.69 | Transmembrane | 158-174 (145-184) |
| | INTEGRAL | Likelihood = −4.94 | Transmembrane | 11-27 (8-31) |
| | INTEGRAL | Likelihood = −3.93 | Transmembrane | 74-90 (73-92) |
| | INTEGRAL | Likelihood = −2.39 | Transmembrane | 103-119 (102-119) |
| | INTEGRAL | Likelihood = −1.86 | Transmembrane | 42-58 (38-59) |

```
----- Final Results -----
                              bacterial membrane --- Certainty = 0.3675(Affirmative) < succ>
                                bacterial outside --- Certainty = 0.0000(Not Clear) < succ>
                            bacterial cytoplasm --- Certainty = 0.0000(Not Clear) < succ>
```

[5475] The protein has homology with the following sequences in the GENPEPT database.

| >GP: AAB85965 GB: AE000909 unknown [Methanothermobacter | | | |
|---|---|---|---|
| thermoautotrophicus] | | | |
| Identities = 46/183 (25%), Positives = 81/183 (44%), Gaps = 11/183 (6%) | | | |
| Query: | 5 | KERFDTLSDAILAIAMTILVLEI-------KTPATMGDIGDFTRNIGLFIVSFVVVFNFW | 57 |
| | | K+R + L DAI AIAMTILVL I PA I ++ + +SF+++ FW | |
| Sbjct: | 6 | KKRLEGLVDAIFAIAMTILVLGIDVPTGTMSVPAMDAYIMGLASDLYSYCLSFLLLGVFW | 65 |
| Query: | 58 | YERAQNSLDAQKTNDEIIALDIIEHLGICLIPLFTKFMISFENHNFAVMAYGLLTLLVGL | 117 |
| | | + + +K + I ++I+ + + L+P TK ++ + + + L L +GL | |
| Sbjct: | 66 | WVNHMHFEKLEKVDTGFIWINIVWLMVVVLVPFSTKLTGNYGDLVTPNILFHLNMLTIGL | 125 |
| Query: | 118 | TSDIIRIRLASYDLVTIPSELKERVIKVMTTFAIRSVVVRFIIIILAYFLPEVGIFAYLV | 177 |
| | | + I L+ I ++K + ++ + +IL PE AY V | |
| Sbjct: | 126 | LLSMSWIYTQRNGLMDIGENEYRLILKKNLLMPLAAI----LALILTPIAPEYSSTAYAV | 181 |
| Query: | 178 | IPL | 180 |
| | | + L | |
| Sbjct: | 182 | LIL | 184 |

[5476] No corresponding DNA sequence was identified in S. pyogenes.

[5477] Based on this analysis, it was predicted that this protein and its epitopes, could be useful antigens for vaccines or diagnostics.

### EXAMPLE 981

[5478] A DNA sequence (GBSx1040) was identified in S. agalactiae <SEQ ID 2999> which encodes the amino acid sequence <SEQ ID 3000>. This protein is predicted to be guanylate kinase (gmk). Analysis of this protein sequence reveals the following:

```
Possible site: 16
>>> Seems to have an uncleavable N-term signal seq
----- Final Results -----
                              bacterial membrane --- Certainty = 0.0000(Not Clear) < succ>
                                bacterial outside --- Certainty = 0.0000(Not Clear) < succ>
                            bacterial cytoplasm --- Certainty = 0.0000(Not Clear) < succ>
```

[5479] The protein has homology with the following sequences in the GENPEPT database.

| >GP: CAB13441 GB: Z99112 similar to guanylate kinase [Bacillus subtilis] | | | |
|---|---|---|---|
| Identities = 121/202 (59%), Positives = 155/202 (75%) | | | |
| Query: | 1 | MSERGLLIVFSGPSGVGKGTVRQEIFSTPDHKFDYSVSMTTRPQRPGEVDGVDYFFRTRE | 60 |
| | | M ERGLLIV SGPSGVGKGTVRQ IFS D KF+YS+S+TTR R GEV+GVDYFF+TR+ | |
| Sbjct: | 41 | MKERGLLIVLSGPSGVGKGTVRQAIFSQEDTKFEYSISVTTRSPREGEVNGVDYFFKTRD | 100 |
| Query: | 61 | EFEALIKEGQMLEYAEYVGNYYGTPLSYVNETLDKGIDVFLEIEVQGALQVKSKVPDGVF | 120 |
| | | EFE +I + ++LE+AEYVGNYYGTP+ YV +TL G DVFLEIEVQGALQV++ P+G+F | |
| Sbjct: | 101 | EFEQMIADNKLLEWAEYVGNYYGTPVDYVEQTLQDGKDVFLEIEVQGALQVRNAFPEGLF | 160 |
| Query: | 121 | IFLTPPDLEELEERLVGRGTDSPEVIAQRIERAKEEIALMREYDYAVVNDQVSLAAERVK | 180 |
| | | IFL PP L EL+ R+V RGT++ +I R++ AK EI +M YDY V ND V A +++K | |
| Sbjct: | 161 | IFLAPPSLSELKNRIVTRGTETDALIENRMKAAKAEIEMMDAYDYVVENDNVETACDKIK | 220 |
| Query: | 181 | RVIEAEHYRVDRVIGRYTNMVK | 202 |
| | | ++ AEH + +RV RY M++ | |
| Sbjct: | 221 | AIVLAEHLKRERVAPRYKKMLE | 242 |

[5480] A related DNA sequence was identified in S. pyogenes <SEQ ID 3001> which encodes the amino acid sequence <SEQ ID 3002>. Analysis of this protein sequence reveals the following:

```
          Possible site: 16
>>> Seems to have an uncleavable N-term signal seq
----- Final Results -----
      bacterial membrane --- Certainty = 0.0000 (Not Clear) < succ>
        bacterial outside --- Certainty = 0.0000 (Not Clear) < succ>
    bacterial cytoplasm --- Certainty = 0.0000 (Not Clear) < succ>
```

[5481] The protein has homology with the following sequences in the databases:

| >GP:CAB13441 GB:Z99112 similar to guanylate kinase [Bacillus subtilis] | | | |
|---|---|---|---|
| Identities = 123/203 (60%), Positives = 157/203 (76%) | | | |
| Query: | 1 | MSERGLLIVFSGPSGVGKGTVRQEIFSTPDHKFEYSVSMTTRPQRFGEVDGVDYFFRTRE | 60 |
| | | M ERGLLIV SGPSGVGKGTVRQ IFS D KFEYS+S+TTR R GEV+GVDYFF+TR+ | |
| Sbjct: | 41 | MKERGLLIVLSGPSGVGKGTVRQAIFSQEDTKFEYSISVTTRSPREGEVNGVDYFFKTRD | 100 |
| Query: | 61 | EFEELIKTGQMLEYAEYVGNYYGTPLTYVNETLDKGIDVFLEIEVQGALQVKSKVPDGVF | 120 |
| | | EFE++I ++LE+AEYVGNYYGTP+ YV +TL G DVFLEIEVQGALQV++ P+G+F | |
| Sbjct: | 101 | EFEQMIADNKLLEWAEYVGNYYGTPVDYVEQTLQDGKDVFLEIEVQGALQVRNAFPEGLF | 160 |
| Query: | 121 | VFLTPPDLDELEDRLVGRGTDSQEVIAQRIERAKEEIALMREYDYAVVNDEVALAAERVK | 180 |
| | | +FL PP L EL++R+V RGT++ +I R++ AK EI +M YDY V ND V A +++K | |
| Sbjct: | 161 | IFLAPPSLSELKNRIVTRGTETDALIENRMKAAKAEIEMMDAYDYVVENDNVETACDKIK | 220 |
| Query: | 181 | RIIETEHFRVERVIGRYDKMIKI | 203 |
| | | I+ EH + ERV RY KM+++ | |
| Sbjct: | 221 | AIVLAEHLKRERVAPRYKKMLEV | 243 |

[5482] An alignment of the GAS and GBS proteins is shown below.

| Identities = 186/204 (91%), Positives = 197/204 (96%) | | | |
|---|---|---|---|
| Query: | 1 | MSERGLLIVFSGPSGVGKGTVRQEIFSTPDHKFDYSVSMTTRPQRPGEVDGVDYFFRTRE | 60 |
| | | MSERGLLIVFSGPSGVGKGTVRQEIFSTPDHKF+YSVSMTTRPQRPGEVDGVDYFFRTRE | |
| Sbjct: | 1 | MSERGLLIVFSGPSGVGKGTVRQEIFSTPDHKFEYSVSMTTRPQRPGEVDGVDYFFRTRE | 60 |
| Query: | 61 | EFEALIKEGQMLEYAEYVGNYYGTPLSYVNETLDKGIDVFLEIEVQGALQVKSKVPDGVF | 120 |
| | | EFE LIK GQMLEYAEYVGNYYGTPL+YVNETLDKGIDVFLEIEVQGALQVKSKVPDGVF | |
| Sbjct: | 61 | EFEELIKTGQMLEYAEYVGNYYGTPLTYVNETLDKGIDVFLEIEVQGALQVKSKVPDGVF | 120 |
| Query: | 121 | IFLTPPDLEELEERLVGRGTDSPEVIAQRIERAKEEIALMREYDYAVVNDQVSLAAERVK | 180 |
| | | +FLTPPDL+ELE+RLVGRGTDS EVIAQRIERAKEEIALMREYDYAVVND+V+LAAERVK | |
| Sbjct: | 121 | VFLTPPDLDELEDRLVGRGTDSQEVIAQRIERAKEEIALMREYDYAVVNDEVALAAERVK | 180 |
| Query: | 181 | RVIEAEHYRVDRVIGRYTNMVKET | 204 |
| | | R+IE EH+RV+RVIGRY M+K T | |
| Sbjct: | 181 | RIIETEHFRVERVIGRYDKMIKIT | 204 |

[5483] Based on this analysis, it was predicted that these proteins and their epitopes could be useful antigens for vaccines or diagnostics.

### EXAMPLE 982

[5484] A DNA sequence (GBSx1041) was identified in S. agalactiae <SEQ ID 3003> which encodes the amino acid sequence <SEQ ID 3004>. Analysis of this protein sequence reveals the following:

```
Possible site: 30
>>>Seems to have no N-terminal signal sequence
----- Final Results -----
    bacterial cytoplasm --- Certainty = 0.1763 (Affirmative) < succ>
      bacterial membrane --- Certainty = 0.0000 (Not Clear) < succ>
        bacterial outside --- Certainty = 0.0000 (Not Clear) < succ>
```

[5485] The protein has no significant homology with any sequences in the GENPEPT database.

[5486] A related DNA sequence was identified in S. pyogenes <SEQ ID 3005> which encodes the amino acid sequence <SEQ ID 3006>. Analysis of this protein sequence reveals the following:

```
Possible site: 35
>>>Seems to have no N-terminal signal sequence
----- Final Results -----
    bacterial cytoplasm --- Certainty = 0.1551 (Affirmative) < succ>
      bacterial membrane --- Certainty = 0.0000 (Not Clear) < succ>
        bacterial outside --- Certainty = 0.0000 (Not Clear) < succ>
```

[5487] An alignment of the GAS and GBS proteins is shown below.

| Identities = 95/105 (90%), Positives = 100/105 (94%), Gaps = 1/105 (0%) | | | |
|---|---|---|---|
| Query: | 1 | MMLKPSIDTLLDKVPSKYSLVILQAKRAHELEAGEKATQDFKSVKSTLRALEEIESGNVV | 60 |
| | | MMLKPSIDTLLDKVPSKYSLVILQAKRAHELEAG TQ+FKSVKSTL+ALEEIESGNVV | |
| Sbjct: | 1 | MMLKPSIDTLLDKVPSKYSLVILQAKRAHELEAGATPTQEFKSVKSTLQALEEIESGNVV | 60 |
| Query: | 61 | IHPDPSAKRASVRARIEAERLAKEEEERKIKEQIAKEK-EDGEKI | 104 |
| | | IHPDPSAKR +VRA+IEAERLAKEEEERKIKEQIAKEK E+GEKI | |
| Sbjct: | 61 | IHPDPSAKREAVRAKIEAERLAKEEEERKIKEQIAKEKEEEGEKI | 105 |

[5488] Based on this analysis, it was predicted that these proteins and their epitopes could be useful antigens for vaccines or diagnostics.

### EXAMPLE 983

[5489] A DNA sequence (GBSx1043) was identified in S. agalactiae <SEQ ID 3007> which encodes the amino acid sequence <SEQ ID 3008>. Analysis of this protein sequence reveals the following:

```
Possible site: 24
>>> Seems to have no N-terminal signal sequence
----- Final Results -----
                            bacterial cytoplasm --- Certainty = 0.3413(Affirmative) < succ>
                              bacterial membrane --- Certainty = 0.0000(Not Clear) < succ>
                                bacterial outside --- Certainty = 0.0000(Not Clear) < succ>
```

[5490] The protein has homology with the following sequences in the GENPEPT database.

| >GP: CAB13444 GB: Z99112 primosomal replication factor Y (primosomal | | | |
|---|---|---|---|
| protein N′) [Bacillus subtilis] | | | |
| Identities = 377/807 (46%), Positives = 529/807 (64%), Gaps = 21/807 (2%) | | | |
| Query: | 6 | AQVIVDIPLMQTDKPFSYAIPKDLEDLVQVGVRVHVPFGRGNRLLQGFVVGFRDDDELET | 65 |
| | | A+VIVD+ D+PF Y IP L+ +++ G+RV VPFG R +QGFV ++ +L | |
| Sbjct: | 4 | AEVIVDVSTKNIDRPFDYKIPDHLKGMIKTGMRVIVPFGP--RKIQGFVTAVKEASDLSG | 61 |
| Query: | 66 | KDIAEV---LDFEPVLNQEQLDLADQMRHTVFSYKISILKSMLPSLLNSQYDKLLL---A | 119 |
| | | K + EV LD PVL +E + L+ + S+KI+ L++MLP+ L ++Y+K L | |
| Sbjct: | 62 | KSVKEVEDLLDLTPVLTEELMILSSWLSDKTLSFKITALQAMLPAALKAKYEKELKIAHG | 121 |
| Query: | 120 | TDTLPSEDREDLFGHKTEIVFSSLSSQDAKKA-GRLIQKGFIEVQYLAKDKKTIKTEKIY | 178 |
| | | D P +R LF +++S + + K R +QKG I+V Y K K + | |
| Sbjct: | 122 | ADLPPQVER--LFSETKTLLYSDIPDHETLKLIQRHVQKGDIDVTYKVAQKTNKKMVRHI | 179 |
| Query: | 179 | KINRTLLEKSQ----IAARAKKRLELKEFLLENPQPGRLTALN----KQFSSPVVNFFRE | 230 |
| | | + N + E ++ ++ +A K+ + FL+ P+ ++ A SS + + | |
| Sbjct: | 180 | QANASKEELAKQAEGLSRQAAKQQAILHFLISEPEGVKIPAAELCKKTDTSSATIKTLIQ | 239 |
| Query: | 231 | EGIIEVIEKEASRSDNYFKGILKTDFLDLNQEQAKVVKIVVDQIGKEQNKPFLLEGITGS | 290 |
| | | +G+++ +E R K KT+ L L EQ + + + + +++K FLL G+TGS | |
| Sbjct: | 240 | KGLLKESYEEVYRDPYQDKMFKKTEPLPLTDEQRAAFEPIRETLDSDEHKVFLLHGVTGS | 299 |
| Query: | 291 | GKTEVYLHIIDNVLKLGKTAIVLVPEISLTPQMTNRFISRFGKQVAIMHSGLSEGEKFDE | 350 |
| | | GKTE+YL I+ VL GK AIVLVPEISLTPQM NRF RFG QVA+MHSGLS GEK+DE | |
| Sbjct: | 300 | GKTEIYLQSIEKVLAKGKEAIVLVPEISLTPQMVNRFKGRFGSQVAVMHSGLSTGEKYDE | 359 |
| Query: | 351 | WRKIKSGQAKVVVGARSAIFAPLENIGAIIIDEEHESTYKQESNPRYHARDVALLRAEYY | 410 |
| | | WRKI + ++VVGARSAIFAP EN+G IIIDEEHES+YKQE PRYHA++VA+ RAE++ | |
| Sbjct: | 360 | WRKIHRKEVRLVVGARSAIFAPFENLGMIIIDEEHESSYKQEEMPRYHAKEVAIKRAEHH | 419 |
| Query: | 411 | KAVLLMGSATPSIESRARASRDVYKFLELKHRANPKARIPQVEIIDFRNFIGQQEVSNFT | 470 |
| | | +++GSATP++ES ARA + VY+ L LKHR N + +P+V ++D R + S F+ | |
| Sbjct: | 420 | SCPVVLGSATPTLESYARAQKGVYELLSLKHRVNHRV-MPEVSLVDMREELRNGNRSMFS | 478 |
| Query: | 471 | SYLLDKIRDRLDKKEQVVLMLNRRGYSSFIMCRDCGYVDQCPNCDISLTLHMATKTMNCH | 530 |
| | | L++K+ + + K EQ VL LN+RGYSSF+MCRDCGYV QCP+CDIS+T H + + CH | |
| Sbjct: | 479 | VELMEKLEETIAKGEQAVLFLNKRGYSSFVMCRDCGYVPQCPHCDISMTYHRYGQRLKCH | 538 |
| Query: | 531 | YCGFEKPIPRTCPNCNSKSISYYGTGTQKAYEELLKVIPDAKILRMDVDTTRQKGGHESI | 590 |
| | | YCG E+P+P TCP C S+ I ++GTGTQ+ EEL KV+P A+++RMDVDTT +KG HE + | |
| Sbjct: | 539 | YCGHEEPVPHTCPECASEHIRFFGTGTQRVEEELTKVLPSARVIRMDVDTTSRKGAHEKL | 598 |
| Query: | 591 | LKRFGNHEADILLGTQMIAKGLDFPNVTLVGVLNADTSLNLPDFRSSERTFQLLTQVAGR | 650 |
| | | L FG +ADILLGTQMIAKGLDFPNVTLVGVL+ADT+L++PDFRS+E+TFQLLTQV+GR | |
| Sbjct: | 599 | LSAFGEGKADILLGTQMIAKGLDFPNVTLVGVLSADTTLHIPDFRSAEKTFQLLTQVSGR | 658 |
| Query: | 651 | AGRAEKEGEVVIQTYNPNHYAIQLAQKQDFEAFYQYEMNIRRQLGYPPYYFTVGLTLSNK | 710 |
| | | AGR EK G V+IQTY P+HY+IQL + D+E FYQ+EM RR+ YPPYY+ +T+SH+ | |
| Sbjct: | 659 | AGRHEKPGHVIIQTYTPSHYSIQLTKTHDYETFYQHEMAHRREQSYPPYYYLALVTVSHE | 718 |
| Query: | 711 | DEEWLIRKSYEVLSLLKQGFSDKVKLLGPTPKPIARTHNLYHYQIIIKYRFEDNLELVLN | 770 |
| | | + + ++ LK K+LGP+ PIAR + Y YQ +IKY+ E L +L | |
| Sbjct: | 719 | EVAKAAVTAEKIAHFLKANCGADTKILGPSASPIARIKDRYRYQCVIKYKQETQLSALLK | 778 |
| Query: | 771 | RLLD-MTQDKENRDLRLAIDHEPQNMM | 796 |
| | | ++L+ ++ E + + ++ID P MM | |
| Sbjct: | 779 | KILEHYKREIEQKHVMISIDMNPYMMM | 805 |

[5491] A related DNA sequence was identified in S. pyogenes <SEQ ID 3009> which encodes the amino acid sequence <SEQ ID 3010>. Analysis of this protein sequence reveals the following:

Possible site: 32
>>> Seems to have no N-terminal signal sequence
----- Final Results -----
bacterial cytoplasm --- Certainty = 0.1396 (Affirmative) < succ>
bacterial membrane --- Certainty = 0.0000 (Not Clear) < succ>
bacterial outside --- Certainty = 0.0000 (Not Clear) < succ>

[5492] An alignment of the GAS and GBS proteins is shown below.

| Identities = 556/793 (70%), Positives = 659/793 (82%), Gaps = 1/793 (0%) | | | |
|---|---|---|---|
| Query: | 4 | KLAQVIVDIPLMQTDKPFSYAIPKDLEDLVQVGVRVHVPFGRGNRLLQGFVVGFRDDDEL | 63 |
| | | K+A VIVDIPLMQTDKPFSY IPK+L LVQ+G RVHVPFG+GNRLLQGF++GF +D | |
| Sbjct: | 12 | KVAHVIVDIPLMQTDKPFSYGIPKELVSLVQLGSRVHVPFGKGNRLLQGFIIGFGQEDSS | 71 |
| Query: | 64 | ETKDIAEVLDFEPVLNQEQLDLADQMRHTVFSYKISILKSMLPSLLNSQYDKLLLATDTL | 123 |
| | | K I VLD EPVLNQEQL LADQ+R TVFSYKI++LK+M+P+LLNS YDK+L L | |
| Sbjct: | 72 | SLKLIQTVLDPEPVLNQEQLTLADQLRKTVFSYKITLLKAMIPNLLNSNYDKVLRPESGL | 131 |
| Query: | 124 | PSEDREDLFGHKTEIVFSSLSSQDAKKAGRLIQKGFIEVQYLAKDKKTIKTEKIYKINRT | 183 |
| | | DR+ LF K +++S+L + K A + IQ G I V YLAKDKK +KTEK Y ++ | |
| Sbjct: | 132 | KKSDRDFLFEGKPSVLYSTLDREKEKIALKGIQAGHITVSYLAKDKKNLKTEKYYHVDLD | 191 |
| Query: | 184 | LLEKSQIAARAKKRLELKEFLLENPQPGRLTALNKQFSSPVVNFFREEGIIEVIEKEASR | 243 |
| | | L I++RAKKR LK++LL + + +L L + FS VV +F +I + E+ R | |
| Sbjct: | 192 | ALAVHPISSRAKKRQLLKDYLLTHTKEAKLATLYQAFSRDVVAYFVTNHLIRIDERPIDR | 251 |
| Query: | 244 | SDNYFKGILKTDFLDLNQEQAKVVKIVVDQIGKEQNKPFLLEGITGSGKTEVYLHIIDNV | 303 |
| | | S++YF I + FL LN++QA V +V+QIGK +KPFL+EGITGSGKTEVYLHII+ V | |
| Sbjct: | 252 | SESYFDQIKPSSFLTLNEQQASAVTEIVEQIGKP-SKPFLIEGITGSGKTEVYLHIIEAV | 310 |
| Query: | 304 | LKLGKTAIVLVPEISLTPQMTNRFISRFGKQVAIMHSGLSEGEKFDEWRKIKSGQAKVVV | 363 |
| | | LK KTAIVLVPEISLTPQMT+RFISRFGKQVAIMHSGLS+GEKFDEWRKIK+GQAKVVV | |
| Sbjct: | 311 | LKQDKTAIVLVPEISLTPQMTSRFISRFGKQVAIMHSGLSDGEKFDEWRKIKTGQAKVVV | 370 |
| Query: | 364 | GARSAIFAPLENIGAIIIDEEHESTYKQESNPRYHARDVALLRAEYYKAVLLMGSATPSI | 423 |
| | | GARSAIF+PLE IGAIIIDEEHESTYKQESNPRYHAR+VALLRA++++AV++MGSATPSI | |
| Sbjct: | 371 | GARSAIFSPLERIGAIIIDEEHESTYKQESNPRYHAREVALLRAKHHQAVVVMGSATPSI | 430 |
| Query: | 424 | ESRARASRDVYKFLELKHRANPKARIPQVEIIDFRNFIGQQEVSNFTSYLLDKIRDRLDK | 483 |
| | | ESRARAS+ VY F++L RANP A+IP+V I+DFR++IGQQ VSNFT YL+DKI++RL K | |
| Sbjct: | 431 | ESRARASKGVYHFIQLTQRANPLAKIPEVTIVDFRDYIGQQAVSNFTPYLIDKIKERLVK | 490 |
| Query: | 484 | KEQVVLMLNRRGYSSFIMCRDCGYVDQCPNCDISLTLHMATKTMNCHYCGFEKPIPRTCP | 543 |
| | | KEQVVLMLNRRGYSSF+MCRDCGYVD+CPNCDISLTLHM TKTMNCHYCGF+KPIP TCP | |
| Sbjct: | 491 | KEQVVLMLNRRGYSSFVMCRDCGYVDKCPNCDISLTLHMDTKTMNCHYCGFQKPIPITCP | 550 |
| Query: | 544 | NCNSKSISYYGTGTQKAYEELLKVIPDAKILRMDVDTTRQKGGHESILKRFGNHEADILL | 603 |
| | | C+S SI YYGTGTQKA++EL VIP+AKILRMDVDTTR+K H++IL FG EADILL | |
| Sbjct: | 551 | ECHSNSIRYYGTGTQKAFDELQGVIPEAKILRMDVDTTRKKRSHKTILDSFGRQEADILL | 610 |
| Query: | 604 | GTQMIAKGLDFPNVTLVGVLNADTSLNLPDFRSSERTFQLLTQVAGRAGRAEKEGEVVIQ | 663 |
| | | GTQMIAKGLDFPNVTLVGVLNADTSLNLPDFR+SE+TFQLLTQVAGRAGRA K GEV+IQ | |
| Sbjct: | 611 | GTQMIAKGLDFPNVTLVGVLNADTSLNLPDFRASEKTFQLLTQVAGRAGRAHKPGEVLIQ | 670 |
| Query: | 664 | TYNPNHYAIQLAQKQDFEAFYQYEMNIRRQLGYPPYYFTVGLTLSHKDEEWLIRKSYEVL | 723 |
| | | TYNP+HYAIQLA+KQDFEAFY+YEM+IR Q+ YPPYYFTVG+TLSH+ E +++K+Y+V | |
| Sbjct: | 671 | TYNPDHYAIQLAKKQDFEAFYRYEMSIRHQMAYPPYYFTVGITLSHRLEASVVKKAYQVT | 730 |
| Query: | 724 | SLLKQGFSDKVKLLGPTPKPIARTHNLYHYQIIIKYRFEDNLELVLNRLLDMTQDKENRD | 783 |
| | | LLK SD +K+LGPTPKPIARTHNLYHYQI++KYRFEDNLE LNR+LD +Q+ +NR | |
| Sbjct: | 731 | ELLKSHLSDNIKILGPTPKPIARTHNLYHYQILLKYRFEDNLEETLNRILDWSQEADNRH | 790 |
| Query: | 784 | LRLAIDHEPQNMM | 796 |
| | | L+L ID EPQ + | |
| Sbjct: | 791 | LKLIIDCEPQQFL | 803 |

[5493] Based on this analysis, it was predicted that these proteins and their epitopes could be useful antigens for vaccines or diagnostics.

### EXAMPLE 984

[5494] A DNA sequence (GBSx1044) was identified in S. agalactiae <SEQ ID 3011> which encodes the amino acid sequence <SEQ ID 3012>. This protein is predicted to be methionyl-tRNA formyltransferase (fmt). Analysis of this protein sequence reveals the following:

Possible site: 13
>>> Seems to have no N-terminal signal sequence
----- Final Results -----
bacterial cytoplasm --- Certainty = 0.1329 (Affirmative) < succ>
bacterial membrane --- Certainty = 0.0000 (Not Clear) < succ>
bacterial outside --- Certainty = 0.0000 (Not Clear) < succ>

[5495] The protein has homology with the following sequences in the GENPEPT database.

| >GP: CAB13446 GB: Z99112 methionyl-tRNA formyltransferase | | | |
|---|---|---|---|
| [Bacillus subtilis] | | | |
| Identities = 155/314 (49%), Positives = 221/314 (70%), Gaps = 7/314 (2%) | | | |
| Query: | 1 | MTKLLFMGTPDFSATVLKGILADGKYDVLAVVTQPDRAVGRKKEIKMTPVKEVALENNIP | 60 |
| | | MT+++FMGTPDFS VL+ ++ DG Y+V+ VVTQPDR GRKK + PVKE AL + IP | |
| Sbjct: | 1 | MTRIVFMGTPDFSVPVLRTLIEDG-YEVVGVVTQPDRPKGRKKVLTPPPVKEEALRHGIP | 59 |
| Query: | 61 | VYQPEKLSGSPELEQLMTLGADGIVTAAFGQFLPTKLLESVGFA-INVHASLLPKYRGGA | 119 |
| | | V QPEK+ + E+E+++ L D IVTAAFGQ LP +LL+S + INVHASLLP+ RGGA | |
| Sbjct: | 60 | VLQPEKVRLTEEIEKVLALKPDLIVTAAFGQILPKELLDSPKYGCINVHASLLPELRGGA | 119 |
| Query: | 120 | PIHYAIINGEKEAGVTIMEMVAKMDAGDMVSKASVEITDEDNVGTMFDRLAVVGRDLLLD | 179 |
| | | PIHY+I+ G+K+ G+TIM MV K+DAGDM+SK V+I + DNVGT+ D+L+V G LL + | |
| Sbjct: | 120 | PIHYSILQGKKKTGITIMYMVEKLDAGDMISKVEVDIEETDNVGTLHDKLSVAGAKLLSE | 179 |
| Query: | 180 | TLPGYLSGDIKPIPQNEEEVSFSPNISPDEERIDWNKSSRDIFNHVRGMYPWPVAHTLLE | 239 |
| | | T+P ++G I P Q+EE+ +++PNI ++E +DW+++ +++N +RG+ PWPVA+T L | |
| Sbjct: | 180 | TVPNVIAGSISPEKQDEEKATYAPNIKREQELLDWSRTGEELYNQIRGLNPWPVAYTTLN | 239 |
| Query: | 240 | GNRFKLY--EVTMSEGKGSPGQVIAKTKNSLTVATG-DGAIELKSVQPAGKPRMDIKDFL | 296 |
| | | G K++ + + PG V+A K + VATG + A+ L +QPAGK RM +DF+ | |
| Sbjct: | 240 | GQNLKIWASKKIAAPTTAEPGTVVAVEKEGIIVATGNETALLLTELQPAGKKRMKGEDFV | 299 |
| Query: | 297 | NGVGRNLEIGDKFG | 310 |
| | | G ++E GD G | |
| Sbjct: | 300 | RGA--HVEAGDVLG | 311 |

[5496] A related DNA sequence was identified in S. pyogenes <SEQ ID 3013> which encodes the amino acid sequence <SEQ ID 3014>. Analysis of this protein sequence reveals the following:

```
Possible site: 15
>>> Seems to have no N-terminal signal sequence
----- Final Results -----
                            bacterial cytoplasm --- Certainty = 0.0730(Affirmative) < succ>
                              bacterial membrane --- Certainty = 0.0000(Not Clear) < succ>
                                bacterial outside --- Certainty = 0.0000(Not Clear) < succ>
```

[5497] An alignment of the GAS and GBS proteins is shown below.

| Identities = 217/310 (70%), Positives = 266/310 (85%) | | | |
|---|---|---|---|
| Query: | 1 | MTKLLFMGTPDFSATVLKGILADGKYDVLAVVTQPDRAVGRKKEIKMTPVKEVALENNIP | 60 |
| | | M KLLFMGTP FSATVLKG+L + Y++L VVTQPDRAVGRKK+IK+TPVK++ALE+ I | |
| Sbjct: | 1 | MIKLLFMGTPQFSATVLKGLLDNPAYEILGVVTQPDRAVGRKKDIKVTPVKQLALEHGIS | 60 |
| Query: | 61 | VYQPEKLSGSPELEQLMTLGADGIVTAAFGQFLPTKLLESVGFAINVHASLLPKYRGGAP | 120 |
| | | +YQPEKLSGS EL ++M LGADGI+TAAFGQFLPT LL+SV FAINVHASLLPKYRGGAP | |
| Sbjct: | 61 | IYQPEKLSGSQELIEIMGLGADGIITAAFGQFLPTILLDSVSFAINVHASLLPKYRGGAP | 120 |
| Query: | 121 | IHYAIINGEKEAGVTIMEMVAKMDAGDMVSKASVEITDEDNVGTMFDRLAVVGRDLLLDT | 180 |
| | | IHYAI+NG+KEAGVTIMEM+ +MDAGDMV+KAS I + DNVGT+F++LA++GRDLLLD+ | |
| Sbjct: | 121 | IHYAIMNGDKEAGVTIMEMIKEMDAGDMVAKASTPILETDNVGTLFEKLAIIGRDLLLDS | 180 |
| Query: | 181 | LPGYLSGDIKPIPQNEEEVSFSPNISPDEERIDWNKSSRDIFNHVRGMYPWPVAHTLLEG | 240 |
| | | LP YLSG++KPIPQ+ + +FSPNISP+ E++DW S++++FNH+RGM PWPVAHT LEG | |
| Sbjct: | 181 | LPAYLSGELKPIPQDHSQATFSPNISPEHEKLDWTMSNQEVFNHIRGMNPWPVAHTFLEG | 240 |
| Query: | 241 | NRFKLYEVTMSEGKGSPGQVIAKTKNSLTVATGDGAIELKSVQPAGKPRMDIKDFLNGVG | 300 |
| | | R K+YE ++EG+G PGQV+ KTK SL +ATG GA+ L VQPAGKP+M I DFLNG+G | |
| Sbjct: | 241 | QRLKIYEAQLAEGEGLPGQVVVKTKKSLVIATGQGALSLIVVQPAGKPKMSIIDFLNGIG | 300 |
| Query: | 301 | RNLEIGDKFG | 310 |
| | | R LE+GD G | |
| Sbjct: | 301 | RKLEVGDIIG | 310 |

[5498] Based on this analysis, it was predicted that these proteins and their epitopes could be useful antigens for vaccines or diagnostics.

### EXAMPLE 985

[5499] A DNA sequence (GBSx1045) was identified in S. agalactiae <SEQ ID 3015> which encodes the amino acid sequence <SEQ ID 3016>. This protein is predicted to be sunL protein (sun). Analysis of this protein sequence reveals the following:

```
Possible site: 59
>>> Seems to have no N-terminal signal sequence
----- Final Results -----
                            bacterial cytoplasm --- Certainty = 0.1677(Affirmative) < succ>
                              bacterial membrane --- Certainty = 0.0000(Not Clear) < succ>
                                bacterial outside --- Certainty = 0.0000(Not Clear) < succ>
```

[5500] The protein has homology with the following sequences in the GENPEPT database.

| >GP: CAA10711 GB: AJ132604 sunL protein [Lactococcus lactis] | | | |
|---|---|---|---|
| Identities = 222/434 (51%), Positives = 305/434 (70%), Gaps = 15/434 (3%) | | | |
| Query: | 7 | KSARGLALMTLEEVFDKGAYSNIALNKSLKKSRLSDKDRALVTEIVYGTVARKITLEWYL | 66 |
| | | K+AR AL L ++F AY+NI+L+++L+ S LS D+ VT +VYG V++K LEWY+ | |
| Sbjct: | 3 | KNARQTALDVLNDIFGNDAYANISLDRNLRDSELSTVDKGFVTALVYGVVSKKALLEWYI | 62 |
| Query: | 67 | SHFIVDRDKLELWVYHLLLLSLYQLLYLDNIPDHAIVNDAVTIAKNRGNKKGAEKLINAV | 126 |
| | | + + K W LLLL++YQ+L++D +P A V++AV IAK R + + INAV | |
| Sbjct: | 63 | TPLLKKEPKP--WAKMLLLLTIYQVLFMDKVPISAAVDEAVKIAK-RHDGQATANFINAV | 119 |
| Query: | 127 | LRR-VSSETLPEIASIKRQNKRYSVAYSMPVWLVKKLIDQYGETRALAIMESLFERNKAS | 185 |
| | | LR + SE E + K + YSMP L+ K++ Q+G R I+ESL + + S | |
| Sbjct: | 120 | LRNFMRSEHRNE------EPKDWETKYSMPKLLLDKMVRQFGGKRTGEILESLEKPSHVS | 173 |
| Query: | 186 | LRVTDLSQKQTIKETLNVRDSHIAETALVADSGNFASTSFFQDGLITIQDESSQLVAPTL | 245 |
| | | LR D + E R S + ETAL+ADSGNF+ T FQ G ITIQDE+SQLVAP L | |
| Sbjct: | 174 | LRKIDPTV-----EIAGTRPSLLTETALIADSGNFSITEEFQTGRITIQDETSQLVAPQL | 228 |
| Query: | 246 | KVSGNDQVLDACSAPGGKTSHIASYLTTGAVTALDLYDHKLELVMENAKRLGLSDKIKTK | 305 |
| | | ++ G ++VLDAC+APGGK++H+A YLTTG +TALDLY+HKL+L+ +NA+R ++DKI T+ | |
| Sbjct: | 229 | ELEGTEEVLDACAAPGGKSTHMAQYLTTGHITALDLYEHKLDLINQNAQRQHVADKITTQ | 288 |
| Query: | 306 | KLDASKAHEYFLEDTFDKILVDAPCSGIGLIRRKPDIKYNKANQDFEALQEIQLSILSSV | 365 |
| | | K DA+ +E F + FD+ILVDAPCSGIGLIRRKPDI+Y K + DF LQ+IQL IL+S | |
| Sbjct: | 289 | KADATMIYENFGPEKFDRILVDAPCSGIGLIRRKPDIRYRKESSDFIDLQKIQLEILNSA | 348 |
| Query: | 366 | CQTLRKGGIITYSTCTIFEEENFQVIEKFLENHPNFEQVELSHTQEDIVKRGCISISPEQ | 425 |
| | | ++L+K GI+ YSTCTIF+EENF V+ +FLENHPNFEQVE+S+ + +++K GC+ I+PE | |
| Sbjct: | 349 | SKSLKKSGIMVYSTCTIFDEENFDVVHEFLENHPNFEQVEISNEKPEVIKEGCLFITPEM | 408 |
| Query: | 426 | YHTDGFFIGQVKRI | 439 |
| | | YHTDGFFI + K+I | |
| Sbjct: | 409 | YHTDGFFIAKFKKI | 422 |

[5501] A related DNA sequence was identified in S. pyogenes <SEQ ID 3017> which encodes the amino acid sequence <SEQ ID 3018>. Analysis of this protein sequence reveals the following:

Possible site: 42
>>> Seems to have a cleavable N-term signal seq.
----- Final Results -----
bacterial outside --- Certainty = 0.3000 (Affirmative) < succ>
bacterial membrane --- Certainty = 0.0000 (Not Clear) < succ>
bacterial cytoplasm --- Certainty = 0.0000 (Not Clear) < succ>

[5502] The protein has homology with the following sequences in the databases:

| >GP: CAA10711 GB: AJ132604 sunL protein [Lactococcus lactis] | | | |
|---|---|---|---|
| Identities = 208/433 (48%), Positives = 287/433 (66%), Gaps = 13/433 (3%) | | | |
| Query: | 7 | KSTRGKALLVIEAIFDQGAYTNIALNQQLSNKALSAKDRALLTEIVYGTVSRKISLEWYL | 66 |
| | | K+ R AL V+ IF AY NI+L++ L + LS D+ +T +VYG VS+K LEWY+ | |
| Sbjct: | 3 | KNARQTALDVLNDIFGNDAYANISLDRNLRDSELSTVDKGFVTALVYGVVSKKALLEWYI | 62 |
| Query: | 67 | AHYVKDRDKLDKWVYYLLMLSLYQLTYLDKLPAHAIVNDAVGIAKNRGNKKGAEKFVNAI | 126 |
| | | +K K W LL+L++YQ+ ++DK+P A V++AV IAK R + + F+NA+ | |
| Sbjct: | 63 | TPLLKKEPK--PWAKMLLLLTIYQVLFMDKVPISAAVDEAVKIAK-RHDGQATANFINAV | 119 |
| Query: | 127 | LRQFTSHPLPDMETIKRRNKYYSVKYSLPVWLVKKLEDQFGSDRSVAIMESLFVRSKASI | 186 |
| | | LR F E K + KYS+P L+ K+ QFG R+ I+ESL S S+ | |
| Sbjct: | 120 | LRNFMRS-----EHRNEEPKDWETKYSMPKLLLDKMVRQFGGKRTGEILESLEKPSHVSL | 174 |
| Query: | 187 | RVTDPLKLEEVAEALDAERSLLSATGLTKASGHFAASDYFTNGDITIQDESSQLVAPTLN | 246 |
| | | R DP E SLL+ T L SG+F+ ++ F G ITIQDE+SQLVAP L | |
| Sbjct: | 175 | RKIDP-----TVEIAGTRPSLLTETALIADSGNFSITEEFQTGRITIQDETSQLVAPQLE | 229 |
| Query: | 247 | IDGDDIILDACSAPGGKTSHIASYLKTGKVIALDLYDHKLELVKENANRLGVADNIETRK | 306 |
| | | ++G + +LDAC+APGGK++H+A YL TG + ALDLY+HKL+L+ +NA R VAD I T+K | |
| Sbjct: | 230 | LEGTEEVLDACAAPGGKSTHMAQYLTTGHITALDLYEHKLDLINQNAQRQHVADKITTQK | 289 |
| Query: | 307 | LDAREVHRHFEKDSFDKILVDAPCSGIGLIRRKPDIKYNKESQGFNALQAIQLEILSSVC | 366 |
| | | DA ++ +F + FD+ILVDAPCSGIGLIRRKPDI+Y KES F LQ IQLEIL+S | |
| Sbjct: | 290 | ADATMIYENFGPEKFDRILVDAPCSGIGLIRRKPDIRYRKESSDFIDLQKIQLEILNSAS | 349 |
| Query: | 367 | QTLRKGGIITYSTCTIFDEENRQVIEAFLQSHPNFEQVKLNHTQADIVKDGYLIITPEQY | 426 |
| | | ++L+K GI+ YSTCTIFDEEN V+ FL++HPNFEQV++++ + +++K+G L ITPE Y | |
| Sbjct: | 350 | KSLKKSGIMVYSTCTIFDEENFDVVHEFLENHPNFEQVEISNEKPEVIKEGCLFITPEMY | 409 |
| Query: | 427 | QTDGFFIGQVRRV | 439 |
| | | TDGFFI + +++ | |
| Sbjct: | 410 | HTDGFFIAKFKKI | 422 |

[5503] An alignment of the GAS and GBS proteins is shown below.

| Identities = 305/440 (69%), Positives = 370/440 (83%) | | | |
|---|---|---|---|
| Query: | 1 | MANDWKKSARGLALMTLEEVFDKGAYSNIALNKSLKKSRLSDKDRALVTEIVYGTVARKI | 60 |
| | | +A++WKKS RG AL+ +E +FD+GAY+NIALN+ L LS KDRAL+TEIVYGTV+RKI | |
| Sbjct: | 1 | LADNWKKSTRGKALLVIEAIFDQGAYTNIALNQQLSNKALSAKDRALLTEIVYGTVSRKI | 60 |
| Query: | 61 | TLEWYLSHFIVDRDKLELWVYHLLLLSLYQLLYLDNIPDHAIVNDAVTIAKNRGNKKGAE | 120 |
| | | +LEWYL+H++ DRDKL+ WVY+LL+LSLYQL YLD +P HAIVNDAV IAKNRGNKKGAE | |
| Sbjct: | 61 | SLEWYLAHYVKDRDKLDKWVYYLLMLSLYQLTYLDKLPAHAIVNDAVGIAKNRGNKKGAE | 120 |
| Query: | 121 | KLINAVLRRVSSETLPEIASIKRQNKRYSVAYSMPVWLVKKLIDQYGETRALAIMESLFE | 180 |
| | | K +NA+LR+ +S LP++ +IKR+NK YSV YS+PVWLVKKL DQ+G R++AIMESLF | |
| Sbjct: | 121 | KFVNAILRQFTSHPLPDMETIKRRNKYYSVKYSLPVWLVKKLEDQFGSDRSVAIMESLFV | 180 |
| Query: | 181 | RNKASLRVTDLSQKQTIKETLNVRDSHIAETALVADSGNFASTSFFQDGLITIQDESSQL | 240 |
| | | R+KAS+RVTD + + + E L+ S ++ T L SG+FA++ +F +G ITIQDESSQL | |
| Sbjct: | 181 | RSKASIRVTDPLKLEEVAEALDAERSLLSATGLTKASGHFAASDYFTNGDITIQDESSQL | 240 |
| Query: | 241 | VAPTLKVSGNDQVLDACSAPGGKTSHIASYLTTGAVTALDLYDHKLELVMENAKRLGLSD | 300 |
| | | VAPTL + G+D +LDACSAPGGKTSHIASYL TG V ALDLYDHKLELV ENA RLG++D | |
| Sbjct: | 241 | VAPTLNIDGDDIILDACSAPGGKTSHIASYLKTGKVIALDLYDHKLELVKENANRLGVAD | 300 |
| Query: | 301 | KIKTKKLDASKAHEYFLEDTFDKILVDAPCSGIGLIRRKPDIKYNKANQDFEALQEIQLS | 360 |
| | | I+T+KLDA + H +F +D+FDKILVDAPCSGIGLIRRKPDIKYNK +Q F ALQ IQL | |
| Sbjct: | 301 | NIETRKLDAREVHRHFEKDSFDKILVDAPCSGIGLIRRKPDIKYNKESQGFNALQAIQLE | 360 |
| Query: | 361 | ILSSVCQTLRKGGIITYSTCTIFEEENFQVIEKFLENHPNFEQVELSHTQEDIVKRGCIS | 420 |
| | | ILSSVCQTLRKGGIITYSTCTIF+EEN QVIE FL++HPNFEQV+L+HTQ DIVK G + | |
| Sbjct: | 361 | ILSSVCQTLRKGGIITYSTCTIFDEENRQVIEAFLQSHPNFEQVKLNHTQADIVKDGYLI | 420 |
| Query: | 421 | ISPEQYHTDGFFIGQVKRIL | 440 |
| | | I+PEQY TDGFFIGQV+R+L | |
| Sbjct: | 421 | ITPEQYQTDGFFIGQVRRVL | 440 |

[5504] Based on this analysis, it was predicted that these proteins and their epitopes could be useful antigens for vaccines or diagnostics.

### EXAMPLE 986

[5505] A DNA sequence (GBSx1046) was identified in S. agalactiae <SEQ ID 3019> which encodes the amino acid sequence <SEQ ID 3020>. This protein is predicted to be pppL protein. Analysis of this protein sequence reveals the following:

Possible site: 45
>>> Seems to have no N-terminal signal sequence
----- Final Results -----
bacterial cytoplasm --- Certainty = 0.5796 (Affirmative) < succ>
bacterial membrane --- Certainty = 0.0000 (Not Clear) < succ>
bacterial outside --- Certainty = 0.0000 (Not Clear) < succ>

[5506] The protein has homology with the following sequences in the GENPEPT database.

| >GP: CAA10712 GB: AJ132604 pppL protein [Lactococcus lactis] | | | |
|---|---|---|---|
| Identities = 131/245 (53%), Positives = 177/245 (71%), Gaps = 4/245 (1%) | | | |
| Query: | 1 | MEISLLTDIGQRRSNNQDFINQFENKAGVPLIILADGMGGHRAGNIASEMTVTDLGSDWA | 60 |
| | | ME S+L+DIG +RS NQD++ + N+AG L +LADGMGGH+AGN+AS++TV DLG W+ | |
| Sbjct: | 1 | MEYSILSDIGSKRSTNQDYVGTYVNRAGYQLFLLADGMGGHKAGNVASKLTVEDLGKLWS | 60 |
| Query: | 61 | ETDF---SELSEIRDWMLVSIETENRKIYELGQSDDYKGMGTTIEAVAIVGDNIIFAHVG | 117 |
| | | ET F + + + W+ + EN I LG+ D+Y+GMGTT+EA+ I G+ I+ AHVG | |
| Sbjct: | 61 | ETFFDAGTPEATLEIWLRNQVRNENENIASLGKLDEYQGMGTTLEALVIKGNTIVSAHVG | 120 |
| Query: | 118 | DSRIGIVRQGEYHLLTSDHSLVNELVKAGQLTEEEAASHPQKNIITQSIGQANPVEPDLG | 177 |
| | | DSR ++R GE + +T+DHSLV ELV AGQ+TEEEA HP KNIIT+S+GQ N V+ D+ | |
| Sbjct: | 121 | DSRTYLMRDGELNKITTDHSLVQELVDAGQITEEEAEVHPNKNIITRSLGQTNEVQADIQ | 180 |
| Query: | 178 | VHLLEEGDYLVVNSDGLTNMLSNADIATVLTQEK-TLDDKNQDLITLANHRGGLDNITVA | 236 |
| | | L+ GD +++NSDGLTNM+S +I VL +E TLD+K++ LI LAN GGLDNITV | |
| Sbjct: | 181 | ALELQAGDIILMNSDGLTNMVSTTEIMEVLEREDLTLDNKSEALIRLANEHGGLDNITVV | 240 |
| Query: | 237 | LVYVE | 241 |
| | | L+ E | |
| Sbjct: | 241 | LIKFE | 245 |

[5507] A related DNA sequence was identified in S. pyogenes <SEQ ID 3021> which encodes the amino acid sequence <SEQ ID 3022>. Analysis of this protein sequence reveals the following:

```
Possible site: 43
>>> Seems to have no N-terminal signal sequence
----- Final Results -----
                            bacterial cytoplasm --- Certainty = 0.5301(Affirmative) < succ>
                              bacterial membrane --- Certainty = 0.0000(Not Clear) < succ>
                                bacterial outside --- Certainty = 0.0000(Not Clear) < succ>
```

[5508] An alignment of the GAS and GBS proteins is shown below.

| Identities = 180/245 (73%), Positives = 220/245 (89%) | | | |
|---|---|---|---|
| Query: | 1 | MEISLLTDIGQRRSNNQDFINQFENKAGVPLIILADGMGGHRAGNIASEMTVTDLGSDWA | 60 |
| | | M+ISL TDIGQ+RSNNQDFIN+F+NK G+ L+ILADGMGGHRAGNIASEMTVTDLG +W | |
| Sbjct: | 1 | MKISLKTDIGQKRSNNQDFINKFDNKKGITLVILADGMGGHRAGNIASEMTVTDLGREWV | 60 |
| Query: | 61 | ETDFSELSEIRDWMLVSIETENRKIYELGQSDDYKGMGTTIEAVAIVGDNIIFAHVGDSR | 120 |
| | | +TDF+ELS+IRDW+ +I++EN++IY+LGQS+D+KGMGTT+EAVA+V + I+AH+GDSR | |
| Sbjct: | 61 | KTDFTELSQIRDWLFETIQSENQRIYDLGQSEDFKGMGTTVEAVALVESSAIYAHIGDSR | 120 |
| Query: | 121 | IGIVRQGEYHLLTSDHSLVNELVKAGQLTEEEAASHPQKNIITQSIGQANPVEPDLGVHL | 180 |
| | | IG+V G Y LLTSDHSLVNELVKAGQ+TEEEAASHPQ+NIITQSIGQA+PVEPDLGV + | |
| Sbjct: | 121 | IGLVHDGHYTLLTSDHSLVNELVKAGQITEEEAASHPQRNIITQSIGQASPVEPDLGVRV | 180 |
| Query: | 181 | LEEGDYLVVNSDGLTNMLSNADIATVLTQEKTLDDKNQDLITLANHRGGLDNITVALVYV | 240 |
| | | LE GDYLV+NSDGLTNM+SN +I T+L + +LD+KNQ++I LAN RGGLDNIT+ALV+ | |
| Sbjct: | 181 | LEPGDYLVINSDGLTNMISNDEIVTILGSKVSLDEKNQEMIDLANLRGGLDNITIALVHN | 240 |
| Query: | 241 | ESEAV | 245 |
| | | ESE V | |
| Sbjct: | 241 | ESEDV | 245 |

[5509] Based on this analysis, it was predicted that these proteins and their epitopes could be useful antigens for vaccines or diagnostics.

### EXAMPLE 987

[5510] A DNA sequence (GBSx1047) was identified in S. agalactiae <SEQ ID 3023> which encodes the amino acid sequence <SEQ ID 3024>. Analysis of this protein sequence reveals the following:

| Possible site: 56 | | | | |
|---|---|---|---|---|
| >>> Seems to have no N-terminal signal sequence | | | | |
| | INTEGRAL | Likelihood = −10.03 | Transmembrane | 346-362 (340-372) |

```
----- Final Results -----
                              bacterial membrane --- Certainty = 0.5012(Affirmative) < succ>
                                bacterial outside --- Certainty = 0.0000(Not Clear) < succ>
                            bacterial cytoplasm --- Certainty = 0.0000(Not Clear) < succ>
```

[5511] A related GBS nucleic acid sequence <SEQ ID 9539> which encodes amino acid sequence <SEQ ID 9540> was also identified.

[5512] The protein has homology with the following sequences in the GENPEPT database.

| >GP: CAA10713 GB: AJ132604 hypothetical protein [Lactococcus lactis] | | | |
|---|---|---|---|
| Identities = 219/380 (57%), Positives = 284/380 (74%), Gaps = 8/380 (2%) | | | |
| Query: | 1 | MIQIGKLFAGRYRILKSIGRGGMADVYLARDLILDNEEVAIKVLRTNYQTDQIAVARFQR | 60 |
| | | MIQIGK+FA RYRI+K IGRGGMA+VY D L + +VAIKVLR+N++ D IA+ARFQR | |
| Sbjct: | 1 | MIQIGKIFADRYRIIKEIGRGGMANVYQGEDTFLGDRKVAIKVLRSNFENDDIAIARFQR | 60 |
| Query: | 61 | EARAMAELTHPNIVAIRDIGEEDGQQFLVMEYVDGFDLKKYIQDNAPLSNNEVVRIMNEV | 120 |
| | | EA AMAEL+HPNIV I D+GE + QQ++VME+VDG LK+YI NAPL+N+E + I+ E+ | |
| Sbjct: | 61 | EAFAMAELSHPNIVGISDVGEFESQQYIVMEFVDGMTLKQYINQNAPLANDEAIEIITEI | 120 |
| Query: | 121 | LSAMSLAHQKGIVHRDLKPQNILLTKKGTVKVTDFGIAVAFAETSLTQTNSMLGSVHYLS | 180 |
| | | LSAM +AH GI+HRDLKPQN+L++ GTVKVTDFGIA A +ETSLTQTN+M GSVHYLS | |
| Sbjct: | 121 | LSAMDMAHSHGIIHRDLKPQNVLSSSGTVKVTDFGIAKALSETSLTQTNTMFGSVHYLS | 180 |
| Query: | 181 | PEQARGSKATVQSDIYAMGIMLFEMLTGHIPYDGDSAVTIALQHFQKPLPSILAENKSVP | 240 |
| | | PEQARGS ATVQSDIYA+GI+LFE+LTG IP+DGDSAV IAL+HFQ+ +PSI+ N VP | |
| Sbjct: | 181 | PEQARGSNATVQSDIYAIGIILFELLTGQIPFDGDSAVAIALKHFQENIPSIINLNPEVP | 240 |
| Query: | 241 | QALENIVIKATAKKLTDRYKTTYEMGRDLSTALSSTRHREPKLVFN-DTESTKTLPKVTS | 299 |
| | | QALEN+VIKATAK + +RY EM D++T+ S R E KLVFN D + TK +P + | |
| Sbjct: | 241 | QALENVVIKATAKDINNRYADVEEMMTDVATSTSLDRRGEEKLVFNKDHDETKIMP--AN | 298 |
| Query: | 300 | TVSSLTTEQLLRNQKQAKTTEKITPDSASNDKTKSKKKASHRLLGTIMKLFFALCVVGII | 359 |
| | | ++ T+ L+ K+ EK +S++ + K+K K S + G I+ L L V+G | |
| Sbjct: | 299 | LINPYDTKPLI--DKKTDDQEKAQSESSTTENNKNKNKKSKK--GLIISLVVLLLVIGGG | 354 |
| Query: | 360 | VFAYKILVSPTTIRVPDVSN | 379 |
| | | FA+ + +PT ++VP+V+N | |
| Sbjct: | 355 | AFAWAV-STPTNVKVPNVTN | 373 |

[5513] A related DNA sequence was identified in S. pyogenes <SEQ ID 3025> which encodes the amino acid sequence <SEQ ID 3026>. Analysis of this protein sequence reveals the following:

| Possible site: 56 | | | | |
|---|---|---|---|---|
| >>> Seems to have no N-terminal signal sequence | | | | |
| | INTEGRAL | Likelihood = −8.60 | Transmembrane | 349-365 (340-370) |

```
----- Final Results -----
                              bacterial membrane --- Certainty = 0.4439(Affirmative) < succ>
                                bacterial outside --- Certainty = 0.0000(Not Clear) < succ>
                            bacterial cytoplasm --- Certainty = 0.0000(Not Clear) < succ>
```

[5514] The protein has homology with the following sequences in the databases:

| >GP: CAA10713 GB: AJ132604 hypothetical protein [Lactococcus lactis] | | | |
|---|---|---|---|
| Identities = 209/378 (55%), Positives = 273/378 (71%), Gaps = 8/378 (2%) | | | |
| Query: | 1 | MIQIGKLFAGRYRILKSIGRGGMADVYLANDLILDNEDVAIKVLRTNYQTDQVAVARFQR | 60 |
| | | MIQIGK+FA RYRI+K IGRGGMA+VY D L + VAIKVLR+N++ D +A+ARFQR | |
| Sbjct: | 1 | MIQIGKIFADRYRIIKEIGRGGMANVYQGEDTFLGDRKVAIKVLRSNFENDDIAIARFQR | 60 |
| Query: | 61 | EARAMAELNHPNIVAIRDIGEEDGQQFLVMEYVDGADLKRYIQNHAPLSNNEVVRIMEEV | 120 |
| | | EA AMAEL+HPNIV I D+GE + QQ++VME+VDG LK+YI +APL+N+E + I+ E+ | |
| Sbjct: | 61 | EAFAMAELSHPNIVGISDVGEFESQQYIVMEFVDGMTLKQYINQNAPLANDEAIEIITEI | 120 |
| Query: | 121 | LSAMTLAHQKGIVHRDLKPQNILLTKEGVVKVTDFGIAVAFAETSLTQTNSMLGSVHYLS | 180 |
| | | LSAM +AH GI+HRDLKPQN+L++ G VKVTDFGIA A +ETSLTQTN+M GSVHYLS | |
| Sbjct: | 121 | LSAMDMAHSHGIIHRDLKPQNVLVSSSGTVKVTDFGIAKALSETSLTQTNTMFGSVHYLS | 180 |
| Query: | 181 | PEQARGSKATIQSDIYAMGIMLFEMLTGHIPYDGDSAVTIALQHFQKPLPSIIEENHNVP | 240 |
| | | PEQARGS AT+QSDIYA+GI+LFE+LTG IP+DGDSAV IAL+HFQ+ +PSII N VP | |
| Sbjct: | 181 | PEQARGSNATVQSDIYAIGIILFELLTGQIPFDGDSAVAIALKHFQENIPSIINLNPEVP | 240 |
| Query: | 241 | QALENVVIRATAKKLSDRYGSTFEMSRDLMTALSYNRSRERKIIF-ENVESTKPLPKVAS | 299 |
| | | QALENVVI+ATAK +++RY EM D+ T+ S +R E K++F ++ + TK +P | |
| Sbjct: | 241 | QALENVVIKATAKDINNRYADVEEMMTDVATSTSLDRRGEEKLVFNKDHDETKIMPANLI | 300 |
| Query: | 300 | GPTASVKLSPPTPTVLTQESRLDQTNQTDALQPPTKKKKSGRFLGTLFKILFSFFIVGVA | 359 |
| | | P + L QE +++ T+ + KK K G + + +L ++G | |
| Sbjct: | 301 | NPYDTKPLIDKKTD--DQEKAQSESSTTENNKNKNKKSKKGLIISLVVLLL----VIGGG | 354 |
| Query: | 360 | LFTYLILTKPTSVKVPNV | 377 |
| | | F + + T PT+VKVPNV | |
| Sbjct: | 355 | AFAWAVST-PTNVKVPNV | 371 |

[5515] An alignment of the GAS and GBS proteins is shown below.

| Identities = 390/643 (60%), Positives = 480/643 (73%), Gaps = 29/643 (4%) | | | |
|---|---|---|---|
| Query: | 1 | MIQIGKLFAGRYRILKSIGRGGMADVYLARDLILDNEEVAIKVLRTNYQTDQIAVARFQR | 60 |
| | | MIQIGKLFAGRYRILKSIGRGGMADVYLA DLILDNE+VAIKVLRTNYQTDQ+AVARFQR | |
| Sbjct: | 1 | MIQIGKLFAGRYRILKSIGRGGMADVYLANDLILDNEDVAIKVLRTNYQTDQVAVARFQR | 60 |
| Query: | 61 | EARAMAELTHPNIVAIRDIGEEDGQQFLVMEYVDGFDLKKYIQDNAPLSNNEVVRIMNEV | 120 |
| | | EARAMAEL HPNIVAIRDIGEEDGQQFLVMEYVDG DLK+YIQ++APLSNNEVVRIM EV | |
| Sbjct: | 61 | EARAMAELNHPNIVAIRDIGEEDGQQFLVMEYVDGADLKRYIQNHAPLSNNEVVRIMEEV | 120 |
| Query: | 121 | LSAMSLAHQKGIVHRDLKPQNILLTKKGTVKVTDFGIAVAFAETSLTQTNSMLGSVHYLS | 180 |
| | | LSAM+LAHQKGIVHRDLKPQNILLTK+G VKVTDFGIAVAFAETSLTQTNSMLGSVHYLS | |
| Sbjct: | 121 | LSAMTLAHQKGIVHRDLKPQNILLTKEGVVKVTDFGIAVAFAETSLTQTNSMLGSVHYLS | 180 |
| Query: | 181 | PEQARGSKATVQSDIYAMGIMLFEMLTGHIPYDGDSAVTIALQHFQKPLPSILAENKSVP | 240 |
| | | PEQARGSKAT+QSDIYAMGIMLFEMLTGHIPYDGDSAVTIALQHFQKPLPSI+ EN +VP | |
| Sbjct: | 181 | PEQARGSKATIQSDIYAMGIMLFEMLTGHIPYDGDSAVTIALQHFQKPLPSIIEENHNVP | 240 |
| Query: | 241 | QALENIVIKATAKKLTDRYKTTYEMGRDLSTALSSTRHREPKLVFNDTESTKTLPKVTS- | 299 |
| | | QALEN+VI+ATAKKL+DRY +T+EM RDL TALS R RE K++F + ESTK LPKV S | |
| Sbjct: | 241 | QALENVVIRATAKKLSDRYGSTFEMSRDLMTALSYNRSRERKIIFENVESTKPLPKVASG | 300 |
| Query: | 300 | ----------TVSSLTTEQLLRNQKQAKTTEKITPDSASNDKTKSKKKASHRLLGTIMKL | 349 |
| | | T + LT E L Q T+ + P + KKK S R LGT+ K+ | |
| Sbjct: | 301 | PTASVKLSPPTPTVLTQESRL---DQTNQTDALQPPT--------KKKKSGRFLGTLFKI | 349 |
| Query: | 350 | FFALCVVGIIVFAYKILVSPTTIRVPDVSNKTVAQAKMTLENSGLKVGAIRNIESDSVSE | 409 |
| | | F+ +VG+ +F Y IL PT+++VP+V+ ++ AK L + GLKVG IR IESD+V+E | |
| Sbjct: | 350 | LFSFFIVGVALFTYLILTKPTSVKVPNVAGTSLKVAKQELYDVGLKVGKIRQIESDTVAE | 409 |
| Query: | 410 | GLVVKTDPAAGRSRREGAKVNLYIATPNKSFTLGNYKEHNYKDILKDL-QGKGVKKSLIK | 468 |
| | | G VV+TDP AG ++R+G+ + LY++ NK F + NYK +Y++ + L + GV KS IK | |
| Sbjct: | 410 | GNVVRTDPKAGTAKRQGSSITLYVSIGNKGFDMENYKGLDYQEANNSLIETYGVPKSKIK | 469 |
| Query: | 469 | VKRKINNDYTTGTILAQSLPEGTSFNPDGNKKLTLTVAVNDPMIMPDVTGMTVGEVIETL | 528 |
| | | ++R + N+Y T+++QS G FNP+G K+TL+VAV+D + MP VT + + + TL | |
| Sbjct: | 470 | IERIVTNEYPENTVISQSPSAGDKFNPNGKSKITLSVAVSDTITMPMVTEYSYADAVNTL | 529 |
| Query: | 529 | TDLGLDADNLVFYQMQNGV---YQTVVTPPSSSKIASQDPYYGGEVGLRRGDKVKLYLLG | 585 |
| | | T LG+DA + Y + + + P S + ++ Q PYYG + L ++ LYL | |
| Sbjct: | 530 | TALGIDASRIKAYVPSSSSATGFVPIHSPSSKAIVSGQSPYYGTSLSLSDKGEISLYLYP | 589 |
| Query: | 586 | SKTTNNSSSTPIDSSASSSTGTTTSDSVSSSTDASTSDSSSTS | 628 |
| | | +T ++SSS+ SS SSS ++ +DS + ++ S S +TS | |
| Sbjct: | 590 | EETHSSSSSS---SSTSSSNSSSINDSTAPGSNTELSPSETTS | 629 |

[5516] SEQ ID 3024 (GBS297) was expressed in E. coli as a His-fusion product. SDS-PAGE analysis of total cell extract is shown in FIG. 43 (lane 6; MW 75 kDa). It was also expressed in E. coli as a GST-fusion product. SDS-PAGE analysis of total cell extract is shown in FIG. 27 (lane 4; MW 100.2 kDa) and in FIG. 159 (lane 24; MW 100 kDa). GBS297-GST was purified as shown in FIG. 223, lane 3.

[5517] GBS297-His was purified as shown in FIG. 203, lane 8.

[5518] Based on this analysis; it was predicted that these proteins and their epitopes could be useful antigens for vaccines or diagnostics.

### EXAMPLE 988

[5519] A DNA sequence (GBSx1048) was identified in S. agalactiae <SEQ ID 3027> which encodes the amino acid sequence <SEQ ID 3028>. Analysis of this protein sequence reveals the following:

| Possible site: 16 | | | | |
|---|---|---|---|---|
| >>> Seems to have an uncleavable N-term signal seq | | | | |
| | INTEGRAL | Likelihood = −7.91 | Transmembrane | 60-76 (50-90) |
| | INTEGRAL | Likelihood = −7.43 | Transmembrane | 7-23 (3-25) |
| | INTEGRAL | Likelihood = −5.68 | Transmembrane | 27-43 (24-46) |

```
----- Final Results -----
                              bacterial membrane --- Certainty = 0.4163(Affirmative) < succ>
                                bacterial outside --- Certainty = 0.0000(Not Clear) < succ>
                            bacterial cytoplasm --- Certainty = 0.0000(Not Clear) < succ>
```

[5520] The protein has homology with the following sequences in the GENPEPT database.

| >GP: BAB03323 GB: AB035448 hypothetical protein [Staphylococcus | | | |
|---|---|---|---|
| aureus] | | | |
| Identities = 53/230 (23%), Positives = 104/230 (45%), Gaps = 14/230 (6%) | | | |
| Query: | 5 | QFFLLVEAVVLVMGLMKILSDDWTSFIFILAL--ILLALRF-YNNDSRHNFLLTTSLLLL | 61 |
| | | Q ++ A++++ I + F+ +L L +L+ + + Y + R LL+ | |
| Sbjct: | 9 | QMLIIFTALMIIANFYYIFFEK-IGFLLVLLLGCVLVYVGYLYFHKIRGLLAFWIGALLI | 67 |
| Query: | 62 | FLIFMLNPY-IIAAVVFAVLYVLINHFSQVKKKNRYALIQFKNHQLDVKTTRNQWLGTDQ | 120 |
| | | + N Y II VF +L ++ + K K A + +K +W G + | |
| Sbjct: | 68 | AFTLLSNKYTIIILFVFLLLLIVRYLIHKFKPKKVVATDEVMTSPSFIK---QKWFGEQR | 124 |
| Query: | 121 | HESDFYAFEDINIIRISGTDTIDLTNVIVSGQDNVIIIQKVFGDTKVLVPLDVAVKADIS | 180 |
| | | Y +ED+ I G IDLT ++N I+++ + G +V++P++ + ++ | |
| Sbjct: | 125 | TPVYVYKWEDVQIQHGIGDLHIDLTKAANIKENNTIVVRHILGKVQVILPVNYNINLHVA | 184 |
| Query: | 181 | SVYGSVQYFDFEEYDLRNESIKLSQ--EEEYYLLKRVKLVVNTIAGKVEV | 228 |
| | | + YGS Y + + Y + N +I + + + + Y V + V+T G VEV | |
| Sbjct: | 185 | AFYGST-YVNEKSYKVENNNIHIEEMMKPDNY---TVNIYVSTFIGDVEV | 230 |

[5521] A related DNA sequence was identified in S. pyogenes <SEQ ID 3029> which encodes the amino acid sequence <SEQ ID 3030>. Analysis of this protein sequence reveals the following:

| Possible site: 35 | | | | |
|---|---|---|---|---|
| >>> Seems to have no N-terminal signal sequence | | | | |
| | INTEGRAL | Likelihood = −9.92 | Transmembrane | 44-60 (36-64) |
| | INTEGRAL | Likelihood = −8.76 | Transmembrane | 69-85 (66-105) |
| | INTEGRAL | Likelihood = −8.70 | Transmembrane | 24-40 (20-42) |
| | INTEGRAL | Likelihood = −6.64 | Transmembrane | 88-104 (85-105) |

```
----- Final Results -----
                              bacterial membrane --- Certainty = 0.4970(Affirmative) < succ>
                                bacterial outside --- Certainty = 0.0000(Not Clear) < succ>
                            bacterial cytoplasm --- Certainty = 0.0000(Not Clear) < succ>
```

[5522] The protein has homology with the following sequences in the databases:

| >GP: BAB03323 GB: AB035448 hypothetical protein [Staphylococcus | | | |
|---|---|---|---|
| aureus] | | | |
| Identities = 41/187 (21%), Positives = 85/187 (44%), Gaps = 22/187 (11%) | | | |
| Query: | 47 | FILILVL--ILLALRF-YNQDSRNNFLLTVSLLFLFLIFMLNPYIIMAVLLGIVYIFINH | 103 |
| | | F+L+L+L +L+ + + Y R + L + + N Y I+ + + ++ + + | |
| Sbjct: | 33 | FLLVLLLGCVLVYVGYLYFHKIRGLLAFWIGALLIAFTLLSNKYTIIILFVFLLLLIV-- | 90 |
| Query: | 104 | FSQVKKKNRFALIRFKEEKIEVNNT--------KHQWIGTANYESDYYCFDDINIIRISG | 155 |
| | | R+ + +FK +K+ + K +W G Y ++D+ I G | |
| Sbjct: | 91 | --------RYLIHKFKPKKVVATDEVMTSPSFIKQKWFGEQRTPVYVYKWEDVQIQHGIG | 142 |
| Query: | 156 | NDTVDLTNVIVTGMDNIIVIRKIFGNTTILVPIDVTVTLDVSSIYGSVDFFRCQQYDLRN | 215 |
| | | + +DLT +N IV+R I G +++P++ + L V++ YGS + + Y + N | |
| Sbjct: | 143 | DLHIDLTKAANIKENNTIVVRHILGKVQVILPVNYNINLHVAAFYGST-YVNEKSYKVEN | 201 |
| Query: | 216 | ESIKFKE | 222 |
| | | +I +E | |
| Sbjct: | 202 | NNIHIEE | 208 |

[5523] An alignment of the GAS and GBS proteins is shown below.

| Identities = 137/211 (64%), Positives = 175/211 (82%) | | | |
|---|---|---|---|
| Query: | 1 | MKKFQFFLLVEAVVLVMGLMKILSDDWTSFIFILALILLALRFYNNDSRHNFLLTTSLLL | 60 |
| | | MKKFQFFLL+E ++L MG+M IL +D +SFI IL LILLALRFYN DSR+NFLLT SLL | |
| Sbjct: | 18 | MKKFQFFLLIECILLAMGIMTILDNDLSSFILILVLILLALRFYNQDSRNNFLLTVSLLF | 77 |
| Query: | 61 | LFLIFMLNPYIIAAVVFAVLYVLINHFSQVKKKNRYALIQFKNHQLDVKTTRNQWLGTDQ | 120 |
| | | LFLIFMLNPYII AV+ ++Y+ INHFSQVKKKNR+ALI+FK +++V T++QW+GT | |
| Sbjct: | 78 | LFLIFMLNPYIIMAVLLGIVYIFINHFSQVKKKNRFALIRFKEEKIEVNNTKHQWIGTAN | 137 |
| Query: | 121 | HESDFYAFEDINIIRISGTDTIDLTNVIVSGQDNVIIIQKVFGDTKVLVPLDVAVKADIS | 180 |
| | | +ESD+Y F+DINIIRISG DT+DLTNVIV+G DN+I+I+K+FG+T +LVP+DV V D+S | |
| Sbjct: | 138 | YESDYYCFDDINIIRISGNDTVDLTNVIVTGMDNIIVIRKIFGNTTILVPIDVTVTLDVS | 197 |
| Query: | 181 | SVYGSVQYFDFEEYDLRNESIKLSQEEEYYL | 211 |
| | | S+YGSV +F ++YDLRNESIK + + L | |
| Sbjct: | 198 | SIYGSVDFFRCQQYDLRNESIKFKETDNQSL | 228 |

[5524] SEQ ID 3028 (GBS66) was expressed in E. coli as a His-fusion product. SDS-PAGE analysis of total cell extract is shown in FIG. 6 (lane 4; MW 25 kDa) and in FIG. 7 (lane 2; MW 24.7 kDa).

[5525] Based on this analysis, it was predicted that these proteins and their epitopes could be useful antigens for vaccines or diagnostics.

### EXAMPLE 989

[5526] A DNA sequence (GBSx1049) was identified in S. agalactiae <SEQ ID 3031> which encodes the amino acid sequence <SEQ ID 3032>. This protein is predicted to be histidine kinase (narQ). Analysis of this protein sequence reveals the following:

| Possible site: 19 | | | | |
|---|---|---|---|---|
| >>> Seems to have an uncleavable N-term signal seq | | | | |
| | INTEGRAL | Likelihood = −11.41 | Transmembrane | 47-63 (40-72) |
| | INTEGRAL | Likelihood = −9.98 | Transmembrane | 9-25 (5-36) |

```
----- Final Results -----
                              bacterial membrane --- Certainty = 0.5564(Affirmative) < succ>
                                bacterial outside --- Certainty = 0.0000(Not Clear) < succ>
                            bacterial cytoplasm --- Certainty = 0.0000(Not Clear) < succ>
```

[5527] The protein has homology with the following sequences in the GENPEPT database.

| >GP: CAB54570 GB: AJ006393 histidine kinase [Streptococcus pneumoniae] | | | |
|---|---|---|---|
| Identities = 159/334 (47%), Positives = 239/334 (70%), Gaps = 5/334 (1%) | | | |
| Query: | 1 | MKKHHYFLAFFYGSVIIFAICFVIIDSLGVNL-VHLYQTSRLWLIEQLIFSIFFLSLAVT | 59 |
| | | MKK Y + + +F +++ L + + L+ + E+ +F + S+++T | |
| Sbjct: | 1 | MKKQAYVIIALTSFLFVFFFSHSLLEILDFDWSIFLHDVEKT---EKFVFLLLVFSMSMT | 57 |
| Query: | 60 | ILLLLTWFLLDDNSKRQINHNLRRILNNQSINVTDDGTEISTNIQRLSKKMNLMTASLQS | 119 |
| | | LL L W +++ S R++ NL+R+L Q + D ++ + + LS K+NL+T +LQ | |
| Sbjct: | 58 | CLLALFWRGIEELSLRKMQANLKRLLAGQEVVQVAD-PDLDASFKSLSGKLNLLTEALQK | 116 |
| Query: | 120 | KENSRILKSQEIVKQERKRIARDLHDTVSQDLFAASMVLSGIAQNVSQLDVDQVGSQLLA | 179 |
| | | EN + + +EI+++ERKRIARDLHDTVSQ+LFAA M+LSGI+Q +LD +++ +QL + | |
| Sbjct: | 117 | AENQSLAQEEEIIEKERKRIARDLHDTVSQELFAAHMILSGISQQALKLDREKMQTQLQS | 176 |
| Query: | 180 | VEEMLQHAQNDLRILLLHLRPVELENKTLSEGFRMILKELTDKSDIEVVYHESILTLPKK | 239 |
| | | V +L+ AQ DLR+LLLHLRPVELE K+L EG +++LKEL DKSD+ V +++ LPKK | |
| Sbjct: | 177 | VTAILETAQKDLRVLLLHLRPVELEQKSLIEGIQILLKELEDKSDLRVSLKQNMTKLPKK | 236 |
| Query: | 240 | IEDNIFRIGQEFISNTLKHSQASRLEVYLNQTENELQLKMIDNGIGFDMDSVYDLSYGLK | 299 |
| | | IE++IFRI QE ISNTL+H+QAS L+VYL QT+ ELQLK++DNGIGF + S+ DLSYGL+ | |
| Sbjct: | 237 | IEEHIFRILQELISNTLRHAQASCLDVYLYQTDVELQLKVVDNGIGFQLGSLDDLSYGLR | 296 |
| Query: | 300 | NIEDRVEDLAGNLQLLSQPGKGVAMDIRLPLVNQ | 333 |
| | | NI++RVED+AG +QLL+ P +G+A+DIR+PL+++ | |
| Sbjct: | 297 | NIKERVEDMAGTVQLLTAPKQGLAVDIRIPLLDK | 330 |

[5528] A related DNA sequence was identified in S. pyogenes <SEQ ID 2991> which encodes the amino acid sequence <SEQ ID 2992>. Analysis of this protein sequence reveals the following:

| Possible site: 18 | | | | |
|---|---|---|---|---|
| >>> Seems to have an uncleavable N-term signal seq | | | | |
| | INTEGRAL | Likelihood = −14.22 | Transmembrane | 49-65 (42-70) |
| | INTEGRAL | Likelihood = −6.58 | Transmembrane | 8-24 (5-33) |

```
----- Final Results -----
                              bacterial membrane --- Certainty = 0.6689(Affirmative) < succ>
                                bacterial outside --- Certainty = 0.0000(Not Clear) < succ>
                            bacterial cytoplasm --- Certainty = 0.0000(Not Clear) < succ>
```

[5529] An alignment of the GAS and GBS proteins is shown below.

| Identities = 218/337 (64%), Positives = 276/337 (81%), Gaps = 3/337 (0%) | | | |
|---|---|---|---|
| Query: | 1 | MKKHHYFLAFFYGSVIIFAICFVIIDSLGVNLVHLYQTSRLWLIEQLIFSIFFLSLAVTI | 60 |
| | | MKK +Y L + Y ++ I +I FV++D+LG+ +L + LW +E+L FSI L ++VT+ | |
| Sbjct: | 1 | MKKRYYALVWLYSTITILSIVFVVMDNLGITFNYL--RNHLWQVERLGFSILLLIVSVTL | 58 |
| Query: | 61 | LLLLTWFLLDDNSKRQINHNLRRILNNQSINVTDDGTEISTNIQRLSKKMNLMTASLQSK | 120 |
| | | LLLL W ++DDNSKR IN NL+ ILNN+ + + D+ +EI+TN+ RLSKKM+ +TA++Q K | |
| Sbjct: | 59 | LLLLLWIIMDDNSKRNINQNLKYILNNRRLYL-DETSEINTNLSRLSKKMSHLTANMQKK | 117 |
| Query: | 121 | ENSRILKSQEIVKQERKRIARDLHDTVSQDLFAASMVLSGIAQNVSQLDVDQVGSQLLAV | 180 |
| | | E++ IL SQE+VKQERKRIARDLHDTVSQ+LFA+S++LSGI+ ++ QLD Q+ +QL V | |
| Sbjct: | 118 | ESAYILDSQEVVKQERKRIARDLHDTVSQELFASSLILSGISMSLEQLDKTQLQTQLTTV | 177 |
| Query: | 181 | EEMLQHAQNDLRILLLHLRPVELENKTLSEGFRMILKELTDKSDIEVVYHESILTLPKKI | 240 |
| | | E MLQ+AQNDLRILLLHLRP EL N+TLSEG MILKELTDKSDIEV+Y E+I LPK + | |
| Sbjct: | 178 | EAMLQNAQNDLRILLLHLRPTELANRTLSEGLHMILKELTDKSDIEVIYKETIAQLPKTM | 237 |
| Query: | 241 | EDNIFRIGQEFISNTLKHSQASRLEVYLNQTENELQLKMIDNGIGFDMDSVYDLSYGLKN | 300 |
| | | EDN+FRI QEFISNTLRH++ASR+EVYLNQT ELQLKMID+G+GFDMD V DLSYGLKN | |
| Sbjct: | 238 | EDNLFRIAQEFISNTLKHAKASRIEVYLNQTSTELQLKMIDDGVGFDMDQVRDLSYGLKN | 297 |
| Query: | 301 | IEDRVEDLAGNLQLLSQPGKGVAMDIRLPLVNQSEDK | 337 |
| | | IEDRV DLAGNL L+SQ GKGV+MDIRLP+V +D+ | |
| Sbjct: | 298 | IEDRVNDLAGNLHLISQKGKGVSMDIRLPIVKGDDDE | 334 |

[5530] A related GBS gene <SEQ ID 8701> and protein <SEQ ID 8702> were also identified. Analysis of this protein sequence reveals the following:

| Lipop: Possible site: −1 Crend: 4 | | | |
|---|---|---|---|
| McG: Discrim Score: 14.69 | | | |
| GvH: Signal Score (−7.5): −4.31 | | | |
| Possible site: 19 | | | |
| >>> Seems to have an uncleavable N-term signal seq | | | |
| ALOM program | count: 2 | value: −11.41 | threshold: 0.0 |

| | | | |
|---|---|---|---|
| INTEGRAL | Likelihood = −11.41 | Transmembrane | 47-63 (40-72) |
| INTEGRAL | Likelihood = −9.98 | Transmembrane | 9-25 (5-36) |

| | | |
|---|---|---|
| PERIPHERAL | Likelihood = 3.61 | 146 |

modified ALOM score: 2.78
*** Reasoning Step: 3
----- Final Results -----
bacterial membrane --- Certainty = 0.5564 (Affirmative) < succ>
bacterial outside --- Certainty = 0.0000 (Not Clear) < succ>
bacterial cytoplasm --- Certainty = 0.0000 (Not Clear) < succ>

[5531] The protein has homology with the following sequences in the databases:

[chemical structure]

[5532] SEQ ID 8702 (GBS31) was expressed in E. coli as a GST-fusion product. SDS-PAGE analysis of total cell extract is shown in FIG. 15 (lane 8; MW 64 kDa). It was also expressed as GBS31d in E. coli as a GST-fusion product. SDS-PAGE analysis of total cell extract is shown in FIG. 151 (lane 8-10; MW 59 kDa) and in FIG. 187 (lane 8; MW 59 kDa). GBS31d was also expressed in E. coli as a His-fusion product. SDS-PAGE analysis of total cell extract is shown in FIG. 151 (lane 11-13; MW 34 kDa) and in FIG. 182 (lane 11; MW 34 kDa). Purified GBS31d-GST is shown in lane 3 of FIG. 237.

### EXAMPLE 990

[5533] A DNA sequence (GBSx1050) was identified in S. agalactiae <SEQ ID 3033> which encodes the amino acid sequence <SEQ ID 3034>. Analysis of this protein sequence reveals the following:

```
Possible site: 31
>>> Seems to have no N-terminal signal sequence
----- Final Results -----
                            bacterial cytoplasm --- Certainty = 0.2706(Affirmative) < succ>
                              bacterial membrane --- Certainty = 0.0000(Not Clear) < succ>
                                bacterial outside --- Certainty = 0.0000(Not Clear) < succ>
```

[5534] The protein has homology with the following sequences in the GENPEPT database.

| >GP: CAB54571 GB: AJ006393 response regulator [Streptococcus pneumoniae] | | | |
|---|---|---|---|
| Identities = 154/209 (73%), Positives = 184/209 (87%) | | | |
| Query: | 8 | IKIVLVDDHEMVRLGLKSFLNLQADVEVIGEASNGLEGIKKALELRPDVVVMDLVMPEMD | 67 |
| | | +KI+LVDDHEMVRLGLKS+ +LQ DVEV+GEASNG +GI ALELRPDV+VMD+VMPEM+ | |
| Sbjct: | 1 | MKILLVDDHEMVRLGLKSYFDLQDDVEVVGEASNGSQGIDLALELRPDVIVMDIVMPEMN | 60 |
| Query: | 68 | GVEATLALLKDWPEAAILVLTSYLDNEKIYPVIEAGAKGYMLKTSSAAEILNAIRKVSRG | 127 |
| | | G++ATLA+LK+WPEA IL++TSYLDNEKI PV++AGAKGYMLKTSSA E+L+A+ KV+ G | |
| Sbjct: | 61 | GIDATLAILKEWPEAKILIVTSYLDNEKIMPVLDAGAKGYMLKTSSADELLHAVSKVAAG | 120 |
| Query: | 128 | EQAIENEVDKKIKAHDKCPALHEGLTARERDILNLLAKGYDNQRIADELFISLKTVKTHV | 187 |
| | | E AIE EV KK++ H LHE LTARERD+L L+AKGY+NQRIAD+LFISLKTVKTHV | |
| Sbjct: | 121 | ELAIEQEVSKKVEYHRNHMELHEELTARERDVLQLIAKGYENQRIADDLFISLKTVKTHV | 180 |
| Query: | 188 | SNILGKLNVADRTQAVVYAFQHHLVPQDD | 216 |
| | | SNIL KL V+DRTQA VYAFQHHLV Q++ | |
| Sbjct: | 181 | SNILAKLEVSDRTQAAVYAFQHHLVGQEE | 209 |

[5535] A related DNA sequence was identified in S. pyogenes <SEQ ID 2995> which encodes the amino acid sequence <SEQ ID 2996>. Analysis of this protein sequence reveals the following:

```
Possible site: 29
>>> Seems to have no N-terminal signal sequence
----- Final Results -----
                            bacterial cytoplasm --- Certainty = 0.3094(Affirmative) < succ>
                              bacterial membrane --- Certainty = 0.0000(Not Clear) < succ>
                                bacterial outside --- Certainty = 0.0000(Not Clear) < succ>
```

[5536] An alignment of the GAS and GBS proteins is shown below.

| Identities = 175/212 (82%), Positives = 192/212 (90%) | | | |
|---|---|---|---|
| Query: | 5 | MDKIKIVLVDDHEMVRLGLKSFLNLQADVEVIGEASNGLEGIKKALELRPDVVVMDLVMP | 64 |
| | | M KIK++LVDDHEMVR+GLKSFLNLQAD++V+GEASNG EG+ AL L+PDV+VMDLVMP | |
| Sbjct: | 3 | MSKIKVILVDDHEMVRMGLKSFLNLQADIDVVGEASNGREGVDLALALKPDVLVMDLVMP | 62 |
| Query: | 65 | EMDGVEATLALLKDWPEAAILVLTSYLDNEKIYPVIEAGAKGYMLKTSSAAEILNAIRKV | 124 |
| | | E+ GVEATL +LK W EA +LVLTSYLDNEKIYPVI+AGAKGYMLKTSSAAEILNAIRKV | |
| Sbjct: | 63 | ELGGVEATLEVLKKWKEAKVLVLTSYLDNEKIYPVIDAGAKGYMLKTSSAAEILNAIRKV | 122 |
| Query: | 125 | SRGEQAIENEVDKKIKAHDKCPALHEGLTARERDILNLLAKGYDNQRIADELFISLKTVK | 184 |
| | | S+GE AIE EVDKKIKAHD+ P LHE LTARE DIL+LLAKGYDNQ IADELFISLKTVK | |
| Sbjct: | 123 | SKGELAIETEVDKKIKAHDQHPDLHEELTAREYDILHLLAKGYDNQTIADELFISLKTVK | 182 |
| Query: | 185 | THVSNILGKLNVADRTQAVVYAFQHHLVPQDD | 216 |
| | | THVSNIL KL V DRTQAVVYAF+HHLVPQDD | |
| Sbjct: | 183 | THVSNILAKLEVGDRTQAVVYAERHHLVPQDD | 214 |

[5537] Based on this analysis, it was predicted that these proteins and their epitopes could be useful antigens for vaccines or diagnostics.

### EXAMPLE 991

[5538] A DNA sequence (GBSx1051) was identified in S. agalactiae <SEQ ID 3035> which encodes the amino acid sequence <SEQ ID 3036>. Analysis of this protein sequence reveals the following:

```
Possible site: 59
>>> Seems to have no N-terminal signal sequence
----- Final Results -----
                            bacterial cytoplasm --- Certainty = 0.1688(Affirmative) < succ>
                              bacterial membrane --- Certainty = 0.0000(Not Clear) < succ>
                                bacterial outside --- Certainty = 0.0000(Not Clear) < succ>
```

[5539] The protein has homology with the following sequences in the GENPEPT database.

| >GP: CAB08166 GB: Z94864 putative peptidyl-prolyl cis-trans isomerase | | | |
|---|---|---|---|
| [Schizosaccharomyces pombe] | | | |
| Identities = 81/174 (46%), Positives = 109/174 (62%), | | | |
| Gaps = 30/174 (17%) | | | |
| Query: | 288 | IKTNHGDMTVKLFPDHAPKTVANFIGLAKQGYYDGIIFHRIIPDFMIQGGDPTGTGMGGE | 347 |
| | | ++T+ G + ++L+ +HAPKT NF LAK+GYYDG+IFHR+IPDF+IQGGDPTGTG GG | |
| Sbjct: | 6 | LQTSLGKILIELYTEHAPKTCQNFYTLAKEGYYDGVIFHRVIPDFVIQGGDPTGTGRGGT | 65 |
| Query: | 348 | SIYGESFEDEFSEELYNV-RGALSMANAGPNTNGSQFFIVQNTKIPYAKKELERGGWPTP | 406 |
| | | SIYG+ F+DE +L++ G LSMANAGPNTN SQFFI T P | |
| Sbjct: | 66 | SIYGDKFDDEIHSDLHHTGAGILSMANAGPNTNSSQFFI---TLAP-------------- | 108 |
| Query: | 407 | IAELYAGQGGTPHLDRRHSVFGQLVDQSSFEVLDEIAAVETGSQDKPLEDVVIL | 460 |
| | | TP LD +H++FG++V S V + + T S D+P+E + I+ | |
| Sbjct: | 109 | ----------TPWLDGKHTIFGRVV--SGLSVCKRMGLIRTDSSDRPIEPLKII | 150 |

[5540] A related DNA sequence was identified in S. pyogenes <SEQ ID 3037> which encodes the amino acid sequence <SEQ ID 3038>. Analysis of this protein sequence reveals the following:

```
Possible site: 59
>>> Seems to have no N-terminal signal sequence
----- Final Results -----
                            bacterial cytoplasm --- Certainty = 0.2175(Affirmative) < succ>
                              bacterial membrane --- Certainty = 0.0000(Not Clear) < succ>
                                bacterial outside --- Certainty = 0.0000(Not Clear) < succ>
```

[5541] An alignment of the GAS and GBS proteins is shown below.

| Identities = 381/464 (82%), Positives = 422/464 (90%) | | | |
|---|---|---|---|
| Query: | 1 | MDAKTKYKAKKIKAVFFDIDDTLRVKDTGYMPPSILKVFKALKDKGIVVGIASGRARYGV | 60 |
| | | MDAK KYKAKKIK VFFDIDDTLRVKDTGYMP SI +VFKALI KGI+VGIASGRARYGV | |
| Sbjct: | 5 | MDAKLKYKAKKIKMVFFDIDDTLRVKDTGYMPESIQRVFKALKAKGILVGIASGRARYGV | 64 |
| Query: | 61 | PKEVQDLNADYCVKLNGAYVKDKDKNIIFHRPIPAEYVEQYKKWADTVGIKYGLAGRHEA | 120 |
| | | P+EVQDL+ADYCVKLNGAYVKD K IIF PIPA+ V YKKWAD +GI YG+AGRHEA | |
| Sbjct: | 65 | PQEVQDLHADYCVKLNGAYVKDDAKTIIFQAPIPADVVVAYKKWADDMGIFYGMAGRHEA | 124 |
| Query: | 121 | VLSDRDDLVNDAIDIVYSDLEVNPDFNKEHDIYQMWTFEDKGDSLHLPEPLAEHLRLIRW | 180 |
| | | VLS R+D++++AID VY+ LEV PD+N+ HD+YQMWTFEDKGD L LP LAEHLRL+RW | |
| Sbjct: | 125 | VLSARNDMISNAIDNVYAQLEVCPDYNEYHDVYQMWTFEDKGDGLQLPAELAEHLRLVRW | 184 |
| Query: | 181 | HDHSSDVVLKGTSKALGVSKVVEHLGLKPENILVFGDELNDLELFDYAGLAVAMGVSHPE | 240 |
| | | HD+SSDVVLKGTSKALGVSKVV+HLGLKPENILVFGDELNDLELFDYAG+++AMGVSHP | |
| Sbjct: | 185 | HDNSSDVVLKGTSKALGVSKVVDHLGLKPENILVFGDELNDLELFDYAGISIAMGVSHPL | 244 |
| Query: | 241 | AQKKADFITKKVEEDGILYALEELGLIEKELTFPQVDIENTEGPVAVIKTNHGDMTVKLF | 300 |
| | | Q+KADFITKKVEEDGILYALEELGLI+KEL FPQ+D+ N +GP A IKTNHGDMT+ LF | |
| Sbjct: | 245 | LQEKADFITKKVEEDGILYALEELGLIDKELQFPQLDLPNHKGPKATIKTNHGDMTLVLF | 304 |
| Query: | 301 | PDHAPKTVANFIGLAKQGYYDGIIFHRIIPDFMIQGGDPTGTGMGGESIYGESFEDEFSE | 360 |
| | | PDHAPKTVANF+GLAK+GYYDGIIFHRIIP+FMIQGGDPTGTGM G+SIYGESFEDEFS+ | |
| Sbjct: | 305 | PDHAPKTVANFLGLAKEGYYDGIIFHRIIPEFMIQGGDPTGTGMCGQSIYGESFEDEFSD | 364 |
| Query: | 361 | ELYNVRGALSMANAGPNTNGSQFFIVQNTKIPYAKKELERGGWPTPIAELYAGQGGTPHL | 420 |
| | | ELYN+RGALSMANAGPNTNGSQFFIVQN+KIPYAKKELERGGWP PIA YA GGTPHL | |
| Sbjct: | 365 | ELYNLRGALSMANAGPNTNGSQFFIVQNSKIPYAKKELERGGWPAPIAASYAANGGTPHL | 424 |
| Query: | 421 | DRRHSVFGQLVDQSSFEVLDEIAAVETGSQDKPLEDVVILTIEV | 464 |
| | | DRRH+VFGQLVD++SF+VLD IA VETG+QDKP EDV+I TIEV | |
| Sbjct: | 425 | DRRHTVFGQLVDETSFQVLDLIAGVETGAQDKPKEDVIIETIEV | 468 |

[5542] Based on this analysis, it was predicted that these proteins and their epitopes could be useful antigens for vaccines or diagnostics.

### EXAMPLE 992

[5543] A DNA sequence (GBSx1052) was identified in S. agalactiae <SEQ ID 3039> which encodes the amino acid sequence <SEQ ID 3040>. This protein is predicted to be ribosomal protein S1 (rpsA). Analysis of this protein sequence reveals the following:

```
Possible site: 36
>>> Seems to have no N-terminal signal sequence
----- Final Results -----
                            bacterial cytoplasm --- Certainty = 0.3126(Affirmative) < succ>
                              bacterial membrane --- Certainty = 0.0000(Not Clear) < succ>
                                bacterial outside --- Certainty = 0.0000(Not Clear) < succ>
```

[5544] The protein has homology with the following sequences in the GENPEPT database.

| >GP: BAB07066 GB: AP001518 polyribonucleotide nucleotidyltransferase | | | |
|---|---|---|---|
| (general stress protein 13) [Bacillus halodurans] | | | |
| Identities = 46/120 (38%), Positives = 71/120 (58%), Gaps = 11/120 (9%) | | | |
| Query: | 8 | KIGDKLKGTVTGIRPYGAFVSLEDGRTGLIHISEIKTGYIDNIYDVLSVGDEVYVQVIDV | 67 |
| | | ++G ++G VTGI+P+GAFV+++D + GL+HISE+ G++ +I DVLSVGDEV V+++ V | |
| Sbjct: | 5 | EVGSIVEGKVTGIKPFGAFVAIDDQKQGLVHISEVAHGFVKDINDVLSVGDEVKVKILSV | 64 |
| Query: | 68 | DEFTQKASLSLRTLEEERHHIQH-----------RHRFSNNRLKIGFKPLEENLPSWVEE | 116 |
| | | DE + K SLS+R +E R GF LE+ L W+++ | |
| Sbjct: | 65 | DEESGKISLSIRATQEAPERPARAPKPRPAGGGGRKPQKGQSQGQGFNTLEDKLKEWLKQ | 124 |

[5545] A related DNA sequence was identified in S. pyogenes <SEQ ID 3041> which encodes the amino acid sequence <SEQ ID 3042>. Analysis of this protein sequence reveals the following:

Possible site: 58
>>> Seems to have no N-terminal signal sequence
----- Final Results -----
bacterial cytoplasm --- Certainty = 0.1832 (Affirmative) < succ>
bacterial membrane --- Certainty = 0.0000 (Not Clear) < succ>
bacterial outside --- Certainty = 0.0000 (Not Clear) < succ>

[5546] An alignment of the GAS and GBS proteins is shown below.

| Identities = 78/115 (67%), Positives = 100/115 (86%) | | | |
|---|---|---|---|
| Query: | 7 | MKIGDKLKGTVTGIRPYGAFVSLEDGRTGLIHISEIKTGYIDNIYDVLSVGDEVYVQVID | 66 |
| | | MKIGDKL GT+TGI+PYGAFV+LE+G TGLIHISEIKTG+ID+I +L++G++V VQVID | |
| Sbjct: | 1 | MKIGDKLHGTITGIKPYGAFVALENGTTGLIHISEIKTGFIDDIDQLLAIGNQVLVQVID | 60 |
| Query: | 67 | VDEFTQKASLSLRTLEEERHHIQHRHRFSNNRLKIGFKPLEENLPSWVEEGLAYL | 121 |
| | | +DE+++K SLS+RTL EE+ H HRHR+SN+R KIGF+PLEE LP W+EE L +L | |
| Sbjct: | 61 | IDEYSKKPSLSMRTLAEEKQHFFHRHRYSNSRHKIGFRPLEEQLPQWIEESLQFL | 115 |

[5547] Based on this analysis, it was predicted that these proteins and their epitopes could be useful antigens for vaccines or diagnostics.

### EXAMPLE 993

[5548] A DNA sequence (GBSx1053) was identified in S. agalactiae <SEQ ID 3043> which encodes the amino acid sequence <SEQ ID 3044>. This protein is predicted to be pyruvate formate-lyase 2 activating enzyme (pflA). Analysis of this protein sequence reveals the following:

```
Possible site: 41
>>> Seems to have no N-terminal signal sequence
----- Final Results -----
                            bacterial cytoplasm --- Certainty = 0.2889(Affirmative) < succ>
                              bacterial membrane --- Certainty = 0.0000(Not Clear) < succ>
                                bacterial outside --- Certainty = 0.0000(Not Clear) < succ>
```

[5549] The protein has homology with the following sequences in the GENPEPT database.

| >GP: AAC76934 GB: AE000469 probable pyruvate formate lyase activating | | | |
|---|---|---|---|
| enzyme 2 [Escherichia coli K12] | | | |
| Identities = 90/251 (35%), Positives = 142/251 (55%), Gaps = 16/251 (6%) | | | |
| Query: | 8 | VFNIQHFSIHDGPGIRTTVFLKGCPLRCPWCANPESQKMVPETMR--------------- | 52 |
| | | +FNIQ +S++DG GIRT VF KGCP CPWCANPES +T+R | |
| Sbjct: | 24 | IFNIQRYSLNDGEGIRTVVFFKGCPHLCPWCANPESISGKIQTVRREAKCLHCAKCLRDA | 83 |
| Query: | 53 | -DAITNESVIVGEEKSVDDIIEEVLKDIDFYEESGGGITLSGGEIFAQFEFAKAILKRAK | 111 |
| | | + + +G + S+D + EV+KD F+ SGGG+TLSGGE+ Q EFA L+R + | |
| Sbjct: | 84 | DECPSGAFERIGRDISLDALEREVMKDDIFFRTSGGGVTLSGGEVLMQAEFATRFLQRLR | 143 |
| Query: | 112 | SLGIHTAIETTAYTRHEQFIDLIQYVDFIYTDLKHYNSLKHQEKTMVKNASIIKNIHYAF | 171 |
| | | G+ AIET + + L + D + DLK ++ + ++ + +++N+ | |
| Sbjct: | 144 | LWGVSCAIETAGDAPASKLLPLAKLCDEVLFDLKIMDATQARDVVKMNLPRVLENLRLLV | 203 |
| Query: | 172 | ANGKTIVLRIPVIPNFNDSLEDAEEFACLFDRLDIRQVQLLPFHQFGQNKYQLLNRQYEM | 231 |
| | | + G ++ R+P+IP F S E+ ++ + L+IRQ+ LLPFHQ+G+ KY+LL + + M | |
| Sbjct: | 204 | SEGVNVIPRLPLIPGFTLSRENMQQALDVLIPLNIRQIHLLPFHQYGEPKYRLLGKTWSM | 263 |
| Query: | 232 | EEIAALHPEDL | 242 |
| | | +E+ A D+ | |
| Sbjct: | 264 | KEVPAPSSADV | 274 |

[5550] A related DNA sequence was identified in S. pyogenes <SEQ ID 3045> which encodes the amino acid sequence <SEQ ID 3046>. Analysis of this protein sequence reveals the following:

```
Possible site: 58
>>> Seems to have no N-terminal signal sequence
----- Final Results -----
                            bacterial cytoplasm --- Certainty = 0.2209(Affirmative) < succ>
                              bacterial membrane --- Certainty = 0.0000(Not Clear) < succ>
                                bacterial outside --- Certainty = 0.0000(Not Clear) < succ>
```

[5551] An alignment of the GAS and GBS proteins is shown below.

| Identities = 187/255 (73%), Positives = 220/255 (85%) | | | |
|---|---|---|---|
| Query: | 4 | EKGIVFNIQHFSIHDGPGIRTTVFLKGCPLRCPWCANPESQKMVPETMRDAITNESVIVG | 63 |
| | | ++GIVFNIQHFSIHDGPGIRTTVFLKGCPLRCPWCANPESQ+ PE M + + IVG | |
| Sbjct: | 3 | DRGIVFNIQHFSIHDGPGIRTTVFLKGCPLRCPWCANPESQQKAPEQMLTSDGLNTKIVG | 62 |
| Query: | 64 | EEKSVDDIIEEVLKDIDFYEESGGGITLSGGEIFAQFEFAKAILKRAKSLGIHTAIETTA | 123 |
| | | EEK+VD++IEEVLKD+DFYEESGGG+TLSGGEIFAQF+FA A+LK AK+ G+HTAIETTA | |
| Sbjct: | 63 | EEKTVDEVIEEVLKDLDFYEESGGGMTLSGGEIFAQFDFALALLKAAKAAGLHTAIETTA | 122 |
| Query: | 124 | YTRHEQFIDLIQYVDFIYTDLKHYNSLKHQEKTMVKNASIIKNIHYAFANGKTIVLRIPV | 183 |
| | | + +HEQF+ L+ YVDFIYTDLKHYN L+HQ+ T V+N IIKNIHYAF GK IVLRIPV | |
| Sbjct: | 123 | FAKHEQFVTLVDYVDFIYTDLKHYNQLRHQKVTGVRNDLIIKNIHYAFQAGKEIVLRIPV | 182 |
| Query: | 184 | IPNFNDSLEDAEEFACLFDRLDIRQVQLLPFHQFGQNKYQLLNRQYEMEEIAALHPEDLL | 243 |
| | | IP FNDSL+DA+ F+ LF++L+I QVQLLPFHQFG+NKY+LL R+YEM E+ A HPEDL | |
| Sbjct: | 183 | IPQFNDSLDDAKAFSELFNQLEIDQVQLLPFHQFGENKYKLLGREYEMAEVKAYHPEDLA | 242 |
| Query: | 244 | DYQAIFSKYNIHCYF | 258 |
| | | DYQA+F +NIHCYF | |
| Sbjct: | 243 | DYQAVFLNHNIHCYF | 257 |

[5552] Based on this analysis, it was predicted that these proteins and their epitopes could be useful antigens for vaccines or diagnostics.

### EXAMPLE 994

[5553] A DNA sequence (GBSx1054) was identified in S. agalactiae <SEQ ID 3047> which encodes the amino acid sequence <SEQ ID 3048>. Analysis of this protein sequence reveals the following:

Possible site: 57
>>> Seems to have no N-terminal signal sequence
----- Final Results -----
bacterial cytoplasm --- Certainty = 0.1762 (Affirmative) < succ>
bacterial membrane --- Certainty = 0.0000 (Not Clear) < succ>
bacterial outside --- Certainty = 0.0000 (Not Clear) < succ>

[5554] A related GBS nucleic acid sequence <SEQ ID 9299> which encodes amino acid sequence <SEQ ID 9300> was also identified.

[5555] The protein has homology with the following sequences in the GENPEPT database.

| >GP: AAC74366 GB: AE000226 putative DEOR-type transcriptional | | | |
|---|---|---|---|
| regulator [Escherichia coli K12] | | | |
| Identities = 74/177 (41%), Positives = 113/177 (63%), Gaps = 1/177 (0%) | | | |
| Query: | 2 | NRLENIISLVSQYQKIDVNTLSELLQVSKVTIRKDLDKLEGKGLLHREHGYAVLNSGDDL | 61 |
| | | +R + I+ +V ++ V L++ VS+VTIR+DL+ LE L R HG+AV DD+ | |
| Sbjct: | 3 | SRQQTILQMVIDQGQVSVTDLAKATGVSEVTIRQDLNTLEKLSYLRRAHGFAVSLDSDDV | 62 |
| Query: | 62 | NVRLSFNHKTKKEIAALAANMVSDNDTILIESGSTCALLAENICQTKRNVTILTNSCFIA | 121 |
| | | R+ N+ K+E+A AA++V +TI IE+GS+ ALLA + + K+NVTI+T S +IA | |
| Sbjct: | 63 | ETRMMSNYTLKRELAEFAASLVQPGETIFIENGSSNALLARTLGEQKKNVTIITVSSYIA | 122 |
| Query: | 122 | NYLREYDSCQIVLLGGEYQSSSQVTVGPLLKKMISLFHVSLAFVGTDGFDPKTRIYG | 178 |
| | | + L++ C+++LLGG YQ S+ VGPL ++ I H S AF+G DG+ P+T G | |
| Sbjct: | 123 | HLLKD-APCEVILLGGVYQKKSESMVGPLTRQCIQQVHFSKAFIGIDGWQPETGFTG | 178 |

[5556] A related DNA sequence was identified in S. pyogenes <SEQ ID 3049> which encodes the amino acid sequence <SEQ ID 3050>. Analysis of this protein sequence reveals the following:

Possible site: 58
>>> Seems to have no N-terminal signal sequence
----- Final Results -----
bacterial cytoplasm --- Certainty = 0.2888 (Affirmative) < succ>
bacterial membrane --- Certainty = 0.0000 (Not Clear) < succ>
bacterial outside --- Certainty = 0.0000 (Not Clear) < succ>

[5557] An alignment of the GAS and GBS proteins is shown below.

| Identities = 131/171 (76%), Positives = 150/171 (87%) | | | |
|---|---|---|---|
| Query: | 1 | MNRLENIISLVSQYQKIDVNTLSELLQVSKVTIRKDLDKLEGKGLLHREHGYAVLNSGDD | 60 |
| | | MNRLE II LVSQ +KIDVN+LSE L VSKVTIRKDLDKLE KGLL REHGYAVLNSGDD | |
| Sbjct: | 2 | MNRLERIIQLVSQKKKIDVNSLSEQLDVSKVTIRKDLDKLESKGLLRREHGYAVLNSGDD | 61 |
| Query: | 61 | LNVRLSFNHKTKKEIAALAANMVSDNDTILIESGSTCALLAENICQTKRNVTILTNSCFI | 120 |
| | | LNVRLS+N+ K+ IA AA +V DNDTI+IESGSTCALLAE +CQTKRN+ ++TNSCFI | |
| Sbjct: | 62 | LNVRLSYNYNIKRRIAEKAAELVQDNDTIMIESGSTCALLAEVLCQTKRNIKVITNSCFI | 121 |
| Query: | 121 | ANYLREYDSCQIVLLGGEYQSSSQVTVGPLLKKMISLFHVSLAFVGTDGFD | 171 |
| | | ANY+R+Y SCQI+LLGG YQ +S+VTVGPLLK+MISLFHV+ FVGTDGF+ | |
| Sbjct: | 122 | ANYIRQYSSCQIILLGGYYQPNSEVTVGPLLKEMISLFHVNRVFVGTDGFN | 172 |

[5558] Based on this analysis, it was predicted that these proteins and their epitopes could be useful antigens for vaccines or diagnostics.

### EXAMPLE 995

[5559] A DNA sequence (GBSx1055) was identified in S. agalactiae <SEQ ID 3051> which encodes the amino acid sequence <SEQ ID 3052>. Analysis of this protein sequence reveals the following:

Possible site: 24
>>> Seems to have no N-terminal signal sequence
----- Final Results -----
bacterial cytoplasm --- Certainty = 0.1672 (Affirmative) < succ>
bacterial membrane --- Certainty = 0.0000 (Not Clear) < succ>
bacterial outside --- Certainty = 0.0000 (Not Clear) < succ>

[5560] The protein has homology with the following sequences in the GENPEPT database.

| >GP: AAG04879 GB: AE004578 probable transcriptional regulator | | | |
|---|---|---|---|
| [Pseudomonas aeruginosa] | | | |
| Identities = 20/70 (28%), Positives = 40/70 (56%) | | | |
| Query: | 6 | GFMGRDLMRSEVAQEMANAADEVIILTDSSKFNQTALVEQLPLSTVSQVITDKHPNSEIA | 65 |
| | | G M + +E+A+ M A ++ ++ DSSK + AL + PLS +++++ D+ P E+ | |
| Sbjct: | 179 | GAMDFSIEEAEIARAMIAQARQLTVIADSSKLGRRALFQVFPLSRINRLVVDRKPTGELW | 238 |
| Query: | 66 | NLFQEAEITI | 75 |
| | | Q+A + + | |
| Sbjct: | 239 | EALQQARVEV | 248 |

[5561] There is also homology to SEQ ID 3050.

[5562] Based on this analysis, it was predicted that this protein and its epitopes, could be useful antigens for vaccines or diagnostics.

### EXAMPLE 996

[5563] A DNA sequence (GBSx1056) was identified in S. agalactiae <SEQ ID 3053> which encodes the amino acid sequence <SEQ ID 3054>. This protein is predicted to be transcriptional regulator. Analysis of this protein sequence reveals the following:

Possible site: 46
>>> Seems to have no N-terminal signal sequence
----- Final Results -----
bacterial cytoplasm --- Certainty = 0.0904 (Affirmative) < succ>
bacterial membrane --- Certainty = 0.0000 (Not Clear) < succ>
bacterial outside --- Certainty = 0.0000 (Not Clear) < succ>

[5564] A related GBS nucleic acid sequence <SEQ ID 9541> which encodes amino acid sequence <SEQ ID 9542> was also identified.

[5565] The protein has homology with the following sequences in the GENPEPT database.

| >GP: BAB04499 GB: AP001509 transcriptional regulator [Bacillus halodurans] | | | |
|---|---|---|---|
| Identities = 98/309 (31%), Positives = 178/309 (56%), Gaps = 1/309 (0%) | | | |
| Query: | 6 | ERQKLLAKVAYLYYMEGKSQSEIANELGIYRTTISRMLAKAREEGLVRIEISDFNPEIFQ | 65 |
| | | E ++L+ KVA LYY EG +Q+++A ++G+ R IS++L KA+E+G+V I I D N + | |
| Sbjct: | 5 | EERRLIVKVASLYYFEGWTQAQVAKKIGVSRPVISKLLNKAKEQGIVEIYIKDENIHTVE | 64 |
| Query: | 66 | LESYFKSKYHLKDIEIVSSRKDSDTSEIEKDLAHVAAAMIRKKIKENDKVGIAWGRTLSK | 125 |
| | | LE + KYHLK+ +V + I++ + + + K IK D +GI+WG T+S | |
| Sbjct: | 65 | LEQRLEKKYHLKEAIVVPT-SGLTQDMIKRAIGKATSYYVSKNIKGMDSIGISWGTTVSS | 123 |
| Query: | 126 | VVEAMRPHPVSQVSFVPLAGGPSHINARYHVNTLVYEMSRRFQGSCTFINATLVQENANL | 185 |
| | | V+ ++ +PL GG H N L YE++++ C+++ A + E L | |
| Sbjct: | 124 | FVQEYPYEQHRELKVIPLVGGMGRKFVELHSNLLAYELAKKMNCECSYLYAPAMVEAKEL | 183 |
| Query: | 186 | AKGILTSKYFEGLMDNWEKLDVAIVGVGGKPKSNEQQWLDLLNQDDFQCLDEEAAVGEIT | 245 |
| | | + ++ S+ +++ + +A+VG+G K + + ++ L ++D L + AVG+++ | |
| Sbjct: | 184 | KERLIQSEDIASVLEEGRNVKMAVVGIGSPFKGSTMKVMNYLKEEDIATLKKIGAVGDMS | 243 |
| Query: | 246 | CRFFNHSGDPVNQHLAKRTIGITLEQLQKVPNRIAVAHGNYKAAALLAVLKKGYINHLVT | 305 |
| | | RF++ G P++ L + IGI L++L+++P I V+ G +K ++ A LK GY++ LVT | |
| Sbjct: | 244 | SRFYDALGQPIDHPLNELVIGIDLDELKRIPIVIGVSEGAHKVDSVEAALKGGYLDVLVT | 303 |
| Query: | 306 | DFSTALNIL | 314 |
| | | D STA +++ | |
| Sbjct: | 304 | DDSTAQSLI | 312 |

[5566] A related DNA sequence was identified in S. pyogenes <SEQ ID 3055> which encodes the amino acid sequence <SEQ ID 3056>. Analysis of this protein sequence reveals the following:

Possible site: 44
>>> Seems to have no N-terminal signal sequence
----- Final Results -----
bacterial cytoplasm --- Certainty = 0.2123 (Affirmative) < succ>
bacterial membrane --- Certainty = 0.0000 (Not Clear) < succ>
bacterial outside --- Certainty = 0.0000 (Not Clear) < succ>

[5567] An alignment of the GAS and GBS proteins is shown below.

| Identities = 165/324 (50%), Positives = 238/324 (72%), Gaps = 1/324 (0%) | | | |
|---|---|---|---|
| Query: | 3 | MKLERQKLLAKVAYLYYMEGKSQSEIANELGIYRTTISRMLAKAREEGLVRIEISDFNPE | 62 |
| | | MK ER++LLAKVAYL+Y++GKSQ+ I+ E+ IYRTT+ RMLAKA+EEG+VRIEI+D++ + | |
| Sbjct: | 1 | MKEERRRLLAKVAYLHYVQGKSQTLISKEMNIYRTTVCRMLAKAKEEGIVRIEIADYDAD | 60 |
| Query: | 63 | IFQLESYFKSKYHLKDIEIVSSRKDSDTSEIEKDLAHVAAAMIRKKIKENDKVGIAWGRT | 122 |
| | | +F LE Y + +Y L+ +++V ++ + + ++A AA + R +K+ DK+G++WG T | |
| Sbjct: | 61 | LFALEEYVRQQYGLEKLDLVPNQVEDTPMDTLTNVAKTAAEVFRHVVKDGDKIGLSWGAT | 120 |
| Query: | 123 | LSKVVEAMRPHPVSQVSFVPLAGGPSHINARYHVNTLVYEMSRRFQGSCTFINATLVQEN | 182 |
| | | LS +++ + P + V PLAGGPSHINA+YHVNTLVY ++R F G+ F+NA ++QE+ | |
| Sbjct: | 121 | LSCLMDELNPKAMKDVFIYPLAGGPSHINAKYHVNTLVYRLARIFHGNSAFMNAMVIQED | 180 |
| Query: | 183 | ANLAKGILTSKYFEGLMDNWEKLDVAIVGVGGKPKSNEQ-QWLDLLNQDDFQCLDEEAAV | 241 |
| | | +LAKGIL SKYF ++ +W++LD+A+VG+GG+P S EQ QW DLL D L E AV | |
| Sbjct: | 181 | KHLAKGILQSKYFNDILTSWDQLDLALVGIGGEPNSLEQSQWRDLLTSSDHDQLKYEKAV | 240 |
| Query: | 242 | GEITCRFFNHSGDPVNQHLAKRTIGITLEQLQKVPNRIAVAHGNYKAAALLAVLKKGYIN | 301 |
| | | GE+ CRFF+ +G PV L RTIGI+LEQL++VP +AVA G +KA A+LA LK G+IN | |
| Sbjct: | 241 | GEVCCRFFDQAGQPVYTGLQDRTIGISLEQLRRVPKTMAVATGKHKAKAILAALKAGFIN | 300 |
| Query: | 302 | HLVTDFSTALNILRLDKDTFVDTI | 325 |
| | | +LVTD T L +L LD+D ++ + | |
| Sbjct: | 301 | YLVTDKETMLAVLALDEDIDLNNV | 324 |

[5568] Based on this analysis, it was predicted that these proteins and their epitopes could be useful antigens for vaccines or diagnostics.

### EXAMPLE 997

[5569] A DNA sequence (GBSx1057) was identified in S. agalactiae <SEQ ID 3057> which encodes the amino acid sequence <SEQ ID 3058>. This protein is predicted to be PTS enzyme III cel (celC). Analysis of this protein sequence reveals the following:

Possible site: 55
>>> Seems to have a cleavable N-term signal seq.
----- Final Results -----
bacterial outside --- Certainty = 0.3000 (Affirmative) < succ>
bacterial membrane --- Certainty = 0.0000 (Not Clear) < succ>
bacterial cytoplasm --- Certainty = 0.0000 (Not Clear) < succ>

[5570] A related GBS nucleic acid sequence <SEQ ID 9543> which encodes amino acid sequence <SEQ ID 9544> was also identified.

[5571] The protein has homology with the following sequences in the GENPEPT database.

| >GP: AAA23551 GB: M93570 PTS enzyme III cel [Escherichia coli] | | | |
|---|---|---|---|
| Identities = 42/102 (41%), Positives = 70/102 (68%) | | | |
| Query: | 4 | EIIVADQIIMGLILNAGDAKQHIYQALKLAKEGNFAESKIEIELADSALLEAHNLQTQFL | 63 |
| | | E+ ++++MGLI+N+G A+ Y ALK AK+G+FA +K ++ + AL EAH +QT+ + | |
| Sbjct: | 13 | EVEELEEVVMGLIINSGQARSLAYAALKQAKQGDFAAAKAMMDQSRMALNEAHLVQTKLI | 72 |
| Query: | 64 | AQEAGGTRTDISALFIHSQDHLMTSITEINLIKEIIDLRQEL | 105 |
| | | +AG + +S + +H+QDHLMTS+ LI E+I+L ++L | |
| Sbjct: | 73 | EGDAGEGKMKVSLVLVHAQDHLMTSMLARELITELIELHEKL | 114 |

[5572] A related DNA sequence was identified in S. pyogenes <SEQ ID 3059> which encodes the amino acid sequence <SEQ ID 3060>. Analysis of this protein sequence reveals the following:

Possible site: 17
>>> Seems to have an uncleavable N-term signal seq
----- Final Results -----
bacterial membrane --- Certainty = 0.0000 (Not Clear) < succ>
bacterial outside --- Certainty = 0.0000 (Not Clear) < succ>
bacterial cytoplasm --- Certainty = 0.0000 (Not Clear) < succ>

[5573] The protein has homology with the following sequences in the databases:

| >GP: AAC74806 GB: AE000268 PEP-dependent phosphotransferase enzyme III | | | |
|---|---|---|---|
| for cellobiose, arbutin, and salicin [Escherichia coli] | | | |
| Identities = 39/97 (40%), Positives = 66/97 (67%) | | | |
| Query: | 7 | DQIIMGLILNAGDAKQHIYQALKCAKEDDYATSEKEMALADDALLEAHNLQTQFLAQEAS | 66 |
| | | ++++MGLI+N+G A+ Y ALK AK+ D+A ++ M + AL EAH +QT+ + +A | |
| Sbjct: | 18 | EEVVMGLIINSGQARSLAYAALKQAKQGDFAAAKAMMDQSRMALNEAHLVQTKLIEGDAG | 77 |
| Query: | 67 | GNKSEITALFVHSQDHLMTTITEINLIKEIIDLRKEL | 103 |
| | | K +++ + VH+QDHLMT++ LI E+I+L ++L | |
| Sbjct: | 78 | EGKMKVSLVLVHAQDHLMTSMLARELITELIELHEKL | 114 |

[5574] An alignment of the GAS and GBS proteins is shown below.

| Identities = 81/103 (78%), Positives = 94/103 (90%) | | | |
|---|---|---|---|
| Query: | 3 | MEIIVADQIIMGLILNAGDAKQHIYQALKLAKEGNFAESKIEIELADSALLEAHNLQTQF | 62 |
| | | M++IV DQIIMGLILNAGDAKQHIYQALK AKE ++A S+ E+ LAD ALLEAHNLQTQF | |
| Sbjct: | 1 | MQVIVPDQIIMGLILNAGDAKQHIYQALKCAKEDDYATSEKEMALADDALLEAHNLQTQF | 60 |
| Query: | 63 | LAQEAGGTRTDISALFIHSQDHLMTSITEINLIKEIIDLRQEL | 105 |
| | | LAQEA G +++I+ALF+HSQDHLMT+ITEINLIKEIIDLR+EL | |
| Sbjct: | 61 | LAQEASGNKSEITALFVHSQDHLMTTITEINLIKEIIDLRKEL | 103 |

[5575] Based on this analysis, it was predicted that these proteins and their epitopes could be useful antigens for vaccines or diagnostics.

### EXAMPLE 998

[5576] A DNA sequence (GBSx1058) was identified in S. agalactiae <SEQ ID 3061> which encodes the amino acid sequence <SEQ ID 3062>. This protein is predicted to be PTS system, cellobiose-specific IIB component (celA). Analysis of this protein sequence reveals the following:

```
Possible site: 24
>>> Seems to have a cleavable N-term signal seq.
----- Final Results -----
                                bacterial outside --- Certainty = 0.3000(Affirmative) < succ>
                              bacterial membrane --- Certainty = 0.0000(Not Clear) < succ>
                            bacterial cytoplasm --- Certainty = 0.0000(Not Clear) < succ>
```

[5577] The protein has homology with the following sequences in the GENPEPT database.

| >GP: AAF94440 GB: AE004207 PTS system, cellobiose-specific IIB | | | |
|---|---|---|---|
| component [Vibrio cholerae] | | | |
| Identities = 46/100 (46%), Positives = 62/100 (62%) | | | |
| Query: | 1 | MIKIGLFCAAGFSTGMLVNNMKIAADKEGIEAHIEAYSQGKIADYAKDLDVALLGPQVSY | 60 |
| | | M KI L C+AG ST MLV M+ AA+ +GIE I+A S + ++ DV LLGPQV + | |
| Sbjct: | 1 | MKKILLCCSAGMSTSMLVKKMQQAAESKGIECKIDALSVNAFEEAIQEYDVCLLGPQVRF | 60 |
| Query: | 61 | TLDKSKSICDEYGVPIAVIPMADYGMLDGVKVLKLALSLL | 100 |
| | | L++ + DEYG IA I YGM+ G +VL+ AL L+ | |
| Sbjct: | 61 | QLEELRKTADEYGKNIAAISPQAYGMMKGDEVLQQALDLI | 100 |

[5578] A related DNA sequence was identified in S. pyogenes <SEQ ID 3063> which encodes the amino acid sequence <SEQ ID 3064>. Analysis of this protein sequence reveals the following:

```
Possible site: 31
>>> Seems to have a cleavable N-term signal seq.
----- Final Results -----
                                bacterial outside --- Certainty = 0.3000(Affirmative) < succ>
                              bacterial membrane --- Certainty = 0.0000(Not Clear) < succ>
                            bacterial cytoplasm --- Certainty = 0.0000(Not Clear) < succ>
```

[5579] The protein has homology with the following sequences in the databases:

| >GP: AAF94440 GB: AE004207 PTS system, cellobiose-specific IIB | | | |
|---|---|---|---|
| component [Vibrio cholerae] | | | |
| Identities = 43/100 (43%), Positives = 58/100 (58%) | | | |
| Query: | 8 | MIKIGLFCAAGFSTGMLVNNMKVAAEKKGIDCQIEAYAQGKLADYAPLLDVALLGPQVAY | 67 |
| | | M KI L C+AG ST MLV M+ AAE KGI+C+I+A + + DV LLGPQV + | |
| Sbjct: | 1 | MKKILLCCSAGMSTSMLVKKMQQAAESKGIECKIDALSVNAFEEAIQEYDVCLLGPQVRF | 60 |
| Query: | 68 | TLDKSEAICKDNDIPIAVIPMADYGMLDGNKVLDLALSLV | 107 |
| | | L++ + IA I YGM+ G++VL AL L+ | |
| Sbjct: | 61 | QLEELRKTADEYGKNIAAISPQAYGMMKGDEVLQQALDLI | 100 |

[5580] An alignment of the GAS and GBS proteins is shown below.

| Identities = 79/101 (78%), Positives = 92/101 (90%) | | | |
|---|---|---|---|
| Query: | 1 | MIKIGLFCAAGFSTGMLVNNMKIAADKEGIEAHIEAYSQGKIADYAKDLDVALLGPQVSY | 60 |
| | | MIKIGLFCAAGFSTGMLVNNMK+AA+K+GI+ IEAY+QGK+ADYA LDVALLGPQV+Y | |
| Sbjct: | 8 | MIKIGLFCAAGFSTGMLVNNMKVAAEKKGIDCQIEAYAQGKLADYAPLLDVALLGPQVAY | 67 |
| Query: | 61 | TLDKSKSICDEYGVPIAVIPMADYGMLDGVKVLKLALSLLE | 101 |
| | | TLDKS++IC + +PIAVIPMADYGMLDG KVL LALSL++ | |
| Sbjct: | 68 | TLDKSEAICKDNDIPIAVIPMADYGMLDGNKVLDLALSLVK | 108 |

[5581] SEQ ID 3062 (GBS180) was expressed in E. coli as a His-fusion product. SDS-PAGE analysis of total cell extract is shown in FIG. 39 (lane 4; MW 12.6 kDa). It was also expressed in E. coli as a GST-fusion product. SDS-PAGE analysis of total cell extract is shown in FIG. 41 (lane 2; MW 37.6 kDa).

[5582] The GBS180-GST fusion product was purified (FIG. 204, lane 8) and used to immunise mice. The resulting antiserum was used for FACS (FIG. 298), which confirmed that the protein is immunoaccessible on GBS bacteria.

[5583] Based on this analysis, it was predicted that these proteins and their epitopes could be useful antigens for vaccines or diagnostics.

### EXAMPLE 999

[5584] A DNA sequence (GBSx1059) was identified in S. agalactiae <SEQ ID 3065> which encodes the amino acid sequence <SEQ ID 3066>. This protein is predicted to be pts system, cellobiose-specific iic component (celB). Analysis of this protein sequence reveals the following:

| Possible site: 40 | | | | |
|---|---|---|---|---|
| >>> Seems to have no N-terminal signal sequence | | | | |
| | INTEGRAL | Likelihood = −11.68 | Transmembrane | 346-362 (334-374) |
| | INTEGRAL | Likelihood = −9.77 | Transmembrane | 182-198 (178-205) |
| | INTEGRAL | Likelihood = −8.65 | Transmembrane | 29-45 (27-50) |
| | INTEGRAL | Likelihood = −6.53 | Transmembrane | 140-156 (134-161) |
| | INTEGRAL | Likelihood = −4.78 | Transmembrane | 292-308 (289-312) |
| | INTEGRAL | Likelihood = −4.41 | Transmembrane | 397-413 (395-416) |
| | INTEGRAL | Likelihood = −2.97 | Transmembrane | 77-93 (72-93) |
| | INTEGRAL | Likelihood = −2.97 | Transmembrane | 228-244 (222-246) |

```
----- Final Results -----
                              bacterial membrane --- Certainty = 0.5670(Affirmative) < succ>
                                bacterial outside --- Certainty = 0.0000(Not Clear) < succ>
                            bacterial cytoplasm --- Certainty = 0.0000(Not Clear) < succ>
```

[5585] The protein has homology with the following sequences in the GENPEPT database.

| >GP: AAA17390 GB: U07818 cellobiose phosphotransferase enzyme II″ | | | |
|---|---|---|---|
| [Bacillus stearothermophilus] | | | |
| Identities = 160/415 (38%), Positives = 251/415 (59%), Gaps = 13/415 (3%) | | | |
| Query: | 15 | KFVNMRGIIALKDGMLAILPLTVVGSLFLILGQLPFKGLNQAIANVFGPEWTEPFMQVYS | 74 |
| | | K R + A++DG++ +PL ++GSLFLI+G LP G N+ +A FG W + + | |
| Sbjct: | 18 | KIAEQRHLQAIRDGIILSMPLLIIGSLFLIVGFLPIPGYNEWMAKWFGEHWLDKLLYPVG | 77 |
| Query: | 75 | GTFAIMGLISCFAIAYAYAKNSSVEPLPAGVLSLSSFFILMKSSYIPVKGEA------IA | 128 |
| | | TF IM L+ F +AY A+ V+ L AG +SL++F +L +P E ++ | |
| Sbjct: | 78 | ATFDIMALVVSFGVAYRLAEKYKVDALSAGAISLAAF-LLATPYQVPFTPEGAKETIMVS | 136 |
| Query: | 129 | DAISKVWFGGQGIIGAIIIGLVVGAIYTWFIQHHIVIKMPEQVPQAIAKQFEAMIPAFVI | 188 |
| | | I W G +G+ A+I+ +V IY IQ +IVIK+P+ VP A+A+ F A+IP + | |
| Sbjct: | 137 | GGIPVQWVGSKGLFVAMILAIVSTEIYRKIIQKNIVIKLPDGVPPAVARSFVALIPGAAV | 196 |
| Query: | 189 | FLLSMIVYLIAKVTTGGTFIEMIYDIIQVPLQGLTGSLYGAIGIAFFISFLWWFGVHGQS | 248 |
| | | ++ + LI ++T +F ++ ++ PL L GS++GAI + LW G+HG + | |
| Sbjct: | 197 | LVVVWVARLILEMTPFESFHNIVSVLLNKPLSVLGGSVFGAIVAVLLVQLLWSTGLHGAA | 256 |
| Query: | 249 | VVNGIVTALLLSNLDANKSLLAAN-RLTLDNGAHIVTQQFLDSFLILSGSGITFGLVIAM | 307 |
| | | +V G++ + LS +D N+ + N L N ++TQQF D ++ + GSG T L + M | |
| Sbjct: | 257 | IVGGVMGPIWLSLMDENRMVFQQNPNAELPN---VITQQFFDLWIYIGGSGATLALALTM | 313 |
| Query: | 308 | LFAAKSKQYKALGKVAAFPAIFNVNEPIVFGFPIVMNPVMFLPFILVPVLAALIVYGAIA | 367 |
| | | +F A+S+Q K+LG++A P IFN+NEPI FG PIVMNP++ +PFILVPV+ ++ Y A+A | |
| Sbjct: | 314 | MFRARSRQLKSLGRLAIAPGIFNINEPITFGMPIVMNPLLIIPFILVPVVLVVVSYAAMA | 373 |
| Query: | 368 | VGFMQPFSGVTLPWSTPAIISGFMVGGWQ--GALVQIVILAISTAVYFPFFKIQD | 420 |
| | | G + SGV +PW+TP +ISG++ G + G+++QIV I+ A+Y+PFF I D | |
| Sbjct: | 374 | TGLVAKPSGVAVPWTTPIVISGYLATGGKISGSILQIVNFFIAFAIYYPFFSIWD | 428 |

[5586] A related DNA sequence was identified in S. pyogenes <SEQ ID 2215> which encodes the amino acid sequence <SEQ ID 2216>. Analysis of this protein sequence reveals the following:

| Possible site: 40 | | | | |
|---|---|---|---|---|
| >>> Seems to have no N-terminal signal sequence | | | | |
| | INTEGRAL | Likelihood = −8.92 | Transmembrane | 347-363 (335-373) |
| | INTEGRAL | Likelihood = −7.59 | Transmembrane | 29-45 (27-50) |
| | INTEGRAL | Likelihood = −7.38 | Transmembrane | 182-198 (179-204) |
| | INTEGRAL | Likelihood = −5.68 | Transmembrane | 398-414 (395-420) |
| | INTEGRAL | Likelihood = −4.99 | Transmembrane | 293-309 (291-314) |
| | INTEGRAL | Likelihood = −3.61 | Transmembrane | 140-156 (134-160) |
| | INTEGRAL | Likelihood = −2.60 | Transmembrane | 229-245 (229-246) |
| | INTEGRAL | Likelihood = −0.75 | Transmembrane | 72-88 (72-88) |

```
----- Final Results -----
                              bacterial membrane --- Certainty = 0.4567(Affirmative) < succ>
                                bacterial outside --- Certainty = 0.0000(Not Clear) < succ>
                            bacterial cytoplasm --- Certainty = 0.0000(Not Clear) < succ>
```

[5587] An alignment of the GAS and GBS proteins is shown below.

| Identities = 366/428 (85%), Positives = 402/428 (93%), Gaps = 1/428 (0%) | | | |
|---|---|---|---|
| Query: | 1 | MSKFDSQKIITPIMKFVNMRGIIALKDGMLAILPLTVVGSLFLILGQLPFKGLNQAIANV | 60 |
| | | M+K + Q II PIM FVNMRGIIALKDGMLAILPLTVVGSLFLI GQ+PF+G+N AIA+V | |
| Sbjct: | 1 | MAKMNMQNIIKPIMTFVNMRGIIALKDGMLAILPLTVVGSLFLIAGQIPFQGVNDAIASV | 60 |
| Query: | 61 | FGPEWTEPFMQVYSGTFAIMGLISCFAIAYAYAKNSSVEPLPAGVLSLSSFFILMKSSYI | 120 |
| | | FG +WTEPFMQVY GTFAIMGLISCFAI Y+YAKNS VEPLP+GVLSLS+FFIL++SSY+ | |
| Sbjct: | 61 | FGADWTEPFMQVYHGTFAIMGLISCFAIGYSYAKNSGVEPLPSGVLSLSAFFILLRSSYV | 120 |
| Query: | 121 | PVKGEAIADAISKVWFGGQGIIGAIIIGLVVGAIYTWFIQHHIVIKMPEQVPQAIAKQFE | 180 |
| | | P +GEAI DAISKVWFGGQGIIGAI+IGL VGA+YT FI+ HIVIKMP+QVPQAIAKQFE | |
| Sbjct: | 121 | PAEGEAIGDAISKVWFGGQGIIGAIVIGLTVGAVYTTFIRRHIVIKMPDQVPQAIAKQFE | 180 |
| Query: | 181 | AMIPAFVIFLLSMIVYLIAK-VTTGGTFIEMIYDIIQVPLQGLTGSLYGAIGIAFFISFL | 239 |
| | | AMIPAFVIF LSM+VY+IAK VT GGTFIEMIYD+IQVPLQGLTGSLYGA+GIAFFISFL | |
| Sbjct: | 181 | AMIPAFVIFTLSMLVYIIAKSVTGGGTFIEMIYDVIQVPLQGLTGSLYGALGIAFFISFL | 240 |
| Query: | 240 | WWFGVHGQSVVNGIVTALLLSNLDANKSLLAANRLTLDNGAHIVTQQFLDSFLILSGSGI | 299 |
| | | WWFGVHGQSVVNGIVTALLLSNLDANK+L+AA L+LD GAHIVTQQFLDSFLILSGSGI | |
| Sbjct: | 241 | WWFGVHGQSVVNGIVTALLLSNLDANKALMAAGELSLDKGAHIVTQQFLDSFLILSGSGI | 300 |
| Query: | 300 | TFGLVIAMLFAAKSKQYKALGKVAAFPAIFNVNEPIVFGFPIVMNPVMFLPFILVPVLAA | 359 |
| | | TFGLV+AM+FAAKSKQYKALGKVAAFPA+FNVNEP+VFGFPIVMNPVMFLPFILVPVLAA | |
| Sbjct: | 301 | TFGLVVAMIFAAKSKQYKALGKVAAFPALFNVNEPVVFGFPIVMNPVMFLPFILVPVLAA | 360 |
| Query: | 360 | LIVYGAIAVGFMQPFSGVTLPWSTPAIISGFMVGGWQGALVQIVILAISTAVYFPFFKIQ | 419 |
| | | L VYGAIA+GFMQPF+GVTLPWSTPAIISGFMVGGWQGA+VQI+IL +ST VYFPFFKIQ | |
| Sbjct: | 361 | LTVYGAIAIGFMQPFAGVTLPWSTPAIISGFMVGGWQGAIVQILILIMSTLVYFPFFKIQ | 420 |
| Query: | 420 | DNITYKNE | 427 |
| | | DN+ Y+NE | |
| Sbjct: | 421 | DNMAYQNE | 428 |

[5588] Based on this analysis, it was predicted that these proteins and their epitopes could be useful antigens for vaccines or diagnostics.

### EXAMPLE 1000

[5589] A DNA sequence (GBSx1060) was identified in S. agalactiae <SEQ ID 3067> which encodes the amino acid sequence <SEQ, ID 3068>. This protein is predicted to be formate acetyltransferase 2 (pflB). Analysis of this protein sequence reveals the following:

```
Possible site: 54
>>> Seems to have no N-terminal signal sequence
----- Final Results -----
                            bacterial cytoplasm --- Certainty = 0.5049(Affirmative) < succ>
                              bacterial membrane --- Certainty = 0.0000(Not Clear) < succ>
                                bacterial outside --- Certainty = 0.0000(Not Clear) < succ>
```

[5590] The protein has homology with the following sequences in the GENPEPT database.

| >GP: AAC73910 GB: AE000184 putative formate acetyltransferase | | | |
|---|---|---|---|
| [Escherichia coli K12] | | | |
| Identities = 414/805 (51%), Positives = 555/805 (68%), Gaps = 14/805 (1%) | | | |
| Query: | 25 | LTERMYSYRDKVLD-KKPFIDAERAILVTEAYQKHQEKPNVLKRAYMLQNILEKMTIYID | 83 |
| | | L++R+ ++++ ++ KP + ERA TE YQ+H +KP ++RA L + L TI+I | |
| Sbjct: | 9 | LSDRIKAHKNALVHIVKPPVCTERAQHYTEMYQQHLDKPIPVRRALALAHHLANRTIWIK | 68 |
| Query: | 84 | DETMIVGNQASSDKDAPIFPEYTLEFVVNELDLFEKRDGDVFYITEETKEQIRNIAPFWE | 143 |
| | | + +I+GNQAS + APIFPEYT+ ++ E+D R G F ++EE K + + P+W | |
| Sbjct: | 69 | HDELIIGNQASEVRAAPIFPEYTVSWIEKEIDDLADRPGAGFAVSEENKRVLHEVCPWWR | 128 |
| Query: | 144 | NNNLRARAGVMLPEEVQVYMETGFFGMEGKMNSGDAHLAVNYQKLLEEGLIGFEKKARKA | 203 |
| | | ++ R M +E + + TG EG M SGDAHLAVN+ LLE+GL G ++ + | |
| Sbjct: | 129 | GQTVQDRCYGMFTDEQKGLLATGIIKAEGNMTSGDAHLAVNFPLLLEKGLDGLREEVAER | 188 |
| Query: | 204 | KADLDLTKPESIDKYHFYDSILITIEAVKTYAERFAILAKKQAKTANAK-RRQELLDIAS | 262 |
| | | ++ ++LT E + F +I I + AV + ERFA LA++ A T + RR ELL +A | |
| Sbjct: | 189 | RSRINLTVLEDLHGEQFLKAIDIVLVAVSEHIERFAALAREMAATETRESRRDELLAMAE | 248 |
| Query: | 263 | ICERVPYYPAETFAEAVQSVWFIQCILQIESNGHSLSYGRFDQYMYPYVKSDLEAGRETE | 322 |
| | | C+ + + P +TF +A+Q +FIQ ILQIESNGHS+S+GR DQY+YPY + D+E + + | |
| Sbjct: | 249 | NCDLIAHQPPQTFWQALQLCYFIQLILQIESNGHSVSFGRMDQYLYPYYRRDVELNQTLD | 308 |
| Query: | 323 | -DSIVERLTNLWIKTITINKVRSQAHTFSSAGSPLYQNVTIGGQTR---HKEDAVNPLSF | 378 |
| | | + +E L + W+K + +NK+RS +H+ +SAGSPLYQNVTIGGQ DAVNPLS+ | |
| Sbjct: | 309 | REHAIEMLHSCWLKLLEVNKIRSGSHSKASAGSPLYQNVTIGGQNLVDGQPMDAVNPLSY | 368 |
| Query: | 379 | LVLKSVAQTHLPQPNLTVRYHANLDKSFMNEAIEVMKLGFGMPAFNNDEIIIPSFIKKGV | 438 |
| | | +L+S + QPNL+VRYHA + F++ ++V++ GFGMPAFNNDEI+IP FIK G+ | |
| Sbjct: | 369 | AILESCGRLRSTQPNLSVRYHAGMSNDFLDACVQVIRCGFGMPAFNNDEIVIPEFIKLGI | 428 |
| Query: | 439 | SEEDAYDYSAIGCVETAVPGKWGYRCTGMSYINFPKVLLITMNDGIDPASGKRFAP---- | 494 |
| | | +DAYDY+AIGC+ETAV GKWGYRCTGMS+INF +V+L + G D SGK F P | |
| Sbjct: | 429 | EPQDAYDYAAIGCIETAVGGKWGYRCTGMSFINFARVMLAALEGGHDATSGKVFLPQEKA | 488 |
| Query: | 495 | -SYGHFTQMTSYKELKEAWDKTLRYLTRMSVIVENAIDISLEREVPDILCSALTDDCIGR | 553 |
| | | S G+F ++ E+ +AWD +RY TR S+ +E +D LE V DILCSAL DDCI R | |
| Sbjct: | 489 | LSAGNFN---NFDEVMDAWDTQIRYYTRKSIEIEYVVDTMLEENVHDILCSALVDDCIER | 545 |
| Query: | 554 | GKHLKEGGAVYDYISGLQVGIANLSDSLAALKKLVFEEKRLTTLEVWQALQSDYAGPRGE | 613 |
| | | K +K+GGA YD++SGLQVGIANL +SLAA+KKLVFE+ + ++ AL D+ G E | |
| Sbjct: | 546 | AKSIKQGGAKYDWVSGLQVGIANLGNSLAAVKKLVFEQGAIGQQQLAAALADDFDGLTHE | 605 |
| Query: | 614 | EIRQMLINEAPKYGNDDDYADSLVRECYDVYVEEIAKYPNTRYGRGPIGGIRYSGTSSIS | 673 |
| | | ++RQ LIN APKYGNDDD D+L+ Y Y++E+ +Y N RYGRGP+GG Y+GTSSIS | |
| Sbjct: | 606 | QLRQRLINGAPKYGNDDDTVDTLLARAYQTYIDELKQYHNPRYGRGPVGGNYYAGTSSIS | 665 |
| Query: | 674 | ANVGQGRGTLATPDGRHAGTPLAEGCSPSHNMDKKGPTSVLKSVSKLPTDEIVGGVLLNQ | 733 |
| | | ANV G T+ATPDGR A TPLAEG SP+ D GPT+V+ SV KLPT I+GGVLLNQ | |
| Sbjct: | 666 | ANVPFGAQTMATPDGRKAHTPLAEGASPASGTDHLGPTAVIGSVGKLPTAAILGGVLLNQ | 725 |
| Query: | 734 | KVNPQTLAKEEDKQKLIALLRTFFNRLHGYHIQYNVVSRETLIDAQKHPEKHRDLIVRVA | 793 |
| | | K+NP TL E DKQKL+ LLRTFF G+HIQYN+VSRETL+DA+KHP+++RDL+VRVA | |
| Sbjct: | 726 | KLNPATLENESDKQKLMILLRTFFEVHKGWHIQYNIVSRETLLDAKKHPDQYRDLVVRVA | 785 |
| Query: | 794 | GYSAFFNVLSKATQDDIIARTEHAL | 818 |
| | | GYSAFF LS QDDIIARTEH L | |
| Sbjct: | 786 | GYSAFFTALSPDAQDDIIARTEHML | 810 |

[5591] A related DNA sequence was identified in S. pyogenes <SEQ ID 3069> which encodes the amino acid sequence <SEQ ID 3070>. Analysis of this protein sequence reveals the following:

```
Possible site: 19
>>> Seems to have no N-terminal signal sequence
----- Final Results -----
                            bacterial cytoplasm --- Certainty = 0.4763(Affirmative) < succ>
                              bacterial membrane --- Certainty = 0.0000(Not Clear) < succ>
                                bacterial outside --- Certainty = 0.0000(Not Clear) < succ>
```

[5592] An alignment of the GAS and GBS proteins is shown below.

| Identities = 694/803 (86%), Positives = 747/803 (92%) | | | |
|---|---|---|---|
| Query: | 16 | QNSQKHFGYLTERMYSYRDKVLDKKPFIDAERAILVTEAYQKHQEKPNVLKRAYMLQNIL | 75 |
| | | + +FG+LT+RM YR+ VLDKKP+IDAERAIL TEAYQKHQ KP LKRAYMLQ IL | |
| Sbjct: | 3 | ETKSPYFGHLTDRMTHYREAVLDKKPYIDAERAILATEAYQKHQNKPANLKRAYMLQTIL | 62 |
| Query: | 76 | EKMTIYIDDETMIVGNQASSDKDAPIFPEYTLEFVVNELDLFEKRDGDVFYITEETKEQI | 135 |
| | | E MTIYI+DE++I GNQASS+KDAPIFPEYTLEFV+NELDLFEKRDGDVFYITEETK+Q+ | |
| Sbjct: | 63 | ENMTIYIEDESLIAGNQASSNKDAPIFPEYTLEFVLNELDLFEKRDGDVFYITEETKQQL | 122 |
| Query: | 136 | RNIAPFWENNNLRARAGVMLPEEVQVYMETGFFGMEGKMNSGDAHLAVNYQKLLEEGLIG | 195 |
| | | R+IAPFWENNNLRAR GV+LPEEVQVYMETGFFGMEGKMNSGDAHLAVNYQKLLE GL G | |
| Sbjct: | 123 | RDIAPFWENNNLRARCGVLLPEEVQVYMETGFFGMEGKMNSGDAHLAVNYQKLLEHGLKG | 182 |
| Query: | 196 | FEKKARKAKADLDLTKPESIDKYHFYDSILITIEAVKTYAERFAILAKKQAKTANAKRRQ | 255 |
| | | FE++AR AKA LDLT PE+IDKYHFYDS+ I I+AVKTYA+R+A LA++ AKTA +R+ | |
| Sbjct: | 183 | FEERARAAKAALDLTIPENIDKYHFYDSVFIVIDAVKTYAKRYAKLARELAKTAKPERQA | 242 |
| Query: | 256 | ELLDIASICERVPYYPAETFAEAVQSVWFIQCILQIESNGHSLSYGRFDQYMYPYVKSDL | 315 |
| | | ELLDIA IC++VPY PA+TFAEAVQSVWFIQCILQIESNGHSLSYGRFDQYMYPYVK+DL | |
| Sbjct: | 243 | ELLDIARICDKVPYEPAKTFAEAVQSVWFIQCILQIESNGHSLSYGRFDQYMYPYVKADL | 302 |
| Query: | 316 | EAGRETEDSIVERLTNLWIKTITINKVRSQAHTFSSAGSPLYQNVTIGGQTRHKEDAVNP | 375 |
| | | EAGRETED+IVERLTNLWIKT+TINKVRSQAHTFSSAGSPLYQNVTIGGQTR K+DAVNP | |
| Sbjct: | 303 | EAGRETEDTIVERLTNLWIKTLTINKVRSQAHTFSSAGSPLYQNVTIGGQTRDKKDAVNP | 362 |
| Query: | 376 | LSFLVLKSVAQTHLPQPNLTVRYHANLDKSFMNEAIEVMKLGFGMPAFNNDEIIIPSFIK | 435 |
| | | LS+LVL+SVAQT LPQPNLTVRYH LD +FMNE IEVMKLGFGMPA NNDEIIIPSFIK | |
| Sbjct: | 363 | LSYLVLRSVAQTKLPQPNLTVRYHKGLDNTFMNECIEVMKLGFGMPAMNNDEIIIPSFIK | 422 |
| Query: | 436 | KGVSEEDAYDYSAIGCVETAVPGKWGYRCTGMSYINFPKVLLITMNDGIDPASGKRFAPS | 495 |
| | | KGVSEEDAYDYSAIGCVETAVPGKWGYRCTGMSYINFPK+LLITMNDGIDPASGKRFA | |
| Sbjct: | 423 | KGVSEEDAYDYSAIGCVETAVPGKWGYRCTGMSYINFPKILLITMNDGIDPASGKRFAKG | 482 |
| Query: | 496 | YGHFTQMTSYKELKEAWDKTLRYLTRMSVIVENAIDISLEREVPDILCSALTDDCIGRGK | 555 |
| | | +GHF MTSY+ELK AWD TLR +TRMSVIVENAID+ LEREVPDILCSALTDDCIGRGK | |
| Sbjct: | 483 | HGHFKDMTSYEELKAAWDATLREITRMSVIVENAIDLGLEREVPDILCSALTDDCIGRGK | 542 |
| Query: | 556 | HLKEGGAVYDYISGLQVGIANLSDSLAALKKLVFEEKRLTTLEVWQALQSDYAGPRGEEI | 615 |
| | | LKEGGAVYDYISGLQVGIANLSDSLAALKKLVFEE RLT E+W+AL+SD+AG RGE+I | |
| Sbjct: | 543 | TLKEGGAVYDYISGLQVGIANLSDSLAALKKLVFEEGRLTPEELWKALESDFAGERGEDI | 602 |
| Query: | 616 | RQMLINEAPKYGNDDDYADSLVRECYDVYVEEIAKYPNTRYGRGPIGGIRYSGTSSISAN | 675 |
| | | RQMLIN+APKYGNDDDYADSLV E YD Y++EIAKYPNTRYGRGPIGGIRYSGTSSISAN | |
| Sbjct: | 603 | RQMLINDAPKYGNDDDYADSLVVEAYDTYIDEIAKYPNTRYGRGPIGGIRYSGTSSISAN | 662 |
| Query: | 676 | VGQGRGTLATPDGRHAGTPLAEGCSPSHNMDKKGPTSVLKSVSKLPTDEIVGGVLLNQKV | 735 |
| | | VGQG+GTLATPDGRHAGTPLAEGCSP H+MDKKGPTSVLKSV+KLPTDEIVGGVLLNQKV | |
| Sbjct: | 663 | VGQGKGTLATPDGRHAGTPLAEGCSPEHSMDKKGPTSVLKSVAKLPTDEIVGGVLLNQKV | 722 |
| Query: | 736 | NPQTLAKEEDKQKLIALLRTFFNRLHGYHIQYNVVSRETLIDAQKHPEKHRDLIVRVAGY | 795 |
| | | NPQTLAKEEDK KL+ALLRTFFNRLHGYHIQYNVVSRETLIDAQKHPEKHRDLIVRVAGY | |
| Sbjct: | 723 | NPQTLAKEEDKLKLMALLRTFFNRLHGYHIQYNVVSRETLIDAQKHPEKHRDLIVRVAGY | 782 |
| Query: | 796 | SAFFNVLSKATQDDIIARTEHAL | 818 |
| | | SAFFNVLSKATQDDII RTEH L | |
| Sbjct: | 783 | SAFFNVLSKATQDDIIERTEHTL | 805 |

[5593] Based on this analysis, it was predicted that these proteins and their epitopes could be useful antigens for vaccines or diagnostics.

### EXAMPLE 1001

[5594] A DNA sequence (GBSx1061) was identified in S. agalactiae <SEQ ID 3071> which encodes the amino acid sequence <SEQ ID 3072>. Analysis of this protein sequence reveals the following:

```
Possible site: 32
>>> Seems to have no N-terminal signal sequence
----- Final Results -----
                            bacterial cytoplasm --- Certainty = 0.1024(Affirmative) < succ>
                              bacterial membrane --- Certainty = 0.0000(Not Clear) < succ>
                                bacterial outside --- Certainty = 0.0000(Not Clear) < succ>
```

[5595] The protein has homology with the following sequences in the GENPEPT database.

| >GP: CAA05516 GB: AJ002527 OrfX [Clostridium beijerinckii] | | | |
|---|---|---|---|
| Identities = 90/214 (42%), Positives = 131/214 (61%), Gaps = 1/214 (0%) | | | |
| Query: | 1 | MEFLLDTLNLEAIKKWHHILPLAGVTSNPTIAKKEGDIHFFQRIRDVREIIGREASLHVQ | 60 |
| | | M+ ++D +N+E IK I + GVTSNP+I K G + I+ +RE IG + LHVQ | |
| Sbjct: | 1 | MKLIIDDVNIEKIKDVFSIFQIDGVTSNPSILHKYGKQPYEILIK-IREFIGENSELHVQ | 59 |
| Query: | 61 | VVAKDYQGILDDAAKIRQETDDDIYIKVPVTPDGLAAIKTLKAEGYNITATAIYTSMQGL | 120 |
| | | V+++ +G+L +A KI +E + Y+K+PVT DGL AIK L+ E N+TATAIYT MQ | |
| Sbjct: | 60 | VISESSEGMLKEAHKIIKELGKNTYVKIPVTRDGLKAIKILRKEEINVTATAIYTQMQAY | 119 |
| Query: | 121 | LAISAGADYLAPYFNRMENLDIDATQVIKELAQAIERTGSSSKILAASFKNASQVTKALS | 180 |
| | | LA AGA Y APY NR++NL + QV K++ E+ +++LAASFKN+ QV + | |
| Sbjct: | 120 | LAGKAGAQYAAPYVNRIDNLGANGVQVAKDIHDIFEKNNFKTEVLAASFKNSQQVLELCK | 179 |
| Query: | 181 | QGAQSITAGPDIFESVFAMPSIAKAVNDFADDWK | 214 |
| | | G + T PD+ E + + AV +F D++ | |
| Sbjct: | 180 | YGIGAATISPDVIEGLIKNDCVDVAVENFKKDFE | 213 |

[5596] A related DNA sequence was identified in S. pyogenes <SEQ ID 3073> which encodes the amino acid sequence <SEQ ID 3074>. Analysis of this protein sequence reveals the following:

```
Possible site: 32
>>> Seems to have no N-terminal signal sequence
----- Final Results -----
                            bacterial cytoplasm --- Certainty = 0.1090(Affirmative) < succ>
                              bacterial membrane --- Certainty = 0.0000(Not Clear) < succ>
                                bacterial outside --- Certainty = 0.0000(Not Clear) < succ>
```

[5597] An alignment of the GAS and GBS proteins is shown below.

| Identities = 158/222 (71%), Positives = 194/222 (87%) | | | |
|---|---|---|---|
| Query: | 1 | MEFLLDTLNLEAIKKWHHILPLAGVTSNPTIAKKEGDIHFFQRIRDVREIIGREASLHVQ | 60 |
| | | ME++LDTL+LEAIKKWHHILPLAGVTSNP+IAKKEG+I FF+RIR+VR IIG +AS+HVQ | |
| Sbjct: | 1 | MEYMLDTLDLEAIKKWHHILPLAGVTSNPSIAKKEGEIDFFERIREVRAIIGDKASIHVQ | 60 |
| Query: | 61 | VVAKDYQGILDDAAKIRQETDDDIYIKVPVTPDGLAAIKTLKAEGYNITATAIYTSMQGL | 120 |
| | | V+A+DY+GIL DAA+IR++ D +Y+KVPVT +GLAAIKTLKAEGY+ITATAIYT+ QGL | |
| Sbjct: | 61 | VIAQDYEGILKDAAEIRRQCGDSVYVKVPVTTEGLAAIKTLKAEGYHITATAIYTTFQGL | 120 |
| Query: | 121 | LAISAGADYLAPYFNRMENLDIDATQVIKELAQAIERTGSSSKILAASFKNASQVTKALS | 180 |
| | | LAI AGADYLAPY+NRMENL+ID VI++LA+AI R ++SKILAASFKN +QV K+ + | |
| Sbjct: | 121 | LAIEAGADYLAPYYNRMENLNIDPEAVIEQLAEAINRENANSKILAASFKNVAQVNKSFA | 180 |
| Query: | 181 | QGAQSITAGPDIFESVFAMPSIAKAVNDFADDWKASQHSEHI | 222 |
| | | GAQ+ITAGPD+FE+ FAMPSI KAV+DF DW+A H + I | |
| Sbjct: | 181 | LGAQAITAGPDVFEAGFAMPSIQKAVDDFGKDWEAIHHRKSI | 222 |

[5598] Based on this analysis, it was predicted that these proteins and their epitopes could be useful antigens for vaccines or diagnostics.

### EXAMPLE 1002

[5599] A DNA sequence (GBSx1062) was identified in S. agalactiae <SEQ ID 3075> which encodes the amino acid sequence <SEQ ID 3076>. Analysis of this protein sequence reveals the following:

```
Possible site: 30
>>> Seems to have no N-terminal signal sequence
----- Final Results -----
                            bacterial cytoplasm --- Certainty = 0.3086(Affirmative) < succ>
                              bacterial membrane --- Certainty = 0.0000(Not Clear) < succ>
                                bacterial outside --- Certainty = 0.0000(Not Clear) < succ>
```

[5600] A related GBS nucleic acid sequence <SEQ ID 9545> which encodes amino acid sequence <SEQ ID 9546> was also identified.

[5601] The protein has homology with the following sequences in the GENPEPT database.

| >GP: AAA22477 GB: M65289 glycerol dehydrogenase [Bacillus | | | |
|---|---|---|---|
| stearothermophilus] | | | |
| Identities = 199/362 (54%), Positives = 271/362 (73%), Gaps = 2/362 (0%) | | | |
| Query: | 4 | KVFASPSRYIQGKDALFQSIEHIKSLGQTPLILCDDVVYNIVGERFLSYLQD-DLLPHRV | 62 |
| | | +VF SP++Y+QGK+ + + +++ +G +++ D++V+ I G ++ L+ ++ V | |
| Sbjct: | 5 | RVFISPAKYVQGKNVITKIANYLEGIGNKTVVIADEIVWKIAGHTIVNELKKGNIAAEEV | 64 |
| Query: | 63 | SFNGEASDNEINRVVAVAKEKNSDLIIGLGGGKTIDSAKAIADKVNLPVVIAPTVASTDA | 122 |
| | | F+GEAS NE+ R+ +A++ + ++IG+GGGKT+D+AKA+AD+++ +VI PT ASTDA | |
| Sbjct: | 65 | VFSGEASRNEVERIANIARKAEAAIVIGVGGGKTLDTAKAVADELDAYIVIVPTAASTDA | 124 |
| Query: | 123 | PTSALSVIYTDEGAFEKYIFYSKNPDLVLVDTQVIAQAPKRLLASGIADGLATWVEARAV | 182 |
| | | PTSALSVIY+D+G FE Y FY KNPDLVLVDT++IA AP RLLASGIAD LATWVEAR+V | |
| Sbjct: | 125 | PTSALSVIYSDDGVFESYRFYKKNPDLVLVDTKIIANAPPRLLASGIADALATWVEARSV | 184 |
| Query: | 183 | LQKNGIAMAGGRQTLAGVAIAQACERTLFNDSLQALAACDAKVVTKALENVIEANTLLSG | 242 |
| | | ++ G MAGG T+A AIA+ CE+TLF A + AKVVT ALE V+EANTLLSG | |
| Sbjct: | 185 | IKSGGKTMAGGIPTIAAEAIAEKCEQTLFKYGKLAYESVKAKVVTPALEAVVEANTLLSG | 244 |
| Query: | 243 | LGFESAGLAAAHAIHNGFTALSGDIHHLTHGEKVAYGTLTQLFLENRPKEEIDRYINLYQ | 302 |
| | | LGFES GLAAAHAIHNGFTAL G+IHHLTHGEKVA+GTL QL LE ++EI+RYI LY | |
| Sbjct: | 245 | LGFESGGLAAAHAIHNGFTALEGEIHHLTHGEKVAFGTLVQLALEEHSQQEIERYIELYL | 304 |
| Query: | 303 | AIGMPTTLAELHLGDATYEELLKVGQQATIEGETIHEMPFKISAEDVAAALLTVDRYVSN | 362 |
| | | ++ +P TL ++ L DA+ E++LKV + AT EGETIH F ++A+DVA A+ D+Y | |
| Sbjct: | 305 | SLDLPVTLEDIKLKDASREDILKVAKAATAEGETIHN-AFNVTADDVADAIFAADQYAKA | 363 |
| Query: | 363 | HQ | 364 |
| | | ++ | |
| Sbjct: | 364 | YK | 365 |

[5602] A related DNA sequence was identified in S. pyogenes <SEQ ID 3077> which encodes the amino acid sequence <SEQ ID 3078>. Analysis of this protein sequence reveals the following:

| Possible site: 35 | | | | |
|---|---|---|---|---|
| >>> Seems to have no N-terminal signal sequence | | | | |
| | INTEGRAL | Likelihood = −4.62 | Transmembrane | 101-117 (98-119) |

```
----- Final Results -----
                              bacterial membrane --- Certainty = 0.2848(Affirmative) < succ>
                                bacterial outside --- Certainty = 0.0000(Not Clear) < succ>
                            bacterial cytoplasm --- Certainty = 0.0000(Not Clear) < succ>
```

[5603] The protein has homology with the following sequences in the databases:

| >GP: AAA22477 GB: M65289 glycerol dehydrogenase [Bacillus | | | |
|---|---|---|---|
| stearothermophilus] | | | |
| Identities = 202/357 (56%), Positives = 261/357 (72%), Gaps = 1/357 (0%) | | | |
| Query: | 2 | KVFASPSRYIQGKNALFTNVKTLKQLGDSPILLCDDVVYGIVGERFESYLIDNGMTPVHV | 61 |
| | | +VF SP++Y+QGKN + L+ +G+ +++ D++V+ I G + L + V | |
| Sbjct: | 5 | RVFISPAKYVQGKNVITKIANYLEGIGNKTVVIADEIVWKIAGHTIVNELKKGNIAAEEV | 64 |
| Query: | 62 | AFNGEASDNEISRVVAIAKENGNDVIIGLGGGKTIDSAKAIADLLAVPVIIAPTIASTDA | 121 |
| | | F+GEAS NE+ R+ IA++ ++IG+GGGKT+D+AKA+AD L ++I PT ASTDA | |
| Sbjct: | 65 | VFSGEASRNEVERIANIARKAEAAIVIGVGGGKTLDTAKAVADELDAYIVIVPTAASTDA | 124 |
| Query: | 122 | PTSALSVIYTDEGAFEKYIFYSKNPDLVLVDTQVICQAPKRLLASGIADGLATWVEARAV | 181 |
| | | PTSALSVIY+D+G FE Y FY KNPDLVLVDT++I AP RLLASGIAD LATWVEAR+V | |
| Sbjct: | 125 | PTSALSVIYSDDGVFESYRFYKKNPDLVLVDTKIIANAPPRLLASGIADALATWVEARSV | 184 |
| Query: | 182 | MQKNGDTMAGGNQTLAGVAIAKACEQTLFADGLKAMASCDRQVVTPALENVIEANTLLSG | 241 |
| | | ++ G TMAGG T+A AIA+ CEQTLF G A S +VVTPALE V+EANTLLSG | |
| Sbjct: | 185 | IKSGGKTMAGGIPTIAAEAIAEKCEQTLFKYGKLAYESVKAKVVTPALEAVVEANTLLSG | 244 |
| Query: | 242 | LGFESAGLAAAHAIHNGFTALTGAIHHLTHGEKVAYGTLTQLFLENRSREEIDRYIDFYQ | 301 |
| | | LGFES GLAAAHAIHNGFTAL G IHHLTHGEKVA+GTL QL LE S++EI+RYI+ Y | |
| Sbjct: | 245 | LGFESGGLAAAHAIHNGFTALEGEIHHLTHGEKVAFGTLVQLALEEHSQQEIERYIELYL | 304 |
| Query: | 302 | AIGMPTTLKEMHLDTATQEDFLKIGRQATMAGETIHQMPFVISPEDVAAALVAVDAY | 358 |
| | | ++ +P TL+++ L A++ED LK+ + AT GETIH F ++ +DVA A+ A D Y | |
| Sbjct: | 305 | SLDLPVTLEDIKLKDASREDILKVAKAATAEGETIHN-AFNVTADDVADAIFAADQY | 360 |

[5604] An alignment of the GAS and GBS proteins is shown below.

| Identities = 287/361 (79%), Positives = 325/361 (89%), | | | |
|---|---|---|---|
| Gaps = 1/361 (0%) | | | |
| Query: | 3 | MKVFASPSRYIQGKDALFQSIEHIKSLGQTPLILCDDVVYNIVGERFLSYLQDD-LLPHR | 61 |
| | | MKVFASPSRYIQGK+ALF +++ +K LG +P++LCDDVVY IVGERF SYL D+ + P | |
| Sbjct: | 1 | MKVFASPSRYIQGKNALFTNVKTLKQLGDSPILLCDDVVYGIVGERFESYLIDNGMTPVH | 60 |
| Query: | 62 | VSFNGEASDNEINRVVAVAKEKNSDLIIGLGGGKTIDSAKAIADKVNLPVVIAPTVASTD | 121 |
| | | V+FNGEASDNEI+RVVA+AKE +D+IIGLGGGKTIDSAKAIAD + +PV+IAPT+ASTD | |
| Sbjct: | 61 | VAFNGEASDNEISRVVAIAKENGNDVIIGLGGGKTIDSAKAIADLLAVPVIIAPTIASTD | 120 |
| Query: | 122 | APTSALSVIYTDEGAFEKYIFYSKNPDLVLVDTQVIAQAPKRLLASGIADGLATWVEARA | 181 |
| | | APTSALSVIYTDEGAFEKYIFYSKNPDLVLVDTQVI QAPKRLLASGIADGLATWVEARA | |
| Sbjct: | 121 | APTSALSVIYTDEGAFEKYIFYSKNPDLVLVDTQVICQAPKRLLASGIADGLATWVEARA | 180 |
| Query: | 182 | VLQKNGIAMAGGRQTLAGVAIAQACERTLFNDSLQALAACDAKVVTKALENVIEANTLLS | 241 |
| | | V+QKNG MAGG QTLAGVAIA+ACE+TLF D L+A+A+CD +VVT ALENVIEANTLLS | |
| Sbjct: | 181 | VMQKNGDTMAGGNQTLAGVAIAKACEQTLFADGLKAMASCDRQVVTPALENVIEANTLLS | 240 |
| Query: | 242 | GLGFESAGLAAAHAIHNGFTALSGDIHHLTHGEKVAYGTLTQLFLENRPKEEIDRYINLY | 301 |
| | | GLGFESAGLAAAHAIHNGFTAL+G IHHLTHGEKVAYGTLTQLFLENR +EEIDRYI+ Y | |
| Sbjct: | 241 | GLGFESAGLAAAHAIHNGFTALTGAIHHLTHGEKVAYGTLTQLFLENRSREEIDRYIDFY | 300 |
| Query: | 302 | QAIGMPTTLAELHLGDATYEELLKVGQQATIEGETIHEMPFKISAEDVAAALLTVDRYVSN | 362 |
| | | QAIGMPTTL E+HL AT E+ LK+G+QAT+ GETIH+MPF IS EDVAAAL+ VD YV++ | |
| Sbjct: | 301 | QAIGMPTTLKEMHLDTATQEDFLKIGRQATMAGETIHQMPFVISPEDVAAALVAVDAYVTS | 361 |

[5605] Based on this analysis, it was predicted that these proteins and their epitopes could be useful antigens for vaccines or diagnostics.

### EXAMPLE 1003

[5606] A DNA sequence (GBSx1063) was identified in S. agalactiae <SEQ ID 3079> which encodes the amino acid sequence <SEQ ID 3080>. Analysis of this protein sequence reveals the following:

| Possible site: 28 | | | | |
|---|---|---|---|---|
| >>> Seems to have no N-terminal signal sequence | | | | |
| | INTEGRAL | Likelihood = −0.75 | Transmembrane | 262-278 (262-279) |

```
----- Final Results -----
                              bacterial membrane --- Certainty = 0.1298(Affirmative) < succ>
                                bacterial outside --- Certainty = 0.0000(Not Clear) < succ>
                            bacterial cytoplasm --- Certainty = 0.0000(Not Clear) < succ>
```

[5607] The protein has homology with the following sequences in the GENPEPT database.

| >GP: BAA88310 GB: AB028865 O-acetylserine lyase | | | |
|---|---|---|---|
| [Streptococcus suis] | | | |
| Identities = 239/304 (78%), Positives = 273/304 (89%) | | | |
| Query: | 4 | IYNSITDLIGNTPIIQLHHIVPEGAAEVYVKLESFNPGSSVKDRIALAMIEDAEQKGILK | 63 |
| | | IY +IT L+G TP+I+L++IVPEGAAEVYVKLE+FNPGSSVKDRIALAMIEDAE+ G +K | |
| Sbjct: | 3 | IYQNITQLVGKTPVIKLNNIVPEGAAEVYVKLEAFNPGSSVRDRIALAMIEDAEKAGTIK | 62 |
| Query: | 64 | AGDTIVEPTSGNTGIGLAWVGKAKGYNVIIVMPETMSIERRKIIQAYGAQLVLTPGSEGM | 123 |
| | | GDTIVEPTSGNTGIGLAWVG AKGYNVIIVMPETMS+ERRKIIQAYGA+LVLTPGSEGM | |
| Sbjct: | 63 | PGDTIVEPTSGNTGIGLAWVGAAKGYNVIIVMPETMSVERRKIIQAYGAELVLTPGSEGM | 122 |
| Query: | 124 | KGAIAKAKEISAEQNAWLPLQFNNQANPEIHEKTTGREIIETFGEKGLDAFIAGVGTGGT | 183 |
| | | KGAIAKAKEI+ E+N W+P QF N +NP++HE TTG+EI+E FG GLDAF++GVGTGGT | |
| Sbjct: | 123 | KGAIAKAKEIAEEKNGWVPFQFANPSNPKVHEDTTGQEILEDFGTTGLDAFVSGVGTGGT | 182 |
| Query: | 184 | ITGVSRALKKVNPDVAIYAVEADESAILSGEQPGPHKIQGISAGFIPETLATDSYDHIIR | 243 |
| | | ++GVS LK NPD+AIYAVEADESA+LSGE PGPHKIQGISAGFIP+TL T +YD IIR | |
| Sbjct: | 183 | VSGVSHVLKTANPDIAIYAVEADESAVLSGEAPGPHKIQGISAGFIPDTLDTSAYDGIIR | 242 |
| Query: | 244 | VTSDDAIETGRIIGGLEGFLAGISASAAIYAAIEVAKQLGKGKKVLALLPDNGERYLSTS | 303 |
| | | V SDDA+ TGR IGG EGFL GIS+ AAI+AAIEVAK+LG GKKVLA+LPDNGERYLST+ | |
| Sbjct: | 243 | VKSDDALATGRAIGGKEGFLVGISSGAAIHAAIEVAKELGTGKKVLAILPDNGERYLSTA | 302 |
| Query: | 304 | LYDF | 307 |
| | | LY+F | |
| Sbjct: | 303 | LYEF | 306 |

[5608] A related DNA sequence was identified in S. pyogenes <SEQ ID 3081> which encodes the amino acid sequence <SEQ ID 3082>. Analysis of this protein sequence reveals the following:

| Possible site: 58 | | | | |
|---|---|---|---|---|
| >>> Seems to have no N-terminal signal sequence | | | | |
| | INTEGRAL | Likelihood = −0.48 | Transmembrane | 262-278 (262-278) |

```
----- Final Results -----
                              bacterial membrane --- Certainty = 0.1192(Affirmative) < succ>
                                bacterial outside --- Certainty = 0.0000(Not Clear) < succ>
                            bacterial cytoplasm --- Certainty = 0.0000(Not Clear) < succ>
```

[5609] The protein has homology with the following sequences in the databases:

| >GP: BAA88310 GB: AB028865 O-acetylserine lyase | | | |
|---|---|---|---|
| [Streptococcus suis] | | | |
| Identities = 235/303 (77%), Positives = 261/303 (85%) | | | |
| Query: | 4 | IYKTITELVGQTPIIKLNRLIPNEAADVYVKLEAFNPGSSVKDRIALSMIEAAEAEGLIS | 63 |
| | | IY+ IT+LVG+TP+IKLN ++P AA+VYVKLEAFNPGSSVKDRIAL+MIE AE G I | |
| Sbjct: | 3 | IYQNITQLVGKTPVIKLNNIVPEGAAEVYVKLEAFNPGSSVKDRIALAMIEDAEKAGTIK | 62 |
| Query: | 64 | PGDVIIEPTSGNTGIGLAWVGAAKGYRVIIVMPETMSLERRQIIQAYGAELVLTPGAEGM | 123 |
| | | PGD I+EPTSGNTGIGLAWVGAAKGY VIIVMPETMS+ERR+IIQAYGAELVLTPG+EGM | |
| Sbjct: | 63 | PGDTIVEPTSGNTGIGLAWVGAAKGYNVIIVMPETMSVERRKIIQAYGAELVLTPGSEGM | 122 |
| Query: | 124 | KGAIAKAETLAIELGAWMPMQFNNPANPSIHEKTTAQEILEAFKEISLDAFVSGVGTGGT | 183 |
| | | KGAIAEA+ +A E W+P QF NP+NP +HE TT QEILE F LDAFVSGVGTGGT | |
| Sbjct: | 123 | KGAIAKAKEIAEEKNGWVPFQFANPSNPKVHEDTTGQEILEDFGTTGLDAFVSGVGTGGT | 182 |
| Query: | 184 | LSGVSHVLKKANPETVIYAVEAEESAVLSGQEPGPHKIQGISAGFIPNTLDTKAYDQIIR | 243 |
| | | +SGVSHVLK ANP+ IYAVEA+ESAVLSG+ PGPHKIQGISAGFIP+TLDT AYD IIR | |
| Sbjct: | 183 | VSGVSHVLKTANPDIAIYAVEADESAVLSGEAPGPHKIQGISAGFIPDTLDTSAYDGIIR | 242 |
| Query: | 244 | VKSKDALETARLTGAKEGFLVGISSGAALYAAIEVAKQLGKGKHVLTILPDNGERYLSTE | 303 |
| | | VKS DAL T R G KEGFLVGISSGAA++AAIEVAK+LG GK VL ILPDNGERYLST | |
| Sbjct: | 243 | VKSDDALATGRAIGGKEGFLVGISSGAAIHAAIEVAKELGTGKKVLAILPDNGERYLSTA | 302 |
| Query: | 304 | LYD | 306 |
| | | LY+ | |
| Sbjct: | 303 | LYE | 305 |

[5610] An alignment of the GAS and GBS proteins is shown below.

| Identities = 222/306 (72%), Positives = 263/306 (85%) | | | |
|---|---|---|---|
| Query: | 1 | MSKIYNSITDLIGNTPIIQLHHIVPEGAAEVYVKLESFNPGSSVKDRIALAMIEDAEQKG | 60 |
| | | M+KIY +IT+L+G TPII+L+ ++P AA+VYVKLE+FNPGSSVKDRIAL+MIE AE +G | |
| Sbjct: | 1 | MTKIYKTITELVGQTPIIKLNRLIPNEAADVYVKLEAFNPGSSVKDRIALSMIEAAEAEG | 60 |
| Query: | 61 | ILKAGDTIVEPTSGNTGIGLAWVGKAKGYNVIIVMPETMSIERRKIIQAYGAQLVLTPGS | 120 |
| | | ++ GD I+EPTSGNTGIGLAWVG AKGY VIIVMPETMS+ERR+IIQAYGA+LVLTPG+ | |
| Sbjct: | 61 | LISPGDVIIEPTSGNTGIGLAWVGAAKGYRVIIVMPETMSLERRQIIQAYGAELVLTPGA | 120 |
| Query: | 121 | EGMKGAIAKAKEISAEQNAWLPLQFNNQANPEIHEKTTGREIIETFGEKGLDAFIAGVGT | 180 |
| | | EGMKGAIAKA+ ++E AW+P+QFNN ANP IHEKTT +EI+E F E LDAF++GVGT | |
| Sbjct: | 121 | EGMKGAIAKAETLAIELGAWMPMQFNNPANPSIHEKTTAQEILEAFKEISLDAFVSGVGT | 180 |
| Query: | 181 | GGTITGVSRALKKVNPDVAIYAVEADESAILSGEQPGPHKIQGISAGFIPETLATDSYDH | 240 |
| | | GGT++GVS LKK NP+ IYAVEA+ESA+LSG++PGPHKIQGISAGFIP TL T +YD | |
| Sbjct: | 181 | GGTLSGVSHVLKKANPETVIYAVEAEESAVLSGQEPGPHKIQGISAGFIPNTLDTKAYDQ | 240 |
| Query: | 241 | IIRVTSDDAIETGRIIGGLEGFLAGISASAAIYAAIEVAKQLGKGKKVLALLPDNGERYL | 300 |
| | | IIRV S DA+ET R+ G EGFL GIS+ AA+YAAIEVAKQLGKGK VL +LPDNGERYL | |
| Sbjct: | 241 | IIRVKSKDALETARLTGAKEGFLVGISSGAALYAAIEVAKQLGKGKHVLTILPDNGERYL | 300 |
| Query: | 301 | STSLYD | 306 |
| | | ST LYD | |
| Sbjct: | 301 | STELYD | 306 |

[5611] Based on this analysis, it was predicted that these proteins and their epitopes could be useful antigens for vaccines or diagnostics.

### EXAMPLE 1004

[5612] A DNA sequence (GBSx1064) was identified in S. agalactiae <SEQ ID 3083> which encodes the amino acid sequence <SEQ ID 3084>. Analysis of this protein sequence reveals the following:

```
Possible site: 56
>>> Seems to have no N-terminal signal sequence
----- Final Results -----
                            bacterial cytoplasm --- Certainty = 0.3666(Affirmative) < succ>
                              bacterial membrane --- Certainty = 0.0000(Not Clear) < succ>
                                bacterial outside --- Certainty = 0.0000(Not Clear) < succ>
```

[5613] The protein has homology with the following sequences in the GENPEPT database.

| >GP: BAB07349 GB: AP001519 unknown conserved protein [Bacillus halodurans] | | | |
|---|---|---|---|
| Identities = 96/204 (47%), Positives = 127/204 (62%) | | | |
| Query: | 2 | NYKTIKSDGIVEEEIKKSRFICHLKRVESEEEGRNYITQIKKAHYKANHSCSAMVIGEKG | 61 |
| | | +Y T+K GI E I+KSRFI HL R SEEE +I QIKK H+ A H+CSA +IGE | |
| Sbjct: | 4 | SYYTVKESGIHEISIQKSRFIAHLSRATSEEEAIQFIEQIKKEHWNATHNCSAYLIGEND | 63 |
| Query: | 62 | DIKRSSDDGEPSGTAGIPMLTVLEKQGLTNVVAVVTRYFGGIKLGAGGLIRAYSGSVANT | 121 |
| | | +++++DDGEPSGTAG+PML VL+K+ L + VAVVTRYFGG+KLGAGGLIRAY +V++ | |
| Sbjct: | 64 | QVQKANDDGEPSGTAGVPMLEVLKKRRLKDTVAVVTRYFGGVKLGAGGLIRAYGSAVSDG | 123 |
| Query: | 122 | IKEIGVVEVKEQIGIRIQLTYPQYQTFDNFLKEHHLQEFETEFLEAVTCKIYVDPKEFEH | 181 |
| | | + IGVVE K I + Y +N L++ H E +LE V + YV E E | |
| Sbjct: | 124 | LNAIGVVERKRMQVIHTSIDYHWLGKVENELRQSHYLLKEISYLENVDVQTYVLEAEVES | 183 |
| Query: | 182 | TITNLTEFYQGKALLTEEGSQIVE | 205 |
| | | +T G+A T + +E | |
| Sbjct: | 184 | YCEWMTNLTNGQAAFTHGAIEYLE | 207 |

[5614] A related DNA sequence was identified in S. pyogenes <SEQ ID 3085> which encodes the amino acid sequence <SEQ ID 3086>. Analysis of this protein sequence reveals the following:

| Possible site: 36 | | | | |
|---|---|---|---|---|
| >>> Seems to have no N-terminal signal sequence | | | | |
| | INTEGRAL | Likelihood = −0.43 | Transmembrane | 86-102 (86-102) |

```
----- Final Results -----
                              bacterial membrane --- Certainty = 0.1171(Affirmative) < succ>
                                bacterial outside --- Certainty = 0.0000(Not Clear) < succ>
                            bacterial cytoplasm --- Certainty = 0.0000(Not Clear) < succ>
```

[5615] A related sequence was also identified in GAS <SEQ ID 9153> which encodes the amino acid sequence <SEQ ID 9154>. Analysis of this protein sequence reveals the following:

| Possible site: 31 | | | | |
|---|---|---|---|---|
| >>> Seems to have no N-terminal signal sequence | | | | |
| | INTEGRAL | Likelihood = −0.43 | Transmembrane | 81-97 (81-97) |

```
----- Final Results -----
                              bacterial membrane --- Certainty = 0.1171(Affirmative) < succ>
                                bacterial outside --- Certainty = 0.0000(Not Clear) < succ>
                            bacterial cytoplasm --- Certainty = 0.0000(Not Clear) < succ>
```

[5616] An alignment of the GAS and GBS proteins is shown below.

| Identities = 122/206 (59%), Positives = 153/206 (74%) | | | |
|---|---|---|---|
| Query: | 2 | NYKTIKSDGIVEEEIKKSRFICHLKRVESEEEGRNYITQIKKAHYKANHSCSAMVIGEKG | 61 |
| | | ++KTIK+ G EE IKKSRFICH+KRV +EE+G+N++ IKK HYKANHSC AM+IG | |
| Sbjct: | 8 | HFKTIKASGFFEESIKKSRFICHIKRVSTEEDGKNFVNAIKKEHYKANHSCFAMIIGNNR | 67 |
| Query: | 62 | DIKRSSDDGEPSGTAGIPMLTVLEKQGLTNVVAVVTRYFGGIKLGAGGLIRAYSGSVANT | 121 |
| | | IKRSSDDGEPSGTAGIP+L+VLEKQ LTNVV VVTRYFGGIKLG GGLIRAYS A | |
| Sbjct: | 68 | QIKRSSDDGEPSGTAGIPILSVLEKQCLTNVVVVVTRYFGGIKLGTGGLIRAYSNMTATA | 127 |
| Query: | 122 | IKEIGVVEVKEQIGIRIQLTYPQYQTFDNFLKEHHLQEFETEFLEAVTCKIYVDPKEFEH | 181 |
| | | IK G++EVK+QIG+ I L+YPQYQ + N L + L E ET+F + + +Y D + E+ | |
| Sbjct: | 128 | IKRFGIIEVKQQIGLEITLSYPQYQLYSNLLDQLALTETETKFSDTIKTTLYCDTERVEN | 187 |
| Query: | 182 | TITNLTEFYQGKALLTEEGSQIVEIP | 207 |
| | | I LT +Y G+ + GS+++E P | |
| Sbjct: | 188 | LIDTLTNYYHGQISCEKIGSKVIEFP | 213 |

[5617] Based on this analysis, it was predicted that these proteins and their epitopes could be useful antigens for vaccines or diagnostics.

### EXAMPLE 1005

[5618] A DNA sequence (GBSx1065) was identified in S. agalactiae <SEQ ID 3087> which encodes the amino acid sequence <SEQ ID 3088>. Analysis of this protein sequence reveals the following:

```
Possible site: 45
>>> Seems to have no N-terminal signal sequence
----- Final Results -----
                            bacterial cytoplasm --- Certainty = 0.1421(Affirmative) < succ>
                              bacterial membrane --- Certainty = 0.0000(Not Clear) < succ>
                                bacterial outside --- Certainty = 0.0000(Not Clear) < succ>
```

[5619] The protein has homology with the following sequences in the GENPEPT database.

| >GP: AAC44940 GB: U56901 involved in transformation [Bacillus subtilis] | | | |
|---|---|---|---|
| Identities = 160/405 (39%), Positives = 228/405 (55%), Gaps = 20/405 (4%) | | | |
| Query: | 35 | YICTRCSSSVAKNCQL----PTGNYYCRECIVFGRVTSNENLYYFPQKTFSKTNSLK--W | 88 |
| | | Y C RC + + YCR C++ GRV+ LY + ++ S S+K W | |
| Sbjct: | 58 | YRCNRCGQTDQRYFSFYHSSGKNKLYCRSCVMMGRVSEEVPLYSWKEENESNWKSIKLTW | 117 |
| Query: | 89 | KGELTPYQNEVSEELLKGISSKENLLVHAVTGAGKTEMIYHSVAKVIDTGGSVCIASPRI | 148 |
| | | G+L+ Q + + L++ IS KE LL+ AV GAGKTEM++ + ++ G VCIA+PR | |
| Sbjct: | 118 | DGKLSSGQQKAANVLIEAISKKEELLIWAVCGAGKTEMLFPGIESALNQGLRVCIATPRT | 177 |
| Query: | 149 | DVCLELYKRLSNDFRCA-ITLMHGESPSYQR-SPLTIATTHQLLKFYHAFDLLIVDEVDA | 206 |
| | | DV LEL RL F+ A I+ ++G S R SPL I+TTHQLL++ A D++I+DEVDA | |
| Sbjct: | 178 | DVVLELAPRLKAAFQGADISALYGGSDDKGRLSPLMISTTHQLLRYKDAIDVMIIDEVDA | 237 |
| Query: | 207 | FPYVDNPILYQGVKQALKENGTSIFLTATSTTELERKVARKELKKLHLARRFHANPLVIP | 266 |
| | | FPY + L V++A K+N T ++L+AT EL+RK +L + + R H PL P | |
| Sbjct: | 238 | FPYSADQTLQFAVQKARKKNSTLVYLSATPPKELKRKALHGQLHSVRIPARHHRKPLPEP | 297 |
| Query: | 267 | EMVWVSGIQKSLQTQKLPPKLYQLINKQRQTRYPLLLFFPHISEGQVFTEILRQAFPMEK | 326 |
| | | VW +K L K+PP + + I + P+ LF P +S IL +A K | |
| Sbjct: | 298 | RFVWCGNWKKKLNRNKIPPAVKRWIEFHVKEGRPVFLFVPSVS-------ILEKAAACFK | 350 |
| Query: | 327 | -----IGFVSSKSTSRLKLVQDFRDNKLSILVSTTILERGVTFPSVDVFVIQANHHLFTK | 381 |
| | | V ++ R + VQ FRD +L +L++TTILERGVT P V V+ A +FT+ | |
| Sbjct: | 351 | GVHCRTASVHAEDKHRKEKVQQFRDGQLDLLITTTILERGVTVPKVQTGVLGAESSIFTE | 410 |
| Query: | 382 | SSLVQISGRVGRALERPEGLLYFLHDGKSKSMHQAIKEIKNMNHI | 426 |
| | | S+LVQI+GR GR E +G + + H GK+KSM A K IK MN + | |
| Sbjct: | 411 | SALVQIAGRTGRHKEYADGDVIYFHFGKTKSMLDARKHIKEMNEL | 455 |

[5620] A related DNA sequence was identified in S. pyogenes <SEQ ID 3089> which encodes the amino acid sequence <SEQ ID 3090>. Analysis of this protein sequence reveals the following:

| Possible site: 21 | | | | |
|---|---|---|---|---|
| >>> Seems to have no N-terminal signal sequence. | | | | |
| | INTEGRAL | Likelihood = −4.09 | Transmembrane | 304-320 (303-322) |

```
----- Final Results -----
                              bacterial membrane --- Certainty = 0.2635(Affirmative) < succ>
                                bacterial outside --- Certainty = 0.0000(Not Clear) < succ>
                            bacterial cytoplasm --- Certainty = 0.0000(Not Clear) < succ>
```

[5621] The protein has homology with the following sequences in the databases:

| !GB: U56901 involved in transformation [Bacillus subt . . . 258 1e−67 | | | |
|---|---|---|---|
| >GP: AAC44940 GB: U56901 involved in transformation [Bacillus subtilis] | | | |
| Identities = 155/435 (35%), Positives = 249/435 (56%), Gaps = 20/435 (4%) | | | |
| Query: | 10 | RLLLESQLPDSAKQLAQPLK--------SVVILRGKMICQRCHYQLDEEA-----RLPSG | 56 |
| | | R LL ++L S + + +K S+ I + + C RC Q D+ | |
| Sbjct: | 22 | RHLLRTELSFSDEMIEWHIKNGYITAENSISINKRRYRCNRCG-QTDQRYFSFYHSSGKN | 80 |
| Query: | 57 | AYYCRFCLVFGRNQSDKLLYAIPPMHFP--KGNYLVWGGQLTAYQEMISQQLLINMQNQK | 114 |
| | | YCR C++ GR + LY+ + K L W G+L++ Q+ + L+ + ++ | |
| Sbjct: | 81 | KLYCRSCVMMGRVSEEVPLYSWKEENESNWKSIKLTWDGKLSSGQQKAANVLIEAISKKE | 140 |
| Query: | 115 | TTLVHAVTGAGKTEMIYAAIEAVINTGGWVCIASPRVDVCVEVATRLSQAFS-CSICLMH | 173 |
| | | L+ AV GAGKTEM++ IE+ +N G VCIA+PR DV +E+A RL AF I ++ | |
| Sbjct: | 141 | ELLIWAVCGAGKTEMLFPGIESALNQGLRVCIATPRTDVVLELAPRLKAAFQGADISALY | 200 |
| Query: | 174 | AESLPYQR-APIIVATTHQLLKFHKAFDLLIIDEVDAFPFVNNIQLHYAASQALKEGGAK | 232 |
| | | S R +P++++TTHQLL++ A D++IIDEVDAFP+ + L +A +A K+ | |
| Sbjct: | 201 | GGSDDKGRLSPLMISTTHQLLRYKDAIDVMIIDEVDAFPYSADQTLQFAVQKARKKNSTL | 260 |
| Query: | 233 | ILLTATSTRTLERKVNKGEVVKLTLARRFHNRPLVIPKFIRSFNLFKMIHRQKLPLKILK | 292 |
| | | + L+AT + L+RK G++ + + R H +PL P+F+ N K ++R K+P + + | |
| Sbjct: | 261 | VYLSATPPKELKRKALNGQLHSVRIPARHHRKPLPEPRFVWCGNWKKKLNRNKIPPAVKR | 320 |
| Query: | 293 | YLKKQRKTGYPLLIFLPTIIMAESVTAILKELLPAEQIACVSSQSQNRKEDITAFRQGKK | 352 |
| | | +++ K G P+ +F+P++ + E A K + + A V ++ ++RKE + FR G+ | |
| Sbjct: | 321 | WIEFHVKEGRPVFLFVPSVSILEKAAACFKGV--HCRTASVHAEDKHRKEKVQQFRDGQL | 378 |
| Query: | 353 | TILITTSILERGVTFPQIDVFVLGSHHRVYSSQSLVQIAGRVGRSIDRPDGTLYFFHEGI | 412 |
| | | +LITT+ILERGVT P++ VLG+ +++ +LVQIAGR GR + DG + +FH G | |
| Sbjct: | 379 | DLLITTTILERGVTVPKVQTGVLGAESSIFTESALVQIAGRTGRHKEYADGDVIYFHFGK | 438 |
| Query: | 413 | SKAMLLARKEIKEMN | 427 |
| | | +K+ML ARK IKEMN | |
| Sbjct: | 439 | TKSMLDARKHIKEMN | 453 |

[5622] An alignment of the GAS and GBS proteins is shown below.

| Identities = 223/427 (52%), Positives = 299/427 (69%) | | | |
|---|---|---|---|
| Query: | 1 | MENYLGRLWTKAQLSEQLRKIAISLPSFIKKGSDYICTRCSSSVAKNCQLPTGNYYCREC | 60 |
| | | +EN GRL ++QL + +++A L S + IC RC + + +LP+G YYCR C | |
| Sbjct: | 4 | IENSYGRLLLESQLPDSAKQLAQPLKSVVILRGKMICQRCHYQLDEEARLPSGAYYCRFC | 63 |
| Query: | 61 | IVFGRVTSNENLYYFPQKTFSKTNSLKWKGELTPYQNEVSEELLKGISSKENLLVHAVTG | 120 |
| | | +VFGR S++ LY P F K N L W G+LT YQ +S++LL + +++ LVHAVTG | |
| Sbjct: | 64 | LVFGRNQSDKLLYAIPPMHFPKGNYLVWGGQLTAYQEMISQQLLINMQNQKTTLVHAVTG | 123 |
| Query: | 121 | AGKTEMIYHSVAKVIDTGGSVCIASPRIDVCLELYKRLSNDFRCAITLMHGESPSYQRSP | 180 |
| | | AGKTEMIY ++ VI+TGG VCIASPR+DVC+E+ RLS F C+I LMH ES YQR+P | |
| Sbjct: | 124 | AGKTEMIYAAIEAVINTGGWVCIASPRVDVCVEVATRLSQAFSCSICLMHAESLPYQRAP | 183 |
| Query: | 181 | LTIATTHQLLKFYHAFDLLIVDEVDAFPYVDNPILYQGVKQALKENGTSIFLTATSTTEL | 240 |
| | | + +ATTHQLLKF+ AFDLLI+DEVDAFP+V+N L+ QALKE G I LTATST L | |
| Sbjct: | 184 | IIVATTHQLLKFHKAFDLLIIDEVDAFPFVNNIQLHYAASQALKEGGAKILLTATSTRTL | 243 |
| Query: | 241 | ERKVARKELKKLHLARRFHANPLVIPEMVWVSGIQKSLQTQKLPPKLYQLINKQRQTRYP | 300 |
| | | ERKV + E+ KL LARRFH PLVIP+ + + K + QKLP K+ + + KQR+T YP | |
| Sbjct: | 244 | ERKVNKGEVVKLTLARRFHNRPLVIPKFIRSFNLFKMIHRQKLPLKILKYLKKQRKTGYP | 303 |
| Query: | 301 | LLLFFPHISEGQVFTEILRQAFPMEKIGFVSSKSTSRLKLVQDFRDNKLSILVSTTILER | 360 |
| | | LL+F P I + T IL++ P E+I VSS+S +R + + FR K +IL++T+ILER | |
| Sbjct: | 304 | LLIFLPTIIMAESVTAILKELLPAEQIACVSSQSQNRKEDITAFRQGKKTILITTSILER | 363 |
| Query: | 361 | GVTFPSVDVFVIQANHHLFTKSSLVQISGRVGRALERPEGLLYFLHDGKSKSMHQAIKEI | 420 |
| | | GVTFP +DVFV+ ++H +++ SLVQI+GRVGR+++RP+G LYF H+G SK+M A KEI | |
| Sbjct: | 364 | GVTFPQIDVFVLGSHHRVYSSQSLVQIAGRVGRSIDRPDGTLYFFHEGISKAMLLARKEI | 423 |
| Query: | 421 | KNMNHIG | 427 |
| | | K MN+ G | |
| Sbjct: | 424 | KEMNYKG | 430 |

[5623] Based on this analysis, it was predicted that these proteins and their epitopes could be useful antigens for vaccines or diagnostics.

### EXAMPLE 1006

[5624] A DNA sequence (GBSx1066) was identified in S. agalactiae <SEQ ID 3091> which encodes the amino acid sequence <SEQ ID 3092>. This protein is predicted to be comf operon protein 3 (comFC). Analysis of this protein sequence reveals the following:

```
Possible site: 41
>>> Seems to have no N-terminal signal sequence
----- Final Results -----
                            bacterial cytoplasm --- Certainty = 0.0894(Affirmative) < succ>
                              bacterial membrane --- Certainty = 0.0000(Not Clear) < succ>
                                bacterial outside --- Certainty = 0.0000(Not Clear) < succ>
```

[5625] The protein has homology with the following sequences in the GENPEPT database.

| >GP: AAC44942 GB: U56901 involved in transformation [Bacillus subtilis] | | | |
|---|---|---|---|
| Identities = 76/230 (33%), Positives = 118/230 (51%), Gaps = 11/230 (4%) | | | |
| Query: | 1 | MTCLLCHEIDLSQLTFVEUMLLKPKQNVICQTCKGSFEALSREMGCQTCCK-QIPQKQCQ | 59 |
| | | M CLLC +T+ L LLKP +V C +C+ + ++ + C C + Q C+ | |
| Sbjct: | 1 | MICLLCDSQFSQDVTWRALFLLKPDEKV-CYSCRSKLKKITGHI-CPLCGRPQSVHAVCR | 58 |
| Query: | 60 | DCIYWGKKGIEV----NHFSLYRYNEAMKKNFSLFKFQGDYLLKDVFTKEIKAALKKY-- | 113 |
| | | DC W + + + S+Y YN+ MK+ S FKF+GD + + F + + K | |
| Sbjct: | 59 | DCEVWRTRIRDSLLLRQNRSVYTYNDMMKETLSRFKFRGDAEIINAFKSDFSSTFSKVYP | 118 |
| Query: | 114 | -KGYTIVPVPLSHEGYQNRQFNQVIAFLQSANIPYKNILSKKDGGKQSANNKEERLKQVQ | 172 |
| | | K + +VP+PLS E +R FNQ + + P + L + + KQS K ERL | |
| Sbjct: | 119 | DKHFVLVPIPLSKEREEERGFNQAHLLAECLDRPSHHPLIRLNNEKQSKKKKTERLLSEC | 178 |
| Query: | 173 | QFTLKNEAELGDNLLIVDDIYTTGATIAQIRKLLEEKG-IKNIKSFSLAR | 221 |
| | | F KN + G N++++DD+YTTGAT+ + L EKG ++ SF+L R | |
| Sbjct: | 179 | IFDTKNNSAEGMNIILIDDLYTTGATLHFAARCLLEKGKAASVSSFTLIR | 228 |

[5626] A related DNA sequence was identified in S. pyogenes <SEQ ID 3093> which encodes the amino acid sequence <SEQ ID 3094>. Analysis of this protein sequence reveals the following:

```
Possible site: 52
>>> Seems to have no N-terminal signal sequence
----- Final Results -----
                            bacterial cytoplasm --- Certainty = 0.0763(Affirmative) < succ>
                              bacterial membrane --- Certainty = 0.0000(Not Clear) < succ>
                                bacterial outside --- Certainty 0.0000(Not Clear) < succ>
```

[5627] An alignment of the GAS and GBS proteins is shown below.

| Identities = 100/222 (45%), Positives = 139/222 (62%), Gaps = 2/222 (0%) | | | |
|---|---|---|---|
| Query: | 1 | MTCLLCHEIDLSQLTFVELMLLKPKQNVICQTCKGSFEALSREMGCQTCCKQIPQKQCQD | 60 |
| | | M CLLC +I + ++ E++ L+ + ICQ C+ SF+ + + + C TCC C+D | |
| Sbjct: | 1 | MICLLCQQISQTPISITEIIFLRRISSPICQQCQKSFQKIGKSV-CATCCANSDIIACRD | 59 |
| Query: | 61 | CIYWGKKGIEVNHFSLYRYNEAMKKNFSLFKFQGDYLLKDVFTKEIKAALKKY-KGYTIV | 119 |
| | | C+ W KG VNH SLY YN AMK FS +KFQGDYLL+ VF E+ + KY KGY V | |
| Sbjct: | 60 | CLKWENKGYNVNHRSLYCYNAAMKAYFSQYKFQGDYLLRKVFAVELADVITKYYKGYIPV | 119 |
| Query: | 120 | PVPLSHEGYQNRQFNQVIAFLQSANIPYKNILSKKDGGKQSANNKEERLKQVQQFTLKNE | 179 |
| | | PVP+S ++ RQFNQV A L++AN+ Y ++ K D QS+ K+ERL + +L | |
| Sbjct: | 120 | PVPVSPGCFRERQFNQVSAILEAANVSYLSLFEKLDNTHQSSRTKKERLLVEKSYRLLKV | 179 |
| Query: | 180 | AELGDNLLIVDDIYTTGATIAQIRKLLEEKGIKNIKSFSLAR | 221 |
| | | + + D +LIVDDIYTTG+TI +RK L + +IKS S+AR | |
| Sbjct: | 180 | SNIPDKILIVDDIYTTGSTIIALRKQLAKVANSDIKSLSIAR | 221 |

[5628] Based on this analysis, it was predicted that these proteins and their epitopes could be useful antigens for vaccines or diagnostics.

### EXAMPLE 1007

[5629] A DNA sequence (GBSx1067) was identified in S. agalactiae <SEQ ID 3095> which encodes the amino acid sequence <SEQ ID 3096>. Analysis of this protein sequence reveals the following:

```
Possible site: 16
>>> Seems to have no N-terminal signal sequence
----- Final Results -----
                            bacterial cytoplasm --- Certainty = 0.3889(Affirmative) < succ>
                              bacterial membrane --- Certainty = 0.0000(Not Clear) < succ>
                                bacterial outside --- Certainty = 0.0000(Not Clear) < succ>
```

[5630] The protein has homology with the following sequences in the GENPEPT database.

| >GP: CAB91549 GB: AJ249134 hypothetical protein [Lactococcus lactis] | | | |
|---|---|---|---|
| Identities = 107/185 (57%), Positives = 140/185 (74%), Gaps = 3/185 (1%) | | | |
| Query: | 1 | MIKYSIRGENIEVTEAIREYVETKLSKVEKYFNEAQELDTRVNLKVYREKTAKVEVTILI | 60 |
| | | MIK++IRGEN+EVT+AIR YVE K+ K++KYFN+ E+ VNLKVY EK AKVEVT+ | |
| Sbjct: | 1 | MIKFNIRGENVEVTDAIRAYVEDKIGKLDKYFNDGHEVTAYVNLKVYTEKRAKVEVTLPA | 60 |
| Query: | 61 | DSITLRAEDVSQDMYGSIDLVVDKIERQIRKNKTKIAKKYREKIPASQVFTTEFEAEPDE | 120 |
| | | ++TLRAED SQDMY SID V +K+ERQIRK KT++ +K R +P QVF EF | |
| Sbjct: | 61 | KNVTLRAEDTSQDMYSSIDFVEEKLERQIRKYKTRMNRKPRNAVPTGQVFGDEFAPLDTT | 120 |
| Query: | 121 | EAVSQ---RIVRTKNVNLKPMDVEEALLQMELLGHDFFIYTDAEDNTTNVLYKREDGELG | 177 |
| | | + V++ IVRTK+V LKPMD EEA+LQM++LGHDF+++TDA+ N T+V+Y+R DG G | |
| Sbjct: | 121 | DEVAEDHVDIVRTKHVALKPMDAEEAVLQMDMLGHDFYVFTDADSNGTHVVYRRTDGRYG | 180 |
| Query: | 178 | LIEAK | 182 |
| | | LIE + | |
| Sbjct: | 181 | LIETE | 185 |

[5631] A related DNA sequence was identified in S. pyogenes <SEQ ID 3097> which encodes the amino acid sequence <SEQ ID 3098>. Analysis of this protein sequence reveals the following:

```
Possible site: 16
>>> Seems to have no N-terminal signal sequence
----- Final Results -----
                            bacterial cytoplasm --- Certainty = 0.3751(Affirmative) < succ>
                              bacterial membrane --- Certainty = 0.0000(Not Clear) < succ>
                                bacterial outside --- Certainty = 0.0000(Not Clear) < succ>
```

[5632] An alignment of the GAS and GBS proteins is shown below.

| Identities = 145/182 (79%), Positives = 165/182 (89%) | | | |
|---|---|---|---|
| Query: | 1 | MIKYSIRGENIEVTEAIREYVETKLSKVEKYFNEAQELDTRVNLKVYREKTAKVEVTILI | 60 |
| | | MIK+SIRGENIEVTEAIR+YVE+KL+K+EKYF + QE+D RVNLKVYRE+++KVEVTI + | |
| Sbjct: | 1 | MIKFSIRGENIEVTEAIRDYVESKLTKIEKYFAKDQEIDARVNLKVYRERSSKVEVTIPL | 60 |
| Query: | 61 | DSITLRAEDVSQDMYGSIDLVVDKIERQIRKNKTKIAKKYREKIPASQVFTTEFEAEPDE | 20 |
| | | DS+TLRAEDVSQDMYGSIDLVVDKIERQIRKNKTKIAKK+REK+P QVFTTEFEAE + | |
| Sbjct: | 61 | DSVTLRAEDVSQDMYGSIDLVVDKIERQIRKNKTKIAKKHREKVPTGQVFTTEFEAEEVD | 120 |
| Query: | 121 | EAVSQRIVRTKNVNLKPMDVEEALLQMELLGHDFFIYTDAEDNTTNVLYKREDGELGLIE | 180 |
| | | E ++VRTKNV LKPMDVEEA LQMELLGHDFFIYTD+ED TN+LY+REDG LGLIE | |
| Sbjct: | 121 | EIPEVQVVRTKNVTLKPMDVEEARLQMELLGHDFFIYTDSEDGATNILYRREDGNLGLIE | 180 |
| Query: | 181 | AK | 182 |
| | | AK | |
| Sbjct: | 181 | AK | 182 |

[5633] Based on this analysis, it was predicted that these proteins and their epitopes could be useful antigens for vaccines or diagnostics.

### EXAMPLE 1008

[5634] A DNA sequence (GBSx1068) was identified in S. agalactiae <SEQ ID 3099> which encodes the amino acid sequence <SEQ ID 3100>. Analysis of this protein sequence reveals the following:

```
Possible site: 16
>>> Seems to have no N-terminal signal sequence
----- Final Results -----
                            bacterial cytoplasm --- Certainty = 0.0685(Affirmative) < succ>
                              bacterial membrane --- Certainty = 0.0000(Not Clear) < succ>
                                bacterial outside --- Certainty = 0.0000(Not Clear) < succ>
```

[5635] The protein has no significant homology with any sequences in the GENPEPT database.

[5636] No corresponding DNA sequence was identified in S. pyogenes.

[5637] Based on this analysis, it was predicted that this protein and its epitopes, could be useful antigens for vaccines or diagnostics.

### EXAMPLE 1009

[5638] A DNA sequence (GBSx1077) was identified in S. agalactiae <SEQ ID 3101> which encodes the amino acid sequence <SEQ ID 3102> (sgaT). Analysis of this protein sequence reveals the following:

| Possible site: 41 | | | | |
|---|---|---|---|---|
| >>> Seems to have a cleavable N-term signal seq. | | | | |
| | INTEGRAL | Likelihood = −5.95 | Transmembrane | 99-115 (87-115) |
| | INTEGRAL | Likelihood = −3.50 | Transmembrane | 43-59 (42-60) |

```
----- Final Results -----
                              bacterial membrane --- Certainty = 0.3378(Affirmative) < succ>
                                bacterial outside --- Certainty = 0.0000(Not Clear) < succ>
                            bacterial cytoplasm --- Certainty = 0.0000(Not Clear) < succ>
```

[5639] The protein has homology with the following sequences in the GENPEPT database.

```
>GP:BAB03942 GB:AP001507 unknown conserved protein [Bacillus halodurans]
  Identities 47/111 (42%), Positives = 76/111
  (68%), Gaps = 5/111 (4%)
```

| | | | |
|---|---|---|---|
| Query: | 1 | MAIIYLIVAVFAG--EAYIAKEI---SNGVNGLVYALQLAGQFAAGVFVILAGVRLILGE | 55 |
| | | M I++L+A+ + A+E+ S + +YA+ +FA G+ V+L GV++ +GE | |
| Sbjct: | 233 | MGILFLVGAIILALKDTQGAQELIAQSGEQSFFIYAIIQSFMFAGGIAVVLLGVKMFIGE | 292 |
| Query: | 56 | IVPAFKGISEKLVPNSKPALDCPIVYPYAPNAVLIGFISKFVGGLVSMIVM | 106 |
| | | +VPAF GI+ KLVP ++PALD P+V+P APNAV++GF+ FVG L+ ++V+ | |
| Sbjct: | 293 | VVPAFNGIATKLVPGARPALDAPVVFPMAPNAVILGFLGAFVGALIWLVVI | 343 |

[5640] There is also homology to SEQ ID 516.

[5641] Based on this analysis, it was predicted that this protein and its epitopes, could be useful antigens for vaccines or diagnostics.

### EXAMPLE 1010

[5642] A DNA sequence (GBSx1078) was identified in S. agalactiae <SEQ ID 3103> which encodes the amino acid sequence <SEQ ID 3104>. This protein is predicted to be tryptophanyl-tRNA synthetase (trpS). Analysis of this protein sequence reveals the following:

```
Possible site: 50
>>> Seems to have no N-terminal signal sequence
----- Final Results -----
    bacterial cytoplasm --- Certainty = 0.2156 (Affirmative) < succ>
      bacterial membrane --- Certainty = 0.0000 (Not Clear) < succ>
        bacterial outside --- Certainty = 0.0000 (Not Clear) < succ>
```

[5643] The protein has homology with the following sequences in the GENPEPT database.

>GP:AAC05711 GB:L49336 tryptophanyl-tRNA synthetase [Clostridium longisporum]
Identities = 225/340 (66%), Positives = 271/340 (79%), GapS = 3/340 (0%)

| | | | |
|---|---|---|---|
| Query: | 1 | MTKPIILTGDRPTGKLHIGHYVGSLKNRVLLQNEGSYTLFVFLADQQALTDHAKDPQTIV | 60 |
| | | M K IILTGDRPTGKLHIGHYVGSLKNRV LQN G Y F+ +ADQQALTD+A++P+ I | |
| Sbjct: | 1 | MAKEIILTGDRPTGKLHIGHYVGSLKNRVQLQNSGDYRSFIMIADQQALTDNARNPEKIR | 60 |
| Query: | 61 | ESIGNVALDYLAVGLDPNKSTLFIQSQIPELAELSMYYMNLVSLARLERNPTVKTEIAQK | 120 |
| | | S+ VALDYLAVG+DP KST+ +QSQIPEL EL+M+Y+NLV+L+RLERNPTVK EI QK | |
| Sbjct: | 61 | NSLIEVALDYLAVGIDPLKSTILVQSQIPELNELTMHYLNLVTLSRLERNPTVKAEIKQK | 120 |
| Query: | 121 | GFGESIPAGFLVYPVAQAADITAFKANLVPVGTDQKPMIEQTREIVRSFNHAYNCQVLVE | 180 |
| | | F SIPAGFL+YPV+QAADITAFKA VPVG DQ PMIEQ REIVRSFN Y +VLVE | |
| Sbjct: | 121 | NFENSIPAGFLIYPVSQAADITAFKATTVPVGEDQLPMIEQAREIVRSFNTIYGKEVLVE | 180 |
| Query: | 181 | PEGIYPENDAAGRLPGLDGNAKMSKSLNNGIFLADDMDTVKKKVMSMYTDPNHIKVEEPG | 240 |
| | | P+ + P+ GRLPG DG AKMSKS+ N I+LAD+ D +K+KVMSMYTDPNHIKV +PG | |
| Sbjct: | 181 | PKAVIPKG-TIGRLPGTDGKAKMSKSIGNAIYLADEADVIKQKVNSMYTDPNHIKVTDPG | 239 |
| Query: | 241 | QIEGNMVFHYLDVFGRDEDQKEITAMKEHYQKGGLGDVKTKRYLLDILERELSPIRERRL | 300 |
| | | Q+EGN VF YLD F +D + E MK HY +GGLGDVK K++L +IL+ EL PIR RR | |
| Sbjct: | 240 | QVEGNTVFTYLDTFCKDTETLE--EMKAHYSRGGLGDVKVKKFLNEILQAELEPIRNRRK | 297 |
| Query: | 301 | EYAKDMGQVYQMLQKGSEKAQAVAASTLDEVKSAMGLNYF | 340 |
| | | E+ KD+ +VY++L++GSEKA+ VAA TL EV+ +G+ YF | |
| Sbjct: | 298 | EFQKDIPEVYRILKEGSEKAREVAAGTLKEVRETIGIEYF | 337 |

[5644] A related DNA sequence was identified in S. pyogenes <SEQ ID 3105> which encodes the amino acid sequence <SEQ ID 3106>. Analysis of this protein sequence reveals the following:

```
Possible site: 54
>>> Seems to have no N-terminal signal sequence
----- Final Results -----
                            bacterial cytoplasm --- Certainty = 0.2737(Affirmative) < succ>
                              bacterial membrane --- Certainty = 0.0000(Not Clear) < succ>
                                bacterial outside --- Certainty = 0.0000(Not Clear) < succ>
```

[5645] An alignment of the GAS and GBS proteins is shown below.

| Identities = 290/340 (85%), Positives = 316/340 (92%) | | | |
|---|---|---|---|
| Query: | 1 | MTKPIILTGDRPTGKLHIGHYVGSLKNRVLLQNEGSYTLFVFLADQQALTDHAKDPQTIV | 60 |
| | | MTKPIILTGDRPTGKLH+GHYVGSLKNRV LQNE Y +FVFLADQQALTDHAK+ + I | |
| Sbjct: | 2 | MTKPIILTGDRPTGKLHLGHYVGSLKNRVFLQNENKYKMFVFLADQQALTDHAKESELIQ | 61 |
| Query: | 61 | ESIGNVALDYLAVGLDPNKSTLFIQSQIPELAELSMYYMNLVSLARLERNPTVKTEIAQK | 120 |
| | | ESIGNVALDYL+VGLDP +ST+FIQSQIPELAELSMYYMNLVSLARLERNPTVKTEIAQK | |
| Sbjct: | 62 | ESIGNVALDYLSVGLDPKQSTIFIQSQIPELAELSMYYMNLVSLARLERNPTVKTEIAQK | 121 |
| Query: | 121 | GFGESIPAGFLVYPVAQAADITAFKANLVPVGTDQKPMIEQTREIVRSFNHAYNCQVLVE | 180 |
| | | GFGESIP+GFLVYPV+QAADITAFKANLVPVG DQKPMIEQTREIVRSFNH Y+ LVE | |
| Sbjct: | 122 | GFGESIPSGFLVYPVSQAADITAFKANLVPVGNDQKPMIEQTREIVRSFNHTYHTDCLVE | 181 |
| Query: | 181 | PEGIYPENDAAGRLPGLDGNAKMSKSLNNGIFLADDMDTVKKKVMSMYTDPNHIKVEEPG | 240 |
| | | PEGIYPEN+ AGRLPGLDGNAKMSKSL NGI+L+DD DTV+KKVMSMYTDPNHIK+E+PG | |
| Sbjct: | 182 | PEGIYPENEKAGRLPGLDGNAKMSKSLGNGIYLSDDADTVRKKVMSMYTDPNHIKIEDPG | 241 |
| Query: | 241 | QIEGNMVFHYLDVFGRDEDQKEITAMKEHYQKGGLGDVKTKRYLLDILERELSPIRERRL | 300 |
| | | QIEGNMVFHYLD+F R EDQ +I AMKEHYQ GGLGDVKTKRYLLDILEREL+PIRERRL | |
| Sbjct: | 242 | QIEGNMVFHYLDIFARKEDQADIEAMKEHYQIGGLGDVKTKRYLLDILERELAPIRERRL | 301 |
| Query: | 301 | EYAKDMGQVYQMLQKGSEKAQAVAASTLDEVKSAMGLNYF | 340 |
| | | EYAKDMG+V++MLQ+GS+KA+ VAA TL EVKSAMG+NYF | |
| Sbjct: | 302 | EYAKDMGEVFRMLQEGSQKARTVAAKTLSEVKSAMGINYF | 341 |

[5646] Based on this analysis, it was predicted that these proteins and their epitopes could be useful antigens for vaccines or diagnostics.

### EXAMPLE 1011

[5647] A DNA sequence (GBSx1079) was identified in S. agalactiae <SEQ ID 3107> which encodes the amino acid sequence <SEQ ID 3108>. This protein is predicted to be carbamate kinase. Analysis of this protein sequence reveals the following:

```
Possible site: 24
>>> Seems to have no N-terminal signal sequence
----- Final Results -----
                            bacterial cytoplasm --- Certainty = 0.0013(Affirmative) < succ>
                              bacterial membrane --- Certainty = 0.0000(Not Clear) < succ>
                                bacterial outside --- Certainty = 0.0000(Not Clear) < succ>
```

[5648] The protein has homology with the following sequences in the GENPEPT database.

| >GP: CAA04684 GB: AJ001330 carbamate kinase [Lactobacillus sakei] | | | |
|---|---|---|---|
| Identities = 199/311 (63%), Positives = 254/311 (80%), Gaps = 3/311 (0%) | | | |
| Query: | 6 | QKIVVALGGNAILSTDASAKAQQEALINTSKSLVKLIKEGHDVIVTHGNGPQVGNLLLQQ | 65 |
| | | +KIVVALGGNAILSTDASA AQ +A+ T K LV +K+G +I++HGNGPQVGNLL+QQ | |
| Sbjct: | 4 | RKIVVALGGNAILSTDASANAQIKAVKETVKQLVAFVKQGDQLIISHGNGPQVGNLLIQQ | 63 |
| Query: | 66 | AASDSEKNPAMPLDTCVAMTEGSIGFWLQNALNNELQEQGIDKEVATVVTQVIVDEKDQA | 125 |
| | | AASDSEK PAMPLDT AM++G IG+W+QNA N L E+G+ +VAT+VTQ IVD KD+A | |
| Sbjct: | 64 | AASDSEKTPAMPLDTVGAMSQGEIGYWMQNAFNEVLAEEGLALDVATIVTQTIVDAKDEA | 123 |
| Query: | 126 | FTNPTKPIGPFLSEEDAKKQAQ-ETGSKFKEDAGRGWRKVVPSPKPVGIKEASVIRRLVD | 184 |
| | | F NPTKPIGPF SE +AKKQ + F EDAGRGWR+VVPSP+P+GI+EA VI++LV+ | |
| Sbjct: | 124 | FQNPTKPIGPFYSEAEAKKQQSINPEAHFVEDAGRGWRRVVPSPRPIGIQEAPVIQKLVE | 183 |
| Query: | 185 | SGVVVISAGGGGVPVIEDANTKALKGVEAVIDKDFASQTLSELVDADLFIVLTGVDNVFV | 244 |
| | | V+ ISAGGGGVPV ++ N L+GVEAVIDKDFAS+ L+ELV AD+ I+LT VDNV+V | |
| Sbjct: | 184 | GNVITISAGGGGVPVAKEGN--KLRGVEAVIDKDFASEKLAELVGADMLIILTAVDNVYV | 241 |
| Query: | 245 | NFNKPNQEKLEEVTVSQMKQYITENQFAPGSMLPKVEAAIAFVENKPESRAIITSLENID | 304 |
| | | NFNKP+Q+KL V+V++++ YI ++QFA GSMLPK++ AI +V N+P+S+AIITSL+N+ | |
| Sbjct: | 242 | NFNKPDQKKLTNVSVAELEDYIKDDQFAKGSMLPKIQTAIEYVNNRPDSKAIITSLDNVK | 301 |
| Query: | 305 | NVLAQNAGTQI | 315 |
| | | N+LA +AGT I | |
| Sbjct: | 302 | NLLAHDAGTII | 312 |

[5649] A related DNA sequence was identified in S. pyogenes <SEQ ID 3109> which encodes the amino acid sequence <SEQ ID 3110>. Analysis of this protein sequence reveals the following:

```
Possible site: 22
>>> Seems to have no N-terminal signal sequence
----- Final Results -----
                            bacterial cytoplasm --- Certainty = 0.0013(Affirmative) < succ>
                              bacterial membrane --- Certainty = 0.0000(Not Clear) < succ>
                                bacterial outside --- Certainty = 0.0000(Not Clear) < succ>
```

[5650] An alignment of the GAS and GBS proteins is shown below.

| Identities = 275/312 (88%), Positives = 295/312 (94%) | | | |
|---|---|---|---|
| Query: | 6 | QKIVVALGGNAILSTDASAKAQQEALINTSKSLVKLIKEGHDVIVTHGNGPQVGNLLLQQ | 65 |
| | | QKIVVALGGNAILSTDASAKAQQEALI+TSKSLVKLIKEGH+VIVTHGNGPQVGNLLLQQ | |
| Sbjct: | 4 | QKIVVALGGNAILSTDASAKAQQEALISTSKSLVKLIKEGHEVIVTHGNGPQVGNLLLQQ | 63 |
| Query: | 66 | AASDSEKNPAMPLDTCVAMTEGSIGFWLQNALNNELQEQGIDKEVATVVTQVIVDEKDQA | 125 |
| | | AA+DSEKNPAMPLDTCVAMTEGSIGFWL NAL+NELQ QGI KEVA VVTQVIVD RD A | |
| Sbjct: | 64 | AAADSEKNPAMPLDTCVAMTEGSIGFWLVNALDNELQAQGIQKEVAAVVTQVIVDAKDPA | 123 |
| Query: | 126 | FTNPTKPIGPFLSEEDAKKQAQETGSKFKEDAGRGWRKVVPSPKPVGIKEASVIRRLVDS | 185 |
| | | F NPTKPIGPFL+EEDAKKQ E+G+ FKEDAGRGWRKVVPSPKPVGIKEA+VIR LVDS | |
| SbjCt: | 124 | FENPThPIGPFLTEEDAKKQMAESGASFKEDAGRGWRKVVPSPKPVGIKEANVIRSLVDS | 183 |
| Query: | 186 | GVVVISAGGGGVPVIEDANTKALKGVEAVIDKDFASQTLSELVDADLFIVLTGVDNVFVN | 245 |
| | | GVVV+SAGGGGVPV+EDA +K L GVEAVIDKDFASQTLSELVDADLFIVLTGVDNV+VN | |
| SbjCt: | 184 | GVVVVSAGGGGVPVVEDATSKTLTGVEAVIDKDFASQTLSELVDADLFIVLTGVDNVYVN | 243 |
| Query: | 246 | FNKPNQEKLEEVTVSQMKQYITENQFAPGSMLPKVEAAIAFVENKPESRAIITSLENIDN | 305 |
| | | FNKP+Q KLEEVTVSQMK+YIT++QFAPGSMLPKVEAAIAFVENKP ++AIITSLENIDN | |
| Sbjct: | 244 | FNKPDQAKLEEVTVSQMKEYITQDQFAPGSMLPKVEAAIAFVENKPNAKAIITSLENIDN | 303 |
| Query: | 306 | VLAQNAGTQIVA | 317 |
| | | VL+ NAGTQI+A | |
| Sbjct: | 304 | VLSANAGTQIIA | 315 |

[5651] Based on this analysis, it was predicted that these proteins and their epitopes could be useful antigens for vaccines or diagnostics.

### EXAMPLE 1012

[5652] A DNA sequence (GBSx1080) was identified in S. agalactiae <SEQ ID 3111> which encodes the amino acid sequence <SEQ ID 3112>. This protein is predicted to be permease (potE). Analysis of this protein sequence reveals the following:

| Possible site: 52 | | | | |
|---|---|---|---|---|
| >>> Seems to have an uncleavable N-term signal seq | | | | |
| | INTEGRAL | Likelihood = −12.63 | Transmembrane | 450-466 (441-478) |
| | INTEGRAL | Likelihood = −8.97 | Transmembrane | 236-252 (231-259) |
| | INTEGRAL | Likelihood = −8.70 | Transmembrane | 283-299 (277-308) |
| | INTEGRAL | Likelihood = −8.44 | Transmembrane | 165-181 (153-186) |
| | INTEGRAL | Likelihood = −7.96 | Transmembrane | 129-145 (126-151) |
| | INTEGRAL | Likelihood = −6.16 | Transmembrane | 396-412 (394-415) |
| | INTEGRAL | Likelihood = −5.15 | Transmembrane | 45-61 (38-63) |
| | INTEGRAL | Likelihood = −4.94 | Transmembrane | 335-351 (334-352) |
| | INTEGRAL | Likelihood = −3.72 | Transmembrane | 13-29 (10-30) |
| | INTEGRAL | Likelihood = −2.92 | Transmembrane | 417-433 (417-435) |
| | INTEGRAL | Likelihood = −1.54 | Transmembrane | 360-376 (360-376) |
| | INTEGRAL | Likelihood = −0.53 | Transmembrane | 207-223 (207-223) |

```
----- Final Results -----
                              bacterial membrane --- Certainty = 0.6052(Affirmative) < succ>
                                bacterial outside --- Certainty = 0.0000(Not Clear) < succ>
                            bacterial cytoplasm --- Certainty = 0.0000(Not Clear) < succ>
```

[5653] A related GBS nucleic acid sequence <SEQ ID 10295> which encodes amino acid sequence <SEQ ID 10296> was also identified.

[5654] The protein has homology with the following sequences in the GENPEPT database.

| >GP:CAA76779 GB:Y17554 permease [Bacillus licheniformis] | | | |
|---|---|---|---|
| Identities = 265/470 (56%), Positives = 347/470 (73%), Gaps = 3/470 (0%) | | | |
| Query: | 5 | MEKEKKLGLLPLTMLVIGSLIGGGIFDLMQNMSSRAGLVPMLIAWVITAIGMGTFVLSFQ | 64 |
| | | M +EKKLGL L LVIGS+IGGG F+L +M+S AG +LI W+IT +GM SFQ | |
| Sbjct: | 1 | MAEEKKLGLFALIALVIGSMIGGGAFNLASDMASGAGAGAILIGWIITGVGMIALAFSFQ | 60 |
| Query: | 65 | NLSEKRPDLTAGIFSYAKEGFGNFMGFNSAWGYWLSAWLGNVAYAALLFSSLGYFFKFFG | 124 |
| | | NL+ KRPDL GIF+YA+EGFG+FMGFNS WGYW +A LGNVAY LLFS++GYF FG | |
| Sbjct: | 61 | NLTTKRPDLDGGIFTYAREGFGHFMGFNSGWGYWFAALLGNVAYGTLLFSAIGYFIPAFG | 120 |
| Query: | 125 | NGNNIISIIGASIVIWVVHFLILRGVNTAAFINTIVTFAKLVPVIIFLISALLAFKFNIF | 184 |
| | | +G NI SIIGAS+++W VHFLILRGV +AA IN I T +KLVP+ F+I+ + F ++F | |
| Sbjct: | 121 | DGQNIASIIGASVILWCVHFLILRGVQSAAMINLITTISKLVPIFAFIIAIIFVFHLDLF | 180 |
| Query: | 185 | SLDIWGNGLH-QSIFNQVNSTMKTAVWVFIGIEGAVVFSGRAKKIISDIGKASILALFTMI | 243 |
| | | + D WG GL SI QV STM VWVF GIEGAV+FS RAKK SD+GKA+++ L +++ | |
| Sbjct: | 181 | TNDFWGKGLSLGSIGTQVKSTMLVTVWVFTGIEGAVLFSSRAKKSSDVGKATVIGLISVL | 240 |
| | | G | |
| Sbjct: | 417 | FG | 418 |

[5655] An alignment of the GAS and GBS proteins is shown below.

| Identities = 104/368 (28%), Positives = 162/368 (43%), Gaps = 32/368 (8%) | | | |
|---|---|---|---|
| Query: | 1 | MRYKMEKEKKLGLLPLTMLVIGSLIGGGIFDLMQNMSSRAGLVPMLIAWVI-TAIGMGTF | 59 |
| | | M + ++ K L T+ I ++IG GIF L + + GL P IA + TAI | |
| Sbjct: | 6 | MNEQEREQAKFSLSGATLYGINAVIGSGIFLLPRAIYK--GLGPASIAVMFGTAILTIML | 63 |
| Query: | 60 | VLSFQNLSEKRPDLTAGIFSYAKEGFGNFMGFNSA---WGYWLSAWLGNVAYAALLFSSL | 116 |
| | | + F +S G F Y+K FG+F+GFN W + AW A A +F | |
| Sbjct: | 64 | AVCFAEVSGYFGK-NGGAFQYSKRAFGDFIGFNVGFLGWTVTIFAWAAMAAGFARMFIIT | 122 |
| Query: | 117 | GYFFKFFGNGNNIISIIGASIVIWVVHFLILRGVNTAAFINTIVTFAKLVPVIIFLISAL | 176 |
| | | F+ G +I IG I++ +++ + G+ T+ + T AKL+P++ F L | |
| Sbjct: | 123 | FPAFE----GWHIPLSIGLIILLSLMN---IAGLKTSKIVTITATIAKLIPIVAFCACTL | 175 |
| Query: | 177 | LAFK-----FNIFSLDIWGNGLHQSIFNQVNSTMKTAVWVFIGIEGAVVFSGRAKKHSDI | 231 |
| | | K F F G L +I N TAV++F G G S A + D | |
| Sbjct: | 176 | FFIKNGLPNFTPFVQLEPGTNLLGAISN-------TAVYIFYGFIGFETLSIVAGEMRDP | 228 |
| Query: | 232 | GKASILALFTMISLYVLISVLSLG---IMSRPELANLKTPAM-AYVLEKAVGHWGAILVN | 287 |
| | | K AL IS+ ++ +L +G M ++ P A+V++K +G GA +V+ | |
| Sbjct: | 229 | EKNVPRALLGSISIVSVLYMLIIGGTIAMLGSQIMMTNAPVQDAFV--KMIGPAGAWMVS | 286 |
| Query: | 288 | LGVIISVFGAILAWTLFAAELPYQAAKEGAFPKFFAKENKNKAPINSLLVTNLCVQAFLI | 347 |
| | | +G +IS+ G + ++ A EG P AK+N+N AP+ ++LV+ L+ | |
| Sbjct: | 287 | IGALISITGLNMGESIMVPRYGAAIADEGLLPAAIAKQNQNGAPLVAILVSGAIAIVLLL | 346 |
| Query: | 348 | TFLFTQSA | 355 |
| | | T F A | |
| Sbjct: | 347 | TGSFESLA | 354 |

[5656] A further related DNA sequence was identified in S. pyogenes <SEQ ID 9079> which encodes the amino acid sequence <SEQ ID 9080>. Analysis of this protein sequence reveals the following:

| Possible site: 60 | | | |
|---|---|---|---|
| >>> Seems to have no N-terminal signal sequence | | | |
| INTEGRAL | Likelihood = −9.92 | Transmembrane | 77-93 (72-100) |
| INTEGRAL | Likelihood = −9.29 | Transmembrane | 279-295 (274-303) |
| INTEGRAL | Likelihood = −9.08 | Transmembrane | 203-219 (199-225) |
| INTEGRAL | Likelihood = −8.55 | Transmembrane | 174-190 (171-197) |
| INTEGRAL | Likelihood = −8.33 | Tramsmembrane | 436-452 (432-455) |
| INTEGRAL | Likelihood = −7.32 | Transmembrene | 329-345 (324-350) |
| INTEGRAL | Likelihood = −5.63 | Transmembrane | 402-418 (396-421) |
| INTEGRAL | Likelihood = −4.88 | Tramsmembrane | 460-476 (456-479) |
| INTEGRAL | Likelihood = −4.51 | Transmembrane | 379-395 (377-401) |
| INTEGRAL | Likelihood = −2.81 | Transmembrane | 48-64 (48-65) |
| INTEGRAL | Likelihood = −2.23 | Transmembrane | 243-259 (243-262) |
| INTEGRAL | Likelihood = −0.37 | Transmembrane | 123-139 (123-139) |

```
----- Final Results -----
      bacterial membrane --- Certainty = 0.4970 (Affirmative) < succ>
        bacterial outside --- Certainty = 0.0000 (Not Clear) < succ>
    bacterial cytoplasm --- Certainty = 0.0000 (Not Clear) < succ>
```

[5657] An alignment of the GAS and GBS sequences follows:

```
  Score = 62.1 bits (148), Expect = 2e-11
  Identities = 59/250 (23%), Positives = 107/250 (42%), Gaps = 12/250 (4%)
```

| | | | |
|---|---|---|---|
| Query: | 143 | WGSYLKGLLAN--YNIVLPNALNGTFNL--KNGTYIDILPV-LVMFFVTGIVLMNSKLAL | 197 |
| | | WG +L L N Y +L ++L F I I+ +V++ V ++L A | |
| Sbjct: | 95 | WGYWLSAWLGNVAYAALLFSSLGYFFKFFGNGNNIISIIGASIVIWVVHFLILRGVNTAA | 154 |
| Query: | 198 | RFNSFLVILKFSALALFIFVGIFFIDHNNWSHFAPYGVGQITGGKTGIFAGASVMFFAFL | 257 |
| | | N+ + K + +F+ + N +S +G G + + + F+ | |
| Sbjct: | 155 | FINTIVTFAKLVPVIIFLISALLAFKFNIFS-LDIWGNGLHQSIFNQVNSTMKTAVWVFI | 213 |
| Query: | 258 | GFESISMAVDEVKEPQKTIPKGIILSLIIVTALYIVvTTILTGIV---HYTKLNVPDAVA | 314 |
| | | G E + K+ I K IL+L + +LY++++ + GI+ L P A+A | |
| Sbjct: | 214 | GIEGAVVFSGRAKK-HSDIGKASILALFTMISLYVLISVLSLGIMSRPELANLKTP-AMA | 271 |
| Query: | 315 | FALRNIRLYWAADYVSIVAILTLITVCISMTYALARTIYSISRDGLLPKSLYTLTKKNKV | 374 |
| | | + L +W A V++ I+++ ++ T A Y +++G PK + KNK | |
| Sbjct: | 272 | YVLEKAVGHWGAILVNLGVIISVFGAILAWTLFAAELPYQAAKEGAFPK-FFAKENKNKA | 330 |
| Query: | 375 | PQNATLVTGL | 384 |
| | | P N+ LVT L | |
| Sbjct: | 331 | PINSLLVTNL | 340 |

[5658] Based on this analysis, it was predicted that these proteins and their epitopes could be useful antigens for vaccines or diagnostics.

### EXAMPLE 1013

[5659] A DNA sequence (GBSx1081) was identified in S. agalactiae <SEQ ID 3115> which encodes the amino acid sequence <SEQ ID 3116>. This protein is predicted to be unnamed protein product (argF). Analysis of this protein sequence reveals the following:

```
Possible site: 31
>>> Seems to have no N-terminal signal sequence
----- Final Results -----
                            bacterial cytoplasm --- Certainty = 0.3757(Affirmative) < succ>
                              bacterial membrane --- Certainty = 0.0000(Not Clear) < succ>
                                bacterial outside --- Certainty = 0.0000(Not Clear) < succ>
```

[5660] A related DNA sequence was identified in S. pyogenes <SEQ ID 3117> which encodes the amino acid sequence <SEQ ID 3118>. Analysis of this protein sequence reveals the following:

| Possible site: 31 | | | | |
|---|---|---|---|---|
| >>> Seems to have no N-terminal signal sequence | | | | |
| | INTEGRAL | Likelihood = 0.48 | Transmembrane | 171-187 (171-188) |

```
----- Final Results -----
                              bacterial membrane --- Certainty = 0.1192(Affirmative) < succ>
                                bacterial outside --- Certainty = 0.0000(Not Clear) < succ>
                            bacterial cytoplasm --- Certainty = 0.0000(Not Clear) < succ>
```

[5661] The protein has homology with the following sequences in the databases:

| >GP: CAB12563 GB: Z99108 similar to metabolite | | | |
|---|---|---|---|
| transporter [Bacillus subtilis] | | | |
| Identities = 190/467 (40%), Positives = 284/467 (60%), Gaps = 13/467 (2%) | | | |
| Query: | 25 | TIFRKK-----KKYSNKTEMQRHFKVIDLVFLGLGSMVGTGIFTVTGIGAAKYAGPALTI | 79 |
| | | ++FRKK S + R DL LG+G ++GTGIF +TG AA AGPAL I | |
| Sbjct: | 3 | SLFRKKPLETLSAQSKSKSLARTLSAFDLTLLGIGCVIGTGIFVITGTVAATGAGPALII | 62 |
| Query: | 80 | SIIISAIAIGILALFYAEFASRMPSNGGAYSYVYATLGEFPAWLVGWYIIMEFLTAISSV | 139 |
| | | S I++ +A + A YAEF+S +P +G YSY Y TLGE A+L+GW +++E++ A+S+V | |
| Sbjct: | 63 | SFILAGLACALAAFCYAEFSSSIPISGSVYSYSYVTLGELLAFLIGWDLMLEYVIALSAV | 122 |
| Query: | 140 | AVGWGSYLKGLLANYNIVLPNALNGTFNLKNGTYIDILPVLVMFFVTGIVLMNSKLALRF | 199 |
| | | A GW SY + LLA +N+ +P AL G G ++ +++ +T IV K + RF | |
| Sbjct: | 123 | ATGWSSYFQSLLAGFNLHIPAALTGAPGSMAGAVFNLPAAVIILLITAIVSRGVKESTRF | 182 |
| Query: | 200 | NSFLVILKFSALALFIFVGIFFIDHNNWSHFAPYGVGQITGGKTGIFAGASVMFFAFLGF | 259 |
| | | N+ +V++K + + LFI VGI ++ +NWS F P+G+ G+ A+ +FFA+LGF | |
| Sbjct: | 183 | NNVIVLMKIAIILLFIIVGIGYVKPDNWSPFMPFGM-------KGVILSAATVFFAYLGF | 235 |
| Query: | 260 | ESISMAVDEVKEPQKTIPKGIILSLIIVTALYIVVTTILTGIVHYTKLNVPDAVAFALRN | 319 |
| | | +++S A +EVK PQK +P GII +L + T LYI V+ +LTG++ Y KLNV D V+FAL+ | |
| Sbjct: | 236 | DAVSNASEEVKNPQKNMPVGIISALAVCTVLYIAVSLVLTGMMPYAKLNVGDPVSFALKF | 295 |
| Query: | 320 | IRLYWAADYVSIVAILTLITVCISNTYALARTIYSISRDGLLPKSLYTLTKKNKVPQNAT | 379 |
| | | + A +S+ AI+ + TV +++ YA R +++SRDGLLP + K P T | |
| Sbjct: | 296 | VGQDAVAGIISVGAIIGITTVMLALLYAQVRLTFAMSRDGLLPGLFAKVHPSFKTPFRNT | 355 |
| Query: | 380 | LVTGLLAMICAGIFPLSSLAEFVNICTLAYLIILSGAIIKLRRIEGEPKANEFKTPLVPF | 439 |
| | | +TG++A AG L +LA VN+ TLA ++S A+I LR+ E KA+ F+ P VP | |
| Sbjct: | 356 | WLTGIVAAGIAGFINLGTLAHLVNMGTLAAFTVISIAVIVLRKKHPEIKAS-FRVPFVPV | 414 |
| Query: | 440 | LPMLAIIICLSFMSQYKAFTWIAFAIATIIGTLIYLAYGYTHSIENK | 486 |
| | | +P+++ ICL FM TW++F I +GTL+Y Y HS+ NK | |
| Sbjct: | 415 | VPIISAGICLWFMYSLPGVTWLSFVIWIAVGTLVYFLYSRKHSLLNK | 461 |

[5662] An alignment of the GAS and GBS proteins is shown below.

| Identities = 312/337 (92%), Positives = 324/337 (95%) | | | |
|---|---|---|---|
| Query: | 1 | MTQVFQGRSFLAEKDFSREEFEYLIDFSAHLKDLKKRGVPHHYLEGKNIALLFEKTSTRT | 60 |
| | | MTQVFQGRSFLAEKDF+R E EYLIDFSAHLKDLKKRGVPHHYLEGKNIALLFEKTSTRT | |
| Sbjct: | 1 | MTQVFQGRSFLAEKDFTRAELEYLIDFSAHLKDLKKRGVPHHYLEGKNIALLFEKTSTRT | 60 |
| Query: | 61 | RAAFTTAAIDLGAHPEYLGANDIQLGKKESTEDTAKVLGRMFDGIEFRGFSQRMVEELAE | 120 |
| | | RAAFTTAAIDLGAHPEYLGANDIQLGKKESTEDTAKVLGRMFDGIEFRGFSQRMVEELAE | |
| Sbjct: | 61 | RAAFTTAAIDLGAHPEYLGANDIQLGKKESTEDTAKVLGRMFDGIEFRGFSQRMVEELAE | 120 |
| Query: | 121 | FSGVPVWNGLTDEWHPTQMLADYLTIKENFGKLEGITLVYCGDGRNNVANSLLVAGTLMG | 180 |
| | | FSGVPVWNGLTDEWHPTQMLADY T+KENFGKLEG+TLVYCGDGRNNVANSLLV G ++G | |
| Sbjct: | 121 | FSGVPVWNGLTDEWHPTQMLADYFTVKENFGKLEGLTLVYCGDGRNNVANSLLVTGAILG | 180 |
| Query: | 181 | VNVHIFSPKELFPAEEIVKLAEEYAKESGAHVLVTDNVDEAVKGADVFYTDVWVSMGEED | 240 |
| | | VNVHIFSPKELFP EEIV LAE YAKESGA +L+T++ DEAVKGADV YTDVWVSMGEED | |
| Sbjct: | 181 | VNVHIFSPKELFPEEEIVTLAEGYAKESGARILITEDADEAVKGADVLYTDVWVSMGEED | 240 |
| Query: | 241 | KFKERVELLQPYQVNMELIKKANNDNLIFLHCLPAFHDTNTVYGKDVAEKFGVKEMEVTD | 300 |
| | | KFKERVELLQPYQVNM+L++KA ND LIFLHCLPAFHDTNTVYGKDVAEKFGVKEMEVTD | |
| Sbjct: | 241 | KFKERVELLQPYQVNMDLVQKAGNDKLIFLHCLPAFHDTNTVYGKDVAEKFGVKEMEVTD | 300 |
| Query: | 301 | EVFRSKYARHFDQAENRMHTIKAVMAATLGNLFIPKV | 337 |
| | | EVFRSKYARHFDQAENRMHTIKAVMAATLGNLFIPKV | |
| Sbjct: | 301 | EVFRSKYARHFDQAENRMHTIKAVMAATLGNLFIPKV | 337 |

[5663] Based on this analysis, it was predicted that these proteins and their epitopes could be useful antigens for vaccines or diagnostics.

### EXAMPLE 1014

[5664] A DNA sequence (GBSx1082) was identified in S. agalactiae <SEQ ID 3119> which encodes the amino acid sequence <SEQ ID 3120>. Analysis of this protein sequence reveals the following:

```
Possible site: 24
>>> Seems to have no N-terminal signal sequence
----- Final Results -----
                            bacterial cytoplasm --- Certainty = 0.0456(Affirmative) < succ>
                              bacterial membrane --- Certainty = 0.0000(Not Clear) < succ>
                                bacterial outside --- Certainty = 0.0000(Not Clear) < succ>
```

[5665] A related GBS nucleic acid sequence <SEQ ID 10921> which encodes amino acid sequence <SEQ ID 10922> was also identified.

[5666] A related DNA sequence was identified in S. pyogenes <SEQ ID 3121> which encodes the amino acid sequence <SEQ ID 3122>. Analysis of this protein sequence reveals the following:

Possible site: 61
>>> Seems to have no N-terminal signal sequence

| | | | |
|---|---|---|---|
| INTEGRAL | Likelihood = −5.41 | Transmembrane | 121-137 (118-140) |

```
----- Final Results -----
                              bacterial membrane --- Certainty = 0.3166(Affirmative) < succ>
                                bacterial outside --- Certainty = 0.0000(Not Clear) < succ>
                            bacterial cytoplasm --- Certainty = 0.0000(Not Clear) < succ>
```

[5667] An alignment of the GAS and GBS proteins is shown below.

| Identities = 65/113 (57%), Positives = 83/113 (72%) | | | |
|---|---|---|---|
| Query: | 31 | MEEEFDDNDEQDTIYAVLYDGKQPVSTGRFLPETQTEARLTRIATLKGYRGNGYGTKIII | 90 |
| | | M ++FD NDE T+YAV+YD QPVSTG+FL ET+ EARLTRI TL Y G GYG K+ | |
| Sbjct: | 1 | MADKFDANDETRTVYAVVYDNDQPVSTGQFLAETKIEARLTRIVTLADYCGCGYGAKVTE | 60 |
| Query: | 91 | ALENYAKENGYHYLTIHAELTAKDFYQTLGYQATGNIYMEDGEACQTLEKYLI | 143 |
| | | ALE Y + G++ LTIH+ELTA+ FY+ LGYQ+ G +EDGE CQ+L K ++ | |
| Sbjct: | 61 | ALETYTRREGFYQLTIHSELTAQTFYENLGYQSYGPKCLEDGEYCQSLAKTIL | 113 |

[5668] Based on this analysis, it was predicted that these proteins and their epitopes could be useful antigens for vaccines or diagnostics.

### EXAMPLE 1015

[5669] A DNA sequence (GBSx1083) was identified in S. agalactiae <SEQ ID 3123> which encodes the amino acid sequence <SEQ ID 3124>. Analysis of this protein sequence reveals the following:

```
Possible site: 58
>>> Seems to have no N-terminal signal sequence
----- Final Results -----
    bacterial cytoplasm --- Certainty = 0.2160 (Affirmative) < succ>
      bacterial membrane --- Certainty = 0.0000 (Not Clear) < succ>
        bacterial outside --- Certainty = 0.0000 (Not Clear) < succ>
```

[5670] A related DNA sequence was identified in S. pyogenes <SEQ ID 3125> which encodes the amino acid sequence <SEQ ID 3126>. Analysis of this protein sequence reveals the following:

```
Possible site: 58
>>> Seems to have no N-terminal signal sequence
----- Final Results -----
    bacterial cytoplasm --- Certainty = 0.2730 (Affirmative) < succ>
      bacterial membrane --- Certainty = 0.0000 (Not Clear) < succ>
        bacterial outside --- Certainty = 0.0000 (Not Clear) < succ>
```

[5671] An alignment of the GAS and GBS proteins is shown below.

| Identities = 375/411 (91%), Positives = 395/411 (95%), Gaps = 1/411 (0%) | | | |
|---|---|---|---|
| Query: | 1 | MTQTHPIHVFSEIGKLKKVMLHRPGKEIENLMPDYLERLLFDDIPFLEDAQKEHDAFAQA | 60 |
| | | MT PIHV+SEIGKLKKV+LHRPGKEIENLMPDYLERLLFDDIPFLEDAQKEHDAFAQA | |
| Sbjct: | 1 | MTAQTPIHVYSEIGKLKKVLLHRPGKEIENLMPDYLERLLFDDIPFLEDAQKEHDAFAQA | 60 |
| Query: | 61 | LRNEGVEVLYLENLAAESLTNQEIREQFIDEYIGEANVRGRATKKAIRELLLNIKDNKEL | 120 |
| | | LR+EG+EVLYLE LAAESL EIRE FIDEY+ EAN+RGRATKKAIRELL+ I+DN+EL | |
| Sbjct: | 61 | LRDEGIEVLYLETLAAESLVTPEIREAFIDEYLSEANIRGRATKKAIRELLMAIEDNQEL | 120 |
| Query: | 121 | IEKTMAGIQKSELPEIPSSEKGLTDLVESNYPFAIDPMPNLYFTRDPFATIGNGVSLNHM | 180 |
| | | IEKTMAG+QKSELPEIP+SEKGLTDLVESNYPFAIDPMPNLYFTRDPFATIG GVSLNHM | |
| Sbjct: | 121 | IEKTMAGVQKSELPEIPASEKGLTDLVESNYPFAIDPMPNLYFTRDPFATIGTGVSLNHM | 180 |
| Query: | 181 | FSETRNRETLYGKYIFTHHPEYGG-KVPMVYEREETTRIEGGDELVLSKDVLAVGISQRT | 239 |
| | | FSETRNRETLYGKYIFTHHP YGG KVPMVY+R ETTRIEGGDELVLSKDVLAVGISQRT | |
| Sbjct: | 181 | FSETRNRETLYGKYIFTHHPIYGGGKVPMVYDRNETTRIEGGDELVLSKDVLAVGISQRT | 240 |
| Query: | 240 | DAASIEKLLVNIFKQNLGFKKVLAFEFANNRKFMHLDTVFTMVDYDKFTIHPEIEGDLRV | 299 |
| | | DAASIEKLLVNIFKQNLGFKKVLAFEFANNRKFMHLDTVFTMVDYDKFTIHPEIEGDLRV | |
| Sbjct: | 241 | DAASIEKLLVNIFKQNLGFKKVLAFEFANNRKFMHLDTVFTMVDYDKFTIHPEIEGDLRV | 300 |
| Query: | 300 | YSVTYENQDLHIEEEKGDLADLLAKNLGVEKVELIRCGGDNLVAAGREQWNDGSNTLTIA | 359 |
| | | YSVTY+N++LHI EEKGDLA+LLA NLGVEKV+LIRCGGDNLVAAGREQWNDGSNTLTIA | |
| Sbjct: | 301 | YSVTYDNEELHIVEEKGDLAELLAANLGVEKVDLIRCGGDNLVAAGREQWNDGSNTLTIA | 360 |
| Query: | 360 | PGVVIVYNRNTITNAILESKGLKLIKINGSELVRGRGGPRCMSMPFEREDL | 410 |
| | | PGVV+VYNRNTITNAILESKGLKLIKI+GSELVRGRGGPRCMSMPFERED+ | |
| Sbjct: | 361 | PGVVVVYNRNTITNAILESKGLKLIKIHGSELVRGRGGPRCMSMPFEREDI | 411 |

[5672] Based on this analysis, it was predicted that these proteins and their epitopes could be useful antigens for vaccines or diagnostics.

### EXAMPLE 1016

[5673] A DNA sequence (GBSx1084) was identified in S. agalactiae <SEQ ID 3127> which encodes the amino acid sequence <SEQ ID 3128>. Analysis of this protein sequence reveals the following:

```
Possible site: 20
>>> Seems to have no N-terminal signal sequence
----- Final Results -----
                            bacterial cytoplasm --- Certainty = 0.3162(Affirmative) < succ>
                              bacterial membrane --- Certainty = 0.0000(Not Clear) < succ>
                                bacterial outside --- Certainty = 0.0000(Not Clear) < succ>
```

[5674] A related GBS nucleic acid sequence <SEQ ID 8703> which encodes amino acid sequence <SEQ ID 8704> was also identified. This protein has an RGD motif and has homology with the following sequences in the GENPEPT database.

| >GP: AAG07568 GB: AE004834 hypothetical protein [Pseudomonas aeruginosa] | | | |
|---|---|---|---|
| Identities = 42/132 (31%), Positives = 74/132 (55%), Gaps = 3/132 (2%) | | | |
| Query: | 35 | IQTYRKAYQTFKTK-KGARSSIEALLKRVNSGNEITSINPLVDIYNAASLRFGLPIGAED | 93 |
| | | + + +A++ F K + S EAL KR + SI+P+VD+YNA S++F +P+G E+ | |
| Sbjct: | 63 | LAAWAEAFRRFGAKPQRTPCSAEALRKRALRDGGLPSIDPVVDLYNAISVQFAIPVGGEN | 122 |
| Query: | 94 | SDTFRGDLKLTITNGGDEFYLI--GEDFNRPTLSGELAYVDDVGAVCRCFNWRDGKRTMI | 151 |
| | | + G +L + +G + F + GE + GE+ + DD+G CR +NWR G RT + | |
| Sbjct: | 123 | LAAYAGPPRLVVADGSETFDTLKNGEALDESPDPGEVVWRDDLGVTCRRWNWRQGVRTRL | 182 |
| Query: | 152 | TDNTQNAFLVIE | 163 |
| | | + + + ++E | |
| Sbjct: | 183 | DASARRMWFILE | 194 |

[5675] A related DNA sequence was identified in S. pyogenes <SEQ ID 3129> which encodes the amino acid sequence <SEQ ID 3130>. Analysis of this protein sequence reveals the following:

```
Possible site: 33
>>> Seems to have no N-terminal signal sequence
----- Final Results -----
                            bacterial cytoplasm --- Certainty = 0.0700(Affirmative) < succ>
                              bacterial membrane --- Certainty = 0.0000(Not Clear) < succ>
                                bacterial outside --- Certainty = 0.0000(Not Clear) < succ>
```

[5676] An alignment of the GAS and GBS proteins is shown below.

| Identities = 127/199 (63%), Positives = 155/199 (77%) | | | |
|---|---|---|---|
| Query: | 8 | ELKQLLSDSHSLAKKYLQEKEFSQNRVIQTYRKAYQTFKTKKGARSSIEALLKRVNSGNE | 67 |
| | | ++KQLL+DSH LAK YL FS N+V+Q YRKAYQ FKTKKGARSSIEALLKRV++G | |
| Sbjct: | 36 | DVKQLLADSHELAKAYLTADNFSDNQVVQVYRKAYQHFKTKKGARSSIEALLKRVSNGQS | 95 |
| Query: | 68 | ITSINPLVDIYNAASLRFGLPIGAEDSDTFRGDLKLTITNGGDEFYLIGEDFNRPTLSGE | 127 |
| | | I SINPLVDIYNAASLRFGLP GAEDSD+F GDL+LTIT+GGD+FYLIG+ N PTL E | |
| Sbjct: | 96 | IPSINPLVDIYNAASLRFGLPAGAEDSDSFIGDLRLTITDGGDDFYLIGDADNNPTLPNE | 155 |
| Query: | 128 | LAYVDDVGAVCRCFNWRDGKRTMITDNTQNAFLVIELIDNGREIIFKEALDFIATNTNRF | 187 |
| | | L Y DD+GA CRC NWRDG+RTM+T++T+NAFL+IE +D + +EAL FI + + | |
| Sbjct: | 156 | LCYKDDIGAFCRCLNWRDGERTMVTEHTKNAFLIIEALDQEGQNRLQEALKFIEGSAKMY | 215 |
| Query: | 188 | LKAKTQTIILDKEHSEITL | 206 |
| | | L A T +LDK++ + L | |
| Sbjct: | 216 | LHAITSVHVLDKDNPHVPL | 234 |

[5677] SEQ ID 8704 (GBS298) was expressed in E. coli as a His-fusion product. SDS-PAGE analysis of total cell extract is shown in FIG. 44 (lane 2; MW 29 kDa). It was also expressed in E. coli as a GST-fusion product. SDS-PAGE analysis of total cell extract is shown in FIG. 48 (lane 5; MW 54 kDa).

[5678] The GBS298-GST fusion product was purified (FIG. 203, lane 9) and used to immunise mice. The resulting antiserum was used for FACS (FIG. 297), which confirmed that the protein is immunoaccessible on GBS bacteria.

[5679] Based on this analysis, it was predicted that these proteins and their epitopes could be useful antigens for vaccines or diagnostics.

### EXAMPLE 1017

[5680] A DNA sequence (GBSx1085) was identified in S. agalactiae <SEQ ID 3131> which encodes the amino acid sequence <SEQ ID 3132>. Analysis of this protein sequence reveals the following:

```
Possible site: 26
>>> Seems to have no N-terminal signal sequence
----- Final Results -----
                            bacterial cytoplasm --- Certainty = 0.3770(Affirmative) < succ>
                              bacterial membrane --- Certainty = 0.0000(Not Clear) < succ>
                                bacterial outside --- Certainty = 0.0000(Not Clear) < succ>
```

[5681] The protein has no significant homology with any sequences in the GENPEPT database.

[5682] No corresponding DNA sequence was identified in S. pyogenes.

[5683] Based on this analysis, it was predicted that this protein and its epitopes, could be useful antigens for vaccines or diagnostics.

### EXAMPLE 1018

[5684] A DNA sequence (GBSx1086) was identified in S. agalactiae <SEQ ID 3133> which encodes the amino acid sequence <SEQ ID 3134>. Analysis of this protein sequence reveals the following:

```
Possible site: 20
>>> Seems to have no N-terminal signal sequence
----- Final Results -----
                            bacterial cytoplasm --- Certainty = 0.4263(Affirmative) < succ>
                              bacterial membrane --- Certainty = 0.0000(Not Clear) < succ>
                                bacterial outside --- Certainty = 0.0000(Not Clear) < succ>
```

[5685] The protein has homology with the following sequences in the GENPEPT database.

| >GP:CAB95946 GB:Y17554 Crp/Fnr family protein [Bacillus licheniformis] | | | |
|---|---|---|---|
| Identities = 85/214 (39%), Positives = 126/214 (58%), Gaps = 14/214 (6%) | | | |
| Query: | 11 | RQLDDFKHFTIEQFDHIVSHIKHRTALKNHTLFFEGDYREKLFLIQSGHVKIEQSDASGS | 70 |
| | | R L+D K F I R+ K LF E D RE+++L+ G +K+E+S+ +GS | |
| Sbjct: | 22 | RDLEDMKQF-----------IYWRSYHKGQILFMEDDPRERMYLLLDGFIKLEKSNEAGS | 70 |
| Query: | 71 | FIYTDYVRQGTVFPYGGLFLDDDYHFSAVAITDIEYFSLPMALYEEYSLQNINQMKHLCR | 130 |
| | | YTDYVR T+FP+GGLF D+ YH++A A+TDIE + +PM ++E+ N N + + | |
| Sbjct: | 71 | MFYTDYVRPHTLFPEGGLFRDEHYHYAAEALTDIELYYIPMNIFEDLVRDNKNLLYDILN | 130 |
| Query: | 131 | KYSKLLRVHEIRLRNMVTSSASMRVIQSLATL---LLQVPTERGHLPFPITTIEIANMSG | 187 |
| | | S +L +HE RL+ + S A RV Q++ L L Q + + PIT EIA +SG | |
| Sbjct: | 131 | HLSDILALHEERLKRITLSHAHDRVTQAIYYLTESLGQKESNSTVINCPITAAEIAKISG | 190 |
| Query: | 188 | TTRETVSHVLKELRQKDIVEMKGKKLLYNNKNYF | 221 |
| | | T+RETVS VLK+LR + ++ K+++ N YF | |
| Sbjct: | 191 | TSRETVSAVLKKLRCEGVISQMNKQIMINRPEYF | 224 |

[5686] A related DNA sequence was identified in S. pyogenes <SEQ ID 3135> which encodes the amino acid sequence <SEQ ID 3136>. Analysis of this protein sequence reveals the following:

```
Possible site: 20
>>> Seems to have no N-terminal signal sequence
----- Final Results -----
    bacterial cytoplasm --- Certainty = 0.4478 (Affirmative) < succ>
      bacterial membrane --- Certainty = 0.0000 (Not Clear) < succ>
        bacterial outside --- Certainty = 0.0000 (Not Clear) < succ>
```

[5687] An alignment of the GAS and GBS proteins is shown below.

| Identities = 130/224 (58%), Positives = 180/224 (80%) | | | |
|---|---|---|---|
| Query: | 1 | MITKEQYFYFRQLDDFKHFTIEQFDHIVSHIKHRTALKNHTLFFEGDYREKLFLIQSGHV | 60 |
| | | +I +E Y Y R+L+DF++F+IEQFD IV ++ R A K+H LFFEGD R+KLFL+ SG+ | |
| Sbjct: | 1 | VIRREDYQYLRKLNDFRYFSIEQFDKIVGQMEFRKAKKDHILFFEGDKRDKLFLVTSGYF | 60 |
| Query: | 61 | KIEQSDASGSFIYTDYVRQGTVFPYGGLFLDDDYHFSAVAITDIEYFSLPMALYEEYSLQ | 120 |
| | | K+EQSD SG+F+YTD++R GT+FPYGGLF DD YHFS VA+TD+ YF P+ L+E+YSL+ | |
| Sbjct: | 61 | KVEQSDQSGTFMYTDFIRHGTIFPYGGLFTDDYYHFSVVAMTDVTYFYFPVDLFEDYSLE | 120 |
| Query: | 121 | NINQMKHLCRKYSKLLRVHEIRLRNMVTSSASMRVIQSLATLLLQVPTERGHLPFPITTI | 180 |
| | | N QMKHL K SKLL +HE+R+RN++TSSAS RVIQSLA LL+++ + LPF +TT | |
| Sbjct: | 121 | NRLQMKHLYSKMSKLLELHELRVRNLITSSASSRVIQSLAILLVEMGKDSDTLPFQLTTT | 180 |
| Query: | 181 | EIANMSGTTRETVSHVLKELRQKDIVEMKGKKLLYNNKNYFKKF | 224 |
| | | +IA +SGTTRETVSHVL++L++++++ +KGK L Y +K+YF ++ | |
| Sbjct: | 181 | DIAQISGTTRETVSHVLRDLKKQELITIKGKYLTYLDKDYFLQY | 224 |

[5688] Based on this analysis, it was predicted that these proteins and their epitopes could be useful antigens for vaccines or diagnostics.

### EXAMPLE 1019

[5689] A DNA sequence (GBSx1087) was identified in S. agalactiae <SEQ ID 3137> which encodes the amino acid sequence <SEQ ID 3138>. Analysis of this protein sequence reveals the following:

```
Possible site: 53
>>> Seems to have no N-terminal signal sequence
----- Final Results -----
                            bacterial cytoplasm --- Certainty = 0.1643(Affirmative) < succ>
                              bacterial membrane --- Certainty = 0.0000(Not Clear) < succ>
                                bacterial outside --- Certainty = 0.0000(Not Clear) < succ>
```

[5690] A related DNA sequence was identified in S. pyogenes <SEQ ID 2161> which encodes the amino acid sequence <SEQ ID 2162>. Analysis of this protein sequence reveals the following:

```
Possible site: 59
>>> Seems to have no N-terminal signal sequence
----- Final Results -----
                            bacterial cytoplasm --- Certainty = 0.1201(Affirmative) < succ>
                              bacterial membrane --- Certainty = 0.0000(Not Clear) < succ>
                                bacterial outside --- Certainty = 0.0000(Not Clear) < succ>
```

[5691] An alignment of the GAS and GBS proteins is shown below.

| Identities = 461/493 (93%), Positives = 478/493 (96%) | | | |
|---|---|---|---|
| Query: | 2 | MSNWDTKFLKKGFTFDDVLLIPAESHVLPNEVDMKTKLADNLTLNIPIITAAMDTVTDSK | 61 |
| | | MSNWDTKFLKKG+TFDDVLLIPAESHVLPNEVD+KTKLADNLTLNIPIITAAMDTVT SK | |
| Sbjct: | 1 | MSNWDTKFLKKGYTFDDVLLIPAESHVLPNEVDLKTKLADNLTLNIPIITAAMDTVTGSK | 60 |
| Query: | 62 | MAIAIARAGGLGIIHKNMSIVDQAEEVRKVKRSENGVIIDPFFLTPDNTVSEAEELMQNY | 121 |
| | | MAIAIARAGGLG+IHKNMSI +QAEEVRKVKRSENGVIIDPFFLTP++ VSEAEELMQ Y | |
| Sbjct: | 61 | MAIAIARAGGLGVIHKNMSITEQAEEVRKVKRSENGVIIDPFFLTPEHKVSEAEELMQRY | 120 |
| Query: | 122 | RISGVPIVETLENRKLVGIITNRDMRFISDYKQLISEHMTSQNLVTAPIGTDLETAERIL | 181 |
| | | RISGVPIVETL NRKLVGIITNRDMRFISDY ISEHMTS++LVTA +GTDLETAERIL | |
| Sbjct: | 121 | RISGVPIVETLANRKLVGIITNRDMRFISDYNAPISEHMTSEHLVTAAVGTDLETAERIL | 180 |
| Query: | 182 | HEHRIEKLPLVDDEGRLSGLITIKDIEKVIEFPKAAKDEFGRLLVAGAVGVTSDTFERAE | 241 |
| | | HEHRIEKLPLVD+ GRLSGLITIKDIEKVIEFP AAKDEFGRLLVA AVGVTSDTFERAE | |
| Sbjct: | 181 | HEHRIEKLPLVDNSGRLSGLITIKDIEKVIEFPHAAKDEFGRLLVAAAVGVTSDTFERAE | 240 |
| Query: | 242 | ALFEAGADAIVIDTAHGHSAGVLRKIAEIRAHFPNRTLIAGNIATAEGARALYDAGVDVV | 301 |
| | | ALFEAGADAIVIDTAHGHSAGVLRKIAEIRAHFPNRTLIAGNIATAEGARALYDAGVDVV | |
| Sbjct: | 241 | ALFEAGADAIVIDTAHGHSAGVLRKIAEIRAHFPNRTLIAGNIATAEGARALYDAGVDVV | 300 |
| Query: | 302 | KVGIGPGSICTTRVVAGVGVPQITAIYDAAAVAREYGKTIIADGGIKYSGDIVKALAAGG | 361 |
| | | KVGIGPGSICTTRVVAGVGVPQ+TAIYDAAAVAREYGKTIIADGGIKYSGDIVKALAAGG | |
| Sbjct: | 301 | KVGIGPGSICTTRVVAGVGVPQVTAIYDAAAVAREYGKTIIADGGIKYSGDIVKALAAGG | 360 |
| Query: | 362 | NAVMLGSMFAGTDEAPGETEIFQGRKFKTYRGMGSIAAMKKGSSDRYFQGSVNEANKLVP | 421 |
| | | NAVMLGSMFAGTDEAPGETEI+QGRKFKTYRGMGSIAAMKKGSSDRYFQGSVNEANKLVP | |
| Sbjct: | 361 | NAVMLGSMFAGTDEAPGETEIYQGRKFKTYRGMGSIAAMKKGSSDRYFQGSVNEANKLVP | 420 |
| Query: | 422 | EGIEGRVAYKGSVADIVFQMLGGIRSGMGYVGAANIKELHDNAQFVEMSGAGLKESHPHD | 481 |
| | | EGIEGRVAYKG+ +DIVFQMLGGIRSGMGYVGA +I+ELH+NAQFVEMSGAGL ESHPHD | |
| Sbjct: | 421 | EGIEGRVAYKGAASDIVFQMLGGIRSGMGYVGAGDIQELHENAQFVEMSGAGLIESHPHD | 480 |
| Query: | 482 | VQITNEAPNYSVH | 494 |
| | | VQITNEAPNYSVH | |
| Sbjct: | 481 | VQITNEAPNYSVH | 493 |

[5692] Based on this analysis, it was predicted that these proteins and their epitopes could be useful antigens for vaccines or diagnostics.

### EXAMPLE 1020

[5693] A DNA sequence (GBSx1089) was identified in S. agalactiae <SEQ ID 3139> which encodes the amino acid sequence <SEQ ID 3140>. This protein is predicted to be MutR. Analysis of this protein sequence reveals the following:

```
Possible site: 23
>>> Seems to have no N-terminal signal sequence
----- Final Results -----
                            bacterial cytoplasm --- Certainty = 0.1841(Affirmative) < succ>
                              bacterial membrane --- Certainty = 0.0000(Not Clear) < succ>
                                bacterial outside --- Certainty = 0.0000(Not Clear) < succ>
```

[5694] The protein has homology with the following sequences in the GENPEPT database.

| >GP: AAD04237 GB: AF007761 MutR [Streptococcus mutans] | | | |
|---|---|---|---|
| Identities = 51/215 (23%), Positives = 102/215 (46%), Gaps = 9/215 (4%) | | | |
| Query: | 5 | GKILKELREDKGISLSSLAKSAQLSKSTLSRFENGETQIGIDKFIKALQTLEVGVTINEV | 64 |
| | | G++ KELR +G+ L +A+ LS S LS+FENG+T + DK I A+Q + +T +E | |
| Sbjct: | 9 | GELYKELRMARGLKLKDIARD-NLSVSQLSKFENGQTMLAADKLILAIQGIH--MTFSEF | 65 |
| Query: | 65 | SILDSKVKAGTSNTDLEQLTLLESYRDNEDIMRIFSFQKQQSCDRIESNVLKILAKLFIS | 124 |
| | | S ++ + ++L L++ +D + + +I + + + K++ K + | |
| Sbjct: | 66 | SYAFTQYQESDLFKTGKKLVELQTKKDIKGLKKILKDYPDTETYNVYNRLNKLVIKAAVY | 125 |
| Query: | 125 | NLGLNMRLPQDEINLVVTYLNGVTQYNDFYFKVICYFQDILPED--VILNKI----SNMT | 178 |
| | | +L + + +E + +YL + ++ ++ + IL +D V L K + | |
| Sbjct: | 126 | SLDSSFEITNEEKEFLTSYLYAIEEWTEYELYLFGNTLFILSDDDLVFLGKAFVERDKLY | 185 |
| Query: | 179 | KEQLPYSKSLVNLLIKQVIIALEKDSVDKAIVFAD | 213 |
| | | +E + K +LI ++I +E S A F + | |
| Sbjct: | 186 | RELSEHKKRAELVLINLILILVEHHSFYHAQYFIE | 220 |

[5695] There is also homology to SEQ ID 628.

[5696] Based on this analysis, it was predicted that this protein and its epitopes, could be useful antigens for vaccines or diagnostics.

### EXAMPLE 1021

[5697] A DNA sequence (GBSx1090) was identified in S. agalactiae <SEQ ID 3141> which encodes the amino acid sequence <SEQ ID 3142>. Analysis of this protein sequence reveals the following:

| Possible site: 15 | | | | |
|---|---|---|---|---|
| >>> Seems to have a cleavable N-term signal seq. | | | | |
| | INTEGRAL | Likelihood = −10.77 | Transmembrane | 269-285 (265-287) |
| | INTEGRAL | Likelihood = −6.90 | Transmembrane | 33-49 (31-51) |
| | INTEGRAL | Likelihood = −6.79 | Transmembrane | 182-198 (176-200) |
| | INTEGRAL | Likelihood = −6.37 | Transmembrane | 117-133 (113-135) |
| | INTEGRAL | Likelihood = −5.57 | Transmembrane | 240-256 (232-259) |
| | INTEGRAL | Likelihood = −3.40 | Transmembrane | 223-239 (220-239) |
| | INTEGRAL | Likelihood = −0.96 | Transmembrane | 56-72 (55-72) |

```
----- Final Results -----
                              bacterial membrane --- Certainty = 0.5310(Affirmative) < succ>
                                bacterial outside --- Certainty = 0.0000(Not Clear) < succ>
                            bacterial cytoplasm --- Certainty = 0.0000(Not Clear) < succ>
```

[5698] A related DNA sequence was identified in S. pyogenes <SEQ ID 3143> which encodes the amino acid sequence <SEQ ID 3144>. Analysis of this protein sequence reveals the following:

| Possible site: 48 | | | | |
|---|---|---|---|---|
| >>> Seems to have an uncleavable N-term signal seq | | | | |
| | INTEGRAL | Likelihood = −10.99 | Transmembrane | 269-285 (264-286) |
| | INTEGRAL | Likelihood = −8.76 | Transmembrane | 117-133 (112-135) |
| | INTEGRAL | Likelihood = −7.70 | Transmembrane | 179-195 (174-200) |
| | INTEGRAL | Likelihood = −4.83 | Transmembrane | 34-50 (32-52) |
| | INTEGRAL | Likelihood = −4.46 | Transmembrane | 213-229 (211-230) |
| | INTEGRAL | Likelihood = −4.14 | Transmembrane | 240-256 (232-259) |
| | INTEGRAL | Likelihood = −0.69 | Transmembrane | 91-107 (91-108) |
| | INTEGRAL | Likelihood = −0.32 | Transmembrane | 4-20 (4-20) |

```
----- Final Results -----
                              bacterial membrane --- Certainty = 0.5394(Affirmative) < succ>
                                bacterial outside --- Certainty = 0.0000(Not Clear) < succ>
                            bacterial cytoplasm --- Certainty = 0.0000(Not Clear) < succ>
```

[5699] A related sequence was also identified in GAS <SEQ ID 9181> which encodes the amino acid sequence <SEQ ID 9182>. Analysis of this protein sequence reveals the following:

| Possible site: 38 | | | |
|---|---|---|---|
| >>> Seems to have an uncleavable N-term signal seq | | | |
| INTEGRAL | Likelihood = −10.99 | Transmembrane | 259-275 (254-276) |
| INTEGRAL | Likelihood = −8.76 | Transmembrane | 107-123 (102-125) |
| INTEGRAL | Likelihood = −7.70 | Transmembrane | 169-185 (164-190) |
| INTEGRAL | Likelihood = −4.83 | Transmembrane | 24-40 ( 22-42) |
| INTEGRAL | Likelihood = −4.46 | Transmembrane | 203-219 (201-220) |
| INTEGRAL | Likelihood = −4.14 | Transmembrane | 230-246 (222-249) |
| INTEGRAL | Likelihood = −0.69 | Transmembrane | 81-97 ( 81-98) |

```
----- Final Results -----
      bacterial membrane --- Certainty = 0.539 (Affirmative) < succ>
        bacterial outside --- Certainty = 0.0000 (Not Clear) < succ>
    bacterial cytoplasm --- Certainty = 0.0000 (Not Clear) < succ>
```

[5700] An alignment of the GAS and GBS proteins is shown below.

| Identities = 200/287 (69%), Positives = 244/287 (84%) | | | |
|---|---|---|---|
| Query: | 1 | MEGLLIALIPMFAWGSIGFVSNKIGGRPNQQTFGMTLGALLFAIIVWLFKQPEMTASLWI | 60 |
| | | +EG+ ALIPMF WGSIGFVSNKIGG+P+QQT GMT GALLF++ VWL +PEMT LW+ | |
| Sbjct: | 1 | LEGIFYALIPMFTWGSIGFVSNKIGGKPSQQTLGMTFGALLFSLAVWLIVRPEMTLQLWL | 60 |
| Query: | 61 | FGILGGILWSVGQNGQFQAMKYMGVSVANPLSSGAQLVGGSLVGALVFHEWTKPIQFILG | 120 |
| | | FGILGG +WS+GQ GQF AM+YMGVSVANPLSSG+QLV GSL+G LVFHEWT+P+QF++G | |
| Sbjct: | 61 | FGILGGFIWSIGQTGQFHAMQYMGVSVANPLSSGSQLVLGSLIGVLVFHEWTRPMQFVVG | 120 |
| Query: | 121 | LTALTLLVIGFYFSSKRDVSEQALATHQEFSKGFATIAYSTVGYISYAVLFNNIMKFDAM | 180 |
| | | AL LL++GFYFSSK+D + + FSKGF + YST+GY+ YAVLFNNIMKF+ + | |
| Sbjct: | 121 | SLALLLLIVGFYFSSKQDDANAQVNHLHNFSKGFRALTYSTIGYVMYAVLFNNIMKFEVL | 180 |
| Query: | 181 | AVILPMAVGMCLGAICFMKFRVNFEAVVVKNMITGLMWGVGNVFMLLAAAKAGLAIAFSF | 240 |
| | | +VILPMAVGM LGAI FM F+++ +V+KN +GL+WG+GN+FMLLAA+KAGLAIAFSF | |
| Sbjct: | 181 | SVILPMAVGMVLGAITFMSFKISIDQYVIKNSVVGLLWGIGNIFMLLAASKAGLAIAFSF | 240 |
| Query: | 241 | SQLGVIISIIGGILFLGETKTKKEQKWVVMGILCFVMGAILLGIVKS | 287 |
| | | SQLG IISI+GGILFLGETKTKKE +WVV GI+CF++GAILLG+VKS | |
| Sbjct: | 241 | SQLGAIISIVGGILFLGETKTKKEMRWVVTGIICFIVGAILLGVVKS | 287 |

[5701] Based on this analysis, it was predicted that these proteins and their epitopes could be useful antigens for vaccines or diagnostics.

### EXAMPLE 1022

[5702] A DNA sequence (GBSx1092) was identified in S. agalactiae <SEQ ID 3145> which encodes the amino acid sequence <SEQ ID 3146>. This protein is predicted to be recf protein (recF). Analysis of this protein sequence reveals the following:

```
Possible site: 56
>>> Seems to have no N-terminal signal sequence
----- Final Results -----
                            bacterial cytoplasm --- Certainty = 0.2653(Affirmative) < succ>
                              bacterial membrane --- Certainty = 0.0000(Not Clear) < succ>
                                bacterial outside --- Certainty = 0.0000(Not Clear) < succ>
```

[5703] A related DNA sequence was identified in S. pyogenes <SEQ ID 3147> which encodes the amino acid sequence <SEQ ID 3148>. Analysis of this protein sequence reveals the following:

```
Possible site: 56
>>> Seems to have no N-terminal signal sequence
----- Final Results -----
                            bacterial cytoplasm --- Certainty = 0.1677(Affirmative) < succ>
                              bacterial membrane --- Certainty = 0.0000(Not Clear) < succ>
                                bacterial outside --- Certainty = 0.0000(Not Clear) < succ>
```

[5704] An alignment of the GAS and GBS proteins is shown below.

| Identities = 248/364 (68%), Positives = 300/364 (82%), Gaps = 1/364 (0%) | | | |
|---|---|---|---|
| Query: | 1 | MWIKNISLKHYRNYEEAQVDFSPNLNIFIGRNAQGKTNFLEAIYFLALTRSHRTRSDKEL | 60 |
| | | MWIK + LKHYRNY+ FS LN+FIG NAQGKTNFLEAIYFL+LTRSHRTR+DKEL | |
| Sbjct: | 1 | MWIKELELKHYRNYDHLLASFSSGLNVFIGNNAQGKTNFLEAIYFLSLTRSHRTRADKEL | 60 |
| Query: | 61 | VHFKHHDVQITGEVIRKSGHLNLDIQLSEKGRITKVNHLKQAKLSDYIGAMTVVLFAPED | 120 |
| | | +HF H V +TG++ R SG ++L+I LS+KGR+TK+N LKQAKLSDYIG M VVLFAPED | |
| Sbjct: | 61 | IHFDHSTVSLTGKIQRISGTVDLEINLSDKGRVTKINALKQAKLSDYIGTMMVVLFAPED | 120 |
| Query: | 121 | LQLVKGAPSLRRKFLDIDIGQIKPTYLAELSNYNHVLKQRNTYLKTTNNVDKTFLTVLDE | 180 |
| | | LQLVKGAPSLRRKF+DID+GQIKP YL+ELS+YNHVLKQRN+YLK+ +D FL VLDE | |
| Sbjct: | 121 | LQLVKGAPSLRRKFIDIDLGQIKPVYLSELSHYNHVLKQRNSYLKSAQQIDAAFLAVLDE | 180 |
| Query: | 181 | QLADYGSRVIEHRFDFIQALNDEADKHHYIISTELEHLSIHYKSSIEFTDKSSIREHFLN | 240 |
| | | QLA YG+RV+EHR DFI AL EA+ HH IS LE LS+ Y+SS+ F K++I + FL+ | |
| Sbjct: | 181 | QLASYGARVMEHRIDFINALEKEANTHHQAISNGLESLSLSYQSSVVFDKKTNIYQQFLH | 240 |
| Query: | 241 | QLSKSHSRDIFKKNTSIGPHRDDITFFINDINATFASQGQQRSLILSLKLAEIELIKTVT | 300 |
| | | QL K+H +D F+KNTS+GPHRD++ F+IN +NA FASQGQ RSLILSLK+AE+ L+K +T | |
| Sbjct: | 241 | QLEKNHQKDFFRKNTSVGPHRDELAFYINGMNANFASQGQHRSLILSLKMAEVSLMKALT | 300 |
| Query: | 301 | NDYPILLLDDVMSELDNHRQLKLLEG-IKENVQTFITTTSLEHLSALPDQLKIFNVSDGT | 359 |
| | | D PILLLDDVMSELDN RQ KLLE IKENVQTFITTTSL+HLS LP+ ++IF+V+ GT | |
| Sbjct: | 301 | GDNPILLLDDVMSELDNTRQTKLLETVIKENVQTFITTTSLDHLSQLPEGIRIFHVTKGT | 360 |
| Query: | 360 | ISIN | 363 |
| | | + I+ | |
| Sbjct: | 361 | VQID | 364 |

[5705] Based on this analysis, it was predicted that these proteins and their epitopes could be useful antigens for vaccines or diagnostics.

### EXAMPLE 1023

[5706] A DNA sequence (GBSx1093) was identified in S. agalactiae <SEQ ID 3149> which encodes the amino acid sequence <SEQ ID 3150>. Analysis of this protein sequence reveals the following:

```
Possible site: 26
>>> Seems to have no N-terminal signal sequence
----- Final Results -----
                            bacterial cytoplasm --- Certainty = 0.1807(Affirmative) < succ>
                              bacterial membrane --- Certainty = 0.0000(Not Clear) < succ>
                                bacterial outside --- Certainty = 0.0000(Not Clear) < succ>
```

[5707] The protein has homology with the following sequences in the GENPEPT database.

| >GP: CAA61548 GB: X89367 orf121 [Lactococcus lactis] | | | |
|---|---|---|---|
| Identities = 56/116 (48%), Positives = 74/116 (63%), Gaps = 3/116 (2%) | | | |
| Query: | 3 | YKLFDEYITLQSLLKEIGIIQSGGAIKKFLADNR--VLFNGDLENRRGKKLRLGDIITIP | 60 |
| | | Y LF+EYITL LLKE+G+I +GG K FLA+N + +NG+ ENRRGKKLR GD++ P | |
| Sbjct: | 4 | YILFEEYITLGQLLKELGLISTGGQPKIFLAENEGNIFYNGEAENRRGKKLRDGDLLEFP | 63 |
| Query: | 61 | DQNIEIIIRKPSDQEIEERNIEIAEKQRVSAIVKEMNKNTNKGKSKTSKKPVRFPG | 116 |
| | | ++++ + I+E E AE+ RV AIVK+MN NK K P RFPG | |
| Sbjct: | 64 | TFDLKVTFEQADADAIKEHEAEKAEEARVKAIVKKMNAE-NKTTKPAKKAPPRFPG | 118 |

[5708] A related DNA sequence was identified in S. pyogenes <SEQ ID 3151> which encodes the amino acid sequence <SEQ ID 3152>. Analysis of this protein sequence reveals the following:

```
Possible site: 34
>>> Seems to have no N-terminal signal sequence
----- Final Results -----
                            bacterial cytoplasm --- Certainty = 0.0483(Affirmative) < succ>
                              bacterial membrane --- Certainty = 0.0000(Not Clear) < succ>
                                bacterial outside --- Certainty = 0.0000(Not Clear) < succ>
```

[5709] An alignment of the GAS and GBS proteins is shown below.

| Identities = 74/136 (54%), Positives = 94/136 (68%), Gaps = 20/136 (14%) | | | |
|---|---|---|---|
| Query: | 1 | MDYKLFDEYITLQSLLKEIGIIQSGGAIKKFLADNRVLFNGDLENRRGKKLRLGDIITIP | 60 |
| | | M YKLF E+ITLQ+LLKE+GIIQSGGAIK FLA+ VLFNG+ E RRGKK+R+GD I++P | |
| Sbjct: | 9 | MIYKLFTEFITLQALLKELGIIQSGGAIKGFLAETTVLFNGEDEKRRGKKIRVGDKISLP | 68 |
| Query: | 61 | DQNIEIIIRKPSDQEIEERNIEIAEKQRVSAIVKEMNKNTNKGKSK------TSKK---- | 110 |
| | | DQ++ I I +PS +E E+ E+AEK RV+A+VK+MN+ K SK T+KK | |
| Sbjct: | 69 | DQDLIITIVEPSQEEKEQFAEEMAEKTRVAALVKQMNQANKKTSSKHNNRQSTTKKSLRA | 128 |
| Query: | 111 | ----------PVRFPG | 116 |
| | | PVRFPG | |
| Sbjct: | 129 | TKKTKGKPTAPVRFPG | 144 |

[5710] Based on this analysis, it was predicted that these proteins and their epitopes could be useful antigens for vaccines or diagnostics.

### EXAMPLE 1024

[5711] A DNA sequence (GBSx1094) was identified in S. agalactiae <SEQ ID 3153> which encodes the amino acid sequence <SEQ ID 3154>. Analysis of this protein sequence reveals the following:

| Possible site: 47 | | | | |
|---|---|---|---|---|
| >>> Seems to have no N-terminal signal sequence | | | | |
| | INTEGRAL | Likelihood = −1.86 | Transmembrane | 269-285 (267-285) |

```
----- Final Results -----
                              bacterial membrane --- Certainty = 0.1744(Affirmative) < succ>
                                bacterial outside --- Certainty = 0.0000(Not Clear) < succ>
                            bacterial cytoplasm --- Certainty = 0.0000(Not Clear) < succ>
```

[5712] A related DNA sequence was identified in S. pyogenes <SEQ ID 3155> which encodes the amino acid sequence <SEQ ID 3156>. Analysis of this protein sequence reveals the following:

```
Possible site: 48
>>> Seems to have no N-terminal signal sequence
----- Final Results -----
    bacterial cytoplasm --- Certainty = 0.3008 (Affirmative) < succ>
      bacterial membrane --- Certainty = 0.0000 (Not Clear) < succ>
        bacterial outside --- Certainty = 0.0000 (Not Clear) < succ>
```

[5713] An alignment of the GAS and GBS proteins is shown below.

| Identities = 227/413 (54%), Positives = 309/413 (73%) | | | |
|---|---|---|---|
| Query: | 1 | MKIVEGVSLHLIKNQQFKTNHLTFRFSGDFNNKTVARRSLVAQMLVTANAKYPKVQEFRE | 60 |
| | | MKIV+GV LHLIK +QFKTNN+TFRFSGD N KTVA++ LVAQNL TAN YP V++FRE | |
| Sbjct: | 1 | MKIVQGVQLHLIKTKQFKTNHITFRFSGDLNQKTVAKKVLVAQMLATANECYPTVRQFRE | 60 |
| Query: | 61 | KLASLYGASLSTKISTKGLVHIVDIDIVFVKNTFTLEQENIVEQIITFLEDMLFSPLISL | 120 |
| | | KLA LYGASLST + TKGLVHIVDIDI F+++ + E I++++I FL+D+LFSPL+S+ | |
| Sbjct: | 61 | KLARLYGASLSTNVLTKGLVHIVDIDITFIQDRYACNGEKILDEMIQFLKDILFSPLLSI | 120 |
| Query: | 121 | EQYQTSIFDTEKKNLIQYLEADIEDNFYSSDLALKSLFYNNKTLRLPKYGTASLVESENS | 180 |
| | | QYQ +F+TEK NLI Y+E+D ED+FY S L +K LFY NK L++ +YG+ L+ E + | |
| Sbjct: | 121 | AQYQPKVFETEKNNLINYIESDREDSFYYSSLKVKELFYCNKNLQNSEYGSPELIAKETA | 180 |
| Query: | 181 | FTAYQEFQKMLKEDQLDIFVVGDFDDYRMIQAFNRMAFEPRHKVLAFDYTQTYENITRSQ | 240 |
| | | +T+YQEF KML EDQ+DIF++GDFDDYR++Q ++ + R+K L F + Q NI + | |
| Sbjct: | 181 | YTSYQEFHKMLNEDQIDIFILGDFDDYRVVQLIHQFPLDNRNKNLNFFHLQNSVNIIKES | 240 |
| Query: | 241 | VEDKDVNQSIMQLAYHLPITYKDEDYFALIVFNGLFGAFAHSLLFTEIREKQGLAYTIGS | 300 |
| | | +E + V+QSI+QLAYH P + DY+AL++ NGL G+FAHS LF +IRE++GLAY+IG | |
| Sbjct: | 241 | IEKRAVHQSILQLAYHFPSVFGQRDYYALVLLNGLLGSFAHSRLFIKIREEEGLAYSIGC | 300 |
| Query: | 301 | QFDSFTGLFTIYAGIDKENRERFLKLINKQFNNIKMGRFSSTLLKQTKDILKMNYVLASD | 360 |
| | | +FDS+TGLF IY GID ++R + L+LI ++ N IKMGRFS L+K+T+ +L N +L+ D | |
| Sbjct: | 301 | RFDSYTGLFEIYTGIDSQHRTKTLQLIIQELNAIKMGRFSEQLIKKTRSMLLNNALLSED | 360 |
| Query: | 361 | NPKVIVDHIYHEHYLDQFHTSALFIDKVDDVTKSDIVSVATKLKLQAFYFLEG | 413 |
| | | K I++IY Y+D ++ +I V++V K+DI+ VA LKLQ YFLEG | |
| Sbjct: | 361 | YNKNIIERIYRSSYIDSSYSIKNWIKGVNEVNKADIIKVANLLKLQTVYFLEG | 413 |

[5714] SEQ ID 3154 (GBS400) was expressed in E. coli as a His-fusion product. SDS-PAGE analysis of total cell extract is shown in FIG. 76 (lane 2; MW 49.2 kDa). It was also expressed in E. coli as a GST-fusion product. SDS-PAGE analysis of total cell extract is shown in FIG. 84 (lane 3; MW 74 kDa) and in FIG. 177 (lane 6; MW 74 kDa).

[5715] GBS400-GST was purified as shown in FIG. 217, lane 10.

[5716] Based on this analysis, it was predicted that these proteins and their epitopes could be useful antigens for vaccines or diagnostics.

### EXAMPLE 1025

[5717] A DNA sequence (GBSx1095) was identified in S. agalactiae <SEQ ID 3157> which encodes the amino acid sequence <SEQ ID 3158>. Analysis of this protein sequence reveals the following:

```
Possible site: 50
>>> Seems to have no N-terminal signal sequence
----- Final Results -----
    bacterial cytoplasm --- Certainty = 0.3473 (Affirmative) < succ>
      bacterial membrane --- Certainty = 0.0000 (Not Clear) < succ>
        bacterial outside --- Certainty = 0.0000 (Not Clear) < succ>
```

[5718] A related DNA sequence was identified in S. pyogenes <SEQ ID 3159> which encodes the amino acid sequence <SEQ ID 3160>. Analysis of this protein sequence reveals the following:

```
Possible site: 45
>>>Seems to have no N-terminal signal sequence
----- Final Results -----
    bacterial cytoplasm --- Certainty = 0.4298 (Affirmative) < succ>
      bacterial membrane --- Certainty = 0.0000 (Not Clear) < succ>
        bacterial outside --- Certainty = 0.0000 (Not Clear) < succ>
```

[5719] An alignment of the GAS and GBS proteins is shown below.

| Identities = 207/424 (48%), Positives = 276/424 (64%), Gaps = 3/424 (0%) | | | |
|---|---|---|---|
| Query: | 5 | KITYQNLQEEVYKLTLESGLNVYLIPKPSFKETVGVLTANFGSLHTKYTRNGCVEHYPAG | 64 |
| | | KI Y N+ E++Y + LE+GL VY I K F E +LT FGSL K T + PAG | |
| Sbjct: | 6 | KINYPNIDEDLYYVKLENGLTVYFIKKIGFLEKTAMLTVGFGSLDNKLTVDDESRDAPAG | 65 |
| Query: | 65 | IAHFLEHKLFELDKGQDAATQFTKYGAESNAFTTFDKTSFYFSTISHITNCLDILLDFVL | 124 |
| | | IAHFLEHKLFE + G D + +FT+ GAE+NAFTTF++TSF+FST S L++L FVL | |
| Sbjct: | 66 | IAHFLEHKLFEDESGGDISLKFTQLGAETNAFTTFNQTSFFFSTASKFQENLELLQYFVL | 125 |
| Query: | 125 | TTNFTEESITKEKDIIKQEIEMYQDDPEYRLYQGVLSNLYPNSPLAFDIAGDYQSISQIT | 184 |
| | | + N T+ES+++EK II QEI+MYQDD +YR Y G+L NL+P + LA DIAG SI +IT | |
| Sbjct: | 126 | SANITDESVSREKKIIGQEIDMYQDDADYRAYSGILQNLFPKTSLANDIAGSKASIQKIT | 185 |
| Query: | 185 | LTDLQENHKDFYQLSNMNLVLVGQFSPQEIITYLQKNSHFTSY--SQNIDRDSISLEPVI | 242 |
| | | L+ +H FYQ +NM+L +VG E +Q+ SY + + D + PVI | |
| Sbjct: | 186 | KILLETHHTYFYQPTNMSLFIVGDIDIDETFLAIQRFQTTLSYPDRKRVTVDPLHYYPVI | 245 |
| Query: | 243 | KNNSCHMTVTKPKLAIGYRKSNHMIHGSYLKEKIGLQLFFAMLLGWTSTINQDWYESGQI | 302 |
| | | K++S M VT KL +G+R + S L +I L+LF +ML+GWTS I YE G+I | |
| Sbjct: | 246 | KSSSVDMDVTTAKLVVGFRGYLTLTQHSLLTYRIALKLFLSMLIGWTSKIYHTLYEDGKI | 305 |
| Query: | 303 | DDSFDIEIEVHPDFECVIISLDTTEPIAFSTQLRLLLKNALQSSDLTESHLKNVKRELYG | 362 |
| | | DDSFD+++E+H +F+ V+ISLDT EPIA S +R L S + T HL +K+E+YG | |
| Sbjct: | 306 | DDSFDVDVEIHHNFQFVLISLDTPEPIAMSNYIRQKLATIKISKEFTNEHLNLLKKEMYG | 365 |
| Query: | 363 | DFLRSLDSIENLAMQFVTYLYDG-KTMYLDLPSIVEELDLEDVITIGKDFLDNADTSDFV | 421 |
| | | DF++SLDSIE+L QF YL D K Y D+P I+E L L+DV+TIGK F + AD SDF | |
| Sbjct: | 366 | DFIQSLDSIEHLTHQFSLYLSDSDKETYFDIPKIIERLTLKDVVTIGKAFFEKADASDFT | 425 |
| Query: | 422 | IFPK | 425 |
| | | +FPK | |
| Sbjct: | 426 | VFPK | 429 |

[5720] Based on this analysis, it was predicted that these proteins and their epitopes could be useful antigens for vaccines or diagnostics.

### EXAMPLE 1026

[5721] A DNA sequence (GBSx1096) was identified in S. agalactiae <SEQ ID 3161> which encodes the amino acid sequence <SEQ ID 3162>. This protein is predicted to be phosphotidylglycerophosphate synthase (pgsA). Analysis of this protein sequence reveals the following:

| Possible site: 55 | | | | |
|---|---|---|---|---|
| >>> Seems to have no N-terminal signal sequence | | | | |
| | INTEGRAL | Likelihood = −8.17 | Transmembrane | 17-33 (14-39) |
| | INTEGRAL | Likelihood = −3.77 | Transmembrane | 92-108 (88-108) |
| | INTEGRAL | Likelihood = −2.87 | Transmembrane | 144-160 (142-162) |
| | INTEGRAL | Likelihood = −1.65 | Transmembrane | 42-58 (42-59) |

```
----- Final Results -----
                              bacterial membrane --- Certainty = 0.4270(Affirmative) < succ>
                                bacterial outside --- Certainty = 0.0000(Not Clear) < succ>
                            bacterial cytoplasm --- Certainty = 0.0000(Not Clear) < succ>
```

[5722] A related GBS nucleic acid sequence <SEQ ID 10293> which encodes amino acid sequence <SEQ ID 10294> was also identified.

[5723] A related DNA sequence was identified in S. pyogenes <SEQ ID 3163> which encodes the amino acid sequence <SEQ ID 3164>. Analysis of this protein sequence reveals the following:

| Possible site: 48 | | | | |
|---|---|---|---|---|
| >>> Seems to have a cleavable N-term signal seq. | | | | |
| | INTEGRAL | Likelihood = −6.64 | Transmembrane | 76-92 (72-102) |
| | INTEGRAL | Likelihood = −5.36 | Transmembrane | 136-152 (131-164) |
| | INTEGRAL | Likelihood = −2.34 | Transmembrane | 98-114 (97-114) |

```
----- Final Results -----
                              bacterial membrane --- Certainty = 0.3654(Affirmative) < succ>
                                bacterial outside --- Certainty = 0.0000(Not Clear) < succ>
                            bacterial cytoplasm --- Certainty = 0.0000(Not Clear) < succ>
```

[5724] An alignment of the GAS and GBS proteins is shown below.

| Identities = 145/180 (80%), Positives = 160/180 (88%) | | | |
|---|---|---|---|
| Query: | 8 | MMKKENIPNLLTVVRILMIPLFIVLTSVTTSTTWHIVAAIVFAIASLTDYLDGYLARKWQ | 67 |
| | | M+KKENIPNLLT+VRI MIP F+ +TS + WHI AA++FAIAS TDYLDGYLARKW | |
| Sbjct: | 1 | MIKKSNIPNLLTLVRIAMIPFFLFITSSSNKVGWHIFAAVIFAIASFTDYLDGYLARKWH | 60 |
| Query: | 68 | VVTNFGKFADPLADKMLVMSAFIMLVGLDLAPAWVSAIIICRELAVTGLRLLLVETGGTV | 127 |
| | | V +NFGKFADPLADKMLVMSAFIMLVGL L PAWVSA+IICRELAVTGLRLLLVETGG V | |
| Sbjct: | 61 | VASNFGKFADPLADKMLVMSAFIMLVGLGLVPAWVSAVIICRELAVTGLRLLLVETGGKV | 120 |
| Query: | 128 | LAAAMPGKIKTATQMFAVIFLLVHWMTLGNIMLYIALFFTLYSGYDYFKGAGFLFKDTFK | 187 |
| | | LAAAMPGKIKTATQM ++I LL HW+ LGN++LYIALFFT+YSGYDYFKGA FLFKDTFK | |
| Sbjct: | 121 | LAAAMPGKIKTATQMLSIILLLCHWIFLGNVLLYIALFFTIYSGYDYFKGASFLFKDTFK | 180 |

[5725] A related GBS gene <SEQ ID 8705> and protein <SEQ ID 8706> were also identified. Analysis of this protein sequence reveals the following:

| Lipop Possible site: −1 Crend: 4 | | | | |
|---|---|---|---|---|
| SRCFLG: 0 | | | | |
| McG: Length of UR: 9 | | | | |
| Peak Value of UR: 3.03 | | | | |
| Net Charge of CR: 1 | | | | |
| McG: Discrim Score: 6.36 | | | | |
| GvH: Signal Score (−7.5): −0.400001 | | | | |
| Possible site: 48 | | | | |
| >>> Seems to have a cleavable N-term signal seq. | | | | |
| Amino Acid Composition: calculated from 49 | | | | |
| ALOM program count: 2 value: −3.77 threshold: 0.0 | | | | |
| | INTEGRAL | Likelihood = −3.77 | Transmembrane | 85-101 (81-101) |
| | INTEGRAL | Likelihood = −2.87 | Transmembrane | 137-153 (135-155) |
| | PERIPHERAL | Likelihood = 1.27 | 109 | |

```
modified ALOM score: 1.25
icm1 HYPID: 7 CFP: 0.251
*** Reasoning Step: 3
----- Final Results -----
                              bacterial membrane --- Certainty = 0.2508(Affirmative) < succ>
                                bacterial outside --- Certainty = 0.0000(Not Clear) < succ>
                            bacterial cytoplasm --- Certainty = 0.0000(Not Clear) < succ>
```

[5726] Based on this analysis, it was predicted that these proteins and their epitopes could be useful antigens for vaccines or diagnostics.

### EXAMPLE 1027

[5727] A DNA sequence (GBSx1097) was identified in S. agalactiae <SEQ ID 3165> which encodes the amino acid sequence <SEQ ID 3166>. This protein is predicted to be ABC transporter ATP-binding protein (potA): Analysis of this protein sequence reveals the following:

```
Possible site: 32
>>> Seems to have no N-terminal signal sequence
----- Final Results -----
                            bacterial cytoplasm --- Certainty = 0.1805(Affirmative) < succ>
                              bacterial membrane --- Certainty = 0.0000(Not Clear) < succ>
                                bacterial outside --- Certainty = 0.0000(Not Clear) < succ>
```

[5728] The protein has homology with the following sequences in the GENPEPT database.

| >GP:AAC61484 GB:AF082738 ABC transporter ATP-binding protein | | | |
|---|---|---|---|
| [Streptococcus pyogenes] | | | |
| Identities = 201/279 (72%), Positives = 231/279 (82%) | | | |
| Query: | 1 | MTNIITVNNLFFKYDSNQTHYQLENVSFHVKQGEWLSIIGHNGSGKSTTVRLIDGLLEAE | 60 |
| | | M+ II + + F Y +Q L+ VSFHVKQGEWLSIIGHNGSGKSTT+RLIDGLLE E | |
| Sbjct: | 18 | MSAIIELKKVTFNYHKDQEKPTLDGVSFHVKQGEWLSIIGHNGSGKSTTIRLIDGLLEPE | 77 |
| Query: | 61 | SGQIIIDGQELTEDNVWELRHKIGMVFQNPDNQFVGATVEDDVAFGLENKGIPLKDMKER | 120 |
| | | SG II+DG LT NVWE+RHKIGMVFQNPDNQFVGATVEDDVAFGLENKGI +D+KER | |
| Sbjct: | 78 | SGSIIVDGDLLTITNVWEIRHKIGMVFQNPDNQFVGATVEDDVAFGLENKGIAHEDIKER | 137 |
| Query: | 121 | VDQALDLVGMSEFKMREPARLSGGQKQRVAIAGAVAMRPQVIILDEATSMLDPEGRLELI | 180 |
| | | V+ AL+LVGM FK +EPARLSGGQKQRVAIAGAVAM+P++IILDEATSMLDP+GRLELI | |
| Sbjct: | 138 | VNHALELVGMQNFKEKEPARLSGGQKQRVAIAGAVAMKPKIIILDEATSMLDPKGRLELI | 197 |
| Query: | 181 | RTIRAIRQKYNLTVISITHDLDEVALSDRVIVMKNGKVESTSTPKALFGRGNRLISLGLD | 240 |
| | | +TI+ IR Y LTVISITHDLDEVALSDRV+VMK+G+VESTSTP+ LF RG+ L+ LGLD | |
| Sbjct: | 198 | KTIKNIRDDYQLTVISITHDLDEVALSDRVLVMKDGQVESTSTPEQLFARGDELLQLGLD | 257 |
| Query: | 241 | VPFTSRLMAELAANGLDIGTEYLTEKELEEQLWELNLKM | 279 |
| | | +PFT+ ++ L G I YLTEKELE QL +L KM | |
| Sbjct: | 258 | IPFTTSVVQMLQEEGYPIDYGYLTEKELENQLCQLISKM | 296 |

[5729] A related DNA sequence was identified in S. pyogenes <SEQ ID 3167> which encodes the amino acid sequence <SEQ ID 3168>. Analysis of this protein sequence reveals the following:

```
          Possible site: 19
>>> Seems to have no N-terminal signal sequence
----- Final Results -----
    bacterial cytoplasm --- Certainty = 0.2235 (Affirmative) < succ>
      bacterial membrane --- Certainty = 0.0000 (Not Clear) < succ>
        bacterial outside --- Certainty = 0.0000 (Not Clear) < succ>
RGD motif: 247-249
```

[5730] An alignment of the GAS and GBS proteins is shown below.

| Identities = 200/279 (71%), Positives = 231/279 (82%) | | | |
|---|---|---|---|
| Query: | 1 | MTNIITVNNLFFKYDSNQTHYQLENVSFHVKQGEWLSIIGHNGSGKSTTVRLIDGLLEAE | 60 |
| | | M+ II + + F Y +Q L+ VSFHVKQGEWLSIIGHNGSGKSTT+RLIDGLLE E | |
| Sbjct: | 18 | MSAIIELKKVTFNYHKDQEKPTLDGVSFHVKQGEWLSIIGHNGSGKSTTIRLIDGLLEPE | 77 |
| Query: | 61 | SGQIIIDGQELTEDNVWELRHKIGMVFQNPDNQFVGATVEDDVAFGLENKGIPLKDMKER | 120 |
| | | SG II+DG LT NVWE+RHKIGMVFQNPDNQFVGATVEDDVAFGLENKGI +D+KER | |
| Sbjct: | 78 | SGSIIVDGDLLTITNVWEIRHKIGMVFQNPDNQFVGATVEDDVAFGLENKGIAHEDIKER | 137 |
| Query: | 121 | VDQALDLVGMSEFKMREPARLSGGQKQRVAIAGAVAMRPQVIILDEATSMLDPEGRLELI | 180 |
| | | V+ AL+LVGM FK +EPARLSGGQKQRVAIAGAVAM+P++IILDEATSMLDP+GRLELI | |
| Sbjct: | 138 | VNHALELVGMQNFKEKEPARLSGGQKQRVAIAGAVAMKPKIIILDEATSMLDPKGRLELI | 197 |
| Query: | 181 | RTIRAIRQKYNLTVISITHDLDEVALSDRVIVMKNGKVESTSTPKALFGRGNRLISLGLD | 240 |
| | | +TI+ IR Y LTVISITHDLDEVALSDRV+VMK+G+VESTSTP+ LF RG+ L+ LGLD | |
| Sbjct: | 198 | KTIKNIRDDYQLTVISITHDLDEVALSDRVLVMKDGQVESTSTPEQLFARGDELLQLGLD | 257 |
| Query: | 241 | VPFTSRLMAELAANGLDIGTEYLTEKELEEQLWELNLKM | 279 |
| | | +PFT+ ++ L G + YLTEKELE QL +L KM | |
| Sbjct: | 258 | IPFTTSVVQMLQEEGYPIDYGYLTEKELENQLCQLISKM | 296 |

[5731] Based on this analysis, it was predicted that these proteins and their epitopes could be useful antigens for vaccines or diagnostics.

### EXAMPLE 1028

[5732] A DNA sequence (GBSx1098) was identified in S. agalactiae <SEQ ID 3169> which encodes the amino acid sequence <SEQ ID 3170>. Analysis of this protein sequence reveals the following:

```
Possible site: 49
>>> Seems to have no N-terminal signal sequence
      INTEGRAL Likelihood = −0.27  Transmembrane 154-170 (154-170)
----- Final Results -----
      bacterial membrane --- Certainty = 0.1107 (Affirmative) < succ>
        bacterial outside --- Certainty = 0.0000 (Not Clear) < succ>
    bacterial cytoplasm --- Certainty = 0.0000 (Not Clear) < succ>
```

[5733] The protein has homology with the following sequences in the GENPEPT database.

| >GP: CAB11922 GB: Z99104 similar to ABC transporter (ATP-binding | | | |
|---|---|---|---|
| protein) [Bacillus subtilis] | | | |
| Identities = 141/242 (58%), Positives = 188/242 (77%), Gaps = 1/242 (0%) | | | |
| Query: | 16 | TPFEGRALFDVNLKIEDASYTAFIGHTGSGKSTIMQLLNGLHIPTKGEVIVDDFSIKAGD | 75 |
| | | TPFE AL+D+N I++ SY A IGHTGSGKST++Q LNGL PTKG++ + I+AG | |
| Sbjct: | 3 | TPFERLALYDINASIKEGSYVAVIGHTGSGKSTLLQHLNGLLKPTKGQISLGSTVIQAGK | 62 |
| Query: | 76 | KNKEIKFIRQKVGLVFQFPESQLFEETVLKDVAFGPQNFGISQIEAERLAEEKLRLVGIS | 135 |
| | | KNK++K +R+KVG+VFQFPE QLFEETVLKD++FGP NFG+ + +AE+ A E L+LVG+S | |
| Sbjct: | 63 | KNKDLKKLRKKVGIVFQFPEHQLFEETVLKDISFGPMNFGVKKEDAEQKAREMLQLVGLS | 122 |
| Query: | 136 | EDLFDKNPFELSGGQMRRVAIAGILAMEPKVLVLDEPTAGLDPKGRKELMTLFKNLHKKG | 195 |
| | | E+L D++PFELSGGQMRRVAIAG+LAM+P+VLVLDEPTAGLDP+GRKE+M +F LH++G | |
| Sbjct: | 123 | EELLDRSPFELSGGQMRRVAIAGVLAMDPEVLVLDEPTAGLDPRGRKEIMDMFYELHQRG | 182 |
| Query: | 196 | -MTIVLVTHLMDDVADYADYVYVLEAGKVTLSGQPKQIFQEVELLESKQLGVPKITKFAQ | 254 |
| | | +T+LVTH M+D A YAD + V+ G + SG P+ +F + E + L +P+ KF + | |
| Sbjct: | 183 | NLTTILVTHSMEDAAAYADEMIVMHKGTIQASGSPRDLFLKGEEMAGWGLDLPETIKFQR | 242 |
| Query: | 255 | RL | 256 |
| | | L | |
| Sbjct: | 243 | HL | 244 |

[5734] A related DNA sequence was identified in S. pyogenes <SEQ ID 3171> which encodes the amino acid sequence <SEQ ID 3172>. Analysis of this protein sequence reveals the following:

| Possible site: 40 | | | | |
|---|---|---|---|---|
| >>> Seems to have no N-terminal signal sequence | | | | |
| | INTEGRAL | Likelihood = −0.27 | Transmembrane | 154-170 (154-170) |

```
----- Final Results -----
                              bacterial membrane --- Certainty = 0.1107(Affirmative) < succ>
                                bacterial outside --- Certainty = 0.0000(Not Clear) < succ>
                            bacterial cytoplasm --- Certainty = 0.0000(Not Clear) < succ>
```

[5735] The protein has homology with the following sequences in the databases:

| >GP: CAB11922 GB: Z99104 similar to ABC transporter (ATP-binding | | | |
|---|---|---|---|
| protein) [Bacillus subtilis] | | | |
| Identities = 146/259 (56%), Positives = 187/259 (71%), Gaps = 2/259 (0%) | | | |
| Query: | 16 | TPFEGRALFNINLDILDGSYTAFIGHTGSGKSTIMQLLNGLHVPTTGIVSVDKQDITNHS | 75 |
| | | TPFE AL++IN I +GSY A IGHTGSGKST++Q LNGL PT G +S+ I | |
| Sbjct: | 3 | TPFERLALYDINASIKEGSYVAVIGHTGSGKSTLLQHLNGLLKPTKGQISLGSTVIQAGK | 62 |
| Query: | 76 | KNKEIKSIRKHVGLVFQFPESQLFEETVLKDVAFGPQNFGVSPEEAEALAREKLALVGIS | 135 |
| | | KNK++K +RK VG+VFQFPE QLFEETVLKD++FGP NFGV E+AE ARE L LVG+S | |
| Sbjct: | 63 | KNKDLKKLRKKVGIVFQFPEHQLFEETVLKDISFGPMNFGVKKEDAEQKAREMLQLVGLS | 122 |
| Query: | 136 | ENLFEKNPFELSGGQMRRVAIAGILAMQPKVLVLDEPTAGLDPKGRKELMTIFKKLHQSG | 195 |
| | | E L +++PFELSGGQMRRVAIAG+LAM P+VLVLDEPTAGLDP+GRKE+M +F +LHQ G | |
| Sbjct: | 123 | EELLDRSPFELSGGQMRRVAIAGVLAMDPEVLVLDEPTAGLDPRGRKEIMDMFYELHQRG | 182 |
| Query: | 196 | -MTIVLVTHLMDDVANYADFVYVLDKGKIILSGKPKTIFQQVSLLEKKQLGVPKVTKLAQ | 254 |
| | | +T +LVTH M+D A YAD + V+ KG I SG P+ +F + + L +P+ K + | |
| Sbjct: | 183 | NLTTILVTHSMEDAAAYADEMIVMHKGTIQASGSPRDLFLKGEEMAGWGLDLPETIKFQR | 242 |
| Query: | 255 | RL-VDRGIPISSLPITLEE | 272 |
| | | L G+ + +T+E+ | |
| Sbjct: | 243 | HLEAALGVRFNEPMLTIED | 261 |

[5736] An alignment of the GAS and GBS proteins is shown below.

| Identities = 218/280 (77%), Positives = 241/280 (85%) | | | |
|---|---|---|---|
| Query: | 1 | MGIEFKNVSYTYQAGTPFEGRALFDVNLKIEDASYTAFIGHTGSGKSTIMQLLNGLHIPT | 60 |
| | | M I +NVSYTYQAGTPFEGRALF++NL I D SYTAFIGHTGSGKSTIMQLLNGLH+PT | |
| Sbjct: | 1 | MSINLQNVSYTYQAGTPFEGRALFNINLDILDGSYTAFIGHTGSGKSTIMQLLNGLHVPT | 60 |
| Query: | 61 | KGEVIVDDFSIKAGDKNKEIKFIRQKVGLVFQFPESQLFEETVLKDVAFGPQNFGISQIE | 120 |
| | | G V VD I KNKEIK IR+ VGLVFQFPESQLFEETVLKDVAFGPQNFG+S E | |
| Sbjct: | 61 | TGIVSVDKQDITNHSKNKEIKSIRKHVGLVFQFPESQLFEETVLKDVAFGPQNFGVSPEE | 120 |
| Query: | 121 | AERLAEEKLRLVGISEDLFDKNPFELSGGQMRRVAIAGILAMEPKVLVLDEPTAGLDPKG | 180 |
| | | AE LA EKL LVGISE+LF+KNPFELSGGQMRRVAIAGILAM+PKVLVLDEPTAGLDPKG | |
| Sbjct: | 121 | AEALAREKLALVGISENLFEKNPFELSGGQMRRVAIAGILAMQPKVLVLDEPTAGLDPKG | 180 |
| Query: | 181 | RKELMTLFKNLHKKGMTIVLVTHLMDDVADYADYVYVLEAGKVTLSGQPKQIFQEVELLE | 240 |
| | | RKELMT+FK LH+ GMTIVLVTHLMDDVA+YAD+VYVL+ GK+ LSG+PK IFQ+V LLE | |
| Sbjct: | 181 | RKELMTIFKKLHQSGMTIVLVTHLMDDVANYADFVYVLDKGRIILSGKPKTIFQQVSLLE | 240 |
| Query: | 241 | SKQLGVPKITKFAQRLSHKGLNLPSLPITINEFVEAIKHG | 280 |
| | | KQLGVPK+TK AQRL +G+ + SLPIT+ E E +KHG | |
| Sbjct: | 241 | KKQLGVPKVTKLAQRLVDRGIPISSLPITLEELREVLKHG | 280 |

[5737] Based on this analysis, it was predicted that these proteins and their epitopes could be useful antigens for vaccines or diagnostics.

### EXAMPLE 1029

[5738] A DNA sequence (GBSx1099) was identified in S. agalactiae <SEQ ID 3173> which encodes the amino acid sequence <SEQ ID 3174>. Analysis of this protein sequence reveals the following:

| Possible site: 43 | | | | |
|---|---|---|---|---|
| >>> Seems to have no N-terminal signal sequence | | | | |
| | INTEGRAL | Likelihood = −10.46 | Transmembrane | 47-63 (25-69) |
| | INTEGRAL | Likelihood = −8.81 | Transmembrane | 252-268 (249-269) |
| | INTEGRAL | Likelihood = −7.91 | Transmembrane | 116-132 (110-141) |
| | INTEGRAL | Likelihood = −4.25 | Transmembrane | 29-45 (25-46) |
| | INTEGRAL | Likelihood = −2.55 | Transmembrane | 77-93 (77-95) |
| | INTEGRAL | Likelihood = −0.43 | Transmembrane | 199-215 (199-215) |

```
----- Final Results -----
                              bacterial membrane --- Certainty = 0.5182(Affirmative) < succ>
                                bacterial outside --- Certainty = 0.0000(Not Clear) < succ>
                            bacterial cytoplasm --- Certainty = 0.0000(Not Clear) < succ>
```

[5739] A related GBS nucleic acid sequence <SEQ ID 8707> which encodes amino acid sequence <SEQ ID 8708> was also identified. Analysis of this protein sequence reveals the following:

| Lipop: Possible site: −1 Crend: 7 | | | | |
|---|---|---|---|---|
| SRCFLG: 0 | | | | |
| McG: Length of UR: 8 | | | | |
| Peak Value of UR: 0.65 | | | | |
| Net Charge of CR: 1 | | | | |
| McG: Discrim Score: −10.55 | | | | |
| GvH: Signal Score (−7.5): 1.45 | | | | |
| Possible site: 37 | | | | |
| >>> Seems to have no N-terminal signal sequence | | | | |
| Amino Acid Composition: calculated from 1 | | | | |
| ALOM program count: 6 value: −10.46 threshold: 0.0 | | | | |
| | INTEGRAL | Likelihood = −10.46 | Transmembrane | 41-57 (19-63) |
| | INTEGRAL | Likelihood = −8.81 | Transmembrane | 246-262 (243-263) |
| | INTEGRAL | Likelihood = −7.91 | Transmembrane | 110-126 (104-135) |
| | INTEGRAL | Likelihood = −4.25 | Transmembrane | 23-39 (19-40) |
| | INTEGRAL | Likelihood = −2.55 | Transmembrane | 71-87 (71-89) |
| | INTEGRAL | Likelihood = −0.43 | Transmembrane | 193-209 (193-209) |
| | PERIPHERAL | Likelihood = 0.79 | 90 | |

```
modified ALOM score: 2.59
icm1 HYPID: 7 CFP: 0.518
*** Reasoning Step: 3
----- Final Results -----
                              bacterial membrane --- Certainty = 0.5182(Affirmative) < succ>
                                bacterial outside --- Certainty = 0.0000(Not Clear) < succ>
                            bacterial cytoplasm --- Certainty = 0.0000(Not Clear) < succ>
```

[5740] The protein has homology with the following sequences in the GENPEPT database.

| >GP:CAB11923 GB:Z99104 ybaF [Bacillus subtilis] | | | |
|---|---|---|---|
| Identities = 133/263 (50%), Positives = 191/263 (72%) | | | |
| Query: | 7 | MDKLILGRYIPGNSLIHKLDPRSKLLAMLLFIIIVFWANNVVTNVIVFIFTLVIVGLSQI | 66 |
| | | MD +I+G+Y+PG SL+H+LDPR+KL+ + LF+ IVF ANNV T ++ +FT+ +V L+++ | |
| Sbjct: | 2 | MDSMIIGKYVPGTSLVHRLDPRTKLITIFLFVCIVFLANNVQTYALLGLFTIGVVSLTRV | 61 |
| Query: | 67 | KFSYFFNGIKPMVGIILFTTLFQMLFAQGGQVIFSFWIFSITSLGLQQAALIFMRFVLII | 126 |
| | | FS+ G+KP++ I+LFT L +L G +IF + GL Q I +RFV +I | |
| Sbjct: | 62 | PFSFLMKGLKPIIWIVLFTFLLHILMTHEGPIIFQIGFSRVYEGGLVQGIFISLRFVYLI | 121 |
| Query: | 127 | FFSTLLTLTTTPLSLADAVESLLKPLEVLRVPAHEIGLMLSLSLRFVPTLMDDTTRIMNA | 186 |
| | | +TLLTLTTTP+ + D +E LL PL+ L++P HE+ LM+S+SLRF+PTLM++T +IM A | |
| Sbjct: | 122 | LITTLLTLTTTPIEITDGMEQLLNPLKKLKLPVHELALMMSISLRFIPTLMEETDKIMKA | 181 |
| Query: | 187 | QRARGVDFGEGNLIHKVKSIIPILIPLFASSFKRADALAIAMEARGYQGGANRSKYRLLK | 246 |
| | | Q ARGVDF G + +VK+I+P+L+PLF S+FKRA+ LA+AMEARGYQGG R+KYR L | |
| Sbjct: | 182 | QMARGVDFTSGPVKERVKAIVPLLVPLFVSAFKRAEELAVAMEARGYQGGEGRTKYRKLV | 241 |
| Query: | 247 | WTVRDTFSILLMLLLGLSLFLLK | 269 |
| | | WT +DT I+ +++L LF L+ | |
| Sbjct: | 242 | WTGKDTSVIVSLIVLAALLFSLR | 264 |

[5741] A related DNA sequence was identified in S. pyogenes <SEQ ID 3175> which encodes the amino acid sequence <SEQ ID 3176>. Analysis of this protein sequence reveals the following:

Possible site: 53
>>> Seems to have no N-terminal signal sequence

| | | | |
|---|---|---|---|
| INTEGRAL | Likelihood =−9.50 | Transmembrane | 246-262 (243-265) |
| INTEGRAL | Likelihood = −9.34 | Transmembrane | 110-126 (103-135) |
| INTEGRAL | Likelihood = −6.69 | Transmembrane | 41-57 (40-58) |
| INTEGRAL | Likelihood = −2.81 | Transmembrane | 23-39 (21-40) |
| INTEGRAL | Likelihood = −1.01 | Transmembrane | 62-78 (62-78) |
| INTEGRAL | Likelihood = −0.27 | Transmembrane | 193-209 (193-209) |

```
----- Final Results -----
      bacterial membrane --- Certainty = 0.4800 (Affirmative) < succ>
        bacterial outside --- Certainty = 0.0000 (Not Clear) < succ>
    bacterial cytoplasm --- Certainty = 0.0000 (Not Clear) < succ>
```

[5742] The protein has homology with the following sequences in the databases:

| >GP: CAB11923 GB: Z99104 ybaF [Bacillus subtilis] | | | |
|---|---|---|---|
| Identities = 138/263 (52%), Positives = 195/263 (73%) | | | |
| Query: | 1 | MDKLILGRYIPGDSLIHRLDPRSKLLAMIIYIVIIFWANNVVTNLLMLTFTLAVVFLSKI | 60 |
| | | MD +I+G+Y+PG SL+HRLDPR+KL+ + +++ I+F ANNV T L+ FT+ VV L+++ | |
| Sbjct: | 2 | MDSMIIGKYVPGTSLVHRLDPRTKLITIFLFVCIVFLANNVQTYALLGLFTIGVVSLTRV | 61 |
| Query: | 61 | KLSFFLNGVKPMIGIILFTTLFQMFFSQGGKVIFSWWFISITDLGLSQAILIFMRFVLII | 120 |
| | | SF + G+KP+I I+LFT L + + G +IF F + + GL Q I I +RFV +I | |
| Sbjct: | 62 | PFSFLMKGLKPIIWIVLFTFLLHILMTHEGPIIFQIGFSRVYEGGLVQGIFISLRFVYLI | 121 |
| Query: | 121 | FFSTLLTLTTTPLSLSDAVESLLKPLTRFKVPAHEIGLMLSLSLRFVPTLMDDTTRIMNA | 180 |
| | | +TLLTLTTTP+ ++D +E LL PL + K+P HE+ LM+S+SLRF+PTLM++T +IM A | |
| Sbjct: | 122 | LITTLLTLTTTPIEITDGMEQLLNPLKKLKLPVHELALMMSISLRFIPTLMEETDKIMKA | 181 |
| Query: | 181 | QRARGVDFGEGNLIQKVKSIIPILIPLFASSFKRADALAIAMEARGYQGGEGRTKYRQLD | 240 |
| | | Q ARGVDF G + ++VK+I+P+L+PLF S+FKRA+ LA+AMEARGYQGGEGRTKYR+L | |
| Sbjct: | 182 | QMARGVDFTSGPVKERVKAIVPLLVPLFVSAFKRAEELAVAMEARGYQGGEGRTKYRKLV | 241 |
| Query: | 241 | WQLKDSLAIGIVSLLGLLLFFLK | 263 |
| | | W KD+ I + +L LLF L+ | |
| Sbjct: | 242 | WTGKDTSVIVSLIVLAALLFSLR | 264 |

[5743] An alignment of the GAS and GBS proteins is shown below.

| Identities = 210/263 (79%), Positives = 237/263 (89%) | | | |
|---|---|---|---|
| Query: | 7 | MDKLILGRYIPGNSLIHKLDPRSKLLAMLLFIIIVFWANNVVTNVIVFIFTLVIVGLSQI | 66 |
| | | MDKLILGRYIPG+SLIH+LDPRSKLLAM+++I+I+FWANNVVTN+++ FTL +V LS+I | |
| Sbjct: | 1 | MDKLILGRYIPGDSLIHRLDPRSKLLAMIIYIVIIFWANNVVTNLLMLTFTLAVVFLSKI | 60 |
| Query: | 67 | KFSYFFNGIKPMVGIILFTTLFQMLFAQGGQVIFSFWIFSITSLGLQQAALIFMRFVLII | 126 |
| | | K S+F NG+KPM+GIILFTTLFQM F+QGG+VIFS+W SIT LGL QA LIFMRFVLII | |
| Sbjct: | 61 | KLSFFLNGVKPMIGIILFTTLFQMFFSQGGKVIFSWWFISITDLGLSQAILIFMRFVLII | 120 |
| Query: | 127 | FFSTLLTLTTTPLSLADAVESLLKPLEVLRVPAHEIGLMLSLSLRFVPTLMDDTTRIMNA | 186 |
| | | FFSTLLTLTTTPLSL+DAVESLLKPL +VPAHEIGLMLSLSLRFVPTLMDDTTRIMNA | |
| Sbjct: | 121 | FFSTLLTLTTTPLSLSDAVESLLKPLTRFKVPAHEIGLMLSLSLRFVPTLMDDTTRIMNA | 180 |
| Query: | 187 | QRARGVDFGEGNLIHKVKSIIPILIPLFASSFKRADALAIAMEARGYQGGANRSKYRLLK | 246 |
| | | QRARGVDFGEGNLI KVKSIIPILIPLFASSFKRADALAIAMEARGYQGG R+KYR L | |
| Sbjct: | 181 | QRARGVDFGEGNLIQKVKSIIPILIPLFASSFKRADALAIAMEARGYQGGEGRTKYRQLD | 240 |
| Query: | 247 | WTVRDTFSILLMLLLGLSLFLLK | 269 |
| | | W ++D+ +I ++ LLGL LF LK | |
| Sbjct: | 241 | WQLKDSLAIGIVSLLGLLLFFLK | 263 |

[5744] Based on this analysis, it was predicted that these proteins and their epitopes could be useful antigens for vaccines or diagnostics.

### EXAMPLE 1030

[5745] A DNA sequence (GBSx1101) was identified in S. agalactiae <SEQ ID 3179> which encodes the amino acid sequence <SEQ ID 3180>. This protein is predicted to be unnamed protein product. Analysis of this protein sequence reveals the following:

```
Possible site: 45
>>> Seems to have an uncleavable N-term signal seq
      INTEGRAL Likelihood = −12.05 Transmembrane 22-38 (16-43)
----- Final Results -----
      bacterial membrane --- Certainty = 0.5819 (Affirmative) < succ>
        bacterial outside --- Certainty = 0.0000 (Not Clear) < succ>
    bacterial cytoplasm --- Certainty = 0.0000 (Not Clear) < succ>
```

[5746] A related DNA sequence was identified in S. pyogenes <SEQ ID 3181> which encodes the amino acid sequence <SEQ ID 3182>. Analysis of this protein sequence reveals the following:

```
Possible site: 31
>>> Seems to have a cleavable N-term signal seq.
----- Final Results -----
                                bacterial outside --- Certainty = 0.3000(Affirmative) < succ>
                              bacterial membrane --- Certainty = 0.0000(Not Clear) < succ>
                            bacterial cytoplasm --- Certainty = 0.0000(Not Clear) < succ>
```

[5747] An alignment of the GAS and GBS proteins is shown below.

| Identities = 116/233 (49%), Positives = 140/233 (59%), Gaps = 39/233 (16%) | | | |
|---|---|---|---|
| Query: | 9 | KLNVKKHHLAYGAITLVALFSCILAVMVIFKSSQVTTESLSKADKVRVAKKSK------- | 61 |
| | | K N+K+ + +G LVAL ILA++ F S T+S +K + ++ K | |
| Sbjct: | 4 | KENLKQRYFNFG---LVALALTILAIIFAFSSKNADTKSYAKKSESKMVTIDKAPKNNHA | 60 |
| Query: | 62 | MTKATSKSKVEDVKQAPKPSQASNEAPKSSSQSTEANSQQQVTASEEAAVEQAVVTENTP | 121 |
| | | +TK SK K + + P P+ ++ AP T +EE V Q VT | |
| Sbjct: | 61 | ITKEESKEKAKSIASEPIPTVENSVAP---------------TVTEEVPVVQQEVT---- | 101 |
| Query: | 122 | ATSQAQQAYAVTETTYRPAQHQTSGQVLSNGNTAGAIGSAAAAQMAAATGVPQSTWEHII | 181 |
| | | Q V+ Y P + VLSNGNTAG +GS AAAQMAAATGVPQSTWEHII | |
| Sbjct: | 102 | -----QTVQQVSSVAYNP-----NNVVLSNGNTAGIVGSQAAAQMAAATGVPQSTWEHII | 151 |
| Query: | 182 | ARESNGNPNVANASGASGLFQTMPGWGSTATVQDQVNSAIKAYRAQGLSAWGY | 234 |
| | | ARESNGNPN ANASGASGLFQTMPGWGSTATV+DQVN+A+KAY AQGLSAWGY | |
| Sbjct: | 152 | ARESNGNPNAANASGASGLFQTMPGWGSTATVEDQVNAALKAYSAQGLSAWGY | 204 |

[5748] A related GBS gene <SEQ ID 8713> and protein <SEQ ID 8714> were also identified. Analysis of this protein sequence reveals the following:

| Lipop: Possible site: −1 Crend: 8 | | | | |
|---|---|---|---|---|
| McG: Discrim Score: 2.48 | | | | |
| GvH: Signal Score (−7.5): −3.74 | | | | |
| Possible site: 45 | | | | |
| >>> Seems to have an uncleavable N-term signal seq | | | | |
| ALOM program count: 1 value: −12.05 threshold: 0.0 | | | | |
| | INTEGRAL | Likelihood = −12.05 | Transmembrane | 22-38 (16-43) |
| | PERIPHERAL | Likelihood = 4.29 | 156 | |

```
modified ALOM score: 2.91
*** Reasoning Step: 3
----- Final Results -----
                              bacterial membrane --- Certainty = 0.5819(Affirmative) < succ>
                                bacterial outside --- Certainty = 0.0000(Not Clear) < succ>
                            bacterial cytoplasm --- Certainty = 0.0000(Not Clear) < succ>
```

[5749] The protein has homology with the following sequences in the databases:

[chemical structure]

[5750] SEQ ID 3180 (GBS25) was expressed in E. coli as a His-fusion product. SDS-PAGE analysis of total cell extract is shown in FIG. 14 (lane 5; MW 25 kDa). It was also expressed in E. coli as a GST-fusion product. SDS-PAGE analysis of total cell extract is shown in FIG. 16 (lane 11; MW 50 kDa), FIG. 63 (lane 6; MW 50.3 kDa), FIG. 66 (lane 6; MW 50 kDa) and in FIG. 175 (lane 8 & 9; MW 50 kDa).

[5751] Purified GBS25-GST is shown in FIG. 9A, FIG. 193 (lane 11) and FIG. 210 (lane 5).

[5752] The purified GBS25-GST fusion product was used to immunise mice (lane 1+2+3 products; 20 μg/mouse). The resulting antiserum was used for Western blot (FIG. 95B), FACS (FIG. 95C), and in the in vivo passive protection assay (Table III). These tests confirm that the protein is immunoaccessible on GBS bacteria and that it is an effective protective immunogen.

[5753] Based on this analysis, it was predicted that these proteins and their epitopes could be useful antigens for vaccines or diagnostics.

### EXAMPLE 1031

[5754] A DNA sequence (GBSx1103) was identified in S. agalactiae <SEQ ID 3183> which encodes the amino acid sequence <SEQ ID 3184>. This protein is predicted to be L-serine dehydratase 1 (sdaA-2). Analysis of this protein sequence reveals the following:

| Possible site: 61 | | | | |
|---|---|---|---|---|
| >>> Seems to have no N-terminal signal sequence | | | | |
| | INTEGRAL | Likelihood = −0.85 | Transmembrane | 205-221 (205-221) |
| | INTEGRAL | Likelihood = −0.59 | Transmembrane | 171-187 (171-187) |
| | INTEGRAL | Likelihood = −0.53 | Transmembrane | 226-242 (226-242) |

```
----- Final Results -----
                              bacterial membrane --- Certainty = 0.1341(Affirmative) < succ>
                                bacterial outside --- Certainty = 0.0000(Not Clear) < succ>
                            bacterial cytoplasm --- Certainty = 0.0000(Not Clear) < succ>
```

[5755] The protein has homology with the following sequences in the GENPEPT database.

| >GP:CAB13459 GB:Z99112 similar to L-serine dehydratase [Bacillus subtilis] | | | |
|---|---|---|---|
| Identities = 176/289 (60%), Positives = 224/289 (76%), Gaps = 1/289 (0%) | | | |
| Query: | 1 | MFYTIEELVEQANSQHKGNIAELMIQTEIEMTGRSREEIRYIMSRNLEVMKASVIDGLTP | 60 |
| | | MF ++EL+E + + I+++MI E+E+T +++E+I M NL VM+A+V GL | |
| Sbjct: | 1 | MFRNVKELIE-ITKEKQILISDVMIAQEMEVTEKTKEDIFQQMDHNLSVMEAAVQKGLEG | 59 |
| Query: | 61 | SKSISGLTGGDAVKMDQYLQSGKTISDTTILAAVRNAMAVNELNAKKMGLVCATPTAGSAG | 120 |
| | | S +GLTGGDAVK+ Y++SGK++S IL AV A+A NE+NA MG +CATPTAGSAG | |
| Sbjct: | 60 | VTSQTGLTGGDAVKLQAYIRSGKSLSGPLILDAVSKAVATNEVNAAMGTICATPTAGSAG | 119 |
| Query: | 121 | CLPAVISTAIEKLNLTEEEQLDFLFTAGAFGLVIGNNASISGAEGGCQAEVGSASAMAAA | 180 |
| | | +P + EKLN T E+ + FLFTAGAFG V+ NNASISGA GGCQAEVGSAS MAAA | |
| Sbjct: | 120 | VVPGTLFAVKEKLNPTREQMIRFLFTAGAFGFVVANNASISGAAGGCQAEVGSASGMAAA | 179 |
| Query: | 181 | ALVMAGGTPFQASQAIAFVIKNMLGLICDPVAGLVEVPCVKRNALGSSFALVAADMALA | 240 |
| | | A+V AGGTP Q+++A+A +KNMLGL+CDPVAGLVEVPCVKRNA+G+S A++AADMALA | |
| Sbjct: | 180 | AIVEMAGGTPEQSAEAMAITLKNMLGLVCDPVAGLVEVPCVKRNAMGASNAMIAADMALA | 239 |
| Query: | 241 | GIESQIPVDEVIDAMYQVGSSLPTAFRETAEGGLAATPTGRRYSKEIFG | 289 |
| | | GI S+IP DEVIDAMY++G ++PTA RET +GGLAATPTGR K+IFG | |
| Sbjct: | 240 | GITSRIPCDEVIDAMYKIGQTMPTALRETGQGGLAATPTGRELEKKIFG | 288 |

[5756] A related DNA sequence was identified in S. pyogenes <SEQ ID 3185> which encodes the amino acid sequence <SEQ ID 3186>. Analysis of this protein sequence reveals the following:

| Possible site: 55 | | | |
|---|---|---|---|
| >>> Seems to have no N-terminal signal sequence | | | |
| INTEGRAL | Likelihood = −1.12 | Transmembrane | 196-212 (196-213) |
| INTEGRAL | Likelihood = −0.27 | Transmembrane | 226-242 (226-242) |

```
----- Final Results -----
      bacterial membrane --- Certainty = 0.1447 (Affirmative) < succ>
        bacterial outside --- Certainty = 0.0000 (Not Clear) < succ>
    bacterial cytoplasm --- Certainty = 0.0000 (Not Clear) < succ>
```

[5757] The protein has homology with the following sequences in the databases:

| >GP:CAB13459 GB:Z99112 similar to L-serine dehydratase [Bacillus subtilis] | | | |
|---|---|---|---|
| Identities = 173/289 (59%), Positives = 222/289 (75%), Gaps = 1/289 (0%) | | | |
| Query: | 1 | MFYTIEELVKQADQQFNGNIAELMIATEVEMSGRNREDIIKIMSRNLQVMKAAVTEGLTS | 60 |
| | | MF ++EL++ ++ I+++MIA E+E++ + +EDI + M NL VM+AAV +GL | |
| Sbjct: | 1 | MFRNVKELIEITKEK-QILISDVMIAQEMEVTEKTKEDIFQQMDHNLSVMEAAVQKGLEG | 59 |
| Query: | 61 | TKSISGLTGGDAVKMDNYIKKGNSLSDTTILNAVRNAIAVNELNAKHGLVCATPTAGSAG | 120 |
| | | S +GLTGGDAVK+ YI+G SLS IL+AV A+A NE+NA MG +CATPTAGSAG | |
| Sbjct: | 60 | VTSQTGLTGGDAVKLQAYIRSGKSLSGPLILDAVSKAVATNEVNAAMGTICATPTAGSAG | 119 |
| Query: | 121 | CLPAVLATAIEKLDLSEKEQLEFLFTAGAFGLVIGNNASISGAEGGCQAEVGSAAAMSAA | 180 |
| | | +P L EKL+ + ++ + FLFTAGAFG V+ NNASISGA GGCQAEVGSA+ M+AA | |
| Sbjct: | 120 | VVPGTLFAVKEKLNPTREQMIRFLFTAGAFGFVVANNASISGAAGGCQAEVGSASGMAAA | 179 |
| Query: | 181 | ALVKAAGGTSHQASQAIAFVIKNLLGLVCDPVAGLVEVPCVKRNALGASFALVAADMALA | 240 |
| | | A+V+ AGGT Q+++A+A +KN+LGLVCDPVAGLVEVPCVKRNA+GAS A++AADMALA | |
| Sbjct: | 180 | AIVEMAGGTPEQSAEAMAITLKNMLGLVCDPVAGLVEVPCVKRNAMGASNAMIAAOMALA | 239 |
| Query: | 241 | DIDSQIPVDEVIDAMYQVGSAMPTAFRETAEGGLAATPTGRRYSVEIFG | 289 |
| | | I S+IP DEVIDAMY++G MPTA RET +GGLAATPTGR +IFG | |
| Sbjct: | 240 | GITSRIPCDEVIDAMYKIGQTMPTALRETGQGGLAATPTGRELEKKIFG | 288 |

[5758] An alignment of the GAS and GBS proteins is shown below.

| Identities = 244/290 (84%), Positives = 273/290 (94%) | | | |
|---|---|---|---|
| Query: | 1 | MFYTIEELVEQANSQHKGNIAELMIQTEIEMTGRSREEIRYIMSRNLEVMKASVIDGLTP | 60 |
| | | MFYTIEELV+QA+ Q GNIAELMI TE+EM+GR+RE+I IMSRNL+VMKA+V +GLT | |
| Sbjct: | 1 | MFYTIEELVKQADQQFNGNIAELMIATEVEMSGRNREDIIKIMSRNLQVMKAAVTEGLTS | 60 |
| Query: | 61 | SKSISGLTGGDAVKMDQYLQSGKTISDTTILAAVRNAMAVNELNAKMGLVCATPTAGSAG | 120 |
| | | +KSISGLTGGDAVKMD Y++ G ++SDTTIL AVRNA+AVNELNAKMGLVCATPTAGSAG | |
| Sbjct: | 61 | TKSISGLTGGDAVKMDNYIKKGNSLSDTTILNAVRNAIAVNELNAKMGLVCATPTAGSAG | 120 |
| Query: | 121 | CLPAVISTAIEKLNLTEEEQLDFLFTAGAFGLVIGNNASISGAEGGCQAEVGSASAMAAA | 180 |
| | | CLPAV++TAIEKL+L+E+EQL+FLFTAGAFGLVIGNNASISGAEGGCQAEVGSA+AM+AA | |
| Sbjct: | 121 | CLPAVLATAIEKLDLSEKEQLEFLFTAGAFGLVIGNNASISGAEGGCQAEVGSAAAMSAA | 180 |
| Query: | 181 | ALVMAAGGTPFQASQAIAFVIKNMLGLICDPVAGLVEVPCVKRNALGSSFALVAADMALA | 240 |
| | | ALV AAGGT QASQAIAFVIKN+LGL+CDPVAGLVEVPCVKRNALG+SFALVAADMALA | |
| Sbjct: | 181 | ALVKAAGGTSHQASQAIAFVIKNLLGLVCDPVAGLVEVPCVKRNALGASFALVAADMALA | 240 |
| Query: | 241 | GIESQIPVDEVIDAMYQVGSSLPTAFRETAEGGLAATPTGRRYSKEIFGE | 290 |
| | | I+SQIPVDEVIDAMYQVGS++PTAFRETAEGGLAATPTGRRYS EIFGE | |
| Sbjct: | 241 | DIDSQIPVDEVIDAMYQVGSAMPTAFRETAEGGLAATPTGRRYSVEIFGE | 290 |

[5759] SEQ ID 3184 (GBS358) was expressed in E. coli as a His-fusion product. SDS-PAGE analysis of total cell extract is shown in FIG. 176 (lane 6; MW 35 kDa).

[5760] Based on this analysis, it was predicted that these proteins and their epitopes could be useful antigens for vaccines or diagnostics.

### EXAMPLE 1032

[5761] A DNA sequence (GBSx1104) was identified in S. agalactiae <SEQ ID 3187> which encodes the amino acid sequence <SEQ ID 3188>. Analysis of this protein sequence reveals the following:

```
Possible site: 28
>>> Seems to have a cleavable N-term signal seq.
----- Final Results -----
                                bacterial outside --- Certainty = 0.3000(Affirmative) < succ>
                              bacterial membrane --- Certainty = 0.0000(Not Clear) < succ>
                            bacterial cytoplasm --- Certainty = 0.0000(Not Clear) < succ>
```

[5762] The protein has homology with the following sequences in the GENPEPT database.

| >GP: BAB06216 GB: AP001515 L-serine dehydratase beta subunit [Bacillus halodurans] | | | |
|---|---|---|---|
| Identities = 101/216 (46%), Positives = 156/216 (71%), Gaps = 2/216 (0%) | | | |
| Query: | 4 | LKFQSVFDIIGPVMIGPSSSHTAGAVRIGKVVHSIFGE-PSEVTFHLYNSFAKTYQGHGT | 62 |
| | | +K+++VFDIIGPVMIGPSSSHTAGA RIG+V ++FG+ P + Y SFA+TY+GHGT | |
| Sbjct: | 1 | MKYRTVFDIIGPVMIGPSSSHTAGAARIGRVARTLFGQQPERCDIYFYGSFAETYKGHGT | 60 |
| Query: | 63 | DKALVAGILGMDTDNPDIKNSLEIAHQKGIKIYWDILKDSNSPHPNTAKITVKNGDRSMS | 122 |
| | | D A+V GIL DT +P I SL++A +KG+++Y+ +++ + HPNTAK+ ++ G+ + | |
| Sbjct: | 61 | DVAIVGGILDFDTFDPRIPRSLQLAKEKGVRVYFHE-EEAITDHPNTAKVVLQKGEDQLE | 119 |
| Query: | 123 | ITGVSIGGGNIQVTELNGFSVSLTMNTPTLIIVHQDIPGMIAKVTDILSDFNINIAQMNV | 182 |
| | | + GVSIGGG I++ ELNGF + L+ N P +++VH D G+IA V+++L+ INI M V | |
| Sbjct: | 120 | VVGVSIGGGKIEIVELNGFHLKLSGNHPAILVVHTDRFGVIASVSNMLAKHEINIGHMEV | 179 |
| Query: | 183 | TRESAGEKAIMIIEVDSRDCQQAVKKIEAIPHLHNV | 218 |
| | | +R+ G++A+M+IEVD ++++E +P++ V | |
| Sbjct: | 180 | SRKEKGKEALMVIEVDQNVDDLLLQELERLPNIVTV | 215 |

[5763] A related DNA sequence was identified in S. pyogenes <SEQ ID 3189> which encodes the amino acid sequence <SEQ ID 3190>. Analysis of this protein sequence reveals the following:

```
Possible site: 30
>>> Seems to have no N-terminal signal sequence
----- Final Results -----
                              bacterial membrane --- Certainty = 0.0000(Not Clear) < succ>
                                bacterial outside --- Certainty = 0.0000(Not Clear) < succ>
                            bacterial Cytoplasm --- Certainty = 0.0000(Not Clear) < succ>
```

[5764] A related sequence was also identified in GAS <SEQ ID 9161> which encodes the amino acid sequence <SEQ ID 9162>. Analysis of this protein sequence reveals the following:

```
Possible Site: 28
>>> Seems to have a cleavable N-term signal seq.
----- Final Results -----
                        bacterial outside --- Certainty = 0.300(Affirmative) < succ>
                              bacterial membrane --- Certainty = 0.000(Not Clear) < succ>
                            bacterial cytoplasm --- Certainty = 0.000(Not Clear) < succ>
```

[5765] An alignment of the GAS and GBS proteins is shown below.

| Identities = 187/223 (83%), Positives = 205/223 (91%), Gaps = 1/223 (0%) | | | |
|---|---|---|---|
| Query: | 1 | MKHLKFQSVFDIIGPVMIGPSSSHTAGAVRIGKVVHSIFGE-PSEVTFHLYNSFAKTYQG | 59 |
| | | M KFQSVFDIIGPVMIGPSSSHTAGAVRIGKVVHSIFG+ P EVTFHLYNSFAKTY+G | |
| Sbjct: | 3 | MNTQKFQSVFDIIGPVMIGPSSSHTAGAVRIGKVVHSIFGDIPDEVTFHLYNSFAKTYRG | 62 |
| Query: | 60 | HGTDKALVAGILGMDTDNPDIKNSLEIAHQKGIKIYWDILKDSNSPHPNTAKITVKNGDR | 119 |
| | | HGTDKALVAGI+GM TDNPDIKNSLEIAHQKGIKIYWDILKDSN+PHPNT KI+VK D+ | |
| Sbjct: | 63 | HGTDKALVAGIMGMGTDNPDIKNSLEIAHQKGIKIYWDILKDSNAPHPNTVKISVKKADK | 122 |
| Query: | 120 | SMSITGVSIGGGNIQVTELNGFSVSLTMNTPTLIIVHQDIPGMIAKVTDILSDFNINIAQ | 179 |
| | | ++S+TGVSIGGGNIQVTELNGFSVSL+MNTPT++ VH+DIPGMIAKVTDILS NINIA | |
| Sbjct: | 123 | TLSVTGVSIGGGNIQVTELNGFSVSLSMNTPTIVTVHKDIPGMIAKVTDILSSNNINIAT | 182 |
| Query: | 180 | MNVTRESAGEKAIMIIEVDSRDCQQAVKKIEAIPHLHNVNFFD | 222 |
| | | MNVTRESAGEKA MIIEVDSR+CQ+A +I IPH++NVNFFD | |
| Sbjct: | 183 | MNVTRESAGEKATMIIEVDSRECQEAANQIAKIPHIYNVNFFD | 225 |

[5766] SEQ ID 3188 (GBS151) was expressed in E. coli as a GST-fusion product. SDS-PAGE analysis of total cell extract is shown in FIG. 31 (lane 3; MW 50 kDa). It was also expressed in E. coli as a His-fusion product. SDS-PAGE analysis of total cell extract is shown in FIG. 188 (lane 11; MW 25 kDa) and in FIG. 165 (lane 14-16; MW 25.3 kDa).

[5767] The GBS151-GST fusion product was purified (FIG. 198, lane 3; FIG. 236, lane 8) and used to immunise mice. The resulting antiserum was used for FACS (FIG. 289), which confirmed that the protein is immunoaccessible on GBS bacteria.

[5768] GBS151L was expressed in E. coli as a GST-fusion product. SDS-PAGE analysis of total cell extract is shown in FIG. 127 (lane 8-10; MW 50 kDa). GBS151L was also expressed in E. coli as a His-fusion product. SDS-PAGE analysis of total cell extract is shown in FIG. 127 (lane 11 & 12; MW 25 kDa), in FIG. 128 (lane 7; MW 25 kDa) and in FIG. 180 (lane 7; MW 25 kDa). Purified GBS151L-His is shown in FIG. 232 (lanes 5 & 6) and in FIG. 240 (lanes 3 & 4).

[5769] Based on this analysis, it was predicted that these proteins and their epitopes could be useful antigens for vaccines or diagnostics.

### EXAMPLE 1033

[5770] A DNA sequence (GBSx1105) was identified in S. agalactiae <SEQ ID 3191> which encodes the amino acid sequence <SEQ ID 3192>. This protein is predicted to be tRNA (5-methylaminomethyl-2-thiouridylate)-methyltransferase (trmU). Analysis of this protein sequence reveals the following:

```
Possible site: 47
>>> Seems to have no N-terminal signal sequence
----- Final Results -----
                            bacterial cytoplasm --- Certainty = 0.2208(Affirmative) < succ>
                              bacterial membrane --- Certainty = 0.0000(Not Clear) < succ>
                                bacterial outside --- Certainty = 0.0000(Not Clear) < succ>
```

[5771] A related GBS nucleic acid sequence <SEQ ID 10291> which encodes amino acid sequence <SEQ ID 10292> was also identified.

[5772] The protein has homology with the following sequences in the GENPEPT database.

| >GP:BAB04980 GB:AP001511 | | | |
|---|---|---|---|
| (5-methylaminomethyl-2-thiouridylate)-methyltran sferase | | | |
| [Bacillus halodurans] | | | |
| Identities = 250/359 (69%), Positives = 292/359 (80%), Gaps = 6/359 (1%) | | | |
| Query: | 32 | RVVVGMSGGVDSSVTALLLKEQGYDVIGVFMKNWDDTDEFGVCTATEDYKDVAAVADQIG | 91 |
| | | RVVVGMSGGVDSSVTALLLKEQGYDVIG+FMKNWDDTDE GVCTATEDY+DV V +Q+G | |
| Sbjct: | 10 | RVVVGMSGGVDSSVTALLLKEQGYDVIGIFMKNWDDTDENGVCTATEDYQDVVQVCNQLG | 69 |
| Query: | 92 | IPYYSVNFEKEYWDRVFEYFLAEYRAGRTPNPDVMCNKEIKFKAFLDYAMTLGADYVATG | 151 |
| | | I YY+VNFEKEYWD+VF YFL EY+AGRTPNPDVMCNKEIKFKAFL++A+TLGADYVATG | |
| Sbjct: | 70 | IAYYAVNFEKEYWDKVFTYFLEEYKAGRTPNPDVMCNKEIKFKAFLNHALTLGADYVATG | 129 |
| Query: | 152 | HYAQVTRDENGIVHMLRGADNNKDQTYFLSQLSQEQLQKTLFPLGHLQKPEVRRIAEEAG | 211 |
| | | HYAQV ++ +G ++RG D NKDQTYFL+ LSQ+QL + +FPLGHL+K EVR IAE AG | |
| Sbjct: | 130 | HYAQV-KNVDGQYQLIRGKDPNKDQTYFLNALSQQQLSRVMFPLGHLSKKEVRAIAERAG | 188 |
| Query: | 212 | LATAKKKDSTGICFIGEKNFKDFLGQYLPAQPGRMMTVDGRDMGEHAGLMYYTIGQRGGL | 271 |
| | | LATAKKKDSTGICFIG+++FK+FL YLPAQPG M T+DG G H GLMYYT+GQR GL | |
| Sbjct: | 189 | LATAKKKDSTGICFIGKRDFKEFLSSYLPAQPGEMQTLDGEVKGTHDGLMYYTLGQRQGL | 248 |
| Query: | 272 | GIGGQHGGDNKPWFVVGKDLSKNILYVGQGFYHDSLMSTSLTASEIHFTRDMPNEFKLEC | 331 |
| | | GI GG +PWFV+GK+L KNILYVGQGF+H L S L A ++++ ++ EC | |
| Sbjct: | 249 | GI----GGSGEPWFVIGKNLSKNILYVGQGFHHPGLYSEGLRAIKVNWILRRSSDEPFEC | 304 |
| Query: | 332 | TAKFRYRQPDSKVTVYVKGNQA-RVVFDDLQRAITPGQAVVFYNEQECLGGGMIDQAYR | 389 |
| | | TAKFRYRQPD KVTVY + + A V+F + QRAITPGQAVVFY+ CLGGG ID + | |
| Sbjct: | 305 | TAKFRYRQPDQKVTVYPQSDGAVEVLFAEPQRAITPGQAVVFYDGDVCLGGGTIDHVLK | 363 |

[5773] A related DNA sequence was identified in S. pyogenes <SEQ ID 3193> which encodes the amino acid sequence <SEQ ID 3194>. Analysis of this protein sequence reveals the following:

```
Possible site: 29
>>> Seems to have no N-terminal signal sequence
----- Final Results -----
                            bacterial cytoplasm --- Certainty = 0.1691(Affirmative) < succ>
                              bacterial membrane --- Certainty = 0.0000(Not Clear) < succ>
                                bacterial outside --- Certainty = 0.0000(Not Clear) < succ>
RGD motif: 331-333
```

[5774] The protein has homology with the following sequences in the databases:

| >GP: BAB04980 GB: AP001511 | | | |
|---|---|---|---|
| (5-methylaminomethyl-2-thiouridylate)-methyltran sferase | | | |
| [Bacillus halodurans] | | | |
| Identities = 255/359 (71%), Positives = 293/359 (81%), Gaps = 6/359 (1%) | | | |
| Query: | 14 | RVVVGMSGGVDSSVTALLLKEQGYDVIGVFMKNWDDTDEFGVCTATEDYKDVAAVADKIG | 73 |
| | | RVVVGMSGGVDSSVTALLLKEQGYDVIG+FMKNWDDTDE GVCTATEDY+DV V +++G | |
| Sbjct: | 10 | RVVVGMSGGVDSSVTALLLKEQGYDVIGIFMKNWDDTDENGHVCTATEDYQDVVQVCNQLG | 69 |
| Query: | 74 | IPYYSVNFEKEYWDRVFEYFLAEYRAGRTPNPDVMCNKEIKFKAFLDYAMTLGADYVATG | 133 |
| | | I YY+VNFEKEYWD+VF YFL EY+AGRTPNPDVMCNKEIKFKAFL++A+TLGADYVATG | |
| Sbjct: | 70 | IAYYAVNFEKEYWDKVFTYFLEEYKAGRTPNDDVMCNKEIKFKAFLNHALTLGADYVATG | 129 |
| Query: | 134 | HYAQVRRDENGTVHMLRGADNGKDQTYFLSQLSQEQLQKTLFPLGHLQKSEVREIAERAG | 193 |
| | | HYAQVK + +G ++RG D KDQTYFL+ LSQ+QL + +FPLGHL+K EVR IAERAG | |
| Sbjct: | 130 | HYAQVK-NVDGQYQLIRGKDPNKDQTYFLNALSQQQLSRVMFPLGHLEKKEVRAIAERAG | 188 |
| Query: | 194 | LATAKKKDSTGICFIGEKNFKQFLSQYLPAQKGRMMTIDGRDMGEHAGLMYYTIGQRGGL | 253 |
| | | LATAKKKDSTGICFIG+++FK+FLS YLPAQ G M T+DG G H GLMYYT+GQR GL | |
| Sbjct: | 189 | LATAKKKDSTGICFIGKRDFKEFLSSYLPAQPGEMTQTLDGEVKGTHDGLMYYTLGQRQGL | 248 |
| Query: | 254 | GIGGQHGGDNQPWFVVGKDLSQNILYVGQGFYHEALMSNSLDASVIHFTREMPEEFTFEC | 313 |
| | | GI GG +PWFV+GK+L +NILYVGQGF+H L S L A +++ + FEC | |
| Sbjct: | 249 | GI----GGSGEPWFVIGKNLEKNILYVGQGFHHPGLYSEGLRAIKVNWILRRESDEPFEC | 304 |
| Query: | 314 | TAKFRYRQPDSHVAVHVRGDKA-EVVFAEPQRAITPGQAVVFYDGKECLGGGMIDMAYK | 371 |
| | | TAKFRYRQPD V V+ + D A EV+FAEPQRAITPGQAVVFYDG CLGGG ID K | |
| Sbjct: | 305 | TAKFRYRQPDQKVTVYPQSDGAVEVLFAEPQRAITPGQAVVFYDGDVCLGGGTIDHVLK | 363 |

[5775] An alignment of the GAS and GBS proteins is shown below.

| Identities = 332/377 (88%), Positives = 349/377 (92%) | | | |
|---|---|---|---|
| Query: | 21 | GRILMTDNSNIRVVVGMSGGVDSSVTALLLKEQGYDVIGVFMKNWDDTDEFGVCTATEDY | 80 |
| | | G MTDNS IRVVVGMSGGVDSSVTALLLKEQGYDVIGVFMKNWDDTDEFGVCTATEDY | |
| Sbjct: | 3 | GEFFMTDNSKIRVVVGMSGGVDSSVTALLLKEQGYDVIGVFMKNWDDTDEFGVCTATEDY | 62 |
| Query: | 81 | KDVAAVADQIGIPYYSVNFEKEYWDRVFEYFLAEYRAGRTPNPDVMCNKEIKFKAFLDYA | 140 |
| | | KDVAAVAD+IGIPYYSVNFEKEYWDRVFEYFLAEYRAGRTPNPDVMCNKEIKFKAFLDYA | |
| Sbjct: | 63 | KDVAAVADKIGIPYYSVNFEKEYWDRVFEYFLAEYRAGRTPNPDVMCNKEIKFKAFLDYA | 122 |
| Query: | 141 | MTLGADYVATGHYAQVTRDENGIVHMLRGADNNKDQTYFLSQLSQEQLQKTLFPLGHLQK | 200 |
| | | MTLGADYVATGHYAQV RDENG VHMLRGADN KDQTYFLSQLSQEQLQKTLFPLGHLQK | |
| Sbjct: | 123 | MTLGADYVATGHYAQVKRDENGTVHMLRGADNGKDQTYFLSQLSQEQLQKTLFPLGHLQK | 182 |
| Query: | 201 | PEVRRIAEEAGLATAKKKDSTGICFIGEKNFKDFLGQYLPAQPGRMMTVDGRDMGEHAGL | 260 |
| | | EVR IAE AGLATAKKKDSTGICFIGEKNFK FL QYLPAQ GRMMT+DGRDMGEHAGL | |
| Sbjct: | 183 | SEVREIAERAGLATAKKKDSTGICFIGEKNFKQFLSQYLPAQKGRMMTIDGRDMGEHAGL | 242 |
| Query: | 261 | MYYTIGQRGGLGIGGQHGGDNKPWFVVGKDLSKNILYVGQGFYHDSLMSTSLTASEIHFT | 320 |
| | | MYYTIGQRGGLGIGGQHGGDN+PWFVVGKDLS+NILYVGQGFYH++LMS SL AS IHFT | |
| Sbjct: | 243 | MYYTIGQRGGLGIGGQHGGDNQPWFVVGKDLSQNILYVGQGFYHEALMSNSLDASVIHFT | 302 |
| Query: | 321 | RDMPNEFKLECTAKFRYRQPDSKVTVYVKGNQARVVFDDLQRAITPGQAVVFYNEQECLG | 380 |
| | | R+MP EF ECTAKFRYRQPDS V V+V+G++A VVF + QRAITPGQAVVFY+ +ECLG | |
| Sbjct: | 303 | REMPEEFTFECTAKFRYRQPDSHVAVHVRGDKAEVVFAEPQRAITPGQAVVFYDGKECLG | 362 |
| Query: | 381 | GGMIDQAYRDDKICQYI | 397 |
| | | GGMID AY++ + CQYI | |
| Sbjct: | 363 | GGMIDMAYKNGQPCQYI | 379 |

[5776] Based on this analysis, it was predicted that these proteins and their epitopes could be useful antigens for vaccines or diagnostics.

### EXAMPLE 1034

[5777] A DNA sequence (GBSx1106) was identified in S. agalactiae <SEQ ID 3195> which encodes the amino acid sequence <SEQ ID 3196>. Analysis of this protein sequence reveals the following:

| Possible site: 29 | | | | |
|---|---|---|---|---|
| >>> Seems to have a cleavable N-term signal seq. | | | | |
| | INTEGRAL | Likelihood = −12.84 | Transmembrane | 141-157 (134-165) |
| | INTEGRAL | Likelihood = −11.78 | Transmembrane | 40-56 (36-73) |
| | INTEGRAL | Likelihood = −4.35 | Transmembrane | 68-84 (65-86) |
| | INTEGRAL | Likelihood = −3.50 | Transmembrane | 180-196 (175-199) |

```
----- Final Results -----
                              bacterial membrane --- Certainty = 0.6137(Affirmative) < succ>
                                bacterial outside --- Certainty = 0.0000(Not Clear) < succ>
                            bacterial cytoplasm --- Certainty = 0.0000(Not Clear) < succ>
```

[5778] The protein has homology with the following sequences in the GENPEPT database.

| >GP: CAB15390 GB: Z99121 similar to hypothetical proteins | | | |
|---|---|---|---|
| [Bacillus subtilis] | | | |
| Identities = 71/202 (35%), Positives = 120/202 (59%), Gaps = 5/202 (2%) | | | |
| Query: | 1 | MISKFILAFMAFFAIMNPISNLPAFMALVADDDQKISRRIAAKGVLLAFVIIVIFVLSGH | 60 |
| | | M S + F++FA+ NPI N+P F+ L + IA K +L+F I+ F++ GH | |
| Sbjct: | 2 | MFSFIVHVFISLFAVSNPIGNVPIFLTLTEGYTAAERKAIARKAAILSFFILAAFLVFGH | 61 |
| Query: | 61 | LLFNLFGITLAALKISGGILVGIIGYKMINGIHSPTNK-NLEEHKD--DPMNVAVSPLAM | 117 |
| | | L+F LF I + AL+++GGI + I Y ++N S + +EHK+ + +++V+PL++ | |
| Sbjct: | 62 | LIFKLFDINIHALRVAGGIFIFGIAYNLLNAKESHVQSLHHDEHKESKEKADISVTPLSI | 121 |
| Query: | 118 | PLLAGPGTIATAMGLSSG--GLSGKLITILAFAILCVIMYVILISANEITKFLGKNANTI | 175 |
| | | P++AGPGTIAT M LS+G G+ ++ A + + ++ + I+ LGK M + | |
| Sbjct: | 122 | PIIAGPGTIATVMSLSAGHSGIGHYAAVMIGIAAVIALTFLFFHYSAFISSKLGKTEMNV | 181 |
| Query: | 176 | ITKMMGLILMTIGIEMLITGIK | 197 |
| | | IT++MGLIL + + M+ G+K | |
| Sbjct: | 182 | ITRLMGLILAVVAVGMIGAGLK | 203 |

[5779] No corresponding DNA sequence was identified in S. pyogenes.

[5780] A related GBS gene <SEQ ID 8715> and protein <SEQ ID 8716> were also identified. Analysis of this protein sequence reveals the following:

| Lipop: Possible site: −1 Crend: 3 | | | | |
|---|---|---|---|---|
| McG: Discrim Score: 9.79 | | | | |
| GvH: Signal Score (−7.5): −1.53 | | | | |
| Possible site: 29 | | | | |
| >>> Seems to have a cleavable N-term signal seq. | | | | |
| ALOM program count: 4 value: −12.84 threshold: 0.0 | | | | |
| | INTEGRAL | Likelihood = −12.84 | Transmembrane | 141-157 (134-165) |
| | INTEGRAL | Likelihood = −11.78 | Transmembrane | 40-56 (36-73) |
| | INTEGRAL | Likelihood = −4.35 | Transmembrane | 68-84 (65-86) |
| | INTEGRAL | Likelihood = −3.50 | Transmembrane | 180-196 (175-199) |
| | PERIPHERAL | Likelihood = 1.27 | 110 | |

```
modified ALOM score: 3.07
*** Reasoning Step: 3
----- Final Results -----
                              bacterial membrane --- Certainty = 0.6137(Affirmative) < succ>
                                bacterial outside --- Certainty = 0.0000(Not Clear) < succ>
                            bacterial Cytoplasm --- Certainty = 0.0000(Not Clear) < succ>
```

[5781] The protein has homology with the following sequences in the databases:

[chemical structure]

[5782] Based on this analysis, it was predicted that these proteins and their epitopes could be useful antigens for vaccines or diagnostics.

### EXAMPLE 1035

[5783] A DNA sequence (GBSx1107) was identified in S. agalactiae <SEQ ID 3197> which encodes the amino acid sequence <SEQ ID 3198>. Analysis of this protein sequence reveals the following:

```
Possible site: 17
>>> Seems to have no N-terminal signal sequence
----- Final Results -----
                            bacterial cytoplasm --- Certainty = 0.1747(Affirmative) < succ>
                              bacterial membrane --- Certainty = 0.0000(Not Clear) < succ>
                                bacterial outside --- Certainty = 0.0000(Not Clear) < succ>
```

[5784] A related GBS nucleic acid sequence <SEQ ID 10289> which encodes amino acid sequence <SEQ ID 10290> was also identified.

[5785] The protein has homology with the following sequences in the GENPEPT database.

| >GP: AAC45494 GB: U80409 glucose inhibited division protein homolog | | | |
|---|---|---|---|
| GidA [Lactococcus lactis subsp. cremoris] | | | |
| Identities = 394/524 (75%), Positives = 458/524 (87%), Gaps = 2/524 (0%) | | | |
| Query: | 13 | KTLLATINLEMLAFMPCNPSIGGSAKGIVVREIDALGGEMGKNIDKTYIQMKMLNTGKGP | 72 |
| | | KTLL TINL M+AFMPCNPSIGGSAKGIVVREIDALGGEMG+NIDKTYIQMKMLNTGKGP | |
| Sbjct: | 12 | KTLLMTINLNMVAFMPCNPSIGGSAKGIVVREIDALGGEMGRNIDKTYIQMKMLNTGKGP | 71 |
| Query: | 73 | AVRALRAQADKALYAQTMKQTVEKQENLTLRQAMIDEILVEDGK--VVGVRTATNQKFSA | 130 |
| | | AVRALRAQADK YA +MK TV QENLTLRQ M++E++++D K V+GVRT+T ++ A | |
| Sbjct: | 72 | AVRALRAQADKDEYAASMKNTVSDQENLTLRQGMVEELILDDEKQKVIGVRTSTGTQYGA | 131 |
| Query: | 131 | KSVVITTGTALRGEIILGDLKYSSGPNNSLASVTLADNLRDLGLEIGRFKTGTPPRVKAS | 190 |
| | | K+V+ITTGTALRGEII+G+LKYSSGPNNSL+S+ LADNLR++G EIGRFKTGTPPRV AS | |
| Sbjct: | 132 | KAVIITTGTALRGEIIIGELKYSSGPNNSLSSIGLADNLREIGFEIGRFKTGTPPRVLAS | 191 |
| Query: | 191 | SINYEKTEIQPGDEQPNHFSFMSRDEDYITDQVPCWLTYTNTLSHDIINQNLHRAPMFSG | 250 |
| | | SI+Y+KTEIQPGDE PNHFSFMS DEDY+ DQ+PCWLTYT SH I+ NLHRAP+FSG | |
| Sbjct: | 192 | SIDYDKTEIQPGDEAPNHFSFMSSDEDYLKDQIPCWLTYTTENSHTILRDNLHRAPLFSG | 251 |
| Query: | 251 | IVKGVGPRYCPSIEDKIVRFADKERHQLFLEPEGRYTEEVYVQGLSTSLPEDVQVDLLRS | 310 |
| | | IVKGVGPRYCPSIEDKI RFADK RHQLFLEPEGR TEEVY+ GLSTS+PEDVQ DL++S | |
| Sbjct: | 252 | IVKGVGPRYCPSIEDKITRFADKPRHQLFLEPEGRNTEEVYIGGLSTSMPEDVQFDLVKS | 311 |
| Query: | 311 | IKGLENAEMMRTGYAIEYDIVLPHQLRATLETKVIAGLFTAGQTNGTSGYEEAAGQGLVA | 370 |
| | | I GLENA+MMR GYAIEYD+V+PHQLR TLETK+I+GLFTAGQTNGTSGYEEAAGQGLVA | |
| Sbjct: | 312 | IPGLENAKMMRPGYAIEYDVVMPHQLRPTLETKLISGLFTAGQTNGTSGYEEAAGQGLVA | 371 |
| Query: | 371 | GINAALKVQGKPELILKRSDAYIGVMIDDLVTKGTLEPYRLLTSRAEYRLILRHDNADMR | 430 |
| | | GINAALK+QGKPE ILKRS+AYIGVMIDDLVTKGTLEPYRLLTSRAEYRLILRHDNAD R | |
| Sbjct: | 372 | GINAALKIQGKPEFILKRSEAYIGVMIDDLVTKGTLEPYRLLTSRAEYRLILRHDNADRR | 431 |
| Query: | 431 | LTEIGYEIGLVDEERYAIFKKRQMQFENELERLDSIKLKPVSETNKRIQELGFKPLTDAL | 490 |
| | | LTEIG ++GLV + ++ ++ + QF+ E++RL+S KLKP+ +T +++ +LGF P+ DAL | |
| Sbjct: | 432 | LTEIGRQVGLVSDAQWEHYQAKMAQFDREMKRLNSEKLKPLPDTQEKLGKLGFGPIKDAL | 491 |
| Query: | 491 | TAKEFMRRPQITYAVATDFVGCADEPLDSKVIELLETEIKYEGY | 534 |
| | | T EF++RP++ Y DF+G A E +D V EL+ETEI YEGY | |
| Sbjct: | 492 | TGAEFLKRPEVNYDEVIDFIGQAPEVIDRTVSELIETEITYEGY | 535 |

[5786] A related DNA sequence was identified in S. pyogenes <SEQ ID 3199> which encodes the amino acid sequence <SEQ ID 3200>. Analysis of this protein sequence reveals the following:

```
Possible site: 28
>>> Seems to have no N-terminal signal sequence
----- Final Results -----
    bacterial cytoplasm --- Certainty = 0.1064 (Affirmative) < succ>
      bacterial membrane --- Certainty = 0.0000 (Not Clear) < succ>
        bacterial outside --- Certainty = 0.0000 (Not Clear) < succ>
```

[5787] An alignment of the GAS and GBS proteins is shown below.

| Identities = 530/610 (86%), Positives = 574/610 (93%) | | | |
|---|---|---|---|
| Query: | 1 | MEASLAASRMGCKTLLATINLEMLAFMPCNPSIGGSAKGIVVREIDALGGEMGKNIDKTY | 60 |
| | | +EASLA SRMGCKTLLATINL+MLAFMPCNPSIGGSAKGIVVREIDALGGEMGKNIDKTY | |
| Sbjct: | 21 | VEASLATSRMGCKTLLATINLDMLAFMPCNPSIGGSAKGIVVREIDALGGEMGKNIDKTY | 80 |
| Query: | 61 | IQMKMLNTGKGPAVRALRAQADKALYAQTMKQTVEKQENLTLRQAMIDEILVEDGKVVGV | 120 |
| | | IQMKMLNTGKGPAVRALRAQADK+LYA+ MK TVEKQ NLTLRQ MID+ILVEDG+VVGV | |
| Sbjct: | 81 | IQMKMLNTGKGPAVRALRAQADKSLYAREMKHTVEKQANLTLRQTMIDDILVEDGRVVGV | 140 |
| Query: | 121 | RTATNQKFSAKSVVITTGTALRGEIILGDLKYSSGPNNSLASVTLADNLRDLGLEIGRFK | 180 |
| | | TAT QKF+AK+VV+TTGTALRGEIILG+LKYSSGPNNSLASVTLADNL+ LGLEIGRFK | |
| Sbjct: | 141 | LTATGQKFAAKAVVVTTGTALRGEIILGELKYSSGPNNSLASVTLADNLKKLGLEIGRFK | 200 |
| Query: | 181 | TGTPPRVKASSINYEKTEIQPGDEQPNHFSFMSRDEDYITDQVPCWLTYTNTLSHDIINQ | 240 |
| | | TGTPPRVKASSINY++TEIQPGD++PNHFSFMS+D DY+ DQ+PCWLTYTN SHDIINQ | |
| Sbjct: | 201 | TGTPPRVKASSINYDQTEIQPGDDKPNHFSFMSKDADYLKDQIPCWLTYTNQTSHDIINQ | 260 |
| Query: | 241 | NLHRAPMFSGIVKGVGPRYCPSIEDKIVRFADKERHQLFLEPEGRYTEEVYVQGLSTSLP | 300 |
| | | NL+RAPMFSGIVKGVGPRYCPSIEDKIVRFADKERHQLFLEPEGR TEEVYVQGLSTSLP | |
| Sbjct: | 261 | NLYRAPMFSGIVKGVGPRYCPSIEDKIVRFADKERHQLFLEPEGRDTEEVYVQGLSTSLP | 320 |
| Query: | 301 | EDVQVDLLRSIKGLENAEMMRTGYAIEYDIVLPHQLRATLETKVIAGLFTAGQTNGTSGY | 360 |
| | | EDVQ DL+ SIKGLE AEMMRTGYAIEYDIVLPHQLRATLETK+I+GLFTAGQTNGTSGY | |
| Sbjct: | 321 | EDVQKDLIHSIKGLEKAEMMRTGYAIEYDIVLPHQLRATLETKLISGLFTAGQTNGTSGY | 380 |
| Query: | 361 | EEAAGQGLVAGINAALKVQGKPELILKRSDAYIGVMIDDLVTKGTLEPYRLLTSRAEYRL | 420 |
| | | EEAAGQGL+AGINAALKVQGKPELILKRSDAYIGVMIDDLVTKGTLEPYRLLTSRAEYRL | |
| Sbjct: | 381 | EEAAGQGLIAGINAALKVQGKPELILKRSDAYIGVMIDDLVTKGTLEPYRLLTSRAEYRL | 440 |
| Query: | 421 | ILRHDNADMRLTEIGYEIGLVDEERYAIFKKRQMQFENELERLDSIKLKPVSETNKRIQE | 480 |
| | | ILRHDNADMRLTEIG +IGLVD+ER+ F+ ++ QF+NEL+RL+SIKLKP+ ETN R+Q+ | |
| Sbjct: | 441 | ILRHDNADMRLTEIGRDIGLVDDERWKAFEIKKNQFDNELKRLNSIKLKPIKETNDRVQD | 500 |
| Query: | 481 | LGFKPLTDALTAKEFMRRPQITYAVATDFVGCADEPLDSKVIELLETEIKYEGYIKKALD | 540 |
| | | LGFKPLTDA+TAKEFMRRP+I YA A FVG A E LD+K+IELLETEIKYEGYI+KALD | |
| Sbjct: | 501 | LGFKPLTDAMTAKEFMRRPEIDYATAVSFVGPAAEDLDAKIIELLETEIKYEGYIRKALD | 560 |
| Query: | 541 | QVAKMKRMEEKRIPPHIDWDDIDSIATEARQKFKKINPETLGQASRISGVNPADISILMV | 600 |
| | | QVAKMKRMEEKRIP +IDWD IDSIATEARQKFKKINPET+GQASRISGVNPADISILM+ | |
| Sbjct: | 561 | QVAKMKRMEEKRIPTNIDWDAIDSIATEARQKFKKINPETIGQASRISGVNPADISILMI | 620 |
| Query: | 601 | YLEGRQKGRK | 610 |
| | | YLEG K + | |
| Sbjct: | 621 | YLEGNGKAHR | 630 |

[5788] Based on this analysis, it was predicted that these proteins and their epitopes could be useful antigens for vaccines or diagnostics.

### EXAMPLE 1036

[5789] A DNA sequence (GBSx1108) was identified in S. agalactiae <SEQ ID 3201> which encodes the amino acid sequence <SEQ ID 3202>. Analysis of this protein sequence reveals the following:

```
Possible site: 44
>>> Seems to have a cleavable N-term signal seq.
----- Final Results -----
                                bacterial outside --- Certainty = 0.3000(Affirmative) < succ>
                              bacterial membrane --- Certainty = 0.0000(Not Clear) < succ>
                            bacterial cytoplasm --- Certainty = 0.0000(Not Clear) < succ>
```

[5790] The protein has homology with the following sequences in the GENPEPT database.

| >GP: BAB07750 GB: AP001520 unknown conserved protein in B. subtilis | | | |
|---|---|---|---|
| [Bacillus halodurans] | | | |
| Identities = 205/644 (31%), Positives = 362/644 (55%), Gaps = 28/644 (4%) | | | |
| Query: | 35 | LLLAIFVALSFVVALLYYQ---------------------KITYELSEVEQIELLNDQTE | 73 |
| | | ++ + VAL F++AL + YQ +I++E + I L+ + | |
| Sbjct: | 14 | VIALLAVALVFLIALSFYQWQLGVIGVLLLLVIAIFSLRARISFERDLEQYISTLSYRVH | 73 |
| Query: | 74 | VSLKSLLEQMPVGVIQFDLETNDIEWFNPYA-ELIFTGDNGHFQSATVKDIITSRRNGTA | 132 |
| | | + + + Q+PVG+I ++ + ++W NPYA E + + +++ + GT | |
| Sbjct: | 74 | KAGEEAVTQLPVGMILYNDQLR-VQWVNPYAAEHLPKAEIDASLEELSPELVRALEEGTD | 132 |
| Query: | 133 | GQSFEYGDNKYSAYLDTETGVFYFFDNFMGNRRNYDSSMLRPVIGIISIDNYDDIMDTML | 192 |
| | | Q + Y + YFFD R + +PV+ I +DNYD++ M | |
| Sbjct: | 133 | EQKIVIEEKTYDCTFKPNERLIYFFDITESERMHQQFEESQPVLTFIYLDNYDEVTQGME | 192 |
| Query: | 193 | EADMSKINAFVTSFISDFTQSKNIFYRRVNMDRYYIFTDYSVLNTLIKDKFDILNEFRKR | 252 |
| | | + S++ + VTS ++ + ++F RR DR+ Y L + K KF IL+E R+ | |
| Sbjct: | 193 | DQVRSRLMSQVTSSLNQWANEHDLFLRRTAADRFIAVMSYGSLLAIEKTKFGILDEIRET | 252 |
| Query: | 253 | AQENHLSLTLSMGISYGDGNHNQIGQIALENLNTALVRGGDQIVVRENDSSKKALYFGGG | 312 |
| | | + + LTLS+G+ YGD + ++GQ+A +L+ AL RGGDQ+ +++ K ++GG | |
| Sbjct: | 253 | TGKEKIPLTLSIGVGYGDLSLRELGQLAQSSLDLALGRGGDQVAIKQKTG--KVRFYGGK | 310 |
| Query: | 313 | AVSTIKRSRTRTRAMMTAISDRLKVVDSVFIVGHRKLDMDALGASVGMQFFASNIVNASY | 372 |
| | | + + KR+R R R + A+ D + D V ++GH+ DMDA+GA++G+ A ++ | |
| Sbjct: | 311 | SNAMEKRTRVRARVISHALRDFVLESDRVIVMGHKNPDMDAVGAAIGILKIAEVNDREAF | 370 |
| Query: | 373 | VVYDPNDMNSDIERAIDYLQEDGET--RLVSVERAFELITQNSLLVMVDHSKTALTLSKE | 430 |
| | | VV DPND+N D+ + ++ ++++ + + ++ E + EL+T+ +LLV+VD K ++ + | |
| Sbjct: | 371 | VVLDPNDVNPDVSKLMEEVEKNEQLWDKFITPEESLELMTEETLLVIVDTHKPSMVIEPR | 430 |
| Query: | 431 | FFNKFADVIVVDHHRRDEDFPKNAVLSFIESGASSASELVTELIQFQQAKDKLSRSQASI | 490 |
| | | + V+V+DHHRR E+F ++ VL ++E ASS +ELVTEL+++Q K K+ +++ | |
| Sbjct: | 431 | LLDYVERVVVLDHHRRGEEFIEDPVLVYMEPYASSTAELVTELLEYQPKKLKMDILESTA | 490 |
| Query: | 491 | LMAGIMLDTRNFASNVTSRTFDVASYLRGLGSNSMAIQKISATDFDEYRLINELILKGER | 550 |
| | | L+AG+++DT++FA +RTFD AS+LR G++++ +QK+ D + Y +L+ + | |
| Sbjct: | 491 | LLAGMIVDTKSFAIRTGARTFDAASFLRSHGADTVLVQKLLKEDLNHYVKRAKLVETAKL | 550 |
| Query: | 551 | IYDNIIVATGEEHKVYSHVIASKAADTMLTMAGIEATFVITKNSSN-IGISARSRNNINV | 609 |
| | | D + +AT E + S ++ ++AADT+LTM G+ A+FVI++ + ISARS ++NV | |
| Sbjct: | 551 | YRDGMAIATAREEEAVSQLLIAQAADTLLTMKGVVASFVISRRHDGVVSISARSLGDVNV | 610 |
| Query: | 610 | QRIMEKLGGGGHFSFAACQIQDKSVKQVRRMLLEIIDEDLRENS | 653 |
| | | Q IME L GGGH + AA Q +D ++++ L E ID+ L S | |
| Sbjct: | 611 | QLIMESLDGGGHLTNAATQFEDATLEEAEAKLKEAIDQYLEGGS | 654 |

[5791] A related DNA sequence was identified in S. pyogenes <SEQ ID 3203> which encodes the amino acid sequence <SEQ ID 3204>. Analysis of this protein sequence reveals the following:

| Possible site: 25 | | | |
|---|---|---|---|
| >>> Seems to have an uncleavable N-term signal seq | | | |
| INTEGRAL | Likelihood = −18.57 | Transmembrane | 33-49 (6-56) |
| INTEGRAL | Likelihood = −10.14 | Transmembrane | 12-28 (6-32) |

```
----- Final Results -----
      bacterial membrane --- Certainty = 0.8429 (Affirmative) < succ>
        bacterial outside --- Certainty = 0.0000 (Not Clear) < succ>
    bacterial cytoplasm --- Certainty = 0.0000 (Not Clear) < succ>
```

[5792] The protein has homology with the following sequences in the databases:

| >GP: BAB07750 GB: AP001520 unknown conserved protein in B. subtilis | | | |
|---|---|---|---|
| [Bacillus halodurans] | | | |
| Identities = 199/659 \grave{ }(30%), Positives = 367/659 (55%), Gaps = 16/659 (2%) | | | |
| Query: | 1 | MKKF---RFETIHLI-MMGLILFGLLALCVSIMQSKILILLAIFLVLLFVV-ALLWYQKE | 55 |
| | | M KF R+ H+I ++ + L L+AL Q ++ +L + ++ +F + A + ++++ | |
| Sbjct: | 1 | MPKFLLKRWHGYHVIALLAVALVFLIALSFYQWQLGVIGVLLLLVIAIFSLRARISFERD | 60 |
| Query: | 56 | AYQLSDLAHIELLNEQTEDNLKTLLDNMPVGVVQFDQETNAVEWYNPYA-ELIFTTEEGF | 114 |
| | | Q +I L+ + + + +PVG++ ++ + V+W NPYA E + E | |
| Sbjct: | 61 | LEQ-----YISTLSYRVHKAGEEAVTQLPVGMILYNDQLR-VQWVNPYAAEHLPKAEIDA | 114 |
| Query: | 115 | IQNGLIQQIITEKRREDISQTFEVSGNKYTSYIDVSSGIFYFFDSFVGNRQLADASMLRP | 174 |
| | | L +++ Q + Y + + YFFD R +P | |
| Sbjct: | 115 | SLEELSPELVRALEEGTDEQKIVIEEKTYDCTFKPNERLIYFFDITESERMHQQFEESQP | 174 |
| Query: | 175 | VVGIISVDNYDDITDDLSDADTSKINSFVANFIDEFMESKRIFYRRVNMDRYYFFTDFKT | 234 |
| | | V+ I +DNYD++T + D S++ S V + ++++ +F RR DR+ + + | |
| Sbjct: | 175 | VLTFIYLDNYDEVTQGMEDQVRSRLMSQVTSSLNQWANEHDLFLRRTAADRFIAVMSYGS | 234 |
| Query: | 235 | LNDLMDNKFSVLSEEFRKEAQDAQRPLTLSIGISFGEENHSQIGQVALENLNIALVRGGDQ | 294 |
| | | L + KF +L+E R+ + PLTLSIG+ +G+ + ++GQ+A +L++AL RGGDQ | |
| Sbjct: | 235 | LLAIEKTKFGILDEIRETTGKEKIPLTLSIGVGYGDLSLRELGQLAQSSLDLALGRGGDQ | 294 |
| Query: | 295 | IVIRENADHTNPIYFGGGSVSTVKRSRTRTRAMMTAISDRIKMVDNVFIVGHRKLDMDAL | 354 |
| | | + I++ ++GG S + KR+R R R + A+ D + D V ++GH+ DMDA+ | |
| Sbjct: | 295 | VAIKQKTGKVR--FYGGKSNAMEKRTRVRARVISHALRDFVLESDRVIVMGHKNPDMDAV | 352 |
| Query: | 355 | GSAVGMQFFAGNIIENSFAVYNPDEMSPDIERAIERLQADGKT--RLISVSQAMGLVTPR | 412 |
| | | G+A+G+ A +F V +P++++PD+ + +E ++ + + + I+ +++ L+T | |
| Sbjct: | 353 | GAAIGILKIAEVNDREAFVVLDPNDVNPDVSKLMEEVEKNEQLWDKFITPEESLELMTEE | 412 |
| Query: | 413 | SLLVMVDHSKISLTLSKEFYEQFQNVIVVDHHRRDDDFPDNAILTFIESGASSAAELVTE | 472 |
| | | +LLV+VD K S+ + + + V+V+DHHRR ++F ++ +L ++E ASS AELVTE | |
| Sbjct: | 413 | TLLVIVDTHKPSMVIEPRLLDYVERVVVLDHHRRGEEFIEDPVLVYMEPYASSTAELVTE | 472 |
| Query: | 473 | LIQFQNAKKCLNKIQASVLMAGIMLDTKNFSTRVTSRTFDVASYLRSKGSDSVEIQNISA | 532 |
| | | L+++Q K ++ ++++ L+AG+++DTK+F+ R +RTFD AS+LRS G+D+V +Q + | |
| Sbjct: | 473 | LLEYQPKKLKMDILESTALLAGMIVDTKSFAIRTGARTFDAASFLRSHGADTVLVQKLLK | 532 |
| Query: | 533 | TDFEEYKQINEIILQGERLGDSIIVAAGEKNHLYSNVIASKAADTILSMAHVEASFVLVE | 592 |
| | | D Y + +++ + D + +A + S ++ ++AADT+L+M V ASFV+ | |
| Sbjct: | 533 | EDLNHYVKRAKLVETAKLYRDGMAIATAREEEAVSQLLIAQAADTLLTMKGVVASFVISR | 592 |
| Query: | 593 | TASHKIAISARSRSKINVQRVMEKLGGGGHFNLAACQLTDISLPQAKYLLLKTINMTMK | 651 |
| | | ++ISARS +NVQ +ME L GGGH AA Q D +L +A+ L + I+ ++ | |
| Sbjct: | 593 | RHDGVVSISARSLGDVNVQLIMESLDGGGHLTNAATQFEDATLEEAEAKLKEAIDQYLE | 651 |

[5793] An alignment of the GAS and GBS proteins is shown below.

| Identities = 428/658 (65%), Positives = 547/658 (83%), Gaps = 1/658 (0%) | | | |
|---|---|---|---|
| Query: | 1 | MKRFRFATVHLVLIGLILFGLLAICVRLFQSYTALLLAIFVALSFVVALLYYQKITYELS | 60 |
| | | MK+FRF T+HL+++GLILFGLLA+CV + QS +LLAIF+ L FVVALL+YQK Y+LS | |
| Sbjct: | 1 | MKKFRFETIHLIMMGLILFGLLALCVSIMQSKILILLAIFLVLLFVVALLWYQKEAYQLS | 60 |
| Query: | 61 | EVEQIELLNDQTEVSLKSLLEQMPVGVIQFDLETNDIEWFNPYAELIFTGDNGHFQSATV | 120 |
| | | ++ IELLN+QTE +LK+LL+ MPVGV+QFD ETN +EW+NPYAELIFT + G Q+ + | |
| Sbjct: | 61 | DLAHIELLNEQTEDNLKTLLDNMPVGVVQFDQETNAVEWYNPYAELIFTTEEGFIQNGLI | 120 |
| Query: | 121 | KDIITSRRNGTAGQSFEYGDNKYSAYLDTETGVFYFFDNFMGNRRNYDSSMLRPVIGIIS | 180 |
| | | + IIT +R Q+FE NKY++Y+D +G+FYFFD+F+GNR+ D+SMLRPV+GIIS | |
| Sbjct: | 121 | QQIITEKRREDISQTFEVSGNKYTSYIDVSSGIFYFFDSFVGNRQLADASMLRPVVGIIS | 180 |
| Query: | 181 | IDNYDDIMDTMLEADMSKINAFVTSFISDFTQSKNIFYRRVNMDRYYIFTDYSVLNTLIK | 240 |
| | | +DNYDDI D + +AD SKIN+FV +FI +F +SK IFYRRVNMDRYY FTD+ LN L+ | |
| Sbjct: | 181 | VDNYDDITDDLSDADTSKINSFVANFIDEFMESKRIFYRRVNMDRYYFFTDFKTLNDLMD | 240 |
| Query: | 241 | DKFDILNEFRKRAQENHLSLTLSMGISYGDGNHNQIGQIALENLNTALVRGGDQIVVREN | 300 |
| | | +KF +L EFRK AQ+ LTLS+GIS+G+ NH+QIGQ+ALENLN ALVRGGDQIV+REN | |
| Sbjct: | 241 | NKFSVLEEFRKEAQDAQRPLTLSIGISFGEENHSQIGQVALENLNIALVRGGDQIVIREN | 300 |
| Query: | 301 | DSSKKALYFGGGAVSTIKRSRTRTRAMMTAISDRLKVVDSVFIVGHRKLDMDALGASVGM | 360 |
| | | +YFGGG+VST+KRSRTRTRAMMTAISDR+K+VD+VFIVGHRKLDMDALG++VGM | |
| Sbjct: | 301 | ADHTNPIYFGGGSVSTVKRSRTRTRAMMTAISDRIKMVDNVFIVGHRKLDMDALGSAVGM | 360 |
| Query: | 361 | QFFASNIVNASYVVYDPNDMNSDIERAIDYLQEDGETRLVSVERAFELITQNSLLVMVDH | 420 |
| | | QFFA NI+ S+ VY+P++M+ DIERAI+ LQ DG+TRL+SV +A L+T SLLVMVDH | |
| Sbjct: | 361 | QFFAGNIIENSFAVYNPDEMSPDIERAIERLQADGKTRLISVSQAMGLVTPRSLLVMVDH | 420 |
| Query: | 421 | SKTALTLSKEFFNKFADVIVVDHHRRDEDFPKNAVLSFIESGASSASELVTELIQFQQAK | 480 |
| | | SK +LTLSKEF+ +F +VIVVDHHRRD+DFP NA+L+FIESGASSA+ELVTELIQFQ AK | |
| Sbjct: | 421 | SKISLTLSKEFYEQFQNVIVVDHHRRDDDFPDNAILTFIESGASSAAELVTELIQFQNAK | 480 |
| Query: | 481 | DKLSRSQASILMAGIMLDTRNFASNVTSRTFDVASYLRGLGSNSMAIQKISATDFDEYRL | 540 |
| | | L++ QAS+LMAGIMLDT+NF++ VTSRTFDVASYLR GS+S+ IQ ISATDF+EY+ | |
| Sbjct: | 481 | KCLNKIQASVLMAGIMLDTKNFSTRVTSRTFDVASYLRSKGSDSVEIQNISATDFEEYKQ | 540 |
| Query: | 541 | INELILKGERIYDNIIVATGEEHKVYSHVIASKAADTMLTMAGIEATFVITKNSSN-IGI | 599 |
| | | INE+IL+GER+ D+IIVA GE++ +YS+VIASKAADT+L+MA +EA+FV+ + +S+ I I | |
| Sbjct: | 541 | INEIILQGERLGDSIIVAAGEKNHLYSNVIASKAADTILSMAHVEASFVLVETASHKIAI | 600 |
| Query: | 600 | SARSRNNINVQRIMEKLGGGGHFSFAACQIQDKSVKQVRRMLLEIIDEDLRENSTVEN | 657 |
| | | SARSR+ INVQR+MEKLGGGGHF+ AACQ+ D S+ Q + +LL+ I+ ++E VE+ | |
| Sbjct: | 601 | SARSRSKINVQRVMEKLGGGGHFNLAACQLTDISLPQAKYLLLKTINMTMKETGEVES | 658 |

[5794] A related GBS gene <SEQ ID 8717> and protein <SEQ ID 8718> were also identified. Analysis of this protein sequence reveals the following:

| Lipop: Possible site: −1 Crend: 9 | | |
|---|---|---|
| McG: Discrim Score: 13.82 | | |
| GvH: Signal Score (−7.5): −0.890001 | | |
| Possible site: 44 | | |
| >>> Seems to have a cleavable N-term signal seq. | | |
| ALOM program count: 0 | value: 2.97 | threshold: 0.0 |

| | | |
|---|---|---|
| PERIPHERAL | Likelihood = 2.97 | 574 |

modified ALOM score: −1.09
*** Reasoning Step: 3
----- Final Results -----
bacterial outside --- Certainty = 0.3000(affirmative) < succ>
bacterial membrane --- Certainty = 0.0000(Not Clear) < succ>

[5795] The protein has homology with the following sequences in the databases:

[chemical structure]

[5796] SEQ ID 8718 (GBS10) was expressed in E. coli as a GST-fusion product. SDS-PAGE analysis of total cell extract is shown in FIG. 1 (lane 6; MW 98 kDa). It was also expressed in E. coli as a His-fusion product. SDS-PAGE analysis of total cell extract is shown in FIG. 2 (lane 7; MW 73 kDa).

[5797] The GST-fusion protein was purified as shown in FIG. 189, lane 3.

[5798] Based on this analysis, it was predicted that these proteins and their epitopes could be useful antigens for vaccines or diagnostics.

### EXAMPLE 1037

[5799] A DNA sequence (GBSx1109) was identified in S. agalactiae <SEQ ID 3205> which encodes the amino acid sequence <SEQ ID 3206>. Analysis of this protein sequence reveals the following:

```
Possible site: 59
>>> Seems to have no N-terminal signal sequence
----- Final Results -----
    bacterial cytoplasm --- Certainty = 0.4643 (Affirmative) < succ>
      bacterial membrane --- Certainty = 0.0000 (Not Clear) < succ>
        bacterial outside --- Certainty = 0.0000 (Not Clear) < succ>
```

[5800] The protein has homology with the following sequences in the GENPEPT database.

| >GP:CAA43972 GB:X62002 ribosomal protein L9 [Bacillus | | | |
|---|---|---|---|
| stearothermophilus] | | | |
| Identities = 80/149 (53%), Positives = 105/149 (69%), Gaps = 2/149 (1%) | | | |
| Query: | 1 | MKVIFLQDVKGKGKKGEVKEVPTGYAQNFLLKKNLAKEATTQAIGELKGKQKSEEKAQAE | 60 |
| | | MKVIFL+DVKGKGKKGE+K V GYA NFL K+ LA EAT + L+ +++ E++ AE | |
| Sbjct: | 1 | MKVIFLKDVKGKGKKGEIKNVADGYANNFLFKQGLAIEATPANLKALEAQKQKEQRQAAE | 60 |
| Query: | 61 | ILAQAKELKTQLESETTRVQFIEKVGPDGRTFGSITAKKIAEELQKQYGIKIDKRHIDLD | 120 |
| | | LA AK+LK QLE T + K G GR FGSIT+K+IAE LQ Q+G+K+DKR I+L | |
| Sbjct: | 61 | ELANAKKLKEQLEKLTVTIP--AKAGEGGRLFGSITSKQIAESLQAQHGLKLDKRKIELA | 118 |
| Query: | 121 | HTIRAIGKVEVPVKLHKQVSSQIKLDIKE | 149 |
| | | IRA+G VPVKLH +V++ +K+ + E | |
| Sbjct: | 119 | DAIRALGYTNVPVKLHPEVTATLKVHVTE | 147 |

[5801] A related DNA sequence was identified in S. pyogenes <SEQ ID 3207> which encodes the amino acid sequence <SEQ ID 3208>. Analysis of this protein sequence reveals the following:

```
Possible site: 59
>>> Seems to have no N-terminal signal sequence
----- Final Results -----
    bacterial cytoplasm --- Certainty = 0.4630 (Affirmative) < succ>
      bacterial membrane --- Certainty = 0.0000 (Not Clear) < succ>
        bacterial outside --- Certainty = 0.0000 (Not Clear) < succ>
```

[5802] An alignment of the GAS and GBS proteins is shown below.

Identities = 119/150 (79%), Positives = 138/150 (91%)

| | | | |
|---|---|---|---|
| Query: | 1 | MKVIFLQDVKGKGKKGEVKEVPTGYAQNFLLKKNLAKEATTQAIGELKGKQKSEEKAQAE | 60 |
| | | MKVIFL DVKGKGKKGE+KEVPTGYAQNFL+KKNLAKEAT+Q+IGELKGKQK+EEKAQAE | |
| Sbjct: | 1 | MKVIFLADVKGKGKKGEIKEVPTGYAQNFLIKKNLAKEATSQSIGELKGKQKAEEKAQAE | 60 |
| Query: | 61 | ILAQAKELKTQLESETTRVQFIEKVGPDGRTFGSITAKKIAEELQKQYGIKIDKRHIDLD | 120 |
| | | ILA+A+ +K L+ + TRVQF EKVGPDGRTFGSITAKKI+EELQKQ+G+K+DKRHI LD | |
| Sbjct: | 61 | ILAEAQAVKAVLDEDKTRVQFQEKVGPDGRTFGSITAKKISEELQKQFGVKVDKRHIVLD | 120 |
| Query: | 121 | HTIRAIGKVEVPVKLHKQVSSQIKLDIKEA | 150 |
| | | H IRAIG +EVPVKLHK+V+++IKL I EA | |
| Sbjct: | 121 | HPIRAIGLIEVPVKLHKEVTAEIKLAITEA | 150 |

[5803] Based on this analysis, it was predicted that these proteins and their epitopes could be useful antigens for vaccines or diagnostics.

### EXAMPLE 1038

[5804] A DNA sequence (GBSx1110) was identified in S. agalactiae <SEQ ID 3209> which encodes the amino acid sequence <SEQ ID 3210>. This protein is predicted to be DNA polymerase III delta prime subunit (dnaB). Analysis of this protein sequence reveals the following:

```
Possible site: 61
>>> Seems to have an uncleavable N-term signal seq
      INTEGRAL Likelihood = −0.43 Transmembrane 204-220 (204-220)
----- Final Results -----
      bacterial membrane --- Certainty = 0.1171 (Affirmative) < succ>
        bacterial outside --- Certainty = 0.0000 (Not Clear) < succ>
    bacterial cytoplasm --- Certainty = 0.0000 (Not Clear) < succ>
```

[5805] A related DNA sequence was identified in S. pyogenes <SEQ ID 2423> which encodes the amino acid sequence <SEQ ID 2424>. Analysis of this protein sequence reveals the following:

```
Possible site: 21
>>> Seems to have no N-terminal signal sequence
      INTEGRAL Likelihood = −0.27 Transmembrane 210-226 (210-226)
----- Final Results -----
                              bacterial membrane --- Certainty = 0.1107(Affirmative) < succ>
                                bacterial outside --- Certainty = 0.0000(Not Clear) < succ>
                            bacterial cytoplasm --- Certainty = 0.0000(Not Clear) < succ>
```

[5806] An alignment of the GAS and GBS proteins is shown below.

| Identities = 397/450 (88%), Positives = 431/450 (95%), Gaps = 1/450 (0%) | | | |
|---|---|---|---|
| Query: | 3 | EVSELRVQPQDLLAEQAVLGSIFISPEKLIMVREFISPDDFYKYSHKVIFRAMITLADRN | 62 |
| | | EV+ELRVQPQDLLAEQ+VLGSIFISP+KLI VREFISPDDFYKY+HK+IFRAMITL+DRN | |
| Sbjct: | 8 | EVAELRVQPQDLLAEQSVLGSIFISPDKLIAVREFISPDDFYKYAHKIIFRAMITLSDRN | 67 |
| Query: | 63 | DAIDAATVRNILDDQGDLQNIGGLGYIVELVNSVPTSANAEFYAKIVSEKAMLRDIISKL | 122 |
| | | DAIDA T+R ILDDQ DLQ+IGGL YIVELVNSVPTSANAE+YAKIV+EKAMLRDII++L | |
| Sbjct: | 68 | DAIDATTIRTILDDQDDLQSIGGLSYIVELVNSVPTSANAEYYAKIVAEKAMLRDIIARL | 127 |
| Query: | 123 | TDTVNMAY-EGNDSDEIIATAEKALVDINEHSNRSGFRKISDVLKVNYENLELRSQQTSD | 181 |
| | | T++VN+AY E +E+IA E+AL+++NEHSNRSGFRKISDVLKVNYE LE RS+QTS+ | |
| Sbjct: | 128 | TESVNLAYDEILKPEEVIAGVERALIELNEHSNRSGFRKISDVLKVNYEALEARSKQTSN | 187 |
| Query: | 182 | VTGLPTGFRDLDRITTGLHPDQLIILAARPAVGKTAFVLNIAQNVGTKQNRPVAIFSLEM | 241 |
| | | VTGLPTGFRDLD+ITTGLHPDOL+ILAARPAVGKTAFVLNIAONVGTKO + VAIFSLEM | |
| Sbjct: | 188 | VTGLPTGFRDLDKITTGLHPDQLVILAARPAVGKTAFVLNIAQNVGTKQKKTVAIFSLEM | 247 |
| Query: | 242 | GAESLVDRMLAAEGMVDSHSLRTGQLTDQDWNNVTIAQGALADAPIYIDDTPGIKITEIR | 301 |
| | | GAESLVDRMLAAEGMVDSHSLRTGQLTDQDWNNVTIAQGALA+APIYIDDTPGIKITEIR | |
| Sbjct: | 248 | GAESLVDRMLAAEGMVDSHSLRTGQLTDQDWNNVTIAQGALAEAPIYIDDTPGIKITEIR | 307 |
| Query: | 302 | ARSRKLSQEVDDGLGLIVIDYLQLISGTRPENRQQEVSEISRQLKILAKELKVPVIALSQ | 361 |
| | | ARSRKLSQEVD GLGLIVIDYLQLI+GT+PENRQQEVS+ISRQLKILAKELKVPVIALSQ | |
| Sbjct: | 308 | ARSRKLSQEVDGGLGLIVIDYLQLITGTKPENRQQEVSDISRQLKILAKELKVPVIALSQ | 367 |
| Query: | 362 | LSRGVEQRQDKRPVLSDIRESGSIEQDADIVAFLYRDDYYRREGEEAEEIVEDNTVEVIL | 421 |
| | | LSRGVEQRQDKRPVLSDIRESGSIEQDADIVAFLYRDDYYR+E ++AEE VEDNT+EVIL | |
| Sbjct: | 368 | LSRGVEQRQDKRPVLSDIRESGSIEQDADIVAFLYRDDYYRKECDDAEEAVEDNTIEVIL | 427 |
| Query: | 422 | EKNRAGARGTVKLMFQKEYNKFSSIAQFEE | 451 |
| | | EKNRAGARGTVKLMFQKEYNKFSSIAQFEE | |
| Sbjct: | 428 | EKNRAGARGTVKLMFQKEYNKFSSIAQFEE | 457 |

[5807] Based on this analysis, it was predicted that these proteins and their epitopes could be useful antigens for vaccines or diagnostics.

### EXAMPLE 1039

[5808] A DNA sequence (GBSx111) was identified in S. agalactiae <SEQ ID 3211> which encodes the amino acid sequence <SEQ ID 3212>. Analysis of this protein sequence reveals the following:

```
Possible Site: 61
>>> Seems to have no N-terminal signal sequence
----- Final Results -----
                            bacterial cytoplasm --- Certainty = 0.4909(Affirmative) < succ>
                              bacterial membrane --- Certainty = 0.0000(Not Clear) < succ>
                                bacterial outside --- Certainty = 0.0000(Not Clear) < succ>
```

[5809] The protein has no significant homology with any sequences in the GENPEPT database.

[5810] A related DNA sequence was identified in S. pyogenes <SEQ ID 3213> which encodes the amino acid sequence <SEQ ID 3214>. Analysis of this protein sequence reveals the following:

```
Possible site: 21
>>> Seems to have no N-terminal signal sequence
----- Final Results -----
                            bacterial cytoplasm --- Certainty = 0.3467(Affirmative) < succ>
                              bacterial membrane --- Certainty = 0.0000(Not Clear) < succ>
                                bacterial outside --- Certainty = 0.0000(Not Clear) < succ>
```

[5811] An alignment of the GAS and GBS proteins is shown below.

| Identities = 77/90 (85%), Positives = 84/90 (92%) | | | |
|---|---|---|---|
| Query: | 1 | MSDAFADVAKMKKIKEDIKSHEGQMVELTLENGRKREKNKIGRLIEVYPSLFIVEYKDTA | 60 |
| | | MSDAF DVAKMKKIKEDI++HEGQ+VELTLENGRKREKNKIGRLIEVY SLFI+EY D++ | |
| Sbjct: | 11 | MSDAFTDVAKMKKIKEDIRAHEGQLVELTLENGRKREKNKIGRLIEVYSSLFIIEYSDSS | 70 |
| Query: | 61 | AVPGAIDNTYVESYTYSDILTEKTLIRYFD | 90 |
| | | PGAIDN+YVESYTYSDILTEKTLIRY D | |
| Sbjct: | 71 | DTPGAIDNSYVESYTYSDILTEKTLIRYLD | 100 |

[5812] Based on this analysis, it was predicted that these proteins and their epitopes could be useful antigens for vaccines or diagnostics.

### EXAMPLE 1040

[5813] A DNA sequence (GBSx1112) was identified in S. agalactiae <SEQ ID 3215> which encodes the amino acid sequence <SEQ ID 3216>. This protein is predicted to be 30S ribosomal protein S4 (rpsD). Analysis of this protein sequence reveals the following:

```
Possible site: 27
>>> Seems to have no N-terminal signal sequence
----- Final Results -----
                            bacterial cytoplasm --- Certainty = 0.2937(Affirmative) < succ>
                              bacterial membrane --- Certainty = 0.0000(Not Clear) < succ>
                                bacterial outside --- Certainty = 0.0000(Not Clear) < succ>
```

[5814] The protein has homology with the following sequences in the GENPEPT database.

>GP:AAC00397 GB:AF008220 ribosomal protein S4 [Bacillus subtilis]
Identities = 138/201 (68%), Positives = 158/201 (77%), Gaps = 1/201 (0%)

| | | | |
|---|---|---|---|
| Query: | 1 | MSRYTGPSWKQSRRLGLSLTGTGKELARRNYVPGQHGPNNRSKLSEYGLQLAEKQKLRFS | 60 |
| | | M+RYTGPSWK SRRLG+SL+GTGKEL +R Y PG HGP R KLSEYGLQL EKQKLR | |
| Sbjct: | 1 | MARYTGPSWKLSRRLGISLSGTGKELEKRPYAPGPHGPGQRKKLSEYGLQLQEKQKLRHM | 60 |
| Query: | 61 | YGLGEKQFRNLFVQATKAKEGTLGFNFMVLLERRLDNVVYRLGLATTRRQARQFVNHGHI | 120 |
| | | YG+ E+QFR LF +A K G G NFM+LL+ RLDNVVY+LGLA TRRQARQ VNHGHI | |
| Sbjct: | 61 | YGVNERQFRTLFDKAGKLA-GKHGENFMILLDSRLDNVVYKLGLARTRRQARQLVNHGHI | 119 |
| Query: | 121 | LVDGKRVDIPSYRVTPGQVISVREKSMKVPAILEAVEATLGRPAFVSFDAEKLEGSLTRL | 180 |
| | | LVDG RVDIPSY V PGQ I VREKS + I E+VE P +++FDAEKLEG+ TRL | |
| Sbjct: | 120 | LVDGSRVDIPSYLVKPGQTIGVREKSRNLSIIKESVEVNNFVPEYLTFDAEKLEGTFTRL | 179 |
| Query: | 181 | PERDEINPEINEALVVEFYNK | 201 |
| | | PER E+ PEINEAL+VEFY++ | |
| Sbjct: | 180 | PERSELAPEINEALIVEFYSR | 200 |

[5815] A related DNA sequence was identified in S. pyogenes <SEQ ID 3217> which encodes the amino acid sequence <SEQ ID 3218>. Analysis of this protein sequence reveals the following:

```
Possible site: 27
>>> Seems to have no N-terminal signal sequence
----- Final Results -----
                            bacterial cytoplasm --- Certainty = 0.2937(Affirmative) < succ>
                              bacterial membrane --- Certainty = 0.0000(Not Clear) < succ>
                                bacterial outside --- Certainty = 0.0000(Not Clear) < succ>
```

[5816] An alignment of the GAS and GBS proteins is shown below.

| Identities = 201/203 (99%), Positives = 201/203 (99%) | | | |
|---|---|---|---|
| Query: | 1 | MSRYTGPSWKQSRRLGLSLTGTGKELARRNYVPGQHGPNNRSKLSEYGLQLAEKQKLRFS | 60 |
| | | MSRYTGPSWKQSRRLGLSLTGTGKELARRNYVPGQHGPNNRSKLSEYGLQLAEKQKLRFS | |
| Sbjct: | 1 | MSRYTGPSWKQSRRLGLSLTGTGKELARRNYVPGQHGPNNRSKLSEYGLQLAEKQKLRFS | 60 |
| Query: | 61 | YGLGEKQFRNLFVQATKAKEGTLGFNFMVLLERRLDNVVYRLGLATTRRQARQFVNHGHI | 120 |
| | | YGLGEKQFRNLFVQATK KEGTLGFNFMVLLERRLDNVVYRLGLATTRRQARQFVNHGHI | |
| Sbjct: | 61 | YGLGEKQFRNLFVQATKIKEGTLGFNFMVLLERRLDNVVYRLGLATTRRQARQFVNHGHI | 120 |
| Query: | 121 | LVDGKRVDIPSYRVTPGQVISVREKSMKVPAILEAVEATLGRPAFVSFDAEKLEGSLTRL | 180 |
| | | LVDGKRVDIPSYRV PGOVISVREKSMKVPAILEAVEATLGRPAFVSFDAEKLEGSLTRL | |
| Sbjct: | 121 | LVDGKRVDIPSYRVDPGQVISVREKSMKVPAILEAVEATLGRPAFVSFDAEKLEGSLTRL | 180 |
| Query: | 181 | PERDEINPEINEALVVEFYNKNL | 203 |
| | | PERDEINPEINEALVVEFYNKML | |
| Sbjct: | 181 | PERDEINPEINEALVVEFYNKML | 203 |

[5817] Based on this analysis, it was predicted that these proteins and their epitopes could be useful antigens for vaccines or diagnostics.

### EXAMPLE 1041

[5818] A DNA sequence (GBSx1113) was identified in S. agalactiae <SEQ ID 3219> which encodes the amino acid sequence <SEQ ID 3220>. Analysis of this protein sequence reveals the following:

```
Possible site: 29
>>> Seems to have no N-terminal signal sequence
----- Final Results -----
                            bacterial cytoplasm --- Certainty = 0.4067(Affirmative) < succ>
                              bacterial membrane --- Certainty = 0.0000(Not Clear) < succ>
                                bacterial outside --- Certainty = 0.0000(Not Clear) < succ>
```

[5819] The protein has homology with the following sequences in the GENPEPT database.

| >GP:AAF98302 GB:AF243383 unknown; Orf3 [Lactococcus lactissubsp. | | | |
|---|---|---|---|
| lactis] | | | |
| Identities = 46/97 (47%), Positives = 69/97 (70%) | | | |
| Query: | 1 | MNLNDRLKIEEMEEKYDSFKPRINALVEAIDDFQKHYEDYVKLREFYGSEDWFRLSEQTE | 60 |
| | | M+ D I++ME KYD+F P + L+++++ F Y +Y++LR FYGSE WF E + | |
| Sbjct: | 1 | MDNKDIELIQQMENKYDTFMPVLTNLIDSVEKFNSIYNNYIELRNFYGSEKWFEYMEIEK | 60 |
| Query: | 61 | NNLKCGVLSEDQLFDFIGEHNELVGQFLDNSSQMYRH | 97 |
| | | +KCGVL+EDQLFD I +HNEL+G LD++S+MY++ | |
| Sbjct: | 61 | IPVKCGVLTEDQLFDMISDHNELLGVLLDLTSKMYKN | 97 |

[5820] A related DNA sequence was identified in S. pyogenes <SEQ ID 3221> which encodes the amino acid sequence <SEQ ID 3222>. Analysis of this protein sequence reveals the following:

```
Possible site: 34
>>> Seems to have no N-terminal signal sequence
----- Final Results -----
                            bacterial cytoplasm --- Certainty = 0.3465(Affirmative) < succ>
                              bacterial membrane --- Certainty = 0.0000(Not Clear) < succ>
                                bacterial outside --- Certainty = 0.0000(Not Clear) < succ>
```

[5821] An alignment of the GAS and GBS proteins is shown below.

| Identities = 48/98 (48%), Positives = 74/98 (74%) | | | |
|---|---|---|---|
| Query: | 1 | MNLNDRLKIEEMEEKYDSFKPRINALVEAIDDFQKHYEDYVKLREFYGSEDWFRLSEQTE | 60 |
| | | M D+L +E+ME+ Y++F P++ L+EA+D F++HYE+Y LR FY S++WFRL+ Q | |
| Sbjct: | 1 | MTKQDQLIVEKMEQTYEAFSPKLANLIEALDAFKEHYEEYATLRNFYSSDEWFRLANQPW | 60 |
| Query: | 61 | NNLKCGVLSEDQLFDFIGEHNELVGQFLDMSSQMYRHL | 98 |
| | | +++ CGVLSED LFD IG+HN+L+ LD++ MY+H+ | |
| Sbjct: | 61 | DDIPCGVLSEDLLFDMIGDHNQLLADILDLAPIMYKHN | 98 |

[5822] Based on this analysis, it was predicted that these proteins and their epitopes could be useful antigens for vaccines or diagnostics.

### EXAMPLE 1042

[5823] A DNA sequence (GBSx1114) was identified in S. agalactiae <SEQ ID 3223> which encodes the amino acid sequence <SEQ ID 3224>. Analysis of this protein sequence reveals the following:

```
Possible site: 50
>>> Seems to have no N-terminal signal sequence
----- Final Results -----
                            bacterial cytoplasm --- Certainty = 0.0965(Affirmative) < succ>
                              bacterial membrane --- Certainty = 0.0000(Not Clear) < succ>
                                bacterial outside --- Certainty = 0.0000(Not Clear) < succ>
```

[5824] The protein has homology with the following sequences in the GENPEPT database.

```
>GP:BAB04438 GB:AP001509 transcriptional regulator (TetR/AcrR
                      family) [Bacillus halodurans]
  Identities = 47/181 (25%), Positives = 95/181 (51%), Gaps = 16/181 (8%)
```

| | | | |
|---|---|---|---|
| Query: | 4 | DTRREKTKRAIEAAMITLLKDQSFDEISTINLTKTAGISRSSFYTHYKDKYEMIDQYQQS | 63 |
| | | D R++ T+ ++ +++ L++++ I+ + A I+RS+FY+HY D Y+++ Q + | |
| Sbjct: | 6 | DRRKKYTRMLLKESLMKLMQEKPLSNITIKEICDLADINRSTFYSHYTDLYDLLYQIEDE | 65 |
| Query: | 64 | LFNKV-EYIFDRNQFKKEDAL-----LEIFQFLDRESLFAALLTQNGTKEIQTYILNKLQ | 117 |
| | | + + E + N K E+AL L ++ +RES L ++ G Q K | |
| Sbjct: | 66 | IIKDLSEALSSYNYTKDEEALQMTENLLVYIANNRESC-QTLFSEYGDPSFQ-----KKV | 119 |
| Query: | 118 | LMLSKELPVVNP---DATKSDINRLYYSVYLSHAIFGVYQMWITRGKKESPQQITQVLLSL | 175 |
| | | +ML+ + + P TK DI+ Y S+Y+ + + Q W+ G K+SP+++ ++++ L | |
| Sbjct: | 120 | MMLAHDHVIKTPLVGKHTKPDISE-YVSLYIVNGSIHIVQSWLKNGLKQSPKEMAELIIKL | 179 |

[5825] A related DNA sequence was identified in S. pyogenes <SEQ ID 3225> which encodes the amino acid sequence <SEQ ID 3226>. Analysis of this protein sequence reveals the following:

```
          Possible site: 48
>>> Seems to have an uncleavable N-term signal seq
----- Final Results -----
      bacterial membrane --- Certainty = 0.0000 (Not Clear) < succ>
        bacterial outside --- Certainty = 0.0000 (Not Clear) < succ>
    bacterial cytoplasm --- Certainty = 0.0000 (Not Clear) < succ>
```

[5826] The protein has homology with the following sequences in the databases:

| >GP:BAB04438 GB:AP001509 transcriptional regulator (TetR/AcrR | | | |
|---|---|---|---|
| family) [Bacillus halodurans] | | | |
| Identities = 47/180 (26%), Positives = 88/180 (48%), Gaps = 18/180 (10%) | | | |
| Query: | 4 | RKENTKQAILKAMVMLLKTESFDDITTVKLSKRAGISRSSFYTHYKDKYEMIDYYQQTFF | 63 |
| | | RK+ T+ + ++++ L++ + +IT ++ A I+RS+FY+HY D Y+++ + | |
| Sbjct: | 8 | RKKYTRMLLKESLMKLMQEKPLSNITIKEICDLADINRSTFYSHYTDLYDLLYQIEDEII | 67 |
| Query: | 64 | HKLEYIFEKKYQNKEQAFLEVFEFL-----QREQLLSSLLSANGTKEIQAFIINKVRLL- | 117 |
| | | L K++ L++ E L + +L S G Q KV +L | |
| Sbjct: | 68 | KDLSEALSSYNYTKDEEALQMTENLLVYIANNRESCQTLFSEYGDPSFQ----KKVMMLA | 123 |
| Query: | 118 | ----ITTDLQDKFSTEELSQTEKEYQSIYLAHAFFGVCQSWIAKGKKESPQEMTQFVLKM | 173 |
| | | I T L K + ++S EY S+Y+ + + QSW+ G K+SP+EM + ++K+ | |
| Sbjct: | 124 | HDHVIKTPLVGKHTRPDIS----EYVSLYIVNGSIHIVQSWLKNGLKQSPKEMAELIIKL | 179 |

[5827] An alignment of the GAS and GBS proteins is shown below.

| Identities = 100/179 (55%), Positives = 134/179 (73%), Gaps = 2/179 (1%) | | | |
|---|---|---|---|
| Query: | 1 | MVNDTRREKTKRAIEAAMITLLKDQSWDEISTINLTKTAGISRSSFYTHYKDKYEMIDQY | 60 |
| | | MVN R+E TK+AI AM+ LLK +SFD+I+T+ L+K AGISRSSFYTHYKDKYEMID Y | |
| Sbjct: | 1 | MVN--RKENTKQAILKAMVMLLKTESFDDITTVKLSKRAGISRSSFYTHYKDKYEMIDYY | 58 |
| Query: | 61 | QQSLFNKVEYIFDRNQFKKEDALLEIFQFLDRESLFAALLTQNGTKEIQTYILNKLQLML | 120 |
| | | QQ+ F+K+EYIF++ KE A LE+F+FL RE L ++LL+ NGTKEIQ +I+NK++L++ | |
| Sbjct: | 59 | QQTFFHKLEYIFEKKYQNKEQAFLEVFEFLQREQLLSSLLSANGTKEIQAFIINKVRLLI | 118 |
| Query: | 121 | SKELPVVNPDATKSDINRLYYSVYLSHAIFGVYQMWITRGKKESPQQITQVLLSLLPQT | 179 |
| | | + +L S + Y S+YL+HA FGV Q WI +GKKESPQ++TQ +L +L T | |
| Sbjct: | 119 | TTDLQDKFSTEELSQTEKEYQSIYLAHAFFGVCQSWIAKGKKESPQEMTQFVLKMLTST | 177 |

[5828] Based on this analysis, it was predicted that these proteins and their epitopes could be useful antigens for vaccines or diagnostics.

### EXAMPLE 1043

[5829] A DNA sequence (GBSx1115) was identified in S. agalactiae <SEQ ID 3227> which encodes the amino acid sequence <SEQ ID 3228>. Analysis of this protein sequence reveals the following:

| Possible site: 58 | | | |
|---|---|---|---|
| >>> Seems to have no N-terminal signal sequence | | | |
| INTEGRAL | Likelihood = −10.35 | Transmembrane | 790-806 (787-808) |
| INTEGRAL | Likelihood = −7.32 | Transmembrane | 707-723 (703-725) |
| INTEGRAL | Likelihood = −7.11 | Transmembrane | 637-653 (630-659) |
| INTEGRAL | Likelihood = −6.32 | Transmembrane | 678-694 (672-698) |
| INTEGRAL | Likelihood = −1.44 | Transmembrane | 55-71 (55-73) |
| INTEGRAL | Likelihood = −0.22 | Transmembrane | 732-748 (730-748) |

```
----- Final Results -----
      bacterial membrane --- Certainty = 0.5140 (Affirmative) < succ>
        bacterial outside --- Certainty = 0.0000 (Not Clear) < succ>
    bacterial cytoplasm --- Certainty = 0.0000 (Not Clear) < succ>
```

[5830] A related GBS nucleic acid sequence <SEQ ID 10287> which encodes amino acid sequence <SEQ ID 10288> was also identified.

[5831] The protein has homology with the following sequences in the GENPEPT database.

| >GP:CAB12856 GB:Z99109 alternate gene name: yixE~similar to phage | | | |
|---|---|---|---|
| infection protein [Bacillus subtilis] | | | |
| Identities = 227/783 (28%), Positives = 387/783 (48%), Gaps = 60/783 (7%) | | | |
| Query: | 45 | KAIIKSPKLWITMAGVALIPTLYNVIFLSSMWDPYGNTKNLPVAVVNQDKSAKLNGKTIS | 104 |
| | | K I+ S KL I + + +P +Y+ +FL + WDPYG LPV VVNQDK A G+ + | |
| Sbjct: | 9 | KDIVTSKKLLIPIIAILFVPLIYSGVFLKAYWDPYGTVDQLPVVVVNQDKGATYEGERLQ | 68 |
| Query: | 105 | IGKDMEDNLSKNDSLDFHFTT-AKRAEKELEKGHYYMVITFPKDLSRKATTLMTEKPERL | 163 |
| | | IG D+ L N++ D+HF+ ++ K+L YY+V+ P+D S+ A+T++ + P++L | |
| Sbjct: | 69 | IGDDLVKELKDNNNFDWHFSNDLDQSLKDLLNQKYYLVVEIPEDFSKNASTVLDKNPKKL | 128 |
| Query: | 164 | NITYKTTKGRSFVASKMSETAANKLKDEVAESITGTYTESVFKNMGSMKTGINKAADGSQ | 223 |
| | | ++ Y T G ++V + + E A +KLK V++ +T YT+ +F N + G++ A+ G++ | |
| Sbjct: | 129 | DLKYHTNAGSNYVGATIGEKAIDKLKASVSKEVTEQYTKVIFDNFKDIAKGLSDASSGAK | 188 |
| Query: | 224 | ELLNGSNKLQDGSQTLTSNLDVLASSSQTFSGGANKLNSGINLYTDGVGTLSNGLETLSD | 283 |
| | | ++ +G+ ++GS L NL L S+ T S +L G T G+ +L + L D | |
| Sbjct: | 189 | KIDDGTKDAKNGSAQLKENLAKLKESTATISDKTAQLADGAAQVTSGIQSLDSSLGKFQD | 248 |
| Query: | 284 | GVTAYTTGVHKLSEGSQKLDDKSQALV-------EGSEKLTDGLQQLSQATQLKPEQSRT | 336 |
| | | +L+ GS +L K L+ +G+ LT+GL QL+ Q E+ | |
| Sbjct: | 249 | SSNQIYDKSSQLAAGSGELTSKMNELLAGLQNVQKGTPNLTNGLDQLNSKVQEGSEKAAK | 308 |
| Query: | 337 | LQNLSDG--LKNLNQIITNLQSTATTDSDTNSKLFNFLSTIESSTKALMNTAAADKQKQM | 394 |
| | | + + + L L + NL+ + T + +L +F +++++ +A N + + | |
| Sbjct: | 309 | AEKIINALDLTKLETAVNNLEKSETAMKEFKKQLTDFENSLKNRDQAFKN--VINSSDFL | 366 |
| Query: | 395 | TAVQST----SAFKSLTPEQQSQITSAVTGTPTSAE-TIAANISSNIENMKTVLSEASSS | 449 |
| | | TA Q + S K L ++ PT+ + A I S++E++K +++ + | |
| Sbjct: | 367 | TAEQKSQLINSVEKKLPQVDAPDFDQILSQLPTADQLPDIATIKSSLEDVKAQVAQVKAM | 426 |
| Query: | 450 | APSN----NGSQNLQTLSGTANNLVLKAISDLDKIQKLPTATKQLYQGSQTLTKGITDYT | 505 |
| | | + NG++ +Q D I +L ++Y GSQ LT G T T | |
| Sbjct: | 427 | PEATSKLYNGAKTIQ-----------------DAIDRLTEGADKIYNGSQKLTDGQTKLT | 469 |
| Query: | 506 | NAVGQLRKGAVTLDSKSNQLISGTQKASQGAQTLDSKSDQLRDGAGQLASGSDRIADGSN | 565 |
| | | +G+ K + S QL++G S Q+ G +L GS ++ GS+ | |
| Sbjct: | 470 | AGIGEYNKQFAKAKAGSEQLVTG--------------SSQVSGGLFKLLDGSKQVQSGSS | 515 |
| Query: | 566 | KLAGGGHQLTDGLTELSGGVSQLSSSLGKAGDQLSMVSVNKDNANAVSSPVTIKHEDYDS | 625 |
| | | KLA G L GL +L G +LSS L A DQ + + + PV K + S | |
| Sbjct: | 516 | KLADGSASLDTGLGKLLDGTGELSSKLKDAADQTGDIDADDQTYGMFADPVKTKDDAIHS | 575 |
| Query: | 626 | VDTNGVGMAPYMISVALMVVALSANVIFAKALSGKEPANRFSWAKNK---LLINGFIATL | 682 |
| | | V G G+ PY++S+ L V + V+F + P N F W +K +++ G I +L | |
| Sbjct: | 576 | VPNYGTGLTPYILSMGLYVGGIMLTVVFPLKEASGRPRNGFEWFFSKFNVMMLVGIIQSL | 635 |
| Query: | 683 | -AATILFFAVQFIGLKPDYPGKTYFIILLTAWTLMALVTALVGWDNRYGSFLSLLILLFQ | 741 |
| | | AT+L IGL+ + + Y ++T+ +A++ L G F++++IL+ Q | |
| Sbjct: | 636 | IVATVLLLG---IGLEVESTWRFYVFTIITSLAFLAIIQFLATTMGNPGRFIAVIILVLQ | 692 |
| Query: | 742 | LGSSAGTYPIELSPKFFQTIQPFLPMTYSVSGLRETISLTGDVNHQWRMLVIFLVSSMIL | 801 |
| | | LG+S GT+P+EL P F+Q I LPMTYS++G R IS GD + W+M + + ++++ | |
| Sbjct: | 693 | LGASGGTFPLELLPNFYQVIHGALPMTYSINGFRAVIS-NGDFGYMWQMAGVLIGIALVM | 751 |
| Query: | 802 | ALL | 804 |
| | | L | |
| Sbjct: | 752 | IAL | 754 |

[5832] A related DNA sequence was identified in S. pyogenes <SEQ ID 2017> which encodes the amino acid sequence <SEQ ID 2018>. Analysis of this protein sequence reveals the following:

| Possible site: 26 | | | |
|---|---|---|---|
| >>> Seems to have no N-terminal signal sequence | | | |
| INTEGRAL | Likelihood = −9.29 | Transmembrane | 735-751 (729-754) |
| INTEGRAL | Likelihood = −5.79 | Transmembrane | 582-598 (580-601) |
| INTEGRAL | Likelihood = −3.66 | Transmembrane | 652-668 (650-669) |
| INTEGRAL | Likelihood = −2.97 | Transmembrane | 14-30 (14-34) |
| INTEGRAL | Likelihood = −2.66 | Transmembrane | 623-639 (622-641) |

```
----- Final Results -----
      bacterial membrane --- Certainty = 0.4715 (Affirmative) < succ>
        bacterial outside --- Certainty = 0.0000 (Not Clear) < succ>
    bacterial cytoplasm --- Certainty = 0.0000 (Not Clear) < succ>
```

[5833] An alignment of the GAS and GBS proteins is shown below.

| Identities = 360/779 (46%), Positives = 508/779 (64%), Gaps = 32/779 (4%) | | | |
|---|---|---|---|
| Query: | 40 | MLDELKAIIKSPKLWITMAGVALIPTLYNVIFLSSMWDPYGNTKNLPVAVVNQDKSAKLN | 99 |
| | | ML+ELK +IK+PKL ITM GVAL+P LYN+ FL SMWDPYG +LP+AVVN DK AK | |
| Sbjct: | 1 | MLEELKTLIKNPKLMITMIGVALVPALYNLSFLGSMWDPYGRVNDLPIAVVNHDKPAKRA | 60 |
| Query: | 100 | GKTISIGKDMEDNLSKNDSLDFHFTTAKRAEKELEKGHYYMVITFPKDLSRKATTLMTEK | 159 |
| | | K+++IG DM D +SK+ L++HF +AK+A++ L++G YYMVIT P+DLS++A TL+ + | |
| Sbjct: | 61 | DKSLTIGNDMVDKMSKSKDLEYHFVSAKQAQEGLKEGDYYMVITLPEDLSQRAATLLNPE | 120 |
| Query: | 160 | PERLNITYKTTKGRSFVASKMSETAANKLKDEVAESITGTYTESVFKNMGSMKTGINKAA | 219 |
| | | P++L I Y+T+KG VA+KM ETA KLK+ V+++IT TYT +VF +M +++G+ +A+ | |
| Sbjct: | 121 | PQKLTIRYQTSKCHGMVAAKMGETAMAKLKESVSQNITKTYTSAVFSSMTDLQSGLKEAS | 180 |
| Query: | 220 | DGSQELLNGSNKLQDCSQTLTSNLDVLASSSQTFSGGANKLNSGINLYTDGVGTLSNGLE | 279 |
| | | GSQ L +G+ Q GSQTL++NL L +SQ F G +L SG+ YTDGV + NGL | |
| Sbjct: | 181 | AGSQALASGAKTAQAGSQTLSTNLAALTGASQQFQQGTGRLTSGLTTYTDGVNQVKNGLG | 240 |
| Query: | 280 | TLSDGVTAYTTGVHKLSEGSQKLDDKSQALVEGSEKLTDGLQQLSQATQLKPEQERTLQN | 339 |
| | | TLS + Y GV +LS+G+ +L+ GL QL+QAT L E+ + +Q+ | |
| Sbjct: | 241 | TLSTDIPNYLNGVSRLSQGASQLNQ--------------GLSQLTQATTLSDEKAKGIQS | 286 |
| Query: | 340 | LSDGLKNLNQIITNLQSTATTDSDTN---SKLFNFLSTIESSTKALMNTAAADKQKQNTA | 396 |
| | | L GL LNQ I L + +T N +L N L I + K ++ A + ++++A | |
| Sbjct: | 287 | LIVGLPVLNQGIQQLNTELSTLQPPNLNADELGNSLGAIAQAAKQVIAEETAAQNEELSA | 346 |
| Query: | 397 | VQSTSAFKSLTPEQQSQITSAVTGTPTSAETIAAN-ISSNIENMKTVLSEASSSAPSNNG | 455 |
| | | +Q+TS ++SLT EQQ ++ +A++ + S AA I S+++ + T L S S | |
| Sbjct: | 347 | LQATSVYQSLTAEQQGELAAALSQSDKSQTVSAAQTILSSVQTLSTSLQSLSQEDQSKQL | 406 |
| Query: | 456 | SQNLQTLSGTANNLVLKAISDLDKIQKLPTATKQLYQGSQTLTKGITDYTNAV----GQL | 511 |
| | | Q + ++ AN Q LP A+ L + S L K V QL | |
| Sbjct: | 407 | EQLKEAVAQIANQ----------SNQALPGASSALTELSTGLAKVNGSLNQQVLPGSNQL | 456 |
| Query: | 512 | RKGAVTLDSKSNQLISGTQKASQGAQTLDSKSDQLRDGAGQLASGSDRIADGSNKLAGGG | 571 |
| | | G L+ + + SG K S+GA L SKS +L DG+ QL+ G+ ++ADGS++L+ GG | |
| Sbjct: | 457 | TTGLAQLNRYNTAIGSGVIKLSEGANALSSKSGELLDGSHQLSEGATKLADGSSQLSQGG | 516 |
| Query: | 572 | HQLTDGLTELSGGVSQLSSSLGKAGDQLSMVSVNKDNANAVSSPVTIKHEDYDSVDTNGV | 631 |
| | | HQLT GLTELS G+S L+ SL KA QLS+VSV NA AV+ P+ + +D D V TNG+ | |
| Sbjct: | 517 | HQLTSGLTELSTGLSTLNGSLAKASQQLSLVSVTDKNAKAVAKPLVLNEKDKDGVKTNGI | 576 |
| Query: | 632 | GMAPYMISVALMVVALSANVIFAKALSGKEPANRFSWAKNKLLINGFIATLAATILFFAV | 691 |
| | | GMAPYMI+V+LMVVALS NVIFA +LSG+ +++ WAK K +INGFI+T+ + +L+ A+ | |
| Sbjct: | 577 | GMAPYMIAVSLMVVALSTNVIFANSLSGRPVKDKWDWAKQKFVINGFISTMGSIVLYLAI | 636 |
| Query: | 692 | QFIGLKPDYFGKTYFIILLTAWTLMALVTALVGWDNRYGSFLSLLILLFQLGSSAGTYPI | 751 |
| | | Q +G + Y +T I+L+ WT MALVTALVGWD+RYGSF SL++LL Q+GSS G+YPI | |
| Sbjct: | 637 | QLLGFEARYGMETLGFIMLSGWTFMALVTALVGWDDRYGSFASLVMLLLQVGSSGGSYPI | 696 |
| Query: | 752 | ELSPKFFQTIQPFLPMTYSVSGLRETISLTGDVNHQWRMLVIFLVSSMILALLIYRKQE | 810 |
| | | ELS FFQ + PFLPMTY VSGLR+TISL+G + + ++L FL++ M+LALLIYR ++ | |
| Sbjct: | 697 | ELSGAFFQKLHPFLPMTYVVSGLRQTISLSGHIGVEVKVLTGFLLAFMVLALLIYRPKK | 755 |

[5834] Based on this analysis, it was predicted that these proteins and their epitopes could be useful antigens for vaccines or diagnostics.

### EXAMPLE 1044

[5835] A DNA sequence (GBSx1116) was identified in S. agalactiae <SEQ ID 3229> which encodes the amino acid sequence <SEQ ID 3230>. Analysis of this protein sequence reveals the following:

```
Possible site: 35
>>> Seems to have no N-terminal signal sequence
----- Final Results -----
    bacterial cytoplasm --- Certainty = 0.2664 (Affirmative) < succ>
      bacterial membrane --- Certainty = 0.0000 (Not Clear) < succ>
        bacterial outside --- Certainty = 0.0000 (Not Clear) < succ>
```

[5836] The protein has no significant homology with any sequences in the GENPEPT database.

[5837] No corresponding DNA sequence was identified in S. pyogenes.

[5838] Based on this analysis, it was predicted that this protein and its epitopes, could be useful antigens for vaccines or diagnostics.

### EXAMPLE 1045

[5839] A DNA sequence (GBSx1117) was identified in S. agalactiae <SEQ ID 3231> which encodes the amino acid sequence <SEQ ID 3232>. Analysis of this protein sequence reveals the following:

| Possible site: 60 | | | |
|---|---|---|---|
| >>> Seems to have no N-terminal signal sequence | | | |
| INTEGRAL | Likelihood = −9.45 | Transmembrane | 48-64 (45-69) |
| INTEGRAL | Likelihood = −1.49 | Transmembrane | 71-87 (71-87) |

```
----- Final Results -----
      bacterial membrane --- Certainty = 0.4779 (Affirmative) < succ>
        bacterial outside --- Certainty = 0.0000 (Not Clear) < succ>
    bacterial cytoplasm --- Certainty = 0.0000 (Not Clear) < succ>
```

[5840] A related GBS nucleic acid sequence <SEQ ID 9441> which encodes amino acid sequence <SEQ ID 9442> was also identified.

[5841] The protein has homology with the following sequences in the GENPEPT database.

| >GP:AAA25222 GB:M87483 ORF 1 [Lactococcus lactis] | | | |
|---|---|---|---|
| Identities = 50/88 (56%), Positives = 66/88 (74%), Gaps = 1/88 (1%) | | | |
| Query: | 2 | TGKIFSMSKEELSYLPVIKLFKNQGVYNGLIGLFLLYGLYISQNQ-EIVAVFLINVLLVA | 60 |
| | | T ++F+M KEEL V LFKNQG+YNGLIGL L+Y ++ S Q EIV + LI ++LVA | |
| Sbjct: | 32 | TSRVFNMGKEELERSSVQTLFKNQGIYNGLIGLGLIYAIFFSSAQLEIVRLLLIYIILVA | 91 |
| Query: | 61 | IYGALTVDKKILLKQGGLPILALLTFLF | 88 |
| | | +YG+LT +KKI+L QGGL ILAL++ F | |
| Sbjct: | 92 | LYGSLTSNKKIILTQGGLAILALISSFF | 119 |

[5842] No corresponding DNA sequence was identified in S. pyogenes.

[5843] A related GBS gene <SEQ ID 8719> and protein <SEQ ID 8720> were also identified. Analysis of this protein sequence reveals the following:

| Lipop: Possible site: −1 Crend: 8 | | | |
|---|---|---|---|
| McG: Discrim Score: 4.19 | | | |
| GvH: Signal Score (−7.5): −3.99 | | | |
| Possible site: 38 | | | |
| >>> Seems to have an uncleavable N-term signal seq | | | |
| ALOM program count: 3 value: −9.45 threshold: 0.0 | | | |
| INTSGRAL | Likelihood = −9.45 | Transmembrane | 87-103 (84-108) |
| INTEGRAL | Likelihood = −1.49 | Transmembrane | 110-126 (110-126) |
| INTEGRAL | Likelihood = −0.37 | Transmembrane | 13-29 (13-29) |
| PERIPHERAL | Likelihood = 0.47 | 65 | |

```
  modified ALOM score: 2.39
*** Reasoning Step: 3
----- Final Results -----
      bacterial membrane --- Certainty = 0.4779 (Affirmative) < succ>
        bacterial outside --- Certainty = 0.0000 (Not Clear) < succ>
    bacterial cytoplasm --- Certainty = 0.0000 (Not Clear) < succ>
```

[5844] The protein has homology with the following sequences in the databases:

[chemical structure]

[5845] Based on this analysis, it was predicted that these proteins and their epitopes could be useful antigens for vaccines or diagnostics.

### EXAMPLE 1046

[5846] A DNA sequence (GBSx1118) was identified in S. agalactiae <SEQ ID 3233> which encodes the amino acid sequence <SEQ ID 3234>. Analysis of this protein sequence reveals the following:

```
Possible site: 41
>>> Seems to have no N-terminal signal sequence
----- Final Results -----
    bacterial cytoplasm --- Certainty = 0.3140 (Affirmative) < succ>
      bacterial membrane --- Certainty = 0.0000 (Not Clear) < succ>
        bacterial outside --- Certainty = 0.0000 (Not Clear) < succ>
```

[5847] A related GBS nucleic acid sequence <SEQ ID 10285> which encodes amino acid sequence <SEQ ID 10286> was also identified.

[5848] The protein has homology with the following sequences in the GENPEPT database.

| >GP:CAB12447 GB:Z99107 similar to arylesterase [Bacillus subtilis] | | | |
|---|---|---|---|
| Identities = 37/91 (40%), Positives = 56/91 (60%) | | | |
| Query: | 13 | KDGSDIYYRVVGQGQPIVFLHGNSLSSRYFDKQIAYFSKYYQVIVMDSRGHGKSHAKLNT | 72 |
| | | +D + +YY G G PI+F+HG +S ++F KQ + S YQ I +D RGHG+S L+ | |
| Sbjct: | 7 | EDQTRLYYETHGSGTPILFIHGVLMSGQFFHKQFSVLSANYQCIRLDLRGHGESDKVLHG | 66 |
| Query: | 73 | ISFRQIAVDLKDILVHLEIDKVILVGHSDGA | 103 |
| | | + Q A D+++ L +E+D V+L G S GA | |
| Sbjct: | 67 | HTISQYARDIREFLNANELDHVVLAGWSMGA | 97 |

[5849] No corresponding DNA sequence was identified in S. pyogenes.

[5850] Based on this analysis, it was predicted that these proteins and their epitopes could be useful antigens for vaccines or diagnostics.

### EXAMPLE 1047

[5851] A DNA sequence (GBSx1119) was identified in S. agalactiae <SEQ ID 3235> which encodes the amino acid sequence <SEQ ID 3236>. This protein is predicted to be an integral membrane protein. Analysis of this protein sequence reveals the following:

| Possible site: 58 | | | |
|---|---|---|---|
| >>> Seems to have an uncleavable N-term signal seq | | | |
| INTEGRAL | Likelihood = −12.90 | Transmembrane | 14-30 (9-41) |
| INTEGRAL | Likelihood = −9.71 | Transmembrane | 451-467 (447-472) |
| INTEGRAL | Likelihood = −9.18 | Transmembrane | 234-250 (229-257) |
| INTEGRAL | Likelihood = −8.07 | Transmembrane | 56-72 (46-77) |
| INTEGRAL | Likelihood = −8.01 | Transmembrane | 490-506 (484-512) |
| INTEGRAL | Likelihood = −5.84 | Transmembrane | 414-430 (412-436) |
| INTEGRAL | Likelihood = −4.99 | Transmembrane | 136-152 (135-159) |
| INTEGRAL | Likelihood = −4.14 | Transmembrane | 213-229 (211-232) |
| INTEGRAL | Likelihood = −4.14 | Transmembrane | 365-381 (364-382) |
| INTEGRAL | Likelihood = −2.66 | Transmembrane | 393-409 (391-412) |
| INTEGRAL | Likelihood = −1.06 | Transmembrane | 168-184 (167-184) |
| INTEGRAL | Likelihood = −0.64 | Transmembrane | 275-291 (275-291) |
| INTEGRAL | Likelihood = −0.32 | Transmembrane | 328-344 (328-345) |
| INTEGRAL | Likelihood = −0.27 | Transmembrane | 821-837 (821-837) |

```
----- Final Results -----
      bacterial membrane --- Certainty = 0.6158 (Affirmative) < succ>
        bacterial outside --- Certainty = 0.0000 (Not Clear) < succ>
    bacterial cytoplasm --- Certainty = 0.0000 (Not Clear) < succ>
```

[5852] A related GBS nucleic acid sequence <SEQ ID 10283> which encodes amino acid sequence <SEQ ID 10284> was also identified.

[5853] The protein has homology with the following sequences in the GENPEPT database.

| >GP:BAA24464 GB:D85082 YfiX [Bacillus subtilis] | | | |
|---|---|---|---|
| Identities = 190/596 (31%), Positives = 324/596 (53%), Gaps = 31/596 (5%) | | | |
| Query: | 246 | IVSLIPGGLGSFELVLFTGFAAEGLPKETVVAWLLLYRLAYYIIPFFAGIYFFIHYLGSQ | 305 |
| | | ++SL+PGG GSF+L+ G G +E +V ++LYRLAY IPF G++F L | |
| Sbjct: | 1 | MISLVPGGFGSFDLLFLLGMEQLGYHQEAIVTSIVLYRLAYSFIPFILGLFFAAGDLTEN | 60 |
| Query: | 306 | INQRYENVPK-----ELVSTVLQTMVSHLMRILG---AFLIFSTAFFENITYIMWLQKLG | 357 |
| | | +R E P+ E + +L + L+RIL + ++F + + + +L | |
| Sbjct: | 61 | TMKRLETNPRIAPAIETTNVLLVVQRAVLVRILQGSLSLIVFVAGLIVLASVSLPIDRLT | 120 |
| Query: | 358 | LDP-LQEQMLWQFPGLLLGVCFILLARTID--QKVKNAFPIAIIWITLTLFYLNLGHISW | 414 |
| | | + P + L F GL L ILL I+ ++ K ++ +AI + + L ++ | |
| Sbjct: | 121 | VIPHIPRPALLLFNGLSLSSALILLILPIELYKRTKRSYTMAITALVGGFVFSFLKGLNI | 180 |
| Query: | 415 | RLSFWFILLLLGLLVIKPTLYKKQFIYSWEERIKDGIIIVSLMGVLFY----IAGLLFPI | 470 |
| | | F ++++ L+++K ++Q Y+ + I V+L V + IAG ++ | |
| Sbjct: | 181 | SAIFVLPMIIVLLVLLKKQFVREQASYTLGQLI----FAVALFTVALFNYNLIAGFIWDR | 236 |
| Query: | 471 | RAHITGGSIERLHYIIAWEPIALATL----ILTLVYLCLVKILQGKSCQIGDVFNVDRYK | 526 |
| | | + + +++ + I AT+ I+ L +L + ++ IG+ + +R | |
| Sbjct: | 237 | MKKV----LRHEYFVHSTSHITHATIMAIIIVPLFFLIFTVVYHRRTKPIGEKADPERLA | 292 |
| Query: | 527 | KLLQAYGGSSDSGLAFLNDKRLYWYQKNGEDCVAFQFVIVNNKCLIMGEPAGDDTYIREA | 586 |
| | | L GG++ S L FL DKR Y + +G + F + + +++G+P+G | |
| Sbjct: | 293 | AFLNEKGGNALSHLGFLGDKRFY-FSSDGNALLLFGKIA--RRLVVLGDPSGQRESFPLV | 349 |
| Query: | 587 | IESFIDDADKLDYDLVFYSIGQKLTLLLHEYGFDFMKVGEDALVNLETFTLKGNKYKPFR | 646 |
| | | +E F+++A + + ++FY I ++ L H++G++F K+GE+A V+L TFTL G K R | |
| Sbjct: | 350 | LEEFLNEAHQKGFSVLFYQIEREDMALYHDFGYNFFKLGEEAYVDLNTFTLTGKKKAGLR | 409 |
| Query: | 647 | NALNRVEKDGFYFEVVQSPHSQSLLNSLEEISNTWLEGRPEKGFSLGYFNKDYFQQAPIA | 706 |
| | | NR E++ + F V P S L L++IS+ WL + EKGFSLG+F+ Y Q+APIA | |
| Sbjct: | 410 | AINNRFEREEYTFHVDHPPFSDAFLEELKQISDEWLGSKKEKGFSLGFFDPSYLQKAPIA | 469 |
| Query: | 707 | LVKNAEHEVVAFANIMPNYEKSIISIDLMRHDKQKIPNGVMDFLFLSLFSYYQEKGYHYF | 766 |
| | | +KNAE E+VAFAN+MP Y++ IS+DLMR+ + PNG+MD LF+ +F + +E+G F | |
| Sbjct: | 470 | YMKNAEGEIVAFANVMPMYQEGEISVDLMRY-RGDAPNGIMDALFIRMFLWAKEEGCTSF | 528 |
| Query: | 767 | DLGMAPLSGVGRVETSFAKERMAYLVYHFGSHFYSFNGLHKYKKKFTPLWSERYIS | 822 |
| | | ++GMAPL+ VG TSF ER A ++++ + YSF+GL +K+K+ P W +Y++ | |
| Sbjct: | 529 | NMGMAPLANVGTAFTSFWSERFAAVIFNNVRYMYSFSGLRAFKEKYKPEWRGKYLA | 584 |

[5854] No corresponding DNA sequence was identified in S. pyogenes.

[5855] A related GBS gene <SEQ ID 8721> and protein <SEQ ID 8722> were also identified. Analysis of this protein sequence reveals the following:

| Lipop: Possible site: −1 Crend: 9 | | | | |
|---|---|---|---|---|
| McG: Discrim Score: 9.22 | | | | |
| GvH: Signal Score (−7.5): −7.66 | | | | |
| Possible site: 58 | | | | |
| >>> Seems to have an uncleavable N-term signal seq | | | | |
| ALOM program count: 14 value: −12.90 threshold: 0.0 | | | | |
| INTEGRAL | Likelihood = −12.90 | Transmembrane | 14-30 | (9-41) |
| INTEGRAL | Likelihood = −9.71 | Transmembrane | 451-467 | (447-472) |
| INTEGRAL | Likelihood = −9.18 | Transmembrane | 234-250 | (229-257) |
| INTEGRAL | Likelihood = −8.07 | Transmembrane | 56-72 | (46-77) |
| INTEGRAL | Likelihood = −8.01 | Transmembrane | 490-506 | (484-512) |
| INTEGRAL | Likelihood = −5.84 | Tranamembrane | 414-430 | (412-436) |
| INTEGRAL | Likelihood = −4.99 | Transmembrane | 136-152 | (135-159) |
| INTEGRAL | Likelihood = −4.14 | Transmembrane | 213-229 | (211-232) |
| INTEGRAL | Likelihood = −4.14 | Transmembrane | 365-381 | (364-382) |
| INTEGRAL | Likelihood = −2.66 | Transmembrane | 393-409 | (391-412) |
| INTEGRAL | Likelihood = −1.06 | Transmembrane | 168-184 | (167-184) |
| INTEGRAL | Likelihood = −0.64 | Transmembrane | 275-291 | (275-291) |
| INTEGRAL | Likelihood = −0.32 | Transmembrane | 328-344 | (328-345) |
| INTEGRAL | Likelihood = −0.27 | Transmembrane | 821-837 | (821-837) |
| PERIPHERAL | Likelihood = 1.06 | 558 | | |

```
    modified ALOM score: 3.08
*** Reasoning Step: 3
----- Final Results -----
                              bacterial membrane --- Certainty = 0.6158(Affirmative) < succ>
                                bacterial outside --- Certainty = 0.0000(Not Clear) < succ>
                            bacterial cytoplasm --- Certainty = 0.0000(Not Clear) < succ>
```

[5856] The protein has homology with the following sequences in the databases:

[chemical structure]

[5857] Based on this analysis, it was predicted that these proteins and their epitopes could be useful antigens for vaccines or diagnostics.

### EXAMPLE 1048

[5858] A DNA sequence (GBSx1120) was identified in S. agalactiae <SEQ ID 3237> which encodes the amino acid sequence <SEQ ID 3238>. This protein is predicted to be choline transporter. Analysis of this protein sequence reveals the following:

| Possible site: 37 | | | | |
|---|---|---|---|---|
| >>> Seems to have no N-terminal signal sequence | | | | |
| INTEGRAL | Likelihood = −10.24 | Transmembrane | 28-44 | (22-47) |
| INTEGRAL | Likelihood = −8.81 | Transmembrane | 178-194 | (176-204) |
| INTEGRAL | Likelihood = −7.22 | Transmembrane | 81-97 | (63-105) |
| INTEGRAL | Likelihood = −3.50 | Transmembrane | 209-225 | (206-226) |
| INTEGRAL | Likelihood = −3.13 | Transmembrane | 64-80 | (63-80) |
| INTEGRAL | Likelihood = −2.44 | Transmembrane | 156-172 | (153-172) |
| INTEGRAL | Likelihood = −0.64 | Transmembrane | 137-153 | (137-153) |

```
----- Final Results -----
                              bacterial membrane --- Certainty = 0.5097(Affirmative) < succ>
                                bacterial outside --- Certainty = 0.0000(Not Clear) < succ>
                            bacterial cytoplasm --- Certainty = 0.0000(Not Clear) < succ>
```

[5859] The protein has homology with the following sequences in the GENPEPT database.

| >GP:AAD45530 GB:AF162656 choline transporter [Streptococcus pneumoniae] | | | |
|---|---|---|---|
| Identities = 326/505 (64%), Positives = 409/505 (80%), Gaps = 1/505 (0%) | | | |
| Query: | 1 | MTTLITTFQERFGDWTQSLIEHLQLSLLTLILATLIAIPLGIIISHYKKISHVVLQITGI | 60 |
| | | MT LI TFQ+RF DW +L +HLQLSLLTL+LA L+AIPL + + +++K++ VLQI GI | |
| Sbjct: | 1 | MTNLIATFQDRFSDWLTALSQHLQLSLLTLLLAILLAIPLAVFLRYHEKLADWVLQIAGI | 60 |
| Query: | 61 | FQTIPSLALLGLFIPFMGIGTVPAVVALIIYALFPILQNTVTVLMQIDANLIEAATAFGM | 120 |
| | | FQTIPSLALLGLFIP MGIGT+PA+ AL+IYA+FPILQNT+T L ID NL EA AFGM | |
| Sbjct: | 61 | FQTIPSLALLGLFIPLMGIGTLPALTALVIYAIFPILQNTITGLKGIDPNLQEAGIAFGM | 120 |
| Query: | 121 | TRWERLKKFELALSMPVIISGIRTASVMIIGTATLASLIGAGGLGSFILLGIDRNNPSLI | 180 |
| | | TRWERLKKFE+ L+MPVI+SGIRTA+V+IIGTATLA+LIGAGGLGSFILLGIDRNN SLI | |
| Sbjct: | 121 | TRWERLKKFEIPLAMPVIMSGIRTAAVLIIGTATLAALIGAGGLGSFILLGIDRNNASLI | 180 |
| Query: | 181 | LIGAISSAVLAIIFSGLIGLLEKARLRTIAVSGILLLAGLGLSYAPKWMPGTNTATITVA | 240 |
| | | LIGA+SSAVLAI F+ L+ ++EKA+LRTI L+ LGLSY+P + + +A | |
| Sbjct: | 181 | LIGALSSAVLAIAFNFLLKVMEKAKLRTIFSGFALVALLLGLSYSPALLVQKEKENLVIA | 240 |
| Query: | 241 | GKLGTEPDILINMYKELIEDQTDIKVKLKPNFGKTTFLYQALKSGDIDLYPEFTGTITSS | 300 |
| | | GK+G EP+IL NMYK LIE+ T + +KPNFGKT+FLY+ALK GDID+YPEFTGT+T S | |
| Sbjct: | 241 | GKIGPEPEILANMYKLLIEENTSMTATVKPNFGKTSFLYEALKKGDIDIYPEFTGTVTES | 300 |
| Query: | 301 | LLKNPPKVSNNPKQVYNLAKNGILKQDKLSLLSPMAYQNTYAVAVKKDYAEANQLKNISD | 360 |
| | | LL+ PKVS+ P+QVY +A++GI KQD L+ L PM+YQNTYAVAV K A+ LK ISD | |
| Sbjct: | 301 | LLQPSPKVSHEPEQVYQVARDGIAKQDHLAYLKPMSYQNTYAVAVPKKIAQEYGLKTISD | 360 |
| Query: | 361 | LKKLD-KLKAGETLEFKDREDGSIGLQKHYGLNLDISTLEPALRYQAINSKDVNIIDAYS | 419 |
| | | LKK++ +LKAGFTLEF DREDG+ GLQ YGLNL+++T+EPALRYQAI S D+ I DAYS | |
| Sbjct: | 361 | LKKVEGQLKAGFTLEFNDREDGNKGLQSMYGLNLNVATIEPALRYQAIQSGDIQITDAYS | 420 |
| Query: | 420 | TDSELIQYQLQILKDDKHLFPPYQGAPLLRQDTIKKYPQVKKALNKLAGHITEKEMQEMN | 479 |
| | | TD+EL +Y LQ+L+DDK LFPPYQGAPL+++ +KK+P++++ LN LAG ITE +M ++N | |
| Sbjct: | 421 | TDAELERYDLQVLEDDKQLFPPYQGAPLMKEALLKKHPELERVLNTLAGKITESQMSQLN | 480 |
| Query: | 480 | YQVAVKHKSAATVAKQYLKAHHIIK | 504 |
| | | YQV V+ KSA VAK++L+ ++K | |
| Sbjct: | 481 | YQVGVEGKSAKQVAKEFLQEQGLLK | 505 |

[5860] There is also homology to SEQ ID 636.

[5861] Based on this analysis, it was predicted that this protein and its epitopes, could be useful antigens for vaccines or diagnostics.

### EXAMPLE 1049

[5862] A DNA sequence (GBSx1121) was identified in S. agalactiae <SEQ ID 3239> which encodes the amino acid sequence <SEQ ID 3240>. This protein is predicted to be choline transporter (opuBA). Analysis of this protein sequence reveals the following:

```
Possible site: 59
>>> Seems to have no N-terminal signal sequence
----- Final Results -----
                            bacterial cytoplasm --- Certainty = 0.2345(Affirmative) < succ>
                              bacterial membrane --- Certainty = 0.0000(Not Clear) < succ>
                                bacterial outside --- Certainty = 0.0000(Not Clear) < succ>
```

[5863] The protein has homology with the following sequences in the GENPEPT database.

| >GP:AAD45529 GB:AF162655 choline transporter [Streptococcus pneumoniae] | | | |
|---|---|---|---|
| Identities = 139/236 (58%), Positives = 178/236 (74%) | | | |
| Query: | 1 | MISFENVSKSYGDHTIIDNISCHIQRGEFFVLVGASGSGKTTILKMINRLIEPSQGAITL | 60 |
| | | MI ++NV+ Y + ++ +++ I+ GEF VLVG SGSGKTT+LKMINRL+EP+ G I + | |
| Sbjct: | 1 | MIEYKNVALRYTEKDVLRDVNLQIEDGEFMVLVGPSGSGKTTMLKMINRLLEPTDGNIYM | 60 |
| Query: | 61 | DGENITSLDLRQLRLETGYVLQQIALFPNLTVGENIELIPEMKGWSKGDQKKAASDLLDK | 120 |
| | | DG+ I D R+LRL TGYVLQ IALFPNLTV ENI LIPEMKGWSK + K +LL K | |
| Sbjct: | 61 | DGKRIKDYDERELRLSTGYVLQAIALFPNLTVAENIALIPEMKGWSKEEITKKTEELLAK | 120 |
| Query: | 121 | VGLPAKDYFNRYPHELSGGEQQRIGILRAIVAKPKVLLMDEPFSALDPISRRQLQDITKQ | 180 |
| | | VGLP +Y +R P ELSGGEQQR+GI+RA++ +PK+ LMDEPFSALD ISR+QLQ +TK+ | |
| Sbjct: | 121 | VGLPVAEYGHRLPSELSGGEQQRVGIVRAMIGQPKIFLMDEPFSALDAISRKQLQVLTKE | 180 |
| Query: | 181 | LQSELGITLVFVTHDMKEAMRLADRICVIKEGKIVQLDRPEIIQNNPSDQFVRTLF | 236 |
| | | L E G+T +FVTHD EA++LADRI V+++G+I Q+ PE I P+ FV LF | |
| Sbjct: | 181 | LHKEFGMTTIFVTHDTDEALKLADRIAVLQDGEIRQVANPETILKAPATDFVADLF | 236 |

[5864] There is also homology to SEQ ID 644.

[5865] Based on this analysis, it was predicted that this protein and its epitopes, could be useful antigens for vaccines or diagnostics.

### EXAMPLE 1050

[5866] A DNA sequence (GBSx1122) was identified in S. agalactiae <SEQ ID 3241> which encodes the amino acid sequence <SEQ ID 3242>. This protein is predicted to be two-component response regulator. Analysis of this protein sequence reveals the following:

```
Possible site: 61
>>> Seems to have no N-terminal signal sequence
      INTEGRAL Likelihood = −5.52 Transmembrane 49-65 (46-66)
----- Final Results -----
                              bacterial membrane --- Certainty = 0.3208(Affirmative) < succ>
                                bacterial outside --- Certainty = 0.0000(Not Clear) < succ>
                            bacterial cytoplasm --- Certainty = 0.0000(Not Clear) < succ>
```

[5867] The protein has homology with the following sequences in the GENPEPT database.

| >GP:BAB06434 GB:AP001516 two-component response regulator [Bacillus halodurans] | | | |
|---|---|---|---|
| Identities = 101/305 (33%), Positives = 152/305 (49%), Gaps = 31/305 (10%) | | | |
| Query: | 1 | MKFYIIDDDPTITMILQDIIE-EDFNNTVVRVNNVSSKAYNELLIADVDIVLIDLLNPIL | 59 |
| | | M F+I DDD T+ IL IIE E V + S L I VDI+LIDLLMP | |
| Sbjct: | 1 | MNFFITDDDVTVRSILAQIIEDEQLGQVVGEAEDGSELDGKRLNIKQVDILLIDLLMPNC | 60 |
| Query: | 60 | DGVTLVQKIYKQRSDLKFIMISQVKDNDLRQEAYKAGIEFEINKPINIIEVKSVVKRVTD | 119 |
| | | DG+ +QKI K K IMISQ++ +L EAY GIE +I KPIN IEV SV+++V + | |
| Sbjct: | 61 | DGLEAIQKI-KPEFKGKIINISQIESKELISEAYLLGIEHYIMKPINKIEVLSVIRKVIN | 119 |
| Query: | 120 | TIEMQKKLNTIQNLLENTPSYQKPITTSNLT----KIRS----ILSYLGITSETAYTDIL | 171 |
| | | +++ L IQ L N P ++ I+S +LS LGI E+ D++ | |
| Sbjct: | 120 | HTRLEQSLYDIQKSLSNVLQGSIPTQVNDQVFHDDSIKSYGQYLLSELGIAGESGSKDLM | 179 |
| Query: | 172 | NICELLLKQELNF-------AQFDFQKELSIDE-----------HQQKIILQRIRRAVKK | 213 |
| | | NI L E + A D ++L+ ++ + K QR+RRAV + | |
| Sbjct: | 180 | NILNFLYTYEKEYSFEKGFPALKDIFEQLASEKLGDAADERDVRREVKAAKQRVRRAVYQ | 239 |
| Query: | 214 | AMINNAHLYIDDFENELTLQYANALFGFQNIHNEAQLIQGK---SMYGGKISLKHFFDEL | 270 |
| | | ++ ++A L + DF N +YA+ F F + ++ ++ + S +I++K F L | |
| Sbjct: | 240 | SLEHVASLGLIDFSNPKFEEYASHFFDFSVVRSKMTELKNETSSSYTSARINVKKFTQAL | 299 |
| Query: | 271 | ILQSK | 275 |
| | | ++K | |
| Sbjct: | 300 | YYEAK | 304 |

[5868] There is homology to SEQ ID 460.

[5869] A related GBS gene <SEQ ID 8723> and protein <SEQ ID 8724> were also identified. Analysis of this protein sequence reveals the following:

| Lipop: Possible site: −1 Crend: 8 | | | |
|---|---|---|---|
| McG: Discrim Score: −7.05 | | | |
| GvH: Signal Score (−7.5): −6.58 | | | |
| Possible site: 61 | | | |
| >>> Seems to have no N-terminal signal sequence | | | |
| ALOM program count: 1 value: 5.52 threshold: 0.0 | | | |
| INTEGRAL | Likelihood = −5.52 | Transmembrane | 49-65 (46-66) |
| PERIPHERAL | Likelihood = 7.37 | 155 | |

```
  modified ALOM score: 1.60
*** Reasoning Step: 3
----- Final Results -----
                              bacterial membrane --- Certainty = 0.3208(Affirmative) < succ>
                                bacterial outside --- Certainty = 0.0000(Not Clear) < succ>
                            bacterial cytoplasm --- Certainty = 0.0000(Not Clear) < succ>
```

[5870] The protein has homology with the following sequences in the databases:

[chemical structure]

[5871] SEQ ID 8724 (GBS356) was expressed in E. coli as a His-fusion product. SDS-PAGE analysis of total cell extract is shown in FIG. 73 (lane 3; MW 34 kDa). It was also expressed in E. coli as a GST-fusion product. SDS-PAGE analysis of total cell extract is shown in FIG. 81 (lane 8; MW 59 kDa).

[5872] GBS356-GST was purified as shown in FIG. 216, lane 7.

[5873] Based on this analysis, it was predicted that these proteins and their epitopes could be useful antigens for vaccines or diagnostics.

### EXAMPLE 1051

[5874] A DNA sequence (GBSx1123) was identified in S. agalactiae <SEQ ID 3243> which encodes the amino acid sequence <SEQ ID 3244>. Analysis of this protein sequence reveals the following:

| Possible site: 26 | | | | |
|---|---|---|---|---|
| >>> Seems to have a cleavable N-term signal seq. | | | | |
| INTEGRAL | Likelihood = −6.48 | Transmembrane | 149-165 | (147-172) |
| INTEGRAL | Likelihood = −5.20 | Transmembrane | 37-53 | (29-55) |
| INTEGRAL | Likelihood = −2.50 | Transmembrane | 126-142 | (126-142) |
| INTEGRAL | Likelihood = −2.13 | Transmembrane | 62-78 | (60-78) |
| INTEGRAL | Likelihood = −0.64 | Transmembrane | 314-330 | (314-330) |
| INTEGRAL | Likelihood = −0.11 | Transmembrane | 89-105 | (89-105) |

```
----- Final Results -----
                              bacterial membrane --- Certainty = 0.3590(Affirmative) < succ>
                                bacterial outside --- Certainty = 0.0000(Not Clear) < succ>
                            bacterial cytoplasm --- Certainty = 0.0000(Not Clear) < succ>
```

[5875] The protein has homology with the following sequences in the GENPEPT database.

| >GP:BAB06435 GB:AP001516 two-component sensor histidine kinase | | | |
|---|---|---|---|
| [Bacillus halodurans] | | | |
| Identities = 118/427 (27%), Positives = 199/427 (45%), Gaps = 25/427 (5%) | | | |
| Query: | 10 | LERRQRIIISAIAIA-LAAQINISILADGFIMTLSLFILPVFLYFNDDINPILLCLGITF | 68 |
| | | L + II+S + A +A +IN + + F ++L I +FL F +I+ | |
| Sbjct: | 7 | LSKDYMIILSMLLFAPIAGEINFYPVNETFRVSLGPPIFFLFLLFLRNTAAIVPGFFTAI | 66 |
| Query: | 69 | ASPIFRGIILSIAGEAEIHQIIEFVLTDMAFYICYGITFYTIYWHRSYRNKGTFFFSIII | 128 |
| | | A +FR + ++ + E FY Y + F R + F II | |
| Sbjct: | 67 | AVVVFRVFLDTLHADFYWVDSFEIHYPTFFFYFTYSLLFSLAKVQRFHEQPLIIFLFGII | 126 |
| Query: | 129 | CDYFANLVEISFLIKFNNYTITIFA-TLFAIALLRAFISCAVAYTYSYLSLLLQKD---D | 184 |
| | | + A+ E F+ ++ + + + ++F I L+ S V +S + L + + | |
| Sbjct: | 127 | IEILADTAE--FIAQYFAFGVMVTKDSIFQILLIAFSHSFIVLGVFSMMKLYETRSRELE | 184 |
| Query: | 185 | HERRYYYFMWSTSAVKSEVYFMQKNIIEIENIMKNAYLLDKELSKY---HLPKEYQHLS- | 240 |
| | | +R + + S + E ++K + E+I + L +E+ + H+ + HL | |
| Sbjct: | 185 | IRKRNEHMLLLISNLYEESVHLKKTLQNSEDITSKVFGLYREMKRLQSEHMDQVNPHLEK | 244 |
| Query: | 241 | -----LDISRDVHEVKKDYQNIIKGLGTYFSVKNESTMALKDIFQIVLSYTRS---IIQF | 292 |
| | | L+IS +VHE+KKD Q I GL S NES + +I QI+ R+ Q | |
| Sbjct: | 245 | ISKRLLEISGEVHEIKKDNQRIFAGLSKLIS--NESYVDYIEIGQIIKMIVRTNEKYAQL | 302 |
| Query: | 293 | RHQDIIILENNKCNLIISNYYYLLTIISNIVLNAVEAIDKQKKGTISVHTESLEDFIKIE | 352 |
| | | ++I + + + Y L+II+N+V NAVEAID KG +++ + L ++ | |
| Sbjct: | 303 | LGKEIDFHYSIQGEHPPYHIYTHLSIINNLVANAVEAIDG--KGNLTIRVKALGQTVEFR | 360 |
| Query: | 353 | ISDNGPGIPDKMKHMIFKPGFSTKFDANGDIYRGIGLSHVRILMEEQYQGTITVCPNQ-P | 411 |
| | | I D+GPGIPDK + +IFKPGF++KFD G GIGL++V M ++ GT+ Q | |
| Sbjct: | 361 | IEDDGPGIPDKHRALIFKPGFTSKFDHTGKPSTGIGLTYVHD-MVDKLGGTVVYERGQGG | 419 |
| Query: | 412 | NGTTFTL | 418 |
| | | G+ FT+ | |
| Sbjct: | 420 | KGSVFTI | 426 |

[5876] Based on this analysis, it was predicted that this protein and its epitopes, could be useful antigens for vaccines or diagnostics.

### EXAMPLE 1052

[5877] A DNA sequence (GBSx1124) was identified in S. agalactiae <SEQ ID 3245> which encodes the amino acid sequence <SEQ ID 3246>. This protein is predicted to be ornithine carbamoyltransferase Otc6850 (argF). Analysis of this protein sequence reveals the following:

| Possible site: 61 | | | |
|---|---|---|---|
| >>>Seems to have no N-terminal signal sequence | | | |
| INTEGRAL | Likelihood = −0.64 | Transmembrane | 171-187 (171-187) |

```
----- Final Results -----
                              bacterial membrane --- Certainty = 0.1256(Affirmative) < succ>
                                bacterial outside --- Certainty = 0.0000(Not Clear) < succ>
                            bacterial cytoplasm --- Certainty = 0.0000(Not Clear) < succ>
```

[5878] The protein has homology with the following sequences in the GENPEPT database.

| >GP:CAB75986 GB:AJ272085 ornithine carbamoyltransferase | | | |
|---|---|---|---|
| [Staphylococcus aureus] | | | |
| Identities = 264/332 (79%), Positives = 292/332 (87%) | | | |
| Query: | 1 | MKNLRNRSFLTLLDFSTAEVEFLLKLSEDLKRAKYAGIEQQKLVGKNIALIFEKDSTRTR | 60 |
| | | MKNLRNRSFLTLLDFS EVEFLL LSEDLKRAKY G E+ L KNIAL+FSKDSTRTR | |
| Sbjct: | 1 | MKNLRNRSFLTLLDFSRQEVEFLLTLSEDLKRAKYIGTEKPMLKNKNIALLFEKDSTRTR | 60 |
| Query: | 61 | CAFEVAAHDQGAHVTYLGPTGSQMGKKETSKDTARVLGGMYDGIEYRGFSQETVETLAEF | 120 |
| | | CAFEVAAHDQGA+VTYLGPTGSQMGKKET+KDTARVLGGMYDGIEYRGFSQ TVETLAE+ | |
| Sbjct: | 61 | CAFEVAAHDQGANVTYLGPTGSQMGKKETTKDTARVLGGMYDGIEYRGFSQRTVETLAEY | 120 |
| Query: | 121 | SGVPVWNGLTDADHPTQVLADFLTAKECLHKPYKDIRFTYVGDGRNNVANALMIGASIVG | 180 |
| | | SGVPVWNGLTD DHPTQVLADFLTAKE L K Y DI FTYVGDGRNNVANALM GA+I+G | |
| Sbjct: | 121 | SGVPVWNGLTDEDHPTQVLADFLTAKEVLKKDYADINFTYVGDGRNNVANALMQGAAIMG | 180 |
| Query: | 181 | MTYHLVCPKELEPDPELLSKCQEIAKTTGASIEITADIAEGVRDSDVLYTDVWVSMGSPD | 240 |
| | | M +HLVCPKEL P ELL++C+ IA G +I IT DI +GV+ SDV+YTDVWVSHGEPD | |
| Sbjct: | 181 | MNFHLVCPKELNPTDELLNRCKNIAAENGGNILITDDIDQGVKGSDVIYTDVWVSMGEPD | 240 |
| Query: | 241 | EVWKERIALLEPYRITQEMLNMTENPNVIFEHCLPSFHNIDTKVGYDIYEKYGLKEMSVS | 300 |
| | | EVWKER+ LL+PY++ +EM++ T NPNVIFEHCLPSFHN DTK+G I+EKYG++EMEV+ | |
| Sbjct: | 241 | EVWKERLSLLKPYQVNKEMMDKTGNPNVIFEHCLPSFHNADTKIGQQIFEKYGIREMEVT | 300 |
| Query: | 301 | DSVFEGPHSVVFQEAENRMHTIKAVMVATLGD | 332 |
| | | DEVFE SVVFQSAENRMHTIKAVMVATLG+ | |
| Sbjct: | 301 | DEVFESKASVVFQEAENRMHTIKAVMVATLGE | 332 |

[5879] There is also homology to SEQ ID 3118.

[5880] Based on this analysis, it was predicted that this protein and its epitopes, could be useful antigens for vaccines or diagnostics.

### EXAMPLE 1053

[5881] A DNA sequence (GBSx1126) was identified in S. agalactiae <SEQ ID 3247> which encodes the amino acid sequence <SEQ ID 3248>. This protein is predicted to be carbamate kinase (b2874). Analysis of this protein sequence reveals the following:

| Possible site: 53 | | | |
|---|---|---|---|
| >>> Seems to have no N-terminal signal sequence | | | |
| INTEGRAL | Likelihood = −0.48 | Transmembrane | 214-230 (214-230) |

```
----- Final Results -----
      bacterial membrane --- Certainty = 0.1192 (Affirmative) < succ>
        bacterial outside --- Certainty = 0.0000 (Not Clear) < succ>
    bacterial cytoplasm --- Certainty = 0.0000 (Not Clear) < succ>
```

[5882] The protein has homology with the following sequences in the GENPEPT database.

| >GP:CAA66367 GB:X97768 carbamate kinase [Clostridium perfringens] | | | |
|---|---|---|---|
| Identities = 162/313 (51%), Positives = 207/313 (65%), Gaps = 7/313 (2%) | | | |
| Query: | 3 | KIVVALGGNAL-----GNSPEEQLRLVKHTAKSLVALIKKGHEIVVSHGNGPQVGAINLG | 57 |
| | | KIV+ALG NAL S E QL + TA S+ LI+ GHE+ + HGNGPQVG I | |
| Sbjct: | 2 | KIVLALGENALQKDSKDKSAEGQLETCRQTAISVADLIEDGHEVSIVHGNGPQVGQILAS | 61 |
| Query: | 58 | MNFAAESGQGTN-FPFPECGAMSQGYIGYHLQQSLLNELRQEGINKEVATIITQIEVDES | 116 |
| | | + A + G FPF GA S+GYIGYHLQ ++ EL + GI K V TI TQ+ VD++ | |
| Sbjct: | 62 | IELAHQVDNGNPLFPFDVVGAFSEGYIGYHLQNTIREELLKRGIEKSVDTITTQVIVDKN | 121 |
| Query: | 117 | DQAFSAPTKPIGTFYDKETSEKIAIEKGYTFVEDAGRGYRRVVASPEPKKIIEINSIKTL | 176 |
| | | D F+ PTKPIG+FY KE +EK+ +KGYT EDAGRGYRRVVASP+P I+E +IKT+ | |
| Sbjct: | 122 | DPGFTNPTKPIGSFYTKEEAEKLEKDKGYTMKEDAGRGYRRVVASPKPVDIVEKEAIKTM | 181 |
| Query: | 177 | IENDTLVIAGGGGGIPVINKGG-YEGIAAVIDKDKSSALLAGELAADQLIILTAVDYVYT | 235 |
| | | +++ +VIA GGGGIPV+ G EG+ AVIDKD ++ LA L AD L+ILTAVD V | |
| Sbjct: | 182 | VDSGFIVIACGGGGIPVVEDGDRLEGVPAVIDKDFAAEKLAEILDADALLILTAVDRVCV | 241 |
| Query: | 236 | QFGKENQKALTEVNENQMIDYVNQGEFAKGSMLPKVIACMSFLDHNPKGTALITSLNGLE | 295 |
| | | F K +QKAL E+N ++ Y+ +G+FA GSMLPKV AC F+ K A+I SL + | |
| Sbjct: | 242 | NFNKPDQKALKEINLEEVDKYIEEGQFAPGSMLPKVEACKKFVLSGDKKVAIIASLTNAK | 301 |
| Query: | 296 | DALDGKLGTRITK | 308 |
| | | AL G+ GT+I K | |
| Sbjct: | 302 | AALRGESGTKIVK | 314 |

[5883] There is also homology to SEQ ID 3110.

[5884] Based on this analysis, it was predicted that this protein and its epitopes, could be useful antigens for vaccines or diagnostics.

### EXAMPLE 1054

[5885] A DNA sequence (GBSx1127) was identified in S. agalactiae <SEQ ID 3249> which encodes the amino acid sequence <SEQ ID 3250>. Analysis of this protein sequence reveals the following:

```
Possible site: 34
>>> Seems to have no N-terminal signal sequence
----- Final Results -----
    bacterial cytoplasm --- Certainty = 0.3558 (Affirmative) < succ>
      bacterial membrane --- Certainty = 0.0000 (Not Clear) < succ>
        bacterial outside --- Certainty = 0.0000 (Not Clear) < succ>
```

[5886] The protein has no significant homology with any sequences in the GENPEPT database.

[5887] No corresponding DNA sequence was identified in S. pyogenes.

[5888] Based on this analysis, it was predicted that this protein and its epitopes, could be useful antigens for vaccines or diagnostics.

### EXAMPLE 1055

[5889] A DNA sequence (GBSx1128) was identified in S. agalactiae <SEQ ID 3251> which encodes the amino acid sequence <SEQ ID 3252>. This protein is predicted to be a transmembrane protein (b2298). Analysis of this protein sequence reveals the following:

| Possible site: 35 | | | |
|---|---|---|---|
| >>>Seems to have a cleavable N-term signal seq. | | | |
| INTEGRAL | Likelihood = −13.11 | Transmembrane | 413-429 (405-440) |
| INTEGRAL | Likelihood = −9.61 | Transmembrane | 498-514 (489-516) |
| INTEGRAL | Likelihood = −9.45 | Transmembrane | 165-181 (161-185) |
| INTEGRAL | Likelihood = −8.07 | Transmembrane | 127-143 (122-146) |
| INTEGRAL | Likelihood = −7.22 | Transmembrane | 308-324 (306-326) |
| INTEGRAL | Likelihood = −5.57 | Transmembrane | 334-350 (330-357) |
| INTEGRAL | Likelihood = −4.51 | Transmembrane | 194-210 (193-217) |
| INTEGRAL | Likelihood = −3.82 | Transmembrane | 372-388 (371-390) |
| INTEGRAL | Likelihood = −1.22 | Transmembrane | 250-266 (250-268) |
| INTEGRAL | Likelihood = −0.80 | Transmembrane | 468-484 (468-484) |
| INTEGRAL | Likelihood = −0.32 | Transmembrane | 436-452 (436-452) |

```
----- Final Results -----
      bacterial membrane --- Certainty = 0.6243 (Affirmative) < succ>
        bacterial outside --- Certainty = 0.0000 (Not Clear) < succ>
    bacterial cytoplasm --- Certainty = 0.0000 (Not Clear) < succ>
```

[5890] The protein has homology with the following sequences in the GENPEPT database.

| >GP:AAC22251 GB:U32741 conserved hypothetical transmembrane protein | | | |
|---|---|---|---|
| [Haemophilus influenzae Rd] | | | |
| Identities = 303/506 (59%), Positives = 389/506 (75%), Gaps = 6/506 (1%) | | | |
| Query: | 10 | NKRSKGFRMPGAFTILFILTIFSVLATWWIPAGSYSKLQFDTASSKLVVTDPNGKTVHVP | 69 |
| | | +K+ K F P AFTILF + I +V TW IP+GSYSKL +++ + VV P | |
| Sbjct: | 4 | SKKKKTFNFPSAFTILFAILILAVGLTWVIPSGSYSKLTYNSTDNVFVVKAYGVDDKTYP | 63 |
| Query: | 70 | ATQTQLDKMNVKIKIKEFTSGAISKPVSVPNTYKRLKQNPAGIGSVTTSMVNGTIEAVDI | 129 |
| | | AT LD +N+KIK+ FT G I KP+++P TY+R++Q+ GI +T SMV GTIEAVD+ | |
| Sbjct: | 64 | ATTDTLDNLNIKIKLSNFTEGVIKKPIAIPGTYQRVEQHHKGIEDITKSMVEGTIEAVDV | 123 |
| Query: | 130 | MVFIMVLGGMIGVVRKSGAFESGLLALTKKTKGREFLLIFLVSLLMVLGGTLCGIEEEAV | 189 |
| | | MVFI VLGGMIGV+ ++G+F +GL+AL KKTKG EF ++F VS+LMVLGGT CGIEEEAV | |
| Sbjct: | 124 | MVFIFVLGGMIGVINRTGSFNAGLMALVKKTKGNEFFIVFCVSVLMVLGGTTCGIEEEAV | 183 |
| Query: | 190 | AFYPILVPIFLAMGYDSIICVGAIFLASSVGTSFSTINPFSSVIASNAAGISFTEGLSWR | 249 |
| | | AFYPILVP+FLA+GYD+I+CVGAIFLA+S+GT+FSTINPFS VIASNAAGI FTEG+ +R | |
| Sbjct: | 184 | AFYPILVPVFLALGYDAIVCVGAIFLAASMGTAFSTINPFSVVIASNAAGIQFTEGIGFR | 243 |
| Query: | 250 | TAGCIAGAIFVVVYLHWYAKKIKANPEFSYSYEDRVEFNAKWGMTTN-HTPSLFTIRQKI | 308 |
| | | G + GA V+ YL+WY KKIKA+P FSY+Y+DR EF ++ + +T F+ R+K+ | |
| Sbjct: | 244 | ALGLVLGATCVIAYLYWYCKKIKADPSFSYTYDDREEFRQRYMKNFDPNTTIPFSARRKL | 303 |
| Query: | 309 | ILSLFVISFPLMVWGVMSQGWWFPTMASSFLAITIIIMFLTATGANGIGERDVVDEFVNG | 368 |
| | | IL+LF ISFP+M+WGVM GWWFP MA+SFLAITIIIMF+ +G+ E+D+++ F G | |
| Sbjct: | 304 | ILTLFCISFPIMIWGVMVGGWWFPQMAASFLAITIIIMFI-----SGLSEKDIMESFTEG | 358 |
| Query: | 369 | ASSLVGVSLIIGLARGINIILSQGYISDTMLYTASKLASHVSGSVFIIVMMFIYFVLGFV | 428 |
| | | AS LVGVSLIIGLARG+N++L QG ISDT+L S + S + GSVFI+ + ++ LG + | |
| Sbjct: | 359 | ASELVGVSLIIGLARGVNLVLEQGMISDTILDYMSNVVSGMPGSVFILGQLVVFIFLGLI | 418 |
| Query: | 429 | VPSSSGLAVLSMPILAPLADTVGIPRSVVVMAYQFGQYAMLFLAPTGLVMATLQMLDMKY | 488 |
| | | VPSSSGLAVLSMPI+APLAD+VGIPR +VV AY +GQYAMLFLAPTGLV+ TLQML + + | |
| Sbjct: | 419 | VPSSSGLAVLSMPIMAPLADSVGIPRDIVVSAYNWGQYAMLFLAPTGLVLVTLQMLQIPF | 478 |
| Query: | 489 | SHWLKFVWPVVLFLLIFGGGLLVLQV | 514 |
| | | W+KFV P++ LL+ G LLV+QV | |
| Sbjct: | 479 | DRWVKFVMPMIGCLLLIGSILLVVQV | 504 |

[5891] A related DNA sequence was identified in S. pyogenes <SEQ ID 3253> which encodes the amino acid sequence <SEQ ID 3254>. Analysis of this protein sequence reveals the following:

| Possible site: 36 | | | |
|---|---|---|---|
| >>> Seems to have a cleavable N-term signal seq. | | | |
| INTEGRAL | Likelihood = −13.21 | Transmembrane | 479-495 (472-496) |
| INTEGRAL | Likelihood = −10.24 | Transmembrane | 261-277 (258-280) |
| INTEGRAL | Likelihood = −9.24 | Transmembrane | 153-169 (142-180) |
| INTEGRAL | Likelihood = −7.17 | Transmembrane | 393-409 (391-411) |
| INTEGRAL | Likelihood = −6.00 | Transmembrane | 81-97 (78-99) |
| INTEGRAL | Likelihood = −5.95 | Transmembrane | 318-334 (314-338) |
| INTEGRAL | Likelihood = −3.77 | Transmembrane | 352-368 (352-369) |
| INTEGRAL | Likelihood = −2.66 | Transmembrane | 120-136 (119-138) |
| INTEGRAL | Likelihood = −0.32 | Transmembrane | 204-220 (204-220) |

```
----- Final Results -----
      bacterial membrane --- Certainty = 0.6286 (Affirmative) < succ>
        bacterial outside --- Certainty = 0.0000 (Not Clear) < succ>
    bacterial cytoplasm --- Certainty = 0.0000 (Not Clear) < succ>
```

[5892] The protein has homology with the following sequences in the databases:

| >GP:AAB94000 GB:AF008219 unknown [Borrelia afzelii] | | | |
|---|---|---|---|
| Identities = 174/496 (35%), Positives = 306/496 (61%), Gaps = 37/496 (7%) | | | |
| Query: | 10 | RIPSSYTVLFIIIAIMAVLTWFIPAGAYETAK---GGG-----VISGTYKTVASNPQGFF | 61 |
| | | ++PSS+T++F +I + +LT+ IPAG ++ G G +++GTY+T+ P+GF | |
| Sbjct: | 3 | KMPSSFTIIFSLIVFVTILTYVIPAGKFDKEFRQIGDGPKREIIVAGTYQTIDRGPRGFL | 62 |
| Query: | 62 | DILMAPVRGMLGVEGTDGAIQVSFFILMVGGFLGVVNKTGALDTGIASVVRKNKGREKML | 121 |
| | | +M + M +G + A +V F+L+VGG G++ KTGA+D GI S+++K ++K+L | |
| Sbjct: | 63 | HPIMTILTAMS--KGMEHAAEVIIFVLIVGGAYGIIMKTGAIDAGIYSLIKKLGHKDELL | 120 |
| Query: | 122 | IAILIPLFALGGTTYGMGEETMAFYPLLIPVMIAVGFDSIVAVAIILIGSQIGCLASTIN | 181 |
| | | I +L+ +F++GGT GM EET+ FY ++IP+++A+G+D++V VAII +G+ +G +AST+N | |
| Sbjct: | 121 | IPLLMFIFSIGGTVTGMSEETLPFYFVMIPLIVALGYDNVVGVAIIALGAGVGTMASTVN | 180 |
| Query: | 182 | PFATGVAADAAGVSIADGMIWRVIQWVILVGMSIWFVYNYASKIEEDPSKSLVADKEEEH | 241 |
| | | PFATG+A+ A +S+ DG +R++ + I + ++I +V YAS+I++DPSKSLV K+ EH | |
| Sbjct: | 181 | PFATGIASAIASISLQDGFSFRIVLYFISILVAIIYVCVYASRIKKDPSKSLVYSKKNEH | 240 |
| Query: | 242 | KELF-QLQNSGEDLNKRQRNVLTIFTLTFVIMILSLIPWEDFGIKFFTNINTWLTTMPIL | 300 |
| | | + F + + S ED NV TF ++ L+ FG I + ++ L | |
| Sbjct: | 241 | YQYFVKNEISKED------NVQNTLEFTFARKLVLLL----FGFM----ILFLVFSIVQL | 286 |
| Query: | 301 | GGVIGKTMGAFGTWYFPEITMLFIMMGVLVAIVYRMSEEDFFSSFLTGAGEFLGVAMICA | 360 |
| | | G W+ E+TML++ + ++ A + R+ E + + +F+ G+ + A+I | |
| Sbjct: | 287 | G------------WWMQEMTMLYLGVAIISAFICRLGESEMWDAFVKGSESLITAALIIG | 334 |
| Query: | 361 | IARGIQVIMNGGNITATILHLGETSLSGLSSQVFVILAYIFYLPMSFLIPSTSGLAGATM | 420 |
| | | +ARG+ ++ + G+ITAT+L+ L L F+IL I + + F++PS+SG A TM | |
| Sbjct: | 335 | LARGVMIVCDDGLITATMLNAATNFLYNLPRPFFIILNEIIQIFIGFIVPSSSGHASLTM | 394 |
| Query: | 421 | GIMAPLGQFSNVPAHLVITAFQSASGILNMISPTSAIVMGALALGRVDLGTWWKFIGKFI | 480 |
| | | IMAPL F ++ V+ A Q++SG++N+I+PTS ++M L + ++ GTW+KF + | |
| Sbjct: | 395 | PIMAPLADFLSIGRSSVVIAMQTSSGLINLITPTSGVIMAVLGISKLSYGTWFRFVLPLF | 454 |
| Query: | 481 | VMVMLVSVLLLVVATF | 496 |
| | | ++ +S+L+++ + | |
| Sbjct: | 455 | IIEFFISILVIIANVY | 470 |

[5893] An alignment of the GAS and GBS proteins is shown below.

| Identities = 158/542 (29%), Positives = 274/542 (50%), Gaps = 92/542 (16%) | | | |
|---|---|---|---|
| Query: | 11 | KRSKGFRMPGAFTILFILTIFSVLATWWIPAGSYSKLQFDTASSKLVVTDPNGKTVHVPA | 70 |
| | | ++ +GFR+P ++T+LFI+ + TW+IPAG+Y +TA | |
| Sbjct: | 4 | EKKRGFRIPSSYTVLFIIIAIMAVLTWFIPAGAY-----ETAKG---------------- | 42 |
| Query: | 71 | TQTQLDKMNVKIKIKEFTSGAISKPVSVPNTYKRLKQNPAGIGSVTTSMVNG------TI | 124 |
| | | G IS TYK + NP G + + V G T | |
| Sbjct: | 43 | ------------------GGVIS------GTYKTVASNPQGFFDILMAPVRGMLGVEGTD | 78 |
| Query: | 125 | EAVDIMVFIMVLGGMIGVVRKSGAFESGLLALTKKTKGREFLLIFLVSLLMVLGGTLCGI | 184 |
| | | A+ + FI+++GG +GVV K+GA ++G+ ++ +K KGRE +LI ++ L LGGT G+ | |
| Sbjct: | 79 | GAIQVSFFILMVGGFLGVVNKTGALDTGIASVVRKNKGREKMLIAILIPLFALGGTTYGM | 138 |
| Query: | 185 | EEEAVAFYPILVPIFLAMGYDSIICVGAIFLASSVGTSFSTINPFSSVIASNAAGISFTE | 244 |
| | | EE +AFYP+L+P+ +A+G+DSI+ V I + S +G STINPF++ +A++AAG+S + | |
| Sbjct: | 139 | GEETMAFYPLLIPVMIAVGFDSIVAVAIILIGSQIGCLASTINPFATGVAADAAGVSIAD | 198 |
| Query: | 245 | GLSWRTAGCIAGAIFVVVYLHWYAKKIKANPEFSYSYEDRVEFNAKWGMTTNHTPSLFTI | 304 |
| | | G+ WR + + +++ YA KI+ +P S D+ E + + N L | |
| Sbjct: | 199 | GMIWRVIQWVILVGMSIWFVYNYASKIEEDPSKSL-VADKEEEHKELFQLQNSGEDL-NK | 256 |
| Query: | 305 | RQKIILSLFVISFPLMV-----W----------------------GVMSQ------GWWF | 331 |
| | | RQ+ +L++F ++F +M+ W GV+ + W+F | |
| Sbjct: | 257 | RQRNVLTIFTLTFVIMILSLIPWEDFGIKFFTNINTWLTTMPILGGVIGKTMGAFGTWYF | 316 |
| Query: | 332 | PTMASSFLAITIIIMFLTATGANGIGERDVVDEFVNGASSLVGVSLIIGLARGINIILSQ | 391 |
| | | P + F+ + +++ + + E D F+ GA +GV++I +ARGI +I++ | |
| Sbjct: | 317 | PEITMLFIMMGVLVAIVYR-----MSEEDFFSSFLTGAGEFLGVAMICAIARGIQVIMNG | 371 |
| Query: | 392 | GYISDTMLYTASKLASHVSGSVFIIVMMFIYFVLGFVVPSSSGLAVLSMPILAPLADTVG | 451 |
| | | G I+ T+L+ S +S VF+I+ Y + F++PS+SGLA +M I+APL | |
| Sbjct: | 372 | GMITATILHLGETSLSGLSSQVFVILAYIFYLPMSFLIPSTSGLAGATMGIMAPLGQFSN | 431 |
| Query: | 452 | IPRSVVVMAYQFGQYAMLFLAPT-GLVMATLQMLDMKYSHWLKFVWPVVLFLLIFGGGLLVL | 512 |
| | | +P +V+ A+Q + ++PT +VM L + + W KF+ ++ +++ LLV+ | |
| Sbjct: | 432 | VPAHLVITAFQSASGILNMISPTSAIVMGALALGRVDLGTWWKFIGKFIVMVMLVSVLLLVV | 493 |

[5894] Based on this analysis, it was predicted that these proteins and their epitopes could be useful antigens for vaccines or diagnostics.

### EXAMPLE 1056

[5895] A DNA sequence (GBSx1129) was identified in S. agalactiae <SEQ ID 3255> which encodes the amino acid sequence <SEQ ID 3256>. Analysis of this protein sequence reveals the following:

| Possible site: 46 | | | |
|---|---|---|---|
| >>> Seems to have no N-terminal signal sequence | | | |
| INTEGRAL | Likelihood = −10.83 | Transmembrane | 25-41 (18-47) |
| INTEGRAL | Likelihood = −10.46 | Transmembrane | 153-169 (148-176) |

```
----- Final Results -----
      bacterial membrane --- Certainty = 0.5331 (Affirmative) < succ>
        bacterial outside --- Certainty = 0.0000 (Not Clear) < succ>
    bacterial cytoplasm --- Certainty = 0.0000 (Not Clear) < succ>
```

[5896] The protein has homology with the following sequences in the GENPEPT database.

| >GP:CAB13183 GB:Z99110 similar to two component sensor histidine | | | |
|---|---|---|---|
| kinase [YkoG] [Bacillus subtilis] | | | |
| Identities = 119/446 (26%), Positives = 212/446 (46%), Gaps = 18/446 (4%) | | | |
| Query: | 17 | TQITLWYSSFIFILVIGVLIGSFFISKSIAENKSKKNLEAKAVQMSQALAKGHRYEAFED | 76 |
| | | T+I L+ S + IL+I V + I S +K L + +++AL | |
| Sbjct: | 5 | TKIHLYTSISLLILLILVHTAVYLIFSSALTSKDAARLADETDNIAEALRAAETEGVALQ | 64 |
| Query: | 77 | GIFYSVYDQNGKV-IYSGFPKGFKRDLDHQHKHKKKLSLFSMEN--------RTFQYVDI | 127 |
| | | + + NG V + +G K + LS S E + F + | |
| Sbjct: | 65 | DMLQAYLPANGMVRVVNGDQKAVMTITKEKAYKDFPLSFHSGETADVRKPDGKLFAEAAV | 124 |
| Query: | 128 | PISGKNQWLRAIRTVDRLDKQLTELLFSLGIVLPLMLIIITVG----GYLILKRTFRPIQ | 183 |
| | | P+ + + +++ V+RL+ E LF L I+L + + G L+ +R PI+ | |
| Sbjct: | 125 | PVIWTDGQVVSLQLVERLENT-EESLFLLKIILIAASAAVCIASFFAGSLLARRIINPIR | 183 |
| Query: | 184 | EITETAQFITQNEDYTKRIITKNNENELTELAAVINTMLASIESSFVREKQFNNDVSHEL | 243 |
| | | + T + I +++++ + + +EL ++ N M ++ + +++QF D SHEL | |
| Sbjct: | 184 | RLMITMKDIQRDKEFKTISLEGQSNDELYQMGLTFNEMAMMLKEHYDKQQQFVQDASHEL | 243 |
| Query: | 244 | RTPVTVILSESEYGKNYAENLSEA-KESFEVIHRQSLSMKKLVEQLLELTKAENPLSIQL | 302 |
| | | +TP+T+I S S K + E +ES E IH +++ MKKL QLL L K+ L + L | |
| Sbjct: | 244 | KTPLTIIESYSSLMKRWGAKKPEVLEESIEAIHSEAVHMKKLTNQLLALAKSHQGLEVDL | 303 |
| Query: | 303 | EPLNFSIMMKQLVSDSSRLLDNTPIHLDSQIEDDLWIIGQQTLLKRLFDNLFSNAIKFTN | 362 |
| | | + ++ I + V + + + I L++ ++ L + + +K+L L NAIK++ | |
| Sbjct: | 304 | KTIDL-IKAARAVMQTLQSVYQRDILLETD-KESLLVKADEERIKQLLTILLDNAIKYSE | 361 |
| Query: | 363 | NHISISLRQSDNQIVFSIKDNGLGISVDDQSKIWNRFYQVDSARTKDSQSGIGLGLSLVK | 422 |
| | | I +S + + S++D G+GI + ++ RFY+ D AR + + G GLGLS+ K | |
| Sbjct: | 362 | KPIEMSAGTRNGRPFLSVRDEGIGIPEEHIPHLFERFYRADEARNRKT-GGTGLGLSIAK | 420 |
| Query: | 423 | QIATIHRAKIWVDSKPDDGSQFTLTF | 448 |
| | | QIA H ++ V SKP G+ T+ F | |
| Sbjct: | 421 | QIADEHGIELSVKSKPGQGTAVTMQF | 446 |

[5897] There is also homology to SEQ ID 1178.

[5898] SEQ ID 3256 (GBS77) was expressed in E. coli as a GST-fusion product. SDS-PAGE analysis of total cell extract is shown in FIG. 21 (lane 2; MW 78.5 kDa) and in FIG. 28 (lane 2; MW 78.5 kDa).

[5899] GBS77-GST was purified as shown in FIG. 195, lane 4.

[5900] Based on this analysis, it was predicted that this protein and its epitopes, could be useful antigens for vaccines or diagnostics.

### EXAMPLE 1057

[5901] A DNA sequence (GBSx1130) was identified in S. agalactiae <SEQ ID 3257> which encodes the amino acid sequence <SEQ ID 3258>. This protein is predicted to be CopR protein (tcrA). Analysis of this protein sequence reveals the following:

```
Possible Site: 33
>>> Seems to have no N-terminal signal sequence
----- Final Results -----
    bacterial cytoplasm --- Certainty = 0.3963 (Affirmative) < succ>
      bacterial membrane --- Certainty = 0.0000 (Not Clear) < succ>
        bacterial outside --- Certainty = 0.0000 (Not Clear) < succ>
```

[5902] The protein has homology with the following sequences in the GENPEPT database.

| >GP:CAC07978 GB:AJ278983 CopR protein [Ralstonia metallidurans] | | | |
|---|---|---|---|
| Identities = 102/221 (46%), Positives = 145/221 (65%) | | | |
| Query: | 1 | MKILVVEDEFDLNRSIVKLLKKQHYSVDSASNGEEALQFVSVAEYDVIILDVMMPKMDGF | 60 |
| | | MK+LVVEDE + + L + + VD +NG + F YD+IILDVM+P +DG+ | |
| Sbjct: | 1 | MKLLVVEDEVKTGEYLRQGLTEAGFVVDLVANGLDGQHFAVNETYDLIILDVMLPDVDGW | 60 |
| Query: | 61 | TFLKLLRNKGSQVSILMLTARDAVEDRIAGLDFGADDYLVKPFEFGELMARIRAMLRRAN | 120 |
| | | L +R G+ V +L LTARD+V DR+ GL+ GADDYLVKPF F EL+AR+R +LRR | |
| Sbjct: | 61 | HILHAIRASGNAVPVLFLTARDSVADRVRGLELGADDYLVKPFAFSELLARVRTLLRRGA | 120 |
| Query: | 121 | RQVSSDDIQIQDITINLSTKQVWRNDNLIDLTAKEYEVLEYLARHRDQVLSRHQIREHVW | 180 |
| | | Q++ D IQ+ D+ ++LS ++ R I LT+KE+ +LE AR R +VL R I VW | |
| Sbjct: | 121 | VQLAMDRIQVADLILDLSRRRASRGGRRITLTSKEFALLELFARRRGEVLPRSLIASQVW | 180 |
| Query: | 181 | DYDYYGESNIIDVLIKNLRRKLDNNRDGSLIKTKRGLGYVI | 221 |
| | | D ++ +SN+IDV I+ LR K+D+ + LI+T RG+GYV+ | |
| Sbjct: | 181 | DMNFDSDSNVIDVAIRRLRAKIDDGFEVKLIQTVRGMGYVL | 221 |

[5903] There is also homology to SEQ ID 3260.

[5904] Based on this analysis, it was predicted that this protein and its epitopes, could be useful antigens for vaccines or diagnostics.

### EXAMPLE 1058

[5905] A DNA sequence (GBSx1131) was identified in S. agalactiae <SEQ ID 3261> which encodes the amino acid sequence <SEQ ID 3262>. Analysis of this protein sequence reveals the following:

Possible site: 40
>>> Seems to have no N-terminal signal sequence

| | | | |
|---|---|---|---|
| INTEGRAL | Likelihood = −3.45 | Transmembrane | 18-34 (16-36) |

```
----- Final Results -----
      bacterial membrane --- Certainty = 0.2381 (Affirmative) < succ>
        bacterial outside --- Certainty = 0.0000 (Not Clear) < succ>
    bacterial cytoplasm --- Certainty = 0.0000 (Not Clear) < succ>
```

[5906] A related GBS nucleic acid sequence <SEQ ID 10281> which encodes amino acid sequence <SEQ ID 10282> was also identified.

[5907] The protein has no significant homology with any sequences in the GENPEPT database.

[5908] No corresponding DNA sequence was identified in S. pyogenes.

[5909] SEQ ID 3262 (GBS78) was expressed in E. coli as a His-fusion product. SDS-PAGE analysis of total cell extract is shown in FIG. 16 (lane 4; MW 23.8 kDa).

[5910] The GBS78-GST fusion product was purified (FIG. 194, lane 4) and used to immunise mice. The resulting antiserum was used for FACS (FIG. 317), which confirmed that the protein is immunoaccessible on GBS bacteria.

[5911] Based on this analysis, it was predicted that these proteins and their epitopes could be useful antigens for vaccines or diagnostics.

### EXAMPLE 1059

[5912] A DNA sequence (GBSx1132) was identified in S. agalactiae <SEQ ID 3263> which encodes the amino acid sequence <SEQ ID 3264>. Analysis of this protein sequence reveals the following:

Possible site: 36
>>> Seems to have an uncleavable N-term signal seq

| | | | |
|---|---|---|---|
| INTEGRAL | Likelihood = −11.04 | Transmembrane | 15-31 (6-35) |
| INTEGRAL | Likelihood = −1.28 | Transmembrane | 51-67 (51-67) |

```
----- Final Results -----
      bacterial membrane --- Certainty = 0.5416 (Affirmative) < succ>
        bacterial outside --- Certainty = 0.0000 (Not Clear) < succ>
    bacterial cytoplasm --- Certainty = 0.0000 (Not Clear) < succ>
```

[5913] The protein has no significant homology with any sequences in the GENPEPT database.

[5914] No corresponding DNA sequence was identified in S. pyogenes.

[5915] SEQ ID 3264 (GBS79) was expressed in E. coli as a GST-fusion product. GBS79d was expressed in E. coli as a GST-fusion product. SDS-PAGE analysis of total cell extract is shown in FIG. 154 (lane 17 & 18; MW 51 kDa), in FIG. 155 (lane 17; MW 51 kDa) and in FIG. 187 (lane 13; MW 51 kDa).

[5916] GBS79d was also expressed in E. coli as a His-fusion product. SDS-PAGE analysis of total cell extract is shown in FIG. 155 (lane 24; MW 26 kDa) and in FIG. 183 (lane 5; MW 26 kDa). Purified GBS79d-GST is shown in FIG. 243, lane 2.

[5917] Based on this analysis, it was predicted that this protein and its epitopes, could be useful antigens for vaccines or diagnostics.

### EXAMPLE 1060

[5918] A DNA sequence (GBSx1133) was identified in S. agalactiae <SEQ ID 3265> which encodes the amino acid sequence <SEQ ID 3266>. Analysis of this protein sequence reveals the following:

```
Possible site: 50
>>> Seems to have no N-terminal signal sequence
----- Final Results -----
    bacterial cytoplasm --- Certainty = 0.5326 (Affirmative) < succ>
      bacterial membrane --- Certainty = 0.0000 (Not Clear) < succ>
        bacterial outside --- Certainty = 0.0000 (Not Clear) < succ>
```

[5919] A related GBS nucleic acid sequence <SEQ ID 10279> which encodes amino acid sequence <SEQ ID 10280> was also identified.

[5920] The protein has homology with the following sequences in the GENPEPT database.

| >GP:AAG20974 GB:AE005164 Vng6349c [Halobacteriurn sp. NRC-1] | | | |
|---|---|---|---|
| Identities = 97/358 (27%), Positives = 163/358 (45%), Gaps =20/358 (5%) | | | |
| Query: | 35 | DPQIIKLTTRANIAIGTYEGFLESIINPMLLISPLLSQEAVLSSKLEGTHATLKDLLNYE | 94 |
| | | D + A +G G + P +L + LL +EA+ S++++EG L + E | |
| Sbjct: | 70 | DDDFYETLADATFWLGKLSGVSLELDFPPVLYTSLLRKEAMESAEIEGADVDYDALYSLE | 129 |
| Query: | 95 | AGNKVDIERDELHEII------NYRKALFYALENISTINNIDSKGLPLSNRIIKENHKIL | 148 |
| | | D RDE E + R+ L Y I+ +D+ G L+ ++ ++H+ L | |
| Sbjct: | 130 | T-RTFDEGRDEPSETTAAAETKDTREVLNYETAVKEGIDALDA-GEELNVELLHDLHETL | 187 |
| Query: | 149 | LDNV---RGSSKNPGNFKRSQNYIGSVSSISYTPVPAEKTPEYMSNLEQYIHYD-DLDLL | 204 |
| | | L V R + G++K + NY+G + P + M L Y L | |
| Sbjct: | 188 | LTGVPDDRVDTDTIGDYKTNPNYLGD-----FLPPAPGAVEDLMDGLFTYYRTGGSYHPL | 242 |
| Query: | 205 | VQSAIIHAQFEMIHPFEDGNGRIGRLLIPLFLYYQELLSYPTFYMSSYFERDRSLYISHL | 264 |
| | | V A+ H QFE IHP+ DGNGR+GRLLI L LY +LL P Y+S Y R+++ Y+ + | |
| Sbjct: | 243 | VDIALFHYQFETIHPYGDGNGRLGRLLITLQLYDADLLERPNLYLSEYLNRNKTTYVERM | 302 |
| Query: | 265 | SNISKDNNWKDWFEYYLEGVILSAEESTKKAQDILSLYNIMKEQVIPKLNSVSGIQLLDF | 324 |
| | | + W+ W +++EG+ A ES ++ + + L + + K + + QL | |
| Sbjct: | 303 | EGVRFHGEWEAWLSFFIEGIARQAHESVERTRALADLRREYEHEYGGKAYTKN--QLAVT | 360 |
| Query: | 325 | IFSAPIFKAEQVSEHLKISERTTYTLLNKLIDEGYL-STDNAQRNRTYYCPQLLSIVQ | 381 |
| | | +F P ++ V I + T +N+L++EG L RN+ Y ++ I++ | |
| Sbjct: | 361 | LFEQPYITSKTVQRLFDIEQSTASRAINELVNEGILEEVPRHGRNKEYRAREIFEILE | 418 |

[5921] No corresponding DNA sequence was identified in S. pyogenes.

[5922] Based on this analysis, it was predicted that these proteins and their epitopes could be useful antigens for vaccines or diagnostics.

### EXAMPLE 1061

[5923] A DNA sequence (GBSx1134) was identified in S. agalactiae <SEQ ID 3267> which encodes the amino acid sequence <SEQ ID 3268>. Analysis of this protein sequence reveals the following:

```
Possible site: 47
>>> Seems to have no N-terminal signal sequence
----- Final Results -----
                            bacterial cytoplasm --- Certainty = 0.4370(Affirmative) < succ>
                              bacterial membrane --- Certainty = 0.0000(Not Clear) < succ>
                                bacterial outside --- Certainty = 0.0000(Not Clear) < succ>
RGD motif : 46-48
```

[5924] The protein has no significant homology with any sequences in the GENPEPT database.

[5925] No corresponding DNA sequence was identified in S. pyogenes.

[5926] SEQ ID 3268 (GBS299) was expressed in E. coli as a GST-fusion product. SDS-PAGE analysis of total cell extract is shown in FIG. 58 (lane 2; MW 62.2 kDa) and in FIG. 60 (lane 4; MW 62.2 kDa).

[5927] GBS299-GST was purified as shown in FIG. 207 (lane 4) and FIG. 225 (lanes 2-3).

[5928] Based on this analysis, it was predicted that this protein and its epitopes, could be useful antigens for vaccines or diagnostics.

### EXAMPLE 1062

[5929] A DNA sequence (GBSx1135) was identified in S. agalactiae <SEQ ID 3269> which encodes the amino acid sequence <SEQ ID 3270>. Analysis of this protein sequence reveals the following:

```
Possible site: 37
>>> Seems to have no N-terminal signal sequence
----- Final Results -----
                            bacterial cytoplasm --- Certainty = 0.4176(Affirmative) < succ>
                              bacterial membrane --- Certainty = 0.0000(Not Clear) < succ>
                                bacterial outside --- Certainty = 0.0000(Not Clear) < succ>
```

[5930] The protein has no significant homology with any sequences in the GENPEPT database.

[5931] No corresponding DNA sequence was identified in S. pyogenes.

[5932] Based on this analysis, it was predicted that this protein and its epitopes, could be useful antigens for vaccines or diagnostics.

### EXAMPLE 1063

[5933] A DNA sequence (GBSx1136) was identified in S. agalactiae <SEQ ID 3271> which encodes the amino acid sequence <SEQ ID 3272>. Analysis of this protein sequence reveals the following:

```
Possible site: 19
>>> Seems to have no N-terminal signal sequence
----- Final Results ------
                            bacterial cytoplasm --- Certainty = 0.1789(Affirmative) < succ>
                              bacterial membrane --- Certainty = 0.0000(Not Clear) < succ>
                                bacterial outside --- Certainty = 0.0000(Not Clear) < succ>
```

[5934] The protein has no significant homology with any sequences in the GENPEPT database.

[5935] No corresponding DNA sequence was identified in S. pyogenes.

[5936] Based on this analysis, it was predicted that this protein and its epitopes, could be useful antigens for vaccines or diagnostics.

### EXAMPLE 1064

[5937] A DNA sequence (GBSx1137) was identified in S. agalactiae <SEQ ID 3273> which encodes the amino acid sequence <SEQ ID 3274>. Analysis of this protein sequence reveals the following:

```
Possible site: 49
>>> Seems to have no N-terminal signal sequence
----- Final Results -----
                            bacterial cytoplasm --- Certainty = 0.3748(Affirmative) < succ>
                              bacterial membrane --- Certainty = 0.0000(Not Clear) < succ>
                                bacterial outside --- Certainty = 0.0000(Not Clear) < succ>
```

[5938] The protein has no significant homology with any sequences in the GENPEPT database.

[5939] No corresponding DNA sequence was identified in S. pyogenes.

[5940] Based on this analysis, it was predicted that this protein and its epitopes, could be useful antigens for vaccines or diagnostics.

### EXAMPLE 1065

[5941] A DNA sequence (GBSx1138) was identified in S. agalactiae <SEQ ID 3275> which encodes the amino acid sequence <SEQ ID 3276>. Analysis of this protein sequence reveals the following:

```
Possible site: 51
>>> Seems to have no N-terminal signal sequence
----- Final Results -----
                            bacterial cytoplasm --- Certainty = 0.1638(Affirmative) < succ>
                              bacterial membrane --- Certainty = 0.0000(Not Clear) < succ>
                                bacterial outside --- Certainty = 0.0000(Not Clear) < succ>
```

[5942] The protein has homology with the following sequences in the GENPEPT database.

| >GP:CAB12294 GB:Z99106 similar to transposon protein [Bacillus subtilis] | | | |
|---|---|---|---|
| Identities = 84/291 (28%), Positives = 138/291 (46%), Gaps = 6/291 (2%) | | | |
| Query: | 6 | MLDYLAVTIKGLAPDDVIEKILILPKDKFVLNEWGINKYQRHYSFSEIKVYFNKDWQSKM | 65 |
| | | M+DY+ V+ K D +IE++L L KD + G Y Y IKV+++ ++ | |
| Sbjct: | 31 | MVDYIRVSFKTHDVDRIIEEVLHLSKDFMTEKQSGFYGYVGTYELDYIKVFYSAPDDNR- | 89 |
| Query: | 66 | GVFIELRGQGCRQYEEYMENNVNNWVTLMKRISECHSNVTRLDIANDIFDDSLSVPLIYS | 125 |
| | | GV IE+ GQGCRQ+E ++E W + + + TR D+A D S+P + | |
| Sbjct: | 90 | GVLIEMSGQGCRQFESFLECRKKTWYDFFQDCMQQGGSFTRFDLAIDDKKTYFSIPELLK | 149 |
| Query: | 126 | YCKKQLCISTAKTFDYHEKSLLENGEKVGEMVTIGVRGTQQW-CVYNKLLEQKLDQELPN | 184 |
| | | +K CIS + D++ L +G G + G + ++ + C Y K EQ +P | |
| Sbjct: | 150 | KAQKGECISRFRKSDFNGSFDLSDGITGGTTIYFGSKKSEAYLCFYEKNYEQAEKYNIPL | 209 |
| Query: | 185 | TPL-SWTRAELRCWQEKANLLAKQIKEGRPLKEIYFEVINGHYRFVSPRDKDSNRWRRKT | 243 |
| | | L W R ELR E+A + + + + L I ++IN + RFV D++ R KT | |
| Sbjct: | 210 | EELGDWNRYELRLKNERAQVAIDALLKTKDLTLIAMQIINNYVRFVD-ADENITREHWKT | 268 |
| Query: | 244 | VKWWNDYLETQEKTVLSVKRTKPTLKRSEKWTEKQVSRTLGKLYVAKAESH | 294 |
| | | +W+D++ + L VK K ++S W + T+ V +A+ H | |
| Sbjct: | 269 | SLFWSDFIGDVGRLPLYVKPQKDFYQKSRNWLRNSCAPTM--KMVLEADEH | 317 |

[5943] No corresponding DNA sequence was identified in S. pyogenes.

[5944] Based on this analysis, it was predicted that this protein and its epitopes, could be useful antigens for vaccines or diagnostics.

### EXAMPLE 1066

[5945] A DNA sequence (GBSx1139) was identified in S. agalactiae <SEQ ID 3277> which encodes the amino acid sequence <SEQ ID 3278>. This protein is predicted to be integrase. Analysis of this protein sequence reveals the following:

```
Possible site: 58
>>> Seems to have no N-terminal signal sequence
----- Final Results -----
                            bacterial cytoplasm --- Certainty = 0.1914(Affirmative) < succ>
                              bacterial membrane --- Certainty = 0.0000(Not Clear) < succ>
                                bacterial outside --- Certainty = 0.0000(Not Clear) < succ>
```

[5946] The protein has homology with the following sequences in the GENPEPT database.

| >GP:CAB70622 GB:AJ243106 integrase [Streptococcus thermophilus] | | | |
|---|---|---|---|
| Identities = 135/474 (28%), Positives = 233/474 (48%), Gaps = 68/474 (14%) | | | |
| Query: | 20 | KAGNVLVKFAMRFTHPITKKSHKKYLSTGASKGWFTTKATPSKKLPSGKERLLVSDIKNT | 79 |
| | | K G + VKF F + +T K ++ LS W+T +KK +GK +L S | |
| Sbjct: | 19 | KTGYIEVKFRTYFNNQLTNK-RREILSD-----WYTIV---NKKDTTGKIKL--SPQIKA | 67 |
| Query: | 80 | QLITQVTQELNKLVDDYIAELMGIKPKKAKKLLTLEEIAKPFDKDGNFYGKAFKAWH--- | 136 |
| | | + ++ ++ NK+ ++ ++ K +TL+E+ + WH | |
| Sbjct: | 68 | IIHKELQEKANKVYEELTRTIL-----LEKSDITLDEV--------------WNEWHNER | 108 |
| Query: | 137 | -ERVKPANNTLKTRVTIYNRYIEPNFDTRMSITKFAFMTDEIQNLIN-----ASSMHMAR | 190 |
| | | ER A TL Y +I + SI K + I+NL++ + +A+ | |
| Sbjct: | 109 | VERQLVAPKTLAGEDGRYRNHITKQIP-KNSILK-NIPSSLIKNLLDNLYPIGNHKRLAQ | 166 |
| Query: | 191 | NLHIYLKMIFDWSVENGQITLTQDPIASNKVKRRVLTKSEEQDK-KREDIAEKYLEASEV | 249 |
| | | + L I+ +++ + I+ Q+P+ + R+ L S+E D+ K+ DI ++YLE+ E+ | |
| Sbjct: | 167 | GVKSDLTSIYKFAILHDYISPDQNPMPYISIGRKGL--SDELDRLKKSDIEDQYLESWEL | 224 |
| Query: | 250 | NHVLRLIESWTNRPDNQLIADVLRMIFLTGMRPSEVLGLNEDMLDFEKKWIKVHWQRASK | 309 |
| | | VL ++ + N+ A + LTGMR EVLGL E+ +DF K V RA+ | |
| Sbjct: | 225 | KEVLSIVRKY-----NEQYARIFEFQALTGMRIGEVLGLKEEAIDFNKNIASVIRTRATH | 279 |
| Query: | 310 | NKSDDMMEALNLDEKERYRADLKTKESVRTIPMSPEVEKILRHYIDRNKFQAQFSPTYQD | 369 |
| | | + + + Y ++K +S R + +S +IL+ I+ N +F+P Y+D | |
| Sbjct: | 280 | GGASE----------DSYEGNVKNLQSYRNVQLSKRAIEILKEEIELNHQHIRFNPDYKD | 329 |
| Query: | 370 | LGYLFTRTYIRAGNRQGSPLYHNELSQFLRGGSSQSAKYNKKAGKPYK---DIDSFLDFG | 426 |
| | | G++FT I + G+PL+++ L+ FL SS++K N+ G P + DID+ L F | |
| Sbjct: | 330 | NGWIFTSKSIHKPDYNGTPLHYSVLNNFL--NSSENGKLNRN-GNPRRAGIDIDNKLSFK | 386 |
| Query: | 427 | RPIHVIPHMFRHSFISIMASEGIDLPTIREFVGHSEDSKEIERVYLHVIKKQKD | 480 |
| | | + H+ H+FRH+ IS +A +G+ L I++ VGHS S+ + +YLH+ KK RD | |
| Sbjct: | 387 | K--HITTHIFRHTHISFLAEQGVPLEAIQDRVGHSRGSR-VTEIYLHITKKTKD | 437 |

[5947] A related DNA sequence was identified in S. pyogenes <SEQ ID 3279> which encodes the amino acid sequence <SEQ ID 3280>. Analysis of this protein sequence reveals the following:

```
Possible site: 33
>>> Seems to have no N-terminal signal sequence
----- Final Results -----
                            bacterial cytoplasm --- Certainty = 0.5203(Affirmative) < succ>
                              bacterial membrane --- Certainty = 0.0000(Not Clear) < succ>
                                bacterial outside --- Certainty = 0.0000(Not Clear) < succ>
```

[5948] An alignment of the GAS and GBS proteins is shown below.

| Identities = 82/357 (22%), Positives = 155/357 (42%), Gaps = 52/357 (14%) | | | |
|---|---|---|---|
| Query: | 135 | WHERVKPANNTLKTRVTIYNRYIEPNFDTRMSITKFAFMTDEIQNLINA--SSMHMARNL | 192 |
| | | W K +T + R + D + I K T +Q++I+ S + | |
| Sbjct: | 73 | WEHHQKSLKSTSVRSLDFRIRELRNLIDPEVMIAKIT--TKYLQSIIDKIPGSYDKRKRA | 130 |
| Query: | 193 | HIYLKMIFDWSVENGQITLTQDPIASNKVKRRVLTKSEEQDKKREDIAEKYLEASEVNHV | 252 |
| | | LK FD+++ +++ +P+ S +++ V T K ED+A+K+LE E+ | |
| Sbjct: | 131 | RQLLKQTFDYAIALEYVSI--NPVISTQLAKPVKTI-----KDFEDVAQKFLSKDELK-- | 181 |
| Query: | 253 | LRLIESWTNRPDNQLIADVLRMIFLTGMRPSEVLGLNEDMLDFEKKWIKVHWQRASKNKS | 312 |
| | | RL++ R + +A + + L G R E L + + + I++H | |
| Sbjct: | 182 | -RLLDEMYRRKGSIKMAYLAEFMSLNGCRIGEALAIQPD--NIKNDIIEIH--------- | 229 |
| Query: | 313 | DDMMEALNLDEKERYRADLKTKESVRTIPMSPEVEKILRHYIDRNKFQAQFSPTYQDLGY | 372 |
| | | ++ + + + KT S R ++ ++I++ + N + +P Y+D+GY | |
| Sbjct: | 230 | -GTLDYTSNGYRNAIKTTPKTNSSWRETLITKREKEIIQDILKINALEKNTNPNYKDNGY | 288 |
| Query: | 373 | LFTRTYIRAGNRQGSPLYNNELSQFLRGGSSQSAKYNKKAGKPYKDIDSFLDFGRPIHVI | 432 |
| | | +F +R G P+ N L+ +R NK+ KP + + | |
| Sbjct: | 289 | IFI-------SRNGVPIQDNALNTSIRAA-------NKRLEKPIQK-----------ELT | 323 |
| Query: | 433 | PHMFRHSFISIMASEGIDLPTIREFVGHSEDSKEIERVYLHVIKKQKDTMRGAVEKL | 489 |
| | | H+FRH+ +S +A + L TI + VGH+ DSK +++Y HV K K+ + + +L | |
| Sbjct: | 324 | SHIFRHTLVSRLAENKVPLKTIMDRVGHA-DSKTTQQIYTHVTHSMKNEVVDILNRL | 379 |

[5949] Based on this analysis, it was predicted that these proteins and their epitopes could be useful antigens for vaccines or diagnostics.

### EXAMPLE 1067

[5950] A DNA sequence (GBSx1140) was identified in S. agalactiae <SEQ ID 3281> which encodes the amino acid sequence <SEQ ID 3282>. Analysis of this protein sequence reveals the following:

```
Possible site: 42
>>> Seems to have no N-terminal signal sequence
----- Final Results -----
                            bacterial cytoplasm --- Certainty = 0.3023(Affirmative) < succ>
                              bacterial membrane --- Certainty = 0.0000(Not Clear) < succ>
                                bacterial outside --- Certainty = 0.0000(Not Clear) < succ>
```

[5951] A related GBS nucleic acid sequence <SEQ ID 10277> which encodes amino acid sequence <SEQ ID 10278> was also identified.

[5952] The protein has homology with the following sequences in the GENPEPT database.

| >GP:AAB64982 GB:U43834 Ydr540cp [Saccharomyces cerevisiae] | | | |
|---|---|---|---|
| Identities = 88/170 (51%), Positives = 117/170 (68%), Gaps = 3/170 (1%) | | | |
| Query: | 36 | MRTYSDKNELKEEVLKSYKKYIAEFNDIPEKLKDLRIDEVDRTPAENLAYQVGWTTLILK | 95 |
| | | MR Y+ K ELKEE+ K Y+KY AEF I E KD +++ VDRTP+ENL+YQ+GW L+L+ | |
| Sbjct: | 1 | MREYTSKKELKEEIEKKYEKYDAEFETISESQKDEKVETVDRTPSENLSYQLGWVNLLLE | 60 |
| Query: | 96 | WESDEQSGLEVKTPTETFKWNQLGELYQHFTETYASLTIKELTAQLNDNVDAIGNMIDSM | 155 |
| | | WE+ E +G V+TP +KWN LG LYQ F + Y +IKE A+L + V+ + I ++ | |
| Sbjct: | 61 | WEAKEIAGYNVETPAPGYKWNNLGGLYQSFYKKYGIYSIKEQRAKLREAVNEVYKWISTL | 120 |
| Query: | 156 | SDEVLFKPHMRNWADSATKNAVWEVYKFIHINTVAPFGTFRTKIRKWKKV | 205 |
| | | SD+ LF+ R W AT A+W VYK+IHINTVAPF FR KIRKWK++ | |
| Sbjct: | 121 | SDDELFQAGNRKW---ATTKAMWPVYKWIHINTVAFFTNFRGKIRKWKRL | 167 |

[5953] No corresponding DNA sequence was identified in S. pyogenes.

[5954] Based on this analysis, it was predicted that these proteins and their epitopes could be useful antigens for vaccines or diagnostics.

### EXAMPLE 1068

[5955] A DNA sequence (GBSx1141) was identified in S. agalactiae <SEQ ID 3283> which encodes the amino acid sequence <SEQ ID 3284>. This protein is predicted to be 50S ribosomal protein subunit L33-related protein. Analysis of this protein sequence reveals the following:

```
Possible site: 46
>>> Seems to have no N-terminal signal sequence
----- Final Results -----
                            bacterial cytoplasm --- Certainty = 0.5420(Affirmative) < succ>
                              bacterial membrane --- Certainty = 0.0000(Not Clear) < succ>
                                bacterial outside --- Certainty = 0.0000(Not Clear) < succ>
```

[5956] The protein has homology with the following sequences in the GENPEPT database.

| >GP:AAB66692 GB:U89998 50S ribosomal protein subunit L33 | | | |
|---|---|---|---|
| [Lactococcus lactis subsp. cremoris] | | | |
| Identities = 43/49 (87%), Positives = 46/49 (93%) | | | |
| Query: | 1 | HRVNITLEHKESGERLYLTSKNKRNTPDRLQLKKYSPKLRKHVVFTEVK | 49 |
| | | HRVNITLEHKESGERLYLT KNKRNTPD+L+LKKYS KLRKHV+F EVK | |
| Sbjct: | 1 | MRVNITLEHKESGERLYLTQKNKRNTPDKLELKKYSKKLRKHVIFKEVK | 49 |

[5957] A related DNA sequence was identified in S. pyogenes <SEQ ID 3285> which encodes the amino acid sequence <SEQ ID 3286>. Analysis of this protein sequence reveals the following:

```
Possible site: 46
>>> Seems to have no N-terminal signal sequence
----- Final Results -----
                            bacterial cytoplasm --- Certainty = 0.5394(Affirmative) < succ>
                              bacterial membrane --- Certainty = 0.0000(Not Clear) < succ>
                                bacterial outside --- Certainty = 0.0000(Not Clear) < succ>
```

[5958] An alignment of the GAS and GBS proteins is shown below.

| Identities = 48/49 (97%), Positives = 48/49 (97%) | | | |
|---|---|---|---|
| Query: | 1 | MRVNITLEHKESGERLYLTSKNKRNTPDRLQLKKYSPKLRKHVVFTEVK | 49 |
| | | MRVNITLEHKESGERLYLTSKNKRNTPDRLQLKKYSPKLRKHV FTEVK | |
| Sbjct: | 1 | MRVNITLEHKESGERLYLTSKNKRNTPDRLQLKKYSPKLRKHVTFTEVK | 49 |

[5959] Based on this analysis, it was predicted that these proteins and their epitopes could be useful antigens for vaccines or diagnostics.

### EXAMPLE 1069

[5960] A DNA sequence (GBSx1142) was identified in S. agalactiae <SEQ ID 3287> which encodes the amino acid sequence <SEQ ID 3288>. This protein is predicted to be 50S ribosomal protein subunit L32-related protein. Analysis of this protein sequence reveals the following:

```
Possible site: 56
>>> Seems to have no N-terminal signal sequence
----- Final Results -----
                            bacterial cytoplasm --- Certainty = 0.3577(Affirmative) < succ>
                              bacterial membrane --- Certainty = 0.0000(Not Clear) < succ>
                                bacterial outside --- Certainty = 0.0000(Not Clear) < succ>
```

[5961] The protein has homology with the following sequences in the GENPEPT database.

| >GP: AAB66691 GB: U89998 50S ribosomal protein subunit L32 | | | |
|---|---|---|---|
| [Lactococcus lactis subsp. cremoris] | | | |
| Identities = 44/53 (83%), Positives = 48/53 (90%) | | | |
| Query: | 1 | MAKPARHTSKAKRNKRRTHYKLTAPSVQFDETTGDYSRSHRVSLKGYYKGRKI | 53 |
| | | MA PARHTS AK+N+RRTHYKLTAP+V FDETTGDY SHRVSLKGYYKGRK+ | |
| Sbjct: | 1 | MAVPARHTSSAKKNRRRTHYKLTAPTVTFDETTGDYRHSHRVSLKGYYKGRKV | 53 |

[5962] A related DNA sequence was identified in S. pyogenes <SEQ ID 3289> which encodes the amino acid sequence <SEQ ID 3290>. Analysis of this protein sequence reveals the following:

```
Possible site: 35
>>> Seems to have no N-terminal signal sequence
----- Final Results -----
                            bacterial cytoplasm --- Certainty = 0.5148(Affirmative) < succ>
                              bacterial membrane --- Certainty = 0.0000(Not Clear) < succ>
                                bacterial outside --- Certainty = 0.0000(Not Clear) < succ>
```

[5963] An alignment of the GAS and GBS proteins is shown below.

| Identities = 38/39 (97%), Positives = 39/39 (99%) | | | |
|---|---|---|---|
| Query: | 22 | LTAPSVQFDETTGDYSRSHRVSLKGYYKGRKIAKANEAK | 60 |
| | | +TAPSVQFDETTGDYSRSHRVSLKGYYKGRKIAKANEAK | |
| Sbjct: | 1 | MTAPSVQFDETTGDYSRSHRVSLKGYYKGRKIAKANEAK | 39 |

[5964] Based on this analysis, it was predicted that these proteins and their epitopes could be useful antigens for vaccines or diagnostics.

### EXAMPLE 1070

[5965] A DNA sequence (GBSx1144) was identified in S. agalactiae <SEQ ID 3291> which encodes the amino acid sequence <SEQ ID 3292>. This protein is predicted to be histidyl-tRNA synthetase (hisS). Analysis of this protein sequence reveals the following:

```
Possible site: 32
>>> Seems to have no N-terminal signal sequence
----- Final Results -----
                            bacterial cytoplasm --- Certainty = 0.4357(Affirmative) < succ>
                              bacterial membrane --- Certainty = 0.0000(Not Clear) < succ>
                                bacterial outside --- Certainty = 0.0000(Not Clear) < succ>
```

[5966] A related GBS nucleic acid sequence <SEQ ID 10275> which encodes amino acid sequence <SEQ ID 10276> was also identified.

[5967] The protein has homology with the following sequences in the GENPEPT database.

| >GP: CAA78919 GB: Z17214 histidine--tRNA ligase [Streptococcus | | | |
|---|---|---|---|
| equisimilis] | | | |
| Identities = 327/404 (80%), Positives = 361/404 (88%) | | | |
| Query: | 32 | WQYVENVIRNLFKQYHYDEIRTPMFEHYEVISRSVGDTTDIVTKEMYDFHDKGDRHITLR | 91 |
| | | WQYVE V R FKQYHY EIRTPMFEHYEVISRSVGDTTDIVTKEMYDF+DKGDRHITLR | |
| Sbjct: | 1 | WQYVEGVARETFKQYHYGEIRTPMFEHYEVISRSVGDTTDIVTKEMYDFYDKGDRHITLR | 60 |
| Query: | 92 | PEGTAPVVRSYVENKLFAPEVQKPTKMYYIGSMFRYERPQAGRLREFHQVGVECFGSNNP | 151 |
| | | PEGTAPVVRSYVENKLFAPEVQKP K+YYIGSMFRYERPQAGRLREFHQ+GVECFGS NP | |
| Sbjct: | 61 | PEGTAPVVRSYVENKLFAPEVQKPVKLYYIGSMFRYERPQAGRLREFHQIGVECFGSANP | 120 |
| Query: | 152 | ATDVETIAMGHHLFEDLGIKNVKLHLNSLGNPESRQAYRQALIDYLTPIREQLSKDSQRR | 211 |
| | | ATDVETIAM +HLFE LGIK V LHLNSLGN SR AYRQALIDYL+P+R+ LSKDSQRR | |
| Sbjct: | 121 | ATDVETIAMAYHLFERLGIKGVTLHLNSLGNAASRAAYRQALIDYLSPMRDTLSKDSQRR | 180 |
| Query: | 212 | LNENPLRVLDSKEPEDKLAVENAPSILDYLDESSQAHFDAVCHMLDALNIPYIIDTNMVR | 271 |
| | | L+ENPLRVLDSKE EDK+AV NAPSILDY DE SQAHFDAV ML+AL IPY+IDTNMVR | |
| Sbjct: | 181 | LDENPLRVLDSKEKEDKIAVANAPSILDYQDEESQAHFDAVRSMLEALAIPYVIDTNMVR | 240 |
| Query: | 272 | GLDYYNHTIFEFITEIEDNELTICAGGRYDGLVSYFGGPETPAFGFGLGLERLLLILDKQ | 331 |
| | | GLDYYNHTIFEFITE++ +ELTICAGGRYDGLV YFGGP TP FGFGLGLERLLLILDKQ | |
| Sbjct: | 241 | GLDYYNHTIFEFITEVDQSELTICAGGRYDGLVEYFGGPATPGFGFGLGLERLLLILDKQ | 300 |
| Query: | 332 | GISLPIENTIDLYIAVLGSEANLAALDLAQSIRHQGFKVERDYLGRKIKAQFKSADTFNA | 391 |
| | | G+ LP+E +D+YIAVLG++AN+AAL L Q+IR QGF VERDYLGRKIKAQFKSADTF A | |
| Sbjct: | 301 | GVELPVEEGLDVYIAVLGADANVAALALTQAIRRQGFTVERDYLGRKIKAQFKSADTFKA | 360 |
| Query: | 392 | KVIMTLGSSEVDSKEVGLKNNQTRQEVKVSFENIKTDFSSVLKQ | 435 |
| | | KV++TLG SE+ + + LK+NQTRQE+ VSF+ I+TDF+S+ + | |
| Sbjct: | 361 | KVVITLGESEIKAGQAVLKHNQTRQEMTVSFDQIQTDFASIFAE | 404 |

[5968] A related DNA sequence was identified in S. pyogenes <SEQ ID 3293> which encodes the amino acid sequence <SEQ ID 3294>. Analysis of this protein sequence reveals the following:

```
Possible site: 27
>>> Seems to have no N-terminal signal sequence
----- Final Results -----
                            bacterial cytoplasm --- Certainty = 0.3183(Affirmative) < succ>
                              bacterial membrane --- Certainty = 0.0000(Not Clear) < succ>
                                bacterial outside --- Certainty = 0.0000(Not Clear) < succ>
```

[5969] An alignment of the GAS and GBS proteins is shown below.

| Identities = 339/424 (79%), Positives = 387/424 (90%) | | | |
|---|---|---|---|
| Query: | 13 | MKLQKPKGTQDILPGESAKWQYVENVIRNLFKQYHYDEIRTPMFEHYEVISRSVGDTTDI | 72 |
| | | MKLQKPKGTQDILPG++AKWQYVE+V R+ F QY+Y EIRTPMFEHYEVISRSVGDTTDI | |
| Sbjct: | 1 | MKLQKPKGTQDILPGDAAKWQYVESVARDTFSQYNYGEIRTPMFEHYEVISRSVGDTTDI | 60 |
| Query: | 73 | VTKEMYDFHDKGDRHITLRPEGTAPVVRSYVENKLFAPEVQKPTKMYYIGSMFRYERPQA | 132 |
| | | VTKEMYDF+DKGDRHITLRPEGTAPVVRSYVENKLFAPEVQKP K+YYIGSMFRYERPQA | |
| Sbjct: | 61 | VTKEMYDFYDKGDRHITLRPEGTAPVVRSYVENKLFAPEVQKPVKLYYIGSMFRYERPQA | 120 |
| Query: | 133 | GRLREFHQVGVECFGSNNPATDVETIAMGHHLFEDLGIKNVKLHLNSLGNPESRQAYRQA | 192 |
| | | GRLREFHQ+GVECFG+ NPATDVETIAM +HLFE LGIK+V LHLNSLG+PESR AYRQA | |
| Sbjct: | 121 | GRLREFHQIGVECFGAANPATDVETIAMAYHLFEKLGIKDVTLHLNSLGSPESRAAYRQA | 180 |
| Query: | 193 | LIDYLTPIREQLSKDSQRRLNENPLRVLDSKEPEDKLAVENAPSILDYLDESSQAHFDAV | 252 |
| | | LIDYLTP+R+QLSKDSQRRL+ENPLRVLDSKE EDKLAVE APSILDYLDE SQAHF+AV | |
| Sbjct: | 181 | LIDYLTPMRDQLSKDSQRRLDENPLRVLDSKEKEDKLAVEKAPSILDYLDEESQAHFEAV | 240 |
| Query: | 253 | CHMLDALNIPYIIDTNMVRGLDYYNHTIFEFITEIEDNELTICAGGRYDGLVSYFGGPET | 312 |
| | | ML+AL+IPY+IDTNMVRGLDYY+HTIFEFIT +E ++LTICAGGRYD LV YFGGPET | |
| Sbjct: | 241 | KDMLEALDIPYVIDTNMVRGLDYYSHTIFEFITSVEGSDLTICAGGRYDSLVGYFGGPET | 300 |
| Query: | 313 | PAFGFGLGLERLLLILDKQGISLPIENTIDLYIAVLGSEANLAALDLAQSIRHQGFKVER | 372 |
| | | P FGFGLGLERLL+I++KQGI+LPIE +D+Y+AVLG AN AL+L Q+IR QGF ER | |
| Sbjct: | 301 | PGFGFGLGLERLLMIIEKQGITLPIETEMDIYLAVLGDGANSKALELVQAIRRQGFTAER | 360 |
| Query: | 373 | DYLGRKIKAQFKSADTFNAKVIMTLGSSEVDSKEVGLKNNQTRQEVKVSFENIKTDFSSV | 432 |
| | | DYLGRKIKAQFKSADTF AK++MTLG SEV++ + +KNN++RQEV+VSFE++ T+F+++ | |
| Sbjct: | 361 | DYLGRKIKAQFKSADTFKAKLVMTLGESEVEAGKAVIKNNRSRQEVEVSFEDMMTNFANI | 420 |
| Query: | 433 | LKQL | 436 |
| | | +QL | |
| Sbjct: | 421 | SEQL | 424 |

[5970] Based on this analysis, it was predicted that these proteins and their epitopes could be useful antigens for vaccines or diagnostics.

### EXAMPLE 1071

[5971] A DNA sequence (GBSx1145) was identified in S. agalactiae <SEQ ID 3295> which encodes the amino acid sequence <SEQ ID 3296>. This protein is predicted to be aspartyl-tRNA synthetase (aspS). Analysis of this protein sequence reveals the following:

```
Possible site: 29
>>> Seems to have no N-terminal signal sequence
----- Final Results -----
                            bacterial cytoplasm --- Certainty = 0.5124(Affirmative) < succ>
                              bacterial membrane --- Certainty = 0.0000(Not Clear) < succ>
                                bacterial outside --- Certainty = 0.0000(Not Clear) < succ>
```

[5972] A related GBS nucleic acid sequence <SEQ ID 10273> which encodes amino acid sequence <SEQ ID 10274> was also identified.

[5973] The protein has homology with the following sequences in the GENPEPT database.

>GP: CAB14714 GB: Z99118 aspartyl-tRNA synthetase [Bacillus subtilis]
Identities = 339/585 (57%), Positives = 432/585 (72%), Gaps = 9/585 (1%)

| | | | |
|---|---|---|---|
| Query: | 20 | RSMYAGRVRSEHIGTSITLKGWVGRRRDLGGLIFIDLRDREGIMQLVINPEEVSASVMAT | 79 |
| | | R+ Y G + + IG S+TLKGWV +RRDLGGLIFIDLRDR GI+Q+V NP+ VS +A | |
| Sbjct: | 4 | RTYYCGDITEKAIGESVTLKGWVQKRRDLGGLIFIDLRDRTGIVQVVFNPD-VSKEALAI | 62 |
| Query: | 80 | AESLRSEFVIEVSGVVTAREQA--NDNLPTGEVELKVQELSILNTSKTTPFEIKDGIE-A | 136 |
| | | AE +R+E+V+++ G V ARE+ N NL TG +E+ +++LN +KT PF I D E | |
| Sbjct: | 63 | AEGIRNEYVLDIQGKVVAREEGTVNPNLKTGAIEIHADGVNVLNAAKTPPFAISDQAEEV | 122 |
| Query: | 137 | NDDTRMRYRYLDLRRPEMLENFKLRAKVTHSIRNYLDNLEFIDVETPMLTKSTPEGARDY | 196 |
| | | ++D R+++RYLDLRRP M + +LR VT ++R++LD F+D+ETP+LT STPEGARDY | |
| Sbjct: | 123 | SEDVRLKHRYLDLRRPAMFQTMQLRHNVTKAVRSFLDENGFLDIETPILTGSTPEGARDY | 182 |
| Query: | 197 | LVPSRVNQGHFYALPQSPQITKQLLMNAGFDRYYQIVKCFRDEDLRGDRQPEFTQVDLET | 256 |
| | | LVPSRV++G FYALPQSPQ+ KQLLM +G +RYYQI +CFRDEDLR DRQPEFTQ+D+E | |
| Sbjct: | 183 | LVPSRVHEGEFYALPQSPQLFKQLLMVSGIERYYQIARCFRDEDLRADRQPEFTQIDIEM | 242 |
| Query: | 257 | SFLSDQEIQDIVEGMIAKVMKDTKGLEVSLPFPRMAYDDAMNNYGSDKPDTRFDMLLQDL | 316 |
| | | SF+S ++I + E M+AKVM++TKG E+ LP PRM YD+AMN YGSDKPDTRFDMLL D+ | |
| Sbjct: | 243 | SFMSQEDIMSLAEEMMAKVMRETKGEELQLPLPRMTYDEAMNKYGSDKPDTRFDMLLTDV | 302 |
| Query: | 317 | TEIVKEVDFKVFSEA----SVVKAIVVKDKADKYSRKNIDKLTEIAKQYGAKGLAWLKYA | 372 |
| | | ++IVK+ +FKVFS A VVKAI VK A YSRK+ID L A YGAKGLAW+K | |
| Sbjct: | 303 | SDIVKDTEFKVFSSAVANGGVVKAINVKGGAGDYSRKDIDALGAFAANYGAKGLAWVKVE | 362 |
| Query: | 373 | DNTISGPVAKFL-TAIEGRLTEALQLENNDLILFVADSLEVANETLGALRTRIAKELELI | 431 |
| | | + + GP+AKF + +L EAL DL+LF AD EV +LGALR ++ KE LI | |
| Sbjct: | 363 | ADGVKGPIAKFFDEEKQSKLIEALDAAEGDLLLFGADQFEVVAASLGALRLKLGKERGLI | 422 |
| Query: | 432 | DYSKFNFLWVVDWPMFEWSEEEGRYMSAHHPFTLPTAETAHELEGDLAKVRAVAYDIVLN | 491 |
| | | D FNFLWV+DWP+ E EEGR+ +AHHPFT+P E +E ++A AYD+VLN | |
| Sbjct: | 423 | DEKLFNFLWVIDWPLLEHDPEEGRFYAAHHPFTMPVREDLELIETAPEDMKAQAYDLVLN | 482 |
| Query: | 492 | GYELGGGSLRINQKDTQERMFKALGFSAESAQEQFGFLLEAMDYGFPPHGGLAIGLDRFV | 551 |
| | | GYELGGGS+RI +KD QE+MF LGFS E A EQFGFLLEA +YG PPHGG+A+GLDR V | |
| Sbjct: | 483 | GYELGGGSIRIFEKDIQEKMFALLGFSPEEAAEQFGFLLEAFEYGAPPHGGIALGLDRLV | 542 |
| Query: | 552 | MLLAGKDNIREVIAFPKNNKASDPMTQAPSLVSEQQLEELSLTVE | 596 |
| | | MLLAG+ N+R+ IAFPK AS MT+AP VS+ QL+EL L+++ | |
| Sbjct: | 543 | MLLAGRTNLRDTIAFPKTASASCLMTEAPGEVSDAQLDELHLSIK | 587 |

[5974] A related DNA sequence was identified in S. pyogenes <SEQ ID 3297> which encodes the amino acid sequence <SEQ ID 3298>. Analysis of this protein sequence reveals the following:

```
Possible site: 23
>>> Seems to have an uncleavable N-term signal seq
----- Final Results -----
                              bacterial membrane --- Certainty = 0.0000(Not Clear) < succ>
                                bacterial outside --- Certainty = 0.0000(Not Clear) < succ>
                            bacterial cytoplasm --- Certainty = 0.0000(Not Clear) < succ>
```

[5975] An alignment of the GAS and GBS proteins is shown below.

| Identities = 495/582 (85%), Positives = 538/582 (92%) | | | |
|---|---|---|---|
| Query: | 18 | MKRSMYAGRVRSEHIGTSITLKGWVGRRRDLGGLIFIDLRDREGIMQLVINPEEVSASVM | 77 |
| | | MKRSMYAGRVR EHIGT+ITLKGWV RRRDLGGLIFIDLRDREG+MQLVINPEEVS+ VM | |
| Sbjct: | 18 | MKRSMYAGRVREEHIGTTITLKGWVSRRRDLGGLIFIDLRDREGVMQLVINPEEVSSDVM | 77 |
| Query: | 78 | ATAESLRSEFVIEVSGVVTAREQANDNLPTGEVELKVQELSILNTSKTTPFEIKDGIEAN | 137 |
| | | ATAE LRSE+VIEV G V AR+QAND L TG VELKV L+ILNT+KTTPFEIKD +E + | |
| Sbjct: | 78 | ATAERLRSEYVIEVEGFVEARQQANDKLATGMVELKVSALTILNTAKTTPFEIKDDVEVS | 137 |
| Query: | 138 | DDTRMRYRYLDLRRPEMLENFKLRAKVTHSIRNYLDNLEFIDVETPMLTKSTPEGARDYL | 197 |
| | | DDTR+RYRYLDLRRPEMLENFKLRAKVTHSIRNYLD+LEFIDVETPMLTKSTPEGARDYL | |
| Sbjct: | 138 | DDTRLRYRYLDLRRPEMLENFKLRAKVTHSIRNYLDDLEFIDVETPMLTKSTPEGARDYL | 197 |
| Query: | 198 | VPSRVNQGHFYALPQSPQITKQLLMNAGFDRYYQIVKCFRDEDLRGDRQPEFTQVDLETS | 257 |
| | | VPSRV+QGHFYALPQSPQITKQLLMNAGFDRYYQIVKCFRDEDLRGDRQPEFTQVDLETS | |
| Sbjct: | 198 | VPSRVSQGHFYALPQSPQITKQLLMNAGFDRYYQIVKCFRDEDLRGDRQPEFTQVDLETS | 257 |
| Query: | 258 | FLSDQEIQDIVEGMIAKVMKDTKGLEVSLPFPRMAYDDAMNNYGSDKPDTRFDMLLQDLT | 317 |
| | | FLS+QEIQDIVEGMIAKVMK+TK ++V+LPFPRM+YD AMN+YGSDKPDTRF+MLLQDLT | |
| Sbjct: | 258 | FLSEQEIQDIVEGMIAKVMKETKEIDVTLPFPRMSYDVAMNSYGSDKPDTRFEMLLQDLT | 317 |
| Query: | 318 | EIVKEVDFKVFSEASVVKAIVVKDKADKYSRKNIDKLTEIAKQYGAKGLAWLKYADNTIS | 377 |
| | | VK DFKVFSEA VKAIVVK AD+YSRK+IDKLTE AKQ+GAKGLAW+K D ++ | |
| Sbjct: | 318 | VTVKGNDFKVFSEAPAVKAIVVKGNADRYSRKDIDKLTEFAKQFGAKGLAWVKVTDGQLA | 377 |
| Query: | 378 | GPVAKFLTAIEGRLTEALQLENNDLILFVADSLEVANETLGALRTRIAKELELIDYSKFN | 437 |
| | | GPVAKFLTAIE L+ L+L NDL+LFVAD+LEVAN TLGALR RIAK+L++ID S+FN | |
| Sbjct: | 378 | GPVAKFLTAIETELSSQLKLAENDLVLFVADTLEVANNTLGALRNRIAKDLDMIDQSQFN | 437 |
| Query: | 438 | FLWVVDWPMFEWSEEEGRYMSAHHPFTLPTAETAHELEGDLAKVRAVAYDIVLNGYELGG | 497 |
| | | FLWVVDWPMFEWSEEEGRYMSAHHPFTLPT E+AHELEGDLAKVRA+AYDIVLNGYELGG | |
| Sbjct: | 438 | FLWVVDWPMFEWSEEEGRYMSAHHPFTLPTPESAHELEGDLAKVRAIAYDIVLNGYELGG | 497 |
| Query: | 498 | GSLRINQKDTQERMFKALGFSAESAQEQFGFLLEAMDYGFPPHGGLAIGLDRFVMLLAGK | 557 |
| | | GSLRINQK+ QERMFKALGF+A+ A +QFGFLLEAMDYGFPPHGGLAIGLDRFVMLLAGK | |
| Sbjct: | 498 | GSLRINQKEMQERMFKALGFTADEANDQFGFLLEAMDYGFPPHGGLAIGLDRFVMLLAGK | 557 |
| Query: | 558 | DNIREVIAFPKNNKASDPMTQAPSLVSEQQLEELSLTVESYE | 599 |
| | | DNIREVIAFPKNNKASDPMTQAPSLVSE QLEELSL +ES++ | |
| Sbjct: | 558 | DNIREVIAFPKNNKASDPMTQAPSLVSENQLEELSLQIESHD | 599 |

[5976] Based on this analysis, it was predicted that these proteins and their epitopes could be useful antigens for vaccines or diagnostics.

### EXAMPLE 1072

[5977] A DNA sequence (GBSx1146) was identified in S. agalactiae <SEQ ID 3299> which encodes the amino acid sequence <SEQ ID 3300>. Analysis of this protein sequence reveals the following:

| Possible site: 54 | | | | |
|---|---|---|---|---|
| >>> Seems to have no N-terminal signal sequence | | | | |
| | INTEGRAL | Likelihood = −8.44 | Transmembrane | 186-202 (182-205) |
| | INTEGRAL | Likelihood = −5.68 | Transmembrane | 88-104 (86-106) |
| | INTEGRAL | Likelihood = −3.40 | Transmembrane | 115-131 (112-132) |
| | INTEGRAL | Likelihood = −2.13 | Transmembrane | 141-157 (141-157) |
| | INTEGRAL | Likelihood = −0.96 | Transmembrane | 43-59 (43-59) |

```
----- Final Results -----
                              bacterial membrane --- Certainty = 0.4376(Affirmative) < succ>
                                bacterial outside --- Certainty = 0.0000(Not Clear) < succ>
                            bacterial cytoplasm --- Certainty = 0.0000(Not Clear) < succ>
```

[5978] The protein has homology with the following sequences in the GENPEPT database.

| >GP: CAB12952 GB: Z99109 alternate gene name: yuxA~similar to | | | |
|---|---|---|---|
| hypothetical proteins [Bacillus subtilis] | | | |
| Identities = 104/275 (37%), Positives = 181/275 (65%), Gaps = 1/275 (0%) | | | |
| Query: | 39 | EKISASLLYGILSSVAVNFFFQPGHVYSSGATGLAQVISAVSKHWFSFEIPVALAFYAIN | 98 |
| | | +K+ ++ +L++ +N F P VY+SG TG+AQ++S+V + F I + +N | |
| Sbjct: | 7 | KKLLIVIIGALLNAAGLNLFLIPADVYASGFTGVAQLLSSVVDQYAPFYISTGTLLFLLN | 66 |
| Query: | 99 | IPLLILSWRKIGHKFTIFTFITVTVSSIFIQLMPQITLTTDPLINAIFGGLIMGAGVGFS | 158 |
| | | IP+ IL W K+G FT+++ ++V ++++F+ ++P+ +L+ D L+NA+FGG+I G+G + | |
| Sbjct: | 67 | IPVGILGWLKVGKSFTVYSILSVALTTLFMGILPETSLSHDILLNAVFGGVISAVGIGLT | 126 |
| Query: | 159 | FKSRISSGGTDIISLTIRKKTGRDVGSISFIINGIILLFAGLLFGWKYALYSMVTIFVSS | 218 |
| | | K S+GG DI+++ + K + VG+ FI+NGII+L AGLL GW+ ALY++VT++V++ | |
| Sbjct: | 127 | LKYGASTGGLDIVAMVLAKWKDKPVGTYFFILNGIIILTAGLLQGWEKALYTLVTLYVTT | 186 |
| Query: | 219 | RVTDAIFTKQKKMQAMIVTSKPYCVIKRIHRDLHRGVTCINDAEGTYNHEKKAVLITILT | 278 |
| | | RV DAI T+ K+ AMIVT K + + I+ + RG+T + A+G + +E+K ++I ++T | |
| Sbjct: | 187 | RVIDAIHTRHMKLTAMIVTKKADEIKEAIYGKMVRGITTV-PAKGAFTNEQKEMMIIVIT | 245 |
| Query: | 279 | REEFSDFKYLMLKADPKAFVSVAENVHIIGRFVDD | 313 |
| | | R E D + ++ + DPKAF ++ + I G F D | |
| Sbjct: | 246 | RYELYDLEKIVKEVDPKAFTNIVQTTGIFGFFRKD | 280 |

[5979] A related DNA sequence was identified in S. pyogenes <SEQ ID 3301> which encodes the amino acid sequence <SEQ ID 3302>. Analysis of this protein sequence reveals the following:

| Possible site: 53 | | | | |
|---|---|---|---|---|
| >>> Seems to have no N-terminal signal sequence | | | | |
| | INTEGRAL | Likelihood = −5.47 | Transmembrane | 87-103 (86-106) |
| | INTEGRAL | Likelihood = −4.94 | Transmembrane | 185-201 (182-203) |
| | INTEGRAL | Likelihood = −1.59 | Transmembrane | 114-130 (113-130) |
| | INTEGRAL | Likelihood = −1.12 | Transmembrane | 42-58 (42-58) |
| | INTEGRAL | Likelihood = −0.32 | Transmembrane | 140-156 (140-156) |

```
----- Final Results -----
                              bacterial membrane --- Certainty = 0.3187(Affirmative) < succ>
                                bacterial outside --- Certainty = 0.0000(Not Clear) < succ>
                            bacterial cytoplasm --- Certainty = 0.0000(Not Clear) < succ>
```

[5980] The protein has homology with the following sequences in the databases:

| >GP: CAA66894 GB: X98238 orf2 [Lactobacillus sakei] | | | |
|---|---|---|---|
| Identities = 105/280 (37%), Positives = 180/280 (63%), Gaps = 7/280 (2%) | | | |
| Query: | 37 | AEKISASLLYGILSSIAVNFFFQPGHVYSSGATGLAQVFSAL-SHRLLGYDFPIAFAFYL | 95 |
| | | +++I +++YG L++++VN F P YSSG TG+AQ+ +AL SH LG +A ++ | |
| Sbjct: | 8 | SKRIVIAMVYGFLAAVSVNLFLIPAKTYSSGVTGVAQLLTALVSH--LGGSLSVAALVFI | 65 |
| Query: | 96 | INIPLLILAWYKIGHQFTIFTFITVSMSSFFIQIMPQVT--LTTDPLINAIFGGLVMGMG | 153 |
| | | +N+PLL+LAW+KI HQ+ IF+ + V S F++I+P + T+ A+FGG ++G+G | |
| Sbjct: | 66 | LNVPLLVLAWFKINHQYAIFSIVAVFTSVIFLKIIPVPVQPILTERFAGALFGGALIGLG | 125 |
| Query: | 154 | IGTGLKSRISSGGTDIVSLTLRKRTGKDVGSLSLMVNGAILAFAGILFGWQYALYSMVSI | 213 |
| | | +G ++ S+GGTD++ + + TGK VG+++ ++NG I+ AGI FGW ALYS+V I | |
| Sbjct: | 126 | VGLCFRAGFSTGGTDVIVTLVGRLTGKRVGAVNNVINGMIILAAGIFFGWGAALYSIVEI | 185 |
| Query: | 214 | FVSSRVTDAIFTKQKKMQATIVTSHPERVIHMIHKRLHRGVTSINDAEGTYKHEQKAVLI | 273 |
| | | FVSS + D I+T+Q+K+ TI T PE + + + +H G T + D G Y +++ +V++ | |
| Sbjct: | 186 | FVSSLLMDYIYTQQQKVTVTIFTKQPEALKKRMREFIH-GATEL-DGTGLYTNQETSVIM | 243 |
| Query: | 274 | TILTCEEYPEFKWLMLKTDPQAFVSVAENVRIIGRFVEDD | 313 |
| | | T+++ + K ++ DP AFV++ + +GRF ++ | |
| Sbjct: | 244 | TVVSKYDLTALKLVVQDADPNAFVNIQSTMNLWGRFESNE | 283 |

[5981] An alignment of the GAS and GBS proteins is shown below.

| Identities = 239/311 (76%), Positives = 274/311 (87%) | | | |
|---|---|---|---|
| Query: | 4 | RRTPLEKKVKYIISVWAKKFGLLHTLKSISREKYAEKISASLLYGILSSVAVNFFFQPGH | 63 |
| | | ++T +KKVKY+IS AKK GLLH L+SISREKYAEKISASLLYGILSS+AVNFFFQPGH | |
| Sbjct: | 3 | KKTTYKKKVKYVISRGAKKVGLLHALRSISREKYAEKISASLLYGILSSIAVNFFFQPGH | 62 |
| Query: | 64 | VYSSGATGLAQVISAVSKHWFSFEIPVALAFYAINIPLLILSWRKIGHKFTIFTFITVTV | 123 |
| | | VYSSGATGLAQV SA+S ++ P+A AFY INIPLLIL+W KIGH+FTIFTFITV++ | |
| Sbjct: | 63 | VYSSGATGLAQVFSALSHRLLGYDFPIAFAFYLINIPLLILAWYKIGHQFTIFTFITVSM | 122 |
| Query: | 124 | SSIFIQLMPQITLTTDPLINAIFGGLIMGAGVGFSFKSRISSGGTDIISLTIRKKTGRDV | 183 |
| | | SS FIQ+MPQ+TLTTDPLINAIFGGL+MG G+G KSRISSGGTDI+SLT+RK+TG+DV | |
| Sbjct: | 123 | SSFFIQIMPQVTLTTDPLINAIFGGLVMGMGIGTGLKSRISSGGTDIVSLTLRKRTGKDV | 182 |
| Query: | 184 | GSISFIINGIILLFAGLLFGWKYALYSMVTIFVSSRVTDAIFTKQKKMQAMIVTSKPYCV | 243 |
| | | GS+S ++NG IL FAG+LFGW+YALYSMV+IFVSSRVTDAIFTKQKKMQA IVTS P V | |
| Sbjct: | 183 | GSLSLMVNGAILAFAGILFGWQYALYSMVSIFVSSRVTDAIFTKQKKMQATIVTSHPERV | 242 |
| Query: | 244 | IKRIHRDLHRGVTCINDAEGTYNHEKKAVLITILTREEFSDFKYLMLKADPKAFVSVAEN | 303 |
| | | I IH+ LHRGVT INDAEGTY HE+KAVLITILT EE+ +FK+LMLK DP+AFVSVAEN | |
| Sbjct: | 243 | IHMIHKRLHRGVTSINDAEGTYKHEQKAVLITILTCEEYPEFKWLMLKTDPQAFVSVAEN | 302 |
| Query: | 304 | VHIIGRFVDDD | 314 |
| | | V IIGRFV+DD | |
| Sbjct: | 303 | VRIIGRFVEDD | 313 |

[5982] Based on this analysis, it was predicted that these proteins and their epitopes could be useful antigens for vaccines or diagnostics.

### EXAMPLE 1073

[5983] A DNA sequence (GBSx1147) was identified in S. agalactiae <SEQ ID 3303> which encodes the amino acid sequence <SEQ ID 3304>. Analysis of this protein sequence reveals the following:

| Possible site: 26 | | | | |
|---|---|---|---|---|
| >>> Seems to have a cleavable N-term signal seq. | | | | |
| | INTEGRAL | Likelihood = −3.72 | Transmembrane | 156-172 (156-174) |
| | INTEGRAL | Likelihood = −3.03 | Transmembrane | 112-128 (110-129) |
| | INTEGRAL | Likelihood = −2.34 | Transmembrane | 80-96 (79-96) |
| | INTEGRAL | Likelihood = −1.49 | Transmembrane | 60-76 (58-76) |

```
----- Final Results -----
                              bacterial membrane --- Certainty = 0.2487(Affirmative) < succ>
                                bacterial outside --- Certainty = 0.0000(Not Clear) < succ>
                            bacterial cytoplasm --- Certainty = 0.0000(Not Clear) < succ>
```

[5984] The protein has homology with the following sequences in the GENPEPT database.

| >GP: BAB05397 GB: AP001512 unknown conserved | | | |
|---|---|---|---|
| protein [Bacillus halodurans] | | | |
| Identities = 113/278 (40%), Positives = 192/278 (68%), Gaps = 1/278 (0%) | | | |
| Query: | 7 | KTKIKETILIAFGVALYTFGFVKFNMANHLAEGGISGVTLIIHALFGVNPALSSLLLNIP | 66 |
| | | + K K + I G A+++FG V FNM N+LAEGG +G+TLI++ +F +NPA+++L+LNIP | |
| Sbjct: | 4 | RLKWKNIVFILLGSAIFSFGLVYFNMENNLAEGGFTGITLILYFMFQINPAVTNLVLNIP | 63 |
| Query: | 67 | LFILGARILGKKSLLLTIYGTVLMSFFMWFWQQIP-VTVPLKNDMMLVAVAAGILAGTGS | 125 |
| | | + ++G +ILG+ +L+ TI GTV +S F+ +Q+ + +PL +DM L A+ AG+ GTG | |
| Sbjct: | 64 | ILLIGWKILGRVTLIYTIIGTVSVSVFLEMFQRWKFMDIPLHDDMTLAALFAGVFVGTGL | 123 |
| Query: | 126 | GLVFRYGATTGGADIIGRIVEEKSGIKLGQTLLFIDAIVLTSSLVYINLQQMLYTLVASF | 185 |
| | | G+VFR+G TTGG DII ++ G +G+T+ DA+V+ SSL+Y+N ++ +YTL+A F | |
| Sbjct: | 124 | GIVFRFGGTTGGVDIIAKLGFRYLGWSMGKTMFMFDAVVIASSLIYLNYREAMYTLLAVF | 183 |
| Query: | 186 | VFSQVLTNVENGGYTVRGMIIITKESESAAATILHEINRGVTFLRGQGAYSGREHDVLYV | 245 |
| | | + ++V+ ++ Y+ + II++ +E+ A TIL E+ RG T L+G+G+++G E ++LY | |
| Sbjct: | 184 | IAAKVIDFIQQTAYSAKAAFIISEHTEAIADTILKEMERGATTLKGKGSFTGTEKEILYC | 243 |
| Query: | 246 | ALNPSEVRDVKEIMADLDPDAFISVINVDEVISSDFKI | 283 |
| | | + +E+ +K ++ +DP AF++V +V +VI F + | |
| Sbjct: | 244 | VVGRNELIRLKSLVERIDPHAFVTVNDVQDVIGEGFTL | 281 |

[5985] A related DNA sequence was identified in S. pyogenes <SEQ ID 3305> which encodes the amino acid sequence <SEQ ID 3306>. Analysis of this protein sequence reveals the following:

| Possible site: 26 | | | | |
|---|---|---|---|---|
| >>> Seems to have a cleavable N-term signal seq. | | | | |
| | INTEGRAL | Likelihood = −5.15 | Transmembrane | 112-128 (109-130) |
| | INTEGRAL | Likelihood = −2.34 | Transmembrane | 156-172 (156-174) |
| | INTEGRAL | Likelihood = −1.81 | Transmembrane | 178-194 (177-194) |
| | INTEGRAL | Likelihood = −1.65 | Transmembrane | 80-96 (79-96) |
| | INTEGRAL | Likelihood = −0.37 | Transmembrane | 60-76 (59-76) |

```
----- Final Results -----
                              bacterial membrane --- Certainty = 0.3060(Affirmative) < succ>
                                bacterial outside --- Certainty = 0.0000(Not Clear) < succ>
                            bacterial cytoplasm --- Certainty = 0.0000(Not Clear) < succ>
```

[5986] The protein has homology with the following sequences in the databases:

| >GP: BAB05397 GB: AP001512 unknown conserved | | | |
|---|---|---|---|
| protein [Bacillus halodurans] | | | |
| Identities = 116/276 (42%), Positives = 182/276 (65%), Gaps = 1/276 (0%) | | | |
| Query: | 9 | KLLKLFLIALGVAIYTFGFVNFNMANALAEGGVAGITLILHAHFGINPAYSSLLFNLPLF | 68 |
| | | K + I LG AI++FG V FNM N LAEGG GITLIL+ F INPA ++L+ N+P+ | |
| Sbjct: | 6 | KWKNIVFILLGSAIFSFGLVYFNMENNLAEGGFTGITLILYFMFQINPAVTNLVLNIPIL | 65 |
| Query: | 69 | ILGAKIFGKRSLALTIYGTVLMSAFIWMWQKVP-IELGLENDMMLVAVVAGLFSGIGSGI | 127 |
| | | ++G KI G+ +L TI GTV +S F+ M+Q+ +++ L +DM L A+ AG+F G G GI | |
| Sbjct: | 66 | LIGWKILGRVTLIYTIIGTVSVSVFLEMFQRWKFMDIPLHDDMTLAALFAGVFVGTGLGI | 125 |
| Query: | 128 | VFRYGATTGGTDIIGRIAEEKFGAKLGQTLLLVDALVLTASLTYVDLKHMLYTLVASFVF | 187 |
| | | VFR+G TTGG DII ++ G +G+T+ + DA+V+ +SL Y++ + +YTL+A F+ | |
| Sbjct: | 126 | VFRFGGTTGGVDIIAKLGFRYLGWSMGKTMFMFDAVVIASSLIYLNYREAMYTLLAVFIA | 185 |
| Query: | 188 | SQMISVVQNGGYTIRGMIIITKHSEAAAQAILTEINRGVTYLKGQGAYSGNDYNIMYVTL | 247 |
| | | +++I +Q Y+ + II++H+EA A IL E+ RG T LKG+G+++G + I+Y + | |
| Sbjct: | 186 | AKVIDFIQQTAYSAKAAFIISEHTEAIADTILKEMERGATTLKGKGSFTGTEKEILYCVV | 245 |
| Query: | 248 | NPTEVREVKRILAGLDPDAFISIIDVDEVISSDFKI | 283 |
| | | E+ +K ++ +DP AF+++ DV +VI F + | |
| Sbjct: | 246 | GRNELIRLKSLVERIDPHAFVTVNDVQDVIGEGFTL | 281 |

[5987] An alignment of the GAS and GBS proteins is shown below.

| Identities = 206/286 (72%), Positives = 250/286 (87%) | | | |
|---|---|---|---|
| Query: | 5 | DLKTKIKETILIAFGVALYTFGFVKFNMANHLAEGGISGVTLIIHALFGVNPALSSLLLN | 64 |
| | | D TK+ + LIA GVA+YTFGFV FNMAN LAEGG++G+TLI+HA FG+NPA SSLL N | |
| Sbjct: | 5 | DKLTKLLKLFLIALGVAIYTFGFVNFNMANALAEGGVAGITLILHAHFGINPAYSSLLFN | 64 |
| Query: | 65 | IPLFILGARILGKKSLLLTIYGTVLMSFFMWFWQQIPVTVPLKNDMMLVAVAAGILAGTG | 124 |
| | | +PLFILGA+I GK+SL LTIYGTVLMS F+W WQ++P+ + L+NDMMLVAV AG+ +G G | |
| Sbjct: | 65 | LPLFILGAKIFGKRSLALTIYGTVLMSAFIWMWQKVPIELGLENDMMLVAVVAGLFSGIG | 124 |
| Query: | 125 | SGLVFRYGATTGGADIIGRIVEEKSGIKLGQTLLFIDAIVLTSSLVYINLQQMLYTLVAS | 184 |
| | | SG+VFRYGATTGG DIIGRI EEK G KLGQTLL +DA+VLT+SL Y++L+ MLYTLVAS | |
| Sbjct: | 125 | SGIVFRYGATTGGTDIIGRIAEEKFGAKLGQTLLLVDALVLTASLTYVDLKHMLYTLVAS | 184 |
| Query: | 185 | FVFSQVLTNVENGGYTVRGMIIITKESESAAATILHEINRGVTFLRGQGAYSGREHDVLY | 244 |
| | | FVFSQ+++ V+NGGYT+RGMIIITK SE+AA IL EINRGVT+L+GQGAYSG +++++Y | |
| Sbjct: | 185 | FVFSQMISVVQNGGYTIRGMIIITKHSEAAAQAILTEINRGVTYLKGQGAYSGNDYNIMY | 244 |
| Query: | 245 | VALNPSEVRDVKEIMADLDPDAFISVINVDEVISSDFKIRRRNYDK | 290 |
| | | V LNP+EVR+VK I+A LDPDAFIS+I+VDEVISSDFKIRRRNYDK | |
| Sbjct: | 245 | VTLNPTEVREVKRILAGLDPDAFISIIDVDEVISSDFKIRRRNYDK | 290 |

[5988] Based on this analysis, it was predicted that these proteins and their epitopes could be useful antigens for vaccines or diagnostics.

### EXAMPLE 1074

[5989] A DNA sequence (GBSx1148) was identified in S. agalactiae <SEQ ID 3307> which encodes the amino acid sequence <SEQ ID 3308>. This protein is predicted to be BacB protein. Analysis of this protein sequence reveals the following:

```
Possible site: 60
>>> Seems to have no N-terminal signal sequence
----- Final Results -----
                            bacterial cytoplasm --- Certainty = 0.4355(Affirmative) < succ>
                              bacterial membrane --- Certainty = 0.0000(Not Clear) < succ>
                                bacterial outside --- Certainty = 0.0000(Not Clear) < succ>
```

[5990] The protein has homology with the following sequences in the GENPEPT database.

| >GP: BAA11330 GB: D78257 BacB [Enterococcus faecalis] | | | |
|---|---|---|---|
| Identities = 27/88 (30%), Positives = 48/88 (53%), Gaps = 1/88 (1%) | | | |
| Query: | 1 | MPSEKEILDALSKVYSEEVIQADDYFRQAIFELASQLEKEGMN-SLLATKIDSLINQYVL | 59 |
| | | M ++E+LD LSK Y++ I + + +FE A +L N + K+ ++ ++Y+ | |
| Sbjct: | 1 | MDKQQELLDLLSKAYNDPKINEYEGLKDKLFECAKRLTTNETNIGEVCYKLSTINSEYLA | 60 |
| Query: | 60 | THQFDAPKSIFDLSRLVKTKASHYKGTA | 87 |
| | | H F+ PKSI +L + V + Y+G A | |
| Sbjct: | 61 | RHHFEMPKSIIELQKFVTKEGQKYRGWA | 88 |

[5991] A related DNA sequence was identified in S. pyogenes <SEQ ID 3309> which encodes the amino acid sequence <SEQ ID 3310>. Analysis of this protein sequence reveals the following:

```
Possible site: 27
>>> Seems to have no N-terminal signal sequence
----- Final Results -----
                            bacterial cytoplasm --- Certainty = 0.2712(Affirmative) < succ>
                              bacterial membrane --- Certainty = 0.0000(Not Clear) < succ>
                                bacterial outside --- Certainty = 0.0000(Not Clear) < succ>
```

[5992] An alignment of the GAS and GBS proteins is shown below.

| Identities = 99/102 (97%), Positives = 102/102 (99%) | | | |
|---|---|---|---|
| Query: | 1 | MPSEKEILDALSKVYSEEVIQADDYFRQAIFELASQLEKEGMNSLLATKIDSLINQYVLT | 60 |
| | | MPSEKEILDALSKVYSE+VIQADDYFRQAIFELASQLEKEGM+SLLATKIDSLINQY+LT | |
| Sbjct: | 7 | MPSEKEILDALSKVYSEQVIQADDYFRQAIFELASQLEKEGMSSLLATKIDSLINQYILT | 66 |
| Query: | 61 | HQFDAPKSIFDLSRLVKTKASHYKGTAISAIMLGSFLSGGPK | 102 |
| | | HQFDAPKSIFDLSRLVKTKASHYKGTAISAIMLGSFLSGGPK | |
| Sbjct: | 67 | HQFDAPKSIFDLSRLVKTKASHYKGTAISAIMLGSFLSGGPK | 108 |

[5993] Based on this analysis, it was predicted that these proteins and their epitopes could be useful antigens for vaccines or diagnostics.

### EXAMPLE 1075

[5994] A DNA sequence (GBSx1149) was identified in S. agalactiae <SEQ ID 3311> which encodes the amino acid sequence <SEQ ID 3312>. This protein is predicted to be ArgS (argS). Analysis of this protein sequence reveals the following:

```
Possible site: 57
>>> Seems to have no N-terminal signal sequence
----- Final Results -----
                            bacterial cytoplasm --- Certainty = 0.2522(Affirmative) < succ>
                              bacterial membrane --- Certainty = 0.0000(Not Clear) < succ>
                                bacterial outside --- Certainty = 0.0000(Not Clear) < succ>
```

[5995] A related GBS nucleic acid sequence <SEQ ID 10271> which encodes amino acid sequence <SEQ ID 10272> was also identified.

[5996] The protein has homology with the following sequences in the GENPEPT database.

| >GP: AAF86984 GB: AF282249 ArgS [Lactococcus lactis subsp. lactis] | | | |
|---|---|---|---|
| Identities = 377/566 (66%), Positives = 464/566 (81%), Gaps = 5/566 (0%) | | | |
| Query: | 12 | MDTKHLIASEIQKVVPD-MEQSTILSLLETPKNSSMGDLAFPAFSLAKTLRKAPQIIASD | 70 |
| | | MD K L++ + + + I +++E PK+S +GDLAFPAF LAKTLRK+PQIIA + | |
| Sbjct: | 1 | MDEKQLVSQALSAAIDGVLGVEQIAAIIEKPKSSDLGDLAFPAFQLAKTLRKSPQIIAGE | 60 |
| Query: | 71 | IAEQIKSDQFEKVEAVGPYVNFFLDKAAISSQVLKQVLSDGSAYATQNIGEGRNVAIDMS | 130 |
| | | IAE+I + FEKV AVGPYVNFFLDK A +S+V+++VL++G Y NIGEG NV IDMS | |
| Sbjct: | 61 | IAEKIDTKGFEKVIAVGPYVNFFLDKNATASEVIREVLAEGEHYGDANIGEGGNVPIDMS | 120 |
| Query: | 131 | SPNIAKPFSIGHLRSTVIGDSLANIFDKIGYHPVKINHLGDWGKQFGMLIVAYKKWGNEE | 190 |
| | | +PNIAKPFSIGHLRSTVIGDS+A I++K+GY P+KINHLGDWGKQFG+LI AYKK+G+E | |
| Sbjct: | 121 | APNIAKPFSIGHLRSTVIGDSIAKIYEKLGYQPIKINHLGDWGKQFGLLITAYKKYGDEA | 180 |
| Query: | 191 | AVRAHPIDELLKLYVRINAEAETDPSVDEEAREWFRKLEANDPEATELWQWFRDESLLEF | 250 |
| | | + A+PIDELLKLYV+INAEA+ D VDEE R+WF K+E D EA +W+WF D SL+EF | |
| Sbjct: | 181 | TITANPIDELLKLYVKINAEAKEDSEVDEEGRQWFLKMEQGDEEALRIWKWFSDVSLIEF | 240 |
| Query: | 251 | NRLYDQMNVTFDSYNGEAFYNDKMDEVLELLESKNLLVESKGAQVVNLEKYGIEHPALIK | 310 |
| | | NR+Y ++ VTFD + GE+FY+DKMD ++E LE+KNLL ESKGA +V+LEKY + +PALIK | |
| Sbjct: | 241 | NRIYGKLGVTFDHFMGESFYSDKMDAIVEDLENKNLLHESKGALIVDLEKYNL-NPALIK | 299 |
| Query: | 311 | KSDGATLYITRDLAAALYRKRTYDFAKSIYVVGNEQSAHFKQLKAVLKEMDYDWSDDMTH | 370 |
| | | K+DGATLYITRDLA A YRK+T++F KS+YVVG EQ+ HFKQLKAVLKE YDWSDDM H | |
| Sbjct: | 300 | KTDGATLYITRDLATAAYRKKTFNFVKSLYVVGGEQTNHFKQLKAVLKEAGYDWSDDMVH | 359 |
| Query: | 371 | VPFGLVTKGGAKLSTRKGNVILLEPTVAEAINRAASQIEAKNPNLADKDKVAQAVGVGAI | 430 |
| | | VPFG+VT+GG K STRKG+V+ LE + EA++RA QIEAKNPNL +K++VA+ VGVGA+ | |
| Sbjct: | 360 | VPFGMVTQGGKKFSTRKGHVVKLEMALDEAVDRAEKQIEAKNPNLENKEEVAKQVGVGAV | 419 |
| Query: | 431 | KFYDLKTDRTNGYDFDLEAMVSFEGETGPYVQYAHARIQSILRKANFSPSNSDNYSL--N | 488 |
| | | KFYDLKTDR NGYDFDL+ MVSFEGETGPYVQYAHARIQSILRKAN N DN SL + | |
| Sbjct: | 420 | KFYDLKTDRNNGYDFDLDEMVSFEGETGPYVQYAHARIQSILRKAN-RKVNIDNISLVVS | 478 |
| Query: | 489 | DVESWEIIKLIQDFPRIIVRAADNFEPSIIAKFAINLAQCFNKYYAHTRILDEDAEISSR | 548 |
| | | D E+WEI+K +++FP I+ RAADN+EPSIIAK+AI+LAQ FNKYYAH RIL++DA++ R | |
| Sbjct: | 479 | DAEAWEIVKALKEFPNIVKRAADNYEPSIIAKYAISLAQAFNKYYAHVRILEDDAQLDGR | 538 |
| Query: | 549 | LALCYATATVLKESLRLLGVDAPNEM | 574 |
| | | LAL AT+ VLKE+LRLLGV AP M | |
| Sbjct: | 539 | LALISATSIVLKEALRLLGVAAPENM | 564 |

[5997] A related DNA sequence was identified in S. pyogenes <SEQ ID 3313> which encodes the amino acid sequence <SEQ ID 3314>. Analysis of this protein sequence reveals the following:

```
Possible site: 46
>>> Seems to have no N-terminal signal sequence
----- Final Results -----
                            bacterial cytoplasm --- Certainty = 0.1734(Affirmative) < succ>
                              bacterial membrane --- Certainty = 0.0000(Not Clear) < succ>
                                bacterial outside --- Certainty = 0.0000(Not Clear) < succ>
```

[5998] An alignment of the GAS and GBS proteins is shown below.

| Identities = 492/563 (87%), Positives = 526/563 (93%) | | | |
|---|---|---|---|
| Query: | 12 | MDTKHLIASEIQKVVPDMEQSTILSLLETPKNSSMGDLAFPAFSLAKTLRKAPQIIASDI | 71 |
| | | MDTK LIASEI KVVP++EQ I +LLETPKNS MGDLAFPAFSLAK LRKAPQ+IAS++ | |
| Sbjct: | 1 | MDTKTLIASEIAKVVPELEQDAIFNLLETPKNSDMGDLAFPAFSLAKVLRKAPQMIASEL | 60 |
| Query: | 72 | AEQIKSDQFEKVEAVGPYVNFFLDKAAISSQVLKQVLSDGSAYATQNIGEGRNVAIDMSS | 131 |
| | | AEQI QFEKV AVGPY+NFFLDKA ISSQVL+QV++ GS YA Q+ G+GRNVAIDMSS | |
| Sbjct: | 61 | AEQIDESQFEKVVAVGPYINFFLDKAKISSQVLEQVITAGSDYAQQDEGQGRNVAIDMSS | 120 |
| Query: | 132 | PNIAKPFSIGHLRSTVIGDSLANIFDKIGYHPVKINHLGDWGKQFGMLIVAYKKWGNEEA | 191 |
| | | PNIAKPFSIGHLRSTVIGDSLA+IF K+GY PVKINHLGDWGKQFGMLIVAYKKWG+E A | |
| Sbjct: | 121 | PNIAKPFSIGHLRSTVIGDSLAHIFAKMGYKPVKINHLGDWGKQFGMLIVAYKKWGDEAA | 180 |
| Query: | 192 | VRAHPIDELLKLYVRINAEAETDPSVDEEAREWFRKLEANDPEATELWQWFRDESLLEFN | 251 |
| | | V+AHPIDELLELYVERINAEAETDP+VDEEAREWFRKLE D EATELWQWFRDESLLEFN | |
| Sbjct: | 181 | VQAHPIDELLKLYVRINAEAETDPTVDEEAREWFRKLEDGDKEATELWQWFRDESLLEFN | 240 |
| Query: | 252 | RLYDQMNVTFDSYNGEAFYNDKMDEVLELLESKNLLVESKGAQVVNLEKYGIEHPALIKK | 311 |
| | | RLYDQ++VTFDSYNGEAFYNDKMDEVL+LLE+KNLLVESKGAQVVNLEKYGIEHPALIKK | |
| Sbjct: | 241 | RLYDQLHVTFDSYNGEAFYNDKMDEVLDLLEAKNLLVESKGAQVVNLEKYGIEHPALIKK | 300 |
| Query: | 312 | SDGATLYITRDLAAALYRKRTYDFAKSIYVVGNEQSAHFKQLKAVLKEMDYDWSDDMTHV | 371 |
| | | SDGATLYITRDLAAALYRKRTYDFAKS+YVVGNEQ+AHFKQLKAVLKEM YDWSDDMTHV | |
| Sbjct: | 301 | SDGATLYITRDLAAALYRKRTYDFAKSVYVVGNEQAAHFKQLKAVLKEMGYDWSDDMTHV | 360 |
| Query: | 372 | PFGLVTKGGAKLSTRKGNVILLEPTVAEAINRAASQIEAKNPNLADKDKVAQAVGVGAIK | 431 |
| | | FGLVTKGGAKLSTRKGNVILLEPTVAEAINRAASQIEAKNPNLADK+ VA AVGVGAIK | |
| Sbjct: | 361 | AFGLVTKGGAKLSTRKGNVILLEPTVAEAINRAASQIEAKNPNLADKEAVAHAVGVGAIK | 420 |
| Query: | 432 | FYDLKTDRTNGYDFDLEAMVSFEGETGPYVQYAHARIQSILRKANFSPSNSDNYSLNDVE | 491 |
| | | FYDLKTDR NGYDFDLEAMVSFEGETGPYVQYAHARIQSILRKA+F+PS + YSL D E | |
| Sbjct: | 421 | FYDLKTDRMNGYDFDLEAMVSFEGETGPYVQYAHARIQSILRKADFTPSATTTYSLADAE | 480 |
| Query: | 492 | SWEIIKLIQDFPRIIVRAADNFEPSIIAKFAINLAQCFNKYYAHTRILDEDAEISSRLAL | 551 |
| | | SWEIIKLIQDFPRII R +DNFEPSI+AKFAINLAQ FNKYYAHTRILD+++E +RLAL | |
| Sbjct: | 481 | SWEIIKLIQDFPRIIKRTSDNFEPSIMAKFAINLAQSFNKYYAHTRILDDNSERDNRLAL | 540 |
| Query: | 552 | CYATATVLKESLRLLGVDAPNEM | 574 |
| | | CYATATVLKE+LRLLGVDAPNEM | |
| Sbjct: | 541 | CYATATVLKEALRLLGVDAPNEM | 563 |

[5999] Based on this analysis, it was predicted that these proteins and their epitopes could be useful antigens for vaccines or diagnostics.

### EXAMPLE 1076

[6000] A DNA sequence (GBSx1150) was identified in S. agalactiae <SEQ ID 3315> which encodes the amino acid sequence <SEQ ID 3316>. This protein is predicted to be arginine hydroximate resistance protein (argR). Analysis of this protein sequence reveals the following:

```
Possible site: 42
>>> Seems to have no N-terminal signal sequence
----- Final Results -----
                            bacterial cytoplasm --- Certainty = 0.3252(Affirmative) < succ>
                              bacterial membrane --- Certainty = 0.0000(Not Clear) < succ>
                                bacterial outside --- Certainty = 0.0000(Not Clear) < succ>
```

[6001] A related GBS nucleic acid sequence <SEQ ID 10269> which encodes amino acid sequence <SEQ ID 10270> was also identified.

[6002] The protein has homology with the following sequences in the GENPEPT database.

| >GP: AAA88596 GB: M18729 unknown protein [Streptococcus pneumoniae] | | | |
|---|---|---|---|
| Identities = 63/141 (44%), Positives = 90/141 (63%) | | | |
| Query: | 4 | MNKIERQKRIKRLIQSGQIGTQEEIKLHLKNEGIDVTQATLSRDLREIGLLKLRSPEGKL | 63 |
| | | M K +R + IK++I ++ TQ+EI+ L+ + VTQ TLSRDLREIGL K++ + | |
| Sbjct: | 1 | MRKRDRHQLIKKMITEEKLSTQKEIQDRLEAHNVCVTQTTLSRDLREIGLTKVKKNDMVY | 60 |
| Query: | 64 | YYSLSTATSNRFSPALRSYILKVSRASFMLVLNTNLGEASVLANFIDEKGLPEILGTMAG | 123 |
| | | Y ++ L ++ V+RA F LVL+T LGEASVLAN +D ILGT+AG | |
| Sbjct: | 61 | YVLVNETEKIDLVEFLSHHLEGVARAEFTLVLHTKLGEASVLANIVDVNKDEWILGTVAG | 120 |
| Query: | 124 | ADTLLVICQNEDIAKVFEKEL | 144 |
| | | A+TLLVIC+++ +AK+ E L | |
| Sbjct: | 121 | ANTLLVICRDQHVAKLMEDRL | 141 |

[6003] A related DNA sequence was identified in S. pyogenes <SEQ ID 3317> which encodes the amino acid sequence <SEQ ID 3318>. Analysis of this protein sequence reveals the following:

```
Possible site: 42
>>> Seems to have no N-terminal signal sequence
----- Final Results -----
                            bacterial cytoplasm --- Certainty = 0.3176(Affirmative) < succ>
                              bacterial membrane --- Certainty = 0.0000(Not Clear) < succ>
                                bacterial outside --- Certainty = 0.0000(Not Clear) < succ>
```

[6004] An alignment of the GAS and GBS proteins is shown below.

| Identities = 101/145 (69%), Positives = 121/145 (82%) | | | |
|---|---|---|---|
| Query: | 4 | MNKIERQKRIKRLIQSGQIGTQEEIKLHLKNEGIDVTQATLSRDLREIGLLKLRSPEGKL | 63 |
| | | MNK+ERQ++IKR+IQ+ IGTQE+IK HL+ EGI VTQATLSRDLREIGLLKLR +GKL | |
| Sbjct: | 1 | MNKMERQQQIKRIIQAEHIGTQEDIKNHLQKEGIVVTQATLSRDLREIGLLKLRDEQGKL | 60 |
| Query: | 64 | YYSLSTATSNRFSPALRSYILKVSRASFMLVLNTNLGEASVLANFIDEKGLPEILGTMAG | 123 |
| | | YYSLS + FSP +R Y+LKV RA FMLVL+TNLGEA VLAN ID + +ILGT+AG | |
| Sbjct: | 61 | YYSLSEPVATPFSPEVRFYVLKVDRAGFMLVLHTNLGEADVLANLIDNDAIEDILGTIAG | 120 |
| Query: | 124 | ADTLLVICQNEDIAKVFEKELSVGL | 148 |
| | | ADTLLVIC++E+IAK FEK+L+ GL | |
| Sbjct: | 121 | ADTLLVICRDEEIAKRFEKDLAAGL | 145 |

[6005] Based on this analysis, it was predicted that these proteins and their epitopes could be useful antigens for vaccines or diagnostics.

### EXAMPLE 1077

[6006] A DNA sequence (GBSx1151) was identified in S. agalactiae <SEQ ID 3319> which encodes the amino acid sequence <SEQ ID 3320>. This protein is predicted to be DNA mismatch repair protein hexa (mutS). Analysis of this protein sequence reveals the following:

```
Possible site: 43
>>> Seems to have no N-terminal signal sequence
----- Final Results -----
                            bacterial cytoplasm --- Certainty = 0.3570(Affirmative) < succ>
                              bacterial membrane --- Certainty = 0.0000(Not Clear) < succ>
                                bacterial outside --- Certainty = 0.0000(Not Clear) < succ>
```

[6007] The protein has homology with the following sequences in the GENPEPT database.

| >GP: AAA88597 GB: M18729 mismatch repair protein [Streptococcus pneumoniae] | | | |
|---|---|---|---|
| Identities = 593/858 (69%), Positives = 698/858 (81%), Gaps = 14/858 (1%) | | | |
| Query: | 1 | MAKPTISPGMQQYLDIKENYPDAFLLFRMGDFYELFYDDAVKAAQILEISLTSRNKNAEK | 60 |
| | | MA +SPGMQQY+DIK+ YPDAFLLFRMGDFYELFY+DAV AAQILEISLTSRNKNA+ | |
| Sbjct: | 1 | MAIEKLSPGMQQYVDIKKQYPDAFLLFRMGDFYELFYEDAVNAAQILEISLTSRNKNADN | 60 |
| Query: | 61 | PIPMAGVPYHSAQQYIDVLVELGYKVAIAEQMEDPKKAVGVVKREVVQVVTPGTVVESTK | 120 |
| | | PIPMAGVPYHSAQQYIDVL+E GYKVAIAEQMEDPK+AVGVVKREVVQV+TPGTVV+S+K | |
| Sbjct: | 61 | PIPMAGVPYHSAQQYIDVLIEQGYKVAIAEQMEDPKQAVGVVKREVVQVITPGTVVDSSK | 120 |
| Query: | 121 | PDSANNFLVAIDSQDQQTFGLAYMDVSTGEFQATLLTDFESVRSEILNLKAREIVVGYQL | 180 |
| | | PDS NNFLV+ID + Q FGLAYMD+ TG+F T L DF V EI NLKARE+V+GY L | |
| Sbjct: | 121 | PDSQNNFLVSIDREGNQ-FGLAYMDLVTGDFYVTGLLDFTLVCGEIRNLKAREVVLGYDL | 179 |
| Query: | 181 | TDEKNHLLTKQMNLLLSYEDERLNDIHLIDEQLTDLEISAAEKLLQYVHRTQKRELSHLQ | 240 |
| | | ++E+ +L++QMNL+LSYE E D+HL+D +L +E +A+ KLLQYVHRTQ REL+HL+ | |
| Sbjct: | 180 | SEEEEQILSRQMNLVLSYEKESFEDLHLLDLRLATVEQTASSKLLQYVHRTQMRELNHLK | 239 |
| Query: | 241 | KVVHYEIKDYLQMSYATKNSLDLLENARTSKKHGSLYWLLDETKTAMGTRMLRTWIDRPL | 300 |
| | | V+ YEIKD+LQM YATK SLDL+ENAR+ KK GSL+WLLDETKTAMG R+LR+WI RPL | |
| Sbjct: | 240 | PVIRYEIKDFLQMDYATKASLDLVENARSGKKQGSLFWLLDETKTAMGMRLLRSWIHRPL | 299 |
| Query: | 301 | VSMNRIKERQDIIQVFLDYFFERNDLTESLKGVYDIERLASRVSFGKANPKDLLQLGQTL | 360 |
| | | + RI +RQ+++QVFLD+FFER+DLT+SLKGVYDIERLASRVSFGK NPKDLLQL TL | |
| Sbjct: | 300 | IDKERIVQRQEVVQVFLDHFFERSDLTDSLKGVYDIERLASRVSFGKTNPKDLLQLATTL | 359 |
| Query: | 361 | SQIPRIKMILQSFNQPELDIIVNKIDTMPELESLINTAIAPEAQATITEGNIIKSGFDKQ | 420 |
| | | S +PRI+ IL+ QP L ++ ++D +PELESLI+ AIAPEA IT+G II++GFD+ | |
| Sbjct: | 360 | SSVPRIRAILEGMEQPTLAYLIAQLDAIPELESLISAAIAPEAPHVITDGGIIRTGFDET | 419 |
| Query: | 421 | LDNYRTVMREGTGWIADIEAKERAASGIGTLKIDYNKKDGYYFHVTNSNLSLVPEHFFRK | 480 |
| | | LD YR V+REGT WIA+IEAKER SGI TLKIDYNKKDGYYFHVTNS L VP HFFRK | |
| Sbjct: | 420 | LDKYRCVLREGTSWIAEIEAKERENSGISTLKIDYNKKDGYYFHVTNSQLGNVPAHFFRK | 479 |
| Query: | 481 | ATLKNSERYGTAELAKIEGEMLEAREQSSNLEYDIFMRVRAQVESYIKRLQELAKTIATV | 540 |
| | | ATLKNSER+GT ELA+IEG+MLEARE+S+NLEY+IFMR+R +V YI+RLQ LA+ IATV | |
| Sbjct: | 480 | ATLKNSERFGTEELARIEGDMLEAREKSANLEYEIFMRIREEVGKYIQRLQALAQGIATV | 539 |
| Query: | 541 | DVLQSLAVVAENYHYVRPKFNDQHQIKIKNGRHATVEKVMGVQEYIPNSIYFDSQTDIQL | 600 |
| | | DVLQSLAVVAE H +RP+F D QI I+ GRHA VEKVMG Q YIPN+I T IQL | |
| Sbjct: | 540 | DVLQSLAVVAETQHLIRPEFGDDSQIDIRKGRHAVVEKVMGAQTYIPNTIQMAEDTSIQL | 599 |
| Query: | 601 | ITGPNMSGKSTYMRQLALTVIMAQMGGFVSADEVDLPVFDAIFTRIGAADDLISGQSTFM | 660 |
| | | +TGPNMSGKSTYMRQLA+T +MAQ+G +V A+ LP+FDAIFTRIGAADDL+SGQSTFM | |
| Sbjct: | 600 | VTGPNMSGKSTYMRQLAMTAVMAQLGSYVPAESAHLPIFDAIFTRIGAADDLVSGQSTFM | 659 |
| Query: | 661 | VEMMEANQAVKRASDKSLILFDELGRGTATYDGMALAQSIIEYIHDRVRAKTMFATHYHE | 720 |
| | | VEMMEAN A+ A+ SLILFDELGRGTATYDGMALAQSIIEYIH+ + + AKT+FATHYHE | |
| Sbjct: | 660 | VEMMEANNAISHATKNSLILFDELGRGTATYDGMALAQSIIEYIHEHIGAKTLFATHYHE | 719 |
| Query: | 721 | LTDLSEQLTRLVNVHVATLERDGEVTFLHKIESGPADKSYGIHVAKIAGLPIDLLDRATD | 780 |
| | | LT L L LVNVHVATLE+DG+VTFLHKIE GPADKSYGIHVAKIAGLP DLL RA | |
| Sbjct: | 720 | LTSLESSLQHLVNVHVATLEQDGQVTFLHKIEPGPADKSYGIHVAKIAGLPADLLARADK | 779 |
| Query: | 781 | ILSQLEADAVQLIVSPSQEAVTADLNEELDSEKQQGQLSLFEEPSNAGRVIEELEAIDIM | 840 |
| | | IL+QLE + SP T+ + E Q+SLF+ + ++ EL +D+ | |
| Sbjct: | 780 | ILTQLENQGTE---SPPPMRQTSAVTE---------QISLFDR-AEEHPILAELAKLDVY | 826 |
| Query: | 841 | NLTPMQAMNAIFDLKKLL | 858 |
| | | N+TPMQ MN + +LK+ L | |
| Sbjct: | 827 | NMTPMQVMNVLVELKQKL | 844 |

[6008] A related DNA sequence was identified in S. pyogenes <SEQ ID 3321> which encodes the amino acid sequence <SEQ ID 3322>. Analysis of this protein sequence reveals the following:

| Possible site: 58 | | | | |
|---|---|---|---|---|
| >>> Seems to have no N-terminal signal sequence | | | | |
| | INTEGRAL | Likelihood = −1.38 | Transmembrane | 532-548 (532-549) |

```
----- Final Results -----
                              bacterial membrane --- Certainty = 0.1553(Affirmative) < succ>
                                bacterial outside --- Certainty = 0.0000(Not Clear) < succ>
                            bacterial cytoplasm --- Certainty = 0.0000(Not Clear) < succ>
```

[6009] An alignment of the GAS and GBS proteins is shown below.

| Identities = 661/858 (77%), Positives = 746/858 (86%), Gaps = 7/858 (0%) | | | |
|---|---|---|---|
| Query: | 1 | MAKPTISPGMQQYLDIKENYPDAFLLFRMGDFYELFYDDAVKAAQILEISLTSRNKNAEK | 60 |
| | | MAK ISPGMQQYLDIK++YPDAFLLFRMGDFYELFY+DAVKAAQ+LEI LTSRNKNAE | |
| Sbjct: | 1 | MAKTNISPGMQQYLDIKKDYPDAFLLFRMGDFYELFYEDAVKAAQLLEIGLTSRNKNAEN | 60 |
| Query: | 61 | PIPMAGVPYHSAQQYIDVLVELGYKVAIAEQMEDPKKAVGVVKREVVQVVTPGTVVESTK | 120 |
| | | PIPMAGVP+HSAQQYIDVL+ELGYKVA+AEQMEDPK+AVGVVKREVVQV+TPGTVV+S K | |
| Sbjct: | 61 | PIPMAGVPHHSAQQYIDVLIELGYKVAVAEQMEDPKQAVGVVKREVVQVITPGTVVDSAK | 120 |
| Query: | 121 | PDSANNFLVAIDSQDQQTFGLAYMDVSTGEFQATLLTDFESVRSEILNLKAREIVVGYQL | 180 |
| | | PDSANNFLVA+D D +GLAYMDVSTGEF T L DF SVRSEI NLKA+E+++G+ L | |
| Sbjct: | 121 | PDSANNFLVAVDF-DGCRYGLAYMDVSTGEFCVTDLADFTSVRSEIQNLKAKEVLLGFDL | 179 |
| Query: | 181 | TDEKNHLLTKQMNLLLSYEDERLNDIHLIDEQLTDLEISAAEKLLQYVHRTQKRELSHLQ | 240 |
| | | ++E+ +L KQMNLLLSYE+ D LID QLT +E++AA KLLQYVH+TQ RELSHLQ | |
| Sbjct: | 180 | SEEEQTILVKQMNLLLSYEETVYEDKSLIDGQLTTVELTAAGKLLQYVHKTQMRELSHLQ | 239 |
| Query: | 241 | KVVHYEIKDYLQMSYATKNSLDLLENARTSKKHGSLYWLLDETKTAMGTRMLRTWIDRPL | 300 |
| | | +VHYEIKDYLQMSYATK+SLDL+ENART+KKHGSLYWLLDETKTAMG R+LR+WIDRPL | |
| Sbjct: | 240 | ALVHYEIKDYLQMSYATKSSLDLVENARTNKKHGSLYWLLDETKTAMGMRLLRSWIDRPL | 299 |
| Query: | 301 | VSMNRIKERQDIIQVFLDYFFERNDLTESLKGVYDIERLASRVSFGKANPKDLLQLGQTL | 360 |
| | | VS I ERQ+IIQVFL+ F ER DL+ SLKGVYDIERL+SRVSFGKANPKDLLQLG TL | |
| Sbjct: | 300 | VSKEAILERQEIIQVFLNAFIERTDLSNSLKGVYDIERLSSRVSFGKANPKDLLQLGHTL | 359 |
| Query: | 361 | SQIPRIKMILQSFNQPELDIIVNKIDTMPELESLINTAIAPEAQATITEGNIIKSGFDKQ | 420 |
| | | +Q+P IK IL+SF+ P +D +VN ID++PELE LI TAI P+A ATI+EG+II++GFD++ | |
| Sbjct: | 360 | AQVPYIKAILESFDSPCVDKLVNDIDSLPELEYLIRTAIDPDAPATISEGSIIRNGFDER | 419 |
| Query: | 421 | LDNYRTVMREGTGWIADIEAKERAASGIGTLKIDYNKKDGYYFHVTNSNLSLVPEHFFRK | 480 |
| | | LD+YR VMREGTGWIADIEAKER ASGI LKIDYNKKDGYYFHVTNSNLSLVPEHFFRK | |
| Sbjct: | 420 | LDHYRKVMREGTGWIADIEAKERQASGINNLKIDYNKKDGYYFHVTNSNLSLVPEHFFRK | 479 |
| Query: | 481 | ATLKNSERYGTAELAKIEGEMLEAREQSSNLEYDIFMRVRAQVESYIKRLQELAKTIATV | 540 |
| | | ATLKNSERYGTAELAKIEG+MLEARE+SS+LEYDIFM +RAQVE+YI RLQ+LAK +ATV | |
| Sbjct: | 480 | ATLKNSERYGTAELAKIEGQMLEAREESSSLEYDIFMCIRAQVETYINRLQKLAKILATV | 539 |
| Query: | 541 | DVLQSLAVVAENYHYVRPKFNDQHQIKIKNGRHATVEKVMGVQEYIPNSIYFDSQTDIQL | 600 |
| | | DVLQSLAVVAE HY+RP+FND H I I+ GRHA VEKVMGVQEYIPNSI FD QT IQL | |
| Sbjct: | 540 | DVLQSLAVVAETNHYIRPQFNDNHVITIQEGRHAVVEKVMGVQEYIPNSISFDQQTSIQL | 599 |
| Query: | 601 | ITGPNMSGKSTYMRQLALTVIMAQMGGFVSADEVDLPVFDAIFTRIGAADDLISGQSTFM | 660 |
| | | ITGPNMSGKSTYMRQLALTVIMAQMG FV+AD VDLP+FDAIFTRIGAADDLISGQSTFM | |
| Sbjct: | 600 | ITGPNMSGKSTYMRQLALTVIMAQMGSFVAADHVDLPLFDAIFTRIGAADDLISGQSTFM | 659 |
| Query: | 661 | VEMMEANQAVKRASDKSLILFDELGRGTATYDGMALAQSIIEYIHDRVRAKTMFATHYHE | 720 |
| | | VEMMEANQA+KRASD SLILFDELGRGTATYDGMALAQ+IIEYIHDRV AKT+FATHYHE | |
| Sbjct: | 660 | VEMMEANQAIKRASDNSLILFDELGRGTATYDGMALAQAIIEYIHDRVGAKTIFATHYHE | 719 |
| Query: | 721 | LTDLSEQLTRLVNVHVATLERDGEVTFLHKIESGPADKSYGIHVAKIAGLPIDLLDRATD | 780 |
| | | LTDLS LT LVNVHVATLE+DG+VTFLHKI GPADKSYGIHVAKIAGLP LL RA + | |
| Sbjct: | 720 | LTDLSTNLTSLVNVHVATLEKDGDVTFLHKIAEGPADKSYGIHVAKIAGLPKSLLKRADE | 779 |
| Query: | 781 | ILSQLEADAVQLIVSPSQEAVTADLNEELDSEKQQGQLSLFEEPSNAGRVIEELEAIDIM | 840 |
| | | +L++LE S S E ++ E S +QGQLSLF + A + + LE ID+M | |
| Sbjct: | 780 | VLTRLETQ------SRSTEIISVPSQVESSSAVRQGQLSLFGDEEKAHEIRQALEVIDVM | 833 |
| Query: | 841 | NLTPMQAMNAIFDLKKLL | 858 |
| | | N+TP+QAM +++LKKLL | |
| Sbjct: | 834 | NMTPLQAMTTLYELKKLL | 851 |

[6010] Based on this analysis, it was predicted that these proteins and their epitopes could be useful antigens for vaccines or diagnostics.

### EXAMPLE 1078

[6011] A DNA sequence (GBSx1152) was identified in S. agalactiae <SEQ ID 3323> which encodes the amino acid sequence <SEQ ID 3324>. This protein is predicted to be cold shock protein-related protein. Analysis of this protein sequence reveals the following:

```
Possible site: 28
>>> Seems to have no N-terminal signal sequence
----- Final Results -----
                            bacterial cytoplasm --- Certainty = 0.2095(Affirmative) < succ>
                              bacterial membrane --- Certainty = 0.0000(Not Clear) < succ>
                                bacterial outside --- Certainty = 0.0000(Not Clear) < succ>
```

[6012] The protein has homology with the following sequences in the GENPEPT database.

| >GP: CAB69404 GB: A91080 unnamed protein product [unidentified] | | | |
|---|---|---|---|
| Identities = 48/63 (76%), Positives = 56/63 (88%) | | | |
| Query: | 1 | MTQGTVKWFNSEKGFGFISSETGTDVFAHFSEIKVDGFKTLEEGQKVTFDIQDGQRGPQA | 60 |
| | | MT+GTVKWFN +KGFGFI+SE G DVFAHFS+I+ GFKTL+EGQKVTFD++ GQRGPQA | |
| Sbjct: | 1 | MTKGTVKWFNPDKGFGFITSEDGQDVFAHFSQIQTSGFKTLDEGQKVTFDVEAGQRGPQA | 60 |
| Query: | 61 | TNI | 63 |
| | | NI | |
| Sbjct: | 61 | VNI | 63 |

[6013] A related DNA sequence was identified in S. pyogenes <SEQ ID 3325> which encodes the amino acid sequence <SEQ ID 3326>. Analysis of this protein sequence reveals the following:

```
Possible site: 30
>>> Seems to have no N-terminal signal sequence
----- Final Results -----
                            bacterial cytoplasm --- Certainty = 0.2350(Affirmative) < succ>
                              bacterial membrane --- Certainty = 0.0000(Not Clear) < succ>
                                bacterial outside --- Certainty = 0.0000(Not Clear) < succ>
```

[6014] An alignment of the GAS and GBS proteins is shown below.

| Identities = 49/63 (77%), Positives = 56/63 (88%) | | | |
|---|---|---|---|
| Query: | 1 | MTQGTVKWFNSEKGFGFISSETGTDVFAHFSEIKVDGFKTLEEGQKVTFDIQDGQRGPQA | 60 |
| | | M QGTVKWFN+EKGFGFIS+E G DVFAHFS I+ +GFKTLEEGQKV FD+++GQRGPQA | |
| Sbjct: | 3 | MAQGTVKWFNAEKGFGFISTENGQDVFAHFSAIQTNGFKTLEEGQKVAFDVEEGQRGPQA | 62 |
| Query: | 61 | TNI | 63 |
| | | NI | |
| Sbjct: | 63 | VNI | 65 |

[6015] Based on this analysis, it was predicted that these proteins and their epitopes could be useful antigens for vaccines or diagnostics.

### EXAMPLE 1079

[6016] A DNA sequence (GBSx1153) was identified in S. agalactiae <SEQ ID 3327> which encodes the amino acid sequence <SEQ ID 3328>. Analysis of this protein sequence reveals the following:

```
Possible site: 13
>>> Seems to have no N-terminal signal sequence
----- Final Results -----
                            bacterial cytoplasm --- Certainty = 0.6378(Affirmative) < succ>
                              bacterial membrane --- Certainty = 0.0000(Not Clear) < succ>
                                bacterial outside --- Certainty = 0.0000(Not Clear) < succ>
```

[6017] The protein has no significant homology with any sequences in the GENPEPT database.

[6018] No corresponding DNA sequence was identified in S. pyogenes.

[6019] Based on this analysis, it was predicted that this protein and its epitopes, could be useful antigens for vaccines or diagnostics.

### EXAMPLE 1080

[6020] A DNA sequence (GBSx1154) was identified in S. agalactiae <SEQ ID 3329> which encodes the amino acid sequence <SEQ ID 3330>. This protein is predicted to be DNA mismatch repair protein hexb (mutL). Analysis of this protein sequence reveals the following:

```
Possible site: 37
>>> Seems to have no N-terminal signal sequence
----- Final Results -----
                            bacterial cytoplasm --- Certainty = 0.2242(Affirmative) < succ>
                              bacterial membrane --- Certainty = 0.0000(Not Clear) < succ>
                                bacterial outside --- Certainty = 0.0000(Not Clear) < succ>
```

[6021] A related GBS nucleic acid sequence <SEQ ID 10267> which encodes amino acid sequence <SEQ ID 10268> was also identified.

[6022] The protein has homology with the following sequences in the GENPEPT database.

| >GP: AAA88600 GB: M29686 mismatch repair protein [Streptococcus pneumoniae] | | | |
|---|---|---|---|
| Identities = 452/657 (68%), Positives = 543/657 (81%), Gaps = 8/657 (1%) | | | |
| Query: | 20 | LSKIIELPDILANQIAAGEVVERPSSVVKELVENAIDAGSSQITIEVEESGLKKIQITDN | 79 |
| | | +S IIELP++LANQIAAGEV+ERP+SV KELVENAIDAGSSQI IE+EE+GLKK+QITDN | |
| Sbjct: | 1 | MSHIIELPEMLANQIAAGEVIERPASVCKELVENAIDAGSSQIIIEIEEAGLKKVQITDN | 60 |
| Query: | 80 | GEGMTSEDAVLSLRRHATSKIKSQSDLFRIRTLGFRGEALPSIASISLMTIKTATEQGKQ | 139 |
| | | G G+ ++ L+LRRHATSKIK+Q+DLFRIRTLGFRGEALPSIAS+S++T+ TA + | |
| Sbjct: | 61 | GHGIAHDEVELALRRHATSKIKNQADLFRIRTLGFRGEALPSIASVSVLTLLTAVDGASH | 120 |
| Query: | 140 | GTLLVAKGGNIEKQEVVSSPRGTKILVENLFFNTPARLKYMKSLQSELAHIIDIVNRLSL | 199 |
| | | GT LVA+GG +E+ +SP GTK+ VE+LFFNTPARLKYMKS Q+EL+HIIDIVNRL L | |
| Sbjct: | 121 | GTKLVARGGEVEEVIPATSPVGTKVCVEDLFFNTPARLKYMKSQQAELSHIIDIVNRLGL | 180 |
| Query: | 200 | AHPEVAFTLINDGKEMTKTSGTGDLRQAIAGIYGLNTAKKMIEISNADLDFEISGYVSLP | 259 |
| | | AHPE++F+LI+DGKEMT+T+GTG LRQAIAGIYGL +AKKMIEI N+DLDFEISG+VSLP | |
| Sbjct: | 181 | AHPEISFSLISDGKEMTRTAGTGQLRQAIAGIYGLVSAKKMIEIENSDLDFEISGFVSLP | 240 |
| Query: | 260 | ELTRANRNYITLLINGRYIKNFLLNRSILDGYGSKLMVGRFPIAVIDIQIDPYLADVNVH | 319 |
| | | ELTRANRNYI+L INGRYIKNFLLNR+ILDG+GSKLMVGRFP+AVI I IDPYLADVNVH | |
| Sbjct: | 241 | ELTRANRNYISLFINGRYIKNFLLNRAILDGFGSKLMVGRFPLAVIHIHIDPYLADVNVH | 300 |
| Query: | 320 | PTKQEVRISKERELMSLISTAISESLKQYDLIPDALENLAKTSTRSVDKPIQTSFSLKQP | 379 |
| | | PTKQEVRISKE+ELM+L+S AI+ SLK+ LIPDALENLAK++ R+ +K QT LK+ | |
| Sbjct: | 301 | PTKQEVRISKEKELMTLVSEAIANSLKEQTLIPDALENLAKSTVRNREKVEQTILPLKEN | 360 |
| Query: | 380 | GLYYDRAKNDFFIGADTVSEPIANFTNLDKSDGSVDNDVKNSVNQGATQSPNIKYASRDQ | 439 |
| | | LYY++ + + +E L + K ++++ T+ + +A R | |
| Sbjct: | 361 | TLYYEKTEP----SRPSQTEVADYQVELTDEGQDLTLFAKETLDR-LTKPAKLHFAERKP | 415 |
| Query: | 440 | ADSENFIHSQDYLSSKQSLNKLVEKLDSEESSTFPELEFFGQMHGTYLFAQGNGGLYIID | 499 |
| | | A+ + H + L+ S++K +KL+ EE+S+FPELEFFGQMHGTYLFAQG GLYIID | |
| Sbjct: | 416 | ANYDQLDHPELDLA---SIDKAYDKLEREEASSFPELEFFGQMHGTYLFAQGRDGLYIID | 472 |
| Query: | 500 | QHAAQERVKYEYYREKIGEVDNSLQQLLVPFLFEFSSSDFLQLQEKMSLLQDVGIFLEPY | 559 |
| | | QHAAQERVKYE YRE IG VD S QQLLVP++FEF + D L+L+E+M LL++VG+FL Y | |
| Sbjct: | 473 | QHAAQERVKYEEYRESIGNVDQSQQQLLVPYIFEFPADDALRLKERMPLLEEVGVFLAEY | 532 |
| Query: | 560 | GNNTFILREHPIWMKEEEVESGIYEMCDMLLLTNEVSVKKYRAELAIMMSCKRSIKANHT | 619 |
| | | G N FILREHPIWM EEE+ESGIYEMCDMLLLT EVS+KKYRAELAIMMSCKRSIKANH | |
| Sbjct: | 533 | GENQFILREHPIWMAEEEIESGIYEMCDMLLLTKEVSIKKYRAELAIMMSCKRSIKANHR | 592 |
| Query: | 620 | LDDYSARHLLDQLAQCKNPYNCPHGRPVLVNFTKADMEKMFKRIQENHTSLRDLGKY | 676 |
| | | +DD+SAR LL QL+QC NPYNCPHGRPVLV+FTK+DMEKMF+RIQENHTSLR+LGKY | |
| Sbjct: | 593 | IDDHSARQLLYQLSQCDNPYNCPHGRPVLVHFTKSDMEKMFRRIQENHTSLRELGKY | 649 |

[6023] A related DNA sequence was identified in S. pyogenes <SEQ ID 3331> which encodes the amino acid sequence <SEQ ID 3332>. Analysis of this protein sequence reveals the following:

```
Possible site: 25
>>> Seems to have no N-terminal signal sequence
----- Final Results -----
                            bacterial cytoplasm --- Certainty = 0.1854(Affirmative) < succ>
                              bacterial membrane --- Certainty = 0.0000(Not Clear) < succ>
                                bacterial outside --- Certainty = 0.0000(Not Clear) < succ>
```

[6024] An alignment of the GAS and GBS proteins is shown below.

| Identities = 502/663 (75%), Positives = 574/663 (85%), Gaps = 9/663 (1%) | | | |
|---|---|---|---|
| Query: | 20 | LSKIIELPDILANQIAAGEVVERPSSVVKELVENAIDAGSSQITIEVEESGLKKIQITDN | 79 |
| | | ++ IIELP++LANQIAAGEVVERP+SVVKELVENAIDA SSQIT+E+EESGLK IQ+TDN | |
| Sbjct: | 14 | MTNIIELPEVLANQIAAGEVVERPASVVKELVENAIDAKSSQITVEIEESGLKMIQVTDN | 73 |
| Query: | 80 | GEGMTSEDAVLSLRRHATSKIKSQSDLFRIRTLGFRGEALPSIASISLMTIKTATEQGKQ | 139 |
| | | GEGM+ ED LSLRRHATSKIKSQSDLFRIRTLGFRGEALPS+ASIS +TIKTAT++ | |
| Sbjct: | 74 | GEGMSHEDLPLSLRRHATSKIKSQSDLFRIRTLGFRGEALPSVASISKITIKTATKEVTH | 133 |
| Query: | 140 | GTLLVAKGGNIEKQEVVSSPRGTKILVENLFFNTPARLKYMKSLQSELAHIIDIVNRLSL | 199 |
| | | G+LL+A GG IE E +S+P GTKI VENLF+NTPARLKYMKSLQ+ELAHI+D+VNRLSL | |
| Sbjct: | 134 | GSLLIATGGEIETLEAISTPTGTKIKVENLFYNTPARLKYMKSLQAELAHIVDVVNRLSL | 193 |
| Query: | 200 | AHPEVAFTLINDGKEMTKTSGTGDLRQAIAGIYGLNTAKKMIEISNADLDFEISGYVSLP | 259 |
| | | AHPEVAFTLI+DG+++T+TSGTGDLRQAIAGIYGLNT KKM+ ISNADLDFE+SGYVSLP | |
| Sbjct: | 194 | AHPEVAFTLISDGRQLTQTSGTGDLRQAIAGIYGLNTTKKMLAISNADLDFEVSGYVSLP | 253 |
| Query: | 260 | ELTRANRNYITLLINGRYIKNFLLNRSILDGYGSKLMVGRFPIAVIDIQIDPYLADVNVH | 319 |
| | | ELTRANRNY+T+L+NGRYIKNFLLNR+ILDGYGSKLMVGRFPI VIDIQIDPYLADVNVH | |
| Sbjct: | 254 | ELTRANRNYMTILVNGRYIKNFLLNRAILDGYGSKLMVGRFPIVVIDIQIDPYLADVNVH | 313 |
| Query: | 320 | PTKQEVRISKERELMSLISTAISESLKQYDLIPDALENLAKTSTRSVDKPIQTSFSLKQP | 379 |
| | | PTKQEVRISKERELM+LISTAISESLK+ DLIPDALENLAK+STR KP QT L+ | |
| Sbjct: | 314 | PTKQEVRISKERELMALISTAISESLKEQDLIPDALENLAKSSTRHFSKPEQTQLPLQSR | 373 |
| Query: | 380 | GLYYDRAKNDFFIGADTVSEPIANFTNLDKSDGSVDNDVKNSV------NQGATQSPNIK | 433 |
| | | GLYYD KNDFF+ VSE I D G+VDN VK ++ K | |
| Sbjct: | 374 | GLYYDPQKNDFFVKESAVSEKI---PETDFYSGAVDNSVKVEKVELLPHSEEVIGPSSVK | 430 |
| Query: | 434 | YASRDQADSENFIHSQDYLSSKQSLNKLVEKLDSEESSTFPELEFFGQMHGTYLFAQGNG | 493 |
| | | +ASR Q H L ++Q L++++ +L++E S FPEL++FGQMHGTYLFAQG | |
| Sbjct: | 431 | HASRPQNTFTETDHPNLDLKNRQKLSQMLTRLENEGQSVFPELDYFGQMHGTYLFAQGKD | 490 |
| Query: | 494 | GLYIIDQHAAQERVKYEYYREKIGEVDNSLQQLLVPFLFEFSSSDFLQLQEKMSLLQDVG | 553 |
| | | GL+IIDQHAAQERVKYEYYR+KIGEVD+SLQQLLVP+LFEFS SDF+ LQEKM+LL +VG | |
| Sbjct: | 491 | GLFIIDQHAAQERVKYEYYRDKIGEVDSSLQQLLVPYLFEFSGSDFINLQEKMALLNEVG | 550 |
| Query: | 554 | IFLEPYGNNTFILREHPIWMKEEEVESGIYEMCDMLLLTNEVSVKKYRAELAIMMSCKRS | 613 |
| | | IFLE YG+NTFILREHPIWMKEEE+ SG+YEMCDMLLLTNEVS+K YRAELAIMMSCKRS | |
| Sbjct: | 551 | IFLEVYGHNTFILREHPIWMKEEEIASGVYEMCDMLLLTNEVSIKTYRAELAIMMSCKRS | 610 |
| Query: | 614 | IKANHTLDDYSARHLLDQLAQCKNPYNCPHGRPVLVNFTKADMEKMFKRIQENHTSLRDLGKY | 676 |
| | | IKANH+LDDYSAR+LL QLAQC+NPYNCPHGRPVL+NF+KADMEKMF+RIQENHTSLR+LGKY | |
| Sbjct: | 611 | IKANHSLDDYSARNLLLQLAQCQNPYNCPHGRPVLINFSKADMEKMFRRIQENHTSLRELGKY | 673 |

[6025] Based on this analysis, it was predicted that these proteins and their epitopes could be useful antigens for vaccines or diagnostics.

### EXAMPLE 1081

[6026] A DNA sequence (GBSx1155) was identified in S. agalactiae <SEQ ID 3333> which encodes the amino acid sequence <SEQ ID 3334>. Analysis of this protein sequence reveals the following:

```
Possible site: 15
>>> Seems to have no N-terminal signal sequence
----- Final Results -----
                            bacterial cytoplasm --- Certainty = 0.3372(Affirmative) < succ>
                              bacterial membrane --- Certainty = 0.0000(Not Clear) < succ>
                                bacterial outside --- Certainty = 0.0000(Not Clear) < succ>
```

[6027] The protein has no significant homology with any sequences in the GENPEPT database.

[6028] No corresponding DNA sequence was identified in S. pyogenes.

[6029] Based on this analysis, it was predicted that this protein and its epitopes, could be useful antigens for vaccines or diagnostics.

### EXAMPLE 1082

[6030] A DNA sequence (GBSx1156) was identified in S. agalactiae <SEQ ID 3335> which encodes the amino acid sequence <SEQ ID 3336>. Analysis of this protein sequence reveals the following:

| Possible site: 43 | | | | |
|---|---|---|---|---|
| >>> Seems to have no N-terminal signal sequence | | | | |
| | INTEGRAL | Likelihood = −14.01 | Transmembrane | 176-192 (170-197) |
| | INTEGRAL | Likelihood = −8.07 | Transmembrane | 390-406 (387-412) |
| | INTEGRAL | Likelihood = −6.10 | Transmembrane | 271-287 (269-291) |
| | INTEGRAL | Likelihood = −6.00 | Transmembrane | 83-99 (82-101) |
| | INTEGRAL | Likelihood = −4.78 | Transmembrane | 51-67 (50-71) |
| | INTEGRAL | Likelihood = −2.92 | Transmembrane | 303-319 (302-320) |
| | INTEGRAL | Likelihood = −2.76 | Transmembrane | 363-379 (362-381) |
| | INTEGRAL | Likelihood = −2.39 | Transmembrane | 152-168 (151-169) |
| | INTEGRAL | Likelihood = −2.02 | Transmembrane | 325-341 (325-342) |
| | INTEGRAL | Likelihood = −1.65 | Transmembrane | 226-242 (226-242) |
| | INTEGRAL | Likelihood = −0.90 | Transmembrane | 24-40 (24-40) |
| | INTEGRAL | Likelihood = −0.27 | Transmembrane | 111-127 (111-127) |

```
----- Final Results -----
                              bacterial membrane --- Certainty = 0.6604(Affirmative) < succ>
                                bacterial outside --- Certainty = 0.0000(Not Clear) < succ>
                            bacterial cytoplasm --- Certainty = 0.0000(Not Clear) < succ>
```

[6031] A related GBS nucleic acid sequence <SEQ ID 10265> which encodes amino acid sequence <SEQ ID 10266> was also identified.

[6032] The protein has homology with the following sequences in the GENPEPT database.

| >GP: CAA61918 GB: X89779 LmrP integral membrane protein [Lactococcus | | | |
|---|---|---|---|
| lactis] | | | |
| Identities = 145/401 (36%), Positives = 236/401 (58%), Gaps = 4/401 (0%) | | | |
| Query: | 9 | VKEFFALPKQLQLRELLRFISITVGSAIFPFMAMYYVQYFGNLVTGILIIITQLSGFVAT | 68 |
| | | +KEF+ L K LQLR + F+ +F M +YY QY G+ +TGIL+ ++ ++ FVA | |
| Sbjct: | 1 | MKEFWNLDKNLQLRLGIVFLGAFSYGTVFSSMTIYYNQYLGSAITGILLALSAVATFVAG | 60 |
| Query: | 69 | LYGGHLSDAMGRKKVVIIGSLLATIGWAITIAANVPNHITPHLTFVGILIIEIAHQFYFP | 128 |
| | | + G +D GRK V++ G+++ +G A+ IA+N+P H+ P TF+ L+I +F | |
| Sbjct: | 61 | ILAGFFADRNGRKPVMVFGTIIQLLGAALAIASNLPGHVNPWSTFIAFLLISFGYNFVIT | 120 |
| Query: | 129 | AYEAMTIDLTNEQNRRFVYTIGYWLVNIAVMLGSGIAGIFYDHHFFELLIVLLIISAICC | 188 |
| | | A AM ID +N +NR+ V+ + YW N++V+LG+ + + F LL++LL+ + | |
| Sbjct: | 121 | AGNAMIIDASNAENRKVVFMLDYWAQNLSVILGAALGAWLFRPAFEALLVILLLTVLVSF | 180 |
| Query: | 189 | FVVYFKFDET-KPQEGTFKHDKGVLGTFKNYSQVLVDKAFVVYTLGAIGSSVVWLQVDNY | 247 |
| | | F+ F ET KP T K D+ F+ Y VL DK ++++ I ++ + +Q DN+ | |
| Sbjct: | 181 | FLTTFVMTETFKP---TVKVDEKAENIFQAYKTVLQDKTYMIFMGANIATTFIIMQFDNF | 237 |
| Query: | 248 | FSVNLKQNFEVVSILGHTITGAKMLSLAVFTNTLLIVLLMTTINKFIENWPLKRQLILGS | 307 |
| | | V+L +F+ ++ G I G +ML++ + + L+VLLMTT+N+ ++W ++ I GS | |
| Sbjct: | 238 | LPVHLSNSFKTITFWGFEIYGQRMLTIYLILACVLVVLLMTTLNRLTKDWSHQKGFIWGS | 297 |
| Query: | 308 | LICGFGMLFNISLNTFGAILIAMTFFTFGEMIYVPASQVLRAEMMVEGKIGSYSGFLAIA | 367 |
| | | L GM+F+ TF I IA +T GE++Y P+ Q L A++M KIGSY+G AI | |
| Sbjct: | 298 | LFMAIGMIFSFLTTTFTPIFIAGIVYTLGEIVYTPSVQTLGADLMNPEKIGSYNGVAAIK | 357 |
| Query: | 368 | QPVASVLAGAMVSLSYFTGKIGVQITLTIFMLAGLVLILYA | 408 |
| | | P+AS+LAG +VS+S IGV + L + + ++L+L A | |
| Sbjct: | 358 | MPIASILAGLLVSISPMIKAIGVSLVLALTEVLAIILVLVA | 398 |

[6033] A related DNA sequence was identified in S. pyogenes <SEQ ID 3337> which encodes the amino acid sequence <SEQ ID 3338>. Analysis of this protein sequence reveals the following:

| Possible site: 56 | | | | |
|---|---|---|---|---|
| >>> Seems to have no N-terminal signal sequence | | | | |
| | INTEGRAL | Likelihood = −11.41 | Transmembrane | 166-182 (161-188) |
| | INTEGRAL | Likelihood = −7.75 | Transmembrane | 384-400 (376-403) |
| | INTEGRAL | Likelihood = −7.64 | Transmembrane | 266-282 (261-285) |
| | INTEGRAL | Likelihood = −4.25 | Transmembrane | 295-311 (291-313) |
| | INTEGRAL | Likelihood = −2.71 | Transmembrane | 98-114 (98-115) |
| | INTEGRAL | Likelihood = −2.23 | Transmembrane | 355-371 (355-374) |
| | INTEGRAL | Likelihood = −2.02 | Transmembrane | 218-234 (218-234) |
| | INTEGRAL | Likelihood = −1.91 | Transmembrane | 315-331 (315-331) |
| | INTEGRAL | Likelihood = −1.22 | Transmembrane | 75-91 (75-92) |
| | INTEGRAL | Likelihood = −0.75 | Transmembrane | 45-61 (45-63) |
| | INTEGRAL | Likelihood = −0.75 | Transmembrane | 144-160 (144-161) |

```
----- Final Results -----
                              bacterial membrane --- Certainty = 0.5564(Affirmative) < succ>
                                bacterial outside --- Certainty = 0.0000(Not Clear) < succ>
                            bacterial cytoplasm --- Certainty = 0.0000(Not Clear) < succ>
```

[6034] The protein has homology with the following sequences in the databases:

| >GP: CAA61918 GB: X89779 LmrP integral membrane protein [Lactococcus | | | |
|---|---|---|---|
| lactis] | | | |
| Identities = 138/400 (34%), Positives = 223/400 (55%), Gaps = 2/400 (0%) | | | |
| Query: | 1 | MQEFLNLPKQIQLRQLVRFVTITLGSSIFPFMAMYYTTYFGTFWTGLLMMITSLMGFVGT | 60 |
| | | M+EF NL K +QLR + F+ ++F M +YY Y G+ TG+L+ ++++ FV | |
| Sbjct: | 1 | MKEFWNLDKNLQLRLGIVFLGAFSYGTVFSSMTIYYNQYLGSAITGILLALSAVATFVAG | 60 |
| Query: | 61 | LYGGHLSDALGRKKVIMIGSVGTTLGWFLTILANLPNAAIPWLTFAGILLVEIASSFYGP | 120 |
| | | + G +D GRK V++ G++ LG L I +NLP PW TF LL+ +F | |
| Sbjct: | 61 | ILAGFFADRNGRKPVMVFGTIIQLLGAALAIASNLPGHVNPWSTFIAFLLISFGYNFVIT | 120 |
| Query: | 121 | AYEAMLIDLTDESNRRFVYTINYWFINIAVMFGAGLSGLFYDHHFLALLVALLLVNVLCF | 180 |
| | | A AM+ID ++ NR+ V+ ++YW N++V+ GA L + F ALLV LLL ++ F | |
| Sbjct: | 121 | AGNAMIIDASNAENRKVVFMLDYWAQNLSVILGAALGAWLFRPAFEALLVILLLTVLVSF | 180 |
| Query: | 181 | GVAYYCFDETRPETHAFDHGKGLLASFQNYRQVFHDRAFVLFTLGAIFSGSIWMQMDNYV | 240 |
| | | + + ET T D + FQ Y+ V D+ +++F I + I MQ DN++ | |
| Sbjct: | 181 | FLTTFVMTETFKPTVKVDEKAENI--FQAYKTVLQDKTYMIFMGANIATTFIIMQFDNFL | 238 |
| Query: | 241 | PVHLKLYFQPTAVLGFQVTSSKMLSLMVLTNTLLIVLFMTVVNKLTEKWKLLPQLVVGSL | 300 |
| | | PVHL F+ GF++ +ML++ ++ +L+VL MT +N+LT+ W + GSL | |
| Sbjct: | 239 | PVHLSNSFKTITFWGFEIYGQRMLTIYLILACVLVVLLMTTLNRLTKDWSHQKGFIWGSL | 298 |
| Query: | 301 | LFTLGMLLSFTFTQFYAIWLSVVLLTFGEMINVSASQVLRADMMDHSQIGSYTGFVSMAQ | 360 |
| | | +GM+ SF T F I+++ ++ T GE++ + Q L AD+M+ +IGSY G ++ | |
| Sbjct: | 299 | FMAIGMIFSFLTTTFTPIFIAGIVYTLGEIVYTPSVQTLGADLMNPEKIGSYNGVAAIKM | 358 |
| Query: | 361 | PLGAILASLLVSVSHFTGPLGVQCLFAVIALLGIYFTVVS | 400 |
| | | P+ +ILA LLVS+S +GV + A+ +L I +V+ | |
| Sbjct: | 359 | PIASILAGLLVSISPMIKAIGVSLVLALTEVLAIILVLVA | 398 |

[6035] An alignment of the GAS and GBS proteins is shown below.

| Identities = 228/406 (56%), Positives = 305/406 (74%) | | | |
|---|---|---|---|
| Query: | 9 | VKEFFALPKQLQLRELLRFISITVGSAIFPFMAMYYVQYFGNLVTGILIIITQLSGFVAT | 68 |
| | | ++EF LPKQ+QLR+L+RF++IT+GS+IFPFMAMYY YFG TG+L++IT L GFV T | |
| Sbjct: | 1 | MQEFLNLPKQIQLRQLVRFVTITLGSSIFPFMAMYYTTYFGTFWTGLLMMITSLMGFVGT | 60 |
| Query: | 69 | LYGGHLSDAMGRKKVVIIGSLLATIGWAITIAANVPNHITPHLTFVGILIIEIAHQFYFP | 128 |
| | | LYGGHLSDA+GRKKV++IGS+ T+GW +TI AN+PN P LTF GIL++EIA FY P | |
| Sbjct: | 61 | LYGGHLSDALGRKKVIMIGSVGTTLGWFLTILANLPNAAIPWLTFAGILLVEIASSFYGP | 120 |
| Query: | 129 | AYEAMTIDLTNEQNRRFVYTIGYWLVNIAVMLGSGIAGIFYDHHFFELLIVLLIISAICC | 188 |
| | | AYEAM IDLT+E NRRFVYTI YW +NIAVM G+G++G+FYDHHF LL+ LL+++ +C | |
| Sbjct: | 121 | AYEAMLIDLTDESNRRFVYTINYWFINIAVMFGAGLSGLFYDHHFLALLVALLLVNVLCF | 180 |
| Query: | 189 | FVVYFKFDETKPQEGTFKHDKGVLGTFKNYSQVLVDKAFVVYTLGAIGSSVVWLQVDNYF | 248 |
| | | V Y+ FDET+P+ F H KG+L +F+NY QV D+AFV++TLGAI S +W+Q+DNY | |
| Sbjct: | 181 | GVAYYCFDETRPETHAFDHGKGLLASFQNYRQVFHDRAFVLFTLGAIFSGSIWMQMDNYV | 240 |
| Query: | 249 | SVNLKQNFEVVSILGHTITGAKMLSLAVFTNTLLIVLLMTTINKFIENWPLKRQLILGSL | 308 |
| | | V+LK F+ ++LG +T +KMLSL V TNTLLIVL MT +NK E W L QL++GSL | |
| Sbjct: | 241 | PVHLKLYFQPTAVLGFQVTSSKMLSLMVLTNTLLIVLFMTVVNKLTEKWKLLPQLVVGSL | 300 |
| Query: | 309 | ICGFGMLFNISLNTFGAILIAMTFFTFGEMIYVPASQVLRAEMMVEGKIGSYSGFLAIAQ | 368 |
| | | + GML + + F AI +++ TFGEMI V ASQVLRA+MM +IGSY+GF+++AQ | |
| Sbjct: | 301 | LFTLGMLLSFTFTQFYAIWLSVVLLTFGEMINVSASQVLRADMMDHSQIGSYTGFVSMAQ | 360 |
| Query: | 369 | PVASVLAGAMVSLSYFTGKIGVQITLTIFMLAGLVLILYATKMKNI | 414 |
| | | P+ ++LA +VS+S+FTG +GVQ + L G+ + + KMK + | |
| Sbjct: | 361 | PLGAILASLLVSVSHFTGPLGVQCLFAVIALLGIYFTVVSAKMKKV | 406 |

[6036] A related GBS gene <SEQ ID 8725> and protein <SEQ ID 8726> were also identified. Analysis of this protein sequence reveals the following:

| Lipop: Possible site: −1 Crend: 8 | | | | |
|---|---|---|---|---|
| SRCFLG: 0 | | | | |
| McG: Length of UR: 4 | | | | |
| Peak Value of UR: 1.73 | | | | |
| Net Charge of CR: 1 | | | | |
| McG: Discrim Score: −4.26 | | | | |
| GvH: Signal Score (−7.5): −2.48 | | | | |
| Possible site: 35 | | | | |
| >>> Seems to have no N-terminal signal sequence | | | | |
| Amino Acid Composition: calculated from 1 | | | | |
| ALOM program count: 12 value: −14.01 threshold: 0.0 | | | | |
| | INTEGRAL | Likelihood = −14.01 | Transmembrane | 168-184 (162-189) |
| | INTEGRAL | Likelihood = −8.07 | Transmembrane | 382-398 (379-404) |
| | INTEGRAL | Likelihood = −6.10 | Transmembrane | 263-279 (261-283) |
| | INTEGRAL | Likelihood = −6.00 | Transmembrane | 75-91 (74-93) |
| | INTEGRAL | Likelihood = −4.78 | Transmembrane | 43-59 (42-63) |
| | INTEGRAL | Likelihood = −2.92 | Transmembrane | 295-311 (294-312) |
| | INTEGRAL | Likelihood = −2.76 | Transmembrane | 355-371 (354-373) |
| | INTEGRAL | Likelihood = −2.39 | Transmembrane | 144-160 (143-161) |
| | INTEGRAL | Likelihood = −2.02 | Transmembrane | 317-333 (317-334) |
| | INTEGRAL | Likelihood = −1.65 | Transmembrane | 218-234 (218-234) |
| | INTEGRAL | Likelihood = −0.90 | Transmembrane | 16-32 (16-32) |
| | INTEGRAL | Likelihood = −0.27 | Transmembrane | 103-119 (103-119) |
| | PERIPHERAL | Likelihood = 9.44 | 239 | |

```
modified ALOM score: 3.30
icm1 HYPID: 7 CFP: 0.660
*** Reasoning Step: 3
----- Final Results -----
                              bacterial membrane --- Certainty = 0.6604(Affirmative) < succ>
                                bacterial outside --- Certainty = 0.0000(Not Clear) < succ>
                            bacterial cytoplasm --- Certainty = 0.0000(Not Clear) < succ>
```

[6037] The protein has homology with the following sequences in the databases:

[chemical structure]

[6038] Based on this analysis, it was predicted that these proteins and their epitopes could be useful antigens for vaccines or diagnostics.

### EXAMPLE 1083

[6039] A DNA sequence (GBSx1157) was identified in S. agalactiae <SEQ ID 3339> which encodes the amino acid sequence <SEQ ID 3340>. This protein is predicted to be holliday junction DNA helicase (ruvA). Analysis of this protein sequence reveals the following:

| Possible site: 37 | | | | |
|---|---|---|---|---|
| >>> Seems to have no N-terminal signal sequence | | | | |
| | INTEGRAL | Likelihood = −1.75 | Transmembrane | 75-91 (74-91) |

```
----- Final Results -----
                              bacterial membrane --- Certainty = 0.1702(Affirmative) < succ>
                                bacterial outside --- Certainty = 0.0000(Not Clear) < succ>
                            bacterial cytoplasm --- Certainty = 0.0000(Not Clear) < succ>
```

[6040] The protein has homology with the following sequences in the GENPEPT database.

| >GP: BAB04943 GB: AP001511 holliday junction DNA helicase [Bacillus | | | |
|---|---|---|---|
| halodurans] | | | |
| Identities = 86/201 (42%), Positives = 122/201 (59%), Gaps = 6/201 (2%) | | | |
| Query: | 1 | MYDYIKGKLSKITAKFIVVETAGLGYMIYVANPYSFSGYVNQEVTIYLHQVIRDDAHLLF | 60 |
| | | M DY++G L+ I ++ VVE G+GY +Y NPY F + +TIY Q +R+D L+ | |
| Sbjct: | 1 | MIDYLRGTLTDIDHQYAVVEVHGVGYQVYCPNPYEFEKERDSVITIYTFQYVREDVIRLY | 60 |
| Query: | 61 | GFHTENEKEIFLNLISVSGIGPTTALAIIAVDDNEGLVSAIDNSDIKYLTKFPKIGKKTA | 120 |
| | | GF T+ ++ +F L++VSGIGP ALAI+A E ++ AI+ D +L KFP +GKKTA | |
| Sbjct: | 61 | GFRTKEKRSLFEKLLNVSGIGPKGALAILATGQPEHVIQAIEEEDEAFLVKFPGVGKKTA | 120 |
| Query: | 121 | QQMILDLSGKFVE------ASGESATSRKVSSEQNSNLEEAMEALLALGYKATELKKVKA | 174 |
| | | +Q+ILDL GK E + E ++ N L+EAMEAL ALGY ELKKVK | |
| Sbjct: | 121 | RQIILDLKGKVDELHPGLFSQKEEQPKPHEKNDGNQALDEAMEALKALGYVEKELKKVKP | 180 |
| Query: | 175 | FFEGTNETVEQYIKSSLKMLM | 195 |
| | | E T + YIK +L++++ | |
| Sbjct: | 181 | KLEQETLTTDAYIKKALQLML | 201 |

[6041] A related DNA sequence was identified in S. pyogenes <SEQ ID 3341> which encodes the amino acid sequence <SEQ ID 3342>. Analysis of this protein sequence reveals the following:

| Possible site: 37 | | | | |
|---|---|---|---|---|
| >>> Seems to have no N-terminal signal sequence | | | | |
| | INTEGRAL | Likelihood = −1.59 | Transmembrane | 75-91 (74-91) |

```
----- Final Results -----
                              bacterial membrane --- Certainty = 0.1638(Affirmative) < succ>
                                bacterial outside --- Certainty = 0.0000(Not Clear) < succ>
                            bacterial cytoplasm --- Certainty = 0.0000(Not Clear) < succ>
```

[6042] The protein has homology with the following sequences in the databases:

| >GP: BAB04943 GB: AP001511 holliday junction DNA helicase | | | |
|---|---|---|---|
| [Bacillus halodurans] | | | |
| Identities = 91/201 (45%), Positives = 128/201 (63%), Gaps = 5/201 (2%) | | | |
| Query: | 1 | MYDYIKGQLTKITAKYIVVEANGLGYMINVANPYSFTDSVNQLVTIYLHQVIREDAHLLF | 60 |
| | | M DY++G LT I +Y VVE +G+GY + NPY F + ++TIY Q +RED L+ | |
| Sbjct: | 1 | MIDYLRGTLTDIDHQYAVVEVHGVGYQVYCPNPYEFEKERDSVITIYTFQYVREDVIRLY | 60 |
| Query: | 61 | GFHTEDEKDVFLKLISVSGIGPTTALAIVAVDDNEGLVNAIDNSDIKYLMKFPKIGKKTA | 120 |
| | | GF T++++ +F KL++VSGIGP ALAI+A E ++ AI+ D +L+KFP +GKKTA | |
| Sbjct: | 61 | GFRTKEKRSLFEKLLNVSGIGPKGALAILATGQPEHVIQAIEEEDEAFLVKFPGVGKKTA | 120 |
| Query: | 121 | QQMVLDLAGKFVEA-----PQETGHTKARSNKAGNTQLDEAIEALLALGYKAKELKKIRA | 175 |
| | | +Q++LDL GK E Q+ K GN LDEA+EAL ALGY KELKK++ | |
| Sbjct: | 121 | RQIILDLKGKVDELHPGLFSQKEEQPKPHEKNDGNQALDEAMEALKALGYVEKELKKVKP | 180 |
| Query: | 176 | FFEGTSETAEQYIKSALKLLM | 196 |
| | | E + T + YIK AL+L++ | |
| Sbjct: | 181 | KLEQETLTTDAYIKKALQLML | 201 |

[6043] An alignment of the GAS and GBS proteins is shown below.

| Identities = 153/197 (77%), Positives = 176/197 (88%), Gaps = 1/197 (0%) | | | |
|---|---|---|---|
| Query: | 1 | MYDYIKGKLSKITAKFIVVETAGLGYMIYVANPYSFSGYVNQEVTIYLHQVIRDDAHLLF | 60 |
| | | MYDYIKG+L+KITAK+IVVE GLGYMI VANPYSF+ VNQ VTIYLHQVIR+DAHLLF | |
| Sbjct: | 1 | MYDYIKGQLTKITAKYIVVEANGLGYMINVANPYSFTDSVNQLVTIYLHQVIREDAHLLF | 60 |
| Query: | 61 | GFHTENEKEIFLNLISVSGIGPTTALAIIAVDDNEGLVSAIDNSDIKYLTKFPKIGKKTA | 120 |
| | | GFHTE+EK++FL LISVSGIGPTTALAI+AVDDNEGLV+AIDNSDIKYL KFPKIGKKTA | |
| Sbjct: | 61 | GFHTEDEKDVFLKLISVSGIGPTTALAIVAVDDNEGLVNAIDNSDIKYLMKFPKIGKKTA | 120 |
| Query: | 121 | QQMILDLSGKFVEASGESA-TSRKVSSEQNSNLEEAMEALLALGYKATELKKVKAFFEGT | 179 |
| | | QQM+LDL+GKFVEA E+ T + + N+ L+EA+EALLALGYKA ELKK++AFFEGT | |
| Sbjct: | 121 | QQMVLDLAGKFVEAPQETGHTKARSNKAGNTQLDEAIEALLALGYKAKELKKIRAFFEGT | 180 |
| Query: | 180 | NETVEQYIKSSLKMLMK | 196 |
| | | +ET EQYIKS+LK+LMK | |
| Sbjct: | 181 | SETAEQYIKSALKLLMK | 197 |

[6044] Based on this analysis, it was predicted that these proteins and their epitopes could be useful antigens for vaccines or diagnostics.

### EXAMPLE 1084

[6045] A DNA sequence (GBSx1159) was identified in S. agalactiae <SEQ ID 3343> which encodes the amino acid sequence <SEQ ID 3344>. This protein is predicted to be DNA-3-methyladenine glycosidase I (tag). Analysis of this protein sequence reveals the following:

```
Possible site: 50
>>> Seems to have no N-terminal signal sequence
----- Final Results -----
                            bacterial cytoplasm --- Certainty = 0.2812(Affirmative) < succ>
                              bacterial membrane --- Certainty = 0.0000(Not Clear) < succ>
                                bacterial outside --- Certainty = 0.0000(Not Clear) < succ>
```

[6046] A related GBS nucleic acid sequence <SEQ ID 10263> which encodes amino acid sequence <SEQ ID 10264> was also identified.

[6047] The protein has homology with the following sequences in the GENPEPT database.

| >GP: AAC76573 GB: AE000432 3-methyl-adenine DNA glycosylase I, | | | |
|---|---|---|---|
| constitutive [Escherichia coli K12] | | | |
| Identities = 87/176 (49%), Positives = 122/176 (68%), Gaps = 1/176 (0%) | | | |
| Query: | 5 | MKRCSWVNLDNPLYVAYHDKEWGRAVHDDHVLFELLCLETYQSGLSWETVLNKRQEFRQV | 64 |
| | | M+RC WV+ D PLY+AYHD EWG D LFE++CLE Q+GLSW TVL KR+ +R | |
| Sbjct: | 1 | MERCGWVSQD-PLYIAYHDNEWGVPETDSKKLFEMICLEGQQAGLSWITVLKKRENYRAC | 59 |
| Query: | 65 | FHHYNIEKVAAMSDADLEIILQNPRVIRHRLKLFSTRQNARSIILIQKEFGSFDRYIWSF | 124 |
| | | FH ++ KVAAM + D+E ++Q+ +IRHR K+ + NAR+ + +++ F ++WSF | |
| Sbjct: | 60 | FHQFDPVKVAAMQEEDVERLVQDAGIIRHRGKIQAIIGNARAYLQMEQNGEPFVDFVWSF | 119 |
| Query: | 125 | VDNKVQVNSVNNYNDVPASTTLSERLSKDLKKRGFKFVGPTCLYSFIQAAGMVNDH | 180 |
| | | V+++ QV +++P ST+ S+ LSK LKKRGFKFVG T YSF+QA G+VNDH | |
| Sbjct: | 120 | VNHQPQVTQATTLSEIPTSTSASDALSKALKKRGFKFVGTTICYSFMQACGLVNDH | 175 |

[6048] A related DNA sequence was identified in S. pyogenes <SEQ ID 3345> which encodes the amino acid sequence <SEQ ID 3346>. Analysis of this protein sequence reveals the following:

```
Possible site: 48
>>> Seems to have no N-terminal signal sequence
----- Final Results -----
                            bacterial cytoplasm --- Certainty = 0.4149(Affirmative) < succ>
                              bacterial membrane --- Certainty = 0.0000(Not Clear) < succ>
                                bacterial outside --- Certainty = 0.0000(Not Clear) < succ>
```

[6049] An alignment of the GAS and GBS proteins is shown below.

| Identities = 114/184 (61%), Positives = 135/184 (72%) | | | |
|---|---|---|---|
| Query: | 3 | FHMKRCSWVNLDNPLYVAYHDKEWGRAVHDDHVLFELLCLETYQSGLSWETVLNKRQEFR | 62 |
| | | FHMKRCSWV DN LY YHD EWG+ + DD FELLCLE+YQSGLSW TVL KRQ FR | |
| Sbjct: | 2 | FHMKRCSWVPKDNQLYCDYHDLEWGQPLDDDRDFFELLCLESYQSGLSWLTVLKKRQAFR | 61 |
| Query: | 63 | QVFHHYNIEKVAAMSDADLEIILQNPRVIRHRLKLFSTRQNARSIILIQKEFGSFDRYIW | 122 |
| | | VFHHY+I VA + ++ L+NP +IRH+LKL +T NA ++ IQKEFGSF Y+W | |
| Sbjct: | 62 | TVFHHYDIASVATFTSEEMADALENPSIIRHKLKLAATVNNAIAVQKIQKEFGSFSTYLW | 121 |
| Query: | 123 | SFVDNKVQVNSVNNYNDVPASTTLSERLSKDLKKRGFKFVGPTCLYSFIQAAGMVNDHEN | 182 |
| | | +FV K N VN N VPA T LS RL+KDLKKRGFKF+GPT +YSF+QA+G+VNDHE | |
| Sbjct: | 122 | NFVGGKPINNLVNQENLVPAQTELSIRLAKDLKKRGFKFLGPTTVYSFMQASGLVNDHEE | 181 |
| Query: | 183 | ICDF | 186 |
| | | C F | |
| Sbjct: | 182 | ACVF | 185 |

[6050] Based on this analysis, it was predicted that these proteins and their epitopes could be useful antigens for vaccines or diagnostics.

### EXAMPLE 1085

[6051] A DNA sequence (GBSx1160) was identified in S. agalactiae <SEQ ID 3347> which encodes the amino acid sequence <SEQ ID 3348>. This protein is predicted to be competence-damage inducible protein (cinA). Analysis of this protein sequence reveals the following:

```
Possible site: 22
>>> Seems to have an uncleavable N-term signal seq
----- Final Results -----
                              bacterial membrane --- Certainty = 0.0000(Not Clear) < succ>
                                bacterial outside --- Certainty = 0.0000(Not Clear) < succ>
                            bacterial cytoplasm --- Certainty = 0.0000(Not Clear) < succ>
```

[6052] A related GBS nucleic acid sequence <SEQ ID 10261> which encodes amino acid sequence <SEQ ID 10262> was also identified.

[6053] The protein has homology with the following sequences in the GENPEPT database.

| >GP: CAA84071 GB: Z34303 CinA protein [Streptococcus pneumoniae] | | | |
|---|---|---|---|
| Identities = 194/297 (65%), Positives = 236/297 (79%), Gaps = 1/297 (0%) | | | |
| Query: | 1 | MVEGSIPLQNLTGLAVGGIVTSKGVQYMVLPGPPSELKPMVMEQVVPILSNNGTKLYSRV | 60 |
| | | +VEG+IPL N TGLAVGG + GV Y+VLPGPPSELKPMV+ Q++P L G+KLYSRV | |
| Sbjct: | 121 | IVEGAIPLPNETGLAVGGKLEVDGVTYVVLPGPPSELKPMVLNQLLPKLMT-GSKLYSRV | 179 |
| Query: | 61 | LRFFGIGESQLVTILEDIIKNQTDPTIAPYAKVGEVTLRLSTKAENQDEADFKLDSLEKE | 120 |
| | | LRFFGIGESQLVTIL D+I NQ DPT+APYAK GEVTLRLSTKA +Q+EA+ LD LE + | |
| Sbjct: | 180 | LRFFGIGESQLVTILADLIDNQIDPTLAPYAKTGEVTLRLSTKASSQEEANQALDILENQ | 239 |
| Query: | 121 | ILALKTLDNRKLKDLLYGYGDNNSMARTVLELLKVQNKTITAAESLTAGLFQSQLAEFSG | 180 |
| | | IL +T + L+D YGYG+ S+A V+E LK Q KTI AAESLTAGLFQ+ +A FSG | |
| Sbjct: | 240 | ILDCQTFEGISLRDFCYGYGEETSLASIVVEELKRQGKTIAAAESLTAGLFQATVANFSG | 299 |
| Query: | 181 | ASQVFNGGFTTYSMEAKSQLLGIPKKKLQEYGVVSHFTAEAMAQQARQLLKADFGIGLTG | 240 |
| | | S +F GGF TYS+E KS++L IP K L+E+GVVS FTA+ MA+QAR ++DFGI LTG | |
| Sbjct: | 300 | VSSIFEGGFVTYSLEEKSRMLDIPAKNLEEHGVVSEFTAQKMAEQARSKTQSDFGISLTG | 359 |
| Query: | 241 | VAGPDELEGYPAGTVFIGIATPEGVSSIKVSIGGKSRSDVRHISTLHAFDLVRRALL | 297 |
| | | VAGPD LEG+P GTVFIG+A +G IKV+IGG+SR+DVRHI+ +HAF+LVR+ALL | |
| Sbjct: | 360 | VAGPDSLEGHPVGTVFIGLAQDQGTEVIKVNIGGRSRADVRHIAVMHAFNLVRKALL | 416 |

[6054] A related DNA sequence was identified in S. pyogenes <SEQ ID 3349> which encodes the amino acid sequence <SEQ ID 3350>. Analysis of this protein sequence reveals the following:

| Possible site: 22 | | | | |
|---|---|---|---|---|
| >>> Seems to have no N-terminal signal sequence | | | | |
| | INTEGRAL | Likelihood = −1.91 | Transmembrane | 134-150 (134-150) |

```
----- Final Results -----
                              bacterial membrane --- Certainty = 0.1765(Affirmative) < succ>
                                bacterial outside --- Certainty = 0.0000(Not Clear) < succ>
                            bacterial cytoplasm --- Certainty = 0.0000(Not Clear) < succ>
```

[6055] The protein has homology with the following sequences in the databases:

| >GP: CAA84071 GB: Z34303 CinA protein [Streptococcus pneumoniae] | | | |
|---|---|---|---|
| Identities = 286/417 (68%), Positives = 336/417 (79%), Gaps = 1/417 (0%) | | | |
| Query: | 1 | MKAELIAVGTEILTGQIVNTNAQFLSEKMAELGIDVYFQTAVGDNEERLLSVITTASQRS | 60 |
| | | MKAE+IAVGTEILTGQIVNTNAQFLSEK+AE+G+DVYFQTAVGDNE RLLS++ ASQRS | |
| Sbjct: | 1 | MKAEIIAVGTEILTGQIVNTNAQFLSEKLAEIGVDVYFQTAVGDNEVRLLSLLEIASQRS | 60 |
| Query: | 61 | NLVILCGGLGPTKDDLTKQTLAKYLRKDLVYDEQACQKLDDFFAKRKPSSRTPNNERQAQ | 120 |
| | | +LVIL GGLG T+DDLTKQTLAK+L K LV+D QA +KLD FFA R +RTPNNERQAQ | |
| Sbjct: | 61 | SLVILTGGLGATEDDLTKQTLAKFLGKALVFDPQAQEKLDIFFALRPDYARTPNNERQAQ | 120 |
| Query: | 121 | VIEGSIPLPNKTGLAVGGFITVDGISYVVLPGPPSELKPMVNEELVPLLSKQYSTLYSKV | 180 |
| | | ++EG+IPLPN+TGLAVGG + VDG++YVVLPGPPSELKPMV +L+P L S LYS+V | |
| Sbjct: | 121 | IVEGAIPLPNETGLAVGGKLEVDGVTYVVLPGPPSELKPMVLNQLLPKLMTG-SKLYSRV | 179 |
| Query: | 181 | LRFFGIGESQLVTVLSDFIENQTDPTIAPYAKTGEVTLRLSTKTENQALADKKLGQLEAQ | 240 |
| | | LRFFGIGESQLVT+L+D I+NQ DPT+APYAKTGEVTLRLSTK +Q A++ L LE Q | |
| Sbjct: | 180 | LRFFGIGESQLVTILADLIDNQIDPTLAPYAKTGEVTLRLSTKASSQEEANQALDILENQ | 239 |
| Query: | 241 | LLSRKTLEGQPLADVFYGYGEDNSLARETFELLVKYDKTITAAESLTAGLEQSTLASFPG | 300 |
| | | +L +T EG L D YGYGE+ SLA E L + KTI AAESLTAGLFQ+T+A+F G | |
| Sbjct: | 240 | ILDCQTFEGISLRDFCYGYGEETSLASIVVEELKRQGKTIAAAESLTAGLFQATVANFSG | 299 |
| Query: | 301 | ASQVFNGGFVTYSMEEKAKMLGLPLEELKSHGVVSAYTAEGMAEQARLLTGADIGVSLTG | 360 |
| | | S +F GGFVTYS+EEK++ML +P + L+ HGVVS +TA+ MAEQAR T +D G+SLTG | |
| Sbjct: | 300 | VSSIFEGGFVTYSLEEKSRMLDIPAKNLEEHGVVSEFTAQKMAEQARSKTQSDFGISLTG | 359 |
| Query: | 361 | VAGPDMLEEQPAGTVFIGLATQNKVESIKVLISGRSRLDVRYIATLHAFNMVRKTLL | 417 |
| | | VAGPD LE P GTVFIGLA E IKV I GRSR DVR+IA +HAFN+VRK LL | |
| Sbjct: | 360 | VAGPDSLEGHPVGTVFIGLAQDQGTEVIKVNIGGRSRADVRHIAVMHAFNLVRKALL | 416 |

[6056] An alignment of the GAS and GBS proteins is shown below.

| Identities = 201/299 (67%), Positives = 242/299 (80%) | | | |
|---|---|---|---|
| Query: | 1 | MVEGSIPLQNLTGLAVGGIVTSKGVQYMVLPGPPSELKPMVMEQVVPILSNNGTKLYSRV | 60 |
| | | ++EGSIPL N TGLAVGG +T G+ Y+VLPGPPSELKPMV E++VP+LS + LYS+V | |
| Sbjct: | 121 | VIEGSIPLPNKTGLAVGGFITVDGISYVVLPGPPSELKPMVNEELVPLLSKQYSTLYSKV | 180 |
| Query: | 61 | LRFFGIGESQLVTILEDIIKNQTDPTIAPYAKVGEVTLRLSTKAENQDEADFKLDSLEKE | 120 |
| | | LRFFGIGESQLVT+L D I+NQTDPTIAPYAK GEVTLRLSTK ENQ AD KL LE + | |
| Sbjct: | 181 | LRFFGIGESQLVTVLSDFIENQTDPTIAPYAKTGEVTLRLSTKTENQALADKKLGQLEAQ | 240 |
| Query: | 121 | ILALKTLDNRKLKDLLYGYGDNNSMARTVLELLKVQNKTITAAESLTAGLFQSQLAEFSG | 180 |
| | | +L+ KTL+ + L D+ YGYG++NS+AR ELL +KTITAAESLTAGLFQS LA F G | |
| Sbjct: | 241 | LLSRKTLEGQPLADVFYGYGEDNSLARETFELLVKYDKTITAAESLTAGLFQSTLASFPG | 300 |
| Query: | 181 | ASQVFNGGFTTYSMEAKSQLLGIPKKKLQEYGVVSHFTAEAMAQQARQLLKADFGIGLTG | 240 |
| | | ASQVFNGGF TYSME K+++LG+P ++L+ +GVVS +TAE MA+QAR L AD G+ LTG | |
| Sbjct: | 301 | ASQVFNGGFVTYSMEEKAKMLGLPLEELKSHGVVSAYTAEGMAEQARLLTGADIGVSLTG | 360 |
| Query: | 241 | VAGPDELEGYPAGTVFIGIATPEGVSSIKVSIGGKSRSDVRHISTLHAFDLVRRALLKI | 299 |
| | | VAGPD LE PAGTVFIG+AT V SIKV I G+SR DVR+I+TLHAF++VR+ LLK+ | |
| Sbjct: | 361 | VAGPDMLEEQPAGTVFIGLATQNKVESIKVLISGRSRLDVRYIATLHAFNMVRKTLLKL | 419 |

[6057] SEQ ID 3348 (GBS646) was expressed in E. coli as a GST-fusion product. SDS-PAGE analysis of total cell extract is shown in FIG. 131 (lane 24; MW 61.6 kDa), in FIG. 134 (lane 3; MW 57.5 kDa+lanes 2 & 4; MW 27 kDa). It was also expressed in E. coli as a His-fusion product. SDS-PAGE analysis of total cell extract is shown in FIG. 131 (lane 5-7; MW 36.6 kDa) and in FIG. 178 (lane 5; MW 37 kDa).

[6058] GBS646-His was purified as shown in FIG. 229, lane 5.

[6059] Based on this analysis, it was predicted that these proteins and their epitopes could be useful antigens for vaccines or diagnostics.

### EXAMPLE 1086

[6060] A DNA sequence (GBSx1161) was identified in S. agalactiae <SEQ ID 3351> which encodes the amino acid sequence <SEQ ID 3352>. Analysis of this protein sequence reveals the following:

| Possible site: 59 | | | | |
|---|---|---|---|---|
| >>> Seems to have no N-terminal signal sequence | | | | |
| | INTEGRAL | Likelihood = −0.37 | Transmembrane | 148-164 (148-164) |

```
----- Final Results -----
                              bacterial membrane --- Certainty = 0.1150(Affirmative) < succ>
                                bacterial outside --- Certainty = 0.0000(Not Clear) < succ>
                            bacterial cytoplasm --- Certainty = 0.0000(Not Clear) < succ>
```

[6061] A related DNA sequence was identified in S. pyogenes <SEQ ID 3353> which encodes the amino acid sequence <SEQ ID 3354>. Analysis of this protein sequence reveals the following:

| Possible site: 59 | | | | |
|---|---|---|---|---|
| >>> Seems to have no N-terminal signal sequence | | | | |
| | INTEGRAL | Likelihood = −0.37 | Transmembrane | 148-164 (148-164) |

```
----- Final Results -----
                              bacterial membrane --- Certainty = 0.1150(Affirmative) < succ>
                                bacterial outside --- Certainty = 0.0000(Not Clear) < succ>
                            bacterial cytoplasm --- Certainty = 0.0000(Not Clear) < succ>
```

[6062] The protein has homology with the following sequences in the databases:

| >GP: AAD04860 GB: AF069745 RecA protein [Streptococcus parasanguinis] | | | |
|---|---|---|---|
| Identities = 333/381 (87%), Positives = 356/381 (93%), Gaps = 3/381 (0%) | | | |
| Query: | 1 | LAKKLKKNEEITKKFGDERRKALDDALKNIEKDFGKGAVMRLGERAEQKVQVMSSGSLAL | 60 |
| | | +AKK KK ++ITKKFGDER KAL+DALK IEKDFGKG++MRLGERAEQKVQVMSSGSLAL | |
| Sbjct: | 1 | MAKKQKKLDDITKKFGDEREKALNDALKLIEKDFGKGSIMRLGERAEQKVQVMSSGSLAL | 60 |
| Query: | 61 | DIALGAGGYPKGRIIEIYGPESSGKTTVALHAVAQAQKEGGIAAFIDAEHALDPAYAAAL | 120 |
| | | DIALGAGGYPKGRIIEIYGPESSGKTTVALHAVAQAQKEGGIAAFIDAEHALDP+YAAAL | |
| Sbjct: | 61 | DIALGAGGYPKGRIIEIYGPESSGKTTVALHAVAQAQKEGGIAAFIDAEHALDPSYAAAL | 120 |
| Query: | 121 | GVNIDELLLSQPDSGEQGLEIAGKLIDSGAVDLVVVDSVAALVPRAEIDGDIGDSHVGLQ | 180 |
| | | GVNIDELLLSQPDSGEQGLEIAGKLIDSGAVDLVVVDSVAALVPRAEIDGDIGDSHVGLQ | |
| Sbjct: | 121 | GVNIDELLLSQPDSGEQGLEIAGKLIDSGAVDLVVVDSVAALVPRAEIDGDIGDSHVGLQ | 180 |
| Query: | 181 | ARMMSQAMRKLSASINKTKTIAIFINQLREKVGVMFGNPETTPGGRALKFYASVRLDVRG | 240 |
| | | ARMMSQAMRKL ASINKTKTIAIFINQLREKVGVMFGNPETTPGGRALKFYASVRLDVRG | |
| Sbjct: | 181 | ARMMSQAMRKLGASINKTKTIAIFINQLREKVGVMFGNPETTPGGRALKFYASVRLDVRG | 240 |
| Query: | 241 | TTQIKGTGDQKDSSIGKETKIKVVKNKVAPPFKVAEVEIMYGEGISRTGELVKIASDLDI | 300 |
| | | TQIKGTGDQKD+++GKETKIKVVKNKVAPPFK A VEIMYGEGISRTGELVKIA+DLDI | |
| Sbjct: | 241 | NTQIKGTGDQKDTNVGKETKIKVVKNKVAPPFKEAMVEIMYGEGISRTGELVKIATDLDI | 300 |
| Query: | 301 | IQKAGAWFSYNGEKIGQGSENAKRYLADHPELFDEIDLKVRVKFGLLEESEEESAMAVAS | 360 |
| | | IQKAGAW+SYNGEKIGQGSENAK++LADHPE+FDEID KVRV FGL+E+ E ++ | |
| Sbjct: | 301 | IQKAGAWYSYNGEKIGQGSENAKKFLADHPEIFDEIDHKVRVHFGLIEKDEAVKSLDKTE | 360 |
| Query: | 361 | EE---TDDLALDLDNGIEIED | 378 |
| | | E +++ LDLD+ IEIED | |
| Sbjct: | 361 | EAAPVVEEVTLDLDDAIEIED | 381 |

[6063] An alignment of the GAS and GBS proteins is shown below.

| Identities = 339/379 (89%), Positives = 356/379 (93%), Gaps = 1/379 (0%) | | | |
|---|---|---|---|
| Query: | 1 | MAKKTKKAEEITKKFGDERRKALDDALKNIEKDFGKGAVMRLGERAEQKVQVMSSGSLAL | 60 |
| | | +AKK KK EEITKKFGDERRKALDDALKNIEKDFGKGAVMRLGERAEQKVQVMSSGSLAL | |
| Sbjct: | 1 | LAKKLKKNEEITKKFGDERRKALDDALKNIEKDFGKGAVMRLGERAEQKVQVMSSGSLAL | 60 |
| Query: | 61 | DIALGAGGYPKGRIVEIYGPESSGKTTVALHAVAQAQKEGGIAAFIDAEHALDPAYAAAL | 120 |
| | | DIALGAGGYPKGRI+EIYGPESSGKTTVALHAVAQAQKEGGIAAFIDAEHALDPAYAAAL | |
| Sbjct: | 61 | DIALGAGGYPKGRIIEIYGPESSGKTTVALHAVAQAQKEGGIAAFIDAEHALDPAYAAAL | 120 |
| Query: | 121 | GVNIDELLLSQPDSGEQGLEIAGKLIDSGAVDLVVVDSVAALVPRAEIDGDIGDSHVGLQ | 180 |
| | | GVNIDELLLSQPDSGEQGLEIAGKLIDSGAVDLVVVDSVAALVPRAEIDGDIGDSHVGLQ | |
| Sbjct: | 121 | GVNIDELLLSQPDSGEQGLEIAGKLIDSGAVDLVVVDSVAALVPRAEIDGDIGDSHVGLQ | 180 |
| Query: | 181 | ARMMSQAMRKLSASINKTKTIAIFINQLREKVGVMFGNPETTPGGRALKFYSSVRLDVRG | 240 |
| | | ARMMSQAMRKLSASINKTKTIAIFINQLREKVGVMFGNPETTPGGRALKFY+SVRLDVRG | |
| Sbjct: | 181 | ARMMSQAMRKLSASINKTKTIAIFINQLREKVGVMFGNPETTPGGRALKFYASVRLDVRG | 240 |
| Query: | 241 | NTQIKGTGEHKDHNVGKETKIKVVKNKVAPPFREAFVEIMYGEGISRTGELIKIASDLDI | 300 |
| | | TQIKGTG+ KD ++GKETKIKVVKNKVAPPF+ A VEIMYGEGISRTGEL+KIASDLDI | |
| Sbjct: | 241 | TTQIKGTGDQKDSSIGKETKIKVVKNKVAPPFKVAEVEIMYGEGISRTGELVKIASDLDI | 300 |
| Query: | 301 | IQKAGAWYSYNGEKIGQGSENAKKYLADNPAIFDEIDHKVRVHFGMTEDDSPVQSELVEE | 360 |
| | | IQKAGAW+SYNGEKIGQGSENAK+YLAD+P +FDEID KVRV FG+ E +S +S + | |
| Sbjct: | 301 | IQKAGAWFSYNGEKIGQGSENAKRYLADHPELFDEIDLKVRVKFGLLE-ESEEESAMAVA | 359 |
| Query: | 361 | KNEADDLVLDLDNAIEIEE | 379 |
| | | E DDL LDLDN IEIE+ | |
| Sbjct: | 360 | SEETDDLALDLDNGIEIED | 378 |

[6064] Based on this analysis, it was predicted that these proteins and their epitopes could be useful antigens for vaccines or diagnostics.

### EXAMPLE 1087

[6065] A DNA sequence (GBSx1162) was identified in S. agalactiae <SEQ ID 3355> hich encodes the amino acid sequence <SEQ ID 3356>. Analysis of this protein sequence reveals the following:

```
Possible site: 26
>>> Seems to have no N-terminal signal sequence
----- Final Results -----
                            bacterial cytoplasm --- Certainty = 0.2344(Affirmative) < succ>
                              bacterial membrane --- Certainty = 0.0000(Not Clear) < succ>
                                bacterial outside --- Certainty = 0.0000(Not Clear) < succ>
```

[6066] A related GBS nucleic acid sequence <SEQ ID 10259> which encodes amino acid sequence <SEQ ID 10260> was also identified.

[6067] The protein has homology with the following sequences in the GENPEPT database.

| >GP: AAG37358 GB: AF028804 NrpR [Lactococcus lactis subsp. cremoris] | | | |
|---|---|---|---|
| Identities = 69/132 (52%), Positives = 102/132 (77%) | | | |
| Query: | 5 | MIKIYTISSCTSCKKAKTWLNAHQLPYKEQNLGKESLTRDEILEILTKTESGIESIVSSK | 64 |
| | | MI IYT SCTSCKKAKTWL+ H +P+ E+NL + L+ EI +IL K + G+E ++SS+ | |
| Sbjct: | 1 | MITIYTAPSCTSCKKAKTWLSYHHIPFNERNLIADPLSTTEISQILQKCDDGVEGLISSR | 60 |
| Query: | 65 | NRYAKALNCNIEELSVNEVIDLIQENPRILKSPILIDDKRLQVGYKEDDIRAFLPRSIRN | 124 |
| | | NR+ K L + E++S+++ I +I ENP+I++ PI++D+KRL VGY E++IRAFLPR++R | |
| Sbjct: | 61 | NRFVKTLGVDFEDISLSQAIKIISENPQIMRRPIIMDEKRLHVGYNEEEIRAFLPRTVRV | 120 |
| Query: | 125 | VENAEARLRAAL | 136 |
| | | +EN ARLR+A+ | |
| Sbjct: | 121 | LENGGARLRSAI | 132 |

[6068] A related DNA sequence was identified in S. pyogenes <SEQ ID 3357> which encodes the amino acid sequence <SEQ ID 3358>. Analysis of this protein sequence reveals the following:

```
Possible site: 28
>>> Seems to have no N-terminal signal sequence
----- Final Results -----
                            bacterial cytoplasm --- Certainty = 0.2569(Affirmative) < succ>
                              bacterial membrane --- Certainty = 0.0000(Not Clear) < succ>
                                bacterial outside --- Certainty = 0.0000(Not Clear) < succ>
```

[6069] An alignment of the GAS and GBS proteins is shown below.

| Identities = 117/132 (88%), Positives = 128/132 (96%) | | | |
|---|---|---|---|
| Query: | 5 | MIKIYTISSCTSCKKAKTWLNAHQLPYKEQNLGKESLTRDEILEILTKTESGIESIVSSK | 64 |
| | | MIKIYTISSCTSCKKAKTWLNAH+L YKEQNLGKE LT++EIL IL+KTE+G+ESIVSSK | |
| Sbjct: | 1 | MIKIYTISSCTSCKKAKTWLNAHKLAYKEQNLGKEPLTKEEILAILSKTENGVESIVSSK | 60 |
| Query: | 65 | NRYAKALNCNIEELSVNEVIDLIQENPRILKSPILIDDKRLQVGYKEDDIRAFLPRSIRN | 124 |
| | | NRYAKAL+C+IEELSV+EVIDLIQ+NPRILKSPILIDDKRLQVGYKEDDIRAFLPRSIRN | |
| Sbjct: | 61 | NRYAKALDCDIEELSVSEVIDLIQDNPRILKSPILIDDKRLQVGYKEDDIRAFLPRSIRN | 120 |
| Query: | 125 | VENAEARLRAAL | 136 |
| | | +EN EARLRAAL | |
| Sbjct: | 121 | IENTEARLRAAL | 132 |

[6070] Based on this analysis, it was predicted that these proteins and their epitopes could be useful antigens for vaccines or diagnostics.

### EXAMPLE 1088

[6071] A DNA sequence (GBSx1163) was identified in S. agalactiae <SEQ ID 3359> which encodes the amino acid sequence <SEQ ID 3360>. Analysis of this protein sequence reveals the following:

```
Possible site: 49
>>> Seems to have no N-terminal signal sequence
----- Final Results -----
                            bacterial cytoplasm --- Certainty = 0.3097(Affirmative) < succ>
                              bacterial membrane --- Certainty = 0.0000(Not Clear) < succ>
                                bacterial outside --- Certainty = 0.0000(Not Clear) < succ>
```

[6072] The protein has homology with the following sequences in the GENPEPT database.

| >GP: BAB04987 GB: AP001511 unknown [Bacillus halodurans] | | | |
|---|---|---|---|
| Identities = 49/82 (59%), Positives = 64/82 (77%), Gaps = 1/82 (1%) | | | |
| Query: | 1 | MGFTDETVRFRLDDSN-KVEISETLTAVYRSLEEKGYNPINQIVGYVLSGDPAYVPRYND | 59 |
| | | M D T++F +++ V++ E L +VY +LEEKGYNPINQIVGY+LSGDPAY+PR+ D | |
| Sbjct: | 1 | MSSMDNTMKFNVNEEPVSVDVQEVLMSVYEALEEKGYNPINQIVGYLLSGDPAYIPRHKD | 60 |
| Query: | 60 | ARNQIRKYERDEIVEELVRYYL | 81 |
| | | AR IRK ERDE++EELV+ YL | |
| Sbjct: | 61 | ARTLIRKLERDELIEELVKSYL | 82 |

[6073] A related DNA sequence was identified in S. pyogenes <SEQ ID 3361> which encodes the amino acid sequence <SEQ ID 3362>. Analysis of this protein sequence reveals the following:

```
Possible site: 49
>>> Seems to have no N-terminal signal sequence
----- Final Results -----
                            bacterial cytoplasm --- Certainty = 0.3097(Affirmative) < succ>
                              bacterial membrane --- Certainty = 0.0000(Not Clear) < succ>
                                bacterial outside --- Certainty = 0.0000(Not Clear) < succ>
```

[6074] An alignment of the GAS and GBS proteins is shown below.

| Identities = 80/88 (90%), Positives = 85/88 (95%) | | | |
|---|---|---|---|
| Query: | 1 | MGFTDETVRFRLDDSNKVEISETLTAVYRSLEEKGYNPINQIVGYVLSGDPAYVPRYNDA | 60 |
| | | MGFTDETVRF+LDD +K +ISETLTAVY SL+EKGYNPINQIVGYVLSGDPAYVPRYNDA | |
| Sbjct: | 1 | MGFTDETVRFKLDDGDKRQISETLTAVYHSLDEKGYNPINQIVGYVLSGDPAYVPRYNDA | 60 |
| Query: | 61 | RNQIRKYERDEIVEELVRYYLQGNGIDL | 88 |
| | | RNQIRKYERDEIVEELVRYYLQGNGID+ | |
| Sbjct: | 61 | RNQIRKYERDEIVEELVRYYLQGNGIDV | 88 |

[6075] Based on this analysis, it was predicted that these proteins and their epitopes could be useful antigens for vaccines or diagnostics.

### EXAMPLE 1089

[6076] A DNA sequence (GBSx1164) was identified in S. agalactiae <SEQ ID 3363> which encodes the amino acid sequence <SEQ ID 3364>. Analysis of this protein sequence reveals the following:

```
Possible Site: 27
>>> Seems to have no N-terminal signal sequence
----- Final Results -----
                            bacterial cytoplasm --- Certainty = 0.1575(Affirmative) < succ>
                              bacterial membrane --- Certainty = 0.0000(Not Clear) < succ>
                                bacterial outside --- Certainty = 0.0000(Not Clear) < succ>
```

[6077] A related GBS nucleic acid sequence <SEQ ID 10257> which encodes amino acid sequence <SEQ ID 10258> was also identified.

[6078] The protein has homology with the following sequences in the GENPEPT database.

| >GP: CAB14698 GB: Z99118 similar to hypothetical proteins | | | |
|---|---|---|---|
| [Bacillus subtilis] | | | |
| Identities = 82/138 (59%), Positives = 109/138 (78%), Gaps = 1/138 (0%) | | | |
| Query: | 1 | MRIMGLDVGSKTVGVAISDPLGFTAQGLEIIKIDEESGNFGFDRLAELVKEYKVDKFVVG | 60 |
| | | MRI+GLD+G+KT+GVA+SD +G+TAQG+E IKI+E G++G RL+EL+K+Y +DK V+G | |
| Sbjct: | 1 | MRILGLDLGTKTLGVALSDEMGWTAQGIETIKINEAEGDYGLSRLSELIKDYTIDKIVLG | 60 |
| Query: | 61 | LPKNMNNTSGPRVEASQAYGDKITELFNLPVEYQDERLTTVQAERMLVEQADISRGKRKK | 120 |
| | | PKNMN T GPR EASQ + + +N+PV DERLTT+ AE+ML+ AD+SR KRKK | |
| Sbjct: | 61 | FPKNMNGTVGPRGEASQTFAKVLETTYNVPVVLWDERLTTMAAEKMLI-AADVSRQKRKK | 119 |
| Query: | 121 | VIDKLAAQLILQNYLDRM | 138 |
| | | VIDK+AA +ILQ YLD + | |
| Sbjct: | 120 | VIDKMAAVMILQGYLDSL | 137 |

[6079] A related DNA sequence was identified in S. pyogenes <SEQ ID 3365> which encodes the amino acid sequence <SEQ ID 3366>. Analysis of this protein sequence reveals the following:

```
Possible site: 27
>>> Seems to have no N-terminal signal sequence
----- Final Results -----
                            bacterial cytoplasm --- Certainty = 0.1575(Affirmative) < succ>
                              bacterial membrane --- Certainty = 0.0000(Not Clear) < succ>
                                bacterial outside --- Certainty = 0.0000(Not Clear) < succ>
```

[6080] An alignment of the GAS and GBS proteins is shown below.

| Identities = 114/139 (82%), Positives = 126/139 (90%) | | | |
|---|---|---|---|
| Query: | 1 | MRIMGLDVGSKTVGVAISDPLGFTAQGLEIIKIDEESGNFGFDRLAELVKEYKVDKFVVG | 60 |
| | | MRIMGLDVGSKTVGVAISDPLGFTAQGLEIIKIDEE FGF RL ELVK+Y+V++FV+G | |
| Sbjct: | 1 | MRIMGLDVGSKTVGVAISDPLGFTAQGLEIIKIDEEKAEFGFTRLEELVKQYQVEQFVIG | 60 |
| Query: | 61 | LPKNMNNTSGPRVEASQAYGDKITELFNLPVEYQDERLTTVQAERMLVEQADISRGKRKK | 120 |
| | | LPKNMNNT+GPRV+AS YG+ I LF LPV YQDERLTTV+A+RML+EQADISRGKRKK | |
| Sbjct: | 61 | LPKNMNNTNGPRVDASITYGNHIEHLFGLPVHYQDERLTTVEAKRMLIEQADISRGKRKK | 120 |
| Query: | 121 | VIDKLAAQLILQNYLDRMF | 139 |
| | | VIDKLAAQLILQNYL+R F | |
| Sbjct: | 121 | VIDKLAAQLILQNYLNRNF | 139 |

[6081] Based on this analysis, it was predicted that these proteins and their epitopes could be useful antigens for vaccines or diagnostics.

### EXAMPLE 1090

[6082] A DNA sequence (GBSx1165) was identified in S. agalactiae <SEQ ID 3367> which encodes the amino acid sequence <SEQ ID 3368>. Analysis of this protein sequence reveals the following:

```
Possible site: 56
>>> Seems to have no N-terminal signal sequence
----- Final Results -----
                            bacterial cytoplasm --- Certainty = 0.2631(Affirmative) < succ>
                              bacterial membrane --- Certainty = 0.0000(Not Clear) < succ>
                                bacterial outside --- Certainty = 0.0000(Not Clear) < succ>
```

[6083] The protein has homology with the following sequences in the GENPEPT database.

| >GP: CAB14697 GB: Z99118 yrzB [Bacillus subtilis] | | | |
|---|---|---|---|
| Identities = 50/94 (53%), Positives = 65/94 (68%), Gaps = 5/94 (5%) | | | |
| Query: | 12 | EHQHEVITLVDENGNETLFEILLTIDGREEFGKNYVLLVPAGAEEDEQGEIEIQAYSFTE | 71 |
| | | EH + IT+VD+ GNE L E+L T + EEFGK+YVL P +++DE E+EI A SFT | |
| Sbjct: | 2 | EHGEKNITIVDDQGNEQLCEVLFTFEN-EEFGKSYVLYYPIESKDDE--EVEILASSFTP | 58 |
| Query: | 72 | NADGTEGDLQPIPEDSDAEWDMIEEVFNSFLDEE | 105 |
| | | N DG G+L PI ++D EWDMIEE N+FL +E | |
| Sbjct: | 59 | NEDGENGELFPI--ETDEEWDMIEETLNTFLADE | 90 |

[6084] A related DNA sequence was identified in S. pyogenes <SEQ ID 3369> which encodes the amino acid sequence <SEQ ID 3370>. Analysis of this protein sequence reveals the following:

```
Possible site: 52
>>> Seems to have no N-terminal signal sequence
----- Final Results -----
                            bacterial cytoplasm --- Certainty = 0.3170(Affirmative) < succ>
                              bacterial membrane --- Certainty = 0.0000(Not Clear) < succ>
                                bacterial outside --- Certainty = 0.0000(Not Clear) < succ>
```

[6085] An alignment of the GAS and GBS proteins is shown below.

| Identities = 90/98 (91%), Positives = 94/98 (95%) | | | |
|---|---|---|---|
| Query: | 7 | HDHNHEHQHEVITLVDENGNETLFEILLTIDGREEFGKNYVLLVPAGAEEDEQGEIEIQA | 66 |
| | | H+H ++HQHEVITLVDE GNETLFEILLTIDGREEFGKNYVLLVPAG+EEDE GEIEIQA | |
| Sbjct: | 3 | HNHENDHQHEVITLVDEQGNETLFEILLTIDGREEFGKNYVLLVPAGSEEDESGEIEIQA | 62 |
| Query: | 67 | YSFTENADGTEGDLQPIPEDSDAEWDMIEEVFNSFLDE | 104 |
| | | YSFTEN DGTEGDLQPIPEDSDAEWDMIEEVFNSFLDE | |
| Sbjct: | 63 | YSFTENEDGTEGDLQPIPEDSDAEWDMIEEVFNSFLDE | 100 |

[6086] Based on this analysis, it was predicted that these proteins and their epitopes could be useful antigens for vaccines or diagnostics.

### EXAMPLE 1091

[6087] A DNA sequence (GBSx1166) was identified in S. agalactiae <SEQ ID 3371> which encodes the amino acid sequence <SEQ ID 3372>. Analysis of this protein sequence reveals the following:

```
Possible site: 20
>>> Seems to have no N-terminal signal sequence
----- Final Results -----
                            bacterial cytoplasm --- Certainty = 0.2059(Affirmative) < succ>
                              bacterial membrane --- Certainty = 0.0000(Not Clear) < succ>
                                bacterial outside --- Certainty = 0.0000(Not Clear) < succ>
```

[6088] The protein has no significant homology with any sequences in the GENPEPT database.

[6089] No corresponding DNA sequence was identified in S. pyogenes.

[6090] Based on this analysis, it was predicted that this protein and its epitopes, could be useful antigens for vaccines or diagnostics.

### EXAMPLE 1092

[6091] A DNA sequence (GBSx1167) was identified in S. agalactiae <SEQ ID 3373> which encodes the amino acid sequence <SEQ ID 3374>. This protein is predicted to be unnamed protein product. Analysis of this protein sequence reveals the following:

| Possible site: 53 | | | | |
|---|---|---|---|---|
| >>> Seems to have no N-terminal signal sequence | | | | |
| | INTEGRAL | Likelihood = −9.18 | Transmembrane | 314-330 (308-334) |
| | INTEGRAL | Likelihood = −6.21 | Transmembrane | 279-295 (274-300) |
| | INTEGRAL | Likelihood = −6.10 | Transmembrane | 136-152 (135-157) |
| | INTEGRAL | Likelihood = −5.31 | Transmembrane | 232-248 (226-253) |
| | INTEGRAL | Likelihood = −4.73 | Transmembrane | 163-179 (162-180) |
| | INTEGRAL | Likelihood = −3.13 | Transmembrane | 95-111 (94-119) |
| | INTEGRAL | Likelihood = −3.03 | Transmembrane | 386-402 (386-405) |
| | INTEGRAL | Likelihood = −2.18 | Transmembrane | 204-220 (204-221) |
| | INTEGRAL | Likelihood = −2.13 | Transmembrane | 40-56 (40-57) |
| | INTEGRAL | Likelihood = −1.70 | Transmembrane | 186-202 (182-202) |

```
----- Final Results -----
                              bacterial membrane --- Certainty = 0.4673(Affirmative) < succ>
                                bacterial outside --- Certainty = 0.0000(Not Clear) < succ>
                            bacterial cytoplasm --- Certainty = 0.0000(Not Clear) < succ>
```

[6092] A related GBS nucleic acid sequence <SEQ ID 10255> which encodes amino acid sequence <SEQ ID 10256> was also identified.

[6093] A related DNA sequence was identified in S. pyogenes <SEQ ID 3375> which encodes the amino acid sequence <SEQ ID 3376>. Analysis of this protein sequence reveals the following:

| Possible site: 53 | | | | |
|---|---|---|---|---|
| >>> Seems to have no N-terminal signal sequence | | | | |
| | INTEGRAL | Likelihood = −7.38 | Transmembrane | 315-331 (311-333) |
| | INTEGRAL | Likelihood = −6.48 | Transmembrane | 40-56 (37-61) |
| | INTEGRAL | Likelihood = −6.10 | Transmembrane | 278-294 (274-298) |
| | INTEGRAL | Likelihood = −5.57 | Transmembrane | 392-408 (387-410) |
| | INTEGRAL | Likelihood = −3.98 | Transmembrane | 186-202 (184-208) |
| | INTEGRAL | Likelihood = −3.93 | Transmembrane | 339-355 (338-356) |
| | INTEGRAL | Likelihood = −2.97 | Transmembrane | 235-251 (228-253) |
| | INTEGRAL | Likelihood = −2.44 | Transmembrane | 166-182 (166-182) |
| | INTEGRAL | Likelihood = −2.23 | Transmembrane | 106-122 (106-125) |
| | INTEGRAL | Likelihood = −1.81 | Transmembrane | 83-99 (83-101) |

```
----- Final Results -----
                              bacterial membrane --- Certainty = 0.3951(Affirmative) < succ>
                                bacterial outside --- Certainty = 0.0000(Not Clear) < succ>
                            bacterial cytoplasm --- Certainty = 0.0000(Not Clear) < succ>
```

[6094] A related sequence was also identified in GAS <SEQ ID 9179> which encodes the amino acid sequence <SEQ ID 9180>. Analysis of this protein sequence reveals the following:

| Possible cleavage site: 13 | | | | |
|---|---|---|---|---|
| >>> Seems to have a cleavable N-term signal seq. | | | | |
| | INTEGRAL | Likelihood = −7.38 | Transmembrane | 243-259 (239-261) |
| | INTEGRAL | Likelihood = −6.10 | Transmembrane | 206-222 (202-226) |
| | INTEGRAL | Likelihood = −5.57 | Transmembrane | 320-336 (315-338) |
| | INTEGRAL | Likelihood = −3.98 | Transmembrane | 114-130 (112-136) |
| | INTEGRAL | Likelihood = −3.93 | Transmembrane | 267-283 (266-284) |
| | INTEGRAL | Likelihood = −2.97 | Transmembrane | 163-179 (156-181) |
| | INTEGRAL | Likelihood = −2.44 | Transmembrane | 94-110 (94-110) |
| | INTEGRAL | Likelihood = −2.23 | Transmembrane | 34-50 (34-53) |

```
----- Final Results -----
                              bacterial membrane --- Certainty = 0.395(Affirmative) < succ>
                                bacterial outside --- Certainty = 0.0000(Not Clear) < succ>
                            bacterial cytoplasm --- Certainty = 0.0000(Not Clear) < succ>
```

[6095] An alignment of the GAS and GBS proteins is shown below.

| Identities = 200/480 (41%), Positives = 310/480 (63%), Gaps = 1/480 (0%) | | | |
|---|---|---|---|
| Query: | 40 | ILLYSVLSTLLAIANPLLTYFANGLQTQNLYTGLMMTKGQIPYSDVFATGGFLYYVTIAL | 99 |
| | | +L +S++ + L IA P LT ANGLQ+QNLY G+M+TKGQ+PYS F TGG Y+V IAL | |
| Sbjct: | 40 | LLFFSIIISSLTIAVPFLTDAANGLQSQNLYIGMMLTKGQLPYSAAFTTGGLFYFVIIAL | 99 |
| Query: | 100 | SYLLGSSIWLLIVQFIAYYVSGIYFYKLVYYVAQSEIVSIGMTLIFYIMNIVLGFGGMYP | 159 |
| | | SY LGS++WL+ VQ +Y+SG+Y YKL+ Y+ + V++ ++ +Y++++ LGFGG+YP | |
| Sbjct: | 100 | SYYLGSTLWLVFVQVFCFYLSGLYLYKLINYMTGFQKVALTFSISYYLLSVSLGFGGLYP | 159 |
| Query: | 160 | IQWALPFMLISLWFLIKFCVDNIVDEAFIFYGILAAFSLFIDPQTLIFWLCSFVLLTATN | 219 |
| | | Q A+PF+LIS WFL K+ + DEAFI +G + A ++ IDP TLIFW + V + + N | |
| Sbjct: | 160 | TQLAMPFILISAWFLTKYFACLVKDEAFILFGFVGALAMLIDPSTLIFWSFACVTVFSYN | 219 |
| Query: | 220 | IKQKQSLRGFYQFLCVVFGMILIAYTVGYFMFNLQIISSYIDKAIFYPFTYFARTNHSFL | 279 |
| | | I QK RGFYQ L +FGMIL+ YT GYF+ NLQ+++ Y+ + + YPFT+F N S L | |
| Sbjct: | 220 | ISQKHLARGFYQLLASIFGMILVFYTAGYFILNLQVLNPYLSQTMIYPFTFFKSGNLSLL | 279 |
| Query: | 280 | LSLAIQIVVLLGSGCLFGLWDFIQNRKKASYQIGLNFIACIFIIYAIMAIFSRDFNLYHF | 339 |
| | | LAIQ+ LG G L G+ + I+ K S ++ + + ++AIFS+D+ YH | |
| Sbjct: | 280 | FGLAIQLFFALGLGLLTGMENVIRRFKNNSDRVVKWLFVMVILESILVAIFSQDYRPYHL | 339 |
| Query: | 340 | LPALPFGLLLTSNKITILYQKVIDRRSHRRQY-FSGKSLIVDLFVKKTYYLPLLLVSLSI | 398 |
| | | LP LPFGL+LT+ + Y + + SHRR++ +G ++ +++K+ +YLP+L+V + | |
| Sbjct: | 340 | LPLLPFGLILTAIPVGYQYGIGLGQSSHRRRHGKNGVGRVMNIYLKRHFYLPILIVGTIL | 399 |
| Query: | 399 | GLLVYNTYQNVTLSKERRDISHYLTTKIDRDGKIYVWDKVASIYSQTRLKSASQFVLPHI | 458 |
| | | Y ++ L++ER I+ YL K+++ IYVWD + IY ++ KS SQF P I | |
| Sbjct: | 400 | ICSTYCFISSIPLNQERDHIASYLEQKLNKTQSIYVWDDTSKIYLDSKAKSVSQFSSPDI | 459 |
| Query: | 459 | NTAQKNNEKILKDELLQHGAKYFILNKNEKLPNELKSDIKKHYQEVPLSNITHFVLYRFK | 518 |
| | | NT ++++ KIL+DELL++ A Y ++N+ + LP ++ + +Y+ F++Y+ K | |
| Sbjct: | 460 | NTQKESHRKILEDELLENKAAYIVVNRYKNLPKIIQKVLSTNYKVDKQITTKSFIVYQKK | 519 |

[6096] A related GBS gene <SEQ ID 8727> and protein <SEQ ID 8728> were also identified. Analysis of this protein sequence reveals the following:

| Lipop: Possible site: −1 Crend: 0 | | | | |
|---|---|---|---|---|
| SRCFLG: 0 | | | | |
| McG: Length of UR: 34 | | | | |
| Peak Value of UR: 2.23 | | | | |
| Net Charge of CR: 0 | | | | |
| McG: Discrim Score: 7.72 | | | | |
| GvH: Signal Score (−7.5): −2.21 | | | | |
| Possible site: 60 | | | | |
| >>> Seems to have a cleavable N-term signal seq. | | | | |
| Amino Acid Composition: calculated from 61 | | | | |
| ALOM program count: 5 value: −9.18 threshold: 0.0 | | | | |
| | INTEGRAL | Likelihood = −9.18 | Transmembrane | 174-190 (168-194) |
| | INTEGRAL | Likelihood = −6.21 | Transmembrane | 139-155 (134-160) |
| | INTEGRAL | Likelihood = −5.31 | Transmembrane | 92-108 (86-113) |
| | INTEGRAL | Likelihood = −3.03 | Transmembrane | 246-262 (246-265) |
| | INTEGRAL | Likelihood = −2.18 | Transmembrane | 64-80 (64-81) |
| | PERIPHERAL | Likelihood = 3.29 | 194 | |

```
modified ALOM score: 2.34
icm1 HYPID: 7 CFP: 0.467
*** Reasoning Step: 3
----- Final Results -----
                              bacterial membrane --- Certainty = 0.4673(Affirmative) < succ>
                                bacterial outside --- Certainty = 0.0000(Not Clear) < succ>
                            bacterial cytoplasm --- Certainty = 0.0000(Not Clear) < succ>
```

[6097] The protein has homology with the following sequences in the databases:

[chemical structure]

[6098] Based on this analysis, it was predicted that these proteins and their epitopes could be useful antigens for vaccines or diagnostics.

### EXAMPLE 1093

[6099] A DNA sequence (GBSx1168) was identified in S. agalactiae <SEQ ID 3377> which encodes the amino acid sequence <SEQ ID 3378>. This protein is predicted to be anaerobic ribonucleotide reductase (nrdD). Analysis of this protein sequence reveals the following:

```
Possible site: 52
>>> Seems to have no N-terminal signal sequence
----- Final Results -----
                            bacterial cytoplasm --- Certainty = 0.3722(Affirmative) < succ>
                              bacterial membrane --- Certainty = 0.0000(Not Clear) < succ>
                                bacterial outside --- Certainty = 0.0000(Not Clear) < succ>
```

[6100] A related GBS nucleic acid sequence <SEQ ID 10253> which encodes amino acid sequence <SEQ ID 10254> was also identified.

[6101] The protein has homology with the following sequences in the GENPEPT database.

| >GP: AAD00215 GB: U73336 anaerobic ribonucleotide reductase | | | |
|---|---|---|---|
| [Lactococcus lactis subsp. cremoris] | | | |
| Identities = 539/725 (74%), Positives = 616/725 (84%), Gaps = 7/725 (0%) | | | |
| Query: | 10 | MTESDIKVIKRDGRLVSFDKYKIYTALLKASNKVIKMSPLVEAKLEMIADHVIAEIYNRF | 69 |
| | | +T +I VIKRDGR V F+ KI+ AL KA+ KV V L + D V++EI++RF | |
| Sbjct: | 10 | VTLEEINVIKRDGRSVKFNSEKIFDALTKAAKKVELTDKSV---LSELTDRVVSEIFSRF | 66 |
| Query: | 70 | KDNIKIYEIQNIVEHKLLEANEYAIAQEYINYRTQRDFERSQATDINFSIGKLINKDQTV | 129 |
| | | +N+KIYEIQ+IVE +LLE+ E A+A+EYI+YR RD R++ATDINF+I KLIN+DQTV | |
| Sbjct: | 67 | SENVKIYEIQSIVEQELLESGETALAEEYISYRANRDLARTKATDINFTIEKLINRDQTV | 126 |
| Query: | 130 | VNENANKDSDVFNTQRDLTAGIVGKSIGLKMLPSHVANAHQKGDIHYHDLDYSPYTPMTN | 189 |
| | | VNENANKDS+VFNTQRDLTAG V K+IGLK+LP HVANAHQKGDIHYHDLDYSP+T M N | |
| Sbjct: | 127 | VNENANKDSNVFNTQRDLTAGAVSKAIGLKLLPPHVANAHQKGDIHYHDLDYSPFTTMAN | 186 |
| Query: | 190 | CCLIDFKGMLANGFKIGNAEVESPKSIQTATAQISQIIANVASSQYGGCTADRIDEFLAP | 249 |
| | | CCLIDFK M NGFK+GNA+V+SPKSIQTATAQ SQIIANVASSQYGGC+ DR DE LAP | |
| Sbjct: | 187 | CCLIDFKNMFENGFKLGNAQVDSPKSIQTATAQASQIIANVASSQYGGCSFDRADEVLAP | 246 |
| Query: | 250 | YAQLNYQKHLKDAKEWVIED-KQEDYARAKTQKDIYDAMQSLEYEINTLFTSNGQTPFTS | 308 |
| | | YA+LNYQKHLKDA++W+ D K+E YAR KT KDIYDAMQSLEYEINTLFTSNGQTPF + | |
| Sbjct: | 247 | YAKLNYQKHLKDAQKWIDGDEKREAYAREKTAKDIYDAMQSLEYEINTLFTSNGQTPFVT | 306 |
| Query: | 309 | LGFGLGTNWFEREIQKAILKIRIQGLGSEHRTAIFPKLIFTLKKGLNLEEDSPNYDIKQL | 368 |
| | | +GFGLG +W+ REIQKAILK+RI GLGSEHRTAIFPKLIFTLK+GLNLE +PNYDIK+L | |
| Sbjct: | 307 | VGFGLGDDWYAREIQKAILKVRIGGLGSEHRTAIFPKLIFTLKRGLNLEVGTPNYDIKEL | 366 |
| Query: | 369 | ALECATKRMYPDVLSYDKIIDLTGSFKAPMGCRSFLQGWRDANGQDVTSGRMNLGVVTVN | 428 |
| | | ALEC+TKRMYPD+LSYDKI++LTGSFKA MGCRSFLQGW+DANG DVT+GR NLGVVTVN | |
| Sbjct: | 367 | ALECSTKRMYPDILSYDKIVELTGSFKASMGCRSFLQGWKDANGNDVTAGRNNLGVVTVN | 426 |
| Query: | 429 | LPRVAMESNGDMDKFWEIFNERMSIARDALVYRVERVKEAIPANAPILYQYGAFGERLGK | 488 |
| | | LPR+A+E+ G+ +KFWEIFNER+ IA DAL +RVER KEA P NAPIL+ GA G RL | |
| Sbjct: | 427 | LPRIALEAAGNKEKFWEIFNERVEIAHDALAFRVERAKEAQPKNAPILFMNGALG-RLDS | 485 |
| Query: | 489 | YDNVDRLFNHRRATVSLGYIGLYEVASVFYGGDWEDNHQAKAFTVDIVRKMKQLCADWSD | 548 |
| | | +VD L+N+ RATVSLGYIGLYEVA+ FYG WE N +AKAFT++IV++M + C DWS | |
| Sbjct: | 486 | EGSVDDLYNNERATVSLGYIGLYEVATTFYGPTWESNPEAKAFTIEIVKRMHEDCEDWSK | 545 |
| Query: | 549 | EYDYHFSVYSTPSESLTDRFCRLDTEKFGIVTDITDKEYYTNSFHYDVRKNPTPFEKLDF | 608 |
| | | YH+SVYSTPSESLTDRFCR+D EKFG V DITDK+YYTNSFHYDVRKNPTPFEKL+F | |
| Sbjct: | 546 | ASGYHYSVYSTPSESLTDRFCRMDKEKFGSVADITDKDYYTNSFHYDVRKNPTPFEKLEF | 605 |
| Query: | 609 | EKIYPETGASGGFIHYCEYPVLQQNPKALEAVWDYAYDRVGYLGTNTPIDKCYQCQFEGD | 668 |
| | | EK YP A+GGFIHYCEYPVLQQNPKALEAVWD+AYDR+GYLGTN PID CY C FEGD | |
| Sbjct: | 606 | EKDYP-VYANGGFIHYCEYPVLQQNPKALEAVWDFAYDRIGYLGTNAPIDHCYACGFEGD | 664 |
| Query: | 669 | FTPTDRGFTCPNCGNSDPKTVDVVKRTCGYLGNPQARPMVNGRHKEISARVKHMNGS-SI | 727 |
| | | FTPT+RGF CP CGN DPKT DVVKRTCGYLGNPQARPMV+GRHKEIS+RVKHMNGS | |
| Sbjct: | 665 | FTPTERGFKCPQCGNDDPKTCDVVKRTCGYLGNPQARPMVHGRHKEISSRVKHMNGSVGA | 724 |
| Query: | 728 | KNQGN | 732 |
| | | N GN | |
| Sbjct: | 725 | LNDGN | 729 |

[6102] A related DNA sequence was identified in S. pyogenes <SEQ ID 3379> which encodes the amino acid sequence <SEQ ID 3380>. Analysis of this protein sequence reveals the following:

```
Possible site: 52
>>> Seems to have no N-terminal signal sequence
----- Final Results -----
                            bacterial cytoplasm --- Certainty = 0.2975(Affirmative) < succ>
                              bacterial membrane --- Certainty = 0.0000(Not Clear) < succ>
                                bacterial outside --- Certainty = 0.0000(Not Clear) < succ>
```

[6103] An alignment of the GAS and GBS proteins is shown below.

| Identities = 641/731 (87%), Positives = 680/731 (92%) | | | |
|---|---|---|---|
| Query: | 1 | MMVLERERFMTESDIKVIKRDGRLVSFDKYKIYTALLKASNKVIKMSPLVEAKLEMIADH | 60 |
| | | M+ LE ++ + DIKVIKRDGRLV+FD KIY+ALLKAS KV +MSPLVEAKLE I+D | |
| Sbjct: | 1 | MVSLEEDKVTVQPDIKVIKRDGRLVNFDSTKIYSALLKASMKVTRMSPLVEAKLEAISDR | 60 |
| Query: | 61 | VIAEIYNRFKDNIKIYEIQNIVEHKLLEANEYAIAQEYINYRTQRDFERSQATDINFSIG | 120 |
| | | +IAEI RF NIKIYEIQNIVEHKLL ANEYAIA+EYINYRTQRDF RSQATDINFSI | |
| Sbjct: | 61 | IIAEIIERFPTNIKIYEIQNIVEHKLLAANEYAIAKEYINYRTQRDFARSQATDINFSID | 120 |
| Query: | 121 | KLINKDQTVVNENANKDSDVFNTQRDLTAGIVGKSIGLKMLPSHVANAHQKGDIHYHDLD | 180 |
| | | KLINKDQTVVNENANKDSDVFNTQRDLTAGIVGKSIGLKMLPSHVANAHQKGDIHYHDLD | |
| Sbjct: | 121 | KLINKDQTVVNENANKDSDVFNTQRDLTAGIVGKSIGLKMLPSHVANAHQKGDIHYHDLD | 180 |
| Query: | 181 | YSPYTPMTNCCLIDFKGMLANGFKIGNAEVESPKSIQTATAQISQIIANVASSQYGGCTA | 240 |
| | | YSPYTPMTNCCLIDFKGMLANGFKIGNAEVESPKSIQTATAQISQIIANVASSQYGGCTA | |
| Sbjct: | 181 | YSPYTPMTNCCLIDFKGMLANGFKIGNAEVESPKSIQTATAQISQIIANVASSQYGGCTA | 240 |
| Query: | 241 | DRIDEFLAPYAQLNYQKHLKDAKEWVIEDKQEDYARAKTQKDIYDAMQSLEYEINTLFTS | 300 |
| | | DRIDEFLAPYA+LN++KH+ DAK+W++E K+E YA KTQKDIYDAMQSLEYEINTLFTS | |
| Sbjct: | 241 | DRIDEFLAPYAELNFKKHMADAKKWIVETKRESYAFEKTQKDIYDAMQSLEYEINTLFTS | 300 |
| Query: | 301 | NGQTPFTSLGFGLGTNWFEREIQKAILKIRIQGLGSEHRTAIFPKLIFTLKKGLNLEEDS | 360 |
| | | NGQTPFTSLGFGLGT+WFEREIQKAIL IRI GLGSEHRTAIFPKLIFT+K+GLNLE DS | |
| Sbjct: | 301 | NGQTPFTSLGFGLGTSWFEREIQKAILTIRINGLGSEHRTAIFPKLIFTVKRGLNLEPDS | 360 |
| Query: | 361 | PNYDIKQLALECATKRMYPDVLSYDKIIDLTGSFKAPMGCRSFLQGWRDANGQDVTSGRM | 420 |
| | | PNYDIK LALECATKRMYPD+LSYDKIIDLTGSFK+PMGCRSFLQGW+D NGQDVTSGRM | |
| Sbjct: | 361 | PNYDIKTLALECATKRMYPDMLSYDKIIDLTGSFKSPMGCRSFLQGWKDENGQDVTSGRM | 420 |
| Query: | 421 | NLGVVTVNLPRVAMESNGDMDKFWEIFNERMSIARDALVYRVERVKEAIPANAPILYQYG | 480 |
| | | NLGVVT+NLPR+AMESNGDMDKFWE+FNERM I++DAL+YRVERV EA PANAPILYQYG | |
| Sbjct: | 421 | NLGVVTLNLPRIAMESNGDMDKFWELFNERMLISKDALIYRVERVTEAKPANAPILYQYG | 480 |
| Query: | 481 | AFGERLGKYDNVDRLFNHRRATVSLGYIGLYEVASVFYGGDWEDNHQAKAFTVDIVRKMK | 540 |
| | | AFG+RL K NV+ LF +RRATVSLGYIGLYEVASVFYGG WE N AKAFT+ IV+ MK | |
| Sbjct: | 481 | AFGKRLEKTGNVNDLFKNRRATVSLGYIGLYEVASVFYGGQWEGNPDAKAFTLSIVKAMK | 540 |
| Query: | 541 | QLCADWSDEYDYHFSVYSTPSESLTDRFCRLDTEKFGIVTDITDKEYYTNSFHYDVRKNP | 600 |
| | | Q C DWSDEY YHFSVYSTPSESLTDRFCRLDTEKFGIVTDITDKEYYTNSFHYDVRK+P | |
| Sbjct: | 541 | QACEDWSDEYGYHFSVYSTPSESLTDRFCRLDTEKFGIVTDITDKEYYTNSFHYDVRKSP | 600 |
| Query: | 601 | TPFEKLDFEKIYPETGASGGFIHYCEYPVLQQNPKALEAVWDYAYDRVGYLGTNTPIDKC | 660 |
| | | TPFEKLDFEK YPE GASGGFIHYCEYPVLQQNPKALEAVWDYAYDRVGYLGTNTPIDKC | |
| Sbjct: | 601 | TPFEKLDFEKDYPEAGASGGFIHYCEYPVLQQNPKALEAVWDYAYDRVGYLGTNTPIDKC | 660 |
| Query: | 661 | YQCQFEGDFTPTDRGFTCPNCGNSDPKTVDVVKRTCGYLGNPQARPMVNGRHKEISARVK | 720 |
| | | Y CQFEGDFTPT+RGFTCPNCGN+DPKTVDVVKRTCGYLGNPQARPMVNGRHKEISARVK | |
| Sbjct: | 661 | YNCQFEGDFTPTERGFTCPNCGNNDPKTVDVVKRTCGYLGNPQARPMVNGRHKEISARVK | 720 |
| Query: | 721 | HMNGSSIKNQG | 731 |
| | | HMNGS+IK G | |
| Sbjct: | 721 | HMNGSTIKYPG | 731 |

[6104] Based on this analysis, it was predicted that these proteins and their epitopes could be useful antigens for vaccines or diagnostics.

### EXAMPLE 1094

[6105] A DNA sequence (GBSx1169) was identified in S. agalactiae <SEQ ID 3381> which encodes the amino acid sequence <SEQ ID 3382>. Analysis of this protein sequence reveals the following:

```
Possible site: 27
>>> Seems to have no N-terminal signal sequence
----- Final Results -----
                            bacterial cytoplasm --- Certainty = 0.5372(Affirmative) < succ>
                              bacterial membrane --- Certainty = 0.0000(Not Clear) < succ>
                                bacterial outside --- Certainty = 0.0000(Not Clear) < succ>
```

[6106] The protein has no significant homology with any sequences in the GENPEPT database.

[6107] A related DNA sequence was identified in S. pyogenes <SEQ ID 3383> which encodes the amino acid sequence <SEQ ID 3384>. Analysis of this protein sequence reveals the following:

```
Possible site: 45
>>> Seems to have no N-terminal signal sequence
----- Final Results -----
                            bacterial cytoplasm --- Certainty = 0.6084(Affirmative) < succ>
                              bacterial membrane --- Certainty = 0.0000(Not Clear) < succ>
                                bacterial outside --- Certainty = 0.0000(Not Clear) < succ>
```

[6108] An alignment of the GAS and GBS proteins is shown below.

| Identities = 28/47 (59%), Positives = 40/47 (84%), Gaps = 1/47 (2%) | | | |
|---|---|---|---|
| Query: | 1 | MGKYQLDYKGQAQVQKFHEKHSTGENANQKSRLKDLRKQFLEKAKKK | 47 |
| | | MGKYQLDYKG QV++FHEKHS + ++KSR+++L+ +FLEK+KK+ | |
| Sbjct: | 1 | MGKYQLDYKGMQQVERFHEKHSK-KKTDKKSRVQELKARFLEKSKKQ | 46 |

[6109] Based on this analysis, it was predicted that these proteins and their epitopes could be useful antigens for vaccines or diagnostics.

### EXAMPLE 1095

[6110] A DNA sequence (GBSx1170) was identified in S. agalactiae <SEQ ID 3385> which encodes the amino acid sequence <SEQ ID 3386>. Analysis of this protein sequence reveals the following:

```
Possible site: 51
>>> Seems to have no N-terminal signal sequence
----- Final Results -----
                            bacterial cytoplasm --- Certainty = 0.0436(Affirmative) < succ>
                              bacterial membrane --- Certainty = 0.0000(Not Clear) < succ>
                                bacterial outside --- Certainty = 0.0000(Not Clear) < succ>
```

[6111] The protein has homology with the following sequences in the GENPEPT database.

| >GP: CAB95794 GB: AL359949 putative oxidoreductase [Streptomyces | | | |
|---|---|---|---|
| coelicolor A3(2)] | | | |
| Identities = 91/299 (30%), Positives = 147/299 (48%), Gaps = 7/299 (2%) | | | |
| Query: | 2 | LQLGIVGLGGISQKAYLPYMRQVTGVHWHLFTRQKQILEEV--NMLFGSSTAYDSLDSLA | 59 |
| | | +++G +GLG I+QK YLP + + G+ HL TR L V + + + LD+L | |
| Sbjct: | 1 | MKVGCIGLGDIAQKGYLPVLAALPGIELHLQTRTPATLTRVADKLRIPPAQRHADLDALL | 60 |
| Query: | 60 | EHPLDGVFIHVATSAHFDIAKLFLKKGIPVFMDKPLTEDYTSTKALYDLAKDHKTFLMAG | 119 |
| | | LD F+H T+AH +I L+ G+P ++DKPL + ++ L LA++ T L G | |
| Sbjct: | 61 | AQGLDAAFVHAPTAAHPEIVTRLLEAGVPTYVDKPLAYELADSERLVTLAEERGTSLAVG | 120 |
| Query: | 120 | FNRRFAPRIMEMKKVEDKNHIRTFKNAVNAPADFQYKLFDMFIHPLDTALFLTNNVVKRG | 179 |
| | | FNRR AP + + + I KN P D + + D FIH +DT FL V | |
| Sbjct: | 121 | FNRRHAPGYAQCAE-HPRELILMQKNRTGLPEDPRTMILDDFIHVVDTLRFLVPGPVDDV | 179 |
| Query: | 180 | YFVTKRDGNKILQVSVTLETDSEIIEASMNLQSGSRREIIEIESPEVTYSLDDLSNLSVI | 239 |
| | | + +G + V + L D MN SGS EI+E+ + + +L+ VI | |
| Sbjct: | 180 | TVRARTEGGLLHHVVLQLAGDGFTALGVMNRLSGSAEEILEVSGQDTKRQVVNLA--EVI | 237 |
| Query: | 240 | DGFDRRAI-GFGSWASTLEKRGFEPMIDAFIQAITTGVNPISPKSSLLSHFICDQINKA | 297 |
| | | D + + G W +RG E + AF+ A+ +G +S + +L +H +C+++ +A | |
| Sbjct: | 238 | DHKGQPTVRRRGDWVPVARQRGIEQAVLAFLDAVRSG-EVLSARDALATHELCERVVRA | 295 |

[6112] A related DNA sequence was identified in S. pyogenes <SEQ ID 3387> which encodes the amino acid sequence <SEQ ID 3388>. Analysis of this protein sequence reveals the following:

```
Possible site: 57
>>> Seems to have an uncleavable N-term signal seq
----- Final Results -----
                              bacterial membrane --- Certainty = 0.0000(Not Clear) < succ>
                                bacterial outside --- Certainty = 0.0000(Not Clear) < succ>
                            bacterial cytoplasm --- Certainty = 0.0000(Not Clear) < succ>
```

[6113] The protein has homology with the following sequences in the databases:

| >GP: AAF96942 GB: AE004430 oxidoreductase, Gfo/Idh/MocA family | | | |
|---|---|---|---|
| [Vibrio cholerae] | | | |
| Identities = 103/304 (33%), Positives = 158/304 (51%), Gaps = 11/304 (3%) | | | |
| Query: | 4 | LNIGIVGLGAISQKAYLPYMRQLSDITWHLSTRNAAVRQQVGQLFGHAILYSDVKELSKT | 63 |
| | | + I ++GLG I+QKAYLP + Q DI L TRN V + + + +D +++ + | |
| Sbjct: | 1 | MKIAMIGLGDIAQKAYLPVLAQWPDIELVLCTRNPKVLGTLATRYRVSATCTDYRDVLQY | 60 |
| Query: | 64 | NLDGVFIHAATSAHAELASLFLNQGIPVFMDKPIADNYLMTKNLYDLAKENQTFLMAGFN | 123 |
| | | +D V IHAAT H+ LA+ FL+ GIP F+DKP+A + +NLY+LA+++ L GFN | |
| Sbjct: | 61 | GVDAVMIHAATDVHSTLAAFFLHLGIPTFVDKPLAASAQECENLYELAEKHHQPLYVGFN | 120 |
| Query: | 124 | RRFTPRVKK-LSSLSTK-----RKVAVEKNDLNRPGDMTFKLFDFFIHPLDTALFLTEGT | 177 |
| | | RR P + LS L+ + R + EK+ PGD+ +FD FIHPLD+ + | |
| Sbjct: | 121 | RRHIPLYNQHLSELAQQECGALRSLRWEKHRHALPGDIRTFVFDDFIHPLDSVNLSRQCN | 180 |
| Query: | 178 | LLKGHFQYHLEAGLLSQVMVTLMTESMTTTASMNLQSGSRREVMEVQRAEETYHLENLDE | 237 |
| | | L H YH+ GLL+++ V T ASMN Q G E + Y ++ + | |
| Sbjct: | 181 | LDDLHLTYHMSEGLLARLDVQWQTGDTLLHASMNRQFGITTEHVTASYDNVAYLFDSFTQ | 240 |
| Query: | 238 | LSIYKGTEKRVLGFASWDTTLHKRGFETMIDAFLEAISTGVNPVS-PESSLLSHW----I | 292 |
| | | +++ ++ + W L +GF+ M+ +L+ + G P E +L SH I | |
| Sbjct: | 241 | GKMWRDNQESRVALKDWTPMLASKGFDAMVQDWLQVAAAGKLPTHIIERNLASHQLAEAI | 300 |
| Query: | 293 | CQQI | 296 |
| | | CQQI | |
| Sbjct: | 301 | CQQI | 304 |

[6114] An alignment of the GAS and GBS proteins is shown below.

| Identities = 168/308 (54%), Positives = 223/308 (71%) | | | |
|---|---|---|---|
| Query: | 1 | MLQLGIVGLGGISQKAYLPYMRQVTGVHWHLFTRQKQILEEVNMLFGSSTAYDSLDSLAE | 60 |
| | | ML +GIVGLG ISQKAYLPYMRQ++ + WHL TR + ++V LFG + Y + L++ | |
| Sbjct: | 3 | MLNIGIVGLGAISQKAYLPYMRQLSDITWHLSTRNAAVRQQVGQLFGHAILYSDVKELSK | 62 |
| Query: | 61 | HPLDGVFIHVATSAHFDIAKLFLKKGIPVFMDKPLTEDYTSTKALYDLAKDHKTFLMAGF | 120 |
| | | LDGVFIH ATSAH ++A LFL +GIPVFMDKP+ ++Y TK LYDLAK+++TFLMAGF | |
| Sbjct: | 63 | TNLDGVFIHAATSAHAELASLFLNQGIPVFMDKPIADNYLMTKNLYDLAKENQTFLMAGF | 122 |
| Query: | 121 | NRRFAPRIMEMKKVEDKNHIRTFKNAVNAPADFQYKLFDMFIHPLDTALFLTNNVVKRGY | 180 |
| | | NRRF PR+ ++ + K + KN +N P D +KLFD FIHPLDTALFLT + +G+ | |
| Sbjct: | 123 | NRRFTPRVKKLSSLSTKRKVAVEKNDLNRPGDMTFKLFDFFIHPLDTALFLTEGTLLKGH | 182 |
| Query: | 181 | FVTKRDGNKILQVSVTLETDSEIIEASMNLQSGSRREIIEIESPEVTYSLDDLSNLSVID | 240 |
| | | F + + QV VTL T+S ASMNLQSGSRRE++E++ E TY L++L LS+ | |
| Sbjct: | 183 | FQYHLEAGLLSQVMVTLMTESMTTTASMNLQSGSRREVMEVQRAEETYHLENLDELSIYK | 242 |
| Query: | 241 | GFDRRAIGFGSWASTLEKRGFEPMIDAFIQAITTGVNPISPKSSLLSHFICDQINKANAP | 300 |
| | | G ++R +GF SW +TL KRGFE MIDAF++AI+TGVNP+SP+SSLLSH+IC QI + | |
| Sbjct: | 243 | GTEKRVLGFASWDTTLHKRGFETMIDAFLEAISTGVNPVSPESSLLSHWICQQIADSQLS | 302 |
| Query: | 301 | FGMLNLKI | 308 |
| | | +G L +++ | |
| Sbjct: | 303 | YGELTVEL | 310 |

[6115] SEQ ID 3386 (GBS309) was expressed in E. coli as a GST-fusion product. SDS-PAGE analysis of total cell extract is shown in FIG. 68 (lane 10; MW 63 kDa).

[6116] GBS309-GST was purified as shown in FIG. 212, lane 10.

[6117] Based on this analysis, it was predicted that these proteins and their epitopes could be useful antigens for vaccines or diagnostics.

### EXAMPLE 1096

[6118] A DNA sequence (GBSx1171) was identified in S. agalactiae <SEQ ID 3389> which encodes the amino acid sequence <SEQ ID 3390>. Analysis of this protein sequence reveals the following:

```
Possible site: 27
>>> Seems to have no N-terminal signal sequence
----- Final Results -----
                            bacterial cytoplasm --- Certainty = 0.2983(Affirmative) < succ>
                              bacterial membrane --- Certainty = 0.0000(Not Clear) < succ>
                                bacterial outside --- Certainty = 0.0000(Not Clear) < succ>
```

[6119] The protein has homology with the following sequences in the GENPEPT database.

| >GP: BAB04222 GB: AP001508 unknown conserved protein in others | | | |
|---|---|---|---|
| [Bacillus halodurans] | | | |
| Identities = 52/129 (40%), Positives = 70/129 (53%), Gaps = 5/129 (3%) | | | |
| Query: | 39 | FEDWLDHNLNMELGVGVPDNFVPYIQFVSFDNDNNAIGFLNLRLRLNDTLLEKGGHIGYS | 98 |
| | | FE L + + GV +P N V + IG +N+R LND L +GGHIGY | |
| Sbjct: | 43 | FEHLLKTLKDYQHGVNLPANRVANTTYWLVHEQKRLIGAINIRHTLNDWLHHRGGHIGYG | 102 |
| Query: | 99 | IRPRQRGKGYAKEQLKLGIEQAHLKNINEILVTCHVDNDASKSVILANGGVLEDCLHQ-- | 156 |
| | | IRP +RGKGYA LKLG+E+A + ++L+TC +N S I NGGVL+ + | |
| Sbjct: | 103 | IRPSERGKGYATLMLKLGLEKAAALGLEKVLITCDKENLPSARTIQRNGGVLDSEVVDER | 162 |
| Query: | 157 | ---TERYWI | 162 |
| | | +RYWI | |
| Sbjct: | 163 | GIAIQRYWI | 171 |

[6120] A related DNA sequence was identified in S. pyogenes <SEQ ID 3391> which encodes the amino acid sequence <SEQ ID 3392>. Analysis of this protein sequence reveals the following:

```
Possible site: 59
>>> Seems to have no N-terminal signal sequence
----- Final Results -----
                            bacterial cytoplasm --- Certainty = 0.2195(Affirmative) < succ>
                              bacterial membrane --- Certainty = 0.0000(Not Clear) < succ>
                                bacterial outside --- Certainty = 0.0000(Not Clear) < succ>
```

[6121] An alignment of the GAS and GBS proteins is shown below.

| Identities = 90/164 (54%), Positives = 115/164 (69%), Gaps = 4/164 (2%) | | | |
|---|---|---|---|
| Query: | 1 | MKLRRPVLEDKEEILAMYKEFQKESSSVDG--GFYEPTMHFEDWLDHNLNMELGVGVPDN | 58 |
| | | M++RRP L+DK+ +L+M EF ++ S+ DG F ++E WL+ +L E+G+ | |
| Sbjct: | 1 | MEIRRPTLKDKDAVLSMINEFLEQKSATDGLWHFNVNDFNYETWLEDSLRQEMGLS--SQ | 58 |
| Query: | 59 | FVPYIQFVSFDNDNNAIGFLNLRLRLNDTLLEKGGHIGYSIRPRQRGKGYAKEQLKLGIE | 118 |
| | | VP IQ+V+FD + AIGFLNLRLRLN+ LLEKGGHIGYS+RP QRGKGYAKE LK + | |
| Sbjct: | 59 | GVPAIQYVAFDERSQAIGFLNLRLRLNERLLEKGGHIGYSVRPSQRGKGYAKEMLKQAVS | 118 |
| Query: | 119 | QAHLKNINEILVTCHVDNDASKSVILANGGVLEDCLHQTERYWI | 162 |
| | | A KNI ILVTC N AS++VI+AN G+LED TERYWI | |
| Sbjct: | 119 | YAISKNITTILVTCDETNVASRAVIVANVGILEDSRGGTERYWI | 162 |

[6122] Based on this analysis, it was predicted that these proteins and their epitopes could be useful antigens for vaccines or diagnostics.

### EXAMPLE 1097

[6123] A DNA sequence (GBSx1172) was identified in S. agalactiae <SEQ ID 3393> which encodes the amino acid sequence <SEQ ID 3394>. This protein is predicted to be anaerobic ribonucleotide reductase activator protein (nrdG). Analysis of this protein sequence reveals the following:

```
Possible site: 59
>>> Seems to have no N-terminal signal sequence
----- Final Results -----
                            bacterial cytoplasm --- Certainty = 0.4239(Affirmative) < succ>
                              bacterial membrane --- Certainty = 0.0000(Not Clear) < succ>
                                bacterial outside --- Certainty = 0.0000(Not Clear) < succ>
```

[6124] The protein has homology with the following sequences in the GENPEPT database.

| >GP: AAD00216 GB: U73336 anaerobic ribonucleotide reductase activator | | | |
|---|---|---|---|
| protein [Lactococcus lactis subsp. cremoris] | | | |
| Identities = 152/198 (76%), Positives = 176/198 (88%) | | | |
| Query: | 8 | NTPKPGEWKSEELSHGHIIDYKAFNFVDGEGVRNSLYVAGCMFHCKGCYNTATWSFRAGI | 67 |
| | | N PKPGEW+++ELS +I DYK FNFVDGEGVR SLYV+GCMFHC+GCYN ATWSFR G | |
| Sbjct: | 2 | NNPKPGEWRADELSQNYIADYKPFNFVDGEGVRCSLYVSGCMFHCEGCYNQATWSFRYGR | 61 |
| Query: | 68 | PYTKELEDQIMTDLEQPYVQGLTLLGGEPFLNTGILLPLLQRIRRELPEKDIWSWTGYTW | 127 |
| | | PYTKELED+IM DL +PYVQGLTLLGGEPFLNT L+PLL+RIRRELP+KDIWSWTGYTW | |
| Sbjct: | 62 | PYTKELEDKIMADLAEPYVQGLTLLGGEPFLNTTFLIPLLKRIRRELPDKDIWSWTGYTW | 121 |
| Query: | 128 | EEMMLETQDKLEMLSLIDILVDGRFDQSKRNLMLQFRGSSNQRIIDVQKSLKEGEVVIWE | 187 |
| | | EEMMLET DKLEML L+D+LVDGRF+ SK+NLMLQFRGSSNQRIIDV KS +G+VVIWE | |
| Sbjct: | 122 | EEMMLETDDKLEMLDLLDVLVDGRFELSKKNLMLQFRGSSNQRIIDVPKSRSKGQVVIWE | 181 |
| Query: | 188 | GLNDGDNSYEQVKRDDLL | 205 |
| | | LNDG+N++EQ+ ++ L+ | |
| Sbjct: | 182 | KLNDGENNFEQIHKEKLI | 199 |

[6125] A related DNA sequence was identified in S. pyogenes <SEQ ID 3395> which encodes the amino acid sequence <SEQ ID 3396>. Analysis of this protein sequence reveals the following:

```
Possible site: 59
>>> Seems to have no N-terminal signal sequence
----- Final Results -----
                            bacterial cytoplasm --- Certainty = 0.4111(Affirmative) < succ>
                              bacterial membrane --- Certainty = 0.0000(Not Clear) < succ>
                                bacterial outside --- Certainty = 0.0000(Not Clear) < succ>
```

[6126] An alignment of the GAS and GBS proteins is shown below.

| Identities = 167/202 (82%), Positives = 186/202 (91%) | | | |
|---|---|---|---|
| Query: | 4 | EASWNTPKPGEWKSEELSHGHIIDYKAFNFVDGEGVRNSLYVAGCMFHCKGCYNTATWSF | 63 |
| | | E WN PKP EW++EELS G IIDYKAFNFVDGEGVRNSLYV+GC+FHCKGCYN ATWSF | |
| Sbjct: | 4 | EKCWNNPKPKEWQAEELSQGRIIDYKAFNFVDGEGVRNSLYVSGCLFHCKGCYNAATWSF | 63 |
| Query: | 64 | RAGIPYTKELEDQIMTDLEQPYVQGLTLLGGEPFLNTGILLPLLQRIRRELPEKDIWSWT | 123 |
| | | +AG+PYT+ELE+QIMTDL QPYVQGLTLLGGEPFLNTGIL+PL++RIRRELPEKDIWSWT | |
| Sbjct: | 64 | KAGMPYTQELEEQIMTDLAQPYVQGLTLLGGEPFLNTGILIPLIKRIRRELPEKDIWSWT | 123 |
| Query: | 124 | GYTWEEMMLETQDKLEMLSLIDILVDGRFDQSKRNLMLQFRGSSNQRIIDVQKSLKEGEV | 183 |
| | | GYTWEEMMLET DKLEMLSLIDILVDGRFD +K+NLMLQFRGSSNQRIIDVQKSL EV | |
| Sbjct: | 124 | GYTWEEMMLETPDKLEMLSLIDILVDGRFDITKKNLMLQFRGSSNQRIIDVQKSLAAKEV | 183 |
| Query: | 184 | VIWEGLNDGDNSYEQVKRDDLL | 205 |
| | | +IW+ LNDGD ++EQ+ R+DLL | |
| Sbjct: | 184 | IIWDKLNDGDQTFEQISREDLL | 205 |

[6127] Based on this analysis, it was predicted that these proteins and their epitopes could be useful antigens for vaccines or diagnostics.

### EXAMPLE 1098

[6128] A DNA sequence (GBSx1173) was identified in S. agalactiae <SEQ ID 3397> which encodes the amino acid sequence <SEQ ID 3398>. Analysis of this protein sequence reveals the following:

| Possible site: 27 | | | | |
|---|---|---|---|---|
| >>> Seems to have no N-terminal signal sequence | | | | |
| | INTEGRAL | Likelihood = −3.03 | Transmembrane | 102-118 (101-119) |

```
----- Final Results -----
                              bacterial membrane --- Certainty = 0.2211(Affirmative) < succ>
                                bacterial outside --- Certainty = 0.0000(Not Clear) < succ>
                            bacterial cytoplasm --- Certainty = 0.0000(Not Clear) < succ>
```

[6129] The protein has homology with the following sequences in the GENPEPT database.

| >GP: AAD24446 GB: AF118389 unknown [Streptococcus suis] | | | |
|---|---|---|---|
| Identities = 97/240 (40%), Positives = 151/240 (62%), Gaps = 1/240 (0%) | | | |
| Query: | 2 | IKILIPTAKEMKV-CQNIAWPKLSAQTKIIIDYFSTLTVSDLEDIYRINTSAARCEAQRW | 60 |
| | | +KI+IP AKE+ +N ++ LS ++K ++D S V + Y++N + A EA RW | |
| Sbjct: | 1 | MKIIIPNAKEVNTNLENASFYLLSDRSKPVLDAISQFDVKKMAAFYKLNEAKAELEADRW | 60 |
| Query: | 61 | QDFKAKQLTLNPAIKLFNGLMYRNIKRHNLSTSEAQFMENSVFITSALYGIIPAMTLISP | 120 |
| | | + Q PA +L++GLMYR + R + + E ++ + V + +ALYG+I ISP | |
| Sbjct: | 61 | YRIRTGQAKTYPAWQLYDGLMYRYMDRRGIDSKEENYLRDHVRVATALYGLIHPFEFISP | 120 |
| Query: | 121 | HRLDFNTKIKINNNSLKVFWRENYDTFMQSDDIMVSLLSNEFETVFSPKERQKLIHLNFI | 180 |
| | | HRLDF +KI N SLK +WR YD + D++++SL S+EFE VFSP+ +++L+ + F+ | |
| Sbjct: | 121 | HRLDFQGSLKIGNQSLKQYWRPYYDQEVGDDELILSLASSEFEQVFSPQIQKRLVKILFM | 180 |
| Query: | 181 | EDRDGQLKTHSTISKKARGKCLTAMMENNCQTLEHLKQLRFDGFCYDNELSDSKQLTFVK | 240 |
| | | E++ GQLK HSTISKK RG+ L+ + +NN Q L ++ + DGF Y S + QLTF++ | |
| Sbjct: | 181 | EEKAGQLKVHSTISKKGRGRLLSWLAKNNIQELSDIQDFKVDGFEYCTSESTANQLTFIR | 240 |

[6130] A related GBS nucleic acid sequence <SEQ ID 10941> which encodes amino acid sequence <SEQ ID 10942> was also identified.

[6131] A related DNA sequence was identified in S. pyogenes <SEQ ID 3399> which encodes the amino acid sequence <SEQ ID 3400>. Analysis of this protein sequence reveals the following:

```
Possible site: 38
>>> Seems to have no N-terminal signal sequence
----- Final Results -----
                            bacterial cytoplasm --- Certainty = 0.3759(Affirmative) < succ>
                              bacterial membrane --- Certainty = 0.0000(Not Clear) < succ>
                                bacterial outside --- Certainty = 0.0000(Not Clear) < succ>
```

[6132] An alignment of the GAS and GBS proteins is shown below.

| Identities = 114/242 (47%), Positives = 155/242 (63%) | | | |
|---|---|---|---|
| Query: | 1 | MIKILIPTAKEMKVCQNIAWPKLSAQTKIIIDYFSTLTVSDLEDIYRINTSAARCEAQRW | 60 |
| | | M+ LIPTAKEM + + L ++ I+ + +T DL YRI +A+ E QRW | |
| Sbjct: | 1 | MLTFLIPTAKEMTIPKESHPHLLPQDSQAILKIMAAMTTEDLAKSYRIKEESAKKEQQRW | 60 |
| Query: | 61 | QDFKAKQLTLNPAIKLFNGLMYRNIKRHNLSTSEAQFMENSVFITSALYGIIPAMTLISP | 120 |
| | | QD ++Q PA +LFNGLMYR+IKR L+T E ++ V+ITS+ YGIIPA I+ | |
| Sbjct: | 61 | QDMASQQSLAYPAYQLFNGLMYRHIKRDKLTTQEQAYLTQQVYITSSFYGIIPANHPIAE | 120 |
| Query: | 121 | HRLDFNTKIKINNNSLKVFWRENYDTFMQSDDIMVSLLSNEFETVFSPKERQKLIHLNFI | 180 |
| | | HR DF+T+IKI SLK +WR Y+ F + ++SLLS+EF+ VFS +Q I F+ | |
| Sbjct: | 121 | HRHDFHTRIKIEGQSLKSYWRPCYNQFAKEHPQVISLLSSEFDDVFSKDCKQLWISPKFM | 180 |
| Query: | 181 | EDRDGQLKTHSTISKKARGKCLTAMMENNCQTLEHLKQLRFDGFCYDNELSDSKQLTFVKKQ | 242 |
| | | +++GQ KTHSTISKKARG LTA MENNCQT++ LK L F GF Y +LS + ++KK+ | |
| Sbjct: | 181 | AEKEGQFKTHSTISKKARGAFLTACMENNCQTVDSLKSLVFAGFYYHPDLSTDHEFVYIKKK | 242 |

[6133] SEQ ID 3398 (GBS428) was expressed in E. coli as a His-fusion product. SDS-PAGE analysis of total cell extract is shown in FIG. 80 (lane 6; MW 30.4 kDa). It was also expressed in E. coli as a GST-fusion product. SDS-PAGE analysis of total cell extract is shown in FIG. 173 (lane 4; MW 55 kDa).

[6134] GBS428-GST was purified as shown in FIG. 220, lane 6-7.

[6135] Based on this analysis, it was predicted that these proteins and their epitopes could be useful antigens for vaccines or diagnostics.

### EXAMPLE 1099

[6136] A DNA sequence (GBSx1174) was identified in S. agalactiae <SEQ ID 3401> which encodes the amino acid sequence <SEQ ID 3402>. Analysis of this protein sequence reveals the following:

Possible site: 23
>>> Seems to have an uncleavable N-term signal seq

| | | | |
|---|---|---|---|
| INTEGRAL | Likelihood = −0.59 | Transmembrane | 3-19 (3-19) |

```
----- Final Results -----
                              bacterial membrane --- Certainty = 0.1235(Affirmative) < succ>
                                bacterial outside --- Certainty = 0.0000(Not Clear) < succ>
                            bacterial cytoplasm --- Certainty = 0.0000(Not Clear) < succ>
```

[6137] A related GBS nucleic acid sequence <SEQ ID 10251> which encodes amino acid sequence <SEQ ID 10252> was also identified.

[6138] The protein has homology with the following sequences in the GENPEPT database.

| >GP: BAB07024 GB: AP001518 unknown conserved | | | |
|---|---|---|---|
| protein [Bacillus halodurans] | | | |
| Identities = 86/275 (31%), Positives = 143/275 (51%), Gaps = 6/275 (2%) | | | |
| Query: | 17 | MSYPYKANHSIESITLKVNDLENLVNFYSDIIGLTVIDKSSTRALLGVNQKIPLIILEKT | 76 |
| | | M + + N ++ + +KV+DL + FY +IIG V+++S A L N + PL+++E+ | |
| Sbjct: | 1 | MEFHRQPNTFVDLVNIKVSDLSRALTFYQEIIGFQVLERSERSATLTANGRTPLLVIEQP | 60 |
| Query: | 77 | E---LEKHSTYGLYHTAILVPDEYHLSLALNHLLSQHIPLEGGADHGYSNAIYLSDPEGN | 133 |
| | | + ++ T GLYH A+L+P L LNHLL PL+G +DH S AIY +DP+GN | |
| Sbjct: | 61 | DPVIAKQPRTTGLYHFALLLPSRADLGRFLNHLLQSGYPLQGASDHLVSEAIYFADPDGN | 120 |
| Query: | 134 | GIEIYNDKDISMWDIRESGQIIGITERLDIDNLLDSLVNVPNNYKLSEKTSIGHIHLSVK | 193 |
| | | G+E+Y D+ S WD +G++ TE + +NLL + P L +T +GHIHL V | |
| Sbjct: | 121 | GVEVYADRPSSSWD-WSNGEVKMSTEPIHAENLLAEGKDEPWT-ALPPETILGHIHLHVA | 178 |
| Query: | 194 | DAKISSKLYQNVFGLDEKFAIPT-ASWIASGNYHHHLAFNNWAGPNLSKNQEDRPGISLL | 252 |
| | | + + Y G + + A +I++GNYHHH+ N W G E G+ | |
| Sbjct: | 179 | NLFEAETFYIEGLGFNVVARLGNQALFISTGNYHHHIGLNTWNGVGAPTPPENSVGLKWF | 238 |
| Query: | 253 | TIAYNDDNLFRDSLKKAQLYQLTFLEKQDHYYIIE | 287 |
| | | ++ Y + + ++ + + K ++I+ | |
| Sbjct: | 239 | SLTYPSEEVRAKTVNRLETIGFQVERKHGEEWVID | 273 |

[6139] A related DNA sequence was identified in S. pyogenes <SEQ ID 3403> which encodes the amino acid sequence <SEQ ID 3404>. Analysis of this protein sequence reveals the following:

```
Possible site: 38
>>> Seems to have no N-terminal signal sequence
----- Final Results -----
                            bacterial cytoplasm --- Certainty = 0.0936(Affirmative) < succ>
                              bacterial membrane --- Certainty = 0.0000(Not Clear) < succ>
                                bacterial outside --- Certainty = 0.0000(Not Clear) < succ>
```

[6140] An alignment of the GAS and GBS proteins is shown below.

| Identities = 143/282 (50%), Positives = 194/282 (68%) | | | |
|---|---|---|---|
| Query: | 17 | MSYPYKANHSIESITLKVNDLENLVNFYSDIIGLTVIDKSSTRALLGVNQKIPLIILEKT | 76 |
| | | M YPY + S+ +++L V DL + FY+ IIGL V+ + +T L + K ++ L +T | |
| Sbjct: | 1 | MIYPYNSTISLGTVSLNVTDLAKMTTFYTSIIGLQVLSQDTTSRQLTTDGKTVILELRQT | 60 |
| Query: | 77 | ELEKHSTYGLYHTAILVPDEYHLSLALNHLLSQHIPLEGGADHGYSNAIYLSDPEGNGIE | 136 |
| | | L YGLYHTA LVPD + L L LNH L++ I LEG ADHG+S AIYLSDPEGNGIE | |
| Sbjct: | 61 | PLPGDKAYGLYHTAFLVPDRHSLGLVLNHFLTRSISLEGAADHGHSEAIYLSDPEGNGIE | 120 |
| Query: | 137 | IYNDKDISMWDIRESGQIIGITERLDIDNLLDSLVNVPNNYKLSEKTSIGHIHLSVKDAK | 196 |
| | | IY+DK + WDIR++GQIIG+TE D ++L+ L ++P ++ L++ T I H+HLSVK+A | |
| Sbjct: | 121 | IYHDKAVEHWDIRDNGQIIGVTEPTDTKSILEQLTDIPKHFLLAQDTRIRHVHLSVKNAL | 180 |
| Query: | 197 | ISSKLYQNVFGLDEKFAIPTASWIASGNYHHHLAFNNWAGPNLSKNQEDRPGISLLTIAY | 256 |
| | | SS LYQ VF L +K IP+ASWIASGNY+HHLAFN+W+ P L K+QE PG++ LTI | |
| Sbjct: | 181 | ASSLLYQKVFDLGDKMTIPSASWIASGNYYHHLAFNHWSAPYLKKHQEGAPGLAFLTIHI | 240 |
| Query: | 257 | NDDNLFRDSLKKAQLYQLTFLEKQDHYYIIEDFDGIRIKVVL | 298 |
| | | LF +LKKA+L+ L L++ + ED +GIR+ V+L | |
| Sbjct: | 241 | ETPLLFSATLKKARLHGLAILQEDSSSFTTEDEEGIRVNVIL | 282 |

[6141] SEQ ID 3402 (GBS429) was expressed in E. coli as a His-fusion product. SDS-PAGE analysis of total cell extract is shown in FIG. 80 (lane 7; MW 34.2 kDa).

[6142] GBS429-His was purified as shown in FIG. 214, lane 9.

[6143] Based on this analysis, it was predicted that these proteins and their epitopes could be useful antigens for vaccines or diagnostics.

### EXAMPLE 1100

[6144] A DNA sequence (GBSx1175) was identified in S. agalactiae <SEQ ID 3405> which encodes the amino acid sequence <SEQ ID 3406>. Analysis of this protein sequence reveals the following:

```
Possible site: 59
>>> Seems to have no N-terminal signal sequence
----- Final Results -----
                            bacterial cytoplasm --- Certainty = 0.2362(Affirmative) < succ>
                              bacterial membrane --- Certainty = 0.000(Not Clear) < succ>
                                bacterial outside --- Certainty = 0.0000(Not Clear) < succ>
```

[6145] A related GBS nucleic acid sequence <SEQ ID 10249> which encodes amino acid sequence <SEQ ID 10250> was also identified.

[6146] The protein has homology with the following sequences in the GENPEPT database.

| >GP: AAC21682 GB: U32686 conserved hypothetical | | | |
|---|---|---|---|
| protein [Haemophilus influenzae Rd] | | | |
| Identities = 89/261 (34%), Positives = 151/261 (57%), Gaps = 4/261 (1%) | | | |
| Query: | 10 | MVRLIFSDIDGTLINSNFKVTPKTRQGIKQIVAQGATFVPISARMPEAITPIMEQIGIDS | 69 |
| | | M + +FSD +GTL+ S ++P+T IK++ A G FVPISAR P I P +Q+ ++ | |
| Sbjct: | 2 | MYKAVFSDFNGTLLTSQHTISPRTVVVIKRLTANGIPFVPISARSPLGILPYWKQLETNN | 61 |
| Query: | 70 | YIISYNGALIQDMQQKTIASHTMDGQVALQVCSYVSKHYSKIAWNVYRYHEWYSCDKENE | 129 |
| | | +++++GALI + + I S ++ + L++ + +++H + N Y ++ ++ D EN+ | |
| Sbjct: | 62 | VLVAFSGALILNQNLEPIYSVQIEPKDILEINTVLAEH-PLLGVNYYTNNDCHARDVENK | 120 |
| Query: | 130 | WVQKEEEIVGLQSKEMSLMELEKQDRIHKLLLMGEPSLMGELENTLKAQYPHLSIAQSAP | 189 |
| | | WV E + ++ + HK+ ++GE + E+E LK ++PHLSI +S | |
| Sbjct: | 121 | WVIYERSVTKIEIHPFDEVATRSP---HKIQIIGEAEEIIEIEVLLKEKFPHLSICRSHA | 177 |
| Query: | 190 | YFIEIMAPGIEKGKSAKTLADYLDISLADSIAFGDNYNDLNLLEIVGKGFVMGNAPKDLQ | 249 |
| | | F+E+M KG + + L DY + + IAFGDN+NDL++LE VG G MGNAP +++ | |
| Sbjct: | 178 | NFLEVMHKSATKGSAVRFLEDYFGVQTNEVIAFGDNFNDLDMLEHVGLGVAMGNAPNEIK | 237 |
| Query: | 250 | ERIGNVTQDNDNDGIYYALVE | 270 |
| | | + VT N+ DG+ L E | |
| Sbjct: | 238 | QAANVVTATNNEDGLALILEE | 258 |

[6147] Based on this analysis, it was predicted that these proteins and their epitopes could be useful antigens for vaccines or diagnostics.

### EXAMPLE 1101

[6148] A DNA sequence (GBSx1176) was identified in S. agalactiae <SEQ ID 3409> which encodes the amino acid sequence <SEQ ID 3410>. Analysis of this protein sequence reveals the following:

```
Possible site: 19
>>> May be a lipoprotein
----- Final Results -----
                              bacterial membrane --- Certainty = 0.0000(Not Clear) < succ>
                                bacterial outside --- Certainty = 0.0000(Not Clear) < succ>
                            bacterial cytoplasm --- Certainty = 0.0000(Not Clear) < succ>
```

[6149] The protein has homology with the following sequences in the GENPEPT database.

| >GP: AAG07223 GB: AE004801 hypothetical protein [Pseudomonas aeruginosa] | | | |
|---|---|---|---|
| Identities = 103/283 (36%), Positives = 165/283 (57%), Gaps = 1/283 (0%) | | | |
| Query: | 33 | KHIGILQYVEHPSLTATRKGFIKELAKEGYKDGKNIKIEYKNAQGDQSNIQSISEKLIKD | 92 |
| | | K + + VEHP+L A R G + L + GY+DGKN+K +Y++AQG+ I+ K I D | |
| Sbjct: | 31 | KSVAVTAIVEHPALDAARDGVKEALQEAGYEDGKNLKWQYQSAQGNTGTAAQIARKFIGD | 90 |
| Query: | 93 | NK-LVLGIATPAAQSLTTVSTETPILFTAVTDPVSAELVKSMKKPEGLATGTSDMSPIKK | 151 |
| | | +++GIATP+AQ+L + PI+F+ VTDPV A L S + TG SDM + K | |
| Sbjct: | 91 | KPDVIVGIATPSAQALVAATKSIPIVFSTVTDPVGAHLTPSWEASGTNVTGVSDMLALDK | 150 |
| Query: | 152 | QVSLLRKVMPKVKRVGIMYTTSERNSEVQVKQAKKIFQEAGIKTSVKGISSTNDVQDTAK | 211 |
| | | Q+ L++KV+P KR+G++Y E NS V VK+ K++ + G+ + DV A+ | |
| Sbjct: | 151 | QIELIKKVVPGAKRIGMVYNPGEANSVVVVKELKELLPKMGLSLVEASAPRSVDVSSAAR | 210 |
| Query: | 212 | SLMSKTEVIFVPTDNIIASSVTLLGNLSKELKVPVVGGSADMVPSGLLFSYGADYEALGR | 271 |
| | | SL+ K + I+ TDN + S+ L + + K+P++ D V G + + G +Y+ +G+ | |
| Sbjct: | 211 | SLVGKVDAIYTNTDNNVVSAYEALVKVGNDAKIPLIASDTDSVKRGAIAALGINYKEMGK | 270 |
| Query: | 272 | QTARQAVKILKGKDVAKVPSEYPQNLKVVVNEDMAKELGIDVS | 314 |
| | | QT R V+ILKG+ ++ E NL++ VN A++ G+ +S | |
| Sbjct: | 271 | QTGRMVVRILKGEKPGEIKPETSDNLQLFVNPGAAQKQGVTLS | 313 |

[6150] There is also homology to SEQ ID 2712.

[6151] SEQ ID 3410 (GBS188) was expressed in E. coli as a His-fusion product. SDS-PAGE analysis of total cell extract is shown in FIG. 39 (lane 2; MW 36.6 kDa).

[6152] The GBS188-His fusion product was purified (FIG. 204, lane 6) and used to immunise mice. The resulting antiserum was used for Western blot (FIG. 247), FACS, and in the in vivo passive protection assay (Table III). These tests confirm that the protein is immunoaccessible on GBS bacteria and that it is an effective protective immunogen.

[6153] Based on this analysis, it was predicted that this protein and its epitopes, could be useful antigens for vaccines or diagnostics.

### EXAMPLE 1102

[6154] A DNA sequence (GBSx1177) was identified in S. agalactiae <SEQ ID 3411> which encodes the amino acid sequence <SEQ ID 3412>. This protein is predicted to be probable permease of ABC transporter (rbsC). Analysis of this protein sequence reveals the following:

| Possible site: 21 | | | | |
|---|---|---|---|---|
| >>> Seems to have a cleavable N-term signal seq. | | | | |
| | INTEGRAL | Likelihood = −16.13 | Transmembrane | 132-148 (124-160) |
| | INTEGRAL | Likelihood = −6.42 | Transmembrane | 241-257 (238-258) |
| | INTEGRAL | Likelihood = −6.32 | Transmembrane | 264-280 (260-284) |
| | INTEGRAL | Likelihood = −6.00 | Transmembrane | 213-229 (207-235) |
| | INTEGRAL | Likelihood = −4.67 | Transmembrane | 58-74 (57-75) |
| | INTEGRAL | Likelihood = −1.38 | Transmembrane | 36-52 (36-52) |
| | INTEGRAL | Likelihood = −0.85 | Transmembrane | 90-106 (87-106) |

```
----- Final Results -----
                              bacterial membrane --- Certainty = 0.7453(Affirmative) < succ>
                                bacterial outside --- Certainty = 0.0000(Not Clear) < succ>
                            bacterial cytoplasm --- Certainty = 0.0000(Not Clear) < succ>
```

[6155] The protein has homology with the following sequences in the GENPEPT database.

| >GP: AAG07224 GB: AE004801 probable permease of ABC transporter | | | |
|---|---|---|---|
| [Pseudomonas aeruginosa] | | | |
| Identities = 114/285 (40%), Positives = 175/285 (61%), Gaps = 3/285 (1%) | | | |
| Query: | 5 | ILSGISQGLLWSIMAIGVFITFRILDIADLSAEGAFPMGAAVCALCIVNDINPIVATIAG | 64 |
| | | + + GL++S++A+GVFI+FR+L DL+ +G+FP+G AVCA I +P AT+A | |
| Sbjct: | 6 | LFGALEIGLIFSLVALGVFISFRLLRFPDLTVDGSFPLGGAVCATLIALGWDPYSATLAA | 65 |
| Query: | 65 | MLGGMLAGLVSGFLHTKMKIPALLTGIITLTGLYSINLLVLGRSNVSFALKNTLVTMVTR | 124 |
| | | G LAGL +G L+ K+KI LL I+ + LYSINL ++G+ NV + TL T++ | |
| Sbjct: | 66 | TAAGALAGLATGLLNVKLKIMDLLASILMMIALYSINLRIMGKPNVPLIAEPTLFTLLQP | 125 |
| Query: | 125 | LGLNKLSAVLLIGIVCVGLVILILYLFLNTQLGLALRATGDNEAMGQANSIKVDRMKMLG | 184 |
| | | L+ L+ + V L+L F TQ GLA+RATG N M +A + M +LG | |
| Sbjct: | 126 | EWLSDYVFRPLLLVFIVIAAKLLLDWFFTTQKGLAIRATGSNPRMARAQGVNTGGMILLG | 185 |
| Query: | 185 | YMIGNGLIALSGALLAQNNGYADLNMGVGTIVIGLASIILAEVMIKYLPLGKRLWSIVLG | 244 |
| | | I N L+AL+GAL AQ G AD++MG+GTIVIGLA++I+ E ++ L +++LG | |
| Sbjct: | 186 | MAISNALVALAGALFAQTQGGADISMGIGTIVIGLAAVIVGESILPSRRLILATLAVILG | 245 |
| Query: | 245 | SVLYRMIIVFILTTD---IDAQMIKLVSAILLALILYVPELRAKL | 286 |
| | | +++YR I L +D + AQ + LV+A+L+ + L +P ++ +L | |
| Sbjct: | 246 | AIVYRFFIALALNSDFIGLQAQDLNLVTAVLVTVALVIPMMKKRL | 290 |

[6156] There is also homology to SEQ ID 2716.

[6157] Based on this analysis, it was predicted that this protein and its epitopes, could be useful antigens for vaccines or diagnostics.

### EXAMPLE 1103

[6158] A DNA sequence (GBSx1178) was identified in S. agalactiae <SEQ ID 3413> which encodes the amino acid sequence <SEQ ID 3414>. This protein is predicted to be ABC transporter. Analysis of this protein sequence reveals the following:

```
Possible site: 41
>>> Seems to have no N-terminal signal sequence
----- Final Results -----
                            bacterial cytoplasm --- Certainty = 0.3798(Affirmative) < succ>
                              bacterial membrane --- Certainty = 0.0000(Not Clear) < succ>
                                bacterial outside --- Certainty = 0.0000(Not Clear) < succ>
```

[6159] The protein has homology with the following sequences in the GENPEPT database.

| >GP: AAF86640 GB: AF162694 ABC transporter [Enterococcus gallinarum] | | | |
|---|---|---|---|
| Identities = 171/264 (64%), Positives = 213/264 (79%), Gaps = 1/264 (0%) | | | |
| Query: | 3 | LLELVNLHKTFEKGTVNENHVLRGLDLTIEDGDFISVIGGNGAGKSTLLNCIAGLIPIDQ | 62 |
| | | +L + +LH+TFEKGT+NENHVLRG+DLT+ GDFI++IGGNGAGKSTLLN IAG IP +Q | |
| Sbjct: | 5 | VLTISDLHQTFEKGTINENHVLRGIDLTMNSGDFITIIGGNGAGKSTLLNSIAGTIPTEQ | 64 |
| Query: | 63 | GAITLDNQSITKDSVEKRSKDISRVFQDPRMGTATNLTIEENMAIAHKRGNKRHIFRQSV | 122 |
| | | G I L ++ IT+ SV +RSK+ISRVFQDPRMGTA LT+EEN+A+A+KRG R F V | |
| Sbjct: | 65 | GKIVLGDKEITRHSVTRRSKEISRVFQDPRMGTAVRLTVEENLALAYKRGQVRG-FSSGV | 123 |
| Query: | 123 | TDDDRQLFKKSLSQLGLGLENRMKTDAAFLSGGQRQALTLAMATLVRPKLLLLDEHTAAL | 182 |
| | | R FK+ L++L LGLENR+ T+ LSGGQRQA+TL MATL +PKL+LLDEHTAAL | |
| Sbjct: | 124 | KGKHRAFFKEKLARLNLGLENRLTTEIGLLSGGQRQAITLLMATLQQPKLILLDEHTAAL | 183 |
| Query: | 183 | DPKTSDMVMELTQKVIEEQRLTALMITHNMEHAIAYGNRLVMLYHGKIVVDVKGEAKRNL | 242 |
| | | DPKTS VM LT ++I+EQ+LTA M+TH+ME AI YGNRL+ML+ GKIVVD+ GE K++L | |
| Sbjct: | 184 | DPKTSMTVMALTDQLIQEQQLTAFMVTHDMEDAIRYGNRLIMLHQGKIVVDITGEEKQSL | 243 |
| Query: | 243 | TVAELMELFHKNSGQQLIDDALVL | 266 |
| | | TV +LM LFH+NSG +L DD L+L | |
| Sbjct: | 244 | TVPDLMALFHQNSGTELKDDQLLL | 267 |

[6160] There is also homology to SEQ ID 2720:

| Identities = 116/249 (46%), Positives = 166/249 (66%), Gaps = 1/249 (0%) | | | |
|---|---|---|---|
| Query: | 3 | LLELVNLHKTFEKGTVNENHVLRGLDLTIEDGDFISVIGGNGAGKSTLLNCIAGLIPIDQ | 62 |
| | | ++EL+N + G + +L + LTI + DF++++GGNGAGKSTL N IAG + + + | |
| Sbjct: | 4 | IIELINATVDVDNGFEDAKTILDNVTLTIYEHDFLTILGGNGAGKSTLFNVIAGTLSLTR | 63 |
| Query: | 63 | GAITLDNQSITKDSVEKRSKDISRVFQDPRMGTATNLTIEENMAIAHKRGNKRHIFRQSV | 122 |
| | | G I + Q +T EKR+ +SRVFQD +MGTA +T+ EN+ IA +RG KR + + + | |
| Sbjct: | 64 | GQIRILGQDVTHWPAEKRALYLSRVFQDSKMGTAPRMTVAENLLIARQRGGKRSLASRKI | 123 |
| Query: | 123 | TDDDRQLFKKSLSQLGLGLENRMKTDAAFLSGGQRQALTLAMATLVRPKLLLLDEHTAAL | 182 |
| | | T+ F+ + + G GLE ++T A LSGGQRQAL+L MATL +P LLLLDEHTAAL | |
| Sbjct: | 124 | TEHLAS-FEDLVKRTGNGLEKHLETPAGLLSGGQRQALSLLMATLKKPALLLLDEHTAAL | 182 |
| Query: | 183 | DPKTSDMVMELTQKVIEEQRLTALMITHNMEHAIAYGNRLVMLYHGKIVVDVKGEAKRNL | 242 |
| | | DPKTS +M+LT + + + LTALMITH+ME A+ YGNRL+++ G I+ D+ K L | |
| Sbjct: | 183 | DPKTSQSLMQLTDEFVTKDGLTALMITHHMEDALTYGNRLIVMKDGNIIKDLNQMEKEQL | 242 |
| Query: | 243 | TVAELMELF | 251 |
| | | T+ + +LF | |
| Sbjct: | 243 | TITDYYQLF | 251 |

[6161] Based on this analysis, it was predicted that this protein and its epitopes, could be useful antigens for vaccines or diagnostics.

### EXAMPLE 1104

[6162] A DNA sequence (GBSx1179) was identified in S. agalactiae <SEQ ID 3415> which encodes the amino acid sequence <SEQ ID 3416>. This protein is predicted to be mannose-specific phosphotransferase system component IIAB. Analysis of this protein sequence reveals the following:

```
Possible site: 54
>>> Seems to have no N-terminal signal sequence
----- Final Results -----
                            bacterial cytoplasm --- Certainty = 0.3527(Affirmative) < succ>
                              bacterial membrane --- Certainty = 0.0000(Not Clear) < succ>
                                bacterial outside --- Certainty = 0.0000(Not Clear) < succ>
```

[6163] The protein has homology with the following sequences in the GENPEPT database.

| >GP: AAD46485 GB: AF130465 mannose-specific phosphotransferase system | | | |
|---|---|---|---|
| component IIAB [Streptococcus salivarius] | | | |
| Identities = 287/336 (85%), Positives = 306/336 (90%), Gaps = 6/336 (1%) | | | |
| Query: | 1 | MGIGIIIASHGKFAEGIHQSGSMIFGEQEKVQVVTFMPNEGPDDLYGHFNNAIAQFDADD | 60 |
| | | MGIGIIIASHGKFAEGIHQSGSMIFG+QEKVQVVTFMP+EGPDDLY HFN+AIAQFDADD | |
| Sbjct: | 1 | MGIGIIIASHGKFAEGIHQSGSMIFGDQEKVQVVTFMPSEGPDDLYAHFNDAIAQFDADD | 60 |
| Query: | 61 | EVLVLADLWSGSPFNQASRVMGENPERKMAIITGLNLPMLIQAYTERMMDANAGVEQVAA | 120 |
| | | E+LVLADLWSGSPFNQASR+ GENP+RK+AIITGLNLPMLIQAYTERMMDANA EQVAA | |
| Sbjct: | 61 | EILVLADLWSGSPFNQASRIAGENPDRKIAIITGLNLPMLIQAYTERMMDANATAEQVAA | 120 |
| Query: | 121 | NIIKESKEGIKALPEELNPVVEATPVAGVPADVPAEVKQSGSIPEGTVIGDGKLKINLAR | 180 |
| | | NIIKE+K GIKALPEELNP E T A V A P G+IPEGTVIGDGKLKINLAR | |
| Sbjct: | 121 | NIIKEAKGGIKALPEELNPAEETT-AAPVEAAAP-----QGAIPEGTVIGDGKLKINLAR | 174 |
| Query: | 181 | IDTRLLHGQVATAWTPASKANRIIVASDEVSKDELRKQLIKQAAPGGVKANVVPISKLIE | 240 |
| | | +DTRLLHGQVAT WTPASKA+RIIVASD+V+KDELRK+LIKQAAP GVKANVVPI KLI+ | |
| Sbjct: | 175 | LDTRLLHGQVATNWTPASKADRIIVASDDVAKDELRKELIKQAAPNGVKANVVPIQKLID | 234 |
| Query: | 241 | VAKDPRFGNTRALILFETVQDALRAIEGGVEIPELNVGSMAHSTGKTMVNNVLSMDKDDV | 300 |
| | | +KDPRFGNT ALILFETVQDALRAIEGGV I ELNVGSMAHSTGKTMVNNVLSMDKDDV | |
| Sbjct: | 235 | ASKDPRFGNTHALILFETVQDALRAIEGGVPIKELNVGSMAHSTGKTMVNNVLSMDKDDV | 294 |
| Query: | 301 | AAFEKLRDLGVSFDVRKVPNDAKKNLFDLINKANVK | 336 |
| | | A FEKLRDLGV FDVRKVPND+KK+LFDLI KANV+ | |
| Sbjct: | 295 | ACFEKLRDLGVEFDVRKVPNDSKKDLFDLIKKANVQ | 330 |

[6164] A related DNA sequence was identified in S. pyogenes <SEQ ID 3417> which encodes the amino acid sequence <SEQ ID 3418>. Analysis of this protein sequence reveals the following:

```
Possible site: 14
>>> Seems to have no N-terminal signal sequence
----- Final Results -----
                            bacterial cytoplasm --- Certainty = 0.3533(Affirmative) < succ>
                              bacterial membrane --- Certainty = 0.0000(Not Clear) < succ>
                                bacterial outside --- Certainty = 0.0000(Not Clear) < succ>
```

[6165] An alignment of the GAS and GBS proteins is shown below.

| Identities = 288/336 (85%), Positives = 308/336 (90%), Gaps = 6/336 (1%) | | | |
|---|---|---|---|
| Query: | 1 | MGIGIIIASHGKFAEGIHQSGSMIFGEQEKVQVVTFMPNEGPDDLYGHFNNAIAQFDADD | 60 |
| | | MGIGIIIASHGKFAEGIHQSGSMIFGEQEKVQVVTFMPNEGPDDLYGHFNNAI QFDADD | |
| Sbjct: | 1 | MGIGIIIASHGKFAEGIHQSGSMIFGEQEKVQVVTFMPNEGPDDLYGHFNNAIQQFDADD | 60 |
| Query: | 61 | EVLVLADLWSGSPFNQASRVMGENPERKMAIITGLNLPMLIQAYTERMMDANAGVEQVAA | 120 |
| | | E+LVLADLWSGSPFNQASRV GENP+RKMAIITGLNLPMLIQAYTER+MDA AGVEQVAA | |
| Sbjct: | 61 | EILVLADLWSGSPFNQASRVAGENPDRKMAIITGLNLPMLIQAYTERLMDAGAGVEQVAA | 120 |
| Query: | 121 | NIIKESKEGIKALPEELNPVVEATPVAGVPADVPAEVKQSGSIPEGTVIGDGKLKINLAR | 180 |
| | | NIIKESK+GIKALPE+LNPV E V + G+IP GTVIGDGKLKINLAR | |
| Sbjct: | 121 | NIIKESKDGIKALPEDLNPVEETAATEKVVNAL------QGAIPAGTVIGDGKLKINLAR | 174 |
| Query: | 181 | IDTRLLHGQVATAWTPASKANRIIVASDEVSKDELRKQLIKQAAPGGVKANVVPISKLIE | 240 |
| | | +DTRLLHGQVATAWTPASKA+RIIVASDEV++D+LRKQLIKQAAPGGVKANVVPISKLIE | |
| Sbjct: | 175 | VDTRLLHGQVATAWTPASKADRIIVASDEVAQDDLRKQLIKQAAPGGVKANVVPISKLIE | 234 |
| Query: | 241 | VAKDPRFGNTRALILFETVQDALRAIEGGVEIPELNVGSMAHSTGKTMVNNVLSMDKDDV | 300 |
| | | +KDPRFGNT ALILF+T QDALRA+EGGVEI ELNVGSMAHSTGKTMVNNVLSMDK+DV | |
| Sbjct: | 235 | ASKDPRFGNTHALILFQTPQDALRAVEGGVEINELNVGSMAHSTGKTMVNNVLSMDKEDV | 294 |
| Query: | 301 | AAFEKLRDLGVSFDVRKVPNDAKKNLFDLINKANVK | 336 |
| | | A FEKLRDLGV+FDVRKVPND+KKNLF+LI K N+K | |
| Sbjct: | 295 | ATFEKLRDLGVTFDVRKVPNDSKKNLFELIQKTNIK | 330 |

[6166] Based on this analysis, it was predicted that these proteins and their epitopes could be useful antigens for vaccines or diagnostics.

### EXAMPLE 1105

[6167] A DNA sequence (GBSx1180) was identified in S. agalactiae <SEQ ID 3419> which encodes the amino acid sequence <SEQ ID 3420>. Analysis of this protein sequence reveals the following:

```
Possible site: 52
>>> Seems to have no N-terminal signal sequence
----- Final Results -----
                            bacterial cytoplasm --- Certainty = 0.3873(Affirmative) < succ>
                              bacterial membrane --- Certainty = 0.0000(Not Clear) < succ>
                                bacterial outside --- Certainty = 0.0000(Not Clear) < succ>
```

[6168] The protein has homology with the following sequences in the GENPEPT database.

| >GP: BAB06625 GB: AP001517 unknown conserved protein [Bacillus halodurans] | | | |
|---|---|---|---|
| Identities = 89/267 (33%), Positives = 139/267 (51%), Gaps = 3/267 (1%) | | | |
| Query: | 3 | KKIIAVDLDGTLLHNNNTISDYTADTLRKVQAQGHKVIITTGRPYRMALAHYLRLDLKTP | 62 |
| | | + +IA+DLDGTLL +N TIS T T++K + GH V+I+TGRPYR ++ +Y L L T | |
| Sbjct: | 4 | RHLIALDLDGTLLTDNKTISMKTKQTIQKAREAGHIVVISTGRPYRASIQYYQELQLDTA | 63 |
| Query: | 63 | MINFNGALTHIPEKKWAFERSATIDKKLLLETLNLSDAIQADFIASEYRKNFYITMDNRD | 122 |
| | | ++NFNGA H P+ ++ + + +A I E ++Y+ D | |
| Sbjct: | 64 | IVNFNGAFVHHPKDSSFGTYHHPLELSTARQVIETCEAFDVSNIMVEVIDDYYLRY--YD | 121 |
| Query: | 123 | KINPQLFGVNEITDKMALDVTKITRNPNALLMQTRHKDKYELAKELRQHFNHELEVDSWG | 182 |
| | | ++ Q F + + + K+ +P +L+ + EL L ++ +WG | |
| Sbjct: | 122 | ELFIQTFTEGQGPVEHGNLLKKLRDDPTCVLIHPKDDHVSELRSLLDGAHAEVIDQRTWG | 181 |
| Query: | 183 | GPLNILEFSPKGVNKAYALKHLLKSLNLSQENLIAFGDEHNDTEMLAFAHTGYAMKNANP | 242 |
| | | P N++E G+NKA LK + + +E +IAFGDE ND EM+ +A G AM NA | |
| Sbjct: | 182 | APWNVIEIVKAGMNKAVGLKRIADYYQVPKERIIAFGDEDNDFEMIEYAGKGVAMANAID | 241 |
| Query: | 243 | TLLPYADQQIQWTNEEDGVAKTLEKLL | 269 |
| | | L A+ I +NE+DG+A LE+ L | |
| Sbjct: | 242 | PLKALAN-DITLSNEDDGIAVYLEEAL | 267 |

[6169] A related DNA sequence was identified in S. pyogenes <SEQ ID 3421> which encodes the amino acid sequence <SEQ ID 3422>. Analysis of this protein sequence reveals the following:

```
Possible site: 50
>>> Seems to have no N-terminal signal sequence
----- Final Results -----
                            bacterial cytoplasm --- Certainty = 0.4380(Affirmative) < succ>
                              bacterial membrane --- Certainty = 0.0000(Not Clear) < succ>
                                bacterial outside --- Certainty = 0.0000(Not Clear) < succ>
```

[6170] An alignment of the GAS and GBS proteins is shown below.

| Identities = 188/270 (69%), Positives = 224/270 (82%) | | | |
|---|---|---|---|
| Query: | 1 | MTKKIIAVDLDGTLLHNNNTISDYTADTLRKVQAQGHKVIITTGRPYRMALAHYLRLDLK | 60 |
| | | MTKK+IA+DLDGTLLH++NTIS YT T++ VQ +GH VII+TGRPYRNAL +YL+L+LK | |
| Sbjct: | 1 | MTKKLIAIDLDGTLLHHDNTISTYTQKTIKAVQDKGHHVIISTGRPYRMALGYYLQLNLK | 60 |
| Query: | 61 | TPMINFNGALTHIPEKKWAFERSATIDKKLLLETLNLSDAIQADFIASEYRKNFYITMDN | 120 |
| | | TP+I FNGALTH+PE+KWA+E + T+DK LL L D Q DFIASEYRKN YITM N | |
| Sbjct: | 61 | TPIITFNGALTHMPEQKWAYEHNVTLDKGYLLRLLKYQDDFQMDFIASEYRKNVYITMTN | 120 |
| Query: | 121 | RDKINPQLFGVNEITDKMALDVTKITRNPNALLMQTRHKDKYELAKELRQHFNHELEVDS | 180 |
| | | + I+PQLFGV+EIT MAL++TKITRNPNALLMQT H+DKY LAK +R F E+E+DS | |
| Sbjct: | 121 | PESIDPQLFGVDEITQDMALEITKITRNPNALLMQTHHEDKYALAKNMRACFKDEIEIDS | 180 |
| Query: | 181 | WGGPLNILEFSPKGVNKAYALKHLLKSLNLSQENLIAFGDEHNDTEMLAFAHTGYAMKNA | 240 |
| | | WGGPLNILE S K VNKAYAL +LL N+ +++LIAFGDENNDTEMLAFA TGYAMKNA | |
| Sbjct: | 181 | WGGPLNILEISSKNVNKAYALNYLLGIYNMDKKDLIAFGDEHNDTEMLAFAGTGYAMKNA | 240 |
| Query: | 241 | NPTLLPYADQQIQWTNEEDGVAKTLEKLLL | 270 |
| | | +P LLPYADQQ+ ++NEEDGVAK LE+L L | |
| Sbjct: | 241 | SPVLLPYADQQLNFSNEEDGVAKKLEELFL | 270 |

[6171] Based on this analysis, it was predicted that these proteins and their epitopes could be useful antigens for vaccines or diagnostics.

### EXAMPLE 1106

[6172] A DNA sequence (GBSx1181) was identified in S. agalactiae <SEQ ID 3423> which encodes the amino acid sequence <SEQ ID 3424>. Analysis of this protein sequence reveals the following:

| Possible site: 39 | | | | |
|---|---|---|---|---|
| >>> Seems to have an uncleavable N-term signal seq | | | | |
| | INTEGRAL | Likelihood = −7.38 | Transmembrane | 96-112 (90-119) |
| | INTEGRAL | Likelihood = −6.58 | Transmembrane | 28-44 (27-47) |
| | INTEGRAL | Likelihood = −6.26 | Transmembrane | 176-192 (174-193) |
| | INTEGRAL | Likelihood = −5.26 | Transmembrane | 127-143 (126-144) |
| | INTEGRAL | Likelihood = −1.59 | Transmembrane | 4-20 (3-20) |
| | INTEGRAL | Likelihood = −0.22 | Transmembrane | 60-76 (59-78) |

```
----- Final Results -----
                              bacterial membrane --- Certainty = 0.3951(Affirmative) < succ>
                                bacterial outside --- Certainty = 0.0000(Not Clear) < succ>
                            bacterial cytoplasm --- Certainty = 0.0000(Not Clear) < succ>
```

[6173] The protein has no significant homology with any sequences in the GENPEPT database.

[6174] No corresponding DNA sequence was identified in S. pyogenes.

[6175] Based on this analysis, it was predicted that this protein and its epitopes, could be useful antigens for vaccines or diagnostics.

### EXAMPLE 1107

[6176] A DNA sequence (GBSx1182) was identified in S. agalactiae <SEQ ID 3425> which encodes the amino acid sequence <SEQ ID 3426>. Analysis of this protein sequence reveals the following:

```
Possible site: 31
>>> Seems to have no N-terminal signal sequence
----- Final Results -----
                            bacterial cytoplasm --- Certainty = 0.2025(Affirmative) < succ>
                              bacterial membrane --- Certainty = 0.0000(Not Clear) < succ>
                                bacterial outside --- Certainty = 0.0000(Not Clear) < succ>
```

[6177] The protein has no significant homology with any sequences in the GENPEPT database.

[6178] No corresponding DNA sequence was identified in S. pyogenes.

[6179] Based on this analysis, it was predicted that this protein and its epitopes, could be useful antigens for vaccines or diagnostics.

### EXAMPLE 1108

[6180] A DNA sequence (GBSx1183) was identified in S. agalactiae <SEQ ID 3427> which encodes the amino acid sequence <SEQ ID 3428>. This protein is predicted to be an integral membrane protein. Analysis of this protein sequence reveals the following:

| Possible site: 22 | | | | |
|---|---|---|---|---|
| >>> Seems to have a cleavable N-term signal seq. | | | | |
| | INTEGRAL | Likelihood = −5.41 | Transmembrane | 180-196 (179-199) |
| | INTEGRAL | Likelihood = −5.31 | Transmembrane | 96-112 (94-114) |
| | INTEGRAL | Likelihood = −2.18 | Transmembrane | 129-145 (129-145) |
| | INTEGRAL | Likelihood = −1.33 | Transmembrane | 37-53 (37-53) |

```
----- Final Results -----
                              bacterial membrane --- Certainty = 0.3166(Affirmative) < succ>
                                bacterial outside --- Certainty = 0.0000(Not Clear) < succ>
                            bacterial cytoplasm --- Certainty = 0.0000(Not Clear) < succ>
```

[6181] A related GBS nucleic acid sequence <SEQ ID 8729> which encodes amino acid sequence <SEQ ID 8730> was also identified. Analysis of this protein sequence reveals the following:

| Lipop: Possible site: −1 Crend: 7 | | | | |
|---|---|---|---|---|
| McG: Discrim Score: 5.85 | | | | |
| GvH: Signal Score (−7.5): −2.39 | | | | |
| Possible site: 18 | | | | |
| >>> Seems to have a cleavable N-term signal seq. | | | | |
| ALOM program count: 4 value: −5.41 threshold: 0.0 | | | | |
| | INTEGRAL | Likelihood = −5.41 | Transmembrane | 176-192 (175-195) |
| | INTEGRAL | Likelihood = −5.31 | Transmembrane | 92-108 (90-110) |
| | INTEGRAL | Likelihood = −2.18 | Transmembrane | 129-145 (129-145) |
| | PERIPHERAL | Likelihood = 0.05 | 57 | |

```
modified ALOM score: 1.58
*** Reasoning Step: 3
----- Final Results -----
                              bacterial membrane --- Certainty = 0.3166(Affirmative) < succ>
                                bacterial outside --- Certainty = 0.0000(Not Clear) < succ>
                            bacterial cytoplasm --- Certainty = 0.0000(Not Clear) < succ>
```

[6182] The protein has homology with the following sequences in the GENPEPT database.

| >GP: AAC65028 GB: AE001188 conserved hypothetical integral membrane | | | |
|---|---|---|---|
| protein [Treponema pallidum] | | | |
| Identities = 54/190 (28%), Positives = 93/190 (48%), Gaps = 14/190 (7%) | | | |
| Query: | 14 | LFFIVISFGIKYYHLQG--PNLIWNMTLALIALDFAYLTSL--FKKKILIGLFALAWFFF | 69 |
| | | +F +++SFG + L+WN+ LA I + + + F + + L W F | |
| Sbjct: | 3 | VFCLLLSFGRRCVAADNFLSFLVWNLVLAFIPWLISAILHVRRFAVRSVQLFLMLLWLLF | 62 |
| Query: | 70 | YPNTFYMLTDIIHMHFVGDVLYNKTNLILYILYVSSILFGFLSGIESFSVIMRKFRISNI | 129 |
| | | +PN Y+LTDIIH+ L +IL + + + F+S S++ R F I | |
| Sbjct: | 63 | FPNAPYILTDIIHLGKGKSFLLYYDLIILLAYSFTGLFYAFVSLHLIESILARDFHIKRP | 122 |
| Query: | 130 | FLRWGIIGIVSL-VSSFGIHIGRYARLNSWDILTKPQVVINELLAVPSR-----DSFHFI | 183 |
| | | F II + L + +FGI++GR+ R NSWDI+ + +++++ R D++ F+ | |
| Sbjct: | 123 | F----IISVFELYLCAFGIYLGRFLRWNSWDIVLHGRTILSDIGIRVIRPVFYVDTWMFV | 178 |
| Query: | 184 | LGFTFLQVLC | 193 |
| | | F + VLC | |
| Sbjct: | 179 | FFFGTMLVLC | 188 |

[6183] No corresponding DNA sequence was identified in S. pyogenes.

[6184] Based on this analysis, it was predicted that these proteins and their epitopes could be useful antigens for vaccines or diagnostics.

### EXAMPLE 1109

[6185] A DNA sequence (GBSx1184) was identified in S. agalactiae <SEQ ID 3429> which encodes the amino acid sequence <SEQ ID 3430>. Analysis of this protein sequence reveals the following:

| Possible site: 17 | | | | |
|---|---|---|---|---|
| >>> Seems to have no N-terminal signal sequence | | | | |
| | INTEGRAL | Likelihood = −6.79 | Transmembrane | 171-187 (166-191) |

```
----- Final Results -----
                              bacterial membrane --- Certainty = 0.3718(Affirmative) < succ>
                                bacterial outside --- Certainty = 0.0000(Not Clear) < succ>
                            bacterial cytoplasm --- Certainty = 0.0000(Not Clear) < succ>
```

[6186] The protein has no significant homology with any sequences in the GENPEPT database.

[6187] No corresponding DNA sequence was identified in S. pyogenes.

[6188] Based on this analysis, it was predicted that this protein and its epitopes, could be useful antigens for vaccines or diagnostics.

### EXAMPLE 1110

[6189] A DNA sequence (GBSx1185) was identified in S. agalactiae <SEQ ID 3431> which encodes the amino acid sequence <SEQ ID 3432>. Analysis of this protein sequence reveals the following:

| Possible site: 29 | | | | |
|---|---|---|---|---|
| >>> Seems to have no N-terminal signal sequence | | | | |
| | INTEGRAL | Likelihood = −10.46 | Transmembrane | 193-209 (191-214) |
| | INTEGRAL | Likelihood = −10.30 | Transmembrane | 99-115 (96-119) |
| | INTEGRAL | Likelihood = −8.17 | Transmembrane | 454-470 (451-472) |
| | INTEGRAL | Likelihood = −6.64 | Transmembrane | 216-232 (212-236) |
| | INTEGRAL | Likelihood = −6.37 | Transmembrane | 49-65 (43-68) |
| | INTEGRAL | Likelihood = −4.88 | Transmembrane | 362-378 (357-383) |
| | INTEGRAL | Likelihood = −3.61 | Transmembrane | 385-401 (385-402) |
| | INTEGRAL | Likelihood = −2.76 | Transmembrane | 275-291 (275-291) |
| | INTEGRAL | Likelihood = −1.70 | Transmembrane | 18-34 (18-34) |

```
----- Final Results -----
                              bacterial membrane --- Certainty = 0.5182(Affirmative) < succ>
                                bacterial outside --- Certainty = 0.0000(Not Clear) < succ>
                            bacterial cytoplasm --- Certainty = 0.0000(Not Clear) < succ>
```

[6190] The protein has homology with the following sequences in the GENPEPT database.

| >GP: AAF95422 GB: AE004299 conserved hypothetical protein [Vibrio cholerae] | | | |
|---|---|---|---|
| Identities = 193/471 (40%), Positives = 286/471 (59%), Gaps = 42/471 (8%) | | | |
| Query: | 1 | MEKFFKLKEHGTTIRTEITAGLTTFFAMSYILFVNPAILSQTGMPAQGVFLATIIGAVVA | 60 |
| | | +EK FKL E+GT +RTEI AG+TTF M+YI+FVNPAILS GM VF+AT + A + | |
| Sbjct: | 2 | LEKLFKLSEYGTNVRTEILAGVTTFLTMAYIIFVNPAILSDAGMDRGAVFVATCLAAAIG | 61 |
| Query: | 61 | TSVMAFYANLPYAQAPGMGLNAFFTYTVVFALGYTWQEALAMVFICGLISLIITLTKVRK | 120 |
| | | +M F AN P AQAPGMGLNAFFTY VV +G+TWQ ALA VF G++ ++++L K+R+ | |
| Sbjct: | 62 | CFIMGFIANYPIAQAPGMGLNAFFTYGVVLGMGHTWQVALAAVFCSGVLFILLSLFKIRE | 121 |
| Query: | 121 | MIIESIPTTLKSAITAGIGTFLAYVGIKNAGFLKFSIDPGTYDVVGKGAAKGLATITANS | 180 |
| | | II SIP +L++ I+AGIG FLA++ +KNAG + +P T +V GA L + | |
| Sbjct: | 122 | WIINSIPHSLRTGISAGIGLFLAFIALKNAGIV--VDNPAT--LVSLGAITSLHAV---- | 173 |
| Query: | 181 | SATPGLVSFDNPAILLSLIGLSITIFFIVKGIRGGIILSILTTTLLGILMGVVKLDAINW | 240 |
| | | L+ +G +TI + +G++G ++++IL T LG++G V+ I | |
| Sbjct: | 174 | ---------------LAAVGFFLTIGLVYRGVKGAVMIAILAVTALGLVFGDVQWGGIMS | 218 |
| Query: | 241 | EATNLSASFRDLKQVFGVALGEKGLISLFSNPSRLPSVLMAILAFSLTDIFDTIGTLIGT | 300 |
| | | +++ +F Q+ A+ E G+IS+ + AF D+FDT GTL+G | |
| Sbjct: | 219 | TPPSIAPTF---MQLDFSAVFEIGMISV-------------VFAFLFVDLFDTAGTLVGV | 262 |
| Query: | 301 | GEKVGILATTGDNHESKSLDKALYSDLIGTTFGAICGTSNVTTYVESAAGIGAGGRTGLT | 360 |
| | | K G++ G + L++AL +D T+ GA+ GTSN T+Y+ES +G+ GGRTGLT | |
| Sbjct: | 263 | ATKAGLIEKDG---KIPRLNRALLADSTATSVGALLGTSNTTSYIESVSGVAVGGRTGLT | 319 |
| Query: | 361 | ALVVAGLFAISSFFSPLVSIVPSQATAPILVIVGIMNLSNLKDIKWDDMSEAIPAFFTSL | 420 |
| | | A+VV LF ++ FFSPL ++P+ ATA L V I+M+S L I W D++EA P T L | |
| Sbjct: | 320 | AVVVGILFLLALFFSPLAGMIPAYATAGALFYVAILMMSGLVSIDWRDLTEAAPTVVTCL | 379 |
| Query: | 421 | FMGFTYSITYGIAAGFLTYTLAKVIKGQAKDIHVVLWILDILFILNFISLA | 471 |
| | | M T+SI GI+ GF+ Y K+ G+ + + + +W++ +F++ +I A | |
| Sbjct: | 380 | MMPLTFSIAEGISLGFIAYAAIKLFSGKGRSVSLSVWVMAAIFVIKYILAA | 430 |

[6191] A related DNA sequence was identified in S. pyogenes <SEQ ID 3433> which encodes the amino acid sequence <SEQ ID 3434>. Analysis of this protein sequence reveals the following:

| Possible site: 51 | | | | |
|---|---|---|---|---|
| >>> Seems to have no N-terminal signal sequence | | | | |
| | INTEGRAL | Likelihood = −11.57 | Transmembrane | 378-394 (370-419) |
| | INTEGRAL | Likelihood = −9.29 | Transmembrane | 202-218 (195-221) |
| | INTEGRAL | Likelihood = −7.64 | Transmembrane | 48-64 (46-71) |
| | INTEGRAL | Likelihood = −7.64 | Transmembrane | 99-115 (97-118) |
| | INTEGRAL | Likelihood = −6.90 | Transmembrane | 225-241 (221-245) |
| | INTEGRAL | Likelihood = −6.05 | Transmembrane | 468-484 (465-485) |
| | INTEGRAL | Likelihood = −4.35 | Transmembrane | 399-415 (395-419) |
| | INTEGRAL | Likelihood = −3.24 | Transmembrane | 425-441 (425-442) |
| | INTEGRAL | Likelihood = −3.08 | Transmembrane | 18-34 (18-34) |
| | INTEGRAL | Likelihood = −2.28 | Transmembrane | 442-458 (442-460) |
| | INTEGRAL | Likelihood = −0.00 | Transmembrane | 282-298 (282-298) |

```
----- Final Results -----
                              bacterial membrane --- Certainty = 0.5628(Affirmative) < succ>
                                bacterial outside --- Certainty = 0.0000(Not Clear) < succ>
                            bacterial cytoplasm --- Certainty = 0.0000(Not Clear) < succ>
```

[6192] The protein has homology with the following sequences in the databases:

| >GP: BAB04327 GB: AP001509 unknown conserved protein [Bacillus halodurans] | | | |
|---|---|---|---|
| Identities = 192/485 (39%), Positives = 276/485 (56%), Gaps = 53/485 (10%) | | | |
| Query: | 1 | MEKFFKLSENGTTVSTEIMAGLTTFFAMSYILFVNPSILGAAGMPSNAVFLATIIAAAIS | 60 |
| | | M+++F E+GTT E +AGLTTF +M+YILFVNP ILG AGM AVF+AT +AAAI | |
| Sbjct: | 1 | MDRYFGFKEHGTTYGRESIAGLTTFLSMAYILFVNPLILGDAGMDVQAVFMATALAAAIG | 60 |
| Query: | 61 | TLIMGLFANVPYALAPGMGLNAFFTYTVVFALRFSWQEALAMVFICGLFNIFITVTKFRK | 120 |
| | | TLIMG+ A P ALAPGMGLNAFF Y+VV + WQ AL VF+ G+ I ITV K R+ | |
| Sbjct: | 61 | TLIMGILAKYPIALAPGMGLNAFFAYSVVIGMGIDWQLALFGVFVSGIIFILITVFKIRE | 120 |
| Query: | 121 | SIIKAIPVSLQHAIGGGIGVFVAYLGFKNANIITFSISAENIVMVNGVEPAKASAKTFAD | 180 |
| | | II AIP L++A GIG+F+A++G KNA I+ | |
| Sbjct: | 121 | VIINAIPAELKNAAAAGIGLFIAFIGLKNAGIVV-------------------------- | 154 |
| Query: | 181 | GLLFVDANGGVVPTISSFTDSGVLLAIFGLLLTTALVIRNFRGAILIGIVATTLVGIPLG | 240 |
| | | ++ ++ + LLA FGL++T ++R +G I G++ T +VG+ G | |
| Sbjct: | 155 | ------SDEATAVSLGHILNGPTLLACFGLIVTVLFMVRGIQGGIFYGMILTAIVGLISG | 208 |
| Query: | 241 | IVDVSNLNFGISHIGEAWTELGTTFLAAFD-GLSSLFSDSSRLPLVFMTIFAFSLSDTFD | 299 |
| | | I+ + I L TF AF+ ++ +FS + + F D FD | |
| Sbjct: | 209 | IITYTG-----GGIVSTPPSLAPTFGQAFNIQMADVFSVQ-----FLIVVLTFLFVDFFD | 258 |
| Query: | 300 | TIGTFIGTGRRTGIFSQDDENALENSIGFSSKMDRALFADAIGTSIGALVGTSNTTTYVE | 359 |
| | | T GT G + G F +D++ + +AL AD+ TSIGA++GTS TT Y+E | |
| Sbjct: | 259 | TAGTLYGVANQAG-FIKDNK---------LPRAGKALLADSSATSIGAILGTSTTTAYIE | 308 |
| Query: | 360 | SAAGIAEGGRTGLTAVSTAVCFLLSILLLPLVGIVPAAATAPALIIVGVMMVSSFLDVNW | 419 |
| | | S+AG+A GGRTG ++ TA F+L++ PL+ +V TA ALI+VG++M SS ++W | |
| Sbjct: | 309 | SSAGVAAGGRTGFASIVTAGLFVLAMFFSPLLSVVTEQVTAAALIVVGILMASSLRFIDW | 368 |
| Query: | 420 | SKFADALPAFFAAFFMALCYSISYGIAAAFIFYCLVKVVEGKTKDIHPIIWGATFLFIVN | 479 |
| | | +K A+P+F M L YSI+ GIA F+FY + +V+G+ K++HPI++ F+F+ | |
| Sbjct: | 369 | TKLEIAIPSFLTVVAMPLTYSIATGIAFGFLFYPITMIVKGRGKEVHPIMYALFFVFLAY | 428 |
| Query: | 480 | FIILT | 484 |
| | | FI L+ | |
| Sbjct: | 429 | FIFLS | 433 |

[6193] An alignment of the GAS and GBS proteins is shown below.

| Identities = 258/488 (52%), Positives = 336/488 (67%), Gaps = 17/488 (3%) | | | |
|---|---|---|---|
| Query: | 1 | MEKFFKLKEHGTTIRTEITAGLTTFFAMSYILFVNPAILSQTGMPAQGVFLATIIGAVVA | 60 |
| | | MEKFFKL E+GTT+ TEI AGLTTFFAMSYILFVNP+IL GMP+ VFLATII A ++ | |
| Sbjct: | 1 | MEKFFKLSENGTTVSTEIMAGLTTFFAMSYILFVNPSILGAAGMPSNAVFLATIIAAAIS | 60 |
| Query: | 61 | TSVMAFYANLPYAQAPGMGLNAFFTYTVVFALGYTWQEALAMVFICGLISLIITLTKVRK | 120 |
| | | T +M +AN+PYA APGMGLNAFFTYTVVFAL ++WQEALAMVFICGL ++ IT+TK RK | |
| Sbjct: | 61 | TLIMGLFANVPYALAPGMGLNAFFTYTVVFALRFSWQEALAMVFICGLFNIFITVTKFRK | 120 |
| Query: | 121 | MIIESIPTTLKSAITAGIGTFLAYVGIKNAGFLKFSIDPGTYDVV---------GRGAAK | 171 |
| | | II++IP +L+AI GIG F+AY+G KNA + FSI +V K A | |
| Sbjct: | 121 | SIIKAIPVSLQHAIGGGIGVFVAYLGFKNANIITFSISAENIVMVNGVEPAKASAKTFAD | 180 |
| Query: | 172 | GLATITANSSATPGLVSFDNPAILLSLIGLSITIFFIVKGIRGGIILSILTTTLLGILMG | 231 |
| | | GL + AN P + SF + +LL++ GL +T +++ RG I++ I+ TTL+GI +G | |
| Sbjct: | 181 | GLLFVDANGGVVPTISSFTDSGVLLAIFGLLLTTALVIRNFRGAILIGIVATTLVGIPLG | 240 |
| Query: | 232 | VVKLDAINWEATNLSASFRDLKQVFGVALGEKGLISLFSNPSRLPSVLMAILAFSLTDIF | 291 |
| | | +V + +N+ +++ ++ +L F A GL SLFS+ SRLP V M I AFSL+D F | |
| Sbjct: | 241 | IVDVSNLNFGISHIGEAWTELGTTFLAAF--DGLSSLFSDSSRLPLVFMTIFAFSLSDTF | 298 |
| Query: | 292 | DTIGTLIGTGEKVGILATTGDN------HESKSLDKALYSDLIGTTFGAICGTSNVTTYV | 345 |
| | | DTIGT IGTG + GI + +N S +D+AL++D IGT+ GA+ GTSN TTYV | |
| Sbjct: | 299 | DTIGTFIGTGRRTGIFSQDDENALENSIGFSSKMDRALFADAIGTSIGALVGTSNTTTYV | 358 |
| Query: | 346 | ESAAGIGAGGRTGLTALVVAGLFAISSFFSPLVSIVPSQATAPILVIVGIMMLSNLKDIK | 405 |
| | | ESAAGI GGRTGLTA+ A F +S PLV IVP+ ATAP L+IVG+MM+S+ D+ | |
| Sbjct: | 359 | ESAAGIAEGGRTGLTAVSTAVCFLLSILLLPLVGIVPAAATAPALIIVGVMNVSSFLDVN | 418 |
| Query: | 406 | WDDMSEAIPAFFTSLFMGFTYSITYGIAAGFLTYTLAKVIKGQAKDIHVVLWILDILFIL | 465 |
| | | W ++A+PAFF + FM YSI+YGIAA F+ Y L KV++G+ KDIH ++W LFI+ | |
| Sbjct: | 419 | WSKFADALPAFFAAFFMALCYSISYGIAAAFIFYCLVKVVEGKTKDIHPIIWGATFLFIV | 478 |
| Query: | 466 | NFISLAIL | 473 |
| | | NFI L IL | |
| Sbjct: | 479 | NFIILTIL | 486 |

[6194] Based on this analysis, it was predicted that these proteins and their epitopes could be useful antigens for vaccines or diagnostics.

### EXAMPLE 1111

[6195] A DNA sequence (GBSx1186) was identified in S. agalactiae <SEQ ID 3435> which encodes the amino acid sequence <SEQ ID 3436>. Analysis of this protein sequence reveals the following:

```
Possible site: 32
>>> Seems to have no N-terminal signal sequence
----- Final Results -----
                            bacterial cytoplasm --- Certainty = 0.3221(Affirmative) < succ>
                              bacterial membrane --- Certainty = 0.0000(Not Clear) < succ>
                                bacterial outside --- Certainty = 0.0000(Not Clear) < succ>
```

[6196] The protein has homology with the following sequences in the GENPEPT database.

| >GP: BAB04264 GB: AP001508 unknown conserved protein [Bacillus halodurans] | | | |
|---|---|---|---|
| Identities = 68/147 (46%), Positives = 100/147 (67%), Gaps = 1/147 (0%) | | | |
| Query: | 27 | MFYTQNEEELIALGQKLGTVLKSGDIVLLTGNLGAGKTTLTKGIAKGLDIKQMIKSPTYT | 86 |
| | | M TQ+ E +A QKL L +GD++ L G+LGAGKT+ TKG+A GL IK+++KSPT+T | |
| Sbjct: | 5 | MMITQSPEATMAFAQKLADKLLAGDVITLEGDLGAGKTSFTKGLALGLGIKRVVKSPTFT | 64 |
| Query: | 87 | IVREYEGRVPLYHLDVYRIGDDPDSIDLDDFLFGQGVTVIEWGELLSDNLINNYLEIVIT | 146 |
| | | I+REY+GR+PLYH+DVYR+ ++ + + D++ G GVTV+EW L+ L L I IT | |
| Sbjct: | 65 | IIREYKGRLPLYHMDVYRLNEEEEDLGFDEYFHGDGVTVVEWASLIEGRLPPVRLAITIT | 124 |
| Query: | 147 | RSNQG-RQVQLEAYGHRAREIIEAIQD | 172 |
| | | + + RQ+ AYG R E+++ + D | |
| Sbjct: | 125 | HAGENERQLSFTAYGERWEEVLKELLD | 151 |

[6197] A related DNA sequence was identified in S. pyogenes <SEQ ID 3437> which encodes the amino acid sequence <SEQ ID 3438>. Analysis of this protein sequence reveals the following:

```
Possible site: 43
>>> Seems to have no N-terminal signal sequence
----- Final Results -----
                            bacterial cytoplasm --- Certainty = 0.1202(Affirmative) < succ>
                              bacterial membrane --- Certainty = 0.0000(Not Clear) < succ>
                                bacterial outside --- Certainty = 0.0000(Not Clear) < succ>
```

[6198] An alignment of the GAS and GBS proteins is shown below.

| Identities = 97/142 (68%), Positives = 122/142 (85%) | | | |
|---|---|---|---|
| Query: | 27 | MFYTQNEEELIALGQKLGTVLKSGDIVLLTGNLGAGKTTLTKGIAKGLDIKQMIKSPTYT | 86 |
| | | MFY++NE L A G+ LGT L GD+++L+G+LGAGKTTL KGIAKG+ I QMIKSPTYT | |
| Sbjct: | 1 | MFYSENEYTLKAYGETLGTYLSIGDVIVLSGDLGAGKTTLAKGIAKGMGISQMIKSPTYT | 60 |
| Query: | 87 | IVREYEGRVPLYHLDVYRIGDDPDSIDLDDFLFGQGVTVIEWGELLSDNLINNYLEIVIT | 146 |
| | | IVREYEGR+PLYHLD+YR+GDDPDSIDLDDFLFG GVTVIEWGELL + L+ +YL+I IT | |
| Sbjct: | 61 | IVREYEGRLPLYHLDIYRVGDDPDSIDLDDFLFGNGVTVIEWGELLGEGLLQDYLQITIT | 120 |
| Query: | 147 | RSNQGRQVQLEAYGHRAREIIE | 168 |
| | | + ++GRQ+ L A+G R+R+++E | |
| Sbjct: | 121 | KRDKGRQLDLLAHGERSRQLLE | 142 |

[6199] Based on this analysis, it was predicted that these proteins and their epitopes could be useful antigens for vaccines or diagnostics.

### EXAMPLE 1112

[6200] A DNA sequence (GBSx1187) was identified in S. agalactiae <SEQ ID 3439> which encodes the amino acid sequence <SEQ ID 3440>. Analysis of this protein sequence reveals the following:

```
Possible site: 58
>>> Seems to have no N-terminal signal sequence
----- Final Results -----
                            bacterial cytoplasm --- Certainty = 0.1782(Affirmative) < succ>
                              bacterial membrane --- Certainty = 0.0000(Not Clear) < succ>
                                bacterial outside --- Certainty = 0.0000(Not Clear) < succ>
```

[6201] The protein has homology with the following sequences in the GENPEPT database.

| >GP: AAD35662 GB: AE001732 conserved hypothetical protein | | | |
|---|---|---|---|
| [Thermotoga maritima] | | | |
| Identities = 56/163 (34%), Positives = 94/163 (57%), Gaps = 1/163 (0%) | | | |
| Query: | 24 | EASREEASAILEFLNTVTEETDFILHTVSNQLSLSEMETFIENTLMTKNCICLIAKLKNK | 83 |
| | | EAS +A I+E+L VT ETDF++ +S +I + ++ ++ + | |
| Sbjct: | 18 | EASIWDARRIVEYLKEVTSETDFLITRPDEVYDVSTERNYIRMYRSNPGKLMIVGEINRE | 77 |
| Query: | 84 | VIGLITIISQSDIEIEHVGDLFIAVQKDYWGYGIGHILMEEAIEWASDNDITRRLELSVQ | 143 |
| | | ++ L+T +HVG++ I+V+K YW GIG ++ AIEWA N R++L V | |
| Sbjct: | 78 | IVSLLTFTGFGRKRTKHVGEIGISVKKRYWNIGIGTRMITSAIEWARRNGFI-RIQLEVL | 136 |
| Query: | 144 | GRNERAIHLYQKFGFEIDGLQTRGIKRENGEFLDIYRMSKLID | 186 |
| | | NERAI LY+K GFE++G++ + ++R++G F D+ M+ L+D | |
| Sbjct: | 137 | KSNERAISLYRKLGFELEGIKRKAVRRDDGSFEDVLVMALLLD | 179 |

[6202] There is also homology to SEQ ID 1724.

[6203] Based on this analysis, it was predicted that this protein and its epitopes, could be useful antigens for vaccines or diagnostics.

### EXAMPLE 1113

[6204] A DNA sequence (GBSx1188) was identified in S. agalactiae <SEQ ID 3441> which encodes the amino acid sequence <SEQ ID 3442>. Analysis of this protein sequence reveals the following:

```
Possible site: 53
>>> Seems to have a cleavable N-term signal seq.
----- Final Results -----
                                bacterial outside --- Certainty = 0.3000(Affirmative) < succ>
                              bacterial membrane --- Certainty = 0.0000(Not Clear) < succ>
                            bacterial cytoplasm --- Certainty = 0.0000(Not Clear) < succ>
```

[6205] The protein has homology with the following sequences in the GENPEPT database.

| >GP: CAB15582 GB: Z99122 membrane-bound protein [Bacillus subtilis] | | | |
|---|---|---|---|
| Identities = 108/324 (33%), Positives = 178/324 (54%), Gaps = 33/324 (10%) | | | |
| Query: | 5 | KKITLMFSAIILTTVIALGV--YVASAYNFSTNELSKTFKDFKLAKS--KSHAIEETKPF | 60 |
| | | KK TL+ + + + ++ LG Y ++ + + ++ + +K K +I + PF | |
| Sbjct: | 8 | KKKTLLLTILTIIGLLVLGTGGYAYYLWHKAASTVASIHESIDKSKKRDKEVSINKKDPF | 67 |
| Query: | 61 | SILLMGVDTGSEHRKSKWSGNSDSMILVTINPKTNKTTMTSLERDVLIKLSGPKNNGQTG | 120 |
| | | S+L+MGVD + G +D++I +T+NPKTN T M S+ RD K+ G G | |
| Sbjct: | 68 | SVLIMGVDERDGDK-----GRADTLIYMTVNPKTNTTDMVSIPRDTYTKIIGK------G | 116 |
| Query: | 121 | VEAKLNAAYASGGAEMALMTVQDLLDINVDYFMQINMQGLVDLVNAVGGITVTNKFDFPI | 180 |
| | | K+N +YA GG +M + TV++ LD+ VDYF+++NM+ D+V+ +GGITV + F F | |
| Sbjct: | 117 | TMDKINHSYAFGGTQMTVDTVENFLDVPVDYFVKVNMESFRDVVDTLGGITVNSTFAFSY | 176 |
| Query: | 181 | SIAANEPEYKAVVEPGTHKINGEQALVYSRMRYDDPEGDYGRQKRQREVIQKVLKKILAL | 240 |
| | | + G +NG++AL Y+RMR +DP GD+GRQ RQR+VIQ ++ K + | |
| Sbjct: | 177 | DGYS--------FGKGEITLNGKEALAYTRMRKEDPRGDFGRQDRQRQVIQGIINKGANI | 228 |
| Query: | 241 | NSISSYKKILSAVSNNMQTNIEISSKTIPNL----LAYKDSLEHIKSYQLKGEDATLSDG | 296 |
| | | +SI+ + + V NN++TN+ T N+ YK + +HIK ++LKG T +G | |
| Sbjct: | 229 | SSITKFGDMFKVVENNVKTNL-----TFDNMWDIQSDYKGARKHIKQHELKG-TGTKING | 282 |
| Query: | 297 | GSYQILTKKHLLAVQNRIKKELDK | 320 |
| | | Y + L + +K+ L+K | |
| Sbjct: | 283 | IYYYQADESALSDITKELKESLEK | 306 |

[6206] A related DNA sequence was identified in S. pyogenes <SEQ ID 2763> which encodes the amino acid sequence <SEQ ID 2764>. Analysis of this protein sequence reveals the following:

```
Possible site: 33
>>> Seems to have a cleavable N-term signal seq.
----- Final Results -----
                                bacterial outside --- Certainty = 0.3000(Affirmative) < succ>
                              bacterial membrane --- Certainty = 0.0000(Not Clear) < succ>
                            bacterial cytoplasm --- Certainty = 0.0000(Not Clear) < succ>
```

[6207] An alignment of the GAS and GBS proteins is shown below.

| Identities = 288/436 (66%), Positives = 342/436 (78%), Gaps = 22/436 (5%) | | | |
|---|---|---|---|
| Query: | 1 | MKIWKKITLMFSAIILTTVIALGVYVASAYNFSTNELSKTFKDFKLAKSKSHAIEETKPF | 60 |
| | | MKI KKI LMF+AI+LTTV+ALGVY+ SAY FST ELSKTFKDF + +KS AI++T+ F | |
| Sbjct: | 1 | MKIGKKIVLMFTAIVLTTVLALGVYLTSAYTFSTGELSKTFKDFSTSSNKSDAIKQTRAF | 60 |
| Query: | 61 | SILLMGVDTGSEHRKSKWSGNSDSMILVTINPKTNKTTMTSLERDVLIKLSGPKNNGQTG | 120 |
| | | SILLMGVDTGS R SKW GNSDSMILVT+NPKT KTTMTSLERD L LSGPKNN G | |
| Sbjct: | 61 | SILLMGVDTGSSERASKWEGNSDSMILVTVNPKTKKTTMTSLERDTLTTLSGPKNNEMNG | 120 |
| Query: | 121 | VEAKLNAAYASGGAEMALMTVQDLLDINVDYFMQINMQGLVDLVNAVGGITVTNKFDFPI | 180 |
| | | VEAKLNAAYA+GGA+MA+MTVQDLL+I +D ++QINMQGL+DLVNAVGGITVTN+FDFPI | |
| Sbjct: | 121 | VEAKLNAAYAAGGAQMAIMTVQDLLNITIDNYVQINMQGLIDLVNAVGGITVTNEFDFPI | 180 |
| Query: | 181 | SIAANEPEYKAVVEPGTHKINGEQALVYSRMRYDDPEGDYGRQKRQREVIQKVLKKILAL | 240 |
| | | SIA NEPEY+A V PGTHKINGEQALVY+RMRYDDPEGDYGRQKRQREVIQKVLKKILAL | |
| Sbjct: | 181 | SIAENEPEYQATVAPGTHKINGEQALVYARMRYDDPEGDYGRQKRQREVIQKVLKKILAL | 240 |
| Query: | 241 | NSISSYKKILSAVSNNMQTNIEISSKTIPNLLAYKDSLEHIKSYQLKGEDATLSDGGSYQ | 300 |
| | | +SISSY+KILSAVS+NMQTNIEISS+TIP+LL Y+D+L IK+YQLKGEDATLSDGGSYQ | |
| Sbjct: | 241 | DSISSYRKILSAVSSNMQTNIEISSRTIPSLLGYRDALRTIKTYQLKGEDATLSDGGSYQ | 300 |
| Query: | 301 | ILTKKHLLAVQNRIKKELDKKRSKTLKTSAILYEDYYGTTASNDSSTYSSTQENNYNTT- | 359 |
| | | I+T HLL +QNRI+ EL + LKT+A +YE+ YG ST S T NNY+++ | |
| Sbjct: | 301 | IVTSNHLLEIQNRIRTELGLHKVNQLKTNATVYENLYG-------STKSQTVNNNYDSSG | 353 |
| Query: | 360 | ---PYSEAPPSYSG-----NTTYSSETNQTTHQNYYNSSTPASNYSSNTNTGQADSSGSV | 411 |
| | | YS++ SY+ +T S+ T+Q + + + +TP+S+ S ++ SSGS | |
| Sbjct: | 354 | QAPSYSDSHSSYANYSSGVDTGQSASTDQDSTASSHRPATPSSS-SDALAADESSSSGS- | 411 |
| Query: | 412 | NNHNGAATPNPNTGTQ | 427 |
| | | G+ P N Q | |
| Sbjct: | 412 | ----GSLVPPANINPQ | 423 |

[6208] SEQ ID 3442 (GBS54) was expressed in E. coli as a His-fusion product. SDS-PAGE analysis of total cell extract is shown in FIG. 16 (lane 8; MW 48.4 kDa).

[6209] The GBS54-His fusion product was purified (FIG. 98A; see also FIG. 194, lane 6) and used to immunise mice (lane 1+2 product; 20 μg/mouse). The resulting antiserum was used for Western blot (FIG. 98B), FACS (FIG. 98C), and in the in vivo passive protection assay (Table III). These tests confirm that the protein is immunoaccessible on GBS and that it is an effective protective immunogen.

[6210] Based on this analysis, it was predicted that these proteins and their epitopes could be useful antigens for vaccines or diagnostics.

### EXAMPLE 1114

[6211] A DNA sequence (GBSx1189) was identified in S. agalactiae <SEQ ID 3443> which encodes the amino acid sequence <SEQ ID 3444>. This protein is predicted to be Vesl-1L. Analysis of this protein sequence reveals the following:

| Possible site: 18 | | | | |
|---|---|---|---|---|
| >>> Seems to have an uncleavable N-term signal seq | | | | |
| | INTEGRAL | Likelihood = −1.44 | Transmembrane | 3-19 (3-19) |

```
----- Final Results -----
                              bacterial membrane --- Certainty = 0.1574(Affirmative) < succ>
                                bacterial outside --- Certainty = 0.0000(Not Clear) < succ>
                            bacterial cytoplasm --- Certainty = 0.0000(Not Clear) < succ>
```

[6212] The protein has no significant homology with any sequences in the GENPEPT database.

[6213] A related DNA sequence was identified in S. pyogenes <SEQ ID 3445> which encodes the amino acid sequence <SEQ ID 3446>. Analysis of this protein sequence reveals the following:

```
Possible site: 15
>>> Seems to have a cleavable N-term signal seq.
----- Final Results -----
                                bacterial outside --- Certainty = 0.3000(Affirmative) < succ>
                              bacterial membrane --- Certainty = 0.0000(Not Clear) < succ>
                            bacterial cytoplasm --- Certainty = 0.0000(Not Clear) < succ>
```

[6214] The protein has no significant homology with any sequences in the GENPEPT database.

[6215] An alignment of the GAS and GBS proteins is shown below.

| Identities = 42/98 (42%), Positives = 64/98 (64%) | | | |
|---|---|---|---|
| Query: | 1 | MKIGRLIALGLVSLGALELYKNRKTIKDSYQNTKNETDSAKLKLERIKNDLAIISQEKEK | 60 |
| | | MK+ +IA+GL+S A + Y+ R TIK+ ++ D+A+L L+ IK +L +I + + | |
| Sbjct: | 1 | MKVKTVIAVGLLSFTAYKAYQKRCTIKELLSISRQAKDAAQLDLDNIKANLDLIHSQGKV | 60 |
| Query: | 61 | IRLISQELNHKFQVFNKDIQPRLEEINQRMAKYQEKDE | 98 |
| | | I+ ISQ+L HK++ FN++ Q L EI RMAKYQE E | |
| Sbjct: | 61 | IQNISQDLAHKWRYFNQETQAHLTEIQNRMAKYQEDSE | 98 |

[6216] Based on this analysis, it was predicted that these proteins and their epitopes could be useful antigens for vaccines or diagnostics.

### EXAMPLE 1115

[6217] A DNA sequence (GBSx1190) was identified in S. agalactiae <SEQ ID 3447> which encodes the amino acid sequence <SEQ ID 3448>. This protein is predicted to be Hit-like protein involved in cell-cycle regulation (hit). Analysis of this protein sequence reveals the following:

```
Possible site: 37
>>> Seems to have no N-terminal signal sequence
----- Final Results -----
                            bacterial cytoplasm --- Certainty = 0.2694(Affirmative) < succ>
                              bacterial membrane --- Certainty = 0.0000(Not Clear) < succ>
                                bacterial outside --- Certainty = 0.0000(Not Clear) < succ>
```

[6218] The protein has homology with the following sequences in the GENPEPT database.

| >GP: BAB04908 GB: AP001511 Hit-like protein involved in cell-cycle | | | |
|---|---|---|---|
| regulation [Bacillus halodurans] | | | |
| Identities = 74/137 (54%), Positives = 95/137 (69%), Gaps = 2/137 (1%) | | | |
| Query: | 3 | NCIFCKIISGEIPSSKVYEDDEVLAFLDITQTTTGHTLLIPKKHVRNVLEMDEKTAQITF | 62 |
| | | NCIFCKII+GEIPS+ VYEDD V AFLDI+Q T GHTL+IPK H RNV E+ E+ A F | |
| Sbjct: | 6 | NCIFCKIIAGEIPSATVYEDDHVYAFLDISQVTKGHTLVIPKVHKRNFELSEEIASSLF | 65 |
| Query: | 63 | ERLPKVARAVQAATKAKGMNIINNNEEIAGQTVFHAHVHLVPRFDESDGIKIHYTTHEPD | 122 |
| | | +PK++RA+ A + GMNI+NNN E AGQTVFH H+HL+PR+ E DG + H | |
| Sbjct: | 66 | AAVPKISRAINDAFQPIGMNIVNNNGEAAGQTVFHYHLHLLPRYGEGDGYGAVWKDHSSQ | 125 |
| Query: | 123 | F--EALAKLAKEIRKEI | 137 |
| | | + + L L+ IR+ + | |
| Sbjct: | 126 | YSGDDLQVLSSSIREHL | 142 |

[6219] A related DNA sequence was identified in S. pyogenes <SEQ ID 3449> which encodes the amino acid sequence <SEQ ID 3450>. Analysis of this protein sequence reveals the following:

```
Possible site: 37
>>> Seems to have no N-terminal signal sequence
----- Final Results -----
                            bacterial cytoplasm --- Certainty = 0.0125(Affirmative) < succ>
                              bacterial membrane --- Certainty = 0.0000(Not Clear) < succ>
                                bacterial outside --- Certainty = 0.0000(Not Clear) < succ>
```

[6220] An alignment of the GAS and GBS proteins is shown below.

| Identities = 97/137 (70%), Positives = 117/137 (84%) | | | |
|---|---|---|---|
| Query: | 1 | MDNCIFCKIISGEIPSSKVYEDDEVLAFLDITQTTTGHTLLIPKKHVRNVLEMDEKTAQI | 60 |
| | | M+NCIFC II G+IPSSKVYED++VLAFLDI+QTT GHTL+IPK+HVRN+LEM +TA | |
| Sbjct: | 1 | MENCIFCSIIQGDIPSSKVYEDEQVLAFLDISQTTKGHTLVIPKQHVRNLLEMTAETASH | 60 |
| Query: | 61 | TFERLPKVARAVQAATKAKGMNIINNNEEIAGQTVFHAHVHLVPRFDESDGIKIHYTTHE | 120 |
| | | F R+PK+ARA+Q+AT A MNIINNNE +AGQTVFHAHVHLVPR++E DGI I YTTHE | |
| Sbjct: | 61 | LFARIPKIARAIQSATGATAMNIINNNEALAGQTVFHAHVHLVPRYNEEDGISIQYTTHE | 120 |
| Query: | 121 | PDFEALAKLAKEIRKEI | 137 |
| | | PDF L KLA++I +E+ | |
| Sbjct: | 121 | PDFPVLEKLARQINQEV | 137 |

[6221] Based on this analysis, it was predicted that these proteins and their epitopes could be useful antigens for vaccines or diagnostics.

### EXAMPLE 1116

[6222] A DNA sequence (GBSx1191) was identified in S. agalactiae <SEQ ID 3451> which encodes the amino acid sequence <SEQ ID 3452>. Analysis of this protein sequence reveals the following:

```
Possible site: 36
>>> Seems to have a cleavable N-term signal seq.
----- Final Results -----
                                bacterial outside --- Certainty = 0.3000(Affirmative) < succ>
                              bacterial membrane --- Certainty = 0.0000(Not Clear) < succ>
                            bacterial cytoplasm --- Certainty = 0.0000(Not Clear) < succ>
```

[6223] A related GBS nucleic acid sequence <SEQ ID 10923> which encodes amino acid sequence <SEQ ID 10924> was also identified.

[6224] The protein has no significant homology with any sequences in the GENPEPT database.

[6225] No corresponding DNA sequence was identified in S. pyogenes.

[6226] SEQ ID 3452 (GBS87) was expressed in E. coli as a His-fusion product. SDS-PAGE analysis of total cell extract is shown in FIG. 8 (lane 3; MW 19.5 kDa). It was also expressed in E. coli as a GST-fusion product. SDS-PAGE analysis of total cell extract is shown in FIG. 15 (lane 10; MW 44 kDa).

[6227] Based on this analysis, it was predicted that these proteins and their epitopes could be useful antigens for vaccines or diagnostics.

### EXAMPLE 1117

[6228] A DNA sequence (GBSx1192) was identified in S. agalactiae <SEQ ID 3453> which encodes the amino acid sequence <SEQ ID 3454>. This protein is predicted to be ABC transporter, ATP-binding protein. Analysis of this protein sequence reveals the following:

| Possible site: 45 | | | | |
|---|---|---|---|---|
| >>> Seems to have no N-terminal signal sequence | | | | |
| | INTEGRAL | Likelihood = −6.53 | Transmembrane | 143-159 (141-161) |

```
----- Final Results -----
                              bacterial membrane --- Certainty = 0.3612(Affirmative) < succ>
                                bacterial outside --- Certainty = 0.0000(Not Clear) < succ>
                            bacterial cytoplasm --- Certainty = 0.0000(Not Clear) < succ>
```

[6229] A related GBS nucleic acid sequence <SEQ ID 9563> which encodes amino acid sequence <SEQ ID 9564> was also identified.

[6230] The protein has homology with the following sequences in the GENPEPT database.

| >GP: CAB12844 GB: Z99109 ABC transporter (ATP-binding protein) | | | |
|---|---|---|---|
| [Bacillus subtilis] | | | |
| Identities = 137/242 (56%), Positives = 181/242 (74%) | | | |
| Query: | 1 | MTMLKIENVTGGYVNIPVLKNISFEVNDGELVGLIGLNGAGKSTTINEIIGILRPYQGDI | 60 |
| | | M++L ++++TGGY PVLKN+SF + ++VGLIGLNGAGKSTTI IIG++ P++G I | |
| Sbjct: | 1 | MSLLSVKDLTGGYTRNPVLKNVSFTLEPNQIVGLIGLNGAGKSTTIRHIIGLMDPHKGSI | 60 |
| Query: | 61 | TIDGISLEADQELYRKKIGFIPETPSLYEELTLREHLETVAMAYDIATDEVMARAQKLLE | 120 |
| | | ++G + D E YR + +IPETP LYEELTL EHLE AMAY ++ + + R LL+ | |
| Sbjct: | 61 | ELNGKTFAEDPEGYRSQFTYIPETPVLYEELTLMEHLELTAMAYGLSKETMEKRLPPLLK | 120 |
| Query: | 121 | MFRLTDKLDWFPMHFSKGMKQKVMIICAFVVSPSLFIVDEPFLGLDPLAISDLINLLAEE | 180 |
| | | FR+ +L WFP HFSKGMKQKVMI+CAF+ P+L+I+DEPFLGLDPLAI+ L+ + E | |
| Sbjct: | 121 | EFRMEKRLKWFPAHFSKGMKQKVMIMCAFLAEPALYIIDEPFLGLDPLAINALLERMNEA | 180 |
| Query: | 181 | KAKGKSILMSTHVLDSAEKMCDRFVILHKGEIRAVGTLEELRAIFGDSNANLNDIYIALT | 240 |
| | | K G S+LMSTH+L +AE+ CD F+ILH GE+RA GTL ELR FG +A L+D+Y+ LT | |
| Sbjct: | 181 | KKGGASVLMSTHILATAERYCDSFIILHNGEVRARGTLSELREQFGMKDAALDDLYLELT | 240 |
| Query: | 241 | KE | 242 |
| | | KE | |
| Sbjct: | 241 | KE | 242 |

[6231] A related DNA sequence was identified in S. pyogenes <SEQ ID 3455> which encodes the amino acid sequence <SEQ ID 3456>. Analysis of this protein sequence reveals the following:

| Possible site: 43 | | | | |
|---|---|---|---|---|
| >>> Seems to have no N-terminal signal sequence | | | | |
| | INTEGRAL | Likelihood = −5.04 | Transmembrane | 141-157 (139-158) |

```
----- Final Results -----
                              bacterial membrane --- Certainty = 0.3017(Affirmative) < succ>
                                bacterial outside --- Certainty = 0.0000(Not Clear) < succ>
                            bacterial cytoplasm --- Certainty = 0.0000(Not Clear) < succ>
```

[6232] The protein has homology with the following sequences in the databases:

| >GP: CAB12844 GB: Z99109 ABC transporter (ATP-binding protein) | | | |
|---|---|---|---|
| [Bacillus subtilis] | | | |
| Identities = 139/241 (57%), Positives = 189/241 (77%) | | | |
| Query: | 1 | MLNIKNLTGGYHNIPVLNDVSFSVDNGELVGLIGLNGAGKSTTINEIIGFLKPYQGSISI | 60 |
| | | +L++K+LTGGY PVL +VSF+++ ++VGLIGLNGAGKSTTI IIG + P++GSI + | |
| Sbjct: | 3 | LLSVKDLTGGYTRNPVLKNVSFTLEPNQIVGLIGLNGAGKSTTIRHIIGLMDPHKGSIEL | 62 |
| Query: | 61 | DGLTLAENAVAYRQKIGFIPETPSLYEELTLSEHINTVAMAYDIDLEVAQKRAQPFLEMF | 120 |
| | | +G T AE+ YR + +IPETP LYEELTL EH+ AMAY + E +KR P L+ F | |
| Sbjct: | 63 | NGKTFAEDPEGYRSQFTYIPETPVLYEELTLMEHLELTAMAYGLSKETMEKRLPPLLKEF | 122 |
| Query: | 121 | RLTDKLEWFPVNFSKGMKQKVMIICAFVIDPSLFILDEPFLGLDPLAISDLIQTLEVEKA | 180 |
| | | R+ +L+WFP +FSKGMKQKVMI+CAF+ +P+L+I+DEPFLGLDPLAI+ L++ + K | |
| Sbjct: | 123 | RMEKRLKWFPAHFSKGMKQKVMIMCAFLAEPALYIIDEPFLGLDPLAINALLERMNEAKK | 182 |
| Query: | 181 | KGKSILMSTHVLDSAERMCDRFVILHHGQVRAQGTLADLQEAFGDRSASLNDIYLALTKED | 241 |
| | | G S+LMSTH+L +AER CD F+ILH+G+VRA+GTL++L+E FG + A+L+D+YL LTKED | |
| Sbjct: | 183 | GGASVLMSTHILATAERYCDSFIILHNGEVRARGTLSELREQFGMKDAALDDLYLELTKED | 243 |

[6233] An alignment of the GAS and GBS proteins is shown below.

| Identities = 181/240 (75%), Positives = 208/240 (86%) | | | |
|---|---|---|---|
| Query: | 3 | MLKIENVTGGYVNIPVLKNISFEVNDGELVGLIGLNGAGKSTTINEIIGILRPYQGDITI | 62 |
| | | ML I+N+TGGY NIPVL ++SF V++GELVGLIGLNGAGKSTTINEIIG L+PYQG I+I | |
| Sbjct: | 1 | MLNIKNLTGGYHNIPVLNDVSFSVDNGELVGLIGLNGAGKSTTINEIIGFLKPYQGSISI | 60 |
| Query: | 63 | DGISLEADQELYRKKIGFIPETPSLYEELTLREHLETVAMAYDIATDEVMARAQKLLEMF | 122 |
| | | DG++L + YR+KIGFIPETPSLYEELTL EH+ TVAMAYDI + RAQ LEMF | |
| Sbjct: | 61 | DGLTLAENAVAYRQKIGFIPETPSLYEELTLSEHINTVAMAYDIDLEVAQKRAQPFLEMF | 120 |
| Query: | 123 | RLTDKLDWFPMHFSKGMKQKVMIICAFVVSPSLFIVDEPFLGLDPLAISDLINLLAEEKA | 182 |
| | | RLTDKL+WFP++FSKGMKQKVMIICAFV+ PSLFI+DEPFLGLDPLAISDLI L EKA | |
| Sbjct: | 121 | RLTDKLEWFPVNFSKGMKQKVMIICAFVIDPSLFILDEPFLGLDPLAISDLIQTLEVEKA | 180 |
| Query: | 183 | KGKSILMSTHVLDSAEKMCDRFVILHKGEIRAVGTLEELRAIFGDSNANLNDIYIALTKE | 242 |
| | | KGKSILMSTHVLDSAE+MCDRFVILH G++RA GTL +L+ FGD +A+LNDIY+ALTKE | |
| Sbjct: | 181 | KGKSILMSTHVLDSAERMCDRFVILHHGQVRAQGTLADLQEAFGDRSASLNDIYLALTKE | 240 |

[6234] SEQ ID 3454 (GBS353) was expressed in E. coli as a His-fusion product. SDS-PAGE analysis of total cell extract is shown in FIG. 74 (lane 2; MW 30 kDa). It was also expressed in E. coli as a GST-fusion product. SDS-PAGE analysis of total cell extract is shown in FIG. 81 (lane 6; MW 55 kDa).

[6235] GBS353-GST was purified as shown in FIG. 216, lane 5.

[6236] Based on this analysis, it was predicted that these proteins and their epitopes could be useful antigens for vaccines or diagnostics.

### EXAMPLE 1118

[6237] A DNA sequence (GBSx1193) was identified in S. agalactiae <SEQ ID 3457> which encodes the amino acid sequence <SEQ ID 3458>. Analysis of this protein sequence reveals the following:

```
Possible site: 28
>>> Seems to have no N-terminal signal sequence
----- Final Results -----
                            bacterial cytoplasm --- Certainty = 0.1475(Affirmative) < succ>
                              bacterial membrane --- Certainty = 0.0000(Not Clear) < succ>
                                bacterial outside --- Certainty = 0.0000(Not Clear) < succ>
```

[6238] The protein has no significant homology with any sequences in the GENPEPT database.

[6239] No corresponding DNA sequence was identified in S. pyogenes.

[6240] Based on this analysis, it was predicted that this protein and its epitopes, could be useful antigens for vaccines or diagnostics.

### EXAMPLE 1119

[6241] A DNA sequence (GBSx1194) was identified in S. agalactiae <SEQ ID 3459> which encodes the amino acid sequence <SEQ ID 3460>. Analysis of this protein sequence reveals the following:

| Possible site: 44 | | | | |
|---|---|---|---|---|
| >>> Seems to have no N-terminal signal sequence | | | | |
| | INTEGRAL | Likelihood = −12.68 | Transmembrane | 57-73 (50-80) |
| | INTEGRAL | Likelihood = −8.49 | Transmembrane | 122-138 (103-152) |
| | INTEGRAL | Likelihood = −6.58 | Transmembrane | 319-335 (308-337) |
| | INTEGRAL | Likelihood = −4.99 | Transmembrane | 252-268 (249-273) |
| | INTEGRAL | Likelihood = −4.19 | Transmembrane | 104-120 (103-121) |
| | INTEGRAL | Likelihood = −3.50 | Transmembrane | 231-247 (229-248) |
| | INTEGRAL | Likelihood = −1.91 | Transmembrane | 298-314 (298-314) |
| | INTEGRAL | Likelihood = −1.44 | Transmembrane | 28-44 (27-44) |

```
----- Final Results -----
                              bacterial membrane --- Certainty = 0.6074(Affirmative) < succ>
                                bacterial outside --- Certainty = 0.0000(Not Clear) < succ>
                            bacterial cytoplasm --- Certainty = 0.0000(Not Clear) < succ>
```

[6242] The protein has homology with the following sequences in the GENPEPT database.

| >GP: CAB12845 GB: Z99109 ABC transporter (membrane protein) | | | |
|---|---|---|---|
| [Bacillus subtilis] | | | |
| Identities = 101/409 (24%), Positives = 187/409 (45%), | | | |
| Gaps = 76/409 (18%) | | | |
| Query: | 1 | MKKLFNKRRSLFLTQNSKYLRYVFNDHFVLVLMFLSGFLLYQYSQLLKDFPKTHWPIIVI | 60 |
| | | M ++ R + + Y++Y+ NDH V+VL+F YS+ ++D P H+P + | |
| Sbjct: | 4 | MLDIWQSRLQEHIKETRTYMKYMLNDHLVIVLIFFLAGAASWYSKWIRDIP-AHFPSFWV | 62 |
| Query: | 61 | VSIIILMLLAMGGIASYLEPADKQFLLIKEEAIKEIINSAKKRTYI-------------- | 106 |
| | | ++++ ++L + + L+ AD FLL E ++ + A +Y+ | |
| Sbjct: | 63 | MAVLFSLVLTSSYVRTLLKEADLVFLLPLEAKMEPYLKQAFVYSYVSQLFPLIALSIVAM | 122 |
| Query: | 107 | --FWLVIQTLFLVLISPILIKLGL------------------------------------ | 128 |
| | | ++ V LV + + ++L L | |
| Sbjct: | 123 | PLYFAVTPGASLVSYAAVFVQLLLLKAWNQVMEWRTTFQNDRSMKRMDVIIRFAANTLVL | 182 |
| Query: | 129 | -----SVFMITLLIFGLGIIKWLVITYKVKVFYNNQNLNWDAAINHEQERKQSILKFFSL | 183 |
| | | SV+M LL++ + + +L ++ K + W++ I E RKQ + +L | |
| Sbjct: | 183 | YFVFQSVYMYALLVYVIMAVLYLYMSSAAK----RKTFKWESHIESELRRKQRFYRIANL | 238 |
| Query: | 184 | FTNVKGISTSVKRRSFLDGILKLISKTPSRLWTNLFVRAFLRSSDYLGLTIRLVTLNILS | 243 |
| | | FT+V + KRR++LD +L+L+ + + +F RAFLRSSDYLG+ +RL + L | |
| Sbjct: | 239 | FTDVPHLRKQAKRRAYLDFLLRLVPFEQRKTFAYMFTRAFLRSSDYLGILVRLTIVFALI | 298 |
| Query: | 244 | VIFVNETYLALALAFVFN-YLLLFQLLALGHHFDYQYMNQLYPVRLNAKASQLKGFLRVL | 302 |
| | | +++V+ + L A+ VF ++ QLL L HFD+ + +LYPV+ K ++LK + +L | |
| Sbjct: | 299 | IMYVSASPLIAAVLTVFAIFITGIQLLPLFGHFDHLALQELYPVQ---KETKLKSYFSLL | 355 |
| Query: | 303 | SYAVTVIDSI----------LIRELKPVILLIVLMLIVTEYYIPYKIKK | 341 |
| | | A+++ + L L +I VL+ +V Y+ ++KK | |
| Sbjct: | 356 | KTALSIQALLMSVASAYAAGLTGFLYALIGSAVLIFVVLPAYMTTRLKK | 404 |

[6243] A related DNA sequence was identified in S. pyogenes <SEQ ID 3461> which encodes the amino acid sequence <SEQ ID 3462>. Analysis of this protein sequence reveals the following:

Possible site: 44
>>> Seems to have no N-terminal signal sequence

| | | | |
|---|---|---|---|
| INTEGRAL | Likelihood = −14.91 | Transmembrane | 126-142 (119-151) |
| INTEGRAL | Likelihood = −9.77 | Transmembrane | 320-336 (311-339) |
| INTEGRAL | Likelihood = −6.37 | Transmembrane | 59-75 (53-79) |
| INTEGRAL | Likelihood = −4.94 | Transmembrane | 28-44 (22-47) |
| INTEGRAL | Likelihood = −4.73 | Transmembrane | 250-266 (249-273) |
| INTEGRAL | Likelihood = −4.04 | Transmembrane | 231-247 (229-248) |
| INTEGRAL | Likelihood = −3.19 | Transmembrane | 298-314 (295-315) |
| INTEGRAL | Likelihood = −2.28 | Transmembrane | 103-119 (103-119) |

```
----- Final Results -----
                              bacterial membrane --- Certainty = 0.6965(Affirmative) < succ>
                                bacterial outside --- Certainty = 0.0000(Not Clear) < succ>
                            bacterial cytoplasm --- Certainty = 0.0000(Not Clear) < succ>
```

[6244] The protein has homology with the following sequences in the databases:

| >GP: CAB12845 GB: Z99109 ABC transporter (membrane protein) | | | |
|---|---|---|---|
| [Bacillus subtilis] | | | |
| Identities = 96/403 (23%), Positives = 173/403 (42%), Gaps = 78/403 (19%) | | | |
| Query: | 1 | MKALFLKRRQDFQKQQNKYLRYVLNDHFVLVLMFLLGFAMVQYGQLLN----HEPT---- | 52 |
| | | M ++ R Q+ K+ Y++Y+LNDH V+VL+F L A Y + + HFP+ | |
| Sbjct: | 4 | MLDIWQSRLQEHIKETRTYMKYMLNDHLVIVLIFFLAGAASWYSKWIRDIPAHFPSFWVM | 63 |
| Query: | 53 | -------------NHLPIQVCLGILIPLLLSM---------------------------- | 71 |
| | | L + L L+PL M | |
| Sbjct: | 64 | AVLFSLVLTSSYVRTLLKEADLVFLLPLEAKMEPYLKQAFVYSYVSQLFPLIALSIVAMP | 123 |
| Query: | 72 | --------GSIATYLEEADQHFLLPKEEEVISYI------KQAERLSFLLWGTLQTAVLL | 117 |
| | | S+ +Y Q LL +V+ + + +R+ ++ T VL | |
| Sbjct: | 124 | LYFAVTPGASLVSYAAVFVQLLLLKAWNQVMEWRTTFQNDRSMKRMDVIIRFAANTLVLY | 183 |
| Query: | 118 | FLYPIFRRLGLSLFIFIILVLILLALKRVVLSRKTRYFLRGNRLDWAKAVAFESNRKQSI | 177 |
| | | F++ S++++ +LV +++A+ + +S + W + E RKQ | |
| Sbjct: | 184 | FVFQ-------SVYMYALLVYVIMAVLYLYMSSAAKR----KTFKWESHIESELRRKQRF | 232 |
| Query: | 178 | LKFYSLFTTVKGISTKVKERTYLNPLLKLVKQTPSNLWLSLYARAFLRSSDYLGLFLRLM | 237 |
| | | + +LFT V + + K R YL+ LL+LV + ++ RAFLRSSDYLG+ +RL | |
| Sbjct: | 233 | YRIANLFTDVPHLRKQAKRRAYLDFLLRLVPFEQRKTFAYMFTRAFLRSSDYLGILVRLT | 292 |
| Query: | 238 | LLSSLSVFFIHNLYLSVSLALIFN-YLVVFQLLSLYYHYDYHYMTSLYPENSRSKKKNML | 296 |
| | | ++ +L + ++ L ++ +F ++ QLL L+ H+D+ + LYP +K K+ | |
| Sbjct: | 293 | IVFALIIMYVSASPLIAAVLTVFAIFITGIQLLPLFGHFDHLALQELYPVQKETKLKSYF | 352 |
| Query: | 297 | SFLR-GLSFLMLIVNMLCCSSAPKA--LILIVGMVFIACIYLP | 336 |
| | | S L+ LS L++++ +A L ++G + + LP | |
| Sbjct: | 353 | SLLKTALSIQALLMSVASAYAAGLTGFLYALIGSAVLIFVVLP | 395 |

[6245] An alignment of the GAS and GBS proteins is shown below.

| Identities = 170/344 (49%), Positives = 237/344 (68%) | | | |
|---|---|---|---|
| Query: | 1 | MKKLFNKRRSLFLTQNSKYLRYVFNDHFVLVLHFLSGFLLYQYSQLLKDFPKTHWPIIVI | 60 |
| | | MK LF KRR F Q +KYLRYV NDHFVLVLMFL GF + QY QLL FP H PI V | |
| Sbjct: | 1 | MKALFLKRRQDFQKQQNKYLRYVLNDHFVLVLMFLLGFAMVQYGQLLNHFPTNHLPIQVC | 60 |
| Query: | 61 | VSIIILMLLAMGGIASYLEPADKQFLLIKEEAIKEIINSAKKRTYIFWLVIQTLFLVLIS | 120 |
| | | + I+I +LL+MG IA+YLE AD+ FLL KEE + I A++ +++ W +QT L+ + | |
| Sbjct: | 61 | LGILIPLLLSMGSIATYLEEADQHFLLPKEEEVISYIKQAERLSFLLWGTLQTAVLLFLY | 120 |
| Query: | 121 | PILIKLGLSVFMITLLIFGLGIIKWLVITYKVKVFYNNQNLNWDAAINHEQERKQSILKF | 180 |
| | | PI +LGLS+F+ +L+ L +K +V++ K + F L+W A+ E RKQSILKF | |
| Sbjct: | 121 | PIFRRLGLSLFIFIILVLILLALKRVVLSRKTRYFLRGNRLDWAKAVAFESNRKQSILKF | 180 |
| Query: | 181 | FSLFTNVKGISTSVKRRSFLDGILKLISKTPSRLWTNLFVRAFLRSSDYLGLTIRLVTLN | 240 |
| | | +SLFT VKGIST VK R++L+ +LKL+ +TPS LW +L+ RAFLRSSDYLGL +RL+ L+ | |
| Sbjct: | 181 | YSLFTTVKGISTKVKERTYLNPLLKLVKQTPSNLWLSLYARAFLRSSDYLGLFLRLMLLS | 240 |
| Query: | 241 | ILSVIFVNETYLALALAFVFNYLLLFQLLALGHHFDYQYMNQLYPVRLNAKASQLKGFLR | 300 |
| | | LSV F++ YL+++LA +FNYL++FQLL+L +H+DY YM LYP +K + FLR | |
| Sbjct: | 241 | SLSVFFIHNLYLSVSLALIFNYLVVFQLLSLYYHYDYHYMTSLYPENSRSKKKNMLSFLR | 300 |
| Query: | 301 | VLSYAVTVIDSILIRELKPVILLIVLMLIVTEYYIPYKIKKMID | 344 |
| | | LS+ + +++ + ++LIV M+ + Y+PYK+KK+ID | |
| Sbjct: | 301 | GLSFLMLIVNMLCCSSAPKALILIVGMVFIACIYLPYKLKKIID | 344 |

[6246] Based on this analysis, it was predicted that these proteins and their epitopes could be useful antigens for vaccines or diagnostics.

### EXAMPLE 1120

[6247] A DNA sequence (GBSx1195) was identified in S. agalactiae <SEQ ID 3463> which encodes the amino acid sequence <SEQ ID 3464>. Analysis of this protein sequence reveals the following:

```
Possible site: 45
>>> Seems to have no N-terminal signal sequence
----- Final Results -----
                            bacterial cytoplasm --- Certainty = 0.2821(Affirmative) < succ>
                              bacterial membrane --- Certainty = 0.0000(Not Clear) < succ>
                                bacterial outside --- Certainty = 0.0000(Not Clear) < succ>
```

[6248] The protein has homology with the following sequences in the GENPEPT database.

| >GP: AAC00284 GB: AF008220 YtmP [Bacillus subtilis] | | | |
|---|---|---|---|
| Identities = 69/214 (32%), Positives = 121/214 (56%), Gaps = 1/214 (0%) | | | |
| Query: | 12 | PLRGKSGKAYIGTYPNGERVFVKYNTTPILPALAKEQIAPQLLWARRTSNGDMMSAQEWL | 71 |
| | | P G +G AY + NG+++F+K N++P L L+ E I P+L+W +R NGD+++AQ W+ | |
| Sbjct: | 20 | PAGGATGDAYYAKH-NGQQLFLKRNSSPFLAVLSAEGIVPKLVWTKRMENGDVITAQHWM | 78 |
| Query: | 72 | DGRTLTKEDMGSKQIIHILLRLHKSRPLVNQLLQLGYKIENPYDLLMDWEKQTPIQIREN | 131 |
| | | GR L +DM + + +L ++H S+ L++ L +LG + NP LL ++ + + | |
| Sbjct: | 79 | TGRELKPKDMSGRPVAELLRKIHTSKALLDMLKRLGKEPLNPGALLSQLKQAVFAVQQSS | 138 |
| Query: | 132 | TYLQSIVTELKRSLPEFRTEVATIVHGDIKHSNWVITTSGLIYLVDWDSVRLTDRMYDVA | 191 |
| | | +Q + L+ L E + H D+ H+NW+++ +YL+DWD + D D+ | |
| Sbjct: | 139 | PLIQEGIKYLEEHLHEVHFGEKVVCHCDVNHNNWLLSEDNQLYLIDWDGAMIADPAMDLG | 198 |
| Query: | 192 | YILSHYIPQKHWKDWLSYYGYKDNEKVWSKIIWY | 225 |
| | | +L HY+ + W+ WLS YG + E + ++ WY | |
| Sbjct: | 199 | PLLYHYVEKPAWESWLSMYGIELTESLRLRMAWY | 232 |

[6249] A related DNA sequence was identified in S. pyogenes <SEQ ID 3465> which encodes the amino acid sequence <SEQ ID 3466>. Analysis of this protein sequence reveals the following:

```
Possible site: 45
>>> Seems to have no N-terminal signal sequence
----- Final Results -----
                            bacterial cytoplasm --- Certainty = 0.2686(Affirmative) < succ>
                              bacterial membrane --- Certainty = 0.0000(Not Clear) < succ>
                                bacterial outside --- Certainty = 0.0000(Not Clear) < succ>
```

[6250] An alignment of the GAS and GBS proteins is shown below.

| Identities = 214/262 (81%), Positives = 242/262 (91%) | | | |
|---|---|---|---|
| Query: | 1 | MTISNQELTLTPLRGKSGKAYIGTYPNGERVFVKYNTTPILPALAKEQIAPQLLWARRTS | 60 |
| | | +T + QELTLTPLRGKSGKAY GTYPNGE VF+K NTTPILPALAKEQIAPQLLWA+R | |
| Sbjct: | 1 | VTTTEQELTLTPLRGKSGKAYKGTYPNGECVFIKLNTTPILPALAKEQIAPQLLWAKRHG | 60 |
| Query: | 61 | NGDMMSAQEWLDGRTLTKEDMGSKQIIHILLRLHKSRPLVNQLLQLGYKIENPYDLLMDW | 120 |
| | | NGDMMSAQEWL+GRTLTKEDM SKQIIHILLRLHKS+ LVNQLLQL YKIENPYDLL+D+ | |
| Sbjct: | 61 | NGDMMSAQEWLNGRTLTKEDMNSKQIIHILLRLHKSKKLVNQLLQLNYKIENPYDLLVDF | 120 |
| Query: | 121 | EKQTPIQIRENTYLQSIVTELKRSLPEFRTEVATIVHGDIKHSNWVITTSGLIYLVDWDS | 180 |
| | | E+ P+QI++N+YLQ+IV ELKRSLPEF++EVATIVHGDIKHSNWVITTSG+I+LVDWDS | |
| Sbjct: | 121 | EQNAPLQIQQNSYLQAIVKELKRSLPEFKSEVATIVHGDIKHSNWVITTSGMIFLVDWDS | 180 |
| Query: | 181 | VRLTDRMYDVAYILSHYIPQKHWKDWLSYYGYKDNEKVWSKIIWYGQFSYLSQIIKCFDK | 240 |
| | | VRLTDRMYDVAY+LSHYIP+ W +WLSYYGYK+N+KV KIIWYGQFS+L+QI+KCFDK | |
| Sbjct: | 181 | VRLTDRMYDVAYLLSHYIPRSRWSEWLSYYGYKNNDKVMQKIIWYGQFSHLTQILKCFDK | 240 |
| Query: | 241 | RDMEHVNQEIYELRKFRELIKK | 262 |
| | | RDMEHVNQEIY LRKFRE+ +K | |
| Sbjct: | 241 | RDMEHVNQEIYALRKFREIFRK | 262 |

[6251] Based on this analysis, it was predicted that these proteins and their epitopes could be useful antigens for vaccines or diagnostics.

### EXAMPLE 1121

[6252] A DNA sequence (GBSx1196) was identified in S. agalactiae <SEQ ID 3467> which encodes the amino acid sequence <SEQ ID 3468>. Analysis of this protein sequence reveals the following:

```
Possible site: 51
>>> Seems to have no N-terminal signal sequence
----- Final Results -----
                            bacterial cytoplasm --- Certainty = 0.4529(Affirmative) < succ>
                              bacterial membrane --- Certainty = 0.0000(Not Clear) < succ>
                                bacterial outside --- Certainty = 0.0000(Not Clear) < succ>
```

[6253] The protein has homology with the following sequences in the GENPEPT database.

| >GP: AAC00285 GB: AF008220 YtmQ [Bacillus subtilis] | | | |
|---|---|---|---|
| Identities = 126/211 (59%), Positives = 161/211 (75%) | | | |
| Query: | 1 | MRVRKRKGAEEHLENNPHYVISNPEEAKGRWHEIFGNNNPIHIEVGSGKGAFITGMAEQN | 60 |
| | | MR+R + A++ L N ISNP + KG+W+ +FGN+NPIHIEVG+GKG FI+GMA+QN | |
| Sbjct: | 1 | MRMRHKPWADDFLAENADIAISNPADYKGKWNTVFGNDNPIHIEVGTGKGQFISGMAKQN | 60 |
| Query: | 61 | PDINYIGIDIQLSVLSYALDKVLDSGAKNIKLLLVDGSSLSNYFDTGEVDLMYLNFSDPW | 120 |
| | | PDINYIGI++ SV+ A+ KV DS A+N+KLL +D +L++ F+ GEV +YLNFSDPW | |
| Sbjct: | 61 | PDINYIGIELFKSVIVTAVQKVKDSEAQNVKLLNIDADTLTDVFEPGEVKRVYLNFSDPW | 120 |
| Query: | 121 | PKKKHEKRRLTYKTFLDTYKDILPEQGEIHFKTDNRGLFEYSLASFSQYGMTLKQVWLDL | 180 |
| | | PKK+HEKRRLTY FL Y++++ + G IHFKTDNRGLFEYSL SFS+YG+ L V LDL | |
| Sbjct: | 121 | PKKRHEKRRLTYSHFLKKYEEVMGKGGSIHFKTDNRGLFEYSLKSFSEYGLLLTYVSLDL | 180 |
| Query: | 181 | HASDYQQNIMTEYERKFSNKGQVIYRVEARF | 211 |
| | | H S+ + NIMTEYE KFS GQ IYR E + | |
| Sbjct: | 181 | HNSNLEGNIMTEYEEKFSALGQPIYRAEVEW | 211 |

[6254] A related DNA sequence was identified in S. pyogenes <SEQ ID 3469> which encodes the amino acid sequence <SEQ ID 3470>. Analysis of this protein sequence reveals the following:

```
Possible site: 29
>>> Seems to have no N-terminal signal sequence
----- Final Results -----
                            bacterial cytoplasm --- Certainty = 0.3303(Affirmative) < succ>
                              bacterial membrane --- Certainty = 0.0000(Not Clear) < succ>
                                bacterial outside --- Certainty = 0.0000 (Not Clear) < succ>
```

[6255] An alignment of the GAS and GBS proteins is shown below.

| Identities = 179/211 (84%), Positives = 193/211 (90%) | | | |
|---|---|---|---|
| Query: | 1 | MRVRKRKGAEEHLENNPHYVISNPEEAKGRWHEIFGNNNPIHIEVGSGKGAFITGMAEQN | 60 |
| | | MRVRKRKGAEEHL NNPHYVI NPE+AKGRWH++FGN+ PIHIEVGSGKG FITGMA +N | |
| Sbjct: | 1 | MRVRKRKGAEEHLANNPHYVILNPEDAKGRWHDVFGNDRPIHIEVGSGKGGFITGMALKN | 60 |
| Query: | 61 | PDINYIGIDIQLSVLSYALDKVLDSGAKNIKLLLVDGSSLSNYFDTGEVDLMYLNFSDPW | 120 |
| | | PDINYIGIDIQLSVLSYALDKVL S N+KLL VDGSSL+NYF+ GEVD+MYLNFSDPW | |
| Sbjct: | 61 | PDINYIGIDIQLSVLSYALDKVLASEVPNVKLLRVDGSSLTNYFEDGEVDMMYLNFSDPW | 120 |
| Query: | 121 | PKKKHEKRRLTYKTFLDTYKDILPEQGEIHFKTDNRGLFEYSLASFSQYGMTLKQVWLDL | 180 |
| | | PK KHEKRRLTYK FLDTYK ILPE GEIHFKTDNRGLFEYSLASFSQYGMTL+Q+WLDL | |
| Sbjct: | 121 | PKTKHEKRRLTYKDFLDTYKRILPEHGEIHFKTDNRGLFEYSLASFSQYGMTLRQIWLDL | 180 |
| Query: | 181 | HASDYQQNIMTEYERKFSNKGQVIYRVEARF | 211 |
| | | HAS+Y+ N+MTEYE KFSNKGQVIYRVEA F | |
| Sbjct: | 181 | HASNYEGNVMTEYEEKFSNKGQVIYRVEANF | 211 |

[6256] Based on this analysis, it was predicted that these proteins and their epitopes could be useful antigens for vaccines or diagnostics.

### EXAMPLE 1122

[6257] A DNA sequence (GBSx1197) was identified in S. agalactiae <SEQ ID 3471> which encodes the amino acid sequence <SEQ ID 3472>. Analysis of this protein sequence reveals the following:

```
Possible site: 35
>>> Seems to have no N-terminal signal sequence
----- Final Results -----
                            bacterial cytoplasm --- Certainty = 0.1311(Affirmative) < succ>
                              bacterial membrane --- Certainty = 0.0000(Not Clear) < succ>
                                bacterial outside --- Certainty = 0.0000(Not Clear) < succ>
```

[6258] The protein has homology with the following sequences in the GENPEPT database.

| >GP: BAB06136 GB: AP001515 unknown conserved protein | | | |
|---|---|---|---|
| [Bacillus halodurans] | | | |
| Identities = 61/124 (49%), Positives = 81/124 (65%), | | | |
| Gaps = 2/124 (1%) | | | |
| Query: | 2 | GGDYVLSILIDKPGGITVEDTAQLTDVVSPLLDTIQPDPFPEQYMLEVSSPGLERPLKTA | 61 |
| | | G D+ L + ID G+ +ED ++++ +S LD + DP + Y LEVSSPG ERPLK | |
| Sbjct: | 33 | GKDWFLRVFIDSETGVDLEDCGKVSERLSEKLD--ETDPIEQAYFLEVSSPGAERPLKRE | 90 |
| Query: | 62 | EALSNAVGSYINVSLYKSIDKVKIFEGDLLSFDGETLTIDYMDKTRHKTVDIPYQTVAKA | 121 |
| | | + L ++G ++V+LY+ ID K EG+L FDGETLTI+ KTR KTV IPY VA A | |
| Sbjct: | 91 | KDLLRSIGKNVHVTLYEPIDGEKALEGELTEFDGETLTIEIKIKTRKKTVTIPYAKVASA | 150 |
| Query: | 122 | RLAV | 125 |
| | | RLAV | |
| Sbjct: | 151 | RLAV | 154 |

[6259] A related DNA sequence was identified in S. pyogenes <SEQ ID 3473> which encodes the amino acid sequence <SEQ ID 3474>. Analysis of this protein sequence reveals the following:

```
Possible site: 33
>>> Seems to have no N-terminal signal sequence
----- Final Results -----
                            bacterial cytoplasm --- Certainty = 0.3445(Affirmative) < succ>
                              bacterial membrane --- Certainty = 0.0000(Not Clear) < succ>
                                bacterial outside --- Certainty = 0.0000(Not Clear) < succ>
```

[6260] An alignment of the GAS and GBS proteins is shown below.

| Identities = 101/127 (79%), Positives = 117/127 (91%) | | | |
|---|---|---|---|
| Query: | 1 | MGGDYVLSILIDKPGGITVEDTAQLTDVVSPLLDTIQPDPFPEQYMLEVSSPGLERPLKT | 60 |
| | | MG DY+LSIL+DK GGITVEDT+ LT+++SPLLDTI PDPFP QYMLEVSSPGLERPLKT | |
| Sbjct: | 52 | MGSDYILSILVDKEGGITVEDTSDLTNIISPLLDTIDPDPFPNQYMLEVSSPGLERPLKT | 111 |
| Query: | 61 | AEALSNAVGSYINVSLYKSIDKVKIFEGDLLSFDGETLTIDYMDKTRHKTVDIPYQTVAK | 120 |
| | | A++L AVGSYINVSLY++IDKVK+F+GDLL+FDGETLTIDY+DKTRHK V+IPYQ VAK | |
| Sbjct: | 112 | ADSLKAAVGSYINVSLYQAIDKVKVFQGDLLAFDGETLTIDYLDKTRHKIVNIPYQAVAK | 171 |
| Query: | 121 | ARLAVKL | 127 |
| | | R+AVKL | |
| Sbjct: | 172 | VRMAVKL | 178 |

[6261] Based on this analysis, it was predicted that these proteins and their epitopes could be useful antigens for vaccines or diagnostics.

### EXAMPLE 1123

[6262] A DNA sequence (GBSx1198) was identified in S. agalactiae <SEQ ID 3475> which encodes the amino acid sequence <SEQ ID 3476>. This protein is predicted to be n utilization substance protein a homolog (nusA). Analysis of this protein sequence reveals the following:

```
Possible site: 36
>>> Seems to have no N-terminal signal sequence
----- Final Results -----
                            bacterial cytoplasm --- Certainty = 0.5069(Affirmative) < succ>
                              bacterial membrane --- Certainty = 0.0000(Not Clear) < succ>
                                bacterial outside --- Certainty = 0.0000(Not Clear) < succ>
```

[6263] A related GBS nucleic acid sequence <SEQ ID 9565> which encodes amino acid sequence <SEQ ID 9566> was also identified.

[6264] The protein has homology with the following sequences in the GENPEPT database.

| >GP: CAB13533 GB: Z99112 nusA [Bacillus subtilis] | | | |
|---|---|---|---|
| Identities = 164/370 (44%), Positives = 251/370 (67%), Gaps = 15/370 (4%) | | | |
| Query: | 4 | MSKEMLEAFRILEEEKHINKEDIIDAVTESLKSAYKRRYGQSESCVIEFNEKKADFTVYT | 63 |
| | | MS E+L+A ILE+EK I+KE II+A+ +L SAYKR + Q+++ ++ N + V+ | |
| Sbjct: | 1 | MSSELLDALTILEKEKGISKEIIIEAIEAALISAYKRNFNQAQNVRVDLNRETGSIRVFA | 60 |
| Query: | 64 | VREVVDEVFDSRLEISLKDALAISSAYELGDKIRFEESVTEFGRVAAQSAKQTIMEKMRR | 123 |
| | | ++VVDEV+D RLEIS+++A I Y +GD + E + +FGR+AAQ+AKQ + +++R | |
| Sbjct: | 61 | RKDVVDEVYDQRLEISIEEAQGIHPEYMVGDVVEIEVTPKDFGRIAAQTAKQVVTQRVRE | 120 |
| Query: | 124 | QMREVTFNEYKQHEGEIMTGTVERFDQRFIYVNLGSLEAQLSHQDQIPGESFKSHDMIDV | 183 |
| | | R V ++E+ E +IMTG V+R D +FIYV+LG +EA L +Q+P ES+K HD I V | |
| Sbjct: | 121 | AERGVIYSEFIDREEDIMTGIVQRLDNKFIYVSLGKIEALLPVNEQMPNESYKPHDRIKV | 180 |
| Query: | 184 | YVYKVENNPKGVNVFVSRSHPEFIKRIMEREIPEVFDGTVEIMSVSREAGDRTKVAVRSH | 243 |
| | | Y+ KVE KG ++VSR+HP +KR+ E E+PE++DGTVE+ SV+REAGDR+K++VR+ | |
| Sbjct: | 181 | YITKVEKTTKGPQIYVSRTHPGLLKRLFEIEVPEIYDGTVELKSVAREAGDRSKISVRTD | 240 |
| Query: | 244 | NSNVDAIGTIVGRGGSNIKKVISNFHPKRVDAKTGLEIPVEENIDVIQWVEDPAEFIYNA | 303 |
| | | + +VD +G+ VG G ++ +++ E ID++ W DP EF+ NA | |
| Sbjct: | 241 | DPDVDPVGSCVGPKGQRVQAIVNELK--------------GEKIDIVNWSSDPVEFVANA | 286 |
| Query: | 304 | IAPAEVDMVLFDDEDTKRATVVVPDSKLSLAIGRRGQNVRLAAHLTGYRIDIKSASEYEK | 363 |
| | | ++P++V V+ ++E+ K TV+VPD +LSLAIG+RGQN RLAA LTG++IDIKS ++ + | |
| Sbjct: | 287 | LSPSKVLDVIVNEEE-KATTVIVPDYQLSLAIGKRGQNARLAAKLTGWKIDIKSETDARE | 345 |
| Query: | 364 | MEAQELQTEE | 373 |
| | | + + EE | |
| Sbjct: | 346 | LGIYPRELEE | 355 |

[6265] A related DNA sequence was identified in S. pyogenes <SEQ ID 3477> which encodes the amino acid sequence <SEQ ID 3478>. Analysis of this protein sequence reveals the following:

```
Possible site: 44
>>> Seems to have no N-terminal signal sequence
----- Final Results -----
                            bacterial cytoplasm --- Certainty = 0.2074(Affirmative) < succ>
                              bacterial membrane --- Certainty = 0.0000(Not Clear) < succ>
                                bacterial outside --- Certainty = 0.0000(Not Clear) < succ>
```

[6266] An alignment of the GAS and GBS proteins is shown below.

| Identities = 348/380 (91%), Positives = 361/380 (94%), Gaps = 2/380 (0%) | | | |
|---|---|---|---|
| Query: | 4 | MSKEMLEAFRILEEEKHINKEDIIDAVTESLKSAYKRRYGQSESCVIEFNEKKADFTVYT | 63 |
| | | MSKEMLEAFRILEEEKHI+K DIIDAVTESLKSAYKRRYGQSESCVIEFNEK ADF V+T | |
| Sbjct: | 12 | MSKEMLEAFRILEEEKHIDKADIIDAVTESLKSAYKRRYGQSESCVIEFNEKTADFQVFT | 71 |
| Query: | 64 | VREVVDEVFDSRLEISLKDALAISSAYELGDKIRFEESVTEFGRVAAQSAKQTIMEKMRR | 123 |
| | | VREVV+EVFDSRLEISLKDALAISSAYELGDKIRFEESV EFGRVAAQSAKQTIMEKMRR | |
| Sbjct: | 72 | VREVVEEVFDSRLEISLKDALAISSAYELGDKIRFEESVNEFGRVAAQSAKQTIMEKMRR | 131 |
| Query: | 124 | QMREVTFNEYKQHEGEIMTGTVERFDQRFIYVNLGSLEAQLSHQDQIPGESFKSHDMIDV | 183 |
| | | QMREV FNEYK+HEGEIMTGTVERFDQRFIYVNLGSLEAQLSHQDQIPGE+FKSHD IDV | |
| Sbjct: | 132 | QMREVMFNEYKEHEGEIMTGTVERFDQRFIYVNLGSLEAQLSHQDQIPGETFKSHDRIDV | 191 |
| Query: | 184 | YVYKVENNPKGVNVFVSRSHPEFIKRIMEREIPEVFDGTVEIMSVSREAGDRTKVAVRSH | 243 |
| | | YVYKVENNPKGVNVFVSRSHPEFIKRIME+EIPEVFDGTVEIMSVSREAGDRTKVAVRSH | |
| Sbjct: | 192 | YVYKVENNPKGVNVFVSRSHPEFIKRIMEQEIPEVFDGTVEIMSVSREAGDRTKVAVRSH | 251 |
| Query: | 244 | NSNVDAIGTIVGRGGSNIKKVISNFHPKRVDAKTGLEIPVEENIDVIQWVEDPAEFIYNA | 303 |
| | | N NVDAIGTIVGRGGSNIKKVIS FHPKRVDAKTGLEIPVEENIDVIQWV+DPAEFIYNA | |
| Sbjct: | 252 | NPNVDAIGTIVGRGGSNIKKVISKFHPKRVDAKTGLEIPVEENIDVIQWVDDPAEFIYNA | 311 |
| Query: | 304 | IAPAEVDMVLFDDEDTKRATVVVPDSKLSLAIGRRGQNVRLAAHLTGYRIDIKSASEYEK | 363 |
| | | IAPAEVDMVLFDDED KRATVVVPDSKLSLAIGRRGQNVRLAAHLTGYRIDIKSASEY++ | |
| Sbjct: | 312 | IAPAEVDMVLFDDEDLKRATVVVPDSKLSLAIGRRGQNVRLAAHLTGYRIDIKSASEYDR | 371 |
| Query: | 364 | MEAQELQTEEVAQESEVISD | 383 |
| | | +EA+ + A E V+ D | |
| Sbjct: | 372 | LEAE--KEAATAVEEPVVDD | 389 |

[6267] Based on this analysis, it was predicted that these proteins and their epitopes could be useful antigens for vaccines or diagnostics.

### EXAMPLE 1124

[6268] A DNA sequence (GBSx1199) was identified in S. agalactiae <SEQ ID 3479> which encodes the amino acid sequence <SEQ ID 3480>. Analysis of this protein sequence reveals the following:

```
Possible site: 37
>>> Seems to have no N-terminal signal sequence
----- Final Results -----
                            bacterial cytoplasm --- Certainty = 0.2012(Affirmative) < succ>
                              bacterial membrane --- Certainty = 0.0000(Not Clear) < succ>
                                bacterial outside --- Certainty = 0.0000(Not Clear) < succ>
```

[6269] The protein has homology with the following sequences in the GENPEPT database.

| >GP: CAB13534 GB: Z99112 alternate gene name: ymxB~similar to | | | |
|---|---|---|---|
| hypothetical proteins [Bacillus subtilis] | | | |
| Identities = 46/92 (50%), Positives = 67/92 (72%), Gaps = 1/92 (1%) | | | |
| Query: | 1 | MAKTKKIPLRKSVVSGEVIDKRDLLRIVKNKEGQVFIDPTGKQNGRGAYIKLDNDEAILA | 60 |
| | | M K KKIPLRK VV+GE+ K++L+R+V++KEG++ +DPTGK+NGRGAY+ LD + + A | |
| Sbjct: | 1 | MNKHKKIPLRKCVVTGEMKPKKELIRVVRSKEGEISVDPTGKKNGRGAYLTLDKECILAA | 60 |
| Query: | 61 | KKKRVFDRSFSMEVSDEFYDELLAYVDHKVKR | 92 |
| | | KKK F ++ D+ +DELL + KVK+ | |
| Sbjct: | 61 | KKKNTLQNQFQSQIDDQIFDELLELAE-KVKK | 91 |

[6270] A related DNA sequence was identified in S. pyogenes <SEQ ID 3481> which encodes the amino acid sequence <SEQ ID 3482>. Analysis of this protein sequence reveals the following:

```
Possible site: 61
>>> Seems to have no N-terminal signal sequence
----- Final Results -----
                            bacterial cytoplasm --- Certainty = 0.1008(Affirmative) < succ>
                              bacterial membrane --- Certainty = 0.0000(Not Clear) < succ>
                                bacterial outside --- Certainty = 0.0000(Not Clear) < succ>
```

[6271] An alignment of the GAS and GBS proteins is shown below.

| Identities = 77/98 (78%), Positives = 92/98 (93%) | | | |
|---|---|---|---|
| Query: | 1 | MAKTKKIPLRKSVVSGEVIDKRDLLRIVKNKEGQVFIDPTGKQNGRGAYIKLDNDEAILA | 60 |
| | | M+K KKIPLRKS+VSGE+I KRDLLRIVK K+GQVFIDPTGKQNGRGAYIKLDN EA++A | |
| Sbjct: | 2 | MSKVKKIPLRKSLVSGEIIAKRDLLRIVKTKDGQVFIDPTGKQNGRGAYIKLDNQEALMA | 61 |
| Query: | 61 | KKKRVFDRSFSMEVSDEFYDELLAYVDHKVKRRELGLE | 98 |
| | | KKK+VF+RSFSH++ + FYD+L+AYVDHK+KRRELGL+ | |
| Sbjct: | 62 | KKKQVFNRSFSMDIPESFYDDLIAYVDHKIKRRELGLD | 99 |

[6272] Based on this analysis, it was predicted that these proteins and their epitopes could be useful antigens for vaccines or diagnostics.

### EXAMPLE 1125

[6273] A DNA sequence (GBSx1200) was identified in S. agalactiae <SEQ ID 3483> which encodes the amino acid sequence <SEQ ID 3484>. This protein is predicted to be probable ribosomal protein in infb 5′region. Analysis of this protein sequence reveals the following:

```
Possible site: 19
>>> Seems to have an uncleavable N-term signal seq
----- Final Results -----
                              bacterial membrane --- Certainty = 0.0000(Not Clear) < succ>
                                bacterial outside --- Certainty = 0.0000(Not Clear) < succ>
                            bacterial cytoplasm --- Certainty = 0.0000(Not Clear) < succ>
```

[6274] The protein has homology with the following sequences in the GENPEPT database.

| >GP: BAB06133 GB: AP001515 unknown conserved protein [Bacillus halodurans] | | | |
|---|---|---|---|
| Identities = 46/95 (48%), Positives = 65/95 (68%), Gaps = 1/95 (1%) | | | |
| Query: | 6 | KVLNLIGLAQRAGRLITGEELVIKAIQNQQVSLIFLANDAGPNLTKKVTDKSNYYKTEVS | 65 |
| | | K L+L+GLA RA +L+TGEE V+KA+QN QV+L+ L++DAG + KK+ DK Y+ V | |
| Sbjct: | 5 | KWLSLLGLAARARQLLTGEEQVVKAVQNGQVTLVILSSDAGIHTKKKLLDKCGSYQIPVK | 64 |
| Query: | 66 | TVFSTLELSDALGK-PRKVVAVADAGFSKKMRTLM | 99 |
| | | V + L A+GK R V+ V DAGFS+K+ L+ | |
| Sbjct: | 65 | VVGNRQMLGRAIGKHERVVIGVKDAGFSRKLAALI | 99 |

[6275] A related DNA sequence was identified in S. pyogenes <SEQ ID 3485> which encodes the amino acid sequence <SEQ ID 3486>. Analysis of this protein sequence reveals the following:

```
Possible site: 45
>>> Seems to have no N-terminal signal sequence
----- Final Results -----
                            bacterial cytoplasm --- Certainty = 0.1950(Affirmative) < succ>
                              bacterial membrane --- Certainty = 0.0000(Not Clear) < succ>
                                bacterial outside --- Certainty = 0.0000(Not Clear) < succ>
```

[6276] An alignment of the GAS and GBS proteins is shown below.

| Identities = 75/99 (75%), Positives = 88/99 (88%) | | | |
|---|---|---|---|
| Query: | 1 | MNNSEKVLNLIGLAQRAGRLITGEELVIKAIQNQQVSLIFLANDAGPNLTKKVTDKSNYY | 60 |
| | | + N E++ +LIG AQRAG++I+GEELV+KAIQ+QQV L+FLANDAGPN+TKKVTDKSNYY | |
| Sbjct: | 1 | LTNLERLSSLIGPAQRAGKVISGEELVVKAIQHQQVILVFLANDAGPNVTKKVTDKSNYY | 60 |
| Query: | 61 | KTEVSTVFSTLELSDALGKPRKVVAVADAGFSKKMRTLM | 99 |
| | | EVSTV + LELS ALGKPRKV A+ADAGFSKKMRTLM | |
| Sbjct: | 61 | NVEVSTVLNALELSAALGKPRKVAAIADAGFSKKMRTLM | 99 |

[6277] Based on this analysis, it was predicted that these proteins and their epitopes could be useful antigens for vaccines or diagnostics.

### EXAMPLE 1126

[6278] A DNA sequence (GBSx1201) was identified in S. agalactiae <SEQ ID 3487> which encodes the amino acid sequence <SEQ ID 3488>. Analysis of this protein sequence reveals the following:

```
Possible site: 37
>>> Seems to have no N-terminal signal sequence
----- Final Results -----
                            bacterial cytoplasm --- Certainty = 0.2873(Affirmative) < succ>
                              bacterial membrane --- Certainty = 0.0000(Not Clear) < succ>
                                bacterial outside --- Certainty = 0.0000(Not Clear) < succ>
```

[6279] A related GBS nucleic acid sequence <SEQ ID 10959> which encodes amino acid sequence <SEQ ID 10960> was also identified.

[6280] A related DNA sequence was identified in S. pyogenes <SEQ ID 3489> which encodes the amino acid sequence <SEQ ID 3490>. Analysis of this protein sequence reveals the following:

```
Possible site: 37
>>> Seems to have no N-terminal signal sequence
----- Final Results -----
                            bacterial cytoplasm --- Certainty = 0.2985(Affirmative) < succ>
                              bacterial membrane --- Certainty = 0.0000(Not Clear) < succ>
                                bacterial outside --- Certainty = 0.0000(Not Clear) < succ>
```

[6281] An alignment of the GAS and GBS proteins is shown below.

| Identities = 735/961 (76%), Positives = 805/961 (83%), Gaps = 42/961 (4%) | | | |
|---|---|---|---|
| Query: | 1 | MSKKRLHEIAKEIGKTSKEVVEQAQSLGLPVKSHASSVEENDATRIVESFS-SSKTKAPT | 59 |
| | | +SKKRLHEIAKEIGK+SKEVVE A+ LGL VKSHASSVEE DA +I+ SFS +SK | |
| Sbjct: | 1 | LSKKRLHEIAKEIGESSKEVVEHAKYLGLDVKSHASSVEEADAKKIISSFSKASKPDVTA | 60 |
| Query: | 60 | NSVQTNQGVKTESKTVETKQGLSDDKPSTQPVAKPKPQSRNFKAEREARAKAEAEKRQHN | 119 |
| | | + + V S TV + G S+ TQ V+KPK SRNFKAEREARAK +A ++Q N | |
| Sbjct: | 61 | SQTVKPKEVAQPSVTVVKETG-SEHVEKTQ-VSKPK--SRNFKAEREARAKEQAARKQAN | 116 |
| Query: | 120 | GD----------HRKNNRHNDTRSDDRR--HQGQKRSNGNR-----------NDNRQ--G | 154 |
| | | G +R+ N H D+R H+ Q +N R +DN Q G | |
| Sbjct: | 117 | GSSHRSQERRGGYRQPNNHQTNEQGDKRITHRSQGDTNDKRIERKASNVSPRHDNHQLVG | 176 |
| Query: | 155 | QQNN----RNKNDGRYADHKQKPQTRPQQPAGNRIDFKARAAALKAEQNAEYSRHSEQRF | 210 |
| | | +N N +GR+ + K++ + PQ + +IDFKARAAALKAEQNAEYSR SE RF | |
| Sbjct: | 177 | DRNRSFAKENHKNGRFTNQKKQGRQEPQSKSP-KIDFKARAAALKAEQNAEYSRQSETRF | 235 |
| Query: | 211 | REEQEAKRQAAKEQELAKAAALKAQEEAQKAKEKLASKPVAKVKEIVNKVAATPSQTADS | 270 |
| | | R +QEAKR A ++ AK AALKAQ E +E A K + + + + + TAD+ | |
| Sbjct: | 236 | RAQQEAKRLAELARQEAKEAALKAQAEEMSHREA-ALKSIEEAETKLKSSNISAKSTADN | 294 |
| Query: | 271 | RRKKQTRSDKSRQFSNENEDGQKQTRNKKNWNNQNQVRNQRNSNWNHNKKNKKGK----T | 326 |
| | | RRKKQ R +K+R+ ++ +++GQK +NKK+WN+QNQVRNQ+NSNWN NKK KKGK T | |
| Sbjct: | 295 | RRKKQARPEKNRELTHHSQEGQK--KNKKSWNSQNQVRNQKNSNWNKNKKTKKGKNVKNT | 352 |
| Query: | 327 | NGAPKPVTERKFHELPKEFEYTEGMTVAEIAKRIKREPAEIVKKLFMMGVMATQNQSLDG | 386 |
| | | N APKPVTERKFHELPKEFEYTEGMTVAEIAKRIKREPAEIVKKLFMMGVMATQNQSLDG | |
| Sbjct: | 353 | NTAPKPVTERKFHELPKEFEYTEGMTVAEIAKRIKREPAEIVKKLFMMGVMATQNQSLDG | 412 |
| Query: | 387 | DTIELLMVDYGIEAHAKVEVDEADIERFFADEDYLNPDNLTERPPVVTIMGHVDHGKTTL | 446 |
| | | DTIELLMVDYGIEA AKVEVD+ADIERFF DE+YLNP+N+ ER PVVTIMGHVDHGKTTL | |
| Sbjct: | 413 | DTIELLMVDYGIEAKAKVEVDDADIERFFEDENYLNPENIVERAPVVTIMGHVDHGKTTL | 472 |
| Query: | 447 | LDTLRNSRVATGEAGGITQHIGAYQIEEAGKKITFLDTPGHAAFTSMRARGASVTDITIL | 506 |
| | | LDTLRNSRVATGEAGGITQHIGAYQIEEAGKKITFLDTPGHAAFTSMRARGASVTDITIL | |
| Sbjct: | 473 | LDTLRNSRVATGEAGGITQHIGAYQIEEAGKKITFLDTPGHAAFTSMRARGASVTDITIL | 532 |
| Query: | 507 | IVAADDGVMPQTVEAINHSKAAGVPIIVAINKIDKPGANPERVISELAEHGVISTAWGGE | 566 |
| | | IVAADDGVMPQT+EAINHSKAAGVPIIVAINKIDKPGANPERVI+ELAE+G+ISTAWGGE | |
| Sbjct: | 533 | IVAADDGVMPQTIEAINHSKAAGVPIIVAINKIDKPGANPERVIAELAEYGIISTAWGGE | 592 |
| Query: | 567 | SEFVEISAKFGKNIQELLETVLLVAEMEELKADADVRAIGTVIEARLDKGKGAVATLLVQ | 626 |
| | | EFVEISAKF KNI ELLETVLLVAE+EELKAD VRAIGTVIEARLDKGKGA+ATLLVQ | |
| Sbjct: | 593 | CEFVEISAKFNKNIDELLETVLLVAEVEELKADPTVRAIGTVIEARLDKGKGAIATLLVQ | 652 |
| Query: | 627 | QGTLNVQDPIVVGNTFGRVRAMTNDLGRRVKVAGPSTPVSITGLNEAPMAGDHFAVYADE | 686 |
| | | QGTL+VQDPIVVGNTFGRVRAM NDLGRRVK A PSTPVSITGLNE PMAGDHFAVYADE | |
| Sbjct: | 653 | QGTLHVQDPIVVGNTFGRVRAMVNDLGRRVKSAEPSTPVSITGLNETPMAGDHFAVYADE | 712 |
| Query: | 687 | KAARAAGEERAKRALLKQRQNTQRVSLENLFDTLKAGEVKSVNVIIKADVQGSVEALAAS | 746 |
| | | KAARAAGEER+KRALLKQRQNTQRVSL+NLFDTLKAGE+K+VNVIIKADVQGSVEALAAS | |
| Sbjct: | 713 | KAARAAGEERSKRALLKQRQNTQRVSLDNLFDTLKAGEIKTVNVIIKADVQGSVEALAAS | 772 |
| Query: | 747 | LLKIDVEGVKVNVVHSAVGAINESDVTLAEASNAVIIGFNVRPTPQARQQADADDVEIRQ | 806 |
| | | L+KI+VEGV+VNVVHSAVGAINESDVTLAEASNAVIIGFNVRPTPQARQQAD DDVEIR | |
| Sbjct: | 773 | LVKIEVEGVRVNVVHSAVGAINESDVTLAEASNAVIIGFNVRPTPQARQQADTDDVEIRL | 832 |
| Query: | 807 | HSIIYKVIEEVEEAMKGKLDPEYQEKILGEAIIRETFKVSKVGTIGGFMVINGKVTRDSS | 866 |
| | | HSIIYKVIEEVEEAMKGKLDP YQEKILGEAIIRETFKVSKVGTIGGFMVINGKVTRDSS | |
| Sbjct: | 833 | HSIIYKVIEEVEEAMKGKLDPVYQEKILGEAIIRETFKVSKVGTIGGFMVINGKVTRDSS | 892 |
| Query: | 867 | VRVIRDGVVIFDGKLASLKHYKDDVKEVGNAQEGGLMIENYNDLKEDDTIEAYIMEEIKRK | 927 |
| | | VRVIRD VVIFDGKLASLKHYKDDVKEVGNAQEGGLMIEN+NDLK DDTIEAYIMEEI RK | |
| Sbjct: | 893 | VRVIRDSVVIFDGKLASLKHYKDDVKEVGNAQEGGLMIENFNDLKVDDTIEAYIMEEIVRK | 953 |

[6282] Based on this analysis, it was predicted that this protein and its epitopes, could be useful antigens for vaccines or diagnostics.

### EXAMPLE 1127

[6283] A DNA sequence (GBSx1202) was identified in S. agalactiae <SEQ ID 3491> which encodes the amino acid sequence <SEQ ID 3492>. This protein is predicted to be ribosome binding factor A (rbfA). Analysis of this protein sequence reveals the following:

```
Possible site: 56
>>> Seems to have no N-terminal signal sequence
----- Final Results -----
                            bacterial cytoplasm --- Certainty = 0.2557(Affirmative) < succ>
                              bacterial membrane --- Certainty = 0.0000(Not Clear) < succ>
                                bacterial outside --- Certainty = 0.0000(Not Clear) < succ>
```

[6284] A related GBS nucleic acid sequence <SEQ ID 9567> which encodes amino acid sequence <SEQ ID 9568> was also identified.

[6285] A related DNA sequence was identified in S. pyogenes <SEQ ID 3493> which encodes the amino acid sequence <SEQ ID 3494>. Analysis of this protein sequence reveals the following:

```
Possible site: 60
>>> Seems to have no N-terminal signal sequence
----- Final Results -----
                            bacterial cytoplasm --- Certainty = 0.4765(Affirmative) < succ>
                              bacterial membrane --- Certainty = 0.0000(Not Clear) < succ>
                                bacterial outside --- Certainty = 0.0000(Not Clear) < succ>
```

[6286] An alignment of the GAS and GBS proteins is shown below.

| Identities = 93/117 (79%), Positives = 103/117 (87%) | | | |
|---|---|---|---|
| Query: | 8 | LIMANHRIDRVGMEIKREVNEILRLRVNDPRVQDVTITDVQMLGDLSMAKVFYTIHSTLA | 67 |
| | | + MANHRIDRVGMEIKREVN+IL+ +V DPRVQ VTIT+VQM GDLS+AKV+YTI S LA | |
| Sbjct: | 1 | MAMANHRIDRVGMEIKREVNDILQKKVRDPRVQGVTITEVQMQGDLSLAKVYYTIMSDLA | 60 |
| Query: | 68 | SDNQKAQIGLEKATGTIKRELGKNLTMYKIPDLQFVKDESIEYGNKIDEMLRNLDKK | 124 |
| | | SDNQKAQ GLEKATGTIKRELGK LTMYKIPDL F KD SI YGNKID++LR+LD K | |
| Sbjct: | 61 | SDNQKAQTGLEKATGTIKRELGKQLTMYKIPDLVFEKDNSIAYGNKIDQLLRDLDNK | 117 |

[6287] Based on this analysis, it was predicted that these proteins and their epitopes could be useful antigens for vaccines or diagnostics.

### EXAMPLE 1128

[6288] A DNA sequence (GBSx1203) was identified in S. agalactiae <SEQ ID 3495> which encodes the amino acid sequence <SEQ ID 3496>. This protein is predicted to be esterase. Analysis of this protein sequence reveals the following:

```
Possible site: 28
>>> Seems to have a cleavable N-term signal seq.
----- Final Results -----
                                bacterial outside --- Certainty = 0.3000(Affirmative) < succ>
                              bacterial membrane --- Certainty = 0.0000(Not Clear) < succ>
                            bacterial cytoplasm --- Certainty = 0.0000(Not Clear) < succ>
```

[6289] The protein has homology with the following sequences in the GENPEPT database.

| >GP: AAA79277 GB: M64783 acetyl-hydrolase [Streptomyces hygroscopicus] | | | |
|---|---|---|---|
| Identities = 58/220 (26%), Positives = 90/220 (40%), Gaps = 8/220 (3%) | | | |
| Query: | 98 | WNDNGKANQKTIFYLAGGSYLNNPTPYHISMLKTLSTSLDAKIILPIYPKTPRYTYDYAI | 157 |
| | | W + + +T+ YL GGSY H + L + A ++ Y + P + A+ | |
| Sbjct: | 58 | WVRPARQDGRTLLYLHGGSYALGSPQSHRHLSSALGDAAGAAVLALHYRRPPESPFPAAV | 117 |
| Query: | 158 | PRLVNLYRHFHEKN---ANLTLMGDSAGGGLALGLAHALSHQSGQEAIPQPKNIILLSPW | 214 |
| | | V YR E+ +TL GDSAG GLA+ AL P P + +SPW | |
| Sbjct: | 118 | EDAVAAYRMLLEQGCPPGRVTLAGDSAGAGLAVAALQALR----DAGTPLPAAAVCISPW | 173 |
| Query: | 215 | LDVTMKHPEIPKYEDTDPILSAWGLARVGEIWANGSNNTNHTYVSPKNAPATKLAPITLF | 274 |
| | | D+ + + + +L L R+ E + G+ + H SP + T L P+ + | |
| Sbjct: | 174 | ADLACEGASHTTRKAREILLDTADLRRMAERYLAGT-DPRHPLASPAHGDLTGLPPLLIQ | 232 |
| Query: | 275 | TGTREIFFPDIRDYAAQLQAANHPVNYIAQEGMNHVYPIY | 314 |
| | | G+ E+ D R A PV + M HV+ Y | |
| Sbjct: | 233 | VGSEEVLHDDARALEQAALKAGTPVTFEEWPEMFHVWHWY | 272 |

[6290] A related DNA sequence was identified in S. pyogenes <SEQ ID 3497> which encodes the amino acid sequence <SEQ ID 3498>. Analysis of this protein sequence reveals the following:

```
Possible site: 27
>>> Seems to have a cleavable N-term signal seq.
----- Final Results -----
                                bacterial outside --- Certainty = 0.3000(Affirmative) < succ>
                              bacterial membrane --- Certainty = 0.0000(Not Clear) < succ>
                            bacterial cytoplasm --- Certainty = 0.0000(Not Clear) < succ>
```

[6291] An alignment of the GAS and GBS proteins is shown below.

| Identities = 244/334 (73%), Positives = 280/334 (83%), Gaps = 6/334 (1%) | | | |
|---|---|---|---|
| Query: | 1 | MKPSFKKLLLLFSIITILSIACTPHAKASGRSWKSWFIEQYFWLKRDKSYYKVQDESSFQ | 60 |
| | | +K +K L+ ++ L + TP A AS RSWKSWFIEQYFWLKRDKSYY QD+ SFQ | |
| Sbjct: | 1 | LKHPIRKTLVTLGLLLTLCLP-TPVA-ASSRSWKSWFIEQYFWLKRDKSYYSKQDDPSFQ | 58 |
| Query: | 61 | KYLNASREQSDKGYYLDPNSVNGGLVQERLFDMQVYSWNDNGKANQKTIFYLAGGSYLNN | 120 |
| | | +YL+A REQSDK Y LD N VNG LVQE L+ MQVYSWNDNGK +QKTI YLAGGSYLNN | |
| Sbjct: | 59 | RYLDACREQSDKPYQLDTNLVNGPLVQENLYGMQVYSWNDNGKPDQKTIIYLAGGSYLNN | 118 |
| Query: | 121 | PTPYHISMLKTLSTSLDAKIILPIYPKTPRYTYDYAIPRLVNLYRHFHEKNANLTLMGDS | 180 |
| | | PT YHI+MLKTLSTSLDAKI+LPIYPK PRYTY+Y +P+LVNLY+H++ KN N+ LMGDS | |
| Sbjct: | 119 | PTTYHINMLKTLSTSLDAKIVLPIYPKAPRYTYNYTMPKLVNLYQHYYHKNQNVFLMGDS | 178 |
| Query: | 181 | AGGGLALGLAHALSHQSGQEAIPQPKNIILLSPWLDVTMKHPEIPKYEDTDPILSAWGLA | 240 |
| | | AGGGLALGLAHAL + E++PQPK ++LLSPWLDVTM HPEIP+YED DPILS+WGL | |
| Sbjct: | 179 | AGGGLALGLAHALHN----ESVPQPKQLVLLSPWLDVTMSHPEIPEYEDADPILSSWGLK | 234 |
| Query: | 241 | RVGEIWANGSNNTNHTYVSPKNAPATKLAPITLFTGTREIFFPDIRDYAAQLQAANHPVN | 300 |
| | | RVGE+WA ++NTNH YVSPKN P T L PITLFTGTREIF+PDIRDYAA+L+AANH + | |
| Sbjct: | 235 | RVGELWAYSADNTNHIYVSPKNGPITYLPPITLFTGTREIFYPDIRDYAAKLKAANHNIT | 294 |
| Query: | 301 | YIAQEGMNHVYPIYPIEEAKTAQYQMIDIINKTP | 334 |
| | | +I QEGMNHVYPIYPIEEAKTAQYQ+ID INKTP | |
| Sbjct: | 295 | FITQEGMNHVYPIYPIEEAKTAQYQIIDAINKTP | 328 |

[6292] A related GBS gene <SEQ ID 8731> and protein <SEQ ID 8732> were also identified. Analysis of this protein sequence reveals the following:

```
Lipop: Possible site: −1 Crend: 6
McG: Discrim Score: 11.88
GvH: Signal Score (−7.5): −1.33
          Possible site: 28
>>> Seems to have a cleavable N-term signal seq.
ALOM program count: 0 value: 4.03 threshold: 0.0
      PERIPHERAL Likelihood = 4.03 174
modified ALOM score: −1.31
*** Reasoning Step: 3
----- Final Results -----
                                bacterial outside --- Certainty = 0.3000(Affirmative) < succ>
                              bacterial membrane --- Certainty = 0.0000(Not Clear) < succ>
                            bacterial cytoplasm --- Certainty = 0.0000(Not Clear) < succ>
```

[6293] The protein has homology with the following sequences in the databases:

[chemical structure]

[6294] SEQ ID 8732 (GBS149) was expressed in E. coli as a His-fusion product. SDS-PAGE analysis of total cell extract is shown in FIG. 23 (lane 6; MW 37 kDa).

[6295] The GBS149-His fusion product was purified (FIG. 196, lane 6) and used to immunise mice. The resulting antiserum was used for FACS (FIG. 291), which confirmed that the protein is immunoaccessible on GBS bacteria.

[6296] Based on this analysis, it was predicted that these proteins and their epitopes could be useful antigens for vaccines or diagnostics.

### EXAMPLE 1129

[6297] A DNA sequence (GBSx1204) was identified in S. agalactiae <SEQ ID 3499> which encodes the amino acid sequence <SEQ ID 3500>. This protein is predicted to be CopY. Analysis of this protein sequence reveals the following:

```
Possible site: 22
>>> Seems to have no N-terminal signal sequence
----- Final Results -----
                            bacterial cytoplasm --- Certainty = 0.3140(Affirmative) < succ>
                              bacterial membrane --- Certainty = 0.0000(Not Clear) < succ>
                                bacterial outside --- Certainty = 0.0000(Not Clear) < succ>
```

[6298] The protein has homology with the following sequences in the GENPEPT database.

| >GP: AAG10085 GB: AF296446 CopY [Streptococcus mutans] | | | |
|---|---|---|---|
| Identities = 67/137 (48%), Positives = 98/137 (70%) | | | |
| Query: | 2 | TISSAEWEIMRVVWAQQNTTSNEILAVLLEKYDWTPSTVKTLLRRLLDKGYVSREKMGKG | 61 |
| | | +IS+AEWE+MRVVWA+Q T+S+EI+A+L Y W+ ST+KTL+ RL +KGY++ ++ G+ | |
| Sbjct: | 3 | SISNAEWEVMRVVWAKQMTSSSEIIAILSRTYCWSASTIKTLITRLSEKGYLTSQRQGRK | 62 |
| Query: | 62 | FSYSPLIDEDLAMMSEVDSVFQKVCQTKHVAIVRHLLESIPMTEKDRLNLQSSLEAKKGK | 121 |
| | | + YS LI E+ A+ +V VF ++C TKH A++RHL+E PMT D L++ L +KK | |
| Sbjct: | 63 | YIYSSLISEEEALEQQVSEVFSRICVTKHQALIRHLVEETPMTLSDIEKLEALLLSKKAN | 122 |
| Query: | 122 | TLERVACNCIPGQCQCH | 138 |
| | | + V CNCI GQC C+ | |
| Sbjct: | 123 | AVPEVKCNCIVGQCSCY | 139 |

[6299] A related DNA sequence was identified in S. pyogenes <SEQ ID 3501> which encodes the amino acid sequence <SEQ ID 3502>. Analysis of this protein sequence reveals the following:

```
Possible site: 13
>>> Seems to have no N-terminal signal sequence
----- Final Results -----
                            bacterial cytoplasm --- Certainty = 0.2331(Affirmative) < succ>
                              bacterial membrane --- Certainty = 0.0000(Not Clear) < succ>
                                bacterial outside --- Certainty = 0.0000(Not Clear) < succ>
```

[6300] An alignment of the GAS and GBS proteins is shown below.

| Identities = 54/135 (40%), Positives = 84/135 (62%) | | | |
|---|---|---|---|
| Query: | 3 | ISSAEWEIMRVVWAQQNTTSNEILAVLLEKYDWTPSTVKTLLRRLLDKGYVSREKMGKGF | 62 |
| | | IS+AEWE+MRVVWA + S++I+ +L +KY W+ ST+KTL+ RL+ K +++ + G+ + | |
| Sbjct: | 10 | ISAAEWEVMRVVWASGDIKSSDIITILRKKYQWSDSTIKTLIGRLVKKNFLTSYRQGRAY | 69 |
| Query: | 63 | SYSPLIDEDLAMMSEVDSVFQKVCQTKHVAIVRHLLESIPMTEKDRLNLQSSLEAKKGKT | 122 |
| | | Y L+DE L + +V +CQ +H ++ L +PMT ++ Q LE KK | |
| Sbjct: | 70 | IYQALLDETLLQKEALATVLDGICQRQHTRLLLERLYHLPMTLEEIGAFQELLEVKKENA | 129 |
| Query: | 123 | LERVACNCIPGQCQC | 137 |
| | | + V CNC+PGQC C | |
| Sbjct: | 130 | VLEVPCNCLPGQCHC | 144 |

[6301] Based on this analysis, it was predicted that these proteins and their epitopes could be useful antigens for vaccines or diagnostics.

### EXAMPLE 1130

[6302] A DNA sequence (GBSx1206) was identified in S. agalactiae <SEQ ID 3503> which encodes the amino acid sequence <SEQ ID 3504>. This protein is predicted to be CopA. Analysis of this protein sequence reveals the following:

| Possible site: 19 | | | | |
|---|---|---|---|---|
| >>> Seems to have no N-terminal signal sequence | | | | |
| | INTEGRAL | Likelihood = −9.82 | Transmembrane | 382-398 (370-406) |
| | INTEGRAL | Likelihood = −8.01 | Transmembrane | 356-372 (344-374) |
| | INTEGRAL | Likelihood = −2.50 | Transmembrane | 719-735 (719-738) |
| | INTEGRAL | Likelihood = −2.28 | Transmembrane | 202-218 (202-218) |
| | INTEGRAL | Likelihood = −1.59 | Transmembrane | 693-709 (691-712) |
| | INTEGRAL | Likelihood = −1.33 | Transmembrane | 167-183 (167-183) |

```
----- Final Results -----
                              bacterial membrane --- Certainty = 0.4927(Affirmative) < succ>
                                bacterial outside --- Certainty = 0.0000(Not Clear) < succ>
                            bacterial cytoplasm --- Certainty = 0.0000(Not Clear) < succ>
```

[6303] The protein has homology with the following sequences in the GENPEPT database.

| >GP: AAG10086 GB: AF296446 CopA [Streptococcus mutans] | | | |
|---|---|---|---|
| Identities = 440/740 (59%), Positives = 571/740 (76%), Gaps = 1/740 (0%) | | | |
| Query: | 5 | KETFLIDGMTCASCALTIEKAVNKLDHVDSAVVNLATEKMTVTFDDTTLSPNVIEECVSE | 64 |
| | | +E FLIDGMTCASCA+ +E AV KLD ++SAVVNL TEKMT+ +D +S + + V+ | |
| Sbjct: | 3 | EEVFLIDGMTCASCAINVENAVKKLDGIESAVVNLTTEKMTIDYDAAKVSEADVTKAVAG | 62 |
| Query: | 65 | SGYEASLFKEETSKSQSERHQLAIEKMWHRFWMSAVATIPLLYISMGPMINLWLPSFLMP | 124 |
| | | +GY A ++ T++SQ +R + + + R +++ TIPL YI+MG M+ L LP+FL P | |
| Sbjct: | 63 | AGYGAKVYDPTTAESQKDREEHKLAGIKKRLLWTSIFTIPLFYIAMGSMVGLPLPNFLAP | 122 |
| Query: | 125 | DKGPLNYGMIQLLLTLPVMYFGRIFYQNGFKALFKRHPNMDSLVAIATTAAFIYSLYGLY | 184 |
| | | PL Y M+ LLLT+PV+ FY NGF++LFK HPNMDSLV++ATTAAF+YSLYG Y | |
| Sbjct: | 123 | SSAPLTYAMVLLLLTIPVIVLSWSFYDNGFRSLFKGHPNMDSLVSLATTAAFLYSLYGTY | 182 |
| Query: | 185 | EILQGDIHYAHQLYFESVAVILTLITLGKYFEILSKGRTSASIEKLLTLSAKEARVIKDG | 244 |
| | | + G H+AH LY+ESVAVILTLITLGKYFE LSKGRTS +I+KL+ LSAKEA +I+DG | |
| Sbjct: | 183 | HVYLGHTHHAHHLYYESVAVILTLITLGKYFETLSKGRTSDAIKKLMHLSAKEATLIRDG | 242 |
| Query: | 245 | EDYMVPLDKVKIGETILVKPGEKIPLDGHVVAGESSIDESMLTGESIPVEKKVGSKVYGA | 304 |
| | | E+ VP+++V+I + ILVKPGEKIP+DG V++G S+IDESMLTGESIP+EK S VY | |
| Sbjct: | 243 | EEIKVPIEQVQIRDQILVKPGEKIPVDGRVLSGHSAIDESMLTGESIPIEKMADSPVYAG | 302 |
| Query: | 305 | SINGQGSLTIFVEKEAGGSLLSQIINLVEAAQTSKAPIANLADKVSGVFVPFVIVIAILS | 364 |
| | | SINGQGSLT EK +LLSQII LVE AQ +KAPIA +ADKVS VFVP +I IAIL+ | |
| Sbjct: | 303 | SINGQGSLTFEAEKVGNETLLSQIIKLVENAQQTKAPIAKIADKVSAVFVPVIITIAILT | 362 |
| Query: | 365 | GLSWYLILGQSFAFSLKIMIAVLVIACPCALGLATPTAIMVASGKAAENGILFKGGEVLE | 424 |
| | | GL WY ++GQ F FS+ I +AVLVIACPCALGLATPTAIMV +G+AAENGIL+K G+VLE | |
| Sbjct: | 363 | GLFWYFVMGQDFTFSMTISVAVLVIACPCALGLATPTAIMVGTGRAAENGILYKRGDVLE | 422 |
| Query: | 425 | KAHHIDTIVFDKTGTLTKGKPEVVAIKTYGGDKEEFLGQVASVEKLSNHPLSQTIVNKAK | 484 |
| | | AH I+TIVFDKTGT+T+GKPEVV +Y D+ + + A++E LS HPLSQ IV+ AK | |
| Sbjct: | 423 | LAHQINTIVFDKTGTITQGKPEVVHQFSY-HDRTDLVQVTAALEALSEHPLSQAIVDYAK | 481 |
| Query: | 485 | EKELPLREVMAFKNILGYGLSATINGKTMLVGNANLMTKNDVNLDLAKADIEIAQEEAQT | 544 |
| | | ++ L V F ++ G GL + +T+LVGN LM + +++L+ A+AD + A + QT | |
| Sbjct: | 482 | KEGTHLLAVDDFTSLTGLGLKGCVADETLLVGNEKLMRQANISLEQAQADFKAATAQGQT | 541 |
| Query: | 545 | VVYVSENGVLSGLITLTDQLKTDSQETVKQLQRLGFNLVLLTGDNKASADAIAQKLGITT | 604 |
| | | ++V+ +G L GLIT+ D++K DS TVK LQ +G + +LTGDN+ +A AIA+++GIT | |
| Sbjct: | 542 | PIFVASDGQLLGLITIADKVKNDSAATVKALQNMGVEVAMLTGDNEETAQAIAKEVGITF | 601 |
| Query: | 605 | VVSEVLPDQKANVILELKEKGGQIAMVGDGINDAPALASSDVGISMSSGTDIAIESADIV | 664 |
| | | V+S+V +K IL+L+ +G ++AMVGDGINDAPALA++D+GISM SGTDIA+ESADIV | |
| Sbjct: | 602 | VISQVFSQEKTQAILDLQAEGKKVAMVGDGINDAPALATADIGISMGSGTDIAMESADIV | 661 |
| Query: | 665 | LMKPELTDLLKAMTISKQTIQIIKENLFWAFFYNVLAIPVAMGVLHLFGGPLLNPMLAGL | 724 |
| | | LMKP + D++KA+ IS+ TI IKENLFWAF YNVL++P+AMGVL+LFGGPLL+PM+AGL | |
| Sbjct: | 662 | LMKPAMLDIIKALKISRVTIINIKENLFWAFIYNVLSVPIAMGVLYLFGGPLLDPMIAGL | 721 |
| Query: | 725 | AMAFSSVSVVLNALRLKVLK | 744 |
| | | AM+FSSVSVVLNALRLKV+K | |
| Sbjct: | 722 | AMSFSSVSVVLNALRLKVVK | 741 |

[6304] There is also homology to SEQ ID 3506.

[6305] Based on this analysis, it was predicted that this protein and its epitopes, could be useful antigens for vaccines or diagnostics.

### EXAMPLE 1131

[6306] A DNA sequence (GBSx1207) was identified in S. agalactiae <SEQ ID 3507> which encodes the amino acid sequence <SEQ ID 3508>. This protein is predicted to be cation-transporting ATPase, P-type (pacS). Analysis of this protein sequence reveals the following:

```
Possible site: 28
>>> Seems to have no N-terminal signal sequence
----- Final Results -----
                            bacterial cytoplasm --- Certainty = 0.1934(Affirmative) < succ>
                              bacterial membrane --- Certainty = 0.0000(Not Clear) < succ>
                                bacterial outside --- Certainty = 0.0000(Not Clear) < succ>
```

[6307] The protein has homology with the following sequences in the GENPEPT database.

| >GP: AAG10087 GB: AF296446 CopZ [Streptococcus mutans] | | | |
|---|---|---|---|
| Identities = 31/67 (46%), Positives = 43/67 (63%) | | | |
| Query: | 1 | MKHTYRVSGMKCDGCAKTVSDKLSSVIGVDEVNVDLTKNQVVVSGKTFKWLLKRSLKDTK | 60 |
| | | M+ TY + G+KC GCA V+ + S + V++V VDL K +V ++G KW LKR+LK T | |
| Sbjct: | 1 | MEKTYHIDGLKCQGCADNVTKRFSELKKVNDVKVDLDKKEVRITGNPSKWSLKRALKGTN | 60 |
| Query: | 61 | YSLEEEI | 67 |
| | | Y L EI | |
| Sbjct: | 61 | YELGAEI | 67 |

[6308] A related DNA sequence was identified in S. pyogenes <SEQ ID 3509> which encodes the amino acid sequence <SEQ ID 3510>. Analysis of this protein sequence reveals the following:

```
Possible site: 18
>>> Seems to have no N-terminal signal sequence
----- Final Results -----
                            bacterial cytoplasm --- Certainty = 0.2997(Affirmative) < succ>
                              bacterial membrane --- Certainty = 0.0000(Not Clear) < succ>
                                bacterial outside --- Certainty = 0.0000(Not Clear) < succ>
```

[6309] An alignment of the GAS and GBS proteins is shown below.

| Identities = 33/63 (52%), Positives = 48/63 (75%) | | | |
|---|---|---|---|
| Query: | 1 | MKHTYRVSGMKCDGCAKTVSDKLSSVIGVDEVNVDLTKNQVVVSGKTFKWLLKRSLKDTK | 60 |
| | | M+ Y+V+GM CDGCA+TV++KLS+V GV V V+L K + V+G+ +L+KR+LKDTK | |
| Sbjct: | 1 | MEKHYQVTGMTCDGCARTVTEKLSAVPGVQSVQVNLEKGEAKVTGRPLTFLIKRALKDTK | 60 |
| Query: | 61 | YSL | 63 |
| | | + L | |
| Sbjct: | 61 | FEL | 63 |

[6310] Based on this analysis, it was predicted that these proteins and their epitopes could be useful antigens for vaccines or diagnostics.

### EXAMPLE 1132

[6311] A DNA sequence (GBSx1208) was identified in S. agalactiae <SEQ ID 3511> which encodes the amino acid sequence <SEQ ID 3512>. Analysis of this protein sequence reveals the following:

| Possible site: 20 | | | | |
|---|---|---|---|---|
| >>> Seems to have a cleavable N-term signal seq. | | | | |
| | INTEGRAL | Likelihood = −7.59 | Transmembrane | 67-83 (65-90) |
| | INTEGRAL | Likelihood = −3.72 | Transmembrane | 35-51 (31-51) |
| | INTEGRAL | Likelihood = −3.61 | Transmembrane | 122-138 (120-139) |
| | INTEGRAL | Likelihood = −1.59 | Transmembrane | 154-170 (154-171) |

```
----- Final Results -----
                              bacterial membrane --- Certainty = 0.4036(Affirmative) < succ>
                                bacterial outside --- Certainty = 0.0000(Not Clear) < succ>
                            bacterial cytoplasm --- Certainty = 0.0000(Not Clear) < succ>
```

[6312] A related GBS nucleic acid sequence <SEQ ID 8733> which encodes amino acid sequence <SEQ ID 8734> was also identified. Analysis of this protein sequence reveals the following:

| Lipop: Possible site: −1 Crend: 5 | | | | |
|---|---|---|---|---|
| McG: Discrim Score: 4.09 | | | | |
| GvH: Signal Score (−7.5): 3.87 | | | | |
| Possible site: 20 | | | | |
| >>> Seems to have a cleavable N-term signal seq. | | | | |
| ALOM program count: 4 value: −7.59 threshold: 0.0 | | | | |
| | INTEGRAL | Likelihood = −7.59 | Transmembrane | 65-81 (63-88) |
| | INTEGRAL | Likelihood = −3.72 | Transmembrane | 33-49 (29-49) |
| | INTEGRAL | Likelihood = −3.61 | Transmembrane | 120-136 (118-137) |
| | INTEGRAL | Likelihood = −1.59 | Transmembrane | 152-168 (152-169) |
| | PERIPHERAL | Likelihood = 0.85 | 96 | |

```
modified ALOM score: 2.02
*** Reasoning Step: 3
----- Final Results -----
                              bacterial membrane --- Certainty = 0.4036(Affirmative) < succ>
                                bacterial outside --- Certainty = 0.0000(Not Clear) < succ>
                            bacterial cytoplasm --- Certainty = 0.0000(Not Clear) < succ>
```

[6313] The protein has homology with the following sequences in the GENPEPT database.

| >GP: CAB15351 GB: Z99121 similar to hypothetical proteins [Bacillus subtilis] | | | |
|---|---|---|---|
| Identities = 107/192 (55%), Positives = 137/192 (70%) | | | |
| Query: | 8 | WNILSLVGTVAFASSGAIVAIEEEFDILGLFILGFVTAFGGGAIRNVLIGLPIETLWSQG | 67 |
| | | W +LS++G +AFA SGAIVA+EEE+DILG++ILG VTAFGGGAIRN+LIG+P+ LW QG | |
| Sbjct: | 3 | WELLSVIGIIAFAVSGAIVAMEEEYDILGVYILGIVTAFGGGAIRNLLIGVPVSALWEQG | 62 |
| Query: | 68 | IAFYAAAAAILFIMIFPNLLSGKGRDAEVVSDAIGLAAFSVQGALYATQSHQPLSAVIVA | 127 |
| | | F A +I + +FP LL +SDAIGLAAF++QGALYA + PLSAVIVA | |
| Sbjct: | 63 | AYFQIALLSITIVFLFPKLLLKHWNKWGNLSDAIGLAAFAIQGALYAVKMGHPLSAVIVA | 122 |
| Query: | 128 | AVLTGAGGGIVRDVLAGRKPGVLRSEIYAGWSILVGIILYFKIAKTTTDYYLLVLVVTSL | 187 |
| | | AVLTG+GGGI+RD+LAGRKP VL++EIYA W+ L G+I+ + Y+L V+ | |
| Sbjct: | 123 | AVLTGSGGGIIRDLLAGRKPLVLKAEIYAVWAALGGLIVGLGWLGNSFGLYVLFFVLVVC | 182 |
| Query: | 188 | RMLGYKKQWHLP | 199 |
| | | R+ Y W LP | |
| Sbjct: | 183 | RVCSYMFNWKLP | 194 |

[6314] A related DNA sequence was identified in S. pyogenes <SEQ ID 3513> which encodes the amino acid sequence <SEQ ID 3514>. Analysis of this protein sequence reveals the following:

| Possible site: 27 | | | | |
|---|---|---|---|---|
| >>> Seems to have a cleavable N-term signal seq. | | | | |
| | INTEGRAL | Likelihood = −5.15 | Transmembrane | 70-86 (65-88) |
| | INTEGRAL | Likelihood = −4.09 | Transmembrane | 33-49 (29-49) |
| | INTEGRAL | Likelihood = −2.13 | Transmembrane | 120-136 (119-137) |
| | INTEGRAL | Likelihood = −0.43 | Transmembrane | 173-189 (172-189) |

```
----- Final Results -----
                              bacterial membrane --- Certainty = 0.3060(Affirmative) < succ>
                                bacterial outside --- Certainty = 0.0000(Not Clear) < succ>
                            bacterial cytoplasm --- Certainty = 0.0000(Not Clear) < succ>
```

[6315] The protein has homology with the following sequences in the databases:

| >GP: BAB05428 GB: AP001512 unknown conserved protein [Bacillus halodurans] | | | |
|---|---|---|---|
| Identities = 109/195 (55%), Positives = 137/195 (69%) | | | |
| Query: | 6 | WEILNIIGTIAFALSGAIVAMEEEFDILGIFILGFVTAFGGGAIRNTLIGLPIEALWGQK | 65 |
| | | W++LN+IGTIAFALSG IVAMEE+FD++G++ILGFVTAFGGGAIRN LIG+P+ ALW Q | |
| Sbjct: | 3 | WDVLNVIGTIAFALSGVIVAMEEDFDLMGVYILGFVTAFGGGAIRNLLIGVPVSALWEQG | 62 |
| Query: | 66 | PEFTCAFFAMVLIMLFPKLMARGWVRAAVLTDAIGLAAFSVQGALHAVRLNQPLSAVIVT | 125 |
| | | FT AF M + P L W++ +L DAIGLAAF++QGAL A ++ PLSAVIV | |
| Sbjct: | 63 | TLFTIAFIVMTIAFFLPNLWINHWLKFGLLFDAIGLAAFAIQGALFATSMDHPLSAVIVA | 122 |
| Query: | 126 | AVLTGAGGGVVRDILAGRKPSVLRSEIYAGWSILAAIVLHFKLADSTIECYALVVLLTTL | 185 |
| | | A LTGAGGG+VRD+LA RKP VL EIY GW++LA + + I L++L+ L | |
| Sbjct: | 123 | AALTGAGGGIVRDMLARRKPLVLSKEIYIGWAMLAGAAIGLNIVSGPIGIGFLIILVVFL | 182 |
| Query: | 186 | RMIGNRKKWNLPKIK | 200 |
| | | RM+ W LP K | |
| Sbjct: | 183 | RMLSVHYNWCLPHRK | 197 |

[6316] An alignment of the GAS and GBS proteins is shown below.

| Identities = 133/200 (66%), Positives = 168/200 (83%) | | | |
|---|---|---|---|
| Query: | 3 | MSIDIWNILSLVGTVAFASSGAIVAIEEEFDILGLFILGFVTAFGGGAIRNVLIGLPIET | 62 |
| | | M+ID+W IL+++GT+AFA SGAIVA+EEEFDILG+FILGFVTAFGGGAIRN LIGLPIE | |
| Sbjct: | 1 | MTIDMWEILNIIGTIAFALSGAIVAMEEEFDILGIFILGFVTAFGGGAIRNTLIGLPIEA | 60 |
| Query: | 63 | LWSQGIAFYAAAAAILFIMIFPNLLSGKGRDAEVVSDAIGLAAFSVQGALYATQSHQPLS | 122 |
| | | LW Q F A A++ IM+FP L++ A V++DAIGLAAFSVQGAL+A + +QPLS | |
| Sbjct: | 61 | LWGQKPEFTCAFFAMVLIMLFPKLMARGWVRAAVLTDAIGLAAFSVQGALHAVRLNQPLS | 120 |
| Query: | 123 | AVIVAAVLTGAGGGIVRDVLAGRKPGVLRSEIYAGWSILVGIILYFKIAKTTTDYYLLVL | 182 |
| | | AVIV AVLTGAGGG+VRD+LAGRKP VLRSEIYAGWSIL I+L+FK+A +T + Y LV+ | |
| Sbjct: | 121 | AVIVTAVLTGAGGGVVRDILAGRKPSVLRSEIYAGWSILAAIVLHFKLADSTIECYALVV | 180 |
| Query: | 183 | VVTSLRMLGYKKQWHLPVVR | 202 |
| | | ++T+LRM+G +K+W+LP ++ | |
| Sbjct: | 181 | LLTTLRMIGNRKKWNLPKIK | 200 |

[6317] Based on this analysis, it was predicted that these proteins and their epitopes could be useful antigens for vaccines or diagnostics.

### EXAMPLE 1133

[6318] A DNA sequence (GBSx1209) was identified in S. agalactiae <SEQ ID 3515> which encodes the amino acid sequence <SEQ ID 3516>. Analysis of this protein sequence reveals the following:

```
Possible site: 42
>>> Seems to have no N-terminal signal sequence
----- Final Results -----
                            bacterial cytoplasm --- Certainty = 0.2805(Affirmative) < succ>
                              bacterial membrane --- Certainty = 0.0000(Not Clear) < succ>
                                bacterial outside --- Certainty = 0.0000(Not Clear) < succ>
```

[6319] A related GBS nucleic acid sequence <SEQ ID 9569> which encodes amino acid sequence <SEQ ID 9570> was also identified.

[6320] The protein has homology with the following sequences in the GENPEPT database.

| >GP: CAB94816 GB: AJ245582 hypothetical protein | | | |
|---|---|---|---|
| [Streptococcus thermophilus] | | | |
| Identities = 138/238 (57%), Positives = 184/238 (76%) | | | |
| Query: | 5 | KKMIKLIAIDMDGTLLNDEKKIPKENIQAIKEATQAGIKIVLCTGRPMSGILPYFNELGL | 64 |
| | | + +KLIAIDMDGTLLN +K+IPKENI+AI+EAT AGIKIVLCTGRP SGI+P+F +LGL | |
| Sbjct: | 3 | QNQVKLIAIDMDGTLLNSQKEIPKENIKAIQEATAAGIKIVLCTGRPRSGIVPHFEKLGL | 62 |
| Query: | 65 | TKEEYIIMNNGCSTYSTKDWQLIDSATLTHDELIFLEEVVKEFPNVCLTLTAENTFYAVG | 124 |
| | | ++EE+IIMNNGCSTY TK+W L++S +L+ E+ L + ++FP V LT T E ++Y VG | |
| Sbjct: | 63 | SEEEFIIMNNGCSTYETKNWTLLESESLSRSEMEELLQACEDFPGVALTFTGEKSYYVVG | 122 |
| Query: | 125 | EEVPEIVAYDADLVFTKAKSTSLDALRNQEEIVFQAMYMGLDADVTAFQEAVEEALISKF | 184 |
| | | EVPE+VAYDA VFT+AK+ SL+ + + +++FQAMYM + AFQ AV++ L + | |
| Sbjct: | 123 | NEVPELVAYDAGTVFTEAKARSLEEIFEEGQVIFQAMYMAESEPLDAFQNAVQDRLDQSY | 182 |
| Query: | 185 | SGVRSQDYIYEIMPQGVTKARGLKSLIAKLGLDINQVMAIGDAPNDIELLDLVPNSVA | 242 |
| | | S VRSQ+YI+E+MPQG TKA GLK L KL ++ +Q+MA+GDA ND+E+L V SVA | |
| Sbjct: | 183 | STVRSQEYIFEVMPQGATKASGLKHLAEKLDINRDQIMALGDAANDLEMLQFVGQSVA | 240 |

[6321] A related DNA sequence was identified in S. pyogenes <SEQ ID 3517> which encodes the amino acid sequence <SEQ ID 3518>. Analysis of this protein sequence reveals the following:

```
Possible site: 14
>>> Seems to have no N-terminal signal sequence
----- Final Results -----
                            bacterial cytoplasm --- Certainty = 0.1468(Affirmative) < succ>
                              bacterial membrane --- Certainty = 0.0000(Not Clear) < succ>
                                bacterial outside --- Certainty = 0.0000(Not Clear) < succ>
```

[6322] An alignment of the GAS and GBS proteins is shown below.

| Identities = 152/270 (56%), Positives = 193/270 (71%) | | | |
|---|---|---|---|
| Query: | 6 | KMIKLIAIDMDGTLLNDEKKIPKENIQAIKEATQAGIKIVLCTGRPMSGILPYFNELGLT | 65 |
| | | +MI+LIAID+DGTLLN +K+IPKENI AI+EA Q+G+KIVLCTGRP SG PYF++LGLT | |
| Sbjct: | 19 | RMIQLIAIDLDGTLLNQDKQIPKENITAIQEAAQSGLKIVLCTGRPQSGTRPYFDQLGLT | 78 |
| Query: | 66 | KEEYIIMNNGCSTYSTKDWQLIDSATLTHDELIFLEEVVKEFPNVCLTLTAENTFYAVGE | 125 |
| | | +EE++I+NNGCSTYS+ DWQL S L ++ LEE+ + FP++ LTLT EN + + E | |
| Sbjct: | 79 | QEEFLIINNGCSTYSSPDWQLRHSKMLKVSDIELLEELSQSFPDIYLTLTEENDYLVLEE | 138 |
| Query: | 126 | EVPEIVAYDADLVFTKAKSTSLDALRNQEEIVFQAMYMGLDADVTAFQEAVEEALISKFS | 185 |
| | | EVP++V D DLVFT K SL L + ++FQAMY+G A + AF+ AV L F | |
| Sbjct: | 139 | EVPDLVQEDGDLVFTIVKPVSLAELSDTPRLIFQAMYLGEKAALDAFERAVRNQLSQSFH | 198 |
| Query: | 186 | GVRSQDYIYEIMPQGVTKARGLKSLIAKLGLDINQVMAIGDAPNDIELLDLVPNSVAMGN | 245 |
| | | VRSQD I EI+PQGV+KA LK L+ LGL +QVMAIGDAPNDIE+L VAM N | |
| Sbjct: | 199 | VVRSQDNILEILPQGVSKASALKELVEDLGLTADQVMAIGDAPNDIEMLTYAGLGVAMEN | 258 |
| Query: | 246 | ASDEIKSRCKYITVDNNKAGVAKAIYDYAL | 275 |
| | | AS IK +T+ N+ AGVA+AI +AL | |
| Sbjct: | 259 | ASAAIKPLADKVTLTNDMAGVAQAIRQFAL | 288 |

[6323] Based on this analysis, it was predicted that these proteins and their epitopes could be useful antigens for vaccines or diagnostics.

### EXAMPLE 1134

[6324] A DNA sequence (GBSx1210) was identified in S. agalactiae <SEQ ID 3519> which encodes the amino acid sequence <SEQ ID 3520>. Analysis of this protein sequence reveals the following:

| Possible site: 18 | | | | |
|---|---|---|---|---|
| >>> Seems to have no N-terminal signal sequence | | | | |
| | INTEGRAL | Likelihood = −0.43 | Transmembrane | 7-23 (7-23) |

```
----- Final Results -----
                              bacterial membrane --- Certainty = 0.1171(Affirmative) < succ>
                                bacterial outside --- Certainty = 0.0000(Not Clear) < succ>
                            bacterial cytoplasm --- Certainty = 0.0000(Not Clear) < succ>
```

[6325] The protein has homology with the following sequences in the GENPEPT database.

| >GP: AAA26954 GB: J04479 DNA polymerase I [Streptococcus pneumoniae] | | | |
|---|---|---|---|
| Identities = 655/879 (74%), Positives = 748/879 (84%), Gaps = 4/879 (0%) | | | |
| Query: | 3 | NKNKLLLIDGSSVAFRAFFALYNQIDRFKNNSGLHTNAIYGFHLMLNHILGRVQPSHILV | 62 |
| | | +K KLLLIDGSSVAFRAFFALY Q+DRFKN +GLHTNAIYGF LML+H+L RV+PSHILV | |
| Sbjct: | 2 | DKKKLLLIDGSSVAFRAFFALYQQLDRFKNAAGLHTNAIYGFQLMLSHLLERVEPSHILV | 61 |
| Query: | 63 | AFDAGKTTFRTEMYADYKGGRAKTPDEFREQFPYIRQQLDVLGIKHYELEHYEADDIIGT | 122 |
| | | AFDAGKTTFRTEMYADYKGGRAKTPDEFREQFP+IR+ LD +GI+HYEL YEADDIIGT | |
| Sbjct: | 62 | AFDAGKTTFRTEMYADYKGGRAKTPDEFREQFPFIRELLDHMGIRHYELAQYEADDIIGT | 121 |
| Query: | 123 | LAKQAEASNEHFDITVVSGDKDLIQLTDTNTVVEISKKGVAEFEEFTPAYLMEKMGITPS | 182 |
| | | L K AE + FDIT+VSGDKDLIQLTD +TVVEISKKGVAEFE FTP YLME+MG+TP+ | |
| Sbjct: | 122 | LDKLAE--QDGFDITIVSGDKDLIQLTDEHTVVEISKKGVAEFEAFTPDYLMEEMGLTPA | 179 |
| Query: | 183 | QFIDLKALMGDKSDNIPGVTKIGEKTGLKLLSEYGSLEGIYENIEAMKQSKMKENLINDK | 242 |
| | | QFIDLKALMGDKSDNIPGVTK+GEKTG+KLL E+GSLEGIYENI+ MK SKMKENLINDK | |
| Sbjct: | 180 | QFIDLKALMGDKSDNIPGVTKVGEKTGIKLLLEHGSLEGIYENIDGMKTSKMKENLINDK | 239 |
| Query: | 243 | EQAFLSKTLATINIASPITIGLEDILYSGPQDIKALSQFYDEMDFKQFKAALGEETSQED | 302 |
| | | EQAFLSKTLATI+ +PI IGLED++YSGP D++ L +FYDEM FKQ K AL ++ | |
| Sbjct: | 240 | EQAFLSKTLATIDTKAPIAIGLEDLVYSGP-DVENLGKFYDEMGFKQLKQALNMSSADVA | 298 |
| Query: | 303 | FEVDFTEVEQLKTEMFSDNDFYYFEMLGDNYHVEDLIGIAWGNSDTIYATSNVSLLQEAL | 362 |
| | | +DFT V+Q+ +M S+ ++FE+ G+NYH ++L+G AW D +YAT + LLQ+ + | |
| Sbjct: | 299 | EGLDFTIVDQISQDMLSEESIFHFELFGENYHTDNLVGFAWSCGDQLYATDKLELLQDPI | 358 |
| Query: | 363 | FKKALSKP-IKTYDFKRSKVLLNRFNIDLPEPAFDTRLAKYLLSTTEDNLVSTIARLYTN | 421 |
| | | FK L K ++ YDFK+ KVLL RF +DL PAFD RLAKYLLST EDN ++TIA LY | |
| Sbjct: | 359 | FKDFLEKTSLRVYDFKKVKVLLQRFGVDLQAPAFDIRLAKYLLSTVEDNEIATIASLYGQ | 418 |
| Query: | 422 | LPLDTDDAVYGKGAKRAIPEKTRFLEHLAKKVKVLVDSEANIMQQLKANEQEELLFEMEQ | 481 |
| | | L D+ YGKG K+AIPE+ +FLEHLA K+ VLV++E ++++L N Q ELL++MEQ | |
| Sbjct: | 419 | TYLVDDETFYGKGVKKAIPEREKFLEHLACKLAVLVETEPILLEKLSENGQLELLYDMEQ | 478 |
| Query: | 482 | PLANVLAKMEIRGIKVKKNTLNEMAIENQKVIETLTQEIYELAGQEFNINSPKQLGKLLF | 541 |
| | | PLA VLAKMEI GI VKK TL EM EN+ VIE LTQEIYELAG+EFN+NSPKQLG LLF | |
| Sbjct: | 479 | PLAFVLAKMEIAGIVVKKETLLEMQAENELVIEKLTQEIYELAGEEFNVNSPKQLGVLLF | 538 |
| Query: | 542 | ETLGLPVEMTKKTKTGYSTAVDVLERLAPISPLVTKILEYRQITKLQSTYIIGLQDYILE | 601 |
| | | E LGLP+E TKKTKTGYSTAVDVLERLAPI+P+V KIL+YRQI K+QSTY+IGLQD+IL | |
| Sbjct: | 539 | EKLGLPLEYTKKTKTGYSTAVDVLERLAPIAPIVKKILDYRQIAKIQSTYVIGLQDWILA | 598 |
| Query: | 602 | DGKIHTRYVQDLTQTGRLSSSDPNLQNIPVRLEQGRLIRKAFVPSEDNAVLLSSDYSQIE | 661 |
| | | DGKIHTRYVQDLTQTGRLSS DPNLQNIP RLEQGRLIRKAFVP +++VLLSSDYSQIE | |
| Sbjct: | 599 | DGKIHTRYVQDLTQTGRLSSVDPNLQNIPARLEQGRLIRKAFVPEWEDSVLLSSDYSQIE | 658 |
| Query: | 662 | LRVLAHISKDEHLIAAFKEGADIHTSTAMRVFGIEKPENVTPNDRRNAKAVNFGIVYGIS | 721 |
| | | LRVLAHISKDEHLI AF+EGADIHTSTAMRVFGIE+P+NVT NDRRNAKAVNFG+VYGIS | |
| Sbjct: | 659 | LRVLAHISKDEHLIKAFQEGADIHTSTAMRVFGIERPDNVTANDRRNAKAVNFGVVYGIS | 718 |
| Query: | 722 | DFGLSHNLGIPRKLAKQYIDTYFERYPGIKNYMETVVREAKDKGYVETLFHRRRSLPDIN | 781 |
| | | DFGLS+NLGI RK AK YIDTYFER+PGIKNYM+ VVREA+DKGYVETLF RRR LPDIN | |
| Sbjct: | 719 | DFGLSNNLGISRKEAKAYIDTYFERFPGIKNYMDEVVREARDKGYVETLFKRRRELPDIN | 778 |
| Query: | 782 | SRNFNIRQFAERTAINSPIQGSAADILKIAMINLDRVLDKGGYKSKMLLQVHDEIVLEVP | 841 |
| | | SRNFNIR FAE TAINSPIQGSAADILKIAMI LD+ L GGY++KMLLQVHDEIVLEVP | |
| Sbjct: | 779 | SRNFNIRGFAEATAINSPIQGSAADILKIAMIQLDKALVAGGYQTKMLLQVHDEIVLEVP | 838 |
| Query: | 842 | NEEIGAIRELVTKTMESAISLSVPLIADENAGETWYEAK | 880 |
| | | E+ +++LV +TME AI LSVPLIADEN G TWYEAK | |
| Sbjct: | 839 | KSELVEMKKLVKQTMEEAIQLSVPLIADENEGATWYEAK | 877 |

[6326] A related DNA sequence was identified in S. pyogenes <SEQ ID 3521> which encodes the amino acid sequence <SEQ ID 3522>. Analysis of this protein sequence reveals the following:

| Possible site: 18 | | | | |
|---|---|---|---|---|
| >>> Seems to have no N-terminal signal sequence | | | | |
| | INTEGRAL | Likelihood = −0.43 | Transmembrane | 7-23 (7-23) |

```
----- Final Results -----
                              bacterial membrane --- Certainty = 0.1171(Affirmative) < succ>
                                bacterial outside --- Certainty = 0.0000(Not Clear) < succ>
                            bacterial cytoplasm --- Certainty = 0.0000(Not Clear) < succ>
```

[6327] An alignment of the GAS and GBS proteins is shown below.

| Identities = 665/881 (75%), Positives = 761/881 (85%), Gaps = 2/881 (0%) | | | |
|---|---|---|---|
| Query: | 1 | MTNKNKLLLIDGSSVAFRAFFALYNQIDRFKNNSGLHTNAIYGFHLMLNHILGRVQPSHI | 60 |
| | | M NKNKLLLIDGSSVAFRAFFALYNQIDRFKN+SGLHTNAIYGFHLML+H++ RVQP+H+ | |
| Sbjct: | 1 | MENKNKLLLIDGSSVAFRAFFALYNQIDRFKNHSGLHTNAIYGFHLMLDHMMKRVQPTHV | 60 |
| Query: | 61 | LVAFDAGKTTFRTEMYADYKGGRAKTPDEFREQFPYIRQQLDVLGIKHYELEHYEADDII | 120 |
| | | LVAFDAGKTTFRTEMYADYK GRAKTP+EFREQFPYIR+ L LGI +YELEHYEADDII | |
| Sbjct: | 61 | LVAFDAGKTTFRTEMYADYKAGRAKTPEEFREQFPYIREMLTALGIAYYELEHYEADDII | 120 |
| Query: | 121 | GTLAKQAEASNEHFDITVVSGDKDLIQLTDTNTVVEISKKGVAEFEEFTPAYLMEKMGIT | 180 |
| | | GTL K AE + FD+T+VSGDKDLIQLTD NTVVEISKKGVAEFEEFTPAYLMEKMG+T | |
| Sbjct: | 121 | GTLDKMAERTEVPFDVTIVSGDKDLIQLTDENTVVEISKKGVAEFEEFTPAYLMEKMGLT | 180 |
| Query: | 181 | PSQFIDLKALMGDKSDNIPGVTKIGEKTGLKLLSEYGSLEGIYENIEAMKQSKMKENLIN | 240 |
| | | P+QFIDLKALMGDKSDNIPGVTKIGEKTGLKLL E+GSLEGIYE+I+ K SKMKENLIN | |
| Sbjct: | 181 | PNQFIDLKALMGDKSDNIPGVTKIGEKTGLKLLHEFGSLEGIYEHIDGFKTSKMKENLIN | 240 |
| Query: | 241 | DKEQAFLSKTLATINIASPITIGLEDILYSGPQDIKALSQFYDEMDFKQFKAALGEETSQ | 300 |
| | | D++QAFLSKTLATIN ASPITIGL+DI+Y+GP D+ +LSQFYDEMDF Q K L + Q | |
| Sbjct: | 241 | DRDQAFLSKTLATINTASPITIGLDDIVYNGP-DVASLSQFYDEMDFVQLKKGLASQMPQ | 299 |
| Query: | 301 | EDFEV-DFTEVEQLKTEMFSDNDFYYFEMLGDNYHVEDLIGIAWGNSDTIYATSNVSLLQ | 359 |
| | | E V + EV + ++FS D +YFE L DNYH E +IG AWG+ + IYA++++ LL | |
| Sbjct: | 300 | EPVAVISYQEVTNVSADLFSAEDIFYFETLRDNYHREAIIGFAWGHGEQIYASTDLGLLA | 359 |
| Query: | 360 | EALFKKALSKPIKTYDFKRSKVLLNRFNIDLPEPAFDTRLAKYLLSTTEDNLVSTIARLY | 419 |
| | | FK+ KPI TYDFKRSKVLL+ I+L P++D RLA YLLST EDN +STIAR++ | |
| Sbjct: | 360 | TDSFKQVFQKPIATYDFKRSKVLLSHLGIELVAPSYDARLANYLLSTVEDNELSTIARIF | 419 |
| Query: | 420 | TNLPLDTDDAVYGKGAKRAIPEKTRFLEHLAKKVKVLVDSEANIMQQLKANEQEELLFEM | 479 |
| | | T++ L+ DD VYGKGAKRA+P+K LEHLA+KVKVL+DS++ ++ +L A+EQ +L + | |
| Sbjct: | 420 | TDISLEEDDTVYGKGAKRAVPDKDVLLEHLARKVKVLLDSKSQMLDKLTAHEQLDLYQNI | 479 |
| Query: | 480 | EQPLANVLAKMEIRGIKVKKNTLNEMAIENQKVIETLTQEIYELAGQEFNINSPKQLGKL | 539 |
| | | E PLANVLAKMEI GIKV + TL +MA +N+ +IE LTQEIY++AGQEFNINSPKQLG + | |
| Sbjct: | 480 | ELPLANVLAKMEIEGIKVNRATLQDMAEQNKVIIEALTQEIYDMAGQEFNINSPKQLGSI | 539 |
| Query: | 540 | LFETLGLPVEMTKKTKTGYSTAVDVLERLAPISPLVTKILEYRQITKLQSTYIIGLQDYI | 599 |
| | | LFE + LP+EMTKKTKTGYSTAV+VLERLAPI+P+V KIL+YRQITKLQSTY+IGLQDYI | |
| Sbjct: | 540 | LFEKMQLPLEMTKKTKTGYSTAVNVLKRLAPIAPIVAKILDYRQITKLQSTYVIGLQDYI | 599 |
| Query: | 600 | LEDGKIHTRYVQDLTQTGRLSSSDPNLQNIPVRLEQGRLIRKAFVPSEDNAVLLSSDYSQ | 659 |
| | | L DGKIHTRYVQDLTQTGRLSS DPNLQNIP+RLEQGRLIRKAF PS ++AVLLSSDYSQ | |
| Sbjct: | 600 | LADGKIHTRYVQDLTQTGRLSSVDPNLQNIPIRLEQGRLIRKAFTPSHEDAVLLSSDYSQ | 659 |
| Query: | 660 | IELRVLAHISKDEHLIAAFKEGADIHTSTAMRVFGIEKPENVTPNDRRNAKAVNFGIVYG | 719 |
| | | IELRVLAHIS DEHLIAAF EGADIHTSTAMRVFGI++ +VT NDRRNAKAVNFGIVYG | |
| Sbjct: | 660 | IELRVLAHISGDEHLIAAFNEGADIHTSTAMRVFGIDRAADVTANDRRNAKAVNFGIVYG | 719 |
| Query: | 720 | ISDFGLSHNLGIPRKLAKQYIDTYFERYPGIKNYMETVVREAKDKGYVETLFHRRRSLPD | 779 |
| | | ISDFGLS+NLGI RK AK YIDTYFERYPGIK YME VVREAKDKGYVETLF RRR LPD | |
| Sbjct: | 720 | ISDFGLSNNLGITRKQAKSYIDTYFERYPGIKAYMENVVREAKDKGYVETLFKRRRELPD | 779 |
| Query: | 780 | INSRNFNIRQFAERTAINSPIQGSAADILKIAMINLDRVLDKGGYKSKMLLQVHDEIVLE | 839 |
| | | INSRNFN+R FAERTAINSPIQGSAADILKIAMINLD+ L GG+++KMLLQVHDEIVLE | |
| Sbjct: | 780 | INSRNFNVRSFAERTAINSPIQGSAADILKIAMINLDKALQAGGFRAKMLLQVHDEIVLE | 839 |
| Query: | 840 | VPNEEIGAIRELVTKTMESAISLSVPLIADENAGETWYEAK | 880 |
| | | VPN+E+ AI++LV TME+A+ L+VPL DE+ G +WYEAK | |
| Sbjct: | 840 | VPNDELTAIKKLVKDTMEAAVDLAVPLCVDESTGHSWYEAK | 880 |

[6328] Based on this analysis, it was predicted that these proteins and their epitopes could be useful antigens for vaccines or diagnostics.

### EXAMPLE 1135

[6329] A DNA sequence (GBSx1211) was identified in S. agalactiae <SEQ ID 3523> which encodes the amino acid sequence <SEQ ID 3524>. Analysis of this protein sequence reveals the following:

```
Possible site: 30
>>> Seems to have no N-terminal signal sequence
----- Final Results -----
                            bacterial cytoplasm --- Certainty = 0.1880(Affirmative) < succ>
                              bacterial membrane --- Certainty = 0.0000(Not Clear) < succ>
                                bacterial outside --- Certainty = 0.0000(Not Clear) < succ>
```

[6330] A related GBS nucleic acid sequence <SEQ ID 9571> which encodes amino acid sequence <SEQ ID 9572> was also identified.

[6331] The protein has homology with the following sequences in the GENPEPT database.

| >GP: BAB05860 GB: AP001514 unknown conserved protein [Bacillus halodurans] | | | |
|---|---|---|---|
| Identities = 72/134 (53%), Positives = 94/134 (69%), Gaps = 3/134 (2%) | | | |
| Query: | 17 | NPSDFMLKNYLTKAKTIAVVGLSDRQETAAYQVSKIMQEAGYQIIPVNPKNAGQKILGQM | 76 |
| | | NPSD +K L +AK IAVVGLS + +Y VS MQ AGY+IIPVNP ++LG+ | |
| Sbjct: | 4 | NPSDEKIKQILQEAKRIAVVGLSGNPDRTSYMVSAAMQHAGYEIIPVNP--TVDEVLGEK | 61 |
| Query: | 77 | TYASLKDVTEHIDIVNIFRRSEYLPDIAREFLEVDADIFWAQLGLESQEAETILKQAGHK | 136 |
| | | SL+D+ +DIVN+FRRSE+LPD+ARE +E+ A +FWAQLGLE++EA L+Q G | |
| Sbjct: | 62 | AVPSLQDIEGAVDIVNVFRRSEHLPDVARETVEIGAPVFWAQLGLENKEAYDYLQQHGVT | 121 |
| Query: | 137 | QIVMNKCLKVECQK | 150 |
| | | I MN+C+KVE K | |
| Sbjct: | 122 | SI-MNRCIKVEHAK | 134 |

[6332] A related DNA sequence was identified in S. pyogenes <SEQ ID 3525> which encodes the amino acid sequence <SEQ ID 3526>. Analysis of this protein sequence reveals the following:

```
Possible site: 24
>>> Seems to have no N-terminal signal sequence
----- Final Results -----
                            bacterial cytoplasm --- Certainty = 0.0837(Affirmative) < succ>
                              bacterial membrane --- Certainty = 0.0000(Not Clear) < succ>
                                bacterial outside --- Certainty = 0.0000(Not Clear) < succ>
```

[6333] An alignment of the GAS and GBS proteins is shown below.

| Identities = 87/141 (61%), Positives = 114/141 (80%) | | | |
|---|---|---|---|
| Query: | 11 | MVYHFQNPSDFMLKNYLTKAKTIAVVGLSDRQETAAYQVSKIMQEAGYQIIPVNPKNAGQ | 70 |
| | | ++Y FQNPS+ +LK YL AKTIAVVGLSDR++TAAY V+K MQ Y+IIPVNPK AGQ | |
| Sbjct: | 1 | VIYSFQNPSEDVLKAYLESAKTIAVVGLSDRKDTAAYGVAKFMQAMDYRIIPVNPKLAGQ | 60 |
| Query: | 71 | KILGQMTYASLKDVTEHIDIVNIFRRSEYLPDIAREFLEVDADIFWAQLGLESQEAETIL | 130 |
| | | ILG+ YAS+K + +DIV++FRRSE+LP++AR+FL A +FWAQLGLE+QEA+TIL | |
| Sbjct: | 61 | LILGEKVYASIKAIPFEVDIVDVFRRSEFLPEVARDFLAGQAKVFWAQLGLENQEAQTIL | 120 |
| Query: | 131 | KQAGHKQIVMNKCLKVECQKL | 151 |
| | | + AG + IVMN+CLK++ +L | |
| Sbjct: | 121 | RSAGKEAIVMNRCLKIDYLQL | 141 |

[6334] Based on this analysis, it was predicted that these proteins and their epitopes could be useful antigens for vaccines or diagnostics.

### EXAMPLE 1136

[6335] A DNA sequence (GBSx1212) was identified in S. agalactiae <SEQ ID 3527> which encodes the amino acid sequence <SEQ ID 3528>. Analysis of this protein sequence reveals the following:

```
Possible site: 13
>>> Seems to have no N-terminal signal sequence
----- Final Results -----
                            bacterial cytoplasm --- Certainty = 0.3367(Affirmative) < succ>
                              bacterial membrane --- Certainty = 0.0000(Not Clear) < succ>
                                bacterial outside --- Certainty = 0.0000(Not Clear) < succ>
```

[6336] A related GBS nucleic acid sequence <SEQ ID 9573> which encodes amino acid sequence <SEQ ID 9574> was also identified.

[6337] A related DNA sequence was identified in S. pyogenes <SEQ ID 3529> which encodes the amino acid sequence <SEQ ID 3530>. Analysis of this protein sequence reveals the following:

```
Possible site: 49
>>> Seems to have no N-terminal signal sequence
----- Final Results -----
                            bacterial cytoplasm --- Certainty = 0.4960(Affirmative) < succ>
                              bacterial membrane --- Certainty = 0.0000(Not Clear) < succ>
                                bacterial outside --- Certainty = 0.0000(Not Clear) < succ>
```

[6338] An alignment of the GAS and GBS proteins is shown below.

| Identities = 113/151 (74%), Positives = 133/151 (87%), Gaps = 1/151 (0%) | | | |
|---|---|---|---|
| Query: | 7 | MDSHSHGHRPLDAYENVLEHLREKRIRITETRKAIISYMVNSREHPSAEKIYNDLLPEYP | 66 |
| | | MD HSH + LDAYENVLEHLREK IRITETRKAIISYM+ S EHPSA+KIY DL P +P | |
| Sbjct: | 1 | MDIHSH-QQALDAYENVLEHLREKHIRITETRKAIISYMIQSTEHPSADKIYRDLQPNFP | 59 |
| Query: | 67 | NMSLATVYNNLKVLVDEGFVTELKLCNYSTTYYDFMGHQHLNIACEDCGKIVDFVDVDLL | 126 |
| | | NMSLATVYNNLKVLVDEGFV+ELK+ N TTYYDFMGHQH+N+ CE CGKI DF+DVD++ | |
| Sbjct: | 60 | NMSLATVYNNLKVLVDEGFVSELKISNDLTTYYDFMGHQHVNVVCEICGKIADFMDVDVM | 119 |
| Query: | 127 | DISREAHQQTGFEVTRVQLVAYGICPECQRK | 157 |
| | | DI++EAH+QTG++VTR+ ++AYGICP+CQ K | |
| Sbjct: | 120 | DIAKEAHEQTGYKVTRIPVIAYGICPDCQAK | 150 |

[6339] Based on this analysis, it was predicted that these proteins and their epitopes could be useful antigens for vaccines or diagnostics.

### EXAMPLE 1137

[6340] A DNA sequence (GBSx1213) was identified in S. agalactiae <SEQ ID 3531> which encodes the amino acid sequence <SEQ ID 3532>. Analysis of this protein sequence reveals the following:

| Possible site: 39 | | | | |
|---|---|---|---|---|
| >>> Seems to have no N-terminal signal sequence | | | | |
| | INTEGRAL | Likelihood = −2.13 | Transmembrane | 16-32 (14-32) |
| | INTEGRAL | Likelihood = −1.81 | Transmembrane | 496-512 (496-515) |

```
----- Final Results -----
                              bacterial membrane --- Certainty = 0.1850(Affirmative) < succ>
                                bacterial outside --- Certainty = 0.0000(Not Clear) < succ>
                            bacterial cytoplasm --- Certainty = 0.0000(Not Clear) < succ>
```

[6341] The protein has homology with the following sequences in the GENPEPT database.

| >GP: CAA06650 GB: AJ005645 sdrc [Staphylococcus aureus] | | | |
|---|---|---|---|
| Identities = 41/146 (28%), Positives = 63/146 (43%), Gaps = 13/146 (8%) | | | |
| Query: | 4 | SQYNKWSIRRLKVGAASVMIASGSIVALGQSHIVSAD----EMSQPKTTITAPTANTSTN | 59 |
| | | ++ NK+SIR+ VG AS+++ + I L +A+ E++Q K TAP+ N +T | |
| Sbjct: | 16 | NRLNKFSIRKYSVGTASILVGTTLIFGLSGHEAKAAEHTNGELNQSKNETTAPSENKTT- | 74 |
| Query: | 60 | VESSTDKALSKVTTMETSSEMPK--MQNMAKVEKTSDKPMMVATSVRKMMATPTPVAMT- | 116 |
| | | D K T +++ PK M + A V++TS + T T T | |
| Sbjct: | 75 | --KKVDSRQLKDNTQTATADQPKVTMSDSATVKETSSNMQSPQNATANQSTTKTSNVTTN | 132 |
| Query: | 117 | ---KTTSVDEVKKSTDTAFKQTVDVP | 139 |
| | | TT +E KS T K P | |
| Sbjct: | 133 | DKSSTTYSNETDKSNLTQAKDVSTTP | 158 |

[6342] No corresponding DNA sequence was identified in S. pyogenes.

[6343] A related GBS gene <SEQ ID 8735> and protein <SEQ ID 8736> were also identified. Analysis of this protein sequence reveals the following:

| Lipop: Possible site: −1 Crend: 7 | | | | |
|---|---|---|---|---|
| McG: Discrim Score: −0.92 | | | | |
| GvH: Signal Score (−7.5): −2.48 | | | | |
| Possible site: 39 | | | | |
| >>> Seems to have no N-terminal signal sequence | | | | |
| ALOM program count: 2 value: −2.13 threshold: 0.0 | | | | |
| | INTEGRAL | Likelihood = −2.13 | Transmembrane | 16-32 (14-32) |
| | INTEGRAL | Likelihood = −1.81 | Transmembrane | 496-512 (496-515) |
| | PERIPHERAL | Likelihood = 7.96 | 402 | |

```
modified ALOM score: 0.93
*** Reasoning Step: 3
----- Final Results -----
                              bacterial membrane --- Certainty = 0.1850(Affirmative) < succ>
                                bacterial outside --- Certainty = 0.0000(Not Clear) < succ>
                            bacterial cytoplasm --- Certainty = 0.0000(Not Clear) < succ>
LPXTG motif: 485-489
```

[6344] The protein has homology with the following sequences in the databases:

| D\|5981\|5780 leukotoxin > Insert characterized | | | |
|---|---|---|---|
| SP\|P16462\|HLYA_ACTAC LEUKOTOXIN. > Edit characterized | | | |
| GP\|141834\|gb\|AAA21922.1\|\|M27399 leukotoxin (LtA) {Actinobacillus | | | |
| actinomycetemcomitans} Insert characterized | | | |
| Query: | 210 | VSLNGNTTGKEGQALLDQI\|AND---KHSYQATIRVYGAKDGKVDLKNMISPKMVTINIP | 266 |
| | | ++ NG+ + G+A +D +K + KHS + T ++ G +DL + +T P | |
| Sbjct: | 488 | ITRNGDRI-QSGKAYVDYLKKGEELAKHSDKFTKQILDPIKGNIDLSGIKGSTTLTFLNP | 546 |
| Query: | 267 | HITTDMEVKNSLKMAFKEKV-DVPAKYVSAAKAKG-PFLAGVNE--TIPYEAFGGDGMLT | 322 |
| | | +T E + + + E + ++ K + K KG P GV + + A D + | |
| Sbjct: | 547 | LLTAGKEERKTRQSGKYEFITELKVKGRTDWKVKGVPNSNGVYDFSNLIQHAVTRDNKVL | 606 |
| Query: | 323 | RLILKASEGAKWSDNGVDKNSPLL------PLKDLTKGKYFYQVSLNGNTAGKKGQALLD | 376 |
| | | L A+ GAK V S ++ + D +KG+ ++++G A K GQ ++ | |
| Sbjct: | 607 | EARLIANLGAKDDYVFVGSGSTIVNAGDGYDVVDYSKGRTG-ALTIDGRNATKAGQYKVE | 665 |
| Query: | 377 | QIKANGSHTYQATITIYGTKDGKV | 400 |
| | | + +G+ Q T++ TK GKV | |
| Sbjct: | 666 | R-DLSGTQVLQETVSKQETKRGKV | 688 |

[6345] SEQ ID 3532 (GBS1) was expressed in E. coli as a GST-fusion product. SDS-PAGE analysis of total cell extract is shown in FIG. 1 (lane 3; MW 78 kDa). It was also expressed in E. coli as a His-fusion product. SDS-PAGE analysis of total cell extract is shown in FIG. 2 (lane 3; MW 53 kDa).

[6346] The His-fusion protein was purified as shown in FIG. 189, lane 5.

[6347] Based on this analysis, it was predicted that these proteins and their epitopes could be useful antigens for vaccines or diagnostics.

### EXAMPLE 1138

[6348] A DNA sequence (GBSx1214) was identified in S. agalactiae <SEQ ID 3533> which encodes the amino acid sequence <SEQ ID 3534>. This protein is predicted to be response regulator (regX3). Analysis of this protein sequence reveals the following:

```
Possible site: 32
>>> Seems to have no N-terminal signal sequence
----- Final Results -----
                              bacterial cytoplasm --- Certainty = 0.3585(Affirmative) < succ>
                                bacterial membrane --- Certainty = 0.0000(Not Clear) < succ>
                                  bacterial outside --- Certainty = 0.0000(Not Clear) < succ>
```

[6349] The protein has homology with the following sequences in the GENPEPT database.

| >GP: CAB54578 GB: AJ006397 response regulator [Streptococcus pneumoniae] | | | |
|---|---|---|---|
| Identities = 143/228 (62%), Positives = 183/228 (79%), Gaps = 1/228 (0%) | | | |
| Query: | 1 | MTQKLLLVDDEFEIIDINRRYLEQAGYEVSVAADGIEALKEVDENRFDLIISDIMMPKMD | 60 |
| | | M + +LLVDDE EI DI++RYL QAGY+V VA DG+EAL+ + DLII+D+MMP+MD | |
| Sbjct: | 1 | MGKTILLVDDEVEITDIHQRYLIQAGYQVLVAHDGLEALELFKKKPIDLIITDVMMPRMD | 60 |
| Query: | 61 | GYDFISEVLVREPNQPFLFITAKVSEPDKIYSLSMGADDFISKPFSPRELVLRVKNILRR | 120 |
| | | GYD ISEV P QPFLFITAK SE DKIY LS+GADDFI+KPFSPRELVLRV NILRR | |
| Sbjct: | 61 | GYDLISEVQYLSPEQPFLFITAKTSEQDKIYGLSLGADDFIAKPFSPRELVLRVHNILRR | 120 |
| Query: | 121 | IYGNHQQSEVLTIGDLVIDQKQRLVMVDCNTISLTNKSFDLLWILANHLNRVFSKTELYE | 180 |
| | | ++ ++E++++G+L ++ V + + LT KSF+LLWILA++ RVFSKT+LYE | |
| Sbjct: | 121 | LH-RGGETELISLGNLKMNHSSHEVQIGEEMLDLTVKSFELLWILASNPERVFSKTDLYE | 179 |
| Query: | 181 | RVWGEEFLDDTNTLNVHIHALRNDLAKFSTDNTPTIKTVWGLGYKLEE | 228 |
| | | ++W E+++DDTNTLNVHIHALR +LAK+S+D TPTIKTVWGLGYK+E+ | |
| Sbjct: | 180 | KIWKEDYVDDTNTLNVHIHALRQELAKYSSDQTPTIKTVWGLGYKIEK | 227 |

[6350] There is also homology to SEQ ID 1182.

[6351] Based on this analysis, it was predicted that this protein and its epitopes, could be useful antigens for vaccines or diagnostics.

### EXAMPLE 1139

[6352] A DNA sequence (GBSx1215) was identified in S. agalactiae <SEQ ID 3535> which encodes the amino acid sequence <SEQ ID 3536>. This protein is predicted to be histidine kinase (resE). Analysis of this protein sequence reveals the following:

| Possible site: 25 | | | | |
|---|---|---|---|---|
| >>> Seems to have an uncleavable N-term signal seq | | | | |
| | INTEGRAL | Likelihood = −9.13 | Transmembrane | 42-58 (33-65) |
| | INTEGRAL | Likelihood = −7.54 | Transmembrane | 7-23 (3-29) |

```
----- Final Results -----
                              bacterial membrane --- Certainty = 0.4652(Affirmative) < succ>
                                bacterial outside --- Certainty = 0.0000(Not Clear) < succ>
                            bacterial cytoplasm --- Certainty = 0.0000(Not Clear) < succ>
```

[6353] The protein has homology with the following sequences in the GENPEPT database.

| >GP: CAB54579 GB: AJ006397 histidine kinase [Streptococcus pneumoniae] | | | |
|---|---|---|---|
| Identities = 190/343 (55%), Positives = 249/343 (72%) | | | |
| Query: | 1 | MKLKYYIVIGYLISMLITVAGVFFGLNHMLIETRGVYYILSVTIIACIVGGIVNLFLLSS | 60 |
| | | MKLK YI++GY+IS L+T+ VF+ + MLI +Y++L +TI+A +VG ++LFLL | |
| Sbjct: | 1 | MKLKSYILVGYIISTLLTILVVFWAVQKMLIAKGEIYFLLGMTIVASLVGAGISLFLLLP | 60 |
| Query: | 61 | VFTSLKKLKQKMKDISQRCFDTKAQICSPQEFKDLETAFNQMSSELESTFKSLNESEREK | 120 |
| | | VFTSL KLK+ K ++ + F + ++ P EF+ L FN+MS +L+ +F SL ESEREK | |
| Sbjct: | 61 | VFTSLGKLKEHAKRVAAKDFPSNLEVQGPVEFQQLGQTFNEMSHDLQVSFDSLEESEREK | 120 |
| Query: | 121 | TMMIAQLSHDIKTPITSIQSTVEGILDGIISEEEVNYYLNTISRQTNRLNHLVEELSFIT | 180 |
| | | +MIAQLSHDIKTPITSIQ+TVEGILDGII E E +YL TI RQT RLN LVEEL+F+T | |
| Sbjct: | 121 | GLMIAQLSHDIKTPITSIQATVEGILDGIIKESEQAHYLATIGRQTERLNKLVEELNFLT | 180 |
| Query: | 181 | LETMSDTAEPHKEETIYLDKLLIDILSEFQLVFEKENRQVMIDVAPDVSKLSSQYDKLSR | 240 |
| | | L T + E +++I+LDKLLI+ +SEFQ + E+E R V + V P+ +++ Y KLSR | |
| Sbjct: | 181 | LNTARNQVETTSKDSIFLDKLLIECMSEFQFLIEQERRDVHLQVIPESARIEGDYAKLSR | 240 |
| Query: | 241 | ILLNLISNAVKYSDPGSPLTIKAYSNRQDIVIDIIDQGYGIKDEDLASIFNRLYRVESSR | 300 |
| | | IL+NL+ NA KYS PG+ L + A + + I + D+G GI EDL +IF RLYRVE+SR | |
| Sbjct: | 241 | ILVNLVDNAFKYSAPGTKLEVVAKLEKDQLSISVTDEGQGIAPEDLENIFKRLYRVETSR | 300 |
| Query: | 301 | NMKTGGHGLGLYIARQLAHQLNGDILVESQYQKGSKFSLVLKL | 343 |
| | | NMKTGGHGLGL IAR+LAHQL G+I V SQY GS F+LVL L | |
| Sbjct: | 301 | NMKTGGHGLGLAIARELAHQLGGEITVSSQYGLGSTFTLVLNL | 343 |

[6354] There is also homology to SEQ ID 1178.

[6355] A related GBS gene <SEQ ID 8737> and protein <SEQ ID 8738> were also identified. Analysis of this protein sequence reveals the following:

| Lipop: Possible site: −1 Crend: 3 | | | | |
|---|---|---|---|---|
| McG: Discrim Score: 8.67 | | | | |
| GvH: Signal Score (−7.5): −5.75 | | | | |
| Possible site: 25 | | | | |
| >>> Seems to have an uncleavable N-term signal seq | | | | |
| ALOM program count: 2 value: −9.13 threshold: 0.0 | | | | |
| | INTEGRAL | Likelihood = −9.13 | Transmembrane | 42-58 (33-65) |
| | INTEGRAL | Likelihood = −7.54 | Transmembrane | 7-23 (3-29) |
| | PERIPHERAL | Likelihood = 3.92 | 196 | |

```
modified ALOM score: 2.33
*** Reasoning Step: 3
----- Final Results -----
                              bacterial membrane --- Certainty = 0.4652(Affirmative) < succ>
                                bacterial outside --- Certainty = 0.0000(Not Clear) < succ>
                            bacterial cytoplasm --- Certainty = 0.0000(Not Clear) < succ>
```

[6356] The protein has homology with the following sequences in the databases:

[chemical structure]

[6357] SEQ ID 8738 (GBS28) was expressed in E. coli as a GST-fusion product. SDS-PAGE analysis of total cell extract is shown in FIG. 14 (lane 3; MW 64 kDa). It was also expressed in E. coli as a His-fusion product. SDS-PAGE analysis of total cell extract is shown in FIG. 85 (lane 5; MW 38.8 kDa) and in FIG. 157 (lane 9-11; MW 39 kDa).

[6358] GBS28-His was purified as shown in FIG. 221, lane 6-7.

[6359] Based on this analysis, it was predicted that these proteins and their epitopes could be useful antigens for vaccines or diagnostics.

### EXAMPLE 1140

[6360] A DNA sequence (GBSx1216) was identified in S. agalactiae <SEQ ID 3537> which encodes the amino acid sequence <SEQ ID 3538>. Analysis of this protein sequence reveals the following:

| Possible site: 19 | | | | |
|---|---|---|---|---|
| >>> Seems to have no N-terminal signal sequence | | | | |
| | INTEGRAL | Likelihood = −7.70 | Transmembrane | 125-141 (110-155) |
| | INTEGRAL | Likelihood = −7.59 | Transmembrane | 38-54 (36-56) |
| | INTEGRAL | Likelihood = −6.48 | Transmembrane | 146-162 (143-174) |
| | INTEGRAL | Likelihood = −5.57 | Transmembrane | 72-88 (63-93) |
| | INTEGRAL | Likelihood = −1.33 | Transmembrane | 229-245 (227-245) |

```
----- Final Results -----
                              bacterial membrane --- Certainty = 0.4079(Affirmative) < succ>
                                bacterial outside --- Certainty = 0.0000(Not Clear) < succ>
                            bacterial cytoplasm --- Certainty = 0.0000(Not Clear) < succ>
```

[6361] A related GBS nucleic acid sequence <SEQ ID 9575> which encodes amino acid sequence <SEQ ID 9576> was also identified.

[6362] The protein has homology with the following sequences in the GENPEPT database.

| >GP: CAA79984 GB: Z21972 ORF1 [Bacillus megaterium] | | | |
|---|---|---|---|
| Identities = 35/119 (29%), Positives = 62/119 (51%), Gaps = 15/119 (12%) | | | |
| Query: | 142 | SSFRLLLSGNLILAPVLIVVSSLITTKAVIKLV---QQYYSYSISTLVFYTQLESGNYEG | 198 |
| | | +SF+L+ +++ A + + S L+ +IK + QQ++ + YT LE+ | |
| Sbjct: | 105 | TSFKLI-GASILQAIFIFLWSLLLIIPGIIKAIAYSQQFFL--LKDHPEYTVLEA----- | 156 |
| Query: | 199 | PSKVLVASRELMNGNKLRLFLLDLSFIGWQFLTIFSFGLVYIYLLPYQTTARLIFYRNI | 257 |
| | | + S++ M G K + FL+ LSFIGW L +F+ G+ ++L+PY T FY + | |
| Sbjct: | 157 | ----ITESKKRMKGLKWKYFLMHLSFIGWGILCMFTLGIGLLWLIPYAGTTTAAFYEEL | 211 |

[6363] A related DNA sequence was identified in S. pyogenes <SEQ ID 3539> which encodes the amino acid sequence <SEQ ID 3540>. Analysis of this protein sequence reveals the following:

| Possible site: 54 | | | | |
|---|---|---|---|---|
| >>> Seems to have an uncleavable N-term signal seq | | | | |
| | INTEGRAL | Likelihood = −10.08 | Transmembrane | 148-164 (143-170) |
| | INTEGRAL | Likelihood = −8.28 | Transmembrane | 114-130 (101-141) |
| | INTEGRAL | Likelihood = −6.69 | Transmembrane | 60-76 (49-82) |
| | INTEGRAL | Likelihood = −3.72 | Transmembrane | 21-37 (21-39) |
| | INTEGRAL | Likelihood = −2.34 | Transmembrane | 222-238 (221-239) |

```
----- Final Results -----
                              bacterial membrane --- Certainty = 0.5034(Affirmative) < succ>
                                bacterial outside --- Certainty = 0.0000(Not Clear) < succ>
                            bacterial cytoplasm --- Certainty = 0.0000(Not Clear) < succ>
```

[6364] The protein has homology with the following sequences in the databases:

| >GP: CAA79984 GB: Z21972 ORF1 [Bacillus megaterium] | | | |
|---|---|---|---|
| Identities = 63/220 (28%), Positives = 100/220 (44%), Gaps = 31/220 (14%) | | | |
| Query: | 62 | LGLILSLFILSASFTMI-DVVRHFRQKVSFAESTTAFSKEFFGNLLVLAITKWLFFLIWS | 120 |
| | | + L+L LF+++ F +I +V+ + T + F + +A+ L S | |
| Sbjct: | 22 | VSLMLLLFLINLVFPLIVEVIGSGGFSEWLMQEETPLWSDIFSMVFSIALIP----LTIS | 77 |
| Query: | 121 | LIWFF-------------GLFIFLSGLSAFLVNAKSGSSTVISLIFLLFGAVLSLIGFGI | 167 |
| | | WF+ I+ G ++F + G+S + ++ L+ +L + G | |
| Sbjct: | 78 | TTWFYLNLVREGNPGIPEVFAIYKDGKTSFKL---IGASILQAIFIFLWSLLLIIPG--- | 131 |
| Query: | 168 | YINRYYAYSLSEYLLYDEVKEGTYLGAIAVIETSVAMMKGYKWKLFFLQLSFTGWFLLNI | 227 |
| | | I + AYS +LL D E T L AI S MKG KWK F + LSF GW +L + | |
| Sbjct: | 132 | -IIKAIAYSQQFFLLKDH-PEYTVLEAIT---ESKKRMKGLKWKYFLMHLSFIGWGILCM | 186 |
| Query: | 228 | VTFGLLNIYLLPYFTTANVIFYDQLKKRFKDKDD--PIEG | 265 |
| | | T G+ ++L+PY T FY++L +D DD IEG | |
| Sbjct: | 187 | FTLGIGLLWLIPYAGTTTAAFYEELIVPQEDIDDDQQIEG | 226 |

[6365] An alignment of the GAS and GBS proteins is shown below.

| Identities = 87/254 (34%), Positives = 137/254 (53%), Gaps = 10/254 (3%) | | | |
|---|---|---|---|
| Query: | 16 | MTNSEIKNEAKTILSNLQGKNQLFLLPILLSIITLYISFYYQYN-----NMTLLDFFVPL | 70 |
| | | M+ IK +A+ L NL GK LFL+P LL + I + Y ++L + PL | |
| Sbjct: | 1 | MSIKAIKGQARDTLKNLSGKYLLFLIPTLLFMFHFGIEIHQGYVLSSGIEVSLAASYFPL | 60 |
| Query: | 71 | PVYFFYTLFIISVSFVMLDVVKNQKLNVRFSDNTYVFSSHIFWKLLSVLVLKGLILSFFY | 130 |
| | | + +LFI+S SF M+DVV++ + V F+++T FS F LL + + K L + | |
| Sbjct: | 61 | LLGLILSLFILSASFTMIDVVRHFRQKVSFAESTTAFSKEFFGNLLVLAITKWLFFLIWS | 120 |
| Query: | 131 | LLSTFGLLIIISSFRLLL-----SGNLILAPVLIVVSSLITTKAVIKLVQQYYSYSISTL | 185 |
| | | L+ FGL I +S L + +++ + ++ ++++ + +YY+YS+S | |
| Sbjct: | 121 | LIWFFGLFIFLSGLSAFLVNAKSGSSTVISLIFLLFGAVLSLIGFGIYINRYYAYSLSEY | 180 |
| Query: | 186 | VFYTQLESGNYEGPSKVLVASRELMNGNKLRLFLLDLSFIGWQFLTIFSFGLVYIYLLPY | 245 |
| | | + Y +++ G Y G V+ S +M G K +LF L LSF GW L I +FGL+ IYLLPY | |
| Sbjct: | 181 | LLYDEVKEGTYLGAIAVIETSVAMMKGYKWKLFFLQLSFTGWFLLNIVTFGLLNIYLLPY | 240 |
| Query: | 246 | QTTARLIFYRNITK | 259 |
| | | TTA +IFY + K | |
| Sbjct: | 241 | FTTANVIFYDQLKK | 254 |

[6366] A related GBS gene <SEQ ID 8739> and protein <SEQ ID 8740> were also identified. Analysis of this protein sequence reveals the following:

| Lipop: Possible site: −1 Crend: 4 | | | | |
|---|---|---|---|---|
| McG: Discrim Score: −11.32 | | | | |
| GvH: Signal Score (−7.5): −5.39 | | | | |
| Possible site: 19 | | | | |
| >>> Seems to have no N-terminal signal sequence | | | | |
| ALOM program count: 5 value: −7.70 threshold: 0.0 | | | | |
| | INTEGRAL | Likelihood = −7.70 | Transmembrane | 125-141 (110-155) |
| | INTEGRAL | Likelihood = −7.59 | Transmembrane | 38-54 (34-56) |
| | INTEGRAL | Likelihood = −6.48 | Transmembrane | 146-162 (143-174) |
| | INTEGRAL | Likelihood = −5.57 | Transmembrane | 72-88 (63-93) |
| | INTEGRAL | Likelihood = −1.33 | Transmembrane | 229-245 (227-245) |
| | PERIPHERAL | Likelihood = 0.37 | 105 | |

```
modified ALOM score: 2.04
*** Reasoning Step: 3
----- Final Results -----
                              bacterial membrane --- Certainty = 0.4079(Affirmative) < succ>
                                bacterial outside --- Certainty = 0.0000(Not Clear) < succ>
                            bacterial cytoplasm --- Certainty = 0.0000(Not Clear) < succ>
```

[6367] The protein has homology with the following sequences in the databases:

[chemical structure]

[6368] Based on this analysis, it was predicted that these proteins and their epitopes could be useful antigens for vaccines or diagnostics.

### EXAMPLE 1141

[6369] A DNA sequence (GBSx1217) was identified in S. agalactiae <SEQ ID 3541> which encodes the amino acid sequence <SEQ ID 3542>. This protein is predicted to be tRNA-guanine transglycosylase (tgt). Analysis of this protein sequence reveals the following:

Possible site: 54
>>> Seems to have no N-terminal signal sequence

```
----- Final Results -----
                            bacterial cytoplasm --- Certainty = 0.3706(Affirmative) < succ>
                              bacterial membrane --- Certainty = 0.0000(Not Clear) < succ>
                                bacterial outside --- Certainty = 0.0000(Not Clear) < succ>
```

[6370] A related GBS nucleic acid sequence <SEQ ID 9577> which encodes amino acid sequence <SEQ ID 9578> was also identified.

[6371] The protein has homology with the following sequences in the GENPEPT database.

| >GP: CAB14731 GB: Z99118 tRNA-guanine transglycosylase [Bacillus subtilis] | | | |
|---|---|---|---|
| Identities = 269/377 (71%), Positives = 320/377 (84%) | | | |
| Query: | 12 | MTDHPIKYRLIKQEKHTGARLGEIITPHGTFPTPMFMPVGTQATVKTQSPEELKEMGSGI | 71 |
| | | M + PI+Y IK+ K TGARLG++ TPHG+F TP+FMPVGT ATVKT SPEELK M +GI | |
| Sbjct: | 1 | MAEQPIRYEFIKECKQTGARLGKVHTPHGSFETPVFMPVGTLATVKTMSPEELKAMDAGI | 60 |
| Query: | 72 | ILSNTYHLWLRPGDELIAKAGGLHKFMNWDQAILTDSGGFQVYSLADSRNITEEGVTFKN | 131 |
| | | ILSNTYHLWLRPG +++ +AGGLHKFMNWD+AILTDSGGFQV+SL+ RNI EEGV F+N | |
| Sbjct: | 61 | ILSNTYHLWLRPGQDIVKEAGGLHKFMNWDRAILTDSGGFQVFSLSKFRNIEEEGVHFRN | 120 |
| Query: | 132 | HLNGAKMFLSPEKAISIQNNLGSDIMMSFDECPQFYQPYDYVKKSIERTSRWAERGLNAH | 191 |
| | | HLNG K+FLSPEKA+ IQN LGSDIMM+FDECP + YDY+K+S+ERTSRWAER LNAH | |
| Sbjct: | 121 | HLNGDKLFLSPEKAMEIQNALGSDIMMAFDECPPYPAEYDYMKRSVERTSRWAERCLNAH | 180 |
| Query: | 192 | RRPHDQGLFGIVQGAGFEDLRRQSARDLVSMDFPGYSIGGLAVGETHDEMNAVLDFTVPM | 251 |
| | | R +QGLFGIVQG +EDLR QSA+DL+S+DFPGY+IGGL+VGE D MN VL+FT P+ | |
| Sbjct: | 181 | NRQDEQGLFGIVQGGEYEDLRTQSAKDLISLDFPGYAIGGLSVGEPKDVMNRVLEFTTPL | 240 |
| Query: | 252 | LPNDKPRYLMGVGAPDSLIDAVIRGVDMFDCVLPTRIARNGTCNTSQGRLVVKNAKFAED | 311 |
| | | LP DKPRYLBGVG+PD+LID IRGVDMFDCVLPTRIARNGT T++GRL +KNAKF D | |
| Sbjct: | 241 | LPKDKPRYLMGVGSPDALIDGAIRGVDMFDCVLPTRIARNGTVFTAEGRLNMKNAKFERD | 300 |
| Query: | 312 | FTPLDPNCDCYTCKNYTRAYIRHLLKADETFGIRLTSYHNLYFLVNLMKDVRQAIMDDNL | 371 |
| | | F P+D CDCYTCKNYTRAYIRHL++ +ETFG+RLT+YHNL+FL++LM+ VRQAI +D L | |
| Sbjct: | 301 | FRPIDEECDCYTCKNYTRAYIRHLIRCNETFGLRLTTYHNLHFLLHLMEQVRQAIREDRL | 360 |
| Query: | 372 | LEFRQDFMERYGYGMNN | 388 |
| | | +FR++F ERYGY N | |
| Sbjct: | 361 | GDFREEFFERYGYNKPN | 377 |

[6372] A related DNA sequence was identified in S. pyogenes <SEQ ID 3543> which encodes the amino acid sequence <SEQ ID 3544>. Analysis of this protein sequence reveals the following:

```
Possible site: 43
>>> Seems to have no N-terminal signal sequence
----- Final Results -----
                            bacterial cytoplasm --- Certainty = 0.2590(Affirmative) < succ>
                              bacterial membrane --- Certainty = 0.0000(Not Clear) < succ>
                                bacterial outside --- Certainty = 0.0000(Not Clear) < succ>
```

[6373] An alignment of the GAS and GBS proteins is shown below.

| Identities = 351/380 (92%), Positives = 368/380 (96%) | | | |
|---|---|---|---|
| Query: | 12 | MTDHPIKYRLIKQEKHTGARLGEIITPHGTFPTPMFMPVGTQATVKTQSPEELKEMGSGI | 71 |
| | | MTD+PIKYRLIK EKHTGARLGEIITPHGTFPTPMFMPVGTQATVKTQSPEELK +GSGI | |
| Sbjct: | 1 | MTDYPIKYRLIKAEKHTGARLGEIITPHGTFPTPMFMPVGTQATVKTQSPEELKAIGSGI | 60 |
| Query: | 72 | ILSNTYHLWLRPGDELIAKAGGLHKFMNWDQAILTDSGGFQVYSLADSRNITEEGVTFKN | 131 |
| | | ILSNTYHLWLRPGDELIA++GGLHKFMNWDQ ILTDSGGFQVYSLADSRNITEEGVTFKN | |
| Sbjct: | 61 | ILSNTYHLWLRPGDELIARSGGLHKFMNWDQPILTDSGGFQVYSLADSRNITEEGVTFKN | 120 |
| Query: | 132 | HLNGAKMFLSPEKAISIQNNLGSDIMMSFDECPQFYQPYDYVKKSIERTSRWAERGLNAH | 191 |
| | | HLNG+KMFLSPEKAISIQNNLGSDIMMSFDECPQFYQPYDYVKKSIERTSRWAERGL AH | |
| Sbjct: | 121 | HLNGSKMFLSPEKAISIQNNLGSDIMMSFDECPQFYQPYDYVKKSIERTSRWAERGLKAH | 180 |
| Query: | 192 | RRPHDQGLFGIVQGAGFEDLRRQSARDLVSMDFPGYSIGGLAVGETHDEMNAVLDFTVPM | 251 |
| | | RRPHDQGLFGIVQGAGFEDLRRQSA DLV+MDFPGYSIGGLAVGE+H+EMNAVLDFT P+ | |
| Sbjct: | 181 | RRPHDQGLFGIVQGAGFEDLRRQSAADLVAMDFPGYSIGGLAVGESHEEMNAVLDETTPL | 240 |
| Query: | 252 | LPNDKPRYLMGVGAPDSLIDAVIRGVDMFDCVLPTRIARNGTCMTSQGRLVVKNAKFAED | 311 |
| | | LP +KPRYLMGVGAPDSLID VIRGVDMFDCVLPTRIARNGTCMTS+GRLV+KNAKFAED | |
| Sbjct: | 241 | LPENKPRYLMGVGAPDSLIDGVIRGVDMFDCVLPTRIARNGTCMTSEGRLVIKNAKFAED | 300 |
| Query: | 312 | FTPLDPNCDCYTCKNYTRAYIRHLLKADETFGIRLTSYHNLYFLVNLMKDVRQAIMDDNL | 371 |
| | | FTPLD +CDCYTC+NY+RAYIRHLLKADETFGIRLTSYHNLYFLVNLMK VRQAIMDDNL | |
| Sbjct: | 301 | FTPLDHDCDCYTCQNYSRAYIRHLLKADETFGIRLTSYHNLYFLVNLMKKVRQAIMDDNL | 360 |
| Query: | 372 | LEFRQDFMERYGYGMNNRNF | 391 |
| | | LEFRQDF+ERYGY +NRNF | |
| Sbjct: | 361 | LEFRQDFLERYGYNKSNRNF | 380 |

[6374] Based on this analysis, it was predicted that these proteins and their epitopes could be useful antigens for vaccines or diagnostics.

### EXAMPLE 1142

[6375] A DNA sequence (GBSx1218) was identified in S. agalactiae <SEQ ID 3545> which encodes the amino acid sequence <SEQ ID 3546>. Analysis of this protein sequence reveals the following:

```
Possible site: 56
>>> Seems to have no N-terminal signal sequence
----- Final Results -----
                            bacterial cytoplasm --- Certainty = 0.2479(Affirmative) < succ>
                              bacterial membrane --- Certainty = 0.0000(Not Clear) < succ>
                                bacterial outside --- Certainty = 0.0000(Not Clear) < succ>
```

[6376] A related GBS nucleic acid sequence <SEQ ID 9303> which encodes amino acid sequence <SEQ ID 9304> was also identified. A further related GBS nucleic acid sequence <SEQ ID 10795> which encodes amino acid sequence <SEQ ID 10796> was also identified.

[6377] The protein has homology with the following sequences in the GENPEPT database.

| >GP: CAB16256 GB: Z99164 hypothetical protein [Schizosaccharomyces | | | |
|---|---|---|---|
| pombe] | | | |
| Identities = 42/91 (46%), Positives = 62/91 (67%), Gaps = 3/91 (3%) | | | |
| Query: | 6 | FGIGLDSSSRCYHYHTKLDIVALKCAVCQKYYACYKCHDALEEHCFAA-TKSDETFP-VL | 63 |
| | | +G +D+ +RC+HYH+K D+VAL+C C+K+YAC++CHD L H F K+ P V+ | |
| Sbjct: | 13 | YGKLVDNETRCFHYHSKADVVALRCGQCEKFYACFQCHDELNTHPFLPWRKAKFHIPCVI | 72 |
| Query: | 64 | CGSCRQMLTLKEYK-TGFCPYCRMLFNPNCQ | 93 |
| | | CG+C+ LT++EY+ T C YC FNP C+ | |
| Sbjct: | 73 | CGACKNSLTVEEYRSTVHCKYCNHPFNPKCK | 103 |

[6378] A related DNA sequence was identified in S. pyogenes <SEQ ID 3547> which encodes the amino acid sequence <SEQ ID 3548>. Analysis of this protein sequence reveals the following:

```
Possible site: 36
>>> Seems to have no N-terminal signal sequence
----- Final Results -----
                            bacterial cytoplasm --- Certainty = 0.2769(Affirmative) < succ>
                              bacterial membrane --- Certainty = 0.0000(Not Clear) < succ>
                              bacterial outside --- Certainty = 0.0000(Not Clear) < succ>
```

[6379] An alignment of the GAS and GBS proteins is shown below.

| Identities = 55/93 (59%), Positives = 62/93 (66%) | | | |
|---|---|---|---|
| Query: | 2 | MQEYFGIGLDSSSRCYHYHTKLDIVALKCAVCQKYYACYKCHDALEEHCFAATKSDETFP | 61 |
| | | M + FGI LD RC HYHT LDIV LKCA CQ YYACY CHD L +H F T ET P | |
| Sbjct: | 1 | MTDCFGIDLDQEYRCLHYHTPLDIVGLKCASCQTYYACYHCHDQLTDHAFVPTGHQETSP | 60 |
| Query: | 62 | VLCGSCRQMLTLKEYKTGFCPYCRMLFNPNCQR | 94 |
| | | V+CG CR++L+ EY G CPYC+ FNP C R | |
| Sbjct: | 61 | VICGHCRKLLSRAEYGCGCCPYCQSPFNPACHR | 93 |

[6380] Based on this analysis, it was predicted that these proteins and their epitopes could be useful antigens for vaccines or diagnostics.

### EXAMPLE 1143

[6381] A DNA sequence (GBSx1219) was identified in S. agalactiae <SEQ ID 3549> which encodes the amino acid sequence <SEQ ID 3550>. This protein is predicted to be transport protein. Analysis of this protein sequence reveals the following:

| Possible site: 19 | | | | |
|---|---|---|---|---|
| >>> Seems to have no N-terminal signal sequence | | | | |
| | INTEGRAL | Likelihood = −9.45 | Transmembrane | 300-316 (292-321) |
| | INTEGRAL | Likelihood = −1.17 | Transmembrane | 265-281 (265-281) |

```
----- Final Results -----
                              bacterial membrane --- Certainty = 0.4779(Affirmative) < succ>
                                bacterial outside --- Certainty = 0.0000(Not Clear) < succ>
                            bacterial cytoplasm --- Certainty = 0.0000(Not Clear) < succ>
```

[6382] A related GBS nucleic acid sequence <SEQ ID 10113> which encodes amino acid sequence <SEQ ID 10114> was also identified.

[6383] The protein has homology with the following sequences in the GENPEPT database.

| >GP: AAF12002 GB: AE002075 transport protein, putative | | | |
|---|---|---|---|
| [Deinococcus radiodurans] | | | |
| Identities = 108/295 (36%), Positives = 174/295 (58%), Gaps = 4/295 (1%) | | | |
| Query: | 31 | GAWINLVNPSQEESEQVADQFGIDIDDLRAPLDVEETSRISVEDDYTLVIVDVPTYEERN | 90 |
| | | G WI+ P+ EE +V+ + G+++D L+ PLD +E SR ED L+I+ + | |
| Sbjct: | 21 | GCWIDAAAPTTEELARVSRETGLELDYLKYPLDPDERSRFEREDGQLLIIMQTSYRLAED | 80 |
| Query: | 91 | NKSYYMTIPMGIIVTDNAVITTC-LEHLTLFDHFYRRRVKNFYTFMKTRFVFQLLYRNAE | 149 |
| | | + Y T+P+GI+ TD+ ++T C LE + V+ T K R QL RNA+ | |
| Sbjct: | 81 | SDIPYDTVPLGILHTDHCLVTVCSLEENPVVKDVVSGLVRRVSTVKKNRLTLQLFLRNAQ | 140 |
| Query: | 150 | LYLQALRTIDRQSDKIEAQLESATRNEQLIDMMELEKSIVYLKASLKFNERIVKKLTSST | 209 |
| | | +L +R I+++ D IE ++E+ATRN +L+D+++LEKS+VY LK NE +++++ | |
| Sbjct: | 141 | RFLIDVRQINKRVDAIEDKMENATRNRELLDLLKLEKSLVYFITGLKANEAMMERVKRDR | 200 |
| Query: | 210 | SSLKKYIEDEDLLEDTLIETQQAIEMANIYENVLNAMTETTASIIGNNQNTIMKTLALVT | 269 |
| | | + Y ED +LL+D LIE QAIEMA+I N+L +M AS+I NN N ++K L + T | |
| Sbjct: | 201 | I-FEMYEEDSELLDDVLIENLQAIEMASIASNILTSMAGAFASVINNNVNQVVKVLTVTT | 259 |
| Query: | 270 | MTLDIPTVIFSAYGMNFQNNWMPLNGLAHGFIYVVLLAFLMSSFVVFYFIRKKWF | 324 |
| | | + + IPT++ +GMN + +P + +GF V+ +A ++S + F F R K F | |
| Sbjct: | 260 | ILVAIPTLVSGFFGMNVEG-LPFSDSPYGFWLVMTVAMGIASLLAFLFYRWKVF | 312 |

[6384] A related DNA sequence was identified in S. pyogenes <SEQ ID 715> which encodes the amino acid sequence <SEQ ID 716>. Analysis of this protein sequence reveals the following:

| Possible site: 61 | | | | |
|---|---|---|---|---|
| >>> Seems to have no N-terminal signal sequence | | | | |
| | INTEGRAL | Likelihood = −8.81 | Transmembrane | 293-309 (288-311) |
| | INTEGRAL | Likelihood = −1.28 | Transmembrane | 255-271 (255-271) |

```
----- Final Results -----
                              bacterial membrane --- Certainty = 0.4524(Affirmative) < succ>
                                bacterial outside --- Certainty = 0.0000(Not Clear) < succ>
                            bacterial cytoplasm --- Certainty = 0.0000(Not Clear) < succ>
```

[6385] An alignment of the GAS and GBS proteins is shown below.

| Identities = 272/314 (86%), Positives = 296/314 (93%) | | | |
|---|---|---|---|
| Query: | 11 | MKQMFLSTAIEFKEIETFEPGAWINLVNPSQEESEQVADQFGIDIDDLRAPLDVEETSRI | 70 |
| | | MKQMFLS+AIEFKEIETFEPGAWI LVNPSQEES ++ADQF IDI DLRAPLDVEETSRI | |
| Sbjct: | 1 | MKQMFLSSAIEFKEIETFEPGAWIKLVNPSQEESMKIADQFNIDISDLRAPLDVEETSRI | 60 |
| Query: | 71 | SVEDDYTLVIVDVPTYEERNNKSYYMTIPMGIIVTDNAVITTCLEHLTLFDHFYRRRVKN | 130 |
| | | +VEDDYTL+IVDVP YEERNNKSYY+T+P+GIIVT+NAVITTCL +TLFDHF+ RRVKN | |
| Sbjct: | 61 | AVEDDYTLIIVDVPIYEERNNKSYYITMPLGIIVTENAVITTCLHDMTLFDHFHNRRVKN | 120 |
| Query: | 131 | FYTFMKTRFVFQLLYRNAELYLQALRTIDRQSDKIEAQLESATRNEQLIDMMELEKSIVY | 190 |
| | | FYTFMKTRFVFQ+LYRNAEL+L ALRTIDRQS+++EAQLE+ATRNE+LIDMMELEKSIVY | |
| Sbjct: | 121 | FYTFMKTRFVFQILYRNAELFLTALRTIDRQSERLEAQLEAATRNEELIDMMELEKSIVY | 180 |
| Query: | 191 | LKASLKFNERIVKKLTSSTSSLKKYIEDEDLLEDTLIETQQAIEMANIYENVLNAMTETT | 250 |
| | | LKASLKFNERIVKKL+SSTSSLKKYIEDEDLLEDTLIETQQAIEMA IYENVLNAMTETT | |
| Sbjct: | 181 | LKASLKFNERIVKKLSSSTSSLKKYIEDEDLLEDTLIETQQAIEMAGIYENVLNAMTETT | 240 |
| Query: | 251 | ASIIGNNQNTIMKTLALVTMTLDIPTVIFSAYGMNFQNNWMPLNGLAHGFIYVVLLAFLM | 310 |
| | | ASII NNQNTIMKTLAL+TM LDIPTVIFSAYGMNFQNNW+PLNGL H F Y+ L+A L+ | |
| Sbjct: | 241 | ASIINNNQNTIMKTLALMTMALDIPTVIFSAYGMNFQNNWLPLNGLEHAFWYITLIAMLL | 300 |
| Query: | 311 | SSFVVFYFIRKKWF | 324 |
| | | SSFVV YFIRKKWF | |
| Sbjct: | 301 | SSFVVIYFIRKKWF | 314 |

[6386] Based on this analysis, it was predicted that these proteins and their epitopes could be useful antigens for vaccines or diagnostics.

### EXAMPLE 1144

[6387] A DNA sequence (GBSx1220) was identified in S. agalactiae <SEQ ID 3551> which encodes the amino acid sequence <SEQ ID 3552>. Analysis of this protein sequence reveals the following:

| Possible site: 29 | | | | |
|---|---|---|---|---|
| >>> Seems to have no N-terminal signal sequence | | | | |
| | INTEGRAL | Likelihood = −12.26 | Transmembrane | 158-174 (151-182) |
| | INTEGRAL | Likelihood = −6.37 | Transmembrane | 93-109 (91-111) |
| | INTEGRAL | Likelihood = −5.68 | Transmembrane | 188-204 (184-205) |
| | INTEGRAL | Likelihood = −0.85 | Transmembrane | 118-134 (118-134) |

```
----- Final Results -----
                              bacterial membrane --- Certainty = 0.5904(Affirmative) < succ>
                                bacterial outside --- Certainty = 0.0000(Not Clear) < succ>
                            bacterial cytoplasm --- Certainty = 0.0000(Not Clear) < succ>
```

[6388] The protein has no significant homology with any sequences in the GENPEPT database.

[6389] A related DNA sequence was identified in S. pyogenes <SEQ ID 3553> which encodes the amino acid sequence <SEQ ID 3554>. Analysis of this protein sequence reveals the following:

| Possible site: 52 | | | | |
|---|---|---|---|---|
| >>> Seems to have no N-terminal signal sequence | | | | |
| | INTEGRAL | Likelihood = −6.95 | Transmembrane | 92-108 (88-110) |
| | INTEGRAL | Likelihood = −6.69 | Transmembrane | 153-169 (151-177) |
| | INTEGRAL | Likelihood = −2.34 | Transmembrane | 183-199 (183-200) |

```
----- Final Results -----
                              bacterial membrane --- Certainty = 0.3781(Affirmative) < succ>
                                bacterial outside --- Certainty = 0.0000(Not Clear) < succ>
                            bacterial cytoplasm --- Certainty = 0.0000(Not Clear) < succ>
```

[6390] The protein has no significant homology with any sequences in the GENPEPT database.

[6391] An alignment of the GAS and GBS proteins is shown below.

| Identities = 135/217 (62%), Positives = 167/217 (76%), Gaps = 1/217 (0%) | | | |
|---|---|---|---|
| Query: | 1 | MTLQDLTKKNQEFVHIATNQLLADGKSDAEIKAILEEHLPEIIDNQKKGITARSLLGAPT | 60 |
| | | M LQ+LTKKNQEF+H ATN+L+ DGKSD +IK ILEE +P I++NQKKG+TAR+LLG PT | |
| Sbjct: | 1 | MELQELTKKNQEFIHTATNKLIQDGKSDEDIKLILEEAIPAILENQKKGVTARNLLGTPT | 60 |
| Query: | 61 | TWAASFTERPEDKARVSVQKNTNPWLMWLDTSLLFLGLVTALNGLMLLFGQSNVNTGLIS | 120 |
| | | WAASF++ P KA KNTNPWLMWLDTSLLF+G+V LNG+M F + TGLIS | |
| Sbjct: | 61 | AWAASFSQDPSQKA-AETDKNTNPWLMWLDTSLLFIGIVALLNGIMTFFNTNATVTGLIS | 119 |
| Query: | 121 | ILTLGFGGGAAMYVTYYYIYRHMGKPKSERPGWLKSFAVLALVMLVWFALFAVVPLLPAT | 180 |
| | | +L LGFGGGA+MY TYY+IYRH+GK KS RP W K A L+L ML+W AL++ LP + | |
| Sbjct: | 120 | LLALGFGGGASMYATYYFIYRHLGKDKSLRPSWFKIIAALSLAMLIWIALYSATAFLPTS | 179 |
| Query: | 181 | INPKLPEVVLFIIALASFGLRFYLQRKYNIQSSMAPV | 217 |
| | | +NP+LP + L II S LR+YLQRKYNIQ++M+PV | |
| Sbjct: | 180 | LNPQLPPLALLIIGGVSLALRYYLQRKYNIQNTMSPV | 216 |

[6392] A related GBS gene <SEQ ID 10787> and protein <SEQ ID 10788> were also identified. Analysis of this protein sequence reveals the following:

| Lipop: Possible site: −1 Crend: 8 | | | | |
|---|---|---|---|---|
| McG: Discrim Score: −9.94 | | | | |
| GvH: Signal Score (−7.5): −3.66 | | | | |
| Possible site: 29 | | | | |
| >>> Seems to have no N-terminal signal sequence | | | | |
| ALOM program count: 4 value: −12.26 threshold: 0.0 | | | | |
| | INTEGRAL | Likelihood = −12.26 | Transmembrane | 158-174 (151-182) |
| | INTEGRAL | Likelihood = −6.37 | Transmembrane | 93-109 (91-111) |
| | INTEGRAL | Likelihood = −5.68 | Transmembrane | 188-204 (184-205) |
| | INTEGRAL | Likelihood = −0.85 | Transmembrane | 118-134 (118-134) |
| | PERIPHERAL | Likelihood = 8.43 | 50 | |

```
modified ALOM score: 2.95
*** Reasoning Step: 3
----- Final Results -----
                              bacterial membrane --- Certainty = 0.5904(Affirmative) < succ>
                                bacterial outside --- Certainty = 0.0000(Not Clear) < succ>
                            bacterial cytoplasm --- Certainty = 0.0000(Not Clear) < succ>
```

[6393] Based on this analysis, it was predicted that these proteins and their epitopes could be useful antigens for vaccines or diagnostics.

### EXAMPLE 1145

[6394] A DNA sequence (GBSx1221) was identified in S. agalactiae <SEQ ID 3555> which encodes the amino acid sequence <SEQ ID 3556>. Analysis of this protein sequence reveals the following:

```
Possible site: 28
>>> Seems to have no N-terminal signal sequence
----- Final Results -----
                            bacterial cytoplasm --- Certainty = 0.1348(Affirmative) < succ>
                              bacterial membrane --- Certainty = 0.0000(Not Clear) < succ>
                                bacterial outside --- Certainty = 0.0000(Not Clear) < succ>
```

[6395] The protein has no significant homology with any sequences in the GENPEPT database.

[6396] No corresponding DNA sequence was identified in S. pyogenes.

[6397] Based on this analysis, it was predicted that this protein and its epitopes, could be useful antigens for vaccines or diagnostics.

### EXAMPLE 1146

[6398] A DNA sequence (GBSx1222) was identified in S. agalactiae <SEQ ID 3557> which encodes the amino acid sequence <SEQ ID 3558>. This protein is predicted to be excinuclease ABC (uvrA). Analysis of this protein sequence reveals the following:

```
Possible site: 18
>>> Seems to have no N-terminal signal sequence
----- Final Results -----
                            bacterial cytoplasm --- Certainty = 0.1738(Affirmative) < succ>
                              bacterial membrane --- Certainty = 0.0000(Not Clear) < succ>
                                bacterial outside --- Certainty = 0.0000(Not Clear) < succ>
```

[6399] A related GBS nucleic acid sequence <SEQ ID 10111> which encodes amino acid sequence <SEQ ID 10112> was also identified.

[6400] The protein has homology with the following sequences in the GENPEPT database.

| >GP: AAC67271 GB: AF017113 excinuclease ABC subunit A [Bacillus subtilis] | | | |
|---|---|---|---|
| Identities = 642/940 (68%), Positives = 785/940 (83%), Gaps = 3/940 (0%) | | | |
| Query: | 9 | DKLMIRGARAHNLKNISVDIPRDKLVVVTGLSGSGKSSLAFDTIYAEGQRRYVESLSAYA | 68 |
| | | D++ ++GARAHNLKNI V IPRD+LVVVTGLSGSGKSSLAFDTIYAEGQRRYVESLSAYA | |
| Sbjct: | 4 | DRIEVKGARAHNLKNIDVTIPRDQLVVVTGLSGSGKSSLAFDTIYAEGQRRYVESLSAYA | 63 |
| Query: | 69 | RQFLGNMEKPDVDSIDGLSPAISIDQKTTSKNPRSTVGTVTEINDYLRLLYARVGTPYCI | 128 |
| | | RQFLG M+KPDVD+I+GLSPAISIDQKTTS+NPRSTVGTVTEI DYLRLLYARVG P+C | |
| Sbjct: | 64 | RQFLGQMDKPDVDAIEGLSPAISIDQKTTSRNPRSTVGTVTEIYDYLRLLYARVGKPHCP | 123 |
| Query: | 129 | NGHGAITASSVEQIVDKVLALPERTKMQILAPIIRRKKGQHKSTFEKIQKDGYVRVRIDG | 188 |
| | | IT+ ++EQ+VD++L PERTK+Q+LAPI+ +KG H E+I+K GYVRVRIDG | |
| Sbjct: | 124 | EHGIEITSQTIEQMVDRILEYPERTKLQVLAPIVSGRKGAHVKVLEQIRKQGYVRVRIDG | 183 |
| Query: | 189 | DIHDVTEVPELSKSKMHNIDIVVDRLINKEGIRSRLFDSVEAALRLSDGYVVIDTMDGNE | 248 |
| | | ++ ++++ EL K+K H+I++V+DR++ KEG+ +RL DS+E ALRL +G V+ID + E | |
| Sbjct: | 184 | EMAELSDDIELEKNKKHSIEVVIDRIVVKEGVAARLSDSLETALRLGEGRVMIDVIGEEE | 243 |
| Query: | 249 | LLFSEHYSCPECGFTVPELEPRLFSFNAPFGSCPTCDGLGIKLEVDIDLVIPDRSKTLRE | 308 |
| | | L+FSEH++CP CGF++ ELEPRLFSFN+PFG+CPTCDGLG+KLEVD DLVIP++ +L+E | |
| Sbjct: | 244 | LMFSEHHACPHCGFSIGELEPRLFSFNSPFGACPTCDGLGMKLEVDADLVIPNQDLSLKE | 303 |
| Query: | 309 | GALVPWNPISSNYYPTMLEQAMTQFGVDMDTPFEKLSKAEQDLALYGSGEREFHFHYIND | 368 |
| | | A+ PW PISS YYP +LE T +G+DMD P + L K + D LYGSG+ +F Y ND | |
| Sbjct: | 304 | NAVAPWTPISSQYYPQLLEAVCTHYGIDMDVPVKDLPKHQLDKVLYGSGDDLIYFRYEND | 363 |
| Query: | 369 | FGGERNIDLPFEGVVNNINRRYHETNSDYTRNVMREYMNELKCNTCHGYRLNDQALCVRV | 428 |
| | | FG R ++ FEGV+ NI RRY ET SD+ R M +YN++ C TC GYRL +AL V + | |
| Sbjct: | 364 | FGQIREGEIQFEGVLRNIERRYKETGSDFIREQMEQYMSQKSCPTCKGYRLKKEALAVLI | 423 |
| Query: | 429 | GGEEGLNIGQVSDLSIADHLELLETLRLSSNEQLIARPIIKEIHDRLSFLNNVGLNYLNL | 488 |
| | | +G +IG++++LS+AD L + L LS + IA I++EI +RLSFL+ VGL+YL L | |
| Sbjct: | 424 | ---DGRHIGKITELSVADALAFFKDLTLSEKDMQIANLILREIVERLSFLDKVGLDYLTL | 480 |
| Query: | 489 | SRSAGTLSGGESQRIRLATQIGSLSGVLY+LDEPSIGLHQRDNDRLIDSLKKMRDLGNT | 548 |
| | | SR+AGTLSGGE+QRIRLATQIGS LSGVLYVLDEPSIGLHQRDNDRLI +LK MRDLGNT | |
| Sbjct: | 481 | SRAAGTLSGGEAQRIRLATQIGSRLSGVLYILDEPSIGLHQRDNDRLISALKNMRDLGNT | 540 |
| Query: | 549 | LIVVEHDEDTMMAADWLIDVGPGAGAFGGEIVASGTPKQVAKNTKSITGQYLSGKKVIPV | 608 |
| | | LIVVEHDEDTMMAAD+LID+GPGAG GG+++++GTP++V ++ S+TG YLSGKK IP+ | |
| Sbjct: | 541 | LIVVEHDEDTMMAADYLIDIGPGAGIHGGQVISAGTPEEVMEDPNSLTGSYLSGKKFIPL | 600 |
| Query: | 609 | PSERRVGNGRFLEIKGAAENNLQNLDVKFPLGKFIAVTGVSGSGKSTLINSILKKAVAQK | 668 |
| | | P ERR +GR++EIKGA+ENNL+ ++ KFPLG F AVTGVSGSGKSTL+N IL KA+AQK | |
| Sbjct: | 601 | PPERRKPDGRYIEIKGASENNLKKVNAKFPLGTFTAVTGVSGSGKSTLVNEILHKALAQK | 660 |
| Query: | 669 | LNRNSDKPGKYVSLEGIEYVORLIDIDQSPIGRTPRSNPATYTGVFDDIRDLFAQTNEAK | 728 |
| | | L++ KPG + ++G++++D++IDIDQ+PIGRTPRSNPATYTGVFDDIRD+FAQTNEAK | |
| Sbjct: | 661 | LHKAKAKPGSHKEIKGLDHLDKVIDIDQAPIGRTPRSNPATYTGVFDDIRDVFAQTNEAK | 720 |
| Query: | 729 | IRGYKKGRFSFNVKGGRCESCSGDGIIKIEMHFLPDVYVPCEVCHGTRYNSETLEVNYKE | 788 |
| | | +RGYKKGRFSFNVRGGRCE+C GDGIIKIEMHFLPDVYVPCEVCHG RYN ETLEV YK | |
| Sbjct: | 721 | VRGYKKGRFSFNVKGGRCEACRGDGIIKIEMHFLPDVYVPCEVCHGKRYNRETLEVTYKG | 780 |
| Query: | 789 | KNIAQILDNTVNDAVTFFAAIPKIARKLQTIKDVGLGYVTLGQPATTLSGGEAQRMKLAS | 848 |
| | | K+I+ +LDMTV DA++FF IPKI RKLQT+ DVGLGY+TLGQPATTLSGGEAQR+KLAS | |
| Sbjct: | 781 | KSISDVLDMTVEDALSFFENIPKIKRKLQTLYDVGLGYITLGQPATTLSGGEAQRVKLAS | 840 |
| Query: | 849 | ELHKRSTGKSLYILDEPTTGLHADDIARLLKVLDRFVDDGNTVLVIEHNLDVIKTADHII | 908 |
| | | ELHKRSTG++LYILDEPTTGLH DDIARLL VL R VD+G+TVLVIEHNLD+IKTAD+I+ | |
| Sbjct: | 841 | ELHKRSTGRTLYILDEPTTGLHVDDIARLLVVLQRLVDNGDTVLVIEHNLDIIKTADYIV | 900 |
| Query: | 909 | DLGPEGGIGGGQIVAIGTPEEVAENPKSYTGYYLKEKLAR | 948 |
| | | DLGPEGG GGG IVA GTPEE+ E +SYTG YLK + R | |
| Sbjct: | 901 | DLGPEGGAGGGTIVASGTPEEITEVEESYTGRYLKPVIER | 940 |

[6401] A related DNA sequence was identified in S. pyogenes <SEQ ID 3559> which encodes the amino acid sequence <SEQ ID 3560>. Analysis of this protein sequence reveals the following:

```
Possible site: 52
>>> Seems to have no N-terminal signal sequence
----- Final Results -----
                            bacterial cytoplasm --- Certainty = 0.1138(Affirmative) < succ>
                              bacterial membrane --- Certainty = 0.0000(Not Clear) < succ>
                                bacterial outside --- Certainty = 0.0000(Not Clear) < succ>
```

[6402] An alignment of the GAS and GBS proteins is shown below.

| Identities = 835/940 (88%), Positives = 896/940 (94%) | | | |
|---|---|---|---|
| Query: | 7 | MQDKLMIRGARAHNLKNISVDIPRDKLVVVTGLSGSGKSSLAFDTIYAEGQRRYVESLSA | 66 |
| | | MQ+K++I GARAHNLKNI V+IPRDKLVVVTGLSGSGKSSLAFDTIYAEGQRRYVESLSA | |
| Sbjct: | 11 | MQNKIIIHGARAHNLKNIDVEIPRDKLVVVTGLSGSGKSSLAFDTIYAEGQRRYVESLSA | 70 |
| Query: | 67 | YARQFLGNMEKPDVDSIDGLSPAISIDQKTTSKNPRSTVGTVTEINDYLRLLYARVGTPY | 126 |
| | | YARQFLGNMEKPDVDSIDGLSPAISIDQKTTSKNPRSTVGTVTEINDYLRLLYARVGTPY | |
| Sbjct: | 71 | YARQFLGNMEKPDVDSIDGLSPAISIDQKTTSKNPRSTVGTVTEINDYLRLLYARVGTPY | 130 |
| Query: | 127 | CINGHGAITASSVEQIVDKVLALPERTKMQILAPIIRRKKGQHKSTFEKIQKDGYVRVRI | 186 |
| | | CINGHGAITASS EQIV++VLALPERT+MQILAP++RRKKGQHK+ FEKIQKDGYVRVR+ | |
| Sbjct: | 131 | CINGHGAITASSAEQIVEQVLALPERTRMQILAPVVRRKKGQHKTVFEKIQKDGYVRVRV | 190 |
| Query: | 187 | DGDIHDVTEVPELSKSKMHNIDIVVDRLINKEGIRSRLFDSVEAALRLSDGYVVIDTMDG | 246 |
| | | DGDI DVTEVPELSKSKMHNI++V+DRL+NK+GIRSRLFDSVEAALRL DGY++IDTMDG | |
| Sbjct: | 191 | DGDIFDVTEVPELSKSKMHNIEVVIDRLVNKDGIRSRLFDSVEAALRLGDGYLMIDTMDG | 250 |
| Query: | 247 | NELLFSEHYSCPECGFTVPELEPRLFSFNAPFGSCPTCDGLGIKLEVDIDLVIPDRSKTL | 306 |
| | | NELLFSEHYSCP CGFTVPELEPRLFSFNAPFGSCPTCDGLGIKLEVD+DLV+PD SK+L | |
| Sbjct: | 251 | NELLFSEHYSCPVCGFTVPELEPRLFSFNAPFGSCPTCDGLGIKLEVDLDLVVPDPSKSL | 310 |
| Query: | 307 | REGALVPWNPISSNYYPTMLEQAMTQFGVDMDTPFEKLSKAEQDLALYGSGEREFHFHYI | 366 |
| | | REGAL PWNPISSNYYPTMLEQAM FGVDMDTPFE L++ E+DL LYGSG+REFHFHY+ | |
| Sbjct: | 311 | REGALAPWNPISSNYYPTMLEQAMASFGVDMDTPFEALTEEERDLVLYGSGDREFHFHYV | 370 |
| Query: | 367 | NDFGGERNIDLPFEGVVNNINRRYHETNSDYTRNVMREYMNELKCNTCHGYRLNDQALCV | 426 |
| | | NDFGGERNID+PFEGVV N+NRRYHETNSDYTRNVMR YMNEL C TCHGYRLNDQALCV | |
| Sbjct: | 371 | NDFGGERNIDIPFEGVVTNVNRRYHETNSDYTRNVMRGYMNELTCATCHGYRLNDQALCV | 430 |
| Query: | 427 | RVGGEEGLNIGQVSDLSIADHLELLETLRLSSNEQLIARPIIKEIHDRLSFLNNVGLNYL | 486 |
| | | VGGEEG +IGQ+S+LSIADHL+LLE L L+ NE IA+PI+KEIHDRL+FLNNVGLNYL | |
| Sbjct: | 431 | HVGGEEGTHIGQISELSIADHLQLLEELELTENESTIAKPIVKEIHDRLTFLNNVGLNYL | 490 |
| Query: | 487 | NLSRSAGTLSGGESQRIRLATQIGSNLSGVLYVLDEPSIGLHQRDNDRLIDSLKKMRDLG | 546 |
| | | LSR+AGTLSGGESQRIRLATQIGSNLSGVLY+LDEPSIGLHQRDNDRLI+SLKKMRDLG | |
| Sbjct: | 491 | TLSRAAGTLSGGESQRIRLATQIGSNLSGVLYILDEPSIGLHQRDNDRLIESLKKMRDLG | 550 |
| Query: | 547 | NTLIVVEHDEDTMMAADWLIDVGPGAGAFGGEIVASGTPKQVAKNTKSITGQYLSGKKVI | 606 |
| | | NTLIVVEHDEDTMM ADWLIDVGPGAG FGGEI ASGTPKQVAKN KSITGQYLSGKK I | |
| Sbjct: | 551 | NTLIVVEHDEDTMMQADWLIDVGPGAGEFGGEITASGTPKQVAKNKKSITGQYLSGKKFI | 610 |
| Query: | 607 | PVPSERRVGNGRFLEIKGAAENNLQNLDVKFPLGKFIAVTGVSGSGKSTLINSILKKAVA | 666 |
| | | PVP ERR GNGRF+EIKGAA+NNLQ+LDV+FPLGKFIAVTGVSGSGKSTL+NSILKKAVA | |
| Sbjct: | 611 | PVPLERRSGNGRFIEIKGAAQNNLQSLDVRFPLGKFIAVTGVSGSGKSTLVNSILKKAVA | 670 |
| Query: | 667 | QKLNRNSDKPGKYVSLEGIEYVDRLIDIDQSPIGRTPRSNPATYTGVFDDIRDLFAQTNE | 726 |
| | | QKLNRN+DKPGKY S+ GIE+++RLIDIDQSPIGRTPRSNPATYTGVFDDIRDLFAQTNE | |
| Sbjct: | 671 | QKLNRNADKPGKYHSISGIEHIERLIDIDQSPIGRTPRSNPATYTGVFDDIRDLFAQTNE | 730 |
| Query: | 727 | AKIRGYKKGRFSFNVKGGRCESCSGDGIIKIEMHFLPDVYVPCEVCHGTRYNSETLEVHY | 786 |
| | | AKIRGYKKGRFSFNVKGGRCE+CSGDGIIKIEMHFLPDVYVPCEVCHG RYNSETLEVHY | |
| Sbjct: | 731 | AKIRGYKKGRFSFNVKGGRCEACSGDGIIKIEMHFLPDVYVPCEVCHGRRYNSETLEVHY | 790 |
| Query: | 787 | KEKNIAQILDMTVNDAVTFFAAIPKIARKLQTIKDVGLGYVTLGQPATTLSGGEAQRMKL | 846 |
| | | K KNIA++LDMTV+DA+ FF+AIPKIARK+QTIKDVGLGYVTLGQPATTLSGGEAQRMKL | |
| Sbjct: | 791 | KGKNIAEVLDMTVDDALVFFSAIPKIARKIQTIKDVGLGYVTLGQPATTLSGGEAQRMKL | 850 |
| Query: | 847 | ASELHKRSTGKSLYILDEPTTGLHADDIARLLKVLDRFVDDGNTVLVIEHNLDVIKTADH | 906 |
| | | ASELHKRSTGKSLYILDEPTTGLH DDIARLLKVL+RFVDDGNTVLVIEHNLDVIK+ADH | |
| Sbjct: | 851 | ASELHKRSTGKSLYILDEPTTGLHTDDIARLLKVLERFVDDGNTVLVIEHNLDVIKSADH | 910 |
| Query: | 907 | IIDLGPEGGIGGGQIVAIGTPEEVAENPKSYTGYYLKEKL | 946 |
| | | IIDLGPEGG GGGQIVA GTPEEVA+ +SYTG+YLK KL | |
| Sbjct: | 911 | IIDLGPEGGDGGGQIVATGTPEEVAQVKESYTGHYLKVKL | 950 |

[6403] Based on this analysis, it was predicted that these proteins and their epitopes could be useful antigens for vaccines or diagnostics.

### EXAMPLE 1147

[6404] A DNA sequence (GBSx1223) was identified in S. agalactiae <SEQ ID 3561> which encodes the amino acid sequence <SEQ ID 3562>. Analysis of this protein sequence reveals the following:

| Possible site: 60 | | | | |
|---|---|---|---|---|
| >>> Seems to have an uncleavable N-term signal seq | | | | |
| | INTEGRAL | Likelihood = −10.40 | Transmembrane | 471-487 (463-490) |
| | INTEGRAL | Likelihood = −9.29 | Transmembrane | 246-262 (242-264) |
| | INTEGRAL | Likelihood = −7.27 | Transmembrane | 183-199 (178-207) |
| | INTEGRAL | Likelihood = −5.41 | Transmembrane | 351-367 (349-370) |
| | INTEGRAL | Likelihood = −4.41 | Transmembrane | 87-103 (83-107) |
| | INTEGRAL | Likelihood = −3.24 | Transmembrane | 375-391 (374-392) |
| | INTEGRAL | Likelihood = −2.97 | Transmembrane | 17-33 (16-35) |
| | INTEGRAL | Likelihood = −2.28 | Transmembrane | 420-436 (420-438) |
| | INTEGRAL | Likelihood = −1.97 | Transmembrane | 320-336 (320-337) |
| | INTEGRAL | Likelihood = −1.75 | Transmembrane | 214-230 (214-230) |
| | INTEGRAL | Likelihood = −1.75 | Transmembrane | 288-304 (288-304) |
| | INTEGRAL | Likelihood = −1.70 | Transmembrane | 110-126 (110-126) |
| | INTEGRAL | Likelihood = −0.69 | Transmembrane | 152-168 (151-168) |

```
----- Final Results -----
                              bacterial membrane --- Certainty = 0.5161(Affirmative) < succ>
                                bacterial outside --- Certainty = 0.0000(Not Clear) < succ>
                            bacterial cytoplasm --- Certainty = 0.0000(Not Clear) < succ>
```

[6405] The protein has homology with the following sequences in the GENPEPT database.

| >GP: CAB12192 GB: Z99106 similar to multidrug resistance | | | |
|---|---|---|---|
| protein [Bacillus subtilis] | | | |
| Identities = 198/481 (41%), Positives = 300/481 (62%), Gaps = 24/481 (4%) | | | |
| Query: | 9 | IHGKPYNRTAMITLLLIATFAGVLNQTSLGTAIPTLMNSFNISLSTAQQATTWFLLANGI | 68 |
| | | I KP+NR+ ++ +LL F +LNQT L TA+P +M FN+ + AQ TT F+L NGI | |
| Sbjct: | 5 | IEQKPFNRSVIVGILLAGAFVAILNQTLLITALPHIMRDFNVDANQAQWLTTSFMLTNGI | 64 |
| Query: | 69 | MIPVSAYLATRFSTKWLYVTSYVVLLIGLLMTTLAPTSNWNLFLVGRIIQAISVGISMPL | 128 |
| | | +IP++A+L +F+++ L +T+ + G ++ AP N+ + L RIIQA GI MPL | |
| Sbjct: | 65 | LIPITAFLIEKFTSRALLITAMSIFTAGTVVGAFAP--NFPVLLTARIIQAAGAGIMMPL | 122 |
| Query: | 129 | MQVVMVNVFPPEQRGAAMGLNGLVVGLAPAIGPTLAGWILKQEFHFAGHDLTWRAIFLLP | 188 |
| | | MQ V + +FP E+RG AMG+ GLV+ APAIGPTL+GW ++ +WR++F + | |
| Sbjct: | 123 | MQTVFLTIFPIEKRGQAMGMVGLVISFAPAIGPTLSGWAVEA--------FSWRSLFYII | 174 |
| Query: | 189 | LLILTVTTILSPFVLKDVVDNKSVKLEVPSLILSIIGFGSFLWGFTNVATYGWGDIGYVI | 248 |
| | | L + IL+ ++K+V + ++++ S+ILS GFG L+GF++V +YGW +I | |
| Sbjct: | 175 | LPFAVIDLILASILMKNVTTLRKTQIDILSVILSTFGFGGLLYGFSSVGSYGWSSSTVLI | 234 |
| Query: | 249 | SPIMVGIIFIALFIHRQLKLETPFLDIRVFKNKQFSVTTAAIALSMMAMMGVEMMLPLYL | 308 |
| | | S ++VG+I + LFI RQ+KL+ P L+ RVF FS+TT L ++G E +LPLY | |
| Sbjct: | 235 | S-LLVGVIALLLFITRQMKLKKPMLEFRVFTFGVFSLTTLLGTLVFALLIGTETILPLYT | 293 |
| Query: | 309 | QNVHGLSALDSGLALLPGALMMGIVSPISGAVYDKVGARRMAMIGFTILGVATLPFVFLT | 368 |
| | | QNV ++A D+GL LLPGA++MG +SPI G ++D+VG R +A+ GF I+ + +LPF+ LT | |
| Sbjct: | 294 | QNVRDVTAFDTGLMLLPGAVVMGFMSPIIGRIFDRVGGRGLAIAGFCIIFLTSLPFMQLT | 353 |
| Query: | 369 | TTTPDHFITLLYAVRMFGIAMVMMPLTASAMSALPPHEAAHGTAANNTARQIASAVVVAL | 428 |
| | | T +I +LY VR+ G AM+MMP+T + ++ALP H HGTA NNT RQ+ ++ AL | |
| Sbjct: | 354 | DHTSLAWIVVLYTVRLLGTAMIMMPVTTAGINALPRHLIPHGTAMNNTIRQVGGSIGTAL | 413 |
| Query: | 429 | LSSVAQNIITNNKPSKDLLTMNPLKYANQMLNASLDGFHVSFAIGFVFAVLGLLVSLFLRK | 489 |
| | | L SV N + + +A+L G + +F + V A++G L+S L+K | |
| Sbjct: | 414 | LVSVMSNQAAH-------------AGTTNVKHAALHGMNAAFIVAAVIALVGFLLSFTLKK | 461 |

[6406] There is also homology to SEQ ID 46.

[6407] Based on this analysis, it was predicted that this protein and its epitopes, could be useful antigens for vaccines or diagnostics.

### EXAMPLE 1148

[6408] A DNA sequence (GBSx1224) was identified in S. agalactiae <SEQ ID 3563> which encodes the amino acid sequence <SEQ ID 3564>. Analysis of this protein sequence reveals the following:

| Possible site: 47 | | | | |
|---|---|---|---|---|
| >>> Seems to have an uncleavable N-term signal seq | | | | |
| | INTEGRAL | Likelihood = −8.81 | Transmembrane | 8-24 (5-30) |
| | INTEGRAL | Likelihood = −7.32 | Transmembrane | 36-52 (31-54) |

```
----- Final Results -----
                              bacterial membrane --- Certainty = 0.4524(Affirmative) < succ>
                                bacterial outside --- Certainty = 0.0000(Not Clear) < succ>
                            bacterial cytoplasm --- Certainty = 0.0000(Not Clear) < succ>
```

[6409] A related GBS nucleic acid sequence <SEQ ID 10109> which encodes amino acid sequence <SEQ ID 10110> was also identified.

[6410] A related GBS gene <SEQ ID 8743> and protein <SEQ ID 8744> were also identified. Analysis of this protein sequence reveals the following:

| Lipop: Possible site: −1 Crend: 8 | | | | |
|---|---|---|---|---|
| McG: Discrim Score: 9.52 | | | | |
| GvH: Signal Score (−7.5): −3.4 | | | | |
| Possible site: 22 | | | | |
| >>> Seems to have an uncleavable N-term signal seq | | | | |
| ALOM program Count: 1 value: −7.32 threshold: 0.0 | | | | |
| | INTEGRAL | Likelihood = −7.32 | Transmembrane | 11-27 (6-29) |
| | PERIPHERAL | Likelihood = 11.19 | 130 | |

```
modified ALOM score: 1.96
*** Reasoning Step: 3
----- Final Results -----
                              bacterial membrane --- Certainty = 0.3930(Affirmative) < succ>
                                bacterial outside --- Certainty = 0.0000(Not Clear) < succ>
                            bacterial cytoplasm --- Certainty = 0.0000(Not Clear) < succ>
```

[6411] The protein has no significant homology with any sequences in the GENPEPT database.

[6412] No corresponding DNA sequence was identified in S. pyogenes.

[6413] SEQ ID 8744 (GBS29) was expressed in E. coli as a His-fusion product. SDS-PAGE analysis of total cell extract is shown in FIG. 7 (lane 2; MW 25.6 kDa). It was also expressed in E. coli as a GST-fusion product. SDS-PAGE analysis of total cell extract is shown in FIG. 15 (lane 6; MW 51 kDa).

[6414] Based on this analysis, it was predicted that these proteins and their epitopes could be useful antigens for vaccines or diagnostics.

### EXAMPLE 1149

[6415] A DNA sequence (GBSx1225) was identified in S. agalactiae <SEQ ID 3565> which encodes the amino acid sequence <SEQ ID 3566>. This protein is predicted to be aminopeptidase P (pepQ). Analysis of this protein sequence reveals the following:

```
Possible site: 41
>>> Seems to have no N-terminal signal sequence
----- Final Results -----
                            bacterial cytoplasm --- Certainty = 0.0724(Affirmative) < succ>
                              bacterial membrane --- Certainty = 0.0000(Not Clear) < succ>
                                bacterial outside --- Certainty = 0.0000(Not Clear) < succ>
```

[6416] The protein has homology with the following sequences in the GENPEPT database.

| >GP: CAA70068 GB: Y08842 aminopeptidase P [Lactococcus lactis] | | | |
|---|---|---|---|
| Identities = 44/126 (34%), Positives = 78/126 (60%) | | | |
| Query: | 6 | RLTRCQTAISQLSCDALLITNLTNIFYLTGFSGTNATVLISPKHRIFVTDSRYALIAKNT | 65 |
| | | R+ + + + + D+LLIT++ NIFYLTGFSGT TV ++ K IF+TDSRY+ +A+ | |
| Sbjct: | 2 | RIEKLKVKMLTENIDSLLITDMKNIFYLTGFSGTAGTVFLTQKRNIFMTDSRYSEMARGL | 61 |
| Query: | 66 | VREFDIIISREPLAAILKIIRDDALIAIGFETDISYHMYKHMVEVFEDYRLIEAPSVVEK | 125 |
| | | ++ F+II +R+P++ + ++ +++ + FE + Y +K + + L + V + | |
| Sbjct: | 62 | IKNFEIIETRDPISLLTELSASESVKNMAFEETVDYAFFKRLSKAATKLDLFSTSNFVLE | 121 |
| Query: | 126 | LRMIKD | 131 |
| | | LR IKD | |
| Sbjct: | 122 | LRQIKD | 127 |

[6417] There is also homology to SEQ ID 3568.

[6418] Based on this analysis, it was predicted that this protein and its epitopes, could be useful antigens for vaccines or diagnostics.

### EXAMPLE 1150

[6419] A DNA sequence (GBSx1226) was identified in S. agalactiae <SEQ ID 3569> which encodes the amino acid sequence <SEQ ID 3570>. This protein is predicted to be aminopeptidase P (pepQ-2). Analysis of this protein sequence reveals the following:

```
Possible site: 44
>>> Seems to have no N-terminal signal sequence
----- Final Results -----
                            bacterial cytoplasm --- Certainty = 0.2508(Affirmative) < succ>
                              bacterial membrane --- Certainty = 0.0000(Not Clear) < succ>
                                bacterial outside --- Certainty = 0.0000(Not Clear) < succ>
```

[6420] The protein has homology with the following sequences in the GENPEPT database.

| >GP: CAA70068 GB: Y08842 aminopeptidase P [Lactococcus lactis] | | | |
|---|---|---|---|
| Identities = 131/205 (63%), Positives = 163/205 (78%), Gaps = 3/205 (1%) | | | |
| Query: | 2 | LDFIKPDRTTELQVANFLDFRMRELGATGPSFDFIVASGYRSAMPHGVASQKTIQSGETL | 61 |
| | | L FI+P RT E++VANFLDF+MR+L A+G SF+ IVASG RS++PHGVA+ K IQ G+ + | |
| Sbjct: | 149 | LRFIEPGRT-EIEVANFLDFKMRDLEASGISFETIVASGKRSSLPHGVATSKMIQFGDPV | 207 |
| Query: | 62 | TLDFGCYYQHYVSDMTRTIHIGHVTDQEREIYDIVLKSNQAIIGNVKSGMKRCDYDYLAR | 121 |
| | | T+DFGCYY+HY SDMTRTI +G V D+ R IY+ V K+N+A+I VK+GM YD + R | |
| Sbjct: | 208 | TIDFGCYYEHYASDMTRTIFVGSVDDKMRTIYETVRKANEALIKQVKAGMTYAQYDNIPR | 267 |
| Query: | 122 | QVIENSGYGNHFTHGIGHGMGLDVHEIPYFGKS--EGVIASGMVVTDEPGIYLDNKYGVR | 179 |
| | | +VIE + +G +FTHGIGHG+GLDVHEIPYF +S E + SGMV+TDEPGIYL GVR | |
| Sbjct: | 268 | EVIEKADFGQYFTHGIGHGLGLDVHEIPYFNQSMTENQLRSGMVITDEPGIYLPEFGGVR | 327 |
| Query: | 180 | IEDDLLITETGCEVLTSAPKELIVL | 204 |
| | | IEDDLL+TE GCEVLT APKELIV+ | |
| Sbjct: | 328 | IEDDLLVTENGCEVLTKAPKELIVI | 352 |

[6421] A related DNA sequence was identified in S. pyogenes <SEQ ID 3567> which encodes the amino acid sequence <SEQ ID 3568>. Analysis of this protein sequence reveals the following:

```
Possible Site: 45
>>> Seems to have no N-terminal signal sequence
----- Final Results -----
                            bacterial cytoplasm --- Certainty = 0.1450(Affirmative) < succ>
                              bacterial membrane --- Certainty = 0.0000(Not Clear) < succ>
                                bacterial outside --- Certainty = 0.0000(Not Clear) < succ>
```

[6422] An alignment of the GAS and GBS proteins is shown below.

| Identities = 145/203 (71%), Positives = 171/203 (83%) | | | |
|---|---|---|---|
| Query: | 2 | LDFIKPDRTTELQVANFLDFRMRELGATGPSFDFIVASGYRSAMPHGVASQKTIQSGETL | 61 |
| | | LDFIKP TTE +ANFLDFRMR+ GA+G SFD IVASGY SAMPHG AS K IQ+ E+L | |
| Sbjct: | 168 | LDFIKPGTTTERDLANFLDFRMRQYGASGTSFDIIVASGYLSAMPHGRASDKVIQNKESL | 227 |
| Query: | 62 | TLDFGCYYQHYVSDMTRTIHIGHVTDQEREIYDIVLKSNQAIIGNVKSGMKRCDYDYLAR | 121 |
| | | T+DFGCYY HYVSDMTRTIHIG VTD+EREIY +VL +N+A+I +GM D+D + R | |
| Sbjct: | 228 | TMDFGCYYNHYVSDMTRTIHIGQVTDEEREIYALVLAANKALIAKASAGMTYSDFDGIPR | 287 |
| Query: | 122 | QVIENSGYGNHFTHGIGHGMGLDVHEIPYFGKSEGVIASGMVVTDEPGIYLDNKYGVRIE | 181 |
| | | Q+I +GYG+ FTHGIGHG+GLD+HE P+FGKSE ++ +GMVVTDEPGIYLDNKYGVRIE | |
| Sbjct: | 288 | QLITEAGYGSRETHGIGHGIGLDIHENPFFGKSEQLLQAGMVVTDEPGIYLDNKYGVRIE | 347 |
| Query: | 182 | DDLLITETGCEVLTSAPKELIVL | 204 |
| | | DDL+IT+TGC+VLT APKELIVL | |
| Sbjct: | 348 | DDLVITKTGCQVLTLAPKELIVL | 370 |

[6423] Based on this analysis, it was predicted that these proteins and their epitopes could be useful antigens for vaccines or diagnostics.

### EXAMPLE 1151

[6424] A DNA sequence (GBSx1227) was identified in S. agalactiae <SEQ ID 3571> which encodes the amino acid sequence <SEQ ID 3572>. This protein is predicted to be yfhC protein (comEB). Analysis of this protein sequence reveals the following:

```
Possible site: 14
>>> Seems to have no N-terminal signal sequence
----- Final Results -----
                            bacterial cytoplasm --- Certainty = 0.1401(Affirmative) < succ>
                              bacterial membrane --- Certainty = 0.0000(Not Clear) < succ>
                                bacterial outside --- Certainty = 0.0000(Not Clear) < succ>
```

[6425] The protein has homology with the following sequences in the GENPEPT database.

| >GP: BAB05053 GB: AP001511 late competence operon required for DNA | | | |
|---|---|---|---|
| binding and uptake [Bacillus halodurans] | | | |
| Identities = 78/146 (53%), Positives = 107/146 (72%) | | | |
| Query: | 1 | MNRLSWEDYFMANAELISKRSTCDRAFVGAVLVKNNRIIATGYNGGVSETDNCNEVGHYM | 60 |
| | | MNR+SW+ YFMA + L++ RSTC R VGA +V++ RIIA GYNG +S +C + G Y+ | |
| Sbjct: | 1 | MNRISWDQYFMAQSHLLALRSTCTRLMVGATIVRDKRIIAGGYNGSISGGPHCIDEGCYV | 60 |
| Query: | 61 | EDGNCIRTVHAEMNALIQCAKEGISTNNTEIYVTHFPCINCTKALLQAGVKKITYKANYR | 120 |
| | | +GHCIRT+HAE+NAL+QCAK G+ T EIYVTHFPC+NCTKA++Q+G+KK+ Y +Y+ | |
| Sbjct: | 61 | VEGHCIRTIHAEVNALLQCAKFGVPTEGAEIYVTHFPCVNCTKAIIQSGIKKVYYATDYK | 120 |
| Query: | 121 | PHPFAIELMEAKGVAYVQHDVPEVTL | 146 |
| | | P+A EL GV Q ++ E+ L | |
| Sbjct: | 121 | NSPYAEELFRDAGVDVEQVELEEMIL | 146 |

[6426] A related DNA sequence was identified in S. pyogenes <SEQ ID 3573> which encodes the amino acid sequence <SEQ ID 3574>. Analysis of this protein sequence reveals the following:

```
Possible site: 30
>>> Seems to have no N-terminal signal sequence
----- Final Results -----
                            bacterial cytoplasm --- Certainty = 0.3155(Affirmative) < succ>
                              bacterial membrane --- Certainty = 0.0000(Not Clear) < succ>
                                bacterial outside --- Certainty = 0.0000(Not Clear) < succ>
```

[6427] An alignment of the GAS and GBS proteins is shown below.

| Identities = 133/146 (91%), Positives = 140/146 (95%) | | | |
|---|---|---|---|
| Query: | 2 | NRLSWEDYFMANAELISKRSTCDRAFVGAVLVKNNRIIATGYNGGVSETDNCNEVGHYME | 61 |
| | | NRLSW+DYFMANAELISKRSTCDRAFVGAVLVK+NRIIATGYNGGVS TDNCNE GHYME | |
| Sbjct: | 18 | NRLSWQDYFMANAELISKRSTCDRAFVGAVLVKDNRIIATGYNGGVSATDNCNEAGHYME | 77 |
| Query: | 62 | DGHCIRTVHAEMNALIQCAKEGISTNNTEIYVTHFPCINCTKALLQAGVKKITYKANYRP | 121 |
| | | DGHCIRTVHAEMNALIQCAKEGIST+ TEIYVTHFPCINCTKALLQAG+ KITYKA+YRP | |
| Sbjct: | 78 | DGHCIRTVHAEMNALIQCAKEGISTDGTEIYVTHFPCINCTKALLQAGITKITYKAHYRP | 137 |
| Query: | 122 | HPFAIELMEAKGVAYVQHDVPEVTLG | 147 |
| | | HPFAIELME KGVAYVQHDVP++ LG | |
| Sbjct: | 138 | HPFAIELMEKKGVAYVQHDVPQIVLG | 163 |

[6428] Based on this analysis, it was predicted that these proteins and their epitopes could be useful antigens for vaccines or diagnostics.

### EXAMPLE 1152

[6429] A DNA sequence (GBSx1228) was identified in S. agalactiae <SEQ ID 3575> which encodes the amino acid sequence <SEQ ID 3576>. Analysis of this protein sequence reveals the following:

```
Possible site: 13
>>> Seems to have no N-terminal signal sequence
----- Final Results -----
                            bacterial cytoplasm --- Certainty = 0.2454(Affirmative) < succ>
                              bacterial membrane --- Certainty = 0.0000(Not Clear) < succ>
                                bacterial outside --- Certainty = 0.0000(Not Clear) < succ>
```

[6430] The protein has no significant homology with any sequences in the GENPEPT database.

[6431] No corresponding DNA sequence was identified in S. pyogenes.

[6432] Based on this analysis, it was predicted that this protein and its epitopes, could be useful antigens for vaccines or diagnostics.

### EXAMPLE 1153

[6433] A DNA sequence (GBSx1229) was identified in S. agalactiae <SEQ ID 3577> which encodes the amino acid sequence <SEQ ID 3578>. Analysis of this protein sequence reveals the following:

| Possible site: 25 | | | | |
|---|---|---|---|---|
| >>> Seems to have an uncleavable N-term signal seq | | | | |
| | INTEGRAL | Likelihood = −1.65 | Transmembrane | 4-20 (3-21) |

```
----- Final Results -----
                              bacterial membrane --- Certainty = 0.1659(Affirmative) < succ>
                                bacterial outside --- Certainty = 0.0000(Not Clear) < succ>
                            bacterial cytoplasm --- Certainty = 0.0000(Not Clear) < succ>
```

[6434] The protein has no significant homology with any sequences in the GENPEPT database.

[6435] No corresponding DNA sequence was identified in S. pyogenes.

[6436] Based on this analysis, it was predicted that this protein and its epitopes, could be useful antigens for vaccines or diagnostics.

### EXAMPLE 1154

[6437] A DNA sequence (GBSx1230) was identified in S. agalactiae <SEQ ID 3579> which encodes the amino acid sequence <SEQ ID 3580>. Analysis of this protein sequence reveals the following:

```
Possible site: 54
>>> Seems to have an uncleavable N-term signal seq
----- Final Results -----
                              bacterial membrane --- Certainty = 0.0000(Not Clear) < succ>
                                bacterial outside --- Certainty = 0.0000(Not Clear) < succ>
                            bacterial cytoplasm --- Certainty = 0.0000(Not Clear) < succ>
```

[6438] The protein has homology with the following sequences in the GENPEPT database.

| >GP: BAB04699 GB: AP001510 unknown conserved protein [Bacillus halodurans] | | | |
|---|---|---|---|
| Identities = 47/94 (50%), Positives = 65/94 (69%) | | | |
| Query: | 2 | LLPVGSVVYLIDGNQKLVIVNRGAIVEQEGQEVYFDYLGGIFPEGLNLEQVYYFNQEDID | 61 |
| | | +LP+GS+VYL +G KL+I+NRG I+E G+ FDY G +P+GL ++V+YFN E+ID | |
| Sbjct: | 1 | MLPIGSIVYLKEGTSKLMILNRGPILEANGENKMFDYSGCFYPQGLVPDKVFYFNHENID | 60 |
| Query: | 62 | EVVFEGYHDEEEERVSRLIEKWKNTEGKNLPKGK | 95 |
| | | EVVFEG+ D+EE+R +L WK KGK | |
| Sbjct: | 61 | EVVFEGFQDDEEQRFQKLFHDWKKENKDRYVKGK | 94 |

[6439] No corresponding DNA sequence was identified in S. pyogenes.

[6440] Based on this analysis, it was predicted that this protein and its epitopes, could be useful antigens for vaccines or diagnostics.

### EXAMPLE 1155

[6441] A DNA sequence (GBSx1231) was identified in S. agalactiae <SEQ ID 3581> which encodes the amino acid sequence <SEQ ID 3582>. Analysis of this protein sequence reveals the following:

```
Possible site: 15
>>> Seems to have no N-terminal signal sequence
----- Final Results -----
                            bacterial cytoplasm --- Certainty = 0.3560(Affirmative) < succ>
                              bacterial membrane --- Certainty = 0.0000(Not Clear) < succ>
                                bacterial outside --- Certainty = 0.000(Not Clear) < succ>
```

[6442] The protein has no significant homology with any sequences in the GENPEPT database.

[6443] No corresponding DNA sequence was identified in S. pyogenes.

[6444] Based on this analysis, it was predicted that this protein and its epitopes, could be useful antigens for vaccines or diagnostics.

### EXAMPLE 1156

[6445] A DNA sequence (GBSx1232) was identified in S. agalactiae <SEQ ID 3583> which encodes the amino acid sequence <SEQ ID 3584>. This protein is predicted to be elongation factor p (efp). Analysis of this protein sequence reveals the following:

```
Possible site: 29
>>> Seems to have no N-terminal signal sequence
----- Final Results -----
                            bacterial cytoplasm --- Certainty = 0.3067(Affirmative) < succ>
                              bacterial membrane --- Certainty = 0.0000(Not Clear) < succ>
                                bacterial outside --- Certainty = 0.0000(Not Clear) < succ>
```

[6446] The protein has homology with the following sequences in the GENPEPT database.

| >GP: CAB14376 GB: Z99116 elongation factor P [Bacillus subtilis] | | | |
|---|---|---|---|
| Identities = 89/186 (47%), Positives = 120/186 (63%), Gaps = 1/186 (0%) | | | |
| Query: | 1 | MIEASKLKAGMTFETADGKLIRVLEASHHKPGKGNTIMRMKLRDVRTGSTFDTSYRPEEK | 60 |
| | | MI + + G+T + DG + RV++ H KPGKG +R KLR++RTG+ + ++R BK | |
| Sbjct: | 1 | MISVNDFRTGLTIDV-DGGIWRVVDFQHVKPGKGAAFVRSKLRNLRTGAIQEKTFRAGEK | 59 |
| Query: | 61 | FEQAIIETVPAQYLYKMDDTAYFMNNETYDQYEIPTVNIENELLYILENSEVKIQFYGTE | 120 |
| | | +A IET QYLY D FM+ +Y+Q E+ IE EL Y+LEN V I Y E | |
| Sbjct: | 60 | VAKAQIETKTMQYLYANGDQHVFMDTSSYEQLELSATQIEEELKYLLENMSVHIMNYQDE | 119 |
| Query: | 121 | VIGVQIPTTVELTVAETQPSIKGATVTGSGKPATMETGLVVNVPDFIEAGQKLVINTAEG | 180 |
| | | +G+++P TVEL V ET+P IKG T +G KPA ETGLVVNVP F+ G LV+NT++G | |
| Sbjct: | 120 | TLGIELPNTVELKVVETEPGIKGDTASGGTKPAKTETGLVVNVPFFVNEGDTLVVNTSDG | 179 |
| Query: | 181 | TYVSRA | 186 |
| | | +YVSRA | |
| Sbjct: | 180 | SYVSRA | 185 |

[6447] A related DNA sequence was identified in S. pyogenes <SEQ ID 3585> which encodes the amino acid sequence <SEQ ID 3586>. Analysis of this protein sequence reveals the following:

```
Possible site: 14
>>> Seems to have no N-terminal signal sequence
----- Final Results -----
                            bacterial cytoplasm --- Certainty = 0.1813(Affirmative) < succ>
                              bacterial membrane --- Certainty = 0.0000(Not Clear) < succ>
                                bacterial outside --- Certainty = 0.0000(Not Clear) < succ>
```

[6448] An alignment of the GAS and GBS proteins is shown below.

| Identities = 170/186 (91%), Positives = 180/186 (96%), Gaps = 1/186 (0%) | | | |
|---|---|---|---|
| Query: | 1 | MIEASKLKAGMTFETADGKLIRVLEASHHKPGKGNTIMRMKLRDVRTGSTFDTSYRPEEK | 60 |
| | | MIEASKLKAGMTFE A+GKLIRVLEASHHKPGKGNTIMRMKLRDVRTGSTFDT+YRP+EK | |
| Sbjct: | 1 | MIEASKLKAGMTFE-AEGKLIRVLEASHHKPGKGNTIMRMKLRDVRTGSTFDTTYRPDEK | 59 |
| Query: | 61 | FEQAIIETVPAQYLYKMDDTAYFMNNETYDQYEIPTVNIENELLYILENSEVKIQFYGTE | 120 |
| | | FEQAIIETVPAQYLYKMDDTAYFMN +TYDQYEIP N+E ELLYILENS+VKIQFYG+E | |
| Sbjct: | 60 | FEQAIIETVPAQYLYKMDDTAYFMNTDTYDQYEIPVANVEQELLYILENSDVKIQFYGSE | 119 |
| Query: | 121 | VIGVQIPTTVELTVAETQPSIKGATVTGSGKPATMETGLVVNVPDFIEAGQKLVINTAEG | 180 |
| | | VIGV +PTTVELTVAETQPSIKGATVTGSGKPAT+ETGLVVNVPDFIEAGQKL+INTAEG | |
| Sbjct: | 120 | VIGVTVPTTVELTVAETQPSIKGATVTGSGKPATLETGLVVNVPDFIEAGQKLIINTAEG | 179 |
| Query: | 181 | TYVSRA | 186 |
| | | TYVSRA | |
| Sbjct: | 180 | TYVSRA | 185 |

[6449] Based on this analysis, it was predicted that these proteins and their epitopes could be useful antigens for vaccines or diagnostics.

### EXAMPLE 1157

[6450] A DNA sequence (GBSx1233) was identified in S. agalactiae <SEQ ID 3587> which encodes the amino acid sequence <SEQ ID 3588>. Analysis of this protein sequence reveals the following:

```
Possible site: 29
>>> Seems to have no N-terminal signal sequence
----- Final Results -----
                            bacterial cytoplasm --- Certainty = 0.1508(Affirmative) < succ>
                              bacterial membrane --- Certainty = 0.0000(Not Clear) < succ>
                                bacterial outside --- Certainty = 0.0000(Not Clear) < succ>
```

[6451] The protein has homology with the following sequences in the GENPEPT database.

| >GP: BAB06505 GB: AP001516 unknown conserved protein [Bacillus halodurans] | | | |
|---|---|---|---|
| Identities = 42/107 (39%), Positives = 70/107 (65%), Gaps = 4/107 (3%) | | | |
| Query: | 5 | NLGEIVISPRVLEVITGIAATKVDGVHSLRNK---AVTDSLSKKSLGRGVYLKNEEDDTV | 61 |
| | | +LG + ISP V+EVI GIAA++V+GV ++R V + L K+ G+GV + + D+ + | |
| Sbjct: | 15 | DLGRVEISPEVIEVIAGIAASEVEGVATMRGNFAAGVAEKLGYKNHGKGVKV-DLNDEGI | 73 |
| Query: | 62 | AADIYVYLQYGVNVPAVSIAIQQAVKTAVYDMAEVKISSVNIHVEGI | 108 |
| | | D+ V + YGV+VP V+ IQQ +K A+ M +++ S+N+H+ G+ | |
| Sbjct: | 74 | IVDVSVIILYGVSVPEVAKKIQQNIKQALQTMTAIELQSINVHIVGV | 120 |

[6452] A related DNA sequence was identified in S. pyogenes <SEQ ID 3589> which encodes the amino acid sequence <SEQ ID 3590>. Analysis of this protein sequence reveals the following:

```
Possible site: 41
>>> Seems to have no N-terminal signal sequence
----- Final Results -----
                            bacterial cytoplasm --- Certainty = 0.0882(Affirmative) < succ>
                              bacterial membrane --- Certainty = 0.0000(Not Clear) < succ>
                                bacterial outside --- Certainty = 0.0000(Not Clear) < succ>
```

[6453] An alignment of the GAS and GBS proteins is shown below.

| Identities = 101/129 (78%), Positives = 113/129 (87%) | | | |
|---|---|---|---|
| Query: | 1 | MTTENLGEIVISPRVLEVITGIAATKVDGVHSLRNKAVTDSLSKKSLGRGVYLKNEEDDT | 60 |
| | | MTTE +GEIVISPRVLEVITGIA T+V+GVHSL NK + DS +K SLG+GVYL+ EED + | |
| Sbjct: | 1 | MTTEYIGEIVISPRVLEVITGIATTQVEGVHSLHNKKMADSFNKASLGKGVYLQTEEDGS | 60 |
| Query: | 61 | VAADIYVYLQYGVNVPAVSIAIQQAVKTAVYDMAEVKISSVNIHVEGIVPEKTPKPDLKS | 120 |
| | | V ADIYVYLQYGV VP VS+ IQ+ VK+AVYDMAEV IS+VNIHVEGIV EKTPKPDLKS | |
| Sbjct: | 61 | VTADIYVYLQYGVKVPTVSMNIQKTVKSAVYDMAEVPISAVNIHVEGIVAEKTPKPDLKS | 120 |
| Query: | 121 | LFDEDFLDD | 129 |
| | | LFDEDFLDD | |
| Sbjct: | 121 | LFDEDFLDD | 129 |

[6454] Based on this analysis, it was predicted that these proteins and their epitopes could be useful antigens for vaccines or diagnostics.

### EXAMPLE 1158

[6455] A DNA sequence (GBSx1234) was identified in S. agalactiae <SEQ ID 3591> which encodes the amino acid sequence <SEQ ID 3592>. This protein is predicted to be n utilization substance protein b homolog (nusB). Analysis of this protein sequence reveals the following:

| Possible site: 27 | | | | |
|---|---|---|---|---|
| >>> Seems to have no N-terminal signal sequence | | | | |
| | INTEGRAL | Likelihood = −0.32 | Transmembrane | 48-64 (47-64) |

```
----- Final Results -----
                              bacterial membrane --- Certainty = 0.1128(Affirmative) < succ>
                                bacterial outside --- Certainty = 0.0000(Not Clear) < succ>
                            bacterial cytoplasm --- Certainty = 0.0000(Not Clear) < succ>
```

[6456] The protein has homology with the following sequences in the GENPEPT database.

| >GP: CAB14363 GB: Z99116 similar to transcription termination | | | |
|---|---|---|---|
| [Bacillus subtilis] | | | |
| Identities = 51/129 (39%), Positives = 82/129 (63%), Gaps = 9/129 (6%) | | | |
| Query: | 9 | RRDLRERAFQTLFSLETGGEFIDAAHFAYGYDKTVSEDKVLEVPIFLLNLVNGVVDHKDE | 68 |
| | | RR RE+A Q LF ++ ++ A + + E+K F LV+GV++H+D+ | |
| Sbjct: | 3 | RRTAREKALQALFQIDVSDIAVNEA-----IEHALDEEKT---DPFFEQLVHGVLEHQDQ | 54 |
| Query: | 69 | LDTLISSHLKSGWSLERLTLVDKSLLRLGLYEIKYFDETPDRVALNEIIEIAKKYSDETS | 128 |
| | | LD +IS HL + W L+R+ VD+++LRL YE+ Y ++ P V++NE IE+AK++ D+ + | |
| Sbjct: | 55 | LDEMISKHLVN-WKLDRIANVDRAILRLAAYEMAYAEDIPVNVSMNEAIELAKRFGDDKA | 113 |
| Query: | 129 | AKFVNGLLS | 137 |
| | | KFVNG+LS | |
| Sbjct: | 114 | TKFVNGVLS | 122 |

[6457] A related DNA sequence was identified in S. pyogenes <SEQ ID 3593> which encodes the amino acid sequence <SEQ ID 3594>. Analysis of this protein sequence reveals the following:

| Possible site: 44 | | | | |
|---|---|---|---|---|
| >>> Seems to have no N-terminal signal sequence | | | | |
| | INTEGRAL | Likelihood = −1.75 | Transmembrane | 53-69 (53-69) |

```
----- Final Results -----
                              bacterial membrane --- Certainty = 0.1702(Affirmative) < succ>
                                bacterial outside --- Certainty = 0.0000(Not Clear) < succ>
                            bacterial cytoplasm --- Certainty = 0.0000(Not Clear) < succ>
```

[6458] The protein has homology with the following sequences in the databases:

| >GP: CAB14363 GB: Z99116 similar to transcription termination | | | |
|---|---|---|---|
| [Bacillus subtilis] | | | |
| Identities = 47/134 (35%), Positives = 76/134 (56%), Gaps = 10/134 (7%) | | | |
| Query: | 15 | RRDLRERAFQALFNIEMGAELLAASQFAYGYDKVTGEDAQVLELPIFLLSLVTGVNNHKE | 74 |
| | | RR RE+A QALF I++ +++ + D+ + F LV GV H++ | |
| Sbjct: | 3 | RRTAREKALQALFQIDV-SDIAVNEAIEHALDEEKTDP--------FFEQLVHGVLEHQD | 53 |
| Query: | 75 | ELDNLISTHLKKGWSLERLTLTDKTLLRLGLFEIKYFDKTPDRVALNEIIEVVKKYSDET | 134 |
| | | +LD +IS HL W L+R+ D+ +LRL +E+ Y + P V++NE IE+ K++ D+ | |
| Sbjct: | 54 | QLDEMISKHLVN-WKLDRIANVDRAILRLAAYEMAYAEDIPVNVSMNEAIELAKRFGDDK | 112 |
| Query: | 135 | SAKFINGLLSQYVS | 148 |
| | | + KF+NG+LS S | |
| Sbjct: | 113 | ATKFVNGVLSNIKS | 126 |

[6459] An alignment of the GAS and GBS proteins is shown below.

| Identities = 104/142 (73%), Positives = 125/142 (87%), Gaps = 1/142 (0%) | | | |
|---|---|---|---|
| Query: | 1 | MTSVFKDSRRDLRERAFQTLFSLETGGEFIDAAHFAYGYDKTVSED-KVLEVPIFLLNLV | 59 |
| | | MT+ F++SRRDLRERAFQ LF++E G E + A+ FAYGYDK ED +VLE+PIFLL+LV | |
| Sbjct: | 7 | MTNSFQNSRRDLRERAFQALFNIEMGAELLAASQFAYGYDKVTGEDAQVLELPIFLLSLV | 66 |
| Query: | 60 | NGVVDHKDELDTLISSHLKSGWSLERLTLVDKSLLRLGLYEIKYFDETPDRVALNEIIEI | 119 |
| | | GV +HK+ELD LIS+HLK GWSLERLTL DK+LLRLGL+EIKYFD+TPDRVALNEIIE+ | |
| Sbjct: | 67 | TGVNNHKEELDNLISTHLKKGWSLERLTLTDKTLLRLGLFEIKYFDKTPDRVALNEIIEV | 126 |
| Query: | 120 | AKKYSDETSAKFVNGLLSQFIT | 141 |
| | | KKYSDETSAKF+NGLLSQ+++ | |
| Sbjct: | 127 | VKKYSDETSAKFINGLLSQYVS | 148 |

[6460] Based on this analysis, it was predicted that these proteins and their epitopes could be useful antigens for vaccines or diagnostics.

### EXAMPLE 1159

[6461] A DNA sequence (GBSx1235) was identified in S. agalactiae <SEQ ID 3595> which encodes the amino acid sequence <SEQ ID 3596>. Analysis of this protein sequence reveals the following:

| Possible site: 20 | | | | |
|---|---|---|---|---|
| >>> Seems to have a cleavable N-term signal seq. | | | | |
| | INTEGRAL | Likelihood = −2.81 | Transmembrane | 239-255 (239-255) |

```
----- Final Results -----
                              bacterial membrane --- Certainty = 0.2126(Affirmative) < succ>
                                bacterial outside --- Certainty = 0.0000(Not Clear) < succ>
                            bacterial cytoplasm --- Certainty = 0.0000(Not Clear) < succ>
```

[6462] The protein has homology with the following sequences in the GENPEPT database.

| >GP: AAC31628 GB: U46902 ScrR [Streptococcus mutans] | | | |
|---|---|---|---|
| Identities = 225/320 (70%), Positives = 273/320 (85%) | | | |
| Query: | 1 | MVAKLTDVAALAGVSPTTVSRVINKKGYLSQKTVTKVNEAMRTLGYKPNNLARSLQGKSA | 60 |
| | | MVAKLTDVA LAGVSPTTVSRVIN+KGYLS+KT+TKV AM+TLGYKPNNLARSLQGKSA | |
| Sbjct: | 1 | MVAKLTDVAKLAGVSPTTVSRVINRKGYLSEKTITKVQAAMKTLGYKPNNLARSLQGKSA | 60 |
| Query: | 61 | KLIGLIFPNIRNIFYAELIEHLEIELFKHGYKTILCNSEKDPIKEKEYLEMLGANQVDGI | 120 |
| | | KLIGLIFPNI +IFY+ELIE+LEIELFKHGYK I+CNS+ +P KE++YLEML ANQVDGI | |
| Sbjct: | 61 | KLIGLIFPNISHIFYSELIEYLEIELFKHGYKAIICNSQNNPDKERDYLEMLEANQVDGI | 120 |
| Query: | 121 | ISSSHNLGIDDYEKVEAPIVAFDRNLAPHIPIVSSDNFFGGKMAAQTLKKHGCQKMIMIT | 180 |
| | | ISSSHNLGIDDYEKV API+AFDRNLAP+IPIVSSDNF GG+MAA+ LKKHGCQ IMI | |
| Sbjct: | 121 | ISSSHNLGIDDYEKVSAPIIAFDRNLAPNIPIVSSDNFEGGRMAAKLLKKHGCQHPIMIA | 180 |
| Query: | 181 | GNDNSDSPTGLRRLGFSYESKESKVITVTNGLSNMRREMELKSIISTHKPDGIFTSDDLT | 240 |
| | | G DNS+SPT LR+LGF ++ + ++ LS +R+EME+K I+ KPDGIF SDD+T | |
| Sbjct: | 181 | GKDNSNSPTALRQLGFKSVFAQAPIFHLSGELSIIRKEMEIKVILQNEKPDGIFLSDDMT | 240 |
| Query: | 241 | ALLVIKLISQLGLSIPEDIKVIGYDGTSFIQDYVPHLTTIKQPIREIAQLMVEILLAKIE | 300 |
| | | A+L +K+ +QL ++IP ++K+IGYDGT F+++Y P+LTTI+QPI++IA L+V+ILL KI+ | |
| Sbjct: | 241 | AILTMKIANQLNITIPHELKIIGYDGTHFVENYYPYLTTIRQPIKDIAHLLVDILLRRID | 300 |
| Query: | 301 | GQKTNKDYILPVSLIPGSSV | 320 |
| | | Q KDYILPV L+ G SV | |
| Sbjct: | 301 | HQDIPKDYILPVGLLSGESV | 320 |

[6463] A related DNA sequence was identified in S. pyogenes <SEQ ID 3597> which encodes the amino acid sequence <SEQ ID 3598>. Analysis of this protein sequence reveals the following:

```
Possible site: 20
>>> Seems to have a cleavable N-term signal seq.
----- Final Results -----
                                bacterial outside --- Certainty = 0.3000(Affirmative) < succ>
                              bacterial membrane --- Certainty = 0.0000(Not Clear) < succ>
                            bacterial cytoplasm --- Certainty = 0.0000(Not Clear) < succ>
```

[6464] The protein has homology with the following sequences in the databases:

| >GP: AAC31628 GB: U46902 ScrR [Streptococcus mutans] | | | |
|---|---|---|---|
| Identities = 226/321 (70%), Positives = 269/321 (83%), Gaps = 1/321 (0%) | | | |
| Query: | 1 | VVAKLTDVAALAGVSPTTVSRVINKKGYLSQKTVNKVNKAMRELGYKPNNLARSLQGKST | 60 |
| | | +VAKLTDVA LAGVSPTTVSRVIN+KGYLS+KT+ KV AM+ LGYKPNNLARSLQGKS | |
| Sbjct: | 1 | MVAKLTDVAKLAGVSPTTVSRVINRKGYLSEKTITKVQAAMKTLGYKPNNLARSLQGKSA | 60 |
| Query: | 61 | QLIGLIFPNISNIFYAELIEHLEIELFKQGYKTIICNSEHNPVKEREYLEMLAANQVDGI | 120 |
| | | +LIGLIFPNIS+IFY+ELIE+LEIELFK GYK IICNS++NP KER+YLEML ANQVDGI | |
| Sbjct: | 61 | KLIGLIFPNISHIFYSELIEYLEIELFKHGYKAIICNSQNNPDKERDYLEMLEANQVDGI | 120 |
| Query: | 121 | ISSSHNLGIEDYERVEAPIVAFDRNLAPNIPVISSDNFEGGKLAAQTLQKHGCQNIVMIT | 180 |
| | | ISSSHNLGI+DYE+V API+AFDRNLAPNIP++SSDNFEGG++AA+ L+KHGCQ+ +MI | |
| Sbjct: | 121 | ISSSHNLGIDDYEKVSAPIIAFDRNLAPNIPIVSSDNFEGGRMAAKLLKKHGCQHPIMIA | 180 |
| Query: | 181 | GNDNSDSPTGLRQLGFNYQLKRSAEIIKLPNNLSPVRREMEIKSILATRKPDGLFVSDDL | 240 |
| | | G DNS+SPT LRQLGF + A I L LS +R+EMEIK IL KPDG+F+SDD+ | |
| Sbjct: | 181 | GKDNSNSPTALRQLGFK-SVFAQAPIFHLSGELSIIRKEMEIKVILQNEKPDGIFLSDDM | 239 |
| Query: | 241 | TAILIMKVAKQLHITIPEDMKVIGYDGTTFIQQYVPQLATIRQPIDEIAKLSVEILIKKI | 300 |
| | | TAIL MK+A QL+ITIP ++K+IGYDGT F++ Y P L TIRQPI +IA L V+IL+KKI | |
| Sbjct: | 240 | TAILTMKIANQLNITIPHELKIIGYDGTHFVENYYPYLTTIRQPIKDIAHLLVDILLKKI | 299 |
| Query: | 301 | KKEKTSKDYILPITLLPGASI | 321 |
| | | + KDYILP+ LL G S+ | |
| Sbjct: | 300 | DHQDIPKDYILPVGLLSGESV | 320 |

[6465] An alignment of the GAS and GBS proteins is shown below.

| Identities = 247/321 (76%), Positives = 293/321 (90%), Gaps = 1/321 (0%) | | | |
|---|---|---|---|
| Query: | 1 | MVAKLTDVAALAGVSPTTVSRVINKKGYLSQKTVTKVNEAMRTLGYKPNNLARSLQGKSA | 60 |
| | | +VAKLTDVAALAGVSPTTVSRVINKKGYLSQKTV KVN+AMR LGYKPNNLARSLQGKS | |
| Sbjct: | 1 | VVAKLTDVAALAGVSPTTVSRVINKKGYLSQKTVNKVNKAMRELGYKPNNLARSLQGKST | 60 |
| Query: | 61 | KLIGLIFPNIRNIFYAELIEHLEIELFKHGYKTILCNSEKDPIKEKEYLEMLGANQVDGI | 120 |
| | | +LIGLIFPNI NIFYAELIEHLEIELFK GYKTI+CNSE +P+KE+EYLEML ANQVDGI | |
| Sbjct: | 61 | QLIGLIFPNISNIFYAELIEHLEIELFKQGYKTIICNSEHNPVKEREYLEMLAANQVDGI | 120 |
| Query: | 121 | ISSSHNLGIDDYEKVEAPIVAFDRNLAPHIPIVSSDNFFGGKMAAQTLKKHGCQKMIMIT | 180 |
| | | ISSSHNLGI+DYE+VEAPIVAFDRNLAP+IP++SSDNF GGK+AAQTL+KHGCQ ++MIT | |
| Sbjct: | 121 | ISSSHNLGIEDYERVEAPIVAFDRNLAPNIPVISSDNFEGGKLAAQTLQKHGCQNIVMIT | 180 |
| Query: | 181 | GNDNSDSPTGLRRLGFSYESKES-KVITVTNGLSNMRREMELKSIISTHKPDGIFTSDDL | 239 |
| | | GNDNSDSPTGLR+LGF+Y+ K S ++I + N LS +RREME+KSI++T KPDG+F SDDL | |
| Sbjct: | 181 | GNDNSDSPTGLRQLGFNYQLKRSAEIIKLPNNLSPVRREMEIKSILATRKPDGLFVSDDL | 240 |
| Query: | 240 | TALLVIKLISQLGLSIPEDIKVIGYDGTSFIQDYVPHLTTIKQPIREIAQLMVEILLAKI | 299 |
| | | TA+L++K+ QL ++IPED+KVIGYDGT+FIQ YVP L TI+QPI EIA+L VEIL+KI | |
| Sbjct: | 241 | TAILIMKVAKQLHITIPEDMKVIGYDGTTFIQQYVPQLATIRQPIDEIAKLSVEILIKKI | 300 |
| Query: | 300 | EGQKTNKDYILPVSLIPGSSV | 320 |
| | | + +KT+KDYILP++L+PG+S+ | |
| Sbjct: | 301 | KKEKTSKDYILPITLLPGASI | 321 |

[6466] Based on this analysis, it was predicted that these proteins and their epitopes could be useful antigens for vaccines or diagnostics.

### EXAMPLE 1160

[6467] A DNA sequence (GBSx1236) was identified in S. agalactiae <SEQ ID 3599> which encodes the amino acid sequence <SEQ ID 3600>. This protein is predicted to be sucrose-6-phosphate hydrolase (cscA). Analysis of this protein sequence reveals the following:

```
Possible site: 52
>>> Seems to have no N-terminal signal sequence
----- Final Results -----
                            bacterial cytoplasm --- Certainty = 0.4775(Affirmative) < succ>
                              bacterial membrane --- Certainty = 0.0000(Not Clear) < succ>
                                bacterial outside --- Certainty = 0.0000(Not Clear) < succ>
```

[6468] The protein has homology with the following sequences in the GENPEPT database.

| >GP: CAA35872 GB: X51507 sucrose-6-phosphate | | | |
|---|---|---|---|
| hydrolase [Streptococcus mutans] | | | |
| Identities = 303/479 (63%), Positives = 359/479 (74%), | | | |
| Gaps = 25/479 (5%) | | | |
| Query: | 1 | MNLPTEIRYRPYDEWTEEDKENIVKNVSKSPWRATYHLEAKTGLLNDPNGFSYFNGKFHL | 60 |
| | | MNLP IRYR Y +WTEE+ ++I NV+ SPW TYH+E KTGLLNDPNGFSYFNGKF+L | |
| Sbjct: | 1 | MNLPQNIRYRRYQDWTEEEIKSIKTNVALSPWHTTYHIEPKTGLLNDPNGFSYFNGKFNL | 60 |
| Query: | 61 | FYQNWPFGAAHGLKQWVHTESDDLVHFKETGIKLKPDHVNDSHGAYSGSALAIDDKLFLF | 120 |
| | | FYQNWPFGAAHGLK W+HTES+DLVHFKETG L PD +DSHGAYSGSA I D+LFLF | |
| Sbjct: | 61 | FYQNWPFGAAHGLKSWIHTESEDLVHFKETGTVLYPDTSHDSHGAYSGSAYEIGDQLFLF | 120 |
| Query: | 121 | YTGNVRDMKWNRDPRQIGAWMTNDGKITKFDKVLISQPNDVTEHFRDPQIFNYDNQFYAV | 180 |
| | | YTGNVRD W R P QIGA+M G I KF VLI QPNDVTEHFRDPQIFNY QFYA+ | |
| Sbjct: | 121 | YTGNVRDENWVRHPLQIGAFMDKKGNIQKFTDVLIKQPNDVTEHFRDPQIFNYKGQFYAI | 180 |
| Query: | 181 | IGAQNSKKCGFIKLYKALNNDIHHWEFVGDLDFGGTGSEYMIECPNIIFVKGKPVLLYSP | 240 |
| | | +GAQ+ LDFGG+ SEYMIECPN++F+ +PVL+YSP | |
| Sbjct: | 181 | VGAQS-------------------------LDFGGSKSEYMIECPNLVFINEQPVLIYSP | 215 |
| Query: | 241 | QGLDKNELDYQNIYPNTYKIGQYFDANSSKIVEPSPIYNLDYGFEAYATQGFNTSDGRAF | 300 |
| | | QGL K+ELDY NIYPNTYK+ Q FD +V+ S I NLD+GFE YATQ+FN DGR | |
| Sbjct: | 216 | QGLSKSELDYHNIYPNTYKVCQSFDTEKPALVDASEIQNLDFGFECYATQAFNAPDGRVY | 275 |
| Query: | 301 | IVSWIGLPDIDYPSDQFDYQGAMSLVKELSIKNGNLYQYPVPAMKNLRQHQAEFKTQLQT | 360 |
| | | VSWIGLPDIDYPSD +DYQGA+SLVKELS+K+G LYQYPV A+++LR + + +T | |
| Sbjct: | 276 | AVSWIGLPDIDYPSDSYDYQGALSLVKELSLKHGKLYQYPVEAVRSLRSEKEAVTYKPET | 335 |
| Query: | 361 | NNTYELELLVPRNDLSSFVLFANPKGQGLSITIDTVKGKVIIDRSQAGQQYATEFGTSRQ | 420 |
| | | NNTYELEL + ++ +LFA+ KG GL+IT+DT G ++IDRS+AG+QYA EFG+ R | |
| Sbjct: | 336 | NNTYELELTFDSSSVNELLLFADNKGNGLAITVDTKMGTILIDRSKAGEQYALEFGSQRS | 395 |
| Query: | 421 | CDIPKDATSINIFIDKSIFEIFINKGEKVFTGRVFPDAEQSGIQLKEGHVHGKYFELKY | 479 |
| | | C I T +NIF+DKSIFEIFINKGEKVFTGRVFP+ +Q+GI +K G G Y+ELKY | |
| Sbjct: | 396 | CSIQAKETVVNIFVDKSIFEIFINKGEKVFTGRVFPNDKQTGIVIKSGKPSGNYYELKY | 454 |
| ♯ | | | |

[6469] A related DNA sequence was identified in S. pyogenes <SEQ ID 3601> which encodes the amino acid sequence <SEQ ID 3602>. Analysis of this protein sequence reveals the following:

```
Possible site: 31
>>> Seems to have no N-terminal signal sequence
----- Final Results -----
                            bacterial cytoplasm --- Certainty = 0.4629(Affirmative) < succ>
                              bacterial membrane --- Certainty = 0.0000(Not Clear) < succ>
                                bacterial outside --- Certainty = 0.0000(Not Clear) < succ>
```

[6470] An alignment of the GAS and GBS proteins is shown below.

| Identities = 288/479 (60%), Positives = 367/479 (76%) | | | |
|---|---|---|---|
| Query: | 1 | MNLPTEIRYRPYDEWTEEDKENIVKNVSKSPWRATYHLEAKTGLLNDPNGFSYFNGKFHL | 60 |
| | | M+LP IRYRPY EW+ +D + I + +++SPW + +H+E KTGLLNDPNGFSYFNG++HL | |
| Sbjct: | 2 | MDLPQAIRYRPYKEWSSKDYQAITEKMAQSPWHSQFHVEPKTGLLNDPNGFSYFNGRYHL | 61 |
| Query: | 61 | FYQNWPFGAAHGLKQWVHTESDDLVHFKETGIKLKPDHVNDSHGAYSGSALAIDDKLFLF | 120 |
| | | FYQNWP+GAAHGLKQWVH S DLVHF ET +L PDH +DSHGAYSGSA AIDDKLFLF | |
| Sbjct: | 62 | FYQNWPYGAAHGLKQWVHMTSTDLVHFTETRSRLLPDHAHDSHGAYSGSAYAIDDKLFLF | 121 |
| Query: | 121 | YTGNVRDMKWNRDPRQIGAWMTNDGKITKFDKVLISQPNDVTEHFRDPQIFNYDNQFYAV | 180 |
| | | YTGNVRD W R P Q+GAWM G I+K +VLI QP+DVTEHFRDPQ+F+Y QFYA+ | |
| Sbjct: | 122 | YTGNVRDANWVRTPLQVGAWMDKQGNISKIPQVLIEQPDDVTEHFRDPQLFSYQGQFYAI | 181 |
| Query: | 181 | IGAQNSKKCGFIKLYKALNNDIHHWEFVGDLDFGGTGSEYMIECPNIIFVKGKPVLLYSP | 240 |
| | | IGAQ G IKLYKA++N + +W F+ DLDF +G+EYMIECPN++FV KPVL++SP | |
| Sbjct: | 182 | IGAQGLDGKGKIKLYKAVDNHVDNWRFIADLDFDDSGTEYMIECPNLVFVDDKPVLIFSP | 241 |
| Query: | 241 | QGLDKNELDYQNIYPNTYKIGQYFDANSSKIVEPSPIYNLDYGFEAYATQGFNTSDGRAF | 300 |
| | | QGL K +LDYQNIYPNTYKI + F+ + +++ +NLD+GFEAYATQ F++ DGR | |
| Sbjct: | 242 | QGLAKADLDYQNIYPNTYKIFESFNPETGQLLGGGALQNLDFGFEAYATQAFSSPOGRVL | 301 |
| Query: | 301 | IVSWIGLPDIDYPSDQFDYQGAMSLVKELSIKNGNLYQYPVPAMKNLRQHQAEFKTQLQT | 360 |
| | | VSWIGLPDIDYP+D++DYQGA+SLVKEL IK+G LYQ PV A++NLR F ++ + | |
| Sbjct: | 302 | AVSWIGLPDIDYPTDRYDYQGALSLVKELRIKDGILYQTPVSALQNLRGPAELFHNKIDS | 361 |
| Query: | 361 | NNTYELELLVPRNDLSSFVLFANPKGQGLSITIDTVKGKVIIDRSQAGQQYATEFGTSRQ | 420 |
| | | +N YELEL +P +LFA+ KG GL + +DT KG++ IDRS+AG QYA ++GT R | |
| Sbjct: | 362 | SNCYELELTIPGQKKLDLLLFADQKGNGLRLKVDTTKGQLSIDRSRAGVQYAQDYGTVRS | 421 |
| Query: | 421 | CDIPKDATSINIFIDKSIFEIFINKGEKVFTGRVFPDAEQSGIQLKEGHVHGKYFELKY | 479 |
| | | C IP+ ++N+++D SI EIFIN+G+KV T RVFP Q+GIQ+ EG G Y+E++Y | |
| Sbjct: | 422 | CQIPQGHVTLNVYVDNSILEIFINQGQKVLTSRVFPTHGQTGIQVVEGQAFGHYYEMRY | 480 |

[6471] Based on this analysis, it was predicted that these proteins and their epitopes could be useful antigens for vaccines or diagnostics.

### EXAMPLE 1161

[6472] A DNA sequence (GBSx1237) was identified in S. agalactiae <SEQ ID 3603> which encodes the amino acid sequence <SEQ ID 3604>. Analysis of this protein sequence reveals the following:

```
Possible site: 14
>>> Seems to have no N-terminal signal sequence
----- Final Results -----
                            bacterial cytoplasm --- Certainty = 0.2204(Affirmative) < succ>
                              bacterial membrane --- Certainty = 0.0000(Not Clear) < succ>
                                bacterial outside --- Certainty = 0.0000(Not Clear) < succ>
```

[6473] The protein has no significant homology with any sequences in the GENPEPT database.

[6474] No corresponding DNA sequence was identified in S. pyogenes.

[6475] Based on this analysis, it was predicted that this protein and its epitopes, could be useful antigens for vaccines or diagnostics.

### EXAMPLE 1162

[6476] A DNA sequence (GBSx1238) was identified in S. agalactiae <SEQ ID 3605> which encodes the amino acid sequence <SEQ ID 3606>. Analysis of this protein sequence reveals the following:

| Possible site: 27 | | | | |
|---|---|---|---|---|
| >>> Seems to have no N-terminal signal sequence | | | | |
| | INTEGRAL | Likelihood = −7.64 | Transmembrane | 259-275 (250-283) |
| | INTEGRAL | Likelihood = −4.41 | Transmembrane | 113-129 (109-130) |
| | INTEGRAL | Likelihood = −3.03 | Transmembrane | 180-196 (180-196) |
| | INTEGRAL | Likelihood = −3.03 | Transmembrane | 439-455 (438-456) |
| | INTEGRAL | Likelihood = −2.81 | Transmembrane | 298-314 (298-317) |
| | INTEGRAL | Likelihood = −2.02 | Transmembrane | 396-412 (395-412) |

```
----- Final Results -----
                              bacterial membrane --- Certainty = 0.4057(Affirmative) < succ>
                                bacterial outside --- Certainty = 0.0000(Not Clear) < succ>
                            bacterial cytoplasm --- Certainty = 0.0000(Not Clear) < succ>
```

[6477] The protein has homology with the following sequences in the GENPEPT database.

| >GP: AAC99320 GB: AF059741 sucrose-specific PTS permease | | | |
|---|---|---|---|
| [Clostridium beijerinckii] | | | |
| Identities = 235/453 (51%), Positives = 312/453 (67%), Gaps = 15/453 (3%) | | | |
| Query: | 7 | IAKQVINAIGGASNVRSVAHCATRLRVMVKDETVIDKNTVENIEKVQGAFFNSGQYQIIF | 66 |
| | | +AK+++ IGG N++SV HCATRLR+++ D+ I++ +ENI+ V+G FF++ QYQII | |
| Sbjct: | 6 | VAKEILENIGGKENIKSVEHCATRLRLILNDKEKINEKAIENIDGVKGQFFSAAQYQIIL | 65 |
| Query: | 67 | GTGTVNKIYDEVVAQGLPTSSTSDQKAEAAKQGNAFQRAIRTFGDVFVPLLPAIVATGLF | 126 |
| | | GTG VN++YD +V Q T + K EA Q Q+ RTFGDVFVP++P +VATGLF | |
| Sbjct: | 66 | GTGFVNEVYDVIVGQNSDLV-TGNNKEEAYSQMTLIQKISRTFGDVFVPIIPVLVATGLF | 124 |
| Query: | 127 | MGIRGAINNDTVLALFGTTSKAFSSSNFYTYTVVLTDTAFAFFPALISWSAFRVFGGNPV | 186 |
| | | MG+RG + N V + NF +T VLTDTAFAF PAL++WS + FGG PV | |
| Sbjct: | 125 | MGLRGLLTNLGVQM----------NENFVLFTQVLTDTAFAFLPALVAWSTMKKFGGTPV | 174 |
| Query: | 187 | IGLVLGLMMVNSALPNAWAVASGDAHPIKF--FGF-IPVVGYQNSVLPAFFVGLLGAKLE | 243 |
| | | IG+V+GLM+V+ +LPNA+AVA+G A PI G IPVVGYQ SVLPA +G++ AK + | |
| Sbjct: | 175 | IGIVIGLMLVSPSLPNAYAVAAGTATPINLTILGLNIPVVGYQGSVLPALVLGIIAAKTQ | 234 |
| Query: | 244 | KWLHKKIPDVLDLLLVPFLTFTVMSILALFVIGPIFHSVENYVLAGTKFVLNLPLGLSGL | 303 |
| | | K L K +PDVLDL++ PF+T +L L ++GPI H+ E + K + LP GL GL | |
| Sbjct: | 235 | KALKKVVPDVLDLIVTPFITLLFSMVLGLLIVGPIMHNAEQLIFGAIKGFMGLPFGLGGL | 294 |
| Query: | 304 | ILGGVHQIIVVTGVHHIFNLLEAQLIAADGKDPFNAIITAAMTAQAGATLAVGVKTKNKK | 363 |
| | | ++GGVHQ+IVVTGVHH N LE +L+++ GKD FNA+IT + AQ A LAV VKTK+KK | |
| Sbjct: | 295 | VVGGVHQLIVVTGVHHALNALEVELLSSTGKDAFNAMITCGIVAQGAAALAVAVKTKDKK | 354 |
| Query: | 364 | LKALAFPAALSAGLGITEPAIFGVNLRFGKPFIMGLIAGAAGGWLASILKLAGTGFGITI | 423 |
| | | ++L +A+ A LGITEPAIFGVNLRF KPFI G GA GG L+ IL LAGTG GIT | |
| Sbjct: | 355 | KRSLYISSAIPAFLGITEPAIFGVNLRFIKPFIFGCAGGAVGGMLSGILHLAGTGMGITA | 414 |
| Query: | 424 | IPGTLLYLNGQIVKYLIMVIGTTSLAFVLTYMF | 456 |
| | | +PG LLY+N + Y+++ + ++AF LT F | |
| Sbjct: | 415 | LPGMLLYVN-NLGSYILVNVVAIAVAFCLTLFF | 446 |

[6478] A related DNA sequence was identified in S. pyogenes <SEQ ID 3607> which encodes the amino acid sequence <SEQ ID 3608>. Analysis of this protein sequence reveals the following:

| Possible site: 26 | | | | |
|---|---|---|---|---|
| >>> Seems to have no N-terminal signal sequence | | | | |
| | INTEGRAL | Likelihood = −4.99 | Transmembrane | 111-127 (108-129) |
| | INTEGRAL | Likelihood = −4.57 | Transmembrane | 176-192 (176-193) |
| | INTEGRAL | Likelihood = −4.35 | Transmembrane | 436-452 (431-453) |
| | INTEGRAL | Likelihood = −3.88 | Transmembrane | 295-311 (293-314) |
| | INTEGRAL | Likelihood = −3.50 | Transmembrane | 259-275 (253-277) |
| | INTEGRAL | Likelihood = −2.07 | Transmembrane | 405-421 (405-421) |
| | INTEGRAL | Likelihood = −0.43 | Transmembrane | 219-235 (219-235) |

```
----- Final Results -----
                              bacterial membrane --- Certainty = 0.2996(Affirmative) < succ>
                                bacterial outside --- Certainty = 0.0000(Not Clear) < succ>
                            bacterial cytoplasm --- Certainty = 0.0000(Not Clear) < succ>
```

[6479] The protein has homology with the following sequences in the databases:

| >GP: AAC99320 GB: AF059741 sucrose-specific PTS permease [Clostridium | | | |
|---|---|---|---|
| beijerinckii] | | | |
| Identities = 234/451 (51%), Positives = 312/451 (68%), Gaps = 11/451 (2%) | | | |
| Query: | 1 | MDNRQIAAEVIEALGGRENVRSVAHCATRLRVMVYDEGKIDKEKAEAIDKVKGAFFNSGQ | 60 |
| | | M + +A E++E +GG+EN++SV HCATRLR+++ D+ KI+++ E ID VKG FF++ Q | |
| Sbjct: | 1 | MKEQIVAKEILENIGGKENIKSVEHCATRLRLILNDKEKINEKAIENIDGVKGQFFSAAQ | 60 |
| Query: | 61 | YQMIFGTGTVNNIYDEVVALGLPTSSTSEQKAEAGKHGNIFQRAIRTFGDVFVPIIPAIV | 120 |
| | | YQ+I GTG VN +YD +V T K EA + Q+ RTFGDVFVPIIP +V | |
| Sbjct: | 61 | YQIILGTGFVNEVYDVIVGQNSDLV-TGNNKEEAYSQMTLIQKISRTFGDVFVPIIPVLV | 119 |
| Query: | 121 | ATGLFMGVRGLVTQPAIMDLFGVHEYGENFLMYTRILTDTAFVYLPALVAWSAFRVFGGN | 180 |
| | | ATGLFMG+RGL+T + + ENF+++T++LTDTAF +LPALVAWS + FGG | |
| Sbjct: | 120 | ATGLFMGLRGLLTNLGV-------QMNENFVLFTQVLTDTAFAFLPALVAWSTMKKFGGT | 172 |
| Query: | 181 | PIIGIVLGLMLVSNELPNAWVVASGGDVK-PLTFFGF-VPVVGYQGTVLPAFFVGLVGAK | 238 |
| | | P+IGIV+GLMLVS LPNA+ VA+G LT G +PVVGYQG+VLPA +G++ AK | |
| Sbjct: | 173 | PVIGIVIGLMLVSPSLPNAYAVAAGTATPINLTILGLNIPVVGYQGSVLPALVLGIIAAK | 232 |
| Query: | 239 | LEKWLHKKVPEALDLLVTPFLTFAIMSTLGLFVIGPVFHSLENLVLAGTQAVLHLPFGIA | 298 |
| | | +K L K VP+ LDL+VTPF+T LGL ++GP+ H+ E L+ + + LPFG+ | |
| Sbjct: | 233 | TQKALKKVVPDVLDLIVTPFITLLFSMVLGLLIVGPIMHNAEQLIFGAIKGFMGLPFGLG | 292 |
| Query: | 299 | GLIVGGIQQLIVVTGIHHIFNFLEAQLIANTGKDPFNAYLTAATAAQAGATLAVAVKTKS | 358 |
| | | GL+VGG+ QLIVVTG+HH N LE +L+++TGKD FNA +T AQ A LAVAVKTK | |
| Sbjct: | 293 | GLVVGGVHQLIVVTGVHHALNALEVELLSSTGKDAFNAMITCGIVAQGAAALAVAVKTKD | 352 |
| Query: | 359 | TKLKGLAFPSTLSALLGITEPAIFGVNLRYPKVFVSGLIGGALGGWVAGLFGIAGTGFGI | 418 |
| | | K + L S + A LGITEPAIFGVNLR+ K F+ G GGA+GG ++G+ +AGTG GI | |
| Sbjct: | 353 | KKKRSLYISSAIPAFLGITEPAIFGVNLRFIKPFIFGCAGGAVGGMLSGILHLAGTGMGI | 412 |
| Query: | 419 | TVLPGTLLYLNGQLLQYLVTMLVGLGVAFAI | 449 |
| | | T LPG LLY+N L Y++ +V + VAF + | |
| Sbjct: | 413 | TALPGMLLYVN-NLGSYILVNVVAIAVAFCL | 442 |

[6480] An alignment of the GAS and GBS proteins is shown below.

| Identities = 409/618 (66%), Positives = 491/618 (79%), Gaps = 12/618 (1%) | | | |
|---|---|---|---|
| Query: | 4 | NTEIAKQVINAIGGASNVRSVAHCATRLRVMVKDETVIDKNTVENIEKVQGAFFNSGQYQ | 63 |
| | | N +IA +VI A+GG NVRSVAHCATRLRVMV DE IDK E I+KV+GAFFNSGQYQ | |
| Sbjct: | 3 | NRQIAAEVIEALGGRENVRSVAHCATRLRVMVYDEGKIDKEKAEAIDKVKGAFFNSGQYQ | 62 |
| Query: | 64 | IIFGTGTVNKIYDEVVAQGLPTSSTSDQKAEAAKQGNAFQRAIRTFGDVFVPLLPAIVAT | 123 |
| | | +IFGTGTVN IYDEVVA GLPTSSTS+QKAEA K GN FQRAIRTFGDVFVP++PAIVAT | |
| Sbjct: | 63 | MIFGTGTVNNIYDEVVALGLPTSSTSEQKAEAGKHGNIFQRAIRTFGDVFVPIIPAIVAT | 122 |
| Query: | 124 | GLFMGIRGAINNDTVLALFGTTSKAFSSSNFYTYTVVLTDTAFAFFPALISWSAFRVFGG | 183 |
| | | GLFMG+RG + ++ LFG NF YT +LTDTAF + PAL++WSAFRVFGG | |
| Sbjct: | 123 | GLFMGVRGLVTQPAIMDLFGVHEYG---ENFLMYTRILTDTAFVYLPALVAWSAFRVFGG | 179 |
| Query: | 184 | NPVIGLVLGLMMVNSALPNAWAVASG-DAHPIKFFGFIPVVGYQNSVLPAFFVGLLGAKL | 242 |
| | | NP+IG+VLGLM+V++ LPNAW VASG D P+ FFGF+PVVGYQ +VLPAFFVGL+GAKL | |
| Sbjct: | 180 | NPIIGIVLGLMLVSNELPNAWVVASGGDVKPLTFFGFVPVVGYQGTVLPAFFVGLVGAKL | 239 |
| Query: | 243 | EKWLHKKIPDVLDLLLVPFLTFTVMSILALFVIGPIFHSVENYVLAGTKFVLNLPLGLSG | 302 |
| | | EKWLHKK+P+ LDLL+ PFLTF +MS L LFVIGP+FHS+EN VLAGT+ VL+LP G++G | |
| Sbjct: | 240 | EKWLHKKVPEALDLLVTPFLTFAIMSTLGLFVIGPVFHSLENLVLAGTQAVLHLPFGIAG | 299 |
| Query: | 303 | LILGGVHQIIVVTGVHHIFNLLEAQLIAADGKDPFNAIITAAMTAQAGATLAVGVKTKNK | 362 |
| | | LI+GG+ Q+IVVTG+HHIFN LEAQLIA GKDPFNA +TAA AQAGATLAV VKTK+ | |
| Sbjct: | 300 | LIVGGIQQLIVVTGIHHIFNFLEAQLIANTGKDPFNAYLTAATAAQAGATLAVAVKTKST | 359 |
| Query: | 363 | KLKALAFPAALSAGLGITEPAIFGVNLRFGKPFIMGLIAGAAGGWLASILKLAGTGFGIT | 422 |
| | | KLK LAFP+ LSA LGITEPAIFGVNLR+ K F+ GLI GA GGW+A + +AGTGFGIT | |
| Sbjct: | 360 | KLKGLAFPSTLSALLGITEPAIFGVNLRYPKVFVSGLIGGALGGWVAGLFGIAGTGFGIT | 419 |
| Query: | 423 | IIPGTLLYLNGQIVKYLIMVIGTTSLAFVLTYMFGYEDKDEKAVAEVSPLVEETDDDPTI | 482 |
| | | ++PGTLLYLNGQ+++YL+ ++ +AF + Y +GY+D++ + V V++T D P + | |
| Sbjct: | 420 | VLPGTLLYLNGQLLQYLVTMLVGLGVAFAIAYTWGYQDRETLPLPAVE--VDQTADQPAL | 477 |
| Query: | 483 | TQTSQLRAETIVSPLDGQVIALDTVSDPVFSSGIMGDGLAIKPRGNTIYSPVDGFVQIAF | 542 |
| | | + ET+ SPL+G V+ L VSDPVFSSG MG GLAIKP NT+YSPVDG V+I F | |
| Sbjct: | 478 | AE------ETLYSPLNGTVVDLSAVSDPVFSSGAMGQGLAIKPEDNTLYSPVDGKVEIVF | 531 |
| Query: | 543 | ETGHAYGIKSDKGAEILIHIGIDTVTMNGTGFTSKVKADQKVKKGDILGTFDSAKIAEAG | 602 |
| | | ETGHAY I S +GAE+L+HIGIDT +M G GF S V Q VKKGD+LG FD +KIAEAG | |
| Sbjct: | 532 | ETGHAYAITSSQGAEVLLHIGIDTESMAGDGFESLVAVGQAVKKGDLLGHFDPSKIAEAG | 591 |
| Query: | 603 | LDNTAMIIVTNTADFADV | 620 |
| | | LD+T M+IV+N AD+ V | |
| Sbjct: | 592 | LDDTTMMIVSNIADYQSV | 609 |

[6481] Based on this analysis, it was predicted that these proteins and their epitopes could be useful antigens for vaccines or diagnostics.

### EXAMPLE 1163

[6482] A DNA sequence (GBSx1239) was identified in S. agalactiae <SEQ ID 3609> which encodes the amino acid sequence <SEQ ID 3610>. This protein is predicted to be fructokinase. Analysis of this protein sequence reveals the following:

```
Possible site: 18
>>> Seems to have no N-terminal signal sequence
----- Final Results -----
                          bacterial cytoplasm --- Certainty = 0.2436(Affirmative) < succ>
                            bacterial membrane --- Certainty = 0.0000(Not Clear) < succ>
                              bacterial outside --- Certainty = 0.0000(Not Clear) < succ>
```

[6483] The protein has homology with the following sequences in the GENPEPT database.

| >GP: BAA02467 GB: D13175 fructokinase [Streptococcus mutans] | | | |
|---|---|---|---|
| Identities = 232/291 (79%), Positives = 257/291 (87%) | | | |
| Query: | 1 | MTKLYGSIEAGGTKFVCAVGDEELKVVEKMQFPTTTPQETIKKTVDFFKRFEKKLEAVAI | 60 |
| | | M+KLYGSIEAGGTKFVCAVGDE +++EK+QFPTTTP ETI+KTV FFK+FE L +VAI | |
| Sbjct: | 1 | MSKLYGSIEAGGTKFVCAVGDENFQILEKVQFPTTTPYETIEKTVAFFKKFEADLASVAI | 60 |
| Query: | 61 | GSFGPIDIDKKSKTYGYITTTPKLHWANVDLLGLISKDFNVPFYFTTDVNSSAYGEVIAR | 120 |
| | | GSFGPIDID+ S TYGYIT+TPK +WANVD +GLISKDF +PFYFTTDVNSSAYGE IAR | |
| Sbjct: | 61 | GSFGPIDIDQNSDTYGYITSTPKPNWANVDFVGLISKDFKIPFYFTTDVNSSAYGETIAR | 120 |
| Query: | 121 | NNIDSLVYYTIGTGIGAGAIQKGEFIGGTGHTEAGHTYMAMHPQDQANDFKGICPFHNSC | 180 |
| | | +N+ SLVYYTIGTGIGAGAIQ GEFIGG GHTEAGH YMA HP D + F G CPFH C | |
| Sbjct: | 121 | SNVKSLVYYTIGTGIGAGAIQNGEFIGGMGHTEAGHVYMAPHPNDVHHGFVGTCPFHKGC | 180 |
| Query: | 181 | LEGLASGPTLEARTGIRGELIEENSMVWDVQAYYIAQAAIQATVLYRPQVIVFGGGVMAQ | 240 |
| | | LEGLA+GP+LEARTGIRGELIE+NS VWD+QAYYIAQAAIQATVLYRPQVIVFGGGVMAQ | |
| Sbjct: | 181 | LEGLAAGPSLEARTGIRGELIEQNSEVWDIQAYYIAQAAIQATVLYRPQVIVFGGGVMAQ | 240 |
| Query: | 241 | EHMLRRVRQTFATLLNGYLPVPDLSDYIVTPAIEENGSATLGNFALAKKIS | 291 |
| | | EHML RVR+ F +LLN YLPVPD+ DYIVTPA+ ENGSATLGN ALAKKI+ | |
| Sbjct: | 241 | EHMLNRVREKFTSLLNDYLPVPDVKDYIVTPAVAENGSATLGNLALAKKIA | 291 |

[6484] A related DNA sequence was identified in S. pyogenes <SEQ ID 3611> which encodes the amino acid sequence <SEQ ID 3612>. Analysis of this protein sequence reveals the following:

```
Possible site: 52
>>> Seems to have no N-terminal signal sequence
----- Final Results -----
                          bacterial cytoplasm --- Certainty = 0.2012(Affirmative) < succ>
                            bacterial membrane --- Certainty = 0.0000(Not Clear) < succ>
                              bacterial outside --- Certainty = 0.0000(Not Clear) < succ>
```

[6485] An alignment of the GAS and GBS proteins is shown below.

| Identities = 212/293 (72%), Positives = 246/293 (83%) | | | |
|---|---|---|---|
| Query: | 1 | MTKLYGSIEAGGTKFVCAVGDEELKVVEKMQFPTTTPQETIKKTVDFFKRFEKKLEAVAI | 60 |
| | | M KLYGSIEAGGTKFVCAVGDEE VV+K QFPTTTP+ETI +T+ +FK FE L +AI | |
| Sbjct: | 1 | MGKLYGSIEAGGTKFVCAVGDEEFTVVDKTQFPTTTPEETIARTIAYFKAFEADLAGMAI | 60 |
| Query: | 61 | GSFGPIDIDKKSKTYGYITTTPKLHWANVDLLGLISKDFNVPFYFTTDVNSSAYGEVIAR | 120 |
| | | GSFGPIDID S+TYGYITTTPK WANVDLLG +S F +PF TTDVNSSAYGEV+AR | |
| Sbjct: | 61 | GSFGPIDIDPSSETYGYITTTPKSGWANVDLLGQLSAAFKIPFDVTTDVNSSAYGEVLAR | 120 |
| Query: | 121 | NNIDSLVYYTIGTGIGAGAIQKGEFIGGTGHTEAGHTYMAMHPQDQANDFKGICPFHNSC | 180 |
| | | ++SLVYYTIGTGIGAGAIQ G FIGG GHTEAGHTY+ HP D A F G+CPFH C | |
| Sbjct: | 121 | PGVESLVYYTIGTGIGAGAIQHGHFIGGLGHTEAGHTYVMPHPDDMAKGFLGVCPFHKGC | 180 |
| Query: | 181 | LEGLASGPTLEARTGIRGELIEENSMVWDVQAYYIAQAAIQATVLYRPQVIVFGGGVMAQ | 240 |
| | | LEG+A+GP++EARTG+RGE +++ + VWD+QA+YIAQAA+QAT+LYRPQVIVFGGGVMAQ | |
| Sbjct: | 181 | LEGMAAGPSIEARTGVRGERLDQEADVWDIQAFYIAQAALQATMLYRPQVIVFGGGVMAQ | 240 |
| Query: | 241 | EHMLRRVRQTFATLLNGYLPVPDLSDYIVTPAIEENGSATLGNFALAKKISKG | 293 |
| | | EHM+ RV F LL+GYLPVPDL+DYIVTPA+ +NGSATLGNFALAK ++G | |
| Sbjct: | 241 | EHMVLRVHDKFTALLSGYLPVPDLTDYIVTPAVADNGSATLGNFALAKLAAQG | 293 |

[6486] Based on this analysis, it was predicted that these proteins and their epitopes could be useful antigens for vaccines or diagnostics.

### EXAMPLE 1164

[6487] A DNA sequence (GBSx1240) was identified in S. agalactiae <SEQ ID 3613> which encodes the amino acid sequence <SEQ ID 3614>. This protein is predicted to be Mannosephosphate Isomerase (pmi). Analysis of this protein sequence reveals the following:

```
Possible site: 50
>>> Seems to have no N-terminal signal sequence
----- Final Results -----
                          bacterial cytoplasm --- Certainty = 0.4717(Affirmative) < succ>
                            bacterial membrane --- Certainty = 0.0000(Not Clear) < succ>
                              bacterial outside --- Certainty = 0.0000(Not Clear) < succ>
```

[6488] The protein has homology with the following sequences in the GENPEPT database.

| >GP: BAA04021 GB: D16594 Mannosephosphate Isomerase | | | |
|---|---|---|---|
| [Streptococcus mutans] | | | |
| Identities = 232/312 (74%), Positives = 262/312 (83%) | | | |
| Query: | 1 | MSEPLFLEASMHDKIWGGTKLRDEFGYDIPSETTGEYWAISAHPNGVSRVKNGRFKGCFL | 60 |
| | | M PLFL++ MH KIWGG +LR EFGYDIPSETTGEYWAISAHPNGVS VKNG +KG L | |
| Sbjct: | 1 | MEGPLFLQSQMHKKIWGGNRLRKEFGYDIPSETTGEYWAISAHPNGVSVVKNGVYKGVPL | 60 |
| Query: | 61 | DKLYQGEKSLFGNPDDTVFPLLTKILDANDWLSVQVHPDDAYALKHEGELGKTECWYIIS | 120 |
| | | D+LY + LFGN +VFPLLTKILDANDWLSVQVHPD+AYAL+HEGELGKTECWY+IS | |
| Sbjct: | 61 | DELYAEHRELFGNSKSSVFPLLTKILDANDWLSVQVHPDNAYALEHEGELGKTECWYVIS | 120 |
| Query: | 121 | ADEGSEIIYGHNAKTKEELRQMIESGDWEHLLTRIPVKSGDFYYVPSGTMHAIGKGILIL | 180 |
| | | ADEG+EIIYGH AK+KEELRQMI +GDW+HLLT+IPVK+GDF+YVPSGTMHAIG+GI+IL | |
| Sbjct: | 121 | ADEGAEIIYGHEAKSKEELRQMIAAGDWDHLLTKIPVKAGDFFYVPSGTMHAIGRGIMIL | 180 |
| Query: | 181 | ETQQSSDTTYRVYDFDRPDASGKLRDLHIEQSIDVLTIGKPANTVPANMKLKHLSSTLLV | 240 |
| | | ETQQSSDTTYRVYDFDR D G+ R LHIEQSIDVLTIGKPAN PA + L+ L +T+LV | |
| Sbjct: | 181 | ETQQSSDTTYRVYDFDRKDDQGRKRALHIEQSIDVLTIGKPANATPAWLSLQGLETTVLV | 240 |
| Query: | 241 | SNDFFTVYKWEISGVTNFKQFAPYLLVSVLDGAGHITVDNKVYTLKKGDHFILPNDVVKW | 300 |
| | | S+ FFTVYKW+ISG +Q APYLLVSVL G G ITV + Y L+KGDH ILPN + W | |
| Sbjct: | 241 | SSPFFTVYKWQISGSVKMQQTAPYLLVSVLAGQGRITVGLEQYALRKGDHLILPNTIKSW | 300 |
| Query: | 301 | DIDGQLEIIASH | 312 |
| | | DG LEIIASH | |
| Sbjct: | 301 | QFDGDLEIIASH | 312 |

[6489] A related DNA sequence was identified in S. pyogenes <SEQ ID 3615> which encodes the amino acid sequence <SEQ ID 3616>. Analysis of this protein sequence reveals the following:

```
Possible site: 53
>>> Seems to have no N-terminal signal sequence
----- Final Results -----
                          bacterial cytoplasm --- Certainty = 0.3714(Affirmative) < succ>
                            bacterial membrane --- Certainty = 0.0000(Not Clear) < succ>
                              bacterial outside --- Certainty = 0.0000(Not Clear) < succ>
```

[6490] An alignment of the GAS and GBS proteins is shown below.

| Identities = 232/312 (74%), Positives = 264/312 (84%) | | | |
|---|---|---|---|
| Query: | 1 | MSEPLFLEASMHDKIWGGTKLRDEFGYDIPSETTGEYWAISAHPNGVSRVKNGRFKGCFL | 60 |
| | | MSEPLFL+++MHD+IWGGTKLRD F Y+IPS+TTGEYWAISAHPNGVS V NGR++G L | |
| Sbjct: | 1 | MSEPLFLKSTMHDRIWGGTKLRDVFAYNIPSDTTGEYWAISAHPNGVSTVTNGRYQGQPL | 60 |
| Query: | 61 | DKLYQGEKSLFGNPDDTVFPLLTKILDANDWLSVQVHPDDAYALKHEGELGKTECWYIIS | 120 |
| | | + LY E +LFGNP + VFPLLTKILDANDWLSVQVHPDDAY +HEGELGKTECWYIIS | |
| Sbjct: | 61 | NTLYAQEPALFGNPKEEVFPLLTKILDANDWLSVQVHPDDAYGREHEGELGKTECWYIIS | 120 |
| Query: | 121 | ADEGSEIIYGHNAKTKEELRQMIESGDWEHLLTRIPVKSGDFYYVPSGTMHAIGKGILIL | 180 |
| | | A+EGSEI+YGH AK+KE+LR MIE+G W+ LLTR+PVK+GDF+YVPSGTMHAIGKGILIL | |
| Sbjct: | 121 | AEEGSEIVYGHQAKSKEDLRAMIEAGAWDDLLTRVPVKAGDFFYVPSGTMHAIGKGILIL | 180 |
| Query: | 181 | ETQQSSDTTYRVYDFDRPDASGKLRDLHIEQSIDVLTIGKPANTVPANMKLKHLSSTLLV | 240 |
| | | ETQQSSDTTYRVYDFDR D +G LRDLHIE+SIDVLTIGKP N+VPA M L ++ +T LV | |
| Sbjct: | 181 | ETQQSSDTTYRVYDFDRKDVNGNLRDLHIEKSIDVLTIGKPENSVPATMVLDNMVATTLV | 240 |
| Query: | 241 | SNDFFTVYKWEISGVTNFKQFAPYLLVSVLDGAGHITVDNKVYTLKKGDHFILPNDVVKW | 300 |
| | | S FFTVYKW S + + KQ APYLLVSVL G G + VD K Y L+KG HFILPNDV W | |
| Sbjct: | 241 | STPFFTVYKWVTSQMVDMKQAAPYLLVSVLKGQGKLYVDQKAYELEKGMHFILPNDVKSW | 300 |
| Query: | 301 | DIDGQLEIIASH | 312 |
| | | DGQLE+I SH | |
| Sbjct: | 301 | SFDGQLEMIVSH | 312 |

[6491] Based on this analysis, it was predicted that these proteins and their epitopes could be useful antigens for vaccines or diagnostics.

### EXAMPLE 1165

[6492] A DNA sequence (GBSx1241) was identified in S. agalactiae <SEQ ID 3617> which encodes the amino acid sequence <SEQ ID 3618>. This protein is predicted to be preprotein translocase seca subunit (secA). Analysis of this protein sequence reveals the following:

```
Possible site: 53
>>> Seems to have no N-terminal signal sequence
----- Final Results -----
                          bacterial cytoplasm --- Certainty = 0.1102(Affirmative) < succ>
                            bacterial membrane --- Certainty = 0.0000(Not Clear) < succ>
                              bacterial outside --- Certainty = 0.0000(Not Clear) < succ>
```

[6493] A related GBS nucleic acid sequence <SEQ ID 10107> which encodes amino acid sequence <SEQ ID 10108> was also identified.

[6494] The protein has homology with the following sequences in the GENPEPT database.

| >GP: AAA50286 GB: L32090 secA [Listerie monocytogenes] | | | |
|---|---|---|---|
| Identities = 503/843 (59%), Positives = 643/843 (75%), Gaps = 16/843 (1%) | | | |
| Query: | 11 | MANILRTVIENDKGELKKLDKIAKKVDSYADHMAALSDEALQAKTPEFKERYQNGETLDQ | 70 |
| | | MA +L+ + E+ K ++K L++ A ++ + AD AALSD+AL+ KT EFKER Q GETLD | |
| Sbjct: | 1 | MAGLLKKIFESGKKDVKYLERKADEIIALADETAALSDDALREKTVEFKERVQKGETLDD | 60 |
| Query: | 71 | LLPEAFAVVREASKRVLGLYPYHVQIMGGIVLHHGDIPEMRTGEGKTLTATMPVYLNAIS | 130 |
| | | LL EAFAV RE +KR LGLYP+ VQ+MGGIVLH +I EM TGEGKTLTAT+PVYLNA+S | |
| Sbjct: | 61 | LLVEAFAVAREGAKRALGLYPFKVQLMGGIVLHEDNIAEMKTGEGKTLTATLPVYLNALS | 120 |
| Query: | 131 | GLGVHVITVNEYLSTRDATEMGEVYSWLGLSVGINLAAKSPFEKREAYNCDITYSTNAEV | 190 |
| | | G GVHV+TVNEYL+ RDA EMG +Y++LGLSVG+NL A S EKREAY CDITYSTN E+ | |
| Sbjct: | 121 | GEGVHVVTVNEYLAHRDAEEMGVLYNFLGLSVGLNLNALSSTEKREAYACDITYSTNNEL | 180 |
| Query: | 191 | GFDYLRDNMVVRQEDMVQRPLNYALVDEVDSVLIDEARTPLIVSGPVSSEMNQLYTRADM | 250 |
| | | GFDYLRDNMVV +E+MVQRPL +A++DEVDS+L+DEARTPLI+SG + + LY RA+ | |
| Sbjct: | 181 | GFDYLRDNMVVYKEEMVQRPLAFAVIDEVDSILVDEARTPLIISGE-AEKSTILYVRANT | 239 |
| Query: | 251 | FVKTL-NSDDYIIDVPTKTIGLSDTGIDKAENYFHLNNLYDLENVALTHYIDNALRANYI | 309 |
| | | FV+TL +DY +D+ TK++ L++ G+ K ENYF + NL+DLEN + H+I AL+ANY | |
| Sbjct: | 240 | FVRTLTEEEDYTVDIKTKSVQLTEDGMTKGENYFDVENLFDLENTVILHHIAQALKANYT | 299 |
| Query: | 310 | MLLNIDYVVSEEQEILIVDQFTGRTMEGRRFSDGLHQAIEAKESVPIQEESKTSASITYQ | 369 |
| | | M L++DYVV ++ E+LIVDQFTGR M+GRRFS+GLHQA+EAKE V IQ ESKT A+IT+Q | |
| Sbjct: | 300 | MSLDVDYVV-QDDEVLIVDQFTGRIMKGRRFSEGLHQALEAKEGVTIQNESKTMATITFQ | 358 |
| Query: | 370 | NMFRMYHKLAGMTGTGKTEEEEFREIYNMRVIPIPTNRPVQRIDHSDLLYPTLDSKFRAV | 429 |
| | | N FRMY KLAGMTGT KTEEEEFR+IYNMRVI IPTN+ + R D DL+Y T+++KF AV | |
| Sbjct: | 359 | NYFRMYKKLAGMTGTAKTEEEEFRDIYNMRVIEIPTNKVIIRDDRPDLIYTTMEAKFNAV | 418 |
| Query: | 430 | VADVKERYEQGQPVLVGTVAVETSDLISRKLVAAGVPHEVLNAKNHFKEAQIIMNAGQRG | 489 |
| | | V D+ ER+ +GQPVLVGTVA+ +LIS KL G+ H+VLNAK H +EA II +AG+RG | |
| Sbjct: | 419 | VEDIAERHAKGQPVLVGTVAMNI-ELISSKLKRKGIKHDVLNAKQHEREADIIKHAGERG | 477 |
| Query: | 490 | AVTIATNMAGRGTDIKLGEGVRELGGLCVIGTERHESRRIDNQLRGRSGRQGDPGESQFY | 549 |
| | | AV IATNMAGRGTDIKLGEG E GGL VIGTERHESRRIDNQLRGRSGRQGDPG +QFY | |
| Sbjct: | 478 | AVVIATNMAGRGTDIKLGEGTIEAGGLAVIGTERHESRRIDNQLRGRSGRQGDPGVTQFY | 537 |
| Query: | 550 | LSLEDDLMRRFGTDRIKVVLERMNLAEDDTVIKSKMLTRQVESAQRRVEGNNYDTRKQVL | 609 |
| | | LS+ED+LMRRFG+D +K ++ER +AED I+SKM++R VESAQRRVEGNN+D+RKQVL | |
| Sbjct: | 538 | LSMEDELMRRFGSDNMKSMMERFGMAED--AIQSKMVSRAVESAQRRVEGNNFDSRKQVL | 595 |
| Query: | 610 | QYDDVMREQREIIYANRREVITAERDLGPELKGMIKRTIKRAVDAHSRSDKNTAA---EA | 666 |
| | | QYDDV+R+QRE+IY R EVI AE L ++ MI+RT+ V +++ S + A + | |
| Sbjct: | 596 | QYDDVLRQQREVIYKQRYEVINAENSLREIIEQMIQRTVNFIVSSNASSHEPEEAWNLQG | 655 |
| Query: | 667 | IVNFARSALLDEEAITVSELRGLKEAEIKELLYERALAVYEQQIAKLKDPEAIIEFQKVL | 726 |
| | | I+++ + LL E IT+ +L+ +I+ L+ ++ A Y+++ L PE EF+KV+ | |
| Sbjct: | 656 | IIDYVDANLLPEGTITLEDLQNRTSEDIQNLILDKIKAAYDEK-ETLLPPEEFNEFEKVV | 714 |
| Query: | 727 | ILMVVDNQWTEHIDALDQLRNSVGLRGYAQNNPIVEYQSEGFRMFQDMIGSIEFDVTRTL | 786 |
| | | +L VVD +W +HIDA+D LR+ + LR Y Q +P+ EYQSEGF MF+ M+ SI+ DV R + | |
| Sbjct: | 715 | LLRVVDTKWVDHIDAMDHLRDGIHLRAYGQIDPLREYQSEGFEMFEAMVSSIDEDVARYI | 774 |
| Query: | 787 | MKAQIHEQ-ERER-ASQHATTTAEQNISAQHVPMNNESPEYQGIKRNDKCPCGSGMKFKN | 844 |
| | | MKA+I + ERE+ A A AE A+ P+ + Q I RND CPCGSG K+KN | |
| Sbjct: | 775 | MKAEIRQNLEREQVAKGEAINPAEGKPEAKRQPIRKD----QHIGRNDPCPCGSGKKYKN | 830 |
| Query: | 845 | CHG | 847 |
| | | CHG | |
| Sbjct: | 831 | CHG | 833 |

[6495] A related DNA sequence was identified in S. pyogenes <SEQ ID 3619> which encodes the amino acid sequence <SEQ ID 3620>. Analysis of this protein sequence reveals the following:

```
Possible site: 43
>>> Seems to have no N-terminal signal sequence
----- Final Results -----
                          bacterial cytoplasm --- Certainty = 0.4443(Affirmative) < succ>
                            bacterial membrane --- Certainty = 0.0000(Not Clear) < succ>
                              bacterial outside --- Certainty = 0.0000(Not Clear) < succ>
```

[6496] An alignment of the GAS and GBS proteins is shown below.

| Identities = 710/837 (84%), Positives = 777/837 (92%), Gaps = 3/837 (0%) | | | |
|---|---|---|---|
| Query: | 11 | MANILRTVIENDKGELKKLDKIAKKVDSYADHMAALSDEALQAKTPEFKERYQNGETLDQ | 70 |
| | | MANILR VIENDKGEL+KL+KIAKKV+SYAD MA+LSD LQ KT EFKERYQ GETL+Q | |
| Sbjct: | 1 | MANILRKVIENDKGELRKLEKIAKKVESYADQMASLSDRDLQGKTLEFKERYQKGETLEQ | 60 |
| Query: | 71 | LLPEAFAVVREASKRVLGLYPYHVQIMGGIVLHHGDIPEMRTGEGKTLTATMPVYLNAIS | 130 |
| | | LLPEAFAVVREA+KRVLGL+PY VQIMGGIVLH+GD+PEMRTGEGKTLTATMPVYLNAI+ | |
| Sbjct: | 61 | LLPEAFAVVREAAKRVLGLFPYRVQIMGGIVLHNGDVPEMRTGEGKTLTATMPVYLNAIA | 120 |
| Query: | 131 | GLGVHVITVNEYLSTRDATEMGEVYSWLGLSVGINLAAKSPFEKREAYNCDITYSTNAEV | 190 |
| | | G GVHVITVNEYLSTRDATEMGEVYSWLGLSVGINLAAKSP EKREAYNCDITYSTN+EV | |
| Sbjct: | 121 | GEGVHVITVNEYLSTRDATEMGEVYSWLGLSVGINLAAKSPAEKREAYNCDITYSTNSEV | 180 |
| Query: | 191 | GFDYLRDNMVVRQEDMVQRPLNYALVDEVDSVLIDEARTPLIVSGPVSSEMNQLYTRADM | 250 |
| | | GFDYLRDNMVVRQEDMVQRPLN+ALVDEVDSVLIDEARTPLIVSG VSSE NQLY RADM | |
| Sbjct: | 181 | GFDYLRDNMVVRQEDMVQRPLNFALVDEVDSVLIDEARTPLIVSGAVSSETNQLYIRADM | 240 |
| Query: | 251 | FVKTLNSDDYIIDVPTKTIGLSDTGIDKAENYFHLNNLYDLENVALTHYIDNALRANYIM | 310 |
| | | FVKTL S DY+IDVPTKTIGLSD+GIDKAE+YF+L+NLYD+ENVALTH+IDNALRANYIM | |
| Sbjct: | 241 | FVKTLTSVDYVIDVPTKTIGLSDSGIDKAESYFNLSNLYDIENVALTHFIDNALRANYIM | 300 |
| Query: | 311 | LLNIDYVVSEEQEILIVDQFTGRTMEGRRFSDGLHQAIEAKESVPIQEESKTSASITYQN | 370 |
| | | LL+IDYVVSE+ EILIVDQFTGRTMEGRRFSDGLHQAIEAKE V IQEESKTSASITYQN | |
| Sbjct: | 301 | LLDIDYVVSEDGEILIVDQFTGRTMEGRRFSDGLHQAIEAKEGVRIQEESKTSASITYQN | 360 |
| Query: | 371 | MFRMYHKLAGMTGTGKTEEEEFREIYNMRVIPIPTNRPVQRIDHSDLLYPTLDSKFRAVV | 430 |
| | | MFRMY KLAGMTGT KTEEEEFRE+YNMR+IPIPTNRP+ RIDH+DLLYPTL+SKFRAVV | |
| Sbjct: | 361 | MFRMYKKLAGMTGTAKTEEEEFREVYNMRIIPIPTNRPIARIDHTDLLYPTLESKFRAVV | 420 |
| Query: | 431 | ADVKERYEQGQPVLVGTVAVETSDLISRKLVAAGVPHEVLNAKNHFKEAQIIMNAGQRGA | 490 |
| | | DVK R+ +GQP+LVGTVAVETSDLISRKLV AG+PHEVLNAKNHFKEAQIIMNAGQRGA | |
| Sbjct: | 421 | EDVKTRHAKGQPILVGTVAVETSDLISRKLVEAGIPHEVLNAKNHFKEAQIIMNAGQRGA | 480 |
| Query: | 491 | VTIATNMAGRGTDIKLGEGVRELGGLCVIGTERHESRRIDNQLRGRSGRQGDPGESQFYL | 550 |
| | | VTIATNMAGRGTDIKLGEGVRELGGLCVIGTERHESRRIDNQLRGRSGRQGDPGESQFYL | |
| Sbjct: | 481 | VTIATNMAGRGTDIKLGEGVRELGGLCVIGTERHESRRIDNQLRGRSGRQGDPGESQFYL | 540 |
| Query: | 551 | SLEDDLMRRFGTDRIKVVLERMNLAEDDTVIKSKMLTRQVESAQRRVEGNNYDTRKQVLQ | 610 |
| | | SLEDDLMRRFG+DRIK L+RM L E+DTVIKS ML RQVESAQ+RVEGNNYDTRKQVLQ | |
| Sbjct: | 541 | SLEDDLMRRFGSDRIKAFLDRMKLDEEDTVIKSGMLGRQVESAQKRVEGNNYDTRKQVLQ | 600 |
| Query: | 611 | YDDVMREQREIIYANRREVITAERDLGPELKGMIKRTIKRAVDAHSRSDKNTAAEAIVNF | 670 |
| | | YDDVMREQREIIYANRR+VITA RDLGPE+K MIKRTI RAVDAH+RS++ A +AIV F | |
| Sbjct: | 601 | YDDVMREQREIIYANRRDVITANRDLGPEIKAMIKRTIDRAVDAHARSNRKDAIDAIVTF | 660 |
| Query: | 671 | ARSALLDEEAITVSELRGLKEAEIKELLYERALAVYEQQIAKLKDPEAIIEFQKVLILMV | 730 |
| | | AR++L+ EE I+ ELRGLK+ +IKE LY+RALA+Y+QQ++KL+D EAIIEFQKVLILM+ | |
| Sbjct: | 661 | ARTSLVPEEFISAKELRGLKDDQIKEKLYQRALAIYDQQLSKLRDQEAIIEFQKVLILMI | 720 |
| Query: | 731 | VDNQWTEHIDALDQLRNSVGLRGYAQNNPIVEYQSEGFRMFQDMIGSIEFDVTRTLMKAQ | 790 |
| | | VDN+WTEHIDALDQLRN+VGLRGYAQNNP+VEYQ+EGF+MFQDMIG+IEFDVTRT+MKAQ | |
| Sbjct: | 721 | VDNKWTEHIDALDQLRNAVGLRGYAQNNPVVEYQAEGFKMFQDMIGAIEFDVTRTMMKAQ | 780 |
| Query: | 791 | IHEQERERASQHATTTAEQNISAQHVPMNNESPEYQGIKRNDKCPCGSGMKFKNCHG | 847 |
| | | IHEQERERASQ ATT A QNI +Q ++ P+ ++RN+ CPCGSG KFKNCHG | |
| Sbjct: | 781 | IHEQERERASQRATTAAPQNIQSQQSANTDDLPK---VERNEACPCGSGKKFKNCHG | 834 |

[6497] Based on this analysis, it was predicted that these proteins and their epitopes could be useful antigens for vaccines or diagnostics.

### EXAMPLE 1166

[6498] A DNA sequence (GBSx1242) was identified in S. agalactiae <SEQ ID 3621> which encodes the amino acid sequence <SEQ ID 3622>. This protein is predicted to be phospho-2-dehydro-3-deoxyheptonate aldolase (aroH). Analysis of this protein sequence reveals the following:

```
Possible site: 31
>>> Seems to have no N-terminal signal sequence
----- Final Results -----
                            bacterial cytoplasm --- Certainty = 0.3429(Affirmative) < succ>
                              bacterial membrane --- Certainty = 0.0000(Not Clear) < succ>
                                bacterial outside --- Certainty = 0.0000(Not Clear) < succ>
```

[6499] The protein has homology with the following sequences in the GENPEPT database.

| >GP: AAF40753 GB: AE002387 phospho-2-dehydro-3-deoxyheptonate | | | |
|---|---|---|---|
| aldolase, phe-sensitive [Neisseria meningitidis MC58] | | | |
| Identities = 122/348 (35%), Positives = 187/348 (53%), Gaps = 32/348 (9%) | | | |
| Query: | 1 | MGFHQLSDKINIEILKQKTSLDLEVSQKKLAKE---------EELKNIIKGEDQRFLVIV | 51 |
| | | M H +D I I+ +K+ + + ++KE +E+ +++ G D+R LVI+ | |
| Sbjct: | 1 | MTHHYPTDDIKIKEVKELLPPIAHLYELPISKEASGLVHRTRQEISDLVHGRDKRLLVII | 60 |
| Query: | 52 | GPCSADNPKAVLTYAKRLAKLEAAFKDKMFLVMRVYTAKPRTNGDGYKGLVHHSDKLGVF | 111 |
| | | GPCS +PKA L YA+RL KL +++++ +VMRVY KPRT G+KGL++ G F | |
| Sbjct: | 61 | GPCSIHDPKAALEYAERLLKLRKQYENELLIVMRVYFEKPRTT-VGWKGLINDPHLDGTF | 119 |
| Query: | 112 | ------FQARKMHYDIIRETGLLTADELLYPEMLSVMDDLVSYYAIGARSVEDQGHRFIS | 165 |
| | | QAR + + G+ + E L DL+S+ AIGAR+ E Q HR ++ | |
| Sbjct: | 120 | DINFGLRQARSLLLS-LNNMGMPASTEFLDMITPQYYADLISWGAIGARTTESQVHRELA | 178 |
| Query: | 166 | SGIDAPVGMKNPTSGNLRVMFNAVYAAQNQQELFYQNKQ-----VRTDGNLLSHVILRGY | 220 |
| | | SG+ PVG KN T GNL++ +A+ AA + K V T GN HVILRG | |
| Sbjct: | 179 | SGLSCPVGFKNGTDGNLKIAIDAIGAASHSHHFLSVTKAGHSAIVHTGGNPDCHVILRGG | 238 |
| Query: | 221 | HNADYRSIPNYHYENLLETITHYEETDLQNPFIVVDTNHDNSGKQFLEQIRIVKSVLADR | 280 |
| | | PNY E++ E + + +++D +H NS K + Q+ + + + A | |
| Sbjct: | 239 | KE------PNYDAEHVSEAAEQLRAAGVTDK-LMIDCSHANSRKDYTRQMEVAQDIAAQL | 291 |
| Query: | 281 | QWHTKIRNYVRGFLIESYLEDGRQDKPDVFGKSITDPCLGWDKTEMLI | 328 |
| | | + + + G ++ES+L +GRQDKP+V+GKSITD C+GW TE L+ | |
| Sbjct: | 292 | E---QDGGNIMGVMVESHLVEGRQDKPEVYGKSITDACIGWGATEELL | 336 |

[6500] A related DNA sequence was identified in S. pyogenes <SEQ ID 3623> which encodes the amino acid sequence <SEQ ID 3624>. Analysis of this protein sequence reveals the following:

```
Possible site: 57
>>> Seems to have no N-terminal signal sequence
----- Final Results -----
                            bacterial cytoplasm --- Certainty = 0.1171(Affirmative) < succ>
                              bacterial membrane --- Certainty = 0.0000(Not Clear) < succ>
                                bacterial outside --- Certainty = 0.0000(Not Clear) < succ>
```

[6501] An alignment of the GAS and GBS proteins is shown below.

| Identities = 52/233 (22%), Positives = 93/233 (39%), Gaps = 40/233 (17%) | | | |
|---|---|---|---|
| Query: | 50 | IVGPCSADNPKAVLTYAKRLAKLEAAFKDKMFLVMRVYTAKPRTNGDGYKGLVHHSDKLG | 109 |
| | | IVGPCS ++ + A KL + R KPRT+ ++GL | |
| Sbjct: | 19 | IVGPCSIESYDHIRLAASSAKKLGYNY-------FRGGAYKPRTSAASFQGLG------- | 64 |
| Query: | 110 | VFFQARKMHYDIIRETGLLTADELLYPEMLSVMDDLVSYYAIGARSVEDQGHRFISSGID | 169 |
| | | Q + +++ +E GLL+ E++ L D + +GAR++++ S ID | |
| Sbjct: | 65 | --LQGIRYLHEVCQEFGLLSVSEIMSERQLEEAYDYLDVIQVGARNMQNFEFLKTLSHID | 122 |
| Query: | 170 | APVGMKNPTSGNLRVMFNAVYAAQNQQELFYQNKQVRTDGNLLSHVIL--RGYHNADYRS | 227 |
| | | P+ K + A+ Q+ + S++IL RG D | |
| Sbjct: | 123 | KPILFKRGLMATIEEYLGALSYLQDTGK---------------SNIILCERGVRGYD--- | 164 |
| Query: | 228 | IPNYHYENLLETITHYEETDLQNPFIVVDTNHDNSGKQ-FLEQIRIVKSVLAD | 279 |
| | | + + +++ ++TDL I+VD +H + L +I K+V A+ | |
| Sbjct: | 165 | VETRNMLDIMAVPIIQQKTDLP---IIVDVSHSTGRRDLLLPAAKIAKAVGAN | 214 |

[6502] Based on this analysis, it was predicted that these proteins and their epitopes could be useful antigens for vaccines or diagnostics.

### EXAMPLE 1167

[6503] A DNA sequence (GBSx1243) was identified in S. agalactiae <SEQ ID 3625> which encodes the amino acid sequence <SEQ ID 3626>. This protein is predicted to be AcpS (acpS). Analysis of this protein sequence reveals the following:

```
Possible site: 59
>>> Seems to have no N-terminal signal sequence
----- Final Results -----
                            bacterial cytoplasm --- Certainty = 0.3620(Affirmative) < succ>
                              bacterial membrane --- Certainty = 0.00000(Not Clear) < succ>
                                bacterial outside --- Certainty = 0.00000(Not Clear) < succ>
```

[6504] The protein has homology with the following sequences in the GENPEPT database.

| >GP: AAG22706 GB: AF276617 acyl carrier protein synthase; AcpS | | | |
|---|---|---|---|
| [Streptococcus pneumoniae] | | | |
| Identities = 61/117 (52%), Positives = 90/117 (76%), Gaps = 1/117 (0%) | | | |
| Query: | 1 | MIVGHGIDLQEIEAITKAYERNQRFAERVLTEQELLLFKGISNPKRQMSFLTGRWAAKEA | 60 |
| | | MIVGHGID++E+ +I A R++ FA+RVLT QE+ F + +RQ+ +L GRW+AKEA | |
| Sbjct: | 1 | MIVGHGIDIEELASIESAVTRHEGFAKRVLTAQEMERFTSLKG-RRQIEYLAGRWSAKEA | 59 |
| Query: | 61 | YSKALGTGIGKVNFHDIEILSDDKGAPLITKEPFNGKSFVSISHSGNYAQASVILEE | 117 |
| | | +SKA+GTGI K+ F D+E+L++++GAP ++ PF+GK ++SISH+ + ASVILEE | |
| Sbjct: | 60 | FSKAMGTGISKLGFQDLEVLNNERGAPYFSQAPFSGKIWLSISHTDQFVTASVILEE | 116 |

[6505] A related DNA sequence was identified in S. pyogenes <SEQ ID 3627> which encodes the amino acid sequence <SEQ ID 3628>. Analysis of this protein sequence reveals the following:

```
Possible site: 61
>>> Seems to have no N-terminal signal sequence
----- Final Results -----
                            bacterial cytoplasm --- Certainty = 0.2001(Affirmative) < succ>
                              bacterial membrane --- Certainty = 0.0000(Not Clear) < succ>
                              bacterial outside --- Certainty = 0.0000(Not Clear) < succ>
```

[6506] An alignment of the GAS and GBS proteins is shown below.

| Identities = 76/119 (63%), Positives = 99/119 (82%), Gaps = 1/119 (0%) | | | |
|---|---|---|---|
| Query: | 1 | MIVGHGIDLQEIEAITKAYERNQRFAERVLTEQELLLFKGISNPKRQMSFLTGRWAAKEA | 60 |
| | | MIVGHGIDLQEI AI K Y+RN RFA+++LTEQEL +F+ KR++++L GRW+ KEA | |
| Sbjct: | 1 | MIVGHGIDLQEISAIEKVYQRNPRFAQKILTEQELAIFESFPY-KRRLNYLAGRWSGKEA | 59 |
| Query: | 61 | YSKALGTGIGKVNFHDIEILSDDKGAPLITKEPFNGKSFVSISHSGNYAQASVILEEEK | 119 |
| | | ++KA+GTGIG++ F DIEIL+D +G P++TK PF G SF+SISHSGNY QASVILE++K | |
| Sbjct: | 60 | FAKAIGTGIGRLTFQDIEILNDVRGCPILTKSPFKGNSFISISHSGNYVQASVILEDKK | 118 |

[6507] Based on this analysis, it was predicted that these proteins and their epitopes could be useful antigens for vaccines or diagnostics.

### EXAMPLE 1168

[6508] A DNA sequence (GBSx1244) was identified in S. agalactiae <SEQ ID 3629> which encodes the amino acid sequence <SEQ ID 3630>. Analysis of this protein sequence reveals the following:

| Possible site: 19 | | | | |
|---|---|---|---|---|
| >>> Seems to have no N-terminal signal sequence | | | | |
| | INTEGRAL | Likelihood = −3.24 | Transmembrane | 78-94 (77-97) |

```
----- Final Results -----
                              bacterial membrane --- Certainty = 0.2296(Affirmative) < succ>
                                bacterial outside --- Certainty = 0.0000(Not Clear) < succ>
                            bacterial cytoplasm --- Certainty = 0.0000(Not Clear) < succ>
```

[6509] The protein has homology with the following sequences in the GENPEPT database.

| >GP: AAD51027 GB: AF171873 alanine racemase [Streptococcus pneumoniae] | | | |
|---|---|---|---|
| Identities = 227/366 (62%), Positives = 270/366 (73%) | | | |
| Query: | 1 | MISSYHRPTRALIDLEAIANNVKSVQEHIPSDKKTFAVVKANAYGHGAVEVSKYIESIVD | 60 |
| | | M +S HRPT+ALI L AI N++ + HIP AVVKANAYGHGAV V+K I+ VD | |
| Sbjct: | 1 | MKASPHRPTKALIHLGAIRQNIQQMGAHIPQGTLKLAVVKANAYGHGAVAVAKAIQDDVD | 60 |
| Query: | 61 | GFCVSNLDEAIELRQAGIVKMILVLGVVMPEQVILAKNENITLTVASLEWLRLCQTSAVD | 120 |
| | | GFCVSN+DEAIELRQAG+ K IL+LGV E V LAK + TLTVA LEW++ VD | |
| Sbjct: | 61 | GFCVSNIDEAIELRQAGLSKPILILGVSEIEAVALAKEYDFTLTVAGLEWIQALLDKEVD | 120 |
| Query: | 121 | LSGLEVHIKVDSGMGRIGVRQLDEGNKLISELGESGASVKGIFTHFATADEADNCKFNQQ | 180 |
| | | L+GL VH+K+DSGMGRIG R+ E + L + G V+GIFTHFATADE + FN Q | |
| Sbjct: | 121 | LTGLTVHLKIDSGMGRIGFREASEVEQAQDLLQQHGVCVEGIFTHFATADEESDDYFNAQ | 180 |
| Query: | 181 | LTFFKDFISGLDNCPDLVHASNSATSLWHSETIFNAVRLGVVMYGLNPSGTDLDLPYPIN | 240 |
| | | L FK ++ + P+LVHASNSAT+LWH ETIFNAVR+G MYGLNPSG LDLPY + | |
| Sbjct: | 181 | LERFKTILASMKEVPELVHASNSATTLWHVETIFNAVRMGDAMYGLNPSGAVLDLPYDLI | 240 |
| Query: | 241 | PALSLESELVHVKQLHDGSQVGYGATYQVTGDEFVGTVPIGYADGWTRDMQGFSVIVNGE | 300 |
| | | PAL+LES LVHVK + G+ +GYGATYQ ++ + TVPIGYADGWTRDMQ FSV+V+G+ | |
| Sbjct: | 241 | PALTLESALVHVKTVPAGACMGYGATYQADSEQVIATVPIGYADGWTRDMQNFSVLVDGQ | 300 |
| Query: | 301 | LCEIIGRVSMDQMTIRLPQKYTIGTKVTLIGQQGSCNITTTDVAQKRQTINYEVLCLLSD | 360 |
| | | C I+GRVSMDQ+TIRLP+ Y +GTKVTLIG G IT T VA R TINYEV+CLLSD | |
| Sbjct: | 301 | ACPIVGRVSMDQITIRLPKLYPLGTKVTLIGSNGDKEITATQVATYRVTINYEVVCLLSD | 360 |
| Query: | 361 | RIPRYY | 366 |
| | | RIPR Y | |
| Sbjct: | 361 | RIPREY | 366 |

[6510] A related DNA sequence was identified in S. pyogenes <SEQ ID 3631> which encodes the amino acid sequence <SEQ ID 3632>. Analysis of this protein sequence reveals the following:

| Possible site: 41 | | | | |
|---|---|---|---|---|
| >>> Seems to have no N-terminal signal sequence | | | | |
| | INTEGRAL | Likelihood = −2.34 | Transmembrane | 82-98 (82-98) |

```
----- Final Results -----
                              bacterial membrane --- Certainty = 0.1935(Affirmative) < succ>
                                bacterial outside --- Certainty = 0.0000(Not Clear) < succ>
                            bacterial cytoplasm --- Certainty = 0.0000(Not Clear) < succ>
```

[6511] The protein has homology with the following sequences in the databases:

| >GP: AAD51027 GB: AF171873 alanine racemase [Streptococcus pneumoniae] | | | |
|---|---|---|---|
| Identities = 222/366 (60%), Positives = 273/366 (73%) | | | |
| Query: | 1 | MISSFHRPTVARVNLQAIKENVASVQKHIPLGVKTYAVVKADAYGHGAVQVSKALLPQVD | 60 |
| | | M +S HRPT A ++L AI++N+ + HIP G AVVKA+AYGHGAV V+KA+ VD | |
| Sbjct: | 1 | MKASPHRPTKALIHLGAIRQNIQQMGAHIPQGTLKLAVVKANAYGHGAVAVAKAIQDDVD | 60 |
| Query: | 61 | GYCVSNLDEALQLRQAGIDKEILILGVLLPNELELAVANAITVTIASLDWIALARLEKKE | 120 |
| | | G+CVSN+DEA++LRQAG+ K ILILGV + LA T+T+A L+WI ++ + | |
| Sbjct: | 61 | GFCVSNIDEAIELRQAGLSKPILILGVSEIEAVALAKEYDFTLTVAGLEWIQALLDKEVD | 120 |
| Query: | 121 | CQGLKVHVKVDSGMGRIGLRSSKEVNLLIDSLKELGADVEGIFTHFATADEADDTKFNQQ | 180 |
| | | GL VH+K+DSGMGRIG R + EV D L++ G VEGIFTHFATADE D FN Q | |
| Sbjct: | 121 | LTGLTVHLKIDSGMGRIGFREASEVEQAQDLLQQHGVCVEGIFTHFATADEESDDYFNAQ | 180 |
| Query: | 181 | LQFFKKLIAGLEDKPRLVHASNSATSIWHSDTIFNAVRLGIVSYGLNPSGSDLSLPFPLQ | 240 |
| | | L+ FK ++A +++ P LVHASNSAT++WH +TIFNAVR+G YGLNPSG+ L LP+ L | |
| Sbjct: | 181 | LERFKTILASMKEVPELVHASNSATTLWHVETIFNAVRMGDAMYGLNPSGAVLDLPYDLI | 240 |
| Query: | 241 | EALSLESSLVHVKMISAGDTVGYGATYTAKKSEYVGTVPIGYADGWTRNMQGFSVLVDGQ | 300 |
| | | AL+LES+LVHVK + AG +GYGATY A + + TVPIGYADGWTR+MQ FSVLVDGQ | |
| Sbjct: | 241 | PALTLESALVHVKTVPAGACMGYGATYQADSEQVIATVPIGYADGWTRDMQNFSVLVDGQ | 300 |
| Query: | 301 | FCEIIGRVSMDQLTIRLPKAYPLGTKVTLIGSNQQKNISTTDIANYRNTINYEVLCLLSD | 360 |
| | | C I+GRVSMDQ+TIRLPK YPLGTKVTLIGSN K I+ T +A YR TINYEV+CLLSD | |
| Sbjct: | 301 | ACPIVGRVSMDQITIRLPKLYPLGTKVTLIGSNGDKEITATQVATYRVTINYEVVCLLSD | 360 |
| Query: | 361 | RIPRIY | 366 |
| | | RIPR Y | |
| Sbjct: | 361 | RIPREY | 366 |

[6512] An alignment of the GAS and GBS proteins is shown below.

| Identities = 247/366 (67%), Positives = 295/366 (80%) | | | |
|---|---|---|---|
| Query: | 1 | MISSYHRPTRALIDLEAIANNVKSVQEHIPSDKKTFAVVKANAYGHGAVEVSKYIESIVD | 60 |
| | | MISS+HRPT A ++L+AI NV SVQ+HIP KT+AVVKA+AYGHGAV+VSK + VD | |
| Sbjct: | 1 | MISSFHRPTVARVNLQAIKENVASVQKHIPLGVKTYAVVKADAYGHGAVQVSKALLPQVD | 60 |
| Query: | 61 | GFCVSNLDEAIELRQAGIVKMILVLGVVMPEQVILAKNENITLTVASLEWLRLCQTSAVD | 120 |
| | | G+CVSNLDEA++LRQAGI K IL+LGV++P ++ LA IT+T+ASL+W+ L + + | |
| Sbjct: | 61 | GYCVSNLDEALQLRQAGIDKEILILGVLLPNELELAVANAITVTIASLDWIALARLEKKE | 120 |
| Query: | 121 | LSGLEVHIKVDSGMGRIGVRQLDEGNKLISELGESGASVKGIFTHFATADEADNCKFNQQ | 180 |
| | | GL+VH+KVDSGMGRIG+R E N LI L E GA V+GIFTHFATADEAD+ KFNQQ | |
| Sbjct: | 121 | CQGLKVHVKVDSGMGRIGLRSSKEVNLLIDSLKELGADVEGIFTHFATADEADDTKFNQQ | 180 |
| Query: | 181 | LTFFKDFISGLDNCPDLVHASNSATSLWHSETIFNAVRLGVVMYGLNPSGTDLDLPYPIN | 240 |
| | | L FFK I+GL++ P LVHASNSATS+WHS+TIFNAVRLG+V YGLNPSG+DL LP+P+ | |
| Sbjct: | 181 | LQFFKKLIAGLEDKPRLVHASNSATSIWHSDTIFNAVRLGIVSYGLNPSGSDLSLPFPLQ | 240 |
| Query: | 241 | PALSLESELVHVKQLHDGSQVGYGATYQVTGDEFVGTVPIGYADGWTRDMQGFSVIVNGE | 300 |
| | | ALSLES LVHVK + G VGYGATY E+VGTVPIGYADGWTR+MQGFSV+V+G+ | |
| Sbjct: | 241 | EALSLESSLVHVKMISAGDTVGYGATYTAKKSEYVGTVPIGYADGWTRNMQGFSVLVDGQ | 300 |
| Query: | 301 | LCEIIGRVSMDQMTIRLPQKYTIGTKVTLIGQQGSCNITTTDVAQKRQTINYEVLCLLSD | 360 |
| | | CEIIGRVSMDQ+TIRLP+ Y +GTKVTLIG NI+TTD+A R TINYEVLCLLSD | |
| Sbjct: | 301 | FCEIIGRVSMDQLTIRLPKAYPLGTKVTLIGSNQQKNISTTDIANYRNTINYEVLCLLSD | 360 |
| Query: | 361 | RIPRYY | 366 |
| | | RIPR Y | |
| Sbjct: | 361 | RIPRIY | 366 |

[6513] Based on this analysis, it was predicted that these proteins and their epitopes could be useful antigens for vaccines or diagnostics.

### EXAMPLE 1169

[6514] A DNA sequence (GBSx1245) was identified in S. agalactiae <SEQ ID 3633> which encodes the amino acid sequence <SEQ ID 3634>. This protein is predicted to be immunogenic secreted protein precursor. Analysis of this protein sequence reveals the following:

```
Possible site: 27
>>> Seems to have a cleavable N-term signal seq.
----- Final Results -----
                                bacterial outside --- Certainty = 0.3000(Affirmative) < succ>
                              bacterial membrane --- Certainty = 0.0000(Not Clear) < succ>
                            bacterial cytoplasm --- Certainty = 0.0000(Not Clear) < succ>
```

[6515] There is also homology to SEQ ID 1988.

[6516] A related GBS gene <SEQ ID 8745> and protein <SEQ ID 8746> were also identified. Analysis of this protein sequence reveals the following:

```
Lipop: Possible site: −1 Crend: 4
McG: Discrim Score: 8.81
GvH: Signal Score (−7.5): 0.659999
          Possible site: 27
>>> Seems to have a cleavable N-term signal seq.
ALOM program count: 0 value: 1.06 threshold: 0.0
      PERIPHERAL Likelihood = 1.06 247
modified ALOM score: −0.71
*** Reasoning Step: 3
----- Final Results -----
                                bacterial outside --- Certainty = 0.3000(Affirmative) < succ>
                              bacterial membrane --- Certainty = 0.0000(Not Clear) < succ>
                            bacterial cytoplasm --- Certainty = 0.0000(Not Clear)
```

[6517] SEQ ID 8746 (GBS98) was expressed in E. coli as a His-fusion product. SDS-PAGE analysis of total cell extract is shown in FIG. 7 (lane 5; MW 80 kDa).

[6518] GBS98-His was purified as shown in FIG. 192, lane 9.

[6519] Based on this analysis, it was predicted that these proteins and their epitopes could be useful antigens for vaccines or diagnostics.

### EXAMPLE 1170

[6520] A DNA sequence (GBSx1246) was identified in S. agalactiae <SEQ ID 3635> which encodes the amino acid sequence <SEQ ID 3636>. This protein is predicted to be junction specific DNA helicase (mmsA) (recG). Analysis of this protein sequence reveals the following:

| Possible site: 17 | | | | |
|---|---|---|---|---|
| >>> Seems to have no N-terminal signal sequence | | | | |
| | INTEGRAL | Likelihood = −0.16 | Transmembrane | 530-546 (530-546) |

```
----- Final Results -----
                              bacterial membrane --- Certainty = 0.1065(Affirmative) < succ>
                                bacterial outside --- Certainty = 0.0000(Not Clear) < succ>
                            bacterial cytoplasm --- Certainty = 0.0000(Not Clear) < succ>
```

[6521] The protein has homology with the following sequences in the GENPEPT database.

| >GP: CAA90280 GB: Z49988 MmsA [Streptococcus pneumoniae] | | | |
|---|---|---|---|
| Identities = 483/671 (71%), Positives = 568/671 (83%) | | | |
| Query: | 1 | MLLQSPISNLKGFGPKSAEKFQKLDIYTVEDLLLYYPFRYEDFKSKSVFDLVDGEKAVIT | 60 |
| | | M L P+ L G GPKSAEK+ KL I ++DLLLY+PFRYEDFK+K V +L DGEKAV++ | |
| Sbjct: | 1 | MNLHQPLHVLPGVGPKSAEKYAKLGIENLQDLLLYFPFRYEDFKTKQVLELEDGEKAVLS | 60 |
| Query: | 61 | GLVVTPANVQYYGFKRNRLSFKLRQGEAVLNVSFFNQPYLADKIELGQEVAVFGKWDATK | 120 |
| | | G VVTPA+VQYYGFKRNRL F L+QGE V V+FFNQPYLADKIELG +AVFGKWD K | |
| Sbjct: | 61 | GQVVTPASVQYYGFKRNRLRFSLKQGEVVFAVNFFNQPYLADKIELGATLAVFGKWDRAK | 120 |
| Query: | 121 | SAITGMKVLAQVEDDMQPVYRVAQGISQSTLIKAIKSAFEISAHLELKENLPATLLEKYR | 180 |
| | | +++TGMKVLAQVEDD+QPVYR+AQGISQ++L+K IK+AF+ L ++ENLP +LL+KY+ | |
| Sbjct: | 121 | ASLTGMKVLAQVEDDLQPVYRLAQGISQASLVKVIKTAFDQGLDLLIEENLPQSLLDKYK | 180 |
| Query: | 181 | LMGRSQACLAMHFPKDITEYKQALRRIKFEELFYFQMNLQVLKSENKSETNGLPILYSKH | 240 |
| | | LM R QA AMHFPKD+ EYKQALRRIKF ELFYFQM LQ LKSEN+ + +GL + +S+ | |
| Sbjct: | 181 | LMSRCQAVRAMHFPKDLAEYKQALRRIKFAELFYFQMQLQTLKSENRVQGSGLVLNWSQE | 240 |
| Query: | 241 | AMETKISSLPFILTNAQKRSLDEILSDMSSGAHMNRLLQGDVGSGKTVIAGLSMYAAYTA | 300 |
| | | + +SLPF LT AQ++SL EIL+DM S HMNRLLQGDVGSGKTV+AGL+M+AA TA | |
| Sbjct: | 241 | KVTAVKASLPFALTQAQEKSLQEILTDMKSDHHMNRLLQGDVGSGKTVVAGLAMFAAVTA | 300 |
| Query: | 301 | GFQSALMVPTEILAEQHYISLQELFPDLSIAILTSGMKAAVKRTVLAAIANGSVDMIVGT | 360 |
| | | G+Q+ALMVPTEILAEQH+ SLQ LFP+L +A+LT +KAA KR VL IA G D+I+GT | |
| Sbjct: | 301 | GYQAALMVPTEILAEQHFESLQNLFPNLKLALLTGSLKAAEKREVLETIAKGEADLIIGT | 360 |
| Query: | 361 | HALIQDSVQYHKLGLVITDEQHRFGVKQRRIFREKGENPDVLMMTATPIPRTLAITAFGE | 420 |
| | | HALIQD V+Y +LGL+I DEQHRFGV QRRI REKG+NPDVLMMTATPIPRTLAITAFG+ | |
| Sbjct: | 361 | HALIQDGVEYARLGLIIIDEQHRFGVGQRRILREKGDNPDVLMMTATPIPRTLAITAFGD | 420 |
| Query: | 421 | MDVSIIDELPAGRKPIITRWVKHEQLGTVLEWVKGELQKDAQVYVISPLIEESEALDLKN | 480 |
| | | MDVSIID++PAGRKPI+TRW+KHEQL VL W++GE+QK +Q YVISPLIEESEALDLKN | |
| Sbjct: | 421 | MDVSIIDQMPAGRKPIVTRWIKHEQLPQVLTWLEGEIQKGSQAYVISPLIEESEALDLKN | 480 |
| Query: | 481 | AVALHAELSTYFEGIAKVALVHGRMKNDEKDAIMQDFKDKKSHILVSTTVIEVGVNVPNA | 540 |
| | | A+AL EL+T+F G A+VAL+HGRMK+DEKD IMQDFK++K+ ILVSTTVIEVGVNVPNA | |
| Sbjct: | 481 | AIALSEELTTHFAGKAEVALLHGRMKSDEKDQIMQDFKERKTDILVSTTVIEVGVNVPNA | 540 |
| Query: | 541 | TIMIIMDADRFGLSQLHQLRGRVGRGYKQSYAVLVANPKTDSGKKRMTIMTETTDGFVLA | 600 |
| | | T+MIIMDADRFGLSQLHQLRGRVGRG KQSYAVLVANPKTDSGK RM IMTETT+GFVLA | |
| Sbjct: | 541 | TVMIIMDADRFGLSQLHQLRGRVGRGDKQSYAVLVANPKTDSGKDRMRIMTETTNGFVLA | 600 |
| Query: | 601 | ESDLKMRGSGEIFGTRQSGIPEFQVADIVEDYPILEEARRVASDIVKDNNWKENTEWALI | 660 |
| | | E DLKMRGSGEIFGTRQSG+PEFQVADI+ED+PILEEAR+VAS I W+E+ EW +I | |
| Sbjct: | 601 | EEDLKMRGSGEIFGTRQSGLPEFQVADIIEDFPILEEARKVASYISSIEAWQEDPEWRMI | 660 |
| Query: | 661 | LDNLRQHSDFD | 671 |
| | | +L + D | |
| Sbjct: | 661 | ALHLEKKEHLD | 671 |

[6522] A related DNA sequence was identified in S. pyogenes <SEQ ID 3637> which encodes the amino acid sequence <SEQ ID 3638>. Analysis of this protein sequence reveals the following:

| Possible site: 17 | | | | |
|---|---|---|---|---|
| >>> Seems to have no N-terminal signal sequence | | | | |
| | INTEGRAL | Likelihood = −0.16 | Transmembrane | 530-546 (530-546) |

```
----- Final Results -----
                            bacterial membrane --- Certainty = 0.1065(Affirmative) < succ>
                              bacterial outside --- Certainty = 0.0000(Not Clear) < succ>
                                bacterial cytoplasm --- Certainty = 0.0000(Not Clear) < succ>
```

[6523] An alignment of the GAS and GBS proteins is shown below.

| Identities = 641/671 (95%), Positives = 655/671 (97%) | | | |
|---|---|---|---|
| Query: | 1 | MLLQSPISNLKGFGPKSAEKFQKLDIYTVEDLLLYYPFRYEDFKSKSVFDLVDGEKAVIT | 60 |
| | | M+L +P+SNLKGFGPKSAEKFQKLDIYTVEDLLLYYPFRYEDFKSKSVFDLVDGEKAVIT | |
| Sbjct: | 1 | MILTAPMSNLKGFGPKSAEKFQKLDIYTVEDLLLYYPFRYEDFKSKSVFDLVDGEKAVIT | 60 |
| Query: | 61 | GLVVTPANVQYYGFKRNRLSFKLRQGEAVLNVSFFNQPYLADKIELGQEVAVFGKWDATK | 120 |
| | | GLVVTPANVQYYGFKRNRLSFKLRQGEAVLNVSFFNQPYLADKIELGQEVAVFGKWDATK | |
| Sbjct: | 61 | GLVVTPANVQYYGFKRNRLSFKLRQGEAVLNVSFFNQPYLADKIELGQEVAVFGKWDATK | 120 |
| Query: | 121 | SAITGMKVLAQVEDDMQPVYRVAQGISQSTLIKAIKSAFEISAHLELKENLPATLLEKYR | 180 |
| | | SAITGMKVLAQVEDDMQPVYRVAQGISQSTLIKAIKSAFEI AHLELKENLPATLLEKYR | |
| Sbjct: | 121 | SAITGMKVLAQVEDDMQPVYRVAQGISQSTLIKAIKSAFEIDAHLELKENLPATLLEKYR | 180 |
| Query: | 181 | LMGRSQACLAMHFPKDITEYKQALRRIKFEELFYFQMNLQVLKSENKSETNGLPILYSKH | 240 |
| | | LMGRSQACLAMHFPKDITEYKQALRRIKFEELFYFQMNLQVLK+ENKSETNGLPILYSK | |
| Sbjct: | 181 | LMGRSQACLAMHFPKDITEYKQALRRIKFEELFYFQMNLQVLKAENKSETNGLPILYSKR | 240 |
| Query: | 241 | AMETKISSLPFILTNAQKRSLDEILSDMSSGAHMNRLLQGDVGSGKTVIAGLSMYAAYTA | 300 |
| | | AMETKISSLPFILTNAQKRSLD+ILSDMSSGAHMNRLLQGDVGSGKTVIAGLSMYAAYTA | |
| Sbjct: | 241 | AMETKISSLPFILTNAQKRSLDDILSDMSSGAHMNRLLQGDVGSGKTVIAGLSMYAAYTA | 300 |
| Query: | 301 | GFQSALMVPTEILAEQHYISLQELFPDLSIAILTSGMKAAVKRTVLAAIANGSVDMIVGT | 360 |
| | | GFQSALMVPTEILAEQHYISLQELFPDLSIAILTSGMKAAVKRTVLAAIANGSVDMIVGT | |
| Sbjct: | 301 | GFQSALMVPTEILAEQHYISLQELFPDLSIAILTSGMKAAVKRTVLAAIANGSVDMIVGT | 360 |
| Query: | 361 | HALIQDSVQYHKLGLVITDEQHRFGVKQRRIFREKGENPDVLMMTATPIPRTLAITAFGE | 420 |
| | | HALIQDSVQYHKLGLVITDEQHRFGVKQRRIFREKGENPDVLMMTATPIPRTLAITAFGE | |
| Sbjct: | 361 | HALIQDSVQYHKLGLVITDEQHRFGVKQRRIFREKGENPDVLMMTATPIPRTLAITAFGE | 420 |
| Query: | 421 | MDVSIIDELPAGRKPIITRWVKHEQLGTVLEWVKGELQKDAQVYVISPLIEESEALDLKN | 480 |
| | | MDVSIIDELPAGRKPI+TRWVKHEQLGTVLEWVKGELQKDAQVYVISPLIEESEALDLKN | |
| Sbjct: | 421 | MDVSIIDELPAGRKPIMTRWVKHEQLGTVLEWVKGELQKDAQVYVISPLIEESEALDLKN | 480 |
| Query: | 481 | AVALHAELSTYFEGIAKVALVHGRMKNDEKDAIMQDFKDKKSHILVSTTVIEVGVNVPNA | 540 |
| | | AVALHAELSTYFEGIAKVALVHGRMKNDEKDAIMQDFKDKKSHILVSTTVIEVGVNVPNA | |
| Sbjct: | 481 | AVALHAELSTYFEGIAKVALVHGRMKNDEKDAIMQDFKDKKSHILVSTTVIEVGVNVPNA | 540 |
| Query: | 541 | TIMIIMDADRFGLSQLHQLRGRVGRGYKQSYAVLVANPKTDSGKKRMTIMTETTDGFVLA | 600 |
| | | TIMIIMDADRFGLSQLHQLRGRVGRGYKQSYAVLVANPKTDSGKKRMTIMTETTDGFVLA | |
| Sbjct: | 541 | TIMIIMDADRFGLSQLHQLRGRVGRGYKQSYAVLVANPKTDSGKKRMTIMTETTDGFVLA | 600 |
| Query: | 601 | ESDLKMRGSGEIFGTRQSGIPEFQVADIVEDYPILEEARRVASDIVKDNNWKENTEWALI | 660 |
| | | ESDLKMRGSGEIFGTRQSGIPEFQVADIVEDYPILEEAR+V++ IV D NW +W L+ | |
| Sbjct: | 601 | ESDLKMRGSGEIFGTRQSGIPEFQVADIVEDYPILEEARKVSAAIVSDPNWIYEKQWQLV | 660 |
| Query: | 661 | LDNLRQHSDFD | 671 |
| | | N+R+ +D | |
| Sbjct: | 661 | AQNIRKKEVYD | 671 |

[6524] Based on this analysis, it was predicted that these proteins and their epitopes could be useful antigens for vaccines or diagnostics.

### EXAMPLE 1171

[6525] A DNA sequence (GBSx1247) was identified in S. agalactiae <SEQ ID 3639> which encodes the amino acid sequence <SEQ ID 3640>. This protein is predicted to be aryl-alcohol dehydrogenase (b1647). Analysis of this protein sequence reveals the following:

```
Possible site: 50
>>> Seems to have no N-terminal signal sequence
----- Final Results -----
                            bacterial cytoplasm --- Certainty = 0.1562(Affirmative) < succ>
                              bacterial membrane --- Certainty = 0.0000(Not Clear) < succ>
                                bacterial outside --- Certainty = 0.0000(Not Clear) < succ>
```

[6526] A related GBS nucleic acid sequence <SEQ ID 10105> which encodes amino acid sequence <SEQ ID 10106> was also identified.

[6527] The protein has homology with the following sequences in the GENPEPT database.

| >GP: BAB07646 GB: AP001520 aryl-alcohol dehydrogenase [Bacillus halodurans] | | | |
|---|---|---|---|
| Identities = 173/300 (57%), Positives = 224/300 (74%) | | | |
| Query: | 7 | IGQTGIQATRIALGCMRMSDLKGKQAEEVVGTALDLGINFFDHADIYGGGLSELRFRDAI | 66 |
| | | +G + ++ +A+GCMR++ + K+AE V TAL+ G NFFDHADIYGGG E F DAI | |
| Sbjct: | 6 | LGSSSLEVPVVAVGCMRINAISKKEAERFVQTALEQGANFFDHADIYGGGECEEIFADAI | 65 |
| Query: | 67 | KHLNVNRDKMIIQSKCGIREGYFDFSKEYILSSVDGILERLGTEYLDFLILHRPDVLVEP | 126 |
| | | + R+K+I+QSKCGIREG FDFSKEYIL SVDGIL+RL T+YLD L+LHRPD LVEP | |
| Sbjct: | 66 | QMNEAVREKIILQSKCGIREGRFDFSKEYILQSVDGILQRLKTDYLDVLLLHRPDALVEP | 125 |
| Query: | 127 | EEVAEAFTKLRAEGKVKHFGVSNQNRFQMELLQSYLDEPLAVNQLQLSPAHTPMFDAGLN | 186 |
| | | EEVAEAF L + GKV+HFGVSNQN Q+ELL+ ++ +P+ NQLQLS + M +G+N | |
| Sbjct: | 126 | EEVAEAFDLLESSGKVRHFGVSNQNPMQIELLKKFVRQPIVANQLQLSITNATMISSGIN | 185 |
| Query: | 187 | VNMLNKASIEHDDGIVDYCRLKRVTIQAWSPFQIDLSRGLFVNHPDYKELNETIAKLAKN | 246 |
| | | VNM N+++I D ++DYCRL VTIQ WSPFQ G+F+ + + ELN+ I +LA+ | |
| Sbjct: | 186 | VNMENESAINRDGSVLDYCRLHDVTIQPWSPFQYGFFEGVFLGNDLFPELNKKIDELAEK | 245 |
| Query: | 247 | YNVSSEAIVIAWILRHPAKMQAIVGSMNPSRLKAIDKANDIALTRKEWYDIYRSAGNILP | 306 |
| | | Y VS+ I IAW+LRHPA MQ ++G+MN RLK KA++I LTR+EWY+IYR+AGNILP | |
| Sbjct: | 246 | YEVSNTTIAIAWLLRHPANMQPVIGTMNLKRLKDCCKASEIRLTREEWYEIYRAAGNILP | 305 |

[6528] There is also homology to SEQ ID 780.

[6529] Based on this analysis, it was predicted that these proteins and their epitopes could be useful antigens for vaccines or diagnostics.

### EXAMPLE 1172

[6530] A DNA sequence (GBSx1248) was identified in S. agalactiae <SEQ ID 3641> which encodes the amino acid sequence <SEQ ID 3642>. This protein is predicted to be shikimate 5-dehydrogenase (aroE) (aroE). Analysis of this protein sequence reveals the following:

```
Possible site: 21
>>> Seems to have no N-terminal signal sequence
----- Final Results -----
                            bacterial cytoplasm --- Certainty = 0.0988(Affirmative) < succ>
                              bacterial membrane --- Certainty = 0.0000(Not Clear) < succ>
                                bacterial outside --- Certainty = 0.0000(Not Clear) < succ>
```

[6531] The protein has homology with the following sequences in the GENPEPT database.

| >GP: AAC74762 GB: AE000264 putative oxidoreductase | | | |
|---|---|---|---|
| [Escherichia coli K12] | | | |
| Identities = 114/279 (40%), Positives = 171/279 (60%), | | | |
| Gaps = 3/279 (1%) | | | |
| Query: | 10 | LTGLIANPARHSLSPLMWNTSFQEKNMNYAYLTFEVEEGKLTEAVRGVRALGIRGVNVSM | 69 |
| | | L GL+A P RHSLSP M N + ++ + + Y+ FEV+ A+ G++AL +RG VSM | |
| Sbjct: | 9 | LIGLMAYPIRHSLSPEMQNKALEKAGLPFTYMAFEVDNDSFPGAIEGLKALKMRGTGVSM | 68 |
| Query: | 70 | PFKQSVIPLLDDLSPQAKLVGAVNTIVNQGGTGRLVGHMTDGIGCFKALAAQGFSAKNKI | 129 |
| | | P KQ +D+L+P AKLVGA+NTIVN G R G+ TDG G +A+ GF K K | |
| Sbjct: | 69 | PNKQLACEYVDELTPAAKLVGAINTIVNDDGYLR--GYNTDGTGHIRAIKESGFDIKGKT | 126 |
| Query: | 130 | ITIAGIGGSGKAVAVQAAMEGVAEIRLFNRNSSNYDKVIDLSDKIKKQFQIKVVVDYLEN | 189 |
| | | + + G GG+ A+ Q A+EG+ EI+LFNR +DK + + ++ + V V L + | |
| Sbjct: | 127 | MVLLGAGGASTAIGAQGAIEGLKEIKLFNRRDEFFDKALAFAQRVNENTDCVVTVTDLAD | 186 |
| Query: | 190 | KTAFKDAIRTSHFYIDATSLGMRPLDNYSLINDPEILTPNLVVVDLVYKPKETALLRFVR | 249 |
| | | + AF +A+ ++ + T +GM+PL+N SL+ND +L P L+V + VY P T LL+ + | |
| Sbjct: | 187 | QQAFAEALASADILTNGTKVGMKPLENESLVNDISLLHPGLLVTECVYNPHMTKLLQQAQ | 246 |
| Query: | 250 | QNGVKHAYNGLGMLIYQGAEAFQLITNQEMPISSVERVL | 288 |
| | | Q G K +G GML++QGAE F L T ++ P+ V++V+ | |
| Sbjct: | 247 | QAGCK-TIDGYGMLLWQGAEQFTLWTGKDFPLEYVKQVM | 284 |

[6532] A related DNA sequence was identified in S. pyogenes <SEQ ID 3643> which encodes the amino acid sequence <SEQ ID 3644>. Analysis of this protein sequence reveals the following:

```
Possible site: 54
>>> Seems to have an uncleavable N-term signal seq
----- Final Results -----
                              bacterial membrane --- Certainty = 0.0000(Not Clear) < succ>
                                bacterial outside --- Certainty = 0.0000(Not Clear) < succ>
                            bacterial cytoplasm --- Certainty = 0.0000(Not Clear) < succ>
```

[6533] The protein has homology with the following sequences in the databases:

| >GP: AAC74762 GB: AE000264 putative oxidoreductase | | | |
|---|---|---|---|
| [Escherichia coli] | | | |
| Identities = 132/280 (47%), Positives = 186/280 (66%), | | | |
| Gaps = 3/280 (1%) | | | |
| Query: | 11 | LVSLLATPIRHSLSPKMHNEAYAKLGLDYAYLAFEVGTEQLADAVQGIRALGIRGSNVSM | 70 |
| | | L+ L+A PIRHSLSP+M N+A K GL + Y+AFEV + A++G++AL +RG+ VSM | |
| Sbjct: | 9 | LIGLMAYPIRHSLSPEMQNKALEKAGLPFTYMAFEVDNDSFPGAIEGLKALKMRGTGVSM | 68 |
| Query: | 71 | PNKEAILPLLDDLSPAAELVGAVNTVVNKDGKGHLVGHITDGIGALRALADEGVSVKNKI | 130 |
| | | PNK+ +D+L+PAA+LVGA+NT+VN DG +L G+ TDG G +RA+ + G +K K | |
| Sbjct: | 69 | PNKQLACEYVDELTPAAKLVGAINTIVNDDG--YLRGYNTDGTGHIRAIKESGFDIKGKT | 126 |
| Query: | 131 | ITLAGVGGAGKAIAVQLAFDGAKEVRLFNRQATRLSSVQKLVTKLNQLTRTKVTLQDLED | 190 |
| | | + L G GGA AI Q A +G KE++LFNR+ ++N+ T VT+ DL D | |
| Sbjct: | 127 | MVLLGAGGASTAIGAQGAIEGLKEIKLFNRRDEFFDKALAFAQRVNENTDCVVTVTDLAD | 186 |
| Query: | 191 | QTAFKEAIRESHLFIDATSVGMKPLENLSLITDPELIRPDLVVFDIVYSPAETKLLAFAR | 250 |
| | | Q AF EA+ + + + T VGMKPLEN SL+ D L+ P L+V + VY+P TKLL A+ | |
| Sbjct: | 187 | QQAFAEALASADILTNGTKVGMKPLENESLVNDISLLHPGLLVTECVYNPHMTKLLQQAQ | 246 |
| Query: | 251 | QHGAQKVINGLGMVLYQGAEAFKLITGQDMPVDAIKPLLG | 290 |
| | | Q G K I+G GM+L+QGAE F L TG+D P++ +K ++G | |
| Sbjct: | 247 | QAGC-KTIDGYGMLLWQGAEQFTLWTGKDFPLEYVKQVMG | 285 |

[6534] An alignment of the GAS and GBS proteins is shown below.

| Identities = 166/288 (57%), Positives = 221/288 (76%) | | | |
|---|---|---|---|
| Query: | 4 | LNGETLLTGLIANPARHSLSPLMWNTSFQEKNMNYAYLTFEVEEGKLTEAVRGVRALGIR | 63 |
| | | L+G TLL L+A P RHSLSP M N ++ + ++YAYL FEV +L +AV+G+RALGIR | |
| Sbjct: | 5 | LSGHTLLVSLLATPIRHSLSPKMHNEAYAKLGLDYAYLAFEVGTEQLADAVQGIRALGIR | 64 |
| Query: | 64 | GVNVSMPFKQSVIPLLDDLSPQAKLVGAVNTIVNQGGTGRLVGHMTDGIGCFKALAAQGF | 123 |
| | | G NVSMP K++++PLLDDLSP A+LVGAVNT+VN+ G G LVGH+TDGIG +ALA +G | |
| Sbjct: | 65 | GSNVSMPNKEAILPLLDDLSPAAELVGAVNTVVNKDGKGHLVGHITDGIGALRALADEGV | 124 |
| Query: | 124 | SAKNKIITIAGIGGSGKAVAVQAAMEGVAEIRLFNRNSSNYDKVIDLSDKIKKQFQIKVV | 183 |
| | | S KNKIIT+AG+GG+GKA+AVQ A +G E+RLFNR ++ V L K+ + + KV | |
| Sbjct: | 125 | SVKNKIITLAGVGGAGKAIAVQLAFDGAKEVRLFNRQATRLSSVQKLVTKLNQLTRTKVT | 184 |
| Query: | 184 | VDYLENKTAFKDAIRTSHFYIDATSLGMRPLDNYSLINDPEILTPNLVVVDLVYKPKETA | 243 |
| | | + LE++TAFK+AIR SH +IDATS+GM+PL+N SLI DPE++ P+LVV D+VY P ET | |
| Sbjct: | 185 | LQDLEDQTAFKEAIRESHLFIDATSVGMKPLENLSLITDPELIRPDLVVFDIVYSPAETK | 244 |
| Query: | 244 | LLRFVRQNGVKHAYNGLGMLIYQGAEAFQLITNQEMPISSVERVLQTE | 291 |
| | | LL F RQ+G + NGLGM++YQGAEAF+LIT Q+MP+ +++ +L E | |
| Sbjct: | 245 | LLAFARQHGAQKVINGLGMVLYQGAEAFKLITGQDMPVDAIKPLLGDE | 292 |

[6535] Based on this analysis, it was predicted that these proteins and their epitopes could be useful antigens for vaccines or diagnostics.

### EXAMPLE 1173

[6536] A DNA sequence (GBSx1249) was identified in S. agalactiae <SEQ ID 3645> which encodes the amino acid sequence <SEQ ID 3646>. Analysis of this protein sequence reveals the following:

| Possible site: 13 | | | | |
|---|---|---|---|---|
| >>> Seems to have no N-terminal signal sequence | | | | |
| | INTEGRAL | Likelihood = −6.16 | Transmembrane | 57-73 (53-76) |

```
----- Final Results -----
                            bacterial membrane --- Certainty = 0.3463(Affirmative) < succ>
                              bacterial outside --- Certainty = 0.0000(Not Clear) < succ>
                                bacterial cytoplasm --- Certainty = 0.0000(Not Clear) < succ>
```

[6537] The protein has no significant homology with any sequences in the GENPEPT database.

[6538] No corresponding DNA sequence was identified in S. pyogenes.

[6539] Based on this analysis, it was predicted that this protein and its epitopes, could be useful antigens for vaccines or diagnostics.

### EXAMPLE 1174

[6540] A DNA sequence (GBSx1250) was identified in S. agalactiae <SEQ ID 3647> which encodes the amino acid sequence <SEQ ID 3648>. Analysis of this protein sequence reveals the following:

```
Possible site: 17
>>> Seems to have no N-terminal signal sequence
----- Final Results -----
                            bacterial cytoplasm --- Certainty = 0.2333(Affirmative) < succ>
                              bacterial membrane --- Certainty = 0.0000(Not Clear) < succ>
                                bacterial outside --- Certainty = 0.0000(Not Clear) < succ>
```

[6541] A related GBS nucleic acid sequence <SEQ ID 10103> which encodes amino acid sequence <SEQ ID 10104> was also identified.

[6542] The protein has homology with the following sequences in the GENPEPT database.

| >GP: BAB05343 GB: AP001512 L-asparaginase | | | |
|---|---|---|---|
| [Bacillus halodurans ] | | | |
| Identities = 158/319 (49%), Positives = 214/319 (66%), | | | |
| Gaps = 4/319 (1%) | | | |
| Query: | 1 | MKKILVLHTGGTISMNANEKGQVMSSADNPMKYVDLSLDDL-DLTVVDFLNLPSPQITPH | 59 |
| | | MKK+LV+HTGGTI+M+ +EKG V NP+ SL + + V DFLN+PSP +TP | |
| Sbjct: | 1 | MKKVLVIHTGGTIAMHEDEKGGVQPKETNPLFATVESLTSIASIEVDDFLNIPSPHMTPE | 60 |
| Query: | 60 | HMLDIYHYLKQHASN--FDGVVITHGTDTLEETAYFLDTMILPKIPIIITGAMRSTNELG | 117 |
| | | M + LK N FDGVVITHGTDTLEETAY LD ++ ++P+++TGAMRS+NELG | |
| Sbjct: | 61 | LMFQLAERLKSRVGNESFDGVVITHGTDTLEETAYLLDLLLDWEVPVVVTGAMRSSNELG | 120 |
| Query: | 118 | SDGVYNYLSALRVANSTKAADKGVLVVMNDEIHAAKYVTKTHTTNVSTFQTPTHGPLGII | 177 |
| | | +DG +N++SA++ A + +A KGVLVV NDEIH AK VTKTHT+NV+TFQ+P +GP+GI+ | |
| Sbjct: | 121 | ADGPHNFISAVKTAATDEAKGKGVLVVFNDEIHTAKNVTKTHTSNVATFQSPQYGPIGIV | 180 |
| Query: | 178 | MKQDLLFFKATEERVRFDLDKITGTVPIVKAYAGMGDSGIISFLNSQNISGLVIEALGAG | 237 |
| | | K+ + F A + + + I V ++KAYAGM D ++ + I GLVIEA G G | |
| Sbjct: | 181 | TKRGVTFHHAPSYKESYTVSSIDHRVVLLKAYAGM-DGSVVDAIADTGIDGLVIEAFGQG | 239 |
| Query: | 238 | NMPPKAAQEIEELIEQGVPVVLVSRCFNGIAEPVYGYEGGGAKLQESGVMFVKELNAPKA | 297 |
| | | N+PP I+ L + +PVVLVSR +GI + Y YEGGG L++ GV+F LN KA | |
| Sbjct: | 240 | NLPPAVVPSIKRLHQANIPVVLVSRSVSGIVQETYAYEGGGRHLKDLGVIFTNGLNGQKA | 299 |
| Query: | 298 | RLKLLIALNAGLTGQNLKD | 316 |
| | | RLKLL+AL + L++ | |
| Sbjct: | 300 | RLKLLVALELTTDRKKLQE | 318 |

[6543] A related DNA sequence was identified in S. pyogenes <SEQ ID 3649> which encodes the amino acid sequence <SEQ ID 3650>. Analysis of this protein sequence reveals the following:

| Possible site: 16 | | | | |
|---|---|---|---|---|
| >>> Seems to have no N-terminal signal sequence | | | | |
| | INTEGRAL | Likelihood = −2.28 | Transmembrane | 245-261 (243-261) |

```
----- Final Results -----
                              bacterial membrane --- Certainty = 0.1914(Affirmative) < succ>
                                bacterial outside --- Certainty = 0.0000(Not Clear) < succ>
                            bacterial cytoplasm --- Certainty = 0.0000(Not Clear) < succ>
```

[6544] The protein has homology with the following sequences in the databases:

| >GP: BAB05343 GB: AP001512 L-asparaginase [Bacillus halodurans] | | | |
|---|---|---|---|
| Identities = 158/320 (49%), Positives = 218/320 (67%), Gaps = 5/320 (1%) | | | |
| Query: | 1 | MKKILVLHTGGTISMQADNSGRVVPNQDNPM-TKIHAAAQDIQLTVSDFLNLPSPHITPH | 59 |
| | | MKK+LV+HTGGTI+M D G V P + NP+ + + + V DFLN+PSPH+TP | |
| Sbjct: | 1 | MKKVLVIHTGGTIAMHEDEKGGVQPKETNPLFATVESLTSIASIEVDDFLNIPSPHMTPE | 60 |
| Query: | 60 | HMLSIYHHIQERT--DVFDGIVITHGTDTLEETAYFLDTMALPTNIPVVLTGAMRSSNEV | 117 |
| | | M + ++ R + FDG+VITHGTDTLEETAY LD + L +PVV+TGAMRSSNE+ | |
| Sbjct: | 61 | LMFQLAERLKSRVGNESFDGVVITHGTDTLEETAYLLDLL-LDWEVPVVVTGAMRSSNEL | 119 |
| Query: | 118 | GSDGIYNYLTALRVASSDKAKEKGVLVVMNDEIHAAKYVTKTHTTNISTFQTPTHGPLGI | 177 |
| | | G+DG +N+++A++ A++D+AK KGVLVV NDEIH AK VTKTHT+N++TFQ+P +GP+GI | |
| Sbjct: | 120 | GADGPHNFISAVKTAATDEAKGKGVLVVFNDEIHTAKNVTKTHTSNVATFQSPQYGPIGI | 179 |
| Query: | 178 | IMKNDLLFFKTAEPRIRFDLRCISGTIPIIKAYAGMGDGSILSLLTPGSIQGLVIEALGA | 237 |
| | | + K + F + + + I + ++KAYAGM DGS++ + I GLVIEA G | |
| Sbjct: | 180 | VTKRGVTFHHAPSYKESYTVSSIDHRVVLLKAYAGM-DGSVVDAIADTGIDGLVIEAFGQ | 238 |
| Query: | 238 | GNVPPLAVGEIEHLIALGIPVILVSRCFNGMAEPVYAYEGGGAMLQEAGVMFVKELNAPK | 297 |
| | | GN+PP V I+ L IPV+LVSR +G+ + YAYEGGG L++ GV+F LN K | |
| Sbjct: | 239 | GNLPPAVVPSIKRLHQANIPVVLVSRSVSGIVQETYAYEGGGRHLKDLGVIFTNGLNGQK | 298 |
| Query: | 298 | ARLKLLIALNAGLTGQELKD | 317 |
| | | ARLKLL+AL ++L++ | |
| Sbjct: | 299 | ARLKLLVALELTTDRKKLQE | 318 |

[6545] An alignment of the GAS and GBS proteins is shown below.

| Identities = 242/321 (75%), Positives = 275/321 (85%), Gaps = 1/321 (0%) | | | |
|---|---|---|---|
| Query: | 1 | MKKILVLHTGGTISMNANEKGQVMSSADNPMKYVDLSLDDLDLTVVDFLNLPSPQITPHH | 60 |
| | | MKKILVLHTGGTISM A+ G+V+ + DNPM + + D+ LTV DFLNLPSP ITPHH | |
| Sbjct: | 1 | MKKILVLHTGGTISMQADNSGRVVPNQDNPMTKIHAAAQDIQLTVSDFLNLPSPHITPHH | 60 |
| Query: | 61 | MLDIYHYLKQHASNFDGVVITHGTDTLEETAYFLDTMILP-KIPIIITGAMRSTNELGSD | 119 |
| | | ML IYH++++ FDG+VITHGTDTLEETAYFLDTM LP IP+++TGAMRS+NE+GSD | |
| Sbjct: | 61 | MLSIYHHIQERTDVFDGIVITHGTDTLEETAYFLDTMALPTNIPVVLTGAMRSSNEVGSD | 120 |
| Query: | 120 | GVYNYLSALRVANSTKAADKGVLVVMNDEIHAAKYVTKTHTTNVSTFQTPTHGPLGIIMK | 179 |
| | | G+YNYL+ALRVA+S KA +KGVLVVMNDEIHAAKYVTKTHTTN+STFQTPTHGPLGIIMK | |
| Sbjct: | 121 | GIYNYLTALRVASSDKAKEKGVLVVMNDEIHAAKYVTKTHTTNISTFQTPTHGPLGIIMK | 180 |
| Query: | 180 | QDLLFFKATEERVRFDLDKITGTVPIVKAYAGMGDSGIISFLNSQNISGLVIEALGAGNM | 239 |
| | | DLLFFK E R+RFDL I+GT+PI+KAYAGMGD I+S L +I GLVIEALGAGN+ | |
| Sbjct: | 181 | NDLLFFKTAEPRIRFDLRCISGTIPIIKAYAGMGDGSILSLLTPGSIQGLVIEALGAGNV | 240 |
| Query: | 240 | PPKAAQEIEELIEQGVPVVLVSRCFNGIAEPVYGYEGGGAKLQESGVMFVKELNAPKARL | 299 |
| | | PP A EIE LI G+PV+LVSRCFNG+AEPVY YEGGGA LQE+GVMFVKELNAPKARL | |
| Sbjct: | 241 | PPLAVGEIEHLIALGIPVILVSRCFNGMAEPVYAYEGGGAMLQEAGVMFVKELNAPKARL | 300 |
| Query: | 300 | KLLIALNAGLTGQNLKDYIEG | 320 |
| | | KLLIALNAGLTGQ LKDYIEG | |
| Sbjct: | 301 | KLLIALNAGLTGQELKDYIEG | 321 |

[6546] Based on this analysis, it was predicted that these proteins and their epitopes could be useful antigens for vaccines or diagnostics.

### EXAMPLE 1175

[6547] A DNA sequence (GBSx1251) was identified in S. agalactiae <SEQ ID 3651> which encodes the amino acid sequence <SEQ ID 3652>. Analysis of this protein sequence reveals the following:

```
Possible site: 50
>>> Seems to have no N-terminal signal sequence
----- Final Results -----
                            bacterial cytoplasm --- Certainty = 0.4427(Affirmative). < succ>
                              bacterial membrane --- Certainty = 0.0000(Not Clear) < succ>
                                bacterial outside --- Certainty = 0.0000(Not Clear) < succ>
```

[6548] The protein has homology with the following sequences in the GENPEPT database.

| >GP: CAB85142 GB: AL162757 conserved hypothetical protein [Neisseria | | | |
|---|---|---|---|
| meningitidis Z2491] | | | |
| Identities = 87/285 (30%), Positives = 138/285 (47%), Gaps = 35/285 (12%) | | | |
| Query: | 4 | KAVFFDIDGTLLNDRKNVQKSTIK-AIRNLKDQGILVGLATGRG----PSFVQPFLENLG | 58 |
| | | K VFFDID TL + + ++K A+ L+ +GIL LATGR P V+ + G | |
| Sbjct: | 11 | KIVFFDIDDTLYRKYTDTLRPSVKTAVAALRGKGILTALATGRSLATIPEKVRDMMAETG | 70 |
| Query: | 59 | LDFAVTYNGQYIYSRSEIIYTNQLSKTTVYRLIRYAGARRREISLGTASGLLGSGIIGLG | 118 |
| | | +D VT NGQ+ + + + + R+ + SLG +G G+ | |
| Sbjct: | 71 | MDAVVTINGQFALLHGKTVCEVPMDAGLMGRVCAHLD------SLGMDYAFVGGE--GIA | 122 |
| Query: | 119 | TSRLGQIVSSLVPRKWAKAIERSFKHFIRRIKPQNIDSLMVILREPIYQVVLVATEGE-- | 176 |
| | | S L + V R+ KH I +P+YQ+++ A E E | |
| Sbjct: | 123 | VSALSECVC------------RALKH----IASDFFADKDYFSSKPVYQMLVFAEENEMP | 166 |
| Query: | 177 | --SERIQKQFPRVKLTRSSPYSMDVISEGQSKVKGIERVGQRYGFDLSEVIAFGDSDNDI | 234 |
| | | S+ ++++ +K R ++D++ G SK GI V + G ++++V+AFGD ND+ | |
| Sbjct: | 167 | LWSDIVERE--GLKTVRWHEEAVDLLPAGASKTDGIRSVVEALGLEMADVMAFGDGLNDV | 224 |
| Query: | 235 | EMLSQVGIGVAMGNASQQVRENARYTTADNNDDGISKALAHYGLI | 279 |
| | | EMLS+VG GVAMGN Q +E A+Y ++DG+ + L G+I | |
| Sbjct: | 225 | EMLSEVGFGVAMGNGEQAAKEAAKYVCPGVDEDGVLRGLQDLGVI | 269 |

[6549] A related DNA sequence was identified in S. pyogenes <SEQ ID 3653> which encodes the amino acid sequence <SEQ ID 3654>. Analysis of this protein sequence reveals the following:

```
Possible site: 45
>>> Seems to have no N-terminal signal sequence
----- Final Results -----
                            bacterial cytoplasm --- Certainty = 0.6014(Affirmative) < succ>
                              bacterial membrane --- Certainty = 0.0000(Not Clear) < succ>
                                bacterial outside --- Certainty = 0.0000(Not Clear) < succ>
```

[6550] An alignment of the GAS and GBS proteins is shown below.

| Identities = 320/459 (69%), Positives = 391/459 (84%) | | | |
|---|---|---|---|
| Query: | 1 | MAIKAVFFDIDGTLLNDRKNVQKSTIKAIRNLKDQGILVGLATGRGPSFVQPFLENLGLD | 60 |
| | | + +KAVFFDIDGTLLNDRKN+QK+T KAI+ LK QGI+VGLATGRGP FVQPFLEN GLD | |
| Sbjct: | 1 | LTVKAVFFDIDGTLLNDRKNIQKTTQKAIQQLKKQGIMVGLATGRGPGFVQPFLENFGLD | 60 |
| Query: | 61 | FAVTYNGQYIYSRSEIIYTNQLSKTTVYRLIRYAGARRREISLGTASGLLGSGIIGLGTS | 120 |
| | | FAVTYNGQYI +R +++Y NQL K+ +Y++IRYA ++REISLGTASGL GS II +GTS | |
| Sbjct: | 61 | FAVTYNGQYILTRDKVLYQNQLPKSMIYKVIRYANEKKREISLGTASGLAGSRIIDMGTS | 120 |
| Query: | 121 | RLGQIVSSLVPRKWAKAIERSFKHFIRRIKPQNIDSLMVILREPIYQVVLVATEGESERI | 180 |
| | | GQ++SS VP+ WA+ +E SFKH IRRIKPQ+ +L+ I+REPIYQVVLVA++ E+++I | |
| Sbjct: | 121 | PFGQVISSFVPKSWARTVEGSFKHLIRRIKPQSFRNLVTIMREPIYQVVLVASQAETKKI | 180 |
| Query: | 181 | QKQFPRVKLTRSSPYSMDVISEGQSKVKGIERVGQRYGFDLSEVIAFGDSDNDIEMLSQV | 240 |
| | | Q++FP +K+TRSSPYS+D+IS QSK+KGIER+G+ +GFDLSEV+AFGDSDND+EMLS V | |
| Sbjct: | 181 | QEKFPHIKITRSSPYSLDLISVDQSKIKGIERLGEMFGFDLSEVMAFGDSDNDLEMLSGV | 240 |
| Query: | 241 | GIGVAMGNASQQVRENARYTTADNNDDGISKALAHYGLIQFEIEKTFSSRDENFNKVKSF | 300 |
| | | GIG+AMGNA V++ A +TT NN+DGISKALAHYGLI F+IEK+F SRDENFNKVK F | |
| Sbjct: | 241 | GIGIAMGNAETVVKDGAHFTTDSNNNDGISKALAHYGLIHFDIEKSFKSRDENFNKVKDF | 300 |
| Query: | 301 | HLLMDGETIETPRLYDSKEAGFRSDFKVEEIVEFLYAASQGNQKVFDQSIRNLHLAIDKA | 360 |
| | | H LMD +TIETPR Y EAG+RS FKVEEIVEFLYAAS+G+Q+ F Q+I +LH A+D+A | |
| Sbjct: | 301 | HRLMDSDTIETPRSYTISEAGYRSGFKVEEIVEFLYAASKGDQQQFTQAIFDLHGAVDQA | 360 |
| Query: | 361 | RDKVISKDHPETPLVGEVDALTDLLYLTYGSFVLMGVDPKPLFDTVHEANMGKIFPDGKA | 420 |
| | | +KV +K H ETPL+G+VDAL DLLY TYGSFVLMGVDP+P+F+ VHEANM KIFPDGKA | |
| Sbjct: | 361 | ANKVQAKKHVETPLIGQVDALADLLYFTYGSFVLMGVDPQPIFEAVHEANMAKIFPDGKA | 420 |
| Query: | 421 | HFDPVTHKILKPDDWEEHFAPEPSIRRELDSQIQKSLNR | 459 |
| | | HFDPVTHKI KPD W+E APE +I++ELD Q+QKSL R | |
| Sbjct: | 421 | HFDPVTHKIQKPDYWQERHAPEVAIKKELDKQLQKSLQR | 459 |

[6551] Based on this analysis, it was predicted that these proteins and their epitopes could be useful antigens for vaccines or diagnostics.

### EXAMPLE 1176

[6552] A DNA sequence (GBSx1252) was identified in S. agalactiae <SEQ ID 3655> which encodes the amino acid sequence <SEQ ID 3656>. Analysis of this protein sequence reveals the following:

```
Possible site: 38
>>> Seems to have no N-terminal signal sequence
----- Final Results -----
                            bacterial cytoplasm --- Certainty = 0.1671(Affirmative) < succ>
                              bacterial membrane --- Certainty = 0.0000(Not Clear) < succ>
                                bacterial outside --- Certainty = 0.0000(Not Clear) < succ>
```

[6553] A related GBS nucleic acid sequence <SEQ ID 10101> which encodes amino acid sequence <SEQ ID 10102> was also identified.

[6554] The protein has homology with the following sequences in the GENPEPT database.

| >GP: BAB06903 GB: AP001518 unknown conserved protein [Bacillus halodurans] | | | |
|---|---|---|---|
| Identities = 61/141 (43%), Positives = 92/141 (64%) | | | |
| Query: | 22 | YERILVAIDGSTESELAFEKAVNVALRNDSELILTHVIDTRALQSFATFDTYIYEKLEKE | 81 |
| | | Y ILVA+DGST+++ A KA N A ++L + HVID+R+ + +D + E + | |
| Sbjct: | 2 | YNHILVAVDGSTQAKRALYKAFNYAKEFKADLFICHVIDSRSFATVEQYDRTVVGAAELD | 61 |
| Query: | 82 | AKDVLEEYEKQAREKGADKVRQVIEFGNPKTLLAHDIPEKEKVDLIMVGATGLNTFERFX | 141 |
| | | K +L+ Y ++A + G DKV +++FG+PK ++ I +K +DLI+ GATGLN ERF | |
| Sbjct: | 62 | GKKLLQRYSEEAEKAGVDKVHTILDFGSPKANISKTIAQKYDIDLIITGATGLNAVERFL | 121 |
| Query: | 142 | IGSSSEYILRHAKVDLLIVRD | 162 |
| | | +GS SE + RHAK D+LIVR+ | |
| Sbjct: | 122 | MGSVSESVARHAKCDVLIVRN | 142 |

[6555] A related DNA sequence was identified in S. pyogenes <SEQ ID 3657> which encodes the amino acid sequence <SEQ ID 3658>. Analysis of this protein sequence reveals the following:

```
Possible site: 51
>>> Seems to have no N-terminal signal sequence
----- Final Results -----
                            bacterial cytoplasm --- Certainty = 0.1296(Affirmative) < succ>
                              bacterial membrane --- Certainty = 0.0000(Not Clear) < succ>
                                bacterial outside --- Certainty = 0.0000(Not Clear) < succ>
```

[6556] An alignment of the GAS and GBS proteins is shown below.

| Identities = 117/156 (75%), Positives = 135/156 (86%) | | | |
|---|---|---|---|
| Query: | 12 | LEEDRLMSQKYERILVAIDGSTESELAFEKAVNVALRNDSELILTHVIDTRALQSFATFD | 71 |
| | | L+ED MS KY+RILVAIDGS ESELAF K VNVALRND+ L+L HVIDTRALQS ATFD | |
| Sbjct: | 25 | LKEDSSMSLKYKRILVAIDGSYESELAFNKGVNVALRNDATLLLVHVIDTRALQSVATFD | 84 |
| Query: | 72 | TYIYEKLEKEAKDVLEEYEKQAREKGADKVRQVIEFGNPKTLLAHDIPEKEKVDLIMVGA | 131 |
| | | TYIYEKLE+EAKDVL+++EKQA+ G ++Q+IEFGNPK LLAHDIP++E DLIMVGA | |
| Sbjct: | 85 | TYIYEKLEQEAKDVLDDFEKQAQIAGITNIKQIIEFGNPKNLLAHDIPDRENADLIMVGA | 144 |
| Query: | 132 | TGLNTFERFXIGSSSEYILRHAKVDLLIVRDPNKTM | 167 |
| | | TGLNTFER IGSSSEYI+RHAK+DLL+VRD KT+ | |
| Sbjct: | 145 | TGLNTFERLLIGSSSEYIMRHAKIDLLVVRDSTKTL | 180 |

[6557] Based on this analysis, it was predicted that these proteins and their epitopes could be useful antigens for vaccines or diagnostics.

### EXAMPLE 1177

[6558] A DNA sequence (GBSx1253) was identified in S. agalactiae <SEQ ID 3659> which encodes the amino acid sequence <SEQ ID 3660>. This protein is predicted to be aspartate aminotransferase (aspC). Analysis of this protein sequence reveals the following:

```
Possible site: 47
>>> Seems to have no N-terminal signal sequence
----- Final Results -----
                            bacterial cytoplasm --- Certainty = 0.2803(Affirmative) < succ>
                              bacterial membrane --- Certainty = 0.0000(Not Clear) < succ>
                                bacterial outside --- Certainty = 0.0000(Not Clear) < succ>
```

[6559] The protein has homology with the following sequences in the GENPEPT database.

| >GP: AAC21948 GB: U32714 aminotransferase [Haemophilus influenzae Rd] | | | |
|---|---|---|---|
| Identities = 142/212 (66%), Positives = 181/212 (84%), Gaps = 1/212 (0%) | | | |
| Query: | 1 | MKIFDKSMKLEHVAYDIRGPVLEEADRMRANGEKILRLNTGNPAAFGFEAPDEVIRDLIT | 60 |
| | | M++F KS KLEHV YDIRGPV +EA R+ G KIL+LN GNPA FGFEAPDE++ D++ | |
| Sbjct: | 1 | MRLFPKSDKLEHVCYDIRGPVHKEALRLEEEGNKILKLNIGNPAPFGFEAPDEILVDVLR | 60 |
| Query: | 61 | NARESEGYSDSKGIFSARKAVMQYYQLQNI-HVDMDDIYIVNGVSEGISMSMQALLDNDD | 119 |
| | | N ++GY DSKG++SARKA++QYYQ + I ++D+YI NGVSE I+M+MQALL++ D | |
| Sbjct: | 61 | NLPSAQGYCDSKGLYSARKAIVQYYQSKGILGATVNDVYIGNGVSELITMAMQALLNDGD | 120 |
| Query: | 120 | EVLVPMPDYPLWTACVSLAGGNAVHYICDEEANWYPDIDDIKSKITSKTKAIVLINPNNP | 179 |
| | | EVLVPMPDYPLWTA V+L+GG AVHY+CDE+ANW+P IDDIK+K+ +KTKAIV+INPNNP | |
| Sbjct: | 121 | EVLVPMPDYPLWTAAVTLSGGKAVHYLCDEDANWFPTIDDIKAKVNAKTKAIVIINPNNP | 180 |
| Query: | 180 | TGAVYPREILQEIVDIARQNDLIIFSDEVYDR | 211 |
| | | TGAVY +E+LQEIV+IARQN+LIIF+DE+YD+ | |
| Sbjct: | 181 | TGAVYSKELLQEIVEIARQNNLIIFADEIYDK | 212 |

[6560] A related DNA sequence was identified in S. pyogenes <SEQ ID 3661> which encodes the amino acid sequence <SEQ ID 3662>. Analysis of this protein sequence reveals the following:

```
Possible site: 59
>>> Seems to have no N-terminal signal sequence
----- Final Results -----
                            bacterial cytoplasm --- Certainty = 0.2936(Affirmative) < succ>
                              bacterial membrane --- Certainty = 0.0000(Not Clear) < succ>
                                bacterial outside --- Certainty = 0.0000(Not Clear) < succ>
```

[6561] An alignment of the GAS and GBS proteins is shown below.

| Identities = 170/212 (80%), Positives = 193/212 (90%), Gaps = 1/212 (0%) | | | |
|---|---|---|---|
| Query: | 1 | MKIFDKSMKLEHVAYDIRGPVLEEADRMRANGEKILRLNTGNPAAFGFEAPDEVIRDLIT | 60 |
| | | MKI +KS KLEHVAYDIRGPVL+EA+RM A+GEKILRLNTGNPAAFGFEAPDEVIRDLI | |
| Sbjct: | 13 | MKIIEKSSKLEHVAYDIRGPVLDEANRMIASGEKILRLNTGNPAAFGFEAPDEVIRDLIV | 72 |
| Query: | 61 | NARESEGYSDSKGIFSARKAVMQYYQLQNI-HVDMDDIYIVNGVSEGISMSMQALLDNDD | 119 |
| | | NAR SEGYSDSKGIFSARKA+MQY QL+ VD++DIY+ NGVSE IS+S+QALLDN D | |
| Sbjct: | 73 | NARLSEGYSDSKGIFSARKAIMQYCQLKGFPDVDIEDIYLGNGVSELISISLQALLDNGD | 132 |
| Query: | 120 | EVLVPMPDYPLWTACVSLAGGNAVHYICDEEANWYPDIDDIKSKITSKTKAIVLINPNNP | 179 |
| | | EVLVPMPDYPLWTACVSL GG AVHY+CDEEA WYPDI DIKSKITS+TKAIV+INPNNP | |
| Sbjct: | 133 | EVLVPMPDYPLWTACVSLGGGKAVHYLCDEEAGWYPDIADIKSKITSRTKAIVVINPNNP | 192 |
| Query: | 180 | TGAVYPREILQEIVDIARQNDLIIFSDEVYDR | 211 |
| | | TGA+YP+EIL++IV +AR++ LIIF+DE+YDR | |
| Sbjct: | 193 | TGALYPKEILEDIVALAREHQLIIFADEIYDR | 224 |

[6562] Based on this analysis, it was predicted that these proteins and their epitopes could be useful antigens for vaccines or diagnostics.

### EXAMPLE 1178

[6563] A DNA sequence (GBSx1254) was identified in S. agalactiae <SEQ ID 3663> which encodes the amino acid sequence <SEQ ID 3664>. Analysis of this protein sequence reveals the following:

| Possible site: 60 | | | | |
|---|---|---|---|---|
| >>> Seems to have no N-terminal signal sequence | | | | |
| | INTEGRAL | Likelihood = −14.75 | Transmembrane | 38-54 (29-60) |

```
----- Final Results -----
                              bacterial membrane --- Certainty = 0.6901(Affirmative) < succ>
                                bacterial outside --- Certainty = 0.0000(Not Clear) < succ>
                            bacterial cytoplasm --- Certainty = 0.0000(Not Clear) < succ>
```

[6564] A related GBS nucleic acid sequence <SEQ ID 9389> which encodes amino acid sequence <SEQ ID 9390> was also identified.

[6565] The protein has no significant homology with any sequences in the GENPEPT database.

[6566] A related DNA sequence was identified in S. pyogenes <SEQ ID 3665> which encodes the amino acid sequence <SEQ ID 3666>. Analysis of this protein sequence reveals the following:

| Possible site: 43 | | | | |
|---|---|---|---|---|
| >>> Seems to have no N-terminal signal sequence | | | | |
| | INTEGRAL | Likelihood = −15.97 | Transmembrane | 35-51 (25-58) |

```
----- Final Results -----
                              bacterial membrane --- Certainty = 0.7389(Affirmative) < succ>
                                bacterial outside --- Certainty = 0.0000(Not Clear) < succ>
                            bacterial cytoplasm --- Certainty = 0.0000(Not Clear) < succ>
```

[6567] The protein has no significant homology with any sequences in the GENPEPT database.

[6568] An alignment of the GAS and GBS proteins is shown below.

| Identities = 51/87 (58%), Positives = 63/87 (71%), Gaps = 7/87 (8%) | | | |
|---|---|---|---|
| Query: | 1 | MAKKPWEKKVVENNSHRKDKITRTSRGVVSSTPWITAFLSAFFVIVVAILFIVFYTSNRG | 60 |
| | | MAK+PWE+K+V++ + TR SR STPW+TA LS FFVI+VAILFI FYTSN G | |
| Sbjct: | 1 | MAKEPWEEKIVDDTIGTR---TRKSRNAFISTPWLTALLSVFFVIIVAILFIFFYTSNSG | 57 |
| Query: | 61 | EDRAKETSGFYGASSQKVNSSKTKKAS | 87 |
| | | +R ET+GFYGAS+ K KT+KAS | |
| Sbjct: | 58 | SNRQAETNGFYGASTHK----KTRKAS | 80 |

[6569] Based on this analysis, it was predicted that these proteins and their epitopes could be useful antigens for vaccines or diagnostics.

### EXAMPLE 1179

[6570] A DNA sequence (GBSx1255) was identified in S. agalactiae <SEQ ID 3667> which encodes the amino acid sequence <SEQ ID 3668>. Analysis of this protein sequence reveals the following:

```
Possible site: 22
>>> Seems to have no N-terminal signal sequence
----- Final Results -----
                            bacterial cytoplasm --- Certainty = 0.0815(Affirmative) < succ>
                              bacterial membrane --- Certainty = 0.0000(Not Clear) < succ>
                                bacterial outside --- Certainty = 0.0000(Not Clear) < succ>
```

[6571] The protein has no significant homology with any sequences in the GENPEPT database.

[6572] A related DNA sequence was identified in S. pyogenes <SEQ ID 3669> which encodes the amino acid sequence <SEQ ID 3670>. Analysis of this protein sequence reveals the following:

```
Possible site: 61
>>> Seems to have no N-terminal signal sequence
----- Final Results -----
                            bacterial cytoplasm --- Certainty = 0.0107(Affirmative) < succ>
                              bacterial membrane --- Certainty = 0.000(Not Clear) < succ>
                                bacterial outside --- Certainty = 0.0000(Not Clear) < succ>
```

[6573] An alignment of the GAS and GBS proteins is shown below.

| Identities = 43/64 (67%), Positives = 53/64 (82%) | | | |
|---|---|---|---|
| Query: | 1 | MKVALIPEKCIACGLCQTYSNIFDYQDDGIVKFSDTDNLEKEIPSSDQDTVLAVKSCPTK | 60 |
| | | MKV++IPEKCIACGLCQTYS++FDY D+GIV FS + + I SD+D +LAVKSCPTK | |
| Sbjct: | 1 | MKVSIIPEKCIACGLCQTYSSLFDYHDNGIVTFSSSSETSQSICPSDKDAILAVKSCPTK | 60 |
| Query: | 61 | ALTI | 64 |
| | | ALT+ | |
| Sbjct: | 61 | ALTL | 64 |

[6574] Based on this analysis, it was predicted that these proteins and their epitopes could be useful antigens for vaccines or diagnostics.

### EXAMPLE 1180

[6575] A DNA sequence (GBSx1256) was identified in S. agalactiae <SEQ ID 3671> which encodes the amino acid sequence <SEQ ID 3672>. Analysis of this protein sequence reveals the following:

| Possible site: 28 | | | | |
|---|---|---|---|---|
| >>> Seems to have a cleavable N-term signal seq. | | | | |
| | INTEGRAL | Likelihood = −10.61 | Transmembrane | 47-63 (41-69) |

```
----- Final Results -----
                              bacterial membrane --- Certainty = 0.5246(Affirmative) < succ>
                                bacterial outside --- Certainty = 0.0000(Not Clear) < succ>
                            bacterial cytoplasm --- Certainty = 0.0000(Not Clear) < succ>
```

[6576] The protein has homology with the following sequences in the GENPEPT database.

| >GP: AAC36851 GB: L23802 pore-forming peptide [Enterococcus faecalis] | | | |
|---|---|---|---|
| Identities = 42/130 (32%), Positives = 63/130 (48%), Gaps = 9/130 (6%) | | | |
| Query: | 7 | KIRYHWQPELSWAIIYWSIAIAPIFIGLSLLYERTE---IPSQVFVLFAIFIVLVGIGFH | 63 |
| | | K +++WQPEL+ IIYWS +FI L L E I + V V F +F L G | |
| Sbjct: | 3 | KQKFYWQPELASTIIYWSCTFCILFISLILALENNGPYLISNLVMVPFFVFAYL---GIA | 59 |
| Query: | 64 | RYFVIEEDGYLRIVSFNFLRRTKFPIEDIAKIEVTKSSVTIKFNNNHE--RIFYMRKWPK | 121 |
| | | R F + E L + + R+ P+ I K+ + S+ I + E ++F M+K | |
| Sbjct: | 60 | RSFNMTETS-LIVRDVLWFRKKALPLSQIEKVTYNEKSIEIFSSEFKEGSKVFLMKKKTD | 118 |
| Query: | 122 | KYFLDALAIE | 131 |
| | | FL+AL I+ | |
| Sbjct: | 119 | SLFLEALKIK | 128 |

[6577] A related DNA sequence was identified in S. pyogenes <SEQ ID 3673> which encodes the amino acid sequence <SEQ ID 3674>. Analysis of this protein sequence reveals the following:

| Possible site: 28 | | | | |
|---|---|---|---|---|
| >>> Seems to have no N-terminal signal sequence | | | | |
| | INTEGRAL | Likelihood = −9.87 | Transmembrane | 47-63 (41-69) |
| | INTEGRAL | Likelihood = −3.35 | Transmembrane | 20-36 (18-37) |

```
----- Final Results -----
                              bacterial membrane --- Certainty = 0.4949(Affirmative) < succ>
                                bacterial outside --- Certainty = 0.0000(Not Clear) < succ>
                            bacterial cytoplasm --- Certainty = 0.0000(Not Clear) < succ>
```

[6578] The protein has homology with the following sequences in the databases:

| >GP: AAC36851 GB: L23802 pore-forming peptide [Enterococcus faecalis] | | | |
|---|---|---|---|
| Identities = 42/130 (32%), Positives = 70/130 (53%), Gaps = 12/130 (9%) | | | |
| Query: | 7 | KIRYHWQPELSWSIIYWSIAFAPIFVGLSLLYERTE---IPSRVFILFAIFAVLVGIGLH | 63 |
| | | K +++WQPEL+ +IIYWS F +F+ L L E I + V + F +FA L G+ | |
| Sbjct: | 3 | KQKFYWQPELASTIIYWSCTFCILFISLILALENNGPYLISNLVMVPFFVFAYL---GIA | 59 |
| Query: | 64 | RYF-IIENNGILRIVSFKLFGPRKLLISTITKIEVTKSTLCL---HVEDKSYLFYMRKWP | 119 |
| | | R F + E + I+R V + F + L +S I K+ + ++ + ++ S +F M+K | |
| Sbjct: | 60 | RSFNMTETSLIVRDVLW--FRKKALPLSQIEKVTYNEKSIEIFSSEFKEGSKVFLMKKKT | 117 |
| Query: | 120 | KKYFLDALAV | 129 |
| | | FL+AL + | |
| Sbjct: | 118 | DSLFLEALKI | 127 |

[6579] An alignment of the GAS and GBS proteins is shown below.

| Identities = 115/162 (70%), Positives = 132/162 (80%), Gaps = 1/162 (0%) | | | |
|---|---|---|---|
| Query: | 1 | MIKLFGKIRYHWQPELSWAIIYWSIAIAPIFIGLSLLYERTEIPSQVFVLFAIFIVLVGI | 60 |
| | | MIKLFGKIRYHWQPELSW+IIYWSIA APIF+GLSLLYERTEIPS+VF+LFAIF VLVGI | |
| Sbjct: | 1 | MIKLFGKIRYHWQPELSWSIIYWSIAFAPIFVGLSLLYERTEIPSRVFILFAIFAVLVGI | 60 |
| Query: | 61 | GFHRYFVIEEDGYLRIVSFNFLRRTKFPIEDIAKIEVTKSSVTIKFNNNHERIFYMRKWP | 120 |
| | | G HRYF+IE +G LRIVSF K I I KIEVTKS++ + + +FYMRKWP | |
| Sbjct: | 61 | GLHRYFIIENNGILRIVSFKLFGPRKLLISTITKIEVTKSTLCLHVEDK-SYLFYMRKWP | 119 |
| Query: | 121 | KKYFLDALAIEPTFKGEVELLDNLIKMDYFECYRYDKKALTK | 162 |
| | | KKYFLDALA+ P F+GEV L DN IK+DYFE Y++DKKALT+ | |
| Sbjct: | 120 | KKYFLDALAVNPYFQGEVILSDNFIKLDYFEVYQHDKKALTR | 161 |

[6580] Based on this analysis, it was predicted that these proteins and their epitopes could be useful antigens for vaccines or diagnostics.

### EXAMPLE 1181

[6581] A DNA sequence (GBSx1257) was identified in S. agalactiae <SEQ ID 3675> which encodes the amino acid sequence <SEQ ID 3676>. This protein is predicted to be peptidase t (pepT). Analysis of this protein sequence reveals the following:

```
Possible site: 49
>>> Seems to have no N-terminal signal sequence
----- Final Results -----
                            bacterial cytoplasm --- Certainty = 0.2913(Affirmative) < succ>
                              bacterial membrane --- Certainty = 0.0000(Not Clear) < succ>
                                bacterial outside --- Certainty = 0.0000(Not Clear) < succ>
```

[6582] The protein has homology with the following sequences in the GENPEPT database.

| >GP: AAA20627 GB: L27596 tripeptidase [Lactococcus lactis] | | | |
|---|---|---|---|
| Identities = 274/406 (67%), Positives = 334/406 (81%), Gaps = 4/406 (0%) | | | |
| Query: | 1 | MSYEKLLERFLTYVKINTRSNPNSTQTPTTQSQVDFALTVLKPEMEAIGLKDVHYLPSNG | 60 |
| | | M YEKLL RFL YVK+NTRS+ NST TP+TQ+ V+FA + +M+A+GLKDVHYL SNG | |
| Sbjct: | 1 | MKYEKLLPRFLEYVKVNTRSDENSTTTPSTQALVEFAHK-MGEDMKALGLKDVHYLESNG | 59 |
| Query: | 61 | YLVGTLPATSDRLRHKIGFISHMDTADFNAENITPQIVDYKGGD--IELGDSGYILSPKD | 118 |
| | | Y++GT+PA +D+ KIG ++H+DTADFNAE + PQI++ G+ I+LGD+ + L PKD | |
| Sbjct: | 60 | YVIGTIPANTDKKVRKIGLLAHLDTADFNAEGVNPQILENYDGESVIQLGDTEFTLDPKD | 119 |
| Query: | 119 | FPNLNNYHGQTLITTDGKTLLGADDKSGIAEIMTAMEYLAS-HPEIEHCEIRVGFGPDEE | 177 |
| | | FPNL NY GQTL+ TDG TLLG+DDKSG+AEIMT +YL + +P+ EH EIRVGFGPDEE | |
| Sbjct: | 120 | FPNLKNYKGQTLVHTDGTTLLGSDDKSGVAEIMTLADYLLNINPDFEHGEIRVGFGPDEE | 179 |
| Query: | 178 | IGIGADKFDVKDFDVDFAYTVDGGPLGELQYETFSAAGLELTFEGRNVHPGTAKNQMINA | 237 |
| | | IG+GADKFDV DFDVDFAYTVDGGPLGELQYETFSAAG + F+G+NVHPGTAKN M+NA | |
| Sbjct: | 180 | IGVGADKFDVADFDVDFAYTVDGGPLGELQYETFSAAGAVIEFQGKNVHPGTAKNMMVNA | 239 |
| Query: | 238 | LQLAMDFHSQLPENERPEQTDGYQGFYHLYDLSGTVDQAKSSYIIRDFEEVDFLKRKHLA | 297 |
| | | LQLA+D+H+ LPE +RPE+T+G +GF+HL L GT ++A++ YIIRD EE F +RK L | |
| Sbjct: | 240 | LQLAIDYHNALPEFDRPEKTEGREGFFHLLKLDGTPEEARAQYIIRDHEEGKFNERKALM | 299 |
| Query: | 298 | QDIADNMNEALQSERVKVKLYDQYYNMKKVIEKDMTPINIAKEVMEELDIKPIIEPIRGG | 357 |
| | | Q+IAD MN L RVK + DQYYNM ++IEKDM+ I+IAK+ ME LDI PIIEPIRGG | |
| Sbjct: | 300 | QEIADKMNAELGQNRVKPVIKDQYYNMAQIIEKDMSIIDIAKKAMENLDIAPIIEPIRGG | 359 |
| Query: | 358 | TDGSKISFMGIPTPNLFAGGENMHGRFEFVSLQTMEKAVDVILGIV | 403 |
| | | TDGSKISFMG+PTPNLFAGGENMHGRFEFVS+QTNEKAVD +L I+ | |
| Sbjct: | 360 | TDGSKISFMGLPTPNLFAGGENMHGRFEFVSVQTMEKAVDTLLEII | 405 |

[6583] A related DNA sequence was identified in S. pyogenes <SEQ ID 3677> which encodes the amino acid sequence <SEQ ID 3678>. Analysis of this protein sequence reveals the following:

```
Possible site: 41
>>> Seems to have no N-terminal signal sequence
----- Final Results -----
                            bacterial cytoplasm --- Certainty = 0.2938(Affirmative) < succ>
                              bacterial membrane --- Certainty = 0.0000(Not Clear) < succ>
                                bacterial outside --- Certainty = 0.0000(Not Clear) < succ>
```

[6584] An alignment of the GAS and GBS proteins is shown below.

| Identities = 305/406 (75%), Positives = 352/406 (86%), Gaps = 1/406 (0%) | | | |
|---|---|---|---|
| Query: | 1 | MSYEKLLERFLTYVKINTRSNPNSTQTPTTQSQVDFALTVLKPEMEAIGLKDVHYLPSNG | 60 |
| | | M Y+ LL+RF+ YVK+NTRS P+S TP+T+SQ FALT+LKPEMEAIGL+DVHY P NG | |
| Sbjct: | 5 | MKYDNLLDRFIKYVKVNTRSVPDSETTPSTESQEAFALTILKPEMEAIGLQDVHYNPVNG | 64 |
| Query: | 61 | YLVGTLPATSDRLRHKIGFISHMDTADFNAENITPQIVD-YKGGDIELGDSGYILSPKDF | 119 |
| | | YL+GTLPA + L KIGFI+HMDTADFNAEN+ PQI+D Y+GGDI LG S Y L PK F | |
| Sbjct: | 65 | YLIGTLPANNPTLTRKIGFIAHMDTADFNAENVNPQIIDNYQGGDITLGSSNYKLDPKAF | 124 |
| Query: | 120 | PNLNNYHGQTLITTDGKTLLGADDKSGIAEIMTAMEYLASHPEIEHCEIRVGFGPDEEIG | 179 |
| | | PNLNNY GQTLITTDG TLLGADDKSGIAEIMTA+E+L S P+IEHC+I+V FGPDEEIG | |
| Sbjct: | 125 | PNLNNYIGQTLITTDGTTLLGADDKSGIAEIMTAIEFLTSQPQIEHCDIKVAFGPDEEIG | 184 |
| Query: | 180 | IGADKFDVKDFDVDFAYTVDGGPLGELQYETFSAAGLELTFEGRNVHPGTAKNQMINALQ | 239 |
| | | +GADKF+V DF+VDFAYT+DGGPLGELQYETFSAA LE+TF GRNVHPGTAK+QMINAL+ | |
| Sbjct: | 185 | VGADKFEVADFEVDFAYTMDGGPLGELQYETFSAAALEVTFLGRNVHPGTAKDQMINALE | 244 |
| Query: | 240 | LAMDFHSQLPENERPEQTDGYQGFYHLYDLSGTVDQAKSSYIIRDFEEVDFLKRKHLAQD | 299 |
| | | LA+DFH +LP +RPE TDGYQGFYHL L+GTV++A++SYIIRDFEE F RK ++ | |
| Sbjct: | 245 | LAIDFHEKLPAKDRPEYTDGYQGFYHLTGLTGTVEEARASYIIRDFEEASFEARKVKVEN | 304 |
| Query: | 300 | IADNMNEALQSERVKVKLYDQYYNMKKVIEKDMTPINIAKEVMEELDIKPIIEPIRGGTD | 359 |
| | | IA +MN L ++RV V+L DQYYNMKKVIEKDMT I +AKEVMEEL IKP+IEPIRGGTD | |
| Sbjct: | 305 | IAQSMNAQLGTKRVLVELNDQYYNMKKVIEKDMTAIELAKEVMEELAIKPVIEPIRGGTD | 364 |
| Query: | 360 | GSKISFMGIPTPNLFAGGENMHGRFEFVSLQTMEKAVDVILGIVAK | 405 |
| | | GSKISFMGIPTPN+FAGGENMHGRFEFVSLQTME+AVDVI+G+V K | |
| Sbjct: | 365 | GSKISFMGIPTPNIFAGGENMHGRFEFVSLQTMERAVDVIIGLVCK | 410 |

[6585] Based on this analysis, it was predicted that these proteins and their epitopes could be useful antigens for vaccines or diagnostics.

### EXAMPLE 1182

[6586] A DNA sequence (GBSx1258) was identified in S. agalactiae <SEQ ID 3679> which encodes the amino acid sequence <SEQ ID 3680>. Analysis of this protein sequence reveals the following:

| Possible site: 43 | | | | |
|---|---|---|---|---|
| >>> Seems to have no N-terminal signal sequence | | | | |
| | INTEGRAL | Likelihood = −12.26 | Transmembrane | 481-497 (477-508) |
| | INTEGRAL | Likelihood = −9.45 | Transmembrane | 510-526 (506-534) |
| | INTEGRAL | Likelihood = −7.96 | Transmembrane | 316-332 (310-334) |
| | INTEGRAL | Likelihood = −7.54 | Transmembrane | 354-370 (351-373) |
| | INTEGRAL | Likelihood = −7.11 | Transmembrane | 385-401 (383-409) |
| | INTEGRAL | Likelihood = −6.58 | Transmembrane | 215-231 (211-233) |
| | INTEGRAL | Likelihood = −6.48 | Transmembrane | 71-87 (69-91) |
| | INTEGRAL | Likelihood = −6.32 | Transmembrane | 110-126 (106-133) |
| | INTEGRAL | Likelihood = −5.10 | Transmembrane | 446-462 (443-465) |
| | INTEGRAL | Likelihood = −3.29 | Transmembrane | 418-434 (418-435) |
| | INTEGRAL | Likelihood = −2.55 | Transmembrane | 263-279 (263-279) |
| | INTEGRAL | Likelihood = −2.02 | Transmembrane | 142-158 (141-159) |
| | INTEGRAL | Likelihood = −1.70 | Transmembrane | 184-200 (184-200) |

```
----- Final Results -----
                              bacterial membrane --- Certainty = 0.5904(Affirmative) < succ>
                                bacterial outside --- Certainty = 0.0000(Not Clear) < succ>
                            bacterial cytoplasm --- Certainty = 0.0000(Not Clear) < succ>
```

[6587] A related GBS nucleic acid sequence <SEQ ID 8747> which encodes amino acid sequence <SEQ ID 8748> was also identified. Analysis of this protein sequence reveals the following:

| Lipop: Possible site: −1 Crend: 6 | | | | |
|---|---|---|---|---|
| McG: Discrim Score: −10.58 | | | | |
| GvH: Signal Score (−7.5): −1.1 | | | | |
| Possible site: 32 | | | | |
| >>> Seems to have no N-terminal signal sequence | | | | |
| ALOM program count: 13 value: −12.26 threshold: 0.0 | | | | |
| | INTEGRAL | Likelihood = −12.26 | Transmembrane | 470-486 (466-497) |
| | INTEGRAL | Likelihood = −9.45 | Transmembrane | 499-515 (495-523) |
| | INTEGRAL | Likelihood = −7.96 | Transmembrane | 305-321 (299-323) |
| | INTEGRAL | Likelihood = −7.54 | Transmembrane | 343-359 (340-362) |
| | INTEGRAL | Likelihood = −7.11 | Transmembrane | 374-390 (372-398) |
| | INTEGRAL | Likelihood = −6.58 | Transmembrane | 204-220 (200-222) |
| | INTEGRAL | Likelihood = −6.48 | Transmembrane | 60-76 (58-80) |
| | INTEGRAL | Likelihood = −6.32 | Transmembrane | 99-115 (95-122) |
| | INTEGRAL | Likelihood = −5.10 | Transmembrane | 435−451 (432-454) |
| | INTEGRAL | Likelihood = −3.29 | Transmembrane | 407−423 (407-424) |
| | INTEGRAL | Likelihood = −2.55 | Transmembrane | 252−268 (252-268) |
| | INTEGRAL | Likelihood = −2.02 | Transmembrane | 131−147 (130-148) |
| | INTEGRAL | Likelihood = −1.70 | Transmembrane | 173−189 (173-189) |
| | PERIPHERAL | Likelihood = 1.43 | 21 | |

```
modified ALOM score: 2.95
*** Reasoning Step: 3
----- Final Results -----
                              bacterial membrane --- Certainty = 0.5904(Affirmative) < succ>
                                bacterial outside --- Certainty = 0.0000(Not Clear) < succ>
                            bacterial cytoplasm --- Certainty = 0.0000(Not Clear) < succ>
```

[6588] The protein has homology with the following sequences in the GENPEPT database.

| >GP: AAC00276 GB: AF008220 YtgP [Bacillus subtilis] | | | |
|---|---|---|---|
| Identities = 178/545 (32%), Positives = 302/545 (54%), Gaps 26/545 (4%) | | | |
| Query: | 24 | QMVKGTAWLTAGNFISRLLGAIYIIPWYAWMGKHAAEANALFGMGYEIYALFLLISTVGI | 83 |
| | | ++++GT LT G +ISR+LG +Y+IP+ +G A ALF GY Y LFL I+T+G | |
| Sbjct: | 4 | KLLRGTFVLTLGTYISRILGMVYLIPFSIMVG---ATGGALFQYGYNQYTLFLNIATMGF | 60 |
| Query: | 84 | PVAVAKQVSKYNTLGKEEMSIYLVRKILQFMLILGGIFALIMYIGSPLFASLSKGGQE-- | 141 |
| | | P AV+K VSKYN+ G E S +++ + ML+ G I I+Y+ +P+FA +S GG++ | |
| Sbjct: | 61 | PAAVSKFVSKYNSKGDYETSRKMLKAGMSVMLVTGMIAFFILYLSAPMFAEISLGGKDNN | 120 |
| Query: | 142 | ------LVPILRSLTLAVLVFPSMSVLRGFFQGFNNLKPYAISQVAEQIIRVIWMLLTAF | 195 |
| | | +V ++R ++LA+LV P MS++RGFFQG + P A+SQV EQI+R+I++L F | |
| Sbjct: | 121 | GLTIDHVVYVIRMVSLALLVVPIMSLVRGFFQGHQMMGPTAVSQVVEQIVRIIFLLSATF | 180 |
| Query: | 196 | YIMRLGSGDYIAAVTQSTFAAFVGMFASIAVLLYFLW--RYNMLSALIGKTPKHIKLDTK | 253 |
| | | I+++ +G + AV +TFAA +G F + V+LY W R L A++ T L K | |
| Sbjct: | 181 | LILKVFNGGLVIAVGYATFAALIGAFGGL-VVLYIYWNKRKGSLLAMMPNTGPTANLSYK | 239 |
| Query: | 254 | EILIETIKEAIPFIITGAAIQIFKLIDQFSFGNTM--ALFTNYSSEELRVMFAYFSSNPG | 311 |
| | | ++ E A P++ G AI ++ ID +F M A S + L ++ Y | |
| Sbjct: | 240 | KMFFELFSYAAPYVFVGLAIPLYNYIDTNTFNKAMIEAGHQAISQDMLAILTLYVQ---- | 295 |
| Query: | 312 | KVTMILIAVATAIAGVGIPLLTENFVKNDKKAAARLVVNNLQMLLMFLLPAVAGSVILAK | 371 |
| | | K+ MI +++ATA IP +TE+F + K + + +Q +L ++PAV G +L+ | |
| Sbjct: | 296 | KLVMIPVSLATAFGLTLIPTITESFTSGNYKLLNQQINQTMQTILFLIIPAVVGISLLSG | 355 |
| Query: | 372 | PLYTVFYGL----PQGQALGLFVISLIQTIILSIYTVLAPMLQALFENRKAIIYFLYGLV | 427 |
| | | P YT FYG P+ A L S + I+ S++TV A +LQ + + + A++ + G+V | |
| Sbjct: | 356 | PTYTFFYGSESLHPELGANILLWYSPV-AILFSLFTVNAAILQGINKQKFAVVSLVIGVV | 414 |
| Query: | 428 | AKVILQLPSIFLFHAYGPLFSTTVALCIPVILMYLKIHEITGFKRQAIRRTSALVLILTL | 487 |
| | | K++L +P I L A G + + T + ++ ++ I G+ + + + + L+L+L+ | |
| Sbjct: | 415 | IKLVLNVPLIKLMQADGAILATALGYIASLLYGFIMIKRHAGYSYKILVKRTVLMLVLSA | 474 |
| Query: | 488 | LMSFIISMIIWLMNLVI-VPDSRLVSLVYIIVIGAIGLGVYGFMALATHLLDKMIGSRAQ | 546 |
| | | +M + ++ W++ I D ++ + + +++ A+G VY + L K++G R | |
| Sbjct: | 475 | IMGIAVKIVQWVLGFFISYQDGQHQAAIVVVIAAAVGGAVYLYCGYRLGFLQKILGRRLP | 534 |
| Query: | 547 | DLRRK | 551 |
| | | RK | |
| Sbjct: | 535 | GFFRK | 539 |

[6589] A related DNA sequence was identified in S. pyogenes <SEQ ID 3681> which encodes the amino acid sequence <SEQ ID 3682>. Analysis of this protein sequence reveals the following:

| Possible site: 49 | | | | |
|---|---|---|---|---|
| >>> Seems to have no N-terminal signal sequence | | | | |
| | INTEGRAL | Likelihood = −8.60 | Transmembrane | 468-484 (466-493) |
| | INTEGRAL | Likelihood = −8.39 | Transmembrane | 305-321 (299-323) |
| | INTEGRAL | Likelihood = −7.75 | Transmembrane | 343-359 (340-362) |
| | INTEGRAL | Likelihood = −6.58 | Transmembrane | 374-390 (373-398) |
| | INTEGRAL | Likelihood = −4.25 | Transmembrane | 138-154 (137-157) |
| | INTEGRAL | Likelihood = −3.45 | Transmembrane | 100-116 (98-122) |
| | INTEGRAL | Likelihood = −3.40 | Transmembrane | 415-431 (410-432) |
| | INTEGRAL | Likelihood = −3.35 | Transmembrane | 499-515 (499-519) |
| | INTEGRAL | Likelihood = −2.60 | Transmembrane | 433-449 (432-451) |
| | INTEGRAL | Likelihood = −2.50 | Transmembrane | 173-189 (173-190) |
| | INTEGRAL | Likelihood = −0.59 | Transmembrane | 201-217 (201-220) |

```
----- Final Results -----
                              bacterial membrane --- Certainty = 0.4439(Affirmative) < succ>
                                bacterial outside --- Certainty = 0.0000(Not Clear) < succ>
                            bacterial cytoplasm --- Certainty = 0.0000(Not Clear) < succ>
```

[6590] The protein has homology with the following sequences in the databases:

| >GP: AAC00276 GB: AF008220 YtgP [Bacillus subtilis] | | | |
|---|---|---|---|
| Identities = 169/536 (31%), Positives = 295/536 (54%), Gaps = 24/536 (4%) | | | |
| Query: | 14 | MVQGAAWSTAGNFISRLLGVLYIIPWYIWMGQYAIQANALFNMGYNVYAYFLLISTTGLN | 73 |
| | | +++G T G +ISR+LG++Y+IP+ I +G ALF GYN Y FL I+T G | |
| Sbjct: | 5 | LLRGTFVLTLGTYISRILGMVYLIPFSIMVGA---TGGALFQYGYNQYTLFLNIATMGFP | 61 |
| Query: | 74 | VAIAKQVAKYNSMGQTEHSYQLIRSTLKLMLGLGLIFSAIMYLGSPLFASLS-GGDDT-- | 130 |
| | | A++K V+KYNS G E S ++++++ + ML G+I I+YL +P+FA +S GG D | |
| Sbjct: | 62 | AAVSKFVSKYNSKGDYETSRKMLKAGMSVMLVTGMIAFFILYLSAPMFAEISLGGKDNNG | 121 |
| Query: | 131 | -----LVPIMHSLSLAVFIFPVMSVIRGIFQGHNNIKPYAVSQIAEQLIRVIWMLLTTFF | 185 |
| | | +V ++ +SLA+ + P+MS++RG FQGH + P AVSQ+ EQ++R+I++L TF | |
| Sbjct: | 122 | LTIDHVVYVIRMVSLALLVVPIMSLVRGFFQGHQMMGPTAVSQVVEQIVRIIFLLSATFL | 181 |
| Query: | 186 | IMKLGSGDYASAVTQSTFAAFIGMVASMGVLGYYLW--KQGLLAAIFSKPDHTVSIDIKG | 243 |
| | | I+K+ +G AV +TFAA IG + VL Y W ++G L A+ T ++ K | |
| Sbjct: | 182 | ILKVFNGGLVIAVGYATFAALIGAFGGLVVL-YIYWNKRKGSLLAMMPNTGPTANLSYKK | 240 |
| Query: | 244 | LLLETLKESIPFIVTGSAIQAFQLIDQWTFVNTMTLFTDYSRSQ--LLVLFGYFNANPAK | 301 |
| | | + E + P++ G AI + ID TF M + SQ L +L Y K | |
| Sbjct: | 241 | MFFELFSYAAPYVFVGLAIPLYNYIDTNTFNKAMIEAGHQAISQDMLAILTLYVQ----K | 296 |
| Query: | 302 | ITMVLIAVAASIGGVGIALLTENYVKKDMKAAARLIINNIEMLVMFLLPALTGAIILARP | 361 |
| | | + M+ +++A + G I +TE++ + K + I ++ ++ ++PA+ G +L+ P | |
| Sbjct: | 297 | LVMIPVSLATAFGLTLIPTITESFTSGNYKLLNQQINQTMQTILFLIIPAVVGISLLSGP | 356 |
| Query: | 362 | LYSVFYGASE---ERAIHLFVAVLFQTLLLALYTLFSPMLQALFENRKAIYYFAYGILIK | 418 |
| | | Y+ FYG+ E ++ + +L +L+T+ + +LQ + + + A+ G++IK | |
| Sbjct: | 357 | TYTFFYGSESLHPELGANILLWYSPVAILFSLFTVNAAILQGINKQKFAVVSLVIGVVIK | 416 |
| Query: | 419 | LVLQIPLIYLLHAYGPLLATTIALVVPIYLMYRRLYQVTHFNRKLLQKRLLLTLIETLLM | 478 |
| | | LVL +PLI L+ A G +LAT + + + + + + ++ K+L KR +L L+ + +M | |
| Sbjct: | 417 | LVLNVPLIKLMQADGAILATALGYIASLLYGFIMIKRHAGYSYKILVKRTVLMLVLSAIM | 476 |
| Query: | 479 | GLVVFVANWLLGYAFK-PTGRLTSLLYLLIIGGLGMTVYTALTLLTHQLDKLIGSK | 533 |
| | | G+ V + W+LG+ G++ + + ++I +G VY L K++G + | |
| Sbjct: | 477 | GIAVKIVQWVLGFFISYQDGQMQAAIVVVIAAAVGGAVYLYCGYRLGFLQKILGRR | 532 |

[6591] An alignment of the GAS and GBS proteins is shown below.

| dentities = 320/541 (59%), Positives = 431/541 (79%) | | | |
|---|---|---|---|
| IQuery: | 12 | MSQKTTKVSQQEQMVKGTAWLTAGNFISRLLGAIYIIPWYAWMGKHAAEANALFGMGYEI | 71 |
| | | MS + +++Q+E MV+G AW TAGNFISRLLG +YIIPWY WMG++A +ANALF MGY + | |
| Sbjct: | 1 | MSTEKKQLTQEELMVQGAAWSTAGNFISRLLGVLYIIPWYIWMGQYAIQANALFNMGYNV | 60 |
| Query: | 72 | YALFLLISTVGIPVAVAKQVSKYNTLGKEEMSIYLVRKILQFMLILGGIFALIMYIGSPL | 131 |
| | | YA FLLIST G+ VA+AKQV+KYN++G+ E S L+R L+ ML LG IF+ IMY+GSPL | |
| Sbjct: | 61 | YAYFLLISTTGLNVAIAKQVAKYNSMGQTEHSYQLIRSTLKLMLGLGLIFSAIMYLGSPL | 120 |
| Query: | 132 | FASLSKGGQELVPILRSLTLAVLVFPSMSVLRGFFQGFNNLKPYAISQVAEQIIRVIWML | 191 |
| | | FASLS G LVPI+ SL+LAV +FP MSV+RG FQG NN+KPYA+SQ+AEQ+IRVIWML | |
| Sbjct: | 121 | FASLSGGDDTLVPIMHSLSLAVFIFPVMSVIRGIFQGHNNIKPYAVSQIAEQLIRVIWML | 180 |
| Query: | 192 | LTAFYIMRLGSGDYIAAVTQSTFAAFVGMFASIAVLLYFLWRYNMLSALIGKTPKHIKLD | 251 |
| | | LT F+IM+LGSGDY +AVTQSTFAAF+GM AS+ VL Y+LW+ +L+A+ K + +D | |
| Sbjct: | 181 | LTTFFIMKLGSGDYASAVTQSTFAAFIGMVASMGVLGYYLWKQGLLAAIFSKPDHTVSID | 240 |
| Query: | 252 | TKEILIETIKEAIPFIITGAAIQIFKLIDQFSFGNTMALFTNYSSEELRVMFAYFSSNPG | 311 |
| | | K +L+ET+KE+IPFI+TG+AIQ F+LIDQ++F NTM LFT+YS +L V+F YF++NP | |
| Sbjct: | 241 | IKGLLLETLKESIPFIVTGSAIQAFQLIDQWTFVNTMTLFTDYSRSQLLVLFGYFNANPA | 300 |
| Query: | 312 | KVTMILIAVATAIAGVGIPLLTENFVKNDKKAAARLVVNNLQMLLMFLLPAVAGSVILAK | 371 |
| | | K+TM+LIAVA +I GVGI LLTEN+VK D KAAARL++NN++ML+MFLLPA+ G++ILA+ | |
| Sbjct: | 301 | KITMVLIAVAASIGGVGIALLTENYVKKDMKAAARLIINNIEMLVMFLLPALTGAIILAR | 360 |
| Query: | 372 | PLYTVFYGLPQGQALGLFVISLIQTIILSIYTVLAPMLQALFENRKAIIYFLYGLVAKVI | 431 |
| | | PLY+VFYG + +A+ LFV L QT++L++YT+ +PMLQALFENRKAI YF YG++ K++ | |
| Sbjct: | 361 | PLYSVFYGASEERAIHLFVAVLFQTLLLALYTLFSPMLQALFENRKAIYYFAYGILIKLV | 420 |
| Query: | 432 | LQLPSIFLFHAYGPLFSTTVALCIPVILMYLKIHEITGFKRQAIRRTSALVLILTLLMSF | 491 |
| | | LQ+P I+L HAYGPL +TT+AL +P+ LMY +++++T F R+ +++ L LI TLLM | |
| Sbjct: | 421 | LQIPLIYLLHAYGPLLATTIALVVPIYLMYRRLYQVTHFNRKLLQKRLLLTLIETLLMGL | 480 |
| Query: | 492 | IISMIIWLMNLVIVPDSRLVSLVYIIVIGAIGLGVYGFMALATHLLDKMIGSRAQDLRRKL | 552 |
| | | ++ + WL+ P RL SL+Y+++IG +G+ VY + L TH LDK+IGS+A LR+KL | |
| Sbjct: | 481 | VVFVANWLLGYAFKPTGRLTSLLYLLIIGGLGMTVYTALTLLTHQLDKLIGSKASRLRQKL | 541 |

[6592] Based on this analysis, it was predicted that these proteins and their epitopes could be useful antigens for vaccines or diagnostics.

### EXAMPLE 1183

[6593] A DNA sequence (GBSx1259) was identified in S. agalactiae <SEQ ID 3683> which encodes the amino acid sequence <SEQ ID 3684>. Analysis of this protein sequence reveals the following:

```
Possible site: 40
>>> Seems to have no N-terminal signal sequence
----- Final Results -----
                            bacterial cytoplasm --- Certainty = 0.4104(Affirmative) < succ>
                              bacterial membrane --- Certainty = 0.0000(Not Clear) < succ>
                                bacterial outside --- Certainty = 0.0000(Not Clear) < succ>
```

[6594] The protein has homology with the following sequences in the GENPEPT database.

| >GP: BAB06290 GB: AP001515 UDP-N-acetylmuramoylalanyl-D-glutamyl-2, | | | |
|---|---|---|---|
| 6-diaminopimelate ligase [Bacillus halodurans] | | | |
| Identities = 153/468 (32%), Positives = 237/468 (49%), Gaps = 23/468 (4%) | | | |
| Query: | 33 | NVTFNALSYDSRQISSDTLFFA-KGATFK-KEYLDSAITAGLSFYVSETDYGADIPVILV | 90 |
| | | N +++ DSR++ LFF KG T +Y A++ G VSE +PV++V | |
| Sbjct: | 21 | NPDIHSIHMDSREVVEGGLFFCIKGYTVDGHDYAQQAVSNGAVAVVSERPLELSVPVVVV | 80 |
| Query: | 91 | NDIKKAMSLISMSFYNNPQNKLKLLAFTGTKGKTTAAYFAYHMLKVNHR-PAMLSTMNTT | 149 |
| | | D ++AM+ ++ FY P N L+L+ TGT GKTT + +++ + ++ TM T | |
| Sbjct: | 81 | RDSRRAMAQVATKFYGEPTNDLQLIGVTGTNGKTTITHLIEKIMQDQGKMTGLIGTMYTK | 140 |
| Query: | 150 | LDGKSFFKSHLTTPESLDLFRMMATAVENQMTHLIMEVSSQAYLTKRVYGLTFDVGVFLN | 209 |
| | | + G ++ TTPESL L R A ++ +T +MEVSS A + RV G FDV VF N | |
| Sbjct: | 141 | I-GHELKETKNTTPESLVLQRTFADMKKSGVTTAMMEVSSHALQSGRVRGCDFDVAVFSN | 199 |
| Query: | 210 | ISPDHIGPIEHPTFEDYFFHKRLLME------NSNAVVVN----SQMDHFNIVKEQVEYI | 259 |
| | | ++PDH+ H T E Y F K LL V+N + D + QV | |
| Sbjct: | 200 | LTPDHLD--YHGTMERYKFAKGLLFAQLGNTYQGKVAVLNADDPASADFAEMTIAQVVTY | 257 |
| Query: | 260 | PHDFYGDY-SENVITESKAFSFHVKGKLEN-TYDIKLIGKFNQENAIAAGLACLRLGVSI | 317 |
| | | + D+ +ENV S +F + E I LIGKF+ N +AA A GV + | |
| Sbjct: | 258 | GIENEADFQAENVRITSTGTTFELAAFEERMELSIHLIGKFSVYNVLAAAAAAYVSGVPL | 317 |
| Query: | 318 | EDIKNGIAQTT-VPGRMEVLTQTNGAKIFVDYAHNGDSLKKLLAVVEEHQKGDIILVLGA | 376 |
| | | ++IK + + V GR E + + VDYAH DSL+ +L V E KGD+ +V+G | |
| Sbjct: | 318 | QEIKKSLEEVKGVAGRFETVKHDQPFTVIVDYAHTPDSLENVLKTVGELAKGDVRVVVGC | 377 |
| Query: | 377 | PGNKGQSRRKDFGDVINQHPNLQVILTADDPNFEDPLVISQEIASHINRPVTIII-DREE | 435 |
| | | G++ +++R ++ N Q I T+D+P E+P+ I +++ ++I DR+E | |
| Sbjct: | 378 | GGDRDKTKRPVMAEIATTFAN-QAIFTSDNPRSEEPMDILRDMEQGAKGDSYLMIEDRKE | 436 |
| Query: | 436 | AIANASTLTNCKLDAIIIAGKGADAYQIIKGNRDNYSGDLEVAKKYLK | 483 |
| | | AI A L + D I+IAGKG + YQ + ++ D VA++ +K | |
| Sbjct: | 437 | AIFKAIELAK-EDDIIVIAGKGHETYQQFRDRTIDFD-DRIVAQQAIK | 482 |

[6595] A related DNA sequence was identified in S. pyogenes <SEQ ID 3685> which encodes the amino acid sequence <SEQ ID 3686>. Analysis of this protein sequence reveals the following:

```
Possible site: 59
>>> Seems to have no N-terminal signal sequence
----- Final Results -----
                            bacterial cytoplasm --- Certainty = 0.4717(Affirmative) < succ>
                              bacterial membrane --- Certainty = 0.0000(Not Clear) < succ>
                                bacterial outside --- Certainty = 0.0000(Not Clear) < succ>
```

[6596] An alignment of the GAS and GBS proteins is shown below.

| Identities = 350/482 (72%), Positives = 399/482 (82%), Gaps = 1/482 (0%) | | | |
|---|---|---|---|
| Query: | 1 | MITIDKILEILKNDHNFREILFHEHYYYNWTQNVTFNALSYDSRQISSDTLFFAKGATFK | 60 |
| | | MITI+++L+ILK DHNFRE+L + Y+Y++ Q +F LSYDSRQ+ TLFFAKGATFK | |
| Sbjct: | 1 | MITIEQLLDILKKDHNFREVLDADGYHYHY-QGFSFERLSYDSRQVDGKTLFFAKGATFK | 59 |
| Query: | 61 | KEYLDSAITAGLSFYVSETDYGADIPVILVNDIKKAMSLISMSFYNNPQNKLKLLAFTGT | 120 |
| | | +YL AIT GL Y+SE DY IPV+LV DIKKAMSLI+M+FY NPQ KLKLLAFTGT | |
| Sbjct: | 60 | ADYLKEAITNGLQLYISEVDYELGIPVVLVTDIKKAMSLIAMAFYGNPQEKLKLLAFTGT | 119 |
| Query: | 121 | KGKTTAAYFAYHMLKVNHRPAMLSTMNTTLDGKSFFKSHLTTPESLDLFRMMATAVENQM | 180 |
| | | KGKTTAAYFAYHMLK +++PAM STMNTTLDGK+FFKS LTTPESLDLF MMA V N M | |
| Sbjct: | 120 | KGKTTAAYFAYHMLKESYKPAMFSTMNTTLDGKTFFKSQLTTPESLDLFAMMAECVTNGM | 179 |
| Query: | 181 | THLIMEVSSQAYLTKRVYGLTFDVGVFLNISPDHIGPIEHPTFEDYFFHKRLLMENSNAV | 240 |
| | | THLIMEVSSQAYL RVYGLTFDVGVFLNISPDHIGPIEHPTFEDYF+HKRLLMENS AV | |
| Sbjct: | 180 | THLIMEVSSQAYLVDRVYGLTFDVGVFLNISPDHIGPIEHPTFEDYFYHKRLLMENSRAV | 239 |
| Query: | 241 | VVNSQMDHFNIVKEQVEYIPHDFYGDYSENVITESKAFSFHVKGKLENTYDIKLIGKFNQ | 300 |
| | | V+NS MDHF+ + +QV H FYG S+N IT S+AFSF KG+L YDI+LIG FNQ | |
| Sbjct: | 240 | VINSGMDHFSFLADQVADQEHVFYGPLSDNQITTSQAFSFEAKGQLAGHYDIQLIGHFNQ | 299 |
| Query: | 301 | ENAIAAGLACLRLGVSIEDIKNGIAQTTVPGRMEVLTQTNGAKIFVDYAHNGDSLKKLLA | 360 |
| | | ENA+AAGLACLRLG S+ DI+ GIA+T VPGRMEVLT TN AK+FVDYAHNGDSL+KLL+ | |
| Sbjct: | 300 | ENAMAAGLACLRLGASLADIQKGIAKTRVPGRMEVLTMTNHAKVFVDYAHNGDSLEKLLS | 359 |
| Query: | 361 | VVEEHQKGDIILVLGAPGNKGQSRRKDFGDVINQHPNLQVILTADDPNFEDPLVISQEIA | 420 |
| | | VVEEHQ G ++L+LGAPGNKG+SRR DFG VI+QHPNL VILTADDPNFEDP IS+EIA | |
| Sbjct: | 360 | VVEEHQTGKLMLILGAPGNKGESRRADFGRVIHQHPNLTVILTADDPNFEDPEDISKEIA | 419 |
| Query: | 421 | SHINRPVTIIIDREEAIANASTLTNCKLDAIIIAGKGADAYQIIKGNRDNYSGDLEVAKKYL | 482 |
| | | SHI RPV II DRE+AI A +L DA+IIAGKGADAYQI+KG + Y+GDL +AK YL | |
| Sbjct: | 420 | SHIARPVEIISDREQAIQKAMSLCQGAKDAVIIAGKGADAYQIVKGQQVAYAGDLAIAKHYL | 481 |

[6597] Based on this analysis, it was predicted that these proteins and their epitopes could be useful antigens for vaccines or diagnostics.

### EXAMPLE 1184

[6598] A DNA sequence (GBSx1260) was identified in S. agalactiae <SEQ ID 3687> which encodes the amino acid sequence <SEQ ID 3688>. Analysis of this protein sequence reveals the following:

```
Possible site: 29
>>> Seems to have no N-terminal signal sequence
----- Final Results -----
                            bacterial cytoplasm --- Certainty = 0.1421(Affirmative) < succ>
                              bacterial membrane --- Certainty = 0.0000(Not Clear) < succ>
                                bacterial outside --- Certainty = 0.0000(Not Clear) < succ>
```

[6599] The protein has no significant homology with any sequences in the GENPEPT database.

[6600] No corresponding DNA sequence was identified in S. pyogenes.

[6601] Based on this analysis, it was predicted that this protein and its epitopes, could be useful antigens for vaccines or diagnostics.

### EXAMPLE 1185

[6602] A DNA sequence (GBSx1261) was identified in S. agalactiae <SEQ ID 3689> which encodes the amino acid sequence <SEQ ID 3690>. This protein is predicted to be FhuA (fepC). Analysis of this protein sequence reveals the following:

```
Possible site: 54
>>> Seems to have no N-terminal signal sequence
----- Final Results -----
                            bacterial cytoplasm --- Certainty = 0.2785(Affirmative) < succ>
                              bacterial membrane --- Certainty = 0.0000(Not Clear) < succ>
                                bacterial outside --- Certainty = 0.0000(Not Clear) < succ>
```

[6603] A related GBS nucleic acid sequence <SEQ ID 9975> which encodes amino acid sequence <SEQ ID 9976> was also identified.

[6604] The protein has homology with the following sequences in the GENPEPT database.

| >GP: AAF98153 GB: AF251216 FhuC [Staphylococcus aureus] | | | |
|---|---|---|---|
| Identities = 141/259 (54%), Positives = 193/259 (74%) | | | |
| Query: | 7 | MSHIKAENIIVSYDQKEIINNLSLSILNQKITTIIGANGCGKSTLLKALTRIHKIKDGTI | 66 |
| | | M+ + + + + Y IIN L + I + K+T+IIG NGCGKSTLLKAL+R+ +K+G + | |
| Sbjct: | 1 | MNRLHGQQVKIGYGDNTIINKLDVEIPDGKVTSIIGPNGCGKSTLLKALSRLLAVKEGEV | 60 |
| Query: | 67 | TIDGHDIAHLPTKEIAKKIALLPQVLEATEGITVYELISYGRFPHQKYLGNLTNDDRSKI | 126 |
| | | +DG +I TKEIAKKIA+LPQ E +G+TV EL+SYGRFPHQK G LT +D+ +I | |
| Sbjct: | 61 | FLDGENIHTQSTKEIAKKIAILPQSPEVADGLTVGELVSYGRFPHQKGFGRLTAEDKKEI | 120 |
| Query: | 127 | HWAMEMTNVAQFANRDVDDLSGGQRQKVWIAMALAQDTDTIFLDEPTTYLDMNHQLEVLE | 186 |
| | | WAME+T F +R ++DLSGGQRQ+VWIAMALAQ TD IFLDEPTTYLD+ HQLE+LE | |
| Sbjct: | 121 | DWAMEVTGTDTFRHRSINDLSGGQRQRVWIAMALAQRTDIIFLDEPTTYLDICHQLEILE | 180 |
| Query: | 187 | LLKKLNDETQKTIIMVLHDLNLSARYSDYLVAMKTGKIIYEGSPSQIMTKDIIKDIFKID | 246 |
| | | L++KLN E TI+MVLHD+N +R+SD+L+AMK G II GS ++T++I++ +F ID | |
| Sbjct: | 181 | LVQKLNQEQGCTIVMVLHDINQAIRFSDHLIAMKEGDIIATGSTEDVLTQEILEKVFNID | 240 |
| Query: | 247 | AHIIQDPISKQPVLLSYQL | 265 |
| | | + +DP + +P+L++Y L | |
| Sbjct: | 241 | VVLSKDPKTGKPLLVTYDL | 259 |

[6605] A related DNA sequence was identified in S. pyogenes <SEQ ID 1929> which encodes the amino acid sequence <SEQ ID 1930>. Analysis of this protein sequence reveals the following:

```
Possible site: 48
>>> Seems to have no N-terminal signal sequence
----- Final Results -----
                            bacterial cytoplasm --- Certainty = 0.2970(Affirmative) < succ>
                              bacterial membrane --- Certainty = 0.0000(Not Clear) < succ>
                                bacterial outside --- Certainty = 0.0000(Not Clear) < succ>
```

[6606] An alignment of the GAS and GBS proteins is shown below.

| Identities = 166/259 (64%), Positives = 208/259 (80%) | | | |
|---|---|---|---|
| Query: | 7 | MSHIKAENIIVSYDQKEIINNLSLSILNQKITTIIGANGCGKSTLLKALTRIHKIKDGTI | 66 |
| | | M+ I AE++ ++Y+Q+ II+ LS I KITTIIGANGCGKS+LLKALTR+ K G + | |
| Sbjct: | 1 | MTTISAEDLTIAYEQRTIIDKLSFYIPEGKITTIIGANGCGKSSLLKALTRLLPPKQGVV | 60 |
| Query: | 67 | TIDGHDIAHLPTKEIAKKIALLPQVLEATEGITVYELISYGRFPHQKYLGNLTNDDRSKI | 126 |
| | | ++G +IA L TKE+AKK+ALLPQV EAT GITVYEL+SYGRFPHQ Y GNL+ D+ I | |
| Sbjct: | 61 | YLNGQNIATLETKEVAKKLALLPQVQEATNGITVYELVSYGRFPHQSYFGNLSPADKKAI | 120 |
| Query: | 127 | HWAMEMTNVAQFANRDVDDLSGGQRQKVWIAMALAQDTDTIFLDEPTTYLDMNHQLEVLE | 186 |
| | | HWAM+ TNV +A++ VD LSGGQRQ+VW+AMALAQ TDTIFLDEPTTYLD+NHQLE+LE | |
| Sbjct: | 121 | HWAMQATNVMAYADQPVDALSGGQRQRVWLAMALAQGTDTIFLDEPTTYLDLNHQLEILE | 180 |
| Query: | 187 | LLKKLNDETQKTIIMVLHDLNLSARYSDYLVAMKTGKIIYEGSPSQIMTKDIIKDIFKID | 246 |
| | | L+K LN + KTI+MVLHDLNLSARYSD+L+AMK GKI Y G+ + +MT II+DIF+I | |
| Sbjct: | 181 | LVKSLNKDAGKTIVMVLHDLNLSARYSDHLIAMKHGKIHYTGTIADVMTSPIIQDIFQIK | 240 |
| Query: | 247 | AHIIQDPISKQPVLLSYQL | 265 |
| | | ++ DPI P++L+YQL | |
| Sbjct: | 241 | PVLVDDPIHNCPIVLTYQL | 259 |

[6607] Based on this analysis, it was predicted that these proteins and their epitopes could be useful antigens for vaccines or diagnostics.

### EXAMPLE 1186

[6608] A DNA sequence (GBSx1262) was identified in S. agalactiae <SEQ ID 3691> which encodes the amino acid sequence <SEQ ID 3692>. This protein is predicted to be ferrichrome ABC transporter. Analysis of this protein sequence reveals the following:

```
Possible site: 20
>>> Seems to have a cleavable N-term signal seq.
----- Final Results -----
                                bacterial outside --- Certainty = 0.3000(Affirmative) < succ>
                              bacterial membrane --- Certainty = 0.0000(Not Clear) < succ>
                            bacterial cytoplasm --- Certainty = 0.0000(Not Clear) < succ>
```

[6609] The protein has homology with the following sequences in the GENPEPT database.

| >GP: BAB07609 GB: AP001520 ferrichrome ABC transporter | | | |
|---|---|---|---|
| (ferrichrome-binding protein) [Bacillus halodurans] | | | |
| Identities = 94/301 (31%), Positives = 177/301 (58%), Gaps = 11/301 (3%) | | | |
| Query: | 6 | IIVLTLLTFFLV---SCGQQTKQESTKTTISK--MPKIEGFTYYGKIPENPKKVINFTYS | 60 |
| | | +++LT+L F L+ +CG T E S+ M E T ++P NP++V+ | |
| Sbjct: | 7 | LLLLTMLLFALLVVAACGSNTDAEQADELESEDGMITYESETGPIEVPANPQRVV--ALG | 64 |
| Query: | 61 | YTGYLLKLGVNVSSYSLDLEKDSPVFGKQLKEAKKLTADDTEAIAAQKPDLIMVFDQDPN | 120 |
| | | +TG +L L VNV K++P + + L++ +++ ++ E I PDLI+ + N | |
| Sbjct: | 65 | FTGNILALDVNVVGVDT-WSKNNPNYEQLLQDVTEVSEENLEQIMELDPDLIIAYSTVQN | 123 |
| Query: | 121 | INTLKKIAPTLVIKYGAQNYLDMMPALGKVFGKEKEANQWVSQWKTKTLAVKKDLHHILK | 180 |
| | | L++IAPT++ Y +YL+ +GK+ KE+EA WV +K + +++ + | |
| Sbjct: | 124 | AEQLQEIAPTVLYTYNNLDYLEQHVEIGKLLNKEEEAQAWVDDFKARAEQAGEEIKEKIG | 183 |
| Query: | 181 | PNTTFTIMDFYDKNIYLYGNNFGRGGELIYDSLGYAAPEKVKKDVFKKGWFTVSQEAIGD | 240 |
| | | + T ++++ ++ +Y++GNN+GRG E++Y ++ A PE+V++ G++ +S EA+ + | |
| Sbjct: | 184 | EDATVSVIETFEDQLYVFGNNWGRGTEILYQTMDLAMPERVEEMALADGYYALSFEALPE | 243 |
| Query: | 241 | YVGDYALVNINKTTKKAASSLKESDVWKNLPAVKKGHIIESNYDVFYFSDPLSLEAQLKSF | 30 |
| | | + GDY +++ N +A +S +E++ ++++PAV+ G + E+N FYF+DPLSLE QL+ F | |
| Sbjct: | 244 | FAGDYIILSKN---DEADNSFQETNTYQSIPAVQNGQVFEANAKEFYFNDPLSLELQLEFF | 301 |

[6610] A related DNA sequence was identified in S. pyogenes <SEQ ID 3693> which encodes the amino acid sequence <SEQ ID 3694>. Analysis of this protein sequence reveals the following:

```
Possible site: 19
>>> May be a lipoprotein
----- Final Results -----
                              bacterial membrane --- Certainty = 0.0000(Not Clear) < succ>
                                bacterial outside --- Certainty = 0.0000(Not Clear) < succ>
                            bacterial cytoplasm --- Certainty = 0.0000(Not Clear) < succ>
```

[6611] The protein has homology with the following sequences in the databases:

| >GP: BAB07609 GB: AP001520 ferrichrome ABC transporter | | | |
|---|---|---|---|
| (ferrichrome-binding protein) [Bacillus halodurans] | | | |
| Identities = 112/306 (36%), Positives = 178/306 (57%), Gaps = 3/306 (0%) | | | |
| Query: | 2 | KKLTLLLTLCLTTITLIACGNQATNHSNTASKSLSPMPQIAGVTYYGDIPKQPKRVVSLA | 61 |
| | | K L LL L + + ACG+ +S M T ++P P+RVV+L | |
| Sbjct: | 5 | KHLLLLTMLLFALLVVAACGSNTDAEQADELESEDGMITYESETGPIEVPANPQRVVALG | 64 |
| Query: | 62 | STYTGYLKKLDMNLVGVTSYDKKNPILAKTVKKAKQVAATDLEAVTTLKPDLIVVGSTEE | 121 |
| | | +TG + LD+N+VGV ++ K NP + ++ +V+ +LE + L PDLI+ ST + | |
| Sbjct: | 65 | --FTGNILALDVNVVGVDTWSKNNPNYEQLLQDVTEVSEENLEQIMELDPDLIIAYSTVQ | 122 |
| Query: | 122 | NIKQLAEIAPVISIEYRKRDYLQVLSDFGRIFNKEDKAKKWLKDWKTKTAAYEKEVKAVT | 181 |
| | | N +QL EIAP + Y DYL+ + G++ NKE++A+ W+ D+K + +E+K | |
| Sbjct: | 123 | NAEQLQEIAPTVLYTYNNLDYLEQHVEIGKLLNKEEEAQAWVDDFKARAEQAGEEIKEKI | 182 |
| Query: | 182 | GDKATFTIMGLYEKDVYLFGKDWGRGGEIIHQAFHYDAPEKVKTEVFKQGYLSLSQEVLP | 241 |
| | | G+ AT +++ +E +Y+FG +WGRG EI++Q PE+V+ GY +LS E LP | |
| Sbjct: | 183 | GEDATVSVIETFEDQLYVFGNNWGRGTEILYQTMDLAMPERVEEMALADGYYALSFEALP | 242 |
| Query: | 242 | DYIGDYVVVAAEDDKTGSALYESKLWQSIPAVKKHHVIKVNANVFYFTDPLSLEYQLETL | 301 |
| | | ++ GDY+++ +++D+ ++ E+ +QSIPAV+ V + NA FYF DPLSLE QLE | |
| Sbjct: | 243 | EFAGDYIIL-SKNDEADNSFQETNTYQSIPAVQNGQVFEANAKEFYFNDPLSLELQLEFF | 301 |
| Query: | 302 | REAILS | 307 |
| | | +E LS | |
| Sbjct: | 302 | KEHFLS | 307 |

[6612] An alignment of the GAS and GBS proteins is shown below.

| Identities = 140/316 (44%), Positives = 212/316 (66%), Gaps = 12/316 (3%) | | | |
|---|---|---|---|
| Query: | 1 | MKKIGIIV-LTLLTFFLVSCGQQTKQESTKTT--ISKMPKIEGFTYYGKIPENPKKVINF | 57 |
| | | MKK+ +++ L L T L++CG Q S + +S MP+I G TYYG IP+ PK+V++ | |
| Sbjct: | 1 | MKKLTLLLTLCLTTITLIACGNQATNHSNTASKSLSPMPQIAGVTYYGDIPKQPKRVVSL | 60 |
| Query: | 58 | TYSYTGYLLKLGVN---VSSYSLDLEKDSPVFGKQLKEAKKLTADDTEAIAAQKPDLIMV | 114 |
| | | +YTGYL KL +N V+SY +K +P+ K +K+AK++ A D EA+ KPDLI+V | |
| Sbjct: | 61 | ASTYTGYLKKLDMNLVGVTSY----DKKNPILAKTVKKAKQVAATDLEAVTTLKPDLIVV | 116 |
| Query: | 115 | FDQDPNINTLKKIAPTLVIKYGAQNYLDMMPALGKVFGKEKEANQWVSQWKTKTLAVKKD | 174 |
| | | + NI L +IAP + I+Y ++YL ++ G++F KE +A +W+ WKTKT A +K+ | |
| Sbjct: | 117 | GSTEENIKQLAEIAPVISIEYRKRDYLQVLSDFGRIFNKEDKAKKWLKDWKTKTAAYEKE | 176 |
| Query: | 175 | LHHILKPNTTFTIMDFYDKNIYLYGNNFGRGGELIYDSLGYAAPEKVKKDVFKKGWFTVS | 234 |
| | | + + TFTIM Y+K++YL+G ++GRGGE+I+ + Y APEKVK +VFK+G+ ++S | |
| Sbjct: | 177 | VKAVTGDKATFTIMGLYEKDVYLFGKDWGRGGEIIHQAFHYDAPEKVKTEVFKQGYLSLS | 236 |
| Query: | 235 | QEAIGDYVGDYALVNINKTTKKAASSLKESDVWKNLPAVKKGHIIESNYDVFYFSDPLSL | 294 |
| | | QE + DY+GDY +V K S+L ES +W+++PAVKK H+I+ N +VFYF+DPLSL | |
| Sbjct: | 237 | QEVLPDYIGDYVVVAAE--DDKTGSALYESKLWQSIPAVKKHHVIKVNANVFYFTDPLSL | 294 |
| Query: | 295 | EAQLKSFTKAIKENTN | 310 |
| | | E QL++ +AI + N | |
| Sbjct: | 295 | EYQLETLREAILSSEN | 310 |

[6613] Based on this analysis, it was predicted that these proteins and their epitopes could be useful antigens for vaccines or diagnostics.

### EXAMPLE 1187

[6614] A DNA sequence (GBSx1263) was identified in S. agalactiae <SEQ ID 3695> which encodes the amino acid sequence <SEQ ID 3696>. Analysis of this protein sequence reveals the following:

```
Possible site: 26
>>> Seems to have no N-terminal signal sequence
----- Final Results -----
                            bacterial cytoplasm --- Certainty = 0.3431(Affirmative) < succ>
                              bacterial membrane --- Certainty = 0.0000(Not Clear) < succ>
                                bacterial outside --- Certainty = 0.0000(Not Clear) < succ>
```

[6615] The protein has no significant homology with any sequences in the GENPEPT database.

[6616] No corresponding DNA sequence was identified in S. pyogenes.

[6617] Based on this analysis, it was predicted that this protein and its epitopes, could be useful antigens for vaccines or diagnostics.

### EXAMPLE 1188

[6618] A DNA sequence (GBSx1264) was identified in S. agalactiae <SEQ ID 3697> which encodes the amino acid sequence <SEQ ID 3698>. This protein is predicted to be ferrichrome transport permease (permease). Analysis of this protein sequence reveals the following:

| Possible site: 39 | | | | |
|---|---|---|---|---|
| >>> May be a lipoprotein | | | | |
| | INTEGRAL | Likelihood = −12.74 | Transmembrane | 129-145 (123-150) |
| | INTEGRAL | Likelihood = −10.67 | Transmembrane | 248-264 (240-283) |
| | INTEGRAL | Likelihood = −10.14 | Transmembrane | 205-221 (196-228) |
| | INTEGRAL | Likelihood = −5.95 | Transmembrane | 319-335 (317-336) |
| | INTEGRAL | Likelihood = −3.56 | Transmembrane | 73-89 (73-90) |
| | INTEGRAL | Likelihood = −3.19 | Transmembrane | 288-304 (288-304) |
| | INTEGRAL | Likelihood = −2.76 | Transmembrane | 266-282 (265-283) |
| | INTEGRAL | Likelihood = −2.23 | Transmembrane | 103-119 (101-122) |
| | INTEGRAL | Likelihood = −1.01 | Transmembrane | 158-174 (158-174) |

```
----- Final Results -----
                              bacterial membrane --- Certainty = 0.6095(Affirmative) < succ>
                                bacterial outside --- Certainty = 0.0000(Not Clear) < succ>
                            bacterial cytoplasm --- Certainty = 0.0000(Not Clear) < succ>
```

[6619] The protein has homology with the following sequences in the GENPEPT database.

| >GP: AAF98154 GB: AF251216 FhuB [Staphylococcus aureus] | | | |
|---|---|---|---|
| Identities = 116/313 (37%), Positives = 194/313 (61%), Gaps = 3/313 (0%) | | | |
| Query: | 26 | ILFLIGCYASLRFGAINFKTSDLITVLKNPLKNSNAQDVIFDIRLPRIIAAILVGAAMSQ | 85 |
| | | ++ LI + S G + S +I + N ++ Q++I +IR+PR IAA++VG A++ | |
| Sbjct: | 28 | MILLITLFISTLIGDAKIQASTIIEAIFNYNPSNQQQNIINEIRIPRNIAAVIVGMALAV | 87 |
| Query: | 86 | AGAIMQGVTRNAIADPGLLGINAGAGLALVVAYAFLGSMHYSTILIVCLLGSVISCLLVF | 145 |
| | | +GAI+QGVTRN +ADP L+G+N+GA AL + YA L + + ++ LG+++ +V | |
| Sbjct: | 88 | SGAIIQGVTRNGLADPALIGLNSGASFALALTYAVLPNTSFLILMFAGFLGAILGGAIVL | 147 |
| Query: | 146 | TLSYTKQKGYHQLRLILAGAMISTLFTSVGQVVTLYFKLNRTVIGWQAGGLSQINWKMLI | 205 |
| | | + +++ G++ +R+ILAGA +S + T++ Q + L F+LN+TV W AGG+S W L | |
| Sbjct: | 148 | MIGRSRRDGFNPMRIILAGAAVSAMLTALSQGIALAFRLNQTVTFWTAGGVSGTTWSHLK | 207 |
| Query: | 206 | IIAPIIILGLLISQLLAHQLTILSLNESVAKALGQKTQLMTAFLLLIVLFLSASSVALIG | 265 |
| | | P+I + L I ++ QLTIL+L ES+AK LGQ ++ L+I + L+ +VA+ G | |
| Sbjct: | 208 | WAIPLIGIALFIILTISKQLTILNLGESLAKGLGQNVTMIRGICLIIAMILAGIAVAIAG | 267 |
| Query: | 266 | TVSFIGLIIPHFIKLFIPKDYRLLLPLIGFSGATFMIWVDLSSRIINPPSETSISSIISI | 325 |
| | | V+F+GL++PH + I DY +LPL G ++ D+ +R + E +IIS | |
| Sbjct: | 268 | QVAFVGLMVPHIARFLIGTDYAKILPLTALLGGILVLVADVIARYL---GEAPVGAIISF | 324 |
| Query: | 326 | VGLPCFLWLIRKG | 338 |
| | | +G+P FL+L++KG | |
| Sbjct: | 325 | IGVPYFLYLVKKG | 337 |

[6620] A related DNA sequence was identified in S. pyogenes <SEQ ID 3699> which encodes the amino acid sequence <SEQ ID 3700>. Analysis of this protein sequence reveals the following:

| Possible site: 54 | | | | |
|---|---|---|---|---|
| >>> Seems to have no N-terminal signal sequence | | | | |
| | INTEGRAL | Likelihood = −11.09 | Transmembrane | 256-272 (248-287) |
| | INTEGRAL | Likelihood = −10.67 | Transmembrane | 26-42 (23-48) |
| | INTEGRAL | Likelihood = −6.90 | Transmembrane | 137-153 (133-157) |
| | INTEGRAL | Likelihood = −5.10 | Transmembrane | 167-183 (166-187) |
| | INTEGRAL | Likelihood = −4.57 | Transmembrane | 213-229 (210-232) |
| | INTEGRAL | Likelihood = −2.02 | Transmembrane | 112-128 (110-131) |

```
----- Final Results -----
                              bacterial membrane --- Certainty = 0.5437(Affirmative) < succ>
                                bacterial outside --- Certainty = 0.0000(Not Clear) < succ>
                            bacterial cytoplasm --- Certainty = 0.0000(Not Clear) < succ>
```

[6621] The protein has homology with the following sequences in the databases:

| >GP: AAF98154 GB: AF251216 FhuB [Staphylococcus aureus] | | | |
|---|---|---|---|
| Identities = 99/274 (36%), Positives = 159/274 (57%), Gaps = 1/274 (0%) | | | |
| Query: | 34 | LSFSLCVAIYCHLRFGAVALSHQDLNSILFG-KQNGHKANVLLAIRLPRLFGATLTGSAL | 92 |
| | | LS L + ++ G + + +F + + N++ IR+PR A + G AL | |
| Sbjct: | 26 | LSMILLITLFISTLIGDAKIQASTIIEAIFNYNPSNQQQNIINEIRIPRNIAAVIVGMAL | 85 |
| Query: | 93 | AVSGTIMQAITRNPIAEPGLLGINAGAGLALVLAYAFVPHLHYSLIILLSLLGSSLAATL | 152 |
| | | AVSG I+Q +TRN +A+P L+G+N+GA AL L YA +P+ + +++ LG+ L + | |
| Sbjct: | 86 | AVSGAIIQGVTRNGLADPALIGLNSGASFALALTYAVLPNTSFLILMFAGFLGAILGGAI | 145 |
| Query: | 153 | VFGLSYQSGKGYHQLRLVLAGAMVSILLSALGQGITNYYHLANAVIGWQAGGLVGVNWQM | 212 |
| | | V + G++ +R++LAGA VS +L+AL QGI + L V W AGG+ G W | |
| Sbjct: | 146 | VLMIGRSRRDGFNPMRIILAGAAVSAMLTALSQGIALAFRLNQTVTFWTAGGVSGTTWSH | 205 |
| Query: | 213 | IGYIAPLIILSLCLAQLLSYHLTVLSLSESQAKALGQKTNLISAVFMILVLILSSAAVAI | 272 |
| | | + + PLI ++L + +S LT+L+L ES AK LGQ +I + +I+ +IL+ AVAI | |
| Sbjct: | 206 | LKWAIPLIGIALFIILTISKQLTILNLGESLAKGLGQNVTMIRGICLIIAMILAGIAVAI | 265 |
| Query: | 273 | AGSISFIGLVIPHLMKHFTPHHYRYLLPLCAVSG | 306 |
| | | AG ++F+GL++PH+ + Y +LPL A+ G | |
| Sbjct: | 266 | AGQVAFVGLMVPHIARFLIGTDYAKILPLTALLG | 299 |

[6622] An alignment of the GAS and GBS proteins is shown below.

| Identities = 158/295 (53%), Positives = 214/295 (71%), Gaps 1/295 (0%) | | | |
|---|---|---|---|
| Query: | 6 | KKLVQKNKSNHFWLVFFITLILFLIGCYASLRFGAINFKTSDLITVLKNPLKNSNAQDVI | 65 |
| | | KK KS+ FWLVF + + Y LRFGA+ DL ++L +N + +V+ | |
| Sbjct: | 16 | KKTQIITKSHIFWLVFVLLSFSLCVAIYCHLRFGAVALSHQDLNSILFGK-QNGHKANVL | 74 |
| Query: | 66 | FDIRLPRIIAAILVGAAMSQAGAIMQGVTRNAIADPGLLGINAGAGLALVVAYAFLGSMH | 125 |
| | | IRLPR+ A L G+A++ +G IMQ +TRN IA+PGLLGINAGAGLALV+AYAF+ +H | |
| Sbjct: | 75 | LAIRLPRLFGATLTGSALAVSGTIMQAITRNPIAEPGLLGINAGAGLALVLAYAFVPHLH | 134 |
| Query: | 126 | YSTILIVCLLGSVISCLLVFTLSYTKQKGYHQLRLILAGAMISTLFTSVGQVVTLYFKLN | 185 |
| | | YS I+++ LLGS ++ LVF LSY KGYHQLRL+LAGAM+S L +++GQ +T Y+ L | |
| Sbjct: | 135 | YSLIILLSLLGSSLAATLVFGLSYQSGKGYHQLRLVLAGAMVSILLSALGQGITNYYHLA | 194 |
| Query: | 186 | RTVIGWQAGGLSQINWKMLIIIAPIIILGLLISQLLAHQLTILSLNESVAKALGQKTQLM | 245 |
| | | VIGWQAGGL +NW+M+ IAP+IIL L ++QLL++ LT+LSL+ES AKALGQKT L+ | |
| Sbjct: | 195 | NAVIGWQAGGLVGVNWQMIGYIAPLIILSLCLAQLLSYHLTVLSLSESQAKALGQKTNLI | 254 |
| Query: | 246 | TAFLLLIVLFLSASSVALIGTVSFIGLIIPHFIKLFIPKDYRLLLPLIGFSGATF | 300 |
| | | +A +++VL LS+++VA+ G++SFIGL+IPH +K F P YR LLPL SGA+F | |
| Sbjct: | 255 | SAVFMILVLILSSAAVAIAGSISFIGLVIPHLMKHFTPHHYRYLLPLCAVSGASF | 309 |

[6623] Based on this analysis, it was predicted that these proteins and their epitopes could be useful antigens for vaccines or diagnostics.

### EXAMPLE 1189

[6624] A DNA sequence (GBSx1265) was identified in S. agalactiae <SEQ ID 3701> which encodes the amino acid sequence <SEQ ID 3702>. Analysis of this protein sequence reveals the following:

```
Possible site: 13
>>> Seems to have no N-terminal signal sequence
----- Final Results -----
                            bacterial cytoplasm --- Certainty = 0.1492(Affirmative) < succ>
                              bacterial membrane --- Certainty = 0.0000(Not Clear) < succ>
                                bacterial outside --- Certainty = 0.0000(Not Clear) < succ>
```

[6625] The protein has no significant homology with any sequences in the GENPEPT database.

[6626] No corresponding DNA sequence was identified in S. pyogenes.

[6627] Based on this analysis, it was predicted that this protein and its epitopes, could be useful antigens for vaccines or diagnostics.

### EXAMPLE 1190

[6628] A DNA sequence (GBSx1266) was identified in S. agalactiae <SEQ ID 3703> which encodes the amino acid sequence <SEQ ID 3704>. This protein is predicted to be ferrichrome transport permease (permease). Analysis of this protein sequence reveals the following:

| Possible site: 30 | | | | |
|---|---|---|---|---|
| >>> Seems to have a cleavable N-term signal seq. | | | | |
| | INTEGRAL | Likelihood = −10.35 | Transmembrane | 282-298 (279-309) |
| | INTEGRAL | Likelihood = −7.06 | Transmembrane | 120-136 (115-141) |
| | INTEGRAL | Likelihood = −7.01 | Transmembrane | 62-78 (61-80) |
| | INTEGRAL | Likelihood = −6.10 | Transmembrane | 250-266 (241-272) |
| | INTEGRAL | Likelihood = −5.52 | Transmembrane | 196-212 (190-215) |
| | INTEGRAL | Likelihood = −5.47 | Transmembrane | 155-171 (151-174) |
| | INTEGRAL | Likelihood = −4.99 | Transmembrane | 304-320 (303-322) |
| | INTEGRAL | Likelihood = −3.35 | Transmembrane | 91-107 (90-110) |

```
----- Final Results -----
                              bacterial membrane --- Certainty = 0.5140(Affirmative) < succ>
                                bacterial outside --- Certainty = 0.0000(Not Clear) < succ>
                            bacterial cytoplasm --- Certainty = 0.0000(Not Clear) < succ>
```

[6629] The protein has homology with the following sequences in the GENPEPT database.

| >GP: AAF98155 GB: AF251216 FhuG [Staphylococcus aureus] | | | |
|---|---|---|---|
| Identities = 122/334 (36%), Positives = 208/334 (61%), Gaps = 3/334 (0%) | | | |
| Query: | 1 | MIQKNKAPFVLISSVIILLLLILV---SISLGYANTSVIDVLKLISGKSDDAFLFIITNI | 57 |
| | | MI N LI+ + +LL L SI+ G N V K + G+ D I+ + | |
| Sbjct: | 1 | MISSNNKRRQLIALAVFSILLFLGCTWSITSGEYNIPVERFFKTLIGQGDAIDELILLDF | 60 |
| Query: | 58 | RLPRIIVCIFGGASLGIAGLLLQTLTKNPLADSGILGINAGAGLVIALTIGTFNVSNPTI | 117 |
| | | RLPR+++ I GA+L I+G ++Q++TKNP+A+ GILGINAG G IAL I ++ | |
| Sbjct: | 61 | RLPRMMITILAGAALSISGAIVQSVTKNPIAEPGILGINAGGGFAIALFIAIGKINADNF | 120 |
| Query: | 118 | LYFLPLFAMFGGLVTIFLIYLMSYRRNHNISPTRLIVTGIGISTIISGVMILIISQSNNQ | 177 |
| | | +Y LPL ++ GG+ T +I++ S+ +N ++P +++ G+G+ T + G I I+S+ +++ | |
| Sbjct: | 121 | VYVLPLISILGGITTALIIFIFSFNKNEGVTPASMVLIGVGLQTALYGGSITIMSKFDDK | 180 |
| Query: | 178 | KMDMIVEWLSGKITISSWTTIITFIPILILLWGLAYSRSRHLNIMNLNEQTALALGLHLK | 237 |
| | | + D I W +G I W +I F+P ++++ +S LNI++ + A LG+ L | |
| Sbjct: | 181 | QSDFIAAWFAGNIWGDEWPFVIAFLPWVLIIIPYLLFKSNTLNIIHTGDNIARGLGVRLS | 240 |
| Query: | 238 | KERIYTLMLTSSLAAISVVLIGNITFIGLLAGHLSRRLLGNNHKIILPSCLLIGAIILLV | 297 |
| | | +ER+ + L++ +V + G+I+FIGL+ H+++R++G H++ LP +L+GA +L++ | |
| Sbjct: | 241 | RERLILFFIAVMLSSAAVAVAGSISFIGLMGPHIAKRIVGPRHQLFLPIAILVGACLLVI | 300 |
| Query: | 298 | SDTIGRLLLVGTGIPTGLVVSIIGAPYFLWLMTK | 331 |
| | | +DTIG+++L G+P G+VV+IIGAPYFL+LM K | |
| Sbjct: | 301 | ADTIGKIVLQPGGVPAGIVVAIIGAPYFLYLMYK | 334 |

[6630] A related DNA sequence was identified in S. pyogenes <SEQ ID 1939> which encodes the amino acid sequence <SEQ ID 1940>. Analysis of this protein sequence reveals the following:

| Possible site: 37 | | | | |
|---|---|---|---|---|
| >>> Seems to have no N-terminal signal sequence | | | | |
| | INTEGRAL | Likelihood = −10.93 | Transmembrane | 254-270 (252-284) |
| | INTEGRAL | Likelihood = −10.46 | Transmembrane | 294-310 (292-320) |
| | INTEGRAL | Likelihood = −6.74 | Transmembrane | 25-41 (18-43) |
| | INTEGRAL | Likelihood = −6.26 | Transmembrane | 103-119 (102-125) |
| | INTEGRAL | Likelihood = −3.66 | Transmembrane | 164-180 (164-186) |
| | INTEGRAL | Likelihood = −3.03 | Transmembrane | 209-225 (207-226) |
| | INTEGRAL | Likelihood = −2.71 | Transmembrane | 74-90 (74-91) |
| | INTEGRAL | Likelihood = −2.13 | Transmembrane | 326-342 (325-343) |
| | INTEGRAL | Likelihood = −1.97 | Transmembrane | 135-151 (135-151) |

```
----- Final Results -----
                              bacterial membrane --- Certainty = 0.5373(Affirmative) < succ>
                                bacterial outside --- Certainty = 0.0000(Not Clear) < succ>
                            bacterial cytoplasm --- Certainty = 0.0000(Not Clear) < succ>
```

[6631] An alignment of the GAS and GBS proteins is shown below.

| Identities = 153/322 (47%), Positives = 229/322 (70%), Gaps = 1/322 (0%) | | | |
|---|---|---|---|
| Query: | 11 | LISSVIILLLLIL-VSISLGYANTSVIDVLKLISGKSDDAFLFIITNIRLPRIIVCIFGG | 69 |
| | | L +S+I+LL+ ++ +++SLG ++ S +D++ + GKS A FI+ NIRLPRI+ GG | |
| Sbjct: | 22 | LYTSLILLLVSLMGLALSLGESHLSFLDLVHVFLGKSSHAISFIVINIRLPRILAACLGG | 81 |
| Query: | 70 | ASLGIAGLLLQTLTKNPLADSGILGINAGAGLVIALTIGTFNVSNPTILYFLPLFAMFGG | 129 |
| | | SL ++GLLLQ LT+NPLADSG+LGI GAG+ +A+ + I ++LPLFAM G | |
| Sbjct: | 82 | GSLALSGLLLQRLTRNPLADSGVLGITIGAGISLAIVVSFSFFEQAHISHYLPLFAMLGA | 141 |
| Query: | 130 | LVTIFLIYLMSYRRNHNISPTRLIVTGIGISTIISGVMILIISQSNNQKMDHIVEWLSGK | 189 |
| | | +VT F +Y +S + I PTRLI+TG+ ++T++S +M+ ++ N K+D+++ WLSG+ | |
| Sbjct: | 142 | IVTTFSVYWLSLTKQGQIDPTRLILTGVAVTTMLSSLMVALVGHINRYRVDLVINWLSGQ | 201 |
| Query: | 190 | ITISSWTTIITFIPILILLWGLAYSRSRHLNIMNLNEQTALALGLHLKKERIYTLMLTSS | 249 |
| | | + W T+ P+L+ W L YS++ LNIM L + TA+ LGL L ++R L+L + | |
| Sbjct: | 202 | LIGDDWPTLSVIAPLLLCFWLLTYSQAHFLNIMGLADNTAIGLGLPLNRKRRLILVLAAG | 261 |
| Query: | 250 | LAAISVVLIGNITFIGLLAGHLSRRLLGNNHKIILPSCLLIGAIILLVSDTIGRLLLVGT | 309 |
| | | L A+SV+L+GNI+FIGL+AGH S L+G+NHKI +P +LIG I+LLV+DT+GR+ LVG+ | |
| Sbjct: | 262 | LGALSVLLVGNISFIGLIAGHFSTYLVGSNHKITIPISILIGMILLLVADTVGRVYLVGS | 321 |
| Query: | 310 | GIPTGLVVSIIGAPYFLWLMTK | 331 |
| | | I TG++VS+IGAPYFL+LM K | |
| Sbjct: | 322 | NIQTGILVSLIGAPYFLYLMAK | 343 |

[6632] There is also homology to SEQ ID 396.

[6633] Based on this analysis, it was predicted that these proteins and their epitopes could be useful antigens for vaccines or diagnostics.

### EXAMPLE 1191

[6634] A DNA sequence (GBSx1267) was identified in S. agalactiae <SEQ ID 3705> which encodes the amino acid sequence <SEQ ID 3706>. Analysis of this protein sequence reveals the following:

```
Possible site: 44
>>> Seems to have no N-terminal signal sequence
----- Final Results -----
                            bacterial cytoplasm --- Certainty = 0.3785(Affirmative) < succ>
                              bacterial membrane --- Certainty = 0.0000(Not Clear) < succ>
                                bacterial outside --- Certainty = 0.0000(Not Clear) < succ>
```

[6635] The protein has homology with the following sequences in the GENPEPT database.

| >GP: AAC05779 GB: AF051356 unknown [Streptococcus mutans] | | | |
|---|---|---|---|
| Identities = 49/93 (52%), Positives = 63/93 (67%) | | | |
| Query: | 1 | MILTFNPGKLERQEFFKELINYLWIHDDVTLRKIKSHFTDYSKIDRLLEEYINHGYILRQ | 60 |
| | | MI +N KL RQ FF +LINYL IHDDVTLR+IK +F D ++R +E+Y+ GY+LR+ | |
| Sbjct: | 1 | MIKIYNGDKLTRQPFFIKLINYLQIHDDVTLRQIKRNFADTEHLERSIEDYVQAGYVLRE | 60 |
| Query: | 61 | NKRYSLNLPFLSSLDGLVLDDLVFIDSDSQIYQ | 93 |
| | | NK Y L +LDGL LD +F+D S IYQ | |
| Sbjct: | 61 | NKHYYNAFELLENLDGLTLDSQIFVDDQSSIYQ | 93 |

[6636] A related DNA sequence was identified in S. pyogenes <SEQ ID 3707> which encodes the amino acid sequence <SEQ ID 3708>. Analysis of this protein sequence reveals the following:

Possible site: 54
>>> Seems to have no N-terminal signal sequence
----- Final Results -----
bacterial cytoplasm --- Certainty = 0.3447 (Affirmative) < succ>
bacterial membrane --- Certainty = 0.0000 (Not Clear) < succ>
bacterial outside --- Certainty = 0.0000 (Not Clear) < succ>

[6637] An alignment of the GAS and GBS proteins is shown below.

| Identities = 108/212 (50%), Positives = 143/212 (66%) | | | |
|---|---|---|---|
| Query: | 1 | MILTFNPGKLERQEFFKELINYLWIHDDVTLRKIKSHFTDYSKIDRLLEEYINHGYILRQ | 60 |
| | | MI F+ KL RQ FF++LINYL HD V LR+IK F + + ID+ +E Y+ GYI R+ | |
| Sbjct: | 1 | MITVFHSDKLTRQPFFQDLINYLDQHDHVILREIKKAFPNVTGIDKAIESYVQAGYIRRE | 60 |
| Query: | 61 | NKRYSLNLPFLSSLDGLVLDDLVFIDSDSQIYQLLQKRKFVTNLDNPTNHLVFVEETDFE | 120 |
| | | NKRY +NLP +SS L LD ++F+D+ S +Y+ + F T L N TN ++ E+T+ | |
| Sbjct: | 61 | NKRYGINLPLVSSDQQLALDTMLFVDTCSAMYENILAVVFETQLTNQTNRVMIKEKTNIT | 120 |
| Query: | 121 | RNTLTLSNYFYKLTNGYPLSREQKKLYQLLGDVNSEYALKYMSSFILKFLRKDSVKQKRT | 180 |
| | | R+ LTL+NYFY+L G S EQ LY LLGDVN EYALKYM++F+LKF RKD V QKR | |
| Sbjct: | 121 | RDDLTLANYFYRLKRGEKPSAEQMDLYDLLGDVNQEYALKYMTTFLLKFTRKDFVMQKRP | 180 |
| Query: | 181 | VIFIQALELLGYISLNQDTTYRLNAKLDVEAL | 212 |
| | | IF++AL LGY+ + TTY+L LD E+L | |
| Sbjct: | 181 | DIFVEALVTLGYLKQVEPTTYQLLMTLDKESL | 212 |

[6638] Based on this analysis, it was predicted that these proteins and their epitopes could be useful antigens for vaccines or diagnostics.

### EXAMPLE 1192

[6639] A DNA sequence (GBSx1268) was identified in S. agalactiae <SEQ ID 3709> which encodes the amino acid sequence <SEQ ID 3710>. Analysis of this protein sequence reveals the following:

Possible site: 24
>>> Seems to have no N-terminal signal sequence
----- Final Results -----
bacterial cytoplasm --- Certainty = 0.0824 (Affirmative) < succ>
bacterial membrane --- Certainty = 0.0000 (Not Clear) < succ>
bacterial outside --- Certainty = 0.0000 (Not Clear) < succ>

[6640] The protein has homology with the following sequences in the GENPEPT database.

| >GP: AAB39104 GB: U57759 intrageneric coaggregation-relevant adhesin | | | |
|---|---|---|---|
| [Streptococcus gordonii] | | | |
| Identities = 261/311 (83%), Positives = 283/311 (90%) | | | |
| Query: | 1 | MSKILVFGHQNPDSDAIGSSVAFAYLAKEAWGLDTEAVALGTPNEETAYVLDYFGVQAPR | 60 |
| | | MSKILVFGHQNPDSDAIGSS AFAYLA+EA+GLDTEAVALG PNEETA+VLDYFGV APR | |
| Sbjct: | 1 | MSKILVFGHQNPDSDAIGSSYAFAYLAREAYGLDTEAVALGEPNEETAFVLDYFGVAAPR | 60 |
| Query: | 61 | VVESAKAEGVETVILTDHNEFQQSISDIKDVTVYGVVDHHRVANFETANPLYMRLEPVGS | 120 |
| | | V+ SAKAEG E VILTDHNEFQQS++DI +V VYGVVDHHRVANFETANPLYMRLEPVGS | |
| Sbjct: | 61 | VITSAKAEGAEQVILTDHNEFQQSVADIAEVEVYGVVDHHRVANFETANPLYMRLEPVGS | 120 |
| Query: | 121 | ASSIVYRMFKENGVSVPKELAGLLLSGLISDTLLLKSPTTHASDIPVAKELAELAGVNLE | 180 |
| | | ASSIVYRMFKE+ V+V KE+AGL+LSGLISDTLLLKSPTTH +D +A ELAELAGVNLE | |
| Sbjct: | 121 | ASSIVYRMFKEHSVAVSKEIAGLMLSGLISDTLLLKSPTTHPTDKAIAPELAELAGVNLE | 180 |
| Query: | 181 | EYGLEMLKAGTNLSSKTAAELIDIDAKTFELNGEAVRVAQVNTVDINDILARQEEIEVAI | 240 |
| | | EYGL MLKAGTNL+SK+A ELIDIDAKTFELNG VRVAQVNTVDI ++L RQ EIE AI | |
| Sbjct: | 181 | EYGLAMLKAGTNLASKSAEELIDIDAKTFELNGNNVRVAQVNTVDIAEVLERQAEIEAAI | 240 |
| Query: | 241 | QEAIVTEGYSDFVLMITDIVNSNSEILALGSNMAKVEAAFEFTLENNHAFLAGAVSRKKQ | 300 |
| | | ++AI GYSDFVLMITDI+NSNSEILA+GSNM KVEAAF F LENNHAFLAGAVSRKKQ | |
| Sbjct: | 241 | EKAIADNGYSDFVLMITDIINSNSEILAIGSNMDKVEAAFNFVLENNHAFLAGAVSRKKQ | 300 |
| Query: | 301 | VVPQLTESYNA | 311 |
| | | VVPQLTES+NA | |
| Sbjct: | 301 | VVPQLTESFNA | 311 |

[6641] A related DNA sequence was identified in S. pyogenes <SEQ ID 3711> which encodes the amino acid sequence <SEQ ID 3712>. Analysis of this protein sequence reveals the following:

| Possible site: 52 | | | |
|---|---|---|---|
| >>> Seems to have no N-terminal signal sequence | | | |
| INTEGRAL | Likelihood = −2.02 | Transmembrane | 141-157 (141-157) |

----- Final Results -----
bacterial membrane --- Certainty = 0.1808 (Affirmative) < succ>
bacterial outside --- Certainty = 0.0000 (Not Clear) < succ>
bacterial cytoplasm --- Certainty = 0.0000 (Not Clear) < succ>

[6642] A related sequence was also identified in GAS <SEQ ID 9103> which encodes the amino acid sequence <SEQ ID 9104>. Analysis of this protein sequence reveals the following:

| Possible site: 50 | | | |
|---|---|---|---|
| >>> Seems to have no N-terminal signal sequence | | | |
| INTEGRAL | Likelihood = −2.02 | Transmembrane | 139-155 (139-155) |

----- Final Results -----
bacterial membrane --- Certainty = 0.181 (Affirmative) < succ>
bacterial outside --- Certainty = 0.000 (Not Clear) < succ>
bacterial cytoplasm --- Certainty = 0.000 (Not Clear) < succ>

[6643] An alignment of the GAS and GBS proteins is shown below.

| Identities = 253/311 (81%), Positives = 283/311 (90%) | | | |
|---|---|---|---|
| Query: | 1 | MSKILVFGHQNPDSDAIGSSVAFAYLAKEAWGLDTEAVALGTPNEETAYVLDYFGVQAPR | 60 |
| | | MSKILVFGHQNPD+DAI SS AF YL+++A+GLDTE VALGTPNEETA+ LDYFGV+APR | |
| Sbjct: | 3 | MSKILVFGHQNPDTDAIASSYAFDYLSQKAFGLDTEVVALGTPNEETAFALDYFGVEAPR | 62 |
| Query: | 61 | VVESAKAEGVETVILTDHNEFQQSISDIKDVTVYGVVDHHRVANFETANPLYMRLEPVGS | 120 |
| | | VVESAKA+G E VILTDHNEFQQSI+DI++V VYGVVDHHRVANFETANPLYMR+EPVGS | |
| Sbjct: | 63 | VVESAKAQGSEQVILTDHNEFQQSIADIREVEVYGVVDHHRVANFETANPLYMRVEPVGS | 122 |
| Query: | 121 | ASSIVYRMFKENGVSVPKELAGLLLSGLISDTLLLKSPTTHASDIPVAKELAELAGVNLE | 180 |
| | | ASSIVYRMFKENG+ VPK +AG+LLSGLISDTLLLKSPTTH SD VA+ELAELA VNLE | |
| Sbjct: | 123 | ASSIVYRMFKENGIEVPKAIAGMLLSGLISDTLLLKSPTTHVSDHLVAEELAELAEVNLE | 182 |
| Query: | 181 | EYGLEMLKAGTNLSSKTAAELIDIDAKTFELNGEAVRVAQVNTVDINDILARQEEIEVAI | 240 |
| | | +YG+ +LKAGTNL+SK+ ELI IDAKTFELNG AVRVAQVNTVDI ++L RQE IE AI | |
| Sbjct: | 183 | DYGMALLKAGTNLASKSEVELIGIDAKTFELNGNAVRVAQVNTVDIAEVLERQEAIEAAI | 242 |
| Query: | 241 | QEAIVTEGYSDFVLMITDIVNSNSEILALGSNMAKVEAAFEFTLENNHAFLAGAVSRKKQ | 300 |
| | | ++A+ EGYSDFVLMITDIVNSNSEILA+G+NM KVEAAF FTL+NNHAFLAGAVSRKKQ | |
| Sbjct: | 243 | KDAMAAEGYSDFVLMITDIVNSNSEILAIGANMDKVEAAFNFTLDNNHAFLAGAVSRKKQ | 302 |
| Query: | 301 | VVPQLTESYNA | 311 |
| | | VVPQLTES+ A | |
| Sbjct: | 303 | VVPQLTESFGA | 313 |

[6644] Based on this analysis, it was predicted that these proteins and their epitopes could be useful antigens for vaccines or diagnostics.

### EXAMPLE 1193

[6645] A DNA sequence (GBSx1269) was identified in S. agalactiae <SEQ ID 3713> which encodes the amino acid sequence <SEQ ID 3714>. Analysis of this protein sequence reveals the following:

Possible site: 20
>>> Seems to have no N-terminal signal sequence
----- Final Results -----
bacterial cytoplasm --- Certainty = 0.2769 (Affirmative) < succ>
bacterial membrane --- Certainty = 0.0000 (Not Clear) < succ>
bacterial outside --- Certainty = 0.0000 (Not Clear) < succ>

[6646] The protein has homology with the following sequences in the GENPEPT database.

| >GP: AAC05773 GB: AF051356 pyruvate-formate lyase activating enzyme | | | |
|---|---|---|---|
| [Streptococcus mutans] | | | |
| Identities = 184/260 (70%), Positives = 217/260 (82%) | | | |
| Query: | 3 | EIDYKKVTGMIHSTESFGSVDGPGIRFIIFMQGCKMRCQYCHNPDTWEMETNNSKERTVE | 62 |
| | | ++DY+KVTG+++STESFGSVDGPGIRF++FMQGC+MRCQYCHNPDTW M+ + + ERT | |
| Sbjct: | 4 | KVDYEKVTGLVNSTESFGSVDGPGIRFVVFMQGCQMRCQYCHNPDTWAMKNDRATERTAG | 63 |
| Query: | 63 | DVLKEALRYKHFWGKDGGITVSGGEAMLQIDFITALFIEAKKLGIHTTLDTCGFAYRATP | 122 |
| | | DV KEALR+K FWG GGITVSGGEA LQ+DF+ ALF AK+ GIHTTLDTC +R TP | |
| Sbjct: | 64 | DVFKEALRFKDFWGDTGGITVSGGEATLQMDFLIALFSLAKEKGIHTTLDTCALTFRNTP | 123 |
| Query: | 123 | EYHAILEKLLDVTDLVLLDLKEIDSEQHKIVTRQSNKNILQFARYLSDRGTPVWIRHVLV | 182 |
| | | +Y EKL+ VTDLVLLD+KEI+ +QHKIVT SNK IL ARYLSD G PVWIRHVLV | |
| Sbjct: | 124 | KYLEKYEKLMAVTDLVLLDIKEINPDQHKIVTGHSNKTILACARYLSDIGKPVWIRHVLV | 183 |
| Query: | 183 | PGLTDIDDHLKRLGEFVQTLDNVDKFEVLPYHTMGEFKWRELGIPYPLAGVKPPTPERVK | 242 |
| | | PGLTD D+ L +LGE+V+TL NV +FE+LPYHTMGEFKWRELGIPYPL GVKPPTP+RV+ | |
| Sbjct: | 184 | PGLTDRDEDLIKLGEYVKTLKNVQRFEILPYHTMGEFKWRELGIPYPLEGVKPPTPDRVR | 243 |
| Query: | 243 | NAKDIMKTESYTEYLKRIQN | 262 |
| | | NAK +M TE+Y EY KRI + | |
| Sbjct: | 244 | NAKKLMHTETYEEYKKRINH | 263 |

[6647] A related DNA sequence was identified in S. pyogenes <SEQ ID 3715> which encodes the amino acid sequence <SEQ ID 3716>. Analysis of this protein sequence reveals the following:

```
Possible site: 44
>>> Seems to have no N-terminal signal sequence
----- Final Results -----
                            bacterial cytoplasm --- Certainty = 0.4614(Affirmative) < succ>
                              bacterial membrane --- Certainty = 0.0000(Not Clear) < succ>
                              bacterial outside --- Certainty = 0.0000(Not Clear) < succ>
```

[6648] An alignment of the GAS and GBS proteins is shown below.

| Identities = 223/260 (85%), Positives = 239/260 (91%) | | | |
|---|---|---|---|
| Query: | 1 | MAEIDYKKVTGMIHSTESFGSVDGPGIRFIIFMQGCKMRCQYCHNPDTWEMETNNSKERT | 60 |
| | | M E DY +VTGM+HSTESFGSVDGPGIRFIIF+QGCK+RCQYCHNPDTWEMETNNSK RT | |
| Sbjct: | 25 | MTEKDYGQVTGMVHSTESFGSVDGPGIRFIIFLQGCKLRCQYCHNPDTWEMETNNSKIRT | 84 |
| Query: | 61 | VEDVLKEALRYKHFWGKDGGITVSGGEAMLQIDFITALFIEAKKLGIHTTLDTCGFAYRA | 120 |
| | | V DVLKEAL+YKHFWGK GGITVSGGEAMLQIDFITALFIEAKKLGIHTTLDTCGF YR | |
| Sbjct: | 85 | VNDVLKEALQYKHFWGKKGGITVSGGEAMLQIDFITALFIEAKKLGIHTTLDTCGFTYRP | 144 |
| Query: | 121 | TPEYHAILEKLLDVTDLVLLDLKEIDSEQHKIVTRQSNKNILQFARYLSDRGTPVWIRHV | 180 |
| | | TPEYH +L+ LL VTDL+LLDLKEID +QHKIVTRQ NKNILQFARYLSD+ PVWIRHV | |
| Sbjct: | 145 | TPEYHQVLDNLLAVTDLILLDLKEIDEKQHKIVTRQPNKNILQFARYLSDKQIPVWIRHV | 204 |
| Query: | 181 | LVPGLTDIDDHLKRLGEFVQTLDNVDKFEVLPYHTMGEFKWRELGIPYPLAGVKPPTPER | 240 |
| | | LVPGLTDIDDHL RLGEFV+TL NVDKFEVLPYHTMGEFKWRELGIPY L GVKPPT ER | |
| Sbjct: | 205 | LVPGLTDIDDHLTRLGEFVKTLKNVDKFEVLPYHTMGEFKWRELGIPYQLEGVKPPTKER | 264 |
| Query: | 241 | VKNAKDIMKTESYTEYLKRI | 260 |
| | | V+NAK++M+TESYTEY+ RI | |
| Sbjct: | 265 | VQNAKNLMQTESYTEYMNRI | 284 |

[6649] Based on this analysis, it was predicted that these proteins and their epitopes could be useful antigens for vaccines or diagnostics.

### EXAMPLE 1194

[6650] A DNA sequence (GBSx1270) was identified in S. agalactiae <SEQ ID 3717> which encodes the amino acid sequence <SEQ ID 3718>. Analysis of this protein sequence reveals the following:

| Possible site: 28 | | | | |
|---|---|---|---|---|
| >>> Seems to have a cleavable N-term signal seq. | | | | |
| | INTEGRAL | Likelihood = −7.06 | Transmembrane | 105-121 (103-126) |
| | INTEGRAL | Likelihood = −5.57 | Transmembrane | 137-153 (136-162) |

```
----- Final Results -----
                              bacterial membrane --- Certainty = 0.3824(Affirmative) < succ>
                                bacterial outside --- Certainty = 0.0000(Not Clear) < succ>
                            bacterial cytoplasm --- Certainty = 0.0000(Not Clear) < succ>
```

[6651] The protein has homology with the following sequences in the GENPEPT database.

| >GP: AAC05772 GB: AF051356 putative hemolysin [Streptococcus mutans] | | | |
|---|---|---|---|
| Identities = 347/445 (77%), Positives = 406/445 (90%), Gaps = 1/445 (0%) | | | |
| Query: | 1 | MQDPGSQSLLLQFVILLILTLFNAFFSASEMALVSLNRSKVEQKAEEGDKRYRRLLDVLE | 60 |
| | | M+DPGSQSL+LQF++LLILTL NAFFSA+EMALVSLNR++VEQKAEEG+K+Y RLL VLE | |
| Sbjct: | 1 | MEDPGSQSLILQFLLLLILTLCNAFFSATEMALVSLNRARVEQKAEEGEKKYIRLLKVLE | 60 |
| Query: | 61 | NPNNFLSTIQVGITFISLLQGASLSASLGHVISGWLGNSATARTAGSIIALIFLTYVSIV | 120 |
| | | NPNNFLSTIQVGIT I+LL GASL+ SLG I+ W GNSATARTAGS+I+L FLTY+SIV | |
| Sbjct: | 61 | NPNNFLSTIQVGITLITLLSGASLADSLGREIAVWFGNSATARTAGSLISLAFLTYISIV | 120 |
| Query: | 121 | LGELYPKRIAMNLKDRLAIVSAPIIIFLGKIVSPFVWLLSASTNLLSRITPMTFDDADEK | 180 |
| | | LGELYPKRIAMNLK+ LA++SAP+IIFLGK+VSPFVWLLS STNLLSR+TPMTFDDADEK | |
| Sbjct: | 121 | LGELYPKRIAMNLKENLAVLSAPVIIFLGKVVSPFVWLLSVSTNLLSRLTPMTFDDADEK | 180 |
| Query: | 181 | MTRDEIEYMLTNSEETLEAEEIEMLQGIFSLDEMMAREVMVPRTDAFMIDINNDAQSNIE | 240 |
| | | MTRDEIEYMLTNSEETL+A+EIEMLQG+FSLDE+MAREVMVPRTDAFM+DIN+D+ I+ | |
| Sbjct: | 181 | MTRDEIEYMLTNSEETLDADEIEMLQGVFSLDELMAREVMVPRTDAFMVDINDDSSDIIQ | 240 |
| Query: | 241 | GILSQNFSRVPVFDDDKDRVVGVLHTKRLLEAGFKTGFDTIDLRKILQEPLFVPETIFVD | 300 |
| | | IL++ FSR+PV+DDDKD+++G++HTK LL AGFK GFD I+LR+ILQEPLFVPETI V+ | |
| Sbjct: | 241 | TILNERFSRIPVYDDDKDKIIGIIHTKNLLNAGFKEGFDHINLRRILQEPLFVPETIVVN | 300 |
| Query: | 301 | DLLKALRNTQNQMAILLDEYGGVAGLVTLEDLLEEIVGEIDDETDTAEQFVREIDENIYI | 360 |
| | | DLL AL+NTQNQMAILLDEYGGVAGLVTLEDLLEEIVGEIDDETD VREI +N YI | |
| Sbjct: | 301 | DLLTALKNTQNQMAILLDEYGGVAGLVTLEDLLEEIVGEIDDETDKTAISVREIADNTYI | 360 |
| Query: | 361 | VLGTMTLNEFNDYFETELESDDVDTIAGYYLTGVGSIPNQEEKVAYEVDSKDKHITLIND | 420 |
| | | VLGTMTLN+FN+YFET+LESD+VDTIAG+YLTGVG+IP+QEEK +EV+S KH+ LIND | |
| Sbjct: | 361 | VLGTMTLNDFNEYFETDLESDNVDTIAGFYLTGVGTIPSQEEKEHFEVESNGKHLELIND | 420 |
| Query: | 421 | KVKDGRITKLKVLLSDIEQ-NIEKD | 444 |
| | | KVKDGR+TKLK+L+S++E+ EKD | |
| Sbjct: | 421 | KVKDGRVTKLKILVSEVEEKEDEKD | 445 |

[6652] A related DNA sequence was identified in S. pyogenes <SEQ ID 3719> which encodes the amino acid sequence <SEQ ID 3720>. Analysis of this protein sequence reveals the following:

| Possible site: 42 | | | | |
|---|---|---|---|---|
| >>> Seems to have no N-terminal signal sequence | | | | |
| | INTEGRAL | Likelihood = −8.76 | Transmembrane | 22-38 (16-47) |
| | INTEGRAL | Likelihood = −5.57 | Transmembrane | 118-134 (117-138) |
| | INTEGRAL | Likelihood = −3.19 | Transmembrane | 150-166 (149-169) |

```
----- Final Results -----
                              bacterial membrane --- Certainty = 0.4503(Affirmative) < succ>
                                bacterial outside --- Certainty = 0.0000(Not Clear) < succ>
                            bacterial cytoplasm --- Certainty = 0.0000(Not Clear) < succ>
```

[6653] The protein has homology with the following sequences in the databases:

| >GP: AAC05772 GB: AF051356 putative hemolysin [Streptococcus mutans] | | | |
|---|---|---|---|
| Identities = 343/443 (77%), Positives = 401/443 (90%) | | | |
| Query: | 14 | MEDPVSQSLVIQFLLLVVLTLLNAFFSASEMALVSLNRSRVEQKAADGDKKYARLLRVLE | 73 |
| | | MEDP SQSL++QFLLL++LTL NAFFSA+EMALVSLNR+RVEQKA +G+KKY RLL+VLE | |
| Sbjct: | 1 | MEDPGSQSLILQFLLLLILTLCNAFFSATEMALVSLNRARVEQKAEEGEKKYIRLLKVLE | 60 |
| Query: | 74 | EPNHFLSTIQVGITFISLLSGASLSASLGKVISGWLGNSATARTAGTIISLVFLTYVSIV | 133 |
| | | PN+FLSTIQVGIT I+LLSGASL+ SLG+ I+ W GNSATARTAG++ISL FLTY+SIV | |
| Sbjct: | 61 | NPNNFLSTIQVGITLITLLSGASLADSLGREIAVWFGNSATARTAGSLISLAFLTYISIV | 120 |
| Query: | 134 | LGELYPKRIAMNLKDKLAIVSAPIIIGLGRLVSPFVWLLSASTNLLSRLTPMTFDDADEQ | 193 |
| | | LGELYPKRIAMNLK+ LA++SAP+II LG++VSPFVWLLS STNLLSRLTPMTFDDADE+ | |
| Sbjct: | 121 | LGELYPKRIAMNLKENLAVLSAPVIIFLGKVVSPFVWLLSVSTNLLSRLTPMTFDDADEK | 180 |
| Query: | 194 | MTRDEIEYMLSKSEATLDAEEIEMLQGVFSLDEMMAREVMVPRTDAFMIDINDDPLENIQ | 253 |
| | | MTRDEIEYML+ SE TLDA+EIEMLQGVFSLDE+MAREVMVPRTDAFM+DINDD + IQ | |
| Sbjct: | 181 | MTRDEIEYMLTNSEETLDADEIEMLQGVFSLDELMAREVMVPRTDAFMVDINDDSSDIIQ | 240 |
| Query: | 254 | EILKQSFSRIPVYDVDKDKIIGLIHTKRLLESGFRQGFDQINMRKMLQEPLFVPETIFVD | 313 |
| | | IL + FSRIPVYD DKDKIIG+IHTK LL +GF++GFD IN+R++LQEPLFVPETI V+ | |
| Sbjct: | 241 | TILNERFSRIPVYDDDKDKIIGIIHTKNLLNAGFKEGFDHINLRRILQEPLFVPETIVVN | 300 |
| Query: | 314 | DLLRQLRNTQNQMAILLDEYGGVAGLVTLEDLLEEIVGEIDDETDKAEQFVHEIGDNTYI | 373 |
| | | DLL L+NTQNQMAILLDEYGGVAGLVTLEDLLEEIVGEIDDETDK V EI DNTYI | |
| Sbjct: | 301 | DLLTALKNTQNQMAILLDEYGGVAGLVTLEDLLEEIVGEIDDETDKTAISVREIADNTYI | 360 |
| Query: | 374 | VVGTMTLNEFNDYFDTELESDDVDTIAGFYLTGIGTIPSQEQKEAYEIDNKDKHLVLIND | 433 |
| | | V+GTMTLN+FN+YF+T+LESD+VDTIAGFYLTG+GTIPSQE+KE +E+++ KHL LIND | |
| Sbjct: | 361 | VLGTMTLNDFNEYFETDLESDNVDTIAGFYLTGVGTIPSQEEKEHFEVESNGKHLELIND | 420 |
| Query: | 434 | KVKDGRITKLKLILSNIEQIIEE | 456 |
| | | KVKDGR+TKLK+++S +E+ +E | |
| Sbjct: | 421 | KVKDGRVTKLKILVSEVEEKEDE | 443 |

[6654] An alignment of the GAS and GBS proteins is shown below.

| Identities = 364/444 (81%), Positives = 417/444 (92%) | | | |
|---|---|---|---|
| Query: | 1 | MQDPGSQSLLLQFVILLILTLFNAFFSASEMALVSLNRSKVEQKAEEGDKRYRRLLDVLE | 60 |
| | | M+DP SQSL++QF++L++LTL NAFFSASEMALVSLNRS+VEQKA +GDK+Y RLL VLE | |
| Sbjct: | 14 | MEDPVSQSLVIQFLLLVVLTLLNAFFSASEMALVSLNRSRVEQKAADGDKKYARLLRVLE | 73 |
| Query: | 61 | NPNNFLSTIQVGITFISLLQGASLSASLGHVISGWLGNSATARTAGSIIALIFLTYVSIV | 120 |
| | | PN+FLSTIQVGITFISLL GASLSASLG VISGWLGNSATARTAG+II+L+FLTYVSIV | |
| Sbjct: | 74 | EPNHFLSTIQVGITFISLLSGASLSASLGKVISGWLGNSATARTAGTIISLVFLTYVSIV | 133 |
| Query: | 121 | LGELYPKRIAMNLKDRLAIVSAPIIIFLGKIVSPFVWLLSASTNLLSRITPMTFDDADEK | 180 |
| | | LGELYPKRIAMNLKD+LAIVSAPIII LG++VSPFVWLLSASTNLLSR+TPMTFDDADE+ | |
| Sbjct: | 134 | LGELYPKRIAMNLKDKLAIVSAPIIIGLGRLVSPFVWLLSASTNLLSRLTPMTFDDADEQ | 193 |
| Query: | 181 | MTRDEIEYMLTNSEETLEAEEIEMLQGIFSLDEMMAREVMVPRTDAFMIDINNDAQSNIE | 240 |
| | | MTRDEIEYML+ SE TL+AEEIEMLQG+FSLDEMMAREVMVPRTDAFMIDIN+D NI+ | |
| Sbjct: | 194 | MTRDEIEYMLSKSEATLDAEEIEMLQGVFSLDEMMAREVMVPRTDAFMIDINDDPLENIQ | 253 |
| Query: | 241 | GILSQNFSRVPVFDDDKDRVVGVLHTKRLLEAGFKTGFDTIDLRKILQEPLFVPETIFVD | 300 |
| | | IL Q+FSR+PV+D DKD+++G++HTKRLLE+GF+ GFD I++RK+LQEPLFVPETIFVD | |
| Sbjct: | 254 | EILKQSFSRIPVYDVDKDKIIGLIHTKRLLESGFRQGFDQINMRKMLQEPLFVPETIFVD | 313 |
| Query: | 301 | DLLKALRNTQNQMAILLDEYGGVAGLVTLEDLLEEIVGEIDDETDTAEQFVREIDENIYI | 360 |
| | | DLL+ LRNTQNQMAILLDEYGGVAGLVTLEDLLEEIVGEIDDETD AEQFV EI +N YI | |
| Sbjct: | 314 | DLLRQLRNTQNQMAILLDEYGGVAGLVTLEDLLEEIVGEIDDETDKAEQFVHEIGDNTYI | 373 |
| Query: | 361 | VLGTMTLNEFNDYFETELESDDVDTIAGYYLTGVGSIPNQEEKVAYEVDSKDKHITLIND | 420 |
| | | V+GTMTLNEFNDYF+TELESDDVDTIAG+YLTG+G+IP+QE+K AYE+D+KDKH+ LIND | |
| Sbjct: | 374 | VVGTMTLNEFNDYFDTELESDDVDTIAGFYLTGIGTIPSQEQKEAYEIDNKDKHLVLIND | 433 |
| Query: | 421 | KVKDGRITKLKVLLSDIEQNIEKD | 444 |
| | | KVKDGRITKLK++LS+IEQ IE+D | |
| Sbjct: | 434 | KVKDGRITKLKLILSNIEQIIEED | 457 |

[6655] SEQ ID 3718 (GBS70d) was expressed in E. coli as a GST-fusion product. SDS-PAGE analysis of total cell extract is shown in FIG. 120 (lane 8-10; MW 65 kDa). It was also expressed in E. coli as a His-fusion product. SDS-PAGE analysis of total cell extract is shown in FIG. 120 (lane 11 & 12; MW 44 kDa) and in FIG. 179 (lane 5; MW 35 kDa).

[6656] GBS70d-His was purified as shown in FIG. 231, lane 9-10.

[6657] Based on this analysis, it was predicted that these proteins and their epitopes could be useful antigens for vaccines or diagnostics.

### EXAMPLE 1195

[6658] A DNA sequence (GBSx1271) was identified in S. agalactiae <SEQ ID 3721> which encodes the amino acid sequence <SEQ ID 3722>. Analysis of this protein sequence reveals the following:

```
Possible site: 46
>>> Seems to have no N-terminal signal sequence
----- Final Results -----
                            bacterial cytoplasm --- Certainty = 0.1212(Affirmative) < succ>
                              bacterial membrane --- Certainty = 0.0000(Not Clear) < succ>
                                bacterial outside --- Certainty = 0.0000(Not Clear) < succ>
```

[6659] The protein has homology with the following sequences in the GENPEPT database.

| >GP: CAB84230 GB: AL162754 hypothetical protein NMA0960 [Neisseria | | | |
|---|---|---|---|
| meningitidis Z2491] | | | |
| Identities = 80/184 (43%), Positives = 119/184 (64%), Gaps = 3/184 (1%) | | | |
| Query: | 1 | MIKRPIHLSHDFLAEVIDKEAITLDATMGNGNDTVFLAKSSK---KVYAFDIQEEAIAKT | 57 |
| | | ++K + +H L + + + LD T GNG+DT+FLA+++ KV+AFDIQ +A+ T | |
| Sbjct: | 2 | LLKNILPFAHCLLRQALPEGGNALDGTAGNGHDTLFLAQTAGIRGKVWAFDIQPQALNNT | 61 |
| Query: | 58 | KAKLTEQGISNAELILDGHENLEQYVHTPLRAAIFNLGYLPSADKTVITKPHTTIKAIKN | 117 |
| | | + +L E G SN LILDGHENL+QY+ PL AAIFN G+LP DK++ T+ T+I A+ | |
| Sbjct: | 62 | RCRLQEAGYSNVRLILDGHENLKQYIPKPLDAAIFNFGWLPGGDKSLTTRTETSIAALSA | 121 |
| Query: | 118 | VLDILEVGGRLSLMVYYGHDGGKSEKDAVIAFVEQLPQNNFATMLYQPLNQVNTPPFLIM | 177 |
| | | L +L+ G L ++Y GH+ GK E +A+ + + LPQ FA + Y N+ N+PP+L+ | |
| Sbjct: | 122 | ALSLLKENGMLIAVLYPGHENGKQEAEAIEQWAKNLPQEQFAVLRYSFTNRKNSPPYLLA | 181 |
| Query: | 178 | VEKL | 181 |
| | | EKL | |
| Sbjct: | 182 | FEKL | 185 |

[6660] A related DNA sequence was identified in S. pyogenes <SEQ ID 3723> which encodes the amino acid sequence <SEQ ID 3724>. Analysis of this protein sequence reveals the following:

| Possible site: 55 | | | | |
|---|---|---|---|---|
| >>> Seems to have no N-terminal signal sequence | | | | |
| | INTEGRAL | Likelihood = −1.44 | Transmembrane | 127-143 (123-143) |

```
----- Final Results -----
                              bacterial membrane --- Certainty = 0.1574(Affirmative) < succ>
                                bacterial outside --- Certainty = 0.0000(Not Clear) < succ>
                            bacterial cytoplasm --- Certainty = 0.0000(Not Clear) < succ>
```

[6661] A related sequence was also identified in GAS <SEQ ID 9101> which encodes the amino acid sequence <SEQ ID 9102>. Analysis of this protein sequence reveals the following:

| Possible site: 46 | | | | |
|---|---|---|---|---|
| >>> Seems to have no N-terminal signal sequence | | | | |
| | INTEGRAL | Likelihood = −1.44 | Transmembrane | 118-134 (114-134) |

```
----- Final Results -----
                              bacterial membrane --- Certainty = 0.157(Affirmative) < succ>
                                bacterial outside --- Certainty = 0.000(Not Clear) < succ>
                            bacterial cytoplasm --- Certainty = 0.000(Not Clear) < succ>
```

[6662] An alignment of the GAS and GBS proteins is shown below.

| Identities = 124/184 (67%), Positives = 156/184 (84%) | | | |
|---|---|---|---|
| Query: | 1 | MIKRPIHLSHDFLAEVIDKEAITLDATMGNGNDTVFLAKSSKKVYAFDIQEEAIAKTKAK | 60 |
| | | M+KRPIHLSHDFLAEV+DK ++ +DATMGNGNDT FLA+ +KKVYAFD+QE+AI KT + | |
| Sbjct: | 10 | MLKRPIHLSHDFLAEVVDKSSVVVDATMGNGNDTAFLAQLAKKVYAFDVQEQAIRKTSER | 69 |
| Query: | 61 | LTEQGISNAELILDGHENLEQYVHTPLRAAIFNLGYLPSADKTVITKPHTTIKAIKNVLD | 120 |
| | | L + G+SNAELIL GHE ++QYV P+RAAIFNLGYLPSADK++IT P+TT++A+ +L | |
| Sbjct: | 70 | LAQLGLSNAELILAGHEAVDQYVTEPVRAAIFNLGYLPSADKSIITLPNTTLQALSKLLT | 129 |
| Query: | 121 | ILEVGGRLSLMVYYGHDGGKSEKDAVIAFVEQLPQNNFATMLYQPLNQVNTPPFLIMVEK | 180 |
| | | +L VGGR+++MVYYGHDGG EKDA++ FV+QL Q + MLYQPLNQVNTPPFLIM+EK | |
| Sbjct: | 130 | LLMVGGRIAIMVYYGHDGGSLEKDALLDFVKQLDQRKVSAMLYQPLNQVNTPPFLIMLEK | 189 |
| Query: | 181 | LQSY | 184 |
| | | L + | |
| Sbjct: | 190 | LADF | 193 |

[6663] Based on this analysis, it was predicted that these proteins and their epitopes could be useful antigens for vaccines or diagnostics.

### EXAMPLE 1196

[6664] A DNA sequence (GBSx1272) was identified in S. agalactiae <SEQ ID 3725> which encodes the amino acid sequence <SEQ ID 3726>. Analysis of this protein sequence reveals the following:

Possible site: 51
>>> Seems to have no N-terminal signal sequence
----- Final Results -----
bacterial cytoplasm --- Certainty = 0.1948 (Affirmative) < succ>
bacterial membrane --- Certainty = 0.0000 (Not Clear) < succ>
bacterial outside --- Certainty = 0.0000 (Not Clear) < succ>

[6665] The protein has homology with the following sequences in the GENPEPT database.

| >GP: AAC00380 GB: AF008220 YtqA [Bacillus subtilis] | | | |
|---|---|---|---|
| Identities = 161/302 (53%), Positives = 220/302 (72%), Gaps = 4/302 (1%) | | | |
| Query: | 2 | KKRYRAINDYYRELFGEKIFKLPIDAGFDCPNRDGTVARGGCTFCTVSGSGDAIVAPEAP | 61 |
| | | +KRY +N + RE FG K+FK+ +D GFDCPNRDGTVA GGCTFC+ +GSGD | |
| Sbjct: | 13 | EKRYHTLNYHLREHFGHKVFKVALDGGFDCPNRDGTVAHGGCTFCSAAGSGDFAGNRTDD | 72 |
| Query: | 62 | IREQFYKEIDFMHRKWPEVNKYLVYFQNFTNTHAKLEIIKERYEQAINEPGVIGINIGTR | 121 |
| | | + QF+ + MH KW + KY+ YFQ FTNTHA +E+++E++E + V+GI+I TR | |
| Sbjct: | 73 | LITQFHDIKNRMHEKWKD-GKYIAYFQAFTNTHAPVEVLREKFESVLALDDVVGISIATR | 131 |
| Query: | 122 | PDCLPDETIYYLAELSERMHVTLELGLQTTYEATSALINRAHSYDLYKKTVKRIRELAPK | 181 |
| | | PDCLPD+ + YLAEL+ER ++ +ELGLQT +E T+ LINRAH ++ Y + V ++R+ | |
| Sbjct: | 132 | PDCLPDDVVDYLAELNERTYLWVELGLQTVHERTALLINRAHDFNCYVEGVNKLRKHG-- | 189 |
| Query: | 182 | VEIVSHLINGLPGETHDMMVENVRRCVTDNDIQGIKLHLLHLMTNTRMQRDYHEGRLRLL | 241 |
| | | + + SH+INGLP E DMM+E + V D D+QGIK+HLLHL+ T M + Y +G+L L | |
| Sbjct: | 190 | IRVCSHIINGLPLEDRDMMMETAK-AVADLDVQGIKIHLLHLLKGTPMVKQYEKGKLEFL | 248 |
| Query: | 242 | SQEDYISIICDQLEIIPKHIVIHRITGDAPRHMLIGPMWSLNKWEVLNAIDKEMEKRQSY | 301 |
| | | SQ+DY+ ++CDQLEIIP +++HRITGD P ++IGPMWS+NKWEVL AI+KE+E R SY | |
| Sbjct: | 249 | SQDDYVQLVCDQLEIIPPEMIVHRITGDGPIELMIGPMWSVNKWEVLGAINKSLENRGSY | 308 |
| Query: | 302 | QG | 303 |
| | | QG | |
| Sbjct: | 309 | QG | 310 |

[6666] A related DNA sequence was identified in S. pyogenes <SEQ ID 3727> which encodes the amino acid sequence <SEQ ID 3728>. Analysis of this protein sequence reveals the following:

Possible site: 57
>>> Seems to have no N-terminal signal sequence
----- Final Results -----
bacterial cytoplasm --- Certainty = 0.2023 (Affirmative) < succ>
bacterial membrane --- Certainty = 0.0000 (Not Clear) < succ>
bacterial outside --- Certainty = 0.0000 (Not Clear) < succ>

[6667] An alignment of the GAS and GBS proteins is shown below.

| Identities = 260/307 (84%), Positives = 290/307 (93%), Gaps = 1/307 (0%) | | | |
|---|---|---|---|
| Query: | 1 | MKKRYRAINDYYRELFGEKIFKLPIDAGFDCPNRDGTVARGGCTFCTVSGSGDAIVAPEA | 60 |
| | | MKKRY+ +N++YR+LFG K+FK+PIDAGFDCPNRDGTVA GGCTFCTVSGSGDAIVAP+A | |
| Sbjct: | 7 | MKKRYQTLNEHYRQLFGAKMFKVPIDAGFDCPNRDGTVAHGGCTFCTVSGSGDAIVAPDA | 66 |
| Query: | 61 | PIREQFYKEIDFMHRKWPEVNKYLVYFQNFTNTHAKLEIIKERYEQAINEPGVIGINIGT | 120 |
| | | PI+EQFYKEIDFMHRKWP+VN+YLVYFQNFTNTH +++I++RYEQAINEPGV+GINIGT | |
| Sbjct: | 67 | PIKEQFYKEIDFMHRKWPDVNRYLVYFQNFTNTHDTVDVIRDRYEQAINEPGVVGINIGT | 26 |
| Query: | 121 | RPDCLPDETIYYLAELSERMHVTLELGLQTTYEATSALINRAHSYDLYKKTVKRIRELAP | 180 |
| | | RPDCLPD+TI YLAELSERMHVT+ELGLQTTYE TS LINRAHSYDLYK+TV+R+R P | |
| Sbjct: | 127 | RPDCLPDDTIAYLAELSERMHVTVELGLQTTYEETSRLINRAHSYDLYKETVRRLRHY-P | 185 |
| Query: | 181 | KVEIVSHLINGLPGETHDMMVENVRRCVTDNDIQGIKLHLLHLMTNTRMQRDYHEGRLRL | 240 |
| | | + IVSHLINGLP ETHDMM+ENVRRCVTDNDIQGIKLHLLHLMTNTRMQRDYHEGRL+L | |
| Sbjct: | 186 | NINIVSHLINGLPKETHDMMLENVRRCVTDNDIQGIKLHLLHLMTNTRMQRDYHEGRLKL | 245 |
| Query: | 241 | LSQEDYISIICDQLEIIPKHIVIHRITGDAPRHMLIGPMWSLNKWEVLNAIDKEMEKRQS | 300 |
| | | LSQ+DY+SIICDQLEIIPKHIVIHRITGDAPR MLIGPMWSLNKWEVLNAIDKEME+R S | |
| Sbjct: | 246 | LSQKDYVSIICDQLEIIPKHIVIHRITGDAPRDMLIGPMWSLNKWEVLNAIDKEMERRGS | 305 |
| Query: | 301 | YQGCKAE | 307 |
| | | +QGCK + | |
| Sbjct: | 306 | FQGCKVD | 312 |

[6668] Based on this analysis, it was predicted that these proteins and their epitopes could be useful antigens for vaccines or diagnostics.

### EXAMPLE 1197

[6669] A DNA sequence (GBSx1273) was identified in S. agalactiae <SEQ ID 3729> which encodes the amino acid sequence <SEQ ID 3730>. Analysis of this protein sequence reveals the following:

| Possible site: 24 | | | |
|---|---|---|---|
| >>> Seems to have an uncleavable N-term signal seq | | | |
| INTEGRAL | Likelihood = −9.82 | Transmembrane | 10-26 (6-30) |
| INTEGRAL | Likelihood = −4.73 | Transmembrane | 93-109 (87-112) |
| INTEGRAL | Likelihood = −4.57 | Transmembrane | 163-179 (161-181) |
| INTEGRAL | Likelihood = −2.97 | Transmembrane | 189-205 (185-205) |
| INTEGRAL | Likelihood = −1.97 | Transmembrane | 58-74 (58-74) |
| INTEGRAL | Likelihood = −0.75 | Transmembrane | 130-146 (130-146) |

----- Final Results -----
bacterial membrane --- Certainty = 0.4927 (Affirmative) < succ>
bacterial outside --- Certainty = 0.0000 (Not Clear) < succ>
bacterial cytoplasm --- Certainty = 0.0000 (Not Clear) < succ>

[6670] The protein has homology with the following sequences in the GENPEPT database.

| >GP: CAA79986 GB: Z21972 ORF2 [Bacillus megaterium] | | | |
|---|---|---|---|
| Identities = 62/159 (38%), Positives = 92/159 (56%), Gaps = 3/159 (1%) | | | |
| Query: | 34 | ISFDQTIQESVRGQLPNLSTRFFKLITVIGNTVSQIAIAIMSVTFCY--LKKWYPQARFI | 91 |
| | | + FD+ + V+G L T K T IG+T S I ++++ + F Y LK F | |
| Sbjct: | 34 | LKFDEDVISLVQGWESPLLTDIMKFFTYIGSTASLIILSLVILFFLYRILKHRLELVLFT | 93 |
| Query: | 92 | AVNAIISGICILSLKLIFQRVRPTLTHLVFAGGYSFPSGHSMGTFMIFGSIIILLQYYMP | 151 |
| | | AV + S + L +KL FQR RP L L+ GGYSFPSGH+M F ++G + LL ++ | |
| Sbjct: | 94 | AV-MVGSPLLNLMVKLFFQRARPDLHRLIDIGGYSFPSGHAMNAFSLYGILTFLLWRHIT | 152 |
| Query: | 152 | KSIWKLLCQGTLGLLIFLIGLSRIYLGVHFPTDVLAGFI | 190 |
| | | ++L L+I IG+SRIYLGVH+P+D++AG++ | |
| Sbjct: | 153 | ARWARILLILFSMLMILSIGISRIYLGVHYPSDIIAGYL | 191 |

[6671] A related DNA sequence was identified in S. pyogenes <SEQ ID 1851> which encodes the amino acid sequence <SEQ ID 1852>. Analysis of this protein sequence reveals the following:

| Possible site: 15 | | | |
|---|---|---|---|
| >>> Seems to have an uncleavable N-term signal seq | | | |
| INTEGRAL | Likelihood = −11.30 | Transmembrane | 154-170 (150-181) |
| INTEGRAL | Likelihood = −10.88 | Transmembrane | 65-81 (58-93) |
| INTEGRAL | Likelihood = −8.97 | Transmembrane | 10-26 (5-31) |
| INTEGRAL | Likelihood = −3.77 | Transmembrane | 86-102 (86-105) |
| INTEGRAL | Likelihood = −2.71 | Transmembrane | 185-201 (183-202) |
| INTEGRAL | Likelihood = −1.54 | Transmembrane | 130-146 (130-148) |

----- Final Results -----
bacterial membrane --- Certainty = 0.5522 (Affirmative) < succ>
bacterial outside --- Certainty = 0.0000 (Not Clear) < succ>
bacterial cytoplasm --- Certainty = 0.0000 (Not Clear) < succ>

[6672] An alignment of the GAS and GBS proteins is shown below.

| Identities = 88/197 (44%), Positives 134/197 (67%), Gaps = 1/197 (0%) | | | |
|---|---|---|---|
| Query: | 1 | MLSRQNSKLIQAFIAIILFFSLGLVIKYWPDTVISFDQTIQESVRGQLPNLSTRFFKLIT | 60 |
| | | M ++Q LI +F A+++F +G +K++P+ + D TIQ +RG LP + T+FF+ +T | |
| Sbjct: | 2 | MTNKQTHFLIASF-ALLIFVIIGYTVKFFPERLALLDNTIQAEIRGNLPIVLTQFFRGVT | 60 |
| Query: | 61 | VIGNTVSQIAIAIMSVTFCYLKKWYPQARFIAVNAIISGICILSLKLIFQRVRPTLTHLV | 120 |
| | | V GN ++Q+ + I+SV + KW +A FI N I+ I +LKL +QR RP + HLV | |
| Sbjct: | 61 | VFGNVMTQVLLVIVSVLVLFFMKWKIEALFILSNGAIAAFLITTLKLFYQRPRPAIEHLV | 120 |
| Query: | 121 | FAGGYSFPSGHSMGTFMIFGSIIILLQYYMPKSIWKLLCQGTLGLLIFLIGLSRIYLGVH | 180 |
| | | +AGGYSFPSGH+MG+ +IFGS++I+ + + + + +LI LIGLSRIYLGVH | |
| Sbjct: | 121 | YAGGYSFPSGHAMGSMLIFGSLLIICYQRLHSKLLQFVTSMIFIILILLIGLSRIYLGVH | 180 |
| Query: | 181 | FPTDVLAGFILAYGILN | 197 |
| | | +P+D+LAGF+L +GIL+ | |
| Sbjct: | 181 | YPSDILAGFVLGFGILH | 197 |

[6673] Based on this analysis, it was predicted that these proteins and their epitopes could be useful antigens for vaccines or diagnostics.

### EXAMPLE 1198

[6674] A DNA sequence (GBSx1274) was identified in S. agalactiae <SEQ ID 3731> which encodes the amino acid sequence <SEQ ID 3732>. Analysis of this protein sequence reveals the following:

| Possible site: 58 | | | |
|---|---|---|---|
| >>> Seems to have no N-terminal signal sequence | | | |
| INTEGRAL | Likelihood = −8.44 | Transmembrane | 35-51 (33-59) |
| INTEGRAL | Likelihood = −6.53 | Transmembrane | 193-209 (179-211) |
| INTEGRAL | Likelihood = −4.46 | Transmembrane | 64-80 (60-82) |
| INTEGRAL | Likelihood = −4.09 | Transmembrane | 108-124 (103-128) |
| INTEGRAL | Likelihood = −2.71 | Transmembrane | 150-166 (148-166) |
| INTEGRAL | Likelihood = −0.06 | Transmembrane | 174-190 (174-190) |

----- Final Results -----
bacterial membrane --- Certainty = 0.4376 (Affirmative) < succ>
bacterial outside --- Certainty = 0.0000 (Not Clear) < succ>
bacterial cytoplasm --- Certainty = 0.0000 (Not Clear) < succ>

[6675] A related GBS nucleic acid sequence <SEQ ID 9977> which encodes amino acid sequence <SEQ ID 9978> was also identified.

[6676] The protein has homology with the following sequences in the GENPEPT database.

| >GP:AAC83944 GB:L47648 putative [Bacillus subtilis] | | | |
|---|---|---|---|
| Identities = 53/186 (28%), Positives = 109/186 (58%) | | | |
| Query: | 33 | RKMVTIAILSALSFVLMMVSFPLIPGAEFLKVDFSILPMLVAFILFDLKSSYGVLLLRSL | 92 |
| | | +K+V +++LS+++FVLM+++FP ++LK+DFS +P ++A +++ + V ++++ | |
| Sbjct: | 4 | KKLVVVSMLSSIAFVLMLLNFPFPGLPDYLKIDFSDVPAIIAILIYGPLAGIAVEAIKNV | 63 |
| Query: | 93 | LKVILANRGPETFIGLPMNMVALALFLASFAIFWKNRESAKDFIKASLFGTVSLTVSMVA | 152 |
| | | L+ I+ +G N +A LF+ A +K SAK + L GT ++T+ M | |
| Sbjct: | 64 | LQYIIQGSMAGVPVGQVANFIAGTLFILPTAFLFKKLNSAKGLAVSLLLGTAAMTILMSI | 123 |
| Query: | 153 | LNYVFAIPLYAIFANFDIRTFIGVGNYLLTMVIPFNIVEGILISIVFYLTYVACLPILER | 212 |
| | | LNYV +P Y F + + + ++ ++PFN+++GI+I++VF L ++ P +E+ | |
| Sbjct: | 124 | LNYVLILPAYTWFLHSPALSDSALKTAVVAGILPFNMIKGIVITVVFSLIFIKLKPWIEQ | 183 |
| Query: | 213 | YKKTNV | 218 |
| | | + ++ | |
| Sbjct: | 184 | QRSAHI | 189 |

[6677] A related DNA sequence was identified in S. pyogenes <SEQ ID 3733> which encodes the amino acid sequence <SEQ ID 3734>. Analysis of this protein sequence reveals the following:

| Possible site: 26 | | | | |
|---|---|---|---|---|
| >>> Seems to have a cleavable N-term signal seq. | | | | |
| INTEGRAL | Likelihood = −6.48 | Transmembrane | 82-98 | (74-100) |
| INTEGRAL | Likelihood = −3.93 | Transmembrane | 161-177 | (152-178) |
| INTEGRAL | Likelihood = −3.61 | Transmembrane | 108-124 | (107-126) |
| INTEGRAL | Likelihood = −3.61 | Transmembrane | 33-49 | (31-50) |

----- Final Results -----
bacterial membrane --- Certainty = 0.3590 (Affirmative) < succ>
bacterial outside --- Certainty = 0.0000 (Not Clear) < succ>
bacterial cytoplasm --- Certainty = 0.0000 (Not Clear) < succ>

[6678] The protein has homology with the following sequences in the databases:

| >GP:AAC83944 GB:L47648 putative [Bacillus subtilis] | | | |
|---|---|---|---|
| Identities = 46/182 (25%), Positives = 97/182 (53%) | | | |
| Query: | 3 | KTHKMIMIGILSAISFLLMLVSFAIIPGAAFLKIEFSIIPVLFGLMIMDLKSAYLILLLR | 62 |
| | | K K++++ +LS+I+F+LML++F +LKI+FS +P + ++I + + ++ | |
| Sbjct: | 2 | KVKKLVVVSMLSSIAFVLMLLNFPFPGLPDYLKIDFSDVPAIIAILIYGPLAGIAVEAIK | 61 |
| Query: | 63 | SLLKLFLNNRGVNDFIGLPMNIIAIALFVTAFALVWNRQKTLSQYVFASLLGTGLLTFGM | 122 |
| | | ++L+ + +G N IA LF+ A ++ + + + LLGT +T M | |
| Sbjct: | 62 | NVLQYIIQGSMAGVPVGQVANFIAGTLFILPTAFLFKKLNSAKGLAVSLLLGTAAMTILM | 121 |
| Query: | 123 | VVLNYTFAIPLYAIFANIDIRAYIGVTKYMMTMVIPFNLVEGLIFAITFYFVYIASKPIL | 182 |
| | | +LNY +P Y F + + + ++ ++PFN+++G++ + F ++I KP + | |
| Sbjct: | 122 | SILNYVLILPAYTWFLHSPALSDSALKTAVVAGILPFNMIKGIVITVVFSLIFIKLKPWI | 181 |
| Query: | 183 | ER | 184 |
| | | E+ | |
| Sbjct: | 182 | EQ | 183 |

[6679] An alignment of the GAS and GBS proteins is shown below.

| Identities = 110/185 (59%), Positives = 144/185 (77%) | | | |
|---|---|---|---|
| Query: | 29 | MTNTRKMVTIAILSALSFVLMMVSFPLIPGAEFLKVDFSILPMLVAFILFDLKSSYGVLL | 88 |
| | | M+ T KM+ I ILSA+SF+LM+VSF +IPGA FLK++FSI+P+L ++ DLKS+Y +LL | |
| Sbjct: | 1 | MSKTHKMIMIGILSAISFLLMLVSFAIIPGAAFLKIEFSIIPVLFGLMIMDLKSAYLILL | 60 |
| Query: | 89 | LRSLLKVILANRGPETFIGLPMNMVALALFLASFAIFWKNRESAKDFIKASLFGTVSLTV | 148 |
| | | LRSLLK+ L NRG FIGLPMN++A+ALF+ +FA+ W +++ ++ ASL GT LT | |
| Sbjct: | 61 | LRSLLKLFLNNRGVNDFIGLPMNIIAIALFVTAFALVWNRQKTLSQYVFASLLGTGLLTF | 120 |
| Query: | 149 | SMVALNYVFAIPLYAIFANFDIRTFIGVGNYLLTMVIPFNIVEGILISIVFYLTYVACLP | 208 |
| | | MV LNY FAIPLYAIFAN DIR +IGV Y++TMVIPFN+VEG++ +I FY Y+A P | |
| Sbjct: | 121 | GMVVLNYTFAIPLYAIFANIDIRAYIGVTKYMMTMVIPFNLVEGLIFAITFYFVYIASKP | 180 |
| Query: | 209 | ILERY | 213 |
| | | ILERY | |
| Sbjct: | 181 | ILERY | 185 |

[6680] Based on this analysis, it was predicted that these proteins and their epitopes could be useful antigens for vaccines or diagnostics.

### EXAMPLE 1199

[6681] A DNA sequence (GBSx1275) was identified in S. agalactiae <SEQ ID 3735> which encodes the amino acid sequence <SEQ ID 3736>. Analysis of this protein sequence reveals the following:

| Possible site: 31 | | | | |
|---|---|---|---|---|
| >>> Seems to have a cleavable N-term signal seq. | | | | |
| INTEGRAL | Likelihood = −11.04 | Transmembrane | 278-294 | (270-298) |

----- Final Results -----
bacterial membrane --- Certainty = 0.5416 (Affirmative) < succ>
bacterial outside --- Certainty = 0.0000 (Not Clear) < succ>
bacterial cytoplasm --- Certainty = 0.0000 (Not Clear) < succ>

[6682] The protein has no significant homology with any sequences in the GENPEPT database.

[6683] No corresponding DNA sequence was identified in S. pyogenes.

[6684] SEQ ID 3736 (GBS150) was expressed in E. coli as a His-fusion product. SDS-PAGE analysis of total cell extract is shown in FIG. 23 (lane 7; MW 29.7 kDa) and in FIG. 175 (lane 4 & 5; MW 30 kDa).

[6685] Purified GBS150-His is shown in FIG. 110A, FIG. 199 (lane 5) and FIG. 227 (lanes 6-7).

[6686] The purified GBS150-His fusion product was used to immunise mice (lane 1+2 product; 20 μg/mouse).

[6687] The resulting antiserum was used for Western blot (FIG. 110B), FACS (FIG. 110C), and in the in vivo passive protection assay (Table III). These tests confirm that the protein is immunoaccessible on GBS bacteria and that it is an effective protective immunogen.

[6688] Based on this analysis, it was predicted that this protein and its epitopes, could be useful antigens for vaccines or diagnostics.

### EXAMPLE 1200

[6689] A DNA sequence (GBSx1276) was identified in S. agalactiae <SEQ ID 3737> which encodes the amino acid sequence <SEQ ID 3738>. This protein is predicted to be a fimbria-associated protein. Analysis of this protein sequence reveals the following:

| Possible site: 40 | | | | |
|---|---|---|---|---|
| >>> Seems to have an uncleavable N-term signal seq | | | | |
| INTEGRAL | Likelihood = −15.34 | Transmembrane | 264-280 | (257-285) |
| INTEGRAL | Likelihood = −7.64 | Transmembrane | 23-39 | (12-41) |

----- Final Results -----
bacterial membrane --- Certainty = 0.7135 (Affirmative) < succ>
bacterial outside --- Certainty = 0.0000 (Not Clear) < succ>
bacterial cytoplasm --- Certainty = 0.0000 (Not Clear) < succ>

[6690] The protein has homology with the following sequences in the GENPEPT database.

| >GP:AAC13546 GB:AF019629 putative fimbria-associated protein | | | |
|---|---|---|---|
| [Actinomyces naeslundii] | | | |
| Identities = 95/271 (35%), Positives = 139/271 (51%), Gaps = 16/271 (5%) | | | |
| Query: | 29 | VGLLITSYPFISNWYYNIKANNQVTNFDNQTQKLNTKEINRRFELAKAYNRTLDPSRLSD | 88 |
| | | +GLL +YP ++W + ++ Q + + E A AYN L + + | |
| Sbjct: | 1 | MGLL--TYPTAASWVSQYNQSKVTADYSAQVDGARP-DAKTQVEQAHAYNDALSAGAVLE | 57 |
| Query: | 89 | PYTE------KEKKGIAEYAHMLEIAE--MIGYIDIPSIKQKLPIYAGTTSSVLEKGAGH | 140 |
| | | K +YA++L+ ++ + IPSI LP+Y GT L KG GH | |
| Sbjct: | 58 | ANNHVPTGAGSSKDSSLQYANILKANNEGLMARLKIPSISLDLPVYHGTADDTLLKGLGH | 117 |
| Query: | 141 | LEGTSLPIGGKSSHTVITAHRGLPKAKLFTDLDKLKKGKIFYIHNIKEVLAYKVDQISVV | 200 |
| | | LEGTSLP+GG+ + +VIT HRGL +A +FT+LDK+K G + EVL Y+V VV | |
| Sbjct: | 118 | LEGTSLPVGGEGTRSVITGHRGLAEATMFTNLDKVKTGDSLIVEVFGEVLTYRVTSTKVV | 177 |
| Query: | 201 | KPDNFSKLLVVKGKDYATLLTCTPYSINSHRLLVRGHRIKYVPPVKEKNYLMKELQTHYK | 260 |
| | | +P+ L V +GKD TL+TCTP IN+HR+L+ G RI Y P K+ K + | |
| Sbjct: | 178 | EPEETEALRVEEGKDLLTLVTCTPLGINTHRILLTGERI-YPTPAKDLAAAGKRPDVPHF | 236 |
| Query: | 261 | LYFLLSILVILILVALLL----YLKRKFKER | 287 |
| | | ++ + + LI+V L L Y + KER | |
| Sbjct: | 237 | PWWAVGLAAGLIVVGLYLWRSGYAAARAKER | 267 |

[6691] A related DNA sequence was identified in S. pyogenes <SEQ ID 3739> which encodes the amino acid sequence <SEQ ID 3740>. Analysis of this protein sequence reveals the following:

| Possible site: 49 | | | | |
|---|---|---|---|---|
| >>> Seems to have no N-terminal signal sequence | | | | |
| INTEGRAL | Likelihood = −14.01 | Transmembrane | 225-241 | (220-248) |

----- Final Results -----
bacterial membrane --- Certainty = 0.6604 (Affirmative) < succ>
bacterial outside --- Certainty = 0.0000 (Not Clear) < succ>
bacterial cytoplasm --- Certainty = 0.0000 (Not Clear) < succ>

[6692] The protein has homology with the following sequences in the databases:

| >GP:AAC13546 GB:AF019629 putative fimbria-associated protein | | | |
|---|---|---|---|
| [Actinomyces naeslundii] | | | |
| Identities = 94/250 (37%), Positives = 133/250 (52%), Gaps = 17/250 (6%) | | | |
| Query: | 1 | VECYRDRQLLSTYHKQVTQKKPSEMEEVWQKAKAYNARLGIQPVPDAF--------SFRD | 52 |
| | | V Y ++ + Y QV +P +V ++A AYN L V +A S +D | |
| Sbjct: | 13 | VSQYNQSKVTADYSAQVDGARPDAKTQV-EQAHAYNDALSAGAVLEANNHVPTGAGSSKD | 71 |
| Query: | 53 | GIHDKNYESLLQIENNDIMGYVEVPSIKVTLPIYHYTTDEVLTKGAGHLFGSALPVGGDG | 112 |
| | | Y ++L+ N +M +++PSI + LP+YH T D+ L KG GHL G++LPVGG+G | |
| Sbjct: | 72 | S--SLQYANILKANNEGLMARLKIPSISLDLPVYHGTADDTLLKGLGHLEGTSLPVGGEG | 129 |
| Query: | 113 | THTVISAHRGLPSAEMFTNLNLVKKGDTFYFRVLNKVLAYKVDQILTVEPDQVTSLSGVM | 172 |
| | | T +VI+ HRGL A MFTNL+ VK GD+ V +VL Y+V VEP++ +L | |
| Sbjct: | 130 | TRSVITGHRGLAEATMFTNLDKVKTGDSLIVEVFGEVLTYRVTSTKVVEPEETEALRVEE | 189 |
| Query: | 173 | GKDYATLVTCTPYGVNTKRLLVRGHRIAYHYKKYQQAKKAMKLVDKSRMWAEVVCAAFGV | 232 |
| | | GKD TLVTCTP G+NT R+L+ G RI Y K + K A G+ | |
| Sbjct: | 190 | GKDLLTLVTCTPLGINTHRILLTGERI------YPTPAKDLAAAGKRPDVPHFPWWAVGL | 243 |
| Query: | 233 | VIAIILVFMY | 242 |
| | | +I+V +Y | |
| Sbjct: | 244 | AAGLIVVGLY | 253 |

[6693] An alignment of the GAS and GBS proteins is shown below.

| Identities = 93/192 (48%), Positives = 130/192 (67%), Gaps = 2/192 (1%) | | | |
|---|---|---|---|
| Query: | 52 | VTNFDNQTQKLNTKEINRRFELAKAYNRTLDPSRLSDPYTEKEKKGIAEYAHMLEIA--E | 109 |
| | | ++ + Q + E+ ++ AKAYN L + D ++ ++ Y +L+I + | |
| Sbjct: | 10 | LSTYHKQVTQKKPSEMEEVWQKAKAYNARLGIQPVPDAFSFRDGIHDKNYESLLQIENND | 69 |
| Query: | 110 | MIGYIDIPSIKQKLPIYAGTTSSVLEKGAGHLEGTSLPIGGKSSHTVITAHRGLPKAKLF | 169 |
| | | ++GY+++PSIK LPIY TT VL KGAGHL G++LP+GG +HTVI+AHRGLP A++F | |
| Sbjct: | 70 | IMGYVEVPSIKVTLPIYHYTTDEVLTKGAGHLFGSALPVGGDGTHTVISAHRGLPSAEMF | 129 |
| Query: | 170 | TDLDKLKKGKIFYIHNIKEVLAYKVDQISVVKPDNFSKLLVVKGKDYATLLTCTPYSINS | 229 |
| | | T+L+ +KKG FY + +VLAYKVDQI V+PD + L V GKDYATL+TCTPY +N+ | |
| Sbjct: | 130 | TNLNLVKKGDTFYFRVLNKVLAYKVDQILTVEPDQVTSLSGVMGKDYATLVTCTPYGVNT | 189 |
| Query: | 230 | HRLLVRGHRIKY | 241 |
| | | RLLVRGHRI Y | |
| Sbjct: | 190 | KRLLVRGHRIAY | 201 |

[6694] SEQ ID 3738 (GBS210) was expressed in E. coli as a GST-fusion product. SDS-PAGE analysis of total cell extract is shown in FIG. 50 (lane 3; MW 61 kDa).

[6695] GBS210d was expressed in E. coli as a GST-fusion product. SDS-PAGE analysis of total cell extract is shown in FIG. 152 (lane 24; MW 54 kDa) and in FIG. 187 (lane 9; MW 54 kDa). It was also expressed in E. coli as a His-fusion product. SDS-PAGE analysis of total cell extract is shown in FIG. 154 (lane 24; MW 28.7 kDa) and in FIG. 182 (lane 13; MW 29 kDa). Purified GBS210d-GST is shown in lane 4 of FIG. 237.

[6696] Based on this analysis, it was predicted that these proteins and their epitopes could be useful antigens for vaccines or diagnostics.

### EXAMPLE 1201

[6697] A DNA sequence (GBSx1277) was identified in S. agalactiae <SEQ ID 3741> which encodes the amino acid sequence <SEQ ID 3742>. This protein is predicted to be a fimbria-associated protein. Analysis of this protein sequence reveals the following:

| Possible site: 42 | | | | |
|---|---|---|---|---|
| >>> Seems to have an uncleavable N-term signal seq | | | | |
| INTEGRAL | Likelihood = −10.61 | Transmembrane | 20-36 | (15-40) |
| INTEGRAL | Likelihood = −7.27 | Transmembrane | 259-275 | (258-277) |

----- Final Results -----
bacterial membrane --- Certainty = 0.5246 (Affirmative) < succ>
bacterial outside --- Certainty = 0.0000 (Not Clear) < succ>
bacterial cytoplasm --- Certainty = 0.0000 (Not Clear) < succ>

[6698] The protein has homology with the following sequences in the GENPEPT database.

| >GP:AAC13546 GB:AF019629 putative fimbria-associated protein | | | |
|---|---|---|---|
| [Actinomyces naeslundii] | | | |
| Identities = 76/219 (34%), Positives = 120/219 (54%), Gaps = 12/219 (5%) | | | |
| Query: | 28 | LSILLYPVVSRFYYTIESNNQTQDFERAAKKLSQKEINRRMALAQAYNDSLN-------N | 80 |
| | | + +L YP + + + T D+ A ++ + ++ A AYND+L+ N | |
| Sbjct: | 1 | MGLLTYPTAASWVSQYNQSKVTADYS-AQVDGARPDAKTQVEQAHAYNDALSAGAVLEAN | 59 |
| Query: | 81 | VHLEDPYEKKRIQKGVAEYARMLEVSEK--IGTISVPKIGQKLPIFAGSSQEVLSKGAGH | 138 |
| | | H+ P + +YA +L+ + + + + +P I LP++ G++ + L KG GH | |
| Sbjct: | 60 | NHV--PTGAGSSKDSSLQYANILKANNEGLMARLKIPSISLDLPVYHGTADDTLLKGLGH | 117 |
| Query: | 139 | LEGTSLPIGGNSTHTVITAHSGIPDKELFSNLKKLKKGDKFYIQNIKETIAYQVDQIKVV | 198 |
| | | LEGTSLP+GG T +VIT H G+ + +F+NL K+K GD ++ E + Y+V KVV | |
| Sbjct: | 118 | LEGTSLPVGGEGTRSVITGHRGLAEATMFTNLDKVKTGDSLIVEVFGEVLTYRVTSTKVV | 177 |
| Query: | 199 | TPDNFSDLLVVPGHDYATLLTCTPIMINTHRLLVRGHRI | 237 |
| | | P+ L V G D TL+TCTP+ INTHR+L+ G RI | |
| Sbjct: | 178 | EPEETEALRVEEGKDLLTLVTCTPLGINTHRILLTGERI | 216 |

[6699] There is also homology to SEQ ID 3740.

[6700] A related GBS gene <SEQ ID 8749> and protein <SEQ ID 8750> were also identified. Analysis of this protein sequence reveals the following:

| Lipop Possible site: −1 Crend: 10 | | |
|---|---|---|
| McG: Discrim Score: 9.66 | | |
| GvH: Signal Score (−7.5): −6.53 | | |
| Possible site: 42 | | |
| >>> Seems to have an uncleavable N-term signal seq | | |
| ALOM program | count: 2 value: −10.61 | threshold: 0.0 |

| | | | | |
|---|---|---|---|---|
| INTEGRAL | Likelihood = −10.61 | Transmembrane | 20-36 | (15-40) |
| INTEGRAL | Likelihood = −7.27 | Transmembrane | 259-275 | (258-277) |
| PERIPHERAL | Likelihood = 5.14 | 216 | | |

modified ALOM score: 2.62
*** Reasoning Step: 3
----- Final Results -----
bacterial membrane --- Certainty = 0.5246 (Affirmative) < succ>
bacterial outside --- Certainty = 0.0000 (Not Clear) < succ>
bacterial cytoplasm --- Certainty = 0.0000 (Not Clear) < succ>

[6701] The protein has homology with the following sequences in the databases:

[chemical structure]

[6702] SEQ ID 8750 (GBS212) was expressed in E. coli as a His-fusion product. SDS-PAGE analysis of total cell extract is shown in FIG. 44 (lane 4; MW 36 kDa). It was also expressed in E. coli as a GST-fusion product. SDS-PAGE analysis of total cell extract is shown in FIG. 50 (lane 2; MW 61 kDa).

[6703] Purified Thio-GBS212-His is shown in FIG. 244, lane 5.

[6704] Based on this analysis, it was predicted that these proteins and their epitopes could be useful antigens for vaccines or diagnostics.

### EXAMPLE 1202

[6705] A DNA sequence (GBSx1278) was identified in S. agalactiae <SEQ ID 3743> which encodes the amino acid sequence <SEQ ID 3744>. Analysis of this protein sequence reveals the following:

| Possible site: 29 | | | | |
|---|---|---|---|---|
| >>> Seems to have a cleavable N-term signal seq. | | | | |
| INTEGRAL | Likelihood = −10.40 | Transmembrane | 680-696 | (674-699) |

----- Final Results -----
bacterial membrane --- Certainty = 0.5161 (Affirmative) < succ>
bacterial outside --- Certainty = 0.0000 (Not Clear) < succ>
bacterial cytoplasm --- Certainty = 0.0000 (Not Clear) < succ>

[6706] The protein has homology with the following sequences in the GENPEPT database.

| >GP:CAA57459 GB:X81869 orf2 [Lactobacillus leichmannii] | | | |
|---|---|---|---|
| Identities = 84/325 (25%), Positives = 122/325 (36%), Gaps = 94/325 (28%) | | | |
| Query: | 397 | VNVVYTLKDKD----------------KTVASVSLTKTSKGTI---DLGNGIKFEVSGNF | 437 |
| | | VNV + +KDKD TV+ LTK++ T+ D G + F+ + | |
| Sbjct: | 236 | VNVPWNIKDKDTFNVVDKPDTGIDIDASTVSIDGLTKSTDYTVNKKDNGYQVVFKTT--- | 292 |
| Query: | 438 | SGKFTGLENKSYMISERVSGYGSAINLENGKVTITNTKDSDNPTPLNPTEPKVETHGKKF | 497 |
| | | S L KS I+ K T+TN D + T +G | |
| Sbjct: | 293 | SAAVQALAGKSLTITY--------------KATLTNNATPDKA--IGNTATLSIGNGTNI | 336 |
| Query: | 498 | VKTNEQGDRL--AGAQFVVKNSAGKYLALKADQSEGQKTLAAKKIALDEAIAAYNKLSAT | 555 |
| | | T G R+ GAQFV K+S + KTLA + L + + N +S | |
| Sbjct: | 337 | TSTPANGPRIYTGGAQFVKKDS------------QSNKTLAGAEFQLVKVDSNGNIVSYA | 384 |
| Query: | 556 | DQKGEKGITAKELIKTKQADYDAAFIEARTAYEWITDKARAITYTSNDQGQFEVTGLADG | 615 |
| | | Q + +Y W A TYTS+ G + GL+ | |
| Sbjct: | 385 | TQASDG------------------------SYTWNDSATEATTYTSDANGLVALKGLSYS | 420 |
| Query: | 616 | -------TYNLEETLAPAGFAKLAGNIKFVVNQGSYITGGNIDYVANSNQKDATRVENKK | 668 |
| | | +Y L E AP G+AKL +KF + QGS+ G+ + + N K+ | |
| Sbjct: | 421 | DKLDSGESYALLEIQAPDGYAKLDSPVKFSITQGSF---GDSNKITIDNTKEG------- | 470 |
| Query: | 669 | VTIPQTGGIGTILFTIIGLSIMLGA | 693 |
| | | +P TGG G +F IG+ IM+ A | |
| Sbjct: | 471 | -LLPSTGGKGIYIFLAIGIVIMIVA | 494 |

[6707] No corresponding DNA sequence was identified in S. pyogenes.

[6708] SEQ ID 3744 (GBS59) was expressed in E. coli as a His-fusion product. SDS-PAGE analysis of total cell extract is shown in FIG. 7 (lane 8; MW 120 kDa), in FIG. 11 (lane 9; MW 100 kDa) and in FIG. 13 (lane 6; MW 74 kDa).

[6709] GBS59-His was purified as shown in FIG. 193, lane 2.

[6710] Based on this analysis, it was predicted that this protein and its epitopes, could be useful antigens for vaccines or diagnostics.

### EXAMPLE 1203

[6711] A DNA sequence (GBSx1279) was identified in S. agalactiae <SEQ ID 3745> which encodes the amino acid sequence <SEQ ID 3746>. Analysis of this protein sequence reveals the following:

| Possible site: 25 | | | | |
|---|---|---|---|---|
| >>> Seems to have an uncleavable N-term signal seq | | | | |
| INTEGRAL | Likelihood = −3.13 | Transmembrane | 870-886 | (864-887) |

----- Final Results -----
bacterial membrane --- Certainty = 0.2253 (Affirmative) < succ>
bacterial outside --- Certainty = 0.0000 (Not Clear) < succ>
bacterial cytoplasm --- Certainty = 0.0000 (Not Clear) < succ>

[6712] The protein has homology with the following sequences in the GENPEPT database.

| >GP:AAD33086 GB:AF071083 fibronectin-binding protein I | | | |
|---|---|---|---|
| [Streptococcus pyogenes] | | | |
| Identities = 58/176 (32%), Positives = 83/176 (46%), Gaps = 19/176 (10%) | | | |
| Query: | 6 | KFSKILTLSLFCLSQIPLNTNVLGEST---VPENGA--KGKLVVKKTDDQNKPLSKATFV | 60 |
| | | K S +L+L+ F L + + + G S NGA +G +KK D NKPL AT | |
| Sbjct: | 8 | KLSFLLSLTGFILGLLLVFIGLSGVSVGHAETRNGANKQGSFEIKKVDQNNKPLPGATSS | 67 |
| Query: | 61 | LKTTAHPESKIEKVTAELTGEATFDNLIPGDYTLSEETAPEGYKKTNQTWQVKVESNGKT | 120 |
| | | L + + ++ T+ G NL PG YTL EETAP+GY KT++TW V V NG T | |
| Sbjct: | 68 | LTSKDGKGTSVQTFTSNDKGIVDAQNLQPGTYTLKEETAPDGYDKTSRTWTVTVYENGYT | 127 |
| Query: | 121 | TIQNSGDKNSTIGQNQEELDKQYPPTGIYEDTKESYKLEHVKGSVPN--GKSEAKA | 174 |
| | | + + I + +D S +LE+ K SV + GK+E + | |
| Sbjct: | 128 | KLVENPYNGEIISKAGS------------KDVSSSLQLENPKMSVVSKYGKTEVSS | 171 |
| Identities = 31/92 (33%), Positives = 49/92 (52%), Gaps = 14/92 (15%) | | | |
| Query: | 725 | PTITIKNEKKLGEIEFIKVDKDNNKLLLKGATFELQEFNEDYKLYLPIKNNNSKVVTGEN | 784 |
| | | P+IT+ N K++ ++ F K+ DN + L A FEL+ N N+ K+ N | |
| Sbjct: | 501 | PSITVANLKRVAQLRFKKMSTDN--VPLPEAAFELRSSN----------GNSQKLEASSN | 548 |
| Query: | 785 | --GKISYKDLKDGKYQLIEAVSPEDYQKITNK | 814 |
| | | G++ +KDL G Y L E +P+ YQ++T K | |
| Sbjct: | 549 | TQGEVHFKDLTSGTYDLYETKAPKGYQQVTEK | 580 |

[6713] No corresponding DNA sequence was identified in S. pyogenes.

[6714] SEQ ID 3746 (GBS67) was expressed in E. coli as a His-fusion product. SDS-PAGE analysis of total cell extract is shown in FIG. 7 (lane 10; MW 140 kDa), in FIG. 11 (lane 10; MW 150 kDa) and in FIG. 12 (lane 6; MW 95.3 kDa).

[6715] GBS67-His was purified as shown in FIG. 192, lane 10.

[6716] Based on this analysis, it was predicted that this protein and its epitopes, could be useful antigens for vaccines or diagnostics.

### EXAMPLE 1204

[6717] A DNA sequence (GBSx1280) was identified in S. agalactiae <SEQ ID 3747> which encodes the amino acid sequence <SEQ ID 3748>. This protein is predicted to be Nra. Analysis of this protein sequence reveals the following:

Possible site: 34
>>> Seems to have no N-terminal signal sequence
----- Final Results -----
bacterial cytoplasm --- Certainty = 0.2020 (Affirmative) < succ>
bacterial membrane --- Certainty = 0.0000 (Not Clear) < succ>
bacterial outside --- Certainty = 0.0000 (Not Clear) < succ>

[6718] A related GBS nucleic acid sequence <SEQ ID 9979> which encodes amino acid sequence <SEQ ID 9980> was also identified.

[6719] A related DNA sequence was identified in S. pyogenes <SEQ ID 3749> which encodes the amino acid sequence <SEQ ID 3750>. Analysis of this protein sequence reveals the following:

| Possible site: 58 | | | | |
|---|---|---|---|---|
| >>> Seems to have no N-terminal signal sequence | | | | |
| INTEGRAL | Likelihood = −1.75 | Transmembrane | 393-409 | (392-409) |

----- Final Results -----
bacterial membrane --- Certainty = 0.1702 (Affirmative) < succ>
bacterial outside --- Certainty = 0.0000 (Not Clear) < succ>
bacterial cytoplasm --- Certainty = 0.0000 (Not Clear) < succ>

[6720] An alignment of the GAS and GBS proteins is shown below.

| Identities = 122/325 (37%), Positives = 186/325 (56%), Gaps = 5/325 (1%) | | | |
|---|---|---|---|
| Query: | 7 | LIENYLEKDILNQIKLLTLCY--DYYPSITLDKSCHQLGLSELLIRKYCHDLTTLFNSQL | 64 |
| | | LIE YLE I ++ +L+ L + Y P + + + GL+ L + YC +L F L | |
| Sbjct: | 1 | LIEKYLESSIESKCQLIVLFFKTSYLP---ITEVAEKTGLTFLQLNHYCEELNAFFPGSL | 57 |
| Query: | 65 | SLNIEKSTIVYQSNGVTREQAFKYIYHQSHVLQLLKFLITNDSGRLPLTYFSEKFGLSCA | 124 |
| | | S+ I+K I Q +E +Y S+VLQLL FLI N S PLT F+ LS + | |
| Sbjct: | 58 | SMTIQKRMISCQFTHPFKETYLYQLYASSNVLQLLAFLIKNGSHSRPLTDFARSHFLSNS | 117 |
| Query: | 125 | TAYRIRKHISPLLEKLGFQIVKNTITGDEYRIRYLIAFLNAQFGIEVYPMSKMDKLLIKR | 184 |
| | | +AYR+R+ + PLL ++ KN I G+EYRIRYLIA L ++FGI+VY +++ DK I | |
| Sbjct: | 118 | SAYRMREALIPLLRNFELKLSKNKIVGEEYRIRYLIALLYSKFGIKVYDLTQQDKNTIHS | 177 |
| Query: | 185 | LLLEHSTTFTASHYFPNTFIFFDTLLSLSWKRINYNVVVPYSSLFTELQNIFIYDTLQYC | 244 |
| | | L ST S + +F F+D LL+LSWKR ++V +P + +F +L+ +F+YD+L+ | |
| Sbjct: | 178 | FLSHSSTHLKTSPWLSESFSFYDILLALSWKRHQFSVTIPQTRIFQQLKKLFVYDSLKKS | 237 |
| Query: | 245 | VKNVIIDSFKINLKKDDIDYIFLAYLTSHNSFSNPNWTEKRIDNVIAIFENYPKFQKLLQ | 304 |
| | | ++I ++N D+DY++L Y+T++NSF++ WT + I +FE F+ LL | |
| Sbjct: | 238 | SHDIIETYCQLNFSAGDLDYLYLIYITANNSFASLQWTPEHIRQYCQLFEENDTFRLLLN | 297 |
| Query: | 305 | PLKDALPLSGSYHDELVKVAIFFSE | 329 |
| | | P+ LP LVK +FFS+ | |
| Sbjct: | 298 | PIITLLPNLKEQKASLVKALMFFSK | 322 |

[6721] Based on this analysis, it was predicted that these proteins and their epitopes could be useful antigens for vaccines or diagnostics.

### EXAMPLE 1205

[6722] A DNA sequence (GBSx1281) was identified in S. agalactiae <SEQ ID 3751> which encodes the amino acid sequence <SEQ ID 3752>. This protein is predicted to be galactosyltransferase. Analysis of this protein sequence reveals the following:

Possible site: 21
>>> Seems to have no N-terminal signal sequence (or aa 1-22)
----- Final Results -----
bacterial cytoplasm --- Certainty = 0.1168 (Affirmative) < succ>
bacterial membrane --- Certainty = 0.0000 (Not Clear) < succ>
bacterial outside --- Certainty = 0.0000 (Not Clear) < succ>

[6723] The protein has homology with the following sequences in the GENPEPT database.

| >GP:AAB99071 GB:U67549 galactosyltransferase isolog [Methanococcus | | | |
|---|---|---|---|
| jannaschii] | | | |
| Identities = 108/395 (27%), Positives = 196/395 (49%), Gaps = 28/395 (7%) | | | |
| Query: | 4 | KVKTVAVFSGYYLPFLGGIERYTDKMTADLVK-RGYRVVIVTTNHGDLPIIDEDKGR--- | 59 |
| | | K+K + +F GYY+P +GG+E + D+ T L + Y + I N +P E + R | |
| Sbjct: | 3 | KIKLI-IFPGYYIPHIGGLETHVDEFTKHLSEDENYDIYIFAPN---IPKYKEFEIRHNN | 58 |
| Query: | 60 | -KIYRLPTKNIVKQRYPIINK-NREYNTLMKYVSDENIDFVICNTRFQLTTLEGLSFAKN | 117 |
| | | K+YR P I+ YP+ N N ++ + + + D V+ TRF TL G FAK | |
| Sbjct: | 59 | VKVYRYPAFEIIPN-YPVPNIFNIKFWRMFFNLYKIDFDIVMTRTRFFSNTLLGFIFAKL | 117 |
| Query: | 118 | HHLPS--IVLDHGSSHFSVNNRFLDFFGAIYEHLLTARVKHYRPDFYAVSKRSVEWLKHF | 175 |
| | | I ++HGS+ + + F + Y+ + + A+SK ++ | |
| Sbjct: | 118 | RFKKKKLIHVEHGSAFVKLESEFKNKLSYFYDKTIGKLIFKKADYVVAISKAVKNFILEN | 177 |
| Query: | 176 | NIEAKGV--IYNSVS----ESLGSDFAGTAYLEKSADDIFITYAGRIIKEKGIELLLEAF | 229 |
| | | + K + IY + ES+G D EK + I + + GR+ K KG+E +++A+ | |
| Sbjct: | 178 | FVNDKDIPIIYRGLEIEKIESIGED---KKIKEKFKNKIKLCFVGRLYKWKGVENIIKAY | 234 |
| Query: | 230 | S--MSQYSENVYLQIAGDGPELAHLKE---KYQSKQINFLGKLNFEQTMSLMAQTDIFVY | 284 |
| | | E + L + G G +L LK+ Y + I F GK++FE+ ++++ +DI+++ | |
| Sbjct: | 235 | VDLPKDLKEKIILIVVGYGEDLERLKKLAGNYLNNGIYFTGKVDFEKAIAIVKASDIYIH | 294 |
| Query: | 285 | PSMYPEGLPTSILEAGLLSSAIIATDRGGTVEVIDSPELGIIMEENT-QSLHESLDLLVK | 343 |
| | | S GL +S+L+A AI+A+ G EV+ GI++++N+ + + + L++ | |
| Sbjct: | 295 | SSYKGGGLSSSLLQAMCCGKAIVASPYEGADEVVIDGYNGILLKDNSPEEIKRGIIKLIE | 354 |
| Query: | 344 | DKALREKLQQNIAKRIKEHFTWEKTVEKLDYIIQK | 378 |
| | | + LR+ +N IKE+F W+K+V++ I ++ | |
| Sbjct: | 355 | NNNLRKIYGENAKNFIKENFNWKKSVKEYKKIFER | 389 |

[6724] No corresponding DNA sequence was identified in S. pyogenes.

[6725] SEQ ID 3752 (GBS258) was expressed in E. coli as a His-fusion product. SDS-PAGE analysis of total cell extract is shown in FIG. 45 (lane 2; MW 43 kDa). It was also expressed in E. coli as a GST-fusion product. SDS-PAGE analysis of total cell extract is shown in FIG. 48 (lane 7; MW 67.9 kDa).

[6726] Based on this analysis, it was predicted that this protein and its epitopes, could be useful antigens for vaccines or diagnostics.

### EXAMPLE 1206

[6727] A DNA sequence (GBSx1282) was identified in S. agalactiae <SEQ ID 3753> which encodes the amino acid sequence <SEQ ID 3754>. Analysis of this protein sequence reveals the following:

Possible site: 31
>>> Seems to have no N-terminal signal sequence
----- Final Results -----
bacterial cytoplasm --- Certainty = 0.1182 (Affirmative) < succ>
bacterial membrane --- Certainty = 0.0000 (Not Clear) < succ>
bacterial outside --- Certainty = 0.0000 (Not Clear) < succ>

[6728] The protein has homology with the following sequences in the GENPEPT database.

| >GP:CAB52237 GB:Z98171 EpsQ protein [Streptococcus thermophilus] | | | |
|---|---|---|---|
| Identities = 112/278 (40%), Positives = 163/278 (58%), Gaps = 2/278 (0%) | | | |
| Query: | 1 | MKYLAGIVTFNPNIERLDQNIRAIYPQVSHIYIVDNGSKNKEEISQLVADYNEEGHLTVD | 60 |
| | | M AGIV FNP+I+RL +NI A+ Q +H+Y+VDNGS N +E+ L+ YN+ +++ | |
| Sbjct: | 1 | MDISAGIVLFNPDIKRLKENIDAVIIQCTHLYLVDNGSGNVDEVKGLLNQYNQS-KISIL | 59 |
| Query: | 61 | YLTENKGIAYALNCIGQFAVAQEFDWFLTLDQDSVVLGDLIDNYENYLHLPKVGMLSCLY | 120 |
| | | + EN+GIA ALN + A + FDW LTLDQDSVV +++ +E Y++ VG+L + | |
| Sbjct: | 60 | WNRENQGIAKALNQLTSAAQKEGFDWILTLDQDSVVPSNIVGEFEKYINNSSVGILCPII | 119 |
| Query: | 121 | QDMNRENLVMQEFDYKEIEECITSAALMKTSVFEETSGFAEEMFIDFVDSEMNYRLSEMG | 180 |
| | | D N++ + D EI+ECITS +L+ + E GF E MFID VD ++ YRL + G | |
| Sbjct: | 120 | CDRNKDEEIKINEDCTEIDECITSGSLLNIKAWSEIGGFDERMFIDGVDFDICYRLRQRG | 179 |
| Query: | 181 | YKTYQVNFIGLLHEIGHSSRVKKFGHVFHVLNHSPFRKYYMIRNAIYIIKKYGKKKRYKY | 240 |
| | | YK Y ++ + LLHE+GH + V NHS FRKYY+ RN IY KK | |
| Sbjct: | 180 | YKIYCIHSVVLLHELGHIEYHRFLFWKVLVKNHSAFRKYYIARNIIYTAKKRRSTLLVVK | 239 |
| Query: | 241 | LVFMRNEFVRVLV-AEEQKSKKIVAMIKGLKDGLLMKV | 277 |
| | | + + + +++ EE K KI + +G+ DG KV | |
| Sbjct: | 240 | GLLQEIKLIGIVIFYEEDKLNKIRCICRGIYDGFKGKV | 277 |

[6729] No corresponding DNA sequence was identified in S. pyogenes.

[6730] Based on this analysis, it was predicted that this protein and its epitopes, could be useful antigens for vaccines or diagnostics.

### EXAMPLE 1207

[6731] A DNA sequence (GBSx1283) was identified in S. agalactiae <SEQ ID 3755> which encodes the amino acid sequence <SEQ ID 3756>. This protein is predicted to be EpsU protein (rfbX). Analysis of this protein sequence reveals the following:

| Possible site: 54 | | | | |
|---|---|---|---|---|
| >>> Seems to have an uncleavable N-term signal seq | | | | |
| INTEGRAL | Likelihood = −8.44 | Transmembrane | 357-373 | (352-387) |
| INTEGRAL | Likelihood = −7.59 | Transmembrane | 88-104 | (79-107) |
| INTEGRAL | Likelihood = −7.32 | Transmembrane | 440-456 | (433-465) |
| INTEGRAL | Likelihood = −6.48 | Transmembrane | 246-262 | (245-263) |
| INTEGRAL | Likelihood = −4.78 | Transmembrane | 294-310 | (290-312) |
| INTEGRAL | Likelihood = −3.88 | Transmembrane | 164-180 | (162-183) |
| INTEGRAL | Likelihood = −3.56 | Transmembrane | 144-160 | (136-161) |
| INTEGRAL | Likelihood = −2.87 | Transmembrane | 317-333 | (316-334) |
| INTEGRAL | Likelihood = −2.71 | Transmembrane | 374-390 | (374-393) |
| INTEGRAL | Likelihood = −0.96 | Transmembrane | 44-60 | (44-62) |
| INTEGRAL | Likelihood = −0.80 | Transmembrane | 15-31 | (15-32) |

----- Final Results -----
bacterial membrane --- Certainty = 0.4376 (Affirmative) < succ>
bacterial outside --- Certainty = 0.0000 (Not Clear) < succ>
bacterial cytoplasm --- Certainty = 0.0000 (Not Clear) < succ>

[6732] The protein has homology with the following sequences in the GENPEPT database.

| >GP: CAB52225 GB: Z98171 EpsU protein [Streptococcus thermophilus] | | | |
|---|---|---|---|
| Identities = 189/462 (40%), Positives = 313/462 (66%) | | | |
| Query: | 1 | MKLLKNMFYNTSYQLLTLLLPLVTVPYVSRVLSPQGIGINAYTSSIVMYFTLFGALGISL | 60 |
| | | M+++KN YN YQ+ +++PL+T+PY+SR+L P GIGIN+YT+SIV YF LFG++G+ L | |
| Sbjct: | 1 | MQIVKNYLYNAIYQVFIIIVPLLTIPYLSRILGPSGIGINSYTNSIVQYEVLFGSIGLGL | 60 |
| Query: | 61 | YGNREIAFVQSNKYKRSKIFWELVVLKLASVSIATLLFFGFVLLTNEWQLFYLIQGINLL | 120 |
| | | YGNR+IAFV+ N+ K SK+F+E+ +L+L ++ +A LF F+++ ++ +YL Q I ++ | |
| Sbjct: | 61 | YGNRQIAFVRDNQVKMSKVFYEIFILRLFTICLAYFLFVAFLIINGQYYAYYLSQSIAIV | 120 |
| Query: | 121 | ATATDISWYFIGVEDFKIIVIRNTIVKLITVVLTFLVVKTPDDLALYMFLIAFASLLGNL | 180 |
| | | A A DISW F+G+E+FK+IV+RN IVKL+ + FL VK+ +DL +Y+ + ++L+GNL | |
| Sbjct: | 121 | AAAFDISWAFMGIENFKVIVLRNFIVKLLALFSIFLFVKSYNDLNIYILITVLSTLIGNL | 180 |
| Query: | 181 | TVWHHLKHEIIKIPFSRLDILIHLRPTLMLFLPQITMQIYLSLNKSMLGAMDSVVSAGYF | 240 |
| | | T + L ++K+ + L + HL+ +L++F+PQI +QIY LNK+MLG++DSV S+G+F | |
| Sbjct: | 181 | TFFPSLHRYLVKVNYRELRPIKHLKQSLVMFIPQIALQIYWVLNKTMLGSLDSVTSSGFF | 240 |
| Query: | 241 | DQSDKIIRILFTIVSAIGGVFLPRLSSLFSSGKEKQAKALLLKLVDLSNAISMLMIAGVV | 300 |
| | | DQSDKI++++ IV+A G V LPR+++ F+ + + K + +AIS+ M+ G++ | |
| Sbjct: | 241 | DQSDKIVKLVLAIVTATGTVMLPRVANAFAHREYSKIKEYMYAGFSFVSAISIPMMFGLI | 300 |
| Query: | 301 | GVSSTFAVFFFGKGYEAVGPLMAVESLMIICISYGNALGTQYLLASRRTKAYTMSAVIGL | 360 |
| | | ++ F FF + V P++ +ES+ II I++ NA+G QYLL + + K+YT+S +IG | |
| Sbjct: | 301 | AITPKFVPLFFTSQFSDVIPVLMIESIAIIFIAWSNAIGNQYLLPTNQNKSYTVSVIIGA | 360 |
| Query: | 361 | VANVVLNILLIPILGAMGAIISTVITEFIVSLYQAISLRDVFTFKELTRGMLRYLIAATL | 420 |
| | | + N++LNI LI LGA+GA I+TVI+E V++YQ + L + +YLIA + | |
| Sbjct: | 361 | IVNLMLNIPLIIYLGAVGASIATVISEMSVTVYQLFIIHKQLNLHTLFSDLSKYLIAGLV | 420 |
| Query: | 421 | SGAVLYYINTQMSVSLVNYVIQSLVAVTIYVGIVFITKAPVI | 462 |
| | | +++ I+ S + +++ V + IY+ ++ KA +I | |
| Sbjct: | 421 | MFLIVFKISLLTPTSWIFILLEITVGIIIYIVLLIFLKAEII | 462 |

[6733] No corresponding DNA sequence was identified in S. pyogenes.

[6734] Based on this analysis, it was predicted that this protein and its epitopes, could be useful antigens for vaccines or diagnostics.

### EXAMPLE 1208

[6735] A DNA sequence (GBSx1284) was identified in S. agalactiae <SEQ ID 3757> which encodes the amino acid sequence <SEQ ID 3758>. Analysis of this protein sequence reveals the following:

Possible site: 23
>>> Seems to have no N-terminal signal sequence
----- Final Results -----
bacterial cytoplasm --- Certainty = 0.1742 (Affirmative) < succ>
bacterial membrane --- Certainty = 0.0000 (Not Clear) < succ>
bacterial outside --- Certainty = 0.0000 (Not Clear) < succ>

[6736] The protein has no significant homology with any sequences in the GENPEPT database.

[6737] No corresponding DNA sequence was identified in S. pyogenes.

[6738] Based on this analysis, it was predicted that this protein and its epitopes, could be useful antigens for vaccines or diagnostics.

### EXAMPLE 1209

[6739] A DNA sequence (GBSx1285) was identified in S. agalactiae <SEQ ID 3759> which encodes the amino acid sequence <SEQ ID 3760>. Analysis of this protein sequence reveals the following:

Possible site: 25
>>> Seems to have an uncleavable N-term signal seq
----- Final Results -----
bacterial membrane --- Certainty = 0.0000 (Not Clear) < succ>
bacterial outside --- Certainty = 0.0000 (Not Clear) < succ>
bacterial cytoplasm --- Certainty = 0.0000 (Not Clear) < succ>

[6740] The protein has no significant homology with any sequences in the GENPEPT database.

[6741] No corresponding DNA sequence was identified in S. pyogenes.

[6742] Based on this analysis, it was predicted that this protein and its epitopes, could be useful antigens for vaccines or diagnostics.

### EXAMPLE 1210

[6743] A DNA sequence (GBSx1286) was identified in S. agalactiae <SEQ ID 3761> which encodes the amino acid sequence <SEQ ID 3762>. Analysis of this protein sequence reveals the following:

| Possible site: 34 | | | |
|---|---|---|---|
| >>> Seems to have no N-terminal signal sequence | | | |
| INTEGRAL | Likelihood = −10.56 | Transmembrane | 214-230 (210-236) |
| INTEGRAL | Likelihood = −10.03 | Transmembrane | 364-380 (361-386) |
| INTEGRAL | Likelihood = −7.96 | Transmembrane | 272-288 (271-291) |
| INTEGRAL | Likelihood = −6.95 | Transmembrane | 23-39 (20-41) |
| INTEGRAL | Likelihood = −5.57 | Transmembrane | 191-207 (189-209) |
| INTEGRAL | Likelihood = −5.15 | Transmembrane | 434-450 (425-451) |
| INTEGRAL | Likelihood = −4.25 | Transmembrane | 143-159 (138-162) |
| INTEGRAL | Likelihood = −3.13 | Transmembrane | 167-183 (166-186) |
| INTEGRAL | Likelihood = −1.44 | Transmembrane | 400-416 (400-416) |
| INTEGRAL | Likelihood = −1.33 | Transmembrane | 333-349 (333-349) |
| INTEGRAL | Likelihood = −0.80 | Transmembrane | 232-248 (232-251) |

----- Final Results -----
bacterial membrane --- Certainty = 0.5225 (Affirmative) < succ>
bacterial outside --- Certainty = 0.0000 (Not Clear) < succ>
bacterial Cytoplasm --- Certainty = 0.0000 (Not Clear) < succ>

[6744] The protein has no significant homology with any sequences in the GENPEPT database.

[6745] No corresponding DNA sequence was identified in S. pyogenes.

[6746] Based on this analysis, it was predicted that this protein and its epitopes, could be useful antigens for vaccines or diagnostics.

### EXAMPLE 1211

[6747] A DNA sequence (GBSx1287) was identified in S. agalactiae <SEQ ID 3763> which encodes the amino acid sequence <SEQ ID 3764>. This protein is predicted to be rhamnosyltransferase. Analysis of this protein sequence reveals the following:

Possible site: 17
>>> Seems to have no N-terminal signal sequence
----- Final Results -----
bacterial cytoplasm --- Certainty = 0.1792 (Affirmative) < succ>
bacterial membrane --- Certainty = 0.0000 (Not Clear) < succ>
bacterial outside --- Certainty = 0.0000 (Not Clear) < succ>

[6748] A related GBS nucleic acid sequence <SEQ ID 9981> which encodes amino acid sequence <SEQ ID 9982> was also identified.

[6749] The protein has homology with the following sequences in the GENPEPT database.

| >GP: AAF18951 GB: AF155805 Cps9H [Streptococcus suis] | | | |
|---|---|---|---|
| Identities = 53/116 (45%), Positives = 75/116 (63%), Gaps = 4/116 (3%) | | | |
| Query: | 6 | VLMATYNGQGFIHDQLDSIRNQTLRPDYVLMRDDGSTDDTVKVVEDYIKEHRLDGWSITS | 65 |
| | | VLMATYNG FI QLDSIRNQ++ D V++ DD STDDT+K+++DYIK++ LD W ++ | |
| Sbjct: | 4 | VLMATYNGSPFIIKQLDSIRNQSVSADKVIIWDDCSTDDTIKIIKDYIKKYSLDSWVVSQ | 63 |
| Query: | 66 | NDKNLGWRLNFRQLLIDVLAYEVDYVFFSDQDDTWYHHKNKMQVDIMEERQDINLL | 121 |
| | | N N G F L + VFFSDQDD W HK + + I +R++++++ | |
| Sbjct: | 64 | NKSNQGHYQTFINL---TKLVQEGIVFFSDQDDIWDCHKIETMLPIF-DRENVSMV | 115 |

[6750] Based on this analysis, it was predicted that these proteins and their epitopes could be useful antigens for vaccines or diagnostics.

### EXAMPLE 1212

[6751] A DNA sequence (GBSx1288) was identified in S. agalactiae <SEQ ID 3765> which encodes the amino acid sequence <SEQ ID 3766>. This protein is predicted to be rhamnosyltransferase. Analysis of this protein sequence reveals the following:

Possible site: 13
>>> Seems to have no N-terminal signal sequence
----- Final Results -----
bacterial cytoplasm --- Certainty = 0.1278 (Affirmative) < succ>
bacterial membrane --- Certainty = 0.0000 (Not Clear) < succ>
bacterial outside --- Certainty = 0.0000 (Not Clear) < succ>

[6752] A related GBS nucleic acid sequence <SEQ ID 9983> which encodes amino acid sequence <SEQ ID 9984> was also identified.

[6753] The protein has homology with the following sequences in the GENPEPT database.

| >GP: AAF18951 GB: AF155805 Cps9H [Streptococcus suis] | | | |
|---|---|---|---|
| Identities = 57/146 (39%), Positives = 81/146 (55%), Gaps = 8/146 (5%) | | | |
| Query: | 10 | VLMATYNGEIFISEQLDSIRQQTLKPDYVLLRDDCSTDETVNVVNNYIAKHELEGWKIVK | 69 |
| | | VLMATYNG FI +QLDSIR Q++ D V++ DDCSTD+T+ ++ +YI K+ L+ W + + | |
| Sbjct: | 4 | VLMATYNGSPFIIKQLDSIRNQSVSADKVIIWDDCSTDDTIKIIKDYIKKYSLDSWVVSQ | 63 |
| Query: | 70 | NDKNLGWRLNFRQLLIDVLAYEVDYVFFSDQDDIWYLDKNERQFAIMSDKPQIEVLSADV | 129 |
| | | N N G F L + VFFSDQDDIW K E I D+ + + V | |
| Sbjct: | 64 | NKSNQGHYQTFINL---TKLVQEGIVFFSDQDDIWDCHKIETMLPIF-DRENVSM----V | 115 |
| Query: | 130 | DIKTMSTEASVPHFLTFSSSDRISQY | 155 |
| | | K+ + + + +SDRI+ Y | |
| Sbjct: | 116 | FCKSRLIDENGNIISSPDTSDRINTY | 141 |

[6754] Based on this analysis, it was predicted that these proteins and their epitopes could be useful antigens for vaccines or diagnostics.

### EXAMPLE 1213

[6755] A DNA sequence (GBSx1289) was identified in S. agalactiae <SEQ ID 3767> which encodes the amino acid sequence <SEQ ID 3768>. This protein is predicted to be dTDP-glucose 4-6-dehydratase (galE). Analysis of this protein sequence reveals the following:

| Possible site: 44 | | | |
|---|---|---|---|
| >>> Seems to have no N-terminal signal sequence | | | |
| INTEGRAL | Likelihood = −2.02 | Transmembrane | 250-266 (250-266) |

----- Final Results -----
bacterial membrane --- Certainty = 0.1808 (Affirmative) < succ>
bacterial outside --- Certainty = 0.0000 (Not Clear) < succ>
bacterial cytoplasm --- Certainty = 0.0000 (Not Clear) < succ>

[6756] A related GBS nucleic acid sequence <SEQ ID 9985> which encodes amino acid sequence <SEQ ID 9986> was also identified.

[6757] The protein has homology with the following sequences in the GENPEPT database.

| >GP: CAC14890 GB: AJ295156 d-TDP-glucose dehydratase [Phragmites | | | |
|---|---|---|---|
| australis] | | | |
| Identities = 108/327 (33%), Positives = 170/327 (51%), Gaps = 22/327 (6%) | | | |
| Query: | 29 | ANKGVLISGSNSMLASYMVFLLAYLNETRNYQTQIIATARNIEKARDKFSDLVGKDYFTL | 88 |
| | | AN +L++G + S++V L N + ++I ++D +G F L | |
| Sbjct: | 33 | ANLRILVTGGAGFIGSHLVDKLM-----ENEKHEVIVADNFFTGSKDNLKKWIGHPRFEL | 87 |
| Query: | 89 | IPYDVEERLEYDGKVDYIIHAASNASPTAILSNPVSIIKANTIGTLNLLDFAKEKTIENF | 148 |
| | | I +DV + L + VD I H A ASP NPV IK N IGTLN+L AK + | |
| Sbjct: | 88 | IRHDVTQPLLVE--VDQIYHLACPASPIFYKHNPVKTIKTNVIGTLNMLGLAK-RVGARI | 144 |
| Query: | 149 | LFLSTREVYGTSIKEVIDEEAYGGFDILATRACYPESKRMAETLLQSYYDQYKVPFTIAR | 208 |
| | | L ST EVYG ++ E +G + + R+CY E KR+AETL+ Y+ Q+ + IAR | |
| Sbjct: | 145 | LLTSTSEVYGDPLEHPQTEAYWGNVNPIGVRSCYDEGKRVAETLMFDYHRQHGIEIRIAR | 204 |
| Query: | 209 | IAHSFGPGMELGNDGRIMNDLLSNVIDGKDIVLKSSGTAERAFCYLADAVSGLFTILLNG | 268 |
| | | I +++GP M + +DGR++++ ++ + G + ++ GT R+FCY+AD V GL L+NG | |
| Sbjct: | 205 | IFNTYGPRMNI-DDGRVVSNFIAQAVRGDPLTVQKPGTQTRSFCYVADMVDGLIK-LMNG | 262 |
| Query: | 269 | EVGQAYNVANEDQPIMIKDLAQKLVDLFSDKNISVVFDIPKTMSAGYSKMGRTR---LTM | 325 |
| | | N+ N + M+ +LA+K+ +L + ++ TM+ R R +T | |
| Sbjct: | 263 | NNTGPINLGNPGEFTML-ELAEKVKELINP-------EVTVTMTENTPDDPRQRKPDITK | 314 |
| Query: | 326 | AKLEALGWKREVSLESGILKTVQAFEE | 352 |
| | | AK E LGW+ +V L G++ F E | |
| Sbjct: | 315 | AK-EVLGWEPKVVLRDGLVLMEDDFRE | 340 |

[6758] Based on this analysis, it was predicted that these proteins and their epitopes could be useful antigens for vaccines or diagnostics.

### EXAMPLE 1214

[6759] A DNA sequence (GBSx1290) was identified in S. agalactiae <SEQ ID 3769> which encodes the amino acid sequence <SEQ ID 3770>. Analysis of this protein sequence reveals the following:

Possible site: 53
>>> Seems to have an uncleavable N-term signal seq
----- Final Results -----
bacterial membrane --- Certainty = 0.0000 (Not Clear) < succ>
bacterial outside --- Certainty = 0.0000 (Not Clear) < succ>
bacterial cytoplasm --- Certainty = 0.0000 (Not Clear) < succ>

[6760] A related GBS nucleic acid sequence <SEQ ID 9987> which encodes amino acid sequence <SEQ ID 9988> was also identified.

[6761] The protein has homology with the following sequences in the GENPEPT database.

| >GP: CAB11866 GB: Z99104 similar to hypothetical proteins [Bacillus | | | |
|---|---|---|---|
| subtilis] | | | |
| Identities = 77/231 (33%), Positives = 131/231 (56%), Gaps = 6/231 (2%) | | | |
| Query: | 13 | VIFAGGVGRRMNTKGKPKQFLEVHGKPIIVHTIDIFQNTEAIDAVVVVCVSDWLDYMNNL | 72 |
| | | VI A G G+RM G+ K F+E+ G P+I+HT+ +F + D +++V ++ L | |
| Sbjct: | 6 | VIPAAGQGKRMKA-GRNKLFIELKGDPVIIHTLRVFDSHRQCDKIILVINEQEREHFQQL | 64 |
| Query: | 73 | VERFNLTKVKAVVAGGETGQMSIFKGLEAAEQLATDDAVVLIHDGVRPLINEEVINANIQ | 132 |
| | | + + +VAGG+ Q S++KGL+A +Q + +VL+HDG RP I E I+ I | |
| Sbjct: | 65 | LSDYPFQTSIELVAGGDERQHSVYKGLKAVKQ----EKIVLVHDGARPFIKHEQIDELIA | 120 |
| Query: | 133 | SVKETGSAVTSVRAKETVVLVNDSSKISEVVDRTRSFIAKAPQSFYLSDILSVERDAISK | 192 |
| | | ++TG+A+ +V K+T+ V D ++SE ++R+ + +PQ+F LS ++ +A K | |
| Sbjct: | 121 | EAEQTGAAILAVPVKDTIKRVQDL-QVSETIERSSLWAVQTPQAFRLSLLMKAHAEAERK | 179 |
| Query: | 193 | GITDAIDSSTLMGMYNRELTIVEGPYENIKITTPDDFYMFKALYDARENEQ | 243 |
| | | G D+S + M + +VEG Y NIK+TTPDD +A+ ++ + | |
| Sbjct: | 180 | GFLGTDDASLVEQMEGGSVRVVEGSYTNIKLTTPDDLTSAEAIMESESGNK | 230 |

[6762] No corresponding DNA sequence was identified in S. pyogenes.

[6763] SEQ ID 3770 (GBS647) was expressed in E. coli as a GST-fusion product. SDS-PAGE analysis of total cell extract is shown in FIG. 130 (lane 9 & 10; MW 55.9 kDa+lane 8; MW 27 kDa) and in FIG. 186 (lane 5; MW 56 kDa). It was also expressed in E. coli as a His-fusion product. SDS-PAGE analysis of total cell extract is shown in FIG. 130 (lane 12; MW 31 kDa), in FIG. 140 (lane 9; MW 31 kDa) and in FIG. 178 (lane 6; MW 31 kDa).

[6764] Purified GBS647-GST is shown in FIG. 243, lane 4; purified GBS647-His is shown in FIG. 229, lane 6.

[6765] Based on this analysis, it was predicted that these proteins and their epitopes could be useful antigens for vaccines or diagnostics.

### EXAMPLE 1215

[6766] A DNA sequence (GBSx1291) was identified in S. agalactiae <SEQ ID 3771> which encodes the amino acid sequence <SEQ ID 3772>. This protein is predicted to be LicD1. Analysis of this protein sequence reveals the following:

Possible site: 41
>>> Seems to have no N-terminal signal sequence
----- Final Results -----
bacterial cytoplasm --- Certainty = 0.2647 (Affirmative) < succ>
bacterial membrane --- Certainty = 0.0000 (Not Clear) < succ>
bacterial outside --- Certainty = 0.0000 (Not Clear) < succ>

[6767] A related GBS nucleic acid sequence <SEQ ID 9989> which encodes amino acid sequence <SEQ ID 9990> was also identified.

[6768] The protein has homology with the following sequences in the GENPEPT database.

| >GP: AAD37094 GB: AF106539 LicD2 [Streptococcus pneumoniae] | | | |
|---|---|---|---|
| Identities = 85/271 (31%) , Positives = 130/271 (47%) , Gaps = 15/271 (5%) | | | |
| Query: | 1 | MKEMTVSEIREVQLEMLAYIDKVARDNKIEYSLGGGSLLGAMRHKGFIPWDDDIDLMLER | 60 |
| | | M+ + EI+E+QL +L YID+ + + I Y L G++LGA+RHKG IPWDDDID+ L R | |
| Sbjct: | 1 | MQYLEKKEIKEIQLALLDYIDETCKKHDIPYFLSYGTMLGAIRHKGMIPWDDDIDISLYR | 60 |
| Query: | 61 | SQYERLMKALADANNSDFKLLHHSVEKNLW---PFAKLYHTKSMYLSKTDRIHPWTGIFI | 117 |
| | | YERL+K + + N+ +K+L S + + W FA + T ++ T +FI | |
| Sbjct: | 61 | EDYERLLKIIEEENHPRYKVL--SYDTSSWYFHNFASILDTSTVIEDHVKYKRHDTSLFI | 118 |
| Query: | 118 | DIFPLDRLPESAEERQRFFKKVHSAAANLMCTTYPNFASGSRKLYANARLILGLP-RFIA | 176 |
| | | D+FP+DR + + + + + A L G KL RL RF+ | |
| Sbjct: | 119 | DVFPIDRFTDLSIVDKSY---KYVALRQLAYIKKSRAVHGDSKLKDFLRLCSWYALRFVN | 175 |
| Query: | 177 | YHGQAKKRAEIVDQVMETYNNQEVPYMGYTD-SRYRLKEYFPREIFSEYEDVMFENIKTR | 235 |
| | | KK +DQ+++ Y G + +KE FP + F E FE | |
| Sbjct: | 176 | PRYFYKK----IDQLVKNAVTNTPQYEGGVGIGKEGMKEIFPVDTFKELILTEFEGRMLP | 231 |
| Query: | 236 | KIKNEHAYLNQLYGGSYMELPPESKRESHSY | 266 |
| | | K +L Q+Y G YM P + +E +S+ | |
| Sbjct: | 232 | VPKKYDQFLTQMY-GDYMTPPSKEMQEWYSH | 261 |

[6769] No corresponding DNA sequence was identified in S. pyogenes.

[6770] Based on this analysis, it was predicted that these proteins and their epitopes could be useful antigens for vaccines or diagnostics.

### EXAMPLE 1216

[6771] A DNA sequence (GBSx1292) was identified in S. agalactiae <SEQ ID 3773> which encodes the amino acid sequence <SEQ ID 3774>. Analysis of this protein sequence reveals the following:

| Possible site: 18 | | | |
|---|---|---|---|
| >>> May be a lipoprotein | | | |
| INTEGRAL | Likelihood = −12.05 | Transmembrane | 554-570 (547-575) |

----- Final Results -----
bacterial membrane --- Certainty = 0.5819 (Affirmative) < succ>
bacterial outside --- Certainty = 0.0000 (Not Clear) < succ>
bacterial cytoplasm --- Certainty = 0.0000 (Not Clear) < succ>

[6772] The protein has no significant homology with any sequences in the GENPEPT database.

[6773] No corresponding DNA sequence was identified in S. pyogenes.

[6774] SEQ ID 3774 (GBS182d) was expressed in E. coli as a His-fusion product. SDS-PAGE analysis of total cell extract is shown in FIG. 184 (lane 8; MW 62 kDa).

[6775] Based on this analysis, it was predicted that this protein and its epitopes, could be useful antigens for vaccines or diagnostics.

### EXAMPLE 1217

[6776] A DNA sequence (GBSx1293) was identified in S. agalactiae <SEQ ID 3775> which encodes the amino acid sequence <SEQ ID 3776>. Analysis of this protein sequence reveals the following:

Possible site: 13
>>> Seems to have no N-terminal signal sequence
----- Final Results -----
bacterial cytoplasm --- Certainty = 0.4653 (Affirmative) < succ>
bacterial membrane --- Certainty = 0.0000 (Not Clear) < succ>
bacterial outside --- Certainty = 0.0000 (Not Clear) < succ>

[6777] The protein has no significant homology with any sequences in the GENPEPT database.

[6778] No corresponding DNA sequence was identified in S. pyogenes.

[6779] Based on this analysis, it was predicted that this protein and its epitopes, could be useful antigens for vaccines or diagnostics.

### EXAMPLE 1218

[6780] A DNA sequence (GBSx1294) was identified in S. agalactiae <SEQ ID 3777> which encodes the amino acid sequence <SEQ ID 3778>. This protein is predicted to be DOLICHYL-PHOSPHATE MANNOSE SYNTHASE RELATED PROTEIN. Analysis of this protein sequence reveals the following:

| Possible site: 29 | | | |
|---|---|---|---|
| >>> Seems to have an uncleavable N-term signal seq | | | |
| INTEGRAL | Likelihood = −2.92 | Transmembrane | 232-248 (231-248) |

----- Final Results -----
bacterial membrane --- Certainty = 0.2168 (Affirmative) < succ>
bacterial outside --- Certainty = 0.0000 (Not Clear) < succ>
bacterial cytoplasm --- Certainty = 0.0000 (Not Clear) < succ>

[6781] A related GBS nucleic acid sequence <SEQ ID 9991> which encodes amino acid sequence <SEQ ID 9992> was also identified.

[6782] The protein has homology with the following sequences in the GENPEPT database.

| >GP: AAC35924 GB: AF071085 putative glycosyl transferase [Enterococcus | | | |
|---|---|---|---|
| faecalis] | | | |
| Identities = 118/240 (49%), Positives = 152/240 (63%), Gaps = 1/240 (0%) | | | |
| Query: | 14 | KILLVIPAYNEEGSIAKTVQTIVDFKASRS-LPFELDYIVINDGSTDGTPELLDRLGLNH | 72 |
| | | K+LL+IPAYNEE +I +T+ +I FK + ELDY+VINDGSTDGT ++L+ +N | |
| Sbjct: | 2 | KVLLIIPAYNEEENILRTIASIETFKQEVTHFQHELDYVVINDGSTDGTKQILEVNQINA | 61 |
| Query: | 73 | IDLVQNLGIGGCVQTGYLYANRNHYDVAVQFDGDGQHDIRSIEDVVMPILNDEADFVIGS | 132 |
| | | I LV NLGIGG VQTGY YA N YDVA QFDGDG HDI S+ ++ P+ F GS | |
| Sbjct: | 62 | IHLVLNLGIGGAVQTGYKYALENEYDVAXQFDGDGXHDIXSLPILLEPLAEGXCXFSXGS | 121 |
| Query: | 133 | RFVDKKHQNFQSTAMRRLGINLISAAIKLTTGHKVYDTTSGYRAANAALIAYLSCHYPVQ | 192 |
| | | RF+ +FQS MRR GI L+S G +Y T G RA N +IA+ + YP | |
| Sbjct: | 122 | RFIPGNXASFQSXKMRRXGIRLLSFCXXXAXGXTIYXVTXGXRAGNRKVIAFFAKRYPTN | 181 |
| Query: | 193 | YPEPESTARILKKGYRLKEVTANMFEREAGTSSISSLKSIFYMTDVLTSIIIAGFIKEDD | 252 |
| | | YPEPES ++KK + + E NM ER G SSI +L S+ YM +V ++I+IA F+KE D | |
| Sbjct: | 182 | YPEPESIVHLIKKRFVIVERPVNMMERLGGVSSIRALASVKYMLEVGSAILIAPFMKEGD | 241 |

[6783] A related DNA sequence was identified in S. pyogenes <SEQ ID 3779> which encodes the amino acid sequence <SEQ ID 3780>. Analysis of this protein sequence reveals the following:

| Possible site: 56 | | | |
|---|---|---|---|
| >>> Seems to have no N-terminal signal sequence | | | |
| INTEGRAL | Likelihood = −0.80 | Transmembrane | 211-227 (211-227) |

----- Final Results -----
bacterial membrane --- Certainty = 0.1319 (Affirmative) < succ>
bacterial outside --- Certainty = 0.0000 (Not Clear) < succ>
bacterial cytoplasm --- Certainty = 0.0000 (Not Clear) < succ>

[6784] The protein has homology with the following sequences in the databases:

| >GP: AAC35924 GB: AF071085 putative glycosyl transferase [Enterococcus | | | |
|---|---|---|---|
| faecalis] | | | |
| Identities = 104/233 (44%), Positives = 134/233 (56%), Gaps = 9/233 (3%) | | | |
| Query: | 1 | VKKLIIIPAYNESSNIVNTIRTIESDAPD-------FDYIIIDDCSTDNTLAICQKQGFN | 53 |
| | | +K L+IIPAYNE NI+ TI +IE+ + DY++I+D STD T I + N | |
| Sbjct: | 1 | MKVLLIIPAYNEEENILRTIASIETFKQEVTHFQHELDYVVINDGSTDGTKQILEVNQIN | 60 |
| Query: | 54 | VISLPINLGIGGAVQTGYRYAQRCGYDVAVQVDGDGQHNPCYLEKMVEVLVQSSVNMVIG | 113 |
| | | I L +NLGIGGAVQTGY+YA YDVA Q DGDG H+ L ++E L + G | |
| Sbjct: | 61 | AIHLVLNLGIGGAVQTGYKYALENEYDVAXQFDGDGXHDIXSLPILLEPLAEGXCXFSXG | 120 |
| Query: | 114 | SRFI--TKEGFQSSFARRIGIKYFTWLIALLTGKKITDATSGLRLIDRSLIERFANHYPD | 171 |
| | | SRFI FQS RR GI+ ++ G I T G R +R +I FA YP | |
| Sbjct: | 121 | SRFIPGNXASFQSXKMRRXGIRLLSFCXXXAXGXTIYXVTXGXRAGNRKVIAFFAKRYPT | 180 |
| Query: | 172 | DYPEPETVVDVLVSHFKVKEIPVVMNERQGGVSSISLTKSVYYNIKVTLAILV | 224 |
| | | +YPEPE++V ++ F + E PV M ER GGVSSI SV YM++V AIL+ | |
| Sbjct: | 181 | NYPEPESIVHLIKKRFVIVERPVNMMERLGGVSSIRALASVKYMLEVGSAILI | 233 |

[6785] An alignment of the GAS and GBS proteins is shown below.

| Identities = 105/231 (45%), Positives = 142/231 (61%), Gaps = 8/231 (3%) | | | |
|---|---|---|---|
| Query: | 14 | KILLVIPAYNEEGSIAKTVQTIVDFKASRSLPFELDYIVINDGSTDGTPELLDRLGLNHI | 73 |
| | | K L++IPAYNE +I T++TI S + DYI+I+D STD T + + G N I | |
| Sbjct: | 2 | KKLIIIPAYNESSNIVNTIRTI------ESDAPDFDYIIIDDCSTDNTLAICQKQGFNVI | 55 |
| Query: | 74 | DLVQNLGIGGCVQTGYLYANRNHYDVAVQFDGDGQHDIRSIEDVVMPILNDEADFVIGSR | 133 |
| | | L NLGIGG VQTGY YA R YDVAVQ DGDGQH+ +E +V ++ + VIGSR | |
| Sbjct: | 56 | SLPINLGIGGAVQTGYRYAQRCGYDVAVQVDGDGQHNPCYLEKMVEVLVQSSVNMVIGSR | 115 |
| Query: | 134 | FVDKKHQNFQSTAMRRLGINLISAAIKLTTGHKVYDTTSGYRAANAALIAYLSCHYPVQY | 193 |
| | | F+ K + FQS+ RR+GI + I L TG K+ D TSG R + +LI + HYP Y | |
| Sbjct: | 116 | FITK--EGFQSSFARRIGIKYFTWLIALLTGKKITDATSGLRLIDRSLIERFANHYPDDY | 173 |
| Query: | 194 | PEPESTARILKKGYRLKEVTANMFEREAGTSSISSLKSIFYMTDVLTSIII | 244 |
| | | PEPE+ +L +++KE+ M ER+ G SSIS KS++YM V +I++ | |
| Sbjct: | 174 | PEPETVVDVLVSHFKVKEIPVVMNERQGGVSSISLTKSVYYMIKVTLAILV | 224 |

[6786] A related GBS gene <SEQ ID 8751> and protein <SEQ ID 8752> were also identified. Analysis of this protein sequence reveals the following:

| Lipop: Possible site: −1 Crend: 9 | | | |
|---|---|---|---|
| McG: Discrim Score: 0.29 | | | |
| GvH: Signal Score (−7.5): −4.34 | | | |
| Possible site: 29 | | | |
| >>> Seems to have an uncleavable N-term signal seq | | | |
| ALOM program | count: 1 | value: −2.92 | threshold: 0.0 |

| | | | |
|---|---|---|---|
| INTEGRAL | Likelihood = −2.92 | Transmembrane | 222-238 (221-238) |

| | | |
|---|---|---|
| PERIPHERAL | Likelihood = 4.40 | 4 |

modified ALOM score: 1.08
*** Reasoning Step: 3
----- Final Results -----
bacterial membrane --- Certainty = 0.2168 (Affirmative) < succ>
bacterial outside --- Certainty = 0.0000 (Not Clear) < succ>
bacterial cytoplasm --- Certainty = 0.0000 (Not Clear) < succ>

[6787] The protein has homology with the following sequences in the databases:

[chemical structure]

[6788] SEQ ID 8752 (GBS355) was expressed in E. coli as a His-fusion product. SDS-PAGE analysis of total cell extract is shown in FIG. 74 (lane 4; MW 27 kDa). It was also expressed in E. coli as a GST-fusion product. SDS-PAGE analysis of total cell extract is shown in FIG. 81 (lane 7; MW 52 kDa).

[6789] GBS355-GST was purified as shown in FIG. 213 (lane 4) and in FIG. 216 (lane 6).

[6790] Based on this analysis, it was predicted that these proteins and their epitopes could be useful antigens for vaccines or diagnostics.

### EXAMPLE 1219

[6791] A DNA sequence (GBSx1295) was identified in S. agalactiae <SEQ ID 3781> which encodes the amino acid sequence <SEQ ID 3782>. Analysis of this protein sequence reveals the following:

| Possible site: 19 | | | |
|---|---|---|---|
| >>> Seems to have no N-terminal signal sequence | | | |
| INTEGRAL | Likelihood = −1.91 | Transmembrane | 185-201 (185-201) |

----- Final Results -----
bacterial membrane --- Certainty = 0.1765 (Affirmative) < succ>
bacterial outside --- Certainty = 0.0000 (Not Clear) < succ>
bacterial cytoplasm --- Certainty = 0.0000 (Not Clear) < succ>

[6792] The protein has homology with the following sequences in the GENPEPT database.

| >GP: BAA32090 GB: AB010970 rhamnosyltransferase [Streptococcus mutans] | | | |
|---|---|---|---|
| Identities = 181/315 (57%), Positives = 244/315 (77%), Gaps = 7/315 (2%) | | | |
| Query: | 1 | MKVNILMATYNGEKFLAQQIESIQKQTFKEWNLLIRDDGSSDKTCDIIRNFTAKDSRIRF | 60 |
| | | MKVNILM+TYNG++F+AQQI+SIQKQTF+ WNLLIRDDGSSD T II +F D+RIRF | |
| Sbjct: | 1 | MKVNILMSTYNGQEFIAQQIQSIQKQTFENWNLLIRDDGSSDGTPKIIADFAKSDARIRF | 60 |
| Query: | 61 | INENEHHNLGVIKSFFTLVNYEVADFYFFSDQDDVWLPEKLSVSLEAAKHKASDVPLLVY | 120 |
| | | IN ++ N GVIK+F+TL+ YE AD+YFFSDQDDVWLP KL ++L + + + + +PL+VY | |
| Sbjct: | 61 | INADKRENFGVIKNFYTLLKYEKADYYFFSDQDDVWLPQKLELTLASVEKENNQIPLMVY | 120 |
| Query: | 121 | TDLKVVNQELNILQDSMIRAQSHHANTTLLPELTENTVTGGTMMINHALAEKW-FTPNDI | 179 |
| | | TDL VV+++L +L DSMI+ QSHHANT+LL ELTENTVTGGTMM+NH LA++W +D+ | |
| Sbjct: | 121 | TDLTVVDRDLQVLHDSMIKTQSHHANTSLLEELTENTVTGGTMMVNHCLAKQWKQCYDDL | 180 |
| Query: | 180 | LMHDWFLALLAASLGEIIYLDLPTQLYRQHDNNVLGARTMDKRFK-ILREGPKSIFTRYW | 238 |
| | | +MHDW+LALLAASLG++IYLD T+LYRQH++NVLGART KR K LR P + +YW | |
| Sbjct: | 181 | IMHDWYLALLAASLGKLIYLDETTELYRQHESNVLGARTWSKRLKNWLR--PHRLVKKYW | 238 |
| Query: | 239 | KLIHDSQKQASLIVDKYGDIMTANDLELIKCFIKIDKQPFMTRLRWLWKYGYSKNQFKHQ | 298 |
| | | L+ SQ+QAS +++ D+ AN +I+ ++ + Q F+ R++WL +YG++KN+ H | |
| Sbjct: | 239 | WLVTSSQQQASHLLEL-DLPAANK-AIIRAYVTLLDQSFLNRIKWLKQYGFAKNRAFHT | 295 |
| Query: | 299 | VVFKWLIATNYYNKR | 313 |
| | | VFK LI T + +R | |
| Sbjct: | 296 | FVFKTLIITKFGYRR | 310 |

[6793] A related DNA sequence was identified in S. pyogenes <SEQ ID 817> which encodes the amino acid sequence <SEQ ID 818>. Analysis of this protein sequence reveals the following:

```
Possible site: 43
>>> Seems to have no N-terminal signal sequence
----- Final Results -----
                            bacterial cytoplasm --- Certainty = 0.1980(Affirmative) < succ>
                              bacterial membrane --- Certainty = 0.0000(Not Clear) < succ>
                              bacterial outside --- Certainty = 0.0000(Not Clear) < succ>
```

[6794] An alignment of the GAS and GBS proteins is shown below.

| Identities = 178/314 (56%), Positives = 232/314 (73%), Gaps = 6/314 (1%) | | | |
|---|---|---|---|
| Query: | 1 | MKVNILMATYNGEKFLAQQIESIQKQTFKEWNLLIRDDGSSDKTCDIIRNFTAKDSRIRF | 60 |
| | | M +NIL++TYNGE+FLA+QI+SIQ+QT +W LLIRDDGS+D T DIIR F +D RI++ | |
| Sbjct: | 1 | MNINILLSTYNGERFLAEQIQSIQRQTVNDWTLLIRDDGSTDGTQDIIRTFVKEDKRIQW | 60 |
| Query: | 61 | INENEHHNLGVIKSFFTLVNYEVADFYFFSDQDDVWLPEKLSVS-LEAAKHKASDVPLLV | 119 |
| | | INE + NLGVIK+F+TL+ ++ AD YFFSDQDD+WL KL V+ LEA KH+ + PLLV | |
| Sbjct: | 61 | INEGQTENLGVIKNFYTLLKHQKADVYFFSDQDDIWLDNKLEVTLLEAQKHEMT-APLLV | 119 |
| Query: | 120 | YTDLKVVNQELNILQDSMIRAQSHHANTTLLPELTENTVTGGTMMINHALAEKWFTPNDI | 179 |
| | | YTDLKVV Q L + DSMI+ QS HANT+LL ELTENTVTGGTMMI HALAE+W T + + | |
| Sbjct: | 120 | YTDLKVVTQHLAVCHDSMIKTQSGHANTSLLQELTENTVTGGTMMITHALAEEWTTCDGL | 179 |
| Query: | 180 | LMHDWFLALLAASLGEIIYLDLPTQLYRQHDNNVLGARTMDKRFKILREGPKSIFTRYWK | 239 |
| | | LMHDW+LALLA+++G+++YLD+PT+LYRQHD NVLGART KR K P + +YW | |
| Sbjct: | 180 | LMHDWYLALLASAIGKLVYLDIPTELYRQHDANVLGARTWSKRMKNWLT-PHHLVNKYWW | 238 |
| Query: | 240 | LIHDSQKQASLIVDKYGDIMTANDLELIKCFIKIDKQPFMTRLRWLWKYGYSKNQFKHQV | 299 |
| | | LI SQEQA L++D + ND EL+ ++ + PF RL L +YG+ KN+ H | |
| Sbjct: | 239 | LITSSQKQAQLLLDL---PLKPNDHELVTAYVSLLDMPFTKRLATLKRYGFRKNRIFHTF | 295 |
| Query: | 300 | VFKWLIATNYYNKR | 313 |
| | | +F+ L+ T + +R | |
| Sbjct: | 296 | IFRSLVVTLFGYRR | 309 |

[6795] Based on this analysis, it was predicted that these proteins and their epitopes could be useful antigens for vaccines or diagnostics.

### EXAMPLE 1220

[6796] A DNA sequence (GBSx1296) was identified in S. agalactiae <SEQ ID 3783> which encodes the amino acid sequence <SEQ ID 3784>. This protein is predicted to be rgpAc. Analysis of this protein sequence reveals the following:

```
Possible site: 21
>>> Seems to have no N-terminal signal sequence
----- Final Results -----
                            bacterial cytoplasm --- Certainty = 0.1881(Affirmative) < succ>
                              bacterial membrane --- Certainty = 0.0000(Not Clear) < succ>
                                bacterial outside --- Certainty = 0.0000(Not Clear) < succ>
```

[6797] A related GBS nucleic acid sequence <SEQ ID 9993> which encodes amino acid sequence <SEQ ID 9994> was also identified.

[6798] The protein has homology with the following sequences in the GENPEPT database.

| >GP: BAA32089 GB: AB010970 rgpAc [Streptococcus mutans] | | | |
|---|---|---|---|
| Identities = 234/362 (64%), Positives = 284/362 (77%) | | | |
| Query: | 33 | VSELINHQKSFDIKYHVACLSDKEHHTHFNFADADCFTINPPQLGPARVIAYDIMAINYA | 92 |
| | | + EL+ +++S + YHVACLS+ + H HF + DCFTI P+LGPARVIAYD+MAI YA | |
| Sbjct: | 1 | MEELVKYKQSQQLTYHVACLSETDQHKHFTYLGVDCFTIKAPKLGPARVIAYDMMAIRYA | 60 |
| Query: | 93 | LDLVKTHDLKEPIFYILGNTIGAFIWHFANKIHKVGGLLYVNPDGLEWKRSKWSRPTQRY | 152 |
| | | L L+K +K PIFYILGNTIGAF+ FA KI ++GG Y+NPDGLEW+RSKWSRP Q Y | |
| Sbjct: | 61 | LKLIKDQKIKHPIFYILGNTIGAFMGPFARKIKRIGGRFYINPDGLEWRRSKWSRPVQAY | 120 |
| Query: | 153 | LKYAEKCMTKNADLIISDNIGIENYIQSTYSNVKTRFIAYGTEINSRKLSSDDPRVKQLF | 212 |
| | | LKYAEKCMTK ADL+ISDN GIE YI+ Y KT FIAYGT+++ L +D +VK + | |
| Sbjct: | 121 | LKYAEKCMTKKADLVISDNTGIEGYIKQMYPWAKTTFIAYGTDLSPSGLLKNDSKVKDFY | 180 |
| Query: | 213 | KKWNIKSKGYYLIVGRFVPENNYETAIREFMASDTKRDLVIICNHQNNPYFEKLSLKTNL | 272 |
| | | KKW IK KGYYLIVGRFVPENNYETAIREFM S ++RDLVIICN++ N YFE L KT | |
| Sbjct: | 181 | KKWAIKDKGYYLIVGRFVPENNYETAIREFMTSSSERDLVIICNYEGNAYFEDLRQKTEF | 240 |
| Query: | 273 | QQDKRVKFVGTLYEKDLLDYVRQQAFAYIHGHEVGGTNPGLLEALANTDLNLVLDVDFNK | 332 |
| | | +DKR+KFVGT+Y++ LL Y+R+QAFAYIHGHEVGGTNPGLLEALA+TDLNLVL +FN | |
| Sbjct: | 241 | DKDKRIKFVGTVYDRPLLTYIREQAFAYIHGHEVGGTNPGLLEALAHTDLNLVLITEFNY | 300 |
| Query: | 333 | SVAGLSSFYWAKKEGDLAKLINDSDQQQDLSTYGDRAKAIIQENYTWKKIVEEYEDLFLN | 392 |
| | | +VA ++ YW + G LA+LIN D+Q++ + YG RAK II YTW+KIVEEYEDLFL+ | |
| Sbjct: | 301 | TVALDAARYWTQDNGSLAQLINQFDKQENFAEYGQRAKEIIVNYYTWEKIVEEYEDLFLH | 360 |
| Query: | 393 | ES | 394 |
| | | ES | |
| Sbjct: | 361 | ES | 362 |

[6799] A related DNA sequence was identified in S. pyogenes <SEQ ID 3785> which encodes the amino acid sequence <SEQ ID 3786>. Analysis of this protein sequence reveals the following:

| Possible site: 23 | | | | |
|---|---|---|---|---|
| >>> Seems to have no N-terminal signal sequence | | | | |
| | INTEGRAL | Likelihood = −1.38 | Transmembrane | 95-111 (95-111) |

```
----- Final Results -----
                              bacterial membrane --- Certainty = 0.1553(Affirmative) < succ>
                                bacterial outside --- Certainty = 0.0000(Not Clear) < succ>
                            bacterial cytoplasm --- Certainty = 0.0000(Not Clear) < succ>
```

[6800] An alignment of the GAS and GBS proteins is shown below.

| Identities = 250/383 (65%), Positives = 307/383 (79%) | | | |
|---|---|---|---|
| Query: | 11 | MQDVFIIGSRGLPARYGGFETFVSELINHQKSFDIKYHVACLSDKEHHTHFNFADADCFT | 70 |
| | | MQDVFIIGSRGLPA+YGGFETFV ELI+HQ S +I+YHVACLSD +H HF++ ADCF | |
| Sbjct: | 1 | MQDVFIIGSRGLPAKYGGFETFVEELISHQSSKNIRYHVACLSDTKHKVHFDYKGADCFY | 60 |
| Query: | 71 | INPPQLGPARVIAYDIMAINYALDLVKTHDLKEPIFYILGNTIGAFIWHFANKIHKVGGL | 130 |
| | | +NPP+LGPARVIAYD+MAI YAL H ++ PIFY+LGNT+GAFI F +IH GG | |
| Sbjct: | 61 | LNPPKLGPARVIAYDMMAITYALSYSDQHQIQNPIFYVLGNTVGAFIAPFVKQIHNRGGR | 120 |
| Query: | 131 | LYVNPDGLEWKRSKWSRPTQRYLKYAEKCMTKNADLIISDNIGIENYIQSTYSNVKTRFI | 190 |
| | | ++NPDGLEWKRSKWSRP Q YLK++EK MT+ ADL+ISDNIGI+ Y++ Y KT FI | |
| Sbjct: | 121 | FFINPDGLEWKRSKWSRPVQAYLKFSEKQMTRQADLVISDNIGIDRYLKQVYPWSKTCFI | 180 |
| Query: | 191 | AYGTEINSRKLSSDDPRVKQLFKKWNIKSKGYYLIVGRFVPENNYETAIREFMASDTKRD | 250 |
| | | AYGT+ +L++ D +V+ F+ ++I+ K YYLI+GRFVPENNYETAI+EFMAS TKRD | |
| Sbjct: | 181 | AYGTQTQPSRLATADSKVRAYFQTFDIREKDYYLILGRFVPENNYETAIKEFMASSTKRD | 240 |
| Query: | 251 | LVIICNHQNNPYFEKLSLKTNLQQDKRVKFVGTLYEKDLLDYVRQQAFAYIHGHEVGGTN | 310 |
| | | LVIICNH+ N YF++L +T +D R+KFVGTLY+K+LL Y+R+QA+AYIHGHEVGGTN | |
| Sbjct: | 241 | LVIICNHEGNAYFKQLLAETECDKDPRIKFVGTLYDKELLAYIREQAYAYIHGHEVGGTN | 300 |
| Query: | 311 | PGLLEALANTDLNLVLDVDFNKSVAGLSSFYWAKKEGDLAKLINDSDQQQDLSTYGDRAK | 370 |
| | | PGLLEALA+T+LNLVL VDFN+SVA ++ YW K++G LA+LIN D D G AK | |
| Sbjct: | 301 | PGLLEALAHTNLNLVLGVDFNQSVAKSAALYWTKQKGQLAELINQVDAGFDSDHLGKEAK | 360 |
| Query: | 371 | AIIQENYTWKKIVEEYEDLFLNE | 393 |
| | | AIIQE+YTW+KIV EYE LFLNE | |
| Sbjct: | 361 | AIIQEHYTWEKIVGEYEALFLNE | 383 |

[6801] Based on this analysis, it was predicted that these proteins and their epitopes could be useful antigens for vaccines or diagnostics.

### EXAMPLE 1221

[6802] A DNA sequence (GBSx1297) was identified in S. agalactiae <SEQ ID 3787> which encodes the amino acid sequence <SEQ ID 3788>. This protein is predicted to be dTDP-L-rhamnose synthase. Analysis of this protein sequence reveals the following:

```
Possible site: 61
>>> Seems to have no N-terminal signal sequence
----- Final Results -----
                            bacterial cytoplasm --- Certainty = 0.1059(Affirmative) < succ>
                              bacterial membrane --- Certainty = 0.0000(Not Clear) < succ>
                                bacterial outside --- Certainty = 0.0000(Not Clear) < succ>
```

[6803] The protein has homology with the following sequences in the GENPEPT database.

| >GP: AAD10184 GB: AF026471 Cps2O [Streptococcus pneumoniae] | | | |
|---|---|---|---|
| Identities = 258/283 (91%), Positives = 274/283 (96%) | | | |
| Query: | 1 | MILITGANGQLGSELRHLLDERTQEYVAVDVAEMDITNAEMVDKVFEEVKPSLVYHCAAY | 60 |
| | | MILITGANGQLG+ELR+LLDER +EYVAVDVAEMDIT+AEMV+KVFEEVKP+LVYHCAAY | |
| Sbjct: | 1 | MILITGANGQLGTELRYLLDERNEEYVAVDVAEMDITDAEMVEKVFEEVKPTLVYHCAAY | 60 |
| Query: | 61 | TAVDAAEDEGKELDFAINVTGTENVAKAAAKHDATLVYISTDYVFDGEKPVGQEWEVDDL | 120 |
| | | TAVDAAEDEGKELDFAINVTGT+NVAKA+ KH ATLVYISTDYVFDG+KPVGQEWEVDD | |
| Sbjct: | 61 | TAVDAAEDEGKELDFAINVTGTKNVAKASEKHGATLVYISTDYVFDGKKPVGQEWEVDDR | 120 |
| Query: | 121 | PDPKTEYGRTKRMGEELVEKYTSKFYTIRTAWVFGNYGKNFVFTMQNLAKTHKTLTVVND | 180 |
| | | PDP+TEYGRTKRMGEELVEK+ S FY IRTAWVFGNYGKNFVFTMQNLAKTHKTLTVVND | |
| Sbjct: | 121 | PDPQTEYGRTKRMGEELVEKHVSNFYIIRTAWVFGNYGKNFVFTMQNLAKTHKTLTVVND | 180 |
| Query: | 181 | QHGRPTWTRTLAEFMTYLAENQKDFGYYHLSNDAKEDTTWYDFAVEILKDTDVEVKPVDS | 240 |
| | | Q+GRPTWTRTLAEFMTYLAEN+K+FGYYHLSNDA EDTTWYDFAVEILKDTDVEVKPVDS | |
| Sbjct: | 181 | QYGRPTWTRTLAEFMTYLAENRKEFGYYHLSNDATEDTTWYDFAVEILKDTDVEVKPVDS | 240 |
| Query: | 241 | SQFPAKAKRPLNSTMSLEKAKATGFVIPTWQDALKEFYKQEVK | 283 |
| | | SQFPAKAKRPLNSTMSL KAKATGFVIPTWQDAL+EFYKQEV+ | |
| Sbjct: | 241 | SQFPAKAKRPLNSTMSLAKAKATGFVIPTWQDALQEFYKQEVR | 283 |

[6804] A related DNA sequence was identified in S. pyogenes <SEQ ID 3789> which encodes the amino acid sequence <SEQ ID 3790>. Analysis of this protein sequence reveals the following:

```
Possible site: 32
>>> Seems to have no N-terminal signal sequence
----- Final Results -----
                            bacterial cytoplasm --- Certainty = 0.0618(Affirmative) < succ>
                              bacterial membrane --- Certainty = 0.0000(Not Clear) < succ>
                                bacterial outside --- Certainty = 0.0000(Not Clear) < succ>
```

[6805] An alignment of the GAS and GBS proteins is shown below.

| Identities = 227/284 (79%), Positives = 248/284 (86%) | | | |
|---|---|---|---|
| Query: | 1 | MILITGANGQLGSELRHLLDERTQEYVAVDVAEMDITNAEMVDKVFEEVKPSLVYHCAAY | 60 |
| | | MILITG+NGQLG+ELR+LLDER +YVAVDVAEMDITN + V+ VF +VKP+LVYHCAAY | |
| Sbjct: | 21 | MILITGSNGQLGTELRYLLDERGVDYVAVDVAEMDITNEDKVEAVFAQVKPTLVYHCAAY | 80 |
| Query: | 61 | TAVDAAEDEGKELDFAINVTGTENVAKAAAKHDATLVYISTDYVFDGEKPVGQEWEVDDL | 120 |
| | | TAVDAAEDEGK L+ AINVTG+EN+AKA K+ ATLVYISTDYVFDG KPVGQEW D | |
| Sbjct: | 81 | TAVDAAEDEGKALNEAINVTGSENIAKACGKYGATLVYISTDYVFDGNKPVGQEWVETDH | 140 |
| Query: | 121 | PDPKTEYGRTKRMGEELVEKYTSKFYTIRTAWVFGNYGKNFVFTMQNLAKTHKTLTVVND | 180 |
| | | PDPKTEYGRTKR+GE VE+Y FY IRTAWVFGNYGKNFVFTM+ LA+ H LTVVND | |
| Sbjct: | 141 | PDPKTEYGRTKRLGELAVERYAEHFYIIRTAWVFGNYGKNFVFTMEQLAENHSRLTVVND | 200 |
| Query: | 181 | QHGRPTWTRTLAEFMTYLAENQKDFGYYHLSNDAKEDTTWYDFAVEILKDTDVEVKPVDS | 240 |
| | | QHGRPTWTRTLAEFM YL ENQK FGYYHLSNDAKEDTTWYDFA EILKD VEV PVDS | |
| Sbjct: | 201 | QHGRPTWTRTLAEFMCYLTENQKAFGYYHLSNDAKEDTTWYDFAKEILKDKAVEVVPVDS | 260 |
| Query: | 241 | SQFPAKAKRPLNSTMSLEKAKATGFVIPTWQDALKEFYKQEVKK | 284 |
| | | S FPAKAKRPLNSTM+L+KAKATGFVIPTWQ+ALK FY+Q +KK | |
| Sbjct: | 261 | SAFPAKAKRPLNSTMNLDKAKATGFVIPTWQEALKAFYQQGLKK | 304 |

[6806] Based on this analysis, it was predicted that these proteins and their epitopes could be useful antigens for vaccines or diagnostics.

### EXAMPLE 1222

[6807] A DNA sequence (GBSx1298) was identified in S. agalactiae <SEQ ID 3791> which encodes the amino acid sequence <SEQ ID 3792>. Analysis of this protein sequence reveals the following:

```
Possible site: 32
>>> Seems to have no N-terminal signal sequence
----- Final Results -----
                            bacterial cytoplasm --- Certainty = 0.2554(Affirmative) < succ>
                              bacterial membrane --- Certainty = 0.0000(Not Clear) < succ>
                                bacterial outside --- Certainty = 0.0000(Not Clear) < succ>
```

[6808] The protein has homology with the following sequences in the GENPEPT database.

| >GP: BAA21508 GB: AB000631 unnamed protein product [Streptococcus mutans] | | | |
|---|---|---|---|
| Identities = 92/108 (85%), Positives = 100/108 (92%) | | | |
| Query: | 5 | KQYSEEEVGKIKDRILEALEMVIDPELGIDIVNLGLIYEIRFEDNGRTEIDMTLTTMGCP | 64 |
| | | K Y+ EE+ KIKDRILEALEMVIDPELGIDIVNLGLIY+IRFED+GRTEIDMTLTTMGCP | |
| Sbjct: | 4 | KNYTPEEIAKIKDRILEALEMVIDPELGIDIVNLGLIYDIRFEDSGRTEIDMTLTTMGCP | 63 |
| Query: | 65 | LADLLTDQIHDVMKTVPEVTETEVKLVWYPAWSVDKMSRYARIALGIR | 112 |
| | | LADLLTDQIHD +K VPEV + +VKLVW PAW+VDKMSRYARIALGIR | |
| Sbjct: | 64 | LADLLTDQIHDALKDVPEVLDIDVKLVWSPAWTVDKMSRYARIALGIR | 111 |

[6809] A related DNA sequence was identified in S. pyogenes <SEQ ID 3793> which encodes the amino acid sequence <SEQ ID 3794>. Analysis of this protein sequence reveals the following:

```
Possible site: 32
>>> Seems to have no N-terminal signal sequence
----- Final Results -----
                            bacterial cytoplasm --- Certainty = 0.2818(Affirmative) < succ>
                              bacterial membrane --- Certainty = 0.0000(Not Clear) < succ>
                                bacterial outside --- Certainty = 0.0000(Not Clear) < succ>
```

[6810] An alignment of the GAS and GBS proteins is shown below.

| Identities = 90/112 (80%), Positives = 102/112 (90%) | | | |
|---|---|---|---|
| Query: | 1 | MSEVKQYSEEEVGKIKDRILEALEMVIDPELGIDIVNLGLIYEIRFEDNGRTEIDMTLTT | 60 |
| | | MS+ +Y++++V IK+RILEALE VIDPELGID+VNLGLIYEIRF DNG TEIDMTLTT | |
| Sbjct: | 1 | MSDTPKYTQDQVIAIKNRILEALETVIDPELGIDVVNLGLIYEIRFNDNGYTEIDMTLTT | 60 |
| Query: | 61 | MGCPLADLLTDQIHDVMKTVPEVTETEVKLVWYPAWSVDKMSRYARIALGIR | 112 |
| | | MGCPLADLLTD IHD ++ VPEVT+TEVKLVWYPAW+VDKMSRYARIALGIR | |
| Sbjct: | 61 | MGCPLADLLTDYIHDALQDVPEVTKTEVKLVWYPAWTVDKMSRYARIALGIR | 112 |

[6811] Based on this analysis, it was predicted that these proteins and their epitopes could be useful antigens for vaccines or diagnostics.

### EXAMPLE 1223

[6812] A DNA sequence (GBSx1299) was identified in S. agalactiae <SEQ ID 3795> which encodes the amino acid sequence <SEQ ID 3796>. This protein is predicted to be RNA polymerase sigma factor, sigma-70 family (rpoD). Analysis of this protein sequence reveals the following:

```
Possible site: 54
>>> Seems to have no N-terminal signal sequence
----- Final Results -----
                            bacterial cytoplasm --- Certainty = 0.3157(Affirmative) < succ>
                              bacterial membrane --- Certainty = 0.0000(Not Clear) < succ>
                                bacterial outside --- Certainty = 0.0000(Not Clear) < succ>
```

[6813] The protein is similar to the sigma-42 protein from S. mutans:

| >GP: BAA21507 GB: AB000631 sigma 42 protein [Streptococcus mutans] | | | |
|---|---|---|---|
| Identities = 345/367 (94%), Positives = 358/367 (97%) | | | |
| Query: | 14 | EKKGNTTFNVQVADFIRNHKKQGTAIDDEVTEKLVIPFVLDADQIDDLLERLTDGGISIT | 73 |
| | | +KK ++TFNVQVADFIRNHKK+G A+DDEVTEKLVIPF L+A+QIDDLLERLTDGGISIT | |
| Sbjct: | 5 | KKKTSSTFNVQVADFIRNHKKEGVAVDDEVTEKLVIPFELEAEQIDDLLERLTDGGISIT | 64 |
| Query: | 74 | DKEGNPSTKYVVEGPKPEELTDEELIGSNSAKVNDPVRMYLKEIGVVPLLTNEEEKELAV | 133 |
| | | D+EGNPSTKY VE KPEELTDEEL+GSNSAKVNDPVRMYLKEIGVVPLLTNEEEKELA+ | |
| Sbjct: | 65 | DREGNPSTKYAVEEIKPEELTDEELLGSNSAKVNDPVRMYLKEIGVVPLLTNEEEKELAI | 124 |
| Query: | 134 | AVAEGDLMAKQRLAEANLRLVVSIAKRYVGRGMQFLDLIQEGNMGLMKAVDKFDYSKGFK | 193 |
| | | AV GDL AKQRLAEANLRLVVSIAKRYVGRGMQFLDLIQEGNMGLMKAVDKFDYSKGFK | |
| Sbjct: | 125 | AVENGDLEAKQRLAEANLRLVVSIAKRYVGRGMQFLDLIQEGNMGLMKAVDKFDYSKGFK | 184 |
| Query: | 194 | FSTYATWWIRQAITRAIADQARTIRIPVHMVETINKLVREQRNLLQELGQDPTPEQIAER | 253 |
| | | FSTYATWWIRQAITRAIADQARTIRIPVHMVETINKLVREQRNLLQELGQDPTPEQIAER | |
| Sbjct: | 185 | FSTYATWWIRQAITRAIADQARTIRIPVHMVETINKLVREQRNLLQELGQDPTPEQIAER | 244 |
| Query: | 254 | MDMTPDKVREILKIAQEPVSLETPIGEEDDSHLGDFIEDEVIENPVDYTTRVVLREQLDE | 313 |
| | | MDMTPDKVREILKIAQEPVSLETPIGEEDDSHLGDFIEDEVIENPVDYTTRVVLREQLDE | |
| Sbjct: | 245 | MDMTPDKVREILKIAQEPVSLETPIGEEDDSHLGDFIEDEVIENPVDYTTRVVLREQLDE | 304 |
| Query: | 314 | VLDTLTDREENVLRLRFGLDDGKMRTLEDVGKVFNVTRERIRQIEAKALRKLRHPSRSKQ | 373 |
| | | VLDTLTDREENVLRLRFGLDDGKMRTLEDVGKVF+VTRERIRQIEAKALRKLRHPSRSKQ | |
| Sbjct: | 305 | VLDTLTDREENVLRLRFGLDDGKMRTLEDVGKVFDVTRERIRQIEAKALRKLRHPSRSKQ | 364 |
| Query: | 374 | LKDFMED | 380 |
| | | L+DF+ED | |
| Sbjct: | 365 | LRDFVED | 371 |

[6814] A related DNA sequence was identified in S. pyogenes <SEQ ID 3797> which encodes the amino acid sequence <SEQ ID 3798>. Analysis of this protein sequence reveals the following:

```
Possible site: 43
>>> Seems to have no N-terminal signal sequence
----- Final Results -----
                            bacterial cytoplasm --- Certainty = 0.1788(Affirmative) < succ>
                              bacterial membrane --- Certainty = 0.0000(Not Clear) < succ>
                                bacterial outside --- Certainty = 0.0000(Not Clear) < succ>
```

[6815] An alignment of the GAS and GBS proteins is shown below.

| Identities = 351/369 (95%), Positives = 364/369 (98%) | | | |
|---|---|---|---|
| Query: | 12 | MAEKKGNTTFNVQVADFIRNHKKQGTAIDDEVTEKLVIPFVLDADQIDDLLERLTDGGIS | 71 |
| | | M ++K TTFNVQVA+FIR+HKK+GTAIDD+VTEKLVIPF LDADQIDDLLERLTDGGIS | |
| Sbjct: | 1 | MTKQKEITTFNVQVAEFIRHHKKEGTAIDDDVTEKLVIPFALDADQIDDLLERLTDGGIS | 60 |
| Query: | 72 | ITDKEGNPSTKYVVEGPKPEELTDEELIGSNSAKVNDPVRMYLKEIGVVPLLTNEEEKEL | 131 |
| | | ITDKEGNPS+KY+VE PKPEELTDEELIGSNSAKVNDPVRMYLKEIGVVPLLT+EEEKEL | |
| Sbjct: | 61 | ITDKEGNPSSKYIVEEPKPEELTDEELIGSNSAKVNDPVRMYLKEIGVVPLLTSEEEKEL | 120 |
| Query: | 132 | AVAVAEGDLMAKQRLAEANLRLVVSIAKRYVGRGMQFLDLIQEGNMGLMKAVDKFDYSKG | 191 |
| | | AVAVA+GDLMAKQRLAEANLRLVVSIAKRYVGRGMQFLDLIQEGNMGLMKAVDKFDYSKG | |
| Sbjct: | 121 | AVAVAKGDLMAKQRLAEANLRLVVSIAKRYVGRGMQFLDLIQEGNMGLMKAVDKFDYSKG | 180 |
| Query: | 192 | FKFSTYATWWIRQAITRAIADQARTIRIPVHMVETINKLVREQRNLLQELGQDPTPEQIA | 251 |
| | | FKFSTYATWWIRQAITRAIADQARTIRIPVHMVETINKLVREQRNLLQELGQDPTPEQIA | |
| Sbjct: | 181 | FKFSTYATWWIRQAITRAIADQARTIRIPVHMVETINKLVREQRNLLQELGQDPTPEQIA | 240 |
| Query: | 252 | ERMDMTPDKVREILKIAQEPVSLETPIGEEDDSHLGDFIEDEVIENPVDYTTRVVLREQL | 311 |
| | | ERM+MTPDKVREILKIAQEPVSLETPIGEEDDSHLGDFIEDEVIENPVDYTTRVVLREQL | |
| Sbjct: | 241 | ERMEMTPDKVREILKIAQEPVSLETPIGEEDDSHLGDFIEDEVIENPVDYTTRVVLREQL | 300 |
| Query: | 312 | DEVLDTLTDREENVLRLRFGLDDGKMRTLEDVGKVFNVTRERIRQIEAKALRKLRHPSRS | 371 |
| | | DEVLDTLTDREENVLRLRFGLDDGKMRTLEDVGKVFNVTRERIRQIEAKALRKLRHPSRS | |
| Sbjct: | 301 | DEVLDTLTDREENVLRLRFGLDDGKMRTLEDVGKVFNVTRERIRQIEAKALRKLRHPSRS | 360 |
| Query: | 372 | KQLKDFMED | 380 |
| | | KQL+DF+ED | |
| Sbjct: | 361 | KQLRDFIED | 369 |

[6816] Based on this analysis, it was predicted that these proteins and their epitopes could be useful antigens for vaccines or diagnostics.

### EXAMPLE 1224

[6817] A DNA sequence (GBSx1300) was identified in S. agalactiae <SEQ ID 3799> which encodes the amino acid sequence <SEQ ID 3800>. Analysis of this protein sequence reveals the following:

```
Possible site: 14
>>> Seems to have no N-terminal signal sequence
----- Final Results -----
                            bacterial cytoplasm --- Certainty = 0.2853(Affirmative) < succ>
                              bacterial membrane --- Certainty = 0.0000(Not Clear) < succ>
                                bacterial outside --- Certainty = 0.0000(Not Clear) < succ>
```

[6818] The protein has no significant homology with any sequences in the GENPEPT database.

[6819] No corresponding DNA sequence was identified in S. pyogenes.

[6820] Based on this analysis, it was predicted that this protein and its epitopes, could be useful antigens for vaccines or diagnostics.

### EXAMPLE 1225

[6821] A DNA sequence (GBSx1301) was identified in S. agalactiae <SEQ ID 3801> which encodes the amino acid sequence <SEQ ID 3802>. Analysis of this protein sequence reveals the following:

```
Possible site: 40
>>> Seems to have no N-terminal signal sequence
----- Final Results -----
                            bacterial cytoplasm --- Certainty = 0.2198(Affirmative) < succ>
                              bacterial membrane --- Certainty = 0.0000(Not Clear) < succ>
                                bacterial outside --- Certainty = 0.0000(Not Clear) < succ>
```

[6822] The protein has homology with the following sequences in the GENPEPT database.

| >GP: BAA03516 GB: D14690 DNA primase [Lactococcus lactis] | | | |
|---|---|---|---|
| Identities = 206/398 (51%), Positives = 294/398 (73%), Gaps = 6/398 (1%) | | | |
| Query: | 37 | LAIDKEKISEIKNSVNIVDVIGEVVGLTKTGRNHLGLCPFHKEKTPSFNVIEDRQFFHCF | 96 |
| | | +++D E ++++K+ VNI D+I + V L++TG+N++GLCPFH EKTPSFNV ++ F+HCF | |
| Sbjct: | 2 | VSLDTEVVNDLKSKVNIADLISQYVALSRTGKNYIGLCPFHGEKTPSFNVNAEKGFYHCF | 61 |
| Query: | 97 | GCGRSGDVFKFVEDYQHISFLDSVQVLAERSGIPLDTNFKGQVPKKPKANQSLLDIHRVA | 156 |
| | | GCGRSGD +F+++Y + F+D+V+ LA+ +G+ L N +K N L +I+ A | |
| Sbjct: | 62 | GCGRSGDAIEFLKEYNQVGFVDAVKELADFAGVTL--NISDDREEKNNPNAPLFEINNQA | 119 |
| Query: | 157 | SGFYHAYLMTTNDGERARQYLAERGVTEDLIKHFQIGLSPGGQDFLYRRLAKEFDEKTLM | 216 |
| | | + Y+ LM+T GERAR+YL ERG+T+D+IK F IGL+P DF+++ L+ +FDE+ + | |
| Sbjct: | 120 | ARLYNILLMSTELGERARKYLEERGITDDVIKRFNIGLAPEENDFIFKNLSNKFDEEIMA | 179 |
| Query: | 217 | SSGLFNYSENSNQFYDSFNNRIMFPLTNDIGEVIAFSGRVWTQEDIDRKQAKYKNSRATP | 276 |
| | | SGLF++S +N+ +D+F NRIMFP+TN+ G+ I FSGR W QE+ D K AKY N+ AT | |
| Sbjct: | 180 | KSGLFHFS--NNKVFDAFTNRIMFPITNEYGQTIGFSGRKW-QENDDSK-AKYINTSATT | 235 |
| Query: | 277 | IFNKSYELYHLDKARAVINKAHEVYLMEGFMDVIAAYRAGIENVVASMGTALTNEHVRHL | 336 |
| | | IF+KSYEL++LDKA+ I+K HEVYLMEGFMDVIA+Y+AGI NVVASMGTALT +HVR L | |
| Sbjct: | 236 | IFDKSYELWNLDKAKPTISKQHEVYLMEGFMDVIASYKAGINNVVASMGTALTEKHVRRL | 295 |
| Query: | 337 | KRFTKKVVLTYDGDRAGQNAIDKSLELLSDMTVDIVRIPNKMDPDEFLQANSAEDFKQLL | 396 |
| | | K+ KK VL YDGD AGQNAI K+++L+ + V IV++P +DPDE+ + + L+ | |
| Sbjct: | 296 | KQMAKKFVLVYDGDSAGQNAIYKAIDLIGESAVQIVKVPEGLDPDEYSKNYGLKGLSALM | 355 |
| Query: | 397 | ENGRISNTEFYIHYLKPENTDNLQSEIAYVEKIAKLIA | 434 |
| | | E GRI EF I YL+PEN NLQ+++ ++E+I+ +IA | |
| Sbjct: | 356 | ETGRIQPIEFLIDYLRPENLANLQTQLDFIEQISPMIA | 393 |

[6823] A related DNA sequence was identified in S. pyogenes <SEQ ID 3803> which encodes the amino acid sequence <SEQ ID 3804>. Analysis of this protein sequence reveals the following:

```
Possible site: 13
>>> Seems to have no N-terminal signal sequence
----- Final Results -----
                            bacterial cytoplasm --- Certainty = 0.3532(Affirmative) < succ>
                              bacterial membrane --- Certainty = 0.0000(Not Clear) < succ>
                                bacterial outside --- Certainty = 0.0000(Not Clear) < succ>
```

[6824] An alignment of the GAS and GBS proteins is shown below.

| Identities = 378/604 (62%), Positives = 477/604 (78%), Gaps = 2/604 (0%) | | | |
|---|---|---|---|
| Query: | 28 | MGYFCGGHDLAIDKEKISEIKNSVNIVDVIGEVVGLTKTGRNHLGLCPFHKEKTPSFNVI | 87 |
| | | MG+ GG DLAIDKE IS++KNSVNIVDVIGEVV L+++GR++LGLCPFHKEKTPSFNV+ | |
| Sbjct: | 1 | MGFLWGGDDLAIDKEMISQVKNSVNIVDVIGEVVKLSRSGRHYLGLCPFHKEKTPSFNVV | 60 |
| Query: | 88 | EDRQFFHCFGCGRSGDVFKFVEDYQHISFLDSVQVLAERSGIPLDTNFKGQV--PKKPKA | 145 |
| | | EDRQFFHCFGCG+SGDVFKF+E+Y+ + FL+SVQ++A+++G+ L+ V + | |
| Sbjct: | 61 | EDRQFFHCFGCGKSGDVFKFIEEYRQVPFLESVQIIADKTGMSLNIPPSQAVLASQHKHP | 120 |
| Query: | 146 | NQSLLDIHRVASGFYHAYLMTTNDGERARQYLAERGVTEDLIKHFQIGLSPGGQDFLYRR | 205 |
| | | N +L+ +H A+ FYHA LMTT G+ AR+YL +RG+ + LI+HF IGL+P D+LY+ | |
| Sbjct: | 121 | NHALMTLHEDAAKFYHAVLMTTTIGQEARKYLYQRGLDDQLIEHFNIGLAPDESDYLYQA | 180 |
| Query: | 206 | LAKEFDEKTLMSSGLFNYSENSNQFYDSFNNRIMFPLTNDIGEVIAFSGRVWTQEDIDRK | 265 |
| | | L+K+++E L++SGLF+ S+ SN YD+F NRIMFPL++D G +IAFSGR+WT D++++ | |
| Sbjct: | 181 | LSKKYEEGQLVASGLFHLSDQSNTIYDAFRNRIMFPLSDDRGHIIAFSGRIWTAADMEKR | 240 |
| Query: | 266 | QAKYKNSRATPIFNKSYELYHLDKARAVINKAHEVYLMEGFMDVIAAYRAGIENVVASMG | 325 |
| | | QAKYKNSR T +FNKSYELYHLDKAR VI K HEV+LMEGFMDVIAAYR+G EN VASMG | |
| Sbjct: | 241 | QAKYKNSRGTVLFNKSYELYHLDKARPVIAKTHEVFLMEGFMDVIAAYRSGYENAVASMG | 300 |
| Query: | 326 | TALTNEHVRHLKRFTKKVVLTYDGDRAGQNAIDKSLELLSDMTVDIVRIPNKMDPDEFLQ | 385 |
| | | TALT EHV HLK+ TKKVVL YDGD AGQ+AI KSLELL D V+IVRIPNKMDPDEF+Q | |
| Sbjct: | 301 | TALTQEHVNHLKQVTKKVVLIYDGDDAGQHAIAKSLELLKDFVVEIVRIPNKMDPDEFVQ | 360 |
| Query: | 386 | ANSAEDFKQLLENGRISNTEFYIHYLKPENTDNLQSEIAYVEKIAKLIAKSPSITAQNSY | 445 |
| | | +S E F LL+ RIS+ EF+I YLKP N DNLQS+I YVEK+A LIA+SPSITAQ+SY | |
| Sbjct: | 361 | RHSPEAFADLLKQSRISSVEFFIDYLKPTNVDNLQSQIVYVEKMAPLIAQSPSITAQHSY | 420 |
| Query: | 446 | ITKVAELLPDFDYFQVEQSVNNERLHHRSQQQASSSVQTSATVQLPQTGKLSAITKTEMQ | 505 |
| | | I K+A+LLP+FDYFQVEQSVN R+ R + Q + S V LP L+AI KTE | |
| Sbjct: | 421 | INKIADLLPNFDYFQVEQSVNALRIQDRQKHQGQIAQAVSNLVTLPMPKSLTAIAKTESH | 480 |
| Query: | 506 | LFHRLLNHPYLLNEFRNRDNFYFDTTEIQVLYELLKESGEITSYDLSQESDKVNRTYYII | 565 |
| | | L HRLL+H YLLNEFR+RD+FYFDT+ +++LY+ LK+ G ITSYDLS+ S++VNR YY + | |
| Sbjct: | 481 | LMHRLLHHDYLLNEFRHRDDFYFDTSTLELLYQRLKQQGHITSYDLSEMSEEVNRAYYNV | 540 |
| Query: | 566 | LEEQLPVEVSIGEIEAVEKARDRLLKERDLRKQSQLIRQSSNQGDEEGALAALENLIAQK | 625 |
| | | LEE LP EV++GEI+ + R +LL ERDL KQ + +R+SSN+GD + AL LE+ IAQK | |
| Sbjct: | 541 | LEENLPKEVALGEIDDILSKRAKLLAERDLHKQGKKVRESSNKGDHQAALEVLEHFIAQK | 600 |
| Query: | 626 | RNME | 629 |
| | | R ME | |
| Sbjct: | 601 | RKME | 604 |

[6825] Based on this analysis, it was predicted that these proteins and their epitopes could be useful antigens for vaccines or diagnostics.

### EXAMPLE 1226

[6826] A DNA sequence (GBSx1302) was identified in S. agalactiae <SEQ ID 3805> which encodes the amino acid sequence <SEQ ID 3806>. Analysis of this protein sequence reveals the following:

| Possible site: 47 | | | | |
|---|---|---|---|---|
| >>> Seems to have no N-terminal signal sequence | | | | |
| | INTEGRAL | Likelihood = −6.05 | Transmembrane | 41-57 (34-58) |
| | INTEGRAL | Likelihood = −5.79 | Transmembrane | 93-109 (90-112) |

```
----- Final Results -----
                              bacterial membrane --- Certainty = 0.3421(Affirmative) < succ>
                                bacterial outside --- Certainty = 0.0000(Not Clear) < succ>
                            bacterial cytoplasm --- Certainty = 0.0000(Not Clear) < succ>
```

[6827] A related GBS nucleic acid sequence <SEQ ID 9995> which encodes amino acid sequence <SEQ ID 9996> was also identified.

[6828] The protein has homology with the following sequences in the GENPEPT database.

| >GP: AAC38560 GB: AF029731 large conductance mechanosensitive channel | | | |
|---|---|---|---|
| [Staphylococcus aureus] | | | |
| Identities = 64/126 (50%), Positives = 83/126 (65%), Gaps = 8/126 (6%) | | | |
| Query: | 23 | MIKELKEFLFKGNVLDLAVAVILGAAFNAIITSLVKDVITPLILNPVLKAAGVSNIA-QL | 81 |
| | | M+KE KEF KGNVLDLA+AV++GAAFN II+SLV+++I PLI K G + A + | |
| Sbjct: | 1 | MLKEFKEFALKGNVLDLAIAVVMGAAFNKIISSLVENIIMPLI----GKIFGSVDFAKEW | 56 |
| Query: | 82 | SWNGVAYGNFLSAVINFLIVGTTLFFIVKAANKVMAKKPAEEEIIEVVEPTQEQLLAEIR | 141 |
| | | S+ G+ YG F+ +VI+F+I+ LF VK AN +M K+ AEE E V LL EIR | |
| Sbjct: | 57 | SFWGIKYGLFIQSVIDFIIIAFALFIFVKIANTLMKKEEAEE---EAVVEENVVLLTEIR | 113 |
| Query: | 142 | DLLANK | 147 |
| | | DLL K | |
| Sbjct: | 114 | DLLREK | 119 |

[6829] A related DNA sequence was identified in S. pyogenes <SEQ ID 3807> which encodes the amino acid sequence <SEQ ID 3808>. Analysis of this protein sequence reveals the following:

| Possible site: 28 | | | | |
|---|---|---|---|---|
| >>> Seems to have a cleavable N-term signal seq. | | | | |
| | INTEGRAL | Likelihood = −5.95 | Transmembrane | 71-87 (67-90) |

```
----- Final Results -----
                              bacterial membrane --- Certainty = 0.3378(Affirmative) < succ>
                                bacterial outside --- Certainty = 0.0000(Not Clear) < succ>
                            bacterial cytoplasm --- Certainty = 0.0000(Not Clear) < succ>
```

[6830] The protein has homology with the following sequences in the databases:

| >GP: CAB15653 GB: Z99122 similar to large conductance mechanosensitive | | | |
|---|---|---|---|
| channel protein [Bacillus subtilis] | | | |
| Identities = 61/126 (48%), Positives = 77/126 (60%), Gaps = 7/126 (5%) | | | |
| Query: | 1 | MVKELKAFLFRGNIIELAVAVIIGGAFGAIVTSFVNDIITPLILNPALKAANVENITQLS | 60 |
| | | M E KAF RGNI++LA+ V+IGGAFG IVTS VNDII PL+ L + ++ | |
| Sbjct: | 1 | MWNEFKAFAMRGNIVDLAIGVVIGGAFGKIVTSLVNDIIMPLV-GLLLGGLDFSGLSFTF | 59 |
| Query: | 61 | WNG-VKYGSFLGAVINFLIIGTSLFFVVKAAEKAMPKKE-----KEAAAPTQEELLTEIR | 114 |
| | | + VKYGSF+ ++NFLII S+F V++ KKE E A QEELL EIR | |
| Sbjct: | 60 | GDAVVKYGSFIQTIVNFLIISFSIFIVIRTLNGLRRKKEAEEEAAEEAVDAQEELLKEIR | 119 |
| Query: | 115 | DLLAQK | 120 |
| | | DLL Q+ | |
| Sbjct: | 120 | DLLKQQ | 125 |

[6831] An alignment of the GAS and GBS proteins is shown below.

| Identities = 86/125 (68%), Positives = 99/125 (78%), Gaps = 5/125 (4%) | | | |
|---|---|---|---|
| Query: | 23 | MIKELKEFLFKGNVLDLAVAVILGAAFNAIITSLVKDVITPLILNPVLKAAGVSNIAQLS | 82 |
| | | M+KELK FLF+GN+++LAVAVI+G AF AI+TS V D+ITPLILNP LKAA V NI QLS | |
| Sbjct: | 1 | MVKELKAFLFRGNIIELAVAVIIGGAFGAIVTSFVNDIITPLILNPALKAANVENITQLS | 60 |
| Query: | 83 | WNGVAYGNFLSAVINFLIVGTTLFFIVKAANKVMAKKPAEEEIIEVVEPTQEQLLAEIRD | 142 |
| | | WNGV YG+FL AVINFLI+GT+LFF+VKAA K M KK E PTQE+LL EIRD | |
| Sbjct: | 61 | WNGVKYGSFLGAVINFLIIGTSLFFVVKAAEKAMPKKEK-----EAAAPTQEELLTEIRD | 115 |
| Query: | 143 | LLANK | 147 |
| | | LLA K | |
| Sbjct: | 116 | LLAQK | 120 |

[6832] A related GBS gene <SEQ ID 8753> and protein <SEQ ID 8754> were also identified. Analysis of this protein sequence reveals the following:

| Lipop: Possible site: −1 Crend: 10 | | | | |
|---|---|---|---|---|
| SRCFLG: 0 | | | | |
| McG: Length of UR: 4 | | | | |
| Peak Value of UR: 2.96 | | | | |
| Net Charge of CR: 1 | | | | |
| McG: Discrim Score: 4.39 | | | | |
| GvH: Signal Score (−7.5): −1.79 | | | | |
| Possible site: 25 | | | | |
| >>> Seems to have a cleavable N-term signal seq. | | | | |
| Amino Acid Composition: calculated from 26 | | | | |
| ALOM program count: 1 value: −5.79 threshold: 0.0 | | | | |
| | INTEGRAL | Likelihood = −5.79 | Transmembrane | 71-87 (68-90) |
| | PERIPHERAL | Likelihood = 1.06 | 28 | |

```
modified ALOM score: 1.66
icm1 HYPID: 7 CFP: 0.331
*** Reasoning Step: 3
----- Final Results -----
                              bacterial membrane --- Certainty = 0.3314(Affirmative) < succ>
                                bacterial outside --- Certainty = 0.0000(Not Clear) < succ>
                            bacterial cytoplasm --- Certainty = 0.0000(Not Clear) < succ>
```

[6833] The protein has homology with the following sequences in the databases:

[chemical structure]

[6834] SEQ ID 8754 (GBS354) was expressed in E. coli as a His-fusion product. SDS-PAGE analysis of total cell extract is shown in FIG. 74 (lane 3; MW 17 kDa).

[6835] Based on this analysis, it was predicted that these proteins and their epitopes could be useful antigens for vaccines or diagnostics.

### EXAMPLE 1227

[6836] A DNA sequence (GBSx1303) was identified in S. agalactiae <SEQ ID 3809> which encodes the amino acid sequence <SEQ ID 3810>. This protein is predicted to be 30S ribosomal protein S21-related protein. Analysis of this protein sequence reveals the following:

```
Possible site: 29
>>> Seems to have no N-terminal signal sequence
----- Final Results -----
                            bacterial cytoplasm --- Certainty = 0.6479(Affirmative) < succ>
                              bacterial membrane --- Certainty = 0.0000(Not Clear) < succ>
                                bacterial outside --- Certainty = 0.0000(Not Clear) < succ>
```

[6837] A related GBS nucleic acid sequence <SEQ ID 9391> which encodes amino acid sequence <SEQ ID 9392> was also identified. A related GBS nucleic acid sequence <SEQ ID 10799> which encodes amino acid sequence <SEQ ID 10800> was also identified.

[6838] The protein is similar to the 30S ribosomal protein S21 from Listeria monocytogenes:

>GP: BAA82793 GB: AB023064 30S ribosomal protein
S21 [Listeria monocytogenes]
Identities = 30/34 (88%), Positives = 34/34 (99%)

| | | | |
|---|---|---|---|
| Query: | 1 | MTKAGTLQESRKREFYEKPSVKRKRKSEAARKRK | 34 |
| | | ++K+GTLQESRKREFYEKPSVKRK+KSEAARKRK | |
| Sbjct: | 23 | VSKSGTLQESRKREFYEKPSVKRKKKSEAARKRK | 56 |

[6839] A related DNA sequence was identified in S. pyogenes <SEQ ID 3811> which encodes the amino acid sequence <SEQ ID 3812>. Analysis of this protein sequence reveals the following:

```
Possible site: 38
>>> Seems to have no N-terminal signal sequence
----- Final Results -----
                            bacterial cytoplasm --- Certainty = 0.4815(Affirmative) < succ>
                              bacterial membrane --- Certainty = 0.0000(Not Clear) < succ>
                                bacterial outside --- Certainty = 0.0000(Not Clear) < succ>
```

[6840] An alignment of the GAS and GBS proteins is shown below.

Identities = 35/36 (97%), Positives = 36/36 (99%)

| | | | |
|---|---|---|---|
| Query: | 1 | MTKAGTLQESRKREFYEKPSVKRKRKSEAARKRKKF | 36 |
| | | +TKAGTLQESRKREFYEKPSVKRKRKSEAARKRKKF | |
| Sbjct: | 35 | VTKAGTLQESRKREFYEKPSVKRKRKSEAARKRKKF | 70 |

[6841] Based on this analysis, it was predicted that these proteins and their epitopes could be useful antigens for vaccines or diagnostics.

### EXAMPLE 1228

[6842] A DNA sequence (GBSx1304) was identified in S. agalactiae <SEQ ID 3813> which encodes the amino acid sequence <SEQ ID 3814>. Analysis of this protein sequence reveals the following:

| Possible site: 18 | | | | |
|---|---|---|---|---|
| >>> Seems to have an uncleavable N-term signal seq | | | | |
| | INTEGRAL | Likelihood = −7.06 | Transmembrane | 5-21 (3-23) |
| | INTEGRAL | Likelihood = −2.28 | Transmembrane | 191-207 (189-207) |

```
----- Final Results -----
                              bacterial membrane --- Certainty = 0.3824(Affirmative) < succ>
                                bacterial outside --- Certainty = 0.0000(Not Clear) < succ>
                            bacterial cytoplasm --- Certainty = 0.0000(Not Clear) < succ>
```

[6843] The protein has no significant homology with any sequences in the GENPEPT database.

[6844] No corresponding DNA sequence was identified in S. pyogenes.

[6845] A related GBS gene <SEQ ID 8755> and protein <SEQ ID 8756> were also identified. Analysis of this protein sequence reveals the following:

| Lipop Possible site: −1 Crend: 2 | | | | |
|---|---|---|---|---|
| McG: Discrim Score: 8.68 | | | | |
| GvH: Signal Score (−7.5): −5.71 | | | | |
| Possible site: 18 | | | | |
| >>> Seems to have an uncleavable N-term signal seq | | | | |
| ALOM program count: 2 value: −7.06 threshold: 0.0 | | | | |
| | INTEGRAL | Likelihood = −7.06 | Transmembrane | 5-21 (3-23) |
| | INTEGRAL | Likelihood = −2.28 | Transmembrane | 191-207 (189-207) |
| | PERIPHERAL | Likelihood = 4.35 | 142 | |

```
modified ALOM score: 1.91
*** Reasoning Step: 3
----- Final Results -----
                              bacterial membrane --- Certainty = 0.3824(Affirmative) < succ>
                                bacterial outside --- Certainty = 0.0000(Not Clear) < succ>
                            bacterial cytoplasm --- Certainty = 0.0000(Not Clear) < succ>
```

[6846] SEQ ID 8756 (GBS259) was expressed in E. coli as a His-fusion product. SDS-PAGE analysis of total cell extract is shown in FIG. 45 (lane 4; MW 54 kDa).

[6847] Based on this analysis, it was predicted that these proteins and their epitopes could be useful antigens for vaccines or diagnostics.

### EXAMPLE 1229

[6848] A DNA sequence (GBSx1305) was identified in S. agalactiae <SEQ ID 3815> which encodes the amino acid sequence <SEQ ID 3816>. Analysis of this protein sequence reveals the following:

| Possible site: 56 | | | | |
|---|---|---|---|---|
| >>> Seems to have no N-terminal signal sequence | | | | |
| | INTEGRAL | Likelihood = −1.38 | Transmembrane | 136-152 (135-152) |

```
----- Final Results -----
                              bacterial membrane --- Certainty = 0.1553(Affirmative) < succ>
                                bacterial outside --- Certainty = 0.0000(Not Clear) < succ>
                            bacterial cytoplasm --- Certainty = 0.0000(Not Clear) < succ>
```

[6849] The protein has homology with the following sequences in the GENPEPT database.

| >GP: AAD47593 GB: AF140784 Vexp2 [Streptococcus pneumoniae] | | | |
|---|---|---|---|
| Identities = 117/212 (55%), Positives = 152/212 (71%) | | | |
| Query: | 1 | MLELKNIAYRYKGNDNKTLENINYSFQSGVFYTILGNSGSGKTTLLSLMAGLDSPTEGQV | 60 |
| | | +L+L+++ YRYK L INY+F+ G FY+I+G SG+GK+TLLSL+AGLDSP EG + | |
| Sbjct: | 3 | LLQLQDVTYRYKNTAEAVLYQINYNFEPGKFYSIIGESGAGKSTLLSLLAGLDSPVEGSI | 62 |
| Query: | 61 | LFNKKDIKEAGYAQHRKKNIALVFQNYNLLDYLTPLENVQLVKPTADKQLLLDLGLKEDM | 120 |
| | | LF +DI++ GY+ HR +I+LVFQNYNL+DYL+PLEN++LV A K LL+LGL E | |
| Sbjct: | 63 | LFQGEDIRKKGYSYHRMHHISLVFQNYNLIDYLSPLENIRLVNKKASKNTLLELGLDESQ | 122 |
| Query: | 121 | LTRNILRLSGGQQQRVAIARALVVGTPAILLDEPTGNLDFDISRDITMRLKDFAHKEKRC | 180 |
| | | + RN+L+LSGGQQQRVAIAR+LV P IL DEPTGNLD + DI LK A K +C | |
| Sbjct: | 123 | IKRNVLQLSGGQQQRVAIARSLVSEAPVILADEPTGNLDPKTAGDIVELLKSLAQKTGKC | 182 |
| Query: | 181 | VIMVTHSREIAHMADTALQLIGDNLKELSKES | 212 |
| | | VI+VTHS+E+A +D L+L L E S | |
| Sbjct: | 183 | VIVVTHSKEVAQASDITLELKDKKLTETRNTS | 214 |

[6850] SEQ ID 3816 (GBS363) was expressed in E. coli as a His-fusion product. SDS-PAGE analysis of total cell extract is shown in FIG. 74 (lane 5; MW 28 kDa). It was also expressed in E. coli as a GST-fusion product. SDS-PAGE analysis of total cell extract is shown in FIG. 81 (lane 10; MW 53 kDa).

[6851] GBS363-GST was purified as shown in FIG. 216, lane 9.

[6852] Based on this analysis, it was predicted that this protein and its epitopes, could be useful antigens for vaccines or diagnostics.

### EXAMPLE 1230

[6853] A DNA sequence (GBSx1306) was identified in S. agalactiae <SEQ ID 3817> which encodes the amino acid sequence <SEQ ID 3818>. This protein is predicted to be Vexp3. Analysis of this protein sequence reveals the following:

| Possible site: 47 | | | | |
|---|---|---|---|---|
| >>> Seems to have an uncleavable N-term signal seq | | | | |
| | INTEGRAL | Likelihood = −14.97 | Transmembrane | 71-87 (66-97) |
| | INTEGRAL | Likelihood = −3.61 | Transmembrane | 2-18 (1-18) |

```
----- Final Results -----
                              bacterial membrane --- Certainty = 0.6986(Affirmative) < succ>
                                bacterial outside --- Certainty = 0.0000(Not Clear) < succ>
                            bacterial cytoplasm --- Certainty = 0.0000(Not Clear) < succ>
```

[6854] The protein has no significant homology with any sequences in the GENPEPT database.

[6855] No corresponding DNA sequence was identified in S. pyogenes.

[6856] Based on this analysis, it was predicted that this protein and its epitopes, could be useful antigens for vaccines or diagnostics.

### EXAMPLE 1231

[6857] A DNA sequence (GBSx1307) was identified in S. agalactiae <SEQ ID 3819> which encodes the amino acid sequence <SEQ ID 3820>. This protein is predicted to be Vexp3. Analysis of this protein sequence reveals the following:

```
Possible site: 45
>>> Seems to have no N-terminal signal sequence
----- Final Results -----
                            bacterial cytoplasm --- Certainty = 0.1986(Affirmative) < succ>
                              bacterial membrane --- Certainty = 0.0000(Not Clear) < succ>
                                bacterial outside --- Certainty = 0.0000(Not Clear) < succ>
```

[6858] The protein has no significant homology with any sequences in the GENPEPT database.

[6859] No corresponding DNA sequence was identified in S. pyogenes.

[6860] Based on this analysis, it was predicted that this protein and its epitopes, could be useful antigens for vaccines or diagnostics.

### EXAMPLE 1232

[6861] A DNA sequence (GBSx1308) was identified in S. agalactiae <SEQ ID 3821> which encodes the amino acid sequence <SEQ ID 3822>. This protein is predicted to be Vexp3. Analysis of this protein sequence reveals the following:

| Possible site: 34 | | | | |
|---|---|---|---|---|
| >>> Seems to have no N-terminal signal sequence | | | | |
| | INTEGRAL | Likelihood = −6.05 | Transmembrane | 22-38 (17-39) |

```
----- Final Results -----
                              bacterial membrane --- Certainty = 0.3421(Affirmative) < succ>
                                bacterial outside --- Certainty = 0.0000(Not Clear) < succ>
                            bacterial cytoplasm --- Certainty = 0.0000(Not Clear) < succ>
```

[6862] The protein has homology with the following sequences in the GENPEPT database.

| >GP: AAD47594 GB: AF140784 Vexp3 [Streptococcus pneumoniae] | | | |
|---|---|---|---|
| Identities = 39/153 (25%), Positives = 67/153 (43%), Gaps = 9/153 (5%) | | | |
| Query: | 3 | LFKRSFLYVSRKKRKSITLFVCLWLVASTLISGIAVKNAGLTA-KKTFSRQTGSILHISS | 61 |
| | | + +F YV+RK KSI +F+ + L+AS + G+++K A A ++TF T S + | |
| Sbjct: | 1 | MLHNAFAYVTRKFFKSIVIFLIILLMASLSLVGLSIKGATAKASQETFKNITNS-FSMQI | 59 |
| Query: | 62 | DSTDLVGDGYGSGEIPEKAIVNIASNPNVKRVNNNLMAYAGLTSEKMVTRPNDKEQYKE- | 120 |
| | | + G G+G I + I I N ++ + A LT ++ P K+ | |
| Sbjct: | 60 | NRRVNQGTPRGAGNIKGEDIKKITENKAIESYVKRINAIGDLTGYDLIETPETKKNLTAD | 119 |
| Query: | 121 | ------QVLQVHGNSYSDTDPKYTAGMISLKGG | 147 |
| | | L + G + S + K+ +G L G | |
| Sbjct: | 120 | RAKRFGSSLMITGVNDSSKEDKFVSGSYKLVEG | 152 |

[6863] No corresponding DNA sequence was identified in S. pyogenes.

[6864] Based on this analysis, it was predicted that this protein and its epitopes, could be useful antigens for vaccines or diagnostics.

### EXAMPLE 1233

[6865] A DNA sequence (GBSx1309) was identified in S. agalactiae <SEQ ID 3823> which encodes the amino acid sequence <SEQ ID 3824>. Analysis of this protein sequence reveals the following:

| Possible site: 39 | | | | |
|---|---|---|---|---|
| >>> Seems to have an uncleavable N-term signal seq | | | | |
| | NTEGRAL | Likelihood = −15.76 | Transmembrane | 295-311 (287-317) |
| | INTEGRAL | Likelihood = −7.59 | Transmembrane | 49-65 (46-69) |
| | INTEGRAL | Likelihood = −6.90 | Transmembrane | 340-356 (339-362) |
| | INTEGRAL | Likelihood = −5.57 | Transmembrane | 411-427 (404-430) |

```
----- Final Results -----
                              bacterial membrane --- Certainty = 0.7305(Affirmative) < succ>
                                bacterial outside --- Certainty = 0.0000(Not Clear) < succ>
                            bacterial cytoplasm --- Certainty = 0.0000(Not Clear) < succ>
```

[6866] A related GBS nucleic acid sequence <SEQ ID 9695> which encodes amino acid sequence <SEQ ID 9696> was also identified.

[6867] The protein has homology with the following sequences in the GENPEPT database.

| >GP: CAB12182 GB: Z99106 similar to transporter [Bacillus subtilis] | | | |
|---|---|---|---|
| Identities = 95/370 (25%), Positives = 167/370 (44%), | | | |
| Gaps = 41/370 (11%) | | | |
| Query: | 109 | ESVEASLSIDVGSRLKSVSPYNSS--------KEENQVTLAGYQSTEDLRAFQTKALVLK | 160 |
| | | +++ E+S S D S S + NS + +++ G ST + F + | |
| Sbjct: | 115 | DAIESSSSSDSSSSSSSSNAKNSQGGGQGGPQMVQADLSIEGVISTALVDDFSDGDSKIT | 174 |
| Query: | 161 | KGSHLAADNT--KQVLVPLKLAQKNHLSVGNKLRLGK---ENVT----IAGIYDANSA-- | 209 |
| | | G + + K ++ LA++N LSVG+ + + E+ T I GIY S+ | |
| Sbjct: | 175 | DGRAITKSDVGKKVTVINETLAEENDLSVGDSITIESATDEDTTVKLKIVGIYKTTSSGD | 234 |
| Query: | 210 | -KSKNTFNPNIDNTLIAQATLVRKISKQKGYQTV---AVRLSDKRLVDTVIQNIKQWPLD | 265 |
| | | +++N N N L T + T+ + D + +DT ++ K+ +D | |
| Sbjct: | 235 | DQAQNFSFLNPYNKLYTPYTATAALKGDDYKNTIDSAVYYMDDAKNMDTFVKAAKKTSID | 294 |
| Query: | 266 | FGKLDVQTAKEFYGDSYRNIETLHRLVGRIILIVSLVAMAILVVMLTFWINNRIKETGIL | 325 |
| | | F + T + Y IE + ++ +VS+ IL +++ I R E G+L | |
| Sbjct: | 295 | FDTYTLNTNDQLYQQMVGPIENVASFSKNVVYLVSVAGAVILGLIVMMSIRERKYEMGVL | 354 |
| Query: | 326 | LAIGKTKFEIIGHYLIEVLLVAGAAFTLSIIGGVFLGKTFAAGLLSQV------------ | 373 |
| | | +AIG+ ++++IG +L E+L+VA A L+ + G + LLSQ | |
| Sbjct: | 355 | MAIGEKRWKLIGQFLTEILIVAVIAIGLASVTGNLVANQLGNQLLSQQISSSTDSTQTAS | 414 |
| Query: | 374 | ------NGGVSSQIVQNSSLIIDRIDNLAVSVGVMDVFRLYAQGALICLFAVVLSSYSIL | 427 |
| | | GG+ ++ +SS +D ID+L V+V + D+ L G LI + A +L S S+L | |
| Sbjct: | 415 | GQMPGGGGGNGGKMFGHSSSNVDVIDSLNVAVSMNDMLILGGIGILIAIIATLLPSISVL | 474 |
| Query: | 428 | KLQPKQILSR | 437 |
| | | +L PK IL++ | |
| Sbjct: | 475 | RLHPKTILTK | 484 |

[6868] No corresponding DNA sequence was identified in S. pyogenes.

[6869] A related GBS gene <SEQ ID 8757> and protein <SEQ ID 8758> were also identified. Analysis of this protein sequence reveals the following:

| Lipop: Possible site: −1 Crend: 9 | | | | |
|---|---|---|---|---|
| McG: Discrim Score: 1.50 | | | | |
| GvH: Signal Score (−7.5): −8.43 | | | | |
| Possible site: 39 | | | | |
| >>> Seems to have an uncleavable N-term signal seq | | | | |
| ALOM program count: 4 value: −15.76 threshold: 0.0 | | | | |
| | INTEGRAL | Likelihood = −15.76 | Transmembrane | 295-311 (287-317) |
| | INTEGRAL | Likelihood = −7.59 | Transmewbrane | 49-65 (46-69) |
| | INTEGRAL | Likelihood = −6.90 | Transmembrane | 340-356 (339-362) |
| | INTEGRAL | Likelihood = −5.57 | Transmembrane | 411-427 (404-430) |
| | PERIPHERAL | Likelihood = 3.45 | 386 | |

```
modified ALOM score: 3.65
*** Reasoning Step: 3
----- Final Results -----
                              bacterial membrane --- Certainty = 0.7305(Affirmative) < succ>
                                bacterial outside --- Certainty = 0.0000(Not Clear) < succ>
                            bacterial cytoplasm --- Certainty = 0.0000(Not Clear) < succ>
```

[6870] The protein has homology with the following sequences in the databases:

[chemical structure]

[6871] Based on this analysis, it was predicted that these proteins and their epitopes could be useful antigens for vaccines or diagnostics.

### EXAMPLE 1234

[6872] A DNA sequence (GBSx1310) was identified in S. agalactiae <SEQ ID 3825> which encodes the amino acid sequence <SEQ ID 3826>. Analysis of this protein sequence reveals the following:

```
Possible site: 24
>>> Seems to have a cleavable N-term signal seq.
----- Final Results -----
                                bacterial outside --- Certainty = 0.3000(Affirmative) < succ>
                              bacterial membrane --- Certainty = 0.0000(Not Clear) < succ>
                            bacterial cytoplasm --- Certainty = 0.0000(Not Clear) < succ>
```

[6873] The protein has homology with the following sequences in the GENPEPT database.

| >GP: CAB11993 GB: Z99105 ybdG [Bacillus subtilis] | | | |
|---|---|---|---|
| Identities = 66/224 (29%), Positives = 102/224 (45%), Gaps = 22/224 (9%) | | | |
| Query: | 84 | IKEYGQKVEVKGKKMNVYTVGEGKVPIVFIPGQGTVTAKHQYHNLISNLSKTHKVVVVEP | 143 |
| | | +K G V+V GKKMNVY G GK VF+ G G ++ L S SK +K+ VV+ | |
| Sbjct: | 41 | LKGKGTVVDVDGKKMNVYQEGSGKDTFVFMSGSGIAAPAYEMKGLYSKFSKENKIAVVDR | 100 |
| Query: | 144 | FGSGLSDVIDQPRNLANITSDIHEALQKVGITGKYVIASHSIGGVYALKYISTYPKEVLG | 203 |
| | | G G S+V R++ + +AL K G Y++ HSI G+ A+ + YPKE+ | |
| Sbjct: | 101 | AGYGYSEVSHDDRDIDTVLEQTRKALMKSGNKPPYILMPHSISGIEAMYWAQKYPKEIKA | 160 |
| Query: | 204 | LIGLDTSTP---------GMEGGKQVDF-------------AAPVLKELPKIPKVSDDIN | 241 |
| | | +I +D P G++ K F +A E+ + ++D+ | |
| Sbjct: | 161 | IIAMDIGLPQQYVTYKLSGVDRLKVRGFHLLTSIGFHRFIPSAVYNPEVIRQSFLTDEEK | 220 |
| Query: | 242 | AQFFAIGHKILNNSNMKEEAKNSSNMINESANYKIPKGIPAMYL | 285 |
| | | + AI K N++M+ E S ++S N PK P + L | |
| Sbjct: | 221 | EIYKAINFKQFFNADMEHELLQSYQNGSKSVNLPAPKETPVLIL | 264 |

[6874] No corresponding DNA sequence was identified in S. pyogenes.

[6875] SEQ ID 3826 (GBS121) was expressed in E. coli as a His-fusion product. SDS-PAGE analysis of total cell extract is shown in FIG. 24 (lane 9; MW 40 kDa). It was also expressed in E. coli as a GST-fusion product. SDS-PAGE analysis of total cell extract is shown in FIG. 31 (lane 6; MW 65 kDa).

[6876] GBS121-GST was purified as shown in FIG. 198, lane 6.

[6877] Based on this analysis, it was predicted that this protein and its epitopes, could be useful antigens for vaccines or diagnostics.

### EXAMPLE 1235

[6878] A DNA sequence (GBSx1311) was identified in S. agalactiae <SEQ ID 3827> which encodes the amino acid sequence <SEQ ID 3828>. Analysis of this protein sequence reveals the following:

```
Possible site: 33
>>> Seems to have a cleavable N-term signal seq.
----- Final Results -----
                                bacterial outside --- Certainty = 0.3000(Affirmative) < succ>
                              bacterial membrane --- Certainty = 0.0000(Not Clear) < succ>
                            bacterial cytoplasm --- Certainty = 0.0000(Not Clear) < succ>
```

[6879] A related GBS nucleic acid sequence <SEQ ID 8759> which encodes amino acid sequence <SEQ ID 8760> was also identified. Analysis of this protein sequence reveals the following:

| Lipop: Possible site: −1 Crend: 8 | | | |
|---|---|---|---|
| McG: Discrim Score: 3.70 | | | |
| GvH: Signal Score (−7.5): −0.0600004 | | | |
| Possible site: 22 | | | |
| >>> Seems to have a cleavable N-term signal seq. | | | |
| ALOM program count: 0 value: 8.01 threshold: 0.0 | | | |
| | PERIPHERAL | Likelihood = 8.01 | 167 |

```
modified ALOM score: −2.10
*** Reasoning Step: 3
----- Final Results -----
                                bacterial outside --- Certainty = 0.3000(Affirmative) < succ>
                              bacterial membrane --- Certainty = 0.0000(Not Clear) < succ>
                            bacterial cytoplasm --- Certainty = 0.0000(Not Clear)
```

[6880] No corresponding DNA sequence was identified in S. pyogenes.

[6881] SEQ ID 8760 (GBS60) was expressed in E. coli as a His-fusion product. SDS-PAGE analysis of total cell extract is shown in FIG. 16 (lane 7; MW 38.6 kDa).

[6882] GBS60-His was purified as shown in FIG. 193, lane 3.

[6883] Based on this analysis, it was predicted that these proteins and their epitopes could be useful antigens for vaccines or diagnostics.

### EXAMPLE 1236

[6884] A DNA sequence (GBSx1312) was identified in S. agalactiae <SEQ ID 3829> which encodes the amino acid sequence <SEQ ID 3830>. This protein is predicted to be unnamed protein product. Analysis of this protein sequence reveals the following:

```
Possible site: 21
>>> May be a lipoprotein
----- Final Results -----
                              bacterial membrane --- Certainty = 0.0000(Not Clear) < succ>
                                bacterial outside --- Certainty = 0.0000(Not Clear) < succ>
                            bacterial cytoplasm --- Certainty = 0.0000(Not Clear) < succ>
```

[6885] A related GBS nucleic acid sequence <SEQ ID 9693> which encodes amino acid sequence <SEQ ID 9694> was also identified.

[6886] No corresponding DNA sequence was identified in S. pyogenes.

[6887] A related GBS gene <SEQ ID 8761> and protein <SEQ ID 8762> were also identified. Analysis of this protein sequence reveals the following:

```
Lipop: Possible site: 19 Crend: 5
McG: Discrim Score: 9.85
GvH: Signal Score (−7.5): −0.28
          Possible site: 21
>>> May be a lipoprotein
ALOM program count: 0 value: 9.07 threshold: 0.0
      PERIPHERAL Likelihood = 9.07 99
  modified ALOM score: −2.31
----- Final Results -----
                              bacterial membrane --- Certainty = 0.0000(Not Clear) < succ>
                                bacterial outside --- Certainty = 0.0000(Not Clear) < succ>
                            bacterial cytoplasm --- Certainty = 0.0000(Not Clear) < succ>
```

[6888] The protein has homology with the following sequences in the databases:

[chemical structure]

[6889] SEQ ID 8762 (GBS21) was expressed in E. coli as a His-fusion product. SDS-PAGE analysis of total cell extract is shown in FIG. 11 (lane 3; MW 31.6 kDa).

[6890] GBS21-His was purified as shown in FIG. 192, lane 11.

[6891] GBS21L was expressed in E. coli as a GST-fusion product. SDS-PAGE analysis of total cell extract is shown in FIG. 124 (lane 8-10; MW 66.5 kDa). It was also expressed in E. coli as a His-fusion product. SDS-PAGE analysis of total cell extract is shown in FIG. 124 (lane 11; MW 41.5 kDa) and in FIG. 180 (lane 6; MW 41 kDa). GBS21L-His was purified as shown in FIG. 232 (lanes 3 & 4) Based on this analysis, it was predicted that these proteins and their epitopes could be useful antigens for vaccines or diagnostics.

### EXAMPLE 1237

[6892] A DNA sequence (GBSx1313) was identified in S. agalactiae <SEQ ID 3831> which encodes the amino acid sequence <SEQ ID 3832>. This protein is predicted to be endopeptidase 0. Analysis of this protein sequence reveals the following:

```
Possible site: 18
>>> Seems to have no N-terminal signal sequence
----- Final Results -----
                            bacterial cytoplasm --- Certainty = 0.3854(Affirmative) < succ>
                              bacterial membrane --- Certainty = 0.0000(Not Clear) < succ>
                                bacterial outside --- Certainty = 0.0000(Not Clear) < succ>
```

[6893] The protein has homology with the following sequences in the GENPEPT database.

>GP: AAF67832 GB: AF179267 endopeptidase PepO2
[Lactococcus lactis]
Identities = 21/36 (58%), Positives = 26/36 (71%)

| | | | |
|---|---|---|---|
| Query: | 1 | MRANIPVRNFQEFYDAFGVKKGDSMYLKPEKRLTLW | 36 |
| | | +RANIP N +EFY+ F VK+ D MY PEKRL+W | |
| Sbjct: | 592 | LRANIPPTNLEEFYETFDVKETDQMYRAPEKRLKIW | 627 |

[6894] There is also some homology to SEQ ID 2384:

Identities = 13/36 (36%), Positives = 25/36 (69%)

| | | | |
|---|---|---|---|
| Query: | 1 | MRANIPVRNFQEFYDAFGVKKGDSMYLKPEKRLTLW | 36 |
| | | +R N+ + NF F++ F +K+GD+M+ P+ R+ +W | |
| Sbjct: | 596 | LRTNVTLTNFDAFHETFDIKEGDAMWRAPKDRVIIW | 631 |

[6895] Based on this analysis, it was predicted that this protein and its epitopes, could be useful antigens for vaccines or diagnostics.

### EXAMPLE 1238

[6896] A DNA sequence (GBSx1314) was identified in S. agalactiae <SEQ ID 3833> which encodes the amino acid sequence <SEQ ID 3834>. This protein is predicted to be endopeptidase 0. Analysis of this protein sequence reveals the following:

```
Possible site: 47
>>> Seems to have no N-terminal signal sequence
----- Final Results -----
                            bacterial cytoplasm --- Certainty = 0.3801(Affirmative) < succ>
                              bacterial membrane --- Certainty = 0.0000(Not Clear) < succ>
                                bacterial outside --- Certainty = 0.0000(Not Clear) < succ>
```

[6897] The protein has homology with the following sequences in the GENPEPT database.

| >GP: AAA16168 GB: L18760 endopeptidase [Lactococcus lactis] | | | |
|---|---|---|---|
| Identities = 118/268 (44%), Positives = 174/268 (64%), Gaps = 6/268 (2%) | | | |
| Query: | 1 | MGDYYGKKYFGEAAKKDVEHMAKKIINVYKTRLKNNTWLSENTKAMAIKKLDNMRLMIGY | 60 |
| | | +G +YGKKYFGEAAK DV+ M +I VY+ RL N WLS+ T AI+KLD + IG+ | |
| Sbjct: | 321 | IGLFYGKKYFGEAAKADVKRMVTAMIKVYQVRLSKNEWLSQETAEKAIEKLDAITPFIGF | 380 |
| Query: | 61 | PEDYPDLYRQYQFDSKASFFENNDNYRKLSNKKTFEEFNQSNQREHWQMSANAVNAYNDP | 120 |
| | | P+ P++Y + + S S +E+ + K+ +TFE+F++ + W M A+ VNAY P | |
| Sbjct: | 381 | PDKLPEIYSRLKTTS-GSLYEDALKFDKILTARTFEKFSEDVDKTSWHMPAHMVNAYYSP | 439 |
| Query: | 121 | NTNSIVFPAAIFQSPLYDKTKTVSQNYGAIGAIIGHEISHSFDINGMKYDEKGNLHDWWT | 180 |
| | | ++N+IVFPAAI Q+P Y ++ SQNYG IGA+I HEISH+FD NG ++D++GNL+ WW | |
| Sbjct: | 440 | DSNTIVFPAAILQAPFYSLEQSSSQNYGGIGAVIAHEISHAFDNNGAQFDKEGNLNKWWL | 499 |
| Query: | 181 | KEDLKHYKKKTQAMIDQWDGLKADGGKVDGKLTLAENIADNGGVMASLEALKTEKIQTIK | 240 |
| | | ED + +++K + MI +DG++ + G +GKL ++ENIAD GG+ A+L A K EK +K | |
| Sbjct: | 500 | DEDYEAFEEKQKEMIALFDGVETEAGPANGKLIVSENIADQGGITAALTAAKDEKDVDLK | 559 |
| Query: | 241 | NFLNHGQVFGVKKQPKNKVSPQFSQMFM | 268 |
| | | F + K + K S +F QM + | |
| Sbjct: | 560 | AFFSQW-----AKIWRMKASKEFQQMLL | 582 |

[6898] There is also homology to SEQ ID 2384:

| Identities = 110/253 (43%), Positives = 161/253 (63%), Gaps = 1/253 (0%) | | | |
|---|---|---|---|
| Query: | 1 | MGDYYGKKYFGEAAKKDVEHMAKKIINVYKTRLKNNTWLSENTKAMAIKKLDNMRLMIGY | 60 |
| | | +G +Y + F AK DVE ++I VYK+RL+ WL+ T+ AI KL+ + IGY | |
| Sbjct: | 324 | LGLWYAGQKFSPEAKADVESKVARMIEVYKSRLETADWLAPATREKAITKLNVITPHIGY | 383 |
| Query: | 61 | PEDYPDLYRQYQFDSKASFFENNDNYRKLSNKKTFEEFNQSNQREHWQMSANAVNAYNDP | 120 |
| | | PE P+ Y + D S EN N K++ T+ ++N+ R W M A+ VNAY D | |
| Sbjct: | 384 | PEKLPETYAKKVIDESLSLVENAQNLAKITIAHTWSKWNKPVDRSEWHMPAHLVNAYYDL | 443 |
| Query: | 121 | NTNSIVFPAAIFQSPLYDKTKTVSQNYGAIGAIIGHEISHSFDINGMKYDEKGNLHDWWT | 180 |
| | | N IVFPAAI Q P Y ++ S NYG IGA+I HEISH+FD NG +DE G+L+DWWT | |
| Sbjct: | 444 | QQNQIVFPAAILQEPFYSLDQSSSANYGGIGAVIAHEISHAFDTNGASFDEHGSLNDWWT | 503 |
| Query: | 181 | KEDLKHYKKKTQAMIDQWDGLKADGGKVDGKLTLAENIADNGGVMASLEALKTEKIQTIK | 240 |
| | | +ED +K++T ++ Q+DGL++ G KV+GKLT++EN+AD GGV +LEA ++E+ + + | |
| Sbjct: | 504 | QEDYAAFKERTDKIVAQFDGLESHGAKVNGKLTVSENVADLGGVACALEAAQSEEDFSAR | 563 |
| Query: | 241 | N-FLNHGQVFGVK | 252 |
| | | + F+N ++ +K | |
| Sbjct: | 564 | DFFINFATIWRMK | 576 |

[6899] Based on this analysis, it was predicted that this protein and its epitopes, could be useful antigens for vaccines or diagnostics.

### EXAMPLE 1239

[6900] A DNA sequence (GBSx1315) was identified in S. agalactiae <SEQ ID 3835> which encodes the amino acid sequence <SEQ ID 3836>. Analysis of this protein sequence reveals the following:

```
Possible site: 39
>>> Seems to have a cleavable N-term signal seq.
----- Final Results -----
                                bacterial outside --- Certainty = 0.3000(Affirmative) < succ>
                              bacterial membrane --- Certainty = 0.0000(Not Clear) < succ>
                            bacterial cytoplasm --- Certainty = 0.0000(Not Clear) < succ>
```

[6901] A related GBS nucleic acid sequence <SEQ ID 9691> which encodes amino acid sequence <SEQ ID 9692> was also identified.

[6902] The protein has homology with the following sequences in the GENPEPT database.

| >GP: AAC35997 GB: AF019410 endopeptidase O [Lactobacillus helveticus] | | | |
|---|---|---|---|
| Identities = 85/315 (26%), Positives = 146/315 (45%), Gaps = 8/315 (2%) | | | |
| Query: | 46 | NVSPRENLYRAVNDNWLANTKLKQGQTSVNSFSEIEDKLKQLLVSDMAKMASGKIETTN- | 104 |
| | | N P++NLY AVN WL+ ++ QTS +E++ K+++ ++ D A +ASGK + + | |
| Sbjct: | 20 | NAKPQDNLYLAVNSEWLSKAEIPADQTSAGVNTELDIKIEKRMMKDFADIASGKEKMPDI | 79 |
| Query: | 105 | DEQKKMVAYYKQGMDFKTRDKNGLKPLKPVLQKLEAVSSMKDFQSLAHDFVMSGFVLPFG | 164 |
| | | + K +A YK +F RD P++ LQK+ + + F+ A + M + LPF | |
| Sbjct: | 80 | RDFDKAIALYKIAKNFDKRDAEKANPIQNDLQKILDLINFDKFKDNATELFMGPYALPFV | 139 |
| Query: | 165 | LTVETNARDNSQKQLVLRQAPALLESPDQYKKGNKEGEAKLSAYRTSAMALLKQAGKSNI | 224 |
| | | V+ + ++ L L YK E + L ++ LL+ AG | |
| Sbjct: | 140 | FDVDADMKNTDFNVLHFGGPSTFLPDTTTYK--TPEAKKLLDILEKQSINLLEMAGIGKE | 197 |
| Query: | 225 | EDRKLVKQAIAFDRLLSEKTQVDQSKITAESETAAGRYNPESMETVHNYAKEFDFKELIE | 284 |
| | | E R V+ A+AFD+ LS+ K T E A YNP S+ K FD + ++ | |
| Sbjct: | 198 | EARVYVQNALAFDQKLSKVV-----KSTEEWSDYAAIYNPVSLTEFLAKFKSFDMADFLK | 252 |
| Query: | 285 | KLVGPTNKAVNVEDKTYFKQVNDVINSKQLANMKAWMMISMLVDQSDFLGEQNRQAASAF | 344 |
| | | ++ + V V + + +++IN +K WM++ + + +L + R AA F | |
| Sbjct: | 253 | TILPEKVERVIVMEPRFLDHADELINPANFDEIKGWMLVKYINSVAKYLSQDFRAAAFPF | 312 |
| Query: | 345 | KNVASGLTQIESKEK | 359 |
| | | SG ++ S+ K | |
| Sbjct: | 313 | NQAISGTPELPSQIK | 327 |

[6903] A related GBS gene <SEQ ID 8763> and protein <SEQ ID 8764> were also identified. Analysis of this protein sequence reveals the following:

```
Lipop: Possible site: −1 Crend: 10
McG: Discrim Score: 5.41
GvH: Signal Score (−7.5): −1.39
          Possible site: 36
>>> Seems to have a cleavable N-term signal seq.
ALOM program count: 0 value: 2.76 threshold: 0.0
      PERIPHERAL Likelihood = 2.76 151
modified ALOM score: −1.05
*** Reasoning Step: 3
----- Final Results -----
                                bacterial outside --- Certainty = 0.3000(Affirmative) < succ>
                              bacterial membrane --- Certainty = 0.0000(Not Clear) < succ>
                            bacterial cytoplasm --- Certainty = 0.0000(Not Clear) < succ>
```

[6904] SEQ ID 8764 (GBS12) was expressed in E. coli as a GST-fusion product. SDS-PAGE analysis of total cell extract is shown in FIG. 1 (lane 7; MW 65 kDa). It was also expressed in E. coli as a His-fusion product. SDS-PAGE analysis of total cell extract is shown in FIG. 3 (lane 3; MW 39 kDa).

[6905] The GST-fusion protein was purified as shown in FIG. 189, lane 4.

[6906] Based on this analysis, it was predicted that these proteins and their epitopes could be useful antigens for vaccines or diagnostics.

### EXAMPLE 1240

[6907] A DNA sequence (GBSx1317) was identified in S. agalactiae <SEQ ID 3839> which encodes the amino acid sequence <SEQ ID 3840>. Analysis of this protein sequence reveals the following:

Possible site: 15
>>> Seems to have no N-terminal signal sequence

| | | | |
|---|---|---|---|
| INTEGRAL | Likelihood = −1.75 | Transmembrane | 301-317 (299-317) |

```
----- Final Results -----
                              bacterial membrane --- Certainty = 0.1702(Affirmative) < succ>
                                bacterial outside --- Certainty = 0.0000(Not Clear) < succ>
                            bacterial cytoplasm --- Certainty = 0.0000(Not Clear) < succ>
```

[6908] The protein has homology with the following sequences in the GENPEPT database.

| >GP: CAB42180 GB: A67181 unnamed protein product | | | |
|---|---|---|---|
| [unidentified] | | | |
| Identities = 245/771 (31%), Positives = 410/771 (52%), | | | |
| Gaps = 80/771 (10%) | | | |
| Query: | 22 | VRVIVEFNKESILDYATEQKKTVAQLNQADVEKKLQSIKQEQDKVLKNIEKSVHEDSSIIV | 81 |
| | | VRVIV NK + D+ ++ + A + + +E+ +K Q+KV+K +E+ +KV | |
| Sbjct: | 97 | VRVIVSLNKSAAFDHTSKPTGSAASVKK--IEQASDQVKDGQEKVIKQVEE---ITGNKV | 151 |
| Query: | 82 | KR-YDAIINGVALDIQAQEIEKLKTIADVRRVYVSQEYVQTKPLLSSSGQLIGLPEVWNN | 140 |
| | | +R + ++N ++D+ +I+K+K + V+ V + Y P S+ Q+ + +VW | |
| Sbjct: | 152 | RRQFGYLVNAFSIDMDLDDIDKVKDLPQVKNVTPVKVY---HPTDESADQMAQVQDVWQE | 208 |
| Query: | 141 | SQYKGEGTVVAVIDSGVDFKHQALKIKEPNRAKYNKTSIE----KLIHEKNLKGKFYSEK | 196 |
| | | + KGEG V+++ID+G+D HQ LK+ +K+ +E KL H GK+Y+EK | |
| Sbjct: | 209 | QKLKGEGMVISIIDTGIDSSHQDLKLDSGVSTALSKSEVESDKSKLGH-----GKYYTEK | 263 |
| Query: | 197 | VPYGYNYYDYNDNLKDS-YGVMHGMHVTGIVGANDDNQKLYGVAPNAQILAMKVFSDDQQ | 255 |
| | | VPYGYNY D ND + D+ G MHG HV GI GAN ++ GVAP+AQ+LAMKVFS++ + | |
| Sbjct: | 264 | VPYGYNYADKNDQIVDNGCGEMHGQHVAGIAGANG---QVKGVAPDAQLLAMKVFSNNAK | 320 |
| Query: | 256 | NPTTFTDVWLKALDDAILLKADVVNMSLGTPAGFVHEGKDYPELEVIARACKAGIVIAVA | 315 |
| | | N + D + A++D++ L ADV+NMSLG+ + V G P+ + +A+A +AG++ ++ | |
| Sbjct: | 321 | NSGAYDDDIISAIEDSVKLGADVINMSLGSVSSDV--GPSDPQQQAVAKASEAGVINVIS | 378 |
| Query: | 316 | AGNE---GNITDGNTYGVKPLAENYDTALIANPALDDNTLAVASMENLKKHAHVLKFK-- | 370 |
| | | AGN G+ DGN +E + + P + + L VAS EN K +K + | |
| Sbjct: | 379 | AGNSGVAGSTADGNPVNNTGTSE---LSTVGTPGVTPDALTVASAENSKVTTDTVKDELG | 435 |
| Query: | 371 | --------DKKSGTEVTEVINLHVAPNASKTIIGLAVDLGAGAPSELS--KHFDLSGKIA | 420 |
| | | + K +VT + + + K + VD+G G + + K ++ G++A | |
| Sbjct: | 436 | GVTFSSNSELKGAAQVTTQLESNYSVLTKKLKL---VDMGLGGADDYTAEKKAEVKGQLA | 492 |
| Query: | 421 | MLEIPEDNKSNGFLEKVQAITKLNPAAILLYNNAKVKDDLGSQLLVESEAAKFNIARITR | 480 |
| | | +++ + F KV A I++YN+ D L S L + +++ | |
| Sbjct: | 493 | VVK----RGAYTFSAKVANAKAAGAAGIVIYNSE--DDGLLSMSLDDKTFPTLGMSKADG | 546 |
| Query: | 481 | STY----NNIKNNSNKIITILTERQAIDNSLAGQLSSYSSWGPTPDLRLKPEITAPGGHI | 536 |
| | | + ++ + K T L IDNS AG++S ++SWGPTP+L KPEITAPGG I | |
| Sbjct: | 547 | KFWLKQQKKVRASRLKFGTAL-----IDNSRAGKMSDFTSWGPTPELDFKPEITAPGGKI | 601 |
| Query: | 537 | FSTVEDNQYADKSGTSMAAPQVAGAAAVLKQYITDKKIPV--DNAADFIKLLLMNTAQPI | 594 |
| | | +S DN+Y SGTSMA+P VAG+ A++ Q I + + + + F K MNT+ P+ | |
| Sbjct: | 602 | YSLANDNKYQQMSGTSMASPFVAGSEALILQGIKKQGLNLSGEELVQFAKNSAMNTSHPV | 661 |
| Query: | 595 | IN-KQSKDGKTPYFVRQQGSGAMNLAKALVTTVVATVTGTNDNNADGKLELREL-KEKKF | 652 |
| | | + + +K+ +P R+QGSG +N+ A+ TV N +G L+E+ ++ F | |
| Sbjct: | 662 | YDTEHTKEIISP---RRQGSGEINVKDAINNTVEVKAA-----NGNGAAALKEIGRQTTF | 713 |
| Query: | 653 | KARILLRNFGKTNKTYIISSEA--IADPVDEKGFRTQNSEHLVSKKADAVTRKVTVEAGK | 710 |
| | | K + L N GK +TY + + + K +++ +V + T KVTV+ G+ | |
| Sbjct: | 714 | K--VTLTNHGKKAQTYAVDNYGGPYTQATEAKSGEIYDTK-IVKGQLTTETPKVTVQPGE | 770 |
| Query: | 711 | TLAVDLDVDYSDAEALTRNNFLEGYLNLK-DTEGVADLHLPFLGFYGSWTE | 760 |
| | | +VD+ + + R NF+EGY+ + + +L LP++GF+GS+++ | |
| Sbjct: | 771 | --SVDVSFTLTLPYSFQRQNFVEGYVGFEAKDQATPNLVLPYMGFFGSYSQ | 819 |

[6909] A related GBS gene <SEQ ID 8767> and protein <SEQ ID 8768> were also identified. Analysis of this protein sequence reveals the following:

| Lipop: Possible site: −1 Crend: 10 | | | | |
|---|---|---|---|---|
| McG: Discrim Score: −8.37 | | | | |
| GvH: Signal Score (−7.5): −6.06 | | | | |
| Possible site: 15 | | | | |
| >>> Seems to have no N-terminal signal sequence | | | | |
| ALOM program count: 1 value: −1.75 threshold: 0.0 | | | | |
| | INTEGRAL | Likelihood = −1.75 | Transmembrane | 301-317 (299-317) |
| | PERIPHERAL | Likelihood = 1.75 | 614 | |

```
modified ALOM score: 0.85
*** Reasoning Step: 3
----- Final Results -----
                              bacterial membrane --- Certainty = 0.1702(Affirmative) < succ>
                                bacterial outside --- Certainty = 0.0000(Not Clear) < succ>
                            bacterial cytoplasm --- Certainty = 0.0000(Not Clear) < succ>
```

[6910] The protein has homology with the following sequences in the databases:

[chemical structure]

[chemical structure]

[6911] SEQ ID 8768 (GBS362N) was expressed in E. coli as a GST-fusion product. SDS-PAGE analysis of total cell extract is shown in FIG. 149 (lane 10; MW 63.5 kDa). It was also expressed in E. coli as a His-fusion product. SDS-PAGE analysis of total cell extract is shown in FIG. 182 (lane 9; MW 38 kDa) and in FIG. 149 (lane 11 & 12; MW 38 kDa). Purified GBS362N is shown in FIG. 235, lanes 3 & 4 GBS362C was expressed in E. coli as a GST-fusion product. SDS-PAGE analysis of total cell extract is shown in FIG. 149 (lane 14-16; MW 91 kDa). It was also expressed in E. coli as a His-fusion product. SDS-PAGE analysis of total cell extract is shown in FIG. 155 (lane 18; MW 66.3 kDa).

[6912] Based on this analysis, it was predicted that these proteins and their epitopes could be useful antigens for vaccines or diagnostics.

### EXAMPLE 1241

[6913] A DNA sequence (GBSx1318) was identified in S. agalactiae <SEQ ID 3841> which encodes the amino acid sequence <SEQ ID 3842>. Analysis of this protein sequence reveals the following:

| Possible site: 35 | | | | |
|---|---|---|---|---|
| >>> Seems to have no N-terminal signal sequence | | | | |
| | INTEGRAL | Likelihood = −4.04 | Transmembrane | 21-37 (17-38) |

```
----- Final Results -----
                              bacterial membrane --- Certainty = 0.2614(Affirmative) < succ>
                                bacterial outside --- Certainty = 0.0000(Not Clear) < succ>
                            bacterial cytoplasm --- Certainty = 0.0000(Not Clear) < succ>
```

[6914] The protein has homology with the following sequences in the GENPEPT database.

| >GP: BAA95000 GB: AB042239 PAa [Streptococcus criceti ] | | | |
|---|---|---|---|
| Identities = 55/166 (33%), Positives = 81/166 (48%), Gaps = 24/166 (14%) | | | |
| Query: | 5 | KKTDKFGFRKSKVCRSLCGALLGTVAVVSLATASTEIHADEATTSPTTVTKVPQPVQADT | 64 |
| | | K+ + FGFRKSK+ +SLCGALLGT VVS+ A A++ TTS T+ DT | |
| Sbjct: | 2 | KRKETFGFRKSKISKSLCGALLGTAIVVSV--AGQRALAEDMTTSTTSA--------VDT | 51 |
| Query: | 65 | TALNTSKTHSTQATTTPVEAKENKVVKSETVQSESRV--MPRD-KVVERPETVKASVNS- | 120 |
| | | TA+ ++T + +A + ++ Q+E + MP D E E VK++ + | |
| Sbjct: | 52 | TAVVGTETGNPATNLPEKQADSSSQAEASQAQAEQKTGSMPVDVATTELDEAVKSAAEAG | 111 |
| Query: | 121 | -DVSQPITTTPPTI------NEKTVEIPNLAQDTKKVAPKVTVTPE | 159 |
| | | VSQ T T+------+EK+ EI D K A + +T E | |
| Sbjct: | 112 | VTVSQDETVDKGTVGTSQEADEKSGEI---KADYSKQAETIKITTE | 154 |

[6915] No corresponding DNA sequence was identified in S. pyogenes.

[6916] SEQ ID 3842 (GBS222) was expressed in E. coli as a His-fusion product. SDS-PAGE analysis of total cell extract is shown in FIG. 44 (lane 6; MW 22 kDa).

[6917] Based on this analysis, it was predicted that this protein and its epitopes, could be useful antigens for vaccines or diagnostics.

### EXAMPLE 1242

[6918] A DNA sequence (GBSx1319) was identified in S. agalactiae <SEQ ID 3843> which encodes the amino acid sequence <SEQ ID 3844>. This protein is predicted to be CylK. Analysis of this protein sequence reveals the following:

```
Possible site: 23
>>> Seems to have no N-terminal signal sequence
----- Final Results -----
                            bacterial cytoplasm --- Certainty = 0.3738(Affirmative) < succ>
                              bacterial membrane --- Certainty = 0.0000(Not Clear) < succ>
                                bacterial outside --- Certainty = 0.0000(Not Clear) < succ>
```

[6919] No corresponding DNA sequence was identified in S. pyogenes.

[6920] Based on this analysis, it was predicted that this protein and its epitopes, could be useful antigens for vaccines or diagnostics.

### EXAMPLE 1243

[6921] A DNA sequence (GBSx1320) was identified in S. agalactiae <SEQ ID 3845> which encodes the amino acid sequence <SEQ ID 3846>. This protein is predicted to be CylJ. Analysis of this protein sequence reveals the following:

```
Possible site: 20
>>> Seems to have no N-terminal signal sequence
----- Final Results -----
                            bacterial cytoplasm --- Certainty = 0.1143(Affirmative) < succ>
                              bacterial membrane --- Certainty = 0.0000(Not Clear) < succ>
                                bacterial outside --- Certainty = 0.0000(Not Clear) < succ>
```

[6922] A related GBS nucleic acid sequence <SEQ ID 9689> which encodes amino acid sequence <SEQ ID 9690> was also identified.

[6923] No corresponding DNA sequence was identified in S. pyogenes.

[6924] Based on this analysis, it was predicted that this protein and its epitopes, could be useful antigens for vaccines or diagnostics.

### EXAMPLE 1244

[6925] A DNA sequence (GBSx1321) was identified in S. agalactiae <SEQ ID 3847> which encodes the amino acid sequence <SEQ ID 3848>. Analysis of this protein sequence reveals the following:

```
Possible site: 22
>>> Seems to have no N-terminal signal sequence
----- Final Results -----
                            bacterial cytoplasm --- Certainty = 0.0913(Affirmative) < succ>
                              bacterial membrane --- Certainty = 0.0000(Not Clear) < succ>
                                bacterial outside --- Certainty = 0.0000(Not Clear) < succ>
```

[6926] The protein has no significant homology with any sequences in the GENPEPT database.

[6927] No corresponding DNA sequence was identified in S. pyogenes.

[6928] Based on this analysis, it was predicted that this protein and its epitopes, could be useful antigens for vaccines or diagnostics.

### EXAMPLE 1245

[6929] A DNA sequence (GBSx1322) was identified in S. agalactiae <SEQ ID 3849> which encodes the amino acid sequence <SEQ ID 3850>. This protein is predicted to be CylI (fabF). Analysis of this protein sequence reveals the following:

| Possible site: 24 | | | | |
|---|---|---|---|---|
| >>> Seems to have an uncleavable N-term signal seq | | | | |
| | INTEGRAL | Likelihood = −2.39 | Transmembrane | 721-737 (721-738) |
| | INTEGRAL | Likelihood = −1.97 | Transmembrane | 326-342 (326-343) |
| | INTEGRAL | Likelihood = −0.43 | Transmembrane | 534-550 (534-550) |

```
----- Final Results -----
                              bacterial membrane --- Certainty = 0.1956(Affirmative) < succ>
                                bacterial outside --- Certainty = 0.0000(Not Clear) < succ>
                            bacterial cytoplasm --- Certainty = 0.0000(Not Clear) < succ>
```

[6930] A related GBS nucleic acid sequence <SEQ ID 9687> which encodes amino acid sequence <SEQ ID 9688> was also identified.

[6931] There is also homology to SEQ ID 3852.

[6932] A related GBS gene <SEQ ID 8769> and protein <SEQ ID 8770> were also identified. Analysis of this protein sequence reveals the following:

| Lipop: Possible site: −1 Crend: 8 | | | | |
|---|---|---|---|---|
| McG: Discrim Score: 1.08 | | | | |
| GvH: Signal Score (−7.5): −5.97 | | | | |
| Possible site: 24 | | | | |
| >>> Seems to have an uncleavable N-term signal seq | | | | |
| ALOM program count: 3 value: −2.39 threshold: 0.0 | | | | |
| | INTEGRAL | Likelihood = −2.39 | Transmembrane | 712-728 (712-729) |
| | INTEGRAL | Likelihood = −1.97 | Transmembrane | 317-333 (317-334) |
| | PERIPHERAL | Likelihood = 3.45 | 492 | |

```
modified ALOM score: 0.98
*** Reasoning Step: 3
----- Final Results -----
                              bacterial membrane --- Certainty = 0.1956(Affirmative) < succ>
                                bacterial outside --- Certainty = 0.0000(Not Clear) < succ>
                            bacterial cytoplasm --- Certainty = 0.0000(Not Clear) < succ>
```

[6933] SEQ ID 8770 (GBS361) was expressed in E. coli as a His-fusion product. SDS-PAGE analysis of total cell extract is shown in FIG. 73 (lane 4; MW 84 kDa).

[6934] GBS361-His was purified as shown in FIG. 213, lane 5.

[6935] Based on this analysis, it was predicted that these proteins and their epitopes could be useful antigens for vaccines or diagnostics.

### EXAMPLE 1246

[6936] A DNA sequence (GBSx1323) was identified in S. agalactiae <SEQ ID 3853> which encodes the amino acid sequence <SEQ ID 3854>. This protein is predicted to be CylF. Analysis of this protein sequence reveals the following:

```
Possible site: 44
>>> Seems to have no N-terminal signal sequence
----- Final Results -----
                            bacterial cytoplasm --- Certainty = 0.3766(Affirmative) < succ>
                              bacterial membrane --- Certainty = 0.0000(Not Clear) < succ>
                                bacterial outside --- Certainty = 0.0000(Not Clear) < succ>
```

[6937] No corresponding DNA sequence was identified in S. pyogenes.

[6938] Based on this analysis, it was predicted that this protein and its epitopes, could be useful antigens for vaccines or diagnostics.

### EXAMPLE 1247

[6939] A DNA sequence (GBSx1324) was identified in S. agalactiae <SEQ ID 3855> which encodes the amino acid sequence <SEQ ID 3856>. This protein is predicted to be CylE. Analysis of this protein sequence reveals the following:

```
Possible site: 23
>>> Seems to have no N-terminal signal sequence
----- Final Results -----
                            bacterial cytoplasm --- Certainty = 0.3498(Affirmative) < succ>
                              bacterial membrane --- Certainty = 0.0000(Not Clear) < succ>
                                bacterial outside --- Certainty = 0.0000(Not Clear) < succ>
```

[6940] No corresponding DNA sequence was identified in S. pyogenes.

[6941] Based on this analysis, it was predicted that this protein and its epitopes, could be useful antigens for vaccines or diagnostics.

### EXAMPLE 1248

[6942] A DNA sequence (GBSx1325) was identified in S. agalactiae <SEQ ID 3857> which encodes the amino acid sequence <SEQ ID 3858>. This protein is predicted to be ABC transporter homolog CylB. Analysis of this protein sequence reveals the following:

| Possible site: 56 | | | | |
|---|---|---|---|---|
| >>> Seems to have an uncleavable N-term signal seq | | | | |
| | INTEGRAL | Likelihood = −13.90 | Transmembrane | 271-287 (263-291) |
| | INTEGRAL | Likelihood = −10.30 | Transmembrane | 17-33 (14-43) |
| | INTEGRAL | Likelihood = −8.60 | Transmembrane | 114-130 (106-138) |
| | INTEGRAL | Likelihood = −6.69 | Transmembrane | 152-168 (149-178) |
| | INTEGRAL | Likelihood = −1.97 | Transmembrane | 186-202 (185-202) |

```
----- Final Results -----
                              bacterial membrane --- Certainty = 0.6562(Affirmative) < succ>
                                bacterial outside --- Certainty = 0.0000(Not Clear) < succ>
                            bacterial cytoplasm --- Certainty = 0.0000(Not Clear) < succ>
```

[6943] A related GBS nucleic acid sequence <SEQ ID 9685> which encodes amino acid sequence <SEQ ID 9686> was also identified.

[6944] No corresponding DNA sequence was identified in S. pyogenes.

[6945] Based on this analysis, it was predicted that this protein and its epitopes, could be useful antigens for vaccines or diagnostics.

### EXAMPLE 1249

[6946] A DNA sequence (GBSx1326) was identified in S. agalactiae <SEQ ID 3859> which encodes the amino acid sequence <SEQ ID 3860>. This protein is predicted to be ABC transporter homolog CylA. Analysis of this protein sequence reveals the following:

```
Possible site: 57
>>> Seems to have no N-terminal signal sequence
----- Final Results -----
                            bacterial cytoplasm --- Certainty = 0.4122(Affirmative) < succ>
                              bacterial membrane --- Certainty = 0.0000(Not Clear) < succ>
                                bacterial outside --- Certainty = 0.0000(Not Clear) < succ>
```

[6947] A related GBS nucleic acid sequence <SEQ ID 9683> which encodes amino acid sequence <SEQ ID 9684> was also identified. A further related GBS gene <SEQ ID 8771> and protein <SEQ ID 8772> were also identified. Analysis of this protein sequence reveals homology to membrane protein ABC transporters.

[6948] A further related DNA sequence was identified in S. pyogenes <SEQ ID 9085> which encodes the amino acid sequence <SEQ ID 9086>. An alignment of the GAS and GBS sequences follows:

| Score = 85.4 bits (208), Expect = 1e−18 | | | |
|---|---|---|---|
| Identities = 68/271 (25%), Positives = 129/271 (47%), Gaps = 17/271 (6%) | | | |
| Query: | 39 | KGFTEQHVLKDINFDVYKGDFFGIVGRNGSGKSTLLKIISQIYVPEKGQVT--VDGKMVS | 96 |
| | | K + L+DIN +G F+G++G NG+GK+TL ++ Q + G + VDGK +S | |
| Sbjct: | 10 | KKYGSFEALRDINLIFEEGKFYGLLGPNGAGKTTLFNLLIQNFKQTSGDIKWEVDGKPLS | 69 |
| Query: | 97 | ----FIELGVGF-----NPELTGRENVYMNGAMLGFTKDEVDDMYNDIVDFAELHHFMNQ | 147 |
| | | + +G+ F + LT EN+ GA+ G +K +V + D+ + ++ Q | |
| Sbjct: | 70 | IKDFYRHIGIVFQSNRLDDNLTVEENLISRGALYGLSKSQVRNRLKDLQTYLDITAIKKQ | 129 |
| Query: | 148 | KLKNYSSGMQVRLAFSVAIKAQGDVLILDEVLAVGDEAFQRKCNDYFME-RKDSGKTTIL | 206 |
| | | K + S G + ++ + A+ Q +L+LDE D +R D + + S T +L | |
| Sbjct: | 130 | KYGSLSGGQKRKVDIARALLPQPSLLLLDEPTTGLDPQSRRDLWDAIAQLNQQSQMTVVL | 189 |
| Query: | 207 | VTHDMGAVKKYCNRAVLIEDGLVKAYGEPFDVANQYSVDNTETA-EDAMNAEKISVSDIA | 265 |
| | | +TH + + C+ ++ +G + G+ Q+S N + + +++S++D | |
| Sbjct: | 190 | ITHYLEEMSA-CDVLNVLIEGNIYYSGDIKSFIEQHSTTNLNVVLKPEKSLDQLSIADFV | 248 |
| Query: | 266 | KDLKVSLISNPRITPNDTITFEVSYEVLKDD | 296 |
| | | K ++S I D I+ E +V+ D+ | |
| Sbjct: | 249 | N--KCQVLSEREIVFKD-ISVEEMMQVISDN | 276 |

[6949] Based on this analysis, it was predicted that these proteins and their epitopes could be useful antigens for vaccines or diagnostics.

### EXAMPLE 1250

[6950] A DNA sequence (GBSx1327) was identified in S. agalactiae <SEQ ID 3861> which encodes the amino acid sequence <SEQ ID 3862>. This protein is predicted to be acyl carrier protein homolog AcpC. Analysis of this protein sequence reveals the following:

```
Possible site: 56
>>> Seems to have no N-terminal signal sequence
----- Final Results -----
                            bacterial cytoplasm --- Certainty = 0.3451(Affirmative) < succ>
                              bacterial membrane --- Certainty = 0.0000(Not Clear) < succ>
                                bacterial outside --- Certainty = 0.0000(Not Clear) < succ>
```

[6951] No corresponding DNA sequence was identified in S. pyogenes.

[6952] Based on this analysis, it was predicted that this protein and its epitopes, could be useful antigens for vaccines or diagnostics.

### EXAMPLE 1251

[6953] A DNA sequence (GBSx1328) was identified in S. agalactiae <SEQ ID 3863> which encodes the amino acid sequence <SEQ ID 3864>. This protein is predicted to be CylG (fabG). Analysis of this protein sequence reveals the following:

```
Possible site: 39
>>> Seems to have no N-terminal signal sequence
----- Final Results -----
                            bacterial cytoplasm --- Certainty = 0.2651(Affirmative) < succ>
                              bacterial membrane --- Certainty = 0.0000(Not Clear) < succ>
                                bacterial outside --- Certainty = 0.0000(Not Clear) < succ>
```

[6954] There is also homology to SEQ ID 3866.

[6955] Based on this analysis, it was predicted that this protein and its epitopes, could be useful antigens for vaccines or diagnostics.

### EXAMPLE 1252

[6956] A DNA sequence (GBSx1329) was identified in S. agalactiae <SEQ ID 3867> which encodes the amino acid sequence <SEQ ID 3868>. This protein is predicted to be CylD. Analysis of this protein sequence reveals the following:

```
Possible site: 60
>>> Seems to have no N-terminal signal sequence
----- Final Results -----
                            bacterial cytoplasm --- Certainty = 0.2030(Affirmative) < succ>
                              bacterial membrane --- Certainty = 0.0000(Not Clear) < succ>
                                bacterial outside --- Certainty = 0.0000(Not Clear) < succ>
```

[6957] No corresponding DNA sequence was identified in S. pyogenes.

[6958] Based on this analysis, it was predicted that this protein and its epitopes, could be useful antigens for vaccines or diagnostics.

### EXAMPLE 1253

[6959] A DNA sequence (GBSx1330) was identified in S. agalactiae <SEQ ID 3869> which encodes the amino acid sequence <SEQ ID 3870>. Analysis of this protein sequence reveals the following:

```
Possible site: 14
>>> Seems to have no N-terminal signal sequence
----- Final Results -----
                            bacterial cytoplasm --- Certainty = 0.3219(Affirmative) < succ>
                              bacterial membrane --- Certainty = 0.0000(Not Clear) < succ>
                                bacterial outside --- Certainty = 0.0000(Not Clear) < succ>
```

[6960] The protein has no significant homology with any sequences in the GENPEPT database.

[6961] No corresponding DNA sequence was identified in S. pyogenes.

[6962] Based on this analysis, it was predicted that this protein and its epitopes, could be useful antigens for vaccines or diagnostics.

### EXAMPLE 1254

[6963] A DNA sequence (GBSx1331) was identified in S. agalactiae <SEQ ID 3871> which encodes the amino acid sequence <SEQ ID 3872>. Analysis of this protein sequence reveals the following:

| Possible site: 56 | | | | |
|---|---|---|---|---|
| >>> Seems to have no N-terminal signal sequence | | | | |
| | INTEGRAL | Likelihood = −8.97 | Transmembrane | 231-247 (226-251) |
| | INTEGRAL | Likelihood = −7.06 | Transmembrane | 141-157 (134-164) |
| | INTEGRAL | Likelihood = −2.76 | Transmembrane | 28-44 (26-44) |
| | INTEGRAL | Likelihood = −1.38 | Transmembrane | 123-139 (121-139) |
| | INTEGRAL | Likelihood = −0.32 | Transmembrane | 199-215 (199-215) |

```
----- Final Results -----
                              bacterial membrane --- Certainty = 0.4588(Affirmative) < succ>
                                bacterial outside --- Certainty = 0.0000(Not Clear) < succ>
                            bacterial cytoplasm --- Certainty = 0.0000(Not Clear) < succ>
```

[6964] The protein has homology with the following sequences in the GENPEPT database.

| >GP: CAB88836 GB: AL353832 putative integral membrane transport | | | |
|---|---|---|---|
| protein. [Streptomyces coelicolor A3(2)] | | | |
| Identities = 68/264 (25%), Positives = 123/264 (45%), Gaps = 10/264 (3%) | | | |
| Query: | 6 | RMHFIFIKQYMKQIMEYKIDFFVGVLGVFLTQGLNLLFLNVLFQHIPSLEGWTFQQIAFI | 65 |
| | | R + + +++ M Y+ F + G F L+ + + ++F + +L G++ ++AF+ | |
| Sbjct: | 34 | RAYGLIAGMWIRSTMAYRTSFALTAFGNFAMTALDFVAILLMFSRVDALGGYSLPEVAFL | 93 |
| Query: | 66 | YGFSLLPKGIDHLFFDNLWALGQRLIRKGEFDKYLTRPISPLFHVLVETFQVDALGELLV | 125 |
| | | YG S + G+ L ++ LG+R +R G D L RP L V + F + LG ++ | |
| Sbjct: | 94 | YGLSGVSFGLADLAIGSMERLGRR-VRDGTLDTLLVRPAPVLAQVAADRFALRRLGRVVQ | 152 |
| Query: | 126 | GFILL--STTVSSISWTVPKVLLFIFIIPFATLIYTSLKIATSSIAFWTKQSGAVIYIF- | 182 |
| | | G ++L + V I WT KVLL + I+ ++ +A + F + + V F | |
| Sbjct: | 153 | GLLVLGYALVVVDIDWTAAKVLLLPVALISGAGIFCAVFVAAGAFQFAAQDASEVANAFT | 212 |
| Query: | 183 | YMFNDFAKYPVAIYNNLLRWIISFVIPFAFTAYYPAAYFLQDRNVYFNIGGVI-----LI | 237 |
| | | Y +YP ++ L +FV+P AF + PA+Y L R ++ G + L | |
| Sbjct: | 213 | YGGTTMLQYPPTVFALDLVRGATFVLPLAFVNWLPASYVL-GRPYPLDLPGWVAFTPPLA | 271 |
| Query: | 238 | SLISFMVSLILWHKGVEVYESAGS | 261 |
| | | + ++ + W G+ Y S GS | |
| Sbjct: | 272 | AAACCALAGLAWRAGLRSYRSTGS | 295 |

[6965] A related DNA sequence was identified in S. pyogenes <SEQ ID 3873> which encodes the amino acid sequence <SEQ ID 3874>. Analysis of this protein sequence reveals the following:

| Possible site: 49 | | | | |
|---|---|---|---|---|
| >>> Seems to have no N-terminal signal sequence | | | | |
| | INTEGRAL | Likelihood = −8.86 | Transmembrane | 227-243 (225-251) |
| | INTEGRAL | Likelihood = −7.22 | Transmembrane | 141-157 (133-164) |
| | INTEGRAL | Likelihood = −6.37 | Transmembrane | 123-139 (114-140) |
| | INTEGRAL | Likelihood = −2.97 | Transmembrane | 26-42 (26-49) |

```
----- Final Results -----
                              bacterial membrane --- Certainty = 0.4545(Affirmative) < succ>
                                bacterial outside --- Certainty = 0.0000(Not Clear) < succ>
                            bacterial cytoplasm --- Certainty = 0.0000(Not Clear) < succ>
```

[6966] The protein has homology with the following sequences in the databases:

| >GP: CAB88836 GB: AL353832 putative integral membrane transport | | | |
|---|---|---|---|
| protein. [Streptomyces coelicolor A3(2)] | | | |
| Identities = 69/262 (26%), Positives = 125/262 (47%), Gaps = 10/262 (3%) | | | |
| Query: | 8 | HAIFIKQYLKQIMEYKVDFVVGVLGVFLTQGLNLLFLSVLFQHIPSLEGWTFEQIAFIYG | 67 |
| | | + + +++ M Y+ F + G F L+ + + ++F + +L G++ ++AF+YG | |
| Sbjct: | 36 | YGLIAGMWIRSTMAYRTSFALTAFGNFAMTALDFVAILLMFSRVDALGGYSLPEVAFLYG | 95 |
| Query: | 68 | FCLIPKGIDHLFFDNLWALGQRLVRKGEFDKYLTRPISPLFHVLVETFQVDALGELLVGV | 127 |
| | | + G+ L ++ LG+R VR G D L RP L V + F + LG ++ G+ | |
| Sbjct: | 96 | LSGVSFGLADLAIGSMERLGRR-VRDGTLDTLLVRPAPVLAQVAADRFALRRLGRVVQGL | 154 |
| Query: | 128 | ILL--VTTAGSIVWTLPKVLLFILVIPFATLIYTSLKIATASISFWTKQSGAVIYIF-YM | 184 |
| | | ++L I WT KVLL + + I+ ++ +A + F + + V F Y | |
| Sbjct: | 155 | LVLGYALVVVDIDWTAAKVLLLPVALISGAGIFCAVFVAAGAFQFAAQDASEVANAFTYG | 214 |
| Query: | 185 | FNDFSKYPMSIYHSFLRWLISFIIPFAFTAYYPASYFLTGQHLLFNIGGLV-----VVSL | 239 |
| | | +YP +++ L +F++P AF + PASY L G+ ++ G V + + | |
| Sbjct: | 215 | GTTMLQYPPTVFALDLVRGATFVLPLAFVNWLPASYVL-GRPYPLDLPGWVAFTPPLAAA | 273 |
| Query: | 240 | LVLALSLKLWKWGLDAYESAGS | 261 |
| | | AL+ W+ GL +Y S GS | |
| Sbjct: | 274 | ACCALAGLAWRAGLRSYRSTGS | 295 |

[6967] An alignment of the GAS and GBS proteins is shown below.

| Identities = 208/261 (79%), Positives = 238/261 (90%) | | | |
|---|---|---|---|
| Query: | 1 | MTKYQRMHFIFIKQYMKQIMEYKIDFFVGVLGVFLTQGLNLLFLNVLFQHIPSLEGWTFQ | 60 |
| | | M K + MH IFIKQY+KQIMEYK+DF VGVLGVFLTQGLNLLFL+VLFQHIPSLEGWTF+ | |
| Sbjct: | 1 | MAKLRCMHAIFIKQYLKQIMEYKVDFVVGVLGVFLTQGLNLLFLSVLFQHIPSLEGWTFE | 60 |
| Query: | 61 | QIAFIYGFSLLPKGIDHLFFDNLWALGQRLIRKGEFDKYLTRPISPLFHVLVETFQVDAL | 120 |
| | | QIAFIYGF L+PKGIDHLFFDNLWALGQRL+RKGEFDKYLTRPISPLFHVLVETFQVDAL | |
| Sbjct: | 61 | QIAFIYGFCLIPKGIDHLFFDNLWALGQRLVRKGEFDKYLTRPISPLFHVLVETFQVDAL | 120 |
| Query: | 121 | GELLVGFILLSTTVSSISWTVPKVLLFIFIIPFATLIYTSLKIATSSIAFWTKQSGAVIY | 180 |
| | | GELLVG ILL TT SI WT+PKVLLFI +IPFATLIYTSLKIAT+SI+FWTKQSGAVIY | |
| Sbjct: | 121 | GELLVGVILLVTTAGSIVWTLPKVLLFILVIPFATLIYTSLKIATASISFWTKQSGAVIY | 180 |
| Query: | 181 | IFYMFNDFAKYPVAIYNNLLRWIISFVIPFAFTAYYPAAYFLQDRNVYFNIGGVILISLI | 240 |
| | | IFYMFNDF+KYP++IY++ LRW+ISF+IPFAFTAYYPA+YFL +++ FNIGG++++SL+ | |
| Sbjct: | 181 | IFYMFNDFSKYPMSIYHSFLRWLISFIIPFAFTAYYPASYFLTGQHLLFNIGGLVVVSLL | 240 |
| Query: | 241 | SFMVSLILWHKGVEVYESAGS | 261 |
| | | +SL LW G++ YESAGS | |
| Sbjct: | 241 | VLALSLKLWKWGLDAYESAGS | 261 |

[6968] Based on this analysis, it was predicted that these proteins and their epitopes could be useful antigens for vaccines or diagnostics.

### EXAMPLE 1255

[6969] A DNA sequence (GBSx1332) was identified in S. agalactiae <SEQ ID 3875> which encodes the amino acid sequence <SEQ ID 3876>. Analysis of this protein sequence reveals the following:

| Possible site: 54 | | | | |
|---|---|---|---|---|
| >>> Seems to have no N-terminal signal sequence | | | | |
| | INTEGRAL | Likelihood = −15.60 | Transmembrane | 147-163 (134-178) |
| | INTEGRAL | Likelihood = −8.55 | Transmembrane | 119-135 (114-141) |
| | INTEGRAL | Likelihood = −7.86 | Transmembrane | 238-254 (235-260) |
| | INTEGRAL | Likelihood = −1.70 | Transmembrane | 215-231 (212-231) |
| | INTEGRAL | Likelihood = −1.06 | Transmembrane | 61-77 (61-77) |
| | INTEGRAL | Likelihood = −0.22 | Transmembrane | 27-43 (27-43) |

```
----- Final Results -----
                              bacterial membrane --- Certainty = 0.7241(Affirmative) < succ>
                                bacterial outside --- Certainty = 0.0000(Not Clear) < succ>
                            bacterial cytoplasm --- Certainty = 0.0000(Not Clear) < succ>
```

[6970] The protein has homology with the following sequences in the GENPEPT database.

| >GP: CAB88837 GB: AL353832 putative integral membrane protein. | | | |
|---|---|---|---|
| [Streptomyces coelicolor A3(2)] | | | |
| Identities = 60/271 (22%), Positives = 118/271 (43%), Gaps = 13/271 (4%) | | | |
| Query: | 6 | RRYKPFISTGIQGLITYRVDFILYRIGDVIGAFVAFYLWKAVFDSSSQSLIQGFQLSDMI | 65 |
| | | R Y + G + TYR + + + Y + A++D Q + G+ + + | |
| Sbjct: | 7 | RLYVAVAAGGFRRYATYRAATAAGVFTNTVFGLILVYTYLALWDEKPQ--LGGYDQAQAV | 64 |
| Query: | 66 | LYIIMS-FVTNLLTRTDSSFM--IGDEVKDGSIIMRLLRPVHFAASYLFMEIGSRWLIFL | 122 |
| | | ++ + + L F + + ++ G + + L RP +L ++G L | |
| Sbjct: | 65 | TFVWLGQALLAALAIGGGGFEDELMERIRTGDVAVDLYRPADLQLWWLAADVGRAVFQLL | 124 |
| Query: | 123 | SIGV-PFLLVITGVRLFLGTDLIQAIVLVVFYIISIILAFLINFFFNICFGFSAFVFKNL | 181 |
| | | GV PF+ LF L + + + ++++++LA ++ F SAF + | |
| Sbjct: | 125 | GRGVVPFVFG----SLFFPVALPREVSVWAAFLVAVVLAMVVGFALRYLVALSAFWLLDG | 180 |
| Query: | 182 | WGSNLLKNSLVAFMSGSLIPLTFFPKIVADILGFLPFSSLIYTPVMIIIGKYDGSQIVQA | 241 |
| | | G + F SG L+PL FP ++ D++ LP+SSL+ P +++G+ D + | |
| Sbjct: | 181 | TGVTQMAWLAGLFCSGMLLPLNVFPGVLGDVVRALPWSSLLQGPADVLLGEADP---LGT | 237 |
| Query: | 242 | LLLQIFWLIVMVALSQLIWKKVQLHITIQGG | 272 |
| | | L Q W + ++AL +L+ + +QGG | |
| Sbjct: | 238 | YLFQASWAVALLALGRLVQSAATRRVVVQGG | 268 |

[6971] A related DNA sequence was identified in S. pyogenes <SEQ ID 3877> which encodes the amino acid sequence <SEQ ID 3878>. Analysis of this protein sequence reveals the following:

| Possible site: 50 | | | | |
|---|---|---|---|---|
| >>> Seems to have no N-terminal signal sequence | | | | |
| | INTEGRAL | Likelihood = −9.18 | Transmembrane | 252-268 (248-277) |
| | INTEGRAL | Likelihood = −7.22 | Transmembrane | 161-177 (151-187) |
| | INTEGRAL | Likelihood = −6.10 | Transmembrane | 133-149 (128-160) |
| | INTEGRAL | Likelihood = −2.81 | Transmembrane | 213-229 (211-230) |

```
----- Final Results -----
                              bacterial membrane --- Certainty = 0.4673(Affirmative) < succ>
                                bacterial outside --- Certainty = 0.0000(Not Clear) < succ>
                            bacterial cytoplasm --- Certainty = 0.0000(Not Clear) < succ>
```

[6972] The protein has homology with the following sequences in the databases:

| >GP: AAF11144 GB: AE002002 conserved hypothetical protein [Deinococcus radiodurans] | | | |
|---|---|---|---|
| Identities = 56/268 (20%), Positives = 113/268 (41%), Gaps = 21/268 (7%) | | | |
| Query: | 15 | MWSFWKRYRPFLSAGIQELITYRVNFFLYRIGDVMGAFVAYYLWKAVFDSSKQSLINGFT | 74 |
| | | M +FW++ R + + + YR ++ + + V +W S+ ING+T | |
| Sbjct: | 1 | MTNFWRKVRVLWAVSLASTLEYRAETIIWMLSGTLN-LVMMLVWMTQAKSAPGGQINGYT | 59 |
| Query: | 75 | LSDMTFYIIMSFVTTLLTKSDSSFMIGEEVKDGSIIMRLLRPV-----HFAASYLFMEIG | 129 |
| | | Y + +++ +L + + +++ G++ LL P+ FAA + | |
| Sbjct: | 60 | PQAFAGYFLATWLVSQLLVVWVGWELDYKIRQGTLSPELLHPIDPLWREFAAH--LTDKA | 117 |
| Query: | 130 | FRWIVLMSVGFPFLMVLSGIKVMAGLSILQVLASSCLYLVSLLLAFL---INFYFNICFG | 186 |
| | | FR P ++VL + + A L+ Q + Y L LA L + F + G | |
| Sbjct: | 118 | FR--------LPIMLVL--LLIFAALTGAQFTSQWWAYPAVLGLALLGLCVRFLWEYTLG | 167 |
| Query: | 187 | SSAFVFKNLWGSNLLKNALVAFMSGSLIPLAFFPKMVSIVLSFLPFSSLVYTPVMIVIGK | 246 |
| | | AF ++ + A G PL+F+P + + ++ PF ++ P ++ GK | |
| Sbjct: | 168 | LLAFWTESSSSFGEVLWLFYAAFGGMFAPLSFYPGWLQTLAAWTPFPYMLGLPAALLAGK | 227 |
| Query: | 247 | YSLSQIMVALSLQIFWLLVMVVLSQVIW | 274 |
| | | S ++ + + + WL VM ++ + +W | |
| Sbjct: | 228 | ASGAEALRGAGVLLGWLAVMWLVRRWVW | 255 |

[6973] An alignment of the GAS and GBS proteins is shown below.

| Identities = 199/268 (74%), Positives = 236/268 (87%) | | | |
|---|---|---|---|
| Query: | 5 | WRRYKPFISTGIQGLITYRVDFILYRIGDVIGAFVAFYLWKAVFDSSSQSLIQGFQLSDM | 64 |
| | | W+RY+PF+S GIQ LITYRV+F LYRIGDV+GAFVA+YLWKAVFDSS QSLI GF LSDM | |
| Sbjct: | 19 | WKRYRPFLSAGIQELITYRVNFFLYRIGDVMGAFVAYYLWKAVFDSSKQSLINGFTLSDM | 78 |
| Query: | 65 | ILYIIMSFVTNLLTRTDSSFMIGDEVKDGSIIMRLLRPVHFAASYLFMEIGSRWLIFLSI | 124 |
| | | YIIMSFVT LLT++DSSFMIG+EVKDGSIIMRLLRPVHFAASYLFMEIG RW++ +S+ | |
| Sbjct: | 79 | TFYIIMSFVTTLLTKSDSSFMIGEEVKDGSIIMRLLRPVHFAASYLFMEIGFRWIVLMSV | 138 |
| Query: | 125 | GVPFLLVITGVRLFLGTDLIQAIVLVVFYIISIILAFLINFFFNICFGFSAFVFKNLWGS | 184 |
| | | G PEL+V++G+++ G ++Q + Y++S++LAFLINF+FNICFG SAFVFKNLWGS | |
| Sbjct: | 139 | GFPFLMVLSGIKVMAGLSILQVLASSCLYLVSLLLAFLINFYFNICFGSSAFVFKNLWGS | 198 |
| Query: | 185 | NLLKNSLVAFMSGSLIPLTFFPKIVADILGFLPFSSLIYTPVMIIIGKYDGSQIVQALLL | 244 |
| | | NLLKN+LVAFMSGSLIPL FFPK+V+ +L FLPFSSL+YTPVMI+IGKY SQI+ AL L | |
| Sbjct: | 199 | NLLKNALVAFMSGSLIPLAFFPKMVSIVLSFLPFSSLVYTPVMIVIGKYSLSQIMVALSL | 258 |
| Query: | 245 | QIFWLIVMVALSQLIWKKVQLHITIQGG | 272 |
| | | QIFWL+VMV LSQ+IWKKVQ H+TIQGG | |
| Sbjct: | 259 | QIFWLLVMVVLSQVIWKKVQYHLTIQGG | 286 |

[6974] Based on this analysis, it was predicted that these proteins and their epitopes could be useful antigens for vaccines or diagnostics.

### EXAMPLE 1256

[6975] A DNA sequence (GBSx1333) was identified in S. agalactiae <SEQ ID 3879> which encodes the amino acid sequence <SEQ ID 3880>. This protein is predicted to be ABC transporter, ATP-binding protein. Analysis of this protein sequence reveals the following:

```
Possible site: 31
>>> Seems to have no N-terminal signal sequence
----- Final Results -----
                            bacterial cytoplasm --- Certainty = 0.2013(Affirmative) < succ>
                              bacterial membrane --- Certainty = 0.0000(Not Clear) < succ>
                                bacterial outside --- Certainty = 0.0000(Not Clear) < succ>
```

[6976] A related GBS nucleic acid sequence <SEQ ID 9681> which encodes amino acid sequence <SEQ ID 9682> was also identified.

[6977] The protein has homology with the following sequences in the GENPEPT database.

| >GP: AAF09790 GB: AE001882 ABC transporter, ATP-binding protein | | | |
|---|---|---|---|
| [Deinococcus radiodurans] | | | |
| Identities = 141/331 (42%), Positives = 201/331 (60%), | | | |
| Gaps = 34/331 (10%) | | | |
| Query: | 10 | MIEVSHLQKNFIKTVKAPGLKGAFQSFLRPEKHTFEAVKDLTFDVPKGQILGFIGANGAG | 69 |
| | | MIEV HL K+F + AV+D++F +P G+I+G++G NGAG | |
| Sbjct: | 46 | MIEVRHLCKSFARK---------------------PAVQDISFSIPAGEIVGYLGPNGAG | 84 |
| Query: | 70 | KSTTIKMLTGILKPTSGFCRIDGKLPQENRQNYVKDIGVVFGQRTQLWWDLALQETYTVL | 129 |
| | | KSTTIK+LTG+L P SG R+ G +P + R+ +V +G VFGQRT LWWDL ++E+ +L | |
| Sbjct: | 85 | KSTTIKVLTGLLVPDSGEVRVGGLVPWKQRRQHVARLGAVFGQRTTLWWDLPVRESLELL | 144 |
| Query: | 130 | KEIYDVPDKEFRKRMAFLNEVLELNDFIKDPVRTLSLGQRMRADIAASLLHNPKVLFLDE | 189 |
| | | + +Y VP F + +A E+LEL F+ P R LSLGQRMRAD+AA+LLH+P++LFLDE | |
| Sbjct: | 145 | RHVYRVPAARFAENLAGFTELLELGPFLNTPARALSLGQRMRADLAAALLHDPELLFLDE | 204 |
| Query: | 190 | PTIGLDVSVKDNIRRAITQINQEEETTILLTTHDLSDIEQLCHRIFMIDRGQEIFDGTVS | 249 |
| | | PT+GLDV K+ IR + +N E T+LLTTHDL D+E+L R+ MID G+ +FDG ++ | |
| Sbjct: | 205 | PTVGLDVVAKERIREFVKAVNAERGVTVLLTTHDLGDVERLARRVMMIDTGRLLFDGPLA | 264 |
| Query: | 250 | QLKETFGRMKTL--SFDLRPGQEHISS-SLIGKSEINIKRNDLVLDIQYDSSRYQTADII | 306 |
| | | +L+ +G + L F+ P Q + +L+G+ ++ Y S A I | |
| Sbjct: | 265 | ELQARYGGERELWVEFEKAPAQPALPGLTLLGQDGPRVR---------YGFSGAAAAPIA | 315 |
| Query: | 307 | QQTLADFSVRDLKMTDADIEDIIRRFYRNEL | 337 |
| | | Q T A VRDL + + ++E IRR Y L | |
| Sbjct: | 316 | QVT-ALAPVRDLAVKEPEVEATIRRIYEGNL | 345 |

[6978] A related DNA sequence was identified in S. pyogenes <SEQ ID 3881> which encodes the amino acid sequence <SEQ ID 3882>. Analysis of this protein sequence reveals the following:

```
Possible site: 60
>>> Seems to have no N-terminal signal sequence
----- Final Results -----
                            bacterial cytoplasm --- Certainty = 0.3315(Affirmative) < succ>
                              bacterial membrane --- Certainty = 0.0000(Not Clear) < succ>
                                bacterial outside --- Certainty = 0.0000(Not Clear) < succ>
```

[6979] An alignment of the GAS and GBS proteins is shown below.

| Identities = 272/330 (82%), Positives = 305/330 (92%) | | | |
|---|---|---|---|
| Query: | 8 | MSMIEVSHLQKNFIKTVKAPGLKGAFQSFLRPEKHTFEAVKDLTFDVPKGQILGFIGANG | 67 |
| | | M MIEVSHLQKNF KT+K PGLKGA +SF+ P + FEAVKDL+F+VPKGQILGFIGANG | |
| Sbjct: | 1 | MVMIEVSHLQKNFSKTIKEPGLKGALKSFVHPPREIFEAVKDLSFEVPKGQILGFIGANG | 60 |
| Query: | 68 | AGKSTTIKMLTGILKPTSGFCRIDGKLPQENRQNYVKDIGVVFGQRTQLWWDLALQETYT | 127 |
| | | AGKSTTIKMLTGILKPTSG+CRI+GK+PQ+NRQ YV+DIG VFGQRTQLWWDLALQETY | |
| Sbjct: | 61 | AGKSTTIKMLTGILKPTSGYCRINGKIPQDNRQYYVRDIGAVFGQRTQLWWDLALQETYV | 120 |
| Query: | 128 | VLKEIYDVPDKEFRKRMAFLNEVLELNDFIKDPVRTLSLGQRMRADIAASLLHNPKVLFL | 187 |
| | | VLKEIYDVP+K FRKRM FLNEVL+LN+FIKDPVRTLSLGQRMRADIAASLLHNPKVLFL | |
| Sbjct: | 121 | VLKEIYDVPEKAFRKRMDFLNEVLDLNEFIKDPVRTLSLGQRMRADIAASLLHNPKVLFL | 180 |
| Query: | 188 | DEPTIGLDVSVKDNIRRAITQINQEEETTILLTTHDLSDIEQLCHRIFMIDRGQEIFDGT | 247 |
| | | DEPTIGLDVSVKDNIRRAITQINQEEETTILLTTHDLSDIEQLC RI MID+GQEIFDGT | |
| Sbjct: | 181 | DEPTIGLDVSVKDNIRRAITQINQEEETTILLTTHDLSDIEQLCDRIIMIDKGQEIFDGT | 240 |
| Query: | 248 | VSQLKETFGKMKTLSFDLRPGQEHISSSLIGKSEINIKRNDLVLDIQYDSSRYQTADIIQ | 307 |
| | | V+QLK++FGKMK+LSF+L+PGQE + S +G +I ++R++L LDIQYDSSRYQTADIIQ | |
| Sbjct: | 241 | VTQLKQSFGKMKSLSFELKPGQEQVVSQFMGLPDITVERHELSLDIQYDSSRYQTADIIQ | 300 |
| Query: | 308 | QTLADFSVRDLKMTDADIEDIIRRFYRNEL | 337 |
| | | +T+ADF+VRD+KMTD DIEDI+RRFYR EL | |
| Sbjct: | 301 | KTMADFAVRDVKMTDVDIEDIVRRFYRKEL | 330 |

[6980] Based on this analysis, it was predicted that these proteins and their epitopes could be useful antigens for vaccines or diagnostics.

### EXAMPLE 1257

[6981] A DNA sequence (GBSx1334) was identified in S. agalactiae <SEQ ID 3883> which encodes the amino acid sequence <SEQ ID 3884>. This protein is predicted to be Fmt. Analysis of this protein sequence reveals the following:

| Possible site: 32 | | | | |
|---|---|---|---|---|
| >>> Seems to have an uncleavable N-term signal seq | | | | |
| | INTEGRAL | Likelihood = −9.39 | Transmembrane | 21-37 (8-39) |
| | INTEGRAL | Likelihood = −7.75 | Transmembrane | 360-376 (359-381) |

```
----- Final Results -----
                              bacterial membrane --- Certainty = 0.4758(Affirmative) < succ>
                                bacterial outside --- Certainty = 0.0000(Not Clear) < succ>
                            bacterial cytoplasm --- Certainty = 0.0000(Not Clear) < succ>
```

[6982] A related GBS nucleic acid sequence <SEQ ID 8775> which encodes amino acid sequence <SEQ ID 8776> was also identified. Analysis of this protein sequence reveals the following:

| Lipop: Possible site: −1 Crend: 10 | | | | |
|---|---|---|---|---|
| McG: Discrim Score: 8.85 | | | | |
| GvH: Signal Score (−7.5): −3.75 | | | | |
| Possible site: 25 | | | | |
| >>> Seems to have an uncleavable N-term signal seq | | | | |
| ALOM program count: 2 value: −9.39 threshold: 0.0 | | | | |
| | INTEGRAL | Likelihood = −9.39 | Transmembrane | 21-37 (8-39) |
| | INTEGRAL | Likelihood = −7.75 | Transmembrane | 353-369 (352-374) |
| | PERIPHERAL | Likelihood = 4.24 | 92 | |

```
modified ALOM score: 2.38
*** Reasoning Step: 3
----- Final Results -----
                              bacterial membrane --- Certainty = 0.4758(Affirmative) < succ>
                                bacterial outside --- Certainty = 0.0000(Not Clear) < succ>
                            bacterial cytoplasm --- Certainty = 0.0000(Not Clear) < succ>
```

[6983] The protein has homology with the following sequences in the GENPEPT database.

| >GP: BAA24012 GB: AB009635 Fmt [Staphylococcus aureus] | | | |
|---|---|---|---|
| Identities = 72/279 (25%), Positives = 125/279 (43%), Gaps = 25/279 (8%) | | | |
| Query: | 49 | LHRFMRKNNVNGMMIVSDNTGKPITISHGINRGEVETDIEN--NKLFPMASLQKLMTGII | 106 |
| | | + ++++ + NG + + +N GK + +S G + E I+N N +F + S QK TG++ | |
| Sbjct: | 79 | IDKYLQSSLFNGSVAIYEN-GK-LKMSKGYGYQDFEKGIKNTPNTMFLIGSAQKFSTGLL | 136 |
| Query: | 107 | IQRLIDQDVLSEDDRLSQFFPQVKGSNSITIHQLLTHTSGLREKGVKVSPYLKNEREQLQ | 166 |
| | | +++L ++ ++ +D +S++ P K S I + L+ H SGL + K S KN + ++ | |
| Sbjct: | 137 | LKQLEEEHKININDPVSKYLPWFKTSKPIPLKDLMLHQSGLYK--YKSSKDYKNLDQAVK | 194 |
| Query: | 167 | FCLKHYNFVNK-KSWYYSNINFSFLTGIATQVTGRTYAELVDDVIKNPLRLDDTQSYQSV | 225 |
| | | K K K Y++ N+ L + +VTG++YAE I +PL+L T Y | |
| Sbjct: | 195 | AIQKRGIDPKKYKKHMYNDGNYLVLAKVIEEVTGKSYAENYYTKIGDPLKLQHTAFYD-- | 252 |
| Query: | 226 | VNHDLVSPMRKNGKLNKINIF----NQVSTAYGAGDFFTTPLNFWVLMRSFSKGYFFPT- | 280 |
| | | + K N + N + YGAG+ + TP + L+ + F | |
| Sbjct: | 253 | -EQPFKKYLAKGYAYNSTGLSFLRPNILDQYYGAGNLYMTPTDMGKLITQIQQYKLFSPK | 311 |
| Query: | 281 | -------DEYTKHQNDAISHYYGGLYMHGRIVNSNGTFF | 312 |
| | | + TK D Y G Y + NG FF | |
| Sbjct: | 312 | ITNPLLHEFGTKQYPD---EYRYGFYAKPTLNRLNGGFF | 347 |

[6984] There is also homology to SEQ ID 3886.

[6985] A related GBS gene <SEQ ID 8773> and protein <SEQ ID 8774> were also identified. Analysis of this protein sequence reveals the following:

| Lipop: Possible site: −1 Crend: 6 | | | | |
|---|---|---|---|---|
| McG: Discrim Score: 14.89 | | | | |
| GvH: Signal Score (−7.5): −3.75 | | | | |
| Possible site: 25 | | | | |
| >>> Seems to have an uncleavable N-term signal seq | | | | |
| ALOM program count: 1 value: −9.39 threshold: 0.0 | | | | |
| | INTEGRAL | Likelihood = −9.39 | Transmembrane | 14-30 (1-32) |
| | PERIPHERAL | Likelihood = 4.24 | 85 | |

```
modified ALOM score: 2.38
*** Reasoning Step: 3
----- Final Results -----
                              bacterial membrane --- Certainty = 0.4758(Affirmative) < succ>
                                bacterial outside --- Certainty = 0.0000(Not Clear) < succ>
                            bacterial cytoplasm --- Certainty = 0.0000(Not Clear) < succ>
```

[6986] The protein has homology with the following sequences in the databases:

[chemical structure]

[6987] SEQ ID 8776 (GBS61) was expressed in E. coli as a GST-fusion product. SDS-PAGE analysis of total cell extract is shown in FIG. 33 (lane 3; MW 68 kDa); GBS61-GST was purified as shown in FIG. 195, lane 5.

[6988] Based on this analysis, it was predicted that these proteins and their epitopes could be useful antigens for vaccines or diagnostics.

### EXAMPLE 1258

[6989] A DNA sequence (GBSx1335) was identified in S. agalactiae <SEQ ID 3887> which encodes the amino acid sequence <SEQ ID 3888>. Analysis of this protein sequence reveals the following:

```
Possible site: 32
>>> Seems to have no N-terminal signal sequence
----- Final Results -----
                            bacterial cytoplasm --- Certainty = 0.2398(Affirmative) < succ>
                              bacterial membrane --- Certainty = 0.0000(Not Clear) < succ>
                                bacterial outside --- Certainty = 0.0000(Not Clear) < succ>
```

[6990] The protein has no significant homology with any sequences in the GENPEPT database.

[6991] No corresponding DNA sequence was identified in S. pyogenes.

[6992] Based on this analysis, it was predicted that this protein and its epitopes, could be useful antigens for vaccines or diagnostics.

### EXAMPLE 1259

[6993] A DNA sequence (GBSx1336) was identified in S. agalactiae <SEQ ID 3889> which encodes the amino acid sequence <SEQ ID 3890>. Analysis of this protein sequence reveals the following:

| Possible site: 28 | | | | |
|---|---|---|---|---|
| >>> Seems to have an uncleavable N-term signal seq | | | | |
| | INTEGRAL | Likelihood = −5.57 | Transmembrane | 16-32 (13-33) |

```
----- Final Results -----
                              bacterial membrane --- Certainty = 0.3230(Affirmative) < succ>
                                bacterial outside --- Certainty = 0.0000(Not Clear) < succ>
                            bacterial cytoplasm --- Certainty = 0.0000(Not Clear) < succ>
```

[6994] The protein has no significant homology with any sequences in the GENPEPT database.

[6995] No corresponding DNA sequence was identified in S. pyogenes.

[6996] Based on this analysis, it was predicted that this protein and its epitopes, could be useful antigens for vaccines or diagnostics.

### EXAMPLE 1260

[6997] A DNA sequence (GBSx1337) was identified in S. agalactiae <SEQ ID 3891> which encodes the amino acid sequence <SEQ ID 3892>. Analysis of this protein sequence reveals the following:

```
Possible site: 14
>>> Seems to have no N-terminal signal sequence
----- Final Results -----
                            bacterial cytoplasm --- Certainty = 0.3910(Affirmative) < succ>
                              bacterial membrane --- Certainty = 0.0000(Not Clear) < succ>
                                bacterial outside --- Certainty = 0.0000(Not Clear) < succ>
```

[6998] The protein has no significant homology with any sequences in the GENPEPT database.

[6999] No corresponding DNA sequence was identified in S. pyogenes.

[7000] Based on this analysis, it was predicted that this protein and its epitopes, could be useful antigens for vaccines or diagnostics.

### EXAMPLE 1261

[7001] A DNA sequence (GBSx1338) was identified in S. agalactiae <SEQ ID 3893> which encodes the amino acid sequence <SEQ ID 3894>. Analysis of this protein sequence reveals the following:

```
Possible site: 37
>>> Seems to have no N-terminal signal sequence
----- Final Results -----
                            bacterial cytoplasm --- Certainty = 0.4239(Affirmative) < succ>
                              bacterial membrane --- Certainty = 0.0000(Not Clear) < succ>
                                bacterial outside --- Certainty = 0.0000(Not Clear) < succ>
```

[7002] The protein has no significant homology with any sequences in the GENPEPT database.

[7003] No corresponding DNA sequence was identified in S. pyogenes.

[7004] Based on this analysis, it was predicted that this protein and its epitopes, could be useful antigens for vaccines or diagnostics.

### EXAMPLE 1262

[7005] A DNA sequence (GBSx1339) was identified in S. agalactiae <SEQ ID 3895> which encodes the amino acid sequence <SEQ ID 3896>. Analysis of this protein sequence reveals the following:

```
Possible site: 32
>>> Seems to have no N-terminal signal sequence
----- Final Results -----
                            bacterial cytoplasm --- Certainty = 0.4349(Affirmative) < succ>
                              bacterial membrane --- Certainty = 0.0000(Not Clear) < succ>
                                bacterial outside --- Certainty = 0.0000(Not Clear) < succ>
```

[7006] The protein has no significant homology with any sequences in the GENPEPT database.

[7007] No corresponding DNA sequence was identified in S. pyogenes.

[7008] Based on this analysis, it was predicted that this protein and its epitopes, could be useful antigens for vaccines or diagnostics.

### EXAMPLE 1263

[7009] A DNA sequence (GBSx1340) was identified in S. agalactiae <SEQ ID 3897> which encodes the amino acid sequence <SEQ ID 3898>. Analysis of this protein sequence reveals the following:

```
Possible site: 16
>>> Seems to have no N-terminal signal sequence
----- Final Results -----
                            bacterial cytoplasm --- Certainty = 0.4962(Affirmative) < succ>
                              bacterial membrane --- Certainty = 0.0000(Not Clear) < succ>
                                bacterial outside --- Certainty = 0.0000(Not Clear) < succ>
```

[7010] The protein has no significant homology with any sequences in the GENPEPT database.

[7011] No corresponding DNA sequence was identified in S. pyogenes.

[7012] Based on this analysis, it was predicted that this protein and its epitopes, could be useful antigens for vaccines or diagnostics.

### EXAMPLE 1264

[7013] A DNA sequence (GBSx1341) was identified in S. agalactiae <SEQ ID 3899> which encodes the amino acid sequence <SEQ ID 3900>. Analysis of this protein sequence reveals the following:

```
Possible site: 29
>>> Seems to have no N-terminal signal sequence
----- Final Results -----
                            bacterial cytoplasm --- Certainty = 0.4014(Affirmative) < succ>
                              bacterial membrane --- Certainty = 0.0000(Not Clear) < succ>
                                bacterial outside --- Certainty = 0.0000(Not Clear) < succ>
```

[7014] The protein has homology with the following sequences in the GENPEPT database.

>GP: AAG38044 GB: AF295925 Orf28 [Streptococcus
pneumoniae]
Identities = 23/35 (65%), Positives = 28/35 (79%)

| | | | |
|---|---|---|---|
| Query: | 9 | LIHWEGNSGDKLIEHQTSATGWYYQVDRSFSQPKG | 43 |
| | | L +WEGNSGDKL+E QT AT WYYQ+++ FSQ G | |
| Sbjct: | 180 | LTYWEGNSGDKLLERQTRATEWYYQIEKGFSQTNG | 214 |

[7015] No corresponding DNA sequence was identified in S. pyogenes.

[7016] Based on this analysis, it was predicted that this protein and its epitopes, could be useful antigens for vaccines or diagnostics.

### EXAMPLE 1265

[7017] A DNA sequence (GBSx1342) was identified in S. agalactiae <SEQ ID 3901> which encodes the amino acid sequence <SEQ ID 3902>. Analysis of this protein sequence reveals the following:

```
Possible site: 26
>>> Seems to have no N-terminal signal sequence
----- Final Results -----
                            bacterial cytoplasm --- Certainty = 0.2036(Affirmative) < succ>
                              bacterial membrane --- Certainty = 0.0000(Not Clear) < succ>
                                bacterial outside --- Certainty = 0.0000(Not Clear) < succ>
```

[7018] The protein has no significant homology with any sequences in the GENPEPT database.

[7019] No corresponding DNA sequence was identified in S. pyogenes.

[7020] Based on this analysis, it was predicted that this protein and its epitopes, could be useful antigens for vaccines or diagnostics.

### EXAMPLE 1266

[7021] A DNA sequence (GBSx1343) was identified in S. agalactiae <SEQ ID 3903> which encodes the amino acid sequence <SEQ ID 3904>. Analysis of this protein sequence reveals the following:

```
Possible site: 47
>>> Seems to have a cleavable N-term signal seq.
----- Final Results -----
                                bacterial outside --- Certainty = 0.3000(Affirmative) < succ>
                              bacterial membrane --- Certainty = 0.0000(Not Clear) < succ>
                            bacterial cytoplasm --- Certainty = 0.0000(Not Clear) < succ>
```

[7022] A related GBS nucleic acid sequence <SEQ ID 10933> which encodes amino acid sequence <SEQ ID 10934> was also identified.

[7023] SEQ ID 3904 (GBS153) was expressed in E. coli as a His-fusion product. SDS-PAGE analysis of total cell extract is shown in FIG. 25 (lane 3; MW 22 kDa). It was also expressed in E. coli as a GST-fusion product. SDS-PAGE analysis of total cell extract is shown in FIG. 31 (lane 4; MW 47 kDa).

[7024] GBS153-GST was purified as shown in FIG. 198, lane 4.

[7025] Based on this analysis, it was predicted that these proteins and their epitopes could be useful antigens for vaccines or diagnostics.

### EXAMPLE 1267

[7026] A DNA sequence (GBSx1344) was identified in S. agalactiae <SEQ ID 3905> which encodes the amino acid sequence <SEQ ID 3906>. Analysis of this protein sequence reveals the following:

```
Possible site: 13
>>> Seems to have no N-terminal signal sequence
----- Final Results -----
                            bacterial cytoplasm --- Certainty = 0.2036(Affirmative) < succ>
                              bacterial membrane --- Certainty = 0.0000(Not Clear) < succ>
                                bacterial outside --- Certainty = 0.0000(Not Clear) < succ>
```

[7027] The protein has no significant homology with any sequences in the GENPEPT database.

[7028] No corresponding DNA sequence was identified in S. pyogenes.

[7029] Based on this analysis, it was predicted that this protein and its epitopes, could be useful antigens for vaccines or diagnostics.

### EXAMPLE 1268

[7030] A DNA sequence (GBSx1345) was identified in S. agalactiae <SEQ ID 3907> which encodes the amino acid sequence <SEQ ID 3908>. Analysis of this protein sequence reveals the following:

```
Possible site: 19
>>> Seems to have no N-terminal signal sequence
----- Final Results -----
                            bacterial cytoplasm --- Certainty = 0.2570(Affirmative) < succ>
                              bacterial membrane --- Certainty = 0.0000(Not Clear) < succ>
                                bacterial outside --- Certainty = 0.0000(Not Clear) < succ>
```

[7031] The protein has homology with the following sequences in the GENPEPT database.

>GP: CAA59773 GB: X85787 tasA [Streptococcus pneumoniae]
Identities = 18/33 (54%), Positives = 28/33 (84%)

| | | | |
|---|---|---|---|
| Query: | 2 | DVQSDENFAFKIFKVAKAKGLSLDVFDKLVGRF | 34 |
| | | + QSD+N F++FKV+K KG++LD FD+++GRF | |
| Sbjct: | 320 | EYQSDKNPFFEVFKVSKTKGIALDPFDEIIGRF | 352 |

[7032] A related DNA sequence was identified in S. pyogenes <SEQ ID 3909> which encodes the amino acid sequence <SEQ ID 3910>. Analysis of this protein sequence reveals the following:

```
Possible site: 56
>>> Seems to have no N-terminal signal sequence
----- Final Results -----
                            bacterial cytoplasm --- Certainty = 0.2405(Affirmative) < succ>
                              bacterial membrane --- Certainty = 0.0000(Not Clear) < succ>
                                bacterial outside --- Certainty = 0.0000(Not Clear) < succ>
```

[7033] An alignment of the GAS and GBS proteins is shown below.

Identities = 18/34 (52%), Positives = 25/34 (72%)

| | | | |
|---|---|---|---|
| Query: | 1 | MDVQSDENFAFKIFKVAKAKGLSLDVFDKLVGRF | 34 |
| | | +DVQSDE+F FK+ KV K+KG+ L+ D+ V F | |
| Sbjct: | 31 | LDVQSDEDFGFKVVKVLKSKGIVLNALDESVCGF | 64 |

[7034] Based on this analysis, it was predicted that these proteins and their epitopes could be useful antigens for vaccines or diagnostics.

### EXAMPLE 1269

[7035] A DNA sequence (GBSx1346) was identified in S. agalactiae <SEQ ID 3911> which encodes the amino acid sequence <SEQ ID 3912>. This protein is predicted to be a fimbria-associated protein. Analysis of this protein sequence reveals the following:

| Possible site: 52 | | | | |
|---|---|---|---|---|
| >>> Seems to have no N-terminal signal sequence | | | | |
| | INTEGRAL | Likelihood = −1.17 | Transmembrane | 169-185 (168-185) |

```
----- Final Results -----
                              bacterial membrane --- Certainty = 0.1468(Affirmative) < succ>
                                bacterial outside --- Certainty = 0.0000(Not Clear) < succ>
                            bacterial cytoplasm --- Certainty = 0.0000(Not Clear) < succ>
```

[7036] The protein has homology with the following sequences in the GENPEPT database.

| >GP: AAC13546 GB: AF019629 putative fimbria-associated protein | | | |
|---|---|---|---|
| [Actinomyces naeslundii] | | | |
| Identities = 53/109 (48%), Positives = 75/109 (68%) | | | |
| Query: | 13 | IPKINQDLPIYAGSEEDNLQRGVGHLEGISLPIGGASTHAVLSGQRGMPAARLFADLDKM | 72 |
| | | IP I+ DLP+Y G+ +D L +G+GHLEG SLP+GG T +V++G RG+ A +F +LDK+ | |
| Sbjct: | 93 | IPSISLDLPVYHGTADDTLLKGLGHLEGTSLPVGGEGTRSVITGHRGLAEATMFTNLDKV | 152 |
| Query: | 73 | KKGDYFYVTNLKETLAYQVDRIMVIEPSQLDAVSIEEDKDYVTLLTCTP | 121 |
| | | K GD V E L Y+V V+EP + +A+ +EE KD +TL+TCTP | |
| Sbjct: | 153 | KTGDSLIVEVFGEVLTYRVTSTKVVEPEETEALRVEEGKDLLTLVTCTP | 201 |

[7037] There is also homology to SEQ ID 3740 and to SEQ ID 3910.

[7038] SEQ ID 3912 (GBS194) was expressed in E. coli as a His-fusion product. SDS-PAGE analysis of total cell extract is shown in FIG. 177 (lane 2; MW 24 kDa).

[7039] Based on this analysis, it was predicted that this protein and its epitopes, could be useful antigens for vaccines or diagnostics.

### EXAMPLE 1270

[7040] A DNA sequence (GBSx1347) was identified in S. agalactiae <SEQ ID 3913> which encodes the amino acid sequence <SEQ ID 3914>. Analysis of this protein sequence reveals the following:

| Possible site: 42 | | | | |
|---|---|---|---|---|
| >>> Seems to have no N-terminal signal sequence | | | | |
| | INTEGRAL | Likelihood = −5.15 | Transmembrane | 880-896 (876-898) |
| | INTEGRAL | Likelihood = −4.78 | Transmembrane | 24-40 (23-42) |

```
----- Final Results -----
                              bacterial membrane --- Certainty = 0.3060(Affirmative) < succ>
                                bacterial outside --- Certainty = 0.0000(Not Clear) < succ>
                            bacterial cytoplasm --- Certainty = 0.0000(Not Clear) < succ>
```

[7041] A related GBS nucleic acid sequence <SEQ ID 8777> which encodes amino acid sequence <SEQ ID 8778> was also identified. Analysis of this protein sequence reveals the following:

| Lipop: Possible site: −1 Crend: 8 | | | | |
|---|---|---|---|---|
| SRCFLG: 0 | | | | |
| McG: Length of UR: 20 | | | | |
| Peak Value of UR: 2.80 | | | | |
| Net Charge of CR: 5 | | | | |
| McG: Discrim Score: 10.81 | | | | |
| GvH: Signal Score (−7.5): −3.76 | | | | |
| Possible site: 29 | | | | |
| >>> Seems to have an uncleavable N-term signal seq | | | | |
| Amino Acid Composition: calculated from 1 | | | | |
| ALOM program count: 2 value: −5.15 threshold: 0.0 | | | | |
| | INTEGRAL | Likelihood = −5.15 | Transmembrane | 867-883 (863-885) |
| | INTEGRAL | Likelihood = −4.78 | Transmembrane | 11-27 (10-29) |
| | PERIPHERAL | Likelihood = 7.58 | 531 | |

```
modified ALOM score: 1.53
icm1 HYPID: 7 CFP: 0.306
*** Reasoning Step: 3
----- Final Results -----
                              bacterial membrane --- Certainty = 0.3060(Affirmative) < succ>
                                bacterial outside --- Certainty = 0.0000(Not Clear) < succ>
                            bacterial cytoplasm --- Certainty = 0.0000(Not Clear) < succ>
LPXTG motif: 859-863
```

[7042] No corresponding DNA sequence was identified in S. pyogenes.

[7043] SEQ ID 8778 (GBS104) was expressed in E. coli as a His-fusion product. SDS-PAGE analysis of total cell extract is shown in FIG. 27 (lane 5; MW 95 kDa).

[7044] GBS104-His was purified as shown in FIG. 221, lane 9-10.

[7045] Based on this analysis, it was predicted that this protein and its epitopes, could be useful antigens for vaccines or diagnostics.

### EXAMPLE 1271

[7046] A DNA sequence (GBSx1348) was identified in S. agalactiae <SEQ ID 3915> which encodes the amino acid sequence <SEQ ID 3916>. This protein is predicted to be a fimbria-associated protein. Analysis of this protein sequence reveals the following:

| Possible site: 40 | | | | |
|---|---|---|---|---|
| >>> Seems to have an uncleavable N-term signal seq | | | | |
| | INTEGRAL | Likelihood = −15.28 | Transmembrane | 257-273 (252-280) |
| | INTEGRAL | Likelihood = −7.11 | Transmembrane | 19-35 (16-39) |

```
----- Final Results -----
                              bacterial membrane --- Certainty = 0.7114(Affirmative) < succ>
                                bacterial outside --- Certainty = 0.0000(Not Clear) < succ>
                            bacterial cytoplasm --- Certainty = 0.0000(Not Clear) < succ>
```

[7047] The protein has homology with the following sequences in the GENPEPT database.

| >GP: AAC13546 GB: AF019629 putative fimbria-associated protein | | | |
|---|---|---|---|
| [Actinomyces naeslundii] | | | |
| Identities = 79/178 (44%), Positives = 112/178 (62%), Gaps = 7/178 (3%) | | | |
| Query: | 65 | RIALANAYNETLSRNPLL-----IDPFTSKQKEGLREYARMLEVHEQ--IGHVAIPSIGV | 117 |
| | | ++ A+AYN+ LS +L + K+ +YA +L+ + + + + IPSI + | |
| Sbjct: | 39 | QVEQAHAYNDALSAGAVLEANNHVPTGAGSSKDSSLQYANILKANNEGLMARLKIPSISL | 98 |
| Query: | 118 | DIPIYAGTSETVLQKGSGHLEGTSLPVGGLSTHSVLTAHRGLPTARLFTDLNKVKKGQIF | 177 |
| | | D+P+Y GT++ L KG GHLEGTSLPVGG T SV+T HRGL A +FT+L+KVK G | |
| Sbjct: | 99 | DLPVYHGTADDTLLKGLGHLEGTSLPVGGEGTRSVITGHRGLAEATMFTNLDKVKTGDSL | 158 |
| Query: | 178 | YVTNIKETLAYKVVSIKVVDPTALSEVKIVNGKDYITLLTCTPYMINSHRLLVKGERI | 235 |
| | | V E L Y+V S KVV+P +++ GKD +TL+TCTP IN+HR+L+ GERI | |
| Sbjct: | 159 | IVEVFGEVLTYRVTSTKVVEPEETEALRVEEGKDLLTLVTCTPLGINTHRILLTGERI | 216 |

[7048] There is also homology to SEQ ID 3740.

[7049] SEQ ID 3916 (GBS208) was expressed in E. coli as a His-fusion product. SDS-PAGE analysis of total cell extract is shown in FIG. 44 (lane 5; MW 35 kDa). It was also expressed in E. coli as a GST-fusion product. SDS-PAGE analysis of total cell extract is shown in FIG. 85 (lane 8; MW 59.7 kDa) and in FIG. 160 (lane 5; MW 60 kDa).

[7050] GBS208-GST was purified as shown in FIG. 224, lane 7-8.

[7051] Based on this analysis, it was predicted that this protein and its epitopes, could be useful antigens for vaccines or diagnostics.

### EXAMPLE 1272

[7052] A DNA sequence (GBSx1349) was identified in S. agalactiae <SEQ ID 3917> which encodes the amino acid sequence <SEQ ID 3918>. This protein is predicted to be a fimbria-associated protein. Analysis of this protein sequence reveals the following:

| Possible site: 30 | | | | |
|---|---|---|---|---|
| >>> Seems to have a cleavable N-term signal seq. | | | | |
| | INTEGRAL | Likelihood = −9.13 | Transmembrane | 265-281 (260-284) |

```
----- Final Results -----
                              bacterial membrane --- Certainty = 0.4652(Affirmative) < succ>
                                bacterial outside --- Certainty = 0.0000(Not Clear) < succ>
                            bacterial cytoplasm --- Certainty = 0.0000(Not Clear) < succ>
```

[7053] The protein has homology with the following sequences in the GENPEPT database.

| >GP: AAC13546 GB: AF019629 putative fimbria-associated protein | | | |
|---|---|---|---|
| [Actinomyces naeslundii] | | | |
| Identities = 96/265 (36%), Positives = 150/265 (56%), Gaps = 10/265 (3%) | | | |
| Query: | 41 | QASHANINAFKEAVTKIDRVEINRRLELAYAYNASI-AGAKTNGEYPALKDPYSAEQKQA | 99 |
| | | Q + + + A A R + ++E A+AYN ++ AGA P A + | |
| Sbjct: | 15 | QYNQSKVTADYSAQVDGARPDAKTQVEQAHAYNDALSAGAVLEANNHV---PTGAGSSKD | 71 |
| Query: | 100 | GVVEYARMLEVKEQ--IGHVIIPRINQDIPIYAGSAEENLQRGVGHLEGTSLPVGGESTH | 157 |
| | | ++YA +L+ + + + IP I+ D+P+Y G+A++ L +G+GHLEGTSLPVGGE T | |
| Sbjct: | 72 | SSLQYANILKANNEGLMARLKIPSISLDLPVYHGTADDTLLKGLGHLEGTSLPVGGEGTR | 131 |
| Query: | 158 | AVLTAHRGLPTAKLFTNLDKVTVGDRFYIEHIGGKIAYQVDQIKVIAPDQLEDLYVIQGE | 217 |
| | | +V+T HRGL A +FTNLDKV GD +E G + Y+V KV+ P++ E L V +G+ | |
| Sbjct: | 132 | SVITGHRGLAEATMFTNLDKVKTGDSLIVEVFGEVLTYRVTSTKVVEPEETEALRVEEGK | 191 |
| Query: | 218 | DHVTLLTCTPYMINSHRLLVRGKRI-PYVEKTVQKDSKTFRQQQYLTYAMWVVVGLILLS | 276 |
| | | D +TL+TCTP IN+HR+L+ G+RI P K + K + +A+ + GLI++ | |
| Sbjct: | 192 | DLLTLVTCTPLGINTHRILLTGERIYPTPAKDLAAAGKRPDVPHFPWWAVGLAAGLIVVG | 251 |
| Query: | 277 | LLIW---FKKTKQKKRRKNEKAASQ | 298 |
| | | L +W + + K+R A+Q | |
| Sbjct: | 252 | LYLWRSGYAAARAKERALARARAAQ | 276 |

[7054] There is also homology to SEQ ID 3740.

[7055] SEQ ID 3918 (GBS209) was expressed in E. coli as a GST-fusion product. SDS-PAGE analysis of total cell extract is shown in FIG. 50 (lane 4; MW 62 kDa). It was also expressed in E. coli as a His-fusion product. SDS-PAGE analysis of total cell extract is shown in FIG. 85 (lane 3; MW 37.2 kDa).

[7056] GBS209-His was purified as shown in FIG. 221, lane 8.

[7057] Based on this analysis, it was predicted that this protein and its epitopes, could be useful antigens for vaccines or diagnostics.

### EXAMPLE 1273

[7058] A DNA sequence (GBSx1350) was identified in S. agalactiae <SEQ ID 3919> which encodes the amino acid sequence <SEQ ID 3920>. Analysis of this protein sequence reveals the following:

| Possible site: 27 | | | | |
|---|---|---|---|---|
| >>> Seems to have a cleavable N-term signal seq. | | | | |
| | INTEGRAL | Likelihood = −9.66 | Transmembrane | 281-297 (276-300) |

```
----- Final Results -----
                              bacterial membrane --- Certainty = 0.4864(Affirmative) < succ>
                                bacterial outside --- Certainty = 0.0000(Not Clear) < succ>
                            bacterial cytoplasm --- Certainty = 0.0000(Not Clear) < succ>
```

[7059] The protein has homology with the following sequences in the GENPEPT database.

| >GP: BAB04080 GB: AP001508 unknown [Bacillus halodurans] | | | |
|---|---|---|---|
| Identities = 45/241 (31%), Positives = 63/141 (43%), Gaps = 20/141 (14%) | | | |
| Query: | 153 | TGELDLLKVGVDGDTKKPLAGVVFELYEKNGRTPIRVKNGVHSQDIDAAKHLETDSSGHI | 212 |
| | | TG L++ KV D DT + L G F LY+ G IR LET G | |
| Sbjct: | 1084 | TGSLEVTKV--DADTGEVLQGATFTLYDSEGEFAIRT--------------LETGEDGKA | 1127 |
| Query: | 213 | RISGLIHGDYVLKEIETQSGYQIGQAETAVTIEKSKTVTVTIENKKVPTPKVPSRGGL-I | 271 |
| | | L++GDY+LKE GY +G +T + VT+EN+K +V + G + + | |
| Sbjct: | 1128 | TFVNLLYGDYLLKEDSAPEGYLVGINDTQRVTIDTVLHEVTVENEKSDINRVSAVGAVQL | 1187 |
| Query: | 272 | PKTGEQQAMALVIIGGILIAL | 292 |
| | | K E+ +L G L AL | |
| Sbjct: | 1188 | QKVDEETGESL---QGALFAL | 1205 |

Identities = 64/259 (24%), Positives = 113/259 (42%), Gaps = 48/259 (18%)

| | | | |
|---|---|---|---|
| Query: | 16 | GTMFGISQT---VLAQETHQLTIVHLEARDIDRPNP----QLEIAPKE-GTPIEGVLYQL | 67 |
| | | G + GI+ T + H++T+ + E DI+R + QL+ +E G ++G L+ L | |
| Sbjct: | 1147 | GYLVGINDTQRVTIDTVLHEVTVEN-EKSDINRVSAVGAVQLQKVDEETGESLQGALFAL | 1205 |
| Query: | 68 | YQLKSTEDGDLLAHWNSLTITELKKQAQQVFEATTNQQGKATFNQLPDGIYYGL----AV | 123 |
| | | Q E +TI E++ + + A + + G F +L + Y L V | |
| Sbjct: | 1206 | QQKVDDE---------FVTIAEMETDEEGIVFAGSLEPGDYQFVELNAPVGYKLDETPVV | 1256 |
| Query: | 124 | KAGEKNRNVSAFLVDLSEDKVIYPKIIWSTGELDLLKVGVDGDTKKPLAGVVFELYEKNG | 183 |
| | | E++R + ++L ++ + P G + L+KV D D L G F L + G | |
| Sbjct: | 1257 | FTVEEDRTET---IELQKENHLIP------GSVQLVKVDAD-DAANTLEGAEFTLLDGEG | 1306 |
| Query: | 184 | RTPIRVKNGVHSQDIDAAKHLETDSSGHIRISGLIHGDYVLKEIETQSGYQIGQAETAVT | 243 |
| | | V+ G L TD +G + ++ L G+Y E + +GY++ T | |
| Sbjct: | 1307 | NV---VQEG-----------LTTDENGQVVVTDLKPGEYQFVETKAPAGYELEATPIGFT | 1352 |
| Query: | 244 | IEKS--KTVTVTIENKKVP | 260 |
| | | IE++ + TV +EN +P | |
| Sbjct: | 1353 | IERNQQEVATVAVENHLIP | 1371 |

[7060] No corresponding DNA sequence was identified in S. pyogenes.

[7061] SEQ ID 3920 (GBS52) was expressed in E. coli as a His-fusion product. SDS-PAGE analysis of total cell extract is shown in FIG. 7 (lane 4; MW 30.5 kDa).

[7062] GBS52-His was purified as shown in FIG. 192, lane 8.

[7063] Based on this analysis, it was predicted that this protein and its epitopes, could be useful antigens for vaccines or diagnostics.

### EXAMPLE 1274

[7064] A DNA sequence (GBSx1351) was identified in S. agalactiae <SEQ ID 3921> which encodes the amino acid sequence <SEQ ID 3922>. Analysis of this protein sequence reveals the following:

| Possible site: 46 | | | | |
|---|---|---|---|---|
| >>> Seems to have no N-terminal signal sequence | | | | |
| | INTEGRAL | Likelihood = −6.26 | Transmembrane | 554-570 (551-575) |
| | INTEGRAL | Likelihood = −0.16 | Transmembrane | 34-50 (34-50) |

```
----- Final Results -----
                              bacterial membrane --- Certainty = 0.3506(Affirmative) < succ>
                                bacterial outside --- Certainty = 0.0000(Not Clear) < succ>
                            bacterial cytoplasm --- Certainty = 0.0000(Not Clear) < succ>
```

[7065] A related GBS nucleic acid sequence <SEQ ID 8779> which encodes amino acid sequence <SEQ ID 8780> was also identified. Analysis of this protein sequence reveals the following:

| Lipop: Possible site: −1 Crend: 0 | | | | |
|---|---|---|---|---|
| McG: Discrim Score: −5.81 | | | | |
| GvH: Signal Score (−7.5): −1.92 | | | | |
| Possible site: 37 | | | | |
| >>> Seems to have a cleavable N-terminal signal sequence | | | | |
| ALOM program count: 2 value: −6.26 threshold: 0.0 | | | | |
| | INTEGRAL | Likelihood = −6.26 | Transmembrane | 527-543 (524-548) |
| | PERIPHERAL | Likelihood = 5.36 | 194 | |

```
modified ALOM score: 1.75
*** Reasoning Step: 3
----- Final Results -----
                              bacterial membrane --- Certainty = 0.3506(Affirmative) < succ>
                                bacterial outside --- Certainty = 0.0000(Not Clear) < succ>
                            bacterial cytoplasm --- Certainty = 0.0000(Not Clear) < succ>
LPXTG motif: 521-525
```

[7066] The protein has homology with the following sequences in the GENPEPT database.

| >GP: CAA57459 GB: X81869 orf2 [Lactobacillus leichmannii] | | | |
|---|---|---|---|
| Identities = 140/505 (27%), Positives = 220/505 (42%), Gaps = 94/505 (18%) | | | |
| Query: | 102 | GEVISNYAKLGDNVKGLQGVQFKRYKVKTDI-----SVDELKKLTTVEAADAKVGTILEE | 156 |
| | | GE+++++ G L GV FK Y V S D + T +DAK L | |
| Sbjct: | 58 | GEIMNDFGGTG-----LNGVTFKAYNVTDHYLSLRKSGDSAQDAVTAIQSDAKDSDNLPS | 112 |
| Query: | 157 | --GVSLPQKTNAQGLVVDAL---------DSKSNVR-YLYVEDLKNSPSNITKAYAVPFV | 204 |
| | | G ++ +T A D + DS N + YL+VE +SP+++T+ A P V | |
| Sbjct: | 113 | YAGSAIATETTATSKGEDGIAAFDNLNLKDSDGNYQTYLFVET--DSPTDVTQQ-AAPIV | 169 |
| Query: | 205 | LELPVANSTGTGFLS-EINIYPKNVVTDEPKTDKDVKKLGQDDAGYTI-----------G | 252 |
| | | L +P+ ++ T ++ +I IYPKNV + P T KD+ + + D T+ G | |
| Sbjct: | 170 | LTMPIYKTSDTSAINHDIQIYPKNVKST-PIT-KDLDEASKKDLAVTLPDGSTIYNAQYG | 227 |
| Query: | 253 | EEFKWFLKSTIPANLGDYEKFEITDKFADGLTYKSVGKIKIGSKTLNRDEHYTIDEPTVD | 312 |
| | | + F + + +P N+ D + F + DK G+ + + L + YT+++ | |
| Sbjct: | 228 | KSFGYNITVNVPWNIKDKDTFNVVDKPDTGI---DIDASTVSIDGLTKSTDYTVNK---- | 280 |
| Query: | 313 | NQNTLKITFKPEKFKEIAELLKGMTLVKNQDALDKATANTDDAAFLEIPVASTINEKAVL | 372 |
| | | N ++ FK + L G +L I +T+ A | |
| Sbjct: | 281 | KDNGYQVVFKTTS--AAVQALAGKSLT--------------------ITYKATLTNNATP | 318 |
| Query: | 373 | GKAIENTFELQYDHTPDKADNPKPSNPPRKPEVHTGGKRFVKKDSTETQTLGGAEFDLLA | 432 |
| | | KAI NT L + + S P P ++TGG +FVKKDS +TL GAEF L+ | |
| Sbjct: | 319 | DKAIGNTATLSIGNGTNIT-----STPANGPRIYTGGAQFVKKDSQSNKTLAGAEFQLVK | 373 |
| Query: | 433 | --SDGTAVKWTDALIKANTNKNYIAGEAVTGQPIKLKSHTDGTFEIKGLAYAVDANAEGT | 490 |
| | | S+G V + + N A EA T S +G +KGL+Y ++ + | |
| Sbjct: | 374 | VDSNGNIVSYATQASDGSYTWNDSATEATT-----YTSDANGLVALKGLSY---SDKLDS | 425 |
| Query: | 491 | AVTYKLKETKAPEGYVIPDKEIEFTVSQTSYNTKPTDITVDSADATPDTIKNNKRPSIPN | 550 |
| | | +Y L E +AP+GY D ++F+++Q S+ D+ TI N K +P+ | |
| Sbjct: | 426 | GESYALLEIQAPDGYAKLDSPVKFSITQGSF-----------GDSNKITIDNTKEGLLPS | 474 |
| Query: | 551 | TGGIGTAIFVAIGAAVMAFAVKGMK | 575 |
| | | TGG G IF+AIG +M A G K | |
| Sbjct: | 475 | TGGKGIYIFLAIGIVIMIVAFGGYK | 499 |

[7067] No corresponding DNA sequence was identified in S. pyogenes.

[7068] SEQ ID 8780 (GBS80) was expressed in E. coli as a His-fusion product. SDS-PAGE analysis of total cell extract is shown in FIG. 16 (lane 6; MW 56.8 kDa).

[7069] The GBS80-His fusion product was purified (FIG. 104A; see also FIG. 194, lane 5) and used to immunise mice (lane 1+2 product; 20 μg/mouse). The resulting antiserum was used for Western blot (FIG. 104B), FACS (FIG. 104C), and in the in vivo passive protection assay (Table III). These tests confirm that the protein is immunoaccessible on GBS and that it is an effective protective immunogen.

[7070] Based on this analysis, it was predicted that this protein and its epitopes, could be useful antigens for vaccines or diagnostics.

### EXAMPLE 1275

[7071] A DNA sequence (GBSx1352) was identified in S. agalactiae <SEQ ID 3923> which encodes the amino acid sequence <SEQ ID 3924>. Analysis of this protein sequence reveals the following:

```
Possible site: 17
>>> Seems to have no N-terminal signal sequence
----- Final Results -----
                            bacterial cytoplasm --- Certainty = 0.4043(Affirmative) < succ>
                              bacterial membrane --- Certainty = 0.0000(Not Clear) < succ>
                                bacterial outside --- Certainty = 0.0000(Not Clear) < succ>
```

[7072] The protein has no significant homology with any sequences in the GENPEPT database.

[7073] No corresponding DNA sequence was identified in S. pyogenes.

[7074] Based on this analysis, it was predicted that this protein and its epitopes, could be useful antigens for vaccines or diagnostics.

### EXAMPLE 1276

[7075] A DNA sequence (GBSx1353) was identified in S. agalactiae <SEQ ID 3925> which encodes the amino acid sequence <SEQ ID 3926>. This protein is predicted to be MsmR. Analysis of this protein sequence reveals the following:

| Possible site: 32 | | | | |
|---|---|---|---|---|
| >>> Seems to have no N-terminal signal sequence | | | | |
| | INTEGRAL | Likelihood = −1.01 | Transmembrane | 75-91 (75-92) |

```
----- Final Results -----
                              bacterial membrane --- Certainty = 0.1404(Affirmative) < succ>
                                bacterial outside --- Certainty = 0.0000(Not Clear) < succ>
                            bacterial cytoplasm --- Certainty = 0.0000(Not Clear) < succ>
```

[7076] A related GBS nucleic acid sequence <SEQ ID 9679> which encodes amino acid sequence <SEQ ID 9680> was also identified.

[7077] SEQ ID 3926 (GBS360) was expressed in E. coli as a GST-fusion product. SDS-PAGE analysis of total cell extract is shown in FIG. 81 (lane 9; MW 74 kDa).

[7078] GBS360-GST was purified as shown in FIG. 216, lane 8.

[7079] Based on this analysis, it was predicted that these proteins and their epitopes could be useful antigens for vaccines or diagnostics.

### EXAMPLE 1277

[7080] A DNA sequence (GBSx1354) was identified in S. agalactiae <SEQ ID 3927> which encodes the amino acid sequence <SEQ ID 3928>. Analysis of this protein sequence reveals the following:

```
Possible site: 53
>>> Seems to have no N-terminal signal sequence
----- Final Results -----
                            bacterial cytoplasm --- Certainty = 0.1762(Affirmative) < succ>
                              bacterial membrane --- Certainty = 0.0000(Not Clear) < succ>
                                bacterial outside --- Certainty = 0.0000(Not Clear) < succ>
```

[7081] A related DNA sequence was identified in S. pyogenes <SEQ ID 3929> which encodes the amino acid sequence <SEQ ID 3930>. Analysis of this protein sequence reveals the following:

```
Possible site: 28
>>> Seems to have no N-terminal signal sequence
----- Final Results -----
                            bacterial cytoplasm --- Certainty = 0.1640(Affirmative) < succ>
                              bacterial membrane --- Certainty = 0.0000(Not Clear) < succ>
                                bacterial outside --- Certainty = 0.0000(Not Clear) < succ>
```

[7082] An alignment of the GAS and GBS proteins is shown below.

| Identities = 93/98 (94%), Positives = 96/98 (97%) | | | |
|---|---|---|---|
| Query: | 1 | MDKIIKSISASGAFRSYVLDSTETVKLAQEKHHTLSSSTVALGRTLIANQILAANQKGDS | 60 |
| | | MDKIIKSI+ SGAFR+YVLDSTETV LAQEKH+TLSSSTVALGRTLIANQILAANQKGDS | |
| Sbjct: | 1 | MDKIIKSIAQSGAFRAYVLDSTETVALAQEKHNTLSSSTVALGRTLIANQILAANQKGDS | 60 |
| Query: | 61 | KITVKVIGDSSFGHIISVADTKGHVKGYIQINTGVDIKK | 98 |
| | | KITVKVIGDSSFGHIISVADTKGHVKGYIQNTGVDIKK | |
| Sbjct: | 61 | KITVKVIGDSSFGHIISVADTKGHVKGYIQNTGVDIKK | 98 |

[7083] Based on this analysis, it was predicted that these proteins and their epitopes could be useful antigens for vaccines or diagnostics.

### EXAMPLE 1278

[7084] A DNA sequence (GBSx1355) was identified in S. agalactiae <SEQ ID 3931> which encodes the amino acid sequence <SEQ ID 3932>. Analysis of this protein sequence reveals the following:

```
Possible site: 17
>>> Seems to have an uncleavable N-term signal seq
----- Final Results -----
                              bacterial membrane --- Certainty = 0.0000(Not Clear) < succ>
                                bacterial outside --- Certainty = 0.0000(Not Clear) < succ>
                            bacterial cytoplasm --- Certainty = 0.0000(Not Clear) < succ>
```

[7085] The protein has homology with the following sequences in the GENPEPT database.

| >GP: AAC98436 GB: L29324 unknown [Streptococcus pneumoniae] | | | |
|---|---|---|---|
| Identities = 34/48 (70%), Positives = 39/48 (80%) | | | |
| Query: | 1 | MQEVLIIARENHQVTHEHVSILLTCVQELIVEVNQTQPLSREFREKYM | 48 |
| | | + EV IIA+ NHQVTHEHVSILLTC+QELI EV +T PLS +F KYM | |
| Sbjct: | 70 | VHEVFIIAKTNHQVTHEHVSILLTCIQELIKEVEKTGPLSEDFCNKYM | 117 |

[7086] No corresponding DNA sequence was identified in S. pyogenes.

[7087] Based on this analysis, it was predicted that this protein and its epitopes, could be useful antigens for vaccines or diagnostics.

### EXAMPLE 1279

[7088] A DNA sequence (GBSx1356) was identified in S. agalactiae <SEQ ID 3933> which encodes the amino acid sequence <SEQ ID 3934>. This protein is predicted to be TnpA (orfB). Analysis of this protein sequence reveals the following:

```
Possible site: 13
>>> Seems to have no N-terminal signal sequence
----- Final Results -----
                            bacterial cytoplasm --- Certainty = 0.5248(Affirmative) < succ>
                              bacterial membrane --- Certainty = 0.0000(Not Clear) < succ>
                                bacterial outside --- Certainty = 0.0000(Not Clear) < succ>
```

[7089] A related GBS nucleic acid sequence <SEQ ID 9907> which encodes amino acid sequence <SEQ ID 9908> was also identified. A further related GBS nucleic acid sequence <SEQ ID 9677> which encodes amino acid sequence <SEQ ID 9678> was also identified. A further related GBS nucleic acid sequence <SEQ ID 10911> which encodes amino acid sequence <SEQ ID 10912> was also identified.

[7090] There is homology to SEQ ID 1336.

[7091] Based on this analysis, it was predicted that these proteins and their epitopes could be useful antigens for vaccines or diagnostics.

### EXAMPLE 1280

[7092] A DNA sequence (GBSx1357) was identified in S. agalactiae <SEQ ID 3935> which encodes the amino acid sequence <SEQ ID 3936>. Analysis of this protein sequence reveals the following:

```
Possible site: 45
>>> Seems to have no N-terminal signal sequence
----- Final Results -----
                            bacterial cytoplasm --- Certainty = 0.4489(Affirmative) < succ>
                              bacterial membrane --- Certainty = 0.0000(Not Clear) < succ>
                                bacterial outside --- Certainty = 0.0000(Not Clear) < succ>
```

[7093] The protein has homology with the following sequences in the GENPEPT database.

| >GP: AAB64982 GB: U43834 Ydr540cp [Saccharomyces cerevisiae] | | | |
|---|---|---|---|
| Identities = 93/171 (54%), Positives = 121/171 (70%), Gaps = 3/171 (1%) | | | |
| Query: | 1 | MRVYENKEELKKEISKTFEKYIMEFNNIPENLKDKRIDEVDRTPAANLSYQVGWTNLVLK | 60 |
| | | MR Y +K+ELK+EI K +EKY EF I E+ KD++++ VDRTP+ NLSYQ+GW NL+L+ | |
| Sbjct: | 1 | MREYTSKKELKEEIEKKYEKYDAEFETISESQKDEKVETVDRTPSENLSYQLGWVNLLLE | 60 |
| Query: | 61 | WEEDERKGLQVKTPSDKFKWNQLGELYQWFTDTYAHLSLQELKAKLNENINSIYAMIDLL | 120 |
| | | WE E G V+TP+ +KWN LG LYQ F Y S++E +AKL E +N +Y I L | |
| Sbjct: | 61 | WEAKEIAGYNVETPAPGYKWNNLGGLYQSFYKKYGIYSIKEQRAKLREAVNEVYKWISTL | 120 |
| Query: | 121 | SEEELFEAHMRKWADEATKTATWEVYKFIHVNTVAPFGTFRTKIRKWKKIV | 171 |
| | | S++ELF+A RKW AT A W VYK+IH+NTVAPF FR KIRKWK++V | |
| Sbjct: | 121 | SDDELFQAGNRKW---ATTKAMWPVYKWIHINTVAPFTNFRGKIRKWKRLV | 168 |

[7094] No corresponding DNA sequence was identified in S. pyogenes.

[7095] Based on this analysis, it was predicted that this protein and its epitopes, could be useful antigens for vaccines or diagnostics.

### EXAMPLE 1281

[7096] A DNA sequence (GBSx1358) was identified in S. agalactiae <SEQ ID 3937> which encodes the amino acid sequence <SEQ ID 3938>. Analysis of this protein sequence reveals the following:

Possible site: 28
>>> Seems to have an uncleavable N-term signal seq

| | | | |
|---|---|---|---|
| INTEGRAL | Likelihood = −3.45 | Transmembrance | 10-26 (2-26) |

```
----- Final Results -----
                              bacterial membrane --- Certainty = 0.2381(Affirmative) < succ>
                                bacterial outside --- Certainty = 0.0000(Not Clear) < succ>
                            bacterial cytoplasm --- Certainty = 0.0000(Not Clear) < succ>
```

[7097] A related GBS nucleic acid sequence <SEQ ID 8781> which encodes amino acid sequence <SEQ ID 8782> was also identified. Analysis of this protein sequence reveals the following:

| Lipop: Possible site: −1 Crend: 6 | | | | |
|---|---|---|---|---|
| McG: Discrim Score: 8.80 | | | | |
| GvH: Signal Score (−7.5): −3.94 | | | | |
| Possible site: 28 | | | | |
| >>> Seems to have an uncleavable N-term signal seq | | | | |
| ALOM program count: 1 value: −3.45 threshold: 0.0 | | | | |
| | INTEGRAL | Likelihood = −3.45 | Transmembrane | 7-23 (2-26) |
| | PERIPHERAL | Likelihood = 10.40 | 69 | |

```
modified ALOM score: 1.19
*** Reasoning Step: 3
----- Final Results -----
                              bacterial membrane --- Certainty = 0.2381(Affirmative) < succ>
                                bacterial outside --- Certainty = 0.0000(Not Clear) < succ>
                            bacterial cytoplasm --- Certainty = 0.0000(Not Clear)
```

[7098] The protein has homology with the following sequences in the GENPEPT database.

| >GP: CAA68889 GB: Y07615 acid phosphatase [Haemophilus influenzae] | | | |
|---|---|---|---|
| Identities = 112/245 (45%), Positives = 148/245 (59%), Gaps = 10/245 (4%) | | | |
| Query: | 5 | MKKVLVSSLLVLGITITLQTVVEAKGPKVAYTQEGMTALSDTNKDKVTTISIDEIQKSLE | 64 |
| | | MK V+ S++ L +T V G YTQ G A + + IS+D+I++SLE | |
| Sbjct: | 1 | MKNVMKLSVIAL---LTAAAVPAMAGKTEPYTQSGTNAREMLQEQAIHWISVDQIKQSLE | 57 |
| Query: | 65 | GKKPITVSFDIDDTLLFSSQYFQYGKEYVTPGSFDFLHKQKEWDLVAKRGDQDSIPKEYA | 124 |
| | | GK PI VSFDIDDT+LFSS F +G++ +PG D+L Q FW+ V D+ SIPK+ A | |
| Sbjct: | 58 | GKAPINVSFDIDDTVLFSSPCFYHGQQKFSPGKHDYLKNQDFWNEVNAGCDKYSIPKQIA | 117 |
| Query: | 125 | KKLIAMHQKRGDKIVFITGRTRGSMYKEGEVDKTAKALAKDFKLDKPIAVNYTGDKPKKP | 184 |
| | | LI MHQ RGD++ F TGRT G+VD L K F + V + G + ++ | |
| Sbjct: | 118 | IDLINMHQARGDQVYFFTGRT------AGKVDGVTPILEKTFNIKNMHPVEFMGSR-ERT | 170 |
| Query: | 185 | YKYDKSYYIKKYGSDIHYGDSDDDIHAAREAGARPIRILRAPNSTNLPLPEAGGYGEEVL | 244 |
| | | KY+K+ I + IHYGDSDDD+ AA+EAG R IR++RA NST P+P GGYGEEVL | |
| Sbjct: | 171 | TKYNKTPAIISHKVSIHYGDSDDDVLAAKEAGVRGIRLMRAANSTYQPMPTLGGYGEEVL | 230 |
| Query: | 245 | ENSAY | 249 |
| | | NS+Y | |
| Sbjct: | 231 | INSSY | 235 |

[7099] A related DNA sequence was identified in S. pyogenes <SEQ ID 3939> which encodes the amino acid sequence <SEQ ID 3940>. Analysis of this protein sequence reveals the following:

| Possible site: 56 | | | | |
|---|---|---|---|---|
| >>> Seems to have an uncleavable N-term signal seq | | | | |
| | INTEGRAL | Likelihood = −3.98 | Transmembrane | 6-22 (4-25) |

```
----- Final Results -----
                              bacterial membrane --- Certainty = 0.2593(Affirmative) < succ>
                                bacterial outside --- Certainty = 0.0000(Not Clear) < succ>
                            bacterial cytoplasm --- Certainty = 0.0000(Not Clear) < succ>
```

[7100] The protein has homology with the following sequences in the databases:

| >GP: CAA68889 GB: Y07615 acid phosphatase [Haemophilus influenzae] | | | |
|---|---|---|---|
| Identities = 105/237 (44%), Positives = 141/237 (59%), Gaps = 10/237 (4%) | | | |
| Query: | 9 | LFTVSFCGIIALPVEASGPKVPYTQEGITA--ISNQATVKLISIADIASSLEGQKPITVS | 66 |
| | | L ++ A+P A G PYTQ G A + + + IS+ I SLEG+ PI VS | |
| Sbjct: | 7 | LSVIALLTAAAVPAMA-GKTEPYTQSGTNAREMLQEQAIHWISVDQIKQSLEGKAPINVS | 65 |
| Query: | 67 | FDIDDTLLFTSQYFQYGKEYITPGSFDFLHKQKFWDLVAKRGDQDSIPKEYAKQLIAMHQ | 126 |
| | | FDIDDT+LF+S F +G++ +PG D+L Q FW+ V D+ SIPK+ A LI MHQ | |
| Sbjct: | 66 | FDIDDTVLFSSPCFYHGQQKFSPGKHDYLKNQDFWNEVNAGCDKYSIPKQIAIDLINMHQ | 125 |
| Query: | 127 | KRGDKIVFITGRTRGSMYKKGEIDKTAKSLAKDFKLDKPIAINYTGDKAVKPYQYDKTYY | 186 |
| | | RGD++ F TGRT G++D L K F + + + G + + +Y+KT | |
| Sbjct: | 126 | ARGDQVYFFTGRT------AGKVDGVTPILEKTFNIKNMHPVEFMGSRE-RTTKYNKTPA | 178 |
| Query: | 187 | IKKNGSQIHYGDSDEDINAAKEAGARPIRILRAPNSTNLPLPKAGGYGEEVLENSAY | 243 |
| | | I + IHYGDSD+D+ AAKEAG R IR++RA NST P+P GGYGEEVL NS+Y | |
| Sbjct: | 179 | IISHKVSIHYGDSDDDVLAAKEAGVRGIRLMRAANSTYQPMPTLGGYGEEVLINSSY | 235 |

[7101] An alignment of the GAS and GBS proteins is shown below.

| Identities = 196/245 (80%), Positives = 216/245 (88%), Gaps = 2/245 (0%) | | | |
|---|---|---|---|
| Query: | 5 | MKKVLVSSLLVLGITITLQTVVEAKGPKVAYTQEGMTALSDTNKDKVTTISIDEIQKSLE | 64 |
| | | MKK S L + + VEA GPKV YTQEG+TA+S N+ V ISI +I SLE | |
| Sbjct: | 1 | MKKEFTSILFTVSFCGIIALPVEASGPKVPYTQEGITAIS--NQATVKLISIADIASSLE | 58 |
| Query: | 65 | GKKPITVSFDIDDTLLFSSQYFQYGKEYVTPGSFDFLHKQKFWDLVAKRGDQDSIPKEYA | 124 |
| | | G+KPITVSFDIDDTLLF+SQYFQYGKEY+TPGSFDFLHKQKFWDLVAKRGDQDSIPKEYA | |
| Sbjct: | 59 | GQKPITVSFDIDDTLLFTSQYFQYGKEYITPGSFDFLHKQKFWDLVAKRGDQDSIPKEYA | 118 |
| Query: | 125 | KKLIAMHQKRGDKIVFITGRTRGSMYKEGEVDKTAKALAKDFKLDKPIAVNYTGDKPKKP | 184 |
| | | K+LIAMHQKRGDKIVFITGRTRGSMYK+GE+DKTAK+LAKDFKLDKPIA+NYTGDK KP | |
| Sbjct: | 119 | KQLIAMHQKRGDKIVFITGRTRGSMYKKGEIDKTAKSLAKDFKLDKPIAINYTGDKAVKP | 178 |
| Query: | 185 | YKYDKSYYIKKYGSDIHYGDSDDDIHAAREAGARPIRILRAPNSTNLPLPEAGGYGEEVL | 244 |
| | | Y+YDK+YYIKK GS IHYGDSD+DI+AA+EAGARPIRILRAPNSTNLPLP+AGGYGEEVL | |
| Sbjct: | 179 | YQYDKTYYIKKNGSQIHYGDSDEDINAAKEAGARPIRILRAPNSTNLPLPKAGGYGEEVL | 238 |
| Query: | 245 | ENSAY | 249 |
| | | ENSAY | |
| Sbjct: | 239 | ENSAY | 243 |

[7102] SEQ ID 8782 (GBS100) was expressed in E. coli as a His-fusion product. SDS-PAGE analysis of total cell extract is shown in FIG. 16 (lane 5; MW 28 kDa). It was also expressed in E. coli as a GST-fusion product. SDS-PAGE analysis of total cell extract is shown in FIG. 33 (lane 2; MW 53 kDa).

[7103] The GBS100-GST fusion product was purified (FIG. 106A; see also FIG. 197, lane 4) and used to immunise mice (lane 1 product; 9.9 μg/mouse). The resulting antiserum was used for Western blot (FIG. 106B), FACS (FIG. 106C), and in the in vivo passive protection assay (Table III). These tests confirm that the protein is immunoaccessible on GBS and that it is an effective protective immunogen.

[7104] Based on this analysis, it was predicted that these proteins and their epitopes could be useful antigens for vaccines or diagnostics.

### EXAMPLE 1282

[7105] A DNA sequence (GBSx1359) was identified in S. agalactiae <SEQ ID 3941> which encodes the amino acid sequence <SEQ ID 3942>. Analysis of this protein sequence reveals the following:

```
Possible site: 19
>>> Seems to have no N-terminal signal sequence
----- Final Results -----
                            bacterial cytoplasm --- Certainty = 0.3288(Affirmative) < succ>
                              bacterial membrane --- Certainty = 0.0000(Not Clear) < succ>
                                bacterial outside --- Certainty = 0.0000(Not Clear) < succ>
```

[7106] The protein has no significant homology with any sequences in the GENPEPT database.

[7107] No corresponding DNA sequence was identified in S. pyogenes.

[7108] Based on this analysis, it was predicted that this protein and its epitopes, could be useful antigens for vaccines or diagnostics.

### EXAMPLE 1283

[7109] A DNA sequence (GBSx1360) was identified in S. agalactiae <SEQ ID 3943> which encodes the amino acid sequence <SEQ ID 3944>. Analysis of this protein sequence reveals the following:

```
Possible site: 50
>>> Seems to have no N-terminal signal sequence
----- Final Results -----
                            bacterial cytoplasm --- Certainty = 0.4004(Affirmative) < succ>
                              bacterial membrane --- Certainty = 0.0000(Not Clear) < succ>
                                bacterial outside --- Certainty = 0.0000(Not Clear) < succ>
```

[7110] A related GBS nucleic acid sequence <SEQ ID 9675> which encodes amino acid sequence <SEQ ID 9676> was also identified.

[7111] The protein has homology with the following sequences in the GENPEPT database.

| >GP: BAB04406 GB: AP001509 RNA methyltransferase [Bacillus halodurans] | | | |
|---|---|---|---|
| Identities = 198/452 (43%), Positives = 300/452 (65%) | | | |
| Query: | 12 | KRKIMLHKNDIIETEISDISHEGMGIAKVDGFVFFVENALPGEIIKMRVLKLRKRIGYGK | 71 |
| | | K++ ++KND++E I D++H+G G+AKVDG+ F+ ALPGE +K +V+K++K G+G+ | |
| Sbjct: | 3 | KQQAPVNKNDVVEVTIEDLTHDGAGVAKVDGYALFIPKALPGERLKAKVVKVKKGYGFGR | 62 |
| Query: | 72 | VEEYLTTSPHRNEGLDYTYLRTGIADLGHLTYEQQLLFKQKQVADNLYKIAHISDVLVEP | 131 |
| | | V + SP R E + + G L H++Y+ QL +KQKQV D L +I I+ V V P | |
| Sbjct: | 63 | VLNMIEASPDRVEAPCPVFNQCGGCQLQHMSYDAQLRYKQKQVQDVLERIGKITAVTVRP | 122 |
| Query: | 132 | TLGMTIPLAYRNKAQVPVRRVDGQLETGFFRKNSHTLVSIEDYLIQEKEIDALINFTRDL | 191 |
| | | T+GM P YRNKAQVPV +G L GF+++ SH ++ +++ +IQ +E D +I ++L | |
| Sbjct: | 123 | TIGMNEPWRYRNKAQVPVGEREGGLIAGFYQERSHRIIDMDECMIQHEENDKVIRQVKEL | 182 |
| Query: | 192 | LRKFDVKPYDEEQQSGLIRNLVVRRGHYTGQLMLVLVTTRPKIFRIDQMIEKLVSAFPSV | 251 |
| | | R+ ++ YDEE+ G +R++V R G TG++M+VL+T ++ +IE++ A P V | |
| Sbjct: | 183 | ARELGIRGYDEEKHRGTLRHVVARYGKNTGEIMVVLITRGEELPHKKTLIERIHKAIPHV | 242 |
| Query: | 252 | VSIMQNINDRNSNVIFGKEFRTLYGSDTIEDQMLGNTYAISAQSFYQVNTEMAEKLYQKA | 311 |
| | | SI+QN+N + +NVIFG + + L+G + I D + +AISA+SFYQVN E + LY +A | |
| Sbjct: | 243 | KSIVQNVNPKRTNVIFGDKTKVLWGEEYIYDTIGDIKFAISARSFYQVNPEQTKVLYDQA | 302 |
| Query: | 312 | IDFSDLNSEDIVIDAYSGIGTIGLSVAKQVKHVYGVEVVEKAVSDAKENATRNGITNSTY | 371 |
| | | ++F++L + VIDAY GIGTI L +A+Q KHVYGVE+V +A+SDAK NA NG N + | |
| Sbjct: | 303 | LEFANLTGSETVIDAYCGIGTISLFLAQQAKHVYGVEIVPEAISDAKRNARLNGFANVQF | 362 |
| Query: | 372 | VADSAENAMAKWLKEGIKPTVIMVDPPRKGLTESFVYSAAQTKADKITYISCNSATMARD | 431 |
| | | AE M W +G++ VI+VDPPRKG E+ + + K D++ Y+SCN AT+ARD | |
| Sbjct: | 363 | AVGDAEKVMPWWYAQGVRADVIVVDPPRKGCDEALLKTILNMKPDRVVYVSCNPATLARD | 422 |
| Query: | 432 | IKLFEELGYHLVKIQPVDLFPMTHHVECVALL | 463 |
| | | +++ E+ GY +QPVD+FP T H+E VA+L | |
| Sbjct: | 423 | LRVLEDGGYETKDVQPVDMFPWTTHIESVAVL | 454 |

[7112] A related DNA sequence was identified in S. pyogenes <SEQ ID 3945> which encodes the amino acid sequence <SEQ ID 3946>. Analysis of this protein sequence reveals the following:

```
Possible site: 33
>>> Seems to have no N-terminal signal sequence
----- Final Results -----
                            bacterial cytoplasm --- Certainty = 0.1262(Affirmative) < succ>
                              bacterial membrane --- Certainty = 0.0000(Not Clear) < succ>
                                bacterial outside --- Certainty = 0.0000(Not Clear) < succ>
```

[7113] An alignment of the GAS and GBS proteins is shown below.

| Identities = 332/454 (73%), Positives = 387/454 (85%) | | | |
|---|---|---|---|
| Query: | 12 | KRKIMLHKNDIIETEISDISHEGMGIAKVDGFVFFVENALPGEIIKMRVLKLRKRIGYGK | 71 |
| | | KR ML KNDII+ ISD+SHEG G+AK DGFVFFV+NALP E+I MRVLK+ K G+GK | |
| Sbjct: | 8 | KRIRMLKKNDIIQVAISDLSHEGAGVAKHDGFVFFVDNALPEEVIDMRVLKVNKNSGFGK | 67 |
| Query: | 72 | VEEYLTTSPHRNEGLDYTYLRTGIADLGHLTYEQQLLFKQKQVADNLYKIAHISDVLVEP | 131 |
| | | VE Y S RN ++ TYLRTGIADLGHLTYE QL FK+KQV D+LYKIA ISDV VE | |
| Sbjct: | 68 | VEAYHYLSSARNADVNLTYLRTGIADLGHLTYEDQLTFKKKQVQDSLYKIAGISDVTVES | 127 |
| Query: | 132 | TLGMTIPLAYRNKAQVPVRRVDGQLETGFFRKNSHTLVSIEDYLIQEKEIDALINFTRDL | 191 |
| | | T+GMT PLAYRNKAQVPVRRV+GQLETGFFRK+SH L+ I DY IQ+KEID LINFTRDL | |
| Sbjct: | 128 | TIGMTEPLAYRNKAQVPVRRVNGQLETGFFRKHSHDLIPISDYYIQDKEIDRLINFTRDL | 187 |
| Query: | 192 | LRKFDVKPYDEEQQSGLIRNLVVRRGHYTGQLMLVLVTTRPKIFRIDQMIEKLVSAFPSV | 251 |
| | | LR+FD+KPYDE +Q+GL+RN+VVRRGHY+G++MLVLVTTRPK+FR+DQ+IEK+V AFP+V | |
| Sbjct: | 188 | LRRFDIKPYDETEQTGLLRNIVVRRGHYSGEMMLVLVTTRPKVFRVDQVIEKIVEAFPAV | 247 |
| Query: | 252 | VSIMQNINDRNSNVIFGKEFRTLYGSDTIEDQMLGNTYAISAQSFYQVNTEMAEKLYQKA | 311 |
| | | VSI+QNIND+N+N IFGK+F+TLYG DTI D MLGN YAISAQSFYQVNT MAEKLYQ A | |
| Sbjct: | 248 | VSIIQNINDKNTNAIFGKDFKTLYGKDTITDSMLGNNYAISAQSFYQVNTVMAEKLYQTA | 307 |
| Query: | 312 | IDFSDLNSEDIVIDAYSGIGTIGLSVAKQVKHVYGVEVVEKAVSDAKENATRNGITNSTY | 371 |
| | | I FSDL+ +DIVIDAYSGIGTIGLS AK VK VYGVEV+E AV DA++NA NGITN+ + | |
| Sbjct: | 308 | IAFSDLSKDDIVIDAYSGIGTIGLSFAKTVKAVYGVEVIEAAVRDAQQNAALNGITNAYF | 367 |
| Query: | 372 | VADSAENAMAKWLKEGIKPTVIMVDPPRKGLTESFVYSAAQTKADKITYISCNSATMARD | 431 |
| | | VAD+AE+AMA W K+GIKP+VI+VDPPRKGLTESF+ ++ KITY+SCN ATMARD | |
| Sbjct: | 368 | VADTAEHAMATWAKDGIKPSVILVDPPRKGLTESFIQASVAMGPQKITYVSCNPATMARD | 427 |
| Query: | 432 | IKLFEELGYHLVKIQPVDLFPMTHHVECVALLVK | 465 |
| | | IK ++ELGY L K+QPVDLFP THHVECV LL+K | |
| Sbjct: | 428 | IKRYQELGYKLAKVQPVDLFPQTHHVECVVLLIK | 461 |

[7114] Based on this analysis, it was predicted that these proteins and their epitopes could be useful antigens for vaccines or diagnostics.

### EXAMPLE 1284

[7115] A DNA sequence (GBSx1361) was identified in S. agalactiae <SEQ ID 3947> which encodes the amino acid sequence <SEQ ID 3948>. This protein is predicted to be PSR protein. Analysis of this protein sequence reveals the following:

| Possible site: 58 | | | | |
|---|---|---|---|---|
| >>> Seems to have no N-terminal signal sequence | | | | |
| | INTEGRAL | Likelihood = −12.15 | Transmembrane | 135-151 (127-155) |

```
----- Final Results -----
                              bacterial membrane --- Certainty = 0.5861(Affirmative) < succ>
                                bacterial outside --- Certainty = 0.0000(Not Clear) < succ>
                            bacterial cytoplasm --- Certainty = 0.0000(Not Clear) < succ>
```

[7116] The protein has homology with the following sequences in the GENPEPT database.

| >GP: CAB76822 GB: AJ276232 PSR protein [Enterococcus faecalis] | | | |
|---|---|---|---|
| Identities = 143/409 (34%), Positives = 206/409 (49%), Gaps = 56/409 (13%) | | | |
| Query: | 48 | QRRTESPP--TNSYYEEPYSDSYYQDDDFYSEPQLTSQGLPIYQEERAPKKKKQRARKEK | 105 |
| | | + R E P S E Y DSY +D T G ++ P+ KK + K+K | |
| Sbjct: | 31 | EHREEEPEELAESLQEPVYEDSYTEDSRRSERRHQTDSGGG-NGSDQPPRGKKDKKPKKK | 89 |
| Query: | 106 | QRVKVMAPFPPKAITPPRKKKKFKGFLKFIGIILLIVLSGMVFMFVKGMRDVNNGKSHYS | 165 |
| | | RKK K K F K++ I+L+++ + MF+KG + S | |
| Sbjct: | 90 | -----------------RKKSKTKRFFKWLVILLILLFAYSTVMFLKGKSAAEHDDS-LP | 131 |
| Query: | 166 | PAIIEDFKGKDAVDGT-NILILGSDKRVSERSTDARTDTIMVANVGNKDNKVKMVSFMRD | 224 |
| | | +E F G + +G NILILGSD R + R DTIMV + K K++SFMRD | |
| Sbjct: | 132 | QEKVETFNGVKSSNGAKNILILGSDTRGEDAG---RADTIMVLQLNGPSKKPKLISFMRD | 188 |
| Query: | 225 | LLVNIPNYSTEGYYDMKLNASFNLGEQDNHKGAEYVRQTLKNHFDIDIKYYVMVDFETFA | 284 |
| | | V+IP G K+NA++ G GAE VR+TLK +F++D KYY VDF++F | |
| Sbjct: | 189 | TFVDIP-----GVGPNKINAAYAYG------GAELVRETLKQNFNLDTKYYAKVDFQSFE | 237 |
| Query: | 285 | DAIDTLFPNGVKINAKFGLVGGQSADSVKVPDDLRMKNGVVPSQKIKVGIQYMDGRTLLN | 344 |
| | | +D++FP GVKI+A+ L + D V I+ G Q MDG LL | |
| Sbjct: | 238 | KIVDSMFPKGVKIDAEKSL----NLDGVD----------------IEKGQQVMDGHVLLQ | 277 |
| Query: | 345 | YARFRKDDDGDFGRTQRQQQVMRAIVSQIKDPRRLFTGSAAIGKAYALTSSNLSYSFVLT | 404 |
| | | YARFR D++GDFGR +RQQQVM A++SQ+K+P L ++GK S+++ SF+LT | |
| Sbjct: | 278 | YARFRMDEEGDFGRVRRQQQVMSAVMSQMKNPMTLLRTPESLGKLVGYMSTDVPVSFMLT | 337 |
| Query: | 405 | DGIPILSDAKNGIKQMTIPREGDWVDDYDQYGGQGLTIDFAKYKKILKK | 453 |
| | | +G +L K G++ +++P W Y G L +D K ++K | |
| Sbjct: | 338 | NGPSLLIKGKTGVESLSVPVPDSWNFGESSYAGSILEVDEQKNADAIEK | 386 |

[7117] A related DNA sequence was identified in S. pyogenes <SEQ ID 3949> which encodes the amino acid sequence <SEQ ID 3950>. Analysis of this protein sequence reveals the following:

| Possible site: 49 | | | | |
|---|---|---|---|---|
| >>> Seems to have no N-terminal signal sequence | | | | |
| | INTEGRAL | Likelihood = −7.96 | Transmembrane | 159-175 (152-180) |

```
----- Final Results -----
                              bacterial membrane --- Certainty = 0.4185(Affirmative) < succ>
                                bacterial outside --- Certainty = 0.0000(Not Clear) < succ>
                            bacterial cytoplasm --- Certainty = 0.0000(Not Clear) < succ>
```

[7118] The protein has homology with the following sequences in the databases:

| >GP: CAB76822 GB: AJ276232 PSR protein [Enterococcus faecalis] | | | |
|---|---|---|---|
| Identities = 140/345 (40%), Positives = 195/345 (55%), Gaps = 41/345 (11%) | | | |
| Query: | 140 | PRSQK----RKHKKKGCMKWFFNILGLLLMTVLMGLGLMFAKGVFDISTNKANYKPAVSQ | 195 |
| | | PR +K +K +KK K FF L +LL+ + +MF KG + + + V + | |
| Sbjct: | 78 | PRGKKDKKPKKKRKKSKTKRFFKWLVILLILLFAYSTVMFLKGKSAAEHDDSLPQEKV-E | 136 |
| Query: | 196 | AFDGQETQDGT-NILILGSDQRVTQGSTDARTDTIMVVNVGNHAKKIKMVSFMRDTLINI | 254 |
| | | F+G ++ +G NILILGSD T+G R DTIMV+ + +KK K++SFMRDT ++I | |
| Sbjct: | 137 | TFNGVKSSNGAKNILILGSD---TRGEDAGRADTIMVLQLNGPSKKPKLISFMRDTFVDI | 193 |
| Query: | 255 | PGYSYNDNSYDLKLNSAFNLGEQEDHHGAEYVRRALKHNFDIDIKYYVMVDFETFAEAID | 314 |
| | | PG N K+N+A+ G GAE VR LK NF++D KYY VDF++F + +D | |
| Sbjct: | 194 | PGVGPN------KINAAYAYG------GAELVRETLKQNFNLDTKYYAKVDFQSFEKIVD | 241 |
| Query: | 315 | TLFPNGVKIDAKFATVGGVAVDSVEVPDDLRMKNGVVPNQTIEVGEQRMDGRTLLNYARF | 374 |
| | | ++FP GVKIDA+ + + +D V+ IE G+Q MDG LL YARF | |
| Sbjct: | 242 | SMFPKGVKIDAEKS----LNLDGVD----------------IEKGQQVMDGHVLLQYARF | 281 |
| Query: | 375 | RKDDEGDFGRTVRQQQVMSAVMSQIKDPTKLFTGSAAIGKIYALTSTNVSFPFVVKNGVS | 434 |
| | | R D+EGDFGR RQQQVMSAVMSQ+K+P L ++GK+ ST+V F++ NG S | |
| Sbjct: | 282 | RMDEEGDFGRVRRQQQVMSAVMSQMKNPMTLLRTPESLGKLVGYMSTDVPVSFMLTNGPS | 341 |
| Query: | 435 | VLGSGKNGVEHVTIPENGDWVDEYDMYGGQALYIDFDKYQKTLAK | 479 |
| | | +L GK GVE +++P W Y G L +D K + K | |
| Sbjct: | 342 | LLIKGKTGVESLSVPVPDSWNFGESSYAGSILEVDEQKNADAIEK | 386 |

[7119] An alignment of the GAS and GBS proteins is shown below.

| Identities = 273/486 (56%), Positives = 340/486 (69%), Gaps = 32/486 (6%) | | | |
|---|---|---|---|
| Query: | 1 | MSRNNYGQLNHHEELRYNYLLKNIHYLNEREKMEFQYLHYKKTAVRPQRRTESPPTNSYY | 60 |
| | | M++ G L+HHEELRY YLL+N+ YL+E EK EF +L K R ++ S | |
| Sbjct: | 1 | MTKYPMGGLSHHEELRYFYLLRNLSYLSENEKKEFAFLKSKLEIGRAYAPSKQHYRKSKR | 60 |
| Query: | 61 | EEPY-SDSYY---------QDDDFYSEPQLTSQGLPIYQEERAPKKKKQRARKEKQRVKV | 110 |
| | | +EPY D YY +DDD + GLPIY +E KK K R + | |
| Sbjct: | 61 | QEPYFEDDYYNDYSPNDLLEDDDVNHDSSFVPYGLPIYPKEDRYLNKKT---KLTARRPI | 117 |
| Query: | 111 | MAPFP-----------------PKAITPPRKKKK-FKGFLKFIGIILLIVLSGMVFMFVK | 152 |
| | | AP P P++ KKK K F +G++L+ VL G+ MF K | |
| Sbjct: | 118 | DAPQPIDEDDAFLTESVARCALPRSQKRKHKKKGCMKWFFNILGLLLMTVLMGLGLMFAK | 177 |
| Query: | 153 | GMRDVNNGKSHYSPAIIEDFKGKDAVDGTNILILGSDKRVSERSTDARTDTIMVANVGNK | 212 |
| | | G+ D++ K++Y PA+ + F G++ DGTNILILGSD+RV++ STDARTDTIMV NVGN | |
| Sbjct: | 178 | GVFDISTNKANYKPAVSQAFDGQETQDGTNILILGSDQRVTQGSTDARTDTIMVVNVGNH | 237 |
| Query: | 213 | DNKVKMVSFMRDLLVNIPNYS-TEGYYDMKLNASFNLGEQDNHKGAEYVRQTLKNHFDID | 271 |
| | | K+KMVSFMRD L+NIP YS + YD+KLN++FNLGEQ++H GAEYVR+ LK++FDID | |
| Sbjct: | 238 | AKKIKMVSFMRDTLINIPGYSYNDNSYDLKLNSAFNLGEQEDHHGAEYVRRALKHNFDID | 297 |
| Query: | 272 | IKYYVMVDFETFADAIDTLFPNGVKINAKFGLVGGQSADSVKVPDDLRMKNGVVPSQKIK | 331 |
| | | IKYYVMVDFETFA+AIDTLFPNGVKI+AKF VGG + DSV+VPDDLRMKNGVVP+Q I+ | |
| Sbjct: | 298 | IKYYVMVDFETFAEAIDTLFPNGVKIDAKFATVGGVAVDSVEVPDDLRMKNGVVPNQTIE | 357 |
| Query: | 332 | VGIQYMDGRTLLNYARFRKDDDGDFGRTQRQQQVMRAIVSQIKDPRRLFTGSAAIGKAYA | 391 |
| | | VG Q MDGRTLLNYARFRKDD+GDFGRT RQQQVM A++SQIKDP +LFTGSAAIGK YA | |
| Sbjct: | 358 | VGEQRMDGRTLLNYARFRKDDEGDFGRTVRQQQVMSAVMSQIKDPTKLFTGSAAIGKIYA | 417 |
| Query: | 392 | LTSSNLSYSFVLTDGIPILSDAKNGIKQMTIPREGDWVDDYDQYGGQGLTIDFAKYKKIL | 451 |
| | | LTS+N+S+ FV+ +G+ +L KNG++ +TIP GDWVD+YD YGGQ L IDF KY+K L | |
| Sbjct: | 418 | LTSTNVSFPFVVKNGVSVLGSGKNGVEHVTIPENGDWVDEYDMYGGQALYIDFDKYQKTL | 477 |
| Query: | 452 | KKMGLR | 457 |
| | | K+GLR | |
| Sbjct: | 478 | AKLGLR | 483 |

[7120] Based on this analysis, it was predicted that these proteins and their epitopes could be useful antigens for vaccines or diagnostics.

### EXAMPLE 1285

[7121] A DNA sequence (GBSx1362) was identified in S. agalactiae <SEQ ID 3951> which encodes the amino acid sequence <SEQ ID 3952>. This protein is predicted to be shikimate kinase (aroK). Analysis of this protein sequence reveals the following:

```
Possible site: 17
>>> Seems to have a cleavable N-term signal seq.
----- Final Results -----
                                bacterial outside --- Certainty = 0.3000(Affirmative) < succ>
                              bacterial membrane --- Certainty = 0.0000(Not Clear) < succ>
                            bacterial cytoplasm --- Certainty = 0.0000(Not Clear) < succ>
```

[7122] The protein has homology with the following sequences in the GENPEPT database.

| >GP: CAA55181 GB: X78413 shikimate kinase [Lactococcus lactis] | | | |
|---|---|---|---|
| Identities = 65/164 (39%), Positives = 98/164 (59%), Gaps = 8/164 (4%) | | | |
| Query: | 1 | MPKVLLGFMGVGKTSVANCLENEVIDMDSLIEKHIGMSISRFFTEEGEASFRALESQFLN | 60 |
| | | M +L+GFMG GK++VA L E D+D LIE+ I M I+ FF GEA FR +E++ | |
| Sbjct: | 1 | MSIILIGFMGAGKSTVAKLLAEEFTDLDKLIEEEIEMPIATFFELFGEADFRKIENEVFE | 60 |
| Query: | 61 | ELLKKKNEGLVIASGGGIVLLEENRRLLTLNRHNNIL-LTGSFEVLYHRIKKDEKNRRPL | 119 |
| | | ++K ++IA+GGGI+ E + L L+R + ++ LT F+ L+ RI D +N RP | |
| Sbjct: | 61 | LAVQK---DIIIATGGGII--ENPKNLNVLDRASRVVFLTADFDTLWKRISMDWQNVRP- | 114 |
| Query: | 120 | FLNHSKEEFYDIYQKRMLLYSGLSDMIIDTDYLTPQKIATVIGE | 163 |
| | | L KE +++KRM YS ++D+ ID +P++IA I E | |
| Sbjct: | 115 | -LAQDKEAAQLLFEKRMKDYSLVADLTIDVTDKSPEQIAEQIRE | 157 |

[7123] A related DNA sequence was identified in S. pyogenes <SEQ ID 3953> which encodes the amino acid sequence <SEQ ID 3954>. Analysis of this protein sequence reveals the following:

```
Possible site: 43
>>> Seems to have a cleavable N-term signal seq.
----- Final Results -----
                                bacterial outside --- Certainty = 0.3000(Affirmative) < succ>
                              bacterial membrane --- Certainty = 0.0000(Not Clear) < succ>
                            bacterial cytoplasm --- Certainty = 0.0000(Not Clear) < succ>
```

[7124] The protein has homology with the following sequences in the databases:

| >GP: CAA55181 GB: X78413 shikimate kinase [Lactococcus lactis] | | | |
|---|---|---|---|
| Identities = 63/160 (39%), Positives = 97/160 (60%), Gaps = 5/160 (3%) | | | |
| Query: | 1 | MTKVLLGFMGVGKTTVSKHLSMHCKDMDAIIEAKIGMSIAAFFEQHGEIAFRTIESQVLK | 60 |
| | | M+ +L+GFMG GK+TV+K L+ D+D +IE +I M IA FFE GE FR IE++V + | |
| Sbjct: | 1 | MSIILIGFMGAGKSTVAKLLAEEFTDLDKLIEEEIEMPIATFFELFGEADFRKIENEVFE | 60 |
| Query: | 61 | DLLFANDNSIIVTGGGVVVLQENRQLLRKNHQHNILLVASFETLYQRLKHDKKSQRPLFL | 120 |
| | | L + II TGGG++ +N +L + + L A F+TL++R+ D ++ RP L | |
| Sbjct: | 61 | --LAVQKDIIIATGGGIIENPKNLNVLDR-ASRVVFLTADFDTLWKRISMDWQNVRP--L | 115 |
| Query: | 121 | KYSKEAFYEFYQQRMVFYEGLSDLVIRVDHRTPEEVANII | 160 |
| | | KEA +++RM Y ++DL I V ++PE++A I | |
| Sbjct: | 116 | AQDKEAAQLLFEKRMKDYSLVADLTIDVTDKSPEQIAEQI | 155 |

[7125] An alignment of the GAS and GBS proteins is shown below.

| Identities = 88/161 (54%), Positives = 120/161 (73%), Gaps = 1/161 (0%) | | | |
|---|---|---|---|
| Query: | 1 | MPKVLLGFMGVGKTSVANCLENEVIDMDSLIEKHIGMSISRFFTEEGEASFRALESQFLN | 60 |
| | | M KVLLGFMGVGKT+V+ L DMD++IE IGMSI+ FF + GE +FR +ESQ L | |
| Sbjct: | 1 | MTKVLLGFMGVGKTTVSKHLSMHCKDMDAIIEAKIGMSIAAFFEQHGEIAFRTIESQVLK | 60 |
| Query: | 61 | ELLKKKNEGLVIASGGGIVLLEENRRLLTLNRHNNILLTGSFEVLYHRIKKDEKNRRPLF | 120 |
| | | +LL N+ +I +GGG+V+L+ENR+LL N +NILL SFE LY R+K D+K++RPLF | |
| Sbjct: | 61 | DLLFA-NDNSIIVTGGGVVVLQENRQLLRKNHQHNILLVASFETLYQRLKHDKKSQRPLF | 119 |
| Query: | 121 | LNHSKEEFYDIYQKRMLLYSGLSDMIIIDTDYLTPQKIATVI | 161 |
| | | L +SKE FY+ YQ+RM+ Y GLSD++I D+ TP+++A +I | |
| Sbjct: | 120 | LKYSKEAFYEFYQQRMVFYEGLSDLVIRVDHRTPEEVANII | 160 |

[7126] SEQ ID 3952 (GBS152) was expressed in E. coli as a His-fusion product. SDS-PAGE analysis of total cell extract is shown in FIG. 25 (lane 2; MW 20 kDa). It was also expressed in E. coli as a GST-fusion product. SDS-PAGE analysis of total cell extract is shown in FIG. 37 (lane 2; MW 45.5 kDa).

[7127] Based on this analysis, it was predicted that these proteins and their epitopes could be useful antigens for vaccines or diagnostics.

### EXAMPLE 1286

[7128] A DNA sequence (GBSx1363) was identified in S. agalactiae <SEQ ID 3955> which encodes the amino acid sequence <SEQ ID 3956>. This protein is predicted to be 3-phosphoshikimate 1-carboxyvinyltransferase (aroA). Analysis of this protein sequence reveals the following:

| Possible site: 39 | | | | |
|---|---|---|---|---|
| >>> Seems to have no N-terminal signal sequence | | | | |
| | INTEGRAL | Likelihood = −1.81 | Transmembrane | 241-257 (240-257) |
| | INTEGRAL | Likelihood = −0.06 | Transmembrane | 390-406 (390-406) |

```
----- Final Results -----
                              bacterial membrane --- Certainty = 0.1723(Affirmative) < succ>
                                bacterial outside --- Certainty = 0.0000(Not Clear) < succ>
                            bacterial cytoplasm --- Certainty = 0.0000(Not Clear) < succ>
```

[7129] A related GBS nucleic acid sequence <SEQ ID 9673> which encodes amino acid sequence <SEQ ID 9674> was also identified.

[7130] The protein has homology with the following sequences in the GENPEPT database.

| >GP: AAD45819 GB: AF169483 5-enolpyruvylshikimate-3-phosphate synthase | | | |
|---|---|---|---|
| [Streptococcus pneumoniae] | | | |
| Identities = 288/426 (67%), Positives = 347/426 (80%) | | | |
| Query: | 5 | MKLLTNANTLKGTIRVPGDKSISHRAIIFGSISQGVTRIVDVLRGEDVLSTIEAFKQMGV | 64 |
| | | MKL TN L G IRVPGDKSISHR+IIFGS+++G T++ D+LRGEDVLST++ F+ +GV | |
| Sbjct: | 1 | MKLKTNIRHLHGIIRVPGDKSISHRSIIFGSLAEGETKVYDILRGEDVLSTMQVFRDLGV | 60 |
| Query: | 65 | LIEDDGEIITIYGKGFAGLTQPNNLLDMGNSGTSMRLIAGVLAGQEFEVTMVGDNSLSKR | 124 |
| | | IED +IT+ G G AGL P N L+MGNSGTS+RLI+GVLAG +FEV M GD+SLSKR | |
| Sbjct: | 61 | EIEDKDGVITVQGVGMAGLKAPQNALNMGNSGTSIRLISGVLAGADFEVEMFGDDSLSKR | 120 |
| Query: | 125 | PMDRIALPLSKMGARISGVTNRDLPPLKLQGTKKLKPIFYHLPVASAQVKSALIFAALQT | 184 |
| | | PMDR+ LPL KMG ISG T RDLPPL+L+GTK L+PI Y LP+ASAQVKSAL+FAALQ | |
| Sbjct: | 121 | PMDRVTLPLKKMGVSISGQTERDLPPLRLKGTKNLRPIHYELPIASAQVKSALMFAALQA | 180 |
| Query: | 185 | KGESLIVEKEQTRNHTEDMIRQFGGNLDIKDKEIRLNGGQSLVGQDIRVPGDISSAAFWI | 244 |
| | | KGES+I+EKE TRNHTEDM++QFGGHL + K+I + G Q L GQ + VPGDISSAAFW+ | |
| Sbjct: | 181 | KGESVIIEKEYTRNHTEDMLQQFGGNLSVDGKKITVQGPQKLTGQKVVVPGDISSAAFWL | 240 |
| Query: | 245 | VAGLIIPNSHIILENVGINETRTGILDVVSKMGGKIKLSSVDNQVKSATLTVDYSHLQAT | 304 |
| | | VAGLI PNS ++L+NVGINETRTGI+DV+ MGGK++++ +D KSATL V+ S L+ T | |
| Sbjct: | 241 | VAGLIAPNSRLVLQNVGINETRTGIIDVIRAMGGKLEITEIDPVAKSATLIVESSDLKGT | 300 |
| Query: | 305 | HISGAMIPRLIDELPIIALLATQAQGTTVIADAQELKVKETDRIQVVVESLKQMGADITA | 364 |
| | | I GA+IPRLIDELPIIALLATQAQG TVI DA+ELKVKETDRIQVV ++L MGADIT | |
| Sbjct: | 301 | EICGALIPRLIDELPIIALLATQAQGVTVIKDAEELKVKETDRIQVVADALNSMGADITP | 360 |
| Query: | 365 | TADGMIIRGNTPLHAASLDCHGDHRIGMMIAIAALLVKEGEVDLSGEEAINTSYPNFLEH | 424 |
| | | TADGMII+G + LH A ++ GDHRIGMM AIAALLV +GEV+L EAINTSYP+F + | |
| Sbjct: | 361 | TADGMIIKGKSALHGARVNTFGDHRIGMMTAIAALLVADGEVELDRAEAINTSYPSFFDD | 420 |
| Query: | 425 | LEGLVN | 430 |
| | | LE L++ | |
| Sbjct: | 421 | LESLIH | 426 |

[7131] A related DNA sequence was identified in S. pyogenes <SEQ ID 3957> which encodes the amino acid sequence <SEQ ID 3958>. Analysis of this protein sequence reveals the following:

| Possible site: 36 | | | | |
|---|---|---|---|---|
| >>> Seems to have no N-terminal signal sequence | | | | |
| | INTEGRAL | Likelihood = −2.18 | Transmembrane | 240-256 (239-256) |

```
----- Final Results -----
                              bacterial membrane --- Certainty = 0.1871(Affirmative) < succ>
                                bacterial outside --- Certainty = 0.0000(Not Clear) < succ>
                            bacterial cytoplasm --- Certainty = 0.0000(Not Clear) < succ>
```

[7132] The protein has homology with the following sequences in the databases:

| >GP: AAD45819 GB: AF169483 5-enolpyruvylshikimate-3-phosphate synthase | | | |
|---|---|---|---|
| [Streptococcus pneumoniae] | | | |
| Identities = 278/426 (65%), Positives = 346/426 (80%) | | | |
| Query: | 4 | MKLRTNAGPLQGTIQVPGDKSISHRAVILGAVAKGETRVKGLLKGEDVLSTIQAFRNLGV | 63 |
| | | MKL+TN L G I+VPGDKSISHR++I G++A+GET+V +L+GEDVLST+Q FR+LGV | |
| Sbjct: | 1 | MKLKTNIRHLHGIIRVPGDKSISHRSIIFGSLAEGETKVYDILRGEDVLSTMQVFRDLGV | 60 |
| Query: | 64 | RIEEKDDQLVIEGQGFQGLNAPCQTLNMGNSGTSMRLIAGLLAGQPFSVKMIGDESLSKR | 123 |
| | | IE+KD + ++G G GL AP LNMGNSGTS+RLI+G+LAG F V+M GD+SLSKR | |
| Sbjct: | 61 | EIEDKDGVITVQGVGMAGLKAPQNALNMGNSGTSIRLISGVLAGADFEVEMFGDDSLSKR | 120 |
| Query: | 124 | PMDRIVYPLKQMGVEISGETDRQFPPLQLQGNRNLQPITYTLPISSAQVKSAILLAALQA | 183 |
| | | PMDR+ PLK+MGV ISG+T+R PPL+L+G +NL+PI Y LPI+SAQVKSA++ AALQA | |
| Sbjct: | 121 | PMDRVTLPLKKMGVSISGQTERDLPPLRLKGTKNLRPIHYELPIASAQVKSALMFAALQA | 180 |
| Query: | 184 | KGTTQVVEKEITRNHTEEMIQQFGGRLIVDGKRITLVGPQQLTAQEITVPGDISSAAFWL | 243 |
| | | KG + ++EKE TRNHTE+M+QQFGG L VDGK+IT+ GPQ+LT Q++ VPGDISSAAFWL | |
| Sbjct: | 181 | KGESVIIEKEYTRNHTEDMLQQFGGHLSVDGKKITVQGPQKLTGQKVVVPGDISSAAFWL | 240 |
| Query: | 244 | VAGLIIPGSELLLKNVGVNPTRTGILEVVEKMGAQIVYEDMNKKEQVTSIRVVYSNMKGT | 303 |
| | | VAGLI P S L+L+NVG+N TRTGI++V+ MG ++ +++ + ++ V S++KGT | |
| Sbjct: | 241 | VAGLIAPNSRLVLQNVGINETRTGIIDVIRAMGGKLEITEIDPVAKSATLIVESSDLKGT | 300 |
| Query: | 304 | IISGGLIPRLIDELPIIALLATQAQGTTCIKDAQELRVKETDRIQVVTDILNSMGANIKA | 363 |
| | | I G LIPRLIDELPIIALLATQAQG T IKDA+EL+VKETDRIQVV D LNSMGA+I | |
| Sbjct: | 301 | EICGALIPRLIDELPIIALLATQAQGVTVIKDAEELKVKETDRIQVVADALNSMGADITP | 360 |
| Query: | 364 | TADGMIIKGPTVLYGANTSTYGDHRIGMMTAIAALLVKQGQVHLDKEEAIMTSYPTFFKD | 423 |
| | | TADGMIIKG + L+GA +T+GDHRIGMMTAIAALLV G+V LD+ EAI TSYP+FF D | |
| Sbjct: | 361 | TADGMIIKGKSALHGARVNTFGDHRIGMMTAIAALLVADGEVELDRAEAINTSYPSFFDD | 420 |
| Query: | 424 | LERLCH | 429 |
| | | LE L H | |
| Sbjct: | 421 | LESLIH | 426 |

[7133] An alignment of the GAS and GBS proteins is shown below.

| Identities = 269/424 (63%), Positives = 331/424 (77%) | | | |
|---|---|---|---|
| Query: | 5 | MKLLTNANTLKGTIRVPGDKSISHRAIIFGSISQGVTRIVDVLRGEDVLSTIEAFKQMGV | 64 |
| | | MKL TNA L+GTI+VPGDKSISHRA+I G++++G TR+ +L+GEDVLSTI+AF+ +GV | |
| Sbjct: | 4 | MKLRTNAGPLQGTIQVPGDKSISHRAVILGAVAKGETRVKGLLKGEDVLSTIQAFRNLGV | 63 |
| Query: | 65 | LIEDDGEIITIYGKGFAGLTQPNNLLDMGNSGTSMRLIAGVLAGQEFEVTMVGDNSLSKR | 124 |
| | | IE+ + + I G+GF GL P L+MGNSGTSMRLIAG+LAGQ F V M+GD SLSKR | |
| Sbjct: | 64 | RIEEKDDQLVIEGQGFQGLNAPCQTLNMGNSGTSMRLIAGLLAGQPFSVKMIGDESLSKR | 123 |
| Query: | 125 | PMDRIALPLSKMGARISGVTNRDLPPLKLQGTKKLKPIFYHLPVASAQVKSALIFAALQT | 184 |
| | | PMDRI PL +MG ISG T+R PPL+LQG + L+PI Y LP++SAQVKSA++ AALQ | |
| Sbjct: | 124 | PMDRIVYPLKQMGVEISGETDRQFPPLQLQGNRNLQPITYTLPISSAQVKSAILLAALQA | 183 |
| Query: | 185 | KGESLIVEKEQTRNHTEDMIRQFGGHLDIKDKEIRLNGGQSLVGQDIRVPGDISSAAFWI | 244 |
| | | KG + +VEKE TRNHTE+MI+QFGG L + K I L G Q L Q+I VPGDISSAAFW+ | |
| Sbjct: | 184 | KGTTQVVEKEITRNHTEEMIQQFGGRLIVDGKRITLVGPQQLTAQEITVPGDISSAAFWL | 243 |
| Query: | 245 | VAGLIIPNSHIILENVGINETRTGILDVVSKMGGKIKLSSVDNQVKSATLTVDYSHLQAT | 304 |
| | | VAGLIIP S ++L+NVG+N TRTGIL+VV KMG +I ++ + + ++ V YS+++ T | |
| Sbjct: | 244 | VAGLIIPGSELLLKNVGVNPTRTGILEVVEKMGAQIVYEDMNKKEQVTSIRVVYSNMKGT | 303 |
| Query: | 305 | HISGAMIPRLIDELPIIALLATQAQGTTVIADAQELKVKETDRIQVVVESLKQMGADITA | 364 |
| | | ISG +IPRLIDELPIIALLATQAQGTT I DAQEL+VKETDRIQVV + L MGA+I A | |
| Sbjct: | 304 | IISGGLIPRLIDELPIIALLATQAQGTTCIKDAQELRVKETDRIQVVTDILNSMGANIKA | 363 |
| Query: | 365 | TADGMIIRGNTPLHAASLDCHGDHRIGMMIAIAALLVKEGEVDLSGEEAINTSYPNFLEH | 424 |
| | | TADGMII+G T L+ A+ +GDHRIGMM AIAALLVK+G+V L EEAI TSYP F + | |
| Sbjct: | 364 | TADGMIIKGPTVLYGANTSTYGDHRIGMMTAIAALLVKQGQVHLDKEEAIMTSYPTFFKD | 423 |
| Query: | 425 | LEGL | 428 |
| | | LE L | |
| Sbjct: | 424 | LERL | 427 |

[7134] Based on this analysis, it was predicted that these proteins and their epitopes could be useful antigens for vaccines or diagnostics.

### EXAMPLE 1287

[7135] A DNA sequence (GBSx1364) was identified in S. agalactiae <SEQ ID 3959> which encodes the amino acid sequence <SEQ ID 3960>. Analysis of this protein sequence reveals the following:

| Possible site: 38 | | | | |
|---|---|---|---|---|
| >>> Seems to have an uncleavable N-term signal seq | | | | |
| | INTEGRAL | Likelihood = −1.12 | Transmembrane | 6-22 (6-22) |

```
----- Final Results -----
                              bacterial membrane --- Certainty = 0.1447(Affirmative) < succ>
                                bacterial outside --- Certainty = 0.0000(Not Clear) < succ>
                            bacterial cytoplasm --- Certainty = 0.0000(Not Clear) < succ>
```

[7136] The protein has homology with the following sequences in the GENPEPT database.

| >GP: AAF20148 GB: AF208390 actinin-like protein [Entamoeba | | | |
|---|---|---|---|
| histolytica] | | | |
| Identities = 62/236 (26%), Positives = 107/236 (45%), Gaps = 38/236 (16%) | | | |
| Query: | 144 | NYNSTNSSNPESMLFYEKQLKTWLSTH----KNYYLDYK--VTPIYQNNELIPRKIELK- | 196 |
| | | N N + N + + L W+++ N+ D+K V + + +I+ + | |
| Sbjct: | 116 | NANQQKNVNAKEEVVENNALLDWVNSFGLNVSNFSSDWKDGVALVKLTEAVSAGQIKFEQ | 175 |
| Query: | 197 | YVGIDKTGKLLPIFIGNKSTQDQFGI------STVTLENTSPNATIDYLSGKAQN----- | 245 |
| | | + G+D T ++ K +QF I + E P + + Y+S + | |
| Sbjct: | 176 | FSGLDNTQMVIDC---QKLAYEQFKIPILMDVKDLVCERPDPKSIMTYVSVYKERYEQLL | 232 |
| Query: | 246 | TVLSAKEQRKLIAKHEEEKRLAEK-----KVEEEKAAAETQKKL-EEEQARLAAEAQ-RK | 298 |
| | | KE+++ IA+ E+E++ E+ + E+E+ A E Q++L EEQ RLA E Q RK | |
| Sbjct: | 233 | VEKEQKEEQERIAREEQERKQKEEQERLAREEQERLAREEQERLAREEQERLAREEQERK | 292 |
| Query: | 299 | QKEEQARLAAETQKKQETLVQEQTSQGYKRDYRGRWHRPNGQYASKAEIAAAGLQW | 354 |
| | | QKEEQ RLA E Q++++ QE+ +Q +P Q + + AA W | |
| Sbjct: | 293 | QKEEQERLAREEQERKQREEQERLNQ----------QQPTSQQLTFFSVQAAADAW | 338 |

[7137] A related DNA sequence was identified in S. pyogenes <SEQ ID 3961> which encodes the amino acid sequence <SEQ ID 3962>. Analysis of this protein sequence reveals the following:

```
Possible site: 41
>>> Seems to have a cleavable N-term signal seq.
----- Final Results -----
                                bacterial outside --- Certainty = 0.3000(Affirmative) < succ>
                              bacterial membrane --- Certainty = 0.0000(Not Clear) < succ>
                            bacterial cytoplasm --- Certainty = 0.0000(Not Clear) < succ>
```

[7138] The protein has homology with the following sequences in the databases:

| >GP: CAA03161 GB: A49208 unnamed protein product [Streptococcus | | | |
|---|---|---|---|
| pyogenes] | | | |
| Identities = 54/222 (24%), Positives = 93/222 (41%), Gaps = 39/222 (17%) | | | |
| Query: | 44 | HYKNTVSSKLLP--FTANYQLQLGELDNLNRA-----TFSHIQLQDRHETKDVRTKINYD | 96 |
| | | +YK +S++ P F + +LD L R T ++ ++ + + K N + | |
| Sbjct: | 76 | YYKTLGTSQITPALFPKAGDILYSKLDELGRTRTARGTLTYANVEGSYGVRQSFGK-NQN | 134 |
| Query: | 97 | PVGWHN------YQFPYGDG-SKSSWVMNRGHLVGYQFCGLNDEPRNLVAMTAWLNTGAY | 149 |
| | | P GW Y+ + +G S NR HL+ G + + + A T | |
| Sbjct: | 135 | PAGWTGNPNHVKYKIEWLNGLSYVGDFWNRSHLIADSLGG------DALRVNAVTGTRTQ | 188 |
| Query: | 150 | SGANDSNPEGMLYYENRLDSWLALHPDFWLDYKVTPIYSGNEVVPRQIELQYVGIDSSGE | 209 |
| | | + GM Y E R WL + D +L Y+V PIY+ +E++PR + | |
| Sbjct: | 189 | NVGGRDQKGGMRYTEQRAQEWLEANRDGYLYYEVAPIYNADELIPRAV------------ | 236 |
| Query: | 210 | LLTIRLNSNKESIDENGVTTVILENSAPNINLDYLNGTATPK | 251 |
| | | + + S+ +I+E V++ N+A ++Y NGT T K | |
| Sbjct: | 237 | --VVSMQSSDNTINEK----VLVYNTANGYTINYHNGTPTQK | 272 |

[7139] An alignment of the GAS and GBS proteins is shown below.

| Identities = 117/245 (47%), Positives = 166/245 (67%), Gaps = 4/245 (1%) | | | |
|---|---|---|---|
| Query: | 2 | KRKQFIKLGIATLLTVISLYTPINLATNHTTENIVTAQEY--KTKENGTLPFKHKRQLVL | 59 |
| | | K+K + + LL++ ++ A T N+ A + T + LPF QL L | |
| Sbjct: | 5 | KQKASLLTAVLLLLSLSITTITVDAARVRTYPNVSHANTHYKNTVSSKLLPFTANYQLQL | 64 |
| Query: | 60 | GELDDKGRATFAHIQLKVKDEPKKKRVKRLKTTPVGWHNFKFYYNDGTQKAWLMSRGRLI | 119 |
| | | GELD+ RATF+HIQL+ + E K R K + PVGWHN++F Y DG++ +W+M+RG L+ | |
| Sbjct: | 65 | GELDNLNRATFSHIQLQDRHETKDVRTK-INYDPVGWHNYQFPYGDGSKSSWVMNRGHLV | 123 |
| Query: | 120 | CHQFSGLNNERKNLVPMTNWLNTGNYNSTNSSNPESMLFYEKQLKTWLSTHKNYYLDYKV | 179 |
| | | +QF GLN+E +NLV MT WLNTG Y+ N SNPE ML+YE +L +WL+ H +++LDYKV | |
| Sbjct: | 124 | GYQFCGLNDEPRNLVAMTAWLNTGAYSGANDSNPEGMLYYENRLDSWLALHPDFWLDYKV | 183 |
| Query: | 180 | TPIYQNNELIPRKIELKYVGIDKTGKLLPIFI-GNKSTQDQFGISTVTLENTSPNATIDY | 238 |
| | | TPIY NE++PR+IEL+YVGID +G+LL I + NK + D+ G++TV LEN++PN +DY | |
| Sbjct: | 184 | TPIYSGNEVVPRQIELQYVGIDSSGELLTIRLNSNKESIDENGVTTVILENSAPNINLDY | 243 |
| Query: | 239 | LSGKA | 243 |
| | | L+G A | |
| Sbjct: | 244 | LNGTA | 248 |

[7140] A related DNA sequence was identified in S. pyogenes <SEQ ID 7263> which encodes amino acid sequence <SEQ ID 7264>. An alignment of the GAS and GBS sequences follows:

| Score = 58.9 bits (140), Expect = 2e−11 | | | |
|---|---|---|---|
| Identities = 34/103 (33%), Positives = 55/103 (53%), Gaps = 1/103 (0%) | | | |
| Query: | 1 | MPFKTNLKAGILLYAMFMASIFLLVLQVYLSQVTALHKEYQAQTDYVKARLIAEIVYQD- | 59 |
| | | M K LKAGILL A+ +A++F LVLQ YL+++ A ++Y +Q + KA L A++ Y+ | |
| Sbjct: | 1 | MILKKKLKAGILLQAIVLAAVFTLVLQFYLARILATERQYHSQIEASKAYLTAQLAYKTI | 60 |
| Query: | 60 | HRYKASNPVFFKGGQVICRERKERWMLIVKLDQQRQYQFEYLK | 102 |
| | | S +F GG + + V LD+ Y ++ + | |
| Sbjct: | 61 | EGDSISGKCYFTGGYASYLQEGNYLQVKVTLDKGGNYNHKFYR | 103 |

[7141] Based on this analysis, it was predicted that these proteins and their epitopes could be useful antigens for vaccines or diagnostics.

### EXAMPLE 1288

[7142] A DNA sequence (GBSx1365) was identified in S. agalactiae <SEQ ID 3963> which encodes the amino acid sequence <SEQ ID 3964>. This protein is predicted to be enolase (eno). Analysis of this protein sequence reveals the following:

```
Possible site: 43
>>> Seems to have no N-terminal signal sequence
----- Final Results -----
                            bacterial cytoplasm --- Certainty = 0.3025(Affirmative) < succ>
                              bacterial membrane --- Certainty = 0.0000(Not Clear) < succ>
                                bacterial outside --- Certainty = 0.0000(Not Clear) < succ>
```

[7143] The protein has homology with the following sequences in the GENPEPT database.

| >GP: BAA81815 GB: AB029313 enolase [Streptococcus intermedius] | | | |
|---|---|---|---|
| Identities = 396/435 (91%), Positives = 414/435 (95%), Gaps = 1/435 (0%) | | | |
| Query: | 1 | MSIITDVYAREVLDSRGNPTLEVEVYTESGAFGRGMVPSGASTGEHEAVELRDGDKSRYG | 60 |
| | | MSIITDVYAREVLDSRGNPTLEVEVYTESGAFGRGMVPSGASTGEHEAVELRDGDKSRYG | |
| Sbjct: | 1 | MSIITDVYAREVLDSRGNPTLEVEVYTESGAFGRGMVPSGASTGEHEAVELRDGDKSRYG | 60 |
| Query: | 61 | GLGTQKAVDNVNNVIAEAIIGYDVRDQQAIDRAMIALDGTPNKGKLGANAILGVSIAVAR | 120 |
| | | GLGTQKAVDNVNN+IAEA+IGYDVRDQQAIDRAMIALDGTPNKGKLGANAILGVSIAVAR | |
| Sbjct: | 61 | GLGTQKAVDNVNNIIAEAVIGYDVRDQQAIDRAMIALDGTPNKGKLGANAILGVSIAVAR | 120 |
| Query: | 121 | AAADYLEVPLYSYLGGFNTKVLPTPMMNIINGGSHSDAPIAFQEFMIMPVGAPTFKEALR | 180 |
| | | AAADYLE+PLYSYLGGFNTKVLPTPMMNIINGGSHSDAPIAFQEFMI+P GAPTFKEALR | |
| Sbjct: | 121 | AAADYLEIPLYSYLGGFNTKVLPTPMMNIINGGSHSDAPIAFQEFMIVPAGAPTFKEALR | 180 |
| Query: | 181 | WGAEVFHALKKILKERGLETAVGDEGGFAPKFEGTEDGVETILKAIEAAGYEAGENGIMI | 240 |
| | | WGAE+FHALKKILK RGL TAVGDEGGFAP+F+GTEDGVETIL AIEAAGY G++ + + | |
| Sbjct: | 181 | WGAEIFHALKKILKSRGLATAVGDEGGFAPRFDGTEDGVETILAAIEAAGYVPGKD-VFL | 239 |
| Query: | 241 | GFDCASSEFYDAERKVYDYSKFEGEGGAVRTAAEQIDYLEELVNKYPIITIEDGMDENDW | 300 |
| | | GFDCASSEFYD ERKVYDY+KFEGEG AVRTA EQIDYLEELVNKYPIITIEDGMDENDW | |
| Sbjct: | 240 | GFDCASSEFYDKERKVYDYTKFEGEGAAVRTADEQIDYLEELVNKYPIITIEDGMDENDW | 299 |
| Query: | 301 | DGWKALTERLGGRVQLVGDDFFVTNTDYLARGIKEEAANSILIKVNQIGTLTETFEAIEM | 360 |
| | | DGWK LTERLG +VQ VGDDFFVTNT YL +GI E ANSILIKVNQIGTLTETF+AIEM | |
| Sbjct: | 300 | DGWKKLTERLGKKVQPVGDDFFVTNTSYLEKGINEACANSILIKVNQIGTLTETFDAIEM | 359 |
| Query: | 361 | AKEAGYTAVVSHRSGETEDSTIADIAVATNAGQIKTGSLSRTDRIAKYNQLLRIEDQLGE | 420 |
| | | AKEAGYTAVVSHRSGETEDSTIADIAVA NAGQIKTGSLSRTDRIAKYNQLLRIEDQLGE | |
| Sbjct: | 360 | AKEAGYTAVVSHRSGETEDSTIADIAVAANAGQIKTGSLSRTDRIAKYNQLLRIEDQLGE | 419 |
| Query: | 421 | VAQYKGIKSFYNLKK | 435 |
| | | VA+Y+G+KSFYNL K | |
| Sbjct: | 420 | VAEYRGLKSFYNLSK | 434 |

[7144] Proteins in the glycolysis/gluconeogenesis pathway have been experimentally detected on the surface of Streptococci.

[7145] A related DNA sequence was identified in S. pyogenes <SEQ ID 3965> which encodes the amino acid sequence <SEQ ID 3966>. Analysis of this protein sequence reveals the following:

```
Possible site: 43
>>> Seems to have no N-terminal signal sequence
----- Final Results -----
                            bacterial cytoplasm --- Certainty = 0.3025(Affirmative) < succ>
                              bacterial membrane --- Certainty = 0.0000(Not Clear) < succ>
                                bacterial outside --- Certainty = 0.0000(Not Clear) < succ>
```

[7146] The protein has homology with the following sequences in the databases:

| >GP: BAA81815 GB: AB029313 enolase [Streptococcus intermedius] | | | |
|---|---|---|---|
| Identities = 396/435 (91%), Positives = 415/435 (95%), Gaps = 1/435 (0%) | | | |
| Query: | 1 | MSIITDVYAREVLDSRGNPTLEVEVYTESGAFGRGMVPSGASTGEHEAVELRDGDKSRYL | 60 |
| | | MSIITDVYAREVLDSRGNPTLEVEVYTESGAFGRGMVPSGASTGEHEAVELRDGDKSRY | |
| Sbjct: | 1 | MSIITDVYAREVLDSRGNPTLEVEVYTESGAFGRGMVPSGASTGEHEAVELRDGDKSRYG | 60 |
| Query: | 61 | GLGTQKAVDNVNNIIAEAIIGYDVRDQQAIDRAMIALDGTPNKGKLGANAILGVSIAVAR | 120 |
| | | GLGTQKAVDNVNNIIAEA+IGYDVRDQQAIDRAMIALDGTPNKGKLGANAILGVSIAVAR | |
| Sbjct: | 61 | GLGTQKAVDNVNNIIAEAVIGYDVRDQQAIDRAMIALDGTPNKGKLGANAILGVSIAVAR | 120 |
| Query: | 121 | AAADYLEVPLYTYLGGFNTKVLPTPMMNIINGGSHSDAPIAFQEFMIMPVGAPTFKEGLR | 180 |
| | | AAADYLE+PLY+YLGGFNTKVLPTPMMNIINGGSHSDAPIAFQEFMI+P GAPTFKE LR | |
| Sbjct: | 121 | AAADYLEIPLYSYLGGFNTKVLPTPMMNIINGGSHSDAPIAFQEFMIVPAGAPTFKEALR | 180 |
| Query: | 181 | WGAEVFHALKKILKERGLVTAVGDEGGFAPKFEGTEDGVETILKAIEAAGYEAGENGIMI | 240 |
| | | WGAE+FHALKKILK RGL TAVGDEGGFAP+F+GTEDGVETIL AIEAAGY G++ + + | |
| Sbjct: | 181 | WGAEIFHALKKILKSRGLATAVGDEGGFAPRFDGTEDGVETILAAIEAAGYVPGKD-VFL | 239 |
| Query: | 241 | GFDCASSEFYDKERKVYDYTKFEGEGAAVRTSAEQVDYLEELVNKYPIITIEDGMDENDW | 300 |
| | | GFDCASSEFYDKERKVYDYTKFEGEGAAVRT+ EQ+DYLEELVNKYPIITIEDGMDENDW | |
| Sbjct: | 240 | GFDCASSEFYDKERKVYDYTKFEGEGAAVRTADEQIDYLEELVNKYPIITIEDGMDENDW | 299 |
| Query: | 301 | DGWKVLTERLGKRVQLVGDDFFVTNTEYLARGIKENAANSILIKVNQIGTLTETFEAIEM | 360 |
| | | DGWK LTERLGK+VQ VGDDFFVTNT YL +GI E ANSILIKVNQIGTLTETF+AIEM | |
| Sbjct: | 300 | DGWKKLTERLGKKVQPVGDDFFVTNTSYLEKGINEACANSILIKVNQIGTLTETFDAIEM | 359 |
| Query: | 361 | AKEAGYTAVVSHRSGETEDSTIADIAVATNAGQIKTGSLSRTDRIAKYNQLLRIEDQLGE | 420 |
| | | AKEAGYTAVVSHRSGETEDSTIADIAVA NAGQIKTGSLSRTDRIAKYNQLLRIEDQLGE | |
| Sbjct: | 360 | AKEAGYTAVVSHRSGETEDSTIADIAVAANAGQIKTGSLSRTDRIAKYNQLLRIEDQLGE | 419 |
| Query: | 421 | VAQYKGIKSFYNLKK | 435 |
| | | VA+Y+G+KSFYNL K | |
| Sbjct: | 420 | VAEYRGLKSFYNLSK | 434 |

[7147] An alignment of the GAS and GBS proteins is shown below.

| Identities = 421/435 (96%), Positives = 427/435 (97%) | | | |
|---|---|---|---|
| Query: | 1 | MSIITDVYAREVLDSRGNPTLEVEVYTESGAFGRGMVPSGASTGEHEAVELRDGDKSRYG | 60 |
| | | MSIITDVYAREVLDSRGNPTLEVEVYTESGAFGRGMVPSGASTGEHEAVELRDGDKSRY | |
| Sbjct: | 1 | MSIITDVYAREVLDSRGNPTLEVEVYTESGAFGRGMVPSGASTGEHEAVELRDGDKSRYL | 60 |
| Query: | 61 | GLGTQKAVDNVNNVIAEAIIGYDVRDQQAIDRAMIALDGTPNKGKLGANAILGVSIAVAR | 120 |
| | | GLGTQKAVDNVNN+IAEAIIGYDVRDQQAIDRAMIALDGTPNKGKLGANAILGVSIAVAR | |
| Sbjct: | 61 | GLGTQKAVDNVNNIIAEAIIGYDVRDQQAIDRAMIALDGTPNKGKLGANAILGVSIAVAR | 120 |
| Query: | 121 | AAADYLEVPLYSYLGGFNTKVLPTPMMNIINGGSHSDAPIAFQEFMIMPVGAPTFKEALR | 180 |
| | | AAADYLEVPLY+YLGGFNTKVLPTPMMNIINGGSHSDAPIAFQEFMIMPVGAPTFKE LR | |
| Sbjct: | 121 | AAADYLEVPLYTYLGGFNTKVLPTPMMNIINGGSHSDAPIAFQEFMIMPVGAPTFKEGLR | 180 |
| Query: | 181 | WGAEVFHALKKILKERGLETAVGDEGGFAPKFEGTEDGVETILKAIEAAGYEAGENGIMI | 240 |
| | | WGAEVFHALKKILKERGL TAVGDEGGFAPKFEGTEDGVETILKAIEAAGYEAGENGIMI | |
| Sbjct: | 181 | WGAEVFHALKKILKERGLVTAVGDEGGFAPKFEGTEDGVETILKAIEAAGYEAGENGIMI | 240 |
| Query: | 241 | GFDCASSEFYDAERKVYDYSKFEGEGGAVRTAAEQIDYLEELVNKYPIITIEDGMDENDW | 300 |
| | | GFDCASSEFYD ERKVYDY+KFEGEG AVRT+AEQ+DYLEELVNKYPIITIEDGMDENDW | |
| Sbjct: | 241 | GFDCASSEFYDKERKVYDYTKFEGEGAAVRTSAEQVDYLEELVNKYPIITIEDGMDENDW | 300 |
| Query: | 301 | DGWKALTERLGGRVQLVGDDFFVTNTDYLARGIKEEAANSILIKVNQIGTLTETFEAIEM | 360 |
| | | DGWK LTERLG RVQLVGDDFFVTNT+YLARGIKE AANSILIKVNQIGTLTETFEAIEM | |
| Sbjct: | 301 | DGWKVLTERLGKRVQLVGDDFFVTNTEYLARGIKENAANSILIKVNQIGTLTETFEAIEM | 360 |
| Query: | 361 | AKEAGYTAVVSHRSGETEDSTIADIAVATNAGQIKTGSLSRTDRIAKYNQLLRIEDQLGE | 420 |
| | | AKEAGYTAVVSHRSGETEDSTIADIAVATNAGQIKTGSLSRTDRIAKYNQLLRIEDQLGE | |
| Sbjct: | 361 | AKEAGYTAVVSHRSGETEDSTIADIAVATNAGQIKTGSLSRTDRIAKYNQLLRIEDQLGE | 420 |
| Query: | 421 | VAQYKGIKSFYNLKK | 435 |
| | | VAQYKGIKSFYNLKK | |
| Sbjct: | 421 | VAQYKGIKSFYNLKK | 435 |

[7148] Based on this analysis, it was predicted that these proteins and their epitopes could be useful antigens for vaccines or diagnostics.

### EXAMPLE 1289

[7149] A DNA sequence (GBSx1366) was identified in S. agalactiae <SEQ ID 3967> which encodes the amino acid sequence <SEQ ID 3968>. Analysis of this protein sequence reveals the following:

```
Possible site: 60
>>> Seems to have no N-terminal signal sequence
----- Final Results -----
                            bacterial cytoplasm --- Certainty = 0.1998(Affirmative) < succ>
                              bacterial membrane --- Certainty = 0.0000(Not Clear) < succ>
                                bacterial outside --- Certainty = 0.0000(Not Clear) < succ>
```

[7150] The protein has no significant homology with any sequences in the GENPEPT database.

[7151] No corresponding DNA sequence was identified in S. pyogenes.

[7152] Based on this analysis, it was predicted that this protein and its epitopes, could be useful antigens for vaccines or diagnostics.

### EXAMPLE 1290

[7153] A DNA sequence (GBSx1367) was identified in S. agalactiae <SEQ ID 3969> which encodes the amino acid sequence <SEQ ID 3970>. This protein is predicted to be di-/tripeptide transporter. Analysis of this protein sequence reveals the following:

| Possible site: 54 | | | | |
|---|---|---|---|---|
| >>> Seems to have no N-terminal signal sequence | | | | |
| | INTEGRAL | Likelihood = −14.33 | Transmembrane | 93-109 (87-122) |
| | INTEGRAL | Likelihood = −9.02 | Transmembrane | 117-133 (110-141) |
| | INTEGRAL | Likelihood = −8.44 | Transmembrane | 333-349 (328-353) |
| | INTEGRAL | Likelihood = −5.84 | Transmembrane | 19-35 (17-38) |
| | INTEGRAL | Likelihood = −3.08 | Transmembrane | 151-167 (151-167) |
| | INTEGRAL | Likelihood = −2.55 | Transmembrane | 264-280 (264-281) |
| | INTEGRAL | Likelihood = −2.28 | Transmembrane | 44-60 (44-60) |
| | INTEGRAL | Likelihood = −2.02 | Transmembrane | 238-254 (238-255) |

```
----- Final Results -----
                              bacterial membrane --- Certainty = 0.6731(Affirmative) < succ>
                                bacterial outside --- Certainty = 0.0000(Not Clear) < succ>
                            bacterial cytoplasm --- Certainty = 0.0000(Not Clear) < succ>
```

[7154] A related GBS nucleic acid sequence <SEQ ID 9395> which encodes amino acid sequence <SEQ ID 9396> was also identified.

[7155] The protein has homology with the following sequences in the GENPEPT database.

| >GP: CAB12175 GB: Z99106 similar to di-tripeptide ABC transporter | | | |
|---|---|---|---|
| (membrane protein) [Bacillus subtilis] | | | |
| Identities = 175/359 (48%), Positives = 254/359 (70%), Gaps = 9/359 (2%) | | | |
| Query: | 1 | MVGNLYGENDSRRDAGFSIFVFGINLGAFISPIVVGYLGQEVNFHLGFSLAAIGMFFGLL | 60 |
| | | +VG+LY + D RRD+GFSIF GINLG ++P++VG LGQ+ N+HLGF AA+GM GL+ | |
| Sbjct: | 142 | VVGDLYTKEDPRRDSGFSIFYMGINLGGLLAPLIVGTLGQKYNYHLGFGAAAVGMLLGLI | 201 |
| Query: | 61 | QYTLDGKKYLTEESLRPNDPLSPEEKSSLYKKVGLILIGIVIVLILLHLMHMLTIEVIID | 120 |
| | | + L KK L +PLS +KS++ +G+I++ I +++ + +LTI+ ID | |
| Sbjct: | 202 | VFPLTRKKNLGLAGSNVPNPLS--KKSAIGTGIGVIIVAIAVIISVQ--TGVLTIKRFID | 257 |
| Query: | 121 | IFSIIAIAIPIIYFIKILSSKKISSVERSRVWAYIPLFIASILFWSIEEQGSVVLALFAD | 180 |
| | | + SI+ I IP+IYFI + +SKK E+SR+ AY+PLFI +++FW+I+EQG+ +LA++AD | |
| Sbjct: | 258 | LVSILGILIPVIYFIIMFTSKKADKTEKSRLAAYVPLFIGAVMFWAIQEQGATILAVYAD | 317 |
| Query: | 181 | EQTKLYLNFFGHHINFPSSYFQSMNPLFIMLYVPFFAWLWAKWGSKQPSSPKKFAYGLFF | 240 |
| | | E+ +L L F SS+FQS+NPLF++++ P FAWLW K G +QPS+P KF+ G+ | |
| Sbjct: | 318 | ERIRLSLGGF----ELQSSWFQSLNPLFVVIFAPIFAWLWMKLGKRQPSTPVKFSIGIIL | 373 |
| Query: | 241 | AGASFLWMMLPGLLFGVNAKVSPLWLTMSWAIVIVGEMLISPVGLSATSKLAPKAFQAQM | 300 |
| | | AG SF+ M+ P + G A VSPLWL +S+ +V++GE+ +SPVGLS T+KLAP AF AQ | |
| Sbjct: | 374 | AGLSFIIMVFPAMQ-GKEALVSPLWLVLSFLLVVLGELCLSPVGLSVTTKLAPAAFSAQT | 432 |
| Query: | 301 | MSIWFLSNAAAQAINAQIVKLYTPDTQTLYYGVVGGITVVFGFILLFYVPRIEKLMSGV | 359 |
| | | MS+WFL+NAAAQAINAQ+ L+ +T+Y+G +G I++V G ILL P I++ M GV | |
| Sbjct: | 433 | MSMWFLTNAAAQAINAQVAGLFDRIPETMYFGTIGLISIVLGGILLLLSPVIKRAMKGV | 491 |

[7156] No corresponding DNA sequence was identified in S. pyogenes.

[7157] Based on this analysis, it was predicted that these proteins and their epitopes could be useful antigens for vaccines or diagnostics.

### EXAMPLE 1291

[7158] A DNA sequence (GBSx1369) was identified in S. agalactiae <SEQ ID 3971> which encodes the amino acid sequence <SEQ ID 3972>. Analysis of this protein sequence reveals the following:

```
Possible site: 37
>>> Seems to have an uncleavable N-term signal seq
----- Final Results -----
                              bacterial membrane --- Certainty = 0.0000(Not Clear) < succ>
                                bacterial outside --- Certainty = 0.0000(Not Clear) < succ>
                            bacterial cytoplasm --- Certainty = 0.0000(Not Clear) < succ>
```

[7159] The protein has no significant homology with any sequences in the GENPEPT database.

[7160] No corresponding DNA sequence was identified in S. pyogenes.

[7161] Based on this analysis, it was predicted that this protein and its epitopes, could be useful antigens for vaccines or diagnostics.

### EXAMPLE 1292

[7162] A DNA sequence (GBSx1370) was identified in S. agalactiae <SEQ ID 3973> which encodes the amino acid sequence <SEQ ID 3974>. Analysis of this protein sequence reveals the following:

```
Possible site: 30
>>> Seems to have no N-terminal signal sequence
----- Final Results -----
                            bacterial cytoplasm --- Certainty = 0.2485(Affirmative) < succ>
                              bacterial membrane --- Certainty = 0.0000(Not Clear) < succ>
                                bacterial outside --- Certainty = 0.0000(Not Clear) < succ>
```

[7163] The protein has homology with the following sequences in the GENPEPT database.

| >GP: AAF61315 GB: U96166 unknown [Streptococcus cristatus] | | | |
|---|---|---|---|
| Identities = 181/442 (40%), Positives = 270/442 (60%), Gaps = 2/442 (0%) | | | |
| Query: | 1 | MINLFDSYTQSSWDLHFSLIKSGYINPTIALNDDGFLPDDVTSPYLYYTGFAKTGAGRPL | 60 |
| | | MI LFD Y Q+S+DL SL +G P + + DDG+L DV SPY Y+TG T GRP+ | |
| Sbjct: | 1 | MICLFDRYDQASFDLLRSLKATGLDCPVVVVQDDGYLSPDVESPYSYFTGDLDTPEGRPI | 60 |
| Query: | 61 | YYNELRVPDTWEIIGFSSGADIVDLGVKKGRIIYANPNHKRLIKEVDWFDEQGRVILKDR | 120 |
| | | Y+N + P WEI + +I+D+G K+ I Y P H+R ++ V+W D +G+V D | |
| Sbjct: | 61 | YFNLVPKPHLWEIRSSNVNGEILDMGKKRANIFYRQPTHERRVRAVEWLDTEGQVRAADI | 120 |
| Query: | 121 | FNKFGFCFAQTFYNADGQAIQTSYYNKDRQEVISENHMTGDYILNDNNQFKVFKSKVEFV | 180 |
| | | +N+ G FAQ Y+ + T Y+++ VI ENH+TGD IL + +FKSK EFV | |
| Sbjct: | 121 | YNRKGRLFAQITYDQTQRPTHTRYFDQSNVVVIMENHLTGDIILTLEGKRHIFKSKQEFV | 180 |
| Query: | 181 | INYLQEAKFNLDRIFYNSLSTPFLVSFYL--NRLESKDVLFWQEPLVDDIPGNMRLLLNN | 238 |
| | | + YLQ ++ DRI YNSL+TPFLV++ L ++DVLFWQEP+ + +PGNM++ + | |
| Sbjct: | 181 | VFYLQYRGYDTDRIIYNSLATPFLVAYALRPKNGRAEDVLFWQEPIGEALPGNMKVAMKM | 240 |
| Query: | 239 | PSPNTKIVIQSYEAYANAMRLLTDEEQKQVSFLGFMYPLKETEKLHNQALILTNSDQIEA | 298 |
| | | P N +I +Q + Y L T EE+ +G++Y + ++ +ALILTNSDQ+E | |
| Sbjct: | 241 | PHRNIRIAVQDRQVYEKIQSLATPEEKVYFHNIGYIYDYQRLNNMNPEALILTNSDQLEQ | 300 |
| Query: | 299 | LESLVTSLPNLTFNIGALTEMSSDLMNFGKYDNVVLYPNITTNQIQYLSNICAFYLDINH | 358 |
| | | +E L+T LPN+ F+IGA+TEMS LM +Y NV LYPNI ++ L C YLDIN | |
| Sbjct: | 301 | IEQLLTQLPNVHFHIGAITEMSGHLMGLNRYPNVSLYPNIRPAKVAELFERCDLYLDINI | 360 |
| Query: | 359 | HNEILSAVRSAFEHQQLIFAFEETSHQIRFVSPKNIFPKKDIFTFISHLQPLIGNKCNIE | 418 |
| | | +EIL+A R+AFE+ LI +F T H RF++ +I+ +++ + +Q + + +E | |
| Sbjct: | 361 | SDEILNACRTAFENNMLILSFTNTCHSRRFIADDHIYAPENVSGMVDKIQSALAHSSEME | 420 |
| Query: | 419 | KALKQQLEDCHVSSSTQYQSVI | 440 |
| | | AL +Q + + +S QY+++I | |
| Sbjct: | 421 | AALTRQKQAANQASLEQYKAII | 442 |

[7164] No corresponding DNA sequence was identified in S. pyogenes.

[7165] Based on this analysis, it was predicted that this protein and its epitopes, could be useful antigens for vaccines or diagnostics.

### EXAMPLE 1293

[7166] A DNA sequence (GBSx1371) was identified in S. agalactiae <SEQ ID 3975> which encodes the amino acid sequence <SEQ ID 3976>. Analysis of this protein sequence reveals the following:

| Possible site: 22 | | | | |
|---|---|---|---|---|
| >>> Seems to have no N-terminal signal sequence | | | | |
| | INTEGRAL | Likelihood = −0.06 | Transmembrane | 405-421 (404-422) |

```
----- Final Results -----
                              bacterial membrane --- Certainty = 0.1022(Affirmative) < succ>
                                bacterial outside --- Certainty = 0.0000(Not Clear) < succ>
                            bacterial cytoplasm --- Certainty = 0.0000(Not Clear) < succ>
```

[7167] The protein has homology with the following sequences in the GENPEPT database.

| >GP: BAA94320 GB: AB033763 hypothetical protein [Staphylococcus | | | |
|---|---|---|---|
| aureus] | | | |
| Identities = 66/195 (33%), Positives = 99/195 (49%), Gaps = 9/195 (4%) | | | |
| Query: | 259 | NYYDYQFTNANRFDFFITSTDKQTELLEQQFKQFTNHNPRIITIPVGSID----NLKMPM | 314 |
| | | N Y + F N NR+ I ST +Q + N+ + TIPVG ID NLK | |
| Sbjct: | 15 | NTYKHVFNNLNRYSGIIVSTKQQ----QLDISARINNEIPVHTIPVGYIDEHFTNLKRNN | 70 |
| Query: | 315 | DNRRPYSILTASRLASEKHVDWLVRAVIRIREILPEVTFDIYGSGGEEEKIRNIINAANA | 374 |
| | | + I++ +R + EK ++ + V ++ + P + +YG G EEEK + +I N | |
| Sbjct: | 71 | HSINNNKIISVARYSPEKQLNHQIELVSKLIKEFPNIRLHLYGFGKEEEKYKQLITEYNL | 130 |
| Query: | 375 | TEYIRLMG-HKNLSNVYQNYELYLTASKSEGFGLTLLEAIGAGLPLIGFDVRYGNQTFIK | 433 |
| | | + L G +NLS Q+ + L S EGF L LLE I G+P +G++ +YG I | |
| Sbjct: | 131 | ENNVFLRGFRRNLSAEIQDAYMSLITSNMEGFNLGLLETITEGIPPVGYNSKYGPSELIL | 190 |
| Query: | 434 | DGENGYLIPRFDMDD | 448 |
| | | + ENGYLI + D D+ | |
| Sbjct: | 191 | NNENGYLINKNDKDE | 205 |

[7168] SEQ ID 3976 (GBS426) was expressed in E. coli as a His-fusion product. SDS-PAGE analysis of total cell extract is shown in FIG. 80 (lane 4; MW 58.8 kDa). It was also expressed in E. coli as a GST-fusion product. SDS-PAGE analysis of total cell extract is shown in FIG. 173 (lane 3; MW 84 kDa).

[7169] GBS426-GST was purified as shown in FIG. 220, lane 5.

[7170] Based on this analysis, it was predicted that this protein and its epitopes, could be useful antigens for vaccines or diagnostics.

### EXAMPLE 1294

[7171] A DNA sequence (GBSx1372) was identified in S. agalactiae <SEQ ID 3977> which encodes the amino acid sequence <SEQ ID 3978>. This protein is predicted to be preprotein translocase seca subunit (secA). Analysis of this protein sequence reveals the following:

| Possible site: 42 | | | | |
|---|---|---|---|---|
| >>> Seems to have no N-terminal signal sequence | | | | |
| | INTEGRAL | Likelihood = −0.69 | Transmembrane | 75-91 (75-91) |

```
----- Final Results -----
                              bacterial membrane --- Certainty = 0.1277(Affirmative) < succ>
                                bacterial outside --- Certainty = 0.0000(Not Clear) < succ>
                            bacterial cytoplasm --- Certainty = 0.0000(Not Clear) < succ>
```

[7172] The protein has homology with the following sequences in the GENPEPT database.

| >GP: AAC44957 GB: U56901 involved in protein export [Bacillus subtilis] | | | |
|---|---|---|---|
| Identities = 336/794 (42%), Positives = 506/794 (63%), Gaps = 29/794 (3%) | | | |
| Query: | 5 | NSLFSLDKKRLKKLQRTLNTINSLKGQMATLSNEELQAKTTEFRKRLVNGETLDDICAEA | 64 |
| | | N +F K+ L + ++ N I++++G LS++ L+ KT EF++RL G T DD+ EA | |
| Sbjct: | 6 | NKMFDPTKRTLNRYEKIANDIDAIRGDYENLSDDALKHKTIEFKERLEKGATTDDLLVEA | 65 |
| Query: | 65 | FAVVREADERVLGLFPYDVQVIGGLVLHQGNTAEMKTGEGKTLTATMPLYLNALEGKGAM | 124 |
| | | FAVVREA RV G+FP+ VQ++GG+ LH GN AEMKTGEGKTLT+T+P+YLNAL GKG | |
| Sbjct: | 66 | FAVVREASRRVTGMFPFKVQLMGGVALHDGNIAEMKTGEGKTLTSTLPVYLNALTGKGVH | 125 |
| Query: | 125 | LLTNNSYLAIRDAEEMGKVYRFLGLSVGVGVSDNEEEDRDAATKRAVYSSDIVYSTSSAL | 184 |
| | | ++T N YLA RDAE+MGK++ FLGL+VG+ ++ +++ KR Y++DI YST++ L | |
| Sbjct: | 126 | VVTVNEYLASRDAEQMGKIFEFLGLTVGLNLNSMSKDE-----KREAYAADITYSTNNEL | 180 |
| Query: | 185 | GFDYLIDNLASSKSQKYMPKLHYAIVDEADAVLLDMAQTPLVISGSPRVQSNLYKIADEL | 244 |
| | | GFDYL DN+ K Q LH+A++DE D++L+D A+TPL+ISG + LY A+ | |
| Sbjct: | 181 | GFDYLRDNMVLYKEQMVQRPLHFAVIDEVDSILIDEARTPLIISGQAAKSTKLYVQANAF | 240 |
| Query: | 245 | ILSFEEQVDYYFDKERQEVWIKNQGVREAERYFRIPHFYKQSNRELVRHLNLSLKAHKLF | 304 |
| | | + + + + DY +D + + V + +G+ +AE+ F I + + + L H+N +LKAH | |
| Sbjct: | 241 | VRTLKAEKDYTYDIKTKAVQLTEEGMTKAEKAFGIDNLFDVKHVALNHHINQALKAHVAM | 300 |
| Query: | 305 | ERGKDYVVDDGEIKLLDATNGRVLEGTKLQGGVHQAIEQKEHLNVTPESRAMASITYQNL | 364 |
| | | ++ DYVV+DG++ ++D+ GR+++G + G+HQAIE KE L + ES +A+IT+QN | |
| Sbjct: | 301 | QKDVDYVVEDGQVVIVDSFTGRLMKGRRYSEGLHQAIEAKEGLEIQNESMTLATITFQNY | 360 |
| Query: | 365 | FRMFTKLAGMTGTGKTAEKEFIEVYDMEVVRIPTNSPVRRIDYPDKIYTTLPEKIHATIE | 424 |
| | | FRM+ KLAGMTGT KT E+EF +Y+M+VV IPTN PV R D PD IY T+ K A E | |
| Sbjct: | 361 | FRMYEKLAGMTGTAKTEEEEFRNIYNMQVVTIPTNRPVVRDDRPDLIYRTMEGKFKAVAE | 420 |
| Query: | 425 | FVKQVHDTGQPILLVAGSVRMSELFSELLLLSGIPHSLLNAQSAVKEAQMIAEAGQKGAV | 484 |
| | | V Q + TGQP+L+ +V SEL S+LL GIPH +LNA++ +EAQ+I EAGQKGAV | |
| Sbjct: | 421 | DVAQRYMTGQPVLVGTVAVETSELISKLLKNKGIPHQVLNAKNHEREAQIIEEAGQKGAV | 480 |
| Query: | 485 | TVATNMAGRGTDIKLGKGVSELGGLAVIGTERMKSQRMDLQLRGRSGRQGDIGFSQFFVS | 544 |
| | | T+ATNMAGRGTDIKLG+GV ELGGLAV+GTER +S+R+D QLRGRSGRQGD G +QF++S | |
| Sbjct: | 481 | TIATNMAGRGTDIKLGEGVKELGGLAVVGTERHESRRIDNQLRGRSGRQGDPGITQFYLS | 540 |
| Query: | 545 | FEDDLMIESGPKWAQDYFRKNRDKVNPEKPKALGQRRFQKLFQQTQEASDGKGESARSQT | 604 |
| | | ED+LM G + D+ + + + + + +Q+ +G +R Q | |
| Sbjct: | 541 | MEDELMRRFGAERTMAML----DRFGMDDSTPIQSKMVSRAVESSQKRVEGNNFDSRKQL | 596 |
| Query: | 605 | IEFDSSVQLQREYVYRERNALINGESGHFSPRQIIDTVISSFI-----AYLDGEVEKEEL | 659 |
| | | +++D ++ QRE +Y++R +I+ E + R+I++ +I S + AY E EE | |
| Sbjct: | 597 | LQYDDVLRQQREVIYKQRFEVIDSE----NLREIVENMIKSSLERAIAAYTPREELPEE- | 651 |
| Query: | 660 | IFEVNRFI-FDNMSYNLQGISKEMSL--EEIKNYLFKIADEILREKHNLLGDSFG----- | 711 |
| | | ++++ + N +Y +G ++ + +E L I D I+ K+N + FG | |
| Sbjct: | 652 | -WKLDGLVDLINTTYLDEGALEKSDIFGKEPDEMLELIMDRII-TKYNEKEEQFGKEQMR | 709 |
| Query: | 712 | DFERTAALKAIDEAWIEEVDYLQQLRTVATARQTAQRNPVFEYHKEAYKSYNIMKKEIRE | 771 |
| | | +FE+ L+A+D W++ +D + QLR R AQ NP+ EY E + + M + I + | |
| Sbjct: | 710 | EFEKVIVLRAVDSKWMDHIDAMDQLRQGIHLRAYAQTNPLREYQMEGFAMFEHMIESIED | 769 |
| Query: | 772 | QTFRNLLLSEVSFN | 785 |
| | | + + ++ +E+ N | |
| Sbjct: | 770 | EVAKFVMKAEIENN | 783 |

[7173] There is also homology to SEQ ID 3620.

[7174] SEQ ID 3978 (GBS425) was expressed in E. coli as a His-fusion product. SDS-PAGE analysis of total cell extract is shown in FIG. 80 (lane 3; MW 91 kDa). It was also expressed in E. coli as a GST-fusion product. SDS-PAGE analysis of total cell extract is shown in FIG. 173 (lane 2; MW 116 kDa).

[7175] GBS425-GST was purified as shown in FIG. 220, lane 4.

[7176] Based on this analysis, it was predicted that this protein and its epitopes, could be useful antigens for vaccines or diagnostics.

### EXAMPLE 1295

[7177] A DNA sequence (GBSx1373) was identified in S. agalactiae <SEQ ID 3979> which encodes the amino acid sequence <SEQ ID 3980>. Analysis of this protein sequence reveals the following:

```
Possible site: 43
>>> Seems to have no N-terminal signal sequence
----- Final Results -----
                            bacterial cytoplasm --- Certainty = 0.3827(Affirmative) < succ>
                              bacterial membrane --- Certainty = 0.0000(Not Clear) < succ>
                                bacterial outside --- Certainty = 0.0000(Not Clear) < succ>
```

[7178] The protein has no significant homology with any sequences in the GENPEPT database.

[7179] No corresponding DNA sequence was identified in S. pyogenes.

[7180] Based on this analysis, it was predicted that this protein and its epitopes, could be useful antigens for vaccines or diagnostics.

### EXAMPLE 1296

[7181] A DNA sequence (GBSx1374) was identified in S. agalactiae <SEQ ID 3981> which encodes the amino acid sequence <SEQ ID 3982>. Analysis of this protein sequence reveals the following:

```
Possible site: 17
>>> Seems to have no N-terminal signal sequence
----- Final Results -----
                            bacterial Cytoplasm --- Certainty = 0.2683(Affirmative) < succ>
                              bacterial membrane --- Certainty = 0.0000(Not Clear) < succ>
                                bacterial outside --- Certainty = 0.0000(Not Clear) < succ>
```

[7182] A related GBS nucleic acid sequence <SEQ ID 10001> which encodes amino acid sequence <SEQ ID 10002> was also identified.

[7183] The protein has no significant homology with any sequences in the GENPEPT database.

[7184] No corresponding DNA sequence was identified in S. pyogenes.

[7185] Based on this analysis, it was predicted that these proteins and their epitopes could be useful antigens for vaccines or diagnostics.

### EXAMPLE 1297

[7186] A DNA sequence (GBSx1375) was identified in S. agalactiae <SEQ ID 3983> which encodes the amino acid sequence <SEQ ID 3984>. Analysis of this protein sequence reveals the following:

Possible site: 31
>>> Seems to have no N-terminal signal sequence
----- Final Results -----
bacterial cytoplasm --- Certainty = 0.5410 (Affirmative) < succ>
bacterial membrane --- Certainty = 0.0000 (Not Clear) < succ>
bacterial outside --- Certainty = 0.0000 (Not Clear) < succ>

[7187] The protein has no significant homology with any sequences in the GENPEPT database.

[7188] No corresponding DNA sequence was identified in S. pyogenes.

[7189] Based on this analysis, it was predicted that this protein and its epitopes, could be useful antigens for vaccines or diagnostics.

### EXAMPLE 1298

[7190] A DNA sequence (GBSx1376) was identified in S. agalactiae <SEQ ID 3985> which encodes the amino acid sequence <SEQ ID 3986>. This protein is predicted to be preprotein translocase secy subunit. Analysis of this protein sequence reveals the following:

| Possible site: 59 | | | |
|---|---|---|---|
| >>> Seems to have an uncleavable N-term signal seq | | | |
| INTEGRAL | Likelihood = −9.92 | Transmembrane | 287-303 (278-309) |
| INTEGRAL | Likelihood = −9.08 | Transmembrane | 191-207 (186-210) |
| INTEGRAL | Likelihood = −8.44 | Transmembrane | 104-120 (101-123) |
| INTEGRAL | Likelihood = −8.23 | Transmembrane | 11-27 (9-41) |
| INTEGRAL | Likelihood = −3.93 | Transmembrane | 133-149 (129-150) |
| INTEGRAL | Likelihood = −3.19 | Transmembrane | 347-363 (344-364) |
| INTEGRAL | Likelihood = −2.97 | Transmembrane | 158-174 (155-174) |
| INTEGRAL | Likelihood = −1.54 | Transmembrane | 246-262 (245-262) |
| INTEGRAL | Likelihood = −0.90 | Transmembrane | 372-388 (372-388) |
| INTEGRAL | Likelihood = −0.85 | Transmembrane | 64-80 (64-81) |

----- Final Results -----
bacterial membrane --- Certainty = 0.4970 (Affirmative) < succ>
bacterial outside --- Certainty = 0.0000 (Not Clear) < succ>
bacterial cytoplasm --- Certainty = 0.0000 (Not Clear) < succ>

[7191] The protein has homology with the following sequences in the GENPEPT database.

| >GP: AAF30659 GB: AE002122 preprotein translocase [Ureaplasma urealyticum] | | | |
|---|---|---|---|
| Identities = 105/422 (24%), Positives = 213/422 (49%), Gaps = 49/422 (11%) | | | |
| Query: | 2 | KLLYIFEKNIILRKILITFSLIIIFLLGRYVPIPGVLISAYKGQDNNFATLYSTVTGGNL | 61 |
| | | +LL IF+ +L +++T S++I+F +G +P+P + ++ G +F ++ + + GG L | |
| Sbjct: | 13 | QLLMIFKNKKVLVALIVTLSILILFRIGSVIPMPYIKLNGNFGNQGSFFSIINLLGGGGL | 72 |
| Query: | 62 | SQVGVFSLGIGPMMTTMILLRLFT---------IGKYSSGVSQKVQQFRQNVVMLVIAII | 112 |
| | | SQ +F++GIGP +T I+++L + + K +K++ + ++ L +A++ | |
| Sbjct: | 73 | SQFSLFAIGIGPYITAQIIMQLLSSELVPPLAKLSKSGERGRKKIEVITR-IITLPLAVM | 131 |
| Query: | 113 | QGLAITISFQYHNGFSL----------TKLLLATMI--LVTGAYIISWIGNLNAEYGFG- | 159 |
| | | Q + I NGF + L T I +V G YI ++ +L ++ G G | |
| Sbjct: | 132 | QAVIIINLMTRANGFISIVSNAPFAIGSPLFYVTYIFLMVGGTYISLFLADLISKKGVGN | 191 |
| Query: | 160 | GMTILVVVGMLVGQFNNIPLIFELF------QDGYQLAIILFLLWTLVAMYLMITFERSE | 213 |
| | | G+T+L++ G++ FN+ IF + + IL++L+ ++ + ++ S | |
| Sbjct: | 192 | GITLLILTGIVASLFNHFIAIFSNLGSLTSSKVSQIIGFILYILFYIMILIGVVFVNNST | 251 |
| Query: | 214 | YRIPVMRTS-----IHNRLVDDAYMPIKVNASGGMAFMYVYTLLMFPQYIIILLRSIFPT | 268 |
| | | +IPV +T H +L ++PIK+ +G M ++ ++L P + L | |
| Sbjct: | 252 | RKIPVQQTGQALILDHEKL---PFLPIKIMTAGVMPVIFASSVLAIPAQVAEFLDK---Q | 305 |
| Query: | 269 | NPDITSYNDYFSLSSIQGVVIYMILMLVLSVAFTFVNIDPTKISEAMRESGDFIPNYRPG | 328 |
| | | + ++YF + S G+ IY++L+L+ + F++V ++P K++E ++++G FIP + G | |
| Sbjct: | 306 | SMGYYVIHNYFIVDSWTGLAIYVVLILLFTFFFSYVQLNPPKMAEDIKKAGRFIPGVQVG | 365 |
| Query: | 329 | KETQSYLSKICYLFGTFSGFFMAFLGGVPLLFALGNDDLR---------TVSSMTGIFMM | 379 |
| | | +T+ +++K+ Y +AFL +P L AL + T+ T I +M | |
| Sbjct: | 366 | MDTEKHITKVIYRVNWIGAPILAFLACLPHLVALVAKTINHGIPVIQPSTIFGGTSIIIM | 425 |
| Query: | 380 | IT | 381 |
| | | +T | |
| Sbjct: | 426 | VT | 427 |

[7192] There is also homology to SEQ ID 3988.

[7193] A related GBS gene <SEQ ID 8783> and protein <SEQ ID 8784> were also identified. Analysis of this protein sequence reveals the following:

| Lipop: Possible site: −1 Crend: 8 | | | |
|---|---|---|---|
| McG: Discrim Score: 6.32 | | | |
| GvH: Signal Score (−7.5): −4.07 | | | |
| Possible site: 59 | | | |
| >>> Seems to have an uncleavable N-term signal seq | | | |
| ALOM program | count: 10 | value: −9.92 | threshold: 0.0 |

| | | | |
|---|---|---|---|
| INTEGRAL | Likelihood = −9.92 | Transmembrane | 287-303 (278-309) |
| INTEGRAL | Likelihood = −9.08 | Transmembrane | 191-207 (186-210) |
| INTEGRAL | Likelihood = −8.44 | Transmembrane | 104-120 (101-123) |
| INTEGRAL | Likelihood = −8.23 | Transmembrane | 11-27 (9-41) |
| INTEGRAL | Likelihood = −3.93 | Transmembrane | 133-149 (129-150) |
| INTEGRAL | Likelihood = −3.19 | Transmembrane | 347-363 (344-364) |
| INTEGRAL | Likelihood = −2.97 | Transmembrane | 158-174 (155-174) |
| INTEGRAL | Likelihood = −1.54 | Transmembrane | 246-262 (245-262) |
| INTEGRAL | Likelihood = −0.90 | Transmembrane | 372-388 (372-388) |
| INTEGRAL | Likelihood = −0.85 | Transmembrane | 64-80 (64-81) |

| | | |
|---|---|---|
| PERIPHERAL | Likelihood = −8.65 | 28 |

modified ALOM score: 2.48
*** Reasoning Step: 3
----- Final Results -----
bacterial membrane --- Certainty = 0.4970 (Affirmative) < succ>
bacterial outside --- Certainty = 0.0000 (Not Clear) < succ>
bacterial cytoplasm --- Certainty = 0.0000 (Not Clear) < succ>

[7194] The protein has homology with the following sequences in the databases:

[chemical structure]

[7195] Based on this analysis, it was predicted that these proteins and their epitopes could be useful antigens for vaccines or diagnostics.

### EXAMPLE 1299

[7196] A DNA sequence (GBSx1377) was identified in S. agalactiae <SEQ ID 3989> which encodes the amino acid sequence <SEQ ID 3990>. Analysis of this protein sequence reveals the following:

Possible site: 24
>>> Seems to have no N-terminal signal sequence
----- Final Results -----
bacterial cytoplasm --- Certainty = 0.3002 (Affirmative) < succ>
bacterial membrane --- Certainty = 0.0000 (Not Clear) < succ>
bacterial outside --- Certainty = 0.0000 (Not Clear) < succ>

[7197] The protein has homology with the following sequences in the GENPEPT database.

| >GP: AAF61315 GB: U96166 unknown [Streptococcus cristatus] | | | |
|---|---|---|---|
| Identities = 30/78 (38%), Positives = 41/78 (52%) | | | |
| Query: | 276 | ALTVTLTDDIWELEHLLQRCPNTDFHIAAPVYCSDRLKQLVGYPNYYLHEAITEEQFEVL | 335 |
| | | AL +T +D + ++E LL + PN FHI A S L L YPN L+ I + L | |
| Sbjct: | 289 | ALILTNSDQLEQIEQLLTQLPNVHFHIGAITEMSGHLMGLNRYPNVSLYPNIRPAKVAEL | 348 |
| Query: | 336 | LLNSDIYLDINHGEEVWN | 353 |
| | | D+YLDIN +E+ N | |
| Sbjct: | 349 | FERCDLYLDINISDEILN | 366 |

[7198] No corresponding DNA sequence was identified in S. pyogenes.

[7199] Based on this analysis, it was predicted that this protein and its epitopes, could be useful antigens for vaccines or diagnostics.

### EXAMPLE 1300

[7200] A DNA sequence (GBSx1378) was identified in S. agalactiae <SEQ ID 3991> which encodes the amino acid sequence <SEQ ID 3992>. This protein is predicted to be eps7. Analysis of this protein sequence reveals the following:

Possible site: 19
>>> May be a lipoprotein
----- Final Results -----
bacterial membrane --- Certainty = 0.0000 (Not Clear) < succ>
bacterial outside --- Certainty = 0.0000 (Not Clear) < succ>
bacterial cytoplasm --- Certainty = 0.0000 (Not Clear) < succ>

[7201] The protein has homology with the following sequences in the GENPEPT database.

| >GP: CAC07458 GB: AX009404 product = eps7 [Streptococcus thermophilus] | | | |
|---|---|---|---|
| Identities = 87/232 (37%), Positives = 133/232 (56%), Gaps = 22/232 (9%) | | | |
| Query: | 10 | VSVIIPVYNAAPYLEGCVNTILGQTYQVFEILLIDDGSTDTSASICDQLSLRDNRIRVFH | 69 |
| | | +S++IPVYN Y++ C+++IL QT+ EI+L+DDGSTD S ICD S D RI+V H | |
| Sbjct: | 3 | ISIVIPVYNVQDYIKKCLDSILSQTFSDLEIILVDDGSTDLSGRICDYYSENDKRIKVIH | 62 |
| Query: | 70 | IENGGASRARNFGLARISPESQFVTFVDSDDWVKENYLEVLLAQQEKYNADIVISNYYIY | 129 |
| | | NGG S+ARN G+ + S+++TF+DSDD+V +Y+E L + +NADI I+++ | |
| Sbjct: | 63 | TANGGQSEARNVGIKNAT--SEWITFIDSDDYVSSDYIEYLYNLIQVHNADISIASF--- | 117 |
| Query: | 130 | RETEDIFGYYITDKDFV------IEEISAQTAIDRQVHWHLNSSVFIVIWGKLYRRELFD | 183 |
| | | YIT K + + + A+TAI R + LN + +WGK+YR E F+ | |
| Sbjct: | 118 | --------TYITPKKIIKHGNGEVALMDAKTAIRRML---LNEGFDMGVWGKMYRTEYFN | 166 |
| Query: | 184 | TITFPIDKVFEDELVSVLLFIKSKKTILVNGSYYGYRIRPNSIMTSAFSSKR | 235 |
| | | F K+FED L++ +F ++ + Y Y R NS + F+ K+ | |
| Sbjct: | 167 | KYKFVSGKLFEDSLITYQIFSEASTIVFGAKDIYFYVNRKNSTVNGTFNIKK | 218 |

[7202] Based on this analysis, it was predicted that this protein and its epitopes, could be useful antigens for vaccines or diagnostics.

### EXAMPLE 1301

[7203] A DNA sequence (GBSx1379) was identified in S. agalactiae <SEQ ID 3993> which encodes the amino acid sequence <SEQ ID 3994>. Analysis of this protein sequence reveals the following:

Possible site: 14
>>> Seems to have no N-terminal signal sequence
----- Final Results -----
bacterial cytoplasm --- Certainty = 0.1569 (Affirmative) < succ>
bacterial membrane --- Certainty = 0.0000 (Not Clear) < succ>
bacterial outside --- Certainty = 0.0000 (Not Clear) < succ>

[7204] The protein has no significant homology with any sequences in the GENPEPT database.

[7205] No corresponding DNA sequence was identified in S. pyogenes.

[7206] Based on this analysis, it was predicted that this protein and its epitopes, could be useful antigens for vaccines or diagnostics.

### EXAMPLE 1302

[7207] A DNA sequence (GBSx1380) was identified in S. agalactiae <SEQ ID 3995> which encodes the amino acid sequence <SEQ ID 3996>. Analysis of this protein sequence reveals the following:

Possible site: 26
>>> Seems to have no N-terminal signal sequence
----- Final Results -----
bacterial cytoplasm --- Certainty = 0.1662 (Affirmative) < succ>
bacterial membrane --- Certainty = 0.0000 (Not Clear) < succ>
bacterial outside --- Certainty = 0.0000 (Not Clear) < succ>

[7208] The protein has no significant homology with any sequences in the GENPEPT database.

[7209] No corresponding DNA sequence was identified in S. pyogenes.

[7210] Based on this analysis, it was predicted that this protein and its epitopes, could be useful antigens for vaccines or diagnostics.

### EXAMPLE 1303

[7211] A DNA sequence (GBSx1381) was identified in S. agalactiae <SEQ ID 3997> which encodes the amino acid sequence <SEQ ID 3998>. This protein is predicted to be a glycosyl transferase (gspA). Analysis of this protein sequence reveals the following:

```
Possible site: 13
>>> Seems to have no N-terminal signal sequence
----- Final Results -----
                            bacterial cytoplasm --- Certainty = 0.2606(Affirmative) < succ>
                              bacterial membrane --- Certainty = 0.0000(Not Clear) < succ>
                                bacterial outside --- Certainty = 0.0000(Not Clear) < succ>
```

[7212] The protein has homology with the following sequences in the GENPEPT database.

| >GP: AAF28363 GB: AF224467 putative glycosyl transferase [Haemophilus | | | |
|---|---|---|---|
| ducreyi] | | | |
| Identities = 62/177 (35%), Positives = 105/177 (59%), Gaps = 8/177 (4%) | | | |
| Query: | 3 | YARYYIPQLIDAEKVLYLDIDTLVVDNLDKLFEIELGDYPIAAILD--GDGIY-----FN | 55 |
| | | + RY+I I+ +KV+YLD D +V +L +L++ ++ +Y +AA+ D + IY FN | |
| Sbjct: | 89 | FFRYFISDFIEQDKVIYLDADIVVNGSLTELYQTDISNYFLAAVKDIISEKIYVNNHIFN | 148 |
| Query: | 56 | SGVMLINSLYWMRYRVTEKLLEITERELDNGIFGDQGVLNLLFDNNWLKLEDKYNAQVGN | 115 |
| | | +G++LIN+ W + +T+ L ++E+ +++ DQ +LNL+F + WLKL YN +G | |
| Sbjct: | 149 | AGMLLINNKKWREHNITQFCLSLSEKYINSLPDADQSILNLIFKDKWLKLNRGYNYLIGT | 208 |
| Query: | 116 | DLGAFYENWQGYFDRNFES-PTIIHYCTHDKPWNTFSSSRFRETWWQYEQLDWNEVF | 171 |
| | | D F Y + E+ P IIHY T KPW ++RFR +W Y +L+W +++ | |
| Sbjct: | 209 | DYLFFKYGKTRYLEDLGETIPLIIHYNTEAKPWLNIFNTRFRNIYWFYYELNWQDIY | 265 |

[7213] No corresponding DNA sequence was identified in S. pyogenes.

[7214] Based on this analysis, it was predicted that this protein and its epitopes, could be useful antigens for vaccines or diagnostics.

### EXAMPLE 1304

[7215] A DNA sequence (GBSx1384) was identified in S. agalactiae <SEQ ID 3999> which encodes the amino acid sequence <SEQ ID 4000>. This protein is predicted to be a glycosyl transferase. Analysis of this protein sequence reveals the following:

```
Possible site: 56
>>> Seems to have no N-terminal signal sequence
----- Final Results -----
                            bacterial cytoplasm --- Certainty = 0.1157(Affirmative) < succ>
                              bacterial membrane --- Certainty = 0.0000(Not Clear) < succ>
                                bacterial outside --- Certainty = 0.0000(Not Clear) < succ>
```

[7216] The protein has homology with the following sequences in the GENPEPT database.

| >GP: AAF28363 GB: AF224467 putative glycosyl transferase [Haemophilus | | | |
|---|---|---|---|
| ducreyi] | | | |
| Identities = 103/259 (39%), Positives = 156/259 (59%), Gaps = 3/259 (1%) | | | |
| Query: | 7 | IALAADFGYQEQVKTIIKSICFHNQFIDFYILNDDFPVEWFQMMEYHLSKMDCTISNTKI | 66 |
| | | I LAA+ Y E + T IKSI HN+ I FY+LN D+P EWF ++ L K++ I + K+ | |
| Sbjct: | 10 | IVLAANQSYSEYILTTIKSIYLHNKHIRFYLLNRDYPTEWFDILNNKLRKLNSEIIDIKV | 69 |
| Query: | 67 | FNEEIKHFK-FQKPMPYPTYFRYFIPEVIHEDKVLYLDCDMIITSDLTSIFTLDISKYGV | 125 |
| | | N+ IK+FK + T+FRYFI + I +DKV+YLD D+++ LT ++ DIS Y + | |
| Sbjct: | 70 | TNDTIKNFKTYSHISSDTTFFRYFISDFIEQDKVIYLDADIVVNGSLTELYQTDISNYFL | 129 |
| Query: | 126 | AAVRDDLLEEYDGKEDYFNSGLLLINNIFWREQGISQRLLDYTRENQGALQYHDQDVLND | 185 |
| | | AAV+D + E+ FN+G+LLINN WRE I+Q L + + +L DQ +LN | |
| Sbjct: | 130 | AAVKDIISEKIYVNNHIFNAGMLLINNKKWREHNITQFCLSLSEKYINSLPDADQSILNL | 189 |
| Query: | 186 | VLCDNWLELDETYNYHTGADMLYNLFQQSERQLNRRKDLPKVIHY-TATKPWKYLETSVR | 244 |
| | | + D WL+L+ YNY G D L+ + ++ + + +P +IHY T KPW + + R | |
| Sbjct: | 190 | IFKDKWLKLWRGYNYLIGTDYLFFKYGKTRYLEDLGETIPLIIHYNTEAKPWLNI-FNTR | 248 |
| Query: | 245 | WRDIWWEYNRLEWRDIFTR | 263 |
| | | +R+I+W Y L W+DI+ + | |
| Sbjct: | 249 | FRNIYWFYYELNWQDIYAK | 267 |

[7217] No corresponding DNA sequence was identified in S. pyogenes.

[7218] Based on this analysis, it was predicted that this protein and its epitopes, could be useful antigens for vaccines or diagnostics.

### EXAMPLE 1305

[7219] A DNA sequence (GBSx1385) was identified in S. agalactiae <SEQ ID 4001> which encodes the amino acid sequence <SEQ ID 4002>. This protein is predicted to be a glycosyl transferase. Analysis of this protein sequence reveals the following:

```
Possible site: 28
>>> Seems to have no N-terminal signal sequence
----- Final Results -----
                            bacterial cytoplasm --- Certainty = 0.2679(Affirmative) < succ>
                              bacterial membrane --- Certainty = 0.0000(Not Clear) < succ>
                                bacterial outside --- Certainty = 0.0000(Not Clear) < succ>
```

[7220] The protein has homology with the following sequences in the GENPEPT database.

| >GP: AAF28363 GB: AF224467 putative glycosyl transferase [Haemophilus | | | |
|---|---|---|---|
| ducreyi] | | | |
| Identities = 94/263 (35%), Positives = 158/263 (59%), Gaps = 4/263 (1%) | | | |
| Query: | 2 | KKTIVLGADFQYRDQVMTTIKSIVSHNQHLTIYIINTDFPVEWFNILNHSLEQFDCRVKN | 61 |
| | | K IVL A+ Y + ++TTIKSI HN+H+ Y++N D+P EWF+ILN+ L + + + + | |
| Sbjct: | 7 | KMNIVLAANQSYSEYILTTIKSIYLHNKHIRFYLLNRDYPTEWFDILNNKLRKLNSEIID | 66 |
| Query: | 62 | IPISSDVFEGIPTLSHISV-AGFFRWFIPIHLEEEIVLYLDSDVIVRGSLDPLFDINLEE | 120 |
| | | I +++D + T SHIS FFR+FI +E++ V+YLD+D++V GSL L+ ++ | |
| Sbjct: | 67 | IKVTNDTIKNFKTYSHISSDTTFFRYFISDFIEQDKVIYLDADIVVNGSLTELYQTDISN | 126 |
| Query: | 121 | NLLGAVADHFSTLYYGDTAPVSFNSGVMLINNSLWKKEEIYNSLMRIADKG-SAVGVGDQ | 179 |
| | | L AV D S Y + FN+G++LINN W++ I + +++K +++ DQ | |
| Sbjct: | 127 | YFLAAVKDIISEKIYVNNH--IFNAGMLLINNKKWREHNITQFCLSLSEKYINSLPDADQ | 184 |
| Query: | 180 | EYLNILTQNRWIDIGKQYNVQIGQDVNINAYGRPDLYHFYDDCEPVIVHYNSQDKPWNKY | 239 |
| | | LN++ +++W+ + + YN IG D YG+ + P+I+HYN++ KPW | |
| Sbjct: | 185 | SILNLIFKDKWLKLNRGYNYLIGTDYLFFKYGKTRYLEDLGETIPLIIHYNTEAKPWLNI | 244 |
| Query: | 240 | SQSRYRSEWWYYFGLEWSVIYAQ | 262 |
| | | +R+R+ +W+Y+ L W IYA+ | |
| Sbjct: | 245 | FNTRFRNIYWFYYELNWQDIYAK | 267 |

[7221] No corresponding DNA sequence was identified in S. pyogenes.

[7222] Based on this analysis, it was predicted that this protein and its epitopes, could be useful antigens for vaccines or diagnostics.

### EXAMPLE 1306

[7223] A DNA sequence (GBSx1386) was identified in S. agalactiae <SEQ ID 4003> which encodes the amino acid sequence <SEQ ID 4004>. Analysis of this protein sequence reveals the following:

```
Possible site: 13
>>> Seems to have no N-terminal signal sequence
----- Final Results -----
                            bacterial cytoplasm --- Certainty = 0.2996(Affirmative) < succ>
                              bacterial membrane --- Certainty = 0.0000(Not Clear) < succ>
                                bacterial outside --- Certainty = 0.0000(Not Clear) < succ>
```

[7224] A related GBS nucleic acid sequence <SEQ ID 10003> which encodes amino acid sequence <SEQ ID 10004> was also identified.

[7225] The protein has homology with the following sequences in the GENPEPT database.

| >GP: AAC75095 GB: AE000294 putative Galf transferase [Escherichia coli K12] | | | |
|---|---|---|---|
| Identities = 68/286 (23%), Positives = 122/286 (41%), Gaps = 18/286 (6%) | | | |
| Query: | 77 | STRMDGIIAGLGRGDIVVFQVPTWNSTEFDELFLDKLQAYGARIITFVHDIVPLMFESNF | 136 |
| | | S ++ + GL D+++F P F +L + RI+ +HDI L | |
| Sbjct: | 50 | SVKLSTFLCGLENKDVLIFNFPMAKPFWHILSFFHRLLKE--RIVPLIHDIDELRGGGGS | 107 |
| Query: | 137 | YLLDRVIDMYNRSDVVILPTKAMHDYLIEKGMTTSKVLYQEVWDHPVNIDLPRPEC---Q | 193 |
| | | D V D+VI M YL K M+ K+ +++D+ V+ D+ + Q | |
| Sbjct: | 108 | ---DSV--RLATCDMVISHNPQMTKYL-SKYMSQDKIKDIKIFDYLVSSDVEHRDVTDKQ | 161 |
| Query: | 194 | KVLSFAGDIQRFPFVNDWKENIPLIYYGDGSRLNSEANVHAQGWKDDVELMLSLSKRG-G | 252 |
| | | + + +AG++ R + E +G ++ N G D + ++ G | |
| Sbjct: | 162 | RGVIYAGNLSRHKCSFIYTEGCDFTLFG--VNYENKDNPKYLG-SFDAQSPEKINLPGMQ | 218 |
| Query: | 253 | FGLCWSEDREELVERR---YSRMNASYKLSTFLAAGLPIIANHDISSRDFIKQHGLGFTV | 309 |
| | | FGL W D E Y + N +K S +L+ LP+ + DFI + +G+ V | |
| Sbjct: | 219 | FGLIWDGDSVETCSGAFGDYLKFNNPHKTSLYLSMELPVFIWDKAALADFIVDNRIGYAV | 278 |
| Query: | 310 | ETLEEAVEKINNMEKETYDSYVENVEKIATLLRNGYITKKLLIDAV | 355 |
| | | +++E E +++M ETY EN + I+ +R G + +L + + | |
| Sbjct: | 279 | GSIKEMQEIVDSMTIETYKQISENTKIISQKIRTGSYFRDVLEEVI | 324 |

[7226] No corresponding DNA sequence was identified in S. pyogenes.

[7227] Based on this analysis, it was predicted that these proteins and their epitopes could be useful antigens for vaccines or diagnostics.

### EXAMPLE 1307

[7228] A DNA sequence (GBSx1387) was identified in S. agalactiae <SEQ ID 4005> which encodes the amino acid sequence <SEQ ID 4006>. Analysis of this protein sequence reveals the following:

Possible site: 33
>>> Seems to have no N-terminal signal sequence
----- Final Results -----
bacterial cytoplasm --- Certainty = 0.3098 (Affirmative) < succ>
bacterial membrane --- Certainty = 0.0000 (Not Clear) < succ>
bacterial outside --- Certainty = 0.0000 (Not Clear) < succ>

[7229] The protein has homology with the following sequences in the GENPEPT database.

| >GP: AAA73093 GB: M76233 [Rabbit smooth muscle myosin light chain | | | |
|---|---|---|---|
| kinase mRNA, complete CDS.], gene product [Oryctolagus | | | |
| cuniculus] | | | |
| Identities = 23/63 (36%), Positives = 36/63 (56%) | | | |
| Query: | 5 | QPAPALQRVRQCQPAPVLQPVPRCQPALALQRVRQCQPAQVLQQVPRCQPAQVLQQVPRC | 64 |
| | | +PA L+ V +PA L+PV +PA L+ V +PA+ L+ V +PA+ L+ V | |
| Sbjct: | 225 | KPAETLKPVGNAKPAETLKPVGNAKPAETLKPVGNAKPAETLKPVGNAKPAETLKAVANA | 284 |
| Query: | 65 | QPA | 67 |
| | | +PA | |
| Sbjct: | 285 | KPA | 287 |

[7230] No corresponding DNA sequence was identified in S. pyogenes.

[7231] Based on this analysis, it was predicted that this protein and its epitopes, could be useful antigens for vaccines or diagnostics.

### EXAMPLE 1308

[7232] A DNA sequence (GBSx1388) was identified in S. agalactiae <SEQ ID 4007> which encodes the amino acid sequence <SEQ ID 4008>. Analysis of this protein sequence reveals the following:

| Possible site: 43 | | | |
|---|---|---|---|
| >>> Seems to have no N-terminal signal sequence | | | |
| INTEGRAL | Likelihood = −9.24 | Transmembrane | 189-205 (173-245) |
| INTEGRAL | Likelihood = −9.24 | Transmembrane | 213-229 (206-245) |
| INTEGRAL | Likelihood = −7.96 | Transmembrane | 95-111 (83-185) |
| INTEGRAL | Likelihood = −7.96 | Transmembrane | 115-131 (112-185) |
| INTEGRAL | Likelihood = −7.96 | Transmembrane | 135-151 (132-185) |
| INTEGRAL | Likelihood = −7.96 | Transmembrane | 155-171 (152-185) |
| INTEGRAL | Likelihood = −6.85 | Transmembrane | 15-31 (8-45) |
| INTEGRAL | Likelihood = −4.09 | Transmembrane | 39-55 (35-57) |
| INTEGRAL | Likelihood = −4.09 | Transmembrane | 63-79 (59-81) |
| INTEGRAL | Likelihood = −2.71 | Transmembrane | 235-251 (235-251) |
| INTEGRAL | Likelihood = −0.11 | Transmembrane | 253-269 (253-269) |

----- Final Results -----
bacterial membrane --- Certainty = 0.4694 (Affirmative) < succ>
bacterial outside --- Certainty = 0.0000 (Not Clear) < succ>
bacterial cytoplasm --- Certainty = 0.0000 (Not Clear) < succ>

[7233] The protein has homology with the following sequences in the GENPEPT database.

| >GP: AAC16164 GB: AF010496 ice nucleation protein [Rhodobacter apsulatus] | | | |
|---|---|---|---|
| Identities = 85/286 (29%), Positives = 119/286 (40%), Gaps = 17/286 (5%) | | | |
| Query: | 3 | ALVLADVDALVETLVLADVVALIEALVLADIEALV----EALVLADIEALVEALVLADID | 58 |
| | | AL A AL T + A ++ L AD+ L +AL A I AL + + A | |
| Sbjct: | 523 | ALSDAQAGALTSTQIGLLSTAAVKGLSTADMAGLTTAEAQALTSAQIAALSSSQIRAMTT | 582 |
| Query: | 59 | ALVEALVLADIEALVEALVL----ADIDALVEALVLADVEALIEALVLALVEALVLADVE | 114 |
| | | A + AL A I+ L + +L ADI AL A + I AL +LV A+ AD+ | |
| Sbjct: | 583 | AQIAALGTAQIKGLTASNILGLETADIVALTTTQAPALSSSQIAALSTSLVAAMETADLA | 642 |
| Query: | 115 | ALIEALVLAL----VEALVLADVEAL----IEALVLALVEALVLADVEALIEALVLALVE | 166 |
| | | L A + AL A A+ I + A ++ L AD+ AL A + + | |
| Sbjct: | 643 | KLSAATFKGFSSTQITALTTAQAGAIGTDQIAQITTAAIKGLESADIAALANATLAKMTT | 702 |
| Query: | 167 | ALVLADVEALIEALVLADVD-ALVLALVEALVLALVEALILAEVEALVLALVEALVLALV | 225 |
| | | A V A + L ++ L A V+AL A + L ++ AL AL V | |
| Sbjct: | 703 | AQVAVLGSAQLTGLTTTQINTVLTTAQVKALGAAALAGLGTDDIVALTTGQAAALSSTQV | 762 |
| Query: | 226 | EALILALVEALVLADVDALMEALVLADVEALMEALVLADVDALVEA | 271 |
| | | AL A + AL AD AL A + + AL +DAL A | |
| Sbjct: | 763 | AALSTAQISALQTADFAALSTAAIKGLSSTQITALSTGQIDALTTA | 808 |

[7234] No corresponding DNA sequence was identified in S. pyogenes.

[7235] Based on this analysis, it was predicted that this protein and its epitopes, could be useful antigens for vaccines or diagnostics.

### EXAMPLE 1309

[7236] A DNA sequence (GBSx1389) was identified in S. agalactiae <SEQ ID 4009> which encodes the amino acid sequence <SEQ ID 4010>. Analysis of this protein sequence reveals the following:

Possible site: 41
>>> Seems to have no N-terminal signal sequence
----- Final Results -----
bacterial cytoplasm --- Certainty = 0.2297 (Affirmative) < succ>
bacterial membrane --- Certainty = 0.0000 (Not Clear) < succ>
bacterial outside --- Certainty = 0.0000 (Not Clear) < succ>

[7237] The protein has no significant homology with any sequences in the GENPEPT database.

[7238] No corresponding DNA sequence was identified in S. pyogenes.

[7239] Based on this analysis, it was predicted that this protein and its epitopes, could be useful antigens for vaccines or diagnostics.

### EXAMPLE 1310

[7240] A DNA sequence (GBSx1390) was identified in S. agalactiae <SEQ ID 4011> which encodes the amino acid sequence <SEQ ID 4012>. This protein is predicted to be fimbriae-associated protein Fap1. Analysis of this protein sequence reveals the following:

Possible site: 50
>>> Seems to have no N-terminal signal sequence
----- Final Results -----
bacterial cytoplasm --- Certainty = 0.3138 (Affirmative) < succ>
bacterial membrane --- Certainty = 0.0000 (Not Clear) < succ>
bacterial outside --- Certainty = 0.0000 (Not Clear) < succ>

[7241] The protein has homology with the following sequences in the GENPEPT database.

| >GP: BAA97453 GB: AB029393 streptococcal hemagglutinin [Streptococcus gordonii] | | | |
|---|---|---|---|
| Identities = 388/968 (40%), Positives = 518/968 (53%), Gaps = 68/968 (7%) | | | |
| Query: | 13 | VDTKSRVKMHKSEKNWVRTVMSHFNLFKAIKGRATVEADVCIQDVEKEDRLSSGNLTYLK | 72 |
| | | V+ +R K+ KS K+W+R S F L + +KG +V V +E + G L YLK | |
| Sbjct: | 13 | VERVTRFKLIKSGKHWLRAATSQFGLLRLMKGADISSVEV---KVAEEQSVEKGGLNYLK | 69 |
| Query: | 73 | GILAAGALVGGASLTSR-VYADETPVVQEQSSSVPTLAEQTEVTV--KTTTVQNHQDGTV | 129 |
| | | GI+A GA++GGA +TS VYA+E +++ + LA + E + + T + + | |
| Sbjct: | 70 | GIIATGAVLGGAVVTSSSVYAEEEQALEKVIDTRDVLATRGEAVLSEEAATTLSSEGANP | 129 |
| Query: | 130 | SKNIIDSNSVSMSESASTSTSESVSMSMSGSTLTSVSESVSTSALTSASESISTSASESV | 189 |
| | | +++ D+ S S S SA+ S S S+S+S S S S S S S+S S+SES S S S SV | |
| Sbjct: | 130 | VESLSDTLSASESASAN-SVSTSISISESFSVSASASLSSSSSLSQSSSESASASESLSV | 188 |
| Query: | 190 | SKSTSISEVSNILETQASLTDKGRESFSANQIVTESSLVTDAGKNASVSSLIEITKPKSE | 249 |
| | | S STS S S TQ+S + S S+N + T S V+ +NA V + + +E | |
| Sbjct: | 189 | SASTSQSFSSTTSSTQSSNNESLISSDSSNSLNTNQS-VSARNQNARVRTRRAVAANDTE | 247 |
| Query: | 250 | LQTSKMSNESLITPEKSQVMIASDKTGNESLTPTIRLKSVIQPRSMNLMTLSSEMDLIPL | 309 |
| | | K + + E + ++ T N + ++ N+ ++ L P | |
| Sbjct: | 248 | APQVKSGDYVVYRGESFEYY---AEITDNSGQVNRVVIR--------NVEGGANSTYLSPN | 297 |
| Query: | 310 | EEVSDTEMLGKDVSSELQKVNIALKDNTLSEPGTVKLDSSENLVLNFAFSIASVNEGDVF | 369 |
| | | TE LG+ ++ +Q L+ E ++ + ++ + +A G+ | |
| Sbjct: | 298 | WVKYSTENLGRPGNATVQN---PLRTRIFGEVPLNEIVNEKSYYTRYI--VAWDPSGN-- | 350 |
| Query: | 370 | TVKLSDNLDTQGIGTILKVQDIMDETGQLLATGSYSPLTHNITY--------TWTRYAST | 421 |
| | | ++ DN + G+ + +E Y P ++TY T R A | |
| Sbjct: | 351 | ATQMVDNANRNGLERFVLTVKSQNE--------KYDPAESSVTYVNNLSNLSTSEREAVA | 402 |
| Query: | 422 | LNNIKARVNMPVWPDQRI-------ISKTTSDKQCFTATLNNQVASIE---ERVQYNSPS | 471 |
| | | A N+P P +I ++ T DK T N V ++ S S | |
| Sbjct: | 403 | AAVRAANPNIP--PTAKITVSQNGTVTITYPDKSTDTIPANRVVKDLQISKSNSASQSSS | 460 |
| Query: | 472 | VTEHTNVKTNVRSRIMKLDDERQTETYITQINPEGKEMYFASGLGNLYTIIGSDGTSGSP | 531 |
| | | V+ + T+V + I ++ + + ++ S+ S S | |
| Sbjct: | 461 | VSASQSASTSVSASI---SASMSASVSVSTSASTSASVSASESASTSASVSASESASTS- | 516 |
| Query: | 532 | VNLLNAEVKILKTNSKNLTDSMDQNYDSPEFEDVTSQYSYTNDGSKITIDWKTNSISSTT | 591 |
| | | A V K++S + + S ++ + + S + S + S+S++T | |
| Sbjct: | 517 | -----ASVSASKSSSTSASVSASESASTSASVSASESASTSASVSASESASTSASVSAST | 571 |
| Query: | 592 | SYVVLVKIPKQSGVLYSTVSDINQTYGSKYSYGHTNISGDSDANAEIKL-LSESASTSAS | 650 |
| | | S + ST + ++ + + S ++S A+ + SESASTSAS | |
| Sbjct: | 572 | SASTSASVSASESA--STSASVSASESASTS---ASVSASESASTSASVSASESASTSAS | 626 |
| Query: | 651 | TSASTSASMSASTSASTSASMSASTSASTSASTSASMSASTSASTSASTSASTSASTSAS | 710 |
| | | SAS S+S SAS SAS SAS SAS SAS SASTSAS+SASTSASTSAS SASTSASTSAS | |
| Sbjct: | 627 | VSASESSSTSASVSASESASTSASVSASESASTSASVSASTSASTSASVSASTSASTSAS | 686 |
| Query: | 711 | MSASTSASTSASTSASTSASTSASTSASMSASTSASTSASTSASTSASMSASTSASTSAS | 770 |
| | | +SASTSASTSAS SAS SASTSAS SAS SASTSAS SASTSASTSAS+SASTSASTSAS | |
| Sbjct: | 687 | VSASTSASTSASVSASESASTSASVSASESASTSASVSASTSASTSASVSASTSASTSAS | 746 |
| Query: | 771 | TSASTSASMSASTSASTSASTSASTSASMSASTSASTSASTSASTSASMSASTSASTSAS | 830 |
| | | SAS SAS SAS SASTSASTSAS SAS SASTSAS SAST ASTSAS+SAS SASTSAS | |
| Sbjct: | 747 | VSASESASTSASVSASTSASTSASVSASESASTSASVSASTYASTSASVSASESASTSAS | 806 |
| Query: | 831 | TSASMSASTSASTSASMSASTSASTSASMSASTSASTSASMSASTSASTSASMSASTSAS | 890 |
| | | SAS SASTSAS SAS SASTSAS SAS SASTSAS SAS SASTSAS SAS SASTSAS | |
| Sbjct: | 807 | VSASESASTSASVSASTSASTSASVSASESASTSASVSASESASTSASVSASESASTSAS | 866 |
| Query: | 891 | MSATTSASTSVSTSASTSASTSASTSSSSSVTSNSSKEKVYSALPSTGDQDYSVTATALG | 950 |
| | | +SA+TSASTS S SAS SASTSAS S+S S ++++S SA S +T+ | |
| Sbjct: | 867 | VSASTSASTSASVSASESASTSASVSASESASTSASVSASESASTSASVSASESASTSAS | 926 |
| Query: | 951 | LGLMTGAT | 958 |
| | | + T A+ | |
| Sbjct: | 927 | VSASTSAS | 934 |

[7242] There is also homology to SEQ ID 760.

[7243] SEQ ID 4012 (GBS68) was expressed in E. coli as a GST-fusion product. SDS-PAGE analysis of total cell extract is shown in FIG. 33 (lane 4; MW 131.2 kDa).

[7244] GBS68d was expressed in E. coli as a GST-fusion product. SDS-PAGE analysis of total cell extract is shown in FIG. 153 (lane 14; MW 103 kDa) and in FIG. 239 (lane 13; MW 103 kDa). It was also expressed in E. coli as a His-fusion product. SDS-PAGE analysis of total cell extract is shown in FIG. 152 (lane 17; MW 78 kDa), in FIG. 153 (lane 17; MW>78 kDa) and in FIG. 184 (lane 10; MW 78 kDa). Purified GBS68d-GST is shown in FIG. 246, lane 5.

[7245] Based on this analysis, it was predicted that this protein and its epitopes, could be useful antigens for vaccines or diagnostics.

### EXAMPLE 1311

[7246] A DNA sequence (GBSx1391) was identified in S. agalactiae <SEQ ID 4013> which encodes the amino acid sequence <SEQ ID 4014>. This protein is predicted to be RofA. Analysis of this protein sequence reveals the following:

Possible site: 30
>>> Seems to have no N-terminal signal sequence
----- Final Results -----
bacterial cytoplasm --- Certainty = 0.1738 (Affirmative) < succ>
bacterial membrane --- Certainty = 0.0000 (Not Clear) < succ>
bacterial outside --- Certainty = 0.0000 (Not Clear) < succ>

[7247] A related GBS nucleic acid sequence <SEQ ID 10005> which encodes amino acid sequence <SEQ ID 10006> was also identified.

[7248] There is also homology to SEQ ID 3750.

[7249] Based on this analysis, it was predicted that this protein and its epitopes, could be useful antigens for vaccines or diagnostics.

### EXAMPLE 1312

[7250] A DNA sequence (GBSx1392) was identified in S. agalactiae <SEQ ID 4015> which encodes the amino acid sequence <SEQ ID 4016>. This protein is predicted to be Nra. Analysis of this protein sequence reveals the following:

Possible site: 16
>>> Seems to have a cleavable N-term signal seq.
----- Final Results -----
bacterial outside --- Certainty = 0.3000 (Affirmative) < succ>
bacterial membrane --- Certainty = 0.0000 (Not Clear) < succ>
bacterial cytoplasm --- Certainty = 0.0000 (Not Clear) < succ>

[7251] Based on this analysis, it was predicted that this protein and its epitopes, could be useful antigens for vaccines or diagnostics.

### EXAMPLE 1313

[7252] A DNA sequence (GBSx1393) was identified in S. agalactiae <SEQ ID 4017> which encodes the amino acid sequence <SEQ ID 4018>. Analysis of this protein sequence reveals the following:

Possible site: 19
>>> Seems to have no N-terminal signal sequence
----- Final Results -----
bacterial cytoplasm --- Certainty = 0.3674 (Affirmative) < succ>
bacterial membrane --- Certainty = 0.0000 (Not Clear) < succ>
bacterial outside --- Certainty = 0.0000 (Not Clear) < succ>

[7253] The protein has homology with the following sequences in the GENPEPT database.

| >GP:AAA27020 GB:M80215 uvs402 protein [Streptococcus pneumoniae] | | |
|---|---|---|
| Identities = 577/663 (87%), Positives = 633/663 (95%), Gaps = 1/663 (0%) | | |
| Query: 1 | MIDRKDTNRFKLVSKYSPSGDQPQAIETLVDNIEGGEKAQILKGATGTGKTYTMSQVIAQ | 60 |
| | MI+ N+FKLVSKY PSGDQPQAIE LVDNIEGGEKAQIL GATGTGKTYTMSQVI++ | |
| Sbjct: 7 | MINHITDNQFKLVSKYQPSGDQPQAIEQLVDNIEGGEKAQILMGATGTGKTYTMSQVISK | 66 |
| Query: 61 | VNKPTLVIAHNKTLAGQLYGEFKEFFPDNAVEYFVSYYDYYQPEAYVPSSDTYIEKDSSV | 120 |
| | VNKPTLVIAHNKTLAGQLYGEFKEFFP+NAVEYFVSYYDYYQPEAYVPSSDTYIEKDSSV | |
| Sbjct: 67 | VNKPTLVIAHNKTLAGQLYGEFKEFFPENAVEYFVSYYDYYQPEAYVPSSDTYIEKDSSV | 126 |
| Query: 121 | NDEIDKLRHSATSSLLERNDVIVVASVSCIYGLGSPKEYADSVVSLRPGQEISRDQLLNN | 180 |
| | NDEIDKLRHSATS+LLERNDVIVVASVSCIYGLGSPKEYADSVVSLRPG EISRD+LLN+ | |
| Sbjct: 127 | NDEIDKLRHSATSALLERNDVIVVASVSCIYGLGSPKEYADSVVSLRPGLEISRDKLLND | 186 |
| Query: 181 | LVDIQFERNDIDFQRGKFRVRGDVVEVFPASRDEHAFRIEFFGDEIDRIREIESLTGRVL | 240 |
| | LVDIQFERNDIDFQRG+FRVRGDVVE+FPASRDEHAFR+EFFGDEIDRIRE+E+LTG+VL | |
| Sbjct: 187 | LVDIQFERNDIDFQRGRFRVRGDVVEIFPASRDEHAFRVEFFGDEIDRIREVEALTGQVL | 246 |
| Query: 241 | GEVEHLAIFPATHFMTNDEHMEEAISKIQAEMENQVELFEKEGKLIEAQRIRQRTEYDIE | 300 |
| | GEV+HLAIFPATHF+TND+HME AI+KIQAE+E Q+ + FEKEGKL+EAQR++QRTEYDIE | |
| Sbjct: 247 | GEVDHLAIFPATHFVTNDDHMEVAIAKIQAELEEQLAVFEKEGKLLEAQRLKQRTEYDIE | 306 |
| Query: 301 | MLREMGYTNGVENYSRHMDGRSEGEPPFTLLDFFPEDFLIMIDESHMTMGQIKGMYNGDR | 360 |
| | MLREMGYTNGVENYSRHMDGRSEGEPP+TLLDFFP+DFLIMIDESHMTMGQIKGMYNGDR | |
| Sbjct: 307 | MLREMGYTNGVENYSRHMDGRSEGEPPYTLLDFFPDDFLIMIDESHMTMGQIKGMYNGDR | 366 |
| Query: 361 | SRKEMLVNYGFRLPSALDNRPLRREEFESHVHQIVYVSATPGDYEMEQTDTVVEQIIRPT | 420 |
| | SRK+MLVNYGFRLPSALDNRPLRREEFESHVHQIVYVSATPGDYE EQT+TV+EQIIRPT | |
| Sbjct: 367 | SRKKMLVNYGFRLPSALDNRPLRREEFESHVHQIVYVSATPGDYENEQTETVIEQIIRPT | 426 |
| Query: 421 | GLLDPEVEVRPSMGQMDDLLGEINLRTEKGERTFITTLTKRMAEDLTDYLKEMGVKVKYM | 480 |
| | GLLDPEVEVRP+MGQ+DDLLGEIN R EK ERTFITTLTE+MAEDLTDY KEMG+KVKYM | |
| Sbjct: 427 | GLLDPEVEVRPTMGQIDDLLGEINARVEKNERTFITTLTKKMAEDLTDYFKEMGIKVKYM | 486 |
| Query: 481 | HSDIKTLERTEIIRDLRLGVFDVLIGINLLREGIDVPEVSLVAILDADKEGFLRNERGLI | 540 |
| | HSDIKTLERTEIIRDLRLGVFDVL+GINLLREGIDVPEVSLVAILDADKEGFLRNERGLI | |
| Sbjct: 487 | HSDIKTLERTEIIRDLRLGVFDVLVGINLLREGIDVPEVSLVAILDADKEGFLRNERGLI | 546 |
| Query: 541 | QTIGRAARNSNGHVIMYADKITDSMQRAMDETARRRRLQMDYNEKHGIVPQTIKKEIRDL | 600 |
| | QTIGRAARNS GHVIMYAD +T SMQRA+DETARRR++QM YNE+HGIVPQTIKKEIRDL | |
| Sbjct: 547 | QTIGRAARNSEGHVIMYADTVTQSMQRAIDETARRRKIQMAYNEEHGIVPQTIKKEIRDL | 606 |
| Query: 601 | IAITKSNDSDKPEKVVDYSSLSKKERQAEIKALQQQMQEAAELLDFELAAQIRDVILELK | 660 |
| | IA+TK+ ++ +K VD +SL+K+ER+ +K L++QMQEA E+LDFELAAQIRD++LE+K | |
| Sbjct: 607 | IAVTKAVAKEE-DKEVDINSLNKQERKELVKKLEKQMQEAVEVLDFELAAQIRDMMLEVK | 665 |
| Query: 661 | AID | 663 |
| | A+D | |
| Sbjct: 666 | ALD | 668 |

[7254] A related DNA sequence was identified in S. pyogenes <SEQ ID 4019> which encodes the amino acid sequence <SEQ ID 4020>. Analysis of this protein sequence reveals the following:

```
Possible site: 55
>>> Seems to have no N-terminal signal sequence
----- Final Results -----
bacterial cytoplasm --- Certainty = 0.4386 (Affirmative) <succ>
  bacterial membrane --- Certainty = 0.0000 (Not Clear) <succ>
    bacterial outside --- Certainty = 0.0000 (Not Clear) <succ>
```

[7255] An alignment of the GAS and GBS proteins is shown below.

| Identities = 570/663 (85%), Positives = 625/663 (93%) | | |
|---|---|---|
| Query: 1 | MIDRKDTNRFKLVSKYSPSGDQPQAIETLVDNIEGGEKAQILKGATGTGKTYTMSQVIAQ | 60 |
| | MID++D FKL SKY PSGDQPQAIE+LVDNIEGGEKAQIL GATGTGKTYTMSQVI++ | |
| Sbjct: 1 | MIDKRDDKPFKLKSKYKPSGDQPQAIESLVDNIEGGEKAQILLGATGTGKTYTMSQVISK | 60 |
| Query: 61 | VNKPTLVIAHNKTLAGQLYGEFKEFFPDNAVEYFVSYYDYYQPEAYVPSSDTYIEKDSSV | 120 |
| | VNKPTLVIAHNKTLAGQLYGEFKEFFPDNAVEYFVSYYDYYQPEAYVPSSDTYIEKDSSV | |
| Sbjct: 61 | VNKPTLVIAHNKTLAGQLYGEFKEFFPDNAVEYFVSYYDYYQPEAYVPSSDTYIEKDSSV | 120 |
| Query: 121 | NDEIDKLRHSATSSLLERNDVIVVASVSCIYGLGSPKEYADSVVSLRPGQEISRDQLLNN | 180 |
| | NDEIDKLRHSATSSLLERNDVIVVASVSCIYGLGSPKEYADS VSLRPGQEISRD LLN | |
| Sbjct: 121 | NDEIDKLRHSATSSLLERNDVIVVASVSCIYGLGSPKEYADSAVSLRPGQEISRDTLLNQ | 180 |
| Query: 181 | LVDIQFERNDIDFQRGKFRVRGDVVEVFPASRDEHAFRIEFFGDEIDRIREIESLTGRVL | 240 |
| | LVDIQFERNDIDFQRG FRVRGDVVEVFPASRDEHAFR+EFFGDEIDRI EIESLTG+ + | |
| Sbjct: 181 | LVDIQFERNDIDFQRGCFRVRGDVVEVFPASRDEHAFRVEFFGDEIDRICEIESLTGKTI | 240 |
| Query: 241 | GEVEHLAIFPATHFMTNDEHMEEAISKIQAEMENQVELFEKEGKLIEAQRIRQRTEYDIE | 300 |
| | GEV+HL +FPATHF+TNDEHME++I+KIQAE+ Q++LFS EGKL+EAQR+RQRTEYDIE | |
| Sbjct: 241 | GEVDHLVLFPATHFVTNDEHMEQSIAKIQAELAEQLQLFESEGKLLEAQRLRQRTEYDIE | 300 |
| Query: 301 | MLREMGYTNGVENYSRHMDGRSEGEPPFTLLDFFPEDFLIMIDESHMTMGQIKGMYNGDR | 360 |
| | MLREMGYT+GVENYSRHMDGRS GEPP+TLLDFFPEDFLIMIDESHMTMGQIKGMYNGD+ | |
| Sbjct: 301 | MLREMGYTSGVENYSRHMDGRSPGEPPYTLLDFFPEDFLIMIDESHMTMGQIKGMYNGDQ | 360 |
| Query: 361 | SRKEMLVNYGFRLPSALDNRPLRREEFESHVHQIVYVSATPGDYEMEQTDTVVEQIIRPT | 420 |
| | +RK+MLV+YGFRLPSALDNRPLRREEFESHVHQIVYVSATPG+YEM QT+T++EQIIRPT | |
| Sbjct: 361 | ARKQMLVDYGFRLPSALDNRPLRREEFESHVHQIVYVSATPGEYEMSQTNTIIEQIIRPT | 420 |
| Query: 421 | GLLDPEVEVRFSMGQMDDLLGEINLRTEKGERTFITTLTKRMAEDLTDYLKEMGVKVKYM | 480 |
| | GLLDPE++VR SMGQMDDLLGEIN R + ERTFITTLTK+MAEDLTDYLKEMGVKVKYM | |
| Sbjct: 421 | GLLDPEIDVRSSMGQMDDLLGEINQRVARDERTFITTLTKKMAEDLTDYLKEMGVKVKYM | 480 |
| Query: 481 | HSDIKTLERTEIIRDLRLGVFDVLIGINLLREGIDVPEVSLVAILDADKEGFLRNERGLI | 540 |
| | HSDIKTLERTEIIRDLRLGVFDVLIGINLLREGIDVPEVSLVAILDADKEGFLRNERGLI | |
| Sbjct: 481 | HSDIKTLERTEIIRDLRLGVFDVLIGINLLREGIDVPEVSLVAILDADKEGFLRNERGLI | 540 |
| Query: 541 | QTIGRAARNSNGHVIMYADKITDSMQRAMDETARRRRLQMDYNEKHGIVPQTIKKEIRDL | 600 |
| | QTIGRAARN +GHVIMYADK+TDSMQRA+DETARRR +Q+ YN+ HGIVPQTIKK+IR L | |
| Sbjct: 541 | QTIGRAARNVDGHVIMYADKMTDSMQRAIDETARRREIQIAYNKAHGIVPQTIKKDIRGL | 600 |
| Query: 601 | IAITKSNDSDKPEKVVDYSSLSKKERQAEIKALQQQMQEAAELLDFELAAQIRDVILELK | 660 |
| | I+I+K++ +D ++ +DY S+S+ ER+ I ALQ+QMQEAAELLDFELAAQ+RD+ILELK | |
| Sbjct: 601 | ISISKTSHNDISKEEMDYESMSRGERKEAINALQKQMQEAAELLDFELAAQMRDLILELK | 660 |
| Query: 661 | AID | 663 |
| | +D | |
| Sbjct: 661 | LMD | 663 |

[7256] Based on this analysis, it was predicted that these proteins and their epitopes could be useful antigens for vaccines or diagnostics.

### EXAMPLE 1314

[7257] A DNA sequence (GBSx1394) was identified in S. agalactiae <SEQ ID 4021> which encodes the amino acid sequence <SEQ ID 4022>. Analysis of this protein sequence reveals the following:

| Possible site: 31 | | |
|---|---|---|
| >>> Seems to have no N-terminal signal sequence | | |
| INTEGRAL | Likelihood = −11.78 | Transmembrane 284-300 (274-303) |
| INTEGRAL | Likelihood = −10.08 | Transmembrane 20-36 (16-53) |
| INTEGRAL | Likelihood = −5.52 | Transmembrane 117-133 (114-137) |
| INTEGRAL | Likelihood = −5.15 | Transmembrane 203-219 (201-225) |
| INTEGRAL | Likelihood = −3.29 | Transmembrane 183-199 (182-200) |
| INTEGRAL | Likelihood = −1.54 | Transmembrane 74-90 (73-90) |
| INTEGRAL | Likelihood = −0.48 | Transmembrane 37-53 (37-53) |

```
----- Final Results -----
  bacterial membrane --- Certainty = 0.5713 (Affirmative) <succ>
    bacterial outside --- Certainty = 0.0000 (Not Clear) <succ>
bacterial cytoplasm --- Certainty = 0.0000 (Not Clear) <succ>
```

[7258] The protein has homology with the following sequences in the GENPEPT database.

| >Gp:CAA22372 GB:AL034446 putative transmembrane protein | | |
|---|---|---|
| [Streptomyces coelicolor A3(2)] | | |
| Identities = 58/190 (30%), Positives = 96/190 (50%), Gaps = 11/190 (5%) | | |
| Query: 114 | GWS--IGFILFSISVITAYILGGLDFHSYDVSK-ATIFYVVTLLPFWLIQSGTEELLTRG | 170 |
| | GW IGF LF +VIT G Y+V ++ + L+ F + TEE++ RG | |
| Sbjct: 98 | GWGTLIGFGLFG-AVITNLFASGY----YEVDGLGSVQGAIGLVGFMAAAAATEEVVFRG | 152 |
| Query: 171 | WLLPLINHRFHLAVAIGVSSTLFGILHLVNAHVTFLSIVSI-ICSGVLMSLYMIKSGNIW | 229 |
| | L +I +A+G++ +FG++HL+N T ++I I +G +++ + N+W | |
| Sbjct: 153 | VLFRIIEEHIGTYLALGLTGLVFGLMHLLNEDATLWGALAIAIEAGFMLAAAYAATRNLW | 212 |
| Query: 230 | SVAALHGAWNFSQGNLYGIAVSGQKAGASLLHFTVKENAPDWISGGAFGIEGSLISIFVL | 289 |
| | +H WNF+ G ++ VSG LL T+ + P ++GG FG EGS+ S+ | |
| Sbjct: 213 | LTIGVHFGWNFAAGGVFSTVVSGNGDSEGLLDATM--SGPKLLTGGDFGPEGSVYSVGFG | 270 |
| Query: 290 | LAAIIYLLWL | 299 |
| | + + LWL | |
| Sbjct: 271 | VLLTLVFLWL | 280 |

[7259] No corresponding DNA sequence was identified in S. pyogenes.

[7260] Based on this analysis, it was predicted that this protein and its epitopes, could be useful antigens for vaccines or diagnostics.

### EXAMPLE 1315

[7261] A DNA sequence (GBSx1395) was identified in S. agalactiae <SEQ ID 4023> which encodes the amino acid sequence <SEQ ID 4024>. This protein is predicted to be glutamine-binding periplasmic protein/glutamine transport system perme. Analysis of this protein sequence reveals the following:

| Possible site: 20 | | |
|---|---|---|
| >>> Seems to have a cleavable N-term signal seq. | | |
| INTEGRAL | Likelihood = −8.97 | Transmembrane 532-548 (523-553) |
| INTEGRAL | Likelihood = −7.38 | Transmembrane 700-716 (696-720) |
| INTEGRAL | Likelihood = −4.57 | Transmembrane 562-578 (558-588) |
| INTEGRAL | Likelihood = −0.32 | Transmembrane 665-681 (665-681) |

```
----- Final Results -----
  bacterial membrane --- Certainty = 0.4588 (Affirmative) <succ>
    bacterial outside --- Certainty = 0.0000 (Not Clear) <succ>
bacterial cytoplasm --- Certainty = 0.0000 (Not Clear) <succ>
```

[7262] The protein has homology with the following sequences in the GENPEPT database.

| >GP:AAF16724 GB:AF141644 putative integral membrane protein | | |
|---|---|---|
| [Lactococcus lactis] | | |
| Identities = 109/195 (55%), Positives = 156/195 (79%), Gaps = 4/195 (2%) | | |
| Query: 466 | KMFNNGLASLKKSGEYDKLVKKYLSTASTSSNDKAAKPVDESTILGLISNNYKQLLSGIG | 525 |
| | +MFNNGLA+L+ +GEYDK++ KYL++ T + +AK E+T G++ NN++Q+ G+ | |
| Sbjct: 1 | EMFNNGLANLRANGEYDKIIDKYLAS-DTKTIQSSAK---ENTFFGILQNNWEQIGRGLL | 56 |
| Query: 526 | TTLSLTLISFAIAMVIGIIFGMMSVSPSNTLRTISMIFVDIVRGIPLMIVAAFIFWGIPN | 585 |
| | TL L ++SF +AM++GIIFG+ SV+PS LRTI+ I+VD+ R IPL+++ FIF+GIPN | |
| Sbjct: 57 | VTLELAVLSFILAMIVGIIFGLFSVAPSKILRTIARIYVDLNRSIPLLVLTIFIFYGIPN | 116 |
| Query: 586 | LIESITGHQSPINDFVAATIALSLNGGAYIAEIVRGGIEAVPSGQMEASRSLGISYGKTM | 645 |
| | L++ ITGHQSP+N+F A IAL+LN AYIAEIVR G++AVPSGQMEASRSLG++Y +M | |
| Sbjct: 117 | LLQIITGHQSPLNEFTAGVIALTLNSSAYIAEIVRSGVQAVPSGQMEASRSLGVTYLTSM | 176 |
| Query: 646 | QKVILPQAVRLMLPN | 660 |
| | +KVILPQA+++ +P+ | |
| Sbjct: 177 | RKVILPQAIKITIPS | 191 |

[7263] There is also homology to SEQ ID 1198.

[7264] A further related DNA sequence was identified in S. pyogenes <SEQ ID 9071> which encodes amino acid sequence <SEQ ID 9072>. Analysis of this protein sequence reveals the following:

```
Possible site: 21
>>> May be a lipoprotein
----- Final Results -----
  bacterial membrane --- Certainty = 0.0000 (Not Clear) <succ>
    bacterial outside --- Certainty = 0.0000 (Not Clear) <succ>
bacterial cytoplasm --- Certainty = 0.0000 (Not Clear) <succ>
```

[7265] An alignment of the GAS and GBS sequences follows:

| Score = 80.8 bits (196), Expect = 2e − 17 | | |
|---|---|---|
| Identities = 64/233 (27%), Positives = 113/233 (48%), Gaps = 13/233 (5%) | | |
| Query: 34 | IKKTRKLVVAVSPDYAPFEFKALVNGKDTIVGADVQLAQAIADELDVDLELSPMSFDNVL | 93 |
| | +K + K+V S +APFE++ NGK G D++L + IA + L++S FD L | |
| Sbjct: 268 | VKPSYKIVSDSS--FAPFEYQ---NGKGKYTGFDMELIKKIAKQQGFKLDISNPGFDAAL | 322 |
| Query: 94 | SSLQTGKADLAISGISHTKERAKVYDFSIPYYQAENAIVMRASDAKVTKNISDLNGKKVA | 153 |
| | +++Q+G+AD I+G + T+ R K++DFS PYY +++++ K+ DL GK V | |
| Sbjct: 323 | NAVQSGQADGVIAGATITEARQKIFDFSDPYY--TSSVILAVKKGSNVKSYQDLKGKTVG | 380 |
| Query: 154 | AQKGSIEEGLVKIQLPKANLISLTAMGEA---INELKAGQVYAVTLEAPVAAGFLAQHKD | 210 |
| | A+ G+ + K N + A EA + + +G + A+ + V A + Q + | |
| Sbjct: 381 | AKNGTASYTWLSDHADKYN-YHVKAFDEASTMYDSMNSGSIDALMDDEAVLAYAINQGRK | 439 |
| Query: 211 | LALAPFSLKTSDGDAKAVALPKNSGDLTKAVNKVIAKLDEQERYKSFIAETIA | 263 |
| | P + S GD + +L K N +A L + Y + + ++ | |
| Sbjct: 440 | FE-TPIKGEKS-GDIGFAVKKGANPELIKMFNNGLASLKKSGEYDKLVKKYLS | 490 |
| Score = 74.5 bits (180), Expect = 1e − 15 | | |
| Identities = 59/215 (27%), Positives = 102/215 (47%), Gaps = 12/215 (5%) | | |
| Query: 48 | YAPFEFKALVNGKDTIVGADVQLAQAIADELDVDLELSPMSFDNVLSSLQTGKADLAISG | 107 |
| | YAPFEFK + T G DV + +A ++ ++ FD ++++Q+G+AD ++G | |
| Sbjct: 36 | YAPFEFK---DSDQTYKGIDVDIVNEVAKRAGWNVNMTYPGFDAAVNAVQSGQADALMAG | 92 |
| Query: 108 | ISHTKERARVYDFSIPYYQAENAIVMRASDAKVTKNISDLNGKKVAAQKGSIEEGLVKIQ | 167 |
| | + T+ R KV++FS YY + I+ ++ KVT N L GK V + G+ + ++ | |
| Sbjct: 93 | TTVTEARKKVFNFSDTYYDT-SVILYTKNNNKVT-NYKQLKGKVVGVKNGTAAQSFLEEN | 150 |
| Query: 168 | LPKANLISLTAMGEAI--NELKAGQVYAVTLEAPVAAGFLAQHKDLALAPFSLKTSDGDA | 225 |
| | K T + N L +G +YA + PV + Q K A+ +++ + | |
| Sbjct: 151 | KSKYGYKVKTFDTSDLMNNSLDSGSIYAAMDDQPVVQFAINQGKAYAI---NMEGEAVGS | 207 |
| Query: 226 | KAVALPKNSG--DLTKAVNKVIAKLDEQERYKSFI | 258 |
| | A A+ K SG +L K N A++ Y + | |
| Sbjct: 208 | FAFAVKKGSGHDNLIKEFNTAFAQMKSDGTYNDIM | 242 |

[7266] SEQ ID 4024 (GBS154) was expressed in E. coli as a His-fusion product. The purified protein is shown in FIG. 199, lane 6.

[7267] Based on this analysis, it was predicted that these proteins and their epitopes could be useful antigens for vaccines or diagnostics.

### EXAMPLE 1316

[7268] A DNA sequence (GBSx1396) was identified in S. agalactiae <SEQ ID 4025> which encodes the amino acid sequence <SEQ ID 4026>. This protein is predicted to be amino acid ABC transporter, ATP-binding protein (glnQ). Analysis of this protein sequence reveals the following:

```
Possible site: 60
>>> Seems to have no N-terminal signal sequence
----- Final Results -----
bacterial cytoplasm --- Certainty = 0.4183 (Affirmative) <succ>
  bacterial membrane --- Certainty = 0.0000 (Not Clear) <succ>
    bacterial outside --- Certainty = 0.0000 (Not Clear) <succ>
```

[7269] The protein has homology with the following sequences in the GENPEPT database.

| >GP:AAB90561 GB:AE001058 glutamine ABC transporter, ATP-binding | | |
|---|---|---|
| protein (glnQ) [Archaeoglobus fulgidus] | | |
| Identities = 147/240 (61%), Positives = 192/240 (79%) | | |
| Query: 5 | KIDVQDLHKSYGQNEVLKGIDAKFYEGDVVCIIGPSGSGKSTFLRTLNLLESITSGKVVV | 64 |
| | ++++ DLHK +G+ EVLKG+ K +G+VV IIGPSGSGKST LR +N LE TSGK+++ | |
| Sbjct: 3 | QLEIIDLHKRFGELEVLKGVTMKVEKGEVVVIIGPSGSGKSTLLRCINRLEEPTSGKILL | 62 |
| Query: 65 | DGFELSNPKTDIDKARENIGMVFQHFNLFPHMSVLENITFAPIELGKESKEAAEKHGMEL | 124 |
| | DG +++N K DI+K R+ IG+VFQ FNLFPH++ L+N+T API++ K SK AE+ GM L | |
| Sbjct: 63 | DGVDITNSKIDINKVRQRIGIVFQQFNLFPHLTALQNVTLAPIKIKKMSKREAEELGMRL | 122 |
| Query: 125 | LEKVGLADKANAKPDSLSGGQKQRVAIARSLAMNPDILLFDEPTSALDPEMVGDVLNVMK | 184 |
| | LEKVGL DKA+ P LSGGQ+QRVAIAR+LAMNP+++LFDE TSALDPE+V +VL+VMK | |
| Sbjct: 123 | LEKVGLEDKADYYPAQLSGGQQQRVAIARALAMNPEVMLFDEVTSALDPELVKEVLDVMK | 182 |
| Query: 185 | DLAEQGMTMLIVTHEMGFARQVANRVIFTDGGRFLEDGTPEQIFDTPQHPRLQDFLNKVL | 244 |
| | LA GMTM++VTHEMGFAR+V +RVIF DGG +E+G PEQIF P+H R + FL+ + L | |
| Sbjct: 183 | QLARDGMTMVVVTHEMGFAREVGDRVIFMDGGVIVEEGKPEQIFSNPKHERTRKFLSMIL | 242 |

[7270] A related DNA sequence was identified in S. pyogenes <SEQ ID 4027> which encodes the amino acid sequence <SEQ ID 4028>. Analysis of this protein sequence reveals the following:

```
Possible site: 60
>>> Seems to have no N-terminal signal sequence
----- Final Results -----
bacterial cytoplasm --- Certainty = 0.4149 (Affirmative) <succ>
  bacterial membrane --- Certainty = 0.0000 (Not Clear) <succ>
    bacterial outside --- Certainty = 0.0000 (Not Clear) <succ>
```

[7271] The protein has homology with the following sequences in the databases:

| >GP: BAB05180 GB: AP001512 ABC transporter (substrate-binding protein) | | | |
|---|---|---|---|
| [Bacillus halodurans] | | | |
| Identities = 79/227 (34%), Positives = 126/227 (54%), Gaps = 10/227 (4%) | | | |
| Query: | 35 | KKTRKLVVAVSPDYAPFEFKALVNGKDTIVGADVQLAQAIADELDVDLELSPMSFDNVLS | 94 |
| | | +K LV+ S DY P+E + G+ IVG DV +A+ I EL +L++ M F+ ++ | |
| Sbjct: | 48 | EKKSVLVMGTSADYPPYESVDVTTGE--IVGFDVDIAEYITSELGYELKIQDMDFNGIIP | 105 |
| Query: | 95 | SLQTGKADLAISGISHTKERAKVYDFSIPYYQAENAIVMRASDAKVTKNISDLNGKKVAA | 154 |
| | | +LQ G+ D A+SG++ T+ER K DFS YY A+N +V + D ++ DL GK V | |
| Sbjct: | 106 | ALQAGRVDFALSGMTPTEERKKSVDFSDVYYDAQNLVVFKEEDG--LSSVEDLAGKTVGV | 163 |
| Query: | 155 | QKGSI-EEGLVKIQ--LPKANLISLTAMGEAINELKAGQVYAVTLEAPVAAGFLAQHKDL | 211 |
| | | Q SI EE V++Q L + + + E + EL AG+V A+ +E VAAG L + | |
| Sbjct: | 164 | QLASIQEEAAVELQEELDGLTIETRNRVPELVQELLAGRVDALIIEDTVAAGHLEANP-- | 221 |
| Query: | 212 | ALAPFSLKTSDGDAKAVALPKNSGDLTKAVNKVIAKLDEQERYKSFI | 258 |
| | | L F++++ A+A PK+S +LT+ N+ + ++ E + I | |
| Sbjct: | 222 | GLVRFAIESEGETGSAIAFPKDS-ELTEPFNEKLQEMMEDGTMEELI | 267 |

[7272] An alignment of the GAS and GBS proteins is shown below.

| Identities = 223/246 (90%), Positives = 238/246 (96%) | | | |
|---|---|---|---|
| Query: | 1 | MAELKIDVQDLHKSYGQNEVLKGIDAKFYEGDVVCIIGPSGSGKSTFLRTLNLLESITSG | 60 |
| | | M ELKIDVQDLHKSYGQNEVLKGIDAKFYEGDVVCIIGPSGSGKSTFLRTLNLLE+ITSG | |
| Sbjct: | 1 | MTELKIDVQDLHKSYGQNEVLKGIDAKFYEGDVVCIIGPSGSGKSTFLRTLNLLETITSG | 60 |
| Query: | 61 | KVVVDGFELSNPKTDIDKARENIGMVFQHFNLFPHMSVLENITFAPIELGKESKEAAEKH | 120 |
| | | KV+VDGFELS+PKT+IDKARENIGMVFQHFNLFPHM+VLENI FAP+ELGKESKE A+KH | |
| Sbjct: | 61 | KVMVDGFELSDPKTNIDKARENIGMVFQHFNLFPHMTVLENIIFAPVELGKESKEVAKKH | 120 |
| Query: | 121 | GMELLEKVGLADKANAKPDSLSGGQKQRVAIARSLAMNPDILLFDEPTSALDPEMVGDVL | 180 |
| | | GM LLEKVGL+DKA+A P SLSGGQKQRVAIARSLAMNPDI+LFDEPTSALDPEMVGDVL | |
| Sbjct: | 121 | GMALLEKVGLSDKADAFPGSLSGGQKQRVAIARSLAMNPDIMLFDEPTSALDPEMVGDVL | 180 |
| Query: | 181 | NVMKDLAEQGMTMLIVTHEMGFARQVANRVIFTDGGRFLEDGTPEQIFDTPQHPRLQDFL | 240 |
| | | NVMKDLAEQGMTMLIVTHEMGFARQVANRVIFTDGG+FLEDGTPE+IFD P+HPRL +FL | |
| Sbjct: | 181 | NVMKDLAEQGMTMLIVTHEMGFARQVANRVIFTDGGQFLEDGTPEEIFDHPKHPRLIEFL | 240 |
| Query: | 241 | NKVLNV | 246 |
| | | +KVLNV | |
| Sbjct: | 241 | DKVLNV | 246 |

[7273] Based on this analysis, it was predicted that these proteins and their epitopes could be useful antigens for vaccines or diagnostics.

### EXAMPLE 1317

[7274] A DNA sequence (GBSx1397) was identified in S. agalactiae <SEQ ID 4029> which encodes the amino acid sequence <SEQ ID 4030>. Analysis of this protein sequence reveals the following:

```
Possible site: 18
>>> Seems to have no N-terminal signal sequence
----- Final Results -----
                            bacterial cytoplasm --- Certainty = 0.2311(Affirmative) < succ>
                              bacterial membrane --- Certainty = 0.0000(Not Clear) < succ>
                                bacterial outside --- Certainty = 0.0000(Not Clear) < succ>
```

[7275] The protein has no significant homology with any sequences in the GENPEPT database.

[7276] A related DNA sequence was identified in S. pyogenes <SEQ ID 4031> which encodes the amino acid sequence <SEQ ID 4032>. Analysis of this protein sequence reveals the following:

```
Possible site: 28
>>> Seems to have no N-terminal signal sequence
----- Final Results -----
                            bacterial cytoplasm --- Certainty = 0.2702(Affirmative) < succ>
                              bacterial membrane --- Certainty = 0.0000(Not Clear) < succ>
                                bacterial outside --- Certainty = 0.0000(Not Clear) < succ>
```

[7277] An alignment of the GAS and GBS proteins is shown below.

| Identities = 45/51 (88%), Positives = 49/51 (95%) | | | |
|---|---|---|---|
| Query: | 1 | MGDKPISFRDKDGNFVSAADVWNAEKLEELFNTLNPNRKLRLEREKLAKEK | 51 |
| | | MGDKPISF+DKDGNFVSAADVWNAEKLEELFN LNPNR+LRLEREKL K++ | |
| Sbjct: | 11 | MGDKPISFKDKDGNFVSAADVWNAEKLEELFNLLNPNRRLRLEREKLKKDE | 61 |

[7278] Based on this analysis, it was predicted that these proteins and their epitopes could be useful antigens for vaccines or diagnostics.

### EXAMPLE 1318

[7279] A DNA sequence (GBSx1398) was identified in S. agalactiae <SEQ ID 4033> which encodes the amino acid sequence <SEQ ID 4034>. This protein is predicted to be spo0b-associated GTP-binding protein (obg). Analysis of this protein sequence reveals the following:

```
Possible site: 14
>>> Seems to have no N-terminal signal sequence
----- Final Results -----
                            bacterial cytoplasm --- Certainty = 0.2967(Affirmative) < succ>
                              bacterial membrane --- Certainty = 0.0000(Not Clear) < succ>
                                bacterial outside --- Certainty = 0.0000(Not Clear) < succ>
```

[7280] The protein has homology with the following sequences in the GENPEPT database.

| >GP: CAB14752 GB: Z99118 GTPase activity [Bacillus subtilis] | | | |
|---|---|---|---|
| Identities = 297/435 (68%), Positives = 345/435 (79%), Gaps = 7/435 (1%) | | | |
| Query: | 3 | MFLDTAKISVKAGRGGDGMVAFRREKYVPNGGPWGGDGGKGGSVIFKVNEGLRTLMDFRY | 62 |
| | | MF+D K+ VK G GG+GMVAFRREKYVP GGP GGDGGKGG V+F+V+EGLRTLMDFRY | |
| Sbjct: | 1 | MFVDQVKVYVKGGDGGNGMVAFRREKYVPKGGPAGGDGGKGGDVVFEVDEGLRTLMDFRY | 60 |
| Query: | 63 | NRNFKAKAGEKGMTKGMHGRGAEDLIVSLPPGTTVRDATTGKVITDLVEHDQEFVVARGG | 122 |
| | | ++FKA GE GM+K HGR A+D+++ +PPGT V D T +VI DL EH Q V+ARGG | |
| Sbjct: | 61 | KKHFKAIRGEHGMSKNQHGRNADDMVIKVPPGTVVTDDDTKQVIADLTEHGQRAVIARGG | 120 |
| Query: | 123 | RGGRGNIRFATPRNPAPEIAENGEPGEERELQLELKILADVGLVGFPSVGKSTLLSVVSA | 182 |
| | | RGGRGN RFATP NPAP+++ENGEPG+ER + LELK+LADVGLVGFPSVGKSTLLSVVS+ | |
| Sbjct: | 121 | RGGRGNSRFATPANPAPQLSENGEPGKERYIVLELKVLADVGLVGFPSVGKSTLLSVVSS | 180 |
| Query: | 183 | AKPKIGAYHFTTIVPNLGMVRTKSGDSFAMADLPGLIEGASQGVGLGTQFLRHIERTRVI | 242 |
| | | AKPKI YHFTT+VPNLGMV T G SF MADLPGLIEGA QGVGLG QFLRHIERTRVI | |
| Sbjct: | 181 | AKPKIADYHFTTLVPNLGMVETDDGRSFVMADLPGLIEGAHQGVGLGHQFLRHIERTRVI | 240 |
| Query: | 243 | LHVIDMSASEGRDPYDDYVSINNELETYNLRLMERPQIIVANKMDMPDSEENLAAFKEKL | 302 |
| | | +HVIDMS EGRDPYDDY++IN EL YNLRL ERPQIIVANKMDMP++ ENL AFKEKL | |
| Sbjct: | 241 | VHVIDMSGLEGRDPYDDYLTINQELSEYNLRLTERPQIIVANKMDMPEAAENLEAFKEKL | 300 |
| Query: | 303 | AANYDEFDDMPMIFPISSLAHQGLENLMDATAELLANTEEFLLYDETDMQEDEAYYGFNE | 362 |
| | | DD P +FPIS++ +GL L+ A L NT EF LYDE ++ ++ Y | |
| Sbjct: | 301 | T------DDYP-VFPISAVTREGLRELLFEVANQLENTPEFPLYDEEELTQNRVMYTMEN | 353 |
| Query: | 363 | DERPFEITRDDDATWVLYGDKLEKLFVMTNMERDESIMKFARQLRGMGVDEALRERGAKD | 422 |
| | | +E PF ITRD D +VL GD LE+LF MT+ RDES+ +FARQ+RGMGVDEALRERGAKD | |
| Sbjct: | 354 | EEVPFNITRDPDGVFVLSGDSLERLFKMTDFSRDESVKRFARQMRGMGVDEALRERGAKD | 413 |
| Query: | 423 | GDIVRIGNFEFEFVD | 437 |
| | | GDI+R+ FEFEF+D | |
| Sbjct: | 414 | GDIIRLLEFEFEFID | 428 |

[7281] A related DNA sequence was identified in S. pyogenes <SEQ ID 4035> which encodes the amino acid sequence <SEQ ID 4036>. Analysis of this protein sequence reveals the following:

```
Possible site: 14
>>> Seems to have no N-terminal signal sequence
----- Final Results -----
                            bacterial cytoplasm --- Certainty = 0.2588(Affirmative) < succ>
                              bacterial membrane --- Certainty = 0.0000(Not Clear) < succ>
                                bacterial outside --- Certainty = 0.0000(Not Clear) < succ>
```

[7282] An alignment of the GAS and GBS proteins is shown below.

| Identities = 394/437 (90%), Positives = 421/437 (96%) | | | |
|---|---|---|---|
| Query: | 1 | MSMFLDTAKISVKAGRGGDGMVAFRREKYVPNGGPWGGDGGKGGSVIFKVNEGLRTLMDF | 60 |
| | | MSMFLDTAKISV+AGRGGDGMVAFRREKYVPNGGPWGGDGGKGGSVIF+V+EGLRTLMDF | |
| Sbjct: | 1 | MSMFLDTAKISVQAGRGGDGMVAFRREKYVPNGGPWGGDGGKGGSVIFRVDEGLRTLMDF | 60 |
| Query: | 61 | RYNRNFKAKAGEKGMTKGMHGRGAEDLIVSLPPGTTVRDATTGKVITDLVEHDQEFVVAR | 120 |
| | | RYNR FKAK+GEKGMTKGMHGRGAEDLIV +P GTTVRDA TGKVITDLVEH QE V+A+ | |
| Sbjct: | 61 | RYNRKFKAKSGEKGMTKGMHGRGAEDLIVFVPQGTTVRDAETGKVITDLVEHGQEVVIAK | 120 |
| Query: | 121 | GGRGGRGNIRFATPRNPAPEIAENGEPGEERELQLELKILADVGLVGFPSVGKSTLLSVV | 180 |
| | | GGRGGRGNIRFATPRNPAPEIAENGEPGEER+L+LELKILADVGLVGFPSVGKSTLLSVV | |
| Sbjct: | 121 | GGRGGRGNIRFATPRNPAPEIAENGEPGEERQLELELKILADVGLVGFPSVGKSTLLSVV | 180 |
| Query: | 181 | SAAKPKIGAYHFTTIVPNLGMVRTKSGDSFAMADLPGLIEGASQGVGLGTQFLRHIERTR | 240 |
| | | S+AKPKIGAYHFTTIVPNLGMVRTKSGDSFAMADLPGLIEGASQGVGLGTQFLRHIERTR | |
| Sbjct: | 181 | SSAKPKIGAYHFTTIVPNLGMVRTKSGDSFAMADLPGLIEGASQGVGLGTQFLRHIERTR | 240 |
| Query: | 241 | VILHVIDMSASEGRDPYDDYVSINNELETYNLRLMERPQIIVANKMDMPDSEENLAAFKE | 300 |
| | | VILHVIDMSASEGRDPY+DYVSINNELETYNLRLMERPQIIVANKMD+P+++ENL AFK+ | |
| Sbjct: | 241 | VILHVIDMSASEGRDPYEDYVSINNELETYNLRLMERPQIIVANKMDIPEAQENLKAFKK | 300 |
| Query: | 301 | KLAANYDEFDDMPMIFPISSLAHQGLENLMDATAELLANTEEFLLYDETDMQEDEAYYGF | 360 |
| | | KLAA YDEFDD+PMIFPISSLAHQGLENL++ATAELLA T+EFLLYDE+D+ ++EAYYGF | |
| Sbjct: | 301 | KLAAQYDEFDDLPMIFPISSLAHQGLENLLEATAELLAKTDEFLLYDESDLVDEEAYYGF | 360 |
| Query: | 361 | NEDERPFEITRDDDATWVLYGDKLEKLFVMTNMERDESIMKFARQLRGMGVDEALRERGA | 420 |
| | | E E+ FEITRDDDATWVL G+KLE+LFVMTNMERDESIMKFARQLRGMGVDEALRERGA | |
| Sbjct: | 361 | AETEKDFEITRDDDATWVLSGEKLERLFVMTNMERDESIMKFARQLRGMGVDEALRERGA | 420 |
| Query: | 421 | KDGDIVRIGNFEFEFVD | 437 |
| | | KDGD VRIG FEFEFVD | |
| Sbjct: | 421 | KDGDPVRIGKFEFEFVD | 437 |

[7283] Based on this analysis, it was predicted that these proteins and their epitopes could be useful antigens for vaccines or diagnostics.

### EXAMPLE 1319

[7284] A DNA sequence (GBSx1399) was identified in S. agalactiae <SEQ ID 4037> which encodes the amino acid sequence <SEQ ID 4038>. Analysis of this protein sequence reveals the following:

```
Possible site: 36
>>> Seems to have a cleavable N-term signal seq.
----- Final Results -----
                                bacterial outside --- Certainty = 0.3000(Affirmative) < succ>
                              bacterial membrane --- Certainty = 0.0000(Not Clear) < succ>
                            bacterial cytoplasm --- Certainty = 0.0000(Not Clear) < succ>
```

[7285] The protein has no significant homology with any sequences in the GENPEPT database.

[7286] A related DNA sequence was identified in S. pyogenes <SEQ ID 4039> which encodes the amino acid sequence <SEQ ID 4040>. Analysis of this protein sequence reveals the following:

```
Possible site: 39
>>> Seems to have a cleavable N-term signal seq.
----- Final Results -----
                                bacterial outside --- Certainty = 0.3000(Affirmative) < succ>
                              bacterial membrane --- Certainty = 0.0000(Not Clear) < succ>
                            bacterial cytoplasm --- Certainty = 0.0000(Not Clear) < succ>
```

[7287] An alignment of the GAS and GBS proteins is shown below.

| Identities = 30/42 (71%), Positives = 37/42 (87%) | | | |
|---|---|---|---|
| Query: | 1 | MAFGDNGQRKKTGFEKLTLFVVILMVLVTVGGLVFGAISAIM | 42 |
| | | +AFG+NG RKKT FEK+T+FVVILMVLVTVGGL+ A+S +M | |
| Sbjct: | 1 | VAFGENGPRKKTTFEKVTMFVVILMVLVTVGGLIASALSVLM | 42 |

[7288] Based on this analysis, it was predicted that these proteins and their epitopes could be useful antigens for vaccines or diagnostics.

### EXAMPLE 1320

[7289] A DNA sequence (GBSx1401) was identified in S. agalactiae <SEQ ID 4041> which encodes the amino acid sequence <SEQ ID 4042>. Analysis of this protein sequence reveals the following:

```
Possible site: 48
>>> Seems to have no N-terminal signal sequence
----- Final Results -----
                            bacterial cytoplasm --- Certainty = 0.2484(Affirmative) < succ>
                              bacterial membrane --- Certainty = 0.0000(Not Clear) < succ>
                                bacterial outside --- Certainty = 0.0000(Not Clear) < succ>
```

[7290] The protein has homology with the following sequences in the GENPEPT database.

| >GP: AAD28348 GB: AF102860 aminopeptidase PepS [Streptococcus | | | |
|---|---|---|---|
| hermophilus] | | | |
| Identities = 247/413 (59%), Positives = 313/413 (74%) | | | |
| Query: | 1 | MVLQDFDNLLKKYAQLIISKGLNVQKGHTLALTIDVEQVHLARLLTEAAYEKGASEVIVD | 60 |
| | | MVL +F L+KYA+L+++ G+NVQ GHT+AL+IDVEQ LA LL + AY GA+EVIV | |
| Sbjct: | 1 | MVLPNFKENLEKYAKLLVTNGINVQPGHTVALSIDVEQAELAHLLVKEAYALGAAEVIVQ | 60 |
| Query: | 61 | YTDDFITRQRLLHASDEVLTNVPQYTVDKSLALLNKKASRLVVKSSNPNAFATVDPKRLS | 120 |
| | | ++DD I R+R LHA + VP Y + LL KKASRL V+SS+P+AF V P+RLS | |
| Sbjct: | 61 | WSDDTINRERFLHAEMNRIEEVPAYKKAEMEYLLEKKASRLGVRSSDPDAFNGVAPERLS | 120 |
| Query: | 121 | ETTRATAIALEEQSRAIQANKVSWNVAAAAGREWAALVFPELKTSDQQVDALWDTIFKLN | 180 |
| | | +A A + A Q+NKVSW VAAAAG+EWA VFP + ++ VD LW+ IFK | |
| Sbjct: | 121 | AHAKAIGAAFKPMQVATQSNKVSWTVAAAAGKEWAKKVFPNASSDEEAVDLLWNQIFKTC | 180 |
| Query: | 181 | RIYEDDPIAAWDAHEAKLLEKATRLNQEQFDALHYTAPGTDLTLGMPKNHIWEAAGSLNA | 240 |
| | | R+YE DP+ AW H +L KA LN+ QF ALHYTAPGTDLTLG+PKNH+WE+AG++NA | |
| Sbjct: | 181 | RVYEKDPVRAWKEHADRLDAKARILNEAQFSALHYTAPGTDLTLGLPKNHVWESAGAINA | 240 |
| Query: | 241 | QGETFIANMPTEEIFSAPDYRRADGYVTSTKPLSYAGVIIENMTFTFKDGKIINVTAEKG | 300 |
| | | QGE+F+ NMPTEE+F+APD+RRA GYV+STKPLSY G IIE + TFKDG+I+++TA++G | |
| Sbjct: | 241 | QGESFLPNMPTEEVFTAPDFRRAYGYVSSTKPLSYNGNIIEGIKVTFKDGEIVDITADQG | 300 |
| Query: | 301 | QETVQRLIEENDGARSLGEVALVPHKTPISLSGLIFFNTLFDENASNHLAIGTAYAFNVE | 360 |
| | | ++ ++ L+ N+GAR+LGE ALVP +PIS SG+ FFNTLFDENASNHLAIG AYA +VE | |
| Sbjct: | 301 | EKVMKNLVFNNNGARALGECALVPDSSPISQSGITFFNTLFDENASNHLAIGAAYATSVE | 360 |
| Query: | 361 | GGTEMTSQELDEAGLNRSSTHVDFMIGSEQMDIDGIRADGTAVPIFRNGEWAI | 413 |
| | | GG +MT +EL AGLNRS HVDF+IGS QM+IDGI DG+ VPIFRNG+W I | |
| Sbjct: | 361 | GGADMTEEELKAAGLNRSDVHVDFIIGSNQMNIDGIHHDGSRVPIFRNGDWVI | 413 |

[7291] No corresponding DNA sequence was identified in S. pyogenes.

[7292] Based on this analysis, it was predicted that this protein and its epitopes, could be useful antigens for vaccines or diagnostics.

### EXAMPLE 1321

[7293] A DNA sequence (GBSx1403) was identified in S. agalactiae <SEQ ID 4045> which encodes the amino acid sequence <SEQ ID 4046>. Analysis of this protein sequence reveals the following:

| Possible site: 33 | | | | |
|---|---|---|---|---|
| >>> Seems to have a cleavable N-term signal seq. | | | | |
| | INTEGRAL | Likelihood = −7.91 | Transmembrane | 661-677 (657-680) |

```
----- Final Results -----
                              bacterial membrane --- Certainty = 0.4163(Affirmative) < succ>
                                bacterial outside --- Certainty = 0.0000(Not Clear) < succ>
                            bacterial cytoplasm --- Certainty = 0.0000(Not Clear) < succ>
```

[7294] A related GBS nucleic acid sequence <SEQ ID 8787> which encodes amino acid sequence <SEQ ID 8788> was also identified. Analysis of this protein sequence reveals the following:

| Lipop: Possible site: −1 Crend: 7 | | | | |
|---|---|---|---|---|
| McG: Discrim Score: 6.47 | | | | |
| GvH: Signal Score (−7.5): 1.01 | | | | |
| Possible site: 29 | | | | |
| >>> Seems to have a cleavable N-term signal seq. | | | | |
| ALOM program count: 1 value: −7.91 threshold: 0.0 | | | | |
| | INTEGRAL | Likelihood = −7.91 | Transmembrane | 658-673 (657-680) |
| | PERIPHERAL | Likelihood = 4.35 | 555 | |

```
modified ALOM score: 2.08
*** Reasoning Step: 3
----- Final Results -----
                              bacterial membrane --- Certainty = 0.4163(Affirmative) < succ>
                                bacterial outside --- Certainty = 0.0000(Not Clear) < succ>
                            bacterial cytoplasm --- Certainty= 0.0000(Not Clear) < succ>
LPXTG motif: 647-651
```

[7295] The protein has homology with the following sequences in the GENPEPT database.

| >GP: AAF09821 GB: AE001885 6-aminohexanoate-cyclic-dimer hydrolase | | | |
|---|---|---|---|
| [Deinococcus radiodurans] | | | |
| Identities = 150/497 (30%), Positives = 233/497 (46%), Gaps = 32/497 (6%) | | | |
| Query: | 110 | LTEETYKQKDGQDLANMVRSGQVTSEELVNMAYDIIAKENPSLNAVITTRRQEAIEEARK | 169 |
| | | LT Y + D DLA + R G++++E++ A N +LNAV+ + + +AR | |
| Sbjct: | 45 | LTFAEYDRLDALDLAQLFRRGELSAEDMCTAAIHRAQVVNVALNAVVYPLYDQGLAQARA | 104 |
| Query: | 170 | L-------KDTNQPFLGVPLLVKGLGHSIKGGETNNGLIYADGKISTFDSSYVKKYKDLG | 222 |
| | | + PF GVP LVK G + G G +I +D V++++ G | |
| Sbjct: | 105 | TDAARARGEQATGPFAGVPFLVKDFGSRLAGVPHTGGTRAYRDQIPEWDDELVRRWQAAG | 164 |
| Query: | 223 | FIILGQTNFPEYGWRNITDSKLYGLTHNPWDLAHNAGGSSGGSAAAIASGMTPIASGSDA | 282 |
| | | + LG+TN PE+ +T+ +L+G T NPWDL GGSSGGSA+A+A+G+ P+A D | |
| Sbjct: | 165 | LLPLGKTNTPEFALMGVTEPELHGPTRNPWDLGRTPGGSSGGSASAVAAGIVPLAGAGDG | 224 |
| Query: | 283 | GGSIRIPSSWTGLVGLKPTRGLV---SNEKPDSYSTAVHFPLTKSSRDAETLLTYLKKSD | 339 |
| | | GGSIRIP+S GL GLKP+RG V AV LT+S RD+ LL + D | |
| Sbjct: | 225 | GGSIRIPASCCGLFGLKPSRGRVPCGDGVGEPWQGAAVEHVLTRSVRDSAALLDLEQGPD | 284 |
| Query: | 340 | QTLVSV-------------NDLKSLPIAYTLKSPMGTEVSQDAKNAIMDNVTFLRKQGFK | 386 |
| | | + L I ++ P+G V + A+ L G + | |
| Sbjct: | 285 | AGAALFLPSPERPYSEEVGREPGRLRIGFSTAHPLGRSVHPECVAAVQGAARLLESLGHE | 344 |
| Query: | 387 | VTEIDLPIDGRALMRDYSTLAIGMGGAFSTIEKDLKKHGFTKEDVDPITWAVHVIYQNSD | 446 |
| | | V E+ LP DG AL + + L G GA +D DV+ +TW + + ++ | |
| Sbjct: | 345 | VEEVALPWDGPALAQAFLMLYFGETGASLAALRDTLGRPARASDVEAVTWLLGQLGRSYS | 404 |
| Query: | 447 | KAELKKSIMEAQKHMDDYRKAMEKLHKQFPIFLSPTTASLAPLNTDFY----VTEEDKRA | 502 |
| | | A+ A+ + + +AM + H+ + + L+P A+ PL V RA | |
| Sbjct: | 405 | AAD----FAAARASWNVHARAMGRFHQNYDLLLTPVLAT-PPLQIGELQPRGVQAALLRA | 459 |
| Query: | 503 | IYNMENLSQEERIALFNRQWEPMLRRTPFTQIANMTGLPAISIPTYLSESGLPIGTMLMA | 562 |
| | | M+ R + +L + P+TQ+AN+TG PA+S+P + + GLP+G +A | |
| Sbjct: | 460 | AQQMDVSGLLRRSGQVDALATDILEKMPYTQLANLTGQPAMSVPLHWTADGLPVGVQFVA | 519 |
| Query: | 563 | GANYDMVLIKFATFFEK | 579 |
| | | + VL++ A E+ | |
| Sbjct: | 520 | PLAREDVLLRLAGQLEQ | 536 |

[7296] There is also homology to SEQ ID 4048.

[7297] SEQ ID 8788 (GBS173) was expressed in E. coli as a GST-fusion product. SDS-PAGE analysis of total cell extract is shown in FIG. 41 (lane 5; MW 96.8 kDa).

[7298] The GBS173-GST fusion product was purified (FIG. 116A; see also FIG. 201, lane 7) and used to immunise mice (lane 1+2 product; 15 μg/mouse). The resulting antiserum was used for Western blot, FACS, and in the in vivo passive protection assay (Table III). These tests confirm that the protein is immunoaccessible on GBS bacteria and that it is an effective protective immunogen.

[7299] Based on this analysis, it was predicted that these proteins and their epitopes could be useful antigens for vaccines or diagnostics.

### EXAMPLE 1322

[7300] A DNA sequence (GBSx1404) was identified in S. agalactiae <SEQ ID 4049> which encodes the amino acid sequence <SEQ ID 4050>. This protein is predicted to be ribosomal large subunit pseudouridine synthase B (rsuA). Analysis of this protein sequence reveals the following:

```
Possible site: 41
>>> Seems to have no N-terminal signal sequence
----- Final Results -----
                            bacterial cytoplasm --- Certainty = 0.3674(Affirmative) < succ>
                              bacterial membrane --- Certainty = 0.0000(Not Clear) < succ>
                                bacterial outside --- Certainty = 0.0000(Not Clear) < succ>
```

[7301] The protein has homology with the following sequences in the GENPEPT database.

| >GP: BAB06992 GB: AP001518 16S pseudouridylate synthase | | | |
|---|---|---|---|
| [Bacillus halodurans] | | | |
| Identities = 110/236 (46%), Positives = 149/236 (62%), Gaps = 4/236 (1%) | | | |
| Query: | 1 | MRLDKFLVECGLGSRTQVKLILKKKQISVNGNSETSPKVQVDEYRDEIKYNGTLVSYEKF | 60 |
| | | MR+DKFL G GSR VK +LK + V G P V+ + I G V Y+ + | |
| Sbjct: | 1 | MRIDKFLANMGFGSRKDVKKLLKTGAVRVQGQPIKDPSTHVEPESESITVYGEEVEYKPY | 60 |
| Query: | 61 | VYYMLHKPKGVISATDDPSHKTVLDLLDKTARDKAVFPVGRLDIDTTGLLLLTNNGELAH | 120 |
| | | VY M++KPKGVI AT+D H+TV+DLL + R PVGRLD DT GLLL+TN+G+ H | |
| Sbjct: | 61 | VYLMMNKPKGVICATEDLEHETVIDLLGEEERHYEPSPVGRLDKDTVGLLLITNDGKFNH | 120 |
| Query: | 121 | KMLSPKKHVDKCYEVKISGIMTEDDILAFDKGIILKD-FTCLPALLEIVEVNQVKKQSLV | 179 |
| | | ++SPK HV K Y + G +TE+D+ AF G++L D + PA L I+E +S + | |
| Sbjct: | 121 | WLMSPKHHVPKTYRALVEGHVTEEDVGAFSHGVVLDDGYVTKPATLHILEAG---ARSHI | 177 |
| Query: | 180 | KITIKEGKFHQVKRMVAACGKEVLELKRLRMGNLQLDKQLESGQWRRLTIKEIEKL | 235 |
| | | ++ + EGKFHQVKRM A GK VLEL+R+++GNL LD +L G++R LT +EI L | |
| Sbjct: | 178 | ELILTEGKFHQVKRMFQAVGKRVLELERIKIGNLLLDPELARGEYRELTKEEIALL | 233 |

[7302] A related DNA sequence was identified in S. pyogenes <SEQ ID 4051> which encodes the amino acid sequence <SEQ ID 4052>. Analysis of this protein sequence reveals the following:

```
Possible Site: 40
>>> Seems to have no N-terminal signal sequence
----- Final Results -----
                            bacterial cytoplasm --- Certainty = 0.0152(Affirmative) < succ>
                              bacterial membrane --- Certainty = 0.0000(Not Clear) < succ>
                                bacterial outside --- Certainty = 0.0000(Not Clear) < succ>
```

[7303] The protein has homology with the following sequences in the databases:

| >GP: AAF09821 GB: AE001885 6-aminohexanoate-cyclic-dimer hydrolase | | | |
|---|---|---|---|
| [Deinococcus radiodurans] | | | |
| Identities = 177/485 (36%), Positives = 259/485 (52%), Gaps = 13/485 (2%) | | | |
| Query: | 5 | DATAMAIAVQTGQTTPLELVTQAIYKAKKLNPTLNAITSERFEAALEEAKQRDFSGL--- | 61 |
| | | DA +A + G+ + ++ T AI++A+ +N LNA+ ++ L +A+ D + | |
| Sbjct: | 54 | DALDLAQLFRRGELSAEDMCTAAIHRAQVVNVALNAVVYPLYDQGLAQARATDAARARGE | 113 |
| Query: | 62 | ----PFAGVPLFLKDLGQELKGHSSTSGSRLFKEYQATKTDLFVKRLEALGFIILGRSNT | 117 |
| | | PFAGVP +KD G L G T G+R +++ D V+R +A G + LG++NT | |
| Sbjct: | 114 | QATGPFAGVPFLVKDFGSRLAGVPHTGGTRAYRDQIPEWDDELVRRWQAAGLLPLGKTNT | 173 |
| Query: | 118 | PEFGFKNISDSSLHGPVNLPRDNTRNAGGSSGGAAALVSSGISALATASDGGGSIRIPAS | 177 |
| | | PEF +++ LHGP P D R GGSSGG+A+ V++GI LA A DGGGSIRIPAS | |
| Sbjct: | 174 | PEFALMGVTEPELHGPTRNPWDLGRTPGGSSGGSASAVAAGIVPLAGAGDGGGSIRIPAS | 233 |
| Query: | 178 | FNGLIGLKPSRGRMPVGPGSYRSWQGASVHFALTKSVRDTRNLLYYLQMEQMESPFPLAT | 237 |
| | | GL GLKPSRGR+P G G WQGA+V LT+SVRD+ LL Q + L + | |
| Sbjct: | 234 | CCGLFGLKPSRGRVPCGDGVGEPWQGAAVEHVLTRSVRDSAALLDLEQGPDAGAALFLPS | 293 |
| Query: | 238 | LTKDSIYQSLQRP--LTIAFYQRLSDGSPVSLDTAKALRQAVTWLREQGHQLVELEEFPV | 295 |
| | | + + + P L I F G V + A++ A L GH++ E+ P | |
| Sbjct: | 294 | PERPYSEEVGREFGRLRIGFSTAHPLGRSVHPECVAAVQGAARLLESLGHEVEEV-ALPW | 352 |
| Query: | 296 | NMTEVIRHYYIMNSVETAAMFADIEDTFGRPMTKDDMETMTWAIYQSGKDIPAWRYSQVL | 355 |
| | | + + + + ++ ET A A + DT GRP D+E +TW + Q G+ A ++ | |
| Sbjct: | 353 | DGPALAQAFLMLYFGETGASLAALRDTLGRPARASDVEAVTWLLGQLGRSYSAADFAAAR | 412 |
| Query: | 356 | QKWDTYSATMASFHETYDLLLTFTTNTPAPKHGELVP---DSKLMANLAQAEIFSSEEQF | 412 |
| | | W+ ++ M FH+ YDLLLT TP + GEL P + L+ Q ++ + | |
| Sbjct: | 413 | ASWNVHARAMGRFHQNYDLLLTPVLATPPLQIGELQPRGVQAALLRAAQQMDVSGLLRRS | 472 |
| Query: | 413 | NLVETMFGKSLAINPYTALPNLTGQPAISLPTYETKEGLSMGIQLIAAKGREDLLLGIAE | 472 |
| | | V+ + L PYT L NLTGQPA+S+P + T +GL +G+Q +A RED+LL +A | |
| Sbjct: | 473 | GQVDALATDILEKMPYTQLANLTGQPAMSVPLHWTADGLPVGVQFVAPLAREDVLLRLAG | 532 |
| Query: | 473 | QFEAA | 477 |
| | | Q E A | |
| Sbjct: | 533 | QLEQA | 537 |

[7304] An alignment of the GAS and GBS proteins is shown below.

| Identities = 151/240 (62%), Positives = 183/240 (75%) | | | |
|---|---|---|---|
| Query: | 1 | MRLDKFLVECGLGSRTQVKLILKKKQISVNGNSETSPKVQVDEYRDEIKYNGTLVSYEKF | 60 |
| | | MRLDKFLV G+G+R+QVKL+LKKK I VN ETS K +DEY+D + Y GT + YE F | |
| Sbjct: | 2 | MRLDKFLVATGVGTRSQVKLLLKKKAIFVNQKVETSAKAHIDEYKDLVTYQGTPLVYESF | 61 |
| Query: | 61 | VYYMLHKPKGVISATDDPSHKTVLDLLDKTARDKAVFPVGRLDIDTTGLLLLTNNGELAH | 120 |
| | | VYY+L+KP G +SAT D TV++LLD TAR KAVFPVGRLD DT GLLLLTNNG+LAH | |
| Sbjct: | 62 | VYYLLNKPSGYVSATQDRQQATVMELLDDTARQKAVFPVGRLDKDTRGLLLLTNNGQLAH | 121 |
| Query: | 121 | KMLSPKKHVDKCYEVKISGIMTEDDILAFDKGIILKDFTCLPALLEIVEVNQVKKQSLVK | 180 |
| | | +LSPKKHV K Y K++GIMTE D F +GI LKD CLPA LE++ + ++ SLVK | |
| Sbjct: | 122 | DLLSPKKHVTKEYLAKVAGIMTEADKDYFARGISLKDHQCLPAHLEVLASDLQQQTSLVK | 181 |
| Query: | 181 | ITIKEGKFHQVKRMVAACGKEVLELKRLRMGNLQLDKQLESGQWRRLTIKEIEKLEKYMQ | 240 |
| | | ITI+EGKFHQVKRMVAACGKEVL+L+RL MG L+LD L G++RRLT +E++ L Y Q | |
| Sbjct: | 182 | ITIQEGKFHQVKRMVAACGKEVLDLQRLSMGPLKLDPSLAEGEFRRLTPEELQSLAPYCQ | 241 |

[7305] Based on this analysis, it was predicted that these proteins and their epitopes could be useful antigens for vaccines or diagnostics.

### EXAMPLE 1323

[7306] A DNA sequence (GBSx1405) was identified in S. agalactiae <SEQ ID 4053> which encodes the amino acid sequence <SEQ ID 4054>. Analysis of this protein sequence reveals the following:

```
Possible site: 46
>>> Seems to have no N-terminal signal sequence
----- Final Results -----
                            bacterial cytoplasm --- Certainty = 0.2811(Affirmative) < succ>
                              bacterial membrane --- Certainty = 0.0000(Not Clear) < succ>
                                bacterial outside --- Certainty = 0.0000(Not Clear) < succ>
```

[7307] A related GBS nucleic acid sequence <SEQ ID 10007> which encodes amino acid sequence <SEQ ID 10008> was also identified.

[7308] The protein has homology with the following sequences in the GENPEPT database.

| >GP: AAA57350 GB: J04483 reductase [Leishmania major] | | | |
|---|---|---|---|
| Identities = 129/277 (46%), Positives = 167/277 (59%), | | | |
| Gaps = 3/277 (1%) | | | |
| Query: | 26 | TLSNTLNIPKIGFGTWQLTEGEEAYKAVTHALKVGYTHIDTAQIYGNEHSVGRAIRDSGL | 85 |
| | | TLSN + +P+ G G WQ GE AV AL GY HIDTA IY NE SVG +R SG+ | |
| Sbjct: | 10 | TLSNGVKMPQFGLGVWQSPAGEVTENAVNWALCAGYRHIDTAAIYKNEESVGAGLRASGV | 69 |
| Query: | 86 | ARESIFLTTKIWNDKHDYHLAKASIDESLQKLGVDYIDLLLIHWPNPKALRENDAWKAGN | 145 |
| | | RE +F+TTK+WN + Y A+ +ES QKLGVDYIDL LIHWP K + + K | |
| Sbjct: | 70 | PREDVFITTKLWNTEQGYESTLAAFEESRQKLGVDYIDLYLIHWPRGKDILSKEGKKY-- | 127 |
| Query: | 146 | AGTWKAMEEAYKEGKVKAIGVSNFMKHHLEALFETAEIKPMVNQIILAPGCAQEDLVRFC | 205 |
| | | +W+A E+ YKE KV+AIGVSNF HHLE + + PMVNQ+ L P Q DL FC | |
| Sbjct: | 128 | LDSWRAFEQLYKEKKVRAIGVSNFHIHHLEDVLAMCTVTPMVNQVELHPLNNQADLRAFC | 187 |
| Query: | 206 | KGNDILLEAYSPFGTGAIFENESIKAIAEKYGKSVAQVALRWSLDNGFLPLPKSATPKNI | 265 |
| | | I +EA+SP G G + N + AI KY K+ AQV LRW++ + +PKS + I | |
| Sbjct: | 188 | DAKQIKVEAWSPLGQGKLLSNPILSAIGAKYNKTAAQVILRWNIQKNLITIPKSVHRERI | 247 |
| Query: | 266 | EANLDIFDFQLNEDDIATLIQLDSGIK-PKDPDNVSF | 301 |
| | | E N DIFDF+L +D+ ++ L++ + DPD F | |
| Sbjct: | 248 | EENADIFDFELGAEDVMSIDALNTNSRYGPDPDEAQF | 284 |

[7309] A related DNA sequence was identified in S. pyogenes <SEQ ID 779> which encodes the amino acid sequence <SEQ ID 780>. Analysis of this protein sequence reveals the following:

```
Possible site: 27
>>> Seems to have no N-terminal signal sequence
----- Final Results -----
                            bacterial cytoplasm --- Certainty = 0.0980(Affirmative) < succ>
                              bacterial membrane --- Certainty = 0.0000(Not Clear) < succ>
                                bacterial outside --- Certainty = 0.0000(Not Clear) < succ>
```

[7310] An alignment of the GAS and GBS proteins is shown below.

| Identities = 155/282 (54%), Positives = 204/282 (71%), Gaps = 2/282 (0%) | | | |
|---|---|---|---|
| Query: | 20 | IVMETYTLSNTLNIPKIGFGTWQLTEGEEAYKAVTHALKVGYTHIDTAQIYGNEHSVGRA | 79 |
| | | +++ T +++ IP +GFGT+Q +GEEAY++ A+K GY HIDTA IY NE SVGRA | |
| Sbjct: | 1 | VMVTTVKMTSGYEIPVLGFGTYQAADGEEAYQSTLAAIKAGYRHIDTAAIYKNEESVGRA | 60 |
| Query: | 80 | IRDSGLARESIFLTTKIWNDKHDYHLAKASIDESLQKLGVDYIDLLLIHWPNPKALREND | 139 |
| | | I+DSG+ RE +F+TTK+WND H Y AK ++ SL +LG+DY+DL LIHWPNPKALR + | |
| Sbjct: | 61 | IKDSGVLREDLFITTKLWNDAHSYEGAKDALAASLDRLGLDYVDLYLIHWPNPKALR--N | 118 |
| Query: | 140 | AWKAGNAGTWKAMEEAYKEGKVKAIGVSNFMKHHLEALFETAEIKPMVNQIILAPGCAQE | 199 |
| | | WK NA W+ MEEA + G +K+IGVSNFM HHLEAL ETA+I P +NQI LAPGC Q+ | |
| Sbjct: | 119 | TWKEANAQAWQYMEEAVEAGLIKSIGVSNFMVHHLEALQETAKITPAINQIRLAPGCYQK | 178 |
| Query: | 200 | DLVRFCKGNDILLEAYSPFGTGAIFENESIKAIAEKYGKSVAQVALRWSLDNGFLPLPKS | 259 |
| | | ++V +CK N+ILLEA+SP G G IF+NE+++ +A KY K+VAQVAL WSL GF+PLPKS | |
| Sbjct: | 179 | EVVDYCKANEILLEAWSPLGQGEIFDNETMQQLANKYDKTVAQVALAWSLAEGFIPLPKS | 238 |
| Query: | 260 | ATPKNIEANLDIFDFQLNEDDIATLIQLDSGIKPKDPDNVSF | 301 |
| | | + I+ N+ IFD L ++D T+ L +PD SF | |
| Sbjct: | 239 | VHDERIKENMAIFDVSLTQEDKKTIRYLSGMSAIPNPDTTSF | 280 |

[7311] Based on this analysis, it was predicted that these proteins and their epitopes could be useful antigens for vaccines or diagnostics.

### EXAMPLE 1324

[7312] A DNA sequence (GBSx1406) was identified in S. agalactiae <SEQ ID 4055> which encodes the amino acid sequence <SEQ ID 4056>. Analysis of this protein sequence reveals the following:

```
Possible site: 26
>>> Seems to have no N-terminal signal sequence
----- Final Results -----
                            bacterial cytoplasm --- Certainty = 0.0633(Affirmative) < succ>
                              bacterial membrane --- Certainty = 0.0000(Not Clear) < succ>
                                bacterial outside --- Certainty = 0.0000(Not Clear) < succ>
```

[7313] A related GBS nucleic acid sequence <SEQ ID 10009> which encodes amino acid sequence <SEQ ID 10010> was also identified.

[7314] The protein has homology with the following sequences in the GENPEPT database.

| >GP: CAB12612 GB: Z99108 similar to NAD(P)H-flavin oxidoreductase | | | |
|---|---|---|---|
| [Bacillus subtilis] | | | |
| Identities = 106/223 (47%), Positives = 150/223 (66%), | | | |
| Gaps = 8/223 (3%) | | | |
| Query: | 29 | DIKKQVRRAFDFRMAIRVYN-NNDIPKEDMEYILDTAWLSPSSVGLEGWRFLVLDRQTIA | 87 |
| | | D+K Q+ A++FR A + ++ N + D E+IL+T LSPSS+GLE W+F+V+ | |
| Sbjct: | 3 | DLKTQILDAYNFRHATKEFDPNKKVSDSDFEFILETGRLSPSSLGLEPWKFVVVQNP--- | 59 |
| Query: | 88 | KFRDKLKEVAWGAQYQLDTASHFVLLLAE--KGAYYNADSMINSLIRRGLGDPAALESRI | 145 |
| | | +FR+KL+E WGAQ QL TASHFVL+LA K YNAD + L E + | |
| Sbjct: | 60 | EFREKLREYTWGAQKQLPTASHFVLILARTAKDIKYNADYIKRHLKEVKQMPQDVYEGYL | 119 |
| Query: | 146 | PLYKSFQENDMKI-DSERSLWDWTAKQTYIALGNMMTAAAMIGVDSCPIEGFDYEKVNNI | 204 |
| | | + FQ+ND+ + +S+R+L+DW +KQTYIALGNMMTAAA IGVDSCPIEGF Y+ ++ I | |
| Sbjct: | 120 | SKTEEFQKNDLHLLESDRTLFDWASKQTYIALGNMMTAAAQIGVDSCPIEGFQYDHIHRI | 179 |
| Query: | 205 | LSKEGLIDDKKEAISCMVSFGYRLREPKHSRARKERQEVITWV | 247 |
| | | L +EGL+++ IS MV+FGYR+R+P+ + R ++V+ WV | |
| Sbjct: | 180 | LEEEGLLENGSFDISVMVAFGYRVRDPR-PKTRSAVEDVVKWV | 221 |

[7315] A related DNA sequence was identified in S. pyogenes <SEQ ID 4057> which encodes the amino acid sequence <SEQ ID 4058>. Analysis of this protein sequence reveals the following:

```
Possible site: 47
>>> Seems to have no N-terminal signal sequence
----- Final Results -----
                            bacterial cytoplasm --- Certainty = 0.1705(Affirmative) < succ>
                              bacterial membrane --- Certainty = 0.0000(Not Clear) < succ>
                                bacterial outside --- Certainty = 0.0000(Not Clear) < succ>
```

[7316] An alignment of the GAS and GBS proteins is shown below.

| Identities = 126/222 (56%), Positives = 174/222 (77%), Gaps = 4/222 (1%) | | | |
|---|---|---|---|
| Query: | 28 | EDIKKQVRRAFDFRMAIRVYNNNDIPKEDMEYILDTAWLSPSSVGLEGWRFLVLDRQTIA | 87 |
| | | + I Q+++A FR A+RVY I ED+ ILD AWLSPSS+GLEGWRF+VLD + I | |
| Sbjct: | 3 | QTIHHQIQQALHFRTAVRVYKEEKISDEDLALILDAAWLSPSSIGLEGWRFVVLDNKPI- | 61 |
| Query: | 88 | KFRDKLKEVAWGAQYQLDTASHFVLLLAEKGAYYNADSMINSLIRRGLGDPAALESRIPL | 147 |
| | | ++++K AWGAQYQL+TASHF+LL+AEK A Y++ ++ NSL+RRG+ + L SR+ L | |
| Sbjct: | 62 | --KEEIKPFAWGAQYQLETASHFILLIAEKHARYDSPAIKNSLLRRGIKEGDGLNSRLKL | 119 |
| Query: | 148 | YKSFQENDMKI-DSERSLWDWTAKQTYIALGNMMTAAAMIGVDSCPIEGFDYEKVNNILS | 206 |
| | | Y+SFQ+ DM + D+ R+L+DWTAKQTYIALGNMM AA++G+D+CPIEGF Y+KVN+IL+ | |
| Sbjct: | 120 | YESFQKEDMDMADNPRALFDWTAKQTYIALGNMMMTAALLGIDTCPIEGFHYDKVNHILA | 179 |
| Query: | 207 | KEGLIDDKKEAISCMVSFGYRLREPKHSRARKERQEVITWVE | 248 |
| | | K +ID +KE I+ M+S GYRLR+PKH++ RK ++EVI+ V+ | |
| Sbjct: | 180 | KHNVIDLEKEGIASMLSLGYRLRDPKHAQVRKPKEEVISVVK | 221 |

[7317] Based on this analysis, it was predicted that these proteins and their epitopes could be useful antigens for vaccines or diagnostics.

### EXAMPLE 1325

[7318] A DNA sequence (GBSx1407) was identified in S. agalactiae <SEQ ID 4059> which encodes the amino acid sequence <SEQ ID 4060>. This protein is predicted to be lactoylglutathione lyase (gloA). Analysis of this protein sequence reveals the following:

```
Possible site: 25
>>> Seems to have no N-terminal signal sequence
----- Final Results -----
                            bacterial cytoplasm --- Certainty = 0.1656(Affirmative) < succ>
                              bacterial membrane --- Certainty = 0.0000(Not Clear) < succ>
                                bacterial outside --- Certainty = 0.0000(Not Clear) < succ>
```

[7319] The protein has homology with the following sequences in the GENPEPT database.

| >GP: AAC21986 GB: U32717 lactoylglutathione lyase | | | |
|---|---|---|---|
| (gloA) [Haemophilus influenzae Rd] | | | |
| Identities = 59/131 (45%), Positives = 86/131 (65%), | | | |
| Gaps = 2/131 (1%) | | | |
| Query: | 1 | MPFLHTCIRVKDLDASIAFYQEALGFKEVRRNDFPENQFTLVYMALEDDPSY-ELELTYN | 59 |
| | | M LHT +RV DLD SI FYQ+ LG + +R ++ PE ++TL ++ ED S E+ELTYN | |
| Sbjct: | 1 | MQILHTMLRVGDLDRSIKFYQDVLGMRLLRTSENPEYKYTLAFLGYEDGESAAEIELTYN | 60 |
| Query: | 60 | YDHEAYDLGNGYGHIAVGVDDLETTYDAHQKAGYSVTKISG-LPGKPNMFYFIQDPDGYK | 118 |
| | | + + Y+ G YGHIA+GVDD+ T +A + +G +VT+ +G + G + F++DPDGYK | |
| Sbjct: | 61 | WGVDKYEHGTAYGHIAIGVDDIYATCEAVRASGGNVTREAGPVKGGSTVIAFVEDPDGYK | 120 |
| Query: | 119 | IEVIRLSQFKA | 129 |
| | | IE I K+ | |
| Sbjct: | 121 | IEFIENKSTKS | 131 |

[7320] A related DNA sequence was identified in S. pyogenes <SEQ ID 4061> which encodes the amino acid sequence <SEQ ID 4062>. Analysis of this protein sequence reveals the following:

```
Possible site: 23
>>> Seems to have no N-terminal signal sequence
----- Final Results -----
                            bacterial cytoplasm --- Certainty = 0.1382(Affirmative) < succ>
                              bacterial membrane --- Certainty = 0.0000(Not Clear) < succ>
                                bacterial outside --- Certainty = 0.0000(Not Clear) < succ>
```

[7321] An alignment of the GAS and GBS proteins is shown below.

| Identities = 80/125 (64%), Positives = 93/125 (74%), Gaps = 1/125 (0%) | | | |
|---|---|---|---|
| Query: | 1 | MPFLHTCIRVKDLDASIAFYQEALGFKEVRRNDFPENQFTLVYMALEDDPSYELELTYNY | 60 |
| | | M LHTCIRVKDLD S+AFY A FKE R DFP++QFTLVY+ALE + SYELELTYNY | |
| Sbjct: | 1 | MKALHTCIRVKDLDQSVAFYTSAFPFKENYRKDFPDSQFTLVYLALEGE-SYELELTYNY | 59 |
| Query: | 61 | DHEAYDLGNGYGHIAVGVDDLETTYDAHQKAGYSVTKISGLPGKPNMFYFIQDPDGYKIE | 120 |
| | | H YDLGNGYGHIA+G + E + H++AG+VT I L K +YFIQDPDGYKIE | |
| Sbjct: | 60 | GHGDYDLGNGYGHIALGSEHFEADHKKHRQAGFPVTDIKELADKSARYYFIQDPDGYKIE | 119 |
| Query: | 121 | VIRLS | 125 |
| | | VI L+ | |
| Sbjct: | 120 | VIDLN | 124 |

[7322] Based on this analysis, it was predicted that these proteins and their epitopes could be useful antigens for vaccines or diagnostics.

### EXAMPLE 1326

[7323] A DNA sequence (GBSx1408) was identified in S. agalactiae <SEQ ID 4063> which encodes the amino acid sequence <SEQ ID 4064>. Analysis of this protein sequence reveals the following:

| Possible site: 29 | | | | |
|---|---|---|---|---|
| >>> Seems to have an uncleavable N-term signal seq | | | | |
| | INTEGRAL | Likelihood = −9.02 | Transmembrane | 241-257 (229-262) |
| | INTEGRAL | Likelihood = −4.94 | Transmembrane | 270-286 (264-287) |

```
----- Final Results -----
                              bacterial membrane --- Certainty = 0.4609(Affirmative) < succ>
                                bacterial outside --- Certainty = 0.0000(Not Clear) < succ>
                            bacterial cytoplasm --- Certainty = 0.0000(Not Clear) < succ>
```

[7324] The protein has homology with the following sequences in the GENPEPT database.

| >GP: CAB12688 GB: Z99108 stress response protein [Bacillus subtilis] | | | |
|---|---|---|---|
| Identities = 139/304 (45%), Positives = 200/304 (65%), Gaps = 3/304 (0%) | | | |
| Query: | 3 | LLSVIVPCYNEQETVSTFLTEIKKVESEMARYTHFEYIFVNDGSTDRTLELLKKAAKQFD | 62 |
| | | L+S+I+P YNE V +KK E + Y +E F+NDGS D TL+ +K A | |
| Sbjct: | 5 | LISIIIPSYNEGYNVKLIHESLKK-EFKNIHYD-YEIFFINDGSVDDTLQQIKDLAATCS | 62 |
| Query: | 63 | NVHYLSFSRHFGKDAALLAGLEHTTGDFITVMDVDLQDPPTLLPEMYLKLQEGYDIVATR | 122 |
| | | V Y+SFSR+FGK+AA+LAG EH G+ + VMD DLQ P LL E +EGYD V + | |
| Sbjct: | 63 | RVKYISFSRNFGKEAAILAGFEHVQGEAVIVMDADLQHPTYLLKEFIKGYEEGYDQVIAQ | 122 |
| Query: | 123 | RKDRKGEPLIRSLFAKLFYKLINQVSDTKMVDGARDFRLMTKQVVDSILELNEVNRFSKG | 182 |
| | | R +RKG+ +RSL + ++YK IN+ + + DG DFRL+++Q V+++L+L+E NRFSKG | |
| Sbjct: | 123 | R-NRKGDSFVRSLLSSMYYKFINKAVEVDLRDGVGDFRLLSRQAVNALLKLSEGNRFSKG | 181 |
| Query: | 183 | IFSWIGYDVAYISYENRERIAGKTSWSFFNLLKYSLDGFINFSEIPLAIATWIGTLSSVL | 242 |
| | | +F WIG+D + YEN ER G + WSF +L Y +DG ++F+ PL + + G +L | |
| Sbjct: | 182 | LFCWIGFDQKIVFYENVERKNGTSKWSFSSLFNYGMDGVVSFNHKPLRLCFYTGIFILLL | 241 |
| Query: | 243 | SLLAIIFIIIRKLLFGDPVSGWASTVTIVLFMGGIQLLSLGIIGKYISKIFLETKKRPVY | 302 |
| | | S++ II ++ L G V G+ + ++ VLF+GG+QLLSLGIIG+YI +I+ ETKKRP Y | |
| Sbjct: | 242 | SIIYIIATFVKILTNGISVPGYFTIISAVLFLGGVQLLSLGIIGEYIGRIYYETKKRPHY | 301 |
| Query: | 303 | IVKE | 306 |
| | | ++KE | |
| Sbjct: | 302 | LIKE | 305 |

[7325] A related DNA sequence was identified in S. pyogenes <SEQ ID 4065> which encodes the amino acid sequence <SEQ ID 4066>. Analysis of this protein sequence reveals the following:

| Possible site: 56 | | | | |
|---|---|---|---|---|
| >>> Seems to have an uncleavable N-term signal seq | | | | |
| | INTEGRAL | Likelihood = −9.55 | Transmembrane | 256-272 (251-282) |
| | INTEGRAL | Likelihood = −5.31 | Transmembrane | 290-306 (284-307) |

```
----- Final Results -----
                              bacterial membrane --- Certainty = 0.4821(Affirmative) < succ>
                                bacterial outside --- Certainty = 0.0000(Not Clear) < succ>
                            bacterial cytoplasm --- Certainty = 0.0000(Not Clear) < succ>
```

[7326] A related sequence was also identified in GAS <SEQ ID 9113> which encodes the amino acid sequence <SEQ ID 9114>. Analysis of this protein sequence reveals the following:

```
Possible cleavage site: 36
>>> Seems to have an uncleavable N-term signal seq
----- Final Results -----
                              bacterial membrane --- Certainty = 0.482(Affirmative) < succ>
                                bacterial outside --- Certainty = 0.000(Not Clear) < succ>
                            bacterial cytoplasm --- Certainty = 0.000(Not Clear) < succ>
```

[7327] An alignment of the GAS and GBS proteins is shown below.

| Identities = 207/307 (67%), Positives = 258/307 (83%) | | | |
|---|---|---|---|
| Query: | 1 | MALLSVIVPCYNEQETVSTFLTEIKKVESEMARYTHFEYIFVNDGSTDRTLELLKKAAKQ | 60 |
| | | M LLS+IVPC+NE+ + + E+ ++E+ M FEYIF++DGS D TL +L++ A + | |
| Sbjct: | 21 | MTLLSIIVPCFNEEANILPYFEEMHQLETSMTNQLAFEYIFIDDGSKDNTLGILRELAAR | 80 |
| Query: | 61 | FDNVHYLSFSRHFGKDAALLAGLEHTTGDFITVMDVDLQDPPTLLPEMYLKLQEGYDIVA | 120 |
| | | F NVHYLSFSRHFGK+A LLAGL+ G++ITVMDVDLQDPP LLP MY KL+EGYDIV | |
| Sbjct: | 81 | FPNVHYLSFSRHFGKEAGLLAGLKEAKGNYITVMDVDLQDPPELLPIMYAKLKEGYDIVG | 140 |
| Query: | 121 | TRRKDRKGEPLIRSLFAKLFYKLINQVSDTKMVDGARDFRLMTKQVVDSILELNEVNRFS | 180 |
| | | TRR++R+GEPLIRS+ + LFY LI +SDT+MV+G RD+RLMT+QVVDSILEL EVNRFS | |
| Sbjct: | 141 | TRRQNRQGEPLIRSMCSNLFYGLIKHLSDTEMVNGVRDYRLMTRQVVDSILELGEVNRFS | 200 |
| Query: | 181 | KGIFSWIGYDVAYISYENRERIAGKTSWSFFNLLKYSLDGFINFSEIPLAIATWIGTLSS | 240 |
| | | KGIFSW+GY + Y+S+EN++R GK+ W F+ LL+YSLDGFINFSE+PL IATW GT S | |
| Sbjct: | 201 | KGIFSWVGYRITYLSFENQKRKYGKSRWHFWELLRYSLDGFINFSEMPLTIATWTGTFSF | 260 |
| Query: | 241 | VLSLLAIIFIIIRKLLFGDPVSGWASTVTIVLFMGGIQLLSLGIIGKYISKIFLETKKRP | 300 |
| | | ++S+ AI+FIIIRK+LFGDPVSGWASTV+I+LFMGGIQL +GIIGKYISKIFLETKKRP | |
| Sbjct: | 261 | LISIFAILFIIIRKILFGDPVSGWASTVSIILFMGGIQLFCMGIIGKYISKIFLETKKRP | 320 |
| Query: | 301 | VYIVKEE | 307 |
| | | +YI+KE+ | |
| Sbjct: | 321 | LYIIKEK | 327 |

[7328] Based on this analysis, it was predicted that these proteins and their epitopes could be useful antigens for vaccines or diagnostics.

### EXAMPLE 1327

[7329] A DNA sequence (GBSx1409) was identified in S. agalactiae <SEQ ID 4067> which encodes the amino acid sequence <SEQ ID 4068>. This protein is predicted to be d-serine/d-alanine/glycine transporter (cycA). Analysis of this protein sequence reveals the following:

| Possible site: 49 | | | | |
|---|---|---|---|---|
| >>> Seems to have no N-terminal signal sequence | | | | |
| | INTEGRAL | Likelihood = −2.44 | Transmembrane | 50-66 (50-66) |
| | INTEGRAL | Likelihood = −1.49 | Transmembrane | 27-43 (27-43) |

```
----- Final Results -----
                              bacterial membrane --- Certainty = 0.1977(Affirmative) < succ>
                                bacterial outside --- Certainty = 0.0000(Not Clear) < succ>
                            bacterial cytoplasm --- Certainty = 0.0000(Not Clear) < succ>
```

[7330] The protein has homology with the following sequences in the GENPEPT database.

| >GP: CAA83253 GB: Z31377 potential amino acid permease | | | |
|---|---|---|---|
| [Lactobacillus delbrueckii] | | | |
| Identities = 34/55 (61%), Positives = 44/55 (79%) | | | |
| Query: | 7 | DHTQKSENGMVRGLENRHVQLIAIAGTIGTGLFLGAGRSISLTGPSIVLVYAITG | 61 |
| | | D + ++ +G +R L NRHVQ+IAI GTIGTGLFLGAG +IS TGPS++ +YAI G | |
| Sbjct: | 5 | DRSIENTDGTIRSLSNRHVQMIAIGGTIGTGLFLGAGTTISATGPSVIFIYAIMG | 59 |

[7331] A related DNA sequence was identified in S. pyogenes <SEQ ID 4069> which encodes the amino acid sequence <SEQ ID 4070>. Analysis of this protein sequence reveals the following:

| Possible site: 53 | | | | |
|---|---|---|---|---|
| >>> Seems to have no N-terminal signal sequence | | | | |
| | INTEGRAL | Likelihood = −11.15 | Transmembrane | 170-186 (161-190) |
| | INTEGRAL | Likelihood = −8.44 | Transmembrane | 256-272 (252-274) |
| | INTEGRAL | Likelihood = −8.33 | Transmembrane | 352-368 (347-375) |
| | INTEGRAL | Likelihood = −7.54 | Transmembrane | 139-155 (133-160) |
| | INTEGRAL | Likelihood = −5.73 | Transmembrane | 420-436 (417-440) |
| | INTEGRAL | Likelihood = −3.88 | Transmembrane | 56-72 (54-75) |
| | INTEGRAL | Likelihood = −3.40 | Transmembrane | 283-299 (282-300) |
| | INTEGRAL | Likelihood = −3.29 | Transmembrane | 440-456 (439-458) |
| | INTEGRAL | Likelihood = −1.49 | Transmembrane | 31-47 (31-47) |
| | INTEGRAL | Likelihood = −1.33 | Transmembrane | 109-125 (109-127) |

```
----- Final Results -----
                              bacterial membrane --- Certainty = 0.5458(Affirmative) < succ>
                                bacterial outside --- Certainty = 0.0000(Not Clear) < succ>
                            bacterial cytoplasm --- Certainty = 0.0000(Not Clear) < succ>
```

[7332] The protein has homology with the following sequences in the databases:

| >GP: CAB14651 GB: Z99117 amino acid permease [Bacillus subtilis] | | | |
|---|---|---|---|
| Identities = 210/454 (46%), Positives = 296/454 (64%), | | | |
| Gaps = 11/454 (2%) | | | |
| Query: | 12 | DNNELENGMVRGLENRHVQLIAIAGTIGTGLFLGAGRSIALTGPSIIFVYMITGAFMFMM | 71 |
| | | DN + + RGL+NRH+QL+AI G IGTGLFLG+G+SI GPSI+F Y+ITG F F + | |
| Sbjct: | 8 | DNFGQQQKLSRGLKNRHIQLMAIGGAIGTGLFLGSGKSIHFAGPSILFAYLITGVFCFFI | 67 |
| Query: | 72 | MRAIGEMLYYDPDQHTFINFISKYIGPGWGYFSGLSYWISLIFIGMAEITAVGAYVQFWF | 131 |
| | | +R++GE+L + H+F++F+ Y+G + +G +YW I + MA++TAVG Y Q+W | |
| Sbjct: | 68 | IRSLGELLLSNAGYHSFVDFVRDYLGNMAAFITGWTYWFCWISLAMADLTAVGIYTQYWL | 127 |
| Query: | 132 | PSWPAWLIQLVFLVLLSSINLIAVRVFGETEFWFAMIKILAILALIATAIFMVLTGFETH | 191 |
| | | P P WL L+ L++L +NL V++FGE EFWFA+IK++AILALI T I ++ GF | |
| Sbjct: | 128 | PDVPQWLPGLLALIILLIMNLATVKLFGELEFWFALIKVIAILALIVTGILLIAKGFSAA | 187 |
| Query: | 192 | TGHASLSNIFDHFSMFPNGKLKFFMAFQMVFFAYQAIEFVGITTSETANPRKVLPKAIQE | 251 |
| | | +G ASL+N++ H MFPNG F ++FQMV FA+ IE VG+T ET NP+KV+PKAI + | |
| Sbjct: | 188 | SGPASLNNLWSHGGMFPNGWHGFILSFQMVVFAFVGIELVGLTAGETENPQKVIPKAINQ | 247 |
| Query: | 252 | IPTRIVIFYVGALVSIMAIVPWHQLPVDESPFVMVFKLIGIKWAAALINFVVLTSAASAL | 311 |
| | | IP RI++FYVGAL IM I PW+ L +ESPFV VF +GI AA+LINFVVLTSAASA | |
| Sbjct: | 248 | IPVRILLFYVGALFVIMCIYPWNVLNPNESPFVQVFSAVGIVVAASLINFVVLTSAASAA | 307 |
| Query: | 312 | NSTLYSTGRHLYQIANE--TPNALTNRLKINTLSRQGVPSRAIIASAVVVGISALINILP | 369 |
| | | NS L+ST R +Y +A + P L L+ VPS A+ S++ + I +N L | |
| Sbjct: | 308 | NSALFSTSRMVYSLAKDHHAPGLL------KKLTSSNVPSNALFFSSIAILIGVSLNYLM | 361 |
| Query: | 370 | GVADAFSLITASSSGVYIAIYALTMIAHWKYRQSK--DFMADGYLMPKYKVTTPLTLAFF | 427 |
| | | F+LIT+ S+ +I I+ +T+I H KYR+++ + A+ + MP Y ++ LTLAF | |
| Sbjct: | 362 | -PEQVFTLITSVSTICFIFIWGITVICHLKYRKTRQHEAKANKFKMPFYPLSNYLTLAFL | 420 |
| Query: | 428 | AFVFISLFLQESTYIGAIGATIWIIIFGIYSNVK | 461 |
| | | AF+ + L L T I +W ++ I V+ | |
| Sbjct: | 421 | AFILVILALANDTRIALFVTPVWFVLLIILYKVQ | 454 |

[7333] An alignment of the GAS and GBS proteins is shown below.

| Identities = 48/62 (77%), Positives = 51/62 (81%) | | | |
|---|---|---|---|
| Query: | 1 | MSKNNNDHTQKSENGMVRGLENRHVQLIAIAGTIGTGLFLGAGRSISLTGPSIVLVYAITGA | 62 |
| | | MS + ENGMVRGLENRHVQLIAIAGTIGTGLFLGAGRSI+LTGPSI+ VY ITGA | |
| Sbjct: | 5 | MSIKEQTDNNELENGMVRGLENRHVQLIAIAGTIGTGLFLGAGRSIALTGPSIIFVYMITGA | 66 |

[7334] Based on this analysis, it was predicted that these proteins and their epitopes could be useful antigens for vaccines or diagnostics.

### EXAMPLE 1328

[7335] A DNA sequence (GBSx1411) was identified in S. agalactiae <SEQ ID 4071> which encodes the amino acid sequence <SEQ ID 4072>. This protein is predicted to be alkylphosphonate uptake protein (phnA). Analysis of this protein sequence reveals the following:

```
Possible site: 29
>>> Seems to have no N-terminal signal sequence
----- Final Results -----
                            bacterial cytoplasm --- Certainty = 0.0965(Affirmative) < succ>
                              bacterial membrane --- Certainty = 0.0000(Not Clear) < succ>
                                bacterial outside --- Certainty = 0.0000(Not Clear) < succ>
```

[7336] The protein has homology with the following sequences in the GENPEPT database.

| >GP: AAC77069 GB: AE000483 orf, hypothetical protein [Escherichia coli | | | |
|---|---|---|---|
| K12] | | | |
| Identities = 79/110 (71%), Positives = 91/110 (81%), Gaps = 1/110 (0%) | | | |
| Query: | 1 | MSLPNCPKCNSEYVYEDGILLVCPECAYEWNPEE-IEEEVGLIVLDSNGTRLSDGDTVTV | 59 |
| | | MSLP+CPKCNSEY YED + +CPECAYEWN E +E LIV D+NG L+DGD+VT+ | |
| Sbjct: | 1 | MSLPHCPKCNSEYTYEDNGMYICPECAYEWNDAEPAQESDELIVKDANGNLLADGDSVTI | 60 |
| Query: | 60 | IKDLKVKGAPKDIKQGTRVKNIRLVDGDHNIDCKIDGFGAMKLKSEFVKK | 109 |
| | | IKDLKVKG+ +K GT+VKNIRLV+GDHNIDCKIDGFG MKLKSEFVKK | |
| Sbjct: | 61 | IKDLKVKGSSSMLKIGTKVKNIRLVEGDHNIDCKIDGFGPMKLKSEFVKK | 110 |

[7337] A related DNA sequence was identified in S. pyogenes <SEQ ID 4073> which encodes the amino acid sequence <SEQ ID 4074>. Analysis of this protein sequence reveals the following:

```
Possible site: 14
>>> Seems to have no N-terminal signal sequence
----- Final Results -----
                            bacterial cytoplasm --- Certainty = 0.3428(Affirmative) < succ>
                              bacterial membrane --- Certainty = 0.0000(Not Clear) < succ>
                                bacterial outside --- Certainty = 0.0000(Not Clear) < succ>
```

[7338] An alignment of the GAS and GBS proteins is shown below.

| Identities = 73/85 (85%), Positives = 79/85 (92%), Gaps = 1/85 (1%) | | | |
|---|---|---|---|
| Query: | 26 | CAYEWNP-EEIEEEVGLIVLDSNGTRLSDGDTVTVIKDLKVKGAPKDIKQGTRVKNIRLV | 84 |
| | | CA+EW P EE EE GL+VLDSNG RLSDGDT+TV+KDLKVKGAPKD+KQGTRVKNIRLV | |
| Sbjct: | 2 | CAFEWTPGEEATEEEGLVVLDSNGVRLSDGDTITVVKDLKVKGAPKDLKQGTRVKNIRLV | 61 |
| Query: | 85 | DGDHNIDCKIDGFGAMKLKSEFVKK | 109 |
| | | +GDHNIDCKIDGFGAMKLKSEFVKK | |
| Sbjct: | 62 | EGDHNIDCKIDGFGAMKLKSEFVKK | 86 |

[7339] Based on this analysis, it was predicted that these proteins and their epitopes could be useful antigens for vaccines or diagnostics.

### EXAMPLE 1329

[7340] A DNA sequence (GBSx1412) was identified in S. agalactiae <SEQ ID 4075> which encodes the amino acid sequence <SEQ ID 4076>. Analysis of this protein sequence reveals the following:

```
Possible site: 22
>>> Seems to have no N-terminal signal sequence
----- Final Results -----
                            bacterial cytoplasm --- Certainty = 0.3665(Affirmative) < succ>
                              bacterial membrane --- Certainty = 0.0000(Not Clear) < succ>
                                bacterial outside --- Certainty = 0.0000(Not Clear) < succ>
```

[7341] The protein has no significant homology with any sequences in the GENPEPT database, but there is homology to SEQ ID 500.

[7342] Based on this analysis, it was predicted that this protein and its epitopes, could be useful antigens for vaccines or diagnostics.

### EXAMPLE 1330

[7343] A DNA sequence (GBSx1414) was identified in S. agalactiae <SEQ ID 4077> which encodes the amino acid sequence <SEQ ID 4078>. Analysis of this protein sequence reveals the following:

| Possible site: 13 | | | | |
|---|---|---|---|---|
| >>> Seems to have an uncleavable N-term signal seq | | | | |
| | INTEGRAL | Likelihood = −0.11 | Transmembrane | 558-574 (558-574) |

```
----- Final Results -----
                              bacterial membrane --- Certainty = 0.1044(Affirmative) < succ>
                                bacterial outside --- Certainty = 0.0000(Not Clear) < succ>
                            bacterial cytoplasm --- Certainty = 0.0000(Not Clear) < succ>
```

[7344] The protein has homology with the following sequences in the GENPEPT database.

| >GP: CAB11971 GB: Z99105 L-glutamine-D-fructose-6-phosphate | | | |
|---|---|---|---|
| amidotransferase [Bacillus subtilis] | | | |
| Identities = 355/604 (58%), Positives = 445/604 (72%), Gaps = 4/604 (0%) | | | |
| Query: | 1 | MCGIVGVVGNTNATDILIQGLEKLEYRGYDSAGIFVVGDNKSQLVKSVGRIAEIQAKVGD | 60 |
| | | MCGIVG +G +A +IL++GLEKLEYRGYDSAGI V + + K GRIA+++ V | |
| Sbjct: | 1 | MCGIVGYIGQLDAKEILLKGLEKLEYRGYDSAGIAVANEQGIHVFKEKGRIADLREVVDA | 60 |
| Query: | 61 | SVSGTTGIGHTRWATHGKPTEGNAHPHTSGSGRFVLVHNGVIENYLQIKETYLTKHNLKG | 120 |
| | | +V GIGHTRWATHG+P+ NAHPH S GRF LVHNGVIENY+Q+K+ YL LK | |
| Sbjct: | 61 | NVEAKAGIGHTRWATHGEPSYLNAHPHQSALGRFTLVHNGVIENYVQLKQEYLQDVELKS | 120 |
| Query: | 121 | ETDTEIAIHLVEHFVEEDNLSVLEAFKKALHIIEGSYAFALIDSQDADTIYVAKNKSPLL | 180 |
| | | +TDTE+ + ++E FV L EAF+K L +++GSYA AL D+ + +TI+VAKNKSPLL | |
| Sbjct: | 121 | DTDTEVVVQVIEQFVN-GGLETEEAFRKTLTLLKGSYAIALFDNDNRETIFVAKNKSPLL | 179 |
| Query: | 181 | IGLGNGYNMVCSDAMAMIRETSEYMEIHDKELVIVKKDSVEVQDYDGNVIERGSYTAELD | 240 |
| | | +GLG+ +N+V SDAMAM++ T+EY+E+ DKE+VIV D V +++ DG+VI R SY AELD | |
| Sbjct: | 180 | VGLGDTFNVVASDAMAMLQVTNEYVELMDKEMVIVTDDQVVIKNLDGDVITRASYIAELD | 239 |
| Query: | 241 | LSDIGKGTYPFYMLKEIDEQPTVMRKLISTYANESGDMNVDSDIIKSVQEADRLYILAAG | 300 |
| | | SDI KGTYP YMLKE DEQP VMRK+I TY +E+G ++V DI +V EADR+YI+ G | |
| Sbjct: | 240 | ASDIEKGTYPHYMLKETDEQPVVMRKIIQTYQDENGKLSVPGDIAAAVAEADRIYIIGCG | 299 |
| Query: | 301 | TSYHAGFAAKTMIEKLTDTPVELGVSSEWGYNMPLLSKKPMFILLSQSGETADSRQVLVK | 360 |
| | | TSYHAG K IE + PVE+ V+SE+ YNMPLLSKKP+FI LSQSGETADSR VLV+ | |
| Sbjct: | 300 | TSYHAGLVGKQYIEMWANVPVEVHVASEFSYNMPLLSKKPLFIFLSQSGETADSRAVLVQ | 359 |
| Query: | 361 | ANEMGIPSLTITNVPGSTLSREATYTMLIHAGPEIAVASTKAYTAQVATLAFLAKAVGEA | 420 |
| | | +G +LTITNVPGSTLSREA YT+L+HAGPEIAVASTKAYTAQ+A LA LA + | |
| Sbjct: | 360 | VKALGHKALTITNVPGSTLSREADYTLLLHAGPEIAVASTKAYTAQIAVLAVLASVAADK | 419 |
| Query: | 421 | NGKAEAKDFDLVHELSIVAQSIEATLSEKDVISEKVEQLLISTRNAFYIGRGNDYYVTME | 480 |
| | | NG FDLV EL I A ++EA +KD + + L +RNAF+IGRG DY+V +E | |
| Sbjct: | 420 | NGINIG--FDLVKELGIAANAMEALCDQKDEMEMIAREYLTVSRNAFFIGRGLDYFVCVE | 477 |
| Query: | 481 | AALKLKEISYIQTEGFAAGELKHGTISLIEDNTPVIALISADSTIAAHTRGNIQEVVSRG | 540 |
| | | ALKLKEISYIQ EGFA GELKHGTI+LIE TPV AL + + + RGN++EV +RG | |
| Sbjct: | 478 | GALKLKEISYIQAEGFAGGELKHGTIALIEQGTPVFALATQEH-VNLSIRGNVKEVAARG | 536 |
| Query: | 541 | ANALIIVEEGLEREGDDIIVNKVHPFLSAISMVIPTQLIAYYASLQRGLDVDKPRNLAKA | 600 |
| | | AN II +GL+ D ++ +V+P L+ + V+P QLIAYYA+L RG DVDKPRNLAK+ | |
| Sbjct: | 537 | ANTCIISLKGLDDADDRFVLPEVNPALAPLVSVVPLQLIAYYAALHRGCDVDKPRNLAKS | 596 |
| Query: | 601 | VTVE | 604 |
| | | VTVE | |
| Sbjct: | 597 | VTVE | 600 |

[7345] A related DNA sequence was identified in S. pyogenes <SEQ ID 4079> which encodes the amino acid sequence <SEQ ID 4080>. Analysis of this protein sequence reveals the following:

| Possible site: 39 | | | | |
|---|---|---|---|---|
| >>> Seems to have no N-terminal signal sequence | | | | |
| | INTEGRAL | Likelihood = −1.06 | Transmembrane | 558-574 (558-574) |

```
----- Final Results -----
                              bacterial membrane --- Certainty = 0.1426(Affirmative) < succ>
                                bacterial outside --- Certainty = 0.0000(Not Clear) < succ>
                            bacterial cytoplasm --- Certainty = 0.0000(Not Clear) < succ>
```

[7346] The protein has homology with the following sequences in the databases:

| >GP: CAB11971 GB: Z99105 L-glutamine-D-fructose-6-phosphate | | | |
|---|---|---|---|
| amidotransferase [Bacillus subtilis] | | | |
| Identities = 353/604 (58%), Positives = 445/604 (73%), Gaps = 4/604 (0%) | | | |
| Query: | 1 | MCGIVGVVGNRNATDILMQGLEKLEYRGYDSAGIFVANANQTNLIKSVGRIADLRAKIGI | 60 |
| | | MCGIVG +G +A +IL++GLEKLEYRGYDSAGI VAN ++ K GRIADLR + | |
| Sbjct: | 1 | MCGIVGYIGQLDAKEILLKGLEKLEYRGYDSAGIAVANEQGINVFKEKGRIADLREVVDA | 60 |
| Query: | 61 | DVAGSTGIGHTRWATHGQSTEDNAHPHTSQTGRFVLVHNGVIENYLHIKTEFLAGHDFKG | 120 |
| | | +V GIGHTRWATHG+ + NAHPH S GRF LVHNGVIENY+ +K E+L + K | |
| Sbjct: | 61 | NVEAKAGIGHTRWATHGEPSYLNAHPHQSALGRFTLVHNGVIENYVQLKQEYLQDVELKS | 120 |
| Query: | 121 | QTDTEIAVHLIGKFVEEDKLSVLEAFKKSLSIIEGSYAFALMDSQATDTIYVAKNKSPLL | 180 |
| | | TDTE+ V +I +FV L EAF+K+L++++GSYA AL D+ +TI+VAKNKSPLL | |
| Sbjct: | 121 | DTDTEVVVQVIEQFVNGG-LETEEAFRKTLTLLKGSYAIALFDNDNRETIFVAKNKSPLL | 179 |
| Query: | 181 | IGLGEGYNMVCSDAMAMIRETSEFMEIHDKELVILTKDKVTVTDYDGKELIRDSYTAELD | 240 |
| | | +GLG+ +N+V SDAMAM++ T+E++E+ DKE+VI+T D+V + + DG + R SY AELD | |
| Sbjct: | 180 | VGLGDTFNVVASDAMAMLQVTNEYVELMDKEMVIVTDDQVVIKNLDGDVITRASYIAELD | 239 |
| Query: | 241 | LSDIGKGTYPFYMLKEIDEQPTVMRQLISTYADETGNVQVDPAIITSIQEADRLYILAAG | 300 |
| | | SDI KGTYP YMLKE DEQP VMR++I TY DE G + V I ++ EADR+YI+ G | |
| Sbjct: | 240 | ASDIEKGTYPHYMLKETDEQPVVMRKIIQTYQDENGKLSVPGDIAAAVAEADRIYIIGCG | 299 |
| Query: | 301 | TSYHAGFATKNMLEQLTDTPVELGVASEWGYHMPLLSKKPMFILLSQSGETADSRQVLVK | 360 |
| | | TSYHAG K +E + PVE+ VASE+ Y+MPLLSKKP+FI LSQSGETADSR VLV+ | |
| Sbjct: | 300 | TSYHAGLVGKQYIEMWANVPVEVHVASEFSYNMPLLSKKPLFIFLSQSGETADSRAVLVQ | 359 |
| Query: | 361 | ANAMGIPSLTVTNVPGSTLSREATYTMLIHAGPEIAVASTKAYTAQIAALAFLAKAVGEA | 420 |
| | | A+G +LT+TNVPGSTLSREA YT+L+HAGPEIAVASTKAYTAQIA LA LA + | |
| Sbjct: | 360 | VKALGHKALTITNVPGSTLSREADYTLLLHAGPEIAVASTKAYTAQIAVLAVLASVAADK | 419 |
| Query: | 421 | NGKQEALDFNLVHELSLVAQSIEATLSEKDLVAEKVQALLATTRNAFYIGRGNDYYVAME | 480 |
| | | NG + F+LV EL + A ++EA +KD + + L +RNAF+IGRG DY+V +E | |
| Sbjct: | 420 | NGIN--IGFDLVKELGIAANAMEALCDQKDEMEMIAREYLTVSRNAFFIGRGLDYFVCVE | 477 |
| Query: | 481 | AALKLKEISYIQCEGFAAGELKHGTISLIEEDTPVIALISSSQLVASHTRGNIQEVAARG | 540 |
| | | ALKLKEISYIQ EGFA GELKHGTI+LIE+ TPV AL + + S RGN++EVAARG | |
| Sbjct: | 478 | GALKLKEISYIQAEGFAGGELKHGTIALIEQGTPVFALATQEHVNLS-IRGNVKEVAARG | 536 |
| Query: | 541 | AHVLTVVEEGLDREGDDIIVNKVHPFLAPIAMVIPTQLIAYYASLQRGLDVDKPRNLAKA | 600 |
| | | A+ + +GLD D ++ +V+P LAP+ V+P QLIAYYA+L RG DVDKPRNLAK+ | |
| Sbjct: | 537 | ANTCIISLKGLDDADDRFVLPEVNPALAPLVSVVPLQLIAYYAALHRGCDVDKPRNLAKS | 596 |
| Query: | 601 | VTVE | 604 |
| | | VTVE | |
| Sbjct: | 597 | VTVE | 600 |

[7347] An alignment of the GAS and GBS proteins is shown below.

| Identities = 500/604 (82%), Positives = 552/604 (90%) | | | |
|---|---|---|---|
| Query: | 1 | MCGIVGVVGNTNATDILIQGLEKLEYRGYDSAGIFVVGDNKSQLVKSVGRIAEIQAKVGD | 60 |
| | | MCGIVGVVGN NATDIL+QGLEKLEYRGYDSAGIFV N++ L+KSVGRIA+++AK+G | |
| Sbjct: | 1 | MCGIVGVVGNRNATDILMQGLEKLEYRGYDSAGIFVANANQTNLIKSVGRIADLRAKIGI 60 | |
| Query: | 61 | SVSGTTGIGHTRWATHGKPTEGNAHPHTSGSGRFVLVHNGVIENYLQIKETYLTKHNLKG | 120 |
| | | V+G+TGIGHTRWATHG+ TE NAHPHTS +GRFVLVHNGVIENYL IK +L H+ KG | |
| Sbjct: | 61 | DVAGSTGIGHTRWATHGQSTEDNAHPHTSQTGRFVLVHNGVIENYLHIKTEFLAGHDFKG | 120 |
| Query: | 121 | ETDTEIAIHLVEHFVEEDNLSVLEAFKKALHIIEGSYAFALIDSQDADTIYVAKNKSPLL | 180 |
| | | +TDTEIA+HL+ FVEED LSVLEAFKK+L IIEGSYAFAL+DSQ DTIYVAKNKSPLL | |
| Sbjct: | 221 | QTDTEIAVHLIGKFVEEDKLSVLEAFKKSLSIIEGSYAFALMDSQATDTIYVAKNKSPLL | 180 |
| Query: | 181 | IGLGNGYNMVCSDAMAMIRETSEYMEIHDKELVIVKKDSVEVQDYDGNVIERGSYTAELD | 240 |
| | | IGLG GYNMVCSDAMAMIRETSE+MEIHDKELVI+ KD V V DYDG + R SYTAELD | |
| Sbjct: | 181 | IGLGEGYNMVCSDAMAMIRETSEFMEIHDKELVILTKDKVTVTDYDGKELIRDSYTAELD | 240 |
| Query: | 241 | LSDIGKGTYPFYMLKEIDEQPTVMRKLISTYANESGDMNVDSDIIKSVQEADRLYILAAG | 300 |
| | | LSDIGKGTYPFYMLKEIDEQPTVMR+LISTYA+E+G++ VD II S+QEADRLYILAAG | |
| Sbjct: | 241 | LSDIGKGTYPFYMLKEIDEQPTVMRQLISTYADETGNVQVDPAIITSIQEADRLYILAAG | 300 |
| Query: | 301 | TSYHAGFAAKTMIEKLTDTPVELGVSSEWGYNMPLLSKKPMFILLSQSGETADSRQVLVK | 360 |
| | | TSYHAGFA K M+E+LTDTPVELGV+SEWGY+MPLLSKKPMFILLSQSGETADSRQVLVK | |
| Sbjct: | 301 | TSYHAGFATKNMLEQLTDTPVELGVASEWGYHMPLLSKKPMFILLSQSGETADSRQVLVK | 360 |
| Query: | 361 | ANEMGIPSLTITNVPGSTLSREATYTMLIHAGPEIAVASTKAYTAQVATLAFLAKAVGEA | 420 |
| | | AN MGIPSLT+TNVPGSTLSREATYTMLIHAGPEIAVASTKAYTAQ+A LAFLAKAVGEA | |
| Sbjct: | 361 | ANAMGIPSLTVTNVPGSTLSREATYTMLIHAGPEIAVASTKAYTAQIAALAFLAKAVGEA | 420 |
| Query: | 421 | NGKAEAKDFDLVHELSIVAQSIEATLSEKDVISEKVEQLLISTRNAFYIGRGNDYYVTME | 480 |
| | | NGK EA DF+LVHELS+VAQSIEATLSEKD+++EKV+ LL +TRNAFYIGRGNDYYV ME | |
| Sbjct: | 421 | NGKQEALDFNLVHELSLVAQSIEATLSEKDLVAEKVQALLATTRNAFYIGRGNDYYVAME | 480 |
| Query: | 481 | AALKLKEISYIQTEGFAAGELKHGTISLIEDNTPVIALISADSTIAAHTRGNIQEVVSRG | 540 |
| | | AALKLKEISYIQ EGFAAGELKHGTISLIE++TPVIALIS+ +A+HTRGNIQEV +RG | |
| Sbjct: | 481 | AALKLKEISYIQCEGFAAGELKHGTISLIEEDTPVIALISSSQLVASHTRGNIQEVAARG | 540 |
| Query: | 541 | ANALIIVEEGLEREGDDIIVNKVHPFLSAISMVIPTQLIAYYASLQRGLDVDKPRNLAKA | 600 |
| | | A+ L +VEEGL+REGDDIIVNKVHPFL+ I+MVIPTQLIAYYASLQRGLDVDKPRNLAKA | |
| Sbjct: | 541 | AHVLTVVEEGLDREGDDIIVNKVHPFLAPIAMVIPTQLIAYYASLQRGLDVDKPRNLAKA | 600 |
| Query: | 601 | VTVE | 604 |
| | | VTVE | |
| Sbjct: | 601 | VTVE | 604 |

[7348] Based on this analysis, it was predicted that these proteins and their epitopes could be useful antigens for vaccines or diagnostics.

### EXAMPLE 1331

[7349] A DNA sequence (GBSx1415) was identified in S. agalactiae <SEQ ID 4081> which encodes the amino acid sequence <SEQ ID 4082>. Analysis of this protein sequence reveals the following:

```
Possible site: 37
>>> Seems to have a cleavable N-term signal seq.
----- Final Results -----
                                bacterial outside --- Certainty = 0.3000(Affirmative) < succ>
                              bacterial membrane --- Certainty = 0.0000(Not Clear) < succ>
                            bacterial cytoplasm --- Certainty = 0.0000(Not Clear) < succ>
```

[7350] A related GBS nucleic acid sequence <SEQ ID 9797> which encodes amino acid sequence <SEQ ID 9798> was also identified.

[7351] The protein has homology with the following sequences in the GENPEPT database.

| >GP: AAC44435 GB: U65000 type-I signal peptidase SpsB [Staphylococcus | | | |
|---|---|---|---|
| aureus] | | | |
| Identities = 62/185 (33%), Positives = 97/185 (51%), Gaps = 12/185 (6%) | | | |
| Query: | 10 | VKRDFIRNIILALIAVLILILLRYFVFATFKVHKDATNSYFSNGDVVVVN----RNRTPK | 65 |
| | | +K++ + II +A +IL ++ F+ + + ++ + +G+ V VN + + | |
| Sbjct: | 1 | MKKELLEWIISIAVAFVILFIVGKFIVTPYTIKGESMDPTLKDGERVAVNIIGYKTGGLE | 60 |
| Query: | 66 | YKDFIVYKVGKIF-YISRVIGEPNQKVRVMDDILYLNDVFKDEPYIEKMKNAYSEKKDGQ | 124 |
| | | + +V+ K Y+ RVIG P KV +D LY+N +DEPY+ N + K G | |
| Sbjct: | 61 | KGNVVVFHANKNDDYVKRVIGVPGDKVEYKNDTLYVNGKKQDEPYL----NYNLKHKQGD | 116 |
| Query: | 125 | MPFTSDFSVETL--TRNKESRVPKGSYLVLNDNRQNKNDSRKFGLIKEKDIRGVITFKVY | 182 |
| | | T F V+ L K + +PKG YLVL DNR+ DSR FGLI E I G ++F+ + | |
| Sbjct: | 117 | Y-ITGTFQVKDLPNANPKSNVIPKGKYLVLGDNREVSKDSRAFGLIDEDQIVGKVSFRFW | 175 |
| Query: | 183 | PLSEF | 187 |
| | | P SEF | |
| Sbjct: | 176 | PFSEF | 180 |

[7352] A related DNA sequence was identified in S. pyogenes <SEQ ID 4083> which encodes the amino acid sequence <SEQ ID 4084>. Analysis of this protein sequence reveals the following:

| Possible site: 32 | | | | |
|---|---|---|---|---|
| >>> Seems to have an uncleavable N-term signal seq | | | | |
| | INTEGRAL | Likelihood = −14.22 | Transmembrane | 10-26 (4-34) |

```
----- Final Results -----
                              bacterial membrane --- Certainty = 0.6689(Affirmative) < succ>
                                bacterial outside --- Certainty = 0.0000(Not Clear) < succ>
                            bacterial cytoplasm --- Certainty = 0.0000(Not Clear) < succ>
```

[7353] An alignment of the GAS and GBS proteins is shown below.

| Identities = 99/185 (53%), Positives = 130/185 (69%) | | | |
|---|---|---|---|
| Query: | 9 | MVKRDFIRNIILALIAVLILILLRYFVFATFKVHKDATNSYFSNGDVVVVNRNRTPKYKD | 68 |
| | | MVKRDFIRNI+L LI ++ ILLR FVF+TFKV + N+Y +GD+V + +N PKYKD | |
| Sbjct: | 1 | MVKRDFIRNILLLLIVIIGAILLRIFVFSTFKVSPETANTYLKSGDLVTIKKNIQPKYKD | 60 |
| Query: | 69 | FIVYKVGKIFYISRVIGEPNQKVRVMDDILYLNDVFKDEPYIEKMKNAYSEKKDGQMPFT | 128 |
| | | F+VY+VGK Y+SRVI V MDDI YLN++ + + Y+EKMK Y +T | |
| Sbjct: | 61 | FVVYRVGKKDYVSRVIAVEGDSVTYMDDIFYLNNMVESQAYLEKMKAHYLNHAPFGTLYT | 120 |
| Query: | 129 | SDFSVETLTRNKESRVPKGSYLVLNDNRQNKNDSRKFGLIKEKDIRGVITFKVYPLSEFG | 188 |
| | | DF+V T+T +K +VPKG YL+LNDNR+N NDSR+FGLI I+G++TF+V PLS+FG | |
| Sbjct: | 121 | DDFTVATITADKYQKVPKGKYLLLNDNRKNTNDSRRFGLINASQIKGLVTFRVLPLSDFG | 180 |
| Query: | 189 | FTASE | 193 |
| | | F E | |
| Sbjct: | 181 | FVEVE | 185 |

[7354] A related GBS gene <SEQ ID 8789> and protein <SEQ ID 8790> were also identified. Analysis of this protein sequence reveals the following:

| Lipop: Possible site: −1 Crend: 10 | | | |
|---|---|---|---|
| McG: Discrim Score: 10.13 | | | |
| GvH: Signal Score (−7.5): 0.45 | | | |
| Possible site: 37 | | | |
| >>> Seems to have a cleavable N-term signal seq. | | | |
| ALOM program | count: 0 | value: 3.82 | threshold: 0.0 |

| | | |
|---|---|---|
| PERIPHERAL | Likelihood = 3.82 | 69 |

modified ALOM score: −1.26
*** Reasoning Step: 3
----- Final Results -----
bacterial outside --- Certainty = 0.3000 (Affirmative) < succ>
bacterial membrane --- Certainty = 0.0000 (Not Clear) < succ>
bacterial cytoplasm --- Certainty = 0.0000 (Not Clear) < succ>

[7355] The protein has homology with the following sequences in the databases:

[chemical structure]

[7356] SEQ ID 8790 (GBS7) was expressed in E. coli as a GST-fusion product. SDS-PAGE analysis of total cell extract is shown in FIG. 1 (lane 4; MW 46 kDa). It was also expressed in E. coli as a His-fusion product. SDS-PAGE analysis of total cell extract is shown in FIG. 2 (lane 4; MW 21 kDa). The GBS7-His fusion product was purified (FIG. 189, lane 6) and used to immunise mice. The resulting antiserum was used for FACS (FIG. 262), which confirmed that the protein is immunoaccessible on GBS bacteria.

[7357] Based on this analysis, it was predicted that these proteins and their epitopes could be useful antigens for vaccines or diagnostics.

### EXAMPLE 1332

[7358] A DNA sequence (GBSx1416) was identified in S. agalactiae <SEQ ID 4085> which encodes the amino acid sequence <SEQ ID 4086>. Analysis of this protein sequence reveals the following:

Possible site: 54
>>> Seems to have no N-terminal signal sequence
----- Final Results -----
bacterial cytoplasm --- Certainty = 0.1099 (Affirmative) < succ>
bacterial membrane --- Certainty = 0.0000 (Not Clear) < succ>
bacterial outside --- Certainty = 0.0000 (Not Clear) < succ>

[7359] A related GBS nucleic acid sequence <SEQ ID 9795> which encodes amino acid sequence <SEQ ID 9796> was also identified.

[7360] The protein has homology with the following sequences in the GENPEPT database.

| >GP: AAF25804 GB: AF172173 pyruvate kinase [treptococcus thermophilus] | | | |
|---|---|---|---|
| Identities = 413/500 (82%), Positives = 451/500 (89%) | | | |
| Query: | 1 | MNKRVKIVATLGPAVEFRGGKKFGESGYWGESLDVEASAEKIAQLIKEGANVFRFNFSHG | 60 |
| | | MNKRVKIVATLGPAVE RGGKKFGE GYW E LD +ASA+ IAQLI+EGANVFRFNFSHG | |
| Sbjct: | 1 | MNKRVKIVATLGPAVEIRGGKKFGEDGYWSEKLDPDASAKNIAQLIEEGANVFRFNFSHG | 60 |
| Query: | 61 | DHAEQGARMATVRKAEEIAGQKVGFLLDTKGPEIRTELFEDGADFHSYTTGTKLRVATKQ | 120 |
| | | +HAEQG RM VR AE IAGQKVGFLLDTKGPEIRTELFE A ++Y TG ++R+ATKQ | |
| Sbjct: | 61 | NHAEQGERMDVVRMAESIAGQKVGFLLDTKGPEIRTELFEGDAKEYAYKTGEQIRIATKQ | 120 |
| Query: | 121 | GIKSTPEVIALNVAGGLDIFDDVEVGKQILVDDGKLGLTVFAKDKDTREFEVVVENDGLI | 180 |
| | | G+KST +VIALNVAG LDIFDDVEVGKQ+LVDDGKLGL V KD + REF V VENDG+I | |
| Sbjct: | 121 | GLKSTRDVIALNVAGALDIFDDVEVGKQVLVDDGKLGLRVVDKDAEKREFIVEVENDGII | 180 |
| Query: | 181 | GKQKGVNIPYTKIPFPALAERDNADIRFGLEQGLNFIAISFVRTAKDVNEVRAICEETGN | 240 |
| | | KQKGVNIPYTKIPFPALAERDNADIRFGLEQG+NFIAISFVRTAKDV EVRAICEETGN | |
| Sbjct: | 181 | AKQKGVNIPYTKIPFPALAERDNADIRFGLEQGINFIAISFVRTAKDVQEVRAICEETGN | 240 |
| Query: | 241 | GHVKLFAKIENQQGIDNIDEIIEAADGIMIARGDMGIEVPFEMVPVYQKMIITKVNAAGK | 300 |
| | | GHVKL AKIENQQGIDNIDEIIEAADGIMIARGDMGIEVPFEMVPVYQKMIITKVNAAGK | |
| Sbjct: | 241 | GHVKLLAKIENQQGIDNIDEIIEAADGIMIARGDMGIEVPFEMVPVYQKMIITKVNAAGK | 300 |
| Query: | 301 | AVITATNMLETMTDKPRATRSEVSDVFNAVIDGTDATMLSGESANGKYPVESVRTMATID | 360 |
| | | V+TATNMLETMT+KPRATRSEVSDVFNAVIDGTDATMLSGESANG YPVESVRTMATI | |
| Sbjct: | 301 | IVVTATNMLETMTEKPRATRSEVSDVFNAVIDGTDATMLSGESANGPYPVESVRTMATIH | 360 |
| Query: | 361 | KNAQTLLNEYGRLDSSAFPRNNKTDVIASAVKDATHSMDIKLVVTITETGNTARAISKFR | 420 |
| | | KNAQTLL EYGRL+SS F R++ T+V+ASAVKDAT+SM I+L+V +TE+GNTA I +R | |
| Sbjct: | 361 | KNAQTLLKEYGRLNSSTFDRSSNTEVVASAVKDATNSMHIQLIVALTESGNTASLIDTYR | 420 |
| Query: | 421 | PDADILAVTFDEKVQRSLMINWGVIPVLADKPASTDDMFEVAERVALEAGFVESGDNIVI | 480 |
| | | P+ADI A+TFDE Q+SLM+NWGVIPV+ + P+STDDMFEVAERVALE+G VESGDNIVI | |
| Sbjct: | 421 | PEADIWAITFDELTQKSLMLNWGVIPVVTETPSSTDDMFEVAERVALESGLVESGDNIVI | 480 |
| Query: | 481 | VAGVPVGTGGTNTMRVRTVK | 500 |
| | | VAGVPVG+G TNTMR+RTVK | |
| Sbjct: | 481 | VAGVPVGSGNTNTMRIRTVK | 500 |

[7361] A related DNA sequence was identified in S. pyogenes <SEQ ID 4087> which encodes the amino acid sequence <SEQ ID 4088>. Analysis of this protein sequence reveals the following:

Possible site: 54
>>> Seems to have no N-terminal signal sequence
----- Final Results -----
bacterial cytoplasm --- Certainty = 0.0915 (Affirmative) < succ>
bacterial membrane --- Certainty = 0.0000 (Not Clear) < succ>
bacterial outside --- Certainty = 0.0000 (Not Clear) < succ>
RGD motif: 272-274

[7362] The protein has homology with the following sequences in the databases:

| >GP: AAF25804 GB: AF172173 pyruvate kinase [Streptococcus thermophilus] | | | |
|---|---|---|---|
| Identities = 404/500 (80%), Positives = 457/500 (90%) | | | |
| Query: | 1 | MNKRVKIVATLGPAVEIRGGKKYGEDGYWAGQLDVEESAKKIAELIEAGANVFRFNFSHG | 60 |
| | | MNKRVKIVATLGPAVEIRGGKK+GEDGYW+ +LD + SAK IA+LIE GANVFRFNFSHG | |
| Sbjct: | 1 | MNKRVKIVATLGPAVEIRGGKKFGEDGYWSEKLDPDASAKNIAQLIEEGANVFRFNFSHG | 60 |
| Query: | 61 | DHKEQGDRMATVRLAEEIARQKVGFLLDTKGPEMRTELFADDAKEFSYVTGEKIRVATTQ | 120 |
| | | +H EQG+RM VR+AE IA QKVGFLLDTKGPE+RTELF DAKE++Y TGE+IR+AT Q | |
| Sbjct: | 61 | NHAEQGERMDVVRMAESIAGQKVGFLLDTKGPEIRTELFEGDAKEYAYKTGEQIRIATKQ | 120 |
| Query: | 121 | GIQSTRDVIALNVAGSLDIYDEVEVGHTILIDDGKLGLKVIDKDIATRQFIVEVENDGII | 180 |
| | | G++STRDVIALNVAG+LDI+D+VEVG +L+DDGKLGL+V+DKD R+FIVEVENDGII | |
| Sbjct: | 121 | GLKSTRDVIALNVAGALDIFDDVEVGKQVLVDDGKLGLRVVDKDAEKREFIVEVENDGII | 180 |
| Query: | 181 | AKQKGVNIPNTKIPFPALAERDNADIRFGLEQGLNFIAISFVRTAKDVEEVREICRETGN | 240 |
| | | AKQKGVNIP TKIPFPALAERDNADIRFGLEQG+NFIAISFVRTAKDV+EVR IC ETGN | |
| Sbjct: | 181 | AKQKGVNIPYTKIPFPALAERDNADIRFGLEQGINFIAISFVRTAKDVQEVRAICEETGN | 240 |
| Query: | 241 | DHVQLFAKIENQQGIDNLDEIIEAADGIMIARGDMGIEVPFEMVPVFQKMIITKVNAAGK | 300 |
| | | HV+L AKIENQQGIDN+DEIIEAADGIMIARGDMGIEVPFEMVPV+QKMIITKVNAAGK | |
| Sbjct: | 241 | GHVKLLAKIENQQGIDNIDEIIEAADGIMIARGDMGIEVPFEMVPVYQKMIITKVNAAGK | 300 |
| Query: | 301 | AVITATNMLETMTEKPRATRSEVSDVFNAVIDGTDATMLSGESANGKYPVESVRTMATID | 360 |
| | | V+TATNMLETMTEKPRATRSEVSDVFNAVIDGTDATMLSGESANG YPVESVRTMATI | |
| Sbjct: | 301 | IVVTATNMLETMTEKPRATRSEVSDVFNAVIDGTDATMLSGESANGPYPVESVRTMATIH | 360 |
| Query: | 361 | RNAQTLLNEYGRLDSSAFPRTNKTDVIASAVKDATHSMDIKLVVTITETGNTARAISKFR | 420 |
| | | +NAQTLL EYGRL+SS F R++ T+V+ASAVKDAT+SM I+L+V +TE+GNTA I +R | |
| Sbjct: | 361 | KNAQTLLKEYGRLNSSTFDRSSNTEVVASAVKDATNSMHIQLIVALTESGNTASLIDTYR | 420 |
| Query: | 421 | PDADILAVTFDEKVQRALMINWGVIPVLAEKPASTDDMFEVAERVAVEAGLVQSGDNIVI | 480 |
| | | P+ADI A+TFDE Q++LM+NWGVIPV+ E P+STDDMFEVAERVA+E+GLV+SGDNIVI | |
| Sbjct: | 421 | PEADIWAITFDELTQKSLMLNWGVIPVVTETPSSTDDMFEVAERVALESGLVESGDNIVI | 480 |
| Query: | 481 | VAGVPVGTGGTNTMRVRTVK | 500 |
| | | VAGVPVG+G TNTMR+RTVK | |
| Sbjct: | 481 | VAGVPVGSGNTNTMRIRTVK | 500 |

[7363] An alignment of the GAS and GBS proteins is shown below.

| Identities = 440/500 (88%), Positives = 462/500 (92%) | | | |
|---|---|---|---|
| Query: | 1 | MNKRVKIVATLGPAVEFRGGKKFGESGYWGESLDVEASAEKIAQLIKEGANVFRFNFSHG | 60 |
| | | MNKRVKIVATLGPAVE RGGKK+GE GYW LDVE SA+KIA+LI+ GANVFRFNFSHG | |
| Sbjct: | 1 | MNKRVKIVATLGPAVEIRGGKKYGEDGYWAGQLDVEESAKKIAELIEAGANVFRFNFSHG | 60 |
| Query: | 61 | DHAEQGARMATVRKAEEIAGQKVGFLLDTKGPEIRTELFEDGADFHSYTTGTKLRVATKQ | 120 |
| | | DH EQG RMATVR AEEIA QKVGFLLDTKGPE+RTELF D A SY TG K+RVAT Q | |
| Sbjct: | 61 | DHKEQGDRMATVRLAEEIARQKVGFLLDTKGPEMRTELFADDAKEFSYVTGEKIRVATTQ | 120 |
| Query: | 121 | GIKSTFEVIALNVAGGLDIFDDVEVGKQILVDDGKLGLTVFAKDKDTREFEVVVENDGLI | 180 |
| | | GI+ST +VIALNVAG LDI+D+VEVG IL+DDGKLGL V KD TR+F V VENDG+I | |
| Sbjct: | 121 | GIQSTRDVIALNVAGSLDIYDEVEVGHTILIDDGKLGLKVIDKDIATRQFIVEVENDGII | 180 |
| Query: | 181 | GKQKGVNIPYTKIPFPALAERDNADIRFGLEQGLNFIAISFVRTAKDVNEVRAICEETGN | 240 |
| | | KQKGVNIP TKIPFPALAERDNADIRFGLEQGLNFIAISFVRTAKDV EVR IC ETGN | |
| Sbjct: | 181 | AKQKGVNIPNTKIPFPALAERDNADIRFGLEQGLNFIAISFVRTAKDVEEVREICRETGN | 240 |
| Query: | 241 | GHVKLFAKIENQQGIDNIDEIIEAADGIMIARGDMGIEVPFEMVPVYQKMIITKVNAAGK | 300 |
| | | HV+LFAKIENQQGIDN+DEIIEAADGIMIARGDMGIEVPFEMVPV+QKMIITKVNAAGK | |
| Sbjct: | 241 | DHVQLFAKIENQQGIDNLDEIIEAADGIMIARGDMGIEVPFEMVPVFQKMIITKVNAAGK | 300 |
| Query: | 301 | AVITATNMLETMTDKPRATRSEVSDVFNAVIDGTDATMLSGESANGKYPVESVRTMATID | 360 |
| | | AVITATNMLETMT+KPRATRSEVSDVFNAVIDGTDATMLSGESANGKYPVESVRTMATID | |
| Sbjct: | 301 | AVITATNMLETMTEKPRATRSEVSDVFNAVIDGTDATMLSGESANGKYPVESVRTMATID | 360 |
| Query: | 361 | KNAQTLLNEYGRLDSSAFPRNNKTDVIASAVKDATHSMDIKLVVTITETGNTARAISKFR | 420 |
| | | +NAQTLLNEYGRLDSSAFPR NKTDVIASAVKDATHSMDIKLVVTITETGNTARAISKFR | |
| Sbjct: | 361 | RNAQTLLNEYGRLDSSAFPRTNKTDVIASAVKDATHSMDIKLVVTITETGNTARAISKFR | 420 |
| Query: | 421 | PDADILAVTFDEKVQRSLMINWGVIPVLADKPASTDDMFEVAERVALEAGFVESGDNIVI | 480 |
| | | PDADILAVTFDEKVQR+LMINWGVIPVLA+KPASTDDMFEVAERVA+EAG V+SGDNIVI | |
| Sbjct: | 421 | PDADILAVTFDEKVQRALMINWGVIPVLAEKPASTDDMFEVAERVAVEAGLVQSGDNIVI | 480 |
| Query: | 481 | VAGVPVGTGGTNTMRVRTVK | 500 |
| | | VAGVPVGTGGTNTMRVRTVK | |
| Sbjct: | 481 | VAGVPVGTGGTNTMRVRTVK | 500 |

[7364] A related GBS gene <SEQ ID 8791> and protein <SEQ ID 8792> were also identified. Analysis of this protein sequence reveals the following:
[7365] Belongs to Glycolysis/gluconeogenesis pathway. Proteins belonging to this methabolic pathway have been experimentally detected on the surface of Streptococci.

[7366] The protein has homology with the following sequences in the databases:

| >GP\|6708108\|gb\|AAF25804.1\|AF172173_2\|AF172173 pyruvate kinase | | | |
|---|---|---|---|
| [Streptococcus thermophilus] | | | |
| Score = 821 bits (2098), Expect = 0.0 | | | |
| Identities = 412/500 (82%), Positives = 450/500 (89%) | | | |
| Query: | 1 | MNKRVKIVATLGPAVEFRGGKKFGESGYWGESLDVEASAEKIAQLIKEGANVFRFNFSHG | 60 |
| | | MNKRVKIVATLGPAVE RGGKKFGE GYW E LD +ASA+ IAQLI+EGANVFRFNFSHG | |
| Sbjct: | 1 | MNKRVKIVATLGPAVEIRGGKKFGEDGYWSEKLDPDASAKNIAQLIEEGANVFRFNFSHG | 60 |
| Query: | 61 | DHAEQGARMATVRKAEEIAGQKVGFLLDTKGPEIRTELFEDGADFHSYTTGTKLRVATKQ | 120 |
| | | +HAEQG RM VR AE IAGQKVGFLLDTKGPEIRTELFE A ++Y TG ++R+ATKQ | |
| Sbjct: | 61 | NHAEQGERMDVVRMAESIAGQKVGFLLDTKGPEIRTELFEGDAKEYAYKTGEQIRIATKQ | 120 |
| Query: | 121 | GIKSTPEVIALNVAGGLDIFDDVEVGKQILVDDGKLGLTVFAKDKDTREFEVVVENDGLI | 180 |
| | | G+KST +VIALNVAG LDIFDDVEVGKQ+LVDDGKLGL V KD + REF V VENDG+I | |
| Sbjct: | 121 | GLKSTRDVIALNVAGALDIFDDVEVGKQVLVDDGKLGLRVVDKDAEKREFIVEVENDGII | 180 |
| Query: | 181 | GKQKGVNIPYTKIPFPALAERDNADIRFGLEQGLNFIAISFVRTAKDVNEVRAICEETGX | 240 |
| | | KQKGVNIPYTKIPFPALAERDNADIRFGLEQG+NFIAISFVRTAKDV EVRAICEETG | |
| Sbjct: | 181 | AKQKGVNIPYTKIPFPALAERDNADIRFGLEQGINFIAISFVRTAKDVQEVRAICEETGN | 240 |
| Query: | 241 | GHVKLFAKIENQQGIDNIDEIIEAADGIMIARGDMGIEVPFEMVPVYQKMIITKVNAAGK | 300 |
| | | GHVKL AKIENQQGIDNIDEIIEAADGIMIARGDMGIEVPFEMVPVYQKMIITKVNAAGK | |
| Sbjct: | 241 | GHVKLLAKIENQQGIDNIDEIIEAADGIMIARGDMGIEVPFEMVPVYQKMIITKVNAAGK | 300 |
| Query: | 301 | AVITATNMLETMTDKPRATRSEVSDVFNAVIDGTDATMLSGESANGKYPVESVRTMATID | 360 |
| | | V+TATNMLETMT+KPRATRSEVSDVFNAVIDGTDATMLSGESANG YPVESVRTMATI | |
| Sbjct: | 301 | IVVTATNMLETMTEKPRATRSEVSDVFNAVIDGTDATMLSGESANGPYPVESVRTMATIH | 360 |
| Query: | 361 | KNAQTLLNEYGRLDSSAFPRNNKTDVIASAVKDATHSMDIKLVVTITETGNTARAISKFR | 420 |
| | | KNAQTLL EYGRL+SS F R++ T+V+ASAVKDAT+SM I+L+V +TE+GNTA I +R | |
| Sbjct: | 361 | KNAQTLLKEYGRLNSSTFDRSSNTEVVASAVKDATNSMHIQLIVALTESGNTASLIDTYR | 420 |
| Query: | 421 | PDADILAVTFDEKVQRSLMINWGVIPVLADKPASTDDMFEVAERVALEAGFVESGDNIVI | 480 |
| | | P+ADI A+TFDE Q+SLM+NWGVIPV+ + P+STDDMFEVAERVALE+G VESGDNIVI | |
| Sbjct: | 421 | PEADIWAITFDELTQKSLMLNWGVIPVVTETPSSTDDMFEVAERVALESGLVESGDNIVI | 480 |
| Query: | 481 | VAGVPVGTGGTNTMRVRTVK | 500 |
| | | VAGVPVG+G TNTMR+RTVK | |
| Sbjct: | 481 | VAGVPVGSGNTNTMRIRTVK | 500 |

[7367] SEQ ID 8792 (GBS330) was expressed in E. coli as a His-fusion product. SDS-PAGE analysis of total cell extract is shown in FIG. 73 (lane 5; MW 59 kDa).

[7368] GBS330-His was purified as shown in FIG. 213, lane 6.

[7369] Based on this analysis, it was predicted that these proteins and their epitopes could be useful antigens for vaccines or diagnostics.

### EXAMPLE 1333

[7370] A DNA sequence (GBSx1417) was identified in S. agalactiae <SEQ ID 4089> which encodes the amino acid sequence <SEQ ID 4090>. Analysis of this protein sequence reveals the following:

```
Possible site: 18
>>> Seems to have no N-terminal signal sequence
----- Final Results -----
                            bacterial cytoplasm --- Certainty = 0.0632(Affirmative) < succ>
                              bacterial membrane --- Certainty = 0.0000(Not Clear) < succ>
                                bacterial outside --- Certainty = 0.0000(Not Clear) < succ>
```

[7371] The protein has homology with the following sequences in the GENPEPT database.

| >GP: AAF25803 GB: AF172173 phosphofructokinase | | | |
|---|---|---|---|
| [Streptococcus thermophilus] | | | |
| Identities = 270/337 (80%), Positives = 302/337 (89%), Gaps = 1/337 (0%) | | | |
| Query: | 1 | MKRIAVLTSGGDAPGMNAAIRAVVRKAISEGMEVYGINQGYYGMVTGDIFPLDANSVGDT | 60 |
| | | MKRIAVLTSGGDAPGMNAA+RAVV KAISEG+EV+GIN+GY GMV GDIF LDA V + | |
| Sbjct: | 1 | MKRIAVLTSGGDAPGMNAAVRAVVLKAISEGIEVFGINRGYAGMVEGDIFKLDAKRVENI | 60 |
| Query: | 61 | INRGGTFLRSARYPEFAELEGQLKGIEQLKKHGIEGVVVIGGDGSYHGAMRLTEHGFPAV | 120 |
| | | ++RGGTFL+SARYPEFA+LEGQLKGIEQLKK+GIEGVVVIGGDGSYHGAMRLTEHGFPAV | |
| Sbjct: | 61 | LSRGGTFLQSARYPEFAQLEGQLKGIEQLKKYGIEGVVVIGGDGSYHGAMRLTEHGFPAV | 120 |
| Query: | 121 | GLPGTIDNDIVGTDYTIGFDTAVATAVENLDRLRDTSASHNRTFVVEVMGRNAGDIALWS | 180 |
| | | GLPGTIDNDIVGTDYTIGFDTAVATA E LD+++DT+ SH RTFVVEVMGRNAGDIALW+ | |
| Sbjct: | 121 | GLPGTIDNDIVGTDYTIGFDTAVATATEALDKIQDTAFSHGRTFVVEVMGRNAGDIALWA | 180 |
| Query: | 181 | GIAAGADQIIVPEEEFNIDEVVSNVRAGYAAG−KHHQIIVLAEGVMSGDEFAKTMKAAGD | 239 |
| | | GIA+GADQIIVPEEE++I+EVV V+ GY +G K H IIVLAEGVM +EFA MK AGD | |
| Sbjct: | 181 | GIASGADQIIVPEEEYDINEVVRKVKEGYESGEKSHHIIVLAEGVMGAEEFAAKMKEAGD | 240 |
| Query: | 240 | DSDLRVTMLGHLLRGGSPTARDRVLASRMGAYAVQLLKEGRGGLAVGVHNEEMVESPILG | 299 |
| | | SDLR TNLGH++RGGSPTARDRVLAS MGA+AV LLKEG GG+AVG+HNE++VESPILG | |
| Sbjct: | 241 | TSDLRATNLGHVIRGGSPTARDRVLASWMGAHAVDLLKEGIGGVAVGIHNEQLVESPILG | 300 |
| Query: | 300 | LAEEGALFSLTDEGKIVVNNPHKADLRLAALNRDLAN | 336 |
| | | AEEGALFSLT++GKI+VNNPHKA L A LNR LAN | |
| Sbjct: | 301 | TAEEGALFSLTEDGKIIVNNPHKARLDFAELNRSLAN | 337 |

[7372] Proteins in the glycolysis/gluconeogenesis pathway have been experimentally detected on the surface of Streptococci.

[7373] A related DNA sequence was identified in S. pyogenes <SEQ ID 4091> which encodes the amino acid sequence <SEQ ID 4092>. Analysis of this protein sequence reveals the following:

```
Possible site: 18
>>> Seems to have no N-terminal signal sequence
----- Final Results -----
                            bacterial cytoplasm --- Certainty = 0.0632(Affirmative) < succ>
                              bacterial membrane --- Certainty = 0.0000(Not Clear) < succ>
                                bacterial outside --- Certainty = 0.0000(Not Clear) < succ>
```

[7374] An alignment of the GAS and GBS proteins is shown below.

| Identities = 274/336 (81%), Positives = 306/336 (90%), Gaps = 1/336 (0%) | | | |
|---|---|---|---|
| Query: | 1 | MKRIAVLTSGGDAPGMNAAIRAVVRKAISEGMEVYGINQGYYGMVTGDIFPLDANSVGDT | 60 |
| | | MKRIAVLTSGGDAPGMNAAIRAVVRKAISEGMEVYGIN+GY GMV GDIFPL + VGD | |
| Sbjct: | 1 | MKRIAVLTSGGDAPGMNAAIRAVVRKAISEGMEVYGINRGYAGMVDGDIFPLGSKEVGDK | 60 |
| Query: | 61 | INRGGTFLRSARYPEFAELEGQLKGIEQLKKHGIEGVVVIGGDGSYHGAMRLTEHGEPAV | 120 |
| | | I+RGGTFL SARYPEFA+LEGQL GIEQLKKHGIEGVVVIGGDGSYHGAMRLTEHGFPAV | |
| Sbjct: | 61 | ISRGGTFLYSARYPEFAQLEGQLAGIEQLKKHGIEGVVVIGGDGSYHGAMRLTEHGFPAV | 120 |
| Query: | 121 | GLPGTIDNDIVGTDYTIGFDTAVATAVENLDRLRDTSASHNRTFVVEVMGRNAGDIALWS | 180 |
| | | G+PGTIDNDI GTDYTIGFDTAV TAVE +D+LRDTS+SH RTFVVEVMGRNAGDIALW+ | |
| Sbjct: | 121 | GIPGTIDNDIAGTDYTIGFDTAVMTAVEAIDKLRDTSSSHGRTFVVEVMGRNAGDIALWA | 180 |
| Query: | 181 | GIAAGADQIIVPEEEFNIDEVVSNVRAGYA−AGKHHQIIVLAEGVMSGDEFAKTMKAAGD | 239 |
| | | GIA+GADQIIVPEEEF+I++V S ++ + GK+H IIVLAEGVMSG+ FA+ +K AGD | |
| Sbjct: | 181 | GIASGADQIIVPEEEFDIEKVASTIQYDFEHKGKNNHIIVLAEGVMSGEAFAQKLKEAGD | 240 |
| Query: | 240 | DSDLRVTNLGHLLRGGSPTARDRVLASRMGAYAVQLLKEGRGGLAVGVHNEEMVESPILG | 299 |
| | | SDLRVTNLGH+LRGGSPTARDRV+AS MG++AV+LLK+G+GGLAVG+HNEE+VESPILG | |
| Sbjct: | 241 | KSDLRVTNLGHILRGGSPTARDRVIASWMGSHAVELLKDGKGGLAVGIHNEELVESPILG | 300 |
| Query: | 300 | LAEEGALFSLTDEGKIVVNNPHKADLRLAALNRDLA | 335 |
| | | AEEGALFSLT+EGKI+VNNPHKA L AALNR L+ | |
| Sbjct: | 301 | TAEEGALFSLTEEGKIIVNNPHKARLDFAALNRSLS | 336 |

[7375] SEQ ID 4090 (GBS313) was expressed in E. coli as a His-fusion product. SDS-PAGE analysis of total cell extract is shown in FIG. 45 (lane 5; MW 41 kDa).

[7376] GBS313-His was purified as shown in FIG. 204, lane 4.

[7377] Based on this analysis, it was predicted that these proteins and their epitopes could be useful antigens for vaccines or diagnostics.

### EXAMPLE 1334

[7378] A DNA sequence (GBSx1418) was identified in S. agalactiae <SEQ ID 4093> which encodes the amino acid sequence <SEQ ID 4094>. This protein is predicted to be DNA polymerase III alpha subunit (dnaE). Analysis of this protein sequence reveals the following:

```
Possible site: 55
>>> Seems to have no N-terminal signal sequence
----- Final Results -----
                            bacterial cytoplasm --- Certainty = 0.1446(Affirmative) < succ>
                              bacterial membrane --- Certainty = 0.0000(Not Clear) < succ>
                                bacterial outside --- Certainty = 0.0000(Not Clear) < succ>
```

[7379] There is also homology to SEQ ID 4096.

[7380] Based on this analysis, it was predicted that this protein and its epitopes, could be useful antigens for vaccines or diagnostics.

### EXAMPLE 1335

[7381] A DNA sequence (GBSx1419) was identified in S. agalactiae <SEQ ID 4097> which encodes the amino acid sequence <SEQ ID 4098>. This protein is predicted to be YHCF (farR). Analysis of this protein sequence reveals the following:

```
Possible site: 52
>>> Seems to have no N-terminal signal sequence
----- Final Results -----
                            bacterial cytoplasm --- Certainty = 0.3316(Affirmative) < succ>
                              bacterial membrane --- Certainty = 0.0000(Not Clear) < succ>
                                bacterial outside --- Certainty = 0.0000(Not Clear) < succ>
```

[7382] The protein has homology with the following sequences in the GENPEPT database.

| >GP: BAB04102 GB: AP001508 transcriptional regulator (GntR family) | | | |
|---|---|---|---|
| [Bacillus halodurans] | | | |
| Identities = 51/116 (43%), Positives = 79/116 (67%) | | | |
| Query: | 5 | FNEKSPIYSQIAEHIKMQIVSQEIKSGDQLPTVRELAQEAGVNPNTMQRAFTELEREGMV | 64 |
| | | F+ PIY Q+AE +K QIV E++ G++LP+VR++ EA VNPNT+QR + ELE +V | |
| Sbjct: | 5 | FHSSEPIYLQLAERVKRQIVRGELRLGEKLPSVRDMGIEANVNPNTVQRTYRELEGLKIV | 64 |
| Query: | 65 | FSQRTSGRFVTEDNLLIGKIRQQVAKAELATFVNNMKKIGYKLDEITVALDHFIKE | 120 |
| | | S+R G FVTED ++ IR+Q+ + E++ FV M+++GY +EI L+ ++ E | |
| Sbjct: | 65 | ESKRGQGTFVTEDEQVLQAIREQMKETEISHFVQGMREMGYSDNEIQAGLESYLTE | 120 |

[7383] A related DNA sequence was identified in S. pyogenes <SEQ ID 4099> which encodes the amino acid sequence <SEQ ID 4100>. Analysis of this protein sequence reveals the following:

```
Possible site: 25
>>> Seems to have no N-terminal signal sequence
----- Final Results -----
                            bacterial cytoplasm --- Certainty = 0.2075(Affirmative) < succ>
                              bacterial membrane --- Certainty = 0.0000(Not Clear) < succ>
                                bacterial outside --- Certainty = 0.0000(Not Clear) < succ>
```

[7384] An alignment of the GAS and GBS proteins is shown below.

| Identities = 80/120 (66%), Positives = 100/120 (82%) | | | |
|---|---|---|---|
| Query: | 1 | MAWEFNEKSPIYSQIAEHIKMQIVSQEIKSGDQLPTVRELAQEAGVNPNTMQRAFTELER | 60 |
| | | M+W+F EKSPIY+QIA+H+ MQI+SQEIKSGDQLPTVRE A+ AGVNPNTMQRAFTELER | |
| Sbjct: | 1 | MSWKFEEKSPIYAQIAQHVMMQIISQEIKSGDQLPTVREYAEIAGVNPNTMQRAFTELER | 60 |
| Query: | 61 | EGMVFSQRTSGRFVTEDNLLIGKIRQQVAKAELATFVNNMKKIGYKLDEITVALDHFIKE | 120 |
| | | EGMV+SQRT+GRFVT+D LI + R+++A +EL +F+ NM K+G+ EI L F+KE | |
| Sbjct: | 61 | EGMVYSQRTAGRFVTDDQKLIARKRRELAISELESFITNMTKMGFSHTEIIPVLTSFLKE | 120 |

[7385] Based on this analysis, it was predicted that these proteins and their epitopes could be useful antigens for vaccines or diagnostics.

### EXAMPLE 1336

[7386] A DNA sequence (GBSx1420) was identified in S. agalactiae <SEQ ID 4101> which encodes the amino acid sequence <SEQ ID 4102>. This protein is predicted to be ABC transporter, ATP-binding protein (yhcG). Analysis of this protein sequence reveals the following:

```
Possible site: 26
>>> Seems to have no N-terminal signal sequence
----- Final Results -----
                            bacterial cytoplasm --- Certainty = 0.2757(Affirmative) < succ>
                              bacterial membrane --- Certainty = 0.0000(Not Clear) < succ>
                                bacterial outside --- Certainty = 0.0000(Not Clear) < succ>
```

[7387] The protein has homology with the following sequences in the GENPEPT database.

| >GP: CAB12735 GB: Z99108 similar to glycine betaine/L-proline | | | |
|---|---|---|---|
| transport [Bacillus subtilis] | | | |
| Identities = 87/228 (38%), Positives = 150/228 (65%), Gaps = 1/228 (0%) | | | |
| Query: | 5 | LQLHHVTKKYHKHTAVNDVTVSIPTGKIIGLLGPNGSGKTTIIKMINGLLQPDKGDIVID | 64 |
| | | ++L HV+KKY +HTAVNDV++++ +G+I GL+GPNGSGK+T +KM+ GLL P G + +D | |
| Sbjct: | 3 | IKLEHVSKKYGRHTAVNDVSITLSSGRIYGLIGPNGSGKSTTLKMMAGLLFPTSGFVKVD | 62 |
| Query: | 65 | GYRPSVETKKIISYLPDTSYLQENMKIKDVVTLFEDFYNDFDSKVAYQLFEDLNLNPRER | 124 |
| | | + + E + +YL + + +KD+V ++ + DF ++ Y+L ++ LNP ++ | |
| Sbjct: | 63 | EEQVTREMVRQTAYLTELDMFYPHFTVKDMVNFYQSQFPDFHTEQVYKLLNEMQLNPEKK | 122 |
| Query: | 125 | LKNLSKGNKEKVQLILVMSRKARLYILDEPIGGVDPAARDYILKTIISNYSNDAS-VLIS | 183 |
| | | +K LSKGN+ +++++L ++R+A + +LDEP G+DP RD I+ +++S + V+I+ | |
| Sbjct: | 123 | IKKLSKGNRGRLKIVLALARRADVILLDEPFSGLDPMVRDSIVNSLVSYIDFEQQIVVIA | 182 |
| Query: | 184 | THLISDIEPILDEVIFLKEGEIDLQGNADDLREEHNCSIDALFRERFK | 231 |
| | | TH I +IE +LDEVI L GE Q +D+RE+ S+ F+ + + | |
| Sbjct: | 183 | THEIDEIETLLDEVIILANGEKVAQREVEDIREQEGMSVLQWFKSKME | 230 |

[7388] A related DNA sequence was identified in S. pyogenes <SEQ ID 4103> which encodes the amino acid sequence <SEQ ID 4104>. Analysis of this protein sequence reveals the following:

```
Possible site: 13
>>> Seems to have no N-terminal signal sequence
----- Final Results -----
                            bacterial cytoplasm --- Certainty = 0.1983(Affirmative) < succ>
                              bacterial membrane --- Certainty = 0.0000(Not Clear) < succ>
                                bacterial outside --- Certainty = 0.0000(Not Clear) < succ>
```

[7389] An alignment of the GAS and GBS proteins is shown below.

| Identities = 171/231 (74%), Positives = 200/231 (86%) | | | |
|---|---|---|---|
| Query: | 1 | MTQLLQLHHVTKKYHKHTAVNDVTVSIPTGKIIGLLGPNGSGKTTIIKMINGLLQPDKGD | 60 |
| | | M LLQLHHV+K Y + A++D+T++IP GKIIGLLGPNGSGKTT+IK+INGLLQP+KG+ | |
| Sbjct: | 1 | MAHLLQLHHVSKSYREKKAIDDLTITIPNGKIIGLLGPNGSGKTTLIKLINGLLQPNKGE | 60 |
| Query: | 61 | IVIDGYRPSVETKKIISYLPDTSYLQENMKIKDVVTLFEDFYNDFDSKVAYQLFEDLNLN | 120 |
| | | IVIDGYRP VETKKIISYLPDT+YL ENM+IKD++ F DFY+DFD A L DL L+ | |
| Sbjct: | 61 | IVIDGYRPCVETKKIISYLPDTTYLNENMRIKDMLEFFSDFYSDFDKSKATSLLRDLELD | 120 |
| Query: | 121 | PRERLKNLSKGNKEKVQLILVMSRKARLYILDEPIGGVDPAARDYILKTIISNYSNDASV | 180 |
| | | P +R K LSKGNKEKVQLILVMSRKARLY+LDEPIGGVDPAARDYILKTII++Y +ASV | |
| Sbjct: | 121 | PEDRFKTLSKGNKEKVQLILVMSRKARLYVLDEPIGGVDPAARDYILKTIINSYCENASV | 180 |
| Query: | 181 | LISTHLISDIEPILDEVIFLKEGEIDLQGNADDLREEHNCSIDALFRERFK | 231 |
| | | +ISTHLISDIEPILDEVIFLK+G + L GNADDLR+E+ SID+LFRE +K | |
| Sbjct: | 181 | IISTHLISDIEPILDEVIFLKQGRLFLSGNADDLRQEYQQSIDSLFRETYK | 231 |

[7390] Based on this analysis, it was predicted that these proteins and their epitopes could be useful antigens for vaccines or diagnostics.

### EXAMPLE 1337

[7391] A DNA sequence (GBSx1421) was identified in S. agalactiae <SEQ ID 4105> which encodes the amino acid sequence <SEQ ID 4106>. Analysis of this protein sequence reveals the following:

| Possible site: 48 | | | | |
|---|---|---|---|---|
| >>> Seems to have an uncleavable N-term signal seq | | | | |
| | INTEGRAL | Likelihood = −15.39 | Transmembrane | 120-136 (103-146) |
| | INTEGRAL | Likelihood = −9.98 | Transmembrane | 55-71 (47-79) |
| | INTEGRAL | Likelihood = −9.45 | Transmembrane | 22-38 (15-43) |
| | INTEGRAL | Likelihood = −6.05 | Transmembrane | 192-208 (187-218) |
| | INTEGRAL | Likelihood = −4.94 | Transmembrane | 230-246 (228-253) |
| | INTEGRAL | Likelihood = −4.78 | Transmembrane | 157-173 (155-175) |
| | INTEGRAL | Likelihood = −1.44 | Transmembrane | 103-119 (103-119) |

```
----- Final Results -----
                              bacterial membrane --- Certainty = 0.7156(Affirmative) < succ>
                                bacterial outside --- Certainty = 0.0000(Not Clear) < succ>
                            bacterial cytoplasm --- Certainty = 0.0000(Not Clear) < succ>
```

[7392] The protein has no significant homology with any sequences in the GENPEPT database.

[7393] A related DNA sequence was identified in S. pyogenes <SEQ ID 4107> which encodes the amino acid sequence <SEQ ID 4108>. Analysis of this protein sequence reveals the following:

| Possible site: 28 | | | | |
|---|---|---|---|---|
| >>> Seems to have a cleavable N-term signal seq. | | | | |
| | INTEGRAL | Likelihood = −11.52 | Transmembrane | 190-206 (187-215) |
| | INTEGRAL | Likelihood = −10.67 | Transmembrane | 121-137 (104-141) |
| | INTEGRAL | Likelihood = −5.73 | Transmembrane | 63-79 (59-82) |
| | INTEGRAL | Likelihood = −4.83 | Transmembrane | 158-174 (156-181) |
| | INTEGRAL | Likelihood = −1.38 | Transmembrane | 232-248 (232-248) |
| | INTEGRAL | Likelihood = −0.85 | Transmembrane | 104-120 (104-120) |

```
----- Final Results -----
                              bacterial membrane --- Certainty = 0.5607(Affirmative) < succ>
                                bacterial outside --- Certainty = 0.0000(Not Clear) < succ>
                            bacterial cytoplasm --- Certainty = 0.0000(Not Clear) < succ>
```

[7394] The protein has no significant homology with any sequences in the GENPEPT database.

[7395] An alignment of the GAS and GBS proteins is shown below.

| Identities = 116/267 (43%), Positives = 165/267 (61%), Gaps = 13/267 (4%) | | | |
|---|---|---|---|
| Query: | 1 | MFGKLLKYELKSVGKWYLTLNAAVLLVSIILGLVLKALG-----GNFSTDTNSTSAQIFT | 55 |
| | | MFGKLLKYE +S+GKWY LNA V+ ++ IL +K G F TN ++ | |
| Sbjct: | 1 | MFGKLLKYEFRSIGKWYFALNAFVIAIAAILSFTIKLFAQSNSDGLFGVLTN----KMLP | 56 |
| Query: | 56 | IILVLLLAMVISGSLLSTLAIIIKRFYSNIFGRQGYLTLTLPVTTNQIICSKLLASLLWS | 115 |
| | | + L L +I+GSLLSTL IIIKRF ++FG +GYLTLTLPV ++QII SKLLAS + S | |
| Sbjct: | 57 | LTLGLTFGSLIAGSLLSTLLIIIKRFSKSVFGWEGYLTLTLPVNSHQIILSKLLASFICS | 116 |
| Query: | 116 | IFNIFIVIIGIILVILPLVGIGQFVVAFPEIYKIISSSNAPLFIAYFFLSYVAGTLLIYL | 175 |
| | | +FN I+ I +VI+P+ I + + F +K+ N +AY LS LLIYL | |
| Sbjct: | 117 | VFNTIILAFAIAIVIVPMFNINELLEGFFNSFKNDYFINMLTVLAYVLLSTFTSILLIYL | 176 |
| Query: | 176 | SIAVGQLFTNKRVLMGIVSYFGISLLITFLTLIIDSIFHIDLFNSHANA-TFSQPVLLY- | 233 |
| | | SI++GQLF+N+R LM ++YF + +LI+ + S HI N+ A++ F++ +Y | |
| Sbjct: | 177 | SISIGQLFSNRRGLMAFIAYFILVILISVAATYVHS--HIFNINTSADSFPFTEQKTIYL | 234 |
| Query: | 234 | NILVSIVEIAIFYMLTHSIIKYKLNIQ | 260 |
| | | IL +E+ +FY+ T+ IIK KLN+Q | |
| Sbjct: | 235 | LILEQFIEMIMFYLATNFIIKNKLNLQ | 261 |

[7396] Based on this analysis, it was predicted that these proteins and their epitopes could be useful antigens for vaccines or diagnostics.

### EXAMPLE 1338

[7397] A DNA sequence (GBSx1422) was identified in S. agalactiae <SEQ ID 4109> which encodes the amino acid sequence <SEQ ID 4110>. Analysis of this protein sequence reveals the following:

```
Possible site: 17
>>> Seems to have no N-terminal signal sequence
----- Final Results -----
                            bacterial cytoplasm --- Certainty = 0.5890(Affirmative) < succ>
                              bacterial membrane --- Certainty = 0.0000(Not Clear) < succ>
                                bacterial outside --- Certainty = 0.0000(Not Clear) < succ>
```

[7398] The protein is similar to ORF24 from S. faecalis.

[7399] No corresponding DNA sequence was identified in S. pyogenes.

[7400] Based on this analysis, it was predicted that this protein and its epitopes, could be useful antigens for vaccines or diagnostics.

### EXAMPLE 1339

[7401] A DNA sequence (GBSx1423) was identified in S. agalactiae <SEQ ID 4111> which encodes the amino acid sequence <SEQ ID 4112>. Analysis of this protein sequence reveals the following:

```
Possible site: 61
>>> Seems to have no N-terminal signal sequence
----- Final Results -----
                            bacterial cytoplasm --- Certainty = 0.3316(Affirmative) < succ>
                              bacterial membrane --- Certainty = 0.0000(Not Clear) < succ>
                                bacterial outside --- Certainty = 0.0000(Not Clear) < succ>
```

[7402] The protein is similar to ORF23 from S. faecalis. No corresponding DNA sequence was identified in S. pyogenes.

[7403] Based on this analysis, it was predicted that this protein and its epitopes, could be useful antigens for vaccines or diagnostics.

### EXAMPLE 1340

[7404] A DNA sequence (GBSx1424) was identified in S. agalactiae <SEQ ID 4113> which encodes the amino acid sequence <SEQ ID 4114>. Analysis of this protein sequence reveals the following:

```
Possible site: 25
>>> Seems to have no N-terminal signal sequence
----- Final Results -----
                            bacterial cytoplasm --- Certainty = 0.4256(Affirmative) < succ>
                              bacterial membrane --- Certainty = 0.0000(Not Clear) < succ>
                                bacterial outside --- Certainty = 0.0000(Not Clear) < succ>
```

[7405] The protein is similar to ORF22 from S. faecalis. No corresponding DNA sequence was identified in S. pyogenes.

[7406] Based on this analysis, it was predicted that this protein and its epitopes, could be useful antigens for vaccines or diagnostics.

### EXAMPLE 1341

[7407] A DNA sequence (GBSx1425) was identified in S. agalactiae <SEQ ID 4115> which encodes the amino acid sequence <SEQ ID 4116>. Analysis of this protein sequence reveals the following:

| Possible site: 39 | | | | |
|---|---|---|---|---|
| >>> Seems to have an uncleavable N-term signal seq | | | | |
| | INTEGRAL | Likelihood = −13.37 | Transmembrane | 62-78 (55-84) |
| | INTEGRAL | Likelihood = −8.44 | Transmembrane | 19-35 (14-41) |

```
----- Final Results -----
                              bacterial membrane --- Certainty = 0.6349(Affirmative) < succ>
                                bacterial outside --- Certainty = 0.0000(Not Clear) < succ>
                            bacterial cytoplasm --- Certainty = 0.0000(Not Clear) < succ>
```

[7408] The protein is similar to ORF21 from S. faecalis.

[7409] A related DNA sequence was identified in S. pyogenes <SEQ ID 4117> which encodes the amino acid sequence <SEQ ID 4118>. Analysis of this protein sequence reveals the following:

Possible site: 37
>>> Seems to have no N-terminal signal sequence
----- Final Results -----
bacterial cytoplasm --- Certainty = 0.2444 (Affirmative) < succ>
bacterial membrane --- Certainty = 0.0000 (Not Clear) < succ>
bacterial outside --- Certainty = 0.0000 (Not Clear) < succ>

[7410] An alignment of the GAS and GBS proteins is shown below.

| Identities = 54/236 (22%), Positives = 95/236 (39%), Gaps = 12/236 (5%) | | | |
|---|---|---|---|
| Query: | 204 | KDGKLRLMKNVWWEYDKLPHMLIAGGTGGGKTYFILTLIEALLHTDSKLYILDPKN---- | 259 |
| | | + GK+ ++K+ DK H IAG +G GK Y LT ++L S L I+ DPK | |
| Sbjct: | 14 | QQGKIPVIKHFELNLDKGSHWAIAGNSGSGKPY-ALTYFLSVLKPKSGLIIIDPKFDTPS | 72 |
| Query: | 260 | --ADLADLGSVMANVYYRKEDLLSCIETFYEEMMKRSEEMKQMKNYKTGKNYAYLGLPAH | 317 |
| | | A + + + K D +S + + ++ + + + +L + | |
| Sbjct: | 73 | QWARENKIAVIHPVENHSKSDFVSQVNEQLNQCATLIQKRQAILYDNPNHQFTHLTI--- | 129 |
| Query: | 318 | FLIFDEYVAFMEMLGTKENTAVMNKLKQIVMLGRQAGFFLILACQRPDAKYLGDGIRDQF | 377 |
| | | + DE +A E + A + L QI + LG L L QR D + +R++Q | |
| Sbjct: | 130 | --VIDEVLALSEGVNKNIKEAFFSLLSQIALLGHATKIHLFLGSQRFDHNTIPISVREQL | 187 |
| Query: | 378 | NFRVALGRMSEMGYGMMFGSDVQKDFFLKRIKGRGYVDVGTSVISEFYTPLVPKGY | 433 |
| | | N + +G +++ +F + + G G + V + S PL+ Y | |
| Sbjct: | 188 | NVLLQIGNINQKTTQFLFPDLDPEGIVIPTGHGTGIIQVVDNEHSYQVLPLLCPTY | 243 |

[7411] SEQ ID 4116 (GBS109d) was expressed in E. coli as a GST-fusion product. SDS-PAGE analysis of total cell extract is shown in FIG. 121 (lane 8 & 9; MW 71 kDa) and in FIG. 184 (lane 2; MW 71 kDa). It was also expressed in E. coli as a His-fusion product. SDS-PAGE analysis of total cell extract is shown in FIG. 121 (lane 11; MW 46 kDa), FIG. 128 (lane 4; MW 46 kDa) and FIG. 179 (lane 7; MW 46 kDa).

[7412] GBS109d-His was purified as shown in FIG. 232 (lanes 7 & 8). GBS109d-GST was purified as shown in FIG. 236, lane 10.

[7413] Based on this analysis, it was predicted that these proteins and their epitopes could be useful antigens for vaccines or diagnostics.

### EXAMPLE 1342

[7414] A DNA sequence (GBSx1426) was identified in S. agalactiae <SEQ ID 4119> which encodes the amino acid sequence <SEQ ID 4120>. Analysis of this protein sequence reveals the following:

Possible site: 22
>>> Seems to have a cleavable N-term signal seq.
----- Final Results -----
bacterial outside --- Certainty = 0.3000 (Affirmative) < succ>
bacterial membrane --- Certainty = 0.0000 (Not Clear) < succ>
bacterial cytoplasm --- Certainty = 0.0000 (Not Clear) < succ>

[7415] The protein has no significant homology with any sequences in the GENPEPT database.

[7416] No corresponding DNA sequence was identified in S. pyogenes.

[7417] Based on this analysis, it was predicted that this protein and its epitopes, could be useful antigens for vaccines or diagnostics.

### EXAMPLE 1343

[7418] A DNA sequence (GBSx1427) was identified in S. agalactiae <SEQ ID 4121> which encodes the amino acid sequence <SEQ ID 4122>. Analysis of this protein sequence reveals the following:

```
Possible site: 32
>>> Seems to have no N-terminal signal sequence
----- Final Results -----
                            bacterial cytoplasm --- Certainty = 0.4469(Affirmative) < succ>
                              bacterial membrane --- Certainty = 0.0000(Not Clear) < succ>
                                bacterial outside --- Certainty = 0.0000(Not Clear) < succ>
```

[7419] A related GBS nucleic acid sequence <SEQ ID 9793> which encodes amino acid sequence <SEQ ID 9794> was also identified.

[7420] The protein is similar to ORF20 from S. faecalis. No corresponding DNA sequence was identified in S. pyogenes.

[7421] Based on this analysis, it was predicted that these proteins and their epitopes could be useful antigens for vaccines or diagnostics.

### EXAMPLE 1344

[7422] A DNA sequence (GBSx1428) was identified in S. agalactiae <SEQ ID 4123> which encodes the amino acid sequence <SEQ ID 4124>. Analysis of this protein sequence reveals the following:

Possible site: 14
>>> Seems to have no N-terminal signal sequence
----- Final Results -----
bacterial cytoplasm --- Certainty = 0.1367 (Affirmative) < succ>
bacterial membrane --- Certainty = 0.0000 (Not Clear) < succ>
bacterial outside --- Certainty = 0.0000 (Not Clear) < succ>

[7423] The protein has no significant homology with any sequences in the GENPEPT database.

[7424] No corresponding DNA sequence was identified in S. pyogenes.

[7425] Based on this analysis, it was predicted that this protein and its epitopes, could be useful antigens for vaccines or diagnostics.

### EXAMPLE 1345

[7426] A DNA sequence (GBSx1429) was identified in S. agalactiae <SEQ ID 4125> which encodes the amino acid sequence <SEQ ID 4126>. Analysis of this protein sequence reveals the following:

| Possible site: 22 | | | |
|---|---|---|---|
| >>> Seems to have no N-terminal signal sequence | | | |
| INTEGRAL | Likelihood = −10.77 | Transmembrane | 39-55 (34-64) |
| INTEGRAL | Likelihood = −6.32 | Transmembrane | 16-32 (10-35) |

----- Final Results -----
bacterial membrane --- Certainty = 0.5310 (Affirmative) < succ>
bacterial outside --- Certainty = 0.0000 (Not Clear) < succ>
bacterial cytoplasm --- Certainty = 0.0000 (Not Clear) < succ>

[7427] The protein is similar to ORF19 from S. faecalis. No corresponding DNA sequence was identified in S. pyogenes.

[7428] Based on this analysis, it was predicted that this protein and its epitopes, could be useful antigens for vaccines or diagnostics.

### EXAMPLE 1346

[7429] A DNA sequence (GBSx1430) was identified in S. agalactiae <SEQ ID 4127> which encodes the amino acid sequence <SEQ ID 4128>. This protein is predicted to be antirestriction protein. Analysis of this protein sequence reveals the following:

Possible site: 22
>>> Seems to have no N-terminal signal sequence
----- Final Results -----
bacterial cytoplasm --- Certainty = 0.2918 (Affirmative) < succ>
bacterial membrane --- Certainty = 0.0000 (Not Clear) < succ>
bacterial outside --- Certainty = 0.0000 (Not Clear) < succ>

[7430] The protein is similar to ORF18 from S. faecalis. No corresponding DNA sequence was identified in S. pyogenes.

[7431] Based on this analysis, it was predicted that this protein and its epitopes, could be useful antigens for vaccines or diagnostics.

### EXAMPLE 1347

[7432] A DNA sequence (GBSx1431) was identified in S. agalactiae <SEQ ID 4129> which encodes the amino acid sequence <SEQ ID 4130>. Analysis of this protein sequence reveals the following:

| Possible site: 27 | | | |
|---|---|---|---|
| >>> Seems to have a cleavable N-term signal seq. | | | |
| INTEGRAL | Likelihood = −3.61 | Transmembrane | 75-91 (72-94) |

----- Final Results -----
bacterial membrane --- Certainty = 0.2444 (Affirmative) < succ>
bacterial outside --- Certainty = 0.0000 (Not Clear) < succ>
bacterial cytoplasm --- Certainty = 0.0000 (Not Clear) < succ>

[7433] The protein is similar to ORF17 from S. faecalis. No corresponding DNA sequence was identified in S. pyogenes.

[7434] A related GBS gene <SEQ ID 8793> and protein <SEQ ID 8794> were also identified. Analysis of this protein sequence reveals the following:

| Lipop Possible site: −1 Crend: 4 | | | |
|---|---|---|---|
| McG: Discrim Score: −7.12 | | | |
| GvH: Signal Score (−7.5): −2.52 | | | |
| Possible site: 43 | | | |
| >>> Seems to have no N-terminal signal sequence | | | |
| ALOM program | count: 1 | value: −3.61 | threshold: 0.0 |

| | | | |
|---|---|---|---|
| INTEGRAL | Likelihood = −3.61 | Transmembrane | 37-53 (34-56) |

| | | |
|---|---|---|
| PERIPHERAL | Likelihood = 3.66 | 58 |

modified ALOM score: 1.22
*** Reasoning Step: 3
----- Final Results -----
bacterial membrane --- Certainty = 0.2444 (Affirmative) < succ>
bacterial outside --- Certainty = 0.0000 (Not Clear) < succ>
bacterial cytoplasm --- Certainty = 0.0000 (Not Clear) < succ>

[7435] The protein has homology with the following sequences in the databases:

[chemical structure]

[7436] SEQ ID 8794 (GBS223) was expressed in E. coli as a His-fusion product. SDS-PAGE analysis of total cell extract is shown in FIG. 44 (lane 7; MW 18 kDa).

[7437] Based on this analysis, it was predicted that these proteins and their epitopes could be useful antigens for vaccines or diagnostics.

### EXAMPLE 1348

[7438] A DNA sequence (GBSx1432) was identified in S. agalactiae <SEQ ID 4131> which encodes the amino acid sequence <SEQ ID 4132>. Analysis of this protein sequence reveals the following:

Possible site: 37
>>> Seems to have no N-terminal signal sequence
----- Final Results -----
bacterial cytoplasm --- Certainty = 0.4292 (Affirmative) < succ>
bacterial membrane --- Certainty = 0.0000 (Not Clear) < succ>
bacterial outside --- Certainty = 0.0000 (Not Clear) < succ>

[7439] A related GBS nucleic acid sequence <SEQ ID 9791> which encodes amino acid sequence <SEQ ID 9792> was also identified.

[7440] No corresponding DNA sequence was identified in S. pyogenes.

[7441] Based on this analysis, it was predicted that these proteins and their epitopes could be useful antigens for vaccines or diagnostics.

### EXAMPLE 1349

[7442] A DNA sequence (GBSx1433) was identified in S. agalactiae <SEQ ID 4133> which encodes the amino acid sequence <SEQ ID 4134>. Analysis of this protein sequence reveals the following:

| Possible site: 16 | | | |
|---|---|---|---|
| >>> Seems to have no N-terminal signal sequence | | | |
| INTEGRAL | Likelihood = −6.21 | Transmembrane | 350-366 (345-368) |
| INTEGRAL | Likelihood = −0.32 | Transmembrane | 171-187 (171-188) |

----- Final Results -----
bacterial membrane --- Certainty = 0.3484 (Affirmative) < succ>
bacterial outside --- Certainty = 0.0000 (Not Clear) < succ>
bacterial cytoplasm --- Certainty = 0.0000 (Not Clear) < succ>

[7443] No corresponding DNA sequence was identified in S. pyogenes.

[7444] Based on this analysis, it was predicted that this protein and its epitopes, could be useful antigens for vaccines or diagnostics.

### EXAMPLE 1350

[7445] A DNA sequence (GBSx1434) was identified in S. agalactiae <SEQ ID 4135> which encodes the amino acid sequence <SEQ ID 4136>. Analysis of this protein sequence reveals the following:

| Possible site: 45 | | | |
|---|---|---|---|
| >>> Seems to have no N-terminal signal sequence | | | |
| INTEGRAL | Likelihood = −10.30 | Transmembrane | 154-170 (148-177) |
| INTEGRAL | Likelihood = −10.30 | Transmembrane | 21-37 (17-50) |
| INTEGRAL | Likelihood = −10.03 | Transmembrane | 320-336 (316-367) |
| INTEGRAL | Likelihood = −7.43 | Transmembrane | 346-362 (337-367) |
| INTEGRAL | Likelihood = −7.01 | Transmembrane | 186-202 (180-206) |
| INTEGRAL | Likelihood = −5.36 | Transmembrane | 411-427 (404-430) |
| INTEGRAL | Likelihood = −1.17 | Transmembrane | 386-402 (386-402) |

----- Final Results -----
bacterial membrane --- Certainty = 0.5118 (Affirmative) < succ>
bacterial outside --- Certainty = 0.0000 (Not Clear) < succ>
bacterial cytoplasm --- Certainty = 0.0000 (Not Clear) < succ>

[7446] No corresponding DNA sequence was identified in S. pyogenes.

[7447] Based on this analysis, it was predicted that this protein and its epitopes, could be useful antigens for vaccines or diagnostics.

### EXAMPLE 1351

[7448] A DNA sequence (GBSx1436) was identified in S. agalactiae <SEQ ID 4137> which encodes the amino acid sequence <SEQ ID 4138>. Analysis of this protein sequence reveals the following:

Possible site: 14
>>> Seems to have no N-terminal signal sequence
----- Final Results -----
bacterial cytoplasm --- Certainty = 0.6306 (Affirmative) < succ>
bacterial membrane --- Certainty = 0.0000 (Not Clear) < succ>
bacterial outside --- Certainty = 0.0000 (Not Clear) < succ>

[7449] The protein has no significant homology with any sequences in the GENPEPT database.

[7450] No corresponding DNA sequence was identified in S. pyogenes.

[7451] Based on this analysis, it was predicted that this protein and its epitopes, could be useful antigens for vaccines or diagnostics.

### EXAMPLE 1352

[7452] A DNA sequence (GBSx1437) was identified in S. agalactiae <SEQ ID 4139> which encodes the amino acid sequence <SEQ ID 4140>. Analysis of this protein sequence reveals the following:

Possible site: 22
>>> Seems to have no N-terminal signal sequence
----- Final Results -----
bacterial cytoplasm --- Certainty = 0.2973 (Affirmative) < succ>
bacterial membrane --- Certainty = 0.0000 (Not Clear) < succ>
bacterial outside --- Certainty = 0.0000 (Not Clear) < succ>

[7453] The protein has no significant homology with any sequences in the GENPEPT database.

[7454] No corresponding DNA sequence was identified in S. pyogenes.

[7455] Based on this analysis, it was predicted that this protein and its epitopes, could be useful antigens for vaccines or diagnostics.

### EXAMPLE 1353

[7456] A DNA sequence (GBSx1438) was identified in S. agalactiae <SEQ ID 4141> which encodes the amino acid sequence <SEQ ID 4142>. Analysis of this protein sequence reveals the following:

Possible site: 42
>>> Seems to have no N-terminal signal sequence
----- Final Results -----
bacterial cytoplasm --- Certainty = 0.3382 (Affirmative) < succ>
bacterial membrane --- Certainty = 0.0000 (Not Clear) < succ>
bacterial outside --- Certainty = 0.0000 (Not Clear) < succ>

[7457] There is also homology to SEQ ID 4144.

[7458] A related GBS gene <SEQ ID 8795> and protein <SEQ ID 8796> were also identified. Analysis of this protein sequence reveals the following:

| Lipop: Possible site: −1 Crend: 3 | | | |
|---|---|---|---|
| McG: Discrim Score: 11.12 | | | |
| GvH: Signal Score (−7.5): 0.27 | | | |
| Possible site: 24 | | | |
| >>> Seems to have a cleavable N-term signal seq. | | | |
| ALOM program | count: 0 | value: 4.19 | threshold: 0.0 |

| | | |
|---|---|---|
| PERIPHERAL | Likelihood = 4.19 | 69 |

modified ALOM score: −1.34
*** Reasoning Step: 3
----- Final Results -----
bacterial outside --- Certainty = 0.3000 (Affirmative) < succ>
bacterial membrane --- Certainty = 0.0000 (Not Clear) < succ>
bacterial cytoplasm --- Certainty = 0.0000 (Not Clear) < succ>

[7459] The protein has homology with the following sequences in the databases:

[chemical structure]

[7460] SEQ ID 8796 (GBS155) was expressed in E. coli as a His-fusion product. SDS-PAGE analysis of total cell extract is shown in FIG. 24 (lane 10; MW 38 kDa). It was also expressed in E. coli as a GST-fusion product. SDS-PAGE analysis of total cell extract is shown in FIG. 31 (lane 7; MW 62 kDa).

[7461] The GBS155-GST fusion product was purified (FIG. 111; see also FIG. 198, lane 74) and used to immunise mice (lane 1 product; 20 kg/mouse). The resulting antiserum was used for Western blot, FACS, and in the in vivo passive protection assay (Table III). These tests confirm that the protein is immunoaccessible on GBS bacteria and that it is an effective protective immunogen.

[7462] Based on this analysis, it was predicted that these proteins and their epitopes could be useful antigens for vaccines or diagnostics.

### EXAMPLE 1354

[7463] A DNA sequence (GBSx1439) was identified in S. agalactiae <SEQ ID 4145> which encodes the amino acid sequence <SEQ ID 4146>. Analysis of this protein sequence reveals the following:

| Possible site: 52 | | | |
|---|---|---|---|
| >>> Seems to have no N-terminal signal sequence | | | |
| INTEGRAL | Likelihood = −8.60 | Transmembrane | 37-53 (35-55) |

----- Final Results -----
bacterial membrane --- Certainty = 0.4439 (Affirmative) < succ>
bacterial outside --- Certainty = 0.0000 (Not Clear) < succ>
bacterial cytoplasm --- Certainty = 0.0000 (Not Clear) < succ>

[7464] A related GBS nucleic acid sequence <SEQ ID 9789> which encodes amino acid sequence <SEQ ID 9790> was also identified.

[7465] No corresponding DNA sequence was identified in S. pyogenes.

[7466] Based on this analysis, it was predicted that these proteins and their epitopes could be useful antigens for vaccines or diagnostics.

### EXAMPLE 1355

[7467] A DNA sequence (GBSx1440) was identified in S. agalactiae <SEQ ID 4147> which encodes the amino acid sequence <SEQ ID 4148>. Analysis of this protein sequence reveals the following:

| Possible site: 40 | | | |
|---|---|---|---|
| >>> Seems to have an uncleavable N-term signal seq | | | |
| INTEGRAL | Likelihood = −0.00 | Transmembrane | 391-407 (391-407) |

----- Final Results -----
bacterial membrane --- Certainty = 0.1001 (Affirmative) < succ>
bacterial outside --- Certainty = 0.0000 (Not Clear) < succ>
bacterial cytoplasm --- Certainty = 0.0000 (Not Clear) < succ>

[7468] A related GBS nucleic acid sequence <SEQ ID 9787> which encodes amino acid sequence <SEQ ID 9788> was also identified.

[7469] A related DNA sequence was identified in S. pyogenes <SEQ ID 4149> which encodes the amino acid sequence <SEQ ID 4150>. Analysis of this protein sequence reveals the following:

Possible Site: 19
>>> Seems to have no N-terminal signal sequence
----- Final Results -----
bacterial cytoplasm --- Certainty = 0.2027 (Affirmative) < succ>
bacterial membrane --- Certainty = 0.0000 (Not Clear) < succ>
bacterial outside --- Certainty = 0.0000 (Not Clear) < succ>

[7470] An alignment of the GAS and GBS proteins is shown below.

| Identities = 183/669 (27%), Positives = 305/669 (45%), | | | |
|---|---|---|---|
| Gaps = 63/669 (9%) | | | |
| Query: | 7 | KIINIGVLAHVDAGKTTLTESLLYNSGAITELGSVDKGTTRTDNTLLERQRGITIQTGIT | 66 |
| | | K NIG++AHVDAGKTT TE +LY +G I ++G +G ++ D E++RGITI + T | |
| Sbjct: | 9 | KTRNIGIMAHVDAGKTTTTERILYYTGKIHKIGETHEGASQMDWMEQEQERGITITSAAT | 68 |
| Query: | 67 | SFQWENTKVNIIDTPGHMDFLAEVYRSLSVLDGAILLISAKDGVQAQTRILFHALRKMGI | 126 |
| | | + QW+ +VNIIDTPGH+DF EV RSL VLDGA+ ++ ++ GV+ QT ++ + G+ | |
| Sbjct: | 69 | TAQWDGHRVNIIDTPGHVDFTIEVQRSLRVLDGAVTVLDSQSGVEPQTETVWRQATEYGV | 128 |
| Query: | 127 | PTIFFINKIDQNGIDLSTVYQDIKEKLSAEI------------------VIKQKVELYPN | 168 |
| | | P I F NK+D+ G D Q + ++L A +IK K E+Y N | |
| Sbjct: | 129 | PRIVFANKMDKIGADFLYSVQTLHDRLQANAHPIQLPIGAEDDFRGIIDLIKMKAEIYTN | 188 |
| Query: | 169 | MCVTNFTES---EQW------------DTVIEGNDDLLEKYMSGKSLEALELEQEESIRF | 213 |
| | | T+ E E++ + V E ++DL+ KY+ G+ + EL | |
| Sbjct: | 189 | DLGTDILEEDIPEEYLEQAQEYREKLIEAVAETDEDLMMKYLEGEEITNDELIAGIRKAT | 248 |
| Query: | 214 | HNCSLFPVYHGSAKNNIGIDNLIEVI---------------TNKFYSSTHRGPSE----L | 254 |
| | | N FPV GSA N G+ +++ + N + P+ | |
| Sbjct: | 249 | INVEFFPVLCGSAFKNKGVQLMLDAVIAYLPSPLDIPAIKGVNPDTDAEEERPASDEEPF | 308 |
| Query: | 255 | CGNVFKIEYTKKRQRLAYIRLYSGVLHLRDSVRVSEKEKI----KVTEMYTSINGELCKI | 310 |
| | | FKI RL + R+YSGVL+ V + K K ++ +M+ + E I | |
| Sbjct: | 309 | AALAFKIMTDPFVGRLTFFRVYSGVLNSGSYVMNTSKGKRERIGRILQMHANSRQE---I | 365 |
| Query: | 311 | DRAYSGEIVILQN-EFLKLNSVLGDTKLLPQRKKIENPHPLLQTTVEPSKPEQREMLLDA | 369 |
| | | + Y+G+I + L D K + IE P P++Q VEP ++ + A | |
| Sbjct: | 366 | ETVYAGDIAAAVGLKDTTTGDSLTDEKAKVILESIEVPEPVIQLMVEPKSKADQDKMGVA | 425 |
| Query: | 370 | LLEISDSDPLLRYYVDSTTHEIILSFLGKVQMEVISALLQEKYHVEIELKEPTVIYME-- | 427 |
| | | L ++++ DP R + T E +++ +G++ ++V+ ++ ++ VE + P V Y E | |
| Sbjct: | 426 | LQKLAEEDPTFRVETNVETGETVIAGMGELHLDVLVDRMKREFKVEANVGAPQVSYRETF | 485 |
| Query: | 428 | RPLKNAEYTIHIEVPPNPFWASIGLSVSPLPLGSGMQYESSVSLGYLNQSFQNAVMEGIR | 487 |
| | | R A + + + + +P G G ++E+++ G + + F AV +G+ | |
| Sbjct: | 486 | RASTQARGFFKRQSGGKGQFGDVWIEFTPNEEGKGFEFENAIVGGVVPREFIPAVEKGLI | 545 |
| Query: | 488 | YGCEQG-LYGWNVTDCKICFKYGLYYSPVSTPADFRMLAPIVLEQVLKKAGTELLEPYLS | 546 |
| | | G L G+ + D K G Y+ S+ F++ A + L++ K A +LEP + | |
| Sbjct: | 546 | ESMANGVLAGYPMVDVKAKLYDGSYHDVDSSETAFKIAASLALKEAAKSAQPAILEPMML | 605 |
| Query: | 547 | FKIYAPQEYLSRAYNDAPKYCANIVDTQLKNNEVILSGEIPARCIQEYRSDLTFFTNGRS | 606 |
| | | I AP++ L + + N I+ +P + Y + L T GR | |
| Sbjct: | 606 | VTITAPEDNLGDVMGHVTARRGRVDGMEAHGNSQIVRAYVPLAEMFGYATVLRSATQGRG | 665 |
| Query: | 607 | VCLTELKGY | 615 |
| | | + Y | |
| Sbjct: | 666 | TFMMVFDHY | 674 |

[7471] Based on this analysis, it was predicted that these proteins and their epitopes could be useful antigens for vaccines or diagnostics.

### EXAMPLE 1356

[7472] A DNA sequence (GBSx1441) was identified in S. agalactiae <SEQ ID 4151> which encodes the amino acid sequence <SEQ ID 4152>. Analysis of this protein sequence reveals the following:

```
Possible site: 33
>>> Seems to have no N-terminal signal sequence
----- Final Results -----
                            bacterial cytoplasm --- Certainty = 0.2530(Affirmative) < succ>
                              bacterial membrane --- Certainty = 0.0000(Not Clear) < succ>
                                bacterial outside --- Certainty = 0.0000(Not Clear) < succ>
```

[7473] No corresponding DNA sequence was identified in S. pyogenes.

[7474] Based on this analysis, it was predicted that this protein and its epitopes, could be useful antigens for vaccines or diagnostics.

### EXAMPLE 1357

[7475] A DNA sequence (GBSx1442) was identified in S. agalactiae <SEQ ID 4153> which encodes the amino acid sequence <SEQ ID 4154>. Analysis of this protein sequence reveals the following:

```
Possible site: 18
>>> Seems to have no N-terminal signal sequence
----- Final Results -----
                              bacterial membrane --- Certainty = 0.0000(Not Clear) < succ>
                                bacterial outside --- Certainty = 0.0000(Not Clear) < succ>
                            bacterial cytoplasm --- Certainty = 0.0000(Not Clear) < succ>
```

[7476] The protein has no significant homology with any sequences in the GENPEPT database.

[7477] No corresponding DNA sequence was identified in S. pyogenes.

[7478] Based on this analysis, it was predicted that this protein and its epitopes, could be useful antigens for vaccines or diagnostics.

### EXAMPLE 1358

[7479] A DNA sequence (GBSx1443) was identified in S. agalactiae <SEQ ID 4155> which encodes the amino acid sequence <SEQ ID 4156>. Analysis of this protein sequence reveals the following:

```
Possible site: 17
>>> Seems to have no N-terminal signal sequence
----- Final Results -----
                            bacterial cytoplasm --- Certainty = 0.1630(Affirmative) < succ>
                              bacterial membrane --- Certainty = 0.0000(Not Clear) < succ>
                                bacterial outside --- Certainty = 0.0000(Not Clear) < succ>
```

[7480] The protein has no significant homology with any sequences in the GENPEPT database.

[7481] No corresponding DNA sequence was identified in S. pyogenes.

[7482] Based on this analysis, it was predicted that this protein and its epitopes, could be useful antigens for vaccines or diagnostics.

### EXAMPLE 1359

[7483] A DNA sequence (GBSx1444) was identified in S. agalactiae <SEQ ID 4157> which encodes the amino acid sequence <SEQ ID 4158>. This protein is predicted to be excisionase-related protein. Analysis of this protein sequence reveals the following:

```
Possible site: 40
>>> Seems to have no N-terminal signal sequence
----- Final Results -----
                            bacterial cytoplasm --- Certainty = 0.4481(Affirmative) < succ>
                              bacterial membrane --- Certainty = 0.0000(Not Clear) < succ>
                                bacterial outside --- Certainty = 0.0000(Not Clear) < succ>
```

[7484] The protein is similar to transposon Tn916 from S. faecalis. No corresponding DNA sequence was identified in S. pyogenes.

[7485] Based on this analysis, it was predicted that this protein and its epitopes, could be useful antigens for vaccines or diagnostics.

### EXAMPLE 1360

[7486] A DNA sequence (GBSx1445) was identified in S. agalactiae <SEQ ID 4159> which encodes the amino acid sequence <SEQ ID 4160>. This protein is predicted to be transposase. Analysis of this protein sequence reveals the following:

```
Possible site: 46
>>> Seems to have no N-terminal signal sequence
----- Final Results -----
                            bacterial cytoplasm --- Certainty = 0.4626(Affirmative) < succ>
                              bacterial membrane --- Certainty = 0.0000(Not Clear) < succ>
                                bacterial outside --- Certainty = 0.0000(Not Clear) < succ>
```

[7487] The protein is similar the Tn1545 integrase from S. pneumoniae and to SEQ ID 578.

[7488] Based on this analysis, it was predicted that this protein and its epitopes, could be useful antigens for vaccines or diagnostics.

### EXAMPLE 1361

[7489] A DNA sequence (GBSx1446) was identified in S. agalactiae <SEQ ID 4161> which encodes the amino acid sequence <SEQ ID 4162>. Analysis of this protein sequence reveals the following:

| Possible site: 26 | | | | |
|---|---|---|---|---|
| >>> Seems to have an uncleavable N-term signal seq | | | | |
| | INTEGRAL | Likelihood = −10.72 | Transmembrane | 18-34 (13-41) |
| | INTEGRAL | Likelihood = −6.10 | Transmembrane | 58-74 (55-79) |
| | INTEGRAL | Likelihood = −5.04 | Transmembrane | 97-113 (90-116) |
| | INTEGRAL | Likelihood = −1.81 | Transmembrane | 78-94 (78-94) |
| | INTEGRAL | Likelihood = −0.85 | Transmembrane | 145-161 (145-161) |

```
----- Final Results -----
                              bacterial membrane --- Certainty = 0.5288(Affirmative) < succ>
                                bacterial outside --- Certainty = 0.0000(Not Clear) < succ>
                            bacterial cytoplasm --- Certainty = 0.0000(Not Clear) < succ>
```

[7490] The protein has homology with the following sequences in the GENPEPT database.

| >GP: AAC74820 GB: AE000270 orf, hypothetical | | | |
|---|---|---|---|
| protein [Escherichia coli K12] | | | |
| Identities = 43/174 (24%), Positives = 84/174 (47%), | | | |
| Gaps = 9/174 (5%) | | | |
| Query: | 24 | LIATLVLVVYLYKL------GILNDSNELKDLVHKYEFWGPMIFIVAQIVQIVFPVIPGG | 77 |
| | | L A L+ + +Y + +L D L+ L+ + F+G ++I+ I+ + ++PG | |
| Sbjct: | 24 | LFACLIFALVIYAIHAFGLFDLLTDLPHLQTLIRQSGFFGYSLYILLFIIATLL-LLPGS | 82 |
| Query: | 78 | VTTVAGFLIFGPTLGFIYNYIGIIIGSVILFWLVKFYGRKFVLLFM-DQKTFDKYESKLE | 136 |
| | | + +AG ++FGP LG + + I + S F L ++ GR +L ++ TF E + | |
| Sbjct: | 83 | ILVIAGGIVFGPLLGTLLSLIAATLASSCSFLLARWLGRDLLLKYVGHSNTFQAIEKGIA | 142 |
| Query: | 137 | TSGYEKFFIFCMASPISPADIMVMITGLSNMSIKRFVTIIMITKPISIIGYSYL | 190 |
| | | +G + F I P+ P +I GL+ ++ + I +T I+ Y+ + | |
| Sbjct: | 143 | RNGID-FLILTRLIPLFPYNIQNYAYGLTTIAFWPYTLISALTTLPGIVIYTVM | 195 |

[7491] A related DNA sequence was identified in S. pyogenes <SEQ ID 4163> which encodes the amino acid sequence <SEQ ID 4164>. Analysis of this protein sequence reveals the following:

| Possible site: 43 | | | | |
|---|---|---|---|---|
| >>> Seems to have an uncleavable N-term signal seq | | | | |
| | INTEGRAL | Likelihood = −4.30 | Transmembrane | 8-24 (6-29) |
| | INTEGRAL | Likelihood = −0.80 | Transmembrane | 57-73 (57-73) |
| | INTEGRAL | Likelihood = −0.00 | Transmembrane | 86-102 (86-102) |

```
----- Final Results -----
                              bacterial membrane --- Certainty = 0.2720(Affirmative) < succ>
                                bacterial outside --- Certainty = 0.0000(Not Clear) < succ>
                            bacterial cytoplasm --- Certainty = 0.0000(Not Clear) < succ>
```

[7492] The protein has no significant homology with any sequences in the GENPEPT database.

[7493] An alignment of the GAS and GBS proteins is shown below.

| Identities = 85/114 (74%), Positives = 101/114 (88%) | | | |
|---|---|---|---|
| Query: | 89 | PTLGFIYNYIGIIIGSVILFWLVKFYGRKFVLLFMDQKTFDKYESKLETSGYEKFFIFCM | 148 |
| | | P GFIYNY+GIIIGS+ LF LVK YGRKF+LLF++ KTF KYE +LET GYEK FIFCM | |
| Sbjct: | 3 | PVTGFIYNYVGIIIGSIALFLLVKTYGRKFILLFVNDKTFYKYERRLETPGYEKLFIFCM | 62 |
| Query: | 149 | ASPISPADIMVMITGLSNMSIKRFVTIIMITKPISIIGYSYLWIYGGDILKNFL | 202 |
| | | ASP+SPADIMVMITGL++MS+KRFVTI++ITKPISIIGYSYL+I+G D++ FL | |
| Sbjct: | 63 | ASPVSPADIMVMITGLTDMSLKRFVTILLITKPISIIGYSYLFIFGKDVISWFL | 116 |

[7494] There is also homology to SEQ ID 1728.

[7495] Based on this analysis, it was predicted that these proteins and their epitopes could be useful antigens for vaccines or diagnostics.

### EXAMPLE 1362

[7496] A DNA sequence (GBSx1447) was identified in S. agalactiae <SEQ ID 4165> which encodes the amino acid sequence <SEQ ID 4166>. This protein is predicted to be chlorAMPhenicol acetyltransferase (cat). Analysis of this protein sequence reveals the following:

```
Possible site: 28
>>> Seems to have no N-terminal signal sequence
----- Final Results -----
                            bacterial cytoplasm --- Certainty = 0.4725(Affirmative) < succ>
                              bacterial membrane --- Certainty = 0.0000(Not Clear) < succ>
                                bacterial outside --- Certainty = 0.0000(Not Clear) < succ>
```

[7497] The protein has homology with the following sequences in the GENPEPT database.

| >GP: AAA86871 GB: U19459 VAT B [Staphylococcus aureus] | | | |
|---|---|---|---|
| Identities = 57/130 (43%), Positives = 81/130 (61%), Gaps = 4/130 (3%) | | | |
| Query: | 57 | IGAFCSIAQNVT--ITGLNHPTDHITTNPFIYYKSRGFINEDRADLIDEKKNGKVIIGND | 114 |
| | | IG FC+IA+ + + G NH + ITT PF G+ + L D G ++GND | |
| Sbjct: | 65 | IGKFCAIAEGIEFIMNGANHRMNSITTYPF-NIMGNGW-EKATPSLEDLPFKGDTVVGND | 122 |
| Query: | 115 | VWIGTNVTILPSVTIGNGAIIGAGSVITKDIPDYAVVAGTPAKIIKYRFSEEEITLLNAS | 174 |
| | | VWIG NVT++P + IG+GAI+ A SV+TKD+P Y ++ G P++IIK RF +E I L | |
| Sbjct: | 123 | VWIGQNVTVMPGIQIGDGAIVAANSVVTKDVPPYRIIGGNPSRIIKKRFEDELIDYLLQI | 182 |
| Query: | 175 | QWWNWSDEAI | 184 |
| | | +WW+WS + I | |
| Sbjct: | 183 | KWWDWSAQKI | 192 |

[7498] There is also homology to SEQ ID 1944.

[7499] Based on this analysis, it was predicted that this protein and its epitopes, could be useful antigens for vaccines or diagnostics.

### EXAMPLE 1363

[7500] A DNA sequence (GBSx1448) was identified in S. agalactiae <SEQ ID 4167> which encodes the amino acid sequence <SEQ ID 4168>. Analysis of this protein sequence reveals the following:

```
Possible site: 39
>>> Seems to have no N-terminal signal sequence
----- Final Results -----
                            bacterial cytoplasm --- Certainty = 0.2398(Affirmative) < succ>
                              bacterial membrane --- Certainty = 0.0000(Not Clear) < succ>
                                bacterial outside --- Certainty = 0.0000(Not Clear) < succ>
```

[7501] The protein has no significant homology with any sequences in the GENPEPT database.

[7502] No corresponding DNA sequence was identified in S. pyogenes.

[7503] Based on this analysis, it was predicted that this protein and its epitopes, could be useful antigens for vaccines or diagnostics.

### EXAMPLE 1364

[7504] A DNA sequence (GBSx1449) was identified in S. agalactiae <SEQ ID 4169> which encodes the amino acid sequence <SEQ ID 4170>. This protein is predicted to be cation-transporting P-ATPase PacL. Analysis of this protein sequence reveals the following:

| Possible site: 34 | | | | |
|---|---|---|---|---|
| >>> Seems to have no N-terminal signal sequence | | | | |
| | INTEGRAL | Likelihood = −9.18 | Transmembrane | 873-889 (866-894) |
| | INTEGRAL | Likelihood = −8.39 | Transmembrane | 257-273 (251-276) |
| | INTEGRAL | Likelihood = −5.95 | Transmembrane | 67-83 (65-88) |
| | INTEGRAL | Likelihood = −5.41 | Transmembrane | 282-298 (281-301) |
| | INTEGRAL | Likelihood = −1.65 | Transmembrane | 90-106 (89-107) |
| | INTEGRAL | Likelihood = −0.48 | Transmembrane | 737-753 (736-753) |
| | INTEGRAL | Likelihood = −0.00 | Transmembrane | 898-914 (898-914) |

```
----- Final Results -----
                              bacterial membrane --- Certainty = 0.4673(Affirmative) < succ>
                                bacterial outside --- Certainty = 0.0000(Not Clear) < succ>
                            bacterial cytoplasm --- Certainty = 0.0000(Not Clear) < succ>
```

[7505] A related GBS nucleic acid sequence <SEQ ID 10963> which encodes amino acid sequence <SEQ ID 10964> was also identified.

[7506] The protein has homology with the following sequences in the GENPEPT database.

| >GP: AAB85991 GB: AE000912 cation-transporting P-ATPase PacL | | | |
|---|---|---|---|
| [Methanothermobacter thermoautotrophicus] | | | |
| Identities = 409/922 (44%), Positives = 609/922 (65%), | | | |
| Gaps = 22/922 (2%) | | | |
| Query: | 10 | TNTRFAKEELEEVFEELGTTQGGLSDEEVAVRQKKYGLNLLSEVKQESIILLFLKNFTSL | 69 |
| | | T T + E+EEV + L T++ GL +E R K +G N L EVK+ +ILLFL N ++ | |
| Sbjct: | 4 | TMTAIYELEVEEVLQRLETSESGLDPQEAEKRLKIHGPNKLEEVKRRPLILLFLSNLYNV | 63 |
| Query: | 70 | MAILLWVGGFVAIVSNSLELGLAIWMVNVINGIFSFIQEYRASQATQALEKMLPSYSRVL | 129 |
| | | +A+LLW+ ++ ++ + +L +AI MV +IN +FSF QEY A +A +AL+ +LP +V+ | |
| Sbjct: | 64 | LALLLWIAAILSFITGNYQLAVAIVMVIIINALFSFWQEYEAEKAAEALKNILPVMVKVI | 123 |
| Query: | 130 | RKGSEEKILSEQLVPGDIVLIEEGDRISADGRLIKTTDLQVNQSALTGESNPIYKDSNVE | 189 |
| | | R E I + +V GDI+++EEGD + AD R++++ +L+V+ SALTGES P+ K S+ | |
| Sbjct: | 124 | RASKEVLIPAADVVHGDIIILEEGDTVPADARILESHNLRVDASALTGESKPVRKVSHPV | 183 |
| Query: | 190 | NDQSKTLIECDNMVFAGTTVSSGSATMVVTAIGMQTQFGQIADLTQGMKSEKSPLQRELD | 249 |
| | | + + I+ +N++FAGT V+SG+ V A G T+F +IA LTQ ++ E SPLQR++ | |
| Sbjct: | 184 | RE-ADNYIDTENILFAGTQVTSGTGRAAVFATGRDTEFSRIATLTQEVREEPSPLQRQIS | 242 |
| Query: | 250 | RLTKQISIISITVGIIFFLAATFFVKEPVSKSFIFALGMIVAFIPEGLLPTVTLSLAMAV | 309 |
| | | + I +++ +G+I FL + V+ P+ +FIFA+G++VA +PEGLLP+VTLSLA + | |
| Sbjct: | 243 | LAARIIGALAVAMGVILFLVNLYIVRLPLETAFIFAIGLMVANVPEGLLPSVTLSLAASA | 302 |
| Query: | 310 | QRMAKEHALVKKLSSVETLGATSVICSDKTGTLTQNEMTVNHLWQNGKSYQVTGLGYAPE | 369 |
| | | ++MA+E+ALVK+LSSVETLG+T++IC+DKTGTLT+ EMTV +W K +VTG GY PE | |
| Sbjct: | 303 | RKMARENALVKRLSSVETLGSTTIICTDKTGTLTRGEMTVRKIWIPHKVIEVTGSGYRPE | 362 |
| Query: | 370 | GQILFEGDNICFGNSDRGDLEKLIRFAHLCSNAQVLPPNDDRSTYTVLGDPTEACLNVLL | 429 |
| | | GQ LF G+ + + D +L+ L+R A C+++ ++ + ++VLGD TE L V | |
| Sbjct: | 363 | GQFLFRGEPV--SHRDMAELKLLMRAATFCNDSALI---HEEGEWSVLGDSTEGALLVAA | 417 |
| Query: | 430 | EKSGINIQENRKFAPRLKELPFDSVRKRMTTIHSLGGDEKDKKISITKGAPKEILDLSDY | 489 |
| | | EK G + + K PR+ ELPFDS RK MT+IH G K+++ KGAPK+I+ LS+ | |
| Sbjct: | 418 | EKLGFDAEAELKAMPRITELPFDSRRKSMTSIHEKSG----KRVAYVKGAPKKIIGLSER | 473 |
| Query: | 490 | VLSDGKVIPLNKEERNKIQLANDTFAKDGLRVLAVSYCDIEGFSKEQWTQENLEQHMVFI | 549 |
| | | + DG+V L+ +E+ +I +D A GLRVLA +Y ++ E +E+ +V + | |
| Sbjct: | 474 | ISVDGRVRALHADEKERIIGIHDEMASKGLRVLAFAYRELPE-DLEVRDPGEVERDLVLV | 532 |
| Query: | 550 | GLIAMSDPPREGVREAIDKCHAASIRIIMVTGDYGLTALSIAKNIGIIRNDDAKVISGLE | 609 |
| | | G+ AM DPPREGV+EA++ C A IRIIM+TGDYGLTA +IA+ IGI+ + ++I G E | |
| Sbjct: | 533 | GMAAMHDPPREGVKEAVEHCKTAGIRIIMITGDYGLTAEAIAREIGIVEG-ECRIIKGKE | 591 |
| Query: | 610 | LSEMTDSQLKKELSGE--VVFARVAPEQKYRVVTILQEMGEVVAVTGDGVNDAPALKKSD | 667 |
| | | L ++ D++L+ L+ E ++FAR PE K R+ ++L++ E+VA+TGDGVNDAPAL+K+D | |
| Sbjct: | 592 | LDKLKDTELRGILARERNLIFARAVPEHKMRIASVLEDSDEIVAMTGDGVNDAPALRKAD | 651 |
| Query: | 668 | IGVAMGVTGTDVAKESADMILTDDHFASIVHAVEEGRAVYQNIKKFLTYIFNSNTPEAVP | 727 |
| | | IGVAMG +GTDVAKE+AD++L DD+FASIV AV EGR VY+NI+KF+TYIF+ T E VP | |
| Sbjct: | 652 | IGVAMG-SGTDVAKEAADIVLADDNFASIVTAVREGRTVYENIRKFITYIFSHETAEIVP | 710 |
| Query: | 728 | SAFFLFSKGFIPLPLTVMQILAVDLGTDMLPALGLGVEPPETDVMNRPPRRLTDRLLDKG | 787 |
| | | F + IPLP+T+MQILA+DLGTD LPAL LG PE+DVM PPR ++RLL++ | |
| Sbjct: | 711 | --FIMMVLFSIPLPITIMQILAIDLGTDTLPALALGRSLPESDVMKLPPRAPSERLLNRE | 768 |
| Query: | 788 | LLIKSFLWYGTIESVLAMGGFFWAHYLRYGNF---TFFVANGIPYREATTMTLGAIIFSQ | 844 |
| | | ++++ +L+ GTIE+ L M +F Y G + A+ Y ATT+ I+ +Q | |
| Sbjct: | 769 | VILRGYLFTGTIEAALIMAAYFLVLY--SGGWLPGQELSASDPLYMRATTVVFAGIVMAQ | 826 |
| Query: | 845 | IGMVMNSRTSYQSIKALSIFGNKLINFGIIMEILAFLVLVYVPLFHNLFNTASLGLSHWL | 904 |
| | | +G +++S+T S + N+ I G++ I L+++Y+P +F TA G+ W | |
| Sbjct: | 827 | LGNLLSSQTLRSSALEAGLLRNRWILAGMVFAISVMLLVIYLPPLQPIFGTAPPGILEWF | 886 |
| Query: | 905 | YLISCPFIMIGLDEVRKLFSSR | 926 |
| | | LI I+ DE+RK R | |
| Sbjct: | 887 | ILILFTPIVFLTDEMRKFIQRR | 908 |

[7507] There is also homology to SEQ ID 4172.

[7508] Based on this analysis, it was predicted that these proteins and their epitopes could be useful antigens for vaccines or diagnostics.

### EXAMPLE 1365

[7509] A DNA sequence (GBSx1450) was identified in S. agalactiae <SEQ ID 4173> which encodes the amino acid sequence <SEQ ID 4174>. Analysis of this protein sequence reveals the following:

```
Possible site: 25
>>> Seems to have no N-terminal signal sequence
----- Final Results -----
                            bacterial cytoplasm --- Certainty = 0.3740(Affirmative) < succ>
                              bacterial membrane --- Certainty = 0.0000(Not Clear) < succ>
                                bacterial outside --- Certainty = 0.0000(Not Clear) < succ>
```

[7510] The protein has homology with the following sequences in the GENPEPT database.

| >GP: CAB46979 GB: AJ243482 CSRA protein [Enterococcus faecalis] | | | |
|---|---|---|---|
| Identities = 85/132 (64%), Positives = 105/132 (79%) | | | |
| Query: | 2 | KETQEELRQRIGHTAYQVTQNSATEHAFTGKYDDFFEEGIYVDIVSGEVLFSSLDKFQSG | 61 |
| | | K T+EEL+Q + Y VTQ +ATE F+G+YDDF+++GIYVDIVSGE LFSSLDK+ +G | |
| Sbjct: | 3 | KPTEEELKQTLTDLQYAVTQENATERPFSGEYDDFYQDGIYVDIVSGEPLFSSLDKYDAG | 62 |
| Query: | 62 | CGWPAFSKPIENRMVTNHQDHSHGMHRIEVRSRQADSHLGHVFNDGPVDAGGLRYCINSA | 121 |
| | | CGWP+F+KPIE R V D SHGMHR+EVRS++ADSHLGHVF DGP+ GGLRYCIN+A | |
| Sbjct: | 63 | CGWPSFTKPIEKRGVKEKADFSHGMHRVEVRSQEADSHLGHVFTDGPLQEGGLRYCINAA | 122 |
| Query: | 122 | ALDFIPYDQMAK | 133 |
| | | AL F+P + K | |
| Sbjct: | 123 | ALRFVPVADLEK | 134 |

[7511] A related DNA sequence was identified in S. pyogenes <SEQ ID 4175> which encodes the amino acid sequence <SEQ ID 4176>. Analysis of this protein sequence reveals the following:

```
Possible site: 24
>>> Seems to have no N-terminal signal sequence
----- Final Results -----
                            bacterial cytoplasm --- Certainty = 0.3692(Affirmative) < succ>
                              bacterial membrane --- Certainty = 0.0000(Not Clear) < succ>
                                bacterial outside --- Certainty = 0.0000(Not Clear) < succ>
```

[7512] An alignment of the GAS and GBS proteins is shown below.

| Identities = 109/142 (76%), Positives = 126/142 (87%) | | | |
|---|---|---|---|
| Query: | 3 | ETQEELRQRIGHTAYQVTQNSATEHAFTGKYDDFFEEGIYVDIVSGEVLFSSLDKFQSGC | 62 |
| | | ET +EL+QRIG +Y+VTQ++ATE FTG+YD+FFE+GIYVDIVSGEVLFSSLDKF SGC | |
| Sbjct: | 2 | ETSDELKQRIGDLSYEVTQHAATESPFTGEYDNFFEKGIYVDIVSGEVLFSSLDKFNSGC | 61 |
| Query: | 63 | GWPAFSKPIENRMVTNHQDHSHGMHRIEVRSRQADSHLGHVFNDGPVDAGGLRYCINSAA | 122 |
| | | GWPAFSKPIENRMVTNH D S+GM R+EV+SR+A SHLGHVF+DGP +AGGLRYCINSAA | |
| Sbjct: | 62 | GWPAFSKPIENRMVTNHDDSSYGMRRVEVKSREAGSHLGHVFSDGPKEAGGLRYCINSAA | 121 |
| Query: | 123 | LDFIPYDQMAKRGYGDYLSLFD | 144 |
| | | L FIPYDQM K GY +L+LFD | |
| Sbjct: | 122 | LKFIPYDQMEKEGYAQWLTLFD | 143 |

[7513] Based on this analysis, it was predicted that these proteins and their epitopes could be useful antigens for vaccines or diagnostics.

### EXAMPLE 1366

[7514] A DNA sequence (GBSx1451) was identified in S. agalactiae <SEQ ID 4177> which encodes the amino acid sequence <SEQ ID 4178>. Analysis of this protein sequence reveals the following:

```
Possible site: 25
>>> Seems to have no N-terminal signal sequence
----- Final Results -----
                            bacterial cytoplasm --- Certainty = 0.1674(Affirmative) < succ>
                              bacterial membrane --- Certainty = 0.0000(Not Clear) < succ>
                                bacterial outside --- Certainty = 0.0000(Not Clear) < succ>
```

[7515] The protein has homology with the following sequences in the GENPEPT database.

| >GP: BAB05127 GB: AP001511 unknown [Bacillus halodurans] | | | |
|---|---|---|---|
| Identities = 48/152 (31%), Positives = 77/152 (50%), | | | |
| Gaps = 1/152 (0%) | | | |
| Query: | 1 | MIRRAKEKDLPDIAELLKQILMLHHEVRPDIFHTRGSKFSKEQLKEMLIDESKPIFVYES | 60 |
| | | +IR A +D ++A L Q+ H + R DIF + + + + E + V+ | |
| Sbjct: | 2 | IIREATVQDYEEVARLHTQVHEAHVKERGDIFRSNEPTLNPSFFQAAVQGEKSTVLVFVD | 61 |
| Query: | 61 | DEGKVVAHLFLQLQEKRDLPR-KSFKTLYIDDLCIDEEVRGQQIGQKLMDFARQYAKKHG | 119 |
| | | + K+ A+ + L + LP + KT+YI DLC+DE RG IG+ + + Y K H | |
| Sbjct: | 62 | EREKIGAYSVIHLVQTPLLPTMQQRKTVYISDLCVDETRRGGGIGRLIFEAIISYGKAHQ | 121 |
| Query: | 120 | CYNITLNVWNDNQRAVSFYEKLGFKPQQTQME | 151 |
| | | I L+V++ N RA +FY LG + Q+ ME | |
| Sbjct: | 122 | VDAIELDVYDFNDRAKAFYHSLGMRCQKQTME | 153 |

[7516] No corresponding DNA sequence was identified in S. pyogenes.

[7517] Based on this analysis, it was predicted that this protein and its epitopes, could be useful antigens for vaccines or diagnostics.

### EXAMPLE 1367

[7518] A DNA sequence (GBSx1452) was identified in S. agalactiae <SEQ ID 4179> which encodes the amino acid sequence <SEQ ID 4180>. Analysis of this protein sequence reveals the following:

```
Possible site: 52
>>> Seems to have no N-terminal signal sequence
----- Final Results -----
                            bacterial cytoplasm --- Certainty = 0.3285(Affirmative) < succ>
                              bacterial membrane --- Certainty = 0.0000(Not Clear) < succ>
                                bacterial outside --- Certainty = 0.0000(Not Clear) < succ>
```

[7519] A related GBS nucleic acid sequence <SEQ ID 9785> which encodes amino acid sequence <SEQ ID 9786> was also identified.

[7520] The protein has homology with the following sequences in the GENPEPT database.

| >GP: BAB06554 GB: P001516 unknown conserved protein [Bacillus halodurans] | | | |
|---|---|---|---|
| Identities = 108/211 (51%), Positives = 149/211 (70%) | | | |
| Query: | 7 | EDVILNATENMVHHKLKNDPSGHDWFHIVRVRNLAVELAHKEGANTFICQMAALLHDIID | 66 |
| | | E IL + E V +L ++ SGHDW+HI RV +A + +E + F+ Q+AAL HD+ID | |
| Sbjct: | 3 | EQAILQSAEAWVKKQLMDEYSGHDWYHIRRVTLMAKAIGEQEKVDVFVVQIAALFHDLID | 62 |
| Query: | 67 | DKICQDSKQASYELTQWLYSQDLAIAEVEHILDILENISFKAGTGLTMKTLEGQIVQDAD | 126 |
| | | DK+ D + A +L W+ + + +++H +DI+ ISFK G G ++ T E +VQDAD | |
| Sbjct: | 63 | DKLVDDPETAKQQLIDWMEAAGVPSQKIDHTMDIINTISFKGGHGQSLATREAMVVQDAD | 122 |
| Query: | 127 | RLDAMGAIGIARTMAYSGSKGRLIHDPNLKPRENLTLEEYRNGQDTAIIHFYEKLLKLKD | 186 |
| | | RLDA+GAIGIART AYSG+KG+ I+DP L RE +T+EEYR+G+ TAI HFYEKL KLKD | |
| Sbjct: | 123 | RLDALGAIGIARTFAYSGNKGQPIYDPELPIRETMTVEEYRHGKSTAINHFYEKLFKLKD | 182 |
| Query: | 187 | LMNTKQGKMLAQKRHDFLELYLAEFYAEWNG | 217 |
| | | LMNT+ GK LA++RH F+E ++ F +EWNG | |
| Sbjct: | 183 | LMNTETGKQLAKERHVFMEQFIERFLSEWNG | 213 |

[7521] No corresponding DNA sequence was identified in S. pyogenes.

[7522] Based on this analysis, it was predicted that these proteins and their epitopes could be useful antigens for vaccines or diagnostics.

### EXAMPLE 1368

[7523] A DNA sequence (GBSx1453) was identified in S. agalactiae <SEQ ID 4181> which encodes the amino acid sequence <SEQ ID 4182>. Analysis of this protein sequence reveals the following:

```
Possible site: 21
>>> May be a lipoprotein
----- Final Results -----
                              bacterial membrane --- Certainty = 0.0000(Not Clear) < succ>
                                bacterial outside --- Certainty = 0.0000(Not Clear) < succ>
                            bacterial cytoplasm Certainty = 0.0000(Not Clear) < succ>
```

[7524] The protein has homology with the following sequences in the GENPEPT database.

| !GB: U25448 internalin [Listeria monocytogenes] | | | |
|---|---|---|---|
| !GB: U25448 internalin [Listeria monocytogenes] | | | |
| !GB: U25448 internalin [Listeria monocytogenes] | | | |
| !GB: U25448 internalin [Listeria monocytogenes] | | | |
| >GP: AAA69530 GB: U25448 internalin [Listeria monocytogenes] | | | |
| Identities = 78/253 (30%), Positives = 132/253 (51%), Gaps = 2/253 (0%) | | | |
| Query: | 531 | LKQLWMTNTGITDYSFLDKMPLLEGLDISQNGIKDLSFLTKYKQLSLIAAANNGITSLKP | 590 |
| | | L Q+ +N +TD + L + L + ++ N I D++ L L+ + NN IT + P | |
| Sbjct: | 26 | LTQINFSNNQLTDITPLKDLTKLVDILMNNNQIADITPLANLSNLTGLTLFNNQITDIDP | 85 |
| Query: | 591 | LAELPNLQFLVLSHNNISDLTPLSNLTKLQELYLDHNNVKNLSALSGKKDLKVLDLSNNK | 650 |
| | | L L NL L LS N ISD++ LS LT LQ+L L N V +L L+ L+ LD+S+NK | |
| Sbjct: | 86 | LKNLTNLNRLELSSNTISDISALSGLTSLQQLSLG-NQVTDLKPLANLTTLERLDISSNK | 144 |
| Query: | 651 | SADLSTL-KTTSLETLLLNETNTSNLSFLKQNPKVSNLTINNAKLASLDGIEESDEIVKV | 709 |
| | | +D+S L K T+LE+L+ S+++ L + L++N +L + + + + | |
| Sbjct: | 145 | VSDISVLAKLTNLESLIATNNQISDITPLGILTNLDELSLNGNQLKDIGTLASLTNLTDL | 204 |
| Query: | 710 | EAEGNQIKSLVLKNKQGSLKFLNVTNNQLTSLEGVNNYTSLETLSVSKNKLESLDIKTPN | 769 |
| | | + NQI +L L L + NQ++++ + T+L L +++N+LE + + | |
| Sbjct: | 205 | DLANNQISNLAPLPGLTKLTELKLGANQISNIXPLAGLTALTNLELNENQLEDISPISNL | 264 |
| Query: | 770 | KTVTNLDFSHNNV | 782 |
| | | K +T L NN+ | |
| Sbjct: | 265 | KNLTYLTLYFNNI | 277 |
| Identities = 91/300 (30%), Positives = 141/300 (46%), Gaps = 42/300 (14%) | | | |
| Query: | 519 | INDMTPVLQFKKLKQLWMTNTGITDYSFLDKMPLLEGLDISQNGIKD---LSFLTKYKQL | 575 |
| | | I D+TP+ L L + N ITD L + L L++S N I D LS LT +QL | |
| Sbjct: | 58 | IADITPLANLSNLTGLTLFNNQITDIDPLKNLTNLNRLELSSNTISDISALSGLTSLQQL | 117 |
| Query: | 576 | SLIAAANNGITSLKPLA----------------------ELPNLQFLVLSHNNISDLTPL | 613 |
| | | SL N +T LKPLA +L NL+ L+ ++N ISD+TPL | |
| Sbjct: | 118 | SL----GNQVTDLKPLANLTTLERLDISSNKVSDISVLAKLTNLESLIATNNQISDITPL | 173 |
| Query: | 614 | SNLTKLQELYLDHNNVKNLSALSGKKDLKVLDLSNNKSADLSTLK-TTSLETLLLNETNT | 672 |
| | | LT L EL L+ N +K++ L+ +L LDL+NN+ ++L+ L T L L L | |
| Sbjct: | 174 | GILTNLDELSLNGNQLKDIGTLASLTNLTDLDLANNQISNLAPLPGLTKLTELKLGANQI | 233 |
| Query: | 673 | SNLSFLKQNPKVSNLTINNAKLASLDGIEESDEIVKVEAEGNQIKSLVLKNKQGSLKFLN | 732 |
| | | SN+ L ++NL +N +L + I + + N I + + L+ L | |
| Sbjct: | 234 | SNIXPLAGLTALTNLELNENQLEDISPISNLKNLTYLTLYFNNISDISPVSSLTKLQRLF | 293 |
| Query: | 733 | VTNNQLTSLEGVNNYTSLETLSVSKNKLESLDIKTPNKTVTNLDFSHNNVPTSQLKLNEK | 792 |
| | | NN+++ + +N T++ LS N++ L TP +T + +QL LN++ | |
| Sbjct: | 294 | FYNNKVSDVSSLANLTNINWLSAGHNQISDL---TPLANLTRI---------TQLGLNDQ | 341 |
| Identities = 73/253 (28%), Positives = 124/253 (48%), Gaps = 4/253 (1%) | | | |
| Query: | 540 | GITDYSFLDKMPLLEGLDISQNGIKDLSFLTKYKQLSLIAAANNGITSLKPLAELPNLQF | 599 |
| | | GI L+ + L ++ S N + D++ L +L I NN I + PLA L NL | |
| Sbjct: | 13 | GIKSIDGLEYLNNLTQINFSNNQLTDITPLKDLTKLVDILMNNNQIADITPLANLSNLTG | 72 |
| Query: | 600 | LVLSHNNISDLTPLSNLTKLQELYLDHNNVKNLSALSGKKDLKVLDLSNNKSADLSTLKT | 659 |
| | | L L +N I+D+ PL NLT L L L N + ++SALSG L+ L L N + | |
| Sbjct: | 73 | LTLFNNQITDIDPLKNLTNLNRLELSSNTISDISALSGLTSLQQLSLGNQVTDLKPLANL | 132 |
| Query: | 660 | TSLETLLLNETNTSNLSFLKQNPKVSNLTINNAKLASLDGIEESDEIVKVEAEGNQIKSL | 719 |
| | | T+LE L ++ S++S L + + +L N +++ + + + ++ GNQ+K + | |
| Sbjct: | 133 | TTLERLDISSNKVSDISVLAKLTNLESLIATNNQISDITPLGILTNLDELSLNGNQLKDI | 192 |
| Query: | 720 | VLKNKQGSLKFLNVTNNQLTSLEGVNNYTSLETLSVSKNKLESLDIKTPNKTVTNLDFSH | 779 |
| | | +L L++ NNQ+++L + T L L + N++ ++ +TNL+ + | |
| Sbjct: | 193 | GTLASLTNLTDLDLANNQISNLAPLPGLTKLTELKLGANQISNIXPLAGLTALTNLELNE | 252 |
| Query: | 780 | NNV----PTSQLK | 788 |
| | | N + P S LK | |
| Sbjct: | 253 | NQLEDISPISNLK | 265 |
| Identities = 56/209 (26%), Positives = 115/209 (54%), Gaps = 2/209 (0%) | | | |
| Query: | 575 | LSLIAAANNGITSLKPLAELPNLQFLVLSHNNISDLTPLSNLTKLQELYLDHNNVKNLSA | 634 |
| | | ++ + A GI S+ L L NL + S+N ++D+TPL +LTKL ++ +++N + +++ | |
| Sbjct: | 4 | VTTLQADRLGIKSIDGLEYLNNLTQINFSNNQLTDITPLKDLTKLVDILMNNNQIADITP | 63 |
| Query: | 635 | LSGKKDLKVLDLSNNKSADLSTLKT-TSLETLLLNETNTSNLSFLKQNPKVSNLTINNAK | 693 |
| | | L+ +L L L NN+ D+ LK T+L L L+ S++S L + L++ N + | |
| Sbjct: | 64 | LANLSNLTGLTLFNNQITDIDPLKNLTNLNRLELSSNTISDISALSGLTSLQQLSLGN-Q | 122 |
| Query: | 694 | LASLDGIEESDEIVKVEAEGNQIKSLVLKNKQGSLKFLNVTNNQLTSLEGVNNYTSLETL | 753 |
| | | + L + + +++ N++ + + K +L+ L TNNQ++ + + T+L+ L | |
| Sbjct: | 123 | VTDLKPLANLTTLERLDISSNKVSDISVLAKLTNLESLIATNNQISDITPLGILTNLDEL | 182 |
| Query: | 754 | SVSKNKLESLDIKTPNKTVTNLDFSHNNV | 782 |
| | | S++ N+L+ + +T+LD ++N + | |
| Sbjct: | 183 | SLNGNQLKDIGTLASLTNLTDLDLANNQI | 211 |
| Identities = 61/228 (26%), Positives = 118/228 (51%), Gaps = 3/228 (1%) | | | |
| Query: | 483 | LATVTKINIGQRTNPFQRFGLSLMPNIEVLGIGFTPINDMTPVLQFKKLKQLWMTNTGIT | 542 |
| | | L ++ ++++G + + L+ + +E L I ++D++ + + L+ L TN I+ | |
| Sbjct: | 111 | LTSLQQLSLGNQVTDLKP--LANLTTLERLDISSNKVSDISVLAKLTNLESLIATNNQIS | 168 |
| Query: | 543 | DYSFLDKMPLLEGLDISQNGIKDLSFLTKYKQLSLIAAANNGITSLKPLAELPNLQFLVL | 602 |
| | | D + L + L+ L ++ N +KD+ L L+ + ANN I++L PL L L L L | |
| Sbjct: | 169 | DITPLGILTNLDELSLNGNQLKDIGTLASLTNLTDLDLANNQISNLAPLPGLTKLTELKL | 228 |
| Query: | 603 | SHNNISDLTPLSNLTKLQELYLDHNNVKNLSALSGKKDLKVLDLSNNKSADLSTLKT-TS | 661 |
| | | N IS++ PL+ LT L L L+ N ++++S +S K+L L L N +D+S + + T | |
| Sbjct: | 229 | GANQISNIXPLAGLTALTNLELNENQLEDISPISNLKNLTYLTLYFNNISDISPVSSLTK | 288 |
| Query: | 662 | LETLLLNETNTSNLSFLKQNPKVSNLTINNAKLASLDGIEESDEIVKV | 709 |
| | | L+ L S++S L ++ L+ + +++ L + I ++ | |
| Sbjct: | 289 | LQRLFFYNNKVSDVSSLANLTNINWLSAGHNQISDLTPLANLTRITQL | 336 |
| Identities = 60/286 (20%), Positives = 129/286 (44%), Gaps = 24/286 (8%) | | | |
| Query: | 369 | SNKLSDEDQKKLIYLAEKLGLNPNQIEVLTSEDGSIIFKYPHDDHSHTIASKDIEIGKPI | 428 |
| | | +N+++D D K + +L L+ N I +++ G + + + +G + | |
| Sbjct: | 77 | NNQITDIDPLKNLTNLNRLELSSNTISDISALSG-------------LTSLQQLSLGNQV | 123 |
| Query: | 429 | PDGHHDHSHAKDKVGMATLKQIGFDDEIIQDILHADAPTPFPSNETNPEKMRQW--LATV | 486 |
| | | D K + TL+++ + DI T S ++ L + | |
| Sbjct: | 124 | TD-------LKPLANLTTLERLDISSNKVSDISVLAKLTNLESLIATNNQISDITPLGIL | 176 |
| Query: | 487 | TKIN-IGQRTNPFQRFG-LSLMPNIEVLGIGFTPINDMTPVLQFKKLKQLWMTNTGITDY | 544 |
| | | T ++ + N + G L+ + N+ L + I+++ P+ KL +L + I++ | |
| Sbjct: | 177 | TNLDELSLNGNQLKDIGTLASLTNLTDLDLANNQISNLAPLPGLTKLTELKLGANQISNI | 236 |
| Query: | 545 | SFLDKMPLLEGLDISQNGIKDLSFLTKYKQLSLIAAANNGITSLKPLAELPNLQFLVLSH | 604 |
| | | L + L L++++N ++D+S ++ K L+ + N I+ + P++ L LQ L + | |
| Sbjct: | 237 | XPLAGLTALTNLELNENQLEDISPISNLKNLTYLTLYFNNISDISPVSSLTKLQRLFFYN | 296 |
| Query: | 605 | NNISDLTPLSNLTKLQELYLDHNNVKNLSALSGKKDLKVLDLSNNK | 650 |
| | | N +SD++ L+NLT + L HN + +L+ L+ + L L++ + | |
| Sbjct: | 297 | NKVSDVSSLANLTNINWLSAGHNQISDLTPLANLTRITQLGLNDQE | 342 |

[7525] A related DNA sequence was identified in S. pyogenes <SEQ ID 4183> which encodes the amino acid sequence <SEQ ID 4184>. Analysis of this protein sequence reveals the following:

```
Possible site: 21
>>> May be a lipoprotein
----- Final Results -----
                              bacterial membrane --- Certainty = 0.000(Not Clear) < succ>
                                bacterial outside --- Certainty = 0.0000(Not Clear) < succ>
                            bacterial cytoplasm --- Certainty = 0.0000(Not Clear) < succ>
```

[7526] The protein has homology with the following sequences in the databases:

| >GP: AAA69530 GB: U25448 internalin [Listeria monocytogenes] | | | |
|---|---|---|---|
| Identities = 88/279 (31%), Positives = 149/279 (52%), Gaps = 2/279 (0%) | | | |
| Query: | 419 | LPNLETLGIGFTPIKDISPVLQFKKLKQLLMTKTGVTDYRFLDNMPQLEGIDISQNNLKD | 478 |
| | | L + TL IK I + L Q+ + +TD L ++ +L I ++ N + D | |
| Sbjct: | 1 | LDXVTTLQADRLGIKSIDGLEYLNNLTQINFSNNQLTDITPLKDLTKLVDILMNNNQIAD | 60 |
| Query: | 479 | ISFLSKYKNLTLVAAADNGIEDIRPLGQLPNLKFLVLSNNKISDLSPLASLHQLQELHID | 538 |
| | | I+ L+ NLT + +N I DI PL L NL L LS+N ISD+S L+ L LQ+L + | |
| Sbjct: | 61 | ITPLANLSNLTGLTLFNNQITDIDPLKNLTNLNRLELSSNTISDISALSGLTSLQQLSL- | 119 |
| Query: | 539 | NNQITDLSPVSHKESLTVVDLSRNADVDLATL-QAPKLETLMVNDTKVSHLDFLKNNPNL | 597 |
| | | NQ+TDL P+++ +L +D+S N D++ L + LE+L+ + ++S + L NL | |
| Sbjct: | 120 | GNQVTDLKPLANLTTLERLDISSNKVSDISVLAKLTNLESLIATNNQISDITPLGILTNL | 179 |
| Query: | 598 | SSLSINRAQLQSLEGIEASSVIVRVEAEGNQIKSLVLKDKQGSLTFLDVTGNQLTSLEGV | 657 |
| | | LS+N QL+ + + + + + ++ NQI +L LT L + NQ++++ + | |
| Sbjct: | 180 | DELSLNGNQLKDIGTLASLTNLTDLDLANNQISNLAPLPGLTKLTELKLGANQISNIXPL | 239 |
| Query: | 658 | NNFTALDILSVSKNQLTNVNLSKPNKTVTNIDISHNNIS | 696 |
| | | TAL L +++NQL +++ K +T + + NNIS | |
| Sbjct: | 240 | AGLTALTNLELNENQLEDISPISNLKNLTYLTLYFNNIS | 278 |

[7527] An alignment of the GAS and GBS proteins is shown below.

| Identities = 346/753 (45%), Positives = 472/753 (61%), Gaps = 63/753 (8%) | | | |
|---|---|---|---|
| Query: | 187 | SRLGNQSNSHYRVNSSK--------IAGLHYPTSNGFLFNGRG-IKGTTPTGILVEHHNH | 237 |
| | | SR G SN + SK +AG+ +PT +GF+ I T GI+V+H H | |
| Sbjct: | 38 | SRKGMTSNKIKPIKKSKKTNKTHKGVAGVDFPTDDGFILTKDSKILSKTDQGIVVDHDGH | 97 |
| Query: | 238 | LHFISFADLRKGGW------GSIADRYQPQKKADSKKQSPSSKKPRTENTLPKDI--KDK | 289 |
| | | HFI +ADL+ + G+ + ++A S+ S + P DI +D | |
| Sbjct: | 98 | SHFIFYADLKGSPFEYLIPKGASLAKPAVAQRAASQGTSKVADPHHHYEFNPADIVAEDA | 157 |
| Query: | 290 | LAYLARE---LHLDI----------------------SRIRVLKTLNGEIGFEYPHDDHT | 324 |
| | | L Y R H + S + T NG G +P D | |
| Sbjct: | 158 | LGYTVRHDDHFHYILKSSLSGQTQAQAKQVATRLPQTSSLVSTATANGIPGLHFPTSDGF | 217 |
| Query: | 325 | HVIMAKDIDLSKPIPNPHHDDEDH-------------HKGHHHD---ESDHKHEEHEHTK | 368 |
| | | + ++K HD H H +D +++ E H+ + | |
| Sbjct: | 218 | QFNGQGIVGVTKDSILVDHDGHLHPISFADLRQGGWAHVADQYDPAKKAEKPAETHQTPE | 277 |
| Query: | 369 | SNKLSDEDQKKLIYLAEKLGLNPNQIEVLTSEDGSIIFKYPHDDHSHTIASKDIEIGKPI | 428 |
| | | ++ E Q+KL YLAEKLG++P+ I+ + ++DG + +YPH DH+H + DIEIGK I | |
| Sbjct: | 278 | LSEREKEYQEKLAYLAEKLGIDPSTIKRVETQDGKLGLEYPHHDHAHVLMLSDIEIGKDI | 337 |
| Query: | 429 | PDGH---HDHSHAKDKVGMATLKQIGFDDEIIQDILHA-DAPTPFPSNETNPEKMRQWLA | 484 |
| | | PD H H K KVGM TL+ +GFD+E+I DI+ DAPTPFPSNE +P M++WLA | |
| Sbjct: | 338 | PDPHAIEHARELEKHKVGMDTLRALGFDEEVILDIVRTHDAPTPFPSNEKDPNMMKEWLA | 397 |
| Query: | 485 | TVTKINIGQRTNPFQRFGLSLMPNIEVLGIGFTPINDMTPVLQFKKLKQLWMTNTGITDY | 544 |
| | | TV K+++G R +P QR GLSL+PN+E LGIGFTPI D++PVLQFKKLKQL MT TG+TDY | |
| Sbjct: | 398 | TVIKLDLGSRKDPLQRKGLSLLPNLETLGIGFTPIKDISPVLQFKKLKQLLMTKTGVTDY | 457 |
| Query: | 545 | SFLDKMPLLEGLDISQNGIKDLSFLTKYKQLSLIAAANNGITSLKPLAELPNLQFLVLSH | 604 |
| | | FLD MP LEG+DISQN +KD+SFL+KYK L+L+AAA+NGI ++PL +LPNL+FLVLS+ | |
| Sbjct: | 458 | RFLDNMPQLEGIDISQNNLKDISFLSKYKNLTLVAAADNGIEDIRPLGQLPNLKFLVLSN | 517 |
| Query: | 605 | NNISDLTPLSNLTKLQELYLDHNNVKNLSALSGKKDLKVLDLSNNKSADLSTLKTTSLET | 664 |
| | | N ISDL+PL++L +LQEL++D+N + +LS +S K+ L V+DLS N DL+TL+ LET | |
| Sbjct: | 518 | NKISDLSPLASLHQLQELHIDNNQITDLSPVSHKESLTVVDLSRNADVDLATLQAPKLET | 577 |
| Query: | 665 | LLLNETNTSNLSFLKQNPKVSNLTINNAKLASLDGIEESDEIVKVEAEGNQIKSLVLKNK | 724 |
| | | L++N+T S+L FLK NP +S+L+IN A+L SL+GIE S IV+VEAEGNQIKSLVLK+K | |
| Sbjct: | 578 | LMVNDTKVSHLDFLKNNPNLSSLSINRAQLQSLEGIEASSVIVRVEAEGNQIKSLVLKDK | 637 |
| Query: | 725 | QGSLKFLNVTNNQLTSLEGVNNYTSLETLSVSKNKLESLDIKTPNKTVTNLDFSHNNVPT | 784 |
| | | QGSL FL+VT NQLTSLEGVNN+T+L+ LSVSKN+L ++++ PNKTVTN+D SHNN+ | |
| Sbjct: | 638 | QGSLTFLDVTGNQLTSLEGVNNFTALDILSVSKNQLTNVNLSKPNKTVTNIDISHNNISL | 697 |
| Query: | 785 | SQLKLNEKNIPEAVAKNFPAVVEGSMVGNGSLAEKAAMASKEDKQVSD-NTNHQKNTEKS | 843 |
| | | + LKLNE++IPEA+AKNFPAV EGSMVGNG+ EKAAMA+K + + + +H N + | |
| Sbjct: | 698 | ADLKLNEQHIPEAIAKNFPAVYEGSMVGNGTAEEKAAMATKAKESAQEASESHDYNHNHT | 757 |
| Query: | 844 | AQANADSKKENPKTHDEHHDHEETDHAHVGHHH | 876 |
| | | + E+ D H+HE+ + A +H | |
| Sbjct: | 758 | YEDEEGHAHEHRDKDDHDHEHEDENEAKDEQNH | 790 |

[7528] SEQ ID 4182 (GBS84) was expressed in E. coli as a His-fusion product. SDS-PAGE analysis of total cell extract is shown in FIG. 16 (lane 9; MW 97.6 kDa).

[7529] GBS84-His was purified as shown in FIG. 194, lane 7.

[7530] Based on this analysis, it was predicted that these proteins and their epitopes could be useful antigens for vaccines or diagnostics.

### EXAMPLE 1369

[7531] A DNA sequence (GBSx1454) was identified in S. agalactiae <SEQ ID 4185> which encodes the amino acid sequence <SEQ ID 4186>. This protein is predicted to be GTP-binding protein lepa (lepA). Analysis of this protein sequence reveals the following:

```
Possible site: 30
>>> Seems to have no N-terminal signal sequence
----- Final Results -----
                            bacterial cytoplasm --- Certainty = 0.1962(Affirmative) < succ>
                              bacterial membrane --- Certainty = 0.0000(Not Clear) < succ>
                                bacterial outside --- Certainty = 0.0000(Not Clear) < succ>
```

[7532] The protein has homology with the following sequences in the GENPEPT database.

| >GP: CAB14493 GB: Z99117 GTP-binding protein [Bacillus subtilis] | | | |
|---|---|---|---|
| Identities = 464/603 (76%), Positives = 540/603 (88%) | | | |
| Query: | 8 | KRQEKIRNFSIIAHIDHGKSTLADRILEKTETVSSREMQAQLLDSMDLERERGITIKLNA | 67 |
| | | +RQ +IRNFSIIAHIDHGKSTLADRILEKT ++ REM+ QLLDSMDLERERGITIKLN+ | |
| Sbjct: | 9 | ERQSRIRNFSIIAHIDHGKSTLADRILEKTSAITQREMKEQLLDSMDLERERGITIKLNS | 68 |
| Query: | 68 | IELNYTAKDGETYIFHLIDTPGHVDFTYEVSRSLAACEGAILVVDAAQGIEAQTLANVYL | 127 |
| | | ++L Y AKDGE YIFHLIDTPGHVDFTYEVSRSLAACEGAILVVDAAQGIEAQTLANVYL | |
| Sbjct: | 69 | VQLKYKAKDGEEYIFHLIDTPGHVDFTYEVSRSLAACEGAILVVDAAQGIEAQTLANVYL | 128 |
| Query: | 128 | ALDNDLEILPVINKIDLPAADPERVRAEVEDVIGLDASEAVLASAKAGIGIEEILEQIVE | 187 |
| | | ALDNDLEILPVINKIDLP+A+PERVR EVEDVIGLDASEAVLASAKAGIGIEEILEQIVE | |
| Sbjct: | 129 | ALDNDLEILPVINKIDLPSAEPERVRQEVEDVIGLDASEAVLASAKAGIGIEEILEQIVE | 188 |
| Query: | 188 | KVPAPTGEVDAPLQALIFDSVYDAYRGVILQVRIVNGMVKPGDKIQMMSNGKTFDVTEVG | 247 |
| | | KVPAPTG+ +APL+ALIFDS+YDAYRGV+ +R+V G VKPG KI+MM+ GK F+VTEVG | |
| Sbjct: | 189 | KVPAPTGDPEAPLKALIFDSLYDAYRGVVAYIRVVEGTVKPGQKIKMMATGKEFEVTEVG | 248 |
| Query: | 248 | IFTPKAVGRDFLATGDVGYIAASIKTVADTRVGDTITLANNPAIEPLHGYKQMNPMVFAG | 307 |
| | | +FTPKA + L GDVG++ ASIK V DTRVGDTIT A NPA E L GY+++NPMV+G | |
| Sbjct: | 249 | VFTPKATPTNELTVGDVGFLTASIKNVGDTRVGDTITSAANPAEEALPGYRKLNPMVYCG | 308 |
| Query: | 308 | LYPIESNKYNDLREALEKLQLNDASLQFEPETSQALGFGFRCGFLGLLHMDVIQERLERE | 367 |
| | | LYPI++ KYNDLREALEKL+LND+SLQ+E ETSQALGFGFRCGFLG+LHM++IQER+ERE | |
| Sbjct: | 309 | LYPIDTAKYNDLREALEKLELNDSSLQYEAETSQALGFGFRCGFLGMLHMEIIQERIERE | 368 |
| Query: | 368 | FNIDLIMTAPSVVYHVNTTDGEMLEVSNPSEFPDPTRVDSIEEPYVKAQIMVPQEFVGAV | 427 |
| | | FNIDLI TAPSV+Y V TDGE + V NPS PDP +++ +EEPYVKA +MVP ++VGAV | |
| Sbjct: | 369 | FNIDLITTAPSVIYDVYMTDGEKVVVDNPSNMPDPQKIERVEEPYVKATMMVPNDYVGAV | 428 |
| Query: | 428 | MELAQRKRGDFVTMDYIDDNRVNVIYQIPLAEIVFDFFDKLKSSTRGYASFDYEISEYRR | 487 |
| | | MEL Q KRG+F+ M Y+D NRV++IY +PLAEIV++FFD+LKSST+GYASFDYE+ Y+ | |
| Sbjct: | 429 | MELCQGKRGNFIDMQYLDANRVSIIYDMPLAEIVYEFFDQLKSSTKGYASFDYELIGYKP | 488 |
| Query: | 488 | SQLXKMDILLNGDKVDALSFIVHKEFAYERGKLIVDKLKKIIPRQQFEVPIQAAIGQKIV | 547 |
| | | S+L KMDI+LNG+K+DALSFIVH+++AYERGK+IV+KLK++IPRQQFEVP+QAAIGQKIV | |
| Sbjct: | 489 | SKLVKMDIMLNGEKIDALSFIVHRDYAYERGKVIVEKLKELIPRQQFEVPVQAAIGQKIV | 548 |
| Query: | 548 | ARSDIKALRKNVLAKCYGGDVSRKRKLLEKQKAGKKRMKAIGSVEVPQEAFLSVLSMDDD | 607 |
| | | ARS IKA+RKNVLAKCYGGD+SRKRKLLEKQK GK+RMK +GSVEVPQSAF++VL MDD | |
| Sbjct: | 549 | ARSTIKAMRKNVLAKCYGGDISRKRKLLEKQKEGKRRMKQVGSVEVPQEAFMAVLKMDDS | 608 |
| Query: | 608 | DKK | 610 |
| | | KK | |
| Sbjct: | 609 | PKK | 611 |

[7533] A related GBS sequence was identified <SEQ ID 10775> which encodes the amino acid sequence <SEQ ID 10776>. A further related GBS nucleic acid sequence <SEQ ID 10955> which encodes amino acid sequence <SEQ ID 10956> was also identified.

[7534] A related DNA sequence was identified in S. pyogenes <SEQ ID 4187> which encodes the amino acid sequence <SEQ ID 4188>. Analysis of this protein sequence reveals the following:

```
Possible site: 30
>>> Seems to have no N-terminal signal sequence
----- Final Results -----
                            bacterial cytoplasm --- Certainty = 0.1829(Affirmative) < succ>
                              bacterial membrane --- Certainty = 0.0000(Not Clear) < succ>
                                bacterial outside --- Certainty = 0.0000(Not Clear) < succ>
```

[7535] The protein has homology with the following sequences in the databases:

| >GP: CAB14493 GB: Z99117 GTP-binding protein [Bacillus subtilis] | | | |
|---|---|---|---|
| Identities = 463/603 (76%), Positives = 542/603 (89%) | | | |
| Query: | 8 | KRQEKIRNFSIIAHIDHGKSTLADRILEKTETVSSREMQAQLLDSMDLERERGITIKLNA | 67 |
| | | +RQ +IRNFSIIAHIDHGKSTLADRILEKT ++ REM+ QLLDSMDLERERGITIKLN+ | |
| Sbjct: | 9 | ERQSRIRNFSIIAHIDHGKSTLADRILEKTSAITQREMKEQLLDSMDLERERGITIKLNS | 68 |
| Query: | 68 | IELNYTAKDGETYIFHLIDTPGHVDFTYEVSRSLAACEGAILVVDAAQGIEAQTLANVYL | 127 |
| | | ++L Y AKDGE YIFHLIDTPGHVDFTYEVSRSLAACEGAILVVDAAQGIEAQTLANVYL | |
| Sbjct: | 69 | VQLKYKAKDGEEYIFHLIDTPGHVDFTYEVSRSLAACEGAILVVDAAQGIEAQTLANVYL | 128 |
| Query: | 128 | ALDNDLEILPVINKIDLPAADPERVRHEVEDVIGLDASEAVLASAKAGIGIEEILEQIVE | 187 |
| | | ALDNDLEILPVINKIDLP+A+PERVR EVEDVIGLDASEAVLASAKAGIGIEEILEQIVE | |
| Sbjct: | 129 | ALDNDLEILPVINKIDLPSAEPERVRQEVEDVIGLDASEAVLASAKAGIGIEEILEQIVE | 188 |
| Query: | 188 | KVPAPTGDVDAPLQALIFDSVYDAYRGVILQVRIVNGIVKPGDKIQMMSNGKTFDVTEVG | 247 |
| | | KVPAPTGD +APL+ALIFDS+YDAYRGV+ +R+V G VKPG KI+MM+ GK F+VTEVG | |
| Sbjct: | 189 | KVPAPTGDPEAPLKALIFDSLYDAYRGVVAYIRVVEGTVKPGQKIKMMATGKEFEVTEVG | 248 |
| Query: | 248 | IFTPKAVGRDFLATGDVGYVAASIKTVADTRVGDTVTLANNPAKEALHGYKQMNPMVFAG | 307 |
| | | +FTPKA + L GDVG++ ASIK V DTRVGDT+T A NPA+EAL GY+++NPMV+ G | |
| Sbjct: | 249 | VFTPKATPTNELTVGDVGFLTASIKNVGDTRVGDTITSAANPAEEALPGYRKLNPMVYCG | 308 |
| Query: | 308 | IYPIESNKYNDLREALEKLQLNDASLQFEPETSQALGFGFRCGFLGLLHMDVIQERLERE | 367 |
| | | +YPI++ KYNDLREALEKL+LND+SLQ+E ETSQALGFGFRCGFLG+LHM++IQER+ERE | |
| Sbjct: | 309 | LYPIDTAKYNDLREALEKLELNDSSLQYEAETSQALGFGFRCGFLGMLHMEIIQERIERE | 368 |
| Query: | 368 | FNIDLIMTAPSVVYHVHTTDEDMIEVSNPSEFPDPTRVAFIEEPYVKAQIMVPQEFVGAV | 427 |
| | | FNIDLI TAPSV+Y V+ TD + + V NPS PDP ++ +EEPYVKA +MVP ++VGAV | |
| Sbjct: | 369 | FNIDLITTAPSVIYDVYMTDGEKVVVDNPSNMPDPQKIERVEEPYVKATMMVPNDYVGAV | 428 |
| Query: | 428 | MELSQRKRGDFVTMDYIDDNRVNVIYQIPLAEIVFDFFDKLKSSTRGYASFDYDMSEYRR | 487 |
| | | MEL Q KRG+F+ M Y+D NRV++IY +PLAEIV++FFD+LKSST+GYASFDY++ Y+ | |
| Sbjct: | 429 | MELCQGKRGNFIDMQYLDANRVSIIYDMPLAEIVYEFFDQLKSSTKGYASFDYELIGYKP | 488 |
| Query: | 488 | SQLVKMDILLNGDKVDALSFIVHKEFAYERGKIIVEKLKKIIPRQQFEVPIQAAIGQKIV | 547 |
| | | S+LVKMDI+LNG+K+DALSFIVH+++AYERGK+IVEKLK++IPRQQFEVP+QAAIGQKIV | |
| Sbjct: | 489 | SKLVKMDIMLNGEKIDALSFIVHRDYAYERGKVIVEKLKELIPRQQFEVPVQAAIGQKIV | 548 |
| Query: | 548 | ARSDIKALRKNVLAKCYGGDVSRKRKLLEKQKAGKKRMKAIGSVEVPQEAFLSVLSMDDD | 607 |
| | | ARS IKA+RKNVLAKCYGGD+SRKRKLLEKQK GK+RMK +GSVEVPQEAF++VL MDD | |
| Sbjct: | 549 | ARSTIKAMRKNVLAKCYGGDISRKRKLLEKQKEGKRRMKQVGSVEVPQEAFMAVLKMDDS | 608 |
| Query: | 608 | TKK | 610 |
| | | KK | |
| Sbjct: | 609 | PKK | 611 |

[7536] An alignment of the GAS and GBS proteins is shown below.

| Identities = 587/610 (96%), Positives = 601/610 (98%) | | | |
|---|---|---|---|
| Query: | 1 | MNIEDLKKRQEKIRNFSIIAHIDHGKSTLADRILEKTETVSSREMQAQLLDSMDLERERG | 60 |
| | | MN +DLKKRQEKIRNFSIIAHIDHGKSTLADRILEKTETVSSREMQAQLLDSMDLERERG | |
| Sbjct: | 1 | MNSQDLKKRQEKIRNFSIIAHIDHGKSTLADRILEKTETVSSREMQAQLLDSMDLERERG | 60 |
| Query: | 61 | ITIKLNAIELNYTAKDGETYIFHLIDTPGHVDFTYEVSRSLAACEGAILVVDAAQGIEAQ | 120 |
| | | ITIKLNAIELNYTAKDGETYIFHLIDTPGHVDFTYEVSRSLAACEGAILVVDAAQGIEAQ | |
| Sbjct: | 61 | ITIKLNAIELNYTAKDGETYIFHLIDTPGHVDFTYEVSRSLAACEGAILVVDAAQGIEAQ | 120 |
| Query: | 121 | TLANVYLALDNDLEILPVINKIDLPAADPERVRAEVEDVIGLDASEAVLASAKAGIGIEE | 180 |
| | | TLANVYLALDNDLEILPVINKIDLPAADPERVR EVEDVIGLDASEAVLASAKAGIGIEE | |
| Sbjct: | 121 | TLANVYLALDNDLEILPVINKIDLPAADPERVRHEVEDVIGLDASEAVLASAKAGIGIEE | 180 |
| Query: | 181 | ILEQIVEKVPAPTGEVDAPLQALIFDSVYDAYRGVILQVRIVNGMVKPGDKIQMMSNGKT | 240 |
| | | ILEQIVEKVPAPTG+VDAPLQALIFDSVYDAYRGVILQVRIVNG+VKPGDKIQMMSNGKT | |
| Sbjct: | 181 | ILEQIVEKVPAPTGDVDAPLQALIFDSVYDAYRGVILQVRIVNGIVKPGDKIQMMSNGKT | 240 |
| Query: | 241 | FDVTEVGIFTPKAVGRDFLATGDVGYIAASIKTVADTRVGDTITLANNPAIEPLHGYKQM | 300 |
| | | FDVTEVGIFTPKAVGRDFLATGDVGY+AASIKTVADTRVGDT+TLANNPA E LHGYKQM | |
| Sbjct: | 241 | FDVTEVGIFTPKAVGRDFLATGDVGYVAASIKTVADTRVGDTVTLANNPAKEALHGYKQM | 300 |
| Query: | 301 | NPMVFAGLYPIESNKYNDLREALEKLQLNDASLQFEPETSQALGFGFRCGFLGLLHMDVI | 360 |
| | | NPMVFAG+YPIESNKYNDLREALEKLQLNDASLQFEPETSQALGFGFRCGFLGLLHMDVI | |
| Sbjct: | 301 | NPMVFAGIYPIESNKYNDLREALEKLQLNDASLQFEPETSQALGFGFRCGFLGLLHMDVI | 360 |
| Query: | 361 | QERLEREFNIDLIMTAPSVVYHVNTTDGEMLEVSNPSEFPDPTRVDSIEEPYVKAQIMVP | 420 |
| | | QERLEREFNIDLIMTAPSVVYHV+TTD +M+EVSNPSEFPDPTRV IEEPYVKAQIMVP | |
| Sbjct: | 361 | QERLEREFNIDLIMTAPSVVYHVHTTDEDMIEVSNPSEFPDPTRVAFIEEPYVKAQIMVP | 420 |
| Query: | 421 | QEFVGAVMELAQRKRGDFVTMDYIDDNRVNVIYQIPLAEIVFDFFDKLKSSTRGYASFDY | 480 |
| | | QEFVGAVMEL+QRKRGDFVTMDYIDDNRVNVIYQIPLAEIVFDFFDKLKSSTRGYASFDY | |
| Sbjct: | 421 | QEFVGAVMELSQRKRGDFVTMDYIDDNRVNVIYQIPLAEIVFDFFDKLKSSTRGYASFDY | 480 |
| Query: | 481 | EISEYRRSQLXKMDILLNGDKVDALSFIVHKEFAYERGKLIVDKLKKIIPRQQFEVPIQA | 540 |
| | | ++SEYRRSQL KMDILLNGDKVDALSFIVHKEFAYERGK+IV+KLKKIIPRQQFEVPIQA | |
| Sbjct: | 481 | DMSEYRRSQLVKMDILLNGDKVDALSFIVHKEFAYERGKIIVEKLKKIIPRQQFEVPIQA | 540 |
| Query: | 541 | AIGQKIVARSDIKALRKNVLAKCYGGDVSRKRKLLEKQKAGKKRMKAIGSVEVPQEAFLS | 600 |
| | | AIGQKIVARSDIKALRKNVLAKCYGGDVSRKRKLLEKQKAGKKRMKAIGSVEVPQEAFLS | |
| Sbjct: | 541 | AIGQKIVARSDIKALRKNVLAKCYGGDVSRKRKLLEKQKAGKKRMKAIGSVEVPQEAFLS | 600 |
| Query: | 601 | VLSMDDDDKK | 610 |
| | | VLSMDDD KK | |
| Sbjct: | 601 | VLSMDDDTKK | 610 |

[7537] Based on this analysis, it was predicted that these proteins and their epitopes could be useful antigens for vaccines or diagnostics.

### EXAMPLE 1370

[7538] A DNA sequence (GBSx1455) was identified in S. agalactiae <SEQ ID 4189> which encodes the amino acid sequence <SEQ ID 4190>. This protein is predicted to be awd gene product (ndk). Analysis of this protein sequence reveals the following:

```
Possible site: 42
>>> Seems to have no N-terminal signal sequence
----- Final Results -----
                            bacterial cytoplasm --- Certainty = 0.2097(Affirmative) < succ>
                              bacterial membrane --- Certainty = 0.0000(Not Clear) < succ>
                                bacterial outside --- Certainty = 0.0000(Not Clear) < succ>
```

[7539] The protein has homology with the following sequences in the GENPEPT database.

| >GP: AAF57188 GB: AE003779 awd gene product [Drosophila melanogaster] | | | |
|---|---|---|---|
| Identities = 73/136 (53%), Positives = 100/136 (72%), Gaps = 5/136 (3%) | | | |
| Query: | 2 | EQTFFMIKPDGVKRGFIGEVISRIERRGFSIDRLEVRYADADILKRHYAELTDRPFFPTL | 61 |
| | | E+TF M+KPDGV+RG +G++I R E++GF + L+ +A ++L++HYA+L+ RPFFP L | |
| Sbjct: | 25 | ERTFIMVKPDGVQRGLVGKIIERFEQKGFKLVALKFTWASKELLEKHYADLSARPFFPGL | 84 |
| Query: | 62 | VDYMTSGPVIIGVISGEEVISTWRTMMGSTNPKDALPGTIRGDFAQAPSPNQATCNIVHG | 121 |
| | | V+YM SGPV+ V G V+ T R M+G+TNP D+LPGTIRGDF Q NI+HG | |
| Sbjct: | 85 | VNYMNSGPVVPMVWEGLNVVKTGRQMLGATNPADSLPGTIRGDFC-----IQVGRNIIHG | 139 |
| Query: | 122 | SDSPESATREIAIWFN | 137 |
| | | SD+ ESA +EIA+WFN | |
| Sbjct: | 140 | SDAVESAEKEIALWFN | 155 |

[7540] A related DNA sequence was identified in S. pyogenes <SEQ ID 4191> which encodes the amino acid sequence <SEQ ID 4192>. Analysis of this protein sequence reveals the following:

```
Possible site: 22
>>> Seems to have no N-terminal signal sequence
----- Final Results -----
                            bacterial cytoplasm --- Certainty = 0.2913(Affirmative) < succ>
                              bacterial membrane --- Certainty = 0.0000(Not Clear) < succ>
                                bacterial outside --- Certainty = 0.0000(Not Clear) < succ>
```

[7541] An alignment of the GAS and GBS proteins is shown below.

| Identities = 30/48 (62%), Positives = 35/48 (72%) | | | |
|---|---|---|---|
| Query: | 87 | MMGSTNPKDALPGTIRGDFAQAPSPNQATCNIVHGSDSPESATREIAI | 134 |
| | | MM TNPKDAL GTIR +FAQAP + N+VHGS S +SA REIA+ | |
| Sbjct: | 1 | MMRVTNPKDALCGTIRENFAQAPGDDGGIFNMVHGSHSRDSARREIAL | 48 |

[7542] Based on this analysis, it was predicted that these proteins and their epitopes could be useful antigens for vaccines or diagnostics.

### EXAMPLE 1371

[7543] A DNA sequence (GBSx1456) was identified in S. agalactiae <SEQ ID 4193> which encodes the amino acid sequence <SEQ ID 4194>. Analysis of this protein sequence reveals the following:

```
Possible site: 15
>>> Seems to have no N-terminal signal sequence
----- Final Results -----
                            bacterial cytoplasm --- Certainty = 0.2734(Affirmative) < succ>
                              bacterial membrane --- Certainty = 0.0000(Not Clear) < succ>
                                bacterial outside --- Certainty = 0.0000(Not Clear) < succ>
```

[7544] The protein has no significant homology with any sequences in the GENPEPT database.

[7545] A related DNA sequence was identified in S. pyogenes <SEQ ID 4195> which encodes the amino acid sequence <SEQ ID 4196>. Analysis of this protein sequence reveals the following:

```
Possible site: 16
>>> Seems to have no N-terminal signal sequence
----- Final Results -----
                            bacterial cytoplasm --- Certainty = 0.1985(Affirmative) < succ>
                              bacterial membrane --- Certainty = 0.0000(Not Clear) < succ>
                                bacterial outside --- Certainty = 0.0000(Not Clear) < succ>
```

[7546] An alignment of the GAS and GBS proteins is shown below.

Identities = 22/34 (64%), Positives = 26/34 (75%)

| | | | |
|---|---|---|---|
| Query: | 28 | SFGTIRNSTALKQLTLDSLNLLSFGTIRNSTALK | 61 |
| | | SFGTI+NS ALKQ + +N SFGTI+NS ALK | |
| Sbjct: | 7 | SFGTIQNSIALKQKAQEEINQRSFGTIQNSIALK | 40 |

Identities = 22/34 (64%), Positives = 26/34 (75%)

| | | | |
|---|---|---|---|
| Query: | 6 | SFGTIRNSTALKLYAKQSPAFRSFGTIRNSTALK | 39 |
| | | SFGTI+NS ALK A++ RSFGTI+NS ALK | |
| Sbjct: | 7 | SFGTIQNSIALKQKAQEEINQRSFGTIQNSIALK | 40 |

[7547] Based on this analysis, it was predicted that these proteins and their epitopes could be useful antigens for vaccines or diagnostics.

### EXAMPLE 1372

[7548] A DNA sequence (GBSx1457) was identified in S. agalactiae <SEQ ID 4197> which encodes the amino acid sequence <SEQ ID 4198>. Analysis of this protein sequence reveals the following:

```
Possible site: 16
>>> Seems to have no N-terminal signal sequence
----- Final Results -----
                            bacterial cytoplasm --- Certainty = 0.1407(Affirmative) < succ>
                              bacterial membrane --- Certainty = 0.0000(Not Clear) < succ>
                                bacterial outside --- Certainty = 0.0000(Not Clear) < succ>
```

[7549] The protein has no significant homology with any sequences in the GENPEPT database.

[7550] A related DNA sequence was identified in S. pyogenes <SEQ ID 4199> which encodes the amino acid sequence <SEQ ID 4200>. Analysis of this protein sequence reveals the following:

```
Possible site: 37
>>> Seems to have no N-terminal signal sequence
----- Final Results -----
                            bacterial cytoplasm --- Certainty = 0.2055(Affirmative) < succ>
                              bacterial membrane --- Certainty = 0.0000(Not Clear) < succ>
                                bacterial outside --- Certainty = 0.0000(Not Clear) < succ>
```

[7551] An alignment of the GAS and GBS proteins is shown below.

| Identities = 154/221 (69%), Positives = 187/221 (83%) | | | |
|---|---|---|---|
| Query: | 1 | MIKINFPILDEPLVLSNATILTIEDVSVYSSLVKHFYQYDVDEHLKLFDDKQKSLKATEL | 60 |
| | | ++ +NF +LDEP+ L TIL +EDV V+S +V++ YQY+ D LK FD K K++K +E+ | |
| Sbjct: | 8 | LMNLNFSLLDEPIPLRGGTILVLEDVCVFSKIVQYCYQYEEDSELKFFDHKMKTIKESEI | 67 |
| Query: | 61 | MLVTDILGYDVNSAPILKLIHGDLENQFNEKPEVKSMVEKLAATITELIAFECLENELDL | 120 |
| | | MLVTDILG+DVNS+ ILKLIH DLE+QFNEKPEVKSM++KL ATITELI FECLENELDL | |
| Sbjct: | 68 | MLVTDILGFDVNSSTILKLIHADLESQFNEKPEVKSMIDKLVATITELIVFECLENELDL | 127 |
| Query: | 121 | EYDEIKILELIKALGVKIETQSDTIFEKCFEIIQVYHYLTKKNLLVFVNSGAYLTKDEVI | 180 |
| | | EYDEI ILELIK+LGVK+ETQSDTIFEKC EI+Q++ YLTKK LL+FVNSGA+LTKDEV | |
| Sbjct: | 128 | EYDEITILELIKSLGVKVETQSDTIFEKCLEILQIFKYLTKKKLLIFVNSGAFLTKDEVA | 187 |
| Query: | 181 | KLCEYINLMQKSVLFLEPRRLYDLPQYVIDKDYFLIGENMV | 221 |
| | | L EYI+L +VLFLEPR LYD PQY++D+DYFLI +NMV | |
| Sbjct: | 188 | SLQEYISLTNLTVLFLEPRELYDFPQYILDEDYFLITKNMV | 228 |

[7552] Based on this analysis, it was predicted that these proteins and their epitopes could be useful antigens for vaccines or diagnostics.

### EXAMPLE 1373

[7553] A DNA sequence (GBSx1458) was identified in S. agalactiae <SEQ ID 4201> which encodes the amino acid sequence <SEQ ID 4202>. Analysis of this protein sequence reveals the following:

```
Possible site: 18
>>> Seems to have no N-terminal signal sequence
----- Final Results -----
                            bacterial cytoplasm --- Certainty = 0.0842(Affirmative) < succ>
                              bacterial membrane --- Certainty = 0.0000(Not Clear) < succ>
                                bacterial outside --- Certainty = 0.0000(Not Clear) < succ>
```

[7554] A related GBS nucleic acid sequence <SEQ ID 9783> which encodes amino acid sequence <SEQ ID 9784> was also identified.

[7555] The protein has homology with the following sequences in the GENPEPT database.

| >GP: CAB83918 GB: AL162753 hypothetical protein NMA0629 [Neisseria | | | |
|---|---|---|---|
| meningitidis Z2491] | | | |
| Identities = 45/104 (43%), Positives = 65/104 (62%), Gaps = 2/104 (1%) | | | |
| Query: | 4 | RYMRMILMFDMPTETAEERKAYRIFRKFLLSEGFIMHQFSVYSKLLLNNTANNAMIGRLK | 63 |
| | | ++MR+I+ FD+P TA +RKA+ FR+FLL +G+ M Q SVYS+++ + RL | |
| Sbjct: | 5 | KFMRIIVFFDLPVITAAKRKAANQFRQFLLKDGYQMLQLSVYSRIVKGRDSLQKHHNRLC | 64 |
| Query: | 64 | VNNPKKGNITLLTVTEKQFARMVYLHGERNT--SVANSDSRLVF | 105 |
| | | N P++G+I L +TEKQ+A M L GE T NSD L+F | |
| Sbjct: | 65 | ANLPQEGSIRCLEITEKQYAAMKLLLGELKTQEKKVNSDQLLLF | 108 |

[7556] A related DNA sequence was identified in S. pyogenes <SEQ ID 4203> which encodes the amino acid sequence <SEQ ID 4204>. Analysis of this protein sequence reveals the following:

```
Possible site: 18
>>> Seems to have no N-terminal signal sequence
----- Final Results -----
                            bacterial cytoplasm --- Certainty = 0.0822(Affirmative) < succ>
                              bacterial membrane --- Certainty = 0.0000(Not Clear) < succ>
                                bacterial outside --- Certainty = 0.0000(Not Clear) < succ>
```

[7557] An alignment of the GAS and GBS proteins is shown below.

| Identities = 97/112 (86%), Positives = 107/112 (94%) | | | |
|---|---|---|---|
| Query: | 1 | MSYRYMRMILMFDMPTETAEERKAYRKFRKFLLSEGFIMHQFSVYSKLLLNNTANNAMIG | 60 |
| | | MSYRYMRMILMFDMPT+TAEERKAYRKFRKFLLSEGFIMHQFS+YSKLLLNNTANNAMIG | |
| Sbjct: | 1 | MSYRYMRMILMFDMPTDTAEERKAYRKFRKFLLSEGFIMHQFSIYSKLLLNNTANNAMIG | 60 |
| Query: | 61 | RLKVNNPKKGNITLLTVTEKQFARMVYLHGERNTSVANSDSRLVFLGDSYDQ | 112 |
| | | RL+ +NP KGNITLLTVTEKQFARM+YLHGERN +ANSD RLVFLG+++D+ | |
| Sbjct: | 61 | RLREHNPNKGNITLLTVTEKQFARMIYLHGERNNCIANSDERLVFLGEAFDE | 112 |

[7558] Based on this analysis, it was predicted that these proteins and their epitopes could be useful antigens for vaccines or diagnostics.

### EXAMPLE 1374

[7559] A DNA sequence (GBSx1459) was identified in S. agalactiae <SEQ ID 4205> which encodes the amino acid sequence <SEQ ID 4206>. Analysis of this protein sequence reveals the following:

```
Possible site: 13
>>> Seems to have no N-terminal signal sequence
----- Final Results -----
                            bacterial cytoplasm --- Certainty = 0.3185(Affirmative) < succ>
                              bacterial membrane --- Certainty = 0.0000(Not Clear) < succ>
                                bacterial outside --- Certainty = 0.0000(Not Clear) < succ>
```

[7560] The protein has homology with the following sequences in the GENPEPT database.

| >GP: CAB83919 GB: AL162753 hypothetical protein NMA0630 [Neisseria | | | |
|---|---|---|---|
| meningitidis Z2491] | | | |
| Identities = 71/224 (31%), Positives = 122/224 (53%) | | | |
| Query: | 4 | WRTVVVNTHSKLSYKNNHLIFKDSYQTEMIHLSEIDILIMETTDIVLSTMLIKRLVDENI | 63 |
| | | WR++++ KLS + L+ + + ++ + L +I ++I+E + +++ L+ L + | |
| Sbjct: | 3 | WRSLLIQNGGKLSLQRRQLLIQQNGESHTVPLEDIAVIIIENRETLITAPLLSALAEHGA | 62 |
| Query: | 64 | LVIFCDDKRLPTAMLMPYYARHDSSLQLSRQMSWIEDVKADVWTSIIAQKILNQSFYLGE | 123 |
| | | ++ CD++ LP +PY H L Q++ E +K +W I+ QKILNQ+F E | |
| Sbjct: | 63 | TLLTCDEQFLPCGQWLPYAQYHRQLKILKLQLNISEPLKKQLWQHIVRQKILNQAFVADE | 122 |
| Query: | 124 | CSFFEKSQSIMNLYHDLEPFDPSNREGHAARIYFNTLFGNDFSREQDNPINAGLDYGYSL | 183 |
| | | ++ + L ++ D NRE AA +YF LFG F+R +N +NA L+Y Y++ | |
| Sbjct: | 123 | TGNDLAAKRLRTLASEVRSGDTGNREAQAAALYFQALFGEKFTRNDNNAVNAALNYTYAV | 182 |
| Query: | 184 | LLSMFAREVVKCGCMTQFGLKHANQFNQFNLASDIMEPFRPIVD | 227 |
| | | L + AR + G + GL H ++ N FNLA D +EP RP+ D | |
| Sbjct: | 183 | LRAAVARALTLYGWLPALGLFHRSELNPFNLADDFIEPLRPLAD | 226 |

[7561] A related DNA sequence was identified in S. pyogenes <SEQ ID 4207> which encodes the amino acid sequence <SEQ ID 4208>. Analysis of this protein sequence reveals the following:

```
Possible site: 13
>>> Seems to have no N-terminal signal sequence
----- Final Results -----
                            bacterial cytoplasm --- Certainty = 0.3185(Affirmative) < succ>
                              bacterial membrane --- Certainty = 0.0000(Not Clear) < succ>
                                bacterial outside --- Certainty = 0.0000(Not Clear) < succ>
```

[7562] An alignment of the GAS and GBS proteins is shown below.

| Identities = 239/289 (82%), Positives = 271/289 (93%) | | | |
|---|---|---|---|
| Query: | 1 | MAGWRTVVVNTHSKLSYKNNHLIFKDSYQTEMIHLSEIDILIMETTDIVLSTMLIKRLVD | 60 |
| | | MAGWRTVVVNTHSKLSYKNNHLIFKD+Y+TE+IHLSEIDIL++ETTDIVLSTML+KRLVD | |
| Sbjct: | 1 | MAGWRTVVVNTHSKLSYKNNHLIFKDAYKTELIHLSEIDILLLETTDIVLSTMLVKRLVD | 60 |
| Query: | 61 | ENILVIFCDDKRLPTAMLMPYYARHDSSLQLSRQMSWIEDVKADVWTSIIAQKILNQSFY | 120 |
| | | EN+LVIFCDDKRLPTAMLMP+Y RHDSSLQL +QMSW E VK+ VWT+IIAQKILNQS Y | |
| Sbjct: | 61 | ENVLVIFCDDKRLPTAMLMPFYGRHDSSLQLGKQMSWSETVKSQVWTTIIAQKILNQSCY | 120 |
| Query: | 121 | LGECSFFEKSQSIMNLYHDLEPFDPSNREGHAARIYFNTLFGNDFSREQDNPINAGLDYG | 180 |
| | | LG CS+FEKSQSIM+LYH LE FDPSNREGHAARIYFNTLFGNDFSR+ ++PINAGLDYG | |
| Sbjct: | 121 | LGACSYFEKSQSIMDLYHGLENFDPSNREGHAARIYFNTLFGNDFSRDLEHPINAGLDYG | 180 |
| Query: | 181 | YSLLLSMFAREVVKCGCMTQFGLKHANQFNQFNLASDIMEPFRPIVDRIIYENRQSDFVK | 240 |
| | | Y+LLLSMFAREVV GCMTQFGLKHANQFNQFN ASDIMEPFRP+VD+I+YENR F K | |
| Sbjct: | 181 | YTLLLSMFAREVVVSGCMTQFGLKHANQFNQFNFASDIMEPFRPLVDKIVYENRNQPFPK | 240 |
| Query: | 241 | MKRELFSMFSETYSYNGKEMYLSNIVSDYTKKVIKSLNSDGNGIPEFRI | 289 |
| | | +KRELF++FS+T+SYNGKEMYL+NI+SDYTKKV+K+LN++G G+PEFRI | |
| Sbjct: | 241 | IKRELFTLFSDTFSYNGKEMYLTNIISDYTKKVVKALNNEGKGVPEFRI | 289 |

[7563] Based on this analysis, it was predicted that these proteins and their epitopes could be useful antigens for vaccines or diagnostics.

### EXAMPLE 1375

[7564] A DNA sequence (GBSx1460) was identified in S. agalactiae <SEQ ID 4209> which encodes the amino acid sequence <SEQ ID 4210>. Analysis of this protein sequence reveals the following:

```
Possible site: 59
>>> Seems to have no N-terminal signal sequence
----- Final Results -----
                            bacterial cytoplasm --- Certainty = 0.1109(Affirmative) < succ>
                              bacterial membrane --- Certainty = 0.0000(Not Clear) < succ>
                                bacterial outside --- Certainty = 0.0000(Not Clear) < succ>
```

[7565] The protein has homology with the following sequences in the GENPEPT database.

| >GP: CAB73943 GB: AL139078 hyopthetical protein Cj1523c [Campylobacter | | | |
|---|---|---|---|
| jejuni] | | | |
| Identities = 165/746 (22%), Positives = 291/746 (38%), Gaps = 115/746 (15%) | | | |
| Query: | 318 | LSASMIQRYDEHREDLKQLKQFVKASLPEKYQEI--FADSSKDGYAGYIEGKTNQEAFYK | 375 |
| | | L+ S +R + L LK + Y++ F +S Y G + E ++ | |
| Sbjct: | 50 | LARSARKRLARRKARLNHLKHLIANEFKLNYEDYQSFDESLAKAYKGSLISP--YELRFR | 107 |
| Query: | 376 | YLSKLLTKQEDSENFLE--KIKNEDFLRKQRTFDNGSIPHQVHLTELKAIIRRQS----- | 428 |
| | | L++LL+KQ+ + L K + D ++ + G+I + E K + QS | |
| Sbjct: | 108 | ALNELLSKQDFARVILHIAKRRGYDDIKNSDDKEKGAILKAIKQNEEK-LANYQSVGEYL | 166 |
| Query: | 429 | --EYYPFLKENQDRIEKILTFRIPYY-----------IGPLAREKSDFAW-MTRKTDDSI | 474 |
| | | EY+ KEN + + Y + + +++ +F + ++K ++ + | |
| Sbjct: | 167 | YKEYFQKFKENSKEFTNVRNKKESYERCIAQSFLKDELKLIFKKQREFGFSFSKKFEEEV | 226 |
| Query: | 475 | RPWNFEDLVDKEKSAEAFIHRMTNNDFYLPEEKVLPKHSLIYEKFTVYNELTKV--RYKN | 532 |
| | | F +++ + F H + N F+ +EK PK+S + F + + KN | |
| Sbjct: | 227 | LSVAFY-----KRALKDFSHLVGNCSFFT-DEKRAPKNSPLAFMFVALTRIINLLNNLKN | 280 |
| Query: | 533 | EQGETYFFDSNIKQEIFDGVFKEHRKVSK--KKLLDFLAKEYEEFRIVDVIGLDKENKAF | 590 |
| | | +G Y D + + V K K KKLL L+ +YE E + | |
| Sbjct: | 281 | TEGILYTKDD--LNALLNEVLKNGTLTYKQTKKLLG-LSDDYE---------FKGEKGTY | 328 |
| Query: | 591 | NASLGTYHDLEKILDKDFLDNPDNESILEDIVQTLTLFEDREMIKKRLENYKDLFTESQL | 650 |
| | | Y + K L + L D L +I + +TL +D +KK L Y ++Q+ | |
| Sbjct: | 329 | FIEFKKYKEFIKALGEHNLSQDD----LNEIAKDITLIKDEIKLKKALAKYD--LNQNQI | 382 |
| Query: | 651 | KKLYRRHYTGWGRLSAKLINGIRDK--ESQKTILDYLIDDGRSNRNFMQLINDDGLSFKS | 708 |
| | | L + + +S K + + E +K D+ + N IN+D F | |
| Sbjct: | 383 | DSLSKLEFKDHLNISFKALKLVTPLMLEGKK------YDEACNELNLKVAINEDKKDFLP | 436 |
| Query: | 709 | IISKAQAGSHSDNLKEVVGELAGSPAIKKGILQSLKIVDELVKVMGYEPEQIVVEMAREN | 768 |
| | | ++ N P + + I + K+++ L+K G + +I +E+ARE | |
| Sbjct: | 437 | AFNETYYKDEVTN-----------PVVLRAIKEYRKVLNALLKKYG-KVHKINIELAREV | 484 |
| Query: | 769 | QTTNQGR----RNSRQRYKLLDDG---VKNLASDLNG-NILKEYPTDNQALQNERLFLYY | 820 |
| | | + R + + YK D + L +N NILK L L+ | |
| Sbjct: | 485 | GKNHSQRAKIEKEQNENYKAKKDAELECEKLGLKINSKNILK-------------LRLFK | 531 |
| Query: | 821 | LQNGRDMYTGEALDIDNLSQ---YDIDHIIPQAFIKDDSIDNRVLVSSAKNRGKSDDVPS | 877 |
| | | Q Y+GE + I +L +IDHI P + DDS N+VLV + +N+ K + P | |
| Sbjct: | 532 | EQKEFCAYSGEKIKISDLQDEKMLEIDHIYPYSRSFDDSYMNKVLVFTKQNQEKLNQTP- | 590 |
| Query: | 878 | LEIVKDCKVFWKKL--LDAKLMSQRKYDNLTKAERGGLTSDDKARFIQRQLVETRQITKH | 935 |
| | | E + W+K+ L L ++++ L K ++ F R L +TR I + | |
| Sbjct: | 591 | FEAFGNDSAKWQKIEVLAKNLPTKKQKRILDK----NYKDKEQKNFKDRNLNDTRYIARL | 646 |
| Query: | 936 | VARI---------LDERFNNELDSKGRRIRKVKIVTLKSNLVSNFRKEFGFYKIREVNNY | 986 |
| | | V L + N +L+ ++ KV + L S R +GF N+ | |
| Sbjct: | 647 | VLNYTKDYLDFLPLSDDENTKLNDT-QKGSKVHVEAKSGMLTSALRHTWGFSAKDRNNHL | 705 |
| Query: | 987 | HHAHDAYLNAVVAKAILTKYPQLEPE | 1012 |
| | | HHA DA + A +I+ + + E | |
| Sbjct: | 706 | HHAIDAVIIAYANNSIVKAFSDFKKE | 731 |

[7566] A related DNA sequence was identified in S. pyogenes <SEQ ID 4211> which encodes the amino acid sequence <SEQ ID 4212>. Analysis of this protein sequence reveals the following:

```
Possible site: 61
>>> Seems to have no N-terminal signal sequence
----- Final Results -----
                            bacterial cytoplasm --- Certainty = 0.0973(Affirmative) < succ>
                              bacterial membrane --- Certainty = 0.0000(Not Clear) < succ>
                                bacterial outside --- Certainty = 0.0000(Not Clear) < succ>
```

[7567] An alignment of the GAS and GBS proteins is shown below.

| Identities = 881/1380 (63%), Positives = 1088/1380 (78%), Gaps = 22/1380 (1%) | | | |
|---|---|---|---|
| Query: | 1 | MNKPYSIGLDIGTNSVGWSIITDDYKVPAKKMRVLGNTDKEYIKKNLIGALLFDGGNTAA | 60 |
| | | M+K YSIGLDIGTNSVGW++ITD+YKVP+KK +VLGNTD+ IKKNLIGALLFD G TA | |
| Sbjct: | 1 | MDKKYSIGLDIGTNSVGWAVITDEYKVPSKKFKVLGNTDRHSIKKNLIGALLFDSGETAE | 60 |
| Query: | 61 | DRRLKRTARRRYTRRRNRILYLQEIFAEEMSKVDDSFFHRLEDSFLVEEDKRGSKYPIFA | 120 |
| | | RLKRTARRRYTRR+NRI YLQEIF+ EM+KVDDSFFHRLE+SFLVEEDK+ ++PIF | |
| Sbjct: | 61 | ATRLKRTARRRYTRRKNRICYLQEIFSNEMAKVDDSFFHRLEESFLVEEDKKHERHPIFG | 120 |
| Query: | 121 | TLQEEKDYHEKFSTIYHLRKELADKKEKADLRLIYIALAHIIKFRGHFLIEDDSFDVRNT | 180 |
| | | + +E YHEK+ TIYHLRK+L D +KADLRLIY+ALAH+IKFRGHFLIE D + N+ | |
| Sbjct: | 121 | NIVDEVAYHEKYPTIYHLRKKLVDSTDKADLRLIYLALAHMIKFRGHFLIEGD-LNPDNS | 179 |
| Query: | 181 | DISKQYQDFLEIFNTTFENNDLLSQNVDVEAILTDKISKSAKKDRILAQYPNQKSTGIFA | 240 |
| | | D+ K + ++ +N FE N + + VD +AIL+ ++SKS + + ++AQ P +K G+F | |
| Sbjct: | 180 | DVDKLFIQLVQTYNQLFEENPINASGVDAKAILSARLSKSRRLENLIAQLPGEKKNGLFG | 239 |
| Query: | 241 | EFLKLIVGNQADFKKYFNLEDKTPLQFAKDSYDEDLENLLGQIGDEFADLFSAAKKLYDS | 300 |
| | | + L +G +FK F+L + LQ +KD+YD+DL+NLL QIGD++ADLF AAK L D+ | |
| Sbjct: | 240 | NLIALSLGLTPNFKSNFDLAEDAKLQLSKDTYDDDLDNLLAQIGDQYADLFLAAKNLSDA | 299 |
| Query: | 301 | VLLSGILTVIDLSTKAPLSASMIQRYDEHREDLKQLKQFVKASLPEKYQEIFADSSKDGY | 360 |
| | | +LLS IL V TKAPLSASMI+RYDEH +DL LK V+ LPEKY+EIF D SK+GY | |
| Sbjct: | 300 | ILLSDILRVNTEITKAPLSASMIKRYDEHHQDLTLLKALVRQQLPEKYKEIFFDQSKNGY | 359 |
| Query: | 361 | AGYIEGKTNQEAFYKYLSKLLTKQEDSENFLEKIKNEDFLRKQRTFDNGSIPHQVHLTEL | 420 |
| | | AGYI+G +QE FYK++ +L K + +E L K+ ED LRKQRTFDNGSIPHQ+HL EL | |
| Sbjct: | 360 | AGYIDGGASQEEFYKFIKPILEKMDGTEELLVKLNREDLLRKQRTFDNGSIPHQIHLGEL | 419 |
| Query: | 421 | KAIIRRQSEYYPFLKENQDRIEKILTFRIPYYIGPLAREKSDFAWMTRKTDDSIRPWNFE | 480 |
| | | AI+RRQ ++YPFLK+N+++IEKILTFRIPYY+GPLAR S FAWMTRK++++I PWNFE | |
| Sbjct: | 420 | HAILRRQEDFYPFLKDNREKIEKILTFRIPYYVGPLARGNSRFAWMTRKSEETITPWNFE | 479 |
| Query: | 481 | DLVDKEKSAEAFIHRMTNNDFYLPEEKVLPKHSLIYEKFTVYNELTKVRYKNE-QGETYF | 539 |
| | | ++VDK SA++FI RMTN D LP EKVLPKHSL+YE FTVYNELTKV+Y E + F | |
| Sbjct: | 480 | EVVDKGASAQSFIERMTNFDKNLPNEKVLPKHSLLYEYFTVYNELTKVKYVTEGMRKPAF | 539 |
| Query: | 540 | FDSNIKQEIFDGVFKEHRKVSKKKLLDFLAKEYEEFRIVDVIGLDKENKAFNASLGTYHD | 599 |
| | | K+ I D +FK +RKV+ K+L + K+ E F V++ G++ FNASLGTYHD | |
| Sbjct: | 540 | LSGEQKKAIVDLLFKTNRKVTVKQLKEDYFKKIECFDSVEISGVEDR----FNASLGTYHD | 596 |
| Query: | 600 | LEKIL-DKDFLDNPDNESILEDIVQTLTLFEDREMIKKRLENYKDLFTESQLKKLYRRHY | 658 |
| | | L KI+ DKDFLDN +NE ILEDIV TLTLFEDREMI++RL+ Y LF + +K+L RR Y | |
| Sbjct: | 597 | LLKIIKDKDFLDNEENEDILEDIVLTLTLFEDREMIEERLKTYAHLFDDKVMKQLKRRRY | 656 |
| Query: | 659 | TGWGRLSAKLINGIRDKESQKTILDYLIDDGRSNRNFMQLINDDGLSFKSIISKAQAGSH | 718 |
| | | TGWGRLS KLINGIRDK+S KTILD+L DG +NRNFMQLI+DD L+FK I KAQ | |
| Sbjct: | 657 | TGWGRLSRKLINGIRDKQSGKTILDFLKSDGFANRNFMQLIHDDSLTFKEDIQKAQVSGQ | 716 |
| Query: | 719 | SDNLKEVVGELAGSPAIKKGILQSLKIVDELVKVMG-YEPEQIVVEMAPENQTTNQGRRN | 777 |
| | | D+L E + LAGSPAIKKGILQ++K+VDELVKVMG ++PE IV+EMARENQTT +G++N | |
| Sbjct: | 717 | GDSLHEHIANLAGSPAIKKGILQTVKVVDELVKVMGRHKPENIVIEMARENQTTQKGQKN | 776 |
| Query: | 778 | SRQRYKLLDDGVKNLASDLNGNILKEYPTDNQALQNERLFLYYLQNGRDMYTGEALDIDN | 837 |
| | | SR+R K +++G+K L S ILKE+P +N LQNE+L+LYYLQNGRDMY + LDI+ | |
| Sbjct: | 777 | SRERMKRIEEGIKELGS----QILKEHPVENTQLQNEKLYLYYLQNGRDMYVDQELDINR | 832 |
| Query: | 838 | LSQYDIDHIIPQAFIKDDSIDNRVLVSSAKNRGKSDDVPSLEIVKDCKVFWKKLLDAKLM | 897 |
| | | LS YD+DHI+PQ+F+KDDSIDN+VL S KNRGKSD+VPS E+VK K +W++LL+AKL+ | |
| Sbjct: | 833 | LSDYDVDHIVPQSFLKDDSIDNKVLTRSDKNRGKSDNVPSEEVVKKMKNYWRQLLNAKLI | 892 |
| Query: | 898 | SQRKYDNLTKAERGGLTSDDKARFIQRQLVETRQITKHVARILDERFNNELDSKGRRIRK | 957 |
| | | +QRK+DNLTKAERGGL+ DKA FI+RQLVETRQITKHVA+ILD R N + D + IR+ | |
| Sbjct: | 893 | TQRKFDNLTKAERGGLSELDKAGFIKRQLVETRQITKHVAQILDSRMNTKYDENDKLIRE | 952 |
| Query: | 958 | VKIVTLKSNLVSNFRKEFGFYKIREVNNYHHAHDAYLNAVVAKAILTKYPQLEPEFVYGD | 1017 |
| | | VK++TLKS LVS+FRK+F FYK+RE+NNYHHAHDAYLNAVV A++ KYP+LE EFVYGD | |
| Sbjct: | 953 | VKVITLKSKLVSDFRKDFQFYKVREINNYHHAHDAYLNAVVGTALIKKYPKLESEFVYGD | 1012 |
| Query: | 1018 | YPKYN-------SYKTRKSATEKLFFYSNIMNFFKTKVTLADGTVVVKDDIEVNNDTGEI | 1070 |
| | | Y Y+ S + AT K FFYSNIMNFFKT++TLA+G + + IE N +TGEI | |
| Sbjct: | 1013 | YKVYDVRKMIAKSEQEIGKATAKYFFYSNIMNFFKTEITLANGEIRKRPLIETNGETGEI | 1072 |
| Query: | 1071 | VWDKKKHFATVRKVLSYPQNNIVKKTEIQTGGFSKESILAHGNSDKLIPRKTKDIYLDPK | 1130 |
| | | VWDK + FATVRKVLS PQ NIVKKTE+QTGGFSKESIL NSDKLI RK KD DPK | |
| Sbjct: | 1073 | VWDKGRDFATVRKVLSMPQVNIVKKTEVQTGGFSKESILPKRNSDKLIARK-KD--WDPK | 1129 |
| Query: | 1131 | KYGGFDSPIVAYSVLVVADIKKGKAQKLKTVTELLGITIMERSRFEKNPSAFLESKGYLN | 1190 |
| | | KYGGFDSP VAYSVLVVA ++KGK++KLK+V ELLGITIMERS FEKNP FLE+KGY | |
| Sbjct: | 1130 | KYGGFDSPTVAYSVLVVAKVEKGKSKKLKSVKELLGITIMERSSFEKNPIDFLEAKGYKE | 1189 |
| Query: | 1191 | IRADKLIILPKYSLFELENGRRRLLASAGELQKGNELALPTQFMKFLYLASRYNESKGKP | 1250 |
| | | ++ D +I LPKYSLFELENGR+R+LASAGELQKGNELALP++++ FLYLAS Y + KG P | |
| Sbjct: | 1190 | VKKDLIIKLPKYSLFELENGRKRMLASAGELQKGNELALPSKYVNFLYLASHYEKLKGSP | 1249 |
| Query: | 1251 | EEIEKKQEFVNQHVSYFDDILQLINDFSKRVILADANLEKINKLYQDNKENISVDELANN | 1310 |
| | | E+ E+KQ FV QH Y D+I++ I++FSKRVILADANL+K+ Y +++ + E A N | |
| Sbjct: | 1250 | EDNEQKQLFVEQHKHYLDEIIEQISEFSKRVILADANLDKVLSAYNKHRDK-PIREQAEN | 1308 |
| Query: | 1311 | IINLFTFTSLGAPAAFKFFDKIVDRKRYTSTKEVLNSTLIHQSITGLYETRIDLGKLGED | 1370 |
| | | II+LFT T+LGAPAAFK+FD +DRKRYTSTKEVL++TLIHQSITGLYETRIDL +LG D | |
| Sbjct: | 1309 | IIHLFTLTNLGAPAAFKYFDTTIDRKRYTSTKEVLDATLIHQSITGLYETRIDLSQLGGD | 1368 |

[7568] SEQ ID 4210 (GBS317) was expressed in E. coli as a GST-fusion product. SDS-PAGE analysis of total cell extract is shown in FIG. 27 (lane 2; MW 179.3 kDa) and in FIG. 159 (lane 5 & 6; MW 180 kDa).

[7569] It was also expressed in E. coli as a His-fusion product. SDS-PAGE analysis of total cell extract is shown in FIG. 27 (lane 3; MW 154.3 kDa) and in FIG. 159 (lane 9 & 10; MW 154 kDa).

[7570] GBS317-GST was purified as shown in FIG. 224, lane 9-10. GBS317-His was purified as shown in FIG. 222, lane 9.

[7571] GBS317N was expressed in E. coli as a GST-fusion product. SDS-PAGE analysis of total cell extract is shown in FIG. 149 (lane 24; MW 116 kDa).

[7572] GBS317C was expressed in E. coli as a GST-fusion product. SDS-PAGE analysis of total cell extract is shown in FIG. 166 (lane 6-8; MW 92 kDa).

[7573] GBS317dN was expressed in E. coli as a GST-fusion product. SDS-PAGE analysis of total cell extract is shown in FIG. 187 (lane 7; MW 116 kDa). Purified GBS317dN-GST is shown in FIG. 245, lane 8.

[7574] GBS317C was expressed in E. coli as a GST-fusion product. SDS-PAGE analysis of total cell extract is shown in FIG. 188 (lane 13; MW 92 kDa). Purified GBS317dC-GST is shown in FIG. 245, lane 9.

[7575] Based on this analysis, it was predicted that these proteins and their epitopes could be useful antigens for vaccines or diagnostics.

### EXAMPLE 1376

[7576] A DNA sequence (GBSx1461) was identified in S. agalactiae <SEQ ID 4213> which encodes the amino acid sequence <SEQ ID 4214>. Analysis of this protein sequence reveals the following:

| Possible site: 25 | | | | |
|---|---|---|---|---|
| >>> Seems to have a cleavable N-term signal seq. | | | | |
| | INTEGRAL | Likelihood = −11.94 | Transmembrane | 132-148 (123-156) |
| | INTEGRAL | Likelihood = −11.09 | Transmembrane | 190-206 (183-209) |
| | INTEGRAL | Likelihood = −4.94 | Transmembrane | 95-111 (94-115) |

```
----- Final Results -----
                              bacterial membrane --- Certainty = 0.5776(Affirmative) < succ>
                                bacterial outside --- Certainty = 0.0000(Not Clear) < succ>
                            bacterial cytoplasm --- Certainty = 0.0000(Not Clear) < succ>
```

[7577] The protein has no significant homology with any sequences in the GENPEPT database.

[7578] A related sequence was also identified in GAS <SEQ ID 9133> which encodes the amino acid sequence <SEQ ID 9134>. Analysis of this protein sequence reveals the following:

Possible site: 22
>>> Seems to have a cleavable N-term signal seq.

| | | | |
|---|---|---|---|
| INTEGRAL | Likelihood = −7.32 | Transmembrane | 126-142 |
| INTEGRAL | Likelihood = −6.90 | Transmembrane | 178-194 |

```
----- Final Results -----
                              bacterial membrane --- Certainty = 0.3930(Affirmative) < succ>
                                bacterial outside --- Certainty = 0.0000(Not Clear) < succ>
                            bacterial cytoplasm --- Certainty = 0.0000(Not Clear) < succ>
```

[7579] An alignment of the GAS and GBS proteins is shown below.

| Identities = 94/204 (46%), Positives = 139/204 (68%) | | | |
|---|---|---|---|
| Query: | 5 | LMKDKLLVVLTWIWIISLATLATIYIAWLIYPIEIQFLKLEKVVYLKAETIYYNFNKLMI | 64 |
| | | +M + ++ +W+W+++LA L TIY WL YP+E+ LKLE+VV++ + I +N+N L+ | |
| Sbjct: | 4 | VMVENTKLLCSWVWLLALAILITIYSTWLWYPLEVDHLKLEQVVFMSKDAILHNYNGLLN | 63 |
| Query: | 65 | YLTHPFISDLNMPSFPSSEDGLKHFADVKYLFTLAHGLFVILTFPVIYFLRRGWKQKSIF | 124 |
| | | YLT+PF++ L +F SS DGLKHFADVK+LF L +F+ L +P + + K K + | |
| Sbjct: | 64 | YLTNPFVTRLEFANFHSSADGLKHFADVKWLFHLTQVVFLGLLYPTLKTFTQRLKTKRFW | 123 |
| Query: | 125 | LYEGFFKIAIMLPIFIVVCAFLLGFDQFFTLFHEVLFPGDSTWQFNPLTDPVIWILPETF | 184 |
| | | L + +A + P+ I + A +GF+ FFTLFH+VLF GDS+W F+PL D VIWILPE F | |
| Sbjct: | 124 | LLQKPLILAALFPLMIGLMASFIGFEHFFTLFHQVLFVGDSSWLFDPLKDSVIWILPEVF | 183 |
| Query: | 185 | FLHCFIIFLLIYETITIILLIIGR | 208 |
| | | FLHCF+ F+++YE I L+ + R | |
| Sbjct: | 184 | FLHCFLFFMIVYEIILWSLVGLAR | 207 |

[7580] SEQ ID 4214 (GBS167) was expressed in and purified from E. coli. The purified protein is shown in lanes 5 & 6 of FIG. 223.

[7581] Based on this analysis, it was predicted that these proteins and their epitopes could be useful antigens for vaccines or diagnostics.

### EXAMPLE 1377

[7582] A DNA sequence (GBSx1462) was identified in S. agalactiae <SEQ ID 4217> which encodes the amino acid sequence <SEQ ID 4218>. This protein is predicted to be p-nitrophenyl phosphatase (pho2). Analysis of this protein sequence reveals the following:

```
Possible site: 48
>>> Seems to have no N-terminal signal sequence
----- Final Results -----
                            bacterial cytoplasm --- Certainty = 0.3925(Affirmative) < succ>
                              bacterial membrane --- Certainty = 0.0000(Not Clear) < succ>
                                bacterial outside --- Certainty = 0.0000(Not Clear) < succ>
```

[7583] The protein has homology with the following sequences in the GENPEPT database.

| >GP: CAB15219 GB: Z99120 similar to N-acetyl-glucosamine catabolism | | | |
|---|---|---|---|
| [Bacillus subtilis] | | | |
| Identities = 121/249 (48%), Positives = 172/249 (68%) | | | |
| Query: | 3 | YKGYLIDLDGTIYKGKSRIPAGERFIERLQEKGIPYMLVTNNTTRTPESVQEMLRGFNVE | 62 |
| | | YKGYLIDLDGT+Y G +I F+ L+++G+PY+ VTNN++RTP+ V + L F++ | |
| Sbjct: | 4 | YKGYLIDLDGTMYNGTEKIEEACEFVRTLKDRGVPYLFVTNNSSRTPKQVADKLVSFDIP | 63 |
| Query: | 63 | TPLETIYTATMATVDYMNDMNRGKTAYVIGEEGLKKAIADAGYVEDTKNPAYVVVGLDWN | 122 |
| | | E ++T +MAT ++ + + YVIGEEG+++AI + G +N +VVVG+D + | |
| Sbjct: | 64 | ATEEQVFTTSMATAQHIAQQKKDASVYVIGEEGIRQAIEENGLTFGGENADFVVVGIDRS | 123 |
| Query: | 123 | VTYDKLATATLAIQNGALFIGTNPDLNIPTERGLLPGAGSLNALLEAATRIKPVFIGKPN | 182 |
| | | +TY+K A LAI+NGA FI TN D+ IPTERGLLPG GSL ++L +T ++PVFIGKP | |
| Sbjct: | 124 | ITYEKFAVGCLAIRNGARFISTNGDIAIPTERGLLPGNGSLTSVLTVSTGVQPVFIGKPE | 183 |
| Query: | 183 | AIIMNKALEILNIPRNQAVMVGDNYLTDIMAGINNDIDTLLVTTGFTTVEEVPDLPIQPS | 242 |
| | | +IIM +A+ +L ++ +MVGDNY TDIMAGIN +DTLLV TG T E + D +P+ | |
| Sbjct: | 184 | SIIMEQAMRVLGTDVSETLMVGDNYATDIMAGINAGMDTLLVHTGVTKREHMTDDMEKPT | 243 |
| Query: | 243 | YVLASLDEW | 251 |
| | | + + SL EW | |
| Sbjct: | 244 | HAIDSLTEW | 252 |

[7584] A related DNA sequence was identified in S. pyogenes <SEQ ID 4219> which encodes the amino acid sequence <SEQ ID 4220>. Analysis of this protein sequence reveals the following:

| Possible site: 48 | | | | |
|---|---|---|---|---|
| >>> Seems to have no N-terminal signal sequence | | | | |
| | INTEGRAL | Likelihood = −0.53 | Transmembrane | 128-144 (128-144) |

```
----- Final Results -----
                              bacterial membrane --- Certainty = 0.1213(Affirmative) < succ>
                                bacterial outside --- Certainty = 0.0000(Not Clear) < succ>
                            bacterial cytoplasm --- Certainty = 0.0000(Not Clear) < succ>
```

[7585] The protein has homology with the following sequences in the databases:

| >GP: CAB15219 GB: Z99120 similar to N-acetyl-glucosamine catabolism | | | |
|---|---|---|---|
| [Bacillus subtilis] | | | |
| Identities = 121/250 (48%), Positives = 166/250 (66%), Gaps = 1/250 (0%) | | | |
| Query: | 3 | YKGYLIDLDGTIYQGKNRIPAGERFIKRLQERGIPYLLVTNNTTRTPEMVQSMLANQFHV | 62 |
| | | YKGYLIDLDGT+Y G +I F++ L++RG+PYL VTNN++RTP+ V L + F + | |
| Sbjct: | 4 | YKGYLIDLDGTMYNGTEKIEEACEFVRTLKDRGVPYLFVTNNSSRTPKQVADKLVS-FDI | 62 |
| Query: | 63 | ETSIETIYTATMATVDYMNDMNRGKTAYVIGETGLKSAIAAAGYVEELENPAYVVVGLDS | 122 |
| | | + E ++T +MAT ++ + + YVIGE G++ AI G EN +VVVG+D | |
| Sbjct: | 63 | PATEEQVFTTSMATAQHIAQQKKDASVYVIGEEGIRQAIEENGLTFGGENADFVVVGIDR | 122 |
| Query: | 123 | QVTYEMLAIATLAIQKGALFIGTNPDLNIPTERGLMPGAGALNALLEAATRVKPVFIGKP | 182 |
| | | +TYE A+ LAI+ GA FI TN D+ IPTERGL+PG G+L ++L +T V+PVFIGKP | |
| Sbjct: | 123 | SITYEKFAVGCLAIRNGARFISTNGDIAIPTERGLLPGNGSLTSVLTVSTGVQPVFIGKP | 182 |
| Query: | 183 | NAIIMNKSLEVLGIQRSEAVMVGDNYLTDIMAGIQNDIATILVTTGFTRPEEVPTLPIQP | 242 |
| | | +IIM +++ VLG SE +MVGDNY TDIMAGI + T+LV TG T+ E + +P | |
| Sbjct: | 183 | ESIIMEQAMRVLGTDVSETLMVGDNYATDIMAGINAGMDTLLVHTGVTKREHMTDDMEKP | 242 |
| Query: | 243 | DHVLSSLDEW | 252 |
| | | H + SL EW | |
| Sbjct: | 243 | THAIDSLTEW | 252 |

[7586] An alignment of the GAS and GBS proteins is shown below.

| Identities = 207/250 (82%), Positives = 227/250 (90%), Gaps = 1/250 (0%) | | | |
|---|---|---|---|
| Query: | 3 | YKGYLIDLDGTIYKGKSRIPAGERFIERLQEKGIPYMLVTNNTTRTPESVQEMLRG-FNV | 61 |
| | | YKGYLIDLDGTIY+GK+RIPAGERFI+RLQE+GIPY+LVTNNTTRTPE VQ ML F+V | |
| Sbjct: | 3 | YKGYLIDLDGTIYQGKNRIPAGERFIKRLQERGIPYLLVTNNTTRTPEMVQSMLANQFHV | 62 |
| Query: | 62 | ETPLETIYTATMATVDYMNDMNRGKTAYVIGEEGLKKAIADAGYVEDTKNPAYVVVGLDW | 121 |
| | | ET +ETIYTATMATVDYMNDMNRGKTAYVIGE GLK AIA AGYVE+ +NPAYVVVGLD | |
| Sbjct: | 63 | ETSIETIYTATMATVDYMNDMNRGKTAYVIGETGLKSAIAAAGYVEELENPAYVVVGLDS | 122 |
| Query: | 122 | NVTYDKLATATLAIQNGALFIGTNPDLNIPTERGLLPGAGSLNALLEAATRIKPVFIGKP | 181 |
| | | VTY+ LA ATLAIQ GALFIGTNPDLNIPTERGL+PGAG+LNALLEAATR+KPVFIGKP | |
| Sbjct: | 123 | QVTYEMLAIATLAIQKGALFIGTNPDLNIPTERGLMPGAGALNALLEAATRVKPVFIGKP | 182 |
| Query: | 182 | NAIIMNKALEILNIPRNQAVMVGDNYLTDIMAGINNDIDTLLVTTGFTTVEEVPDLPIQP | 241 |
| | | NAIIMNK+LE+L I R++AVMVGDNYLTDIMAGI NDI T+LVTTGFT EEVP LPIQP | |
| Sbjct: | 183 | NAIIMNKSLEVLGIQRSEAVMVGDNYLTDIMAGIQNDIATILVTTGFTRPEEVPTLPIQP | 242 |
| Query: | 242 | SYVLASLDEW | 251 |
| | | +VL+SLDEW | |
| Sbjct: | 243 | DHVLSSLDEW | 252 |

[7587] A similar DNA sequence was identified in S. pyogenes <SEQ ID 4215> which encodes amino acid sequence <SEQ ID 4216>. An alignment of the GAS and GBS sequences follows:

| Identities = 94/204 (46%), Positives = 139/204 (68%) | | | |
|---|---|---|---|
| Query: | 4 | VMVENTKLLCSWVWLLALAILITIYSTWLWYPLEVDHLKLEQVVFMSKDAILHNYNGLLN | 63 |
| | | +M + ++ +W+W+++LA L TIY WL YP+E+ LKLE+VV++ + I +N+N L+ | |
| Sbjct: | 5 | LMKDKLLVVLTWIWIISLATLATIYIAWLIYPIEIQFLKLEKVVYLKAETIYYNFNKLMI | 64 |
| Query: | 64 | YLTNPFVTRLEFANFHSSADGLKHFADVKWLFHLTQVVFLGLLYPTLKTFTQRLKTKRFW | 123 |
| | | YLT+PF++ L +F SS DGLKHFADVK+LF L +F+ L +P + + K K + | |
| Sbjct: | 65 | YLTHPFISDLNMPSFPSSEDGLKHFADVKYLFTLAHGLFVILTFPVIYFLRRGWKQKSIF | 124 |
| Query: | 124 | LLQKPLILAALFPLMIGLMASFIGFEHFFTLFHQVLFVGDSSWLFDPLKDSVIWILPEVF | 183 |
| | | L + +A + P+ I + A +GF+ FFTLFH+VLF GDS+W F+PL D VIWILPE F | |
| Sbjct: | 125 | LYEGFFKIAIMLPIFIVVCAFLLGFDQFFTLFHEVLFPGDSTWQFNPLTDPVIWILPETF | 184 |
| Query: | 184 | FLHCFLFFMIVYEIILWSLVGLAR | 207 |
| | | FLHCF+ F+++YE I L+ + R | |
| Sbjct: | 185 | FLHCFIIFLLIYETITIILLIIGR | 208 |

[7588] Based on this analysis, it was predicted that these proteins and their epitopes could be useful antigens for vaccines or diagnostics.

### EXAMPLE 1378

[7589] A DNA sequence (GBSx1463) was identified in S. agalactiae <SEQ ID 4221> which encodes the amino acid sequence <SEQ ID 4222>. This protein is predicted to be oleoyl-acyl carrier protein thioesterase. Analysis of this protein sequence reveals the following:

```
Possible site: 39
>>> Seems to have no N-terminal signal sequence
----- Final Results -----
                            bacterial cytoplasm --- Certainty = 0.3332(Affirmative) < succ>
                              bacterial membrane --- Certainty = 0.0000(Not Clear) < succ>
                                bacterial outside --- Certainty = 0.0000(Not Clear) < succ>
```

[7590] The protein has homology with the following sequences in the GENPEPT database.

| >GP: BAB02069 GB: AB026647 acyl carrier protein thioesterase | | | |
|---|---|---|---|
| [Arabidopsis thaliana] | | | |
| Identities = 59/248 (23%), Positives = 104/248 (41%), Gaps = 30/248 (12%) | | | |
| Query: | 2 | GLLYRETYEVPFYESDTNHYMKLPQLLALALQISAKQSLKLGIGDD-----IVFKRYGLV | 56 |
| | | GL Y+E + V YE +N + + L ++ + +G D ++ L+ | |
| Sbjct: | 81 | GLSYKEKFVVRSYEVGSNKTATVETIANLLQEVGCNHAQSVGFSTDGFATTTTMRKLHLI | 140 |
| Query: | 57 | WVVTDYIIDIERLPKHAEKIVIETEAKAHNKLLCYRYFYIYGE-DGQKIITISSAFVLMD | 115 |
| | | WV I+I + P + + IET ++ ++ R + + G+ +S +V+M+ | |
| Sbjct: | 141 | WVTARMHIEIYKYPAWGDVVEIETWCQSEGRIGTRRDWILKDSVTGEVTGRATSKWVMMN | 200 |
| Query: | 116 | FKTRKIHPVLDDITSIY---------------QSQRIKKVIRGPKYHPIGDSKVKQYHVR | 160 |
| | | TR++ V DD+ Y ++ +KK+ PK + R | |
| Sbjct: | 201 | QDTRRLQKVSDDVRDEYLVFCPQEPRLAFPEENNRSLKKI---PKLEDPAQYSMIGLKPR | 257 |
| Query: | 161 | YFDLDMNGHVNNSKYLEWMYDVLDLDFLSSHIPKKIDLKYIKEIQYGTDIKSHWYQDGLV | 220 |
| | | DLDMN HVNN Y+ W+ + + + + +H + I L Y +E Q + D L | |
| Sbjct: | 258 | RADLDMNQHVNNVTYIGWVLESIPQEIVDTHELQVITLDYRRECQQDDVV------DSLT | 311 |
| Query: | 221 | TRHDIIGG | 228 |
| | | T IGG | |
| Sbjct: | 312 | TTTSEIGG | 319 |

[7591] A related DNA sequence was identified in S. pyogenes <SEQ ID 4223> which encodes the amino acid sequence <SEQ ID 4224>. Analysis of this protein sequence reveals the following:

| Possible site: 54 | | | | |
|---|---|---|---|---|
| >>> Seems to have no N-terminal signal sequence | | | | |
| | INTEGRAL | Likelihood = −3.88 | Transmembrane | 21-37 (21-38) |

```
----- Final Results -----
                              bacterial membrane --- Certainty = 0.2550(Affirmative) < succ>
                                bacterial outside --- Certainty = 0.0000(Not Clear) < succ>
                            bacterial cytoplasm --- Certainty = 0.0000(Not Clear) < succ>
```

[7592] The protein has homology with the following sequences in the databases:

| >GP: AAB71730 GB: U65643 acyl-ACP thioesterase [Myristica fragrans] | | | |
|---|---|---|---|
| Identities = 41/128 (32%), Positives = 67/128 (52%), Gaps = 11/128 (8%) | | | |
| Query: | 33 | FIFMIKRGGLLVDILAYFALLNPDTRKVATIPEDLVAPFETDFVKKLHRV-----PKMPL | 87 |
| | | F+ K G +L + + ++N TR+++ IPE++ E FV+ H V K+P | |
| Sbjct: | 147 | FLRDCKTGEILTRATSVWVMMNKRTRRLSKIPEEVRVEIEPYFVE--HGVLDEDSRKLPK | 204 |
| Query: | 88 | LEQS----IDRDYYVRYFDIDMNGHVNNSKYLDWMYDVLGCEFLKTHQPLKMTLKYVKEV | 143 |
| | | L + I R R+ D+D+N HVNN KY+ W+ + + L++H+ MTL+Y KE | |
| Sbjct: | 205 | LNDNTANYIRRGLAPRWSDLDVNQHVNNVKYIGWILESVPSSLLESHELYGMTLEYRKEC | 264 |
| Query: | 144 | SPGGQITS | 151 |
| | | G + S | |
| Sbjct: | 265 | GKDGLLQS | 272 |

[7593] An alignment of the GAS and GBS proteins is shown below.

| Identities = 62/144 (43%), Positives = 94/144 (65%) | | | |
|---|---|---|---|
| Query: | 101 | GQKIITISSAFVLMDFKTRKIHPVLDDITSIYQSQRIKKVIRGPKYHPIGDSKVKQYHVR | 160 |
| | | G ++ I + F L++ TRK+ + +D+ + +++ +KK+ R PK + S + Y+VR | |
| Sbjct: | 40 | GGLLVDILAYFALLNPDTRKVATIPEDLVAPFETDFVKKLHRVPKMPLLEQSIDRDYYVR | 99 |
| Query: | 161 | YFDLDMNGHVNNSKYLEWMYDVLDLDFLSSHIPKKIDLKYIKEIQYGTDIKSHWYQDGLV | 220 |
| | | YFD+DMNGHVNNSKYL+WMYDVL +FL +H P K+ LKY+KE+ G I S ++ D L | |
| Sbjct: | 100 | YFDIDMNGHVNNSKYLDWMYDVLGCEFLKTHQPLKMTLKYVKEVSPGGQITSSYHLDQLT | 159 |
| Query: | 221 | TRHDIIGGDAIHAQARIEWQEKKE | 244 |
| | | + H I ++AQA IEW+ K+ | |
| Sbjct: | 160 | SYHQITSDGQLNAQAMIEWRAIKQ | 183 |

[7594] Based on this analysis, it was predicted that these proteins and their epitopes could be useful antigens for vaccines or diagnostics.

### EXAMPLE 1379

[7595] A DNA sequence (GBSx1464) was identified in S. agalactiae <SEQ ID 4225> which encodes the amino acid sequence <SEQ ID 4226>. This protein is predicted to be coproporphyrinogen III oxidase. Analysis of this protein sequence reveals the following:

```
Possible site: 40
>>> Seems to have no N-terminal signal sequence
----- Final Results -----
                            bacterial cytoplasm --- Certainty = 0.1484(Affirmative) < succ>
                              bacterial membrane --- Certainty = 0.0000(Not Clear) < succ>
                                bacterial outside --- Certainty = 0.0000(Not Clear) < succ>
```

[7596] The protein has homology with the following sequences in the GENPEPT database.

| >GP: BAB05062 GB: AP001511 coproporphyrinogen III oxidase | | | |
|---|---|---|---|
| [Bacillus halodurans] | | | |
| Identities = 173/375 (46%), Positives = 248/375 (66%), Gaps = 5/375 (1%) | | | |
| Query: | 5 | PTSAYVHIPFCTQICYYCDFSKVFIKNQPVDAYLQALIREFR----SYDITELRTLYIGG | 60 |
| | | P +AY+HIPFC ICYYCDF+K ++KNQPV+ YLQAL E L+TLY+GG | |
| Sbjct: | 2 | PKAAYIHIPFCEHICYYCDFNKFYLKNQPVNEYLQALETEMAMVVAEQPTKSLQTLYVGG | 61 |
| Query: | 61 | GTPTSISAVQLDYLLTELSRDLNLNTLEEFTIEANPGDLTVDKIEVLQKSAVNRVSLGVQ | 120 |
| | | GTPT+++A QL LL + R L L+ LEEFT E NP + +K++VL+ V+R+S+GVQ | |
| Sbjct: | 62 | GTPTALTADQLAQLLASIKRTLPLSDLEEFTFEVNPDSIDEEKLDVLRSYGVDRLSIGVQ | 121 |
| Query: | 121 | TFNDKHLKRIGRSHNEAQIYSTIDALKTAGFQNISIDLIYALPGQTMDDVRSNVAKALSL | 180 |
| | | F LK IGR+H++ + ++ + AGF N+S+DL+ LP QT + + +A +L | |
| Sbjct: | 122 | AFQPLLLKEIGRTHDQKSVEQAVEKSRQAGFANLSLDLMLGLPKQTPEMFAETLKEAFAL | 181 |
| Query: | 181 | NIPHLSLYSLILEHHTVFMNKMRRGKLHLPTEDLEAEMFEYIISEMERNGFEHYEISNFT | 240 |
| | | + HLS YSL +E TVF N+ R+G+L LP ED E +M+ + E E++GF+ YEISNF | |
| Sbjct: | 182 | EVEHLSCYSLKVEAKTVFYNRQRQGRLTLPPEDDEVKMYRQLCYETEKHGFKQYEISNFA | 241 |
| Query: | 241 | KPGFESRHNLMYWDNVEYYGVGAGASGYLDGIRYRNRGPIQHYLKGVSEGNARLSE-EVL | 299 |
| | | K G+ESRHNL+YW+N EYYG GAGA GY+ G+RY N GP+ YL+ + EG + E + | |
| Sbjct: | 242 | KKGYESRHNLVYWNNDEYYGFGAGAHGYVGGVRYMNHGPLPKYLQAMEEGRRPVFESHHV | 301 |
| Query: | 300 | SKNEMMEEELFLGLRKKEGVSIGKFEQKFGTSFEKRYGQIVQELQSDGLLKENNGFIQMT | 359 |
| | | S+ E MEE++FLGLRK+ GV F ++FG S Y + + +L + LL+ + +++T | |
| Sbjct: | 302 | SRVEQMEEQMFLGLRKRSGVEERVFVERFGVSMFSLYEKQIAQLVARCLLERTDDRVRLT | 361 |
| Query: | 360 | KKGLFLGDTVAEKFI | 374 |
| | | +GL LG+ V E+F+ | |
| Sbjct: | 362 | DEGLLLGNEVFEQFL | 376 |

[7597] A related DNA sequence was identified in S. pyogenes <SEQ ID 4227> which encodes the amino acid sequence <SEQ ID 4228>. Analysis of this protein sequence reveals the following:

```
Possible site: 34
>>> Seems to have no N-terminal signal sequence
----- Final Results -----
                            bacterial cytoplasm --- Certainty = 0.3202(Affirmative) < succ>
                              bacterial membrane --- Certainty = 0.0000(Not Clear) < succ>
                                bacterial outside --- Certainty = 0.0000(Not Clear) < succ>
```

[7598] An alignment of the GAS and GBS proteins is shown below.

| Identities = 304/376 (80%), Positives = 343/376 (90%) | | | |
|---|---|---|---|
| Query: | 1 | MLKKPTSAYVHIPFCTQICYYCDFSKVFIKNQPVDAYLQALIREFRSYDITELRTLYIGG | 60 |
| | | M KKPTSAYVHIPFCTQICYYCDFSKVFI+NQPVDAYL+ALI+EF SY I +L+TLYIGG | |
| Sbjct: | 33 | MSKKPTSAYVHIPFCTQICYYCDFSKVFIQNQPVDAYLKALIQEFDSYGIRDLKTLYIGG | 92 |
| Query: | 61 | GTPTSISAVQLDYLLTELSRDLNLNTLEEFTIEANPGDLTVDKIEVLQKSAVNRVSLGVQ | 120 |
| | | GTPT+I+A QL+YLL L R+LNL+ LEEFTIEANPGDLT +KI VLQ+SAVNR+SLGVQ | |
| Sbjct: | 93 | GTPTAITAKQLEYLLNHLERNLNLDDLEEFTIEANPGDLTPEKIAVLQRSAVNRISLGVQ | 152 |
| Query: | 121 | TFNDKHLKRIGRSHNEAQIYSTIDALKTAGFQNISIDLIYALPGQTMDDVRSNVAKALSL | 180 |
| | | TFN+K LK+IGRSHNE QIYSTI LKTAGF NISIDLIYALPGQT+D V+ NVAKAL+L | |
| Sbjct: | 153 | TFNNKQLKQIGRSHNEEQIYSTIANLKTAGFHNISIDLIYALPGQTLDQVKENVAKALAL | 212 |
| Query: | 181 | NIPHLSLYSLILEHHTVFMNKMRRGKLHLPTEDLEAEMFEYIISEMERNGFEHYEISNFT | 240 |
| | | +IPHLSLYSLILEHHTVFMNKMRRGKL+LPTEDLEAEMFEYIISEME NGFEHYEISNFT | |
| Sbjct: | 213 | DIPHLSLYSLILEHHTVFMNKMRRGKLNLPTEDLEAEMFEYIISEMEANGFEHYEISNFT | 272 |
| Query: | 241 | KPGFESRHNLMYWDNVEYYGVGAGASGYLDGIRYRNRGPIQHYLKGVSEGNARLSEEVLS | 300 |
| | | KPGFESRHNLMYWDNVEY+G GAGASGYL+GIRY+NR PIQHYLK V GNARL+EEVL | |
| Sbjct: | 273 | KPGFESRHNLMYWDNVEYFGCGAGASGYLNGIRYQNRVPIQHYLKAVEAGNARLNEEVLR | 332 |
| Query: | 301 | KNEMMEEELFLGLRKKEGVSIGKFEQKFGTSFEKRYGQIVQELQSDGLLKENNGFIQMTK | 360 |
| | | K EMMEEELFLGLRKK GVSI +F++KFG SFE+RYG IV+ELQ+ GLL +++ F++MTK | |
| Sbjct: | 333 | KEEMMEEELFLGLRKKTGVSIQRFQEKFGMSFEERYGNIVRELQNQGLLVKDDAFVRMTK | 392 |
| Query: | 361 | KGLFLGDTVAEKFIVE | 376 |
| | | KGLFLGD+VAE+FI++ | |
| Sbjct: | 393 | KGLFLGDSVAERFILD | 408 |

[7599] Based on this analysis, it was predicted that these proteins and their epitopes could be useful antigens for vaccines or diagnostics.

### EXAMPLE 1380

[7600] A DNA sequence (GBSx1465) was identified in S. agalactiae <SEQ ID 4229> which encodes the amino acid sequence <SEQ ID 4230>. Analysis of this protein sequence reveals the following:

```
Possible site: 52
>>> Seems to have no N-terminal signal sequence
----- Final Results -----
                            bacterial cytoplasm --- Certainty = 0.3729(Affirmative) < succ>
                              bacterial membrane --- Certainty = 0.0000(Not Clear) < succ>
                                bacterial outside --- Certainty = 0.0000(Not Clear) < succ>
```

[7601] The protein has no significant homology with any sequences in the GENPEPT database.

[7602] No corresponding DNA sequence was identified in S. pyogenes.

[7603] Based on this analysis, it was predicted that this protein and its epitopes, could be useful antigens for vaccines or diagnostics.

### EXAMPLE 1381

[7604] A DNA sequence (GBSx1466) was identified in S. agalactiae <SEQ ID 4231> which encodes the amino acid sequence <SEQ ID 4232>. Analysis of this protein sequence reveals the following:

```
Possible site: 61
>>> Seems to have no N-terminal signal sequence
----- Final Results -----
                            bacterial cytoplasm --- Certainty = 0.2989(Affirmative) < succ>
                              bacterial membrane --- Certainty = 0.0000(Not Clear) < succ>
                                bacterial outside --- Certainty = 0.0000(Not Clear) < succ>
```

[7605] The protein has no significant homology with any sequences in the GENPEPT database.

[7606] A related DNA sequence was identified in S. pyogenes <SEQ ID 4233> which encodes the amino acid sequence <SEQ ID 4234>. Analysis of this protein sequence reveals the following:

```
Possible site: 57
>>> Seems to have no N-terminal signal sequence
----- Final Results -----
                            bacterial cytoplasm --- Certainty = 0.2993(Affirmative) < succ>
                              bacterial membrane --- Certainty = 0.0000(Not Clear) < succ>
                                bacterial outside --- Certainty = 0.0000(Not Clear) < succ>
```

[7607] An alignment of the GAS and GBS proteins is shown below.

| Identities = 36/109 (33%), Positives = 58/109 (53%), Gaps = 6/109 (5%) | | | |
|---|---|---|---|
| Query: | 9 | WAKHKYLVLSKSQKIYLDIRQTLKSPNCT---VLDVQSLIDQAVLLEESPSQVTNAYMHI | 65 |
| | | WA KY V++ SQ+ Y +R+ K + VL LI++A + + + AY H+ | |
| Sbjct: | 13 | WAYQKYWVMAHSQQHYNALRELFKGNQWSEEKVLTFHCLIEEAQAIPPTVKSLRTAYQHV | 72 |
| Query: | 66 | WGYFKNKAERQEKEEFLTLLEKYRKTGYQRRKLLAFLKQLLAKYPNSYL | 114 |
| | | WGYFK A ++EK+ F L + + ++L FL+++ A Y SYL | |
| Sbjct: | 73 | WGYFKKVASQEEKDHFKDLDAQLET---KSEEMLCFLQEMTAHYQPSYL | 118 |

[7608] Based on this analysis, it was predicted that these proteins and their epitopes could be useful antigens for vaccines or diagnostics.

### EXAMPLE 1382

[7609] A DNA sequence (GBSx1467) was identified in S. agalactiae <SEQ ID 4235> which encodes the amino acid sequence <SEQ ID 4236>. This protein is predicted to be mrsA (mrsA). Analysis of this protein sequence reveals the following:

| Possible site: 35 | | | | |
|---|---|---|---|---|
| >>> Seems to have no N-terminal signal sequence | | | | |
| | INTEGRAL | Likelihood = −0.96 | Transmembrane | 56-72 (56-72) |

```
----- Final Results -----
                              bacterial membrane --- Certainty = 0.1383(Affirmative) < succ>
                                bacterial outside --- Certainty = 0.0000(Not Clear) < succ>
                            bacterial cytoplasm --- Certainty = 0.0000(Not Clear) < succ>
```

[7610] The protein has homology with the following sequences in the GENPEPT database.

| >GP: CAB11970 GB: Z99105 similar to phosphoglucomutase (glycolysis) | | | |
|---|---|---|---|
| [Bacillus subtilis] | | | |
| Identities = 284/451 (62%), Positives = 353/451 (77%), Gaps = 4/451 (0%) | | | |
| Query: | 1 | MGKYFGTDGVRGEANVELTPELAFKLGRFGGYVLSQHETDRPRVFVARDTRISGEMLESA | 60 |
| | | MGKYFGTDGVRG AN ELTPELAFK+GRFGGYVL++ + RP+V + RDTRISG MLE A | |
| Sbjct: | 1 | MGKYFGTDGVRGVANSELTPELAFKVGRFGGYVLTK-DKQRPKVLIGRDTRISGHMLEGA | 59 |
| Query: | 61 | LIAGLLSVGIEVYKLGVLATPGVSYLVRTEKASAGVMISASHNPALDNGIKFFGSDGFKL | 120 |
| | | L+AGLLS+G EV +LGV++TPGVSYL + A AGVMISASHNP DNGIKFFG DGFKL | |
| Sbjct: | 60 | LVAGLLSIGAEVMRLGVISTPGVSYLTKAMDAEAGVMISASHNPVQDNGIKFFGGDGFKL | 119 |
| Query: | 121 | DDDRELEIEALLDAKEDTLPRPSAQGLGTLVDYPEGLRKYEKFMESTGI-DLEGMKVALD | 179 |
| | | D++E EIE L+D ED LPRP LG + DY EG +KY +F++ T D G+ VALD | |
| Sbjct: | 120 | SDEQEAEIERLMDEPEDKLPRPVGADLGLVNDYFEGGQKYLQFLKQTADEDFTGIHVALD | 179 |
| Query: | 180 | TANGAATASARNIFLDLNADISVIGDQPDGLNINDGVGSTHPEQLQSLVRENGSDIGLAF | 239 |
| | | ANGA ++ A ++F DL+AD+S +G P+GLNINDGVGSTHPE L + V+E +D+GLAF | |
| Sbjct: | 180 | CANGATSSLATHLFADLDADVSTMGTSPNGLNINDGVGSTHPEALSAFVKEKNADLGLAF | 239 |
| Query: | 240 | DGDSDRLIAVDENGEIVDGDKIMFIIGKYLSDKGQLAQNTIVTTVMSNLGFHKALDREGI | 299 |
| | | DGD DRLIAVDE G IVDGD+IM+I K+L +G+L +T+V+TVMSNLGF+KAL++EGI | |
| Sbjct: | 240 | DGDGDRLIAVDEKGNIVDGDQIMYICSKHLKSEGRLKDDTVVSTVMSNLGFYKALEKEGI | 299 |
| Query: | 300 | HKAITAVGDRYVVEEMRKSGYNLGGEQSGHVIIMDYNTTGDGQLTAIQLTKVMKETGKKL | 359 |
| | | TAVGDRYVVE M+K GYN+GGEQSGH+I +DYNTTGDG L+AI L +K TGK L | |
| Sbjct: | 300 | KSVQTAVGDRYVVEAMKKDGYNVGGEQSGHLIFLDYNTTGDGLLSAIMLMNTLKATGKPL | 359 |
| Query: | 360 | SELASEVTIYPQKLVNIRVENNMKDKAMEVPAIAEIIAKMEEEMDGNGRILVRPSGTEPL | 419 |
| | | SELA+E+ +PQ LVN+RV + K K E + +I+++E+EM+G+GRILVRPSGTEPL | |
| Sbjct: | 360 | SELAAEMQKFPQLLVNVRVTD--KYKVEENEKVKAVISEVEKEMNGDGRILVRPSGTEPL | 417 |
| Query: | 420 | LRVMAEAPTNEAVDYYVDTIADVVRTEIGLD | 450 |
| | | +RVMAEA T E D YV+ I +VVR+E+GL+ | |
| Sbjct: | 418 | VRVMAEAKTKELCDEYVNRIVEVVRSEMGLE | 448 |

[7611] A related DNA sequence was identified in S. pyogenes <SEQ ID 4237> which encodes the amino acid sequence <SEQ ID 4238>. Analysis of this protein sequence reveals the following:

| Possible site: 35 | | | | |
|---|---|---|---|---|
| >>> Seems to have no N-terminal signal sequence | | | | |
| | INTEGRAL | Likelihood = −0.96 | Transmembrane | 56-72 (56-72) |

```
----- Final Results -----
                              bacterial membrane --- Certainty = 0.1383(Affirmative) < succ>
                                bacterial outside --- Certainty = 0.0000(Not Clear) < succ>
                            bacterial cytoplasm --- Certainty = 0.0000(Not Clear) < succ>
```

[7612] The protein has homology with the following sequences in the databases:

| >GP: CAB11970 GB: Z99105 similar to phosphoglucomutase (glycolysis) | | | |
|---|---|---|---|
| [Bacillus subtilis] | | | |
| Identities = 287/451 (63%), Positives = 346/451 (76%), Gaps = 4/451 (0%) | | | |
| Query: | 1 | MGKYFGTDGVRGEANVELTPELAFKLGRFGGYVLSQHETERPKVFVARDTRISGEMLESA | 60 |
| | | MGKYFGTDGVRG AN ELTPELAFK+GRFGGYVL++ + +RPKV + RDTRISG MLE A | |
| Sbjct: | 1 | MGKYFGTDGVRGVANSELTPELAFKVGRFGGYVLTK-DKQRPKVLIGRDTRISGHMLEGA | 59 |
| Query: | 61 | LIAGLLSVGIEVYKLGVLATPGVSYLVRTEKASAGVMISASHNPALDNGIKFFGNDGFKL | 120 |
| | | L+AGLLS+G EV +LGV++TPGVSYL + A AGVMISASHNP DNGIKFFG DGFKL | |
| Sbjct: | 60 | LVAGLLSIGAEVMRLGVISTPGVSYLTKAMDAEAGVMISASHNPVQDNGIKFFGGDGFKL | 119 |
| Query: | 121 | ADDQELEIEALLDAPEDTLPRPSAEGLGTLVDYPEGLRKYEKFLVTTGT-DLSGMTVALD | 179 |
| | | +D+QE EIE L+D PED LPRP LG + DY EG +KY +FL T D +G+ VALD | |
| Sbjct: | 120 | SDEQEAEIERLMDEPEDKLPRPVGADLGLVNDYFEGGQKYLQFLKQTADEDFTGIHVALD | 179 |
| Query: | 180 | TANGAASVSARDVFLDLNAEIAVIGEKPNGLNINDGVGSTRPEQLQELVKETGADLGLAF | 239 |
| | | ANGA S A +F DL+A+++ +G PNGLNINDGVGST PE L VKE ADLGLAF | |
| Sbjct: | 180 | CANGATSSLATHLFADLDADVSTMGTSPNGLNINDGVGSTHPEALSAFVKEKNADLGLAF | 239 |
| Query: | 240 | DGDSDRLIAVDETGEIVDGDRIMFIIGKYLSEKGLLAHNTIVTTVMSNLGFHKALDKQGI | 299 |
| | | DGD DRLIAVDE G IVDGD+IM+I K+L +G L +T+V+TVMSNLGF+KAL+K+GI | |
| Sbjct: | 240 | DGDGDRLIAVDEKGNIVDGDQIMYICSKHLKSEGRLKDDTVVSTVMSNLGFYKALEKEGI | 299 |
| Query: | 300 | NKAITAVGDRYVVEEMRSSGYNLGGEQSGHVIIMDYNTTGDGQLTAIQLAKVMKETGKSL | 359 |
| | | TAVGDRYVVE M+ GYN+GGEQSGH+I +DYNTTGDG L+AI L +K TGK L | |
| Sbjct: | 300 | KSVQTAVGDRYVVEAMKKDGYNVGGEQSGHLIFLDYNTTGDGLLSAIMLMNTLKATGKPL | 359 |
| Query: | 360 | SELAAEVTIYPQKLVNIRVENSMKERAMEVPAIANIIAKMEDEMAGNGRILVRPSGTEPL | 419 |
| | | SELAAE+ +PQ LVN+RV + K + E + +I+++E EM G+GRILVRPSGTEPL | |
| Sbjct: | 360 | SELAAEMQKFPQLLVNVRVTD--KYKVEENEKVKAVISEVEKEMNGDGRILVRPSGTEPL | 417 |
| Query: | 420 | LRVMAEAPTDAEVDYYVDTIADVVRTEIGCD | 450 |
| | | +RVMAEA T D YV+ I +VVR+E+G + | |
| Sbjct: | 418 | VRVMAEAKTKELCDEYVNRIVEVVRSEMGLE | 448 |

[7613] An alignment of the GAS and GBS proteins is shown below.

| Identities = 400/450 (88%), Positives = 429/450 (94%) | | | |
|---|---|---|---|
| Query: | 1 | MGKYFGTDGVRGEANVELTPELAFKLGRFGGYVLSQHETDRPRVFVARDTRISGEMLESA | 60 |
| | | MGKYFGTDGVRGEANVELTPELAFKLGRFGGYVLSQHET+RP+VFVARDTRISGEMLESA | |
| Sbjct: | 1 | MGKYFGTDGVRGEANVELTPELAFKLGRFGGYVLSQHETERPKVFVARDTRISGEMLESA | 60 |
| Query: | 61 | LIAGLLSVGIEVYKLGVLATPGVSYLVRTEKASAGVMISASHNPALDNGIKFFGSDGFKL | 120 |
| | | LIAGLLSVGIEVYKLGVLATPGVSYLVRTEKASAGVMISASHNPALDNGIKFFG+DGFKL | |
| Sbjct: | 61 | LIAGLLSVGIEVYKLGVLATPGVSYLVRTEKASAGVMISASHNPALDNGIKFFGNDGFKL | 120 |
| Query: | 121 | DDDRELEIEALLDAKEDTLPRPSAQGLGTLVDYPEGLRKYEKFMESTGIDLEGMKVALDT | 180 |
| | | DD+ELEIEALLDA EDTLPRPSA+GLGTLVDYPEGLRKYEKF+ +TG DL GM VALDT | |
| Sbjct: | 121 | ADDQELEIEALLDAPEDTLPRPSAEGLGTLVDYPEGLRKYEKFLVTTGTDLSGMTVALDT | 180 |
| Query: | 181 | ANGAATASARNIFLDLNADISVIGDQPDGLNINDGVGSTHPEQLQSLVRENGSDIGLAFD | 240 |
| | | ANGAA+ SAR++FLDLNA+I+VIG++P+GLNINDGVGST PEQLQ LV+E G+D+GLAFD | |
| Sbjct: | 181 | ANGAASVSARDVFLDLNAEIAVIGEKPNGLNINDGVGSTRPEQLQELVKETGADLGLAFD | 240 |
| Query: | 241 | GDSDRLIAVDENGEIVDGDKIMFIIGKYLSDKGQLAQNTIVTTVMSNLGFHKALDREGIH | 300 |
| | | GDSDRLIAVDE GEIVDGD+IMFIIGKYLS+KG LA NTIVTTVMSNLGFHKALD++GI+ | |
| Sbjct: | 241 | GDSDRLIAVDETGEIVDGDRIMFIIGKYLSEKGLLAHNTIVTTVMSNLGFHKALDKQGIN | 300 |
| Query: | 301 | KAITAVGDRYVVEEMRKSGYNLGGEQSGHVIIMDYNTTGDGQLTAIQLTKVMKETGKKLS | 360 |
| | | KAITAVGDRYVVEEMR SGYNLGGEQSGHVIIMDYNTTGDGQLTAIQL KVMKETGK LS | |
| Sbjct: | 301 | KAITAVGDRYVVEEMRSSGYNLGGEQSGHVIIMDYNTTGDGQLTAIQLAKVMKETGKSLS | 360 |
| Query: | 361 | ELASEVTIYPQKLVNIRVENNMKDKAMEVPAIAEIIAKMEEMDGNGRILVRPSGTEPLL | 420 |
| | | ELA+EVTIYPQKLVNIRVEN+MK++AMEVPAIA IIAKME+EM GNGRILVRPSGTEPLL | |
| Sbjct: | 361 | ELAAEVTIYPQKLVNIRVENSMKERAMEVPAIANIIAKMEDEMAGNGRILVRPSGTEPLL | 420 |
| Query: | 421 | RVMAEAPTNEAVDYYVDTIADVVRTEIGLD | 450 |
| | | RVMAEAPT+ VDYYVDTIADVVRTEIG D | |
| Sbjct: | 421 | RVMAEAPTDAEVDYYVDTIADVVRTEIGCD | 450 |

[7614] SEQ ID 4236 (GBS402) was expressed in E. coli as a GST-fusion product. SDS-PAGE analysis of total cell extract is shown in FIG. 84 (lane 5; MW 78 kDa).

[7615] GBS402-GST was purified as shown in FIG. 218, lane 3-5.

[7616] Based on this analysis, it was predicted that these proteins and their epitopes could be useful antigens for vaccines or diagnostics.

### EXAMPLE 1383

[7617] A DNA sequence (GBSx1468) was identified in S. agalactiae <SEQ ID 4239> which encodes the amino acid sequence <SEQ ID 4240>. Analysis of this protein sequence reveals the following:

```
Possible site: 28
>>> Seems to have a cleavable N-term signal seq.
----- Final Results -----
                                bacterial outside --- Certainty = 0.3000(Affirmative) < succ>
                              bacterial membrane --- Certainty = 0.0000(Not Clear) < succ>
                            bacterial cytoplasm --- Certainty = 0.0000(Not Clear) < succ>
```

[7618] The protein has homology with the following sequences in the GENPEPT database.

| >GP: CAB11969 GB: Z99105 ybbR [Bacillus subtilis] | | | |
|---|---|---|---|
| Identities = 90/324 (27%), Positives = 167/324 (50%), Gaps = 18/324 (5%) | | | |
| Query: | 1 | MKKFFTNKFWLGVVSLFLAILLFLTATATSMNHQDNSKIAG-----ASETYTHTLTDVPI | 55 |
| | | M KF N++ + +++L A+LL++ A + N K G S T TLTD+P+ | |
| Sbjct: | 1 | MDKFLNNRWAVKIIALLFALLLYV---AVNSNQAPTPKKPGESFFPTSTTDEATLTDIPV | 57 |
| Query: | 56 | DIKYDSDDYFISGYSYGADVYMS-SVNRVKLDSEINEDTRKFKVVADLTNMKPGTHKVPL | 114 |
| | | YD ++Y ++G +V + S + VK + T+ F++ AD+ ++K GTHKV L | |
| Sbjct: | 58 | KAYYDDENYVVTGVPQTVNVTIKGSTSAVKKARQ----TKNFEIYADMEHLKTGTHKVEL | 113 |
| Query: | 115 | KVVNLPSGVNATVSPTTITVTMGKKKTKEFPV-YGHVNDKQIKAGYAVDKMSVDVSKVKV | 173 |
| | | K N+ G+ +++P+ TVT+ ++ TK FPV + N ++K GY+ ++ V V++ | |
| Sbjct: | 114 | KAKNVSDGLTISINPSVTTVTIQERTTKSFPVEVEYYNKSKMKKGYSPEQPIVSPKNVQI | 173 |
| Query: | 174 | TSDESIIDRIDHVAANIPDDKVLDDDFNKTVTLQAVTADGTVLASIIHPSKATLSVKVKK | 233 |
| | | T +++ID I A++ + D+ K + DG L + PS ++V V | |
| Sbjct: | 174 | TGSKNVIDNISLHKASVNLENA-DETIEKEAKVTVYDKDGNALPVDVEPSVIKITVPVTS | 232 |
| Query: | 234 | LTKTVPINLIPVGQFSDSISKINYKLSQEKAVISGTKEALEAISVIN-AEVDISDVTKNT | 292 |
| | | +K VP + G D +S N +S + + G+++ L+++ I+ +D+S + K++ | |
| Sbjct: | 233 | PSKKVPFKIERTGSLPDGVSIANIESSPSEVTVYGSQDVLDSLEFIDGVSLDLSKINKDS | 292 |
| Query: | 293 | --EKKINLSANNVSVDPAQVTVQL | 314 |
| | | E I L + P++VT+ + | |
| Sbjct: | 293 | DIEADIPLPDGVKKISPSKVTLHI | 316 |

[7619] A related DNA sequence was identified in S. pyogenes <SEQ ID 4241> which encodes the amino acid sequence <SEQ ID 4242>. Analysis of this protein sequence reveals the following:

```
Possible site: 29
>>> Seems to have a cleavable N-term signal seq.
----- Final Results -----
                                bacterial outside --- Certainty = 0.3000(Affirmative) < succ>
                              bacterial membrane --- Certainty = 0.0000(Not Clear) < succ>
                            bacterial cytoplasm --- Certainty = 0.0000(Not Clear) < succ>
```

[7620] The protein has homology with the following sequences in the databases:

| >GP: CAB11969 GB: Z99105 ybbR [Bacillus subtilis] | | | |
|---|---|---|---|
| Identities = 81/322 (25%), Positives = 154/322 (47%), Gaps = 15/322 (4%) | | | |
| Query: | 1 | MKRFLNSRPWLGMVSVFFAILLFLTAASSNH----NNSSSQIYSPIETYTHSLKDVPIDM | 56 |
| | | M +FLN+R + ++++ FA+LL++ A +SN + T +L D+P+ | |
| Sbjct: | 1 | MDKFLNNRWAVKIIALLFALLLYV-AVNSNQAPTPKKPGESFFPTSTTDEATLTDIPVKA | 59 |
| Query: | 57 | KYDSDKYFISGYSYGAEVYLT-STNRIKLDSEVNNDTRNFKIVADLTHSHPGTVSVNLRV | 115 |
| | | YD + Y ++G V + ST+ +K + T+NF+I AD+ H GT V L+ | |
| Sbjct: | 60 | YYDDENYVVTGVPQTVNVTIKGSTSAVKKARQ----TKNFEIYADMEHLKTGTHKVELKA | 115 |
| Query: | 116 | ENLPSGVTATVSPDKISVTIGKKESKVFPVRGS-VDAKQIANGYEISKIETGVNKVEVTS | 174 |
| | | +N+ G+T +++P +VTI ++ +K FPV + ++ GY + V++T | |
| Sbjct: | 116 | KNVSDGLTISINPSVTTVTIQERTTKSFPVEVEYYNKSKMKKGYSPEQPIVSPKNVQITG | 175 |
| Query: | 175 | DESTIALIDHVVAKLPDDQVLDRNYSSRVTLQAVSADGTILASAIDPAKTNLSVAVKKIT | 234 |
| | | ++ I I A + + D + DG L ++P+ ++V V + | |
| Sbjct: | 176 | SKNVIDNISLHKASVNLENA-DETIEKEAKVTVYDKDGNALPVDVEPSVIKITVPVTSPS | 234 |
| Query: | 235 | KSVPIRVEAVGMMDDSLSDIQYKLSKQTAVISGSREVLEDIDEII-AEVNISDVTKNT-- | 291 |
| | | K VP ++E G + D +S + S + GS++VL+ ++ I +++S + K++ | |
| Sbjct: | 235 | KKVPFKIERTGSLPDGVSIANIESSPSEVTVYGSQDVLDSLEFIDGVSLDLSKINKDSDI | 294 |
| Query: | 292 | SKTVSLSSSQVSIEPSVVTVQL | 313 |
| | | + L I PS VT+ + | |
| Sbjct: | 295 | EADIPLPDGVKKISPSKVTLHI | 316 |

[7621] An alignment of the GAS and GBS proteins is shown below.

| Identities = 198/319 (62%), Positives = 251/319 (78%), Gaps = 1/319 (0%) | | | |
|---|---|---|---|
| Query: | 1 | MKKFFTNKFWLGVVSLFLAILLFLTATATSMNHQDNSKIAGASETYTHTLTDVPIDIKYD | 60 |
| | | MK+F ++ WLG+VS+F AILLFLTA A+S ++ +S+I ETYTH+L DVPID+KYD | |
| Sbjct: | 1 | MKRFLNSRPWLGMVSVFFAILLFLTA-ASSNHNNSSSQIYSPIETYTHSLKDVPIDMKYD | 59 |
| Query: | 61 | SDDYFISGYSYGADVYMSSVNRVKLDSEINEDTRKFKVVADLTNMKPGTHKVPLKVVNLP | 120 |
| | | SD YFISGYSYGA+VY++S NR+KLDSE+N DTR FK+VADLT+ PGT V L+V NLP | |
| Sbjct: | 60 | SDKYFISGYSYGAEVYLTSTNRIKLDSEVNNDTRNFKIVADLTHSHPGTVSVNLRVENLP | 119 |
| Query: | 121 | SGVNATVSPTTITVTMGKKKTKEFPVYGHVNDKQIKAGYAVDKMSVDVSKVKVTSDESII | 180 |
| | | SGV ATVSP I+VT+GKK++K FPV G V+ KQI GY + K+ V+KV+VTSDES I | |
| Sbjct: | 120 | SGVTATVSPDKISVTIGKKESKVFPVRGSVDAKQIANGYEISKIETGVNKVEVTSDESTI | 179 |
| Query: | 181 | DRIDHVAANIPDDKVLDDDFNKTVTLQAVTADGTVLASIIHPSKATLSVKVKKLTKTVPI | 240 |
| | | IDHV A +PDD+VLD +++ VTLQAV+ADGT+LAS I P+K LSV VKK+TK+VPI | |
| Sbjct: | 180 | ALIDHVVAKLPDDQVLDRNYSSRVTLQAVSADGTILASAIDPAKTNLSVAVKKITKSVPI | 239 |
| Query: | 241 | NLIPVGQFSDSISKINYKLSQEKAVISGTKEALEAISVINAEVDISDVTKNTEKKINLSA | 300 |
| | | + VG DS+S I YKLS++ AVISG++E LE I I AEV+ISDVTKNT K ++LS+ | |
| Sbjct: | 240 | RVEAVGMMDDSLSDIQYKLSKQTAVISGSREVLEDIDEIIAEVNISDVTKNTSKTVSLSS | 299 |
| Query: | 301 | NNVSVDPAQVTVQLTTTKK | 319 |
| | | + VS++P+ VTVQLTTTKK | |
| Sbjct: | 300 | SQVSIEPSVVTVQLTTTKK | 318 |

[7622] SEQ ID 4240 (GBS99) was expressed in E. coli as a His-fusion product. SDS-PAGE analysis of total cell extract is shown in FIG. 17 (lane 6; MW 35.7 kDa). It was also expressed in E. coli as a GST-fusion product. SDS-PAGE analysis of total cell extract is shown in FIG. 21 (lane 9; MW 60.7 kDa).

[7623] The GBS99-GST fusion product was purified (FIG. 197, lane 9) and used to immunise mice. The resulting antiserum was used for FACS (FIG. 293), which confirmed that the protein is immunoaccessible on GBS bacteria.

[7624] Based on this analysis, it was predicted that these proteins and their epitopes could be useful antigens for vaccines or diagnostics.

### EXAMPLE 1384

[7625] A DNA sequence (GBSx1469) was identified in S. agalactiae <SEQ ID 4243> which encodes the amino acid sequence <SEQ ID 4244>. Analysis of this protein sequence reveals the following:

```
Possible site: 16
>>> Seems to have no N-terminal signal sequence
----- Final Results -----
                            bacterial cytoplasm --- Certainty = 0.0503(Affirmative) < succ>
                              bacterial membrane --- Certainty = 0.0000(Not Clear) < succ>
                                bacterial outside --- Certainty = 0.0000(Not Clear) < succ>
```

[7626] The protein has no significant homology with any sequences in the GENPEPT database.

[7627] No corresponding DNA sequence was identified in S. pyogenes.

[7628] Based on this analysis, it was predicted that this protein and its epitopes, could be useful antigens for vaccines or diagnostics.

### EXAMPLE 1385

[7629] A DNA sequence (GBSx1470) was identified in S. agalactiae <SEQ ID 4245> which encodes the amino acid sequence <SEQ ID 4246>. Analysis of this protein sequence reveals the following:

| Possible site: 15 | | | | |
|---|---|---|---|---|
| >>> Seems to have no N-terminal signal sequence | | | | |
| | INTEGRAL | Likelihood = −9.50 | Transmembrane | 20-36 (18-46) |
| | INTEGRAL | Likelihood = −7.64 | Transmembrane | 48-64 (42-68) |
| | INTEGRAL | Likelihood = −3.40 | Transmembrane | 80-96 (80-96) |

```
----- Final Results -----
                              bacterial membrane --- Certainty = 0.4800(Affirmative) < succ>
                                bacterial outside --- Certainty = 0.0000(Not Clear) < succ>
                            bacterial cytoplasm --- Certainty = 0.0000(Not Clear) < succ>
```

[7630] The protein has homology with the following sequences in the GENPEPT database.

| >GP: CAB11968 GB: Z99105 alternate gene name: ybbQ~similar to | | | |
|---|---|---|---|
| hypothetical proteins [Bacillus subtilis] | | | |
| Identities = 125/253 (49%), Positives = 186/253 (73%), Gaps = 5/253 (1%) | | | |
| Query: | 27 | MDIIIVAVLIYKFIKALAGTKIMSLIQGVILFIIIRFVSEWIGLTTITFLMNQIVTYGVI | 86 |
| | | +DI++V +IYK I + GTK + L++G+++ +++R S+++GL+T+ +LM+Q +T+G + | |
| Sbjct: | 16 | VDILLVWYVIYKLIMVIRGTKAVQLLKGIVVIVLVRMASQYLGLSTLQWLMDQAITWGFL | 75 |
| Query: | 87 | AGVVIFAPEIRTGLEKFGRTPQLFTQRSQLSSDE---KLVDALVKAVAYMSPRKIGALIS | 143 |
| | | A ++IF PE+R LE+ GR F RS +E K ++A+ KA+ YM+ R+IGAL++ | |
| Sbjct: | 76 | AIIIIFQPELRRALEQLGRGR--FFSRSGTPVEEAQQKTIEAITKAINYMAKRRIGALLT | 133 |
| Query: | 144 | IERTQTLQEYIATGIPLDADISSELLINIFIPNTPLHDGAVIVKDKKIATACSYLPLSES | 203 |
| | | IER + +YI TGIPL+A +SSELLINIFIPNTPLHDGAVI+K+ +IA A YLPLSES | |
| Sbjct: | 134 | IERDTGMGDYIETGIPLNAKVSSELLINIFIPNTPLHDGAVIMKNNEIAAAACYLPLSES | 193 |
| Query: | 204 | SSISKEFGTRHRAAIGLSENSDALTVIVSEETGGISVALKGEFLHDLSKDSFEAILRTQL | 263 |
| | | ISKE GTRHRAA+G+SE +D+LT+IVSEETGG+SVA G+ +L++++ + +L + | |
| Sbjct: | 194 | PFISKELGTRHRAAVGISEVTDSLTIIVSEETGGVSVAKNGDLHRELTEEALKEMLEAEF | 253 |
| Query: | 264 | IQNQEENSKLAWY | 276 |
| | | +N + S WY | |
| Sbjct: | 254 | KKNTRDTSSNRWY | 266 |

[7631] A related DNA sequence was identified in S. pyogenes <SEQ ID 4247> which encodes the amino acid sequence <SEQ ID 4248>. Analysis of this protein sequence reveals the following:

| Possible site: 23 | | | | |
|---|---|---|---|---|
| >>> Seems to have no N-terminal signal sequence | | | | |
| | INTEGRAL | Likelihood = −6.64 | Transmembrane | 20-36 (19-40) |
| | INTEGRAL | Likelihood = −6.21 | Transmembrane | 48-64 (47-68) |
| | INTEGRAL | Likelihood = −2.07 | Transmembrane | 76-92 (76-92) |

```
----- Final Results -----
                              bacterial membrane --- Certainty = 0.3654(Affirmative) < succ>
                                bacterial outside --- Certainty = 0.0000(Not Clear) < succ>
                            bacterial cytoplasm --- Certainty = 0.0000(Not Clear) < succ>
```

[7632] The protein has homology with the following sequences in the databases:

| >GP: BAB03984 GB: AP001507 unknown conserved protein [Bacillus halodurans] | | | |
|---|---|---|---|
| Identities = 117/255 (45%), Positives = 178/255 (68%), Gaps = 6/255 (2%) | | | |
| Query: | 19 | PWL-LAVHLLDILIVAYLIYRFIKALTGTKIMSLVQGVIFFLVLRFIAEWIGFTTITYLM | 77 |
| | | PWL +LDIL+V Y+IY+ I + GT+ + L++G+ L++ I+ + T+ +++ | |
| Sbjct: | 8 | PWLNYLTQILDILVVTYVIYKAIMIIRGTRAVQLLKGITVILIVYAISIFFNLRTLGWIV | 67 |
| Query: | 78 | NQVITYGVIAGVVIFTPEIRAGLEKFGRSTQVFLQKQYVSSESAL---VDALIKSVAYMG | 134 |
| | | NQ ITYG++A ++IF PE+R LE+ GR F + + E + +DA++K+ YMG | |
| Sbjct: | 68 | NQAITYGLLAVIIIFQPELRRALEQLGRGR--FFASRTANEEETMKKTIDAIVKASTYMG | 125 |
| Query: | 135 | PRKIGALIAIEQTQTLQEYIATGIPLNADISSQLLINIFIPNTPLHDGAVIVGQNKIVAA | 194 |
| | | R+IGALI++E+ + +Y+ TGIP+NA+++S+LLIN FIPNTPLHDGAVI+ + I+AA | |
| Sbjct: | 126 | KRRIGALISMERETGMTDYVETGIPMNANLTSELLINTFIPNTPLHDGAVIINNDTILAA | 185 |
| Query: | 195 | CAYLPLSESKAISKEFGTRHRAAIGLSENSDALTIIVSEETGAISVTRKGQFLHDLSTDE | 254 |
| | | YLPLSE+ ISKE GTRHRAA+G+SE +D LTI+VSEETG IS+T+ G+ DL ++ | |
| Sbjct: | 186 | ACYLPLSENPFISKELGTRHRAALGVSEVTDCLTIVVSEETGHISLTKNGELHRDLDEEQ | 245 |
| Query: | 255 | FETVLRTYLMSNSNV | 269 |
| | | ++L L+S + + | |
| Sbjct: | 246 | LRSLLEAELISEAKM | 260 |

[7633] An alignment of the GAS and GBS proteins is shown below.

| Identities = 201/283 (71%), Positives = 239/283 (84%), Gaps = 2/283 (0%) | | | |
|---|---|---|---|
| Query: | 1 | MDIFSAIDSKFWASIMENPWMILIHLMDIIIVAVLIYKFIKALAGTKIMSLIQGVILFII | 60 |
| | | M+ S+ID KF S+ +PW++ +HL+DI+IVA LIY+FIKAL GTKIMSL+QGVI F++ | |
| Sbjct: | 1 | MNNLSSIDIKFLLSLFADPWLLAVHLLDILIVAYLIYRFIKALTGTKIMSLVQGVIFFLV | 60 |
| Query: | 61 | IRFVSEWIGLTTITFLMNQIVTYGVIAGVVIFAPEIRTGLEKFGRTPQLFTQRSQLSSDE | 120 |
| | | +RF++EWIG TTIT+LMNQ++TYGVIAGVVIF PEIR GLEKFGR+ Q+F Q+ +SS+ | |
| Sbjct: | 61 | LRFIAEWIGFTTITYLMNQVITYGVIAGVVIFTPEIRAGLEKFGRSTQVFLQKQYVSSES | 120 |
| Query: | 121 | KLVDALVKAVAYMSPRKIGALISIERTQTLQEYIATGIPLDADISSELLINIFIPNTPLH | 180 |
| | | LVDAL+K+VAYM PRKIGALI+IE+TQTLQEYIATGIPL+ADISS+LLINIFIPNTPLH | |
| Sbjct: | 121 | ALVDALIKSVAYMGPRKIGALIAIEQTQTLQEYIATGIPLNADISSQLLINIFIPNTPLH | 180 |
| Query: | 181 | DGAVIVKDKKIATACSYLPLSESSSISKEFGTRHRAAIGLSENSDALTVIVSEETGGISV | 240 |
| | | DGAVIV KI AC+YLPLSES +ISKEFGTRHRAAIGLSENSDALT+IVSEETG ISV | |
| Sbjct: | 181 | DGAVIVGQNKIVAACAYLPLSESKAISKEFGTRHRAAIGLSENSDALTIIVSEETGAISV | 240 |
| Query: | 241 | ALKGEFLHDLSKDSFEAILRTQLIQNQEENSKLAWYNQLLRRK | 283 |
| | | KG+FLHDLS D FE +LRT L+ N N L WY ++L K | |
| Sbjct: | 241 | TRKGQFLHDLSTDEFETVLRTYLMSN--SNVTLPWYKKILGGK | 281 |

[7634] Based on this analysis, it was predicted that these proteins and their epitopes could be useful antigens for vaccines or diagnostics.

### EXAMPLE 1386

[7635] A DNA sequence (GBSx1471) was identified in S. agalactiae <SEQ ID 4249> which encodes the amino acid sequence <SEQ ID 4250>. Analysis of this protein sequence reveals the following:

| Possible site: 25 | | | | |
|---|---|---|---|---|
| >>> Seems to have no N-terminal signal sequence | | | | |
| | INTEGRAL | Likelihood = −2.60 | Transmembrane | 33-49 (33-49) |

```
----- Final Results -----
                              bacterial membrane --- Certainty = 0.2041(Affirmative) < succ>
                                bacterial outside --- Certainty = 0.0000(Not Clear) < succ>
                            bacterial cytoplasm --- Certainty = 0.0000(Not Clear) < succ>
```

[7636] The protein has no significant homology with any sequences in the GENPEPT database.

[7637] No corresponding DNA sequence was identified in S. pyogenes.

[7638] Based on this analysis, it was predicted that this protein and its epitopes, could be useful antigens for vaccines or diagnostics.

### EXAMPLE 1387

[7639] A DNA sequence (GBSx1472) was identified in S. agalactiae <SEQ ID 4251> which encodes the amino acid sequence <SEQ ID 4252>. Analysis of this protein sequence reveals the following:

```
Possible site: 15
>>> Seems to have no N-terminal signal sequence
----- Final Results -----
                            bacterial cytoplasm --- Certainty = 0.1001(Affirmative) < succ>
                              bacterial membrane --- Certainty = 0.0000(Not Clear) < succ>
                                bacterial outside --- Certainty = 0.0000(Not Clear) < succ>
```

[7640] A related GBS nucleic acid sequence <SEQ ID 9781> which encodes amino acid sequence <SEQ ID 9782> was also identified.

[7641] The protein has homology with the following sequences in the GENPEPT database.

| >GP: AAC84012 GB: AF080002 UDP-N-acetylmuramyl tripeptide synthetase | | | |
|---|---|---|---|
| MurC [Heliobacillus mobilis] | | | |
| Identities = 143/442 (32%), Positives = 229/442 (51%), Gaps = 17/442 (3%) | | | |
| Query: | 12 | GKSAHYLLSKMGRGST-YPGSLALKFDKDILDTIAKDYE--IVVVTGTNGKTLTTALTVG | 68 |
| | | GK+A +L + G G T +PG + + IL +A+ + +VVTGTNGKT T+ + | |
| Sbjct: | 2 | GKTAIWLNRRFGHGGTSFPGGIGRRVAPQILTALARQLKRGAMVVTGTNGKTTTSKMLAA | 61 |
| Query: | 69 | ILKEAFGQVVTNPSGANMITGIVSTFLTAKKSKSG--KKIAVLEIDEASLPRITQYIKPS | 126 |
| | | I++++ + N +GAN++ GI + F+ + + ++E+DEA++P++ + ++P | |
| Sbjct: | 62 | IVEKSSLTLTHNRAGANLVGGITTAFIDSATIGGSITSDLGIIEVDEATIPQLVREVQPK | 121 |
| Query: | 127 | LFVFTNIFRDQMDRYGEIYTTYQMILDGAANAP-QATILANGDSPLFNS--KSVTNPVQF | 183 |
| | | V TN FRDQ+DR+GE+ T ++ + P Q+ + N D PL S K V + | |
| Sbjct: | 122 | GVVVTNFFRDQLDRFGELDKTVSLVGEALRLLPVQSIAVLNADDPLVASLGKDFPGRVLY | 181 |
| Query: | 184 | YGFNTDKHEPRLAHYNTEGILCPKCQAILTYRLNTYANLGDYTCPNCDFERPNLDYALTR | 243 |
| | | +G + + R + E C C LTY + LG Y C +C FERP +T | |
| Sbjct: | 182 | FGIDDRSYGAREMLQSAETRFCRLCGHPLTYDWFFFGQLGHYRCSHCGFERPEPKIKVTG | 241 |
| Query: | 244 | LTHLTNTSSGFVIDGQ----QYNINVGGLYNIYNALAAVSVAEYFGVEPSQIKDGFDKSR | 299 |
| | | + S F ++ Q ++ G YNIYNALAA++ A + I+ G R | |
| Sbjct: | 242 | IQLKGEEGSAFTVETPRGTWQLELSTPGFYNIYNALAAIASAIRLDLPEKAIRAGLQGYR | 301 |
| Query: | 300 | AVFGRQETFTIGN-KKCTLVLIKNPVGASQALDMIKLAPYPFSLSVLLNANYADGIDTSW | 358 |
| | | FGR E + + ++ L LIKNP G + + + P L V++N N ADG D SW | |
| Sbjct: | 302 | TNFGRMERIELEDGRRAFLALIKNPTGCDEVIRTLVQNRGPKRLLVIINDNAADGRDISW | 361 |
| Query: | 359 | IWDANFETI--LTMNIPEIFAGGVRHSEIARRLRVTGYDEKRIK-QADKLQDIMTMIEQQ | 415 |
| | | +WDA+FE++ + + +F G+R ++A RL TG + I+ +A+ I + +E | |
| Sbjct: | 362 | LWDADFESLEPVYPELRSVFTSGLRGEDMALRLNYTGIPAESIRYEANVESAIRSALEMT | 421 |
| Query: | 416 | ET-EHAYILATYTAMLEFREIL | 436 |
| | | E E YIL TYTA+LE + L | |
| Sbjct: | 422 | EPGETLYILPTYTALLESKAAL | 443 |

[7642] A related DNA sequence was identified in S. pyogenes <SEQ ID 4253> which encodes the amino acid sequence <SEQ ID 4254>. Analysis of this protein sequence reveals the following:

```
Possible site: 35
>>> Seems to have an uncleavable N-term signal seq
----- Final Results -----
                              bacterial membrane --- Certainty = 0.0000(Not Clear) < succ>
                                bacterial outside --- Certainty = 0.0000(Not Clear) < succ>
                            bacterial cytoplasm --- Certainty = 0.0000(Not Clear) < succ>
```

[7643] An alignment of the GAS and GBS proteins is shown below.

| Identities = 343/446 (76%), Positives = 393/446 (87%) | | | |
|---|---|---|---|
| Query: | 1 | MKINTALGVAAGKSAHYLLSKMGRGSTYPGSLALKFDKDILDTIAKDYEIVVVTGTNGKT | 60 |
| | | MK+ T LG+ AGK+A +L+K+GRGSTYPG LAL DKDIL ++KDY+IVVVTGTNGKT | |
| Sbjct: | 1 | MKMKTLLGIIAGKAAQSILTKLGRGSTYPGRLALACDKDILKDLSKDYDIVVVTGTNGKT | 60 |
| Query: | 61 | LTTALTVGILKEAFGQVVTNPSGANMITGIVSTFLTAKKSKSGKKIAVLEIDEASLPRIT | 120 |
| | | LTTALTVGILKEAFG+++TNPSGANMITGI STFL AKK KS ++IAVLEIDEASLPRIT | |
| Sbjct: | 61 | LTTALTVGILKEAFGEIITNPSGANMITGITSTFLAAKKGKSERQIAVLEIDEASLPRIT | 120 |
| Query: | 121 | QYIKPSLFVFTNIFRDQMDRYGEIYTTYQMILDGAANAPQATILANGDSPLFNSKSVTNP | 180 |
| | | Y+KPSLFV+TNIFRDQMDRYGEIYTTYQMI+DGA NAP+ATILANGDSP+F+SK + NP | |
| Sbjct: | 121 | TYLKPSLFVYTNIFRDQMDRYGEIYTTYQMIVDGARNAPKATILANGDSPIFSSKDIVNP | 180 |
| Query: | 181 | VQFYGFNTDKHEPRLAHYNTEGILCPKCQAILTYRLNTYANLGDYTCPNCDFERPNLDYA | 240 |
| | | VQ+YGF+T KH P+LAHYNTEGILCPKC+ IL YRLNTYANLGD+ C NC F+RP LDY | |
| Sbjct: | 181 | VQYYGFDTAKHAPQLAHYNTEGILCPKCEHILQYRLNTYANLGDFVCLNCQFQRPTLDYQ | 240 |
| Query: | 241 | LTRLTHLTNTSSGFVIDGQQYNINVGGLYNIYNALAAVSVAEYFGVEPSQIKDGFDKSRA | 300 |
| | | LT LT +T+ SS FVIDGQ Y INVGGLYNIYNALAAVSVAE+FGV P +IK GF+KS+A | |
| Sbjct: | 241 | LTELTAITHQSSEFVIDGQNYKINVGGLYNIYNALAAVSVAEFFGVSPEKIKAGFNKSKA | 300 |
| Query: | 301 | VFGRQETFTIGNKKCTLVLIKNPVGASQALDMIKLAPYPFSLSVLLNANYADGIDTSWIW | 360 |
| | | VFGRQETFT+G+K CTL+LIKNPVGASQAL+MI+LA YPFSLSVLLNANYADGIDTSWIW | |
| Sbjct: | 301 | VFGRQETFTVGDKSCTLILIKNPVGASQALEMIQLADYPFSLSVLLNANYADGIDTSWIW | 360 |
| Query: | 361 | DANFETILTMNIPEIFAGGVRHSEIARRLRVTGYDEKRIKQADKLQDIMTMIEQQETEHA | 420 |
| | | DANFE I M I EI AGGVRHSEIARRLRVTG+D+ +IKQA+KL+ I+ IE+QE +HA | |
| Sbjct: | 361 | DANFELITQMPITEINAGGVRHSEIARRLRVTGFDDTKIKQAEKLEQIIETIEKQEAKHA | 420 |
| Query: | 421 | YILATYTAMLEFREILANHNAIRKEM | 446 |
| | | YILATYTAMLEFR +LA+ + + KEM | |
| Sbjct: | 421 | YILATYTAMLEFRSLLADRHVVEKEM | 446 |

[7644] Based on this analysis, it was predicted that these proteins and their epitopes could be useful antigens for vaccines or diagnostics.

### EXAMPLE 1388

[7645] A DNA sequence (GBSx1473) was identified in S. agalactiae <SEQ ID 4255> which encodes the amino acid sequence <SEQ ID 4256>. Analysis of this protein sequence reveals the following:

```
Possible site: 32
>>> Seems to have no N-terminal signal sequence
----- Final Results -----
                            bacterial cytoplasm --- Certainty = 0.3010(Affirmative) < succ>
                              bacterial membrane --- Certainty = 0.0000(Not Clear) < succ>
                                bacterial outside --- Certainty = 0.0000(Not Clear) < succ>
```

[7646] The protein has homology with the following sequences in the GENPEPT database.

| >GP: AAC84011 GB: AF080002 cobyric acid synthase CobQ [Heliobacillus | | | |
|---|---|---|---|
| mobilis] | | | |
| Identities = 89/250 (35%), Positives = 129/250 (51%), Gaps = 9/250 (3%) | | | |
| Query: | 11 | TKDYKYTLNVAHLYGNLLNTYGDNGNILMMKYVGEKLGCQMTFDIVSLEDRFDPNYYQMA | 70 |
| | | +K TL + HLY +LLN YGD GNI+ ++ E G + SL ++ + + | |
| Sbjct: | 2 | SKTSNRTLTLIHLYPDLLNLYGDRGNIITLRRRCEWRGITLQVHSASLGEKAAFDDADLV | 61 |
| Query: | 71 | FFGGGQDYEQAIVARDLPSKKEDINKFIQNNGV-VLAICGGFQLLGQYYIQANGERIEGI | 129 |
| | | F GGG D EQ ++ +D K G+ +L++CGG+QLLG YY GE + G+ | |
| Sbjct: | 62 | FMGGGSDREQTLLFQDFQQHKGPALVEAAEGGLPLLSVCGGYQLLGLYYRTHTGEEMPGL | 121 |
| Query: | 130 | GVMGHYTLNQNNNRYIGDIKIHNDEFNE--TYYGFENHQGRTFLSEDE--KPLGTVIYGN | 185 |
| | | G+ +T + R IG++ E T GFENH GRTFL +PL V G | |
| Sbjct: | 122 | GLFDAWT-EAGSTRLIGNVVAQAPLLGEQATLVGFENHSGRTFLGSRGGIQPLAQVTAGF | 180 |
| Query: | 186 | GNNKEDGTEGVHYKNVFGSYFHGPILSRNANLAYRLVATALRNKYG---KEIVLPSYEEI | 242 |
| | | GNN +D EG YKN G+Y HGP+L +N LA L++ AL +YG + ++E | |
| Sbjct: | 181 | GNNGDDQGEGAVYKNAVGTYLHGPVLPKNPALADWLLSKALERRYGGGSLSTLQDTWENR | 240 |
| Query: | 243 | LSLEIPEEYG | 252 |
| | | L + + +G | |
| Sbjct: | 241 | AHLSVAQRFG | 250 |

[7647] A related DNA sequence was identified in S. pyogenes <SEQ ID 4257> which encodes the amino acid sequence <SEQ ID 4258>. Analysis of this protein sequence reveals the following:

```
Possible site: 32
>>> Seems to have no N-terminal signal sequence
----- Final Results -----
                            bacterial cytoplasm --- Certainty = 0.2586(Affirmative) < succ>
                              bacterial membrane --- Certainty = 0.0000(Not Clear) < succ>
                                bacterial outside --- Certainty = 0.0000(Not Clear) < succ>
```

[7648] An alignment of the GAS and GBS proteins is shown below.

| Identities = 197/260 (75%), Positives = 224/260 (85%) | | | |
|---|---|---|---|
| Query: | 1 | MTYTSLKSPTTKDYKYTLNVAHLYGNLLNTYGDNGNILMMKYVGEKLGCQMTFDIVSLED | 60 |
| | | MTYTSLKSP +DY Y L +AHLYGNL+NTYGDNGNILM+KYV EKLG ++T DIVS+ D | |
| Sbjct: | 1 | MTYTSLKSPENQDYIYDLTIAHLYGNLMNTYGDNGNILMLKYVAEKLGARVTVDIVSIND | 60 |
| Query: | 61 | RFDPNYYQMAFFGGGQDYEQAIVARDLPSKKEDINKFIQNNGVVLAICGGFQLLGQYYIQ | 120 |
| | | F+ + Y + FFGGGQDYEQ+IVA+DLPSKK + +I NN VVLAICGGFQLLGQYY+Q | |
| Sbjct: | 61 | TFEQDDYDIVFFGGGQDYEQSIVAKDLPSKKAALADYIANNKVVLAICGGFQLLGQYYVQ | 120 |
| Query: | 121 | ANGERIEGIGVMGHYTLNQNNNRYIGDIKIHNDEFNETYYGFENHQGRTFLSEDEKPLGT | 180 |
| | | ANG +I+G+G+MGHYTLNQ+ NR+IGDIKIHNDEFNETYYGFENHQGRTFLS DEKPLG | |
| Sbjct: | 121 | ANGVKIDGLGIMGHYTLNQHQNRFIGDIKIHNDEFNETYYGFENHQGRTFLSGDEKPLGR | 180 |
| Query: | 181 | VIYGNGNNKEDGTEGVHYKNVFGSYFHGPILSRNANLAYRLVATALRNKYGKEIVLPSYE | 240 |
| | | V+YGNGNNKED TEGVHYKNV+GSYFHGPILSRN NLAYRLV TAL+ KYG I LPSY+ | |
| Sbjct: | 181 | VVYGNGNNKEDQTEGVHYKNVYGSYFHGPILSRNVNLAYRLVTTALKKKYGSAISLPSYD | 240 |
| Query: | 241 | EILSLEIPEEYGDVKSKADF | 260 |
| | | +IL EI EEY D+KSKA F | |
| Sbjct: | 241 | DILKQEITEEYADLKSKASF | 260 |

[7649] Based on this analysis, it was predicted that these proteins and their epitopes could be useful antigens for vaccines or diagnostics.

### EXAMPLE 1389

[7650] A DNA sequence (GBSx1474) was identified in S. agalactiae <SEQ ID 4259> which encodes the amino acid sequence <SEQ ID 4260>. Analysis of this protein sequence reveals the following:

```
Possible site: 21
>>> Seems to have no N-terminal signal sequence
----- Final Results -----
                            bacterial cytoplasm --- Certainty = 0.1701(Affirmative) < succ>
                              bacterial membrane --- Certainty = 0.0000(Not Clear) < succ>
                                bacterial outside --- Certainty = 0.0000(Not Clear) < succ>
```

[7651] The protein has homology with the following sequences in the GENPEPT database.

| >GP: BAB04402 GB: AP001509 lipoate-protein ligase [Bacillus halodurans] | | | |
|---|---|---|---|
| Identities = 153/316 (48%), Positives = 212/316 (66%), Gaps = 3/316 (0%) | | | |
| Query: | 10 | DPAYNVALEAYAFQKLTDIDEIFIL-WINEPAIIIGRHQNTIQEINKEFIDKNGIHVVRR | 68 |
| | | DP N+A+E YA + L DI+E ++L +INEP+IIIGR+QNTI+EIN E+++ NGIHVVRR | |
| Sbjct: | 11 | DPRINLAIEEYALKNL-DINETYLLFYINEPSIIIGRNQNTIEEINTEYVESNGIHVVRR | 69 |
| Query: | 69 | LSGGGAVYHDLNNLNYTIISNNTQEGAFDFQTFSKPVIDTLAKLGVKAEFTGRNDL-EIN | 127 |
| | | LSGGGAVYHD NLN++ I+ + E +FQ F+ PVI LAKLGV AE GRND+ + | |
| Sbjct: | 70 | LSGGGAVYHDHGNLNFSFITKDDGESFSNFQKFTDPVIKALAKLGVTAELKGRNDIIASD | 129 |
| Query: | 128 | GQKFAGNAQAYYKGRMMHHGCLLFDVDMSVLGQALKVSKDKIESKGIKSVRARVTNIVDH | 187 |
| | | G+K +GNAQ KGRM HG LLFD ++ + AL VSKDKIESKGIKS+R+RV NI + | |
| Sbjct: | 130 | GRKISGNAQFSTKGRMFSHGTLLFDSEIDHVVSALNVSKDKIESKGIKSIRSRVANISEF | 189 |
| Query: | 188 | LSDKITVQEFSDAILAQMKEEYPEMDEYVLSDAELSEIQAMRDNQFATWDWTYGKAPEYT | 247 |
| | | L++KI++ +F +L + + + EY L+ + +EI + ++ WDW YGK+P + | |
| Sbjct: | 190 | LTEKISIDQFRSLLLESIFDGQANIQEYKLTADDWAEIHELSKERYQNWDWNYGKSPAFN | 249 |
| Query: | 248 | IERGVRYPAGKITTYANVENSTIKSVKIFGDFFGVKPVDDIEKMLEGVRYDYKDVLAALK | 307 |
| | | ++ R+P G I V+ TI+ KIFGDFFG V D+E L G+RY+ D+ AL | |
| Sbjct: | 250 | LQHSHRFPVGNIDIRLEVKGGTIQQCKIFGDFFGTGDVRDLEDRLVGIRYERADIEQALA | 309 |
| Query: | 308 | TVDTSQYFSRMTPEEI | 323 |
| | | VD YF ++ ++I | |
| Sbjct: | 310 | DVDVKTYFGQVEKDDI | 325 |

[7652] A related DNA sequence was identified in S. pyogenes <SEQ ID 4261> which encodes the amino acid sequence <SEQ ID 4262>. Analysis of this protein sequence reveals the following:

```
Possible site: 23
>>> Seems to have no N-terminal signal sequence
----- Final Results -----
                            bacterial cytoplasm --- Certainty = 0.1271(Affirmative) < succ>
                              bacterial membrane --- Certainty = 0.0000(Not Clear) < succ>
                                bacterial outside --- Certainty = 0.0000(Not Clear) < succ>
```

[7653] An alignment of the GAS and GBS proteins is shown below.

| Identities = 249/328 (75%), Positives = 292/328 (88%) | | | |
|---|---|---|---|
| Query: | 1 | MKYIVNTSNDPAYNVALEAYAFQKLTDIDEIFILWINEPAIIIGRHQNTIQEINKEFIDK | 60 |
| | | MKYIVN S++PA+N+ALEAYAF++L + DE+FILWINEPAIIIG+HQNTIQEINKE+ID+ | |
| Sbjct: | 1 | MKYIVNKSHNPAFNIALEAYAFRELVEEDELFILWINEPAIIIGKHQNTIQEINKEYIDE | 60 |
| Query: | 61 | NGIHVVRRLSGGGAVYHDLNNLNYTIISNNTQEGAFDFQTFSKPVIDTLAKLGVKAEFTG | 120 |
| | | +GIHVVRRLSGGGAVYHDLNNLNYTIISN T EGAFDF+TFS+PVI TLA LGV A FTG | |
| Sbjct: | 61 | HGIHVVRRLSGGGAVYHDLNNLNYTIISNKTAEGAFDFKTFSQPVIATLADLGVTANFTG | 120 |
| Query: | 121 | RNDLEINGQKFAGNAQAYYKGRMMHHGCLLFDVDMSVLGQALKVSKDKIESKGIKSVRAR | 180 |
| | | RND+EI+G+K GNAQAYYKGRMMHHGCLLFDVDM+VLG ALKVSKDKIESKG+KSVRAR | |
| Sbjct: | 121 | RNDIEIDGKKICGNAQAYYKGRMMHHGCLLFDVDMTVLGDALKVSKDKIESKGVKSVRAR | 180 |
| Query: | 181 | VTNIVDHLSDKITVQEFSDAILAQMKEEYPEMDEYVLSDAELSEIQAMRDNQFATWDWTY | 240 |
| | | VTNI++ L +KITV+EFSD ILA+MKE YP+M EYVLS+ EL++I+ QF +WDWTY | |
| Sbjct: | 181 | VTNILNELPEKITVEEFSDKILAKMKETYPDMTEYVLSEDELAKIEQSAKEQFGSWDWTY | 240 |
| Query: | 241 | GKAPEYTIERGVRYPAGKITTYANVENSTIKSVKIFGDFFGVKPVDDIEKMLEGVRYDYK | 300 |
| | | GKAPEYTIER VRYPAGKI+T+ANVENS IK++KI+GDFFG+K V DIE +L G +Y+Y+ | |
| Sbjct: | 241 | GKAPEYTIERNVRYPAGKISTFANVENSIIKNLKIYGDFFGIKDVQDIENLLIGCKYEYR | 300 |
| Query: | 301 | DVLAALKTVDTSQYFSRMTPEEITKAIV | 328 |
| | | DV LKT+DT+QYFSRMT EE+ KAIV | |
| Sbjct: | 301 | DVFERLKTIDTTQYFSRMTVEEVAKAIV | 328 |

[7654] Based on this analysis, it was predicted that these proteins and their epitopes could be useful antigens for vaccines or diagnostics.

### EXAMPLE 1390

[7655] A DNA sequence (GBSx1475) was identified in S. agalactiae <SEQ ID 4263> which encodes the amino acid sequence <SEQ ID 4264>. Analysis of this protein sequence reveals the following:

| Possible site: 46 | | | | |
|---|---|---|---|---|
| >>> Seems to have no N-terminal signal sequence | | | | |
| | INTEGRAL | Likelihood = −1.70 | Transmembrane | 294-310 (294-312) |

```
----- Final Results -----
                              bacterial membrane --- Certainty = 0.1680(Affirmative) < succ>
                                bacterial outside --- Certainty = 0.0000(Not Clear) < succ>
                            bacterial cytoplasm --- Certainty = 0.0000(Not Clear) < succ>
```

[7656] The protein has homology with the following sequences in the GENPEPT database.

| >GP: AAA21748 GB: L31844 dihydrolipoamide dehydrogenase [Clostridium | | | |
|---|---|---|---|
| magnum] | | | |
| Identities = 229/589 (38%), Positives = 339/589 (56%), Gaps = 25/589 (4%) | | | |
| Query: | 1 | MAFDVIMPKLGVDMQEGEILEWKKNEGDTVNEGDVLLEIMSDKTNMEIEAEDTGVLLKIV | 60 |
| | | MA V+MPKLG+ M EG ++ WKK EGD V G++L E+ +DK E+E+ D G++ K++ | |
| Sbjct: | 1 | MAKIVVMPKLGLTMTEGTLVTWKKAEGDQVKVGEILFEVSTDKLTNEVESSDEGIVRKLL | 60 |
| Query: | 61 | HQAGDVVPVTEVIAYIGEEGEEVGTSSPSADATITAEDGQSVSGPAAPSQETVAAATPKE | 120 |
| | | GDVV +A IG E++ + +G S +A +T A PK+ | |
| Sbjct: | 61 | VNEGDVVECLNPVAIIGSADEDISSLL----------NGSSEGSGSAEQSDTKA---PKK | 107 |
| Query: | 121 | ELAADEY--DIVVVGGGPAGYYAAIRGAQLGGKIAIVEKTEFGGTCLNVGCIPTKTYLKN | 178 |
| | | E+ A + ++VV+GGGP GY AAIR AQLG K+ ++EK GGTCLNVGCIPTK L + | |
| Sbjct: | 108 | EVEAVKGGDNLVVIGGGPGGYVAAIRAAQLGAKVTLIEKESLGGTCLNVGCIPTKVLLHS | 167 |
| Query: | 179 | AEILDGLKVAAGRGINLASTNYAIDMDKTVAFKNSVVKTLTGGVRGLLKANKVEIFNGLG | 238 |
| | | +++L +K GI++ + ++ K V+K L GV GLL NKV++ G | |
| Sbjct: | 168 | SQLLTEMKEGDKLGIDIEGS-IVVNWKHIQKRKKIVIKKLVSGVSGLLTCNKVKVIKGTA | 226 |
| Query: | 239 | QVNPDKSVVIGDK-----VIKGRNVVLATGSKVSRINIPGIESPLVLTSDDILDLREIPK | 293 |
| | | + ++++ + + N ++ATGS I G + V+ S L L P+ | |
| Sbjct: | 227 | KFESKDTILVTKEDGVAEKVNFDNAIIATGSMPFIPEIEGNKLSGVIDSTGALSLESNPE | 286 |
| Query: | 294 | SLAVMGGGVVGIELGLVWASYGVDVTVIEMADRIIPAMDKEVSLELQKILAKKGMKIKTS | 353 |
| | | S+A++GGGV+G+E ++ S G V++IEM I+P MD+E+S + L + G+ I + | |
| Sbjct: | 287 | SIAIIGGGVIGVEFASIFNSLGCKVSIIEMLPHILPPMDREISEIAKAKLIRDGININNN | 346 |
| Query: | 354 | VGVSEIVEANNQLTLKL--NNGEEVV-ADKALLSIGRVPQMNGLENLEPELEMERGRIKV | 410 |
| | | V+ I + + L + + GEE + +K L+++GR + GL+ + ++ E G I V | |
| Sbjct: | 347 | CKVTRIEQGEDGLKVSFIGDKGEESIDVEKVLIAVGRRSNIEGLDVEKIGVKTEGGSIIV | 406 |
| Query: | 411 | NAYQETSIPGIYAPGDVNGTRMLAHAAYRMGEVAAENALGGNKRKAHLDFTPAAVYTHPE | 470 |
| | | N ET++ GIYA GD G MLAH A G VAAEN +G NK K PA VYT PE | |
| Sbjct: | 407 | NDKMETNVEGIYAIGDCTGKIMLAHVASDQGVVAAENIMGQNK-KMDYKTVPACVYTKPE | 465 |
| Query: | 471 | VAMVGMTEEQAREQYGDILVGKNSFTGNGRAIASNEAHGFVKVIAEPKYKEILGVHIIGP | 530 |
| | | +A VG+TEEQA+E+ D VGK NG+++ NE G +K+I + KY+EILGVHI+GP | |
| Sbjct: | 466 | LASVGLTEEQAKEKGIDYKVGKFQLAANGKSLIMNETGGVIKIITDKKYEEILGVHILGP | 525 |
| Query: | 531 | AAAELINEASTIMENELTVYDVAQSIHGHPTFSEVMYEAFLDVLGEAIH | 579 |
| | | A +LI EA+ + E T+ ++ ++H HPT E M EA L V +AIH | |
| Sbjct: | 526 | RATDLITEAALALRLEATLEEIITTVHAHPTVGEAMKEAALAVNNQAIH | 574 |

[7657] A related DNA sequence was identified in S. pyogenes <SEQ ID 1819> which encodes the amino acid sequence <SEQ ID 1820>. Analysis of this protein sequence reveals the following:

| Possible site: 50 | | | | |
|---|---|---|---|---|
| >>> Seems to have no N-terminal signal sequence | | | | |
| | INTEGRAL | Likelihood = −1.70 | Transmembrane | 297-313 (297-315) |

```
----- Final Results -----
                              bacterial membrane --- Certainty = 0.1680(Affirmative) < succ>
                                bacterial outside --- Certainty = 0.0000(Not Clear) < succ>
                            bacterial cytoplasm --- Certainty = 0.0000(Not Clear) < succ>
```

[7658] An alignment of the GAS and GBS proteins is shown below.

| Identities = 497/591 (84%), Positives = 538/591 (90%), Gaps = 10/591 (1%) | | | |
|---|---|---|---|
| Query: | 1 | MAFDVIMPKLGVDMQEGEILEWKKNEGDTVNEGDVLLEIMSDKTNMEIEAEDTGVLLKIV | 60 |
| | | MA ++IMPKLGVDMQEGEI+EWKK EGDTVNEGD+LLEIMSDKTNME+EAED+GVLLKI | |
| Sbjct: | 1 | MAVEIIMPKLGVDMQEGEIIEWKKQEGDTVNEGDILLEIMSDKTNMELEAEDSGVLLKIT | 60 |
| Query: | 61 | HQAGDVVPVTEVIAYIGEEGEEVGTSSPSA---DATITAEDGQS--VSGPAAPSQETVAA | 115 |
| | | QAG+ VPVTEVI YIG EGE V SSP+A + T ED ++ + P AP+Q A+ | |
| Sbjct: | 61 | RQAGETVPVTEVIGYIGAEGESVEVSSPAASDVNVARTTEDLEAAGLEVPKAPAQ--AAS | 118 |
| Query: | 116 | ATPKEELAADEYDIVVVGGGPAGYYAAIRGAQLGGKIAIVEKTEFGGTCLNVGCIPTKTY | 175 |
| | | A PK LA DEYDI+VVGGGPAGYYAAIRGAQLGGKIAIVEK+EFGGTCLNVGCIPTKTY | |
| Sbjct: | 119 | AAPKAALADDEYDIIVVGGGPAGYYAAIRGAQLGGKIAIVEKSEFGGTCLNVGCIPTKTY | 178 |
| Query: | 176 | LKNAEILDGLKVAAGRGINLASTNYAIDMDKTVAFKNSVVKTLTGGVRGLLKANKVEIFN | 235 |
| | | LKNAEILDG+K+AAGRGINLASTNY IDMDKTV FKN+VVKTLTGGV+GLLKANKV IFN | |
| Sbjct: | 179 | LKNAEILDGIKIAAGRGINLASTNYTIDMDKTVDFKNTVVKTLTGGVQGLLKANKVTIFN | 238 |
| Query: | 236 | GLGQVNPDKSVVIGDKVIKGRNVVLATGSKVSRINIPGIESPLVLTSDDILDLREIPKSL | 295 |
| | | GLGQVNPDK+V IG + IKGRNV+LATGSKVSRINIPGI+S LVLTSDDILDLRE+PKSL | |
| Sbjct: | 239 | GLGQVNPDKTVTIGSQTIKGRNVILATGSKVSRINIPGIDSKLVLTSDDILDLREMPKSL | 298 |
| Query: | 296 | AVMGGGVVGIELGLVWASYGVDVTVIEMADRIIPAMDKEVSLELQKILAKKGMKIKTSVG | 355 |
| | | AVMGGGVVGIELGLVWASYGVDVTVIEMADRIIPAMDKEVSLELQKIL+KKGMKIKTSVG | |
| Sbjct: | 299 | AVMGGGVVGIELGLVWASYGVDVTVIEMADRIIPAMDKEVSLELQKILSKKGMKIKTSVG | 358 |
| Query: | 356 | VSEIVEANNQLTLKLNNGEEVVADKALLSIGRVPQMNGLENLEPELEMERGRIKVNAYQE | 415 |
| | | VSEIVEANNQLTLKLNNGEEVVA+KALLSIGRV QMNGLENL LEM+R RIKVN YQE | |
| Sbjct: | 359 | VSEIVEANNQLTLKLNNGEEVVAEKALLSIGRVSQMNGLENL--NLEMDRNRIKVNDYQE | 416 |
| Query: | 416 | TSIPGIYAPGDVNGTRMLAHAAYRMGEVAAENALGGN-KRKAHLDFTPAAVYTHPEVAMV | 474 |
| | | TSIPGIYAPGDVNGT+MLAHAAYRMGEVAAENA+ GN RKA+L +TPAAVYTHPEVAMV | |
| Sbjct: | 417 | TSIPGIYAPGDVNGTKMLAHAAYRMGEVAAENAMHGNTTRKANLKYTPAAVYTHPEVAMV | 476 |
| Query: | 475 | GMTEEQAREQYGDILVGKNSFTGNGRAIASNEAHGFVKVIAEPKYKEILGVHIIGPAAAE | 534 |
| | | G+TEEQAREQYGD+L+GKNSFTGNGRAIASNEAHGFVKVIA+ KY EILGVHIIGPAAAE | |
| Sbjct: | 477 | GLTEEQAREQYGDVLIGKNSFTGNGRAIASNEAHGFVKVIADAKYHEILGVHIIGPAAAE | 536 |
| Query: | 535 | LINEASTIMENELTVYDVAQSIHGHPTFSEVMYEAFLDVLGEAIHNPPKRK | 585 |
| | | +INEA+TIME+ELTV ++ SIHGHPTFSEVMYEAF DVLGEAIHNPPKRK | |
| Sbjct: | 537 | MINEAATIMESELTVDELLLSIHGHPTFSEVMYEAFADVLGEAIHNPPKRK | 587 |

[7659] SEQ ID 4264 (GBS681) was expressed in E. coli as a His-fusion product. SDS-PAGE analysis of total cell extract is shown in FIG. 165 (lane 2; MW 68.3 kDa) and in FIG. 188 (lane 10; MW 68 kDa).

[7660] Purified GBS681-His is shown in FIG. 240, lane 5-6.

[7661] Based on this analysis, it was predicted that these proteins and their epitopes could be useful, antigens for vaccines or diagnostics.

### EXAMPLE 1391

[7662] A DNA sequence (GBSx1476) was identified in S. agalactiae <SEQ ID 4265> which encodes the amino acid sequence <SEQ ID 4266>. This protein is predicted to be dihydrolipoamide acetyltransferase. Analysis of this protein sequence reveals the following:

```
Possible site: 46
>>> Seems to have no N-terminal signal sequence
----- Final Results -----
                            bacterial cytoplasm --- Certainty = 0.4466(Affirmative) < succ>
                              bacterial membrane --- Certainty = 0.0000(Not Clear) < succ>
                                bacterial outside --- Certainty = 0.0000(Not Clear) < succ>
```

[7663] The protein has homology with the following sequences in the GENPEPT database.

| >GP: BAB04497 GB: AP001509 dihydrolipoamide S-acetyltransferase | | | |
|---|---|---|---|
| [Bacillus halodurans] | | | |
| Identities = 187/462 (40%), Positives = 266/462 (57%), Gaps = 26/462 (5%) | | | |
| Query: | 1 | MAVEIIMPKLGVDMQEGEILEWKKQVGDVVNEGDVLLEIMSDKTNMEIEAEDSGVLLKIT | 60 |
| | | MA EI MPKL MQEG +L+W K+ GD V G+ L EIM+DK N+E+EA + G LLK | |
| Sbjct: | 1 | MAKEIFMPKLSSTMQEGTLLQWFKEEGDRVEVGEPLFEIMTDKINIEVEAYEEGTLLKRY | 60 |
| Query: | 61 | HGNGDVVPVTETIGYIGAEGEEVTEASSSENTSVEENATQVTSEPEKVEETSEPSVPAAT | 120 |
| | | +G D +PV IGYIG E V +E E T E T+ P++ | |
| Sbjct: | 61 | YGEDDEIPVNHVIGYIGTPDESVP----TEPPGASEITASSTDEAGDHRTTAVKKAPSSD | 116 |
| Query: | 121 | SGEKVRATPAARKLAREMSIDLALVSGTGANGRVHREDVENFKGAQPRITPLARRIAEDQ | 180 |
| | | E VRATPAAR++A+E IDL V G+G GRV DV FK + TPLA+++AE + | |
| Sbjct: | 117 | R-ENVRATPAARRIAKEKRIDLRQVEGSGPEGRVQAVDVATFKKKGQKATPLAKKVAEVK | 175 |
| Query: | 181 | GVDIAEITGSGIRGKIVKNDVLAAMSPQAAEAPVETKATPTTEEKQLPEGVEVIKMSAMR | 240 |
| | | GV + ++ GSG GK+ + DV A A +PVE K +K+S +R | |
| Sbjct: | 176 | GVALEKVQGSGPYGKVYREDVEHAQ----AASPVEDKGNR-------------VKLSGLR | 218 |
| Query: | 241 | KAISKGMTNSYLTAPSFTLNYDIDMTEMMALRKKLIDPIMAKTGLKVSFTDLIGMAVVKT | 300 |
| | | K ++K M +S +AP T+ +IDM+ + +R +L+ I +TG ++S+T+++ AV | |
| Sbjct: | 219 | KVVAKRMVDSAFSAPHVTITTEIDMSSTIKIRSQLLGMIEQETGYRLSYTEIVMKAVAHA | 278 |
| Query: | 301 | LMKPEHRYLNASLINDAQEIELHNFVNIGIAVGLDDGLIVPVVHNADQMSLSDFVIASKD | 360 |
| | | LM H +NAS + EI H V+IG+AV ++ GL+VPVV + D+ L+ K | |
| Sbjct: | 279 | LMS--HPTINASFFEN--EIVYHEDVHIGLAVAVEGGLVVPVVKHVDKKGLAQLTNECKT | 334 |
| Query: | 361 | VIKKTQEGKLKSAEMSGSTFSITNLGMFGTKTFNPIINQPNSAILGVGATIPTPTVVDGE | 420 |
| | | V ++ +L MSG TF+I+NLGM+ F P+INQP SAILGVG P +DG+ | |
| Sbjct: | 335 | VAMAARDNRLSQEMMSGGTFTISNLGMYAIDVFTPVINQPESAILGVGRIQEKPVGIDGQ | 394 |
| Query: | 421 | IVARPIMAMCLTIDHRIVDGMNGAKFMVDLKNLMENPFGLLI | 462 |
| | | I RP+M L+ DHR++DG A F+ D+K+++E PF LL+ | |
| Sbjct: | 395 | IELRPMMTASLSFDHRVIDGAPAAAFLTDVKSMLEQPFQLLM | 436 |

[7664] A related DNA sequence was identified in S. pyogenes <SEQ ID 4267> which encodes the amino acid sequence <SEQ ID 4268>. Analysis of this protein sequence reveals the following:

```
Possible site: 50
>>> Seems to have no N-terminal signal sequence
----- Final Results -----
                            bacterial cytoplasm --- Certainty = 0.4774(Affirmative) < succ>
                              bacterial membrane --- Certainty = 0.0000(Not Clear) < succ>
                                bacterial outside --- Certainty = 0.0000(Not Clear) < succ>
```

[7665] An alignment of the GAS and GBS proteins is shown below.

| Identities = 354/473 (74%), Positives = 390/473 (81%), Gaps = 15/473 (3%) | | | |
|---|---|---|---|
| Query: | 1 | MAVEIIMPKLGVDMQEGEILEWKKQVGDVVNEGDVLLEIMSDKTNMEIEAEDSGVLLKIT | 60 |
| | | MA EIIMPKLGVDMQEGEI+EWKKQ GD VNEGD+LLEIMSDKTNME+EAEDSGVLLKIT | |
| Sbjct: | 1 | MAFEIIMPKLGVDMQEGEIIEWKKQEGDTVNEGDILLEIMSDKTNMELEAEDSGVLLKIT | 60 |
| Query: | 61 | HGNGDVVPVTETIGYIGAEGEEVTEASSSENTS-----VEENATQVTSEPEKVEETSEPS | 115 |
| | | GD VPVTE IGYIGAEGE V +SSE T+ +A + E V + P | |
| Sbjct: | 61 | RQAGDTVPVTEVIGYIGAEGESVDTIASSEKTTEIPVPASADAGPAVAPKENVASPA-PQ | 119 |
| Query: | 116 | VPAAT----SGEKVRATPAARKLAREMSIDLALVSGTGANGRVHREDVENFKGAQPRITP | 171 |
| | | V A +G KVRATPAARK A EM IDL V GTG GRVH+EDVENFKGAQP+ +P | |
| Sbjct: | 120 | VAATAIPQGNGGKVRATPAARKAAAEMGIDLGQVPGTGPKGRVHKEDVENFKGAQPKASP | 179 |
| Query: | 172 | LARRIAEDQGVDIAEITGSGIRGKIVKNDVLAAMSPQAAEAPVETKATPTTEEK--QLPE | 229 |
| | | LAR+IA D+G+D+A ++G+G GK++K D++A + A P E KA EEK LPE | |
| Sbjct: | 180 | LARKIAADKGIDLATVSGTGFNGKVMKEDIMAILE---AAKPAEAKAPAAKEEKVVDLPE | 236 |
| Query: | 230 | GVEVIKMSAMRKAISKGMTNSYLTAPSFTLNYDIDMTEMMALRKKLIDPIMAKTGLKVSF | 289 |
| | | GVE MSAMRKAISKGMTNSYLTAP+FTLNYDIDMTEM+ALRKKLIDPIMAKTGLKVSF | |
| Sbjct: | 237 | GVEHKPMSAMRKAISKGMTNSYLTAPTFTLNYDIDMTEMIALRKKLIDPIMAKTGLKVSF | 296 |
| Query: | 290 | TDLIGMAVVKTLMKPEHRYLNASLINDAQEIELHNFVNIGIAVGLDDGLIVPVVHNADQM | 349 |
| | | TDLIGMAVVKTLMKPEH Y+NASLINDA +IELH FVN+GIAVGLDDGLIVPV+H A++M | |
| Sbjct: | 297 | TDLIGMAVVKTLMKPEHEYMNASLINDANDIELHRFVNLGIAVGLDDGLIVPVIHGANKM | 356 |
| Query: | 350 | SLSDFVIASKDVIKKTQEGKLKSAEMSGSTFSITNLGMFGTKTFNPIINQPNSAILGVGA | 409 |
| | | LSDFV+ASKDVIKK Q GKLK+AEMSGSTFSITNLGMFGTKTFNPIINQPNSAILGVGA | |
| Sbjct: | 357 | CLSDFVLASKDVIKKAQTGKLKAAEMSGSTFSITNLGMFGTKTFNPIINQPNSAILGVGA | 416 |
| Query: | 410 | TIPTPTVVDGEIVARPIMAMCLTIDHRIVDGMNGAKFMVDLKNLMENPFGLLI | 462 |
| | | TIPTPTVVDGEIV+RPIMAMCLTIDHR+VDGMNGAKFMVDLK LMENPF LLI | |
| Sbjct: | 417 | TIPTPTVVDGEIVSRPIMAMCLTIDHRLVDGMNGAKFMVDLKKLMENPFELLI | 469 |

[7666] Based on this analysis, it was predicted that these proteins and their epitopes could be useful antigens for vaccines or diagnostics.

### EXAMPLE 1392

[7667] A DNA sequence (GBSx1477) was identified in S. agalactiae <SEQ ID 4269> which encodes the amino acid sequence <SEQ ID 4270>. This protein is predicted to be acetoin dehydrogenase (TPP-dependent) beta chain (pdhB). Analysis of this protein sequence reveals the following:

```
Possible site: 18
>>> Seems to have no N-terminal signal sequence
----- Final Results -----
                            bacterial cytoplasm --- Certainty = 0.1267(Affirmative) < succ>
                              bacterial membrane --- Certainty = 0.0000(Not Clear) < succ>
                                bacterial outside --- Certainty= 0.0000(Not Clear) < succ>
```

[7668] A related GBS nucleic acid sequence <SEQ ID 9779> which encodes amino acid sequence <SEQ ID 9780> was also identified.

[7669] The protein has homology with the following sequences in the GENPEPT database.

| >GP: BAB04496 GB: AP001509 acetoin dehydrogenase (TPP-dependent) beta | | | |
|---|---|---|---|
| chain [Bacillus halodurans] | | | |
| Identities = 189/319 (59%), Positives = 249/319 (77%), Gaps = 1/319 (0%) | | | |
| Query: | 11 | EAINVAMSEEMRKDEKVFLMGEDVGVYGGDFGTSVGMLEEFGAKRVRDTPISEAAIAGSA | 70 |
| | | EAI AM+ EMRK+E VF++GED+GVYGG FG + GM+EEFG++RVR+TPISEAAI+G+A | |
| Sbjct: | 8 | EAIREAMTLEMRKNEDVFILGEDIGVYGGAFGVTRGMIEEFGSERVRNTPISEAAISGTA | 67 |
| Query: | 71 | IGAAQTGLRPIVDLTFMDFVTIAMDAIVNQGAKTNYMFGGGLSTPVTFRVASGSGIGSAA | 130 |
| | | IGAA TG+RPI++L F DF+TIAMD +VNQ AK YM+GG P+ R +GSG G+AA | |
| Sbjct: | 68 | IGAALTGMRPILELQFSDFITIAMDNMVNQAAKLRYMYGGKAKVPMVLRTPAGSGTGAAA | 127 |
| Query: | 131 | QHSQSLEAWLTHIPGLKVVAPGTVNESKALLKSSILDNNPVIFLEPKALYGKKEEVNMDP | 190 |
| | | QHSQSLEAW+THIPGLKVV P T ++K LLK++I DNNPVIF E K Y K V + | |
| Sbjct: | 128 | QHSQSLEAWMTHIPGLKVVQPATAYDAKGLLKAAIDDNNPVIFYEHKLCYRTKCHV-PEE | 186 |
| Query: | 191 | DFYIPLGKGDIKREGTDLTIVSYGRMLERVMQAAEEVAEEGINVEVVDPRTLIPLDKELI | 250 |
| | | ++ IPLGK D+KR+GTD+T+V+ M+ + ++AA E+ +EGI+VEV+DPRTL+PLD+E I | |
| Sbjct: | 187 | EYSIPLGKADVKRKGTDVTVVATAVMVHKALEAAVELEKEGISVEVIDPRTLVPLDEETI | 246 |
| Query: | 251 | IDSVKKTGKLILVNDAYKTGGFTGEIATMVAESEAFDYLDHPIVRLASEDVPVPYSRVLE | 310 |
| | | I SVKKT +LI+V++A K GGF GEIA+++AESEAFDYLD PT RL + VP+PY+ LE | |
| Sbjct: | 247 | IRSVKKTSRLIVVHEAVKRGGFGGEIASIIAESEAFDYLDAPIKRLGGKPVPIPYNPTLE | 306 |
| Query: | 311 | QGILPDVAKIKDAIYKVVN | 329 |
| | | + +P V I +A+ + +N | |
| Sbjct: | 307 | RAAIPQVPDIIEAVKETLN | 325 |

[7670] A related DNA sequence was identified in S. pyogenes <SEQ ID 4271> which encodes the amino acid sequence <SEQ ID 4272>. Analysis of this protein sequence reveals the following:

| Possible site: 18 | | | | |
|---|---|---|---|---|
| >>> Seems to have no N-terminal signal sequence | | | | |
| | INTEGRAL | Likelihood = −0.00 | Transmembrane | 81-97 (81-97) |

```
----- Final Results -----
                              bacterial membrane --- Certainty = 0.1001(Affirmative) < succ>
                                bacterial outside --- Certainty = 0.0000(Not Clear) < succ>
                            bacterial cytoplasm --- Certainty = 0.0000(Not Clear) < succ>
```

[7671] The protein has homology with the following sequences in the databases:

| >GP: BAB04496 GB: AP001509 acetoin dehydrogenase (TPP-dependent) beta | | | |
|---|---|---|---|
| chain [Bacillus halodurans] | | | |
| Identities = 187/319 (58%), Positives = 244/319 (75%), Gaps = 1/319 (0%) | | | |
| Query: | 11 | EAVNLAMTEEMRKDENIFLMGEDVGVYGGDFGTSVGMIEEFGPKRVKDTPISEAAISGAA | 70 |
| | | EA+ AMT EMRK+E++F++GED+GVYGG FG + GMIEEFG +RV++TPISEAAISG A | |
| Sbjct: | 8 | EAIREAMTLEMRKNEDVFILGEDIGVYGGAFGVTRGMIEEFGSERVRNTPISEAAISGTA | 67 |
| Query: | 71 | IGAAITGLRPIVDVTFMDFLTIMMDAIVNNGAKNNYMFGGGLITPVTFRVASGSGIGSAA | 130 |
| | | IGAA+TG+RPI+++ F DF+TI MD +VN AK YM+GG P+ R +GSG G+AA | |
| Sbjct: | 68 | IGAALTGMRPILELQFSDFITIAMDNMVNQAAKLRYMYGGKAKVPMVLRTPAGSGTGAAA | 127 |
| Query: | 131 | QHSQSLEAWLTHIPGIKVVAPGNANDAKGLLKSAIRDNNIVLFMEPKALYGKKEEVNQDP | 190 |
| | | QHSQSLEAW+THIPG+KVV P A DAKGLLK+AI DNN V+F E K Y K V ++ | |
| Sbjct: | 128 | QHSQSLEAWMTHIPGLKVVQPATAYDAKGLLKAAIDDNNPVIFYEHKLCYRTKCHVPEE- | 186 |
| Query: | 191 | DFYIPLGKGDIKREGTDLTIVSYGRMLERVLQAAEEVAADGINVEVVDPRTLIPLDKELI | 250 |
| | | ++ IPLGK D+KR+GTD+T+V+ M+ + L+AA E+ +GI+VEV+DPRTL+PLD+E I | |
| Sbjct: | 187 | EYSIPLGKADVKRKGTDVTVVATAVMVHKALEAAVELEKEGISVEVIDPRTLVPLDEETI | 246 |
| Query: | 251 | ISSVKKTGKLMLVNDAYKTGGFIGEIATMITESEAFDYLDHPIVRLASEDVPVPYARVLE | 310 |
| | | I SVKKT +L++V++A K GGF GEIA++I ESEAFDYLD PI RL + VP+PY LE | |
| Sbjct: | 247 | IRSVKKTSRLIVVHEAVKRGGFGGEIASIIAESEAFDYLDAPIKRLGGKPVPIPYNPTLE | 306 |
| Query: | 311 | QAILPDVEKIKAAIVKMAN | 329 |
| | | +A +P V I A+ + N | |
| Sbjct: | 307 | RAAIPQVPDIIEAVKETLN | 325 |

[7672] An alignment of the GAS and GBS proteins is shown below.

| Identities = 286/331 (86%), Positives = 310/331 (93%) | | | |
|---|---|---|---|
| Query: | 1 | MSETKVMALREAINVAMSEEMRKDEKVFLMGEDVGVYGGDFGTSVGMLEEFGAKRVRDTP | 60 |
| | | MSETK+MALREA+N+AM+EEMRKDE +FLMGEDVGVYGGDFGTSVGM+EEFG KRV+DTP | |
| Sbjct: | 1 | MSETKLMALREAVNLAMTEEMRKDENIFLMGEDVGVYGGDFGTSVGDMIEEFGPKRVKDTP | 60 |
| Query: | 61 | ISEAAIAGSAIGAAQTGLRPIVDLTFMDFVTIAMDAIVNQGAKTNYMFGGGLSTPVTFRV | 120 |
| | | ISEAAI+G+AIGAA TGLRPIVD+TFMDF+TI MDAIVN GAK NYMFGGGL TPVTFRV | |
| Sbjct: | 61 | ISEAAISGAAIGAAITGLRPIVDVTFMDFLTIMMDAIVNNGAKNNYMFGGGLITPVTFRV | 120 |
| Query: | 121 | ASGSGIGSAAQHSQSLEAWLTHIPGLKVVAPGTVNESKALLKSSILDNNPVIFLEPKALY | 180 |
| | | ASGSGIGSAAQHSQSLEAWLTHIPG+KVVAPG N++K LLKS+I DNN V+F+EPKALY | |
| Sbjct: | 121 | ASGSGIGSAAQHSQSLEAWLTHIPGIKVVAPGNANDAKGLLISAIRDNNIVLFMEPKALY | 180 |
| Query: | 181 | GKKEEVNMDPDFYIPLGKGDIKREGTDLTIVSYGRMLERVMQAAEEVAEEGINVEVVDPR | 240 |
| | | GKKEEVN DPDFYIPLGKGDIKREGTDLTIVSYGRMLERV+QAAEEVA +GINVEVVDPR | |
| Sbjct: | 181 | GKKEEVNQDPDFYIPLGKGDIKREGTDLTIVSYGRMLERVLQAAEEVAADGINVEVVDPR | 240 |
| Query: | 241 | TLIPLDKELIIDSVKKTGKLILVNDAYKTGGFTGEIATMVAESEAFDYLDHPIVRLASED | 300 |
| | | TLIPLDKELII+SVKKTGKL+LVNDAYKTGGF GEIATM+ ESEAFDYLDHPIVRLASED | |
| Sbjct: | 241 | TLIPLDKELIIESVKKTGKLMLVNDAYKTGGFIGEIATMITESEAFDYLDHPIVRLASED | 300 |
| Query: | 301 | VPVPYSRVLEQGILPDVAKIKDAIYKVVNKG | 331 |
| | | VPVPY+RVLEQ ILPDV KIK AI K+ NKG | |
| Sbjct: | 301 | VPVPYARVLEQAILPDVEKIKAAIVKMANKG | 331 |

[7673] Based on this analysis, it was predicted that these proteins and their epitopes could be useful antigens for vaccines or diagnostics.

### EXAMPLE 1393

[7674] A DNA sequence (GBSx1478) was identified in S. agalactiae <SEQ ID 4273> which encodes the amino acid sequence <SEQ ID 4274>. Analysis of this protein sequence reveals the following:

| Possible site: 48 | | | |
|---|---|---|---|
| >>> Seems to have no N-terminal signal sequence | | | |
| INTEGRAL | Likelihood = −3.03 | Transmembrane | 161-177 (161-178) |

----- Final Results -----
bacterial membrane --- Certainty = 0.2211 (Affirmative) < succ>
bacterial outside --- Certainty = 0.0000 (Not Clear) < succ>
bacterial cytoplasm --- Certainty = 0.0000 (Not Clear) < succ>

[7675] A related GBS nucleic acid sequence <SEQ ID 9777> which encodes amino acid sequence <SEQ ID 9778> was also identified.

[7676] The protein has homology with the following sequences in the GENPEPT database.

| >GP: BAB04495 GB: AP001509 acetoin dehydrogenase (TPP-dependent) alpha | | | |
|---|---|---|---|
| chain [Bacillus halodurans] | | | |
| Identities = 148/317 (46%), Positives = 214/317 (66%), Gaps = 1/317 (0%) | | | |
| Query: | 8 | LSKEQHLDMFLKMQRIRDVDMKFNKLVRRGFVQGMTHFSVGEEAASVGAIQDLTDSDIIF | 67 |
| | | +++++ +D+F +M IR + K ++ +G + G TH +VG+EA++VG+I L + D + | |
| Sbjct: | 10 | MTEKKLVDLFKQMWLIRYFEEKVDEFFAKGMIHGTTHLAVGQEASAVGSIAVLEERDKLT | 69 |
| Query: | 68 | SNHRGHGQTIAKGIDIGGMFAELAGKATGTSKGRGGSMHLANLERGNYGTNGIVGGGYAL | 127 |
| | | S HRGHG IAKG D+ M AEL G+ TG KG+GGSMH+A++E+GN G NGIVGGG+++ | |
| Sbjct: | 70 | STHRGHGHCIAKGADVNRMMAELFGRETGYCKGKGGSMHIADVERGNLGANGIVGGGFSI | 129 |
| Query: | 128 | AVGAALTQQYEGTDNIVIAFSGDSATNEGSFHESVNLAAVWNLPVIFFIINNRYGISTDI | 187 |
| | | A GAALT + + +V+ F GD A+NEGSFHE+VNLA++W LPV+F NN+YG+S + | |
| Sbjct: | 130 | ATGAALTSKMKKEGYVVLCFFGDGASNEGSFHEAVNLASIWKLPVVFICENNQYGMSGSV | 189 |
| Query: | 188 | TYSTKIPHLYMRADAYGIPGHYVEDGNDLMAVYEKMHEVINYVRSGNGPAIVEVESYRWF | 247 |
| | | I H+ RA YGIPG V DGND+ AV + ++ R G GP IVE ++YRW | |
| Sbjct: | 190 | KEMINIEHISDRAAGYGIPG-MVVDGNDVFAVMNVVGRAVDRARRGEGPTIVEAKTYRWK | 248 |
| Query: | 248 | GHSTADAGVYRTKEEVDSWKAKDPVKRYRAYLIENEIATEEELAAIEAQVIKEVEEGVKF | 307 |
| | | GHS +DA YRT+EE W+ KDP+ R RA L++ I TEES +I+ + +++E+ V+F | |
| Sbjct: | 249 | GHSKSDAKKYRTREEEKEWREKDPIARLRATLVKEGIVTEEEADSIQEEAKQKIEDSVQF | 308 |
| Query: | 308 | AEESPFPDMSVAFEDVF | 324 |
| | | A SP P++ EDV+ | |
| Sbjct: | 309 | ARNSPEPEIESLLEDVY | 325 |

[7677] A related DNA sequence was identified in S. pyogenes <SEQ ID 4275> which encodes the amino acid sequence <SEQ ID 4276>. Analysis of this protein sequence reveals the following:

Possible site: 51
>>> Seems to have no N-terminal signal sequence
----- Final Results -----
bacterial cytoplasm --- Certainty = 0.3502 (Affirmative) < succ>
bacterial membrane --- Certainty = 0.0000 (Not Clear) < succ>
bacterial outside --- Certainty = 0.0000 (Not Clear) < succ>

[7678] An alignment of the GAS and GBS proteins is shown below.

| Identities = 244/326 (74%), Positives = 278/326 (84%) | | | |
|---|---|---|---|
| Query: | 1 | MEVRMVTLSKEQHLDMFLKMQRIRDVDMKFNKLVRRGFVQGMTHFSVGEEAASVGAIQDL | 60 |
| | | ME MVT+SKEQHLDMFLKM+RIR+ D + NKLVRRGFVQGMTHFSVGEEAA+VGA+ L | |
| Sbjct: | 1 | MEAEMVTVSKEQHLDMFLKMERIREFDSRINKLVRRGFVQGMTHFSVGEEAANVGAVAHL | 60 |
| Query: | 61 | TDSDIIFSNHRGHGQTIAKGIDIGGMFAELAGKATGTSKGRGGSMHLANLEKGNYGTNGI | 120 |
| | | + DIIFSNHRGHGQ+IAK +D+ M AELAGKATG SKGRGGSMHLA+ EKGNYGTNGI | |
| Sbjct: | 61 | SYDDIIFSNHRGHGQSIAKDMDLNKMMAELAGKATGVSKGRGGSMHLADFEKGNYGTNGI | 120 |
| Query: | 121 | VGGGYALAVGAALTQQYEGTDNIVIAFSGDSATNEGSFHESVNLAAVWNLPVIFFIINNR | 180 |
| | | VGGGYALAVGAALTQQY+GT+NI +AFSGD ATNEGSFHESVN+AA W LPVIFFIINNR | |
| Sbjct: | 121 | VGGGYALAVGAALTQQYKGTNNIAVAFSGDGATNEGSFHESVNMAATWKLPVIFFIINNR | 180 |
| Query: | 181 | YGISTDITYSTKIPHLYMRADAYGIPGHYVEDGNDLMAVYEKMHEVINYVRSGNGPAIVE | 240 |
| | | YGIS I +T PHLY RA+AYG+PG Y EDGND+MAVYE M + + +VR GNGPAIVE | |
| Sbjct: | 181 | YGISMSINNATNTPHLYTRAEAYGVPGFYCEDGNDVMAVYETMGKAVEHVRGGNGPAIVE | 240 |
| Query: | 241 | VESYRWFGHSTADAGVYRTKEEVDSWKAKDPVKRYRAYLIENEIATEEELAAIEAQVIKE | 300 |
| | | VESYRWFGHSTADAG YRTKEEVD WK KDP+ +YR YL IAT++EL AI+AQV KE | |
| Sbjct: | 241 | VESYRWFGHSTADAGKYRTKEEVDEWKEKDPMIKYRTYLTSEGIATDDELDAIQAQVKKE | 300 |
| Query: | 301 | VEEGVKFAEESPFPDMSVAFEDVFVD | 326 |
| | | V++ +FA+ SP P++SVAFEDV+VD | |
| Sbjct: | 301 | VDDAYEFAQNSPDPELSVAFEDVWVD | 326 |

[7679] A related GBS gene <SEQ ID 8797> and protein <SEQ ID 8798> were also identified. Analysis of this protein sequence reveals the following:

| Lipop: Possible site: −1 Crend: 10 | | | |
|---|---|---|---|
| McG: Discrim Score: −14.75 | | | |
| GvH: Signal Score (−7.5): −4.24 | | | |
| Possible site: 48 | | | |
| >>> Seems to have no N-terminal signal sequence | | | |
| ALOM program | count: 1 | value: −3.03 | threshold: 0.0 |

| | | | |
|---|---|---|---|
| INTEGRAL | Likelihood = −3.03 | Transmembrane | 161-177 (161-178) |
| PERIPHERAL | Likelihood = 3.55 | | 117 |

modified ALOM score: 1.11
*** Reasoning Step: 3
----- Final Results -----
bacterial membrane --- Certainty = 0.2211 (Affirmative) < succ>
bacterial outside --- Certainty = 0.0000 (Not Clear) < succ>
bacterial cytoplasm --- Certainty = 0.0000 (Not Clear) < succ>

[7680] The protein has homology with the following sequences in the databases:

[chemical structure]

[7681] SEQ ID 8798 (GBS403) was expressed in E. coli as a GST-fusion product. SDS-PAGE analysis of total cell extract is shown in FIG. 171 (lane 2; MW 64.4 kDa). It was also expressed in E. coli as a His-fusion product. SDS-PAGE analysis of total cell extract is shown in FIG. 76 (lane 4; MW 39.5 kDa).

[7682] GBS403-GST was purified as shown in FIG. 218, lane 6.

[7683] Based on this analysis, it was predicted that these proteins and their epitopes could be useful antigens for vaccines or diagnostics.

### EXAMPLE 1394

[7684] A DNA sequence (GBSx1479) was identified in S. agalactiae <SEQ ID 4277> which encodes the amino acid sequence <SEQ ID 4278>. This protein is predicted to be ABC transporter. Analysis of this protein sequence reveals the following:

Possible site: 22
>>> Seems to have no N-terminal signal sequence
----- Final Results -----
bacterial cytoplasm --- Certainty = 0.2464 (Affirmative) < succ>
bacterial membrane --- Certainty = 0.0000 (Not Clear) < succ>
bacterial outside --- Certainty = 0.0000 (Not Clear) < succ>

[7685] A related GBS nucleic acid sequence <SEQ ID 9775> which encodes amino acid sequence <SEQ ID 9776> was also identified.

[7686] The protein has homology with the following sequences in the GENPEPT database.

| >GP: CAB12414 GB: Z99107 similar to ABC transporter (ATP-binding | | | |
|---|---|---|---|
| protein) [Bacillus subtilis] | | | |
| Identities = 328/643 (51%), Positives = 443/643 (68%), Gaps = 9/643 (1%) | | | |
| Query: | 9 | MIILQGNKIERSFSGDVLFDNINIQVDQRDRIALVGRNGAGKSTLLKILVGEEAPTKGEI | 68 |
| | | M+ILQ N++ +SF D + +NI ++V RDRIA+VGRNGAGKSTLLKI+ G+ + KGEI | |
| Sbjct: | 1 | MMILQANQLSKSFGADTILNNIKLEVRNRDRIAIVGRNGAGKSTLLKIIAGQLSYEKGEI | 60 |
| Query: | 69 | NKKRDLSLSYLAQDSRFQSENTIFQEMLQVFDSLREVEKRLRELELQMGQVSGSDLEQLM | 128 |
| | | K +D+++ YLAQ + S+ TI +E+L VFD L+ +EK +R +E +M +LE +M | |
| Sbjct: | 61 | IKPKDITMGYLAQHTGLDSKLTIKEELLTVFDHLKAMEKEMRAMEEKMAAADPGELESIM | 120 |
| Query: | 129 | KTYDILSEEFREKGGFTYESDIKAILNGFKFNSDMWEMPISELSGGQNTRLALAKMLLEK | 188 |
| | | KTYD L +EF++KGG+ YE+D++++L+G F+ + LSGGQ TRLAL K+LL + | |
| Sbjct: | 121 | KTYDRLQQEFKDKGGYQYEADVRSVLHGLGFSHFDDSTQVQSLSGGQKTRLALGKLLLTQ | 180 |
| Query: | 189 | PELLVLDEPTNHLDIDTIAWLENYLVNYQGALIIVSHDRYFLDKVATVTYDLTTHSLDRY | 248 |
| | | P+LL+LDEPTNHLDIDT+ WLE+YL Y GA++IVSHDRYFLDKV Y+++ +Y | |
| Sbjct: | 181 | PDLLILDEPTNHLDIDTLTWLEHYLQGYSGAILIVSHDRYFLDKVVNQVYEVSRAESKKY | 240 |
| Query: | 249 | VGNYSKFMDLKAEKIATEEKNFEKQQKEIAKLEDFVQRNIVRASTTKRAQARRKQLEKME | 308 |
| | | GNYS ++D KA + + K +EKQQ EIAKL+DFV RN+RASTTKRAQ+RRKQLE+M+ | |
| Sbjct: | 241 | HGNYSAYLDQKAAQYEKDLKMYEKQQDEIAKLQDFVDRNLARASTTKRAQSRRKQLERMD | 300 |
| Query: | 309 | RLDKPNVEQKSANMTFHAGKVSGNVVLTLENAAIGYEG-VSLSEPIDLDVKKFDAIAIVG | 367 |
| | | + KP ++KSAN F K SGN VL +++ I YE L + + + ++ A+VG | |
| Sbjct: | 301 | VMSKPLGDEKSANFHFDITKQSGNEVLRVQDLTISYENQPPLLTSVSFMLTRGESAALVG | 360 |
| Query: | 368 | PNGIGKSTLIKSLVGQIPFIKGEAKLGANVETGYYDQSQSNLTKTNTVLDELWDAFSTTP | 427 |
| | | PNGIGKSTL+K+L+ + +G G+NV GYYDQ Q+ LT + VLDELWD + P | |
| Sbjct: | 361 | PNGIGKSTLLKTLIDTLKPDQGTISYGSNVSVGYYDQEQAELTSSKRVLDELWDEYPGLP | 420 |
| Query: | 428 | EVEIRNRLGAFLFSGDDVKKSVSMLSGGERARLLLAKLSMENNNFLILDEPTNHLDIDSK | 487 |
| | | E EIR LG FLFSGDDV K V LSGGE+ARL LAKL ++ NFLILDEPTNHLD+DSK | |
| Sbjct: | 421 | EKEIRTCLGNFLFSGDDVLKPVHSLSGGEKARLALAKLMLQKANFLILDEPTNHLDLDSK | 480 |
| Query: | 488 | EVLENALIEFDGTLLFVSHDRYFINRVATKVLEISDKGSTLYLGDYDYYLTKKAELEELA | 547 |
| | | EVLENALI++ GTLLFVSHDRYFINR+AT+VLE+S YLGDYDYY KK E EL | |
| Sbjct: | 481 | EVLENALIDYPGTLLFVSHDRYFINRIATRVLELSSSHIEEYLGDYDYYTEKKTEQLELE | 540 |
| Query: | 548 | RLNEEEVSASKTEIDVTSD----YETQKANQKEFRKITRRVVEIEARLEVLENDENNING | 603 |
| | | ++N++E KT V SD YE +K +K+ R+ RR+ EIE ++ +E + + + | |
| Sbjct: | 541 | KMNQQE-ETDKTPATVKSDSKRSYEEEKEWKKKERQRLRRIEEIETTVQTIEENISRNDE | 599 |
| Query: | 604 | LMLET---NDIGKLSDLQKELESIQEEQLLLMEEWENLNMRLD | 643 |
| | | L+ + D K+ + + E + +E L+ EWE L+ D | |
| Sbjct: | 600 | LLCDPEVYQDHEKVQAIHADNEKLNQELESLLSEWEELSTEED | 642 |

[7687] A related DNA sequence was identified in S. pyogenes <SEQ ID 4279> which encodes the amino acid sequence <SEQ ID 4280>. Analysis of this protein sequence reveals the following:

Possible site: 56
>>> Seems to have no N-terminal signal sequence
----- Final Results ----
bacterial cytoplasm --- Certainty = 0.2042 (Affirmative) < succ>
bacterial membrane --- Certainty = 0.0000 (Not Clear) < succ>
bacterial outside --- Certainty = 0.0000 (Not Clear) < succ>

[7688] An alignment of the GAS and GBS proteins is shown below.

| Identities = 473/635 (74%), Positives = 545/635 (85%), Gaps = 1/635 (0%) | | | |
|---|---|---|---|
| Query: | 9 | MIILQGNKIERSFSGDVLFDNINIQVDQRDRIALVGRNGAGKSTLLKILVGEEAPTKGEI | 68 |
| | | MIILQGNK+ERSFSGDVLF NI++QVD+RDRIALVG NGAGKSTLLK+LVGEE PT GE+ | |
| Sbjct: | 1 | MIILQGNKLERSFSGDVLFQNISLQVDERDRIALVGPNGAGKSTLLKLLVGEETPTSGEV | 60 |
| Query: | 69 | NKKRDLSLSYLAQDSRFQSENTIFQEMLQVFDSLREVEKRLRELELQMGQVSGSDLEQLM | 128 |
| | | N K+DL+LSYLAQ+SRF+S+ TI++EML+VF++LR+ EKRLR++E+ M VSG L +LM | |
| Sbjct: | 61 | NTKKDLTLSYLAQNSRFESDQTIYEEMLKVFEALRQDEKRLRQMEMDMATVSGQVLTRLM | 120 |
| Query: | 129 | KTYDILSEEFREKGGFTYESDIKAILNGFKFNSDMWEMPISELSGGQNTRLALAKMLLEK | 188 |
| | | YD+L+E FR++GGFTYESDIKAILNGFKF+ MW+M I+ELSGGQNTRLALAKMLLEK | |
| Sbjct: | 121 | TDYDLLTEHFRQQGGFTYESDIKAILNGFKFDESMWQMTIAELSGGQNTRLALAKMLLEK | 180 |
| Query: | 189 | PELLVLDEPTNHLDIDTIAWLENYLVNYQGALIIVSHDRYFLDKVATVTYDLTTHSLDRY | 248 |
| | | PELLVLDEPTNHLDI+TIAWLENYL NYQGALIIVSHDRYFLDKVATVT DLT + LDRY | |
| Sbjct: | 181 | PELLVLDEPTNHLDIETIAWLENYLANYQGALIIVSHDRYFLDKVATVTLDLTPNGLDRY | 240 |
| Query: | 249 | VGNYSKFMDLKAEKIATEEKNFEKQQKEIAKLEDFVQRNIVRASTTKRAQARRKQLEKME | 308 |
| | | GNYS+FM LKAEK+ EEK F+KQQKEIAKLEDFVQ+NIVRASTTKRAQARRKQLEK+E | |
| Sbjct: | 241 | SGNYSRFMALKAEKLVAEEKQFDKQQKEIAKLEDFVQKNIVRASTTKRAQARRKQLEKIE | 300 |
| Query: | 309 | RLDKPNVEQKSANMTFHAGKVSGNVVLTLENAAIGYEGVSLSEPIDLDVKKWDAIAIVGP | 368 |
| | | RLDKP +KSA+MTFHA K SGNVVL +E AAIGY LSEPI++D+ K DAIA+VGP | |
| Sbjct: | 301 | RLDKPTGGRKSAHMTFHAEKPSGNVVLRVEEAAIGYGDQVLSEPINVDINKLDAIAVVGP | 360 |
| Query: | 369 | NGIGKSTLIKSLVGQIPFIKGEAKLGANVETGYYDQSQSNLTKTNTVLDELWDAFSTTPE | 428 |
| | | NGIGKSTLIKS++GQ+P +KG+ K GANVETGYYDQ+QS+LT +NTVL+ELW FSTTPE | |
| Sbjct: | 361 | NGIGKSTLIKSIIGQLPLLKGQLKYGANVETGYYDQTQSHLTSSNTVLEELWQDFSTTPE | 420 |
| Query: | 429 | VEIRNRLGAFLFSGDDVKKSVSMLSGGERARLLLAKLSMENNNFLILDEPTNHLDIDSKE | 488 |
| | | V+IRNRLGAFLFSGDDVKKSV+MLSGGE+ARLLLAKLSMENNNFL+LDEPTNHLDIDSKE | |
| Sbjct: | 421 | VDIRNRLGAFLFSGDDVKKSVAMLSGGEKARLLLAKLSMENNNFLVLDEPTNHLDIDSKE | 480 |
| Query: | 489 | VLENALIEFDGTLLFVSHDRYFINRVATKVLEISDKGSTLYLGDYDYYLTKKAELEELAR | 548 |
| | | VLENALI+FDGTLLFVSHDRYFINR+ATKVLEI++ GSTLYLGDYDYYL KKAELEELAR | |
| Sbjct: | 481 | VLENALIDFDGTLLFVSHDRYFINRLATKVLEITENGSTLYLGDYDYYLEKKAELEELAR | 540 |
| Query: | 549 | LNEEEVSASKTEIDVTSDYETQKANQKEFRKITRRVVEIEARLEVLENDENNINGLMLET | 608 |
| | | L E E T DY+ QKANQKE R++TRR EIEARLE +E I M + | |
| Sbjct: | 541 | LAAGETVEETKEASAT-DYQLQKANQKERRRLTRRYEEIEARLETIEERIGAIQEDMHAS | 599 |
| Query: | 609 | NDIGKLSDLQKELESIQEEQLLLMEEWENLNMRLD | 643 |
| | | ND +L QKE + + +EQ LMEEWE + +++ | |
| Sbjct: | 600 | NDTAQLIAWQKEWDQLDQEQEALMEEWETIAEQIE | 634 |

[7689] Based on this analysis, it was predicted that these proteins and their epitopes could be useful antigens for vaccines or diagnostics.

### EXAMPLE 1395

[7690] A DNA sequence (GBSx1480) was identified in S. agalactiae <SEQ ID 4281> which encodes the amino acid sequence <SEQ ID 4282>. This protein is predicted to be thiophene degradation protein F (thdF). Analysis of this protein sequence reveals the following:

```
Possible site: 22
>>> Seems to have no N-terminal signal sequence
----- Final Results -----
                            bacterial cytoplasm --- Certainty = 0.0876(Affirmative) < succ>
                              bacterial membrane --- Certainty = 0.0000(Not Clear) < succ>
                                bacterial outside --- Certainty = 0.0000(Not Clear) < succ>
```

[7691] A related GBS nucleic acid sequence <SEQ ID 9773> which encodes amino acid sequence <SEQ ID 9774> was also identified.

[7692] A related DNA sequence was identified in S. pyogenes <SEQ ID 4283> which encodes the amino acid sequence <SEQ ID 4284>. Analysis of this protein sequence reveals the following:

```
Possible site: 34
>>> Seems to have no N-terminal signal sequence
----- Final Results -----
                            bacterial cytoplasm --- Certainty = 0.0795(Affirmative) < succ>
                              bacterial membrane --- Certainty = 0.0000(Not Clear) < succ>
                                bacterial outside --- Certainty = 0.0000(Not Clear) < succ>
```

[7693] An alignment of the GAS and GBS proteins is shown below.

| Identities = 384/458 (83%), Positives = 427/458 (92%) | | | |
|---|---|---|---|
| Query: | 12 | MSITKEFDTIAAISTPLGEGAIGIVRISGTDALKIASKIYRGKDLSAIQSHTLNYGHIVD | 71 |
| | | MSITKEFDTI AISTPLGEGAIGIVR+SGTDAL IA +++GK+L + SHT+NYGHI++ | |
| Sbjct: | 1 | MSITKEFDTITAISTPLGEGAIGIVRLSGTDALAIAQSVFKGKNLEQVASHTINYGHIIN | 60 |
| Query: | 72 | PDKNEILDEVMLGVMLAPKTFTREDVIEINTHGGIAVTNEILQLILRHGARMAEPGEFTK | 131 |
| | | P I+DEVM+ VMLAPRTFTRE+V+EINTHGGIAVTNEILQL++R GARMAEPGEFTK | |
| Sbjct: | 61 | PKTGTIIDEVMVSVMLAPKTFTRENVVEINTHGGIAVTNEILQLLIRQGARMAEPGEFTK | 120 |
| Query: | 132 | RAFLNGRVDLTQAEAVMDLIRAKTDKAMDIAVKQLDGSLKTLINNTRQEILNTLAQVEVN | 191 |
| | | RAFLNGRVDLTQAEAVMD+IRAKTDKAM IAVKQLDGSL LIN+TRQEILNTLAQVEVN | |
| Sbjct: | 121 | RAFLNGRVDLTQAEAVMDIIRAKTDKAMTIAVKQLDGSLSQLINDTRQEILNTLAQVEVN | 180 |
| Query: | 192 | IDYPEYDDVEEMTTTLMREKTQEFQALMENLLRTARRGKILREGLSTAIIGRPNVGKSSL | 251 |
| | | IDYPEYDDVEEMTT L+REKTQEFQ+L+E+LLRTA+RGKILREGLSTAIIGRPNVGKSSL | |
| Sbjct: | 181 | IDYPEYDDVEEMTTALLREKTQEFQSLLESLLRTAKRGKILREGLSTAIIGRPNVGKSSL | 240 |
| Query: | 252 | LNNLLREEKAIVTDIEGTTRDVIEEYVNIKGVPLKLVDTAGIRDTDDIVEKIGVERSKKA | 311 |
| | | LNNLLRE+KAIVTDI GTTRDVIEEYVNIKGVPLKLVDTAGIR+TDD+VE+IGVERSKKA | |
| Sbjct: | 241 | LNNLLREDKAIVTDIAGTTRDVIEEYVNIKGVPLRLVDTAGIRETDDLVEQIGVERSKKA | 300 |
| Query: | 312 | LEEADLVLLVLNSSEPLTLQDRSLLELSKESNRIVLLNKTDLPQKIEVNELPKNVIPISV | 371 |
| | | L+EADLVLLVLN+SE LT QDR+LL LS++SNRI+LLNKTDL QKIE+ +LP + IPISV | |
| Sbjct: | 301 | LQEADLVLLVLNASEKLTDQDRALLNLSQDSNRIILLNKTDLEQKIELEQLPDDYIPISV | 360 |
| Query: | 372 | LENENIDKIEERINDIFFDNAGMVEHDATYLSNARHISLIEKAVDSLKAVNEGLELGMPV | 431 |
| | | L N+NI+ IE+RIN +FFDNAG+VE DATYLSNARHISLIEKAV SL+AVN+GL LGMPV | |
| Sbjct: | 361 | LTNQNINLIEDRINQLFFDNAGLVEQDATYLSNARHISLIEKAVQSLEAVNDGLALGMPV | 420 |
| Query: | 432 | DLLQVDMTRTWEILGEITGDAAPDELITQLFSQFCLGK | 469 |
| | | DLLQVD+TRTWEILGEITGDAAPDELITQLFSQFCLGK | |
| Sbjct: | 421 | DLLQVDLTRTWEILGEITGDAAPDELITQLFSQFCLGK | 458 |

[7694] Based on this analysis, it was predicted that these proteins and their epitopes could be useful antigens for vaccines or diagnostics.

### EXAMPLE 1396

[7695] A DNA sequence (GBSx1481) was identified in S. agalactiae <SEQ ID 4285> which encodes the amino acid sequence <SEQ ID 4286>. Analysis of this protein sequence reveals the following:

| Possible site: 41 | | | | |
|---|---|---|---|---|
| >>> Seems to have no N-terminal signal sequence | | | | |
| | INTEGRAL | Likelihood = −9.18 | Transmembrane | 280-296 (276-299) |
| | INTEGRAL | Likelihood = −4.83 | Transmembrane | 249-265 (243-266) |

```
----- Final Results -----
                              bacterial membrane --- Certainty = 0.4673(Affirmative) < succ>
                                bacterial outside --- Certainty = 0.0000(Not Clear) < succ>
                            bacterial cytoplasm --- Certainty = 0.0000(Not Clear) < succ>
```

[7696] The protein has homology with the following sequences in the GENPEPT database.

| >GP: AAD40365 GB: AF036485 hypothetical protein [Plasmid pNZ4000] | | | |
|---|---|---|---|
| Identities = 88/306 (28%), Positives = 149/306 (47%), Gaps = 17/306 (5%) | | | |
| Query: | 1 | MIVEQKFGNGFTWIN---IEAEQLRTETSEIQAKY-LDSEIITYALDDYERAFMECSHIK | 56 |
| | | MI +K NG WI I AE+ T ++ +Y +D +II Y D+ E I | |
| Sbjct: | 1 | MIKPEKTINGTKWIETIQINAEERAT----LEDQYGIDEDIIEYVTDNDESTNYVYD-IN | 55 |
| Query: | 57 | GKEVLTIIFNTIDLKQKESYYETVPMTFCLSHDRLITVTRSRNSYMLELLQKYLDRNPDV | 116 |
| | | + L I L + Y T P L L T +S + L LD NP+V | |
| Sbjct: | 56 | EDDQLFIFLAPYALDKDALRYITQPFGMLLHKGVLFTFNQSGIPEVNTALYSALD-NPEV | 114 |
| Query: | 117 | -SPKKFLFAALTLITKQYFNVVSKIDREKDILNRQLREQTTNKRLLAMSDLETGSVYLLT | 175 |
| | | S F+ L + + + I ++++ L++ L +T N L+++S L+ +L + | |
| Sbjct: | 115 | KSVDAFILETLFTVVVSFIPISRAITKKRNYLDKMLNRKTKNSDLVSLSYLQQTLTFLSS | 174 |
| Query: | 176 | AANQNALVLEQLDVHPSQRFNSEVEKEQLS---DALIEAHQLVSMTQLNSQVLSQLSSTF | 232 |
| | | A N L +LD P F +++++ D IE Q+ M ++ +QV+ ++ T | |
| Sbjct: | 175 | AVQTN---LSELDRLPKTHFGVGADQDKIDLFEDVQIEGEQVQRMFEIETQVVDRIDHTL | 231 |
| Query: | 233 | NNVLNNNLNENLTGLNIISINLAIIAAITGFFGMNIPLPLTESRSSWLIVIATSVLLWVI | 292 |
| | | N++ NNNLN+ + L I S+ +A+ I+GF+GMN+ LPL + +W++ + SV+L V | |
| Sbjct: | 232 | NSLANNNLNDTMKFLTIWSLTMAVPTIISGFYGMNVKLPLAGMQYAWMLTLGISVVLIVA | 291 |
| Query: | 293 | IAQILK | 298 |
| | | + +LK | |
| Sbjct: | 292 | MLIMLK | 297 |

[7697] Based on this analysis, it was predicted that this protein and its epitopes, could be useful antigens for vaccines or diagnostics.

### EXAMPLE 1397

[7698] A DNA sequence (GBSx1482) was identified in S. agalactiae <SEQ ID 4287> which encodes the amino acid sequence <SEQ ID 4288>. Analysis of this protein sequence reveals the following:

```
Possible site: 38
>>> Seems to have no N-terminal signal sequence
----- Final Results -----
                            bacterial cytoplasm --- Certainty = 0.1437(Affirmative) < succ>
                              bacterial membrane --- Certainty = 0.0000(Not Clear) < succ>
                                bacterial outside --- Certainty = 0.0000(Not Clear) < succ>
```

[7699] The protein has no significant homology with any sequences in the GENPEPT database.

[7700] No corresponding DNA sequence was identified in S. pyogenes.

[7701] Based on this analysis, it was predicted that this protein and its epitopes, could be useful antigens for vaccines or diagnostics.

### EXAMPLE 1398

[7702] A DNA sequence (GBSx1483) was identified in S. agalactiae <SEQ ID 4289> which encodes the amino acid sequence <SEQ ID 4290>. This protein is predicted to be exonuclease RexA. Analysis of this protein sequence reveals the following:

```
Possible site: 52
>>> Seems to have no N-terminal signal sequence
----- Final Results -----
                            bacterial cytoplasm --- Certainty = 0.3165(Affirmative) < succ>
                              bacterial membrane --- Certainty = 0.0000(Not Clear) < succ>
                                bacterial outside --- Certainty = 0.0000(Not Clear) < succ>
```

[7703] A related GBS nucleic acid sequence <SEQ ID 9771> which encodes amino acid sequence <SEQ ID 9772> was also identified.

[7704] The protein has homology with the following sequences in the GENPEPT database.

| >GP: AAC12966 GB: U76424 exonuclease RexA [Lactococcus lactis] | | | |
|---|---|---|---|
| Identities = 522/1211 (43%), Positives = 747/1211 (61%), | | | |
| Gaps = 73/1211 (6%) | | | |
| Query: | 28 | KRTPEQIEAIYTFGNNVLVSASAGSGKTFVMVERILDKLLRGVPIDSLFISTFTVKAAGE | 87 |
| | | K TPEQ EAI++ G N+LVSASAGSGKTFVM +RI++K+ +G+ ID LFISTFT KAA E | |
| Sbjct: | 5 | KLTPEQNEAIHSSGKNILVSASAGSGKTFVMAQRIVEKVKQGIEIDRLFISTFTRKAASE | 64 |
| Query: | 88 | LKERLEKKINESLKSAESDDLKQFLTQQLVGIQTADIGTMDAFTQKIVNQYGYTLGISPI | 147 |
| | | L+ RLE+ + ++ + + D+ LT L + ADIGTMD+FTQK+ + I P | |
| Sbjct: | 65 | LRMRLERDLKKARQESSDDEEAHRLTLALQNLSNADIGTMDSFTQKLTKANFNRVNIDPN | 124 |
| Query: | 148 | FRILQDKNEQDVIKNEVYADLFSDYMTGKNAAS-----FIKLVKNFSGNRKDSKAFREMV | 202 |
| | | FRIL D+ E D+I+ EV+ L Y++ + + F KL+KNFS +R + F+++V | |
| Sbjct: | 125 | FRILADQTESDLIRQEVFEQLVESYLSADESLNISKDKFEKLIKNFSKDR-NILGFQKVV | 183 |
| Query: | 203 | YKVYAFSQSTDNPKRWMQTVFLKGAQTYTDFEAIPDQEVSSLLNVMQT--TANQLRDLTD | 260 |
| | | Y +Y F+ +T+NP W++ FLKG +TY +++ D +NV + T +L + | |
| Sbjct: | 184 | YTIYRFASATENPISWLENQFLKGFETY---KSLTDLSEDFTVNVKENLLTFFELLEAIS | 240 |
| Query: | 261 | QEDYKQLTAKGVPTANYKKHLKIIENL-VHWSQDFNLLYGKKGLTNLARDITNVIPSGND | 319 |
| | | ++D+ TA L I ++ V S+D L KK + +D+ | |
| Sbjct: | 241 | KKDFVTCTAL---------FLSIDTDIRVGSSKDEALSALKKDFSAQKQDL--------- | 282 |
| Query: | 320 | VTVAGVKYPIFKQLHNRIVGLKHLEVIFKYQGESLFLLELLQSFVLDFSEQYLQEKIQEN | 379 |
| | | V P +L + +KH ++I KYQ ++ + LQ F++DF + YL+ K EN | |
| Sbjct: | 283 | --VGSKSKP--GELRKFVDKIKHGQLIEKYQNQAFEIASDLQKFIIDFYKTYLERKKNEN | 338 |
| Query: | 380 | AFEFSDIAHFAIQILEENHDIRQLYQDKYHEVMVDEYQDNNHTQERMLELLSNGHNRFMV | 439 |
| | | AFE+SDIAHFAI+ILEEN DIR+ ++ Y E+M+DEYQD +HTQERMLELLSNGHN FMV | |
| Sbjct: | 339 | AFEYSDIAHFAIEILEENPDIRENLREHYDEIMIDEYQDTSHTQERMLELLSNGHNLFMV | 398 |
| Query: | 440 | GDIKQSIYRFRQADPQIFNDKYKAYQDNPSQGKLIILKENFRSQSEVLDSTNSVFTHLMD | 499 |
| | | GDIKQSIY FR ADP +F +KYK+Y + +LI LKENFRS+ EVL+ TN +F HLMD | |
| Sbjct: | 399 | GDIKQSIYGFRLADPGLFLEKYKSYDQAENPNQLIRLKENFRSRGEVLNFTNDIFKHLMD | 458 |
| Query: | 500 | EEVGDILYDESHQLKAGS----PRQQERHPNNKTQVLLLDTDEDDIDDSDSQQYDISPAE | 555 |
| | | E++G++ Y + L G+ P + E+ + + +T E++I+DS+ + IS E | |
| Sbjct: | 459 | EKLGEMTYGKEEALVQGNISDYPVEAEKDFYPELLLYKENTSEEEIEDSEVK---ISDGE | 515 |
| Query: | 556 | AKLVAKEIIRLHKEENVPFQDITLLVSSRTRNDGILQTFDRYGIPLVTDGGEQNYLKSVE | 615 |
| | | K A+EI +L E V +DI +LV S++ N+ I Y IP+V D G ++LKS+E | |
| Sbjct: | 516 | IKGAAQEIKKL-IEYGVEPKDIAILVRSKSNNNKIEDILLSYDIPVVLDEGRVDFLKSME | 574 |
| Query: | 616 | VMVMLDTLRSIDNPLNDYALVALLRSPMFGFNEDDLTRIAIQDVK-MAFYHKVKLSYHKE | 674 |
| | | V++MLD LR+IDNPL D +LVA+LRSP+FGFNED+LTRI++Q + + F+ K+ LS KE | |
| Sbjct: | 575 | VLIMLDVLRAIDNPLYDLSLVAMLRSPLFGFNEDELTRISVQGSRDLRFWDKILLSLKKE | 634 |
| Query: | 675 | GHHSDLITPELSSKIDHFMKTFQTWRDFAKWHSLYDLIWKIYNDRFYYDYVGALPKAEQR | 734 |
| | | G + +LI L K+ F + F WR ++ L+WKIY + +Y+DYVGAL E R | |
| Sbjct: | 635 | GKNPELINLSLEQKLKAFNQKFTEWRKLVNKIPIHRLLWKIYTETYYFDYVGALKNGEMR | 694 |
| Query: | 735 | QANLYALALRANQFEKTGFKGLSRFIRMIDKVLENENDLADVEVALPQNAVNLMTIHKSK | 794 |
| | | QANL AL++RA +E +G+KGL +F+R+I+K +E NDLA V + LPQNAV +MT HKSK | |
| Sbjct: | 695 | QANLQALSVRAESYESSGYKGLFKFVRLINKFMEQNNDLASVNIKLPQNAVRVMTFHKSK | 754 |
| Query: | 795 | GLEFKYVFILNIDKKFSMVDITSPLILSRNQGIGIKYVADMRHELEE-EILPAVKVSMET | 853 |
| | | GLEF YVF++N+ +F+ D+ +ILSR G+G+KY+AD++ E + P V MET | |
| Sbjct: | 755 | GLEFDYVFLMNLQSRFNDRDLKEDVILSREHGLGMKYIADLKAEPDVITDFPYALVKMET | 814 |
| Query: | 854 | LPYQLNKRELRLATLSEQMRLLYVAMTRAEKKLYLVGKASQT---KWADHYDLVS-ENNH | 909 |
| | | PY +NK + A LSE+MR+LYVA TRA+KKLYLVGK T + YD + E | |
| Sbjct: | 815 | FPYMVNKDLKQRAALSEEMRVLYVAFTRAKKKLYLVGKIKDTDKKAGLELYDAATLEGKI | 874 |
| Query: | 910 | LPLASRETFVTFQDWLLAVHETYKKQELFYDINFVSLEELTDHHIGMVNPSLPFNPDNK- | 968 |
| | | L R + FQ W+LA+ K L +N + +EL + + PD K | |
| Sbjct: | 875 | LSDKFRNSSRGFQHWILALQNATK---LPMKLNVYTKDELETEKLEFTS-----QPDFKK | 926 |
| Query: | 969 | -VENRQSEDIVRAIS--VLESVEQINQTY--KAAIELPTVRTPSQVKK-IYEPILDIEGV | 1022 |
| | | VE + D + + S + E+ + +N Y +AA EL +++TPSQVKK YE L + V | |
| Sbjct: | 927 | LVEESEKFDNIMSFSDEIKEAQKIMNYQYPHQAATELSSIQTPSQVKKRSYEKQLQVGEV | 986 |
| Query: | 1023 | D-VMETITKTSVDFKLPDFSTSKKQDPAALGSAVHELMQRIEMSSHVKMEDIQKALTEVN | 1081 |
| | | V E + ++DF DF KK A +GSA H MQ + S + Q L E+ | |
| Sbjct: | 987 | QPVSEFVRVKNLDFS--DFG-PKKITAAEMGSATHSFMQYADF-SQADLFSFQATLDEMG | 1042 |
| Query: | 1082 | AETSVKAAIQIEKINYFFQETSLGKYIQEEVEHLHREAPFAMLKEDPESGEKFVVRGIID | 1141 |
| | | + +K I I KI F +T G+++ E V+ +EAPF+ML+ D + E+++VRGI D | |
| Sbjct: | 1043 | FDEKIKNQIDITKILTLF-DTEFGQFLSENVDKTVKEAPFSMLRTDEFAKEQYIVRGICD | 1101 |
| Query: | 1142 | GYLLLENRIILFDYKTDKFVNP---LELKERYQGQMALYAEALKKSYEIEKIDKYLILLG | 1198 |
| | | G++ L ++IILFDYKTD+F N E+KERY+ QM LY+EAL+K+Y + +IDKYLILLG | |
| Sbjct: | 1102 | GFVKLADKIILFDYKTDRFTNVSAISEIKERYKDQMNLYSEALQKAYHVNQIDKYLILLG | 1161 |
| Query: | 1199 | G-KQLEVVKMD | 1208 |
| | | G +++ V K+D | |
| Sbjct: | 1162 | GPRKVFVEKID | 1172 |

[7705] A related DNA sequence was identified in S. pyogenes <SEQ ID 4291> which encodes the amino acid sequence <SEQ ID 4292>. Analysis of this protein sequence reveals the following:

```
Possible site: 61
>>> Seems to have an uncleavable N-term signal seq
----- Final Results -----
                              bacterial membrane --- Certainty = 0.0000(Not Clear) < succ>
                                bacterial outside --- Certainty = 0.0000(Not Clear) < succ>
                            bacterial cytoplasm --- Certainty = 0.0000(Not Clear) < succ>
```

[7706] The protein has homology with the following sequences in the databases:

| >GP: AAC12966 GB: U76424 exonuclease RexA [Lactococcus lactis] | | | |
|---|---|---|---|
| Identities = 478/1206 (39%), Positives = 700/1206 (57%), Gaps = 65/1206 (5%) | | | |
| Query: | 40 | KRTAQQIEAIYTSGQNILVSASAGSGKTFVMVERILDKILRGVSIDRLFISTFTVKAATE | 99 |
| | | K T +Q EAI++SG+NILVSASAGSGKTFVM +RI++K+ +G+ IDRLFISTFT KAA+E | |
| Sbjct: | 5 | KLTPEQNEAIHSSGKNILVSASAGSGKTFVMAQRIVEKVKQGIEIDRLFISTFTKKAASE | 64 |
| Query: | 100 | LRERIENKLYSQIAQTTDFQMKVYLTEQLQSLCQADIGTMDAFAQKVVSRYGYSIGISSQ | 159 |
| | | LR R+E L +++D + LT LQ+L ADIGTMD+F QK+ + I | |
| Sbjct: | 65 | LRMRLERDLKKARQESSDDEEAHRLTLALQNLSNADIGTMDSFTQKLTKANFNRVNIDPN | 124 |
| Query: | 160 | FRIMQDKAEQDVLKQEVFSKLFNEFMNQKEA-----PVFRALVKNFSGNCKDTSAFRELV | 214 |
| | | FRI+ D+ E D+++QEVF +L +++ E+ F L+KNFS + ++ F+++V | |
| Sbjct: | 125 | FRILADQTESDLIRQEVFEQLVESYLSADESLNISKDKFEKLIKNFSKD-RNILGFQKVV | 183 |
| Query: | 215 | YTCYSFSQSTENPKIWLQENFLSAAKTYQRLEDIPDHDIELLLLAMQDTANQLRDVTDME | 274 |
| | | YT Y F+ +TENP WL+ FL +TY+ L D+ + D + + T +L + + | |
| Sbjct: | 184 | YTIYRFASATENPISWLENQFLKGFETYRSLTDLSE-DFTVNVKENLLTFFELLEAISKK | 242 |
| Query: | 275 | DYGQLTKAG-SRSAKYTKHLTIIEKLSDWVRDFKCLYGKAGLDRLIRDVTGLIPSGNDVT | 333 |
| | | D+ T S + E LS +DF D+ | |
| Sbjct: | 243 | DFVTCTALFLSIDTDIRVGSSKDEALSALKKDFSA-------------------QKQDLV | 283 |
| Query: | 334 | VSKVKYPVFKTLHQKLKQFRHLETILMYQKDCFSLLEQLQDFVLAFSEAYLAVKIQESAF | 393 |
| | | SK K + K+K H + I YQ F + LQ F++ F + YL K E+AF | |
| Sbjct: | 284 | GSKSKPGELRKFVDKIK---HGQLIEKYQNQAFEIASDLQKFIIDFYKTYLERKKNENAF | 340 |
| Query: | 394 | EFSDIAHFAIKILEENTDIRQSYQQHYHEVMVDEYQDNNHMQERLLTLLSNGHNRFMVGD | 453 |
| | | E+SDIAHFAI+ILEEN DIR++ ++HY E+M+DEYQD +H QER+L LLSNGHN FMVGD | |
| Sbjct: | 341 | EYSDIAHFAIEILEENPDIRENLREHYDEIMIDEYQDTSHTQERMLELLSNGHNLFMVGD | 400 |
| Query: | 454 | IKQSIYRFRQADPQIFNQKFRDYQKKPEQGKVILLKENFRSQSEVLNVSNAVFSHLMDES | 513 |
| | | IKQSIY FR ADP +F +K++ Y + ++I LKENFRS+ EVLN +N +F HLMDE | |
| Sbjct: | 401 | IKQSIYGFRLADPGLFLEKYKSYDQAENPNQLIRLKENFRSRGEVLNFTNDIFKHLMDEK | 460 |
| Query: | 514 | VGDVLYDEQHQLIAG--SHAQTVPYLDRRAQLLLYNSDKDDGNAPSDSEGISFSEVTIVA | 571 |
| | | +G++ Y ++ L+ G S D +LLLY + + IS E+ A | |
| Sbjct: | 461 | LGEMTYGKEEALVQGNISDYPVEAEKDFYPELLLYKENTSEEEIEDSEVKISDGEIKGAA | 520 |
| Query: | 572 | KEIIKLHNDKGVPFEDITLLVSSRTRNDIISHTFNQYGIPIATDGGQQNYLKSVEVMVML | 631 |
| | | +EI KL + GV +DI +LV S++ N+ I Y IP+ D G+ ++LKS+EV++ML | |
| Sbjct: | 521 | QEIKKL-IEYGVEPKDIAILVRSKSNNNKIEDILLSYDIPVVLDEGRVDFLKSMEVLIML | 579 |
| Query: | 632 | DTLRTINNPRNDYALVALLRSPMFAFDEDDLARIALQKDNELDKDCLYDKIQRAVIGRGA | 691 |
| | | D LR I+NP D +LVA+LRSP+F F+ED+L RI++Q +L +DKI ++ G | |
| Sbjct: | 580 | DVLRAIDNPLYDLSLVAMLRSPLFGFNEDELTRISVQGSRDLR---FWDKILLSLKKEGK | 636 |
| Query: | 692 | HPELIHDTLLGKLNVFLKTLKSWRRYAKLGSLYDLIWKIFNDRFYFDFVASQAKAEQAQA | 751 |
| | | +PELI+ +L KL F + WR+ ++ L+WKI+ + +YFD+V + E QA | |
| Sbjct: | 637 | NPELINLSLEQKLKAFNQKFTEWRKLVNKIPIHRLLWKIYTETYYFDYVGALKNGEMRQA | 696 |
| Query: | 752 | NLYALALRANQFEKSGYKGLYRFIKMIDKVLETQNDLADVEVATPKQAVNLMTIHKSKGL | 811 |
| | | NL AL++RA +E SGYKGL++F+++I+K +E NDLA V + P+ AV +MT HKSKGL | |
| Sbjct: | 697 | NLQALSVRAESYESSGYKGLFKFVRLINKFMEQNNDLASVNIKLPQNAVRVMTFHKSKGL | 756 |
| Query: | 812 | QFPYVFILNCDKRFSMTDIHKSFILNRQHGIGIKYLADIKGLLGE-TTLNSVKVSMETLP | 870 |
| | | +F YVF++N RF+ D+ + IL+R+HG+G+KY+AD+K T V MET P | |
| Sbjct: | 757 | EFDYVFLMNLQSRFNDRDLKEDVILSREHGLGMKYIADLKAEPDVITDFPYALVKMETFP | 816 |
| Query: | 871 | YQLNKQELRLATLSEEMRLLYVAMTRAEKKVYFIGK---ASKSKSQEITDPKKL-GKLLP | 926 |
| | | Y +NK + A LSEEMR+LYVA TRA+KK+Y +GK K E+ D L GK+L | |
| Sbjct: | 817 | YMVNKDLKQRAALSEEMRVLYVAFTRAKKKLYLVGKIKDTDKKAGLELYDAATLEGKILS | 876 |
| Query: | 927 | LALREQLLTFQDWLLAIADIFSTEDLYFDVRFIEDSDLTQESVGRLQTP---QLLNPDDL | 983 |
| | | R FQ W+LA+ + L + +L E + P +L+ + | |
| Sbjct: | 877 | DKFRNSSRGFQHWILALQ---NATKLPMKLNVYTKDELETEKLEFTSQPDFKKLVEESEK | 933 |
| Query: | 984 | KDNRQSETIARALDMLEAVSQLNANY--EAAIHLPTVRTPSQL-KATYEPLLEPIGVDII | 1040 |
| | | DN S + ++ EA +N Y +AA L +++TPSQ+ K +YE L+ V + | |
| Sbjct: | 934 | FDNIMSFSD----EIKEAQKIMNYQYPHQAATELSSIQTPSQVKKRSYEKQLQVGEVQPV | 989 |
| Query: | 1041 | EKSSRSLSDFTLPHFSKKAKVEASHIGSALHQLMQVLPLSKP--INQQTLLDALRGIDSN | 1098 |
| | | + R + + F K K+ A+ +GSA H MQ S+ + Q LD + G D | |
| Sbjct: | 990 | SEFVR-VKNLDFSDFGPK-KITAAEMGSATHSFMQYADFSQADLFSFQATLDEM-GFD-- | 1044 |
| Query: | 1099 | EEVKTALDLKKIESFFCDTSLGQFFQTYQKHLYREAPFAILKLDPISQEEYVLRGIIDAY | 1158 |
| | | E++K +D+ KI + F DT GQF +EAPF++L+ D ++E+Y++RGI D + | |
| Sbjct: | 1045 | EKIKNQIDITKILTLF-DTEFGQFLSENVDKTVKEAPFSMLRTDEFAKEQYIVRGICDGF | 1103 |
| Query: | 1159 | FLFDDHIVLVDYKTDKYKQP---IELKKRYQQQLELYAEALTQTYKLPVTKRYLVLMGGG | 1215 |
| | | D I+L DYKTD++ E+K+RY+ Q+ LY+EAL + Y + +YL+L+GG | |
| Sbjct: | 1104 | VKLADEIILFDYKTDRFTNVSAISEIKERYKDQMNLYSEALQKAYHVNQIDKYLILLGGP | 1163 |
| Query: | 1216 | KPEIVE | 1221 |
| | | + VE | |
| Sbjct: | 1164 | RKVFVE | 1169 |

[7707] An alignment of the GAS and GBS proteins is shown below.

| Identities = 728/1211 (60%), Positives = 916/1211 (75%), Gaps = 5/1211 (0%) | | | |
|---|---|---|---|
| Query: | 1 | MMTFKPFLNPEDIAVIQTEEKNSDKKQKRTPEQIEAIYTFGNNVLVSASAGSGKTFVMVE | 60 |
| | | +++F PFL+PE I +Q E+ D+ QKRT +QIEAIYT G N+LVSASAGSGKTFVMVE | |
| Sbjct: | 13 | VISFAPFLSPEAIKHLQENERCRDQSQKRTAQQIEAIYTSGQNILVSASAGSGKTFVMVE | 72 |
| Query: | 61 | RILDKLLRGVPIDSLFISTFTVKAAGELKERLEKKINESLKSAESDDLKQFLTQQLVGIQ | 120 |
| | | RILDK+LRGV ID LFISTFTVKAA EL+ER+E K+ + +K +LT+QL + | |
| Sbjct: | 73 | RILDKILRGVSIDRLFISTFTVKAATELRERIENKLYSQIAQTTDFQMKVYLTEQLQSLC | 132 |
| Query: | 121 | TADIGTMDAFTQKIVNQYGYTLGISPIFRILQDKNEQDVIKNEVYADLFSDYMTGKNAAS | 180 |
| | | ADIGTMDAF QK+V++YGY++GIS FRI+QDK EQDV+K EV++ LF+++M K A | |
| Sbjct: | 133 | QADIGTMDAFAQKVVSRYGYSIGISSQFRIMQDKAEQDVLKQEVFSKLFNEFMNQKEAPV | 192 |
| Query: | 181 | FIKLVKNFSGNRKDSKAFREMVYKVYAFSQSTDNPKRWMQTVFLKGAQTYTDFEAIPDQE | 240 |
| | | F LVKNFSGN KD+ AFRE+VY Y+FSQST+NPK W+Q FL A+TY E IPD + | |
| Sbjct: | 193 | FRALVKNFSGNCKDTSAFRELVYTCYSFSQSTENPKIWLQENFLSAAKTYQRLEDIPDHD | 252 |
| Query: | 241 | VSSLLNVMQTTANQLRDLTDQEDYKQLTAKGVPTANYKKHLKIIENLVHWSQDFNLLYGK | 300 |
| | | + LL MQ TANQLRD+TD EDY QLT G +A Y KHL IIE L W +DF LYGK | |
| Sbjct: | 253 | IELLLLAMQDTANQLRDVTDMEDYGQLTKAGSRSAKYTKHLTIIEKLSDWVRDFKCLYGK | 312 |
| Query: | 301 | KGLTNLARDITNVIPSGNDVTVAGVKYPIFKQLHNRIVGLKHLEVIFKYQGESLFLLELL | 360 |
| | | GL L RD+T +IPSGNDVTV+ VKYP+FK LH ++ +HLE I YQ + LLE L | |
| Sbjct: | 313 | AGLDRLIRDVTGLIPSGNDVTVSKVKYPVFKTLHQKLKQFRHLETILMYQKDCFSLLEQL | 372 |
| Query: | 361 | QSFVLDFSEQYLQEKIQENAFEFSDIAHFAIQILEENHDIRQLYQDKYHEVMVDEYQDNN | 420 |
| | | Q FVL FSE YL KIQE+AFEFSDIAHFAI+ILEEN DIRQ YQ YHEVMVDEYQDNN | |
| Sbjct: | 373 | QDFVLAFSEAYLAVKIQESAFEFSDIAHFAIKILEENTDIRQSYQQHYHEVMVDEYQDNN | 432 |
| Query: | 421 | HTQERMLELLSNGHNRFMVGDIKQSIYRFRQADPQIFNDKYKAYQDNPSQGKLIILKENF | 480 |
| | | H QER+L LLSNGHNRFMVGDIKQSIYRFRQADPQIFN K++ YQ P QGK+I+LKENF | |
| Sbjct: | 433 | HMQERLLTLLSNGHNRFMVGDIKQSIYRFRQADPQIFNQKFRDYQKKPEQGKVILLKENF | 492 |
| Query: | 481 | RSQSEVLDSTNSVFTHLMDEEVGDILYDESHQLKAGSPRQQERHPNNKTQVLLLDTDEDD | 540 |
| | | RSQSEVL+ +N+VF+HLMDE VGD+LYDE HQL AGS Q + + + Q+LL ++D+DD | |
| Sbjct: | 493 | RSQSEVLNVSNAVFSHLMDESVGDVLYDEQHQLIAGSHAQTVPYLDRRAQLLLYNSDKDD | 552 |
| Query: | 541 | IDDSDSQQYDISPAEAKLVAKEIIRLHKEENVPFQDITLLVSSRTRNDGILQTFDRYGIP | 600 |
| | | ++ S IS +E +VAKEII+LH ++ VPF+DITLLVSSRTRND I TF++YGIP | |
| Sbjct: | 553 | -GNAPSDSEGISFSEVTIVAKEIIKLHNDKGVPFEDITLLVSSRTRNDIISHTFNQYGIP | 611 |
| Query: | 601 | LVTDGGEQNYLKSVEVMVMLDTLRSIDNPLNDYALVALLRSPMFGFNEDDLTRIAIQD-- | 658 |
| | | + TDGG+QNYLKSVEVMVMLDTLR+I+NP NDYALVALLRSPMF F+EDDL RIA+Q | |
| Sbjct: | 612 | IATDGGQQNYLKSVEVMVMLDTLRTINNPRNDYALVALLRSPMFAFDEDDLARIALQKDN | 671 |
| Query: | 659 | --VKMAFYHKVKLSYHKEGHHSDLITPELSSKIDHFMKTFQTWRDFAKWHSLYDLIWKIY | 716 |
| | | K Y K++ + G H +LI L K++ F+KT ++WR +AK SLYDLIWKI+ | |
| Sbjct: | 672 | ELDKDCLYDKIQRAVIGRGAHPELIHDTLLGKLNVFLKTLKSWRRYAKLGSLYDLIWKIF | 731 |
| Query: | 717 | NDRFYYDYVGALPKAEQRQANLYALALRANQFEKTGFKGLSRFIRMIDKVLENENDLADV | 776 |
| | | NDRFY+D+V + KAEQ QANLYALALRANQFEK+G+KGL RFI+MIDKVLE +NDLADV | |
| Sbjct: | 732 | NDRFYFDFVASQAKAEQAQANLYALALRANQFEKSGYKGLYRFIKMIDKVLETQNDLADV | 791 |
| Query: | 777 | EVALPQNAVNLMTIHKSKGLEFKYVFILNIDKKFSMVDITSPLILSRNQGIGIKYVADMR | 836 |
| | | EVA P+ AVNLMTIHKSKGL+F YVFILN DK+FSM DI IL+R GIGIKY+AD++ | |
| Sbjct: | 792 | EVATPKQAVNLMTIHKSKGLQFPYVFILNCDKRFSMTDIHKSFILNRQHGIGIKYLADIK | 851 |
| Query: | 837 | HELEEEILPAVKVSMETLPYQLNKRELRLATLSEQMRLLYVAMTRAEKKLYLVGKASQTK | 896 |
| | | L E L +VKVSMETLPYQLNK+ELRLATLSE+MRLLYVAMTRAEKK+Y +GKAS++K | |
| Sbjct: | 852 | GLLGETTLNSVKVSMETLPYQLNKQELRLATLSEEMRLLYVAMTRAEKKVYFIGKASKSK | 911 |
| Query: | 897 | WADHYDLVSENNHLPLASRETFVTFQDWLLAVHETYKKQELFYDINFVSLEELTDHHIGM | 956 |
| | | + D LPLA RE +TFQDWLLA+ + + ++L++D+ F+ +LT +G | |
| Sbjct: | 912 | SQEITDPKKLGKLLPLALREQLLTFQDWLLAIADIFSTEDLYFDVRFIEDSDLTQESVGR | 971 |
| Query: | 957 | VNPSLPFNPDNKVENRQSEDIVRAISVLESVEQINQTYKAAIELPTVRTPSQVKKIYEPI | 1016 |
| | | + NPD+ +NRQSE I RA+ +LE+V Q+N Y+AAI LPTVRTPSQ+K YEP+ | |
| Sbjct: | 972 | LQTPQLLNPDDLKDNRQSETIARALDMLEAVSQLNANYEAAIHLPTVRTPSQLKATYEPL | 1031 |
| Query: | 1017 | LDIEGVDVMETITKTSVDFKLPDFSTSKKQDPAALGSAVHELMQRIEMSSHVKMEDIQKA | 1076 |
| | | L+ GVD++E +++ DF LP FS K + + +GSA+H+LMQ + +S + + + A | |
| Sbjct: | 1032 | LEPIGVDIIEKSSRSLSDFTLPHFSKKAKVEASHIGSALHQLMQVLPLSKPINQQTLLDA | 1091 |
| Query: | 1077 | LTEVNAETSVKAAIQIEKINYFFQETSLGKYIQEEVEHLHREAPFAMLKEDPESGEKFVV | 1136 |
| | | L +++ VK A+ ++KI FF +TSLG++ Q +HL+REAPFA+LK DP S E++V+ | |
| Sbjct: | 1092 | LRGIDSNEEVKTALDLKKIESFFCDTSLGQFFQTYQKHLYREAPFAILKLDPISQEEYVL | 1151 |
| Query: | 1137 | RGIIDGYLLLENRIILFDYKTDKFVNPLELKERYQGQMALYAEALKKSYEIEKIDKYLIL | 1196 |
| | | RGIID Y L ++ I+L DYKTDK+ P+ELK+RYQ Q+ LYAEAL ++Y++ +YL+L | |
| Sbjct: | 1152 | RGIIDAYFLFDDHIVLVDYKTDKYKQPIELKKRYQQQLELYAEALTQTYKLPVTKRYLVL | 1211 |
| Query: | 1197 | LGGKQLEVVKM | 1207 |
| | | +GG + E+V++ | |
| Sbjct: | 1212 | MGGGKPEIVEV | 1222 |

[7708] Based on this analysis, it was predicted that these proteins and their epitopes could be useful antigens for vaccines or diagnostics.

### EXAMPLE 1399

[7709] A DNA sequence (GBSx1484) was identified in S. agalactiae <SEQ ID 4293> which encodes the amino acid sequence <SEQ ID 4294>. This protein is predicted to be exonuclease RexB. Analysis of this protein sequence reveals the following:

```
Possible site: 23
>>> Seems to have no N-terminal signal sequence
----- Final Results -----
                            bacterial cytoplasm --- Certainty = 0.0660(Affirmative) < succ>
                              bacterial membrane --- Certainty = 0.0000(Not Clear) < succ>
                                bacterial outside --- Certainty = 0.0000(Not Clear) < succ>
```

[7710] The protein has homology with the following sequences in the GENPEPT database.

| >GP: AAC12965 GB: U76424 exonuclease RexB [Lactococcus lactis] | | | |
|---|---|---|---|
| Identities = 363/1093 (33%), Positives = 604/1093 (55%), Gaps = 67/1093 (6%) | | | |
| Query: | 1 | MKLLYTDINHDMTEILVNQAAHAAEAGWRIFYIAPNSLSFEKERAVLENLPQ---EASFA | 57 |
| | | M++LYT+I D+TE L+ A E +++YI P+S+SFEKE+ +LE L + A F | |
| Sbjct: | 1 | MEILYTEITQDLTEGLLEIALEELEKNRKVYYIVPSSMSFEKEKEILERLAKGSDTAVFD | 60 |
| Query: | 58 | ITITRFAQLARYFTLNQP-NQKESLNDIGLAMIFYRALASFEDGQLKVFGRLKQDASFIS | 116 |
| | | + +TRF QL YF + K L +GL+M+F R L SF+ ++ ++ L+ A F+ | |
| Sbjct: | 61 | LLVTRFKQLPYYFDKREKATMKTELGTVGLSMLFRRVLRSFKKDEIPLYFSLQDSAGFLE | 120 |
| Query: | 117 | QLVDLYKELQTANLSILELKYLHSPEKFEDLLAIFLVVSDLLREGEYDNQSKIAFFTEQV | 176 |
| | | L+ L EL TANLS+ L ++ + +LA F + EY N S+ FT ++ | |
| Sbjct: | 121 | MLIQLRAELLTANLSVENLPDNPKNQELKKILAKFEAELSV----EYANYSEFGDFTNRL | 176 |
| Query: | 177 | RSGQLDVDLKNTILIVDGFTRFSAEEEALIKSLSSRCQEIIIGAYASQKAYKANFTNGNI | 236 |
| | | G+ D LK+ +I+DG+TRFSAEEE I+S+ + ++G Y+ + + A + I | |
| Sbjct: | 177 | VDGEFDQQLKDVTIIIDGYTRFSAEEELFIESIQEKVARFVVGTYSDENSLTAG--SETI | 234 |
| Query: | 237 | YSAGVDFLRYLATTFQTKPEFILSKWESKSGFEMISK-----NIEGKHDFTNSSHILDDT | 291 |
| | | Y + T F+ K L K S + E+ SK +++ + T+ L | |
| Sbjct: | 235 | YVGTSQMI----TRFRNKFPVELRKIASSAVNEVYSKLTRILDLDSRFVITDEKIELKAE | 290 |
| Query: | 292 | AKDCITIWECINQKDEVEHVARAIRQKLYQGYRYKDILVLLGDVDSYKLQLSKIFEQYDI | 351 |
| | | + IWE NQK E+E VA+ IRQK+ QG +KD VL+GD +Y++ L ++F+ Y+I | |
| Sbjct: | 291 | DEKYFRIWEAENQKVEIERVAKEIRQKIIQGAFFKDFTVLVGDPAAYEITLKEVFDLYEI | 350 |
| Query: | 352 | PYYFGKAETMAAHPLVHFMDSLSRIKRYRFRAEDVLNLFKTGIYGEISQDD--LDYFEAY | 409 |
| | | P+++ + E+M+ HPLV F +SL IK+ +R +DV+NL K+ +Y + + D+ +DYFE Y | |
| Sbjct: | 351 | PFFYAQEESMSQHPLVIFFESLFAIKKNNYRTDDVVNLLKSKVYTDANLDEEVIDYFEYY | 410 |
| Query: | 410 | ISYADIKGPKKFFTDFVVGAKKFDLGRLNTIRQSLL---TPLESFV-KTKKQDGIKTLNQ | 465 |
| | | + I G KKF +F+ ++ + +N +R+ LL +PL+ F+ +K+ G K ++ | |
| Sbjct: | 411 | VQKYKISGRKKFTEEFIE-SEFSQIELVNEMREKLLGSESPLQVFLGNNRKKTGKKWVSD | 469 |
| Query: | 466 | FMFFLTQVGLSDNLSRLVGQMS-ENEQE---KHQEVWKTFTDILEQFQTIFGQEKLNLDE | 521 |
| | | L + N++ +NE + KH++VW+ L +F +F EKL E | |
| Sbjct: | 470 | LQGLLENGNVMTNMNAYFSAAELQNEHQMADKHEQVWQMLISTLNEFLAVFSDEKLKSVE | 529 |
| Query: | 522 | FLSLLNSGMMQAEYRMVPATVDVVTVKSYDLVEPHSNQFVYALGMTQSHFPKIAQNKSLI | 581 |
| | | FL +L +G+ A+YR +PA VDVV VK Y+LVEP +N+++YA+G++Q++FP+I +N +L+ | |
| Sbjct: | 530 | FLDILLAGLKNAKYRQIPANVDVVNVKDYELVEPKTNKYIYAIGLSQTNFPRIKKNSTLL | 589 |
| Query: | 582 | SDIERQLINDANDTDGHFDIMTQENLKKNHFAALSLFNAAKQELVLTIPQLLNESEDQMS | 641 |
| | | SD ER IN D + + + N +KN F LSL N+AK+ LVL++PQ++ + + S | |
| Sbjct: | 590 | SDEERLEINQTTDENQFIEQLNVANYQKNQFTVLSLINSAKESLVLSMPQIMANEQGEFS | 649 |
| Query: | 642 | P-YLVELRDIGVPFNHKGR-QSLKEEADNIGNYKALLSRVVDLYRSAIDKEMTKEE-QTF | 698 |
| | | P + + L+D K + +L E ++IGN +++++ + + R ++ E T E+ + F | |
| Sbjct: | 650 | PVFQLFLKDADEKILQKIQGVNLFESLEHIGNSRSVIAMIGQIERELVESEETSEDKRVF | 709 |
| Query: | 699 | WSVAVRYLRRQLTSKGIEIPIITDSLDTVTVSSDVMTRRFPEDDPLKLSSSALTTFYNNQ | 758 |
| | | WS R L + + + +DTV ++ D + + + D + S S+ FYN + | |
| Sbjct: | 710 | WSSIFRILVKSNADFQKILLDLAKDIDTVNLAPDTLEQIY--GDKIYASVSSFERFYNCE | 767 |
| Query: | 759 | YKYFLQYVLGLEEQDSIHPDMRHHGTYLHRVFEILMKNQGI--ESFEEKLNSAINKTNQE | 816 |
| | | Y+YFL+ L LE ++I + + G + H VFE +MK + E+F+EKL + + ++ | |
| Sbjct: | 768 | YQYFLENTLSLETFENIDINSKIVGNFFHEVFEKVMKETDLSAENFDEKLTLVLQEVDKN | 827 |
| Query: | 817 | DVFKSLYSEDAESRYSLEILEDIARATATILR----QDSQMTVESE-------EERFELM | 865 |
| | | + +++DA +R++ LE+I R TAT+L+ D T+ +E E | |
| Sbjct: | 828 | --YSRYFTQDATARFTWSNLEEIVRQTATVLKATVSTDELKTLLTESSFGLPKSELGNFS | 885 |
| Query: | 866 | IDNTIKINGIIDRIDRLSDGSLGVVDYKSSAQKFDIQKFYNGLSPQLVTYIDAISRDKEV | 925 |
| | | +D+ I + G IDR+D+LS LG +DYKSSA F +Q+ Y+GLS Q +TY+D I K+ | |
| Sbjct: | 886 | VDD-IYLRGRIDRLDQLSTDYLGAIDYKSSAHSFKLQEAYDGLSLQFMTYLDVI---KQA | 941 |
| Query: | 926 | EQKPPIFGAMYLHMQEPRQDLSKIKNLDDLVTKNHQALTYKGLFSEAEKEFLANGKYHL- | 984 |
| | | I+GA+YL + +LS+I L ++ +++ Y+GL E E + G ++ | |
| Sbjct: | 942 | FPNQKIWGALYLQFKNQPINLSEINQLSEIANILKESMRYEGLVLEDAAEQI-KGIENIA | 1000 |
| Query: | 985 | --KDSLYSETEIAILQAHNQSLYKKASETIKSGKFLINPYTEDAKTVDGD---------Q | 1033 |
| | | K ++Y+E E L N+ Y+ A + +K GK INP + ++ +D | |
| Sbjct: | 1001 | LKKTNIYNEEEFEQLLKLNEEHYRAAGQRLKKGKIAINPIMKRSEGIDQSGNVRGCRYCP | 1060 |
| Query: | 1034 | FKSITGFEADRHM | 1046 |
| | | KSI FEA+ HM | |
| Sbjct: | 1061 | LKSICRFEANIHM | 1073 |

[7711] A related DNA sequence was identified in S. pyogenes <SEQ ID 4295> which encodes the amino acid sequence <SEQ ID 4296>. Analysis of this protein sequence reveals the following:

```
Possible site: 23
>>> Seems to have no N-terminal signal sequence
----- Final Results -----
                            bacterial cytoplasm --- Certainty = 0.1891(Affirmative) < succ>
                              bacterial membrane --- Certainty = 0.0000(Not Clear) < succ>
                                bacterial outside --- Certainty = 0.0000(Not Clear) < succ>
```

[7712] An alignment of the GAS and GBS proteins is shown below.

| Identities = 546/1075 (50%), Positives = 758/1075 (69%), Gaps = 11/1075 (1%) | | | |
|---|---|---|---|
| Query: | 1 | MKLLYTDINHDMTEILVNQAAHAAEAGWRIFYIAPNSLSFEKERAVLENLPQEASFAITI | 60 |
| | | MKL+TY++++ MTEILVN+A AA+ G+R+FYIAPNSLSFEKER VL LP+ +F+I + | |
| Sbjct: | 1 | MKLIYTEMSYSMTEILVNEARKAADQGYRVFYIAPNSLSFEKEREVLTLLPERGTFSIIV | 60 |
| Query: | 61 | TRFAQLARYFTLNQPNQKESLNDIGLAMIFYRALASFEDGQLKVFGRLKQDASFISQLVD | 120 |
| | | TRF Q++RYFT+ K+ L+D LAMIFYRAL + L +GRL+ ++ FI QLV+ | |
| Sbjct: | 61 | TRFVQMSRYFTVESSPSKQHLDDTTLAMIFYRALMQLKPEDLPSYGRLQNNSVFIEQLVE | 120 |
| Query: | 121 | LYKELQTANLSILELKYLHSPEKFEDLLAIFLVVSDLLREGEYDNQSKIAFFTEQVRSGQ | 180 |
| | | LYKEL+ A LS+ +L L P+K EDL+ I + ++ + +Y+ S + F ++ G | |
| Sbjct: | 121 | LYKELKNAQLSVHDLTGLDHPQKQEDLIKIIELAETIMIQQDYNQDSPLQSFARAIKLGL | 180 |
| Query: | 181 | LDVDLKNTILIVDGFTRFSAEEEALIKSLSSRCQEIIIGAYASQKAYKANFTNGNIYSAG | 240 |
| | | L+ L T++++DGF+RFSAEE+ L+ L++ CQE+IIG+Y SQKAY+ +F GNIY A | |
| Sbjct: | 181 | LNNQLSKTVVVIDGFSRFSAEEDYLLSLLNNNCQEVIIGSYVSQKAYQKSFIKGNIYEAS | 240 |
| Query: | 241 | VDFLRYLATTFQTKPEFILSKWESKSGFEMISKNIEGKHDFTNSSHILDDTAKDCITIWE | 300 |
| | | + FL+ LA + KP F S K F +++ E HDF+ L + D ++W+ | |
| Sbjct: | 241 | LHFLQDLAQKYHIKPVFATSNQVFKPAFSRLTQLFEATHDFSQVDWQLQKSDLDHFSLWQ | 300 |
| Query: | 301 | CINQKDEVEHVARAIRQKLYQGYRYKDILVLLGDVDSYKLQLSKIFEQYDIPYYFGKAET | 360 |
| | | C +QK+E+EHVA++IRQKLY+GYRYKDILVLLGD+D+Y+LQ+ IF++++IPYY GKAE | |
| Sbjct: | 301 | CHHQKEEIEHVAKSIRQKLYEGYRYKDILVLLGDMDAYQLQIGPIFDKFEIPYYLGKAEP | 360 |
| Query: | 361 | MAAHPLVHFMDSLSRIKRYRFRAEDVLNLFKTGIYGEISQDDLDYFEAYISYADIKGPKK | 420 |
| | | MAAHPLV F++SL R +RY +R ED+LN+ K+G++G D+D FE Y +ADIKG K | |
| Sbjct: | 361 | MAAHPLVQFIESLERSQRYNWRREDILNMLKSGLFGCFDDSDIDRFEEYTQFADIKGFTK | 420 |
| Query: | 421 | FFTDFVV-GAKKFDLGRLNTIRQSLLTPLESFVKTKKQDGIKTLNQFMFFLTQVGLSDNL | 479 |
| | | F F + ++++ L LN +RQ ++ PL+ K++KQ G +++ + FL ++ L++N+ | |
| Sbjct: | 421 | FSKPFTINSSRQYPLDFLNEMRQDIVLPLQELFKSQKQLGASLVDKLILFLKKIRLAENM | 480 |
| Query: | 480 | SRLVGQMSENEQEKHQEVWKTFTDILEQFQTIFGQEKLNLDEFLSLLNSGMMQAEYRMVP | 539 |
| | | L S+ E EK++EVWK FTDIL F IFGQEKL L + L+L+ +GM A+YR+VP | |
| Sbjct: | 481 | QGLA--QSQLEVEKNEEVWKRFTDILTSFHHIFGQEKLRLSDCLALIKTGMKSAQYRVVP | 538 |
| Query: | 540 | ATVDVVTVKSYDLVEPHSNQFVYALGMTQSHFPKIAQNKSLISDIERQLINDANDTDGHF | 599 |
| | | AT+DVVT+KSYDLV+PHS FVYA+G+TQSHFPK + L+SD ER IN+ + HF | |
| Sbjct: | 539 | ATLDVVTIKSYDLVQPHSKPFVYAIGLTQSHFPKQIHHSGLLSDQERARINEIRNY-RHF | 597 |
| Query: | 600 | DIMTQENLKKNHFAALSLFNAAKQELVLTIPQLLNESEDQMSPYLVELRDIGVPFNHKGR | 659 |
| | | DI + EN KKNH ALSLFNAA +ELVL++ ++NE+ D +SPYL EL + G+P KG+ | |
| Sbjct: | 598 | DIASAENSKKNHQTALSLFNAATKELVLSVSTVINETFDDLSPYLKELINFGLPLLDKGK | 657 |
| Query: | 660 | QSLKEEADNIGNYKALLSRVVDLYRSAIDKEMTKEEQTFWSVAVRYLRRQLTSKGIEIPI | 719 |
| | | L + +IGNYKALLS+++ + R + EM+ +++ FW+V +RYLR+QL + +E+P | |
| Sbjct: | 658 | NYLSYDNSDIGNYKALLSQIIAINRQDL-IEMSDQDKMFWTVVLRYLRKQLRKQQLELPT | 716 |
| Query: | 720 | ITDSLDTVTVSSDVMTRRFPEDDPLKLSSSALTTFYNNQYKYFLQYVLGLEEQDSIHPDM | 779 |
| | | L T +S +V+ FP+ PLKLS++ALT FYNNQY YFL+YVL L + +SIHPD | |
| Sbjct: | 717 | SDYRLSTKPLSKEVIEVCFPKGIPLKLSATALTVFYNNQYNYFLKYVLNLNKTESIHPDS | 776 |
| Query: | 780 | RHHGTYLHRVFEILMKNQGIESFEEKLNSAINKTNQEDVFKSLYSEDAESRYSLEILEDI | 839 |
| | | R HG YLHRVFE LMK+ E F+ KL AI TNQE F+ +Y ++AE+ YSL ILEDI | |
| Sbjct: | 777 | RIHGQYLHRVFERLMKDHTQEPFDNKLKQAIYHTNQESFFQQVYQDNAEAEYSLAILEDI | 836 |
| Query: | 840 | ARATATILRQDSQMTVESEEERFELMIDNTIKINGIIDRIDRLSDGSLGVVDYKSSAQKF | 899 |
| | | R+TA IL+ + + V +E+ F+L + N I ++GIIDRID+LSDGSLG+VDYKSSA +F | |
| Sbjct: | 837 | VRSTAPILQLNQNIQVIDQEKNFQLDMGNEILVHGIIDRIDQLSDGSLGIVDYKSSANQF | 896 |
| Query: | 900 | DIQKFYNGLSPQLVTYIDAISR--DKEVEQKPPIFGAMYLHMQEPRQDLSKIKNLDD-LV | 956 |
| | | DI FYNGLSPQL+TY+ A+ + ++ Q +FGAMYLH+Q+P+ DL K +D+ LV | |
| Sbjct: | 897 | DIGTFYNGLSPQLMTYLAALKQIAPHDINQ---LFGAMYLHLQDPKLDLVTFKQIDNTLV | 953 |
| Query: | 957 | TKNHQALTYKGLFSEAEKEFLANGKYHLKDSLYSETEIAILQAHNQSLYKKASETIKSGK | 1016 |
| | | ++ALTYKG+FSE EKE L+ G Y K++LYS E+ L +N+ LY KA++ IK G | |
| Sbjct: | 954 | ESIYKALTYKGIFSEVEKEHLSTGAYQTKNALYSNDELETLLNYNKYLYLKAAKHIKKGH | 1013 |
| Query: | 1017 | FLINPYTEDAKTVDGDQFKSITGFEADRHMARARALYKLPAKEKRQGFLTLMQQE | 1071 |
| | | FLINPYT D KTV GDQ K+IT FEAD M +AR L LPAKEK++ FLTLM++E | |
| Sbjct: | 1014 | FLINPYTSDGKTVQGDQLKAITRFEADLDMGQARRLVTLPAKEKKECFLTLMRKE | 1068 |

[7713] Based on this analysis, it was predicted that these proteins and their epitopes could be useful antigens for vaccines or diagnostics.

### EXAMPLE 1400

[7714] A DNA sequence (GBSx1485) was identified in S. agalactiae <SEQ ID 4297> which encodes the amino acid sequence <SEQ ID 4298>. Analysis of this protein sequence reveals the following:

| Possible site: 31 | | | | |
|---|---|---|---|---|
| >>> Seems to have no N-terminal signal sequence | | | | |
| | INTEGRAL | Likelihood = −7.80 | Transmembrane | 51-67 (44-69) |

```
----- Final Results -----
                              bacterial membrane --- Certainty = 0.4121(Affirmative) < succ>
                                bacterial outside --- Certainty = 0.0000(Not Clear) < succ>
                            bacterial cytoplasm --- Certainty = 0.0000(Not Clear) < succ>
```

[7715] A related GBS nucleic acid sequence <SEQ ID 8799> which encodes amino acid sequence <SEQ ID 8800> was also identified. Analysis of this protein sequence reveals the following:

| Lipop: Possible site: −1 Crend: 10 | | | | |
|---|---|---|---|---|
| McG: Discrim Score: −20.62 | | | | |
| GvH: Signal Score (−7.5): −6.25 | | | | |
| Possible site: 31 | | | | |
| >>> Seems to have no N-terminal signal sequence | | | | |
| ALOM program count: 1 value: −7.80 threshold: 0.0 | | | | |
| | INTEGRAL | Likelihood = −7.80 | Transmembrane | 47-63 (40-65) |
| | PERIPHERAL | Likelihood = 3.34 | 26 | |

```
modified ALOM score: 2.06
*** Reasoning Step: 3
----- Final Results -----
                              bacterial membrane --- Certainty = 0.4121(Affirmative) < succ>
                                bacterial outside --- Certainty = 0.0000(Not Clear) < succ>
                            bacterial cytoplasm --- Certainty = 0.0000(Not Clear) < succ>
```

[7716] The protein has homology with the following sequences in the GENPEPT database.

| Identities = 138/297 (46%), Positives = 193/297 (64%), Gaps = 16/297 (5%) | | | |
|---|---|---|---|
| Query: | 5 | MKIDDLRKSDNVEDRRSSSGGSFSSGGSGLPILQLLLLRGSWKTKLVVLIILLLLG--GG | 62 |
| | | M+ R+SDNVEDRR+SSGG S GG G + S K L++LI++L+ G G | |
| Sbjct: | 1 | MRWQGRRESDNVEDRRNSSGGP-SMGGPGFRL-------PSGKGGLILLIVVLVAGYYGV | 52 |
| Query: | 63 | GLTSIFNDSSSPSSYQSQNVSRSVDNSATREQIDFVNKVLGSTEDFWSQEFQTQGFGNYK | 122 |
| | | LT + ++++S + D +A F + +L +TED W Q+F+ G Y+ | |
| Sbjct: | 53 | DLTGLMTGQPVSQQQSTRSISPNEDEAAK-----FTSVILATTEDTWGQQFEKMG-KTYQ | 106 |
| Query: | 123 | EPKLVLYTNSIQTGCGIGESASGPFYCSADKKIYLDISFYNELSHKYGATGDFAMAYVIA | 182 |
| | | +PKLV+Y +TGCG G+S GPFYC AD +Y+D+SFY+++ K GA GDFA YVIA | |
| Sbjct: | 107 | QPKLVMYRGMTRTGCGAGQSIMGPFYCPADGTVYIDLSFYDDMKDKLGADGDFAQGYVIA | 166 |
| Query: | 183 | HEVGHHIQTELGIMDKYNRMRHGLTKKEANALNVRLELQADYYAGVWAHYIRGKNLLEQG | 242 |
| | | HEVGHH+Q LGI K +++ T+ E N L+VR+ELQAD +AGVW H ++ + +LE G | |
| Sbjct: | 167 | HEVGHHVQKLLGIEPKVRQLQQNATQAEVNRLSVRMELQADCFAGVWGHSMQQQGVLETG | 226 |
| Query: | 243 | DFEEAMNAAHAVGDDTLQKETYGKLVPDSFTHGTAEQRQRWFNKGFQYGDIQHGDTF | 299 |
| | | D EEA+NAA A+GDD LQ+++ G++VPDSFTHGT++QR WF +GF GD +TF | |
| Sbjct: | 227 | DLEEALNAAQAIGDDRLQQQSQGRVVPDSFTHGTSQQRYSWFKRGFDSGDPAQCNTF | 283 |

[7717] A related DNA sequence was identified in S. pyogenes <SEQ ID 4299> which encodes the amino acid sequence <SEQ ID 4300>. Analysis of this protein sequence reveals the following:

| Possible site: 41 | | | | |
|---|---|---|---|---|
| >>> Seems to have no N-terminal signal sequence | | | | |
| | INTEGRAL | Likelihood = −6.42 | Transmembrane | 48-64 (41-67) |

```
----- Final Results -----
                              bacterial membrane --- Certainty = 0.3569(Affirmative) < succ>
                                bacterial outside --- Certainty = 0.0000(Not Clear) < succ>
                            bacterial cytoplasm --- Certainty = 0.0000(Not Clear) < succ>
```

[7718] The protein has homology with the following sequences in the databases:

| >GP: AAC75528 GB: AE000334 orf, hypothetical protein [Escherichia coli] | | | |
|---|---|---|---|
| Identities = 143/301 (47%), Positives = 195/301 (64%), Gaps = 21/301 (6%) | | | |
| Query: | 1 | MKTDDLRESQQVEDRRGQSSG-SFGGGGLGGGLLLQLLFSRGGWKTKLVILLLLLVMG-- | 57 |
| | | M+ RES VEDRR S G S GG G +L +GG L++L+++LV G | |
| Sbjct: | 1 | MRWQGRRESDNVEDRRNSSGGPSMGGPGF------RLPSGKGG----LILLIVVLVAGYY | 50 |
| Query: | 58 | GGGLSGVLGGKPSSTNNNAYQSSQVTRTNGDKASQEQVSFVSKVFASTEDYWTKTFREKG | 117 |
| | | G L+G++ G+P S QS++ N D+A++ F S + A+TED W + F + G | |
| Sbjct: | 51 | GVDLTGLMTGQPVSQQ----QSTRSISPNEDEAAK----FTSVILATTEDTWGQQFEKMG | 102 |
| Query: | 118 | LTYHKPTLVLYTGATQTACGRGQASSGPFYCPGDQKVYLDISFYNELSTKYGAKGDFAMA | 177 |
| | | TY +P LV+Y G T+T CG GQ+ GPFYCP D VY+D+SFY+++ K GA GDFA | |
| Sbjct: | 103 | KTYQQPKLVMYRGMTRTGCGAGQSIMGPFYCPADGTVYIDLSFYDDMKDKLGADGDFAQG | 162 |
| Query: | 178 | YVIAHEVGHHIQNELGIMDNYASARQGKSKAKANQLNVKLELQADYYAGAWANYVQGQGL | 237 |
| | | YVIAHEVGHH+Q LGI +Q ++A+ N+L+V++ELQAD +AG W + +Q QG+ | |
| Sbjct: | 163 | YVIAHEVGHHVQKLLGIEPKVRQLQQNATQAEVNRLSVRMELQADCFAGVWGHSMQQQGV | 222 |
| Query: | 238 | LEKGDIEEAMAAAHAVGDDTLQEETYGRTVPDSFTHGTSKQRQRWFDRGYQYGDFEHGDTF | 298 |
| | | LE GD+EEA+ AA A+GDD LQ+++ GR VPDSFTHGTS+QR WF RG+ GD +TF | |
| Sbjct: | 223 | LETGDLEEALNAAQAIGDDRLQQQSQGRVVPDSFTHGTSQQRYSWFKRGFDSGDPAQCNTF | 283 |

[7719] An alignment of the GAS and GBS proteins is shown below.

| Identities = 191/303 (63%), Positives = 241/303 (79%), Gaps = 5/303 (1%) | | | |
|---|---|---|---|
| Query: | 5 | MKIDDLRKSDNVEDRRSSSGGSFSSGG-SGLPILQLLLLRGSWKTKLVVLIILLLLGGGG | 63 |
| | | MK DDLR+S VEDRR S GSF GG G +LQLL RG WKTKLV+L++LL++GGGG | |
| Sbjct: | 1 | MKTDDLRESQQVEDRRGQSSGSFGGGGLGGGLLLQLLFSRGGWKTKLVILLLLLVMGGGG | 60 |
| Query: | 64 | LTSIFN---DSSSPSSYQSQNVSRSVDNSATREQIDFVNKVLGSTEDFWSQEFQTQGFGN | 120 |
| | | L+ + S++ ++YQS V+R+ + A++EQ+ FV+KV STED+W++ F+ +G | |
| Sbjct: | 61 | LSGVLGGKPSSTNNNAYQSSQVTRTNGDKASQEQVSFVSKVFASTEDYWTKTFREKGL-T | 119 |
| Query: | 121 | YKEPKLVLYTNSIQTGCGIGESASGPFYCSADKKIYLDISFYNELSHKYGATGDFAMAYV | 180 |
| | | Y +P LVLYT + QT CG G+++SGPFYC D+K+YLDISFYNELS KYGA GDFAMAYV | |
| Sbjct: | 120 | YHKPTLVLYTGATQTACGRGQASSGPFYCPGDQKVYLDISFYNELSTKYGAKGDFAMAYV | 179 |
| Query: | 181 | IAHEVGHHIQTELGIMDKYNRMRHGLTKKEANALNVRLELQADYYAGVWAHYIRGKNLLE | 240 |
| | | IAHEVGHHIQ ELGIMD Y R G +K +AN LNV+LELQADYYAG WA+Y++G+ LLE | |
| Sbjct: | 180 | IAHEVGHHIQNELGIMDNYASARQGKSKAKANQLNVKLELQADYYAGAWANYVQGQGLLE | 239 |
| Query: | 241 | QGDFEEAMNAAHAVGDDTLQKETYGKLVPDSFTHGTAEQRQRWFNKGFQYGDIQHGDTFS | 300 |
| | | +GD EEAM AAHAVGDDTLQ+ETYG+ VPDSFTHGT++QRQRWF++G+QYGD +HGDTFS | |
| Sbjct: | 240 | KGDIEEAMAAAHAVGDDTLQEETYGRTVPDSFTHGTSKQRQRWFDRGYQYGDFEHGDTFS | 299 |
| Query: | 301 | VEH | 303 |
| | | + + | |
| Sbjct: | 300 | IPY | 302 |

[7720] SEQ ID 8800 (GBS404) was expressed in E. coli as a GST-fusion product. SDS-PAGE analysis of total cell extract is shown in FIG. 171 (lane 3; MW 62 kDa).

[7721] GBS404-GST was purified as shown in FIG. 218, lane 7.

[7722] Based on this analysis, it was predicted that these proteins and their epitopes could be useful antigens for vaccines or diagnostics.

### EXAMPLE 1401

[7723] A DNA sequence (GBSx1486) was identified in S. agalactiae <SEQ ID 4301> which encodes the amino acid sequence <SEQ ID 4302>. This protein is predicted to be phenylalanyl-tRNA synthetase beta chain (pheT). Analysis of this protein sequence reveals the following:

```
Possible site: 19
>>> Seems to have no N-terminal signal sequence
----- Final Results -----
                            bacterial cytoplasm --- Certainty = 0.2617(Affirmative) < succ>
                              bacterial membrane --- Certainty = 0.0000(Not Clear) < succ>
                                bacterial outside --- Certainty = 0.0000(Not Clear) < succ>
```

[7724] The protein has homology with the following sequences in the GENPEPT database.

| >GP: CAB14823 GB: Z99118 phenylalanyl-tRNA synthetase (beta subunit) | | | |
|---|---|---|---|
| [Bacillus subtilis] | | | |
| Identities = 376/805 (46%), Positives = 523/805 (64%), Gaps = 6/805 (0%) | | | |
| Query: | 1 | MLVSYKWLKELVDVD-VTTAELAEKMSTTGIEVEGVETPAEGLSKLVVGHIVSCEDVPDT | 59 |
| | | M VSYKWL++ VD+ + A LAEK++ GIEVEG+E EG+ +V+GH++ E P+ | |
| Sbjct: | 1 | MFVSYKWLEDYVDLKGMDPAVLAEKITRAGIEVEGIEYKGEGIKGVVIGHVLEREQHPNA | 60 |
| Query: | 60 | H-LHLCQVDTGDDELRQVVCGAPNVKTGINVIVAVPGARIADNYKIKKGKIRGMESLGMI | 118 |
| | | L+ C VD G + Q++CGAPNV G V VA GA + N+KIKK K+RG ES GMI | |
| Sbjct: | 61 | DKLNKCLVDIGAEAPVQIICGAPNVDKGQKVAVATVGAVLPGNFKIKKAKLRGEESNGMI | 120 |
| Query: | 119 | CSLQELGLSESIIPKEFSDGIQILPEGAIPGDSIFSYLDLDDEIIELSITPNRADALSMR | 178 |
| | | CSLQELG+ ++ KE+++GI + P A G + L LDD I+EL +TPNRADA++M | |
| Sbjct: | 121 | CSLQELGIESKLVAKEYAEGIFVFPNDAETGSDALAALQLDDAILELGLTPNRADAMNML | 180 |
| Query: | 179 | GVAHEVAAIYGKKVHFEEKNLIEEAERAADKISVVIESDKVLS-YSARIVKNVTVAPSPQ | 237 |
| | | GVA+EVAAI +V + + +E+A+D ISV IE + Y+A+I+KNVT+APSP | |
| Sbjct: | 181 | GVAYEVAAILDTEVKLPQTDYPAASEQASDYISVKIEDQEANPLYTAKIIKNVTIAPSPL | 240 |
| Query: | 238 | WLQNKLMNAGIRPINNVVDVTNYVLLTYGQPMHAFDFDKFDGTTIVARNAENGEKLITLD | 297 |
| | | W+Q KLMNAGIRP NNVVD+TN+VLL YGQP+HAFD+D+F +V R A E ++TLD | |
| Sbjct: | 241 | WMQTKLMNAGIRPHNNVVDITNFVLLEYGQPLHAFDYDRFGSKEVVVRKAAENEMIVTLD | 300 |
| Query: | 298 | GEERDLIADDLVIAVNDQPVALAGVMGGQSTEIGSSSKTVVLEAAVFNGTSIRKTSGRLN | 357 |
| | | +ER L AD LVI + A+AGVMGG +E+ +KT++LEAA FNG +RK S L | |
| Sbjct: | 301 | DQERKLSADHLVITNGTKAQAVAGVMGGAESEVQEDTKTILLEAAYFNGQKVRKASKDLG | 360 |
| Query: | 358 | LRSESSSRFEKGINYDTVSEAMDFAAAMLQELAGGQVLSGQVTEGVLPTEPVEVSTTLGY | 417 |
| | | LRSESS RFEKGI+ V A + AA ++ AGG+VL+G V E L E + + | |
| Sbjct: | 361 | LRSESSVRFEKGIDPARVRLAAERAAQLIHLYAGGEVLAGTVEEDHLTIEANNIHVSADK | 420 |
| Query: | 418 | VNTRLGTELTYTDIEEVFEKLGFAISGSEVKFTVLVPRRRWDIAIQADLVEEIARIYGYE | 477 |
| | | V++ LG ++ ++ ++++LGF + ++ V VP RR DI I+ DL+EE AR+YGY+ | |
| Sbjct: | 421 | VSSVLGLTISKEELISIYKRLGFTVGEADDLLVVTVPSRRGDITIEEDLIEEAARLYGYD | 480 |
| Query: | 478 | KLPTTLPEAGATAGELTSMQRLRRRVRTVAEGAGLSEIITYALTTPEKAVQFSTQATNIT | 537 |
| | | +P+TLPE T G LT Q RR+VR EGAGLS+ ITY+LT +KA F+ + + T | |
| Sbjct: | 481 | NIPSTLPETAGTTGGLTPYQAKRRKVRRFLEGAGLSQAITYSLTNEKKATAFAIEKSLNT | 540 |
| Query: | 538 | ELMWPMTVDRSALRQNVVSGMLDTIAYNVARKNSNLAVYEIGKVFEQTGNPKEDLPTEVE | 597 |
| | | L PM+ +RS LR ++V +LD+++YN+AR+ ++A+YE+G VF ++ P E E | |
| Sbjct: | 541 | VLALPMSEERSILRHSLVPNLLDSVSYNLARQTDSVALYEVGSVF--LTKEEDTKPVETE | 598 |
| Query: | 598 | TFTFALTGLVEEKDFQTKSKPVDFFYAKGIVEALFIKLK-LDVTFVAQKGLASMHPGRTA | 656 |
| | | A+TGL ++ +Q + KPVDFF KGIVE L KL LD Q +HPGRTA | |
| Sbjct: | 599 | RVAGAVTGLWRKQLWQGEKKPVDFFVVKGIVEGLLDKLNVLDSIEFVQSERKQLHPGRTA | 658 |
| Query: | 657 | TILLDGKEIGFVGQVHPQTAKQYDIPETYVAEINLSTIESQMNQALIFEDITKYPSVSRD | 716 |
| | | ILL+G IGF+GQVHP K+ DI ETYV E++L + + L++ I KYPSV+RD | |
| Sbjct: | 659 | NILLNGSLIGFIGQVHPSLEKELDIKETYVFELDLHALLAAETAPLVYTAIPKYPSVTRD | 718 |
| Query: | 717 | IALLLAESVSHHDIVSAIETSGVKRLTAIKLFDVYAGNNIAEGYKSMAYSLTFQNPNDNL | 776 |
| | | IAL+ ++V+ + S I+ +G K L + +FDVY G ++ EG KS+A+SL + NP L | |
| Sbjct: | 719 | IALVTDKTVTSGQLESVIKEAGGKLLKEVTVFDVYEGEHMEEGKKSVAFSLQYVNPEQTL | 778 |
| Query: | 777 | TDEEVAKYMEKITKSLVEKVNAEIR | 801 |
| | | T+EEV K K+ K+L + A +R | |
| Sbjct: | 779 | TEEEVTKAHSKVLKALEDTYQAVLR | 803 |

[7725] A related DNA sequence was identified in S. pyogenes <SEQ ID 4303> which encodes the amino acid sequence <SEQ ID 4304>. Analysis of this protein sequence reveals the following:

```
Possible site: 27
>>> Seems to have no N-terminal signal sequence
----- Final Results -----
                            bacterial cytoplasm --- Certainty = 0.1283(Affirmative) < succ>
                              bacterial membrane --- Certainty = 0.0000(Not Clear) < succ>
                                bacterial outside --- Certainty = 0.0000(Not Clear) < succ>
```

[7726] An alignment of the GAS and GBS proteins is shown below.

| Identities = 595/801 (74%), Positives = 687/801 (85%) | | | |
|---|---|---|---|
| Query: | 1 | MLVSYKWLKELVDVDVTTAELAEKMSTTGIEVEGVETPAEGLSKLVVGHIVSCEDVPDTH | 60 |
| | | MLVSYKWLKELVD+DVT A LAEKMSTTGIEVEG+E PA+GLSKLVVGH++SCEDVP+TH | |
| Sbjct: | 6 | MLVSYKWLKELVDIDVTPAALAEKMSTTGIEVEGIEVPADGLSKLVVGHVLSCEDVPETH | 65 |
| Query: | 61 | LHLCQVDTGDDELRQVVCGAPNVKTGINVIVAVPGARIADNYKIKKGKIRGMESLGMICS | 120 |
| | | LHLCQVDTGD+ RQ+VCGAPNVK GI VIVAVPGARIADNYKIKKGKIRGMESLGMICS | |
| Sbjct: | 66 | LHLCQVDTGDETPRQIVCGAPNVKAGIKVIVAVPGARIADNYKIKKGKIRGMESLGMICS | 125 |
| Query: | 121 | LQELGLSESIIPKEFSDGIQILPEGAIPGDSIFSYLDLDDEIIELSITPNRADALSMRGV | 180 |
| | | LQELGLS+SIIPKEFSDGIQILPE A+PGD+IF YLDLDD IIELSITPNRADALSMRGV | |
| Sbjct: | 126 | LQELGLSDSIIPKEFSDGIQILPEEAVPGDAIFKYLDLDDHIIELSITPNRADALSMRGV | 185 |
| Query: | 181 | AHEVAAIYGKKVHFEEKNLIEEAERAADKISVVIESDKVLSYSARIVKNVTVAPSPQWLQ | 240 |
| | | AHEVAAIYGK V F +KNL E + ++ I V I SD VL+Y++R+V+NV V PSPQWLQ | |
| Sbjct: | 186 | AHEVAAIYGKSVSFPQKNLQESDKATSEAIEVAIASDNVLTYASRVVENVKVKPSPQWLQ | 245 |
| Query: | 241 | NKLMNAGIRPINNVVDVTNYVLLTYGQPMHAFDFDKFDGTTIVARNAENGEKLITLDGEE | 300 |
| | | N LMNAGIRPINNVVDVTNYVLL +GQPMHAFD+DKF+ IVAR A GE L+TLDGE+ | |
| Sbjct: | 246 | NLLMNAGIRPINNVVDVTNYVLLYFGQPMHAFDYDKFEDHKIVARAARQGESLVTLDGEK | 305 |
| Query: | 301 | RDLIADDLVIAVNDQPVALAGVMGGQSTEIGSSSKTVVLEAAVFNGTSIRKTSGRLNLRS | 360 |
| | | RDL +DLVI V D+PVALAGVMGGQ+TEI ++S+TVVLEAAVF+G SIRKTSGRLNLRS | |
| Sbjct: | 306 | RDLTTEDLVITVADKPVALAGVMGGQATEIDANSQTVVLEAAVFDGKSIRKTSGRLNLRS | 365 |
| Query: | 361 | ESSSRFEKGINYDTVSEAMDFAAAMLQELAGGQVLSGQVTEGVLPTEPVEVSTTLGYVNT | 420 |
| | | ESSSRFEKG+NY TV EA+DFAAAMLQELA GQVLSG V G LPTEPVEVST+L YVN | |
| Sbjct: | 366 | ESSSRFEKGVNYATVLEALDFAAAMLQELAEGQVLSGHVQAGQLPTEPVEVSTSLDYVNV | 425 |
| Query: | 421 | RLGTELTYTDIEEVFEKLGFAISGSEVKFTVLVPRRRWDIAIQADLVEEIARIYGYEKLP | 480 |
| | | RLGTELT+ DI+ +F++LGF ++G E FTV VPRRRWD++I ADLVEEIARIYGY+KLP | |
| Sbjct: | 426 | RLGTELTFADIQRIFDQLGFGLTGDETSFTVAVPRRRWDVSIPADLVEEIARIYGYDKLP | 485 |
| Query: | 481 | TTLPEAGATAGELTSMQRLRRRVRTVAEGAGLSEIITYALTTPEKAVQFSTQATNITELM | 540 |
| | | TTLPEAG TA ELT Q LRR+VR +AEG GL+EII+YALTTPEKAV+F+ +++TELM | |
| Sbjct: | 486 | TTLPEAGGTAAELTPTQALRRKVRGLAEGLGLTEIISYALTTPEKAVEFAVAPSHLTELM | 545 |
| Query: | 541 | WPMTVDRSALRQNVVSGMLDTIAYNVARKNSNLAVYEIGKVFEQTGNPKEDLPTEVETFT | 600 |
| | | WPM+V+RSALRQN+VSGMLDT+AYNVARK SNLA+YEIGK+FEQ NPKEDLP EV F | |
| Sbjct: | 546 | WPMSVERSALRQNMVSGMLDTVAYNVARKQSNLALYEIGKIFEQEANPKEDLPNEVNHFA | 605 |
| Query: | 601 | FALTGLVEEKDFQTKSKPVDFFYAKGIVEALFIKLKLDVTFVAQKGLASMHPGRTATILL | 660 |
| | | FA+ GLV +KDFQT+++ VDF++AKG ++ LF L L V +V K LA+MHPGRTA ILL | |
| Sbjct: | 606 | FAICGLVAQKDFQTQAQAVDFYHAKGNLDTLFANLNLKVQYVPTKDLANMHPGRTALILL | 665 |
| Query: | 661 | DGKEIGFVGQVHPQTAKQYDIPETYVAEINLSTIESQMNQALIFEDITKYPSVSRDIALL | 720 |
| | | D + IGFVGQVHP TAK Y IPETYVAE++++ +E+ + F +ITK+P+++RD+ALL | |
| Sbjct: | 666 | DEQVIGFVGQVHPGTAKAYSIPETYVAELDMAALEAALPSDQTFAEITKFPAMTRDVALL | 725 |
| Query: | 721 | LAESVSHHDIVSAIETSGVKRLTAIKLFDVYAGNNIAEGYKSMAYSLTFQNPNDNLTDEE | 780 |
| | | L VSH IV+AIE++GVKRLT+IKLFDVY G I G KSMAYSLTFQNPNDNLTDEE | |
| Sbjct: | 726 | LDREVSHQAIVTAIESAGVKRLTSIKLFDVYEGATIQAGKKSMAYSLTFQNPNDNLTDEE | 785 |
| Query: | 781 | VAKYMEKITKSLVEKVNAEIR | 801 |
| | | VAKYMEKITK+L E+V AE+R | |
| Sbjct: | 786 | VAKYMEKITKALTEQVGAEVR | 806 |

[7727] Based on this analysis, it was predicted that these proteins and their epitopes could be useful antigens for vaccines or diagnostics.

### EXAMPLE 1402

[7728] A DNA sequence (GBSx1487) was identified in S. agalactiae <SEQ ID 4305> which encodes the amino acid sequence <SEQ ID 4306>. Analysis of this protein sequence reveals the following:

```
Possible Site: 43
>>> Seems to have no N-terminal signal sequence
----- Final Results -----
                            bacterial cytoplasm --- Certainty = 0.0653(Affirmative) < succ>
                              bacterial membrane --- Certainty = 0.0000(Not Clear) < succ>
                                bacterial outside --- Certainty = 0.0000(Not Clear) < succ>
```

[7729] A related GBS nucleic acid sequence <SEQ ID 9769> which encodes amino acid sequence <SEQ ID 9770> was also identified.

[7730] The protein has homology with the following sequences in the GENPEPT database.

| >GP: CAB15205 GB: Z99120 transcriptional regulator [Bacillus subtilis] | | | |
|---|---|---|---|
| Identities = 60/169 (35%), Positives = 100/169 (58%) | | | |
| Query: | 17 | ITFKKVGLDNVNILQNIAIETFRQTFSHDNSEEQLQAFFNESYTLPVLKSEITHAESDTY | 76 |
| | | + KK +++ LQ ++IETF TF NS E ++A+ ++ L+ E+++ S + | |
| Sbjct: | 3 | VKMKKCSREDLQTLQQLSIETFNDTFKEQNSPENMKAYLESAFNTEQLEKELSNMSSQFF | 62 |
| Query: | 77 | FVYLDTDLVGYLKVNWGSQQTEKDLDKAFEIQRIYLLDAYQGQGIGKATFEFALDLAYKS | 136 |
| | | F+Y D ++ GY+KVN Q+E+ ++ EI+RIY+ +++Q G+GK A+++A + | |
| Sbjct: | 63 | FIYFDHEIAGYVKVNIDDAQSEEMGAESLEIERIYIKNSFQKHGLGKHLLNKAIEIALER | 122 |
| Query: | 137 | GLDWAWLGVWEFNHKAQAFYAKYGFEKFSEHQFSVGDKVDTDWLLRKSL | 185 |
| | | WLGVWE N A AFY K GF + H F +GD+ TD ++ K+L | |
| Sbjct: | 123 | NKKNIWLGVWEKNENAIAFYKKMGFVQTGAHSFYMGDEEQTDLIMAKTL | 171 |

[7731] No corresponding DNA sequence was identified in S. pyogenes.

[7732] Based on this analysis, it was predicted that these proteins and their epitopes could be useful antigens for vaccines or diagnostics.

### EXAMPLE 1403

[7733] A DNA sequence (GBSx1488) was identified in S. agalactiae <SEQ ID 4307> which encodes the amino acid sequence <SEQ ID 4308>. This protein is predicted to be phenylalanyl-tRNA synthetase (alpha subunit) (pheS). Analysis of this protein sequence reveals the following:

```
Possible site: 45
>>> Seems to have no N-terminal signal sequence
----- Final Results -----
                            bacterial cytoplasm --- Certainty = 0.3937(Affirmative) < succ>
                              bacterial membrane --- Certainty = 0.0000(Not Clear) < succ>
                                bacterial outside --- Certainty = 0.0000(Not Clear) < succ>
```

[7734] A related GBS nucleic acid sequence <SEQ ID 9339> which encodes amino acid sequence <SEQ ID 9340> was also identified.

[7735] The protein has homology with the following sequences in the GENPEPT database.

| >GP: CAB14824 GB: Z99118 phenylalanyl-tRNA synthetase (alpha subunit) | | | |
|---|---|---|---|
| [Bacillus subtilis] | | | |
| Identities = 209/338 (61%), Positives = 270/338 (79%), Gaps = 2/338 (0%) | | | |
| Query: | 1 | MKISTQEKLKEM-TGNHTKELQDLRVQVLGKKGSLTELLKGLKDLSNDLRPVVGKQVNEV | 59 |
| | | +K QE L+++ + K + D+RVQ LGKKG +TE+L+G+ LS + RP +G NEV | |
| Sbjct: | 5 | LKQLEQEALEQVEAASSLKVVNDIRVQYLGKKGPITEVLRGMGKLSAEERPKMGALANEV | 64 |
| Query: | 60 | RDILTKAFEEQAKVVEAAKIQAQLESESVDVTLPGRQMTLGHRHVLTQTSEEIEDIFLGM | 119 |
| | | R+ + A ++ + +E +++ +L +++DVTLPG + +G RH LT EEIED+F+GM | |
| Sbjct: | 65 | RERIANAIADKNEKLEEEEMKQKLAGQTIDVTLPGNPVAVGGRHPLTVVIEEIEDLFIGM | 124 |
| Query: | 120 | GFQVVDGFEVEKDYYNFERMNLPKDHPARDMQDTFYITEEILLRTHTSPVQARTMDQHDF | 179 |
| | | G+ V +G EVE DYYNFE +NLPK+HPARDMQD+FYITEE L+RT TSPVQ RTM++H+ | |
| Sbjct: | 125 | GYTVEEGPEVETDYYNFESLNLPKEHPARDMQDSFYITEETLMRTQTSPVQTRTMEKHE- | 183 |
| Query: | 180 | SKGPLKMISPGRVFRRDTDDATHSHQFHQIEGLVVGENISMGDLKGTLQLISQKMFGAER | 239 |
| | | KGP+K+I PG+V+RRD DDATHSHQF QIEGLVV +NISM DLKGTL+L+++KMFG +R | |
| Sbjct: | 184 | GKGPVKIICPGKVYRRDNDDATHSHQFMQIEGLVVDKNISMSDLKGTLELVAKKMFGQDR | 243 |
| Query: | 240 | KIRLRPSYFPFTEPSVEVDVSCFKCGGKGCNVCKQTGWIEILGAGMVHPSVLEMSGIDSE | 299 |
| | | +IRLRPS+FPFTEPSVEVDV+CFKCGG GC+VCK TGWIEILGAGMVHP+VL+M+G D + | |
| Sbjct: | 244 | EIRLRPSFFPFTEPSVEVDVTCFKCGGNGCSVCKGTGWIEILGAGMVHPNVLKMAGFDPK | 303 |
| Query: | 300 | KYSGFAFGLGQERIAMLRYGINDIRGFYQGDVRFTDQF | 337 |
| | | +Y GFAFG+G ERIAML+YGI+DIR FY DVRF QF | |
| Sbjct: | 304 | EYQGFAFGMGVERIAMLKYGIDDIRHFYTNDVRFISQF | 341 |

[7736] A related DNA sequence was identified in S. pyogenes <SEQ ID 4309> which encodes the amino acid sequence <SEQ ID 4310>. Analysis of this protein sequence reveals the following:

```
Possible site: 19
>>> Seems to have no N-terminal signal sequence
----- Final Results -----
                            bacterial cytoplasm --- Certainty = 0.2806(Affirmative) < succ>
                              bacterial membrane --- Certainty = 0.0000(Not Clear) < succ>
                                bacterial outside --- Certainty = 0.0000(Not Clear) < succ>
```

[7737] An alignment of the GAS and GBS proteins is shown below.

| Identities = 305/337 (90%), Positives = 327/337 (96%) | | | |
|---|---|---|---|
| Query: | 1 | MKISTQEKLKEMTGNHTKELQDLRVQVLGKKGSLTELLKGLKDLSNDLRPVVGKQVNEVR | 60 |
| | | +K T E L+ +TGNHTKELQDLRV VLGKKGSLTELLKGLKDLSNDLRPVVGKQVNEVR | |
| Sbjct: | 36 | LKTKTLETLQSLTGNHTKELQDLRVAVLGKKGSLTELLKGLKDLSNDLRPVVGKQVNEVR | 95 |
| Query: | 61 | DILTKAFEEQAKVVEAAKIQAQLESESVDVTLPGRQMTLGHRHVLTQTSEEIEDIFLGMG | 120 |
| | | D+LTKAFEEQAK+VEAAKIQAQL++ES+DVTLPGRQMTLGHRHVLTQTSEEIEDIFLGMG | |
| Sbjct: | 96 | DLLTKAFEEQAKIVEAAKIQAQLDAESIDVTLPGRQMTLGHRHVLTQTSEEIEDIFLGMG | 155 |
| Query: | 121 | FQVVDGFEVEKDYYNFERMNLPKDHPARDMQDTFYITEEILLRTHTSPVQARTMDQHDFS | 180 |
| | | FQ+VDGFEVEKDYYNFERMNLPKDHPARDMQDTFYITEEILLRTHTSPVQAPT+DQHDFS | |
| Sbjct: | 156 | FQIVDGFEVEKDYYNFERMNLPKDHPARDMQDTFYITEEILLRTHTSPVQARTLDQHDFS | 215 |
| Query: | 181 | KGPLKMISPGRVFRRDTDDATHSHQFHQIEGLVVGENISMGDLKGTLQLISQKMFGAERK | 240 |
| | | KGPLKM+SPGRVFRRDTDDATHSHQFHQIEGLVVG+NISMGDLKGTL++I +KMFG ER | |
| Sbjct: | 216 | KGPLKMVSPGRVFRRDTDDATHSHQFHQIEGLVVGKNISMGDLKGTLEMIIKKMFGDERS | 275 |
| Query: | 241 | IRLRPSYFPFTEPSVEVDVSCFKCGGKGCNVCKQTGWIEILGAGMVHPSVLEMSGIDSEK | 300 |
| | | IRLRPSYFPETEPSVEVDVSCFKCGGKGCNVCK+TGWIEILGAGMVHPSVLEMSG+D+++ | |
| Sbjct: | 276 | IRLRPSYFPFTEPSVEVDVSCFKCGGKGCNVCKKTGWIEILGAGMVHPSVLEMSGVDAKE | 335 |
| Query: | 301 | YSGFAFGLGQERIAMLRYGINDIRGFYQGDVRFTDQF | 337 |
| | | YSGFAFGLGQERIAMLRYGINDIRGFYQGD RF++QF | |
| Sbjct: | 336 | YSGFAFGLGQERIAMLRYGINDIRGFYQGDQRFSEQF | 372 |

[7738] Based on this analysis, it was predicted that these proteins and their epitopes could be useful antigens for vaccines or diagnostics.

### EXAMPLE 1404

[7739] A DNA sequence (GBSx1489) was identified in S. agalactiae <SEQ ID 4311> which encodes the amino acid sequence <SEQ ID 4312>. Analysis of this protein sequence reveals the following:

```
Possible site: 13
>>> Seems to have no N-terminal signal sequence
----- Final Results -----
                            bacterial cytoplasm --- Certainty = 0.2834(Affirmative) < succ>
                              bacterial membrane --- Certainty = 0.0000(Not Clear) < succ>
                                bacterial outside --- Certainty = 0.0000(Not Clear) < succ>
```

[7740] The protein has no significant homology with any sequences in the GENPEPT database.

[7741] No corresponding DNA sequence was identified in S. pyogenes.

[7742] Based on this analysis, it was predicted that this protein and its epitopes, could be useful antigens for vaccines or diagnostics.

### EXAMPLE 1405

[7743] A DNA sequence (GBSx1490) was identified in S. agalactiae <SEQ ID 4313> which encodes the amino acid sequence <SEQ ID 4314>. Analysis of this protein sequence reveals the following:

```
Possible site: 18
>>> Seems to have no N-terminal signal sequence
----- Final Results -----
                            bacterial cytoplasm --- Certainty = 0.2762(Affirmative) < succ>
                              bacterial membrane --- Certainty = 0.0000(Not Clear) < succ>
                                bacterial outside --- Certainty = 0.0000(Not Clear) < succ>
```

[7744] The protein has no significant homology with any sequences in the GENPEPT database.

[7745] No corresponding DNA sequence was identified in S. pyogenes.

[7746] Based on this analysis, it was predicted that this protein and its epitopes, could be useful antigens for vaccines or diagnostics.

### EXAMPLE 1406

[7747] A DNA sequence (GBSx1491) was identified in S. agalactiae <SEQ ID 4315> which encodes the amino acid sequence <SEQ ID 4316>. This protein is predicted to be DNA-entry nuclease. Analysis of this protein sequence reveals the following:

```
Possible site: 13
>>> Seems to have an uncleavable N-term signal seq
----- Final Results -----
                              bacterial membrane --- Certainty = 0.0000(Not Clear) < succ>
                                bacterial outside --- Certainty = 0.0000(Not Clear) < succ>
                            bacterial cytoplasm --- Certainty = 0.0000(Not Clear) < succ>
```

[7748] A related GBS nucleic acid sequence <SEQ ID 8801> which encodes amino acid sequence <SEQ ID 8802> was also identified. Analysis of this protein sequence reveals the following:

| Lipop Possible site: −1 Crend: 5 | | | | |
|---|---|---|---|---|
| McG: Discrim Score: 10.13 | | | | |
| GvH: Signal Score (−7.5): −5.07 | | | | |
| Possible site: 23 | | | | |
| >>> Seems to have an uncleavable N-term signal seq | | | | |
| ALOM program count: 1 value: −6.79 threshold: 0.0 | | | | |
| | INTEGRAL | Likelihood = −6.79 | Transmembrane | 8-24 (6-27) |
| | PERIPHERAL | Likelihood = 6.26 | 258 | |

```
modified ALOM score: 1.86
*** Reasoning Step: 3
----- Final Results -----
                              bacterial membrane --- Certainty = 0.3718(Affirmative) < succ>
                                bacterial outside --- Certainty = 0.0000(Not Clear) < succ>
                            bacterial cytoplasm --- Certainty = 0.0000(Not Clear) < succ>
```

[7749] The protein has homology with the following sequences in the GENPEPT database.

| >GP: CAA38134 GB: X54225 membrane nuclease [Streptococcus pneumoniae] | | | |
|---|---|---|---|
| Identities = 154/232 (66%), Positives = 180/232 (77%), Gaps = 1/232 (0%) | | | |
| Query: | 41 | KNVSGTPSRELSESVLTSNVKKQLGTNIAWNQSGAFIINQNKTDLNAKVSSAPYAINEIK | 100 |
| | | K S PS+ L+ESVLT VK Q+ ++ WN SGAFI+N NKT+L+AKVSS PYA N+ K | |
| Sbjct: | 43 | KQASEAPSQALAESVLTDAVKSQIKGSLEWNGSGAFIVNGNKTNLDAKVSSKPYADNKTK | 102 |
| Query: | 101 | KVNNQIVPTKANALLTKATRQYRNREETGNGRTYWKPAGWHQINGLKGSYNHAVDRGHLI | 160 |
| | | V + VPT ANALL+KATRQY+NR+ETGNG T W P GWHQ+ LKGSY HAVDRGHL+ | |
| Sbjct: | 103 | TVGKETVPTVANALLSKATRQYKNRKETGNGSTSWTPPGWHQVKNLKGSYTHAVDRGHLL | 162 |
| Query: | 161 | GYALVGSLRGFDASTSNPKNIATQAAWANQANSNQSTGQNYYETLVRKALDRHKTVRYRV | 220 |
| | | GYAL+G L GFDASTSNPKNIA Q AWANQA + STGQNYYE+ VRKALD++K VRYRV | |
| Sbjct: | 163 | GYALIGGLDGFDASTSNPKNIAVQTAWANQAQAEYSTGQNYYESKVRKALDQNKRVRYRV | 222 |
| Query: | 221 | TLIY-DRDNLLSSGSHIEAKSSDGSLEFNVFIPNVQSGLLFDYATGKVKQTK | 271 |
| | | TL Y ++L+ S S IEAKSSDG LEFNV +PNVQ GL DY TG+V T+ | |
| Sbjct: | 223 | TLYYASNEDLVPSASQIEAKSSDGELEFNVLVPNVQKGLQLDYRTGEVTVTQ | 274 |

[7750] There is also homology to SEQ IDs 368 and 1302.

[7751] SEQ ID 8802 (GBS285) was expressed in E. coli as a His-fusion product. SDS-PAGE analysis of total cell extract is shown in FIG. 56 (lane 6; MW 32 kDa). It was also expressed in E. coli as a GST-fusion product. SDS-PAGE analysis of total cell extract is shown in FIG. 60 (lane 7; MW 57.5 kDa).

[7752] GBS285-GST was purified as shown in FIG. 208 (lane 7) and FIG. 225 (lane 8).

[7753] GBS658 was expressed in E. coli as a GST-fusion product. SDS-PAGE analysis of total cell extract is shown in FIG. 134 (lane 8 & 9; MW 27 kDa).

[7754] Based on this analysis, it was predicted that this protein and its epitopes, could be useful antigens for vaccines or diagnostics.

### EXAMPLE 1407

[7755] A DNA sequence (GBSx1492) was identified in S. agalactiae <SEQ ID 4317> which encodes the amino acid sequence <SEQ ID 4318>. Analysis of this protein sequence reveals the following:

```
Possible site: 27
>>> Seems to have a cleavable N-term signal seq.
----- Final Result -----
                                bacterial outside --- Certainty = 0.3000(Affirmative) < succ>
                              bacterial membrane --- Certainty = 0.0000(Not Clear) < succ>
                            bacterial cytoplasm --- Certainty = 0.0000(Not Clear) < succ>
```

[7756] The protein has no significant homology with any sequences in the GENPEPT database.

[7757] No corresponding DNA sequence was identified in S. pyogenes.

[7758] Based on this analysis, it was predicted that this protein and its epitopes, could be useful antigens for vaccines or diagnostics.

### EXAMPLE 1408

[7759] A DNA sequence (GBSx1493) was identified in S. agalactiae <SEQ ID 4319> which encodes the amino acid sequence <SEQ ID 4320>. This protein is predicted to be UDP-N-acetylglucosamine (murA). Analysis of this protein sequence reveals the following:

```
Possible site: 43
>>> Seems to have no N-terminal signal sequence
----- Final Results -----
                            bacterial cytoplasm --- Certainty = 0.1814(Affirmative) < succ>
                              bacterial membrane --- Certainty = 0.0000(Not Clear) < succ>
                                bacterial outside --- Certainty = 0.0000(Not Clear) < succ>
```

[7760] A related GBS nucleic acid sequence <SEQ ID 9767> which encodes amino acid sequence <SEQ ID 9768> was also identified.

[7761] The protein has homology with the following sequences in the GENPEPT database.

| >GP: CAB15693 GB: Z99122 UDP-N-acetylglucosamine | | | |
|---|---|---|---|
| 1-carboxyvinyltransferase [Bacillus subtilis] | | | |
| Identities = 248/423 (58%), Positives = 323/423 (75%), Gaps = 5/423 (1%) | | | |
| Query: | 5 | MDKIIVEGGQTQLQGQVVIEGAKNAVLPLLAATILPSQGKTLLTNVPILSDVFTMNNVVR | 64 |
| | | M+KIIV GGQ +L G V +EGAKNAVLP++AA++L S+ K+++ +VP LSDV+T+N V+R | |
| Sbjct: | 1 | MEKIIVRGGQ-KLNGTVKVEGAKNAVLPVIAASLLASEEKSVICDVPTLSDVYTINEVLR | 59 |
| Query: | 65 | GLDIQVDFNCDKKEILVDASGDILDVAPYEFVSQMRASIVVLGPILARNGHAKVSMPGGC | 124 |
| | | L V F + E+ V+AS + AP+E+V +MRAS++V+GP+LAR GHA+V++PGGC | |
| Sbjct: | 60 | HLGADVHF--ENNEVTVNASYALQTEAPFEYVRKMRASVLVMGPLLARTGHARVALPGGC | 117 |
| Query: | 125 | TIGSRPIDLHLKGLEAMGATITQNGGDITAQAE-KLKGANIYMDFPSVGATQNLMMAATL | 183 |
| | | IGSRPID HLKG EAMGA I G I A+ + +L+GA IY+DFPSVGAT+NL+MAA L | |
| Sbjct: | 118 | AIGSRPIDQHLKGFEAMGAEIKVGNGFIEAEVKGRLQGAKIYLDFPSVGATENLIMAAAL | 177 |
| Query: | 184 | ASGTTTIENAAREPEIVDLAQLLNKMGAKVKGAGTETLTIIGVDALHGTEHDVVQDRIEA | 243 |
| | | A GTTT+EN A+EPEIVDLA +N MG K++GAGT T+ I GV+ LHG +H ++ DRIEA | |
| Sbjct: | 178 | AEGTTTLENVAKEPEIVDLANYINGMGGKIRGAGTGTIKIEGVEKLHGVKHHIIPDRIEA | 237 |
| Query: | 244 | GTFMVAAAMTSGNVLVKDAIWEHNRPLISKLMEMGVEVSEEEDGIRVKADTKKLKPVTVK | 303 |
| | | GTFMVAAA+T GNVLVK A+ EH LI+K+ EMGV + +E +G+RV K+LKP+ +K | |
| Sbjct: | 238 | GTFMVAAAITEGNVLVKGAVPEHLTSLIAKMEEMGVTIKDEGEGLRV-IGPKELKPIDIK | 296 |
| Query: | 304 | TLPHPGFPTDMQAQFTALMAVVNGESTMIETVFENRFQHLEEMRRMGLQTEILRDTAMIH | 363 |
| | | T+PHPGFPTDMQ+Q AL+ +G S + ETVFENRF H EE RRM +I + +I+ | |
| Sbjct: | 297 | TMPHPGFPTDMQSQMMALLLRASGTSMITETVFENRFMHAEEFRRMNGDIKIEGRSVIIN | 356 |
| Query: | 364 | GGRALQGAPVMSTDLRASAALILAGMVAQGQTVVGQLTHLDRGYYQFHEKLAALGANIKR | 423 |
| | | G LQGA V +TDLRA AALILAG+VA+G T V +L HLDRGY FH+KLAALGA+I+R | |
| Sbjct: | 357 | GPVQLQGAEVAATDLRAGAALILAGLVAEGHTRVTELKHLDRGYVDFHQKLAALGADIER | 416 |
| Query: | 424 | VSE | 426 |
| | | V++ | |
| Sbjct: | 417 | VND | 419 |

[7762] A related DNA sequence was identified in S. pyogenes <SEQ ID 4321> which encodes the amino acid sequence <SEQ ID 4322>. Analysis of this protein sequence reveals the following:

| Possible site: 39 | | | | |
|---|---|---|---|---|
| >>> Seems to have no N-terminal signal sequence | | | | |
| | INTEGRAL | Likelihood = −3.03 | Transmembrane | 377-393 (376-394) |

```
----- Final Results -----
                              bacterial membrane --- Certainty = 0.2211(Affirmative) < succ>
                                bacterial outside --- Certainty = 0.0000(Not Clear) < succ>
                            bacterial cytoplasm --- Certainty = 0.0000(Not Clear) < succ>
```

[7763] The protein has homology with the following sequences in the databases:

| >GP: CAB15693 GB: Z99122 UDP-N-acetylglucosamine | | | |
|---|---|---|---|
| 1-carboxyvinyltransferase [Bacillus subtilis] | | | |
| Identities = 248/423 (58%), Positives = 318/423 (74%), Gaps = 5/423 (1%) | | | |
| Query: | 1 | VDKIIIEGGQTRLEGEVVIEGAKNAVLPLLAASILPSKGKTILRNVPILSDVFTMNNVVR | 60 |
| | | ++KII+ GGQ +L G V +EGAKNAVLP++AAS+L S+ K+++ +VP LSDV+T+N V+R | |
| Sbjct: | 1 | MEKIIVRGGQ-KLNGTVKVEGAKNAVLPVIAASLLASEEKSVICDVPTLSDVYTINEVLR | 59 |
| Query: | 61 | GLDIRVDFNEAANEITVDASGHILDEAPYEYVSQMRASIVVLGPILARNGHAKVSMPGGC | 120 |
| | | L V F NE+TV+AS + EAP+EYV +MRAS++V+GP+LAR GHA+V++PGGC | |
| Sbjct: | 60 | HLGADVHFEN--NEVTVNASYALQTEAPFEYVRKMRASVLVMGPLLARTGHARVALPGGC | 117 |
| Query: | 121 | TIGSRPINLHLKGLEAMGATITQKGGDITAQAD-RLQGAMIYMDFPSVGATQNLMMAATL | 179 |
| | | IGSRPI+ HLKG EAMGA I G I A+ RLQGA IY+DFPSVGAT+NL+MAA L | |
| Sbjct: | 118 | AIGSRPIDQHLKGFEAMGAEIKVGNGFIEAEVKGRLQGAKIYLDFPSVGATENLIMAAAL | 177 |
| Query: | 180 | ADGVTTIENAAREPEIVDLAQFLNKMGARIRGAGTETLTITGVTHLRGVEHDVVQDRIEA | 239 |
| | | A+G TT+EN A+EPEIVDLA ++N MG +IRGAGT T+ I GV L GV+H ++ DRIEA | |
| Sbjct: | 178 | AEGTTTLENVAKEPEIVDLANYINGMGGKIRGAGTGTIKIEGVEKLHGVKHHIIPDRIEA | 237 |
| Query: | 240 | GTFMVAAAMTSGNVLIRDAVWEHNRPLISKLMEMGVSVTEEEYGIRVQANTPKLKPVTVK | 299 |
| | | GTFMVAAA+T GNVL++ AV EH LI+K+ EMGV++ +E G+RV +LKP+ +K | |
| Sbjct: | 238 | GTFMVAAAITEGNVLVKGAVPEHLTSLIAKMEEMGVTIKDEGEGLRV-IGPKELKPIDIK | 296 |
| Query: | 300 | TLPHPGFPTDMQAQFTALMAVVNGESTMVETVFENRFQHLEEMRRMGLQSEILRETAMIH | 359 |
| | | T+PHPGFPTDMQ+Q AL+ +G S + ETVFENRF H EE RRM +I + +I+ | |
| Sbjct: | 297 | TMPHPGFPTDMQSQMMALLLRASGTSMITETVFENRFMHAEEFRRMNGDIKIEGRSVIIN | 356 |
| Query: | 360 | GGRQLQGAPVMSTDLRASAALILTGIVAQGVTIVNNLVHLDRGYYQFHEKLAKLGATISR | 419 |
| | | G QLQGA V +TDLRA AALIL G+VA+G T V L HLDRGY FH+KLA LGA I R | |
| Sbjct: | 357 | GPVQLQGAEVAATDLRAGAALILAGLVAEGHTRVTELKHLDRGYVDFHQKLAALGADIER | 416 |
| Query: | 420 | SSE | 422 |
| | | ++ | |
| Sbjct: | 417 | VND | 419 |

[7764] An alignment of the GAS and GBS proteins is shown below.

| Identities = 363/422 (86%), Positives = 391/422 (92%) | | | |
|---|---|---|---|
| Query: | 5 | MDKIIVEGGQTQLQGQVVIEGAKNAVLPLLAATILPSQGKTLLTNVPILSDVFTMNNVVR | 64 |
| | | +DKII+EGGQT+L+G+VVIEGAKNAVLPLLAA+ILPS+GKT+L NVPILSDVFTMNNVVR | |
| Sbjct: | 1 | VDKIIIEGGQTRLEGEVVIEGAKNAVLPLLAASILPSKGKTILRNVPILSDVFTMNNVVR | 60 |
| Query: | 65 | GLDIQVDFNCDKKEILVDASGDILDVAPYEFVSQMRASIVVLGPILARNGHAKVSMPGGC | 124 |
| | | GLDI+VDFN EI VDASG ILD APYE+VSQMRASIVVLGPILARNGHAKVSMPGGC | |
| Sbjct: | 61 | GLDIRVDFNEAANEITVDASGHILDEAPYEYVSQMRASIVVLGPILARNGHAKVSMPGGC | 120 |
| Query: | 125 | TIGSRPIDLHLKGLEAMGATITQNGGDITAQAEKLKGANIYMDFPSVGATQNLMMAATLA | 184 |
| | | TIGSRPI+LHLKGLEAMGATITQ GGDITAQA++L+GA IYMDFPSVGATQNLMMAATLA | |
| Sbjct: | 121 | TIGSRPINLHLKGLEAMGATITQKGGDITAQADRLQGAMIYMDFPSVGATQNLMMAATLA | 180 |
| Query: | 185 | SGTTTIENAAREPEIVDLAQLLNKMGAKVKGAGTETLTIIGVDALHGTEHDVVQDRIEAG | 244 |
| | | G TTIENAAREPEIVDLAQ LNKMGA+++GAGTETLTI GV L G EHDVVQDRIEAG | |
| Sbjct: | 181 | DGVTTIENAAREPEIVDLAQFLNKMGARIRGAGTETLTITGVTHLRGVEHDVVQDRIEAG | 240 |
| Query: | 245 | TFMVAAAMTSGNVLVKDAIWEHNRPLISKLMEMGVEVSEEEDGIRVKADTKKLKPVTVKT | 304 |
| | | TFMVAAAMTSGNVL++DA+WEHNRPLISKLMEMGV V+EEE GIRV+A+T KLKPVTVKT | |
| Sbjct: | 241 | TFMVAAAMTSGNVLIRDAVWEHNRPLISKLMEMGVSVTEEEYGIRVQANTPKLKPVTVKT | 300 |
| Query: | 305 | LPHPGFPTDMQAQFTALMAVVNGESTMIETVFENRFQHLEEMRRMGLQTEILRDTAMIHG | 364 |
| | | LPHPGFPTDMQAQFTALMAVVNGESTM+ETVFENRFQHLEEMRRMGLQ+EILR+TAMIHG | |
| Sbjct: | 301 | LPHPGFPTDMQAQFTALMAVVNGESTMVETVFENRFQHLEEMRRMGLQSEILRETAMIHG | 360 |
| Query: | 365 | GRALQGAPVMSTDLRASAALILAGMVAQGQTVVGQLTHLDRGYYQFHEKLAALGANIKRVSE | 426 |
| | | GR LQGAPVMSTDLRASAALIL G+VAQG T+V L HLDRGYYQFHEKLA LGA I RSSE | |
| Sbjct: | 361 | GRQLQGAPVMSTDLRASAALILTGIVAQGVTIVNNLVHLDRGYYQFHEKLAKLGATISRSSE | 422 |

[7765] Based on this analysis, it was predicted that these proteins and their epitopes could be useful antigens for vaccines or diagnostics.

### EXAMPLE 1409

[7766] A DNA sequence (GBSx1494) was identified in S. agalactiae <SEQ ID 4323> which encodes the amino acid sequence <SEQ ID 4324>. Analysis of this protein sequence reveals the following:

```
Possible site: 49
>>> Seems to have no N-terminal signal sequence
----- Final Results -----
                            bacterial cytoplasm --- Certainty = 0.2096(Affirmative) < succ>
                              bacterial membrane --- Certainty = 0.0000(Not Clear) < succ>
                                bacterial outside --- Certainty = 0.0000(Not Clear) < succ>
```

[7767] The protein has homology with the following sequences in the GENPEPT database.

| >GP: BAA23756 GB: AB009314 proton-translocating ATPase, epsiron | | | |
|---|---|---|---|
| subunit [Streptococcus bovis] | | | |
| Identities = 102/138 (73%), Positives = 121/138 (86%), Gaps = 1/138 (0%) | | | |
| Query: | 1 | MAQLTVQVVTPDGIRYDHHASLITVRTPDGEMGILPGHINLIAPLNVHQMKINRSHQEG- | 59 |
| | | M +TVQVVTPDGIRYDHHA+ I+V+TPDGEMGILP HINLIAPL VH+MKI+R+ | |
| Sbjct: | 1 | MTFMTVQVVTPDGIRYDHHANFISVKTPDGEMGILPEHINLIAPLTVHEMKIHRTDDPNH | 60 |
| Query: | 60 | VDWVAVNGGIIEVNEDQVTIVADSAERARDIDLNRAERAKERAERALEKAQTTQNIDEMR | 119 |
| | | VDWVA+NGGIIE+ ++ VTIVADSAER RDID++RAERAK RAER LE+AQ+T +IDE+R | |
| Sbjct: | 61 | VDWVAINGGIIEIKDNLVTIVADSAERERDIDVSRAERAKIRAERKLEQAQSTHDIDEVR | 120 |
| Query: | 120 | RAEVALRRAINRISVGKK | 137 |
| | | RA+VALRRA+NRISVG K | |
| Sbjct: | 121 | RAQVALRRALNRISVGNK | 138 |

[7768] A related DNA sequence was identified in S. pyogenes <SEQ ID 4325> which encodes the amino acid sequence <SEQ ID 4326>. Analysis of this protein sequence reveals the following:

```
Possible site: 49
>>> Seems to have no N-terminal signal sequence
----- Final Results ----
                            bacterial cytoplasm --- Certainty = 0.2539(Affirmative) < succ>
                              bacterial membrane --- Certainty = 0.0000(Not Clear) < succ>
                                bacterial outside --- Certainty = 0.0000(Not Clear) < succ>
```

[7769] An alignment of the GAS and GBS proteins is shown below.

| Identities = 100/138 (72%), Positives = 119/138 (85%), Gaps = 1/138 (0%) | | | |
|---|---|---|---|
| Query: | 1 | MAQLTVQVVTPDGIRYDHHASLITVRTPDGEMGILPGHINLIAPLNVHQMKINRSHQ-EG | 59 |
| | | M Q+TVQVVTPDGI+YDHHA I+V TPDGEMGILP HINLIAPL VH+MKI R + E | |
| Sbjct: | 1 | MTQMTVQVVTPDGIKYDHHAKFISVTTPDGEMGILPNHINLIAPLQVHEMKIRRGGEDEK | 60 |
| Query: | 60 | VDWVAVNGGIIEVNEDQVTIVADSAERARDIDLNRAERAKERAERALEKAQTTQNIDEMR | 119 |
| | | VDW+A+NGGIIE+ ++ VTIVADSAER RDID++RAERAK RAER + +A+TT NIDE+R | |
| Sbjct: | 61 | VDWIAINGGIIEIKDNVVTIVADSAERDRDIDVSRAERAKLRAEREIAQAETTHNIDEVR | 120 |
| Query: | 120 | RAEVALRRAINRISVGKK | 137 |
| | | RA+VALRRA+NRI+V KK | |
| Sbjct: | 121 | RAKVALRRALNRINVSKK | 138 |

[7770] Based on this analysis, it was predicted that these proteins and their epitopes could be useful antigens for vaccines or diagnostics.

### EXAMPLE 1410

[7771] A DNA sequence (GBSx1495) was identified in S. agalactiae <SEQ ID 4327> which encodes the amino acid sequence <SEQ ID 4328>. Analysis of this protein sequence reveals the following:

```
Possible site: 60
>>> Seems to have an uncleavable N-term signal seq
----- Final Results -----
                              bacterial membrane --- Certainty = 0.0000(Not Clear) < succ>
                                bacterial outside --- Certainty = 0.0000(Not Clear) < succ>
                            bacterial cytoplasm --- Certainty = 0.0000(Not Clear) < succ>
```

[7772] The protein is similar to the beta subunit of the S. mutans ATPase:

| >GP: AAD13383 GB: U31170 ATPase, beta subunit [Streptococcus mutans] | | | |
|---|---|---|---|
| Identities = 435/466 (93%), Positives = 455/466 (97%) | | | |
| Query: | 1 | MSSGKIAQVVGPVVDVVFASGDKLPEINNALIVYKNGDKSQKVVLEVALELGDGLVRTIA | 60 |
| | | MS+GKIAQVVGPVVDV FA+ DKLPEINNAL+VYK+GDKSQ++VLEVALELGDGLVRTIA | |
| Sbjct: | 1 | MSTGKIAQVVGPVVDVAFATDDKLPEINNALVVYKDGDKSQRIVLEVALELGDGLVRTIA | 60 |
| Query: | 61 | MESTDGLTRGLEVLDTGRAISVPVGKDTLGRVFNVLGDAIDLEEPFAEDAERQPIHKKAP | 120 |
| | | MESTDGLTRGLEV DTGRAISVPVGK+TLGRVFNVLGD IDL++PFAEDAERQPIHKKAP | |
| Sbjct: | 61 | MESTDGLTRGLEVFDTGRAISVPVGKETLGRVFNVLGDTIDLDKPFAEDAERQPIHKKAP | 120 |
| Query: | 121 | SFDELSTSSEILETGIKVIDLLAPYLKGGKVGLFGGAGVGKTVLIQELIHNIAQEHGGIS | 180 |
| | | SFD+LSTS+EILETGIKVIDLLAPYLKGGKVGLFGGAGVGKTVLIQELIHNIAQEHGGIS | |
| Sbjct: | 121 | SFDDLSTSTEILETGIKVIDLLAPYLKGGKVGLFGGAGVGKTVLIQELIHNIAQEHGGIS | 180 |
| Query: | 181 | VFTGVGERTREGNDLYWEMKESGVIEKTAMVFGQMNEPPGARMRVALTGLTIAEYFRDVE | 240 |
| | | VFTGVGERTREGNDLYWEMKESGVIEKTAMVFGQMNEPPGARMRVALTGLTIAEYFRDVE | |
| Sbjct: | 181 | VFTGVGERTREGNDLYWEMKESGVIEKTAMVFGQMNEPPGARMRVALTGLTIAEYFRDVE | 240 |
| Query: | 241 | GQDVLLFIDNIFRFTQAGSEVSALLGRMPSAVGYQPTLATEMGQLQERITSTKKGSVTSI | 300 |
| | | GQDVLLFIDNIFRFTQAGSEVSALLGRMPSAVGYQPTLATEMGQLQERITSTKKGSVTSI | |
| Sbjct: | 241 | GQDVLLFIDNIFRFTQAGSEVSALLGRMPSAVGYQPTLATEMGQLQERITSTKKGSVTSI | 300 |
| Query: | 301 | QAIYVPADDYTDPAPATAFAHLDSTTNLERKLTQMGIYPAVDPLASSSRALTPEIVGDEH | 360 |
| | | QAIYVPADDYTDPAPATAFAHLDSTTNLER+LTQMGIYPAVDPLASSSRAL+PEIVG EH | |
| Sbjct: | 301 | QAIYVPADDYTDPAPATAFAHLDSTTNLERRLTQMGIYPAVDPLASSSRALSPEIVGQEH | 360 |
| Query: | 361 | YEVATEVQRVLQRYRELQDIIAILGMDELSDEEKTLVGRARRIQFFLSQNFNVAETFTGQ | 420 |
| | | Y+VATEVQ VLQRYRELQDIIAILGMDELSDEEKTLVGRARRIQFFLSQNFNVAE FTGQ | |
| Sbjct: | 361 | YDVATEVQHVLQRYRELQDIIAILGMDELSDEEKTLVGRARRIQFFLSQNFNVAEQFTGQ | 420 |
| Query: | 421 | PGSYVPVEETVRGFKEILDGKHDQIPEDAFRMVGGIEDVIAKAEKM | 466 |
| | | PGSYVPV ETVRGFKEIL+GK+D++PEDAFR VG IEDV+ KA+KM | |
| Sbjct: | 421 | PGSYVPVAETVRGFKEILEGKYDELPEDAFRSVGAIEDVVEKAKKM | 466 |

[7773] A related DNA sequence was identified in S. pyogenes <SEQ ID 4329> which encodes the amino acid sequence <SEQ ID 4330>. Analysis of this protein sequence reveals the following:

```
Possible site: 60
>>> Seems to have no N-terminal signal sequence
----- Final Results -----
                            bacterial cytoplasm --- Certainty = 0.0275(Affirmative) < succ>
                              bacterial membrane --- Certainty = 0.0000(Not Clear) < succ>
                                bacterial outside --- Certainty = 0.0000(Not Clear) < succ>
```

[7774] An alignment of the GAS and GBS proteins is shown below.

| Identities = 440/468 (94%), Positives = 456/468 (97%) | | | |
|---|---|---|---|
| Query: | 1 | MSSGKIAQVVGPVVDVVFASGDKLPEINNALIVYKNGDKSQKVVLEVALELGDGLVRTIA | 60 |
| | | MSSGKIAQVVGPVVDV+FASGDKLPEINNALIVYK+ DK QK+VLEVALELGDG+VRTIA | |
| Sbjct: | 1 | MSSGKIAQVVGPVVDVMFASGDKLPEINNALIVYKDSDKKQKIVLEVALELGDGMVRTIA | 60 |
| Query: | 61 | MESTDGLTRGLEVLDTGRAISVPVGKDTLGRVFNVLGDAIDLEEPFAEDAERQPIHKKAP | 120 |
| | | MESTDGLTRGLEVLDTGRAISVPVGK+TLGRVFNVLG+IDLEEPFAED +RQPIHKKAP | |
| Sbjct: | 61 | MESTDGLTRGLEVLDTGRAISVPVGKETLGRVFNVLGETIDLEEPFAEDVDRQPIHKKAP | 120 |
| Query: | 121 | SFDELSTSSEILETGIKVIDLLAPYLKGGKVGLFGGAGVGKTVLIQELIHNIAQEHGGIS | 180 |
| | | SFDELSTSSEILETGIKVIDLLAPYLKGGKVGLFGGAGVGKTVLIQELIHNIAQEHGGIS | |
| Sbjct: | 121 | SFDELSTSSEILETGIKVIDLLAPYLKGGKVGLFGGAGVGKTVLIQELIHNIAQEHGGIS | 180 |
| Query: | 181 | VFTGVGERTREGNDLYWEMKESGVIEKTAMVFGQMNEPPGARMRVALTGLTIAEYFRDVE | 240 |
| | | VFTGVGERTREGNDLYWEMKESGVIEKTAMVFGQMNEPPGARMRVALTGLTIAEYFRDVE | |
| Sbjct: | 181 | VFTGVGERTREGNDLYWEMKESGVIEKTAMVFGQMNEPPGARMRVALTGLTIAEYFRDVE | 240 |
| Query: | 241 | GQDVLLFIDNIFRFTQAGSEVSALLGRMPSAVGYQPTLATEMGQLQERITSTKKGSVTSI | 300 |
| | | GQDVLLFIDNIFRFTQAGSEVSALLGRMPSAVGYQPTLATEMGQLQERITST+KGSVTSI | |
| Sbjct: | 241 | GQDVLLFIDNIFRFTQAGSEVSALLGRMPSAVGYQPTLATEMGQLQERITSTQKGSVTSI | 300 |
| Query: | 301 | QAIYVPADDYTDPAPATAFAHLDSTTNLERKLTQMGIYPAVDPLASSSRALTPEIVGDEH | 360 |
| | | QAIYVPADDYTDPAPATAFAHLDSTTNLERKLTQMGIYPAVDPLASSSRAL+PEIVG+EH | |
| Sbjct: | 301 | QAIYVPADDYTDPAPATAFAHLDSTTNLERKLTQMGIYPAVDPLASSSRALSPEIVGEEH | 360 |
| Query: | 361 | YEVATEVQRVLQRYRELQDIIAILGMDELSDEEKTLVGRARRIQFFLSQNFNVAETFTGQ | 420 |
| | | Y VATEVQRVLQRYRELQDIIAILGMDELSDEEKTLVGRARRIQFFLSQNFNVAE FTG | |
| Sbjct: | 361 | YAVATEVQRVLQRYRELQDIIAILGMDELSDEEKTLVGRARRIQFFLSQNFNVAEQFTGL | 420 |
| Query: | 421 | PGSYVPVEETVRGFKEILDGKHDQIPEDAFRMVGGIEDVIAKAEKMNY | 468 |
| | | PGSYVPV +TVRGFKEIL+GK+D++PEDAFR VG IEDVI KAEKM + | |
| Sbjct: | 421 | PGSYVPVADTVRGFKEILEGKYDELPEDAFRSVGPIEDVIKKAEKMGF | 468 |

[7775] Based on this analysis, it was predicted that these proteins and their epitopes could be useful antigens for vaccines or diagnostics.

### EXAMPLE 1411

[7776] A DNA sequence (GBSx1496) was identified in S. agalactiae <SEQ ID 4331> which encodes the amino acid sequence <SEQ ID 4332>. Analysis of this protein sequence reveals the following:

```
Possible site: 31
>>> Seems to have no N-terminal signal sequence
----- Final Results -----
                            bacterial cytoplasm --- Certainty = 0.1889(Affirmative) < succ>
                              bacterial membrane --- Certainty = 0.0000(Not Clear) < succ>
                                bacterial outside --- Certainty = 0.0000(Not Clear) < succ>
```

[7777] The protein has homology with the following sequences in the GENPEPT database.

| >GP: BAA23754 GB: AB009314 proton-translocating ATPase, gamma subunit | | | |
|---|---|---|---|
| [Streptococcus bovis] | | | |
| Identities = 252/293 (86%), Positives = 278/293 (94%), | | | |
| Gaps = 2/293 (0%) | | | |
| Query: | 1 | MAGSLSEIKDKILSTEKTSKITSAMQMVSSAKLVKSEQAARDFQVYASKIRQITTNLLKS | 60 |
| | | MAGSLSEIK KI+ST+KTS IT AMQMVS+AKL KSEQAA+DFQVYASKIRQITT+LLKS | |
| Sbjct: | 1 | MAGSLSEIKGKIISTQKTSHITGAMQMVSAAKLTKSEQAAKDFQVYASKIRQITTDLLKS | 60 |
| Query: | 61 | DLVSGSDNPMLSSRPVKKTGYIVITSDKGLVGGYNSKILKAMMDTITDYHTENDDYAIIS | 120 |
| | | +LV+GS NPML++RPVKKTGYIVITSDKGLVGGYNSKILKAMMD I +YH ++ +YAII+ | |
| Sbjct: | 61 | ELVNGSKNPMLAARPVKKTGYIVITSDKGLVGGYNSKILKAMMDLIEEYH-QDGNYAIIA | 119 |
| Query: | 121 | IGSVGSDFFKARGMNVSFELRGLEDQPSFDQVGKIIAQAVEMYKNELFDELYVCYNHHVN | 180 |
| | | IG +G+DFFKARGMNV FELRGLEDQPSF+QVG IIA++VEMYKNELFDELYVCYNHHVN | |
| Sbjct: | 120 | IGGIGADFFKARGMNVVFELRGLEDQPSFEQVGNIIAKSVEMYKNELFDELYVCYNHHVN | 179 |
| Query: | 181 | SLTSQVRMQQMLPIKELDAEEASEDRVITGFELEPNREVILEQLLPQYTESLIYGAIIDA | 240 |
| | | SLTSQVR+QQMLPI ELDA+EA+E+ V +GFELEPNRE+ILEQLLPQYTESLIYGAI+DA | |
| Sbjct: | 180 | SLTSQVRVQQMLPIAELDADEAAEEGV-SGFELEPNREMILEQLLPQYTESLIYGAIVDA | 238 |
| Query: | 241 | KTAEHAAGMTAMQTATDNAKNVINDLTIQYNRARQAAITQEITEIVAGANALE | 293 |
| | | KTAEHAAGMTAMQTATDNAKNVINDLTIQYNRARQAAITQEITEIVAGANALE | |
| Sbjct: | 239 | KTAEHAAGMTAMQTATDNAKNVINDLTIQYNRARQAAITQEITEIVAGANALE | 291 |

[7778] A related DNA sequence was identified in S. pyogenes <SEQ ID 4333> which encodes the amino acid sequence <SEQ ID 4334>. Analysis of this protein sequence reveals the following:

```
Possible site: 31
>>> Seems to have no N-terminal signal sequence
----- Final Results -----
                            bacterial cytoplasm --- Certainty = 0.1969(Affirmative) < succ>
                              bacterial membrane --- Certainty = 0.0000(Not Clear) < succ>
                                bacterial outside --- Certainty = 0.0000(Not Clear) < succ>
```

[7779] An alignment of the GAS and GBS proteins is shown below.

| Identities = 251/293 (85%), Positives = 275/293 (93%), Gaps = 2/293 (0%) | | | |
|---|---|---|---|
| Query: | 1 | MAGSLSEIKDKILSTEKTSKITSAMQMVSSAKLVKSEQAARDFQVYASKIRQITTNLLKS | 60 |
| | | MAGSLSEIK KI+STEKTSKITSAM+MVSSAKLVKSEQAARDFQ+YASKIRQITT+LLKS | |
| Sbjct: | 1 | MAGSLSEIKAKIISTEKTSKITSAMRMVSSAKLVKSEQAARDFQIYASKIRQITTDLLKS | 60 |
| Query: | 61 | DLVSGSDNPMLSSRPVKKTGYIVITSDKGLVGGYNSKILKAMMDTITDYHTENDDYAIIS | 120 |
| | | +L GSDNPML SRPVKKTGYIVITSDKGLVGGYNSKILK++MD IT+YH + DY IIS | |
| Sbjct: | 61 | ELTIGSDNPMLVSRPVKKTGYIVITSDKGLVGGYNSKILKSVMDMITEYHADG-DYEIIS | 119 |
| Query: | 121 | IGSVGSDFFKARGMNVSFELRGLEDQPSFDQVGKIIAQAVEMYKNELFDELYVCYNHHVN | 180 |
| | | IGSVGSDFFKARGMNV+FELRGL DQPSF+QV +II+Q+V+M+ NE+FDELYVCYNHHVN | |
| Sbjct: | 120 | IGSVGSDFFKARGMNVAFELRGLADQPSFEQVRQIISQSVDMFVNEIFDELYVCYNHHVN | 179 |
| Query: | 181 | SLTSQVRMQQMLPIKELDAEEASEDRVITGFELEPNREVILEQLLPQYTESLIYGAIIDA | 240 |
| | | SLTSQVR+QQMLPI +L A+EA+E+ V TGFELEPNR IL+QLLPQ+TESLIYGAIIDA | |
| Sbjct: | 180 | SLTSQVRVQQMLPISDLVADEAAEEGV-TGFELEPNRHDILDQLLPQFTESLIYGAIIDA | 238 |
| Query: | 241 | KTAEHAAGMTAMQTATDNAKNVINDLTIQYNRARQAAITQEITEIVAGANALE | 293 |
| | | KTAEHAAGMTAMQTATDNAKNVINDLTIQYNRARQAAITQEITEIVAGANALE | |
| Sbjct: | 239 | KTAEHAAGMTAMQTATDNAKNVINDLTIQYNRARQAAITQEITEIVAGANALE | 291 |

[7780] Based on this analysis, it was predicted that these proteins and their epitopes could be useful antigens for vaccines or diagnostics.

### EXAMPLE 1412

[7781] A DNA sequence (GBSx1497) was identified in S. agalactiae <SEQ ID 4335> which encodes the amino acid sequence <SEQ ID 4336>. Analysis of this protein sequence reveals the following:

```
Possible site: 25
>>> Seems to have no N-terminal signal sequence
----- Final Results -----
                            bacterial cytoplasm --- Certainty = 0.1963(Affirmative) < succ>
                              bacterial membrane --- Certainty = 0.0000(Not Clear) < succ>
                                bacterial outside --- Certainty = 0.0000(Not Clear) < succ>
```

[7782] The protein has no significant homology with any sequences in the GENPEPT database.

[7783] No corresponding DNA sequence was identified in S. pyogenes.

[7784] Based on this analysis, it was predicted that this protein and its epitopes, could be useful antigens for vaccines or diagnostics.

### EXAMPLE 1413

[7785] A DNA sequence (GBSx1498) was identified in S. agalactiae <SEQ ID 4337> which encodes the amino acid sequence <SEQ ID 4338>. Analysis of this protein sequence reveals the following:

```
Possible site: 61
>>> Seems to have no N-terminal signal sequence
----- Final Results -----
                            bacterial cytoplasm --- Certainty = 0.3146(Affirmative) < succ>
                              bacterial membrane --- Certainty = 0.0000(Not Clear) < succ>
                                bacterial outside --- Certainty = 0.0000(Not Clear) < succ>
```

[7786] The protein is similar to the alpha subunit of the proton-translocating ATPase from S. bovis:

| >GP: BAA23753 GB: AB009314 proton-translocating ATPase, alpha subunit | | | |
|---|---|---|---|
| [Streptococcus bovis] Length = 501 | | | |
| Identities = 482/501 (96%), Positives = 497/501 (98%) | | | |
| Query: | 1 | MAINAQEISALIKKQIEDFQPNFDVTETGIVTYIGDGIARARGLDNAMSGELLEFSNGAY | 60 |
| | | MAINAQEISALIKKQIE+FQPNFDVTETG+VTYIGDGIARARGLDNAMSGELLEFSNGA+ | |
| Sbjct: | 1 | MAINAQEISALIKKQIENFQPNFDVTETGVVTYIGDGIARARGLDNAMSGELLEFSNGAF | 60 |
| Query: | 61 | GMAQNLESNDVGIIILGDFSEIREGDVVKRTGKIMEVPVGEAMIGRVVNPLGQPVDGLGE | 120 |
| | | GMAQNLESNDVGIIILGDFS IREGD VKRTGKIMEVPVGEA+IGRVVNPLGQPVDGLG+ | |
| Sbjct: | 61 | GMAQNLESNDVGIIILGDFSTIREGDEVKRTGKIMEVPVGEALIGRVVNPLGQPVDGLGD | 120 |
| Query: | 121 | IETTATRPVETPAPGVMQRKSVFEPLQTGLKAIDALVPIGRGQRELIIGDRQTGKTSVAI | 180 |
| | | I+TTATRPVETPAPGVMQRKSV EPLQTGLKAIDALVPIGRGQRELIIGDRQTGKTSVAI | |
| Sbjct: | 121 | IKTTATRPVETPAPGVMQRKSVSEPLQTGLKAIDALVPIGRGQRELIIGDRQTGKTSVAI | 180 |
| Query: | 181 | DAILNQKGQDMICIYVAIGQKESTVRTQVETLRKYGALDYTIVVTASASQPSPLLFIAPY | 240 |
| | | DAILNQKGQDMICIYVAIGQKESTVRTQVETLRKYGALDYTIVVTASASQPSPLL+IAPY | |
| Sbjct: | 181 | DAILNQKGQDMICIYVAIGQKESTVRTQVETLRKYGALDYTIVVTASASQPSPLLYIAPY | 240 |
| Query: | 241 | AGVAMAEEFMYNGKHVLIVYDDLSKQAVAYRELSLLLRRPPGREAYPGDVFYLHSRLLER | 300 |
| | | AGVAMAEEFMYNGKHVLIVYDDLSKQAVAYRELSLLLRRPPGREAYPGDVFYLHSRLLER | |
| Sbjct: | 241 | AGVAMAEEFMYNGKHVLIVYDDLSKQAVAYRELSLLLRRPPGREAYPGDVFYLHSRLLER | 300 |
| Query: | 301 | SAKVSDALGGGSITALPFIETQAGDISAYIATNVISITDGQIFLQENLFNSGIRPAIDAG | 360 |
| | | SAKVSDALGGGSITALPFIETQAGDISAYIATNVISITDGQIFLQENLFNSGIRPAIDAG | |
| Sbjct: | 301 | SAKVSDALGGGSITALPFIETQAGDISAYIATNVISITDGQIFLQENLFNSGIRPAIDAG | 360 |
| Query: | 361 | SSVSRVGGAAQIKAMKRVAGTLRLDLASYRELEAFTQFGSDLDAATQAKLNRGRRTVEVL | 420 |
| | | SSVSRVGG+AQIKAMK+VAGTLRLDLASYRELEAFTQFGSDLDAATQAKLNRGRRTVEVL | |
| Sbjct: | 361 | SSVSRVGGSAQIKAMKKVAGTLRLDLASYRELEAFTQFGSDLDAATQAKLNRGRRTVEVL | 420 |
| Query: | 421 | KQPLHKPLPVEKQVVILYALTHGFLDDVPVNDILAFEEALYDYFDAHYDNLFETIRTTKD | 480 |
| | | KQP+HKPLPVEKQVVILYALTHGFLDDVPVNDILAFEEALYDYFDAHY+++FETIRTTKD | |
| Sbjct: | 421 | KQPVHKPLPVEKQVVILYALTHGFLDDVPVNDILAFEEALYDYFDAHYESIFETIRTTKD | 480 |
| Query: | 481 | LPEEAELDAAIQAFKDQSQFK | 501 |
| | | LPEE+ LDAAIQAFKDQS+FK | |
| Sbjct: | 481 | LPEESVLDAAIQAFKDQSEFK | 501 |

[7787] A related DNA sequence was identified in S. pyogenes <SEQ ID 4339> which encodes the amino acid sequence <SEQ ID 4340>. Analysis of this protein sequence reveals the following:

```
Possible site: 61
>>> Seems to have no N-terminal signal sequence
----- Final Results -----
                            bacterial cytoplasm --- Certainty = 0.3654(Affirmative) < succ>
                              bacterial membrane --- Certainty = 0.0000(Not Clear) < succ>
                                bacterial outside --- Certainty = 0.0000(Not Clear) < succ>
```

[7788] An alignment of the GAS and GBS proteins is shown below.

| Identities = 477/501 (95%), Positives = 490/501 (97%) | | | |
|---|---|---|---|
| Query: | 1 | MAINAQEISALIKKQIEDFQPNFDVTETGIVTYIGDGIARARGLDNAMSGELLEFSNGAY | 60 |
| | | +AINAQEISALIKKQIE+FQPNFDVTETGIVTYIGDGIARARGLDNAMSGELLEF NGAY | |
| Sbjct: | 1 | LAINAQEISALIKKQIENFQPNFDVTETGIVTYIGDGIARARGLDNAMSGELLEFENGAY | 60 |
| Query: | 61 | GMAQNLESNDVGIIILGDFSEIREGDVVKRTGKIMEVPVGEAMIGRVVNPLGQPVDGLGE | 120 |
| | | GMAQNLESNDVGIIILGDFS IREGDVVKRTGKIMEVPVGEA+IGRVVNPLGQPVDGLG+ | |
| Sbjct: | 61 | GMAQNLESNDVGIIILGDFSAIREGDVVKRTGKIMEVPVGEALIGRVVNPLGQPVDGLGD | 120 |
| Query: | 121 | IETTATRPVETPAPGVMQRKSVFEPLQTGLKAIDALVPIGRGQRELIIGDRQTGKTSVAI | 180 |
| | | IETT RPVETPAPGVMQRKSV EPLQTGLKAIDALVPIGRGQRELIIGDRQTGKTSVAI | |
| Sbjct: | 121 | IETTGFRPVETPAPGVMQRKSVSEPLQTGLKAIDALVPIGRGQRELIIGDRQTGKTSVAI | 180 |
| Query: | 181 | DAILNQKGQDMICIYVAIGQKESTVRTQVETLRKYGALDYTIVVTASASQPSPLLFIAPY | 240 |
| | | DAILNQKGQDMICIYVAIGQKESTVRTQVETLR+YGALDYTIVVTASASQPSPLLFIAPY | |
| Sbjct: | 181 | DAILNQKGQDMICIYVAIGQKESTVRTQVETLRRYGALDYTIVVTASASQPSPLLFIAPY | 240 |
| Query: | 241 | AGVAMAEEFMYNGKHVLIVYDDLSKQAVAYRELSLLLRRPPGREAYPGDVFYLHSRLLER | 300 |
| | | AGVAMAEEFMY GKHVLIVYDDLSKQAVAYRELSLLLRRPPGREAYPGDVFYLHSRLLER | |
| Sbjct: | 241 | AGVAMAEEFMYQGKHVLIVYDDLSKQAVAYRELSLLLRRPPGREAYPGDVFYLHSRLLER | 300 |
| Query: | 301 | SAKVSDALGGGSITALPFIETQAGDISAYIATNVISITDGQIFLQENLFNSGIRPAIDAG | 360 |
| | | SAKVSD LGGGSITALPFIETQAGDISAYIATNVISITDGQIFLQENLFNSGIRPAIDAG | |
| Sbjct: | 301 | SAKVSDDLGGGSITALPFIETQAGDISAYIATNVISITDGQIFLQENLFNSGIRPAIDAG | 360 |
| Query: | 361 | SSVSRVGGAAQIKAMKRVAGTLRLDLASYRELEAFTQFGSDLDAATQAKLNRGRRTVEVL | 420 |
| | | SSVSRVGG+AQIKAMK+VAGTLRLDLASYRELEAFTQFGSDLDAATQAKLNRGRRTVE+L | |
| Sbjct: | 361 | SSVSRVGGSAQIKAMKKVAGTLRLDLASYRELEAFTQFGSDLDAATQAKLNRGRRTVEIL | 420 |
| Query: | 421 | KQPLHKPLPVEKQVVILYALTHGFLDDVPVNDILAFEEALYDYFDAHYDNLFETIRTTKD | 480 |
| | | KQPLHKPLPVEKQVVILYALTHGFLDDVPV+DILAFEEALYDYFD HY++LFETIRTTKD | |
| Sbjct: | 421 | KQPLHKPLPVEKQVVILYALTHGFLDDVPVDDILAFEEALYDYFDVHYNDLFETIRTTKD | 480 |
| Query: | 481 | LPEEAELDAAIQAFKDQSQFK | 501 |
| | | LPEEA LDAAI+AFK+ S FK | |
| Sbjct: | 481 | LPEEAALDAAIKAFKEHSNFK | 501 |

[7789] Based on this analysis, it was predicted that these proteins and their epitopes could be useful antigens for vaccines or diagnostics.

### EXAMPLE 1414

[7790] A DNA sequence (GBSx1499) was identified in S. agalactiae <SEQ ID 4341> which encodes the amino acid sequence <SEQ ID 4342>. Analysis of this protein sequence reveals the following:

```
Possible site: 55
>>> Seems to have no N-terminal signal sequence
----- Final Results -----
                            bacterial cytoplasm --- Certainty = 0.1896(Affirmative) < succ>
                              bacterial membrane --- Certainty = 0.0000(Not Clear) < succ>
                                bacterial outside --- Certainty = 0.0000(Not Clear) < succ>
```

[7791] The protein has homology with the following sequences in the GENPEPT database.

| >GP: BAA23752 GB: AB009314 proton-translocating ATPase, delta subunit | | | |
|---|---|---|---|
| [Streptococcus bovis] | | | |
| Identities = 98/178 (55%), Positives = 127/178 (71%) | | | |
| Query: | 1 | MNKKTQALIEQYSKSLVEVAIEHKIVEKIQQEVAALIDIFETSELEGVLSSLAVSHDEKQ | 60 |
| | | M+KKTQAL+EQY+KSLVE+AIE + ++Q E AL+ +FE + L LSSL VS DEK | |
| Sbjct: | 1 | MDKKTQALVEQYAKSLVEIAIEKDSLAELQSETEALLSVFEETNLADFLSSLVVSRDEKV | 60 |
| Query: | 61 | HFVKTLQTSCSTYLVNFLEVIVQNEREALLYPILKSVDQELIKVNGQYPIQITTAVALSP | 120 |
| | | V+ LQ S S Y+ NFLEVI+QNEREA L IL+ V ++ + Q+ I +TTAVAL+ | |
| Sbjct: | 61 | KLVRLLQESSSVYMNNFLEVILQNEREAFLKAILEGVQKDFVIATNQHDIVVTTAVALTD | 120 |
| Query: | 121 | EQKERLFDIAKTKLALPNGQLVEHIDPSIVGGFVVNANNKVIDASVRNQLHQFKMKLK | 178 |
| | | EQKER+ + K + G+LVE+ID SI+GGFV+N NNKVID S+R QL +FKM LK | |
| Sbjct: | 121 | EQKERILALVAEKFGVKAGKLVENIDESILGGFVINVNNKVIDTSIRRQLQEFKMNLK | 178 |

[7792] A related DNA sequence was identified in S. pyogenes <SEQ ID 4343> which encodes the amino acid sequence <SEQ ID 4344>. Analysis of this protein sequence reveals the following:

Possible site: 53
>>> Seems to have no N-terminal signal sequence
----- Final Results -----
bacterial cytoplasm --- Certainty = 0.1668 (Affirmative) < succ>
bacterial membrane --- Certainty = 0.0000 (Not Clear) < succ>
bacterial outside --- Certainty = 0.0000 (Not Clear) < succ>

[7793] An alignment of the GAS and GBS proteins is shown below.

| Identities = 86/178 (48%), Positives = 125/178 (69%) | | | |
|---|---|---|---|
| Query: | 1 | MNKKTQALIEQYSKSLVEVAIEHKIVEKIQQEVAALIDIFETSELEGVLSSLAVSHDEKQ | 60 |
| | | M KK QALIEQY+KSLVEVA EH ++ +Q +V A+++ F T+ L+ LSS AV H EK | |
| Sbjct: | 1 | MTKKEQALIEQYAKSLVEVASEHHSLDALQADVLAILETFVTTNLDQSLSSQAVPHAEKI | 60 |
| Query: | 61 | HFVKTLQTSCSTYLVNFLEVIVQNEREALLYPILKSVDQELIKVNGQYPIQITTAVALSP | 120 |
| | | + L+ + S Y+ NFL +I+QNEREA LY +L++V E+ V+ QY + +T+++ L+ | |
| Sbjct: | 61 | KLLTLLKGNNSVYMNNFLNLILQNEREAYLYQMLQAVLNEIAIVSNQYDVTVTSSLPLTE | 120 |
| Query: | 121 | EQKERLFDIAKTKLALPNGQLVEHIDPSIVGGFVVNANNKVIDASVRNQLHQFKMKLK | 178 |
| | | EQK R+ + K A+ G+L+E +DPS++GGF+++ NNKVID S+R QL FKM LK | |
| Sbjct: | 121 | EQKSRVRAVVAKKFAVTAGRLIEKVDPSLIGGFIISVNNKVIDTSIRRQLQAFKMNLK | 178 |

[7794] Based on this analysis, it was predicted that these proteins and their epitopes could be useful antigens for vaccines or diagnostics.

### EXAMPLE 1415

[7795] A DNA sequence (GBSx1500) was identified in S. agalactiae <SEQ ID 4345> which encodes the amino acid sequence <SEQ ID 4346>. This protein is predicted to be ATP synthase b chain (atpF). Analysis of this protein sequence reveals the following:

Possible site: 33
>>> Seems to have a cleavable N-term signal seq.
----- Final Results -----
bacterial outside --- Certainty = 0.3000 (Affirmative) < succ>
bacterial membrane --- Certainty = 0.0000 (Not Clear) < succ>
bacterial cytoplasm --- Certainty = 0.0000 (Not Clear) < succ>

[7796] The protein has homology with the following sequences in the GENPEPT database.

| >GP: AAD13379 GB: U31170 ATPase, b subunit [Streptococcus mutans] | | | |
|---|---|---|---|
| Identities = 103/165 (62%), Positives = 130/165 (78%) | | | |
| Query: | 1 | MSILINSTTIGDIIIVSGSVLLLFILIKTFAWKQITGIFEAREQKIANDIDTAEQARQQA | 60 |
| | | MS LIN T++G+++IV+GS +LL +L+K FAW Q+ IF+ RE+KIA DID AE +RQ A | |
| Sbjct: | 1 | MSTLINGTSLGNLLIVTGSFILLLLLVKKFAWSQLAAIFKTREEKIAKDIDDAENSRQNA | 60 |
| Query: | 61 | EAFATKREEELSNAKTEANQIIDNAKETGLAKGDQIISEAKTEADRLKEKAHQDIAQNKA | 120 |
| | | + KR+ EL+ AK EA QIIDNAKETG A+ +II+EA EA RLK+KA+QDIA +KA | |
| Sbjct: | 61 | QVLENKRQVELNQAKDEAAQIIDNAKETGKAQESKIITEAHEEAGRLKDKANQDIATSKA | 120 |
| Query: | 121 | EALADVKGEVADLTVLLAEKIMVSNLDKEAQSNLIDSYIKKLGDA | 165 |
| | | EAL+ VK +VADL+VLLAEKIM NLDK AQ +LIDSY+ KLGDA | |
| Sbjct: | 121 | EALSSVKADVADLSVLLAEKIMAKNLDKTAQGDLIDSYLDKLGDA | 165 |

[7797] A related DNA sequence was identified in S. pyogenes <SEQ ID 4347> which encodes the amino acid sequence <SEQ ID 4348>. Analysis of this protein sequence reveals the following:

Possible site: 32
>>> Seems to have a cleavable N-term signal seq.
----- Final Results -----
bacterial outside --- Certainty = 0.3000 (Affirmative) < succ>
bacterial membrane --- Certainty = 0.0000 (Not Clear) < succ>
bacterial cytoplasm --- Certainty = 0.0000 (Not Clear) < succ>

[7798] The protein has homology with the following sequences in the databases:

| >GP: AAD13379 GB: U31170 ATPase, b subunit [Streptococcus mutans] | | | |
|---|---|---|---|
| Identities = 88/159 (55%), Positives = 122/159 (76%) | | | |
| Query: | 6 | GELVGNFILVTGSVIVLLLLIKKFAWGAIESILQTRSQQISRDIDQAEQSRLSAQQLEAK | 65 |
| | | G +GN ++VTGS I+LLLL+KKFAW + +I +TR ++I++DID AE SR +AQ LE K | |
| Sbjct: | 7 | GTSLGNLLIVTGSFILLLLLVKKFAWSQLAAIFKTREEKIAKDIDDAENSRQNAQVLENK | 66 |
| Query: | 66 | SQANLDASRLQASKIISDAKEIGQLQGDKLVAEATDEAKRLKEKALTDIEQSKSDAISAV | 125 |
| | | Q L+ ++ +A++II +AKE G+ Q K++ EA +EA RLK+KA DI SK++A+S+V | |
| Sbjct: | 67 | RQVELNQAKDEAAQIIDNAKETGKAQESKIITEAHEEAGRLKDKANQDIATSKAEALSSV | 126 |
| Query: | 126 | KTEMSDLTVLLAEKIMGANLDKTAQSQLIDSYLDDLGEA | 164 |
| | | K +++DL+VLLAEKIM NLDKTAQ LIDSYLD LG+A | |
| Sbjct: | 127 | KADVADLSVLLAEKIMAKNLDKTAQGDLIDSYLDKLGDA | 165 |

[7799] An alignment of the GAS and GBS proteins is shown below.

| Identities = 81/156 (51%), Positives = 115/156 (72%) | | | |
|---|---|---|---|
| Query: | 10 | IGDIIIVSGSVLLLFILIKTFAWKQITGIFEAREQKIANDIDTAEQARQQAEAFATKREE | 69 |
| | | +G+ I+V+GSV++L +LIK FAW I I + R Q+I+ DID AEQ+R A+ K + | |
| Sbjct: | 9 | VGNFILVTGSVIVLLLLIKKFAWGAIESILQTRSQQISRDIDQAEQSRLSAQQLEAKSQA | 68 |
| Query: | 70 | ELSNAKTEANQIIDNAKETGLAKGDQIISEAKTEADRLKEKAHQDIAQNKAEALADVKGE | 129 |
| | | L ++ +A++II +AKE G +GD++++EA EA RLKEKA DI Q+K++A++ VK E | |
| Sbjct: | 69 | NLDASRLQASKIISDAKEIGQLQGDKLVAEATDEAKRLKEKALTDIEQSKSDAISAVKTE | 128 |
| Query: | 130 | VADLTVLLAEKIMVSNLDKEAQSNLIDSYIKKLGDA | 165 |
| | | ++DLTVLLAEKIM +NLDK AQS LIDSY+ LG+A | |
| Sbjct: | 129 | MSDLTVLLAEKIMGANLDKTAQSQLIDSYLDDLGEA | 164 |

[7800] SEQ ID 4346 (GBS169) was expressed in E. coli as a His-fusion product. SDS-PAGE analysis of total cell extract is shown in FIG. 34 (lane 6; MW 18 kDa).

[7801] The GBS169-His fusion product was purified (FIG. 200, lane 11) and used to immunise mice. The resulting antiserum was used for Western blot (FIG. 250). These tests confirm that the protein is immunoaccessible on GBS bacteria.

[7802] Based on this analysis, it was predicted that these proteins and their epitopes could be useful antigens for vaccines or diagnostics.

### EXAMPLE 1416

[7803] A DNA sequence (GBSx1501) was identified in S. agalactiae <SEQ ID 4349> which encodes the amino acid sequence <SEQ ID 4350>. Analysis of this protein sequence reveals the following:

| Possible site: 29 | | | |
|---|---|---|---|
| >>> Seems to have no N-terminal signal sequence | | | |
| INTEGRAL | Likelihood = −11.73 | Transmembrane | 20-36 (14-42) |
| INTEGRAL | Likelihood = −5.20 | Transmembrane | 207-223 (206-228) |
| INTEGRAL | Likelihood = −4.35 | Transmembrane | 78-94 (73-97) |
| INTEGRAL | Likelihood = −4.09 | Transmembrane | 113-129 (113-133) |
| INTEGRAL | Likelihood = −2.39 | Transmembrane | 174-190 (174-190) |

----- Final Results -----
bacterial membrane --- Certainty = 0.5692 (Affirmative) < succ>
bacterial outside --- Certainty = 0.0000 (Not Clear) < succ>
bacterial cytoplasm --- Certainty = 0.0000 (Not Clear) < succ>

[7804] The protein has homology with the following sequences in the GENPEPT database.

| >GP: BAA23750 GB: AB009314 proton-translocating ATPase, a subunit | | | |
|---|---|---|---|
| [Streptococcus bovis] | | | |
| Identities = 149/238 (62%), Positives = 180/238 (75%) | | | |
| Query: | 1 | MESTSNPTVSFLGIDFDLTILAMSLLTITIIFILVFWASRKMTIKPKGKQNVLEYVYELV | 60 |
| | | ME++ NPT GI+FDLTILAMSLLT+ I F ++FWA+RKMT+KPKGKQN +EYVYE V | |
| Sbjct: | 1 | METSVNPTAHVFGIEFDLTILAMSLLTVIISFGIIFWATRKMTLKPKGKQNFIEYVYEFV | 60 |
| Query: | 61 | NNTISQNLGHYTKNYSLLMFILFSFVFIANNLGLMTSLKTHEHNFWTSPTANFGVDITLS | 120 |
| | | NTI NLG YT YSLLMF F F+ IANNLGL+ L++ ++NFWTSPT+ VD T S | |
| Sbjct: | 61 | QNTIKPNLGEYTPKYSLLMFTFFFFILIANNLGLLVKLESEDYNFWTSPTSTIMVDCTWS | 120 |
| Query: | 121 | LLVAFICHIEGIRKKGIGGYLKGFLSPTPAMLPMNLLEEVTNVASLALRLFGNIFSGEVV | 180 |
| | | L+VA + H+EG+RKKG+ YLKG+LSP P MLPMN+LE+ TNV SLALRLFGNI++GEVV | |
| Sbjct: | 121 | LIVAIVVHVEGVRKKGVKAYLKGYLSPFPMMLPMNILEQFTNVLSLALRLFGNIYAGEVV | 180 |
| Query: | 181 | TGLLLQLAVLSPFTGPLAFALNIVWTAFSMFIGFIQAYVFIILSSSYIGHKVHGDEEE | 238 |
| | | T L++ S P A ALN+ W AFS FIG IQAYVF ILSS YI K+ DE+E | |
| Sbjct: | 181 | TALIVGFGTKSLIFAPFALALNLAWVAFSAFIGCIQAYVFTILSSKYISEKLPEDEDE | 238 |

[7805] A related DNA sequence was identified in S. pyogenes <SEQ ID 4351> which encodes the amino acid sequence <SEQ ID 4352>. Analysis of this protein sequence reveals the following:

| Possible site: 33 | | | |
|---|---|---|---|
| >>> Seems to have a cleavable N-term signal seq. | | | |
| INTEGRAL | Likelihood = −4.73 | Transmembrane | 79-95 (72-97) |
| INTEGRAL | Likelihood = −4.35 | Transmembrane | 115-131 (112-132) |
| INTEGRAL | Likelihood = −2.13 | Transmembrane | 200-216 (197-216) |

----- Final Results -----
bacterial membrane --- Certainty = 0.2890 (Affirmative) < succ>
bacterial outside --- Certainty = 0.0000 (Not Clear) < succ>
bacterial cytoplasm --- Certainty = 0.0000 (Not Clear) < succ>

[7806] An alignment of the GAS and GBS proteins is shown below.

| Identities = 124/239 (51%), Positives = 169/239 (69%), Gaps = 3/239 (1%) | | | |
|---|---|---|---|
| Query: | 1 | MESTSNPTVSFLGIDFDLTILAMSLLTITIIFILVFWASRKMTIKPKGKQNVLEYVYELV | 60 |
| | | ME P + I F+LT+LA+ ++TI I+F VFWASR+M +KP+GKQ LEY+ V | |
| Sbjct: | 1 | MEEAKIPMLKLGPITFNLTLLAVCIVTIAIVFAFVFWASRQMKLKPEGKQTALEYLISFV | 60 |
| Query: | 61 | NNTISQNLGH-YTKNYSLLMFILFSFVFIANNLGLMTSLKT-HEHNFWTSPTANFGVDIT | 118 |
| | | + ++L H K+YSLL+F +F FV +ANNLGL T L+T + +N WTSPTAN D+ | |
| Sbjct: | 61 | DGIGEEHLDHNLQKSYSLLLFTIFLFVAVANNLGLFTKLETVNGYNLWTSPTANLAFDLA | 120 |
| Query: | 119 | LSLLVAFICHIEGIRKKGIGGYLKGFLSPTPAMLPMNLLEEVTNVASLALRLFGNIFSGE | 178 |
| | | LSL + + HIEG+R++G+ +LK +P P M PMNLLEE TN SLA+RLFGNIF+GE | |
| Sbjct: | 121 | LSLFITLMVHIEGVRRRGLVAHLKRLATPWP-MTPMNLLEEFTNFLSLAIRLFGNIFAGE | 179 |
| Query: | 179 | VVTGLLLQLAVLSPFTGPLAFALNIVWTAFSMFIGFIQAYVFIILSSSYIGHKVHGDEE | 237 |
| | | VVTGL++QLA + P+AF +N+ WTAFS+FI IQA+VF L+++Y+G KV+ EE | |
| Sbjct: | 180 | VVTGLIVQLANYRVYWWPIAFLVNMAWTAFSVFISCIQAFVFTKLTATYLGKKVNESEE | 238 |

[7807] A related GBS gene <SEQ ID 8803> and protein <SEQ ID 8804> were also identified. Analysis of this protein sequence reveals the following:

| Lipop: Possible site: −1 Crend: 1 | | | |
|---|---|---|---|
| McG: Discrim Score: −3.50 | | | |
| GvH: Signal Score (−7.5): −3.36 | | | |
| Possible site: 29 | | | |
| >>> Seems to have no N-terminal signal sequence | | | |
| ALOM program | count: 5 | value: −11.73 | threshold: 0.0 |

| | | | |
|---|---|---|---|
| INTEGRAL | Likelihood = −11.73 | Transmembrane | 20-36 (14-42) |
| INTEGRAL | Likelihood = −5.20 | Transmembrane | 207-223 (206-228) |
| INTEGRAL | Likelihood = −4.35 | Transmembrane | 78-94 (73-97) |
| INTEGRAL | Likelihood = −4.09 | Transmembrane | 113-129 (113-133) |
| INTEGRAL | Likelihood = −2.39 | Transmembrane | 174-190 (174-190) |

| | | |
|---|---|---|
| PERIPHERAL | Likelihood = 5.30 | 156 |

modified ALOM score: 2.85
*** Reasoning Step: 3
----- Final Results -----
bacterial membrane --- Certainty = 0.5692 (Affirmative) < succ>
bacterial outside --- Certainty = 0.0000 (Not Clear) < succ>
bacterial cytoplasm --- Certainty = 0.0000 (Not Clear) < succ>

[7808] The protein has homology with the following sequences in the databases:

[chemical structure]

[7809] Based on this analysis, it was predicted that these proteins and their epitopes could be useful antigens for vaccines or diagnostics.

### EXAMPLE 1417

[7810] A DNA sequence (GBSx1502) was identified in S. agalactiae <SEQ ID 4353> which encodes the amino acid sequence <SEQ ID 4354>. This protein is predicted to be ATP synthase c subunit (atpE). Analysis of this protein sequence reveals the following:

| Possible site: 29 | | | | |
|---|---|---|---|---|
| >>> Seems to have a cleavable N-term signal seq. | | | | |
| | INTEGRAL | Likelihood = −4.62 | Transmembrane | 48-64 (42-65) |

```
----- Final Results -----
                              bacterial membrane --- Certainty = 0.2848(Affirmative) < succ>
                                bacterial outside --- Certainty = 0.0000(Not Clear) < succ>
                            bacterial cytoplasm --- Certainty = 0.0000(Not Clear) < succ>
```

[7811] The protein has homology with the following sequences in the GENPEPT database.

| >GP: BAA23749 GB: AB009314 proton-translocating ATPase, | | | |
|---|---|---|---|
| c subunit [Streptococcus bovis] | | | |
| Identities = 56/65 (86%), Positives = 59/65 (90%) | | | |
| Query: | 1 | MNLAILALGFAVMGVSIGEGILVANIAKSAARQPEMFSKLQTLMFTGVAFIEGTFFVLFA | 60 |
| | | +NL ILALG AV+GVS+GEGILVANIAKSAARQPEMFSKLQTLMF GVAFIEGTFFVL A | |
| Sbjct: | 2 | LNLKILALGLAVLGVSLGEGILVANIAKSAARQPEMFSKLQTLMFLGVAFIEGTFFVLLA | 61 |
| Query: | 61 | FTFLV | 65 |
| | | TF V | |
| Sbjct: | 62 | STFFV | 66 |

[7812] A related DNA sequence was identified in S. pyogenes <SEQ ID 4355> which encodes the amino acid sequence <SEQ ID 4356>. Analysis of this protein sequence reveals the following:

| Possible site: 17 | | | | |
|---|---|---|---|---|
| >>> Seems to have a cleavable N-term signal seq. | | | | |
| | INTEGRAL | Likelihood = −5.26 | Transmembrane | 47-63 (41-64) |

```
----- Final Results -----
                              bacterial membrane --- Certainty = 0.3102(Affirmative) < succ>
                                bacterial outside --- Certainty = 0.0000(Not Clear) < succ>
                            bacterial cytoplasm --- Certainty = 0.0000(Not Clear) < succ>
```

[7813] The protein has homology with the following sequences in the databases:

| >GP: AAD00920 GB: AF001955 UncE [Streptococcus sanguinis] | | | |
|---|---|---|---|
| Identities = 50/66 (75%), Positives = 58/66 (87%), Gaps = 1/66 (1%) | | | |
| Query: | 1 | MNPIF-ALALACFGVSLAEGFLMANLFKAASRQPEIIGQLRSLMILGVAFIEGTFFVTLV | 59 |
| | | MN F L ACFGVS+AEG +M+NLFKAASRQPEIIGQLRSL+ILG+AF+EGTFFVTL | |
| Sbjct: | 1 | MNLTFLGLCFACFGVSIAEGLIMSNLFKAASRQPEIIGQLRSLLILGIAFVEGTFFVTLA | 60 |
| Query: | 60 | MAFILK | 65 |
| | | MAF++K | |
| Sbjct: | 61 | MAFVIK | 66 |

[7814] An alignment of the GAS and GBS proteins is shown below.

| Identities = 33/62 (53%), Positives = 45/62 (72%) | | | |
|---|---|---|---|
| Query: | 5 | ILALGFAVMGVSIGEGILVANIAKSAARQPEMFSKLQTLMFTGVAFIEGTFFVLFAFTFLVR | 66 |
| | | I AL A GVS+ EG L+AN+ K+A+RQPE+ +L++LM GVAFIEGTFFV F+++ | |
| Sbjct: | 4 | IFALALACFGVSLAEGFLMANLFKAASRQPEIIGQLRSLMILGVAFIEGTFFVTLVMAFILK | 65 |

[7815] Based on this analysis, it was predicted that these proteins and their epitopes could be useful antigens for vaccines or diagnostics.

### EXAMPLE 1418

[7816] A DNA sequence (GBSx1503) was identified in S. agalactiae <SEQ ID 4357> which encodes the amino acid sequence <SEQ ID 4358>. Analysis of this protein sequence reveals the following:

```
Possible site: 47
>>> Seems to have no N-terminal signal sequence
----- Final Results -----
                            bacterial cytoplasm --- Certainty = 0.2562(Affirmative) < succ>
                              bacterial membrane --- Certainty = 0.0000(Not Clear) < succ>
                                bacterial outside --- Certainty = 0.0000(Not Clear) < succ>
```

[7817] The protein has no significant homology with any sequences in the GENPEPT database.

[7818] No corresponding DNA sequence was identified in S. pyogenes.

[7819] Based on this analysis, it was predicted that this protein and its epitopes, could be useful antigens for vaccines or diagnostics.

### EXAMPLE 1419

[7820] A DNA sequence (GBSx1504) was identified in S. agalactiae <SEQ ID 4359> which encodes the amino acid sequence <SEQ ID 4360>. This protein is predicted to be bacterial glycogen synthase (glgA). Analysis of this protein sequence reveals the following:

```
Possible site: 16
>>> Seems to have no N-terminal signal sequence
----- Final Results -----
                            bacterial cytoplasm --- Certainty = 0.1574(Affirmative) < succ>
                              bacterial membrane --- Certainty = 0.0000(Not Clear) < succ>
                                bacterial outside --- Certainty = 0.0000(Not Clear) < succ>
```

[7821] The protein has homology with the following sequences in the GENPEPT database.

| >GP: BAA19591 GB: D87026 bacterial glycogen synthase [Bacillus | | | |
|---|---|---|---|
| stearothermophilus] | | | |
| Identities = 220/475 (46%), Positives = 312/475 (65%), | | | |
| Gaps = 1/475 (0%) | | | |
| Query: | 1 | MKIMFVAAEGAPFAKTGGLGDVIGALPKSLSKKGHDVAVVMPYYDMVDQKFGDQIENLMY | 60 |
| | | MK++F +E APFAK+GGL DV GALPK L + G D V++P Y+ + ++ +++ + | |
| Sbjct: | 1 | MKVLFAVSECAPFAKSGGLADVAGALPKELRRLGIDARVMLPKYETIAPEWKKKMKKVAE | 60 |
| Query: | 61 | FYTDVGWRHQYVGVKRLSQDNVTFYFIDNQYYFYRGHVYGDWDDGERFAYFQLAALELME | 120 |
| | | VGWR QY GV+ L D V +YFIDN+YYF R +YG +DDGERFAYF A LE++ | |
| Sbjct: | 61 | LIVPVGWRRQYCGVEELRHDGVIYYFIDNEYYFKRPQLYGHYDDGERFAYFCRAVLEVLP | 120 |
| Query: | 121 | KIDFIPDVLHVHDYHTAMIPFLLKEKYHWIQAYNNIRAVFTIHNIEFQGQFGPEMLGDLF | 180 |
| | | +I F PDV+H HD+HT M+PFLL+E+Y Y ++R VFTIHN++FQG F +L DL | |
| Sbjct: | 121 | EIQFQPDVIHCHDWHTGMVPFLLREQYRHELFYVDMRTVFTIHNLQFQGLFPRGILEDLL | 180 |
| Query: | 181 | GVGAERYEDGTLRWNNCLNWMKAAILYSDRVTTVSPSYANEIKTPEFGKGLDQIMRMEAG | 240 |
| | | + + L + C+++MK A++ SD +TTVSP+Y EI+T +G+ LD ++R | |
| Sbjct: | 181 | NLDGRYFTVDHLEFYGCVSFMKGALVASDLITTVSPTYKEEIQTAYYGERLDGLLRARRD | 240 |
| Query: | 241 | KLSGIVNGIDSDLLNPETDAFLPYHFSKSNLEGKIKNKLALQENLGLPQDKNVPLIGIVS | 300 |
| | | L GI+NGID + NPE D FL +S E K NK ALQ GLP+ +VPLI +V+ | |
| Sbjct: | 241 | DLLGILNGIDDEFYNPEADPFLTATYSVHTRERKQLNKRALQRQFGLPEWDDVPLIAMVT | 300 |
| Query: | 301 | RLTDQKGFDIIASELDNMLQQDIQMVILGTGYHHFEETFSYFASRYPEKLSANITFDLRL | 360 |
| | | R+T QKG D++ M+ +D+Q+V+LGTG FE+ FS A+ YP K+ I F L | |
| Sbjct: | 301 | RMTAQKGLDLVTCVFHEMMSEDMQLVVLGTGDWRFEQFFSQMAAAYPGKVGVYIGFHEPL | 360 |
| Query: | 361 | AQQIYAASDIFMMPSAFEPCGLSQMMAMRYGSLPLVHEVGGLKDTVVAFNQFDGSGTGFS | 420 |
| | | A QIYA +D+F++PS FEPCGLSQM+A+RYG++P+V E GGL DTV ++N+ G GFS | |
| Sbjct: | 361 | AHQIYAGADLFLIPSLFEPCGLSQMIALRYGTIPIVRETGGLNDTVQSYNEITKEGNGFS | 420 |
| Query: | 421 | FNHFSGYWLMQTLKLALEVYNDYPEAWKKLQWQAMSKDFSWDTACVAYEQLYQQL | 475 |
| | | F +F+ + ++ T++ AL Y P W++L +AM D+SW + Y+Q Y+QL | |
| Sbjct: | 421 | FTNFNAHDMLYTIRRALSFYRQ-PSVWEQLTERAMRGDYSWRRSANQYKQAYEQL | 474 |

[7822] No corresponding DNA sequence was identified in S. pyogenes.

[7823] Based on this analysis, it was predicted that this protein and its epitopes, could be useful antigens for vaccines or diagnostics.

### EXAMPLE 1420

[7824] A DNA sequence (GBSx1505) was identified in S. agalactiae <SEQ ID 4361> which encodes the amino acid sequence <SEQ ID 4362>. This protein is predicted to be a subunit of ADP-glucose pyrophosphorylase. Analysis of this protein sequence reveals the following:

```
Possible site: 14
>>> Seems to have no N-terminal signal sequence
----- Final Results -----
                            bacterial cytoplasm --- Certainty = 0.3492(Affirmative) < succ>
                              bacterial membrane --- Certainty = 0.0000(Not Clear) < succ>
                                bacterial outside --- Certainty = 0.0000(Not Clear) < succ>
```

[7825] The protein has homology with the following sequences in the GENPEPT database.

| >GP: BAA19590 GB: D87026 subunit of ADP-glucose pyrophosphorylase | | | |
|---|---|---|---|
| [Bacillus stearothermophilus] | | | |
| Identities = 59/178 (33%), Positives = 111/178 (62%), Gaps = 1/178 (0%) | | | |
| Query: | 37 | SAEIYVIDTPWLIEKMEEEAQNNEPRKLRFLLRDLIVESNALAFEYTGYLSNISSIKSYY | 96 |
| | | S E+Y+++T L++ + + +N+ + ++RD + +EY+GY + I S++ Y+ | |
| Sbjct: | 157 | SLEMYLLETSLLLDLIADY-KNHGYYSIVDVIRDYHRSLSICEYEYSGYAAVIDSVEQYF | 215 |
| Query: | 97 | DANMDMLTPNKFYSLFFSNQKVYTKVKNEEATYFDKQSNVSNSQLASGSIIKGYLDHSIV | 156 |
| | | ++M++L + + LF + +YTKVK+E T + ++ NV S +A+G +I+G +++S++ | |
| Sbjct: | 216 | RSSMELLDRDVWEQLFLPSHPIYTKVKDEPPTKYGREGNVKRSMIANGCVIEGTVENSVL | 275 |
| Query: | 157 | SRNCLLEKGTRVVNSIIFPKVKIGEGATIENTIIDKCVKVASGVTLKGSLDKPLVIPK | 214 |
| | | R+ + KG V NSII K +IG+G ++ IIDK KV GV LKG+ ++P ++ K | |
| Sbjct: | 276 | FRSVKIGKGAVVRNSIIMQKCQIGDGCVLDGVIIDKDAKVEPGVVLKGTKEQPFIVRK | 333 |

[7826] No corresponding DNA sequence was identified in S. pyogenes.

[7827] Based on this analysis, it was predicted that this protein and its epitopes, could be useful antigens for vaccines or diagnostics.

### EXAMPLE 1421

[7828] A DNA sequence (GBSx1506) was identified in S. agalactiae <SEQ ID 4363> which encodes the amino acid sequence <SEQ ID 4364>. This protein is predicted to be subunit of ADP-glucose pyrophosphorylase (glgC-1). Analysis of this protein sequence reveals the following:

```
Possible site: 32
>>> Seems to have an uncleavable N-term signal seq.
----- Final Results -----
                              bacterial membrane --- Certainty = 0.0000(Not Clear) < succ>
                                bacterial outside --- Certainty = 0.0000(Not Clear) < succ>
                            bacterial cytoplasm --- Certainty = 0.0000(Not Clear) < succ>
```

[7829] A related GBS nucleic acid sequence <SEQ ID 9765> which encodes amino acid sequence <SEQ ID 9766> was also identified.

[7830] The protein has homology with the following sequences in the GENPEPT database.

| >GP: BAA19589 GB: D87026 subunit of ADP-glucose pyrophosphorylase | | | |
|---|---|---|---|
| [Bacillus stearothermophilus] | | | |
| Identities = 195/352 (55%), Positives = 259/352 (73%) | | | |
| Query: | 7 | MKNEMLALILAGGQGTRLGKLTQSIAKPAVQFGGRYRIIDFALSNCANSGINNVGVITQY | 66 |
| | | MK + +A++LAGGQG+RL LT +IAKPAV FGG+YRIIDF LSNC NSGI+ VGV+TQY | |
| Sbjct: | 1 | MKKKCIAMLLAGGQGSRLRSLTTNIAKPAVPFGGKYRIIDFTLSNCTNSGIDTVGVLTQY | 60 |
| Query: | 67 | QPLELNTHIGNGSSWGLDGIDSGVTVLQPYSATEGNRWFQGTSHAIYQNIDYIDRINPEY | 126 |
| | | QPL L+++IG GS+W LD + GVTVL PYS + G +W++GT++A+YQNI+YI++ NP+Y | |
| Sbjct: | 61 | QPLLLHSYIGIGSAWDLDRRNGGVTVLPPYSVSSGVKWYEGTANAVYQNINYIEQYNPDY | 120 |
| Query: | 127 | VLILSGDHIYKMNYDDMLQTHKDNLASLTVAVLDVPLKEASRFGIMNTDSNDRIVEFEEK | 186 |
| | | VL+LSGDHIYKM+Y ML H A +T++V++VP +EASRFGIMNT+ IVEF EK | |
| Sbjct: | 121 | VLVLSGDHIYKMDYQHMLDYHIAKQADVTISVIEVPWEEASRFGIMNTNEEMEIVEFAEK | 180 |
| Query: | 187 | PEHPKSTKASMGIYIFDWKRLRTVLIDGEKNGIDMSDFGKNVIPAYLESGERVYTYNFDG | 246 |
| | | P PKS ASMGIYIF+W L+ L N DFGK+VIP L +R + Y F+G | |
| Sbjct: | 181 | PAEPKSNLASMGIYIFNWPLLKQYLQIDNANPHSSHDFGKDVIPMLLREKKRPFAYPFEG | 240 |
| Query: | 247 | YWKDVGTIESLWEANMEYIGEDNKLHSRDRSWKIYSKNLIAPPNFMTEDANVKDSLVVDG | 306 |
| | | YWKDVGT++SLWEANN+ + E+N+L DRSW+IYS N PP +++ +A V DSLV +G | |
| Sbjct: | 241 | YWKDVGTVKSLWEANMDLLDENNELDLFDRSWRIYSVNPNQPPQYISPEAEVSDSLVNEG | 300 |
| Query: | 307 | CFVAGNVEHSILSTNVQVKPNAIIKDSFVMSGATIGEGAKINRAIIGEDAVI | 358 |
| | | C V G VE S+L V++ A++K+S +M GA + EGA + RAI+ D++I | |
| Sbjct: | 301 | CVVEGTVERSVLFQGVRIGKGAVVKESVIMPGAAVSEGAYVERAIVTPDSII | 352 |

[7831] There is also homology to SEQ ID 2660.

[7832] Based on this analysis, it was predicted that these proteins and their epitopes could be useful antigens for vaccines or diagnostics.

### EXAMPLE 1422

[7833] A DNA sequence (GBSx1507) was identified in S. agalactiae <SEQ ID 4365> which encodes the amino acid sequence <SEQ ID 4366>. Analysis of this protein sequence reveals the following:

```
Possible site: 37
>>> Seems to have no N-terminal signal sequence
----- Final Results -----
                            bacterial cytoplasm --- Certainty = 0.2844(Affirmative) < succ>
                              bacterial membrane --- Certainty = 0.0000(Not Clear) < succ>
                                bacterial outside --- Certainty = 0.0000(Not Clear) < succ>
```

[7834] The protein has homology with the following sequences in the GENPEPT database.

| >GP: CAA78440 GB: Z14057 1,4-alpha-glucan branching enzyme | | | |
|---|---|---|---|
| [Bacillus caldolyticus] | | | |
| Identities = 272/616 (44%), Positives = 371/616 (60%), Gaps = 14/616 (2%) | | | |
| Query: | 6 | ELYTFGIGENFHLQNYLGVHSENGSFC----FRVWAPNAENVQVIGDFTDWRNRPLQMNK | 61 |
| | | E+Y F G + G H G F VWAP+A V+++G F DW + K | |
| Sbjct: | 10 | EVYLFHEGRLYQSYELFGAHVIRGGGAVGTRFCVWAPHAREVRLVGSFNDWNGTNSPLTK | 69 |
| Query: | 62 | -NQAGVWEANSLDAREGDLYKYLVTRKGGQVVEKIDPMAVYMERRPGTASVIKVLRNKKW | 120 |
| | | N GVW + EG LYKY + G+V+ K DP A Y E RP TAS++ L+ +W | |
| Sbjct: | 70 | VNDEGVWTIVVPENLEGHLYKYEIITPDGRVLLKADPYAFYSELRPHTASIVYDLKGYEW | 129 |
| Query: | 121 | EDGLWMGRRKRLGFQKRPINIYEVHAGSWKKDDFGHPMTFSQLKDYLIPYLVEMNYTHVE | 180 |
| | | D W +++R +P+ IYE+H GSWKK G T+ ++ D LIPY++E +TH+E | |
| Sbjct: | 130 | NDSPWQRKKRRKRIYDQPMVIYELHFGSWKKKPDGRFYTYREMADELIPYVLERGFTHIE | 189 |
| Query: | 181 | FMPLMAHPLDMSWGYQLMGYFAFEHTYGTPEEFQDFVEACHKNNIGVLVDWVPGHFIQND | 240 |
| | | +PL+ HPLD SWGYQ GY++ YGTP +F FV+ CH+ +GV++DWVPGHF ++ | |
| Sbjct: | 190 | LLPLVEHPLDRSWGYQGTGYYSVTSRYGTPHDFMYFVDRCHQAGLGVIIDWVPGHFCKDA | 249 |
| Query: | 241 | DALAYFDGTATYEYQNHDRAHNYRWGALNFDLGKNQVQSFLISSALFWIEHYHIDGIRVD | 300 |
| | | L FDG TYEY N NY WG NFDLGK +V+SFLIS+ALFW+E+YH+DG RVD | |
| Sbjct: | 250 | HGLYMFDGAPTYEYANEKDRENYVWGTANFDLGKPEVRSFLISNALFWLEYYHVDGFRVD | 309 |
| Query: | 301 | AVSNMLYLDYDEGPWEANQFGDNRNLEGYHFLRKLNKVIKERHPNVMMIAEESTASTPIT | 360 |
| | | AV+NMLY ++ +E N FLR+LN+ + PNV MIAE+ST +T | |
| Sbjct: | 310 | AVANMLYWPNNDRLYE--------NPYAVEFLRQLNEAVFAYDPNVWMIAEDSTDWPRVT | 361 |
| Query: | 361 | KDLESGGLGFDFKWNMGWMNDILRFYEEDPLYRQYDFNLVTFSFMYIFNENFVLAFSHDE | 420 |
| | | GGLGF++KWNMGWMND+L++ E P R+Y N V+FS +Y ++ENF+L FSHDE | |
| Sbjct: | 362 | APTYDGGLGFNYKWNMGWMNDMLKYMETPPHERKYAHNQVSFSLLYAYSENFILPFSHDE | 421 |
| Query: | 421 | VVHGKKSMMHKMWGDRYNQFAGLRNLYAYQMCHPGKKLLFMGSEFGQFLEWKYNDQLEWE | 480 |
| | | VVHGKKS+++KM G +FA LR LY Y M HPGKKLLFMGSEF QF EWK+ ++L+W | |
| Sbjct: | 422 | VVHGKKSLLNKMPGSYEEKFAQLRLLYGYMMAHPGKKLLFMGSEFAQFDEWKFAEELDWV | 481 |
| Query: | 481 | NLNDDMNQKMQRYTKQLNQFYKDHKCLWRIDDSFDGLEIIDADNKSETVLSFIRKDDK-G | 539 |
| | | + ++++KM Y KQL YK +K + +D G E ID N +++ SFIR+ K G | |
| Sbjct: | 482 | LFDFELHRKMDEYVKQLIACYKRYKPFYELDHDPRGFEWIDVHNAEQSIFSFIRRGKKEG | 541 |
| Query: | 540 | DLLLCVFNMTPVERPNFTIGVPQAGIYEEVLNTEMEEFGGVWKNHNPVTKTQVATWKDYD | 599 |
| | | D+L+ V N T ++ + VP Y EVLN++ EFGG + + | |
| Sbjct: | 542 | DVLVIVCNFTNQAYDDYKVSVPLLAPYREVLNSDAAEFGGSGHVNGKRLPAFSEPFHGKP | 601 |
| Query: | 600 | HTLSFTLPALGASVWR | 615 |
| | | + + T+P G S+ R | |
| Sbjct: | 602 | YHVRMTIPPFGISILR | 617 |

[7835] Based on this analysis, it was predicted that this protein and its epitopes, could be useful antigens for vaccines or diagnostics.

### EXAMPLE 1423

[7836] A DNA sequence (GBSx1508) was identified in S. agalactiae <SEQ ID 4367> which encodes the amino acid sequence <SEQ ID 4368>. This protein is predicted to be pullulanase (pulA). Analysis of this protein sequence reveals the following:

```
Possible site: 45
>>> Seems to have no N-terminal signal sequence
----- Final Results -----
                            bacterial cytoplasm --- Certainty = 0.3194(Affirmative) < succ>
                              bacterial membrane --- Certainty = 0.0000(Not Clear) < succ>
                                bacterial outside --- Certainty = 0.0000(Not Clear) < succ>
```

[7837] The protein has homology with the following sequences in the GENPEPT database.

| >GP: AAC44685 GB: U67061 pullulanase [Bacteroides thetaiotaomicron] | | | |
|---|---|---|---|
| Identities = 223/597 (37%), Positives = 331/597 (55%), Gaps = 55/597 (9%) | | | |
| Query: | 139 | EYSETKTAFRLWAPTAERVELILYHSTDETASVSKVLSMKRGTAVNYKNHKENTHGVWFT | 198 |
| | | EY+ T F LW+PTA+ V L+LY + E + + M+ G G W | |
| Sbjct: | 46 | EYTPEATKFTLWSPTADEVRLMLYEA-GEGGHAYETVKMQSGE-----------EGTWTA | 93 |
| Query: | 199 | ELEGNYNYQAYTYRVYYRRRTFKITRDPYSIATTANGKRSIVIAPEALTPEGFKISHGKE | 258 |
| | | + + + YT+ V + T + A NGKR+ +I ++ P+G++ + | |
| Sbjct: | 94 | VVSKDLIGKFYTFNVKIDDKWQGDTPGINARAVGVNGKRAAIIDWQSTNPOGWE----SD | 149 |
| Query: | 259 | AKWRLENPNQAVIYEMHVRDFSISETSGVKTDYHGKFKGLHQKGTVNQHGDKTTFDYVQD | 318 |
| | | + L++P +IYEMH RDFS+ TSGVK GK+ L + GT+N T D++ + | |
| Sbjct: | 150 | TRPPLKSPADMIIYEMHHRDFSVDSTSGVKNK--GKYLALTEHGTMNSDKLLTGIDHLIE | 207 |
| Query: | 319 | LGVNYIQLQPIFDHHQTFDDD-GHYAYNWGYDPENYNVPEASFSSNPHEPATRILELKSA | 377 |
| | | LGV ++ L P FD+ + +YNWGYDP+NYNVP+ S++++P++PATR+ E K | |
| Sbjct: | 208 | LGVTHVHLLPSFDYASVDETRLNENSYNWGYDPQNYNVPDGSYATDPYQPATRVKEFKQM | 267 |
| Query: | 378 | IQAYHDAGIGVIMDVVYNHTFSSTDSAFQLTVPDYYYRMNHNGTFQNGSGCGNETASEKE | 437 |
| | | +QA H AGI VIMDVVYNHTF++ +S F+ TVP Y+YR + T NGSGCGNETASE+ | |
| Sbjct: | 268 | VQALHKAGIRVIMDVVYNHTFNTDESNFERTVPGYFYRQKEDKTLANGSGCGNETASERL | 327 |
| Query: | 438 | MCRKYILDSVLYWVKEYNIDGFRFDLMGLHDVETMNIIRNELNKIDPRILVYGEGWDMGA | 497 |
| | | M RK++++SVLYW+KEY++DGFRFDLMG+HD+ETMN IR +N +DP I +YGEGW A | |
| Sbjct: | 328 | MMRKFMVESVLYWIKEYHVDGFRFDLMGIHDIETMNEIRKAVNAVDPTICIYGEGWAAEA | 387 |
| Query: | 498 | GLTPQNK-AKKDNAYQMPGIGFFNDDVRDAV---KGAEIYGEFKKGLVSGNSTEDIVAKG | 553 |
| | | P + A K N Q+PG+ F+D++RD + G + G F G+ G E V G | |
| Sbjct: | 388 | PQYPADSLAMKGNIAQIPGVAVFSDELRDGLCGPVGDKRKGAFLAGIPGG---EMSVKFG | 444 |
| Query: | 554 | ILGSDE-------LVSYI------DPSQVLNYVEAHDNYNLNDLLWELHPNDNEKQHIYR | 600 |
| | | I G+ E V+Y P Q+++YV HD L D L P+ +Q I | |
| Sbjct: | 445 | IAGAIEHPQVQCDSVNYTQKPWAKQPVQMISYVSCHDGLCLVDRLKASMPDITPEQLIRL | 504 |
| Query: | 601 | VEVASAMNLLMQGMAFMQLGQEFLRTKCYPTGDKGQLTQADKERAMNSYNAPDQVNQVNW | 660 |
| | | ++A A+ QG+ F+ G+E +R DK+ NSY +PD VN ++W | |
| Sbjct: | 505 | DKLAQAVVFTSQGIPFIYAGEEIMR---------------DKQGVDNSYKSPDAVNAIDW | 549 |
| Query: | 661 | DNVTFHKSTINFIRKIITLKTNSPYFSYSSFEEIRKHVFVESAQYHSGFISFTVEEH | 717 |
| | | T + +++I L+ + P F ++RKH+ + S I+F +++H | |
| Sbjct: | 550 | RRKTTSADVFMYYKRLIDLRKSHPAFRMGDAGQVRKHLEFLPVE-GSNLIAFRLKDH | 605 |

[7838] Based on this analysis, it was predicted that this protein and its epitopes, could be useful antigens for vaccines or diagnostics.

### EXAMPLE 1424

[7839] A DNA sequence (GBSx1509) was identified in S. agalactiae <SEQ ID 4369> which encodes the amino acid sequence <SEQ ID 4370>. Analysis of this protein sequence reveals the following:

```
Possible site: 40
>>> Seems to have no N-terminal signal sequence
----- Final Results -----
                            bacterial cytoplasm --- Certainty = 0.2368(Affirmative) < succ>
                              bacterial membrane --- Certainty = 0.0000(Not Clear) < succ>
                                bacterial outside --- Certainty = 0.0000(Not Clear) < succ>
```

[7840] The protein has homology with the following sequences in the GENPEPT database.

| >GP: CAB12492 GB: Z99107 similar to hypothetical proteins | | | |
|---|---|---|---|
| [Bacillus subtilis] | | | |
| Identities = 151/293 (51%), Positives = 193/293 (65%), Gaps = 5/293 (1%) | | | |
| Query: | 5 | KKARLIYNPTSGQEIMKKNVAEVLDILEGFGYETSAFQTTPTKNSARDEATRAAQAGFDL | 64 |
| | | K+AR+IYNPTSG+EI KK++A+VL E GYETS TT A A AA FDL | |
| Sbjct: | 2 | KRARIIYNPTSGREIFKKHLAQVLQKFEQAGYETSTHATT-CAGDATHAAKEAALREFDL | 60 |
| Query: | 65 | IVAAGGDGTINEVVNGIAPLKRRPKMAIIPTGTTNDFARALKIPRGNPIEATKLIGKNQI | 124 |
| | | I+AAGGDGTINEVVNG+APL RP + +IP GTTNDFARAL IPR + ++A + | |
| Sbjct: | 61 | IIAAGGDGTINEVVNGLAPLDNRPTLGVIPVGTTNDFARALGIPREDILKAADTVINGVA | 120 |
| Query: | 125 | VKMDIGQAQEDNYFINIAAAGSLTELTYSVPSQLKTTFGYLAYLAKGVELLPRVRKVPVK | 184 |
| | | +DIGQ YFINIA G LTELTY VPS+LKT G LAY KG+E+LP +R V+ | |
| Sbjct: | 121 | RPIDIGQVN-GQYFINIAGGGRLTELTYDVPSKLKTMLGQLAYYLKGMEMLPSLRPTEVE | 179 |
| Query: | 185 | ITHDKGEFIGDASMIFVAITNSVGGFEQIAPDAKLDDGKFTLILVKTANLIEIMHLIRLV | 244 |
| | | I +D F G+ + V +TNSVGGFE++APD+ L+DG F L+++K ANL E + + + | |
| Sbjct: | 180 | IEYDGKLFQGEIMLFLVTLTNSVGGFEKLAPDSSLNDGMFDLMILKKANLAEFIRVATMA | 239 |
| Query: | 245 | LAGGKHINDKRVEYIKTSYLTIEPLSDERMMINLDGEYGGDAPITLANLKNHI | 297 |
| | | L G+HIND+ + Y K + + + E+M +NLDGEYGG P NL HI | |
| Sbjct: | 240 | LR-GEHINDQHIIYTKANRVKVN--VSEKMQLNLDGEYGGMLPGEFVNLYRHI | 289 |

[7841] A related DNA sequence was identified in S. pyogenes <SEQ ID 4371> which encodes the amino acid sequence <SEQ ID 4372>. Analysis of this protein sequence reveals the following:

```
Possible site: 40
>>> Seems to have no N-terminal signal sequence
----- Final Results -----
                            bacterial cytoplasm --- Certainty = 0.2501(Affirmative) < succ>
                              bacterial membrane --- Certainty = 0.0000(Not Clear) < succ>
                                bacterial outside --- Certainty = 0.0000(Not Clear) < succ>
```

[7842] An alignment of the GAS and GBS proteins is shown below.

| Identities = 272/334 (81%), Positives = 300/334 (89%) | | | |
|---|---|---|---|
| Query: | 1 | MKKQKKARLIYNPTSGQEIMKKNVAEVLDILEGFGYETSAFQTTPTKNSARDEATRAAQA | 60 |
| | | MKKQ +ARLIYNPTSGQE+M+K+V EVLDILEGFGYETSAFQTT KNSA +EA RAA+A | |
| Sbjct: | 1 | MKKQLRARLIYNPTSGQELMRKSVPEVLDILEGFGYETSAFQTTAQKNSALNEARRAAKA | 60 |
| Query: | 61 | GFDLIVAAGGDGTINEVVNGIAPLKRRPKMAIIPTGTTNDFARALKIPRGNPIEATKLIG | 120 |
| | | GFDL++AAGGDGTINEVVNGIAPLK+RPKMAIIPTGTTNDFARALK+PRGNP +A KLIG | |
| Sbjct: | 61 | GFDLLIAAGGDGTINEVVNGIAPLKKRPKMAIIPTGTTNDFARALKVPRGNPSQAAKLIG | 120 |
| Query: | 121 | KNQIVKMDIGQAQEDNYFINIAAAGSLTELTYSVPSQLKTTFGYLAYLAKGVELLPRVRK | 180 |
| | | KNQ ++MDIG+A++D YFINIAAAGSLTELTYSVPSQLKT FGYLAYLAKGVELLPRV | |
| Sbjct: | 121 | KNQTIQMDIGRAKKDTYFINIAAAGSLTELTYSVPSQLKTMFGYLAYLAKGVELLPRVSN | 180 |
| Query: | 181 | VPVKITHDKGEFIGDASMIFVAITNSVGGFEQIAPDAKLDDGKFTLILVKTANLIEIMHL | 240 |
| | | VPVKITHDKG F G SMIF AITNSVGGFE IAPDAKLDDG FTLIL+KTANL EI+HL | |
| Sbjct: | 181 | VPVKITHDKGVFEGQVSMIFAAITNSVGGFEMIAPDAKLDDGMFTLILIKTANLFEIVHL | 240 |
| Query: | 241 | IRLVLAGGKHINDKRVEYIKTSYLTIEPLSDERMMINLDGEYGGDAPITLANLKNHIRFF | 300 |
| | | +RL+L GGKHI D+RVEYIKTS + IEP +RMMINLDGEYGGDAPITL NLKNHI FF | |
| Sbjct: | 241 | LRLILDGGKHITDRRVEYIKTSKIVIEPQCGKRMMINLDGEYGGDAPITLENLKNHITFF | 300 |
| Query: | 301 | ANTDEISDDALVLDKDELAIEAIAQKFANEVDDL | 334 |
| | | A+TD ISDDALVLD+DEL IE I +KFA+EV+DL | |
| Sbjct: | 301 | ADTDLISDDALVLDQDELEIEEIVKKFAHEVEDL | 334 |

[7843] Based on this analysis, it was predicted that these proteins and their epitopes could be useful antigens for vaccines or diagnostics.

### EXAMPLE 1425

[7844] A DNA sequence (GBSx1510) was identified in S. agalactiae <SEQ ID 4373> which encodes the amino acid sequence <SEQ ID 4374>. This protein is predicted to be DNA ligase (ligA-1) Analysis of this protein sequence reveals the following:

| Possible site: 16 | | | | |
|---|---|---|---|---|
| >>> Seems to have no N-terminal signal sequence | | | | |
| | INTEGRAL | Likelihood = −0.27 | Transmembrane | 363-379 (363-379) |

```
----- Final Results -----
                              bacterial membrane --- Certainty = 0.1107(Affirmative) < succ>
                                bacterial outside --- Certainty = 0.0000(Not Clear) < succ>
                            bacterial cytoplasm --- Certainty = 0.0000(Not Clear) < succ>
```

[7845] A related GBS nucleic acid sequence <SEQ ID 9763> which encodes amino acid sequence <SEQ ID 9764> was also identified.

[7846] The protein has homology with the following sequences in the GENPEPT database.

| >GP: CAB12482 GB: Z99107 similar to DNA ligase [Bacillus subtilis] | | | |
|---|---|---|---|
| Identities = 346/657 (52%), Positives = 462/657 (69%), Gaps = 8/657 (1%) | | | |
| Query: | 2 | ENRMNELVSLLNQYAKEYYTQDNPTVSDSQYDQLYRELVELEKQHPENILPNSPTHRVGG | 61 |
| | | + R EL +N+Y+ EYYT D P+V D++YD+L +EL+ +E++HP+ P+SPT RVGG | |
| Sbjct: | 7 | KQRAEELRRTINKYSYEYYTLDEPSVPDAEYDRLMQELIAIEEEHPDLRTPDSPTQRVGG | 66 |
| Query: | 62 | LVLEGFEKYQHEYPLYSLQDAFSKEELIAFDKRVKAEF-PTAAYMAELKIDGLSVSLTYV | 120 |
| | | VLE F+K H P+ SL +AF+ ++L FD+RV+ AY ELKIDGL+VSL Y | |
| Sbjct: | 67 | AVLEAFQKVTHGTPMLSLGNAFNADDLRDFDRRVRQSVGDDVAYNVELKIDGLAVSLRYE | 126 |
| Query: | 121 | NGVLQVGATRGDGNIGENITENLKRVHDIPLHLDQSLDITVRGECYLPKESFEAINIEKR | 180 |
| | | +G GATRGDG GE+ITENLK + +IPL +++ L I VRGE Y+PK SFEA+N E+ | |
| Sbjct: | 127 | DGYFVRGATRGDGTTGEDITENLKTIRNIPLKMNRELSIEVRGEAYMPKRSFEALNEERI | 186 |
| Query: | 181 | ANGEQEFANPRNAAAGTLRQLNTGIVAKRKLATFLYQEASPTQK--ETQDDVLKELESYG | 238 |
| | | N E+ FANPRNAAAG+LRQL+ I AKR L F+Y A + ETQ L L+ G | |
| Sbjct: | 187 | KNEEEPFANPRNAAAGSLRQLDPKIAAKRNLDIFVYSIAELDEMGVETQSQGLDFLDELG | 246 |
| Query: | 239 | FSVNHHRLISSSMEKIWDFIQTIEKDRVSLPYDIDGIVIKVNSIAMQEELGFTVKAPRWA | 298 |
| | | F N R S+E++ I ++ R LPY+IDGIVIKV+S+ QEELGFT K+PRWA | |
| Sbjct: | 247 | FKTNQERKKCGSIEEVITLIDELQAKRADLPYEIDGIVIKVDSLDQQEELGFTAKSPRWA | 306 |
| Query: | 299 | IAYKFPAEEKEAEILSVDWTVGRTGVVTPTANLTPVQLAGTTVSRATLHNVDYIAEKDIR | 358 |
| | | IAYKFPAEE ++L ++ VGRTGV+TPTA L PV++AGTTVSRA+LHN D I EKDIR | |
| Sbjct: | 307 | IAYKFPAEEVVTKLLDIELNVGRTGVITPTAILEPVKVAGTTVSRASLHNEDLIKEKDIR | 366 |
| Query: | 359 | IGDTVVVYKAGDIIPAVLNVVMSKRNQQEVML-IPKLCPSCGSELVHFEGEVALRCINPL | 417 |
| | | I D VVV KAGDIIP V+NV++ +R +E +P CP CGSELV EGEVALRCINP | |
| Sbjct: | 367 | ILDKVVVKKAGDIIPEVVNVLVDQRTGEEKEFSMPTECPECGSELVRIEGEVALRCINPE | 426 |
| Query: | 418 | CPNQIKERLAHFASRDAMNITGFGPSLVEKLFDAHLIADVADIYRLSIENLLTLDGIKEK | 477 |
| | | CP QI+E L HF SR+AMNI G G ++ +LF+ +L+ +VAD+Y+L+ E ++ L+ + EK | |
| Sbjct: | 427 | CPAQIREGLIHFVSRNAMNIDGLGERVITQLFEENLVRNVADLYKLTKERVIQLERMGEK | 486 |
| Query: | 478 | SATKIYHAIQSSKENSAEKLLFGLGIRHVGSKASRLLLEEFGNLRQLSQASQESIASIDG | 537 |
| | | S + +IQ SKENS E+LLFGLGIR +GSKA++ L F +L L +AS+E + ++D | |
| Sbjct: | 487 | STENLISSIQKSKENSLERLLFGLGIRFIGSKAAKTLAMHFESLENLKKASKEELLAVDE | 546 |
| Query: | 538 | LGGVIAKSLHTFFEKEEVDKLLEELTSYNVNFNYLG----KRVSTDAQLSGLTVVLTGKL | 593 |
| | | +G +A ++ T+F KEE+ +LL EL VN Y G K +D+ +G T+VLTGKL | |
| Sbjct: | 547 | IGEKMADAVITYFHKEEMLELLNELQELGVNTLYKGPKKVKAEDSDSYFAGKTIVLTGKL | 606 |
| Query: | 594 | EKMTRNEAKEKLQNLGAKVTGSVSKKTDLIVAGSDAGSKLTKAQDLGITIQDEDWLL | 650 |
| | | E+++RNEAK +++ LG K+TGSVSK TDL++AG AGSKLTKAQ+L I + +E+ L+ | |
| Sbjct: | 607 | EELSRNEAKAQIEALGGKLTGSVSKNTDLVIAGEAAGSKLTKAQELNIEVWNEEQLM | 663 |

[7847] A related DNA sequence was identified in S. pyogenes <SEQ ID 4375> which encodes the amino acid sequence <SEQ ID 4376>. Analysis of this protein sequence reveals the following:

| Possible site: 61 | | | | |
|---|---|---|---|---|
| >>> Seems to have no N-terminal signal sequence | | | | |
| | INTEGRAL | Likelihood = −0.43 | Transmembrane | 363-379 (363-379) |

```
----- Final Results -----
                              bacterial membrane --- Certainty = 0.1171(Affirmative) < succ>
                                bacterial outside --- Certainty = 0.0000(Not Clear) < succ>
                            bacterial cytoplasm --- Certainty = 0.0000(Not Clear) < succ>
```

[7848] An alignment of the GAS and GBS proteins is shown below.

| Identities = 472/652 (72%), Positives = 556/652 (84%) | | | |
|---|---|---|---|
| Query: | 1 | MENRMNELVSLLNQYAKEYYTQDNPTVSDSQYDQLYRELVELEKQHPENILPNSPTHRVG | 60 |
| | | M+ R+ EL LLN+Y +YYT+D P+VSDS YD+LYRELV LE+ +PE +L +SPT +VG | |
| Sbjct: | 1 | MKKRIKELTDLLNRYRYDYYTKDAPSVSDSDYDKLYRELVTLEQSYPEYVLQDSPTQQVG | 60 |
| Query: | 61 | GLVLEGFEKYQHEYPLYSLQDAFSKEELIAFDKRVKAEFPTAAYMAELKIDGLSVSLTYV | 120 |
| | | G +L+GFEKY+H+YPL+SLQDAFS+EEL AFDKRVKAEFP A Y+AELKIDGLS+SL+Y | |
| Sbjct: | 61 | GTILKGFEKYRHQYPLFSLQDAFSREELDAFDKRVKAEFPNATYLAELKIDGLSISLSYE | 120 |
| Query: | 121 | NGVLQVGATRGDGNIGENITENLKRVHDIPLHLDQSLDITVRGECYLPKESFEAINIEKR | 180 |
| | | NG LQVGATRGDGNIGENITEN+K++ DIP L + L ITVRGE Y+ ++SF+AIN ++ | |
| Sbjct: | 121 | NGFLQVGATRGDGNIGENITENIKKIKDIPYQLSEPLTITVRGEAYMSRQSFKAINEARQ | 180 |
| Query: | 181 | ANGEQEFANPRNAAAGTLRQLNTGIVAKRKLATFLYQEASPTQKETQDDVLKELESYGFS | 240 |
| | | NGE EFANPRNAAAGTLRQL+T +VAKR+LATFLYQEASPT + Q++VL EL GFS | |
| Sbjct: | 181 | ENGETEFANPRNAAAGTLRQLDTSVVAKRQLATFLYQEASPTARNQQNEVLAELADLGFS | 240 |
| Query: | 241 | VNHHRLISSSMEKIWDFIQTIEKDRVSLPYDIDGIVIKVNSIAMQEELGFTVKAPRWAIA | 300 |
| | | VN + ++SSM++IWDFI+TIE R L YDIDG+VIKVNS+AMQEELGFTVKAPRWAIA | |
| Sbjct: | 241 | VNPYYQLTSSMDEIWDFIKTIEAKRDQLAYDIDGVVIKVNSLAMQEELGFTVKAPRWAIA | 300 |
| Query: | 301 | YKFPAEEKEAEILSVDWTVGRTGVVTPTANLTPVQLAGTTVSRATLHNVDYIAEKDIRIG | 360 |
| | | YKFPAEEKEAEILSVDWTVGRTGVVTPTANLTPVQLAGTTVSRATLHNVDYIAEKDIRIG | |
| Sbjct: | 301 | YKFPAEEKEAEILSVDWTVGRTGVVTPTANLTPVQLAGTTVSRATLHNVDYIAEKDIRIG | 360 |
| Query: | 361 | DTVVVYKAGDIIPAVLNVVMSKRNQQEVMLIPKLCPSCGSELVHFEGEVALRCINPLCPN | 420 |
| | | DTV+VYKAGDIIPAVLNVVMSKRNQQEVMLIPKLCPSCGSELVHFE EVALRCINPLCP+ | |
| Sbjct: | 361 | DTVIVYKAGDIIPAVLNVVMSKRNQQEVMLIPKLCPSCGSELVHFEDEVALRCINPLCPS | 420 |
| Query: | 421 | QIKERLAHFASRDAMNITGFGPSLVEKLFDAHLIADVADIYRLSIENLLTLDGIKEKSAT | 480 |
| | | I+ L HFASRDAMNITG GP++VEKLF A + DVADIY+L+ E+ + LDGIKEKSA | |
| Sbjct: | 421 | LIQRSLEHFASRDAMNITGLGPAIVEKLFLAGFVHDVADIYQLTKEDFMQLDGIKEKSAD | 480 |
| Query: | 481 | KIYHAIQSSKENSAEKLLFGLGIRHVGSKASRLLLEEFGNLRQLSQASQESIASIDGLGG | 540 |
| | | K+ AI++SK NSAEKLLFGLGIRH+GSK SRL+LE +G++ L A +E IA IDGLG | |
| Sbjct: | 481 | KLLAAIEASKSNSAEKLLFGLGIRHIGSKVSRLILEVYGDISALLTAKEEEIARIDGLGS | 540 |
| Query: | 541 | VIAKSLHTFFEKEEVDKLLEELTSYNVNFNYLGKRVSTDAQLSGLTVVLTGKLEKMTRNE | 600 |
| | | IA+SL +FE++ L++EL + VN +Y G++V++DA L GLTVVLTGKL ++ RNE | |
| Sbjct: | 541 | TIAQSLTQYFEQKTAAILVDELKTAGVNMHYSGQKVNSDAALFGLTVVLTGKLNQLNRNE | 600 |
| Query: | 601 | AKEKLQNLGAKVTGSVSKKTDLIVAGSDAGSKLTKAQDLGITIQDEDWLLNL | 652 |
| | | AK+KL+ LGAKVTGSVSKKTDL++AGSDAGSKL KA+ LGI I+DEDWL L | |
| Sbjct: | 601 | AKDKLEALGAKVTGSVSKKTDLVIAGSDAGSKLEKAKSLGIRIEDEDWLRQL | 652 |

[7849] Based on this analysis, it was predicted that these proteins and their epitopes could be useful antigens for vaccines or diagnostics.

### EXAMPLE 1426

[7850] A DNA sequence (GBSx1511) was identified in S. agalactiae <SEQ ID 4377> which encodes the amino acid sequence <SEQ ID 4378>. Analysis of this protein sequence reveals the following:

| Possible Site: 32 | | | | |
|---|---|---|---|---|
| >>> Seems to have a cleavable N-term signal seq. | | | | |
| | INTEGRAL | Likelihood = −5.63 | Transmembrane | 110-126 (108-128) |
| | INTEGRAL | Likelihood = −2.13 | Transmembrane | 142-158 (141-159) |
| | INTEGRAL | Likelihood = −1.12 | Transmembrane | 75-91 (75-93) |

```
----- Final Results -----
                              bacterial membrane --- Certainty = 0.3251(Affirmative) < succ>
                                bacterial outside --- Certainty = 0.0000(Not Clear) < succ>
                            bacterial cytoplasm --- Certainty = 0.0000(Not Clear) < succ>
```

[7851] The protein has homology with the following sequences in the GENPEPT database.

| >GP: CAA68244 GB: X99978 citrulline cluster-linked gene [Lactobacillus | | | |
|---|---|---|---|
| plantarum] | | | |
| Identities = 56/158 (35%), Positives = 91/158 (57%), Gaps = 8/158 (5%) | | | |
| Query: | 13 | AIVTAIYIVLTITPPFNAIAYGAYQFRVSEMLNFLAFYHRKYLFAVTLGCMISNLYSFG- | 71 |
| | | A+V A+Y+VL + P ++A GA QFRVSE LN LA ++RKY++ + G ++ + + G | |
| Sbjct: | 13 | ALVAAMYVVLCLGPAAFSLASGAIQFRVSEGLNHLAVFNRKYIWGIVAGVILFDAFGPGA | 72 |
| Query: | 72 | -MIDVFVGGGSTLLFVYLGTILFKQYQKDYLFNGLINKAFFFFSFFFAASMITVAVELKI | 130 |
| | | +++V GGG +LL + + T L + K L+N A F S F A MIT+ + | |
| Sbjct: | 73 | SLLNVLFGGGQSLLALLVLTWLAPKL-KTVWQRMLLNIALFTVSMFMIALMITM-----M | 126 |
| Query: | 131 | VAGLPLLLTWLTTAVGELASLLVGAVLVDKLSRHVDFT | 168 |
| | | +G+ T+LTTA+ EL + + A ++ L R + F+ | |
| Sbjct: | 127 | SSGVAFWPTYLTTALSELIIMSITAPIMYSLDRVLHFS | 164 |

[7852] A related DNA sequence was identified in S. pyogenes <SEQ ID 4379> which encodes the amino acid sequence <SEQ ID 4380>. Analysis of this protein sequence reveals the following:

| Possible site: 32 | | | | |
|---|---|---|---|---|
| >>> Seems to have an uncleavable N-term signal seq | | | | |
| | INTEGRAL | Likelihood = −4.41 | Transmembrane | 75-91 (70-94) |
| | INTEGRAL | Likelihood = −3.82 | Transmembrane | 12-28 (8-28) |
| | INTEGRAL | Likelihood = −2.28 | Transmembrane | 141-157 (140-158) |
| | INTEGRAL | Likelihood = −0.64 | Transmembrane | 110-126 (110-126) |
| | INTEGRAL | Likelihood = −0.59 | Transmembrane | 55-71 (54-73) |

```
----- Final Results -----
                              bacterial membrane --- Certainty = 0.2763(Affirmative) < succ>
                                bacterial outside --- Certainty = 0.0000(Not Clear) < succ>
                            bacterial cytoplasm --- Certainty = 0.0000(Not Clear) < succ>
```

[7853] An alignment of the GAS and GBS proteins is shown below.

| Identities = 114/167 (68%), Positives = 137/167 (81%), Gaps = 1/167 (0%) | | | |
|---|---|---|---|
| Query: | 1 | MNTFTTRDYAHMAIVTAIYIVLTITPPFNAIAYGAYQFRVSEMLNFLAFYHRKYLFAVTL | 60 |
| | | M T DY H+ +V A+Y+VLTITPP NAI+YG YQFR+SEM+NFLAFYHRKY+ AVTL | |
| Sbjct: | 1 | MTKLTVHDYVHIGLVAALYVVLTITPPLNAISYGMYQFRISEMMNFLAFYHRKYIIAVTL | 60 |
| Query: | 61 | GCMISNLYSFGMIDVFVGGGSTLLFVYLGTILFKQYQKDYLFNGLINKAFFFFSFFFAAS | 120 |
| | | GCMI+N YSFG+IDVFVGGGSTL+FV LG ILF +YQKDYLFNG+ NKAF +FSFFFA S | |
| Sbjct: | 61 | GCMIANFYSFGLIDVFVGGGSTLIFVTLGVILFSKYQKDYLFNGIFNKAFVYFSFFFATS | 120 |
| Query: | 121 | MITVAVELKIVAGLPLLLTWLTTAVGELASLLVGAVLVDKLSRHVDF | 167 |
| | | M VA+EL G P LLTW TTA+GEL SLL+G++++DKLS+ + F | |
| Sbjct: | 121 | MFNVAIELYFF-GAPFLLTWFTTALGELVSLLIGSLIIDKLSQRISF | 166 |

[7854] Based on this analysis, it was predicted that these proteins and their epitopes could be useful antigens for vaccines or diagnostics.

### EXAMPLE 1427

[7855] A DNA sequence (GBSx1513) was identified in S. agalactiae <SEQ ID 4381> which encodes the amino acid sequence <SEQ ID 4382>. Analysis of this protein sequence reveals the following:

| Possible site: 53 | | | | |
|---|---|---|---|---|
| >>> Seems to have no N-terminal signal sequence | | | | |
| | INTEGRAL | Likelihood = −11.20 | Transmembrane | 255-271 (245-281) |
| | INTEGRAL | Likelihood = −10.72 | Transmembrane | 141-157 (132-165) |
| | INTEGRAL | Likelihood = −8.17 | Transmembrane | 189-205 (185-208) |
| | INTEGRAL | Likelihood = −7.01 | Transmembrane | 36-52 (33-60) |

```
----- Final Results -----
                              bacterial membrane --- Certainty = 0.5479(Affirmative) < succ>
                                bacterial outside --- Certainty = 0.0000(Not Clear) < succ>
                            bacterial cytoplasm --- Certainty = 0.0000(Not Clear) < succ>
```

[7856] The protein has homology with the following sequences in the GENPEPT database.

| >GP: AAC35915 GB: AF071085 Orfde2 [Enterococcus faecalis] | | | |
|---|---|---|---|
| Identities = 83/276 (30%), Positives = 157/276 (56%), Gaps = 3/276 (1%) | | | |
| Query: | 17 | RPIQVFMRHFQSAEMDLSAIAVAYYLLVTAFPLLVIAANIFPYFHINVSDLLSLMQKNLP | 76 |
| | | R I+ H +AE+ S++ VAYYLL++ FPLL+ N+ PY I+ + +L + + +P | |
| Sbjct: | 15 | RFIETTQSHMVTAEIGNSSVVVAYYLLLSLFPLLIAVGNVLPYLRIDPNSVLPYIAEAIP | 74 |
| Query: | 77 | KNIYEPASRLAVDAFSKPSTGILGFASLTAFWTMSKSLTSLQKAINKAYGVDQHRDFVIS | 136 |
| | | K++Y+ ++ S G+L ++L AFW+ S+S+ +LQ A+NKA+GV+Q ++F++ | |
| Sbjct: | 75 | KDVYKNLEPAIRSLLTQRSGGLLSVSALAAFWSASQSINALQNAMNKAFGVEQRKNFILV | 134 |
| Query: | 137 | RLVGVGTGLIILFLLTFVLIFSTFSKPVLQIIVNMYDLGDTLTAWLLNLAQPVTFLTIFL | 196 |
| | | R+V L+ + + V++ + +++++ ++ ++ L P+T + + + | |
| Sbjct: | 135 | RVVSFLVILLFMVAIVGVVVILGLGQYIIELLQPIFHYSTSVIDTFQALKWPLTTVVLLV | 194 |
| Query: | 197 | GIGILYFILPNARIRKVRYVIPGTLFSTFVIGFFSNLISQYVLNRVEKMVDIKTFGSVVI | 256 |
| | | + ++Y ++PN ++ +R ++PG +FST S + YV ++ + GS + | |
| Sbjct: | 195 | IMCLIYAVVPNRKL-SLRSILPGAIFSTVGWMLLSQIFGLYVKYFSSRIASYQIIGSFI- | 252 |
| Query: | 257 | FILMLWFIFLAHIMILGAILNASVQEIATGKIESRR | 292 |
| | | ILMLW F A I+ILGAI+NA V E G E ++ | |
| Sbjct: | 253 | -ILMLWLNFAATIIILGAIVNAVVDEYLXGXKEKKQ | 287 |

[7857] A related DNA sequence was identified in S. pyogenes <SEQ ID 4383> which encodes the amino acid sequence <SEQ ID 4384>. Analysis of this protein sequence reveals the following:

| Possible site: 53 | | | | |
|---|---|---|---|---|
| >>> Seems to have no N-terminal signal sequence | | | | |
| | INTEGRAL | Likelihood = −12.58 | Transmembrane | 141-157 (132-168) |
| | INTEGRAL | Likelihood = −12.15 | Transmembrane | 189-205 (177-210) |
| | INTEGRAL | Likelihood = −11.68 | Transmembrane | 256-272 (245-280) |
| | INTEGRAL | Likelihood = −7.54 | Transmembrane | 36-52 (33-60) |

```
----- Final Results -----
                              bacterial membrane --- Certainty = 0.6031(Affirmative) < succ>
                                bacterial outside --- Certainty = 0.0000(Not Clear) < succ>
                            bacterial cytoplasm --- Certainty = 0.0000(Not Clear) < succ>
```

[7858] The protein has homology with the following sequences in the databases:

| >GP: CAA68244 GB: X99978 citrulline cluster-linked gene [Lactobacillus | | | |
|---|---|---|---|
| plantarum] | | | |
| Identities = 53/170 (31%), Positives = 92/170 (53%), Gaps = 11/170 (6%) | | | |
| Query: | 1 | MTKLTVHDYVHIGLVAALYVVLTITPPLNAISYGMYQFRISEMMNFLAFYHRKYIIAVTL | 60 |
| | | MT+ + ++ LVAA+YVVL + P +++ G QFR+SE +N LA ++RKYI + | |
| Sbjct: | 1 | MTQSKIRPWIINALVAAMYVVLCLGPAAFSLASGAIQFRVSEGLNHLAVFNRKYIWGIVA | 60 |
| Query: | 61 | GCMIANFYSFG--LIDVFVGGGSTLIFVTLGVILFSKYQKDYLFNGIFNKAFVYFSFFFA | 118 |
| | | G ++ + + G L++V GGG +L+ + + L K + ++ + + + F | |
| Sbjct: | 61 | GVILFDAFGPGASLLNVLFGGGQSLLALLVLTWLAPKLKT------VWQRMLLNIA-LFT | 113 |
| Query: | 119 | TSMFNVA--IELYFFGAPFLLTWFTTALGELVSLLIGSLIIDKLSQRISF | 166 |
| | | SMF +A I + G F T+ TTAL EL+ + I + I+ L + + F | |
| Sbjct: | 114 | VSMFMIALMITMMSSGVAFWPTYLTTALSELIIMSITAPIMYSLDRVLHF | 163 |
| !GB: AF071085 Orfde2 [Enterococcus faecalis] 176 2e−43 | | | |
| >GP: AAC35915 GB: AF071085 Orfde2 [Enterococcus faecalis] | | | |
| Identities = 90/271 (33%), Positives = 155/271 (56%), Gaps = 3/271 (1%) | | | |
| Query: | 19 | IQVFMRHLQSAEMDLSAIAVAYYLILTAFPLIVIAANIFPYLNIDIADLLRLMKQNLPKD | 78 |
| | | I+ H+ +AE+ S++ VAYYL+L+ FPL++ N+ PYL ID +L + + +PKD | |
| Sbjct: | 17 | IETTQSHMVTAEIGNSSVVVAYYLLLSLFPLLIAVGNVLPYLRIDPNSVLPYIAEAIPKD | 76 |
| Query: | 79 | IFRPASAIVENIFSKPSGSVLGVATLTGLWTMSRSLTSLQKAINKAYGASQHRDFFIGHL | 138 |
| | | +++ + ++ ++ SG +L V+ L W+ S+S+ +LQ A+NKA+G Q ++F + + | |
| Sbjct: | 77 | VYKNLEPAIRSLLTQRSGGLLSVSALAAFWSASQSINALQNAMNKAFGVEQRKNFILVRV | 136 |
| Query: | 139 | VGLLTSLIILFLLAFALIFSIFSKAAIQVLDKHYHLSDNITTIFLLLIQPITVLIIFVGL | 198 |
| | | V L L+ + + ++ + I++L +H S ++ F L P+T +++ V + | |
| Sbjct: | 137 | VSFLVILLFMVAIVGVVVILGLGQYIIELLQPIFHYSTSVIDTFQALKWPLTTVVLLVIM | 196 |
| Query: | 199 | MLLYFLLPNVKIKKIRYILPGTLFTSFVMTFLSNLVGNYVVYNVERMVDIKMFGSVMIFI | 258 |
| | | L+Y ++PN K+ +R ILPG +F++ LS + G YV Y R+ ++ GS I | |
| Sbjct: | 197 | CLIYAVVPNRKL-SLRSILPGAIFSTVGWMLLSQIFGLYVKYFSSRIASYQIIGS--FII | 253 |
| Query: | 259 | IMLWFIFLARILILGAIFNATYQEMSLGKLE | 289 |
| | | +MLW F A I+ILGAI NA E G E | |
| Sbjct: | 254 | LMLWLNFAATIIILGAIVNAVVDEYLXGXKE | 284 |

[7859] An alignment of the GAS and GBS proteins is shown below.

| Identities = 188/302 (62%), Positives = 244/302 (80%) | | | |
|---|---|---|---|
| Query: | 1 | MKLKKFFEDLLAKLEYRPIQVFMRHFQSAEMDLSAIAVAYYLLVTAFPLLVIAANIFPYF | 60 |
| | | M KK+F+ +L+K +Y PIQVFMRH QSAEMDLSAIAVAYYL++TAFPL+VIAANIFPY | |
| Sbjct: | 1 | MAEKKWFDKVLSKWQYEPIQVFMRHLQSAEMDLSAIAVAYYLILTAFPLIVIAANIFPYL | 60 |
| Query: | 61 | HINVSDLLSLMQKNLPKNIYEPASRLAVDAFSKPSTGILGFASLTAFWTMSKSLTSLQKA | 120 |
| | | +I+++DLL LM++NLPK+I+ PAS + + FSKPS +LG A+LT WTMS+SLTSLQKA | |
| Sbjct: | 61 | NIDIADLLRLMKQNLPKDIFRPASAIVENIFSKPSGSVLGVATLTGLWTMSRSLTSLQKA | 120 |
| Query: | 121 | INKAYGVDQHRDFVISRLVGVGTGLIILFLLTFVLIFSTFSKPVLQIIVNMYDLGDTLTA | 180 |
| | | INKAYG QHRDF I LVG+ T LIILFLL F LIFS FSK +Q++ Y L D +T | |
| Sbjct: | 121 | INKAYGASQHRDFFIGHLVGLLTSLIILFLLAFALIFSIFSKAAIQVLDKHYHLSDNITT | 180 |
| Query: | 181 | WLLNLAQPVTFLTIFLGIGILYFILPNARIRKVRYVIPGTLFSTFVIGFFSNLISQYVLN | 240 |
| | | L L QP+T L IF+G+ +LYF+LPN +I+K+RY++PGTLF++FV+ F SNL+ YV+ | |
| Sbjct: | 181 | IFLLLIQPITVLIIFVGLMLLYFLLPNVKIKKIRYILPGTLFTSFVMTFLSNLVGNYVVY | 240 |
| Query: | 241 | RVEKMVDIKTFGSVVIFILMLWFIFLAHIMILGAILNASVQEIATGKIESRRGDIMSLIQ | 300 |
| | | VE+MVDIK FGSV+IFI+MLWFIFLA I+ILGAI NA+ QE++ GK+E R GD++++++ | |
| Sbjct: | 241 | NVERMVDIKMFGSVMIFIIMLWFIFLARILILGAIFNATYQEMSLGKLEGRSGDMIAILK | 300 |
| Query: | 301 | KS | 302 |
| | | K+ | |
| Sbjct: | 301 | KT | 302 |

[7860] Based on this analysis, it was predicted that these proteins and their epitopes could be useful antigens for vaccines or diagnostics.

### EXAMPLE 1428

[7861] A DNA sequence (GBSx1514) was identified in S. agalactiae <SEQ ID 4385> which encodes the amino acid sequence <SEQ ID 4386>. Analysis of this protein sequence reveals the following:

```
Possible site: 22
>>> Seems to have no N-terminal signal sequence
----- Final Results -----
                            bacterial cytoplasm --- Certainty = 0.4200(Affirmative) < succ>
                              bacterial membrane --- Certainty = 0.0000(Not Clear) < succ>
                                bacterial outside --- Certainty = 0.0000(Not Clear) < succ>
```

[7862] The protein has no significant homology with any sequences in the GENPEPT database.

[7863] No corresponding DNA sequence was identified in S. pyogenes.

[7864] Based on this analysis, it was predicted that this protein and its epitopes, could be useful antigens for vaccines or diagnostics.

### EXAMPLE 1429

[7865] A DNA sequence (GBSx1515) was identified in S. agalactiae <SEQ ID 4387> which encodes the amino acid sequence <SEQ ID 4388>. This protein is predicted to be methionine aminopeptidase (map). Analysis of this protein sequence reveals the following:

```
Possible site: 14
>>> Seems to have no N-terminal signal sequence
----- Final Results -----
                            bacterial cytoplasm --- Certainty = 0.2342(Affirmative) < succ>
                              bacterial membrane --- Certainty = 0.0000(Not Clear) < succ>
                                bacterial outside --- Certainty = 0.0000(Not Clear) < succ>
```

[7866] A related GBS nucleic acid sequence <SEQ ID 9761> which encodes amino acid sequence <SEQ ID 9762> was also identified.

[7867] The protein has homology with the following sequences in the GENPEPT database.

| >GP: AAC35914 GB: AF071085 methionine aminopeptidase A [Enterococcus | | | |
|---|---|---|---|
| faecalis] | | | |
| Identities = 101/207 (48%), Positives = 128/207 (61%), Gaps = 31/207 (14%) | | | |
| Query: | 1 | MITLKSAREIEAMDRAGDFLASIHIGLRDIIKPGVDMWEVEEYVRRRCKEENVLPLQIGV | 60 |
| | | MITLKS REIE MD +G+ LA +H LR IKPG+ W++E +VR + + QIG | |
| Sbjct: | 1 | MITLKSPREIEMMDESGELLADVHRHLRTFIKPGITSWDIEVFVRDFIESHGGVAAQIGY | 60 |
| Query: | 61 | DGAVMDYPYATCCGLNDEVAHAFPRHYTLKQGDLLKVDMVLSEPLDKSIVDVSSLNFDNV | 120 |
| | | +G Y YATCC +NDE+ H FPR LK GDL+KVDM + | |
| Sbjct: | 61 | EG----YKYATCCSINDEICHGFPRKKVLKDGDLIKVDMCVD------------------ | 98 |
| Query: | 121 | AQMKKYTETYSGGLADSCWAYAVGEVSQEVKDLMSVTREAMYIGIEKAVIGNRIGDIGAA | 180 |
| | | G ++DSCW+Y VGE + E+ LM VT++A+Y+GIE+A +GNRIGDIG A | |
| Sbjct: | 99 | ---------LKGAISDSCWSYVVGESTPEIDRLMEVTKKALYLGIEQAQVGNRIGDIGHA | 149 |
| Query: | 181 | IQDYAESRGYGVVRDLVGHGVGPTMHE | 207 |
| | | IQ Y E GYGVVRD VGHG+GPT+HE | |
| Sbjct: | 150 | IQTYVEGEGYGVVRDFVGHGIGPTIHE | 176 |

[7868] A related DNA sequence was identified in S. pyogenes <SEQ ID 4389> which encodes the amino acid sequence <SEQ ID 4390>. Analysis of this protein sequence reveals the following:

```
Possible site: 42
>>> Seems to have no N-terminal signal sequence
----- Final Results -----
                            bacterial cytoplasm --- Certainty = 0.2082(Affirmative) < succ>
                              bacterial membrane --- Certainty = 0.0000(Not Clear) < succ>
                                bacterial outside --- Certainty = 0.0000(Not Clear) < succ>
```

[7869] An alignment of the GAS and GBS proteins is shown below.

| Identities = 256/286 (89%), Positives = 273/286 (94%) | | | |
|---|---|---|---|
| Query: | 1 | MITLKSAREIEAMDRAGDFLASIHIGLRDIIKPGVDMWEVEEYVRRRCKEENVLPLQIGV | 60 |
| | | MITLKSAREIEAMDRAGDFLA IHIGLRDIIKPGVDMWEVE YVRRRCKE+NVLPLQIGV | |
| Sbjct: | 1 | MITLKSAREIEAMDRAGDFLAGIHIGLRDIIKPGVDMWEVEAYVRRRCKEDNVLPLQIGV | 60 |
| Query: | 61 | DGAVMDYPYATCCGLNDEVAHAFPRHYTLKQGDLLKVDMVLSEPLDKSIVDVSSLNFDNV | 120 |
| | | DG +MDYPYATCCGLNDEVAHAFPRHY LK+GDLLKVDMVLSEPLDKSIVDV++L+FDNV | |
| Sbjct: | 61 | DGHMMDYPYATCCGLNDEVAHAFPRHYILKEGDLLKVDMVLSEPLDKSIVDVAALDFDNV | 120 |
| Query: | 121 | AQMKKYTETYSGGLADSCWAYAVGEVSQEVKDLMSVTREAMYIGIEKAVIGNRIGDIGAA | 180 |
| | | +MKK+T +Y+GGLADSCWAYAVG S E+K LM VT+EAMY GIEKAVIGNRIGDIGAA | |
| Sbjct: | 121 | PEMKKWTGSYTGGLADSCWAYAVGTPSDEIKQLMDVTKEAMYRGIEKAVIGNRIGDIGAA | 180 |
| Query: | 181 | IQDYAESRGYGVVRDLVGHGVGPTMHEEPMVPNYGTAGRGLRLREGMVLTIEPMINTGTW | 240 |
| | | +Q+YAES GYGVVRDLVGHGVGPTMHEEPMVPNYGTAGRGLRL+EGMVLT+EPMINTGTW | |
| Sbjct: | 181 | VQEYAESFGYGVVRDLVGHGVGPTMHEEPMVPNYGTAGRGLRLKEGMVLTVEPMINTGTW | 240 |
| Query: | 241 | EIDTDMKTGWAHKTLDGGLSCQYEHQFVITKDGPVILTSQGEERTY | 286 |
| | | EIDTD+KTGWAHKTLDGGLSCQYEHQFVITKDGPVILTSQGEERTY | |
| Sbjct: | 241 | EIDTDIKTGWAHKTLDGGLSCQYEHQFVITKDGPVILTSQGEERTY | 286 |

[7870] Based on this analysis, it was predicted that these proteins and their epitopes could be useful antigens for vaccines or diagnostics.

### EXAMPLE 1430

[7871] A DNA sequence (GBSx1516) was identified in S. agalactiae <SEQ ID 4391> which encodes the amino acid sequence <SEQ ID 4392>. Analysis of this protein sequence reveals the following:

```
Possible site: 30
>>> Seems to have no N-terminal signal sequence
----- Final Results -----
                            bacterial cytoplasm --- Certainty = 0.3473(Affirmative) < succ>
                              bacterial membrane --- Certainty = 0.0000(Not Clear) < succ>
                                bacterial outside --- Certainty = 0.0000(Not Clear) < succ>
```

[7872] A related GBS nucleic acid sequence <SEQ ID 9759> which encodes amino acid sequence <SEQ ID 9760> was also identified.

[7873] The protein has homology with the following sequences in the GENPEPT database.

| >GP: BAB06894 GB: AP001518 unknown conserved | | | |
|---|---|---|---|
| protein [Bacillus halodurans] | | | |
| Identities = 158/431 (36%), Positives = 270/431 (61%), Gaps = 6/431 (1%) | | | |
| Query: | 6 | SKHQEILEYLENLAVGKRVSVRSISNHLKVSDGTAYRAIKEAENRGIVETRPRSGTVRVA | 65 |
| | | +KH++IL+Y+ NL VG+++SVR I+ L+VS+GTAYRAIKEAEN+G+V T R GT+R+ | |
| Sbjct: | 3 | TKHEQILQYITNLEVGEKISVRRIAKDLQVSEGTAYRAIKEAENQGLVSTIERVGTIRIE | 62 |
| Query: | 66 | QKAKVNIEKLTYAEIARISDSQVVAGIEGLSKEFSKFSIGAMTHRNIEKYLVQGGLLIVG | 125 |
| | | +K K NIEKLTYAE+ I D QV+ G +GL K ++F IGAM + +Y+ G LLIVG | |
| Sbjct: | 63 | KKQKENIEKLTYAEVVNIVDGQVLGGRDGLHKTLNRFVIGAMKLDAMMRYVEPGNLLIVG | 122 |
| Query: | 126 | DRDEIQHLALQHQNAILVTGGFNVSPSVCRLADKLQIPVMVTHYDTFTVSTMINHTLSNA | 185 |
| | | +R ++ +AL+ A+L+TGGF+ S +LAD+L +PV+ T YDTFTV+TMIN + + | |
| Sbjct: | 123 | NRYQVHQIALEAGAAVLITGGFDTSDEAIKLADELDLPVISTSYDTFTVATMINRAIYDQ | 182 |
| Query: | 186 | KIRTDLKTVEQVYQSQMDYGFLAQDDTVKEFNLLVKQTKNVRFPIVNQANVVVGVVSVQD | 245 |
| | | I+ ++ V+ + D ++ ++ V +++ L ++T + R+P++++ + G+V+ +D | |
| Sbjct: | 183 | LIKKEITLVDDILIPLQDTYYMTTENVVGKWHELNEKTGHSRYPVIDENMKIQGMVAAKD | 242 |
| Query: | 246 | ILGKDKEVKLATVMSKNIIVAKPRMSLANISQKMIFEDLNMMPVVSDDFELLGVITRRQA | 305 |
| | | +L + + VM+KN I R S+A ++ M++E + ++PV+ +L+GV++R+ | |
| Sbjct: | 243 | VLNASRHTPIEKVMTKNPITVSERTSVAAVAHVMVWEGIELLPVIDSHRKLIGVVSRQDV | 302 |
| Query: | 306 | VENLSMSQ-----GTDLYTYSDQILSNLQIEDG-HFSFLVEPAMIDHTGSLTQGVLTEFL | 359 |
| | | ++ L M Q G + L+ + G + + P M + G+++ GV+T + | |
| Sbjct: | 303 | LKALQMIQRQPHVGETIEDLMTNGLNESSSDQGDSYEVEITPQMTNQLGTISHGVMTSLV | 362 |
| Query: | 360 | KEICIRVLTRKHQRSIVVKQMTLYFLQPVQIDEIIMVTPTIISEKRREATLDLELKLENK | 419 |
| | | E RVL + + +VV+ +TLYFL+PVQID + + P ++ R+ +D+E+ E + | |
| Sbjct: | 363 | IESGSRVLRKYKKGDLVVENITLYFLKPVQIDSRLTIRPRVLEIGRKHGKIDVEMYHEGE | 422 |
| Query: | 420 | IIAKAMIAVKI | 430 |
| | | I+ KA+ +I | |
| Sbjct: | 423 | IVGKALFMAQI | 433 |

[7874] A related DNA sequence was identified in S. pyogenes <SEQ ID 4393> which encodes the amino acid sequence <SEQ ID 4394>. Analysis of this protein sequence reveals the following:

```
Possible site: 30
>>> Seems to have no N-terminal signal sequence
----- Final Results -----
                            bacterial cytoplasm --- Certainty = 0.3011(Affirmative) < succ>
                              bacterial membrane --- Certainty = 0.0000(Not Clear) < succ>
                                bacterial outside --- Certainty = 0.0000(Not Clear) < succ>
```

[7875] An alignment of the GAS and GBS proteins is shown below.

| Identities = 267/431 (61%), Positives = 351/431 (80%) | | | |
|---|---|---|---|
| Query: | 1 | MIIVMSKHQEILEYLENLAVGKRVSVRSISNHLKVSDGTAYRAIKEAENRGIVETRPRSG | 60 |
| | | +II+MSKHQ+IL+YLE LA+GK+VSVRSISNHLKVSDGTAYRAIKEAENRGIVET+PRSG | |
| Sbjct: | 1 | VIIIMSKHQDILDYLEKLAIGKKVSVRSISNHLKVSDGTAYRAIKEAENRGIVETKPRSG | 60 |
| Query: | 61 | TVRVAQKAKVNIEKLTYAEIARISDSQVVAGIEGLSKEFSKFSIGAMTHRNIEKYLVQGG | 120 |
| | | TVR+ +K +V I++LTY+EIARISDS+V+AG GL EFS+FSIGAMT +NI +YLV+GG | |
| Sbjct: | 61 | TVRIEKKGRVRIDRLTYSEIARISDSEVLAGHAGLGHEFSRFSIGAMTQQNIRRYLVKGG | 120 |
| Query: | 121 | LLIVGDRDEIQHLALQHQNAILVTGGFNVSPSVCRLADKLQIPVMVTHYDTFTVSTMINH | 180 |
| | | LLIVGDR+ IQ LAL++ NAILVTGGF VS V +A+ +IPVMVTHYDTFTV+TMINH | |
| Sbjct: | 121 | LLIVGDRETIQLLALENHNAILVTGGFPVSKRVIEMANNQRIPVMVTHYDTFTVATMINH | 180 |
| Query: | 181 | TLSNAKIRTDLKTVEQVYQSQMDYGFLAQDDTVKEFNLLVKQTKNVRFPIVNQANVVVGV | 240 |
| | | LSN +I+TDLKTVEQV DYG+L +D +V+EFN L+K+T+ VRFP+++ V+GV | |
| Sbjct: | 181 | ALSNIRIKTDLKTVEQVMIPITDYGYLCEDSSVEEFNTLIKKTRQVRFPVLDYKRKVIGV | 240 |
| Query: | 241 | VSVQDILGKDKEVKLATVMSKNIIVAKPRMSLANISQKMIFEDLNMMPVVSDDFELLGVI | 300 |
| | | VS++D++ + KL VMSKN I A+P SLANISQKMIFEDLNM+PV ++ LLG+I | |
| Sbjct: | 241 | VSMRDVVDQLPTTKLTKVMSKNPITARPNTSLANISQKMIFEDLNMLPVTDEENNLLGMI | 300 |
| Query: | 301 | TRRQAVENLSMSQGTDLYTYSDQILSNLQIEDGHFSFLVEPAMIDHTGSLTQGVLTEFLK | 360 |
| | | TRRQA+ENL Q + YTYS+QILSNL+ ++ +VEP MID G+++ GV++EFLK | |
| Sbjct: | 301 | TRRQAMENLPNHQPNNPYTYSEQILSNLEETVDYYQVVVEPTMIDSAGNMSNGVISEFLK | 360 |
| Query: | 361 | EICIRVLTRKHQRSIVVKQMTLYFLQPVQIDEIIMVTPTIISEKRREATLDLELKLENKI | 420 |
| | | EI IR LT+KHQ++I+++QM +YFL +QI++ + + P II+E RR +T+D+E+ +++++ | |
| Sbjct: | 361 | EISIRALTKKHQKNIIIEQMMVYFLHAIQIEDELKIYPKIITENRRSSTIDIEIFVDDQV | 420 |
| Query: | 421 | IAKAMIAVKIN | 431 |
| | | IAKA+I KIN | |
| Sbjct: | 421 | IAKAIITTKIN | 431 |

[7876] Based on this analysis, it was predicted that these proteins and their epitopes could be useful antigens for vaccines or diagnostics.

### EXAMPLE 1431

[7877] A DNA sequence (GBSx1517) was identified in S. agalactiae <SEQ ID 4395> which encodes the amino acid sequence <SEQ ID 4396>. Analysis of this protein sequence reveals the following:

```
Possible site: 55
>>> Seems to have no N-terminal signal sequence
----- Final Results -----
                            bacterial cytoplasm --- Certainty = 0.2837(Affirmative) < succ>
                              bacterial membrane --- Certainty = 0.0000(Not Clear) < succ>
                                bacterial outside --- Certainty = 0.0000(Not Clear) < succ>
```

[7878] The protein has homology with the following sequences in the GENPEPT database.

| >GP: BAB04556 GB: AP001510 unknown conserved protein | | | |
|---|---|---|---|
| [Bacillus halodurans] | | | |
| Identities = 56/185 (30%), Positives = 86/185 (46%), Gaps = 4/185 (2%) | | | |
| Query: | 7 | MDIWTNLGRFAFIETEHVNLRPVAYTDREAFWRIASKRTNLQFI-FPVQTSKKESDFLLV | 65 |
| | | M+I G +ETE + LR D A + AS +++ + S K+S+ L | |
| Sbjct: | 1 | MEIEDIYGDLPTLETERLRLRKFYKDDAAAIYDYASNEQVTKYVLWETHQSIKDSEAFLA | 60 |
| Query: | 66 | HSFMK---EPLGVWAIEDKVSHKMFGVIRFENIDLSKKTAEIGYFLKESSWGQGIMTECL | 122 |
| | | + K + + WAIE K + +M G + F KTAE+GY L E WGQGIMTE + | |
| Sbjct: | 61 | FALNKYDEKDVSPWAIELKRNERMIGTVDFVWWKPKDKTAELGYVLSEPYWGQGIMTEAV | 120 |
| Query: | 123 | KTLSFFAFREFGMDKLIIVTHKENIASQKVALKAHFKQSRSFKGSDRYTRRIRDYIEFQL | 182 |
| | | L F F ++++ ENI+S +V KA + + + RD+ + + | |
| Sbjct: | 121 | NALVEFGFNNMELERIQAKCFAENISSARVMEKAGLIYEGTHRRAIYVKGAHRDFKVYAI | 180 |
| Query: | 183 | TRGDY | 187 |
| | | R DY | |
| Sbjct: | 181 | IREDY | 185 |

[7879] A related DNA sequence was identified in S. pyogenes <SEQ ID 667> which encodes the amino acid sequence <SEQ ID 668>. Analysis of this protein sequence reveals the following:

```
Possible site: 52
>>> Seems to have no N-terminal signal sequence
----- Final Results -----
                            bacterial cytoplasm --- Certainty = 0.1096(Affirmative) < succ>
                              bacterial membrane --- Certainty = 0.0000(Not Clear) < succ>
                                bacterial outside --- Certainty = 0.0000(Not Clear) < succ>
```

[7880] An alignment of the GAS and GBS proteins is shown below.

| Identities = 94/177 (53%), Positives = 117/177 (65%) | | | |
|---|---|---|---|
| Query: | 7 | MDIWTNLGRFAFIETEHVNLRPVAYTDREAFWRIASKRTNLQFIFPVQTSKKESDFLLVH | 66 |
| | | MDIWT L FAF ET V LRP Y D F+ + + NL ++FP Q +K SD+LLVH | |
| Sbjct: | 1 | MDIWTKLAVFAFFETPKVILRPFRYEDHWDFYSMVNDTKNLYYVFPEQKTKAASDYLLVH | 60 |
| Query: | 67 | SFMKEPLGVWAIEDKVSHKMFGVIRFENIDLSKKTAEIGYFLKESSWGQGIMTECLKTLS | 126 |
| | | SF+K PLG WAIEDK +H++ G IR E+ D + A+IGYFL + WGQGIMTE + L | |
| Sbjct: | 61 | SFIKFPLGQWAIEDKATHQVIGSIRIEHYDAKTRCADIGYFLNYAFWGQGIMTEVVIKLV | 120 |
| Query: | 127 | FFAFREFGMDKLIIVTHKENIASQKVALKAHFKQSRSFKGSDRYTRRIRDYIEFQLT | 183 |
| | | + +F EFG+ L I+TH EN ASQKVA KA F+ FKGSDR T +I Y +QLT | |
| Sbjct: | 121 | YLSFHEFGLKTLRIITHLENKASQKVAKKAGFQLKTCFKGSDRNTHKICIYKMYQLT | 177 |

[7881] Based on this analysis, it was predicted that these proteins and their epitopes could be useful antigens for vaccines or diagnostics.

### EXAMPLE 1432

[7882] A DNA sequence (GBSx1518) was identified in S. agalactiae <SEQ ID 4397> which encodes the amino acid sequence <SEQ ID 4398>. This protein is predicted to be UDP-N-acetylglucosamine-1-carboxyvinyl transferase (murA). Analysis of this protein sequence reveals the following:

| Possible site: 61 | | | | |
|---|---|---|---|---|
| >>> Seems to have no N-terminal signal sequence | | | | |
| | INTEGRAL | Likelihood = −5.63 | Transmembrane | 25-41 (24-42) |

```
----- Final Results -----
                              bacterial membrane --- Certainty = 0.3251(Affirmative) < succ>
                                bacterial outside --- Certainty = 0.0000(Not Clear) < succ>
                            bacterial cytoplasm --- Certainty = 0.0000(Not Clear) < succ>
```

[7883] The protein has homology with the following sequences in the GENPEPT database.

| >GP: AAF86297 GB: AF072894 UDP-N-acetylglucosamine-1-carboxyvinyl | | | |
|---|---|---|---|
| transferase [Listeria monocytogenes] | | | |
| Identities = 240/412 (58%), Positives = 303/412 (73%), | | | |
| Gaps = 2/412 (0%) | | | |
| Query: | 3 | KIIINGGKQLTGEVAVSGAKNSVVALIPATILADDVVVLDGVPAISDVDSLVDIMETMGA | 62 |
| | | K+II GGK+L G + V GAKNS VALIPA ILA+ VVL+G+P ISDV +L +I+E +G | |
| Sbjct: | 20 | KLIIRGGKKLAGTLQVDGAKNSAVALIPAAILAESEVVLEGLPDISDVHTLYNILEELGG | 79 |
| Query: | 63 | KIKRYGETLEIDPCGVKDIPMPYGKINSLRASYYFYGSLLGRYGQATLGLPGGCDLGPRP | 122 |
| | | ++ +T IDP + +P+P G + LRASYY G++LGR+ +A +GLPGGC LGPRP | |
| Sbjct: | 80 | TVRYDNKTAVIDPTDMISMPLPSGNVKKLRASYYLMGAMLGRFKKAVIGLPGGCYLGPRP | 139 |
| Query: | 123 | IDLHLKAFEAMGASVSYEGDSMRLATNGKPLQGANIYMDTVSVGATINTIIAAAKANGRT | 182 |
| | | ID H+K FEA+GA V+ E ++ L + L+GA IY+D VSVGATIN ++AA +A G+T | |
| Sbjct: | 140 | IDQHIKGFEALGAKVTNEQGAIYLRAD--ELKGARIYLDVVSVGATINIMLAAVRAKGKT | 197 |
| Query: | 183 | VIENAAREPEIIDVATLLNNMGAHIRGAGTDVITIEGVKSLHGTRHQVIPDRIEAGTYIA | 242 |
| | | VIENAA+EPEIIDVATLL NMGA I+GAGTD I I GV+ LHG H +IPDRIEAGT++ | |
| Sbjct: | 198 | VIENAAKEPEIIDVATLLTNMGAIIKGAGTDTIRITGVEHLHGCHHTIIPDRIEAGTFMV | 257 |
| Query: | 243 | MAAAIGRGIKVTNVLYEHLESFIAKLDEMGVRMTVEEDSIFVEEQERLKAVSIKTSPYPG | 302 |
| | | +AAA+G+G+++ NV+ HLE IAKL EMGV M +EED+IFV E E++K V IKT YPG | |
| Sbjct: | 258 | LAAASGKGVRIENVIPTHLEGIIAKLTEMGVPMDIEEDAIFVGEVEKIKKVDIKTYAYPG | 317 |
| Query: | 303 | FATDLQQPLTPLLLTAEGNGSLLDTIYEKRVNHVPELARMGANISTLGGKIVYSGPNQLS | 362 |
| | | F TDLQQPLT LL AEG+ + DTIY R H+ E+ RMG G V +GP QL | |
| Sbjct: | 318 | FPTDLQQPLTALLTRAEGSSVITDTIYPSRFKHIAEIERMGGKFKLEGRSAVINGPVQLQ | 377 |
| Query: | 363 | GAPVKATDLRAGAALVIAGLMAEGRTEITNIEFILRGYSNIIEKLTSLGADI | 414 |
| | | G+ V ATDLRAGAALVIA L+A+G TEI +E I RGYS IIEKL+++GA+I | |
| Sbjct: | 378 | GSKVTATDLRAGAALVIAALLADGETEIHGVEHIERGYSKIIEKLSAIGANI | 429 |

[7884] A related DNA sequence was identified in S. pyogenes <SEQ ID 4399> which encodes the amino acid sequence <SEQ ID 4400>. Analysis of this protein sequence reveals the following:

| Possible site: 21 | | | | |
|---|---|---|---|---|
| >>> Seems to have no N-terminal signal sequence | | | | |
| | INTEGRAL | Likelihood = −8.70 | Transmembrane | 25-41 (23-45) |

```
----- Final Results -----
                              bacterial membrane --- Certainty = 0.4482(Affirmative) < succ>
                                bacterial outside --- Certainty = 0.0000(Not Clear) < succ>
                            bacterial cytoplasm --- Certainty = 0.0000(Not Clear) < succ>
```

[7885] The protein has homology with the following sequences in the databases:

| >GP: AAF86297 GB: AF072894 UDP-N-acetylglucosamine-1-carboxyvinyl | | | |
|---|---|---|---|
| transferase [Listeris monocytogenes] | | | |
| Identities = 244/412 (59%), Positives = 302/412 (73%), | | | |
| Gaps = 2/412 (0%) | | | |
| Query: | 3 | KIIINGGKALSGEVAVSGAKNSVVALIPAIILADDIVILDGVPAISDVDSLIEIMELMGA | 62 |
| | | K+II GGK L+G + V GAKNS VALIPA ILA+ V+L+G+P ISDV +LI+E +G | |
| Sbjct: | 20 | KLIIRGGKKLAGTLQVDGAKNSAVALIPAAILAESEVVLEGLPDISDVHTLYNILEELGG | 79 |
| Query: | 63 | TVNYHGDTLEIDPRGVQDIPMPYGRINSLRASYYFYGSLLGRFGQAVVGLPGGCDLGPRP | 122 |
| | | TV Y T IDP + +P+P G + LRASYY G++LGRF +AV+GLPGGC LGPRP | |
| Sbjct: | 80 | TVRYDNKTAVIDPTDMISMPLPSGNVKKLRASYYLMGAMLGRFKKAVIGLPGGCYLGPRP | 139 |
| Query: | 123 | IDLHLKAFEAMGVEVSYEGENMNLSTNGQKIHGAHIYMDTVSVGATINTMVAATKAQGKT | 182 |
| | | ID H+K FEA+G +V+ E + L + ++ GA IY+D VSVGATIN M+AA +A+GKT | |
| Sbjct: | 140 | IDQHIKGFEALGAKVTNEQGAIYLRAD--ELKGARIYLDVVSVGATINIMLAAVRAKGKT | 197 |
| Query: | 183 | VIENAAREPEIIDVATLLNNMGAHIRGAGTDIITIQGVQKLHGTRHQVIPDRIEAGTYIA | 242 |
| | | VIENAA+EPEIIDVATLL NMGA I+GAGTD I I GV+ LHG H +IPDRIEAGT++ | |
| Sbjct: | 198 | VIENAAKEPEIIDVATLLTNMGAIIKGAGTDTIRITGVEHLHGCHHTIIPDRIEAGTFMV | 257 |
| Query: | 243 | LAAAIGKGVKITNVLYEHLESFIAKLEEMGVRMTVEEDAIFVEKQESLKAITIKTSPYPG | 302 |
| | | LAAA GKGV+I NV+ HLE IAKL EMGV M +EEDAIFV + E +K + IKT YPG | |
| Sbjct: | 258 | LAAASGKGVRIENVIPTHLEGIIAKLTEMGVPMDIEEDAIFVGEVEKIKKVDIKTYAYPG | 317 |
| Query: | 303 | FATDLQQPLTPLLLKADGRGTIIDTIYEKRINHVPELMRMGADISVIGGQIVYQGPSRLT | 362 |
| | | F TDLQQPLT LL +A+G I DTIY R H+ E+ RMG + G V GP +L | |
| Sbjct: | 318 | FPTDLQQPLTALLTRAEGSSVITDTIYPSRFKHIAEIERMGGKFKLEGRSAVINGPVQLQ | 377 |
| Query: | 363 | GAQVKATDLRAGAALVTAGLIAEGKTEITNIEFILRGYASIIAKLTALGADI | 414 |
| | | G++V ATDLRAGAALV A L+A+G+TEI +E I RGY+ II KL+A+GA+I | |
| Sbjct: | 378 | GSKVTATDLRAGAALVIAALLADGETEIHGVEHIERGYSKIIEKLSAIGANI | 429 |

[7886] An alignment of the GAS and GBS proteins is shown below.

| Identities = 344/419 (82%), Positives = 394/419 (93%) | | | |
|---|---|---|---|
| Query: | 1 | MRKIIINGGKQLTGEVAVSGAKNSVVALIPATILADDVVVLDGVPAISDVDSLVDIMETM | 60 |
| | | MRKIIINGGK L+GEVAVSGAKNSVVALIPA ILADD+V+LDGVPAISDVDSL++IME M | |
| Sbjct: | 1 | MRKIIINGGKALSGEVAVSGAKNSVVALIPAIILADDIVILDGVPAISDVDSLIEIMELM | 60 |
| Query: | 61 | GAKIKRYGETLEIDPCGVKDIPMPYGKINSLRASYYFYGSLLGRYGQATLGLPGGCDLGP | 120 |
| | | GA + +G+TLEIDP GV+DIPMPYGKINSLRASYYFYGSLLGR+GQA +GLPGGCDLGP | |
| Sbjct: | 61 | GATVNYHGDTLEIDPRGVQDIPMPYGKINSLRASYYFYGSLLGRFGQAVVGLPGGCDLGP | 120 |
| Query: | 121 | RPIDLHLKAFEAMGASVSYEGDSMRLATNGKPLQGANIYMDTVSVGATINTIIAAAKANG | 180 |
| | | RPIDLHLKAFEAMG VSYEG++M L+TNG+ + GA+IYMDTVSVGATINT++AA KA G | |
| Sbjct: | 121 | RPIDLHLKAFEAMGVEVSYEGENMNLSTNGQKIHGAHIYMDTVSVGATINTMVAATKAQG | 180 |
| Query: | 181 | RTVIENAAREPEIIDVATLLNNMGAHIRGAGTDVITIEGVKSLHGTRHQVIPDRIEAGTY | 240 |
| | | +TVIENAAREPEIIDVATLLNNMGAHIRGAGTD+ITI+GV+ LHGTRHQVIPDRIEAGTY | |
| Sbjct: | 181 | KTVIENAAREPEIIDVATLLNNMGAHIRGAGTDIITIQGVQKLHGTRHQVIPDRIEAGTY | 240 |
| Query: | 241 | IAMAAAIGRGIKVTNVLYEHLESFIAKLDEMGVRMTVEEDSIFVEEQERLKAVSIKTSPY | 300 |
| | | IA+AAAIG+G+K+TNVLYEHLESFIAKL+EMGVRMTVEED+IFVE+QE LKA++IKTSPY | |
| Sbjct: | 241 | IALAAAIGKGVKITNVLYEHLESFIAKLEEMGVRMTVEEDAIFVEKQESLKAITIKTSPY | 300 |
| Query: | 301 | PGFATDLQQPLTPLLLTAEGNGSLLDTIYEKRVNHVPELARMGANISTLGGKIVYSGPNQ | 360 |
| | | PGFATDLQQPLTPLLL A+G G+++DTIYEKR+NHVPEL RMGA+IS +GG+IVY GP++ | |
| Sbjct: | 301 | PGFATDLQQPLTPLLLKADGRGTIIDTIYEKRINHVPELMRMGADISVIGGQIVYQGPSR | 360 |
| Query: | 361 | LSGAPVKATDLRAGAALVIAGLMAEGRTEITNIEFILRGYSNIIEKLTSLGADIQLVEE | 419 |
| | | L+GA VKATDLRAGAALV AGL+AEG+TEITNIEFILRGY++II KLT+LGADIQL+E+ | |
| Sbjct: | 361 | LTGAQVKATDLRAGAALVTAGLIAEGKTEITNIEFILRGYASIIAKLTALGADIQLIED | 419 |

[7887] Based on this analysis, it was predicted that these proteins and their epitopes could be useful antigens for vaccines or diagnostics.

### EXAMPLE 1433

[7888] A DNA sequence (GBSx1519) was identified in S. agalactiae <SEQ ID 4401> which encodes the amino acid sequence <SEQ ID 4402>. This protein is predicted to be thiamine phosphate pyrophosphorylase (thiE). Analysis of this protein sequence reveals the following:

```
Possible site: 55
>>> Seems to have no N-terminal signal sequence
----- Final Results -----
                            bacterial cytoplasm --- Certainty = 0.0422(Affirmative) < succ>
                              bacterial membrane --- Certainty = 0.0000(Not Clear) < succ>
                                bacterial outside --- Certainty = 0.0000(Not Clear) < succ>
```

[7889] The protein has homology with the following sequences in the GENPEPT database.

| >GP: AAF25544 GB: AF109218 ThiE [Staphylococcus carnosus] | | | |
|---|---|---|---|
| Identities = 98/200 (49%), Positives = 140/200 (70%), | | | |
| Gaps = 1/200 (0%) | | | |
| Query: | 5 | LKLYFVCGTVDCSR-KNILTVVEEALQAGITLFQFREKGFTALQGKEKIAMAKQLQILCK | 63 |
| | | L +YF+CGT D + I V++EAL+ GITL+QFREKG A G++K+A+AK+LQ LCK | |
| Sbjct: | 7 | LNVYFICGTQDIPEGRTIQEVLKEALEGGITLYQFREKGNGAKTGQDKVALAKELQALCK | 66 |
| Query: | 64 | QYQVPFIIDDDIDLVELIDADGLHIGQNDLPVDEARRRLPDKIIGLSVSTMDEYQKSQLS | 123 |
| | | Y VPFI++DD+ L E IDADG+H+GQ+D VD+ R KIIGLS+ ++E S L+ | |
| Sbjct: | 67 | SYNVPFIVNDDVALAEEIDADGIHVGQDDEAVDDFNNRFEGKIIGLSIGNLEELNASDLT | 126 |
| Query: | 124 | VVDYIGIGPFNPTQSKADAKPAVGNRTTKAVREINQDIPIVAIGGITSDFVHDIIESGAD | 183 |
| | | VDYIG+GP T SK DA VG + + +R+ D+PIVAIGGI+ D V ++ ++ AD | |
| Sbjct: | 127 | YVDYIGVGPIFATPSKDDASEPVGPKMIETLRKEVGDLPIVAIGGISLDNVQEVAKTSAD | 186 |
| Query: | 184 | GIAVISAISKANHIVDATRQ | 203 |
| | | G++VISAI+++ H+ + + | |
| Sbjct: | 187 | GVSVISAIARSPHVTETVHK | 206 |

[7890] No corresponding DNA sequence was identified in S. pyogenes.

[7891] Based on this analysis, it was predicted that this protein and its epitopes, could be useful antigens for vaccines or diagnostics.

### EXAMPLE 1434

[7892] A DNA sequence (GBSx1520) was identified in S. agalactiae <SEQ ID 4403> which encodes the amino acid sequence <SEQ ID 4404>. This protein is predicted to be hydroxyethylthiazole kinase (b2104). Analysis of this protein sequence reveals the following:

| Possible site: 54 | | | | |
|---|---|---|---|---|
| >>> Seems to have a cleavable N-term signal seq. | | | | |
| | INTEGRAL | Likelihood = −4.94 | Transmembrane | 198-214 (194-217) |

```
----- Final Results -----
                              bacterial membrane --- Certainty = 0.2975(Affirmative) < succ>
                                bacterial outside --- Certainty = 0.0000(Not Clear) < succ>
                            bacterial cytoplasm --- Certainty = 0.0000(Not Clear) < succ>
```

[7893] A related GBS nucleic acid sequence <SEQ ID 8805> which encodes amino acid sequence <SEQ ID 8806> was also identified. Analysis of this protein sequence reveals the following:

| Lipop: Possible site: −1 Crend: 7 | | | | |
|---|---|---|---|---|
| McG: Discrim Score: −2.93 | | | | |
| GvH: Signal Score (−7.5): 1.61 | | | | |
| Possible site: 39 | | | | |
| >>> Seems to have no N-terminal signal sequence | | | | |
| ALOM program count: 1 value: −4.94 threshold: 0.0 | | | | |
| | INTEGRAL | Likelihood = −4.94 | Transmembrane | 183-199 (179-202) |
| | PERIPHERAL | Likelihood = 2.49 | 151 | |

```
modified ALOM score: 1.49
*** Reasoning Step: 3
----- Final Results -----
                              bacterial membrane --- Certainty = 0.2975(Affirmative) < succ>
                                bacterial outside --- Certainty = 0.0000(Not Clear) < succ>
                            bacterial cytoplasm --- Certainty = 0.0000(Not Clear) < succ>
```

[7894] The protein has homology with the following sequences in the GENPEPT database.

| >GP: AAF25543 GB: AF109218 ThiM [Staphylococcus carnosus] | | | |
|---|---|---|---|
| Identities = 114/253 (45%), Positives = 160/253 (63%), | | | |
| Gaps = 1/253 (0%) | | | |
| Query: | 18 | LEQLKEVNPLTICITNNVVKNFTANGLLALGASPAMSECIEDLEDLLKVADALLINIGTL | 77 |
| | | L+Q++ +PL IC TN+VVKNFTANGLL+LGASP MSE ++ ED VA ++LINIGTL | |
| Sbjct: | 5 | LDQIRTEHPLVICYTNDVVKNFTANGLLSLGASPTMSEAPQEAEDFYPVAGSVLINIGTL | 64 |
| Query: | 78 | TKESWQLYQEAIKIANKNQVPVVLDPVAAGASRFRLEVSLDLLKNYSISLLTGNGSEIAA | 137 |
| | | TK E KIAN+ + P+V DPVA GAS++R + LK +++ GN SEI A | |
| Sbjct: | 65 | TKHHEHAMLENAKIANETETPLVFDPVAVGASKYRKDFCKYFLKKIKPTVIKGNASEILA | 124 |
| Query: | 138 | LIGEKQASKGADGGKVADLESIAVKANQVFDVPVVVTGETDAIAVRGEVRLLQNGSPLMP | 197 |
| | | LI + KG D D+ IA KA + + +++TGETD I +V L NGS + | |
| Sbjct: | 125 | LIDDTATMKGTDSADNLDVVDIAEKAYKEYQTAIILTGETDVIVQDNKVVKLSNGSHFLA | 184 |
| Query: | 198 | LVTGTGCLLGAVLAAFIGSSDRSDDLACLTEAMTVYNVAGEIAEKVAKGKGVGSFQVAFL | 257 |
| | | +TG GCLLGAV+ AF+ + + L EA++VYN+A E AE+++ KG G+F F+ | |
| Sbjct: | 185 | KITGAGCLLGAVVGAFL-FRNTHPSIETLIEAVSVYNIAAERAEQLSDSKGPGTFLTQFI | 243 |
| Query: | 258 | DALSQMKSEMIMD | 270 |
| | | DAL ++ S+ + + | |
| Sbjct: | 244 | DALYRIDSDAVAE | 256 |

[7895] No corresponding DNA sequence was identified in S. pyogenes.

[7896] SEQ ID 8806 (GBS398) was expressed in E. coli as a His-fusion product. SDS-PAGE analysis of total cell extract is shown in FIG. 75 (lane 6; MW 31.8 kDa).

[7897] The GBS398-His fusion product was purified (FIG. 214, lane 5) and used to immunise mice. The resulting antiserum was used for FACS (FIG. 314), which confirmed that the protein is immunoaccessible on GBS bacteria.

[7898] Based on this analysis, it was predicted that these proteins and their epitopes could be useful antigens for vaccines or diagnostics.

### EXAMPLE 1435

[7899] A DNA sequence (GBSx1521) was identified in S. agalactiae <SEQ ID 4405> which encodes the amino acid sequence <SEQ ID 4406>. This protein is predicted to be ThiD (thiD). Analysis of this protein sequence reveals the following:

```
Possible site: 44
>>> Seems to have an uncleavable N-term signal seq
----- Final Results -----
                              bacterial membrane --- Certainty = 0.0000(Not Clear) < succ>
                                bacterial outside --- Certainty = 0.0000(Not Clear) < succ>
                            bacterial cytoplasm --- Certainty = 0.0000(Not Clear) < succ>
```

[7900] The protein has homology with the following sequences in the GENPEPT database.

| >GP: AAF25542 GB: AF109218 ThiD [Staphylococcus carnosus] | | | |
|---|---|---|---|
| Identities = 139/258 (53%), Positives = 186/258 (71%), Gaps = 4/258 (1%) | | | |
| Query: | 8 | LTIAGTDPSGGAGIMADLKTFQARRTYGMAVVTSVVAQNTCGVRGVQHIETAIIDQQLAC | 67 |
| | | LTIAGTDP+GGAG+MADLK+F A YGMA +TS+VAQNT GV+ + +++ + +QL | |
| Sbjct: | 8 | LTIAGTDPTGGAGVMADLKSFHACGVYGMAAITSIVAQNTKGVQHIHNLDITWLKEQLDS | 67 |
| Query: | 68 | VYDDIKPKAVKTGMLAERETISLVASYLKKYPQ-PYVLDPVMVATSGHRLIDSDAVEALK | 126 |
| | | ++DD P+A+KTGM+A +E + L+ SYL+KYP PYV+DPVM+A SG L+D AL+ | |
| Sbjct: | 68 | IFDDELPQAIKTGMIATKEMMELIRSYLEKYPDIPYVIDPVMLAKSGDSLMDDAGKHALQ | 127 |
| Query: | 127 | EDLLPLATIITPNLPEAEVLVGYDLSDEVSIIKAGYDIQKQYSVRNVLIKGGHLD--GLA | 184 |
| | | E LLPLA + TPNLPEAE +VG+ L E +I KAG + + V+IKGGH++ +A | |
| Sbjct: | 128 | EILLPLADVATPNLPEAEEIVGFKLDTEEAIKKAGDIFINEIGSKGVVIKGGHIEDKNIA | 187 |
| Query: | 185 | KDYLFLEKAGLITLSNQRINTIHTHGTGCTFAAVVAAELAKGQSILNAVSTAKSFITSAI | 244 |
| | | KDYLF K+GL ++R +T HTHGTGCTF+AV+ AELAKG++I AV AK FI +I | |
| Sbjct: | 188 | KDYLF-TKDGLEVFESERYDTKHTHGTGCTFSAVITAELAKGKTIYEAVKKAKDFIALSI | 246 |
| Query: | 245 | ETAPELGLGNGPVNHTSY | 262 |
| | | + PE+G G GPVNH +Y | |
| Sbjct: | 247 | KYTPEIGQGRGPVNHFAY | 264 |

[7901] There is also homology to SEQ ID 4408.

[7902] Based on this analysis, it was predicted that this protein and its epitopes, could be useful antigens for vaccines or diagnostics.

### EXAMPLE 1436

[7903] A DNA sequence (GBSx1522) was identified in S. agalactiae <SEQ ID 4409> which encodes the amino acid sequence <SEQ ID 4410>. This protein is predicted to be TenA (tenA). Analysis of this protein sequence reveals the following:

```
Possible site: 42
>>> Seems to have no N-terminal signal sequence
----- Final Results -----
                            bacterial cytoplasm --- Certainty = 0.2242(Affirmative) < succ>
                              bacterial membrane --- Certainty = 0.0000(Not Clear) < succ>
                                bacterial outside --- Certainty = 0.0000(Not Clear) < succ>
```

[7904] The protein has homology with the following sequences in the GENPEPT database.

| >GP: AAF25541 GB: AF109218 TenA [Staphylococcus carnosus] | | | |
|---|---|---|---|
| Identities = 78/213 (36%), Positives = 127/213 (59%), Gaps = 6/213 (2%) | | | |
| Query: | 14 | IQSIYQDPFIQGIIKGRLDHDVICHYLQADNIYLGKFADIYALCLAKSDNLRDKQFFLEQ | 73 |
| | | I IYQD FIQ ++KG + + + YL+AD YL +FA+IYAL + +L +F ++Q | |
| Sbjct: | 15 | IDEIYQDHFIQELLKGDIKKEALRQYLRADASYLREFANIYALLIPIMPDLESVRFLVDQ | 74 |
| Query: | 74 | IDFTLNRELADGEGPHQALAAYTNRSYQDIIEKGVWYPSADHYIKHMYFHFY-ENGIAGA | 132 |
| | | I F +N E+ H+ +A Y +Y +I++K VW PS DHYIKHMY++ Y A A | |
| Sbjct: | 75 | IQFIVNGEVE----AHEYMADYIGENYNEIVQKKVWPPSGDHYIKHMYYNVYAHENAAYA | 130 |
| Query: | 133 | LAAMSPCPWIYHQLAKKIIEENQFLNGNPFNNWITFYANDTVEELMENYFRMMDYYAQNL | 192 |
| | | +AAM+PCP++Y +AK+ +++ + W FY N ++ L+E +M+ N+ | |
| Sbjct: | 131 | IAAMAPCPYVYAMIAKRAMKDPNLNKSSILAKWFEFY-NTEMDPLIEVLDDLMNQLTANM | 189 |
| Query: | 193 | SKEKQADLVDAFVKSCQHERRFFQMAINQEKWE | 225 |
| | | S+ ++ ++ + +++S HE FF MA EKW+ | |
| Sbjct: | 190 | SETEKNEVRENYLQSTVHELNFFNMAYTSEKWQ | 222 |

[7905] No corresponding DNA sequence was identified in S. pyogenes.

[7906] Based on this analysis, it was predicted that this protein and its epitopes, could be useful antigens for vaccines or diagnostics.

### EXAMPLE 1437

[7907] A DNA sequence (GBSx1523) was identified in S. agalactiae <SEQ ID 4411> which encodes the amino acid sequence <SEQ ID 4412>. Analysis of this protein sequence reveals the following:

| Possible site: 35 | | | | |
|---|---|---|---|---|
| >>> Seems to have a cleavable N-term signal seq. | | | | |
| | INTEGRAL | Likelihood = −7.06 | Transmembrane | 43-59 (36-63) |
| | INTEGRAL | Likelihood = −2.55 | Transmembrane | 92-108 (92-112) |
| | INTEGRAL | Likelihood = −1.49 | Transmembrane | 135-151 (135-151) |
| | INTEGRAL | Likelihood = −1.06 | Transmembrane | 69-85 (69-85) |
| | INTEGRAL | Likelihood = −0.22 | Transmembrane | 216-232 (216-232) |

```
----- Final Results -----
                              bacterial membrane --- Certainty = 0.3824(Affirmative) < succ>
                                bacterial outside --- Certainty = 0.0000(Not Clear) < succ>
                            bacterial cytoplasm --- Certainty = 0.0000(Not Clear) < succ>
```

[7908] The protein has homology with the following sequences in the GENPEPT database.

| >GP: CAA91230 GB: Z56283 orf2 [Lactobacillus helveticus] | | | |
|---|---|---|---|
| Identities = 46/215 (21%), Positives = 96/215 (44%), Gaps = 3/215 (1%) | | | |
| Query: | 21 | AITFLCLLIPTFSFSFTLRLRTSLLFLIIVVTLQCFVKVSLKTWAKVNLISFVMGLSLFL | 80 |
| | | ++ F+ I + S L T+L+ + + ++ +K + + F+ ++F | |
| Sbjct: | 4 | SLKFILAFIISLEISLKASLTTNLIVIAFALIYLLVTRIKIKELILLIAVPFIASFTIFA | 63 |
| Query: | 81 | GTYFWGKLPHQFVLASLVACRPLIFMNVGLLFHASHSNYDFIESLYQTFKVPSHFAYGIF | 140 |
| | | +++ P + +L + R ++ + + DF SL Q +PS FAYG + | |
| Sbjct: | 64 | TLFWFSPTPDAYYAWNL-STRVYVYTLTIACVTRNTTATDFARSLEQNLHLPSKFAYGVL | 122 |
| Query: | 141 | AVFNLLPLIKLQYQRNRLAFRLKNQVTWALSPRLILSVLLKTIYWVEQLELAMLSKGFEV | 200 |
| | | A N++P +K ++ R + ++ SP L +L + + L M S G+ | |
| Sbjct: | 123 | AAINIIPRMKTAVKQIRTSAMMRGMYLSFWSPVLYFKAILVALNSADNLAQGMESHGYVE | 182 |
| Query: | 201 | GKERTHASTYPVRFRDYSL-LGMSILLSIGM-IFK | 233 |
| | | G++R P+ +D+ + + IL++I + IFK | |
| Sbjct: | 183 | GQKRATIVAIPLTKKDWLIFFTLLILVNISLFIFK | 217 |

[7909] No corresponding DNA sequence was identified in S. pyogenes.

[7910] A related GBS gene <SEQ ID 8807> and protein <SEQ ID 8808> were also identified. Analysis of this protein sequence reveals the following:

| Lipop: Possible Site: −1 Crend: 0 | | | | |
|---|---|---|---|---|
| McG: Discrim Score: 4.50 | | | | |
| GvH: Signal Score (−7.5): −0.2 | | | | |
| Possible site: 35 | | | | |
| >>> Seems to have a cleavable N-term signal seq. | | | | |
| ALOM program count: 5 value: −7.06 threshold: 0.0 | | | | |
| | INTEGRAL | Likelihood = −7.06 | Transmembrane | 43-59 (36-63) |
| | INTEGRAL | Likelihood = −2.55 | Transmembrane | 92-108 (92-112) |
| | INTEGRAL | Likelihood = −1.49 | Transmembrane | 135-151 (135-151) |
| | INTEGRAL | Likelihood = −1.06 | Transmembrane | 69-85 (69-85) |
| | INTEGRAL | Likelihood = −0.22 | Transmembrane | 216-232 (216-232) |
| | PERIPHERAL | Likelihood = 2.65 | 170 | |

```
modified ALOM score: 1.91
*** Reasoning Step: 3
----- Final Results -----
                              bacterial membrane --- Certainty = 0.3824(Affirmative) < succ>
                                bacterial outside --- Certainty = 0.0000(Not Clear) < succ>
                            bacterial cytoplasm --- Certainty = 0.0000(Not Clear) < succ>
```

[7911] Based on this analysis, it was predicted that these proteins and their epitopes could be useful antigens for vaccines or diagnostics.

### EXAMPLE 1438

[7912] A DNA sequence (GBSx1524) was identified in S. agalactiae <SEQ ID 4413> which encodes the amino acid sequence <SEQ ID 4414>. Analysis of this protein sequence reveals the following:

```
Possible site: 24
>>> Seems to have no N-terminal signal sequence
----- Final Results -----
                            bacterial cytoplasm --- Certainty = 0.3007(Affirmative) < succ>
                              bacterial membrane --- Certainty = 0.0000(Not Clear) < succ>
                                bacterial outside --- Certainty = 0.0000(Not Clear) < succ>
```

[7913] The protein has homology with the following sequences in the GENPEPT database.

| >GP: CAA91229 GB: Z56283 orf1 [Lactobacillus helveticus] | | | |
|---|---|---|---|
| Identities = 123/424 (29%), Positives = 200/424 (47%), | | | |
| Gaps = 48/424 (11%) | | | |
| Query: | 17 | LFDEVTFSLNPGERILISGYSGCGKSTLALLLSGL--KESGK--GQVLLNGSLIEPSDVG | 72 |
| | | L +++ ++ PG +LI G +GCGKSTL +++GL K +GK G++ L+G | |
| Sbjct: | 12 | LINQLNMNIAPGFNLLI-GPTGCGKSTLLKIIAGLYPKYAGKLTGKIDLHGQ-----KAA | 65 |
| Query: | 73 | FLFQNPDLQFCMDTVAHELYFILENLQIEPEQMQDRSEFVLAQVGLKGFQNRLIYTLSQG | 132 |
| | | +FQN QF M T E+ F LENLQI+ + + + + ++ I TLS G | |
| Sbjct: | 66 | MMFQNAAEQFTMTTPREEIIFALENLQIKAKDYDLHIKKAVEFTKIADLLDQKINTLSGG | 125 |
| Query: | 133 | EKQRLALATIFLKSPKLIILDEAFANLDQESASQLLQLVLNYQANNQSMLIVIDHLITYY | 192 |
| | | ++Q +ALA + + +LDE FA+ D + L++ + + ++ +I+ DH++ Y | |
| Sbjct: | 126 | QQQHVALAVLIAMDVDVFLLDEPFASCDPNTRHFLIEKLASLAETGRT-IILSDHVLDDY | 184 |
| Query: | 193 | QDIMDHYFWLEKRLTRVNFDYMLNRLNVFELEKKSHN--------TGDKLLSIKDFQVK- | 243 |
| | | + I DH + E + + N+L F+ K+ H TG + + Q+K | |
| Sbjct: | 185 | EKICDHLYQFEGKTVKELSANEKNKL--FKQNKQFHEQSYSFALPTGTPVFELNKTQIKQ | 242 |
| Query: | 244 | ----LSKNKFISYLDFDLASGERLCLDGPSGVGKSSLFMGLLGLYRTKGK--------KQ | 291 |
| | | L +NK Y G+ + G +GVGK+SLF + + KG + | |
| Sbjct: | 243 | NRLLLKQNKLKIY-------GKTTLITGSNGVGKTSLFKAMTKMIPYKGNFTYLDNEISK | 295 |
| Query: | 292 | FTHRKQIP-ISFLFQNPLDQFIFSTVYDEIFQVCKDSN------KARDILETINLWDKKQ | 344 |
| | | +RK + I+ FQ DQF+ TV DEI KD N K + LE + L | |
| Sbjct: | 296 | IKYRKYLSQIAQFFQKASDQFLTVTVKDEIELSKKDRNNFFTDAKIDEWLEKLQLKQHLD | 355 |
| Query: | 345 | FSPFQLSQGQQRRLAIGSILASDSKLLLLDEPTYGQDAYHANMITTLLLSYCHKNHCGVI | 404 |
| | | + LS GQQ++L I +L + +LL+DEP G D +++ L+ K + | |
| Sbjct: | 356 | QVVYSLSGGQQKKLQILLMLMTKHNVLLIDEPLSGLDHESVDLVLQLMQECQEKLQQTFL | 415 |
| Query: | 405 | FTSH | 408 |
| | | SH | |
| Sbjct: | 416 | IISH | 419 |
| Identities = 44/185 (23%), Positives = 83/185 (44%), Gaps = 24/185 (12%) | | | |
| Query: | 28 | GERILISGYSGCGKSTLALLLSGLKESGKGQVLLNGSLIEP------SDVGFLFQNPDLQ | 81 |
| | | G+ LI+G +G GK++L ++ + L+ + + S + FQ Q | |
| Sbjct: | 256 | GKTTLITGSNGVGKTSLFKAMTKMIPYKGNFTYLDNEISKIKYRKYLSQIAQFFQKASDQ | 135 |
| Query: | 82 | FCMDTVAHELYFILENLQIEPEQMQDRSEFV--------LAQVGLKGFQNRLIYTLSQGE | 133 |
| | | F TV E+ +DR+ F L ++ LK ++++Y+LS G+ | |
| Sbjct: | 316 | FLTVTVKDEIEL----------SKKDRNNFFTDAKIDEWLEKLQLKQHLDQVVYSLSGGQ | 365 |
| Query: | 134 | KQRLALATIFLKSPKLIILDEAFANLDQESASQLLQLVLNYQANNQSMLIVIDHLITYYQ | 193 |
| | | +++L + + + ++++DE + LD ES +LQL + Q Q ++I H I | |
| Sbjct: | 366 | QKKLQILLMLMTKHNVLLIDEPLSGLDHESVDLVLQLMQECQEKLQQTFLIISHQIDALA | 425 |
| Query: | 194 | DIMDH | 198 |
| | | D D+ | |
| Sbjct: | 426 | DFCDY | 430 |

[7914] A related DNA sequence was identified in S. pyogenes <SEQ ID 4415> which encodes the amino acid sequence <SEQ ID 4416>. Analysis of this protein sequence reveals the following:

```
Possible site: 30
>>> Seems to have no N-terminal signal sequence
----- Final Results -----
                            bacterial cytoplasm --- Certainty = 0.3093(Affirmative) < succ>
                              bacterial membrane --- Certainty = 0.0000(Not Clear) < succ>
                                bacterial outside --- Certainty = 0.0000(Not Clear) < succ>
```

[7915] An alignment of the GAS and GBS proteins is shown below.

| Identities = 120/455 (26%), Positives = 203/455 (44%), | | | |
|---|---|---|---|
| Gaps = 47/455 (10%) | | | |
| Query: | 1 | MLSVEKLACTHGDSHYLFDEV-TFSLNPGERILISGYSGCGKSTLALLLSGLKE---SGK | 56 |
| | | M+S E+L T+ D ++ T + G+ I++ G SG GKST LL+G+ +GK | |
| Sbjct: | 21 | MISAEQLVFTYHDQKNPACQISTCQIASGQFIVLCGPSGSGKSTFLKLLNGIIPDYYAGK | 80 |
| Query: | 57 | GQVLLNGSLIEPS---------DVGFLFQNPDLQFCMDTVAHELYFILENLQIEPEQMQD | 107 |
| | | + L+ + + V +FQNP QF V HEL F EN ++ + + | |
| Sbjct: | 81 | YEGRLDVADCQAGRDSVETFSRSVASVFQNPASQFFYREVQHELVFPCENQGLDAKVIMK | 140 |
| Query: | 108 | RSEFVLAQVGLKGFQNRLIYTLSQGEKQRLALATIFLKSPKLIILDEAFANLDQESASQL | 167 |
| | | R + N+ ++ LS G+KQR+A+AT ++ +++ DE ANLD + + | |
| Sbjct: | 141 | RLWTLAEDFAFAELLNKDMFGLSGGQKQRVAIATAIMQGTNIMLFDEPTANLDSAGIAAV | 200 |
| Query: | 168 | LQLVLNYQANNQSMLIVIDHLITYYQDIMDHYFW-----LEKRLTRVNF---------DY | 213 |
| | | + +A ++ +IV +H + Y D+ D++F+ L +LT N D | |
| Sbjct: | 201 | KAYLTQLKAAGKT-IIVAEHRLHYLMDLADNFFYFKNGRLTDKLTTQNLLALTDEQRQDM | 259 |
| Query: | 214 | MLNRLNVFELE-------KKSHNTGDKLLSIKDFQVKLSKNKFISYLDFDLASGERLCLD | 266 |
| | | L RL++ +L+ + H D L I+ V+ A G + | |
| Sbjct: | 260 | GLRRLDLSDLKPVLAGKIESQHYRPDDSLCIEHLTVRAGSKILRCIEQLSFAVGSISGIT | 319 |
| Query: | 267 | GPSGVGKSSLFMGLLGLYRTKGKKQFTHRKQIPISFLFQNPLDQFIFSTVYDEIF--QVC | 324 |
| | | G +G+GKS L + G+ KK + IP+S + + V ++F V | |
| Sbjct: | 320 | GSNGLGKSQLVYYIAGI--LDDKKATIKFQGIPLSAKQRLSKTSIVLQEVSLQLFAESVS | 377 |
| Query: | 325 | KDSN-------KARDILETINLWDKKQFSPFQLSQGQQRRLAIGSILASDSKLLLLDEPT | 377 |
| | | K+ N + +++E ++L + P LS G+Q+R+ I + L +D +L+ DEP+ | |
| Sbjct: | 378 | KEVNLGHERHPRTTEVIERLSLTTLLERHPASLSGGEQQRVMIAASLLADKDILIFDEPS | 437 |
| Query: | 378 | YGQDAYHANMITTLLLSYCHKNHCGVIFTSHDPHL | 412 |
| | | G D + LL+ H VI SHD L | |
| Sbjct: | 438 | SGLDLLQMKALANLLMQ-LKTQHKVVILISHDEEL | 471 |

[7916] Based on this analysis, it was predicted that these proteins and their epitopes could be useful antigens for vaccines or diagnostics.

### EXAMPLE 1439

[7917] A DNA sequence (GBSx1525) was identified in S. agalactiae <SEQ ID 4417> which encodes the amino acid sequence <SEQ ID 4418>. Analysis of this protein sequence reveals the following:

| Possible site: 42 | | | | |
|---|---|---|---|---|
| >>> Seems to have an uncleavable N-term signal seq | | | | |
| | INTEGRAL | Likelihood = −11.62 | Transmembrane | 8-24 (1-30) |
| | INTEGRAL | Likelihood = −8.17 | Transmembrane | 145-161 (143-163) |
| | INTEGRAL | Likelihood = −6.32 | Transmembrane | 66-82 (62-84) |
| | INTEGRAL | Likelihood = −3.77 | Transmembrane | 112-128 (111-132) |
| | INTEGRAL | Likelihood = −2.66 | Transmembrane | 43-59 (43-59) |

```
----- Final Results -----
                              bacterial membrane --- Certainty = 0.5649(Affirmative) < succ>
                                bacterial outside --- Certainty = 0.0000(Not Clear) < succ>
                            bacterial cytoplasm --- Certainty = 0.0000(Not Clear) < succ>
```

[7918] The protein has homology with the following sequences in the GENPEPT database.

| >GP: CAB13180 GB: Z99110 ykoE [Bacillus subtilis] | | | |
|---|---|---|---|
| Identities = 68/177 (38%), Positives = 117/177 (65%), Gaps = 1/177 (0%) | | | |
| Query: | 5 | LKDVLLIALLAVVLGVVYFGAGYISNAFVPFVGPIAHEVIYGIWFVAGPMALYILRKPGT | 64 |
| | | +K++++++++++V VVY + N GPIA+E IYGIWF+ +A Y++RKPG | |
| Sbjct: | 6 | VKEIVIMSVISIVFAVVYLLFTHFGNVLAGMFGPIAYEPIYGIWFIVSVIAAYMIRKPGA | 65 |
| Query: | 65 | AIVAELLAALIEVLIGSIYGPSVLVIGTLQGLGSELGFTLFRYHNYKLPAFILSAILTSI | 124 |
| | | A+V+E++AAL+E L+G+ GP V+VIG +QGLG+E F R+ Y LP +L+ + +S+ | |
| Sbjct: | 66 | ALVSEIIAALVECLLGNPSGPMVIVIGIVQGLGAEAVFLATRWKAYSLPVLMLAGMGSSV | 125 |
| Query: | 125 | FSFAWSFYANGLSAFSFSYNILMLIVRTVS-SIIFFLLTKNICDQLHRSGVLNAYGI | 180 |
| | | SF + + +G +A+S Y ++ML++R +S +++ LL K + L +GVLN + | |
| Sbjct: | 126 | ASFIYDLFVSGYAAYSPGYLLIMLVIRLISGALLAGLLGKAVSGSLAYTGVLNGMAL | 182 |

[7919] No corresponding DNA sequence was identified in S. pyogenes.

[7920] Based on this analysis, it was predicted that this protein and its epitopes, could be useful antigens for vaccines or diagnostics.

### EXAMPLE 1440

[7921] A DNA sequence (GBSx1526) was identified in S. agalactiae <SEQ ID 4419> which encodes the amino acid sequence <SEQ ID 4420>. Analysis of this protein sequence reveals the following:

| Possible site: 47 | | | | |
|---|---|---|---|---|
| >>> Seems to have no N-terminal signal sequence | | | | |
| | INTEGRAL | Likelihood = −6.69 | Transmembrane | 65-81 (53-95) |
| | INTEGRAL | Likelihood = −6.37 | Transmembrane | 34-50 (31-54) |
| | INTEGRAL | Likelihood = −6.10 | Transmembrane | 176-192 (169-195) |
| | INTEGRAL | Likelihood = −3.66 | Transmembrane | 130-146 (130-151) |
| | INTEGRAL | Likelihood = −1.97 | Transmembrane | 3-19 (3-19) |
| | INTEGRAL | Likelihood = −0.90 | Transmembrane | 88-104 (88-104) |

```
----- Final Results -----
                              bacterial membrane --- Certainty = 0.3675(Affirmative) < succ>
                                bacterial outside --- Certainty = 0.0000(Not Clear) < succ>
                            bacterial cytoplasm --- Certainty = 0.0000(Not Clear) < succ>
```

[7922] A related GBS nucleic acid sequence <SEQ ID 9757> which encodes amino acid sequence <SEQ ID 9758> was also identified.

[7923] The protein has no significant homology with any sequences in the GENPEPT database.

[7924] No corresponding DNA sequence was identified in S. pyogenes.

[7925] A related GBS gene <SEQ ID 8809> and protein <SEQ ID 8810> were also identified. Analysis of this protein sequence reveals the following:

| Lipop: Possible site: −1 Crend: 8 | | | | |
|---|---|---|---|---|
| McG: Discrim Score: −4.09 | | | | |
| GvH: Signal Score (−7.5): −4.38 | | | | |
| Possible site: 47 | | | | |
| >>> Seems to have no N-terminal signal sequence | | | | |
| ALOM program count: 6 value: −6.69 threshold: 0.0 | | | | |
| | INTEGRAL | Likelihood = −6.69 | Transmembrane | 65-81 (53-95) |
| | INTEGRAL | Likelihood = −6.37 | Transmembrane | 34-50 (31-54) |
| | INTEGRAL | Likelihood = −6.10 | Transmembrane | 176-192 (169-195) |
| | INTEGRAL | Likelihood = −3.66 | Transmembrane | 130-146 (130-151) |
| | INTEGRAL | Likelihood = −1.97 | Transmembrane | 3-19 (3-19) |
| | INTEGRAL | Likelihood = −0.90 | Transmembrane | 88-104 (88-104) |
| | PERIPHERAL | Likelihood = 5.30 | 158 | |

```
modified ALOM score: 1.84
*** Reasoning Step: 3
----- Final Results -----
                              bacterial membrane --- Certainty = 0.3675(Affirmative) < succ>
                                bacterial outside --- Certainty = 0.0000(Not Clear) < succ>
                            bacterial cytoplasm --- Certainty = 0.0000(Not Clear) < succ>
```

[7926] Based on this analysis, it was predicted that these proteins and their epitopes could be useful antigens for vaccines or diagnostics.

### EXAMPLE 1441

[7927] A DNA sequence (GBSx1527) was identified in S. agalactiae <SEQ ID 4421> which encodes the amino acid sequence <SEQ ID 4422>. Analysis of this protein sequence reveals the following:

```
Possible site: 23
>>> Seems to have a cleavable N-term signal seq.
----- Final Results -----
                                bacterial outside --- Certainty = 0.3000(Affirmative) < succ>
                              bacterial membrane --- Certainty = 0.0000(Not Clear) < succ>
                            bacterial cytoplasm --- Certainty = 0.0000(Not Clear) < succ>
```

[7928] The protein has no significant homology with any sequences in the GENPEPT database.

[7929] No corresponding DNA sequence was identified in S. pyogenes.

[7930] Based on this analysis, it was predicted that this protein and its epitopes, could be useful antigens for vaccines or diagnostics.

[7931] A related GBS gene <SEQ ID 8811> and protein <SEQ ID 8812> were also identified. Analysis of this protein sequence reveals the following:

```
Lipop: Possible site: −1 Crend: 2
McG: Discrim Score: 6.01
GvH: Signal Score (−7.5): 0.45
          Possible site: 23
>>> Seems to have a cleavable N-term signal seq.
ALOM program count: 0 value: 10.66 threshold: 0.0
      PERIPHERAL Likelihood = 10.66 80
modified ALOM score: −2.63
*** Reasoning Step: 3
----- Final Results -----
                                bacterial outside --- Certainty = 0.3000(Affirmative) < succ>
                              bacterial membrane --- Certainty = 0.0000(Not Clear) < succ>
                            bacterial cytoplasm --- Certainty = 0.0000(Not Clear) < succ>
```

[7932] SEQ ID 4422 (GBS19) was expressed in E. coli as a His-fusion product. SDS-PAGE analysis of total cell extract is shown in FIG. 4 (lane 4; MW 24 kDa). It was also expressed in E. coli as a GST-fusion product. SDS-PAGE analysis of total cell extract is shown in FIG. 9 (lane 6; MW 46.1 kDa).

[7933] The GST-fusion protein was purified as shown in FIG. 190, lane 10.

### EXAMPLE 1442

[7934] A DNA sequence (GBSx1528) was identified in S. agalactiae <SEQ ID 4423> which encodes the amino acid sequence <SEQ ID 4424>. Analysis of this protein sequence reveals the following:

```
Possible site: 30
>>> Seems to have a cleavable N-term signal seq.
----- Final Results -----
                                bacterial outside --- Certainty = 0.3000(Affirmative) < succ>
                              bacterial membrane --- Certainty = 0.0000(Not Clear) < succ>
                            bacterial cytoplasm --- Certainty = 0.0000(Not Clear) < succ>
```

[7935] A related GBS nucleic acid sequence <SEQ ID 8813> which encodes amino acid sequence <SEQ ID 8814> was also identified. Analysis of this protein sequence reveals the following:

```
Lipop: Possible site: −1 Crend: 6
SRCFLG: 0
McG: Length of UR: 23
          Peak Value of UR: 2.61
          Net Charge of CR: 3
McG: Discrim Score: 9.08
GvH: Signal Score (−7.5): −0.76
          Possible site: 22
>>> Seems, to have a cleavable N-term signal seq.
Amino Acid Composition: calculated from 23
ALOM program count: 0 value: 5.14 threshold: 0.0
      PERIPHERAL Likelihood = 5.14 365
modified ALOM score: −1.53
*** Reasoning Step: 3
Rule gpo1
----- Final Results -----
                                bacterial outside --- Certainty = 0.3000(Affirmative) < succ>
                              bacterial membrane --- Certainty = 0.0000(Not Clear) < succ>
                            bacterial cytoplasm --- Certainty = 0.0000(Not Clear) < succ>
```

[7936] The protein has homology with the following sequences in the GENPEPT database.

| >GP: CAA34476 GB: X16457 precursor polypeptide (AA −26 to 632) | | | |
|---|---|---|---|
| [Staphylococcus aureus] | | | |
| Identities = 93/372 (25%), Positives = 160/372 (43%), Gaps = 46/372 (12%) | | | |
| Query: | 9 | MKKQFLKSAAILSLAVTAVSTSQPVGAIVGKDETKLRQQLGYIDSKKSGKKIDERWGEKI | 68 |
| | | MKKQ + A L++A + + AIV KD +K + + K G + + + KI | |
| Sbjct: | 1 | MKKQIISLGA-LAVASSLFTWDNKADAIVTKDYSK---ESRVNEKSKKGATVSDYYYWKI | 56 |
| Query: | 69 | YNYLSYELIEANEWINRSEFQEPEYRTILSEFKDKIDSIEYYLINLS----NIAKEDAHQ | 124 |
| | | +L + A + + ++ +P Y+ ++ + YL+ + K+ | |
| Sbjct: | 57 | IDSLEAQFTGAIDLLENYKYGDPIYKEAKDRLMTRVLGEDQYLLKKKIDEYELYKKWYKS | 116 |
| Query: | 125 | RNILQSLDKYEKSGIYNLDQGVYNYIYQEISSAKHKFSDGVDKIYRLDSTLFPFSVWYDK | 184 |
| | | N ++ + K +YNL YN I+ + A ++F+ V +I + L F | |
| Sbjct: | 117 | SNKNTNMLTFHKYNLYNLTMNEYNDIFNSLKDAVYQFNKEVKEIEHKNVDLKQF------ | 170 |
| Query: | 185 | HLDNNDNYKDNKDFKEYIALLNEITRKARLGYQIVNNHKD-GEHKDEAEI-LDILIRDIT | 242 |
| | | D ++K KE L++EI Y KD GEH E LD+++ D | |
| Sbjct: | 171 | -----DKDGEDKATKEVYDLVSEIDTLVVTYYA----DKDYGEHAKELRAKLDLILGDTD | 221 |
| Query: | 243 | FVSKDAPGYKYIPNKRIAAKIIEDLDGIINDFFKNTGKDKP-SLEKLKDTEFHKKYLNST | 301 |
| | | K I N+RI ++I+DL+ II+DFF T +++P S+ K T+ + K + | |
| Sbjct: | 222 | NPHK-------ITNERIKKEMIDDLNSIIDDFFMETKQNRPNSITKYDPTKHNFKERSEN | 274 |
| Query: | 302 | EPYSIETNLPSNYKELKEKQIKKLEYGYK-KSSKIY--TSAHYALYSEEIDAAKELLQKV | 358 |
| | | +P N +E K K +K+ + +K K+ K Y T + EE + L KV | |
| Sbjct: | 275 | KP-----NFDKLVEETK-KAVKEADESWKNKTVKKYEETVTKSPVVKEEKKVEEPQLPKV | 328 |
| Query: | 359 | KIAKDNYNEIKS | 370 |
| | | N E+K+ | |
| Sbjct: | 329 | ----GNQQEVKT | 336 |

[7937] No corresponding DNA sequence was identified in S. pyogenes.

[7938] SEQ ID 8814 (GBS119) was expressed in E. coli as a His-fusion product. SDS-PAGE analysis of total cell extract is shown in FIG. 29 (lane 2; MW 84.3 kDa). It was also expressed in E. coli as a GST-fusion product. SDS-PAGE analysis of total cell extract is shown in FIG. 35 (lane 5; 2 bands).

[7939] The GBS119-GST fusion product was purified (FIG. 109A; see also FIG. 201, lane 6) and used to immunise mice (lane 1+2+3 product; 20 μg/mouse). The resulting antiserum was used for Western blot, FACS (FIG. 109B), and in the in vivo passive protection assay (Table III). These tests confirm that the protein is immunoaccessible on GBS bacteria and that it is an effective protective immunogen.

[7940] Based on this analysis, it was predicted that these proteins and their epitopes could be useful antigens for vaccines or diagnostics.

### EXAMPLE 1443

[7941] A DNA sequence (GBSx1529) was identified in S. agalactiae <SEQ ID 4425> which encodes the amino acid sequence <SEQ ID 4426>. This protein is predicted to be s-adenosylmethionine synthetase (metK). Analysis of this protein sequence reveals the following:

```
Possible site: 41
>>> Seems to have no N-terminal signal sequence
----- Final Results -----
                            bacterial cytoplasm --- Certainty = 0.3609(Affirmative) < succ>
                              bacterial membrane --- Certainty = 0.0000(Not Clear) < succ>
                                bacterial outside --- Certainty = 0.0000(Not Clear) < succ>
```

[7942] The protein has homology with the following sequences in the GENPEPT database.

| >GP: BAB07019 GB: AP001518 S-adenosylmethionine synthetase | | | |
|---|---|---|---|
| [Bacillus halodurans] | | | |
| Identities = 266/390 (68%), Positives = 324/390 (82%), Gaps = 1/390 (0%) | | | |
| Query: | 4 | RKLFTSESVSEGHPDKIADQISDAILDAILEQDPDAHVAAETAVYTGSVHVFGEISTTAY | 63 |
| | | R+LFTSESV+EGHPDKI DQISD+ILD IL++DP+A VA ET+V TG V V GEI+T+ Y | |
| Sbjct: | 7 | RRLFTSESVTEGHPDKICDQISDSILDEILKEDPNARVACETSVTTGLVLVAGEITTSTY | 66 |
| Query: | 64 | VDINRVVRNTIAEIGYDKAEYGFSAESVGVHPSLVEQSPDIAQGVNEALEVR-GSLEQDP | 122 |
| | | VDI +VVR+TI IGY +A+YGF +E+ V S+ EQSPDIAQGVN+ALE R G + | |
| Sbjct: | 67 | VDIPKVVRDTIRNIGYTRAKYGFDSETCAVLTSIDEQSPDIAQGVNQALEAREGQMTDAE | 126 |
| Query: | 123 | LDLIGAGDQGLMFGFAVDETPELMPLPISLAHQLVKKLTDLRKSGELTYLRPDAKSQVTV | 182 |
| | | ++ IGAGDQGLMFG+A +ETPELMPLPISL+H+L ++L++ RK L YLRPD K+QVTV | |
| Sbjct: | 127 | IEAIGAGDQGLMFGYANNETPELMPLPISLSHKLARRLSEARKGEILPYLRPDGKTQVTV | 186 |
| Query: | 183 | EYDENDQPIRVDAVVISTQHDPNVTNDQLHKDVIEKVINEVIPSHYLDDQTKFFINPTGR | 242 |
| | | EYDENDQ +R+D +VISTQH P VT +Q+ D+ + VI V+P +D++TK+FINPTGR | |
| Sbjct: | 187 | EYDENDQSVRIDTIVISTQHHPEVTLEQIESDLKQHVIRSVVPEELIDEETKYFINPTGR | 246 |
| Query: | 243 | FVIGGPQGDSGLTGRKIIVDTYGGYSRHGGGAFSGKDATKVDRSASYAARYIAKNIVAAD | 302 |
| | | FVIGGPQGD+GLTGRKIIVDTYGGY+RHGGGAFSGKD TKVDRS +YAARY+AKNIVAA | |
| Sbjct: | 247 | FVIGGPQGDAGLTGRKIIVDTYGGYARHGGGAFSGKDPTKVDRSGAYAARYVAKNIVAAG | 306 |
| Query: | 303 | LAKKVEVQLAYAIGVAQPVSVRVDTFGTGVIAEADLEAAVRQIFDLRPAGIINMLDLKRP | 362 |
| | | LA K EVQLAYAIGVA+PVS+ +DTFGTG ++EA L VR+ FDLRPAGII MLDL+RP | |
| Sbjct: | 307 | LADKCEVQLAYAIGVAKPVSISIDTFGTGQVSEARLVELVREHFDLRPAGIIKMLDLRRP | 366 |
| Query: | 363 | IYRQTAAYGHMGRTDIDLPWERVDKVQALK | 392 |
| | | IY+QTAAYGH GRTD++LPWE+ DK + L+ | |
| Sbjct: | 367 | IYKQTAAYGHFGRTDVELPWEQTDKAEILR | 396 |

[7943] A related DNA sequence was identified in S. pyogenes <SEQ ID 4427> which encodes the amino acid sequence <SEQ ID 4428>. Analysis of this protein sequence reveals the following:

```
Possible site: 43
>>> Seems to have no N-terminal signal sequence
----- Final Results -----
                            bacterial cytoplasm --- Certainty = 0.3389(Affirmative) < succ>
                              bacterial membrane --- Certainty = 0.0000(Not Clear) < succ>
                                bacterial outside --- Certainty = 0.0000(Not Clear) < succ>
```

[7944] An alignment of the GAS and GBS proteins is shown below.

| Identities = 333/395 (84%), Positives = 361/395 (91%), Gaps = 1/395 (0%) | | | |
|---|---|---|---|
| Query: | 1 | MSERKLFTSESVSEGHPDKIADQISDAILDAILEQDPDAHVAAETAVYTGSVHVFGEIST | 60 |
| | | MSERKLFTSESVSEGHPDKIADQISDAILDAIL +DP+AHVAAET VYTGSVHVFGEIST | |
| Sbjct: | 1 | MSERKLFTSESVSEGHPDKIADQISDAILDAILAEDPEAHVAAETCVYTGSVHVFGEIST | 60 |
| Query: | 61 | TAYVDINRVVRNTIAEIGYDKAEYGFSAESVGVHPSLVEQSPDIAQGVNEALEVRGSLEQ | 120 |
| | | TAY+DINRVVR+TIAEIGY +AEYGFSAESVGVHPSLVEQS DIAQGVNEA E R + | |
| Sbjct: | 61 | TAYIDINRVVRDTIAEIGYTEAEYGFSAESVGVHPSLVEQSGDIAQGVNEAFESREG-DT | 119 |
| Query: | 121 | DPLDLIGAGDQGLMFGFAVDETPELMPLPISLAHQLVKKLTDLRKSGELTYLRPDAKSQV | 180 |
| | | D L IGAGDQGLMFGFA++ETPELMPLPISL+HQLV++L +LRKSGE++YLRPDAKSQV | |
| Sbjct: | 120 | DDLSHIGAGDQGLMFGFAINETPELMPLPISLSHQLVRRLAELRKSGEISYLRPDAKSQV | 179 |
| Query: | 181 | TVEYDENDQPIRVDAVVISTQHDPNVTNDQLHKDVIEKVINEVIPSHYLDDQTKFFINPT | 240 |
| | | TVEYDE+D+P+RVD VVISTQHDP TNDQ+ +DVIEKVI VIP+ YLDD TKFFINPT | |
| Sbjct: | 180 | TVEYDEHDKPVRVDTVVISTQHDPEATNDQIRQDVIEKVIKAVIPADYLDDDTKFFINPT | 239 |
| Query: | 241 | GRFVIGGPQGDSGLTGRKIIVDTYGGYSRHGGGAFSGKDATKVDRSASYAARYIAKNIVA | 300 |
| | | GRFVIGGPQGDSGLTGRKIIVDTYGGYSRHGGGAFSGKDATKVDRSASYAARYIAKN+VA | |
| Sbjct: | 240 | GRFVIGGPQGDSGLTGRKIIVDTYGGYSRHGGGAFSGKDATKVDRSASYAARYIAKNLVA | 299 |
| Query: | 301 | ADLAKKVEVQLAYAIGVAQPVSVRVDTFGTGVIAEADLEAAVRQIFDLRPAGIINMLDLK | 360 |
| | | A L K EVQLAYAIGVAQPVSVRVDTFGT + EA LEAAVRQ+FDLRPAGII MLDLK | |
| Sbjct: | 300 | AGLVTKAEVQLAYAIGVAQPVSVRVDTFGTSTVPEAVLEAAVRQVFDLRPAGIIQMLDLK | 359 |
| Query: | 361 | RPIYRQTAAYGHMGRTDIDLPWERVDKVQALKDFI | 395 |
| | | RPIY+QTAAYGHMGRTDIDLPWER++KV AL + + | |
| Sbjct: | 360 | RPIYKQTAAYGHMGRTDIDLPWERLNKVDALVEAV | 394 |

[7945] Based on this analysis, it was predicted that these proteins and their epitopes could be useful antigens for vaccines or diagnostics.

### EXAMPLE 1444

[7946] A DNA sequence (GBSx1530) was identified in S. agalactiae <SEQ ID 4429> which encodes the amino acid sequence <SEQ ID 4430>. This protein is predicted to be a transcriptional repressor of the biotin operon. Analysis of this protein sequence reveals the following:

| Possible site: 24 | | | | |
|---|---|---|---|---|
| >>> Seems to have no N-terminal signal sequence | | | | |
| | INTEGRAL | Likelihood = −0.16 | Transmembrane | 188-204 (188-204) |

```
----- Final Results -----
                              bacterial membrane --- Certainty = 0.1065(Affirmative) < succ>
                                bacterial outside --- Certainty = 0.0000(Not Clear) < succ>
                            bacterial cytoplasm --- Certainty = 0.0000(Not Clear) < succ>
```

[7947] A related GBS nucleic acid sequence <SEQ ID 9755> which encodes amino acid sequence <SEQ ID 9756> was also identified.

[7948] The protein has homology with the following sequences in the GENPEPT database.

| >GP: BAB05404 GB: AP001512 transcriptional repressor of the biotin | | | |
|---|---|---|---|
| operon [Bacillus halodurans] | | | |
| Identities = 102/315 (32%), Positives = 169/315 (53%), Gaps = 18/315 (5%) | | | |
| Query: | 10 | ILSKNNNFISGETMANQLNISRTAIWKGIKTLEELGLEIESVTNKGYRLVSG-DILLPEQ | 68 |
| | | +L+ ++F+SGE ++ + SRTA+WK I+ L + G E+E+V KGYR+V D + P | |
| Sbjct: | 9 | LLTAGDDFVSGEKISQAIGCSRTAVWKHIEELRKSGYEVEAVQRKGYRIVKRPDQIKPHD | 68 |
| Query: | 69 | LE-----QEIGIKVSLNNNSASTQLDAKMGIESKLKTPHLFLAPNQKKAKGRFDRPFFTS | 123 |
| | | ++ + G +++ ++ASTQ A + K H+ LA Q KGR R +++ | |
| Sbjct: | 69 | IQVVLETERFGREITYLESTASTQTVALKLAQEGAKEGHIVLANEQTSGKGRMGRGWYSP | 128 |
| Query: | 124 | NQGGIYMSLLLQPNVPIEDIKPYTVMVASSAVKAISRLTGITPEIKWVNDIYLDNKKIAG | 183 |
| | | I MS++ +P +P + T++ A + V+AI TG+ +IKW ND+ +D KKI G | |
| Sbjct: | 129 | PGSSISMSIIFRPQLPPQKAPQLTLLTAVAIVRAIKETTGLDSDIKWPNDLLIDGKKIVG | 188 |
| Query: | 184 | ILTEAIASVESGLVTNVIIGLGINFYIKE--FPRALTKRAGSLFTEQ-PTITRNQLITEI | 240 |
| | | ILTE A +S V +VI G+GIN +E F + K A SL ++ I R LI I | |
| Sbjct: | 189 | ILTEMQADQDS--VHSVIQGIGINVNHQEEAFAEEIRKIATSLAIKKGEPIQRAPLIAAI | 246 |
| Query: | 241 | W---NLFFNIPLEDHLK----VYREKSLVLDRTVSFMDGQTMYSGKAIDITDKGYLVVEL | 293 |
| | | LF+++ L+ ++ ++ + + + + G A ITD G L++E | |
| Sbjct: | 247 | LKNIELFYDLYLQHGFSRIKPLWEAHAISIGKRIRARMLNDVKFGVAKGITDDGVLLLED | 306 |
| Query: | 294 | DDGQLKTLRSGEISL | 308 |
| | | DDG+L ++ S +I + | |
| Sbjct: | 307 | DDGKLHSIYSADIEI | 321 |

[7949] A related DNA sequence was identified in S. pyogenes <SEQ ID 4431> which encodes the amino acid sequence <SEQ ID 4432>. Analysis of this protein sequence reveals the following:

| Possible site: 34 | | | | |
|---|---|---|---|---|
| >>> Seems to have no N-terminal signal sequence | | | | |
| | INTEGRAL | Likelihood = −1.49 | Transmembrane | 194-210 (194-211) |

```
----- Final Results -----
                              bacterial membrane --- Certainty = 0.1595(Affirmative) < succ>
                                bacterial outside --- Certainty = 0.0000(Not Clear) < succ>
                            bacterial cytoplasm --- Certainty = 0.0000(Not Clear) < succ>
```

[7950] The protein has homology with the following sequences in the databases:

| >GP: BAB05404 GB: AP001512 transcriptional repressor of the biotin | | | |
|---|---|---|---|
| operon [Bacillus halodurans] | | | |
| Identities = 98/315 (31%), Positives = 165/315 (52%), Gaps = 18/315 (5%) | | | |
| Query: | 10 | LLSQTDDFVSGEYLADQLSISRTSVWKSIKSLENQGIQIDSLKHKGYRMVQG-DILLPKT | 68 |
| | | LL+ DDFVSGE ++ + SRT+VWK I+ L G ++++++ KGYR+V+ D + P | |
| Sbjct: | 9 | LLTAGDDFVSGEKISQAIGCSRTAVWKHIEELRKSGYEVEAVQRKGYRIVKRPDQIKPHD | 68 |
| Query: | 69 | I-----SQGLGMPVTYTPHSQSTQLDAKQGIEAHNSAPRLYLAPSQEAAKGRLDRQFFSA | 123 |
| | | I ++ G +TY + STQ A + + + LA Q + KGR+ R ++S | |
| Sbjct: | 69 | IQVVLETERFGREITYLESTASTQTVALKLAQEGAKEGHIVLANEQTSGKGRMGRGWYSP | 128 |
| Query: | 124 | STGGIYMSMYLKPNVPYADMPPYTMMVASSIVKAISRLTGIDTEIKWVNDIYLGNMKVAG | 183 |
| | | I MS+ +P +P P T++ A +IV+AI TG+D++IKW ND+ + K+ G | |
| Sbjct: | 129 | PGSSISMSIIFRPQLPPQKAPQLTLLTAVAIVRAIKETTGLDSDIKWPNDLLIDGKKIVG | 188 |
| Query: | 184 | ILTEAITSVETGLITDVIIGVGLNFFVTD--FPEAIAQKAGSLFTEK-PTITRNDLIIDI | 240 |
| | | ILTE + + VI G+G+N + F E I + A SL +K I R LI I | |
| Sbjct: | 189 | ILTE--MQADQDSVHSVIQGIGINVNHQEEAFAEEIRKIATSLAIKKGEPIQRAPLIAAI | 246 |
| Query: | 241 | WK-------LFLSIPVKDHVKVYKEKSLVLNKQVTFIENSQEKRAIAIDLTDQGHLIVQF | 293 |
| | | K L+L +++ ++ + K++ + K +A +TD G L+++ | |
| Sbjct: | 247 | LKNIELFYDLYLQHGFSRIKPLWEAHAISIGKRIRARMLNDVKFGVAKGITDDGVLLLED | 306 |
| Query: | 294 | ENGDLQTLRSGEISL | 308 |
| | | ++G L ++ S +I + | |
| Sbjct: | 307 | DDGKLHSIYSADIEI | 321 |

[7951] An alignment of the GAS and GBS proteins is shown below.

| Identities = 191/311 (61%), Positives = 257/311 (82%) | | | |
|---|---|---|---|
| Query: | 1 | MKTYEKIYQILSKNNNFISGETMANQLNISRTAIWKGIKTLEELGLEIESVTNKGYRLVS | 60 |
| | | MKT EKIYQ+LS+ ++F+SGE +A+QL+ISRT++WK IK+LE G++I+S+ +KGYR+V | |
| Sbjct: | 1 | MKTSEKIYQLLSQTDDFVSGEYLADQLSISRTSVWKSIKSLENQGIQIDSLKHKGYRMVQ | 60 |
| Query: | 61 | GDILLPEQLEQEIGIKVSLNNNSASTQLDAKMGIESKLKTPHLFLAPNQKKAKGRFDRPF | 120 |
| | | GDILLP+ + Q +G+ V+ +S STQLDAK GIE+ P L+LAP+Q+ AKGR DR F | |
| Sbjct: | 61 | GDILLPKTISQGLGMPVTYTPHSQSTQLDAKQGIEAHNSAPRLYLAPSQEAAKGRLDRQF | 120 |
| Query: | 121 | FTSNQGGIYMSLLLQPNVPIEDIKPYTVMVASSAVKAISRLTGITPEIKWVNDIYLDNKK | 180 |
| | | F+++ GGIYMS+ L+PNVP D+ PYT+MVASS VKAISRLTGI EIKWVNDIYL N K | |
| Sbjct: | 121 | FSASTGGIYMSMYLKPNVPYADMPPYTMMVASSIVKAISRLTGIDTEIKWVNDIYLGNHK | 180 |
| Query: | 181 | IAGILTEAIASVESGLVTNVIIGLGINFYIKEFPRALTKRAGSLFTEQPTITRNQLITEI | 240 |
| | | +AGILTEAI SVE+GL+T+VIIG+G+NF++ +FP A+ ++AGSLFTE+PTITRN LI +I | |
| Sbjct: | 181 | VAGILTEAITSVETGLITDVIIGVGLNFFVTDFPEAIAQKAGSLFTEKPTITRNDLIIDI | 240 |
| Query: | 241 | WNLFFNIPLEDHLKVYREKSLVLDRTVSFMDGQTMYSGKAIDITDKGYLVVELDDGQLKT | 300 |
| | | W LF +IP++DH+KVY+EKSLVL++ V+F++ AID+TD+G+L+V+ ++G L+T | |
| Sbjct: | 241 | WKLFLSIPVKDHVKVYKEKSLVLNKQVTFIENSQEKRAIAIDLTDQGHLIVQFENGDLQT | 300 |
| Query: | 301 | LRSGEISLSSW | 311 |
| | | LRSGEISLSSW | |
| Sbjct: | 301 | LRSGEISLSSW | 311 |

[7952] Based on this analysis, it was predicted that these proteins and their epitopes could be useful antigens for vaccines or diagnostics.

### EXAMPLE 1445

[7953] A DNA sequence (GBSx1531) was identified in S. agalactiae <SEQ ID 4433> which encodes the amino acid sequence <SEQ ID 4434>. Analysis of this protein sequence reveals the following:

| Possible site: 15 | | | | |
|---|---|---|---|---|
| >>> Seems to have an uncleavable N-term signal seq | | | | |
| | INTEGRAL | Likelihood = −2.76 | Transmembrane | 3-19 (3-20) |

```
----- Final Results -----
                              bacterial membrane --- Certainty = 0.2105(Affirmative) < succ>
                                bacterial outside --- Certainty = 0.0000(Not Clear) < succ>
                            bacterial cytoplasm --- Certainty = 0.0000(Not Clear) < succ>
```

[7954] The protein has no significant homology with any sequences in the GENPEPT database.

[7955] No corresponding DNA sequence was identified in S. pyogenes.

[7956] Based on this analysis, it was predicted that this protein and its epitopes, could be useful antigens for vaccines or diagnostics.

### EXAMPLE 1446

[7957] A DNA sequence (GBSx1532) was identified in S. agalactiae <SEQ ID 4435> which encodes the amino acid sequence <SEQ ID 4436>. Analysis of this protein sequence reveals the following:

| Possible site: 19 | | | | |
|---|---|---|---|---|
| >>> Seems to have a cleavable N-term signal seq. | | | | |
| | INTEGRAL | Likelihood = −2.28 | Transmembrane | 24-40 (24-40) |

```
----- Final Results -----
                              bacterial membrane --- Certainty = 0.1914(Affirmative) < succ>
                                bacterial outside --- Certainty = 0.0000(Not Clear) < succ>
                            bacterial cytoplasm --- Certainty = 0.0000(Not Clear) < succ>
```

[7958] The protein has no significant homology with any sequences in the GENPEPT database.

[7959] A related DNA sequence was identified in S. pyogenes <SEQ ID 4437> which encodes the amino acid sequence <SEQ ID 4438>. Analysis of this protein sequence reveals the following:

| Possible site: 49 | | | | |
|---|---|---|---|---|
| >>> Seems to have a cleavable N-term signal seq. | | | | |
| | INTEGRAL | Likelihood = −1.91 | Transmembrane | 58-74 (58-75) |

```
----- Final Results -----
                              bacterial membrane --- Certainty = 0.1765(Affirmative) < succ>
                                bacterial outside --- Certainty = 0.0000(Not Clear) < succ>
                            bacterial cytoplasm --- Certainty = 0.0000(Not Clear) < succ>
```

[7960] An alignment of the GAS and GBS proteins is shown below.

| Identities = 37/67 (55%), Positives = 54/67 (80%), Gaps = 3/67 (4%) | | | |
|---|---|---|---|
| Query: | 1 | MTKRQFIFMALLCSFETYFFNQSVMDGSWIFAIFWGVLLLRDLQKVYAISKFTKELIK-- | 58 |
| | | MT RQF+FMA +C+FETYFFN ++ G+++FA+FWG+LL RDL++V+ I++ TK ++K | |
| Sbjct: | 36 | MTIRQFLFMAFVCAFETYFFNDLLLSGNYLFALFWGLLLFRDLRRVHTINQLTKTILKTA | 95 |
| Query: | 59 | -STKKKD | 64 |
| | | S KKKD | |
| Sbjct: | 96 | NSPKKKD | 102 |

[7961] Based on this analysis, it was predicted that these proteins and their epitopes could be useful antigens for vaccines or diagnostics.

### EXAMPLE 1447

[7962] A DNA sequence (GBSx1533) was identified in S. agalactiae <SEQ ID 4439> which encodes the amino acid sequence <SEQ ID 4440>. This protein is predicted to be DNA polymerase III, gamma subunit (dnaZX). Analysis of this protein sequence reveals the following:

```
Possible site: 60
>>> Seems to have no N-terminal signal sequence
----- Final Results -----
                            bacterial cytoplasm --- Certainty = 0.1567(Affirmative) < succ>
                              bacterial membrane --- Certainty = 0.0000(Not Clear) < succ>
                                bacterial outside --- Certainty = 0.0000(Not Clear) < succ>
```

[7963] A related DNA sequence was identified in S. pyogenes <SEQ ID 4441> which encodes the amino acid sequence <SEQ ID 4442>. Analysis of this protein sequence reveals the following:

| Possible site: 60 | | | | |
|---|---|---|---|---|
| >>> Seems to have no N-terminal signal sequence | | | | |
| | INTEGRAL | Likelihood = −0.59 | Transmembrane | 232-248 (232-249) |

```
----- Final Results -----
                              bacterial membrane --- Certainty = 0.1235(Affirmative) < succ>
                                bacterial outside --- Certainty = 0.0000(Not Clear) < succ>
                            bacterial cytoplasm --- Certainty = 0.0000(Not Clear) < succ>
```

[7964] An alignment of the GAS and GBS proteins is shown below.

| Identities = 408/558 (73%), Positives = 473/558 (84%), Gaps = 6/558 (1%) | | | |
|---|---|---|---|
| Query: | 1 | MYQALYRKYRSQTFDEMVGQSVISTTLKQAVSSKKISHAYLFSGPRGTGKTSAAKIFAKA | 60 |
| | | MYQALYRKYRSQTFDEMVGQSVISTTLKQAV S KISHAYLFSGPRGTGKTSAAKIFAKA | |
| Sbjct: | 1 | MYQALYRKYRSQTFDEMVGQSVISTTLKQAVESGKISHAYLFSGPRGTGKTSAAKIFAKA | 60 |
| Query: | 61 | MNCPNQINGEPCNHCDICRDITNGSLEDVIEIDAASNNGVDEIRDIRDKSTYAPSRATYK | 120 |
| | | MNCPNQ++GEPCN CDICRDITNGSLEDVIEIDAASNNGVDEIRDIRDKSTYAPSRATYK | |
| Sbjct: | 61 | MNCPNQVDGEPCNQCDICRDITNGSLEDVIEIDAASNNGVDEIRDIRDKSTYAPSRATYK | 120 |
| Query: | 121 | VYIIDEVHMLSTGAFNALLKTLEEPTENVVFILATTELHKIPATILSRVQRFEFKAIKLL | 180 |
| | | VYIIDEVHMLSTGAFNALLKTLEEPTENVVFILATTELHKIPATILSRVQRFEFKAIK | |
| Sbjct: | 121 | VYIIDEVHMLSTGAFNALLKTLEEPTENVVFILATTELHKIPATILSRVQRFEFKAIKQK | 180 |
| Query: | 181 | AIRDHLAQILDKEAISYDLDALTLVARRAEGGMRDALSILDQALSLAKDNHISLDVAEEI | 240 |
| | | AIR+HLA +LDKE I+Y++DAL L+ARRAEGGMRDALSILDQALSL+ DN +++ +AEEI | |
| Sbjct: | 181 | AIREHLAWVLDKEGIAYEVDALNLIARRAEGGMRDALSILDQALSLSPDNQVAIAIAEEI | 240 |
| Query: | 241 | TGSISLSAIDDYVSNILAHDTTEALAKLEVIFDSGKSMSRFATDLLMYLRDLLVVQAGGE | 300 |
| | | TGSIS+ A+ DYV + T+ALA LE I+DSGKSMSRFATDLL YLRDLLVV+AGG+ | |
| Sbjct: | 241 | TGSISILALGDYVRYVSQEQATQALAALETIYDSGKSMSRFATDLLTYLRDLLVVKAGGD | 300 |
| Query: | 301 | DSHSSDTFIANLNVKQDILFEMIDKVTSVLPEIKNGSHPKVYAEMMTIQLSEMVEKNSS- | 359 |
| | | + S F NL++ D +F+MI VTS LPEIK G+HP++YAEMMTIQL++ + S | |
| Sbjct: | 301 | NQRQSAVFDTNLSLSIDRIFQMITVVTSHLPEIKKGTHPRIYAEMMTIQLAQKEQILSQV | 360 |
| Query: | 360 | NIPADVTAELDSLRRELKSLKNEMSQL-SRADQSSSTQKVKVNNKTFTFKVDRTKILTIM | 418 |
| | | N+ ++ +E+++L+ EL LK ++SQL SR D + + K K KT +++VDR IL IM | |
| Sbjct: | 361 | NLSGELISEIETLKNELAQLKQQLSQLQSRPDSLARSDKTK--PKTTSYRVDRVTILKIM | 418 |
| Query: | 419 | EETVVDSQRSREYLEALKSAWNEILDNITAQDRALLMGSEPVLANSENAILAFDAAFNAE | 478 |
| | | EETV +SQ+SR+YL+ALK+AWNEILDNI+AQDRALLMGSEPVLANSENAILAF+AAFNAE | |
| Sbjct: | 419 | EETVRNSQQSRQYLDALKNAWNEILDNISAQDRALLMGSEPVLANSENAILAFEAAFNAE | 478 |
| Query: | 479 | QAMKRTDLNDIFGNIMSKAAGFSPNILAVPRNDFNQIRSDFAKKMKAQK--TETEPEVNH | 536 |
| | | Q M R +LND+FGNIMSKAAGFSPNILAVPR DF IR +FA++MK+QK + E EV | |
| Sbjct: | 479 | QVMSRNNLNDMFGNIMSKAAGFSPNILAVPRTDFQHIRKEFAQQMKSQKDSVQEEQEVAL | 538 |
| Query: | 537 | QIPEDFSYLAERIAIVED | 554 |
| | | IPE F +L ++I ++D | |
| Sbjct: | 539 | DIPEGFDFLLDKINTIDD | 556 |

[7965] Based on this analysis, it was predicted that these proteins and their epitopes could be useful antigens for vaccines or diagnostics.

### EXAMPLE 1448

[7966] A DNA sequence (GBSx1534) was identified in S. agalactiae <SEQ ID 4443> which encodes the amino acid sequence <SEQ ID 4444>. Analysis of this protein sequence reveals the following:

```
Possible site: 40
>>> Seems to have no N-terminal signal sequence (or aa 1-19)
----- Final Results -----
                              bacterial membrane --- Certainty = 0.0000(Not Clear) < succ>
                                bacterial outside --- Certainty = 0.0000(Not Clear) < succ>
                            bacterial cytoplasm --- Certainty = 0.0000(Not Clear) < succ>
```

[7967] The protein has homology with the following sequences in the GENPEPT database.

| >GP: BAB06927 GB: AP001518 unknown conserved protein [Bacillus halodurans] | | | |
|---|---|---|---|
| Identities = 67/143 (46%), Positives = 96/143 (66%) | | | |
| Query: | 8 | ENYQLLLLQAQALFSDETNALANLSNASAMLNAMLPNSVFTGFYLFDGEELILGPFQGGV | 67 |
| | | E Y L+ Q AL E++A+ANL+NASA+L L + GFYL EL+LGPFQG | |
| Sbjct: | 13 | EKYSLVTKQLAALLEGESDAIANLANASALLYHFLEEVNWVGFYLIKEGELVLGPFQGLP | 72 |
| Query: | 68 | SCVHITLGKGVCGESAQTAKTLIVDDVTKHANYISCDSKAMSEIVVPMFKNGKLLGVLDL | 127 |
| | | +CV I +G+GVCG +A+ +T+ V+DV + +I+CD+ + SEIV+P+F+NG L GVLD+ | |
| Sbjct: | 73 | ACVRIPIGRGVCGTAAKEEQTVRVEDVHQFPGHIACDAASRSEIVIPLFQNGVLYGVLDI | 132 |
| Query: | 128 | DSSLVADYDEIDQEYLEKFVGIL | 150 |
| | | DS + + E +Q LE FV +L | |
| Sbjct: | 133 | DSPSLNRFSEEEQALLESFVDVL | 155 |

[7968] A related DNA sequence was identified in S. pyogenes <SEQ ID 4445> which encodes the amino acid sequence <SEQ ID 4446>. Analysis of this protein sequence reveals the following:

```
Possible site: 27
>>> Seems to have no N-terminal signal sequence
----- Final Results -----
                            bacterial cytoplasm --- Certainty = 0.1753(Affirmative) < succ>
                              bacterial membrane --- Certainty = 0.0000(Not Clear) < succ>
                                bacterial outside --- Certainty = 0.0000(Not Clear) < succ>
```

[7969] An alignment of the GAS and GBS proteins is shown below.

| Identities = 122/164 (74%), Positives = 144/164 (87%) | | | |
|---|---|---|---|
| Query: | 1 | MNKSKKIENYQLLLLQAQALFSDETNALANLSNASAMLNAMLPNSVFTGFYLFDGEELIL | 60 |
| | | MNKSKKIE YQL++ QA+ LF++E+NALANLSNASA+LN LPNSVFTGFYLFDG+ELIL | |
| Sbjct: | 1 | MNKSKKIEQYQLMIAQAKELFANESNALANLSNASALLNMTLPNSVFTGFYLFDGQELIL | 60 |
| Query: | 61 | GPFQGGVSCVHITLGKGVCGESAQTAKTLIVDDVTKHANYISCDSKAMSEIVVPMFKNGK | 120 |
| | | GPFQG VSCVHI LGKGVCGESAQ+ +T+I++DV +HANYISCD+ AMSEIVVPM K G | |
| Sbjct: | 61 | GPFQGRVSCVHIKLGKGVCGESAQSRRTIIINDVKQHANYISCDAAAMSEIVVPMVKEGH | 120 |
| Query: | 121 | LLGVLDLDSSLVADYDEIDQEYLEKFVGILVEHTIWNLDMFGVE | 164 |
| | | L+GVLDLDSSLVADYDE+DQEYLE FV + +E T + +MFGV+ | |
| Sbjct: | 121 | LIGVLDLDSSLVADYDEVDQEYLEAFVDLFLEKTTFTFNMFGVK | 164 |

[7970] SEQ ID 4444 (GBS282) was expressed in E. coli as a His-fusion product. SDS-PAGE analysis of total cell extract is shown in FIG. 52 (lane 9; MW 19.8 kDa). It was also expressed in E. coli as a GST-fusion product. SDS-PAGE analysis of total cell extract is shown in FIG. 60 (lane 6; MW 44.8 kDa) and in FIG. 63 (lane 7; MW 47 kDa).

[7971] The GBS282-GST fusion product was purified (FIG. 211, lane 4; see also FIG. 225, lane 6) and used to immunise mice. The resulting antiserum was used for FACS (FIG. 269), which confirmed that the protein is immunoaccessible on GBS bacteria.

[7972] Based on this analysis, it was predicted that these proteins and their epitopes could be useful antigens for vaccines or diagnostics.

### EXAMPLE 1449

[7973] A DNA sequence (GBSx1535) was identified in S. agalactiae <SEQ ID 4447> which encodes the amino acid sequence <SEQ ID 4448>. This protein is predicted to be uridine kinase (udk). Analysis of this protein sequence reveals the following:

```
Possible site: 24
>>> Seems to have an uncleavable N-term signal seq
----- Final Results -----
                              bacterial membrane --- Certainty = 0.0000(Not Clear) < succ>
                                bacterial outside --- Certainty = 0.0000(Not Clear) < succ>
                            bacterial cytoplasm --- Certainty = 0.0000(Not Clear) < succ>
```

[7974] The protein has homology with the following sequences in the GENPEPT database.

| >GP: CAB14675 GB: Z99117 uridine kinase [Bacillus subtilis] | | | |
|---|---|---|---|
| Identities = 133/207 (64%), Positives = 167/207 (80%) | | | |
| Query: | 1 | MRKKPIIIGVTGGSGGGKTSVSRAILSNFPDQKITMIEHDSYYKDQSHLTFEERVKTNYD | 60 |
| | | M K P++IG+ GGSG GKTSV+R+I F I MI+ D YYKDQSHL FEER+ TNYD | |
| Sbjct: | 1 | MGKNPVVIGIAGGSGSGKTSVTRSIYEQFKGHSILMIQQDLYYKDQSHLPFEERLNTNYD | 60 |
| Query: | 61 | HPLAFDTNLMIEQLNELIEGRPVDIPVYDYTKHTRSDRTIRQEPQDVIIVEGILVLEDQR | 120 |
| | | HPLAFD + +IE + +L+ RP++ P+YDY HTRS+ T+ EP+DVII+EGILVLED+R | |
| Sbjct: | 61 | HPLAFDNDYLIEHIQDLLNYRPIEKPIYDYKLHTRSEETVHVEPKDVIILEGILVLEDKR | 120 |
| Query: | 121 | LRDLMDIKLFVDTDDDIRIIRRIKRDMEERDRSLDSIIEQYTEVVKPMYHQFIEPTKRYA | 180 |
| | | LRDLMDIKL+VDTD D+RIIRRI RD+ ER RS+DS+IEQY VV+PM++QF+EPTKRYA | |
| Sbjct: | 121 | LRDLMDIKLYVDTDADLRIIRRIMRDINERGRSIDSVIEQYVSVVRPMHNQFVEPTKRYA | 180 |
| Query: | 181 | DIVIPEGVSNIVAIDLINTKVASILNE | 207 |
| | | DI+IPEG N VAIDL+ TK+ +IL + | |
| Sbjct: | 181 | DIIIPEGGQNHVAIDLMVTKIQTILEQ | 207 |

[7975] A related DNA sequence was identified in S. pyogenes <SEQ ID 4449> which encodes the amino acid sequence <SEQ ID 4450>. Analysis of this protein sequence reveals the following:

```
Possible site: 39
>>> Seems to have an uncleavable N-term signal seq
----- Final Results -----
                              bacterial membrane --- Certainty = 0.0000(Not Clear) < succ>
                                bacterial outside --- Certainty = 0.0000(Not Clear) < succ>
                            bacterial cytoplasm --- Certainty = 0.0000(Not Clear) < succ>
```

[7976] A related sequence was also identified in GAS <SEQ ID 9151> which encodes the amino acid sequence <SEQ ID 9152>. Analysis of this protein sequence reveals the following:

```
Possible site: 35
>>> Seems to have an uncleavable N-term signal seq
----- Final Results -----
                              bacterial membrane --- Certainty = 0.0000(Not Clear) < succ>
                                bacterial outside --- Certainty = 0.0000(Not Clear) < succ>
                            bacterial cytoplasm --- Certainty = 0.0000(Not Clear) < succ>
```

[7977] An alignment of the GAS and GBS proteins is shown below.

| Identities = 173/207 (83%), Positives = 193/207 (92%) | | | |
|---|---|---|---|
| Query: | 1 | MRKKPIIIGVTGGSGGGKTSVSRAILSNFPDQKITMIEHDSYYKDQSHLTFEERVKTNYD | 60 |
| | | M KKPIIIGVTGGSGGGKTSVSRAIL +FP+ +I MI+HDSYYKDQSH++FEERVKTNYD | |
| Sbjct: | 5 | MLKKPIIIGVTGGSGGGKTSVSRAILDSFPNARIAMIQHDSYYKDQSHMSFEERVKTNYD | 64 |
| Query: | 61 | HPLAFDTNLMIEQLNELIEGRPVDIPVYDYTKHTRSDRTIRQEPQDVIIVEGILVLEDQR | 120 |
| | | HPLAFDT+ MI+QL EL+ GRPVDIP+YDY KHTRS+ T RQ+PQDVIIVEGILVLED+R | |
| Sbjct: | 65 | HPLAFDTDFMIQQLKELLAGRPVDIPIYDYKKHTRSNTTFRQDPQDVIIVEGILVLEDER | 124 |
| Query: | 121 | LRDLMDIKLFVDTDDDIRIIRRIKRDMEERDRSLDSIIEQYTEVVKPMYHQFIEPTKRYA | 180 |
| | | LRDLMDIKLFVDTDDDIRIIRRIKRDM ER RSL+SII+QYT VVKPMYHQFIEP+KRYA | |
| Sbjct: | 125 | LRDLMDIKLFVDTDDDIRIIRRIKRDMMERGRSLESIIDQYTSVVKPMYHQFIEPSKRYA | 184 |
| Query: | 181 | DIVIPEGVSNIVAIDLINTKVASILNE | 207 |
| | | DIVIPEGVSN+VAID+IN+K+ASIL E | |
| Sbjct: | 185 | DIVIPEGVSNVVAIDVINSKIASILGE | 211 |

[7978] Based on this analysis, it was predicted that these proteins and their epitopes could be useful antigens for vaccines or diagnostics.

### EXAMPLE 1450

[7979] A DNA sequence (GBSx1536) was identified in S. agalactiae <SEQ ID 4451> which encodes the amino acid sequence <SEQ ID 4452>. Analysis of this protein sequence reveals the following:

```
Possible site: 51
>>> Seems to have no N-terminal signal sequence
----- Final Results -----
                            bacterial cytoplasm --- Certainty = 0.5083(Affirmative) < succ>
                              bacterial membrane --- Certainty = 0.0000(Not Clear) < succ>
                                bacterial outside --- Certainty = 0.0000(Not Clear) < succ>
```

[7980] The protein has homology with the following sequences in the GENPEPT database.

| >GP: CAB12572 GB: Z99108 similar to RNA helicase [Bacillus subtilis] | | | |
|---|---|---|---|
| Identities = 140/343 (40%), Positives = 202/343 (58%), Gaps = 9/343 (2%) | | | |
| Query: | 10 | QDKLTQRQFDDLTDIQNKLFQPITDGDNILGISPTGTGKTLAYLFPTLLKLQPK-KSQQL | 68 |
| | | Q+ F T +Q + Q I DG +++ SPTGTGKTLAY P L +++P+ K Q | |
| Sbjct: | 16 | QENWNASGFQKPTPVQEQAAQLIMDGKDVIAESPTGTGKTLAYALPVLERIKPEQKHPQA | 75 |
| Query: | 69 | LILAPNSELAGQIFDVTKEWAEPLGLTAQLFLSGSSQKRQIERLKKGPEILIGTAGRVFE | 128 |
| | | +ILAP+ EL QIF V ++W L A + G++ K+Q+E+LKK P I++GT GRVFE | |
| Sbjct: | 76 | VILAPSRELVMQIFQVIQDWKAGSELRAASLIGGANVKKQVEKLKKHPHIIVGTPGRVFE | 135 |
| Query: | 129 | LVKLKKIKMMNINTIVLDEFDELLGDSQYHFVDNIINRVPRDQQMIYISATNKLDNS--- | 185 |
| | | L+K KK+KM + TIVLDE D+L+ + II RD+Q++ SAT K + | |
| Sbjct: | 136 | LIKAKKLKMHEVKTIVLDETDQLVLPEHRETMKQIIKTTLRDRQLLCFSATLKKETEDVL | 195 |
| Query: | 186 | -KLADNTITIDLSNQKLDT--IKHYYITVDKRERTDLLRKFSNIPDFRGLVFFNSLSDLG | 242 |
| | | +LA + + K + +KH Y+ D+R++ LL+K S + + LVF + +L | |
| Sbjct: | 196 | RELAQEPEVLKVQRSKAEAGKVKHQYLICDQRDKVKLLQKLSRLEGMQALVFVRDIGNLS | 255 |
| Query: | 243 | ACEERLQFNRASAVSLASDINIKFRKVILEKFKNHDISLLLGTDLVARGIDIDNLEYVIN | 302 |
| | | E+L ++ L S+ R I+ F++ + LLL TD+ ARG+DI+NL YVI+ | |
| Sbjct: | 256 | VYAEKLAYHHVELGVLHSEAKKMERAKIIATFEDGEFPLLLATDIAARGLDIENLPYVIH | 315 |
| Query: | 303 | FDIARDKETYTHRSGRTGRMGKEGCVITFVTHKEELKQLKKYA | 345 |
| | | DI D++ Y HRSGRTGR GKEG V++ VT EE K LKK A | |
| Sbjct: | 316 | ADIP-DEDGYVHRSGRTGRAGKEGNVLSLVTKLEESK-LKKMA | 356 |

[7981] A related DNA sequence was identified in S. pyogenes <SEQ ID 4453> which encodes the amino acid sequence <SEQ ID 4454>. Analysis of this protein sequence reveals the following:

```
Possible site: 39
>>> Seems to have no N-terminal signal sequence
----- Final Results -----
                            bacterial cytoplasm --- Certainty = 0.3847(Affirmative) < succ>
                              bacterial membrane --- Certainty = 0.0000(Not Clear) < succ>
                                bacterial outside --- Certainty = 0.0000(Not Clear) < succ>
```

[7982] An alignment of the GAS and GBS proteins is shown below.

| Identities = 273/358 (76%), Positives = 312/358 (86%) | | | |
|---|---|---|---|
| Query: | 1 | MITKFPDQWQDKLTQRQFDDLTDIQNKLFQPITDGDNILGISPTGTGKTLAYLFPTLLKL | 60 |
| | | MITKFP QWQ+KL Q F LT IQ + FQPI DG N LGISPTGTGKTLAY+FP LL L | |
| Sbjct: | 12 | MITKFPPQWQEKLDQVAFTHLTPIQEQAFQPIVDGKNFLGISPTGTGKTLAYVFPNLLAL | 71 |
| Query: | 61 | QPKKSQQLLILAPNSELAGQIFDVTKEWAEPLGLTAQLFLSGSSQKRQIERLKKGPEILI | 120 |
| | | PKKSQQLLILAPN+ELAGQIF+VTK+WA+PLGLTAQLF+SG+SQKRQIERLKKGPEILI | |
| Sbjct: | 72 | TPKKSQQLLILAPNTELAGQIFEVTKDWAQPLGLTAQLFISGTSQKRQIERLKKGPEILI | 131 |
| Query: | 121 | GTAGRVFELVKLKKIKMMNINTIVLDEFDELLGDSQYHFVDNIINRVPRDQQMIYISATN | 180 |
| | | GT GR+FEL+KLKKIKMM++NTIVLDE+DELLGDSQY FV I + VPRD QM+Y+SATN | |
| Sbjct: | 132 | GTPGRIFELIKLKKIKMMSVNTIVLDEYDELLGDSQYDFVQKISHYVPRDHQMVYMSATN | 191 |
| Query: | 181 | KLDNSKLADNTITIDLSNQKLDTIKHYYITVDKRERTDLLRKFSNIPDFRGLVFFNSLSD | 240 |
| | | K+D + LA NT IDLS Q D I+H+Y+ VDKRERTDLLRKF+NIP FR LVFFNSLSD | |
| Sbjct: | 192 | KVDQTSLAPNTFCIDLSEQTNDAIQHFYLMVDKRERTDLLRKFTNIPHFRALVFFNSLSD | 251 |
| Query: | 241 | LGACEERLQFNRASAVSLASDINIKFRKVILEKFKNHDISLLLGTDLVARGIDIDNLEYV | 300 |
| | | LGA EERLQ+N A+AVSLASDIN+KFRK ILEKFK+H +SLLL TDLVARGIDIDNL+YV | |
| Sbjct: | 252 | LGATEERLQYNGAAAVSLASDINVKFRKTILEKFKSHQLSLLLATDLVARGIDIDNLDYV | 311 |
| Query: | 301 | INFDIARDKETYTHRSGRTGRMGKEGCVITFVTHKEELKQLKKYATVTELVLHNQKLH | 358 |
| | | I+FD+ARDKE YTHR+GRTGRMGK G VITFV+H E+LK+LKK+A V+E+ L NQ+LH | |
| Sbjct: | 312 | IHFDVARDKENYTHRAGRTGRMGKSGIVITFVSHPEDLKKLKKFAKVSEISLKNQQLH | 369 |

[7983] Based on this analysis, it was predicted that these proteins and their epitopes could be useful antigens for vaccines or diagnostics.

### EXAMPLE 1451

[7984] A DNA sequence (GBSx1537) was identified in S. agalactiae <SEQ ID 4455> which encodes the amino acid sequence <SEQ ID 4456>. Analysis of this protein sequence reveals the following:

| Possible site: 25 | | | |
|---|---|---|---|
| >>> Seems to have an uncleavable N-term signal seq | | | |
| INTEGRAL | Likelihood = −1.38 | Transmembrane | 15-31 (13-31) |

----- Final Results -----
bacterial membrane --- Certainty = 0.1553 (Affirmative) < succ>
bacterial outside --- Certainty = 0.0000 (Not Clear) < succ>
bacterial cytoplasm --- Certainty = 0.0000 (Not Clear) < succ>

[7985] The protein has no significant homology with any sequences in the GENPEPT database.

[7986] No corresponding DNA sequence was identified in S. pyogenes.

[7987] Based on this analysis, it was predicted that this protein and its epitopes, could be useful antigens for vaccines or diagnostics.

### EXAMPLE 1452

[7988] A DNA sequence (GBSx1538) was identified in S. agalactiae <SEQ ID 4457> which encodes the amino acid sequence <SEQ ID 4458>. This protein is predicted to be peptidoglycan GlcNAc deacetylase. Analysis of this protein sequence reveals the following:

| Possible site: 28 | | | |
|---|---|---|---|
| >>> Seems to have an uncleavable N-term signal seq | | | |
| INTEGRAL | Likelihood = −8.92 | Transmembrane | 4-20 (1-26) |

----- Final Results -----
bacterial membrane --- Certainty = 0.4567 (Affirmative) < succ>
bacterial outside --- Certainty = 0.0000 (Not Clear) < succ>
bacterial cytoplasm --- Certainty = 0.0000 (Not Clear) < succ>

[7989] The protein has homology with the following sequences in the GENPEPT database.

| >GP: CAB96552 GB: AJ251472 peptidoglycan GlcNAc deacetylase | | | |
|---|---|---|---|
| [Streptococcus pneumoniae] | | | |
| Identities = 133/431 (30%), Positives = 228/431 (52%), Gaps = 20/431 (4%) | | | |
| Query: | 5 | IIGIFSLIIIAILAWQGFSFLKHK--EIKLQQAVVEKEIRIAEKTVEVVKRQKTERVLFL | 62 |
| | | +IGI ++ I + + F + K E K++ EK+ +++E + RQ V+ | |
| Sbjct: | 21 | LIGILAISICLLGGFIAFKIYQQKSFEQKIESLKKEKDDQLSEGNQKEHFRQGQAEVIAY | 80 |
| Query: | 63 | EPKGYDKSLSADILKWNQKSFEHKKFYDNQYIILRPQLADSNFANVKKLSIYQILYQKEK | 122 |
| | | P +K +S+ NQ + + DN Q +S V ++ + +Y | |
| Sbjct: | 81 | YPLQGEKVISSVRELINQDVKDKLESKDNLVFYYTEQ-EESGLKGVVNRNVTKQIYDLVA | 139 |
| Query: | 123 | GSMFQKSSRLLRTYLLDQNKKPFELDELLAHNISGFKAILENIAPGTQLK--EHDSNKEF | 180 |
| | | + + L L ++ +PF LD+L + + +++ + + K E D +++ | |
| Sbjct: | 140 | FKIEETEKTSLGKVHLTEDGQPFTLDQLFSDASKAKEQLIKELTSFIEDKKIEQDQSEQI | 199 |
| Query: | 181 | LKTGRVTD----GLDVKDGKLII---------NDLKLPLDKLYNVIDESYLKSSDLDLVS | 227 |
| | | +K D D KD ++I+ ++ LP+ ++VI SYL D L | |
| Sbjct: | 200 | VKNFSDQDLSAWNFDYKDSQIILYPSPVVENLEEIALPVSAFFDVIQSSYLLEKDAALYQ | 259 |
| Query: | 228 | NLKAKAPR--VALTFDDGPNEKTTPKALEILKRYNAKATFFVMGQSAVGHTDILQRMHAE | 285 |
| | | + K + VALTFDDGPN TTP+ LE L +Y+ KATFFV+G++ G+ D+++R+ +E | |
| Sbjct: | 260 | SYFDKKHQKVVALTFDDGPNPATTPQVLETLAKYDIKATFFVLGKNVSGNEDLVKRIKSE | 319 |
| Query: | 286 | GHEIGNHTWDHPNLTKLPAEKIKEEIHKTNDLIMKATGQKPVYLRPPYGATNATVKTVTG | 345 |
| | | GH +GNH+W HP L++L ++ K++I T D++ K G +RPPYGA ++ | |
| Sbjct: | 320 | GHVVGNHSWSHPILSQLSLDEAKKQITDTEDVLTKVLGSSSKLMRPPYGAITDDIRNSLD | 379 |
| Query: | 346 | LKEMLWSVDTEDWKNHNTQAMMTNIKKQLRPGGVILMHDIHQTTIDALPTIMDYLTTQGY | 405 |
| | | L ++W VD+ DWK+ N +++T I+ Q+ G ++LMHDIH T++ALP +++YL QGY | |
| Sbjct: | 380 | LSFIMWDVDSLDWKSKNEASILTEIQHQVANGSIVLMHDIHSPTVNALPRVIEYLKNQGY | 439 |
| Query: | 406 | YFVTVGELYST | 416 |
| | | FVT+ E+ +T | |
| Sbjct: | 440 | TFVTIPEMLNT | 450 |

[7990] A related DNA sequence was identified in S. pyogenes <SEQ ID 4459> which encodes the amino acid sequence <SEQ ID 4460>. Analysis of this protein sequence reveals the following:

| Possible site: 22 | | | |
|---|---|---|---|
| >>> Seems to have an uncleavable N-term signal seq | | | |
| INTEGRAL | Likelihood = −12.58 | Transmembrane | 6-22 (1-27) |

----- Final Results -----
bacterial membrane --- Certainty = 0.6031 (Affirmative) < succ>
bacterial outside --- Certainty = 0.0000 (Not Clear) < succ>
bacterial cytoplasm --- Certainty = 0.0000 (Not Clear) < succ>

[7991] The protein has homology with the following sequences in the databases:

| !GB: AJ251472 peptidoglycan GlcNAc deacetylase [Strep... 239 4e−62 | | | |
|---|---|---|---|
| >GP: CAB96552 GB: AJ251472 peptidoglycan GlcNAc deacetylase | | | |
| [Streptococcus pneumoniae] | | | |
| Identities = 136/438 (31%), Positives = 230/438 (52%), Gaps = 23/438 (5%) | | | |
| Query: | 3 | KLNVILVGLLSILMLSLAI----VFINRWKLNEDSQRIVLAEKKKNTSDLVIKAVKHIKK | 58 |
| | | K +L+ L+ IL +S+ + + ++ Q+I +K+K+ +H ++ | |
| Sbjct: | 13 | KTRHVLLALIGILAISICLLGGFIAFKIYQQKSFEQKIESLKKEKDDQLSEGNQKEHFRQ | 72 |
| Query: | 59 | DQKDYYYFSPIK--QADDFFVDNLPVSLYKKKNSDKELILVRPKLQSSHLRSVNTLTISK | 116 |
| | | Q + + P++ + + + + K S L+ + + S L+ V ++K | |
| Sbjct: | 73 | GQAEVIAYYPLQGEKVISSVRELINQDVKDKLESKDNLVFYYTEQEESGLKGVVNRNVTK | 132 |
| Query: | 117 | IVYQKKFFHLAKKSEKVISTYHVTDDLKPFQVKDLVSGHL---ERIQEEVEKKYPDAGFN | 173 |
| | | +Y F + + + + H+T+D +PF + L S E++ +E+ D | |
| Sbjct: | 133 | QIYDLVAFKIEETEKTSLGKVHLTEDGQPFTLDQLFSDASKAKEQLIKELTSFIEDKKIE | 192 |
| Query: | 174 | SDKYNGLKESNS---LLSDGFEVKSGNLIFD--------KKLTIPLTTLFDVINPDFLAN | 222 |
| | | D+ + ++ S L + F+ K +I +++ +P++ FDVI +L | |
| Sbjct: | 193 | QDQSEQIVKNFSDQDLSAWNFDYKDSQIILYPSPVVENLEEIALPVSAFFDVIQSSYLLE | 252 |
| Query: | 223 | SDRAAYDNYRTYKEQHPKKLVALTFDDGPDPTTTPQVLDILAKYQAKGTFFMIGSKVVNN | 282 |
| | | D A Y +Y K Q K+VALTFDDGP+P TTPQVL+ LAKY K TFF++G V N | |
| Sbjct: | 253 | KDAALYQSYFDKKHQ---KVVALTFDDGPNPATTPQVLETLAKYDIKATFFVLGKNVSGN | 309 |
| Query: | 283 | ENLTKRVSDAGHEIANHTWDHPNLTNLSVSEIQHQVNMTNQAIEKACGKKPRYLRPPYGA | 342 |
| | | E+L KR+ GH + NH+W HP L+ LS+ E + Q+ T + K G + +RPPYGA | |
| Sbjct: | 310 | EDLVKRIKSEGHVVGNHSWSHPILSQLSLDEAKKQITDTEDVLTKVLGSSSKLMRPPYGA | 369 |
| Query: | 343 | TNATVQQSSGLTQMLWTVDTRDWENHSTDGIMTNVKNQLQPGGVVLMHDIHQTTINALPT | 402 |
| | | ++ S L+ ++W VD+ DW++ + I+T +++Q+ G +VLMHDIH T+NALP | |
| Sbjct: | 370 | ITDDIRNSLDLSFIMWDVDSLDWKSKNEASILTEIQHQVANGSIVLMHDIHSPTVNALPR | 429 |
| Query: | 403 | VMEYLKAEGYECVTVSEL | 420 |
| | | V+EYLK +GY VT+ E+ | |
| Sbjct: | 430 | VIEYLKNQGYTFVTIPEM | 447 |

[7992] An alignment of the GAS and GBS proteins is shown below.

| Identities = 169/420 (40%), Positives = 259/420 (61%), Gaps = 12/420 (2%) | | | |
|---|---|---|---|
| Query: | 4 | LIIGIFSLIIIAILAWQGFSFLKHKEIKLQQAVVEKEIRIAEKTVEVVKRQKTER--VLF | 61 |
| | | +++G+ S+++++ LA + K E + + EK+ ++ ++ VK K ++ + | |
| Sbjct: | 7 | ILVGLLSILMLS-LAIVFINRWKLNEDSQRIVLAEKKKNTSDLVIKAVKHIKKDQKDYYY | 65 |
| Query: | 62 | LEPKGYDKSLSADILKWNQKSFEHKKFYDNQYIILRPQLADSNFANVKKLSIYQILYQKE | 121 |
| | | P D L S KK D + I++RP+L S+ +V L+I +I+YQK+ | |
| Sbjct: | 66 | FSPIKQADDFFVDNLP---VSLYKKKNSDKELILVRPKLQSSHLRSVNTLTISKIVYQKK | 122 |
| Query: | 122 | KGSMFQKSSRLLRTYLLDQNKKPFELDELLAHNISGFKAILENIAPGTQLKEHDSNKEFL | 181 |
| | | + +KS +++ TY + + KPF++ +L++ ++ + +E P N | |
| Sbjct: | 123 | FFHLAKKSEKVISTYHVTDDLKPFQVKDLVSGHLERIQEEVEKKYPDAGFNSDKYNGLKE | 182 |
| Query: | 182 | KTGRVTDGLDVKDGKLIIND-LKLPLDKLYNVIDESYLKSSDLDLVSNL---KAKAPR-- | 235 |
| | | ++DG +VK G LI + L +PL L++VI+ +L +SD N K + P+ | |
| Sbjct: | 183 | SNSLLSDGFEVKSGNLIFDKKLTIPLTTLFDVINPDFLANSDRAAYDNYRTYKEQHPKKL | 242 |
| Query: | 236 | VALTFDDGPNEKTTPKALEILKRYNAKATFFVMGQSAVGHTDILQRMHAEGHEIGNHTWD | 295 |
| | | VALTFDDGP+ TTP+ L+IL +Y AK TFF++G V + ++ +R+ GHEI NHTWD | |
| Sbjct: | 243 | VALTFDDGPDPTTTPQVLDILAKYQAKGTFFMIGSKVVNNENLTKRVSDAGHEIANHTWD | 302 |
| Query: | 296 | HPNLTKLPAEKIKEEIHKTNDLIMKATGQKPVYLRPPYGATNATVKTVTGLKEMLWSVDT | 355 |
| | | HPNLT L +I+ +++ TN I KA G+KP YLRPPYGATNATV+ +GL +MLW+VDT | |
| Sbjct: | 303 | HPNLTNLSVSEIQHQVNMTNQAIEKACGKKPRYLRPPYGATNATVQQSSGLTQMLWTVDT | 362 |
| Query: | 356 | EDWKNHNTQAMMTNIKKQLRPGGVILMHDIHQTTIDALPTIMDYLTTQGYYFVTVGELYS | 415 |
| | | DW+NH+T +MTN+K QL+PGGV+LMHDIHQTTI+ALPT+M+YL +GY VTV ELY+ | |
| Sbjct: | 363 | RDWENHSTDGIMTNVKNQLQPGGVVLMHDIHQTTINALPTVMEYLKAEGYECVTVSELYA | 422 |

[7993] GBS281d was expressed in E. coli as a GST-fusion product. SDS-PAGE analysis of total cell extract is shown in FIG. 152 (lane 8-10; MW 71.5 kDa) and in FIG. 187 (lane 10; MW 71 kDa). It was also expressed in E. coli as a His-fusion product. SDS-PAGE analysis of total cell extract is shown in FIG. 152 (lane 12; MW 46.5 kDa) and in FIG. 183 (lane 2; MW 46 kDa). Purified GBS281d-GST is shown in lane 6 of FIG. 237.

[7994] Based on this analysis, it was predicted that these proteins and their epitopes could be useful antigens for vaccines or diagnostics.

### EXAMPLE 1453

[7995] A DNA sequence (GBSx1539) was identified in S. agalactiae <SEQ ID 4461> which encodes the amino acid sequence <SEQ ID 4462>. Analysis of this protein sequence reveals the following:

Possible site: 57
>>> Seems to have no N-terminal signal sequence
----- Final Results -----
bacterial cytoplasm --- Certainty = 0.2488 (Affirmative) < succ>
bacterial membrane --- Certainty = 0.0000 (Not Clear) < succ>
bacterial outside --- Certainty = 0.0000 (Not Clear) < succ>

[7996] A related DNA sequence was identified in S. pyogenes <SEQ ID 4463> which encodes the amino acid sequence <SEQ ID 4464>. Analysis of this protein sequence reveals the following:

Possible site: 40
>>> Seems to have no N-terminal signal sequence
----- Final Results -----
bacterial cytoplasm --- Certainty = 0.2799 (Affirmative) < succ>
bacterial membrane --- Certainty = 0.0000 (Not Clear) < succ>
bacterial outside --- Certainty = 0.0000 (Not Clear) < succ>

[7997] An alignment of the GAS and GBS proteins is shown below.

| Identities = 311/475 (65%), Positives = 389/475 (81%) | | | |
|---|---|---|---|
| Query: | 1 | MTKEYQNYVNGEWKSSVNQIEILSPIDDSSLGFVPAMTREEVDHAMKAGREALPAWAALT | 60 |
| | | + K+Y+N VNGEWK S N+I I +P LG VPAMT+ EVD + ++AL W AL+ | |
| Sbjct: | 1 | LAKQYKNLVNGEWKLSENEITIYAPATGEELGSVPAMTQAEVDAVYASAKKALSDWRALS | 60 |
| Query: | 61 | VYERAQYLHKAADIIERDKEEIATVLAKEISKAYNASVTEVVRTADLIRYAAEEGIRLST | 120 |
| | | ERA YLHKAADI+ RD E+I +L+KE++K + A+V+EV+RTA++I YAAEEG+R+ | |
| Sbjct: | 61 | YVERAAYLHKAADILVRDAEKIGAILSKEVAKGHKAAVSEVIRTAEIINYAAEEGLRMEG | 120 |
| Query: | 121 | SADEGGKMDASTGHKLAVIRRQPVGIVLAIAPYNYPVNLSGSKIAPALIGGNVVMFKPPT | 180 |
| | | EGG +A++ K+A++RR+PVG+VLAI+P+NYPVNL+GSKIAPALI GNVV KPPT | |
| Sbjct: | 121 | EVLEGGSFEAASKKKIAIVRREPVGLVLAISPFNYPVNLAGSKIAPALIAGNVVALKPPT | 180 |
| Query: | 181 | QGSVSGLVLAKAFAEAGLPAGVFNTITGRGSEIGDYIVEHEEVNFINFTGSTPVGKRIGK | 240 |
| | | QGS+SGL+LA+AFAEAG+PAGVFNTITGRGS IGDYIVEHE V+FINFTGSTP+G+ IGK | |
| Sbjct: | 181 | QGSISGLLLAEAFAEAGIPAGVFNTITGRGSVIGDYIVEHEAVSFINFTGSTPIGEGIGK | 240 |
| Query: | 241 | LAGMRPIMLELGGKDAGVVLADADLDNAAKQIVAGAYDYSGQRCTAIKRVLVVEEVADEL | 300 |
| | | LAGMRPIMLELGGKD+ +VL DADL AAK IVAGA+ YSGQRCTA+KRVLV+++VAD+L | |
| Sbjct: | 241 | LAGMRPIMLELGGKDSAIVLEDADLALAAKNIVAGAFGYSGQRCTAVKRVLVMDKVADQL | 300 |
| Query: | 301 | AEKISENVAKLSVGDPFDNATVTPVIDDNSADFIESLVVDARQKGAKELNEFKRDGRLLT | 360 |
| | | A +I V KLSVG P D+A +TP+ID ++ADF+E L+ DA KGA L F R+G L++ | |
| Sbjct: | 301 | AAEIKTLVEKLSVGMPEDDADITPLIDTSAADFVEGLIKDATDKGATALTAFNREGNLIS | 360 |
| Query: | 361 | PGLFDHVTLDMKLAWEEPFGPILPIIRVKDAEEAVAIANKSDFGLQSSVFTRDFQKAFDI | 420 |
| | | P LFDHVT DM+LAWEEPFGP+LPIIRV EEA+ I+N+S++GLQ+S+FT +F KAF I | |
| Sbjct: | 361 | PVLFDHVTTDMRLAWEEPFGPVLPIIRVTTVEEAIKISNESEYGLQASIFTTNFPKAFGI | 420 |
| Query: | 421 | ANKLEVGTVHINNKTGRGPDNFPFLGLKGSGAGVQGIRYSIEAMTNVKSIVFDMK | 475 |
| | | A +LEVGTVH+NNKT RG DNFPFLG K SGAGVQG++YSIEAMT VKS+VFD++ | |
| Sbjct: | 421 | AEQLEVGTVHLNNKTQRGTDNFPFLGAKKSGAGVQGVKYSIEAMTTVKSVVFDIQ | 475 |

[7998] A related GBS gene <SEQ ID 8815> and protein <SEQ ID 8816> were also identified. Analysis of this protein sequence reveals the following:

| Lipop: Possible site: −1 Crend: 3 | | | |
|---|---|---|---|
| McG: Discrim Score: −15.11 | | | |
| GvH: Signal Score (−7.5): 0.17 | | | |
| Possible site: 57 | | | |
| >>> Seems to have no N-terminal signal sequence | | | |
| ALOM program | count: 0 | value: 1.22 | threshold: 0.0 |

| | |
|---|---|
| PERIPHERAL | Likelihood = 1.22 187 |

modified ALOM score: −0.74
*** Reasoning Step: 3
----- Final Results -----
bacterial cytoplasm --- Certainty = 0.2488 (Affirmative) < succ>
bacterial membrane --- Certainty = 0.0000 (Not Clear) < succ>
bacterial outside --- Certainty = 0.0000 (Not Clear) < succ>

[7999] The protein has homology with the following sequences in the databases:

[chemical structure]

[8000] SEQ ID 8816 (GBS127) was expressed in E. coli as a His-fusion product. SDS-PAGE analysis of total cell extract is shown in FIG. 29 (lane 10; MW 55.9 kDa).

[8001] GBS127-His was purified as shown in FIG. 200, lane 9.

[8002] Based on this analysis, it was predicted that these proteins and their epitopes could be useful antigens for vaccines or diagnostics.

### EXAMPLE 1454

[8003] A DNA sequence (GBSx1540) was identified in S. agalactiae <SEQ ID 4465> which encodes the amino acid sequence <SEQ ID 4466>. Analysis of this protein sequence reveals the following:

| Possible site: 17 | | | | |
|---|---|---|---|---|
| >>> Seems to have no N-terminal signal sequence | | | | |
| | INTEGRAL | Likelihood = −0.37 | Transmembrane | 427-443 (427-443) |

```
----- Final Results -----
                              bacterial membrane --- Certainty = 0.1150(Affirmative) < succ>
                                bacterial outside --- Certainty = 0.0000(Not Clear) < succ>
                            bacterial cytoplasm --- Certainty = 0.0000(Not Clear) < succ>
```

[8004] The protein has homology with the following sequences in the GENPEPT database.

| >GP: BAA78049 GB: AB027569 phosphoenolpyruvate-protein | | | |
|---|---|---|---|
| phosphotransferase [Streptococcus bovis] | | | |
| Identities = 534/577 (92%), Positives = 559/577 (96%) | | | |
| Query: | 1 | MTEMLKGIAASDGVAVAKAYLLVQPDLSFETVTVEDTNAEEARLDVALQASQDELSVIRE | 60 |
| | | MTEMLKGIAASDGVAVAKAYLLVQPDLSFETVTVEDT+AEEARLD AL+ASQDELS+IRE | |
| Sbjct: | 1 | MTEMLKGIAASDGVAVAKAYLLVQPDLSFETVTVEDTSAEEARLDAALKASQDELSIIRE | 60 |
| Query: | 61 | KAVESLGEEAAAVFDAHLMVLSDPEMINQIKETIRAKQVNAETGLKEVTDMFITIFEGME | 120 |
| | | KAVE+LGEEAAAVFDAHLMVL+DPEMI+QIKETIRAKQ NAE GLKEVTDMFITIFEGME | |
| Sbjct: | 61 | KAVETLGEEAAAVFDAHLMVLADPEMISQIKETIRAKQTNAEAGLKEVTDMFITIFEGME | 120 |
| Query: | 121 | DNPYMQERAADIRDVAKRVLAHLLGVKLPNPATINEESIVIAHDLTPSDTAQLNKQFVKA | 180 |
| | | DNPYMQERAADIRDVAKRVLAHLLG KLPNPATI+EESIVIAHDLTPSDTAQLNKQFVKA | |
| Sbjct: | 121 | DNPYMQERAADIRDVAKRVLAHLLGAKLPNPATIDEESIVIAHDLTPSDTAQLNKQFVKA | 180 |
| Query: | 181 | FVTNIGGRTSHSAIMARTLEIAAVLGTNDITERVQDGQLIAVNGITGEVIIEPTEAQISA | 240 |
| | | FVTNIGGRTSHSAIMARTLEIAAVLGTNDIT RV+DG ++AVNGITGEVII PT+ Q++ | |
| Sbjct: | 181 | FVTNIGGRTSHSAIMARTLEIAAVLGTNDITSRVKDGDIVAVNGITGEVIINPTDEQVAE | 240 |
| Query: | 241 | FKAAGEAYAKQKAEWALLKDAQTVTADGKHFELAANIGTPKDVEGVNENGAEAVGLYRTE | 300 |
| | | FKAAGEAYAKQKAEWALLKDA+TVTADGKHFELAANIGTPKDVEGVN NGAEAVGLYRTE | |
| Sbjct: | 241 | FKAAGEAYAKQKAEWALLKDAKTVTADGKHFELAANIGTPKDVEGVNANGAEAVGLYRTE | 300 |
| Query: | 301 | FLYMDSQDFPTEDEQYEAYKAVLEGMNGKPVVVRTMDIGGDKELPYFDLPKEMNPFLGFR | 360 |
| | | FLYMDSQDFPTEDEQYEAYKAVLEGMNGKPVVVRTMDIGGDKELPY DLPKEMNPFLGFR | |
| Sbjct: | 301 | FLYMDSQDFPTEDEQYEAYKAVLEGMNGKPVVVRTMDIGGDKELPYLDLPKEMNPFLGFR | 360 |
| Query: | 361 | ALRISISETGDAMFRTQIRALLRASVHGQLRIMFPMVALLKEFRAAKAIFEEEKANLLAD | 420 |
| | | ALRISISETG+AMFRTQIRALLRASVHGQLRIMFPMVALLKEFRAAKAIF+EEKANL A+ | |
| Sbjct: | 361 | ALRISISETGNAMFRTQIRALLRASVHGQLRIMFPMVALLKEFRAAKAIFDEEKANLKAE | 420 |
| Query: | 421 | GVAVAEGIEVGIMIEIPAAAMLADQFAKEVDFFSIGTNDLIQYTMAADRMNEQVSYLYQP | 480 |
| | | GVAV++ I+VGIMIEIPAAAMLADQFAKEVDFFSIGTNDLIQYTMAADRMNEQVSYLYQP | |
| Sbjct: | 421 | GVAVSDDIQVGIMIEIPAAAMLADQFAKEVDFFSIGTNDLIQYTMAADRMNEQVSYLYQP | 480 |
| Query: | 481 | YNPSILRLINNVIKAAHAEGKWAGMCGEMAGDQTAVPLLVGMGLDEFSMSATSVLRTRSL | 540 |
| | | YNPSILRLINNVIKAAHAEGKW GMCGEMAGDQ AVPLLV MGLDEFSMSATS+LRTRSL | |
| Sbjct: | 481 | YNPSILRLINNVIKAAHAEGKWVGMCGEMAGDQKAVPLLVEMGLDEFSMSATSILRTRSL | 540 |
| Query: | 541 | MKKLDTAKMEEYANRALSECSTMEEVIELQKEYVDFD | 577 |
| | | MKKLDTAKM+EYANRAL+ECSTMEEV+EL KEYV+ D | |
| Sbjct: | 541 | MKKLDTAKMQEYANRALTECSTMEEVLELSKEYVNVD | 577 |

[8005] A related DNA sequence was identified in S. pyogenes <SEQ ID 4467> which encodes the amino acid sequence <SEQ ID 4468>. Analysis of this protein sequence reveals the following:

```
Possible site: 39
>>> Seems to have no N-terminal signal sequence
----- Final Results -----
                            bacterial cytoplasm --- Certainty = 0.0875(Affirmative) < succ>
                              bacterial membrane --- Certainty = 0.0000(Not Clear) < succ>
                                bacterial outside --- Certainty = 0.0000(Not Clear) < succ>
```

[8006] An alignment of the GAS and GBS proteins is shown below.

| Identities = 540/577 (93%), Positives = 561/577 (96%) | | | |
|---|---|---|---|
| Query: | 1 | MTEMLKGIAASDGVAVAKAYLLVQPDLSFETVTVEDTNAEEARLDVALQASQDELSVIRE | 60 |
| | | MTEMLKGIAASDGVAVAKAYLLVQPDLSFETVTV DTNAEEARLDVALQA+QDELSVIRE | |
| Sbjct: | 1 | MTEMLKGIAASDGVAVAKAYLLVQPDLSFETVTVADTNAEEARLDVALQAAQDELSVIRE | 60 |
| Query: | 61 | KAVESLGEEAAAVFDAHLMVLSDPEMINQIKETIRAKQVNAETGLKEVTDMFITIFEGME | 120 |
| | | AVESLGEEAAAVFDAHLMVL+DPEMI+Q+KETIRAKQ NAETGLKEVTDMFITIFEGME | |
| Sbjct: | 61 | NAVESLGEEAAAVFDAHLMVLADPEMISQVKETIRAKQTNAETGLKEVTDMFITIFEGME | 120 |
| Query: | 121 | DNPYMQERAADIRDVAKRVLAHLLGVKLPNPATINEESIVIAHDLTPSDTAQLNKQFVKA | 180 |
| | | DNPYMQERAADIRDVAKRVLAHLLGVKLPNPATINEESIVIAHDLTPSDTAQLNKQFVKA | |
| Sbjct: | 121 | DNPYMQERAADIRDVAKRVLAHLLGVKLPNPATINEESIVIAHDLTPSDTAQLNKQFVKA | 180 |
| Query: | 181 | FVTNIGGRTSHSAIMARTLEIAAVLGTNDITERVQDGQLIAVNGITGEVIIEPTEAQISA | 240 |
| | | FVTNIGGRTSHSAIMARTLEIAAVLGTNDIT+RV+DG +IAVNGITGEVII+P+E Q+ A | |
| Sbjct: | 181 | FVTNIGGRTSHSAIMARTLEIAAVLGTNDITKRVKDGDVIAVNGITGEVIIDPSEDQVLA | 240 |
| Query: | 241 | FKAAGEAYAKQKAEWALLKDAQTVTADGKHFELAANIGTPKDVEGVNENGAEAVGLYRTE | 300 |
| | | FK AG AYAKQKAEW+LLKDA T TADGKHFELAANIGTPKDVEGVN+NGAEAVGLYRTE | |
| Sbjct: | 241 | FKEAGAAYAKQKAEWSLLKDAHTETADGKHFELAANIGTPKDVEGVNDNGAEAVGLYRTE | 300 |
| Query: | 301 | FLYMDSQDFPTEDEQYEAYKAVLEGMNGKPVVVRTMDIGGDKELPYFDLPKEMNPFLGFR | 360 |
| | | FLYMDSQDFPTEDEQYEAYKAVLEGMNGKPVVVRTMDIGGDKELPYFDLPKEMNPFLGFR | |
| Sbjct: | 301 | FLYMDSQDFPTEDEQYEAYKAVLEGMNGKPVVVRTMDIGGDKELPYFDLPKEMNPFLGFR | 360 |
| Query: | 361 | ALRISISETGDAMFRTQIRALLRASVHGQLRIMFPMVALLKEFRAAKAIFEEEKANLLAD | 420 |
| | | ALRISISETGDAMFRTQ+RALLRASVHGQLRIMFPMVALLKEFRAAKA+F+EEKANLLA+ | |
| Sbjct: | 361 | ALRISISETGDAMFRTQMRALLRASVHGQLRIMFPMVALLKEFRAAKAVFDEEKANLLAE | 420 |
| Query: | 421 | GVAVAEGIEVGIMIEIPAAAMLADQFAKEVDFFSIGTNDLIQYTMAADRMNEQVSYLYQP | 480 |
| | | GVAVA+ I+VGIMIEIPAAAMLADQFAKEVDFFSIGTNDLIQYTMAADRMNEQVSYLYQP | |
| Sbjct: | 421 | GVAVADDIQVGIMIEIPAAAMLADQFAKEVDFFSIGTNDLIQYTMAADRMNEQVSYLYQP | 480 |
| Query: | 481 | YNPSILRLINNVIKAAHAEGKWAGMCGEMAGDQTAVPLLVGMGLDEFSMSATSVLRTRSL | 540 |
| | | YNPSILRLINNVIKAAHAEGKWAGMCGEMAGDQ AVPLLVGMGLDEFSMSATSVLRTRSL | |
| Sbjct: | 481 | YNPSILRLINNVIKAAHAEGKWAGMCGEMAGDQQAVPLLVGMGLDEFSMSATSVLRTRSL | 540 |
| Query: | 541 | MKKLDTAKMEEYANRALSECSTMEEVIELQKEYVDFD | 577 |
| | | MKKLD+AKMEEYANRAL+ECST EEV+EL KEYV D | |
| Sbjct: | 541 | MKKLDSAKMEEYANRALTECSTAEEVLELSKEYVSED | 577 |

[8007] Based on this analysis, it was predicted that these proteins and their epitopes could be useful antigens for vaccines or diagnostics.

### EXAMPLE 1455

[8008] A DNA sequence (GBSx1541) was identified in S. agalactiae <SEQ ID 4469> which encodes the amino acid sequence <SEQ ID 4470>. Analysis of this protein sequence reveals the following:

```
Possible site: 30
>>> Seems to have no N-terminal signal sequence
----- Final Results -----
                            bacterial cytoplasm --- Certainty = 0.1421(Affirmative) < succ>
                              bacterial membrane --- Certainty = 0.0000(Not Clear) < succ>
                                bacterial outside --- Certainty = 0.0000(Not Clear) < succ>
```

[8009] The protein is similar to a protein from S. bovis:

| >GP: BAA78048 GB: AB027569 histidine containing protein | | | |
|---|---|---|---|
| [Streptococcus bovis] | | | |
| Identities = 86/87 (98%), Positives = 87/87 (99%) | | | |
| Query: | 1 | MASKDFHIVAETGIHARPATLLVQTASKFASDITLDYKGKAVNLKSIMGVMSLGVGQGAD | 60 |
| | | MASKDFHIVAETGIHARPATLLVQTASKFASDITLDYKGKAVNLKSIMGVMSLGVGQGAD | |
| Sbjct: | 1 | MASKDFHIVAETGIHARPATLLVQTASKFASDITLDYKGKAVNLKSIMGVMSLGVGQGAD | 60 |
| Query: | 61 | VTISAEGADADDAIAAIEETMTKEGLA | 87 |
| | | VTISAEGADADDA+AAIEETMTKEGLA | |
| Sbjct: | 61 | VTISAEGADADDALAAIEETMTKEGLA | 87 |

[8010] A related DNA sequence was identified in S. pyogenes <SEQ ID 4471> which encodes the amino acid sequence <SEQ ID 4472>. Analysis of this protein sequence reveals the following:

```
Possible site: 30
>>> Seems to have no N-terminal signal sequence
----- Final Results -----
                            bacterial cytoplasm --- Certainty = 0.1421(Affirmative) < succ>
                              bacterial membrane --- Certainty = 0.0000(Not Clear) < succ>
                                bacterial outside --- Certainty = 0.0000(Not Clear) < succ>
```

[8011] An alignment of the GAS and GBS proteins is shown below.

| Identities = 86/87 (98%), Positives = 87/87 (99%) | | | |
|---|---|---|---|
| Query: | 1 | MASKDFHIVAETGIHARPATLLVQTASKFASDITLDYKGKAVNLKSIMGVMSLGVGQGAD | 60 |
| | | MASKDFHIVAETGIHARPATLLVQTASKFASDITLDYKGKAVNLKSIMGVMSLGVGQGAD | |
| Sbjct: | 1 | MASKDFHIVAETGIHARPATLLVQTASKFASDITLDYKGKAVNLKSIMGVMSLGVGQGAD | 60 |
| Query: | 61 | VTISAEGADADDAIAAIEETMTKEGLA | 87 |
| | | VTISAEGADA+DAIAAIEETMTKEGLA | |
| Sbjct: | 61 | VTISAEGADAEDAIAAIEETMTKEGLA | 87 |

[8012] Based on this analysis, it was predicted that these proteins and their epitopes could be useful antigens for vaccines or diagnostics.

### EXAMPLE 1456

[8013] A DNA sequence (GBSx1542) was identified in S. agalactiae <SEQ ID 4473> which encodes the amino acid sequence <SEQ ID 4474>. This protein is predicted to be glutaredoxin-like protein nrdh (b2673). Analysis of this protein sequence reveals the following:

```
Possible site: 56
>>> Seems to have no N-terminal signal sequence
----- Final Results -----
                            bacterial cytoplasm --- Certainty = 0.4532(Affirmative) < succ>
                              bacterial membrane --- Certainty = 0.0000(Not Clear) < succ>
                                bacterial outside --- Certainty = 0.0000(Not Clear) < succ>
```

[8014] The protein has homology with the following sequences in the GENPEPT database.

| >GP: CAA63372 GB: X92690 glutaredoxin-like protein [Lactococcus | | | |
|---|---|---|---|
| lactis] | | | |
| Identities = 42/70 (60%), Positives = 53/70 (75%) | | | |
| Query: | 4 | ITVFSKNNCMQCKMTKKFLDQHGADFEEINIDEKPEKIEYVKNLGFSAAPVIEAGNVVFS | 63 |
| | | +TV+SKNNCMQCKM KK+L +H F EINIDE+PE +E V +GF AAPVI + FS | |
| Sbjct: | 2 | VTVYSKNNCMQCKMVKKWLSEHEIAFNEINIDEQPEFVEKVIEMGFRAAPVITKDDFAFS | 61 |
| Query: | 64 | GFQPSKLKEL | 73 |
| | | GF+PS+L +L | |
| Sbjct: | 62 | GFRPSELAKL | 71 |

[8015] A related DNA sequence was identified in S. pyogenes <SEQ ID 4475> which encodes the amino acid sequence <SEQ ID 4476>. Analysis of this protein sequence reveals the following:

```
Possible site: 17
>>> Seems to have no N-terminal signal sequence
----- Final Results -----
                            bacterial cytoplasm --- Certainty = 0.4606(Affirmative) < succ>
                              bacterial membrane --- Certainty = 0.0000(Not Clear) < succ>
                                bacterial outside --- Certainty = 0.0000(Not Clear) < succ>
```

[8016] An alignment of the GAS and GBS proteins is shown below.

| Identities = 56/71 (78%), Positives = 68/71 (94%) | | | |
|---|---|---|---|
| Query: | 4 | ITVFSKNNCMQCKMTKKFLDQHGADFEEINIDEKPEKIEYVKNLGFSAAPVIEAGNVVFS | 63 |
| | | ITV+SKNNCMQCKMTKKFL+QHG +F+EINIDE PEK++YVK+LGF++APVIEA N+VFS | |
| Sbjct: | 13 | ITVYSKNNCMQCKMTKKFLEQHGVNFQEINIDEHPEKVDYVKSLGFTSAPVIEADNLVFS | 72 |
| Query: | 64 | GFQPSKLKELV | 74 |
| | | GFQP+KLKEL+ | |
| Sbjct: | 73 | GFQPAKLKELI | 83 |

[8017] Based on this analysis, it was predicted that these proteins and their epitopes could be useful antigens for vaccines or diagnostics.

### EXAMPLE 1457

[8018] A DNA sequence (GBSx1543) was identified in S. agalactiae <SEQ ID 4477> which encodes the amino acid sequence <SEQ ID 4478>. This protein is predicted to be ribonucleotide reductase subunit R1E (nrdE). Analysis of this protein sequence reveals the following:

```
Possible site: 49
>>> Seems to have no N-terminal signal sequence
----- Final Results -----
                            bacterial cytoplasm --- Certainty = 0.3676(Affirmative) < succ>
                              bacterial membrane --- Certainty = 0.0000(Not Clear) < succ>
                                bacterial outside --- Certainty = 0.0000(Not Clear) < succ>
```

[8019] The protein has homology with the following sequences in the GENPEPT database.

| >GP: AAD41036 GB: AF112535 ribonucleotide reductase alpha-chain | | | |
|---|---|---|---|
| [Corynebacterium glutamicum] | | | |
| Identities = 366/701 (52%), Positives = 488/701 (69%), Gaps = 19/701 (2%) | | | |
| Query: | 23 | NGQIPLHKDKEALTAFFKENVQPNSKAFDSITDKIAYLLKYDYLEEAFLNKYRPEFIEEL | 82 |
| | | NG+I KD+EA +F ++V N+ F ++ +KI YL++ Y + L+KY +FI++L | |
| Sbjct: | 22 | NGKIQFEKDREAANQYFLQHVNQNTVFFHNLQEKIDYLVENKYYDPIVLDKYDFQFIKDL | 81 |
| Query: | 83 | STKLFDKKFRFKSFMAAYKFYQQYALKTNDGEYYLESIEDRVLFNALYFADGDEELATDL | 142 |
| | | + + KFRF+SF+ AYK+Y Y LKT DG YLE EDRV AL ADGD LA +L | |
| Sbjct: | 82 | FKRAYGFKFRFQSFLGAYKYYTSYTLKTFDGRRYLERFEDRVCMVALTLADGDRALAENL | 141 |
| Query: | 143 | ALEMISQRYQPATPSFLNAGRSRRGELVSCFLIQVTDDMNAIGRSINSALQLSRIGGGVG | 202 |
| | | E++S R+QPATP+FLN+G+++RGE VSCFL+++ D+M +IGRSINSALQLS+ GGGV | |
| Sbjct: | 142 | VDEIMSGRFQPATPTFLNSGKAQRGEPVSCFLLRIEDNMESIGRSINSALQLSKRGGGVA | 201 |
| Query: | 203 | ISLSNLREAGAPIKGFAGAASGVVPVMKLFEDSFSYSNQLGQRQGAGVVYLDVFHPDIIS | 262 |
| | | + LSNLREAGAPIK +SGV+PVMKL ED+FSY+NQLG RQGAG VYL+ HPDI+S | |
| Sbjct: | 202 | LLLSNLREAGAPIKKIENQSSGVIPVMKLLEDAFSYANQLGARQGAGAVYLNAHHPDILS | 261 |
| Query: | 263 | FLSTKKENADEKVRVKTLSLGITVPDKFYELARNNQEMYLFSPYSIEREYGVPFSYIDIT | 322 |
| | | FL TK+ENADEK+R+KTLSLG+ +PD +ELA+ N +MYLFSPY +ER YG PF+ + IT | |
| Sbjct: | 262 | FLDTKRENADEKIRIKTLSLGVVIPDITFELAKRNDDMYLFSPYDVERIYGKPFADVSIT | 321 |
| Query: | 323 | EKYDELVANPNITKTKINARDLETEISKLQQESGYPYIINIDTANRTNPVDGKIIMSNLC | 382 |
| | | E YDE+V + I KTKINAR ++++Q ESGYPYI+ DT N +NP++G+I SNLC | |
| Sbjct: | 322 | EHYDEMVDDDRIRKTKINARQFFQTLAEIQFESGYPYIMYEDTVNASNPIEGRITHSNLC | 381 |
| Query: | 383 | SEILQVQKPSLINDAQEYLEMGTDISCNLGSTNVLNMMTSPDFGKSIKTMTRALTFVTDS | 442 |
| | | SEILQV PS ND Y E+G DISCNLGS NV M SP+F K+I+T R LT V++ | |
| Sbjct: | 382 | SEILQVSTPSEFNDDLTYAEVGEDISCNLGSLNVAMAMDSPNFEKTIETAIRGLTAVSEQ | 441 |
| Query: | 443 | SNIEAVPTIKNGNAQAHTFGLGAMGLHSYLAKNHIEYGSPESIEFTDIYFMLMNYWTLVE | 502 |
| | | ++I++VP+I+ GN AH GLG M LH Y + H+ YGS E+++FT+ YF + Y L | |
| Sbjct: | 442 | TSIDSVPSIRKGNEAAHAIGLGQMNLHGYFGREHMHYGSEEALDFTNAYFAAVLYQCLRA | 501 |
| Query: | 503 | SNNIARERQTTFVGFEKSKYADGTYFDKYVSGKFVPQSDKVKSLFA--NHFIPEAKDWEN | 560 |
| | | SN IA ER F FE SKYA G YFD + + F P+SDKVK LFA N P +DW | |
| Sbjct: | 502 | SNKIATERGERFKNFENSKYATGEYFDDFDANDFAPKSDKVKELFAKSNIHTPTVEDWAA | 561 |
| Query: | 561 | LRYAVMKDGLYHQNRLAVAPNGSISYINDCSASIHPITQRIEERQEKKIGKIYYPANGLA | 620 |
| | | L+ VM+ GL+++N AV P GSISYIN+ ++SIHPI +IE R+E KIG++YYPA + | |
| Sbjct: | 562 | LKADVMEHGLFNRNLQAVPPTGSISYINNSTSSIHPIASKIEIRKEGKIGRVYYPAPHMD | 621 |
| Query: | 621 | TDTIPYYTSAYDMDMRKVIDVYAAATEHVDQGLSMTLFLRSELPKELYEWKTESKQTTRD | 680 |
| | | D + Y+ AY++ K+ID YA AT++VDQGLS+TLF + TTRD | |
| Sbjct: | 622 | NDNLEYFEDAYEIGYEKIIDTYAVATKYVDQGLSLTLFFK-------------DTATTRD | 668 |
| Query: | 681 | LSILRNYAFNKGVKSIYYI--RTFTDDGSEVGANQCESCVI | 719 |
| | | ++ + YA+ KG+K++YYI R +G+EV + C SC++ | |
| Sbjct: | 669 | INRAQIYAWRKGIKTLYYIRLRQVALEGTEV--DGCVSCML | 707 |

[8020] A related DNA sequence was identified in S. pyogenes <SEQ ID 4479> which encodes the amino acid sequence <SEQ ID 4480>. Analysis of this protein sequence reveals the following:

```
Possible site: 39
>>> Seems to have no N-terminal signal sequence
----- Final Results -----
                            bacterial cytoplasm --- Certainty = 0.4241(Affirmative) < succ>
                              bacterial membrane --- Certainty = 0.0000(Not Clear) < succ>
                                bacterial outside --- Certainty = 0.0000(Not Clear) < succ>
```

[8021] An alignment of the GAS and GBS proteins is shown below.

| Identities = 628/719 (87%), Positives = 682/719 (94%) | | | |
|---|---|---|---|
| Query: | 1 | MSLKNIGDVSYFRLNNEINRPVNGQIPLHKDKEALTAFFKENVQPNSKAFDSITDKIAYL | 60 |
| | | MSLK++GD+SYFRLNNEINRPVNG+IPLHKDKEAL AF ENV PN+ +F SIT+KI YL | |
| Sbjct: | 1 | MSLKDLGDISYFRLNNEINRPVNGKIPLHKDKEALKAFSAENVLPNTMSFTSITEKIEYL | 60 |
| Query: | 61 | LKYDYLEEAFLNKYRPEFIEELSTKLFDKKFRFKSFMAAYKFYQQYALKTNDGEYYLESI | 120 |
| | | + DY+E AF+ KYRPEFI EL + + + FRFKSFMAAYKFYQQYALKTNDGE+YLE++ | |
| Sbjct: | 61 | ISNDYIESAFIQKYRPEFITELDSIIKSENFRFKSFMAAYKFYQQYALKTNDGEHYLENL | 120 |
| Query: | 121 | EDRVLFNALYFADGDEELATDLALEMISQRYQPATPSFLNAGRSRRGELVSCFLIQVTDD | 180 |
| | | EDRVLFNALYFADG E+LA DLA+EMI+QRYQPATPSFLNAGRSRRGELVSCFLIQVTDD | |
| Sbjct: | 121 | EDRVLFNALYFADGQEDLAKDLAVEMINQRYQPATPSFLNAGRSRRGELVSCFLIQVTDD | 180 |
| Query: | 181 | MNAIGRSINSALQLSRIGGGVGISLSNLREAGAPIKGFAGAASGVVPVMKLFEDSFSYSN | 240 |
| | | MN+IGRSINSALQLSRIGGGVGI+LSNLREAGAPIKG+AGAASGVVPVMKLFEDSFSYSN | |
| Sbjct: | 181 | MNSIGRSINSALQLSRIGGGVGITLSNLREAGAPIKGYAGAASGVVPVMKLFEDSFSYSN | 240 |
| Query: | 241 | QLGQRQGAGVVYLDVFHPDIISFLSTKKENADEKVRVKTLSLGITVPDKFYELARNNQEM | 300 |
| | | QLGQRQGAGVVYL+VFHPDII+FLSTKKENADEKVRVKTLSLGITVPDKFYELAR N++M | |
| Sbjct: | 241 | QLGQRQGAGVVYLNVFHPDIIAFLSTKKENADEKVRVKTLSLGITVPDKFYELARKNEDM | 300 |
| Query: | 301 | YLFSPYSIEREYGVPFSYIDITEKYDELVANPNITKTKINARDLETEISKLQQESGYPYI | 360 |
| | | YLFSPY++E+EYG+PF+Y+DIT YDELVANP ITKTKI ARDLETEISKLQQESGYPYI | |
| Sbjct: | 301 | YLFSPYNVEKEYGIPFNYLDITNMYDELVANPKITKTKIKARDLETEISKLQQESGYPYI | 360 |
| Query: | 361 | INIDTANRTNPVDGKIIMSNLCSEILQVQKPSLINDAQEYLEMGTDISCNLGSTNVLNMM | 420 |
| | | INIDTAN+ NP+DGKIIMSNLCSEILQVQ PSLINDAQE++EMGTDISCNLGSTN+LNMM | |
| Sbjct: | 361 | INIDTANKANPIDGKIIMSNLCSEILQVQTPSLINDAQEFVEMGTDISCNLGSTNILNMM | 420 |
| Query: | 421 | TSPDFGKSIKTMTRALTFVTDSSNIEAVPTIKNGNAQAHTFGLGAMGLHSYLAKNHIEYG | 480 |
| | | TSPDFG+SIKTMTRALTFVTDSS+IEAVPTIK+GN+QAHTFGLGAMGLHSYLA++HIEYG | |
| Sbjct: | 421 | TSPDFGRSIKTMTRALTFVTDSSSIEAVPTIKHGNSQAHTFGLGAMGLHSYLAQHHIEYG | 480 |
| Query: | 481 | SPESIEFTDIYFMLMNYWTLVESNNIARERQTTFVGFEKSKYADGTYFDKYVSGKFVPQS | 540 |
| | | SPESIEFTDIYFML+NYWTLVESNNIARERQTTFVGFE SKYA+G+YFDKYV+G FVP+S | |
| Sbjct: | 481 | SPESIEFTDIYFMLLNYWTLVESNNIARERQTTFVGFENSKYANGSYFDKYVTGHFVPKS | 540 |
| Query: | 541 | DKVKSLFANHFIPEAKDWENLRYAVMKDGLYHQNRLAVAPNGSISYINDCSASIHPITQR | 600 |
| | | D VK LF +HFIP+A DWE LR AV KDGLYHQNRLAVAPNGSISYINDCSASIHPITQR | |
| Sbjct: | 541 | DLVKDLFKDHFIPQASDWEALRDAVQKDGLYHQNRLAVAPNGSISYINDCSASIHPITQR | 600 |
| Query: | 601 | IEERQEKKIGKIYYPANGLATDTIPYYTSAYDMDMRKVIDVYAAATEHVDQGLSMTLFLR | 660 |
| | | IEERQEKKIGKIYYPANGL+TDTIPYYTSAYDMDMRKVIDVYAAATEHVDQGLS+TLFLR | |
| Sbjct: | 601 | IEERQEKKIGKIYYPANGLSTDTIPYYTSAYDMDMRKVIDVYAAATEHVDQGLSLTLFLR | 660 |
| Query: | 661 | SELPKELYEWKTESKQTTRDLSILRNYAFNKGVKSIYYIRTFTDDGSEVGANQCESCVI | 719 |
| | | SELP ELYEWKT+SKQTTRDLSILRNYAFNKG+KSIYYIRTFTDDG EVGANQCESCVI | |
| Sbjct: | 661 | SELPMELYEWKTQSKQTTRDLSILRNYAFNKGIKSIYYIRTFTDDGEEVGANQCESCVI | 719 |

[8022] Based on this analysis, it was predicted that these proteins and their epitopes could be useful antigens for vaccines or diagnostics.

### EXAMPLE 1458

[8023] A DNA sequence (GBSx1544) was identified in S. agalactiae <SEQ ID 4481> which encodes the amino acid sequence <SEQ ID 4482>. This protein is predicted to be ribonucleotide reductase subunit R2F (nrdB). Analysis of this protein sequence reveals the following:

```
Possible site: 44
>>> Seems to have no N-terminal signal sequence
----- Final Results -----
                            bacterial cytoplasm --- Certainty = 0.4583(Affirmative) < succ>
                              bacterial membrane --- Certainty = 0.0000(Not Clear) < succ>
                                bacterial outside --- Certainty = 0.0000(Not Clear) < succ>
```

[8024] A related GBS nucleic acid sequence <SEQ ID 9753> which encodes amino acid sequence <SEQ ID 9754> was also identified.

[8025] The protein has homology with the following sequences in the GENPEPT database.

>GP: AAC14561 GB: AF050168 ribonucleoside diphosphate reductase small
subunit [Corynebacterium ammoniagenes]
Identities = 166/313 (53%), Positives = 215/313 (68%), Gaps = 1/313 (0%)

| | | | |
|---|---|---|---|
| Query: | 10 | EAINWNEIEDVIDKSTWEKLTEQFWLDTRIPLSNDLDDWRKLSAQEKDLVGKVFGGLTLL | 69 |
| | | +AINWN I D D W++LT FWL +IP+SND+ W K++ QE+ +VF GLTLL | |
| Sbjct: | 17 | KAINWNVIPDEKDLEVWDRLTGNFWLPEKIPVSNDIQSWNKMTPQEQLATMRVFTGLTLL | 76 |
| Query: | 70 | DTMQSETGVEAIRADVRTPHEEAVLNNIQFMESVHAKSYSSIFSTLNTKSEIEEIFEWTN | 129 |
| | | DT+Q G ++ DV T HEE V NI FMESVHAKSYS+IF TL + +I E F W+ | |
| Sbjct: | 77 | DTIQGTVGAISLLPDVETMHEEGVYTNIAFMESVHAKSYSNIFMTLASTPQINEAFRWSE | 136 |
| Query: | 130 | NNEFLQEKARIINDIYANGNALQKKVASTYLETFLFYSGFFTPLYYLGNNKLANVAEIIK | 189 |
| | | NE LQ KA+II Y + L+KKVAST LE+FLFYSGF+ P+Y KL N A+II+ | |
| Sbjct: | 137 | ENENLQRKAKIIMSYYNGDDPLKKKVASTLLESFLFYSGFYLPMYLSSRAKLTNTADIIR | 196 |
| Query: | 190 | LIIRDESVHGTYIGYKFQLGFNELPEDEQENFRDWMYDLLYQLYENEEKYTKTLYDGVGW | 249 |
| | | LIIRDESVHG YIGYK+Q G +L E EQE ++ + +DL+Y LYENE +YT+ +YD +GW | |
| Sbjct: | 197 | LIIRDESVHGYYIGYKYQQGVKKLSEAEQEEYKAYTFDLMYDLYENEIEYTEDIYDDLGW | 256 |
| Query: | 250 | TEEVMTFLRYNANKALMNLGQDPLFPDTANDVNPIVMNGIS-TGTSNHDFFSQVGNGYLL | 308 |
| | | TE+V FLRYNANKAL NLG + LFP V+P +++ +S NHDFFS G+ Y++ | |
| Sbjct: | 257 | TEDVKRFLRYNANKALNNLGYEGLFPTDETKVSPAILSSLSPNADENHDFFSGSGSSYVI | 316 |
| Query: | 309 | GSVEAMHDDDYNY | 321 |
| | | G E DDD+++ | |
| Sbjct: | 317 | GKAEDTTDDDWDF | 329 |

[8026] A related DNA sequence was identified in S. pyogenes <SEQ ID 4483> which encodes the amino acid sequence <SEQ ID 4484>. Analysis of this protein sequence reveals the following:

```
Possible site: 40
>>> Seems to have no N-terminal signal sequence
----- Final Results -----
                            bacterial cytoplasm --- Certainty = 0.4583(Affirmative) < succ>
                              bacterial membrane --- Certainty = 0.0000(Not Clear) < succ>
                                bacterial outside --- Certainty = 0.0000(Not Clear) < succ>
```

[8027] An alignment of the GAS and GBS proteins is shown below.

| Identities = 315/319 (98%), Positives = 316/319 (98%) | | | |
|---|---|---|---|
| Query: | 5 | MTTYYEAINWNEIEDVIDKSTWEKLTEQFWLDTRIPLSNDLDDWRKLSAQEKDLVGKVFG | 64 |
| | | MTTYYEAINWNEIEDVIDKSTWEKLTEQFWLDTRIPLSNDLDDWRKLS QEKDLVGKVFG | |
| Sbjct: | 1 | MTTYYEAINWNEIEDVIDKSTWEKLTEQFWLDTRIPLSNDLDDWRKLSLQEKDLVGKVFG | 60 |
| Query: | 65 | GLTLLDTMQSETGVEAIRADVRTPHEEAVLNNIQFMESVHAKSYSSIFSTLNTKSEIEEI | 124 |
| | | GLTLLDTMQSETGVEAIRADVRTPHEEAVLNNIQFMESVHAKSYSSIFSTLNTK EIEEI | |
| Sbjct: | 61 | GLTLLDTMQSETGVEAIRADVRTPHEEAVLNNIQFMESVHAKSYSSIFSTLNTKKEIEEI | 120 |
| Query: | 125 | FEWTNNNEFLQEKARIINDIYANGNALQKKVASTYLETFLFYSGFFTPLYYLGNNKLANV | 184 |
| | | FEWTNNNEFLQEKARIINDIYANG+ALQKKVASTYLETFLFYSGFFTPLYYLGNNKLANV | |
| Sbjct: | 121 | FEWTNNNEFLQEKARIINDIYANGDALQKKVASTYLETFLFYSGFFTPLYYLGNNKLANV | 180 |
| Query: | 185 | AEIIKLIIRDESVHGTYIGYKFQLGFNELPEDEQENFRDWMYDLLYQLYENEEKYTKTLY | 244 |
| | | AEIIKLIIRDESVHGTYIGYKFQLGFNELPEDEQENFRDWMYDLLYQLYENEEKYTKTLY | |
| Sbjct: | 181 | AEIIKLIIRDESVHGTYIGYKFQLGFNELPEDEQENFRDWMYDLLYQLYENEEKYTKTLY | 240 |
| Query: | 245 | DGVGWTEEVMTFLRYNANKALMNLGQDPLFPDTANDVNPIVMNGISTGTSNHDFFSQVGN | 304 |
| | | DGVGWTEEVMTFLRYNANKALMNLGQDPLFPDTANDVNPIVMNGISTGTSNHDFFSQVGN | |
| Sbjct: | 241 | DGVGWTEEVMTFLRYNANKALMNLGQDPLFPDTANDVNPIVMNGISTGTSNHDFFSQVGN | 300 |
| Query: | 305 | GYLLGSVEAMHDDDYNYGL | 323 |
| | | GYLLGSVEAM DDDYNYGL | |
| Sbjct: | 301 | GYLLGSVEAMSDDDYNYGL | 319 |

[8028] Based on this analysis, it was predicted that these proteins and their epitopes could be useful antigens for vaccines or diagnostics.

### EXAMPLE 1459

[8029] A DNA sequence (GBSx1545) was identified in S. agalactiae <SEQ ID 4485> which encodes the amino acid sequence <SEQ ID 4486>. Analysis of this protein sequence reveals the following:

| Possible site: 53 | | | | |
|---|---|---|---|---|
| >>> Seems to have no N-terminal signal sequence | | | | |
| | INTEGRAL | Likelihood = −0.27 | Transmembrane | 50-66 (50-66) |

```
----- Final Results -----
                              bacterial membrane --- Certainty = 0.1107(Affirmative) < succ>
                                bacterial outside --- Certainty = 0.0000(Not Clear) < succ>
                            bacterial cytoplasm --- Certainty = 0.0000(Not Clear) < succ>
```

[8030] The protein has no significant homology with any sequences in the GENPEPT database.

[8031] No corresponding DNA sequence was identified in S. pyogenes.

[8032] Based on this analysis, it was predicted that this protein and its epitopes, could be useful antigens for vaccines or diagnostics.

### EXAMPLE 1460

[8033] A DNA sequence (GBSx1546) was identified in S. agalactiae <SEQ ID 4487> which encodes the amino acid sequence <SEQ ID 4488>. Analysis of this protein sequence reveals the following:

| Possible site: 35 | | | | |
|---|---|---|---|---|
| >>> Seems to have no N-terminal signal sequence | | | | |
| | INTEGRAL | Likelihood = −14.38 | Transmembrane | 176-192 (168-201) |
| | INTEGRAL | Likelihood = −4.57 | Transmembrane | 25-41 (22-42) |
| | INTEGRAL | Likelihood = −3.88 | Transmembrane | 94-110 (94-112) |
| | INTEGRAL | Likelihood = −1.49 | Transmembrane | 70-86 (70-86) |
| | INTEGRAL | Likelihood = −1.01 | Transmembrane | 128-144 (128-144) |

```
----- Final Results -----
                              bacterial membrane --- Certainty = 0.6753(Affirmative) < succ>
                                bacterial outside --- Certainty = 0.0000(Not Clear) < succ>
                            bacterial cytoplasm --- Certainty = 0.0000(Not Clear) < succ>
```

[8034] A related GBS nucleic acid sequence <SEQ ID 9751> which encodes amino acid sequence <SEQ ID 9752> was also identified.

[8035] The protein has homology with the following sequences in the GENPEPT database.

| >GP: CAB15077 GB: Z99119 similar to hypothetical proteins [Bacillus | | | |
|---|---|---|---|
| subtilis] | | | |
| Identities = 55/184 (29%), Positives = 98/184 (52%), Gaps = 4/184 (2%) | | | |
| Query: | 16 | MSKNNNTTCLIETAIFAALAMALSMIP----DFASWFTPSFGAIPLILFALRRGTKYGLF | 71 |
| | | M+++ LIE AI A A+ L ++ + S IP+ L + R G K GL | |
| Sbjct: | 1 | MNQSKQLVRLIEIAIMTAAAVILDIVSGMFLSMPQGGSVSIMMIPIFLISFRWGVKAGLT | 60 |
| Query: | 72 | AGLIWGLLHFVLSKVYYLSLSQVFIEYILAFISMGLAGVFSAKFKDALSSSSKTKALSLA | 131 |
| | | GL+ GL+ + ++ Q+ ++YI+AF ++G++G F++ + A S +K K + | |
| Sbjct: | 61 | TGLLTGLVQIAIGNLFAQHPVQLLLDYIVAFAAIGISGCFASSVRKAAVSKTKGKLIVSV | 120 |
| Query: | 132 | LSGAILATLVRYVWHYIAGVIFWASYAPKGMSATLYSLSVNGTAGLLTLFFVVISIIILV | 191 |
| | | +S + +L+RY H I+G +F+ S+APKG +YSL+ N T + + I + +L | |
| Sbjct: | 121 | VSAVFIGSLLRYAAHVISGAVFFGSFAPKGTPVWIYSLTYNATYMVPSFIICAIVLCLLF | 180 |
| Query: | 192 | ISYP | 195 |
| | | ++ P | |
| Sbjct: | 181 | MTAP | 184 |

[8036] A related DNA sequence was identified in S. pyogenes <SEQ ID 4489> which encodes the amino acid sequence <SEQ ID 4490>. Analysis of this protein sequence reveals the following:

| Possible site: 20 | | | | |
|---|---|---|---|---|
| >>> Seems to have a cleavable N-term signal seq. | | | | |
| | INTEGRAL | Likelihood = −9.34 | Transmembrane | 162-178 (156-183) |
| | INTEGRAL | Likelihood = −9.34 | Transmembrane | 110-126 (107-130) |
| | INTEGRAL | Likelihood = −1.22 | Transmembrane | 55-71 (55-71) |

```
----- Final Results -----
                              bacterial membrane --- Certainty = 0.4736(Affirmative) < succ>
                                bacterial outside --- Certainty = 0.0000(Not Clear) < succ>
                            bacterial cytoplasm --- Certainty = 0.0000(Not Clear) < succ>
```

[8037] The protein has homology with the following sequences in the databases:

| >GP: CAB15077 GB: Z99119 similar to hypothetical proteins | | | |
|---|---|---|---|
| [Bacillus subtilis] | | | |
| Identities = 55/189 (29%), Positives = 100/189 (52%), Gaps = 10/189 (5%) | | | |
| Query: | 1 | MSPNTNVKYLIEAAIFAALAMTLSFIPDFAGWF--SPSYGAIALV-----IFSLRRGLKY | 53 |
| | | M+ + + LIE AI A A+ L + +G F P G+++++ + S R G+K | |
| Sbjct: | 1 | MNQSKQLVRLIEIAIMTAAAVILDIV---SGMFLSMPQGGSVSIMMIPIFLISFRWGVKA | 57 |
| Query: | 54 | GMLAGLIWGLLHFVLGKVYYLSMSQVFIEYILAFTSMGLAGSFSDSLIKTLRRQQTFFAV | 113 |
| | | G+ GL+ GL+ +G ++ Q+ ++YI+AF ++G++G F+ S+ K + + | |
| Sbjct: | 58 | GLTTGLLTGLVQIAIGNLFAQHPVQLLLDYIVAFAAIGISGCFASSVRKAAVSKTKGKLI | 117 |
| Query: | 114 | FLAIMASLLAVTVRYLWHFLAGIIFWGSYAPKGMSAVWYSFSVNGTAGVLTFLITCLALM | 173 |
| | | + A + +RY H ++G +F+GS+APKG YS + N T V +F+I + L | |
| Sbjct: | 118 | VSVVSAVFIGSLLRYAAHVISGAVFFGSFAPKGTPVWIYSLTYNATYMVPSFIICAIVLC | 177 |
| Query: | 174 | IALPIHPQL | 182 |
| | | + P+L | |
| Sbjct: | 178 | LLFMTAPRL | 186 |

[8038] An alignment of the GAS and GBS proteins is shown below.

| Identities = 116/186 (62%), Positives = 138/186 (73%) | | | |
|---|---|---|---|
| Query: | 16 | MSKNNNTTCLIETAIFAALAMALSMIPDFASWFTPSFGAIPLILFALRRGTKYGLFAGLI | 75 |
| | | MS N N LIE AIFAALAM LS IPDFA WF+PS+GAI L++F+LRRG KYG+ AGLI | |
| Sbjct: | 1 | MSPNTNVKYLIEAAIFAALAMTLSFIPDFAGWFSPSYGAIALVIFSLRRGLKYGMLAGLI | 60 |
| Query: | 76 | WGLLHFVLSKVYYLSLSQVFIEYILAFISMGLAGVFSAKFKDALSSSSKTKALSLALSGA | 135 |
| | | WGLLHFVL KVYYLS+SQVFIEYILAF SMGLAG FS L A+ LA+ + | |
| Sbjct: | 61 | WGLLHFVLGKVYYLSMSQVFIEYILAFTSMGLAGSFSDSLIKTLRRQQTFFAVFLAIMAS | 120 |
| Query: | 136 | ILATLVRYVWHYIAGVIFWASYAPKGMSATLYSLSVNGTAGLLTLFFVVISIIILVISYP | 195 |
| | | +LA VRY+WH++AG+IFW SYAPKGMSA YS SVNGTAG+LT ++++I + +P | |
| Sbjct: | 121 | LLAVTVRYLWHFLAGIIFWGSYAPKGMSAVWYSFSVNGTAGVLTFLITCLALMIALPIHP | 180 |
| Query: | 196 | SFFLPK | 201 |
| | | F PK | |
| Sbjct: | 181 | QLFDPK | 186 |

[8039] Based on this analysis, it was predicted that these proteins and their epitopes could be useful antigens for vaccines or diagnostics.

### EXAMPLE 1461

[8040] A DNA sequence (GBSx1547) was identified in S. agalactiae <SEQ ID 4491> which encodes the amino acid sequence <SEQ ID 4492>. Analysis of this protein sequence reveals the following:

| Possible site: 34 | | | | |
|---|---|---|---|---|
| >>> Seems to have no N-terminal signal sequence | | | | |
| | INTEGRAL | Likelihood = −7.43 | Transmembrane | 206-222 (199-223) |
| | INTEGRAL | Likelihood = −6.64 | Transmembrane | 24-40 (19-42) |
| | INTEGRAL | Likelihood = −6.58 | Transmembrane | 61-77 (51-78) |
| | INTEGRAL | Likelihood = −6.58 | Transmembrane | 134-150 (132-154) |
| | INTEGRAL | Likelihood = −4.62 | Transmembrane | 226-242 (224-245) |
| | INTEGRAL | Likelihood = −3.72 | Transmembrane | 107-123 (106-125) |

```
----- Final Results -----
                              bacterial membrane --- Certainty = 0.3972(Affirmative) < succ>
                                bacterial outside --- Certainty = 0.0000(Not Clear) < succ>
                            bacterial cytoplasm --- Certainty = 0.0000(Not Clear) < succ>
```

[8041] A related GBS nucleic acid sequence <SEQ ID 9749> which encodes amino acid sequence <SEQ ID 9750> was also identified.

[8042] The protein has no significant homology with any sequences in the GENPEPT database.

[8043] A related DNA sequence was identified in S. pyogenes <SEQ ID 4493> which encodes the amino acid sequence <SEQ ID 4494>. Analysis of this protein sequence reveals the following:

| Possible site: 23 | | | | |
|---|---|---|---|---|
| >>> Seems to have no N-terminal signal sequence | | | | |
| | INTEGRAL | Likelihood = −10.46 | Transmembrane | 134-150 (131-159) |
| | INTEGRAL | Likelihood = −7.59 | Transmembrane | 107-123 (103-128) |
| | INTEGRAL | Likelihood = −7.48 | Transmembrane | 225-241 (213-248) |
| | INTEGRAL | Likelihood = −7.22 | Transmembrane | 205-221 (199-224) |
| | INTEGRAL | Likelihood = −3.56 | Transmembrane | 50-66 (50-73) |
| | INTEGRAL | Likelihood = −1.28 | Transmembrane | 16-32 (16-33) |

```
----- Final Results -----
                              bacterial membrane --- Certainty = 0.5182(Affirmative) < succ>
                                bacterial outside --- Certainty = 0.0000(Not Clear) < succ>
                            bacterial cytoplasm --- Certainty = 0.0000(Not Clear) < succ>
```

[8044] The protein has no significant homology with any sequences in the GENPEPT database.

[8045] An alignment of the GAS and GBS proteins is shown below.

| Identities = 82/253 (32%), Positives = 149/253 (58%), Gaps = 5/253 (1%) | | | |
|---|---|---|---|
| Query: | 6 | IKQSDTTFVRIIKSLLIGGFIGAILGSVGALFIIF--GQDKYLSEI--NIVQYFLWVSRI | 61 |
| | | +K+ +F+R++K L+ G I+G + F+ + G+ +L+ + +++ + ++R+ | |
| Sbjct: | 1 | MKKKKNSFLRLLKMSLLSSLAGGIIGGMVGAFLGYHGGRLDHLTFLKDDVINLIILLNRL | 60 |
| Query: | 62 | VVIITALFSLIYLYQIQKYQKVFFNVDESQ-SEEIYRQINLRHSYGMTFVSISIVLSIVN | 120 |
| | | VV+ S ++L Q++K V+ ++E SE YRQ+N +H+Y M ++++ +LS+ N | |
| Sbjct: | 61 | VVVTDLTLSFVFLTQLKKETAVYNTIEEDDISENGYRQLNKKHAYTMLLIAVASILSMCN | 120 |
| Query: | 121 | TLFNYKLNIFDDSVTLVIPIYDLSLLFVLLGLHIYFLKVYRNIRGIKMTVAPTLKELKNN | 180 |
| | | L L L IP+ D+ LL +++ +K Y IRG + P LKELK+N | |
| Sbjct: | 121 | VLLGLTLTNDSQHAMLAIPLLDILLLLMVIPFQALAMKRYNAIRGTDVPYFPNLKELKHN | 180 |
| Query: | 181 | VLQLDEAELESNYKMCFDIVMNLSGFIFPTIYFVLFFISFVFQKVEIVAIIITTSIHIYI | 240 |
| | | ++ LDEAEL++ +K F+ V++L+G I P++Y +LFF+ +VE+ AI++ I +Y+ | |
| Sbjct: | 181 | IMALDEAELQAYHKTSFESVLSLNGVIIPSLYVILFFVYLFTGQVELTAILVLVLIQLYL | 240 |
| Query: | 241 | LIKSLKAARHFYR | 253 |
| | | L+KS R FYR | |
| Sbjct: | 241 | LVKSATMTRQFYR | 253 |

[8046] Based on this analysis, it was predicted that these proteins and their epitopes could be useful antigens for vaccines or diagnostics.

### EXAMPLE 1462

[8047] A DNA sequence (GBSx1548) was identified in S. agalactiae <SEQ ID 4495> which encodes the amino acid sequence <SEQ ID 4496>. Analysis of this protein sequence reveals the following:

```
Possible site: 57
>>> Seems to have no N-terminal signal sequence
----- Final Results -----
                            bacterial cytoplasm --- Certainty = 0.5172(Affirmative) < succ>
                              bacterial membrane --- Certainty = 0.0000(Not Clear) < succ>
                                bacterial outside --- Certainty = 0.0000(Not Clear) < succ>
```

[8048] The protein has no significant homology with any sequences in the GENPEPT database.

[8049] No corresponding DNA sequence was identified in S. pyogenes.

[8050] Based on this analysis, it was predicted that this protein and its epitopes, could be useful antigens for vaccines or diagnostics.

### EXAMPLE 1463

[8051] A DNA sequence (GBSx1549) was identified in S. agalactiae <SEQ ID 4497> which encodes the amino acid sequence <SEQ ID 4498>. Analysis of this protein sequence reveals the following:

```
Possible site: 26
>>> Seems to have no N-terminal signal sequence
----- Final Results -----
                            bacterial cytoplasm --- Certainty = 0.2059(Affirmative) < succ>
                              bacterial membrane --- Certainty = 0.0000(Not Clear) < succ>
                                bacterial outside --- Certainty = 0.0000(Not Clear) < succ>
```

[8052] The protein has homology with the following sequences in the GENPEPT database.

| >GP: AAC76650 GB: AE000440 | | | |
|---|---|---|---|
| UDP-D-glucose: (galactosyl)lipopolysaccharide | | | |
| glucosyltransferase [Escherichia coli K12] | | | |
| Identities = 70/256 (27%), Positives = 121/256 (46%), Gaps = 14/256 (5%) | | | |
| Query: | 1 | MNLLFSIDDMYVDHFKVMLYSLVRQTKNRKLEIYVLQKT----LLKRHTELIQYTQNLEV | 56 |
| | | +N+ + +D Y+D V + S+V ++ L+ Y++ ++ +L + Q | |
| Sbjct: | 28 | LNVAYGVDANYLDGVGVSITSIVLNNRHINLDFYIIADVYNDGFFQKIAKLAEQNQLRIT | 87 |
| Query: | 57 | GYHPIIVGTEVFAQAPTTDRYPDTIYYRLLAHKFLPETLDRILYLDADMLCLNDWSSLYD | 116 |
| | | Y + T+ P T + +Y+RL A + L TLDR+LYLDAD++C D S L | |
| Sbjct: | 88 | LYR---INTDKLQCLPCTQVWSRAMYFRLFAFQLLGLTLDRLLYLDADVVCKGDISQLLH | 144 |
| Query: | 117 | MELGDQLYAAASHNTDGKFLDYVNKLRLKNVELESSYFNTGVLLMNLPAIRKVVHQQTIL | 176 |
| | | + L A A+ D + + RL + EL YFN+GV+ ++L + L | |
| Sbjct: | 145 | LGLNG---AVAAVVKDVEPMQEKAVSRLSDPELLGQYFNSGVVYLDLKKWADAKLTEKAL | 201 |
| Query: | 177 | DYIMQNRGRLILPDQDILNGLYANLVKPIPDEIYNYDARYSLIYQLKSRNEWDLEWVINH | 236 |
| | | +M PDQD++N L + +P E Y+ Y++ +LK + + + +I | |
| Sbjct: | 202 | SILMSKDNVYKYPDQDVMNVLLKGMTLFLPRE---YNTIYTIKSELKDKTHQNYKKLITE | 258 |
| Query: | 237 | -TVFLHFAGRDKPWKK | 251 |
| | | T+ +H+ G KPW K | |
| Sbjct: | 259 | STLLIHYTGATKPWHK | 274 |

[8053] No corresponding DNA sequence was identified in S. pyogenes.

[8054] Based on this analysis, it was predicted that this protein and its epitopes, could be useful antigens for vaccines or diagnostics.

### EXAMPLE 1464

[8055] A DNA sequence (GBSx1550) was identified in S. agalactiae <SEQ ID 4499> which encodes the amino acid sequence <SEQ ID 4500>. Analysis of this protein sequence reveals the following:

```
Possible site: 20
>>> Seems to have no N-terminal signal sequence
----- Final Results -----
                            bacterial cytoplasm --- Certainty = 0.1406(Affirmative) < succ>
                              bacterial membrane --- Certainty = 0.0000(Not Clear) < succ>
                                bacterial outside --- Certainty = 0.0000(Not Clear) < succ>
```

[8056] The protein has no significant homology with any sequences in the GENPEPT database.

[8057] No corresponding DNA sequence was identified in S. pyogenes.

[8058] Based on this analysis, it was predicted that this protein and its epitopes, could be useful antigens for vaccines or diagnostics.

### EXAMPLE 1465

[8059] A DNA sequence (GBSx1551) was identified in S. agalactiae <SEQ ID 4501> which encodes the amino acid sequence <SEQ ID 4502>. Analysis of this protein sequence reveals the following:

| Possible site: 54 | | | |
|---|---|---|---|
| >>> Seems to have an uncleavable N-term signal seq | | | |
| INTEGRAL | Likelihood = −10.72 | Transmembrane | 7-23 (1-28) |
| INTEGRAL | Likelihood = −4.30 | Transmembrane | 222-238 (216-238) |
| INTEGRAL | Likelihood = −3.66 | Transmembrane | 151-167 (140-170) |
| INTEGRAL | Likelihood = −3.50 | Transmembrane | 35-51 (34-58) |
| INTEGRAL | Likelihood = −3.35 | Transmembrane | 71-87 (69-88) |
| INTEGRAL | Likelihood = −3.29 | Transmembrane | 113-129 (113-132) |
| INTEGRAL | Likelihood = −2.81 | Transmembrane | 170-186 (168-190) |
| INTEGRAL | Likelihood = −2.71 | Transmembrane | 198-214 (197-217) |

----- Final Results -----
bacterial membrane --- Certainty = 0.5288 (Affirmative) < succ>
bacterial outside --- Certainty = 0.0000 (Not Clear) < succ>
bacterial cytoplasm --- Certainty = 0.0000 (Not Clear) < succ>

[8060] The protein has homology with the following sequences in the GENPEPT database.

| >GP: BAB07774 GB: AP001520 unknown conserved protein [Bacillus halodurans] | | | |
|---|---|---|---|
| Identities = 84/242 (34%), Positives = 147/242 (60%), Gaps = 16/242 (6%) | | | |
| Query: | 1 | MVGLGTVINVILIIVGGFVGLFLKNFLKESLQKSLMQAMGVAVLFISISGVLEKMMLVEK | 60 |
| | | MV +GTV+N I++ +GL +KN + E ++ +LMQA+G+A++ + + KM L + | |
| Sbjct: | 1 | MVLIGTVVNGAAIVIAALIGLLVKN-IPERVKTTLMQAIGLAIVLLGV-----KMGLQTE | 54 |
| Query: | 61 | SHLISNHTNMMIITLALGTVLGELLSLDSYIDKFGNYLKQKTGSGNDIKFVEAFVTSTCT | 120 |
| | | LI +I +L +G V+GE+++L+ +D G +++ K G D AFVT+T | |
| Sbjct: | 55 | QFLI------VICSLVIGGVIGEMINLEKRLDHLGRWIESKVGGKKDGSIATAFVTTTLI | 108 |
| Query: | 121 | VCIGAMAVVGSIQDGIAADHSILFAKGMLDMIIIAIMTVSLGKGALFSALPVALLQGSLT | 180 |
| | | +GAMAV+G++ G+ DHS+L K +LD + + T +LG G LFSA+PV L QGS+ | |
| Sbjct: | 109 | YVVGAMAVLGALDSGLRGDHSVLLTKALLDGFLAILFTSTLGIGVLFSAIPVVLYQGSIA | 168 |
| Query: | 181 | IVAF----FMGSLLNPSSLDYLNLVGNMLIFCVGVNLLFNLNIKVINMLPAIILAILWGS | 236 |
| | | + A ++ + L S + ++ G ++I +G+NLL +NI+V N+LP++++ + + | |
| Sbjct: | 169 | LFASQIDQYVPTALMDSFITEMSATGGVMIVAIGLNLLNVVNIRVANLLPSLVIVAVLVT | 228 |
| Query: | 237 | FI | 238 |
| | | F+ | |
| Sbjct: | 229 | FV | 230 |

[8061] No corresponding DNA sequence was identified in S. pyogenes.

[8062] Based on this analysis, it was predicted that this protein and its epitopes, could be useful antigens for vaccines or diagnostics.

### EXAMPLE 1466

[8063] A DNA sequence (GBSx1552) was identified in S. agalactiae <SEQ ID 4503> which encodes the amino acid sequence <SEQ ID 4504>. This protein is predicted to be alanyl-tRNA synthetase (alaS). Analysis of this protein sequence reveals the following:

| Possible site: 49 | | | |
|---|---|---|---|
| >>> Seems to have no N-terminal signal sequence | | | |
| INTEGRAL | Likelihood = −4.41 | Transmembrane | 805-821 (804-822) |

----- Final Results -----
bacterial membrane --- Certainty = 0.2763 (Affirmative) < succ>
bacterial outside --- Certainty = 0.0000 (Not Clear) < succ>
bacterial cytoplasm --- Certainty = 0.0000 (Not Clear) < succ>

[8064] The protein has homology with the following sequences in the GENPEPT database.

| >GP: BAB04986 GB: AP001511 alanyl-tRNA synthetase [Bacillus halodurans] | | | |
|---|---|---|---|
| Identities = 482/885 (54%), Positives = 618/885 (69%), Gaps = 27/885 (3%) | | | |
| Query: | 1 | MKELSSAQIRQMWLDFWKSKGHSVEPSANLVPVNDPTLLWINSGVATLKKYFDGSVIPEN | 60 |
| | | MK L+SAQ+RQM+LDF+K KGH VEPSA+LVP +DP+LLWINSGVATLKKYFDG VIPEN | |
| Sbjct: | 1 | MKYLTSAQVRQMFLDFFKEKGHDVEPSASLVPHDDPSLLWINSGVATLKKYFDGRVIPEN | 60 |
| Query: | 61 | PRITNAQKSIRTNDIENVGKTARHHTMFEMLGNFSIGDYFRDEAIEWGFELLTSPEWFDF | 120 |
| | | PRITNAQKSIRTNDIENVGKTARHHT FEMLGNFSIGDYF++EAIEW +E LTS +W F | |
| Sbjct: | 61 | PRITNAQKSIRTNDIENVGKTARHHTFFEMLGNFSIGDYFKEEAIEWAWEFLTSEKWIGF | 120 |
| Query: | 121 | PKDKLYMTYYPDDKDSYNRWIA-CGVEPSHLVPIEDNFWEIGAGPSGPDTEIFFDRGEDF | 179 |
| | | K+KL +T +P+D ++Y+ W G+ ++ +E NFW+IG GPSGP+TEIF+DRG ++ | |
| Sbjct: | 121 | DKEKLSVTVHPEDDEAYSYWKEKIGIPEERIIRLEGNFWDIGEGPSGPNTEIFYDRGPEY | 180 |
| Query: | 180 | -----DPENIGLRLLAEDIENDRYIEIWNIVLSQFNADPAVPRSEYKELPNKNIDTGAGL | 234 |
| | | DPE L ENDRY+E+WN+V SQFN +P Y LP KNIDTG GL | |
| Sbjct: | 181 | GDQPNDPE------LYPGGENDRYLEVWNLVFSQFNHNPD---GSYTPLPKKNIDTGMGL | 231 |
| Query: | 235 | ERLAAVMQGAKTNFETDLFMPIIREVEKLSGKTYDPDGD-NMSFKVIADHIRALSFAIGD | 293 |
| | | ER+ +V+Q TNFETDLFMPIIR EK+SG Y + ++SFKVIADHIR ++FAIGD | |
| Sbjct: | 232 | ERMVSVIQNVPTNFETDLFMPIIRATEKISGTEYGSHHEADVSFKVIADHIRTVTFAIGD | 291 |
| Query: | 294 | GALPGNEGRGYVLRRLLRRAVMHGRRLGINETFLYKLVPTVGQIMESYYPEVLEKRDFIE | 353 |
| | | GALP NEGRGYVLRRLLRRAV + +++GI+ F+Y+LVP VG IM +YPEV EK FI+ | |
| Sbjct: | 292 | GALPSNEGRGYVLRRLLRRAVRYAKQIGIDRPFMYELVPVVGDIMVDFYPEVKEKAAFIQ | 351 |
| Query: | 354 | KIVKREEETFARTIDAGSGHLDSLLAQLKAEGKDTLEGKDIFKLYDTYGFPVELTEELAE | 413 |
| | | K+VK EEE F T++ G L+ ++ + K+EG T+ G D+F+LYDTYGFPV+LTEE E | |
| Sbjct: | 352 | KVVKTEEERFHETLNEGLSILEKVIDKAKSEGASTISGSDVFRLYDTYGFPVDLTEEYVE | 411 |
| Query: | 414 | DAGYKIDHEGFKSAMKEQQDRARAAVVKGGSMGMQNETLAGIVEESRF-EYDTYSLESSL | 472 |
| | | + G ++D +GF++ M+ Q++RAR A + GSM +Q+E L I +S F Y S E+++ | |
| Sbjct: | 412 | EQGLQVDLDGFEAEMERQRERARTARQQAGSMQVQDEVLGQITVDSTFIGYKQLSTETTI | 471 |
| Query: | 473 | SVIIADNERTEAVSEGQ-ALLVFAQTPFYAEMGGQVADHGVIKNDKGDTVAEVVDVQKAP | 531 |
| | | I+ D + V GQ A ++ +TPFYAE GGQVAD G+I+ G V V DVQKAP | |
| Sbjct: | 472 | ETIVLDKTVADYVGAGQEAKVILKETPFYAESGGQVADKGIIRGANGFAV--VSDVQKAP | 529 |
| Query: | 532 | NGQPLHTVNVL-ASLSVGTNYTLEINKERRLAVEKNHTATHLLHAALHNVIGEHATQAGS | 590 |
| | | NGQ LHTV V +L V + + R + KNHTATHLLH AL +V+GEH QAGS | |
| Sbjct: | 530 | NGQHLHTVIVKEGTLQVNDQVQAIVEETERSGIVKNHTATHLLHRALKDVLGEHVNQAGS | 589 |
| Query: | 591 | LNEEEFLRFDFTHFEAVSNEELRHIEQEVNEQIWNDLTITTTETDVETAKEMGAMALFGE | 650 |
| | | L EE LRFDF+HF V++EE IE+ VNE+IW + + + ++ AK +GAMALFGE | |
| Sbjct: | 590 | LVSEERLRFDFSHFGQVTDEEKEKIERIVNEKIWQAIKVNISTKTLDEAKAIGAMALFGE | 649 |
| Query: | 651 | KYGKVVRVVQIGNYSVELCGGTHLNNSSEIGLFKIVKEEGIGSGTRRIIAVTGRQAFEAY | 710 |
| | | KYG +VRVV++G+YS+ELCGG H+ N+SEIGLFKIV E GIG+G RRI AVTG++AF | |
| Sbjct: | 650 | KYGDIVRVVEVGDYSIELCGGCHVTNTSEIGLFKIVSESGIGAGVRRIEAVTGKEAFLFM | 709 |
| Query: | 711 | RNQEDALKEIAATVKAPQLKDAAAKVQALSDSLRDLQKENVELKEKAAAAAAGDVFKDIQ | 770 |
| | | Q D LKE AATVKA +KD +V+AL +R+LQ+EN L K AG + ++Q | |
| Sbjct: | 710 | AKQLDLLKETAATVKAKNVKDVPVRVEALQQQIRELQRENESLNAKLGNMEAGSLVNEVQ | 769 |
| Query: | 771 | EAKGVRFIASQVDVADAGALRTFADNWKQKDYSDVLVLVAAIGEKVNVLVASKTKDV--- | 827 |
| | | + +GV +A +AD LR+ D KQ+ S V+VL A KVN+ VA TKD+ | |
| Sbjct: | 770 | KIEGVPVLAKAISGADMDGLRSIVDKLKQEIPSVVIVLGTASEGKVNI-VAGVTKDLINK | 828 |
| Query: | 828 | --HAGNMIKGLAPIVAGRGGGKPDMAMAGGSDASKIAELLAAVAE | 870 |
| | | HAG ++K +A G GGG+PDMA AGG K+ + L+ V E | |
| Sbjct: | 829 | GYHAGKLVKEVATRCGGGGGGRPDMAQAGGKQPEKLQDALSFVYE | 873 |

[8065] A related DNA sequence was identified in S. pyogenes <SEQ ID 4505> which encodes the amino acid sequence <SEQ ID 4506>. Analysis of this protein sequence reveals the following:

| Possible site: 21 | | | |
|---|---|---|---|
| >>> Seems to have no N-terminal signal sequence | | | |
| INTEGRAL | Likelihood = −4.41 | Transmembrane | 805-821 (804-822) |

----- Final Results -----
bacterial membrane --- Certainty = 0.2763 (Affirmative) < succ>
bacterial outside --- Certainty = 0.0000 (Not Clear) < succ>
bacterial cytoplasm --- Certainty = 0.0000 (Not Clear) < succ>

[8066] An alignment of the GAS and GBS proteins is shown below.

| Identities = 862/870 (99%), Positives = 864/870 (99%) | | | |
|---|---|---|---|
| Query: | 1 | MKELSSAQIRQMWLDFWKSKGHSVEPSANLVPVNDPTLLWINSGVATLKKYFDGSVIPEN | 60 |
| | | MKELSSAQIRQMWLDFWKSKGH VEPSANLVPVNDPTLLWINSGVATLKKYFDGSVIPEN | |
| Sbjct: | 1 | MKELSSAQIRQMWLDFWKSKGHCVEPSANLVPVNDPTLLWINSGVATLKKYFDGSVIPEN | 60 |
| Query: | 61 | PRITNAQKSIRTNDIENVGKTARHHTMFEMLGNFSIGDYFRDEAIEWGFELLTSPEWFDF | 120 |
| | | PRITNAQKSIRTNDIENVGKTARHHTMFEMLGNFSIGDYFRDEAIEWGFELLTSP+WFDF | |
| Sbjct: | 61 | PRITNAQKSIRTNDIENVGKTARHHTMFEMLGNFSIGDYFRDEAIEWGFELLTSPDWFDF | 120 |
| Query: | 121 | PKDKLYMTYYPDDKDSYNRWIACGVEPSHLVPIEDNFWEIGAGPSGPDTEIFFDRGEDFD | 180 |
| | | PKDKLYMTYYPDDKDSYNRWIACGVEPSHLVPIEDNFWEIGAGPSGPDTEIFFDRGEDFD | |
| Sbjct: | 121 | PKDKLYMTYYPDDKDSYNRWIACGVEPSHLVPIEDNFWEIGAGPSGPDTEIFFDRGEDFD | 180 |
| Query: | 181 | PENIGLRLLAEDIENDRYIEIWNIVLSQFNADPAVPRSEYKELPNKNIDTGAGLERLAAV | 240 |
| | | PENIGLRLLAEDIENDRYIEIWNIVLSQFNADPAVPRSEYKELPNKNIDTGAGLERLAAV | |
| Sbjct: | 181 | PENIGLRLLAEDIENDRYIEIWNIVLSQFNADPAVPRSEYKELPNKNIDTGAGLERLAAV | 240 |
| Query: | 241 | MQGAKTNFETDLFMPIIREVEKLSGKTYDPDGDNMSFKVIADHIRALSFAIGDGALPGNE | 300 |
| | | MQGAKTNFETDLFMPIIREVEKLSGKTYDPDGDNMSFKVIADHIRALSFAIGDGALPGNE | |
| Sbjct: | 241 | MQGAKTNFETDLFMPIIREVEKLSGKTYDPDGDNMSFKVIADHIRALSFAIGDGALPGNE | 300 |
| Query: | 301 | GRGYVLRRLLRRAVMHGRRLGINETFLYKLVPTVGQIMESYYPEVLEKRDFIEKIVKREE | 360 |
| | | GRGYVLRRLLRRAVMHGRRLGINETFLYKLVPTVGQIMESYYPEVLEKRDFIEKIVKREE | |
| Sbjct: | 301 | GRGYVLRRLLRRAVMHGRRLGINETFLYKLVPTVGQIMESYYPEVLEKRDFIEKIVKREE | 360 |
| Query: | 361 | ETFARTIDAGSGHLDSLLAQLKAEGKDTLEGKDIFKLYDTYGFPVELTEELAEDAGYKID | 420 |
| | | ETFARTIDAGSGHLDSLLAQLKAEGKDTLEGKDIFKLYDTYGFPVELTEELAEDAGYKID | |
| Sbjct: | 361 | ETFARTIDAGSGHLDSLLAQLKAEGKDTLEGKDIFKLYDTYGFPVELTEELAEDAGYKID | 420 |
| Query: | 421 | HEGFKSAMKEQQDRARAAVVKGGSMGMQNETLAGIVEESRFEYDTYSLESSLSVIIADNE | 480 |
| | | HEGFKSAMKEQQDRARAAVVKGGSMGMQNETLAGIVEESRFEYDTYSLESSLSVIIADNE | |
| Sbjct: | 421 | HEGFKSAMKEQQDRARAAVVKGGSMGMQNETLAGIVEESRFEYDTYSLESSLSVIIADNE | 480 |
| Query: | 481 | RTEAVSEGQALLVFAQTPFYAEMGGQVADHGVIKNDKGDTVAEVVDVQKAPNGQPLHTVN | 540 |
| | | RTEAVSEGQALLVFAQTPFYAEMGGQVAD G IKNDKGDTVAEVVDVQKAFNGQPLHTVN | |
| Sbjct: | 481 | RTEAVSEGQALLVFAQTPFYAEMGGQVADTGRIKNDKGDTVAEVVDVQKAPNGQPLHTVN | 540 |
| Query: | 541 | VLASLSVGTNYTLEINKERRLAVEKNHTATHLLHAALHNVIGEHATQAGSLNEEEFLRFD | 600 |
| | | VLASLSVGTNYTLEINKERRLAVEKNHTATHLLHAALHNVIGEHATQAGSLNEEEFLRFD | |
| Sbjct: | 541 | VLASLSVGTNYTLEINKERRLAVEKNHTATHLLHAALHNVIGEHATQAGSLNEEEFLRFD | 600 |
| Query: | 601 | FTHFEAVSNEELRHIEQEVNEQIWNDLTITTTETDVETAKEMGAMALFGEKYGKVVRVVQ | 660 |
| | | FTHFEAVSNEELRHIEQEVNEQIWN LTITTTETDVETAKEMGAMALFGEKYGKVVRVVQ | |
| Sbjct: | 601 | FTHFEAVSNEELRHIEQEVNEQIWNALTITTTETDVETAKEMGAMALFGEKYGKVVRVVQ | 660 |
| Query: | 661 | IGNYSVELCGGTHLNNSSEIGLFKIVKEEGIGSGTRRIIAVTGRQAFEAYRNQEDALKEI | 720 |
| | | IGNYSVELCGGTHLNNSSEIGLFKIVKEEGIGSGTRRIIAVTGRQAFEAYRNQEDALKEI | |
| Sbjct: | 661 | IGNYSVELCGGTHLNNSSEIGLFKIVKEEGIGSGTRRIIAVTGRQAFEAYRNQEDALKEI | 720 |
| Query: | 721 | AATVRAPQLKDAAAKVQALSDSLRDLQKENVELKEKAAAAAAGDVEKDIQEAKGVRFIAS | 780 |
| | | AATVKAPQLKDAAAKVQALSDSLRDLQKEN ELKEKAAAAAAGDVFKD+QEAKGVRFIAS | |
| Sbjct: | 721 | AATVKAPQLKDAAAKVQALSDSLRDLQKENAELKEKAAAAAAGDVFKDVQEAKGVRFIAS | 780 |
| Query: | 781 | QVDVADAGALRTFADNWKQKDYSDVLVLVAAIGEKVNVLVASKTKDVHAGNMIKGLAPIV | 840 |
| | | QVDVADAGALRTFADNWKQKDYSDVLVLVAAIGEKVNVLVASKTKDVHAGNNIK LAPIV | |
| Sbjct: | 781 | QVDVADAGALRTFADNWKQKDYSDVLVLVAAIGEKVNVLVASKTKDVHAGNMIKELAPIV | 840 |
| Query: | 841 | AGRGGGKPDMAMAGGSDASKIAELLAAVAE | 870 |
| | | AGRGGGKPDMAMAGGSDASKIAELLAAVAE | |
| Sbjct: | 841 | AGRGGGKPDMAMAGGSDASKIAELLAAVAE | 870 |

[8067] Based on this analysis, it was predicted that these proteins and their epitopes could be useful antigens for vaccines or diagnostics.

### EXAMPLE 1467

[8068] A DNA sequence (GBSx1553) was identified in S. agalactiae <SEQ ID 4507> which encodes the amino acid sequence <SEQ ID 4508>. Analysis of this protein sequence reveals the following:

Possible site: 56
>>> Seems to have no N-terminal signal sequence
----- Final Results -----
bacterial cytoplasm --- Certainty = 0.2974 (Affirmative) < succ>
bacterial membrane --- Certainty = 0.0000 (Not Clear) < succ>
bacterial outside --- Certainty = 0.0000 (Not Clear) < succ>

[8069] A related GBS nucleic acid sequence <SEQ ID 9747> which encodes amino acid sequence <SEQ ID 9748> was also identified.

[8070] The protein has homology with the following sequences in the GENPEPT database.

| >GP: CAB15920 GB: Z99123 yxjI [Bacillus subtilis] | | | |
|---|---|---|---|
| Identities = 42/144 (29%), Positives = 73/144 (50%), Gaps = 2/144 (1%) | | | |
| Query: | 17 | IKEKMFSLGGKFTITDLTGLPCYHVEGSLFPLPKTFKVFDEEEHLISQIEKKVLSFLPKF | 76 |
| | | +K+KMFS F I D + VEG F L + ++ D + IE+K++S LP++ | |
| Sbjct: | 6 | MKQKMFSFKDAFHIYDRDEQETFKVEGRFFSLGDSLQMTDSSGKTLVSIEQKLMSLLPRY | 65 |
| Query: | 77 | NVTLANGNHFTIKKDFSFLKPHYTIEDLDMEVKGNFWDMDFQLLKDNQVIANISQQWFRN | 136 |
| | | +++ + K +F KP + I L+ E+ G+ W +FQL V ++S++W | |
| Sbjct: | 66 | EISIGGKTVCEVTKKVTFSKPKFVISGLNWEIDGDLWRDEFQLTDGENVRMSVSKKWLSW | 125 |
| Query: | 137 | TSTYQVEVYSETYNDLTISLVIAI | 160 |
| | | +Y +++ E D+ I IAI | |
| Sbjct: | 126 | GDSYHLQIAYE--EDVLICTAIAI | 147 |

[8071] No corresponding DNA sequence was identified in S. pyogenes.

[8072] Based on this analysis, it was predicted that these proteins and their epitopes could be useful antigens for vaccines or diagnostics.

### EXAMPLE 1468

[8073] A DNA sequence (GBSx1554) was identified in S. agalactiae <SEQ ID 4509> which encodes the amino acid sequence <SEQ ID 4510>. Analysis of this protein sequence reveals the following:

Possible site: 30
>>> Seems to have no N-terminal signal sequence
----- Final Results -----
bacterial cytoplasm --- Certainty = 0.3833 (Affirmative) < succ>
bacterial membrane --- Certainty = 0.0000 (Not Clear) < succ>
bacterial outside --- Certainty = 0.0000 (Not Clear) < succ>

[8074] The protein has homology with the following sequences in the GENPEPT database.

| >GP: BAA36674 GB: AB016282 ORF17 [bacteriophage phi-105] | | | |
|---|---|---|---|
| Identities = 45/133 (33%), Positives = 74/133 (54%), Gaps = 5/133 (3%) | | | |
| Query: | 2 | KYTYLALFEVDKENGGYNISFPDFHGAFSEADSLNEAIFNAREVLEIYTIMFEDEGKEFP | 61 |
| | | +Y Y ALF+ D + G ++FPD G + +S EA+ A+E + ++ FE +G P | |
| Sbjct: | 5 | RYIYPALFDYDDD--GITVTFPDLPGCITFGNSGGEALTMAKEAMALHLYGFEQDGDIIP | 62 |
| Query: | 62 | KASSFKALASNLASDEDVIQAISVDTELVRERERSKIVNKTVTLPSWLVEVGKENKVNFS | 121 |
| | | +A+ K + A + + I R + V KT+T+P W+ ++ KE+KVN+S | |
| Sbjct: | 63 | EATPSKEIK---AEESQSVVLIETWMPPFRHDMENAAVKKTLTIPRWMDDIAKEHKVNYS | 119 |
| Query: | 122 | QLLQKAIREELQV | 134 |
| | | QLLQ+AI+E L + | |
| Sbjct: | 120 | QLLQEAIKEHLGI | 132 |

[8075] No corresponding DNA sequence was identified in S. pyogenes.

[8076] Based on this analysis, it was predicted that this protein and its epitopes, could be useful antigens for vaccines or diagnostics.

### EXAMPLE 1469

[8077] A DNA sequence (GBSx1555) was identified in S. agalactiae <SEQ ID 4511> which encodes the amino acid sequence <SEQ ID 4512>. Analysis of this protein sequence reveals the following:

Possible site: 26
>>> Seems to have no N-terminal signal sequence
----- Final Results -----
bacterial cytoplasm --- Certainty = 0.1484 (Affirmative) < succ>
bacterial membrane --- Certainty = 0.0000 (Not Clear) < succ>
bacterial outside --- Certainty = 0.0000 (Not Clear) < succ>

[8078] The protein has homology with the following sequences in the GENPEPT database.

| >GP: BAA25696 GB: AB010712 NADH oxidase/alkyl hydroperoxidase | | | |
|---|---|---|---|
| reductase [Streptococcus mutans] | | | |
| Identities = 383/509 (75%), Positives = 441/509 (86%) | | | |
| Query: | 1 | MVLDKEIKAQLAQYLDLLESDIVLQADLGDNDNSQKVKDFLDEIVAMSDRISLESTHLKR | 60 |
| | | M LD EIK QL QYL LLES+IVLQA L D+ NSQKVK+FL EIVAMS ISLE L R | |
| Sbjct: | 1 | MALDAEIKEQLGQYLQLLESEIVLQAQLKDDANSQKVKEFLQEIVAMSPMISLEEKELPR | 60 |
| Query: | 61 | QPSFGIAKKGHESRVIFSGLPMGHEFTSFILALLQVSGRAPKVDEDIIKRIKGIEKTINL | 120 |
| | | PSF IAKKG ES V F+GLP+GHEFTSFILALLQVSGR PKV+ DI+KRI+ +++ ++ | |
| Sbjct: | 61 | TPSFRIAKKGQESGVEFAGLPLGHEFTSFILALLQVSGRPPKVETDIVKRIQAVDEPMHF | 120 |
| Query: | 121 | ETYVSLTCHNCPDVVQAFNIMAVLNPNITHTMIEGGMYQDEVKSKGIMSVPTVYKDQEEF | 180 |
| | | ETYVSLTCHNCPDVVQAFNIM+V+NPNI+HTM+EGGM++DE+++KGIMSVPTVYKD EF | |
| Sbjct: | 121 | ETYVSLTCHNCPDVVQAFNIMSVVNPNISHTMVEGGMFKDEIEAKGIMSVPTVYKDGTEF | 180 |
| Query: | 181 | TSGRATIEQLLEQLDGPLDAEAFADKGVYDVLVIGGGPAGNSAAIYAARKGLKTGILAET | 240 |
| | | TSGRA+IEQLL+ + GPL +AF DKGV+DVLVIGGGPAGNSAAIYAARKG+KTG+LAET | |
| Sbjct: | 181 | TSGRASIEQLLDLIAGPLKEDAFDDKGVFDVLVIGGGPAGNSAAIYAARKGVKTGLLAET | 240 |
| Query: | 241 | FGGQVIETVGIENMIGTLYTEGPKLMAQIEEHTKSYDIDIIKSQLATGIEKKELVEVTLA | 300 |
| | | GGQV+ETVGIENMIGT Y EGP+LMAQ+EEHTKSY +DI+K+ A I+K +LVEV L | |
| Sbjct: | 241 | MGGQVMETVGIENMIGTPYVEGPQLMAQVEEHTKSYSVDIMKAPRAKSIQKTDLVEVELD | 300 |
| Query: | 301 | NGAILQAKTAILALGAKWRNINVPGEEEFRNKGVTYCPHCDGPLFEGKDVAVIGGGNSGM | 360 |
| | | NGA L+AKTA+LALGAKWR INVPGE+EF NKGVTYCPHCDGPLF K VAVIGGGNSG+ | |
| Sbjct: | 301 | NGAHLKAKTAVLALGAKWRKINVPGEKEFFNKGVTYCPHCDGPLFTDKKVAVIGGGNSGL | 360 |
| Query: | 361 | EAALDLAGVTKHVTVLEFLPELKADQVLQERAAKTDNLTILKNVATKDIVGEDHVTGLNY | 420 |
| | | EAA+DLAG+ HV +LEFLPELKAD++LQ+RA DN+TIL NVATK+I+G DHV GL Y | |
| Sbjct: | 361 | EAAIDLAGLASHVYILEFLPELKADKILQDRAEALDNITILTNVATKEIIGNDHVEGLRY | 420 |
| Query: | 421 | TDRDTNEEKHIDLEGVFVQIGLVPSTSWLKDSGIELNERQEIVVDKFGSTNIPGIFAAGD | 480 |
| | | +DR TNEE +DLEGVFVQIGLVPST WLKDSG+ LNE+ EI+V K G+TNIP IFAAGD | |
| Sbjct: | 421 | SDRTTNEEYLLDLEGVFVQIGLVPSTDWLKDSGLALNEKGEIIVAKDGATNIPAIFAAGD | 480 |
| Query: | 481 | CTDAAYKQIIISMGSGATAAIGAFDYLIR | 509 |
| | | CTD+AYKQIIISMGSGATAA+GAFDYLIR | |
| Sbjct: | 481 | CTDSAYKQIIISMGSGATAALGAFDYLIR | 509 |

[8079] A related DNA sequence was identified in S. pyogenes <SEQ ID 4513> which encodes the amino acid sequence <SEQ ID 4514>. Analysis of this protein sequence reveals the following:

Possible site: 29
>>> Seems to have no N-terminal signal sequence
----- Final Results -----
bacterial cytoplasm --- Certainty = 0.0654 (Affirmative) < succ>
bacterial membrane --- Certainty = 0.0000 (Not Clear) < succ>
bacterial outside --- Certainty = 0.0000 (Not Clear) < succ>

[8080] An alignment of the GAS and GBS proteins is shown below.

| Identities = 419/510 (82%), Positives = 472/510 (92%) | | | |
|---|---|---|---|
| Query: | 1 | MVLDKEIKAQLAQYLDLLESDIVLQADLGDNDNSQKVKDFLDEIVAMSDRISLESTHLKR | 60 |
| | | M L +IK QLAQYL LLE+D+VLQ LGDN+ SQKVKDF++EI AMS+RIS+E+ L R | |
| Sbjct: | 1 | MALSPDIKEQLAQYLTLLEADLVLQVSLGDNEQSQKVKDFVEEIAAMSERISIENITLDR | 60 |
| Query: | 61 | QPSFGIAKKGHESRVIFSGLPMGHEFTSFILALLQVSGRAPKVDEDIIKRIKGIEKTINL | 120 |
| | | QPSF +AKKGH S V+F+GLP+GHE TSFILALLQVSGRAPKVD+D+I RIK I++ ++ | |
| Sbjct: | 61 | QPSFKVAKKGHGSGVVFAGLPLGHELTSFILALLQVSGRAPKVDQDVIDRIKAIDRPLHF | 120 |
| Query: | 121 | ETYVSLTCHNCPDVVQAFNIMAVLNPNITHTMIEGGMYQDEVKSKGIMSVPTVYKDQEEF | 180 |
| | | ETYVSLTCHNCPDVVQA NIM+VLN I+HTM+EGGM+QDEVK+KGIMSVPTV+ D EEF | |
| Sbjct: | 121 | ETYVSLTCHNCPDVVQALNIMSVLNDKISHTMVEGGMFQDEVKAKGIMSVPTVFLDGEEF | 180 |
| Query: | 181 | TSGRATIEQLLEQLDGPLDAEAFADKGVYDVLVIGGGPAGNSAAIYAARKGLKTGILAET | 240 |
| | | TSGRATIEQLLEQ+ GPL EAFADKG+YDVLVIGGGPAGNSAAIYAARKGLKTG+LAET | |
| Sbjct: | 181 | TSGRATIEQLLEQIAGPLSEEAFADKGLYDVLVIGGGPAGNSAAIYAARKGLKTGLLAET | 240 |
| Query: | 241 | FGGQVIETVGIENMIGTLYTEGPKLMAQIEEHTKSYDIDIIKSQLATGIEKKELVEVTLA | 300 |
| | | FGGQV+ETVGIENMIGTLYTEGPKLMA++E HTKSYD+DIIK+QLAT IEKKE +EVTLA | |
| Sbjct: | 241 | FGGQVMETVGIENMIGTLYTEGPKLMAEVEAHTKSYDVDIIKAQLATSIEKKENIEVTLA | 300 |
| Query: | 301 | NGAILQAKTAILALGAKWRNINVPGEEEFRNKGVTYCPHCDGPLFEGKDVAVIGGGNSGM | 360 |
| | | NGA+LQAKTAILALGAKWRNINVPGE+EFRNKGVTYCPHCDGPLFEGKDVAVIGGGNSG+ | |
| Sbjct: | 301 | NGAVLQAKTAILALGAKWRNINVPGEDEFRNKGVTYCPHCDGPLFEGKDVAVIGGGNSGL | 360 |
| Query: | 361 | EAALDLAGVTKHVTVLEFLPELKADQVLQERAAKTDNLTILKNVATKDIVGEDHVTGLNY | 420 |
| | | EAALDLAG+ KHV VLEFLPELKAD+VLQ+RAAKT+N+TI+KNVATKDIVGEDHVTGLNY | |
| Sbjct: | 361 | EAALDLAGLAKHVYVLEFLPELKADKVLQDRAAKTNNMTIIKNVATKDIVGEDHVTGLNY | 420 |
| Query: | 421 | TDRDTNEEKHIDLEGVFVQIGLVPSTSWLKDSGIELNERQEIVVDKFGSTNIPGIFAAGD | 480 |
| | | T+RD+ E+KH+DLEGVFVQIGLVP+T+WLKDSG+ L +R EI+VDK GSTNIPGIFAAGD | |
| Sbjct: | 421 | TERDSGEDKHLDLEGVFVQIGLVPNTAWLKDSGVNLTDRGEIIVDKHGSTNIPGIFAAGD | 480 |
| Query: | 481 | CTDAAYKQIIISMGSGATAAIGAFDYLIRQ | 510 |
| | | CTD+AYKQIIISMGSGATAAIGAFDYLIRQ | |
| Sbjct: | 481 | CTDSAYKQIIISMGSGATAAIGAFDYLIRQ | 510 |

[8081] Based on this analysis, it was predicted that these proteins and their epitopes could be useful antigens for vaccines or diagnostics.

### EXAMPLE 1470

[8082] A DNA sequence (GBSx1556) was identified in S. agalactiae <SEQ ID 4515> which encodes the amino acid sequence <SEQ ID 4516>. Analysis of this protein sequence reveals the following:

Possible site: 15
>>> Seems to have no N-terminal signal sequence
----- Final Results -----
bacterial cytoplasm --- Certainty = 0.2906 (Affirmative) < succ>
bacterial membrane --- Certainty = 0.0000 (Not Clear) < succ>
bacterial outside --- Certainty = 0.0000 (Not Clear) < succ>

[8083] The protein has homology with the following sequences in the GENPEPT database.

| >GP: BAA25695 GB: AB010712 alkyl hydroperoxidase [Streptococcus mutans] | | | |
|---|---|---|---|
| Identities = 167/186 (89%), Positives = 179/186 (95%) | | | |
| Query: | 1 | MSLVGKEIIEFSAQAYHDGKFITVTNEDVKGKWAVFCFYPADFSFVCPTELGDLQEQYET | 60 |
| | | MSLVGKE++EFSAQAYH G+F+TV NEDVKGKWAVFCFYPADFSFVCPTELGDLQEQY T | |
| Sbjct: | 1 | MSLVGKEMVEFSAQAYHQGEFVTVNNEDVKGKWAVFCFYPADFSFVCPTELGDLQEQYAT | 60 |
| Query: | 61 | LKSLDVEVYSVSTDTHFVHKAWHDDSDVVGTITYPMIGDPSHLISQGFDVLGQDGLAQRG | 120 |
| | | L+SL VEVYSVSTDTHFVHKAWHDDSDVVGTITY MIGDPSH++SQGF+VLG+DGLAQRG | |
| Sbjct: | 61 | LQSLGVEVYSVSTDTHFVHKAWHDDSDVVGTITYTMIGDPSHVLSQGFEVLGEDGLAQRG | 120 |
| Query: | 121 | TFIIDPDGVIQMMEINADGIGRDASTLIDKVRAAQYIRQHTGEVCPAKWKEGAETLTPSL | 180 |
| | | TFI+DPDG+IQMME+NADGIGRDASTLIDKVRAAQYIRQH GEVCPAKWKEGAETL PSL | |
| Sbjct: | 121 | TFIVDPDGIIQMMEVNADGIGRDASTLIDKVRAAQYIRQHPGEVCPAKWKEGAETLKPSL | 180 |
| Query: | 181 | DLVGKI | 186 |
| | | DLVGKI | |
| Sbjct: | 181 | DLVGKI | 186 |

[8084] A related DNA sequence was identified in S. pyogenes <SEQ ID 4517> which encodes the amino acid sequence <SEQ ID 4518>. Analysis of this protein sequence reveals the following:

Possible site: 15
>>> Seems to have no N-terminal signal sequence
----- Final Results -----
bacterial cytoplasm --- Certainty = 0.3022 (Affirmative) < succ>
bacterial membrane --- Certainty = 0.0000 (Not Clear) < succ>
bacterial outside --- Certainty = 0.0000 (Not Clear) < succ>

[8085] An alignment of the GAS and GBS proteins is shown below.

| Identities = 173/186 (93%), Positives = 181/186 (97%) | | | |
|---|---|---|---|
| Query: | 1 | MSLVGKEIIEFSAQAYHDGKFITVTNEDVKGKWAVFCFYPADFSFVCPTELGDLQEQYET | 60 |
| | | MSL+GKEI EFSAQAYHDGKFITVTNEDVKGKWAVFCFYPADFSFVCPTELGDLQEQYET | |
| Sbjct: | 1 | MSLIGKEIAEFSAQAYHDGKFITVTNEDVKGKWAVFCFYPADFSFVCPTELGDLQEQYET | 60 |
| Query: | 61 | LKSLDVEVYSVSTDTHFVHKAWHDDSDVVGTITYPMIGDPSHLISQGFDVLGQDGLAQRG | 120 |
| | | LKSL VEVYSVSTDTHFVHKAWHDDSDVVGTITYPMIGDPSHLISQ F+VLG+DGLAQRG | |
| Sbjct: | 61 | LKSLGVEVYSVSTDTHFVHKAWHDDSDVVGTITYPMIGDPSHLISQAFEVLGEDGLAQRG | 120 |
| Query: | 121 | TFIIDPDGVIQMMEINADGIGRDASTLIDKVRAAQYIRQHTGEVCPAKWKEGAETLTPSL | 180 |
| | | TFI+DPDG+IQMMEINADGIGRDASTLIDK+ AAQY+R+H GEVCPAKWKEGAETLTPSL | |
| Sbjct: | 121 | TFIVDPDGIIQMMEINADGIGRDASTLIDKIHAAQYVRKHPGEVCPAKWKEGAETLTPSL | 180 |
| Query: | 181 | DLVGKI | 186 |
| | | DLVGKI | |
| Sbjct: | 181 | DLVGKI | 186 |

[8086] Based on this analysis, it was predicted that these proteins and their epitopes could be useful antigens for vaccines or diagnostics.

### EXAMPLE 1471

[8087] A DNA sequence (GBSx1557) was identified in S. agalactiae <SEQ ID 4519> which encodes the amino acid sequence <SEQ ID 4520>. This protein is predicted to be 30S ribosomal protein S2 (rpsB). Analysis of this protein sequence reveals the following:

Possible site: 60
>>> Seems to have no N-terminal signal sequence
----- Final Results -----
bacterial cytoplasm --- Certainty = 0.4462 (Affirmative) < succ>
bacterial membrane --- Certainty = 0.0000 (Not Clear) < succ>
bacterial outside --- Certainty = 0.0000 (Not Clear) < succ>

[8088] The protein has homology with the following sequences in the GENPEPT database.

| >GP: CAA50276 GB: X70925 30S ribosomal protein [Pediococcus | | | |
|---|---|---|---|
| acidilactici] | | | |
| Identities = 190/260 (73%), Positives 226/260 (86%), Gaps = 4/260 (1%) | | | |
| Query: | 1 | MAVISMKQLLEAGVHFGHQTRRWNPKMAKYIFTERNGIHVIDLQQTVKLADQAYEFVRDA | 60 |
| | | M+VISMKQLLEAGVHFGHQTRRWNPKM +IFTERNGI++IDLQ+TVKL D AY FV+D | |
| Sbjct: | 1 | MSVISMKQLLEAGVHFGHQTRRWNPKMKPFIFTERNGIYIIDLQKTVKLIDNAYNFVKDV | 60 |
| Query: | 61 | AANDAVILFVGTKKQAAEAVAEEAKRAGQYFINHRWLGGTLTNWGTIQKRIARLKEIKRM | 120 |
| | | AAND V+LFVGTKKQA A+ EEAKRAGQ+++NHRWLGGTLTNW TIQKRI RLK++K+M | |
| Sbjct: | 61 | AANDGVVLFVGTKKQAQTAIEEEAKRAGQFYVNHRWLGGTLTNWNTIQKRIKRLKDLKKM | 120 |
| Query: | 121 | EEEGTFELLPKKEVALLNKQRARLEKFLGGIEDMPRIPDVMYVVDPHKEQIAVKEAKKLG | 180 |
| | | EE+GTF+ LPKKEVALLNKQ+ +LEKFLGGIEDMP IPDV++VVDP KEQIA+KEA+KL | |
| Sbjct: | 121 | EEDGTFDRLPKKEVALLNKQKDKLEKFLGGIEDMPHIPDVLFVVDPRKEQIAIKEAQKLN | 180 |
| Query: | 181 | IPVVAMVDTNADPDDIDVIIPANDDAIRAVKLITSKLADAVIEGRQGEDADV----DFAQ | 236 |
| | | IPVVAMVDTN DPD +DVIIP+NDDAIRAV+LITSK+ADAV+EGRQGED + + A+ | |
| Sbjct: | 181 | IPVVAMVDTNTDPDQVDVIIPSNDDAIRAVRLITSKMADAVVEGRQGEDDEAVQQEEVAE | 240 |
| Query: | 237 | EAQADSIEEIVEVVEGSNND | 256 |
| | | DS+E++ + VE +N+ | |
| Sbjct: | 241 | GVSKDSLEDLKKTVEEGSNE | 260 |

[8089] A related DNA sequence was identified in S. pyogenes <SEQ ID 4521> which encodes the amino acid sequence <SEQ ID 4522>. Analysis of this protein sequence reveals the following:

```
Possible site: 60
>>> Seems to have no N-terminal signal sequence
----- Final Results -----
                            bacterial cytoplasm --- Certainty = 0.4462(Affirmative) < succ>
                              bacterial membrane --- Certainty = 0.0000(Not Clear) < succ>
                                bacterial outside --- Certainty = 0.0000(Not Clear) < succ>
```

[8090] An alignment of the GAS and GBS proteins is shown below.

| Identities = 241/254 (94%), Positives = 248/254 (96%) | | | |
|---|---|---|---|
| Query: | 1 | MAVISMKQLLEAGVHFGHQTRRWNPKMAKYIFTERNGIHVIDLQQTVKLADQAYEFVRDA | 60 |
| | | MAVISMKQLLEAGVHFGHQTRRWNPKMAKYIFTERNGIHVIDLQQTVKLADQAYEFVRDA | |
| Sbjct: | 1 | MAVISMKQLLEAGVHFGHQTRRWNPKMAKYIFTERNGIHVIDLQQTVKLADQAYEFVRDA | 60 |
| Query: | 61 | AANDAVILFVGTKKQAAEAVAEEAKRAGQYFINHRWLGGTLTNWGTIQKRIARLKEIKRM | 120 |
| | | AANDAVILFVGTKKQAAEAVA+EA RAGQYFINHRWLGGTLTNWGTIQKRIARLKEIKRM | |
| Sbjct: | 61 | AANDAVILFVGTKKQAAEAVADEATRAGQYFINHRWLGGTLTNWGTIQKRIARLKEIKRM | 120 |
| Query: | 121 | EEEGTFELLPKKEVALLNKQRARLEKFLGGIEDMPRIPDVMYVVDPHKEQIAVKEAKKLG | 180 |
| | | EEEGTF++LPKKEVALLNKQRARLEKFLGGIEDMPRIPDVMYVVDPHKEQIAVKEAKKLG | |
| Sbjct: | 121 | EEEGTFDVLPKKEVALLNKQRARLEKFLGGIEDMPRIPDVMYVVDPHKEQIAVKEAKKLG | 180 |
| Query: | 181 | IPVVAMVDTNADPDDIDVIIPANDDAIRAVKLITSKLADAVIEGRQGEDADVDFAQEAQA | 240 |
| | | IPVVAMVDTNADPDDID+IIPANDDAIRAVKLIT+KLADA+IEGRQGEDADV F + QA | |
| Sbjct: | 181 | IPVVAMVDTNADPDDIDIIIPANDDAIRAVKLITAKLADAIIEGRQGEDADVAFEADTQA | 240 |
| Query: | 241 | DSIEEIVEVVEGSN | 254 |
| | | DSIEEIVEVVEG N | |
| Sbjct: | 241 | DSIEEIVEVVEGDN | 254 |

[8091] Based on this analysis, it was predicted that these proteins and their epitopes could be useful antigens for vaccines or diagnostics.

### EXAMPLE 1472

[8092] A DNA sequence (GBSx1558) was identified in S. agalactiae <SEQ ID 4523> which encodes the amino acid sequence <SEQ ID 4524>. Analysis of this protein sequence reveals the following:

```
Possible Site: 49
>>> Seems to have no N-terminal signal sequence
----- Final Results -----
                            bacterial cytoplasm --- Certainty = 0.2648(Affirmative) < succ>
                              bacterial membrane --- Certainty = 0.0000(Not Clear) < succ>
                                bacterial outside --- Certainty = 0.0000(Not Clear) < succ>
```

[8093] The protein has homology with the following sequences in the GENPEPT database.

| >GP: CAB73435 GB: AL139077 elongation factor TS [Campylobacter jejuni] | | | |
|---|---|---|---|
| Identities = 169/358 (47%), Positives = 226/358 (62%), Gaps = 19/358 (5%) | | | |
| Query: | 1 | MAEITAKLVKELREKSGAGVMDAKKALVETDGDLDKAIELLREKGMAKAAKKADRVAAEG | 60 |
| | | M EITA +VKELRE +GAG+MD K AL ET+GD DKA++LLREKG+ KAAKKADR+AAEG | |
| Sbjct: | 1 | MTEITAAMVKELRESTGAGMMDCKNALSETNGDFDKAVQLLREKGLGKAAKKADRLAAEG | 60 |
| Query: | 61 | LTGVYV--DGNVAAVIEVNAETDFVAKNDQFVTLVNETAKVIAEGRPSNNEEALALTMPS | 118 |
| | | L V V D A V E+N+ETDFVAKNDQF+ L +T I + EE + T+ + | |
| Sbjct: | 61 | LVSVKVSDDFTSATVSEINSETDFVAKNDQFIALTKDTTAHIQSNSLQSVEELHSSTI-N | 119 |
| Query: | 119 | GETLEQAFVTATATIGEKISFRRFALVEKTDEQHFGAYQHNGGRIGVITV-------VEG | 171 |
| | | G E+ + ATIGE + RRFA ++ Y H GR+GV+ V | |
| Sbjct: | 120 | GVKFEEYLKSQIATIGENLVVRRFATLKAGANGVVNGYIHTNGRVGVVIAAACDSAEVAS | 179 |
| Query: | 172 | GDDALAKQVSMHVAAMKPTVLSYTELDAQFVHDELAQLNHKIEQDNESRAMV---NKPAL | 228 |
| | | L +Q+ MH+AAM+P+ LSY +LD FV +E L ++E++NE R + NKP | |
| Sbjct: | 180 | KSRDLLRQICMHIAAMRPSYLSYEDLDMTFVENEYKALVAELEKENEERRRLKDPNKPEH | 239 |
| Query: | 229 | PFLKYGSKAQLTDEVIAQAEEDIKAELAAEGKPEKIWDKIVPGKMDRFMLDNTKVDQEYT | 288 |
| | | ++ S+ QL+D ++ +AEE IK EL A+GKPEKIWD I+PGKM+ F+ DN+++D + T | |
| Sbjct: | 240 | KIPQFASRKQLSDAILKEAEEKIKEELKAQGKPEKIWDNIIPGKMNSFIADNSQLDSKLT | 299 |
| Query: | 289 | LLAQVYIMDDSKTVEAYLESV------NAKAVAFVRFEVGEGIEKASNDFEAEVAATM | 340 |
| | | L+ Q Y+MDD KTVE + K V F+ FEVGEG+EK + DF AEVAA + | |
| Sbjct: | 300 | LMGQFYVMDDKKTVEQVIAEKEKEFGGKIKIVEFICFEVGEGLEKKTEDFAAEVAAQL | 357 |

[8094] A related DNA sequence was identified in S. pyogenes <SEQ ID 4525> which encodes the amino acid sequence <SEQ ID 4526>. Analysis of this protein sequence reveals the following:

```
Possible site: 38
>>> Seems to have no N-terminal signal sequence
----- Final Results -----
                            bacterial cytoplasm --- Certainty = 0.3942(Affirmative) < succ>
                              bacterial membrane --- Certainty = 0.0000(Not Clear) < succ>
                                bacterial outside --- Certainty = 0.0000(Not Clear) < succ>
```

[8095] An alignment of the GAS and GBS proteins is shown below.

| Identities = 307/344 (89%), Positives = 327/344 (94%) | | | |
|---|---|---|---|
| Query: | 1 | MAEITAKLVKELREKSGAGVMDAKKALVETDGDLDKAIELLREKGMAKAAKKADRVAAEG | 60 |
| | | MAEITAKLVKELREKSGAGVMDAKKALVETDGD+DKA+ELLREKGMAKAAKKADRVAAEG | |
| Sbjct: | 33 | MAEITAKLVKELREKSGAGVMDAKKALVETDGDMDKAVELLREKGMAKAAKKADRVAAEG | 92 |
| Query: | 61 | LTGVYVDGNVAAVIEVNAETDFVAKNDQFVTLVNETAKVIAEGRPSNNEEALALTMPSGE | 120 |
| | | LTGVYV GNVAAV+EVNAETDFVAKN QFV LVN TAKVIAEG+P+NN+EALAL MPSGE | |
| Sbjct: | 93 | LTGVYVHGNVAAVVEVNAETDFVAKNAQFVELVNATAKVIAEGKPANNDEALALVMPSGE | 152 |
| Query: | 121 | TLEQAFVTATATIGEKISFRRFALVEKTDEQHFGAYQHNGGRIGVITVVEGGDDALAKQV | 180 |
| | | TL +A+V ATATIGEKISFRRFAL+EK DEQHFGAYQHNGGRIGVI+VVEGGDDALAKQV | |
| Sbjct: | 153 | TLAEAYVNATATIGEKISFRRFALIEKADEQHFGAYQHNGGRIGVISVVEGGDDALAKQV | 212 |
| Query: | 181 | SMHVAAMKPTVLSYTELDAQFVHDELAQLNHKIEQDNESRAMVNKPALPFLKYGSKAQLT | 240 |
| | | SMH+AAMKPTVLSYTELDAQF+ DELAQLNH IE DNESRAMV+KPALPFLKYGSKAQL+ | |
| Sbjct: | 213 | SMHIAAMKPTVLSYTELDAQFIKDELAQLNHAIELDNESRAMVDKPALPFLKYGSKAQLS | 272 |
| Query: | 241 | DEVIAQAEEDIKAELAAEGKPEKIWDKIVPGKMDRFMLDNTKVDQEYTLLAQVYIMDDSK | 300 |
| | | D+VI AE DIKAELAAEGKPEKIWDKI+PGKMDRFMLDNTKVDQ YTLLAQVYIMDDSK | |
| Sbjct: | 273 | DDVITAAEADIKAELAAEGKPEKIWDKIIPGKMDRFMLDNTKVDQAYTLLAQVYIMDDSK | 332 |
| Query: | 301 | TVEAYLESVNAKAVAFVRFEVGEGIEKASNDFEAEVAATMAAAL | 344 |
| | | TVEAYL+SVNAKA+AF RFEVGEGIEK +NDFE+EVAATMAAAL | |
| Sbjct: | 333 | TVEAYLDSVNAKAIAFARFEVGEGIEKKANDFESEVAATMAAAL | 376 |

[8096] Based on this analysis, it was predicted that these proteins and their epitopes could be useful antigens for vaccines or diagnostics.

### EXAMPLE 1473

[8097] A DNA sequence (GBSx1559) was identified in S. agalactiae <SEQ ID 4527> which encodes the amino acid sequence <SEQ ID 4528>. Analysis of this protein sequence reveals the following:

```
Possible site: 21
>>> Seems to have no N-terminal signal sequence
----- Final Results -----
                            bacterial cytoplasm --- Certainty = 0.1312(Affirmative) < succ>
                              bacterial membrane --- Certainty= 0.0000(Not Clear) < succ>
                                bacterial outside --- Certainty = 0.0000(Not Clear) < succ>
```

[8098] The protein has no significant homology with any sequences in the GENPEPT database.

[8099] No corresponding DNA sequence was identified in S. pyogenes.

[8100] Based on this analysis, it was predicted that this protein and its epitopes, could be useful antigens for vaccines or diagnostics.

### EXAMPLE 1474

[8101] A DNA sequence (GBSx1560) was identified in S. agalactiae <SEQ ID 4529> which encodes the amino acid sequence <SEQ ID 4530>. Analysis of this protein sequence reveals the following:

| Possible site: 26 | | | | |
|---|---|---|---|---|
| >>> Seems to have a cleavable N-term signal seq. | | | | |
| | INTEGRAL | Likelihood = −7.86 | Transmembrane | 128-144 (124-152) |
| | INTEGRAL | Likelihood = −4.57 | Transmembrane | 35-51 (33-53) |
| | INTEGRAL | Likelihood = −4.04 | Transmembrane | 92-108 (87-111) |

```
----- Final Results -----
                              bacterial membrane --- Certainty= 0.4142(Affirmative) < succ>
                                bacterial outside --- Certainty = 0.0000(Not Clear) < succ>
                            bacterial cytoplasm --- Certainty = 0.0000(Not Clear) < succ>
```

[8102] The protein has homology with the following sequences in the GENPEPT database.

| >GP: BAB04953 GB: AP001511 small multidrug export related protein | | | |
|---|---|---|---|
| [Bacillus halodurans] | | | |
| Identities = 47/137 (34%), Positives = 71/137 (51%), Gaps = 5/137 (3%) | | | |
| Query: | 12 | IPLVELRGAVPFAIANGIPLWEALAIGVVGNMLPVPIIFFFARKVLEWGADKPYTGKFFT | 71 |
| | | +P+VELRG +P + G+ WEAL G++GN+LP+ I R + W + + + | |
| Sbjct: | 1 | MPIVELRGGIPLGVVLGLSPWEALLFGIIGNLLPIVPILLLFRPISGWMLRFKWYQRLYD | 60 |
| Query: | 72 | WCLKKGHSGGQKLEKVAGEKGLFIALLLFVGIPLPGTGAWTGTLAASLLDWEFKHSVIAV | 131 |
| | | W + +EK I L+LF +PLP TGA++ LAA L F+ + AV | |
| Sbjct: | 61 | WLYNRTMKKSNNVEKFGA-----IGLILFTAVPLPTTGAYSACLAAVLFFIPFRFAFFAV | 115 |
| Query: | 132 | MLGVILAGCIMGTLSII | 148 |
| | | GV++AG +M S I | |
| Sbjct: | 116 | SAGVVIAGIVMTLFSYI | 132 |

[8103] No corresponding DNA sequence was identified in S. pyogenes.

[8104] A related GBS gene <SEQ ID 8817> and protein <SEQ ID 8818> were also identified. Analysis of this protein sequence reveals the following:

| Lipop: Possible site: −1 Crend: 0 | | | | |
|---|---|---|---|---|
| McG: Discrim Score: 3.98 | | | | |
| GvH: Signal Score (−7.5): −2.35 | | | | |
| Possible site: 26 | | | | |
| >>> Seems to have a cleavable N-term signal seq. | | | | |
| ALOM program count: 3 value: −7.86 threshold: 0.0 | | | | |
| | INTEGRAL | Likelihood = −7.86 | Transmembrane | 128-144 (124-152) |
| | INTEGRAL | Likelihood = −4.57 | Transmembrane | 35-51 (33-53) |
| | INTEGRAL | Likelihood = −4.04 | Transmembrane | 92-108 (87-111) |
| | PERIPHERAL | Likelihood = 12.20 | 109 | |

```
modified ALOM score: 2.07
*** Reasoning Step: 3
----- Final Results -----
                              bacterial membrane --- Certainty = 0.4142(Affirmative) < succ>
                                bacterial outside --- Certainty = 0.0000(Not Clear) < succ>
                            bacterial cytoplasm --- Certainty = 0.0000(Not Clear) < succ>
LPXTG motif: 105-109
```

[8105] The protein has homology with the following sequences in the databases:

[chemical structure]

[8106] Based on this analysis, it was predicted that these proteins and their epitopes could be useful antigens for vaccines or diagnostics.

### EXAMPLE 1475

[8107] A DNA sequence (GBSx1561) was identified in S. agalactiae <SEQ ID 4531> which encodes the amino acid sequence <SEQ ID 4532>. This protein is predicted to be CtsR protein (ctsR). Analysis of this protein sequence reveals the following:

Possible site: 34
>>> Seems to have no N-terminal signal sequence
----- Final Results -----
bacterial cytoplasm --- Certainty = 0.3672 (Affirmative) < succ>
bacterial membrane --- Certainty = 0.0000 (Not Clear) < succ>
bacterial outside --- Certainty = 0.0000 (Not Clear) < succ>

[8108] The protein has homology with the following sequences in the GENPEPT database.

| >GP: CAB91548 GB: AJ249133 CtsR protein [Lactococcus lactis] | | | |
|---|---|---|---|
| Identities = 74/146 (50%), Positives = 103/146 (69%), Gaps = 3/146 (2%) | | | |
| Query: | 4 | KNTSDNIEEYIKSLLEQSGIAEIKRSNLADTFQVVPSQINYVIKTRFTESRGYVVESKRG | 63 |
| | | KNTSD IE Y++ LLE++ + EIKR++LA+ F VVPSQINYVIKTRFT S+G+ VESKRG | |
| Sbjct: | 5 | KNTSDIIEAYLRQLLEEAQVIEIKRADLANQFDVVPSQINYVIKTRFTASKGFDVESKRG | 64 |
| Query: | 64 | GGGYIRIAKVHFSDQHQLFGNMLSTIGERISEQVFDDLIQLLFDEEIITEREGNLILATS | 123 |
| | | GGGYI+I K +S +H+ + + +S + D++QLLFDE+++TEREGNL+L | |
| Sbjct: | 65 | GGGYIKIVKYQYSARHEFLTALYQKVPANLSSKAAHDIVQLLFDEKVLTEREGNLLLLVI | 124 |
| Query: | 124 | GDDVLGEQASVIRARMLRKLLQRLDR | 149 |
| | | D G + R M++ ++ RLDR | |
| Sbjct: | 125 | TD---GAISPFTRGIMMKSIINRLDR | 147 |

[8109] A related DNA sequence was identified in S. pyogenes <SEQ ID 4533> which encodes the amino acid sequence <SEQ ID 4534>. Analysis of this protein sequence reveals the following:

Possible site: 34
>>> Seems to have no N-terminal signal sequence
----- Final Results -----
bacterial cytoplasm --- Certainty = 0.2514 (Affirmative) < succ>
bacterial membrane --- Certainty = 0.0000 (Not Clear) < succ>
bacterial outside --- Certainty = 0.0000 (Not Clear) < succ>

[8110] An alignment of the GAS and GBS proteins is shown below.

| Identities = 117/151 (77%), Positives = 131/151 (86%) | | | |
|---|---|---|---|
| Query: | 1 | MAIKNTSDNIEEYIKSLLEQSGIAEIKRSNLADTFQVVPSQINYVIKTRFTESRGYVVES | 60 |
| | | M KNTSD+IEEYIK LL +SGIAEIKRS LAD+FQVVPSQINYVIKTRFTESRGY VES | |
| Sbjct: | 1 | MPTKNTSDSIEEYIKELLAKSGIAEIKRSMLADSFQVVPSQINYVIKTRFTESRGYEVES | 60 |
| Query: | 61 | KRGGGGYIRIAKVHFSDQHQLFGNMLSTIGERISEQVFDDLIQLLFDEEIITEREGNLIL | 120 |
| | | KRGGGGYIRIAKVHFSD+H L GN+++TI + ISEQVF D IQLLFDE ++TEREGN+IL | |
| Sbjct: | 61 | KRGGGGYIRIAKVHFSDKHHLIGNLMATIEDCISEQVFTDSIQLLFDEHLLTEREGNIIL | 120 |
| Query: | 121 | ATSGDDVLGEQASVIRARMLRKLLQRLDRKG | 151 |
| | | A + DDVLG S IRARML +LLQR+DRKG | |
| Sbjct: | 121 | AVASDDVLGTDGSTIRARMLYRLLQRIDRKG | 151 |

[8111] Based on this analysis, it was predicted that these proteins and their epitopes could be useful antigens for vaccines or diagnostics.

### EXAMPLE 1476

[8112] A DNA sequence (GBSx1562) was identified in S. agalactiae <SEQ ID 4535> which encodes the amino acid sequence <SEQ ID 4536>. This protein is predicted to be ClpC (clpB-1). Analysis of this protein sequence reveals the following:

| Possible site: 49 | | | |
|---|---|---|---|
| >>> Seems to have no N-terminal signal sequence | | | |
| INTEGRAL | Likelihood = −2.34 | Transmembrane | 32-48 (32-49) |

----- Final Results -----
bacterial membrane --- Certainty = 0.1935 (Affirmative) < succ>
bacterial outside --- Certainty = 0.0000 (Not Clear) < succ>
bacterial cytoplasm --- Certainty = 0.0000 (Not Clear) < succ>

[8113] The protein has homology with the following sequences in the GENPEPT database.

| >GP: AAD01783 GB: AF023422 ClpC [Lactococcus lactis] | | | |
|---|---|---|---|
| Identities = 401/831 (48%), Positives = 571/831 (68%), Gaps = 52/831 (6%) | | | |
| Query: | 4 | YSIKLQEVFRLAQFQAARYESHYLESWHLLLAMVLVHDSVAGLTFAEYE---SEVAIEEY | 60 |
| | | Y+ L +F A A +Y+ +ES HLL AM S+A A S++ I+ | |
| Sbjct: | 8 | YTPTLDRIFEKAAEYAHQYQYGTIESAHLLAAMATTSGSIAYSILAGMNVDSSDLLIDLE | 67 |
| Query: | 61 | EAATILALGRAPKEEITNYQFLEQSPALKKILKLAENISIVVGAEDVGTEHVLLAMLVNK | 120 |
| | | + ++ + + R+ L SP ++++ +A +++ AE VGTEH+L A+L + | |
| Sbjct: | 68 | DLSSHVKVKRSE---------LRFSPRAEEVVTVASFLAVHNNAEAVGTEHLLYALLQVE | 118 |
| Query: | 121 | DLLATRILELVGFRGQDDGESVRMVDLRKALERHAGF-TKDDIKAIYELRNPKKAKSGAS | 179 |
| | | D ++L+L + + +V LRK +E+ G ++ KA+ + K AK A | |
| Sbjct: | 119 | DGFGLQLLKL---------QKINIVSLRKEIEKRTGLIVPENKKAVTPMSKRKMAKGVAE | 169 |
| Query: | 180 | FSDMMKPPSTAGDLADFTRDLSQMAVDGEIEPVIGRDKEISRMVQVLSRKTKNNPVLVGD | 239 |
| | | S+ L + DL++ A G+++P+IGR+ E+ R++ +LSR+TKNNPVLVG+ | |
| Sbjct: | 170 | -------NSSTPTLDSVSSDLTEAARSGKLDPMIGREAEVDRLIHILSRRTKNNPVLVGE | 222 |
| Query: | 240 | AGVGKTALAYGLAQRIANGNIPYELRDMRVLELDDMMSVVAGTRFRGDFEERMNQIIADIE | 299 |
| | | GVGK+A+ GLAQRI NG +P L + R++ L+M +VVAGT+FRG+FE+R+ I+ ++ | |
| Sbjct: | 223 | PGVGKSAIIEGLAQRIVNGQVPIGLMNSRIMALNMATVVAGTKFRGEFEDRLTAIVEEVS | 282 |
| Query: | 300 | EDGHIILFIDELHTIMGSGSGIDSTLDAANILKPALARGTLRTVGATTQEEYQKHIEKDA | 359 |
| | | D +I+FIDELHTI+G+G G+DS DAANILKPALARG + VGATT EYQK+IEKD | |
| Sbjct: | 283 | ADPDVIIFIDELHTIIGAGGGMDSVNDAANILKPALARGDFQMVGATTYHEYQKYIEKDE | 342 |
| Query: | 360 | ALSRRFAKVLVEEPNLEDAYEILLGLKPAYEAFHNVTISDEAVMTAVKVAHRYLTSKNLP | 419 |
| | | AL RR A++ V+EP+ ++A IL GL+ +E +H V +D+A+ +AV ++ RY+TS+ LP | |
| Sbjct: | 343 | ALERRLARINVDEPSPDEAIAILQGLREKFEDYHQVKFTDQAIKSAVTLSVRYMTSRKLP | 402 |
| Query: | 420 | DSAIDLLDEASATVQMMIKKNAPSLLT----------EVDQAILDDDMKSA--------- | 460 |
| | | D AIDLLDEA+A V++++K ++ E+ +A++ D+K++ | |
| Sbjct: | 403 | DKAIDLLDEAAARVKILLKTKKQNVFELEKDFVKAQEELAEAVIKLDVKASRIKEKAVEK | 462 |
| Query: | 461 | --SKALKASYKGKKRKPIAVTEDHIMATLSRLSGIPVEKLTQADSKKYLNLEKELHKRVI | 518 |
| | | K K S K +KR+ VT+ ++A S L+G+P+ ++T+++S + +NLEKELHKRV+ | |
| Sbjct: | 463 | ISDKIYKFSIKEEKRQE--VTDQAVIAVASTLTGVPITQMTKSESDRLINLEKELHKRVV | 520 |
| Query: | 519 | GQDDAVTAISRAIRRNQSGIRTGKRPIGSFMFLGPTGVGKTELAKALAEVLFDDESALIR | 578 |
| | | GQ++A++A+SRAIRR +SG+ +RP+GSFMFLGPTGVGKTELAKALA+ +F E +IR | |
| Sbjct: | 521 | GQEEAISAVSRAIRRARSGVADSRRPMGSFMFLGPTGVGKTELAKALADSVFGSEDNMIR | 580 |
| Query: | 579 | FDMSEYMEKFAASHLNGAPPGYVGYDEGGELTEKVRNKPYSVLLFDEVEKAHPDIFNVLL | 638 |
| | | DMSE+MEK + S L GAPPGYVGYDEGG+LTE+VRNKPYSV+L DEVEKAH D+FN++L | |
| Sbjct: | 581 | VDMSEFMEKHSTSRLIGAPPGYVGYDEGGQLTERVRNKPYSVVLLDEVEKAHLDVFNIML | 640 |
| Query: | 639 | QVLDDGVLTDSRGRKVDFSNTIIIMTSNLGATALRDDKTVGFGAKDISHDYTAMQKRIME | 698 |
| | | Q+LDDG +TD++GRKVDF NTIIIMTSNLGATALRDDKTVGFGAK+I+ DY+AMQ RI+E | |
| Sbjct: | 641 | QILDDGFVTDTKGRKVDFRNTIIIMTSNLGATALRDDKTVGFGAKNITADYSAMQSRILE | 700 |
| Query: | 699 | ELKKAYRPEFINRIDEKVVFHSLSQDNMREVVKIMVKPLILALKDKGMDLKFQPSALKHL | 758 |
| | | ELK+ YRPEF+NRIDE +VFHSL + ++VKIM K LI L ++ + +K PSA+K + | |
| Sbjct: | 701 | ELKRHYRPEFLNRIDENIVFHSLESQEIEQIVKIMSKSLIKRLAEQDIHVKLTPSAIKLI | 760 |
| Query: | 759 | AEDGYDIEMGARPLRRTIQTQVEDHLSELLLANQVKEGQVIKIGVSKGKLK | 809 |
| | | AE G+D E GARPLR+ +Q +VED LSE LL+ ++K G I IG S K+K | |
| Sbjct: | 761 | AEVGFDPEYGARPLRKALQKEVEDLLSEQLLSGEIKAGNHISIGASNKKIK | 811 |

[8114] A related DNA sequence was identified in S. pyogenes <SEQ ID 4537> which encodes the amino acid sequence <SEQ ID 4538>. Analysis of this protein sequence reveals the following:

| Possible site: 44 | | | |
|---|---|---|---|
| >>> Seems to have no N-terminal signal sequence | | | |
| INTEGRAL | Likelihood = −1.75 | Transmembrane | 32-48 (32-48) |

----- Final Results -----
bacterial membrane --- Certainty = 0.1702 (Affirmative) < succ>
bacterial outside --- Certainty = 0.0000 (Not Clear) < succ>
bacterial cytoplasm --- Certainty = 0.0000 (Not Clear) < succ>
RGD motif: 285-287

[8115] An alignment of the GAS and GBS proteins is shown below.

| Identities = 618/814 (75%), Positives = 716/814 (87%), Gaps = 1/814 (0%) | | | |
|---|---|---|---|
| Query: | 1 | MSHYSIKLQEVFRLAQFQAARYESHYLESWHLLLAMVLVHDSVAGLTFAEYESEVAIEEY | 60 |
| | | M YS K+Q++FR AQFQAAR++SH LE+WH+LLAMV V +S+A + +EY+++VAIEEY | |
| Sbjct: | 1 | MIMYSTKMQDIFRQAQFQAARFDSHCLETWHVLLAMVAVDNSLANMILSEYDAQVAIEEY | 60 |
| Query: | 61 | EAATILALGRAPKEEITNYQFLEQSPALKKILKLAENISIVVGAEDVGTEHVLLAMLVNK | 120 |
| | | EAA ILA+G+ PKE+++ F QS L +L A+ IS + ++VG+EHVL A+L+N | |
| Sbjct: | 61 | EAAAILAMGKTPKEQLSRVDFRPQSKTLTNLLAFAQAISQITRDQEVGSEHVLFAILLNP | 120 |
| Query: | 121 | DLLATRILELVGFRGQDDGESV-RMVDLRKALERHAGFTKDDIKAIYELRNPKKAKSGAS | 179 |
| | | D++A+R+LE+ G++ +D+G R+ DLRKA+ERHAG++K+ IKAI+ELR PKK K+ + | |
| Sbjct: | 121 | DIMASRLLEIAGYQIKDNGNGQPRLADLRKAIERHAGYSKEMIKAIHELRKPKKTKTQGT | 180 |
| Query: | 180 | FSDMMKPPSTAGDLADFTRDLSQMAVDGEIEPVIGRDKEISRMVQVLSRKTKNNPVLVGD | 239 |
| | | FSDMMKPPSTAG+L+DFTRDL++MA G +E VIGRD+E+SRM+QVLSRKTKNNPVLVGD | |
| Sbjct: | 181 | FSDMMKPPSTAGELSDFTRDLTEMARQGLLESVIGRDQEVSRMIQVLSRKTKNNPVLVGD | 240 |
| Query: | 240 | AGVGKTALAYGLAQRIANGNIPYELRDMRVLELDMMSVVAGTRFRGDFEERMNQIIADIE | 299 |
| | | AGVGRTALAYGLAQRIANG IPYEL++MRVLELDMMSVVAGTRFRGDFEERMNQII DIE | |
| Sbjct: | 241 | AGVGKTALAYGLAQRIANGAIPYELKEMRVLELDMMSVVAGTRFRGDFEERMNQIIDDIE | 300 |
| Query: | 300 | EDGHIILFIDELHTIMGSGSGIDSTLDAANILKPALARGTLRTVGATTQEEYQKHIEKDA | 359 |
| | | DG IILF+DELHTIMGSGSGIDSTLDAANILKPAL+RGTL VGATTQEEYQKHIEKDA | |
| Sbjct: | 301 | ADGQIILFVDELHTIMGSGSGIDSTLDAANILKPALSRGTLHMVGATTQEEYQKHIEKDA | 360 |
| Query: | 360 | ALSRRFAKVLVEEPNLEDAYEILLGLKPAYEAFHNVTISDEAVMTAVKVAHRYLTSKNLP | 419 |
| | | ALSRRFAK+L+EEPN EDAY+IL+GLK +YE +HNV+IS+EAV TAVK+AHRYLTSKNLP | |
| Sbjct: | 361 | ALSRRFAKILIEEPNTEDAYQILMGLKLSYETYHNVSISNEAVKTAVKMAHRYLTSKNLP | 420 |
| Query: | 420 | DSAIDLLDEASATVQMMIKKNAPSLLTEVDQAILDDDMKSASKALKASYKGKKRKPIAVT | 479 |
| | | DSAIDLLDEASA VQ M+KK+AP LT +DQA+++ DMK S+ L KG+ RKP VT | |
| Sbjct: | 421 | DSAIDLLDEASAAVQNMVKKSAPETLTPIDQALINGDMKKVSRLLAKEAKGQMRKPTPVT | 480 |
| Query: | 480 | EDHIMATLSRLSGIPVEKLTQADSKKYLNLEKELHKRVIGQDDAVTAISRAIRRNQSGIR | 539 |
| | | ED I+ATLS+LSGIP+EKLTQADSKKYLNLEKELHKRVIGQD AVTAISRAIRRNQSGIR | |
| Sbjct: | 481 | EDDILATLSKLSGIPLEKLTQADSKKYLNLEKELHKRVIGQDAAVTAISRAIRRNQSGIR | 540 |
| Query: | 540 | TGKRPIGSFMFLGPTGVGKTELAKALAEVLFDDESALIRFDMSEYMEKFAASHLNGAPPG | 599 |
| | | TGKRPIGSFMFLGPTGVGKTELAKALAEVLFDDE+ALIRFDMSEYMEKFAAS LNGAPPG | |
| Sbjct: | 541 | TGKRPIGSFMFLGPTGVGKTELAKALAEVLFDDEAALIRFDMSEYMEKFAASRLNGAPPG | 600 |
| Query: | 600 | YVGYDEGGELTEKVRNKPYSVLLFDEVEKAHPDIFNVLLQVLDDGVLTDSRGRKVDFSNT | 659 |
| | | YVGYDEGGELT+KVRNKPYSVLLFDEVEKAHPDIFNVLLQVLDDG+LTDSRGRKVDFSNT | |
| Sbjct: | 601 | YVGYDEGGELTQKVRNKPYSVLLFDEVEKAHPDIFNVLLQVLDDGILTDSRGRKVDFSNT | 660 |
| Query: | 660 | IIIMTSNLGATALRDDKTVGFGAKDISHDYTAMQKRIMEELKKAYRPEFINRIDEKVVFH | 719 |
| | | IIIMTSNLGATALRDDKTVGFG KDI D+ AM+KRI+EEL+IK YRPEFINRIDEKVVFH | |
| Sbjct: | 661 | IIIMTSNLGATALRDDKTVGFGVKDIHQDHQAMEKRILEELRKTYRPEFINRIDEKVVFH | 720 |
| Query: | 720 | SLSQDNMREVVKIMVKPLILALKDKGMDLKFQPSALKHLAEDGYDIEMGARPLRRTIQTQ | 779 |
| | | SL+QDNMR+VVKIMV+PLI L +KG+ LK QP ALKHL+E GYD MGARPLRRT+QT+ | |
| Sbjct: | 721 | SLTQDNMRDVVKIMVQPLITTLAEKGITLKIQPLALKHLSEVGYDEHMGARPLRRTLQTE | 780 |
| Query: | 780 | VEDHLSELLLANQVKEGQVIKIGVSKGKLKFDIA | 813 |
| | | +ED LSEL+L+ ++ G +KIG+S GKL F IA | |
| Sbjct: | 781 | IEDKLSELILSRELTSGHTLKIGLSHGKLTFHIA | 814 |

[8116] A related GBS gene <SEQ ID 8819> and protein <SEQ ID 8820> were also identified. Analysis of this protein sequence reveals the following:

| Lipop: Possible Site: −1 Crend: 9 | | |
|---|---|---|
| McG: Discrim Score: −13.52 | | |
| GvH: Signal Score (−7.5): −2.1 | | |
| Possible site: 49 | | |
| >>> Seems to have no N-terminal signal sequence | | |
| ALOM program count: 1 | value: −2.34 | threshold: 0.0 |

| | | | |
|---|---|---|---|
| INTEGRAL | Likelihood = −2.34 | Transmembrane | 32-48 (32-49) |
| PERIPHERAL | Likelihood = 0.95 | 112 | |

modified ALOM score: 0.97
*** Reasoning Step: 3
----- Final Results -----
bacterial membrane --- Certainty = 0.1935 (Affirmative) < succ>
bacterial outside --- Certainty = 0.0000 (Not Clear) < succ>
bacterial cytoplasm --- Certainty = 0.0000 (Not Clear) < succ>

[8117] The protein has homology with the following sequences in the databases:

[chemical structure]

[8118] There is also homology to SEQ ID 258.

[8119] SEQ ID 8820 (GBS26) was expressed in E. coli as a His-fusion product. SDS-PAGE analysis of total cell extract is shown in FIG. 7 (lane 9; MW 93.3 kDa), in FIG. 167 (lane 16 & 17; MW 108 kDa) and in FIG. 239 (lane 14; MW 108 kDa). It was also expressed in E. coli as a GST-fusion product. SDS-PAGE analysis of total cell extract is shown in FIG. 15 (lane 7; MW 18 kDa).

[8120] Based on this analysis, it was predicted that these proteins and their epitopes could be useful antigens for vaccines or diagnostics.

### EXAMPLE 1477

[8121] A DNA sequence (GBSx1563) was identified in S. agalactiae <SEQ ID 4539> which encodes the amino acid sequence <SEQ ID 4540>. Analysis of this protein sequence reveals the following:

```
Possible site: 17
>>> Seems to have a cleavable N-term signal seq.
----- Final Results -----
                                bacterial outside --- Certainty = 0.3000(Affirmative) < succ>
                              bacterial membrane --- Certainty = 0.0000(Not Clear) < succ>
                            bacterial cytoplasm --- Certainty = 0.0000(Not Clear) < succ>
```

[8122] A related DNA sequence was identified in S. pyogenes <SEQ ID 4541> which encodes the amino acid sequence <SEQ ID 4542>. Analysis of this protein sequence reveals the following:

```
Possible site: 17
>>> Seems to have a cleavable N-term signal seq.
----- Final Results -----
                                bacterial outside --- Certainty = 0.3000(Affirmative) < succ>
                              bacterial membrane --- Certainty = 0.0000(Not Clear) < succ>
                            bacterial cytoplasm --- Certainty = 0.0000(Not Clear) < succ>
```

[8123] An alignment of the GAS and GBS proteins is shown below.

| Identities = 178/213 (83%), Positives = 199/213 (92%) | | | |
|---|---|---|---|
| Query: | 1 | MLIVLAGTIGAGKSSLAAALGQHLGTDVFYEAVDNNPVLDLYYQDPQKYAFLLQIFFLNK | 60 |
| | | MLIVLAGTIGAGKSSLAAALG+HLGTDVFYEAVDNNPVLDLYYQDP+KYAFLLQI+FLNK | |
| Sbjct: | 1 | MLIVLAGTIGAGKSSLAAALGEHLGTDVFYEAVDNNPVLDLYYQDPKKYAFLLQIYFLNK | 60 |
| Query: | 61 | RFQSIKEAYKANNNVLDRSIFEDELFLTLNYKNGNVTKTELDIYKELLANMLEELEGMPK | 120 |
| | | RF+SIKEAY+A+NN+LDRSIFEDELFL LNYKNGNVTKTELDIY+ELLANMLEELEGMPK | |
| Sbjct: | 61 | RFKSIKEAYQADNNILDRSIFEDELFLKLNYKNGNVTKTELDIYQELLANMLEELEGMPK | 120 |
| Query: | 121 | KRPDLLVYIDVSFDKMLERIDKRGRSFEQVDSNPELYDYYKQVHSEYPEWYENYDVSPKI | 180 |
| | | KRPDLL+YIDVSFDKMLERI++RGRSFEQVD NP L YY QVH EYP WYE+Y+VSPK+ | |
| Sbjct: | 121 | KRPDLLIYIDVSFDKMLERIERRGRSFEQVDGNPSLEQYYHQVHGEYPTWYEDYEVSPKM | 180 |
| Query: | 181 | RIDGNKLDFVKNPEDLQHVLDTIDSELQKLDLL | 213 |
| | | +IDGN LDFV+NP+DL VL ID++L++L LL | |
| Sbjct: | 181 | KIDGNSLDFVQNPQDLATVLKMIDTKLKELHLL | 213 |

[8124] A related GBS gene <SEQ ID 8821> and protein <SEQ ID 8822> were also identified. Analysis of this protein sequence reveals the following:

```
Lipop: Possible Site: −1 Crend: 0
McG: Discrim Score: 3.94
GvH: Signal Score (−7.5): 1.42
          Possible site: 17
>>> Seems to have a cleavable N-term signal seq.
ALOM program count: 0 value: 7.69 threshold: 0.0
      PERIPHERAL Likelihood = 7.69 49
modified ALOM score: −2.04
*** Reasoning Step: 3
----- Final Results -----
                                bacterial outside --- Certainty = 0.3000(Affirmative) < succ>
                              bacterial membrane --- Certainty = 0.0000(Not Clear) < succ>
                            bacterial cytoplasm --- Certainty = 0.0000(Not Clear) < succ>
```

[8125] SEQ ID 4540 (GBS9) was expressed in E. coli as a GST-fusion product. SDS-PAGE analysis of total cell extract is shown in FIG. 1 (lane 5; MW 52 kDa) and FIG. 12 (lane 2 & 3; MW 50.3 kDa). It was also expressed in E. coli as a His-fusion product. SDS-PAGE analysis of total cell extract is shown in FIG. 2 (lane 6; MW 27 kDa) and FIG. 3 (lane 2; MW 25 kDa). The GBS9-GST fusion product was purified (FIG. 191, lane 6) and used to immunise mice. The resulting antiserum was used for FACS (FIG. 318), which confirmed that the protein is immunoaccessible on GBS bacteria.

[8126] Based on this analysis, it was predicted that these proteins and their epitopes could be useful antigens for vaccines or diagnostics.

### EXAMPLE 1478

[8127] A DNA sequence (GBSx1564) was identified in S. agalactiae <SEQ ID 4543> which encodes the amino acid sequence <SEQ ID 4544>. Analysis of this protein sequence reveals the following:

```
Possible site: 36
>>> Seems to have no N-terminal signal sequence
----- Final Results -----
                            bacterial cytoplasm --- Certainty = 0.1182(Affirmative) < succ>
                              bacterial membrane --- Certainty = 0.0000(Not Clear) < succ>
                                bacterial outside --- Certainty = 0.0000(Not Clear) < succ>
```

[8128] A related DNA sequence was identified in S. pyogenes <SEQ ID 4545> which encodes the amino acid sequence <SEQ ID 4546>. Analysis of this protein sequence reveals the following:

```
Possible site: 60
>>> Seems to have no N-terminal signal sequence
----- Final Results -----
                              bacterial membrane --- Certainty = 0.0000(Not Clear) < succ>
                                bacterial outside --- Certainty = 0.0000(Not Clear) < succ>
                            bacterial cytoplasm --- Certainty = 0.0000(Not Clear) < succ>
```

[8129] An alignment of the GAS and GBS proteins is shown below.

| Identities = 281/323 (86%), Positives = 305/323 (93%) | | | |
|---|---|---|---|
| Query: | 3 | QLNSSFMIGKVEIPHRTVLAPMAGITNSAFRTIAKEFGAGLVVMEMISEKGLLYNNEKTL | 62 |
| | | +LNSSF IG VEIPHRTVLAPMAG+TNSAFRTIAKEFGAGLVVMEMISEKGLLYNNEKTL | |
| Sbjct: | 27 | KLNSSFRIGDVEIPHRTVLAPMAGVTNSAFRTIAKEFGAGLVVMEMISEKGLLYNNEKTL | 86 |
| Query: | 63 | HMLHIDENEHPMSIQLFGGDAEGLKRAADFIQSNTKADIVDINMGCPVNKVVKNEAGAKW | 122 |
| | | HMLHIDENEHPMSIQLFGGDAEGLKRAADFIQ+NTKADIVDINMGCPVNKVVKNEAGAKW | |
| Sbjct: | 87 | HMLHIDENEHPMSIQLFGGDAEGLKRAADFIQTNTKADIVDINMGCPVNKVVKNEAGAKW | 146 |
| Query: | 123 | LRDPEKIYHIVKEVTSVLDIPLTVKMRTGWSDSSNAIENALAAESAGVSALAMHGRTREQ | 182 |
| | | LRDP+KIYHIVKEVTSVLDIPLTVKMRTGW+DSS A+ENALAAESAGVSALAMHGRTREQ | |
| Sbjct: | 147 | LRDPDKIYHIVKEVTSVLDIPLTVKMRTGWADSSLAVENALAAESAGVSALAMHGRTREQ | 206 |
| Query: | 183 | MYTGTCDHETLGKVAKAVTSIPFIANGDIRTVHDAKFMIEEIGADAIMVGRGARSNPYIF | 242 |
| | | MYTGTCDHETL +V+KA+T IPFI NGD+R+V DAKFMIEEIG DA+M+GR A +NPY+F | |
| Sbjct: | 207 | MYTGTCDHETLARVSKAITKIPFIGNGDVRSVQDAKFMIEEIGVDAVMIGRAAMNNPYLF | 266 |
| Query: | 243 | TQINHFFETGEILFDLPFEKMLDVAEDHLTRLVNLKGETIAVREFRGLAFHYLRGKSGAA | 302 |
| | | TQINHFFETG+ LPDLPF K LD+A+DHL RL+NLKGETIAVREFRGLAPHYLRG +GAA | |
| Sbjct: | 267 | TQINHFFETGQELPDLPFAKKLDIAKDHLKRLINLKGETIAVREFRGLAPHYLRGTAGAA | 326 |
| Query: | 303 | KIRGAVSRAETLAEVQELFAGLR | 325 |
| | | K+RGAVSRAETLAEV+ + F +R | |
| Sbjct: | 327 | KVRGAVSRAETLAEVEAIFETVR | 349 |

[8130] Based on this analysis, it was predicted that these proteins and their epitopes could be useful antigens for vaccines or diagnostics.

### EXAMPLE 1479

[8131] A DNA sequence (GBSx1565) was identified in S. agalactiae <SEQ ID 4547> which encodes the amino acid sequence <SEQ ID 4548>. Analysis of this protein sequence reveals the following:

```
Possible site: 53
>>> Seems to have no N-terminal signal sequence
----- Final Results -----
                            bacterial cytoplasm --- Certainty = 0.2164(Affirmative) < succ>
                              bacterial membrane --- Certainty = 0.0000(Not Clear) < succ>
                                bacterial outside --- Certainty = 0.0000(Not Clear) < succ>
```

[8132] There is also homology to SEQ ID 3930:

| Identities = 235/288 (81%), Positives = 259/288 (89%) | | | |
|---|---|---|---|
| Query: | 1 | MDKIIKSISTSGSFRAYVLDCTSTVRTAQEKHQTLSSSTVALGRTLIANQILAANQKGNS | 60 |
| | | MDKIIKSI+ SG+FRAYVLD TETV AQEKH TLSSSTVALGRTLIANQILAANQKG+S | |
| Sbjct: | 1 | MDKIIKSIAQSGAFRAYVLDSTETVALAQEKHNTLSSSTVALGRTLIANQILAANQKGDS | 60 |
| Query: | 61 | KVTVKVIGDSSFGHIISVADTKGNVKGYIQNTGVDIKKTATGEVLVGPFMGNGHFVVITD | 120 |
| | | K+TVKVIGDSSFGHIISVADTKG+VKGYIQNTGVDIKKTATGEVLVGPFMGNGHFV I D | |
| Sbjct: | 61 | KITVKVIGDSSFGHIISVADTKGHVKGYIQNTGVDIKKTATGEVLVGPFMGNGHFVTIID | 120 |
| Query: | 121 | YATGQPYTSTTPLITGEIGEDFAYYLTESEQTPSAVGLNVLLDDEDKVKVAGGFMLQVLP | 180 |
| | | Y TG PYTSTTPLITGEIGEDFAYYLTESEQTPSA+GLNVLLD+ DKVKVAGGFM+QVLP | |
| Sbjct: | 121 | YGTGNPYTSTTPLITGEIGEDFAYYLTESEQTPSAIGLNVLLDENDKVKVAGGFMVQVLP | 180 |
| Query: | 181 | GASDEEISRYEKRIQEMPSISSLLESENHIESLLSAIYGEDDYKRLSEDSLAFYCDCSKE | 240 |
| | | GAS+EEI+RYEKR+QEMP+IS LL S+NH+++LL AIYG++ YKRLSE+ L+F CDCS+E | |
| Sbjct: | 181 | GASEEEIARYEKRLQEMPAISHLLASKNHVDALLEAIYGDEPYKRLSEEPLSFQCDCSRE | 240 |
| Query: | 241 | RFEAALLTLGTKELQAMKDEDKGVEITCQFCNQTYYFTEEDLEKIIND | 288 |
| | | RFEAAL+TL +LQAM DEDKG EI CQFC Y F E DLE II+D | |
| Sbjct: | 241 | RFEAALMTLPKADLQAMIDEDKGAEIVCQFCGTKYQFNESDLEAIISD | 288 |

[8133] Based on this analysis, it was predicted that this protein and its epitopes, could be useful antigens for vaccines or diagnostics.

### EXAMPLE 1480

[8134] A DNA sequence (GBSx1566) was identified in S. agalactiae <SEQ ID 4549> which encodes the amino acid sequence <SEQ ID 4550>. This protein is predicted to be surface-located membrane protein 1 (Imp1). Analysis of this protein sequence reveals the following:

```
Possible site: 51
>>> Seems to have no N-terminal signal sequence
----- Final Results -----
                            bacterial cytoplasm --- Certainty = 0.4312(Affirmative) < succ>
                              bacterial membrane --- Certainty = 0.0000(Not Clear) < succ>
                                bacterial outside --- Certainty = 0.0000(Not Clear) < succ>
```

[8135] The protein has homology with the following sequences in the GENPEPT database.

| >GP: AAB93480 GB: AF019377 tellurite resistance protein [Rhodobacter | | | |
|---|---|---|---|
| sphaeroides] | | | |
| Identities = 64/350 (18%), Positives = 146/350 (41%), Gaps = 7/350 (2%) | | | |
| Query: | 44 | LTPAQKSAISEKTPALVDTFVGDQNALLDFGQSAVEGVNTTVNHILSEQKKIQIPQVDDL | 103 |
| | | L A E + + V D +++ FG A + T +L++ K + D | |
| Sbjct: | 34 | LASAPPEKAQEIRRRMAELNVSDSQSIIGFGSKAQAELQTISQQMLADVKNKDVGPAGDS | 93 |
| Query: | 104 | LKNANRELNGFIAKYKDATPAELEKKPNLIQKLFKQSKTSLQEFYFDSQNIEQKMDMMAA | 163 |
| | | L+ + GF + ++ +K + ++L ++ F ++++Q++D + | |
| Sbjct: | 94 | LREVVSTIRGF-----SVSEFDVRRKASWWERLLGRT-APFARFVARYEDVQQQIDRITQ | 147 |
| Query: | 164 | NVVKQEDTLARNIVSAEMLIEDNTKSIENLVGVIAFIESSQAEAANRASHLQQEILALDS | 223 |
| | | +++ E L ++I ++L + L IA + A+ R ++ +A | |
| Sbjct: | 148 | SLLTHEHRLLKDIKGLDILYARTLDFYDELALYIAAGDEVLADLDGRVIPAKEAEVAATP | 207 |
| Query: | 224 | QTSEYQIKSNQLARMTEVINTLEQQHPEYVSRLYVAWATTPQMRNLVKVSSDMRQKLGML | 283 |
| | | + + IK+ +L + + LE++ + V + P +R + + + ++ | |
| Sbjct: | 208 | E-GDRMIKAQELRDLRAARDDLERRVHDLKLTRQVTMQSLPSIRLVQENDKALVTRINST | 266 |
| Query: | 284 | RRNTIPTMKLSIAQLGMMQQSVKSGVTADAIVNANNAALQMLAETSKEAIPMLEKTAQSP | 343 |
| | | NT+P + +AQ +Q+S ++ + N L AE ++A ++ K + | |
| Sbjct: | 267 | LVNTVPLWETQLAQAVTIQRSREAAEAVRGASDLTNELLTANAENLQQANKIVRKEMERG | 326 |
| Query: | 344 | TVSIKSVTALAESLVAQNNGIIAAIDKGRKERAQLESAVIKSAETINDSV | 393 |
| | | I++V +L+A N +A D+GR RA E+ + + + D++ | |
| Sbjct: | 327 | VFDIEAVKKANATLIATINESLAIADEGRARRATAETELQRMEAELRDTL | 376 |

[8136] A related DNA sequence was identified in S. pyogenes <SEQ ID 4551> which encodes the amino acid sequence <SEQ ID 4552>. Analysis of this protein sequence reveals the following:

```
Possible site: 55
>>> Seems to have no N-terminal signal sequence
----- Final Results -----
                            bacterial cytoplasm --- Certainty = 0.3230(Affirmative) < succ>
                              bacterial membrane --- Certainty = 0.0000(Not Clear) < succ>
                                bacterial outside --- Certainty = 0.0000(Not Clear) < succ>
```

[8137] An alignment of the GAS and GBS proteins is shown below.

| Identities = 333/413 (80%), Positives = 379/413 (91%) | | | |
|---|---|---|---|
| Query: | 5 | FNFDIDQIADNAITKTDKTTEIISNQTTSQTGQIAFFEKLTPAQKSAISEKTPALVDTFV | 64 |
| | | FNFDIDQIADNA+ KTDKTT+IIS+ T GQI+FFEKL+ Q++AI+ K PALVDTF+ | |
| Sbjct: | 4 | FNFDIDQIADNAVIKTDKTTDIISDLPTDTNGQISFFEKLSADQQTAITAKAPALVDTFL | 63 |
| Query: | 65 | GDQNALLDFGQSAVEGVNTTVNHILSEQKKIQIPQVDDLLKNANRELNGFIAKYKDATPA | 124 |
| | | DQNALLDFGQSAVEGVN TVNHIL+EQKK+QIPQVDDLLK+ NRELNGFIAKYKDATP | |
| Sbjct: | 64 | ADQNALLDFGQSAVEGVNATVNHILAEQKKLQIPQVDDLLKSTNRELNGFIAKYKDATPV | 123 |
| Query: | 125 | ELEKKPNLIQKLFKQSKTSLQEFYFDSQNIEQKMDMMAANVVKQEDTLARNIVSAEMLIE | 184 |
| | | +L+KKPN +QKLFKQS+ +LQEFYFDSQNIEQKMD MAA VVKQEDTLARNIVSAE+LIE | |
| Sbjct: | 124 | DLDKKPNFLQKLFKQSRDTLQEFYFDSQNIEQKMDSMAAAVVKQEDTLARNIVSAELLIE | 183 |
| Query: | 185 | DNTKSIENLVGVIAFIESSQAEAANRASHLQQEILALDSQTSEYQIKSNQLARMTEVINT | 244 |
| | | DNTKSIE+LVGVIAFIE+SQ EA+ RA+ LQ+++ DS T +YQIK++ LAR TEVINT | |
| Sbjct: | 184 | DNTKSIEHLVGVIAFIEASQKEASQRAAALQKDLKTKDSATPDYQIKADLLARTTEVINT | 243 |
| Query: | 245 | LEQQHPEYVSRLYVAWATTPQMRNLVKVSSDMRQKLGMLRRNTIPTMKLSIAQLGMMQQS | 304 |
| | | LEQQH EY+SRLYVAWATTPQMRNLVKVSSDMRQKLGMLRRNTIPTMKLSIAQLGMMQQS | |
| Sbjct: | 244 | LEQQHTEYLSRLYVAWATTPQMRNLVKVSSDMRQKLGMLRRNTIPTMKLSIAQLGMMQQS | 303 |
| Query: | 305 | VKSGVTADAIVNANNAALQMLAETSKEAIPMLEKTAQSPTVSIKSVTALAESLVAQNNGI | 364 |
| | | VKSG+TADAI+NANNAALQMLAETSKEAIP LE++AQ+PT+S+KSVT+LAESLVAQNNGI | |
| Sbjct: | 304 | VKSGMTADAIINANNAALQMLAETSKEAIPALEQSAQNPTLSMKSVTSLAESLVAQNNGI | 363 |
| Query: | 365 | IAAIDKGRKERAQLESAVIKSAETINDSVKIRDKKIVEALLNEGKSTQEKVDE | 417 |
| | | IAAID GRKERAQLESA+I+SAETINDSVK+RD+ IV+ALL+EGK TQ+ +D+ | |
| Sbjct: | 364 | IAAIDHGRKERAQLESAIIRSAETINDSVKLRDQNIVQALLSEGKETQKTIDK | 416 |

[8138] SEQ ID 4550 (GBS201) was expressed in E. coli as a His-fusion product. SDS-PAGE analysis of total cell extract is shown in FIG. 49 (lane 5; MW 49 kDa). It was also expressed in E. coli as a GST-fusion product. SDS-PAGE analysis of total cell extract is shown in FIG. 54 (lane 3; MW 74.5 kDa) and in FIG. 62 (lane 8 & 9; MW 74.5 kDa). The GBS201-GST fusion product was purified (FIG. 209, lane 9) and used to immunise mice. The resulting antiserum was used for FACS (FIG. 304), which confirmed that the protein is immunoaccessible on GBS bacteria.

[8139] Based on this analysis, it was predicted that these proteins and their epitopes could be useful antigens for vaccines or diagnostics.

### EXAMPLE 1481

[8140] A DNA sequence (GBSx1567) was identified in S. agalactiae <SEQ ID 4553> which encodes the amino acid sequence <SEQ ID 4554>. This protein is predicted to be rhoptry protein. Analysis of this protein sequence reveals the following:

| Possible site: 27 | | | | |
|---|---|---|---|---|
| >>> Seems to have an uncleavable N-term signal seq | | | | |
| | INTEGRAL | Likelihood = −6.58 | Transmembrane | 13-29 (10-31) |
| | INTEGRAL | Likelihood = −1.54 | Transmembrane | 33-49 (33-49) |

```
----- Final Results -----
                              bacterial membrane --- Certainty = 0.3633(Affirmative) < succ>
                                bacterial outside --- Certainty = 0.0000(Not Clear) < succ>
                            bacterial cytoplasm --- Certainty = 0.0000(Not Clear) < succ>
```

[8141] The protein has no significant homology with any sequences in the GENPEPT database.

[8142] A related DNA sequence was identified in S. pyogenes <SEQ ID 4555> which encodes the amino acid sequence <SEQ ID 4556>. Analysis of this protein sequence reveals the following:

```
Possible site: 37
>>> Seems to have a cleavable N-term signal seq.
----- Final Results -----
                                bacterial outside --- Certainty = 0.3000(Affirmative) < succ>
                              bacterial membrane --- Certainty = 0.0000(Not Clear) < succ>
                            bacterial cytoplasm --- Certainty = 0.0000(Not Clear) < succ>
```

[8143] The protein has no significant homology with any sequences in the GENPEPT database.

[8144] An alignment of the GAS and GBS proteins is shown below.

| Identities = 115/239 (48%), Positives = 162/239 (67%), Gaps = 3/239 (1%) | | | |
|---|---|---|---|
| Query: | 32 | EVIATLLIIGGGYCAYYVYD-KKRLKRFTSNQRIEALKSDIKETDQDIRHLEILKKDNRS | 90 |
| | | +++ + I G GY + V +KRL + +++E LK+ I+ D+ +R L+ D+ | |
| Sbjct: | 42 | DILPAIAIGGTGYAIFRVRSHQKRLAKAKIAKQLEDLKAKIQLADRKVRLLDTYLADHDD | 101 |
| Query: | 91 | KEYIKLAHQILPQLDLIRNEANQLQKAIEPNIYKRITKKANTFSNEINEQLIKLHASPEL | 150 |
| | | +Y LA Q+LPQL I+ +A L+ ++P IY+RITKKAN ++I QL L + L | |
| Sbjct: | 102 | FQYNVLAQQLLPQLSDIKAKAITLKDQLDPQIYRRITKKANDVESDITLQLETLQIATTL | 161 |
| Query: | 151 | --EPISDQEDEMIRIAPELKPFYHNIQDDHFAILKKIEEADNKAELAAIHQANMKRFTDV | 208 |
| | | +P+ +I APELKP+Y NIQ DH AIL KI+ ADN+ EL A+H ANM+RF D+ | |
| Sbjct: | 162 | NPQPLKTPSPNLINKAPELKPYYDNIQTDHQAILAKIQGADNQEELLALHDANMRRFEDI | 221 |
| Query: | 209 | LAGYIRIKQSPKNFNNAKERLEQALQAIKKFNLDLDETLRQLNESDMKDFDVSLRMMQG | 267 |
| | | L GY++IK+ PKN+ NA RLEQA QAI++F+ DLDETLR+LNESD+KDFD+SLR+MQG | |
| Sbjct: | 222 | LTGYLKIKEEPKNYYNAAARLEQAKQAIQQFDEDLDETLRRLNESDLKDFDISLRIMQG | 280 |

[8145] The GBS265-GST fusion product was purified (FIG. 207, lane 5) and used to immunise mice. The resulting antiserum was used for Western blot (FIG. 258A) and FACS (FIG. 258B). These tests confirm that the protein is immunoaccessible on GBS bacteria.

[8146] Based on this analysis, it was predicted that these proteins and their epitopes could be useful antigens for vaccines or diagnostics.

### EXAMPLE 1482

[8147] A DNA sequence (GBSx1568) was identified in S. agalactiae <SEQ ID 4557> which encodes the amino acid sequence <SEQ ID 4558>. This protein is predicted to be glutamate—cysteine ligase (gshA). Analysis of this protein sequence reveals the following:

| Possible site: 40 | | | | |
|---|---|---|---|---|
| >>> Seems to have no N-terminal signal sequence | | | | |
| | INTEGRAL | Likelihood = −1.70 | Transmembrane | 575-591 (575-591) |

```
----- Final Results -----
                              bacterial membrane --- Certainty = 0.1680(Affirmative) < succ>
                                bacterial outside --- Certainty = 0.0000(Not Clear) < succ>
                            bacterial cytoplasm --- Certainty = 0.0000(Not Clear) < succ>
```

[8148] The protein has homology with the following sequences in the GENPEPT database.

| >GP: AAG08588 GB: AE004933 glutamate--cysteine ligase | | | |
|---|---|---|---|
| [Pseudomonas aeruginosa] | | | |
| Identities = 142/468 (30%), Positives 220/468 (46%), Gaps = 62/468 (13%) | | | |
| Query: | 12 | SHLPIL-QATFGLERESLRIHQPTQRVAQTPHPKTLGSRNYHPYIQTDYSEPQLELITPI | 70 |
| | | ++LP+L + G+ERE LR+ ++A TPHP+ LGS HP I TDYSE LE ITP | |
| Sbjct: | 16 | ANLPLLTECLHGIERECLRVDSDG-KLALTPHPRALGSTLTHPQITTDYSEALLEFITPT | 74 |
| Query: | 71 | AKDSQEAIRFLKAISDVAGRSINHDEYLWPLSMPPKV-REEDIQIAQLEDA----FEYDY | 125 |
| | | D + + L+ I A ++ EYLW SMP ++ EE I IA+ + +Y Y | |
| Sbjct: | 75 | ETDVADTLGDLERIHRFASSKLD-GEYLWSPSMPCELPDEESIPIARYGSSMIGRLKYVY | 133 |
| Query: | 126 | RKYLEKTYGKLIQSISGIHYNLGLGQELLTSLFELSQAD-NAIDFQNQLYMKLSQNFLRY | 184 |
| | | RK L YGK +Q I+GIHYN L + L L + ++ + D+Q+ Y+ L +NF RY | |
| Sbjct: | 134 | RKGLALRYGKTMQCIAGIHYNFSLPERLWPLLRQAEGSELSERDYQSAAYIALIRNFRRY | 193 |
| Query: | 185 | RWLLTYLYGASPVAEEDFLDQKLNNPVR------------SLRNSHLGYVNHKDIRIS-- | 230 |
| | | WLL YL+GASP + FL + + R SLR S LGY N+ ++ | |
| Sbjct: | 194 | SWLLMYLFGASPALDAGFLRGRPSQLERLDEHTLYLPYATSLRMSDLGYQNNAQAGLTPC | 253 |
| Query: | 231 | YTSLKDYVNDLENAV---------------------KSGQLIAEKEFYSPVRLR-----G | 264 |
| | | Y L+ Y++ L AV + L E E+YS +R + G | |
| Sbjct: | 254 | YNDLQSYIDSLRQAVSTPYPPYEKVGTKQDGEWVQLNTNILQIENEYYSSIRPKRVTYTG | 313 |
| Query: | 265 | SKACRNYLEKGITYLEFRTFDLNPFSPIGITQETVDTVHLFLLALLWIDS---------- | 314 |
| | | + + +G+ Y+E R D+NPF P+GI + + FLL + DS | |
| Sbjct: | 314 | ERPVQALAARGVQYVEVRCLDINPFLPLGIDLDEARFLDAFLLFCAFSDSPLLNGECSDA | 373 |
| Query: | 315 | SSHIDQDIKEANRLN-DLIALSHPLEKLPNQAPVSDLVDAMQSVIQHFNLSPYYQDLLES | 373 |
| | | + + +KE R L P+E + + + +++ + L + | |
| Sbjct: | 374 | TDNFLAVVKEGRRPGLQLQRRGQPVELQVWANELLERIADTAALLDRARGGEAHAAALAA | 433 |
| Query: | 374 | VKRQIQSPELTVAGQLLEMI--EGLSLETFGQRQGQIYHDYAWEAPYA | 419 |
| | | + ++ ELT + Q+L+++ G S E F RQ + + +Y + P A | |
| Sbjct: | 434 | QRAKVADAELTPSAQVLKVMRERGESFEAFSLRQSREHAEYFRQHPLA | 481 |

[8149] There is also homology to SEQ ID 4560.

[8150] Based on this analysis, it was predicted that this protein and its epitopes, could be useful antigens for vaccines or diagnostics.

### EXAMPLE 1483

[8151] A DNA sequence (GBSx1569) was identified in S. agalactiae <SEQ ID 4561> which encodes the amino acid sequence <SEQ ID 4562>. Analysis of this protein sequence reveals the following:

```
Possible site: 59
>>> Seems to have no N-terminal signal sequence
----- Final Results -----
                            bacterial cytoplasm --- Certainty = 0.1504(Affirmative) < succ>
                              bacterial membrane --- Certainty = 0.0000(Not Clear) < succ>
                                bacterial outside --- Certainty = 0.0000(Not Clear) < succ>
```

[8152] The protein has homology with the following sequences in the GENPEPT database.

| >GP: CAB73814 GB: AL139078 helix-turn-helix containing protein | | | |
|---|---|---|---|
| [Campylobacter jejuni] | | | |
| Identities = 107/223 (47%), Positives = 148/223 (65%), Gaps = 7/223 (3%) | | | |
| Query: | 1 | MDKEKLDYWKTIITFLHNVLGDNYEIVLHVVDENDIYIGELVNSHISGRTISSPLTTFAL | 60 |
| | | MD+ + + + FL VLG+ YEIV HV+ E+ YI + NSHISGR++ SPLT FA | |
| Sbjct: | 1 | MDEGQKQQFIKLTYFLGEVLGEQYEIVFHVITEDGAYIAAIANSHISGRSLDSPLTAFAS | 60 |
| Query: | 61 | DLIKNKVYKEKDFVTNYKAIVSPLNKEVRGSTFFIKNAQNELEGMLCINLDISAYQNIAL | 120 |
| | | +L++NK Y EKDF+ +YKA+V +K +RGSTFFIKN ++L G+LCIN D S +++ | |
| Sbjct: | 61 | ELMQNKKYLEKDFLCDYKALVGK-SKLIRGSTFFIKN-HDKLVGILCINHDTSIMRDLIC | 118 |
| Query: | 121 | DILDLVNL-NVNKILPKSPQKISLPQQEEPVEVLSGNIQDIISEIVDPSLLNQNIHLSQE | 179 |
| | | ++DL + ++ IL IS Q + +E LS +I+DI+ + VD S LN + LS | |
| Sbjct: | 119 | KMIDLEKIGDMGDIL----GNISFSQNDSSIETLSHSIEDILVQSVDSSYLNSDYQLSIT | 174 |
| Query: | 180 | VKVEIVSKLHEKGVFQLKGAVSKVAEVLNISEPSVYRYLKKIE | 222 |
| | | K EI KL+EKG+F +KGAV VA+ L ISEPSVYRYLKK + | |
| Sbjct: | 175 | QKEEIAEKLYEKGIFNIKGAVPIVAKFLKISEPSVYRYLKKFK | 217 |

[8153] A related DNA sequence was identified in S. pyogenes <SEQ ID 4563> which encodes the amino acid sequence <SEQ ID 4564>. Analysis of this protein sequence reveals the following:

```
Possible site: 21
>>> Seems to have no N-terminal signal sequence
----- Final Results -----
                            bacterial cytoplasm --- Certainty = 0.1636(Affirmative) < succ>
                              bacterial membrane --- Certainty = 0.0000(Not Clear) < succ>
                                bacterial outside --- Certainty = 0.0000(Not Clear) < succ>
```

[8154] An alignment of the GAS and GBS proteins is shown below.

| Identities = 169/224 (75%), Positives = 198/224 (87%), Gaps = 3/224 (1%) | | | |
|---|---|---|---|
| Query: | 1 | MDKEKLDYWKTIITFLHNVLGDNYEIVLHVVDENDIYIGELVNSHISGRTISSPLTTFAL | 60 |
| | | MDKE L+YWKT+ITFLH+VLGDNYEI+LHV+D+NDIYIGELVNSHISGR+ SPLTTFAL | |
| Sbjct: | 1 | MDKETLNYWKTVITFLHDVLGDNYEIILHVIDKNDIYIGELVNSHISGRSKQSPLTTFAL | 60 |
| Query: | 61 | DLIKNKVYKEKDFVTNYKAIVSPLNKEVRGSTFFIKNAQNELEGMLCINLDISAYQNIAL | 120 |
| | | DLI NKVYKEKDFVTNYKAIVSP +KEVRGSTFFIK+ + LEGMLCINLDISAYQ +A | |
| Sbjct: | 61 | DLITNKVYKEKDFVTNYKAIVSPQHKEVRGSTFFIKDKKGNLEGMLCINLDISAYQGVAR | 120 |
| Query: | 121 | DILDLVNLNVNKILP--KSPQKISLPQQEEPVEVLSGNIQDIISEIVDPSLLNQNIHLSQ | 178 |
| | | D+L LVNLN+ +P K P+ ++ PQ EE VE+L+ NIQDII +I+DPSLL N+HLSQ | |
| Sbjct: | 121 | DLLKLVNLNLEHFIPTAKEPKTVT-PQPEEAVEILTSNIQDIIGQIIDPSLLRHNVHLSQ | 179 |
| Query: | 179 | EVKVEIVSKLHEKGVFQLKGAVSKVAEVLNISEPSVYRYLKKIE | 222 |
| | | +VK++IV+KL+EKGVFQLKGAVSKVA++L ISEPSVYRYLKKIE | |
| Sbjct: | 180 | DVKIDIVAKLYEKGVFQLKGAVSKVADILCISEPSVYRYLKKIE | 223 |

[8155] Based on this analysis, it was predicted that these proteins and their epitopes could be useful antigens for vaccines or diagnostics.

### EXAMPLE 1484

[8156] A DNA sequence (GBSx1570) was identified in S. agalactiae <SEQ ID 4565> which encodes the amino acid sequence <SEQ ID 4566>. This protein is predicted to be regulatory protein pfoR. Analysis of this protein sequence reveals the following:

| Possible site: 37 | | | | |
|---|---|---|---|---|
| >>> Seems to have a cleavable N-term signal seq. | | | | |
| | INTEGRAL | Likelihood = −7.80 | Transmembrane | 299-315 (296-325) |
| | INTEGRAL | Likelihood = −7.54 | Transmembrane | 172-188 (169-193) |
| | INTEGRAL | Likelihood = −7.17 | Transmembrane | 71-87 (66-98) |
| | INTEGRAL | Likelihood = −4.99 | Transmembrane | 261-277 (260-278) |
| | INTEGRAL | Likelihood = −2.81 | Transmembrane | 128-144 (127-149) |
| | INTEGRAL | Likelihood = −2.18 | Transmembrane | 101-117 (101-119) |
| | INTEGRAL | Likelihood = −0.53 | Transmembrane | 198-214 (197-214) |

```
----- Final Results -----
                              bacterial membrane --- Certainty = 0.4121(Affirmative) < succ>
                                bacterial outside --- Certainty = 0.0000(Not Clear) < succ>
                            bacterial cytoplasm --- Certainty = 0.0000(Not Clear) < succ>
```

[8157] The protein has homology with the following sequences in the GENPEPT database.

| >GP: CAA60239 GB: X86525 pfoS [Clostridium perfringens] | | | |
|---|---|---|---|
| Identities = 96/147 (65%), Positives = 122/147 (82%) | | | |
| Query: | 100 | GTGIIPGFLAGYLVGFLVKWMERNIPGGLDLISIIIIGAPLTRLVAKLLTPLINSTLLTI | 159 |
| | | G GI+PGF+AGYL F++K++E+ IP GLDLI II++GAPL R +A + PL+ +TL I | |
| Sbjct: | 1 | GFGILPGFIAGYLGSFVIKFLEKKIPAGLDLIVIIVLGAPLVRGIAAISNPLVETTLQNI | 60 |
| Query: | 160 | GDILTSGAHSNPILMGIILGGTIVVVATAPLSSMALTAMLGLTGMPMAIGALSVFGSSFM | 219 |
| | | G ++T+ + ++PI+MGIILGG + VVATAPLSSMALTAMLGLTG+PMAIGAL+VFGSSFM | |
| Sbjct: | 61 | GGVITATSTASPIMMGIILGGIVTVVATAPLSSMALTAMLGLTGLPMAIGALAVFGSSFM | 120 |
| Query: | 220 | NGVLFHKLKLGSRKDNIAFAVEPLTQA | 246 |
| | | N V F K+K GS+KD IA A+EPLTQA | |
| Sbjct: | 121 | NLVFFGKMKFGSKKDTIAVAIEPLTQA | 147 |

[8158] A related DNA sequence was identified in S. pyogenes <SEQ ID 4567> which encodes the amino acid sequence <SEQ ID 4568>. Analysis of this protein sequence reveals the following:

| Possible site: 37 | | | | |
|---|---|---|---|---|
| >>> Seems to have a cleavable N-term signal seq. | | | | |
| | INTEGRAL | Likelihood = −8.70 | Transmembrane | 303-319 (296-325) |
| | INTEGRAL | Likelihood = −7.11 | Transmembrane | 70-86 (66-98) |
| | INTEGRAL | Likelihood = −6.53 | Transmembrane | 172-188 (169-193) |
| | INTEGRAL | Likelihood = −4.83 | Transmembrane | 261-277 (260-278) |
| | INTEGRAL | Likelihood = −2.55 | Transmembrane | 101-117 (101-119) |
| | INTEGRAL | Likelihood = −2.28 | Transmembrane | 124-140 (124-140) |
| | INTEGRAL | Likelihood = −1.91 | Transmembrane | 198-214 (197-215) |

```
----- Final Results -----
                              bacterial membrane --- Certainty = 0.4482(Affirmative) < succ>
                                bacterial outside --- Certainty = 0.0000(Not Clear) < succ>
                            bacterial cytoplasm --- Certainty = 0.0000(Not Clear) < succ>
```

[8159] The protein has homology with the following sequences in the databases:

| >GP: CAA60239 GB: X86525 pfoS [Clostridium perfringens] | | | |
|---|---|---|---|
| Identities = 95/147 (64%), Positives = 123/147 (63%) | | | |
| Query: | 100 | GTGIIPGFVAGYVVSFLIKWMEKNIPGGLDLISIIIVGAPLTRFLAQLITPVINSTLLTI | 159 |
| | | G GI+PGF+AGY+ SF+IK++EK IP GLDLI II++GAPL R +A + P++ +TL I | |
| Sbjct: | 1 | GFGILPGFIAGYLGSFVIKFLEKKIPAGLDLIVIIVLGAPLVRGIAAISNPLVETTLQNI | 60 |
| Query: | 160 | GDILTSSANSNPIIMGMILGGTIVVVATAPLSSMALTAMLGLTGIPMAIGALSVFGSSFM | 219 |
| | | G ++T+++ ++PI+MG+ILGG + VVATAPLSSMALTAMLGLTG+PMAIGAL+VFGSSFM | |
| Sbjct: | 61 | GGVITATSTASPIMMGIILGGIVTVVATAPLSSMALTAMLGLTGLPMAIGALAVFGSSFM | 120 |
| Query: | 220 | NGVLFYRLKLGERKDNIAFAIEPLTQA | 246 |
| | | N V F ++K G +KD IA AIEPLTQA | |
| Sbjct: | 121 | NLVFFGKMKFGSKKDTIAVAIEPLTQA | 147 |

[8160] An alignment of the GAS and GBS proteins is shown below.

| Identities = 302/339 (89%), Positives = 330/339 (97%) | | | |
|---|---|---|---|
| Query: | 1 | MNIIIGTSLLILVLAIFTLFNYKAPYGTKAMGALASAACASFLVEAFQDSFFGKVLGFQF | 60 |
| | | M+IIIGTSLLILVLAIF+LFNYKAP+G KAMGALASAACASFLVEAFQDSFFGKVLGFQF | |
| Sbjct: | 1 | MDIIIGTSLLILVLAIFSLFNYKAPHGAKAMGALASAACASFLVEAFQDSFFGKVLGFQF | 60 |
| Query: | 61 | LSEVGGANGSLSGVAAAILVAIAIGVTPGYAVLIGLSVSGTGIIPGFLAGYLVGFLVKWM | 120 |
| | | LSEVGGANGSLSGVAAAILVAIAIGV+PGYAVLIGLSVSGTGIIPGF+AGY+V FL+KWM | |
| Sbjct: | 61 | LSEVGGANGSLSGVAAAILVAIAIGVSPGYAVLIGLSVSGTGIIPGFVAGYVVSFLIKWM | 120 |
| Query: | 121 | ERNIPGGLDLISIIIIGAPLTRLVAKLLTPLINSTLLTIGDILTSGAHSNPILMGIILGG | 180 |
| | | E+NIPGGLDLISIII+GAPLTR +A+L+TP+INSTLLTIGDILTS A+SNPI+MG+ILGG | |
| Sbjct: | 121 | EKNIPGGLDLISIIIVGAPLTRFLAQLITPVINSTLLTIGDILTSSANSNPIIMGMILGG | 180 |
| Query: | 181 | TIVVVATAPLSSMALTAMLGLTGMPMAIGALSVFGSSFMNGVLFHKLKLGSRKDNIAFAV | 240 |
| | | TIVVVATAPLSSMALTAMLGLTG+PMAIGALSVFGSSFMNGVLF++LKLG RKDNIAFA+ | |
| Sbjct: | 181 | TIVVVATAPLSSMALTAMLGLTGIPMAIGALSVFGSSFMNGVLFYRLKLGERKDNIAFAI | 240 |
| Query: | 241 | EPLTQADVTSANPIPIYVTNFVGGAACGILIALMKLVNDTPGTATPIAGFAVMFAYNPMI | 300 |
| | | EPLTQADVTSANPIPIYVTNFVGGAACG+LIALMKLVNDTPGTATPIAGFAVMFAYNP+ | |
| Sbjct: | 241 | EPLTQADVTSANPIPIYVTNFVGGAACGVLIALMKLVNDTPGTATPIAGFAVMFAYNPVA | 300 |
| Query: | 301 | KVLITALGCIILSLLAGYFGGIVFKDYKLVTKEELQARD | 339 |
| | | KVLITALGCII+SL+ GY GG VFK+Y+LVTK+ELQAR+ | |
| Sbjct: | 301 | KVLITALGCIIISLIVGYIGGSVFKNYRLVTKQELQARN | 339 |

[8161] Based on this analysis, it was predicted that these proteins and their epitopes could be useful antigens for vaccines or diagnostics.

### EXAMPLE 1485

[8162] A DNA sequence (GBSx1571) was identified in S. agalactiae <SEQ ID 4569> which encodes the amino acid sequence <SEQ ID 4570>. This protein is predicted to be adenylosuccinate synthetase (purA). Analysis of this protein sequence reveals the following:

```
Possible site: 27
>>> Seems to have no N-terminal signal sequence
----- Final Results -----
                            bacterial cytoplasm --- Certainty = 0.0560(Affirmative) < succ>
                              bacterial membrane --- Certainty = 0.0000(Not Clear) < succ>
                                bacterial outside --- Certainty = 0.0000(Not Clear) < succ>
```

[8163] The protein has homology with the following sequences in the GENPEPT database.

| >GP: CAB16079 GB: Z99124 adenylosuccinate synthetase [Bacillus subtilis] | | | |
|---|---|---|---|
| Identities = 320/427 (74%), Positives = 378/427 (87%) | | | |
| Query: | 1 | MTSVVVVGTQWGDEGKGKITDFLSADAEVIARYQGGDNAGHTIVIDNKKFKLHLIPSGIF | 60 |
| | | M+SVVVVGTQWGDEGKGKITDFLS +AEVIARYQGG+NAGHTI D +KLHLIPSGIF | |
| Sbjct: | 1 | MSSVVVVGTQWGDEGKGKITDFLSENAEVIARYQGGNNAGHTIKFDGITYKLHLIPSGIF | 60 |
| Query: | 61 | FKEKISVIGNGVVVNPKSLVKELAYLHGEGVTTDNLRISDRAHVILPYHIKLDQLQEDAK | 120 |
| | | +K+K VIGNG+VV+PK+LV ELAYLH V+TDNLRIS+RAHVILPYH+KLD+++E+ K | |
| Sbjct: | 61 | YKDKTCVIGNGMVVDPKALVTELAYLHERNVSTDNLRISNRAHVILPYHLKLDEVEEERK | 120 |
| Query: | 121 | GDNKIGTTIKGIGPAYMDKAARVGIRIADLLDREVFAERLKINLAEKNRLFEKMYDSTPL | 180 |
| | | G NKIGTT KGIGPAYMDKAAR+GIRIADLLDR+ FAE+L+ NL EKNRL EKMY++ | |
| Sbjct: | 121 | GANKIGTTKKGIGPAYMDKAARIGIRIADLLDRDAFAEKLERNLEEKNRLLEKMYETEGF | 180 |
| Query: | 181 | EFDDIFEEYYEYGQQIKQYVTDTSVILNDALDAGKRVLFEGAQGVMLDIDQGTYPFVTSS | 240 |
| | | + +DI +EYYEYGQQIK+YV DTSV+LNDALD G+RVLFEGAQGVMLDIDQGTYPFVTSS | |
| Sbjct: | 181 | KLEDILDEYYEYGQQIKKYVCDTSVVLNDALDEGRRVLFEGAQGVMLDIDQGTYPFVTSS | 240 |
| Query: | 241 | NPVAGGVTIGSGVGPSKINKVVGVCKAYTSRVGDGPFPTELFDEVGDRIREIGKEYGTTT | 300 |
| | | NPVAGGVTIGSGVGP+KI VVGV KAYT+RVGDGPFPTEL DE+GD+IRE+G+EYGTTT | |
| Sbjct: | 241 | NPVAGGVTIGSGVGPTKIKHVVGVSKAYTTRVGDGPFPTELKDEIGDQIREVGREYGTTT | 300 |
| Query: | 301 | GRPRRVGWFDSVVMRHSRRVSGITNLSLNSIDVLSGLDTVKICVAYDLDGKRIDYYPASL | 360 |
| | | GRPRRVGWFDSVV+RH+RRVSGIT+LSLNSIDVL+G++T+KICVAY G+ I+ +PASL | |
| Sbjct: | 301 | GRPRRVGWFDSVVVRHARRVSGITDLSLNSIDVLAGIETLKICVAYRYKGEIIEEFPASL | 360 |
| Query: | 361 | EQLKRCKPIYEELPGWSEDITACRSLDDLPENARNYVRRVGELVGVRISTFSVGPGREQT | 420 |
| | | + L C+P+YEE+PGW+EDIT +SL +LPENAR+Y+ RV +L G+ +S FSVGP R QT | |
| Sbjct: | 361 | KALAECEPVYEEMPGWTEDITGAKSLSELPENARHYLERVSQLTGIPLSIFSVGPDRSQT | 420 |
| Query: | 421 | NILESVW | 427 |
| | | N+L SV+ | |
| Sbjct: | 421 | NVLRSVY | 427 |

[8164] A related DNA sequence was identified in S. pyogenes <SEQ ID 4571> which encodes the amino acid sequence <SEQ ID 4572>. Analysis of this protein sequence reveals the following:

```
Possible site: 27
>>> Seems to have no N-terminal signal sequence
----- Final Results -----
                            bacterial cytoplasm --- Certainty = 0.0560(Affirmative) < succ>
                              bacterial membrane --- Certainty = 0.0000(Not Clear) < succ>
                                bacterial outside --- Certainty = 0.0000(Not Clear) < succ>
```

[8165] An alignment of the GAS and GBS proteins is shown below.

| Identities = 406/430 (94%), Positives = 421/430 (97%) | | | |
|---|---|---|---|
| Query: | 1 | MTSVVVVGTQWGDEGKGKITDFLSADAEVIARYQGGDNAGHTIVIDNKKFKLHLIPSGIF | 60 |
| | | MTSVVVVGTQWGDEGKGKITDFLSADAEVIARYQGGDNAGHTIVID KKFKLHLIPSGIF | |
| Sbjct: | 1 | MTSVVVVGTQWGDEGKGKITDFLSADAEVIARYQGGDNAGHTIVIDGKKFKLHLIPSGIF | 60 |
| Query: | 61 | FKEKISVIGNGVVVNPKSLVKELAYLHGEGVTTDNLRISDRAHVILPYHIKLDQLQEDAK | 120 |
| | | F +KISVIGNGVVVNPKSLVKELAYLH EGVTTDNLRISDRAHVILPYHI+LDQLQEDAK | |
| Sbjct: | 61 | FPQKISVIGNGVVVNPKSLVKELAYLHDEGVTTDNLRISDRAHVILPYHIQLDQLQEDAK | 120 |
| Query: | 121 | GDNKIGTTIKGIGPAYMDKAARVGIRIADLLDREVFAERLKINLAEKNRLFEKMYDSTPL | 180 |
| | | GDNKIGTTIKGIGPAYMDKAARVGIRIADLLD+++FAERL+INLAEKNRLFEKMYDSTPL | |
| Sbjct: | 121 | GDNKIGTTIKGIGPAYMDKAARVGIRIADLLDKDIFAERLRINLAEKNRLFEKMYDSTPL | 180 |
| Query: | 181 | EFDDIFEEYYEYGQQIKQYVTDTSVILNDALDAGKRVLFEGAQGVMLDIDQGTYPFVTSS | 240 |
| | | +FD IFEEYY YGQ+IKQYVTDTSVILNDALDAGKRVLFEGAQGVMLDIDQGTYPFVTSS | |
| Sbjct: | 181 | DFDAIFEEYYAYGQEIKQYVTDTSVILNDALDAGKRVLFEGAQGVMLDIDQGTYPFVTSS | 240 |
| Query: | 241 | NPVAGGVTIGSGVGPSKINKVVGVCKAYTSRVGDGPFPTELFDEVGDRIREIGKEYGTTT | 300 |
| | | NPVAGGVTIGSGVGP+KINKVVGVCKAYTSRVGDGPFPTELFDEVG+RIRE+G EYGTTT | |
| Sbjct: | 241 | NPVAGGVTIGSGVGPNKINKVVGVCKAYTSRVGDGPFPTELFDEVGERIREVGHEYGTTT | 300 |
| Query: | 301 | GRPRRVGWFDSVVMRHSRRVSGITNLSLNSIDVLSGLDTVKICVAYDLDGKRIDYYPASL | 360 |
| | | GRPRRVGWFDSVVMRHSRRVSGITNLSLNSIDVLSGLDTVKICVAYDLDGKRIDYYPA+L | |
| Sbjct: | 301 | GRPRRVGWFDSVVMRHSRRVSGITNLSLNSIDVLSGLDTVKICVAYDLDGKRIDYYPANL | 360 |
| Query: | 361 | EQLKRCKPIYEELPGWSEDITACRSLDDLPENARNYVRRVGELVGVRISTFSVGPGREQT | 420 |
| | | EQLKRCKPIYEELPGW EDIT RSLD+LPENARNYVRRVGELVGVRISTFSVGPGREQT | |
| Sbjct: | 361 | EQLKRCKPIYEELPGWQEDITGVRSLDELPENARNYVRRVGELVGVRISTFSVGPGREQT | 420 |
| Query: | 421 | NILESVWSNI | 430 |
| | | NILESVW++I | |
| Sbjct: | 421 | NILESVWASI | 430 |

[8166] Based on this analysis, it was predicted that these proteins and their epitopes could be useful antigens for vaccines or diagnostics.

### EXAMPLE 1486

[8167] A DNA sequence (GBSx1572) was identified in S. agalactiae <SEQ ID 4573> which encodes the amino acid sequence <SEQ ID 4574>. Analysis of this protein sequence reveals the following:

| Possible site: 46 | | | | |
|---|---|---|---|---|
| >>> Seems to have no N-terminal signal sequence | | | | |
| | INTEGRAL | Likelihood = −9.29 | Transmembrane | 30-46 (22-55) |
| | INTEGRAL | Likelihood = −2.97 | Transmembrane | 110-126 (109-126) |
| | INTEGRAL | Likelihood = −0.11 | Transmembrane | 89-105 (89-106) |

```
----- Final Results -----
                              bacterial membrane --- Certainty = 0.4715(Affirmative) < succ>
                                bacterial outside --- Certainty = 0.0000(Not Clear) < succ>
                            bacterial cytoplasm --- Certainty = 0.0000(Not Clear) < succ>
```

[8168] A related GBS nucleic acid sequence <SEQ ID 8823> which encodes amino acid sequence <SEQ ID 8824> was also identified. Analysis of this protein sequence reveals the following:

| Lipop Possible site: −1 Crend: 10 | | | | |
|---|---|---|---|---|
| SRCFLG: 0 | | | | |
| McG: Length of UR: 5 | | | | |
| Peak Value of UR: 3.05 | | | | |
| Net Charge of CR: 0 | | | | |
| McG: Discrim Score: 4.64 | | | | |
| GvH: Signal Score (−7.5): −1.66 | | | | |
| Possible site: 36 | | | | |
| >>> Seems to have a cleavable N-term signal seq. | | | | |
| Amino Acid Composition: calculated from 37 | | | | |
| ALOM program count: 2 value: −2.97 threshold: 0.0 | | | | |
| | INTEGRAL | Likelihood = −2.97 | Transmembrane | 100-116 (99-116) |
| | PERIPHERAL | Likelihood = 1.38 | 56 | |

```
modified ALOM score: 1.09
icm1 HYPID: 7 CFP: 0.219
*** Reasoning Step: 3
----- Final Results -----
                              bacterial membrane --- Certainty = 0.2190(Affirmative) < succ>
                                bacterial outside --- Certainty = 0.0000(Not Clear) < succ>
                            bacterial cytoplasm --- Certainty = 0.0000(Not Clear) < succ>
```

[8169] The protein has no significant homology with any sequences in the GENPEPT database and no corresponding DNA sequence was identified in S. pyogenes.

[8170] Based on this analysis, it was predicted that these proteins and their epitopes could be useful antigens for vaccines or diagnostics.

### EXAMPLE 1487

[8171] A DNA sequence (GBSx1573) was identified in S. agalactiae <SEQ ID 4575> which encodes the amino acid sequence <SEQ ID 4576>. Analysis of this protein sequence reveals the following:

```
Possible site: 15
>>> Seems to have no N-terminal signal sequence
----- Final Results -----
                            bacterial cytoplasm --- Certainty = 0.0967(Affirmative) < succ>
                              bacterial membrane --- Certainty = 0.0000(Not Clear) < succ>
                                bactarial outside --- Certainty = 0.0000(Not Clear) < succ>
```

[8172] The protein has no significant homology with any sequences in the GENPEPT database.

[8173] No corresponding DNA sequence was identified in S. pyogenes.

[8174] Based on this analysis, it was predicted that this protein and its epitopes, could be useful antigens for vaccines or diagnostics.

### EXAMPLE 1488

[8175] A DNA sequence (GBSx1574) was identified in S. agalactiae <SEQ ID 4577> which encodes the amino acid sequence <SEQ ID 4578>. This protein is predicted to be SgaT protein (sgaT). Analysis of this protein sequence reveals the following:

| Possible site: 43 | | | | |
|---|---|---|---|---|
| >>> Seems to have no N-terminal signal sequence | | | | |
| | INTEGRAL | Likelihood = −7.80 | Transmembrane | 441-457 (436-464) |
| | INTEGRAL | Likelihood = −7.64 | Transmembrane | 344-360 (339-376) |
| | INTEGRAL | Likelihood = −6.58 | Transmembrane | 403-419 (392-422) |
| | INTEGRAL | Likelihood = −6.48 | Transmembrane | 237-253 (235-261) |
| | INTEGRAL | Likelihood = −5.79 | Transmembrane | 105-121 (99-127) |
| | INTEGRAL | Likelihood = −5.52 | Transmembrane | 138-154 (137-155) |
| | INTEGRAL | Likelihood = −4.78 | Transmembrane | 18-34 (14-38) |
| | INTEGRAL | Likelihood = −2.97 | Transmembrane | 365-381 (365-383) |
| | INTEGRAL | Likelihood = −0.69 | Transmembrane | 41-57 (41-57) |
| | INTEGRAL | Likelihood = −0.16 | Transmembrane | 160-176 (160-176) |

```
----- Final Results -----
                              bacterial membrane --- Certainty = 0.4121(Affirmative) < succ>
                                bacterial outside --- Certainty = 0.0000(Not Clear) < succ>
                            bacterial cytoplasm --- Certainty = 0.0000(Not Clear) < succ>
```

[8176] The protein has homology with the following sequences in the GENPEPT database.

| >GP: AAC77150 GB: AE000491 orf, hypothetical protein [Escherichia coli K12] | | | |
|---|---|---|---|
| Identities = 181/451 (40%), Positives = 274/451 (60%), Gaps = 25/451 (5%) | | | |
| Query: | 11 | FSQNILQNPAFFVGLLVLIGYLLLKKPLHDVFAGFIKATVGYLILNVGAGGLVNTFRPIL | 70 |
| | | F ++ N +G++ +GY+LL+K + + G IK +G+++L G+G L +TF+P++ | |
| Sbjct: | 30 | FFNQVMTNAPLLLGIVTCLGYILLRKSVSVIIKGTIKTIIGFMLLQAGSGILTSTFKPVV | 89 |
| Query: | 71 | VALAKKFNLEAAVIDPYFGLASANAKLETMG-FISVATTALLIGFGINILLVALRKVTKV | 129 |
| | | +++ + + A+ D Y AS A ++ MG S A+L+ +NI V LR++T + | |
| Sbjct: | 90 | AKMSEVYGINGAISDTY---ASMMATIDRMGDAYSWVGYAVLLALALNICYVLLRRITGI | 146 |
| Query: | 130 | RTLFITGHIMVQQAATISVFVLLLIPQLRNGFGAWAV----GIICGLYWAVSSNMTVEAT | 185 |
| | | RT+ +TGHIM QQA I+V + + G+ W I+ LYW ++SNM + T | |
| Sbjct: | 147 | RTIMLTGHIMFQQAGLIAVTLFIF------GYSMWTTIICTAILVSLYWGITSNMMYKPT | 200 |
| Query: | 186 | QRLTGGGGFAIGHQQQFAIWFVDKVAPFFGKKEENLDNLKLPTFLNIFHDTVVASATLML | 245 |
| | | Q +T G GF+IGHQQQFA W KVAPF GKKEE++++LKLP +LNIFHD +V++A +M | |
| Sbjct: | 201 | QEVTDGCGFSIGHQQQFASWIAYKVAPFLGKKEESVEDLKLPGWLNIFHDNIVSTAIVMT | 260 |
| Query: | 246 | VFFGGILAVLGPDIMSNVKLIGPGAFVPTKQAFFMYILQTSLTFSVYLFILMQGVRMFVT | 305 |
| | | +FFG IL G D + + K + +YILQT +F+V +FI+ QGVRMFV | |
| Sbjct: | 261 | IFFGAILLSFGIDTVQ---------AMAGKVHWTVYILQTGFSFAVAIFIITQGVRMFVA | 311 |
| Query: | 306 | ELTNAFQGISNKLLPGSFPAVDVAASYGFGSSNAVLSGFAFGLIGQLITIALLVVFKNPI | 365 |
| | | EL+ AF GIS +L+PG+ A+D AA Y F + NAV+ GF +G IGQLI + +LV + I | |
| Sbjct: | 312 | ELSEAFNGISQRLIPGAVLAIDCAAIYSF-APNAVVWGFMWGTIGQLIAVGILVACGSSI | 370 |
| Query: | 366 | LIITGFVPVFFDNAAIAVYADKRGGWKAAVALSFISGIIQVALGAVAVGLLGLAGGYHGN | 425 |
| | | LII GF+P+FF NA I V+A+ GGW+AA+ + + G+I++ AV L G++ + G | |
| Sbjct: | 371 | LIIPGFIPMFFSNATIGVFANHFGGWRAALKICLVMGMIEIFGCVWAVKLTGMS-AWMGM | 429 |
| Query: | 426 | IDFEFPWLAFGYIFKYLGIAGYVIVCLFFLA | 456 |
| | | D+ F +GIA ++ + LA | |
| Sbjct: | 430 | ADWSILAPPMMQGFFSIGIAFMAVIIVIALA | 460 |

[8177] A related DNA sequence was identified in S. pyogenes <SEQ ID 4579> which encodes the amino acid sequence <SEQ ID 4580>. Analysis of this protein sequence reveals the following:

| Possible site: 43 | | | | |
|---|---|---|---|---|
| >>> Seems to have no N-terminal signal sequence | | | | |
| | INTEGRAL | Likelihood = −10.51 | Transmembrane | 441-457 (435-465) |
| | INTEGRAL | Likelihood = −7.80 | Transmembrane | 344-360 (339-376) |
| | INTEGRAL | Likelihood = −7.64 | Transmembrane | 238-254 (235-261) |
| | INTEGRAL | Likelihood = −5.63 | Transmembrane | 105-121 (100-127) |
| | INTEGRAL | Likelihood = −5.52 | Transmembrane | 138-154 (137-155) |
| | INTEGRAL | Likelihood = −5.20 | Transmembrane | 400-416 (392-422) |
| | INTEGRAL | Likelihood = −4.78 | Transmembrane | 18-34 (14-39) |
| | INTEGRAL | Likelihood = −2.97 | Transmembrane | 365-381 (365-383) |
| | INTEGRAL | Likelihood = −1.49 | Transmembrane | 160-176 (160-177) |
| | INTEGRAL | Likelihood = −0.53 | Transmembrane | 41-57 (41-57) |

```
----- Final Results -----
                              bacterial membrane --- Certainty = 0.5203(Affirmative) < succ>
                                bacterial outside --- Certainty = 0.0000(Not Clear) < succ>
                            bacterial cytoplasm --- Certainty = 0.0000(Not Clear) < succ>
```

[8178] The protein has homology with the following sequences in the databases:

| >GP: AAC77150 GB: AE000491 orf, hypothetical protein [Escherichia | | | |
|---|---|---|---|
| coli] | | | |
| Identities = 182/461 (39%), Positives = 279/461 (60%), Gaps = 25/461 (5%) | | | |
| Query: | 1 | MEMLLAPLNWFSQNILQNPAFFVGLLVLIGYLLLKKPIYEVFAGFVKATVGYLILNVGAG | 60 |
| | | ME+L F ++ N +G++ +GY+LL+K + + G +K +G+++L G+G | |
| Sbjct: | 20 | MEILYNIFTVFFNQVMTNAPLLLGIVTCLGYILLRKSVSVIIKGTIKTIIGFMLLQAGSG | 79 |
| Query: | 61 | GLVTTFRPILVALAKKFELKAAVIDPYFGLAAANTKLEEMG-FISVATTALLIGFGVNIL | 119 |
| | | L +TF+P++ +++ + + A+ D Y + A ++ MG S A+L+ +NI | |
| Sbjct: | 80 | ILTSTFKPVVAKMSEVYGINGAISDTYASMMAT---IDRMGDAYSWVGYAVLLALALNIC | 136 |
| Query: | 120 | LVALRKVTKVRTLFITGHIMVQQAATISVFVLLLIPQFQNAFGAWAV----GIICGLYWA | 175 |
| | | V LR++T +RT+ +TGHIM QQA I+V + + + W I+ LYW | |
| Sbjct: | 137 | YVLLRRITGIRTIMLTGHIMFQQAGLIAVTLFIF------GYSMWTTIICTAILVSLYWG | 190 |
| Query: | 176 | ISSNMTVEATQRLTGGGGFAIGHQQQFAIWFVDKVAPFFGKKEENLDNLKLPTFLNIFHD | 235 |
| | | I+SNM + TQ +T G GF+IGHQQQFA W KVAPF GKKEE++++LKLP +LNIFHD | |
| Sbjct: | 191 | ITSNMMYKPTQEVTDGCGFSIGHQQQFASWIAYKVAPFLGKKEESVEDLKLPGWLNIFHD | 250 |
| Query: | 236 | TVVASATLMLVFFGAILAVLGPDIMSDVDLIGPGAFNPAKQAFFMYILQTSLTFSVYLFI | 295 |
| | | +V++A +M +FFGAIL G D + + K + +YILQT +F+V +FI | |
| Sbjct: | 251 | NIVSTAIVMTIFFGAILLSFGIDTVQAM---------AGKVHWTVYILQTGFSFAVAIFI | 301 |
| Query: | 296 | LMQGVRMFVSELTNAFQGISSKLLPGSFPAVDVAASYGFGSSNAVLSGFAFGLIGQLITI | 355 |
| | | + QGVRMFV+EL+ AF GIS +L+PG+ A+D AA Y F + NAV+ GF +G IGQLI + | |
| Sbjct: | 302 | ITQGVRMFVAELSEAFNGISQRLIPGAVLAIDCAAIYSF-APNAVVWGFMWGTIGQLIAV | 360 |
| Query: | 356 | ALLVIFKNPILIITGFVPVFFDNAAIAVYADKRGGWKAAVALSFISGILQVALGAVAVGL | 415 |
| | | +LV + ILII GF+P+FF NA I V+A+ GGW+AA+ + + G++++ AV L | |
| Sbjct: | 361 | GILVACGSSILIIPGFIPMFFSNATIGVFANHFGGWRAALKICLVMGMIEIFGCVWAVKL | 420 |
| Query: | 416 | LGLTGGYHGNIDLVLPWLPFGYLFKFLGIAGYVLVCIFLLA | 456 |
| | | G++ + G D + P F +GIA ++ + LA | |
| Sbjct: | 421 | TGMS-AWMGMADWSILAPPMMQGFFSIGIAFMAVIIVIALA | 460 |

[8179] An alignment of the GAS and GBS proteins is shown below.

| Identities = 437/476 (91%), Positives = 457/476 (95%) | | | |
|---|---|---|---|
| Query: | 1 | MENFLAPLNWFSQNILQNPAFFVGLLVLIGYLLLKKPLHDVFAGFIKATVGYLILNVGAG | 60 |
| | | ME LAPLNWFSQNILQNPAFFVGLLVLIGYLLLKKP+++VFAGF+KATVGYLILNVGAG | |
| Sbjct: | 1 | MEMLLAPLNWFSQNILQNPAFFVGLLVLIGYLLLKLPIYEVFAGFVKATVGYLILNVGAG | 60 |
| Query: | 61 | GLVNTFRPILVALAKKFNLEAAVIDPYFGLASANAKLETMGFISVATTALLIGFGINILL | 120 |
| | | GLV TFRPILVALAKKF L+AAVIDPYFGLA+AN KLE MGFISVATTALLIGFG+NILL | |
| Sbjct: | 61 | GLVTTFRPILVALAKKFELKAAVIDPYFGLAAANTKLEEMGFISVATTALLIGFGVNILL | 120 |
| Query: | 121 | VALRKVTKVRTLFITGHIMVQQAATISVFVLLLIPQLRNGFGAWAVGIICGLYWAVSSNM | 180 |
| | | VALRKVTKVRTLFITGHIMVQQAATISVFVLLLIPQ +N FGAWAVGIICGLYWA+SSNM | |
| Sbjct: | 121 | VALRKVTKVRTLFITGHIMVQQAATISVFVLLLIPQFQNAFGAWAVGIICGLYWAISSNM | 180 |
| Query: | 181 | TVEATQRLTGGGGFAIGHQQQFAIWFVDKVAPFFGKKEENLDNLKLPTFLNIFHDTVVAS | 240 |
| | | TVEATQRLTGGGGFAIGHQQQFAIWFVDKVAPFFGKKEENLDNLKLPTFLNIFHDTVVAS | |
| Sbjct: | 181 | TVEATQRLTGGGGFAIGHQQQFAIWFVDKVAPFFGKKEENLDNLKLPTFLNIFHDTVVAS | 240 |
| Query: | 241 | ATLMLVFFGGILAVLGPDIMSNVKLIGPGAFVPTKQAFFMYILQTSLTFSVYLFILMQGV | 300 |
| | | ATLMLVFFG ILAVLGPDIMS+V LIGPGAF P KQAFFMYILQTSLTFSVYLFILMQGV | |
| Sbjct: | 241 | ATLMLVFFGAILAVLGPDIMSDVDLIGPGAFNPAKQAFFMYILQTSLTFSVYLFILMQGV | 300 |
| Query: | 301 | RMFVTELTNAFQGISNKLLPGSFPAVDVAASYGFGSSNAVLSGFAFGLIGQLITIALLVV | 360 |
| | | RMFV+ELTNAFQGIS+KLLPGSFPAVDVAASYGFGSSNAVLSGFAFGLIGQLITIALLV+ | |
| Sbjct: | 301 | RMFVSELTNAFQGISSKLLPGSFPAVDVAASYGFGSSNAVLSGFAFGLIGQLITIALLVI | 360 |
| Query: | 361 | FKNPILIITGFVPVFFDNAAIAVYADKRGGWKAAVALSFISGIIQVALGAVAVGLLGLAG | 420 |
| | | FKNPILIITGFVPVFFDNAAIAVYADKRGGWKAAVALSFISGI+QVALGAVAVGLLGL G | |
| Sbjct: | 361 | FKNPILIITGFVPVFFDNAAIAVYADKRGGWKAAVALSFISGILQVALGAVAVGLLGLTG | 420 |
| Query: | 421 | GYHGNIDFEFPWLAFGYIFKYLGIAGYVIVCLFFLAIPQLQFMKSKDKEAYYRGDA | 476 |
| | | GYHGNID PWL FGY+FK+LGIAGYV+VC+F LAIPQLQF K+KDKEAYYRG+A | |
| Sbjct: | 421 | GYHGNIDLVLPWLPFGYLFKFLGIAGYVLVCIFLLAIPQLQFAKAKDKEAYYRGEA | 476 |

[8180] Based on this analysis, it was predicted that these proteins and their epitopes could be useful antigens for vaccines or diagnostics.

### EXAMPLE 1489

[8181] A DNA sequence (GBSx1575) was identified in S. agalactiae <SEQ ID 4581> which encodes the amino acid sequence <SEQ ID 4582>. Analysis of this protein sequence reveals the following:

```
Possible site: 37
>>> Seems to have no N-terminal signal sequence
----- Final Results -----
                            bacterial cytoplasm --- Certainty = 0.1225(Affirmative) < succ>
                              bacterial membrane --- Certainty = 0.0000(Not Clear) < succ>
                                bacterial outside --- Certainty = 0.0000(Not Clear) < succ>
```

[8182] The protein has homology with the following sequences in the GENPEPT database.

| >GP: AAG34743 GB: AE000033 similar to PTS system: EIIB [Mycoplasma | | | |
|---|---|---|---|
| pneumoniae] | | | |
| Identities = 40/89 (44%), Positives = 62/89 (68%), Gaps = 1/89 (1%) | | | |
| Query: | 4 | VLTACGNGMGSSMVIKMKVENALRQLGVSNFESASCSVGEAKGLAANYDIVVASNHLIHE | 63 |
| | | ++ ACGNGMG+SM+IK+KVE +++LG + A S+G+ KG+ + DI+++S HL E | |
| Sbjct: | 8 | IIAACGNGMGTSMLIKIKVEKIMKELGYTAKVEA-LSMGQTKGMEHSADIIISSIHLTSE | 66 |
| Query: | 64 | LDGRTKGHLVGLDNLMDDNEIKTKLQEIL | 92 |
| | | + K +VG+ NLMD+NEIK L ++L | |
| Sbjct: | 67 | FNPNAKAKIVGVLNLMDENEIKQALSKVL | 95 |

[8183] A related DNA sequence was identified in S. pyogenes <SEQ ID 4583> which encodes the amino acid sequence <SEQ ID 4584>. Analysis of this protein sequence reveals the following:

```
Possible site: 42
>>> Seems to have no N-terminal signal sequence
----- Final Results -----
                            bacterial cytoplasm --- Certainty = 0.0977(Affirmative) < succ>
                              bacterial membrane --- Certainty = 0.0000(Not Clear) < succ>
                                bacterial outside --- Certainty = 0.0000(Not Clear) < succ>
```

[8184] An alignment of the GAS and GBS proteins is shown below.

| Identities = 85/92 (92%), Positives = 90/92 (97%) | | | |
|---|---|---|---|
| Query: | 1 | MVKVLTACGNGMGSSMVIKMKVENALRQLGVSNFESASCSVGEAKGLAANYDIVVASNHL | 60 |
| | | MVKVLTACGNGMGSSMVIKMKVENALRQLGV++ +SASCSVGEAKGLA+ YDIVVASNHL | |
| Sbjct: | 1 | MVKVLTACGNGMGSSMVIKMKVENALRQLGVTDIQSASCSVGEAKGLASGYDIVVASNHL | 60 |
| Query: | 61 | IHELDGRTKGHLVGLDNLMDDNEIKTKLQEIL | 92 |
| | | IHELDGRTKGHLVGLDNLMDDNEIKTKLQE+L | |
| Sbjct: | 61 | IHELDGRTKGHLVGLDNLMDDNEIKTKLQEVL | 92 |

[8185] Based on this analysis, it was predicted that these proteins and their epitopes could be useful antigens for vaccines or diagnostics.

### EXAMPLE 1490

[8186] A DNA sequence (GBSx1576) was identified in S. agalactiae <SEQ ID 4585> which encodes the amino acid sequence <SEQ ID 4586>. This protein is predicted to be a pentitol phosphotransferase enzyme ii, a component (ptxA). Analysis of this protein sequence reveals the following:

```
Possible site: 38
>>> Seems to have no N-terminal signal sequence
----- Final Results -----
                            bacterial cytoplasm --- Certainty = 0.3309(Affirmative) < succ>
                              bacterial membrane --- Certainty = 0.0000(Not Clear) < succ>
                                bacterial outside --- Certainty = 0.0000(Not Clear) < succ>
```

[8187] The protein has homology with the following sequences in the GENPEPT database.

| >GP: AAC77152 GB: AE000491 putative PTS system enzyme II A component | | | |
|---|---|---|---|
| [Escherichia coli K12] | | | |
| Identities = 64/150 (42%), Positives = 97/150 (64%), Gaps = 2/150 (1%) | | | |
| Query: | 1 | MNLKQAFIENDSIRLKLSASDWKEAIKLSIDPLIESGAVDAEYYDAIIESTEEFGPYYIL | 60 |
| | | M L+ + EN SIRL+ A W+EA+K+ +D L+ + V+ YY AI++ E+FGPY+++ | |
| Sbjct: | 1 | MKLRDSLAENKSIRLQAEAETWQEAVKIGVDLLVAADVVEPRYYQAILDGVEQFGPYFVI | 60 |
| Query: | 61 | MPGMAMPHARPEAGVKRDAFSLITLTEPVVF--PDGKEVSVLLALAATSSAIHTSVAIPQ | 118 |
| | | PG+AMPH RPE GVK+ FSL+TL +P+ F D V +L+ +AA + H V I Q | |
| Sbjct: | 61 | APGLAMPHGRPEEGVKKTGFSLVTLKKPLEFNHDDNDPVDILITMAAVDANTHQEVGIMQ | 120 |
| Query: | 119 | IIALFELENSIQRLTECQEAKEVLAMVEES | 148 |
| | | I+ LFE E + RL C+ +EVL +++ + | |
| Sbjct: | 121 | IVNLFEDEENFDRLRACRTEQEVLDLIDRT | 150 |

[8188] A related DNA sequence was identified in S. pyogenes <SEQ ID 4587> which encodes the amino acid sequence <SEQ ID 4588>. Analysis of this protein sequence reveals the following:

```
Possible site: 42
>>> Seems to have no N-terminal signal sequence
----- Final Results -----
                            bacterial cytoplasm --- Certainty = 0.2287(Affirmative) < succ>
                              bacterial membrane --- Certainty = 0.0000(Not Clear) < succ>
                                bacterial outside --- Certainty = 0.0000(Not Clear) < succ>
```

[8189] An alignment of the GAS and GBS proteins is shown below.

| Identities = 113/161 (70%), Positives = 137/161 (84%) | | | |
|---|---|---|---|
| Query: | 1 | MNLKQAFIENDSIRLKLSASDWKEAIKLSIDPLIESGAVDAEYYDAIIESTEEFGPYYIL | 60 |
| | | MNLKQAFI+N+SIRL LSA W+EA++L++ PLI+S AV + YYDAII STE++GPYY+L | |
| Sbjct: | 1 | MNLKQAFIDNNSIRLGLSADTWQEAVRLAVQPLIDSKAVTSAYYDAIIASTEKYGPYYVL | 60 |
| Query: | 61 | MPGMAMPHARPEAGVKRDAFSLITLTEPVVFPDGKEVSVLLALAATSSAIHTSVAIPQII | 120 |
| | | MPGMAMPHA GV R+AF+LITLT+PV F DGKEVSVLL LAAT +IHT+VAIPQI+ | |
| Sbjct: | 61 | MPGMAMPHAEAGLGVNRNAFALITLTKPVTFSDGKEVSVLLTLAATDPSIHTTVAIPQIV | 120 |
| Query: | 121 | ALFELENSIQRLTECQEAKEVLAMVEESKNSPYLEGLDLES | 161 |
| | | ALFEL+N+I+RL CQ KEVL MVEESK+SPYLEG+DL + | |
| Sbjct: | 121 | ALFELDNAIERLVACQSPKEVLEMVEESKDSPYLEGMDLNA | 161 |

[8190] Based on this analysis, it was predicted that these proteins and their epitopes could be useful antigens for vaccines or diagnostics.

### EXAMPLE 1491

[8191] A DNA sequence (GBSx1577) was identified in S. agalactiae <SEQ ID 4589> which encodes the amino acid sequence <SEQ ID 4590>. This protein is predicted to be probable hexulose-6-phosphate synthase. Analysis of this protein sequence reveals the following:

```
Possible site: 19
>>> Seems to have no N-terminal signal sequence
----- Final Results -----
                            bacterial cytoplasm --- Certainty = 0.1584(Affirmative) < succ>
                              bacterial membrane --- Certainty = 0.0000(Not Clear) < succ>
                                bacterial outside --- Certainty = 0.0000(Not Clear) < succ>
```

[8192] The protein has homology with the following sequences in the GENPEPT database.

| >GP: AAC77153 GB: AE000491 probable hexulose-6-phosphate synthase | | | |
|---|---|---|---|
| [Escherichia coli K12] | | | |
| Identities = 108/217 (49%), Positives = 141/217 (64%), Gaps = 3/217 (1%) | | | |
| Query: | 5 | LPNLQVALDHSDLQGAIKAAVSVGHEVDVIEAGTVCLLQVGSELVEVLRSLFPDKIIVAD | 64 |
| | | LP LQVALD+ + A + + EVD+IE GT+ + G V L++L+P KI++AD | |
| Sbjct: | 3 | LPMLQVALDNQTMDSAYETTRLIAEEVDIIEVGTILCVGEGVRAVRDLKALYPHKIVLAD | 62 |
| Query: | 65 | TKCADAGGTVAKNNAVRGADWMTCICCATIPTMEAALKAIKEERGDRGEIQIELYGDWTY | 124 |
| | | K ADAG +++ ADW+T ICCA I T + AL KE GD +QIEL G WT+ | |
| Sbjct: | 63 | AKIADAGKILSRMCFEANADWVTVICCADINTAKGALDVAKEFNGD---VQIELTGYWTW | 119 |
| Query: | 125 | EQAQQWLDAGISQAIYHQSRDALLAGETWGEKDLNKVKKLIDMGFRVSVTGGLSTDTLQL | 184 |
| | | EQAQQW DAGI Q +YH+SRDA AG WGE D+ +K+L DMGF+V+VTGGL+ + L L | |
| Sbjct: | 120 | EQAQQWRDAGIGQVVYHRSRDAQAAGVAWGEADITAIKRLSDMGFKVTVTGGLALEDLPL | 179 |
| Query: | 185 | FEGVDVFTFIAGRGITEADDPAAAARAFKDEIKRIWG | 221 |
| | | F+G+ + FIAGR I +A P AAR FK I +WG | |
| Sbjct: | 180 | FKGIPIHVFIAGRSIRDAASPVEAARQFKRSIAELWG | 216 |

[8193] A related DNA sequence was identified in S. pyogenes <SEQ ID 4591> which encodes the amino acid sequence <SEQ ID 4592>. Analysis of this protein sequence reveals the following:

```
Possible site: 27
>>> Seems to have no N-terminal signal sequence
----- Final Results -----
                            bacterial cytoplasm --- Certainty = 0.1473(Affirmative) < succ>
                              bacterial membrane --- Certainty = 0.0000(Not Clear) < succ>
                                bacterial outside --- Certainty = 0.0000(Not Clear) < succ>
```

[8194] An alignment of the GAS and GBS proteins is shown below.

| Identities = 206/217 (94%), Positives = 212/217 (96%) | | | |
|---|---|---|---|
| Query: | 5 | LPNLQVALDHSDLQGAIKAAVSVGHEVDVIEAGTVCLLQVGSELVEVLRSLFPDKIIVAD | 64 |
| | | +PNLQVALDHSDLQGA+KAAV+VGHEVDVIEAGTVCLLQVGSELVEVLRSLFP+KIIVAD | |
| Sbjct: | 4 | IPNLQVALDHSDLQGAVKAAVAVGHEVDVIEAGTVCLLQVGSELVEVLRSLFPEKIIVAD | 63 |
| Query: | 65 | TKCADAGGTVAKNNAVRGADWMTCICCATIPTMEAALKAIKEERGDRGEIQIELYGDWTY | 124 |
| | | TKCADAGGTVAKNNA RGADWMTCICCATIPTMEAALKAIKEERGDRGEIQIELYGDWTY | |
| Sbjct: | 64 | TKCADAGGTVAKNNAKRGADWMTCICCATIPTMEAALKAIKEERGDRGEIQIELYGDWTY | 123 |
| Query: | 125 | EQAQQWLDAGISQAIYHQSRDALLAGETWGEKDLNKVKKLIDMGFRVSVTGGLSTDTLQL | 184 |
| | | EQAQ WLDAGISQAIYHQSRDALLAGETWGEKDLNKVK LIDMGFRVSVTGGL DTL+L | |
| Sbjct: | 124 | EQAQLWLDAGISQAIYHQSRDALLAGETWGEKDLNKVKTLIDMGFRVSVTGGLDVDTLRL | 183 |
| Query: | 185 | FEGVDVFTFIAGRGITEADDPAAAARAFKDEIKRIWG | 221 |
| | | FEGVDVFTFIAGRGITEA+DPAAAARAFKDEIKRIWG | |
| Sbjct: | 184 | FEGVDVFTFIAGRGITEAEDPAAAARAFKDEIKRIWG | 220 |

[8195] Based on this analysis, it was predicted that these proteins and their epitopes could be useful antigens for vaccines or diagnostics.

### EXAMPLE 1492

[8196] A DNA sequence (GBSx1578) was identified in S. agalactiae <SEQ ID 4593> which encodes the amino acid sequence <SEQ ID 4594>. Analysis of this protein sequence reveals the following:

```
Possible site: 36
>>> Seems to have no N-terminal signal sequence
----- Final Results -----
                            bacterial cytoplasm --- Certainty = 0.4179(Affirmative) < succ>
                              bacterial membrane --- Certainty = 0.0000(Not Clear) < succ>
                                bacterial outside --- Certainty = 0.0000(Not Clear) < succ>
```

[8197] The protein has homology with the following sequences in the GENPEPT database.

| >GP: AAC22686 GB: U32783 hexulose-6-phosphate isomerase, putative | | | |
|---|---|---|---|
| [Haemophilus influenzae Rd] | | | |
| Identities = 143/282 (50%), Positives = 199/282 (69%), Gaps = 3/282 (1%) | | | |
| Query: | 5 | IGIYEKATPKHFNWLERLQFAKELGFDFVELSIDESDERLARLEWSKEERLELVKAIFET | 64 |
| | | IGIYEKA PK+ W ERL AK GF+F+E+SIDES++RL+RL W+K ER+ L ++I ++ | |
| Sbjct: | 6 | IGIYEKALPKNITWQERLSLAKACGFEFIEMSIDESNDRLSRLNWTKSERIALHQSIIQS | 65 |
| Query: | 65 | GVRVPTITFSGHRRFPMGSNNPEKEARAMDMMKKCIVFAQDIGIRNIQLAGYDVYYEEKS | 124 |
| | | G+ +P++ S HRRFP GS + + ++ ++M+K I + ++GIR IQLAGYDVYYE++ | |
| Sbjct: | 66 | GITIPSMCLSAHRRFPFGSKDKKIRQKSFEIMEKAIDLSVNLGIRTIQLAGYDVYYEKQD | 125 |
| Query: | 125 | PETRARFIKNLRQACTWAEEAQVILSIEIMDDPFMNSIEKYLAVEKEIDSPYLFVYPDTG | 184 |
| | | ET F + + A T A AQV L++EIMD PFM+SI ++ + I+SP+ VYPD G | |
| Sbjct: | 126 | EETIKYFQEGIEFAVTLAASAQVTLAVEIMDTPFMSSISRWKKWDTIINSPWFTVYPDIG | 185 |
| Query: | 185 | NVSAWHNDLWSEFYNGHRSIAALHIKDTYAVTETSKGQFRDVPFGQGCVDWEEMFAVIKK | 244 |
| | | N+SAW+N++ E G I+A+H+KDTY VTETSKGQFRDVPFGQGCVD+ F+++KK | |
| Sbjct: | 186 | NLSAWNNNIEEELTLGIDKISAIHLKDTYPVTETSKGQFRDVPFGQGCVDFVHFFSLLKK | 245 |
| Query: | 245 | TNYNGPFLIEMWSENCETVEETRAAIKEAQDFLYPLMEKTGV | 286 |
| | | NY G FLIEMW+E EE I +A+ ++ MEK G+ | |
| Sbjct: | 246 | LNYRGAFLIEMWTEK---NEEPLLEIIQARKWIVQQMEKAGL | 284 |

[8198] A related DNA sequence was identified in S. pyogenes <SEQ ID 4595> which encodes the amino acid sequence <SEQ ID 4596>. Analysis of this protein sequence reveals the following:

```
Possible site: 50
>>> Seems to have no N-terminal signal sequence
----- Final Results -----
                            bacterial cytoplasm --- Certainty = 0.1489(Affirmative) < succ>
                              bacterial membrane --- Certainty = 0.0000(Not Clear) < succ>
                                bacterial outside --- Certainty = 0.0000(Not Clear) < succ>
```

[8199] An alignment of the GAS and GBS proteins is shown below.

| Identities = 240/286 (83%), Positives = 271/286 (93%) | | | |
|---|---|---|---|
| Query: | 1 | MTRPIGIYEKATPKHFNWLERLQFAKELGFDFVELSIDESDERLARLEWSKEERLELVKA | 60 |
| | | M RPIGIYEKATPK F W ERLQFAK+LGFDFVE+S+DESD RLARLEW+KEERL+LVKA | |
| Sbjct: | 15 | MARPIGIYEKATPKQFTWRERLQFAKDLGFDFVEMSVDESDARLARLEWTKEERLDLVKA | 74 |
| Query: | 61 | IFETGVRVPTITFSGHRRFPMGSNNPEKEARAMDMMKKCIVFAQDIGIRNIQLAGYDVYY | 120 |
| | | I+ETG+R+PTI FSGHRR+P+GSN+P EA+++ +MK+CI AQD+G+R IQLAGYDVYY | |
| Sbjct: | 75 | IYETGIRIPTICFSGHRRYPLGSNDPAIEAKSLKLMKQCIELAQDLGVRTIQLAGYDVYY | 134 |
| Query: | 121 | EEKSPETRARFIKNLRQACTWAEEAQVILSIEIMDDPFMNSIEKYLAVEKEIDSPYLFVY | 180 |
| | | E+KSPETRARFIKNLRQ+C WAEEAQV+LSIEIMDDPF+NSIEKYLAVEKEIDSPYLFVY | |
| Sbjct: | 135 | EKKSPETRARFIKNLRQSCDWAEEAQVMLSIEIMDDPFINSIEKYLAVEKEIDSPYLFVY | 194 |
| Query: | 181 | PDTGNVSAWHNDLWSEFYNGHRSIAALHIKDTYAVTETSKGQFRDVPFGQGCVDWEEMFA | 240 |
| | | PD GNVSAWHNDLWSEFYNGH+SIAALH+KDTYAVTETSKGQFRDVPFGQGCVDW+E+FA | |
| Sbjct: | 195 | PDAGNVSAWHNDLWSEFYNGHKSIAALHLKDTYAVTETSKGQFRDVPFGQGCVDWQELFA | 254 |
| Query: | 241 | VIKKTNYNGPFLIEMWSENCETVEETRAAIKEAQDFLYPLMEKTGV | 286 |
| | | V+KKTNYNGPFLIEMWSENC+TVEET+AAIKEAQDFLYPL+EK G+ | |
| Sbjct: | 255 | VLKKTNYNGPFLIEMWSENCDTVEETKAAIKEAQDFLYPLIEKAGL | 300 |

[8200] Based on this analysis, it was predicted that these proteins and their epitopes could be useful antigens for vaccines or diagnostics.

### EXAMPLE 1493

[8201] A DNA sequence (GBSx1579) was identified in S. agalactiae <SEQ ID 4597> which encodes the amino acid sequence <SEQ ID 4598>. This protein is predicted to be L-ribulose 5-phosphate 4-epimerase. Analysis of this protein sequence reveals the following:

```
Possible site: 23
>>> Seems to have no N-terminal signal sequence
----- Final Results -----
                            bacterial cytoplasm --- Certainty = 0.2559(Affirmative) < succ>
                              bacterial membrane --- Certainty = 0.0000(Not Clear) < succ>
                                bacterial outside --- Certainty = 0.0000(Not Clear) < succ>
```

[8202] The protein has homology with the following sequences in the GENPEPT database.

| >GP: AAD45716 GB: AF160811 L-ribulose 5-phosphate 4-epimerase | | | |
|---|---|---|---|
| [Bacillus stearothermophilus] | | | |
| Identities = 143/229 (62%), Positives = 176/229 (76%), Gaps = 2/229 (0%) | | | |
| Query: | 5 | LQEMRERVCEANKSLPVHSLVKFTWGNVSEVDREAGLIVIKPSGVDYDQLTPENMVVTDL | 64 |
| | | L+E+++ V EAN LP + LV FTWGNVS +DRE GL+VIKPSGV YD+LT ++MVV DL | |
| Sbjct: | 2 | LEELKQAVLEANLQLPQYRLVTFTWGNVSGIDRERGLVVIKPSGVAYDKLTIDDMVVVDL | 61 |
| Query: | 65 | EGNIVEGDLNPSSDLPTHVQLYKAWPEVGGIVHTHSTEAVGWAQAGRDIPFYGTTHADYF | 124 |
| | | GN+VEGDL PSSD PTH+ LYK +P +GGIVHTHST A WAQAG+ IP GTTHADYF | |
| Sbjct: | 62 | TGNVVEGDLKPSSDTPTHLWLYKQFPGIGGIVHTHSTWATVWAQAGKGIPALGTTHADYF | 121 |
| Query: | 125 | YGPVPCARSLSEDEVNTAYEKETGSVIIEEFERRDLDPMAVPGIVVRNHGPFTWGKDPAQ | 184 |
| | | YG +PC R ++ +E+ AYE ETG VI E F R LDP+ +PG++V HGPF WGKDPA | |
| Sbjct: | 122 | YGEIPCTRPMTNEEIQGAYELETGKVITETF--RFLDPLQMPGVLVHGHGPFAWGKDPAN | 179 |
| Query: | 185 | AVYHSVVLEEVAKMNRFTEQINPRVEPAPKYIMDKHYLRKHGPNAYYGQ | 233 |
| | | AV+++VVLEEVAKM T +NP +P + ++D+HYLRKHG NAYYGQ | |
| Sbjct: | 180 | AVHNAVVLEEVAKMAARTYMLNPNAKPISQTLLDRHYLRKHGANAYYGQ | 228 |

[8203] A related DNA sequence was identified in S. pyogenes <SEQ ID 4599> which encodes the amino acid sequence <SEQ ID 4600>. Analysis of this protein sequence reveals the following:

```
Possible site: 14
>>> Seems to have no N-terminal signal sequence
----- Final Results -----
                            bacterial cytoplasm --- Certainty = 0.2257(Affirmative) < succ>
                              bacterial membrane --- Certainty = 0.0000(Not Clear) < succ>
                                bacterial outside --- Certainty = 0.0000(Not Clear) < succ>
```

[8204] An alignment of the GAS and GBS proteins is shown below.

| Identities = 207/234 (88%), Positives = 220/234 (93%) | | | |
|---|---|---|---|
| Query: | 1 | MAKSLQEMRERVCEANKSLPVHSLVKFTWGNVSEVDREAGLIVIKPSGVDYDQLTPENMV | 60 |
| | | MAK+LQEMRERVC ANKSLP H LVKFTWGNVSEV RE G IVIKPSGVDYD LTPENMV | |
| Sbjct: | 1 | MAKNLQEMRERVCAANKSLPQHGLVKFTWGNVSEVCRELGRIVIKPSGVDYDLLTPENMV | 60 |
| Query: | 61 | VTDLEGNIVEGDLNPSSDLPTHVQLYKAWPEVGGIVHTHSTEAVGWAQAGRDIPFYGTTH | 120 |
| | | VTDL+GN+VEGDLNPSSDLPTHV+LYKAWPEVGGIVHTHSTEAVGWAQAGRDIPFYGTTH | |
| Sbjct: | 61 | VTDLDGNVVEGDLNPSSDLPTHVELYKAWPEVGGIVHTHSTEAVGWAQAGRDIPFYGTTH | 120 |
| Query: | 121 | ADYFYGPVPCARSLSEDEVNTAYEKETGSVIIEEFERRDLDPMAVPGIVVRNHGPFTWGK | 180 |
| | | ADYFYGPVPCARSL++ EV+ AYE+ETG+VI+EEF +R LDPMAVPGIVVRNHGPFTWGK | |
| Sbjct: | 121 | ADYFYGPVPCARSLTKAEVDGAYEQETGNVILEEFSKRGLDPMAVPGIVVRNHGPFTWGK | 180 |
| Query: | 181 | DPAQAVYHSVVLEEVAKMNRFTEQINPRVEPAPKYIMDKHYLRKHGPNAYYGQK | 234 |
| | | P QAVYHSVVLEEVA+MNR TEQINPRVEPAP+YIMDKHYLRKHGPNAYYGQK | |
| Sbjct: | 181 | TPEQAVYHSVVLEEVARMNRLTEQINPRVEPAPRYIMDKHYLRKHGPNAYYGQK | 234 |

[8205] Based on this analysis, it was predicted that these proteins and their epitopes could be useful antigens for vaccines or diagnostics.

### EXAMPLE 1494

[8206] A DNA sequence (GBSx1580) was identified in S. agalactiae <SEQ ID 4601> which encodes the amino acid sequence <SEQ ID 4602>. This protein is predicted to be transaldolase (tal). Analysis of this protein sequence reveals the following:

```
Possible site: 45
>>> Seems to have no N-terminal signal sequence
----- Final Results -----
                            bacterial cytoplasm --- Certainty = 0.4232(Affirmative) < succ>
                              bacterial membrane --- Certainty = 0.0000(Not Clear) < succ>
                                bacterial outside --- Certainty = 0.0000(Not Clear) < succ>
```

[8207] A related GBS nucleic acid sequence <SEQ ID 10149> which encodes amino acid sequence <SEQ ID 10150> was also identified.

[8208] The protein has homology with the following sequences in the GENPEPT database.

| >GP: AAB98962 GB: U67539 transaldolase [Methanococcus jannaschii] | | | |
|---|---|---|---|
| Identities = 124/214 (57%), Positives = 157/214 (72%) | | | |
| Query: | 19 | MKYFLDTADVSEIRRLNRLGIVDGVTTNPTIISREGRDFKEVINEICQIVDGPVSAEVTG | 78 |
| | | MK+FLDTA+V EI++ LG+VDGVTTNPT++++EGRDF EV+ EIC+IV+GPVSAEV | |
| Sbjct: | 1 | MKFFLDTANVEEIKKYAELGLVDGVTTNPTLVAKEGRDFYEVVKEICEIVEGPVSAEVIS | 60 |
| Query: | 79 | LTCDEMVTEAREIAKWSPNVVVKIPMTEEGLAAVSQLSKEGIKTNVTLIFTVAQGLSAMK | 138 |
| | | + MV EARE+AK + N+V+KIPMT++G+ AV LS EGIKTNVTL+F+ Q L A K | |
| Sbjct: | 61 | TDAEGMVKEARELAKLADNIVIKIPMTKDGMKAVKILSAEGIKTNVTLVFSPLQALVAAK | 120 |
| Query: | 139 | AGATFISPFVGRLEDIGTDAYALIRDLRHIIDFYGFQSEIIAASIRGLAHVEGVAKCGAH | 198 |
| | | AGAT++SPFVGRL+DIG LI D+ I Y ++E+I AS+R HV AK GA | |
| Sbjct: | 121 | AGATYVSPFVGRLDDIGHVGMKLIEDVVKIYKNYDIKTEVIVASVRHPWHVLEAAKIGAD | 180 |
| Query: | 199 | IATIPDKTFASLFTHPLTDKGIETFLKDWDSFKK | 232 |
| | | IAT+P LF HPLTD G+E FLKDWD + K | |
| Sbjct: | 181 | IATMPPAVMDKLFNHPLTDIGLERFLKDWDEYLK | 214 |

[8209] A related DNA sequence was identified in S. pyogenes <SEQ ID 4603> which encodes the amino acid sequence <SEQ ID 4604>. Analysis of this protein sequence reveals the following:

```
Possible site: 15
>>> Seems to have no N-terminal signal sequence
----- Final Results -----
                            bacterial cytoplasm --- Certainty = 0.1902(Affirmative) < succ>
                              bacterial membrane --- Certainty = 0.0000(Not Clear) < succ>
                                bacterial outside --- Certainty = 0.0000(Not Clear) < succ>
```

[8210] An alignment of the GAS and GBS proteins is shown below.

| Identities = 162/214 (75%), Positives 180/214 (83%) | | | |
|---|---|---|---|
| Query: | 19 | MKYFLDTADVSEIRRLNRLGIVDGVTTNPTIISREGRDFKEVINEICQIVDGPVSAEVTG | 78 |
| | | MK+FLDTA+V+ I+ +N LG+VDGVTTNPTIISREGRDF+ VI EIC IVDGP+SAEVTG | |
| Sbjct: | 1 | MKFFLDTANVAAIKAINELGVVDGVTTNPTIISREGRDFETVIKEICDIVDGPISAEVTG | 60 |
| Query: | 79 | LTCDEMVTEAREIAKWSPNVVVKIPMTEEGLAAVSQLSKEGIKTNVTLIFTVAQGLSAMK | 138 |
| | | LT D MV EAR IAKW NVVVKIPMT EGL A + LSKEGIKTNVTLIFTV+QGL AMK | |
| Sbjct: | 61 | LTADAMVEEARSIAKWHDNVVVKIPMTTEGLKATNILSKEGIKTNVTLIFTVSQGLMAMK | 120 |
| Query: | 139 | AGATFISPFVGRLEDIGTDAYALIRDLRHIIDFYGFQSEIIAASIRGLAHVEGVAKCGAH | 198 |
| | | AGAT+ISPF+GRLEDIGTDAY LI DLR IID Y FQ+EIIAASIR AHVE VAK GAH | |
| Sbjct: | 121 | AGATYISPFIGRLEDIGTDAYQLISDLREIIDLYDFQAEIIAASIRTTAHVEAVAKLGAH | 180 |
| Query: | 199 | IATIPDKTFASLFTHPLTDKGIETFLKDWDSFKK | 232 |
| | | IATIPD FA + HPLT G++TF++DW SFKK | |
| Sbjct: | 181 | IATIPDPLFAKMTQHPLTTNGLKTFMEDWASFKK | 214 |

[8211] Based on this analysis, it was predicted that these proteins and their epitopes could be useful antigens for vaccines or diagnostics.

### EXAMPLE 1495

[8212] A DNA sequence (GBSx1581) was identified in S. agalactiae <SEQ ID 4605> which encodes the amino acid sequence <SEQ ID 4606>. Analysis of this protein sequence reveals the following:

```
Possible site: 22
>>> Seems to have no N-terminal signal sequence
----- Final Results -----
                            bacterial cytoplasm --- Certainty = 0.1263(Affirmative) < succ>
                              bacterial membrane --- Certainty = 0.0000(Not Clear) < succ>
                                bacterial outside --- Certainty = 0.0000(Not Clear) < succ>
```

[8213] The protein has homology with the following sequences in the GENPEPT database.

| >GP: CAB14129 GB: Z99115 transcriptional regulator (LacI family) | | | |
|---|---|---|---|
| [Bacillus subtilis] | | | |
| Identities = 108/331 (32%), Positives = 188/331 (56%), Gaps = 12/331 (3%) | | | |
| Query: | 6 | TISDIANLVGVSKATVSYYLNGNYKKMSLQTKEKIRLAIKETGYQPSKIAQSLVTKNTRT | 65 |
| | | TI D+A GVSK+TVS Y+NG +S + + I+ AI E Y+PSK+AQ L K ++ | |
| Sbjct: | 10 | TIKDVAECAGVSKSTVSRYINGKIDAISPEKVKNIKKAIAELNYRPSKMAQGLKIKKSKL | 69 |
| Query: | 66 | IGVVIADITNPFISSVMKGIHDTCQQFGYSVNFTNSDNDIDIELENLNRLNQQNVSGIIL | 125 |
| | | IG V+ADITNPF + +G+ + C Q+GYS+ N+DN + E E L +L +V G+IL | |
| Sbjct: | 70 | IGFVVADITNPFSVAAFRGVEEVCDQYGYSIMVCNTDNSPEKEREMLLKLEAHSVEGLIL | 129 |
| Query: | 126 | DSVDPNHSFIETLSNDRL--VMVDRQAKDIKVDTVASDNKESTQIFLEKMQEAGYHDIYF | 183 |
| | | ++ N + + ++ +++DR+ D+K+DTV +DN+ T+ L+K+ GY D+ | |
| Sbjct: | 130 | NATGENKDVLRAFAEQQIPTILIDRKLPDLKLDTVTTDNRWITKEILQKVYSKGYTDVAL | 189 |
| Query: | 184 | VTYPIEGISTRELRYEGFKEVVS-SNPDKLIIITE-DGSTQRILDI------IEHSEQKP | 235 |
| | | T PI IS R R ++E+ S N + L+ + E D + L E EQK | |
| Sbjct: | 190 | FTEPISSISPRAERAAVYQEMASVQNVNGLVRLHEIDVKDKEQLKAELRSFHKEMPEQKK | 249 |
| Query: | 236 | GFLMMNGPTLLNFMKKLNQSTVSYPEDYGLGSYEDLEWMQVLTPNVSCIKQDSYGIGCLA | 295 |
| | | L +NG +L + + + + P+D G+ ++D EW +++ P ++ I Q S+ +G A | |
| Sbjct: | 250 | AILALNGLIMLKIISCMEELGLRIPQDIGIAGFDDTEWYKLIGPGITTIAQPSHDMGRTA | 309 |
| Query: | 296 | AQCLIEKISQGNEPTTARLLEVKNQIVIRQS | 326 |
| | | + ++++I + + +E++ ++++R+S | |
| Sbjct: | 310 | MERVLKRIE--GDKGAPQTIELEAKVIMRKS | 338 |

[8214] There is also homology to SEQ ID 2366.

[8215] Based on this analysis, it was predicted that this protein and its epitopes, could be useful antigens for vaccines or diagnostics.

### EXAMPLE 1496

[8216] A DNA sequence (GBSx1582) was identified in S. agalactiae <SEQ ID 4607> which encodes the amino acid sequence <SEQ ID 4608>. Analysis of this protein sequence reveals the following:

```
Possible site: 40
>>> Seems to have no N-terminal signal sequence
----- Final Results -----
                            bacterial cytoplasm --- Certainty = 0.1661(Affirmative) < succ>
                              bacterial membrane --- Certainty = 0.0000(Not Clear) < succ>
                                bacterial outside --- Certainty = 0.0000(Not Clear) < succ>
```

[8217] The protein has no significant homology with any sequences in the GENPEPT database.

[8218] No corresponding DNA sequence was identified in S. pyogenes.

[8219] Based on this analysis, it was predicted that this protein and its epitopes, could be useful antigens for vaccines or diagnostics.

### EXAMPLE 1497

[8220] A DNA sequence (GBSx1583) was identified in S. agalactiae <SEQ ID 4609> which encodes the amino acid sequence <SEQ ID 4610>. This protein is predicted to be GLYCERATE DEHYDROGENASE. Analysis of this protein sequence reveals the following:

```
Possible site: 29
>>> Seems to have an uncleavable N-term signal seq
----- Final Results -----
                              bacterial membrane --- Certainty = 0.0000(Not Clear) < succ>
                                bacterial outside --- Certainty = 0.0000(Not Clear) < succ>
                            bacterial cytoplasm --- Certainty = 0.0000(Not Clear) < succ>
```

[8221] The protein has homology with the following sequences in the GENPEPT database.

| >GP: CAB50351 GB: AJ248287 GLYCERATE DEHYDROGENASE [Pyrococcus abyssi] | | | |
|---|---|---|---|
| Identities = 123/325 (37%), Positives = 192/325 (58%), | | | |
| Gaps = 8/325 (2%) | | | |
| Query: | 1 | MDKKKILVTGIVPKEGLRKLMDRFDVTYSED-RPFSRDYVLEHLSEYDGWLLM-GQKGDK | 58 |
| | | M K ++ +T +P+ G+ L F+V ED R R+ +LE + + D + M ++ D+ | |
| Sbjct: | 1 | MSKPRVFITREIPEVGIEMLEKEFEVEVWEDEREIPREILLEKVKDVDALVTMLSERIDR | 60 |
| Query: | 59 | EMIDAGENLQIISLNAVGFDHVDTAYAKEKGIIVSNSPQAVRVPTAEMTFALILAASKRL | 118 |
| | | E+ + L+I++ AVG+D++D A ++GI V+N+P + TA++ FAL+LA ++ L | |
| Sbjct: | 61 | EVFERAPRLRIVANYAVGYDNIDVEEATKRGIYVTNTPGVLTDATADLAFALLLATARHL | 120 |
| Query: | 119 | AFYDSIVRSGEW----IDPSEQRYQGLTLQGSTLGIYGMGRIGLTVANFAKAFGMTVVYN | 174 |
| | | D RSGEW + + + G + G T+GI G GRIG +A A+ F M ++Y | |
| Sbjct: | 121 | VKGDKFTRSGEWKKRGVAWHPKWFLGYDVYGKTIGIIGFGRIGQAIAKRARGFDMRILYY | 180 |
| Query: | 175 | DVYRLPEDKEKELGVTYLEFDQLIKTADVITIHAPALPSTIHKFNKDVFAKMKNRSYLIN | 234 |
| | | R PE EKEL + D+L++ +D + + P T H N++ MK + LIN | |
| Sbjct: | 181 | SRTRKPE-VEKELNAEFKPLDELLRESDFVVLAVPLNKETYHMINEERLKMMKRTAILIN | 239 |
| Query: | 235 | AARGPIVSEEALIEALKEGEIAGAGLDVFENEPQVSEGLRSLDNVIMSPHAGTGTIEGRR | 294 |
| | | ARG ++ +ALI+ALKEG IAGAGLDV+E EP +E L SLDNV+++PH G+ T R | |
| Sbjct: | 240 | VARGKVIDTKALIKALKEGWIAGAGLDVYEEEPYYNEELFSLDNVVLTPHIGSATFGARE | 299 |
| Query: | 295 | TLAEEAADNIIAFFDGK-PQNIVNK | 318 |
| | | +A+ A+N+IAF G+ P +VN+ | |
| Sbjct: | 300 | GMAKLVAENLIAFKRGEVPPTLVNR | 324 |

[8222] There is also homology to SEQ ID 124.

[8223] Based on this analysis, it was predicted that this protein and its epitopes, could be useful antigens for vaccines or diagnostics.

### EXAMPLE 1498

[8224] A DNA sequence (GBSx1585) was identified in S. agalactiae <SEQ ID 4611> which encodes the amino acid sequence <SEQ ID 4612>. Analysis of this protein sequence reveals the following:

```
Possible site: 34
>>> Seems to have no N-terminal signal sequence
----- Final Results -----
                            bacterial cytoplasm --- Certainty = 0.1898(Affirmative) < succ>
                              bacterial membrane --- Certainty = 0.0000(Not Clear) < succ>
                                bacterial outside --- Certainty = 0.0000(Not Clear) < succ>
```

[8225] The protein has no significant homology with any sequences in the GENPEPT database.

[8226] No corresponding DNA sequence was identified in S. pyogenes.

[8227] Based on this analysis, it was predicted that this protein and its epitopes, could be useful antigens for vaccines or diagnostics.

### EXAMPLE 1499

[8228] A DNA sequence (GBSx1586) was identified in S. agalactiae <SEQ ID 4613> which encodes the amino acid sequence <SEQ ID 4614>. This protein is predicted to be PTS system, galactitol specific IIC component. Analysis of this protein sequence reveals the following:

| Possible site: 25 | | | | |
|---|---|---|---|---|
| >>> Seems to have no N-terminal signal sequence | | | | |
| | INTEGRAL | Likelihood = −13.27 | Transmembrane | 254-270 (245-277) |
| | INTEGRAL | Likelihood = −9.24 | Transmembrane | 77-93 (71-100) |
| | INTEGRAL | Likelihood = −9.24 | Transmembrane | 367-383 (364-386) |
| | INTEGRAL | Likelihood = −8.28 | Transmembrane | 32-48 (26-54) |
| | INTEGRAL | Likelihood = −7.38 | Transmembrane | 186-202 (182-215) |
| | INTEGRAL | Likelihood = −6.26 | Transmembrane | 158-174 (151-180) |
| | INTEGRAL | Likelihood = −5.79 | Transmembrane | 279-295 (276-296) |
| | INTEGRAL | Likelihood = −1.12 | Transmembrane | 342-358 (342-359) |
| | INTEGRAL | Likelihood = −0.00 | Transmembrane | 308-324 (308-324) |

```
----- Final Results -----
                              bacterial membrane --- Certainty = 0.6307(Affirmative) < succ>
                                bacterial outside --- Certainty = 0.0000(Not Clear) < succ>
                            bacterial cytoplasm --- Certainty = 0.0000(Not Clear) < succ>
```

[8229] A related GBS nucleic acid sequence <SEQ ID 8825> which encodes amino acid sequence <SEQ ID 8826> was also identified. Analysis of this protein sequence reveals the following:

| Lipop: Possible site: −1 Crend: 9 | | | | |
|---|---|---|---|---|
| McG: Discrim Score: 8.30 | | | | |
| GvH: Signal Score (−7.5): 2.97 | | | | |
| Possible site: 58 | | | | |
| >>> Seems to have a cleavable N-term signal seq. | | | | |
| ALOM program count: 9 value: −13.27 threshold: 0.0 | | | | |
| | INTEGRAL | Likelihood = −13.27 | Transmembrane | 321-337 (312-344) |
| | INTEGRAL | Likelihood = −9.24 | Transmembrane | 144-160 (138-167) |
| | INTEGRAL | Likelihood = −9.24 | Transmembrane | 434-450 (431-453) |
| | INTEGRAL | Likelihood = −8.28 | Transmembrane | 99-115 (93-121) |
| | INTEGRAL | Likelihood = −7.38 | Transmembrane | 253-269 (249-282) |
| | INTEGRAL | Likelihood = −6.26 | Transmembrane | 225-241 (218-247) |
| | INTEGRAL | Likelihood = −5.79 | Transmembrane | 346-362 (343-363) |
| | INTEGRAL | Likelihood = −1.12 | Transmembrane | 409-425 (409-426) |
| | INTEGRAL | Likelihood = −0.00 | Transmembrane | 375-391 (375-391) |
| | PERIPHERAL | Likelihood = 0.69 | 188 | |

```
modified ALOM score: 3.15
*** Reasoning Step: 3
----- Final Results -----
                              bacterial membrane --- Certainty = 0.6307(Affirmative) < succ>
                                bacterial outside --- Certainty = 0.0000(Not Clear) < succ>
                            bacterial cytoplasm --- Certainty = 0.0000(Not Clear) < succ>
```

[8230] The protein has homology with the following sequences in the GENPEPT database.

| >GP: BAB03909 GB: AP001507 PTS system, galactitol-specific enzyme II, | | | |
|---|---|---|---|
| C component [Bacillus halodurans] | | | |
| Identities = 92/347 (26%), positives = 173/347 (49%), | | | |
| Gaps = 15/347 (4%) | | | |
| Query: | 1 | MVKTTGLHLPIVDIGWQAGSLTAFSSEIGLSFFVFGLLIELGLFLLGITRVFVPSNLWNN | 60 |
| | | MV G+ L ++D+GW A S A++S + GL++ + + + T+ + ++WN | |
| Sbjct: | 70 | MVDRLGVDLNVIDVGWPATSSIAWASVVAAFIIPLGLIVNVIMLVTKTTKT-MNVDIWNF | 128 |
| Query: | 61 | FGYMIWGTMAYAATGNFILSFAFMVFVLLYSLVMSEVLADRWSEYYGVKNATINSIHNIE | 120 |
| | | + Y + Y + + I + V + +L +++ A SE+Y + +I + I | |
| Sbjct: | 129 | WHYTFMAAVVYTVSDSIIQALIAAVMFQIVALKVADWTAPMVSEFYELPGVSIATGSTIS | 188 |
| Query: | 121 | TLIPALILDPLWNLLGVNKVKLNPESLKTKLGIFGEPMTLGFILGVIIGVLGSLRNLASI | 180 |
| | | ++ + + G+ +P++++ + GIFGE + +G ILG IG+L | |
| Sbjct: | 189 | YAPGIWLVKGIQKIPGIKHWNADPDTIQRRFGIFGESIFIGLILGAAIGLLAGYNV---- | 244 |
| Query: | 181 | DTWGGILGFAVALAAVMTIFPLITGVFASAFAPLAEAVERNKKKESQAEQGALDKKRWFI | 240 |
| | | G ++ +A+AAVM + P + + P++E+ K + I | |
| Sbjct: | 245 | ---GEVIEIGMAMAAVMVLMPRMVKILMEGLMPVSESAREWLNKR-------FGDREIHI | 294 |
| Query: | 241 | AVDDGVGFGEPATIIAGLILVPIMVVISLILPGNEALPVVDLIAIPFMIEAMIAVSKGNI | 300 |
| | | +D V G P+ I LILVP+ V++++ILPGN LP DL IPF++ ++ ++GNI | |
| Sbjct: | 295 | GLDAAVLLGHPSVISTALILVPLTVLLAVILPGNALLPFGDLATIPFIVAFIVGAARGNI | 354 |
| Query: | 301 | LKAILNGIIWFSLGLYAASALGPIYTEAVKHFGTALPAGVTLIMSFN | 347 |
| | | + ++L G I +L LY A+ + P++T+ ++ +P G LI S + | |
| Sbjct: | 355 | IHSVLAGAIMIALSLYMATDIAPVFTKMAENSNFNMPEGSALISSID | 401 |

[8231] Based on this analysis, it was predicted that this protein and its epitopes, could be useful antigens for vaccines or diagnostics.

### EXAMPLE 1500

[8232] A DNA sequence (GBSx1587) was identified in S. agalactiae <SEQ ID 4615> which encodes the amino acid sequence <SEQ ID 4616>. Analysis of this protein sequence reveals the following:

```
Possible site: 52
>>> Seems to have no N-terminal signal sequence
----- Final Results -----
                            bacterial cytoplasm --- Certainty = 0.1013(Affirmative) < succ>
                              bacterial membrane --- Certainty = 0.0000(Not Clear) < succ>
                                bacterial outside --- Certainty = 0.0000(Not Clear) < succ>
```

[8233] The protein has no significant homology with any sequences in the GENPEPT database.

[8234] No corresponding DNA sequence was identified in S. pyogenes.

[8235] Based on this analysis, it was predicted that this protein and its epitopes, could be useful antigens for vaccines or diagnostics.

### EXAMPLE 1501

[8236] A DNA sequence (GBSx1588) was identified in S. agalactiae <SEQ ID 4617> which encodes the amino acid sequence <SEQ ID 4618>. Analysis of this protein sequence reveals the following:

```
Possible site: 43
>>> Seems to have no N-terminal signal sequence
----- Final Results -----
                            bacterial cytoplasm --- Certainty = 0.1294(Affirmative) < succ>
                              bacterial membrane --- Certainty = 0.0000(Not Clear) < succ>
                                bacterial outside --- Certainty = 0.0000(Not Clear) < succ>
```

[8237] A related GBS nucleic acid sequence <SEQ ID 10147> which encodes amino acid sequence <SEQ ID 10148> was also identified.

[8238] The protein has homology with the following sequences in the GENPEPT database.

| >GP: AAC76604 GB: AE000435 L-xylulose kinase, cryptic [Escherichia coli | | | |
|---|---|---|---|
| K12] | | | |
| Identities = 156/496 (31%), Positives = 261/496 (52%), | | | |
| Gaps = 18/496 (3%) | | | |
| Query: | 16 | YYLSIDYGGTNTKALIFDKLGHQIAVSSFETLKNETQSGHRQVNLVKTWNAITSAIREVI | 75 |
| | | Y+L +D GG+ KA ++D+ G + V Q G + ++ + W + IR ++ | |
| Sbjct: | 4 | YWLGLDCGGSWLKAGLYDREGREAGVQRLPLCALSPQPGWAERDMAELWQCCMAVIRALL | 63 |
| Query: | 76 | QISKLSPEQISAVACIGHGKGLYLLDNKLEPLEQGILSTDNRAKDLAQYFESK--LDNIW | 133 |
| | | S +S EQI + GKGL+LLD +PL ILS+D RA ++ + ++ + ++ | |
| Sbjct: | 64 | THSGVSGEQIVGIGISAQGKGLFLLDKNDKPLGNAILSSDRRAMEIVRRWQEDGIPEKLY | 123 |
| Query: | 134 | ELTRQHIFPSQSPVILRWLKDYQPETYKSIGAVLSAKDFIRYKLTGKVQQEYGDASGNHW | 193 |
| | | LTRQ ++ +LRWLK+++PE Y IG V+ D++R+ LTG E + S ++ | |
| Sbjct: | 124 | PLTRQTLWTGHPVSLLRWLKEHEPERYAQIGCVMMTHDYLRWCLTGVKGCEESNISESNL | 183 |
| Query: | 194 | INFQTGTYDPAILDFFGIREIENSLPELIDSADLVPGGISSQAAKETGLVEGTPVVGGLF | 253 |
| | | N G YDP + D+ GI EI ++LP ++ SA++ G I++Q A TGL GTPVVGGLF | |
| Sbjct: | 184 | YNMSLGEYDPCLTDWLGIAEINHALPPVVGSAEIC-GEITAQTAALTGLKAGTPVVGGLF | 242 |
| Query: | 254 | DIDACALGSGVLESDTFSVISGTWNINT--YPSLKPAKQDSGLMTSYFPDRRYLLEASSP | 311 |
| | | D+ + AL +G+ + T + + GTW + + L+ + + Y D +++ +SP | |
| Sbjct: | 243 | DVVSTALCAGIEDEFTLNAVMGTWAVTSGITRGLRDGEAHPYVYGRYVNDGEFIVHEASP | 302 |
| Query: | 312 | TSAGNLNFMLKMLMHQEIDNAKSSGGSIYDNLEEFLTHTDATHHGLIFFPFLYGSNTSQD | 371 |
| | | TS+GNL + G +D + + + L F PFLYGSN + | |
| Sbjct: | 303 | TSSGNLEWF-----------TAQWGEISFDEINQAVASLPKAGGDLFFLPFLYGSNAGLE | 351 |
| Query: | 372 | ASACFFGLTTKSTKSQMIRAVYEGIAFAHKQHITDLIKSRGSVPKIIRFSGGATNSPAWM | 431 |
| | | ++ F+G+ T++ +++A+YEG+ F+H H+ + ++ R + +R +GG +S WM | |
| Sbjct: | 352 | MTSGFYGMQAIHTRAHLLQAIYEGVVFSHMTHL-NRMRERFTDVHTLRVTGGPAHSDVWM | 410 |
| Query: | 432 | QMFSDILNFPIETVEGTELGGLGGAILARHALDKI-SLKEAVQDMVRVKAIYKPQLSEVK | 490 |
| | | QM +D+ IE + E G G A+ AR + EA +D+ P ++ + | |
| Sbjct: | 411 | QMLADVSGLRIELPQVEETGCFGAALAARVGTGVYHNFSEAQRDLRHPVRTLLPDMTAHQ | 470 |
| Query: | 491 | GYKKKYHAYQKLLETL | 506 |
| | | Y+KKY YQ L+ L | |
| Sbjct: | 471 | LYQKKYQRYQHLIAAL | 486 |

[8239] Based on this analysis, it was predicted that these proteins and their epitopes could be useful antigens for vaccines or diagnostics.

### EXAMPLE 1502

[8240] A DNA sequence (GBSx1589) was identified in S. agalactiae <SEQ ID 4619> which encodes the amino acid sequence <SEQ ID 4620>. Analysis of this protein sequence reveals the following:

```
Possible site: 59
>>> Seems to have an uncleavable N-term signal seq
----- Final Results -----
                              bacterial membrane --- Certainty = 0.0000(Not Clear) < succ>
                                bacterial outside --- Certainty = 0.0000(Not Clear) < succ>
                            bacterial cytoplasm --- Certainty = 0.0000(Not Clear) < succ>
```

[8241] The protein has homology with the following sequences in the GENPEPT database.

| >GP: AAG05648 GB: AE004652 hypothetical | | | |
|---|---|---|---|
| protein [Pseudomonas aeruginosa] | | | |
| Identities = 59/235 (25%), Positives = 104/235 (44%), | | | |
| Gaps = 9/235 (3%) | | | |
| Query: | 23 | QVQLIKLVKDLGFSRFEIRQELLQDPDRELPALKAEADFYDINLYYSANEDLIK-GGKVN | 81 |
| | | Q + L+ G R E+R+EL P + AL A + +S+ +L + G++N | |
| Sbjct: | 23 | QASFLPLLAMAGAQRVELREELFAGPP-DTEALTAAIQLQGLECVFSSPLELWREDGQLN | 81 |
| Query: | 82 | PYLNKGLKEASQLGAPFIKLNVGQTRNLSKEELEPLKEILKSQTIGIKVENNQDPKAATV | 141 |
| | | P L L+ A GA ++K+++G + +L L L + + VEN+Q P+ + | |
| Sbjct: | 82 | PELEPTLRRAEACGAGWLKVSLGLLPE--QPDLAALGRRLARHGLQLLVENDQTPQGGRI | 139 |
| Query: | 142 | ENCQYFMTLVKELQIPISFVFDTANWAFINQDLYQAVNNLACDTTYLHCKNFIQVAGKPH | 201 |
| | | E + F L + Q+ ++ FD NW + Q +A L Y+HCK I+ | |
| Sbjct: | 140 | EVLERFFRLAERQQLDLAMTFDIGNWRWQEQAADEAALRLGRYVGYVHCKAVIRNRDGKL | 199 |
| Query: | 202 | LSKSLFEGEINLTD-LLKSFSNCEYLALEYPTE----LEILKRDVQRLISISNSQ | 251 |
| | | ++ ++ LL+ F A+EYP + L + +R + L + Q | |
| Sbjct: | 200 | VAVPPSAADLQYWQRLLQHFPEGVARAIEYPLQGDDLLSLSRRHIAALARLGQPQ | 254 |

[8242] No corresponding DNA sequence was identified in S. pyogenes.

[8243] Based on this analysis, it was predicted that this protein and its epitopes, could be useful antigens for vaccines or diagnostics.

### EXAMPLE 1503

[8244] A DNA sequence (GBSx1590) was identified in S. agalactiae <SEQ ID 4621> which encodes the amino acid sequence <SEQ ID 4622>. Analysis of this protein sequence reveals the following:

```
Possible site: 30
>>> Seems to have no N-terminal signal sequence
----- Final Results -----
                            bacterial cytoplasm --- Certainty = 0.0430(Affirmative) < succ>
                              bacterial membrane --- Certainty = 0.0000(Not Clear) < succ>
                                bacterial outside --- Certainty = 0.0000(Not Clear) < succ>
```

[8245] The protein has homology with the following sequences in the GENPEPT database.

| >GP: BAB03939 GB: AP001507 unknown conserved | | | |
|---|---|---|---|
| protein [Bacillus halodurans] | | | |
| Identities = 136/511 (26%), Positives = 234/511 (45%), | | | |
| Gaps = 29/511 (5%) | | | |
| Query: | 4 | LDKKSYDLLFYLLKLEEPETVMAIANALNQSRRKVYYHLEKINDALPSDVPQIVSYPRV- | 62 |
| | | LD++S +L LL + + LN SRR VY LEKIN L + V R | |
| Sbjct: | 3 | LDQRSTFILTQLLHARSYLPIQELTQKLNVSRRTVYNDLEKINSWLEEQGLKAVYKVRSQ | 62 |
| Query: | 63 | GILLTEKQKAACRLLLDEVTDYSYVMKSSERLQLSLVSIVVAKDRVTIDRLMQLNDVSRN | 122 |
| | | G++L E+ K L + + Y + ER ++ ++ + + ++ LM VSRN | |
| Sbjct: | 63 | GLILDERAKEEIPTKLRSLKSWHYEYSAQERKAWVVIYLLTRLEPLFLEHLMDRTGVSRN | 122 |
| Query: | 123 | TILNDLNELRSELAEKEYNLQLQSTKCRGYFLDGHPL----SIIQYLYKLLDDIYHNGSS | 178 |
| | | T ++D+ L+ EL ++L L+ + GY + G +++ YL + L | |
| Sbjct: | 123 | TTIDDIKCLKDEL--NNFHLALEFERKDGYTISGDETDKRKALVYYLSQALPQQNWETEL | 180 |
| Query: | 179 | SFIDLFNHKLSQAFGASTYFSKEVLDYFHHYLFISQRSLGKKINSQDGQFMIQILPFILM | 238 |
| | | S I +F L F+ E L + + S++ L KI D L F+L | |
| Sbjct: | 181 | SPIRIF---LRTKRDNGRIFTIEELQKVYDVISESEKVL--KIQYTDDVLHSLSLRFLLF | 235 |
| Query: | 239 | AYRK-----MRLSPEVQTSLNSDFSLVWQRKEYEIAKELADELEENFQLSLDEIEVGLVA | 293 |
| | | R +++ P + L KEYE AK ++ +LE+ F + + EV + | |
| Sbjct: | 236 | MKRVAKGKFIKVHPLEKQVLKGT-------KEYEAAKVMSFKLEQAFGVHYPDEEVLYLT | 288 |
| Query: | 294 | MLMLSFRKDRDN-HLESQ-DYDDMRATLTSFLKELEERYHLHFVHKKDLLRQLLTHCKAL | 351 |
| | | +LS + + N +ES+ + ++ +TS + + ++ + F K+ L + L H K | |
| Sbjct: | 289 | THILSSEINYANGEIESRKESQELTHIVTSMVNDFQKYACVVFEEKELLEKNLFFHIKPA | 348 |
| Query: | 352 | LYRKRYGIFSVNPLTEHIKDKYEELFAITSSSVKLLEKAWQIKLTDDDVAYLTIHLGGEL | 411 |
| | | YR +YG+ N + E IK Y ELF +T V LE+ + D++VA++T+H G + | |
| Sbjct: | 349 | FYRIKYGLEVENNIAESIKTSYPELFLLTRKVVHYLERYVGKSVNDNEVAFITMHFVGWM | 408 |
| Query: | 412 | RNSQQSPNE-LKLVIVSDEGIAIQKLLLKQCQRYLTNSDIEAVFTTEQYQSVSDLMHVDM | 470 |
| | | R P K K +IV G+ + L Q + DI + +Y+ + VD | |
| Sbjct: | 409 | RREGTIPTKRKKALIVCANGVGTSQFLENQLEGLFPAVDIIKTCSIREYEKTP--VEVDF | 466 |
| Query: | 471 | VVSTSDALESRFPMLVVHPVLTDDDIIRLIR | 501 |
| | | ++ST+ E P+ +V+P+LT+ + RL++ | |
| Sbjct: | 467 | IISTTSIPEKNVPIFIVNPILTETEKERLLK | 497 |

[8246] A related DNA sequence was identified in S. pyogenes <SEQ ID 4623> which encodes the amino acid sequence <SEQ ID 4624>. Analysis of this protein sequence reveals the following:

```
Possible site: 30
>>> Seems to have no N-terminal signal sequence
----- Final Results -----
                            bacterial cytoplasm --- Certainty = 0.0745(Affirmative) < succ>
                              bacterial membrane --- Certainty = 0.0000(Not Clear) < succ>
                                bacterial outside --- Certainty = 0.0000(Not Clear) < succ>
```

[8247] An alignment of the GAS and GBS proteins is shown below.

| Identities = 368/548 (67%), Positives = 456/548 (83%) | | | |
|---|---|---|---|
| Query: | 1 | MIILDKKSYDLLFYLLKLEEPETVMAIANALNQSRRKVYYHLEKINDALPSDVPQIVSYP | 60 |
| | | M+ILDKKSYDLL YLLKLE PETVMAI++ALNQSRRKVYY L+KIN ALP V QI+SYP | |
| Sbjct: | 1 | MMILDKKSYDLLSYLLKLETPETVMAISHALNQSRRKVYYQLDKINQALPKGVDQIISYP | 60 |
| Query: | 61 | RVGILLTEKQKAACRLLLDEVTDYSYVMKSSERLQLSLVSIVVAKDRVTIDRLMQLNDVS | 120 |
| | | R+GILLT QKAACRLLL+EVTDY+YVMKS ER +LS + I V+ +RVTID+LMQ+NDVS | |
| Sbjct: | 61 | RLGILLTADQKAACRLLLEEVTDYNYVMKSDERRRLSSIYIAVSTERVTIDKLMQINDVS | 120 |
| Query: | 121 | RNTILNDLNELRSELAEKEYNLQLQSTKCRGYFLDGHPLSIIQYLYKLLDDIYHNGSSSF | 180 |
| | | RNTILNDL ELR EL +K+Y +QL +TK RGY+ HP+++IQYLYKLL D+Y G++SF | |
| Sbjct: | 121 | RNTILNDLTELREELEDKQYKIQLHATKARGYYFGCHPMALIQYLYKLLVDVYQGGNTSF | 180 |
| Query: | 181 | IDLFNHKLSQAFGASTYFSKEVLDYFHHYLFISQRSLGKKINSQDGQFMIQILPFILMAY | 240 |
| | | ID+FN KLS+ G S YFSK++L YFH YLF+SQ SLGK IN+QD QFM+QILPF+L++Y | |
| Sbjct: | 181 | IDIFNRKLSEIQGLSVYFSKDILTYFHEYLFLSQASLGKTINTQDSQFMLQILPFMLLSY | 240 |
| Query: | 241 | RKMRLSPEVQTSLNSDFSLVWQRKEYEIAKELADELEENFQLSLDEIEVGLVAMLMLSFR | 300 |
| | | R MRL E +++L +F L+W+RKEY IA++LA EL NF+L LD+IEV +VAMLMLSFR | |
| Sbjct: | 241 | RNMRLDSETKSALKQEFHLIWKRKEYHIAQDLARELYHNFKLHLDDIEVSMVAMLMLSFR | 300 |
| Query: | 301 | KDRDNHLESQDYDDMRATLTSFLKELEERYHLHFVHKKDLLRQLLTHCKALLYRKRYGIF | 360 |
| | | KD+D+H+ESQDYDDMRAT++ F+ +LE RY LHF HK+DLL++L THCKAL+YRK YGIF | |
| Sbjct: | 301 | KDQDHHVESQDYDDMRATISHFIDQLESRYQLHFTHKQDLLKRLTTHCKALVYRKAYGIF | 360 |
| Query: | 361 | SVNPLTEHIKDKYEELFAITSSSVKLLEKAWQIKLTDDDVAYLTIHLGGELRNSQQSPNK | 420 |
| | | VNPLT+H+K+KYEELFA+T S +LE+ W I LTDDD+AYLTIHLGGELR++ K | |
| Sbjct: | 361 | LVNPLTDHVKEKYEELFAMTQSCATILEQDWTISLTDDDIAYLTIHLGGELRHNNTEQEK | 420 |
| Query: | 421 | LKLVIVSDEGIAIQKLLLKQCQRYLTNSDIEAVFTTEQYQSVSDLMHVDMVVSTSDALES | 480 |
| | | KLVIVSD+GI IQKLL KQCQRYL N IEAVFTTEQYQSV DL+ VDM+V+T+D L++ | |
| Sbjct: | 421 | TKLVIVSDDGIGIQKLLFKQCQRYLANGQIEAVFTTEQYQSVYDLLAVDMIVATTDTLKT | 480 |
| Query: | 481 | RFPMLVVHPVLTDDDIIRLIRFSKKGNCANSNQFTNELEKTIAQYVKEDSERYVLKSKIE | 540 |
| | | + PML+V+P+L+DDDII+LIRFSK+G + ++F+ EL K I VK++S+RY L SKIE | |
| Sbjct: | 481 | KIPMLIVNPILSDDDIIKLIRFSKQGRLSEHSRFSTELTKAIEAVVKDESDRYALVSKIE | 540 |
| Query: | 541 | KLIHQELL | 548 |
| | | KLIH+ELL | |
| Sbjct: | 541 | KLIHRELL | 548 |

[8248] Based on this analysis, it was predicted that these proteins and their epitopes could be useful antigens for vaccines or diagnostics.

### EXAMPLE 1504

[8249] A DNA sequence (GBSx1591) was identified in S. agalactiae <SEQ ID 4625> which encodes the amino acid sequence <SEQ ID 4626>. Analysis of this protein sequence reveals the following:

```
Possible site: 50
>>> Seems to have no N-terminal signal sequence
----- Final Results -----
                            bacterial cytoplasm --- Certainty = 0.2692(Affirmative) < succ>
                              bacterial membrane --- Certainty = 0.0000(Not Clear) < succ>
                                bacterial outside --- Certainty = 0.0000(Not Clear) < succ>
```

[8250] The protein has homology with the following sequences in the GENPEPT database.

| >GP: AAC77149 GB: AE000491 orf, hypothetical | | | |
|---|---|---|---|
| protein [Escherichia coli K12] | | | |
| Identities = 211/363 (58%), Positives = 270/363 (74%), | | | |
| Gaps = 9/363 (2%) | | | |
| Query: | 1 | MPNVKDITRESWILSTFPEWGTWLNEEIEEEVVAEGNFAMWWLGNCGVWIKTPGGANVVM | 60 |
| | | M VK ITRESWILSTFPEWG+WLNEEIE+E VA G FAMWWLG G+W+K+ GG NV + | |
| Sbjct: | 3 | MSKVKSITRESWILSTFPEWGSWLNEEIEQEQVAPGTFAMWWLGCTGIWLKSEGGTNVCV | 62 |
| Query: | 61 | DLWSNRGKSTKKVKDMVRGHQMANMAGVRKLQPNLRAQPMVIDPFAINELDYYLVSHFHS | 120 |
| | | D W GK + M +GHQM MAGV+KLQPNLR P V+DPFAI ++D L +H H+ | |
| Sbjct: | 63 | DFWCGTGKQSHGNPLMKQGHQMQRMAGVKKLQPNLRTTPFVLDPFAIRQIDAVLATHDHN | 122 |
| Query: | 121 | DHIDINTAAAIINNPNLDHVKFVGPYECGEIWKKWGVPEERIIVIKPGESFEFKDIKVTA | 180 |
| | | DHID+N AAA++ N D V F+GP C ++W WGVP+ER IV+KPG+ + KDI++ A | |
| Sbjct: | 123 | DHIDVNVAAAVMQNC-ADDVPFIGPKTCVDLWIGWGVPKERCIVVKPGDVVKVKDIEIHA | 181 |
| Query: | 181 | VESFDRTCLVTLPVDGAEEHDGELAGLAVTDEEMARKAVNYIFETPGGTIYHGADSHFSN | 240 |
| | | +++FDRT L+TLP D + AG V + M +AVNY+F+TPGG++YH DSH+SN | |
| Sbjct: | 182 | LDAFDRTALITLPADQ------KAAG--VLPDGMDDRAVNYLFKTPGGSLYHSGDSHYSN | 233 |
| Query: | 241 | YFAKHGKDYKIDVAINNYGDNPVGIQDKMTSIDLLRMAENLRAKVIIPVHYDIWSNFMAS | 300 |
| | | Y+AKHG +++IDVA+ +YG+NP GI DKMTS D+LRM E L AKV+IP H+DIWSNF A | |
| Sbjct: | 234 | YYAKHGNEHQIDVALGSYGENPRGITDKMTSADMLRMGEALNAKVVIPFHHDIWSNFQAD | 293 |
| Query: | 301 | TDEILQLWKMRKERLQYDFHPFIWEVGGKYTYPQDKDRIEYHHPRGFDDCFEQESNIQFK | 360 |
| | | EI LW+M+K+RL+Y F PFIW+VGGK+T+P DKD EYH+PRGFDDCF E ++ FK | |
| Sbjct: | 294 | PQEIRVLWEMKKDRLKYGFKPFIWQVGGKFTWPLDKDNFEYHYPRGFDDCFTIEPDLPFK | 353 |
| Query: | 361 | ALL | 363 |
| | | + L | |
| Sbjct: | 354 | SFL | 356 |

[8251] A related DNA sequence was identified in S. pyogenes <SEQ ID 4627> which encodes the amino acid sequence <SEQ ID 4628>. Analysis of this protein sequence reveals the following:

```
Possible site: 35
>>> Seems to have no N-terminal signal sequence
----- Final Results -----
                            bacterial cytoplasm --- Certainty = 0.3298(Affirmative) < succ>
                              bacterial membrane --- Certainty = 0.0000(Not Clear) < succ>
                                bacterial outside --- Certainty = 0.0000(Not Clear) < succ>
```

[8252] An alignment of the GAS and GBS proteins is shown below.

| Identities = 315/363 (86%), Positives = 348/363 (95%) | | | |
|---|---|---|---|
| Query: | 1 | MPNVKDITRESWILSTFPEWGTWLNEEIEEEVVAEGNFAMWWLGNCGVWIKTPGGANVVM | 60 |
| | | M V+DITRESWIL+TFPEWGTWLNEEIE+EVV NFAMWWLGNCG+WIKTPGGANVVM | |
| Sbjct: | 1 | MTKVQDITRESWILNTFPEWGTWLNEEIEQEVVPADNFAMWWLGNCGIWIKTPGGANVVM | 60 |
| Query: | 61 | DLWSNRGKSTKKVKDMVRGHQMANMAGVRKLQPNLRAQPMVIDPFAINELDYYLVSHFHS | 120 |
| | | DLWSNRGK+TK+VKDMVRGHQMANMAG RKLQPNLRAQPMVIDPF INELDYYLVSH+HS | |
| Sbjct: | 61 | DLWSNRGKATKQVKDMVRGHQMANMAGARKLQPNLRAQPMVIDPFMINELDYYLVSHYHS | 120 |
| Query: | 121 | DHIDINTAAAIINNPNLDHVKFVGPYECGEIWKKWGVPEERIIVIKPGESFEFKDIKVTA | 180 |
| | | DHIDINTAAAIINNP L+HVKFVGPYECGE+WK WGVP++RI+++KPG+SFEFKDIK+TA | |
| Sbjct: | 121 | DHIDINTAAAIINNPKLNHVKFVGPYECGEVWKNWGVPKDRIMILKPGDSFEFKDIKITA | 180 |
| Query: | 181 | VESFDRTCLVTLPVDGAEEHDGELAGLAVTDEEMARKAVNYIFETPGGTIYHGADSHFSN | 240 |
| | | VESFDRTCLVTLP+ GA+ DG+LAGLA+TD++MARKAVNYIFETPGGTIYHGADSHFSN | |
| Sbjct: | 181 | VESFDRTCLVTLPIQGADAQDGDLAGLAITDDDMARKAVNYIFETPGGTIYHGADSHFSN | 240 |
| Query: | 241 | YFAKHGKDYKIDVAINNYGDNPVGIQDKMTSIDLLRMAENLRAKVIIPVHYDIWSNFMAS | 300 |
| | | YFAKHG+DY IDV +NNYG+NP+GIQDKMTS+DLLRMAENLRAKV+IPVHYDIWSNFMAS | |
| Sbjct: | 241 | YFAKHGRDYDIDVVLNNYGENPIGIQDKMTSVDLLRMAENLRAKVVIPVHYDIWSNFMAS | 300 |
| Query: | 301 | TDEILQLWKMRKERLQYDFHPFIWEVGGKYTYPQDKDRIEYHHPRGFDDCFEQESNIQFK | 360 |
| | | TDEIL+LWKMRKERLQYDFHPFIWEVGGKYTYPQD++RIEYHHPRGFDDCF ++SNIQFK | |
| Sbjct: | 301 | TDEILELWKMRKERLQYDFHPFIWEVGGKYTYPQDQNRIEYHHPRGFDDCFLEDSNIQFK | 360 |
| Query: | 361 | ALL | 363 |
| | | ALL | |
| Sbjct: | 361 | ALL | 363 |

[8253] Based on this analysis, it was predicted that these proteins and their epitopes could be useful antigens for vaccines or diagnostics.

### EXAMPLE 1505

[8254] A DNA sequence (GBSx1592) was identified in S. agalactiae <SEQ ID 4629> which encodes the amino acid sequence <SEQ ID 4630>. Analysis of this protein sequence reveals the following:

```
Possible site: 38
>>> Seems to have no N-terminal signal sequence
----- Final Results -----
                            bacterial cytoplasm --- Certainty = 0.3988(Affirmative) < succ>
                              bacterial membrane --- Certainty = 0.0000(Not Clear) < succ>
                                bacterial outside --- Certainty = 0.0000(Not Clear) < succ>
```

[8255] A related GBS nucleic acid sequence <SEQ ID 10145> which encodes amino acid sequence <SEQ ID 10146> was also identified.

[8256] The protein has homology with the following sequences in the GENPEPT database.

| >GP: BAA18808 GB: D90917 hypothetical protein [Synechocystis sp.] | | | |
|---|---|---|---|
| Identities = 358/785 (45%), Positives = 494/785 (62%), Gaps = 15/785 (1%) | | | |
| Query: | 22 | LEKLDAWWRAANYISAAQMYLKDNPLLRRELVENDLKVHPIGHWGTVPGQNFIYAHLNRA | 81 |
| | | L ++ +WRAANY++ +YL+DNPLLR L +K +GHWG+ PG +F+Y HLNR | |
| Sbjct: | 44 | LNQMHGFWRAANYLAVGMIYLRDNPLLREPLQPEQIKHRLLGHWGSSPGISFLYTHLNRI | 103 |
| Query: | 82 | INKYDLDMFYIEGPGHGGQVMVSNSYLDGSYTELNPNIEQTEDGFKQLCKIFSFPCGIAS | 141 |
| | | I K+D DM Y+ GPGHG + YL+GSY+ + EDG K+ K FSFP GI S | |
| Sbjct: | 104 | IRKFDQDMLYMVGPGHGAPGFLGPCYLEGSYSRFFAECSEDEDGMKRFFKQFSFPGGIGS | 163 |
| Query: | 142 | HAAPETPGSIHEGGELGYALSHATGAILDNPDVIAATVIGDGEGETGPLMAGWLSNTFIN | 201 |
| | | H PETPGSIHEGGELGY LSHA GA DNP++I + GDGE ETGPL W SN FIN | |
| Sbjct: | 164 | HCTPETPGSIHEGGELGYCLSHAYGAAFDNPNLIVVGLAGDGESETGPLATSWHSNKFIN | 223 |
| Query: | 202 | PVNDGAVLPIFYLNGGKIHNPTIFERKTDEELSQFFEGLGWKPIFADVVELSEDHAAAHA | 261 |
| | | P+ DGAVLP+ +LNG KI+NP++ R + EEL FEG G+ P F + D + H | |
| Sbjct: | 224 | PIRDGAVLPVLHLNGYKINNPSVLSRISHEELKALFEGYGYTPYFVE----GSDPESMHQ | 279 |
| Query: | 262 | LFAEKLDQAIQEIKTIQSEARQKPAEEAIQAKFPVLVARIPKGWTGPKAWEGTPIEGGFR | 321 |
| | | A LD + EI IQ EAR A++ ++P++V R PKGWTGP +G +EG +R | |
| Sbjct: | 280 | AMAATLDHCVSEIHQIQQEARSTGI--AVRPRWPMVVMRTPKGWTGPDYVDGHKVEGFWR | 337 |
| Query: | 322 | AHQVPIPVDAHHMEHVDSLLSWLQSYRPEELFDENGKIVDEIAAISPKGDRRMSMNPITN | 381 |
| | | +HQVP+ + H+ L +W++SY+PEELFDE G + AI+P+GD+R+ P N | |
| Sbjct: | 338 | SHQVPMGGMHENPAHLQQLEAWMRSYKPEELFDEQGTLKPGFKAIAPEGDKRLGSTPYAN | 397 |
| Query: | 382 | AGIV-KAMDTADWKKFALDINVPGQIMAQDMIEFGKYAADLVDANPDNFRIFGPDETKSN | 440 |
| | | G++ + + D++++ +D++ PG I A + G + D++ N NFR+FGPDE SN | |
| Sbjct: | 398 | GGLLRRGLKMPDFRQYGIDVDQPGTIEAPNTAPLGVFLRDVMANNMTNFRLFGPDENSSN | 457 |
| Query: | 441 | RLQEVFTRTSRQWLGRRKPDYDEA--LSPAGRVIDSQLSEHQAEGFLEGYVLTGRHGFFA | 498 |
| | | +L V+ + + W+ + + LSP GRV++ LSEH EG+LE Y+LTGRHGFFA | |
| Sbjct: | 458 | KLHAVYEVSKKFWIAEYLEEDQDGGELSPDGRVME-MLSEHTLEGWLEAYLLTGRHGFFA | 516 |
| Query: | 499 | SYESFLRVVDSMVTQHFKWLRKSKTHTTWRKNYPALNLIAASTVFQQDHNGYTHQDPGIL | 558 |
| | | +YESF V+ SMV QH KWL + H WR + +LN++ STV++QDHNG+THQDPG L | |
| Sbjct: | 517 | TYESFAHVITSMVNQHAKWLDICR-HLNWRADISSLNILMTSTVWRQDHNGFTHQDPGFL | 575 |
| Query: | 559 | THLAEKTPEYIREYLPADTNSLLAVMDKAFKAEDKINLIVTSKHPRPQFYSIAEAEELVA | 618 |
| | | + K+P+ +R YLP D NSLL+V D ++++ IN+IV K Q+ + A | |
| Sbjct: | 576 | DVILNKSPDVVRIYLPPDVNSLLSVADHCLQSKNYINIIVCDKQAHLQYQDMTSAIRNCT | 635 |
| Query: | 619 | EGYKVIDWASNVSLNQEPDVVFAAAGTEPNLEALAAISILHKAFPELKIRFVNVLDILKL | 678 |
| | | +G + +WASN EPDVV AAAG P EALAA ++L + FP L+IRFV+V+D+LKL | |
| Sbjct: | 636 | KGVDIWEWASN-DAGTEPDVVMAAAGDIPTKEALAATAMLRQFFPNLRIRFVSVIDLLKL | 694 |
| Query: | 679 | RHPSQDARGLSDEEFNKVFTTDKPVIFAFHGYEDMIRDIFFSRHNH-NLHTHGYRENGDI | 737 |
| | | + S+ GLSD +F+ +FTTDKP+IF FH Y +I + + R NH NLH GY+E G+I | |
| Sbjct: | 695 | QPESEHPHGLSDRDFDSLFTTDKPIIFNFHAYPWLIHRLTYRRTNHGNLHVRGYKEKGNI | 754 |
| Query: | 738 | TTPFDMRVMSELDRFHLAQDA--ALASLGNKAQAFSDEMNQMVAYHKDYIREHGDDIPEV | 795 |
| | | TP D+ + +++DRF LA D L L + + M +Y EHG D+PE+ | |
| Sbjct: | 755 | NTPMDLAIQNQIDRFSLAIDVIDRLPQLRVAGAHIKEMLKDMQIDCTNYAYEHGIDMPEI | 814 |
| Query: | 796 | QNWKW | 800 |
| | | NW+W | |
| Sbjct: | 815 | VNWRW | 819 |

[8257] No corresponding DNA sequence was identified in S. pyogenes.

[8258] Based on this analysis, it was predicted that these proteins and their epitopes could be useful antigens for vaccines or diagnostics.

### EXAMPLE 1506

[8259] A DNA sequence (GBSx1593) was identified in S. agalactiae <SEQ ID 4631> which encodes the amino acid sequence <SEQ ID 4632>. Analysis of this protein sequence reveals the following:

```
Possible site: 32
>>> Seems to have no N-terminal signal sequence
----- Final Results -----
                            bacterial cytoplasm --- Certainty = 0.3509(Affirmative) < succ>
                              bacterial membrane --- Certainty = 0.0000(Not Clear) < succ>
                                bacterial outside --- Certainty = 0.0000(Not Clear) < succ>
```

[8260] The protein has homology with the following sequences in the GENPEPT database.

| >GP: AAF37878 GB: AF234619 OpuAA [Lactococcus lactis] | | | |
|---|---|---|---|
| Identities = 274/402 (68%), Positives = 338/402 (83%) | | | |
| Query: | 5 | LEVKNLTKIFGKKQKAALEMVKQGKSKTEILEKTGATVGVYDASFEIKEGEIFVIMGLSG | 64 |
| | | +++++LTKIFGK+ K AL MV++G+ K EIL+KTGATVGVYD +FEI EGEIFVIMGLSG | |
| Sbjct: | 5 | IKIEHLTKIFGKRIKTALTMVEKGEPKNEILKKTGATVGVYDTNFEINEGEIFVIMGLSG | 64 |
| Query: | 65 | SGKSTLVRMLNRLIDPSSGNIYLDGKDIAKMNVEDLRNIRRHDINMVFQNFGLFPHRTIL | 124 |
| | | SGKSTL+R+LNRLI+P+SG I++D +D+A +N EDL +RR ++MVFQNFGLFPHRTIL | |
| Sbjct: | 65 | SGKSTLLRLLNRLIEPTSGKIFIDNQDVATLNKEDLLQVRRKTMSMVFQNFGLFPHRTIL | 124 |
| Query: | 125 | ENTEFGLEMRGVSKEERTTLAEKALDNAGLLPFKDQYPSQLSGGMQQRVGLARALANSPK | 184 |
| | | ENTE+GLE++ V KEER AEKALDNA LL FKDQYP QLSGGMQQRVGLARALAN P+ | |
| Sbjct: | 125 | ENTEYGLEVQNVPKEERRKRAEKALDNANLLDFKDQYPKQLSGGMQQRVGLARALANDPE | 184 |
| Query: | 185 | ILLMDEAFSALDPLIRREMQDELLDLQDTNKQTIIFISHDLNEALRIGDRIALMKDGEIM | 244 |
| | | ILLMDEAFSALDPLIRREMQDELL+LQ ++TIIF+SHDLNEALRIGDRIA+MKDG+IM | |
| Sbjct: | 185 | ILLMDEAFSALDPLIRREMQDELLELQAKFQKTIIFVSHDLNEALRIGDRIAIMKDGKIM | 244 |
| Query: | 245 | QIGTGEEILTNPANDFVREFVEDVDRSKVLTAQNIMIKPLTTVLEIDGPQVALTRMHREE | 304 |
| | | QIGTGEEILTNPAND+V+ FVEDVDR+KV+TA+NIMI LTT +++DGP VAL +M EE | |
| Sbjct: | 245 | QIGTGEEILTNPANDYVKTFVEDVDRAKVITAENIMIPALTTNIDVDGPSVALKKMKTEE | 304 |
| Query: | 305 | VSMLMATNRRRQLLGSLTADAAIEARKKDLPLSEVIDKDVVTVSKDTVITDIMPLIYDSS | 364 |
| | | VS LMA +++RQ G +T++ AI ARK + PL +V+ DV TVSK+ ++ DI+P+IYD+ | |
| Sbjct: | 305 | VSSLMAVDKKRQFRGVVTSEQAIAARKNNQPLKDVMTTDVGTVSKEMLVRDILPIIYDAP | 364 |
| Query: | 365 | APIAVTDDNDRLLGVIIRGRVIEALANVQDETVVESPKETVE | 406 |
| | | P+AV DDN L GV+IRG V+EALA++ DE VE ++ E | |
| Sbjct: | 365 | TPLAVVDDNGFLKGVLIRGSVLEALADIPDEDEVEEIEKEEE | 406 |

[8261] A related DNA sequence was identified in S. pyogenes <SEQ ID 4633> which encodes the amino acid sequence <SEQ ID 4634>. Analysis of this protein sequence reveals the following:

```
Possible site: 53
>>> Seems to have no N-terminal signal sequence
----- Final Results -----
                            bacterial cytoplasm --- Certainty = 0.3761(Affirmative) < succ>
                              bacterial membrane --- Certainty = 0.0000(Not Clear) < succ>
                                bacterial outside --- Certainty = 0.0000(Not Clear) < succ>
```

[8262] An alignment of the GAS and GBS proteins is shown below.

| Identities = 344/395 (87%), Positives = 374/395 (94%) | | | |
|---|---|---|---|
| Query: | 1 | MTNILEVKNLTKIFGKKQKAALEMVKQGKSKTEILEKTGATVGVYDASFEIKEGEIFVIM | 60 |
| | | M ILEVK+L+KIFGKKQKAALEMVK GK+K+EI +KTGATVGVYDASFE+K+GEIFVIM | |
| Sbjct: | 1 | METILEVKHLSKIFGKKQKAALEMVKTGKNKSEIFKKTGATVGVYDASFEVKKGEIFVIM | 60 |
| Query: | 61 | GLSGSGKSTLVRMLNRLIDPSSGNIYLDGKDIAKMNVEDLRNIRRHDINMVFQNFGLFPH | 120 |
| | | GLSGSGKSTLVRMLNRLI+PS+G+I L+GKDI+ M+ + LR +RRHDINMVFQ+F LFPH | |
| Sbjct: | 61 | GLSGSGKSTLVRMLNRLIEPSAGSILLEGKDISTMSADQLREVRRHDINMVFQSFALFPH | 120 |
| Query: | 121 | RTILENTEFGLEMRGVSKEERTTLAEKALDNAGLLPFKDQYPSQLSGGMQQRVGLARALA | 180 |
| | | +TILENTEFGLE+RGV KEER LAEKALDN+GLL FKDQYP+QLSGGMQQRVGLARALA | |
| Sbjct: | 121 | KTILENTEFGLELRGVPKEERQRLAEKALDNSGLLDFKDQYPNQLSGGMQQRVGLARALA | 180 |
| Query: | 181 | NSPKILLMDEAFSALDPLIRREMQDELLDLQDTNKQTIIFISHDLNEALRIGDRIALMKD | 240 |
| | | NSPKILLMDEAFSALDPLIRREMQDELLDLQD+ KQTIIFISHDLNEALRIGDRIALMKD | |
| Sbjct: | 181 | NSPKILLMDEAFSALDPLIRREMQDELLDLQDSMKQTIIFISHDLNEALRIGDRIALMKD | 240 |
| Query: | 241 | GEIMQIGTGEEILTNPANDFVREFVEDVDRSKVLTAQNIMIKPLTTVLEIDGPQVALTRM | 300 |
| | | G+IMQIGTGEEILTNPANDFVREFVEDVDRSKVLTAQNIMIKPLTT +E+DGPQVAL RM | |
| Sbjct: | 241 | GQIMQIGTGEEILTNPANDFVREFVEDVDRSKVLTAQNIMIKPLTTTVELDGPQVALNRM | 300 |
| Query: | 301 | HREEVSMLMATNRRRQLLGSLTADAAIEARKKDLPLSEVIDKDVVTVSKDTVITDIMPLI | 360 |
| | | H EEVSMLMATNRRRQL+GSLTADAAIEARKK LPLSEVID+DV TVSKDT+ITDI+PLI | |
| Sbjct: | 301 | HNEEVSMLMATNRRRQLVGSLTADAAIEARKKGLPLSEVIDRDVRTVSKDTIITDILPLI | 360 |
| Query: | 361 | YDSSAPIAVTDDNDRLLGVIIRGRVIEALANVQDE | 395 |
| | | YDSSAPIAVTDDN+RLLGVIIRGRVIEALAN+ DE | |
| Sbjct: | 361 | YDSSAPIAVTDDNNRLLGVIIRGRVIEALANISDE | 395 |

[8263] Based on this analysis, it was predicted that these proteins and their epitopes could be useful antigens for vaccines or diagnostics.

### EXAMPLE 1507

[8264] A DNA sequence (GBSx1594) was identified in S. agalactiae <SEQ ID 4635> which encodes the amino acid sequence <SEQ ID 4636>. This protein is predicted to be OpuABC (opuAB). Analysis of this protein sequence reveals the following:

| Possible site: 41 | | | | |
|---|---|---|---|---|
| >>> Seems to have no N-terminal signal sequence | | | | |
| | INTEGRAL | Likelihood = −10.67 | Transmembrane | 48-64 (43-72) |
| | INTEGRAL | Likelihood = −9.24 | Transmembrane | 101-117 (93-122) |
| | INTEGRAL | Likelihood = −7.54 | Transmembrane | 296-312 (290-316) |
| | INTEGRAL | Likelihood = −6.21 | Transmembrane | 252-268 (250-273) |
| | INTEGRAL | Likelihood = −5.57 | Transmembrane | 141-157 (138-170) |
| | INTEGRAL | Likelihood = −0.53 | Transmembrane | 220-236 (220-237) |

```
----- Final Results -----
                              bacterial membrane --- Certainty = 0.5267(Affirmative) < succ>
                                bacterial outside --- Certainty = 0.0000(Not Clear) < succ>
                            bacterial cytoplasm --- Certainty = 0.0000(Not Clear) < succ>
```

[8265] The protein has homology with the following sequences in the GENPEPT database.

| >GP: AAF37879 GB: AF234619 OpuABC [Lactococcus lactis] | | | |
|---|---|---|---|
| Identities = 345/578 (59%), Positives = 429/578 (73%), | | | |
| Gaps = 8/578 (1%) | | | |
| Query: | 1 | MENLLQHKLPVAPFVESTTNWITKTFSGLFDFIQTIGNALMDWMTKTLLFINPLLFIVLI | 60 |
| | | M +L ++P+A +V S T+WIT TFS FD IQ G LM+ +T L + L I ++ | |
| Sbjct: | 1 | MIDLAIGQVPIANWVSSATDWITSTFSSGFDVIQKSGTVLMNGITGALTAVPFWLMIAVV | 60 |
| Query: | 61 | TIAVFFLAKKKWQLPTFTFIGLLFIYNQGLWEQLINTFNLVLVASLISIIIGVPLGIWMA | 120 |
| | | TI ++ KK P FTFIGL I NQGLW L++T LVL++SL+SIIIGVPLGIWMA | |
| Sbjct: | 61 | TILAILVSGKKIAFPLFTFIGLSLIANQGLWSDLMSTITLVLLSSLLSIIIGVPLGIWMA | 120 |
| Query: | 121 | KSDKVKQVVNPILDFMQTMPAFVYLIPAVAFFGIGMVPGVFASVVFALPPTVRFTNLAIR | 180 |
| | | KSD V ++V PILDFMQTMP FVYLIPAVAFFGIG+VPGVFASV+FALPPTVR TNL IR | |
| Sbjct: | 121 | KSDLVAKIVQPILDFMQTMPGFVYLIPAVAFFGIGVVPGVFASVIFALPPTVRMTNLGIR | 180 |
| Query: | 181 | EIPLELIEASDSFGSTVKQKLFKVELPLAKNTIMAGINQTMMLALSMVVTGSMIGAPGLG | 240 |
| | | ++ EL+EA+DSFGST +QKLFK+E PLAK TIMAG+NQT+MLALSMVV SMIGAPGLG | |
| Sbjct: | 181 | QVSTELVEAADSFGSTARQKLFKLEFPLAKGTIMAGVNQTIMLALSMVVIASMIGAPGLG | 240 |
| Query: | 241 | REVLSALQHADIGTGFVSGLSLVILAIVLDRVSQFFNSKPGEKQAKTSKVKKW---VGLG | 297 |
| | | R VL+A+Q ADIG GFVSG+SLVILAI++DR +Q N P EKQ + VKKW + L | |
| Sbjct: | 241 | RGVLAAVQSADIGKGFVSGISLVILAIIIDRFTQKLNVSPLEKQGNPT-VKKWKRGIALV | 299 |
| Query: | 298 | ALALFILAALGRIVVNMTSGNEAKGQKVKIAYVQWDSEVASTNVIAEVLKSKGYDVELTP | 357 |
| | | +L I+ A M+ G A +KV + Y+ WDSEVAS NV+ + +K G+DV+ T | |
| Sbjct: | 300 | SLLALIIGAFS----GMSFGKTASDKKVDLVYMNWDSEVASINVLTQAMKEHGFDVKTTA | 355 |
| Query: | 358 | LDNAVMWQTVANGNADFTTSAWLPKTHGQYFNKYKNSLDDLGPHVENVKIGLVVPKYMNV | 417 |
| | | LDNAV WQTVANG AD SAWLP TH + KY S+D LGP+++ K+G VVP YMNV | |
| Sbjct: | 356 | LDNAVAWQTVANGQADGMVSAWLPNTHKTQWQKYGKSVDLLGPNLKGAKVGFVVPSYMNV | 415 |
| Query: | 418 | NSIEELSNQADKQITGIEPGAGIMKSAKQSLKDYPNLSSWKLLSASTGAMTTTLGKAIKN | 477 |
| | | NSIE+L+NQA+K ITGIEPGAG+M +++++L Y NL WKL+ +S+GAMT LG+AIK | |
| Sbjct: | 416 | NSIEDLTNQANKTITGIEPGAGVMAASEKTLNSYDNLKDWKLVPSSSGAMTVALGEAIKQ | 475 |
| Query: | 478 | KDQVVITGWSPHWMFAKYDLKYLKDPKKSFGGEEHINTIARKNLKKDMPKVYKIIDKFKW | 537 |
| | | +VITGWSPHWMF KYDLKYL DPK + G E+INTI RK LKK+ P+ YK++DKF W | |
| Sbjct: | 476 | HKDIVITGWSPHWMFNKYDLKYLADPKGTMGTSENINTIVRKGLKKENPEAYKVLDKFNW | 535 |
| Query: | 538 | TKEDMESIMLDMDKGMEPAKAAQKWIKNHKKEVSEWTK | 575 |
| | | T +DME++MLD+ G P +AA+ WIK+H+KEV +W K | |
| Sbjct: | 536 | TTKDMEAVMLDIQNGKTPEEAAKNWIKDHQKEVDKWFK | 573 |

[8266] A related DNA sequence was identified in S. pyogenes <SEQ ID 4637> which encodes the amino acid sequence <SEQ ID 4638>. Analysis of this protein sequence reveals the following:

| Possible site: 47 | | | | |
|---|---|---|---|---|
| >>> Seems to have no N-terminal signal sequence | | | | |
| | INTEGRAL | Likelihood = −8.86 | Transmembrane | 101-117 (93-121) |
| | INTEGRAL | Likelihood = −7.54 | Transmembrane | 252-268 (250-273) |
| | INTEGRAL | Likelihood = −6.85 | Transmembrane | 48-64 (43-70) |
| | INTEGRAL | Likelihood = −5.57 | Transmembrane | 141-157 (138-170) |
| | INTEGRAL | Likelihood = −5.26 | Transmembrane | 295-311 (289-315) |
| | INTEGRAL | Likelihood = −0.53 | Transmembrane | 220-236 (220-237) |

```
----- Final Results -----
                              bacterial membrane --- Certainty = 0.4545(Affirmative) < succ>
                                bacterial outside --- Certainty = 0.0000(Not Clear) < succ>
                            bacterial cytoplasm --- Certainty = 0.0000(Not Clear) < succ>
```

[8267] The protein has homology with the following sequences in the databases:

| >GP: AAF37879 GB: AF234619 OpuABC [Lactococcus lactis] | | | |
|---|---|---|---|
| Identities = 340/571 (59%), Positives = 418/571 (72%), | | | |
| Gaps = 8/571 (1%) | | | |
| Query: | 8 | KLPVAQLVEQLTEWLTKTFSGLFDIMQVVGSFLMDWMTKTLLFIHPLLFIVLVTAGMFFL | 67 |
| | | ++P+A V T+W+T TFS FD++Q G+ LM+ +T L + L I +VT + | |
| Sbjct: | 8 | QVPIANWVSSATDWITSTFSSGFDVIQKSGTVLMNGITGALTAVPFWLMIAVVTILAILV | 67 |
| Query: | 68 | AKKKWPLPTFTLLGLLFIYNQGLWKQLMNTFTLVLVASLISVLIGIPLGIWMAKNATVRQ | 127 |
| | | + KK P FT +GL I NQGLW LM+T TLVL++SL+S++IG+PLGIWMAK+ V + | |
| Sbjct: | 68 | SGKKIAFPLFTFIGLSLIANQGLWSDLMSTITLVLLSSLLSIIIGVPLGIWMAKSDLVAK | 127 |
| Query: | 128 | IVNPILDFMQTMPAFVYLIPAVAFFGIGMVPGVFASVIFALPPTVRFTNLAIRDIPTELI | 187 |
| | | IV PILDFMQTMP FVYLIPAVAFFGIG+VPGVFASVIFALPPTVR TNL IR + TEL+ | |
| Sbjct: | 128 | IVQPILDFMQTMPGFVYLIPAVAFFGIGVVPGVFASVIFALPPTVRMTNLGIRQVSTELV | 187 |
| Query: | 188 | EASDAFGSTGKQKLFKVELPLAKNTIMAGVNQTMMLALSMVVTGSMIGAPGLGREVLSAL | 247 |
| | | EA+D+FGST +QKLFK+E PLAK TIMAGVNQT+MLALSMVV SMIGAPGLGR VL+A+ | |
| Sbjct: | 188 | EAADSFGSTARQKLFKLEFPLAKGTIMAGVNQTIMLALSMVVIASMIGAPGLGRGVLAAV | 247 |
| Query: | 248 | QHADIGSGFVSGLALVILAIVLDRMTQLFNSKPQEKAKAGKTNKW---IGLAALAVFLIA | 304 |
| | | Q ADIG GFVSG++LVILAI++DR TQ N P EK KW I L +L +I | |
| Sbjct: | 248 | QSADIGKGFVSGISLVILAIIIDRFTQKLNVSPLEKQGNPTVKKWKRGIALVSLLALIIG | 307 |
| Query: | 305 | ALGRGIMAMTSGMADKGETVNIAYVQWDSEVASTHVIAEVLKNEGYHVTLTPLDNAVMWQ | 364 |
| | | A M+ G + V++ Y+ WDSEVAS +V+ + +K G+ V T LDNAV WQ | |
| Sbjct: | 308 | AFS----GMSFGKTASDKKVDLVYMNWDSEVASINVLTQAMKEHGFDVKTTALDNAVAWQ | 363 |
| Query: | 365 | TVANGNADFSTSAWLPVTHGQQYQKYKSKLDDLGPNLKGTKLGLAVPKYMTDVNSIEDLS | 424 |
| | | TVANG AD SAWLP TH Q+QKY +D LGPNLKG K+G VP YM +VNSIEDL+ | |
| Sbjct: | 364 | TVANGQADGMVSAWLPNTHKTQWQKYGKSVDLLGPNLKGAKVGFVVPSYM-NVNSIEDLT | 422 |
| Query: | 425 | KQADQKITGIEPGAGIMAAAQKTLKEYHNLSSWELVAASTGAMTTSLDQAIKKKDPIVVT | 484 |
| | | QA++ ITGIEPGAG+MAA++KTL Y NL W+LV +S+GAMT +L +AIK+ IV+T | |
| Sbjct: | 423 | NQANKTITGIEPGAGVMAASEKTLNSYDNLKDWKLVPSSSGAMTVALGEAIKQHKDIVIT | 482 |
| Query: | 485 | AWSPHWMFAKYDLKYLKDPKEIFGSTENINTIARKGLKKELPNVYKIIDKFHWTQKDMEA | 544 |
| | | WSPHWMF KYDLKYL DPK G++ENINTI RKGLKKE P YK++DKF+WT KDMEA | |
| Sbjct: | 483 | GWSPHWMFNKYDLKYLADPKGTMGTSENINTIVRKGLKKENPEAYKVLDKFNWTTKDMEA | 542 |
| Query: | 545 | VMLDINKGMSPEAAAKKWVEANKSKVSSWTK | 575 |
| | | VMLDI G +PE AAK W++ ++ +V W K | |
| Sbjct: | 543 | VMLDIQNGKTPEEAAKNWIKDHQKEVDKWFK | 573 |

[8268] An alignment of the GAS and GBS proteins is shown below.

| Identities = 439/576 (76%), Positives = 513/576 (88%), | | | |
|---|---|---|---|
| Gaps = 2/576 (0%) | | | |
| Query: | 1 | MENLLQHKLPVAPFVESTTNWITKTFSGLFDFIQTIGNALMDWMTKTLLFINPLLFIVLI | 60 |
| | | +E +LQ KLPVA VE T W+TKTFSGLFD +Q +G+ LMDWMTKTLLFI+PLLFIVL+ | |
| Sbjct: | 1 | LETILQTKLPVAQLVEQLTEWLTKTFSGLFDIMQVVGSFLMDWMTKTLLFIHPLLFIVLV | 60 |
| Query: | 61 | TIAVFFLAKKKWQLPTFTFIGLLFIYNQGLWEQLINTFNLVLVASLISIIIGVPLGIWMA | 120 |
| | | T +FFLAKKKW LPTFT +GLLFIYNQGLW+QL+NTF LVLVASLIS++IG+PLGIWMA | |
| Sbjct: | 61 | TAGMFFLAKKKWPLPTFTLLGLLFIYNQGLWKQLMNTFTLVLVASLISVLIGIPLGIWMA | 120 |
| Query: | 121 | KSDKVKQVVNPILDFMQTMPAFVYLIPAVAFFGIGMVPGVFASVVFALPPTVRFTNLAIR | 180 |
| | | K+ V+Q+VNPILDFMQTMPAFVYLIPAVAFFGIGMVPGVFASV+FALPPTVRFTNLAIR | |
| Sbjct: | 121 | KNATVRQIVNPILDFMQTMPAFVYLIPAVAFFGIGMVPGVFASVIFALPPTVRFTNLAIR | 180 |
| Query: | 181 | EIPLELIEASDSFGSTVKQKLFKVELPLAKNTIMAGINQTMMLALSMVVTGSMIGAPGLG | 240 |
| | | +IP ELIEASD+FGST KQKLFKVELPLAKNTIMAG+NQTMMLALSMVVTGSMIGAPGLG | |
| Sbjct: | 181 | DIPTELIEASDAFGSTGKQKLFKVELPLAKNTIMAGVNQTMMLALSMVVTGSMIGAPGLG | 240 |
| Query: | 241 | REVLSALQHADIGTGFVSGLSLVILAIVLDRVSQFFNSKPGEKQAKTSKVKKWVGLGALA | 300 |
| | | REVLSALQHADIG+GFVSGL+LVILAIVLDR++Q FNSKP EK AK K KW+GL ALA | |
| Sbjct: | 241 | REVLSALQHADIGSGFVSGLALVILAIVLDRMTQLFNSKPQEK-AKAGKTNKWIGLAALA | 299 |
| Query: | 301 | LFILAALGRIVVNMTSGNEAKGQKVKIAYVQWDSEVASTNVIAEVLKSKGYDVELTPLDN | 360 |
| | | +F++AALGR ++ MTSG KG+ V IAYVQWDSEVAST+VIAEVLK++GY V LTPLDN | |
| Sbjct: | 300 | VFLIAALGRGIMAMTSGMADKGETVNIAYVQWDSEVASTHVIAEVLKNEGYHVTLTPLDN | 359 |
| Query: | 361 | AVMWQTVANGNADFTTSAWLPKTHGQYFNKYKNSLDDLGPHVENVKIGLVVPKYM-NVNS | 419 |
| | | AVMWQTVANGNADF+TSAWLP THGQ + KYK+ LDDLGP+++ K+GL VPKYM +VNS | |
| Sbjct: | 360 | AVMWQTVANGNADFSTSAWLPVTHGQQYQKYKSKLDDLGPNLKGTKLGLAVPKYMTDVNS | 419 |
| Query: | 420 | IEELSNQADKQITGIEPGAGIMKSAKQSLKDYPNLSSWKLLSASTGAMTTTLGKAIKNKD | 479 |
| | | IE+LS QAD++ITGIEPGAGIM +A+++LK+Y NLSSW+L++ASTGAMTT+L +AIK KD | |
| Sbjct: | 420 | IEDLSKQADQKITGIEPGAGIMAAAQKTLKEYHNLSSWELVAASTGAMTTSLDQAIKKKD | 479 |
| Query: | 480 | QVVITGWSPHWMFAKYDLKYLKDPKKSFGGEEHINTIARKNLKKDMPKVYKIIDKFKWTK | 539 |
| | | +V+T WSPHWMFAKYDLKYLKDPK+ FG E+INTIARK LKK++P VYKIIDKF WT+ | |
| Sbjct: | 480 | PIVVTAWSPHWMFAKYDLKYLKDPKEIFGSTENINTIARKGLKKELPNVYKIIDKFHWTQ | 539 |
| Query: | 540 | EDMESIMLDMDKGMEPAKAAQKWIKNHKKEVSEWTK | 575 |
| | | +DME++MLD++KGM P AA+KW++ +K +VS WTK | |
| Sbjct: | 540 | KDMEAVMLDINKGMSPEAAAKKWVEANKSKVSSWTK | 575 |

[8269] A related GBS gene <SEQ ID 8827> and protein <SEQ ID 8828> were also identified. Analysis of this protein sequence reveals the following:

| Lipop: Possible site: −1 Crend: 7 | | | |
|---|---|---|---|
| McG: Discrim Score: −6.57 | | | |
| GvH: Signal Score (−7.5): −5.37 | | | |
| Possible site: 41 | | | |
| >>> Seems to have no N-terminal signal sequence | | | |
| ALOM program | count: 6 | value: −10.67 | threshold: 0.0 |

| | | | |
|---|---|---|---|
| INTEGRAL | Likelihood = −10.67 | Transmembrane | 48-64 (43-72) |
| INTEGRAL | Likelihood = −9.24 | Transmembrane | 101-117 (93-122) |
| INTEGRAL | Likelihood = −7.54 | Transmembrane | 296-312 (290-316) |
| INTEGRAL | Likelihood = −6.21 | Transmembrane | 252-268 (250-273) |
| INTEGRAL | Likelihood = −5.57 | Transmembrane | 141-157 (138-170) |
| INTEGRAL | Likelihood = −0.53 | Transmembrane | 220-236 (220-237) |

| | | |
|---|---|---|
| PERIPHERAL | Likelihood = 2.44 | 159 |

modified ALOM score: 2.63
*** Reasoning Step: 3
----- Final Results -----
bacterial membrane --- Certainty = 0.5267 (Affirmative) < succ>
bacterial outside --- Certainty = 0.0000 (Not Clear) < succ>
bacterial cytoplasm --- Certainty = 0.0000 (Not Clear) < succ>

[8270] The protein has homology with the following sequences in the databases:

[chemical structure]

[8271] Based on this analysis, it was predicted that these proteins and their epitopes could be useful antigens for vaccines or diagnostics.

### EXAMPLE 1508

[8272] A DNA sequence (GBSx1596) was identified in S. agalactiae <SEQ ID 4639> which encodes the amino acid sequence <SEQ ID 4640>. This protein is predicted to be a transposase. Analysis of this protein sequence reveals the following:

| Possible site: 45 | | | |
|---|---|---|---|
| >>> Seems to have no N-terminal signal sequence | | | |
| INTEGRAL | Likelihood = −1.65 | Transmembrane | 223-239 (223-240) |

----- Final Results -----
bacterial membrane --- Certainty = 0.1659 (Affirmative) < succ>
bacterial outside --- Certainty = 0.0000 (Not Clear) < succ>
bacterial cytoplasm --- Certainty = 0.0000 (Not Clear) < succ>

[8273] A related GBS nucleic acid sequence <SEQ ID 10057> which encodes amino acid sequence <SEQ ID 10058> was also identified. A related GBS nucleic acid sequence <SEQ ID 10031> which encodes amino acid sequence <SEQ ID 10032> was also identified. A related GBS nucleic acid sequence <SEQ ID 10801> which encodes amino acid sequence <SEQ ID 10802> was also identified.

[8274] The protein has homology with the following sequences in the GENPEPT database.

| >GP: CAA50689 GB: X71844 putative transposase [Clostridium perfringens] | | | |
|---|---|---|---|
| Identities = 94/364 (25%), Positives 160/364 (43%), Gaps = 35/364 (9%) | | | |
| Query: | 8 | KHKHLTLLDRNDIQSGLDRGETFKAIGLNLLKHPTTIAKEVKRN--KQLRESTKDCLDCP | 65 |
| | | K+KHL + +R ++ L G + L + T+ E++R KQ+++ + + | |
| Sbjct: | 12 | KNKHLNMKERMIVEIRLKDGFSAYKNTKELNRPINTVLNEIRRGTTKQIKQGKEFHVYFA | 71 |
| Query: | 66 | LLRKAPYVCNGCPKRRINCGYKKTFYLAKQAQRNYEKLLVESREGIPLNKETFWKIDRVL | 125 |
| | | +A Y N + + N YK ++ K +V+ K W +D + | |
| Sbjct: | 72 | DTGEAVYKKN---RLKSNRKYKLL------ECSDFIKYVVDKV------KNDHWSLDACV | 116 |
| Query: | 126 | SNGVKKGQRIYHILKTNDLEVSSSTVYRHIKKGYLSITPIDLPRAVKFKKRRKSTLPPIP | 185 |
| | | G+ ++ + +S+ T+Y ++ G L I IDLP K + +KST | |
| Sbjct: | 117 | ------GEALHSSRFSPSQIISTKTLYNYVDLGLLPIKNIDLP--AKLHRNKKSTRVRNN | 168 |
| Query: | 186 | KAIKEGRRYEDFIEHM-NQSELNSWLEMDTVIGRIGGK--VLLTFNVAFCNFIFAKLMDS | 242 |
| | | K K G D + N+ E W E+D V+G K VLLT + M S | |
| Sbjct: | 169 | KK-KLGTSISDRPNSIENREEFGHW-EIDCVLGEKSNKDKVLLTLVERKTRYAIISEMSS | 226 |
| Query: | 243 | KTAIETAKHIQVIKRTLYDNKRDFFELFPVILTDNGGEFARVDDIEIDVCGQSQLFFCDP | 302 |
| | | + I K + IK L F E+F I DNG EFA + + E+ +++++F P | |
| Sbjct: | 227 | HSTISVTKALDKIKEFLGSK---FSEVFKSITADNGSEFADLSEFELKT--KTKVYFTHP | 281 |
| Query: | 303 | NRSDQKARIEKNHTLVRDILPKGTSFDNLTQEDINLALSHINSVKRQALNGKTAYELFSF | 362 |
| | | S +K E+++ L+R +PKG + + E I+ + +N++ R+ L+ KT ELF | |
| Sbjct: | 282 | YSSFEKGTNERHNGLIRRFIPKGKRISDYSLETISFIENWMNTLPRKLLDYKTPEELFEI | 341 |
| Query: | 363 | TYGK | 366 |
| | | K | |
| Sbjct: | 342 | HLDK | 345 |

[8275] No corresponding DNA sequence was identified in S. pyogenes.

[8276] Based on this analysis, it was predicted that these proteins and their epitopes could be useful antigens for vaccines or diagnostics.

### EXAMPLE 1509

[8277] A DNA sequence (GBSx1597) was identified in S. agalactiae <SEQ ID 4641> which encodes the amino acid sequence <SEQ ID 4642>. Analysis of this protein sequence reveals the following:

| Possible site: 33 | | | |
|---|---|---|---|
| >>> Seems to have an uncleavable N-term signal seq | | | |
| INTEGRAL | Likelihood = −11.30 | Transmembrane | 56-72 (48-79) |
| INTEGRAL | Likelihood = −6.85 | Transmembrane | 11-27 (6-30) |
| INTEGRAL | Likelihood = −6.69 | Transmembrane | 129-145 (126-158) |
| INTEGRAL | Likelihood = −6.53 | Transmembrane | 94-110 (90-117) |
| INTEGRAL | Likelihood = −1.54 | Transmembrane | 216-232 (215-232) |
| INTEGRAL | Likelihood = −1.22 | Transmembrane | 147-163 (147-165) |

----- Final Results -----
bacterial membrane --- Certainty = 0.5522 (Affirmative) < succ>
bacterial outside --- Certainty = 0.0000 (Not Clear) < succ>
bacterial cytoplasm --- Certainty = 0.0000 (Not Clear) < succ>

[8278] A related GBS nucleic acid sequence <SEQ ID 9431> which encodes amino acid sequence <SEQ ID 9432> was also identified.

[8279] The protein has homology with the following sequences in the GENPEPT database.

| >GP: BAB07666 GB: AP001520 unknown conserved protein [Bacillus halodurans] | | | |
|---|---|---|---|
| Identities = 112/224 (50%), Positives = 150/224 (66%), Gaps = 2/224 (0%) | | | |
| Query: | 8 | IKDILWFIIPSLFGVLLLMTPFKYNGMTTVAVSVISKTINQWINAVFPIHYIILLIIFIS | 67 |
| | | +KD LWF+IPS+ GV L M P + + T+ V+ ++K + ++ P I+L I + | |
| Sbjct: | 19 | LKDYLWFLIPSIIGVGLFMVPIQKDNAITIPVAFLAKQLQGALDDHLPAILTIMLAIVV- | 77 |
| Query: | 68 | CVLALCYRLFRPSFIEKNDLLKEISDITIFWLIIRLIGLALGLMTVLHIGPEMVWGKETG | 127 |
| | | VL+ LF+P+ KN LLK + I WL++R++G MT+L +GPE VW + TG | |
| Sbjct: | 78 | -VLSCVATLFKPNLFMKNGLLKSLFVIHPMWLVVRVLGFIFAFMTLLQLGPEAVWSEGTG | 136 |
| Query: | 128 | GLILFDLIGGLFTIFLAAGFILPFLTEFGLLEFVGVFLTPIMRPFFQLPGRSAVNCVASF | 187 |
| | | L+L+DL+ LFTIFL AG LPFL FGLLE GV L MRP F LPGRS+++C+AS+ | |
| Sbjct: | 137 | ALLLYDLLPLLFTIFLFAGLFLPFLLNFGLLELFGVLLNKFMRPVFTLPGRSSIDCLASW | 196 |
| Query: | 188 | VGDGTIGIALTDKQYVEGYYTSREAATISTTFSAVSITFCLXXL | 231 |
| | | +GDGTIG+ LT+KQY EG+YT REAA ISTTFS VSITF + L | |
| Sbjct: | 197 | MGDGTIGVLLTNKQYEEGFYTQREAAVISTTFSVVSITFSIVVL | 240 |

[8280] No corresponding DNA sequence was identified in S. pyogenes.

[8281] Based on this analysis, it was predicted that these proteins and their epitopes could be useful antigens for vaccines or diagnostics.

### EXAMPLE 1510

[8282] A DNA sequence (GBSx1599) was identified in S. agalactiae <SEQ ID 4643> which encodes the amino acid sequence <SEQ ID 4644>. This protein is predicted to be Na/H antiporter homolog (kefB). Analysis of this protein sequence reveals the following:

| Possible site: 17 | | | |
|---|---|---|---|
| >>> Seems to have an uncleavable N-term signal seq | | | |
| INTEGRAL | Likelihood = −10.14 | Transmembrane | 176-192 (171-203) |
| INTEGRAL | Likelihood = −9.34 | Transmembrane | 353-369 (348-373) |
| INTEGRAL | Likelihood = −9.24 | Transmembrane | 3-19 (1-26) |
| INTEGRAL | Likelihood = −7.17 | Transmembrane | 145-161 (142-168) |
| INTEGRAL | Likelihood = −7.01 | Transmembrane | 86-102 (81-108) |
| INTEGRAL | Likelihood = −6.53 | Transmembrane | 52-68 (51-72) |
| INTEGRAL | Likelihood = −5.79 | Transmembrane | 24-40 (23-49) |
| INTEGRAL | Likelihood = −5.52 | Transmembrane | 214-230 (209-233) |
| INTEGRAL | Likelihood = −4.04 | Transmembrane | 260-276 (258-278) |
| INTEGRAL | Likelihood = −3.66 | Transmembrane | 287-303 (287-308) |
| INTEGRAL | Likelihood = −2.71 | Transmembrane | 113-129 (112-129) |
| INTEGRAL | Likelihood = −2.66 | Transmembrane | 332-348 (330-349) |

----- Final Results -----
bacterial membrane --- Certainty = 0.5055 (Affirmative) < succ>
bacterial outside --- Certainty = 0.0000 (Not Clear) < succ>
bacterial cytoplasm --- Certainty = 0.0000 (Not Clear) < succ>

[8283] The protein has homology with the following sequences in the GENPEPT database.

| >GP: CAA51756 GB: X73329 Na/H antiporter homolog [Lactococcus lactis] | | | |
|---|---|---|---|
| Identities = 208/376 (55%), Positives = 285/376 (75%), Gaps = 3/376 (0%) | | | |
| Query: | 1 | MHIIIQITIILLASVLATLISKRIGIPAVVGQLLVGIIIGPAMLGLVHQNQVLHVLSEIG | 60 |
| | | M+ I+Q+TI+L+AS++ATL S+R+ IPAV+GQ+LVGI+I P++LGLVH VL V+SEIG | |
| Sbjct: | 1 | MNDILQLTIVLIASLIATLASRRLKIPAVIGQMLVGILIAPSVLGLVHSGHVLEVMSEIG | 60 |
| Query: | 61 | VILLMFLAGLEANFDLLKKYLKPSLLVAITGVIVPMALFYFLTRLFGFQINTAIFYGLVF | 120 |
| | | VILLMFLAGLE++ +LKK K S+LVAI GVIVP+ +F + FG+ ++T+ FYG+VF | |
| Sbjct: | 61 | VILLMFLAGLESDLTVLKKNFKASMLVAIGGVIVPLIVFGLVAFSFGYGMSTSFFYGIVF | 120 |
| Query: | 121 | AATSISITVEVLQEYNRVKTDTGAIILGAAVADDVLAVLLLSVFIA--TNGSSSNIGLQI | 178 |
| | | AATS+SITVEVLQEY ++ T G+IILGAAV DD+LAVL+LS+F + GS +++ Q | |
| Sbjct: | 121 | AATSVSITVEVLQEYGKLSTRAGSIILGAAVVDDILAVLILSIFTSFKNGGSGTHLFFQF | 180 |
| Query: | 179 | IIQLLFFVFLFICMKYLVPALFKLIEKVHFFEKYTILAILICFSLSILADKVGMSSIIGS | 238 |
| | | +++LLFF FLF+ K L+P +K ++K+ K TI+A++IC LS+LAD VGMS++IGS | |
| Sbjct: | 181 | LLELLFFAFLFVVHK-LIPRFWKFVQKLPIANKNTIVALIICLGLSLLADSVGMSAVIGS | 239 |
| Query: | 239 | FFAGLAIGQTSFVDKVEHKISLLSYTFFIPIFFASIALPLKFDGMMSHLHTILIFTALAV | 298 |
| | | FFAGLAI QT K+E S + Y FIP+FF IA+ ++FD ++ H IL+FT LA+ | |
| Sbjct: | 240 | FFAGLAISQTEVSHKIEEYTSAIGYVIFIPVFFVLIAISVQFDSLIHHPWIILLFTLLAI | 299 |
| Query: | 299 | LSKLIPGYFVGRGFNFSKLESLTIGGGMVSRGEMALIIVQVGLAAKIISSTTYSELVIVV | 358 |
| | | L+K IP YFVG+ S ES+ IG GM+SRGEMALI+ Q+GL + II+ YSELVIV+ | |
| Sbjct: | 300 | LTKFIPAYFVGKSNKLSTGESMLIGTGMISRGEMALIVAQIGLTSAIITDEVYSELVIVI | 359 |
| Query: | 359 | ILSTIIAPFILKYSFK | 374 |
| | | IL+T++APF++K K | |
| Sbjct: | 360 | ILATVLAPFLIKLVLK | 375 |

[8284] No corresponding DNA sequence was identified in S. pyogenes.

[8285] Based on this analysis, it was predicted that this protein and its epitopes, could be useful antigens for vaccines or diagnostics.

### EXAMPLE 1511

[8286] A DNA sequence (GBSx1600) was identified in S. agalactiae <SEQ ID 4645> which encodes the amino acid sequence <SEQ ID 4646>. Analysis of this protein sequence reveals the following:

Possible site: 22
>>> Seems to have a cleavable N-term signal seq.
----- Final Results -----
bacterial outside --- Certainty = 0.3000 (Affirmative) < succ>
bacterial membrane --- Certainty = 0.0000 (Not Clear) < succ>
bacterial cytoplasm --- Certainty = 0.0000 (Not Clear) < succ>

[8287] The protein has homology with the following sequences in the GENPEPT database.

| >GP: CAB14269 GB: Z99116 ypuA [Bacillus subtilis] | | | |
|---|---|---|---|
| Identities = 86/319 (26%), Positives = 147/319 (45%), Gaps = 34/319 (10%) | | | |
| Query: | 3 | IKKLLFAGLAFILFTLASPAYAASDVQKVIDETYVQPDYVLGYSLNQEQRAQTLQLLNYD | 62 |
| | | +KK+ LA + L P + +D + + V LG L++ + + L +N | |
| Sbjct: | 1 | MKKIWIGMLAAAVLLLMVPKVSLADA--AVGDVIV----TLGADLSESDKQKVLDEMNVP | 54 |
| Query: | 63 | ESRDTKVKTLNTSSYAKIMNIADDASIQLY----SSVKIKKLGSNDTLAVNIVTPENITK | 118 |
| | | ++ T V N + + +A I SS+ I K GS +N+ T NI+ | |
| Sbjct: | 55 | DNATT-VTVTNKEEHEYLGKYISNAQIGSRAISSSSITIAKKGSG----LNVET-HNISG | 108 |
| Query: | 119 | VTEDMYRNAAVTLGIEHATISVAAPIKVTGESALAGIYYSLE-KNGASVSSENKQLAQEE | 177 |
| | | +T++MY NA +T G++ A + V AP +V+G +AL G+ + E + ++S + KQ+A +E | |
| Sbjct: | 109 | ITDEMYLNALMTAGVKDAKVYVTAPFEVSGTAALTGLIKAYEVSSDEAISEDVKQVANQE | 168 |
| Query: | 178 | LSTLSGINAENKGKEGYDADKLNVALTDIKSAVAKGGSDLSKDDIRKIVEETLKNYHLDN | 237 |
| | | L T S + + G E A + IK AK G +K DI K V++ + L+ | |
| Sbjct: | 169 | LVTTSEL-GDKIGNENAAA-----LIAKIKEEFAKNGVPDNKADIEKQVDDAASD--LNV | 220 |
| Query: | 238 | AVTENQINLIVNFAVNLSQSNVIKNSDFTNTLNNLKDNIVSKAGSKFKNINVNFNANKAV | 297 |
| | | +T++Q N +V S N +KN+D + D + KA K + + | |
| Sbjct: | 221 | TLTDSQKNQLV------SLFNKMKNADI--DWGQVSDQL-DKAKDKITKFIESDEGKNFI | 271 |
| Query: | 298 | ESGKGFLANIWQQIVNFFQ | 316 |
| | | + F +IW IV+ F+ | |
| Sbjct: | 272 | QKVIDFFVSIWNAIVSIFK | 290 |

[8288] No corresponding DNA sequence was identified in S. pyogenes.

[8289] Based on this analysis, it was predicted that this protein and its epitopes, could be useful antigens for vaccines or diagnostics.

### EXAMPLE 1512

[8290] A repeated DNA sequence (GBSx1602) was identified in S. agalactiae <SEQ ID 4647> which encodes the amino acid sequence <SEQ ID 4648>. Analysis of this protein sequence reveals the following:

Possible site: 19
>>> Seems to have no N-terminal signal sequence
----- Final Results -----
bacterial cytoplasm --- Certainty = 0.0603 (Affirmative) < succ>
bacterial membrane --- Certainty = 0.0000 (Not Clear) < succ>
bacterial outside --- Certainty = 0.0000 (Not Clear) < succ>

[8291] The protein has homology with the following sequences in the GENPEPT database.

| >GP: CAB15719 GB: Z99122 similar to hypothetical proteins [Bacillus | | | |
|---|---|---|---|
| subtilis] | | | |
| Identities = 76/138 (55%), Positives = 91/138 (65%), Gaps = 12/138 (8%) | | | |
| Query: | 1 | MKLKAVHHIAIIVSDYEKSKDFYVNKLGFEIIRENHRPERHDYKLDLRC-GDIELEIFGN | 59 |
| | | M LK++HHIAII SDYEKSK FYV+KLGF++I+E +R ER YKLDL G +E+F | |
| Sbjct: | 1 | MLLKSIHHIAIICSDYEKSKAFYVHKLGFQVIQETYREERGSYKLDLSLNGSYVIELF-- | 58 |
| Query: | 60 | RLDDPEYETPPQRIGRPNWPREACGLRHLAFYVPDVEAYKVELENLGIFVEPIRYDDYTG | 119 |
| | | + PP+R RP EA GLRHLAF V ++ EL GI EPIR D TG | |
| Sbjct: | 59 | -----SFPDPPERQTRP----EAAGLRHLAFTVGSLDKAVQELHEKGIETEPIRTDPLTG | 109 |
| Query: | 120 | KKMTFFFDPDGLPLELHE | 137 |
| | | K+ TFFFDPD LPLEL+E | |
| Sbjct: | 110 | KRFTFFFDPDQLPLELYE | 127 |

[8292] A related DNA sequence was identified in S. pyogenes <SEQ ID 4649> which encodes the amino acid sequence <SEQ ID 4650>. Analysis of this protein sequence reveals the following:

Possible site: 20
>>> Seems to have no N-terminal signal sequence
----- Final Results -----
bacterial cytoplasm --- Certainty = 0.1205 (Affirmative) < succ>
bacterial membrane --- Certainty = 0.0000 (Not Clear) < succ>
bacterial outside --- Certainty = 0.0000 (Not Clear) < succ>

[8293] An alignment of the GAS and GBS proteins is shown below.

| Identities = 99/137 (72%), Positives = 116/137 (84%) | | | |
|---|---|---|---|
| Query: | 1 | MKLKAVHHIAIIVSDYEKSKDFYVNKLGFEIIRENHRPERHDYKLDLRCGDIELEIFGNR | 60 |
| | | MKL A+HH+AIIVSDY SKDFYVNKLGFEIIREN+RP++HDYKLDL CG IELEIFG | |
| Sbjct: | 2 | MKLNAIHHVAIIVSDYHLSKDFYVNKLGFEIIRENYRPDKHDYKLDLSCGRIELEIFGKV | 61 |
| Query: | 61 | LDDPEYETPPQRIGRPNWPREACGLRHLAFYVPDVEAYKVELENLGIFVEPIRYDDYTGK | 120 |
| | | DP Y+ PP+R+ P + EACGLRHLAF V ++E+Y +L++LGI VEPIR+DDYTG+ | |
| Sbjct: | 62 | TSDPNYQAPPKRVSEPEFKSEACGLRHLAFRVTNIESYVDDLKSLGIPVEPIRHDDYTGE | 121 |
| Query: | 121 | KMTFFFDPDGLPLELHE | 137 |
| | | KMTFFFDPDGLPLELHE | |
| Sbjct: | 122 | KMTFFFDPDGLPLELHE | 138 |

[8294] Based on this analysis, it was predicted that these proteins and their epitopes could be useful antigens for vaccines or diagnostics.

### EXAMPLE 1513

[8295] A DNA sequence (GBSx1603) was identified in S. agalactiae <SEQ ID 4651> which encodes the amino acid sequence <SEQ ID 4652>. This protein is predicted to be alpha-amylase. Analysis of this protein sequence reveals the following:

| Possible site: 40 | | | |
|---|---|---|---|
| >>> Seems to have an uncleavable N-term signal seq | | | |
| INTEGRAL | Likelihood = −11.62 | Transmembrane | 14-30 (7-36) |

----- Final Results -----
bacterial membrane --- Certainty = 0.5649 (Affirmative) < succ>
bacterial outside --- Certainty = 0.0000 (Not Clear) < succ>
bacterial cytoplasm --- Certainty = 0.0000 (Not Clear) < succ>

[8296] The protein has homology with the following sequences in the GENPEPT database.

| >GP: AAG41778 GB: AF213261 sortase [Streptococcus gordonii] | | | |
|---|---|---|---|
| Identities = 136/247 (55%), Positives = 174/247 (70%), Gaps = 2/247 (0%) | | | |
| Query: | 2 | RNKKKSHGFFNFVRWLLVVLLIIVGLALVFNKPIRNAFIAHQSNHYQISRVSKKTIEKNK | 61 |
| | | R KK N + +L V+L++V LAL+FN IRN + +N YQ+S+VSKK IEKNK | |
| Sbjct: | 6 | RRAKKKRSRRNIILNILSVILLLVALALIFNSSIRNMIMVWHTNKYQVSKVSKKEIEKNK | 65 |
| Query: | 62 | KSKTSYDFSSVKSISTESILSAQTKSHNLPVIGGIAIPDVEINLPIFKGLGNTELSYGAG | 121 |
| | | SK S++F V+ +STE++L+AQ K+ LPVIGGIAIP++ +NLPIF GL N L YGAG | |
| Sbjct: | 66 | ASKGSFNFEKVEPLSTEAVLNAQWKAQQLPVIGGIAIPELSLNLPIFNGLENAGLYYGAG | 125 |
| Query: | 122 | TMKENQIMGGPNNYALASHHVFGLTGSSKMLFSPLEHAKKGMKVYLTDKSKVYTYTITEI | 181 |
| | | TMKE Q M G NYALASHHVFG+TG+++MLFSPL+ AK GMK+YLTDK KVYTY+IT + | |
| Sbjct: | 126 | TMKETQEM-GKGNYALASHHVFGITGANEMLFSPLDRAKAGMKIYLTDKEKVYTYSITSV | 184 |
| Query: | 182 | SKVTPEHVEVIDD-TPGKSQLTLVTCTDPEATERIIVHAELEKTGEFSTADESILKAFSK | 240 |
| | | V PE V+V+DD G +++TLVTC D AT R IV LE + + IL F+K | |
| Sbjct: | 185 | ENVEPERVDVVDDAADGTAEVTLVTCEDAAATSRTIVKGVLESETPYKETPKKILNYFNK | 244 |
| Query: | 241 | KYNQINL | 247 |
| | | YNQ+ L | |
| Sbjct: | 245 | SYNQMQL | 251 |

[8297] A related DNA sequence was identified in S. pyogenes <SEQ ID 4653> which encodes the amino acid sequence <SEQ ID 4654>. Analysis of this protein sequence reveals the following:

| Possible site: 34 | | | |
|---|---|---|---|
| >>> Seems to have an uncleavable N-term signal seq | | | |
| INTEGRAL | Likelihood = −8.12 | Transmembrane | 18-34 (13-38) |
| INTEGRAL | Likelihood = −0.32 | Transmembrane | 94-110 (94-110) |

----- Final Results -----
bacterial membrane --- Certainty = 0.4248 (Affirmative) < succ>
bacterial outside --- Certainty = 0.0000 (Not Clear) < succ>
bacterial cytoplasm --- Certainty = 0.0000 (Not Clear) < succ>

[8298] The protein has homology with the following sequences in the databases:

| >GP: AAA73122 GB: M77279 alpha-amylase [unidentified cloning vector] | | | |
|---|---|---|---|
| Identities = 60/122 (49%), Positives = 85/122 (69%) | | | |
| Query: | 7 | RRKIKSMSWARKLLIAVLLILGLALLFNKPIRNTLIARNSNKYQVTKVSKKQIKKNKEAKS | 67 |
| | | + K + +W L+ +L I+GLAL+FN IR+ ++ +NS Y V+K+ +KKN ++ | |
| Sbjct: | 4 | KEKKRGKNWLINSLLVLLFIIGLALIFNNQIRSWVVQQNSRSYAVSKLKPADVKKNMARET | 64 |
| Query: | 68 | TFDFQAVEPVSTESVLQAQMAAQQLPVIGGIAIPELGINLPIFKGLGNTELIYGAGTMKEE | 127 |
| | | TFDF +VE +STE+V++AQ + LPVIG IAIP + INLPIFKGL N L+ GAGTMKE+ | |
| Sbjct: | 65 | TFDFDSVESLSTEAVMKAQFENKNLPVIGAIAIPSVEINLPIFKGLSNVALLTGAGTMKED | 124 |

[8299] An alignment of the GAS and GBS proteins is shown below.

| Identities = 147/245 (60%), Positives = 192/245 (78%) | | | |
|---|---|---|---|
| Query: | 2 | RNKKKSHGFFNFVRWLLVVLLIIVGLALVFNKPIRNAFIAHQSNHYQISRVSKKTIEKNK | 61 |
| | | + K++ ++ R LL+ +L+I+GLAL+FNKPIRN IA SN YQ+++VSKK I+KNK | |
| Sbjct: | 4 | KQKRRKIKSMSWARKLLIAVLLILGLALLFNKPIRNTLIARNSNKYQVTKVSKKQIKKNK | 63 |
| Query: | 62 | KSKTSYDFSSVKSISTESILSAQTKSHNLPVIGGIAIPDVEINLPIFKGLGNTELSYGAG | 121 |
| | | ++K+++DF +V+ +STES+L AQ + LPVIGGIAIP++ INLPIFKGLGNTEL YGAG | |
| Sbjct: | 64 | EAKSTFDFQAVEPVSTESVLQAQMAAQQLPVIGGIAIPELGINLPIFKGLGNTELIYGAG | 123 |
| Query: | 122 | TMKENQIMGGPNNYALASHHVFGLTGSSKMLFSPLEHAKKGMKVYLTDKSKVYTYTITEI | 181 |
| | | TMKE Q+MGG NNY+LASHH+FG+TGSS+MLFSPLE A+ GM +YLTDK K+Y Y I ++ | |
| Sbjct: | 124 | TMKEEQVMGGENNYSLASHHIFGITGSSQMLFSPLERAQNGMSIYLTDKEKIYEYIIKDV | 183 |
| Query: | 182 | SKVTPEHVEVIDDTPGKSQLTLVTCTDPEATERIIVHAELEKTGEFSTADESILKAFSKK | 241 |
| | | V PE V+VIDDT G ++TLVTCTD EATERIIV EL+ +F A +LKAF+ | |
| Sbjct: | 184 | FTVAPERVDVIDDTAGLKEVTLVTCTDIEATERIIVKGELKTEYDFDKAPADVLKAFNHS | 243 |
| Query: | 242 | YNQIN | 246 |
| | | YNQ++ | |
| Sbjct: | 244 | YNQVS | 248 |

[8300] SEQ ID 4652 (GBS266) was expressed in E. coli as a His-fusion product. SDS-PAGE analysis of total cell extract is shown in FIG. 49 (lane 1; MW 26 kDa).

[8301] GBS266-His was purified as shown in FIG. 205, lane 10.

[8302] Based on this analysis, it was predicted that these proteins and their epitopes could be useful antigens for vaccines or diagnostics.

### EXAMPLE 1514

[8303] A DNA sequence (GBSx1604) was identified in S. agalactiae <SEQ ID 4655> which encodes the amino acid sequence <SEQ ID 4656>. Analysis of this protein sequence reveals the following:

Possible site: 31
>>> Seems to have no N-terminal signal sequence
----- Final Results -----
bacterial cytoplasm --- Certainty = 0.1934 (Affirmative) < succ>
bacterial membrane --- Certainty = 0.0000 (Not Clear) < succ>
bacterial outside --- Certainty = 0.0000 (Not Clear) < succ>

[8304] A related DNA sequence was identified in S. pyogenes <SEQ ID 4657> which encodes the amino acid sequence <SEQ ID 4658>. Analysis of this protein sequence reveals the following:

Possible site: 31
>>> Seems to have no N-terminal signal sequence
----- Final Results -----
bacterial cytoplasm --- Certainty = 0.1934 (Affirmative) < succ>
bacterial membrane --- Certainty = 0.0000 (Not Clear) < succ>
bacterial outside --- Certainty = 0.0000 (Not Clear) < succ>

[8305] An alignment of the GAS and GBS proteins is shown below.

| Identities = 711/819 (86%), Positives = 767/819 (92%) | | | |
|---|---|---|---|
| Query: | 1 | MQDKNLVDVNLTSEMKTSFIDYAMSVIVARALPDVRDGLKPVHRRILYGMNELGVTPDKP | 60 |
| | | MQD+NL+DVNLTSEMKTSFIDYAMSVIVARALPDVRDGLKPVHRRILYGMNELGVTPDKP | |
| Sbjct: | 1 | MQDRNLIDVNLTSEMKTSFIDYAMSVIVARALPDVRDGLKPVHRRILYGMNELGVTPDKP | 60 |
| Query: | 61 | HKKSARITGDVMGKYHPHGDSSIYEAMVRMAQWWSYRHMLVDGHGNFGSMDGDGAAAQRY | 120 |
| | | HKKSARITGDVMGKYHPHGDSSIYEAMVRMAQWWSYRHMLVDGHGNFGSMDGDGAAAQRY | |
| Sbjct: | 61 | HKKSARITGDVMGKYHPHGDSSIYEAMVRMAQWWSYRHMLVDGHGNFGSMDGDGAAAQRY | 120 |
| Query: | 121 | TEARMSKIALEMLRDINKNTVDFQDNYDGSEREPLVLPARFPNLLVNGATGIAVGMATNI | 180 |
| | | TEARMSKIALE+LRDINKNTV+FQDNYDGSEREP+VLPARFPNLLVNGATGIAVGMATNI | |
| Sbjct: | 121 | TEARMSKIALELLRDINKNTVNFQDNYDGSEREPVVLPARFPNLLVNGATGIAVGMATNI | 180 |
| Query: | 181 | PPHNLGESIDAVKLVMDNPDVTTRELMEVIPGPDFPTGALVMGRSGIHRAYETGKGSIVL | 240 |
| | | PPHNL ESIDAVK+VM++PD TTRELMEVIPGPDFPTGALVMGRSGIHRAY+TGKGSIVL | |
| Sbjct: | 181 | PPHNLAESIDAVKMVMEHPDCTTRELMEVIPGPDFPTGALVMGRSGIHRAYDTGKGSIVL | 240 |
| Query: | 241 | RSRTEIETTSNGKERIVVTEFPYGVNKTKVHEHIVRLAQEKRIEGITAVRDESSREGVRF | 300 |
| | | RSRTEIETT G+ERIVVTEFPYGVNKTKVHEHIVRLAQEKR+EGITAVRDESSREGVRF | |
| Sbjct: | 241 | RSRTEIETTQTGRERIVVTEFPYGVNKTKVHEHIVRLAQEKRLEGITAVRDESSREGVRF | 300 |
| Query: | 301 | VIEVRRAASANVILNNLFKLTSLQTNFSFNMLAIEKGVPKILSLRQIIDNYIEHQKEVIV | 360 |
| | | VIE+RR ASA VILNNLFKLTSLQTNFSFNMLAIE GVPKILSLRQIIDNYI HQKEVI+ | |
| Sbjct: | 301 | VIEIRREASATVILNNLFKLTSLQTNFSFNMLAIENGVPKILSLRQIIDNYISHQKEVII | 360 |
| Query: | 361 | RRTQFDKAKAGARAHILEGLLVALDHLDEVITIIRNSETDTIAQAELMSRFELSERQSQA | 420 |
| | | RRT+FDK KA ARAHILEGLL+ALDHLDEVI IIRNSETD IAQ ELMSRF+LSERQSQA | |
| Sbjct: | 361 | RRTRFDKDKAEARAHILEGLLIALDHLDEVIAIIRNSETDVIAQTELMSRFDLSERQSQA | 420 |
| Query: | 421 | ILDMRLRRLTGLERDKIQSEYNDLLALIADLADILAKPERVVTIIKEEMDEVKRKYADAR | 480 |
| | | ILDMRLRRLTGLERDKIQSEY+DLLALIADL+DILAKPER++TIIKEEMDE+KRKYA+ R | |
| Sbjct: | 421 | ILDMRLRRLTGLERDKIQSEYDDLLALIADLSDILAKPERIITIIKEEMDEIKRKYANPR | 480 |
| Query: | 481 | RTELMIGEVLSLEDEDLIEEEDVLITLSNKGYIKRLAQDEFRAQKRGGRGIQGTGVNNDD | 540 |
| | | RTELM+GEVLSLEDEDLIEEEDVLITLSNKGYIKRLAQDEFRAQKRGGRG+QGTGVNNDD | |
| Sbjct: | 481 | RTELMVGEVLSLEDEDLIEEEDVLITLSNKGYIKRLAQDEFRAQKRGGRGVQGTGVNNDD | 540 |
| Query: | 541 | FVRELVSTSTHDTVLFFTNLGRVYRLKAYEIPEYGRTAKGLPIVNLLKLDEGETIQTIIN | 600 |
| | | FVREL+STSTHDT+LFFTN GRVYRLKAYEIPEYGRTAKGLPIVNLLKL++GETIQTIIN | |
| Sbjct: | 541 | FVRELISTSTHDTLLFFTNFGRVYRLKAYEIPEYGRTAKGLPIVNLLKLEDGETIQTIIN | 600 |
| Query: | 601 | ARKEDVANKYFFFTTQQGIVKRTSVSEFSNIRQNGLRAINLKENDELINVLLIDENEDVI | 660 |
| | | ARKE+ A K FFFTT+QGIVKRT VSEF+NIRQNGLRA+ LKE D+LINVLL +D+I | |
| Sbjct: | 601 | ARKEETAGKSFFFTTKQGIVKRTEVSEFNNIRQNGLRALKLKEGDQLINVLLTSGQDDII | 660 |
| Query: | 661 | IGTRTGYSVRFKVNAVRNMGRTATGVRGVLNREGDKVVGASRIVNGQEVLIITEKGYGKR | 720 |
| | | IGT +GYSVRF ++RNMGR+ATGVRGV LRE D+VVGASRI + QEVL+ITE G+GKR | |
| Sbjct: | 661 | IGTHSGYSVRFNEASIRNMGRSATGVRGVKLREDDRVVGASRIQDNQEVLVITENGFGKR | 720 |
| Query: | 721 | TEASEYPTKGRGGKGIKTANITAKNGPLARLVTINGNEDIMVITDTGVIIRTNVANISQT | 780 |
| | | T A++YPTKGRGGKGIKTANIT KNG LA LVT++G EDIMVIT+ GVIIRTNVANISQT | |
| Sbjct: | 721 | TSATDYPTKGRGGKGIKTANITPKNGQLAGLVTVDGTEDIMVITNKGVIIRTNVANISQT | 780 |
| Query: | 781 | GRSTMGVKVMRLDQEAKIVTVALVEQEIEDKSNIEDTKE | 819 |
| | | GR+T+GVK+M+LD +AKIVT LV+ E + I +E | |
| Sbjct: | 781 | GRATLGVKIMKLDADAKIVTFTLVQPEDSSIAEINTDRE | 819 |

[8306] Based on this analysis, it was predicted that these proteins and their epitopes could be useful antigens for vaccines or diagnostics.

### EXAMPLE 1515

[8307] A DNA sequence (GBSx1605) was identified in S. agalactiae <SEQ ID 4659> which encodes the amino acid sequence <SEQ ID 4660>. Analysis of this protein sequence reveals the following:

```
Possible site: 25
>>> Seems to have no N-terminal signal sequence
----- Final Results -----
                              bacterial membrane --- Certainty = 0.0000(Not Clear) < succ>
                                bacterial outside --- Certainty = 0.0000(Not Clear) < succ>
                            bacterial cytoplasm --- Certainty = 0.0000(Not Clear) < succ>
```

[8308] The protein has homology with the following sequences in the GENPEPT database.

| >GP: CAA04010 GB: AJ000336 L-lactate dehydrogenase [Streptococcus | | | |
|---|---|---|---|
| pneumoniae] | | | |
| Identities = 290/329 (88%), Positives = 313/329 (94%), Gaps = 1/329 (0%) | | | |
| Query: | 1 | MTATKQHKKVILVGDGAVGSSYAFALVNQGIAQELGIIEIPALFDKAVGDAEDLSHALAF | 60 |
| | | MT+TKQHKKVILVGDGAVGSSYAFALVNQGIAQELGIIEIP L +KAVGDA DLSHALAF | |
| Sbjct: | 1 | MTSTKQHKKVILVGDGAVGSSYAFALVNQGIAQELGIIEIPQLHEKAVGDALDLSHALAF | 60 |
| Query: | 61 | TSPKKIYAATYADCADADLVVITAGAPQKPGETRLDLVGKNLAINKSIVTQVVESGFNGI | 120 |
| | | TSPKKIYAA Y+DCADADLVVITAGAPQKPGETRLDLVGKNLAINKSIVTQVVESGF GI | |
| Sbjct: | 61 | TSPKKIYAAQYSDCADADLVVITAGAPQKPGETRLDLVGKNLAINKSIVTQVVESGFKGI | 120 |
| Query: | 121 | FLVAANPVDVLTYSTWKFSGFPKERVIGSGTSLDSARFRQALADKIGVDARSVHAYIMGE | 180 |
| | | FLVAANPVDVLTYSTWKFSGFPKERVIGSGTSLDSARFRQALA+K+ VDARSVHAYIMGE | |
| Sbjct: | 121 | FLVAANPVDVLTYSTWKFSGFPKERVIGSGTSLDSARFRQALAEKLDVDARSVHAYIMGE | 180 |
| Query: | 181 | HGDSEFAVWSHANVAGVQLEQWLQENRDIDEQGLVDLFISVRDAAYSIINKKGATYYGIA | 240 |
| | | HGDSEFAVWSHAN+AGV LE++L++ +++ E L++LF VRDAAY+IINKKGATYYGIA | |
| Sbjct: | 181 | HGDSEFAVWSHANIAGVNLEEFLKDTQNVQEAELIELFEGVRDAAYTIINKKGATYYGIA | 240 |
| Query: | 241 | VALARITKAILDDENAVLPLSVYQEGQYGDVKDVFIGQPAIVGAHGIVRPVNIPLNDAEL | 300 |
| | | VALARITKAILDDENAVLPLSV+QEGQYG V++VFIGQPA+VGAHGIVRPVNIPLNDAE | |
| Sbjct: | 241 | VALARITKAILDDENAVLPLSVFQEGQYG-VENVFIGQPAVVGAHGIVRPVNIPLNDAET | 299 |
| Query: | 301 | QKMQASAEQLKDIIDEAWKNPEFQEASKN | 329 |
| | | QKMQASA++L+ IIDEAWKNPEFQEASKN | |
| Sbjct: | 300 | QKMQASAKELQAIIDEAWKNPEFQEASKN | 328 |

[8309] A related DNA sequence was identified in S. pyogenes <SEQ ID 4661> which encodes the amino acid sequence <SEQ ID 4662>. Analysis of this protein sequence reveals the following:

| Possible site: 25 | | | | |
|---|---|---|---|---|
| >>> Seems to have no N-terminal signal sequence | | | | |
| | INTEGRAL | Likelihood = −1.17 | Transmembrane | 106-122 (106-122) |

```
----- Final Results -----
                              bacterial membrane --- Certainty = 0.1468(Affirmative) < succ>
                                bacterial outside --- Certainty = 0.0000(Not Clear) < succ>
                            bacterial cytoplasm --- Certainty = 0.0000(Not Clear) < succ>
```

[8310] The protein has homology with the following sequences in the databases:

| >GP: AAB81558 GB: U60997 L(+)-lactate dehydrogenase [Streptococcus | | | |
|---|---|---|---|
| bovis] | | | |
| Identities = 278/329 (84%), Positives = 297/329 (89%), Gaps = 2/329 (0%) | | | |
| Query: | 1 | MTATKQHKKVILVGDGAVGSSYAFALVTQNIAQELGIIDIFK--EKTQGDAEDLSHALAF | 58 |
| | | MTATKQHKKVILVGDGAVGSSYAFALV Q IAQELGII+I + K GDAEDLSHALAF | |
| Sbjct: | 1 | MTATKQHKKVILVGDGAVGSSYAFALVNQGIAQELGIIEIPQLFNKAVGDAEDLSHALAF | 60 |
| Query: | 59 | TSPKKIYAADYSDCHDADLVVLTAGAPQKPGETRLDLVEKNLRINKEVVTQIVASGFKGI | 118 |
| | | TSPKKIYAA Y DC DADLVV+TAGAPQKPGETRLDLV KNL INK +VT++V SGFKGI | |
| Sbjct: | 61 | TSPKKIYAAKYEDCADADLVVITAGAPQKPGETRLDLVGKNLAINKSIVTEVVKSGFKGI | 120 |
| Query: | 119 | FLVAANPVDVLTYSTWKFSGFPKERVIGSGTSLDSARFRQALAAKIGVDARSVHAYIMGE | 178 |
| | | FLVAANPVDVLTYSTWKFSGFPKERVIGSGTSLDSARFRQALA K+ VDARSVHAYIMGE | |
| Sbjct: | 121 | FLVAANPVDVLTYSTWKFSGFPKERVIGSGTSLDSARFRQALAEKLDVDARSVHAYIMGE | 180 |
| Query: | 179 | HGDSEFAVWSHANVAGVGLYDWLQANRDIDEQGLVDLFISVRDAAYSIINKKGATFYGIA | 238 |
| | | HGDSEFAVWSHANVAGV L +L+ ++++E LV+LF VRDAAYSIINKKGATFYGIA | |
| Sbjct: | 181 | HGDSEFAVWSHANVAGVNLESYLKDVQNVEEAELVELFEGVRDAAYSIINKKGATFYGIA | 240 |
| Query: | 239 | VALARITKAILDDENAVLPLSVFQEGQYEGVEDCYIGQPAIVGAYGIVRPVNIPLNDAEL | 298 |
| | | VALARITKAIL+DENAVLPLSVFQEGQY V DCYIGQPAIVGA+GIVRPVNIPLNDAE | |
| Sbjct: | 241 | VALARITKAILNDENAVLPLSVFQEGQYANVTDCYIGQPAIVGAHGIVRPVNIPLNDAEQ | 300 |
| Query: | 299 | QKMQASANQLKAIIDEAFAKEEFASAAKN | 327 |
| | | QKM+ASA +LKAIIDEAF+KEEFASA KN | |
| Sbjct: | 301 | QKMEASAKELKAIIDEAFSKEEFASACKN | 329 |

[8311] An alignment of the GAS and GBS proteins is shown below.

| Identities = 286/329 (86%), Positives = 299/329 (89%), Gaps = 2/329 (0%) | | | |
|---|---|---|---|
| Query: | 1 | MTATKQHKKVILVGDGAVGSSYAFALVNQGIAQELGIIEIPALFDKAVGDAEDLSHALAF | 60 |
| | | MTATKQHKKVILVGDGAVGSSYAFALV Q IAQELGII+I +K GDAEDLSHALAF | |
| Sbjct: | 1 | MTATKQHKKVILVGDGAVGSSYAFALVTQNIAQELGIIDI--FKEKTQGDAEDLSHALAF | 58 |
| Query: | 61 | TSPKKIYAATYADCADADLVVITAGAPQKPGETRLDLVGKNLAINKSIVTQVVESGFNGI | 120 |
| | | TSPKKIYAA Y+DC DADLVV+TAGAPQKPGETRLDLV KNL INK +VTQ+V SGF GI | |
| Sbjct: | 59 | TSPKKIYAADYSDCHDADLVVLTAGAPQKPGETRLDLVEKNLRINKEVVTQIVASGFKGI | 118 |
| Query: | 121 | FLVAANPVDVLTYSTWKFSGFPKERVIGSGTSLDSARFRQALADKIGVDARSVHAYIMGE | 180 |
| | | FLVAANPVDVLTYSTWKFSGFPKERVIGSGTSLDSARFRQALA KIGVDARSVHAYIMGE | |
| Sbjct: | 119 | FLVAANPVDVLTYSTWKFSGFPKERVIGSGTSLDSARFRQALAAKIGVDARSVHAYIMGE | 178 |
| Query: | 181 | HGDSEFAVWSHANVAGVQLEQWLQENRDIDEQGLVDLFISVRDAAYSIINKKGATYYGIA | 240 |
| | | HGDSEFAVWSHANVAGV L WLQ NRDIDEQGLVDLFISVRDAAYSIINKKGAT+YGIA | |
| Sbjct: | 179 | HGDSEFAVWSHANVAGVGLYDWLQANRDIDEQGLVDLFISVRDAAYSIINKKGATFYGIA | 238 |
| Query: | 241 | VALARITKAILDDENAVLPLSVYQEGQYGDVKDVFIGQPAIVGAHGIVRPVNIPLNDAEL | 300 |
| | | VALARITKAILDDENAVLPLSV+QEGQY V+D +IGQPAIVGA+GIVRPVNIPLNDAEL | |
| Sbjct: | 239 | VALARITKAILDDENAVLPLSVFQEGQYEGVEDCYIGQPAIVGAYGIVRPVNIPLNDAEL | 298 |
| Query: | 301 | QKMQASAEQLKDIIDEAWKNPEFQEASKN | 329 |
| | | QKMQASA QLK IIDEA+ EF A+KN | |
| Sbjct: | 299 | QKMQASANQLKAIIDEAFAKEEFASAAKN | 327 |

[8312] SEQ ID 4660 (GBS312) was expressed in E. coli as a His-fusion product. SDS-PAGE analysis of total cell extract is shown in FIG. 49 (lane 7; MW 40 kDa).

[8313] GBS312-His was purified as shown in FIG. 205, lane 9.

[8314] Based on this analysis, it was predicted that these proteins and their epitopes could be useful antigens for vaccines or diagnostics.

### EXAMPLE 1516

[8315] A DNA sequence (GBSx1606) was identified in S. agalactiae <SEQ ID 4663> which encodes the amino acid sequence <SEQ ID 4664>. This protein is predicted to be NADH oxidase (nox). Analysis of this protein sequence reveals the following:

```
Possible site: 27
>>> Seems to have no N-terminal signal sequence
----- Final Results -----
                            bacterial cytoplasm --- Certainty = 0.1888(Affirmative) < succ>
                              bacterial membrane --- Certainty = 0.0000(Not Clear) < succ>
                                bacterial outside --- Certainty = 0.0000(Not Clear) < succ>
```

[8316] The protein has homology with the following sequences in the GENPEPT database.

| >GP: AAC26485 GB: AF014458 NADH oxidase [Streptococcus pneumoniae] | | | |
|---|---|---|---|
| (ver 2) | | | |
| Identities = 363/458 (79%), Positives = 408/458 (88%), Gaps = 3/458 (0%) | | | |
| Query: | 1 | MSKIVVVGTNHAGTAAIKTMLSNYGEANEIVTFDQNSNISFLGCGMALWIGEQIDGPEGL | 60 |
| | | MSKIVVVG NHAGTA I TML N+G NEIV FDQNSNISFLGCGMALWIGEQIDG EGL | |
| Sbjct: | 1 | MSKIVVVGANHAGTACINTMLDNFGNENEIVVFDQNSNISFLGCGMALWIGEQIDGAEGL | 60 |
| Query: | 61 | FYSDKEQLESMGAKVYMNSPVLNIDYDKKEVTALVDGKEHVESYEKLILATGSQPIIPPI | 120 |
| | | FYSDKE+LE+ GAKVYMNSPVL+IDYD K VTA V+GKEH ESYEKLI ATGS PI+PPI | |
| Sbjct: | 61 | FYSDKEKLEAKGAKVYMNSPVLSIDYDNKVVTAEVEGKEHKESYEKLIFATGSTPILPPI | 120 |
| Query: | 121 | KGVEIQEGSREFKATLENLQFVKLYQNSEEVIEKLAKPG--INRVAVVGAGYIGVELAEA | 178 |
| | | +GVEI +G+REFKATLEN+QFVKLYQN+EEVI KL+ ++R+AVVG GYIGVELAEA | |
| Sbjct: | 121 | EGVEIVKGNREFKATLENVQFVKLYQNAEEVINKLSDKSQHLDRIAVVGGGYIGVELAEA | 180 |
| Query: | 179 | FQRIGKEVTLVDVADTCMGGYYDRDFTDMMSKNLEDHGIRLAFGQAVQAVEGDGKVERLV | 238 |
| | | F+R+GKEV LVD+ DT + GYYD+DFT MM+KNLEDH IRLA GQ V+A+EGDGKVERL+ | |
| Sbjct: | 181 | FERLGKEVVLVDIVDTVLNGYYDKDFTQMMAKNLEDHNIRLALGQTVKAIEGDGKVERLI | 240 |
| Query: | 239 | TDKETFDVDMVILAVGFRPNTELGAGKLDTFRNGAWVVDKKQETSVKDVYAIGDCATIWD | 298 |
| | | TDKE+FDVDMVILAVGFRPNT L GK++ FRNGA++VDKKQETS+ VYA+GDCAT++D | |
| Sbjct: | 241 | TDKESFDVDMVILAVGFRPNTALADGKIELFRNGAFLVDKKQETSIPGVYAVGDCATVYD | 300 |
| Query: | 299 | NSRDDINYIALASNAVRTGIVAAHNACGTELEGAGVQGSNGISIYGLNMVSTGLTLEKAK | 358 |
| | | N+R D +YIALASNAVRTGIV A+NACG ELEG GVQGSNGISIYGL+MVSTGLTLEKAK | |
| Sbjct: | 301 | NARKDTSYIALASNAVRTGIVGAYNACGHELEGIGVQGSNGISIYGLHMVSTGLTLEKAK | 360 |
| Query: | 359 | QAGYNAVETGFNDLQKPEFIKHNNHEVAIKIVYDKDSRVILGCQMVSHE-DVSMGIHMFS | 417 |
| | | AGYNA ETGFNDLQKPEF+KH+NHEVAIKIV+DKDSR ILG QMVSH+ +SMGIHMFS | |
| Sbjct: | 361 | AAGYNATETGFNDLQKPEFMKHDNHEVAIKIVFDKDSREILGAQMVSHDIAISMGIHMFS | 420 |
| Query: | 418 | LAIQEKVTIEKLALTDIFFLPHFNKPYNYITMAALGAK | 455 |
| | | LAIQE VTI+KLALTD+FFLPHFNKPYNYITMAAL A+ | |
| Sbjct: | 421 | LAIQEHVTIDKLALTDLFFLPHFNKPYNYITMAALTAE | 458 |

[8317] A related DNA sequence was identified in S. pyogenes <SEQ ID 4665> which encodes the amino acid sequence <SEQ ID 4666>. Analysis of this protein sequence reveals the following:

```
Possible site: 14
>>> Seems to have no N-terminal signal sequence
----- Final Results -----
                            bacterial cytoplasm --- Certainty = 0.2068(Affirmative) < succ>
                              bacterial membrane --- Certainty = 0.0000(Not Clear) < succ>
                                bacterial outside --- Certainty = 0.0000(Not Clear) < succ>
```

[8318] An alignment of the GAS and GBS proteins is shown below.

| Identities = 362/456 (79%), Positives = 403/456 (87%) | | | |
|---|---|---|---|
| Query: | 1 | MSKIVVVGTNHAGTAAIKTMLSNYGEANEIVTFDQNSNISFLGCGMALWIGEQIDGPEGL | 60 |
| | | MSKIVVVG NHAGTA IKTML+NYG+ANEIV FDQNSNISFLGCGMALWIGEQI GPEGL | |
| Sbjct: | 1 | MSKIVVVGANHAGTACIKTMLTNYGDANEIVVFDQNSNISFLGCGMALWIGEQIAGPEGL | 60 |
| Query: | 61 | FYSDKEQLESMGAKVYMNSPVLNIDYDKKEVTALVDGKEHVESYEKLILATGSQPIIPPI | 120 |
| | | FYSDKE+LES+GAKVYM SPV +IDYD K VTALVDGK HVE+Y+KLI ATGSQPI+PPI | |
| Sbjct: | 61 | FYSDKEELESLGAKVYMESPVQSIDYDAKTVTALVDGKNHVETYDKLIFATGSQPILPPI | 120 |
| Query: | 121 | KGVEIQEGSREFKATLENLQFVKLYQNSEEVIEKLAKPGINRVAVVGAGYIGVELAEAFQ | 180 |
| | | KG EI+EGS EF+ATLENLQFVKLYQNS +VI KL I RVAVVGAGYIGVELAEAFQ | |
| Sbjct: | 121 | KGAEIKEGSLEFEATLENLQFVKLYQNSADVIAKLENKDIKRVAVVGAGYIGVELAEAFQ | 180 |
| Query: | 181 | RIGKEVTLVDVADTCMGGYYDRDFTDMMSKNLEDHGIRLAFGQAVQAVEGDGKVERLVTD | 240 |
| | | R GKEV L+DV DTC+ GYYDRD TD+M+KN+E+HGI+LAFG+ V+ V G+GKVE+++TD | |
| Sbjct: | 181 | RKGKEVVLIDVVDTCLAGYYDRDLTDLMAKNMEEHGIQLAFGETVKEVAGNGKVEKIITD | 240 |
| Query: | 241 | KETFDVDMVILAVGFRPNTELGAGKLDTFRNGAWVVDKKQETSVKDVYAIGDCATIWDNS | 300 |
| | | K +DVDMVILAVGFRPNT LG GK+D FRNGA++V+K+QETS+ VYAIGDCATI+DN+ | |
| Sbjct: | 241 | KNEYDVDMVILAVGFRPNTTLGNGKIDLFRNGAFLVNKRQETSIPGVYAIGDCATIYDNA | 300 |
| Query: | 301 | RDDINYIALASNAVRTGIVAAHNACGTELEGAGVQGSNGISIYGLNMVSTGLTLEKAKQA | 360 |
| | | D NYIALASNAVRTGIVAAHNACGT+LEG GVQGSNGISIYGL+MVSTGLTLEKAK+ | |
| Sbjct: | 301 | TRDTNYIALASNAVRTGIVAAHNACGTDLEGIGVQGSNGISIYGLHMVSTGLTLEKAKRL | 360 |
| Query: | 361 | GYNAVETGFNDLQKPEFIKHNNHEVAIKIVYDKDSRVILGCQMVSHEDVSMGIHMFSLAI | 420 |
| | | G++A T + D QKPEFI+H N V IKIVYDKDSR ILG QM + EDVSMGIHMFSLAI | |
| Sbjct: | 361 | GFDAAVTEYTDNQKPEFIEHGNFPVTIKIVYDKDSRRILGAQMAAREDVSMGIHMFSLAI | 420 |
| Query: | 421 | QEKVTIEKLALTDIFFLPHFNKPYNYITMAALGAKD | 456 |
| | | QE VTIEKLALTDIFFLPHFNKPYNYITMAALGAKD | |
| Sbjct: | 421 | QEGVTIEKLALTDIFFLPHFNKPYNYITMAALGAKD | 456 |

[8319] Based on this analysis, it was predicted that these proteins and their epitopes could be useful antigens for vaccines or diagnostics.

### EXAMPLE 1517

[8320] A DNA sequence (GBSx1607) was identified in S. agalactiae <SEQ ID 4667> which encodes the amino acid sequence <SEQ ID 4668>. Analysis of this protein sequence reveals the following:

```
Possible site: 26
>>> Seems to have no N-terminal signal sequence
----- Final Results -----
                            bacterial cytoplasm --- Certainty = 0.2319(Affirmative) < succ>
                              bacterial membrane --- Certainty = 0.0000(Not Clear) < succ>
                                bacterial outside --- Certainty = 0.0000(Not Clear) < succ>
```

[8321] The protein has no significant homology with any sequences in the GENPEPT database.

[8322] No corresponding DNA sequence was identified in S. pyogenes.

[8323] Based on this analysis, it was predicted that this protein and its epitopes, could be useful antigens for vaccines or diagnostics.

### EXAMPLE 1518

[8324] A DNA sequence (GBSx1608) was identified in S. agalactiae <SEQ ID 4669> which encodes the amino acid sequence <SEQ ID 4670>. Analysis of this protein sequence reveals the following:

| Possible site: 22 | | | | |
|---|---|---|---|---|
| >>> Seems to have a cleavable N-term signal seq. | | | | |
| | INTEGRAL | Likelihood = −7.75 | Transmembrane | 160-176 (157-179) |
| | INTEGRAL | Likelihood = −7.38 | Transmembrane | 73-89 (70-97) |
| | INTEGRAL | Likelihood = −5.47 | Transmembrane | 289-305 (284-312) |
| | INTEGRAL | Likelihood = −4.09 | Transmembrane | 107-123 (106-124) |
| | INTEGRAL | Likelihood = −3.24 | Transmembrane | 43-59 (43-59) |
| | INTEGRAL | Likelihood = −1.91 | Transmembrane | 258-274 (258-275) |
| | INTEGRAL | Likelihood = −1.33 | Transmembrane | 234-250 (233-251) |
| | INTEGRAL | Likelihood = −0.00 | Transmembrane | 209-225 (209-225) |

```
----- Final Results -----
                              bacterial membrane --- Certainty = 0.4100(Affirmative) < succ>
                                bacterial outside --- Certainty = 0.0000(Not Clear) < succ>
                            bacterial cytoplasm --- Certainty = 0.0000(Not Clear) < succ>
```

[8325] A related GBS nucleic acid sequence <SEQ ID 9805> which encodes amino acid sequence <SEQ ID 9806> was also identified.

[8326] The protein has homology with the following sequences in the GENPEPT database.

| >GP: CAB15146 GB: Z99120 similar to hypothetical proteins [Bacillus | | | |
|---|---|---|---|
| subtilis] | | | |
| Identities = 172/318 (54%), Positives = 234/318 (73%) | | | |
| Query: | 5 | LSLTTIFALLFSSMLIYATPLIFTSIGGTFSERGGIVNVGLEGIMVIGAFSGVVFNLEFA | 64 |
| | | + + I +++ + L+YA PLI T++GG FSER G+VN+GLEG+M+IGAF+ V+FNL F | |
| Sbjct: | 1 | MDIVQILSIIVPATLVYAAPLILTALGGVFSERSGVVNIGLEGLMIIGAFTSVLFNLFFG | 60 |
| Query: | 65 | SVFGDATPWISVLVGGLVGLIFSVIHAVATVNFRADHIISGTVLNLMAPSLAVFLIKVLY | 124 |
| | | G A PW+S+L G +FS+IHA A ++FRAD +SG +N++A +F++K++Y | |
| Sbjct: | 61 | QELGAAAPWLSLLAAMAAGALFSLIHAAAAISFRADQTVSGVAINMLALGATLFIVKLIY | 120 |
| Query: | 125 | NKGQTDNIQESFGKFNFPILSDIPFVGDIFFKGTSLVGYIAILFSFLAWFILYKTRFGLR | 184 |
| | | K QTD I E F K P L DIP +G IFF +AI +F++WFIL+KT FGLR | |
| Sbjct: | 121 | GKAQTDKIPEPFYKTKIPGLGDIPVLGKIFFSDVYYTSILAIALAFISWFILFKTPFGLR | 180 |
| Query: | 185 | LRSVGEHPQAADTLGINVYLMRYSGVLISGFLGGIGGAVYAQSISVNFAATTILGPGFIS | 244 |
| | | +RSVGEHP AADT+GINVY MRY GV+ISG GG+GG VYA +I+++F +TI G GFI+ | |
| Sbjct: | 181 | IRSVGEHPMAADTMGINVYKMRYIGVMISGLFGGLGGGVYASTIALDFTHSTISGQGFIA | 240 |
| Query: | 245 | LAAMIFGKWNPIGAMLASLFFGLSQSLAVIGSHLPLLSNIPTVYLQIAPYVLTIIVLAAF | 304 |
| | | LAA++FGKW+PIGA+ A+LFFG +QSL++IGS LPL +IP VY+ +APY+LTI+ L F | |
| Sbjct: | 241 | LAALVFGKWHPIGALGAALFFGFAQSLSIIGSLLPLFKDIPNVYMLMAPYILTILALTGF | 300 |
| Query: | 305 | FGQAVAPKADGINYIKTK | 322 |
| | | G+A APKA+G+ YIK K | |
| Sbjct: | 301 | IGRADAPKANGVPYIKGK | 318 |

[8327] A related DNA sequence was identified in S. pyogenes <SEQ ID 4671> which encodes the amino acid sequence <SEQ ID 4672>. Analysis of this protein sequence reveals the following:

| Possible site: 22 | | | | |
|---|---|---|---|---|
| >>> Seems to have a cleavable N-term signal seq. | | | | |
| | INTEGRAL | Likelihood = −8.92 | Transmembrane | 73-89 (69-97) |
| | INTEGRAL | Likelihood = −5.04 | Transmembrane | 160-176 (158-177) |
| | INTEGRAL | Likelihood = −4.62 | Transmembrane | 289-305 (284-312) |
| | INTEGRAL | Likelihood = −3.98 | Transmembrane | 234-250 (232-251) |
| | INTEGRAL | Likelihood = −2.13 | Transmembrane | 107-123 (106-123) |
| | INTEGRAL | Likelihood = −2.02 | Transmembrane | 43-59 (43-59) |
| | INTEGRAL | Likelihood = −0.53 | Transmembrane | 258-274 (258-274) |

```
----- Final Results -----
                              bacterial membrane --- Certainty = 0.4567(Affirmative) < succ>
                                bacterial outside --- Certainty = 0.0000(Not Clear) < succ>
                            bacterial cytoplasm --- Certainty = 0.0000(Not Clear) < succ>
```

[8328] The protein has homology with the following sequences in the databases:

| >GP: CAB15146 GB: Z99120 similar to hypothetical proteins [Bacillus | | | |
|---|---|---|---|
| subtilis] | | | |
| Identities = 176/318 (55%), Positives = 239/318 (74%) | | | |
| Query: | 5 | MSLVTIFALLMSSMLIYATPLIFTSIGGTFSERSGVVNVGLEGIMVMGAFSGIVFNLEFA | 64 |
| | | M +V I ++++ + L+YA PLI T++GG FSERSGVVN+GLEG+M++GAF+ ++FNL F | |
| Sbjct: | 1 | MDIVQILSIIVPATLVYAAPLILTALGGVFSERSGVVNIGLEGLMIIGAFTSVLFNLFFG | 60 |
| Query: | 65 | ETFGKATPWIAVLVGGIVGLIFSLIHAVATINFRADHIVSGTVLNLLAPSFAVFLVKAMY | 124 |
| | | + G A PW+++L G +FSLIHA A I+FRAD VSG +N+LA +F+VK +Y | |
| Sbjct: | 61 | QELGAAAPWLSLLAAMAAGALFSLIHAAAAISFRADQTVSGVAINMLALGATLFIVKLIY | 120 |
| Query: | 125 | GKGQTDNIQQSFGKFDFPGLSQIPVIGDIFFKNTSLIGYFAIAFSFFAWFLLYKTRFGLR | 184 |
| | | GK QTD I + F K PGL IPV+G IFF + AIA +F +WF+L+KT FGLR | |
| Sbjct: | 121 | GKAQTDKIPEPFYKTKIPGLGDIPVLGKIFFSDVYYTSILAIALAFISWFILFKTPFGLR | 180 |
| Query: | 185 | LRSVGEHPQAADTLGINVYLMKYYGVMISGFLGGIGGAVYAQSISVNFAVTTILGPGFIA | 244 |
| | | +RSVGEHP AADT+GINVY M+Y GVMISG GG+GG VYA +I+++F +TI G GFIA | |
| Sbjct: | 181 | IRSVGEHPMAADTMGINVYKMRYIGVMISGLFGGLGGGVYASTIALDFTHSTISGQGFIA | 240 |
| Query: | 245 | LAAMIFGKWNPVGAMLSSLFFGLSQSLAVIGAQLPLLEKIPTVYLQIAPYMVTIIILAAF | 304 |
| | | LAA++FGKW+P+GA+ ++LFFG +QSL++IG+ LPL + IP VY+ +APY++TI+ L F | |
| Sbjct: | 241 | LAALVFGKWHPIGALGAALFFGFAQSLSIIGSLLPLFKDIPNVYMLMAPYILTILALTGF | 300 |
| Query: | 305 | FGQAVAPKADGINYIKSK | 322 |
| | | G+A APKA+G+ YIK K | |
| Sbjct: | 301 | IGRADAPKANGVPYIKGK | 318 |

[8329] An alignment of the GAS and GBS proteins is shown below.

| Identities = 272/322 (84%), Positives = 301/322 (93%) | | | |
|---|---|---|---|
| Query: | 1 | MVSKLSLTTIFALLFSSMLIYATPLIFTSIGGTFSERGGIVNVGLEGIMVIGAFSGVVFN | 60 |
| | | +V+K+SL TIFALL SSMLIYATPLIFTSIGGTFSER G+VNVGLEGIMV+GAFSG+VFN | |
| Sbjct: | 1 | VVNKMSLVTIFALLMSSMLIYATPLIFTSIGGTFSERSGVVNVGLEGIMVMGAFSGIVFN | 60 |
| Query: | 61 | LEFASVFGDATPWISVLVGGLVGLIFSVIHAVATVNFRADHIISGTVLNLMAPSLAVFLI | 120 |
| | | LEFA FG ATPWI+VLVGG+VGLIFS+IHAVAT+NFRADHI+SGTVLNL+APS AVFL+ | |
| Sbjct: | 61 | LEFAETFGKATPWIAVLVGGIVGLIFSLIHAVATINFRADHIVSGTVLNLLAPSFAVFLV | 120 |
| Query: | 121 | KVLYNKGQTDNIQESFGKFNFPILSDIPFVGDIFFKGTSLVGYIAILFSFLAWFILYKTR | 180 |
| | | K +Y KGQTDNIQ+SFGKF+FP LS IP +GDIFFK TSL+GY AI FSF AWF+LYKTR | |
| Sbjct: | 121 | KAMYGKGQTDNIQQSFGKFDFPGLSQIPVIGDIFFKNTSLIGYFAIAFSFFAWFLLYKTR | 180 |
| Query: | 181 | FGLRLRSVGEHPQAADTLGINVYLMRYSGVLISGFLGGIGGAVYAQSISVNFAATTILGP | 240 |
| | | FGLRLRSVGEHPQAADTLGINVYLM+Y GV+ISGFLGGIGGAVYAQSISVNFA TTILGP | |
| Sbjct: | 181 | FGLRLRSVGEHPQAADTLGINVYLMKYYGVMISGFLGGIGGAVYAQSISVNFAVTTILGP | 240 |
| Query: | 241 | GFISLAAMIFGKWNPIGAMLASLFFGLSQSLAVIGSHLPLLSNIPTVYLQIAPYVLTIIV | 300 |
| | | GFI+LAAMIFGKWNP+GAML+SLFFGLSQSLAVIG+ LPLL IPTVYLQIAPY++TII+ | |
| Sbjct: | 241 | GFIALAAMIFGKWNPVGAMLSSLFFGLSQSLAVIGAQLPLLEKIPTVYLQIAPYMVTIII | 300 |
| Query: | 301 | LAAFFGQAVAPKADGINYIKTK | 322 |
| | | LAAFFGQAVAPKADGINYIK+K | |
| Sbjct: | 301 | LAAFFGQAVAPKADGINYIKSK | 322 |

[8330] A related GBS gene <SEQ ID 8829> and protein <SEQ ID 8830> were also identified. Analysis of this protein sequence reveals the following:

| Lipop: Possible site: −1 Crend: 3 | | | | |
|---|---|---|---|---|
| McG: Discrim Score: 8.61 | | | | |
| GvH: Signal Score (−7.5): −1.53 | | | | |
| Possible site: 22 | | | | |
| >>> Seems to have a cleavable N-term signal seq. | | | | |
| ALOM program count: 8 value: −7.75 threshold: 0.0 | | | | |
| | INTEGRAL | Likelihood = −7.75 | Transmembrane | 160-176 (157-179) |
| | INTEGRAL | Likelihood = −7.38 | Transmembrane | 73-89 (70-97) |
| | INTEGRAL | Likelihood = −5.47 | Transmembrane | 289-305 (284-312) |
| | INTEGRAL | Likelihood = −4.09 | Transmembrane | 107-123 (106-124) |
| | INTEGRAL | Likelihood = −3.24 | Transmembrane | 43-59 (43-59) |
| | INTEGRAL | Likelihood = −1.91 | Transmembrane | 258-274 (258-275) |
| | INTEGRAL | Likelihood = −1.33 | Transmembrane | 234-250 (233-251) |
| | INTEGRAL | Likelihood = −0.00 | Transmembrane | 209-225 (209-225) |
| | PERIPHERAL | Likelihood = 3.34 | 139 | |

```
modified ALOM score: 2.05
*** Reasoning Step: 3
----- Final Results -----
                              bacterial membrane --- Certainty = 0.4100(Affirmative) < succ>
                                bacterial outside --- Certainty = 0.0000(Not Clear) < succ>
                            bacterial cytoplasm --- Certainty = 0.0000(Not Clear) < succ>
```

[8331] The protein has homology with the following sequences in the databases:

[chemical structure]

[8332] Based on this analysis, it was predicted that these proteins and their epitopes could be useful antigens for vaccines or diagnostics.

### EXAMPLE 1519

[8333] A DNA sequence (GBSx1609) was identified in S. agalactiae <SEQ ID 4673> which encodes the amino acid sequence <SEQ ID 4674>. This protein is predicted to be ribose/galactose ABC transporter, permease protein (rbsC-1). Analysis of this protein sequence reveals the following:

| Possible site: 55 | | | | |
|---|---|---|---|---|
| >>> Seems to have an uncleavable N-term signal seq | | | | |
| | INTEGRAL | Likelihood = −14.59 | Transmembrane | 205-221 (200-228) |
| | INTEGRAL | Likelihood = −13.69 | Transmembrane | 21-37 (13-45) |
| | INTEGRAL | Likelihood = −7.27 | Transmembrane | 302-318 (290-321) |
| | INTEGRAL | Likelihood = −7.17 | Transmembrane | 115-131 (111-138) |
| | INTEGRAL | Likelihood = −4.25 | Transmembrane | 251-267 (250-268) |
| | INTEGRAL | Likelihood = −2.97 | Transmembrane | 63-79 (63-80) |
| | INTEGRAL | Likelihood = −2.87 | Transmembrane | 333-349 (328-349) |

```
----- Final Results -----
                              bacterial membrane --- Certainty = 0.6838(Affirmative) < succ>
                                bacterial outside --- Certainty = 0.0000(Not Clear) < succ>
                            bacterial cytoplasm --- Certainty = 0.0000(Not Clear) < succ>
```

[8334] A related GBS nucleic acid sequence <SEQ ID 8831> which encodes amino acid sequence <SEQ ID 8832> was also identified. Analysis of this protein sequence reveals the following:

| Lipop: Possible Site: −1 Crend: 6 | | | | |
|---|---|---|---|---|
| SRCFLG: 0 | | | | |
| McG: Length of UR: 24 | | | | |
| Peak Value of UR: 3.06 | | | | |
| Net Charge of CR: 3 | | | | |
| McG: Discrim Score: 12.53 | | | | |
| GvH: Signal Score (−7.5): −5.31 | | | | |
| Possible site: 46 | | | | |
| >>> Seems to have an uncleavable N-term signal seq | | | | |
| Amino Acid Composition: calculated from 1 | | | | |
| ALOM program count: 7 value: −14.59 threshold: 0.0 | | | | |
| | INTEGRAL | Likelihood = −14.59 | Transmembrane | 196-212 (191-219) |
| | INTEGRAL | Likelihood = −13.69 | Transmembrane | 12-28 (4-36) |
| | INTEGRAL | Likelihood = −7.27 | Transmembrane | 293-309 (281-312) |
| | INTEGRAL | Likelihood = −7.17 | Transmembrane | 106-122 (102-129) |
| | INTEGRAL | Likelihood = −4.25 | Transmembrane | 242-258 (241-259) |
| | INTEGRAL | Likelihood = −2.97 | Transmembrane | 54-70 (54-71) |
| | INTEGRAL | Likelihood = −2.87 | Transmembrane | 324-340 (319-340) |
| | PERIPHERAL | Likelihood = 0.16 | 133 | |

```
modified ALOM score: 3.42
icm1 HYPID: 7 CFP: 0.684
*** Reasoning Step: 3
----- Final Results -----
                              bacterial membrane --- Certainty = 0.6838(Affirmative) < succ>
                                bacterial outside --- Certainty = 0.0000(Not Clear) < succ>
                            bacterial cytoplasm --- Certainty = 0.0000(Not Clear) < succ>
```

[8335] The protein has homology with the following sequences in the GENPEPT database.

| >GP: CAB15145 GB: Z99120 similar to hypothetical | | | |
|---|---|---|---|
| proteins [Bacillus subtilis] | | | |
| Identities = 154/349 (44%), Positives = 220/349 (62%), Gaps = 6/349 (1%) | | | |
| Query: | 10 | MSKKAQKIAVPLISVVLGIILGAIIMLIFGYDPLWGYEGLFQTAFGSIKNIGEIFRAMGP | 69 |
| | | M K+ + VPLI+++LG+ GA+IML+ GY GY L+ FG I +GE R + P | |
| Sbjct: | 1 | MVKRLSHLLVPLIAIILGLAAGALIMLVSGYSVASGYSALWNGIFGEIYYVGETIRQITP | 60 |
| Query: | 70 | LILIALGFSVASRAGFFNIGLPGQALSGWIAAGWFALSHPDMPRPAMILCTIIIGIVAGG | 129 |
| | | IL L + A R G FNIG+ GQ L GW AA W + D P + +I AGG | |
| Sbjct: | 61 | YILSGLAVAFAFRTGLFNIGVEGQLLVGWTAAVWVGTAF-DGPAYIHLPLALITAAAAGG | 119 |
| Query: | 130 | ITGAIPGILRAYLGTSEVIVTIMMNYIVLYSGNAIVQRVFPKSIMRTSDSSVYVSANASY | 189 |
| | | + G IPGIL+A EVIVTIMMNYI L+ N I+ V D + + +AS | |
| Sbjct: | 120 | LWGFIPGILKARFYVHEVIVTIMMNYIALHMTNYIISNVLTDH----QDKTGKIHESASL | 175 |
| Query: | 190 | QTDWLSSLTNNSRINIGIFIAIIAVVLVWFLLNKTTLGFEIRSVGLNPNASEYAGMSAKR | 249 |
| | | ++ +L +T+ SR+++GI +A++A V++WF++NK+T GFE+R+VG N +AS+YAGMS ++ | |
| Sbjct: | 176 | RSPFLEQITDYSRLHLGIIVALLAAVIMWFIINKSTKGFELRAVGFNQHASQYAGMSVRK | 235 |
| Query: | 250 | TIILSMIISGAFAGLGGVVEGLGTFENVFVQPSSLAIGFDGMAVSLLAANSPIGILFAAF | 309 |
| | | I+ SM+ISGAFAGL G +EGLGTFE V+ + +GFDG+AV+LL N+ +G++ AA | |
| Sbjct: | 236 | NIMTSMLISGAFAGLAGAMEGLGTFEYAAVKGAFTGVGFDGIAVALLGGNTAVGVVLAAC | 295 |
| Query: | 310 | LFGVLSVGAPGMNI-AGIPPELIKVVTASIIFFVGVHYIIEYVIKPKKQ | 357 |
| | | L G L +GA M I +G+P E++ +V A II FV Y I +V+ K+ | |
| Sbjct: | 296 | LLGGLKIGALNMPIESGVPSEVVDIVIAIIILFVASSYAIRFVMGKLKK | 344 |

[8336] A related DNA sequence was identified in S. pyogenes <SEQ ID 2149> which encodes the amino acid sequence <SEQ ID 2150>. Analysis of this protein sequence reveals the following:

| Possible site: 39 | | | | |
|---|---|---|---|---|
| >>> Seems to have an uncleavable N-term signal seq | | | | |
| | INTEGRAL | Likelihood = −12.74 | Transmembrane | 205-221 (200-228) |
| | INTEGRAL | Likelihood = −12.42 | Transmembrane | 21-37 (14-45) |
| | INTEGRAL | Likelihood = −7.22 | Transmembrane | 115-131 (111-135) |
| | INTEGRAL | Likelihood = −4.78 | Transmembrane | 251-267 (249-269) |
| | INTEGRAL | Likelihood = −2.50 | Transmembrane | 70-86 (69-86) |
| | INTEGRAL | Likelihood = −2.34 | Transmembrane | 302-318 (300-318) |
| | INTEGRAL | Likelihood = −1.44 | Transmembrane | 148-164 (147-165) |
| | INTEGRAL | Likelihood = −1.33 | Transmembrane | 326-342 (326-342) |

```
----- Final Results -----
                              bacterial membrane --- Certainty = 0.6095(Affirmative) < succ>
                                bacterial outside --- Certainty = 0.0000(Not Clear) < succ>
                            bacterial cytoplasm --- Certainty = 0.0000(Not Clear) < succ>
```

[8337] An alignment of the GAS and GBS proteins is shown below.

| identities = 293/358 (81%), Positives = 333/358 (92%), Gaps = 1/358 (0%) | | | |
|---|---|---|---|
| Query: | 6 | RRREMSKKAQKIAVPLISVVLGIILGAIIMLIFGYDPLWGYEGLFQTAFGSIKNIGEIFR | 65 |
| | | RR+ MSK AQKIAVPLISV+LG +LGAIIM+IFGYDP+WGYEGLFQ AFGS+KNIGEIFR | |
| Sbjct: | 6 | RRKVMSKNAQKIAVPLISVLLGFLLGAIIMVIFGYDPIWGYEGLFQIAFGSVKNIGEIFR | 65 |
| Query: | 66 | AMGPLILIALGFSVASRAGFFNIGLPGQALSGWIAAGWFALSHPDMPRPAMILCTIIIGI | 125 |
| | | +MGPLILIALGF+VASRAGFFN+GL GQAL+GWI+AGWFAL +PDMPRP +IL T +IG+ | |
| Sbjct: | 66 | SMGPLILIALGFTVASRAGFFNVGLSGQALAGWISAGWFALLNPDMPRPLLILMTALIGM | 125 |
| Query: | 126 | VAGGITGAIPGILRAYLGTSEVIVTIMMNYIVLYSGNAIVQRVFPKSIMRTSDSSVYVSA | 185 |
| | | +AGGI GAIPGILRAYLGTSEVIVTIMMNYI+LY GNAIVQR +P+S+ ++ DS++ VS | |
| Sbjct: | 126 | IAGGIAGAIPGILRAYLGTSEVIVTIMMNYIILYVGNAIVQRGYPESVKQSIDSTIQVSD | 185 |
| Query: | 186 | NASYQTDWLSSLTNNSRINIGIFIAIIAVVLVWFLLNKTTLGFEIRSVGLNPNASEYAGM | 245 |
| | | NASYQT WLS+LTNNSRINIGIF AIIA+ L+WFLLNKTTLGFEIRSVGLNP+ASEYAGM | |
| Sbjct: | 186 | NASYQTHWLSALTNNSRINIGIFFAIIAIALIWFLLNKTTLGFEIRSVGLNPHASEYAGM | 245 |
| Query: | 246 | SAKRTIILSMIISGAFAGLGGVVEGLGTFENVFVQPSSLAIGFDGMAVSLLAANSPIGIL | 305 |
| | | S+KRTIILSMIISGA AGLGGVVEGLGTFENVFVQ SSLA+GFDGMAVSLLAANSP+GI | |
| Sbjct: | 246 | SSKRTIILSMIISGALAGLGGVVEGLGTFENVFVQGSSLAVGFDGMAVSLLAANSPLGIF | 305 |
| Query: | 306 | FAAFLFGVLSVGAPGMNIAGIPPELIKVVTASIIFFVGVHYIIE-YVIKPKKQMKGGK | 362 |
| | | F++FLFGVL++GAPGMNIAGIPPEL+KVVTASIIFFVG HY+IE Y+I+PKK +KGGK | |
| Sbjct: | 306 | FSSFLFGVLNIGAPGMNIAGIPPELVKVVTASIIFFVGSHYLIERYIIRPKKLVKGGK | 363 |

[8338] Based on this analysis, it was predicted that these proteins and their epitopes could be useful antigens for vaccines or diagnostics.

### EXAMPLE 1520

[8339] A DNA sequence (GBSx1610) was identified in S. agalactiae <SEQ ID 4675> which encodes the amino acid sequence <SEQ ID 4676>. This protein is predicted to be sugar ABC transporter, ATP-binding protein (mglA). Analysis of this protein sequence reveals the following:

```
Possible site: 57
>>> Seems to have no N-terminal signal sequence
----- Final Results -----
                            bacterial cytoplasm --- Certainty = 0.3851(Affirmative) < succ>
                              bacterial membrane --- Certainty = 0.0000(Not Clear) < succ>
                                bacterial outside --- Certainty = 0.0000(Not Clear) < succ>
```

[8340] A related GBS nucleic acid sequence <SEQ ID 9803> which encodes amino acid sequence <SEQ ID 9804> was also identified.

[8341] The protein has homology with the following sequences in the GENPEPT database.

| >GP: CAB15144 GB: Z99120 similar to ABC transporter (ATP-binding | | | |
|---|---|---|---|
| protein) [Bacillus subtilis] | | | |
| Identities = 311/497 (62%), Positives = 396/497 (79%), Gaps = 1/497 (0%) | | | |
| Query: | 14 | VIEMKEITKKFGDFVANDHINLTVEKGEIHALLGENGAGKSTLMNMLAGLLEPTDGQIFI | 73 |
| | | VIEM I K F VAND+INL V+KGEIHALLGENGAGKSTLMN+L GL +P G+I + | |
| Sbjct: | 4 | VIEMLNIRKAFPGIVANDNINLQVKKGEIHALLGENGAGKSTLMNVLFGLYQPERGEIRV | 63 |
| Query: | 74 | NGQPVTIDSPSKSSQLGIGMVHQHFMLVEAFTVAENIVLGNETTQNGVLDIKTAAKEIKE | 133 |
| | | G+ V I+SP+K++ LGIGMVHQHFMLV+ FTVAENI+LG E + G +D K A +E+++ | |
| Sbjct: | 64 | RGEKVHINSPNKANDLGIGMVHQHFMLVDTFTVAENIILGKEPKKFGRIDRKRAGQEVQD | 123 |
| Query: | 134 | LSEKYGLSVNPNAKISDISVGAQQRVEILKTLYRGADILIFDEPTAVLTPSEIKELMTIM | 193 |
| | | +S++YGL ++P AK +DISVG QQR EILKTLYRGADILIFDEPTAVLTP EIKELM IM | |
| Sbjct: | 124 | ISDRYGLQIHPEAKAADISVGMQQRAEILKTLYRGADILIFDEPTAVLTPHEIKELMQIM | 183 |
| Query: | 194 | KSLVKEGKSIILITHKLDEIRAVADKVTVIRRGKSIETVPVAGASSQQLAEMMVGRSVSF | 253 |
| | | K+LVKEGKSIILITHKL EI + D+VTVIR+GK I+T+ V + +LA +MVGR VSF | |
| Sbjct: | 184 | KNLVKEGKSIILITHKLKEIMEICDRVTVIRKGKGIKTLDVRDTNQDELASLMVGREVSF | 243 |
| Query: | 254 | RTEKKEANPTDIILSVKDLVVEENRGGVLAVKNLSLDVRAGEIVGIAGIDGNGQSELIQA | 313 |
| | | +TEK+ A P +L++ + V++ R G+ V++LSL V+AGEIVGIAG+DGNGQSELI+A | |
| Sbjct: | 244 | KTEKRAAQPGAEVLAIDGITVKDTR-GIETVRDLSLSVKAGEIVGIAGVDGNGQSELIEA | 302 |
| Query: | 314 | ITGLRKVTSGQIVIKGKDVTKFSSRQITELSVGHVPEDRHRDGLVLDMTMAENLALQTYY | 373 |
| | | +TGLRK SG I + GK + + R+ITE +GH+P+DRH+ GLVLD + EN+ LQ+YY | |
| Sbjct: | 303 | VTGLRKTDSGTITLNGKQIQNLTPRKITESGIGHIPQDRHKHGLVLDFPIGENILLQSYY | 362 |
| Query: | 374 | KEPLSHKGILNFAKIKEYARQLMTEFDVRGAGEHVLARGFSGGNQQKAIIAREVDRDPDL | 433 |
| | | K+P S G+L+ ++ + AR L+TE+DVR E+ AR SGGNQQKAII RE+DR+PDL | |
| Sbjct: | 363 | KKPYSALGVLHKGEMYKKARSLITEYDVRTPDEYTHARALSGGNQQKAIIGREIDRNPDL | 422 |
| Query: | 434 | LIVSQPTRGLDVGAIEYIHKRLIEERDKGKAVLVVSFELDEILNLSDRIAVIHDGKIQGI | 493 |
| | | LI +QPTRGLDVGAIE++HK+LIE+RD GKAVL++SFEL+EI+NLSDRIAVI +G+I | |
| Sbjct: | 423 | LIAAQPTRGLDVGAIEFVHKKLIEQRDAGKAVLLLSFELEEIMNLSDRIAVIFEGRIIAS | 482 |
| Query: | 494 | VKPDQTNKQELGILMAG | 510 |
| | | V P +T +QELG+LMAG | |
| Sbjct: | 483 | VNPQETTEQELGLLMAG | 499 |
| Identities = 75/242 (30%), Positives = 128/242 (51%), Gaps = 24/242 (9%) | | | |
| Query: | 280 | GVLAVKNLSLDVRAGEIVGIAGIDGNGQSELIQAITGLRKVTSGQIVIKGKDVTKFSSRQ | 339 |
| | | G++A N++L V+ GEI + G +G G+S L+ + GL + G+I ++G+ V S + | |
| Sbjct: | 16 | GIVANDNINLQVKKGEIHALLGENGAGKSTLMNVLFGLYQPERGEIRVRGEKVHINSPNK | 75 |
| Query: | 340 | ITELSVGHVPEDRHRDGLVLD-MTMAENLALQTYYKEPLSHKGILNFAKI--KEYARQLM | 396 |
| | | +L +G V H+ +++D T+AEN+ L KEP F +I K +++ | |
| Sbjct: | 76 | ANDLGIGMV----HQHFMLVDTFTVAENIILG---KEPKK------FGRIDRKRAGQEVQ | 122 |
| Query: | 397 | TEFDVRGAGEHVLARG--FSGGNQQKAIIAREVDRDPDLLIVSQPTRGL---DVGAIEYI | 451 |
| | | D G H A+ S G QQ+A I + + R D+LI +PT L ++ + I | |
| Sbjct: | 123 | DISDRYGLQIHPEAKAADISVGMQQRAEILKTLYRGADILIFDEPTAVLTPHEIKELMQI | 182 |
| Query: | 452 | HKRLIEERDKGKAVLVVSFELDEILNLSDRIAVIHDGKIQGIVKPDQTNKQELGILMAGG | 511 |
| | | K L++E GK++++++ +L EI+ + DR+ VI GK + TN+ EL LM G | |
| Sbjct: | 183 | MKNLVKE---GKSIILITHKLKEIMEICDRVTVIRKGKGIKTLDVRDTNQDELASLMVGR | 239 |
| Query: | 512 | KI | 513 |
| | | ++ | |
| Sbjct: | 240 | EV | 241 |

[8342] A related DNA sequence was identified in S. pyogenes <SEQ ID 4677> which encodes the amino acid sequence <SEQ ID 4678>. Analysis of this protein sequence reveals the following:

```
Possible site: 60
>>> Seems to have no N-terminal signal sequence
----- Final Results -----
                            bacterial cytoplasm --- Certainty = 0.3558(Affirmative) < succ>
                              bacterial membrane --- Certainty = 0.0000(Not Clear) < succ>
                                bacterial outside --- Certainty = 0.0000(Not Clear) < succ>
```

[8343] An alignment of the GAS and GBS proteins is shown below.

| Identities = 431/511 (84%), Positives = 467/511 (91%), Gaps = 1/511 (0%) | | | |
|---|---|---|---|
| Query: | 10 | MTQNVIEMKEITKKFGDFVANDHINLTVEKGEIHALLGENGAGKSTLMNMLAGLLEPTDG | 69 |
| | | MTQ+VIEM+EITKKFGDFVANDHINL V KGEIHALLGENGAGKSTLMNMLAGLLEPT G | |
| Sbjct: | 7 | MTQHVIEMREITKKFGDFVANDHINLNVRKGEIHALLGENGAGKSTLMNMLAGLLEPTSG | 66 |
| Query: | 70 | QIFINGQPVTIDSPSKSSQLGIGMVHQHFMLVEAFTVAENIVLGNETTQNGVLDIKTAAK | 129 |
| | | +I IN +PV IDSPSKS++LGIGMVHQHFMLVEAFTVAENI+LGNE +NG LD+ A+K | |
| Sbjct: | 67 | EIVINDKPVQIDSPSKSAKLGIGMVHQHFMLVEAFTVAENIILGNEVVKNGCLDLNQASK | 126 |
| Query: | 130 | EIKELSEKYGLSVNPNAKISDISVGAQQRVEILKTLYRGADILIFDEPTAVLTPSEIKEL | 189 |
| | | +IK LSEKYGL++NP+AK+SDISVGAQQRVEILKTLYRGADILIFDEPTAVLTP+EIKEL | |
| Sbjct: | 127 | DIKVLSEKYGLAINPSAKVSDISVGAQQRVEILKTLYRGADILIFDEPTAVLTPAEIKEL | 186 |
| Query: | 190 | MTIMKSLVKEGKSIILITHKLDEIRAVADKVTVIRRGKSIETVPVAGASSQQLAEMMVGR | 249 |
| | | MTIMK+LVKEGKSIILITHKLDEIRAVAD+VTVIRRGKSIETV VAGA+SQ LAEMMVGR | |
| Sbjct: | 187 | MTIMKNLVKEGKSIILITHKLDEIRAVADRVTVIRRGKSIETVDVAGATSQDLAEMMVGR | 246 |
| Query: | 250 | SVSFRTEKKEANPTDIILSVKDLVVEENRGGVLAVKNLSLDVRAGEIVGIAGIDGNGQSE | 309 |
| | | SVSF T KK A P D++LS+K+L V+ENR GV AVK LSLDVRAGEIVGIAGIDGNGQSE | |
| Sbjct: | 247 | SVSFTTSKKAAEPKDVVLSIKNLEVDENR-GVPAVKGLSLDVRAGEIVGIAGIDGNGQSE | 305 |
| Query: | 310 | LIQAITGLRKVTSGQIVIKGKDVTKFSSRQITELSVGHVPEDRHRDGLVLDMTMAENLAL | 369 |
| | | LIQAITGLRKV SG I+IK +VT SSR+ITELSVGHVPEDRHRDGL+LD+++AEN AL | |
| Sbjct: | 306 | LIQAITGLRKVKSGSIMIKNNEVTHLSSRKITELSVGHVPEDRHRDGLILDLSLAENTAL | 365 |
| Query: | 370 | QTYYKEPLSHKGILNFAKIKEYARQLMTEFDVRGAGEHVLARGFSGGNQQKAIIAREVDR | 429 |
| | | QTYYK+PLS GILN+ KI +YARQLM EFDVRGA E V ARGFSGGNQQKAIIAREVDR | |
| Sbjct: | 366 | QTYYKQPLSQNGILNYTKINDYARQLMKEFDVRGANELVPARGFSGGNQQKAIIAREVDR | 425 |
| Query: | 430 | DPDLLIVSQPTRGLDVGAIEYIHKRLIEERDKGKAVLVVSFELDEILNLSDRIAVIHDGK | 489 |
| | | DPDLLIVSQPTRGLDVGAIEYIHKRLI+ERDKGKAVLVVSFELDEILNLSDRIAVIHDGK | |
| Sbjct: | 426 | DPDLLIVSQPTRGLDVGAIEYIHKRLIKERDKGKAVLVVSFELDEILNLSDRIAVIHDGK | 485 |
| Query: | 490 | IQGIVKPDQTNKQELGILMAGGKIEKEERDV | 520 |
| | | IQGIV P+ TNKQELGILMAGG I KEE V | |
| Sbjct: | 486 | IQGIVSPENTNKQELGILMAGGSIHKEEGHV | 516 |

[8344] Based on this analysis, it was predicted that these proteins and their epitopes could be useful antigens for vaccines or diagnostics.

### EXAMPLE 1521

[8345] A DNA sequence (GBSx1612) was identified in S. agalactiae <SEQ ID 4679> which encodes the amino acid sequence <SEQ ID 4680>. Analysis of this protein sequence reveals the following:

```
Possible Site: 22
>>> May be a lipoprotein
----- Final Results -----
                              bacterial membrane --- Certainty = 0.0000(Not Clear) < succ>
                                bacterial outside --- Certainty = 0.0000(Not Clear) < succ>
                            bacterial cytoplasm --- Certainty = 0.0000(Not Clear) < succ>
```

[8346] The protein has homology with the following sequences in the GENPEPT database.

| >GP: CAB15143 GB: Z99120 similar to ABC transporter (lipoprotein) | | | |
|---|---|---|---|
| [Bacillus subtilis] | | | |
| Identities = 164/335 (48%), Positives = 224/335 (65%), Gaps = 10/335 (2%) | | | |
| Query: | 18 | LAACGHRGASKSGGKS-DSLKVAMVTDTGGVDDKSFNQSGWEGMQAWGKKNGLKKGA-GF | 75 |
| | | L ACG+ S G+ + VAMVTD GGVDDKSFNQS WEG+QA+GK+NGLKKG G+ | |
| Sbjct: | 11 | LGACGNSEKSSGSGEGKNKFSVAMVTDVGGVDDKSFNQSAWEGIQAFGKENGLKKGKNGY | 70 |
| Query: | 76 | DYFQSASESDYATNLDTAVSSGYKLIFGIGFSLHDAIDKAADNNKDVNYVIVDDVIKGKD | 135 |
| | | DY QS S++DY TNL+ + LI+G+G+ + D+I + AD K+ N+ I+D V+ KD | |
| Sbjct: | 71 | DYLQSKSDADYTTNLNKLARENFDLIYGVGYLMEDSISEIADQRKNTNFAIIDAVVD-KD | 129 |
| Query: | 136 | NVASVVFADNESAYLAGIAAAKTTKTKTVGFVGGMESEVITRFEKGFEAGVKSVDKSIKI | 195 |
| | | NVAS+ F + E ++L G+AAA ++K+ +GFVGGMESE+I +FE GF AGV++V+ + | |
| Sbjct: | 130 | NVASITFKEQEGSFLVGVAAALSSKSGKIGFVGGMESELIKKFEVGFRAGVQAVNPKAVV | 189 |
| Query: | 196 | KVDYAGSFGDAAKGKTIAAAQYASGADIVYQVAGGTGAGVFSEAKSRNESLKEADKVWVL | 255 |
| | | +V YAG F A GK A + Y SG D++Y AG TG GVF+EAK+ + + D VWV+ | |
| Sbjct: | 190 | EVKYAGGFDKADVGKATAESMYKSGVDVIYHSAGATGTGVFTEAKNLKKEDPKRD-VWVI | 248 |
| Query: | 256 | GVDRDQAAEGKYTSKDGKASNFVLASSIKEVGKSVELIATKTSKGKFPGGNVTTYGLKDG | 315 |
| | | GVD+DQ AEG+ +G N L S +K+V VE + K S GKFPGG TYGL | |
| Sbjct: | 249 | GVDKDQYAEGQV---EGTDDNVTLTSMVKKVDTVVEDVTKKASDGKFPGGETLTYGLDQD | 305 |
| Query: | 316 | GVDIATT--NLSDDAVKAIKEAKAKIISGDIKVPS | 348 |
| | | GV I+ + NLSDD +KA+ + K KII G +++P+ | |
| Sbjct: | 306 | GVGISPSKQNLSDDVIKAVDKWKKKIIDG-LEIPA | 339 |

[8347] A related DNA sequence was identified in S. pyogenes <SEQ ID 861> which encodes the amino acid sequence <SEQ ID 862>. Analysis of this protein sequence reveals the following:

```
Possible site: 19
>>> May be a lipoprotein
----- Final Results -----
                              bacterial membrane --- Certainty = 0.0000(Not Clear) < succ>
                                bacterial outside --- Certainty = 0.0000(Not Clear) < succ>
                            bacterial cytoplasm --- Certainty = 0.0000(Not Clear) < succ>
```

[8348] An alignment of the GAS and GBS proteins is shown below.

| Identities = 275/351 (78%), Positives = 312/351 (88%), Gaps = 3/351 (0%) | | | |
|---|---|---|---|
| Query: | 1 | MNKKIAGIGLASIAVLSLAACGHRGASKSG--GKSDSLKVAMVTDTGGVDDKSFNQSGWE | 58 |
| | | MNKK G+GLAS+AVLSLAACG+RGASK G GK+D LKVAMVTDTGGVDDKSFNQS WE | |
| Sbjct: | 1 | MNKKFIGLGLASVAVLSLAACGNRGASKGGASGKTD-LKVAMVTDTGGVDDKSFNQSAWE | 59 |
| Query: | 59 | GMQAWGKKNGLKKGAGFDYFQSASESDYATNLDTAVSSGYKLIFGIGFSLHDAIDKAADN | 118 |
| | | G+Q+WGK+ GL+KG GFDYFQS SES+YATNLDTAVS GY+LI+GIGF+L DAI KAA + | |
| Sbjct: | 60 | GLQSWGKEMGLQKGTGFDYFQSTSESEYATNLDTAVSGGYQLIYGIGFALKDAIAKAAGD | 119 |
| Query: | 119 | NKDVNYVIVDDVIKGKDNVASVVFADNESAYLAGIAAAKTTKTKTVGFVGGMESEVITRF | 178 |
| | | N+ V +VI+DD+I+GKDNVASV FAD+E+AYLAGIAAAKTTKTKTVGFVGGME VITRF | |
| Sbjct: | 120 | NEGVKFVIIDDIIEGKDNVASVTFADHEAAYLAGIAAAKTTKTKTVGFVGGMEGTVITRF | 179 |
| Query: | 179 | EKGFEAGVKSVDKSIKIKVDYAGSFGDAAKGKTIAAAQYASGADIVYQVAGGTGAGVFSE | 238 |
| | | EKGFEAGVKSVD +I++KVDYAGSFGDAAKGKTIAAAQYA+GAD++YQ AGGTGAGVF+E | |
| Sbjct: | 180 | EKGFEAGVKSVDDTIQVKVDYAGSFGDAAKGKTIAAAQYAAGADVIYQAAGGTGAGVFNE | 239 |
| Query: | 239 | AKSRNESLKEADKVWVLGVDRDQAAEGKYTSKDGKASNFVLASSIKEVGKSVELIATKTS | 298 |
| | | AK+ NE EADKVWV+GVDRDQ EGKYTSKDGK +NFVLASSIKEVGK+V+LI + + | |
| Sbjct: | 240 | AKAINEKRSEADKVWVIGVDRDQKDEGKYTSKDGKEANFVLASSIKEVGKAVQLINKQVA | 299 |
| Query: | 299 | KGKFPGGNVTTYGLKDGGVDIATTNLSDDAVKAIKEAKAKIISGDIKVPSK | 349 |
| | | KFPGG T YGLKDGGV+IATTN+S +AVKAIKEAKAKI SGDIKVP K | |
| Sbjct: | 300 | DKKFPGGKTTVYGLKDGGVEIATTNVSKEAVKAIKEAKAKIKSGDIKVPEK | 350 |

[8349] A related DNA sequence was identified in S. pyogenes <SEQ ID 9061> which encodes amino acid sequence <SEQ ID 9062>. Analysis of this protein sequence reveals the following:

```
Possible site: 17
>>> May be a lipoprotein
----- Final Results -----
                              bacterial membrane --- Certainty = 0.0000(Not Clear) < succ>
                                bacterial outside --- Certainty = 0.0000(Not Clear) < succ>
                            bacterial cytoplasm --- Certainty = 0.0000(Not Clear) < succ>
```

[8350] An alignment of the GAS and GBS sequences follows:

| Score = 414 bits (1052), Expect = e−117 | | | |
|---|---|---|---|
| Identities = 196/347 (56%), Positives = 253/347 (72%), Gaps = 2/347 (0%) | | | |
| Query: | 1 | MNKKVMSLGLVSTALFTLGGCTNNSAKQT--TDNSLKIAMITNQTGIDDKSFNQSAWEGL | 58 |
| | | MNKK+ +GL S A+ +L C + A ++ +SLK+AM+T+ G+DDKSFNQS WEG+ | |
| Sbjct: | 1 | MNKKIAGIGLASIAVLSLAACGHRGASKSGGKSDSLKVAMVTDTGGVDDKSFNQSGWEGM | 60 |
| Query: | 59 | QAWGKENKLEKGKGYDYFQSANESEFTTNLESAVTNGYNLVFGIGFPLHDAVEKVAANNP | 118 |
| | | QAWGK+N L+KG G+DYFQSA+ES++ TNL++AV++GY L+FGIGF LHDA++K A NN | |
| Sbjct: | 61 | QAWGKKNGLKKGAGFDYFQSASESDYATNLDTAVSSGYKLIFGIGFSLHDAIDKAADNNK | 120 |
| Query: | 119 | DNHFAIVDDVIKGQKNVASITFSDHEAAYLAGVXXXXXXXXXQVGFVGGMEGDVVKRFEK | 178 |
| | | D ++ IVDDVIKG+ NVAS+ F+D+E+AYLAG+ VGFVGGME +V+ RFEK | |
| Sbjct: | 121 | DVNYVIVDDVIKGKDNVASVVFADNESAYLAGIAAAKTTKTKTVGFVGGMESEVITRFEK | 180 |
| Query: | 179 | GFEAGVKSVDDTIKVRVAYAGSFXXXXXXXXXXXXXXXEGADVIYHAAGGTGAGVFSEAK | 238 |
| | | GFEAGVKSVD +IK++V YAGSF GAD++Y AGGTGAGVFSEAK | |
| Sbjct: | 181 | GFEAGVKSVDKSIKIKVDYAGSFGDAAKGKTIAAAQYASGADIVYQVAGGTGAGVFSEAK | 240 |
| Query: | 239 | SINEKRKEEDKVWVIGVDRDQSEDGKYTTKDGKSANFVLTSSIKEVGKALVKVAVKTSED | 298 |
| | | S NE KE DKVWV+GVDRDQ+ +GKYT+KDGK++NFVL SSIKEVGK++ +A KTS+ | |
| Sbjct: | 241 | SRNESLKEADKVWVLGVDRDQAAEGKYTSKDGKASNFVLASSIKEVGKSVELIATKTSKG | 300 |
| Query: | 299 | QFPGGQITTFGLKEGGVSLTTDALTQDTXXXXXXXXXXXXXGTITVP | 345 |
| | | +FPGG +TT+GLK+GGV + T L+ D G I VP | |
| Sbjct: | 301 | KFPGGNVTTYGLKDGGVDIATTNLSDDAVKAIKEAKAKIISGDIKVP | 347 |

[8351] SEQ ID 4680 (GBS211) was expressed in E. coli as a His-fusion product. SDS-PAGE analysis of total cell extract is shown in FIG. 49 (lane 6; MW 40 kDa).

[8352] The GBS211-His fusion product was purified (FIG. 205, lane 8) and used to immunise mice. The resulting antiserum was used for Western blot (FIG. 259A) and FACS (FIG. 259B). These tests confirm that the protein is immunoaccessible on GBS bacteria.

[8353] Based on this analysis, it was predicted that these proteins and their epitopes could be useful antigens for vaccines or diagnostics.

### EXAMPLE 1522

[8354] A DNA sequence (GBSx1613) was identified in S. agalactiae <SEQ ID 4681> which encodes the amino acid sequence <SEQ ID 4682>. This protein is predicted to be cytidine deaminase (cdd). Analysis of this protein sequence reveals the following:

```
Possible site: 42
>>> Seems to have no N-terminal signal sequence
----- Final Results -----
                            bacterial cytoplasm --- Certainty = 0.2112(Affirmative) < succ>
                              bacterial membrane --- Certainty = 0.0000(Not Clear) < succ>
                                bacterial outside --- Certainty = 0.0000(Not Clear) < succ>
```

[8355] A related GBS nucleic acid sequence <SEQ ID 9801> which encodes amino acid sequence <SEQ ID 9802> was also identified.

[8356] The protein has homology with the following sequences in the GENPEPT database.

| >GP: CAB51906 GB: AJ237978 cytidine deaminase [Bacillus psychrophilus] | | | |
|---|---|---|---|
| Identities = 66/114 (57%), Positives = 81/114 (70%) | | | |
| Query: | 26 | KASENAYVPYSKFPVGAALRTAEGKIFTGCNVENISYGLANCAERTAIFKAVSEGYKDFS | 85 |
| | | KA E AYVPYSKFPVGAAL +G I+ GCN+EN +Y + NCAERTA FKAVS+G + F | |
| Sbjct: | 12 | KAREQAYVPYSKFPVGAALLAEDGTIYHGCNIENSAYSMTNCAERTAFFKAVSDGVRSFK | 71 |
| Query: | 86 | EIAIYGNTEEPISPCGACRQVMVEFFNKNAKVTLIAKNGKTVETTVGELLPYSF | 139 |
| | | +A+ +TE P+SPCGACRQV+ EF N + V L G ETTV +LLP +F | |
| Sbjct: | 72 | ALAVVADTEGPVSPCGACRQVIAEFCNGSMPVYLTNLKGDIEETTVAKLLPGAF | 125 |

[8357] A related DNA sequence was identified in S. pyogenes <SEQ ID 4683> which encodes the amino acid sequence <SEQ ID 4684>. Analysis of this protein sequence reveals the following:

```
Possible site: 13
>>> Seems to have no N-terminal signal sequence
----- Final Results -----
                            bacterial cytoplasm --- Certainty = 0.0041(Affirmative) < succ>
                              bacterial membrane --- Certainty = 0.0000(Not Clear) < succ>
                                bacterial outside --- Certainty = 0.0000(Not Clear) < succ>
```

[8358] The protein has homology with the following sequences in the databases:

| >GP: CAB15143 GB: Z99120 similar to ABC transporter (lipoprotein) | | | |
|---|---|---|---|
| [Bacillus subtilis] | | | |
| Identities = 152/339 (44%), Positives = 223/339 (64%), | | | |
| Gaps = 11/339 (3%) | | | |
| Query: | 8 | LGLVSTALFTLGGCTNN---SAKQTTDNSLKIAMITNQTGIDDKSFNQSAWEGLQAWGKE | 64 |
| | | + LV A LG C N+ S N +AM+T+ G+DDKSFNQSAWEG+QA+GKE | |
| Sbjct: | 1 | MSLVIAAGTILGACGNSEKSSGSGEGKNKFSVAMVTDVGGVDDKSFNQSAWEGIQAFGKE | 60 |
| Query: | 65 | NKLEKGK-GYDYFQSANESEFTTNLESAVTNGYNLVFGIGFPLHDAVEKVAANNPDNHFA | 123 |
| | | N L+KGK GYDY QS +++++TTNL ++L++G+G+ + D++ ++A + +FA | |
| Sbjct: | 61 | NGLKKGKNGYDYLQSKSDADYTTNLNKLARENFDLIYGVGYLMEDSISEIADQRKNTNFA | 120 |
| Query: | 124 | IVDDVIKGQKNVASITFSDHEAAYLAGVAAAKTTKTKQVGFVGGMEGDVVKRFEKGFEAG | 183 |
| | | I+D V+ + NVASITF + E ++L GVAAA ++K+ ++GFVGGME +++K+FE GF AG | |
| Sbjct: | 121 | IIDAVVD-KDNVASITFKEQEGSFLVGVAAALSSKSGKIGFVGGMESELIKKFEVGFRAG | 179 |
| Query: | 184 | VKSVDDTIKVRVAYAGSFADAAKGKTIAAAQYAEGADVIYHAAGGTGAGVFSEAKSINEK | 243 |
| | | V++V+ V V YAG F A GK A + Y G DVIYH+AG TG GVF+EAK++ ++ | |
| Sbjct: | 180 | VQAVNPKAVVEVKYAGGFDKADVGKATAESMYKSGVDVIYHSAGATGTGVFTEAKNLKKE | 239 |
| Query: | 244 | RKEEDKVWVIGVDRDQSEDGKYTTKDGKSANFVLTSSIKEVGKALVKVAVKTSEDQFPGG | 303 |
| | | + D VWVIGVD+DQ +G+ +G N LTS +K+V + V K S+ +FPGG | |
| Sbjct: | 240 | DPKRD-VWVIGVDKDQYAEGQV---EGTDDNVTLTSMVKKVDTVVEDVTKKASDGKFPGG | 295 |
| Query: | 304 | QITTFGLKEGGVSLTTDA--LTQDTKKAIEAAKKAIIEG | 340 |
| | | + T+GL + GV ++ L+ D KA++ KK II+G | |
| Sbjct: | 296 | ETLTYGLDQDGVGISPSKQNLSDDVIKAVDKWKKKIIDG | 334 |

[8359] An alignment of the GAS and GBS proteins is shown below.

| Identities = 88/128 (68%), Positives = 107/128 (82%) | | | |
|---|---|---|---|
| Query: | 15 | MGNIELKKLAVKASENAYVPYSKFPVGAALRTAEGKIFTGCNVENISYGLANCAERTAIF | 74 |
| | | MG +L AV+ASE AYVPYS FPVGAAL+T +G I+TGCN+EN+S+GL NC ERTAIF | |
| Sbjct: | 1 | MGTTDLVSCAVQASEYAYVPYSHFPVGAALKTKDGTIYTGCNIENVSFGLTNCGERTAIF | 60 |
| Query: | 75 | KAVSEGYKDFSEIAIYGNTEEPISPCGACRQVMVEFFNKNAKVTLIAKNGKTVETTVGEL | 134 |
| | | KA+S+G+K+ EIAIYG T +P+SPCGACRQVM EFF+ ++ VTLIARNG+TVE TVG+L | |
| Sbjct: | 61 | KAISDGHKELVEIAIYGETMQPVSPCGACRQVMAEFFDPSSLVTLIAKNGQTVEMTVGDL | 120 |
| Query: | 135 | LPYSFVDL | 142 |
| | | L YSF DL | |
| Sbjct: | 121 | LLYSFTDL | 128 |

[8360] Based on this analysis, it was predicted that these proteins and their epitopes could be useful antigens for vaccines or diagnostics.

### EXAMPLE 1523

[8361] A DNA sequence (GBSx1614) was identified in S. agalactiae <SEQ ID 4685> which encodes the amino acid sequence <SEQ ID 4686>. Analysis of this protein sequence reveals the following:

```
Possible site: 34
>>> Seems to have no N-terminal signal sequence
----- Final Results -----
                            bacterial cytoplasm --- Certainty = 0.2979(Affirmative) < succ>
                              bacterial membrane --- Certainty = 0.0000(Not Clear) < succ>
                                bacterial outside --- Certainty = 0.0000(Not Clear) < succ>
```

[8362] A related GBS nucleic acid sequence <SEQ ID 9799> which encodes amino acid sequence <SEQ ID 9800> was also identified.

[8363] The protein has homology with the following sequences in the GENPEPT database.

| >GP: CAB11882 GB: Z99104 alternate gene name: ybaA~similar to | | | |
|---|---|---|---|
| hypothetical proteins [Bacillus subtilis] | | | |
| Identities = 90/201 (44%), Positives = 144/201 (70%), Gaps = 5/201 (2%) | | | |
| Query: | 1 | MANMYYTENPNVEHDIHELNVKLLGESFSFLTDAGVFSKRMIDYGSQVLLNSLHF-EKNK | 59 |
| | | M+ YY+E P+V+ + + +L + F+F +D+GVFSK+ +D+GS++L++S E | |
| Sbjct: | 1 | MSEHYYSEKPSVKSNKQTWSFRLRNKDFTFTSDSGVFSKKEVDFGSRLLIDSFEEPEVEG | 60 |
| Query: | 60 | SLLDLGCGYGPLGISLAK-VQGVKATMVDINTRALELAKKNATRNGVV-VEVFQSNIYEN | 117 |
| | | +LD+GCGYGP+G+SLA + M+D+N RA+EL+ +NA +NG+ V+++QS+++ N | |
| Sbjct: | 61 | GILDVGCGYGPIGLSLASDFKDRTIHMIDVNERAVELSNENAEQNGITNVKIYQSDLFSN | 120 |
| Query: | 118 | I--SKTFDYIISNPPIRAGKQVVHSIIEESICYLNTGGSLTIVIQKKQGAPSAKAKMLDT | 175 |
| | | + ++TF I++NPPIRAGK+VVH+I E+S +L G L IVIQKKQGAPSA K+ + | |
| Sbjct: | 121 | VDSAQTFASILTNPPIRAGKKVVHAIFEKSAEHLKASGELWIVIQKKQGAPSAIEKLEEL | 180 |
| Query: | 176 | FGNCDILKKDKGYYILRSEKV | 196 |
| | | F +++K KGYYI++++KV | |
| Sbjct: | 181 | FDEVSVVQKKKGYYIIKAKKV | 201 |

[8364] A related DNA sequence was identified in S. pyogenes <SEQ ID 4687> which encodes the amino acid sequence <SEQ ID 4688>. Analysis of this protein sequence reveals the following:

```
Possible site: 49
>>> Seems to have no N-terminal signal sequence
----- Final Results -----
                            bacterial cytoplasm --- Certainty = 0.4232(Affirmative) < succ>
                              bacterial membrane --- Certainty = 0.0000(Not Clear) < succ>
                                bacterial outside --- Certainty = 0.0000(Not Clear) < succ>
```

[8365] An alignment of the GAS and GBS proteins is shown below.

| Identities = 139/195 (71%), Positives = 165/195 (84%) | | | |
|---|---|---|---|
| Query: | 1 | MANMYYTENPNVEHDIHELNVKLLGESFSFLTDAGVFSKRMIDYGSQVLLNSLHFEKNKS | 60 |
| | | M MYY ENP+ HDIHE+ V+LL F+FLTD+GVFSK+M+D+GSQVLL +L+F++N+ | |
| Sbjct: | 12 | MTKMYYDENPDSLHDIHEVKVELLNHPFTFLTDSGVFSKKMVDFGSQVLLKTLNFKENER | 71 |
| Query: | 61 | LLDLGCGYGPLGISLAKVQGVKATMVDINTRALELAKKNATRNGVVVEVFQSNIYENISK | 120 |
| | | +LDLGCGYGPLGISLAKVQ V AT+VDIN RAL+LA+KNAT N V V +FQSNIYENIS | |
| Sbjct: | 72 | VLDLGCGYGPLGISLAKVQRVDATLVDINNRALDLARKNATNNQVAVTIFQSNIYENISG | 131 |
| Query: | 121 | TFDYIISNPPIRAGKQVVHSIIEESICYLNTGGSLTIVIQKKQGAPSAKAKMLDTFGNCD | 180 |
| | | F++IISNPPIRAGK+VVHSIIE+SI +L G LTIVIQKKQGAPSAKAKM FGN + | |
| Sbjct: | 132 | HFEHIISNPPIRAGKRVVHSIIEKSIDFLVVNGDLTIVIQKKQGAPSAKAKMATIFGNVE | 191 |
| Query: | 181 | ILKKDKGYYILRSEK | 195 |
| | | IL+KDKGYY+LRS K | |
| Sbjct: | 192 | ILRKDKGYYVLRSIK | 206 |

[8366] Based on this analysis, it was predicted that these proteins and their epitopes could be useful antigens for vaccines or diagnostics.

### EXAMPLE 1524

[8367] A DNA sequence (GBSx1615) was identified in S. agalactiae <SEQ ID 4689> which encodes the amino acid sequence <SEQ ID 4690>. This protein is predicted to be pantothenate kinase (coaA). Analysis of this protein sequence reveals the following:

```
Possible site: 28
>>> Seems to have no N-terminal signal sequence
----- Final Results -----
                            bacterial cytoplasm --- Certainty = 0.5021(Affirmative) < succ>
                              bacterial membrane --- Certainty = 0.0000(Not Clear) < succ>
                                bacterial outside --- Certainty = 0.0000(Not Clear) < succ>
```

[8368] The protein has homology with the following sequences in the GENPEPT database.

| >GP: BAB06594 GB: AP001516 pantothenate kinase [Bacillus halodurans] | | | |
|---|---|---|---|
| Identities = 140/307 (45%), Positives = 203/307 (65%), Gaps = 5/307 (1%) | | | |
| Query: | 4 | EFINFDRISRENWKDLHQQSQALLTEKELESIKSLNDNINIQDVIDIYLPLINLIQIYKR | 63 |
| | | +F + +SR WK L + S + E+ELE + LN+ I + +V DIY+PL L+ ++ | |
| Sbjct: | 8 | DFFPYTVLSRSQWKSLRKASSLPINEQELEQLVGLNEPITLNEVADIYVPLAELLHVHAT | 67 |
| Query: | 64 | SQENLSFSKAIFLKKENYQRPFIIGISGSVAVGKSTTSRLLQLLISRTFKDSHVELVTTD | 123 |
| | | + + L K F + PFIIG++GSVAVGKSTT+RLLQ L+ + HV+LVTTD | |
| Sbjct: | 68 | AYQRLQQQKRGFFHHGKNRSPFIIGLAGSVAVGKSTTARLLQKLLKAWPEHHHVDLVTTD | 127 |
| Query: | 124 | GFLYPNEKLIQNGILNRKGFPESYDMESLLNFLDTIKNGIT-AKIPIYSHEIYDIVPNQL | 182 |
| | | GFLYPNE L G++++KGFPESYD+ +L+ FL +K G K P+YSH Y+IV | |
| Sbjct: | 128 | GFLYPNETLEARGLMDKKGFPESYDLPALIRFLSDVKAGEPYVKAPVYSHLTYNIVEGDY | 187 |
| Query: | 183 | QTIETPDFLILEGINVFQ-NQQNHRL---YMNDYFDFSIYIDAENKQIEEWYLQRFNSLL | 238 |
| | | Q + PD +I+EGINV Q N++NH + +++D+FDFSIY+DA+ +QI +WY++RF L | |
| Sbjct: | 188 | QVVHEPDIVIVEGINVLQVNKRNHHIPNVFVSDFFDFSIYVDAKEEQILQWYIERFKLLQ | 247 |
| Query: | 239 | QLAEADPSNYYHKFTQIPPHKAMELAKDIWKTINLVNLEKYIEPTRNRADFIIHKGKHHK | 298 |
| | | A DP++Y+H+F + +A + A IWK IN VNL + I PT++RAD ++ KG HH | |
| Sbjct: | 248 | NTAFQDPNSYFHRFRHLSEVEAEQFATSIWKNINGVNLHENILPTKHRADLVLQKGPHHF | 307 |
| Query: | 299 | IDEIYLK | 305 |
| | | IDE+ L+ | |
| Sbjct: | 308 | IDEVKLR | 314 |

[8369] A related DNA sequence was identified in S. pyogenes <SEQ ID 4691> which encodes the amino acid sequence <SEQ ID 4692>. Analysis of this protein sequence reveals the following:

```
Possible site: 28
>>> Seems to have no N-terminal signal sequence
----- Final Results -----
                            bacterial cytoplasm --- Certainty = 0.4790(Affirmative) < succ>
                              bacterial membrane --- Certainty = 0.0000(Not Clear) < succ>
                                bacterial outside --- Certainty = 0.0000(Not Clear) < succ>
```

[8370] An alignment of the GAS and GBS proteins is shown below.

| Identities = 219/306 (71%), Positives = 269/306 (87%) | | | |
|---|---|---|---|
| Query: | 1 | MNNEFINFDRISRENWKDLHQQSQALLTEKELESIKSLNDNINIQDVIDIYLPLINLIQI | 60 |
| | | M+NEFINF++ISRE+WK LHQ+++ALLT++EL+SI SLNDNI+I DVIDIYLPLINLIQ+ | |
| Sbjct: | 1 | MSNEFINFEKISRESWKTLHQKAKALLTQEELKSITSLNDNISINDVIDIYLPLINLIQV | 60 |
| Query: | 61 | YKRSQENLSFSKAIFLKKENYQRPFIIGISGSVAVGKSTTSRLLQLLISRTFKDSHVELV | 120 |
| | | YK +QENLSFSK++FLKK+ RPFIIGISGSVAVGKSTTSRLLQLL+SRT +S VELV | |
| Sbjct: | 61 | YKIAQENLSFSKSLFLKKDIQLRPFIIGISGSVAVGKSTTSRLLQLLLSRTHPNSQVELV | 120 |
| Query: | 121 | TTDGFLYPNEKLIQNGILNRKGFPESYDMESLLNFLDTIKNGITAKIPIYSHEIYDIVPN | 180 |
| | | TTDGFLYPN+ LI+ G+LNRKGFPESY+ME LL+FLD+IKNG TA P+YSH+IYDI+PN | |
| Sbjct: | 121 | TTDGFLYPNQFLIEQGLLNRKGFPESYNMELLLDFLDSIKNGQTAFAPVYSHDIYDIIPN | 180 |
| Query: | 181 | QLQTIETPDFLILEGINVFQNQQNHRLYMNDYFDFSIYIDAENKQIEEWYLQRFNSLLQL | 240 |
| | | Q Q+ PDFLI+EGINVFQNQQN+RLYM+DYFDFSIYIDA++ IE WY++RF S+L+L | |
| Sbjct: | 181 | QKQSFNNPDFLIVEGINVFQNQQNNRLYMSDYFDFSIYIDADSSHIETWYIERFLSILKL | 240 |
| Query: | 241 | AEADPSNYYHKFTQIPPHKAMELAKDIWKTINLVNLEKYIEPTRNRADFIIHKGKHHKID | 300 |
| | | A+ DP NYY ++ Q+P +A+ A+++WKT+NL NLEK+IEPTRNRA+ I+HK HKID | |
| Sbjct: | 241 | AKRDPHNYYAQYAQLPRSEAIAFARNVWKTVNLENLEKFIEPTRNRAELILHKSADHKID | 300 |
| Query: | 301 | EIYLKK | 306 |
| | | EIYLKK | |
| Sbjct: | 301 | EIYLKK | 306 |

[8371] Based on this analysis, it was predicted that these proteins and their epitopes could be useful antigens for vaccines or diagnostics.

### EXAMPLE 1525

[8372] A DNA sequence (GBSx1616) was identified in S. agalactiae <SEQ ID 4693> which encodes the amino acid sequence <SEQ ID 4694>. Analysis of this protein sequence reveals the following:

```
Possible site: 59
>>> Seems to have no N-terminal signal sequence
----- Final Results -----
                            bacterial cytoplasm --- Certainty = 0.3866(Affirmative) < succ>
                              bacterial membrane --- Certainty = 0.0000(Not Clear) < succ>
                                bacterial outside --- Certainty = 0.0000(Not Clear) < succ>
```

[8373] The protein has homology with the following sequences in the GENPEPT database.

| >GP: BAB05058 GB: AP001511 ribosomal protein S20 (BS20) | | | |
|---|---|---|---|
| [Bacillus halodurans] | | | |
| Identities = 47/86 (54%), Positives = 59/86 (67%), Gaps = 7/86 (8%) | | | |
| Query: | 3 | VKTLANIKSAIKRAELNVKQNEKNSAQKSAMRTAIKAFEA---NPSEELYRA----ASSS | 55 |
| | | +K ANIKSAIKR + N K+ +N++ KSA+RTAIK FEA N E +A A+ | |
| Sbjct: | 1 | MKGNANIKSAIKRVKTNEKRRIQNASVKSALRTAIKQFEAKVENNDAEAAKAAFVEATKK | 60 |
| Query: | 56 | IDKAASKGLIHTNKASRDKARLATKL | 81 |
| | | +DKAA+KGLIH N ASR K+RLA KL | |
| Sbjct: | 61 | LDKAANKGLIHKNAASRQKSRLAKKL | 86 |

[8374] A related DNA sequence was identified in S. pyogenes <SEQ ID 4695> which encodes the amino acid sequence <SEQ ID 4696>. Analysis of this protein sequence reveals the following:

```
Possible site: 59
>>> Seems to have no N-terminal signal sequence
----- Final Results -----
                            bacterial cytoplasm --- Certainty = 0.3872(Affirmative) < succ>
                              bacterial membrane --- Certainty = 0.0000(Not Clear) < succ>
                                bacterial outside --- Certainty = 0.0000(Not Clear) < succ>
```

[8375] An alignment of the GAS and GBS proteins is shown below.

| Identities = 76/82 (92%), Positives = 78/82 (94%) | | | |
|---|---|---|---|
| Query: | 1 | MEVKTLANIKSAIKRAELNVKQNEKNSAQKSAMRTAIKAFEANPSEELYRAASSSIDKAA | 60 |
| | | +EVKTLANIKSAIKRAELNVK NEKNSAQKSAMRTAIKAFEANPSEEL+RAASSSIDKA | |
| Sbjct: | 1 | LEVKTLANIKSAIKRAELNVKANEKNSAQKSAMRTAIKAFEANPSEELFRAASSSIDKAE | 60 |
| Query: | 61 | SKGLIHTNKASRDKARLATKLG | 82 |
| | | SKGLIH NKASRDKARLA KLG | |
| Sbjct: | 61 | SKGLIHKNKASRDKARLAAKLG | 82 |

[8376] Based on this analysis, it was predicted that these proteins and their epitopes could be useful antigens for vaccines or diagnostics.

### EXAMPLE 1526

[8377] A DNA sequence (GBSx1617) was identified in S. agalactiae <SEQ ID 4697> which encodes the amino acid sequence <SEQ ID 4698>. Analysis of this protein sequence reveals the following:

| Possible Site: 48 | | | | |
|---|---|---|---|---|
| >>> Seems to have no N-terminal signal sequence | | | | |
| | INTEGRAL | Likelihood = −10.99 | Transmembrane | 31-47 (25-51) |

```
----- Final Results -----
                              bacterial membrane --- Certainty = 0.5394(Affirmative) < succ>
                                bacterial outside --- Certainty = 0.0000(Not Clear) < succ>
                            bacterial cytoplasm --- Certainty = 0.0000(Not Clear) < succ>
```

[8378] The protein has homology with the following sequences in the GENPEPT database.

| >GP: AAC35851 GB: AF086736 amino acid-binding protein Abp | | | |
|---|---|---|---|
| [Streptococcus uberis] | | | |
| Identities = 169/269 (62%), Positives = 203/269 (74%), Gaps = 2/269 (0%) | | | |
| Query: | 29 | KNILLTIIFGLFMIILSACGMSNKEMAGIDNWEHYQKEKKITIGFDNTFVPMGFESRSGD | 88 |
| | | K ILLT + + L ACG S+ A D W+ Y+KEK IT+GFDNTFVPMGF+ SG | |
| Sbjct: | 4 | KKILLTTLALASTLFLVACGKSSA--AKTDQWDTYKKEKSITLGFDNTFVPMGFKDESGK | 61 |
| Query: | 89 | YTGFDIDLANAVFKEYGISVKWQPINWDMKETELNNGNIDLIWNGYSKTAERAKKVAFTN | 148 |
| | | TGFD++LA AVF+EYGI VK+QPINWD+KETEL NG ID+IWNGYS T ER KVAF+ | |
| Sbjct: | 62 | NTGFDVELAKAVFQEYGIKVKFQPINWDLKETELKNGKIDMIWNGYSVTKERQAKVAFST | 121 |
| Query: | 149 | PYMNNHQVIVTKTSSHINSIKDMKGKKLGAQSGSSGFDAFNAKPDILKKFVKGKEAVQYD | 208 |
| | | PYM N QV+VTK SS+I S MKGK LGAQSGSSG+DAF + P +LK VK +A QY+ | |
| Sbjct: | 122 | PYMKNEQVLVTKKSSNITSFAAMKGKVLGAQSGSSGYDAFTSNPKVLKDIVKDNDATQYE | 181 |
| Query: | 209 | TFTQALIDLKNNRIDGLLIDEVYANYYLKQEGNIKAYYFVKTAYQGENFVVGARKVDRRL | 268 |
| | | TF QA IDLKN+RIDGLLID+VYANYYLKQEG + Y VK+ + GE+F VG RK D+ L | |
| Sbjct: | 182 | TFIQAFIDLKNDRIDGLLIDKVYANYYLKQEGELTNYNIVKSEFDGEDFAVGVRKEDKIL | 241 |
| Query: | 269 | IEKINKAFKQLHNKGRFQKISYKWFGEDV | 297 |
| | | ++ IN AF +L+ G+FQ+IS KWFGEDV | |
| Sbjct: | 242 | LKNINSAFTKLYKTGKFQEISQKWFGEDV | 270 |

[8379] A related DNA sequence was identified in S. pyogenes <SEQ ID 4699> which encodes the amino acid sequence <SEQ ID 4700>. Analysis of this protein sequence reveals the following:

```
Possible site: 21
>>> May be a lipoprotein
----- Final Results -----
                              bacterial membrane --- Certainty = 0.0000(Not Clear) < succ>
                                bacterial outside --- Certainty = 0.0000(Not Clear) < succ>
                            bacterial cytoplasm --- Certainty = 0.0000(Not Clear) < succ>
```

[8380] The protein has homology with the following sequences in the databases:

| >GP: AAC35851 GB: AF086736 amino acid-binding protein Abp | | | |
|---|---|---|---|
| [Streptococcus uberis] | | | |
| Identities = 176/277 (63%), Positives = 220/277 (78%), Gaps = 1/277 (0%) | | | |
| Query: | 1 | MIIKKRTVAILAIASSFFLVACQATKSLKSGDAWGVYQKQKSITVGFDNTFVPMGYKDES | 60 |
| | | M +KK + LA+AS+ FLVAC + + K+ D W Y+K+KSIT+GFDNTFVPMG+KDES | |
| Sbjct: | 1 | MNLKKILLTTLALASTLFLVACGKSSAAKT-DQWDTYKKEKSITLGFDNTFVPMGFKDES | 59 |
| Query: | 61 | GRCKGFDIDLAKEVFHQYGLKVNFQAINWDMKEAELNNGKIDVIWNGYSITKERQDKVAF | 120 |
| | | G+ GFD++LAK VF +YG+KV FQ INWD+KE EL NGKID+IWNGYS+TKERQ KVAF | |
| Sbjct: | 60 | GKNTGFDVELAKAVFQEYGIKVKFQPINWDLKETELKNGKIDMIWNGYSVTRERQAKVAF | 119 |
| Query: | 121 | TDSYMRNEQIIVVKKRSDIKTISDMKHKVLGAQSASSGYDSLLRTPKLLKDFIKNKDANQ | 180 |
| | | + YM+NEQ++V KK S+I + + MK KVLGAQS SSGYD+ PK+LKD +K+ DA Q | |
| Sbjct: | 120 | STPYMKNEQVLVTKKSSNITSFAAMKGKVLGAQSGSSGYDAFTSNPKVLKDIVKDNDATQ | 179 |
| Query: | 181 | YETFTQAFIDLKSDRIDGILIDKVYANYYLAKEGQLENYRMIPTTFENEAFSVGLRKEDK | 240 |
| | | YETF QAFIDLK+DRIDG+LIDKVYANYYL +EG+L NY ++ + F+ E F+VG+RKEDK | |
| Sbjct: | 180 | YETFIQAFIDLKNDRIDGLLIDKVYANYYLKQEGELTNYNIVKSEFDGEDFAVGVRKEDK | 239 |
| Query: | 241 | TLQAKINRAFRVLYQNGKFQAISEKWFGDDVATANIK | 277 |
| | | L IN AF LY+ GKFQ IS+KWFG+DVAT N+K | |
| Sbjct: | 240 | ILLKNINSAFTKLYKTGKFQEISQKWFGEDVATENVK | 276 |

[8381] An alignment of the GAS and GBS proteins is shown below.

| Identities = 151/266 (56%), Positives = 189/266 (70%), Gaps = 4/266 (1%) | | | |
|---|---|---|---|
| Query: | 32 | LLTIIFGLFMIILSACGMSNKEMAGIDNWEHYQKEKKITIGFDNTFVPMGFESRSGDYTG | 91 |
| | | +L I F++ AC + K + D W YQK+K IT+GFDNTFVPMG++ SG G | |
| Sbjct: | 10 | ILAIASSFFLV---AC-QATKSLKSGDAWGVYQKQKSITVGFDNTFVPMGYKDESGRCKG | 65 |
| Query: | 92 | FDIDLANAVFKEYGISVKWQPINWDMKETELNNGNIDLIWNGYSKTAERAKKVAFTNPYM | 151 |
| | | FDIDLA VF +YG+ V +Q INWDMKE ELNNG ID+IWNGYS T ER KVAFT+ YM | |
| Sbjct: | 66 | FDIDLAKEVFHQYGLKVNFQAINWDMKEAELNNGKIDVIWNGYSITKERQDKVAFTDSYM | 125 |
| Query: | 152 | NNHQVIVTKTSSHINSIKDMKGKKLGAQSGSSGFDAFNAKPDILKKFVKGKEAVQYDTFT | 211 |
| | | N Q+IV K S I +I DMK K LGAQS SSG+D+ P +LK F+K K+A QY+TFT | |
| Sbjct: | 126 | RNEQIIVVKKRSDIKTISDMKHKVLGAQSASSGYDSLLRTPKLLKDFIKNKDANQYETFT | 185 |
| Query: | 212 | QALIDLKNNRIDGLLIDEVYANYYLKQEGNIKAYYFVKTAYQGENFVVGARKVDRRLIEK | 271 |
| | | QA IDLK++RIDG+LID+VYANYYL +EG ++ Y + T ++ E F VG RK D+ L K | |
| Sbjct: | 186 | QAFIDLKSDRIDGILIDKVYANYYLAKEGQLENYRMIPTTFENEAFSVGLRKEDKTLQAK | 245 |
| Query: | 272 | INKAFKQLHNKGRFQKISYKWFGEDV | 297 |
| | | IN+AF+ L+ G+FQ IS KWFG+DV | |
| Sbjct: | 246 | INRAFRVLYQNGKFQAISEKWFGDDV | 271 |

[8382] A related GBS gene <SEQ ID 8833> and protein <SEQ ID 8834> were also identified. Analysis of this protein sequence reveals the following:

```
Lipop Possible site: 22 Crend: 4
              Sequence Pattern: CGMS
SRCFLG: 0
McG: Length of UR: 22
          Peak Value of UR: 3.05
          Net Charge of CR: 2
McG: Discrim Score: 11.16
GvH: Signal Score (−7.5): −1.96
          Possible site: 24
>>> May be a lipoprotein
Amino Acid Composition: calculated from 23
ALOM program count: 0 value: 8.96 threshold: 0.0
      PERIPHERAL Likelihood = 8.96 68
modified ALOM score: −2.29
*** Reasoning Step: 3
----- Final Results -----
                              bacterial membrane --- Certainty = 0.0000(Not Clear) < succ>
                                bacterial outside --- Certainty = 0.0000(Not Clear) < succ>
                            bacterial cytoplasm --- Certainty = 0.0000(Not Clear) < succ>
```

[8383] The protein has homology with the following sequences in the databases:

[chemical structure]

[8384] SEQ ID 8834 (GBS225) was expressed in E. coli as a His-fusion product. SDS-PAGE analysis of total cell extract is shown in FIG. 49 (lane 10; MW 32 kDa). The GBS225-His fusion product was purified (FIG. 205, lane 7) and used to immunise mice. The resulting antiserum was used for FACS (FIG. 266), which confirmed that the protein is immunoaccessible on GBS bacteria.

[8385] Based on this analysis, it was predicted that these proteins and their epitopes could be useful antigens for vaccines or diagnostics.

### EXAMPLE 1527

[8386] A DNA sequence (GBSx1618) was identified in S. agalactiae <SEQ ID 4701> which encodes the amino acid sequence <SEQ ID 4702>. This protein is predicted to be arginine ABC transporter, ATP-binding protein (glnQ). Analysis of this protein sequence reveals the following:

```
Possible site: 39
>>> Seems to have no N-terminal signal sequence
----- Final Results -----
                            bacterial cytoplasm --- Certainty = 0.3229(Affirmative) < succ>
                              bacterial membrane --- Certainty = 0.0000(Not Clear) < succ>
                                bacterial outside --- Certainty = 0.0000(Not Clear) < succ>
```

[8387] The protein has homology with the following sequences in the GENPEPT database.

| >GP: AAB49429 GB: U73111 glutamine transport ATP-binding protein GLNQ | | | |
|---|---|---|---|
| [Salmonella typhimurium] | | | |
| Identities = 94/210 (44%), Positives = 146/210 (68%), Gaps = 3/210 (1%) | | | |
| Query: | 1 | MLELKNISKCYGQKEIFKDFNLTVEEGKILSLVGPSGGGKTTLLRMLAGLEKIDSGTIVH | 60 |
| | | M+E KN+SK +G ++ + +L + +G+++ ++GPSG GK+TLLR + LE+I SG ++ | |
| Sbjct: | 1 | MIEFKNVSKHFGPTQVLHNIDLNIRQGEVVVIIGPSGSGKSTLLRCINKLEEITSGDLIV | 60 |
| Query: | 61 | DGKEVS---VDHLETLNLLGFVFQDFQLFPHLTVLDNLILSPVKTMGLSKELAKEKALVL | 117 |
| | | DG +V+ VD G VFQ F LFPHLT L+N++ P++ G+ KE A+++A L | |
| Sbjct: | 61 | DGLKVNDPKVDERLIRQEAGMVFQQFYLFPHLTALENVMFGPLRVRGVKKEEAEKQAKAL | 120 |
| Query: | 118 | LERLGLKDHALVYPFSLSGGQKQRVALARAMMIDPQIIGYDEPTSALDPELRQEVEKLIL | 177 |
| | | L ++GL + A YP LSGGQ+QRVA+ARA+ + P+++ +DEPTSALDPELR EV K++ | |
| Sbjct: | 121 | LAKVGLAERAHHYPSELSGGQQQRVAIARALAVKPKMMLFDEPTSALDPELRHEVLKVMQ | 180 |
| Query: | 178 | QNRETGMTQIVVTHDLQFAESISDTILKIN | 207 |
| | | E GMT ++VTH++ FAE ++ ++ I+ | |
| Sbjct: | 181 | DLAEEGMTMVIVTHEIGFAEKVASRLIFID | 210 |

[8388] A related DNA sequence was identified in S. pyogenes <SEQ ID 4703> which encodes the amino acid sequence <SEQ ID 4704>. Analysis of this protein sequence reveals the following:

```
Possible site: 39
>>> Seems to have no N-terminal signal sequence
----- Final Results -----
                            bacterial cytoplasm --- Certainty = 0.2146(Affirmative) < succ>
                              bacterial membrane --- Certainty = 0.0000(Not Clear) < succ>
                                bacterial outside --- Certainty = 0.0000(Not Clear) < succ>
```

[8389] An alignment of the GAS and GBS proteins is shown below.

| Identities = 164/209 (78%), Positives = 183/209 (87%) | | | |
|---|---|---|---|
| Query: | 1 | MLELKNISKCYGQKEIFKDFNLTVEEGKILSLVGPSGGGKTTLLRMLAGLEKIDSGTIVH | 60 |
| | | MLELKNISK +GQK IF FNLTV++G++LSLVGPS GGKTTLLRMLAGLE IDSG + + | |
| Sbjct: | 1 | MLELKNISKQFGQKTIFDGFNLTVQDGEVLSLVGPSSGGKTTLLRMLAGLESIDSGQVFY | 60 |
| Query: | 61 | DGKEVSVDHLETLNLLGFVFQDFQLFPHLTVLDNLILSPVKTMGLSKELAKEKALVLLER | 120 |
| | | +G++V +DHLE NLLGFVFQDFQLFPHLTVLDNL LSP TMG K AKEKAL LL R | |
| Sbjct: | 61 | NGEDVGIDHLENRNLLGFVFQDFQLFPHLTVLDNLTLSPTITMGKQKADAKEKALDLLAR | 120 |
| Query: | 121 | LGLKDHALVYPFSLSGGQKQRVALARAMMIDPQIIGYDEPTSALDPELRQEVEKLILQNR | 180 |
| | | LGLK+HA VYP+SLSGGQKQRVALARAMMIDPQIIGYDEPTSALDPELRQ VE LI+QNR | |
| Sbjct: | 121 | LGLKEHAQVYPYSLSGGQKQRVALARAMMIDPQIIGYDEPTSALDPELRQTVEALIVQNR | 180 |
| Query: | 181 | ETGMTQIVVTHDLQFAESISDTILKINPK | 209 |
| | | E G+TQIVVTHDL FAE+ISD I+++NPK | |
| Sbjct: | 181 | EMGITQIVVTHDLVFAEAISDRIIRVNPK | 209 |

[8390] Based on this analysis, it was predicted that these proteins and their epitopes could be useful antigens for vaccines or diagnostics.

### EXAMPLE 1528

[8391] A DNA sequence (GBSx1619) was identified in S. agalactiae <SEQ ID 4705> which encodes the amino acid sequence <SEQ ID 4706>. This protein is predicted to be amino acid ABC transporter, permease protein (glnP). Analysis of this protein sequence reveals the following:

| Possible site: 16 | | | | |
|---|---|---|---|---|
| >>> Seems to have a cleavable N-term signal seq. | | | | |
| | INTEGRAL | Likelihood = −8.12 | Transmembrane | 102-118 (96-120) |

```
----- Final Results -----
                              bacterial membrane --- Certainty = 0.4248(Affirmative) < succ>
                                bacterial outside --- Certainty = 0.0000(Not Clear) < succ>
                            bacterial cytoplasm --- Certainty = 0.0000(Not Clear) < succ>
```

[8392] A related GBS nucleic acid sequence <SEQ ID 9341> which encodes amino acid sequence <SEQ ID 9342> was also identified.

[8393] The protein has homology with the following sequences in the GENPEPT database.

| >GP: BAA98402 GB: AP002545 ABC amino acid transporter permease | | | |
|---|---|---|---|
| [Chlamydophila pneumoniae J138] | | | |
| Identities = 55/127 (43%), Positives = 83/127 (65%), Gaps = 1/127 (0%) | | | |
| Query: | 3 | AAIIAFTMNYAAYFAEIFRGGIESIPKGQYEAAKVLKFSKFQTVWYIVLPQVFKIVLPSV | 62 |
| | | A IIA +MN AAY AE RGGI S+ GQ+E+A VL + K+Q YI+ PQVFK +LPS+ | |
| Sbjct: | 89 | AGIIALSMNSAAYLAENIRGGINSLSIGQWESAMVLGYKKYQIFVYIIYPQVFKNILPSL | 148 |
| Query: | 63 | FNETITLVKDSSLVYILGVGDLLLESKTAANRDATLAPMF-IAGGIYLLLIGLLTILSKQ | 121 |
| | | NE ++L+K+SS++ ++GV +L +K +R+ M+ I G+Y L+ + +S+ | |
| Sbjct: | 149 | TNEFVSLIKESSILMVVGVPELTKVTKDIVSRELNPMEMYLICAGLYFLMTSSFSCISRL | 208 |
| Query: | 122 | VEKRFNY | 128 |
| | | EKR +Y | |
| Sbjct: | 209 | SEKRRSY | 215 |

[8394] A related DNA sequence was identified in S. pyogenes <SEQ ID 4707> which encodes the amino acid sequence <SEQ ID 4708>. Analysis of this protein sequence reveals the following:

| Possible site: 34 | | | | |
|---|---|---|---|---|
| >>> Seems to have no N-terminal signal sequence | | | | |
| | INTEGRAL | Likelihood = −11.57 | Transmembrane | 21-37 (7-44) |
| | INTEGRAL | Likelihood = −10.93 | Transmembrane | 185-201 (178-206) |
| | INTEGRAL | Likelihood = −3.29 | Transmembrane | 63-79 (62-81) |

```
----- Final Results -----
                              bacterial membrane --- Certainty = 0.5628(Affirmative) < succ>
                                bacterial outside --- Certainty = 0.0000(Not Clear) < succ>
                            bacterial cytoplasm --- Certainty = 0.0000(Not Clear) < succ>
```

[8395] The protein has homology with the following sequences in the databases:

| >GP: BAB05181 GB: AP001512 ABC transporter (permease) [Bacillus halodurans] | | | |
|---|---|---|---|
| Identities = 86/206 (41%), Positives = 126/206 (60%), Gaps = 1/206 (0%) | | | |
| Query: | 4 | IQQVLPSLLDGALVTLQVFFIVIILSIPLGAILAFLMKIPFKPLQWFLTLYVWMMRGTPL | 63 |
| | | IQ +P +L+G VTLQ + ++ + LG +LA ++ +WF Y + RGTPL | |
| Sbjct: | 8 | IQPFMPFMLEGVWVTLQFVSVSLLFGLVLGIVLAIFKISKYRLFRWFADFYTSIFRGTPL | 67 |
| Query: | 64 | LLQLIFFYYVLPSVGISFDRMPAAILAFTLNYAAYFAEIFRGGIEAIPKGQYEAAKVLKL | 123 |
| | | +LQL+ Y LP G+ + AA LAF LN AAY +EI R GI+A+ KGQ EAA+ L + | |
| Sbjct: | 68 | ILQLLMIYLALPQFGVDISQFQAAFLAFGLNSAAYVSEIIRAGIQAVDKGQREAAEALGI | 127 |
| Query: | 124 | KPLQTIRYIILPQVFKIVLPSVFNEVINLVKDSSLVYVLGVGDLL-LASKTAANRDATLA | 182 |
| | | + IILPQ + +LP++FNE INL K+S++V V+GV DL+ A T+A L | |
| Sbjct: | 128 | PYRPMMLRIILPQAMRNILPALFNEFINLTKESAIVSVIGVTDLMRRAQITSAETYLYLE | 187 |
| Query: | 183 | PMFIAGLIYLLLIGLVTIISKQVEKR | 208 |
| | | P+ GLIY +L+ +T+I + +E+R | |
| Sbjct: | 188 | PLLFVGLIYYVLVMGLTVIGRLLERR | 213 |

[8396] An alignment of the GAS and GBS proteins is shown below.

| Identities = 112/130 (86%), Positives = 121/130 (92%) | | | |
|---|---|---|---|
| Query: | 1 | MPAAIIAFTMNYAAYFAEIFRGGIESIPKGQYEAAKVLKFSKFQTVWYIVLPQVFKIVLP | 60 |
| | | MPAAI+AFT+NYAAYFAEIFRGGIE+IPKGQYEAAKVLK QT+ YI+LPQVFKIVLP | |
| Sbjct: | 84 | MPAAILAFTLNYAAYFAEIFRGGIEAIPKGQYEAAKVLKLKPLQTIRYIILPQVFKIVLP | 143 |
| Query: | 61 | SVFNETITLVKDSSLVYILGVGDLLLESKTAANRDATLAPMFIAGGIYLLLIGLLTILSK | 120 |
| | | SVFNE I LVKDSSLVY+LGVGDLLL SKTAANRDATLAPMFIAG IYLLLIGL+TI+SK | |
| Sbjct: | 144 | SVFNEVINLVKDSSLVYVLGVGDLLLASKTAANRDATLAPMFIAGLIYLLLIGLVTIISK | 203 |
| Query: | 121 | QVEKRFNYYK | 130 |
| | | QVEKRFNYY+ | |
| Sbjct: | 204 | QVEKRFNYYQ | 213 |

[8397] Based on this analysis, it was predicted that these proteins and their epitopes could be useful antigens for vaccines or diagnostics.

### EXAMPLE 1529

[8398] A DNA sequence (GBSx1620) was identified in S. agalactiae <SEQ ID 4709> which encodes the amino acid sequence <SEQ ID 4710>. This protein is predicted to be minidiscs. Analysis of this protein sequence reveals the following:

| Possible site: 61 | | | | |
|---|---|---|---|---|
| >>> Seems to have an uncleavable N-term signal seq | | | | |
| | INTEGRAL | Likelihood = −9.66 | Transmembrane | 44-60 (39-66) |
| | INTEGRAL | Likelihood = −7.96 | Transmembrane | 129-145 (123-147) |
| | INTEGRAL | Likelihood = −5.15 | Transmembrane | 13-29 (9-33) |
| | INTEGRAL | Likelihood = −2.39 | Transmembrane | 94-110 (94-110) |

```
----- Final Results -----
                              bacterial membrane --- Certainty = 0.4864(Affirmative) < succ>
                                bacterial outside --- Certainty = 0.0000(Not Clear) < succ>
                            bacterial cytoplasm --- Certainty = 0.0000(Not Clear) < succ>
```

[8399] The protein has homology with the following sequences in the GENPEPT database.

| >GP: AAF49688 GB: AE003532 mnd gene product [Drosophila melanogaster] | | | |
|---|---|---|---|
| Identities = 48/145 (33%), Positives = 78/145 (53%), Gaps = 8/145 (5%) | | | |
| Query: | 7 | IKQTYGLMTTIAMIVGVVIGSGIYFKVDDILKFTGGDVFLGMVILVLGSFSIVFGSLSIS | 66 |
| | | +K+ GL+ +A+IVGV++GSGI+ +LKF+ G + +++ VL + G+L + | |
| Sbjct: | 39 | LKKQIGLLDGVAIIVGVIVGSGIFVSPKGVLKFS-GSIGQSLIVWVLSGVLSMVGALCYA | 97 |
| Query: | 67 | ELAIRTSESGGIFSYYEKYVSPALAATLGLFASFLYL-PTLTAIVSWVAAFYTLGE---- | 121 |
| | | EL +SGG ++Y P L A L L+ + L L PT AI + A Y L | |
| Sbjct: | 98 | ELGTMIPKSGGDYAYIGTAFGP-LPAFLYLWVALLILVPTGNAITALTFAIYLLKPFWPS | 156 |
| Query: | 122 | -SSSLESQIILAAVYILALSLMNIF | 145 |
| | | + +E+ +LAA I L+L+N + | |
| Sbjct: | 157 | CDAPIEAVQLLAAAMICVLTLINCY | 181 |

[8400] No corresponding DNA sequence was identified in S. pyogenes.

[8401] Based on this analysis, it was predicted that this protein and its epitopes, could be useful antigens for vaccines or diagnostics.

### EXAMPLE 1530

[8402] A DNA sequence (GBSx1621) was identified in S. agalactiae <SEQ ID 4711> which encodes the amino acid sequence <SEQ ID 4712>. Analysis of this protein sequence reveals the following:

```
Possible site: 21
>>> Seems to have an uncleavable N-term signal seq
----- Final Results -----
                              bacterial membrane --- Certainty = 0.0000(Not Clear) < succ>
                                bacterial outside --- Certainty = 0.0000(Not Clear) < succ>
                            bacterial cytoplasm --- Certainty = 0.0000(Not Clear) < succ>
```

[8403] The protein has no significant homology with any sequences in the GENPEPT database.

[8404] No corresponding DNA sequence was identified in S. pyogenes.

[8405] Based on this analysis, it was predicted that this protein and its epitopes, could be useful antigens for vaccines or diagnostics.

### EXAMPLE 1531

[8406] A DNA sequence (GBSx1622) was identified in S. agalactiae <SEQ ID 4713> which encodes the amino acid sequence <SEQ ID 4714>. This protein is predicted to be TRK potassium uptake system protein. Analysis of this protein sequence reveals the following:

| Possible site: 27 | | | | |
|---|---|---|---|---|
| >>> Seems to have no N-terminal signal sequence | | | | |
| | INTEGRAL | Likelihood = −0.06 | Transmembrane | 232-248 (232-248) |

```
----- Final Results -----
                              bacterial membrane --- Certainty = 0.1022(Affirmative) < succ>
                                bacterial outside --- Certainty = 0.0000(Not Clear) < succ>
                            bacterial cytoplasm --- Certainty = 0.0000(Not Clear) < succ>
```

[8407] A related GBS nucleic acid sequence <SEQ ID 8835> which encodes amino acid sequence <SEQ ID 8836> was also identified. Analysis of this protein sequence reveals the following:

| Lipop: Possible site: −1 Crend: 5 | | | | |
|---|---|---|---|---|
| McG: Discrim Score: −4.65 | | | | |
| GvH: Signal Score (−7.5): −3.64 | | | | |
| Possible site: 27 | | | | |
| >>> Seems to have no N-terminal signal sequence | | | | |
| ALOM program count: 1 value: −0.06 threshold: 0.0 | | | | |
| | INTEGRAL | Likelihood = −0.06 | Transmembrane | 228-244 (228-244) |
| | PERIPHERAL | Likelihood = 1.27 | 428 | |

```
modified ALOM score: 0.51
*** Reasoning Step: 3
----- Final Results -----
                              bacterial membrane --- Certainty = 0.1022(Affirmative) < succ>
                                bacterial outside --- Certainty = 0.0000(Not Clear) < succ>
                            bacterial cytoplasm --- Certainty = 0.0000(Not Clear) < succ>
```

[8408] The protein has homology with the following sequences in the GENPEPT database.

| >GP: AAB90401 GB: AE001046 TRK potassium uptake system protein | | | |
|---|---|---|---|
| (trkA-2) [Archaeoglobus fulgidus] | | | |
| Identities = 136/446 (30%), Positives = 238/446 (52%), Gaps = 12/446 (2%) | | | |
| Query: | 5 | MRIIVVGGGKVGTALCRSLVAEKHDVVLIEKKENVLKRVTKQHDIMGIVGNGANYKILEQ | 64 |
| | | MRI++ G G+VG L SL A HDV++IEK + +RV++ D++ I GN AN K+L | |
| Sbjct: | 1 | MRIVIAGAGEVGYHLAMSL-APNHDVIIIEKDVSRFERVSEL-DVVAINGNAANMKVLRD | 58 |
| Query: | 65 | AEVKNCDIFIAITDRDEVNMISAVLAKKMGAKETVVRMRNPEYSNPYFKDKNFLGFSSVV | 124 |
| | | A V+ D+F+A+T DEVN++S + AKK+GAK +VR+ NPEY + ++ LG+ ++ | |
| Sbjct: | 59 | AGVERADVFLAVTGNDEVNLLSGLAAKKVGAKNVIVRVENPEYVDRPIVKEHPLGYDVLI | 118 |
| Query: | 125 | NPELLAAQYIANTIEFPNATSVEHFANGRVMLMEFKILEGNKLCHTSMSQIRKKFGNIVI | 184 |
| | | P+L AQ A I P A V F+ G+V ++E +++EG+K +++ + N+VI | |
| Sbjct: | 119 | CPQLSLAQEAARLIGIPGAIEVVTFSGGKVEMIELQVMEGSKADGKAIADLYLP-QNVVI | 177 |
| Query: | 185 | CAIERDGKLIIPDGDATIQVKDKIFVTGNRIEMILFHNYVKNKVVKNLMVIGAGRIAYYL | 244 |
| | | +I R+G + IP GD ++ D++ + ++ + V + + + GAG I Y | |
| Sbjct: | 178 | ASIYRNGHIEIPRGDTVLRAGDRVAIVSKTEDVEMLKGIFGPPVTRRVTIFGAGTIGSYT | 237 |
| Query: | 245 | LNILKNTNTHVKLVELNQEQAEYFSQEFPNVPVVHGDGTAKNILLEESVTSFDAVATLTG | 304 |
| | | IL T VKL+E + E+ E S E V +V GD T L+EE + DAV T | |
| Sbjct: | 238 | AKILAKGMTSVKLIESSMERCEALSGELEGVRIVCGDATDIEFLIEEEIGKSDAVLAATE | 297 |
| Query: | 305 | VDEENIITSMFLESIGIPKNITKVNRTSLLEIIDDKQLSSIITPKRIAVDHVMHFVRGRV | 364 |
| | | DE+N++ S+ +++G I KV + +++ + + + P+ + + V +R | |
| Sbjct: | 298 | SDEKNLLISLLSKNLGARIAIAKVEKREYVKLFEAVGVDVALNPRSVTYNEVSKLLR--- | 354 |
| Query: | 365 | NAQDSNLEAMHHIANDRIETLQFEIKETSKLANRSLASLKLKQNILIAAIIRNNKTIFPT | 424 |
| | | +E + I + + + ++L ++L L L ++ +I AI+R N+ + P | |
| Sbjct: | 355 | ---TMRIETLAEIEGTAVVEV---VVRNTRLVGKALKDLPLPKDAIIGAIVRGNECLIPR | 408 |
| Query: | 425 | GEDVLTVGDRIVVITLLKNITRTSDM | 450 |
| | | G+ + DR++V I + ++ | |
| Sbjct: | 409 | GDTTIEYEDRLLVFAKWDEIEKIEEI | 434 |
| Identities = 48/212 (22%), Positives = 99/212 (46%), Gaps = 15/212 (7%) | | | |
| Query: | 3 | VKMRIIVVGGGKVGTALCRSLVAEKHDVVLIEKKENVLKRVTKQHDIMGIV-GNGANYKI | 61 |
| | | V R+ + G G +G+ + L V LIE + ++ + + + IV G+ + + | |
| Sbjct: | 221 | VTRRVTIFGAGTIGSYTAKILAKGMTSVKLIESSMERCEALSGELEGVRIVCGDATDIEF | 280 |
| Query: | 62 | LEQAEVKNCDIFIAITDRDEVNMISAVLAKKMGAKETVVRMRNPEYSNPYFKDKNFLGFS | 121 |
| | | L + E+ D +A T+ DE N++ ++L+K +GA+ + ++ EY + +G | |
| Sbjct: | 281 | LIEEEIGKSDAVLAATESDEKNLLISLLSKNLGARIAIAKVEKREYVKLF----EAVGVD | 336 |
| Query: | 122 | SVVNPELLAAQYIA---NTIEFPNATSVEHFANGRVMLMEFKILEGNKLCHTSMSQIRKK | 178 |
| | | +NP + ++ T+ +E A V++ +++ G L + + | |
| Sbjct: | 337 | VALNPRSVTYNEVSKLLRTMRIETLAEIEGTAVVEVVVRNTRLV-GKALKDLPLPK---- | 391 |
| Query: | 179 | FGNIVICAIERDGKLIIPDGDATIQVKDKIFV | 210 |
| | | + +I AI R + +IP GD TI+ +D++ V | |
| Sbjct: | 392 | --DAIIGAIVRGNECLIPRGDTTIEYEDRLLV | 421 |

[8409] There is also homology to SEQ ID 4716.

[8410] SEQ ID 8836 (GBS384) was expressed in E. coli as a His-fusion product. SDS-PAGE analysis of total cell extract is shown in FIG. 69 (lane 2; MW 53 kDa). It was also expressed in E. coli as a GST-fusion product. SDS-PAGE analysis of total cell extract is shown in FIG. 72 (lane 6; MW 78 kDa).

[8411] The GBS384-GST fusion product was purified (FIG. 212, lane 9) and used to immunise mice. The resulting antiserum was used for FACS (FIG. 279), which confirmed that the protein is immunoaccessible on GBS bacteria.

[8412] Based on this analysis, it was predicted that this protein and its epitopes, could be useful antigens for vaccines or diagnostics.

### EXAMPLE 1532

[8413] A DNA sequence (GBSx1623) was identified in S. agalactiae <SEQ ID 4717> which encodes the amino acid sequence <SEQ ID 4718>. Analysis of this protein sequence reveals the following:

```
Possible site: 52
>>> Seems to have no N-terminal signal sequence
----- Final Results -----
                            bacterial cytoplasm --- Certainty = 0.4948(Affirmative) < succ>
                              bacterial membrane --- Certainty = 0.0000(Not Clear) < succ>
                                bacterial outside --- Certainty = 0.0000(Not Clear) < succ>
```

[8414] The protein has no significant homology with any sequences in the GENPEPT database.

[8415] No corresponding DNA sequence was identified in S. pyogenes.

[8416] Based on this analysis, it was predicted that this protein and its epitopes, could be useful antigens for vaccines or diagnostics.

### EXAMPLE 1533

[8417] A DNA sequence (GBSx1624) was identified in S. agalactiae <SEQ ID 4719> which encodes the amino acid sequence <SEQ ID 4720>. Analysis of this protein sequence reveals the following:

| Possible site: 22 | | | | |
|---|---|---|---|---|
| >>> Seems to have an uncleavable N-term signal seq | | | | |
| | INTEGRAL | Likelihood = −12.58 | Transmembrane | 37-53 (33-61) |
| | INTEGRAL | Likelihood = −11.57 | Transmembrane | 183-199 (179-214) |
| | INTEGRAL | Likelihood = −10.03 | Transmembrane | 397-413 (392-424) |
| | INTEGRAL | Likelihood = −6.79 | Transmembrane | 14-30 (5-31) |
| | INTEGRAL | Likelihood = −6.42 | Transmembrane | 71-87 (69-93) |
| | INTEGRAL | Likelihood = −4.99 | Transmembrane | 278-294 (274-295) |
| | INTEGRAL | Likelihood = −4.19 | Transmembrane | 133-149 (132-152) |
| | INTEGRAL | Likelihood = −4.09 | Transmembrane | 327-343 (324-344) |
| | INTEGRAL | Likelihood = −2.44 | Transmembrane | 236-252 (234-252) |
| | INTEGRAL | Likelihood = −0.59 | Transmembrane | 456-472 (456-472) |

```
----- Final Results -----
                              bacterial membrane --- Certainty = 0.6031(Affirmative) < succ>
                                bacterial outside --- Certainty = 0.0000(Not Clear) < succ>
                            bacterial cytoplasm --- Certainty = 0.0000(Not Clear) < succ>
```

[8418] A related GBS nucleic acid sequence <SEQ ID 10065> which encodes amino acid sequence <SEQ ID 10066> was also identified.

[8419] The protein has homology with the following sequences in the GENPEPT database.

| >GP: AAB90400 GB: AE001046 TRK potassium uptake system protein (trkH) | | | |
|---|---|---|---|
| [Archaeoglobus fulgidus] | | | |
| Identities = 166/480 (34%), Positives = 262/480 (54%), Gaps = 10/480 (2%) | | | |
| Query: | 1 | MNKSMIRFLLSKLLLIEAALLAIPLTVGLIYREP-QSVMMSIVITMIILIILGLLGSLFK | 59 |
| | | MN + +L KLL++ + +PL ++ EP ++ +++++ +LG G + | |
| Sbjct: | 1 | MNLRLTASILGKLLMLFSFSFILPLIAAHVFEEPYHPFLIPAALSLLVGAVLGY-GIKTE | 59 |
| Query: | 60 | PKNYHIYTKEGMLIVALCWILWSFFGALPFVISGQIPNIIDAFFEVSSGFTTTGATILDD | 119 |
| | | + + KE IVAL W+ S FG++P++I G P +DAFFE SGFTTTGA++L | |
| Sbjct: | 60 | SEFDSLRHKESFAIVALIWLFMSIFGSIPYIIFGISP--VDAFFESMSGFTTTGASVLTP | 117 |
| Query: | 120 | VSVLSPALLFWRSFTHLIGGMGVLVFALAIMENSKNSHLEVMRAEVPGPVFGKVVSKLKK | 179 |
| | | L +LL WRS T IGGMG++V LAI N + +AE PG K+ +++ | |
| Sbjct: | 118 | EE-LPKSLLLWRSLTQWIGGMGIIVLFLAIFPNVAKRSTVLFQAEYPGVSLSKLKPRIRD | 176 |
| Query: | 180 | TAQILYLLYLLMFAVFAVILYFAGMPFFDSIIIAMGTAGTGGFAVYNDSIAHYNSPLITN | 239 |
| | | TA LY +YLL+ +LY G+ FD+I T TGG++ +++SIA + + | |
| Sbjct: | 177 | TALSLYKVYLLLTIAEVALLYALGLSLFDAINHTFTTLSTGGYSTHSESIAFFKDVRVEA | 236 |
| Query: | 240 | LVSIGMLIFGVNFNLYYLLLLRKIKAFFGDEELKTYLRIVAIATFMIALNVIGMYDNFRQ | 299 |
| | | +V+ + G NF L Y LL K F + E + Y+ +A+A+ +IA + Y F + | |
| Sbjct: | 237 | VVAFFAFLGGANFALIYFLLSGK-PVIFRNTEFRAYVCFLALASVVIAAVNLDRYSIF-E | 294 |
| Query: | 300 | GLEHIFFEVSAIITTTGFGVTDITRWPLFSQVILLFLMFIGGSAGSTAGGFKVMRSLILA | 359 |
| | | L + F+ +I+TTTGF D W +++IL+ LMFIGGS+GST GG KV+R +L | |
| Sbjct: | 295 | SLRYSIFQAVSIMTTTGFTTADFDAWSDSAKLILVVLMFIGGSSGSTGGGIKVIRIYLLI | 354 |
| Query: | 360 | KIARNQVLSTLYPNRVMSLHINKSVLDKNTQHGVLKYLTIYLAIFMALVLVLTLDTNDFL | 419 |
| | | K A +Q+L P V ++ + K + + +Y+ IF ++++L D + | |
| Sbjct: | 355 | KYAVHQILRAAEPRTVRAVKFEGRAIKKEILDDIAAFFVLYILIFAVSSILVSLSGYDIV | 414 |
| Query: | 420 | VVISAAASCFNNIGP---LLGSNETFSFFSPFSKLLLSFAMIAGRLEIYPVLLMFIPKTW | 476 |
| | | ISA A+ N+GP L G+ E ++ F +K+LL+ M GRLEI+ V+ +FIP W | |
| Sbjct: | 415 | TSISATAATLGNVGPGLGLAGAAENYASFPSLTKILLAVNMWIGRLEIFTVVSLFIPTFW | 474 |

[8420] No corresponding DNA sequence was identified in S. pyogenes.

[8421] Based on this analysis, it was predicted that this protein and its epitopes, could be useful antigens for vaccines or diagnostics.

### EXAMPLE 1534

[8422] A DNA sequence (GBSx1625) was identified in S. agalactiae <SEQ ID 4721> which encodes the amino acid sequence <SEQ ID 4722>. Analysis of this protein sequence reveals the following:

```
Possible site: 22
>>> Seems to have no N-terminal signal sequence (or aa 1-20)
----- Final Results -----
                            bacterial cytoplasm --- Certainty = 0.2870(Affirmative) < succ>
                              bacterial membrane --- Certainty = 0.0000(Not Clear) < succ>
                                bacterial outside --- Certainty = 0.0000(Not Clear) < succ>
```

[8423] The protein has homology with the following sequences in the GENPEPT database.

| >GP: AAD36530 GB: AE001797 conserved hypothetical protein | | | |
|---|---|---|---|
| [Thermotoga maritima] | | | |
| Identities = 43/75 (57%), Positives = 57/75 (75%), Gaps = 1/75 (1%) | | | |
| Query: | 2 | LKSFLIFLVRFYQKNISPAFPASCRYRPTCSTYMIEAIQKHG-LKGVLMGIARILRCHPL | 60 |
| | | +K LI L+RFYQ+ ISP P +CR+ PTCS Y I+A++KHG LKG +G+ RILRC+PL | |
| Sbjct: | 1 | MKKLLIMLIRFYQRYISPLKPPTCRFTPTCSNYFIQALEKHGLLKGTFLGLRRILRCNPL | 60 |
| Query: | 61 | AHGGNDPVPDHFSLR | 75 |
| | | + GG DPVP+ FS + | |
| Sbjct: | 61 | SKGGYDPVPEEFSFK | 75 |

[8424] A related DNA sequence was identified in S. pyogenes <SEQ ID 4723> which encodes the amino acid sequence <SEQ ID 4724>. Analysis of this protein sequence reveals the following:

```
Possible site: 38
>>> Seems to have no N-terminal signal sequence
----- Final Results -----
                            bacterial cytoplasm --- Certainty = 0.3639(Affirmative) < succ>
                              bacterial membrane --- Certainty = 0.0000(Not Clear) < succ>
                                bacterial outside --- Certainty = 0.0000(Not Clear) < succ>
```

[8425] An alignment of the GAS and GBS proteins is shown below.

| Identities = 53/78 (67%), Positives = 60/78 (75%) | | | |
|---|---|---|---|
| Query: | 1 | MLKSFLIFLVRFYQKNISPAFPASCRYRPTCSTYMIEAIQKHGLKGVLMGIARILRCHPL | 60 |
| | | M+K LI V+ YQK ISP P SCRY+PTCS YM+ AI+KHG KG+LMGIARILRCHP | |
| Sbjct: | 1 | MMKKLLIVSVKAYQKYISPLSPPSCRYKPTCSAYMLTAIEKHGTKGILMGIARILRCHPF | 60 |
| Query: | 61 | AHGGNDPVPDHFSLRRNK | 78 |
| | | GG DPVP+ FSL RNK | |
| Sbjct: | 61 | VAGGVDPVPEDFSLMRNK | 78 |

[8426] SEQ ID 4722 (GBS233) was expressed in E. coli as a GST-fusion product. SDS-PAGE analysis of total cell extract is shown in FIG. 58 (lane 3; MW 35.6 kDa).

[8427] The GBS233-GST fusion product was purified (FIG. 207, lane 10) and used to immunise mice. The resulting antiserum was used for FACS (FIG. 280), which confirmed that the protein is immunoaccessible on GBS bacteria.

[8428] Based on this analysis, it was predicted that these proteins and their epitopes could be useful antigens for vaccines or diagnostics.

### EXAMPLE 1535

[8429] A DNA sequence (GBSx1626) was identified in S. agalactiae <SEQ ID 4725> which encodes the amino acid sequence <SEQ ID 4726>. This protein is predicted to be ribosomal large subunit pseudouridine synthase B (rluB). Analysis of this protein sequence reveals the following:

```
Possible site: 18
>>> Seems to have no N-terminal signal sequence
----- Final Results -----
                            bacterial cytoplasm --- Certainty = 0.2957(Affirmative) < succ>
                              bacterial membrane --- Certainty = 0.0000(Not Clear) < succ>
                                bacterial outside --- Certainty = 0.0000(Not Clear) < succ>
```

[8430] The protein has homology with the following sequences in the GENPEPT database.

| >GP: BAB05295 GB: AP001512 pseudouridylate synthase [Bacillus halodurans] | | | |
|---|---|---|---|
| Identities = 130/239 (54%), Positives = 175/239 (72%), Gaps = 2/239 (0%) | | | |
| Query: | 2 | RINKYIAHAGIASRRKAEELIKQGMVTINGQVVNELATQVKAG-DLVEIEGSPIYNEEKV | 60 |
| | | R+ K IA AGIASRRKAE+LI +G V +NGQVV EL +V D +E+EG P+ EE V | |
| Sbjct: | 3 | RLQKVIAQAGIASRRKAEQLILEGKVKVNGQVVKELGIKVNPNQDDIEVEGVPVEKEEPV | 62 |
| Query: | 61 | YYLLNKPRGVISSVSDDKGRKTVIDLLPQVKERIYPVGRLDWDTTGLLILTNDGDFTDKM | 120 |
| | | Y+LL KP GVISSV DDKGRK V D L ++++R+YPVGRLD+DT+GLL+LTNDG+F + + | |
| Sbjct: | 63 | YFLLYKPTGVISSVKDDKGRKVVTDFL-EIEQRVYPVGRLDYDTSGLLLLTNDGEFANLL | 121 |
| Query: | 121 | IHPRNEIDKVYLARVKGIATKENLRPLTRGVVIDGKKTKPARYTIIKVDHEKNRSVVELT | 180 |
| | | +HPR++I+KVY+A+VKGI T++ L+ L RGV ++ T PA+ ++ VD K ++V+LT | |
| Sbjct: | 122 | MHPRHKIEKVYVAKVKGIPTRDQLKLLARGVKLEDGPTAPAKVKMLSVDRRKQTAIVKLT | 181 |
| Query: | 181 | IHEGRNHQVKKMFEQVGLLVDKLSRTQFGTLDLTGLRPGEARRLNKKEISQLHNAAINK | 239 |
| | | IHEGRN QV++MFE +G V KL R QF LDL+G+ PG+ R L E+ L A+ K | |
| Sbjct: | 182 | IHEGRNRQVRRMFETIGCEVMKLKREQFAFLDLSGMNPGDVRPLKPIEVKHLRELAVTK | 240 |

[8431] A related DNA sequence was identified in S. pyogenes <SEQ ID 4727> which encodes the amino acid sequence <SEQ ID 4728>. Analysis of this protein sequence reveals the following:

```
Possible site: 18
>>> Seems to have no N-terminal signal sequence
----- Final Results -----
                            bacterial cytoplasm --- Certainty = 0.1587(Affirmative) < succ>
                              bacterial membrane --- Certainty = 0.0000(Not Clear) < succ>
                                bacterial outside --- Certainty = 0.0000(Not Clear) < succ>
```

[8432] An alignment of the GAS and GBS proteins is shown below.

| Identities = 210/239 (87%), Positives = 228/239 (94%) | | | |
|---|---|---|---|
| Query: | 1 | MRINKYIAHAGIASRRKAEELIKQGMVTINGQVVNELATQVKAGDLVEIEGSPIYNEEKV | 60 |
| | | MRINKYIAHAGIASRRKAEELIKQG+VT+NGQV+ +LAT VK+GD+VEIEGSPIYNEEKV | |
| Sbjct: | 9 | MRINKYIAHAGIASRRKAEELIKQGLVTLNGQVITDLATTVKSGDVVEIEGSPIYNEEKV | 68 |
| Query: | 61 | YYLLNKPRGVISSVSDDKGRKTVIDLLPQVKERIYPVGRLDWDTTGLLILTNDGDFTDKM | 120 |
| | | YYLLNKPRG ISSVSDDKGRKTV+DLLPQVKERIYPVGRLDWDT+G+LILTNDGDFTD M | |
| Sbjct: | 69 | YYLLNKPRGAISSVSDDKGRKTVLDLLPQVKERIYPVGRLDWDTSGVLILTNDGDFTDTM | 128 |
| Query: | 121 | IHPRNEIDKVYLARVKGIATKENLRPLTRGVVIDGKKTKPARYTIIKVDHEKNRSVVELT | 180 |
| | | IHPRNEIDKVYLARVKGIATKENLRPLTRG+VIDGKKTKPARY I++V+ +K+RS+VELT | |
| Sbjct: | 129 | IHPRNEIDKVYLARVKGIATKENLRPLTRGIVIDGKKTKPARYNIVRVEADKSRSIVELT | 188 |
| Query: | 181 | IHEGRNHQVKKMFEQVGLLVDKLSRTQFGTLDLTGLRPGEARRLNKKEISQLHNAAINK | 239 |
| | | IHEGRNHQVKKMFE VGLLVDKLSRT+FGT+DL GLRPGEARRLNKKEISQLHN A K | |
| Sbjct: | 189 | IHEGRNHQVKKMFESVGLLVDKLSRTRFGTVDLKGLRPGEARRLNKKEISQLHNLANTK | 247 |

[8433] Based on this analysis, it was predicted that these proteins and their epitopes could be useful antigens for vaccines or diagnostics.

### EXAMPLE 1536

[8434] A DNA sequence (GBSx1627) was identified in S. agalactiae <SEQ ID 4729> which encodes the amino acid sequence <SEQ ID 4730>. Analysis of this protein sequence reveals the following:

```
Possible site: 15
>>> Seems to have no N-terminal signal sequence
----- Final Results -----
                            bacterial cytoplasm --- Certainty = 0.1476(Affirmative) < succ>
                              bacterial membrane --- Certainty = 0.0000(Not Clear) < succ>
                                bacterial outside --- Certainty = 0.0000(Not Clear) < succ>
```

[8435] The protein has homology with the following sequences in the GENPEPT database.

| >GP: BAB05280 GB: AP001512 unknown conserved protein [Bacillus halodurans] | | | |
|---|---|---|---|
| Identities = 75/180 (41%), Positives = 107/180 (58%), Gaps = 10/180 (5%) | | | |
| Query: | 6 | SIEALLFVAGEDGLSLRQMAELLSLTPSALIQQLEKLAKRYEEDDDSSLLLLETAQTYKL | 65 |
| | | +IE +LFV G++G++L ++ +LL L+ + LE+L Y D+ L + E A ++L | |
| Sbjct: | 9 | AIEGILFVRGDEGVTLEELCDLLELSTDVVYAALEELRLSYT-DEARGLRIEEVAHAFRL | 67 |
| Query: | 66 | VTKDSYMTLLRDYAKAPINQSLSRASLEVLSIIAYKQPITRIEIDDIRGVNSSGAITRLI | 125 |
| | | TK + A + + LS+A+LE L+IIAY+QPITRIE+D++RGV S AI L | |
| Sbjct: | 68 | STKPELAPYFKKLALSTLQSGLSQAALETLAIIAYRQPITRIEVDEVRGVKSEKAIQTLT | 127 |
| Query: | 126 | AFGLIKEAGKKEVLGRPNLYETTNYFLDYMGINQLDDL------IDASSIELVDEEVSLF | 179 |
| | | + LIKE G+ + GRP LY TT FLD+ G+ L +L ID SSI EE LF | |
| Sbjct: | 128 | SRLLIKEVGRAQGTGRPILYGTTPQFLDHFGLKSLKELPPLPEDIDESSI---GEEADLF | 184 |

[8436] A related DNA sequence was identified in S. pyogenes <SEQ ID 4731> which encodes the amino acid sequence <SEQ ID 4732>. Analysis of this protein sequence reveals the following:

```
Possible site: 31
>>> Seems to have no N-terminal signal sequence
----- Final Results -----
                            bacterial cytoplasm --- Certainty = 0.1062(Affirmative) < succ>
                              bacterial membrane --- Certainty = 0.0000(Not Clear) < succ>
                                bacterial outside --- Certainty = 0.0000(Not Clear) < succ>
```

[8437] An alignment of the GAS and GBS proteins is shown below.

| Identities = 130/179 (72%), Positives = 159/179 (88%) | | | |
|---|---|---|---|
| Query: | 1 | MTYLGSIEALLFVAGEDGLSLRQMAELLSLTPSALIQQLEKLAKRYEEDDDSSLLLLETA | 60 |
| | | MTYL IEALLFVAGE+GLSLR +A +LSLTP+AL QQLEKL+++YE+D SSL L+ETA | |
| Sbjct: | 1 | MTYLSQIEALLFVAGEEGLSLRHLASMLSLTPTALQQQLEKLSQKYEKDQHSSLCLIETA | 60 |
| Query: | 61 | QTYKLVTKDSYMTLLRDYAKAPINQSLSRASLEVLSIIAYKQPITRIEIDDIRGVNSSGA | 120 |
| | | TY+LVTK+ + LLR YAK P+NQSLSRASLEVLSI+AYKQPITRIEIDDIRGVNSSGA | |
| Sbjct: | 61 | NTYRLVTKEGFAELLRAYAKTPMNQSLSRASLEVLSIVAYKQPITRIEIDDIRGVNSSGA | 120 |
| Query: | 121 | ITRLIAFGLIKEAGKKEVLGRPNLYETTNYFLDYMGINQLDDLIDASSIELVDEEVSLF | 179 |
| | | +++L+AF LI+EAGKK+V+GRP+LY TT+YFLDYMGIN LD+LI+ S++E DEE++LF | |
| Sbjct: | 121 | LSKLLAFDLIREAGKKDVVGRPHLYATTDYFLDYMGINHLDELIEVSAVEPADEEIALF | 179 |

[8438] Based on this analysis, it was predicted that these proteins and their epitopes could be useful antigens for vaccines or diagnostics.

### EXAMPLE 1537

[8439] A DNA sequence (GBSx1628) was identified in S. agalactiae <SEQ ID 4733> which encodes the amino acid sequence <SEQ ID 4734>. Analysis of this protein sequence reveals the following:

```
Possible site: 47
>>> Seems to have no N-terminal signal sequence
----- Final Results -----
                            bacterial cytoplasm --- Certainty = 0.1012(Affirmative) < succ>
                              bacterial membrane --- Certainty = 0.0000(Not Clear) < succ>
                                bacterial outside --- Certainty = 0.0000(Not Clear) < succ>
```

[8440] The protein has homology with the following sequences in the GENPEPT database.

| >GP: CAB14254 GB: Z99116 similar to hypothetical proteins [Bacillus | | | |
|---|---|---|---|
| subtilis] | | | |
| Identities = 89/246 (36%), Positives = 145/246 (58%), Gaps = 19/246 (7%) | | | |
| Query: | 3 | IKLKDFEGPLDLLLHLVSKYEVDIYDVPIVEVIEQYLAYIATLQAMRLEVAGEYMLMASQ | 62 |
| | | +K+ FEGPLDLLLHL+++ E+DIYD+P+ ++ EQYL Y+ T++ + L++A EY++MA+ | |
| Sbjct: | 6 | VKIDTFEGPLDLLLHLINRLEIDIYDIPVAKITEQYLLYVHTMRVLELDIASEYLVMAAT | 65 |
| Query: | 63 | LMLIKSRNLLPK----VVESNPI-EDDPEMELLSQLEEYRRFKVLSEELANQHQERAKYF | 117 |
| | | L+ IKSR LLPK + E + E+DP EL+ +L EYR++K +++L + +ER K F | |
| Sbjct: | 66 | LLSIKSRMLLPKQEEELFEDELLEEEDPREELIEKLIEYRKYKDAAKDLKEREEERQKSF | 125 |
| Query: | 118 | SKPKQEVIFEDAILLHDKSVMDLFLTFSQMMSQKQKELSNS------QTVIEKEDYRIED | 171 |
| | | +KP ++ + +S L +T M+ QK L +T I ++D IE | |
| Sbjct: | 126 | TKPPSDL--SEYAKEVKQSEQKLSVTVYDMIGAFQKVLKRKKINRPMETTITRQDIPIEA | 183 |
| Query: | 172 | MMIVIERHFNLKKKTT---LQEVFADCQTKSEMITLFLAMLELIKLHQITVEQDSNFSQV | 228 |
| | | M I +LK + T ++F + K ++ FLA+LEL+K + +EQ+ NFS + | |
| Sbjct: | 184 | RMNEIVH--SLKSRGTRINFMDLF-PYEQKEHLVVTFLAVLELMKNQLVLIEQEHNFSDI | 240 |
| Query: | 229 | ILRKEE | 234 |
| | | + E | |
| Sbjct: | 241 | YITGSE | 246 |

[8441] A related DNA sequence was identified in S. pyogenes <SEQ ID 4735> which encodes the amino acid sequence <SEQ ID 4736>. Analysis of this protein sequence reveals the following:

| Possible site: 60 | | | | |
|---|---|---|---|---|
| >>> Seems to have no N-terminal signal sequence | | | | |
| | INTEGRAL | Likelihood = −3.61 | Transmembrane | 199-215 (199-218) |

```
----- Final Results -----
                              bacterial membrane --- Certainty = 0.2444(Affirmative) < succ>
                                bacterial outside --- Certainty = 0.0000(Not Clear) < succ>
                            bacterial cytoplasm --- Certainty = 0.0000(Not Clear) < succ>
```

[8442] The protein has homology with the following sequences in the databases:

| >GP: CAB14254 GB: Z99116 similar to hypothetical proteins [Bacillus subtilis] | | | |
|---|---|---|---|
| Identities = 86/239 (35%), Positives = 145/239 (59%), Gaps = 15/239 (6%) | | | |
| Query: | 3 | IKLKDFEGPLDLLLHLVSQYKVDIYEVPIVEVIEQYLNYIETLQVMKLEVAGDYMLMASQ | 62 |
| | | +K+ FEGPLDLLLHL+++ ++DIY++P+ ++ EQYL Y+ T++V++L++A +Y++MA+ | |
| Sbjct: | 6 | VKIDTFEGPLDLLLHLINRLEIDIYDIPVAKITEQYLLYVHTMRVLELDIASEYLVMAAT | 65 |
| Query: | 63 | LMLIKSRRLLPKVVEHI-------EEDLEQDLLEKIEEYSRFKAVSQALAKQHDQRAKWY | 115 |
| | | L+ IKSR LLPK E + EED ++L+EK+ EY ++K ++ L ++ ++R K + | |
| Sbjct: | 66 | LLSIKSRMLLPKQEEELFEDELLEEEDPREELIEKLIEYRKYKDAAKDLKEREEERQKSF | 125 |
| Query: | 116 | SKPKQELI-FEDAILQEDK----TVMDLFLAFSNIMAAKRAVLKNNHTVIERDDYKIEDM | 170 |
| | | +KP +L + + Q ++ TV D+ AF ++ K+ + + T I R D IE | |
| Sbjct: | 126 | TKPPSDLSEYAKEVKQSEQKLSVTVYDMIGAFQKVLKRKK-INRPMETTITRQDIPIEAR | 184 |
| Query: | 171 | MASIKQRLEKENV-IRLSAIFEECQTLNEVISIFLASLELIKLHVVFVEQLSNFGAIIL | 228 |
| | | M I L+ I +F Q + V++ FLA LEL+K +V +EQ NF I + | |
| Sbjct: | 185 | MNEIVHSLKSRGTRINFMDLFPYEQKEHLVVT-FLAVLELMKNQLVLIEQEHNFSDIYI | 242 |

[8443] An alignment of the GAS and GBS proteins is shown below.

| Identities = 156/235 (66%), Positives = 191/235 (80%), Gaps = 2/235 (0%) | | | |
|---|---|---|---|
| Query: | 1 | MDIKLKDFEGPLDLLLHLVSKYEVDIYDVPIVEVIEQYLAYIATLQAMRLEVAGEYMLMA | 60 |
| | | MDIKLKDFEGPLDLLLHLVS+Y+VDIY+VPIVEVIEQYL YI TLQ M+LEVAG+YMLMA | |
| Sbjct: | 1 | MDIKLKDFEGPLDLLLHLVSQYKVDIYEVPIVEVIEQYLNYIETLQVMKLEVAGDYMLMA | 60 |
| Query: | 61 | SQLMLIKSRNLLPKVVESNPIEDDPEMELLSQLEEYRRFKVLSEELANQHQERAKYFSKP | 120 |
| | | SQLMLIKSR LLPKVVE IE+D E +LL ++EEY RFK +S+ LA QH +RAK++SKP | |
| Sbjct: | 61 | SQLMLIKSRRLLPKVVEH--IEEDLEQDLLEKIEEYSRFKAVSQALAKQHDQRAKWYSKP | 118 |
| Query: | 121 | KQEVIFEDAILLHDKSVMDLFLTFSQMMSQKQKELSNSQTVIEKEDYRIEDMMIVIERHF | 180 |
| | | KQE+IFEDAIL DK+VMDLFL FS +M+ K+ L N+ TVIE++DY+IEDMM I++ | |
| Sbjct: | 119 | KQELIFEDAILQEDKTVMDLFLAFSNIMAAKRAVLKNNHTVIERDDYKIEDMMASIKQRL | 178 |
| Query: | 181 | NLKKKTTLQEVFADCQTKSEMITLFLAMLELIKLHQITVEQDSNFSQVILRKEEK | 235 |
| | | + L +F +CQT +E+I++FLA LELIKLH + VEQ SNF +ILRKE+K | |
| Sbjct: | 179 | EKENVIRLSAIFEECQTLNEVISIFLASLELIKLHVVFVEQLSNFGAIILRKEKK | 233 |

[8444] Based on this analysis, it was predicted that these proteins and their epitopes could be useful antigens for vaccines or diagnostics.

### EXAMPLE 1538

[8445] A DNA sequence (GBSx1629) was identified in S. agalactiae <SEQ ID 4737> which encodes the amino acid sequence <SEQ ID 4738>. This protein is predicted to be pXO1-18. Analysis of this protein sequence reveals the following:

| Possible site: 15 | | | | |
|---|---|---|---|---|
| >>> Seems to have no N-terminal signal sequence | | | | |
| | INTEGRAL | Likelihood = −4.14 | Transmembrane | 128-144 (127-145) |

```
----- Final Results -----
                              bacterial membrane --- Certainty = 0.2657(Affirmative) < succ>
                                bacterial outside --- Certainty = 0.0000(Not Clear) < succ>
                            bacterial cytoplasm --- Certainty = 0.0000(Not Clear) < succ>
```

[8446] The protein has homology with the following sequences in the GENPEPT database.

| >GP: BAB05248 GB: AP001512 integrase/recombinase | | | |
|---|---|---|---|
| [Bacillus halodurans] | | | |
| Identities = 67/271 (24%), Positives = 117/271 (42%), Gaps = 35/271 (12%) | | | |
| Query: | 11 | LKTMINDINNFIESKK----LSLNSRKSYHYDLKQFYKII--------GGHVNSEKLALY | 58 |
| | | ++T+ N++ F+ +K LS N+ +SY DLKQ+ + + ++ E + Y | |
| Sbjct: | 1 | METVNNNLQQFLHFQKVERGLSNNTIQSYGRDLKQYIQYVERVEEIRSARNITRETILHY | 60 |
| Query: | 59 | QQSLSEFKL--TARKRKLSAVNQFLFFLYNRGTLKEFYRL-----QETEKITLAQTKSQI | 111 |
| | | L E T+ R ++A+ F FL + + T+++ A T ++ | |
| Sbjct: | 61 | LYHLREQGRAETSIARAVAAIRSFHQFLLREKLSDSDPTVHVEIPKATKRLPKALTIEEV | 120 |
| Query: | 112 | MDLSNFYQDTDYPSGRLIALLIL--SLGLTPAEIANLKKADFDTTFNILS-IEKSQMKRI | 168 |
| | | L N Q D S R A+L L + G+ +E+ L +D + + + K +RI | |
| Sbjct: | 121 | EALLNSPQGRDPFSLRNKAMLELLYATGMRVSELIGLTLSDIHLSMGFVRCLGKGNKERI | 180 |
| Query: | 169 | LKLPEDLLPFLLESLEEDG----------DLVF-EHNGKPYSRQWFFNQLTDFLNEKN-E | 216 |
| | | + + + + +ES +G D VF H+G+P SRQ F+ L N + | |
| Sbjct: | 181 | IPIGQ-VATEAVESYLANGRGKLMKKQSHDHVFVNHHGRPLSRQGFWKMLKQLAKNVNID | 239 |
| Query: | 217 | QQLTAQLLREQFILKQKENGKTMTELSRLLG | 247 |
| | | + LT LR F ENG + + +LG | |
| Sbjct: | 240 | KPLTPHTLRHSFATHLLENGADLRAVQEMLG | 270 |

[8447] A related DNA sequence was identified in S. pyogenes <SEQ ID 4739> which encodes the amino acid sequence <SEQ ID 4740>. Analysis of this protein sequence reveals the following:

| Possible site: 20 | | | | |
|---|---|---|---|---|
| >>> Seems to have no N-terminal signal sequence | | | | |
| | INTEGRAL | Likelihood = −0.90 | Transmembrane | 111-127 (110-127) |

```
----- Final Results -----
                              bacterial membrane --- Certainty = 0.1362(Affirmative) < succ>
                                bacterial outside --- Certainty = 0.0000(Not Clear) < succ>
                            bacterial cytoplasm --- Certainty = 0.0000(Not Clear) < succ>
```

[8448] The protein has no significant homology with any sequences in the GENPEPT database.

[8449] An alignment of the GAS and GBS proteins is shown below.

| Identities = 117/243 (48%), Positives = 167/243 (68%), Gaps = 1/243 (0%) | | | |
|---|---|---|---|
| Query: | 18 | INNFIESKKLSLNSRKSYHYDLKQFYRIIGGHVNSEKLALYQQSLSEFKLTARKRKLSAV | 77 |
| | | I FI SK LS NS+F+Y YDL+QF ++IG VN +KL LYQ S++ L+A+KRKLS | |
| Sbjct: | 5 | IEPFIASKALSQNSQKAYRYDLQQFCQLIGERVNQDKLLLYQNSIANLSLSAKKRKLSTA | 64 |
| Query: | 78 | NQFLFFLYNRGTLKEFYRLQETEKITLAQTK-SQIMDLSNFYQDTDYPSGRLIALLILSL | 136 |
| | | NQFL++LY L ++RL +T K+ + + + I++ FYQ T + G+LI+LLIL L | |
| Sbjct: | 65 | NQFLYYLYQIKYLNSYFRLTDTMKVMRTEKQQAAIINTDIFYQKTPFVWGQLISLLILEL | 124 |
| Query: | 137 | GLTPAEIANLKKADFDTTFNILSIEKSQMKRILKLPEDLLPFLLESLEEDGDLVFEHNGK | 196 |
| | | GLTP+E+A ++ A+ D F +L+++ + R+L L + L+PFL + L +FEH G | |
| Sbjct: | 125 | GLTPSEVAGIEVANLDLNFQMLTLKTKKGVRVLPLSQILIPFLEQQLVGKEVYLFEHRGI | 184 |
| Query: | 197 | PYSRQWFFNQLTDFLNEKNEQQLTAQLLREQFILKQKENGKTMTELSRLLGLKTPITLER | 256 |
| | | P+SRQWFFN L F+ + LTAQ LREQFILK+K GK++ ELS +LGLK+P+TLE+ | |
| Sbjct: | 185 | PFSRQWFFNHLKTFVRSIGYEGLTAQKLREQFILKEKLAGKSIIELSDILGLKSPMTLEK | 244 |
| Query: | 257 | YYR | 259 |
| | | YY+ | |
| Sbjct: | 245 | YYK | 247 |

[8450] SEQ ID 4738 (GBS383) was expressed in E. coli as a His-fusion product. SDS-PAGE analysis of total cell extract is shown in FIG. 68 (lane 7; MW 32 kDa). It was also expressed in E. coli as a GST-fusion product. SDS-PAGE analysis of total cell extract is shown in FIG. 72 (lane 5; MW 57.1 kDa).

[8451] The GBS383-GST fusion product was purified (FIG. 212, lane 8) and used to immunise mice. The resulting antiserum was used for FACS (FIG. 308), which confirmed that the protein is immunoaccessible on GBS bacteria.

[8452] Based on this analysis, it was predicted that these proteins and their epitopes could be useful antigens for vaccines or diagnostics.

### EXAMPLE 1539

[8453] A DNA sequence (GBSx1630) was identified in S. agalactiae <SEQ ID 4741> which encodes the amino acid sequence <SEQ ID 4742>. Analysis of this protein sequence reveals the following:

```
Possible site: 21
>>> Seems to have no N-terminal signal sequence
----- Final Results -----
                            bacterial cytoplasm --- Certainty = 0.2465(Affirmative) < succ>
                              bacterial membrane --- Certainty = 0.0000(Not Clear) < succ>
                                bacterial outside --- Certainty = 0.0000(Not Clear) < succ>
```

[8454] The protein has homology with the following sequences in the GENPEPT database.

| >GP: BAB05201 GB: AP001512 unknown conserved protein in B. subtilis | | | |
|---|---|---|---|
| [Bacillus halodurans] | | | |
| Identities = 38/136 (27%), Positives = 73/136 (52%), Gaps = 1/136 (0%) | | | |
| Query: | 7 | ESFLLNHLDHYLIPAEDVAIFVDTHNADHVMLLLASNGFSRVPVITKEKKYVGTISISDI | 66 |
| | | ++ + N L +IP E VA ++ +H +L+L +G++ +PV+ + K G IS S I | |
| Sbjct: | 7 | QNIMDNDLKELVIPFEKVAHVHLSNPLEHALLVLIKSGYTAIPVLDEHSKLHGVISKSLI | 66 |
| Query: | 67 | MGYQSKGQLTDWE-MAQTDIVEMVNTKIEPINEAATLTAIMHKIVDYPFLPVISDQNDFR | 125 |
| | | + + + E +A + +++N +I I+ A+ + + + +PF+ ++ D F | |
| Sbjct: | 67 | LDALLGVERIEMERLAHLVVKDVMNPEIPTIHHKASFSRALKVSIAHPFICILDDDGSFL | 126 |
| Query: | 126 | GIITRKSILKAINSLL | 141 |
| | | GI+TR +IL IN L | |
| Sbjct: | 127 | GILTRSTILSFINRQL | 142 |

[8455] A related DNA sequence was identified in S. pyogenes <SEQ ID 4743> which encodes the amino acid sequence <SEQ ID 4744>. Analysis of this protein sequence reveals the following:

```
Possible site: 47
>>> Seems to have no N-terminal signal sequence
----- Final Results -----
                            bacterial cytoplasm --- Certainty = 0.3539(Affirmative) < succ>
                              bacterial membrane --- Certainty = 0.0000(Not Clear) < succ>
                                bacterial outside --- Certainty = 0.0000(Not Clear) < succ>
```

[8456] An alignment of the GAS and GBS proteins is shown below.

| Identities = 119/153 (77%), Positives = 137/153 (88%) | | | |
|---|---|---|---|
| Query: | 1 | MIAKEFESFLLNHLDHYLIPAEDVAIFVDTHNADHVMLLLASNGFSRVPVITKEKKYVGT | 60 |
| | | MIAKEFE+FL++HLD+YLIP +D+AIF+DTHNADHVMLLL SNGFSRVPVIT+EKKYVGT | |
| Sbjct: | 1 | MIAKEFETFLMSHLDNYLIPEQDLAIFIDTHNADHVMLLLVSNGFSRVPVITREKKYVGT | 60 |
| Query: | 61 | ISISDIMGYQSKGQLTDWEMAQTDIVEMVNTKIEPINEAATLTAIMHKIVDYPFLPVISD | 120 |
| | | ISISDIM YQSK QLTDWEM+QTDI EMVNTKIE I+ ++LT IMHK++D+PFLPV+ | |
| Sbjct: | 61 | ISISDIMMYQSKRQLTDWEMSQTDIGEMVNTKIETISITSSLTEIMHKLIDFPFLPVVDR | 120 |
| Query: | 121 | QNDFRGIITRKSILKAINSLLHDFTDEYTITPK | 153 |
| | | N F GIITRKSILKA+NSLLHDFTD+YTI K | |
| Sbjct: | 121 | ANRFVGIITRKSILKAVNSLLHDFTDDYTIIKK | 153 |

[8457] Based on this analysis, it was predicted that these proteins and their epitopes could be useful antigens for vaccines or diagnostics.

### EXAMPLE 1540

[8458] A DNA sequence (GBSx1631) was identified in S. agalactiae <SEQ ID 4745> which encodes the amino acid sequence <SEQ ID 4746>. Analysis of this protein sequence reveals the following:

```
Possible site: 14
>>> Seems to have no N-terminal signal sequence
----- Final Results -----
                            bacterial cytoplasm --- Certainty = 0.4421(Affirmative) < succ>
                              bacterial membrane --- Certainty = 0.0000(Not Clear) < succ>
                                bacterial outside --- Certainty = 0.0000(Not Clear) < succ>
```

[8459] The protein has homology with the following sequences in the GENPEPT database.

| >GP: BAB06785 GB: AP001517 unknown conserved protein [Bacillus halodurans] | | | |
|---|---|---|---|
| Identities = 55/169 (32%), Positives = 95/169 (55%), Gaps = 1/169 (0%) | | | |
| Query: | 5 | KLVVMSDSHGDRDIVKDIKNHYLGKVDAIFHNGDSELPSSDPIWEGIHVVTGNCDYDSGY | 64 |
| | | KL+++SDSHG D +K + + + +VDAI H GDSELP D EG+++V GNCD+ + | |
| Sbjct: | 2 | KLLILSDSHGWSDELKAVADKHRQEVDAIIHCGDSELPRDDRALEGMNIVRGNCDFGVDF | 61 |
| Query: | 65 | PEVLVTKIDNAVIVQTHGHLHQINFTWDKLDLLAQQEDADICLYGHLHRADAWKNGKTIF | 124 |
| | | PE + + + + THGHL+ + ++ L A++ A + +GH H A +++ +F | |
| Sbjct: | 62 | PEDFIKTVGDFNVYVTHGHLYNVKMSYVSLTYRAEEVGAQLVCFGHSHVATSFQENGIVF | 121 |
| Query: | 125 | INPGSVLQPRGPINEKLYAVVTITDSKVLVEYYTRQHQPYPNLTKELSR | 173 |
| | | +NPGS+ PR E+ Y + + D ++ + + R +L + R | |
| Sbjct: | 122 | VNPGSLRLPRNR-KEQTYCLAYVRDDQIELTFLDRDGHEVTDLQRTYLR | 169 |

[8460] A related DNA sequence was identified in S. pyogenes <SEQ ID 4747> which encodes the amino acid sequence <SEQ ID 4748>. Analysis of this protein sequence reveals the following:

```
Possible site: 14
>>> Seems to have no N-terminal signal sequence
----- Final Results -----
                            bacterial cytoplasm --- Certainty = 0.3835(Affirmative) < succ>
                              bacterial membrane --- Certainty = 0.0000(Not Clear) < succ>
                                bacterial outside --- Certainty = 0.0000(Not Clear) < succ>
```

[8461] An alignment of the GAS and GBS proteins is shown below.

| Identities = 117/173 (67%), Positives = 143/173 (82%) | | | |
|---|---|---|---|
| Query: | 1 | MAIRKLVVMSDSHGDRDIVKDIKNHYLGKVDAIFHNGDSELPSSDPIWEGIHVVTGNCDY | 60 |
| | | MA + ++VMSDSHGDRDIV+ IK+ YLG+VDAIFHNGDSEL SSDPIW GI+VV GNCDY | |
| Sbjct: | 1 | MASKTIIVMSDSHGDRDIVQAIKDKYLGQVDAIFHNGDSELNSSDPIWAGIYVVGGNCDY | 60 |
| Query: | 61 | DSGYPEVLVTKIDNAVIVQTHGHLHQINFTWDKLDLLAQQEDADICLYGHLHRADAWKNG | 120 |
| | | D+GYP+ LVT++ I QTHGHL+ INFTWDKLD AQ+ ADICLYGHLHR AW+ G | |
| Sbjct: | 61 | DTGYPDRLVTQLGTVTIAQTHGHLYHINFTWDKLDYFAQEVVADICLYGHLHRPAAWQVG | 120 |
| Query: | 121 | KTIFINPGSVLQPRGPINEKLYAVVTITDSKVLVEYYTRQHQPYPNLTKELSR | 173 |
| | | +T+F+NPGSV QPRG INEKLYA V +TD+++ V+Y+TR H+ YP+L+KE R | |
| Sbjct: | 121 | QTLFMNPGSVTQPRGEINEKLYARVELTDTQIKVDYFTRDHKLYPSLSKEFKR | 173 |

[8462] Based on this analysis, it was predicted that these proteins and their epitopes could be useful antigens for vaccines or diagnostics.

### EXAMPLE 1541

[8463] A DNA sequence (GBSx1632) was identified in S. agalactiae <SEQ ID 4749> which encodes the amino acid sequence <SEQ ID 4750>. This protein is predicted to be HAM1 family protein. Analysis of this protein sequence reveals the following:

```
Possible site: 23
>>> Seems to have no N-terminal signal sequence
----- Final Results -----
                            bacterial cytoplasm --- Certainty = 0.1218(Affirmative) < succ>
                              bacterial membrane --- Certainty = 0.0000(Not Clear) < succ>
                                bacterial outside --- Certainty = 0.0000(Not Clear) < succ>
```

[8464] The protein has homology with the following sequences in the GENPEPT database.

| >GP: CAB14796 GB: Z99118 similar to hypothetical proteins [Bacillus | | | |
|---|---|---|---|
| subtilis] | | | |
| Identities = 96/189 (50%), Positives = 130/189 (67%), Gaps = 1/189 (0%) | | | |
| Query: | 128 | LIATHNEGKTKEFRELFGKLGLKVENLNDYPDLPEVEETGMTFEENARLKAETISKLTGK | 187 |
| | | +IATHN GK KEF+E+ G V++L + E+EETG TFEENA +KAE ++K K | |
| Sbjct: | 8 | IIATHNPGKVKEFKEILEPRGYDVKSLAEIGFTEEIEETGHTFEENAIMKAEAVAKAVNK | 67 |
| Query: | 188 | MVISDDSGLKVDALGGLPGVWSARFSGPDATDARNNAKLLHELAMVFDKERRSAQFHTTL | 247 |
| | | MVI+DDSGL +D LGG PGV+SAR++G D N K+L EL + +KE+R+A+F L | |
| Sbjct: | 68 | MVIADDSGLSIDNLGGRPGVYSARYAGEQKDDQANIEKVLSELKGI-EKEQRTARFRCAL | 126 |
| Query: | 248 | VVSAPNKESLVVEAEWPGYIGTEPKGENGFGYDPLFIVGEGSRTAAELSAQEKNNLSHRG | 307 |
| | | VS P +E+ VE GYI EP+GE GFGYDP+FIV + +T AEL++ EKN +SHR | |
| Sbjct: | 127 | AVSIPGEETKTVEGHVEGYIAEEPRGEYGFGYDPIFIVKDKDKTMAELTSDEKNKISHRA | 186 |
| Query: | 308 | QAVRKLMEV | 316 |
| | | A++KL ++ | |
| Sbjct: | 187 | DALKKLSKL | 195 |

[8465] A related DNA sequence was identified in S. pyogenes <SEQ ID 4751> which encodes the amino acid sequence <SEQ ID 4752>. Analysis of this protein sequence reveals the following:

Possible site: 39
>>> Seems to have no N-terminal signal sequence
----- Final Results -----
bacterial cytoplasm --- Certainty = 0.2590 (Affirmative) < succ>
bacterial membrane --- Certainty = 0.0000 (Not Clear) < succ>
bacterial outside --- Certainty = 0.0000 (Not Clear) < succ>

[8466] An alignment of the GAS and GBS proteins is shown below.

| Identities = 214/325 (65%), Positives = 253/325 (77%), Gaps = 5/325 (1%) | | | |
|---|---|---|---|
| Query: | 1 | MTKTIFESKTEGNWFLGSFQAFNYFTCFG-NDESYEAIQDVFHRLLSTLKVE---GLQLH | 56 |
| | | M++ I+E K E NWF+G N + +G + + I D+ + +TL E G + | |
| Sbjct: | 14 | MSEKIYEYKDENNWFIGKMTGHNLISGWGVKHTTIKKIDDLLDGIAATLDWENPKGYDVS | 73 |
| Query: | 57 | VVQMTSDFQLLAFLVDMINQEYSRHIKVTQHKGAILVSEDDQLFLVHLPKEGTSLEKFFD | 116 |
| | | VV+ S L+ F++DMINQE R IKVT H G IL+ E+ +L V+LP+ G S FF | |
| Sbjct: | 74 | VVRHQSPLSLITFIIDMINQETQREIKVTPHAGTILLMENAKLLAVYLPEGGVSTATFF- | 132 |
| Query: | 117 | LKNDNNFGDTILIATHNEGKTKEFRELFGKLGLKVENLNDYPDLPEVEETGMTFEENARL | 176 |
| | | ++ FGD ILIAT NEGKTKEFR LFG+LG +VENLNDYP+LPEV ETG TFEENARL | |
| Sbjct: | 133 | ATSEQGFGDIILIATRNEGKTKEFRNLFGQLGYRVENLNDYPELPEVAETGTTFEENARL | 192 |
| Query: | 177 | KAETISKLTGKMVISDDSGLKVDALGGLPGVWSARFSGPDATDARNNAKLLHELAMVFDK | 236 |
| | | KAETIS+LTGKMV++DDSGLKVDALGGLPGVWSARFSGPDATDA+NNAKLLHELAMVFD+ | |
| Sbjct: | 193 | KAETISRLTGRMVLADDSGLKVDALGGLPGVWSARFSGPDATDAKNNAKLLHELAMVFDQ | 252 |
| Query: | 237 | ERRSAQFHTTLVVSAPNKESLVVEAEWPGYIGTEPKGENGFGYDPLFIVGEGSRTAAELS | 296 |
| | | ++RSAQFHTTLVV+APNK+SLVVEA+WPGYI T+PKGENGFGYDP+FIVGE AAEL | |
| Sbjct: | 253 | KKRSAQFHTTLVVAAPNKDSLVVEADWPGYIATQPKGENGFGYDPVFIVGETGHHAAELE | 312 |
| Query: | 297 | AQEKNNLSHRGQAVRKLMEVFPKWQ | 321 |
| | | A +KN LSHRGQAVRKLMEVFP WQ | |
| Sbjct: | 313 | ADQKNQLSHRGQAVRKLMEVFPAWQ | 337 |

[8467] Based on this analysis, it was predicted that these proteins and their epitopes could be useful antigens for vaccines or diagnostics.

### EXAMPLE 1542

[8468] A DNA sequence (GBSx1633) was identified in S. agalactiae <SEQ ID 4753> which encodes the amino acid sequence <SEQ ID 4754>. This protein is predicted to be glutamate racemase (murI). Analysis of this protein sequence reveals the following:

| Possible site: 45 | | | |
|---|---|---|---|
| >>> Seems to have no N-terminal signal sequence | | | |
| INTEGRAL | Likelihood = −1.86 | Transmembrane | 114-130 (114-130) |

----- Final Results -----
bacterial membrane --- Certainty = 0.1744 (Affirmative) < succ>
bacterial outside --- Certainty = 0.0000 (Not Clear) < succ>
bacterial cytoplasm --- Certainty = 0.0000 (Not Clear) < succ>

[8469] A related GBS nucleic acid sequence <SEQ ID 10067> which encodes amino acid sequence <SEQ ID 10068> was also identified.

[8470] The protein has homology with the following sequences in the GENPEPT database.

| >GP: AAF72713 GB: AF263927 glutamate racemase [Carnobacterium sp. St2] | | | |
|---|---|---|---|
| Identities = 160/267 (59%), Positives = 202/267 (74%), Gaps = 3/267 (1%) | | | |
| Query: | 27 | MDSRPIGFLDSGVGGLTVVKEMFRQLPEEEVIFIGDQARAPYGPRPAQQIREFTWQMVNF | 86 |
| | | M + IGF+DSGVGGLTVVKE RQLP E + ++GD AR PYGPRP Q+R+FTW+M +F | |
| Sbjct: | 1 | MKKQAIGFIDSGVGGLTVVKEAMRQLPNESIYYVGDTARCPYGPRPEDQVRKFTWEMTHF | 60 |
| Query: | 87 | LLTKNVKMIVIACNTATAVAWQEIKEKLDIPVLGVILPGASAAIKSTNLGKVGIIGTPMT | 146 |
| | | LL KN+KM+VIACNTATA A ++IK+KL IPV+GVILPG+ AAIK+T+ ++G+IGT T | |
| Sbjct: | 61 | LLDKNIKMLVIACNTATAAALKDIKKKLAIPVIGVILPGSRAAIKATHTNRIGVIGTEGT | 120 |
| Query: | 147 | VKSDAYRQKIQALSPNTAVVSLACPKFVPIVESNQMSSSLAKKVVYETLSPLVGK-LDTL | 205 |
| | | VKS+ Y++ I + V SLACPKFVP+VESN+ SS++AKKVV ETL PL + LDTL | |
| Sbjct: | 121 | VKSNQYKKMIHSKDTKALVTSLACPKFVPLVESNEYSSAIAKKVVAETLRPLKNEGLDTL | 180 |
| Query: | 206 | ILGCTHYPLLRPIIQNVMGAEVKLIDSGAETVRDISVLLNYFEINHNWQNKH-GGHHFYT | 264 |
| | | ILGCTHYPLLRPIIQN +G V LIDSGAETV ++S +L+YF + + QNK +FYT | |
| Sbjct: | 181 | ILGCTHYPLLRPIIQNTLGDSVTLIDSGAETVSEVSTILDYFNLAVDSQNKEKAERNFYT | 240 |
| Query: | 265 | TASPKGFKEIAEQWLS-QEINVERIVL | 290 |
| | | T S + F IA +WL ++ VE I L | |
| Sbjct: | 241 | TGSSQMFHAIASEWLQLDDLAVEHITL | 267 |

[8471] A related DNA sequence was identified in S. pyogenes <SEQ ID 4755> which encodes the amino acid sequence <SEQ ID 4756>. Analysis of this protein sequence reveals the following:

| Possible site: 19 | | | |
|---|---|---|---|
| >>> Seems to have an uncleavable N-term signal seq | | | |
| INTEGRAL | Likelihood = −1.70 | Transmembrane | 88-104 (86-104) |

----- Final Results -----
bacterial membrane --- Certainty = 0.1680 (Affirmative) < succ>
bacterial outside --- Certainty = 0.0000 (Not Clear) < succ>
bacterial cytoplasm --- Certainty = 0.0000 (Not Clear) < succ>

[8472] The protein has homology with the following sequences in the databases:

| >GP: AAF72713 GB: AF263927 glutamate racemase [Carnobacterium sp. St2] | | | |
|---|---|---|---|
| Identities = 149/267 (55%), Positives = 202/267 (74%), Gaps = 3/267 (1%) | | | |
| Query: | 1 | MDTRPIGFLDSGVGGLTVVCELIRQLPHEKIVYIGDSARAPYGPRPKKQIKEYTWELVNF | 60 |
| | | M + IGF+DSGVGGLTVV E +RQLP+E I Y+GD+AR PYGPRP+ Q++++TWE+ +F | |
| Sbjct: | 1 | MKKQAIGFIDSGVGGLTVVKEAMRQLPNESIYYVGDTARCPYGPRPEDQVRKFTWEMTHF | 60 |
| Query: | 61 | LLTQNVKMIVFACNTATAVAWEEVKAALDIPVLGVVLPGASAAIKSTTKGQVGVIGTPMT | 120 |
| | | LL +N+KM+V ACNTATA A +++K L IPV+GV+LPG+ AAIK+T ++GVIGT T | |
| Sbjct: | 61 | LLDKNIKMLVIACNTATAAALKDIKKKLAIPVIGVILPGSRAAIKATHTNRIGVIGTEGT | 120 |
| Query: | 121 | VASDIYRKKIQLLAPSIQVRSLACPKFVPIVESNEMCSSIAKKIVYDSLAPLVGK-IDTL | 179 |
| | | V S+ Y+K I V SLACPKFVP+VESNE S+IAKK+V ++L PL + +DTL | |
| Sbjct: | 121 | VKSNQYKKMIHSKDTKALVTSLACPKFVPLVSSNEYSSAIAKKVVAETLRPLKNEGLDTL | 180 |
| Query: | 180 | VLGCTHYPLLRPIIQNVMGPSVKLIDSGAECVRDISVLLNYFDIN-GNYHQKAVEHRFFT | 238 |
| | | +LGCTHYPLLRPIIQN +G SV LIDSGAE V ++S +L+YF++ + +++ E F+T | |
| Sbjct: | 181 | ILGCTHYPLLRPIIQNTLGDSVTLIDSGAETVSEVSTILDYFNLAVDSQNKEKAERNFYT | 240 |
| Query: | 239 | TANPEIFQEIASIWLK-QKINVEHVTL | 264 |
| | | T + ++F IAS WL+ + VEH+TL | |
| Sbjct: | 241 | TGSSQMFHAIASEWLQLDDLAVEHITL | 267 |

[8473] An alignment of the GAS and GBS proteins is shown below.

| Identities = 195/264 (73%), Positives = 231/264 (86%) | | | |
|---|---|---|---|
| Query: | 27 | MDSRPIGFLDSGVGGLTVVKEMFRQLPEEEVIFIGDQARAPYGPRPAQQIREFTWQMVNF | 86 |
| | | MD+RPIGFLDSGVGGLTVV E+ RQLP E++++IGD ARAPYGPRP +QI+E+TW++VNF | |
| Sbjct: | 1 | MDTRPIGFLDSGVGGLTVVCELIRQLPHEKIVYIGDSARAPYGPRPKKQIKEYTWELVNF | 60 |
| Query: | 87 | LLTKNVKMIVIACNTATAVAWQEIKEKLDIPVLGVILPGASAAIKSTNLGKVGIIGTPMT | 146 |
| | | LLT+NVKMIV ACNTATAVAW+E+K LDIPVLGV+LPGASAAIKST G+VG+IGTPMT | |
| Sbjct: | 61 | LLTQNVKMIVFACNTATAVAWEEVKAALDIPVLGVVLPGASAAIKSTTKGQVGVIGTPMT | 120 |
| Query: | 147 | VKSDAYRQKIQALSPNTAVVSLACPKFVPIVESNQMSSSLAKKVVYETLSPLVGKLDTLI | 206 |
| | | V SD YR+KIQ L+P+ V SLACPKFVPIVESN+M SS+AKK+VY++L+PLVGK+DTL+ | |
| Sbjct: | 121 | VASDIYRKKIQLLAPSIQVRSLACPKFVPIVESNEMCSSIAKKIVYDSLAPLVGKIDTLV | 180 |
| Query: | 207 | LGCTHYPLLRPIIQNVMGAEVKLIDSGAETVRDISVLLNYFEINHNWQNKHGGHHFYTTA | 266 |
| | | LGCTHYPLLRPIIQNVMG VKLIDSGAE VRDISVLLNYF+IN N+ K H F+TTA | |
| Sbjct: | 181 | LGCTHYPLLRPIIQNVMGPSVKLIDSGAECVRDISVLLNYFDINGNYHQKAVEHRFFTTA | 240 |
| Query: | 267 | SPKGFKEIAEQWLSQEINVERIVL | 290 |
| | | +P+ F+EIA WL Q+INVE + L | |
| Sbjct: | 241 | NPEIFQEIASIWLKQKINVEHVTL | 264 |

[8474] Based on this analysis, it was predicted that these proteins and their epitopes could be useful antigens for vaccines or diagnostics.

### EXAMPLE 1543

[8475] A DNA sequence (GBSx1634) was identified in S. agalactiae <SEQ ID 4757> which encodes the amino acid sequence <SEQ ID 4758>. Analysis of this protein sequence reveals the following:

| Possible site: 21 | | | |
|---|---|---|---|
| >>> Seems to have an uncleavable N-term signal seq | | | |
| INTEGRAL | Likelihood = −11.36 | Transmembrane | 3-19 (1-27) |

----- Final Results -----
bacterial membrane --- Certainty = 0.5543 (Affirmative) < succ>
bacterial outside --- Certainty = 0.0000 (Not Clear) < succ>
bacterial cytoplasm --- Certainty = 0.0000 (Not Clear) < succ>

[8476] The protein has homology with the following sequences in the GENPEPT database.

| >GP: CAB13675 GB: Z99113 alternate gene name: yoxG [Bacillus subtilis] | | | |
|---|---|---|---|
| Identities = 26/72 (36%), Positives = 42/72 (58%) | | | |
| Query: | 1 | MSITIWILLIIVALFGGLVGGIFIARKQIEKEIGEHPRLTPDAIREMMSQMGQKPSEAKV | 60 |
| | | M++ + IL+ +VAL G+ G FIARK + + ++P + +R MM QMG KPS+ K+ | |
| Sbjct: | 1 | MTLWVGILVGVVALLIGVALGFFIARKYMMSYLKKNPPINEQMLRMMMMQMGMKPSQKKI | 60 |
| Query: | 61 | QQTYRNIVKHAK | 72 |
| | | Q + + K | |
| Sbjct: | 61 | NQMMKAMNNQTK | 72 |

[8477] A related DNA sequence was identified in S. pyogenes <SEQ ID 4759> which encodes the amino acid sequence <SEQ ID 4760>. Analysis of this protein sequence reveals the following:

| Possible site: 15 | | | | |
|---|---|---|---|---|
| >>> Seems to have an uncleavable N-term signal seq | | | | |
| | INTEGRAL | Likelihood = −10.72 | Transmembrane | 7-23 (1-27) |

```
----- Final Results -----
                              bacterial membrane --- Certainty = 0.5288(Affirmative) < succ>
                                bacterial outside --- Certainty = 0.0000(Not Clear) < succ>
                            bacterial cytoplasm --- Certainty = 0.0000(Not Clear) < succ>
```

[8478] An alignment of the GAS and GBS proteins is shown below.

| Identities = 62/79 (78%), Positives = 69/79 (86%) | | | |
|---|---|---|---|
| Query: | 1 | MSITIWILLIIVALFGGLVGGIFIARKQIEKEIGEHPRLTPDAIREMMSQMGQKPSEAKV | 60 |
| | | MS IWILL+IVAL G+ GGIFIARKQIEKEIGEHPRLTP+AIREMMSQMGQKPSEAK+ | |
| Sbjct: | 1 | MSTAIWILLLIVALGVGVFGGIFIARKQIEKEIGEHPRLTPEAIREMMSQMGQKPSEAKI | 60 |
| Query: | 61 | QQTYRNIVKHAKTAIKTKK | 79 |
| | | QQTYRNI+K +K A+ K | |
| Sbjct: | 61 | QQTYRNIIKQSKAAVSKGK | 79 |

[8479] Based on this analysis, it was predicted that these proteins and their epitopes could be useful antigens for vaccines or diagnostics.

### EXAMPLE 1544

[8480] A DNA sequence (GBSx1635) was identified in S. agalactiae <SEQ ID 4761> which encodes the amino acid sequence <SEQ ID 4762>. Analysis of this protein sequence reveals the following:

| Possible site: 57 | | | | |
|---|---|---|---|---|
| >>> Seems to have no N-terminal signal sequence | | | | |
| | INTEGRAL | Likelihood = −7.86 | Transmembrane | 82-98 (79-103) |

```
----- Final Results -----
                              bacterial membrane --- Certainty = 0.4142(Affirmative) < succ>
                                bacterial outside --- Certainty = 0.0000(Not Clear) < succ>
                            bacterial cytoplasm --- Certainty = 0.0000(Not Clear) < succ>
```

[8481] The protein has no significant homology with any sequences in the GENPEPT database.

[8482] No corresponding DNA sequence was identified in S. pyogenes.

[8483] Based on this analysis, it was predicted that this protein and its epitopes, could be useful antigens for vaccines or diagnostics.

### EXAMPLE 1545

[8484] A DNA sequence (GBSx1636) was identified in S. agalactiae <SEQ ID 4763> which encodes the amino acid sequence <SEQ ID 4764>. Analysis of this protein sequence reveals the following:

| Possible site: 30 | | | | |
|---|---|---|---|---|
| >>> Seems to have no N-terminal signal sequence | | | | |
| | INTEGRAL | Likelihood = −10.83 | Transmembrane | 56-72 (50-105) |
| | INTEGRAL | Likelihood = −7.27 | Transmembrane | 27-43 (17-48) |
| | INTEGRAL | Likelihood = −6.26 | Transmembrane | 76-92 (73-105) |
| | INTEGRAL | Likelihood = −4.83 | Transmembrane | 119-135 (118-141) |
| | INTEGRAL | Likelihood = −1.65 | Transmembrane | 160-176 (160-176) |

```
----- Final Results -----
                              bacterial membrane --- Certainty = 0.5331(Affirmative) < succ>
                                bacterial outside --- Certainty = 0.0000(Not Clear) < succ>
                            bacterial cytoplasm --- Certainty = 0.0000(Not Clear) < succ>
```

[8485] A related GBS nucleic acid sequence <SEQ ID 8837> which encodes amino acid sequence <SEQ ID 8838> was also identified.

[8486] The protein has no significant homology with any sequences in the GENPEPT database.

[8487] A related DNA sequence was identified in S. pyogenes <SEQ ID 4765> which encodes the amino acid sequence <SEQ ID 4766>. Analysis of this protein sequence reveals the following:

| Possible site: 19 | | | | |
|---|---|---|---|---|
| >>> Seems to have a cleavable N-term signal seq. | | | | |
| | INTEGRAL | Likelihood = −10.99 | Transmembrane | 45-61 (37-94) |
| | INTEGRAL | Likelihood = −7.06 | Transmembrane | 74-90 (62-94) |
| | INTEGRAL | Likelihood = −3.45 | Transmembrane | 110-126 (108-130) |
| | INTEGRAL | Likelihood = −2.18 | Transmembrane | 149-165 (149-165) |
| | INTEGRAL | Likelihood = −1.91 | Transmembrane | 21-37 (20-37) |

```
----- Final Results -----
                              bacterial membrane --- Certainty = 0.5394(Affirmative) < succ>
                                bacterial outside --- Certainty = 0.0000(Not Clear) < succ>
                            bacterial cytoplasm --- Certainty = 0.0000(Not Clear) < succ>
```

[8488] The protein has no significant homology with any sequences in the GENPEPT database.

[8489] An alignment of the GAS and GBS proteins is shown below.

| Identities = 111/173 (64%), Positives = 145/173 (83%) | | | |
|---|---|---|---|
| Query: | 12 | MSKKTTQMVSYTSILVAFAIMIPIIMPAKIIIGPASFTLASHVPLFLSIFISVPVAILVA | 71 |
| | | M+KK TQ+++YTSILVAFAI+IPIIMP K+IIGPASFTLASHVPLFL+IF+S+PVAILVA | |
| Sbjct: | 1 | MTKKPTQLIAYTSILVAFAILIPIIMPLKLIIGPASFTLASHVPLFLAIFMSIPVAILVA | 60 |
| Query: | 72 | LGTGLGFLLAGFPIVIVLRALSHIGFALIAAFLIKSKPSLLMSKWQTLLFAVAINIIHGL | 131 |
| | | LGT LGFLLAG P++IVLRALSH+ FA++AA+ + KP L+ S + FA IN+IHGL | |
| Sbjct: | 61 | LGTTLGFLLAGLPLIIVLRALSHLLFAILAAWWLSRKPQLMTSAVKCFSFAFFINVINGL | 120 |
| Query: | 132 | LEFITVYIITMTSNSSSTYLWSLFSLIGLGSLLHGLVDFYIALFIWKWMTQKL | 184 |
| | | EF+ VYI+T T+ +S +Y WS+ LIGLGSL+HG++DFY+AL +W+++ + L | |
| Sbjct: | 121 | AEFLVVYILTATTATSMSYFWSMLGLIGLGSLIHGILDFYLALVLWRFLAKNL | 173 |

[8490] A related GBS gene <SEQ ID 10789> and protein <SEQ ID 10790> were also identified. Analysis of this protein sequence reveals the following:

| Lipop: Possible site: −1 Crend: 3 | | | | |
|---|---|---|---|---|
| SRCFLG: 0 | | | | |
| McG: Length of UR: 24 | | | | |
| Peak Value of UR: 3.16 | | | | |
| Net Charge of CR: 2 | | | | |
| McG: Discrim Score: 12.56 | | | | |
| GvH: Signal Score (−7.5): −0.16 | | | | |
| Possible site: 19 | | | | |
| >>> Seems to have a cleavable N-term signal seq. | | | | |
| Amino Acid Composition: calculated from 20 | | | | |
| ALOM program count: 5 value: −10.83 threshold: 0.0 | | | | |
| | INTEGRAL | Likelihood = −10.83 | Transmembrane | 45-61 (39-94) |
| | INTEGRAL | Likelihood = −6.26 | Transmembrane | 65-81 (62-94) |
| | INTEGRAL | Likelihood = −4.83 | Transmembrane | 108-124 (107-130) |
| | INTEGRAL | Likelihood = −1.65 | Transmembrane | 149-165 (149-165) |
| | INTEGRAL | Likelihood = −0.27 | Transmembrane | 24-40 (24-40) |
| | PERIPHERAL | Likelihood = 0.42 | 86 | |

```
modified ALOM score: 2.67
icm1 HYPID: 7 CFP: 0.533
*** Reasoning Step: 3
----- Final Results -----
                              bacterial membrane --- Certainty = 0.5331(Affirmative) < succ>
                                bacterial outside --- Certainty = 0.0000(Not Clear) < succ>
                            bacterial cytoplasm --- Certainty = 0.0000(Not Clear) < succ>
```

[8491] Based on this analysis, it was predicted that these proteins and their epitopes could be useful antigens for vaccines or diagnostics.

### EXAMPLE 1546

[8492] A DNA sequence (GBSx1637) was identified in S. agalactiae <SEQ ID 4767> which encodes the amino acid sequence <SEQ ID 4768>. This protein is predicted to be transcriptional regulator, biotin repressor family. Analysis of this protein sequence reveals the following:

```
Possible site: 27
>>> Seems to have no N-terminal signal sequence
----- Final Results -----
                            bacterial cytoplasm --- Certainty = 0.2237(Affirmative) < succ>
                              bacterial membrane --- Certainty = 0.0000(Not Clear) < succ>
                                bacterial outside --- Certainty = 0.0000(Not Clear) < succ>
```

[8493] The protein has homology with the following sequences in the GENPEPT database.

| >GP: CAB14749 GB: Z99118 yrxA [Bacillus subtilis] | | | |
|---|---|---|---|
| Identities = 72/165 (43%), Positives = 112/165 (67%), Gaps = 2/165 (1%) | | | |
| Query: | 6 | RRENILTTLKGTKEAISASTLAKIFSVSRQVIVGDIALLRAQQCDIISTPKGYL-MSSAL | 64 |
| | | RR+ +L LK +K ++ LAK +VSRQVIV DI+LL+A+ II+T +GY+ M +A | |
| Sbjct: | 12 | RRDQLLLWLKESKSPLTGGELAKKANVSRQVIVQDISLLKAKNVPIIATSQGYVYMDAAA | 71 |
| Query: | 65 | STHQFTARLV-CQHGIEQTEEELEIILRYQGIIMNVEVEHPIYGMLTAPLNIQSQKDIDN | 123 |
| | | HQ R++ C HG E+TEEEL++I+ + +V++EHP+YG LTA + + ++K++ + | |
| Sbjct: | 72 | QQHQQAERIIACLHGPERTEEELQLIVDEGVTVKDVKIEHPVYGDLTAAIQVGTRKEVSH | 131 |
| Query: | 124 | FTAKLKVSNAELLSSLTDGLHTHMISCQDQSVFDQICEALKKAGI | 168 |
| | | F K+ +NA LS LTDG+H H ++ D+ DQ C+AL++AGI | |
| Sbjct: | 132 | FIKKINSTNAAYLSQLTDGVHLHTLTAPDEHRIDQACQALEEAGI | 176 |

[8494] A related DNA sequence was identified in S. pyogenes <SEQ ID 4769> which encodes the amino acid sequence <SEQ ID 4770>. Analysis of this protein sequence reveals the following:

```
Possible site: 38
>>> Seems to have no N-terminal signal sequence
----- Final Results -----
                            bacterial cytoplasm --- Certainty = 0.2971(Affirmative) < succ>
                              bacterial membrane --- Certainty = 0.0000(Not Clear) < succ>
                                bacterial outside --- Certainty = 0.0000(Not Clear) < succ>
```

[8495] An alignment of the GAS and GBS proteins is shown below.

| Identities = 109/170 (64%), Positives = 136/170 (79%) | | | |
|---|---|---|---|
| Query: | 1 | MKAQERRENILTTLKGTKEAISASTLAKIFSVSRQVIVGDIALLRAQQCDIISTPKGYLM | 60 |
| | | MKA++RR+ I+ L ++A+SA+ L K+ VSRQVIVGDIALLRAQQ DIISTPKGY+M | |
| Sbjct: | 1 | MKAEDRRQKIIECLNSEQKAVSATRLGKLLGVSRQVIVGDIALLRAQQIDIISTPKGYIM | 60 |
| Query: | 61 | SSALSTHQFTARLVCQHGIEQTEEELEIILRYQGIIMNVEVEHPIYGMLTAPLNIQSQKD | 120 |
| | | S+AL +HQF AR+VCQH +E+T++ELEIIL +QGII VEVEHPIYGM+TAPLNI++ D | |
| Sbjct: | 61 | STALYSHQFCARIVCQHNVEETKKELEIILAHQGIITTVEVEHPIYGMITAPLNIKTHSD | 120 |
| Query: | 121 | IDNFTAKLKVSNAELLSSLTDGLHTHMISCQDQSVFDQICEALKKAGILY | 170 |
| | | + NF +KL S AELLSSLT+GLH+H+ISC Q F I L+ AGILY | |
| Sbjct: | 121 | VTNFMSKLSQSKAELLSSLTEGLHSHLISCPSQEAFLAIKHDLELAGILY | 170 |

[8496] Based on this analysis, it was predicted that these proteins and their epitopes could be useful antigens for vaccines or diagnostics.

### EXAMPLE 1547

[8497] A DNA sequence (GBSx1638) was identified in S. agalactiae <SEQ ID 4771> which encodes the amino acid sequence <SEQ ID 4772>. Analysis of this protein sequence reveals the following:

| Possible site: 37 | | | | |
|---|---|---|---|---|
| >>> Seems to have no N-terminal signal sequence | | | | |
| | INTEGRAL | Likelihood = −8.44 | Transmembrane | 143-159 (138-165) |
| | INTEGRAL | Likelihood = −8.17 | Transmembrane | 164-180 (160-184) |
| | INTEGRAL | Likelihood = −7.17 | Transmembrane | 56-72 (53-78) |
| | INTEGRAL | Likelihood = −5.63 | Transmembrane | 24-40 (21-44) |
| | INTEGRAL | Likelihood = −4.94 | Transmembrane | 113-129 (108-131) |
| | INTEGRAL | Likelihood = −2.39 | Transmembrane | 86-102 (86-103) |
| | INTEGRAL | Likelihood = −1.06 | Transmembrane | 203-219 (203-219) |

```
----- Final Results -----
                              bacterial membrane --- Certainty = 0.4376(Affirmative) < succ>
                                bacterial outside --- Certainty = 0.0000(Not Clear) < succ>
                            bacterial cytoplasm --- Certainty = 0.0000(Not Clear) < succ>
```

[8498] A related GBS nucleic acid sequence <SEQ ID 10069> which encodes amino acid sequence <SEQ ID 10070> was also identified.

[8499] The protein has homology with the following sequences in the GENPEPT database.

| >GP: AAC18360 GB: AF064763 putative membrane spanning protein | | | |
|---|---|---|---|
| [Lactococcus lactis subsp. cremoris] | | | |
| Identities = 97/188 (51%), Positives = 133/188 (70%) | | | |
| Query: | 38 | IMLYMFPQNMIAIMQKMPGLYFGAIILELVLVFVASGAARRNTPAALPLFLIYSALNGFT | 97 |
| | | IM+ F NM AI+Q I+ LV+V G A +N+ ALP+F+ Y+A GF | |
| Sbjct: | 1 | IMITFFLDNMRAILQSGSLFLLVLWIIPLVMVVSLQGLAMKNSKMALPIFIGYAAFMGFL | 60 |
| Query: | 98 | LSFIIARYTQTTVLQAFITSAAVFFAMALIGAKTKKDLSGMRKALMAALIGILIASLVNL | 157 |
| | | +SF + YT T + AFIT++A+FF +++ G TK++LSGM KAL A+ G+++A L+NL | |
| Sbjct: | 61 | ISFTLLMYTATDITLAFITASAMFFGLSVYGRFTKRNLSGMGKALGVAVWGLIVAMLLNL | 120 |
| Query: | 158 | FIGSGGMSYIISIVCVIIFSGLIAYDNQMIKYVYNSQGGQVADGWAVSMALSLYLDFINL | 217 |
| | | F S G++ +IS+V V+IFSGLIA+DNQ I VYN+ GQV+DGWA+SMALSLYLDFIN+ | |
| Sbjct: | 121 | FFASTGLTILISLVGVVIFSGLIAWDNQKITQVYNAHNGQVSDGWAISMALSLYLDFINM | 180 |
| Query: | 218 | FLNILRLF | 225 |
| | | FL +LRLF | |
| Sbjct: | 181 | FLFLLRLF | 188 |

[8500] A related DNA sequence was identified in S. pyogenes <SEQ ID 4773> which encodes the amino acid sequence <SEQ ID 4774>. Analysis of this protein sequence reveals the following:

| Possible site: 40 | | | | |
|---|---|---|---|---|
| >>> Seems to have no N-terminal signal sequence | | | | |
| | INTEGRAL | Likelihood = −8.97 | Transmembrane | 143-159 (138-165) |
| | INTEGRAL | Likelihood = −5.89 | Transmembrane | 164-180 (160-184) |
| | INTEGRAL | Likelihood = −5.68 | Transmembrane | 56-72 (55-77) |
| | INTEGRAL | Likelihood = −4.78 | Transmembrane | 113-129 (110-130) |
| | INTEGRAL | Likelihood = −2.81 | Transmembrane | 203-219 (203-222) |
| | INTEGRAL | Likelihood = −2.76 | Transmembrane | 24-40 (23-41) |
| | INTEGRAL | Likelihood = −2.76 | Transmembrane | 86-102 (86-104) |

```
----- Final Results -----
                              bacterial membrane --- Certainty = 0.4588(Affirmative) < succ>
                                bacterial outside --- Certainty = 0.0000(Not Clear) < succ>
                            bacterial cytoplasm --- Certainty = 0.0000(Not Clear) < succ>
```

[8501] The protein has homology with the following sequences in the databases:

| >GP: AAC18360 GB: AF064763 putative membrane spanning protein | | | |
|---|---|---|---|
| [Lactococcus lactis subsp. cremoris] | | | |
| Identities = 90/189 (47%), Positives = 133/189 (69%) | | | |
| Query: | 38 | LMLYPFRENLISILVNQPMIYYGAAIIELILVFVASSAARKNTPAALPIFLIYSALNGFT | 97 |
| | | +M+ F +N+ +IL + + II L++V A KN+ ALPIF+ Y+A GF | |
| Sbjct: | 1 | IMITFFLDNMRAILQSGSLFLLVLWIIPLVMVVSLQGLAMKNSKMALPIFIGYAAFMGFL | 60 |
| Query: | 98 | LSFIIVAYAQTTVFQAFLSSAAVFFAMSIIGVKTKRDMSGLRKAMFAALIGVVVASLINL | 157 |
| | | +SF ++ Y T + AF++++A+FF +S+ G TKR++SG+ KA+ A+ G++VA L+NL | |
| Sbjct: | 61 | ISFTLLMYTATDITLAFITASAMFFGLSVYGRFTKRNLSGMGKALGVAVWGLIVAMLLNL | 120 |
| Query: | 158 | FIGSGMMSYVISVISVLIFSGLIASDNQMIKRVYQATNGQVGDGWAVAMALSLYLDFINL | 217 |
| | | F S ++ +IS++ V+IFSGLIA DNQ I +VY A NGQV DGWA++MALSLYLDFIN+ | |
| Sbjct: | 121 | FFASTGLTILISLVGVVIFSGLIAWDNQKITQVYNAHNGQVSDGWAISMALSLYLDFINM | 180 |
| Query: | 218 | FISLLRIFG | 226 |
| | | F+ LLR+FG | |
| Sbjct: | 181 | FLFLLRLFG | 189 |

[8502] An alignment of the GAS and GBS proteins is shown below.

| Identities = 167/229 (72%), Positives = 202/229 (87%) | | | |
|---|---|---|---|
| Query: | 1 | MNDNVIYTQSDSGLNQFFAKIYGLVGIGVGLSAAVSAIMLYMFPQNMIAIMQKMPGLYFG | 60 |
| | | MND+VIYTQSD GLNQFFAKIY LVG+GVGLSA VS +MLY F +N+I+I+ P +Y+G | |
| Sbjct: | 1 | MNDHVIYTQSDVGLNQFFAKIYSLVGMGVGLSAFVSYLMLYPFRENLISILVNQPMIYYG | 60 |
| Query: | 61 | AIILELVLVFVASGAARRNTPAALPLFLIYSALNGFTLSFIIARYTQTTVLQAFITSAAV | 120 |
| | | A I+EL+LVFVAS AAR+NTPAALP+FLIYSALNGFTLSFII Y QTTV QAF++SAAV | |
| Sbjct: | 61 | AAIIELILVFVASSAARKNTPAALPIFLIYSALNGFTLSFIIVAYAQTTVFQAFLSSAAV | 120 |
| Query: | 121 | FFAMALIGAKTKKDLSGMRKALMAALIGILIASLVNLFIGSGGMSYIISIVCVIIFSGLI | 180 |
| | | FFAM+IG KTK+D+SG+RKA+ AALIG+++ASL+NLFIGSG MSY+IS++ V+IFSGLI | |
| Sbjct: | 121 | FFAMSIIGVKTKRDMSGLRKAMFAALIGVVVASLINLFIGSGMMSYVISVISVLIFSGLI | 180 |
| Query: | 181 | AYDNQMIKYVYNSQGGQVADGWAVSMALSLYLDFINLFLNILRLFARND | 229 |
| | | A DNQMIK VY + GQV DGWAV+MALSLYLDFINLF+++LR+F RND | |
| Sbjct: | 181 | ASDNQMIKRVYQATNGQVGDGWAVAMALSLYLDFINLFISLLRIFGRND | 229 |

[8503] Based on this analysis, it was predicted that these proteins and their epitopes could be useful antigens for vaccines or diagnostics.

### EXAMPLE 1548

[8504] A DNA sequence (GBSx1639) was identified in S. agalactiae <SEQ ID 4775> which encodes the amino acid sequence <SEQ ID 4776>. Analysis of this protein sequence reveals the following:

```
Possible site: 44
>>> Seems to have no N-terminal signal sequence
----- Final Results -----
                            bacterial cytoplasm --- Certainty = 0.2495(Affirmative) < succ>
                              bacterial membrane --- Certainty = 0.0000(Not Clear) < succ>
                                bacterial outside --- Certainty = 0.0000(Not Clear) < succ>
```

[8505] A related GBS nucleic acid sequence <SEQ ID 10071> which encodes amino acid sequence <SEQ ID 10072> was also identified.

[8506] The protein has no significant homology with any sequences in the GENPEPT database.

[8507] A related DNA sequence was identified in S. pyogenes <SEQ ID 4777> which encodes the amino acid sequence <SEQ ID 4778>. Analysis of this protein sequence reveals the following:

```
Possible site: 60
>>> Seems to have no N-terminal signal sequence
----- Final Results -----
                            bacterial cytoplasm --- Certainty = 0.3277(Affirmative) < succ>
                              bacterial membrane Certainty = 0.0000(Not Clear) < succ>
                                bacterial outside --- Certainty = 0.0000(Not Clear) < succ>
```

[8508] An alignment of the GAS and GBS proteins is shown below.

| Identities = 127/163 (77%), Positives = 141/163 (85%) | | | |
|---|---|---|---|
| Query: | 7 | YQDDKDFMDLVGHLIDHPRFQKLEAIVQHHHSTRLEHSINVSYTSYKIAKKFGWDASSTA | 66 |
| | | Y +DK++M+ VGHLI HPRFQKL IVQH HSTRLEHSINVSY+SYK+AK+FGWDA STA | |
| Sbjct: | 3 | YTEDKEYMEHVGHLIAHPRFQKLSHIVQHQHSTRLEHSINVSYSSYKLAKRFGWDAKSTA | 62 |
| Query: | 67 | RGGLLHDFFYYDWRVTKFNKSHAWVHPRIAVRNARKLTDLNAREEDIILKHMWGATIAPP | 126 |
| | | RGGLLHDFFYYDWRVTKFNK HAWVHPRIAVRNA+KLT+LN +EEDIILKHMWGATIA P | |
| Sbjct: | 63 | RGGLLHDFFYYDWRVTKFNKGHAWVHPRIAVRNAKKLTELNKKEEDIILKHMWGATIAFP | 122 |
| Query: | 127 | RYKESYIVTMVDKYWAVREASRPLKRIFKKPIRFSRKFLGSHN | 169 |
| | | RYKESYIVTMVDKYWAV+EA PL++ + RK L SHN | |
| Sbjct: | 123 | RYKESYIVTMVDKYWAVKEAVTPLRQKWSNRRFLRRKTLQSHN | 165 |

[8509] Based on this analysis, it was predicted that these proteins and their epitopes could be useful antigens for vaccines or diagnostics.

### EXAMPLE 1549

[8510] A DNA sequence (GBSx1640) was identified in S. agalactiae <SEQ ID 4779> which encodes the amino acid sequence <SEQ ID 4780>. Analysis of this protein sequence reveals the following:

| Possible site: 37 | | | | |
|---|---|---|---|---|
| >>> Seems to have no N-terminal signal sequence | | | | |
| | INTEGRAL | Likelihood = −3.03 | Transmembrane | 213-229 (212-229) |

```
----- Final Results -----
                              bacterial membrane --- Certainty = 0.2211(Affirmative) < succ>
                                bacterial outside --- Certainty = 0.0000(Not Clear) < succ>
                            bacterial cytoplasm --- Certainty = 0.0000(Not Clear) < succ>
```

[8511] A related GBS nucleic acid sequence <SEQ ID 9413> which encodes amino acid sequence <SEQ ID 9414> was also identified.

[8512] The protein has homology with the following sequences in the GENPEPT database.

| >GP: AB14825 GB: Z99118 similar to rRNA methylase [Bacillus subtilis] | | | |
|---|---|---|---|
| Identities = 96/228 (42%), Positives = 143/228 (62%), Gaps = 5/228 (2%) | | | |
| Query: | 3 | QKKYRKSSYLIEGWHLFEEAEKYGAQFLNIFVT-ETAIDR-LRKPERAIVVTDDVLKELT | 60 |
| | | +++ + +++LIEG HL EEA K I V ET I L + ++++D +T | |
| Sbjct: | 22 | KERTKTNTFLIEGEHLVEEALKSPGIVKEILVKDETRIPSDLETGIQCYMLSEDAFSAVT | 81 |
| Query: | 61 | DSQTPQGIVAEIAFQETRWTDIKKGRFLVLEDVQDPGNLGTMVRTADAANFDAVFLSQKS | 120 |
| | | +++TPQ I A E + +K L+++ VQDPGNLGTM+RTADAA DAV L + | |
| Sbjct: | 82 | ETETPQQIAAVCHMPEEKLATARK--VLLIDAVQDPGNLGTMIRTADAAGLDAVVLGDGT | 139 |
| Query: | 121 | ADLYNQKTLRSMQGSHFHLPVFRVEIEQFVNFCKAEGITMIATTLSEQSVNYKNLPKYDY | 180 |
| | | AD +N KTLRS QGSHFH+PV R + +V+ KAEG+ + T L + Y+ +P+ + | |
| Sbjct: | 140 | ADAFNGKTLRSAQGSHFHIPVVRRNLPSYVDELKAEGVKVYGTAL-QNGAPYQEIPQSES | 198 |
| Query: | 181 | FALIMGNEGQGISKTMTEEADVLAHIEMPGQAESLNVAVAAGVVIFSL | 228 |
| | | FALI+GNEG G+ + E+ D+ ++ + GQAESLNVAVAA ++++ L | |
| Sbjct: | 199 | FALIVGNEGAGVDAALLEKTDLNLYVPLYGQAESLNVAVAAAILVYHL | 246 |

[8513] A related DNA sequence was identified in S. pyogenes <SEQ ID 4781> which encodes the amino acid sequence <SEQ ID 4782>. Analysis of this protein sequence reveals the following:

| Possible site: 61 | | | |
|---|---|---|---|
| >>> Seems to have no N-terminal signal sequence | | | |
| INTEGRAL | Likelihood = −2.97 | Transmembrane | 229-245 (228-245) |

----- Final Results -----
bacterial membrane --- Certainty = 0.2190 (Affirmative) < succ>
bacterial outside --- Certainty = 0.0000 (Not Clear) < succ>
bacterial cytoplasm --- Certainty = 0.0000 (Not Clear) < succ>

[8514] An alignment of the GAS and GBS proteins is shown below.

| Identities = 141/229 (61%), Positives = 178/229 (77%) | | | |
|---|---|---|---|
| Query: | 1 | MLQKKYRKSSYLIEGWHLFEEAEKYGAQFLNIFVTETAIDRLRKPERAIVVTDDVLKELT | 60 |
| | | +LQKK+RK SYLIEGWHLFEEA+K G F +IFV E ++RL + ++V+ VLKELT | |
| Sbjct: | 17 | LLQKKHRKQSYLIEGWHLFEEAQKSGQVFRHIFVLEEMVERLAGEQELVIVSPQVLKELT | 76 |
| Query: | 61 | DSQTPQGIVAEIAFQETRWTDIKKGRFLVLEDVQDPGNLGTMVRTADAANFDAVFLSQKS | 120 |
| | | DS +PQGIVAE+ + + KG++LVLEDVQDPGNLGT++RTADAA FD VFLS+KS | |
| Sbjct: | 77 | DSPSPQGIVAEVEIPKLAFPSDYKGKYLVLEDVQDPGNLGTIIRTADAARFDGVFLSEKS | 136 |
| Query: | 121 | ADLYNQKTLRSMQGSHFHLPVFRVEIEQFVNFCKAEGITMIATTLSEQSVNYKNLPKYDY | 180 |
| | | AD+YNQKTLRSMQGSHFHLP++R ++ Q + ++ATTLS++SV+YK+L ++ | |
| Sbjct: | 137 | ADIYNQKTLRSMQGSHFHLPIWRTDVYQLCRELQEYETPILATTLSKKSVDYKSLTHHER | 196 |
| Query: | 181 | FALIMGNEGQGISKTMTEEADVLAHIEMPGQAESLNVAVAAGVVIFSLI | 229 |
| | | AL++GNEGQGIS M AD L HI MPGQAESLNVAVAAG++IFSLI | |
| Sbjct: | 197 | LALVLGNEGQGISAEMAALADQLVHITMPGQAESLNVAVAAGILIFSLI | 245 |

[8515] Based on this analysis, it was predicted that these proteins and their epitopes could be useful antigens for vaccines or diagnostics.

[8516] A related GBS gene <SEQ ID 8839> and protein <SEQ ID 8840> were also identified. Analysis of this protein sequence reveals the following:

| Lipop: Possible site: −1 Crend: 7 | | | |
|---|---|---|---|
| McG: Discrim Score: −7.98 | | | |
| GvH: Signal Score (−7.5): −3.86 | | | |
| Possible site: 37 | | | |
| >>> Seems to have no N-terminal signal sequence | | | |
| ALOM program | count: 1 | value: −3.03 | threshold: 0.0 |

| | | | |
|---|---|---|---|
| INTEGRAL | Likelihood = −3.03 | Transmembrane | 213-229 (212-229) |

| | | |
|---|---|---|
| PERIPHERAL | Likelihood = 5.14 | 149 |

modified ALOM score: 1.11
*** Reasoning Step: 3
----- Final Results -----
bacterial membrane --- Certainty = 0.2211 (Affirmative) < succ>
bacterial outside --- Certainty = 0.0000 (Not Clear) < succ>
bacterial cytoplasm --- Certainty = 0.0000 (Not Clear) < succ>

[8517] The protein has homology with the following sequences in the databases:

[chemical structure]

[8518] SEQ ID 8840 (GBS430) was expressed in E. coli as a His-fusion product. SDS-PAGE analysis of total cell extract is shown in FIG. 77 (lane 5; MW 29 kDa).

[8519] GBS430-GST was purified as shown in FIG. 220, lane 8.

### EXAMPLE 1550

[8520] A DNA sequence (GBSx1641) was identified in S. agalactiae <SEQ ID 4783> which encodes the amino acid sequence <SEQ ID 4784>. This protein is predicted to be acylphosphatase (acyP). Analysis of this protein sequence reveals the following:

Possible site: 48
>>> Seems to have an uncleavable N-term signal seq
----- Final Results -----
bacterial membrane --- Certainty = 0.0000 (Not Clear) < succ>
bacterial outside --- Certainty = 0.0000 (Not Clear) < succ>
bacterial cytoplasm --- Certainty = 0.0000 (Not Clear) < succ>

[8521] A related GBS nucleic acid sequence <SEQ ID 10073> which encodes amino acid sequence <SEQ ID 10074> was also identified.

[8522] The protein has homology with the following sequences in the GENPEPT database.

| >GP: AAD36630 GB: AE001801 acylphosphatase, putative [Thermotoga | | | |
|---|---|---|---|
| maritima] | | | |
| Identities = 35/88 (39%), Positives = 52/88 (58%), Gaps = 3/88 (3%) | | | |
| Query: | 24 | MKKVHLIVSGRVQGVGFRYATYSLALEIGDIYGRVWNNDDGTVEILAQSTDSNKMTQFIQ | 83 |
| | | MK + + V G VQGVGFRY T +A +G + G V N DDG+V I A+ D N + +F+ | |
| Sbjct: | 1 | MKALKIRVEGIVQGVGFRYFTRRVAKSLG-VKGYVMNMDDGSVFIHAEG-DENALRRFLN | 58 |
| Query: | 84 | KIRKGPSKWSKVTYVDIKLDNFDDFNDF | 111 |
| | | ++ KGP + VT V ++ + + DF | |
| Sbjct: | 59 | EVAKGPPA-AVVTNVSVEETTPEGYEDF | 85 |

[8523] A related DNA sequence was identified in S. pyogenes <SEQ ID 4785> which encodes the amino acid sequence <SEQ ID 4786>. Analysis of this protein sequence reveals the following:

Possible site: 34
>>> Seems to have no N-terminal signal sequence
----- Final Results -----
bacterial cytoplasm --- Certainty = 0.2433 (Affirmative) < succ>
bacterial membrane --- Certainty = 0.0000 (Not Clear) < succ>
bacterial outside --- Certainty = 0.0000 (Not Clear) < succ>

[8524] An alignment of the GAS and GBS proteins is shown below.

| Identities = 69/95 (72%), Positives = 85/95 (88%) | | | |
|---|---|---|---|
| Query: | 19 | KRGQVMKKVHLIVSGRVQGVGFRYATYSLALEIGDIYGRVWNNDDGTVEILAQSTDSNKM | 78 |
| | | K +M+KV LIVSGRVQGVGFRYAT++LAL+IGDIYGRVWNN+DGTVEILAQS DS+K+ | |
| Sbjct: | 7 | KEALLMQKVRLIVSGRVQGVGFRYATHTLALDIGDIYGRVWNNNDGTVEILAQSKDSDKI | 66 |
| Query: | 79 | TQFIQKIRKGPSKWSKVTYVDIKLDNFDDFNDFKM | 113 |
| | | FIQ++RKGPSKW+KVTYVD+ + NF+DF DF++ | |
| Sbjct: | 67 | ATFIQEVRKGPSKWAKVTYVDVTMANFEDFQDFQI | 101 |

[8525] Based on this analysis, it was predicted that these proteins and their epitopes could be useful antigens for vaccines or diagnostics.

### EXAMPLE 1551

[8526] A DNA sequence (GBSx1642) was identified in S. agalactiae <SEQ ID 4787> which encodes the amino acid sequence <SEQ ID 4788>. This protein is predicted to be membrane protein homolog (yidC). Analysis of this protein sequence reveals the following:

| Possible site: 16 | | | |
|---|---|---|---|
| >>> May be a lipoprotein | | | |
| INTEGRAL | Likelihood = −12.52 | Transmembrane | 60-76 (54-83) |
| INTEGRAL | Likelihood = −3.66 | Transmembrane | 178-194 (177-196) |
| INTEGRAL | Likelihood = −2.76 | Transmembrane | 140-156 (137-157) |
| INTEGRAL | Likelihood = −2.60 | Transmembrane | 216-232 (213-232) |

----- Final Results -----
bacterial membrane --- Certainty = 0.6010 (Affirmative) < succ>
bacterial outside --- Certainty = 0.0000 (Not Clear) < succ>
bacterial cytoplasm --- Certainty = 0.0000 (Not Clear) < succ>

[8527] A related OBS nucleic acid sequence <SEQ ID 10075> which encodes amino acid sequence <SEQ ID 10076> was also identified.

[8528] The protein has homology with the following sequences in the GENPEPT database.

| >GP: AAF03934 GB: AF139908 membrane protein homolog [Listeria | | | |
|---|---|---|---|
| monocytogenes] | | | |
| Identities = 82/222 (36%), Positives = 133/222 (58%), Gaps = 4/222 (1%) | | | |
| Query: | 44 | PMANLITYFAQHQGLGFGVAIIIVTVIVRVVILPLGLYQSWKASYQAEKMAYFKPLFEPI | 103 |
| | | P + I + A+ G +G+AIII T+++R +I+PL L + KMA KP + I | |
| Sbjct: | 3 | PFTSFIMFVAKFVGGNYGIAIIITTLLIRALIMPLNLRTAKAQMGMQSKMAVAKPEIDEI | 62 |
| Query: | 104 | NERLRNAKTQEEKLAAQTELMTAQRENGLSMFGGIGCLPLLIQMPFFSAIFFAARYTPGV | 163 |
| | | RL+ A ++EE+ Q E+M + ++ +GCLPLLIQMP A ++A R + + | |
| Sbjct: | 63 | QARLKRATSKEEQATIQKEMMAVYSKYNINPMQ-MGCLPLLIQMPILMAFYYAIRGSSEI | 121 |
| Query: | 164 | SSATFLGLNLGQKSLTLTVIIAILYFVQSWLSMQGVPDEQRQQMKTMMYLMPIMMVFMSI | 223 |
| | | +S TFL NLG + L +I ++Y Q ++SM G EQ++QMK + + PIM++F+S | |
| Sbjct: | 122 | ASHTFLWFNLGSPDMVLAIIAGLVYLAQYFVSMIGYSPEQKKQMKIIGLMSPIMILFVSF | 181 |
| Query: | 224 | SLPASVALYWFIGGIFSIIQQLVT--TYVLK-PKLRRKVEEE | 262 |
| | | + P+++ALYW +GG+F Q L+T Y+ K P+++ +EE | |
| Sbjct: | 182 | TAPSALALYWAVGGLFLAGQTLLTKKLYMNKHPEIKVMEQEE | 223 |

[8529] A related DNA sequence was identified in S. pyogenes <SEQ ID 4789> which encodes the amino acid sequence <SEQ ID 4790>. Analysis of this protein sequence reveals the following:

| Possible site: 31 | | | |
|---|---|---|---|
| >>> May be a lipoprotein | | | |
| INTEGRAL | Likelihood = −9.55 | Transmembrane | 62-78 (54-82) |
| INTEGRAL | Likelihood = −2.81 | Transmembrane | 178-194 (177-195) |
| INTEGRAL | Likelihood = −0.90 | Transmembrane | 216-232 (215-232) |

----- Final Results -----
bacterial membrane --- Certainty = 0.4821 (Affirmative) < succ>
bacterial outside --- Certainty = 0.0000 (Not Clear) < succ>
bacterial cytoplasm --- Certainty = 0.0000 (Not Clear) < succ>

[8530] The protein has homology with the following sequences in the databases:

| >GP: AAF03934 GB: AF139908 membrane protein homolog [Listeria monocytogenes] | | | |
|---|---|---|---|
| Identities = 89/218 (40%), Positives = 132/218 (59%), Gaps = 2/218 (0%) | | | |
| Query: | 43 | KPMSYFIDYFANNAGLGYGLAIIIVTIIVRTLILPLGLYQSWKASYQSEKMAFLKPVFEP | 102 |
| | | +P + FI + A G YG+AIII T+++R LI+PL L + KMA KP + | |
| Sbjct: | 2 | QPFTSFIMFVAKFVGGNYGIAIIITTLLIRALIMPLNLRTAKAQMGMQSKMAVAKPEIDE | 61 |
| Query: | 103 | INKRIKQANSQEEKMAAQTELMAAQRAHGINPLGGIGCLPLLIQMPFFSAMYFAAQYTKG | 162 |
| | | I R+K+A S+EE+ Q E+MA + INP+ +GCLPLLIQMP A Y+A + + | |
| Sbjct: | 62 | IQARLKRATSKEEQATIQKEMMAVYSKYNINPMQ-MGCLPLLIQMPILMAFYYAIRGSSE | 120 |
| Query: | 163 | VSTSTFMGIDLGSRSLVLTAIIAALYFFQSWLSMMAVSEEQREQMKTMMYTMPIMMIFMS | 222 |
| | | +++ TF+ +LGS +VL I +Y Q ++SM+ S EQ++QMK + PIM++F+S | |
| Sbjct: | 121 | IASHTFLWFNLGSPDMVLAIIAGLVYLAQYFVSMIGYSPEQKKQMKIIGLMSPIMILFVS | 180 |
| Query: | 223 | FSLPAGVGLYWLVGGFFSIIQQLITTYLLKPRLHKQIK | 260 |
| | | F+ P+ + LYW VGG F Q L+T L + H +IK | |
| Sbjct: | 181 | FTAPSALALYWAVGGLFLAGQTLLTKKLYMNK-HPEIK | 217 |

[8531] An alignment of the GAS and GBS proteins is shown below.

| Identities = 203/309 (65%), Positives = 254/309 (81%), Gaps = 2/309 (0%) | | | |
|---|---|---|---|
| Query: | 1 | MKKTLKRILFSSLSLSMLLLLTGCVSVDKAGKPYGVIWNTLGVPMANLITYFAQHQGLGF | 60 |
| | | +K TL RILFS L+LS+LL LTGCV D G P G+IW LG PM+ I YFA + GLG+ | |
| Sbjct: | 1 | LKLTLNRILFSGLALSILLTLTGCVGRDAHGNPKGMIWEFLGKPMSYFIDYFANNAGLGY | 60 |
| Query: | 61 | GVAIIIVTVIVRVVILPLGLYQSWKASYQAEKMAYFKPLFEPINERLRNAKTQEEKLAAQ | 120 |
| | | G+AIIIVT+IVR +ILPLGLYQSWKASYQ+EKMA+ KP+FEPIN+R++ A +QEEK+AAQ | |
| Sbjct: | 61 | GLAIIIVTIIVRTLILPLGLYQSWKASYQSEKMAFLKPVFEPINKRIKQANSQEEKMAAQ | 120 |
| Query: | 121 | TELMTAQRENGLSMFGGIGCLPLLIQMPFFSAIFFAARYTPGVSSATFLGLNLGQKSLTL | 180 |
| | | TELM AQR +G++ GGIGCLPLLIQMPFFSA++FAA+YT GVS++TF+G++LG +SL L | |
| Sbjct: | 121 | TELMAAQRAHGINPLGGIGCLPLLIQMPFFSAMYFAAQYTKGVSTSTFMGIDLGSRSLVL | 180 |
| Query: | 181 | TVIIAILYFVQSWLSMQGVPDEQRQQMKTMMYLMPIMMVFMSISLPASVALYWFIGGIFS | 240 |
| | | T IIA LYF QSWLSM V +EQR+QMKTMMY MPIMM+FMS SLPA V LYW +GG FS | |
| Sbjct: | 181 | TAIIAALYFFQSWLSMMAVSEEQREQMKTMMYTMPIMMIFMSFSLPAGVGLYWLVGGFFS | 240 |
| Query: | 241 | IIQQLVTTYVLKPKLRRKVEEEYTKNPPKAYKANNARKDVTNSTKATESNQAIITSKKTN | 300 |
| | | IIQQL+TTY+LKP+L ++++EEY KNPPKAY++ ++RKDVT S ++N + K+N | |
| Sbjct: | 241 | IIQQLITTYLLKPRLHKQIKEEYAKNPPKAYQSTSSRKDVTPSQNMEQAN--LPKKIKSN | 298 |
| Query: | 301 | RNAGKQKRR | 309 |
| | | RNAGKQ++R | |
| Sbjct: | 299 | RNAGKQRKR | 307 |

[8532] A related GBS gene <SEQ ID 8841> and protein <SEQ ID 8842> were also identified. Analysis of this protein sequence reveals the following:

| Lipop: Possible site: 23 Crend: 6 | | | |
|---|---|---|---|
| McG: Discrim Score: 8.74 | | | |
| GvH: Signal Score (−7.5): −1.47 | | | |
| Possible site: 16 | | | |
| >>> May be a lipoprotein | | | |
| ALOM program | count: 4 | value: −12.52 | threshold: 0.0 |

| | | | |
|---|---|---|---|
| INTEGRAL | Likelihood = −12.52 | Transmembrane | 60-76 (54-83) |
| INTEGRAL | Likelihood = −3.66 | Transmembrane | 178-194 (177-196) |
| INTEGRAL | Likelihood = −2.76 | Transmembrane | 140-156 (137-157) |
| INTEGRAL | Likelihood = −2.60 | Transmembrane | 216-232 (213-232) |

| | | |
|---|---|---|
| PERIPHERAL | Likelihood = 0.74 | 235 |

modified ALOM score: 3.00
*** Reasoning Step: 3
----- Final Results -----
bacterial membrane --- Certainty = 0.6010 (Affirmative) < succ>
bacterial outside --- Certainty = 0.0000 (Not Clear) < succ>
bacterial cytoplasm --- Certainty = 0.0000 (Not Clear) < succ>

[8533] The protein has homology with the following sequences in the databases:

[chemical structure]

[8534] Based on this analysis, it was predicted that these proteins and their epitopes could be useful antigens for vaccines or diagnostics.

### EXAMPLE 1552

[8535] A DNA sequence (GBSx1644) was identified in S. agalactiae <SEQ ID 4791> which encodes the amino acid sequence <SEQ ID 4792>. This protein is predicted to be amino acid ABC transporter, permease protein. Analysis of this protein sequence reveals the following:

| Possible site: 48 | | | |
|---|---|---|---|
| >>> Seems to have no N-terminal signal sequence | | | |
| INTEGRAL | Likelihood = −9.98 | Transmembrane | 32-48 (23-53) |
| INTEGRAL | Likelihood = −9.18 | Transmembrane | 195-211 (189-213) |
| INTEGRAL | Likelihood = −8.70 | Transmembrane | 72-88 (62-93) |

----- Final Results -----
bacterial membrane --- Certainty = 0.4991 (Affirmative) < succ>
bacterial outside --- Certainty = 0.0000 (Not Clear) < succ>
bacterial cytoplasm --- Certainty = 0.0000 (Not Clear) < succ>

[8536] The protein has homology with the following sequences in the GENPEPT database.

| >GP: CAB12131 GB: Z99105 similar to amino acid ABC transporter | | | |
|---|---|---|---|
| (permease) [Bacillus subtilis] | | | |
| Identities = 116/217 (53%), Positives = 168/217 (76%) | | | |
| Query: | 2 | INWDAIFNLELAVKAFPSVIQGLPYTIGLSLVGFILGAIVGFFVALMKMSHFRLLRYLAN | 61 |
| | | I W+ IFN +LA+++FP VI+G+ YT+ +S V G ++G F++L +MS LLR+ A | |
| Sbjct: | 5 | IQWEYIFNTKLAIESFPYVIKGIGYTLLISFVSMFAGTVIGLFISLARMSKLALLRWPAK | 64 |
| Query: | 62 | IHISLMRGIPLMVLLFLIYFGLPFIGIQLDAVTASIVGFTMMSSAYISEIIRAALLAVDH | 121 |
| | | ++IS MRG+P++V+LF++YFG P+IGI+ AVTA+++GF++ S+AYI+EI R+A+ +V+ | |
| Sbjct: | 65 | LYISFMRGVPILVILFILYFGFPYIGIEFSAVTAALIGFSLNSAAYIAEINRSAISSVEK | 124 |
| Query: | 122 | GQWEAARALGLKTPTIYRGIIIPQATRIALPSLSNVLLDMVKSSSLTAMITVPDIFNNAK | 181 |
| | | GQWEAA +LGL RGII+PQ+ RIALP L+NVLLD++K+SSL AMITVP++ +AK | |
| Sbjct: | 125 | GQWEAASSLGLSYWQTMRGIILPQSIRIALPPLANVLLDLIKASSLAAMITVPELLQHAK | 184 |
| Query: | 182 | IVGGTYSDYMTAYILVALIYWVICTLYAIIQDWWEKR | 218 |
| | | I+GG DYMT YIL ALIYW IC++ A+ Q+ EK+ | |
| Sbjct: | 185 | IIGGREFDYMTMYILTALIYWAICSIAAVFQNILEKK | 221 |

[8537] A related DNA sequence was identified in S. pyogenes <SEQ ID 4793> which encodes the amino acid sequence <SEQ ID 4794>. Analysis of this protein sequence reveals the following:

| Possible site: 23 | | | |
|---|---|---|---|
| >>> Seems to have an uncleavable N-term signal seq | | | |
| INTEGRAL | Likelihood = −6.79 | Transmembrane | 186-202 (184-205) |
| INTEGRAL | Likelihood = −5.84 | Transmembrane | 26-42 (21-43) |
| INTEGRAL | Likelihood = −4.78 | Transmembrane | 57-73 (56-84) |
| INTEGRAL | Likelihood = −1.59 | Transmembrane | 86-102 (86-103) |

----- Final Results -----
bacterial membrane --- Certainty = 0.3718 (Affirmative) < succ>
bacterial outside --- Certainty = 0.0000 (Not Clear) < succ>
bacterial cytoplasm --- Certainty = 0.0000 (Not Clear) < succ>

[8538] The protein has homology with the following sequences in the databases:

| >GP: CAB12131 GB: Z99105 similar to amino acid ABC transporter | | | |
|---|---|---|---|
| (permease) [Bacillus subtilis] | | | |
| Identities = 113/214 (52%), Positives = 157/214 (72%) | | | |
| Query: | 1 | MINIPLMKDSLGFVLSGLPYTLGISLLSFFTGLFLGLGLALLGRSRQPLIHYLVRAYISI | 60 |
| | | + N L +S +V+ G+ YTL IS +S F G +GL ++L S+ L+ + + YIS | |
| Sbjct: | 10 | IFNTKLAIESFPYVIKGIGYTLLISFVSMFAGTVIGLFISLARMSKLALLRWPAKLYISF | 69 |
| Query: | 61 | MRGVPMIVVLFVLYFGLPYYGLELPALLCAYLGFSMVSAAYISEVFRSSIEAIDKGQWEA | 120 |
| | | MRGVP++V+LF+LYFG PY G+E A+ A +GFS+ SAAYI+E+ RS+I +++KGQWEA | |
| Sbjct: | 70 | MRGVPILVILFILYFGFPYIGIEFSAVTAALIGFSLNSAAYIAEINRSAISSVEKGQWEA | 129 |
| Query: | 121 | AKALGLPYALMVKKIILPQAFRIAVPPLGNVIIDMVKSSSLAAMITVPDIFQNAKIIGGR | 180 |
| | | A +LGL Y ++ IILPQ+ RIA+PPL NV++D++K+SSLAAMITVP++ Q+AKIIGGR | |
| Sbjct: | 130 | ASSLGLSYWQTMRGIILPQSIRIALPPLANVLLDLIKASSLAAMITVPELLQHAKIIGGR | 189 |
| Query: | 181 | EWDYMSMYILVAFIYWLIAFLLERYQEFLENKLA | 214 |
| | | E+DYM+MYIL A IYW I + +Q LE K A | |
| Sbjct: | 190 | EFDYMTMYILTALIYWAICSIAAVFQNILEKKYA | 223 |

[8539] An alignment of the GAS and GBS proteins is shown below.

| Identities = 110/213 (51%), Positives = 156/213 (72%) | | | |
|---|---|---|---|
| Query: | 7 | IFNLELAVKAFPSVIQGLPYTIGLSLVGFILGAIVGFFVALMKMSHFRLLRYLANIHISL | 66 |
| | | + N+ L + V+ GLPYT+G+SL+ F G +G +AL+ S L+ YL +IS+ | |
| Sbjct: | 1 | MINIPLMKDSLGFVLSGLPYTLGISLLSFFTGLFLGLGLALLGRSRQPLIHYLVRAYISI | 60 |
| Query: | 67 | MRGIPLMVLLFLIYFGLPFIGIQLDAVTASIVGFTMMSSAYISEIIRAALLAVDHGQWEA | 126 |
| | | MRG+P++V+LF++YFGLP+ G++L A+ + +GF+M+S+AYISE+ R+++ A+D GQWEA | |
| Sbjct: | 61 | MRGVPMIVVLFVLYFGLPYYGLELPALLCAYLGFSMVSAAYISEVFRSSIEAIDKGQWEA | 120 |
| Query: | 127 | ARALGLKTPTIYRGIIIPQATRIALPSLSNVLLDMVKSSSLTAMITVPDIFNNAKIVGGT | 186 |
| | | A+ALGL + + II+PQA RIA+P L NV++DMVKSSSL AMITVPDIF NAKI+GG | |
| Sbjct: | 121 | AKALGLPYALMVKKIILPQAFRIAVPPLGNVIIDMVKSSSLAAMITVPDIFQNAKIIGGR | 180 |
| Query: | 187 | YSDYMTAYILVALIYWVICTLYAIIQDWWEKRL | 219 |
| | | DYM+ YILVA IYW+I L Q++ E +L | |
| Sbjct: | 181 | EWDYMSMYILVAFIYWLIAFLLERYQEFLENKL | 213 |

[8540] Based on this analysis, it was predicted that these proteins and their epitopes could be useful antigens for vaccines or diagnostics.

### EXAMPLE 1553

[8541] A DNA sequence (GBSx1645) was identified in S. agalactiae <SEQ ID 4795> which encodes the amino acid sequence <SEQ ID 4796>. Analysis of this protein sequence reveals the following:

```
Possible site: 18
>>> May be a lipoprotein
----- Final Results -----
                              bacterial membrane --- Certainty = 0.0000(Not Clear) < succ>
                                bacterial outside --- Certainty = 0.0000(Not Clear) < succ>
                            bacterial cytoplasm --- Certainty = 0.0000(Not Clear) < succ>
```

[8542] The protein has homology with the following sequences in the GENPEPT database.

| >GP: CAB12132 GB: Z99105 similar to amino acid ABC transporter | | | |
|---|---|---|---|
| (binding protein) [Bacillus subtilis] | | | |
| Identities = 127/276 (46%), Positives = 183/276 (66%), Gaps = 12/276 (4%) | | | |
| Query: | 3 | KTILLGLVGLSAMTLAACS--NGQSSKETTWDNIKKDGVLKVATPATLYPTSYYDDHK-- | 58 |
| | | K ++ + LAACS N SK+T W+ IK G + VAT TLYPTSY+D | |
| Sbjct: | 8 | KAVIFSFTMAFFLILAACSGKNEADSKDTGWEQIKDKGKIVVATSGTLYPTSYHDTDSGS | 67 |
| Query: | 59 | -KLTGYEIDMMKAIAKKLKIKVKFVEVGVAESFTSVDSGKVDVAVNNFDTTPERLKKYNF | 117 |
| | | KLTGYE+++++ AK+L +KV+F E+G+ T+V+SG+VD A N+ D T +R +K+ F | |
| Sbjct: | 68 | DKLTGYEVEVVREAAKRLGLKVEFKEMGIDGMLTAVNSGQVDAAANDIDVTKDREEKFAF | 127 |
| Query: | 118 | SQPYKYSVGGMIVRADGSSKITAKDLSDWKGKKAGGGAGTQYMKIAKQQGAEPVIYDNVT | 177 |
| | | S PYKYS G IVR D S I K L D KGKKA G A T YM++A++ GA+ VIYDN T | |
| Sbjct: | 128 | STPYKYSYGTAIVRKDDLSGI--KTLKDLKGKKAAGAATTVYMEVARKYGAKEVIYDNAT | 185 |
| Query: | 178 | NDVYLRDVSTGRTDFIPNDYYTQVIAVKYVTKQYPDIKVKM-GDVKYNPTEQGIVMSKKD | 236 |
| | | N+ YL+DV+ GRTD I NDYY Q +A+ +PD+ + + D+KY P +Q +VM K + | |
| Sbjct: | 186 | NEQYLKDVANGRTDVILNDYYLQTLAL----AAFPDLNITIHPDIKYMPNKQALVMKKSN | 241 |
| Query: | 237 | KSLKTKIDAAIKDMKKDGSLKKISEKYYAGQDLTKE | 272 |
| | | +L+ K++ A+K+M KDGSL K+S++++ D++K+ | |
| Sbjct: | 242 | AALQKKMNEALKEMSKDGSLTKLSKQFFNKADVSKK | 277 |

[8543] There is also homology to SEQ ID 1190.

[8544] SEQ ID 4796 (GBS183) was expressed in E. coli as a His-fusion product. SDS-PAGE analysis of total cell extract is shown in FIG. 26 (lane 2; MW 33 kDa).

[8545] GBS183-His was purified as shown in FIG. 199, lane 7.

[8546] Based on this analysis, it was predicted that this protein and its epitopes, could be useful antigens for vaccines or diagnostics.

### EXAMPLE 1554

[8547] A DNA sequence (GBSx1646) was identified in S. agalactiae <SEQ ID 4797> which encodes the amino acid sequence <SEQ ID 4798>. Analysis of this protein sequence reveals the following:

```
Possible site: 61
>>> Seems to have no N-terminal signal sequence
----- Final Results -----
                            bacterial cytoplasm --- Certainty = 0.1514(Affirmative) < succ>
                              bacterial membrane --- Certainty = 0.0000(Not Clear) < succ>
                                bacterial outside --- Certainty = 0.0000(Not Clear) < succ>
```

[8548] The protein has homology with the following sequences in the GENPEPT database.

| >GP: AAF09821 GB: AE001885 6-aminohexanoate-cyclic-dimer hydrolase | | | |
|---|---|---|---|
| [Deinococcus radiodurans] | | | |
| Identities = 178/488 (36%), Positives = 265/488 (53%), Gaps = 17/488 (3%) | | | |
| Query: | 5 | DATAMVQAIKQHKISSQELVEQAIYKIEEQNVSVNAVVSKQYNEARQAAKYANESNA--- | 61 |
| | | DA + Q ++ ++S++++ AI++ + NV++NAVV Y++ A+ + + A | |
| Sbjct: | 54 | DALDLAQLFRRGELSAEDMCTAAIHRAQVVNVALNAVVYPLYDQGLAQARATDAARARGE | 113 |
| Query: | 62 | ----PFAGVPILLKDLGQNQKGQLSTSGSQLFKHYHAKQTDYLVQSFEKLGFIILGRTNT | 117 |
| | | PFAGVP L+KD G G T G++ ++ + D LV+ ++ G + LG+TNT | |
| Sbjct: | 114 | QATGPFAGVPFLVKDFGSRLAGVPHTGGTRAYRDQIPEWDDELVRRWQAAGLLPLGKTNT | 173 |
| Query: | 118 | PEFGFKNISDGQLHGNVNLPFDHSRNAGGSSGGAAAAVSSGMVPIAGASDGGGSIRIPAS | 177 |
| | | PEF +++ +LHG P+D R GGSSGG+A+AV++G+VP+AGA DGGGSIRIPAS | |
| Sbjct: | 174 | PEFALMGVTEPELHGPTRNPWDLGRTPGGSSGGSASAVAAGIVPLAGAGDGGGSIRIPAS | 233 |
| Query: | 178 | FNGLIGLKPSRGRIPVGPSSYRGWQGASSHFALTKSVRDTKRLLYYLQSYQVES----PF | 233 |
| | | GL GLKPSRGR+P G WQGA+ LT+SVRD+ LL Q + P | |
| Sbjct: | 234 | CCGLFGLKPSRGRVPCGDGVGEPWQGAAVEHVLTRSVRDSAALLDLEQGPDAGAALFLPS | 293 |
| Query: | 234 | PLKKLSKESLFEFSVSKPLKIAVLMDSPLKTKVSSEAKAAIKEAADFLSQKGNHLELVEQ | 293 |
| | | P + S+E E L+I PL V E AA++ AA L G+ +E V | |
| Sbjct: | 294 | PERPYSEEVGRE---PGRLRIGFSTAHPLGRSVHPECVAAVQGAARLLESLGHEVEEVAL | 350 |
| Query: | 294 | PLDGIHSMKTYCMMNSVETAAMFDDIEKSLGRSMEFSDMELMTWAMYQSGQRVLAKDYSK | 353 |
| | | P DG + + M+ ET A + +LGR SD+E +TW + Q G+ A D++ | |
| Sbjct: | 351 | PWDGPALAQAFLMLYFGETGASLAALRDTLGRPARASDVEAVTWLLGQLGRSYSAADFAA | 410 |
| Query: | 354 | LLDSWDQFAATMARFHENYDLILTAATNQPAPFHGQFD---LDETLQKQLRHMGEFSVSE | 410 |
| | | SW+ A M RFH+NYDL+LT P G+ + L + + M + | |
| Sbjct: | 411 | ARASWNVHARAMGRFHQNYDLLLTPVLATPPLQIGELQPRGVQAALLRAAQQMDVSGLLR | 470 |
| Query: | 411 | QQDLIWKMFEDSMAWTPFTHQPNLTGQPSLAIPTHLTKEGLPLGVQLTAAKGREDLLLAV | 470 |
| | | + + + D + P+T NLTGQP++++P H T +GLP+GVQ A RED+LL + | |
| Sbjct: | 471 | RSGQVDALATDILEKMPYTQLANLTGQPAMSVPLHWTADGLPVGVQFVAPLAREDVLLRL | 530 |
| Query: | 471 | AELFEKEK | 478 |
| | | A E+ + | |
| Sbjct: | 531 | AGQLEQAR | 538 |

[8549] A related DNA sequence was identified in S. pyogenes <SEQ ID 4047> which encodes the amino acid sequence <SEQ ID 4048>. Analysis of this protein sequence reveals the following:

```
Possible site: 15
>>> Seems to have an uncleavable N-term signal seq
----- Final Results -----
                              bacterial membrane --- Certainty= 0.0000 (Not Clear) < succ>
                                bacterial outside --- Certainty = 0.0000(Not Clear) < succ>
                            bacterial cytoplasm --- Certainty = 0.0000(Not Clear) < succ>
```

[8550] An alignment of the GAS and GBS proteins is shown below.

| Identities = 277/484 (57%), Positives = 348/484 (71%), Gaps = 2/484 (0%) | | | |
|---|---|---|---|
| Query: | 1 | MVFKDATAMVQAIKQHKISSQELVEQAIYKIEEQNVSVNAVVSKQYNEARQAAKYANESN | 60 |
| | | M ++DATAM A++ + + ELV QAIYK ++ N ++NA+ S+++ A + AK + S | |
| Sbjct: | 1 | MTYQDATAMAIAVQTGQTTPLELVTQAIYKAKKLNPTLNAITSERFEAALEEAKQRDFSG | 60 |
| Query: | 61 | APFAGVPILLKDLGQNQKGQLSTSGSQLFKHYHAKQTDYLVQSFEKLGFIILGRTNTPEF | 120 |
| | | PFAGVP+ LKDLGQ KG STSGS+LFK Y A +TD V+ E LGFIILGR+NTPEF | |
| Sbjct: | 61 | LPFAGVPLFLKDLGQELKGHSSTSGSRLFKEYQATKTDLFVKRLEALGFIILGRSNTPEF | 120 |
| Query: | 121 | GFKNISDGQLHGNVNLPFDHSRNAGGSSGGAAAAVSSGMVPIAGASDGGGSIRIPASFNG | 180 |
| | | GFKNISD LHG VNLP D++RNAGGSSGGAAA VSSG+ +A ASDGGGSIRIPASFNG | |
| Sbjct: | 121 | GFKNISDSSLHGPVNLPRDNTRNAGGSSGGAAALVSSGISALATASDGGGSIRIPASFNG | 180 |
| Query: | 181 | LIGLKPSRGRIPVGPSSYRGWQGASSHFALTKSVRDTKRLLYYLQSYQVESPFPLKKLSK | 240 |
| | | LIGLKPSRGR+PVGP SYR WQGAS HFALTKSVRDT+ LLYYLQ Q+ESPFPL L+K | |
| Sbjct: | 181 | LIGLKPSRGRMPVGPGSYRSWQGASVHFALTKSVRDTRNLLYYLQMEQMESPFPLATLTK | 240 |
| Query: | 241 | ESLFEFSVSKPLKIAVLMDSPLKTKVSSEAKAAIKEAADFLSQKGNHL-ELVEQPLDGIH | 299 |
| | | +S+++ S+ +PL IA + VS + A+++A +L ++G+ L EL E P++ | |
| Sbjct: | 241 | DSIYQ-SLQRPLTIAFYQRLSDGSPVSLDTAKALRQAVTWLREQGHQLVELEEFPVNMTE | 299 |
| Query: | 300 | SMKTYCMMNSVETAAMFDDIEKSLGRSMEFSDMELMTWAMYQSGQRVLAKDYSKLLDSWD | 359 |
| | | ++ Y +MNSVETAAMF DIE + GR M DME MTWA+YQSG+ + A YS++L WD | |
| Sbjct: | 300 | VIRHYYIMNSVETAAMFADIEDTFGRPMTKDDMETMTWAIYQSGKDIPAWRYSQVLQKWD | 359 |
| Query: | 360 | QFAATMARFHENYDLILTAATNQPAPFHGQFDLDETLQKQLRHMGEFSVSEQQDLIWKMF | 419 |
| | | ++ATMA FHE YDL+LT TN PAP HG+ D L L FS EQ +L+ MF | |
| Sbjct: | 360 | TYSATMASFHETYDLLLTFTTNTPAPKHGELVPDSKLMANLAQAEIFSSEEQFNLVETMF | 419 |
| Query: | 420 | EDSMAWTPFTHQPNLTGQPSLAIPTHLTKEGLPLGVQLTAAKGREDLLLAVAELFEKEKQ | 479 |
| | | S+A P+T PNLTGQP++++PT+ TKEGL +G+QL AAKGREDLLL +AE FE | |
| Sbjct: | 420 | GKSLAINPYTALPNLTGQPAISLPTYETKEGLSMGIQLIAAKGREDLLLGIAEQFEAAGL | 479 |
| Query: | 480 | FKGP | 483 |
| | | K P | |
| Sbjct: | 480 | LKIP | 483 |

[8551] Based on this analysis, it was predicted that these proteins and their epitopes could be useful antigens for vaccines or diagnostics.

### EXAMPLE 1555

[8552] A DNA sequence (GBSx1647) was identified in S. agalactiae <SEQ ID 4799> which encodes the amino acid sequence <SEQ ID 4800>. This protein is predicted to be transcription elongation factor (greA). Analysis of this protein sequence reveals the following:

```
Possible site: 53
>>> Seems to have no N-terminal signal sequence
----- Final Results -----
                            bacterial cytoplasm --- Certainty = 0.5003(Affirmative) < succ>
                              bacterial membrane --- Certainty = 0.0000(Not Clear) < succ>
                                bacterial outside --- Certainty = 0.0000(Not Clear) < succ>
```

[8553] The protein has homology with the following sequences in the GENPEPT database.

| >GP: CAB14674 GB: Z99117 transcription elongation factor | | | |
|---|---|---|---|
| [Bacillus subtilis] | | | |
| Identities = 86/154 (55%), Positives = 114/154 (73%), Gaps = 1/154 (0%) | | | |
| Query: | 3 | EKTYPMTQVEKDQLEKELEELKLVRRPEVVERIKIARSYGDLSENSEYDAAKDEQAFVEG | 62 |
| | | EK +PMT K +LE+ELE LK V+R EVVERIKIARS+GDLSENSEYD+AK+EQAFVEG | |
| Sbjct: | 4 | EKVFPMTAEGKQKLEQELEYLKTVKRKEVVERIKIARSFGDLSENSEYDSAKEEQAFVEG | 63 |
| Query: | 63 | QIQILETKIRYAEIIDSDAVAKDEVAIGKTVLVQEVGTNDKDTYHIVGAAGADIFSGKIS | 122 |
| | | ++ LE IR A+II+ D + V +GKTV E+ D+++Y IVG+A AD F GKIS | |
| Sbjct: | 64 | RVTTLENMIRNAKIIEDDG-GSNVVGLGKTVTFVELPDGDEESYTIVGSAEADPFEGKIS | 122 |
| Query: | 123 | NESPIAHALIGKKTGDLATIESPAGSYQVEIISV | 156 |
| | | N+SPIA +L+GKK + T+++P G V+I+ + | |
| Sbjct: | 123 | NDSPIAKSLLGKKVDEEVTVQTPGGEMLVKIVKI | 156 |

[8554] A related DNA sequence was identified in S. pyogenes <SEQ ID 4801> which encodes the amino acid sequence <SEQ ID 4802>. Analysis of this protein sequence reveals the following:

```
Possible site: 27
>>> Seems to have no N-terminal signal sequence
----- Final Results -----
                            bacterial cytoplasm --- Certainty = 0.4434(Affirmative) < succ>
                              bacterial membrane --- Certainty = 0.0000(Not Clear) < succ>
                                bacterial outside --- Certainty = 0.0000(Not Clear) < succ>
```

[8555] An alignment of the GAS and GBS proteins is shown below.

| Identities = 145/160 (90%), Positives = 149/160 (92%) | | | |
|---|---|---|---|
| Query: | 1 | MAEKTYPMTQVEKDQLEKELEELKLVRRPEVVERIKIARSYGDLSENSEYDAAKDEQAFV | 60 |
| | | MAEKTYPMT EK+QLEKELEELKLVRRPE+VERIKIARSYGDLSENSEYDAAKDEQAFV | |
| Sbjct: | 17 | MAEKTYPMTLTEKEQLEKELEELKLVRRPEIVERIKIARSYGDLSENSEYDAAKDEQAFV | 76 |
| Query: | 61 | EGQIQILETKIRYAEIIDSDAVAKDEVAIGKTVLVQEVGTNDKDTYHIVGAAGADIFSGK | 120 |
| | | EGQI LETKIRYAEIIDSDAVAKDEVAIGKTV+VQEVGT DKDTYHIVGAAGADIFSGK | |
| Sbjct: | 77 | EGQISTLETKIRYAEIIDSDAVAKDEVAIGKTVIVQEVGTTDKDTYHIVGAAGADIFSGK | 136 |
| Query: | 121 | ISNESPIAHALIGKKTGDLATIESPAGSYQVEIISVEKTN | 160 |
| | | ISNESPIA ALIGKKTGD IESPA +Y VEIISVEKTN | |
| Sbjct: | 137 | ISNESPIAQALIGKKTGDKVRIESPAATYDVEIISVEKTN | 176 |

[8556] Based on this analysis, it was predicted that these proteins and their epitopes could be useful antigens for vaccines or diagnostics.

### EXAMPLE 1556

[8557] A DNA sequence (GBSx1648) was identified in S. agalactiae <SEQ ID 4803> which encodes the amino acid sequence <SEQ ID 4804>. This protein is predicted to be aminodeoxychorismate lyase-like protein. Analysis of this protein sequence reveals the following:

| Possible site: 58 | | | | |
|---|---|---|---|---|
| >>> Seems to have no N-terminal signal sequence | | | | |
| | INTEGRAL | Likelihood = −13.64 | Transmembrane | 238-254 (230-260) |

```
----- Final Results -----
                              bacterial membrane --- Certainty = 0.6456(Affirmative) < succ>
                                bacterial outside --- Certainty = 0.0000(Not Clear) < succ>
                            bacterial cytoplasm --- Certainty = 0.0000(Not Clear) < succ>
```

[8558] The protein has homology with the following sequences in the GENPEPT database.

| >GP: AAF77615 GB: AF151720 aminodeoxychorismate lyase-like protein | | | |
|---|---|---|---|
| [Streptococcus thermophilus] | | | |
| Identities = 135/210 (64%), Positives = 171/210 (81%) | | | |
| Query: | 373 | KTTSTPYKADDFLKLVQDETFIKKMVAKYPNLLGSLPDKSKAIYQLEGYLFPATYNYYKD | 432 |
| | | K +ST K DFLKL++D+ FI KM AKYP LL +LP+ + A Y LEGYLFPATYN + D | |
| Sbjct: | 5 | KHSSTGLKEKDFLKLMKDDAFITKMKAKYPTLLANLPNSTDAKYVLEGYLFPATYNIHDD | 64 |
| Query: | 433 | TTLEGLVEDMISTMNTKMAPYYNTIKAKNMSVNDVLTLSSLVEKEGSTDEDRRKIASVFY | 492 |
| | | TT+E L E+M+ TM+T ++PYY TI + N +VN++LTL+SLVEKEG+TD+DR+ IASVFY | |
| Sbjct: | 65 | TTVESLAEEMLFTMDTHLSPYYATILSSNHNVNEILTLASLVEKEGATDDDRKNIASVFY | 124 |
| Query: | 493 | NRLSAGQALQSNIAILYAMGKLGDKTSLAEDAQINTSIKSPYNIYTNTGLMPGPVDSPSI | 552 |
| | | NRL++ ALQSNIA+LY +GKLG +T+L EDA I+T+I SPYN Y + GLMPGPVDSPS+ | |
| Sbjct: | 125 | NRLNSDMALQSNIAVLYVLGKLGQETTLKEDATIDTNIDSPYNDYVHKGLMPGPVDSPSL | 184 |
| Query: | 553 | SAIEATIKPASTDYLYFVADVKTGNVYYAK | 582 |
| | | SAIEA I P+ST Y+YFVADV TGNVY+A+ | |
| Sbjct: | 185 | SAIEAVINPSSTKYMYFVADVSTGNVYFAE | 214 |

[8559] A related DNA sequence was identified in S. pyogenes <SEQ ID 4805> which encodes the amino acid sequence <SEQ ID 4806>. Analysis of this protein sequence reveals the following:

| Possible site: 59 | | | |
|---|---|---|---|
| >>> Seems to have no N-terminal signal sequence | | | |
| INTEGRAL | Likelihood = −7.91 | Transmembrane | 161-177 (155-183) |

----- Final Results -----
bacterial membrane --- Certainty = 0.4163 (Affirmative) < succ>
bacterial outside --- Certainty = 0.0000 (Not Clear) < succ>
bacterial cytoplasm --- Certainty = 0.0000 (Not Clear) < succ>

[8560] The protein has homology with the following sequences in the databases:

| >GP: AAF77615 GB: AF151720 aminodeoxychorismate lyase-like protein | | | |
|---|---|---|---|
| [Streptococcus thermophilus] | | | |
| Identities = 135/212 (63%), Positives = 161/212 (75%) | | | |
| Query: | 295 | KTKKAKTPFNEKDFLDLVTDEAFIQDMVKRYPKLLATIPTKEKAIYRLEGYLFPATYNYY | 354 |
| | | K K + T EKDFL L+ D+AFI M +YP LLA +P A Y LEGYLFPATYN + | |
| Sbjct: | 3 | KGKHSSTGLKEKDFLKLMKDDAFITKMKAKYPTLLANLPNSTDAKYVLEGYLFPATYNIH | 62 |
| Query: | 355 | KETTMRELVEDMLAAMDATLVPYYDKIAASGKTVNEVLTLASLVEKEGSTDDDRRQIASV | 414 |
| | | +TT+ L E+ML MD L PYY I +S VNE+LTLASLVEKEG+TDDDR+ IASV | |
| Sbjct: | 63 | DDTTVESLAEEMLFTMDTHLSPYYATILSSNHNVNEILTLASLVEKEGATDDDRKNIASV | 122 |
| Query: | 415 | FYNRLNSGMALQSNIAILYAMGKLGEKTTLAEDATIDTTINSPYNIYTNTGLMPGPVASS | 474 |
| | | FYNRLNS MALQSNIA+LY +GKLG++TTL EDATIDT I+SPYN Y + GLMPGPV S | |
| Sbjct: | 123 | FYNRLNSDMALQSNIAVLYVLGKLGQETTLKEDATIDTNIDSPYNDYVHKGLMPGPVDSP | 182 |
| Query: | 475 | GVSAIEATLNPASTDYLYFVANVHTGEVYYAK | 506 |
| | | +SAIEA +NP+ST Y+YFVA+V TG VY+A+ | |
| Sbjct: | 183 | SLSAIEAVINPSSTKYMYFVADVSTGNVYFAE | 214 |

[8561] An alignment of the GAS and GBS proteins is shown below.

| Identities = 310/603 (51%), Positives 403/603 (66%), Gaps = 86/603 (14%) | | | |
|---|---|---|---|
| Query: | 1 | MTEFNDDQHSNHDQKSFKEQILAELEEANRLRKLREEELYQKEQEAKEAARRTAQLMADY | 60 |
| | | +T+F D + Q+SFKEQILAELE+AN++RK +EEEL+ | |
| Sbjct: | 3 | LTDFKDKDQQDQ-QRSFKEQILAELEKANQIRKEKEEELF-------------------- | 41 |
| Query: | 61 | EAQRLKDEREARAKALETKQRLEEQEKARIEAKLLAEAAREEERRQAEQALASQEEQVIN | 120 |
| | | ++ LE +E AR A+L AE R++ A Q+E + + | |
| Sbjct: | 42 | ------------------QKELEAKEAARRTAQLYAEYKRQD---------AFQKESIAH | 74 |
| Query: | 121 | QGMEPSRELDSGSKSSEFRTTENVPDIDLKADKTDVATAVPNQETEEIFLVRATDIPTEG | 180 |
| | | +T ++ +A K V T+ + T + +E | |
| Sbjct: | 75 | NN----------------KTAKH-----FQAIKGAVMTSEALKPT----------LLSEK | 103 |
| Query: | 181 | ENVKLGEISELEPVAKEPIRVEDLSKEEEGIALSAKNKHNKRER---RQKADNVAKRIAR | 237 |
| | | EN L ++ A E +++ + +E + L+ + H+ R + RQ+ + AK+I+ | |
| Sbjct: | 104 | ENSSLKTTNKRVVQANE---LQETASKESQVPLTIEKGHSVRRKLSKRQQTERAAKKIST | 160 |
| Query: | 238 | ILISIIILVLLLTAFVGYRFVDSAIKPVDSNSNKFVQVEIPIGSGNKLIGQILEKAGVIK | 297 |
| | | +LIS II+ LL G +V SA+ PVD NS+ FVQVEIP GSGNKLIGQIL+K G+IK | |
| Sbjct: | 161 | VLISSIIITLLAVTLAGAGYVYSALNPVDKNSDAFVQVEIPSGSGNKLIGQILQKKGLIK | 220 |
| Query: | 298 | SATVFNYYSKFKNYSNFQSGYYNLKKSMTLDQIAAELEKGGTAEPTKPALGKILITEGYT | 357 |
| | | ++TVF++Y+KFKN++NFQSGYYNL+KSM+L++IA+ L++GGTAEPTKP+LGKILI EGYT | |
| Sbjct: | 221 | NSTVFSFYTKFKNFTNFQSGYYNLQKSMSLEEIASALQEGGTAEPTKPSLGKILIPEGYT | 280 |
| Query: | 358 | IKQIAKAIESN-KIDTKTTSTPYKADDFLKLVQDETFIKKMVAKYPNLLGSLPDKSKAIY | 416 |
| | | IKQIAKA+E N K TK TP+ DFL LV DE FI+ MV +YP LL ++P K KAIY | |
| Sbjct: | 281 | IKQIAKAVEHNSKGKTKKAKTPFNEKDFLDLVTDEAFIQDMVKRYPKLLATIPTKEKAIY | 340 |
| Query: | 417 | QLEGYLFPATYNYYKDTTLEGLVEDMISTMNTKMAPYYNTIKAKNMSVNDVLTLSSLVEK | 476 |
| | | +LEGYLFPATYNYYK+TT+ LVEDM++ M+ + PYY+ I A +VN+VLTL+SLVEK | |
| Sbjct: | 341 | RLEGYLFPATYNYYKETTMRELVEDMLAAMDATLVPYYDKIAASGKTVNEVLTLASLVEK | 400 |
| Query: | 477 | EGSTDEDRRKIASVFYNRLSAGQALQSNIAILYAMGKLGDKTSLAEDAQINTSIKSPYNI | 536 |
| | | EGSTD+DRR+IASVFYNRL++G ALQSNIAILYAMGKLG+KT+LAEDA I+T+I SPYNI | |
| Sbjct: | 401 | EGSTDDDRRQIASVFYNRLNSGMALQSNIAILYAMGKLGEKTTLAEDATIDTTINSPYNI | 460 |
| Query: | 537 | YTNTGLMPGPVDSPSISAIEATIKPASTDYLYFVADVKTGNVYYAKDFETHKANVEKYIN | 596 |
| | | YTNTGLMPGPV S +SAIEAT+ PASTDYLYFVA+V TG VYYAK FE H ANVEKY+N | |
| Sbjct: | 461 | YTNTGLMPGPVASSGVSAIEATLNPASTDYLYFVANVHTGEVYYAKTFEEHSANVEKYVN | 520 |
| Query: | 597 | SQI | 599 |
| | | SQI | |
| Sbjct: | 521 | SQI | 523 |

[8562] A related GBS gene <SEQ ID 8843> and protein <SEQ ID 8844> were also identified. Analysis of this protein sequence reveals the following:

| Lipop: Possible site: −1 Crend: 8 | | | |
|---|---|---|---|
| McG: Discrim Score: −17.88 | | | |
| GvH: Signal Score (−7.5): −3.51 | | | |
| Possible site: 58 | | | |
| >>> Seems to have no N-terminal signal sequence | | | |
| ALOM program | count: 1 | value: −13.64 | threshold: 0.0 |

| | | | |
|---|---|---|---|
| INTEGRAL | Likelihood = −13.64 | Transmembrane | 238-254 (230-260) |

| | | |
|---|---|---|
| PERIPHERAL | Likelihood = 5.78 | 285 |

modified ALOM score: 3.23
*** Reasoning Step: 3
----- Final Results -----
bacterial membrane --- Certainty = 0.6456 (Affirmative) < succ>
bacterial outside --- Certainty = 0.0000 (Not Clear) < succ>
bacterial cytoplasm --- Certainty = 0.0000 (Not Clear) < succ>

[8563] The protein has homology with the following sequences in the databases:

[chemical structure]

[8564] SEQ ID 8844 (GBS370) was expressed in E. coli as a His-fusion product. SDS-PAGE analysis of total cell extract is shown in FIG. 64 (lane 6; MW 70 kDa).

[8565] GBS370-His was purified as shown in FIG. 209, lane 10.

[8566] Based on this analysis, it was predicted that these proteins and their epitopes could be useful antigens for vaccines or diagnostics.

### EXAMPLE 1557

[8567] A DNA sequence (GBSx1649) was identified in S. agalactiae <SEQ ID 4807> which encodes the amino acid sequence <SEQ ID 4808>. Analysis of this protein sequence reveals the following:

Possible site: 53
>>> Seems to have no N-terminal signal sequence
----- Final Results -----
bacterial cytoplasm --- Certainty = 0.0183 (Affirmative) < succ>
bacterial membrane --- Certainty = 0.0000 (Not Clear) < succ>
bacterial outside --- Certainty = 0.0000 (Not Clear) < succ>

[8568] A related GBS nucleic acid sequence <SEQ ID 10077> which encodes amino acid sequence <SEQ ID 10078> was also identified.

[8569] The protein has homology with the following sequences in the GENPEPT database.

| >GP:CAA98889 GB: Z74367 ORF YDR071c [Saccharomyces cerevisiae] | | | |
|---|---|---|---|
| Identities = 52/174 (29%), Positives = 81/174 (45%), Gaps 18/174 (10%) | | | |
| Query: | 27 | MSMIIRNGCLEDLQQVISIEQINFSEAEAASKKAMQERLTIMTDT---FLVAEINGR--- | 80 |
| | | + M IR +EDL+Q++++E F E AS++ + RL + + EI G+ | |
| Sbjct: | 10 | LHMYIRPLIIEDLKQILNLESQGFPPNERASEEIISFRLINCPELCSGLFIREIEGKEVK | 69 |
| Query: | 81 | ---LAGYIEGPVIKGRYLTDDLFHKVSEFPVRVGGFIGITSLSIHPDFKGQGIGTALLAA | 137 |
| | | L G+I G I Y+T + K+ V IGI S+ I P+++ + + T LL | |
| Sbjct: | 70 | KETLIGHIMGTKIPHEYITIESMGKLQ---VESSNHIGIHSVVIKPEYQKKNLATLLLTD | 126 |
| Query: | 138 | MKDLVVSQE-RDGISLTCHDDLISFYEMNGFKDEGES-----DSKHGGSLWYNM | 185 |
| | | + +QE + I L H+ LI FYE GFK E+ D W +M | |
| Sbjct: | 127 | YIQKLSNQEIGNKIVLIAHEPLIPFYERVGFKIIAENTNVAKDKNFAEQKWIDM | 180 |

[8570] A related DNA sequence was identified in S. pyogenes <SEQ ID 4809> which encodes the amino acid sequence <SEQ ID 4810>. Analysis of this protein sequence reveals the following:

```
Possible site: 15
>>> Seems to have no N-terminal signal sequence
----- Final Results -----
                            bacterial cytoplasm --- Certainty = 0.2576(Affirmative) < succ>
                              bacterial membrane --- Certainty = 0.0000(Not Clear) < succ>
                                bacterial outside --- Certainty = 0.0000(Not Clear) < succ>
```

[8571] An alignment of the GAS and GBS proteins is shown below.

| Identities = 87/159 (54%), Positives = 117/159 (72%), Gaps = 1/159 (0%) | | | |
|---|---|---|---|
| Query: | 29 | MIIRNGCLEDLQQVISIEQINFSEAEAASKKAMQERLTIMTDTFLVAEINGRLAGYIEGP | 88 |
| | | M+IR DL+ + +IE NFS EA ++ ++E + ++ DTFLVA I+ + GYIEGP | |
| Sbjct: | 1 | MLIRQVQGSDLEVIATIESDNFSPQEATTRAVLEEHIRLIPDTFLVALIDQEIVGYIEGP | 60 |
| Query: | 89 | VIKGRYLTDDLFHKVSEFPVRVGGFIGITSLSIHPDFKGQGIGTALLAAMKDLVVSQERD | 148 |
| | | V+ L D LFH V++ P + GG+I ITSLSI F+ QG+GTALLAA+KDLVV+Q+R | |
| Sbjct: | 61 | VVTTPILEDSLFHGVTKNP-KTGGYIAITSLSIAKHFQQQGVGTALLAALKDLVVAQQRT | 119 |
| Query: | 149 | GISLTCHDDLISFYEMNGFKDEGESDSKHGGSLWYNMIW | 187 |
| | | G+ LTCHD LIS+YEMNGF ++G S+S+HGG+LWY MIW | |
| Sbjct: | 120 | GLILTCHDYLISYYEMNGFINQGISESQHGGTLWYQMIW | 158 |

[8572] Based on this analysis, it was predicted that these proteins and their epitopes could be useful antigens for vaccines or diagnostics.

### EXAMPLE 1558

[8573] A DNA sequence (GBSx1650) was identified in S. agalactiae <SEQ ID 4811> which encodes the amino acid sequence <SEQ ID 4812>. This protein is predicted to be udp-n-acetylmuramate—alanine ligase (murC/ddlA). Analysis of this protein sequence reveals the following:

| Possible site: 31 | | | | |
|---|---|---|---|---|
| >>> Seems to have a cleavable N-term signal seq. | | | | |
| | INTEGRAL | Likelihood = −2.60 | Transmembrane | 272-288 (270-288) |

```
----- Final Results -----
                              bacterial membrane --- Certainty = 0.2041(Affirmative) < succ>
                                bacterial outside --- Certainty = 0.0000(Not Clear) < succ>
                            bacterial cytoplasm --- Certainty = 0.0000(Not Clear) < succ>
```

[8574] The protein has homology with the following sequences in the GENPEPT database.

| >GP: AAC00294 GB: AF008220 putative UDP-N-acetylmuramate-alanine | | | |
|---|---|---|---|
| ligase [Bacillus subtilis] | | | |
| Identities = 238/432 (55%), Positives = 315/432 (72%), Gaps = 3/432 (0%) | | | |
| Query: | 5 | YHFIGIKGSGMSALALMLHQMGHNVQGSDVDKYYFTQRGLEQAGVTILPFSPNNISEDLE | 64 |
| | | YHF+GIKG+GMS LA +LH G+ VQGSD++K+ FTQ LE+ +TILPFS NI + | |
| Sbjct: | 4 | YHFVGIKGTGMSPLAQILHDNGYTVQGSDIEKFIFTQTALEKRNITILPFSAENIKPGMT | 63 |
| Query: | 65 | IIAGNAFRPDNNEELAYVIEKGYQFKRYHEFLGDFMRQFTSLGVAGAHGKTSTTGLLAHV | 124 |
| | | +IAGNAF PD + E+ + +G RYH+FLGD+M++FTS+ V GAHGKTSTTGLLAHV | |
| Sbjct: | 64 | VIAGNAF-PDTHPEIEKAMSEGIPVIRYHKFLGDYMKKFTSVAVTGAHGKTSTTGLLAHV | 122 |
| Query: | 125 | LKNITDTSFLIGDGTGRGSANANYFVFEADEYERHFMPYHPEYSIITNIDFDHPDYFTGL | 184 |
| | | ++N TSFLIGDGTG+G+ N+ YFVFEA EY RHF+ Y P+Y+I+TNIDFDHPDYF+ + | |
| Sbjct: | 123 | IQNAKPTSFLIGDGTGQGNENSEYFVFEACEYRRHFLSYQPDYAIMTNIDFDHPDYFSSI | 182 |
| Query: | 185 | EDVFNAFNDYAKQVQKGLFIYGEDPKLHEITSEAPIYYYGFEDSNDFIAKDITRTVNGSD | 244 |
| | | +DVF+AF + A QV KG+ G+D L +I + P+ YYG + NDF A++I ++ G+ | |
| Sbjct: | 183 | DDVFDAFQEMALQVNKGIIACGDDEHLPKIHANVPVVYYGTGEENDFQARNIVKSTEGTT | 242 |
| Query: | 245 | FKVFYNQEEIGQFHVPAYGKHNILNATAVIANLYIMGIDMALVAEHLKTFSGVKRRFTEK | 304 |
| | | F VF F++PAYG HN+LN+ AVIA + ID +++ LK+F GVKRRF EK | |
| Sbjct: | 243 | FDVFVRNTFYDTFYIPAYGHHNVLNSLAVIALCHYEEIDSSIIKHALKSFGGVKRRFNEK | 302 |
| Query: | 305 | IIDDTVIIDDFAHHPTEIIATLDAARQKYPSKEIVAIFQPHTFTRTIALLDEFAHALSQA | 364 |
| | | + D V+IDD+AHHPTEI T++AARQKYP +EIVA+FQPHTFTRT LDEFA +LS A | |
| Sbjct: | 303 | QLGDQVLIDDYAHHPTEIKVTIEAARQKYPDREIVAVFQPHTFTRTQQFLDEFAESLSGA | 362 |
| Query: | 365 | DSVYLAQIYGSAREVDNGEVKVEDLAAKIVKHSDLVTVENVSPLLNHDNAVYVFMGAGDI | 424 |
| | | D VYL I+GSARE + G++ + DL KI ++ L+ ++ S L HD AV +FMGAGDI | |
| Sbjct: | 363 | DCVYLCDIFGSARE-NAGKLTIGDLQGRI-HNAKLIEEDDTSVLKAHDKAVLIFMGAGDI | 420 |
| Query: | 425 | QLYERSFEELLA | 436 |
| | | Q Y R++E ++A | |
| Sbjct: | 421 | QKYMRAYENVMA | 432 |

[8575] A related DNA sequence was identified in S. pyogenes <SEQ ID 4813> which encodes the amino acid sequence <SEQ ID 4814>. Analysis of this protein sequence reveals the following:

| Possible site: 31 | | | | |
|---|---|---|---|---|
| >>> Seems to have a cleavable N-term signal seq. | | | | |
| | INTEGRAL | Likelihood = −4.57 | Transmembrane | 271-287 (269-288) |

```
----- Final Results -----
                              bacterial membrane --- Certainty = 0.2826(Affirmative) < succ>
                                bacterial outside --- Certainty = 0.0000(Not Clear) < succ>
                            bacterial cytoplasm --- Certainty = 0.0000(Not Clear) < succ>
```

[8576] The protein has homology with the following sequences in the databases:

| >GP: AAC00294 GB: AF008220 putative UDP-N-acetylmuramate-alanine | | | |
|---|---|---|---|
| ligase [Bacillus subtilis] | | | |
| Identities = 236/431 (54%), Positives = 310/431 (71%), Gaps = 2/431 (0%) | | | |
| Query: | 5 | YHFIGIKGSGMSALALMLHQMGHKVQGSDVEKYYFTQRGLEQAGITILPFSEDNITPDME | 64 |
| | | YHF+GIKG+GMS LA +LH G+ VQGSD+EK+ FTQ LE+ ITILPFS +NI P M | |
| Sbjct: | 4 | YHFVGIKGTGMSPLAQILHDNGYTVQGSDIEKFIFTQTALEKRNITILPFSAENIKPGMT | 63 |
| Query: | 65 | LIVGNAFRENNKEVAYALRHQIPFKRYHDFLGDFMKSFISFAVAGAHGKTSTTGLLSHVL | 124 |
| | | +I GNAF + + E+ A+ IP RYH FLGD+MK F S AV GAHGKTSTTGLL+HV+ | |
| Sbjct: | 64 | VIAGNAFPDTHPEIEKAMSEGIPVIRYHKFLGDYMKKFTSVAVTGAHGKTSTTGLLAHVI | 123 |
| Query: | 125 | KNITDTSYLIGDGTGRGSANAQYFVFESDEYERHFMPYHPEYSIITNIDFDHPDYFTGIA | 184 |
| | | +N TS+LIGDGTG+G+ N++YFVFE+ EY RHF+ Y P+Y+I+TNIDFDHPDYF+ I | |
| Sbjct: | 124 | QNAKPTSFLIGDGTGQGNENSEYFVFEACEYRRHFLSYQPDYAIMTNIDFDHPDYFSSID | 183 |
| Query: | 185 | DVRNAFNDYAKQVKKALFVYGEDDELKKIEAPAPIYYYGFEEGNDFIAYDITRTTNGSDF | 244 |
| | | DV +AF + A QV K + G+D+ L KI A P+ YYG E NDF A +I ++T G+ F | |
| Sbjct: | 184 | DVFDAFQEMALQVNKGIIACGDDEHLPKIHANVPVVYYGTGEENDFQARNIVKSTEGTTF | 243 |
| Query: | 245 | KVKHQGEVIGQFHVPAYGKHNILNATAVIANLFVAGIDMALVADHLKTFSGVKRRFTEKI | 304 |
| | | V + F++PAYG HN+LN+ AVIA ID +++ LK+F GVKRRF EK | |
| Sbjct: | 244 | DVFVRNTFYDTFYIPAYGHHNVLNSLAVIALCHYEEIDSSIIKHALKSFGGVKRRFNEKQ | 303 |
| Query: | 305 | INDTIIIDDFAHHPTEIVATIDAARQKYPSKEIVAIFQPHTFTRTIALLEDFACALNEAD | 364 |
| | | + D ++IDD+AHHPTEI TI+AARQKYP +EIVA+FQPHTFTRT L++FA +L+ AD | |
| Sbjct: | 304 | LGDQVLIDDYAHHPTEIKVTIEAARQKYPDREIVAVFQPHTFTRTQQFLDEFAESLSGAD | 363 |
| Query: | 365 | SVYLAQIYGSAREVDKGEVKVEDLAAKIIKPSQVVTVENVSPLLDHDNAVYVFMGAGDIQ | 424 |
| | | VYL I+GSARE + G++ + DL K I ++++ ++ S L HD AV +FMGAGDIQ | |
| Sbjct: | 364 | CVYLCDIFGSARE-NAGKLTIGDLQGK-IHNAKLIEEDDTSVLKAHDKAVLIFMGAGDIQ | 421 |
| Query: | 425 | LYEHSFEELLA | 435 |
| | | Y ++E ++A | |
| Sbjct: | 422 | KYMRAYENVMA | 432 |

[8577] An alignment of the GAS and GBS proteins is shown below.

| Identities = 369/443 (83%), Positives = 406/443 (91%), Gaps = 1/443 (0%) | | | |
|---|---|---|---|
| Query: | 1 | MSKTYHFIGIKGSGMSALALMLHQMGHNVQGSDVDKYYFTQRGLEQAGVTILPFSPNNIS | 60 |
| | | MSKTYHFIGIKGSGMSALALMLHQMGH VQGSDV+KYYFTQRGLEQAG+TILPFS +NI+ | |
| Sbjct: | 1 | MSKTYHFIGIKGSGMSALALMLHQMGHKVQGSDVEKYYFTQRGLSQAGITILPFSEDNIT | 60 |
| Query: | 61 | EDLEIIAGNAFRPDNNEELAYVIEKGYQFKRYHEFLGDFMRQFTSLGVAGAHGKTSTTGL | 120 |
| | | D+E+I GNAFR +NN+E+AY + FKRYH+FLGDFM+ F S VAGAHGKTSTTGL | |
| Sbjct: | 61 | PDMELIVGNAFR-ENNKEVAYALRHQIPFKRYHDFLGDFMKSFISFAVAGAHGKTSTTGL | 119 |
| Query: | 121 | LAHVLKNITDTSFLIGDGTGRGSANANYFVFEADEYERHFMPYHPEYSIITNIDFDHPDY | 180 |
| | | L+HVLKNITDTS+LIGDGTGRGSANA YFVFE+DEYERHFMPYHPEYSIITNIDFDHPDY | |
| Sbjct: | 120 | LSHVLKNITDTSYLIGDGTGRGSANAQYFVFESDEYERHFMPYHPEYSIITNIDFDHPDY | 179 |
| Query: | 181 | FTGLEDVFNAFNDYAKQVQKGLFIYGEDPKLHEITSEAPIYYYGFEDSNDFIAKDITRTV | 240 |
| | | FTG+ DV NAFNDYAKQV+K LF+YGED +L +I + APIYYYGFE+ NDFIA DITRT | |
| Sbjct: | 180 | FTGIADVRNAFNDYAKQVKKALFVYGEDDELKKIEAPAPIYYYGFEEGNDFIAYDITRTT | 239 |
| Query: | 241 | NGSDFKVFYNQEEIGQFHVPAYGKHNILNATAVIANLYIMGIDMALVAEHLKTFSGVKRR | 300 |
| | | NGSDFKV + E IGQFHVPAYGKHNILNATAVIANL++ GIDMALVA+HLKTFSGVKRR | |
| Sbjct: | 240 | NGSDFKVKHQGEVIGQFHVPAYGKHNILNATAVIANLFVAGIDMALVADHLKTFSGVKRR | 299 |
| Query: | 301 | FTEKIIDDTVIIDDFAHHPTEIIATLDAARQKYPSKEIVAIFQPHTFTRTIALLDEFAHA | 360 |
| | | FTEKII+DT+IIDDFAHHPTEI+AT+DAARQKYPSKEIVAIFQPHTFTRTIALL++FA A | |
| Sbjct: | 300 | FTEKIINDTIIIDDFAHHPTEIVATIDAARQKYPSKEIVAIFQPHTFTRTIALLEDFACA | 359 |
| Query: | 361 | LSQADSVYLAQIYGSAREVDNGEVKVEDLAAKIVKHSDLVTVENVSPLLNHDNAVYVFMG | 420 |
| | | L++ADSVYLAQIYGSAREVD GEVKVEDLAAKI+K S +VTVENVSPLL+HDNAVYVFMG | |
| Sbjct: | 360 | LNEADSVYLAQIYGSAREVDKGEVKVEDLAAKIIKPSQVVTVENVSPLLDHDNAVYVFMG | 419 |
| Query: | 421 | AGDIQLYERSFEELLANLTKNTQ | 443 |
| | | AGDIQLYE SFEELLANLTKN Q | |
| Sbjct: | 420 | AGDIQLYEHSFEELLANLTKNNQ | 442 |

[8578] SEQ ID 4812 (GBS157) was expressed in E. coli as a His-fusion product. SDS-PAGE analysis of total cell extract is shown in FIG. 24 (lane 11; MW 49 kDa). It was also expressed in E. coli as a GST-fusion product. SDS-PAGE analysis of total cell extract is shown in FIG. 31 (lane 8; MW 74 kDa), FIG. 33 (lane 8; MW 74 kDa) and FIG. 37 (lane 3; MW 74 kDa).

[8579] The GBS157-GST fusion product was purified (FIG. 112A; see also FIG. 200, lane 3) and used to immunise mice (lane 1+2 product; 19.5 μg/mouse). The resulting antiserum was used for Western blot (FIG. 112B), FACS, and in the in vivo passive protection assay (Table III). These tests confirm that the protein is immunoaccessible on GBS bacteria and that it is an effective protective immunogen.

[8580] SEQ ID 4812 (GBS157) was expressed in E. coli as a GST-fusion product. SDS-PAGE analysis of total cell extract is shown in FIG. 183 (lane 11-13; MW 74 kDa).

[8581] Based on this analysis, it was predicted that these proteins and their epitopes could be useful antigens for vaccines or diagnostics.

### EXAMPLE 1559

[8582] A DNA sequence (GBSx1651) was identified in S. agalactiae <SEQ ID 4815> which encodes the amino acid sequence <SEQ ID 4816>. Analysis of this protein sequence reveals the following:

```
Possible site: 19
>>> Seems to have no N-terminal signal sequence
----- Final Results -----
                            bacterial cytoplasm --- Certainty = 0.1980(Affirmative) < succ>
                              bacterial membrane --- Certainty = 0.0000(Not Clear) < succ>
                                bacterial outside --- Certainty = 0.0000(Not Clear) < succ>
```

[8583] The protein has no significant homology with any sequences in the GENPEPT database.

[8584] A related DNA sequence was identified in S. pyogenes <SEQ ID 4817> which encodes the amino acid sequence <SEQ ID 4818>. Analysis of this protein sequence reveals the following:

```
Possible site: 25
>>> Seems to have no N-terminal signal sequence
----- Final Results -----
                            bacterial cytoplasm --- Certainty = 0.2731(Affirmative) < succ>
                              bacterial membrane --- Certainty = 0.0000(Not Clear) < succ>
                                bacterial outside --- Certainty = 0.0000(Not Clear) < succ>
```

[8585] An alignment of the GAS and GBS proteins is shown below.

| Identities = 80/201 (39%), Positives = 126/201 (61%), Gaps = 9/201 (4%) | | | |
|---|---|---|---|
| Query: | 7 | RFPLIADDEPVMSPLVKMNLYDNEDLINNIRDFYQEKTYQSMVKSNYEHEEISHPKVIEN | 66 |
| | | +FPL+AD + P +M LY+NEDLI NIR +YQ+K Y + ++ EE + | |
| Sbjct: | 5 | QFPLVADGIAISDPAKQMALYENEDLITNIRGYYQDKEYDDIARN----EEFTAKATSRQ | 60 |
| Query: | 67 | DPVPPQ--SFVKKATELSKSRQEAKRSVREKRQAYYAKQEFKAPSKEAFQQQLKATVPKK | 124 |
| | | P + S +K + ++RQ+AK+ ++EKRQAY AK+ P + + +QQ + P + | |
| Sbjct: | 61 | TPSSKRFCSNDEKHHYVKEARQKAKQDLKEKRQAYLAKEMAYVPKQVSKKQQPADSSPSQ | 120 |
| Query: | 125 | QTQRKVTELSHLSDRLQQESYILAEIPIIFQEPDNTPNP-KTKKNNFDFLKRSQVYNKQD | 183 |
| | | + + TE+S + +L Q++YILAE+P ++EP N P TKKNN+DFLK SQ+YN ++ | |
| Sbjct: | 121 | K--QATTEMSRFTKKLHQDNYILAELPKEYKEPKNLPQQGTTKKNNYDFLKSSQIYNNKE | 178 |
| Query: | 184 | NQFHKERAKAQELNLTRFKDI | 204 |
| | | + +E+ AQELNL+RF+D+ | |
| Sbjct: | 179 | MRQQREKTIAQELNLSRFEDL | 199 |

[8586] Based on this analysis, it was predicted that these proteins and their epitopes could be useful antigens for vaccines or diagnostics.

### EXAMPLE 1560

[8587] A DNA sequence (GBSx1652) was identified in S. agalactiae <SEQ ID 4819> which encodes the amino acid sequence <SEQ ID 4820>. Analysis of this protein sequence reveals the following:

```
Possible site: 29
>>> Seems to have no N-terminal signal sequence
----- Final Results -----
                            bacterial cytoplasm --- Certainty = 0.4959(Affirmative) < succ>
                              bacterial membrane --- Certainty = 0.0000(Not Clear) < succ>
                                bacterial outside --- Certainty = 0.0000(Not Clear) < succ>
```

[8588] The protein has no significant homology with any sequences in the GENPEPT database.

[8589] No corresponding DNA sequence was identified in S. pyogenes.

[8590] Based on this analysis, it was predicted that this protein and its epitopes, could be useful antigens for vaccines or diagnostics.

### EXAMPLE 1561

[8591] A DNA sequence (GBSx1653) was identified in S. agalactiae <SEQ ID 4821> which encodes the amino acid sequence <SEQ ID 4822>. This protein is predicted to be SNF. Analysis of this protein sequence reveals the following:

| Possible site: 28 | | | | |
|---|---|---|---|---|
| >>> Seems to have no N-terminal signal sequence | | | | |
| | INTEGRAL | Likelihood = −0.32 | Transmembrane | 743-759 (743-759) |

```
----- Final Results -----
                              bacterial membrane --- Certainty = 0.1128(Affirmative) < succ>
                                bacterial outside --- Certainty = 0.0000(Not Clear) < succ>
                            bacterial cytoplasm --- Certainty = 0.0000(Not Clear) < succ>
```

[8592] The protein has homology with the following sequences in the GENPEPT database.

| >GP: CAA67095 GB: X98455 SNF [Bacillus cereus] | | | |
|---|---|---|---|
| Identities = 259/678 (38%), Positives = 406/678 (59%), Gaps = 21/678 (3%) | | | |
| Query: | 369 | QNEILLQMVFDYGNDLTVHNRQELEQLTFASHFKHEEKVFKLLEKYGFAPHFSTSHPAYS | 428 |
| | | +N +L + F YGN + ++ + F K E+++ ++ + FA + ++ | |
| Sbjct: | 388 | KNRLLAGLEFHYGNVVINPLEEDGQPSVFNRDEKKEKEILDIMSESAFAKT-EGGYFMHN | 446 |
| Query: | 429 | AQELYDFYTYMLPQFKKMGTV--SLSAKLESYRLIERPQIDIEAKGSL--LDISFDFSDL | 484 |
| | | + Y+F +++P K + + + + KL ++ P I + K + L FD + | |
| Sbjct: | 447 | EEAEYNFLYHIVPTLKGLVDIYATTAIKLRIHKGDTAPLIRVRRKERIDWLSFRFDIKGI | 506 |
| Query: | 485 | LENDVDQALVALFDNNPYFVNKSGQLVIFD-EETKKVSATLQ--GLRARRAKNGHIELDN | 541 |
| | | E ++ L AL + Y+ +G L+ + +E +++ ++ G+R + + | |
| Sbjct: | 507 | PEAEIKGVLAALEEKRKYYRLANGSLLSLESKEFNEINQFVKESGIRKEFLHGEEVNVPL | 566 |
| Query: | 542 | IAAFQLSELFANQDNVSFSQHFYQLIEDLRHPEKFK--IPGLSVSASLRDYQLTGVRWLS | 599 |
| | | I + + + +S + L+E +++P+K K +P ++ A +R+YQ+ G W+ | |
| Sbjct: | 567 | IRSVKWMNGLHEGNVLSLDESVQDLVESIQNPKKLKFTVPP-TLHAVMREYQVYGFEWMK | 625 |
| Query: | 600 | MLDHYGFAGILADDMGLGKTLQTISFLSTKLT--RDSR--VLILSPSSLIYNWQDEFHKF | 655 |
| | | L +Y F GILADDMGLGKTLQ+I+++ + L R+ + +L++SPSSL+YNW E KF | |
| Sbjct: | 626 | TLAYYRFGGILADDMGLGKTLQSIAYIDSVLPEIREKKLPILVVSPSSLVYNWFSELKKF | 685 |
| Query: | 656 | APDVDVAVAYGSKIRRDEIIAE--RHQVIITSYSSFRQDFETYSEGNYDYLILDEAQVMK | 713 |
| | | AP + +A G++ R +I+ + V+ITSY R+D +Y+ + L LDEAQ K | |
| Sbjct: | 686 | APHIRAVIADGNQTERRKILKDVAEFDVVITSYPLLRRDVRSYARP-FHTLFLDEAQAFK | 744 |
| Query: | 714 | NAQTKIAHSLRSFEVKNCFALSGTPIENKLLEIWSIFQIILPGLLPGKKEFLKLNPKQVA | 773 |
| | | N T+ A ++++ + + F L+GTP+EN L E+WSIF ++ P LLPG+KEF L + +A | |
| Sbjct: | 745 | NPTTQTARAVKTIQAEYRFGLTGTPVENSLEELWSIFHVVFPELLPGRKEFGDLRREDIA | 804 |
| Query: | 774 | RYIKPFVMRRRKEEVLPELPDLIEMNYPNEMTDSQKVIYLAQLRQI-QESIQHSSDADLN | 832 |
| | | +KPFV+RR KE+VL ELPD IE +E+ QK +Y A L ++ +E+++H L | |
| Sbjct: | 805 | NAVKPFVLRRLKEDVLQELPDKIEHLQSSELLPDQKRLYAAYLAKLREETLKHLDKDTLR | 864 |
| Query: | 833 | RRKIEILSGITRLRQICDTPRLFMD-YDGESGKLESLRQLLTQIKENGHRALIFSQFRGM | 891 |
| | | + KI IL+G+TRLRQIC+ P LF+D Y G S KLE L +L + + G R LIFSQF M | |
| Sbjct: | 865 | KNKIRILAGLTRLRQICNHPALFVDDYKGSSAKLEQLLDILEECRSTGKRILIFSQFTKM | 924 |
| Query: | 892 | LDIAEREMVAMGLTTYKITGSTPANERHEMTRAFNAGSKDAFLISLKAGGVGLNLTGADT | 951 |
| | | L I RE+ + + + G+TP+ ER E+ FN G D FLISLKAGG GLNLTGADT | |
| Sbjct: | 925 | LSIIGRELNRQAIPYFYLDGNTPSQERVELCNRFNEGEGDLFLISLKAGGTGLNLTGADT | 984 |
| Query: | 952 | VVLIDLWWNPAVEMQAISRAHRLGQKENVEVYRLITRGTIEEKILEMQETKKHLVTTVLD | 1011 |
| | | V+L DLWWNPAVE QA RA+R+GQK V+V +L+ GTIEEK+ E+QE+KKHL+ V++ | |
| Sbjct: | 985 | VILYDLWWNPAVEQQAADRAYRMGQKNTVQVIKLVAHGTIEEKMHELQESKKHLIAEVIE | 1044 |
| Query: | 1012 | -GNETHASMSVDDIREIL | 1028 |
| | | G E +S++ ++IR+IL | |
| Sbjct: | 1045 | PGEEKLSSITEEEIRDIL | 1062 |

[8593] A related DNA sequence was identified in S. pyogenes <SEQ ID 4823> which encodes the amino acid sequence <SEQ ID 4824>. Analysis of this protein sequence reveals the following:

```
Possible site: 26
>>> Seems to have no N-terminal signal sequence
----- Final Results -----
                            bacterial cytoplasm --- Certainty = 0.3909(Affirmative) < succ>
                              bacterial membrane --- Certainty = 0.0000(Not Clear) < succ>
                                bacterial outside --- Certainty = 0.0000(Not Clear) < succ>
```

[8594] An alignment of the GAS and GBS proteins is shown below.

| Identities = 674/1031 (65%), Positives = 834/1031 (80%), Gaps = 2/1031 (0%) | | | |
|---|---|---|---|
| Query: | 1 | MSRMIPGRIRNQGIELYEQGLVSLISQEGNLLKAKVGDCQIEYSLVTEETKCSCDFFARK | 60 |
| | | M+R+IPGR+RN+GI+LYEQGLVS +L+ +V Q++Y E+ C CD F K | |
| Sbjct: | 2 | MARLIPGRVRNEGIKLYEQGLVSFQDDNKGILQIEVETYQVQYGADDEDITCQCDTFHMK | 61 |
| Query: | 61 | GYCQHLAALEHFLKNDPEGKAILSKVQVQQESQQETKKKTSFGSVFLDSLIINEDDTIKY | 120 |
| | | YC+H+AA+E+FLKND +GK L ++ Q + ++ TKK TSFGS+FLDSL +NEDD++KY | |
| Sbjct: | 62 | HYCKHIAAVEYFLKNDQKGKLFLKQLTNQTKIKETTKKMTSFGSLFLDSLAMNEDDSVKY | 121 |
| Query: | 121 | QLSAQGEQNPYANDIWWTLKIRRLPDDRSYVIRDIKAFLNTVRKEAYYQIGKQYFETLSL | 180 |
| | | +LSA G ++P+++D WW+LKI RLPDDRSYVIRDIK FL ++KE +YQIGK YFE LS | |
| Sbjct: | 122 | RLSALGSRSPFSSDYWWSLKINRLPDDRSYVIRDIKGFLQLIKKEGFYQIGKNYFEQLSW | 181 |
| Query: | 181 | IQFDETSQELIEFLWRLIPSHSSKIDLEFILPNQGRHLSLTRGFFEEGVTLMNALENFSF | 240 |
| | | +QFD +SQ LIEFLWRL S + K D E I PN RHL L GFFEEG+ + +L +F+F | |
| Sbjct: | 182 | LQFDPSSQALIEFLWRLA-SDTDKGDNENIFPNHARHLRLPSGFFEEGIHYLTSLYDFTF | 240 |
| Query: | 241 | ESDFHQFNHLYFKELEGEDHLYQFKVIVHRQSIELEIKEKDLKPLFANSYLFYRDTFYHL | 300 |
| | | E ++HL+ + LE E LY+FKV VHR+SIEL+I EK+++ LF N YL Y+DTFYHL | |
| Sbjct: | 241 | EGPSQTYHHLFVRSLEAEAGLYEFKVEVHRKSIELQIAEKNVQYLFDNDYLLYQDTFYHL | 300 |
| Query: | 301 | NLKQEKMVTAIRSLPIEGDLAKHIHFDLDDQDKLAAHLLDFKEIGLVDAPRSFSIHDFKV | 360 |
| | | LKQ KMV AIRSLPIE DLAKHIHFDLDD KLAA L DFK+IGLV+AP+SF+I DF+V | |
| Sbjct: | 301 | TLKQRKMVQAIRSLPIEADLAKHIHFDLDDHAKLAASLSDFKQIGLVEAPKSFAIRDFEV | 360 |
| Query: | 361 | NFEFDINSQNEILLQMVFDYGNDLTVHNRQELEQLTFASHFKHEEKVFKLLEKYGFAPHF | 420 |
| | | F+FD+ +++EI Q++FDYGN V ++ LE L FASH K EEK+ + L +GF+P F | |
| Sbjct: | 361 | TFQFDLLNRDEISCQLMFDYGN-YQVSDKASLEALPFASHLKKEEKINRSLLAFGFSPQF | 419 |
| Query: | 421 | STSHPAYSAQELYDFYTYMLPQFKKMGTVSLSAKLESYRLIERPQIDIEAKGSLLDISFD | 480 |
| | | + SA+ELY F+ +P F+++G V+LS +++ ++ E P+I I LLDISFD | |
| Sbjct: | 420 | YSKKRLTSAKELYTFFEETVPCFERLGNVALSTAIQALQVKEMPKIAIRRNQGLLDISFD | 479 |
| Query: | 481 | FSDLLENDVDQALVALFDNNPYFVNKSGQLVIFDEETKKVSATLQGLRARRAKNGHIELD | 540 |
| | | FS ++END+DQA+ ALF NNPYFV+++GQLV+FD+ET+KVS +LQ LRAR+ KNGH++LD | |
| Sbjct: | 480 | FSTIIENDIDQAVTALFQNNPYFVSQTGQLVVFDDETQKVSKSLQELRARQLKNGHLQLD | 539 |
| Query: | 541 | NIAAFQLSELFANQDNVSFSQHFYQLIEDLRHPEKFKIPGLSVSASLRDYQLTGVRWLSM | 600 |
| | | I A Q+S+LF +V FS+ +L L+HPE F I L V A +RDYQ GV+WLSM | |
| Sbjct: | 540 | GIRALQVSKLFEGMTSVHFSKELEELAYHLQHPETFSIKPLPVKAQMRDYQRNGVQWLSM | 599 |
| Query: | 601 | LDHYGFAGILADDMGLGKTLQTISFLSTKLTRDSRVLILSPSSLIYNWQDEFHKFAPDVD | 660 |
| | | L+HYGF GILADDMGLGKTLQT++FL++ L DS+VLILSPSSLIYNW DE KF P +D | |
| Sbjct: | 600 | LNHYGFGGILADDMGLGKTLQTLAFLASHLKSDSKVLILSPSSLIYNWFDECQKFTPQLD | 659 |
| Query: | 661 | VAVAYGSKIRRDEIIAERHQVIITSYSSFRQDFETYSEGNYDYLILDEAQVMKNAQTKIA | 720 |
| | | V V+YG K RD+II E HQ+ ITSYSSFRQDFETY +YDYLILDEAQV+KNAQTKI+ | |
| Sbjct: | 660 | VVVSYGLKQIRDQIIEEGHQITITSYSSFRQDFETYQAFHYDYLILDEAQVIKNAQTKIS | 719 |
| Query: | 721 | HSLRSFEVKNCFALSGTPIENKLLEIWSIFQIILPGLLPGKKEFLKLNPKQVARYIKPFV | 780 |
| | | H LR+F NCFALSGTPIENK+LEIWSIFQI+LPGLLP KKEFLKL +QV+RYIKPFV | |
| Sbjct: | 720 | HCLRAFNTANCFALSGTPIENKMLEIWSIFQIVLPGLLPTKKEFLKLTAEQVSRYIKPFV | 779 |
| Query: | 781 | MRRRKEEVLPELPDLIEMNYPNEMTDSQKVIYLAQLRQIQESIQHSSDADLNRRKIEILS | 840 |
| | | MRR+KE+VLPELPDLIE+NY NEMTD QK IYLAQLRQ+Q+ I++SSD D++R+KIEILS | |
| Sbjct: | 780 | MRRKKEDVLPELPDLIEINYSNEMTDEQKAIYLAQLRQMQDQIRNSSDVDISRQKIEILS | 839 |
| Query: | 841 | GITRLRQICDTPRLFMDYDGESGKLESLRQLLTQIKENGHRALIFSQFRGMLDIAEREMV | 900 |
| | | GITRLRQICDTP LFMDY G+SGKL+SLR LLTQIKENGHRALIFSQFRGMLD+A++EM | |
| Sbjct: | 840 | GITRLRQICDTPSLFMDYQGKSGKLDSLRILLTQIKENGHRALIFSQFRGMLDLAKQEMT | 899 |
| Query: | 901 | AMGLTTYKITGSTPANERHEMTRAFNAGSKDAFLISLKAGGVGLNLTGADTVVLIDLWWN | 960 |
| | | A+GLT+Y++TGSTPANER EMTRAFN GSKDAFLISLKAGGVG+NLTGADTV+LIDLWWN | |
| Sbjct: | 900 | ALGLTSYQMTGSTPANERQEMTRAFNNGSKDAFLISLKAGGVGINLTGADTVILIDLWWN | 959 |
| Query: | 961 | PAVEMQAISRAHRLGQKENVEVYRLITRGTIEEKILEMQETKKHLVTTVLDGNETHASMS | 1020 |
| | | PAVEMQAISRA+R+GQKENVEVYRLITRGTIEEKILE+QE+K++LVTTVLDGNE+ ASMS | |
| Sbjct: | 960 | PAVEMQAISRAYRIGQKENVEVYRLITRGTIEEKILELQESKRNLVTTVLDGNESRASMS | 1019 |
| Query: | 1021 | VDDIREILGVS | 1031 |
| | | +++I+EILG++ | |
| Sbjct: | 1020 | IEEIKEILGLN | 1030 |

[8595] SEQ ID 4822 (GBS369) was expressed in E. coli as a His-fusion product. SDS-PAGE analysis of total cell extract is shown in FIG. 64 (lane 5; MW 120 kDa). It was also expressed in E. coli as a GST-fusion product. SDS-PAGE analysis of total cell extract is shown in FIG. 69 (lane 6; MW 142 kDa).

[8596] The GBS369-GST fusion product was purified (FIG. 215, lane 7) and used to immunise mice. The resulting antiserum was used for FACS (FIG. 303), which confirmed that the protein is immunoaccessible on GBS bacteria.

[8597] Based on this analysis, it was predicted that these proteins and their epitopes could be useful antigens for vaccines or diagnostics.

### EXAMPLE 1562

[8598] A DNA sequence (GBSx1654) was identified in S. agalactiae <SEQ ID 4825> which encodes the amino acid sequence <SEQ ID 4826>. Analysis of this protein sequence reveals the following:

```
Possible site: 41
>>> Seems to have no N-terminal signal sequence
----- Final Results -----
                            bacterial cytoplasm --- Certainty = 0.3391(Affirmative) < succ>
                              bacterial membrane --- Certainty = 0.0000(Not Clear) < succ>
                                bacterial outside --- Certainty = 0.0000(Not Clear) < succ>
```

[8599] The protein has no significant homology with any sequences in the GENPEPT database.

[8600] There is also homology to SEQ ID 1034:

Identities = 34/38 (89%), Positives = 37/38 (96%)

| | | | |
|---|---|---|---|
| Query: | 1 | MEKEAKQIIDLKRNLFKIDVRAQKDEEKVFMRTACQFS | 38 |
| | | +EKEAKQ+IDLKRNLFKIDVRAQKDEEKVFMRTAC+ S | |
| Sbjct: | 1 | LEKEAKQMIDLKRNLFKIDVRAQKDEEKVFMRTACRQS | 38 |

[8601] Based on this analysis, it was predicted that this protein and its epitopes, could be useful antigens for vaccines or diagnostics.

### EXAMPLE 1563

[8602] A DNA sequence (GBSx1656) was identified in S. agalactiae <SEQ ID 4827> which encodes the amino acid sequence <SEQ ID 4828>. This protein is predicted to be phosphoglycerate dehydrogenase (era2). Analysis of this protein sequence reveals the following:

```
Possible site: 31
>>> Seems to have no N-terminal signal sequence
----- Final Results -----
                            bacterial cytoplasm --- Certainty = 0.3709(Affirmative) < succ>
                              bacterial membrane --- Certainty = 0.0000(Not Clear) < succ>
                                bacterial outside --- Certainty = 0.0000(Not Clear) < succ>
```

[8603] The protein has homology with the following sequences in the GENPEPT database.

| >GP: BAA88823 GB: AB016077 phosphoglycerate dehydrogenase | | | |
|---|---|---|---|
| [Streptococcus mutans] | | | |
| Identities = 377/436 (86%), Positives = 414/436 (94%) | | | |
| Query: | 1 | MVLPTVAIVGRPNVGKSTLFNRIAGERISIVEDVEGVTRDRIYTTGEWLNRKFSLIDTGG | 60 |
| | | M LPTVAIVGRPNVGKS LFNRIAGERISIVEDVEGVTRDRIYT EWLNR+FS+IDTGG | |
| Sbjct: | 1 | MALPTVAIVGRPNVGKSALFNRIAGERISIVEDVEGVTRDRIYTKAEWLNRQFSIIDTGG | 60 |
| Query: | 61 | IDDVDAPFMEQIKHQADIAMTEADVIVFVVSGKEGVTDADEYVSRILYKTNKPVILAVNK | 120 |
| | | IDDVDAPFMEQIKHQADIAMTEADVIVFVVS KEG+TDADEYV++ILY+T+KPVILAVNK | |
| Sbjct: | 61 | IDDVDAPFMEQIKHQADIAMTEADVIVFVVSAKEGITDADEYVAKILYRTHKPVILAVNK | 120 |
| Query: | 121 | VDNPEMRNDIYDFYSLGLGDPYPLSSVHGIGTGDILDAIVENLPVEEENENPDIIRFSLI | 180 |
| | | VDNPEMR+ IYDFY+LGLGDPYP+SS HGIGTGD+LDAIV+NLP E + E+ DII+FSLI | |
| Sbjct: | 121 | VDNPEMRSAIYDFYALGLGDPYPVSSAHGIGTGDVLDAIVDNLPAEAQEESSDIIKFSLI | 180 |
| Query: | 181 | GRPNVGKSSLINAILGEDRVIASPVAGTTRDAIDTNFVDSQGQEYTMIDTAGMRKSGKVY | 240 |
| | | GRPNVGKSSLINAILGEDRVIASPVAGTTRDAIDT F D +GQE+TMIDTAGMRKSGKVY | |
| Sbjct: | 181 | GRPNVGKSSLINAILGEDRVIASPVAGTTRDAIDTTFTDEEGQEFTMIDTAGMRKSGKVY | 240 |
| Query: | 241 | ENTEKYSVMRSMRAIDRSDVVLMVINAEEGIREYDKRIAGFAHETGKGIIIVVNKWDTIE | 300 |
| | | ENTEKYSVMR+MRAIDRSD+VLMV+NAEEGIREYDKRIAGFAHE GKGI++VVNKWD I+ | |
| Sbjct: | 241 | ENTEKYSVMRAMRAIDRSDIVLMVLNAEEGIREYDKRIAGFAHEAGKGIVVVVNKWDAIK | 300 |
| Query: | 301 | KDNHTVSQWEADIRDNFQFLSYAPIIFVSAETKQRLHKLPDMIKRISESQNKRIPSAVLN | 360 |
| | | KDN TV+QWE DIRDNFQ++ YAPI+FVSA TKQRLHKLPD+IK++S+SQN RIPS+VLN | |
| Sbjct: | 301 | KDNRTVAQWETDIRDNFQYIPYAPIVFVSAVTKQRLHKLPDVIKQVSQSQNTRIPSSVLN | 360 |
| Query: | 361 | DVIMDAIAINPTPTDKGKRLKIFYATQVAVKPPTFVVFVNEEELMHFSYLRFLENQIREA | 420 |
| | | DV+MDA+AINPTPTDKGKRLKIFYATQV+VKPPTFV+FVNEEELMHFSYLRFLENQIR+A | |
| Sbjct: | 361 | DVVMDAVAINPTPTDKGKRLKIFYATQVSVKPPTFVIFVNEEELMHFSYLRFLENQIRQA | 420 |
| Query: | 421 | FVFEGTPINLIARKRK | 436 |
| | | FVFEGTPI LIARKRK | |
| Sbjct: | 421 | FVFEGTPIRLIARKRK | 436 |

[8604] A related DNA sequence was identified in S. pyogenes <SEQ ID 4829> which encodes the amino acid sequence <SEQ ID 4830>. Analysis of this protein sequence reveals the following:

```
Possible site: 46
>>> Seems to have no N-terminal signal sequence
----- Final Results -----
                            bacterial cytoplasm --- Certainty = 0.3463(Affirmative) < succ>
                              bacterial membrane --- Certainty = 0.0000(Not Clear) < succ>
                                bacterial outside --- Certainty = 0.0000(Not Clear) < succ>
```

[8605] An alignment of the GAS and GBS proteins is shown below.

| Identities = 403/436 (92%), Positives = 422/436 (96%) | | | |
|---|---|---|---|
| Query: | 1 | MVLPTVAIVGRPNVGKSTLFNRIAGERISIVEDVEGVTRDRIYTTGEWLNRKFSLIDTGG | 60 |
| | | MVLPTVAIVGRPNVGKSTLFNRIAGERISIVEDVEGVTRDRIY TGEWLNR+FSLIDTGG | |
| Sbjct: | 1 | MVLPTVAIVGRPNVGKSTLFNRIAGERISIVEDVEGVTRDRIYATGEWLNRQFSLIDTGG | 60 |
| Query: | 61 | IDDVDAPFMEQIKHQADIAMTEADVIVFVVSGKEGVTDADEYVSRILYKTNKPVILAVNK | 120 |
| | | IDDVDAPFMEQIKHQA IAM EADVIVFVVSGKEGVTDADEYVS+ILY+TN PVILAVNK | |
| Sbjct: | 61 | IDDVDAPFMEQIKHQAQIAMEEADVIVFVVSGKEGVTDADEYVSKILYRTNTPVILAVNK | 120 |
| Query: | 121 | VDNPEMRNDIYDFYSLGLGDPYPLSSVHGIGTGDILDAIVENLPVEEENENPDIIRFSLI | 180 |
| | | VDNPEMRNDIYDFYSLGLGDPYP+SSVHGIGTGD+LDAIVENLPVEE EN DIIRFSLI | |
| Sbjct: | 121 | VDNPEMRNDIYDFYSLGLGDPYPVSSVHGIGTGDVLDAIVENLPVEEAEENDDIIRFSLI | 180 |
| Query: | 181 | GRPNVGKSSLINAILGEDRVIASPVAGTTRDAIDTNFVDSQGQEYTMIDTAGMRKSGKVY | 240 |
| | | GRPNVGKSSLINAILGEDRVIASPVAGTTRDAIDT+F D+ GQE+TMIDTAGMRKSGK+Y | |
| Sbjct: | 181 | GRPNVGKSSLINAILGEDRVIASPVAGTTRDAIDTHFTDADGQEFTMIDTAGMRKSGKIY | 240 |
| Query: | 241 | ENTEKYSVMRSMRAIDRSDVVLMVINAEEGIREYDKRIAGFAHETGKGIIIVVNKWDTIE | 300 |
| | | ENTEKYSVMR+MRAIDRSDVVLMVINAEEGIREYDKRIAGFAHE GKG+IIVVNKWDTI+ | |
| Sbjct: | 241 | ENTEKYSVMRAMRAIDRSDVVLMVINAEEGIREYDKRIAGFAHEAGKGMIIVVNKWDTID | 300 |
| Query: | 301 | KDNHTVSQWEADIRDNFQFLSYAPIIFVSAETKQRLHKLPDMIKRISESQNKRIPSAVLN | 360 |
| | | KDNHTV++WEADIRD FQFL+YAPIIFVSA TKQRL+KLPD+IKRISESQNKRIPSAVLN | |
| Sbjct: | 301 | KDNHTVAKWEADIRDQFQFLTYAPIIFVSALTKQRLNKLPDLIKRISESQNKRIPSAVLN | 360 |
| Query: | 361 | DVIMDAIAINPTPTDKGKRLKIFYATQVAVKPPTFVVFVNEEELMHFSYLRFLENQIREA | 420 |
| | | DVIMDAIAINPTPTDKGKRLKIFYATQV+VKPPTFVVFVNEEELMHFSYLRFLENQIR A | |
| Sbjct: | 361 | DVIMDAIAINPTPTDKGKRLKIFYATQVSVKPPTFVVFVNEEELMHFSYLRFLENQIRAA | 420 |
| Query: | 421 | FVFEGTPINLIARKRK | 436 |
| | | F FEGTPI+LIARKRK | |
| Sbjct: | 421 | FTFEGTPIHLIARKRK | 436 |

[8606] Based on this analysis, it was predicted that these proteins and their epitopes could be useful antigens for vaccines or diagnostics.

### EXAMPLE 1564

[8607] A DNA sequence (GBSx1657) was identified in S. agalactiae <SEQ ID 4831> which encodes the amino acid sequence <SEQ ID 4832>. Analysis of this protein sequence reveals the following:

```
Possible site: 51
>>> Seems to have no N-terminal signal sequence
----- Final Results -----
                            bacterial cytoplasm --- Certainty = 0.2734(Affirmative) < succ>
                              bacterial membrane --- Certainty = 0.0000(Not Clear) < succ>
                                bacterial outside --- Certainty = 0.0000(Not Clear) < succ>
```

[8608] The protein has homology with the following sequences in the GENPEPT database.

| >GP: AAC00359 GB: AF008220 DnaI [Bacillus subtilis] | | | |
|---|---|---|---|
| Identities = 105/313 (33%), Positives = 191/313 (60%), Gaps = 17/313 (5%) | | | |
| Query: | 1 | MKSVGQALENQGRVP--RNTNDELIQMILADAQVAEFIKTHQ--LSQREINISMSKFNQF | 56 |
| | | M+ +G++L+ P + +++ + ++ D V F+K ++ + Q+ I S++K ++ | |
| Sbjct: | 1 | MEPIGRSLQGVTGRPDFQKRLEQMKEKVMKDQDVQAFLKENEEVIDQKMIEKSLNKLYEY | 60 |
| Query: | 57 | LIERQK-----FKNKDSQYIAKGYEPILVMNEGYADVSYLE--TRELIEAQKKQAISDRI | 109 |
| | | IE+ K ++++ + +GY P LV+N D+ Y E + ++ QKKQ + | |
| Sbjct: | 61 | -IEQSKNCSYCSEDENCNNLLEGYHPKLVVNGRSIDIEYYECPVKRKLDQQKKQ--QSLM | 117 |
| Query: | 110 | NLVNLPKSYRNIRMTDFDINNESRMKAMSQLLDFVETYPSYNH-KGLYLYGDMGVGKSYL | 168 |
| | | + + + DI++ SR+ + DF+++Y KGLYLYG GVGK+++ | |
| Sbjct: | 118 | KSMYIQQDLLGATFQQVDISDPSRLAMFQHVTDFLKSYNETGKGKGLYLYGKFGVGKTFM | 177 |
| Query: | 169 | MAAMARELSERKGVSTTLLHFPSFAIDVKNAISSGTVKDEIDAVKSVPILILDDIGAEQA | 228 |
| | | +AA+A EL+E++ S+ +++ P F ++KN++ T++++++ VK+ P+L+LDDIGAE | |
| Sbjct: | 178 | LAAIANELAEKE-YSSMIVYVPEFVRELKNSLQDQTLEEKLNMVKTTPVLMLDDIGAESM | 236 |
| Query: | 229 | TSWVRDEILQVILQHRMLEELPTFFTSNYSFNDLERKWA-NIKGSDETWQAKRVMERVRY | 287 |
| | | TSWVRDE++ +LQHRM ++LPTFF+SN+S ++L+ + + +G E +A R+MER+ Y | |
| Sbjct: | 237 | TSWVRDEVIGTVLQHRMSQQLPTFFSSNFSPDELKHHFTYSQRGEKEEVKAARLMERILY | 296 |
| Query: | 288 | LAIEFHLEGPNRR | 300 |
| | | LA L+G NRR | |
| Sbjct: | 297 | LAAPIRLDGENRR | 309 |

[8609] A related DNA sequence was identified in S. pyogenes <SEQ ID 4833> which encodes the amino acid sequence <SEQ ID 4834>. Analysis of this protein sequence reveals the following:

```
Possible site: 19
>>> Seems to have no N-terminal signal sequence
----- Final Results -----
                            bacterial cytoplasm --- Certainty = 0.1944(Affirmative) < succ>
                              bacterial membrane --- Certainty = 0.0000(Not Clear) < succ>
                                bacterial outside --- Certainty = 0.0000(Not Clear) < succ>
```

[8610] An alignment of the GAS and GBS proteins is shown below.

| Identities = 228/300 (76%), Positives = 264/300 (88%) | | | |
|---|---|---|---|
| Query: | 1 | MKSVGQALENQGRVPRNTNDELIQMILADAQVAEFIKTHQLSQREINISMSKFNQFLIER | 60 |
| | | M+ +G+ + G+ R +D+LIQ ILAD +VA FI H LSQ +IN+S+SKFNQFL+ER | |
| Sbjct: | 1 | MEKIGETMAKLGQNTRVNSDQLIQTILADPEVASFISQHHLSQEQINLSLSKFNQFLVER | 60 |
| Query: | 61 | QKFKNKDSQYIAKGYEPILVMNEGYADVSYLETRELIEAQKKQAISDRINLVNLPKSYRN | 120 |
| | | QK++ KD YIAKGY+PIL MNEGYADVSYLET+EL+EAQK+ AIS+RI LV+LPKSYR+ | |
| Sbjct: | 61 | QKYQLKDPSYIAKGYQPILAMNEGYADVSYLETKELVEAQKQAAISERIQLVSLPKSYRH | 120 |
| Query: | 121 | IRMTDFDINNESRMKAMSQLLDFVETYPSYNHKGLYLYGDMGVGKSYLMAAMARELSERK | 180 |
| | | I ++D D+NN SRM+A S +LDFVE YPS KGLYLYGDMG+GKSYL+AAMA ELSE+K | |
| Sbjct: | 121 | IHLSDIDVNNASRMEAFSAILDFVEQYPSAEQKGLYLYGDMGIGKSYLLAAMAHELSEKK | 180 |
| Query: | 181 | GVSTTLLHFPSFAIDVKNAISSGTVKDEIDAVKSVPILILDDIGAEQATSWVRDEILQVI | 240 |
| | | GVSTTLLHFPSFAIDVKNAIS+G+VK+EIDAVK+VP+LILDDIGAEQATSWVRDE+LQVI | |
| Sbjct: | 181 | GVSTTLLHFPSFAIDVKNAISNGSVKEEIDAVKNVPVLILDDIGAEQATSWVRDEVLQVI | 240 |
| Query: | 241 | LQHRMLEELPTFFTSNYSFNDLERKWANIKGSDETWQAKRVMERVRYLAIEFHLEGPNRR | 300 |
| | | LQ+RMLEELPTFFTSNYSF DLERKWA IKGSDETWQAKRVMERVRYLA EFHLEG NRR | |
| Sbjct: | 241 | LQYRMLEELPTFFTSNYSFADLERKWATIKGSDETWQAKRVMERVRYLAREFHLEGANRR | 300 |

[8611] Based on this analysis, it was predicted that these proteins and their epitopes could be useful antigens for vaccines or diagnostics.

### EXAMPLE 1565

[8612] A DNA sequence (GBSx1658) was identified in S. agalactiae <SEQ ID 4835> which encodes the amino acid sequence <SEQ ID 4836>. Analysis of this protein sequence reveals the following:

```
Possible site: 37
>>> Seems to have no N-terminal signal sequence
----- Final Results -----
                            bacterial cytoplasm --- Certainty = 0.2660(Affirmative) < succ>
                              bacterial membrane --- Certainty = 0.0000(Not Clear) < succ>
                                bacterial outside --- Certainty = 0.0000(Not Clear) < succ>
```

[8613] The protein has no significant homology with any sequences in the GENPEPT database.

[8614] A related DNA sequence was identified in S. pyogenes <SEQ ID 4837> which encodes the amino acid sequence <SEQ ID 4838>. Analysis of this protein sequence reveals the following:

```
Possible site: 35
>>> Seems to have no N-terminal signal sequence
----- Final Results -----
                            bacterial cytoplasm --- Certainty = 0.2135(Affirmative) < succ>
                              bacterial membrane --- Certainty = 0.0000(Not Clear) < succ>
                                bacterial outside --- Certainty = 0.0000(Not Clear) < succ>
```

[8615] An alignment of the GAS and GBS proteins is shown below.

| Identities = 217/391 (55%) Positives = 309/391 (78%) | | | |
|---|---|---|---|
| Query: | 1 | MMSPIDEFTYIKQNKIVYDSNSLIQLYFPIMGSDAMALYDYFVHFFDDGIRRHKFSEVLN | 60 |
| | | MM PID FTY+K+NK+ DS +LIQLYFPI+GSDA+++Y YF+HFFDDG++RHKFS++LN | |
| Sbjct: | 1 | MMKPIDTFTYLKRNKVTLDSVTLIQLYFPIIGSDAVSIYQYFIHFFDDGLQRHKFSDILN | 60 |
| Query: | 61 | HLQYGMPRFQDALVMLTALDLLTVYQATGTYLVKLNQAMSNELFLSNPIYRRLLEKRIGE | 120 |
| | | HLQ+GM RF+DAL +LTA++L++VYQ + TYL+ L+Q +S +LF +P Y RLLE++IGE | |
| Sbjct: | 61 | HLQFGMKRFEDALAILTAMELVSVYQLSDTYLITLHQPLSRDLFFQHPAYSRLLEQKIGE | 120 |
| Query: | 121 | VAVAELDMKIPKNARDISKKFTDVFSDLGQPKQEVNRSKNVFDLESFKRLMMRDGLRFNN | 180 |
| | | VAV+EL + +P AR+ISK+F+D+F G + + FDL SF++LM+RDGL+F + | |
| Sbjct: | 121 | VAVSELQVTVPSQARNISKRFSDIFGVQGDLTNVPQKPQKNFDLSSFQQLMVRDGLQFED | 180 |
| Query: | 181 | EKDDVLGIYSVSELYHLNWYDTYQLAKQTAINGMIAPQRMKVQQNEGQHIKDNQSFTNNE | 240 |
| | | + D++ +YS++E Y + W+DTYQ+AK TA+NG I P+R+ ++N+ ++F+ E | |
| Sbjct: | 181 | NQKDIISLYSIAEQYDMTWFDTYQIAKATAVNGKIRPERLLAKKNQSMTKPSKENFSQAE | 240 |
| Query: | 241 | KVILRESKNDSALVFLEKIKRSRKAVTTSGEKTLLEDLAKMNFLDEVINVMVLYTLNKTK | 300 |
| | | ++ILRE+K DSALVFLEKIK++R+A T E+ LL+ LAKMNFLD+VINVMVLYT NKTK | |
| Sbjct: | 241 | QIILREAKQDSALVFLEKIKKARRATITKDERILLQTLAKMNFLDDVINVMVLYTFNKTK | 300 |
| Query: | 301 | SANLNKAYIMKVANDFAFQNVMTAEDAVLKIRDFSDQKVRTKTETKKKQSNVPEWSNPDY | 360 |
| | | SANL K+Y++K+ANDFA+Q V TAE+A++ +R F+D++ R +++ K QSNVP+WSNPDY | |
| Sbjct: | 301 | SANLQKSYVLKMANDFAYQKVSTAEEAIVVLRAFTDRQSRRQSKVKTSQSNVPKWSNPDY | 360 |
| Query: | 361 | KDEVSPEKEIELEQFKTDALKRLERLGKDGE | 391 |
| | | ++ S E++ +L+QFK ALKRLE LGK G+ | |
| Sbjct: | 361 | QETTSQEEQAKLDQFKQAALKRLENLGKGGD | 391 |

[8616] Based on this analysis, it was predicted that these proteins and their epitopes could be useful antigens for vaccines or diagnostics.

### EXAMPLE 1566

[8617] A DNA sequence (GBSx1659) was identified in S. agalactiae <SEQ ID 4839> which encodes the amino acid sequence <SEQ ID 4840>. Analysis of this protein sequence reveals the following:

```
Possible site: 19
>>> Seems to have no N-terminal signal sequence
----- Final Results -----
                            bacterial cytoplasm --- Certainty = 0.4485(Affirmative) < succ>
                              bacterial membrane --- Certainty = 0.0000(Not Clear) < succ>
                                bacterial outside --- Certainty = 0.0000(Not Clear) < succ>
```

[8618] The protein has homology with the following sequences in the GENPEPT database.

| >GP: BAB06865 GB: AP001517 unknown conserved protein [Bacillus halodurans] | | | |
|---|---|---|---|
| Identities = 80/150 (53%), Positives = 115/150 (76%) | | | |
| Query: | 1 | MRCPKCGYNKSSVVDSRQAEEGTTIRRRRECEKCGNRFTTFERLEELPLLVIKKDGTREQ | 60 |
| | | MRCP C +N + V+DSR A EG +IRRRRECE C +RFTTFE +EE+PL+V+KKDGTR++ | |
| Sbjct: | 1 | MRCPACHHNGTRVLDSRPAHEGRSIRRRRECESCNHRFTTFEMIEEVPLIVVKKDGTRQE | 60 |
| Query: | 61 | FSRDKILNGIIQSAQKRPVSSEDIENCILRIERKIRSEYEDEVSSITIGNLVMDELAELD | 120 |
| | | FS DKIL G+I++ +KRPV E +E + +ER++R + ++EV S IG LVM+ LA +D | |
| Sbjct: | 61 | FSSDKILRGLIRACEKRPVPLETLEGIVNEVERELRGQGKNEVDSKEIGELVMERLANVD | 120 |
| Query: | 121 | EITYVRFASVYKSFKDVDEIEELLQQITKR | 150 |
| | | ++ YVRFASVY+ FKD++ + L+++ +R | |
| Sbjct: | 121 | DVAYVRFASVYRQFKDINVFIQELKELMER | 150 |

[8619] A related DNA sequence was identified in S. pyogenes <SEQ ID 4841> which encodes the amino acid sequence <SEQ ID 4842>. Analysis of this protein sequence reveals the following:

```
Possible site: 19
>>> Seems to have no N-terminal signal sequence
----- Final Results -----
                            bacterial cytoplasm --- Certainty = 0.4365(Affirmative) < succ>
                              bacterial membrane --- Certainty = 0.0000(Not Clear) < succ>
                                bacterial outside --- Certainty = 0.0000(Not Clear) < succ>
```

[8620] An alignment of the GAS and GBS proteins is shown below.

| Identities = 131/155 (84%), Positives = 143/155 (91%) | | | |
|---|---|---|---|
| Query: | 1 | MRCPKCGYNKSSVVDSRQAEEGTTIRRRRECEKCGNRFTTFERLEELPLLVIKKDGTREQ | 60 |
| | | +RCPKC Y+KSSVVDSRQAE+G TIRRRRECE+C RFTTFER+EELPLLVIKKDGTREQ | |
| Sbjct: | 1 | VRCPKCNYHKSSVVDSRQAEDGNTIRRRRECEQCHTRFTTFERVEELPLLVIKKDGTREQ | 60 |
| Query: | 61 | FSRDKILNGIIQSAQKRPVSSEDIENCILRIERKIRSEYEDEVSSITIGNLVMDELAELD | 120 |
| | | FSRDKILNG++QSAQKRPVSS DIEN I RIE+++R+ YE+EVSS IGNLVMDELAELD | |
| Sbjct: | 61 | FSRDKILNGVVQSAQKRPVSSTDIENVISRIEQEVRTTYENEVSSTAIGNLVMDELAELD | 120 |
| Query: | 121 | EITYVRFASVYKSFKDVDEIEELLQQITKRVRSKK | 155 |
| | | EITYVRFASVYKSFKDVDEIEELLQQIT RVR KK | |
| Sbjct: | 121 | EITYVRFASVYKSFKDVDEIEELLQQITNRVRGKK | 155 |

[8621] Based on this analysis, it was predicted that these proteins and their epitopes could be useful antigens for vaccines or diagnostics.

### EXAMPLE 1567

[8622] A DNA sequence (GBSx1660) was identified in S. agalactiae <SEQ ID 4843> which encodes the amino acid sequence <SEQ ID 4844>. This protein is predicted to be CsrS (mtrB). Analysis of this protein sequence reveals the following:

| Possible site: 35 | | | | |
|---|---|---|---|---|
| >>> Seems to have no N-terminal signal sequence | | | | |
| | INTEGRAL | Likelihood = −11.30 | Transmembrane | 22-38 (18-43) |
| | INTEGRAL | Likelihood = −9.66 | Transmembrane | 189-205 (187-212) |

```
----- Final Results -----
                              bacterial membrane --- Certainty = 0.5522(Affirmative) < succ>
                                bacterial outside --- Certainty = 0.0000(Not Clear) < succ>
                            bacterial cytoplasm --- Certainty = 0.0000(Not Clear) < succ>
```

[8623] A related DNA sequence was identified in S. pyogenes <SEQ ID 2109> which encodes the amino acid sequence <SEQ ID 2110>. Analysis of this protein sequence reveals the following:

| Possible site: 35 | | | | |
|---|---|---|---|---|
| >>> Seems to have a cleavable N-term signal seq. | | | | |
| | INTEGRAL | Likelihood = −6.32 | Transmembrane | 196-212 (189-214) |

```
----- Final Results -----
                              bacterial membrane --- Certainty = 0.3527(Affirmative) < succ>
                                bacterial outside --- Certainty = 0.0000(Not Clear) < succ>
                            bacterial cytoplasm --- Certainty = 0.0000(Not Clear) < succ>
```

[8624] An alignment of the GAS and GBS proteins is shown below.

| Identities = 248/501 (49%), Positives = 363/501 (71%), Gaps = 4/501 (0%) | | | |
|---|---|---|---|
| Query: | 1 | MKNKKDQFIGVKQPLSKKLSQLVFILFFSLFTVFSVLVYTSATRYVLHREKINVGRSLEK | 60 |
| | | M+N+K + K L K+LS + F+LFF +F+ F+++ Y+S ++L +EK +V +++ | |
| Sbjct: | 1 | MENQKQKQKKYKNSLPKRLSNIFFVLFFCIFSAFTLIAYSSTNYFLLKKEKQSVFQAVNI | 60 |
| Query: | 61 | TRVRLSQANSSLTSDDILEILYNQVFADDIYPHKRQNGIVRTGESIDSILYVNQEMTLYD | 120 |
| | | RVRLS+ +S+ T +++ E+LY ++ + ++R+ I + L NQ++ +Y+ | |
| Sbjct: | 61 | VRVRLSEVDSNFTLENLAEVLYKNDKTHLRIDDRKGSRVIRSERDITNTLDANQDIYVYN | 120 |
| Query: | 121 | VNRKPVFST-LRTGMPTIGKSMGKVIISKVADM-EGFVGTKAIYSQKTGQLLGYVQIFYN | 178 |
| | | ++++ +F+T P + +G+V + D GF T+ +YS +TG+ +GYVQ+F++ | |
| Sbjct: | 121 | IDKQMIFTTDNEESSPGLHGPIGRVYHDHIEDQYRGFSMTQKVYSNRTGKFVGYVQVFHD | 180 |
| Query: | 179 | LGRYYSMRQNIIVFLIMMEVLGTVLALVVINSATKRIVRPVKNLHDLMHQISENPSNLEI | 238 |
| | | LG YY +R ++ +L+++E+ GT LA ++I T+R ++P+ NLH++M ISENP+NL + | |
| Sbjct: | 181 | LGNYYVIRARLLFWLLVVELFGTSLAYLIILITTRRFLKPLHNLHEVMRNISENPNNLNL | 240 |
| Query: | 239 | RSKVRSEDEIGELSRIFDGMLDQLEDYTRRQSQFISDVSHELRTPVAVVKGHIGLLQRWG | 298 |
| | | RS + S DEI ELS IFD MLD+LE +T+ QS+FISDVSHELRTPVA++KGHIGLLQRWG | |
| Sbjct: | 241 | RSDISSGDEIEELSVIFDNMLDKLETHTKLQSRFISDVSHELRTPVAIIKGHIGLLQRWG | 300 |
| Query: | 299 | KDDPEILEESLAAAYHEADRMSLMINDMLNMIRVQGSLELHQDEVTDLSSSISVVIENFR | 358 |
| | | KDD +ILEESL A HEADRM++MINDML+MIRVQGS E HQ+++T L SI V+ NFR | |
| Sbjct: | 301 | KDDSDILEESLTATAHEADRMAIMINDMLDMIRVQGSFEGHQNDMTVLEDSIETVVGNFR | 360 |
| Query: | 359 | ILREDFQFIFENNISDIVWGKIYKIHFEQALMILIDNAIKYSPSYKEVSVVLSVDNDFAT | 418 |
| | | +LREDF F +++ + +IYK HFEQALMILIDNA+KYS K++++ LSV | |
| Sbjct: | 361 | VLREDFIFTWQSENPKTI-ARIYKNHFEQALMILIDNAVKYSRKEKKIAINLSVTGKQEA | 419 |
| Query: | 419 | VV-VKDKGEGISDEDIEFIFDRFYRTDKSRNRESTQAGLGIGLSVFKQIMDAYHLKVDIK | 477 |
| | | +V V+DKGEGIS EDIE IF+RFYRTDKSRNR STQAGLGIGLS+ KQI+D YHL++ ++ | |
| Sbjct: | 420 | IVRVQDKGEGISKEDIEHIFERFYRTDKSRNRTSTQAGLGIGLSILKQIVDGYHLQMKVE | 479 |
| Query: | 478 | SELNQGTEFIVRIPIKKFEET | 498 |
| | | SELN+G+ FI+ IP+ + +E+ | |
| Sbjct: | 480 | SELNEGSVFILHIPLAQSKES | 500 |

[8625] A related GBS gene <SEQ ID 8845> and protein <SEQ ID 8846> were also identified. Analysis of this protein sequence reveals the following:

| Lipop: Possible site: −1 Crend: 5 | | | | |
|---|---|---|---|---|
| SRCFLG: 0 | | | | |
| McG: Length of UR: 5 | | | | |
| Peak Value of UR: 0.74 | | | | |
| Net Charge of CR: 2 | | | | |
| McG: Discrim Score: −10.19 | | | | |
| GvH: Signal Score (−7.5): −3.66 | | | | |
| Possible site: 35 | | | | |
| >>> Seems to have no N-terminal signal sequence | | | | |
| Amino Acid Composition: calculated from 1 | | | | |
| ALOM program count: 2 value: −11.30 threshold: 0.0 | | | | |
| | INTEGRAL | Likelihood = −11.30 | Transmembrane | 22-38 (18-43) |
| | INTEGRAL | Likelihood = −9.66 | Transmembrane | 189-205 (187-212) |
| | PERIPHERAL | Likelihood = 2.86 | 405 | |

```
modified ALOM score: 2.76
icml HYPID: 7 CFP: 0.552
*** Reasoning Step: 3
----- Final Results -----
                              bacterial membrane --- Certainty = 0.5522(Affirmative) < succ>
                                bacterial outside --- Certainty = 0.0000(Not Clear) < succ>
                            bacterial cytoplasm --- Certainty = 0.0000(Not Clear) < succ>
```

[8626] SEQ ID 8846 (GBS321) was expressed in E. coli as a GST-fusion product. SDS-PAGE analysis of total cell extract is shown in FIG. 173 (lane 6; MW 84 kDa). It was also expressed in E. coli as a His-fusion product. SDS-PAGE analysis of total cell extract is shown in FIG. 80 (lane 2; MW 58.7 kDa).

[8627] GBS321-GST was purified as shown in FIG. 220, lane 3.

[8628] Based on this analysis, it was predicted that these proteins and their epitopes could be useful antigens for vaccines or diagnostics.

### EXAMPLE 1568

[8629] A DNA sequence (GBSx1661) was identified in S. agalactiae <SEQ ID 4845> which encodes the amino acid sequence <SEQ ID 4846>. This protein is predicted to be CsrR (trcR). Analysis of this protein sequence reveals the following:

```
Possible site: 61
>>> Seems to have no N-terminal signal sequence
----- Final Results -----
                            bacterial cytoplasm --- Certainty = 0.2649(Affirmative) < succ>
                              bacterial membrane --- Certainty = 0.0000(Not Clear) < succ>
                                bacterial outside --- Certainty = 0.0000(Not Clear) < succ>
```

[8630] A related DNA sequence was identified in S. pyogenes <SEQ ID 3259> which encodes the amino acid sequence <SEQ ID 3260>. Analysis of this protein sequence reveals the following:

```
Possible site: 61
>>> Seems to have no N-terminal signal sequence
----- Final Results -----
                            bacterial cytoplasm --- Certainty = 0.3226(Affirmative) < succ>
                              bacterial membrane --- Certainty = 0.0000(Not Clear) < succ>
                                bacterial outside --- Certainty = 0.0000(Not Clear) < succ>
```

[8631] An alignment of the GAS and GBS proteins is shown below.

| Identities = 193/229 (84%), Positives = 211/229 (91%), Gaps = 1/229 (0%) | | | |
|---|---|---|---|
| Query: | 1 | MGKKILIIEDEKNLARFVSLELLHEGYDVVVETNGREGLDTALEKDFDLILLDLMLPEMD | 60 |
| | | M KKILIIEDEKNLARFVSLEL HEGY+V+VE NGREGL+TALEK+FDLILLDLMLPEMD | |
| Sbjct: | 1 | MTKKILIIEDEKNLARFVSLELQHEGYEVIVEVNGREGLETALEKEFDLILLDLMLPEMD | 60 |
| Query: | 61 | GFEITRRLQAEKTTYIMMMTARDSVMDIVAGLDRGADDYIVKPFAIEELLARVRAIFRRQ | 120 |
| | | GFE+TRRLQ EKTTYIMMMTARDS+MD+VAGLDRGADDYIVKPFAIEELLAR+RAIFRRQ | |
| Sbjct: | 61 | GFEVTRRLQTEKTTYIMMMTARDSIMDVVAGLDRGADDYIVKPFAIEELLARIRAIFRRQ | 120 |
| Query: | 121 | EIETKTKEKGDSGSFRDLSLNTHNRSAMRGDEEISLTKREFDLLNVLMTNMNRVMTREEL | 180 |
| | | +IE++ K+ G +RDL LN NRS RGD+EISLTKRE+DLLN+LMTNMNRVMTREEL | |
| Sbjct: | 121 | DIESE-KKVPSQGIYRDLVLNPQNRSVNRGDDEISLTKREYDLLNILMTNMNRVMTREEL | 179 |
| Query: | 181 | LEHVWKYDVAAETNVVDVYIRYLRGKIDIPGRESYIQTVRGMGYVIREK | 229 |
| | | L +VWKYD A ETNVVDVYIRYLRGKIDIPG+ESYIQTVRGMGYVIREK | |
| Sbjct: | 180 | LSNVWKYDEAVETNVVDVYIRYLRGKIDIPGKESYIQTVRGMGYVIREK | 228 |

[8632] Based on this analysis, it was predicted that these proteins and their epitopes could be useful antigens for vaccines or diagnostics.

### EXAMPLE 1569

[8633] A DNA sequence (GBSx1662) was identified in S. agalactiae <SEQ ID 4847> which encodes the amino acid sequence <SEQ ID 4848>. Analysis of this protein sequence reveals the following:

```
Possible site: 60
>>> Seems to have no N-terminal signal sequence
----- Final Results -----
                            bacterial cytoplasm --- Certainty = 0.3864(Affirmative) < succ>
                              bacterial membrane --- Certainty = 0.0000(Not Clear) < succ>
                                bacterial outside --- Certainty = 0.0000(Not Clear) < succ>
```

[8634] The protein has homology with the following sequences in the GENPEPT database.

| >GP: AAG32547 GB: U12643 YlbN-like hypothetical protein [Streptococcus | | | |
|---|---|---|---|
| gordonii] | | | |
| Identities = 91/174 (52%), Positives = 133/174 (76%), Gaps = 3/174 (1%) | | | |
| Query: | 3 | LTEIKKSPEGLYFDKKIDIKESLMERHSEIMDISDIQVSGHVVYEDGLYLLDYNMAYDIT | 62 |
| | | + EI+K+P+GL F+KK+D+ E L ER++EI+D+ DI SG YEDGLY LDY ++Y IT | |
| Sbjct: | 4 | IQEIRKNPDGLAFEKKLDLAEELKERNAEILDVQDIVASGRAQYEDGLYFLDYELSYTIT | 63 |
| Query: | 63 | LPSSRSMKPVVLSEKQTINEVFIEAENVSTKKELVDQELVLILEEDDINLEESVIDNILL | 122 |
| | | L SSRSM+PV E +NE+F+E V++ +E++DQ+LVL +E +IN+ ESV DNILL | |
| Sbjct: | 64 | LASSRSMEPVERKESYLVNEIFMEDGQVAS-QEMIDQDLVLPIENGEINVAESVADNILL | 122 |
| Query: | 123 | NIPLRVL-AADEVGVEADLSGKNWSLMTEKQYEEKQAKEKEKSNPFAALEGMFD | 175 |
| | | NIPL+VL AA+E G + +G++W +MTE Y++ QA++KE+++PFA L+G+FD | |
| Sbjct: | 123 | NIPLKVLTAAEEAGSDLP-TGRDWQVMTEDDYQKYQAEKKEENSPFAGLQGLFD | 175 |

[8635] A related DNA sequence was identified in S. pyogenes <SEQ ID 4849> which encodes the amino acid sequence <SEQ ID 4850>. Analysis of this protein sequence reveals the following:

```
Possible site: 42
>>> Seems to have no N-terminal signal sequence
----- Final Results -----
                            bacterial cytoplasm --- Certainty = 0.3032(Affirmative) < succ>
                              bacterial membrane --- Certainty = 0.0000(Not Clear) < succ>
                                bacterial outside --- Certainty = 0.0000(Not Clear) < succ>
```

[8636] An alignment of the GAS and GBS proteins is shown below.

| Identities = 86/175 (49%), Positives = 135/175 (77%) | | | |
|---|---|---|---|
| Query: | 1 | MLLTEIKKSPEGLYFDKKIDIKESLMERHSEIMDISDIQVSGHVVYEDGLYLLDYNMAYD | 60 |
| | | + ++EI+K P+GL FD+ D+K L+ER +I+DI ++ G+V Y+ GLYLLDY ++Y+ | |
| Sbjct: | 3 | LAISEIRKHPDGLSFDRLCDVKSMLLERDQQIIDIKAVKAVGNVRYDKGLYLLDYQLSYE | 62 |
| Query: | 61 | ITLPSSRSMKPVVLSEKQTINEVFIEAENVSTKKELVDQELVLILEEDDINLEESVIDNI | 120 |
| | | + LPSSRSM PV LSE Q I E+FIEA +++ KKELV+ LVL+L++D INLEES++DNI | |
| Sbjct: | 63 | VILPSSRSMVPVCLSEVQHIQELFIEATDLADKKELVEDNLVLVLDKDAINLEESIVDNI | 122 |
| Query: | 121 | LLNIPLRVLAADEVGVEADLSGKNWSLMTEKQYEEKQAKEKEKSNPFAALEGMFD | 175 |
| | | LL IP++VL +E + +G+NW+++TE+ Y+ + ++++++NPFA+L+G+FD | |
| Sbjct: | 123 | LLAIPVQVLTEEEKKSKELPAGQNWAVLTEEDYQCLKEEKQKENNPFASLQGLFD | 177 |

[8637] Based on this analysis, it was predicted that these proteins and their epitopes could be useful antigens for vaccines or diagnostics.

### EXAMPLE 1570

[8638] A DNA sequence (GBSx1663) was identified in S. agalactiae <SEQ ID 4851> which encodes the amino acid sequence <SEQ ID 4852>. This protein is predicted to be heat shock protein (htpX). Analysis of this protein sequence reveals the following:

| Possible site: 25 | | | | |
|---|---|---|---|---|
| >>> Seems to have a cleavable N-term signal seq. | | | | |
| | INTEGRAL | Likelihood = −11.30 | Transmembrane | 195-211 (190-221) |
| | INTEGRAL | Likelihood = −11.09 | Transmembrane | 43-59 (31-62) |
| | INTEGRAL | Likelihood = −3.61 | Transmembrane | 153-169 (153-174) |

```
----- Final Results -----
                              bacterial membrane --- Certainty = 0.5522(Affirmative) < succ>
                                bacterial outside --- Certainty = 0.0000(Not Clear) < succ>
                            bacterial cytoplasm --- Certainty = 0.0000(Not Clear) < succ>
```

[8639] The protein has homology with the following sequences in the GENPEPT database.

| >GP: AAB70525 GB: AF017421 putative heat shock protein HtpX | | | |
|---|---|---|---|
| [Streptococcus gordonii] | | | |
| Identities = 220/297 (74%), Positives = 261/297 (87%), Gaps = 1/297 (0%) | | | |
| Query: | 1 | MLYQQIASNKRKTVVLLIVFFCLLAAIGAAVGYLVLGSYQFGLVLALIIGVIYAVSMIFQ | 60 |
| | | ML++QIA+NKR+T LL+ FF LLA IGAA GYL + S G+++A IIG+IYA++MIFQ | |
| Sbjct: | 1 | MLFEQIAANKRRTWFLLVAFFALLALIGAAAGYLWMNSPLGGVIIAFIIGLIYAITMIFQ | 60 |
| Query: | 61 | STNVVMSMNNAREVTEDEAPNYFHIVEDMAMIAQIPMPRVFIVEDDSLNAFATGSKPENA | 120 |
| | | ST VVMSMN AR+V+E EAP +HIV+DMAM+AQIPMPRV+IVEDDS NAFATGS PENA | |
| Sbjct: | 61 | STEVVMSMNGARQVSEQEAPELYHIVQDMANVAQIPMPRVYIVEDDSPNAFATGSNPENA | 120 |
| Query: | 121 | AVAATTGLLAVMNREELEGVIGHEVSHIRNYDIRISTIAVALASAVTLISSIGSRMLFYG | 180 |
| | | AVAATTGLL +MNREELEGVIGHEVSHIRNYDIRISTIAVALASA+T+ISS+ RM++YG | |
| Sbjct: | 121 | AVAATTGLLRLMNREELEGVIGHEVSHIRNYDIRISTIAVALASAITMISSVAGRMNWYG | 180 |
| Query: | 181 | GGRRRDDDREDGG-NILVLIFSILSLILAPLAASLVQLAISRQREYLADASSVELTRNPQ | 239 |
| | | GGRRR+D +D G +L+L+FS++++ILAPLAA+LVQLAISRQRE+LADASSVELTRNPQ | |
| Sbjct: | 181 | GGRRRNDRDDDSGLGLLMLVFSLIAIILAPLAATLVQLAISRQREFLADASSVELTRNPQ | 240 |
| Query: | 240 | GMISALEKLDRSEPMGHPVDDASAALYINDPTKKEGLKSLFYTHPPIADRIERLRHM | 296 |
| | | GMI AL+KLD SEPM VDDASAALYI+DP KK GL+ LFYTHPPI++R+ERLR M | |
| Sbjct: | 241 | GMIRALQKLDNSEPMHRHVDDASAALYISDPKKKGGLQKLFYTHPPISERVERLRKM | 297 |

[8640] A related DNA sequence was identified in S. pyogenes <SEQ ID 4853> which encodes the amino acid sequence <SEQ ID 4854>. Analysis of this protein sequence reveals the following:

| Possible site: 31 | | | | |
|---|---|---|---|---|
| >>> Seems to have a cleavable N-term signal seq. | | | | |
| | INTEGRAL | Likelihood = −9.77 | Transmembrane | 197-213 (192-223) |
| | INTEGRAL | Likelihood = −8.33 | Transmembrane | 43-59 (33-61) |
| | INTEGRAL | Likelihood = −3.82 | Transmembrane | 153-169 (153-174) |

```
----- Final Results -----
                              bacterial membrane --- Certainty = 0.4906(Affirmative) < succ>
                                bacterial outside --- Certainty = 0.0000(Not Clear) < succ>
                            bacterial cytoplasm --- Certainty = 0.0000(Not Clear) < succ>
```

[8641] The protein has homology with the following sequences in the databases:

| >GP: AAB70525 GB: AF017421 putative heat shock protein HtpX [Streptococcus | | | |
|---|---|---|---|
| gordonii] | | | |
| Identities = 208/298 (69%), Positives = 257/298 (85%), Gaps = 1/298 (0%) | | | |
| Query: | 1 | MLYQQISQNKQRTVVLLVGFFALLALIGASAGYLLLDNYAMGLVLALVIGVIYATSMIFQ | 60 |
| | | ML++QI+ NK+RT LLV FFALLALIGA+AGYL +++ G+++A +IG+IYA +MIFQ | |
| Sbjct: | 1 | MLFEQIAANKRRTWFLLVAFFALLALIGAAAGYLWMNSPLGGVIIAFIIGLIYATTMIFQ | 60 |
| Query: | 61 | STSLVMSMNNAREVTEKEAPGFFHIVEDMAMVAQIPMPRVFIIEDPSLNAFATGSSPQNA | 120 |
| | | ST +VMSMN AR+V+E+EAP +HIV+DMAMVAQIPMPRV+I+ED S NAFATGS+P+NA | |
| Sbjct: | 61 | STEVVMSMNGARQVSEQEAPELYHIVQDMAMVAQIPMPRVYIVEDDSPNAFATGSNPENA | 120 |
| Query: | 121 | AVAATTGLLEVMNREELEGVIGHEISHIRNYDIRISTIAVALASAVTVISSIGGRMLWYG | 180 |
| | | AVAATTGLL +MNREELEGVIGHE+SHIRNYDIRISTIAVALASA+T+ISS+ GRM+WYG | |
| Sbjct: | 121 | AVAATTGLLRLMNREELEGVIGHEVSHIRNYDIRISTIAVALASAITMISSVAGRMMWYG | 180 |
| Query: | 181 | GGSRRQRDDGDDDVLRIITLLLSLLSLLLAPLVASLIQLAISRQREYLADASSVELTRNP | 240 |
| | | GG RR+ D DD L ++ L+ SL++++LAPL A+L+QLAISRQRE+LADASSVELTRNP | |
| Sbjct: | 181 | GG-RRRNDRDDDSGLGLLMLVFSLIAIILAPLAATLVQLAISRQREFLADASSVELTRNP | 239 |
| Query: | 241 | QGMIKALEKLQLSQPMKHPVDDASAALYINEPRKKRSFSSLFSTHPPIEERIERLKNM | 298 |
| | | QGMI+AL+KL S+PM VDDASAALYI++P+KK LF THPPI ER+ERL+ M | |
| Sbjct: | 240 | QGMIRALQKLDNSEPMHRHVDDASAALYISDPKKKGGLQKLFYTHPPISERVERLRKM | 297 |

[8642] An alignment of the GAS and GBS proteins is shown below.

| Identities = 233/298 (78%), Positives = 262/298 (87%), Gaps = 2/298 (0%) | | | |
|---|---|---|---|
| Query: | 1 | MLYQQIASNKRKTVVLLIVFFCLLAAIGAAVGYLVLGSYQFGLVLALIIGVIYAVSMIFQ | 60 |
| | | MLYQQI+ NK++TVVLL+ FF LLA IGA+ GYL+L +Y GLVLAL+IGVIYA SMIFQ | |
| Sbjct: | 1 | MLYQQISQNKQRTVVLLVGFFALLALIGASAGYLLLDNYAMGLVLALVIGVIYATSMIFQ | 60 |
| Query: | 61 | STNVVMSMNNAREVTEDEAPNYFHIVEDMAMIAQIPMPRVFIVEDDSLNAFATGSKPENA | 120 |
| | | ST++VMSMNNAREVTE EAP +FHIVEDMAM+AQIPMPRVFI+ED SLNAFATGS P+NA | |
| Sbjct: | 61 | STSLVMSMNNAREVTEKEAPGFFHIVEDMAMVAQIPMPRVFIIEDPSLNAFATGSSPQNA | 120 |
| Query: | 121 | AVAATTGLLAVMNREELEGVIGHEVSHIRNYDIRISTIAVALASAVTLISSIGSRMLFYG | 180 |
| | | AVAATTGLL VMNREELEGVIGHE+SHIRNYDIRISTIAVALASAVT+ISSIG RML+YG | |
| Sbjct: | 121 | AVAATTGLLEVMNREELEGVIGHEISHIRNYDIRISTIAVALASAVTVISSIGGRMLWYG | 180 |
| Query: | 181 | GG--RRRDDDREDGGNILVLIFSILSLILAPLAASLVQLAISRQREYLADASSVELTRNP | 238 |
| | | GG R+RDD +D I+ L+ S+LSL+LAPL ASL+QLAISRQREYLADASSVELTRNP | |
| Sbjct: | 181 | GGSRRQRDDGDDDVLRIITLLLSLLSLLLAPLVASLIQLAISRQREYLADASSVELTRNP | 240 |
| Query: | 239 | QGMISALEKLDRSEPMGHPVDDASAALYINDPTKKEGLKSLFYTHPPIADRIERLRHM | 296 |
| | | QGMI ALEKL S+PM HPVDDASAALYIN+P KK SLF THPPI +RIERL++M | |
| Sbjct: | 241 | QGMIKALEKLQLSQPMKHPVDDASAALYINEPRKKRSFSSLFSTHPPIEERIERLKNM | 298 |

[8643] A related GBS gene <SEQ ID 8847> and protein <SEQ ID 8848> were also identified. Analysis of this protein sequence reveals the following:

| Lipop: Possible site: −1 Crend: 10 | | | |
|---|---|---|---|
| McG: Discrim Score: 9.61 | | | |
| GvH: Signal Score (−7.5): −0.97 | | | |
| Possible site: 25 | | | |
| >>> Seems to have a cleavable N-term signal seq. | | | |
| ALOM program | count: 3 | value: −11.30 | threshold: 0.0 |

| | | | |
|---|---|---|---|
| INTEGRAL | Likelihood = −11.30 | Transmembrane | 195-211 (190-221) |
| INTEGRAL | Likelihood = −11.09 | Transmembrane | 43-59 (31-62) |
| INTEGRAL | Likelihood = −3.61 | Transmembrane | 153-169 (153-174) |

| | | |
|---|---|---|
| PERIPHERAL | Likelihood = 5.89 | 87 |

modified ALOM score: 2.76
*** Reasoning Step: 3
----- Final Results -----
bacterial membrane --- Certainty = 0.5522 (Affirmative) < succ>
bacterial outside --- Certainty = 0.0000 (Not Clear) < succ>
bacterial cytoplasm --- Certainty = 0.0000 (Not Clear) < succ>

[8644] The protein has homology with the following sequences in the databases:

[chemical structure]

[8645] SEQ ID 8848 (GBS179) was expressed in E. coli as a GST-fusion product. SDS-PAGE analysis of total cell extract is shown in FIG. 175 (lane 11; MW 58 kDa).

[8646] GBS179-GST was purified as shown in FIG. 227, lane 5.

[8647] Based on this analysis, it was predicted that these proteins and their epitopes could be useful antigens for vaccines or diagnostics.

### EXAMPLE 1571

[8648] A DNA sequence (GBSx1665) was identified in S. agalactiae <SEQ ID 4855> which encodes the amino acid sequence <SEQ ID 4856>. Analysis of this protein sequence reveals the following:

| Possible site: 20 | | | |
|---|---|---|---|
| >>> Seems to have an uncleavable N-term signal seq | | | |
| INTEGRAL | Likelihood = −15.44 | Transmembrane | 4-20 (1-27) |

----- Final Results -----
bacterial membrane --- Certainty = 0.7177 (Affirmative) < succ>
bacterial outside --- Certainty = 0.0000 (Not Clear) < succ>
bacterial cytoplasm --- Certainty = 0.0000 (Not Clear) < succ>

[8649] The protein has homology with the following sequences in the GENPEPT database.

| >GP: AAG23700 GB: AF017421 LemA-like protein [Streptococcus gordonii] | | | |
|---|---|---|---|
| Identities = 124/182 (68%), Positives = 152/182 (83%) | | | |
| Query: | 1 | MGTMILIAIIALFVIWLIVAYNSLVRSRMHTKESWSQIDVQLKRRNDLIPNLIETVKGYA | 60 |
| | | M +I IA+I + V+++I YNSLVR+RM T+E+WSQIDVQLKRRNDL+PNLIETVKGY | |
| Sbjct: | 1 | MSFIITIAVIVVIVLFVISVYNSLVRARMQTQEAWSQIDVQLKRRNDLLPNLIETVKGYG | 60 |
| Query: | 61 | AYEGKTLEKIAELRAQVAKANTPAEAMTASNELTRQLSSILAVAENYPDLKANNSFVKLQ | 120 |
| | | YE TLEK+ +LRAQVA A++PA+AM AS+ LTRQ+S I AVAE+YPDLKAN +++KLQ | |
| Sbjct: | 61 | KYEQATLEKVTQLRAQVASASSPADAMKASDALTRQISGIFAVAESYPDLKANENYLKLQ | 120 |
| Query: | 121 | EELTNTENKISYSRQLYNTTTSNYNVKLETFPSNIVGKLFGFKPSQFLETPEEEKEVPKV | 180 |
| | | EELTNTENKISYSRQLYN+ NYNVKL+ FPSN++ F F+P+ FL TPEEEK VPKV | |
| Sbjct: | 121 | EELTNTENKISYSRQLYNSVAGNYNVKLQAFPSNVIAGMFAFRPADFLSTPEEEKAVPKV | 180 |
| Query: | 181 | SF | 182 |
| | | F | |
| Sbjct: | 181 | DF | 182 |

[8650] A related DNA sequence was identified in S. pyogenes <SEQ ID 4857> which encodes the amino acid sequence <SEQ ID 4858>. Analysis of this protein sequence reveals the following:

Possible site: 15
>>> Seems to have a cleavable N-term signal seq.
----- Final Results -----
bacterial outside --- Certainty = 0.3000 (Affirmative) < succ>
bacterial membrane --- Certainty = 0.0000 (Not Clear) < succ>
bacterial cytoplasm --- Certainty = 0.0000 (Not Clear) < succ>

[8651] The protein has homology with the following sequences in the databases:

| >GP: AAC44350 GB: U66186 LemA [Listeria monocytogenes] | | | |
|---|---|---|---|
| Identities = 91/181 (50%), Positives = 121/181 (66%), Gaps = 2/181 (1%) | | | |
| Query: | 5 | LIILVVLGVLALWLMISYNSLVKSRMHTKEAWSQIDVQLKRRNDLIPNLIETVKGYASYE | 64 |
| | | +I + V+ +L L YNSLVK R E W+QIDVQLKRR DLIPNL+ETVKGYA +E | |
| Sbjct: | 5 | IIAIAVVVILVLIYFGLYNSLVKYRNRVDETWAQIDVQLKRRFDLIPNLVETVKGYAKHE | 64 |
| Query: | 65 | QKTFEKITDLRARVAN--ASTPQETMAASNELSKQVTSLFAVAENYPDLKANENFLKLQE | 122 |
| | | ++T ++ + R ++ A Q + A N LS + S+FA+ E YPDLKAN +F++LQ | |
| Sbjct: | 65 | KETLTQVIEARNKMMEVPADNRQGQIEADNMLSGALKSIFALGEAYPDLKANTSFIELQH | 124 |
| Query: | 123 | ELTNTENKISYSRQLYNSTTSNYNLQLESFPSNIAGKLFGFKPSEFLQTPEAEKEVPKVEF | 183 |
| | | ELT TENK++YSRQLYN+T YN +++S P+NI KL F + L PE E+ PKVEF | |
| Sbjct: | 125 | ELTTTENKVAYSRQLYNTTVMTYNTKVQSVPTNIVAKLHNFTERDMLSIPEVERVAPKVEF | 185 |

[8652] An alignment of the GAS and GBS proteins is shown below.

| Identities = 135/181 (74%), Positives = 165/181 (90%) | | | |
|---|---|---|---|
| Query: | 4 | MILIAIIALFVIWLIVAYNSLVRSRMHTKESWSQIDVQLKRRNDLIPNLIETVKGYAAYE | 63 |
| | | +I++ ++ + +WL+++YNSLV+SRMHTKE+WSQIDVQLKRRNDLIPNLIETVKGYA+YE | |
| Sbjct: | 5 | LIILVVLGVLALWLMISYNSLVKSRMHTKEAWSQIDVQLKRRNDLIPNLIETVKGYASYE | 64 |
| Query: | 64 | GKTLEKIAELRAQVAKANTPAEAMTASNELTRQLSSILAVAENYPDLKANNSFVKLQEEL | 123 |
| | | KT EKI +LRA+VA A+TP E M ASNEL++Q++S+ AVAENYPDLKAN +F+KLQEEL | |
| Sbjct: | 65 | QKTFEKITDLRARVANASTPQETMAASNELSKQVTSLFAVAENYPDLKANENFLKLQEEL | 124 |
| Query: | 124 | TNTENKISYSRQLYNTTTSNYNVKLETFPSNIVGKLFGFKPSQFLETPEEEKEVPKVSFDF | 184 |
| | | TNTENKISYSRQLYN+TTSNYN++LE+FPSNI GKLFGFKPS+FL+TPE EKEVPKV F+F | |
| Sbjct: | 125 | TNTENKISYSRQLYNSTTSNYNLQLESFPSNIAGKLFGFKPSEFLQTPEAEKEVPKVEFNF | 185 |

[8653] A related GBS gene <SEQ ID 8849> and protein <SEQ ID 8850> were also identified. Analysis of this protein sequence reveals the following:

| Lipop: Possible site: −1 Crend: 0 | | | |
|---|---|---|---|
| McG: Discrim Score: 14.63 | | | |
| GvH: Signal Score (−7.5): −3.19 | | | |
| Possible site: 20 | | | |
| >>> Seems to have an uncleavable N-term signal seq | | | |
| ALOM program | count: 1 | value: −15.44 | threshold: 0.0 |

| | | | |
|---|---|---|---|
| INTEGRAL | Likelihood = −15.44 | Transmembrane | 4-20 (1-27) |

| | | |
|---|---|---|
| PERIPHERAL | Likelihood = 8.86 | 146 |

modified ALOM score: 3.59
*** Reasoning Step: 3
----- Final Results -----
bacterial membrane --- Certainty = 0.7177 (Affirmative) < succ>
bacterial outside --- Certainty = 0.0000 (Not Clear) < succ>
bacterial cytoplasm --- Certainty = 0.0000 (Not Clear) < succ>

[8654] The protein has homology with the following sequences in the databases:

[chemical structure]

[8655] SEQ ID 4856 (GBS42) was expressed in E. coli as a His-fusion product. SDS-PAGE analysis of total cell extract is shown in FIG. 5 (lane 2; MW 21.8 kDa) and in FIG. 168 (lane 5-7; MW 36 kDa). It was also expressed in E. coli as a GST-fusion product. SDS-PAGE analysis of total cell extract is shown in FIG. 13 (lane 8; MW 46 kDa). Purified Thio-GBS42-His is shown in FIG. 244, lane 11.

[8656] Based on this analysis, it was predicted that these proteins and their epitopes could be useful antigens for vaccines or diagnostics.

### EXAMPLE 1572

[8657] A DNA sequence (GBSx1666) was identified in S. agalactiae <SEQ ID 4859> which encodes the amino acid sequence <SEQ ID 4860>. This protein is predicted to be glucose inhibited division protein b (gidB). Analysis of this protein sequence reveals the following:

Possible site: 47
>>> Seems to have no N-terminal signal sequence
----- Final Results -----
bacterial cytoplasm --- Certainty = 0.2430 (Affirmative) < succ>
bacterial membrane --- Certainty = 0.0000 (Not Clear) < succ>
bacterial outside --- Certainty = 0.0000 (Not Clear) < succ>

[8658] A related GBS nucleic acid sequence <SEQ ID 10079> which encodes amino acid sequence <SEQ ID 10080> was also identified.

[8659] The protein has homology with the following sequences in the GENPEPT database.

| >GP:CAB16137 GB:Z99124 glucose-inhibited division protein | | | |
|---|---|---|---|
| [Bacillus subtilis] | | | |
| Identities = 130/239 (54%), Positives = 170/239 (70%), Gaps = 4/239 (1%) | | | |
| Query: | 5 | MTPQAFYQVLIEHGITLTDKQKKQFETYFRLLVEWNEKINLTAITDKEEVYLKHFYDSIA | 64 |
| | | M + F L E GI+L+ +Q +QFE Y+ +LVEWNEKINLT+IT+K+EVYLKHFYDSI | |
| Sbjct: | 1 | MNIEEFTSGLAEKGISLSPRQLEQFELYYDMLVEWNEKINLTSITEKKEVYLKHFYDSIT | 60 |
| Query: | 65 | PILQGYID-NSPLSILDIGAGAGFPSIPMKILYPEIDITIIDSLNKRINFLNILANELEL | 123 |
| | | Y+D N +I D+GAGAGFPS+P+KI +P + +TI+DSLNKRI FL L+ L+L | |
| Sbjct: | 61 | AAF--YVDFNQVNTICDVGAGAGFPSLPIKICFPHLHVTIVDSLNKRITFLEKLSEALQL | 118 |
| Query: | 124 | SGVHFFHGRAEDFGQDRVFRAKFDIVTARAVAKMQVLAELTIPFLKVNGRLIALKAAAAE | 183 |
| | | F H RAE FGQ + R +DIVTARAVA++ VL+EL +P +K NG +ALKAA+AE | |
| Sbjct: | 119 | ENTTFCHDRAETFGQRKDVRESYDIVTARAVARLSVLSELCLPLVKKNGLFVALKAASAE | 178 |
| Query: | 184 | EELISAEKALKTLFSQVTVNKNYKLP-NGDDRNITIVSKKKETPNKYPRKAGTPNKKPL | 241 |
| | | EEL + +KA+ TL ++ ++KLP DRNI ++ K K TP KYPRK GTPNK P+ | |
| Sbjct: | 179 | EELNAGKKAITTLGGELENIHSFKLPIEESDRNIMVIRKIKNTPKKYPRKPGTPNKSPI | 237 |

[8660] A related DNA sequence was identified in S. pyogenes <SEQ ID 4861> which encodes the amino acid sequence <SEQ ID 4862>. Analysis of this protein sequence reveals the following:

Possible site: 21
>>> Seems to have no N-terminal signal sequence
----- Final Results -----
bacterial cytoplasm --- Certainty = 0.4862 (Affirmative) < succ>
bacterial membrane --- Certainty = 0.0000 (Not Clear) < succ>
bacterial outside --- Certainty = 0.0000 (Not Clear) < succ>

[8661] An alignment of the GAS and GBS proteins is shown below.

| Identities = 170/237 (71%), Positives = 202/237 (84%) | | | |
|---|---|---|---|
| Query: | 5 | MTPQAFYQVLIEHGITLTDKQKKQFETYFRLLVEWNEKINLTAITDKEEVYLKHFYDSIA | 64 |
| | | MTPQ FY+ L E G +L+ KQK+QF+TYF+ LVEWN KINLTAIT++ EVYLKHFYDSIA | |
| Sbjct: | 1 | MTPQDFYRTLEEDGFSLSSKQKEQFDTYFKSLVEWNTKINLTAITEENEVYLKHFYDSIA | 60 |
| Query: | 65 | PILQGYIDNSPLSILDIGAGAGFPSIPMKILYPEIDITIIDSLNKRINFLNILANELELS | 124 |
| | | PILQG++ N P+ +LDIGAGAGFPS+PMKIL+P +++TIIDSLNKRI+FL +LA EL L | |
| Sbjct: | 61 | PILQGFLANEPIKLLDIGAGAGFPSLPMKILFPNLEVTIIDSLNKRISFLTLLAQELGLE | 120 |
| Query: | 125 | GVHFFHGRAEDFGQDRVFRAKFDIVTARAVAKMQVLAELTIPFLKVNGRLIALKAAAAEE | 184 |
| | | VHFFHGRAEDFGQD+ FR +FD+VTARAVA+MQVL+ELTIPFLK+ G+LIALKA AA++ | |
| Sbjct: | 121 | NVHFFHGRAEDFGQDKAFRGQFDVVTARAVARMQVLSELTIPFLKIGGKLIALKAQAADQ | 180 |
| Query: | 185 | ELISAEKALKTLFSQVTVNKNYKLPNGDDRNITIVSKKKETPNKYPRKAGTPNKKPL | 241 |
| | | EL A+ AL LF +V N +Y+LPNGD R ITIV KKKETPNKYPRKAG PNKKPL | |
| Sbjct: | 181 | ELEEAKNALCLLFGKVIKNHSYQLPNGDSRFITIVEKKKETPNKYPRKAGLPNKKPL | 237 |

[8662] Based on this analysis, it was predicted that these proteins and their epitopes could be useful antigens for vaccines or diagnostics.

### EXAMPLE 1573

[8663] A DNA sequence (GBSx1667) was identified in S. agalactiae <SEQ ID 4863> which encodes the amino acid sequence <SEQ ID 4864>. Analysis of this protein sequence reveals the following:

Possible site: 13
>>> Seems to have a cleavable N-term signal seq.
----- Final Results -----
bacterial outside --- Certainty = 0.3000 (Affirmative) < succ>
bacterial membrane --- Certainty = 0.0000 (Not Clear) < succ>
bacterial cytoplasm --- Certainty = 0.0000 (Not Clear) < succ>

[8664] The protein has no significant homology with any sequences in the GENPEPT database.

[8665] No corresponding DNA sequence was identified in S. pyogenes.

[8666] Based on this analysis, it was predicted that this protein and its epitopes, could be useful antigens for vaccines or diagnostics.

### EXAMPLE 1574

[8667] A DNA sequence (GBSx1668) was identified in S. agalactiae <SEQ ID 4865> which encodes the amino acid sequence <SEQ ID 4866>. This protein is predicted to be v-type sodium ATP synthase subunit j. Analysis of this protein sequence reveals the following:

| Possible site: 45 | | | | |
|---|---|---|---|---|
| >>> Seems to have a cleavable N-term signal seq. | | | | |
| INTEGRAL | Likelihood = −10.14 | Transmembrane | 371-387 | (362-391) |
| INTEGRAL | Likelihood = −7.48 | Transmembrane | 200-216 | (190-217) |
| INTEGRAL | Likelihood = −4.94 | Transmembrane | 425-441 | (423-446) |
| INTEGRAL | Likelihood = −4.67 | Transmembrane | 327-343 | (325-349) |
| INTEGRAL | Likelihood = −3.77 | Transmembrane | 81-97 | (81-98) |
| INTEGRAL | Likelihood = −2.66 | Transmembrane | 140-156 | (139-157) |
| INTEGRAL | Likelihood = −1.33 | Transmembrane | 55-71 | (53-71) |
| INTEGRAL | Likelihood = −0.27 | Transmembrane | 247-263 | (247-263) |
| INTEGRAL | Likelihood = −0.11 | Transmembrane | 165-181 | (165-181) |

----- Final Results -----
bacterial membrane --- Certainty = 0.5055 (Affirmative) < succ>
bacterial outside --- Certainty = 0.0000 (Not Clear) < succ>
bacterial cytoplasm --- Certainty = 0.0000 (Not Clear) < succ>

[8668] A related GBS nucleic acid sequence <SEQ ID 10081> which encodes amino acid sequence <SEQ ID 10082> was also identified.

[8669] The protein has homology with the following sequences in the GENPEPT database.

| >GP:BAA04279 GB:D17462 Na+ −ATPase subunit J [Enterococcus hirae] | | | |
|---|---|---|---|
| Identities = 170/461 (36%), Positives = 262/461 (55%), Gaps = 28/461 (6%) | | | |
| Query: | 12 | KTMSVARKLSISFIAVILLGSILLSLPIFQYANAPKTHYIDHLFTTVSMVCVTGLSVFPI | 71 |
| | | K +S + ++ F +IL G LL+LP F + TH+ID LFT S VCVTGL+ | |
| Sbjct: | 10 | KRLSPVQLIAAGFFILILFGGSLLTLPFFS-RSGESTHFIDALFTATSAVCVTGLTTLNT | 68 |
| Query: | 72 | SKVYNGWGQIVAILLMQTGGLGLVTLMSLSYYTLRRKMSLNDQTLLQSAITYNSSTDLKK | 131 |
| | | ++ +N GQ + + L++ GGLG + + L + ++K+S + + +L+ A+ + + K | |
| Sbjct: | 69 | AEHWNSAGQFLIMTLIEIGGLGFMMIPILFFAIAKKKISFSMRIVLKEALNLEEMSGVIK | 128 |
| Query: | 132 | YLYMIFKVTLTLEVLAASILAIDFIPRFGLGHGIFNSIFLAVSAFCNAGFDNLEATSLAQ | 191 |
| | | + I K + ++V+ A L++ FIP FG GI+ SIF AVS+FCNAGFD L + LA | |
| Sbjct: | 129 | LMIYILKFAVVIQVIGAVALSVVFIPEFGWAKGIWFSIFHAVSSFCNAGFDLLGDSLLAD | 188 |
| Query: | 192 | FKLNPLVNIIVCFLIISGGLGFAVWKDLIEATIQTSHKGPKLIKTFPKRLSNHSKLVLKT | 251 |
| | | + N + ++V LII+GGLGF VW+D++ + H+ K+++ HSK+ L | |
| Sbjct: | 189 | -QTNVYLIMVVSALIIAGGLGFIVWRDIL-----SYHR--------VKKITLHSKVALSV | 234 |
| Query: | 252 | TTIILLTGTLLSWLLEFGNFRTIANLSLPKQLMVSFFQTVTMRTAGFSTIDYTQTDFATN | 311 |
| | | T ++L+ G +L +L+ N T+ + ++L +FF +VT RTAG+ +IDY Q A | |
| Sbjct: | 235 | TALLLIGGFIL-FLITERNGLTLVKGTFTERLANTFFMSVTPRTAGYYSIDYLQMSHAGL | 293 |
| Query: | 312 | LVYIIQMLIGGAPGGTAGGFKVTVIAILLLLFKAELSGQSQVTFHYRTIPSSIIKQTLSI | 371 |
| | | ++ + M IGG G TAGG K T + ILL+ A G+++ RTI + + L | |
| Sbjct: | 294 | ILTMFLMYIGGTSGSTAGGLKTTTLGILLIQMHAMFKGKTRAEAFGRTIRQAAV---LRA | 350 |
| Query: | 372 | LTFFFII--LISGYLLLLELNPHIDPFS----LFFEASSALATVGVTMNTTNQLTLGGRI | 425 |
| | | LT FF+ L +++L + I S + FE SA TVG+TM T LTL G++ | |
| Sbjct: | 351 | LTLFFVTLSLCVVAIMVLSVTETIPKTSGIEYIAFEVFSAFGTVGLTMGLTPDLTLIGKL | 410 |
| Query: | 426 | VIMFLMFIGRVGPITVLLSILQK---KEKEIHYAETEIILG | 463 |
| | | VI+ LM+IGRVG +TV+LS+L K E Y E I+LG | |
| Sbjct: | 411 | VIISLMYIGRVGIMTVVLSLLVKANRAEANYKYPEESIMLG | 451 |

[8670] A related DNA sequence was identified in S. pyogenes <SEQ ID 4867> which encodes the amino acid sequence <SEQ ID 4868>. Analysis of this protein sequence reveals the following:

| Possible site: 42 | | | | |
|---|---|---|---|---|
| >>> Seems to have no N-terminal signal sequence | | | | |
| INTEGRAL | Likelihood = −15.12 | Transmembrane | 371-387 | (364-396) |
| INTEGRAL | Likelihood = −7.32 | Transmembrane | 20-36 | (18-42) |
| INTEGRAL | Likelihood = −6.53 | Transmembrane | 425-441 | (417-446) |
| INTEGRAL | Likelihood = −6.16 | Transmembrane | 89-105 | (81-106) |
| INTEGRAL | Likelihood = −5.79 | Transmembrane | 200-216 | (196-223) |
| INTEGRAL | Likelihood = −3.35 | Transmembrane | 140-156 | (139-157) |
| INTEGRAL | Likelihood = −3.03 | Transmembrane | 55-71 | (53-74) |
| INTEGRAL | Likelihood = −3.03 | Transmembrane | 247-263 | (246-264) |
| INTEGRAL | Likelihood = −1.12 | Transmembrane | 393-409 | (393-409) |
| INTEGRAL | Likelihood = −0.11 | Transmembrane | 165-181 | (165-181) |

----- Final Results -----
bacterial membrane --- Certainty = 0.7050 (Affirmative) < succ>
bacterial outside --- Certainty = 0.0000 (Not Clear) < succ>
bacterial cytoplasm --- Certainty = 0.0000 (Not Clear) < succ>

[8671] The protein has homology with the following sequences in the databases:

>GP:BAA04279 GB:D17462 Na+ −ATPase subunit J [Enterococcus hirae]
Identities = 168/466 (36%), Positives = 260/466 (55%), Gaps = 26/466 (5%)

| | | | |
|---|---|---|---|
| Query: | 6 | MKRSFIKSLSVTQRLTFSFAIVILIGTLLLSMPFTHYQNGPNTVYLDHFFNVVSMVCVTG | 65 |
| | | MK+ K LS Q + F I+IL G LL++PF ++G +T ++D F S VCVTG | |
| Sbjct: | 4 | MKKRVRKRLSPVQLIAAGFFILILFGGSLLTLPFFS-RSGESTHFIDALFTATSAVCVTG | 62 |
| Query: | 66 | LSVVPVAEVYNGIGQTIAMALMQIGCLGLVTLIAVSTFAL-KRKMRLSDQTLLQSALNRG | 124 |
| | | L+ + AE +N GQ + M L++IG LG + +I + FA+ K+K+ S + +L+ ALN | |
| Sbjct: | 63 | LTTLNTAEHWNSAGQFLIMTLIEIGGLGFM-MIPILFFAIAKKKISFSMRIVLKEALNLE | 121 |
| Query: | 125 | DSKDLKHYLFFAYKVTFSLEAFAAIVIMIDFIPRFGWKNGIFNSIFLAVSAFCNAGFDNL | 184 |
| | | + + + + K ++ A+ + + FIP FGW GI+ SIF AVS+FCNAGFD L | |
| Sbjct: | 122 | EMSGVIKLMIYILKFAVVIQVIGAVALSVVFIPEFGWAKGIWFSIFHAVSSFCNAGFDLL | 181 |
| Query: | 185 | GSSSLKDFMLNPTLNVIITFLIISGGLGFAVWVDLGVAFKKYFFERPHCYGATFRKLSNQ | 244 |
| | | G S L D N L ++++ LII+GGLGF VW D+ +++ + +K++ | |
| Sbjct: | 182 | GDSLLAD-QTNVYLIMVVSALIIAGGLGFIVWRDI-LSYHR------------VKKITLH | 227 |
| Query: | 245 | SRLVLQTTAVILFLGTFLTWFLEKDNSKTIANFSLHQQLMVSFFQTVTMRTAGFATISYN | 304 |
| | | S++ L TA++L +G F+ + + + N T+ + ++L +FF +VT RTAG+ +I Y | |
| Sbjct: | 228 | SKVALSVTALLL-IGGFILFLITERNGLTLVKGTFTERLANTFFMSVTPRTAGYYSIDYL | 286 |
| Query: | 305 | DTLAPTNILYMIQMVIGGAPGGTAGGIKVTTAAITFLLFKAELSGQSEVTFRNRIIANKT | 364 |
| | | IL M M IGG G TAGG+K TT I + A G++ R I | |
| Sbjct: | 287 | QMSHAGLILTMFLMYIGGTSGSTAGGLKTTTLGILLIQMHAMFKGKTRAEAFGRTIRQAA | 346 |
| Query: | 365 | IKQTMTVLIFFFAVLMIGFILLLSVEPHIAPIP----LLFESISAIATVGVSMDLTPQLS | 420 |
| | | + + +T L F L + I++LSV I + FE SA TVG++M LTP L+ | |
| Sbjct: | 347 | VLRALT-LFFVTLSLCVVAIMVLSVTETIPKTSGIEYIAFEVFSAFGTVGLTMGLTPDLT | 405 |
| Query: | 421 | TAGRLIVIVLMFVGRVGPITVLISLI---QRKEKTIQYATTDILVG | 463 |
| | | G+L++I LM++GRVG +TV++SL+ R E +Y I++G | |
| Sbjct: | 406 | LIGKLVIISLMYIGRVGIMTVVLSLLVKANRAEANYKYPEESIMLG | 451 |

[8672] An alignment of the GAS and GBS proteins is shown below.

| Identities = 275/462 (59%), Positives = 351/462 (75%), Gaps = 1/462 (0%) | | | |
|---|---|---|---|
| Query: | 2 | GASMKHFFDYKTMSVARKLSISFIAVILLGSILLSLPIFQYANAPKTHYIDHLFTTVSMV | 61 |
| | | G +MK F K++SV ++L+ SF VIL+G++LLS+P Y N P T Y+DH F VSMV | |
| Sbjct: | 3 | GGNMKRSF-IKSLSVTQRLTFSFAIVILIGTLLLSMPFTHYQNGPNTVYLDHFFNVVSMV | 61 |
| Query: | 62 | CVTGLSVFPISKVYNGWGQIVAILLMQTGGLGLVTLMSLSYYTLRRKMSLNDQTLLQSAI | 121 |
| | | CVTGLSV P+++VYNG GQ +A+ LMQ G LGLVTL+++S + L+RKM L+DQTLLQSA+ | |
| Sbjct: | 62 | CVTGLSVVPVAEVYNGIGQTIAMALMQIGCLGLVTLIAVSTFALKRKMRLSDQTLLQSAL | 121 |
| Query: | 122 | TYNSSTDLKKYLYMIFKVTLTLEVLAASILAIDFIPRFGLGHGIFNSIFLAVSAFCNAGF | 181 |
| | | S DLK YL+ +KVT +LE AA ++ IDFIPRFG +GIFNSIFLAVSAFCNAGF | |
| Sbjct: | 122 | NRGDSKDLKHYLFFAYKVTFSLEAFAAIVIMIDFIPRFGWKNGIFNSIFLAVSAFCNAGF | 181 |
| Query: | 182 | DNLEATSLAQFKLNPLVNIIVCFLIISGGLGFAVWKDLIEATIQTSHKGPKLIKTFPKRL | 241 |
| | | DNL ++SL F LNP +N+I+ FLIISGGLGFAVW DL A + + P ++L | |
| Sbjct: | 182 | DNLGSSSLKDFMLNPTLNVIITFLIISGGLGFAVWVDLGVAFKKYFFERPHCYGATFRKL | 241 |
| Query: | 242 | SNHSKLVLKTTTIILLTGTLLSWLLEFGNFRTIANLSLPKQLMVSFFQTVTMRTAGFSTI | 301 |
| | | SN S+LVL+TT +IL GT L+W LE N +TIAN SL +QLMVSFFQTVTMRTAGF+TI | |
| Sbjct: | 242 | SNQSRLVLQTTAVILFLGTFLTWFLEKDNSKTIANFSLHQQLMVSFFQTVTMRTAGFATI | 301 |
| Query: | 302 | DYTQTDFATNLVYIIQMLIGGAPGGTAGGFKVTVIAILLLLFKAELSGQSQVTFHYRTIP | 361 |
| | | Y T TN++Y+IQM+IGGAPGGTAGG KVT AI LLFKAELSGQS+VTF R I | |
| Sbjct: | 302 | SYNDTLAPTNILYMIQMVIGGAPGGTAGGIKVTTAAITFLLFKAELSGQSEVTFRNRIIA | 361 |
| Query: | 362 | SSIIKQTLSILTFFFIILISGYLLLLELNPHIDPFSLFFEASSALATVGVTMNTTNQLTL | 421 |
| | | + IKQT+++L FFF +L+ G++LLL + PHI P L FE+ SA+ATVGV+M+ T QL+ | |
| Sbjct: | 362 | NKTIKQTMTVLIFFFAVLMIGFILLLSVEPHIAPIPLLFESISAIATVGVSMDLTPQLST | 421 |
| Query: | 422 | GGRIVIMFLMFIGRVGPITVLLSILQKKEKEIHYAETEIILG | 463 |
| | | GR++++ LMF+GRVGPITVL+S++Q+KEK I YA T+I++G | |
| Sbjct: | 422 | AGRLIVIVLMFVGRVGPITVLISLIQRKEKTIQYATTDILVG | 463 |

[8673] A related GBS gene <SEQ ID 8851> and protein <SEQ ID 8852> were also identified. Analysis of this protein sequence reveals the following:

| Lipop: Possible site: −1 Crend: 9 | | |
|---|---|---|
| McG: Discrim Score: 0.86 | | |
| GvH: Signal Score (−7.5): 0.64 | | |
| Possible site: 45 | | |
| >>> Seems to have a cleavable N-term signal seq. | | |
| ALOM program count: 9 | value: −10.14 | threshold: 0.0 |

| | | | | |
|---|---|---|---|---|
| INTEGRAL | Likelihood = −10.14 | Transmembrane | 371-387 | (362-391) |
| INTEGRAL | Likelihood = −7.48 | Transmembrane | 200-216 | (190-217) |
| INTEGRAL | Likelihood = −4.94 | Transmembrane | 425-441 | (423-446) |
| INTEGRAL | Likelihood = −4.67 | Transmembrane | 327-343 | (325-349) |
| INTEGRAL | Likelihood = −3.77 | Transmembrane | 81-97 | (81-98) |
| INTEGRAL | Likelihood = −2.66 | Transmembrane | 140-156 | (139-157) |
| INTEGRAL | Likelihood = −1.33 | Transmembrane | 55-71 | (53-71) |
| INTEGRAL | Likelihood = −0.27 | Transmembrane | 247-263 | (247-263) |
| INTEGRAL | Likelihood = −0.11 | Transmembrane | 165-181 | (165-181) |
| PERIPHERAL | Likelihood = 2.49 | 308 | | |

modified ALOM score: 2.53
*** Reasoning Step: 3
----- Final Results -----
bacterial membrane --- Certainty = 0.5055 (Affirmative) < succ>
bacterial outside --- Certainty = 0.0000 (Not Clear) < succ>
bacterial cytoplasm --- Certainty = 0.0000 (Not Clear) < succ>

[8674] The protein has homology with the following sequences in the databases:

[chemical structure]

[8675] Based on this analysis, it was predicted that these proteins and their epitopes could be useful antigens for vaccines or diagnostics.

### EXAMPLE 1575

[8676] A DNA sequence (GBSx1669) was identified in S. agalactiae <SEQ ID 4869> which encodes the amino acid sequence <SEQ ID 4870>. This protein is predicted to be TrkA (ktrA). Analysis of this protein sequence reveals the following:

Possible site: 19
>>> Seems to have a cleavable N-term signal seq.
----- Final Results -----
bacterial outside --- Certainty = 0.3000 (Affirmative) < succ>
bacterial membrane --- Certainty = 0.0000 (Not Clear) < succ>
bacterial cytoplasm --- Certainty = 0.0000 (Not Clear) < succ>

[8677] The protein has homology with the following sequences in the GENPEPT database.

| >GP: AAC46144 GB: AF001974 putative TrkA [Thermoanaerobacter | | | |
|---|---|---|---|
| ethanolicus] | | | |
| Identities = 69/177 (38%), Positives = 110/177 (61%), Gaps = 2/177 (1%) | | | |
| Query: | 8 | VLGLGIFGQTLAQELSNFEQDVIAIDSNPEN--VQAVAEVVTKAAIGDITDLAFLKHIGI | 65 |
| | | V+GLG FG +LA+ L DV+ ID + E VQA+ +VT A D TD LK + + | |
| Sbjct: | 6 | VIGLGSFGISLAKTLYEMGNDVLVIDEDEEEELVQAMNGLVTHAVRADATDENVLKSLRV | 65 |
| Query: | 66 | SDCDTVIIATGNSLESSVLAVMHCKKLGVPQVIAKARNLVYEEVLYEIGADLVISPERES | 125 |
| | | + D I+A G ++ESS++ M K+LGV VIAKA N ++ VLY++GAD V+ PE++ | |
| Sbjct: | 66 | KNFDVAIVAIGKNMESSIMVTMLVKELGVKYVIAKAHNELHARVLYKVGADRVVMPEKDM | 125 |
| Query: | 126 | GQNVAANLMRNKITDVFQIESDISVIEFKIPKSWVGKTVEQLNIRHKFDLNLIGIRK | 182 |
| | | G VA N+ + + D+ + + S+ E + W GKT++++N+R K+ LN++ ++K | |
| Sbjct: | 126 | GIRVARNVFSSNLIDLIEFSKEYSIAEILPIEEWFGKTLKEINVREKYGLNVVAVKK | 182 |

[8678] A related DNA sequence was identified in S. pyogenes <SEQ ID 4715> which encodes the amino acid sequence <SEQ ID 4716>. Analysis of this protein sequence reveals the following:

Possible site: 20
>>> Seems to have an uncleavable N-term signal seq
----- Final Results -----
bacterial membrane --- Certainty = 0.0000 (Not Clear) < succ>
bacterial outside --- Certainty = 0.0000 (Not Clear) < succ>
bacterial cytoplasm --- Certainty = 0.0000 (Not Clear) < succ>

[8679] An alignment of the GAS and GBS proteins is shown below.

| Identities = 132/221 (59%), positives = 176/221 (78%) | | | |
|---|---|---|---|
| Query: | 1 | MKTKIIGVLGLGIFGQTLAQELSNFEQDVIAIDSNPENVQAVAEVVTKAAIGDITDLAFL | 60 |
| | | +K K +GVLGLGIFG+T+A+ELSNF+QDVIAID +V+ VA++VTKAA+GDITD FL | |
| Sbjct: | 2 | LKRKTVGVLGLGIFGRTVARELSNFDQDVIAIDIRESHVKEVADLVTKAAVGDITDKEFL | 61 |
| Query: | 61 | KHIGISDCDTVIIATGNSLESSVLAVMHCKKLGVPQVIAKARNLVYEEVLYEIGADLVIS | 120 |
| | | +GI CDTV+IA+GN+LESSVLAVMHCKKLGVP +IAKA+N ++EEVLY IGA VI+ | |
| Sbjct: | 62 | LAVGIEHCDTVVIASGNNLESSVLAVMHCKKLGVPTIIAKAKNKIFEEVLYGIGATKVIT | 121 |
| Query: | 121 | PERESGQNVAANLMRNKITDVFQIESDISVIEFKIPKSWVGKTVEQLNIRHKFDLNLIGI | 180 |
| | | PER+SG+ VA+NL+R I + +E IS+IEF IPKSW G+++ +L++R K++LN+IG+ | |
| Sbjct: | 122 | PERDSGKRVASNLLRRHIESIIYLEHGISMIEFVIPKSWEGQSLSELDVRRKYELNVIGM | 181 |
| Query: | 181 | RKAKNKPVDTEVPINSPLEEGIILVAIANSDAFQRYDYLGY | 221 |
| | | R+ + K +DT V PLE I+VAIAN F+++DYLGY | |
| Sbjct: | 182 | RQKEVKTLDTNVKPFEPLEPNTIIVAIANDHTFEKFDYLGY | 222 |

[8680] A related GBS gene <SEQ ID 8853> and protein <SEQ ID 8854> were also identified. Analysis of this protein sequence reveals the following:

| Lipop: Possible site: −1 Crend: 3 | | | |
|---|---|---|---|
| McG: Discrim Score: 5.14 | | | |
| GvH: Signal Score (−7.5): −0.860001 | | | |
| Possible site: 19 | | | |
| >>> Seems to have a cleavable N-term signal seq. | | | |
| ALOM program | count: 0 | value: 1.06 | threshold: 0.0 |

| | | |
|---|---|---|
| PERIPHERAL | Likelihood = 1.06 | 192 |

modified ALOM score: −0.71
*** Reasoning Step: 3
----- Final Results -----
bacterial outside --- Certainty = 0.3000 (Affirmative) < succ>
bacterial membrane --- Certainty = 0.0000 (Not Clear) < succ>
bacterial cytoplasm --- Certainty = 0.0000 (Not Clear)

[8681] The protein has homology with the following sequences in the databases:

[chemical structure]

[8682] SEQ ID 8854 (GBS57) was expressed in E. coli as a His-fusion product. SDS-PAGE analysis of total cell extract is shown in FIG. 19 (lane 6; MW 26 kDa). It was also expressed in E. coli as a GST-fusion product. SDS-PAGE analysis of total cell extract is shown in FIG. 21 (lane 11; MW 51.1 kDa) and in FIG. 183 (lane 9 & 10; MW 51 kDa).

[8683] The GBS57-GST fusion product was purified (FIG. 99A; see also FIG. 195, lane 8) and used to immunise mice (lane 1 product; 20 μg/mouse). The resulting antiserum was used for Western blot (FIG. 99B), FACS (FIG. 99C), and in the in vivo passive protection assay (Table III). These tests confirm that the protein is immunoaccessible on GBS bacteria and that it is an effective protective immunogen.

[8684] Based on this analysis, it was predicted that these proteins and their epitopes could be useful antigens for vaccines or diagnostics.

### EXAMPLE 1576

[8685] A DNA sequence (GBSx1670) was identified in S. agalactiae <SEQ ID 4871> which encodes the amino acid sequence <SEQ ID 4872>. Analysis of this protein sequence reveals the following:

| Possible site: 40 | | | |
|---|---|---|---|
| >>> Seems to have no N-terminal signal sequence | | | |
| INTEGRAL | Likelihood = −11.62 | Transmembrane | 73-89 (68-96) |
| INTEGRAL | Likelihood = −11.30 | Transmembrane | 254-270 (248-274) |
| INTEGRAL | Likelihood = −4.73 | Transmembrane | 127-143 (124-144) |
| INTEGRAL | Likelihood = −4.19 | Transmembrane | 50-66 (47-67) |
| INTEGRAL | Likelihood = −3.29 | Transmembrane | 25-41 (25-45) |

----- Final Results -----
bacterial membrane --- Certainty = 0.5649 (Affirmative) < succ>
bacterial outside --- Certainty = 0.0000 (Not Clear) < succ>
bacterial cytoplasm --- Certainty = 0.0000 (Not Clear) < succ>

[8686] A related GBS nucleic acid sequence <SEQ ID 8855> which encodes amino acid sequence <SEQ ID 8856> was also identified. Analysis of this protein sequence reveals the following:

| Lipop Possible site: −1 Crend: 9 | | | |
|---|---|---|---|
| McG: Discrim Score: −10.49 | | | |
| GvH: Signal Score (−7.5): −1.14 | | | |
| Possible site: 40 | | | |
| >>> Seems to have no N-terminal signal sequence | | | |
| ALOM program | count: 5 | value: −11.62 | threshold: 0.0 |

| | | | |
|---|---|---|---|
| INTEGRAL | Likelihood = −11.62 | Transmembrane | 73-89 (68-96) |
| INTEGRAL | Likelihood = −11.30 | Transmembrane | 254-270 (248-274) |
| INTEGRAL | Likelihood = −4.73 | Transmembrane | 127-143 (124-144) |
| INTEGRAL | Likelihood = −4.19 | Transmembrane | 50-66 (47-67) |

| | | |
|---|---|---|
| PERIPHERAL | Likelihood = 3.76 | 201 |

modified ALOM score: 2.82
*** Reasoning Step: 3
----- Final Results -----
bacterial membrane --- Certainty = 0.5649 (Affirmative) < succ>
bacterial outside --- Certainty = 0.0000 (Not Clear) < succ>
bacterial cytoplasm --- Certainty = 0.0000 (Not Clear) < succ>

[8687] The protein has homology with the following sequences in the GENPEPT database.

| >GP: CAB13178 GB: Z99110 ykoC [Bacillus subtilis] | | | |
|---|---|---|---|
| Identities = 61/226 (26%), Positives = 108/226 (46%), Gaps = 12/226 (5%) | | | |
| Query: | 49 | FLIVVSLGSLVLFRLAKIKWQQVSFVMTLVVVFAVLNIIMVYLFAPHYGDKIYGSSSLLL | 108 |
| | | F I++ G L+ + KW + + F +L V+ A K+ + L | |
| Sbjct: | 36 | FYIIIVAGVLLAAGIPLKKW------LLFTIPFLILAFGCVWTAAVF--GKVPTTPDNFL | 87 |
| Query: | 109 | KGIGPYDVTSQELFYLFNLILKYFCTVPLALLFLMTTNPSQFASSL-NQLGLSYKIAYAV | 167 |
| | | GP + S + +L + C L+++F+ TT+P F SL Q LS K+AY V | |
| Sbjct: | 88 | FQAGPISINSDNVSVGISLGFRILCFSALSMMFVFTTDPILFMLSLVQQCRLSPKLAYGV | 147 |
| Query: | 168 | SLTLRYIPDVQEEFYTIRRAQEARGIELSKKSNLVARIKGNLQIVTPLIFSSLERIDTVA | 227 |
| | | R++P +++E I++A + RG + +S ++ +I + PL+ S++ + + A | |
| Sbjct: | 148 | IAGFRFLPLLKDEVQLIQQAHKIRGG--AAESGIINKISALKRYTIPLLASAIRKAERTA | 205 |
| Query: | 228 | TAMELRRFGKNKRRTWYSKQSLEKSDIVLIILALASLFVSLYLIHL | 273 |
| | | AME + F ++ RT+Y S+ + D V L L LF +L+ L | |
| Sbjct: | 206 | LAMESKGFTGSRNRTYYRTLSVNRRDWVFFCLVLL-LFAGSFLVSL | 250 |

[8688] Based on this analysis, it was predicted that this protein and its epitopes, could be useful antigens for vaccines or diagnostics.

### EXAMPLE 1577

[8689] A DNA sequence (GBSx1671) was identified in S. agalactiae <SEQ ID 4873> which encodes the amino acid sequence <SEQ ID 4874>. This protein is predicted to be cobalt ABC transporter, ATP-binding protein (cbiO). Analysis of this protein sequence reveals the following:

| Possible site: 49 | | | |
|---|---|---|---|
| >>> Seems to have no N-terminal signal sequence | | | |
| INTEGRAL | Likelihood = −1.91 | Transmembrane | 436-452 (435-452) |

----- Final Results -----
bacterial membrane --- Certainty = 0.1765 (Affirmative) < succ>
bacterial outside --- Certainty = 0.0000 (Not Clear) < succ>
bacterial cytoplasm --- Certainty = 0.0000 (Not Clear) < succ>

[8690] The protein has homology with the following sequences in the GENPEPT database.

| >GP: CAB13179 GB: Z99110 similar to cation ABC transporter | | | |
|---|---|---|---|
| (ATP-binding protein) [Bacillus subtilis] | | | |
| Identities = 151/483 (31%), Positives = 248/483 (51%), Gaps = 19/483 (3%) | | | |
| Query: | 8 | KDFTFQYDVQSEPTLKGINLSIPKGEKVLILGPSGSGKSTLGHCLNGIIPNTHKGQYSGI | 67 |
| | | + +F Y+ +P + I+ + KGE VL+LGPSG GKS+L CLNG+ P G SG | |
| Sbjct: | 11 | EQLSFSYEEDEKPVFQDISFELQKGECVLLLGPSGCGKSSLALCLNGLYPEACDGIQSGH | 70 |
| Query: | 68 | FTINHKNAFDLSIYDK-SHLVSTVLQDPDGQFIGLTVAEDIAFALENDVVAQEEMASIVE | 126 |
| | | + K D + + V QDPD QF LTV ++IAF LEN + +EEM + | |
| Sbjct: | 71 | VFLFQKPVTDAETSETITQHAGVVFQDPDQQFCMLTVEDEIAFGLENLQIPKEEMTEKIN | 130 |
| Query: | 127 | MWAKRLEIAPLLSKRPQDLSGGQKQRVSLAGVLVDDSPILLFDEPLANLDPQSGQDIMAL | 186 |
| | | +L I L K LSGGQKQ+V+LA +L + +++ DEP + LDP S ++ + L | |
| Sbjct: | 131 | AVLGKLRITHLKEKMISTLSGGQKQKVALACILAMEPELIILDEPTSLLDPFSAREFVHL | 190 |
| Query: | 187 | VDRIHQEQDATTIIIEHRLED--VFYERVDRVVLFSDGQIIYNGEPDQLL--KTNFLSEY | 242 |
| | | + + +E+ + ++IEH+L++ + ER +VL G+ +G L + L + | |
| Sbjct: | 191 | MKDLQREKGFSLLVIEHQLDEWAPWIERT--IVLDKSGKKALDGLTKNLFQHEAETLKKL | 248 |
| Query: | 243 | GIREPLYISALKNLGYDFEKQNTMTSIDDFDFSELLIPKMRALDLDKHTDKLLSVQHLSV | 302 |
| | | GI P + L F M + + K +A + +L V LS | |
| Sbjct: | 249 | GIAIPKVCHLQEKLSMPFTLSKEMLFKEPIPAGH--VKKKKA----PSGESVLEVSSLSF | 302 |
| Query: | 303 | SYDLENNTLDDVSFDLYKGQRLAIVGKNGAGKSTLAKALCQFI-PNNATLIYNNEDVSQD | 361 |
| | | + + D+SF L +G A+VG NG GKSTL L + P + ++ ++ + + | |
| Sbjct: | 303 | ARG-QQAIFKDISFSLREGSLTALVGPNGTGKSTLLSVLASLMKPQSGKILLYDQPLQKY | 361 |
| Query: | 362 | SIKERAERIGYVLQNPNQMISQAMVFDEVALGLRLRGFSDNDIESRVYDILKVCGLYQFR | 421 |
| | | KE +R+G+V QNP V+DE+ G + ++ + E + +L+ GL | |
| Sbjct: | 362 | KEKELRKRMGFVFQNPEHQFVTDTVYDELLFGQK----ANAETEKKAQHLLQRFGLAHLA | 417 |
| Query: | 422 | NWPISALSFGQKKRVTIASILILNPEVIILDEPTAGQDMKHYTEMMSFLDKLSCDGHTIV | 481 |
| | | + A+S GQK+R+++A++L+ + +V++LDEPT GQD + E M + ++ +G ++ | |
| Sbjct: | 418 | DHHPFAISQGQKRRLSVATMLMHDVKVLLLDEPTFGQDARTAAECMEMIQRIKAEGTAVL | 477 |
| Query: | 482 | MIT | 484 |
| | | MIT | |
| Sbjct: | 478 | MIT | 480 |

[8691] There is also homology to SEQ ID 4416.

[8692] SEQ ID 4874 (GBS424d) was expressed in E. coli as a GST-fusion product. SDS-PAGE analysis of total cell extract is shown in FIG. 146 (lane 2 & 4; MW 77 kDa) and in FIG. 239 (lane 10; MW 77 kDa). It was also expressed in E. coli as a His-fusion product. SDS-PAGE analysis of total cell extract is shown in FIG. 146 (lane 5 & 7; MW 52 kDa) and in FIG. 182 (lane 4; MW 52 kDa). Purified GBS424d-His is shown in FIG. 241, lanes 6 & 7. Purified GBS424d-GST is shown in FIG. 246, lane 12.

[8693] Based on this analysis, it was predicted that this protein and its epitopes, could be useful antigens for vaccines or diagnostics.

### EXAMPLE 1578

[8694] A DNA sequence (GBSx1672) was identified in S. agalactiae <SEQ ID 4875> which encodes the amino acid sequence <SEQ ID 4876>. Analysis of this protein sequence reveals the following:

| Possible site: 58 | | | |
|---|---|---|---|
| >>> Seems to have no N-terminal signal sequence | | | |
| INTEGRAL | Likelihood = −8.12 | Transmembrane | 39-55 (35-63) |
| INTEGRAL | Likelihood = −3.98 | Transmembrane | 72-88 (71-90) |
| INTEGRAL | Likelihood = −3.66 | Transmembrane | 108-124 (106-127) |
| INTEGRAL | Likelihood = −2.34 | Transmembrane | 182-198 (181-198) |
| INTEGRAL | Likelihood = −1.44 | Transmembrane | 141-157 (139-158) |

----- Final Results -----
bacterial membrane --- Certainty = 0.4248 (Affirmative) < succ>
bacterial outside --- Certainty = 0.0000 (Not Clear) < succ>
bacterial cytoplasm --- Certainty = 0.0000 (Not Clear) < succ>

[8695] The protein has homology with the following sequences in the GENPEPT database.

| >GP: CAB59830 GB: AJ012388 hypothetical protein [Lactococcus lactis] | | | |
|---|---|---|---|
| Identities = 109/182 (59%), Positives = 141/182 (76%) | | | |
| Query: | 31 | MNTNTIKKVVATGIGAALFIIIGMLVNIPTPIPNTNIQLQYAVLALFAVIYGPGVGFFTG | 90 |
| | | M N++K VVATGIGAALF+IIG L+NIPTPIPNT+IQLQYAVLALF+ ++GP GF G | |
| Sbjct: | 1 | MKNNSVKIVVATGIGAALFVIIGWLINIPTPIPNTSIQLQYAVLALFSALFGPLAGFLIG | 60 |
| Query: | 91 | FIGHALKDSIQYGSPWWTWVLVSGLLGLMIGFFAKKLAIQLSGMTKKDLLLFNVVQVIAN | 120 |
| | | FIGHALKDS YG+PWWTWVL SGL+GL +GF K+ ++ K+++ FN+VQ +AN | |
| Sbjct: | 61 | FIGHALKDSFLYGAPWWTWVLGSGLMGLFLGFGVKRESLTQGIFGNKEIIRFNIVQFLAN | 120 |
| Query: | 151 | LIGWSVVAPYGDIFFYSEPASKVFAQGFLSSLVNSITIGVGGTLLLLAYAKSRPQKGSLS | 210 |
| | | ++ W ++AP GDI YSEPA+KVF QG ++ LVN++TI V GTLLL YA +R + G+L | |
| Sbjct: | 121 | VVVWGLIAPIGDILVYSEPANKVFTQGVVAGLVNALTIAVAGTLLLKLYAATRTKSGTLD | 180 |
| Query: | 211 | KD | 212 |
| | | K+ | |
| Sbjct: | 181 | KE | 182 |

[8696] No corresponding DNA sequence was identified in S. pyogenes.

[8697] A related GBS gene <SEQ ID 8857> and protein <SEQ ID 8858> were also identified. Analysis of this protein sequence reveals the following:

| Lipop: Possible site: −1 Crend: 6 | | | |
|---|---|---|---|
| McG: Discrim Score: −5.01 | | | |
| GvH: Signal Score (−7.5): −5.9 | | | |
| Possible site: 50 | | | |
| >>> Seems to have no N-terminal signal sequence | | | |
| ALOM program | count: 5 | value: −8.12 | threshold: 0.0 |

| | | | |
|---|---|---|---|
| INTEGRAL | Likelihood = −8.12 | Transmembrane | 31-47 (27-55) |
| INTEGRAL | Likelihood = −3.98 | Transmembrane | 64-80 (63-82) |
| INTEGRAL | Likelihood = −3.66 | Transmembrane | 100-116 (98-119) |
| INTEGRAL | Likelihood = −2.34 | Transmembrane | 174-190 (173-190) |
| INTEGRAL | Likelihood = −1.44 | Transmembrane | 133-149 (131-150) |

| | | |
|---|---|---|
| PERIPHERAL | Likelihood = 5.78 | 9 |

modified ALOM score: 2.12
*** Reasoning Step: 3
----- Final Results -----
bacterial membrane --- Certainty = 0.4248 (Affirmative) < succ>
bacterial outside --- Certainty = 0.0000 (Not Clear) < succ>
bacterial cytoplasm --- Certainty = 0.0000 (Not Clear) < succ>

[8698] The protein has homology with the following sequences in the databases:

[chemical structure]

[8699] Based on this analysis, it was predicted that these proteins and their epitopes could be useful antigens for vaccines or diagnostics.

### EXAMPLE 1579

[8700] A DNA sequence (GBSx1673) was identified in S. agalactiae <SEQ ID 4877> which encodes the amino acid sequence <SEQ ID 4878>. Analysis of this protein sequence reveals the following:

| Possible site: 42 | | | |
|---|---|---|---|
| >>> Seems to have no N-terminal signal sequence | | | |
| INTEGRAL | Likelihood = −6.85 | Transmembrane | 86-102 (80-106) |

----- Final Results -----
bacterial membrane --- Certainty = 0.3739 (Affirmative) < succ>
bacterial outside --- Certainty = 0.0000 (Not Clear) < succ>
bacterial cytoplasm --- Certainty = 0.0000 (Not Clear) < succ>

[8701] The protein has no significant homology with any sequences in the GENPEPT database.

[8702] No corresponding DNA sequence was identified in S. pyogenes.

[8703] Based on this analysis, it was predicted that this protein and its epitopes, could be useful antigens for vaccines or diagnostics.

### EXAMPLE 1580

[8704] A DNA sequence (GBSx1674) was identified in S. agalactiae <SEQ ID 4879> which encodes the amino acid sequence <SEQ ID 4880>. Analysis of this protein sequence reveals the following:

| Possible site: 47 | | | |
|---|---|---|---|
| >>> Seems to have a cleavable N-term signal seq. | | | |
| INTEGRAL | Likelihood = −3.61 | Transmembrane | 107-123 (96-124) |
| INTEGRAL | Likelihood = −1.86 | Transmembrane | 124-140 (124-142) |
| INTEGRAL | Likelihood = −1.38 | Transmembrane | 83-99 (83-100) |
| INTEGRAL | Likelihood = 1.12 | Transmembrane | 142-158 (142-160) |

----- Final Results -----
bacterial membrane --- Certainty = 0.2444 (Affirmative) < succ>
bacterial outside --- Certainty = 0.0000 (Not Clear) < succ>
bacterial cytoplasm --- Certainty = 0.0000 (Not Clear) < succ>

[8705] A related GBS nucleic acid sequence <SEQ ID 9415> which encodes amino acid sequence <SEQ ID 9416> was also identified.

[8706] The protein has homology with the following sequences in the GENPEPT database.

| >GP: AAC76124 GB: AE000391 putative transport protein [Escherichia | | | |
|---|---|---|---|
| coli K12] | | | |
| Identities = 139/178 (78%), Positives = 159/178 (89%) | | | |
| Query: | 1 | MVGTMLFVALVVNPIIAFVMMRKNPYPLVLRCLKDSGITAFFTRSSAANIPVNMRLCEDL | 60 |
| | | +VG ML VALVVNP++ + +R+NP+PLVL CL++SG+ AFFTRSSAANIPVNM LCE L | |
| Sbjct: | 222 | LVGCMLLVALVVNPLLVWWKIRRNPFPLVLLCLRESGVYAFFTRSSAANIPVNMALCEKL | 281 |
| Query: | 61 | GLDKDTYSVSIPLGAAINMAGAAITINILTLAAVNTLGITVDFPTAFLLSVVAAVSACGA | 120 |
| | | LD+DTYSVSIPLGA INMAGAAITI +LTLAAVNTLGI VD PTA LLSVVA++ ACGA | |
| Sbjct: | 282 | NLDRDTYSVSIPLGATINMAGAAITITVLTLAAVNTLGIPVDLPTALLLSVVASLCACGA | 341 |
| Query: | 121 | SGVTGGSLLLIPVACSLFGISNDVAMQVVGVGFIVGVIQDSCETALNSSTDVLFTAVA | 178 |
| | | SGV GGSLLLIP+AC++FGISND+AMQVV VGFI+GV+QDSCETALNSSTDVLFTA A | |
| Sbjct: | 342 | SGVAGGSLLLIPLACNMFGISNDIAMQVVAVGFIIGVLQDSCETALNSSTDVLFTAAA | 399 |

[8707] A related DNA sequence was identified in S. pyogenes <SEQ ID 4881> which encodes the amino acid sequence <SEQ ID 4882>. Analysis of this protein sequence reveals the following:

| Possible site: 58 | | | |
|---|---|---|---|
| >>> Seems to have an uncleavable N-term signal seq | | | |
| INTEGRAL | Likelihood = −13.69 | Transmembrane | 212-228 (202-239) |
| INTEGRAL | Likelihood = −7.38 | Transmembrane | 78-94 (74-108) |
| INTEGRAL | Likelihood = −6.53 | Transmembrane | 179-195 (175-200) |
| INTEGRAL | Likelihood = −6.10 | Transmembrane | 315-331 (312-341) |
| INTEGRAL | Likelihood = −5.36 | Transmembrane | 44-60 (42-61) |
| INTEGRAL | Likelihood = −4.41 | Transmembrane | 13-29 (11-41) |
| INTEGRAL | Likelihood = −3.19 | Transmembrane | 340-356 (333-358) |
| INTEGRAL | Likelihood = −3.08 | Transmembrane | 145-161 (144-162) |
| INTEGRAL | Likelihood = −0.90 | Transmembrane | 358-374 (358-376) |

----- Final Results -----
bacterial membrane --- Certainty = 0.6477 (Affirmative) < succ>
bacterial outside --- Certainty = 0.0000 (Not Clear) < succ>
bacterial cytoplasm --- Certainty = 0.0000 (Not Clear) < succ>

[8708] The protein has homology with the following sequences in the databases:

| >GP: AAF95950 GB: AE004347 sodium/dicarboxylate symporter [Vibrio | | | |
|---|---|---|---|
| cholerae] | | | |
| Identities = 243/385 (63%), Positives = 299/385 (77%), Gaps = 2/385 (0%) | | | |
| Query: | 9 | VRVSLIKKIGIGVVIGVMLGILAPDLTG-FSILGKLFVGGLKAIAPLLVFALVSQAISHQ | 67 |
| | | VR +L+ +I G+++G + +P+ ++G LFVG LKA+AP+LVF LV+ +I++Q | |
| Sbjct: | 11 | VRGNLVLQILAGILLGAAMATFSPEYAQKVGLIGNLFVGALKAVAPVLVFILVASSIANQ | 70 |
| Query: | 68 | KKGKQTNMTLIIVLYLFGTFASALVAVLTAYLFPLTLVLNTPVNTELSPPQGVAEVFQSL | 127 |
| | | KK + T M I+VLYLFGTF++AL AV+ ++LFP TLVL T +PPQG+AEV +L | |
| Sbjct: | 71 | KKNQHTYMRPIVVLYLFGTFSAALTAVILSFLFPTTLVLATGAEGA-TPPQGIAEVLNTL | 129 |
| Query: | 128 | LLKLVDNPINALATANYIGVLSWAIIFGLALKAASKETKHLIKTAAEVTSQIVVWIINLA | 187 |
| | | L KLVDNP++AL ANYIG+L+W + GLAL +S TK + + + SQIV +II LA | |
| Sbjct: | 130 | LFKLVDNPVSALMNANYIGILAWGVGLGLALHHSSSTTKAVFEDLSHGISQIVRFIIRLA | 189 |
| Query: | 188 | PIGIMSLVFTTISENGVGILSDYAFLILVLVGTMLFVALVVNPLIAVLITRQNPYPLVLR | 247 |
| | | P GI LV +T + G L+ YA L+ VL+G M F+ALVVNP+I R+NP+PLVL+ | |
| Sbjct: | 190 | PFGIFGLVASTFATTGFDALAGYAQLLAVLLGAMAFIALVVNPMIVYYKIRRNPFPLVLQ | 249 |
| Query: | 248 | CLRESGLTAFFTRSSAANIPVNMQLCQKIGLSKDTYSVSIPLGATINMGGAAITINVLTL | 307 |
| | | CLRESG+TAFFTRSSAANIPVNM LC+K+ L +DTYSVSIPLGATINM GAAITI VLTL | |
| Sbjct: | 250 | CLRESGVTAFFTRSSAANIPVNMALCEKLKLDEDTYSVSIPLGATINMAGAAITITVLTL | 309 |
| Query: | 308 | AAVHTFGIPIDELTALLLSVVAAVSACGASGVAGGSLLLIPVACSLFGISNDLAMQVVGV | 367 |
| | | AAVHT GI +D +TALLLSVVAAVSACGASGVAGGSLLLIP+AC LFGISND+AMQVV V | |
| Sbjct: | 310 | AAVHTMGIEVDLMTALLLSVVAAVSACGASGVAGGSLLLIPLACGLFGISNDIAMQVVAV | 369 |
| Query: | 368 | GFIVGVIQDSCETALNSSTDVLFTA | 392 |
| | | GFI+GVIQDS ETALNSSTDVLFTA | |
| Sbjct: | 370 | GFIIGVIQDSAETALNSSTDVLFTA | 394 |

[8709] An alignment of the GAS and GBS proteins is shown below.

| Identities = 153/186 (82%), Positives = 172/186 (92%) | | | |
|---|---|---|---|
| Query: | 1 | MVGTMLFVALVVNPIIAFVMMRKNPYPLVLRCLKDSGITAFFTRSSAANIPVNMRLCEDL | 60 |
| | | +VGTMLFVALVVNP+IA ++ R+NPYPLVLRCL++SG+TAFFTRSSAANIPVNM+LC+ + | |
| Sbjct: | 217 | LVGTMLFVALVVNPLIAVLITRQNPYPLVLRCLRESGLTAFFTRSSAANIPVNMQLCQKI | 276 |
| Query: | 61 | GLDKDTYSVSIPLGAAINMAGAAITINILTLAAVNTLGITVDFPTAFLLSVVAAVSACGA | 120 |
| | | GL KDTYSVSIPLGA INM GAAITIN+LTLAAV+T GI +DF TA LLSVVAAVSACGA | |
| Sbjct: | 277 | GLSKDTYSVSIPLGATINMGGAAITINVLTLAAVHTFGIPIDFLTALLLSVVAAVSACGA | 336 |
| Query: | 121 | SGVTGGSLLLIPVACSLFGISNDVAMQVVGVGFIVGVIQDSCETALNSSTDVLFTAVAEK | 180 |
| | | SGV GGSLLLIPVACSLFGISND+AMQVVGVGFIVGVIQDSCETALNSSTDVLFTA+AE | |
| Sbjct: | 337 | SGVAGGSLLLIPVACSLFGISNDLAMQVVGVGFIVGVIQDSCETALNSSTDVLFTAIAEN | 396 |
| Query: | 181 | SVFGKK | 186 |
| | | + + +K | |
| Sbjct: | 397 | AFWKRK | 402 |

[8710] Based on this analysis, it was predicted that these proteins and their epitopes could be useful antigens for vaccines or diagnostics.

### EXAMPLE 1581

[8711] A DNA sequence (GBSx1675) was identified in S. agalactiae <SEQ ID 4883> which encodes the amino acid sequence <SEQ ID 4884>. This protein is predicted to be acid phosphatase. Analysis of this protein sequence reveals the following:

Possible site: 40
>>> Seems to have no N-terminal signal sequence
----- Final Results -----
bacterial cytoplasm --- Certainty = 0.2436 (Affirmative) < succ>
bacterial membrane --- Certainty = 0.0000 (Not Clear) < succ>
bacterial outside --- Certainty = 0.0000 (Not Clear) < succ>

[8712] A related GBS nucleic acid sequence <SEQ ID 9427> which encodes amino acid sequence <SEQ ID 9428> was also identified.

[8713] The protein has homology with the following sequences in the GENPEPT database.

| >GP: CAA73175 GB: Y12602 acid phosphatase [Streptococcus equisimilis] | | | |
|---|---|---|---|
| Identities = 167/251 (66%), Positives = 209/251 (82%) | | | |
| Query: | 7 | EQKTKFKNISLSSNKLLAKENTMSVLWYQNSAEAKALYLQGYNVAKMKLDDWLQKPSEKP | 66 |
| | | ++ K ++ S +L + ENTMSVLWYQ +AEAKALYLQGY +A +L + L + ++KP | |
| Sbjct: | 34 | KETVKQTKVTYSDEQLRSNENTMSVLWYQRAAEAKALYLQGYQLATDRLKNQLGQATDKP | 93 |
| Query: | 67 | YSIILDLDETVLDNSPYQAKNIKDGSSFTPESWDKWVQKKSAKAVAGAKEFLKYANEKGI | 126 |
| | | YSI+LD+DETVLDNSPYQAKNI +G+SFTPESWD WVQKK AK VAGAKEFL++A++ G+ | |
| Sbjct: | 94 | YSIVLDIDETVLDNSPYQAKNILEGTSFTPESWDVWVQKKEAKPVAGAKEFLQFADQNGV | 153 |
| Query: | 127 | KIYYVSDRTDAQVDATKENLEKEGIPVQGKDHLLFLKKGMKSKESRRQAVQKDTNLIMLF | 186 |
| | | +IYY+SDR +QVDAT ENL+KEGIPVQG+DHLLFL++G+KSKE+RRQ V++ TNLIMLF | |
| Sbjct: | 154 | QIYYISDRAVSQVDATMENLQKEGIPVQGRDHLLFLEEGVKSKEARRQKVKETTNLIMLF | 213 |
| Query: | 187 | GDNLVDFADFSKSSSTDREQLLTKLQSEFGSKFIVFPNPMYGSWESAIYQGKHLDVQKQL | 246 |
| | | GDNLVDFADFSK S DR LL++LQ EFG +FI+FPNPMYGSWESA+Y+G LD QL | |
| Sbjct: | 214 | GDNLVDFADFSKKSEEDRTALLSELQEEFGRQFIIFPNPMYGSWESAVYKGDKLDASHQL | 273 |
| Query: | 247 | KERQKMLHSYD | 257 |
| | | KER+K L S++ | |
| Sbjct: | 274 | KERRKALESFE | 284 |

[8714] A related DNA sequence was identified in S. pyogenes <SEQ ID 4885> which encodes the amino acid sequence <SEQ ID 4886>. Analysis of this protein sequence reveals the following:

```
Possible site: 25
>>> May be a lipoprotein
----- Final Results -----
                              bacterial membrane --- Certainty = 0.0000(Not Clear) < succ>
                                bacterial outside --- Certainty = 0.0000(Not Clear) < succ>
                            bacterial cytoplasm --- Certainty = 0.0000(Not Clear) < succ>
```

[8715] The protein has homology with the following sequences in the databases:

| >GP: CAA73175 GB: Y12602 acid phosphatase [Streptococcus equisimilis] | | | |
|---|---|---|---|
| Identities = 234/284 (82%), Positives = 261/284 (91%) | | | |
| Query: | 1 | MKSKKVVSVISLTLSLFLVTGCAKVDNNKSVNLKPATKQTYNSYSDDQLRSRENTMSVLW | 60 |
| | | MK+K+V SVISL LSLFLVTGCA++D+ +VN K KQT +YSD+QLRS ENTMSVLW | |
| Sbjct: | 1 | MKTKQVASVISLALSLFLVTGCAQLDHKANVNSKETVKQTKVTYSDEQLRSNENTMSVLW | 60 |
| Query: | 61 | YQRAAETQALYLQGYQLATDRLKEQLNKPTDKPYSIVLDIDETVLDNSPYQAKNVLEGTG | 120 |
| | | YQRAAE +ALYLQGYQLATDRLK QL + TDKPYSIVLDIDETVLDNSPYQAKN+LEGT | |
| Sbjct: | 61 | YQRAAEAKALYLQGYQLATDRLKNQLGQATDKPYSIVLDIDETVLDNSPYQAKNILEGTS | 120 |
| Query: | 121 | FTPESWDYWVQKKEAKPVAGAKDFLQFADQNGVQIYYISDRSTTQVDATMENLQKEGIPV | 180 |
| | | FTPESWD WVQKKEAKPVAGAK+FLQFADQNGVQIYYISDR+ +QVDATMENLQKEGIPV | |
| Sbjct: | 121 | FTPESWDVWVQKKEARPVAGAKEFLQFADQNGVQIYYISDRAVSQVDATMENLQKEGIPV | 180 |
| Query: | 181 | QGRDHLLFLEKGVKSKESRRQKVKETTNVTMLFGDNLLDFADFSKKSQEDRTALLSDLQE | 240 |
| | | QGRDHLLFLE+GVKSKE+RRQKVKETTN+ MLFGDNL+DFADFSKKS+EDRTALLS+LQE | |
| Sbjct: | 181 | QGRDHLLFLEEGVKSKEARRQKVKETTNLIMLFGDNLVDFADFSKKSEEDRTALLSELQE | 240 |
| Query: | 241 | EFGRRFIIFPNPMYGSWEGAIYKGEKLDVLKQLEERRKSLKSFK | 284 |
| | | EFGR+FIIFPNPMYGSWE A+YKG+KLD QL+ERRK+L+SF+ | |
| Sbjct: | 241 | EFGRQFIIFPNPMYGSWESAVYKGDKLDASHQLKERRKALESFE | 284 |

[8716] An alignment of the GAS and GBS proteins is shown below.

| Identities = 166/247 (67%), Positives = 207/247 (83%) | | | |
|---|---|---|---|
| Query: | 10 | TKFKNISLSSNKLLAKENTMSVLWYQNSAEAKALYLQGYNVAKMKLDDWLQKPSEKPYSI | 69 |
| | | TK S S ++L ++ENTMSVLWYQ +AE +ALYLQGY +A +L + L KP++KPYSI | |
| Sbjct: | 37 | TKQTYNSYSDDQLRSRENTMSVLWYQRAAETQALYLQGYQLATDRLKEQLNKPTDKPYSI | 96 |
| Query: | 70 | ILDLDETVLDNSPYQAKNIKDGSSFTPESWDKWVQKKSAKAVAGAKEFLKYANEKGIKIY | 129 |
| | | +LD+DETVLDNSPYQAKN+ +G+ FTPESWD WVQKK AK VAGAK+FL++A++ G++IY | |
| Sbjct: | 97 | VLDIDETVLDNSPYQAKNVLEGTGFTPESWDYWVQKKEAKPVAGAKDFLQFADQNGVQIY | 156 |
| Query: | 130 | YVSDRTDAQVDATKENLEKEGIPVQGKDHLLFLKKGMKSKESRRQAVQKDTNLIMLFGDN | 189 |
| | | Y+SDR+ QVDAT ENL+KEGIPVQG+DHLLFL+KG+KSKESRRQ V++ TN+ MLFGDN | |
| Sbjct: | 157 | YISDRSTTQVDATMENLQKEGIPVQGRDHLLFLEKGVKSKESRRQKVKETTNVTMLFGDN | 216 |
| Query: | 190 | LVDFADFSKSSSTDREQLLTKLQSEFGSKFIVFPNPMYGSWESAIYQGKHLDVQKQLKER | 249 |
| | | L+DFADFSK S DR LL+ LQ EFG +FI+FPNPMYGSWE AIY+G+ LDV KQL+ER | |
| Sbjct: | 217 | LLDFADFSKKSQEDRTALLSDLQEEFGRRFIIFPNPMYGSWEGAIYKGEKLDVLKQLEER | 276 |
| Query: | 250 | QKMLHSY | 256 |
| | | +K L S+ | |
| Sbjct: | 277 | RKSLKSF | 283 |

[8717] SEQ ID 9428 (GBS661) was expressed in E. coli as a GST-fusion product. SDS-PAGE analysis of total cell extract is shown in FIG. 136 (lane 2 & 4; MW 61 kDa+lane 3; MW 27 kDa) and in FIG. 186 (lane 11; MW 61 kDa). It was also expressed in E. coli as a His-fusion product. SDS-PAGE analysis of total cell extract is shown in FIG. 136 (lane 5-7; MW 25 kDa).

[8718] GBS661-GST was purified as shown in FIG. 237, lane 5.

[8719] Based on this analysis, it was predicted that these proteins and their epitopes could be useful antigens for vaccines or diagnostics.

### EXAMPLE 1582

[8720] A DNA sequence (GBSx1676) was identified in S. agalactiae <SEQ ID 4887> which encodes the amino acid sequence <SEQ ID 4888>. This protein is predicted to be unnamed protein product. Analysis of this protein sequence reveals the following:

```
Possible site: 58
>>> Seems to have no N-terminal signal sequence
----- Final Results -----
                            bacterial cytoplasm --- Certainty = 0.3462(Affirmative) < succ>
                              bacterial membrane --- Certainty = 0.0000(Not Clear) < succ>
                                bacterial outside --- Certainty = 0.0000(Not Clear) < succ>
```

[8721] A related DNA sequence was identified in S. pyogenes <SEQ ID 4889> which encodes the amino acid sequence <SEQ ID 4890>. Analysis of this protein sequence reveals the following:

```
Possible site: 58
>>> Seems to have no N-terminal signal sequence
----- Final Results -----
                            bacterial cytoplasm --- Certainty = 0.3462(Affirmative) < succ>
                              bacterial membrane --- Certainty = 0.0000(Not Clear) < succ>
                                bacterial outside --- Certainty = 0.0000(Not Clear) < succ>
```

[8722] An alignment of the GAS and GBS proteins is shown below.

| Identities = 395/398 (99%), Positives = 398/398 (99%) | | | |
|---|---|---|---|
| Query: | 1 | MAKLTVKDVDLKGKKVLVRVDFNVPLKDGVITNDNRITAALPTIKYIIEQGGRAILFSHL | 60 |
| | | MAKLTVKDVDLKGKKVLVRVDFNVPLKDGVITNDNRITAALPTIKYIIEQGGRAILFSHL | |
| Sbjct: | 1 | MAKLTVKDVDLKGKKVLVRVDFNVPLKDGVITNDNRITAALPTIKYIIEQGGRAILFSHL | 60 |
| Query: | 61 | GRVKEEADKEGKSLAPVAADLAAKLGQDVVFPGVTRGAKLEEAINALEDGQVLLVENTRF | 120 |
| | | GRVKEEADKEGKSLAPVAADLAAKLGQDVVFPGVTRG+KLEEAINALEDGQVLLVENTRF | |
| Sbjct: | 61 | GRVKEEADKEGKSLAPVAADLAAKLGQDVVFPGVTRGSKLEEAINALEDGQVLLVENTRF | 120 |
| Query: | 121 | EDVDGKKESKNDEELGKYWASLGDGIFVNDAFGTAHRAHASNVGISANVEKAVAGFLLEN | 180 |
| | | EDVDGKKESKNDEELGKYWASLGDGIFVNDAFGTAHRAHASNVGISANVEKAVAGFLLEN | |
| Sbjct: | 121 | EDVDGKKESKNDEELGKYWASLGDGIFVNDAFGTAHRAHASNVGISANVEKAVAGFLLEN | 180 |
| Query: | 181 | EIAYIQEAVETPERPFVAILGGSKVSDKIGVIENLLEKADKVLIGGGMTYTFYKAQGIEI | 240 |
| | | EIAYIQEAVETPERPFVAILGGSKVSDKIGVIENLLEKADKVLIGGGMTYTFYKAQGIEI | |
| Sbjct: | 181 | EIAYIQEAVETPERPFVAILGGSKVSDKIGVIENLLEKADKVLIGGGMTYTFYKAQGIEI | 240 |
| Query: | 241 | GNSLVEEDKLDVAKDLLEKSNGKLILPVDSKEANAFAGYTEVRDTEGEAVSEGFLGLDIG | 300 |
| | | GNSLVEEDKLDVAKDLLEKSNGKLILPVDSKEANAFAGYTEVRDTEGEAVSEGFLGLDIG | |
| Sbjct: | 241 | GNSLVEEDKLDVAKDLLEKSNGKLILPVDSKEANAFAGYTEVRDTEGEAVSEGFLGLDIG | 300 |
| Query: | 301 | PKSIAKFDEALTGAKTVVWNGPMGVFENPDFQAGTIGVMDAIVKQPGVKSIIGGGDSAAA | 360 |
| | | PKSIA+FD+ALTGAKTVVWNGPMGVFENPDFQAGTIGVMDAIVKQPGVKSIIGGGDSAAA | |
| Sbjct: | 301 | PKSIAEFDQALTGAKTVVWNGPMGVFENPDFQAGTIGVMDAIVKQPGVKSIIGGGDSAAA | 360 |
| Query: | 361 | AINLGRADKFSWISTGGGASMELLEGKVLPGLAALTEK | 398 |
| | | AINLGRADKFSWISTGGGASMELLEGKVLPGLAALTEK | |
| Sbjct: | 361 | AINLGRADKFSWISTGGGASMELLEGKVLPGLAALTEK | 398 |

[8723] Based on this analysis, it was predicted that these proteins and their epitopes could be useful antigens for vaccines or diagnostics.

### EXAMPLE 1583

[8724] A DNA sequence (GBSx1677) was identified in S. agalactiae <SEQ ID 4891> which encodes the amino acid sequence <SEQ ID 4892>. Analysis of this protein sequence reveals the following:

| Possible site: 53 | | | | |
|---|---|---|---|---|
| >>> Seems to have no N-terminal signal sequence | | | | |
| | INTEGRAL | Likelihood = −8.39 | Transmembrane | 97-113 (93-118) |
| | INTEGRAL | Likelihood = −3.66 | Transmembrane | 25-41 (24-48) |
| | INTEGRAL | Likelihood = −3.40 | Transmembrane | 121-137 (121-140) |
| | INTEGRAL | Likelihood = −3.24 | Transmembrane | 72-88 (72-88) |
| | INTEGRAL | Likelihood = −2.07 | Transmembrane | 143-159 (143-160) |

```
----- Final Results -----
                              bacterial membrane --- Certainty = 0.4354(Affirmative) < succ>
                                bacterial outside --- Certainty = 0.0000(Not Clear) < succ>
                            bacterial cytoplasm --- Certainty = 0.0000(Not Clear) < succ>
```

[8725] The protein has no significant homology with any sequences in the GENPEPT database.

[8726] A related DNA sequence was identified in S. pyogenes <SEQ ID 4893> which encodes the amino acid sequence <SEQ ID 4894>. Analysis of this protein sequence reveals the following:

| Possible site: 53 | | | | |
|---|---|---|---|---|
| >>> Seems to have no N-terminal signal sequence | | | | |
| | INTEGRAL | Likelihood = −8.23 | Transmembrane | 97-113 (93-118) |
| | INTEGRAL | Likelihood = −7.17 | Transmembrane | 121-137 (119-140) |
| | INTEGRAL | Likelihood = −4.19 | Transmembrane | 25-41 (24-48) |
| | INTEGRAL | Likelihood = −3.24 | Transmembrane | 72-88 (72-88) |
| | INTEGRAL | Likelihood = −2.55 | Transmembrane | 154-170 (154-170) |

```
----- Final Results -----
                              bacterial membrane --- Certainty = 0.4291(Affirmative) < succ>
                                bacterial outside --- Certainty = 0.0000(Not Clear) < succ>
                            bacterial cytoplasm --- Certainty = 0.0000(Not Clear) < succ>
```

[8727] The protein has no significant homology with any sequences in the GENPEPT database.

[8728] An alignment of the GAS and GBS proteins is shown below.

| Identities = 155/178 (87%), Positives = 169/178 (94%) | | | |
|---|---|---|---|
| Query: | 1 | MKTLKKLLSNYKFDIKKFKLGMRTFKTGLSVFLVLLVFHLFGWKGLQIGALTAVFSLRED | 60 |
| | | MKTL+KLLSNYKFDIKKFKLGMRT KTGLSVFLVLLVFHLFGWKGLQIGALTAVFSLRED | |
| Sbjct: | 1 | MKTLRKLLSNYKFDIKKFKLGMRTLKTGLSVFLVLLVFHLFGWKGLQIGALTAVFSLRED | 60 |
| Query: | 61 | FDKSVHFGFSRIIGNSIGGLLSLVFFAFNEIFHQAFWVTLLIVPICTMLCIMINVACNNK | 120 |
| | | FDKSVHFGFSRIIGNSIGGLLSLVFFAFNEIFHQAFWVTLLIVPICTMLCIM+NVACNNK | |
| Sbjct: | 61 | FDKSVHFGFSRIIGNSIGGLLSLVFFAFNEIFHQAFWVTLLIVPICTMLCIMVNVACNNK | 120 |
| Query: | 121 | SGIIGGTAALLIITLSIPSGETILYVFARIFETFCGVFIAMMVNTDIEILRKKLKNNK | 178 |
| | | SGIIG AALLIITLSIP+G+T +YV +R+FETFCGVF+A++VNTD+E+++ K N K | |
| Sbjct: | 121 | SGIIGAVAALLIITLSIPTGQTFIYVTSRVFETFCGVFVAILVNTDVELIKNKWFNKK | 178 |

[8729] Based on this analysis, it was predicted that these proteins and their epitopes could be useful antigens for vaccines or diagnostics.

### EXAMPLE 1584

[8730] A DNA sequence (GBSx1678) was identified in S. agalactiae <SEQ ID 4895> which encodes the amino acid sequence <SEQ ID 4896>. This protein is predicted to be regulatory protein glnr (glnR). Analysis of this protein sequence reveals the following:

```
Possible site: 17
>>> Seems to have an uncleavable N-term signal seq
----- Final Results -----
                              bacterial membrane --- Certainty = 0.0000(Not Clear) < succ>
                                bacterial outside --- Certainty = 0.0000(Not Clear) < succ>
                            bacterial cytoplasm --- Certainty = 0.0000(Not Clear) < succ>
```

[8731] The protein has homology with the following sequences in the GENPEPT database.

| >GP: BAA00402 GB: D00513 ORF129 [Bacillus cereus] | | | |
|---|---|---|---|
| Identities = 59/123 (47%), Positives = 89/123 (71%), | | | |
| Gaps = 5/123 (4%) | | | |
| Query: | 4 | RELRRTMAVFPIGAVMKLTDLTARQIRYYEDQGLITPERTEGNRRMFSLNDMDRLLEIKD | 63 |
| | | +E RR+ +FPIG VM LT L+ARQIRYYE+ L++P RT+GNRR+FS ND+D+LLEIKD | |
| Sbjct: | 2 | KEDRRSAPLFPIGIVMDLTQLSARQIRYYEEHNLVSPTRTKGNRRLFSFNDVDKLLEIKD | 61 |
| Query: | 64 | FISDGLHISDIKNEYMQRQH-----KSKEKQKSLSDAEVRRLLQDELRNQGRFSSPSQHI | 118 |
| | | + GL+++ IK + +++ K KE+ K +S E+R++L+DEL++ GRF+ S | |
| Sbjct: | 62 | LLDQGLNMAGIKQVLLMKENQTEAVKVKEETKEISKTELRKILRDELQHTGRFNRTSLRQ | 121 |
| Query: | 119 | GNM | 121 |
| | | G++ | |
| Sbjct: | 122 | GDI | 124 |

[8732] A related DNA sequence was identified in S. pyogenes <SEQ ID 4897> which encodes the amino acid sequence <SEQ ID 4898>. Analysis of this protein sequence reveals the following:

```
Possible site: 20
>>> Seems to have an uncleavable N-term signal seq
----- Final Results -----
                              bacterial membrane --- Certainty = 0.0000(Not Clear) < succ>
                                bacterial outside --- Certainty = 0.0000(Not Clear) < succ>
                            bacterial cytoplasm --- Certainty = 0.0000(Not Clear) < succ>
```

[8733] The protein has homology with the following sequences in the databases:

| >GP: BAA00402 GB: D00513 ORF129 [Bacillus cereus] | | | |
|---|---|---|---|
| Identities = 59/122 (48%), Positives = 83/122 (67%), | | | |
| Gaps = 5/122 (4%) | | | |
| Query: | 4 | KELRRSMAVFPIGTVMTLTDLSARQIRYYEDQGLIKPERTQGNRRMFSLNDMDRLLEIKD | 63 |
| | | KE RRS +FPIG VM LT LSARQIRYYE+ L+ P RT+GNRR+FS ND+D+LLEIKD | |
| Sbjct: | 2 | KEDRRSAPLFPIGIVMDLTQLSARQIRYYEEHNLVSPTRTKGNRRLFSFNDVDKLLEIKD | 61 |
| Query: | 64 | FLSEGLNIAAIKREYVERQG-----KLMQKQKALTDADVRRILHDEMLTQSGFSTPSQHI | 118 |
| | | L +GLN+A IK+ + ++ K+ ++ K ++ ++R+IL DE+ F+ S | |
| Sbjct: | 62 | LLDQGLNMAGIKQVLLMKENQTEAVKVKEETKEISKTELRKILRDELQHTGRFNRTSLRQ | 121 |
| Query: | 119 | GN | 120 |
| | | G+ | |
| Sbjct: | 122 | GD | 123 |

[8734] An alignment of the GAS and GBS proteins is shown below.

| Identities = 90/123 (73%), Positives = 108/123 (87%) | | | |
|---|---|---|---|
| Query: | 1 | MKERELRRTMAVFPIGAVMKLTDLTARQIRYYEDQGLITPERTEGNRRMFSLNDMDRLLE | 60 |
| | | MKE+ELRR+MAVFPIG VM LTDL+ARQIRYYEDQGLI PERT+GNRRMFSLNDMDRLLE | |
| Sbjct: | 1 | MKEKELRRSMAVFPIGTVMTLTDLSARQIRYYEDQGLIKPERTQGNRRMFSLNDMDRLLE | 60 |
| Query: | 61 | IKDFISDGLHISDIKNEYMQRQHKSKEKQKSLSDAEVRRLLQDELRNQGRFSSPSQHIGN | 120 |
| | | IKDF+S+GL+I+ IK EY++RQ K +KQK+L+DA+VRR+L DE+ Q FS+PSQHIGN | |
| Sbjct: | 61 | IKDFLSEGLNIAAIKREYVERQGKLMQKQKALTDADVRRILHDEMLTQSGFSTPSQHIGN | 120 |
| Query: | 121 | MHL | 123 |
| | | + | |
| Sbjct: | 121 | FRI | 123 |

[8735] Based on this analysis, it was predicted that these proteins and their epitopes could be useful antigens for vaccines or diagnostics.

### EXAMPLE 1585

[8736] A DNA sequence (GBSx1679) was identified in S. agalactiae <SEQ ID 4899> which encodes the amino acid sequence <SEQ ID 4900>. This protein is predicted to be glutamine synthetase (glnA). Analysis of this protein sequence reveals the following:

```
Possible site: 29
>>> Seems to have no N-terminal signal sequence
----- Final Results -----
                            bacterial cytoplasm --- Certainty = 0.2157(Affirmative) < succ>
                              bacterial membrane --- Certainty = 0.0000(Not Clear) < succ>
                                bacterial outside --- Certainty = 0.0000(Not Clear) < succ>
```

[8737] A related DNA sequence was identified in S. pyogenes <SEQ ID 4901> which encodes the amino acid sequence <SEQ ID 4902>. Analysis of this protein sequence reveals the following:

| Possible site: 29 | | | | |
|---|---|---|---|---|
| >>> Seems to have no N-terminal signal sequence | | | | |
| | INTEGRAL | Likelihood = −0.00 | Transmembrane | 347-363 (347-363) |

```
----- Final Results -----
                              bacterial membrane --- Certainty = 0.1001(Affirmative) < succ>
                                bacterial outside --- Certainty = 0.0000(Not Clear) < succ>
                            bacterial cytoplasm --- Certainty = 0.0000(Not Clear) < succ>
```

[8738] An alignment of the GAS and GBS proteins is shown below.

| Identities = 392/448 (87%), Positives = 421/448 (93%) | | | |
|---|---|---|---|
| Query: | 1 | MTITAEDIRREVKEKNVTFLRLMFTDILGVMKNVEIPATDEQLDKVLSNKAMFDGSSIEG | 60 |
| | | M IT DIRREVKEKNVTFLRLMFTDI+GVMKNVEIPAT EQLDKVLSNK MFDGSSIEG | |
| Sbjct: | 1 | MAITVADIRREVKEKNVTFLRLMFTDIMGVMKNVEIPATKEQLDKVLSNKVMFDGSSIEG | 60 |
| Query: | 61 | FVRINESDMYLYPDLDTWIVFPWGDENGAVAGLICDIYTAEGEPFAGDPRGNLKRNMKRM | 120 |
| | | FVRINESDMYLYPDLDTWIVFPWGDENGAVAGLICDIYTAEG+PFAGDPRGNLKR +K M | |
| Sbjct: | 61 | FVRINESDMYLYPDLDTWIVFPWGDENGAVAGLICDIYTAEGKPFAGDPRGNLKRALKHM | 120 |
| Query: | 121 | QEMGYKSFNLGPEPEFFLFKMDENGNPTLDVNDKGGYFDLAPTDLADNTRREIVNVLTQM | 180 |
| | | E+GYKSFNLGPEPEFFLFKMD+ GNPTL+VND GGYFDLAP DLADNTRREIVN+LT+M | |
| Sbjct: | 121 | NEIGYKSFNLGPEPEFFLFKMDDKGNPTLEVNDNGGYFDLAPIDLADNTRREIVNILTKM | 180 |
| Query: | 181 | GFEVEASHHEVAVGQHEIDFKYDDVLKACDNIQLFKLVVKTIARKHGLYATFMAKPKFGI | 240 |
| | | GFEVEASHHEVAVGQHEIDFKY DVLKACDNIQ+FKLVVKTIAR+HGLYATFMAKPKFGI | |
| Sbjct: | 181 | GFEVEASHHEVAVGQHEIDFKYADVLKACDNIQIFKLVVKTIAREHGLYATFMAKPKFGI | 240 |
| Query: | 241 | NGSGMHCNMSLFDNEGNNAFFDPEDPRGMQLSEDAYYFLGGLMKHAYNYTAIINPTVNSY | 300 |
| | | GSGMHCNMSLFDN+GNNAF+D D RGMQLSEDAYYFLGGLMKHAYNYTAI NPTVNSY | |
| Sbjct: | 241 | AGSGMHCNMSLFDNQGNNAFYDEADKRGMQLSEDAYYFLGGLMKHAYNYTAITNPTVNSY | 300 |
| Query: | 301 | KRLVPGYEAPVYVAWAGRNRSPLIRVPASRGMGTRLELRSVDPTANPYLALSVLLGSGLE | 360 |
| | | KRLVPGYEAPVYVAWAG NRSPLIRVPASRGMGTRLELRSVDPTANPYLAL+VLL +GL+ | |
| Sbjct: | 301 | KRLVPGYEAPVYVAWAGSNRSPLIRVPASRGMGTRLELRSVDPTANPYLALAVLLEAGLD | 360 |
| Query: | 361 | GIENKIEAPEPIETNIYAMTVEERRQAGIVDLPSTLHNALEALEEDEVVKAALGTHIYTN | 420 |
| | | GI NKIEAPEP+E NIY MT+EER +AGI+DLPSTLHNAL+AL++D+VV+ ALG HIYTN | |
| Sbjct: | 361 | GIINKIEAPEPVEANIYTMTMEERNEAGIIDLPSTLHNALKALQKDDVVQKALGYHIYTN | 420 |
| Query: | 421 | FLDAKRIEWASYATYVSQWEIDNYLDLY | 448 |
| | | FL+AKRIEW+SYAT+VSQWEID+Y+ Y | |
| Sbjct: | 421 | FLEAKRIEWSSYATFVSQWEIDHYIHNY | 448 |

[8739] Based on this analysis, it was predicted that these proteins and their epitopes could be useful antigens for vaccines or diagnostics.

### EXAMPLE 1586

[8740] A DNA sequence (GBSx1680) was identified in S. agalactiae <SEQ ID 4903> which encodes the amino acid sequence <SEQ ID 4904>. This protein is predicted to be SceB precursor. Analysis of this protein sequence reveals the following:

```
Possible site: 28
>>> Seems to have no N-terminal signal sequence
----- Final Results -----
                              bacterial membrane --- Certainty = 0.0000(Not Clear) < succ>
                                bacterial outside --- Certainty = 0.0000(Not Clear) < succ>
                            bacterial cytoplasm --- Certainty = 0.0000(Not Clear) < succ>
```

[8741] The protein has homology with the following sequences in the GENPEPT database.

| >GP: CAA66624 GB: X97985 ORF1 [Staphylococcus aureus] | | | |
|---|---|---|---|
| Identities = 44/119 (36%), Positives = 66/119 (54%), | | | |
| Gaps = 4/119 (3%) | | | |
| Query: | 26 | SFASTNADANTYNYAVDVDYLASAEEIAQAHPA-SNTFPLGQCTWGVKE-MATWAGNWWG | 83 |
| | | S AS + +N + ++ I+ + + SN + GQCT+ V + + G+ WG | |
| Sbjct: | 117 | SGASYSTTSNNVHVTTTAAPSSNGRSISNGYASGSNLYTSGQCTYYVFDRVGGKIGSTWG | 176 |
| Query: | 84 | NGGDWAASAASADYTVGTQPRVGSIVCWTDGSYGHVAYVTAVDPVTNKIQVLESNYAGH | 142 |
| | | N +WA +AAS+ YTV P+VG+I+ T G YGHVAYV V+ ++V E NY GH | |
| Sbjct: | 177 | NASNWANAAASSGYTVNNTPKVGAIMQTTQGYYGHVAYVEGVNS-NGSVRVSEMNY-GH | 233 |

[8742] A related DNA sequence was identified in S. pyogenes <SEQ ID 1013> which encodes the amino acid sequence <SEQ ID 1014>. Analysis of this protein sequence reveals the following:

Possible site: 17
>>> Seems to have a cleavable N-term signal seq.
----- Final Results -----
bacterial outside --- Certainty = 0.3000 (Affirmative) < succ>
bacterial membrane --- Certainty = 0.0000 (Not Clear) < succ>
bacterial cytoplasm --- Certainty = 0.0000 (Not Clear) < succ>

[8743] An alignment of the GAS and GBS proteins is shown below.

| Identities = 60/115 (52%), Positives = 81/115 (70%), Gaps = 7/115 (6%) | | | |
|---|---|---|---|
| Query: | 55 | AHPASNTFPLGQCTWGVKEMATWAGNWWGNGGDWAASAASADYTVGTQPRVGSIVCWTDG | 114 |
| | | ++ +SNT+P+GQCTWG K +A WAGN WGNGG WA SA +A Y G+ P VG+I W DG | |
| Sbjct: | 291 | SYDSSNTYPVGQCTWGAKSLAPWAGNNWGNGGQWAYSAQAAGYRTGSTPMVGAIAVWNDG | 350 |
| Query: | 115 | SYGHVAYVTAVDPVTNKIQVLESNYAGHQWIDNYRGWFDPQNTVTPGVVSYIYPN | 169 |
| | | YGHVA V V ++ I+V+ESNY+G Q+I ++RGWF+P V++IYP+ | |
| Sbjct: | 351 | GYGHVAVVVEVQSASS-IRVMESNYSGRQYIADHRGWFNPTG------VTFIYPH | 398 |

[8744] A related GBS gene <SEQ ID 8859> and protein <SEQ ID 8860> were also identified. Analysis of this protein sequence reveals the following:

| Lipop: Possible site: −1 Crend: 8 | | |
|---|---|---|
| McG: Discrim Score: 5.85 | | |
| GvH: Signal Score (−7.5): 3.11 | | |
| Possible site: 24 | | |
| >>> Seems to have a cleavable N-term signal seq. | | |
| ALOM program count: 0 | value: 6.74 | threshold: 0.0 |

| | | |
|---|---|---|
| PERIPHERAL | Likelihood = 6.74 | 115 |

modified ALOM score: −1.85
*** Reasoning Step: 3
----- Final Results -----
bacterial outside --- Certainty = 0.3000 (Affirmative) < succ>
bacterial membrane --- Certainty = 0.0000 (Not Clear) < succ>
bacterial cytoplasm --- Certainty = 0.0000 (Not Clear) < succ>

[8745] The protein has homology with the following sequences in the databases:

[chemical structure]

[8746] Based on this analysis, it was predicted that these proteins and their epitopes could be useful antigens for vaccines or diagnostics.

### EXAMPLE 1587

[8747] A DNA sequence (GBSx1681) was identified in S. agalactiae <SEQ ID 4905> which encodes the amino acid sequence <SEQ ID 4906>. Analysis of this protein sequence reveals the following:

| Possible site: 14 | | | |
|---|---|---|---|
| >>> Seems to have an uncleavable N-term signal seq | | | |
| INTEGRAL | Likelihood = −3.93 | Transmembrane | 2-18 (1-18) |

----- Final Results -----
bacterial membrane --- Certainty = 0.2572 (Affirmative) < succ>
bacterial outside --- Certainty = 0.0000 (Not Clear) < succ>
bacterial cytoplasm --- Certainty = 0.0000 (Not Clear) < succ>

[8748] The protein has no significant homology with any sequences in the GENPEPT database.

[8749] No corresponding DNA sequence was identified in S. pyogenes.

[8750] Based on this analysis, it was predicted that this protein and its epitopes, could be useful antigens for vaccines or diagnostics.

### EXAMPLE 1588

[8751] A DNA sequence (GBSx1682) was identified in S. agalactiae <SEQ ID 4907> which encodes the amino acid sequence <SEQ ID 4908>. Analysis of this protein sequence reveals the following:

Possible site: 28
>>> Seems to have no N-terminal signal sequence
----- Final Results -----
bacterial cytoplasm --- Certainty = 0.2160 (Affirmative) < succ>
bacterial membrane --- Certainty = 0.0000 (Not Clear) < succ>
bacterial outside --- Certainty = 0.0000 (Not Clear) < succ>

[8752] The protein has homology with the following sequences in the GENPEPT database.

| >GP: BAB06381 GB: AP001516 unknown conserved protein [Bacillus halodurans] | | | |
|---|---|---|---|
| Identities = 353/550 (64%), Positives = 443/550 (80%) | | | |
| Query: | 6 | LKPEEVGVYAIGGLGEIGKNTYGIEYQDEIIIVDAGIKFPEDDLLGIDYVIPDYSYIVEN | 65 |
| | | LK + VYA+GGLGEIGKNTY +++QDEII++DAGIKFPED+LLGIDYVIPDYSY+V+N | |
| Sbjct: | 4 | LKNNQTAVYALGGLGEIGKNTYAVQFQDEIILIDAGIKFPEDELLGIDYVIPDYSYLVKN | 63 |
| Query: | 66 | IDRIKALVITHGHEDHIGGIPFLLKQANLPIYAGPLALALIKGKLEEHGLLRDATLYEIH | 125 |
| | | ++IK L ITHGHEDHIGGIP+LL++ N+PIY G LAL L++GKLEEHGLLR A L++I | |
| Sbjct: | 64 | ENKIKGLFITHGHEDHIGGIPYLLREVNIPIYGGKLALGLLRGKLEEHGLLRKAKLHDIQ | 123 |
| Query: | 126 | ANTELTFKNLSVTFFRTTHSIPEPLGIVIHTPQGKVICTGDFKFDFTPVGEPADLHRMAA | 185 |
| | | + + F SV+FFRTTHSIP+ GIV+ TP G ++ TGDFKFDFTPVGEPA+L +MA | |
| Sbjct: | 124 | EDDIIKFAKTSVSFFRTTHSIPDSYGIVVKTPPGNIVHTGDFKFDFTPVGEPANLTKMAK | 183 |
| Query: | 186 | LGEDGVLCLLSDSTNAEVPTFTNSEKIVGQSIMKIIEGIEGRIIFASFASNIFRLQQAAE | 245 |
| | | +GE+GVLCLLSDSTN+E+P FT SE+ VG+SI I +EGRIIFA+FASNI RLQQA E | |
| Sbjct: | 184 | IGEEGVLCLLSDSTNSEIPEFTMSERKVGESIDHIFRRVEGRIIFATFASNIHRLQQAVE | 243 |
| Query: | 246 | AAVKTGRKIAVFGRSMEKAIVNGIELGYIKVPKGTFIEPSELKNLHASEVLIMCTGSQGE | 305 |
| | | +AV+ GRK+AVFGRSME AI G ELGYIK PK TFIEP++L L +EV+I+CTGSQGE | |
| Sbjct: | 244 | SAVRYGRKVAVFGRSMESAINIGQELGYIKAPKNTFIEPNQLNKLPDNEVMILCTGSQGE | 303 |
| Query: | 306 | SMAALARIANGTHRQVTLQPGDTVIFSSSPIPGNTTSVNKLINTIQEAGVDVIHGKINNI | 365 |
| | | MAAL+R+A GTHRQ+ + PGDTVIFSSSPIPGNT SV+K IN + +AG +VIHG +N+I | |
| Sbjct: | 304 | PMAALSRVAFGTHRQIQIIPGDTVIFSSSPIPGNTLSVSKTINQLYKAGANVIHGSLNDI | 363 |
| Query: | 366 | HTSGHGGQQEQKLMLRLIKPKYFMPVHGEYRMQKVHAGLAVDTGIPKENIFIMENGDVLA | 425 |
| | | HTSGHGGQ+EQKLMLRLIKPKYFMP+HGEYRM K+H LA D G+P EN FIM+NGDVLA | |
| Sbjct: | 364 | HTSGHGGQEEQKLMLRLIKPKYFMPIHGEYRMLKMHTKLAEDCGVPAENCFIMDNGDVLA | 423 |
| Query: | 426 | LTSDSARIAGHFNAQDIYVDGNGIGDIGAAVLRDRHDLSEDGVVLAVATVDFDSKMILAG | 485 |
| | | L D A IAG + +YVDGNGIGDIG VLRDR LSE+G+V+ V +++ + AG | |
| Sbjct: | 424 | LHPDEAGIAGKIPSGSVYVDGNGIGDIGNIVLRDRRILSEEGLVVVVVSLNMKEYKVTAG | 483 |
| Query: | 486 | PDILSRGFIYMRESGDLIRESQHILFNAIRIALKNKDASIQSVNGAIVNALRPFLYEKTE | 545 |
| | | PD++SRGF+YMRESGDLI+E+Q +L N ++ ++ K + I + L PFLY++T+ | |
| Sbjct: | 484 | PDLISRGFVYMRESGDLIQEAQRLLANHLQEVMERKTNQWSEIKNEITDVLGPFLYDRTK | 543 |
| Query: | 546 | REPIIIPMVL | 555 |
| | | R+P+I+P+++ | |
| Sbjct: | 544 | RKPMILPIIM | 553 |

[8753] A related DNA sequence was identified in S. pyogenes <SEQ ID 4909> which encodes the amino acid sequence <SEQ ID 4910>. Analysis of this protein sequence reveals the following:

| Possible site: 28 | | | |
|---|---|---|---|
| >>> Seems to have no N-terminal signal sequence | | | |
| INTEGRAL | Likelihood = −0.11 | Transmembrane | 468-484 (468-484) |

----- Final Results -----
bacterial membrane --- Certainty = 0.1044 (Affirmative) < succ>
bacterial outside --- Certainty = 0.0000 (Not Clear) < succ>
bacterial cytoplasm --- Certainty = 0.0000 (Not Clear) < succ>

[8754] The protein has homology with the following sequences in the databases:

| >GP: BAB06381 GB: AP001516 unknown conserved protein [Bacillus halodurans] | | | |
|---|---|---|---|
| Identities = 353/550 (64%), Positives = 444/550 (80%) | | | |
| Query: | 6 | LKPNEVGVFAIGGLGEIGKNTYGIEYQDEIIIVDAGIKFPEDDLLGIDYVIPDYSYIVDN | 65 |
| | | LK N+ V+A+GGLGEIGKNTY +++QDEII++DAGIKFPED+LLGIDYVIPDYSY+V N | |
| Sbjct: | 4 | LKNNQTAVYALGGLGEIGKNTYAVQFQDEIILIDAGIKFPEDELLGIDYVIPDYSYLVKN | 63 |
| Query: | 66 | LDRVKALVITHGHEDHIGGIPFLLKQANIPIYAGPLALALIRGKLEEHGLWREATVYEIN | 125 |
| | | +++K L ITHGHEDHIGGIP+LL++ NIPIY G LAL L+RGKLEEHGL R+A +++I | |
| Sbjct: | 64 | ENKIKGLFITHGHEDHIGGIPYLLREVNIPIYGGKLALGLLRGKLEEHGLLRKAKLHDIQ | 123 |
| Query: | 126 | HNTELTFKNMSVTFFKTTHSIPEPVGIVIHTPQGKIICTGDFKFDFTPVGDPADLQRMAA | 185 |
| | | + + F SV+FF+TTHSIP+ GIV+ TP G I+ TGDFKFDFTPVG+PA+L +MA | |
| Sbjct: | 124 | EDDIIKFAKTSVSFFRTTHSIPDSYGIVVKTPPGNIVHTGDFKFDFTPVGEPANLTKMAK | 183 |
| Query: | 186 | LGEEGVLCLLSDSTNAEIPTFTNSEKVVGQSILKIIEGIHGRIIFASFASNIYRLQQAAE | 245 |
| | | +GEEGVLCLLSDSTN+EIP FT SE+ VG+SI I + GRIIFA+FASNI+RLQQA E | |
| Sbjct: | 184 | IGEEGVLCLLSDSTNSEIPEFTMSERKVGESIDHIFRRVEGRIIFATFASNIHRLQQAVE | 243 |
| Query: | 246 | AAVKTGRKIAVFGRSMEKAIVNGIELGYIKVPKGTFIEPSELKNLHASEVLIMCTGSQGE | 305 |
| | | +AV+ GRK+AVFGRSME AI G ELGYIK PK TFIEP++L L +EV+I+CTGSQGE | |
| Sbjct: | 244 | SAVRYGRKVAVFGRSMESAINIGQELGYIKAPKNTFIEPNQLNKLPDNEVMILCTGSQGE | 303 |
| Query: | 306 | SMAALARIANGTHRQVTLQPGDTVIFSSSPIPGNTTSVNKLINTIQEAGVDVIHGKVNNI | 365 |
| | | MAAL+R+A GTHRQ+ + PGDTVIFSSSPIPGNT SV+K IN + +AG +VIHG +N+I | |
| Sbjct: | 304 | PMAALSRVAFGTHRQIQIIPGDTVIFSSSPIPGNTLSVSKTINQLYKAGANVIHGSLNDI | 363 |
| Query: | 366 | HTSGHGGQQEQKLMLSLIKPKYFMPVHGEYRMQKVHAGLAMDIGIPKENIFIMENGDVLA | 425 |
| | | HTSGHGGQ+EQKLML LIKPKYFMP+HGEYRM K+H LA D G+P EN FIM+NGDVLA | |
| Sbjct: | 364 | HTSGHGGQEEQKLMLRLIKPKYFMPIHGEYRMLKMHTKLAEDCGVPAENCFIMDNGDVLA | 423 |
| Query: | 426 | LTSDSARIAGHFNAQDIYVDGNGIGDIGAAVLRDRRDLSEDGVVLAVATVDFNTQMILAG | 485 |
| | | L D A IAG + +YVDGNGIGDIG VLRDRR LSE+G+V+ V +++ + AG | |
| Sbjct: | 424 | LHPDEAGIAGKIPSGSVYVDGNGIGDIGNIVLRDRRILSEEGLVVVVVSLNMKEYKVTAG | 483 |
| Query: | 486 | PDILSRGFIYMRESGDLIRESQRVLFNAIRIALKNKDASIQSVNGAIVNALRPFLYEKTE | 545 |
| | | PD++SRGF+YMRESGDLI+E+QR+L N ++ ++ K + I + L PFLY++T+ | |
| Sbjct: | 484 | PDLISRGFVYMRESGDLIQEAQRLLANHLQEVMERKTNQWSEIKNEITDVLGPFLYDRTK | 543 |
| Query: | 546 | REPIIIPMVL | 555 |
| | | R+P+I+P+++ | |
| Sbjct: | 544 | RKPMILPIIM | 553 |

[8755] An alignment of the GAS and GBS proteins is shown below.

| Identities = 523/559 (93%), Positives = 550/559 (97%) | | | |
|---|---|---|---|
| Query: | 1 | MSNINLKPEEVGVYAIGGLGEIGKNTYGIEYQDEIIIVDAGIKFPEDDLLGIDYVIPDYS | 60 |
| | | M+NI+LKP EVGV+AIGGLGEIGKNTYGIEYQDEIIIVDAGIKFPEDDLLGIDYVIPDYS | |
| Sbjct: | 1 | MTNISLKPNEVGVFAIGGLGEIGKNTYGIEYQDEIIIVDAGIKFPEDDLLGIDYVIPDYS | 60 |
| Query: | 61 | YIVENIDRIKALVITHGHEDHIGGIPFLLKQANLPIYAGPLALALIKGKLEEHGLLRDAT | 120 |
| | | YIV+N+DR+KALVITHGHEDHIGGIPFLLKQAN+PIYAGPLALALI+GKLEEHGL R+AT | |
| Sbjct: | 61 | YIVDNLDRVKALVITHGHEDHIGGIPFLLKQANIPIYAGPLALALIRGKLEEHGLWREAT | 120 |
| Query: | 121 | LYEIHANTELTFKNLSVTFFRTTHSIPEPLGIVIHTPQGKVICTGDFKFDFTPVGEPADL | 180 |
| | | +YEI+ NTELTFKN+SVTFF+TTHSIPEP+GIVIHTFQGK+ICTGDFKFDFTPVG+PADL | |
| Sbjct: | 121 | VYEINHNTELTFKNMSVTFFKTTHSIPEPVGIVIHTPQGKIICTGDFKFDFTPVGDPADL | 180 |
| Query: | 181 | HRMAALGEDGVLCLLSDSTNAEVPTFTNSEKIVGQSIMKIIEGIEGRIIFASFASNIFRL | 240 |
| | | RMAALGE+GVLCLLSDSTNAE+PTFTNSEK+VGQSI+KIIEGI GRIIFASFASNI+RL | |
| Sbjct: | 181 | QRMAALGEEGVLCLLSDSTNAEIPTFTNSEKVVGQSILKIIEGIHGRIIFASFASNIYRL | 240 |
| Query: | 241 | QQAAEAAVKTGRKIAVFGRSMEKAIVNGIELGYIKVPKGTFIEPSELKNLHASEVLIMCT | 300 |
| | | QQAAEAAVKTGRKIAVFGRSMEKAIVNGIELGYIKVPKGTFIEPSELKNLHASEVLIMCT | |
| Sbjct: | 241 | QQAAEAAVKTGRKIAVFGRSMEKAIVNGIELGYIKVPKGTFIEPSELKNLHASEVLIMCT | 300 |
| Query: | 301 | GSQGESMAALARIANGTHRQVTLQPGDTVIFSSSPIPGNTTSVNKLINTIQEAGVDVIHG | 360 |
| | | GSQGESMAALARIANGTHRQVTLQPGDTVIFSSSPIPGNTTSVNKLINTIQEAGVDVIHG | |
| Sbjct: | 301 | GSQGESMAALARIANGTHRQVTLQPGDTVIFSSSPIPGNTTSVNKLINTIQEAGVDVIHG | 360 |
| Query: | 361 | KINNIHTSGHGGQQEQKLMLRLIKPKYFMPVHGEYRMQKVHAGLAVDTGIPKENIFIMEN | 420 |
| | | K+NNIHTSGHGGQQEQKLML LIKPKYFMPVHGEYRMQKVHAGLA+D GIPKENIFIMEN | |
| Sbjct: | 361 | KVNNIHTSGHGGQQEQKLMLSLIKPKYFMPVHGEYRMQKVHAGLAMDIGIPKENIFIMEN | 420 |
| Query: | 421 | GDVLALTSDSARIAGHFNAQDIYVDGNGIGDIGAAVLRDRHDLSEDGVVLAVATVDFDSK | 480 |
| | | GDVLALTSDSARIAGHFNAQDIYVDGNGIGDIGAAVLRDR DLSEDGVVLAVATVDF+++ | |
| Sbjct: | 421 | GDVLALTSDSARIAGHFNAQDIYVDGNGIGDIGAAVLRDRRDLSEDGVVLAVATVDFNTQ | 480 |
| Query: | 481 | MILAGPDILSRGFIYMRESGDLIRESQHILFNAIRIALKNKDASIQSVNGAIVNALRPFL | 540 |
| | | MILAGPDILSRGFIYMRESGDLIRESQ +LFNAIRIALKNKDASIQSVNGAIVNALRPFL | |
| Sbjct: | 481 | MILAGPDILSRGFIYMRESGDLIRESQRVLFNAIRIALKNKDASIQSVNGAIVNALRPFL | 540 |
| Query: | 541 | YEKTEREPIIIPMVLTPDK | 559 |
| | | YEKTEREPIIIPMVLTPDK | |
| Sbjct: | 541 | YEKTEREPIIIPMVLTPDK | 559 |

[8756] Based on this analysis, it was predicted that these proteins and their epitopes could be useful antigens for vaccines or diagnostics.

### EXAMPLE 1589

[8757] A DNA sequence (GBSx1683) was identified in S. agalactiae <SEQ ID 4911> which encodes the amino acid sequence <SEQ ID 4912>. Analysis of this protein sequence reveals the following:

```
Possible site: 32
>>> Seems to have no N-terminal signal sequence
----- Final Results -----
                            bacterial cytoplasm --- Certainty = 0.2932(Affirmative) < succ>
                              bacterial membrane --- Certainty = 0.0000(Not Clear) < succ>
                                bacterial outside --- Certainty = 0.0000(Not Clear) < succ>
```

[8758] The protein has homology with the following sequences in the GENPEPT database.

| >GP: CAB13327 GB: Z99111 ykzG [Bacillus subtilis] | | | |
|---|---|---|---|
| Identities = 27/75 (36%), Positives = 44/75 (58%), Gaps = 7/75 (9%) | | | |
| Query: | 1 | MIYKVFYQETKERNPRREQTKTLYVTIDAANELEGRIAARKLVEENTAYNIEFIELLSDK | 60 |
| | | MIYKVFYQE + P RE+T +LY+ + ++ ++ +K +NIEFI + | |
| Sbjct: | 1 | MIYKVFYQEKADEVPVREKTDSLYIEGVSERDVRTKLKEKK-------FNIEFITPVDGA | 53 |
| Query: | 61 | HLEYEKETGVFELTE | 75 |
| | | LEYE+++ F++ E | |
| Sbjct: | 54 | FLEYEQQSENFKVLE | 68 |

[8759] A related DNA sequence was identified in S. pyogenes <SEQ ID 4913> which encodes the amino acid sequence <SEQ ID 4914>. Analysis of this protein sequence reveals the following:

```
Possible site: 32
>>> Seems to have no N-terminal signal sequence
----- Final Results -----
                            bacterial cytoplasm --- Certainty = 0.3428(Affirmative) < succ>
                              bacterial membrane --- Certainty = 0.0000(Not Clear) < succ>
                                bacterial outside --- Certainty = 0.0000(Not Clear) < succ>
```

[8760] An alignment of the GAS and GBS proteins is shown below.

| Identities = 60/76 (78%), Positives = 70/76 (91%) | | | |
|---|---|---|---|
| Query: | 1 | MIYKVFYQETKERNPRREQTKTLYVTIDAANELEGRIAARKLVEENTAYNIEFIELLSDK | 60 |
| | | MIYKVFYQETK+++PRRE TK LY+ IDA +EL+GRI AR+LVE+NT YN+EFIELLSDK | |
| Sbjct: | 1 | MIYKVFYQETKDQSPRRESTKALYLNIDATDELDGRIKARRLVEDNTYYNVEFIELLSDK | 60 |
| Query: | 61 | HLEYEKETGVFELTEF | 76 |
| | | HL+YEKETGVFELTEF | |
| Sbjct: | 61 | HLDYEKETGVFELTEF | 76 |

[8761] Based on this analysis, it was predicted that these proteins and their epitopes could be useful antigens for vaccines or diagnostics.

### EXAMPLE 1590

[8762] A DNA sequence (GBSx1684) was identified in S. agalactiae <SEQ ID 4915> which encodes the amino acid sequence <SEQ ID 4916>. This protein is predicted to be glycoprotein endopeptidase. Analysis of this protein sequence reveals the following:

```
Possible site: 13
>>> Seems to have no N-terminal signal sequence (or aa 1-17)
----- Final Results -----
                            bacterial cytoplasm --- Certainty = 0.0430(Affirmative) < succ>
                              bacterial membrane --- Certainty = 0.0000(Not Clear) < succ>
                                bacterial outside --- Certainty = 0.0000(Not Clear) < succ>
```

[8763] The protein has homology with the following sequences in the GENPEPT database.

| >GP: CAA76861 GB: Y17797 hypothetical protein [Enterococcus faecalis] | | | |
|---|---|---|---|
| Identities = 94/182 (51%), Positives = 127/182 (69%), Gaps = 6/182 (3%) | | | |
| Query: | 2 | MKVLAFDTSSKALSVAVLNNMECLATVTINIKKNHSINLMPAIDFLMQSIDLEPQDLDRI | 61 |
| | | +++LA DTS++ LS+AV N + L + T +K+NHS+ LMPAID+LM ++L P +DR | |
| Sbjct: | 13 | VRILAIDTSNQTLSIAVCENQKILGSYTATVKRNHSLTLMPAIDYLMSQLNLAPTAIDRF | 72 |
| Query: | 62 | VVAEGPGSYTGLRVAVATAKMLAYTLKIDLVGVSSLYAL-TNGFSENDLLVPLIDARRNN | 120 |
| | | VVAEGPGSYTGLR+ V TAK LAYTLK +LVG+SSL AL N + L+VPL DARR N | |
| Sbjct: | 73 | VVAEGPGSYTGLRLGVTTAKTLAYTLKKELVGISSLQALAANCVGQTGLIVPLFDARRKN | 132 |
| Query: | 121 | VYVGFYQNGDTV----KPDCHTSLEEVLQEVGNKANVHFVGE-VAAFFDQIKKALPHAKI | 175 |
| | | VY G Y+ D V PD H SL E+L+++ N+ N+ FVGE V F ++I + +PH +I | |
| Sbjct: | 133 | VYAGAYRFVDGVWQNELPDQHISLRELLEQLKNEPNLFFVGEDVEKFTEEIAQIIPHGEI | 192 |
| Query: | 176 | TE | 177 |
| | | + | |
| Sbjct: | 193 | CD | 194 |

[8764] A related DNA sequence was identified in S. pyogenes <SEQ ID 4917> which encodes the amino acid sequence <SEQ ID 4918>. Analysis of this protein sequence reveals the following:

| Possible site: 36 | | | | |
|---|---|---|---|---|
| >>> Seems to have no N-terminal signal sequence | | | | |
| | INTEGRAL | Likelihood = −1.38 | Transmembrane | 99-115 (99-115) |

```
----- Final Results -----
                              bacterial membrane --- Certainty = 0.1553(Affirmative) < succ>
                                bacterial outside --- Certainty = 0.0000(Not Clear) < succ>
                            bacterial cytoplasm --- Certainty = 0.0000(Not Clear) < succ>
```

[8765] A related sequence was also identified in GAS <SEQ ID 9159> which encodes the amino acid sequence <SEQ ID 9160>. Analysis of this protein sequence reveals the following:

| Possible site: 25 | | | | |
|---|---|---|---|---|
| >>> Seems to have no N-terminal signal sequence | | | | |
| | INTEGRAL | Likelihood = −1.38 | Transmembrane | 88-104 (88-104) |

```
----- Final Results -----
                              bacterial membrane --- Certainty = 0.1553(Affirmative) < succ>
                                bacterial outside --- Certainty = 0.0000(Not Clear) < succ>
                            bacterial cytoplasm --- Certainty = 0.0000(Not Clear) < succ>
```

[8766] An alignment of the GAS and GBS proteins is shown below.

| Identities = 134/232 (57%), Positives = 172/232 (73%), Gaps = 3/232 (1%) | | | |
|---|---|---|---|
| Query: | 2 | MKVLAFDTSSKALSVAVLNNMECLATVTINIKKNHSINLMPAIDFLMQSIDLEPQDLDRI | 61 |
| | | MK LAFDTS+K LS+A+L++ LA +T+NI+K HS++LMPAIDFLM DL+PQDL+RI | |
| Sbjct: | 12 | MKTLAFDTSNKTLSLAILDDETLLADMTLNIQKKHSVSLMPAIDFLMTCTDLKPQDLERI | 71 |
| Query: | 62 | VVAEGPGSYTGLRVAVATAKMLAYTLKIDLVGVSSLYALTNGFSE---NDLLVPLIDARR | 118 |
| | | VVA+GPGSYTGLRVAVATAK LAY+L I LVG+SSLYAL + N L+VPLIDARR | |
| Sbjct: | 72 | VVAKGPGSYTGLRVAVATAKTLAYSLNIALVGISSLYALAASTCKQYPNTLVVPLIDARR | 131 |
| Query: | 119 | NNVYVGFYQNGDTVKPDCHTSLEEVLQEVGNKANVHFVGEVAAFFDQIKKALPHAKITET | 178 |
| | | N YVG+Y+ G +V P H SLE +++++ + + FVGE A F ++I+K LP A + T | |
| Sbjct: | 132 | QNAYVGYYRQGKSVMPQAHASLEVIIEQLVEEGQLIFVGETAPFAEKIQKKLPQAILLPT | 191 |
| Query: | 179 | LPCAVAIGRKGQKMKSVNVDAFVPRYLKRVEAEENWLKNHCETNTEEYIKRV | 230 |
| | | LP A G GQ + NVDAFVP+YLKRVEAEENWLK++ + Y+KR+ | |
| Sbjct: | 192 | LPSAYECGLLGQSLAPENVDAFVPQYLKRVEAEENWLKDNEIKDDSHYVKRI | 243 |

[8767] SEQ ID 4916 (GBS69) was expressed in E. coli as a His-fusion product. SDS-PAGE analysis of total cell extract is shown in FIG. 17 (lane 9; MW 28.9 kDa). It was also expressed in E. coli as a GST-fusion product. SDS-PAGE analysis of total cell extract is shown in FIG. 20 (lane 4; MW 53.9 kDa).

[8768] The GBS69-GST fusion product was purified (FIG. 197, lane 6) and used to immunise mice. The resulting antiserum was used for FACS (FIG. 285), which confirmed that the protein is immunoaccessible on GBS bacteria.

[8769] Based on this analysis, it was predicted that these proteins and their epitopes could be useful antigens for vaccines or diagnostics.

### EXAMPLE 1591

[8770] A DNA sequence (GBSx1685) was identified in S. agalactiae <SEQ ID 4919> which encodes the amino acid sequence <SEQ ID 4920>. This protein is predicted to be ribosomal-protein-alanine acetyltransferase. Analysis of this protein sequence reveals the following:

```
Possible site: 22
>>> Seems to have a cleavable N-term signal seq.
----- Final Results -----
                                bacterial outside --- Certainty = 0.3000(Affirmative) < succ>
                              bacterial membrane --- Certainty = 0.0000(Not Clear) < succ>
                            bacterial cytoplasm --- Certainty = 0.0000(Not Clear) < succ>
```

[8771] A related GBS nucleic acid sequence <SEQ ID 10137> which encodes amino acid sequence <SEQ ID 10138> was also identified.

[8772] The protein has homology with the following sequences in the GENPEPT database.

| >GP: AAC06803 GB: AE000696 ribosomal-protein-alanine cetyltransferase | | | |
|---|---|---|---|
| [Aquifex aeolicus] | | | |
| Identities = 44/141 (31%), Positives = 74/141 (52%), Gaps = 8/141 (5%) | | | |
| Query: | 9 | LREFEMESSEQALAIWSVLSDVYDKSPWSLSQISEDLKKDSTDYFFVYNDGEVIGFLALQ | 68 |
| | | +RE E E E+ ++ + + + WS +D + + F + DG+V+G++ | |
| Sbjct: | 4 | VREMEREDVER---VYEINRESFTTDAWSRFSFEKDFENKFSRRFVLEEDGKVVGYVIFW | 60 |
| Query: | 69 | QLVGEVEITNIAVKKNYQGKGYAYQLM----SMIADIEVPVFLEVRYSNIVAQKLYERCG | 124 |
| | | + E I A+ Y+GKGY +L+ S + D V L+VR SN+ A LY++ G | |
| Sbjct: | 61 | VVKEEATIMTFAIAPGYRGKGYGEKLLREAISRLGDKVKRVVLDVRKSNLRAINLYKKLG | 120 |
| Query: | 125 | FVVLRKRKNYYHDPIEDAIVM | 145 |
| | | F V+ +RK YY D E+A++M | |
| Sbjct: | 121 | FKVVTERKGYYSDG-ENALLM | 140 |

[8773] A related DNA sequence was identified in S. pyogenes <SEQ ID 4921> which encodes the amino acid sequence <SEQ ID 4922>. Analysis of this protein sequence reveals the following:

```
Possible site: 35
>>> Seems to have no N-terminal signal sequence
----- Final Results -----
                            bacterial cytoplasm --- Certainty = 0.3800(Affirmative) < succ>
                              bacterial membrane --- Certainty = 0.0000(Not Clear) < succ>
                                bacterial outside --- Certainty = 0.0000(Not Clear) < succ>
```

[8774] An alignment of the GAS and GBS proteins is shown below.

| Identities = 65/140 (46%), Positives = 96/140 (68%), Gaps = 1/140 (0%) | | | |
|---|---|---|---|
| Query: | 9 | LREFEMES-SEQALAIWSVLSDVYDKSPWSLSQISEDLKKDSTDYFFVYNDGEVIGFLAL | 67 |
| | | L E M++ EQA I+ +L VY SPW+L Q+ D+++D TDYF +Y+ +++GFLA+ | |
| Sbjct: | 6 | LSESNMKTVEEQAKNIYQLLEMVYGTSPWTLEQVLIDIRRDQTDYFLLYDHDKLLGFLAI | 65 |
| Query: | 68 | QQLVGEVEITNIAVKKNYQGKGYAYQLMSMIADIEVPVFLEVRYSNIVAQKLYERCGFVV | 127 |
| | | Q L GEVE+T IA+ ++Q G A QLM+ + IE +FLEVR SN AQ LY++ GF | |
| Sbjct: | 66 | QDLAGEVEMTQIAILPSHQELGLASQLMTHLDSIESDIFLEVRESNHRAQGLYQKFGFKF | 125 |
| Query: | 128 | LRKRKNYYHDPIEDAIVMRK | 147 |
| | | + KR +YY +PIE A++M++ | |
| Sbjct: | 126 | IGKRPDYYRNPIETALLMKR | 145 |

[8775] Based on this analysis, it was predicted that these proteins and their epitopes could be useful antigens for vaccines or diagnostics.

### EXAMPLE 1592

[8776] A DNA sequence (GBSx1686) was identified in S. agalactiae <SEQ ID 4923> which encodes the amino acid sequence <SEQ ID 4924>. Analysis of this protein sequence reveals the following:

```
Possible site: 21
>>> Seems to have no N-terminal signal sequence
----- Final Results -----
                            bacterial cytoplasm --- Certainty = 0.0334(Affirmative) < succ>
                              bacterial membrane --- Certainty = 0.0000(Not Clear) < succ>
                                bacterial outside --- Certainty = 0.0000(Not Clear) < succ>
```

[8777] The protein has no significant homology with any sequences in the GENPEPT database.

[8778] No corresponding DNA sequence was identified in S. pyogenes.

[8779] Based on this analysis, it was predicted that this protein and its epitopes, could be useful antigens for vaccines or diagnostics.

### EXAMPLE 1593

[8780] A DNA sequence (GBSx1687) was identified in S. agalactiae <SEQ ID 4925> which encodes the amino acid sequence <SEQ ID 4926>. Analysis of this protein sequence reveals the following:

| Possible site: 38 | | | | |
|---|---|---|---|---|
| >>> Seems to have no N-terminal signal sequence | | | | |
| | INTEGRAL | Likelihood = −1.75 | Transmembrane | 86-102 (86-104) |

```
----- Final Results -----
                              bacterial membrane --- Certainty = 0.1702(Affirmative) < succ>
                                bacterial outside --- Certainty = 0.0000(Not Clear) < succ>
                            bacterial cytoplasm --- Certainty= 0.0000(Not Clear) < succ>
```

[8781] The protein has homology with the following sequences in the GENPEPT database.

| >GP: BAB04267 GB: AP001508 glycoprotein endopeptidase | | | |
|---|---|---|---|
| [Bacillus halodurans] | | | |
| Identities = 194/331 (58%), Positives = 263/331 (78%), Gaps = 1/331 (0%) | | | |
| Query: | 6 | ILAVESSCDETSVAILKNDKELLANIIASQVESHKRFGGVVPEVASRHHVEVVTTCFEDA | 65 |
| | | ILA+E+SCDETS A+++N +L+N+++SQ++SHKRFGGVVPE+ASRHHVE +T E+A | |
| Sbjct: | 12 | ILAIETSCDETSAAVIENGTTILSNVVSSQIDSHKRFGGVVPEIASRHHVEQITVIVEEA | 71 |
| Query: | 66 | LQEAGIVASDLDAVAVTYGPGLVGALLVGMAAAKAFAWANKLPLIPINHMAGHLMAARDV | 125 |
| | | + EAG+ +DL AVAVT GPGLVGALL+G+ AAKA A+A++LPLI ++H+AGH+ A R + | |
| Sbjct: | 72 | MHEAGVDFADLAAVAVTEGPGLVGALLIGVNAAKAIAFAHQLPLIGVHHIAGHIYANRLL | 131 |
| Query: | 126 | KELQYPLLALLVSGGHTELVYVSEPGDYKIVGETRDDAVGEAYDKVGRVMGLTYPAGREI | 185 |
| | | KEL++PLLAL+VSGGHTEL+Y+ G+++++GETRDDAVGEAYDKV R +GL YP G I | |
| Sbjct: | 132 | KELEFPLLALVVSGGHTELIYMENHGEFEVIGETRDDAVGEAYDKVARTLGLPYPGGPHI | 191 |
| Query: | 186 | DQLAHKGQDTYHFPRAMIKEDHLEFSFSGLKSAFINLHHNAEQKGEALVLEDLCASFQAA | 245 |
| | | D+LA G+DT FPRA ++ D +FSFSGLKSA IN HNA+Q+GE + ED+ ASFQA+ | |
| Sbjct: | 192 | DRLAVNGEDTLQFPRAWLEPDSFDFSFSGLKSAVINTLHNAKQRGENVQAEDVAASFQAS | 251 |
| Query: | 246 | VLDILLAKTQKALLKYPVKTLVVAGGVAANQGLRERLATDISPD-IDVVIPPLRLCGDNA | 304 |
| | | V+D+L+ KT+KA +Y V+ +++AGGVAAN+GLR L + ID+VIPPL LC DNA | |
| Sbjct: | 252 | VIDVLVTKTKKAAEEYKVRQVLLAGGVAANKGLRTALEEAFFKEPIDLVIPPLSLCTDNA | 311 |
| Query: | 305 | GMIALAAAIEFEKENFASLKLNAKPSLAFES | 335 |
| | | MI AA+I+F+++ FA + LN +PSL E+ | |
| Sbjct: | 312 | AMIGAAASIKFKQQTFAGMDLNGQPSLELEN | 342 |

[8782] A related DNA sequence was identified in S. pyogenes <SEQ ID 4927> which encodes the amino acid sequence <SEQ ID 4928>. Analysis of this protein sequence reveals the following:

| Possible site: 38 | | | | |
|---|---|---|---|---|
| >>> Seems to have no N-terminal signal sequence | | | | |
| | INTEGRAL | Likelihood = −2.76 | Transmembrane | 86-102 (85-104) |

```
----- Final Results -----
                              bacterial membrane --- Certainty = 0.2105(Affirmative) < succ>
                                bacterial outside --- Certainty = 0.0000(Not Clear) < succ>
                            bacterial cytoplasm --- Certainty = 0.0000(Not Clear) < succ>
```

[8783] The protein has homology with the following sequences in the databases:

| 22 GP: BAB04267 GB: AP001508 glycoprotein endopeptidase | | | |
|---|---|---|---|
| [Bacillus halodurans] | | | |
| Identities = 196/330 (59%), Positives = 255/330 (76%), Gaps = 2/330 (0%) | | | |
| Query: | 6 | ILAVESSCDETSVAILKNESTLLSNVIASQVESHKRFGGVVPEVASRHHVEVITTCFEDA | 65 |
| | | ILA+E+SCDETS A+++N +T+LSNV++SQ++SHKRFGGVVPE+ASRHHVE IT E+A | |
| Sbjct: | 12 | ILAIETSCDETSAAVIENGTTILSNVVSSQIDSHKRFGGVVPEIASRHHVEQITVIVEEA | 71 |
| Query: | 66 | LQEAGISASDLSAVAVTYGPGLVGALLVGLAAAKAFAWANHLPLIPVNHMAGHLMAAREQ | 125 |
| | | + EAG+ +DL+AVAVT GPGLVGALL+G+ AAKA A+A+ LPLI V+H+AGH+ A R | |
| Sbjct: | 72 | MHEAGVDFADLAAVAVTEGPGLVGALLIGVNAAKAIAFAHQLPLIGVHHIAGHIYANRLL | 131 |
| Query: | 126 | KPLVYPLIALLVSGGHTELVYVPEPGDYHIIGETRDDAVGEAYDKVGRVMGLTYPAGREI | 185 |
| | | K L +PL+AL+VSGGHTEL+Y+ G++ +IGETRDDAVGEAYDKV R +GL YP G I | |
| Sbjct: | 132 | KELEFPLLALVVSGGHTELIYMENHGEFEVIGETRDDAVGEAYDKVARTLGLPYPGGPHI | 191 |
| Query: | 186 | DQLAHKGQDTYHFPRAMITEDHLEFSFSGLKSAFINLHHNAKQKGDELILEDLCASFQAA | 245 |
| | | D+LA G+DT FPRA + D +FSFSGLKSA IN HNAKQ+G+ + ED+ ASFQA+ | |
| Sbjct: | 192 | DRLAVNGEDTLQFPRAWLEPDSFDFSFSGLKSAVINTLHNAKQRGENVQAEDVAASFQAS | 251 |
| Query: | 246 | VLDILLAKTKKALSRYPAKMLVVAGGVAANQGLRDRLAQEI--THIEVVIPKLRLCGDNA | 303 |
| | | V+D+L+ KTKKA Y + +++AGGVAAN+GLR L + I++VIP L LC DNA | |
| Sbjct: | 252 | VIDVLVTKTKKAAEEYKVRQVLLAGGVAANKGLRTALEEAFFKEPIDLVIPPLSLCTDNA | 311 |
| Query: | 304 | GMIALAAAIEYDKQHFANMSLNAKPSLAFD | 333 |
| | | MI AA+I++ +Q FA M LN +PSL + | |
| Sbjct: | 312 | AMIGAAASIKFKQQTFAGMDLNGQPSLELE | 341 |

[8784] An alignment of the GAS and GBS proteins is shown below.

| Identities = 288/334 (86%), Positives = 313/334 (93%), Gaps = 1/334 (0%) | | | |
|---|---|---|---|
| Query: | 1 | MKDRYILAVESSCDETSVAILKNDKELLANIIASQVESHKRFGGVVPEVASRHHVEVVTT | 60 |
| | | M DRYILAVESSCDETSVAILKN+ LL+N+IASQVESHKRFGGVVPEVASRHHVEV+TT | |
| Sbjct: | 1 | MTDRYILAVESSCDETSVAILKNESTLLSNVIASQVESHKRFGGVVPEVASRHHVEVITT | 60 |
| Query: | 61 | CFEDALQEAGIVASDLDAVAVTYGPGLVGALLVGMAAAKAFAWANKLPLIPINHMAGHLM | 120 |
| | | CFEDALQEAGI ASDL AVAVTYGPGLVGALLVG+AAAKAFAWAN LPLIP+NHMAGHLM | |
| Sbjct: | 61 | CFEDALQEAGISASDLSAVAVTYGPGLVGALLVGLAAAKAFAWANHLPLIPVNHMAGHLM | 120 |
| Query: | 121 | AARDVKELQYPLLALLVSGGHTELVYVSEPGDYKIVGETRDDAVGEAYDKVGRVMGLTYP | 180 |
| | | AAR+ K L YPL+ALLVSGGHTELVYV EPGDY I+GETRDDAVGEAYDKVGRVMGLTYP | |
| Sbjct: | 121 | AAREQKPLVYPLIALLVSGGHTELVYVPEPGDYHIIGETRDDAVGEAYDKVGRVMGLTYP | 180 |
| Query: | 181 | AGREIDQLAHKGQDTYHFPRAMIKEDHLEFSFSGLKSAFINLHHNAEQKGEALVLEDLCA | 240 |
| | | AGREIDQLAHKGQDTYHFPRAMI EDHLEFSFSGLKSAFINLHHNA+QKG+ L+LEDLCA | |
| Sbjct: | 181 | AGREIDQLAHKGQDTYHFPRAMITEDHLEFSFSGLKSAFINLHHNAKQKGDELILEDLCA | 240 |
| Query: | 241 | SFQAAVLDILLAKTQKALLKYPVKTLVVAGGVAANQGLRERLATDISPDIDVVIPPLRLC | 300 |
| | | SFQAAVLDILLAKT+KAL +YP K LVVAGGVAANQGLR+RLA +I+ I+VVIP LRLC | |
| Sbjct: | 241 | SFQAAVLDILLAKTKKALSRYPAKMLVVAGGVAANQGLRDRLAQEIT-HIEVVIPKLRLC | 299 |
| Query: | 301 | GDNAGMIALAAAIEFEKENFASLKLNAKPSLAFE | 334 |
| | | GDNAGMIALAAAIE++K++FA++ LNAKPSLAF+ | |
| Sbjct: | 300 | GDNAGMIALAAAIEYDKQHFANMSLNAKPSLAFD | 333 |

[8785] SEQ ID 4926 (GBS371) was expressed in E. coli as a His-fusion product. SDS-PAGE analysis of total cell extract is shown in FIG. 64 (lane 7; MW 41 kDa), in FIG. 170 (lane 4 & 5; MW 55 kDa) and in FIG. 239 (lane 6; MW 55 kDa). It was also expressed in E. coli as a GST-fusion product. SDS-PAGE analysis of total cell extract is shown in FIG. 69 (lane 7; MW 65 kDa).

[8786] Based on this analysis, it was predicted that these proteins and their epitopes could be useful antigens for vaccines or diagnostics.

### EXAMPLE 1594

[8787] A DNA sequence (GBSx1688) was identified in S. agalactiae <SEQ ID 4929> which encodes the amino acid sequence <SEQ ID 4930>. Analysis of this protein sequence reveals the following:

```
Possible site: 33
>>> Seems to have no N-terminal signal sequence
----- Final Results -----
                            bacterial cytoplasm --- Certainty = 0.1027(Affirmative) < succ>
                              bacterial membrane --- Certainty = 0.0000(Not Clear) < succ>
                                bacterial outside --- Certainty = 0.0000(Not Clear) < succ>
```

[8788] The protein has no significant homology with any sequences in the GENPEPT database.

[8789] No corresponding DNA sequence was identified in S. pyogenes.

[8790] Based on this analysis, it was predicted that this protein and its epitopes, could be useful antigens for vaccines or diagnostics.

### EXAMPLE 1595

[8791] A DNA sequence (GBSx1689) was identified in S. agalactiae <SEQ ID 4931> which encodes the amino acid sequence <SEQ ID 4932>. Analysis of this protein sequence reveals the following:

```
Possible site: 20
>>> Seems to have no N-terminal signal sequence
----- Final Results -----
                            bacterial cytoplasm --- Certainty = 0.1307(Affirmative) < succ>
                              bacterial membrane --- Certainty = 0.0000(Not Clear) < succ>
                                bacterial outside --- Certainty = 0.0000(Not Clear) < succ>
```

[8792] The protein has no significant homology with any sequences in the GENPEPT database.

[8793] No corresponding DNA sequence was identified in S. pyogenes.

[8794] Based on this analysis, it was predicted that this protein and its epitopes, could be useful antigens for vaccines or diagnostics.

### EXAMPLE 1596

[8795] A DNA sequence (GBSx1690) was identified in S. agalactiae <SEQ ID 4933> which encodes the amino acid sequence <SEQ ID 4934>. This protein is predicted to be L4171-60 protein. Analysis of this protein sequence reveals the following:

```
Possible site: 36
>>> Seems to have a cleavable N-term signal seq.
----- Final Results -----
                                bacterial outside --- Certainty = 0.3000(Affirmative) < succ>
                              bacterial membrane --- Certainty = 0.0000(Not Clear) < succ>
                            bacterial cytoplasm --- Certainty = 0.0000(Not Clear) < succ>
```

[8796] A related GBS nucleic acid sequence <SEQ ID 10135> which encodes amino acid sequence <SEQ ID 10136> was also identified.

[8797] The protein has homology with the following sequences in the GENPEPT database.

| >GP: AAC24656 GB: AE001274 L4171.5 [Leishmania major] | | | |
|---|---|---|---|
| Identities = 118/282 (41%), Positives = 167/282 (58%), Gaps = 4/282 (1%) | | | |
| Query: | 2 | GGTQTNQVVISSMLASYEGVIAAETGHVSSHEAGAIEFSGHKVLTLPSHNGKLLASEVAT | 61 |
| | | GGTQTN + S L +E VIA + GH+S+HE GAIE +GHKV+T P +GKL ++ | |
| Sbjct: | 74 | GGTQTNLIACSLALRPWEAVIATQLGHISTHETGAIEATGHKVVTAPCPDGKLRVAD--- | 130 |
| Query: | 62 | YIETFYADGNYQHMVFPGMVYISHPTEYGTLYSKAELEELSKICKHYQIPLFIDGARLGY | 121 |
| | | IE+ + +HMV P +VYIS+ TE GT Y+K ELE++S CK + + LF+DGARL | |
| Sbjct: | 131 | -IESALHENRSEHMVIPKLVYISNTTEVGTQYTKQELEDISASCKEHGLYLFLDGARLAS | 189 |
| Query: | 122 | GLAAKDTDVDFPTIAALSDVFYIGGTKMGALAGEAVVFTKKNRPKQFTTIVKQHGALLAK | 181 |
| | | L++ D+ IA L+D+FYIG TK G + GEA++ ++KQ GAL+AK | |
| Sbjct: | 190 | ALSSPVNDLTLADIARLTDMFYIGATKAGGMFGEALIILNDALKPNARHLIKQRGALMAK | 249 |
| Query: | 182 | GRLLGLAFDRFFTDNLYLKIGRHAIDLAEELKIILEEKGYSFYLKSPTNQQFIIVENTKL | 241 |
| | | G LLG+ F+ DNL+ ++G H+ +A LK LE G S +NQ F I+ENT + | |
| Sbjct: | 250 | GWLLGIQFEVLMKDNLFFELGAHSNKMAAILKAGLEACGIRLAWPSASNQLFPILENTMI | 309 |
| Query: | 242 | ADLAKNVAYSFWEKYDDHHTVIRLATSWSTSREDVTALRNVL | 283 |
| | | A+L + E D ++RL TSW+T ++ VL | |
| Sbjct: | 310 | AELNNDFDMYTVEPLKDGTCIMRLCTSWATEEKECHRFVEVL | 351 |

[8798] No corresponding DNA sequence was identified in S. pyogenes.

[8799] SEQ ID 4934 (GBS648) was expressed in E. coli as a GST-fusion product. SDS-PAGE analysis of total cell extract is shown in FIG. 131 (lane 8-10; MW 60 kDa) and in FIG. 186 (lane 6; MW 60 kDa). It was also expressed in E. coli as a His-fusion product. SDS-PAGE analysis of total cell extract is shown in FIG. 131 (lane 12; MW 35 kDa), in FIG. 140 (lane 10; MW 35 kDa) and in FIG. 178 (lane 7; MW 35 kDa).

[8800] Purified GBS648-GST is shown in FIG. 243, lane 6; purified GBS648-His is shown in FIG. 229, lane 7.

[8801] Based on this analysis, it was predicted that this protein and its epitopes, could be useful antigens for vaccines or diagnostics.

### EXAMPLE 1597

[8802] A DNA sequence (GBSx1691) was identified in S. agalactiae <SEQ ID 4935> which encodes the amino acid sequence <SEQ ID 4936>. Analysis of this protein sequence reveals the following:

```
Possible site: 13
>>> Seems to have no N-terminal signal sequence
----- Final Results -----
                            bacterial cytoplasm --- Certainty = 0.2279(Affirmative) < succ>
                              bacterial membrane --- Certainty = 0.0000(Not Clear) < succ>
                                bacterial outside --- Certainty = 0.0000(Not Clear) < succ>
```

[8803] The protein has no significant homology with any sequences in the GENPEPT database.

[8804] No corresponding DNA sequence was identified in S. pyogenes.

[8805] Based on this analysis, it was predicted that this protein and its epitopes, could be useful antigens for vaccines or diagnostics.

### EXAMPLE 1598

[8806] A DNA sequence (GBSx1692) was identified in S. agalactiae <SEQ ID 4937> which encodes the amino acid sequence <SEQ ID 4938>. This protein is predicted to be ribosomal protein S14 (rpsN). Analysis of this protein sequence reveals the following:

```
Possible site: 60
>>> Seems to have no N-terminal signal sequence
----- Final Results -----
                            bacterial cytoplasm --- Certainty = 0.3848(Affirmative) < succ>
                              bacterial membrane --- Certainty = 0.0000(Not Clear) < succ>
                                bacterial outside --- Certainty = 0.0000(Not Clear) < succ>
```

[8807] The protein has homology with the following sequences in the GENPEPT database.

| >GP: CAB12716 GB: Z99108 similar to ribosomal protein S14 [Bacillus | | | |
|---|---|---|---|
| subtilis] | | | |
| Identities = 67/89 (75%), Positives = 76/89 (85%) | | | |
| Query: | 1 | MAKKSKIAKFQKQQKLVEQYAELRRELKEKGDYEALRKLPKDSNPNRLKNRDLIDGRPHA | 60 |
| | | MAKKSK+AK K+Q+LVEQYA +RRELKEKGDYEAL KLP+DS P RL NR ++ GRP A | |
| Sbjct: | 1 | MAKKSKVAKELKRQQLVEQYAGIRRELKEKGDYEALSKLPRDSAPGRLHNRCMVTGRPRA | 60 |
| Query: | 61 | YMRKFGMSRINFRNLAYKGQIPGIKKASW | 89 |
| | | YMRKF MSRI FR LA+KGQIPG+KKASW | |
| Sbjct: | 61 | YMRKFKMSRIAFRELAHKGQIPGVKKASW | 89 |

[8808] A related DNA sequence was identified in S. pyogenes <SEQ ID 4939> which encodes the amino acid sequence <SEQ ID 4940>. Analysis of this protein sequence reveals the following:

```
Possible site: 31
>>> Seems to have no N-terminal signal sequence
----- Final Results -----
                            bacterial cytoplasm --- Certainty = 0.3799(Affirmative) < succ>
                              bacterial membrane --- Certainty = 0.0000(Not Clear) < succ>
                                bacterial outside --- Certainty = 0.0000(Not Clear) < succ>
```

[8809] An alignment of the GAS and GBS proteins is shown below.

| Identities = 73/89 (82%), Positives = 85/89 (95%) | | | |
|---|---|---|---|
| Query: | 1 | MAKKSKIAKFQKQQKLVEQYAELRRELKEKGDYEALRKLPKDSNPNRLKNRDLIDGRPHA | 60 |
| | | MAKKSKIAK+QKQ +L+EQYA+LRR+LK KGDYE+LRKLP+DSNPNRLKNRD IDGRPHA | |
| Sbjct: | 1 | MAKKSKIAKYQKQLQLIEQYADLRRDLKAKGDYESLRKLPRDSNPNRLKNRDKIDGRPHA | 60 |
| Query: | 61 | YMRKFGMSRINFRNLAYKGQIPGIKKASW | 89 |
| | | YMRKFG+SRINFR+LA+KGQ+PG+ KASW | |
| Sbjct: | 61 | YMRKFGVSRINFRDLAHKGQLPGVTKASW | 89 |

[8810] Based on this analysis, it was predicted that these proteins and their epitopes could be useful antigens for vaccines or diagnostics.

### EXAMPLE 1599

[8811] A DNA sequence (GBSx1693) was identified in S. agalactiae <SEQ ID 4941> which encodes the amino acid sequence <SEQ ID 4942>. Analysis of this protein sequence reveals the following:

```
Possible site: 58
>>> Seems to have no N-terminal signal sequence
----- Final Results -----
                            bacterial cytoplasm --- Certainty = 0.5183(Affirmative) < succ>
                              bacterial membrane --- Certainty = 0.0000(Not Clear) < succ>
                                bacterial outside --- Certainty = 0.0000(Not Clear) < succ>
```

[8812] The protein has homology with the following sequences in the GENPEPT database.

| >GP: CAB95931 GB: AL359989 galactose-1-phosphate uridylyltransferase | | | |
|---|---|---|---|
| [Streptomyces coelicolor A3(2)] | | | |
| Identities = 31/105 (29%), Positives = 51/105 (48%), Gaps = 4/105 (3%) | | | |
| Query: | 27 | DKCPFC--DKSQLGKILDVKDDMIWVENKYPTL--EETYQTLVIESNDHNGDISVYSESK | 82 |
| | | D+CP C D +L +I D D++ EN++P+L + +V ++DH+ + SE + | |
| Sbjct: | 68 | DQCPLCPSDGERLSEIPDSAYDVVVFENRFPSLAGDSGRCEVVCFTSDHDASFADLSEEQ | 127 |
| Query: | 83 | MRQLLDYLLSKWQLMEESGHYRSVVLYRNFGPLSGGSLRHPHSQI | 127 |
| | | R+LD + + V + N G G +L HPH QI | |
| Sbjct: | 128 | ARLVLDAWTDRTSELSHLPSVEQVFCFENRGAEIGVTLGHPHGQI | 172 |

[8813] No corresponding DNA sequence was identified in S. pyogenes.

[8814] Based on this analysis, it was predicted that this protein and its epitopes, could be useful antigens for vaccines or diagnostics.

### EXAMPLE 1600

[8815] A DNA sequence (GBSx1694) was identified in S. agalactiae <SEQ ID 4943> which encodes the amino acid sequence <SEQ ID 4944>. Analysis of this protein sequence reveals the following:

```
Possible site: 18
>>> Seems to have an uncleavable N-term signal seq
----- Final Results -----
                              bacterial membrane --- Certainty = 0.0000(Not Clear) < succ>
                                bacterial outside --- Certainty = 0.0000(Not Clear) < succ>
                            bacterial cytoplasm --- Certainty = 0.0000(Not Clear) < succ>
```

[8816] A related GBS nucleic acid sequence <SEQ ID 10133> which encodes amino acid sequence <SEQ ID 10134> was also identified.

[8817] The protein has homology with the following sequences in the GENPEPT database.

| >GP: BAB06998 GB: AP001518 unknown conserved protein [Bacillus halodurans] | | | |
|---|---|---|---|
| Identities = 186/410 (45%), Positives = 258/410 (62%), Gaps = 27/410 (6%) | | | |
| Query: | 4 | YDTIIIGGGPAGMMAAISSNFYGNKTLLIEKNKRLGKKLAGTGGGRCNVTNNGNLDELLA | 63 |
| | | ++ I+IGGGPAG+MA++S+ +G + LL++K +LG+KLA +GGGRCNVTN LDEL+A | |
| Sbjct: | 2 | HEVIVIGGGPAGLMASVSAAEHGARVLLLDKGDKLGRKLAISGGGRCNVTNBMPLDELIA | 61 |
| Query: | 64 | GIPGNGRFLYSVFSQFDNHDIINFFQDNGVTLKEEDHGRMFPTTDKSRTIINALENKIKE | 123 |
| | | IPGNGRF+YS FS F+N DII FF+ G+ LKEED GRMFP +DK+ T++ L +I + | |
| Sbjct: | 62 | HIPGNGRFMYSPFSVFNNEDIIRFFERLGIALKEEDRGRMFPVSDKATTVVQTLLKRIND | 121 |
| Query: | 124 | LGGQIMTDTEVVSVK-KIGDSFYIKTKDTQFASDK-LIVTTGGKSYPSTGSTGFGHDIAR | 181 |
| | | LG + T+T V S++ G ++ K+ + K +IV TGG+S P TGSTG + A+ | |
| Sbjct: | 122 | LGVTVRTNTAVASLEYDDGRIAMVQLKNGERLKTKTVIVATGGQSVPHTGSTGDAYPWAK | 181 |
| Query: | 182 | HFKLEVTDMEAAESPLLTDFP---HKKLQGISLDDVTLSF----EKHIITH--DLLFTHF | 232 |
| | | +T++ E P+ + P KKLQG+SL D+ LS K I TH D++FTHF | |
| Sbjct: | 182 | AAGHTITELYPTEVPITSAEPFIQEKKLQGLSLRDIELSVYAPNGKQIKTHDGDMIFTHF | 241 |
| Query: | 233 | GLSGPAALRISSFVKGGETIY--------LDVLPNISVKEL-EIHFQN---EREKSLKNA | 280 |
| | | GLSGPAALR S +V Y +D+ P I + L + QN E +K+LK | |
| Sbjct: | 242 | GLSGPAALRCSQYVVKALKKYKQPTIEMRIDLRPTIPAEALFQETIQNIKAEPKKALKTV | 301 |
| Query: | 281 | LKILLPERLAEFYAEDL--PEKVKQVSVKD--LEMLIQKLKKLPILVTGKMSLAKSFVTK | 336 |
| | | L+ + PER ++ E L + SV+ + ++Q+LK V G +S+ K+FVT | |
| Sbjct: | 302 | LRGIAPERFLQYIYERLRIDSNLPCASVRHEVIREIVQQLKSFSFHVNGTLSIEKAFVTG | 361 |
| Query: | 337 | GGVDLKEINPKTLESKKVAGLHFAGEVLDINAHTGGFNITSALCTGWVAG | 386 |
| | | GGV +KEI PKT+ SKK AGL F GEVLDI+ +TGG+NIT A TG+ AG | |
| Sbjct: | 362 | GGVSVKEIEPKTMHSKKKAGLFFCGEVLDIHGYTGGYNITCAFSTGYTAG | 411 |

[8818] A related DNA sequence was identified in S. pyogenes <SEQ ID 4945> which encodes the amino acid sequence <SEQ ID 4946>. Analysis of this protein sequence reveals the following:

Possible site: 23
>>> Seems to have no N-terminal signal sequence
----- Final Results -----
bacterial cytoplasm --- Certainty = 0.0448 (Affirmative) < succ>
bacterial membrane --- Certainty = 0.0000 (Not Clear) < succ>
bacterial outside --- Certainty = 0.0000 (Not Clear) < succ>

[8819] An alignment of the GAS and GBS proteins is shown below.

| Identities = 308/386 (79%), Positives = 344/386 (88%) | | | |
|---|---|---|---|
| Query: | 1 | NKHYDTIIIGGGPAGMMAAISSNFYGNKTLLIEKNKRLGKKLAGTGGGRCNVTNNGNLDE | 60 |
| | | M YDTIIIGGGPAGMMAAISS++YG KTLLIEKN+RLGKKLAGTGGGRCNVTN+GNLD | |
| Sbjct: | 1 | MTQYDTIIIGGGPAGMMAAISSSYYGYKTLLIEKNRRLGKKLAGTGGGRCNVTNSGNLDV | 60 |
| Query: | 61 | LLAGIPGNGRFLYSVFSQFDNHDIINFFQDNGVTLKEEDHGRMFPTTDKSRTIINALENK | 120 |
| | | L+AGIPGNGRFLYSVFSQFDNHDII FF++NGV LKEEDHGRMFPTTDKSRTII+ALE K | |
| Sbjct: | 61 | LMAGIPGNGRFLYSVFSQFDNHDIIAFFEENGVKLKEEDHGRMFPTTDKSRTIIDALEKK | 120 |
| Query: | 121 | IKELGGQIMTDTEVVSVKKIGDSFYIKTKDTQFASDKLIVTTGGKSYPSTGSTGFGHDIA | 180 |
| | | IK LGGQ++T TEVVSVKK D FY+K+ D F KLIVTTGGKSYPSTGSTGFGHDIA | |
| Sbjct: | 121 | IKALGGQVLTSTEVVSVKKQDDLFYLKSADQTFTCQKLIVTTGGKSYPSTGSTGFGHDIA | 180 |
| Query: | 181 | RHFKLEVTDMEAAESPLLTDFPHKKLQGISLDDVTLSFEKHIITHDLLFTHFGLSGPAAL | 240 |
| | | RHFKL VTD+EAAESPLLTDFPHK LQGISLDDVTLS++KH+ITHDLLFTHFGLSGPAAL | |
| Sbjct: | 181 | RHFKLTVTDLEAAESPLLTDFPHKVLQGISLDDVTLSYDKHVITHDLLFTHFGLSGPAAL | 240 |
| Query: | 241 | RISSFVKGGETIYLDVLPNISVKELEIHFQNEREKSLKNALKILLPERLAEFYAEDLPEK | 300 |
| | | R+SSFVKGGE LD LP++S +L + ++R+K++KNALK LLPER+A+F +ED PEK | |
| Sbjct: | 241 | RLSSFVKGGEIAELDFLPHLSTDDLTAYLSDQRDKNIKNALKGLLPERVADFLSEDYPEK | 300 |
| Query: | 301 | VKQVSVKDLEMLIQKLKKLPILVTGKMSLAKSFVTKGGVDLKEINPKTLESKKVAGLHFA | 360 |
| | | VKQ+S K + L+ KLK L I +TGKMSLAKSFVTKGGVDLKEINPKTLESKKV GL+FA | |
| Sbjct: | 301 | VKQLSPKQEKELLDKLKHLQIPITGKMSLAKSFVTKGGVDLKEINPKTLESKKVPGLYFA | 360 |
| Query: | 361 | GEVLDINAHTGGFNITSALCTGWVAG | 386 |
| | | GEVLDINAHTGGFNITSALC+GW+AG | |
| Sbjct: | 361 | GEVLDINAHTGGFNITSALCSGWIAG | 386 |

[8820] Based on this analysis, it was predicted that these proteins and their epitopes could be useful antigens for vaccines or diagnostics.

### EXAMPLE 1601

[8821] A DNA sequence (GBSx1695) was identified in S. agalactiae <SEQ ID 4947> which encodes the amino acid sequence <SEQ ID 4948>. Analysis of this protein sequence reveals the following:

Possible site: 36
>>> Seems to have no N-terminal signal sequence
----- Final Results -----
bacterial cytoplasm --- Certainty = 0.1550 (Affirmative) < succ>
bacterial membrane --- Certainty = 0.0000 (Not Clear) < succ>
bacterial outside --- Certainty = 0.0000 (Not Clear) < succ>

[8822] A related GBS nucleic acid sequence <SEQ ID 10131> which encodes amino acid sequence <SEQ ID 10132> was also identified.

[8823] The protein has homology with the following sequences in the GENPEPT database.

| >GP: CAA73267 GB: Y12736 orfX [Lactococcus lactis subsp. cremoris] | | | |
|---|---|---|---|
| Identities = 51/173 (29%), Positives = 87/173 (49%), Gaps = 20/173 (11%) | | | |
| Query: | 19 | KTVSELAEILGVSRQAMNNRV-KTLPEECVEK---NSKGVTVVNRDGLIKLEEIYKKTIL | 74 |
| | | KT+ ELA+ LGVS+Q + N++ K E+ V+ V+N G + KKT+ | |
| Sbjct: | 6 | KTIKELADELGVSKQTIRNKIDKDFREKFVQTIKIKGNNTLVINNAGY----SLLKKTLQ | 61 |
| Query: | 75 | EEEPIDEEASRRELLEILVDEKNTEITRLYEQLKAKDIQIASKDEQLHVKDIQIAEKDKQ | 134 |
| | | + + + + + + I L EQL K+ Q++ KD+QL KD QI++ | |
| Sbjct: | 62 | NDTAQTAKTLQNDTAQTKL------ICFLEEQLDKKEQQLSVKDKQLENKDTQISQMQNL | 115 |
| Query: | 135 | LDQQQQLTLTAMEDTQRLQLELNEAKA------EVEEIQEAKEEKIQELEAVK | 181 |
| | | LDQQQ+L L + + + E+NE KA ++++ + E +E+E +K | |
| Sbjct: | 116 | LDQQQRLALQDKKLLEEYKSEINELKALKMPREDMKDGSSIRGEAQEEIERLK | 168 |

[8824] A related DNA sequence was identified in S. pyogenes <SEQ ID 4949> which encodes the amino acid sequence <SEQ ID 4950>. Analysis of this protein sequence reveals the following:

Possible site: 14
>>> Seems to have no N-terminal signal sequence
----- Final Results -----
bacterial cytoplasm --- Certainty = 0.3951 (Affirmative) < succ>
bacterial membrane --- Certainty = 0.0000 (Not Clear) < succ>
bacterial outside --- Certainty = 0.0000 (Not Clear) < succ>

[8825] An alignment of the GAS and GBS proteins is shown below.

| Identities = 132/194 (68%), Positives = 154/194 (79%), Gaps = 4/194 (2%) | | | |
|---|---|---|---|
| Query: | 1 | MIFFYKKI---STKEEVMTVEKTVSELAEILGVSRQAMNNRVKTLPEECVEKNSKGVTVV | 57 |
| | | M+ F +I S KEE M +EKTVSELA+ILGVSRQA+NNRVK+LPEE ++KN KGVTVV | |
| Sbjct: | 1 | MVLFLIRIFSDSDKEENMGIEKTVSELADILGVSRQAVNNRVKSLPEEDLDKNEKGVTVV | 60 |
| Query: | 58 | NRDGLIKLEEIYKKTILEEEPIDEEASRRELLEILVDEKNTEITRLYEQLKAKDIQIASK | 117 |
| | | R GL+KLEEIYKKTI ++EPI EE +RELLEILVDEKNTEITRLYEQLKAKD Q+ASK | |
| Sbjct: | 61 | KRSGLVKLEEIYKKTIFDDEPISEETKQRELLEILVDEKNTEITRLYEQLKAKDAQLASK | 120 |
| Query: | 118 | DEQLHVKDIQIAEKDKQLDQQQQLTLTAMEDTQRLQLELNEAKAEVEEIQEAKEEKIQEL | 177 |
| | | DEQ+ VKD+QIAEKDKQLDQQQQLT AM D + L+LEL EAKAE + + + E++Q | |
| Sbjct: | 121 | DEQMRVKDVQIAEKDKQLDQQQQLTAKAMADKETLKLELEEAKAEANQAR-LQVEEVQAE | 179 |
| Query: | 178 | EAVKKSFFGRFFNK | 191 |
| | | KK FF R F K | |
| Sbjct: | 180 | VGPKKGFFTRLFAK | 193 |

[8826] Based on this analysis, it was predicted that these proteins and their epitopes could be useful antigens for vaccines or diagnostics.

### EXAMPLE 1602

[8827] A DNA sequence (GBSx1697) was identified in S. agalactiae <SEQ ID 4951> which encodes the amino acid sequence <SEQ ID 4952>. Analysis of this protein sequence reveals the following:

Possible site: 53
>>> Seems to have no N-terminal signal sequence
----- Final Results -----
bacterial cytoplasm --- Certainty = 0.2157 (Affirmative) < succ>
bacterial membrane --- Certainty = 0.0000 (Not Clear) < succ>
bacterial outside --- Certainty = 0.0000 (Not Clear) < succ>

[8828] The protein has homology with the following sequences in the GENPEPT database.

| >GP: BAB06137 GB: AP001515 DNA polymerase III (alpha subunit) | | | |
|---|---|---|---|
| [Bacillus halodurans] | | | |
| Identities = 31/87 (35%), Positives = 52/87 (59%), Gaps = 1/87 (1%) | | | |
| Query: | 13 | EYIAFDLEFNTVGE-HSNIIQVSAVKYSNHQEIALFDTYVHTKVPLQSFINGLTGITARD | 71 |
| | | E++ FD+E + ++ II+++AVK N + I F+ + PL + I LTGIT | |
| Sbjct: | 418 | EFVVFDVETTGLSAVYNKIIELAAVKVKNGEIIDREERFADPHEPLTNTIIELTGITDDM | 477 |
| Query: | 72 | IIGAPKIEIVLTDFQSFVGDTPLIGYN | 98 |
| | | + G P++E VL +F +F+GD L+ +N | |
| Sbjct: | 478 | LKGQPEVEQVLNEFHAFIGDAVLVAHN | 504 |

[8829] A related DNA sequence was identified in S. pyogenes <SEQ ID 4953> which encodes the amino acid sequence <SEQ ID 4954>. Analysis of this protein sequence reveals the following:

Possible site: 29
>>> Seems to have no N-terminal signal sequence
----- Final Results -----
bacterial cytoplasm --- Certainty = 0.3427 (Affirmative) < succ>
bacterial membrane --- Certainty = 0.0000 (Not Clear) < succ>
bacterial outside --- Certainty = 0.0000 (Not Clear) < succ>

[8830] An alignment of the GAS and GBS proteins is shown below.

| Identities = 136/200 (68%), Positives = 159/200 (79%) | | | |
|---|---|---|---|
| Query: | 3 | FLGEIMKQLQEYIAFDLEFNTVGEHSHIIQVSAVKYSNHQEIALFDTYVHTKVPLQSFIN | 62 |
| | | FL E MK L YIAFDLEFNTV + SHIIQVSAVKY +H+E+ FDTYV+T VPLQSFIN | |
| Sbjct: | 9 | FLEENMKHLDTYIAFDLEFNTVNDVSHIIQVSAVKYDHHKEVDSFDTYVYTDVPLQSFIN | 68 |
| Query: | 63 | GLTGITARDIIGAPKIEIVLTDFQSFVGDTPLIGYNGYKSDLPLLVENGLDLTSQYQVDL | 122 |
| | | GLTGIT+ I PK+E V+ F++FVG+ PLIGYN KSDLP+L ENGLDL QYQ+DL | |
| Sbjct: | 69 | GLTGITSDKIAAEPRVEEVMAAFKNFVGELPLIGYNAQKSDLPILAENGLDLRDQYQIDL | 128 |
| Query: | 123 | YDEAFVRRSTDLNGIVNLKLTTVADFLGIKGKAHNSLEDARMTARVYEKFLDLDENKIYL | 182 |
| | | +DEA+ RRS DLNGI NL+L TVA FLGIKG+ HNSLEDARMTA +Y+ FL+ D NK YL | |
| Sbjct: | 129 | FDEAYDRRSADLNGIANLRLQTVATFLGIKGRGHNSLEDARMTAVIYKSFLETDTNKAYL | 188 |
| Query: | 183 | KQQKEVAVDSPFATLGNLFD | 202 |
| | | QQ+EV D+PFA LG+ FD | |
| Sbjct: | 189 | SQQEEVTTDNPFAALGDFFD | 208 |

[8831] Based on this analysis, it was predicted that these proteins and their epitopes could be useful antigens for vaccines or diagnostics.

### EXAMPLE 1603

[8832] A DNA sequence (GBSx1698) was identified in S. agalactiae <SEQ ID 4955> which encodes the amino acid sequence <SEQ ID 4956>. Analysis of this protein sequence reveals the following:

| Possible site: 46 | | | |
|---|---|---|---|
| >>> Seems to have no N-terminal signal sequence | | | |
| INTEGRAL | Likelihood = −12.10 | Transmembrane | 143-159 (136-166) |
| INTEGRAL | Likelihood = −4.73 | Transmembrane | 169-185 (168-188) |

----- Final Results -----
bacterial membrane --- Certainty = 0.5840 (Affirmative) < succ>
bacterial outside --- Certainty = 0.0000 (Not Clear) < succ>
bacterial cytoplasm --- Certainty = 0.0000 (Not Clear) < succ>

[8833] The protein has homology with the following sequences in the GENPEPT database.

| >GP: CAB42766 GB: AL049841 transcriptional regulator [Streptomyces | | | |
|---|---|---|---|
| coelicolor A3(2)] | | | |
| Identities = 46/141 (32%), Positives = 71/141 (49%), Gaps = 11/141 (7%) | | | |
| Query: | 5 | YSTGDLAKEAGVTVRTVQYYDKRGILSPSELSEGGRRVYSIADLEKLRQIIYLRDLDFSI | 64 |
| | | YS G +A AGVTVRT+ +YD G+L PSE S G R YS ADL++L+QI++ R+L F + | |
| Sbjct: | 3 | YSVGQVAGFAGVTVRTLHHYDDIGLLVPSERSHAGHRRYSDADLDRLQQILFYRELGFPL | 62 |
| Query: | 65 | DNIKNLFTEDNASQILELFLQVQIRELRL--------AIDSKKDKLDKAVNLLKTVEKQD | 116 |
| | | D + L + A L Q ++ R+ A++ + +NL ++ | |
| Sbjct: | 63 | DEVAALLDDPAADPRAHLRRQHELLSARIGKLQKMAAAVEQAMEARSMGINL---TPEEK | 119 |
| Query: | 117 | SKTLGYLSDIVLMEENKRKWG | 137 |
| | | + G EE + +WG | |
| Sbjct: | 120 | FEVFGDFDPDQYEEEVRERWG | 140 |

[8834] There is also homology to SEQ ID 1712.

[8835] SEQ ID 4956 (GBS372) was expressed in E. coli as a GST-fusion product. SDS-PAGE analysis of total cell extract is shown in FIG. 69 (lane 8; MW 55 kDa).

[8836] GBS372-GST was purified as shown in FIG. 215, lane 8.

[8837] Based on this analysis, it was predicted that this protein and its epitopes, could be useful antigens for vaccines or diagnostics.

### EXAMPLE 1604

[8838] A DNA sequence (GBSx1699) was identified in S. agalactiae <SEQ ID 4957> which encodes the amino acid sequence <SEQ ID 4958>. This protein is predicted to be cyclopropane-fatty-acyl-phospholipid synthase (mma2). Analysis of this protein sequence reveals the following:

Possible site: 53
>>> Seems to have no N-terminal signal sequence
----- Final Results -----
bacterial cytoplasm --- Certainty = 0.3145 (Affirmative) < succ>
bacterial membrane --- Certainty = 0.0000 (Not Clear) < succ>
bacterial outside --- Certainty = 0.0000 (Not Clear) < succ>

[8839] The protein has homology with the following sequences in the GENPEPT database.

| >GP: AAD07482 GB: AE000557 cyclopropane fatty acid synthase (cfa) | | | |
|---|---|---|---|
| [Helicobacter pylori 26695] | | | |
| Identities = 167/397 (42%), Positives = 254/397 (63%), Gaps = 14/397 (3%) | | | |
| Query: | 2 | VMDSLIIKQLIKSTFDIPLQVTYPNGNIETYNGSNPHVKLKLNKNFSVSELSKDPSIVLG | 61 |
| | | ++ ++K + K + QV + + ++ +P LK+++ S++ KD S+ + | |
| Sbjct: | 1 | MISKFLLKSMFKQWKNGDYQVVFWDNSVYRNGEHSPKFTLKIHRPLKFSDIKKDMSLTIA | 60 |
| Query: | 62 | EAVMDGDIEIYGSIQELILSAY-RCGDSFLRNSKFSKLIPKQFHDKKHSKSDIQKHYDIG | 120 |
| | | EA MDG I+I GS+ E++ S Y + L +K I K + S+I KHYD+G | |
| Sbjct: | 61 | EAYMDGVIDIEGSMDEVMHSLYLQTNYEHLHKHDNAKAIQKPIKES----SNISKHYDLG | 116 |
| Query: | 121 | NDFYKLWLDDTMTYSCAYFKHENDSLEQAQLNKVHHILNKLNAQPGGKLLDIGCGWGTLI | 180 |
| | | NDFY +WLD+T++YSCAYFK ++D+L AQL K+ H L KL+ +PG KLLDIGCGWG L | |
| Sbjct: | 117 | NDFYSIWLDETLSYSCAYFKKDDDTLHAAQLQKLDHTLKKLHLKPGEKLLDIGCGWGYLS | 176 |
| Query: | 181 | ITAAKEYGLNATGITLSEEQASFITKRIKEEGLENKVTVLIKDYRDI---RETYDYITSV | 237 |
| | | + AA+EYG GIT+S EQ KR++E GLE+KVT+ + +Y+D+ +D + SV | |
| Sbjct: | 177 | VKAAQEYGAEVMGITISSEQYKQANKRVQELGLEDKVTIKLLNYQDLDGRLYRFDKVVSV | 236 |
| Query: | 238 | GMFEHVGKENLSQYFQTISKRLNINGLALIHGITGQVGGNHGSGTNSWINKYIFPGGYIP | 297 |
| | | GMFEHVGK+NL YF+ + + L G+ L+H I G TN+W++KYIFPGGY+P | |
| Sbjct: | 237 | GMFEHVGKDNLPFYFKKVKEVLKRGGMFLLHSILCCFEGK----TNAWVDKYIFPGGYLP | 292 |
| Query: | 298 | RLTENLNHIASAGLQIADLEPLRRHYQKTLELWTKNFHNALPEVQK-THDKRFINMWDLY | 356 |
| | | L E ++ ++ + E LR HY KTL++W NF++ L +V++ ++D+RFI MWDLY | |
| Sbjct: | 293 | SLREVMSVMSECDFHLLMAESLRIHYAKTLDIWRNNFNHNLDQVKRLSYDERFIRMWDLY | 352 |
| Query: | 357 | LQSCAASFESGNIDIFQYLLSKGVSKDTMPMTRDYMY | 393 |
| | | L++CA++F G+ D+FQ LL+ V +T P+T++Y+Y | |
| Sbjct: | 353 | LRTCASAFRVGSADLFQLLLTNSVD-NTFPLTKEYIY | 388 |

[8840] No corresponding DNA sequence was identified in S. pyogenes.

[8841] Based on this analysis, it was predicted that this protein and its epitopes, could be useful antigens for vaccines or diagnostics.

### EXAMPLE 1605

[8842] A DNA sequence (GBSx1700) was identified in S. agalactiae <SEQ ID 4959> which encodes the amino acid sequence <SEQ ID 4960>. Analysis of this protein sequence reveals the following:

Possible site: 35
>>> Seems to have no N-terminal signal sequence
----- Final Results -----
bacterial cytoplasm --- Certainty = 0.4903 (Affirmative) < succ>
bacterial membrane --- Certainty = 0.0000 (Not Clear) < succ>
bacterial outside --- Certainty = 0.0000 (Not Clear) < succ>

[8843] The protein has homology with the following sequences in the GENPEPT database.

| >GP: CAB11796 GB: Z99104 similar to hypothetical proteins [Bacillus subtilis] | | | |
|---|---|---|---|
| Identities = 44/97 (45%), Positives = 60/97 (61%) | | | |
| Query: | 1 | MMNMQNMMRQAQKLQKQMEQKQADLAASQFTGKSAQELVTVTFTGDKKLISIDYKEAVVD | 60 |
| | | M NMQ MM+Q QK+QK M + Q +LA G + +VTV G K+++ + KE VVD | |
| Sbjct: | 5 | MGNMQKMMKQMQKMQKDMAKAQEELAEKVVEGTAGGGMVTVKANGQKEILDVIIKEEVVD | 64 |
| Query: | 61 | PEDIETLQDMTTQAINDALSQVDDATKKIMGAFAGKM | 97 |
| | | PEDI+ LQD+ A N+AL +VD+ T + MG F M | |
| Sbjct: | 65 | PEDIDMLQDLVLAATNEALKKVDEITNETMGQFTKGM | 101 |

[8844] A related DNA sequence was identified in S. pyogenes <SEQ ID 4961> which encodes the amino acid sequence <SEQ ID 4962>. Analysis of this protein sequence reveals the following:

Possible site: 35
>>> Seems to have no N-terminal signal sequence
----- Final Results -----
bacterial cytoplasm --- Certainty = 0.4451 (Affirmative) < succ>
bacterial membrane --- Certainty = 0.0000 (Not Clear) < succ>
bacterial outside --- Certainty = 0.0000 (Not Clear) < succ>

[8845] An alignment of the GAS and GBS proteins is shown below.

| Identities = 84/99 (84%), Positives = 94/99 (94%) | | | |
|---|---|---|---|
| Query: | 1 | MMNMQNMMRQAQKLQKQMEQKQADLAASQFTGKSAQELVTVTFTGDKKLISIDYKEAVVD | 60 |
| | | MMNMQNMM+QAQKLQKQMEQKQADLAA QFTGKSAQ+LVT TFTGDKKL+ ID+KEAVVD | |
| Sbjct: | 1 | MMNMQNMMKQAQKLQKQMEQKQADLAAMQFTGKSAQDLVTATFTGDKKLVGIDFKEAVVD | 60 |
| Query: | 61 | PEDIETLQDMTTQAINDALSQVDDATKKIMGAFAGKMPF | 99 |
| | | PED+ETLQDMTTQAINDAL+Q+D+ TKK +GAFAGK+PF | |
| Sbjct: | 61 | PEDVETLQDMTTQAINDALTQIDETTKKTLGAFAGKLPF | 99 |

[8846] Based on this analysis, it was predicted that these proteins and their epitopes could be useful antigens for vaccines or diagnostics.

### EXAMPLE 1606

[8847] A DNA sequence (GBSx1701) was identified in S. agalactiae <SEQ ID 4963> which encodes the amino acid sequence <SEQ ID 4964>. Analysis of this protein sequence reveals the following:

Possible site: 17
>>> Seems to have no N-terminal signal sequence
----- Final Results -----
bacterial cytoplasm --- Certainty = 0.3963 (Affirmative) < succ>
bacterial membrane --- Certainty = 0.0000 (Not Clear) < succ>
bacterial outside --- Certainty = 0.0000 (Not Clear) < succ>

[8848] The protein has no significant homology with any sequences in the GENPEPT database.

[8849] No corresponding DNA sequence was identified in S. pyogenes.

[8850] Based on this analysis, it was predicted that this protein and its epitopes, could be useful antigens for vaccines or diagnostics.

### EXAMPLE 1607

[8851] A DNA sequence (GBSx1702) was identified in S. agalactiae <SEQ ID 4965> which encodes the amino acid sequence <SEQ ID 4966>. Analysis of this protein sequence reveals the following:

| Possible site: 48 | | | |
|---|---|---|---|
| >>> Seems to have no N-terminal signal sequence | | | |
| INTEGRAL | Likelihood = −2.76 | Transmembrane | 21-37 (19-39) |

----- Final Results -----
bacterial membrane --- Certainty = 0.2105 (Affirmative) < succ>
bacterial outside --- Certainty = 0.0000 (Not Clear) < succ>
bacterial cytoplasm --- Certainty = 0.0000 (Not Clear) < succ>

[8852] A related GBS nucleic acid sequence <SEQ ID 10129> which encodes amino acid sequence <SEQ ID 10130> was also identified.

[8853] The protein has no significant homology with any sequences in the GENPEPT database.

[8854] No corresponding DNA sequence was identified in S. pyogenes.

[8855] Based on this analysis, it was predicted that this protein and its epitopes, could be useful antigens for vaccines or diagnostics.

### EXAMPLE 1608

[8856] A DNA sequence (GBSx1703) was identified in S. agalactiae <SEQ ID 4967> which encodes the amino acid sequence <SEQ ID 4968>. Analysis of this protein sequence reveals the following:

Possible site: 36
>>> Seems to have no N-terminal signal sequence
----- Final Results -----
bacterial cytoplasm --- Certainty = 0.1783 (Affirmative) < succ>
bacterial membrane --- Certainty = 0.0000 (Not Clear) < succ>
bacterial outside --- Certainty = 0.0000 (Not Clear) < succ>

[8857] The protein has no significant homology with any sequences in the GENPEPT database.

[8858] No corresponding DNA sequence was identified in S. pyogenes.

[8859] Based on this analysis, it was predicted that this protein and its epitopes, could be useful antigens for vaccines or diagnostics.

### EXAMPLE 1609

[8860] A DNA sequence (GBSx1704) was identified in S. agalactiae <SEQ ID 4969> which encodes the amino acid sequence <SEQ ID 4970>. This protein is predicted to be probable 1,4-dihydroxy-2-naphthoate octaprenyltransferase. Analysis of this protein sequence reveals the following:

| Possible site: 32 | | | |
|---|---|---|---|
| >>> Seems to have no N-terminal signal sequence | | | |
| INTEGRAL | Likelihood = −8.76 | Transmembrane | 239-255 (219-260) |
| INTEGRAL | Likelihood = −8.33 | Transmembrane | 221-237 (219-238) |
| INTEGRAL | Likelihood = −6.74 | Transmembrane | 91-107 (89-113) |
| INTEGRAL | Likelihood = −6.32 | Transmembrane | 39-55 (35-59) |
| INTEGRAL | Likelihood = −3.77 | Transmembrane | 111-127 (111-132) |
| INTEGRAL | Likelihood = −2.97 | Transmembrane | 144-160 (143-161) |
| INTEGRAL | Likelihood = −1.28 | Transmembrane | 275-291 (275-291) |
| INTEGRAL | Likelihood = −0.59 | Transmembrane | 177-193 (177-193) |

----- Final Results -----
bacterial membrane --- Certainty = 0.4503 (Affirmative) < succ>
bacterial outside --- Certainty = 0.0000 (Not Clear) < succ>
bacterial cytoplasm --- Certainty = 0.0000 (Not Clear) < succ>

[8861] The protein has homology with the following sequences in the GENPEPT database.

| >GP: CAB15875 GB: Z99123 alternate gene name: ipa-6d~similar to | | | |
|---|---|---|---|
| quinone biosynthesis [Bacillus subtilis] | | | |
| Identities = 75/290 (25%), Positives = 139/290 (47%), Gaps = 15/290 (5%) | | | |
| Query: | 5 | IFLELVEMKAKTASVLPFLIGLCFSAYYYNSVHPVYVGLFFVAMFLFNMFVDIWNNYNDY | 64 |
| | | I +L TAS +P L+G + +Y +++ + F +++ + +++N Y D+ | |
| Sbjct: | 21 | ILWQLTRPHTLTASFVPVLLGTVLAMFYVKVDLLLFLAMLFSCLWI-QIATNLFNEYYDF | 79 |
| Query: | 65 | RNAVDL-DYKNDTNIIGRENLSLRQIEVIMASLVITSSMIGLVLVSQVGLPLLWMGLFCF | 123 |
| | | + +D + I R + + I + + + ++G+ + + L +GL | |
| Sbjct: | 80 | KRGLDTAESVGIGGAIVRHGMKPKTILQLALASYGIAILLGVYICASSSWWLALIGLVGM | 139 |
| Query: | 124 | GIGVLYSFGPRPLSSLPLGEVFSGLTMGFMISLICVYLNTYQNFSWDILNLSKIFLISLP | 183 |
| | | IG LY+ GP P++ P GE+FSG+ MG + LI ++ T D +N+ I LIS+P | |
| Sbjct: | 140 | AIGYLYTGGPLPIAYTPFGELFSGICMGSVFVLISFFIQT------DKINMQSI-LISIP | 192 |
| Query: | 184 | NTLWIANLMLANNLCDKEEDEKNHRYTLVHYTGIRGGLLLFAISNSIALLAIVFEFLFGL | 243 |
| | | + + + L+NN+ D EED+K R TL G +G + L A S ++A + +V + G | |
| Sbjct: | 193 | IAILVGAINLSNNIRDIEEDKKGGRKTLAILMGHKGAVTLLAASFAVAYIWVVGLVITGA | 252 |
| Query: | 244 | APVTVLLSLLLIPFIYKQTKLLWQKQVKRETFVCAVRILALGSATQVLTY | 293 |
| | | A + + L +P + K Q ++ I+A+ S Q T+ | |
| Sbjct: | 253 | ASPWLFVVFLSVPKPVQAVKGFVQNEMPMN------MIVAMKSTAQTNTF | 296 |

[8862] No corresponding DNA sequence was identified in S. pyogenes.

[8863] Based on this analysis, it was predicted that this protein and its epitopes, could be useful antigens for vaccines or diagnostics.

### EXAMPLE 1610

[8864] A DNA sequence (GBSx1705) was identified in S. agalactiae <SEQ ID 4971> which encodes the amino acid sequence <SEQ ID 4972>. Analysis of this protein sequence reveals the following:

| Possible site: 16 | | | | |
|---|---|---|---|---|
| >>> Seems to have no N-terminal signal sequence | | | | |
| | INTEGRAL | Likelihood = −0.22 | Transmembrane | 155-171 (154-171) |

```
----- Final Results -----
                              bacterial membrane --- Certainty = 0.1086(Affirmative) < succ>
                                bacterial outside --- Certainty = 0.0000(Not Clear) < succ>
                            bacterial cytoplasm --- Certainty = 0.0000(Not Clear) < succ>
```

[8865] The protein has homology with the following sequences in the GENPEPT database.

| >GP: CAB15200 GB: Z99120 similar to NADH dehydrogenase [Bacillus subtilis] | | | |
|---|---|---|---|
| Identities = 178/403 (44%), Positives = 249/403 (61%), Gaps = 7/403 (1%) | | | |
| Query: | 3 | EILVLGAGYAGLKAVRNLQKQSG--DFHITLVDMNDYHYEATELHEVAAGSQPKEKITFP | 60 |
| | | +I++LGAGY GL V L K G D ITLV+ ++YHYE T +HE +AG+ ++ + | |
| Sbjct: | 7 | KIVILGAGYGGLMTVTRLTKYVGPNDADITLVNKHNYHYETTWMHEASAGTLHHDRCRYQ | 66 |
| Query: | 61 | IKDVINTNKVNFMQDEVLRVDAENKTVTVKNNGELHYDYVVVALGFVSETFGIKGAMENA | 120 |
| | | IKDVIN ++VNF+QD V + + K V + N GEL YDY+V+ LG V ETFGIKG E A | |
| Sbjct: | 67 | IKDVINQSRVNFVQDTVKAIKIDEKKVVLAN-GELQYDYLVIGLGAVPETFGIKGLKEYA | 125 |
| Query: | 121 | LQMTNISQAENIHNHIVNTMKLYRETKDE--NLLKLLVCGAGFTGIELAGAMVDERPKYA | 178 |
| | | + NI+ + + HI Y ++ + L ++V GAGFTGIE G + P+ | |
| Sbjct: | 126 | FPIANINTSRLLREHIELQFATYNTEAEKRPDRLTIVVGGAGFTGIEFLGELAARVPELC | 185 |
| Query: | 179 | ALAGVKPEQIEIICVEAATRILPMFDDELAQYGVNLIKDLGINLMLGSMIKEIKPGEVVY | 238 |
| | | V + IICVEAA +LP FD EL Y V+ +++ G+ +G+ ++E P V | |
| Sbjct: | 186 | KEYDVDRSLVRIICVEAAPTVLPGFDPELVDYAVHYLEENGVEFKIGTAVQECTPEGVRV | 245 |
| Query: | 239 | GTSKEDEELKSITAGTIIWTTGVSGSPVMGESGFDQRRGRVMVNSDLRDPKYDNVYVIGD | 298 |
| | | G K+DEE + I + T++W GV G P++ E+GF+ RGRV VN DLR P +DNV+++GD | |
| Sbjct: | 246 | G--KKDEEPEQIKSQTVVWAAGVRGHPIVEEAGFENMRGRVKVNPDLRAPGHDNVFILGD | 303 |
| Query: | 299 | VSAFMDTESGRPFPTTAQIATRMGAHVAKNLLHQIKGEATEDFSYSPQGTVASVGNTHGL | 358 |
| | | S FM+ ++ RP+P TAQIA + G VAKNL IKG E+F +GTVAS+G + + | |
| Sbjct: | 304 | SSLFMNEDTERPYPPTAQIAMQQGITVAKNLGRLIKGGELEEFKPDIKGTVASLGEHNAV | 363 |
| Query: | 359 | GVVGKTKIKKYPASVMKKIIMNKSLVDMGGLKELLAKGRFDLY | 401 |
| | | GVV K+K PAS MKK+I N+SL +GGL L KG+F + | |
| Sbjct: | 364 | GVVYGRKLKGTPASFMKKVIDNRSLFMIGGLGLTLKKGKFKFF | 406 |

[8866] There is also homology to SEQ ID 4666.

[8867] Based on this analysis, it was predicted that this protein and its epitopes, could be useful antigens for vaccines or diagnostics.

### EXAMPLE 1611

[8868] A DNA sequence (GBSx1706) was identified in S. agalactiae <SEQ ID 4973> which encodes the amino acid sequence <SEQ ID 4974>. This protein is predicted to be cytochrome d ubiquinol oxidase, subunit I (cydA-1). Analysis of this protein sequence reveals the following:

| Possible site: 42 | | | | |
|---|---|---|---|---|
| >>> Seems to have no N-terminal signal sequence | | | | |
| | INTEGRAL | Likelihood = −6.64 | Transmembrane | 19-35 (15-38) |
| | INTEGRAL | Likelihood = −5.73 | Transmembrane | 226-242 (222-244) |
| | INTEGRAL | Likelihood = −4.94 | Transmembrane | 130-146 (126-149) |
| | INTEGRAL | Likelihood = −4.83 | Transmembrane | 429-445 (422-446) |
| | INTEGRAL | Likelihood = −3.77 | Transmembrane | 55-71 (53-74) |
| | INTEGRAL | Likelihood = −3.56 | Transmembrane | 342-358 (340-359) |
| | INTEGRAL | Likelihood = −1.06 | Transmembrane | 89-105 (89-106) |
| | INTEGRAL | Likelihood = −0.59 | Transmembrane | 186-202 (186-202) |

```
----- Final Results -----
                              bacterial membrane --- Certainty = 0.3654(Affirmative) < succ>
                                bacterial outside --- Certainty = 0.0000(Not Clear) < succ>
                            bacterial cytoplasm --- Certainty = 0.0000(Not Clear) < succ>
```

[8869] The protein has homology with the following sequences in the GENPEPT database.

| >GP: CAB15902 GB: Z99123 cytochrome bd ubiquinol oxidase (subunit I) | | | |
|---|---|---|---|
| [Bacillus subtilis] | | | |
| Identities = 246/470 (52%), Positives = 319/470 (67%), Gaps = 12/470 (2%) | | | |
| Query: | 6 | LARFQFAMTTVFHFFFVPFTIGTCLVVAIMETMYVITKNEEYKKLTKFWGNIMLLSFAVG | 65 |
| | | LAR QFA TT+FHF FVP +IG +VA+MET+Y++ KNE Y K+ KFWG++ L++FAVG | |
| Sbjct: | 6 | LARIQFASTTLFHFLFVPMSIGLVFMVALMETLYLVKKNELYLKMAKFWGHLFLINFAVG | 65 |
| Query: | 66 | VVTGIIQEFQFGMNWSDYSRFVGDIFGAPLAIEALLAFFMESTFLGLWMFTWDNKKISKK | 125 |
| | | VVTGI+QEFQFG+NWSDYSRFVGD+FGAPLAIEALLAFFMES F+GLW+F WD ++ KK | |
| Sbjct: | 66 | VVTGILQEFQFGLNWSDYSRFVGDVFGAPLAIEALLAFFMESIFIGLWIFGWD--RLPKK | 123 |
| Query: | 126 | LHVTFIWLVVFGSLMSAMWILTANSFMQHPVGYEVVNGRAQMTDFLALVKNPQFFYEFTH | 185 |
| | | +H IWLV FG++MS+ WILTANSFMQ PVG+ + NGRA+M DF AL+ NPQ + EF H | |
| Sbjct: | 124 | IHALCIWLVSFGTIMSSFWILTANSFMQEPVGFTIKNGRAEMNDFGALITNPQLWVEFPH | 183 |
| Query: | 186 | VIFGAITMGGTVVAGMSAFRLLKSEQLKDTTVELYKKSVRIGLVVALLGSISVMGVGDLQ | 245 |
| | | VIFGA+ G +AG+SAF+LLK ++ V +K+S ++ ++V L + V G +Q | |
| Sbjct: | 184 | VIFGALATGAFFIAGVSAFKLLKKKE-----VPFFKQSFKLAMIVGLCAGLGVGLSGHMQ | 238 |
| Query: | 246 | MKALIHDQPMKFAAMEGDYEDSGDPAAWSVVAWANEAEHKQVFGIKIPYMLSILSYGKPS | 305 |
| | | + L+ QPMK AA EG +EDSGDPAAW+ A + K IK+PY LS L+Y K S | |
| Sbjct: | 239 | AEHLMESQPMKMAASEGLWEDSGDPAAWTAPATIDTKNEKSSNEIKVPYALSYLAYQKFS | 298 |
| Query: | 306 | GSVKGMDTANKELVAKYGKDNYYPMVNLLFYGFRTMAAMGTAINGVSVLGLFLTRKKKPI | 365 |
| | | GSVKGM T E YGK +Y P V F+ FR M G ++ ++ GL+L R+KK | |
| Sbjct: | 299 | GSVKGMKTLQAEYEKIYGKGDYIPPVKTTFWSFRIMVGAGVVMILAALGGLWLNRRKK-- | 356 |
| Query: | 366 | LYKHKWMLWIVALTTFAPFLANTFGWIVTEQGRYPWTVYGLFKIKDSVSPNVSVASLFVS | 425 |
| | | L KW L I+ PFLAN+ GWI+TE GR PWTV GL SVSPNV+ SL S | |
| Sbjct: | 357 | LENSKWYLRIMIALISFPFLANSAGWIMTEIGRQPWTVMGLMTTAQSVSPNVTAGSLLFS | 416 |
| Query: | 426 | NTVYFLLFGGLAVMMISLTIRELKKGPEYEDEHGHHGAYTSIDPFEEGAY | 475 |
| | | + +++ L +++ L IRE+KKG E+++ HH S DPF + Y | |
| Sbjct: | 417 | IIAFGVMYMILGALLVFLFIREIKKGAEHDN---HHDVPVSTDPFSQEVY | 463 |

[8870] No corresponding DNA sequence was identified in S. pyogenes.

[8871] Based on this analysis, it was predicted that this protein and its epitopes, could be useful antigens for vaccines or diagnostics.

### EXAMPLE 1612

[8872] A DNA sequence (GBSx1707) was identified in S. agalactiae <SEQ ID 4975> which encodes the amino acid sequence <SEQ ID 4976>. This protein is predicted to be cytochrome oxidase subunit 11 (cydB-1). Analysis of this protein sequence reveals the following:

| Possible site: 22 | | | | |
|---|---|---|---|---|
| >>> Seems to have an uncleavable N-term signal seq | | | | |
| | INTEGRAL | Likelihood = −14.49 | Transmembrane | 226-242 (220-250) |
| | INTEGRAL | Likelihood = −8.12 | Transmembrane | 254-270 (250-282) |
| | INTEGRAL | Likelihood = −7.64 | Transmembrane | 198-214 (196-218) |
| | INTEGRAL | Likelihood = −6.95 | Transmembrane | 85-101 (76-103) |
| | INTEGRAL | Likelihood = −6.74 | Transmembrane | 6-22 (1-27) |
| | INTEGRAL | Likelihood = −6.16 | Transmembrane | 300-316 (298-322) |
| | INTEGRAL | Likelihood = −5.36 | Transmembrane | 119-135 (117-143) |
| | INTEGRAL | Likelihood = −4.04 | Transmembrane | 159-175 (155-178) |

```
----- Final Results -----
                              bacterial membrane --- Certainty = 0.6795(Affirmative) < succ>
                                bacterial outside --- Certainty = 0.0000(Not Clear) < succ>
                            bacterial cytoplasm --- Certainty = 0.0000(Not Clear) < succ>
```

[8873] The protein has homology with the following sequences in the GENPEPT database.

| >GP: CAB15901 GB: Z99123 cytochrome bd ubiquinol oxidase (subunit II) | | | |
|---|---|---|---|
| [Bacillus subtilis] | | | |
| Identities = 158/331 (47%), Positives = 223/331 (66%), Gaps = 1/331 (0%) | | | |
| Query: | 1 | MSALQFFWFFLIGLLFSGFFFLEGFDFGVGMAVQTLTHNEHEKDQVVETIGPVWDGNEVW | 60 |
| | | M++L WF L+ +LF GFFFLEGFDFGVGMA + L HNE E+ ++ TIGP WD NEVW | |
| Sbjct: | 1 | MASLHDLWFILVAVLFVGFFFLEGFDFGVGMATRFLGHNELERRVLINTIGPFWDANEVW | 60 |
| Query: | 61 | LLTGGGAMFASFPYWYASLFSGYYLILLTILFGLIIRGVSFEFRHKVPAEK-KQFWNWTL | 119 |
| | | LLTG GA+FA+FP WYA++ SGYY+ + +L L+ RGV+FEFR KV K + W+W + | |
| Sbjct: | 61 | LLTGAGAIFAAFPNWYATMLSGYYIPFVIVLLALMGRGVAFEFRGKVDHLKWVKVWDWVV | 120 |
| Query: | 120 | TIGSAIVPFFFGIMFISLIQGMPLDASGNLSAQFSDYFNIFSLVGGVAMVLLAYLHGLNY | 179 |
| | | GS I PF G++F +L +GMP+DA N+ A SDY N++S++GGV + LL + HGL + | |
| Sbjct: | 121 | FFGSLIPPFVLGVLFTTLFRGMPIDADMNIHAHVSDYINVYSILGGVTVTLLCFQHGLMF | 180 |
| Query: | 180 | IALKTEGPIRERARNYAQLLYWVLYLGLALFAVLLYFKTDFFSNHPIVTTIMVLVIVVLA | 239 |
| | | I L+T G ++ RAR AQ + V+++ + FA L ++TD F+ +T + ++IV+ | |
| Sbjct: | 181 | ITLRTIGDLQNRARKMAQKIMGVVFVAVLAFAALSAYQTDMFTRRGEITIPLAVLIVICF | 240 |
| Query: | 240 | VLAHASTFKGAEMTAFLASGLSLVSVVVLLFQGLFPRVMISSISPKYDLLIQNASSTPYT | 299 |
| | | +LA K + F +G L V ++F LFPRVM+SS+ YDL + NASS Y+ | |
| Sbjct: | 241 | MLAAVFIRKKKDGWTFGMTGAGLALTVGMIFISLFPRVMVSSLHSAYDLTVANASSGDYS | 300 |
| Query: | 300 | LKVMSIVAITLVPFVLAYTAWAYYIFRKRIT | 330 |
| | | LKVMSI A+TL+PFV+ W+YY+FRKR++ | |
| Sbjct: | 301 | LKVMSIAALTLLPFVIGSQIWSYYVFRXRVS | 331 |

[8874] No corresponding DNA sequence was identified in S. pyogenes.

[8875] Based on this analysis, it was predicted that this protein and its epitopes, could be useful antigens for vaccines or diagnostics.

### EXAMPLE 1613

[8876] A DNA sequence (GBSx1708) was identified in S. agalactiae <SEQ ID 4977> which encodes the amino acid sequence <SEQ ID 4978>. Analysis of this protein sequence reveals the following:

```
Possible site: 29
>>> Seems to have an uncleavable N-term signal seq
----- Final Results -----
                              bacterial membrane --- Certainty = 0.0000(Not Clear) < succ>
                                bacterial outside --- Certainty = 0.0000(Not Clear) < succ>
                            bacterial cytoplasm --- Certainty = 0.0000(Not Clear) < succ>
```

[8877] The protein has no significant homology with any sequences in the GENPEPT database.

[8878] No corresponding DNA sequence was identified in S. pyogenes.

[8879] Based on this analysis, it was predicted that this protein and its epitopes, could be useful antigens for vaccines or diagnostics.

### EXAMPLE 1614

[8880] A DNA sequence (GBSx1709) was identified in S. agalactiae <SEQ ID 4979> which encodes the amino acid sequence <SEQ ID 4980>. This protein is predicted to be transport ATP-binding protein cydc (cydD). Analysis of this protein sequence reveals the following:

| Possible site: 27 | | | | |
|---|---|---|---|---|
| >>> Seems to have an uncleavable N-term signal seq | | | | |
| | INTEGRAL | Likelihood = −16.82 | Transmembrane | 158-174 (144-182) |
| | INTEGRAL | Likelihood = −6.48 | Transmembrane | 15-31 (14-34) |
| | INTEGRAL | Likelihood = −5.31 | Transmembrane | 243-259 (238-266) |
| | INTEGRAL | Likelihood = −2.55 | Transmembrane | 136-152 (134-152) |
| | INTEGRAL | Likelihood = −0.48 | Transmembrane | 263-279 (263-279) |

```
----- Final Results -----
                              bacterial membrane --- Certainty = 0.7729(Affirmative) < succ>
                                bacterial outside --- Certainty = 0.0000(Not Clear) < succ>
                            bacterial cytoplasm --- Certainty = 0.0000(Not Clear) < succ>
```

[8881] The protein has homology with the following sequences in the GENPEPT database.

| >GP: CAB15900 GB: Z99123 ABC membrane transporter (ATP-binding | | | |
|---|---|---|---|
| protein) [Bacillus subtilis] | | | |
| Identities = 279/569 (49%), Positives = 401/569 (70%), Gaps = 6/569 (1%) | | | |
| Query: | 2 | LDKAVMRLSGIHKLLGLLAGLDVLQAIFIIGQAYYLSLSITGLWEGQKLSSQTVYILLFM | 61 |
| | | + K + R G+ ++L L+ L ++Q II QA +LS ++TGL+ G+ ++S I F+ | |
| Sbjct: | 1 | MGKDLFRYKGMKRILTLITCLTLIQTAAIIMQAEWLSEAVTGLFNGRGITSLLPVIGFFL | 60 |
| Query: | 62 | VSYLGRHVIDYIKNRKLDDFSTAQSSLLRRQLLDKLFDLGPKVVQEQGTGNVVTMALDGV | 121 |
| | | ++++ RH + + + + ++ + LR+ LD+LF LGP+ +++GTG +VT+A++G+ | |
| Sbjct: | 61 | IAFIARHGMTVARQKIVYQYAARTGADLRKSFLDQLFRLGPRFAKKEGTGQMVTLAMEGI | 120 |
| Query: | 122 | SLVENYLRLVLNKMINMSIIPWIILAYIFYLDIESGAILLIVFPLIIIFMIILGYAAQAK | 181 |
| | | S YL L L KM++M+I+P ++ Y+F+ D S IL+ P++IIFMI+LG AQ K | |
| Sbjct: | 121 | SQFRRYLELFLPKMVSMAIVPAAVVIYVFFQDRTSAIILVAAMPILIIFMILLGLVAQRK | 180 |
| Query: | 182 | ADKQYESYQVLSNHFLDSLRGIDTLKYFGLSKRYGKSIYQTSESFRKATMSTLKIGILST | 241 |
| | | AD+Q++SYQ LSNHF+DSLRG++TL++ GLSK + K+I+ SE +RKATMSTL++ LS+ | |
| Sbjct: | 181 | ADRQWKSYQRLSNHFVDSLRGLETLRFLGLSKSHSKNIFYVSERYRKATMSTLRVAFLSS | 240 |
| Query: | 242 | FALDEFTTLSIAIVAVFLGLRLLNEQIYLLPALTILILSPEYFLPVRDFSSDYHATLDGK | 301 |
| | | FALDFFT LS+A VAVFLGLRL++ I L PALT LIL+PEYFLPVR+ +DYHATL+G+ | |
| Sbjct: | 241 | FALDFFTMLSVATVAVFLGLRLIDGDILLGPALTALILAPEYFLPVREVGNDYHATLNGQ | 300 |
| Query: | 302 | NAFQAIQKVLHKTGIKGE-QLVIDDWSKESRLDLENIAIAYDQKRVVEDVTLRFRGHQKV | 360 |
| | | A + IQ++L++ G K E L ++ WS + L L +++ R V D+ L F+G +K+ | |
| Sbjct: | 301 | EAGRTIQEILSQPGFKEETPLQLEAWSDQDELKLSGVSVG----RSVSDIHLSFKGKKKI | 356 |
| Query: | 361 | ALVGVSGSGKSSLINLLSGFLGPDNGSLKVDGREVTNLDQEDWHKQMIYIPQTPYVFEMS | 420 |
| | | ++G SG+GKS+LI++L GFL PD G ++V+G ++L W K ++YIPQ PY+F+ + | |
| Sbjct: | 357 | GIIGASGAGKSTLIDILGGFLEPDGGMIEVNGTSRSHLQDGSWQKNLLYIPQHPYIFDDT | 416 |
| Query: | 421 | LRDNITFYTPNASDEEVVRAIHMVGLDSLLSELPDGLETRIGNGARPLSGGQAQRIALAR | 480 |
| | | L +NI FY P+AS E+ RA GL L++ LPDGLE RIG G R LSGGQAQR+ALAR | |
| Sbjct: | 417 | LGNNIRFYHPSASAEDTTRAAASAGLTELVNNLPDGLEGRIGEGGRALSGGQAQRVALAR | 476 |
| Query: | 481 | AFLDQNRRIMVFDEPTAHLDIETELELKEKMLPLMSDRLVIFATHRLHWLNQMDVIVVME | 540 |
| | | AFL NR I++ DEPTAHLDIETE E+KE ML L D+LV ATHRLHW+ MD I+V++ | |
| Sbjct: | 477 | AFLG-NRPILLLDEPTAHLDIETEYEIKETMLDLFEDKLVFLATHRLHWMLDMDEIIVLD | 535 |
| Query: | 541 | KGRVAEVGSYQELLAKKGYLYQLKHAMGG | 569 |
| | | GRVAE+G++ ELL K G +L A G | |
| Sbjct: | 536 | GGRVAEIGTHNELLEKNGVYTKLVKAQLG | 564 |

[8882] A related DNA sequence was identified in S. pyogenes <SEQ ID 4981> which encodes the amino acid sequence <SEQ ID 4982>. Analysis of this protein sequence reveals the following:

| Possible site: 53 | | | |
|---|---|---|---|
| >>> Seems to have no N-terminal signal sequence | | | |
| INTEGRAL | Likelihood = −10.61 | Transmembrane | 159-175 (154-190) |
| INTEGRAL | Likelihood = −10.03 | Transmembrane | 70-86 (63-91) |
| INTEGRAL | Likelihood = −3.03 | Transmembrane | 282-298 (282-301) |
| INTEGRAL | Likelihood = −1.44 | Transmembrane | 261-277 (260-278) |

----- Final Results -----
bacterial membrane --- Certainty = 0.5246 (Affirmative) < succ>
bacterial outside --- Certainty = 0.0000 (Not Clear) < succ>
bacterial cytoplasm --- Certainty = 0.0000 (Not Clear) < succ>

[8883] The protein has homology with the following sequences in the databases:

| >GP: AAC22320 GB: U32749 ATP-binding transport protein (cydD) | | | |
|---|---|---|---|
| [Haemophilus influenzae Rd] | | | |
| Identities = 167/544 (30%), Positives = 279/544 (50%), Gaps 15/544 (2%) | | | |
| Query: | 46 | MISFYLIAKTFSTFILGHAIALGRLAGLLLLLNVVGFVLAILGK---QLQGIASQFARDS | 102 |
| | | + S+ L A F L A+ LG + L L A GK Q AS + | |
| Sbjct: | 17 | VFSYILQAAYFHELSLLSAVILGIVLIAALALR------AFAGKKSVQASYFASTKVKHE | 70 |
| Query: | 103 | LKQSFFEAFIDLDGQFDAHASDADILTLASQGIDSLDTYYGYYL-SLSMRTKWNCTTIMI | 161 |
| | | L+ + + S + I+ +AS+G++ L+ Y+G YL L T | |
| Sbjct: | 71 | LRSLIYRKLASMPLNQVNQQSTSSIIQVASEGVEQLEIYFGRYLPQLFYSLLAPLTLFAF | 130 |
| Query: | 162 | LVFLIYPLAGLVFLGVLPLIPLSIVAMQKRSQPNMSHYWSSYMDVGNLFMDDLKGLNTLY | 221 |
| | | L+F + A ++ L +PLIP+SI+A+ K ++ ++ YWS Y+ +G+ F+D+L+GL TL | |
| Sbjct: | 131 | LIFFSFKTA-IILLICVPLIPMSIIAVNKIAKKLLAKYWSIYVGLGSSFLDNLQGLITLK | 189 |
| Query: | 222 | SYQATERYEQEFSGKAEQFRKATMSLLGFQLQAVGYMDAVMYLGIGLSGFLAVQALATGQ | 281 |
| | | YQ + +AE FRK TM +L QL +V MD + Y G + A+ Q | |
| Sbjct: | 190 | IYQDDAYKAKAMDKEAEHFRKITMKVLTMQLNSVSLMDLLAYGGAAIGILTALLQFQNAQ | 249 |
| Query: | 282 | LSFFNFLFFLLIATEFFTPIREQGYGMHLVMMNTKMADRIFSFLDS-VPARKDNKSKTAI | 340 |
| | | LS + F+L+++EFF P+R G H+ M +D+IF+ LD+ V ++ A | |
| Sbjct: | 250 | LSVLGVILFILLSSEFFIPLRLLGSFFHVAMNGKAASDKIFTLLDTPVETQQSAVDFEAK | 309 |
| Query: | 341 | NFNQIDIQNISLAY-EKKTVLSGVTMTLTKGQLTAIAGVSGQGKTSLAQLLLKRQSATTG | 399 |
| | | N Q++I+++ +Y E+K ++G+ +++ QL+ G SG GK++L LL+ A G | |
| Sbjct: | 310 | NNVQVEIKDLHFSYSEEKPAITGLNLSILPNQLSVFVGKSGCGKSTLVSLLMGFNKAQQG | 369 |
| Query: | 400 | HILFDGLDSDNLSQETINQQVLYVSDQSTLLNRSIYDNLRLA-ANLSKKEILDWIDQHGL | 458 |
| | | ILF+G ++ N+ + + Q+V VS S + ++ +N+ +A + + ++I ++Q L | |
| Sbjct: | 370 | EILFNGQNALNIDRTSFYQKVSLVSHSSYVFKGTLRENMTMAKIDATDEQIYACLEQVNL | 429 |
| Query: | 459 | LSFINWLPDGLDTIVGENGNLLSPGQKQQVICARALLSKRSLYIFDEATSSLDAENERII | 518 |
| | | F+ GLD + G LS GQ Q++ ARALL LYIFDEATS++D E+E II | |
| Sbjct: | 430 | AQFVR-DNGGLDMQLLSRGANLSGGQIQRLALARALLHNAELYIFDEATSNIDVESEEII | 488 |
| Query: | 519 | DNLITRLAKTAIVIVITHKMSRLKGANQVLFLNTGQPACLGKPCDLYRDQPTYRHLVDTQ | 578 |
| | | I + + +++I+H+++ A+ + L+ G+ G +L Q Y + Q | |
| Sbjct: | 489 | LQFIQQFKQQKTIVMISHRLANAVNADCINVLDQGKLIEQGTHKELMEKQGAYAEMFQQQ | 548 |
| Query: | 579 | ARLE | 582 |
| | | LE | |
| Sbjct: | 549 | KDLE | 552 |

[8884] An alignment of the GAS and GBS proteins is shown below.

| Identities = 143/552 (25%), Positives = 260/552 (46%), Gaps = 12/552 (2%) | | | |
|---|---|---|---|
| Query: | 1 | MLDKAVMRLSGIHKLLGLLAGLDVLQAIFIIGQAYYLSLSITGLWEGQKLSSQTVYILLF | 60 |
| | | +L + R++ LL + A L LQ + + Y ++ + + G ++ + LL | |
| Sbjct: | 16 | LLKRLRERIAPKRYLLYVSAFLSWLQFVMRMISFYLIAKTFSTFILGHAIALGRLAGLLL | 75 |
| Query: | 61 | MVSYLGRHVIDYIKNRKLDDFSTAQSSLLRRQLLDKLFDLGPKVVQEQGTGNVVTMALDG | 120 |
| | | +++ +G V+ + + S L++ + DL + +++T+A G | |
| Sbjct: | 76 | LLNVVG-FVLAILGKQLQGIASQFARDSLKQSFFEAFIDLDGQFDAHASDADILTLASQG | 134 |
| Query: | 121 | VSLVENYLRLVLNKMINMSIIPWIILAYIFYLDIESGAILLIVFPLIIIFMIILGYAAQA | 180 |
| | | + ++ Y L+ + I+ +F + +G + L V PLI + ++ + +Q | |
| Sbjct: | 135 | IDSLDTYYGYYLSLSMRTKWNCTTIMILVFLIYPLAGLVFLGVLPLIPLSIVAMQKRSQP | 194 |
| Query: | 181 | KADKQYESYQVLSNHFLDSLRGIDTLKYFGLSKRYGKSIYQTSESFRKATMSTLKIGILS | 240 |
| | | + SY + N F+D L+G++TL + ++RY + +E FRKATMS L + + | |
| Sbjct: | 195 | NMSHYWSSYMDVGNLFMDDLKGLNTLYSYQATERYEQEFSGKAEQFRKATMSLLGFQLQA | 254 |
| Query: | 241 | TFALDFFTTLSIAIVAVFLGLRLLNEQIYLLPALTILILSPEYFLPVRDFSSDYHATLDG | 300 |
| | | +D L I + L Q+ L L+++ E+F P+R+ H + | |
| Sbjct: | 255 | VGYMDAVMYLGIGLSGFLAVQALATGQLSFFNFLFFLLIATEFFTPIREQGYGMHLVMMN | 314 |
| Query: | 301 | KNAFQAIQKVLNKTGIKGEQLVIDDWSKE----SRLDLENIAIAYDQKRVVEDVTLRFRG | 356 |
| | | I L+ + D+ SK +++D++NI++AY++K V+ VT+ | |
| Sbjct: | 315 | TKMADRIFSFLDSVPARK-----DNKSKTAINFNQIDIQNISLAYEKKTVLSGVTMTLTK | 369 |
| Query: | 357 | HQKVALVGVSGSGKSSLINLLSGFLGPDNGSLKVDGREVTNLDQEDWHKQMIYIPQTPYV | 416 |
| | | Q A+ GVSG GK+SL LL G + DG + NL QE ++Q++Y+ + | |
| Sbjct: | 370 | GQLTAIAGVSGQGKTSLAQLLLKRQSATTGHILFDGLDSDNLSQETINQQVLYVSDQSTL | 429 |
| Query: | 417 | FEMSLRDNITFYTPNASDEEVVRAIHMVGLDSLLSELPDGLETRIGNGARPLSGGQAQRI | 476 |
| | | S+ DN+ N S +E++ I GL S ++ LPDGL+T +G LS GQ Q++ | |
| Sbjct: | 430 | LNRSIYDNLRL-AANLSKKEILDWIDQHGLLSFINWLPDGLDTIVGENGNLLSPGQKQQV | 488 |
| Query: | 477 | ALARAFLDQNRRIMVFDEPTAHLDIETELELKEKMLPLMSDRLVIFATHRLHWLNQMDVI | 536 |
| | | ARA L + R + +FDE T+ LD E E + + L +VI TH++ L + + | |
| Sbjct: | 489 | ICARALLSK-RSLYIFDEATSSLDAENERIIDNLITRLAKTAIVIVITHKMSRLKGANQV | 547 |
| Query: | 537 | VVMEKGRVAEVG | 548 |
| | | + + G+ A +G | |
| Sbjct: | 548 | LFLNTGQPACLG | 559 |

[8885] Based on this analysis, it was predicted that these proteins and their epitopes could be useful antigens for vaccines or diagnostics.

### EXAMPLE 1615

[8886] A DNA sequence (GBSx1710) was identified in S. agalactiae <SEQ ID 4983> which encodes the amino acid sequence <SEQ ID 4984>. This protein is predicted to be transport ATP-binding protein cydd (cydC). Analysis of this protein sequence reveals the following:

| Possible site: 49 | | | |
|---|---|---|---|
| >>> Seems to have no N-terminal signal sequence | | | |
| INTEGRAL | Likelihood = −12.84 | Transmembrane | 260-276 (258-284) |
| INTEGRAL | Likelihood = −9.34 | Transmembrane | 172-188 (147-199) |
| INTEGRAL | Likelihood = −6.53 | Transmembrane | 150-166 (147-171) |
| INTEGRAL | Likelihood = −6.05 | Transmembrane | 31-47 (29-52) |
| INTEGRAL | Likelihood = −3.35 | Transmembrane | 68-84 (67-84) |
| INTEGRAL | Likelihood = −1.17 | Transmembrane | 293-309 (292-310) |
| INTEGRAL | Likelihood = −0.69 | Transmembrane | 494-510 (493-510) |

----- Final Results -----
bacterial membrane --- Certainty = 0.6137 (Affirmative) < succ>
bacterial outside --- Certainty = 0.0000 (Not Clear) < succ>
bacterial cytoplasm --- Certainty = 0.0000 (Not Clear) < succ>

[8887] A related GBS nucleic acid sequence <SEQ ID 10127> which encodes amino acid sequence <SEQ ID 10128> was also identified.

[8888] The protein has homology with the following sequences in the GENPEPT database.

| >GP: CAB15899 GB: Z99123 ABC membrane transporter (ATP-binding | | | |
|---|---|---|---|
| protein) [Bacillus subtilis] | | | |
| Identities = 262/573 (45%), Positives = 389/573 (67%), Gaps = 14/573 (2%) | | | |
| Query: | 16 | LKTDQWIKPFFKQYKVSLVIALFLGFMTFFSASALMFNSGYLISKSASLPSNILLVYVPI | 75 |
| | | +K ++WI P+ KQ V+ +FLG +T FSA+ LMF SG+LISK+A+ P NILL+YVPI | |
| Sbjct: | 1 | MKKEEWILPYIKQNARLFVLVIFLGAVTIFSAAFLMFTSGFLISKAATRPENILLIYVPI | 60 |
| Query: | 76 | VLTRAFGIGRPVFRYIERLTSHNWVLRMTSQLRLKLYHSLESNAIFMKRDFRLGDVMGLL | 135 |
| | | V R FGI R V RY+ERL H+ +L++ S +R++LY+ LE A+ ++ FR GD++G+L | |
| Sbjct: | 61 | VAVRTFGIARSVSRYVERLVGHHIILKIVSDMRVRLYNMLEPGALMLRSRFRTGDMLGIL | 120 |
| Query: | 136 | AEDINYLQNLYLRTIFPTIIAWILYSFIIIATGFFSLWFALMMLLYLAIMIFLFPLWSIL | 195 |
| | | +EDI +LQ+ +L+TIFP I A +LY+ +IA GFFS FA+++ LYL +++ LFP+ S+L | |
| Sbjct: | 121 | SEDIEHLQDAFLKTIFPAISALLLYAVSVIALGFFSWPFAILLALYLFVLVVLFPVVSLL | 180 |
| Query: | 196 | ANGARQTREKELKNHLYTDLTDNVLGISDWIFSQRGQEYVALHERSESELMAVQKKIRSF | 255 |
| | | A+ + K +N LY+ LTD V+G+SDW+FS R ++ +E+ E + +++K + F | |
| Sbjct: | 181 | VTRAKNAKLKSGRNVLYSRLTDAVMGVSDWMFSGRRHAFIDAYEKEERDWFELERKKQRF | 240 |
| Query: | 256 | DNRRALIVELVFGFLAILVIIWASNQFIGHRGGEA--NWIAAFVLTVFPLSEAFAGLSAA | 313 |
| | | R + + L +L++ W + Q GE IAAFVL VFPL+EAF LS A | |
| Sbjct: | 241 | TRWRDFAAQCLVAGLILLMLFWTAGQ---QADGELAKTMIAAFVLVVFPLTEAFLPLSDA | 297 |
| Query: | 314 | AQETNKYSDSIHRLN------ELSETYFETTQNQLPNKPYDFSVKNLSFQYKPQEKWVLH | 367 |
| | | E Y DSI R+N E S+T E+ L + + ++++F Y + VLH | |
| Sbjct: | 298 | LGEVPGYQDSIRRMNNVAPQPEASQT--ESGDQILDLQDVTLAFRDVTFSYDNSSQ-VLH | 354 |
| Query: | 368 | HLDLDIKEGEKIAILGRSGSGKSTLASLLRGDLKASQGEITLGDADVSIVGDCISNYIGV | 427 |
| | | + +++GEK+A+LGRSGSGKST +L+ G LK G +TL + +++ D I++ + V | |
| Sbjct: | 355 | NFSFTLRQGEKMALLGRSGSGKSTSLALIEGALKPDSGSVTLNGVETALLKDQIADAVAV | 414 |
| Query: | 428 | IQQAPYLFNTTLLNNIRIGNQDASEEDVWKVLERVGLKEMVTDLSDGLYTMVDEAGLRFS | 487 |
| | | + Q P+LF+T++LNNIR+GN +AS+EDV + ++V L + + L DG +T V E G+RFS | |
| Sbjct: | 415 | LNQKPHLFDTSILNNIRLGNGEASDEDVRRAAKQVKLHDYIESLPDGYHTSVQETGIRFS | 474 |
| Query: | 488 | GGERHRIALARILLKDVPIVILDEPTVGLDPITEQALLRVFMKELEGKTLVWITHHLKGI | 547 |
| | | GGER RIALARILL+D PI+ILDEPTVGLDPITE+ L+ + L+GKT++WITHHL G+ | |
| Sbjct: | 475 | GGERQRIALARILLQDTPIIILDEPTVGLDPITERELMETVFEVLKGKTILWITHHLAGV | 534 |
| Query: | 548 | EHADRILFIENGQLELEGSPQELSQSSQRYRQL | 580 |
| | | E AD+I+F+ENG+ E+EG+ +EL +++RYR+L | |
| Sbjct: | 535 | EAADKIVFLENGKTEMEGTHEELLAANERYRRL | 567 |

[8889] A related GBS gene <SEQ ID 8861> and protein <SEQ ID 8862> were also identified. Analysis of this protein sequence reveals the following:

| Lipop: Possible site: −1 Crend: 8 | | | |
|---|---|---|---|
| McG: Discrim Score: −15.90 | | | |
| GvH: Signal Score (−7.5): 1.97 | | | |
| Possible site: 49 | | | |
| >>> Seems to have no N-terminal signal sequence | | | |
| ALOM program | count: 7 | value: −12.84 | threshold: 0.0 |

| | | | |
|---|---|---|---|
| INTEGRAL | Likelihood = −12.84 | Transmembrane | 260-276 (258-284) |
| INTEGRAL | Likelihood = −9.34 | Transmembrane | 172-188 (147-199) |
| INTEGRAL | Likelihood = −6.53 | Transmembrane | 150-166 (147-171) |
| INTEGRAL | Likelihood = −6.05 | Transmembrane | 31-47 (29-52) |
| INTEGRAL | Likelihood = −3.35 | Transmembrane | 68-84 (67-84) |
| INTEGRAL | Likelihood = −1.17 | Transmembrane | 293-309 (292-310) |
| INTEGRAL | Likelihood = −0.69 | Transmembrane | 494-510 (493-510) |

| | | |
|---|---|---|
| PERIPHERAL | Likelihood = 3.29 | 412 |

modified ALOM score: 3.07
*** Reasoning Step: 3
----- Final Results -----
bacterial membrane --- Certainty = 0.6137 (Affirmative) < succ>
bacterial outside --- Certainty = 0.0000 (Not Clear) < succ>
bacterial cytoplasm --- Certainty = 0.0000 (Not Clear) < succ>

[8890] The protein has homology with the following sequences in the databases:

[chemical structure]

[8891] There is also homology to SEQ ID 478.

[8892] Based on this analysis, it was predicted that these proteins and their epitopes could be useful antigens for vaccines or diagnostics.

### EXAMPLE 1616

[8893] A DNA sequence (GBSx1711) was identified in S. agalactiae <SEQ ID 4987> which encodes the amino acid sequence <SEQ ID 4988>. This protein is predicted to be spore germination protein C3 (ispB). Analysis of this protein sequence reveals the following:

| Possible site: 45 | | | |
|---|---|---|---|
| >>> Seems to have no N-terminal signal sequence | | | |
| INTEGRAL | Likelihood = −1.06 | Transmembrane | 111-127 (111-128) |

----- Final Results -----
bacterial membrane --- Certainty = 0.1426 (Affirmative) < succ>
bacterial outside --- Certainty = 0.0000 (Not Clear) < succ>
bacterial cytoplasm --- Certainty = 0.0000 (Not Clear) < succ>

[8894] The protein has homology with the following sequences in the GENPEPT database.

| >GP: CAB14190 GB: Z99115 heptaprenyl diphosphate synthase component II | | | |
|---|---|---|---|
| [Bacillus subtilis] | | | |
| Identities = 101/318 (31%), Positives = 184/318 (57%), Gaps = 5/318 (1%) | | | |
| Query: | 8 | YPELKKNIDETNQLIQERIQVRNKDIEAALSQLTAAGGKQLRPAFFYLFSQLGNKENQDT | 67 |
| | | Y L +ID + +++ ++ + A L AGGK++RP F L G+ D | |
| Sbjct: | 35 | YSFLNDDIDVIERELEQTVRSDYPLLSEAGLHLLQAGGKRIRPVFVLLSGMFGD---YDI | 91 |
| Query: | 68 | QQLKKIAASLEILHVATLIHDDVIDDSPLRRGNMTIQSKFGKDIAVYTGDLLFTVFFDLI | 127 |
| | | ++K +A +LE++H+A+L+HDDVIDD+ LRRG TI++K+ IA+YTGD + +++ | |
| Sbjct: | 92 | NKIKYVAVTLEMIHMASLVHDDVIDDAELRRGKPTIKAKWDNRIAMYTGDYMLAGSLEMM | 151 |
| Query: | 128 | LESMADTPFMRINAKSMRKILMGELDQMHLRYNQQQGIHHYLRAISGKTAELFKLASKEG | 187 |
| | | + + RI ++++ ++ +GE++Q+ +YN +Q + YLR I KTA L ++ + G | |
| Sbjct: | 152 | TR-INEPKAHRILSQTIVEVCLGEIEQIKDKYNMEQNLRTYLRRIKRKTALLIAVSCQLG | 210 |
| Query: | 188 | AYFGGAEKEVVRLAGHIGFNIGMTFQILDDILDYTADKKTFNKPVLEDLAQGIYSLPLLL | 247 |
| | | A GA++++ + G+ +GM++QI+DDILD+T+ ++ KPV DL QG +LP+L | |
| Sbjct: | 211 | AIASGADEKIHKALYWFGYYVGMSYQIIDDILDFTSTEEELGKPVGGDLLQGNVTLPVLY | 270 |
| Query: | 248 | AIEENPDIFKPILDKKTDMATEDMEKIAYLVVSHRGVDKARHLARKFTEKAISDINKLPQ | 307 |
| | | A+ +NP + + ++ E +E I + ++ + ++ + +KA +N LP+ | |
| Sbjct: | 271 | AL-KNPALKNQLKLINSETTQEQLEPIIEEIKKTDAIEASMAVSEMYLQKAFQKLNTLPR | 329 |
| Query: | 308 | SSAKKQLLQLTNYLLKRK | 325 |
| | | A+ L + Y+ KRK | |
| Sbjct: | 330 | GRARSSLAAIAKYIGKRK | 347 |

[8895] There is also homology to SEQ ID 284. An alignment of the GAS and GBS proteins is shown below:

| Identities = 65/227 (28%), Positives = 98/227 (42%), Gaps = 9/227 (3%) | | | |
|---|---|---|---|
| Query: | 43 | AGGKQLRPAFFYLFSQLGNKENQDTQQLKKIAASLEILHVATLIHDDV--IDDSPLRRGN | 100 |
| | | +GGK++RP + Q+ +AA+LE++H +LIHDD+ +D+ RRG | |
| Sbjct: | 36 | SGGKRIRPLILLEMIEGFGVSLQNAHF--DLAAALEMIHTGSLIHDDLPAMDNDDYRRGR | 93 |
| Query: | 101 | MTIQSKFGKDIAVYTGDLLFTVFFDLILESM--ADTPFMRINAKSMRKILMGELDQMHLR | 158 |
| | | +T +FG+ A+ GD LF F LI ++ ++ I S+ G + L | |
| Sbjct: | 94 | LTNHKQFGEATAILAGDSLFLDPFGLIAQAELNSEVKVALIQELSLASGTFGMVGGQMLD | 153 |
| Query: | 159 | Y---NQQQGIHHYLRAISGKTAELFKLASKEGAYFGGAEKEVVRLAGHIGFNIGMTFQIL | 215 |
| | | NQ + KT +L K A V + G IG FQI | |
| Sbjct: | 154 | MKGENQALSLPQLSLIHLNKTGKLLAFPFKAAALITEQAMTVRQQLEQAGMLIGHAFQIR | 213 |
| Query: | 216 | DDILDYTADKKTFNKPVLEDLAQGIYSLPLLLAIEENPDIFKPILDK | 262 |
| | | DDILD TA + K +DL + P LL +E + + LD+ | |
| Sbjct: | 214 | DDILDVTASFEDLGKTPKKDLFAEKATYPSLLGLEASYQLLTESLDQ | 260 |

[8896] Based on this analysis, it was predicted that these proteins and their epitopes could be useful antigens for vaccines or diagnostics.

### EXAMPLE 1617

[8897] A DNA sequence (GBSx1712) was identified in S. agalactiae <SEQ ID 4989> which encodes the amino acid sequence <SEQ ID 4990>. Analysis of this protein sequence reveals the following:

Possible site: 49
>>> Seems to have no N-terminal signal sequence
----- Final Results -----
bacterial cytoplasm --- Certainty = 0.3995 (Affirmative) < succ>
bacterial membrane --- Certainty = 0.0000 (Not Clear) < succ>
bacterial outside --- Certainty = 0.0000 (Not Clear) < succ>

[8898] The protein has homology with the following sequences in the GENPEPT database.

| >GP: AAA25232 GB: M58315 dipeptidyl peptidase IV [Lactococcus lactis] | | | |
|---|---|---|---|
| Identities = 385/767 (50%), Positives = 504/767 (65%), Gaps = 21/767 (2%) | | | |
| Query: | 1 | MRYNQFSYIPTKPNEAFEELKGLGFPLNKKNSDKANLEAFLRHSFLNQTDTDYALSLLIV | 60 |
| | | MR+N FS + +E EL LGF + +K L+ FL S + TD L | |
| Sbjct: | 1 | MRFNHFSIVDKNFDEQLAELDQLGFRWSVFWDEKKILKDFLIQSPSDMTD-------LQA | 53 |
| Query: | 61 | DAKTDALTFFKSNSDLTLENLQWIYLQLLGFIPFVDFKDPKAF-------LQDINFPVSY | 113 |
| | | A+ D + F KS+ +L E I LQLL F+P DF+ KAF L I ++ | |
| Sbjct: | 54 | TAELDVIEFLKSSIELDWEIFWNIALQLLDFVPNFDFEIGKAFEYAKNSNLPQIEAEMTT | 113 |
| Query: | 114 | DNIFQSLHHLLACRGKSGNTLIDQLVADGLLHADNHYHFFNGKSLATFNTNQLIREVVYV | 173 |
| | | +NI + ++LL R K+G L++ V++GLL DNHYHFFN KSLATF+++ L REV++V | |
| Sbjct: | 114 | ENIISAFYYLLCTRRKNGMILVEHWVSEGLLPLDNHYHFFNDKSLATFDSSLLEREVLWV | 173 |
| Query: | 174 | ETSLDTMSSGEHDLVKVNIIRPTTEHTIPTMMTASPYHQGINDPAADQKTYQMEGALAVK | 233 |
| | | E+ +D+ GE+DL+K+ IIRP + +P +MTASPYH GIND A D + M L K | |
| Sbjct: | 174 | ESPVDSEQRGENDLIKIQIIRPKSTEKLPVVMTASPYHLGINDKANDLALHDMNVELEEK | 233 |
| Query: | 234 | QPKHIQVDTKPFKEEVKHPSKLPI-SPATESFTHIDSYSLNDYFLSRGFANIYVSGVGTA | 292 |
| | | I V+ K ++ +LPI A FTH +YSLNDYFL+RGFA+IYV+GVGT | |
| Sbjct: | 234 | TSHEIHVEQKLPQKLSAKAKELPIVDKAPYRFTHGWTYSLNDYFLTRGFASIYVAGVGTR | 293 |
| Query: | 293 | GSTGFMTSGDYQQIQSFKAVIDWLNGKVTAFTSHKRDKQVKANWSNGLVATTGKSYLGTM | 352 |
| | | S GF TSGDYQQI S AVIDWLNG+ A+TS K+ ++KA+W+NG VA TGKSYLGTM | |
| Sbjct: | 294 | SSDGFQTSGDYQQIYSMTAVIDWLNGRARAYTSRKKTHEIKASWANGKVAMTGKSYLGTM | 353 |
| Query: | 353 | STGLATTGVEGLKVIIAEAAISTWYDYYRENGLVCSPGGYPGEDLDVLTELTYSRNLLAG | 412 |
| | | + G ATTGVEGL+VI+AEA IS+WY+YYRENGLV SPGG+PGEDLDVL LTYSRNL | |
| Sbjct: | 354 | AYGAATTGVEGLEVILAEAGISSWYNYYRENGLVRSPGGFPGEDLDVLAALTYSRNLDGA | 413 |
| Query: | 413 | DYIKNNDCYQALLNEQSKAIDRQSGDYNQYWHDRNYLTHVNNVKSRVVYTHGLQDWNVKP | 472 |
| | | D++K N Y+ L E + A+DR+SGDYNQ+WHDRNYL + + VK+ V+ HGLQDWNV P | |
| Sbjct: | 414 | DFLKGNAEYEKRLAEMTAALDRKSGDYNQFWHDRNYLINTDKVKADVLIVHGLQDWNVTP | 473 |
| Query: | 473 | RHVYKVFNALPQTIKKHLFLHQGQHVYMHNWQSIDFRESMNALLSQELLGIDNHFQLEEV | 532 |
| | | Y + ALP+ KH FLH+G H+YM++WQSIDF E++NA +LL D + L V | |
| Sbjct: | 474 | EQAYNFWKALPEGHAKHAFLHRGAHIYMNSWQSIDFSETINAYFVAKLLDRDLNLNLPPV | 533 |
| Query: | 533 | IWQDNTTEQTWQVLDAFGGNHQEQIGLGD---SKKLIDNHYDKEAFDTYCKDFNVFKNDL | 589 |
| | | I Q+N+ +Q W +++ FG N Q ++ LG S DNHYD E F Y KDFNVFK DL | |
| Sbjct: | 534 | ILQENSKDQVWTMMNDFGANTQIKLPLGKTAVSFAQFDNHYDDETFKKYSKDFNVFKKDL | 593 |
| Query: | 590 | FKGNNKTNQITINLPLKKNYLLNGQCKLHLRVKTSDKKAILSAQILDYGPKKRFKDTPTI | 649 |
| | | F+ NK N+ I+L L +NG +L LR+K +D K LSAQILD+G KKR +D + | |
| Sbjct: | 594 | FE--NKANEAVIDLELPSMLTINGPVELELRLKLNDTKGFLSAQILDFGQKKRLEDKARV | 651 |
| Query: | 650 | KFLNSLDNGKNFAREALRELPFTKDHYRVISKGVLNLQNRTDLLTIEAIEPEQWFDIEFS | 709 |
| | | K LD G+NF + L ELP + Y++I+KG NLQN+ +LLT+ ++ ++WF I+F | |
| Sbjct: | 652 | KDFKVLDRGRNFMLDDLVELPLVESPYQLITKGFTNLQNQ-NLLTVSDLKADEWFTIKFE | 710 |
| Query: | 710 | LQPSIYQLSKGDNLRIILYTTDFEHTIRDNASYSITVDLSQSYLTIP | 756 |
| | | LQP+IY L K D LR+ILY+TDFEHT+RDN + +DLSQS L IP | |
| Sbjct: | 711 | LQPTIYHLEKADKLRVILYSTDFEHTVRDNRKVTYEIDLSQSKLIIP | 757 |

[8899] A related DNA sequence was identified in S. pyogenes <SEQ ID 4991> which encodes the amino acid sequence <SEQ ID 4992>. Analysis of this protein sequence reveals the following:

```
Possible site: 16
>>> Seems to have no N-terminal signal sequence
----- Final Results -----
                            bacterial cytoplasm --- Certainty = 0.2553(Affirmative) < succ>
                              bacterial membrane --- Certainty = 0.0000(Not Clear) < succ>
                                bacterial outside --- Certainty = 0.0000(Not Clear) < succ>
```

[8900] An alignment of the GAS and GBS proteins is shown below.

| Identities = 481/758 (63%), Positives = 587/758 (76%), Gaps = 4/758 (0%) | | | |
|---|---|---|---|
| Query: | 1 | MRYNQFSYIPTKPNEAFEELKGLGFPLNKKNSDKANLEAFLRHSFLNQTDTDYALSLLIV | 60 |
| | | MRYNQFSYIPT A EELK LGF L+ + + KA+LE+FLR F + D+DY LS LI | |
| Sbjct: | 1 | MRYNQFSYIPTSLERAAEELKELGFDLDLQKTAKASLESFLRKLFFHYPDSDYPLSHLIA | 60 |
| Query: | 61 | DAKTDALTFEKSNSDLTLENLQWIYLQLLGFIPFVDFKDPKAFLQDINFPVSYDN--IFQ | 118 |
| | | DAL+FF+S +L+ E + LQ+LGFIP VDF + AFL + FP+ +D I + | |
| Sbjct: | 61 | KNDMDALSFFQSEQELSKEVFDLLALQVLGFIPGVDFTEADAFLDKLAFPIHFDETEIIK | 120 |
| Query: | 119 | SLHHLLACRGKSGNTLIDQLVADGLLHADNHYHFFNGKSLATFNTNQLIREVVYVETSLD | 178 |
| | | +HHLLA R KSG TLID LV+ G+L DN YHFFNGKSLATF+T+QLIREVVYVE LD | |
| Sbjct: | 121 | HIHHLLATRCKSGMTLIDDLVSQGMLTMDNDYHFFNGKSLATFDTSQLIREVVYVEAPLD | 180 |
| Query: | 179 | TMSSGEHDLVKVNIIRPTTEHTIPTMMTASPYHQGINDPAADQKTYQMEGALAVKQPKHI | 238 |
| | | T G+ DL+KVNIIRP ++ +PT+MT SPYHQGIN+ A D+K Y+ME L VK+ + I | |
| Sbjct: | 181 | TDQDGQLDLIKVNIIRPQSQKPLPTLMTPSPYHQGINEVANDKKLYRMEKELVVKKRRQI | 240 |
| Query: | 239 | QVDTKPFKEEVKHPSKLPISPATESFTHIDSYSLNDYFLSRGFANIYVSGVGTAGSTGFM | 298 |
| | | V+ + F P KLPI ESF++I+SYSLNDYFL+RGFANIYVSGVGTAGSTGFM | |
| Sbjct: | 241 | TVEDRDFIPLETQPCKLPIGQNLESFSYINSYSLNDYFLARGFANIYVSGVGTAGSTGFM | 300 |
| Query: | 299 | TSGDYQQIQSFKAVIDWLNGKVTAFTSHKRDKQVKANWSNGLVATTGKSYLGTMSTGLAT | 358 |
| | | TSG+Y QI+SFKAVIDWLNG+ TA+TSH + QV+A+W+NGLV TTGKSYLGTMSTGLAT | |
| Sbjct: | 301 | TSGNYAQIESFKAVIDWLNGRATAYTSHSKTHQVRADWANGLVCTTGKSYLGTMSTGLAT | 360 |
| Query: | 359 | TGVEGLKVIIAEAAISTWYDYYRENGLVCSPGGYPGEDLDVLTELTYSRNLLAGDYIKNN | 418 |
| | | TGV+GL +IIAE+AIS+WY+YYRENGLVCSPGGYPGEDLDVLTELTYSRNLLAGDY+++N | |
| Sbjct: | 361 | TGVDGLAMIIAESAISSWYNYYRENGLVCSPGGYPGEDLDVLTELTYSRNLLAGDYLRHN | 420 |
| Query: | 419 | DCYQALLNEQSKAIDRQSGDYNQYWHDRNYLTHVNNVKSRVVYTHGLQDWNVKPRHVYKV | 478 |
| | | D YQ LLN+QS+A+DRQSGDYNQ+WHDRNYL + + +K VVYTHGLQDWNVKPR VY++ | |
| Sbjct: | 421 | DRYQELLNQQSQALDRQSGDYNQFWHDRNYLKNAHQIKCDVVYTHGLQDWNVKPRQVYEI | 480 |
| Query: | 479 | FNALPQTIKKHLFLHQGQHVYMHNWQSIDFRESMNALLSQELLGIDNHFQLEEVIWQDNT | 538 |
| | | FNALP TI KHLFLHQG+HVYMHNWQSIDFRESMNALL Q+LLG+ N F L E+IWQDNT | |
| Sbjct: | 481 | FNALPSTINKHLFLHQGEHVYMHNWQSIDFRESMNALLCQKLLGLANDFSLPEMIWQDNT | 540 |
| Query: | 539 | TEQTWQVLDAFGGNHQEQIGLGDSKKLIDNHYDKEAFDTYCKDFNVFKNDLFKGNNKTNQ | 598 |
| | | Q WQ FG + +++ LG LIDNHY ++ F Y KDF FK LFKG K NQ | |
| Sbjct: | 541 | CPQNWQERKVFGTSTIKELDLGQELLLIDNHYGEDEFKAYGKDFRAFKAALFKG--KANQ | 598 |
| Query: | 599 | ITINLPLKKNYLLNGQCKLHLRVKTSDKKAILSAQILDYGPKKRFKDTPTIKFLNSLDNG | 658 |
| | | I++ L+++ +NG+ L L+VK+S+ K +LSAQILDYG KKR D P +S+DNG | |
| Sbjct: | 599 | ALIDILLEEDLPINGEIVLQLKVKSSENKGLLSAQILDYGKKKRLGDLPIALTQSSIDNG | 658 |
| Query: | 659 | KNFAREALRELPFTKDHYRVISKGVLNLQNRTDLLTIEAIEPEQWFDIEFSLQPSIYQLS | 718 |
| | | +NF+RE L+ELPF +D YRVISKG +NLQNR +L +IE I +W + LQP+IY L | |
| Sbjct: | 659 | QNFSREPLKELPFREDSYRVISKGFMNLQNRNNLSSIETIPNNKWMTVRLPLQPTIYHLE | 718 |
| Query: | 719 | KGDNLRIILYTTDFEHTIRDNASYSITVDLSQSYLTIP | 756 |
| | | KGD LR+ILYTTDFEHT+RDN++Y++T+DLSQS L +P | |
| Sbjct: | 719 | KGDTLRVILYTTDFEHTVRDNSNYALTIDLSQSQLIVP | 756 |

[8901] Based on this analysis, it was predicted that these proteins and their epitopes could be useful antigens for vaccines or diagnostics.

### EXAMPLE 1618

[8902] A DNA sequence (GBSx1713) was identified in S. agalactiae <SEQ ID 4993> which encodes the amino acid sequence <SEQ ID 4994>. This protein is predicted to be PrfA. Analysis of this protein sequence reveals the following:

```
Possible site: 54
>>> Seems to have no N-terminal signal sequence
----- Final Results -----
                            bacterial cytoplasm --- Certainty = 0.3976(Affirmative) < succ>
                              bacterial membrane --- Certainty = 0.0000(Not Clear) < succ>
                                bacterial outside --- Certainty = 0.0000(Not Clear) < succ>
```

[8903] A related GBS nucleic acid sequence <SEQ ID 10125> which encodes amino acid sequence <SEQ ID 10126> was also identified.

[8904] The protein has homology with the following sequences in the GENPEPT database.

| >GP: CAA65740 GB: X97014 PrfA [Listeria seeligeri] | | | |
|---|---|---|---|
| Identities = 54/181 (29%), Positives = 95/181 (51%), Gaps = 1/181 (0%) | | | |
| Query: | 38 | DYTYILKDGIVKQSVLSKYGTEFNLRYVTGLEITSILNTDYSQHMGEPYNVRIESETAHF | 97 |
| | | +Y L +G+ K + +S+ G NL+Y G I D + +G YN+ + SE A | |
| Sbjct: | 36 | EYCIFLHEGVAKLTSISESGDILNLQYYKGAFIIMTGFIDTEKSLGY-YNLEVVSEQAAA | 94 |
| Query: | 98 | YKVRRSTFLKDINNDIELQGYVKDFYHNRLEKSMKKMQCMLTNGRIGAISTQLYDLSKMF | 157 |
| | | Y ++ S + ++ D++ Y+ D ++ S+ K +NG++G+I Q L+ ++ | |
| Sbjct: | 95 | YIIKISDLKELVSKDLKQLFYIIDTLQKQVSYSLAKFNDFSSNGKVGSICGQFLILAYVY | 154 |
| Query: | 158 | GEERDNGDIYINFVITNEELGKFCGISTGSSVSRILKQLKDDHIIRIEKQHIIITNVEKLK | 218 |
| | | GEE NG +T +ELG GI+ S+VSRI+ +LK +++I + + I N+ LK | |
| Sbjct: | 155 | GEETPNGIKITLEKLTMQELGCSSGIAHSSAVSRIISKLKQENVIEYKDSYFYIKNIAYLK | 215 |

[8905] A related DNA sequence was identified in S. pyogenes <SEQ ID 4995> which encodes the amino acid sequence <SEQ ID 4996>. Analysis of this protein sequence reveals the following:

```
Possible site: 13
>>> Seems to have no N-terminal signal sequence
----- Final Results -----
                            bacterial cytoplasm --- Certainty = 0.4088(Affirmative) < succ>
                              bacterial membrane --- Certainty = 0.0000(Not Clear) < succ>
                                bacterial outside --- Certainty = 0.0000(Not Clear) < succ>
```

[8906] An alignment of the GAS and GBS proteins is shown below.

| Identities = 186/223 (83%), Positives = 203/223 (90%) | | | |
|---|---|---|---|
| Query: | 1 | MEEVMNHQILQNYINSHNLPIIEKDYHKYLTFESLEEDYTYILKDGIVKQSVLSKYGTEF | 60 |
| | | +E+ +NH ILQ YI++HN PIIEK YHKYLTFESLEED+TYILKDGIVKQSVLSKYG EF | |
| Sbjct: | 17 | LEKSVNHHILQRYIDNHNFPIIEKSYHKYLTFESLEEDFTYILKDGIVKQSVLSKYGMEF | 76 |
| Query: | 61 | NLRYVTGLEITSILNTDYSQHMGEPYNVRIESETAHFYKVRRSTFLKDINNDIELQGYVK | 120 |
| | | NLRYVTGLEITS+LNT YS+ MGEPYNVRIESE A FYKVRRS FLKDIN DIELQGYVK | |
| Sbjct: | 77 | NLRYVTGLEITSVLNTGYSKDMGEPYNVRIESEKASFYKVRRSAFLKDINEDIELQGYVK | 136 |
| Query: | 121 | DFYHNRLEKSMKKMQCMLTNGRIGAISTQLYDLSKMFGEERDNGDIYINFVITNEELGKF | 180 |
| | | DFYHNRL+KSMKKMQCMLTNGRIGAISTQ+YDL +FGEE NG I INFVITNEELGKF | |
| Sbjct: | 137 | DFYHNRLQKSMKKMQCMLTNGRIGAISTQIYDLMTLFGEELPNGQILINFVITNEELGKF | 196 |
| Query: | 181 | CGISTGSSVSRILKQLKDDHIIRIEKQHIIITNVEKLKDHIVF | 223 |
| | | CGIST SSVSRILKQLK+ +IIRI+KQHIIITN++KLKD+IVF | |
| Sbjct: | 197 | CGISTASSVSRILKQLKEKNIIRIDKQHIIITNLDKLKDNIVF | 239 |

[8907] Based on this analysis, it was predicted that these proteins and their epitopes could be useful antigens for vaccines or diagnostics.

### EXAMPLE 1619

[8908] A DNA sequence (GBSx1714) was identified in S. agalactiae <SEQ ID 4997> which encodes the amino acid sequence <SEQ ID 4998>. Analysis of this protein sequence reveals the following:

| Possible site: 46 | | | | |
|---|---|---|---|---|
| >>> Seems to have an uncleavable N-term signal seq | | | | |
| | INTEGRAL | Likelihood = −14.33 | Transmembrane | 167-183 (159-193) |
| | INTEGRAL | Likelihood = −7.96 | Transmembrane | 18-34 (10-37) |
| | INTEGRAL | Likelihood = −7.75 | Transmembrane | 373-389 (369-392) |
| | INTEGRAL | Likelihood = −5.68 | Transmembrane | 214-230 (212-234) |
| | INTEGRAL | Likelihood = −4.78 | Transmembrane | 243-259 (241-262) |
| | INTEGRAL | Likelihood = −2.71 | Transmembrane | 48-64 (47-65) |
| | INTEGRAL | Likelihood = −2.60 | Transmembrane | 283-299 (283-300) |

```
----- Final Results -----
                              bacterial membrane --- Certainty = 0.6731(Affirmative) < succ>
                                bacterial outside --- Certainty = 0.0000(Not Clear) < succ>
                            bacterial cytoplasm --- Certainty = 0.0000(Not Clear) < succ>
```

[8909] The protein has homology with the following sequences in the GENPEPT database.

| >GP: CAB15662 GB: Z99122 similar to antibiotic resistance protein | | | |
|---|---|---|---|
| [Bacillus subtilis] | | | |
| Identities = 106/401 (26%), Positives = 199/401 (49%), Gaps = 21/401 (5%) | | | |
| Query: | 3 | DKLFNKHFIGITILNFIVYMVYYLFTVIIAFIATKELGVSTSQAGLATGIYIVGTLIARL | 62 |
| | | D ++ K FI + ++N V++ +Y F ++ +ELG + SQ GL ++++ +I R | |
| Sbjct: | 5 | DAIWTKDFIMVLLVNLFVFVFFYTFLTVLPIYTLQELGGTESQGGLLISLFLLSAIITRP | 64 |
| Query: | 63 | IFGKQLEVLGRKLVLRGGAIFYLLTTLAYFYMPSIGVMYLVRFLNGFGYGVVSTATNTIV | 122 |
| | | G +E G+K + + L++ Y + + ++ +RF G + +++T T I | |
| Sbjct: | 65 | FSGAIVERFGKKRMAIVSMALFALSSFLYMPIHNFSLLLGLRFFQGIWFSILTTVTGAIA | 124 |
| Query: | 123 | TAYIPADKRGEGINFYGLSTSLAAAIGPFVGTFMLDNLHINFKMVIVLCSILIAIVVLGA | 182 |
| | | IPA +RGEG+ ++ +S +LA AIGPF+G ++ ++F + ++ + +L + | |
| Sbjct: | 125 | ADIIPAKRRGEGLGYFAMSMNLAMAIGPFLGLNLMRV--VSFPVFFTAFALFMVAGLLVS | 182 |
| Query: | 183 | FVFPVKNITLNPEQLAKSKSWTIDSF-----IEKKAIFITIIAFLMGISYASVLGFQKLY | 237 |
| | | F+ V +K T+ F EK A+ I + + Y++V + ++ | |
| Sbjct: | 183 | FLIKVPQ--------SKDSGTTVFRFAFSDMFEKGALKIATVGLFISFCYSTVTSYLSVF | 234 |
| Query: | 238 | TTEINLMTVGAYFFIVYALVITLTRPSMGRLMDAKGDKWVLYPSYLFLTLGLALLGSAMG | 297 |
| | | ++L + YFF+ +A+ + + RP G+L D G V+YPS L ++GL +L | |
| Sbjct: | 235 | AKSVDLSDISGYFFVCFAVTMMIARPFTGKLFDKVGPGIVIYPSILIFSVGLCMLSFTHS | 294 |
| Query: | 298 | SVTYLLSGALIGFGYGTFMSCGQAASIKGVEEHRFNTAMSTYMIGLDLGLGAGPYILGLV | 357 |
| | | + LLSGA+IG GYG+ + C Q +I+ HR A +T+ D G+ G Y+ GL | |
| Sbjct: | 295 | GLMLLLSGAVIGLGYGSIVPCMQTLAIQKSPAHRSGFATATFFTFFDSGIAVGSYVFGL- | 353 |
| Query: | 358 | KDGFLGAGVQSFRELFWIAAIIPVVCGILYFLKSSRQVETK | 398 |
| | | F+ + F ++ A + ++ +LY + E + | |
| Sbjct: | 354 | ---FVASA--GFSAIYLTAGLFVLIALLLYTWSQKKPAEAE | 389 |

[8910] A related DNA sequence was identified in S. pyogenes <SEQ ID 4999> which encodes the amino acid sequence <SEQ ID 5000>. Analysis of this protein sequence reveals the following:

| Possible site: 35 | | | | |
|---|---|---|---|---|
| >>> Seems to have an uncleavable N-term signal seq | | | | |
| | INTEGRAL | Likelihood = −12.31 | Transmembrane | 202-218 (194-225) |
| | INTEGRAL | Likelihood = −7.80 | Transmembrane | 53-69 (44-71) |
| | INTEGRAL | Likelihood = −7.17 | Transmembrane | 407-423 (404-426) |
| | INTEGRAL | Likelihood = −5.26 | Transmembrane | 249-265 (247-269) |
| | INTEGRAL | Likelihood = −3.77 | Transmembrane | 279-295 (276-297) |
| | INTEGRAL | Likelihood = −2.23 | Transmembrane | 11-27 (10-27) |
| | INTEGRAL | Likelihood = −2.13 | Transmembrane | 83-99 (82-99) |
| | INTEGRAL | Likelihood = −1.91 | Transmembrane | 312-328 (311-328) |

```
----- Final Results -----
                              bacterial membrane --- Certainty = 0.5925(Affirmative) < succ>
                                bacterial outside --- Certainty = 0.0000(Not Clear) < succ>
                            bacterial cytoplasm --- Certainty = 0.0000(Not Clear) < succ>
```

[8911] The protein has homology with the following sequences in the databases:

| >GP: CAB15662 GB: Z99122 similar to antibiotic resistance protein | | | |
|---|---|---|---|
| [Bacillus subtilis] | | | |
| Identities = 110/390 (28%), Positives = 194/390 (49%), Gaps = 11/390 (2%) | | | |
| Query: | 38 | EKLFNKHFVAITVINFIVYMVYYLFTVIIAFVATRELGAQTSQAGLATGIYILGTLLARL | 97 |
| | | + ++ K F+ + ++N V++ +Y F ++ +ELG SQ GL +++L ++ R | |
| Sbjct: | 5 | DAIWTKDFIMVLLVNLFVFVFFYTFLTVLPIYTLQELGGTESQGGLLISLFLLSAIITRP | 64 |
| Query: | 98 | IFGKQLEVFGRRLVLRGGAIFYLLTTLAYFYMPTISMMYLVRFLNGFGYGVVSTATNTIV | 157 |
| | | G +E FG++ + + L++ Y + S++ +RF G + +++T T I | |
| Sbjct: | 65 | FSGAIVERFGKKRMAIVSMALFALSSFLYMPIHNFSLLLGLRFFQGIWFSILTTVTGAIA | 124 |
| Query: | 158 | TAYIPARKRGEGINFYGLSTSLAAAIGPFVGTFMLDNLHIDFRMIIVLCSVLIGCVVVGA | 217 |
| | | IPA++RGEG+ ++ +S +LA AIGPF+G ++ + F + ++ + ++ + | |
| Sbjct: | 125 | ADIIPAKRRGEGLGYFAMSMNLAMAIGPFLGLNLMRV--VSFPVFFTAFALFMVAGLLVS | 182 |
| Query: | 218 | FAFPVKNMSLNAEQLAKTKSWTVDSFIEKKALFITAIAFLMGIAYASVLGFQKLYTSEIH | 277 |
| | | F V + + + + EK AL I + + Y++V + ++ + | |
| Sbjct: | 183 | FLIKVPQSKDSGTTVFR---FAFSDMFEKGALKIATVGLFISFCYSTVTSYLSVFAKSVD | 239 |
| Query: | 278 | LTTVGAYFFVVYALIITITRPAMGRLMDAKGDKWVLYPSYLFLAMGLFLLGSVSSGGSYL | 337 |
| | | L+ + YFFV +A+ + I RP G+L D G V+YPS L ++GL +L SG L | |
| Sbjct: | 240 | LSDISGYFFVCFAVTMMIARPFTGKLFDKVGPGIVIYPSILIFSVGLCMLSFTHSGLMLL | 299 |
| Query: | 338 | LSGALIGFGYGTFMSCGQAASIQGVDEHRFNTAMSTYMIGLDLGLGAGPYLLGLIKDLAL | 397 |
| | | LSGA+IG GYG+ + C Q +IQ HR A +T+ D G+ G Y+ GL | |
| Sbjct: | 300 | LSGAVIGLGYGSIVPCMQTLAIQKSPAHRSGFATATFFTFFDSGIAVGSYVFGLF----- | 354 |
| Query: | 398 | GSGVASFRHLFWLAAVIPLICTLLYLLKTK | 427 |
| | | A F ++ A + LI LLY K | |
| Sbjct: | 355 | -VASAGFSAIYLTAGLFVLIALLLYTWSQK | 383 |

[8912] An alignment of the GAS and GBS proteins is shown below.

| Identities = 328/396 (82%), Positives = 370/396 (92%), Gaps = 1/396 (0%) | | | |
|---|---|---|---|
| Query: | 1 | MEDKLFNKHFIGITILNFIVYMVYYLFTVIIAFIATKELGVSTSQAGLATGIYIVGTLIA | 60 |
| | | ME+KLFNKHF+ IT++NFIVYMVYYLFTVIIAF+AT+ELG TSQAGLATGIYI+GTL+A | |
| Sbjct: | 36 | MEEKLFNKHFVAITVINFIVYNVYYLFTVIIAFVATRELGAQTSQAGLATGIYILGTLLA | 95 |
| Query: | 61 | RLIFGKQLEVLGRKLVLRGGAIFYLLTTLAYFYMPSIGVMYLVRFLNGFGYGVVSTATNT | 120 |
| | | RLIFGKQLEV GR+LVLRGGAIFYLLTTLAYFYMP+I +MYLVRFLNGFGYGVVSTATNT | |
| Sbjct: | 96 | RLIFGKQLEVFGRRLVLRGGAIFYLLTTLAYFYMPTISMMYLVRFLNGFGYGVVSTATNT | 155 |
| Query: | 121 | IVTAYIPADKRGEGINFYGLSTSLAAAIGPFVGTFMLDNLHINFKMVIVLCSILIAIVVL | 180 |
| | | IVTAYIPA KRGEGINFYGLSTSLAAAIGPFVGTFMLDNLHI+F+M+IVLCS+LI VV+ | |
| Sbjct: | 156 | IVTAYIPARKRGEGINFYGLSTSLAAAIGPFVGTFMLDNLHIDFRMIIVLCSVLIGCVVV | 215 |
| Query: | 181 | GAFVFPVKNITLNPEQLAKSKSWTIDSFIEKKAIFITIIAFLMGISYASVLGFQKLYTTE | 240 |
| | | GAF FPVKN++LN EQLAK+KSWT+DSFIEKKA+FIT IAFLMGI+YASVLGFQKLYT+E | |
| Sbjct: | 216 | GAFAFPVKNMSLNAEQLAKTKSWTVDSFIEKKALFITAIAFLMGIAYASVLGFQKLYTSE | 275 |
| Query: | 241 | INLMTVGAYFFIVYALVITLTRPSMGRLMDAKGDKWVLYPSYLFLTLGLALLGSAMGSVT | 300 |
| | | I+L TVGAYFF+VYAL+IT+TRP+MGRLMDAKGDKWVLYPSYLFL +GL LLGS + | |
| Sbjct: | 276 | IHLTTVGAYFFVVYALIITITRPAMGRLMDAKGDKWVLYPSYLFLAMGLFLLGSVSSGGS | 335 |
| Query: | 301 | YLLSGALIGFGYGTFMSCGQAASIKGVEEHRFNTAMSTYMIGLDLGLGAGPYILGLVKDG | 360 |
| | | YLLSGALIGFGYGTEMSCGQAASI+GV+EHRFNTAMSTYMIGLDLGLGAGPY+LGL+KD | |
| Sbjct: | 336 | YLLSGALIGFGYGTFMSCGQAASIQGVDEHRFNTAMSTYMIGLDLGLGAGPYLLGLIKDL | 395 |
| Query: | 361 | FLGAGVQSFRELFWIAAIIPVVCGILYFLKS-SRQV | 395 |
| | | LG+GV SFR LFW+AA+IP++C +LY LK+ +RQV | |
| Sbjct: | 396 | ALGSGVASFRHLFWLAAVIPLICTLLYLLKTKTRQV | 431 |

[8913] A related GBS gene <SEQ ID 8863> and protein <SEQ ID 8864> were also identified. Analysis of this protein sequence reveals the following:

| Lipop: Possible site: −1 Crend: 8 | | | |
|---|---|---|---|
| McG: Discrim Score: 8.26 | | | |
| GvH: Signal Score (−7.5): −5.21 | | | |
| Possible site: 46 | | | |
| >>> Seems to have an uncleavable N-term signal seq | | | |
| ALOM program | count: 7 | value: −14.33 | threshold: 0.0 |

| | | | |
|---|---|---|---|
| INTEGRAL | Likelihood = −14.33 | Transmembrane | 167-183 (159-193) |
| INTEGRAL | Likelihood = −7.96 | Transmembrane | 18-34 (10-37) |
| INTEGRAL | Likelihood = −7.75 | Transmembrane | 373-389 (369-392) |
| INTEGRAL | Likelihood = −5.68 | Transmembrane | 214-230 (212-234) |
| INTEGRAL | Likelihood = −4.78 | Transmembrane | 243-259 (241-262) |
| INTEGRAL | Likelihood = −2.71 | Transmembrane | 48-64 (47-65) |
| INTEGRAL | Likelihood = −2.60 | Transmembrane | 283-299 (283-300) |

| | | |
|---|---|---|
| PERIPHERAL | Likelihood = 0.69 | 341 |

modified ALOM score: 3.37
*** Reasoning Step: 3
----- Final Results -----
bacterial membrane --- Certainty = 0.6731 (Affirmative) < succ>
bacterial outside --- Certainty = 0.0000 (Not Clear) < succ>
bacterial cytoplasm --- Certainty = 0.0000 (Not Clear) < succ>

[8914] The protein has homology with the following sequences in the databases:

[chemical structure]

[8915] Based on this analysis, it was predicted that these proteins and their epitopes could be useful antigens for vaccines or diagnostics.

### EXAMPLE 1620

[8916] A DNA sequence (GBSx1715) was identified in S. agalactiae <SEQ ID 5001> which encodes the amino acid sequence <SEQ ID 5002>. Analysis of this protein sequence reveals the following:

Possible site: 46
>>> Seems to have no N-terminal signal sequence
----- Final Results -----
bacterial cytoplasm --- Certainty = 0.0151 (Affirmative) < succ>
bacterial membrane --- Certainty = 0.0000 (Not Clear) < succ>
bacterial outside --- Certainty = 0.0000 (Not Clear) < succ>

[8917] The protein has homology with the following sequences in the GENPEPT database.

| >GP: BAB06903 GB: AP001518 unknown conserved protein [Bacillus halodurans] | | | |
|---|---|---|---|
| Identities = 52/143 (36%), Positives = 84/143 (58%) | | | |
| Query: | 5 | YERILIAIDGSYESELAVEKGINVALRNDAELLLTHVIDAHAYQSEGVFSDYVFDRQEQE | 64 |
| | | Y IL+A+DGS +++ A+ K N A A+L + HVID+ ++ + + V E + | |
| Sbjct: | 2 | YNHILVAVDGSTQAKRALYKAFNYAKEFKADLFICHVIDSRSFATVEQYDRTVVGAAELD | 61 |
| Query: | 65 | SADVLAYFEKLAHSKGLTKIKKITEIGNPKTLLAKDIPIREKADLIMVGATGLNTFERLL | 124 |
| | | +L + + A G+ K+ I + G+PK ++K I + DLI+ GATGLN ER L | |
| Sbjct: | 62 | GKKLLQRYSEEAEKAGVDKVHTILDFGSPKANISKTIAQKYDIDLIITGATGLNAVERFL | 121 |
| Query: | 125 | IGSTSEYILRHSKVDMLVVRDSK | 147 |
| | | +GS SE + RH+K D+L+VR+ + | |
| Sbjct: | 122 | MGSVSESVARHAKCDVLIVRNDQ | 144 |

[8918] There is also homology to SEQ ID 3658:

| Identities = 105/150 (70%), Positives = 121/150 (80%) | | | |
|---|---|---|---|
| Query: | 1 | MTQKYERILIAIDGSYESELAVEKGINVALRNDAELLLTHVIDAHAYQSEGVFSDYVFDR | 60 |
| | | M+ KY+RIL+AIDGSYESELA KG+NVALRNDA LLL HVID A QS F Y++++ | |
| Sbjct: | 31 | MSLKYKRILVAIDGSYESELAFNKGVNVALRNDATLLLVHVIDTRALQSVATFDTYIYEK | 90 |
| Query: | 61 | QEQESADVLAYFEKLAHSKGLTKIKKITEIGNPKTLLAKDIPIREKADLIMVGATGLNTF | 120 |
| | | EQE+ DVL FEK A G+T IK+I E GNPK LLA DIP RE ADLIMVGATGLNTF | |
| Sbjct: | 91 | LEQEAKDVLDDFEKQAQIAGITNIKQIIEFGNPKNLLAHDIPDRENADLIMVGATGLNTF | 150 |
| Query: | 121 | ERLLIGSTSEYILRHSKVDMLVVRDSKKTL | 150 |
| | | ERLLIGS+SEYI+RH+K+D+LVVRDS KTL | |
| Sbjct: | 151 | ERLLIGSSSEYIMRHAKIDLLVVRDSTKTL | 180 |

[8919] Based on this analysis, it was predicted that this protein and its epitopes, could be useful antigens for vaccines or diagnostics.

### EXAMPLE 1621

[8920] A DNA sequence (GBSx1716) was identified in S. agalactiae <SEQ ID 5003> which encodes the amino acid sequence <SEQ ID 5004>. This protein is predicted to be glycerol uptake facilitator protein (glpF). Analysis of this protein sequence reveals the following:

| Possible site: 29 | | | |
|---|---|---|---|
| >>> Seems to have an uncleavable N-term signal seq | | | |
| INTEGRAL | Likelihood = −8.65 | Transmembrane | 261-277 (257-281) |
| INTEGRAL | Likelihood = −5.73 | Transmembrane | 201-217 (199-222) |
| INTEGRAL | Likelihood = −4.51 | Transmembrane | 92-108 (91-110) |
| INTEGRAL | Likelihood = −4.30 | Transmembrane | 44-60 (42-62) |
| INTEGRAL | Likelihood = −2.18 | Transmembrane | 15-31 (11-31) |
| INTEGRAL | Likelihood = −1.54 | Transmembrane | 150-166 (149-166) |

----- Final Results -----
bacterial membrane --- Certainty = 0.4461 (Affirmative) < succ>
bacterial outside --- Certainty = 0.0000 (Not Clear) < succ>
bacterial cytoplasm --- Certainty = 0.0000 (Not Clear) < succ>

[8921] The protein has homology with the following sequences in the GENPEPT database.

| >GP: AAA25231 GB: M58315 putative [Lactococcus lactis] | | | |
|---|---|---|---|
| Identities = 183/290 (63%), Positives = 228/290 (78%), Gaps = 10/290 (3%) | | | |
| Query: | 2 | IEITWTVKYITEFIATAFLIILGNGAVANVDLKGTKGNNSGWIIIAIGYGLGVMMPALMF | 61 |
| | | +++TWTVKYITEF+ TA LII+GNGAVANV+LKGTK + W+II GYGLGVM+PA+ F | |
| Sbjct: | 1 | MDVTWTVKYITEFVGTALLIIMGNGAVANVELKGTKAHAQSWMIIGWGYGLGVMLPAVAF | 60 |
| Query: | 62 | GNVSGNHINPAFTLGLAFSGLFPWAHVGQYILAQILGAMFGQLVVVMVYQPYFVKTENPN | 121 |
| | | GN++ + INPAFTLGLA SGLFPWAHV QYI+AQ+LGAMFGQL+VMVY+PY++KT+NPN | |
| Sbjct: | 61 | GNIT-SQINPAFTLGLAASGLFPWAHVAQYIIAQVLGAMFGQLLIVMVYRPYYLKTQNPN | 119 |
| Query: | 122 | HVLGSFSTISALDDGQKSSRKAAYINGFLNEFVGSFVLFFGALALTKNYFGVE----LVG | 177 |
| | | +LG+FSTI +DD + +R A INGFLNEF+GSFVLFFGA+A T +FG + + | |
| Sbjct: | 120 | AILGTFSTIDNVDDNSEKTRLGATINGFLNEFLGSFVLFFGAVAATNIFFGSQSITWMTN | 179 |
| Query: | 178 | KLVQAGYDQTTAATRISPYVTGSLA-----VAHLGIGFLVMTLVASLGGPTGPALNPARD | 232 |
| | | L G D +++ +V S A +AHL +GFLVM LV +LGGPTGP LNPARD | |
| Sbjct: | 180 | YLKGQGADVSSSDVMNQIWVQASGASASKMIAHLFLGFLVMGLVVALGGPTGPGLNPARD | 239 |
| Query: | 233 | LGPRIVHRLLPKQILGQAKEDSKWWYAWVPVLAPIVASILAVALFKLLYL | 282 |
| | | GPR+VH LLPK +LG+AK SKWWYAWVPVLAPI+AS+ AVALFK++YL | |
| Sbjct: | 240 | FGPRLVHSLLPKSVLGEAKGSSKWWYAWVPVLAPILASLAAVALFKMIYL | 289 |

[8922] A related DNA sequence was identified in S. pyogenes <SEQ ID 5005> which encodes the amino acid sequence <SEQ ID 5006>. Analysis of this protein sequence reveals the following:

| Possible site: 16 | | | |
|---|---|---|---|
| >>> Seems to have an uncleavable N-term signal seq | | | |
| INTEGRAL | Likelihood = −9.18 | Transmembrane | 293-309 (288-314) |
| INTEGRAL | Likelihood = −7.43 | Transmembrane | 2-18 (1-20) |
| INTEGRAL | Likelihood = −7.38 | Transmembrane | 233-249 (228-256) |
| INTEGRAL | Likelihood = −5.57 | Transmembrane | 124-140 (123-142) |
| INTEGRAL | Likelihood = −2.87 | Transmembrane | 76-92 (75-93) |
| INTEGRAL | Likelihood = −2.18 | Transmembrane | 47-63 (43-63) |
| INTEGRAL | Likelihood = −1.54 | Transmembrane | 182-198 (181-198) |

----- Final Results -----
bacterial membrane --- Certainty = 0.4673 (Affirmative) < succ>
bacterial outside --- Certainty = 0.0000 (Not Clear) < succ>
bacterial cytoplasm --- Certainty = 0.0000 (Not Clear) < succ>

[8923] The protein has homology with the following sequences in the databases:

| >GP: AAA25231 GB: M58315 putative [Lactococcus lactis] | | | |
|---|---|---|---|
| Identities = 176/290 (60%), Positives = 228/290 (77%), Gaps = 10/290 (3%) | | | |
| Query: | 34 | MEMTWTVKYITEFIATAFLIILGNGAVANVDLKGTKGHNSGWLVIAFGYGLGVMMPALMF | 93 |
| | | M++TWTVKYITEF+ TA LII+GNGAVANV+LKGTK H W++I +GYGLGVM+PA+ F | |
| Sbjct: | 1 | MDVTWTVKYITEFVGTALLIIMGNGAVANVELKGTKAHAQSWMIIGWGYGLGVMLPAVAF | 60 |
| Query: | 94 | GNVSGNHINPAFTVGLAVSGLFPWAHVLQYVVAQLLGAIFGQLVVVMVYKPYFMKTENPN | 153 |
| | | GN++ + INPAFT+GLA SGLFPWAHV QY++AQ+LGA+FGQL++VMVY+PY++KT+NPN | |
| Sbjct: | 61 | GNIT-SQINPAFTLGLAASGLFPWAHVAQYIIAQVLGAMFGQLLIVMVYRPYYLKTQNPN | 119 |
| Query: | 154 | HVLGSFSTISSLDNGQKDSHKASYINGFLNEFVGSFVLFFGALALTKNYFGVELVGKLIE | 213 |
| | | +LG+FSTI ++D+ + + + INGFLNEF+GSFVLFFGA+A T +FG + + + | |
| Sbjct: | 120 | AILGTFSTIDNVDDNSEKTRLGATINGFLNEFLGSFVLFFGAVAATNIFFGSQSITWMTN | 179 |
| Query: | 214 | ------AGYDQTTAATQISPYVTGSLA---VAHIGIGFLVMVLVTSLGGPTGPALNPARD | 264 |
| | | A + QI +G+ A +AH+ +GFLVM LV +LGGPTGP LNPARD | |
| Sbjct: | 180 | YLKGQGADVSSSDVMNQIWVQASGASASKMIAHLFLGFLVMGLVVALGGPTGPGLNPARD | 239 |
| Query: | 265 | FGPRLLHHFLPKSVLGQAKGDSKWWYAWVPVVAPILAAIVAVAAFKYLYI | 314 |
| | | FGPRL+H LPKSVLG+AKG SKWWYAWVPV+APILA++ AVA FK +Y+ | |
| Sbjct: | 240 | FGPRLVHSLLPKSVLGEAKGSSKWWYAWVPVLAPILASLAAVALFKMIYL | 289 |

[8924] An alignment of the GAS and GBS proteins is shown below.

| Identities = 240/281 (85%), Positives = 267/281 (94%) | | | |
|---|---|---|---|
| Query: | 2 | IEITWTVKYITEFIATAFLIILGNGAVANVDLKGTKGNNSGWIIIAIGYGLGVMMPALMF | 61 |
| | | +E+TWTVKYITEFIATAFLIILGNGAVANVDLKGTKG+NSGW++IA GYGLGVMMPALMF | |
| Sbjct: | 34 | MEMTWTVKYITEFIATAFLIILGNGAVANVDLKGTKGHNSGWLVIAFGYGLGVMMPALMF | 93 |
| Query: | 62 | GNVSGNHINPAFTLGLAFSGLFPWAHVGQYILAQILGAMFGQLVVVMVYQPYFVKTENPN | 121 |
| | | GNVSGNHINPAFT+GLA SGLFPWAHV QY++AQ+LGA+FGQLVVVMVY+PYF+KTENPN | |
| Sbjct: | 94 | GNVSGNHINPAFTVGLAVSGLFPWAHVLQYVVAQLLGAIFGQLVVVMVYKPYFMKTENPN | 153 |
| Query: | 122 | HVLGSFSTISALDDGQKSSRKAAYINGFLNEFVGSFVLFFGALALTKNYFGVELVGKLVQ | 181 |
| | | HVLGSFSTIS+LD+GQK S KA+YINGFLNEFVGSFVLFFGALALTKNYFGVELVGKL++ | |
| Sbjct: | 154 | HVLGSFSTISSLDNGQKDSHKASYINGFLNEFVGSFVLFFGALALTKNYFGVELVGKLIE | 213 |
| Query: | 182 | AGYDQTTAATRISPYVTGSLAVAHLGIGFLVMTLVASLGGPTGPALNPARDLGPRIVHRL | 241 |
| | | AGYDQTTAAT+ISPYVTGSLAVAH+GIGFLVM LV SLGGPTGPALNPARD GPR++H | |
| Sbjct: | 214 | AGYDQTTAATQISPYVTGSLAVAHIGIGFLVMVLVTSLGGPTGPALNPARDFGPRLLHHF | 273 |
| Query: | 242 | LPKQILGQAKEDSKWWYAWVPVLAPIVASILAVALFKLLYL | 282 |
| | | LPK +LGQAK DSKWWYAWVPV+API+A+I+AVA FK LY+ | |
| Sbjct: | 274 | LPKSVLGQAKGDSKWWYAWVPVVAPILAAIVAVAAFKYLYI | 314 |

[8925] A related GBS gene <SEQ ID 8865> and protein <SEQ ID 8866> were also identified. Analysis of this protein sequence reveals the following:

| Lipop: Possible site: −1 Crend: 8 | | | |
|---|---|---|---|
| McG: Discrim Score: 2.81 | | | |
| GvH: Signal Score (−7.5): −3.6 | | | |
| Possible site: 29 | | | |
| >>> Seems to have an uncleavable N-term signal seq | | | |
| ALOM program | count: 6 | value: −8.65 | threshold: 0.0 |

| | | | |
|---|---|---|---|
| INTEGRAL | Likelihood = −8.65 | Transmembrane | 261-277 (257-281) |
| INTEGRAL | Likelihood = −5.73 | Transmembrane | 201-217 (199-222) |
| INTEGRAL | Likelihood = −4.51 | Transmembrane | 92-108 (91-110) |
| INTEGRAL | Likelihood = −4.30 | Transmembrane | 44-60 (42-62) |
| INTEGRAL | Likelihood = −2.18 | Transmembrane | 15-31 (11-31) |
| INTEGRAL | Likelihood = −1.54 | Transmembrane | 150-166 (149-166) |

| | | |
|---|---|---|
| PERIPHERAL | Likelihood = 2.92 | 72 |

modified ALOM score: 2.23
*** Reasoning Step: 3
----- Final Results -----
bacterial membrane --- Certainty = 0.4461 (Affirmative) < succ>
bacterial outside --- Certainty = 0.0000 (Not Clear) < succ>
bacterial cytoplasm --- Certainty = 0.0000 (Not Clear) < succ>

[8926] The protein has homology with the following sequences in the databases:

[chemical structure]

[8927] Based on this analysis, it was predicted that these proteins and their epitopes could be useful antigens for vaccines or diagnostics.

### EXAMPLE 1622

[8928] A DNA sequence (GBSx1717) was identified in S. agalactiae <SEQ ID 5007> which encodes the amino acid sequence <SEQ ID 5008>. Analysis of this protein sequence reveals the following:

| Possible site: 44 | | | |
|---|---|---|---|
| >>> Seems to have an uncleavable N-term signal seq | | | |
| INTEGRAL | Likelihood = −8.70 | Transmembrane | 266-282 (262-290) |
| INTEGRAL | Likelihood = −7.96 | Transmembrane | 25-41 (24-50) |
| INTEGRAL | Likelihood = −6.42 | Transmembrane | 110-126 (105-140) |
| INTEGRAL | Likelihood = −6.26 | Transmembrane | 194-210 (190-215) |
| INTEGRAL | Likelihood = −5.47 | Transmembrane | 290-306 (289-310) |
| INTEGRAL | Likelihood = −4.35 | Transmembrane | 128-144 (127-147) |
| INTEGRAL | Likelihood = −3.29 | Transmembrane | 157-173 (156-174) |
| INTEGRAL | Likelihood = −2.76 | Transmembrane | 221-237 (221-240) |

----- Final Results -----
bacterial membrane --- Certainty = 0.4482 (Affirmative) < succ>
bacterial outside --- Certainty = 0.0000 (Not Clear) < succ>
bacterial cytoplasm --- Certainty = 0.0000 (Not Clear) < succ>

[8929] The protein has no significant homology with any sequences in the GENPEPT database.

[8930] A related sequence was also identified in GAS <SEQ ID 9177> which encodes the amino acid sequence <SEQ ID 9178>. Analysis of this protein sequence reveals the following:

| Possible cleavage site: 21 | | | |
|---|---|---|---|
| >>> Seems to have a cleavable N-term signal seq. | | | |
| INTEGRAL | Likelihood = −10.77 | Transmembrane | 139-155 (133-161) |
| INTEGRAL | Likelihood = −8.28 | Transmembrane | 245-261 (240-269) |
| INTEGRAL | Likelihood = −7.48 | Transmembrane | 269-285 (263-289) |
| INTEGRAL | Likelihood = −7.06 | Transmembrane | 97-113 (83-125) |
| INTEGRAL | Likelihood = −6.10 | Transmembrane | 173-189 (169-194) |
| INTEGRAL | Likelihood = −1.44 | Transmembrane | 200-216 (200-217) |

----- Final Results -----
bacterial membrane --- Certainty = 0.531 (Affirmative) < succ>
bacterial outside --- Certainty = 0.0000 (Not Clear) < succ>
bacterial cytoplasm --- Certainty = 0.0000 (Not Clear) < succ>

[8931] An alignment of the GAS and GBS proteins is shown below.

| Identities = 225/301 (74%), Positives = 263/301 (86%) | | | |
|---|---|---|---|
| Query: | 10 | LTVSLFFCRLDIMNETLLLHGIQLILIIAMIITFYQIVRHIRSQKINPFKRFFTGLWIGF | 69 |
| | | LT +FFC+L MNE L+L IQ +L+ AM+ F+ +V+H++ KINPFKRF+TG WIG | |
| Sbjct: | 1 | LTAKVFFCKLVFMNEMLILRLIQALLVSAMLFIFFMLVKHLKKNKINPFKRFWTGFWIGL | 60 |
| Query: | 70 | VTDALDTLGIGSFATTTTFFKLTKLVEDDRKIPATMTAAHVLPVLLQSLCFIFVVKVEAL | 129 |
| | | +TDALDTLGIGSFATTTT FKLTKLV DDR++P TMT AHVLPVL+QSLCFIFVVKVE L | |
| Sbjct: | 61 | LTDALDTLGIGSFATTTTCFKLTKLVTDDRQLPGTMTVAHVLPVLIQSLCFIFVVKVEVL | 120 |
| Query: | 130 | TLITMAGAAFIGAFVGAKMTKNWHAPTVQRILGTLLITAAIIMLYRMITNPGAGISDSVH | 189 |
| | | TL+ MA AAFIGA+ G +TKNWHAPTVQRILG+LLI AAIIM+ R+I +PG +SD++H | |
| Sbjct: | 121 | TLLAMAAAAFIGAYFGTHITKNWHAPTVQRILGSLLIIAAIIMIIRIIYHPGEHLSDTIH | 180 |
| Query: | 190 | GLHGIWLFVGIGFNFIIGVLMTMGLGNYAPELIFFSLMGLSPAVAMPVMMLDAAMIMTAS | 249 |
| | | GLHGIWLFVGIGFNFI+GVLMTMGLGNYAPELIFFSLMGLSP VAMPVMMLDAAMIMTAS | |
| Sbjct: | 181 | GLHGIWLFVGIGFNFIVGVLMTMGLGNYAPELIFFSLMGLSPTVAMPVMMLDAAMIMTAS | 240 |
| Query: | 250 | STQFIKSGRVNWNGFAGLVTGGILGVIVAVLFLTNLDLNSLKTLVVGIVLFTGAMLIRSSF | 310 |
| | | S+QFIK+ RV+W+GFAG+V+GGI+GV++AV FLTNLD+NSLK LV+ IV FTG MLIRSSF | |
| Sbjct: | 241 | SSQFIKANRVSWDGFAGIVSGGIIGVLLAVFFLTNLDINSLKLLVIAIVFFTGGMLIRSSF | 301 |

[8932] A related GBS gene <SEQ ID 8867> and protein <SEQ ID 8868> were also identified. Analysis of this protein sequence reveals the following:

| Lipop: Possible site: −1 Crend: 8 | | | |
|---|---|---|---|
| McG: Discrim Score: 2.32 | | | |
| GvH: Signal Score (−7.5): −5.59 | | | |
| Possible site: 44 | | | |
| >>> Seems to have an uncleavable N-term signal seq | | | |
| ALOM program | count: 8 | value: −8.70 | threshold: 0.0 |

| | | | |
|---|---|---|---|
| INTEGRAL | Likelihood = −8.70 | Transmembrane | 266-282 (262-290) |
| INTEGRAL | Likelihood = −7.96 | Transmembrane | 25-41 (24-50) |
| INTEGRAL | Likelihood = −6.42 | Transmembrane | 110-126 (105-140) |
| INTEGRAL | Likelihood = −6.26 | Transmembrane | 194-210 (190-215) |
| INTEGRAL | Likelihood = −5.47 | Transmembrane | 290-306 (289-310) |
| INTEGRAL | Likelihood = −4.35 | Transmembrane | 128-144 (127-147) |
| INTEGRAL | Likelihood = −3.29 | Transmembrane | 157-173 (156-174) |
| INTEGRAL | Likelihood = −2.76 | Transmembrane | 221-237 (221-240) |

| | | |
|---|---|---|
| PERIPHERAL | Likelihood = 3.87 | 67 |

modified ALOM score: 2.24
*** Reasoning Step: 3
----- Final Results -----
bacterial membrane --- Certainty = 0.4482 (Affirmative) < succ>
bacterial outside --- Certainty = 0.0000 (Not Clear) < succ>
bacterial cytoplasm --- Certainty = 0.0000 (Not Clear) < succ>

[8933] A related DNA sequence was identified in S. pyogenes <SEQ ID 5009> which encodes amino acid sequence <SEQ ID 5010>:

| Possible site: 33 | | | |
|---|---|---|---|
| >>> Seems to have no N-terminal signal sequence | | | |
| INTEGRAL | Likelihood = −10.77 | Transmembrane | 151-167 (145-173) |
| INTEGRAL | Likelihood = −9.13 | Transmembrane | 22-38 (15-42) |
| INTEGRAL | Likelihood = −8.28 | Transmembrane | 257-273 (252-281) |
| INTEGRAL | Likelihood = −7.48 | Transmembrane | 281-297 (275-301) |
| INTEGRAL | Likelihood = −7.06 | Transmembrane | 109-125 (95-137) |
| INTEGRAL | Likelihood = −6.10 | Transmembrane | 185-201 (181-206) |
| INTEGRAL | Likelihood = −1.44 | Transmembrane | 212-228 (212-229) |
| INTEGRAL | Likelihood = −0.27 | Transmembrane | 5-21 (5-21) |

----- Final Results -----
bacterial membrane --- Certainty = 0.5310 (Affirmative) < succ>
bacterial outside --- Certainty = 0.0000 (Not Clear) < succ>
bacterial cytoplasm --- Certainty = 0.0000 (Not Clear) < succ>

[8934] An alignment of the GAS and GBS sequences follows:

| Score = 405 bits (1029), Expect = e−115 | | | |
|---|---|---|---|
| Identities = 198/301 (65%), Positives = 228/301 (74%) | | | |
| Query: | 1 | LTAKVFFCKLVFMNEMLILRLIQALLVSAMLFIFFMLVKHLKKNKINPFKRFWTGFWIGL | 60 |
| | | LT +FFC+L MNE L+L IQ +L+ AM+ F+ +V+H++ KINPFKRF+TG WIG | |
| Sbjct: | 10 | LTVSLFFCRLDIMNETLLLHGIQLILIIAMIITFYQIVRHIRSQKINPFKRFFTGLWIGF | 69 |
| Query: | 61 | LTDALDTLGIGSFATTTTCFKLTKLVTDDRQLPGTMTVAHVLPVLIQSLCFIFVVKVEVX | 120 |
| | | +TDALDTLGIGSFATTTT FKLTKLV DDR++P TMT AHVLPVL+QSLCFIFVVKVE | |
| Sbjct: | 70 | VTDALDTLGIGSFATTTTFFKLTKLVEDDRKIPATMTAAHVLPVLLQSLCFIFVVKVEAL | 129 |
| Query: | 121 | XXXXXXXXXFIGAYFGTHITKNWHAPTVQRILGSLLXXXXXXXXXXXXYHPGEHLSDTIH | 180 |
| | | FIGA+ G +TKNWHAPTVQRILG+LL +PG +SD++H | |
| Sbjct: | 130 | TLITMAGAAFIGAFVGAMTKNWHAPTVQRILGTLLITAAIIMLYRMITNPGAGISDSVH | 189 |
| Query: | 181 | GLHGIWLFVGIGFNFIVGVLMTMGLGNYAPELIFFSLMGLSPTVAMPVMMLDAAMIMTAS | 240 |
| | | GLHGIWLFVGIGFNFI+GVLMTMGLGNYAPELIFFSLMGLSP VAMPVMMLDAAMIMTAS | |
| Sbjct: | 190 | GLHGIWLFVGIGFNFIIGVLMTMGLGNYAPELIFFSLMGLSPAVAMPVMMLDAAMIMTAS | 249 |
| Query: | 241 | SSQFIKANRVSWDXXXXXXXXXXXXXXXXXFFLTNLDINSLKLLVIAIVFFTGGMLIRSSF | 301 |
| | | S+QFIK+ RV+W+ FLTNLD+NSLK LV+ IV FTG MLIRSSF | |
| Sbjct: | 250 | STQFIKSGRVNWNGFAGLVTGGILGVIVAVLFLTNLDLNSLKTLVVGIVLFTGAMLIRSSF | 310 |

[8935] Based on this analysis, it was predicted that these proteins and their epitopes could be useful antigens for vaccines or diagnostics.

### EXAMPLE 1623

[8936] A DNA sequence (GBSx1718) was identified in S. agalactiae <SEQ ID 5011> which encodes the amino acid sequence <SEQ ID 5012>. This protein is predicted to be C3-degrading proteinase. Analysis of this protein sequence reveals the following:

```
Possible site: 45
>>> Seems to have no N-terminal signal sequence
----- Final Results -----
                            bacterial cytoplasm --- Certainty = 0.2851(Affirmative) < succ>
                              bacterial membrane --- Certainty = 0.0000(Not Clear) < succ>
                                bacterial outside --- Certainty = 0.0000(Not Clear) < succ>
```

[8937] The protein has homology with the following sequences in the GENPEPT database.

| >GP: AAD37110 GB: AF112358 C3-degrading proteinase | | | |
|---|---|---|---|
| [Streptococcus pneumoniae] | | | |
| Identities = 92/240 (38%), Positives = 142/240 (58%), | | | |
| Gaps = 11/240 (4%) | | | |
| Query: | 12 | PVLRVNNRDLNIAFYQESLGFKLISEENAIAVFSAWQNKEASFIIEESPTYRTRAVNGTK | 71 |
| | | P L+ NNR LN FY E+LG K + EE+A E ++EE+P+ RTR V G K | |
| Sbjct: | 11 | PTLKANNRKLNETFYIETLGMKALLEESAFLSLGDQTGLE-KLVLEEAPSMRTRKVEGRK | 69 |
| Query: | 72 | KLAKIIVKSQDAKDIEKLLANGAQAIQVYQGQNGYAYETVSPEGDLFLLHAEDDLSQLVA | 131 |
| | | KLA++IVK ++ +IE +L+ ++Y+GQNGYA+E SPE DL L+HAEDD++ LV | |
| Sbjct: | 70 | KLARLIVKVENPLEIEGILSKTDSIHRLYKGQNGYAFEIFSPEDDLILIHAEDDIASLVE | 129 |
| Query: | 132 | I-ERPELEKKDDTTGLSNFAFQSISLNVPDAVKAEAFYDKVFAGKFPINLSFKEAQGQDL | 190 |
| | | + E+PE + + LS F S+ L++P + E+F + + + +L F AQGQDL | |
| Sbjct: | 130 | VGEKPEFQTDLASISLSKFEI-SMELHLPTDI--ESFLE---SSEIGASLDFIPAQGQDL | 183 |
| Query: | 191 | QIAPNETWDIEILECCVNEDTNLNDLKSTFESLGLDVYLDSKEKILVISDTSNIEIWISK | 250 |
| | | + TWD+ +L+ VNE ++ L+ FES + ++ EK + D +N+E+W + | |
| Sbjct: | 184 | TVDNTVTWDLSMLKFLVNE-LDIASLRQKFES--TEYFIPKSEKFFLGKDRNNVELWFEE | 240 |

[8938] A related DNA sequence was identified in S. pyogenes <SEQ ID 5013> which encodes the amino acid sequence <SEQ ID 5014>. Analysis of this protein sequence reveals the following:

```
Possible site: 42
>>> Seems to have no N-terminal signal sequence
----- Final Results -----
                            bacterial cytoplasm --- Certainty = 0.3267(Affirmative) < succ>
                              bacterial membrane --- Certainty = 0.0000(Not Clear) < succ>
                                bacterial outside --- Certainty = 0.0000(Not Clear) < succ>
```

[8939] An alignment of the GAS and GBS proteins is shown below.

| Identities = 130/250 (52%), Positives = 177/250 (70%) | | | |
|---|---|---|---|
| Query: | 1 | MTLFHSLTFKHPVLRVNNRDLNIAFYQESLGFKLISEENAIAVFSAWQNKEASFIIEESP | 60 |
| | | MTL ++TFK PVLRVN+RDLNIAFYQ +LG +L+SEENAIA+FS+W + F+IEESP | |
| Sbjct: | 1 | MTLMENITFKTPVLRVNDRDLNIAFYQNNLGLRLVSEENAIAIFSSWGEGQECFVIEESP | 60 |
| Query: | 61 | TYRTRAVNGTKKLAKIIVKSQDAKDIEKLLANGAQAIQVYQGQNGYAYETVSPEGDLFLL | 120 |
| | | + RTRAV G KK+ I++K+ K+IE+LLA+GA +++GQNGYA+ET+SPEGD FLL | |
| Sbjct: | 61 | SVRTRAVEGPKKVNTIVIKTNQPKEIEQLLAHGAHYDALFKGQNGYAFETISPEGDRFLL | 120 |
| Query: | 121 | HAEDDLSQLVAIERPELEKKDDTTGLSNFAFQSISLNVPDAVKAEAFYDKVFAGKFPINL | 180 |
| | | HAE D+ L + P LEK GL+ F F I LNV +++AFY +F+ + PI + | |
| Sbjct: | 121 | HAEQDIKHLQGTDLPSLEKDATFKGLTQFKFDIIVLNVISEERSKAFYRDLFSDQLPITM | 180 |
| Query: | 181 | SFKEAQGQDLQIAPNETWDIEILECCVNEDTNLNDLKSTFESLGLDVYLDSKEKILVISD | 240 |
| | | F + +G DL I P+ WD+EILE V++D ++ LK+T E G VY+D K K+LV+SD | |
| Sbjct: | 181 | DFIQEEGPDLAIDPHIAWDLEILEFQVSKDYDMKVLKATLEEDGHKVYIDKKHKVLVLSD | 240 |
| Query: | 241 | TSNIEIWISK | 250 |
| | | S IE+W +K | |
| Sbjct: | 241 | PSQIEVWFTK | 250 |

[8940] Based on this analysis, it was predicted that these proteins and their epitopes could be useful antigens for vaccines or diagnostics.

### EXAMPLE 1624

[8941] A DNA sequence (GBSx1719) was identified in S. agalactiae <SEQ ID 5015> which encodes the amino acid sequence <SEQ ID 5016>. Analysis of this protein sequence reveals the following:

```
Possible site: 31
>>> Seems to have no N-terminal signal sequence
----- Final Results -----
                            bacterial cytoplasm --- Certainty = 0.2510(Affirmative) < succ>
                              bacterial membrane --- Certainty = 0.0000(Not Clear) < succ>
                                bacterial outside --- Certainty = 0.0000(Not Clear) < suec>
```

[8942] The protein has homology with the following sequences in the GENPEPT database.

| >GP: CAC16441 GB: AL450165 putative esterase [Streptomyces coelicolor] | | | |
|---|---|---|---|
| Identities = 89/323 (27%), Positives = 143/323 (43%), | | | |
| Gaps = 51/323 (15%) | | | |
| Query: | 10 | NTVLELIKEQIKDNLYHGASLAIY-ENGEWHEHYLGT-------IDGNEKVKAGLVYDLA | 61 |
| | | +T+ EL+ E + + GA+ ++ G + GT +DG++ V+DLA | |
| Sbjct: | 2 | STLAELLAEGREQRICSGAAWSVGGPQGPLDRGWTGTRCWDGPPLDGDD------VWDLA | 55 |
| Query: | 62 | SVSKVVGVGTLLAKLVYQGTIDIDKPLRYYYPTFH---HQTLTVRQLATHSSCIDPFIP- | 117 |
| | | SV+K + G ++ LV +G + +D + Y P + LTVRQL H+SGI +P | |
| Sbjct: | 56 | SVTKPIA-GLVVMALVERGALGLDDTVGGYLPDYRGGDKAELTVRQLLAHTSGIPGQVPL | 114 |
| Query: | 118 | NRDQLNATQLKDAINHIKVLEDKSFK--YTDINFLLLGFMLEEVLGDSLDKLFKRYIFTP | 175 |
| | | RD L +A+ + + + Y+ F++LG + E G+ L+ L +R + P | |
| Sbjct: | 115 | YRDHPTRAALLEAVRLLPLTAQPGTRVQYSSQGFIVLGLIAEAAAGEPLEALVERLVCAP | 174 |
| Query: | 176 | FQMKETSFGPRVEAVPTVVGIND---------GIVHDPKAKVLGKHTGSAGLFSTIDDLQ | 226 |
| | | +++T F P V D G VHD A VLG G AGLFST+ D++ | |
| Sbjct: | 175 | LGLRDTVFRPDAGRRARAVATEDCPWRGRRVVGEVHDENAVVLGGVGGHAGLFSTLADME | 234 |
| Query: | 227 | RFSIHYL--------KDDFA-KPLWNNYSLSKSRSLAWD------------IDKDWINHT | 265 |
| | | R + FA + L+ R+LAW + HT | |
| Sbjct: | 235 | RLGAALAAGGRGLLRPETFALMTAAHTDGLALRRALAWQGRDPVGSPAGEVFGPESYGHT | 294 |
| Query: | 266 | GYTGPFIALNYQKQAAAIFLTNR | 288 |
| | | G+TG + ++ + A+ LTNR | |
| Sbjct: | 295 | GFTGTSLWVDPATRRYAVLLTNR | 317 |

[8943] A related DNA sequence was identified in S. pyogenes <SEQ ID 3885> which encodes the amino acid sequence <SEQ ID 3886>. Analysis of this protein sequence reveals the following:

| Possible site: 28 | | | | |
|---|---|---|---|---|
| >>> Seems to have no N-terminal signal sequence | | | | |
| | INTEGRAL | Likelihood = −1.33 | Transmembrane | 57-73 (57-74) |

```
----- Final Results -----
                              bacterial membrane --- Certainty = 0.1532(Affirmative) < succ>
                                bacterial outside --- Certainty = 0.0000(Not Clear) < succ>
                            bacterial cytoplasm --- Certainty = 0.0000(Not Clear) < succ>
```

[8944] An alignment of the GAS and GBS proteins is shown below.

| Identities = 174/302 (57%), Positives = 229/302 (75%), | | | |
|---|---|---|---|
| Gaps = 1/302 (0%) | | | |
| Query: | 9 | TNTVLELIKEQIKDNLYHGASLAIYENGEWHEHYLGTIDGNEKVKAGLVYDLASVSKVVG | 68 |
| | | T V++ I+ + +Y GASLA++++G W E+++GTIDG V A LVYDLASVSKVVG | |
| Sbjct: | 6 | TLAVIKCIENHLHKKVYKGASLALFQSGRWQEYHIGTIDGRRPVDANLVYDLASVSKVVG | 65 |
| Query: | 69 | VGTLLAKLVYQGTIDIDKPLRYYYPTFHHQTLTVRQLATHSSGIDPFIPNRDQLNATQLK | 128 |
| | | V T+ L+ GT+ +D PL+ YYP+ T+T+RQL TH+SG+DP+IPNRD LNA QL+ | |
| Sbjct: | 66 | VATICNILLNNGTLALDDPLKVYYPSIADATVTIRQLLTHTSGLDPYIPNRDVLNAQQLR | 125 |
| Query: | 129 | DAINHIKVLEDKSFKYTDINFLLLGFMLEEVLGDSLDKLFKRYIFTPFQMKETSFGPRVE | 188 |
| | | A+NH+ E+K+F YTD+NFLLLGFMLEE+ +SLD++F + IFTPF M TSFGPR E | |
| Sbjct: | 126 | KALNHLTQKENKNFYYTDVNFLLLGFMLEELFSESLDQIFDKTIFTPFGMYHTSFGPRPE | 185 |
| Query: | 189 | AVPTVVGINDGIVHDPKAKVLGKHTGSAGLFSTIDDLQRFSIHYLKDDFAKPLWNNYSLS | 248 |
| | | AVPT+ G++DG VHDPKAK+L KH+GSAGLFST+ DL+ FS HYL D F+ LW NYS | |
| Sbjct: | 186 | AVPTLKGVSDGEVHDPKAKILKKHSGSAGLFSTLADLESFSNHYLNDPFSDCLWRNYSQQ | 245 |
| Query: | 249 | K-SRSLAWDIDKDWINHTGYTGPFIALNYQKQAAAIFLTNRTFSYDDRPLWIKKRRHVQE | 307 |
| | | RSL W++D DWI+HTGYTGPF+ LN ++Q AAIFLTNRT+ DD+ W+K+R+ + | |
| Sbjct: | 246 | TIERSLGWNLDGDWISHTGYTGPFLMLNKKEQTAAIFLTNRTYDEDDKSKWLKERQLLYN | 305 |
| Query: | 308 | AI | 309 |
| | | A+ | |
| Sbjct: | 306 | AL | 307 |

[8945] Based on this analysis, it was predicted that these proteins and their epitopes could be useful antigens for vaccines or diagnostics.

### EXAMPLE 1625

[8946] A DNA sequence (GBSx1720) was identified in S. agalactiae <SEQ ID 5017> which encodes the amino acid sequence <SEQ ID 5018>. Analysis of this protein sequence reveals the following:

```
Possible site: 31
>>> Seems to have no N-terminal signal sequence
----- Final Results -----
                            bacterial cytoplasm --- Certainty = 0.0935(Affirmative) < succ>
                              bacterial membrane --- Certainty = 0.0000(Not Clear) < succ>
                                bacterial outside --- Certainty = 0.0000(Not Clear) < succ>
```

[8947] The protein has homology with the following sequences in the GENPEPT database.

| >GP: BAA25177 GB: D21804 FMN-binding protein [Desulfovibrio vulgaris] | | | |
|---|---|---|---|
| Identities = 53/124 (42%), Positives = 76/124 (60%), Gaps = 2/124 (1%) | | | |
| Query: | 1 | MLNHKFLQVLKYEGVVSITSWIELAPHVTNTWNSYLTITDDQRILAPAAGMTHLENDLNN | 60 |
| | | ML F +VLK EGVV+I + E PH+ NTWNSYL + D RI+ P GM E ++ | |
| Sbjct: | 1 | MLPGTFFEVLKNEGVVAIATQGEDGPHLVNTWNSYLKVLDGNRIVVPVGGMHKTEANVAR | 60 |
| Query: | 61 | NSKIIMTLGSREVEGRDGYQGTGFRIEGTAKLLEAGSDFEIVKEKYPFLRKVLEVTPINV | 120 |
| | | + +++MTLGSR+V GR+G GTGF I G+A G +FE + ++ + R L +T ++ | |
| Sbjct: | 61 | DERVLMTLGSRKVAGRNG-PGTGFLIRGSAAFRTDGPEFEAI-ARFKWARAALVITVVSA | 118 |
| Query: | 121 | IQLL | 124 |
| | | Q L | |
| Sbjct: | 119 | EQTL | 122 |

[8948] No corresponding DNA sequence was identified in S. pyogenes.

[8949] Based on this analysis, it was predicted that this protein and its epitopes, could be useful antigens for vaccines or diagnostics.

### EXAMPLE 1626

[8950] A DNA sequence (GBSx1721) was identified in S. agalactiae <SEQ ID 5019> which encodes the amino acid sequence <SEQ ID 5020>. Analysis of this protein sequence reveals the following:

```
Possible site: 30
>>> Seems to have no N-terminal signal sequence
----- Final Results -----
                            bacterial cytoplasm --- Certainty = 0.3799(Affirmative) < succ>
                              bacterial membrane --- Certainty = 0.0000(Not Clear) < succ>
                                bacterial outside --- Certainty = 0.0000(Not Clear) < succ>
```

[8951] The protein has no significant homology with any sequences in the GENPEPT database.

[8952] No corresponding DNA sequence was identified in S. pyogenes.

[8953] Based on this analysis, it was predicted that this protein and its epitopes, could be useful antigens for vaccines or diagnostics.

### EXAMPLE 1627

[8954] A DNA sequence (GBSx1722) was identified in S. agalactiae <SEQ ID 5021> which encodes the amino acid sequence <SEQ ID 5022>. Analysis of this protein sequence reveals the following:

```
Possible site: 56
>>> Seems to have no N-terminal signal sequence
----- Final Results -----
                            bacterial cytoplasm --- Certainty = 0.3175(Affirmative) < succ>
                              bacterial membrane --- Certainty = 0.0000(Not Clear) < succ>
                                bacterial outside --- Certainty = 0.0000(Not Clear) < succ>
```

[8955] A related GBS nucleic acid sequence <SEQ ID 10123> which encodes amino acid sequence <SEQ ID 10124> was also identified.

[8956] The protein has homology to a pyruvate formate-lyase from S. mutans:

| >GP: BAA09085 GB: D50491 Pyruvate formate-lyase [Streptococcus mutans] | | | |
|---|---|---|---|
| Identities = 709/770 (92%), Positives = 750/770 (97%) | | | |
| Query: | 7 | MATVKTNTDIFEQAWEGFKGVDWKEKASIARFVQANYAPYDGDESFLAGATERSLHIKKV | 66 |
| | | MATVKTNTD+FE+AWEGFKG DWK++ASI+RFVQ NY PYDG ESFLAG TERSLHIKKV | |
| Sbjct: | 1 | MATVKTNTDVFEKAWEGFKGTDWKDRASISRFVQDNYTPYDGGESFLAGPTERSLHIKKV | 60 |
| Query: | 67 | IEETKAHYEETRFPMDTRVASISELPAGFIDKDNELIFGIQNDELFKLNFMPKGGIRMAE | 126 |
| | | +EETKAHYEETRFPMDTR+ SI+++PAG+IDK+NELIFGIQNDELFKLNFMPKGGIRMAE | |
| Sbjct: | 61 | VEETKAHYEETRFPMDTRITSIADIPAGYIDKENELIFGIQNDELFKLNFMPKGGIRMAE | 120 |
| Query: | 127 | TTLKENGYEPDPAVHEIFTKYATTVNDGIFRAYTSNIRRARHAHTVTGLPDAYSRGRIIG | 186 |
| | | T LKE+GYEPDPAVHEIFTKYATTVNDGIFRAYTSNIRRARHAHTVTGLPDAYSRGRIIG | |
| Sbjct: | 121 | TALKEHGYEPDPAVHEIFTKYATTVNDGIFRAYTSNIRRARHAHTVTGLPDAYSRGRIIG | 180 |
| Query: | 187 | VYARLAVYGADYLMQEKVNDWNALNDIDEESIRLREEINLQYQALGEVVKLGDLYGVDVR | 246 |
| | | VYARLA+YGADYLMQEKVNDWN++ +IDEESIRLREEINLQYQALGEVV+LGDLYG+DVR | |
| Sbjct: | 181 | VYARLALYGADYLMQEKVNDWNSIAEIDEESIRLREEINLQYQALGEVVRLGDLYGLDVR | 240 |
| Query: | 247 | KPAMNTKEAIQWVNIAFMAVCRVINGAATSLGRVPIVLDIFAERDLARGTFTESEIQEFV | 306 |
| | | KPAMN KEAIQW+NIAFMAVCRVINGAATSLGRVPIVLDIFAERDLARGTFTESEIQEFV | |
| Sbjct: | 241 | KPAMNVKEAIQWINIAFMAVCRVINGAATSLGRVPIVLDIFAERDLARGTFTESEIQEFV | 300 |
| Query: | 307 | DDFVLKLRTVKFARTKAYDALYSGDPTFITTSMAGMGADGRHRVTKMDYRFLNTLDNIGN | 366 |
| | | DDFV+KLRTVKFARTKAYD LYSGDPTFITTSMAGMGADGRHRVTKMDYRFLNTLDNIGN | |
| Sbjct: | 301 | DDFVMKLRTVKFARTKAYDELYSGDPTFITTSMAGMGADGRHRVTKMDYRFLNTLDNIGN | 360 |
| Query: | 367 | SPEPNLTVLWSDQLPYAFRRYCMSMSHKHSSIQYEGVSTMAKEGYGEMSCISCCVSPLDP | 426 |
| | | +PEPNLTVLWS +LPY+FR YCMSMSHKHSSIQYEGV+TMAKEGYGEMSCISCCVSPLDP | |
| Sbjct: | 361 | APEPNLTVLWSSKLPYSFRHYCMSMSHKHSSIQYEGVTTMAKEGYGEMSCISCCVSPLDP | 420 |
| Query: | 427 | ENEDKRHNLQYFGARVNVMKALLTGLNGGYDDVHKDYKVFDIDPIRDEVLNFDTVKANFE | 486 |
| | | ENED+RHNLQYFGARVNV+KALLTGLNGGYDDVHKDYKVFD++PIRDEVL+F+TVKANFE | |
| Sbjct: | 421 | ENEDRRHNLQYFGARVNVLKALLTGLNGGYDDVHKDYKVFDVEPIRDEVLDFETVKANFE | 480 |
| Query: | 487 | KSLDWLTDTYVDAMNIIHYMTDKYNYEAVQMAFLPSHVRANMGFGICGFANTVDSLSAIK | 546 |
| | | K+LDWLTDTYVDAMNIIHYMTDKYNYEAVQMAFLP+ V+ANMGFGICGF+NTVDSLSAIK | |
| Sbjct: | 481 | KALDWLTDTYVDAMNIIHYMTDKYNYEAVQMAFLPTRVKANMGFGICGFSNTVDSLSAIK | 540 |
| Query: | 547 | YATVKPIRDEDGYIYDYETVGDFPRYGEDDDRVDSIAEWLLEAFHGRLAKHKLYKDAEAT | 606 |
| | | YATVKPIRDEDGYIYDYETVG+FPRYGEDDDRVDSIAEWLLEAFH RLA+HKLYKD+EAT | |
| Sbjct: | 541 | YATVKPIRDEDGYIYDYETVGNFPRYGEDDDRVDSIAEWLLEAFHTRLARHKLYKDSEAT | 600 |
| Query: | 607 | VSLLTITSNVAYSKQTGNSPVHKGVYLNEDGSVNLSKVEFFSPGANPSNKAKGGWLQNLN | 666 |
| | | VSLLTITSNVAYSKQTGNSPVHKGVYLNEDGSVNLSKVEFFSPGANPSNKA GGWLQNLN | |
| Sbjct: | 601 | VSLLTITSNVAYSKQTGNSPVHKGVYLNEDGSVNLSKVEFFSPGANPSNKASGGWLQNLN | 660 |
| Query: | 667 | SLSKLDFAHANDGISLTTQVSPRALGKTFDEQVDNLVTVLDGYFENGGQHVNLNVMDLKD | 726 |
| | | SL KLDFAHANDGISLTTQVSP+ALGKTFDEQV NLVT+LDGYFE GGQHVNLNVMDLKD | |
| Sbjct: | 661 | SLKKLDFAHANDGISLTTQVSPKALGKTFDEQVANLVTILDGYFEGGGQHVNLNVMDLKD | 720 |
| Query: | 727 | VYDKIMNGEDVIVRISGYCVNTKYLTPEQKTELTQRVFHEVLSMDDALTN | 776 |
| | | VYDKIMNGEDVIVRISGYCVNTKYLT EQKTELTQRVFHEVLSMDDA T+ | |
| Sbjct: | 721 | VYDKIMNGEDVIVRISGYCVNTKYLTKEQKTELTQRVFHEVLSMDDAATD | 770 |

[8957] A related DNA sequence was identified in S. pyogenes <SEQ ID 5023> which encodes the amino acid sequence <SEQ ID 5024>. Analysis of this protein sequence reveals the following:

```
Possible site: 59
>>> Seems to have no N-terminal signal sequence
----- Final Results -----
                            bacterial cytoplasm --- Certainty = 0.3184(Affirmative) < succ>
                              bacterial membrane --- Certainty = 0.0000(Not Clear) < succ>
                                bacterial outside --- Certainty = 0.0000(Not Clear) < succ>
```

[8958] An alignment of the GAS and GBS proteins is shown below.

| Identities = 701/773 (90%), Positives = 742/773 (95%), | | | |
|---|---|---|---|
| Gaps = 1/773 (0%) | | | |
| Query: | 2 | FKEKTMATVKTNTDIFEQAWEGFKGVDWKEKASIARFVQANYAPYDGDESFLAGATERSL | 61 |
| | | FKEK MATVKTNTD+FE+AWEGFKG DWKEKAS++RFVQANY PYDGDESFLAGATERSL | |
| Sbjct: | 5 | FKEKFMATVKTNTDVFEKAWEGFKGTDWKEKASVSRFVQANYTPYDGDESFLAGATERSL | 64 |
| Query: | 62 | HIKKVIEETKAHYEETRFPMDTRVASISELPAGFIDKDNELIFGIQNDELFKLNFMPKGG | 121 |
| | | HIKKVIEETKAHYE TRFP DTR SI+++PAGFIDK+NELI+GIQNDELFKLNFMPKGG | |
| Sbjct: | 65 | HIKKVIEETKAHYEATRFPYDTRPTSIADIPAGFIDKENELIYGIQNDELFKLNFMPKGG | 124 |
| Query: | 122 | IRMAETTLKENGYEPDPAVHEIFTKYATTVNDGIFRAYTSNIRRARHAHTVTGLPDAYSR | 181 |
| | | IRMAETTLKENGYEPDPAVHEIFTKY TTVNDGIFRAYTSNIRRARHAHTVTGLPDAYSR | |
| Sbjct: | 125 | IRMAETTLKENGYEPDPAVHEIFTKYVTTVNDGIFRAYTSNIRRARHAHTVTGLPDAYSR | 184 |
| Query: | 182 | GRIIGVYARLAVYGADYLMQEKVNDWNALNDIDEESIRLREEINLQYQALGEVVKLGDLY | 241 |
| | | GRIIGVYARLA+YGADYLMQEKVNDWNA+ +IDEESIRLREE+NLQYQALGEVVKLGDLY | |
| Sbjct: | 185 | GRIIGVYARLALYGADYLMQEKVNDWNAITEIDEESIRLREEVNLQYQALGEVVKLGDLY | 244 |
| Query: | 242 | GVDVRKPAMNTKEAIQWVNIAFMAVCRVINGAATSLGRVPIVLDIFAERDLARGTFTESE | 301 |
| | | GVDVR+PA N KEAIQWVNIAFMAVCRVINGAATSLGRVPIVLDIFAERDLARGTFTESE | |
| Sbjct: | 245 | GVDVRRPAQNVKEAIQWVNIAFMAVCRVINGAATSLGRVPIVLDIFAERDLARGTFTESE | 304 |
| Query: | 302 | IQEFVDDFVLKLRTVKFARTKAYDALYSGDPTFITTSMAGMGADGRHRVTKMDYRFLNTL | 361 |
| | | IQEFVDDFVLKLRTVKF RTKAYDALYSGDPTFITTSMAGMG DGRHRVTKMDYRFLNTL | |
| Sbjct: | 305 | IQEFVDDFVLKLRTVKFGRTKAYDALYSGDPTFITTSMAGMGNDGRHRVTKMDYRFLNTL | 364 |
| Query: | 362 | DNIGNSPEPNLTVLWSDQLPYAFRRYCMSMSHKHSSIQYEGVSTMAKEGYGEMSCISCCV | 421 |
| | | DNIGNSPEPNLTVLW+DQLP FRRYCM MSHKHSSIQYEGV+TMAKEGYGEMSCISCCV | |
| Sbjct: | 365 | DNIGNSPEPNLTVLWTDQLPETFRRYCMKMSHKHSSIQYEGVTTMAKEGYGEMSCISCCV | 424 |
| Query: | 422 | SPLDPENEDKRHNLQYFGARVNVMKALLTGLNGGYDDVHKDYKVFD-IDPIRDEVLNFDT | 480 |
| | | SPLDPENE++RHN+QYFGARVNV+KALLTGLNGGYDDVH+DYKVF+ ++PI EVL +D | |
| Sbjct: | 425 | SPLDPENEEQRHNIQYFGARVNVLKALLTGLNGGYDDVHRDYKVFNVVEPITSEVLEYDE | 484 |
| Query: | 481 | VKANFEKSLDWLTDTYVDAMNIIHYMTDKYNYEAVQMAFLPSHVRANMGFGICGFANTVD | 540 |
| | | V ANFEKSLDWLTDTYVDA+NIIHYMTDKYNYEAVQMAFLP+H RANMGFGICGFANTVD | |
| Sbjct: | 485 | VMANFEKSLDWLTDTYVDALNIIHYMTDKYNYEAVQMAFLPTHQRANMGFGICGFANTVD | 544 |
| Query: | 541 | SLSAIKYATVKPIRDEDGYIYDYETVGDFPRYGEDDDRVDSIAEWLLEAFHGRLAKHKLY | 600 |
| | | +LSAIKYATVK IRDE+GYIYDYE GDFPRYGEDDDRVD IA+WL+EA+H RLA HKLY | |
| Sbjct: | 545 | TLSAIKYATVKTIRDENGYIYDYEVTGDFPRYGEDDDRVDDIAKWLMEAYHTRLASHKLY | 604 |
| Query: | 601 | KDAEATVSLLTITSNVAYSKQTGNSPVHKGVYLNEDGSVNLSKVEFFSPGANPSNKAKGG | 660 |
| | | K+AEA+VSLLTITSNVAYSKQTGNSPVH+GV+LNEDG+VN S+VEFFSPGANPSNKAKGG | |
| Sbjct: | 605 | KNAEASVSLLTITSNVAYSKQTGNSPVHRGVFLNEDGTVNTSQVEFFSPGANPSNKAKGG | 664 |
| Query: | 661 | WLQNLNSLSKLDFAHANDGISLTTQVSPRALGKTFDEQVDNLVTVLDGYFENGGQHVNLN | 720 |
| | | WLQNLNSL+KL+F+HANDGISLTTQVSPRALGKTFDEQVDNLVTVLDGYFENGGQHVNLN | |
| Sbjct: | 665 | WLQNLNSLAKLEFSHANDGISLTTQVSPRALGKTFDEQVDNLVTVLDGYFENGGQHVNLN | 724 |
| Query: | 721 | VMDLKDVYDKIMNGEDVIVRISGYCVNTKYLTPEQKTELTQRVFHEVLSMDDA | 773 |
| | | VMDL DVYDKIMNGEDVIVRISGYCVNTKYLTPEQKTELTQRVFHEVLSMDDA | |
| Sbjct: | 725 | VMDLNDVYDKIMNGEDVIVRISGYCVNTKYLTPEQKTELTQRVFHEVLSMDDA | 777 |

[8959] Based on this analysis, it was predicted that these proteins and their epitopes could be useful antigens for vaccines or diagnostics.

### EXAMPLE 1628

[8960] A DNA sequence (GBSx1723) was identified in S. agalactiae <SEQ ID 5025> which encodes the amino acid sequence <SEQ ID 5026>. This protein is predicted to be DNA-damage inducible protein P (dinP). Analysis of this protein sequence reveals the following:

```
Possible site: 31
>>> Seems to have an uncleavable N-term signal seq
----- Final Results -----
                              bacterial membrane --- Certainty = 0.0000(Not Clear) < succ>
                                bacterial outside --- Certainty = 0.000(Not Clear) < succ>
                            bacterial cytoplasm --- Certainty = 0.0000(Not Clear) < succ>
```

[8961] A related GBS nucleic acid sequence <SEQ ID 10121> which encodes amino acid sequence <SEQ ID 10122> was also identified.

[8962] The protein has homology with the following sequences in the GENPEPT database.

| >GP: AAF95431 GB: AE004300 DNA-damage-inducible | | | |
|---|---|---|---|
| protein P [Vibrio cholerae] | | | |
| Identities = 136/349 (38%), Positives = 210/349 (59%), Gaps = 14/349 (4%) | | | |
| Query: | 12 | INDTSRKIIHIDMDAFFASVEERDNPSLKGKPVIIGSDPRKTGGRGVVSTCNYEARKFGV | 71 |
| | | + D RKIIH+DMD FFA+VE RDNP+ + + +G ++ RGV+STCNY+ARKFGV | |
| Sbjct: | 1 | MQDRIRKIIHVDMDCFFAAVEMRDNPAYREIALAVGGHEKQ---RGVISTCNYQARKFGV | 57 |
| Query: | 72 | HSAMSSKEAYERCPQAIFISGNYQKYRQVGMEVRDIFKKYTDLVEPMSIDEAYLDVTENK | 131 |
| | | SAM + +A + CPQ + G Y+ V +++ IF++YT L+EP+S+DEAYLDV+E+ | |
| Sbjct: | 58 | RSAMPTAQALKLCPQLHVVPGRMSVYKSVSQQIQTIFQRYTSLIEPLSLDEAYLDVSEST | 117 |
| Query: | 132 | MGIKSAVKLAKMIQYDIWNDVHLTCSAGISYNKFLAKLASDFEKPKGLTLILPDQAQDFL | 191 |
| | | SA +A+ I+ DIW +++LT SAG++ KFLAK+ASD KP GL ++ PD+ Q+ + | |
| Sbjct: | 118 | AYQGSATLIAQAIRRDIWQELNLTASAGVAPIKFLAKVASDLNKPDGLYVVTPDKVQEMV | 177 |
| Query: | 192 | KPLPIEKFHGVGKRSVEKLHALGVYTGEDLLSLSEISLIDMFGRFGYDLYRKARGINASP | 251 |
| | | LP+EK GVGK ++EKLH G+Y G D+ L+ FGR G L++K+ GI+ | |
| Sbjct: | 178 | DSLPLEKIPGVGKVALEKLHQAGLYVGADVRRADYRKLLHQFGRLGASLWKKSHGIDERE | 237 |
| Query: | 252 | VKPDRVRKSIGSEKTYGKLLYNEADIKAEISKNVQRVVASLEKNKKVGKTIV---LKVRY | 308 |
| | | V +R RKS+G E T+ + + + I + + + + + I+ +KV++ | |
| Sbjct: | 238 | VVTERERKSVGVEYTFSQNISTFQECWQVIEQKLYPELDARLSRAHPQRGIIKQGIKVKF | 297 |
| Query: | 309 | ADFETLTKRMTLEEYTQDF--QIIDQVAKAIFDTLEESVFGIRLLGVTV | 355 |
| | | ADF+ T D+ ++++QV + IRLLG++V | |
| Sbjct: | 298 | ADFQQTTIEHVHPALELDYFHELLEQV------LTRQQGREIRLLGLSV | 340 |

[8963] A related DNA sequence was identified in S. pyogenes <SEQ ID 5027> which encodes the amino acid sequence <SEQ ID 5028>. Analysis of this protein sequence reveals the following:

```
Possible site: 27
>>> Seems to have no N-terminal signal sequence
----- Final Results -----
                            bacterial cytoplasm --- Certainty = 0.1921(Affirmative) < succ>
                              bacterial membrane --- Certainty = 0.0000(Not Clear) < succ>
                                bacterial outside --- Certainty = 0.0000(Not Clear) < succ>
```

[8964] An alignment of the GAS and GBS proteins is shown below.

| Identities = 276/363 (76%), Positives = 323/363 (88%) | | | |
|---|---|---|---|
| Query: | 6 | MLIFPLINDTSRKIIHIDMDAFFASVEERDNPSLKGKPVIIGSDPRKTGGRGVVSTCNYE | 65 |
| | | MLIFPLINDTSRKIIHIDMDAFFA+VEERDNP+LKGKPV+IG DPR+TGGRGVVSTCNYE | |
| Sbjct: | 1 | MLIFPLINDTSRKIIHIDMDAFFAAVEERDNPALKGKPVVIGKDPRETGGRGVVSTCNYE | 60 |
| Query: | 66 | ARKFGVHSAMSSKEAYERCPQAIFISGNYQKYRQVGMEVRDIFKKYTDLVEPMSIDEAYL | 125 |
| | | ARK+G+HSAMSSKEAYERCP+AIFISGNY+KYR VG ++R IFK+YTD+VEPMSIDEAYL | |
| Sbjct: | 61 | ARKYGIHSAMSSKEAYERCPKAIFISGNYEKYRTVGDQIRRIFKRYTDVVEPMSIDEAYL | 120 |
| Query: | 126 | DVTENKMGIKSAVKLAKMIQYDIWNDVHLTCSAGISYNKFLAKLASDFEKPKGLTLILPD | 185 |
| | | DVT+NK+GIKSAVK+AK+IQ+DIW +V LTCSAG+SYNKFLAKLASDFEKP GLTL+L + | |
| Sbjct: | 121 | DVTDNKLGIKSAVKIAKLIQHDIWKEVGLTCSAGVSYNKFLAKLASDFEKPHGLTLVLKE | 180 |
| Query: | 186 | QAQDFLKPLPIEKFHGVGKRSVEKLHALGVYTGEDLLSLSEISLIDMFGRFGYDLYRKAR | 245 |
| | | A FL LPIEKFHGVGK+SV+KLH +G+YTG+DLL++ E++LID FGRFG+DLYRKAR | |
| Sbjct: | 181 | DALCFLAKLPIEKFHGVGKKSVKKLHDMGIYTGQDLLAVPEMTLIDHFGRFGFDLYRKAR | 240 |
| Query: | 246 | GINASPVKPDRVRKSIGSEKTYGKLLYNEADIKAEISKNVQRVVASLEKNKKVGKTIVLK | 305 |
| | | GI+ SPVK DR+RKSIGSE+TY KLLY E DIKAEISKNV+RV A L+ +KK+GKTIVLK | |
| Sbjct: | 241 | GISNSPVKYDRIRKSIGSERTYAKLLYQETDIKAEISKNVKRVAALLQDHKKLGKTIVLK | 300 |
| Query: | 306 | VRYADFETLTKRMTLEEYTQDFQIIDQVAKAIFDTLEESVFGIRLLGVTVTTLENEHEAI | 365 |
| | | VRYADF TLTKR+TL E T++ I+QVA IFD+L E+ GIRLLGVT+T LE++ I | |
| Sbjct: | 301 | VRYADFTTLTKRVTLPELTRNAAQIEQVAGDIFDSLSENPAGIRLLGVTMTNLEDKVADI | 360 |
| Query: | 366 | YLD | 368 |
| | | LD | |
| Sbjct: | 361 | SLD | 363 |

[8965] Based on this analysis, it was predicted that these proteins and their epitopes could be useful antigens for vaccines or diagnostics.

### EXAMPLE 1629

[8966] A DNA sequence (GBSx1724) was identified in S. agalactiae <SEQ ID 5029> which encodes the amino acid sequence <SEQ ID 5030>. Analysis of this protein sequence reveals the following:

| Possible site: 41 | | | | |
|---|---|---|---|---|
| >>> Seems to have an uncleavable N-term signal seq | | | | |
| | INTEGRAL | Likelihood = −13.11 | Transmembrane | 70-86 (58-92) |
| | INTEGRAL | Likelihood = −5.20 | Transmembrane | 105-121 (100-123) |
| | INTEGRAL | Likelihood = −4.25 | Transmembrane | 126-142 (123-144) |
| | INTEGRAL | Likelihood = −2.71 | Transmembrane | 18-34 (18-34) |

```
----- Final Results -----
                              bacterial membrane --- Certainty = 0.6243(Affirmative) < succ>
                                bacterial outside --- Certainty = 0.0000(Not Clear) < succ>
                            bacterial cytoplasm --- Certainty = 0.0000(Not Clear) < succ>
```

[8967] The protein has no significant homology with any sequences in the GENPEPT database.

[8968] A related DNA sequence was identified in S. pyogenes <SEQ ID 5031> which encodes the amino acid

| Possible site: 32 | | | | |
|---|---|---|---|---|
| >>> Seems to have an uncleavable N-term signal seq | | | | |
| | INTEGRAL | Likelihood = −13.00 | Transmembrane | 69-85 (62-93) |
| | INTEGRAL | Likelihood = −6.85 | Transmembrane | 16-32 (11-37) |
| | INTEGRAL | Likelihood = −4.30 | Transmembrane | 99-115 (96-121) |
| | INTEGRAL | Likelihood = −3.66 | Transmembrane | 126-142 (121-143) |

```
----- Final Results -----
                              bacterial membrane --- Certainty = 0.6201(Affirmative) < succ>
                                bacterial outside --- Certainty = 0.0000(Not Clear) < succ>
                            bacterial cytoplasm --- Certainty = 0.0000(Not Clear) < succ>
```

[8969] The protein has no significant homology with any sequences in the GENPEPT database.

[8970] An alignment of the GAS and GBS proteins is shown below.

| Identities = 57/155 (36%), Positives = 96/155 (61%), Gaps = 5/155 (3%) | | | |
|---|---|---|---|
| Query: | 1 | MVSYEKVRRSLRTATITIIVLNSLSLVFRLFTGISVQLAKTEI-NKGNTGNLPKEHIEAV | 59 |
| | | M+SYEKVR++L+T+TI II+LN L +V L + ++++ N+ L E + + | |
| Sbjct: | 1 | MISYEKVRQALKTSTIAIIILNGLGVVLSLMGFAGIFYLQSQLKNEAFRAQLTTEQLAQL | 60 |
| Query: | 60 | LSATTPFMLFVTALIVLVNIAIVIFCIKNLRAIKRNQTVNYLPYYLGFAITVGLVILGFL | 119 |
| | | S+ TPFM+F++ L VL IAI++FC +NL +K+ TV+Y+PY LG ++V ++ F | |
| Sbjct: | 61 | QSSMTPFMIFLSVLNVLAIIAIIVFCAQNLSKLKQGLTVSYIPYILGLILSVIGLVNQFT | 120 |
| Query: | 120 | TTKAPWAIAINIVFQAIFGLLYFHAYQKAQKLNER | 154 |
| | | TT + + ++ A++G A+ KA+ LNE+ | |
| Sbjct: | 121 | TTMSMVGTILILIQAALYGF----AFYKAKTLNEK | 151 |

[8971] SEQ ID 5030 (GBS227) was expressed in E. coli as a His-fusion product. SDS-PAGE analysis of total cell extract is shown in FIG. 119 (lane 5; MW 21.2 kDa).

[8972] GBS227-His was purified as shown in FIG. 227, lane 8-9.

[8973] Based on this analysis, it was predicted that these proteins and their epitopes could be useful antigens for vaccines or diagnostics.

### EXAMPLE 1630

[8974] A DNA sequence (GBSx1725) was identified in S. agalactiae <SEQ ID 5033> which encodes the amino acid sequence <SEQ ID 5034>. Analysis of this protein sequence reveals the following:

```
Possible site: 47
>>> Seems to have no N-terminal signal sequence
----- Final Results -----
                            bacterial cytoplasm --- Certainty = 0.1224(Affirmative) < succ>
                              bacterial membrane --- Certainty = 0.0000(Not Clear) < succ>
                                bacterial outside --- Certainty = 0.0000(Not Clear) < succ>
```

[8975] The protein has homology with the following sequences in the GENPEPT database.

| >GP: CAB14706 GB: Z99118 similar to conjugation transfer protein | | | |
|---|---|---|---|
| [Bacillus subtilis] | | | |
| Identities = 328/754 (43%), Positives = 484/754 (63%), Gaps = 25/754 (3%) | | | |
| Query: | 2 | EVFFTGTIERIIFENASNFFKILLLEIEDTDSDFDDVEVIITGTMADVIEGEEYTFWGTL | 61 |
| | | E + GT+ +I+ N +N + +L +++ +T +D V +TG + E E YTF+G + | |
| Sbjct: | 13 | EPYLKGTVNTVIYHNDTNLYTVLKVKVTETSEAIEDKAVSVTGYFPALQEEETYTFYGKI | 72 |
| Query: | 62 | TQHPKYGEQLQSVRYERAKPTSG-GLVKYFSSEQFKGIGKKTAQRIVELYGDNTIDKILE | 120 |
| | | HPK+G Q Q+ +++ PT+ G+++Y SS+ F+GIGKKTA+ IV+ GD+ I+KIL | |
| Sbjct: | 73 | VTHPKFGLQFQAEHFKKEIPTTKEGIIQYLSSDLFEGIGKKTAEEIVKKLGDSAINKILA | 132 |
| Query: | 121 | SPEQLSTISGLSKINREAFIAKLKLNYGTEQVLAKLAEYGLSNRAAIQIFDHYKEESLEV | 180 |
| | | L + LSK + L+ + G EQ++ L ++G + +++I+ Y+ E+LE | |
| Sbjct: | 133 | DASVLYDVPRLSKKKADTLAGALQRHQGLEQIMISLNQFGFGPQLSMKIYQAYESETLEK | 192 |
| Query: | 181 | INENPYQLVEDIQGIGFKIADQLAEQVGIESDSPKRFRAAIIHTLVESSMEQGDTYIEAR | 240 |
| | | I ENPYQLV+D++GIGF AD+L ++G+ + P+R +AAI++TL + + +G TYIE | |
| Sbjct: | 193 | IQENPYQLVKDVEGIGFGKADELGSRMGLSGNHPERVKAAILYTLETTCLSEGHTYIETE | 252 |
| Query: | 241 | TLLEKTITLLEEA-----RQIELDPS---IVAKELTNLIAEDKVQHIGTKIFSNTLFFAE | 292 |
| | | L+ T +LL ++ R E+D + I E +++ ED + + +LF+AE | |
| Sbjct: | 253 | QLIIDTQSLLNQSAREGQRITEMDAANAIIALGENKDIVIEDG------RCYFPSLFYAE | 306 |
| Query: | 293 | EGIKKNLQRILNQP-LDKQLNHKDIDREIRDIQKSLNIHYDNIQEKAIREALLSKVFILT | 351 |
| | | + + K ++ I +Q + Q + + ++++ +++ Y Q++AI++AL S + +LT | |
| Sbjct: | 307 | QNVAKRVKHIASQTEYENQFPESEFLLALGELEERMDVQYAPSQKEAIQKALSSFMLLLT | 366 |
| Query: | 352 | GGPGTGKTTVINGIIEAYSELHHIDLN----KND--IPIVLAAPTGRAARRMNELTGLPS | 405 |
| | | GGPGTGKTTVI GI+E Y ELH + L+ K D PIVLAAPTGRAA+RM+E TGLP+ | |
| Sbjct: | 367 | GGPGTGKTTVIRGIVELYGELHGVSLDPSAYKKDEAFPIVLAAPTGRAAKRMSESTGLPA | 426 |
| Query: | 406 | ATIHRHLGLNGDSDYQSLDDY-LDCSLIIIDEFSMVDTWLAHQLFDALDSHTQVIIVGDS | 464 |
| | | TIHR LG NG + +D ++ L+IIDE SM+D WLAN LF A+ H Q+IIVGD | |
| Sbjct: | 427 | VTIHRLLGWNGAEGFTHTEDQPIEGKLLIIDEASMLDIWLANHLFKAIPDHIQIIIVGDE | 486 |
| Query: | 465 | DQLPSVGPGQVLADLLNINALPHVKLEKIFRQSEESTIVTLANQMRQGFLPEDFTAKKAD | 524 |
| | | DQLPSVGPGQVL DLL +P V+L I+RQ+E S+IV LA+QM+ G LP + TA D | |
| Sbjct: | 487 | DQLPSVGPGQVLRDLLASQVIPTVRLTDIYRQAEGSSIVELAHQMKNGLLPNNLTAPTKD | 546 |
| Query: | 525 | RSYFEASANIIPNMISKIVQSALKSGIEAHEIQILAPMYRGQAGINNLNLIMQNLLNPLK | 584 |
| | | RS+ + I ++ K+V +ALK G A +IQ+LAPMYRG+AGIN LN+++Q++LNP K | |
| Sbjct: | 547 | RSFIRCGGSQIKEVVEKVVANALKKGYTAKDIQVLAPMYRGKAGINELNVMLQDILNPPK | 606 |
| Query: | 585 | D-NNQFTFNDINFRIGDKVLHLVNDTELNVFNGDIGYITDLIPAKYTESKQDEIYMTFDG | 643 |
| | | + + F D+ +R GDK+L LVN E NVFNGDIG IT + AK K+D ++FDG | |
| Sbjct: | 607 | EKRRELKFCDVVYRTGDKILQLVNQPENNVFNGDIGEITSIFYAKENTEKEDMAVVSFDG | 666 |
| Query: | 644 | QEVIYQRKEWLKITLAYAMSIHKSQGSEFQVVILPITRQSGRMLQRNLIYTAITRSKSKL | 703 |
| | | E+ + +K++ + T AY SIHKSQGSEF +V+LP+ + RML+RNL+YTAITR+K L | |
| Sbjct: | 667 | NEMTFTKKDFNQFTHAYCCSIHKSQGSEFPIVVLPVVKGYYRMLRRNLLYTAITRAKKFL | 726 |
| Query: | 704 | ILLGEIGAFDFAVKNEGAK-RNTYLIERFENKQE | 736 |
| | | IL GE A ++ VKN A R T L R + E | |
| Sbjct: | 727 | ILCGEEEALEWGVKNNDATVRQTSLKNRLSVQVE | 760 |

[8976] A related DNA sequence was identified in S. pyogenes <SEQ ID 5035> which encodes the amino acid sequence <SEQ ID 5036>. Analysis of this protein sequence reveals the following:

```
Possible site: 47
>>> Seems to have an uncleavable N-term signal seq
----- Final Results -----
                              bacterial membrane --- Certainty = 0.0000(Not Clear) < succ>
                                bacterial outside --- Certainty = 0.0000(Not Clear) < succ>
                            bacterial cytoplasm --- Certainty = 0.0000(Not Clear) < succ>
RGD motif: 232-234
```

[8977] The protein has homology with the following sequences in the databases:

| >GP: CAB14706 GB: Z99118 similar to conjugation transfer protein | | | |
|---|---|---|---|
| [Bacillus subtilis] | | | |
| Identities = 318/769 (41%), Positives = 473/769 (61%), Gaps = 29/769 (3%) | | | |
| Query: | 7 | GTVDRIIFENQANFFKILLLAIEDTDSDIDDFEIIITGTMADIIEGDDYTFWGELTQHPK | 66 |
| | | GTV+ +I+ N N + +L + + +T I+D + +TG + E + YTF+G++ HPK | |
| Sbjct: | 18 | GTVNTVIYHNDTNLYTVLKVKVTETSEAIEDKAVSVTGYFPALQEEETYTFYGKIVTHPK | 77 |
| Query: | 67 | YGQQLKLSRYQKIKPSSS-GLVNYFSSDHFKGIGKKTAEKIIALYGHNTIDHILEDPSKL | 125 |
| | | +G Q + ++K P++ G++ Y SSD F+GIGKKTAE+I+ G + I+ IL D S L | |
| Sbjct: | 78 | FGLQFQAEHFKKEIPTTKEGIIQYLSSDLFEGIGKKTAEEIVKKLGDSAINKILADASVL | 137 |
| Query: | 126 | ETISGLSKANRQAFVAKLKLNYGTEQLIAGLVELGLSNRFALQAFEKYKEEALDLVKENP | 185 |
| | | + LSK L+ + G EQ++ L + G + +++ ++ Y+ E L+ ++ENP | |
| Sbjct: | 138 | YDVPRLSKKKADTLAGALQRHQGLEQIMISLNQFGFGPQLSMKIYQAYESETLEKIQENP | 197 |
| Query: | 186 | YQLVEDLQGFGFKMADALAENLGIESDSPKRFRAALLHCLLEESINRGDTYVQARQLLDF | 245 |
| | | YQLV+D++G GF AD L +G+ + P+R +AA+L+ L ++ G TY++ QL+ | |
| Sbjct: | 198 | YQLVKDVEGIGFGKADELGSRMGLSGNHPERVKAAILYTLETTCLSEGHTYIETEQLIID | 257 |
| Query: | 246 | AITLL-----EDARQVECDPAAVAEQLSE---LIIEGKIKNSDTKLFDASLYFAEEGIAN | 297 |
| | | +LL E R E D A L E ++IE D + + SL++AE+ +A | |
| Sbjct: | 258 | TQSLLNQSAREGQRITEMDAANAIIALGENKDIVIE------DGRCYFPSLFYAEQNVAK | 311 |
| Query: | 298 | NISRLLD-TPLSQSFSHDTIQTTIQAVQKDFAITYDQVQQEAITKALTSKVFLLTGGPGT | 356 |
| | | + + T F + +++ + Y Q+EAI KAL+S + LLTGGPGT | |
| Sbjct: | 312 | RVKHIASQTEYENQFPESEFLLALGELEERMDVQYAPSQKEAIQKALSSPMLLLTGGPGT | 371 |
| Query: | 357 | GKTTVIRGILQAYANLHQIDLD----KKD--LPILLAAPTGRAARRMNELTGLPSATIHR | 410 |
| | | GKTTVIRGI++ Y LH + LD KKD PI+LAAPTGRAA+RM+E TGLP+ TIHR | |
| Sbjct: | 372 | GKTTVIRGIVELYGELHGVSLDPSAYKKDEAFPIVLAAPTGRAAKRMSESTGLPAVTIHR | 431 |
| Query: | 411 | HLGLNGDNDYQAMEDY-LDCDLLIVDEFSMVDTWLANQLLGAINSTTQVIIVGDSDQLPS | 469 |
| | | LG NG + ED ++ LLI+DE SM+D WLAN L AI Q+IIVGD DQLPS | |
| Sbjct: | 432 | LLGWNGAEGFTHTEDQPIEGKLLIIDEASMLDIWLANHLFKAIPDHIQIIIVGDEDQLPS | 491 |
| Query: | 470 | VGPGQVLSDLLKVNSLPQIALQKIFRQSQESTIVNLADQMRRGILAADFRDKKADRSYFE | 529 |
| | | VGPGQVL DLL +P + L I+RQ++ S+IV LA QM+ G+L + DRS+ | |
| Sbjct: | 492 | VGPGQVLRDLLASQVIPTVRLTDIYRQAEGSSIVELAHQMKNGLLPNNLTAPTKDRSFIR | 551 |
| Query: | 530 | AQAAFIPDMIQKIVLSAIKSGIPAEEIQILAPMYKGQAGINHLNQLMQELLN-PLQGQTE | 588 |
| | | + I ++++K+V +A+K G A++IQ+LAPMY+G+AGIN LN ++Q++LN P + + E | |
| Sbjct: | 552 | CGGSQIKEVVEKVVANALKKGYTAKDIQVLAPMYRGKAGINELNVMLQDILNPPKEKRRE | 611 |
| Query: | 589 | FLFNDTHFRKGDKVLHLVNDAQLNVFNGDIGYITDLIPAKYTESKQDELILDFDGSEVTY | 648 |
| | | F D +R GDK+L LVN + NVFNGDIG IT + AK K+D ++ FDG+E+T+ | |
| Sbjct: | 612 | LKFGDVVYRTGDKILQLVNQPENNVFNGDIGEITSIFYAKENTEKEDMAVVSFDGNEMTF | 671 |
| Query: | 649 | PRNEWLKLTLAYAMSIHKSQGSEFQVVILPITRQSGRLLQRNVIYTAITRSKSKLILLGE | 708 |
| | | + ++ + T AY SIHKSQGSEF +V+LP+ + R+L+RN++YTAITR+K LIL GE | |
| Sbjct: | 672 | TKKDFNQFTHAYCCSIHKSQGSEFPIVVLPVVKGYYRMLRRNLLYTAITRAKKFLILCGE | 731 |
| Query: | 709 | YTAFEYAIK-HEGDKRQTYLIERFQEQSDLASSQPNQELKSKEQTSLFS | 756 |
| | | A E+ +K ++ RQT L R Q + + + EL++ ++ FS | |
| Sbjct: | 732 | EEALEWGVKNNDATVRQTSLKNRLSVQVE----EMDAELEALQKELPFS | 776 |

[8978] An alignment of the GAS and GBS proteins is shown below.

| Identities = 544/816 (66%), Positives = 665/816 (80%), Gaps = 10/816 (1%) | | | |
|---|---|---|---|
| Query: | 1 | MEVFFTGTIERIIFENASNFFKILLLEIEDTDSDFDDVEVIITGTMADVIEGEEYTFWGT | 60 |
| | | ME FTGT++RIIFEN +NFFKILLL IEDTDSD DD E+IITGTMAD+IEG++YTFWG | |
| Sbjct: | 1 | MEYVFTGTVDRIIFENQANFFKILLLAIEDTDSDIDDFEIIITGTMADIIEGDDYTFWGE | 60 |
| Query: | 61 | LTQHPKYGEQLQSVRYERAKPTSGGLVKYFSSEQFKGIGKKTAQRIVELYGDNTIDKILE | 120 |
| | | LTQHPKYG+QL+ RY++ KP+S GLV YFSS+ FKGIGKKTA++I+ LYG NTID ILE | |
| Sbjct: | 61 | LTQHPKYGQQLKLSRYQKIKPSSSGLVNYFSSDHFKGIGKKTAEKIIALYGHNTIDHILE | 120 |
| Query: | 121 | SPEQLSTISGLSKINREAFIAKLKLNYGTEQVLAKLAEYGLSNRAAIQIFDHYKEESLEV | 180 |
| | | P +L TISGLSK NR+AF+AKLKLNYGTEQ++A L E GLSNR A+Q F+ YKEE+L++ | |
| Sbjct: | 121 | DPSKLETISGLSKANRQAFVAKLKLNYGTEQLIAGLVELGLSNRFALQAFEKYKEEALDL | 180 |
| Query: | 181 | INENPYQLVEDIQGIGFKIADQLAEQVGIESDSPKRFRAAIIHTLVESSMEQGDTYIEAR | 240 |
| | | + ENPYQLVED+QG GFK+AD LAE +GIESDSPKRFRAA++H L+E S+ +GDTY++AR | |
| Sbjct: | 181 | VKENPYQLVEDLQGFGFKMADALAENLGIESDSPKRFRAALLHCLLEESINRGDTYVQAR | 240 |
| Query: | 241 | TLLEKTITLLEEARQIELDPSIVAKELTNLIAEDKVQHIGTKIFSNTLFFAEEGIKKNLQ | 300 |
| | | LL+ ITLLE+ARQ+E DP+ VA++L+ LI E K+++ TK+F +L+FAEEGI N+ | |
| Sbjct: | 241 | QLLDFAITLLEDARQVECDPAAVAEQLSELIIEGKIKNSDTKLFDASLYFAEEGIANNIS | 300 |
| Query: | 301 | RILNQPLDKQLNHKDIDREIRDIQKSLNIHYDNIQEKAIREALLSKVFILTGGPGTGKTT | 360 |
| | | R+L+ PL + +H I I+ +QK I YD +Q++AI +AL SKVF+LTGGPGTGKTT | |
| Sbjct: | 301 | RLLDTPLSQSFSHDTIQTTIQAVQKDFAITYDQVQQEAITKALTSKVFLLTGGPGTGKTT | 360 |
| Query: | 361 | VINGIIEAYSELHHIDLNKNDIPIVLAAPTGRAARRMNELTGLPSATIHRHLGLNGDSDY | 420 |
| | | VI GI++AY+ LH IDL+K D+PI+LAAPTGRAARRMNELTGLPSATIHRHLGLNGD+DY | |
| Sbjct: | 361 | VIRGILQAYANLHQIDLDKKDLPILLAAPTGRAARRMNELTGLPSATIHRHLGLNGDNDY | 420 |
| Query: | 421 | QSLDDYLDCSLIIIDEFSMVDTWLANQLFDALDSHTQVIIVGDSDQLPSVGPGQVLADLL | 480 |
| | | Q+++DYLDC L+I+DEFSMVDTWLANQL A++S TQVIIVGDSDQLPSVGPGQVL+DLL | |
| Sbjct: | 421 | QAMEDYLDCDLLIVDEFSMVDTWLANQLLGAINSTTQVIIVGDSDQLPSVGPGQVLSDLL | 480 |
| Query: | 481 | NINALPHVKLEKIFRQSEESTIVTLANQMRQGFLPEDFTAKKADRSYFEASANIIPNMIS | 540 |
| | | +N+LP + L+KIFRQS+ESTIV LA+QMR+G L DF KKADRSYFEA A IP+MI | |
| Sbjct: | 481 | KVNSLPQIALQKIFRQSQESTIVNLADQMRRGILAADFRDKKADRSYFEAQAAFIPDMIQ | 540 |
| Query: | 541 | KIVQSALKSGIEAHEIQILAPMYRGQAGINNLNLIMQNLLNPLKDNNQFTFNDINFRIGD | 600 |
| | | KIV SA+KSGI A EIQILAPMY+GQAGIN+LN +MQ LLNPL+ +F FND +FR GD | |
| Sbjct: | 541 | KIVLSAIKSGIPAEEIQILAPMYKGQAGINHLNQLMQELLNPLQGQTEFLFNDTHFRKGD | 600 |
| Query: | 601 | KVLHLVNDTELNVFNGDIGYITDLIPAKYTESKQDEIYMTFDGQEVIYQRKEWLKITLAY | 660 |
| | | KVLHLVND +LNVFNGDIGYITDLIPAKYTESKQDE+ + FDG EV Y R EWLK+TLAY | |
| Sbjct: | 601 | KVLHLVNDAQLNVFNGDIGYITDLIPAKYTESKQDELILDFDGSEVTYPRNEWLKLTLAY | 660 |
| Query: | 661 | AMSIHKSQGSEFQVVILPITRQSGRMLQRNLIYTAITRSKSKLILLGEIGAFDFAVKNEG | 720 |
| | | AMSIHKSQGSEFQVVILPITRQSGR+LQRN+IYTAITRSKSKLILLGE AF++A+K+EG | |
| Sbjct: | 661 | AMSIHKSQGSEFQVVILPITRQSGRLLQRNVIYTAITRSKSKLILLGEYTAFEYAIKHEG | 720 |
| Query: | 721 | AKRNTYLIERFENKQEIANSQKIEDSSIDQKI----------DNTIINTSIPKTATPIEQ | 770 |
| | | KR TYLIERF+ + ++A+SQ ++ ++ D++ ++S + P E | |
| Sbjct: | 721 | DKRQTYLIERFQEQSDLASSQPNQELKSKEQTSLFSNTATLEDDSQKSSSQSTNSNPTEN | 780 |
| Query: | 771 | TNLSKITYRLTEENYLTIDPMIGINQQDISAIFDSK | 806 |
| | | + +RLT ENY TID MIG+ + DI+ F K | |
| Sbjct: | 781 | SQSDNDDFRLTPENYSTIDSMIGLTESDIALFFQKK | 816 |

[8979] Based on this analysis, it was predicted that these proteins and their epitopes could be useful antigens for vaccines or diagnostics.

### EXAMPLE 1631

[8980] A DNA sequence (GBSx1726) was identified in S. agalactiae <SEQ ID 5037> which encodes the amino acid sequence <SEQ ID 5038>. Analysis of this protein sequence reveals the following:

| Possible site: 35 | | | | |
|---|---|---|---|---|
| >>> Seems to have an uncleavable N-term signal seq | | | | |
| | INTEGRAL | Likelihood = −8.23 | Transmembrane | 9-25 (7-29) |

```
----- Final Results -----
                              bacterial membrane --- Certainty = 0.4291(Affirmative) < succ>
                                bacterial outside --- Certainty = 0.0000(Not Clear) < succ>
                            bacterial cytoplasm --- Certainty = 0.0000(Not Clear) < succ>
```

[8981] The protein has homology with the following sequences in the GENPEPT database.

| >GP: AABE9116 GB: U90721 signal peptidase I [Streptococcus pneumoniae] | | | |
|---|---|---|---|
| Identities = 120/201 (59%), Positives = 144/201 (70%), Gaps = 9/201 (4%) | | | |
| Query: | 2 | KEFIKEWGVFILILSLFLLSRIFLWQFVKVDGHSMDPTLADKEQLVVLKQTKINRFDIVV | 61 |
| | | K F+KEWG+F+LILSL LSRIF W V+V+GHSMDPTLAD E L V+K I+RFDIVV | |
| Sbjct: | 5 | KNFLKEWGLFLLILSLLALSRIFFWSNVRVEGHSMDPTLADGEILFVVKHLPIDRFDIVV | 64 |
| Query: | 62 | ANEEEGGQKKKIVKRVIGMPGDVIKYKNDTLTINNKKTEEPYLKEYTKLFKKDKLQEKYS | 121 |
| | | A+EE+G K IVKRVIGMPGD I+Y+ND L IN+K+T+EPYL +Y K FK DKLQ YS | |
| Sbjct: | 65 | AHEEDG--NKDIVKRVIGMPGDTIRYENDKLYINDKETDEPYLADYIKRFKDDKLQSTYS | 122 |
| Query: | 122 | -------YNPLFQDLAQSSTAFTTDSNGSSEFTTVVPKGHYYLVGDDRIVSKDSRAVGPF | 174 |
| | | F+ +AQ + AFT D N ++ F+ VP+G Y L+GDDR+VS DSR VG F | |
| Sbjct: | 123 | GKGFEGNKGTFFRSIAQKAQAFTVDVNYNTNFSFTVPEGEYLLLGDDRLVSSDSRHVGTF | 182 |
| Query: | 175 | KKSTIVGEVKFRFWPIRRFGT | 195 |
| | | K I GE KFRFWPI R GT | |
| Sbjct: | 183 | KAKDITGEAKFRFWPITRIGT | 203 |

[8982] A related DNA sequence was identified in S. pyogenes <SEQ ID 5039> which encodes the amino acid sequence <SEQ ID 5040>. Analysis of this protein sequence reveals the following:

| Possible site: 52 | | | | |
|---|---|---|---|---|
| >>> Seems to have no N-terminal signal sequence | | | | |
| | INTEGRAL | Likelihood = −2.50 | Transmembrane | 35-51 (35-51) |

```
----- Final Results -----
                              bacterial membrane --- Certainty = 0.1999(Affirmative) < succ>
                                bacterial outside --- Certainty = 0.0000(Not Clear) < succ>
                            bacterial cytoplasm --- Certainty = 0.0000(Not Clear) < succ>
```

[8983] A related sequence was also identified in GAS <SEQ ID 9157> which encodes the amino acid sequence <SEQ ID 9158>. Analysis of this protein sequence reveals the following:

```
Possible site: 43
>>> Seems to have a cleavable N-term signal seq.
----- Final Results -----
                                bacterial outside --- Certainty = 0.0300(Affirmative) < succ>
                              bacterial membrane --- Certainty = 0.000(Not Clear) < succ>
                            bacterial cytoplasm --- Certainty = 0.000(Not Clear) < succ>
```

[8984] An alignment of the GAS and GBS proteins is shown below.

| Identities = 131/197 (66%), Positives = 152/197 (76%) | | | |
|---|---|---|---|
| Query: | 1 | MKEFIKEWGVFILILSLFLLSRIFLWQFVKVDGHSMDPTLADKEQLVVLKQTKINRFDIV | 60 |
| | | MK+FIKEWG F L L LF LSR+FLWQ VKVDGHSMDPTLA E+L+V Q +I+RFDIV | |
| Sbjct: | 23 | MKQFIKEWGPFTLFLILFGLSRLFLWQAVKVDGHSMDPTLAHGERLIVFNQARIDRFDIV | 82 |
| Query: | 61 | VANEEEGGQKKKIVKRVIGMPGDVIKYKNDTLTINNKKTEEPYLKEYTKLFKKDKLQEKY | 120 |
| | | VA EEE GQKK+IVKRVIG+PGD I Y +DTL IN KKT EPYL EY K FK DKLQ+ Y | |
| Sbjct: | 83 | VAQEEENGQKKEIVKRVIGLPGDTISYNDDTLYINGKKTVEPYLAEYLKQFKNDKLQKTY | 142 |
| Query: | 121 | SYNPLFQDLAQSSTAFTTDSNGSSEFTTVVPKGHYYLVGDDRIVSKDSRAVGPFKKSTIV | 180 |
| | | +YN LFQ LA++S AFTT+S G + F VPKG Y L+GDDRIVS+DSR VG FKK ++ | |
| Sbjct: | 143 | AYNTLFQQLAETSDAFTTNSEGQTRFEMSVPKGEYLLLGDDRIVSRDSREVGSFKKENLI | 202 |
| Query: | 181 | GEVKFRFWPIRRFGTIN | 197 |
| | | GEVK RFWP+ + N | |
| Sbjct: | 203 | GEVKARFWPLNKMTVFN | 219 |

[8985] SEQ ID 5038 (GBS268) was expressed in E. coli as a GST-fusion product. SDS-PAGE analysis of total cell extract is shown in FIG. 54 (lane 4; MW 50.3 kDa). It was also expressed in E. coli as a His-fusion product. SDS-PAGE analysis of total cell extract is shown in FIG. 85 (lane 9; MW 25.3 kDa) and in FIG. 160 (lane 24; MW 25.3 kDa).

[8986] GBS268-His was purified as shown in FIG. 222, lane 8.

[8987] Based on this analysis, it was predicted that these proteins and their epitopes could be useful antigens for vaccines or diagnostics.

### EXAMPLE 1632

[8988] A DNA sequence (GBSx1727) was identified in S. agalactiae <SEQ ID 5041> which encodes the amino acid sequence <SEQ ID 5042>. This protein is predicted to be ribonuclease HIII (rnhB). Analysis of this protein sequence reveals the following:

```
Possible site: 37
>>> Seems to have no N-terminal signal sequence
----- Final Results -----
                            bacterial cytoplasm --- Certainty = 0.4728(Affirmative) < succ>
                              bacterial membrane --- Certainty = 0.0000(Not Clear) < succ>
                                bacterial outside --- Certainty = 0.0000(Not Clear) < succ>
```

[8989] A related GBS nucleic acid sequence <SEQ ID 10119> which encodes amino acid sequence <SEQ ID 10120> was also identified.

[8990] The protein has homology with the following sequences in the GENPEPT database.

| >GP: AAC45437 GB: U93576 ribonuclease HII [Streptococcus pneumoniae] | | | |
|---|---|---|---|
| Identities = 176/282 (62%), Positives = 219/282 (77%), Gaps = 13/282 (4%) | | | |
| Query: | 16 | EKIRTDLAQHHISNNNPYVVFSAKISGATVLLYTSGKLVFQGSNASHIAQKYGF--IEQK | 73 |
| | | E +T LA + NPY+ + K+ ATV +YTSGK++ QG A A +G+ +EQ | |
| Sbjct: | 18 | EHYQTSLAP----SKNPYIRYFLKLPQATVSIYTSGKILLQGEGAEKYASFFGYQAVEQ- | 72 |
| Query: | 74 | ESCSSESQDIPIIGTDEVGNGSYFGGLAVVASFVTPKDHAYLKKLGVGDSKTLTDQKIKQ | 133 |
| | | + Q++P+IGTDEVGNGSYFGGLAVVA+FVTP H +L+KLGVGDSKTLTDQKI+Q | |
| Sbjct: | 73 | ----TSGQNLPLIGTDEVGNGSYFGGLAVVAAFVTPDQHDFLRKLGVGDSKTLTDQKIRQ | 128 |
| Query: | 134 | IAPLLEKAIPHKALLLSPQKYNQVVSPNNKHNAVSVKVALHNQAIFLLLQDGFEPEKIVI | 193 |
| | | IAP+L++ I H+ALLLSP KYN+V+ +++NAVSVKVALHNQAI+LLLQ G +PEKIVI | |
| Sbjct: | 129 | IAPILKEKIQHQALLLSPSKYNEVIG--DRYNAVSVKVALHNQAIYLLLQKGVQPEKIVI | 186 |
| Query: | 194 | DAFTSSKNYQNYLKNEKNQFKQTITLEEKAENKYLAVAVSSIIARNLFLENLNKLSDDVG | 253 |
| | | DAFTS+KNY YL E N+F I+LEEKAE KYLAVAVSS+IAR+LFLENL L ++G | |
| Sbjct: | 187 | DAFTSAKNYDKYLAQETNRFSNPISLEEKAEGKYLAVAVSSVIARDLFLENLENLGRELG | 246 |
| Query: | 254 | YKLPSGAGHQSDKVASQLLKAYGISSLEHCAKLHFANTKKAQ | 295 |
| | | Y+LPSGAG SDKVASQ+L+AYG+ L CAKLHF NT+KA+ | |
| Sbjct: | 247 | YQLPSGAGTASDKVASQILQAYGMQGLNFCAKLHFKNTEKAK | 288 |

[8991] A related DNA sequence was identified in S. pyogenes <SEQ ID 5043> which encodes the amino acid sequence <SEQ ID 5044>. Analysis of this protein sequence reveals the following:

```
Possible site: 35
>>> Seems to have no N-terminal signal sequence
----- Final Results -----
                            bacterial cytoplasm --- Certainty = 0.2148(Affirmative) < succ>
                              bacterial membrane --- Certainty = 0.0000(Not Clear) < succ>
                                bacterial outside --- Certainty = 0.0000(Not Clear) < succ>
```

[8992] An alignment of the GAS and GBS proteins is shown below.

| Identities = 194/298 (65%), Positives = 240/298 (80%), Gaps = 2/298 (0%) | | | |
|---|---|---|---|
| Query: | 3 | MNTIVMQADKKLQEKIRTDLAQHHISNNNPYVVFSAKISGATVLLYTSGKLVFQGSNASH | 62 |
| | | MNT+V++ D L + ++ LA + IS+ N YV F+AK +G TVLLY SGKLV QG+ A+ | |
| Sbjct: | 1 | MNTLVLKIDAILSKHLKKQLAPYTISSQNTYVAFAAKKNGVTVLLYKSGKLVLQGNGANA | 60 |
| Query: | 63 | IAQKYGFIEQKE--SCSSESQDIPIIGTDEVGNGSYFGGLAVVASFVTPKDHAYLKKLGV | 120 |
| | | +AQ+ K S+ SQDIPIIG+DEVGNGSYFGG+AVVASFV PKDH++LKKLGV | |
| Sbjct: | 61 | LAQELNLPVAKTVFEASNNSQDIPIIGSDEVGNGSYFGGIAVVASFVDPKDHSFLKKLGV | 120 |
| Query: | 121 | GDSKTLTDQKIKQIAPLLEKAIPHKALLLSPQKYNQVVSPNNKHNAVSVKVALHNQAIFL | 180 |
| | | DSK L+D+ I+QIAPLLEK IPH++LLLSP+KYN++V + +NA+S+KVALHNQAIFL | |
| Sbjct: | 121 | DDSKKLSDKTIQQIAPLLEKQIPHQSLLLSPKKYNELVGKSKPYNAISIKVALHNQAIFL | 180 |
| Query: | 181 | LLQDGFEPEKIVIDAFTSSKNYQNYLKNEKNQFKQTITLEEKAENKYLAVAVSSIIARNL | 240 |
| | | LLQ G +P++IVIDAFTS NY+ +LK EKN F +T +EKAE+ YLAVAVSSIIARNL | |
| Sbjct: | 181 | LLQKGIQPKQIVIDAFTSQSNYEKHLKKEKNHFPNPLTFQEKAESHYLAVAVSSIIARNL | 240 |
| Query: | 241 | FLENLNKLSDDVGYKLPSGAGHQSDKVASQLLKAYGISSLEHCAKLHFANTKKAQALL | 298 |
| | | FL+NL++L D+GY+LPSGAG SDKVASQLL AYG+SSLE+ AKLHFANT KAQALL | |
| Sbjct: | 241 | FLDNLDQLGQDLGYQLPSGAGSASDKVASQLLAAYGMSSLEYSAKLHFANTHKAQALL | 298 |

[8993] Based on this analysis, it was predicted that these proteins and their epitopes could be useful antigens for vaccines or diagnostics.

### EXAMPLE 1633

[8994] A DNA sequence (GBSx1728) was identified in S. agalactiae <SEQ ID 5045> which encodes the amino acid sequence <SEQ ID 5046>. This protein is predicted to be heat shock protein 70. Analysis of this protein sequence reveals the following:

```
Possible site: 25
>>> Seems to have no N-terminal signal sequence
----- Final Results -----
                            bacterial cytoplasm --- Certainty = 0.3874(Affirmative) < succ>
                              bacterial membrane --- Certainty = 0.0000(Not Clear) < succ>
                                bacterial outside --- Certainty = 0.0000(Not Clear) < succ>
```

[8995] The protein has no significant homology with any sequences in the GENPEPT database.

[8996] A related DNA sequence was identified in S. pyogenes <SEQ ID 5047> which encodes the amino acid sequence <SEQ ID 5048>. Analysis of this protein sequence reveals the following:

```
Possible site: 58
>>> Seems to have no N-terminal signal sequence
----- Final Results -----
                            bacterial cytoplasm --- Certainty = 0.3442(Affirmative) < succ>
                              bacterial membrane --- Certainty = 0.0000(Not Clear) < succ>
                                bacterial outside --- Certainty = 0.0000(Not Clear) < succ>
```

[8997] An alignment of the GAS and GBS proteins is shown below.

| Identities = 65/92 (70%), Positives = 76/92 (81%) | | | |
|---|---|---|---|
| Query: | 11 | NRYKFVFGDKPLTLTTDKDNLFMEEIERVATEKYEAIKEKLPNADNETIAILMAINALSV | 70 |
| | | NRYKF FG+K LTLTTDKDNLFMEE+ERVA EKY+A+K LP AD+ETIAILMAIN LS | |
| Sbjct: | 5 | NRYKFTFGEKTLTLTTDKDNLFMEEVERVAKEKYQALKNHLPEADDETIAILMAINTLST | 64 |
| Query: | 71 | QLSREIDIEKMEDELNKLRSKTISDIKEKVSE | 102 |
| | | QLSREI IEKME E+ LR KT+ ++EK ++ | |
| Sbjct: | 65 | QLSREIAIEKMEAEILDLRQKTLVGLQEKANQ | 96 |

[8998] Based on this analysis, it was predicted that these proteins and their epitopes could be useful antigens for vaccines or diagnostics.

### EXAMPLE 1634

[8999] A DNA sequence (GBSx1729) was identified in S. agalactiae <SEQ ID 5049> which encodes the amino acid sequence <SEQ ID 5050>. Analysis of this protein sequence reveals the following:

| Possible site: 48 | | | | |
|---|---|---|---|---|
| >>> Seems to have an uncleavable N-term signal seq | | | | |
| | INTEGRAL | Likelihood = −10.99 | Transmembrane | 124-140 (114-148) |
| | INTEGRAL | Likelihood = −5.84 | Transmembrane | 22-38 (21-40) |
| | INTEGRAL | Likelihood = −4.88 | Transmembrane | 2-18 (1-20) |
| | INTEGRAL | Likelihood = −1.97 | Transmembrane | 84-100 (84-100) |

```
----- Final Results -----
                              bacterial membrane --- Certainty = 0.5394(Affirmative) < succ>
                                bacterial outside --- Certainty = 0.0000(Not Clear) < succ>
                            bacterial cytoplasm --- Certainty = 0.0000(Not Clear) < succ>
```

[9000] The protein has homology with the following sequences in the GENPEPT database.

| >GP: BAB06827 GB: AP001517 unknown conserved protein in B. subtilis | | | |
|---|---|---|---|
| [Bacillus halodurans] | | | |
| Identities = 59/182 (32%), Positives = 98/182 (53%), Gaps = 14/182 (7%) | | | |
| Query: | 1 | MLSLLLLIIVIWHFYIGYSRGIFLQVFYVLMSMVSLMIASQFYQELASQITLWVPYS--N | 58 |
| | | MLS++LL I++ F+IG RG+ LQ+ ++L + + +A ++Y +A+ I LW+PY + | |
| Sbjct: | 1 | MLSVILLFILLCSFFIGKRRGLILQLVHLLGFVAAFFVAYKYYAPVATYIRLWIPYPQFS | 60 |
| Query: | 59 | PVQGVEVYFFKDISKFQLSHVYYAGVAFVFIY----SLSYLVGRLLGVLLHLAPVEHFDS | 114 |
| | | P V + I F +VYY+G+AF ++ L ++VG +L L HL + | |
| Sbjct: | 61 | PDSPVTML----IEAFNFENVYYSGIAFALLFIGTKILLHIVGSMLDFLTHLPILRSV-- | 114 |
| Query: | 115 | LQNNIISGFLAVLVCLLFMSMCLTILATVPMSFVQEKLWNSLFVRFLINDLPFFSQFLVR | 174 |
| | | N + G L + L M + L + A +P+ VQ L SL +F++N PF S+F+ | |
| Sbjct: | 115 | --NGWLGGILGFVEVYLIMFVLLYVGALLPIETVQTHLNQSLVAQFIMNHTPFLSEFIRN | 172 |
| Query: | 175 | TW | 176 |
| | | W | |
| Sbjct: | 173 | LW | 174 |

[9001] A related DNA sequence was identified in S. pyogenes <SEQ ID 5051> which encodes the amino acid sequence <SEQ ID 5052>. Analysis of this protein sequence reveals the following:

| Possible site: 59 | | | | |
|---|---|---|---|---|
| >>> Seems to have a cleavable N-term signal seq. | | | | |
| | INTEGRAL | Likelihood = −8.17 | Transmembrane | 124-140 (117-148) |
| | INTEGRAL | Likelihood = −4.73 | Transmembrane | 84-100 (78-105) |
| | INTEGRAL | Likelihood = −0.00 | Transmembrane | 156-172 (156-172) |

```
----- Final Results -----
                              bacterial membrane --- Certainty = 0.4270(Affirmative) < succ>
                                bacterial outside --- Certainty = 0.0000(Not Clear) < succ>
                            bacterial cytoplasm --- Certainty = 0.0000(Not Clear) < succ>
```

[9002] The protein has homology with the following sequences in the databases:

| >GP: BAB06827 GB: AP001517 unknown conserved protein in B. subtilis | | | |
|---|---|---|---|
| [Bacillus halodurans] | | | |
| Identities = 57/177 (32%), Positives = 98/177 (55%), Gaps = 2/177 (1%) | | | |
| Query: | 1 | MLSLLIVLILTWNFYIGYSRGIILQSFYVLGALLSLLVANRFYIGLAHKLTLWIPYSNPV | 60 |
| | | MLS++++ IL +F+IG RG+ILQ ++LG + + VA ++Y +A + LWIPY | |
| Sbjct: | 1 | MLSVILLFILLCSFFIGKRRGLILQLVHLLGFVAAFFVAYKYYAPVATYIRLWIPYPQFS | 60 |
| Query: | 61 | EGTSVFFFKSVDIFVLDKVYYAGLAFFIIFLLGYALSRFLGIFVHFLLLNYFDNQWTKCL | 120 |
| | | + V ++ F + VYY+G+AF ++F+ L +G + FL L | |
| Sbjct: | 61 | PDSPVTML--IEAFNFENVYYSGIAFALLFIGTKILLHIVGSMLDFLTHLPILRSVNGWL | 118 |
| Query: | 121 | SGGLAFLVSLLFLNMLLSIFATVPMPFLQHYLHSSFLARLVIEHLPPLTIIIQKLWI | 177 |
| | | G L F+ L + +LL + A +P+ +Q +L+ S +A+ ++ H P L+ I+ LWI | |
| Sbjct: | 119 | GGILGFVEVYLIMFVLLYVGALLPIETVQTHLNQSLVAQFIMNHTPFLSEFIRNLWI | 175 |

[9003] An alignment of the GAS and GBS proteins is shown below.

| Identities = 87/176 (49%), Positives = 123/176 (69%) | | | |
|---|---|---|---|
| Query: | 1 | MLSLLLLIIVIWHFYIGYSRGIFLQVFYVLMSMVSLMIASQFYQELASQITLWVPYSNPV | 60 |
| | | MLSLL+++I+ W+FYIGYSRGI LQ FYVL +++SL++A++FY LA ++TLW+PYSNPV | |
| Sbjct: | 1 | MLSLLIVLILTWNFYIGYSRGIILQSFYVLGALLSLLVANRFYIGLAHKLTLWIPYSNPV | 60 |
| Query: | 61 | QGVEVYFFKDISKFQLSHVYYAGVAFVFIYSLSYLVGRLLGVLLHLAPVEHFDSLQNNII | 120 |
| | | +G V+FFK + F L VYYAG+AF I+ L Y + R LG+ +H + +FD+ + | |
| Sbjct: | 61 | EGTSVFFFKSVDIFVLDKVYYAGLAFFIIFLLGYALSRFLGIFVHFLLLNYFDNQWTKCL | 120 |
| Query: | 121 | SGFLAVLVCLLFMSMCLTILATVPMSFVQEKLWNSLFVRFLINDLPFFSQFLVRTW | 176 |
| | | SG LA LV LLF++M L+I ATVPM F+Q L +S R +I LP + + + W | |
| Sbjct: | 121 | SGGLAFLVSLLFLNMLLSIFATVPMPFLQHYLHSSFLARLVIEHLPPLTIIIQKLW | 176 |

[9004] Based on this analysis, it was predicted that these proteins and their epitopes could be useful antigens for vaccines or diagnostics.

### EXAMPLE 1635

[9005] A DNA sequence (GBSx1730) was identified in S. agalactiae <SEQ ID 5053> which encodes the amino acid sequence <SEQ ID 5054>. Analysis of this protein sequence reveals the following:

```
Possible site: 48
>>> Seems to have no N-terminal signal sequence
----- Final Results -----
                            bacterial cytoplasm --- Certainty = 0.4176(Affirmative) < succ>
                              bacterial membrane --- Certainty = 0.0000(Not Clear) < succ>
                                bacterial outside --- Certainty = 0.0000(Not Clear) < succ>
```

[9006] A related GBS nucleic acid sequence <SEQ ID 10117> which encodes amino acid sequence <SEQ ID 10118> was also identified.

[9007] The protein has homology with the following sequences in the GENPEPT database.

| >GP: CAB14818 GB: Z99118 similar to DNA mismatch repair protein | | | |
|---|---|---|---|
| [Bacillus subtilis] | | | |
| Identities = 320/790 (40%), Positives = 466/790 (58%), Gaps = 18/790 (2%) | | | |
| Query: | 10 | MNNKILEQLEFNKVKELILPYLKTEQSQEELSELEPMTEAPKIEKSFNEISDMEQIFVEH | 69 |
| | | M K+L LEF+KVKE ++ + + +E L EL+P +I+K +E+ + I | |
| Sbjct: | 1 | MQQKVLSALEFHKVKEQVIGHAASSLGKEMLLELKPSASIDEIKKQLDEVDEASDIIRLR | 60 |
| Query: | 70 | HSFGIVSLSSISESLKRLELSADLNIQELLAIKKVLQSSSDMIHFYSDL--DNVSFQSLD | 127 |
| | | L I +L+R E+ + L+ E I +L + M HF + + D V + | |
| Sbjct: | 61 | GQAPFGGLVDIRGALRRAEIGSVLSPSEFTEISGLLYAVKQMKHFITQMAEDGVDIPLIH | 120 |
| Query: | 128 | RLFENLEQFPNLQGSFQA-INDGGFLEHFASPELERIRRQLTNSERRVRQILQDMLKEKA | 186 |
| | | + E L +L+ + I+D G + AS L IR QL E RVR L+ ML+ + | |
| Sbjct: | 121 | QHAEQLITLSDLERDINSCIDDHGEVLDHASETLRGIRTQLRTLESRVRDRLESMLRSSS | 180 |
| Query: | 187 | --ELLSENLIASRSGRSVLPVKNTYRNRISGVVHDISSSGSTVYIEPRAVVTLNEEITQL | 244 |
| | | ++LS+ ++ R+ R V+PVK YR+ G+VHD SSSG+T++IEP+A+V +N + Q | |
| Sbjct: | 181 | ASKMLSDTIVTIRNDRFVIPVKQEYRSSYGGIVHDTSSSGATLFIEPQAIVDMNNSLQQA | 240 |
| Query: | 245 | RADERHEESRILHAFSDLLRPHVATIRNNAWILGHLDFVRAKYLFMSDNKATIPEISNDS | 304 |
| | | + E+ E RIL ++ + + + +L LDF+ AK + KAT P +++ | |
| Sbjct: | 241 | KVKEKQEIERILRVLTEKTAEYTEELFLDLQVLQTLDFIFAKARYAKAVKATKPIMNDTG | 300 |
| Query: | 305 | TLALINVRHPLL--SNPVANDLHFDQDLTAIVITGPNTGGKTIMLKTLGLAQLMGQSGLP | 362 |
| | | + L RHPLL VAND+ +D + IVITGPNTGGKT+ LKTLGL LM QSGL | |
| Sbjct: | 301 | FIRLKKARHPLLPPDQVVANDIELGRDFSTIVITGPNTGGKTVTLKTLGLLTLMAQSGLH | 360 |
| Query: | 363 | VLADKGSKIAVFNNIFADIGDEQSIEQSLSTFSSHMTHIVSILNEADHNSLVLFDELGAG | 422 |
| | | + AD+GS+ AVF ++FADIGDEQSIEQSLSTFSSHM +IV IL + + NSLVLFDELGAG | |
| Sbjct: | 361 | IPADEGSEAAVFEHVFADIGDEQSIEQSLSTFSSHMVNIVGILEQVNENSLVLFDELGAG | 420 |
| Query: | 423 | TDPQEGASLAMAILEHLRLSNIKTMATTHYPELKAYGIETNFVENASMEFDAETLSPTYR | 482 |
| | | TDPQEGA+LAM+IL+ + +N + +ATTHYPELKAYG V NAS+EFD ETLSPTY+ | |
| Sbjct: | 421 | TDPQEGAALAMSILDDVHRTNARVLATTHYPELKAYGYNREGVMNASVEFDIETLSPTYK | 480 |
| Query: | 483 | FMQGVPGRSNAFEIASRLGLAPFIVKQAK-QMTDSDSDVNRIIEQLEAQTLETRRRLDHI | 541 |
| | | + GVPGRSNAFEI+ RLGL I+ QAK +MT ++V+ +I LE L | |
| Sbjct: | 481 | LLIGVPGRSNAFEISKRLGLPDHIIGQAKSEMTAEHNEVDTMIASLEQSKKRAEEELSET | 540 |
| Query: | 542 | KEVEQENLKFNRAVKKLYNEFSHERDKELEKIYQEAQEIVDMALNESDTILKKL----ND | 597 |
| | | + + +E K ++ +++ E + ++DK LE+ Q+A E V A+ E++ I+ +L + | |
| Sbjct: | 541 | ESIRKEAEKLHKELQQQIIELNSKKDKMLEEAEQQAAEKVKAAMKEAEDIIHELRTIKEE | 600 |
| Query: | 598 | KSQLKPHEIIDAKAQIKKLAPQVDLSKNKVLNKAKKIKAARAPRIGDDIIVTSYGQRGTL | 657 |
| | | K HE+I+AK +++ P + SK K +K R + GD++ V ++GQ+GTL | |
| Sbjct: | 601 | HKSFKDHELINAKKRLEGAMPAFEKSKKPEKPKTQK----RDFKPGDEVKVLTFGQKGTL | 656 |
| Query: | 658 | TSQLKDGRWEAQVGIIKMTLTQDEFTLVRVQEEQKVKSKQINVVKKADSSGPRARLDLRG | 717 |
| | | + W Q+GI+KM + + + ++ E K K K I VK D LDLRG | |
| Sbjct: | 657 | LEKTGGNEWNVQIGILKMKVKEKDLEFIKSAPEPK-KEKMITAVKGKDYH-VSLELDLRG | 714 |
| Query: | 718 | KRYEEAMQELDNFIDQALLNNMGQVDIIHGIGTGVIREGVTKYLRRNKHVKHFAYAPQNA | 777 |
| | | +RYE A+ ++ ++D A+L +V IIHG GTG +R+GV L+ ++ VK + | |
| Sbjct: | 715 | ERYENALSRVEKYLDDAVLAGYPRVSIIHGKGTGALRKGVQDLLKNHRSVKSSRFGEAGE | 774 |
| Query: | 778 | GGSGATIVTL | 787 |
| | | GGSG T+V L | |
| Sbjct: | 775 | GGSGVTVVEL | 784 |

[9008] A related DNA sequence was identified in S. pyogenes <SEQ ID 5055> which encodes the amino acid sequence <SEQ ID 5056>. Analysis of this protein sequence reveals the following:

```
Possible site: 20
>>> Seems to have no N-terminal signal sequence
----- Final Results -----
                            bacterial cytoplasm --- Certainty = 0.3843(Affirmative) < succ>
                              bacterial membrane --- Certainty = 0.0000(Not Clear) < succ>
                                bacterial outside --- Certainty = 0.0000(Not Clear) < succ>
```

[9009] An alignment of the GAS and GBS proteins is shown below.

| Identities = 775/787 (98%), Positives = 781/787 (98%) | | | |
|---|---|---|---|
| Query: | 2 | INLGIMKSMNNKILEQLEFNKVKELILPYLKTEQSQEELSELEPMTEAPKIEKSFNEISD | 61 |
| | | I LGIMKSMNNKILEQLEFNKVKEL+LPYLKTEQSQEEL ELEPMTEAPKIEKSFNEISD | |
| Sbjct: | 32 | IILGIMKSMNNKILEQLEFNKVKELLLPYLKTEQSQEELLELEPMTEAPKIEKSFNEISD | 91 |
| Query: | 62 | MEQIFVEHHSFGIVSLSSISESLKRLELSADLNIQELLAIKKVLQSSSDMIHFYSDLDNV | 121 |
| | | MEQIFVEHHSFGIVSLSSISESLKRLELS DLNIQELLAIKKVLQSSSDMIHFYSDLDNV | |
| Sbjct: | 92 | MEQIFVEHHSFGIVSLSSISESLKRLELSTDLNIQELLAIKKVLQSSSDMIHFYSDLDNV | 151 |
| Query: | 122 | SFQSLDRLFENLEQFPNLQGSFQAINDGGFLEHFASPELERIRRQLTNSERRVRQILQDM | 181 |
| | | SFQSLDRLFENLEQFPNLQGSFQAINDGGFLEHFASPELERIRRQLTNSERRVRQILQDM | |
| Sbjct: | 152 | SFQSLDRLFENLEQFPNLQGSFQAINDGGFLEHFASPELERIRRQLTNSERRVRQILQDM | 211 |
| Query: | 182 | LKEKAELLSENLIASRSGRSVLPVKNTYRNRISGVVHDISSSGSTVYIEPRAVVTLNEEI | 241 |
| | | LKEKAELLSENLIASRSGRSVLPVKNTYRNRISGVVHDISSSGSTVYIEPRAVVTLNEEI | |
| Sbjct: | 212 | LKEKAELLSENLIASRSGRSVLPVKNTYRNRISGVVHDISSSGSTVYIEPRAVVTLNEEI | 271 |
| Query: | 242 | TQLRADERHEESRILHAFSDLLRPHVATIRNNAWILGHLDFVRAKYLFMSDNKATIPEIS | 301 |
| | | TQLRADERHEE RILHAFSDLLRPHVATIRNNAWILGHLDFVRAKYLFMSDNKATIP+IS | |
| Sbjct: | 272 | TQLRADERHEEGRILHAFSDLLRPHVATIRNNAWILGHLDFVRAKYLFMSDNKATIPKIS | 331 |
| Query: | 302 | NDSTLALINVRHPLLSNPVANDLHFDQDLTAIVITGPNTGGKTIMLKTLGLAQLMGQSGL | 361 |
| | | NDSTLALINVRHPLLSNPVANDLHFD DLTAIVITGPNTGGKTIMLKTLGLAQLMGQSGL | |
| Sbjct: | 332 | NDSTLALINVRHPLLSNPVANDLHFDHDLTAIVITGPNTGGKTIMLKTLGLAQLMGQSGL | 391 |
| Query: | 362 | PVLADKGSKIAVFNNIFADIGDEQSIEQSLSTFSSHMTHIVSILNEADHNSLVLFDELGA | 421 |
| | | PVLADKGSKIAVFNNIFADIGDEQSIEQSLSTFSSHMTHIVSILNEADHNSLVLFDELGA | |
| Sbjct: | 392 | PVLADKGSKIAVFNNIFADIGDEQSIEQSLSTFSSHMTHIVSILNEADHNSLVLFDELGA | 451 |
| Query: | 422 | GTDPQEGASLAMAILEHLRLSNIKTMATTHYPELKAYGIETNFVENASMEFDAETLSPTY | 481 |
| | | GTDPQEGASLAMAILEHLRLS+IKTMATTHYPELKAYGIETNFVENASMEFDAETLSPTY | |
| Sbjct: | 452 | GTDPQEGASLAMAILEHLRLSHIKTMATTHYPELKAYGIETNFVENASMEFDAETLSPTY | 511 |
| Query: | 482 | RFMQGVPGRSNAFEIASRLGLAPFIVKQAKQMTDSDSDVNRIIEQLEAQTLETRRRLDHI | 541 |
| | | RFMQGVPGRSNAFEIASRLGLAPFIVKQAKQMTDSDSDVNRIIEQLEAQTLETRRRLDHI | |
| Sbjct: | 512 | RFMQGVPGRSNAFEIASRLGLAPFIVKQAKQMTDSDSDVNRIIEQLEAQTLETRRRLDHI | 571 |
| Query: | 542 | KEVEQENLKFNRAVKKLYNEFSHERDKELEKIYQEAQEIVDMALNESDTILKKLNDKSQL | 601 |
| | | KEVEQENLKFNRAVKKLYNEFSHERDKELEKIYQEAQEIVDMALNESDTILKKLNDKSQL | |
| Sbjct: | 572 | KEVEQENLKFNRAVKKLYNEFSHERDKELEKIYQEAQEIVDMALNESDTILKKLNDKSQL | 631 |
| Query: | 602 | KPHEIIDAKAQIKKLAPQVDLSKNKVLNKAKKIKAARAPRIGDDIIVTSYGQRGTLTSQL | 661 |
| | | KPHEIIDAKAQIKKLAPQVDLSKNKVLNKAKKIKAARAPRIGDDIIVTSYGQRGTLTSQL | |
| Sbjct: | 632 | KPHEIIDAKAQIKKLAPQVDLSKNKVLNKAKKIKAARAPRIGDDIIVTSYGQRGTLTSQL | 691 |
| Query: | 662 | KDGRWEAQVGIIKMTLTQDEFTLVRVQEEQKVKSKQINVVKKADSSGPRARLDLRGKRYE | 721 |
| | | KDGRWEAQVGIIKMTLTQDEF+LVRVQEEQKVK+KQINVVKKAD SGPRARLDLRGKRYE | |
| Sbjct: | 692 | KDGRWEAQVGIIKMTLTQDEFSLVRVQEEQKVKNKQINVVKKADGSGPRARLDLRGKRYE | 751 |
| Query: | 722 | EAMQELDNFIDQALLNNMGQVDIIHGIGTGVIREGVTKYLRRNKHVKHFAYAPQNAGGSG | 781 |
| | | EAMQELD+FIDQALLNNMGQVDIIHGIGTGVIREGVTKYLRRNKHVKHFAYAPQNAGGSG | |
| Sbjct: | 752 | EAMQELDHFIDQALLNNMGQVDIIHGIGTGVIREGVTKYLRRNKHVKHFAYAPQNAGGSG | 811 |
| Query: | 782 | ATIVTLG | 788 |
| | | ATIVTLG | |
| Sbjct: | 812 | ATIVTLG | 818 |

[9010] Based on this analysis, it was predicted that these proteins and their epitopes could be useful antigens for vaccines or diagnostics.

### EXAMPLE 1636

[9011] A DNA sequence (GBSx1731) was identified in S. agalactiae <SEQ ID 5057> which encodes the amino acid sequence <SEQ ID 5058>. This protein is predicted to be thioredoxin (trxA). Analysis of this protein sequence reveals the following:

```
Possible site: 48
>>> Seems to have no N-terminal signal sequence
----- Final Results -----
                            bacterial cytoplasm --- Certainty = 0.2721(Affirmative) < succ>
                              bacterial membrane --- Certainty = 0.0000(Not Clear) < succ>
                                bacterial outside --- Certainty = 0.0000(Not Clear) < succ>
```

[9012] A related GBS nucleic acid sequence <SEQ ID 10115> which encodes amino acid sequence <SEQ ID 10116> was also identified.

[9013] The protein has homology with the following sequences in the GENPEPT database.

| >GP: CAB40815 GB: AJ133006 thioredoxin [Listeria monocytogenes] (ver | | | |
|---|---|---|---|
| 2) | | | |
| Identities = 64/100 (64%), Positives = 78/100 (78%), Gaps = 1/100 (1%) | | | |
| Query: | 15 | MALEVTDATFVEETKEGLVLIDFWATWCGPCRMQAPILEQLSQEIDEDELKILKMDVDEN | 74 |
| | | M E+TDATF +ET EGLVL DFWATWCGPCRM AP+LE++ +E E LKI+KMDVDEN | |
| Sbjct: | 1 | MVKEITDATFEQETSEGLVLTDFWATWCGPCRMVAPVLEEIQEERGE-ALKIVKMDVDEN | 59 |
| Query: | 75 | PETARQFGIMSIPTLMFKKDGEVVKQVAGVHTKDQLKAII | 114 |
| | | PET FG+MSIPTL+ KKDGEVV+ + G K++L +I | |
| Sbjct: | 60 | PETPGSFGVMSIPTLLIKKDGEVVETIIGYRPKEELDEVI | 99 |

[9014] A related DNA sequence was identified in S. pyogenes <SEQ ID 5059> which encodes the amino acid sequence <SEQ ID 5060>. Analysis of this protein sequence reveals the following:

```
Possible site: 48
>>> Seems to have no N-terminal signal sequence
----- Final Results -----
                            bacterial cytoplasm --- Certainty = 0.2721(Affirmative) < succ>
                              bacterial membrane --- Certainty = 0.0000(Not Clear) < succ>
                                bacterial outside --- Certainty = 0.0000(Not Clear) < succ>
```

[9015] Based on this analysis, it was predicted that these proteins and their epitopes could be useful antigens for vaccines or diagnostics.

### EXAMPLE 1637

[9016] A DNA sequence (GBSx1732) was identified in S. agalactiae <SEQ ID 5061> which encodes the amino acid sequence <SEQ ID 5062>. Analysis of this protein sequence reveals the following:

| Possible site: 33 | | | | |
|---|---|---|---|---|
| >>> Seems to have no N-terminal signal sequence | | | | |
| | INTEGRAL | Likelihood = −7.54 | Transmembrane | 170-186 (167-191) |
| | INTEGRAL | Likelihood = −5.52 | Transmembrane | 87-103 (86-107) |
| | INTEGRAL | Likelihood = −4.62 | Transmembrane | 105-121 (104-126) |

```
----- Final Results -----
                              bacterial membrane --- Certainty = 0.4015(Affirmative) < succ>
                                bacterial outside --- Certainty = 0.0000(Not Clear) < succ>
                            bacterial cytoplasm --- Certainty = 0.0000(Not Clear) < succ>
```

[9017] The protein has homology with the following sequences in the GENPEPT database.

| >GP: CAA60798 GB: X87369 ORF3 [Clostridium perfringens] | | | |
|---|---|---|---|
| Identities = 27/67 (40%), Positives = 52/67 (77%) | | | |
| Query: | 1 | MEIGQQIIRYRKQQALSQEELAEKVYVSRQSISNWENDKTYPDIHSLLLLSQIFQVSLDQ | 60 |
| | | M++ +++ RK++ LSQE+LAEK+ +SRQ++S WE+ ++ PD++ L++LS+++ V++D | |
| Sbjct: | 1 | MKLAEKLQLMRKREGLSQEDLAEKLGISRQAVSKWESGQSVPDLNKLIILSELYNVTIDY | 60 |
| Query: | 61 | LIKGDIE | 67 |
| | | L+K E | |
| Sbjct: | 61 | LVKETYE | 67 |

[9018] A related DNA sequence was identified in S. pyogenes <SEQ ID 1739> which encodes the amino acid sequence <SEQ ID 1740>. Analysis of this protein sequence reveals the following:

| Possible site: 36 | | | | |
|---|---|---|---|---|
| >>> Seems to have no N-terminal signal sequence | | | | |
| | INTEGRAL | Likelihood = −8.86 | Transmembrane | 173-189 (169-194) |
| | INTEGRAL | Likelihood = −5.52 | Transmembrane | 90-106 (89-110) |
| | INTEGRAL | Likelihood = −4.62 | Transmembrane | 108-124 (107-129) |

```
----- Final Results -----
                              bacterial membrane --- Certainty = 0.4545(Affirmative) < succ>
                                bacterial outside --- Certainty = 0.0000(Not Clear) < succ>
                            bacterial cytoplasm --- Certainty = 0.0000(Not Clear) < succ>
```

[9019] An alignment of the GAS and GBS proteins is shown below.

| Identities = 187/195 (95%), Positives = 191/195 (97%) | | | |
|---|---|---|---|
| Query: | 1 | MEIGQQIIRYRKQQALSQEELAEKVYVSRQSISNWENDKTYPDIHSLLLLSQIFQVSLDQ | 60 |
| | | MEIGQQIIRYRKQQALSQE+LAEKVYVSRQSISNWENDKTYPDIHSLLLLSQIFQVSLDQ | |
| Sbjct: | 4 | MEIGQQIIRYRKQQALSQEKLAEKVYVSRQSISNWENDKTYPDIHSLLLLSQIFQVSLDQ | 63 |
| Query: | 61 | LIKGDIEKMKYTITQVDKKNFERDTKVMVTLMILLMISSYPLVYFLEWLGLGIFVLLSII | 120 |
| | | LIKGDIEKMKYTITQVDKKNF+RDTKVMVTLMILLMISSYPLVYFLEWLGLGIFVLLSII | |
| Sbjct: | 64 | LIKGDIEKMKYTITQVDKKNFKRDTKVMVTLMILLMISSYPLVYFLEWLGLGIFVLLSII | 123 |
| Query: | 121 | TMTYANRVERFKKKYDVQTYKEILAVSSGKLLDEIEKREERAKLPYQKPLIVTVFFLITV | 180 |
| | | TMTYANRVERFKKKYDVQ YKEILAVS+GKLLDEIEKREERA LPYQKPLIVTVFFLITV | |
| Sbjct: | 124 | TMTYANRVERFKKKYDVQPYKEILAVSNGKLLDEIEKREERATLPYQKPLIVTVFFLITV | 183 |
| Query: | 181 | ATFFASRFIFTWLFH | 195 |
| | | A FASRF+FTWLFH | |
| Sbjct: | 184 | AFAFASRFMFTWLFH | 198 |

[9020] Based on this analysis, it was predicted that these proteins and their epitopes could be useful antigens for vaccines or diagnostics.

### EXAMPLE 1638

[9021] A DNA sequence (GBSx1733) was identified in S. agalactiae <SEQ ID 5063> which encodes the amino acid sequence <SEQ ID 5064>. This protein is predicted to be adenine glycosylase (mutY). Analysis of this protein sequence reveals the following:

```
Possible site: 30
>>> Seems to have no N-terminal signal sequence
----- Final Results -----
                            bacterial cytoplasm --- Certainty = 0.2385(Affirmative) < succ>
                              bacterial membrane --- Certainty = 0.0000(Not Clear) < succ>
                                bacterial outside --- Certainty = 0.0000(Not Clear) < succ>
```

[9022] A related GBS nucleic acid sequence <SEQ ID 9425> which encodes amino acid sequence <SEQ ID 9426> was also identified.

[9023] The protein has homology with the following sequences in the GENPEPT database.

| >GP: BAB04650 GB: AP001510 adenine glycosylase [Bacillus halodurans] | | | |
|---|---|---|---|
| Identities = 130/331 (39%), Positives = 190/331 (57%), Gaps = 15/331 (4%) | | | |
| Query: | 1 | MLQQTQVNTVIPYYKRFLEWFPQIKDLADAPEEQLLKAWEGLGYYSRVRNMQKAAQQVMV | 60 |
| | | MLQQT+V+TVIPYY+ F+ FP ++ LA A E+Q+LKAWEGLGYYSR RN+Q A ++V+ | |
| Sbjct: | 45 | MLQQTRVDTVIPYYQAFMRQFPTLETLAYAEEDQVLKAWEGLGYYSRARNLQSAVREVVE | 104 |
| Query: | 61 | DFGGIFPHTYDDIASLKGIGPYTAGAIASISFNLPEPAVDGNVMRVMARLFEVNYDIGDP | 120 |
| | | +GG P T +I+ LKG+GPYTAGAI SI+++ PEPAVDGNVMRV++R+ + DI | |
| Sbjct: | 105 | SYGGEVPSTRKEISKLKGVGPYTAGAILSIAYDQPEPAVDGNVMRVLSRVLYIEEDIAKV | 164 |
| Query: | 121 | KNRKIFQAIMEILIDPDRPGDFNQALMDLGTDIESAKTPRPDESPIRFFNAAYLNGTYSK | 180 |
| | | K R +F++++ LI + P FNQ LM+LG + + +P P+R A+ G + | |
| Sbjct: | 165 | KTRTLFESLLYDLISKENPSFFNQGLMELGALVCTPTSPGCLLCPVRDHCRAFAAGVQEQ | 224 |
| Query: | 181 | YPIKNTKKKPKPMRIQAFVIRNQNGQYLLEKNTKGRLLGGFWSFPIIETSPLSQQLDLFD | 240 |
| | | PIK KKKPK ++ A VIRN+ GQ L+E+ + LL W FP +E L | |
| Sbjct: | 225 | LPIKAKKKKPKAKQLIAAVIRNEKGQVLIERRPEKGLLAKLWQFPNVE---------LES | 275 |
| Query: | 241 | DNQSNPIIWQTQNETFQREYQLKPQWTDNHFPNIKHTFSHQKWTIELIEGVVKAT-DLPN | 299 |
| | | + ++ +E F + + + ++H FSH W I + E VK L + | |
| Sbjct: | 276 | TKNAQQVLGDYIHERFHLDAAV-----GEYVQTVEHVFSHLIWNIRVYEATVKGVPSLND | 330 |
| Query: | 300 | APHLKWVAIEDFSLYPFATPQKKMLETYLKQ | 330 |
| | | WV Y F +K+++ L++ | |
| Sbjct: | 331 | KYEADWVDDRTIENYAFPVSHQKIIQGNLRK | 361 |

[9024] A related DNA sequence was identified in S. pyogenes <SEQ ID 5065> which encodes the amino acid sequence <SEQ ID 5066>. Analysis of this protein sequence reveals the following:

```
Possible site: 60
>>> Seems to have no N-terminal signal sequence
----- Final Results -----
                            bacterial cytoplasm --- Certainty = 0.3579(Affirmative) < succ>
                              bacterial membrane --- Certainty = 0.0000(Not Clear) < succ>
                                bacterial outside --- Certainty = 0.0000(Not Clear) < succ>
```

[9025] An alignment of the GAS and GBS proteins is shown below.

| Identities = 330/333 (99%), Positives = 331/333 (99%) | | | |
|---|---|---|---|
| Query: | 1 | MLQQTQVNTVIPYYKRFLEWFPQIKDLADAPEEQLLKAWEGLGYYSRVRNMQKAAQQVMV | 60 |
| | | MLQQTQVNTVIPYYKRFLEWFPQIKDLADAPEEQLLKAWEGLGYYSRVRNMQKAAQQVMV | |
| Sbjct: | 52 | MLQQTQVNTVIPYYKRFLEWFPQIKDLADAPEEQLLKAWEGLGYYSRVRNMQKAAQQVMV | 111 |
| Query: | 61 | DFGGIFPHTYDDIASLKGIGPYTAGAIASISFNLPEPAVDGNVMRVMARLFEVNYDIGDP | 120 |
| | | DFGGIFPHTYDDIASLKGIGPYTAGAIASISFNLPEPAVDGNVMRVMARLFEVNYDIGDP | |
| Sbjct: | 112 | DFGGIFPHTYDDIASLKGIGPYTAGAIASISFNLPEPAVDGNVMRVMARLFEVNYDIGDP | 171 |
| Query: | 121 | KNRKIFQAIMEILIDPDRPGDFNQALMDLGTDIESAKTPRPDESPIRFFNAAYLNGTYSK | 180 |
| | | KNRKIFQAIMEILIDPDRPGDFNQALMDLGTDIESAKTPRPDESPIRFFNAAYLNGTY K | |
| Sbjct: | 172 | KNRKIFQAIMEILIDPDRPGDFNQALMDLGTDIESAKTPRPDESPIRFFNAAYLNGTYGK | 231 |
| Query: | 181 | YPIKNTKKKPKPMRIQAFVIRNQNGQYLLEKNTKGRLLGGFWSFPIIETSPLSQQLDLFD | 240 |
| | | YPIKN KKKPKPMRIQAFVIRNQNGQYLLEKNTKGRLLGGFWSFPIIETSPLSQQLDLFD | |
| Sbjct: | 232 | YPIKNPKKKPKPMRIQAFVIRNQNGQYLLEKNTKGRLLGGFWSFPIIETSPLSQQLDLFD | 291 |
| Query: | 241 | DNQSNPIIWQTQNETFQREYQLKPQWTDNHFPNIKHTFSHQKWTIELIEGVVKATDLPNA | 300 |
| | | DNQSNPIIWQTQNETF+REYQLKPQWTDNHFPNIKHTFSHQKWTIELIEGVVKATDLPNA | |
| Sbjct: | 292 | DNQSNPIIWQTQNETFEREYQLKPQWTDNHFPNIKHTFSHQKWTIELIEGVVKATDLPNA | 351 |
| Query: | 301 | PHLKWVAIEDFSLYPFATPQKKMLETYLKQKNA | 333 |
| | | PHLKWVAIEDFSLYPFATPQKKMLETYLKQKNA | |
| Sbjct: | 352 | PHLKWVAIEDFSLYPFATPQKKMLETYLKQKNA | 384 |

[9026] Based on this analysis, it was predicted that these proteins and their epitopes could be useful antigens for vaccines or diagnostics.

### EXAMPLE 1639

[9027] A DNA sequence (GBSx1734) was identified in S. agalactiae <SEQ ID 5067> which encodes the amino acid sequence <SEQ ID 5068>. This protein is predicted to be maltose/maltodextrin transport system (malG). Analysis of this protein sequence reveals the following:

| Possible site: 52 | | | | |
|---|---|---|---|---|
| >>> Seems to have an uncleavable N-term signal seq | | | | |
| | INTEGRAL | Likelihood = −10.30 | Transmembrane | 14-30 (5-35) |
| | INTEGRAL | Likelihood = −6.95 | Transmembrane | 248-264 (242-267) |
| | INTEGRAL | Likelihood = −5.15 | Transmembrane | 75-91 (74-94) |
| | INTEGRAL | Likelihood = −3.19 | Transmembrane | 110-126 (110-127) |
| | INTEGRAL | Likelihood = −2.13 | Transmembrane | 141-157 (138-157) |
| | INTEGRAL | Likelihood = −0.32 | Transmembrane | 188-204 (188-204) |

```
----- Final Results -----
                              bacterial membrane --- Certainty = 0.5118(Affirmative) < succ>
                                bacterial outside --- Certainty = 0.0000(Not Clear) < succ>
                            bacterial cytoplasm --- Certainty = 0.0000(Not Clear) < succ>
```

[9028] The protein has homology with the following sequences in the GENPEPT database.

| >GP: BAB06643 GB: AP001517 maltose/maltodextrin transport system | | | |
|---|---|---|---|
| (permease) [Bacillus halodurans] | | | |
| Identities = 117/281 (41%), Positives = 169/281 (59%), Gaps = 5/281 (1%) | | | |
| Query: | 1 | MNKK--KRLNLTFVYILLIVLSIMWLFPIVWVVLTSFRGEGSAFVNYFIPKTWTLDNYAK | 58 |
| | | MNKK RL +T +Y+ L+V+ I+ L+P++W V S S F + IP+T + +Y | |
| Sbjct: | 1 | MNKKVKSRLEVTAIYLFLLVMGIVILYPLLWTVGLSLNPGTSLFSSRMIPETISFRHYEW | 60 |
| Query: | 59 | LFTQNTFPFGQWFLNTLFVATCTCILSTLITVAMAYSLSRIKFKHRNGFLKLALVLNMFP | 118 |
| | | LF + QW+ NTL VA+ T + ST + AY+ SR +F R L L+L MFP | |
| Sbjct: | 61 | LFFDPRSNYLQWYKNTLIVASVTSVCSTFLVALTAYAFSRYRFVGRTYGLYGFLLLQMFP | 120 |
| Query: | 119 | GFMSMIAVYYILKALNLDQTLTALIFVY-SAGAALTFYIAKGFFDTIPYSLDESAMIDGA | 177 |
| | | M+M+A+Y +L +NL TL LI +Y + ++ KG+FDTIP LDESA +DGA | |
| Sbjct: | 121 | VLMAMVALYILLNTVNLLDTLLGLILIYVGTSIPMNAFLVKGYFDTIPRELDESAKLDGA | 180 |
| Query: | 178 | TRLDIFLKITLPLSKPIIVYTALIAFMGPWMDFIFAKVILGDATSKYTVAIGLFSMLQQD | 237 |
| | | IF I LPL+KPI+ AL FM P+MDFI ++IL + YT+A+GLF+ + | |
| Sbjct: | 181 | GHFRIFFTIMLPLAKPILAVVALFNFMSPFMDFILPRIIL-RSPENYTLALGLFNFVNDQ | 239 |
| Query: | 238 | TINQWFMSFTAGSVIIAIPITILFMFMQKYYVEGITGGSVK | 278 |
| | | N F F AG+++IAIPI +F+F+Q+Y + G+T G+ K | |
| Sbjct: | 240 | FANN-FTRFAAGAILIAIPIATVFLFLQRYLISGLTTGATK | 279 |

[9029] A related DNA sequence was identified in S. pyogenes <SEQ ID 5069> which encodes the amino acid sequence <SEQ ID 5070>. Analysis of this protein sequence reveals the following:

| Possible site: 39 | | | | |
|---|---|---|---|---|
| >>> Seems to have a cleavable N-term signal seq. | | | | |
| | INTEGRAL | Likelihood = −6.42 | Transmembrane | 76-92 (71-97) |
| | INTEGRAL | Likelihood = −6.05 | Transmembrane | 248-264 (242-267) |
| | INTEGRAL | Likelihood = −3.50 | Transmembrane | 110-126 (110-127) |
| | INTEGRAL | Likelihood = −1.33 | Transmembrane | 129-145 (129-145) |
| | INTEGRAL | Likelihood = −1.33 | Transmembrane | 188-204 (188-204) |

```
----- Final Results -----
                              bacterial membrane --- Certainty = 0.3569(Affirmative) < succ>
                                bacterial outside --- Certainty = 0.0000(Not Clear) < succ>
                            bacterial cytoplasm --- Certainty = 0.0000(Not Clear) < succ>
```

[9030] The protein has homology with the following sequences in the databases:

| >GP: CAA60006 GB: X86014 cymG [Klebsiella oxytoca] | | | |
|---|---|---|---|
| Identities = 119/270 (44%), Positives = 172/270 (63%), Gaps = 7/270 (2%) | | | |
| Query: | 11 | LVYATLIILSIIWLFPIAWVILTSFRSEGTAYVNYFIPKTFTLNHYINLFTNETFPFGKW | 70 |
| | | LVY L++ +++ L P+ W +++S + + + F +FTL HY NL T P+ KW | |
| Sbjct: | 12 | LVYLFLLLNALVVLGPVIWTVMSSLKPGNNLFSSGFTEISFTLEHYHNLLTGT--PYLKW | 69 |
| Query: | 71 | FMNTLIVATFTCIISTFITVAIAYSLSRIKFKFRNGFLKLALILNMFPGFMSMIAIYYIL | 130 |
| | | + NT I+AT +IS + A+ SR +FK + L L+L MFP F+SM AIY +L | |
| Sbjct: | 70 | YKNTFILATCNMLISLVVVTITAFIFSRYRFKAKKKILMSILVLQMFPAFLSMTAIYILL | 129 |
| Query: | 131 | KALGLTQTLTALVLVYSSGAALGF--YIAKGFFDTIPYSLDESAMIDGATRMDIFFKITL | 188 |
| | | + L T L+LVY +G+ L F ++ KG+FD IP SLDE+A IDGA + IFF+I L | |
| Sbjct: | 130 | SKMNLIDTYIGLLLVYVTGS-LPFMTWLVKGYFDAIPTSLDEAAKIDGAGHLTIFFEIIL | 188 |
| Query: | 189 | PLAKPIIVYTALLAFMGPWIDFIFAQVILGDATSKYTVAIGLFSMLQPDTINNWFMAFTA | 248 |
| | | PLAKPI+V+ AL++F GPW+DFI +IL + K T+AIG+FS + ++ N F F A | |
| Sbjct: | 189 | PLAKPILVFVALVSFTGPWMDFILPTLIL-RSEDKMTLAIGIFSWISSNSAEN-FTLFAA | 246 |
| Query: | 249 | GSVLIAVPITLLFMFMQKYYVEGITGGSVK | 278 |
| | | G++L+AVPITLLF+ QK+ G+ G+VK | |
| Sbjct: | 247 | GALLVAVPITLLFIVTQKHITTGLVSGAVK | 276 |

[9031] An alignment of the GAS and GBS proteins is shown below.

| Identities = 227/278 (81%), Positives = 253/278 (90%) | | | |
|---|---|---|---|
| Query: | 1 | MNKKKRLNLTFVYILLIVLSIMWLFPIVWVVLTSFRGEGSAFVNYFIPKTWTLDNYAKLF | 60 |
| | | M K+R L VY LI+LSI+WLFPI WV+LTSFR EG+A+VNYFIPKT+TL++Y LF | |
| Sbjct: | 1 | MKNKRRFQLGLVYATLIILSIIWLFPIAWVILTSFRSEGTAYVNYFIPKTFTLNHYINLF | 60 |
| Query: | 61 | TQNTFPFGQWFLNTLFVATCTCILSTLITVAMAYSLSRIKFKHRNGFLKLALVLNMFPGF | 120 |
| | | T TFPFG+WF+NTL VAT TCI+ST ITVA+AYSLSRIKFK RNGFLKLAL+LNMFPGF | |
| Sbjct: | 61 | TNETFPFGKWFMNTLIVATFTCIISTFITVAIAYSLSRIKFKFRNGFLKLALILNMFPGF | 120 |
| Query: | 121 | MSMIAVYYILKALNLDQTLTALIFVYSAGAALTFYIAKGFFDTIPYSLDESAMIDGATRL | 180 |
| | | MSMIA+YYILKAL L QTLTAL+ VYS+GAAL FYIAKGFFDTIPYSLDESAMIDGATR+ | |
| Sbjct: | 121 | MSMIAIYYILKALGLTQTLTALVLVYSSGAALGFYIAKGFFDTIPYSLDESAMIDGATRM | 180 |
| Query: | 181 | DIFLKITLPLSKPIIVYTALIAFMGPWMDFIFAKVILGDATSKYTVAIGLFSMLQQDTIN | 240 |
| | | DIF KITLPL+KPIIVYTAL+AFMGPW+DFIFA+VILGDATSKYTVAIGLFSMLQ DTIN | |
| Sbjct: | 181 | DIFFKITLPLAKPIIVYTALLAFMGPWIDFIFAQVILGDATSKYTVAIGLFSMLQPDTIN | 240 |
| Query: | 241 | QWFMSFTAGSVIIAIPITILFMFMQKYYVEGITGGSVK | 278 |
| | | WFM+FTAGSV+IA+PIT+LFMFMQKYYVEGITGGSVK | |
| Sbjct: | 241 | NWFMAFTAGSVLIAVPITLLFMFMQKYYVEGITGGSVK | 278 |

[9032] Based on this analysis, it was predicted that these proteins and their epitopes could be useful antigens for vaccines or diagnostics.

### EXAMPLE 1640

[9033] A DNA sequence (GBSx1735) was identified in S. agalactiae <SEQ ID 5071> which encodes the amino acid sequence <SEQ ID 5072>. This protein is predicted to be cymF protein (malF). Analysis of this protein sequence reveals the following:

| Possible site: 36 | | | |
|---|---|---|---|
| >>> Seems to have no N-terminal signal sequence | | | |
| INTEGRAL | Likelihood = −11.46 | Transmembrane | 427-443 (417-447) |
| INTEGRAL | Likelihood = −10.24 | Transmembrane | 99-115 (96-121) |
| INTEGRAL | Likelihood = −9.39 | Transmembrane | 166-182 (154-185) |
| INTEGRAL | Likelihood = −6.21 | Transmembrane | 259-275 (257-276) |
| INTEGRAL | Likelihood = −6.21 | Transmembrane | 229-245 (223-247) |
| INTEGRAL | Likelihood = −6.10 | Transmembrane | 44-60 (40-66) |
| INTEGRAL | Likelihood = −4.51 | Transmembrane | 314-330 (312-331) |

----- Final Results -----
bacterial membrane --- Certainty = 0.5585 (Affirmative) < succ>
bacterial outside --- Certainty = 0.0000 (Not Clear) < succ>
bacterial cytoplasm --- Certainty = 0.0000 (Not Clear) < succ>

[9034] The protein has homology with the following sequences in the GENPEPT database.

| >GP: CAA60005 GB: X86014 cymF [Klebsiella oxytoca] | | | |
|---|---|---|---|
| Identities = 174/428 (40%), Positives = 263/428 (60%), Gaps = 21/428 (4%) | | | |
| Query: | 27 | SFLIMGLANLKNKQIVKGLLFLISEILFLITFVYQVIPAVKGLISLGTQEQGMTTKTVDG | 86 |
| | | SFLIMG L + +KG +FL+ +I+ +I+ + ++ A +GLI+LGT Q T G | |
| Sbjct: | 15 | SFLIMGATQLISGHWIKGSVFLLFQIV-VISNINLLLNATQGLITLGTVAQ-----TRSG | 68 |
| Query: | 87 | IKIQVATQGDNSMLMLIFGLASLIFCCVFAYIYWSNIKSAAHLLTLKEEGREIPSFKKDI | 146 |
| | | I GDNS+ ML+ G+ + IF ++YW NIK A + SF + + | |
| Sbjct: | 69 | FDI---VAGDNSIFMLVEGVVAFIFLFFSIFVYWLNIKDAQVCEKCHQ------SFTEQL | 119 |
| Query: | 147 | KSLTDGRFHMTLMSIPLIGVLLFTILPLVYMICLAFTNYDH-NHLPPKSLFDWVGFANFG | 205 |
| | | +++ D RF +++ I + F I+P++ + ++ TNY +H+PPK+L DWVG NF | |
| Sbjct: | 120 | RTIYDNRFATIMLAPAFIACIAFIIMPMIITVLVSLTNYSAPHHIPPKNLVDWVGLKNFI | 179 |
| Query: | 206 | NIFSGRMAS-TFFPVLSWTLIWAVFATVTNFFFGIILALLINTKGLKFKKMWRTIFVITM | 264 |
| | | +F R+ S TF + WT++WA FAT+ FG +LAL + K + KK WR +F++ | |
| Sbjct: | 180 | TLFELRIWSKTFVGIGVWTVLWAFFATLCTCSFGFLLALALENKKIIAKKAWRVVFILPY | 239 |
| Query: | 265 | AVPQFISLLIMRNLLSDAGPVNALLIKWGLISSAHPLPFLSDPVWAKFSIIFVNMWVGIP | 324 |
| | | A+P F++LLI R LL+ GPVN+ L WG+ S + FLSDP+ AK ++I V++WVG P | |
| Sbjct: | 240 | AIPAFVTLLIFRLLLNGIGPVNSTLNSWGIDS----IGFLSDPLIAKMTVIAVSVWVGAP | 295 |
| Query: | 325 | VTMLVATGIIMNLPAEQIEAAEIDGANKFQVFQSITFPQILLIMTPTLIQQFIGNINNFN | 384 |
| | | ML+ TG + N+P + EA+E+DGA+KFQ F+ IT P +L + P+L+ F N NNF | |
| Sbjct: | 296 | YFMLLITGAMTNIPRDLYEASEVDGASKFQQFREITLPMVLHQVAPSLVMTFAHNFNNFG | 355 |
| Query: | 385 | VIYLLTQGGPTNSTYYQAGSTDLLVTWLYNLTVTAADYNLASVVGILIFILSAVFSLLAY | 444 |
| | | IYLLT+GGP N Y AG TD+L+TW+Y LT+ Y +ASV+ I+IF+ ++F++ + | |
| Sbjct: | 356 | AIYLLTEGGPINPEYRFAGHTDILITWIYKLTLDFQQYQIASVISIIIFLFLSIFAIWQF | 415 |
| Query: | 445 | TRTNSYKE | 452 |
| | | R S+KE | |
| Sbjct: | 416 | RRMKSFKE | 423 |

[9035] A related DNA sequence was identified in S. pyogenes <SEQ ID 5073> which encodes the amino acid sequence <SEQ ID 5074>. Analysis of this protein sequence reveals the following:

| Possible site: 36 | | | |
|---|---|---|---|
| >>> Seems to have no N-terminal signal sequence | | | |
| INTEGRAL | Likelihood = −10.93 | Transmembrane | 98-114 (95-122) |
| INTEGRAL | Likelihood = −9.55 | Transmembrane | 165-181 (152-184) |
| INTEGRAL | Likelihood = −9.24 | Transmembrane | 424-440 (419-443) |
| INTEGRAL | Likelihood = −7.91 | Transmembrane | 43-59 (39-71) |
| INTEGRAL | Likelihood = −7.59 | Transmembrane | 258-274 (256-275) |
| INTEGRAL | Likelihood = −6.21 | Transmembrane | 228-244 (222-246) |
| INTEGRAL | Likelihood = −4.09 | Transmembrane | 311-327 (309-328) |

----- Final Results -----
bacterial membrane --- Certainty = 0.5373 (Affirmative) < succ>
bacterial outside --- Certainty = 0.0000 (Not Clear) < succ>
bacterial cytoplasm --- Certainty = 0.0000 (Not Clear) < succ>

[9036] The protein has homology with the following sequences in the databases:

| >GP: CAA60005 GB: X86014 cymF [Klebsiella oxytoca] | | | |
|---|---|---|---|
| Identities = 179/426 (42%), Positives = 266/426 (62%), Gaps = 19/426 (4%) | | | |
| Query: | 26 | SSIIMGFANFANKQFIKGILFLISELIFLVAFVSQIIPAIRGLVTLGTQTQGMTTKTIDG | 85 |
| | | S +IMG + +IKG +FL+ +++ +++ ++ ++ A +GL+TLGT Q T G | |
| Sbjct: | 15 | SFLIMGATQLISGHWIKGSVFLLFQIV-VISNINLLLNATQGLITLGTVAQ-----TRSG | 68 |
| Query: | 86 | INIQVAVDGDNSMLMLIFGLASLIFCLVFAYIYWCNLKSARNLYLFKQKGQKIPSFKEDL | 145 |
| | | +I V GDNS+ ML+ G+ + IF ++YW N+K A+ Q SF E L | |
| Sbjct: | 69 | FDI---VAGDNSIFMLVEGVVAFIFLFFSIFVYWLNIKDAQVCEKCHQ------SFTEQL | 119 |
| Query: | 146 | ATLTNGRFHMTLMAIPLIGVLLFTILPLIYMICLAFTNFDH-NHLPPKSLFDWVGLANFG | 204 |
| | | T+ + RF ++A I + F I+P+I + ++ TN+ +H+PPK+L DWVGL NF | |
| Sbjct: | 120 | RTIYDNRFATIMLAPAFIACIAFIIMPMIITVLVSLTNYSAPHHIPPKNLVDWVGLKNFI | 179 |
| Query: | 205 | NVLSGRM-AGTFFPIFSWTLIWAVFATVTNFFFGIILALLINTKGLKWKKMWRTIFVITI | 263 |
| | | + R+ + TF I WT++WA FAT+ FG +LAL + K + KK WR +F++ | |
| Sbjct: | 180 | TLFELRIWSKTFVGIGVWTVLWAFFATLCTCSFGFLLALALENKKIIAKKAWRVVFILPY | 239 |
| Query: | 264 | AVPQFISLLIMRNLLNDEGPLNALLNKIGLINGSLPFLSDPLWAKFSIIFVNMWIGIPFT | 323 |
| | | A+P F++LLI R LLN GP+N+ LN G+ S+ FLSDPL AK ++I V++W+G P+ | |
| Sbjct: | 240 | AIPAFVTLLIFRLLLNGIGPVNSTLNSWGI--DSIGFLSDPLIAKMTVIAVSVWVGAPYF | 297 |
| Query: | 324 | MLIATGIIMNLPSEQIEAAEIDGASKFQVFKSITFPQILLIMTPNLIQQFIGNINNFNVI | 383 |
| | | ML+ TG + N+P + EA+E+DGASKFQ F+ IT P +L + P+L+ F N NNF I | |
| Sbjct: | 298 | MLLITGAMTNIPRDLYEASEVDGASKFQQFREITLPMVLHQVAPSLVMTFAHNFNNFGAI | 357 |
| Query: | 384 | YLLTGGGPTNSEYYQAGTTDLLVTWLYKLTVTAADYNLASVIGILIFTVSAIFSLLAYTR | 443 |
| | | YLLT GGP N EY AG TD+L+TW+YKLT+ Y +ASVI I+IF +IF++ + R | |
| Sbjct: | 358 | YLLTEGGPINPEYRFAGHTDILITWIYKLTLDFQQYQIASVISIIIFLFLSIFAIWQFRR | 417 |
| Query: | 444 | TASYKE | 449 |
| | | S+ KE | |
| Sbjct: | 418 | MKSFKE | 423 |

[9037] An alignment of the GAS and GBS proteins is shown below.

| Identities = 357/446 (80%), Positives = 404/446 (90%), Gaps = 2/446 (0%) | | | |
|---|---|---|---|
| Query: | 11 | MSLKEVFQKGDLATKLSFLIMGLANLKNKQIVKGLLFLISEILFLITFVYQVIPAVKGLI | 70 |
| | | +S+ E ++G KLS +IMG AN NKQ +KG+LFLISE++FL+ FV Q+IPA++GL+ | |
| Sbjct: | 10 | ISVIEALKRGSWDIKLSSIIMGFANFANKQFIKGILFLISELIFLVAFVSQIIPAIRGLV | 69 |
| Query: | 71 | SLGTQEQGMTTKTVDGIKIQVATQGDNSMLMLIFGLASLIFCCVFAYIYWSNIKSAAHLL | 130 |
| | | +LGTQ QGMTTKT+DGI IQVA GDNSMLMLIFGLASLIFC VFAYIYW N+KSA +L | |
| Sbjct: | 70 | TLGTQTQGMTTKTIDGINIQVAVDGDNSMLMLIFGLASLIFCLVFAYIYWCNLKSAPNLY | 129 |
| Query: | 131 | TLKEEGREIPSFKKDIKSLTDGRFHMTLMSIPLIGVLLFTILPLVYMICLAFTNYDHNHL | 190 |
| | | K++G++IPSFK+D+ +LT+GRFHMTLM+IPLIGVLLFTILPL+YMICLAFTN+DHNHL | |
| Sbjct: | 130 | LFKQKGQKIPSFKEDLATLTNGRFHMTLMAIPLIGVLLFTILPLIYMICLAFTNFDHNHL | 189 |
| Query: | 191 | PPKSLFDWVGFANFGNIFSGRMASTFFPVLSWTLIWAVFATVTNFFFGIILALLINTKGL | 250 |
| | | PPKSLFDWVG ANFGN+ SGRMA TFFP+ SWTLIWAVFATVTNFFFGIILALLINTKGL | |
| Sbjct: | 190 | PPKSLFDWVGLANFGNVLSGRMAGTFFPIFSWTLIWAVFATVTNFFFGIILALLINTKGL | 249 |
| Query: | 251 | KFKKMWRTIFVITMAVPQFISLLIMRNLLSDAGPVNALLIKWGLISSAHPLPFLSDPVWA | 310 |
| | | K+KKMWRTIFVIT+AVPQFISLLIMRNLL+D GP+NALL K GLI+ + LPFLSDP+WA | |
| Sbjct: | 250 | KWKKMWRTIFVITIAVPQFISLLIMRNLLNDEGPLNALLNKIGLINGS--LPFLSDPLWA | 307 |
| Query: | 311 | KFSIIFVNMWVGIPVTMLVATGIIMNLPAEQIEAAEIDGANKFQVFQSITFPQILLIMTP | 370 |
| | | KFSIIFVNMW+GIP TML+ATGIIMNLP+EQIEAAEIDGA+KFQVF+SITFPQILLIMTP | |
| Sbjct: | 308 | KFSIIFVNMWIGIPFTMLIATGIIMNLPSEQIEAAEIDGASKFQVFKSITFPQILLIMTP | 367 |
| Query: | 371 | TLIQQFIGNINNFNVIYLLTQGGPTNSTYYQAGSTDLLVTWLYNLTVTAADYNLASVVGI | 430 |
| | | LIQQFIGNINNFNVIYLLT GGPTNS YYQAG+TDLLVTWLY LTVTAADYNLASV+GI | |
| Sbjct: | 368 | NLIQQFIGNINNFNVIYLLTGGGPTNSEYYQAGTTDLLVTWLYKLTVTAADYNLASVIGI | 427 |
| Query: | 431 | LIFILSAVFSLLAYTRTNSYKEGAAK | 456 |
| | | LIF +SA+FSLLAYTRT SYKEGAAK | |
| Sbjct: | 428 | LIFTVSAIFSLLAYTRTASYKEGAAK | 453 |

[9038] A related GBS gene <SEQ ID 8869> and protein <SEQ ID 8870> were also identified. Analysis of this protein sequence reveals the following:

| Lipop: Possible site: −1 Crend: 8 | | |
|---|---|---|
| McG: Discrim Score: −12.73 | | |
| GvH: Signal Score (−7.5): −6.04 | | |
| Possible site: 36 | | |
| >>> Seems to have no N-terminal signal sequence | | |
| ALOM program count: 7 | value: −11.46 | threshold: 0.0 |

| | | | |
|---|---|---|---|
| INTEGRAL | Likelihood = −11.46 | Transmembrane | 427-443 (417-447) |
| INTEGRAL | Likelihood = −9.87 | Transmembrane | 99-115 (96-121) |
| INTEGRAL | Likelihood = −9.39 | Transmembrane | 166-182 (154-185) |
| INTEGRAL | Likelihood = −6.21 | Transmembrane | 259-275 (257-276) |
| INTEGRAL | Likelihood = −6.21 | Transmembrane | 229-245 (223-247) |
| INTEGRAL | Likelihood = −6.10 | Transmembrane | 44-60 (40-66) |
| INTEGRAL | Likelihood = −4.51 | Transmembrane | 314-330 (312-331) |

| | | |
|---|---|---|
| PERIPHERAL | Likelihood = 0.90 | 212 |

modified ALOM score: 2.79
*** Reasoning Step: 3
----- Final Results -----
bacterial membrane --- Certainty = 0.5585 (Affirmative) < succ>
bacterial outside --- Certainty = 0.0000 (Not Clear) < succ>
bacterial cytoplasm --- Certainty = 0.0000 (Not Clear) < succ>

[9039] The protein has homology with the following sequences in the databases:

[chemical structure]

[9040] Based on this analysis, it was predicted that these proteins and their epitopes could be useful antigens for vaccines or diagnostics.

### EXAMPLE 1641

[9041] A DNA sequence (GBSx1736) was identified in S. agalactiae <SEQ ID 5075> which encodes the amino acid sequence <SEQ ID 5076>. This protein is predicted to be maltose/maltodextrin-binding protein precursor. Analysis of this protein sequence reveals the following:

| Possible site: 41 | | | |
|---|---|---|---|
| >>> Seems to have no N-terminal signal sequence | | | |
| INTEGRAL | Likelihood = −3.98 | Transmembrane | 25-41 (24-43) |

----- Final Results -----
bacterial membrane --- Certainty = 0.2593 (Affirmative) < succ>
bacterial outside --- Certainty = 0.0000 (Not Clear) < succ>
bacterial cytoplasm --- Certainty = 0.0000 (Not Clear) < succ>

[9042] A related GBS nucleic acid sequence <SEQ ID 9999> which encodes amino acid sequence <SEQ ID 10000> was also identified.

[9043] The protein has homology with the following sequences in the GENPEPT database.

| >GP: AAA26925 GB: L08611 MalX [Streptococcus pneumoniae] | | | |
|---|---|---|---|
| Identities = 117/418 (27%), Positives = 186/418 (43%), Gaps = 43/418 (10%) | | | |
| Query: | 15 | TKMEKNTWKKLLVSTAALSVVAGGAIAATHSNSVDAASKTTIKLWVPTDSKASYKAIVKK | 74 |
| | | +K K+T V+ A+L +VA G+ A ++ + ++V K+ + + K | |
| Sbjct: | 3 | SKFMKSTAVLGTVTLASLLLVACGSKTADKPADSGSSEVKELTVYVDEGYKSYIEEVAKA | 62 |
| Query: | 75 | FZKE-NKGVTVKMIESNDSKAQENVKKDPSKAADVFSLPHDQLGQLVESGVIQEIPEQYS | 133 |
| | | ++KE VT+K ++ + ++ DV P+D++G L G + E+ + S | |
| Sbjct: | 63 | YEKEAGVKVTLKTGDALGGLDKLSLDNQSGNVPDVMMAPYDRVGSLGSDGQLSEV--KLS | 120 |
| Query: | 134 | KEIAKNDTKQSLTGAQYKGKTYAFPFGIESQVLYYNKTKLTADDVKSYETITSKGKFGXQ | 193 |
| | | +DT +SL A GK Y P IES V+YYNK L D K++ + + K | |
| Sbjct: | 121 | DGAKTDDTTKSLVTAA-NGKVYGAPAVIESLVMYYNKD-LVKDAPKTFADLENLAKDSKY | 178 |
| Query: | 194 | LKAA-------------NSYVTGPXFLSVGDTLFGKSGEDAKGTNWGNEAGVSVL----- | 235 |
| | | A N Y T G +FG++G+DAK N+ ++ + | |
| Sbjct: | 179 | AFAGEDGKTTAFLADWTNFYYTYGLLAGNGAYVFGQNGKDAKDIGLANDGSIAGINYAKS | 238 |
| Query: | 236 | ---KWIADQKKNDGFVNLTAENTMSKFGDGSVHAFESGPWDYDAAKKAVGEDKIGVAVYP | 292 |
| | | KW + +G NL ++F +G A GPW A K A + GVA P | |
| Sbjct: | 239 | WYEKWPKGMQDTEGAGNLI----QTQFQEGKTAAIIDGPWKAQAFKDA--KVNYGVATIP | 292 |
| Query: | 293 | TMKIGDKEVQQKAFLGVKLYAVNQAPAGSNTKRISASYKLAAYLTNAESQKIQFEKRHIV | 352 |
| | | T+ G + AF G K + + QA K + AS K +L E QK+ ++K + + | |
| Sbjct: | 293 | TLPNGK---EYAAFGGGKAWVIPQA-----VKNLEASQKFVDFLVATEQQKVLYDKTNEI | 344 |
| Query: | 353 | PANSSIQSSDSVQKDELAKAVIEMGSSDKYTTVMPKLSQMSTFWTESAAILSDTYSGK | 410 |
| | | PAN+ +S + DEL AVI+ K T +P +SQMS W + +L D SG+ | |
| Sbjct: | 345 | PANTEARSYAEGKNDELTTAVIK---QFKNTQPLPNISQMSAVWDPAKNMLFDAVSGQ | 399 |

[9044] A related DNA sequence was identified in S. pyogenes <SEQ ID 5077> which encodes the amino acid sequence <SEQ ID 5078>. Analysis of this protein sequence reveals the following:

```
Possible site: 28
>>> May be a lipoprotein
----- Final Results -----
                              bacterial membrane --- Certainty = 0.0000(Not Clear) < succ>
                                bacterial outside --- Certainty = 0.0000(Not Clear) < succ>
                            bacterial cytoplasm --- Certainty = 0.0000(Not Clear) < succ>
```

[9045] The protein has homology with the following sequences in the databases:

| >GP: AAA26925 GB: L08611 MalX [Streptococcus pneumoniae] | | | |
|---|---|---|---|
| Identities = 126/423 (29%), Positives = 191/423 (44%), | | | |
| Gaps = 50/423 (11%) | | | |
| Query: | 13 | SLTLASTLLVGCGSGSKDK--KEAGADSKTIKLWVPTGSKKSYADTIAK-FEKDSGYTVK | 69 |
| | | ++TLAS LLV CGS + DK ++ K + ++V G KSY + +AK +EK++G V | |
| Sbjct: | 14 | TVTLASLLLVACGSKTADKPADSGSSEVKELTVYVDEG-YKSYIEEVAKAYEKEAGVKVT | 72 |
| Query: | 70 | VVESEDPKAQEKIKKD--ASTAADVFSLPHDQLGQLVESGTIQEVPEKYNKEIAATSTDQ | 127 |
| | | + + +K+ D + DV P+D++G L G + EV K + T + | |
| Sbjct: | 73 | LKTGDALGGLDKLSLDNQSGNVPDVMMAPYDRVGSLGSDGQLSEV--KLSDGAKTDDTTK | 130 |
| Query: | 128 | ALVGAQYKGKTYAFPFGIESQVLFYNKSKLAAEDVTSYD----TITTKATFGGTFKQ--- | 180 |
| | | +LV A GK Y P IES V++YNK + T D +K F G + | |
| Sbjct: | 131 | SLVTAA-NGKVYGAPAVIESLVMYYNKDLVKDAPKTFADLENLAKDSKYAFAGEDGKTTA | 189 |
| Query: | 181 | -----ANTYATGPLFMSVGNTLFGENGEDVKGTNWGNEKGAAVL--------KWIADQAS | 227 |
| | | N Y T L G +FG+NG+D K N+ A + KW | |
| Sbjct: | 190 | FLADWTNFYYTYGLLAGNGAYVFGQNGKDAKDIGLANDGSIAGINYAKSWYEKWPKGMQD | 249 |
| Query: | 228 | NKGFVSLDANNVMSKFGDGSVASFESGPWDYEAAQKAIGKENLGVAIYPKVTIGGETVQQ | 287 |
| | | +G N + ++F +G A+ GPW +A +A K N GVA P + G E | |
| Sbjct: | 250 | TEG----AGNLIQTQFQEGKTAAIIDGPWKAQAFKDA--KVNYGVATIPTLPNGKE---Y | 300 |
| Query: | 288 | KAFLGVKLYAVNQAPAKGDTKRIAASYKLASYLTNAESQENQFKTRNIVPANKEVQSSEA | 347 |
| | | AF G K + + QA K + AS K +L E Q+ + N +PAN E +S | |
| Sbjct: | 301 | AAFGGGKAWVIPQA-----VKNLEASQKFVDFLVATEQQKVLYDKTNEIPANTEARSYAE | 355 |
| Query: | 348 | VQSNELAKTVITMGSSSDYTVVMPKLSQMGTFWTESAAILSDAFNG----KIKENDYLTK | 403 |
| | | +++EL VI + T +P +SQM W + +L DA +G K ND +T | |
| Sbjct: | 356 | GKNDELTTAVIKQFKN---TQPLPNISQMSAVWDPAKNMLFDAVSGQKDAKTAANDAVTL | 412 |
| Query: | 404 | LQQ | 406 |
| | | +++ | |
| Sbjct: | 413 | IKE | 415 |

[9046] An alignment of the GAS and GBS proteins is shown below.

| Identities = 278/415 (66%), Positives = 334/415 (79%), Gaps = 6/415 (1%) | | | |
|---|---|---|---|
| Query: | 21 | TWKKLLVSTAALSVVAGGAIAATHSNSVD----AASKTTIKLWVPTDSKASYKAIVKKFZ | 76 |
| | | +W+K++V A+L++ A + S S D A TIKLWVPT SK SY + KF+ | |
| Sbjct: | 3 | SWQKVIVGGASLTL-ASTLLVGCGSGSKDKKEAGADSKTIKLWVPTGSKKSYADTIAKFE | 61 |
| Query: | 77 | KENKGVTVKMIESNDSKAQENVKKDPSKAADVFSLPHDQLGQLVESGVIQEIPEQYSKEI | 136 |
| | | K++ G TVK++ES D KAQE +KKD S AADVFSLPHDQLGQLVESG IQE+PE+Y+KEI | |
| Sbjct: | 62 | KDS-GYTVKVVESEDPKAQEKIKKDASTAADVFSLPHDQLGQLVESGTIQEVPEKYNKEI | 120 |
| Query: | 137 | AKNDTKQSLTGAQYKGKTYAFPFGIESQVLYYNKTKLTADDVKSYETITSKGKFGXQLKA | 196 |
| | | A T Q+L GAQYKGKTYAFPFGIESQVL+YNK+KL A+DV SY+TIT+K FG K | |
| Sbjct: | 121 | AATSTDQALVGAQYKGKTYAFPFGIESQVLFYNKSKLAAEDVTSYDTITTKATFGGTFKQ | 180 |
| Query: | 197 | ANSYVTGPXFLSVGDTLFGKSGEDAKGTNWGNEAGVSVLKWIADQKKNDGFVNLTAENTM | 256 |
| | | AN+Y TGP F+SVG+TLFG++GED KGTNWGNE G +VLKWIADQ N GFV+L A N M | |
| Sbjct: | 181 | ANTYATGPLFMSVGNTLFGENGEDVKGTNWGNEKGAAVLKWIADQASNKGFVSLDANNVM | 240 |
| Query: | 257 | SKFGDGSVHAFESGPWDYDAAKKAVGEDKIGVAVYPTMKIGDKEVQQKAFLGVKLYAVNQ | 316 |
| | | SKFGDGSV +FESGPWDY+AA+KA+G++ +GVA+YP + IG + VQQKAFLGVKLYAVNQ | |
| Sbjct: | 241 | SKFGDGSVASFESGPWDYEAAQKAIGKENLGVAIYPKVTIGGETVQQKAFLGVKLYAVNQ | 300 |
| Query: | 317 | APAGSNTKRISASYKLAAYLTNAESQKIQFEKRHIVPANSSIQSSDSVQKDELAKAVIEM | 376 |
| | | APA +TKRI+ASYKLA+YLTNAESQ+ QF+ R+IVPAN +QSS++VQ +ELAK VI M | |
| Sbjct: | 301 | APAKGDTKRIAASYKLASYLTNAESQENQFKTRNIVPANKEVQSSEAVQSNELAKTVITM | 360 |
| Query: | 377 | GSSDKYTTVMPKLSQMSTFWTESAAILSDTYSGKIKSSDYLKRLKQFDKDIAKTK | 431 |
| | | GSS YT VMPKLSQM TFWTESAAILSD ++GKIK +DYL +L+QFDKDIA TK | |
| Sbjct: | 361 | GSSSDYTVVMPKLSQMGTFWTESAAILSDAFNGKIKENDYLTKLQQFDKDIAATK | 415 |

[9047] SEQ ID 5076 (GBS649) was expressed in E. coli as a GST-fusion product. SDS-PAGE analysis of total cell extract is shown in FIG. 132 (lane 2 & 3; MW 76 kDa) and in FIG. 186 (lane 7; MW 76 kDa). It was also expressed in E. coli as a His-fusion product. SDS-PAGE analysis of total cell extract is shown in FIG. 132 (lane 7; MW 51 kDa) and in FIG. 178 (lane 8; MW 51 kDa).

[9048] GBS649-His was purified as shown in FIG. 229, lane 8. Purified GBS649-GST is shown in FIG. 245, lanes 6 &73.

[9049] Based on this analysis, it was predicted that these proteins and their epitopes could be useful antigens for vaccines or diagnostics.

### EXAMPLE 1642

[9050] A DNA sequence (GBSx1737) was identified in S. agalactiae <SEQ ID 5079> which encodes the amino acid sequence <SEQ ID 5080>. Analysis of this protein sequence reveals the following:

```
Possible site: 51
>>> Seems to have no N-terminal signal sequence
----- Final Results -----
                            bacterial cytoplasm --- Certainty = 0.2462(Affirmative) < succ>
                              bacterial membrane --- Certainty = 0.0000(Not Clear) < succ>
                                bacterial outside --- Certainty = 0.0000(Not Clear) < succ>
```

[9051] The protein has homology with the following sequences in the GENPEPT database.

| >GP: AAD02112 GB: AF039082 putative maltose operon transcriptional | | | |
|---|---|---|---|
| repressor [Lactococcus lactis] | | | |
| Identities = 43/61 (70%), Positives = 49/61 (79%) | | | |
| Query: | 2 | VTIKDVAAKAGVNPSTVSRVLKDNASISSKTKERVKKAMEELGYVPNVAAQMLASGLTQN | 61 |
| | | VTIKDVA KAGVN STVSRV+KD++ IS KTK +V+KAM ELGY N AAQ+LASG T | |
| Sbjct: | 3 | VTIKDVAKKAGVNASTVSRVIKDSSEISDKTKVKVRKAMHELGYRRNAAAQILASGKTNT | 62 |
| Query: | 62 | I | 62 |
| | | I | |
| Sbjct: | 63 | I | 63 |

[9052] A related DNA sequence was identified in S. pyogenes <SEQ ID 5081> which encodes the amino acid sequence <SEQ ID 5082>. Analysis of this protein sequence reveals the following:

| Possible site: 44 | | | | |
|---|---|---|---|---|
| >>> Seems to have no N-terminal signal sequence | | | | |
| | INTEGRAL | Likelihood = −3.93 | Transmembrane | 269-285 (266-287) |

```
----- Final Results -----
                              bacterial membrane --- Certainty = 0.2572(Affirmative) < succ>
                                bacterial outside --- Certainty = 0.0000(Not Clear) < succ>
                            bacterial cytoplasm --- Certainty = 0.0000(Not Clear) < succ>
```

[9053] An alignment of the GAS and GBS proteins is shown below.

| Identities = 53/62 (85%), Positives = 57/62 (91%) | | | |
|---|---|---|---|
| Query: | 1 | MVTIKDVAAKAGVNPSTVSRVLKDNASISSKTKERVKKAMEELGYVPNVAAQMLASGLTQ | 60 |
| | | MVTIKDVA KAGVNPSTVSRVLKDN SIS KTKE+V+KAM +LGYVPNVAAQ+LASGLT | |
| Sbjct: | 26 | MVTIKDVAQKAGVNPSTVSRVLKDNRSISMKTKEKVRKAMADLGYVPNVAAQILASGLTH | 85 |
| Query: | 61 | NI | 62 |
| | | NI | |
| Sbjct: | 86 | NI | 87 |

[9054] Based on this analysis, it was predicted that these proteins and their epitopes could be useful antigens for vaccines or diagnostics.

### EXAMPLE 1643

[9055] A DNA sequence (GBSx1738) was identified in S. agalactiae <SEQ ID 5083> which encodes the amino acid sequence <SEQ ID 5084>. Analysis of this protein sequence reveals the following:

| Possible site: 56 | | | | |
|---|---|---|---|---|
| >>> Seems to have an uncleavable N-term signal seq | | | | |
| | INTEGRAL | Likelihood = −7.70 | Transmembrane | 14-30 (8-34) |
| | INTEGRAL | Likelihood = −6.90 | Transmembrane | 66-82 (63-85) |
| | INTEGRAL | Likelihood = −6.69 | Transmembrane | 110-126 (105-128) |
| | INTEGRAL | Likelihood = −3.93 | Transmembrane | 132-148 (129-149) |

```
----- Final Results -----
                              bacterial membrane --- Certainty = 0.4079(Affirmative) < succ>
                                bacterial outside --- Certainty = 0.0000(Not Clear) < succ>
                            bacterial cytoplasm --- Certainty = 0.0000(Not Clear) < succ>
```

[9056] A related GBS nucleic acid sequence <SEQ ID 9443> which encodes amino acid sequence <SEQ ID 9444> was also identified.

[9057] The protein has homology with the following sequences in the GENPEPT database.

| >GP: AAC67260 GB: AF017113 YvjA [Bacillus subtilis] | | | |
|---|---|---|---|
| Identities = 83/227 (36%), Positives = 140/227 (61%) | | | |
| Query: | 9 | FGWDSAFFIMIINIPLLLLCYFGLGKQTFLKTVYGSWIFPVFIKLTQSVPTLTHNPLLAA | 68 |
| | | +G+++A+ IINIPL + LG + LKT+ GS P+ + LT+ + TH+ LLAA | |
| Sbjct: | 52 | YGFEAAYVQWIINIPLFIAGVILLGGKFGLKTLAGSVFLPLVVFLTRDIQPATHHELLAA | 111 |
| Query: | 69 | LFGGVIVGCGLGIVFWSDSSTGGTGIIIQFLGKYTPISLGQGVILIDGLVTIVGFLAFDS | 128 |
| | | +FGGV +G G+GIV+ STGGT + Q + KY+ +SLG+ + +IDG++ + + F+ | |
| Sbjct: | 112 | IFGGVGIGIGIGIVYLGKGSTGGTALAAQIIHKYSGLSLGKCLAIIDGMIVVTAMIVFNI | 171 |
| Query: | 129 | DTVNFSIIGLITISYIINAIQTGFTTLSTVLIVSQEHQKIKTYINTVADRGVTEIPVKGG | 188 |
| | | + +++++G+ S I+ +Q GF LI++++ Q +K + DRGVT+I GG | |
| Sbjct: | 172 | EQGLYAMLGVYVSSKTIDVVQVGFNRSKMALIITKQEQAVKEAVLQKIDRGVTKISAVGG | 231 |
| Query: | 189 | YSGTNQIMLMTTIAGYEFAKLQEAIAEIDETAFITVTPTSQASGRGF | 235 |
| | | Y+ ++ +LM + EF KL++ + +IDE+AF+ V S+ G GF | |
| Sbjct: | 232 | YTDDDRPILMCVVGQTEFTKLKQIVKQIDESAFVIVADASEVLGEGF | 278 |

[9058] A related DNA sequence was identified in S. pyogenes <SEQ ID 5085> which encodes the amino acid sequence <SEQ ID 5086>. Analysis of this protein sequence reveals the following:

| Possible site: 57 | | | |
|---|---|---|---|
| >>> Seems to have a cleavable N-term signal seq. | | | |
| INTEGRAL | Likelihood = −6.21 | Transmembrane | 104-120 (101-123) |
| INTEGRAL | Likelihood = −3.93 | Transmembrane | 147-163 (142-167) |
| INTEGRAL | Likelihood = −3.29 | Transmembrane | 169-185 (169-186) |

----- Final Results -----
bacterial membrane --- Certainty = 0.3484 (Affirmative) < succ>
bacterial outside --- Certainty = 0.0000 (Not Clear) < succ>
bacterial cytoplasm --- Certainty = 0.0000 (Not Clear) < succ>

[9059] The protein has homology with the following sequences in the databases:

| >GP: AAC67260 GB: AF017113 YvjA [Bacillus subtilis] | | | |
|---|---|---|---|
| Identities = 106/267 (39%), Positives = 169/267 (62%), Gaps = 1/267 (0%) | | | |
| Query: | 7 | DLLLVTIGSFITAIGFNTMFVDNHIASGGMVGIAVVIKALFGISPSLFLMASNIPLLLMC | 66 |
| | | D + + IG+ ITA+ FN + N IA+GG+ GI+ ++++ +G + NIPL + | |
| Sbjct: | 13 | DYVYILIGAAITAVSFNVFLLPNKIAAGGVSGISTILQS-YGFEAAYVQWIINIPLFIAG | 71 |
| Query: | 67 | YFFLGKQNFIKTLYGSWIYPIAIRSTNSLPTLTHNQLLAAIFGGIICGIGLGMVFWGNSS | 126 |
| | | LG + +KTL GS P+ + T + TH++LLAAIFGG+ GIG+G+V+ G S | |
| Sbjct: | 72 | VILLGGKFGLKTLAGSVFLPLVVFLTRDIQPATHHELLAAIFGGVGIGIGIGIVYLGKGS | 131 |
| Query: | 127 | TGGTGILTQILHKYSPLSLGVAMTIVDGISVLMGFIALSADDVMYSTIGLFVIGYVISVM | 186 |
| | | TGGT + QI+HKYS LSLG + I+DG+ V+ I + + +Y+ +G++V I V+ | |
| Sbjct: | 132 | TGGTALAAQIIHKYSGLSLGKCLAIIDGMIVVTAMIVFNIEQGLYAMLGVYVSSKTIDVV | 191 |
| Query: | 187 | ENGFDSSKNVMIISKDYQAIREYITTVMDRGVTKLPIRGGYTTSDKIMLMAIVSSHELPT | 246 |
| | | + GF+ SK +II+K QA++E + +DRGVTK+ GGYT D+ +LM +V E | |
| Sbjct: | 192 | QVGFNRSKMALIITKQEQAVKEAVLQKIDRGVTKISAVGGYTDDDRPILMCVVGQTEFTK | 251 |
| Query: | 247 | LQEKILEIDDTAFIVVMPAAQVMGRGF | 273 |
| | | L++ + +ID++AF++V A++V+G GF | |
| Sbjct: | 252 | LKQIVKQIDESAFVIVADASEVLGEGF | 278 |

[9060] An alignment of the GAS and GBS proteins is shown below.

| Identities = 135/252 (53%), Positives = 190/252 (74%) | | | |
|---|---|---|---|
| Query: | 1 | MAVSFHEVFGWDSAFFIMIINIPLLLLCYFGLGKQTFLKTVYGSWIFPVFIKLTQSVPTL | 60 |
| | | +AV +FG + F+M NIPLLL+CYF LGKQ F+KT+YGSWI+P+ I+ T S+PTL | |
| Sbjct: | 39 | IAVVIKALFGISPSLFLMASNIPLLLMCYFFLGKQNFIKTLYGSWIYPIAIRSTNSLPTL | 98 |
| Query: | 61 | THNPLLAALFGGVIVGCGLGIVFWSDSSTGGTGIIIQFLGKYTPISLGQGVILIDGLVTI | 120 |
| | | THN LLAA+FGG+I G GLG+VFW +SSTGGTGI+ Q L KY+P+SLG + ++DG+ + | |
| Sbjct: | 99 | THNQLLAAIFGGIICGIGLGMVVFWGNSSTGGTGILTQILHKYSPLSLGVAMTIVDGISVL | 158 |
| Query: | 121 | VGFLAFDSDTVMFSIIGLITISYIINAIQTGFTTLSTVLIVSQEHQKIKTYINTVADRGV | 180 |
| | | +GF+A +D VM+S IGL I Y+I+ ++ GF + V+I+S+++Q I+ YI TV DRGV | |
| Sbjct: | 159 | MGFIALSADDVMYSTIGLFVIGYVISVMENGFDSSKNVMIISKDYQAIREYITTVNDRGV | 218 |
| Query: | 181 | TEIPVKGGYSGTNQIMLMTTIAGYEFAKLQEAIAEIDETAFITVTPTSQASGRGFSLQKN | 240 |
| | | T++P++GGY+ +++IMLM ++ +E LQE I EID+TAFI V P +Q GRGFSL K | |
| Sbjct: | 219 | TKLPIRGGYTTSDKIMLMAIVSSHELPTLQEKILEIDDTAFIVVMPAAQVMGRGFSLTKQ | 278 |
| Query: | 241 | HGRLDEDILMPM | 252 |
| | | + R D+D+L+PM | |
| Sbjct: | 279 | YKREDKDVLLPM | 290 |

[9061] A related GBS gene <SEQ ID 8871> and protein <SEQ ID 8872> were also identified. Analysis of this protein sequence reveals the following:

| Lipop: Possible site: −1 Crend: 6 | | | |
|---|---|---|---|
| McG: Discrim Score: 1.57 | | | |
| GvH: Signal Score (−7.5): −2.56 | | | |
| Possible site: 56 | | | |
| >>> Seems to have an uncleavable N-term signal seq | | | |
| ALOM program | count: 4 | value: −7.70 | threshold: 0.0 |

| | | | |
|---|---|---|---|
| INTEGRAL | Likelihood = −7.70 | Transmembrane | 14-30 (8-34) |
| INTEGRAL | Likelihood = −6.90 | Transmembrane | 66-82 (63-85) |
| INTEGRAL | Likelihood = −6.69 | Transmembrane | 110-126 (105-128) |
| INTEGRAL | Likelihood = −3.93 | Transmembrane | 132-148 (129-149) |
| PERIPHERAL | Likelihood = 3.71 | 37 | |

modified ALOM score: 2.04
*** Reasoning Step: 3
----- Final Results -----
bacterial membrane --- Certainty = 0.4079 (Affirmative) < succ>
bacterial outside --- Certainty = 0.0000 (Not Clear) < succ>
bacterial cytoplasm --- Certainty = 0.0000 (Not Clear) < succ>

[9062] The protein has homology with the following sequences in the databases:

[chemical structure]

[9063] Based on this analysis, it was predicted that these proteins and their epitopes could be useful antigens for vaccines or diagnostics.

### EXAMPLE 1644

[9064] A DNA sequence (GBSx1739) was identified in S. agalactiae <SEQ ID 5087> which encodes the amino acid sequence <SEQ ID 5088>. This protein is predicted to be ABC transporter, ATP-binding protein (b0820). Analysis of this protein sequence reveals the following:

Possible site: 56
>>> Seems to have no N-terminal signal sequence
----- Final Results -----
bacterial cytoplasm --- Certainty = 0.3122 (Affirmative) < succ>
bacterial membrane --- Certainty = 0.0000 (Not Clear) < succ>
bacterial outside --- Certainty = 0.0000 (Not Clear) < succ>

[9065] The protein has homology with the following sequences in the GENPEPT database.

| >GP: AAC24918 GB: AF012285 YkpA [Bacillus subtilis] | | | |
|---|---|---|---|
| Identities = 355/540 (65%), Positives = 451/540 (82%), Gaps = 4/540 (0%) | | | |
| Query: | 1 | MLTVSDVSLRFSDRKLFDEVNINFTAGNTYGLIGANGAGKSTFLKILAGDIEPTTGHIAL | 60 |
| | | M+ V++VSLRF+DRKLF++VNI FT GN YGLIGANGAGKSTFLK+L+G+IEP TG + + | |
| Sbjct: | 1 | MIAVNNVSLRFADRKLFEDVNIKFTPGNCYGLIGANGAGKSTFLKVLSGEIEPQTGDVHM | 60 |
| Query: | 61 | GPDERLSVLRQNHFDYEDERVIDVVIMGNETLYSIMKERDAIYMKEDFSDEDGVRAAELE | 120 |
| | | P ERL+VL+QNHF+YE+ V+ VVIMG++ LY +M+EKDAIYMK DFSDEDG+RAAELE | |
| Sbjct: | 61 | SPGERLAVLKQNHFEYEEYEVLKVVIMGHKRLYEVMQEKDAIYMKPDFSDEDGIRAAELE | 120 |
| Query: | 121 | GEFAELGGWEAESEASQLLQNLNISEELHYQNMSELANGDKVKVLLAKALFGKPDVLLLD | 180 |
| | | GEFAEL GWEAESEA+ LL+ L ISE+LH + M++L +KVKVLLA+ALFGKPDVLLLD | |
| Sbjct: | 121 | GEFAELNGWEAESEAAILLKGLGISEDLHTKKMADLGGSEKVKVLLAQALFGKPDVLLLD | 180 |
| Query: | 181 | EPTNGLDIQSITWLEDFLIDFENTVIVVSHDRNFLNKVCTHMADLDFGKIKLFVGNYDFW | 240 |
| | | EPTN LD+Q+I WLE+FLI+FENTVIVVSHDRHFLNKVCTH+ADLDF KI+++VGNYDFW | |
| Sbjct: | 181 | SPTNHLDLQAIQWLEEFLINFENTVIVVSHDRHFLNKVCTHIADLDFNKIQIYVGNYDFW | 240 |
| Query: | 241 | KESSELAARLQADRNAKAEEKIKQLQEFVARFSANASKSKQATSRKKMLDKIELEEIVPS | 300 |
| | | ESS+LA +L + N K EE+IKQLQEFVARFSANASKSKQATSRKK+L+KI L++I PS | |
| Sbjct: | 241 | YESSQLALKLSQEANKKKEEQIKQLQEFVARFSANASKSKQATSRKKLLEKITLDDIKPS | 300 |
| Query: | 301 | SRKYPFVNFKAEREMGNDLLTVENLSVTIDGEKILDNISFILRPGDKTALIGQNDIQTTA | 360 |
| | | SR+YP+VNF ERE+GND+L VE L+ TIDG K+LDN+SFI+ DK A G+N++ T | |
| Sbjct: | 301 | SRRYPYVNFTPEREIGNDVLRVEGLTKTIDGVKVLDNVSFINNREDKIAFTGRNELAVTT | 360 |
| Query: | 361 | LIRALMGDIEYE-GTIKWGVTTSRSYLPKDNSRDFASGE-SILEWLRQFASKEEDDNTFL | 418 |
| | | L + + G++E + GT KWGVTTS++Y PKDNS F + ++++WLRQ+ S + +FL | |
| Sbjct: | 361 | LFKIISGEMEADSGTFKWGVTTSQAYFPKDNSEYFEGSDLNLVDWLRQY-SPHDQSESFL | 419 |
| Query: | 419 | RGFLGRMLFSGDEVNKSVNVLSGGEKVRVMLSKLMLLKSNVLVLDDPTNHLDLESISSLN | 478 |
| | | RGFLGRMLFSG+EV+K NVLSGGEKVR MLSK ML +N+L+LD+PTNHLDLESI++LN | |
| Sbjct: | 420 | RGFLGRMLFSGEEVHKKANVLSGGEKVRCMLSKAMLSGANILILDEPTNHLDLESITALN | 479 |
| Query: | 479 | DGLKDFKESIIFASHDHEFIQTLANHIIVLSKNGVIDRIDETYDEFLENTEVQAKVAQLW | 538 |
| | | +GL FK +++F SHDH+F+QT+AN II ++ NG++D+ +YDEFLEN +VQ K+ +L+ | |
| Sbjct: | 480 | NGLISFKGAMLFTSHDHQFVQTIANRIIEITPNGIVDK-QMSYDEFLENADVQKKLTELY | 538 |

[9066] A related DNA sequence was identified in S. pyogenes <SEQ ID 5089> which encodes the amino acid sequence <SEQ ID 5090>. Analysis of this protein sequence reveals the following:

```
Possible site: 56
>>> Seems to have no N-terminal signal sequence
----- Final Results -----
                            bacterial cytoplasm --- Certainty = 0.3124(Affirmative) < succ>
                              bacterial membrane --- Certainty = 0.0000(Not Clear) < succ>
                                bacterial outside --- Certainty = 0.0000(Not Clear) < succ>
```

[9067] An alignment of the GAS and GBS proteins is shown below.

| Identities = 497/539 (92%), Positives = 525/539 (97%) | | | |
|---|---|---|---|
| Query: | 1 | MLTVSDVSLRFSDRKLFDEVNINFTAGNTYGLIGANGAGKSTFLKILAGDIEPTTGHIAL | 60 |
| | | +LTVSDVSLRFSDRKLFD+VNI FTAGNTYGLIGANGAGKSTFLKILAGDIEP+TGHI+L | |
| Sbjct: | 1 | LLTVSDVSLRFSDRKLFDDVNIKFTAGNTYGLIGANGAGKSTFLKILAGDIEPSTGHISL | 60 |
| Query: | 61 | GPDERLSVLRQNHFDYEDERVIDVVIMGNETLYSIMKEKDAIYMKEDFSDEDGVRAAELE | 120 |
| | | GPDERLSVLRQNHFDYE+ER IDVVIMGNE LY+IMKEKDAIYMK DFS+EDGVRAAELE | |
| Sbjct: | 61 | GPDERLSVLRQNHFDYEEERAIDVVIMGNEQLYNIMKEKDAIYMKADFSEEDGVRAAELE | 120 |
| Query: | 121 | GEFAELGGWEAESEASQLLQNLNISEELHYQNMSELANGDKVKVLLAKALFGKPDVLLLD | 180 |
| | | G FAELGGWEAESEASQLLQNLNI E+LHYQNMSELANGDKVKVLLAKALFGKFDVLLLD | |
| Sbjct: | 121 | GIFAELGGWEAESEASQLLQNLNIPEDLHYQNMSELANGDKVKVLLAKALFGKPDVLLLD | 180 |
| Query: | 181 | EPTNGLDIQSITWLEDFLIDFENTVIVVSHDRHFLNKVCTHMADLDFGKIKLFVGNYDFW | 240 |
| | | EPTNGLDIQSI+WLEDFLIDFENTVIVVSHDRHFLNKVCTHMADLDFGKIKLFVGNYDFW | |
| Sbjct: | 181 | EPTNGLDIQSISWLEDFLIDFENTVIVVSHDRHFLNKVCTHMADLDFGKIKLFVGNYDFW | 240 |
| Query: | 241 | KESSELAARLQADRNAKAEEKIKQLQEFVARFSANASKSKQATSRKKMLDKIELEEIVPS | 300 |
| | | K+SSELAARLQADRNAKAEEKIK+LQEFVARFSANASKSKQATSRKKMLDKIELEEIVPS | |
| Sbjct: | 241 | KQSSELAARLQADRNAKAEEKIKELQEFVARFSANASKSKQATSRKKMLDKIELEEIVPS | 300 |
| Query: | 301 | SRKYPFVNFKAEREMGNDLLTVENLSVTIDGEKILDNISFILRPGDKTALIGQNDIQTTA | 360 |
| | | SRKYPF+NFKAEREMGND LTVENLSVTIDGEKI+DNISFILRFGDK A+IGQNDIQTTA | |
| Sbjct: | 301 | SRKYPFINFKAEREMGNDFLTVENLSVTIDGEKIIDNISFILRFGDKAAIIGQNDIQTTA | 360 |
| Query: | 361 | LIRALMGDIEYEGTIKWGVTTSRSYLPKDNSRDFASGESILEWLRQFASKEEDDNTFLRG | 420 |
| | | L+RAL DI+YEGTIKWGVTTSRSYLPKDNS+DFA+ ESILSWLRQFASK EDD+TFLRG | |
| Sbjct: | 361 | LMRALADDIDYEGTIKWGVTTSRSYLPKDNSKDFATEESILEWLRQFASKGEDDDTFLRG | 420 |
| Query: | 421 | FLGRMLFSGDEVNKSVNVLSGGEKVRVMLSKLMLLKSNVLVLDDPTNHLDLESISSLNDG | 480 |
| | | FLGRMLFSGDEV KSVNVLSGGEKVRVMLSKLMLLKSNVL+LDDPTNHLDLESISSLNDG | |
| Sbjct: | 421 | FLGRMLFSGDEVKKSVNVLSGGEKVRVMLSKLMLLKSNVLILDDPTNHLDLESISSLNDG | 480 |
| Query: | 481 | LKDFKESIIFASHDHEFIQTLANHIIVLSKNGVIDRIDETYDEFLENTEVQAKVAQLWK | 539 |
| | | +KDFKES+IFASHDHEFIQT+ANHI+V+SKNGVIDRIDETYDEFL+N EVQA+VA+LWK | |
| Sbjct: | 481 | IKDFKESVIFASHDHEFIQTIANHIVVISKNGVIDRIDETYDEFLDNPEVQARVAELWK | 539 |

[9068] Based on this analysis, it was predicted that these proteins and their epitopes could be useful antigens for vaccines or diagnostics.

### EXAMPLE 1645

[9069] A DNA sequence (GBSx1740) was identified in S. agalactiae <SEQ ID 5091> which encodes the amino acid sequence <SEQ ID 5092>. Analysis of this protein sequence reveals the following:

| Possible site: 30 | | | |
|---|---|---|---|
| >>> Seems to have an uncleavable N-term signal seq | | | |
| INTEGRAL | Likelihood = −9.71 | Transmembrane | 14-30 (8-35) |
| INTEGRAL | Likelihood = −7.70 | Transmembrane | 384-400 (382-403) |
| INTEGRAL | Likelihood = −7.22 | Transmembrane | 412-428 (408-433) |
| INTEGRAL | Likelihood = −5.73 | Transmembrane | 163-179 (155-180) |
| INTEGRAL | Likelihood = −5.52 | Transmembrane | 322-338 (320-344) |
| INTEGRAL | Likelihood = −5.10 | Transmembrane | 297-313 (290-314) |
| INTEGRAL | Likelihood = −4.41 | Transmembrane | 360-376 (357-377) |
| INTEGRAL | Likelihood = −4.35 | Transmembrane | 438-454 (437-455) |
| INTEGRAL | Likelihood = −4.09 | Transmembrane | 136-152 (136-153) |
| INTEGRAL | Likelihood = −3.35 | Transmembrane | 110-126 (106-128) |
| INTEGRAL | Likelihood = −2.28 | Transmembrane | 232-248 (232-248) |
| INTEGRAL | Likelihood = −1.81 | Transmembrane | 832-848 (832-848) |
| INTEGRAL | Likelihood = −1.12 | Transmembrane | 200-216 (200-216) |

----- Final Results -----
bacterial membrane --- Certainty = 0.4885 (Affirmative) < succ>
bacterial outside --- Certainty = 0.0000 (Not Clear) < succ>
bacterial cytoplasm --- Certainty = 0.0000 (Not Clear) < succ>

[9070] The protein has homology with the following sequences in the GENPEPT database.

| >GP: AAC14608 GB: U95840 transmembrane protein Tmp5 [Lactococcus | | | |
|---|---|---|---|
| lactis] | | | |
| Identities = 140/260 (53%), Positives = 182/260 (69%), Gaps = 6/260 (2%) | | | |
| Query: | 16 | SFLLPFIIIVCILFTKNIYWGSPTTILASDGFHQYVIFNQALRNILH--GSNSLFYTFTS | 73 |
| | | SF +P I++V + L IYWGS +ILA D +HQYV + RNILH GS YTFTS | |
| Sbjct: | 14 | SFFIPLILMVIVLAMTGIYWGSSRSILAGDAYHQYVAIHSLYRNILHSGGSQGFLYTFTS | 73 |
| Query: | 74 | GLGLNFYALSSYYLGSFLSPIVYFFNLKNMPDAIYLLTICKIGLIGLSMFVTLCKRHCKV | 133 |
| | | GLGLN YA S+YY+GSFL P +FF++K+MPDA+YL TI K GLIGLS FV+ + K+ | |
| Sbjct: | 74 | GLGLNLYAFSAYYMGSFLMPFTFFFDVKSMPDALYLFTIIKFGLIGLSSFVSFKNMYQKL | 133 |
| Query: | 134 | NRVLLLVISTCYSLMSFSISQIEINMWLDVFILIPLVVLGVDQLLWERKPILYFLSLTAL | 193 |
| | | + + +L IST ++LMSF SQ+EI MWLDVFIL+PL++ G+ +L+ ERK LYF+SL L | |
| Sbjct: | 134 | SNLTVLSISTAFALMSFLTSQLEITMWLDVFILLPLIIWGLHRLMDERKRWLYFVSLLIL 193 | |
| Query: | 194 | FIQNYYFGFMTAIFTSLYFIVQITRNTDSKVAFKQFLHFTFLSLLAGMTSSIMILPTYFD | 253 |
| | | FIQNYYFGFM AIF LYF + R T K ++ + L F S LAG+ S IM+LP Y D | |
| Sbjct: | 194 | FIQNYYFGFMVAIFLVLYF---LARMTYEKWSWTKVLDFVVSSTLAGIASLIMLLPMYLD | 250 |
| Query: | 254 | L-TTHGEKLTKVSKMFTENS | 272 |
| | | L + + + L+ +S +FTENS | |
| Sbjct: | 251 | LKSNNSDALSTLSGIFTENS | 270 |

[9071] A related DNA sequence was identified in S. pyogenes <SEQ ID 5093> which encodes the amino acid sequence <SEQ ID 5094>. Analysis of this protein sequence reveals the following:

| Possible site: 51 | | | | |
|---|---|---|---|---|
| >>> Seems to have an uncleavable N-term signal seq | | | | |
| | INTEGRAL | Likelihood = −9.29 | Transmembrane | 15-31 (6-35) |
| | INTEGRAL | Likelihood = −8.81 | Transmembrane | 201-217 (196-220) |
| | INTEGRAL | Likelihood = −6.79 | Transmembrane | 410-426 (402-428) |
| | INTEGRAL | Likelihood = −6.05 | Transmembrane | 230-246 (227-252) |
| | INTEGRAL | Likelihood = −5.57 | Transmembrane | 161-177 (153-178) |
| | INTEGRAL | Likelihood = −4.46 | Transmembrane | 291-307 (290-311) |
| | INTEGRAL | Likelihood = −3.82 | Transmembrane | 133-149 (130-151) |
| | INTEGRAL | Likelihood = −3.77 | Transmembrane | 380-396 (376-400) |
| | INTEGRAL | Likelihood = −3.61 | Transmembrane | 105-121 (103-124) |
| | INTEGRAL | Likelihood = −3.45 | Transmembrane | 832-848 (830-848) |
| | INTEGRAL | Likelihood = −2.66 | Transmembrane | 436-452 (435-453) |
| | INTEGRAL | Likelihood = −2.13 | Transmembrane | 318-334 (314-336) |
| | INTEGRAL | Likelihood = −1.54 | Transmembrane | 356-372 (355-372) |
| | INTEGRAL | Likelihood = −0.27 | Transmembrane | 80-96 (80-96) |

```
----- Final Results -----
                              bacterial membrane --- Certainty = 0.4715(Affirmative) < succ>
                                bacterial outside --- Certainty = 0.0000(Not Clear) < succ>
                            bacterial cytoplasm --- Certainty = 0.0000(Not Clear) < succ>
```

[9072] The protein has homology with the following sequences in the databases:

| >GP: AAC14608 GB: U95840 transmembrane protein Tmp5 [Lactococcus lactis] | | | |
|---|---|---|---|
| Identities = 134/269 (49%), Positives = 183/269 (67%), Gaps = 8/269 (2%) | | | |
| Query: | 5 | NKWIIAGLASFLFPLSIIFIILLSMGIYYNSDKTILASDAFHQYVIFAQNFRNIMH--GS | 62 |
| | | NKW + LASF PL ++ I+L GIY+ S ++ILA DA+HQYV +RNI+H GS | |
| Sbjct: | 7 | NKWAL--LASFFIPLILMVIVLAMTGIYWGSSRSILAGDAYHQYVAIHSLYRNILHSGGS | 64 |
| Query: | 63 | DSFFYTFTSGLGINFYALMCYYLGSFFSPLLFFFNLTSMPDAIYLFTLIKFGLIGLAACY | 122 |
| | | F YTFTSGLG+N YA YY+GSF P FFF++ SMPDA+YLFT+IKFGLIGL++ | |
| Sbjct: | 65 | QGFLYTFTSGLGLNLYAFSAYYMGSFLMPFTFFFDVKSMPDALYLFTIIKFGLIGLSSFV | 124 |
| Query: | 123 | SFHRLYPKISAFLMISISVFYSLMSFLTSQMELNSWLDVFILLPLVILGLNKLITENKTR | 182 |
| | | SF +Y K+S ++SIS ++LMSFLTSQ+E+ WLDVFILLPL+I GL++L+ E K | |
| Sbjct: | 125 | SFKNMYQKLSNLTVLSISTAFALMSFLTSQLEITMWLDVFILLPLIIWGLHRLMDERKRW | 184 |
| Query: | 183 | TYYLSISLLFIQNYYFGYMIALFCILYALVCLLRLNDFNKMFIAFVRFTAVSICAALTSA | 242 |
| | | Y++S++ LFIQNYYFG+M+A+F +LY L R+ + + F S A + S | |
| Sbjct: | 185 | LYFVSLLILFIQNYYFGFMVAIFLVLYFLA---RMTYEKWSWTKVLDFVVSSTLAGIASL | 241 |
| Query: | 243 | LVILPTYLDL-STYGENLSPIKQLVTNNA | 270 |
| | | +++LP YLDL S + LS + + T N+ | |
| Sbjct: | 242 | IMLLPMYLDLKSNNSDALSTLSGIFTENS | 270 |

[9073] An alignment of the GAS and GBS proteins is shown below.

| Identities = 432/836 (51%), Positives = 569/836 (67%), Gaps = 2/836 (0%) | | | |
|---|---|---|---|
| Query: | 16 | SFLLPFIIIVCILFTKNIYWGSPTTILASDGFHQYVIFNQALRNILHGSNSLFYTFTSGL | 75 |
| | | SFL P II IL + IY+ S TILASD FHQYVIF Q RNI+HGS+S FYTFTSGL | |
| Sbjct: | 14 | SFLFPLSIIFIILLSMGIYYNSDKTILASDAFHQYVIFAQNFRNIMHGSDSFFYTFTSGL | 73 |
| Query: | 76 | GLNFYALSSYYLGSFLSPIVYFFNLKNMPDAIYLLTICKIGLIGLSMFVTLCKRHCKVNR | 135 |
| | | G+NFYAL YYLGSF SP+++FFNL +MPDAIYL T+ K GLIGL+ + + + K++ | |
| Sbjct: | 74 | GINFYALMCYYLGSFFSPLLFFFNLTSMPDAIYLFTLIKFGLIGLAACYSFHRLYPKISA | 133 |
| Query: | 136 | VLLLVISTCYSLMSFSISQIEINMWLDVFILIPLVVLGVDQLLWERKPILYFLSLTALFI | 195 |
| | | L++ IS YSLMSF SQ+E+N WLDVFIL+PLV+LG+++L+ E K Y+LS++ LFI | |
| Sbjct: | 134 | FLMISISVFYSLMSFLTSQMELNSWLDVFILLPLVILGLNKLITENKTRTYYLSISLLFI | 193 |
| Query: | 196 | QNYYFGFMTAIFTSLYFIVQITRNTDSKVAFKQFLHFTFLSLLAGMTSSIMILPTYFDLT | 255 |
| | | QNYYFG+M A+F LY +V + R D F F+ FT +S+ A +TS+++ILPTY DL+ | |
| Sbjct: | 194 | QNYYFGYMIALFCILYALVCLLRLNDFNKMFIAFVRFTAVSICAALTSALVILPTYLDLS | 253 |
| Query: | 256 | THGEKLTKVSKMFTENSWYMDLFAKNMIGAYDTTKFGSIPMIYVGLLPLLLSLLYFTIKE | 315 |
| | | T+GE L+ + ++ T N+W++D+ AK IG YDTTKF ++PMIYVGL PL+LS++YFT++ | |
| Sbjct: | 254 | TYGENLSPIKQLVTNNAWFLDIPAKLSIGVYDTTKFNALPMIYVGLFPLMLSVIYFTLES | 313 |
| Query: | 316 | VPRRTRLAYGFLIIFVIASFYITPLDLFWQGMHAPNMFLHRYSWVLSVLICLLAAECLEY | 375 |
| | | +P + +LA L+ F+I SFY+ PLDLFWQGMH+PNMFLHRY+W S++I LLA E L | |
| Sbjct: | 314 | IPLKIKLANACLLTFIIISFYLQPLDLFWQGMHSPNMFLHRYAWSFSIVILLLACETLSR | 373 |
| Query: | 376 | LDNISWKKILGVNLILVSGFIITFLFKKHYHYLNLELLLLTLTFLSAYIILTISFVSKQI | 435 |
| | | L ++ K + L+ + + F + Y++L L L LL++ L Y I SF + QI | |
| Sbjct: | 374 | LKEVTQIKAGFAFIFLIILTSLPYSFSQQYNFLPLTLFLLSVFLLLGYTISLFSFRNSQI | 433 |
| Query: | 436 | PKLVFYPFLIGFVVLEMTLNTFYQLNSLNDEWIFPSRQGYAKYNHSISKLVRKTERNNST | 495 |
| | | P F++ F +LE LNT+YQL +N EW FPSRQ Y I+ LV +N+ | |
| Sbjct: | 434 | PSTFISAFILIFSLLESGLNTYYQLQGINKEWGFPSRQIYNSQLKDINNLVNSVSKNSQP | 493 |
| Query: | 496 | FFRTERWLGQTGNDSNKYNYNGISQFSSIRNRSSSQVLDRLGFKSDGTNLNLRYQNNTLI | 555 |
| | | FFR ER L QTGNDSMK+NY GISQFSS+RNR SS +LDRLGF+S GTNLNLRYQNNT+I | |
| Sbjct: | 494 | FFRMERLLPQTGNDSMKFNYYGISQFSSVRNRLSSSLLDRLGFQSKGTNLNLRYQNNTII | 553 |
| Query: | 556 | ADSLFGVKYNLTEYPFDKFGFIKKAQDKQTILYKNQFASQLAILTNQVYQDKPFTVNTLD | 615 |
| | | DSL G+KYNL+E P +KFGF K T LY+N ++S LAILT VY+D VNTLD | |
| Sbjct: | 554 | MDSLLGIKYNLSEGPPNKFGFTKLKTSGNTTLYQNHYSSPLAILTRNVYKDVNLNVNTLD | 613 |
| Query: | 616 | NQTTLLNQLSGLKETYFEHLIPNSVSGQTTLNKQVFVK-KNKQGNTEITYNITIPKNSQL | 674 |
| | | NQT LLNQLSG TYF +SG N Q+ + + Q + + Y I IPK+SQL | |
| Sbjct: | 614 | NQTKLLNQLSGKSLTYFNLQPAQLISGANQFNGQISAQASDYQNSVTLNYQINIPKHSQL | 673 |
| Query: | 675 | YVSMPFINFNNEENKIVQISVNNGPFVPNTLDNAYSFFNIGSFAENSRIKVKFQFPHNDQ | 734 |
| | | YVS+P I F+N + K ++I +N F+ T DNAYSFF++G FA+ F FP N Q | |
| Sbjct: | 674 | YVSIPNIIFSNPDAKEMRIQTDNHNFI-YTTDNAYSFFDLGYFADAKVATFSFVFPKNKQ | 732 |
| Query: | 735 | VSFPIPHFYGLKLEAYQKAMTVINKRKVKVRTDHNKVIANYTSPNRSSLFFTIPYDRGWK | 794 |
| | | +SF PHFY L +E+Y +AM I ++ V N VI +Y S + SL FT+PYD+GW | |
| Sbjct: | 733 | ISFKEPHFYSLSIESYLEAMNSIKQKNVHTYAKSNTVITDYNSKTKGSLIFTLPYDKGWS | 792 |
| Query: | 795 | AYQNNKEIKIFKAQKGFMKINIPKGKGKVTLIFIPYGFKFGVGLSITGIVLFTVYY | 850 |
| | | A ++ K + + KAQ GF+ + IPKGKG+V L FIP GFK G+ LS GI+ + + Y | |
| Sbjct: | 793 | AQKDGKNLPVKKAQGGFLSVTIPKGKGRVILTFIPNGFKLGLSLSCVGIIAYMLLY | 848 |

[9074] Based on this analysis, it was predicted that these proteins and their epitopes could be useful antigens for vaccines or diagnostics.

### EXAMPLE 1646

[9075] A DNA sequence (GBSx1741) was identified in S. agalactiae <SEQ ID 5095> which encodes the amino acid sequence <SEQ ID 5096>. Analysis of this protein sequence reveals the following:

```
Possible site: 50
>>> Seems to have no N-terminal signal sequence
----- Final Results -----
                            bacterial cytoplasm --- Certainty = 0.4624(Affirmative) < succ>
                              bacterial membrane --- Certainty = 0.0000(Not Clear) < succ>
                                bacterial outside --- Certainty = 0.0000(Not Clear) < succ>
```

[9076] The protein has homology with the following sequences in the GENPEPT database.

| >GP: AAC45340 GB: AE000658 ORF1 [Streptococcus pneumoniae] | | | |
|---|---|---|---|
| Identities = 111/159 (69%), Positives = 136/159 (84%) | | | |
| Query: | 1 | MKLKIITVGKLKEKYLKEGVAEYQKRLNRFSKIETIELADEKTPDKASISENQRILDIEG | 60 |
| | | MK+K++TVGKLKEKYLK+G+AEY KR++RF+K E IEL+DEKTPDKAS SENQ+IL+IEG | |
| Sbjct: | 1 | MKIKVVTVGKLKEKYLKDGIAEYSKRISRFAKFEMIELSDEKTPDKASESENQKILEIEG | 60 |
| Query: | 61 | ERILSKIGERDYVIGLAIEGKQLPSESFSHLIDQKMISGYSTITFVIGGSLGLSQKVKKR | 120 |
| | | +RILSKI +RD+VI LAIEGK SE FS +++ I G+ST+TF+IGGSLGLS VK R | |
| Sbjct: | 61 | QRILSKIADRDFVIVLAIEGKTFFSEEFSKQLEETSIKGFSTLTFIIGGSLGLSSSVKNR | 120 |
| Query: | 121 | ADYLMSFGLLTLPHQLMKLVLMEQIYRAFMIRQGTPYHK | 159 |
| | | A+ +SFG LTLPHQLM+LVL+EQIYRAF I+QG PYHK | |
| Sbjct: | 121 | ANLSVSFGRLTLPHQLMRLVLVEQIYRAFTIQQGFPYHK | 159 |

[9077] A related DNA sequence was identified in S. pyogenes <SEQ ID 5097> which encodes the amino acid sequence <SEQ ID 5098>. Analysis of this protein sequence reveals the following:

```
Possible site: 50
>>> Seems to have no N-terminal signal sequence
----- Final Results -----
                            bacterial cytoplasm --- Certainty = 0.4462(Affirmative) < succ>
                              bacterial membrane --- Certainty = 0.0000(Not Clear) < succ>
                                bacterial outside --- Certainty = 0.0000(Not Clear) < succ>
```

[9078] An alignment of the GAS and GBS proteins is shown below.

| Identities = 112/159 (70%), Positives = 133/159 (83%) | | | |
|---|---|---|---|
| Query: | 1 | MKLKIITVGKLKEKYLKEGVAEYQKRLNRFSKIETIELADEKTPDKASISENQRILDIEG | 60 |
| | | MK+K+I VGKLKE+YLK+G++EYQKRL+RF + E IEL DE+TPDKAS ++NQ I+ E | |
| Sbjct: | 1 | MKVKLICVGKLKERYLKDGISEYQKRLSRFCQFEMIELTDERTPDKASFADNQLIMSKEA | 60 |
| Query: | 61 | ERILSKIGERDYVIGLAIEGKQLPSESFSHLIDQKMISGYSTITFVIGGSLGLSQKVKKR | 120 |
| | | +RI KIGERD+VI LAIEGKQ PSE+FS LI + GYSTITF+IGGSLGL +KKR | |
| Sbjct: | 61 | QRIHKKIGERDFVIALAIEGKQFPSETFSELISGVTVKGYSTITFIIGGSLGLDSIIKKR | 120 |
| Query: | 121 | ADYLMSFGLLTLPHQLMKLVLMEQIYRAFMIRQGTPYHK | 159 |
| | | A+ LMSFGLLTLPHQLM+LVL EQIYRAFMI QG+PYHK | |
| Sbjct: | 121 | ANMLMSFGLLTLPHQLMRLVLTEQIYRAFMITQGSPYHK | 159 |

[9079] Based on this analysis, it was predicted that these proteins and their epitopes could be useful antigens for vaccines or diagnostics.

### EXAMPLE 1647

[9080] A DNA sequence (GBSx1742) was identified in S. agalactiae <SEQ ID 5099> which encodes the amino acid sequence <SEQ ID 5100>. Analysis of this protein sequence reveals the following:

```
Possible site: 24
>>> Seems to have no N-terminal signal sequence
----- Final Results -----
                            bacterial cytoplasm --- Certainty = 0.3785(Affirmative) < succ>
                              bacterial membrane --- Certainty = 0.0000(Not Clear) < succ>
                                bacterial outside --- Certainty = 0.0000(Not Clear) < succ>
```

[9081] The protein has no significant homology with any sequences in the GENPEPT database.

[9082] No corresponding DNA sequence was identified in S. pyogenes.

[9083] Based on this analysis, it was predicted that this protein and its epitopes, could be useful antigens for vaccines or diagnostics.

### EXAMPLE 1648

[9084] A DNA sequence (GBSx1743) was identified in S. agalactiae <SEQ ID 5101> which encodes the amino acid sequence <SEQ ID 5102>. This protein is predicted to be a serine protease. Analysis of this protein sequence reveals the following:

```
Possible site: 29
>>> Seems to have no N-terminal signal sequence
----- Final Results -----
                            bacterial cytoplasm --- Certainty = 0.4533(Affirmative) < succ>
                              bacterial membrane --- Certainty = 0.0000(Not Clear) < succ>
                                bacterial outside --- Certainty = 0.0000(Not Clear) < succ>
```

[9085] A related GBS nucleic acid sequence <SEQ ID 9445> which encodes amino acid sequence <SEQ ID 9446> was also identified.

[9086] The protein has homology with the following sequences in the GENPEPT database.

| >GP: AAC45334 GB: AF000658 putative serine protease | | | |
|---|---|---|---|
| [Streptococcus pneumoniae] | | | |
| Identities = 215/370 (58%), Positives = 278/370 (75%), Gaps = 20/370 (5%) | | | |
| Query: | 4 | NDNIPNGGVTKTSKVNYNNITPTTKAVKKVQNSVVSVINYKQQESRSDLSDFYSHFFGNQ | 63 |
| | | N++ N +T+T+ Y N TT+AV KV+++VVSVI Y S FGN | |
| Sbjct: | 46 | NNSNNNSTITQTA---YKNENSTTQAVNKVKDAVVSVITYSANRQNS--------VFGND | 94 |
| Query: | 64 | GGNTDKGLQVYGEGSGVIYKKDGKNAYVVTNNHVIDGAKQIEIQLADGSKAVGKLVGSDT | 123 |
| | | +TD ++ EGSGVIYKK+ K AY+VTNNHVI+GA +++I+L+DG+K G++VG+DT | |
| Sbjct: | 95 | DTDTDSQ-RISSEGSGVIYKKNDKEAYIVTNNHVINGASKVDIRLSDGTKVPGEIVGADT | 153 |
| Query: | 124 | YSDLAVVKIPSDKVSNIAEFADSSKLNIGETAIAIGSPLGTEYANSVTQGIVSSLKRTVT | 183 |
| | | +SD+AVVKI S+KV+ +AEF DSSKL +GETAIAIGSPLG+EYAN+VTQGIVSSL R V+ | |
| Sbjct: | 154 | FSDIAVVKISSEKVTTVAEFGDSSKLTVGETAIAIGSPLGSEYANTVTQGIVSSLNRNVS | 213 |
| Query: | 184 | MTNEEGQTVSTNAIQTDAAINPGNSGGALINIEGQVIGINSSKISSTSNQTSGQSSGNSV | 243 |
| | | + +E+GQ +ST AIQTD AINPGNSGG LINI+GQVIGI SSKI++ + G SV | |
| Sbjct: | 214 | LKSEDGQAISTKAIQTDTAINPGNSGGPLINIQGQVIGITSSKIAT--------NGGTSV | 265 |
| Query: | 244 | EGMGFAIPSNDVVKIINQLESNGQVERPALGISMAGLSNLPSDVISKLKIPSNVTNGIVV | 303 |
| | | EG+GFAIP+ND + II QLE NG+V RPALGI M LSN+ + I +L IPSNVT+G++V | |
| Sbjct: | 266 | EGLGFAIPANDAINIIEQLEKNGKVTRPALGIQMVNLSNVSTSDIRRLNIPSNVTSGVIV | 325 |
| Query: | 304 | ASIQSGMPAQGKLKKYDVITKVDDKEVVSPSDLQSLLYGHQVGDSITVTFYRGENKQTVT | 363 |
| | | S+QS MPA G L+KYDVITKVDDKE+ S +DLQS LY H +GD+I +T+YR ++T + | |
| Sbjct: | 326 | RSVQSNMPANGHLEKYDVITKVDDKEIASSTDLQSALYNHSIGDTIKITYYRNGKEETTS | 385 |
| Query: | 364 | IKLTKTSKDL | 373 |
| | | IKL K+S DL | |
| Sbjct: | 386 | IKLNKSSGDL | 395 |

[9087] A related DNA sequence was identified in S. pyogenes <SEQ ID 5103> which encodes the amino acid sequence <SEQ ID 5104>. Analysis of this protein sequence reveals the following:

| Possible site: 24 | | | | |
|---|---|---|---|---|
| >>> Seems to have an uncleavable N-term signal seq | | | | |
| | INTEGRAL | Likelihood = −8.76 | Transmembrane | 11-27 (6-31) |

```
----- Final Results -----
                              bacterial membrane --- Certainty = 0.4503(Affirmative) < succ>
                                bacterial outside --- Certainty = 0.0000(Not Clear) < succ>
                            bacterial cytoplasm --- Certainty = 0.0000(Not Clear) < succ>
```

[9088] An alignment of the GAS and GBS proteins is shown below.

| Identities = 250/375 (66%), Positives = 299/375 (79%), Gaps = 5/375 (1%) | | | |
|---|---|---|---|
| Query: | 3 | HNDNIPNGGVTKTSKVNYNNITPTTKAVKKVQNSVVSVINYKQQESRSDLSDFYSHFFGN | 62 |
| | | H+ + N G TS + +NN T TTKAVK VQN+VVSVINY+ S S LS+ Y+ FG | |
| Sbjct: | 34 | HSPSKINSGKATTSNMVFNNTTNTTKAVKAVQNAVVSVINYQDNPS-SSLSNPYTKLFGE | 92 |
| Query: | 63 | QGG--NTDKGLQVYGEGSGVIYKKDGKNAYVVTNNHVIDGAKQIEIQLADGSKAVGKLVG | 120 |
| | | N D L ++ EGSGVIY+KDG +AYVVTNNHVIDGAK+IEI +ADGSK VG+LVG | |
| Sbjct: | 93 | GRSKENKDAELSIFSEGSGVIYRKDGNSAYVVTNNHVIDGAKRIEILMADGSKVVGELVG | 152 |
| Query: | 121 | SDTYSDLAVVKIPSDKVSNIAEFADSSKLNIGETAIAIGSPLGTEYANSVTQGIVSSLKR | 180 |
| | | +DTYSDLAVVKI SDK+ +AEFADS+KLN+GE AIAIGSPLGT+YANSVTQGIVSSL R | |
| Sbjct: | 153 | ADTYSDLAVVKISSDKIKTVAEFADSTKLNVGEVAIAIGSPLGTQYANSVTQGIVSSLSR | 212 |
| Query: | 181 | TVTMTNEEGQTVSTNAIQTDAAINPGNSGGALINIEGQVIGINSSKISSTSNQTSGQSSG | 240 |
| | | TVT+ NE G+TVSTNAIQTDAAINPGNSGG LINIEGQVIGINSSKISST ++G S | |
| Sbjct: | 213 | TVTLKNENGETVSTNAIQTDAAINPGNSGGPLINIEGQVIGINSSKISSTPTGSNGNS-- | 270 |
| Query: | 241 | NSVEGMGFAIPSNDVVKIINQLESNGQVERPALGISMAGLSNLPSDVISKLKIPSNVTNG | 300 |
| | | +VEG+GFAIPS DV+KII QLE+NG+V RPALGISM L++L ++ +S++ IP++VT G | |
| Sbjct: | 271 | GAVEGIGFAIPSTDVIKIIKQLETNGEVIRPALGISMVNLNDLSTNALSQINIPTSVTGG | 330 |
| Query: | 301 | IVVASIQSGMPAQGKLKKYDVITKVDDKEVVSPSDLQSLLYGHQVGDSITVTFYRGENKQ | 360 |
| | | IVVA ++ GMPA GKL +YDVIT++D K V S SDLQS LYGH + D+I VTFYRG K+ | |
| Sbjct: | 331 | IVVAEVKEGMPASGKLAQYDVITEIDGKTVNSISDLQSSLYGHDINDTIKVTFYRGTTKK | 390 |
| Query: | 361 | TVTIKLTKTSKDLAK | 375 |
| | | IKLTKT++DL K | |
| Sbjct: | 391 | KADIKLTKTTQDLTK | 405 |

[9089] A related GBS gene <SEQ ID 8873> and protein <SEQ ID 8874> were also identified. Analysis of this protein sequence reveals the following:

| Lipop: Possible site: −1 Crend: 10 | | | |
|---|---|---|---|
| McG: Discrim Score: 12.68 | | | |
| GvH: Signal Score (−7.5): −1.33 | | | |
| Possible site: 21 | | | |
| >>> Seems to have a cleavable N-term signal seq. | | | |
| ALOM program | count: 0 | value: 4.56 | threshold: 0.0 |

| | | |
|---|---|---|
| PERIPHERAL | Likelihood = 4.56 | 301 |

modified ALOM score: −1.41
*** Reasoning Step: 3
----- Final Results -----
bacterial outside --- Certainty = 0.3000 (Affirmative) < succ>
bacterial membrane --- Certainty = 0.0000 (Not Clear) < succ>
bacterial cytoplasm --- Certainty = 0.0000 (Not Clear) < succ>

[9090] The protein has homology with the following sequences in the databases:

[chemical structure]

[9091] Based on this analysis, it was predicted that these proteins and their epitopes could be useful antigens for vaccines or diagnostics.

### EXAMPLE 1649

[9092] A DNA sequence (GBSx1744) was identified in S. agalactiae <SEQ ID 5105> which encodes the amino acid sequence <SEQ ID 5106>. This protein is predicted to be SPSpoJ (spo0J). Analysis of this protein sequence reveals the following:

Possible site: 53
>>> Seems to have no N-terminal signal sequence
----- Final Results -----
bacterial cytoplasm --- Certainty = 0.4152 (Affirmative) < succ>
bacterial membrane --- Certainty = 0.0000 (Not Clear) < succ>
bacterial outside --- Certainty = 0.0000 (Not Clear) < succ>

[9093] The protein has homology with the following sequences in the GENPEPT database.

| >GP: AAC45335 GB: AF000658 SPSpoJ [Streptococcus pneumoniae] | | | |
|---|---|---|---|
| Identities = 138/257 (53%), Positives = 188/257 (72%), Gaps = 5/257 (1%) | | | |
| Query: | 1 | MEYLETININHIAPNPYQPRLEFNTKELEELANSIKINGLIQPIIVRPSAVFGYELVAGE | 60 |
| | | ME E I+I I NPYQPR EF+ ++L+ELA SIK NG+IQPIIVR S V GYE++AGE | |
| Sbjct: | 1 | MEKFEMISITDIQKNPYQPRKEFDREKLDELAQSIKENGVIQPIIVRQSPVIGYEILAGE | 60 |
| Query: | 61 | RRLRAAKLAKLESIPAIIKSYNNDDSMQLAIVENLQRSNLSPIEEAKAYSQLLQKKSMTH | 120 |
| | | RR RA+ LA L SIPA++K ++ + M +I+ENLQR NL+PIEEA+AY L++ K TH | |
| Sbjct: | 61 | RRYRASLLAGLRSIPAVVKQISDQEMMVQSIIENLQRENLNPIEEARAYVSLVE-KGFTH | 119 |
| Query: | 121 | EELAKYMGKSRPYISNTIRLLNLPPLITSAIEEGKLSSGHARALLSLPDASQQKDWYQRI | 180 |
| | | E+A GKSRPYISN+IRLL+LP I S +E GKLS HAR+L+ L + QQ ++QRI | |
| Sbjct: | 120 | AEIADKEGKSRPYISNSIRLLSLPEQILSEVENGKLSQAHARSLVGL-NKEQQDYFFQRI | 178 |
| Query: | 181 | LTEDISVRRLEKLLKQEKKTNHKSLQNKDVFLKHQENELAQFLGSKVKLTINKDGAGNIK | 240 |
| | | + EDISVR+LE LL ++K+ K Q + F++++E +L + LG V++ ++K +G I | |
| Sbjct: | 179 | IEEDISVRKLEALLTEKKQ---KKQQKTNHFIQNEEKQLRKLLGLDVEIKLSKKDSGKII | 235 |
| Query: | 241 | IAFANQEELNRIINTLK | 257 |
| | | I+F+NQEE +RIIN+LK | |
| Sbjct: | 236 | ISFSNQEEYSRIINSLK | 252 |

[9094] A related DNA sequence was identified in S. pyogenes <SEQ ID 5107> which encodes the amino acid sequence <SEQ ID 5108>. Analysis of this protein sequence reveals the following:

Possible site: 51
>>> Seems to have no N-terminal signal sequence
----- Final Results -----
bacterial cytoplasm --- Certainty = 0.1758 (Affirmative) < succ>
bacterial membrane --- Certainty = 0.0000 (Not Clear) < succ>
bacterial outside --- Certainty = 0.0000 (Not Clear) < succ>

[9095] An alignment of the GAS and GBS proteins is shown below.

| Identities = 146/256 (57%), Positives = 191/256 (74%), Gaps = 1/256 (0%) | | | |
|---|---|---|---|
| Query: | 2 | EYLETININHIAPNPYQPRLEFNTKELEELANSIKINGLIQPIIVRPSAVFGYELVAGER | 61 |
| | | E L + I I NPYQPR++FN +EL++LA SIK NGLIQPIIVR S +FGYELVAGER | |
| Sbjct: | 14 | ELLIDLPIEDIVTNPYQPRIQFNQRELQDLATSIKSNGLIQPIIVRKSDIFGYELVAGER | 73 |
| Query: | 62 | RLRAAKLAKLESIPAIIKSYNNDDSMQLAIVENLQRSNLSPIEEAKAYSQLLQKKSMTHE | 121 |
| | | RL+A+K+A L+ +PAIIK + +SMQ AIVENLQRSNL+ IEEAKAY L++KK MTH+ | |
| Sbjct: | 74 | RLKASKMAGLKKVPAIIKKISTLESMQQAIVENLQRSNLNAIEEAKAYQLLVEKKHMTHD | 133 |
| Query: | 122 | ELAKYMGKSRPYISNTIRLLNLPPLITSAIEEGKLSSGHARALLSLPDASQQKDWYQRIL | 181 |
| | | E+AKYMGKSRPYISNT+RLL LP I AIEEGK+S+GHARALL+L D QQ +I | |
| Sbjct: | 134 | EIAKYMGKSRPYISNTLRLLQLPAPIIKAIEEGKISAGHARALLTLSDDKQQLYLTHKIQ | 193 |
| Query: | 182 | TEDISVRRLEKLLKQEKKTNHKSLQNKDVFLKHQENELAQFLGSKVKLTINKDGAGNIKI | 241 |
| | | E +SVR++E+L+ ++ S + K++F E +LA+ LG V + + + +G ++I | |
| Sbjct: | 194 | NEGLSVRQIEQLV-TSTPSSKLSKKTKNIFATSLEKQLAKSLGLSVNMKLTANHSGYLQI | 252 |
| Query: | 242 | AFANQEELNRIINTLK | 257 |
| | | +F+N +ELNRIIN LK | |
| Sbjct: | 253 | SFSNDDELNRIINKLK | 268 |

[9096] Based on this analysis, it was predicted that these proteins and their epitopes could be useful antigens for vaccines or diagnostics.

### EXAMPLE 1650

[9097] A DNA sequence (GBSx1745) was identified in S. agalactiae <SEQ ID 5109> which encodes the amino acid sequence <SEQ ID 5110>. Analysis of this protein sequence reveals the following:

| Possible site: 54 | | | |
|---|---|---|---|
| >>> Seems to have no N-terminal signal sequence | | | |
| INTEGRAL | Likelihood = −0.37 | Transmembrane | 2-18 (1-18) |

----- Final Results -----
bacterial membrane --- Certainty = 0.1150 (Affirmative) < succ>
bacterial outside --- Certainty = 0.0000 (Not Clear) < succ>
bacterial cytoplasm --- Certainty = 0.0000 (Not Clear) < succ>

[9098] A related GBS nucleic acid sequence <SEQ ID 10297> which encodes amino acid sequence <SEQ ID 10298> was also identified.

[9099] A related DNA sequence was identified in S. pyogenes <SEQ ID 5111> which encodes the amino acid sequence <SEQ ID 5112>. Analysis of this protein sequence reveals the following:

Possible site: 23
>>> Seems to have no N-terminal signal sequence
----- Final Results -----
bacterial cytoplasm --- Certainty = 0.3646 (Affirmative) < succ>
bacterial membrane --- Certainty = 0.0000 (Not Clear) < succ>
bacterial outside --- Certainty = 0.0000 (Not Clear) < succ>

[9100] An alignment of the GAS and GBS proteins is shown below.

| Identities = 353/455 (77%), Positives = 401/455 (87%), Gaps = 6/455 (1%) | | | |
|---|---|---|---|
| Query: | 32 | MTENEQLFWNRVLELSRSQIAPAAYEFFVLEARLLKIEHQTAVITLDNIEMKKLFWEQNL | 91 |
| | | MTENEQ+FWNRVLEL++SQ+ A YEFFV +ARLLK++ A I LD +MK+LFWE+NL | |
| Sbjct: | 1 | MTENEQIFWNRVLELAQSQLKQATYEFFVHDARLLKVDKHIATIYLD--QMKELFWEKNL | 58 |
| Query: | 92 | GPVILTAGFEIFNAEITANYV-SNDLHLQETSFS-NYQQSSNEVNTLPIRKIDSNLKEKY | 149 |
| | | VILTAGFE++NA+I+ +YV DL +++ N + +N+LP + S+L KY | |
| Sbjct: | 59 | KDVILTAGFEVYNAQISVDYVFEEDLMIEQNQTKINQKPKQQALNSLPT--VTSDLNSKY | 116 |
| Query: | 150 | TFANFVQGDENRWAVSASIAVADSPGTTYNPLFIWGGPGLGKTHLLNAIGNQVLRDNPNA | 209 |
| | | +F NF+QGDENRWAV+ASIAVA++PGTTYNPLFIWGGPGLGKTHLLNAIGN VL +NPNA | |
| Sbjct: | 117 | SFENFIQGDENRWAVAASIAVANTPGTTYNPLFIWGGPGLGKTHLLNAIGNSVLLENPNA | 176 |
| Query: | 210 | RVLYITAENFINEFVSHIRLDSMEELKEKFRNLDLLLIDDIQSLAKKTLGGTQEEFFNTF | 269 |
| | | R+ YITAENFINEFV HIRLD+M+ELKEKFRNLDLLLIDDIQSLAKKTL GTQEEFFNTF | |
| Sbjct: | 177 | RIKYITAENFINEFVIHIRLDTMDELKEKFRNLDLLLIDDIQSLAKKTLSGTQEEFFNTF | 236 |
| Query: | 270 | NALHTNDKQIVLTSDRNPNQLNDLEERLVTRFSWGLPVNITPPDFETRVAILTNKIQEYP | 329 |
| | | NALH N+KQIVLTSDR P+ LNDLE+RLVTRF WGL VNITPPDFETRVAILTNKIQEY | |
| Sbjct: | 237 | NALHNNNKQIVLTSDRTPDHLNDLEDRLVTRFKWGLTVNITPPDFETRVAILTNKIQEYN | 296 |
| Query: | 330 | YDFPQDTIEYLAGEFDSNVRELEGALKNISLVADFKHAKTITVDIAAEAIRARKNDGPIV | 389 |
| | | + FPQDTIEYLAG+FDSNVR+LEGALK+ISLVA+FK TITVDIAAEAIRARK DGP + | |
| Sbjct: | 297 | FIFPQDTIEYLAGQFDSNVRDLEGALKDISLVANFKQIDTITVDIAAEAIRARKQDGPKM | 356 |
| Query: | 390 | TVIPIEEIQIQVGKFYGVTVKEIKATKRTQDIVLARQVAMYLAREMTDNSLPKIGKEFGG | 449 |
| | | TVIPIEEIQ QVGKFYGVTVKEIKATKRTQ+IVLARQVAM+LAREMTDNSLPKIGKEFGG | |
| Sbjct: | 357 | TVIPIEEIQAQVGKFYGVTVKEIKATKRTQNIVLARQVAMFLAREMTDNSLPKIGKEFGG | 416 |
| Query: | 450 | RDHSTVLHAYNKIKNMVAQDDNLRIEIETIKNKIR | 484 |
| | | RDHSTVLHAYNKIKNM++QD++LRIEIETIKNKI+ | |
| Sbjct: | 417 | RDHSTVLHAYNKIKNMISQDESLRIEIETIKNKIK | 451 |

[9101] Based on this analysis, it was predicted that these proteins and their epitopes could be useful antigens for vaccines or diagnostics.

### EXAMPLE 1651

[9102] A DNA sequence (GBSx1746) was identified in S. agalactiae <SEQ ID 5113> which encodes the amino acid sequence <SEQ ID 5114>. Analysis of this protein sequence reveals the following:

Possible site: 14
>>> Seems to have no N-terminal signal sequence
----- Final Results -----
bacterial cytoplasm --- Certainty = 0.0556 (Affirmative) < succ>
bacterial membrane --- Certainty = 0.0000 (Not Clear) < succ>
bacterial outside --- Certainty = 0.0000 (Not Clear) < succ>

[9103] The protein has homology with the following sequences in the GENPEPT database.

| >GP: AAC45337 GB: AF000658 beta subunit of DNA polymerase III | | | |
|---|---|---|---|
| [Streptococcus pneumoniae] | | | |
| Identities = 278/378 (73%), Positives = 324/378 (85%) | | | |
| Query: | 1 | MIHFSINKNFFLHALTVTKRAISHKNAIPILSTVKIEVTRDAIILTGSNGQISIENTIPA | 60 |
| | | MIHFSINKN FL AL +TKRAIS KNAIPILSTVKI+VT + + L GSNGQISIEN I | |
| Sbjct: | 1 | MIHFSINKNLFLQALNITKRAISSKNAIPILSTVKIDVTNEGVTLIGSNGQISIENFISQ | 60 |
| Query: | 61 | SNENAGLLVTNPGSILLEAGFFINIISSLPDVTLEFTEIEQHQIVLTSGKSEITLKGKDV | 120 |
| | | NE+AGLL+T+ GSILLEA FFIN++SSLPDVTL+F EIEQ+QIVLTSGKSEITLKGKD | |
| Sbjct: | 61 | KNEDAGLLITSLGSILLEASFFINVVSSLPDVTLDFKEIEQNQIVLTSGKSEITLKGKDS | 120 |
| Query: | 121 | DQYPRLQEMTTDTPLTLETKLLKSIINETAFAASQQESRPILTGVHLVISQNKYFKAVAT | 180 |
| | | +QYPR+QE++ TPL LETKLLK IINETAFAAS QESRPILTGVH V+SQ+K K VAT | |
| Sbjct: | 121 | EQYPRIQEISASTPLILETKLLKKIINETAFAASTQESRPILTGVHFVLSQHKELKTVAT | 180 |
| Query: | 181 | DSHRMSQRTFQLEKSANNFDLVVPSKSLREFSAVFTDDIETVEVFFSDSQMLFRSENISF | 240 |
| | | DSHR+SQ+ LEK++++FD+V+PS+SLREFSAVFTDDIETVE+FF+++Q+LFRSENISF | |
| Sbjct: | 181 | DSHRLSQKKLTLEKNSDDFDVVIPSRSLREFSAVFTDDIETVEIFFANNQILFRSENISF | 240 |
| Query: | 241 | YTRLLEGNYPDTDRLLTNQFETEIIFNTNALRHAMERAYLISNATQNGTVRLEIQNETVS | 300 |
| | | YTRLLEGNYPDTDRL+ F T I FN LR +MERA L+S+ATQNGTV+LEI++ VS | |
| Sbjct: | 241 | YTRLLEGNYPDTDRLIPTDFNTTITFNVVNLRQSMERARLLSSATQNGTVKLEIKDGVVS | 300 |
| Query: | 301 | AHVNSPEVGKVNEELDTVSLKGDSLNISFNPTYLIESLKAVKSETVTIRFISPVRPFTLT | 360 |
| | | AHV+SPEVGKVNEE+DT + G+ L ISFNPTYLI+SLKA+ SE VTI FIS VRPFTL | |
| Sbjct: | 301 | AHVHSPEVGKVNEEIDTDQVTGEDLTISFNPTYLIDSLKALNSEKVTISFISAVRPFTLV | 360 |
| Query: | 361 | PGEDTEDFIQLITPVRTN | 378 |
| | | P + EDF+QLITPVRTN | |
| Sbjct: | 361 | PADTDEDFMQLITPVRTN | 378 |

[9104] A related DNA sequence was identified in S. pyogenes <SEQ ID 5115> which encodes the amino acid sequence <SEQ ID 5116>. Analysis of this protein sequence reveals the following:

| Possible site: 14 | | | | |
|---|---|---|---|---|
| >>> Seems to have no N-terminal signal sequence | | | | |
| | INTEGRAL | Likelihood = −1.70 | Transmembrane | 67-83 (67-83) |

```
----- Final Results -----
                              bacterial membrane --- Certainty = 0.1680(Affirmative) < succ>
                                bacterial outside --- Certainty = 0.0000(Not Clear) < succ>
                            bacterial cytoplasm --- Certainty = 0.0000(Not Clear) < succ>
```

[9105] An alignment of the GAS and GBS proteins is shown below.

| Identities = 295/378 (78%), Positives = 334/378 (88%) | | | |
|---|---|---|---|
| Query: | 1 | MIHFSINKNFFLHALTVTKRAISHKNAIPILSTVKIEVTRDAIILTGSNGQISIENTIPA | 60 |
| | | MI FSIN+ F+HAL TKRAIS KNAIPILS++KIEVT + LTGSNGQISIENTIP | |
| Sbjct: | 1 | MIQFSINRTLFIHALNTTKRAISTKNAIPILSSIKIEVTSTGVTLTGSNGQISIENTIPV | 60 |
| Query: | 61 | SNENAGLLVTNPGSILLEAGFFINIISSLPDVTLEFTEIEQHQIVLTSGKSEITLKGKDV | 120 |
| | | SNENAGLL+T+PG+ILLEA FFINIISSLPD+++ EIEQHQ+VLTSGKSEITLKGKDV | |
| Sbjct: | 61 | SNENAGLLITSPGAILLEASFFINIISSLPDISINVKEIEQHQVVLTSGKSEITLKGKDV | 120 |
| Query: | 121 | DQYPRLQEMTTDTPLTLETKLLKSIINETAFAASQQESRPILTGVHLVISQNKYFKAVAT | 180 |
| | | DQYPRLQE++T+ PL L+TKLLKSII ETAFAAS QESRPILTGVH+V+S +K FKAVAT | |
| Sbjct: | 121 | DQYPRLQEVSTENPLILKTKLLKSIIAETAFAASLQESRPILTGVHIVLSNHKDFKAVAT | 180 |
| Query: | 181 | DSHRMSQRTFQLEKSANNFDLVVPSKSLREFSAVFTDDIETVEVFFSDSQMLFRSENISF | 240 |
| | | DSHRMSQR L+ ++ +FD+V+PSKSLREFSAVFTDDIETVEVFFS SQ+LFRSE+ISF | |
| Sbjct: | 181 | DSHRMSQRLITLDNTSADFDVVIPSKSLREFSAVFTDDIETVEVFFSPSQILFRSEHISF | 240 |
| Query: | 241 | YTRLLEGNYPDTDRLLTNQFETEIIFNTNALRHAMERAYLISNATQNGTVRLEIQNETVS | 300 |
| | | YTRLLEGNYPDTDRLL +FETE++FNT +LRHAMERA+LISNATQNGTV+LEI +S | |
| Sbjct: | 241 | YTRLLEGNYPDTDRLLMTEFETEVVFNTQSLRHAMERAFLISNATQNGTVKLEITQNHIS | 300 |
| Query: | 301 | AHVNSPEVGKVNEELDTVSLKGDSLNISFNPTYLIESLKAVKSETVTIRFISPVRPFTLT | 360 |
| | | AHVNSPEVGKVNE+LD VS G L ISFNPTYLIESLKA+KSETV I F+SPVRPFTLT | |
| Sbjct: | 301 | AHVNSPEVGKVNEDLDIVSQSGSDLTISFNPTYLIESLKAIKSETVKIHFLSPVRPFTLT | 360 |
| Query: | 361 | PGEDTEDFIQLITPVRTN | 378 |
| | | PG++ E FIQLITPVRTN | |
| Sbjct: | 361 | PGDEEESFIQLITPVRTN | 378 |

[9106] Based on this analysis, it was predicted that these proteins and their epitopes could be useful antigens for vaccines or diagnostics.

### EXAMPLE 1652

[9107] A DNA sequence (GBSx1747) was identified in S. agalactiae <SEQ ID 5117> which encodes the amino acid sequence <SEQ ID 5118>. Analysis of this protein sequence reveals the following:

```
Possible site: 19
>>> Seems to have no N-terminal signal sequence
----- Final Results -----
                            bacterial cytoplasm --- Certainty = 0.0857(Affirmative) < succ>
                              bacterial membrane --- Certainty = 0.0000(Not Clear) < succ>
                                bacterial outside --- Certainty = 0.0000(Not Clear) < succ>
```

[9108] A related GBS nucleic acid sequence <SEQ ID 10299> which encodes amino acid sequence <SEQ ID 10300> was also identified.

[9109] The protein has homology with the following sequences in the GENPEPT database.

| >GP: AAC00282 GB: AF008220 YtlR [Bacillus subtilis] | | | |
|---|---|---|---|
| Identities = 83/298 (27%), Positives = 138/298 (45%), Gaps = 35/298 (11%) | | | |
| Query: | 19 | YIIANPHAGNKNASTIVGKIQE--LYHTEDISVFYTEQKDDEK--KQVINILRSFKESDH | 74 |
| | | + I NP AG++N + IQ+ + + F TE + + I+ ++ +K | |
| Sbjct: | 5 | FFIINPTAGHRNGLRVWKSIQKELIKRKVEHRSFLTEHPGHAEVLARQISTIQEYKLK-R | 63 |
| Query: | 75 | LMIIGGDGTLSKVMTYLPQ--HIPCTYYPVGSGNDFARALKIPNL---------KETLTA | 123 |
| | | L++IGGDGT+ +V+ L I ++ P G+ NDF+R I + K LT | |
| Sbjct: | 64 | LIVIGGDGTMHEVVNGLKDVDDIELSFVPAGAYNDFSRGFSIKKIDLIQEIKKVKRPLT- | 122 |
| Query: | 124 | IQTERLKEINCFIYDKGLIL---NSLDLGFAAYVVWKASNSKIKNILNRYRLGKITYIVI | 180 |
| | | +T L +N F+ DK IL N + +GF AYV KA ++ + RL + Y + | |
| Sbjct: | 123 | -RTFHLGSVN-FLQDKSQILYFMNHIGIGFDAYVNKKAMEFPLRRVFLFLRLRFLVYPL- | 179 |
| Query: | 181 | AIKSLLHSSK------VQVLVEGETGQQIKLNDLYFFALANNTYFGGGITIWPKASALTA | 234 |
| | | S LH+S + E ET + +D++F ++N+ ++GGG+ P A+ | |
| Sbjct: | 180 | ---SHLHASATFKPFTLACTTEDETRE---FHDVWFAVVSNHPFYGGGMKAAPLANPREK | 233 |
| Query: | 235 | ELDMVYAKGHTFLKRLSILLSLVFKRHTTSKSIKHQTFKAMTVYFPKNSLIEIDGEIV | 292 |
| | | D+V + FLK+ +L + F +HT + K +T Y DGEI+ | |
| Sbjct: | 234 | TFDIVIVENQPFLKKYWLLCLMAFGKHTKMDGVTMFKAKDITFYTKDKIPFHADGEIM | 291 |

[9110] Based on this analysis, it was predicted that these proteins and their epitopes could be useful antigens for vaccines or diagnostics.

### EXAMPLE 1653

[9111] A DNA sequence (GBSx1748) was identified in S. agalactiae <SEQ ID 5121> which encodes the amino acid sequence <SEQ ID 5122>. Analysis of this protein sequence reveals the following:

```
Possible site: 15
>>> Seems to have no N-terminal signal sequence
----- Final Results -----
                            bacterial cytoplasm --- Certainty = 0.3792(Affirmative) < succ>
                              bacterial membrane --- Certainty = 0.0000(Not Clear) < succ>
                                bacterial outside --- Certainty = 0.0000(Not Clear) < succ>
```

[9112] The protein has homology with the following sequences in the GENPEPT database.

| >GP: AAC45338 GB: AF000658 ORFX [Streptococcus pneumoniae] | | | |
|---|---|---|---|
| Identities = 46/63 (73%), Positives = 57/63 (90%) | | | |
| Query: | 1 | MYQVGSLVEMKKPHACVIKETGKKANQWKVLRVGADIKIQCTNCQHVIMMSRYDFERKLK | 60 |
| | | MYQVG+ VEMKKPHAC IK TGKKAN+W++ RVGADIKI+C+NC+HV+MM RYDFERK+ | |
| Sbjct: | 1 | MYQVGNFVEMKKPHACTIKSTGKKANRWEITRVGADIKIKCSNCEHVVMMGRYDFERKMN | 60 |
| Query: | 61 | KVL | 63 |
| | | K++ | |
| Sbjct: | 61 | KII | 63 |

[9113] A related DNA sequence was identified in S. pyogenes <SEQ ID 5123> which encodes the amino acid sequence <SEQ ID 5124>. Analysis of this protein sequence reveals the following:

```
Possible site: 56
>>> Seems to have no N-terminal signal sequence
----- Final Results -----
                            bacterial cytoplasm --- Certainty = 0.4038(Affirmative) < succ>
                              bacterial membrane --- Certainty = 0.0000(Not Clear) < succ>
                                bacterial outside --- Certainty = 0.0000(Not Clear) < succ>
```

[9114] An alignment of the GAS and GBS proteins is shown below.

| Identities = 63/65 (96%), Positives = 64/65 (97%) | | | |
|---|---|---|---|
| Query: | 1 | MYQVGSLVEMKKPHACVIKETGKKANQWKVLRVGADIKIQCTNCQHVIMMSRYDFERKLK | 60 |
| | | MYQ+GS VEMKKPHACVIKETGKKANQWKVLRVGADIKIQCTNCQHVIMMSRYDFERKLK | |
| Sbjct: | 1 | MYQIGSFVEMKKPHACVIKETGKKANQWKVLRVGADIKIQCTNCQHVIMMSRYDFERKLK | 60 |
| Query: | 61 | KVLQP | 65 |
| | | KVLQP | |
| Sbjct: | 61 | KVLQP | 65 |

[9115] Based on this analysis, it was predicted that these proteins and their epitopes could be useful antigens for vaccines or diagnostics.

### EXAMPLE 1654

[9116] A DNA sequence (GBSx1749) was identified in S. agalactiae <SEQ ID 5125> which encodes the amino acid sequence <SEQ ID 5126>. Analysis of this protein sequence reveals the following:

| Possible site: 15 | | | | |
|---|---|---|---|---|
| >>> Seems to have no N-terminal signal sequence | | | | |
| | INTEGRAL | Likelihood = −4.99 | Transmembrane | 48-64 (47-66) |

```
----- Final Results -----
                              bacterial membrane --- Certainty = 0.2996(Affirmative) < succ>
                                bacterial outside --- Certainty = 0.0000(Not Clear) < succ>
                            bacterial cytoplasm --- Certainty = 0.0000(Not Clear) < succ>
```

[9117] The protein has no significant homology with any sequences in the GENPEPT database.

[9118] No corresponding DNA sequence was identified in S. pyogenes.

[9119] Based on this analysis, it was predicted that this protein and its epitopes, could be useful antigens for vaccines or diagnostics.

### EXAMPLE 1655

[9120] A DNA sequence (GBSx1750) was identified in S. agalactiae <SEQ ID 5127> which encodes the amino acid sequence <SEQ ID 5128>. Analysis of this protein sequence reveals the following:

```
Possible site: 15
>>> Seems to have no N-terminal signal sequence
----- Final Results -----
                            bacterial cytoplasm --- Certainty = 0.4171(Affirmative) < succ>
                              bacterial membrane --- Certainty = 0.0000(Not Clear) < succ>
                                bacterial outside --- Certainty = 0.0000(Not Clear) < succ>
```

[9121] The protein has no significant homology with any sequences in the GENPEPT database.

[9122] No corresponding DNA sequence was identified in S. pyogenes.

[9123] Based on this analysis, it was predicted that this protein and its epitopes, could be useful antigens for vaccines or diagnostics.

### EXAMPLE 1656

[9124] A DNA sequence (GBSx1751) was identified in S. agalactiae <SEQ ID 5129> which encodes the amino acid sequence <SEQ ID 5130>. This protein is predicted to be GTP-binding protein. Analysis of this protein sequence reveals the following:

```
Possible site: 41
>>> Seems to have no N-terminal signal sequence
----- Final Results -----
                            bacterial cytoplasm --- Certainty = 0.3952(Affirmative) < succ>
                              bacterial membrane --- Certainty = 0.0000(Not Clear) < succ>
                                bacterial outside --- Certainty = 0.0000(Not Clear) < succ>
```

[9125] A related GBS nucleic acid sequence <SEQ ID 8875> which encodes amino acid sequence <SEQ ID 8876> was also identified. Analysis of this protein sequence reveals the following:

```
Lipop: Possible site: −1 Crend: 0
McG: Discrim Score: 0.53
GvH: Signal Score (−7.5): −0.13
          Possible site: 29
>>> Seems to have a cleavable N-term signal seq.
ALOM program count: 0 value: 1.48 threshold: 0.0
      PERIPHERAL Likelihood = 1.48 195
modified ALOM score: −0.80
*** Reasoning Step: 3
----- Final Results -----
                                bacterial outside --- Certainty = 0.3000(Affirmative) < succ>
                              bacterial membrane --- Certainty = 0.0000(Not Clear) < succ>
                            bacterial cytoplasm --- Certainty = 0.0000(Not Clear) < succ>
```

[9126] The protein has homology with the following sequences in the GENPEPT database.

| >GP: BAB07770 GB: AP001520 GTP-binding protein [Bacillus halodurans] | | | |
|---|---|---|---|
| Identities = 223/329 (67%), Positives = 273/329 (82%), Gaps = 5/329 (1%) | | | |
| Query: | 1 | MVEVPDERLQKLTELITPKKTVPTTFEFTDIAGIVKGASKGEGLGNKFLANIREVDAIVH | 60 |
| | | +VEVPD RLQKLTEL+ PKKTVPT FEFTDIAGIV+GASKGEGLGN+FL++IR+VDAI H | |
| Sbjct: | 43 | IVEVPDPRLQKLTELVNPKKTVPTAFEFTDIAGIVEGASKGEGLGNQFLSHIRQVDAISH | 102 |
| Query: | 61 | VVRAFDDENVMREQGREDAFVDPIADIDTINLELILADLESINKRYARVEKMARTQKDKE | 120 |
| | | VVR FDDEN+ G VDPI DI INLELILADLES++KR++RV+K+A+T KDKE | |
| Sbjct: | 103 | VVRCFDDENITHVSGS----VDPIRDISVINLELILADLESVDKRFSRVQKLAKT-KDKE | 157 |
| Query: | 121 | SVAEFNVLQKIKPVLEDGKSARTIEFTEEEAKVVKGLFLLTTKPVLYVANVDEDKVADPD | 180 |
| | | +VAE VL+K+K E+ K AR+IEFTEE+ K+VKGL LLT+KPVLYVANV ED V PD | |
| Sbjct: | 158 | AVAELEVLEKLKDAFENEKPARSIEFTEEQQKIVKGLHLLTSKPVLYVANVSEDDVLSPD | 217 |
| Query: | 181 | DIDYVNQIRAFAETENAEVVVISARAEEEISELDDEDKLEFLEAIGLTESGVDKLTRAAY | 240 |
| | | D +V +++AFA EN+EV+V+SA+ EEEI+ELD E+K FLE +G+ ESG+D+L RAAY | |
| Sbjct: | 218 | DNPFVQKVKAFAAEENSEVIVVSAKIEEEIAELDGEEKAMFLEELGIQESGLDQLIRAAY | 277 |
| Query: | 241 | HLLGLGTYFTAGEKEVRAWTFKRGIKAPQAASIIHSDFERGFIRAVTMSYDDLIQYGSEK | 300 |
| | | LLGL TYFTAGE+EVRAWTF++G KAPQAA IIHSDFE+GFIRA T+SY+DL++ GS | |
| Sbjct: | 278 | SLLGLQTYFTAGEQEVRAWTFRKGTKAPQAAGIIHSDFEKGFIRAETVSYNDLVEAGSMA | 337 |
| Query: | 301 | AVKEAGRLREEGKEYIVQDGDIMEFRFNV | 329 |
| | | KE G++R EGKEY+VQDGD++ FRFNV | |
| Sbjct: | 338 | VAKERGKVRLEGKEYVVQDGDVIHFRFNV | 366 |

[9127] A related DNA sequence was identified in S. pyogenes <SEQ ID 5131> which encodes the amino acid sequence <SEQ ID 5132>. Analysis of this protein sequence reveals the following:

```
Possible site: 29
>>> Seems to have a cleavable N-term signal seq.
----- Final Results -----
                                bacterial outside --- Certainty = 0.3000(Affirmative) < succ>
                              bacterial membrane --- Certainty = 0.0000(Not Clear) < succ>
                            bacterial cytoplasm --- Certainty = 0.0000(Not Clear) < succ>
```

[9128] The protein has homology with the following sequences in the databases:

| >GP: BAB07770 GB: AP001520 GTP-binding protein [Bacillus halodurans] | | | |
|---|---|---|---|
| Identities = 259/371 (69%), Positives = 314/371 (83%), Gaps = 5/371 (1%) | | | |
| Query: | 1 | MALTAGIVGLPNVGKSTLFNAITKAGAEAANYPFATIDPNVGMVEVPDERLQKLTELITP | 60 |
| | | MALT GIVGLPNVGKSTLFNAIT+AGAE+ANYPF TIDPNVG+VEVPD RLQKLTEL+ P | |
| Sbjct: | 1 | MALTTGIVGLPNVGKSTLFNAITQAGAESANYPFCTIDPNVGIVEVPDPRLQKLTELVNP | 60 |
| Query: | 61 | KKTVPTTFEFTDIAGIVKGASRGEGLGNKFLANIREIDAIVHVVRAFDDENVMREQGRED | 120 |
| | | KKTVPT FEFTDIAGIV+GAS+GEGLGN+FL++IR++DAI HVVR FDDEN+ G | |
| Sbjct: | 61 | KKTVPTAFEFTDIAGIVEGASKGEGLGNQFLSHIRQVDAISHVVRCFDDENITHVSGS-- | 118 |
| Query: | 121 | AFVDPIADIDTINLELILADLESINKRYARVEKMARTQKDKESVAEFNVLQKIKPVLEDG | 180 |
| | | VDPI DI INLELILADLES++KR++RV+K+A+T KDKE+VAE VL+K+K E+ | |
| Sbjct: | 119 | --VDPIRDISVINLELILADLESVDKRFSRVQKLAKT-KDKEAVAELEVLEKLKDAFENE | 175 |
| Query: | 181 | KSARTIEFTEDEAKVVKGLFLLTTKPVLYVANVDEDKVANPDGIDYVKQIRDFAATENAE | 240 |
| | | K AR+IEFTE++ K+VKGL LLT+KPVLYVANV ED V +PD +V++++ FAA EN+E | |
| Sbjct: | 176 | KPARSIEFTEEQQKIVKGLHLLTSKPVLYVANVSEDDVLSPDDNPFVQKVKAFAAEENSE | 235 |
| Query: | 241 | VVVISARAEEEISELDDEDKEEFLEAIGLTESGVDKLTRAAYHLLGLGTYFTAGEKEVRA | 300 |
| | | V+V+SA+ EEEI+ELD E+K FLE +G+ ESG+D+L RAAY LLGL TYFTAGE+EVRA | |
| Sbjct: | 236 | VIVVSAKIEEEIAELDGEEKAMFLEELGIQESGLDQLIRAAYSLLGLQTYFTAGEQEVRA | 295 |
| Query: | 301 | WTFKRGIKAPQAAGIIHSDFERGFIRAVTMSYDDLMTYGSEKAVKEAGRLREEGKEYVVQ | 360 |
| | | WTF++G KAPQAAGIIHSDFE+GFIRA T+SY+DL+ GS KE G++R EGKEYVVQ | |
| Sbjct: | 296 | WTFRKGTKAPQAAGIIHSDFEKGFIRAETVSYNDLVEAGSMAVAKERGKVRLEGKEYVVQ | 355 |
| Query: | 361 | DGDIMEFRFNV | 371 |
| | | DGD++ FRFNV | |
| Sbjct: | 356 | DGDVIHFRFNV | 366 |

[9129] An alignment of the GAS and GBS proteins is shown below.

| Identities = 316/329 (96%), Positives = 322/329 (97%) | | | |
|---|---|---|---|
| Query: | 1 | MVEVPDERLQKLTELITPKKTVPTTFEFTDIAGIVKGASKGEGLGNKFLANIREVDAIVH | 60 |
| | | MVEVPDERLQKLTELITPKKTVPTTFEFTDIAGIVKGAS+GEGLGNKFLANIRE+DAIVH | |
| Sbjct: | 43 | MVEVPDERLQKLTELITPKKTVPTTFEFTDIAGIVKGASRGEGLGNKFLANIREIDAIVH | 102 |
| Query: | 61 | VVRAFDDENVMREQGREDAFVDPIADIDTINLELILADLESINKRYARVEKMARTQKDKE | 120 |
| | | VVRAFDDENVMREQGREDAFVDPIADIDTINLELILADLESINKRYARVEKMARTQKDKE | |
| Sbjct: | 103 | VVRAFDDENVMREQGREDAFVDPIADIDTINLELILADLESINKRYARVEKMARTQKDKE | 162 |
| Query: | 121 | SVAEFNVLQKIKPVLEDGKSARTIEFTEEEAKVVKGLFLLTTKPVLYVANVDEDKVADPD | 180 |
| | | SVAEFNVLQKIKPVLEDGKSARTIEFTE+EAKVVKGLFLLTTKPVLYVANVDEDKVA+PD | |
| Sbjct: | 163 | SVAEFNVLQKIKPVLEDGKSARTIEFTEDEAKVVKGLFLLTTKPVLYVANVDEDKVANPD | 222 |
| Query: | 181 | DIDYVNQIRAFAETENAEVVVISARAEEEISELDDEDKLEFLEAIGLTESGVDKLTRAAY | 240 |
| | | IDYV QIR FA TENAEVVVISARAEEEISELDDEDK EFLEAIGLTESGVDKLTRAAY | |
| Sbjct: | 223 | GIDYVKQIRDFAATENAEVVVISARAEEEISELDDEDKEEFLEAIGLTESGVDKLTRAAY | 282 |
| Query: | 241 | HLLGLGTYFTAGEKEVRAWTFKRGIKAPQAASIIHSDFERGFIRAVTMSYDDLIQYGSEK | 300 |
| | | HLLGLGTYFTAGEKEVRAWTFKRGIKAPQAA IIHSDFERGFIRAVTMSYDDL+ YGSEK | |
| Sbjct: | 283 | HLLGLGTYFTAGEKEVRAWTFKRGIKAPQAAGIIHSDFERGFIRAVTMSYDDLMTYGSEK | 342 |
| Query: | 301 | AVKEAGRLREEGKEYIVQDGDIMEFRFNV | 329 |
| | | AVKEAGRLREEGKEY+VQDGDIMEFRFNV | |
| Sbjct: | 343 | AVKEAGRLREEGKEYVVQDGDIMEFRFNV | 371 |

[9130] SEQ ID 8876 (GBS177) was expressed in E. coli as a His-fusion product. SDS-PAGE analysis of total cell extract is shown in FIG. 38 (lane 4; MW 41.2 kDa).

[9131] The GBS177-His fusion product was purified (FIG. 118A; see also FIG. 202, lane 7) and used to immunise mice (lane 1 product; 20 μg/mouse). The resulting antiserum was used for Western blot, FACS, and in the in vivo passive protection assay (Table III). These tests confirm that the protein is immunoaccessible on GBS bacteria and that it is an effective protective immunogen.

[9132] Based on this analysis, it was predicted that these proteins and their epitopes could be useful antigens for vaccines or diagnostics.

### EXAMPLE 1657

[9133] A DNA sequence (GBSx1752) was identified in S. agalactiae <SEQ ID 5133> which encodes the amino acid sequence <SEQ ID 5134>. This protein is predicted to be stage V sporulation protein C (pth). Analysis of this protein sequence reveals the following:

```
Possible site: 19
>>> Seems to have no N-terminal signal sequence
----- Final Results -----
                            bacterial cytoplasm --- Certainty = 0.2212(Affirmative) < succ>
                              bacterial membrane --- Certainty = 0.0000(Not Clear) < succ>
                                bacterial outside --- Certainty = 0.0000(Not Clear) < succ>
```

[9134] A related GBS nucleic acid sequence <SEQ ID 10301> which encodes amino acid sequence <SEQ ID 10302> was also identified.

[9135] The protein has homology with the following sequences in the GENPEPT database.

| >GP: BAB03787 GB: AP001507 stage V sporulation protein C | | | |
|---|---|---|---|
| (peptidyl-tRNA hydrolase) [Bacillus halodurans] | | | |
| Identities = 89/187 (47%), Positives = 127/187 (67%), Gaps = 2/187 (1%) | | | |
| Query: | 6 | VKMIVGLGNPGSKYNDTKHNIGFMAVDRIVKDLDVNFTEDKNFKAEIGSDFINGEKIYFI | 65 |
| | | +K+IVGLGNPG+KY+ T+HN+GF VD + + L++ + K G I+GEKI+ + | |
| Sbjct: | 1 | MKLIVGLGNPGAKYDGTRHNVGFDVVDAVARRLNIEIKQSKA-NGLYGEGRIDGEKIFLL | 59 |
| Query: | 66 | KPTTFMNNSGIAVKALLTYYNISIKDMIIIYDDLDMEVGKIRFRQKGSAGGHNGIKSIIA | 125 |
| | | KP TFMN SG +V+ L YYN+ ++D+++IYDDLD+ VGKIR RQKGSAGGHNG+KS+IA | |
| Sbjct: | 60 | KPQTFMNRSGESVRPFLEYYNMEVEDLLVIYDDLDLPVGKIRLRQKGSAGGHNGMKSLIA | 119 |
| Query: | 126 | HLGTQEFDRIKVGIGRPNGRMTVINHVLGKFDKNDEIMILNTLDKVDNAVNYYLQTNDFQ | 185 |
| | | HLGT +F RI+VG+ RP TV+ HVLG++ ++ I +D A + + F | |
| Sbjct: | 120 | HLGTSDFKRIRVGVDRPAPGETVVQHVLGRYRPEEKDAISEAIDLSAEAAEAFTK-KPFL | 178 |
| Query: | 186 | KTMQKYN | 192 |
| | | + M +N | |
| Sbjct: | 179 | EVMNTFN | 185 |

[9136] A related DNA sequence was identified in S. pyogenes <SEQ ID 5135> which encodes the amino acid sequence <SEQ ID 5136>. Analysis of this protein sequence reveals the following:

```
Possible site: 30
>>> Seems to have no N-terminal signal sequence
----- Final Results -----
                            bacterial cytoplasm --- Certainty = 0.2840(Affirmative) < succ>
                              bacterial membrane --- Certainty = 0.0000(Not Clear) < succ>
                                bacterial outside --- Certainty = 0.0000(Not Clear) < succ>
```

[9137] An alignment of the GAS and GBS proteins is shown below.

| Identities = 148/189 (78%), Positives = 166/189 (87%) | | | |
|---|---|---|---|
| Query: | 5 | MVKMIVGLGNPGSKYNDTKHNIGFMAVDRIVKDLDVNFTEDKNFKAEIGSDFINGEKIYF | 64 |
| | | MVKMIVGLGNPGSKY TKHNIGFMA+D IVK+LDV FT+DKNFKA+IGS FIN EK+YF | |
| Sbjct: | 16 | MVKMIVGLGNPGSKYEKTKHNIGFMAIDNIVKNLDVTFTDDKNFKAQIGSTFINHEKVYF | 75 |
| Query: | 65 | IKPTTFMNNSGIAVKALLTYYNISIKDMIIIYDDLDMEVGKIRFRQKGSAGGHNGIKSII | 124 |
| | | +KPTTFMNNSGIAVKALLTYYNI I D+I+IYDDLDMEV K+R R KGSAGGHNGIKSII | |
| Sbjct: | 76 | VKPTTFMNNSGIAVKALLTYYNIDITDLIVIYDDLDMEVSKLRLRSKGSAGGHNGIKSII | 135 |
| Query: | 125 | AHLGTQEFDRIKVGIGRPNGRMTVINHVLGKFDKNDEIMILNTLDKVDNAVNYYLQTNDF | 184 |
| | | AH+GTQEF+RIKVGIGRP MTVINHV+G+F+ D I I TLD+V NAV +YLQ NDF | |
| Sbjct: | 136 | AHIGTQEFNRIKVGIGRPLKGMTVINHVMGQFNTEDNIAISLTLDRVVNAVKFYLQENDF | 195 |
| Query: | 185 | QKTMQKYNG | 193 |
| | | +KTMQK+NG | |
| Sbjct: | 196 | EKTMQKFNG | 204 |

[9138] Based on this analysis, it was predicted that these proteins and their epitopes could be useful antigens for vaccines or diagnostics.

### EXAMPLE 1658

[9139] A DNA sequence (GBSx1753) was identified in S. agalactiae <SEQ ID 5137> which encodes the amino acid sequence <SEQ ID 5138>. This protein is predicted to be transcription-repair coupling factor (mfd). Analysis of this protein sequence reveals the following:

```
Possible site: 37
>>> Seems to have no N-terminal signal sequence
----- Final Results -----
                            bacterial cytoplasm --- Certainty = 0.2456(Affirmative) < succ>
                              bacterial membrane --- Certainty = 0.0000(Not Clear) < succ>
                                bacterial outside --- Certainty = 0.0000(Not Clear) < succ>
```

[9140] The protein has homology with the following sequences in the GENPEPT database.

| >GP: AAD03810 GB: AF054624 transcription-repair coupling factor | | | |
|---|---|---|---|
| [Lactobacillus sakei] | | | |
| Identities = 523/1051 (49%), Positives = 733/1051 (68%), | | | |
| Gaps = 20/1051 (1%) | | | |
| Query: | 1 | MNIIELFSQNKVVRTWHSGLVTNSRQLVMGFSGASKAIAIASAYEKLSKKIMVVTATQTD | 60 |
| | | M++I + + V++ RQL+ G SG++K + +A+ Y++ + ++++ + | |
| Sbjct: | 1 | MDLISMLGNTQQVQSVLENQKPGVRQLLTGLSGSAKTLFLATIYKQQRQPLLIIESNMFQ | 60 |
| Query: | 61 | SDKLSSDISSLIGEDNVYQFFADDVPAAEFIFSSLDKSISRLSALRFLKDPEKNGVLITS | 120 |
| | | +++++ D+++ + D +Y F ++V AAE SS + R+ L FL +K G+++TS | |
| Sbjct: | 61 | ANQVAEDLANQLNGDQIYTFPVEEVMAAEIAVSSPESRAERVRTLSFLATGKK-GIVVTS | 119 |
| Query: | 121 | ISGLRLLLPNPEVFSKSQYKFEIGQECYLDKLCKNLVNLGYQKVSQVFSPGEFSQRGDIL | 180 |
| | | ++G+R LLP + SQ + E+G E L L +GY + V PGEF+ RGDI+ | |
| Sbjct: | 120 | VAGMRRLLPTVRQWRDSQTQIEMGGEVDPKILGAQLAEMGYHRDKLVGKPGEFAMRGDII | 179 |
| Query: | 181 | DIFEMTQEYPYRLEFFGDEIDGIRQFDIDTQKSLKQLESVQISPADDIILQDADFERAKK | 240 |
| | | DIF + E P R+E F E+D IR F+ DTQ+S++ LESV I PA D++ A E A + | |
| Sbjct: | 180 | DIFPLDTENPVRIELFDTEVDAIRSFEADTQRSIENLESVAIMPATDLLANAAQLEMAGE | 239 |
| Query: | 241 | KLEG-YLVTASEVQ------------RTYLSEVLSTTENHFKHSDIRRFLSIFYEKEWGI | 287 |
| | | L+ Y TA+++ T +S +L+ + ++ F+ Y + | |
| Sbjct: | 240 | ALQADYQQTAAKITAKDDQKALAVNFETPISRLLAGE----RLENLALFVDYLYPDHTSL | 295 |
| Query: | 288 | LDYIPEGTPLFVDDFQKIVDRNAKLDLEIASLLTEDLQQGKSHSSLNYFSDPYKQLRQYQ | 347 |
| | | +DY + DD+ +I + L E A+ T+ L + + D + ++Q Q | |
| Sbjct: | 296 | IDYFKNSGLVVFDDYPRIQETQRVLAEEAANWQTDMLGSRRLLPAQKLLVDVHHLMKQDQ | 355 |
| Query: | 348 | -PATFFSNFHKGLGNLKFDKLHHFTQYGMQEFFNQFPLLVDEINRYKKSGATVLLQVDSQ | 406 |
| | | P + S F KG+G LK D L + +Q+FF+Q PLL E++R++K TV++ V | |
| Sbjct: | 356 | HPHLYLSLFQKGMGKLKLDTLGNMPTRNVQQFFSQMPLLKTEMSRWQKQQQTVVVLVSDA | 415 |
| Query: | 407 | KGLNLLQENLKEYGLDLIISDKNDIVQKESQLIVGHLSNGFYFADEKIVLITEREIYHRR | 466 |
| | | K + + + ++ ++ ++ K +V + Q++ G L NGF D K+V++TE+E+++ | |
| Sbjct: | 416 | KRVKKIDQTFHDFEIEATVTTKTKLVAGQIQIVQGSLQNGFELPDLKLVVLTEKELFNTA | 475 |
| Query: | 467 | VKRKIRRSNISNAERLKDYNELSVGDYVVHNVHGVGKFLGIETIEIQGIHRDYLTIQYQN | 526 |
| | | K+K+RR ++NAERLK Y+EL GDYVVH HG+G+++G+ET+E+ G+H+DY+TI Y++ | |
| Sbjct: | 476 | PKKKVRRQTLANAERLKSYSELKPGDYVVHVNHGIGEYVGMETLEVDGVHQDYITILYRD | 535 |
| Query: | 527 | ADRISIPVEQIELLTKYVSADGKEPKINTLNDGRFKKAKQRVAKQVEDIADDLLKLYAER | 586 |
| | | ++ IPV Q++++ KYVSA+ K PKIN L ++K K +V+ ++EDIADDL++LYA+R | |
| Sbjct: | 536 | NGKLFIPVTQLDMVQKYVSAESKTPKINKLGGAEWQKTKSKVSAKIEDIADDLIELYAQR | 595 |
| Query: | 587 | SQLQGFAFSPDDNMQNDFDNDFAYVETEDQLRSIKEIKQDMEGNRPMDRLLVGDVGFGKT | 646 |
| | | +G+AF DD +Q DF+N FAY ET+DQLRS EIK DME RPMDRLLVGDVGFGKT | |
| Sbjct: | 596 | EAEKGYAFPKDDQLQADFENQFAYPETDDQLRSTAEIKHDMEKVRPMDRLLVGDVGFGKT | 655 |
| Query: | 647 | EVAMRAAFKAVNDHKQVVVLVPTTVLAQQHFENFKERFSNYPVTVDVLSRFRSKKEQTDT | 706 |
| | | EVA+RAAFKAV KQV LVPTT+LAQQH+EN RF+++PV + +LSRF+++KE T T | |
| Sbjct: | 656 | EVALRAAFKAVAAGKQVAFLVPTTILAQQHYENMLARFADFPVELGLLSRFKTRKEVTAT | 715 |
| Query: | 707 | LKRLSKGQVDIIIGTHRLLSQDVVFSDLGLIVIDEEQRFGVKHKEKLKELKTKVDVLTLT | 766 |
| | | LK L KGQVDI+IGTHRLLS+DVVF DLGL+++DEEQRFGVKHKE+LK+LK +VDVLTLT | |
| Sbjct: | 716 | LKGLEKGQVDIVIGTHRLLSKDVVFKDLGLLIVDEEQRFGVKHKERLKQLKAQVDVLTLT | 775 |
| Query: | 767 | ATPIPRTLHMSMLGIRDLSVIETPPTNRYPVQTYVLETNPGLVREAIIREIDRGGQVFYV | 826 |
| | | ATPIPRTLHMSMLG+RDLSVIETPPTNRYP+QTYV+E N G +REAI RE++R GQVFY+ | |
| Sbjct: | 776 | ATPIPRTLHMSMLGVRDLSVIETPPTNRYPIQTYVMEQNAGAMREAIERELERNGQVFYL | 835 |
| Query: | 827 | YNKVDTIDQKVSELQELVPEASIGFVHGQMSEIQLENTLIDFINGDYDVLVATTIIETGV | 886 |
| | | +N+V I+Q V E+Q LVPEA++G+ HGQM+E QLE + DF+ G YDVLV TTIIETGV | |
| Sbjct: | 836 | HNRVSDIEQTVDEIQALVPEATVGYAHGQMTEAQLEGVIYDFVQGKYDVLVTTTIIETGV | 895 |
| Query: | 887 | DISNVNTLFVENADHMGLSTLYQLRGRVGRSNRIAYAYLMYRPDKVLTEISEKRLDAIKG | 946 |
| | | D+ NVNT+ VE+ADH GLS LYQLRGR+GRS+R+AY Y MY+PDKVLTE+SEKRL AIK | |
| Sbjct: | 896 | DMPNVNTMIVEDADHYGLSQLYQLRGRIGRSSRVAYGYFMYKPDKVLTEVSEKRLQAIKD | 955 |
| Query: | 947 | FTELGSGFKIAMRDLSIRGAGNILGASQSGFIDSVGFEMYSQLLEQAIATKQGKSLIRQK | 1006 |
| | | FTELGSGFKIAMRDLSIRGAGN+LG Q GFIDSVGF++YSQ+L +A+A KQGK + K | |
| Sbjct: | 956 | FTELGSGFKIAMRDLSIRGAGNLLGKQQHGFIDSVGFDLYSQMLSEAVAKKQGKK-VAAK | 1014 |
| Query: | 1007 | GNAELALQIDAYLPAEYISDERQKIEIYKRI | 1037 |
| | | NAE+ L+++AYLP +YI+D+RQKIEIYKRI | |
| Sbjct: | 1015 | TNAEIDLKLEAYLPDDYINDQRQKIEIYKRI | 1045 |

[9141] A related DNA sequence was identified in S. pyogenes <SEQ ID 5139> which encodes the amino acid sequence <SEQ ID 5140>. Analysis of this protein sequence reveals the following:

```
Possible site: 39
>>> Seems to have no N-terminal signal sequence
----- Final Results -----
                            bacterial cytoplasm --- Certainty = 0.2826(Affirmative) < succ>
                              bacterial membrane --- Certainty = 0.0000(Not Clear) < succ>
                                bacterial outside --- Certainty = 0.0000(Not Clear) < succ>
```

[9142] An alignment of the GAS and GBS proteins is shown below.

| Identities = 875/1161 (75%), Positives = 1032/1161 (88%) | | | |
|---|---|---|---|
| Query: | 1 | MNIIELFSQNKVVRTWHSGLVTNSRQLVMGFSGASKAIAIASAYEKLSKKIMVVTATQTD | 60 |
| | | M+I+ELFSQNK V++WHSGL T RQLVMG SG+SK +AIASAY KKI+VVT+TQ + | |
| Sbjct: | 1 | MDILELFSQNKKVQSWHSGLTTLGRQLVMGLSGSSKTLAIASAYLDDQKKIVVVTSTQNE | 60 |
| Query: | 61 | SDKLSSDISSLIGEDNVYQFFADDVPAAEFIFSSLDKSISRLSALRFLKDPEKNGVLITS | 120 |
| | | +KL+SD+SSL+ E+ V+QFFADDV AAEFIF+S+DK++SR+ L+FL++P+ GVLI S | |
| Sbjct: | 61 | VEKLASDLSSLLDEELVFQFFADDVAAAEFIFASMDKALSRIETLQFLRNPKSQGVLIVS | 120 |
| Query: | 121 | ISGLRLLLPNPEVFSKSQYKFEIGQECYLDKLCKNLVNLGYQKVSQVFSPGEFSQRGDIL | 180 |
| | | +SGLR+LLPNP+VF+KSQ + +G++ D L K L+ +GYQKVSQV SPGEFS+RGDIL | |
| Sbjct: | 121 | LSGLRILLPNPDVFTKSQIQLTVGEDYDSDTLTKQLMTIGYQKVSQVISPGEFSRRGDIL | 180 |
| Query: | 181 | DIFEMTQEYPYRLEFFGDEIDGIRQFDIDTQKSLKQLESVQISPADDIILQDADFERAKK | 240 |
| | | DI+E+TQE PYRLEFFGD+ID IRQF +TQKS +QLE + I+PA D+I + +DF+R + | |
| Sbjct: | 181 | DIYEITQELPYRLEFFGDDIDSIRQFHPETQKSFEQLEGIFINPASDLIFEVSDFQRGIE | 240 |
| Query: | 241 | KLEGYLVTASEVQRTYLSEVLSTTENHFKHSDIRRFLSIFYEKEWGILDYIPEGTPLFVD | 300 |
| | | +LE L TA + +++YL +VL+ ++N FKH DIR+F S+FYEKEW +LDYIP+GTP+F D | |
| Sbjct: | 241 | QLEKALQTAQDDKKSYLEDVLAVSKNGFKHKDIRKFQSLFYEKEWSLLDYIPKGTPIFFD | 300 |
| Query: | 301 | DFQKIVDRNAKLDLEIASLLTEDLQQGKSHSSLNYFSDPYKQLRQYQPATFFSNFHKGLG | 360 |
| | | DFQK+VD+NA+ DLEIA+LLTEDLQQGK+ S+LNYF+D Y++LR Y+PATFFSNFHKGLG | |
| Sbjct: | 301 | DFQKLVDKNARFDLEIANLLTEDLQQGKALSNLNYFTDNYRELRHYKPATFFSNFHKGLG | 360 |
| Query: | 361 | NLKFDKLHHFTQYGMQEFFNQFPLLVDEINRYKKSGATVLLQVDSQKGLNLLQENLKEYG | 420 |
| | | N+KFD++H TQY MQEFFNQFPLL+DEI RY+K+ TV++QV+SQ L+++ ++Y | |
| Sbjct: | 361 | NIKFDQMHQLTQYAMQEFFNQFPLLIDEIKRYQKNQTTVIVQVESQYAYERLEKSFQDYQ | 420 |
| Query: | 421 | LDLIISDKNDIVQKESQLIVGHLSNGFYFADEKIVLITEREIYHRRVKRKIRRSNISNAE | 480 |
| | | L + N IV +ESQ+++G +S+GFYFADEK+ LITE EIYH+++KR+ RRSNISNAE | |
| Sbjct: | 421 | FRLPLVSANQIVSRESQIVIGAISSGFYFADEKLALITEHEIYHKKIKRRARRSNISNAE | 480 |
| Query: | 481 | RLKDYNELSVGDYVVHNVHGVGKFLGIETIEIQGIHRDYLTIQYQNADRISIPVEQIELL | 540 |
| | | RLKDYNEL+VGDYVVHNVHG+G+FLGIETI+IQGIHRDY+TIQYQN+DRIS+P++QI L | |
| Sbjct: | 481 | RLKDYNELAVGDYVVHNVHGIGRFLGIETIQIQGIHRDYVTIQYQNSDRISLPIDQISSL | 540 |
| Query: | 541 | TKYVSADGKEPKINTLNDGRFKKAKQRVAKQVEDIADDLLKLYAERSQLQGFAFSPDDNM | 600 |
| | | +KYVSADGKEPKIN LNDGRF+K KQ+VA+QVEDIADDLLKLYAERSQ +GF+FSPDD++ | |
| Sbjct: | 541 | SKYVSADGKEPKINKLNDGRFQKTKQKVARQVEDIADDLLKLYAERSQQKGFSFSPDDDL | 600 |
| Query: | 601 | QNDFDNDFAYVETEDQLRSIKEIKQDMEGNRPMDRLLVGDVGFGKTEVAMRAAFKAVNDH | 660 |
| | | Q FD+DFA+VETEDQLRSIKEIK DME +PMDRLLVGDVGFGKTEVAMRAAFKAVNDH | |
| Sbjct: | 601 | QRAFDDDFAFVETEDQLRSIKEIKADMESMQPMDRLLVGDVGFGKTEVAMRAAFKAVNDH | 660 |
| Query: | 661 | KQVVVLVPTTVLAQQHFENFKERFSNYPVTVDVLSRFRSKKEQTDTLKRLSKGQVDIIIG | 720 |
| | | KQV VLVPTTVLAQQH+ENFK RF NYPV VDVLSRFRSKKEQ +TL+R+ KGQ+DIIIG | |
| Sbjct: | 661 | KQVAVLVPTTVLAQQHYENFKARFENYPVEVDVLSRFRSKKEQAETLERVRKGQIDIIIG | 720 |
| Query: | 721 | THRLLSQDVVFSDLGLIVIDEEQRFGVKHKEKLKELKTKVDVLTLTATPIPRTLHMSMLG | 780 |
| | | THRLLS+DVVFSDLGLIVIDEEQRFGVKHKE LKELKTKVDVLTLTATPIPRTLHMSMLG | |
| Sbjct: | 721 | THRLLSKDVVFSDLGLIVIDEEQRFGVKHKETLKELKTKVDVLTLTATPIPRTLHMSMLG | 780 |
| Query: | 781 | IRDLSVIETPPTNRYPVQTYVLETNPGLVREAIIREIDRGGQVFYVYNKVDTIDQKVSEL | 840 |
| | | IRDLSVIETPPTNRYPVQTYVLE NPGLVREAIIRE+DRGGQ+FYVYNKVDTI++KV+EL | |
| Sbjct: | 781 | IRDLSVIETPPTNRYPVQTYVLENNPGLVREAIIREMDRGGQIFYVYNKVDTIEKKVAEL | 840 |
| Query: | 841 | QELVPEASIGFVHGQMSEIQLENTLIDFINGDYDVLVATTIIETGVDISNVNTLFVENAD | 900 |
| | | QELVPEASIGFVHGQMSEIQLENTLIDFINGDYDVLVATTIIETGVDISNVNTLF+ENAD | |
| Sbjct: | 841 | QELVPEASIGFVHGQMSEIQLENTLIDFINGDYDVLVATTIIETGVDISNVNTLFIENAD | 900 |
| Query: | 901 | HMGLSTLYQLRGRVGRSNRIAYAYLMYRPDKVLTEISEKRLDAIKGFTELGSGFKIAMRD | 960 |
| | | HMGLSTLYQLRGRVGRSNRIAYAYLMYRPDKVLTE+SEKRL+AIKGFTELGSGFKIAMRD | |
| Sbjct: | 901 | HMGLSTLYQLRGRVGRSNRIAYAYLMYRPDKVLTEVSEKRLEAIKGFTELGSGFKIAMRD | 960 |
| Query: | 961 | LSIRGAGNILGASQSGFIDSVGFEMYSQLLEQAIATKQGKSLIRQKGNAELALQIDAYLP | 1020 |
| | | LSIRGAGNILGASQSGFIDSVGFEMYSQLLEQAIA+KQGK+ +RQKGN E+ LQIDAYLP | |
| Sbjct: | 961 | LSIRGAGNILGASQSGFIDSVGFEMYSQLLEQAIASKQGKTTVRQKGNTEINLQIDAYLP | 1020 |
| Query: | 1021 | AEYISDERQKIEIYKRIRELETRADYEALQDELIDRFGEYPDQVAYLLEIGLLKAYLDLA | 1080 |
| | | +YI+DERQKI+IYKRIRE+++R DY LQDEL+DRFGEYPDQVAYLLEI LLK Y+D A | |
| Sbjct: | 1021 | DDYIADERQKIDIYKRIREIQSREDYLNLQDELMDRFGEYPDQVAYLLEIALLKHYMDNA | 1080 |
| Query: | 1081 | FTELVERKGNEISILFEKASLKYFLTQDYFEALSKTQLKARISETNGKMEVVFNIKHKKN | 1140 |
| | | F ELVERK N++ + FE SL YFLTQDYFEALSKT LKA+ISE GK+++VF+++H+K+ | |
| Sbjct: | 1081 | FAELVERKNNQVIVRFEVTSLTYFLTQDYFEALSKTHLKAKISEHQGKIDIVFDVRHQKD | 1140 |
| Query: | 1141 | YEIIEELLKFAECFIEIKSRK | 1161 |
| | | Y I+EEL+ F E EIK RK | |
| Sbjct: | 1141 | YRILEELMLFGERLSEIKIRK | 1161 |

[9143] Based on this analysis, it was predicted that these proteins and their epitopes could be useful antigens for vaccines or diagnostics.

### EXAMPLE 1659

[9144] A DNA sequence (GBSx1754) was identified in S. agalactiae <SEQ ID 5141> which encodes the amino acid sequence <SEQ ID 5142>. Analysis of this protein sequence reveals the following:

```
Possible site: 39
>>> Seems to have no N-terminal signal sequence
----- Final Results -----
                            bacterial cytoplasm --- Certainty = 0.4347(Affirmative) < succ>
                              bacterial membrane --- Certainty = 0.0000(Not Clear) < succ>
                                bacterial outside --- Certainty = 0.0000(Not Clear) < succ>
```

[9145] The protein has homology with the following sequences in the GENPEPT database.

| >GP:CA811835 GB:Z99104 similar to hypothetical proteins | | |
|---|---|---|
| [Bacillus subtilis] | | |
| Identities = 50/84 (59%), Positives = 70/84 (82%) | | |
| Query: 1 | MRLDKYLKVSRIIKRRPVAKEVADKGRVKVNGVLAKSSTDLKLNDQVEIRFGNKLLTVKV | 60 |
| | MRLDK+LKVSR+IKRR +AKEVAD+GR+ +NG AK+S+D+K D++ +RFG KL+TV+V | |
| Sbjct: 1 | MRLDKFLKVSRLIKRRTLAKEVADQGRISINGNQAKASSDVKPGDELTVRFGQKLVTVQV | 60 |
| Query: 61 | LEMKDSTKKEDAIKMYEIINETRI | 84 |
| | E+KD+TKKE+A MY I+ E ++ | |
| Sbjct: 61 | NELKDTTKKEEAANMYTILKEEKL | 84 |

[9146] A related DNA sequence was identified in S. pyogenes <SEQ ID 5143> which encodes the amino acid sequence <SEQ ID 5144>. Analysis of this protein sequence reveals the following:

```
Possible site: 27
>>> Seems to have no N-terminal signal sequence
----- Final Results -----
bacterial cytoplasm --- Certainty = 0.2963 (Affirmative) <succ>
  bacterial membrane --- Certainty = 0.0000 (Not Clear) <succ>
    bacterial outside --- Certainty = 0.0000 (Not Clear) <succ>
```

[9147] An alignment of the GAS and GBS proteins is shown below.

| Identities = 72/90 (80%), Positives = 85/90 (94%) | | |
|---|---|---|
| Query: 1 | MRLDKYLKVSRIIKRRPVAKEVADKGRVKVNGVLAKSSTDLKLNDQVEIRFGNKLLTVKV | 60 |
| | MRLDKYLKVSR+IKRR VAKEVADKGR+KVNG+LAKSST++KLND +EI FGNKLLTV+V | |
| Sbjct: 9 | MRLDKYLKVSRLIKRRSVAKEVADKGRIKVNGILAKSSTNIKLNDHIEISFGNKLLTVRV | 68 |
| Query: 61 | LEMKDSTKKEDAIKMYEIINETRIETDEQA | 90 |
| | +E+KDSTKKEDA+KMYEII+ETRI +E+A | |
| Sbjct: 69 | IEIKDSTKKEDALKMYEIISETRITLNEEA | 98 |

[9148] Based on this analysis, it was predicted that these proteins and their epitopes could be useful antigens for vaccines or diagnostics.

### EXAMPLE 1660

[9149] A DNA sequence (GBSx1755) was identified in S. agalactiae <SEQ ID 5145> which encodes the amino acid sequence <SEQ ID 5146>. This protein is predicted to be DivIC homolog. Analysis of this protein sequence reveals the following:

| Possible site: 50 | | |
|---|---|---|
| >>> Seems to have no N-terminal signal sequence | | |
| INTEGRAL | Likelihood = −8.12 | Transmembrane 34-50 (31-56) |

```
----- Final Results -----
  bacterial membrane --- Certainty = 0.4248 (Affirmative) <succ>
    bacterial outside --- Certainty = 0.0000 (Not Clear) <succ>
bacterial cytoplasm --- Certainty = 0.0000 (Not Clear) <succ>
```

[9150] The protein has homology with the following sequences in the GENPEPT database.

| >GP:AAC98903 GB:AF023181 DivIC homolog [Listeria monocytogenes] | | |
|---|---|---|
| Identities = 36/119 (30%), Positives = 65/119 (54%), Gaps = 2/119 (1%) | | |
| Query: 2 | SKPNVVQLNNQYINDE-NLKKRYEAEELRRKNRLMGWVLIFVMLLFILPTYNLVKSYRTL | 60 |
| | +K V ++ N+YI D +KK + RL +IF ++ +L T K TL | |
| Sbjct: 4 | AKSKVARIENRYIKDTATMKKTRSRRRIALFRRLAFMAIIFAVVGGLL-TITYTKQVLTL | 62 |
| Query: 61 | QERRQEVVKLTKDYQTLTNRTENQKLLAKQLKNPDYVQKYARAKYYFSKTGEMIYPLPD | 119 |
| | +E++++ V++ K + + ++ K+L N DY+ K AR++YY SK GE+I+ +P+ | |
| Sbjct: 63 | KEKKEKQVQVDKKMVAMKDEQDSLNEQIKKLHNDDYIAKLARSEYYLSKDGEIIFNIPE | 121 |

[9151] A related DNA sequence was identified in S. pyogenes <SEQ ID 5147> which encodes the amino acid sequence <SEQ ID 5148>. Analysis of this protein sequence reveals the following:

| Possible site: 50 | | |
|---|---|---|
| >>> Seems to have no N-terminal signal sequence | | |
| INTEGRAL | Likelihood = −3.93 | Transmembrane 34-50 (32-51) |

```
----- Final Results -----
  bacterial membrane --- Certainty = 0.2572 (Affirmative) <succ>
    bacterial outside --- Certainty = 0.0000 (Not Clear) <succ>
bacterial cytoplasm --- Certainty = 0.0000 (Not Clear) <succ>
```

[9152] The protein has homology with the following sequences in the databases:

| >GP:AAC98903 GB:AF023181 DivIC homolog [Listeria monocytogenes] | | |
|---|---|---|
| Identities = 27/116 (23%), Positives = 59/116 (50%) | | |
| Query: 3 | KPSIVQLNNHYIKKENLKKKFEEEESQKRNRFMGWILVSMMFLFILPTYNLVKSYVDFEK | 62 |
| | K + ++ N YIK KK R + ++ + + L T K + ++ | |
| Sbjct: 5 | KSKVARIENRYIKDTATMKKTRSRRRIALFRRLAFMAIIFAVVGGLLTITYTKQVLTLKE | 64 |
| Query: 63 | QNQQVVKLKKEYNELSESTKKEKQLAERLKDDNFVKKYARAKYYLSREGEMIYPIP | 118 |
| | + ++ V++ K+ + + + ++L +D+++ K AR++YYLS++GE+I+ IP | |
| Sbjct: 65 | KKEKQVQVDKKMVAMKDEQDSLNEQIKKLHNDDYIAKLARSEYYLSKDGEIIFNIP | 120 |

[9153] An alignment of the GAS and GBS proteins is shown below.

| Identities = 73/123 (59%), Positives = 99/123 (80%) | | |
|---|---|---|
| Query: 1 | MSKPNVVQLNNQYINDENLKKRYEAEELRRKNRLMGWVLIFVMLLFILPTYNLVKSYRTL | 60 |
| | M KP++VQLNN YI ENLKK++E EE +++NR MGW+L+ +M LFILPTYNLVKSY | |
| Sbjct: 1 | MKKPSIVQLNNHYIKKENLKKKFEEEESQKRNRFMGWILVSMMFLFILPTYNLVKSYVDF | 60 |
| Query: 61 | QERRQEVVKLTKDYQTLTNRTENQKLLAKQLKNPDYVQKYARAKYYFSKTGEMIYPLPDL | 120 |
| | +++ Q+VVKL K+Y L+ T+ +K LA++LK+ ++V+KYARAKYY S+ GEMIYP+P L | |
| Sbjct: 61 | EKQNQQVVKLKKEYNELSESTKKEKQLAERLKDDNFVKKYARAKYYLSREGEMIYPIPGL | 120 |
| Query: 121 | LPK | 123 |
| | LPK | |
| Sbjct: 121 | LPK | 123 |

[9154] Based on this analysis, it was predicted that these proteins and their epitopes could be useful antigens for vaccines or diagnostics.

### EXAMPLE 1661

[9155] A DNA sequence (GBSx1756) was identified in S. agalactiae <SEQ ID 5149> which encodes the amino acid sequence <SEQ ID 5150>. Analysis of this protein sequence reveals the following:

```
Possible site: 15
>>> Seems to have no N-terminal signal sequence
----- Final Results -----
bacterial cytoplasm --- Certainty = 0.4355 (Affirmative) <succ>
  bacterial membrane --- Certainty = 0.0000 (Not Clear) <succ>
    bacterial outside --- Certainty = 0.0000 (Not Clear) <succ>
```

[9156] The protein has no significant homology with any sequences in the GENPEPT database.

[9157] No corresponding DNA sequence was identified in S. pyogenes.

[9158] Based on this analysis, it was predicted that this protein and its epitopes, could be useful antigens for vaccines or diagnostics.

### EXAMPLE 1662

[9159] A DNA sequence (GBSx1757) was identified in S. agalactiae <SEQ ID 5151> which encodes the amino acid sequence <SEQ ID 5152>. Analysis of this protein sequence reveals the following:

| Possible site: 21 | | |
|---|---|---|
| >>> Seems to have an uncleavable N-term signal seq | | |
| INTEGRAL | Likelihood = −5.52 | Transmembrane 4-20 (3-22) |

```
----- Final Results -----
  bacterial membrane --- Certainty = 0.3208 (Affirmative) <succ>
    bacterial outside --- Certainty = 0.0000 (Not Clear) <succ>
bacterial cytoplasm --- Certainty = 0.0000 (Not Clear) <succ>
```

[9160] The protein has no significant homology with any sequences in the GENPEPT database.

[9161] A related DNA sequence was identified in S. pyogenes <SEQ ID 5153> which encodes the amino acid sequence <SEQ ID 5154>. Analysis of this protein sequence reveals the following:

```
Possible site: 21
>>> Seems to have a cleavable N-term signal seq.
----- Final Results -----
    bacterial outside --- Certainty = 0.3000 (Affirmative) <succ>
  bacterial membrane --- Certainty = 0.0000 (Not Clear) <succ>
bacterial cytoplasm --- Certainty = 0.0000 (Not Clear) <succ>
```

[9162] The protein has no significant homology with any sequences in the GENPEPT database.

[9163] An alignment of the GAS and GBS proteins is shown below.

| Identities = 205/428 (47%), Positives = 285/428 (65%) | | |
|---|---|---|
| Query: 1 | MKKVLTFLLCSLYFVSIPAISTEEPLTLSQNRRYALTQTVVDKEMYFDAIPERPTTKIEI | 60 |
| | M+K+L +L + + +P ISTE+ L S+N Y L Q VV +++ IP P E | |
| Sbjct: 1 | MRKLLAAMLMTFFLTPLPVISTEKKLIFSKNAVYQLKQDVVQSTQFYNQIPSNPNLYQET | 60 |
| Query: 61 | SSFQDEALTITGETLVPNTLLSIVSLTINSNGIPVFTLSNGQFIKASREAIFNDLVSKQQ | 120 |
| | +++D LT+ L N L I SL +N +PVF L++G +++A+R+ I++D+V Q | |
| Sbjct: 61 | CAYKDSDLTLPAGRLGVNQPLLIKSLVLNKESLPVFELADGTYVEANRQLIYDDIVLNQV | 120 |
| Query: 121 | SVSLDYWLKPSFVTYEAPYTNGVSEVKNNLKPYSRVHLVEQAETEHGIYYKTDSGFWISV | 180 |
| | + +W + Y APY G + ++ +VH + A+T HG YY D W S | |
| Sbjct: 121 | DIDSYFWTQKKLRLYSAPYVLGTQTIPSSFLFAQKVHATQMAQTNHGTYYLIDDKGWASQ | 180 |
| Query: 181 | EDLSVADNRMAKVQEVLLEKYNKDKYGIYIKQLNTQTVAGINIDRSMYSASIAKLATLYA | 240 |
| | EDL DNRM KVQE+LL+KYN Y I++KQLNTQT AGIN D+ MY+ASI+KLA LY | |
| Sbjct: 181 | EDLVQFDNRMLKVQEMLLQKYNNPNYSIFVKQLNTQTSAGINADKKMYAASISKLAPLYI | 240 |
| Query: 241 | SQEQVKLGKLSLDSKFEYKDNVNQFPNSYDPSGSGKLEKKADHKLYTVKELLEATAKESD | 300 |
| | Q+Q++ KL + Y +VN F YDP GSGK+ K AD+K Y V++LL+A A++SD | |
| Sbjct: 241 | VQKQLQKKKLAENKTLTYTKDVNHFYGDYDPLGSGKISKIADNKDYRVEDLLKAVAQQSD | 300 |
| Query: 301 | NVATNMLGYYVNNQYDSMFQTQVDTISGMHWDMKKRQISPQAAGKMMEAIYYQNGDIVNY | 360 |
| | NVATN+LGYY+ +QYD F++++ +SG+ WDM++R ++ ++A MMEAIY+Q G I++Y | |
| Sbjct: 301 | NVATNILGYYLCHQYDKAFRSEIKALSGIDWDMEQRLLTSRSAANMMEAIYHQKGQIISY | 360 |
| Query: 361 | LSKTDFDNTRIPKNIPVKVAHKIGDAYDYKHDAAIVYAEQPFIMIIFTDKSSYDDITKIA | 420 |
| | LS T+FD RI KNA V VAHKIGDAYDYKHD AIVY PFI+ IFT+KS+Y+DIT IA | |
| Sbjct: 361 | LSNTEFDQQRITKNITVPVAHKIGDAYDYKHDVAIVYGNTPFILSIFTNKSTYEDITAIA | 420 |
| Query: 421 | DDVYQVLK | 428 |
| | DDVY +LK | |
| Sbjct: 421 | DDVYGILK | 428 |

[9164] SEQ ID 5152 (GBS116) was expressed in E. coli as a His-fusion product. SDS-PAGE analysis of total cell extract is shown in FIG. 38 (lane 3; MW 48.5 kDa). The GBS116-His fusion product was purified (FIG. 202, lane 6) and used to immunise mice. The resulting antiserum was used for FACS (FIG. 316), which confirmed that the protein is immunoaccessible on GBS bacteria.

[9165] Based on this analysis, it was predicted that these proteins and their epitopes could be useful antigens for vaccines or diagnostics.

### EXAMPLE 1663

[9166] A DNA sequence (GBSx1758) was identified in S. agalactiae <SEQ ID 5155> which encodes the amino acid sequence <SEQ ID 5156>. Analysis of this protein sequence reveals the following:

```
Possible site: 28
>>> Seems to have no N-terminal signal sequence
----- Final Results -----
bacterial cytoplasm --- Certainty = 0.2260 (Affirmative) <succ>
  bacterial membrane --- Certainty = 0.0000 (Not Clear) <succ>
    bacterial outside --- Certainty = 0.0000 (Not Clear) <succ>
```

[9167] The protein has homology with the following sequences in the GENPEPT database.

| >GP:AAD35664 GB:AE001733 conserved hypothetical protein | | |
|---|---|---|
| [Thermotoga maritima] | | |
| Identities = 100/404 (24%), Positives = 181/404 (44%), Gaps = 61/404 (15%) | | |
| Query: 19 | QKVLIAVSGGIDSINLLQFLYQYQKELSISIGIAHINHGQRKESEKEEEYIRQWGQIHDV | 78 |
| | + VL+AVSGGIDS+ LL L ++ L I I AH++H R+ S ++ E++ + + ++ | |
| Sbjct: 6 | EHVLVAVSGGIDSMTLLYVLRKFSPLLKIKITAAHLDHRIRESSRRDREFVERICRQWNI | 65 |
| Query: 79 | PVFISYF--------QGIFSEDRARNHRYNFFSKVMREEGYTALVTAHHADDQAETVFMR | 130 |
| | PV S G E+ AR RY+F + ++ G + + AHH +D ETV R | |
| Sbjct: 66 | PVETSEVDVPSLWKDSGKTLEEIAREVRYDFLKRTAKKVGASKIALAHHKNDLLETVVHR | 125 |
| Query: 131 | ILRGSRLRYLSGIKQVSAFANGQLIRPFLPYKKELLP------NIFHFEDASNASSDYLR | 184 |
| | ++RG+ L+ I + IRPFL +K+ + N+ + D +N + Y R | |
| Sbjct: 126 | LIRGTGPLGLACISP----KREEFIRPFLVFKRSEIEEYARKNNVPYVVDETNYNVKYTR | 181 |
| Query: 185 | NRIRNVYFPALERENNQLKDSLITLSEETECLFTALTDLTRSIEVTNCYDF--------- | 235 |
| | N IR+ P ++ N ++D++ L T L + + N Y + | |
| Sbjct: 182 | NFIRHRIVPLMKELNPTVEDAVYRLVSVTHLLRNFVERTVQDFVERNVYFYKDYAVFVEP | 241 |
| Query: 236 | --LRQTHSVQEFLLQDYISKFPDLQVSKEQFRVILKLIRTKANIDYTIKSGYFLHKDYES | 293 |
| | L V ++L++ + P+ + KLI T + + SG F+ + + | |
| Sbjct: 242 | EDLFLFLEVTRWVLKEMYGRVPEYE----------KLIGTLKSKRVELWSGIFVERSFGY | 291 |
| Query: 294 | FHITKIHPKTDSFKVEKRLELHNIQIFSQYLFSYGKFISQADITIPIYDT---SPIILRR | 350 |
| | + K FK + R+E+ G + I + + +R | |
| Sbjct: 292 | VAVGK-----TVFKKKYRVEVK------------GDMLEMEGFKIRVVNNRNDMKFWVRN | 334 |
| Query: 351 | RKEGDRIFLGNHTKKIRRLFIDEKIT--LKEREEAVIGEQNKEL | 392 |
| | RKEGDRI + +K++ +FI++K+ ++R ++ E+++ L | |
| Sbjct: 335 | RKEGDRIIVNGRERKLKDVFIEKKVPTFYRDRVPLLVDEEDRVL | 378 |

[9168] A related DNA sequence was identified in S. pyogenes <SEQ ID 5157> which encodes the amino acid sequence <SEQ ID 5158>. Analysis of this protein sequence reveals the following:

```
Possible site: 33
>>> Seems to have no N-terminal signal sequence
----- Final Results -----
bacterial cytoplasm --- Certainty = 0.2187 (Affirmative) <succ>
  bacterial membrane --- Certainty = 0.0000 (Not Clear) <succ>
    bacterial outside --- Certainty = 0.0000 (Not Clear) <succ>
```

[9169] An alignment of the GAS and GBS proteins is shown below.

| Identities = 218/424 (51%), Positives = 290/424 (67%), Gaps = 2/424 (0%) | | |
|---|---|---|
| Query: 2 | YNTILKDTLSKGLFTAHQKVLIAVSGGIDSINLLQFLYQYQKELSISIGIAHINHGQRKE | 61 |
| | Y I + +K F H+ VLIAVSGG+DS+NLL FLY +Q +L I IGIAH+NH QR E | |
| Sbjct: 4 | YQEIFNEIKNKAYFKNHRHVLIAVSGGVDSMNLLHFLYLFQDKLKIRIGIAHVNHKQRSE | 63 |
| Query: 62 | SEKEEEYIRQWGQIHDVPVFISYFQGIFSEDRARNHRYNFFSKVMREEGYTALVTAHHAD | 121 |
| | S+ EE Y++ W + HD+P+++S F+GIFSE AR+ RY FF +M + Y+ALVTAHH+D | |
| Sbjct: 64 | SDSEEAYLKCWAKKHDIPIYVSNFEGIFSEKAARDWRYAFFKSIMLKNNYSALVTAHHSD | 123 |
| Query: 122 | DQAETVFMRILRGSRLRYLSGIKQVSAFANGQLIRPFLPYKKELLPNIFHFEDASNASSD | 181 |
| | DQAET+ MR++RGSRLR+LSGIK V FANGQLIRPFL + K+ LP IFHFED+SN | |
| Sbjct: 124 | DQAETILMRLIRGSRLRHLSGIKSVQPFANGQLIRPFLTFSKKDLPEIFHFEDSSNRELS | 183 |
| Query: 182 | YLRNRIRNVYFPALERENNQLKDSLITLSEETECLFTALTDLTRSIEVTNCYDFLRQTHS | 241 |
| | +LRNR+RN Y P L++EN + L L+E LF A +LT I T+ +F Q+ S | |
| Sbjct: 184 | FLRNRVRNNYLPLLKQENPRFIQGLNQLALENSLLFQAFKELTNHITTTDLTEFNEQSKS | 243 |
| Query: 242 | VQEFLLQDYISKFPDLQVSKEQFRVILKLIRTKANIDYTIKSGYFLHKDYESFHITKIHP | 301 |
| | +Q FLLQDY+ FPDL + K QF +L++I+T Y +K Y++ D SF ITKI P | |
| Sbjct: 244 | IQYFLLQDYLEGFPDLDLKKSQFTQLLQIIQTAKQGYYYLKKDYYIFIDKFSFKITKIVP | 303 |
| Query: 302 | KTDSFKVEKRLELHNIQIFSQYLFSY--GKFISQADITIPIYDTSPIILRRRKEGDRIFL | 359 |
| | KT+ K EK LE + + Y FS+ Q ++IP++ S I LR R+ GD I | |
| Sbjct: 304 | KTELVKEEKMLEYDSNLCYRDYYFSFMPKSNEDQGQVSIPLFSLSSIKLRSRQSGDYISF | 363 |
| Query: 360 | GNHTKKIRRLFIDEKITLKEREEAVIGEQNKELIFVIVAGRTYLRKPSEHDIMKGKLYIE | 419 |
| | G+ +KKIRRLFIDEK T+ ER+ A+IGEQ++++IFV++ +TYLRK +HDIM KLYI+ | |
| Sbjct: 364 | GHFSKKIRRLFIDEKFTIAERQNAIIGEQDEQIIFVLIGNKTYLRKACKHDIMLAKLYID | 423 |
| Query: 420 | NLEK | 423 |
| | LEK | |
| Sbjct: 424 | KLEK | 427 |

[9170] Based on this analysis, it was predicted that these proteins and their epitopes could be useful antigens for vaccines or diagnostics.

### EXAMPLE 1664

[9171] A DNA sequence (GBSx1759) was identified in S. agalactiae <SEQ ID 5159> which encodes the amino acid sequence <SEQ ID 5160>. This protein is predicted to be hypoxanthine-guanine phosphoribosyltransferase (hpt). Analysis of this protein sequence reveals the following:

| Possible site: 50 | | |
|---|---|---|
| >>> Seems to have no N-terminal signal sequence | | |
| INTEGRAL | Likelihood = −0.32 | Transmembrane 37-53 (37-53) |

```
----- Final Results -----
  bacterial membrane --- Certainty = 0.1128 (Affirmative) <succ>
    bacterial outside --- Certainty = 0.0000 (Not Clear) <suco>
bacterial cytoplasm --- Certainty = 0.0000 (Not Clear) <succ>
```

[9172] The protein has homology with the following sequences in the GENPEPT database.

| >GP:CAA48876 GB:X69123 hypoxanthine guanine phosphoribosyltransferase | | |
|---|---|---|
| [Lactococcus lactis] | | |
| Identities = 121/179 (67%), Positives = 152/179 (84%), Gaps = 1/179 (0%) | | |
| Query: 2 | LENDIKKVLYSEEDIILKTKELGAKLTADYAGKNPLLVGVLKGSVPFMAELLKHIDTHVE | 61 |
| | L+ I+KVL SEE+II K+KELG LT +Y GKNPL++G+L+GSVPF+AEL+KHID H+E | |
| Sbjct: 6 | LDKAIEKVLVSEEEIIEKSKELGEILTKEYEGKNPLVLGILRGSVPFLAELIKHIDCHLE | 65 |
| Query: 62 | IDFMVVSSYHGGTTSSGEVKILKDVDTNIEGRDVIFIEDIIDTGRTLKYLRDMFKYRQAN | 121 |
| | DFM VSSYHGGT SSGEVK++ DVDT ++GRD++ +EDIIDTGRTLKYL+++ ++R AN | |
| Sbjct: 66 | TDFMTVSSYHGGTKSSGEVKLILDVDTAVKGRDILIVEDIIDTGRTLKYLKELLEHRGAN | 125 |
| Query: 122 | SVKVATLFDKPEGRLVDIDADYVCYDIPNEFIVGFGLDYAENYRNLPYVGVLKEEIYSK | 180 |
| | VK+ TL DKPEGR+V+I DY + IPNEF+VGFGLDY ENYRNLPYVGVLK E+Y+K | |
| Sbjct: 126 | -VKIVTLLDKPEGRIVEIKPDYSGFTIPNEFVVGFGLDYEENYRNLPYVGVLKPEVYNK | 183 |

[9173] A related DNA sequence was identified in S. pyogenes <SEQ ID 5161> which encodes the amino acid sequence <SEQ ID 5162>. Analysis of this protein sequence reveals the following:

```
Possible site: 52
>>> Seems to have no N-terminal signal sequence
----- Final Results -----
bacterial cytoplasm --- Certainty = 0.4095 (Affirmative) <succ>
  bacterial membrane --- Certainty = 0.0000 (Not Clear) <succ>
    bacterial outside --- Certainty = 0.0000 (Not Clear) <succ>
```

[9174] An alignment of the GAS and GBS proteins is shown below.

| Identities = 153/180 (85%), Positives = 171/180 (95%) | | |
|---|---|---|
| Query: 1 | MLENDIKKVLYSEEDIILKTKELGAKLTADYAGKNPLLVGVLKGSVPFMAELLKHIDTHV | 60 |
| | MLE DI+K+LYSE DII KTK+LG +LT DY KNPL++GVLKGSVPFMAEL+KHIDTHV | |
| Sbjct: 1 | MLEQDIQKILYSENDIIRKTKKLGEQLTKDYQEKNPLMIGVLKGSVPFMAELMKHIDTHV | 60 |
| Query: 61 | EIDFMVVSSYHGGTTSSGEVKILKDVDTNIEGRDVIFIEDIIDTGRTLKYLRDMFKYRQA | 120 |
| | EIDFMVVSSYHGGT+SSGEVKILKDVDTNIEGRD+I +EDIIDTGRTLKYLRDMFKYR+A | |
| Sbjct: 61 | EIDFMVVSSYHGGTSSSGEVKILKDVDTNIEGRDIIIVEDIIDTGRTLKYLRDMFKYRKA | 120 |
| Query: 121 | NSVKVATLFDKPEGRLVDIDADYVCYDIPNEFIVGFGLDYAENYRNLPYVGVLKEEIYSK | 180 |
| | N++K+ATLFDKPEGR+V I+ADYVCY+IPNEFIVGFGLDYAENYRNLPYVGVLKEE+YSK | |
| Sbjct: 121 | NTIKIATLFDKPEGRVVKIEADYVCYNIPNEFIVGFGLDYAENYRNLPYVGVLKEEVYSK | 180 |

[9175] Based on this analysis, it was predicted that these proteins and their epitopes could be useful antigens for vaccines or diagnostics.

### EXAMPLE 1665

[9176] A DNA sequence (GBSx1760) was identified in S. agalactiae <SEQ ID 5163> which encodes the amino acid sequence <SEQ ID 5164>. This protein is predicted to be cell division protein FtsH (ftsH). Analysis of this protein sequence reveals the following:

| Possible site: 25 | | |
|---|---|---|
| >>> Seems to have an uncleavable N-term signal seq | | |
| INTEGRAL | Likelihood = −7.11 | Transmembrane 139-155 (133-158) |
| INTEGRAL | Likelihood = −4.62 | Transmembrane 8-24 (7-31) |

```
----- Final Results -----
  bacterial membrane --- Certainty = 0.3845 (Affirmative) <succ>
    bacterial outside --- Certainty = 0.0000 (Not Clear) <succ>
bacterial cytoplasm --- Certainty = 0.0000 (Not Clear) <succ>
```

[9177] The protein has homology with the following sequences in the GENPEPT database.

| >GP: AAC16243 GB: AF061748 cell division protein FtsH | | | |
|---|---|---|---|
| [Streptococcus pneumoniae] (ver 2) | | | |
| Identities = 490/652 (75%), Positives = 561/652 (85%), | | | |
| Gaps = 5/652 (0%) | | | |
| Query: | 5 | KNNGFLKNSFIYILLIIAVITTFQYYLKGTSSQ-NQQISYTKLVKQLKAGEIKSISYQPS | 63 |
| | | +NNG +KN F+++L I ++T FQY+ G +S +QQI+YT+LV+++ G +K ++YQP+ | |
| Sbjct: | 4 | QNNGLIKNPFLWLLFIFFLVTGFQYFYSGNNSGGSQQINYTELVQEITDGNVKELTYQPN | 63 |
| Query: | 64 | GGVVEVSGTYKKAKTIKSANSFTFLGGSVATKVTGFNSVILPNDSSIKSLVSAAEENNTN | 123 |
| | | G V+EVSG YK KT K F SV TKV F S ILP D+++ L A ++ | |
| Sbjct: | 64 | GSVIEVSGVYKNPKTSKEGTGIQFFTPSV-TKVEKFTSTILPADTTVSELQKLATDHKAE | 122 |
| Query: | 124 | IQVKHESSSGTWISYIASFLPLVIMIGFFMMMMNQGGGGGARGAMSFGKNKARSSSKDEV | 183 |
| | | + VKHESSSG WI+ + S +P I+ F MM GGG R MSFG++KA++++K+++ | |
| Sbjct: | 123 | VTVKHESSSGIWINLLVSIVPFGILFFFLFSMMGNMGGGNGRNPMSFGRSKAKAANKEDI | 182 |
| Query: | 184 | KVRFSDVAGAEEEKQELIEVVDFLKDPKRYKSLGARIPAGVLLEGPPGTGKTLLAKAVAG | 243 |
| | | KVRFSDVAGAEEEKQEL+EVV+FLKDPKR+ LGARIPAGVLLEGPPGTGKTLLAKAVAG | |
| Sbjct: | 183 | KVRFSDVAGAEEEKQELVEVVEFLKDPKRFTKLGARIPAGVLLEGPPGTGKTLLAKAVAG | 242 |
| Query: | 244 | EAGVPFFSISGSDFVEMFVGVGASRVRSLFEDAKKAERAIIFIDEIDAVGRRRGAGMGGG | 303 |
| | | EAGVPFFSISGSDFVEMFVGVGASRVRSLFEDAKKA AIIFIDEIDAVGR+RG G+GGG | |
| Sbjct: | 243 | EAGVPFFSISGSDFVEMFVGVGASRVRSLFEDAKKAAPAIIFIDEIDAVGRQRGVGLGGG | 302 |
| Query: | 304 | NDEREQTLNQLLIEMDGFEGNESIIVIAATNRSDVLDPALLRPGRFDRKVLVGQPDVKGR | 363 |
| | | NDEREQTLNQLLIEMDGFEGNE IIVIAATNRSDVLDPALLRPGRFDRKVLVG+PDVKGR | |
| Sbjct: | 303 | NDEREQTLNQLLIEMDGFEGNEGIIVIAATNRSDVLDPALLRPGRFDRKVLVGRPDVKGR | 362 |
| Query: | 364 | EAILRVHAKNKPLADNVDLKVVAQQTPGFVGADLENVLNEAALVAARRNKKVIDASDIDE | 423 |
| | | EAIL+VHAKNKPLA++VDLK+VAQQTPGFVGADLENVLNEAALVAARRNK +IDASDIDE | |
| Sbjct: | 363 | EAILKVHAKNKPLAEDVDLKLVAQQTPGFVGADLENVLNEAALVAARRNKSIIDASDIDE | 422 |
| Query: | 424 | AEDRVIAGPSKKDRTISERERAMVAYHEAGHTIVGLILSNARVVHKVTIVPRGRAGGYMI | 483 |
| | | AEDRVIAGPSKKD+T+S++ER +VAYHEAGHTIVGL+LSNARVVHKVTIVPRGRAGGYMI | |
| Sbjct: | 423 | AEDRVIAGPSKKDKTVSQKERELVAYHEAGHTIVGLVLSNARVVHKVTIVPRGRAGGYMI | 482 |
| Query: | 484 | ALPKEDQMLLSKDDMKEQLAGLMGGRVAEEIIFNAQTTGASNDFEQATAMARAMVTEYGM | 543 |
| | | ALPKEDQMLLSK+DMKEQLAGLMGGRVAEEIIFN QTTGASNDFEQAT MARAMVTEYGM | |
| Sbjct: | 483 | ALPKEDQMLLSKEDMKEQLAGLMGGRVAEEIIFNVQTTGASNDFEQATQMARAMVTEYGM | 542 |
| Query: | 544 | SEKLGPVQYEGNHAMMAGQMSPEKSYSAQTAQLIDDEVRHLLNEARNKAADIINENRDTH | 603 |
| | | SEKLGPVQYEGNHAM+ G SP+KS S QTA ID+EVR LLNEARNKAA+II NR+TH | |
| Sbjct: | 543 | SEKLGPVQYEGNHAML-GAQSPQKSISEQTAYEIDEEVRSLLNEARNKAAEIIQSNRETH | 601 |
| Query: | 604 | KLIAEALLKYETLDAAQIKSIFETGKMPETENDEDKARALSYDEIKEKMQEE | 655 |
| | | KLIAEALLKYETLD+ QIK+++ETGKMPE E+++ ALSYDE+K KM +E | |
| Sbjct: | 602 | KLIAEALLKYETLDSTQIKALYETGKMPEAV--EEESHALSYDEVKSKMNDE | 651 |

[9178] A related DNA sequence was identified in S. pyogenes <SEQ ID 5165> which encodes the amino acid sequence <SEQ ID 5166>. Analysis of this protein sequence reveals the following:

| Possible site: 38 | | | | |
|---|---|---|---|---|
| >>> Seems to have a cleavable N-term signal seq. | | | | |
| | INTEGRAL | Likelihood = −7.38 | Transmembrane | 138-154 (132-158) |

```
----- Final Results -----
                              bacterial membrane --- Certainty = 0.3951(Affirmative) < succ>
                                bacterial outside --- Certainty = 0.0000(Not Clear) < succ>
                            bacterial cytoplasm --- Certainty = 0.0000(Not Clear) < succ>
```

[9179] The protein has homology with the following sequences in the databases:

| >GP: AAC16243 GB: AF061748 cell division protein FtsH | | | |
|---|---|---|---|
| [Streptococcus pneumoniae] (ver 2) | | | |
| Identities = 487/654 (74%), Positives = 565/654 (85%), | | | |
| Gaps = 7/654 (1%) | | | |
| Query: | 5 | KNNGFVKNSFIYILMIIVVITGFQFYLKGTSTQ-SQQISYSKLIKHLKAGDIKSLSYQPS | 63 |
| | | +NNG +KN F+++L I ++TGFQ++ G ++ SQQI+Y++L++ + G++K L+YQP+ | |
| Sbjct: | 4 | QNNGLIKNPFLWLLFIFFLVTGFQYFYSGNNSGGSQQINYTELVQEITDGNVKELTYQPN | 63 |
| Query: | 64 | GSIIEVKGKYEKPQKVTVNSGLSFLGGRASTQVTEFSSLVLPSDTILKEMTAAADKNGTE | 123 |
| | | GS+IEV G Y+ P+ +G+ F T+V +F+S +LP+DT + E+ A + E | |
| Sbjct: | 64 | GSVIEVSGVYKNPKTSKEGTGIQFFTPSV-TKVEKFTSTILPADTTVSELQKLATDHKAE | 122 |
| Query: | 124 | LTVKQESSSGTWITFLMSFLPIVIFAAFMMMMM-NQGGGGARGAMSFGKNKAKSQSKGNV | 182 |
| | | +TVK ESSSG WI L+S +P I F+ MM N GGG R MSFG++KAK+ +K ++ | |
| Sbjct: | 123 | VTVKHESSSGIWINLLVSIVPFGILFFFLFSMMGNMGGGNGRNPMSFGRSKAKAANKEDI | 182 |
| Query: | 183 | KVRFTDVAGAEEEKQELVEVVDFLKNPKKYKSLGARIPAGVLLEGPPGTGKTLLAKAVAG | 242 |
| | | KVRF+DVAGAEEEKQELVEVV+FLK+PK++ LGARIPAGVLLEGPPGTGKTLLAKAVAG | |
| Sbjct: | 183 | KVRFSDVAGAEEEKQELVEVVEFLKDPKRFTKLGARIPAGVLLEGPPGTGKTLLAKAVAG | 242 |
| Query: | 243 | EAGVPFFSISGSDFVEMFVGVGASRVRSLFEDAKKAERAIIFIDEIDAVGRRRGAGMGGG | 302 |
| | | EAGVPFFSISGSDFVEMFVGVGASRVRSLFEDAKKA AIIFIDEIDAVGR+RG G+GGG | |
| Sbjct: | 243 | EAGVPFFSISGSDFVEMFVGVGASRVRSLFEDAKKAAPAIIFIDEIDAVGRQRGVGLGGG | 302 |
| Query: | 303 | NDEREQTLNQLLIEMDGFEGNENIIVIAATNRSDVLDPALLRPGRFDRKVLVGRPDVKGR | 362 |
| | | NDEREQTLNQLLIEMDGFEGNE IIVIAATNRSDVLDPALLRPGRFDRKVLVGRPDVKGR | |
| Sbjct: | 303 | NDEREQTLNQLLIEMDGFEGNEGIIVIAATNRSDVLDPALLRPGRFDRKVLVGRPDVKGR | 362 |
| Query: | 363 | EAILRVHAKNKPLANDVNLKVVAQQTPGFVGADLENVLNEAALVAARRNKIKIDASDIDE | 422 |
| | | EAIL+VHAKNKPLA DV+LK+VAQQTPGFVGADLENVLNEAALVAARRNK IDASDIDE | |
| Sbjct: | 363 | EAILKVHAKNKPLAEDVDLKLVAQQTPGFVGADLENVLNEAALVAARRNKSIIDASDIDE | 422 |
| Query: | 423 | AEDRVIAGPSKKDRTISQKEREMVAYHEAGHTIVGLVLSNARVVHKVTIVPRGRAGGYMI | 482 |
| | | AEDRVIAGPSKKD+T+SQKERE+VAYHEAGHTIVGLVLSNARVVHKVTIVPRGRAGGYMI | |
| Sbjct: | 423 | AEDRVIAGPSKKDKTVSQKERELVAYHEAGHTIVGLVLSNARVVHKVTIVPRGRAGGYMI | 482 |
| Query: | 483 | ALPKEDQMLLSKEDLKEQLAGLMGGRVAEEIVFNAQTSGASNDFEQATQIARAMVTEYGM | 542 |
| | | ALPKEDQMLLSKED+KEQLAGLMGGRVAEEI+FN QT+GASNDFEQATQ+ARAMVTEYGM | |
| Sbjct: | 483 | ALPKEDQMLLSKEDMKEQLAGLMGGRVAEEIIFNVQTTGASNDFEQATQMARAMVTEYGM | 542 |
| Query: | 543 | SEKLGPVQYEGNHAMMPGQISPEKAYSAQTAQMIDDEVRELLNQARNQAADIINENRDTH | 602 |
| | | SEKLGPVQYEGNHAM+ Q SP+K+ S QTA ID+EVR LLN+ARN+AA+II NR+TH | |
| Sbjct: | 543 | SEKLGPVQYEGNHAMLGAQ-SPQKSISEQTAYEIDEEVRSLLNEARNKAAEIIQSNRETH | 601 |
| Query: | 603 | KLIAEALLKYETLDAAQIKSIYETGKMPVDLETDDNEAHALSYDEIKNKMTESE | 656 |
| | | KLIAEALLKYETLD+ QIK++YETGKMP E + E+HALSYDE+K+KM + + | |
| Sbjct: | 602 | KLIAEALLKYETLDSTQIKALYETGKMP---EAVEEESHALSYDEVKSKMNDEK | 652 |

[9180] An alignment of the GAS and GBS proteins is shown below.

| Identities = 550/657 (83%), Positives = 612/657 (92%), | | | |
|---|---|---|---|
| Gaps = 2/657 (0%) | | | |
| Query: | 1 | MKNNKNNGFLKNSFIYILLIIAVITTFQYYLKGTSSQNQQISYTKLVKQLKAGEIKSISY | 60 |
| | | MKNNKNNGF+KNSFIYIL+II VIT FQ+YLKGTS+Q+QQISY+KL+K LKAG+IKS+SY | |
| Sbjct: | 1 | MKNNKNNGFVKNSFIYILMIIVVITGFQFYLKGTSTQSQQISYSKLIKHLKAGDIKSLSY | 60 |
| Query: | 61 | QPSGGVVEVSGTYKKAKTIKSANSFTFLGGSVATKVTGFNSVILPNDSSIKSLVSAAEEN | 120 |
| | | QPSG ++EV G Y+K + + + +FLGG +T+VT F+S++LP+D+ +K + +AA++N | |
| Sbjct: | 61 | QPSGSIIEVKGKYEKPQKVTVNSGLSFLGGRASTQVTEFSSLVLPSDTILKEMTAAADKN | 120 |
| Query: | 121 | NTNIQVKHESSSGTWISYIASFLPLVIMIGFFMMMMNQGGGGGARGAMSFGKNKARSSSK | 180 |
| | | T + VK ESSSGTWI+++ SFLP+VI F MMMMNQGGGG ARGAMSFGKNKA+S SK | |
| Sbjct: | 121 | GTELTVKQESSSGTWITFLMSFLPIVIFAAFMMMMMNQGGGG-ARGAMSFGKNKAKSQSK | 179 |
| Query: | 181 | DEVKVRFSDVAGAEEEKQELIEVVDFLKDPKRYKSLGARIPAGVLLEGPPGTGKTLLAKA | 240 |
| | | VKVRF+DVAGAEEEKQEL+EVVDFLK+PK+YKSLGARIPAGVLLEGPPGTGKTLLAKA | |
| Sbjct: | 180 | GNVKVRFTDVAGAEEEKQELVEVVDFLKNPKKYKSLGARIPAGVLLEGPPGTGKTLLAKA | 239 |
| Query: | 241 | VAGEAGVPFFSISGSDFVEMFVGVGASRVRSLFEDAKKAERAIIFIDEIDAVGRRRGAGM | 300 |
| | | VAGEAGVPFFSISGSDFVEMFVGVGASRVRSLFEDAKKAERAIIFIDEIDAVGRRRGAGM | |
| Sbjct: | 240 | VAGEAGVPFFSISGSDFVEMFVGVGASRVRSLFEDAKKAERAIIFIDEIDAVGRRRGAGM | 299 |
| Query: | 301 | GGGNDEREQTLNQLLIEMDGFEGNESIIVIAATNRSDVLDPALLRPGRFDRKVLVGQPDV | 360 |
| | | GGGNDEREQTLNQLLIEMDGFEGNE+IIVIAATNRSDVLDPALLRPGRFDRKVLVG+PDV | |
| Sbjct: | 300 | GGGNDEREQTLNQLLIEMDGFEGNENIIVIAATNRSDVLDPALLRPGRFDRKVLVGRPDV | 359 |
| Query: | 361 | KGREAILRVHAKNKPLADNVDLKVVAQQTPGFVGADLENVLNEAALVAARRNKKVIDASD | 420 |
| | | KGREAILRVHAKNKPLA++V+LKVVAQQTPGFVGADLENVLNEAALVAARRNK IDASD | |
| Sbjct: | 360 | KGREAILRVHAKNKPLANDVNLKVVAQQTPGFVGADLENVLNEAALVAARRNKIKIDASD | 419 |
| Query: | 421 | IDEAEDRVIAGPSKKDRTISERERAMVAYHEAGHTIVGLILSNARVVHKVTIVPRGRAGG | 480 |
| | | IDEAEDRVIAGPSKKDRTIS++ER MVAYHEAGHTIVGL+LSNARVVHKVTIVPRGRAGG | |
| Sbjct: | 420 | IDEAEDRVIAGPSKKDRTISQKEREMVAYHEAGHTIVGLVLSNARVVHKVTIVPRGRAGG | 479 |
| Query: | 481 | YMIALPKEDQMLLSKDDMKEQLAGLMGGRVAEEIIFNAQTTGASNDFEQATAMARAMVTE | 540 |
| | | YMIALPKEDQMLLSK+D+KEQLAGLMGGRVAEEI+FNAQT+GASNDFEQAT +ARAMVTE | |
| Sbjct: | 480 | YMIALPKEDQMLLSKEDLKEQLAGLMGGRVAEEIVFNAQTSGASNDFEQATQIARAMVTE | 539 |
| Query: | 541 | YGMSEKLGPVQYEGNHAMMAGQMSPEKSYSAQTAQLIDDEVRHLLNEARNKAADIINENR | 600 |
| | | YGMSEKLGPVQYEGNHAMM GQ+SPEK+YSAQTAQ+IDDEVR LLN+ARN+AADIINENR | |
| Sbjct: | 540 | YGMSEKLGPVQYEGNHAMMPGQISPEKAYSAQTAQMIDDEVRELLNQARNQAADIINENR | 599 |
| Query: | 601 | DTHKLIAEALLKYETLDAAQIKSIFETGKMP-ETENDEDKARALSYDEIKEKMQEED | 656 |
| | | DTHKLIAEALLKYETLDAAQIKSI+ETGKMP + E D+++A ALSYDEIK KM E + | |
| Sbjct: | 600 | DTHKLIAEALLKYETLDAAQIKSIYETGKMPVDLETDDNEAHALSYDEIKNKMTESE | 656 |

[9181] Based on this analysis, it was predicted that these proteins and their epitopes could be useful antigens for vaccines or diagnostics.

### EXAMPLE 1666

[9182] A DNA sequence (GBSx1769) was identified in S. agalactiae <SEQ ID 5167> which encodes the amino acid sequence <SEQ ID 5168>. Analysis of this protein sequence reveals the following:

```
Possible site: 28
>>> Seems to have no N-terminal signal sequence
----- Final Results -----
                            bacterial cytoplasm --- Certainty = 0.2983(Affirmative) < succ>
                              bacterial membrane --- Certainty = 0.0000(Not Clear) < succ>
                                bacterial outside --- Certainty = 0.0000(Not Clear) < succ>
```

[9183] The protein has no significant homology with any sequences in the GENPEPT database.

[9184] No corresponding DNA sequence was identified in S. pyogenes.

[9185] Based on this analysis, it was predicted that this protein and its epitopes, could be useful antigens for vaccines or diagnostics.

### EXAMPLE 1667

[9186] A DNA sequence (GBSx1770) was identified in S. agalactiae <SEQ ID 5169> which encodes the amino acid sequence <SEQ ID 5170>. Analysis of this protein sequence reveals the following:

```
Possible site: 14
>>> Seems to have no N-terminal signal sequence
----- Final Results -----
                            bacterial cytoplasm --- Certainty = 0.2424(Affirmative) < succ>
                              bacterial membrane --- Certainty = 0.0000(Not Clear) < succ>
                                bacterial outside --- Certainty = 0.0000(Not Clear) < succ>
```

[9187] A related GBS nucleic acid sequence <SEQ ID 9547> which encodes amino acid sequence <SEQ ID 9548> was also identified.

[9188] The protein has homology with the following sequences in the GENPEPT database.

| >GP: CAB12187 GB: Z99106 similar to homoserine dehydrogenase [Bacillus | | | |
|---|---|---|---|
| subtilis] | | | |
| Identities = 223/448 (49%), Positives = 313/448 (69%) | | | |
| Query: | 1 | MKVVKFGGSSLASSQQLYKVLNIIKSDYTRRFVVVSAPGKRYEEDLKMTDALIQYYQNYI | 60 |
| | | MKVVKFGGSSLAS QL KV +I+ SD R+ VVVSAPGK Y ED K+TD LI + Y+ | |
| Sbjct: | 1 | MKVVKFGGSSLASGAQLDKVFHIVTSDPARKAVVVSAPGKHYAEDTKVTDLLIACAEQYL | 60 |
| Query: | 61 | NGKDIVKDQTWIINRYQEIISDLSLGSTIAEEITRSIEQLASLPIENNQFLYDCFLAAGE | 120 |
| | | + ++ RY I ++L LG +I E+I + L N + D A+GE | |
| Sbjct: | 61 | ATGSAPELAEAVVERYALIANELQLGQSIIEKIRDDLFTLLEGDKSNPEQYLDAVKASGE | 120 |
| Query: | 121 | DNNAKLVATFFNQNDIPARYVHPNEAGIIVTKEPCNARIIPGSYDKIENLCLYNEVLVIP | 180 |
| | | DNNAKL+A +F + A YV+P +AG+ VT EP NA+++P SY + L + +++ P | |
| Sbjct: | 121 | DNNAKLIAAYFRYKGVKAEYVNPKDAGLFVTNEPGNAQVLPESYQNLYRLRERDGLIIFP | 180 |
| Query: | 181 | GFFGVTEDNQICTFSRGGSDITGSLIAAGIKADLYENFTDVDGIFAAHPGVVKNPHAIPE | 240 |
| | | GFFG ++D + TFSR GSDITGS++A G++ADLYENFTDVD +++ +P V+NP I E | |
| Sbjct: | 181 | GFFGFSKDGDVITFSRSGSDITGSILANGLQADLYENFTDVDAVYSVNPSFVENPKEISE | 240 |
| Query: | 241 | LTYKEMRELAYAGFSVLHDEALLPAYRGRIPLVIKNTNNPQQPGTKIVLKHTRSNIAVTG | 300 |
| | | LTY+EMREL+YAGFSV HDEAL+PA+R IP+ IKNTNNP GT++V K +N V G | |
| Sbjct: | 241 | LTYREMRELSYAGFSVFHDEALIPAFRAGIPVQIKNTNNPSAEGTRVVSKRDNTNGPVVG | 300 |
| Query: | 301 | IASDSRFASINVSKYLMNREVGFGRKVLQILEDLNISFEHMPTGIDDLSIVLREKELTPI | 360 |
| | | IASD+ F SI +SKYLMNRE+GFGR+ LQILE+ +++EH+P+GIDD++I+LR+ ++ | |
| Sbjct: | 301 | IASDTGFCSIYISKYLMNREIGFGRRALQILEEHGLTYEHVPSGIDDMTIILRQGQMDAA | 360 |
| Query: | 361 | KEQEILNYLTRKLEVDYVDIQHNLSTIVIVGENMKSQIGVTATATQALSREKINITMISQ | 420 |
| | | E+ ++ + L D V ++H+L+ I++VGE M+ +G TA A +ALS ++NI MI+Q | |
| Sbjct: | 361 | TERSVIKRIEEDLHADEVIVEHHLALIMVVGEAMRHNVGTTARAAKALSEAQVNIEMINQ | 420 |
| Query: | 421 | GSSEVSIMFVINSKDEKRAIKALYETFF | 448 |
| | | GSSEVS+MF + +E++A++ALY+ FF | |
| Sbjct: | 421 | GSSEVSMMFGVKEAEERKAVQALYQEFF | 448 |

[9189] No corresponding DNA sequence was identified in S. pyogenes.

[9190] Based on this analysis, it was predicted that this protein and its epitopes, could be useful antigens for vaccines or diagnostics.

### EXAMPLE 1668

[9191] A DNA sequence (GBSx1771) was identified in S. agalactiae <SEQ ID 5171> which encodes the amino acid sequence <SEQ ID 5172>. This protein is predicted to be CbbY family protein. Analysis of this protein sequence reveals the following:

```
Possible site: 59
>>> Seems to have no N-terminal signal sequence
----- Final Results -----
                            bacterial cytoplasm --- Certainty = 0.2699(Affirmative) < succ>
                              bacterial membrane --- Certainty = 0.0000(Not Clear) < succ>
                                bacterial outside --- Certainty = 0.0000(Not Clear) < succ>
```

[9192] The protein has homology with the following sequences in the GENPEPT database.

| >GP: AAF96016 GB: AE004353 CbbY family protein [Vibrio cholerae] | | | |
|---|---|---|---|
| Identities = 59/190 (31%), Positives = 93/190 (48%), | | | |
| Gaps = 10/190 (5%) | | | |
| Query: | 4 | YKAIIFDMDGVLFDTELFYYKRRERFLKQHGITIDHLPMNFFIGGNMKQVWKSVLGDQYD | 63 |
| | | ++A IFDMDG+L DTE + + G+ IG N K + +L Y | |
| Sbjct: | 6 | FQAAIFDMDGLLLDTERVCMRVFQEACTACGLPFRQEVYLSVIGCNAKTI-NGILSQAYG | 64 |
| Query: | 64 | TWDIDKL----QQDYSRYKEDNPLPYKDLIFQDCKRVIEKLHHKGYLLGLASSSTRHDIM | 119 |
| | | D+ +L +Q Y+ +P+KD + ++E L + + +A+S+ + + | |
| Sbjct: | 65 | E-DLPRLHNEWRQRYNAVVMHEAIPHKDGVIA----LLEWLKARSIPVAVATSTQKEVAL | 119 |
| Query: | 120 | LALESFNLDTYFKVILSGEEFSESKPNPAIYNRAAELLDIPKQQILIVEDSEKGITAGIA | 179 |
| | | + L+ LD YF I +G E ++ KP+P IY AAE L + QQ L EDS GI A +A | |
| Sbjct: | 120 | IKLQLAGLDHYFANITTGCEVTQGKPHPEIYLLAAERLGVEPQQCLAFEDSNNGIKAAMA | 179 |
| Query: | 180 | AGIDVWAIED | 189 |
| | | A + + I D | |
| Sbjct: | 180 | AQMHAFQIPD | 189 |

[9193] There is also homology to SEQ ID 448.

[9194] Based on this analysis, it was predicted that this protein and its epitopes, could be useful antigens for vaccines or diagnostics.

### EXAMPLE 1669

[9195] A DNA sequence (GBSx1772) was identified in S. agalactiae <SEQ ID 5173> which encodes the amino acid sequence <SEQ ID 5174>. This protein is predicted to be Pseudomonas putida enoyl-CoA hydratase II homologue (b1394). Analysis of this protein sequence reveals the following:

| Possible site: 45 | | | | |
|---|---|---|---|---|
| >>> Seems to have an uncleavable N-term signal seq | | | | |
| | INTEGRAL | Likelihood = −2.18 | Transmembrane | 128-144 (128-145) |
| | INTEGRAL | Likelihood = −1.06 | Transmembrane | 154-170 (154-170) |

```
----- Final Results -----
                              bacterial membrane --- Certainty = 0.1871(Affirmative) < succ>
                                bacterial outside --- Certainty = 0.0000(Not Clear) < succ>
                            bacterial cytoplasm --- Certainty = 0.0000(Not Clear) < succ>
```

[9196] A related GBS nucleic acid sequence <SEQ ID 9549> which encodes amino acid sequence <SEQ ID 9550> was also identified.

[9197] A related DNA sequence was identified in S. pyogenes <SEQ ID 5175> which encodes the amino acid sequence <SEQ ID 5176>. Analysis of this protein sequence reveals the following:

| Possible site: 27 | | | | |
|---|---|---|---|---|
| >>> Seems to have no N-terminal signal sequence | | | | |
| | INTEGRAL | Likelihood = −3.08 | Transmembrane | 110-126 (109-128) |

```
----- Final Results -----
                              bacterial membrane --- Certainty = 0.2232(Affirmative) < succ>
                                bacterial outside --- Certainty = 0.0000(Not Clear) < succ>
                            bacterial cytoplasm --- Certainty = 0.0000(Not Clear) < succ>
```

[9198] An alignment of the GAS and GBS proteins is shown below.

| Identities = 150/263 (57%), Positives = 197/263 (74%) | | | |
|---|---|---|---|
| Query: | 19 | LKFENIIYGIDGNVATIMLNRPDISNGFNIPMCQEIIDAIRLVSENKDVMFLVIEAQGPI | 78 |
| | | ++F++II+ + ++AT+ LNRP++SNGFNIP+CQEI+ A+ V + V FL+I+A G + | |
| Sbjct: | 1 | MQFKHIIFDVVDDLATLTLNRPEVSNGFNIPICQEILVALAEVKRDTSVRFLLIKAVGKV | 60 |
| Query: | 79 | FSIGGDLKVMKAAVESDDISSLTKIAELVNQISYDLLQLEKPVVMCVDGAVAGAAANIAL | 138 |
| | | FS+GGDL M+ AV D++ SL KIAELV +IS+ + L KPV++C DGAVAGAA NIAL | |
| Sbjct: | 61 | FSVGGDLVEMQEAVAKDNVQSLVKIAELVQEISFAIKHLPKPVILCADGAVAGAAFNIAL | 120 |
| Query: | 139 | AADFVIASKKSKFIQAFVGVGLAPDAGGLLLLSKSIGITRAVQLALTGESLSAEKAEALG | 198 |
| | | A DF IAS ++KFIQAFV VGLAPDAGGL LL++++G+ RA L +TGE ++A+K G | |
| Sbjct: | 121 | AVDFCIASTQTKFIQAFVNVGLAPDAGGLFLLTRAVGLNRATHLVMTGEGITADKGLDYG | 180 |
| Query: | 199 | IVYKLCESDKIGKIKDQLLKRLSRHSINSYQAIKSLAWEAAFKDWEQYKKLELQLQESLA | 258 |
| | | VY+ ESDK+ K+ QLLKRL R S NSY +KSL W++ F WE Y K EL +QE LA | |
| Sbjct: | 181 | FVYRTAESDKLDKVCLQLLKRLRRGSSNSYAGMKSLVWQSFFTGWEDYAKAELAIQEELA | 240 |
| Query: | 259 | FKQDFKEGVRAHADRRRPNFLGK | 281 |
| | | FK+DFKEGV A +RRRPNF GK | |
| Sbjct: | 241 | FKEDFKEGVIAFGERRRPNFQGK | 263 |

[9199] A related GBS gene <SEQ ID 8877> and protein <SEQ ID 8878> were also identified. Analysis of this protein sequence reveals the following:

| Lipop: Possible site: −1 Crend: 10 | | | |
|---|---|---|---|
| SRCFLG: 0 | | | |
| McG: Length of UR: 9 | | | |
| Peak Value of UR: 1.45 | | | |
| Net Charge of CR: −1 | | | |
| McG: Discrim Score: −5.99 | | | |
| GvH: Signal Score (−7.5): −4.37 | | | |
| Possible site: 27 | | | |
| >>> Seems to have no N-terminal signal sequence | | | |
| Amino Acid Composition: calculated from 1 | | | |
| ALOM program | count: 2 | value: −2.18 | threshold: 0.0 |

| | | | |
|---|---|---|---|
| INTEGRAL | Likelihood = −2.18 | Transmembrane | 110-126 (110-127) |
| INTEGRAL | Likelihood = −1.06 | Transmembrane | 136-152 (136-152) |

| | | |
|---|---|---|
| PERIPHERAL | Likelihood = 1.32 | 49 |

modified ALOM score: 0.94
icm1 HYPID: 7 CFP: 0.187
*** Reasoning Step: 3
----- Final Results -----
bacterial membrane --- Certainty = 0.1871 (Affirmative) < succ>
bacterial outside --- Certainty = 0.0000 (Not Clear) < succ>
bacterial cytoplasm --- Certainty = 0.0000 (Not Clear) < succ>

[9200] The protein has homology with the following sequences in the databases:

[chemical structure]

[9201] SEQ ID 8878 (GBS374) was expressed in E. coli as a His-fusion product. SDS-PAGE analysis of total cell extract is shown in FIG. 64 (lane 8; MW 32 kDa). It was also expressed in E. coli as a GST-fusion product. SDS-PAGE analysis of total cell extract is shown in FIG. 71 (lane 2; MW 57 kDa).

[9202] The GBS374-GST fusion product was purified (FIG. 215, lane 9) and used to immunise mice. The resulting antiserum was used for FACS (FIG. 307), which confirmed that the protein is immunoaccessible on GBS bacteria.

[9203] Based on this analysis, it was predicted that these proteins and their epitopes could be useful antigens for vaccines or diagnostics.

### EXAMPLE 1670

[9204] A DNA sequence (GBSx1773) was identified in S. agalactiae <SEQ ID 5177> which encodes the amino acid sequence <SEQ ID 5178>. This protein is predicted to be a 16.1 kDa transcriptional regulator. Analysis of this protein sequence reveals the following:

Possible site: 56
>>> Seems to have no N-terminal signal sequence
----- Final Results -----
bacterial cytoplasm --- Certainty = 0.1738 (Affirmative) < succ>
bacterial membrane --- Certainty = 0.0000 (Not Clear) < succ>
bacterial outside --- Certainty = 0.0000 (Not Clear) < succ>

[9205] The protein has homology with the following sequences in the GENPEPT database.

| >GP: AAD05186 GB: AF110185 unknown [Burkholderia pseudomallei] | | | |
|---|---|---|---|
| Identities = 30/102 (29%), Positives = 60/102 (58%) | | | |
| Query: | 32 | DVSLKEMHTIEIIGKHSEVTPSDVARELMLTLGTVTTSLNKLEKKGYIERKRSSIDRRVV | 91 |
| | | +++ +++ I ++ + TP +++R+L G++T L++LEKKG++ R RS DRRV+ | |
| Sbjct: | 39 | ELTAQQISVILLLARGYARTPFELSRKLSYDSGSMTRMLDRLEKKGFVVRARSESDRRVI | 98 |
| Query: | 92 | HLSLTKRGRLLDRLHSKFHKSMVSHIIEDLGEEDIKMLTSAL | 133 |
| | | L+LT+RG R + ++ +E +++ +LT L | |
| Sbjct: | 99 | ELALTERGAHAARALPALIATELNAQLEGFSADELALLTDLL | 140 |

[9206] A related DNA sequence was identified in S. pyogenes <SEQ ID 5179> which encodes the amino acid sequence <SEQ ID 5180>. Analysis of this protein sequence reveals the following:

Possible site: 42
>>> Seems to have no N-terminal signal sequence
----- Final Results -----
bacterial cytoplasm --- Certainty = 0.1412 (Affirmative) < succ>
bacterial membrane --- Certainty = 0.0000 (Not Clear) < succ>
bacterial outside --- Certainty = 0.0000 (Not Clear) < succ>

[9207] An alignment of the GAS and GBS proteins is shown below.

| Identities = 111/144 (77%), Positives = 129/144 (89%) | | | |
|---|---|---|---|
| Query: | 1 | HEYDQINSYLVDIFNRIMIIEEMSLKTSQFSDVSLKEMHTIEIIGKHSEVTPSDVARELM | 60 |
| | | +EYD+I YLVDIFNRI++IEEMSLKTSQFSDVSLKEMHTIEIIGK+ +VTPSD+ARELM | |
| Sbjct: | 7 | LEYDKIYPYLVDIFNRILVIEEMSLKTSQFSDVSLKEMHTIEIIGKYDQVTPSDIARELM | 66 |
| Query: | 61 | LTLGTVTTSLNKLEKKGYIERKRSSIDRRVVHLSLTKRGRLLDRLHSKFHKSMVSHIIED | 120 |
| | | +TLGTVTTSLNKLE KGYI R RS DRRVV+LSLTKRGRLLDRLH+KFHK+MV H+I D | |
| Sbjct: | 67 | VTLGTVTTSLNKLEAKGYIARTRSRSDRRVVYLSLTKRGRLLDRLHAKFHKNMVGHVIAD | 126 |
| Query: | 121 | LGEEDIKMLTSALGNLHKFLEDLV | 144 |
| | | + +E+++ L LGNLH+FLEDLV | |
| Sbjct: | 127 | MSDEEMQALVRGLGNLHQFLEDLV | 150 |

[9208] Based on this analysis, it was predicted that these proteins and their epitopes could be useful antigens for vaccines or diagnostics.

### EXAMPLE 1671

[9209] A DNA sequence (GBSx1774) was identified in S. agalactiae <SEQ ID 5181> which encodes the amino acid sequence <SEQ ID 5182>. This protein is predicted to be 3-oxoacyl-(acyl-carrier-protein) synthase III (fabH-2). Analysis of this protein sequence reveals the following:

| Possible site: 15 | | | |
|---|---|---|---|
| >>> Seems to have no N-terminal signal sequence | | | |
| INTEGRAL | Likelihood = 1.12 | Transmernbrane | 103-119 (103-119) |

----- Final Results -----
bacterial membrane --- Certainty = 0.1447 (Affirmative) < succ>
bacterial outside --- Certainty = 0.0000 (Not Clear) < succ>
bacterial cytoplasm --- Certainty = 0.0000 (Not Clear) < succ>

[9210] The protein has homology with the following sequences in the GENPEPT database.

| >GP: AAF98271 GB: AF197933 beta-ketoacyl-ACP synthase III | | | |
|---|---|---|---|
| [Streptococcus pneumoniae] | | | |
| Identities = 225/324 (69%), Positives = 276/324 (84%), Gaps = 1/324 (0%) | | | |
| Query: | 1 | MVFAKISQLAHYAPSQIIKNEDLSLIMDTSDDWISSRTGIKQRHISKNETTADLANKVAE | 60 |
| | | M FAKISQ+AHY P Q++ N DL+ IMDT+D+WISSRTGI+QRHIS+ E+T+DLA +VA+ | |
| Sbjct: | 1 | MAFAKISQVAHYVPEQVVTNHDLAQIMDTNDEWISSRTGIRQRHISRTESTSDLATEVAK | 60 |
| Query: | 61 | QLIEKSGYSASQIDFIIVATMTPDSMMPSTAARVQAHIGASNAFAFDLSAACSGFVFALS | 120 |
| | | +L+ K+G + ++DFII+AT+TPDSMMPSTAARVQA+IGA+ AFAFDL+AACSGFVFALS | |
| Sbjct: | 61 | KLMAKAGITGEELDFIILATITPDSMMPSTAARVQANIGANKAFAFDLTAACSGFVFALS | 120 |
| Query: | 121 | TAEKLISSGSYQKGLVIGAETVSKVLDWTDRGTAVLFGDGAGGVLLEASKEKHFLAESLN | 180 |
| | | TAEK I+SG +QKGLVIG+ET+SK +DW+DR TAVLFGDGAGGVLLEAS+++HFLAESLN | |
| Sbjct: | 121 | TAEKFIASGRFQKGLVIGSETLSKAVDWSDRSTAVLFGDGAGGVLLEASEQEHFLAESLN | 180 |
| Query: | 181 | TDGSR-QGLQSSQVGLNSPFSDEVLDDKFLKNDGRAIFDFAIKEVSKSINHLIETSYLEK | 239 |
| | | +DGSR + L GL+SPFSD+ D FLKMDGR +FDFAI++V+KSI I+ S +E | |
| Sbjct: | 181 | SDGSRSECLTYGHSGLHSPFSDQESADSFLKMDGRTVFDFAIRDVAKSIKQTIDESPIEV | 240 |
| Query: | 240 | EDIDYLFLHQANRRILDKMSRKIDIARDKFPENMMDYGNTSAASIPILLSESYENGLLKL | 299 |
| | | D+DYL LHQAN RILDKM+RKI + R K P NMM+YGNTSAASIPILLSE E GL+ L | |
| Sbjct: | 241 | TDLDYLLLHQANDRILDKMARKIGVDRAKLPANMMEYGNTSAASIPILLSECVEQGLIPL | 300 |
| Query: | 300 | DGNQTILLSGFGGGLTWGSLIVKI | 323 |
| | | DG+QT+LLSGFGGGLTWG+LI+ I | |
| Sbjct: | 301 | DGSQTVLLSGFGGGLTWGTLILTI | 324 |

[9211] A related DNA sequence was identified in S. pyogenes <SEQ ID 5183> which encodes the amino acid sequence <SEQ ID 5184>. Analysis of this protein sequence reveals the following:

| Possible site: 61 | | | | |
|---|---|---|---|---|
| >>> Seems to have no N-terminal signal sequence | | | | |
| | INTEGRAL | Likelihood = −0.16 | Transmembrane | 103-119 (103-120) |

```
----- Final Results -----
                              bacterial membrane --- Certainty = 0.1065(Affirmative) < succ>
                                bacterial outside --- Certainty = 0.0000(Not Clear) < succ>
                            bacterial cytoplasm --- Certainty = 0.0000(Not Clear) < succ>
```

[9212] The protein has homology with the following sequences in the databases:

| >GP: AAF98271 GB: AF197933 beta-ketoacyl-ACP synthase III | | | |
|---|---|---|---|
| [Streptococcus pneumoniae] | | | |
| Identities = 212/324 (65%), Positives = 263/324 (80%) | | | |
| Query: | 1 | MIFSKISQVAHYVPQQLVTNNDLASIMDTSHEWIFSRTGIAERHISRDEMTSDLAIQVAD | 60 |
| | | M F+KISQVAHYVP+Q+VTN+DLA IMDT+ EWI SRTGI +RHISR E TSDLA +VA | |
| Sbjct: | 1 | MAFAKISQVAHYVPEQVVTNHDLAQIMDTNDEWISSRTGIRQRHISRTESTSDLATEVAK | 60 |
| Query: | 61 | QLLTQSGLKADAIDFIIVATISPDATMPSTAAKVQAAIAATSAFAFDMTAACSGFVFALA | 120 |
| | | +L+ ++G+ + +DFII+ATI+PD+ MPSTAA+VQA I A AFAFD+TAACSGFVFAL+ | |
| Sbjct: | 61 | KLMAKAGITGEELDFIILATITPDSMMPSTAARVQANIGANKAFAFDLTAACSGFVFALS | 120 |
| Query: | 121 | MADKLIASGAYQNGMVIGAETLSKLVNWQDRATAVLFGDGAGGVLLEASKDKHVLAETLH | 180 |
| | | A+K IASG +Q G+VIG+ETLSK V+W DR+TAVLFGDGAGGVLLEAS+ +H LAE+L+ | |
| Sbjct: | 121 | TAEKFIASGRFQKGLVIGSETLSKAVDWSDRSTAVLFGDGAGGVLLEASEQEHFLAESLN | 180 |
| Query: | 181 | TDGARCQSLISGETSLSSPYSIGKKAIATIQMDGRAIFDFAIRDVSKSILTLMAQSDITK | 240 |
| | | +DG+R + L G + L SP+S + A + ++MDGR +FDFAIRDV+KSI + +S I | |
| Sbjct: | 181 | SDGSRSECLTYGHSGLHSPFSDQESADSFLKMDGRTVFDFAIRDVAKSIKQTIDESPIEV | 240 |
| Query: | 241 | DDIDYCLLHQANRRILDKIARKIDVPREKFLENMMRYGNTSAASIPILLSEAVQKGQIRL | 300 |
| | | D+DY LLHQAN RILDK+ARKI V R K NMM YGNTSAASIPILLSE V++G I L | |
| Sbjct: | 241 | TDLDYLLLHQANDRILDKMARKIGVDRAKLPANMMEYGNTSAASIPILLSECVEQGLIPL | 300 |
| Query: | 301 | DGTQKILLSGFGGGLTWGSLIVRI | 324 |
| | | DG+Q +LLSGFGGGLTWG+LI+ I | |
| Sbjct: | 301 | DGSQTVLLSGFGGGLTWGTLILTI | 324 |

[9213] An alignment of the GAS and GBS proteins is shown below.

| Identities = 216/324 (66%), Positives = 271/324 (82%), Gaps = 1/324 (0%) | | | |
|---|---|---|---|
| Query: | 1 | MVFAKISQLAHYAPSQIIKNEDLSLIMDTSDDWISSRTGIKQRHISKNETTADLANKVAE | 60 |
| | | M+F+KISQ+AHY P Q++ N DL+ IMDTS +WI SRTGI +RHIS++E T+DLA +VA+ | |
| Sbjct: | 1 | MIFSKISQVAHYVPQQLVTNNDLASIMDTSHEWIFSRTGIAERHISRDEMTSDLAIQVAD | 60 |
| Query: | 61 | QLIEKSGYSASQIDFIIVATMTPDSMMPSTAARVQAHIGASNAFAFDLSAACSGFVFALS | 120 |
| | | QL+ +SG A IDFIIVAT++PD+ MPSTAA+VQA I A++AFAFD++AACSGFVFAL+ | |
| Sbjct: | 61 | QLLTQSGLKADAIDFIIVATISPDATMPSTAAKVQAAIAATSAFAFDMTAACSGFVFALA | 120 |
| Query: | 121 | TAEKLISSGSYQKGLVIGAETVSKVLDWTDRGTAVLFGDGAGGVLLEASKEKHFLAESLN | 180 |
| | | A+KLI+SG+YQ G+VIGAET+SK+++W DR TAVLFGDGAGGVLLEASK+KH LAE+L+ | |
| Sbjct: | 121 | MADKLIASGAYQNGMVIGAETLSKLVNWQDRATAVLFGDGAGGVLLEASKDKHVLAETLH | 180 |
| Query: | 181 | TDGSR-QGLQSSQVGLNSPFSDEVLDDKFLKMDGRAIFDFAIKEVSKSINHLIETSYLEK | 239 |
| | | TDG+R Q L S + L+SP+S ++MDGRAIFDFAI++VSKSI L+ S + K | |
| Sbjct: | 181 | TDGARCQSLISGETSLSSPYSIGKKAIATIQMDGRAIFDFAIRDVSKSILTLMAQSDITK | 240 |
| Query: | 240 | EDIDYLFLHQANRRILDKMSRKIDIARDKFPENMMDYGNTSAASIPILLSESYENGLLKL | 299 |
| | | +DIDY LHQANRRILDK++RKID+ R+KF ENMM YGNTSAASIPILLSE+ + G ++L | |
| Sbjct: | 241 | DDIDYCLLHQANRRILDKIARKIDVPREKFLENMMRYGNTSAASIPILLSEAVQKGQIRL | 300 |
| Query: | 300 | DGNQTILLSGFGGGLTWGSLIVKI | 323 |
| | | DG Q ILLSGFGGGLTWGSLIV+I | |
| Sbjct: | 301 | DGTQKILLSGFGGGLTWGSLIVRI | 324 |

[9214] Based on this analysis, it was predicted that these proteins and their epitopes could be useful antigens for vaccines or diagnostics.

### EXAMPLE 1672

[9215] A DNA sequence (GBSx1775) was identified in S. agalactiae <SEQ ID 5185> which encodes the amino acid sequence <SEQ ID 5186>. This protein is predicted to be acyl carrier protein (acpP). Analysis of this protein sequence reveals the following:

```
Possible site: 59
>>> Seems to have no N-terminal signal sequence
----- Final Results -----
                            bacterial cytoplasm --- Certainty = 0.3083(Affirmative) < succ>
                              bacterial membrane --- Certainty = 0.0000(Not Clear) < succ>
                                bacterial outside --- Certainty = 0.0000(Not Clear) < succ>
```

[9216] A related GBS nucleic acid sequence <SEQ ID 9551> which encodes amino acid sequence <SEQ ID 9552> was also identified.

[9217] The protein has homology with the following sequences in the GENPEPT database.

| >GP: AAF98272 GB: AF197933 acyl carrier protein [Streptococcus pneumoniae] | | | |
|---|---|---|---|
| Identities = 64/74 (86%), Positives = 67/74 (90%) | | | |
| Query: | 17 | MAVFEKVQEIIVEELGKDAEEVTLNTTFDDLDADSLDVFQVISEIEDAFDIQIETEEGLN | 76 |
| | | MAVFEKVQEIIVEELGKDA EVTL +TFDDLDADSLD+FQVISEIEDAFDIQIE E L | |
| Sbjct: | 1 | MAVFEKVQEIIVEELGKDASEVTLESTFDDLDADSLDLFQVISEIEDAFDIQIEAENDLK | 60 |
| Query: | 77 | TVGDLVAYVEEKVK | 90 |
| | | TVGDLVAYVEE+ K | |
| Sbjct: | 61 | TVGDLVAYVEEQAK | 74 |

[9218] A related DNA sequence was identified in S. pyogenes <SEQ ID 5187> which encodes the amino acid sequence <SEQ ID 5188>. Analysis of this protein sequence reveals the following:

```
Possible site: 43
>>> Seems to have no N-terminal signal sequence
----- Final Results -----
                            bacterial cytoplasm --- Certainty = 0.2995(Affirmative) < succ>
                              bacterial membrane --- Certainty = 0.0000(Not Clear) < succ>
                                bacterial outside --- Certainty = 0.0000(Not Clear) < succ>
```

[9219] An alignment of the GAS and GBS proteins is shown below.

| Identities = 70/74 (94%), Positives = 71/74 (95%) | | | |
|---|---|---|---|
| Query: | 17 | MAVFEKVQEIIVEELGKDAEEVTLNTTFDDLDADSLDVFQVISEIEDAFDIQIETEEGLN | 76 |
| | | MAVFEKVQEIIVEELGK+ EEVTL TTFDDLDADSLDVFQVISEIEDAFDIQIETEEGLN | |
| Sbjct: | 1 | MAVFEKVQEIIVEELGKETEEVTLETTFDDLDADSLDVFQVISEIEDAFDIQIETEEGLN | 60 |
| Query: | 77 | TVGDLVAYVEEKVK | 90 |
| | | TVGDLVAYVEEK K | |
| Sbjct: | 61 | TVGDLVAYVEEKSK | 74 |

[9220] Based on this analysis, it was predicted that these proteins and their epitopes could be useful antigens for vaccines or diagnostics.

### EXAMPLE 1673

[9221] A DNA sequence (GBSx1777) was identified in S. agalactiae <SEQ ID 5189> which encodes the amino acid sequence <SEQ ID 5190>. Analysis of this protein sequence reveals the following:

| Possible site: 31 | | | | |
|---|---|---|---|---|
| >>> Seems to have no N-terminal signal sequence | | | | |
| | INTEGRAL | Likelihood = −0.27 | Transmembrane | 156-172 (156-173) |

```
----- Final Results -----
                              bacterial membrane --- Certainty = 0.1107(Affirmative) < succ>
                                bacterial outside --- Certainty = 0.0000(Not Clear) < succ>
                            bacterial cytoplasm --- Certainty = 0.0000(Not Clear) < succ>
```

[9222] The protein has homology with the following sequences in the GENPEPT database.

| >GP: AAF98273 GB: AF197933 trans-2-enoyl-ACP reductase II | | | |
|---|---|---|---|
| [Streptococcus pneumoniae] | | | |
| Identities = 257/318 (80%), Positives = 277/318 (86%), Gaps = 1/318 (0%) | | | |
| Query: | 1 | MKTRITELLNIKYPIFQGGMAWVADGDLAGAVSKAGGLGIIGGGNAPKEVVKANIDKIKS | 60 |
| | | MKTRITELL I YPIFQGGMAWVADGDLAGAVSKAGGLGIIGGGNAPKEVVKANIDKIKS | |
| Sbjct: | 1 | MKTRITELLKIDYPIFQGGMAWVADGDLAGAVSKAGGLGIIGGGNAPKEVVKANIDKIKS | 60 |
| Query: | 61 | MTDKPFGVNIMLLSPFVDDIVDLVIEEGVKVVTTGAGNPGKYMERFHEAGITVIPVVPSV | 120 |
| | | +TDKPFGVNIMLLSPFV+DIVDLVIEEGVKVVTTGAGNP KYMERFHEAGI VIPVVPSV | |
| Sbjct: | 61 | LTDKPFGVNIMLLSPFVEDIVDLVIEEGVKVVTTGAGNPSKYMERFHEAGIIVIPVVPSV | 120 |
| Query: | 121 | ALAKRMEKLGADAIITEGMEAGGHIGKLTTMTLVRQVVDAVTIPVIAAGGIADGRGAAAG | 180 |
| | | ALAKRMEK+GADA+I EGMEAGGHIGKLTTMTLVRQV A++IPVIAAGGIADG GAAAG | |
| Sbjct: | 121 | ALAKRMEKIGADAVIAEGMEAGGHIGKLTTMTLVRQVATAISIPVIAAGGIADGEGAAAG | 180 |
| Query: | 181 | FMLGADAVQVGTRFVVAKESNAHPNYKAKILKAKDIDTAVSAQVVGHPVRALKNKLVTTY | 240 |
| | | FMLGA+AVQVGTRFVVAKESNAHPNYK KILKA+DIDT +SAQ GH VRA+KN+L + | |
| Sbjct: | 181 | FMLGAEAVQVGTRFVVAKESNAHPNYKEKILKARDIDTTISAQHFGHAVRAIKNQLTRDF | 240 |
| Query: | 241 | SQAEKDYLAGRISINEI-EELGAGALRNAVVDGDVINGSVMAGQIAGLIKSEETCQEILE | 299 |
| | | AEKD EI E++GAGAL AVV GDV GSVMAGQIAGL+ EET +EIL+ | |
| Sbjct: | 241 | ELAEKDAFKQEDPDLEIFEQMGAGALAKAVVHGDVDGGSVMAGQIAGLVSKEETAEEILK | 300 |
| Query: | 300 | DIYSGARQVILSEASRWS | 317 |
| | | D+Y GA + I EASRW+ | |
| Sbjct: | 301 | DLYYGAAKKIQEEASRWT | 318 |

[9223] A related DNA sequence was identified in S. pyogenes <SEQ ID 5191> which encodes the amino acid sequence <SEQ ID 5192>. Analysis of this protein sequence reveals the following:

| Possible site: 35 | | | | |
|---|---|---|---|---|
| >>> Seems to have no N-terminal signal sequence | | | | |
| | INTEGRAL | Likelihood = −1.70 | Transmembrane | 106-122 (106-124) |
| | INTEGRAL | Likelihood = −0.22 | Transmembrane | 156-172 (156-173) |

```
----- Final Results -----
                              bacterial membrane --- Certainty = 0.1680(Affirmative) < succ>
                                bacterial outside --- Certainty = 0.0000(Not Clear) < succ>
                            bacterial cytoplasm --- Certainty = 0.0000(Not Clear) < succ>
```

[9224] The protein has homology with the following sequences in the databases:

| >GP: AAF98273 GB: AF197933 trans-2-enoyl-ACP reductase II | | | |
|---|---|---|---|
| [Streptococcus pneumoniae] | | | |
| Identities = 252/320 (78%), Positives = 276/320 (85%), Gaps = 1/320 (0%) | | | |
| Query: | 1 | MKTRITELLNIDYPIFQGGMAWVADGDLAGAVSNAGGLGIIGGGNAPKEVVKANIDRVKA | 60 |
| | | MKTRITELL IDYPIFQGGMAWVADGDLAGAVS AGGLGIIGGGNAPKEVVKANID++K+ | |
| Sbjct: | 1 | MKTRITELLKIDYPIFQGGMAWVADGDLAGAVSKAGGLGIIGGGNAPKEVVKANIDKIKS | 60 |
| Query: | 61 | ITDRPFGVNIMLLSPFADDIVDLVIEEGVKVVTTGAGNPGKYMERLHQAGIIVVPVVPSV | 120 |
| | | +TD+PFGVNIMLLSPF +DIVDLVIEEGVKVVTTGAGNP KYMER H+AGIIV+PVVPSV | |
| Sbjct: | 61 | LTDKPFGVNIMLLSPFVEDIVDLVIEEGVKVVTTGAGNPSKYMERFHEAGIIVIPVVPSV | 120 |
| Query: | 121 | ALAKRMEKLGVDAVIAEGMEAGGHIGKLTTMSLVRQVVEAVSIPVIAAGGIADGHGAAAA | 180 |
| | | ALAKRMEK+G DAVIAEGMEAGGHIGKLTTM+LVRQV A+SIPVIAAGGIADG GAAA | |
| Sbjct: | 121 | ALAKRMEKIGADAVIAEGMEAGGHIGKLTTMTLVRQVATAISIPVIAAGGIADGEGAAAG | 180 |
| Query: | 181 | FMLGAEAVQIGTRFVVAKESNAHQNFKDKILAAKDIDTVISAQVVGHPVRSIKNKLTSAY | 240 |
| | | FMLGAEAVQ+GTRFVVAKESNAH N+K+KIL A+DIDT ISAQ GH VR+IKN+LT + | |
| Sbjct: | 181 | FMLGAEAVQVGTRFVVAKESNAHPNYKEKILKARDIDTTISAQHFGHAVRAIKNQLTRDF | 240 |
| Query: | 241 | AKAEK-AFLIGQKTATDIEEMGAGSLRHAVIEGDVVNGSVMAGQIAGLVRKEESCETILK | 299 |
| | | AEK AF E+MGAG+L AV+ GDV GSVMAGQIAGLV KEE+ E ILK | |
| Sbjct: | 241 | ELAEKDAFKQEDPDLEIFEQMGAGALAKAVVHGDVDGGSVMAGQIAGLVSKEETAEEILK | 300 |
| Query: | 300 | DIYYGAARVIQNEAKRWQSV | 319 |
| | | D+YYGAA+ IQ EA RW V | |
| Sbjct: | 301 | DLYYGAAKKIQEEASRWTGV | 320 |

[9225] An alignment of the GAS and GBS proteins is shown below.

| Identities = 253/319 (79%), Positives = 291/319 (90%) | | |
|---|---|---|
| Query: 1 | MKTRITELLNIKYPIFQGGMAWVADGDLAGAVSKAGGLGIIGGGNAPKEVVKANIDKIKS | 60 |
| | MKTRITELLNI YPIFQGGMAWVADGDLAGAVS AGGLGIIGGGNAPKEVVKANID++K+ | |
| Sbjct: 1 | MKTRITELLNIDYPIFQGGMAWVADGDLAGAVSNAGGLGIIGGGNAPKEVVKANIDRVKA | 60 |
| Query: 61 | MTDKPFGVNIMLLSPFVDDIVDLVIEEGVKVVTTGAGNPGKYMERFHEAGITVIPVVPSV | 120 |
| | +TD+PFGVNIMLLSPF DDIVDLVIEEGVKVVTTGAGNPGKYMER H+AGI V+PVVPSV | |
| Sbjct: 61 | ITDRPFGVNIMLLSPFADDIVDLVIEEGVKVVTTGAGNPGKYMERLHQAGIIVVPVVPSV | 120 |
| Query: 121 | ALAKRMEKLGADAIITEGMEAGGHIGKLTTMTLVRQVVDAVTIPVIAAGGIADGRGAAAG | 180 |
| | ALAKRMEKLG DA+I EGMEAGGHIGKLTTM+LVRQVV+AV+IPVIAAGGIADG GAAA | |
| Sbjct: 121 | ALAKRMEKLGVDAVIAEGMEAGGHIGKLTTMSLVRQVVEAVSIPVIAAGGIADGHGAAAA | 180 |
| Query: 181 | FMLGADAVQVGTRFVVAKESNAHPNYKAKILKAKDIDTAVSAQVVGHPVRALKNKLVTTY | 240 |
| | FMLGA+AVQ+GTRFVVAKESNAH N+K KIL AKDIDT +SAQVVGHPVR++KNKL + Y | |
| Sbjct: 181 | FMLGAEAVQIGTRFVVAKESNAHQNFKDKILAAKDIDTVISAQVVGHPVRSIKNKLTSAY | 240 |
| Query: 241 | SQAEKDYLAGRISINEIEELGAGALRNAVVDGDVINGSVMAGQIAGLIKSEETCQEILED | 300 |
| | ++AEK +L G+ + +IEE+GAG+LR+AV++GDV+NGSVMAGQIAGL++ EE+C+ IL+D | |
| Sbjct: 241 | AKAEKAFLIGQKTATDIEEMGAGSLRHAVIEGDVVNGSVMAGQIAGLVRKEESCETILKD | 300 |
| Query: 301 | IYSGARQVILSEASRWSDL | 319 |
| | IY GA +VI +EA RW + | |
| Sbjct: 301 | IYYGAARVIQNEAKRWQSV | 319 |

[9226] Based on this analysis, it was predicted that these proteins and their epitopes could be useful antigens for vaccines or diagnostics.

### EXAMPLE 1674

[9227] A DNA sequence (GBSx1778) was identified in S. agalactiae <SEQ ID 5193> which encodes the amino acid sequence <SEQ ID 5194>. This protein is predicted to be MCAT (fabD). Analysis of this protein sequence reveals the following:

```
Possible site: 19
>>> Seems to have no N-terminal signal sequence
----- Final Results -----
bacterial cytoplasm --- Certainty = 0.1276 (Affirmative) <succ>
  bacterial membrane --- Certainty = 0.0000 (Not Clear) <succ>
    bacterial outside --- Certainty = 0.0000 (Not Clear) <succ>
```

[9228] The protein has homology with a S. pneumoniae sequence:

| Identities = 203/306 (66%), Positives = 242/306 (78%), Gaps = 1/306 (0%) | | |
|---|---|---|
| Query: 1 | MNKVSFLFAGQGAQKLGMARDLYETFPIVKETFDKASHVLGYDLRELIDKDLDKLNQTKY | 60 |
| | M K +FLFAGQGAQ LGM RD Y+ +PIVKET D+AS VLGYDLR LID + DKLNQT+Y | |
| Sbjct: 1 | MTKTAFLFAGQGAQYLGMGRDFYDQYPIVKETIDRASQVLGYDLRYLIDTEEDKLNQTRY | 60 |
| Query: 61 | TQPAILTTSTAIYRLILKEIELRPDMVAGLSLGEYSALVASGAIRFEDAVVLVARRGQLM | 120 |
| | TQPAIL TS AIYRL L+E +PDMVAGLSLGEYSALVASGA+ FEDAV LVA+RG M | |
| Sbjct: 61 | TQPAILATSVAIYRL-LQEKGYQPDMVAGLSLGEYSALVASGALDFEDAVALVAKRGAYM | 119 |
| Query: 121 | EAAAPAGSGKMVAVLNADRQIIEDACKKASQFGIVSPANYNTPKQIVIGGESIAVNAAVE | 180 |
| | E AAPA SGKMVAVLN ++IE+AC+KAS+ G+V+PANYNTP QIVI GE +AV+ AVE | |
| Sbjct: 120 | EEAAPADSGKMVAVLNTPVEVIEEACQKASELGVVTPANYNTPAQIVIAGEVVAVDRAVE | 179 |
| Query: 181 | ELKQQGVKRLIPLNVSGPFHTALLKPASQKLSDVLDKVHFSVSEIPVIGNTEAQIMKKDD | 240 |
| | L++ G KRLIPL VSGPFHTALL+PASQKL++ L +V FS P++GNTEA +M+K+D | |
| Sbjct: 180 | LLQEAGAKRLIPLKVSGPFHTALLEPASQKLAETLAQVSFSDFTCPLVGNTEAAVMQKED | 239 |
| Query: 241 | IKSLLARQVMEPVRFDESIETMKKMGMTQVVEIGPGKVLSGFLKKIDSSLSVHSVEDKIG | 300 |
| | I LL RQV EPVRF ESI M++ G++ +EIGPGKVLSGF+KKID + + VED+ | |
| Sbjct: 240 | IAQLLTRQVKEPVRFYESIGVMQEAGISNFIEIGPGKVLSGFVKKIDQTAHLAHVEDQAS | 299 |
| Query: 301 | FNNLKE | 306 |
| | L E | |
| Sbjct: 300 | LVALLE | 305 |

[9229] A related DNA sequence was identified in S. pyogenes <SEQ ID 5195> which encodes the amino acid sequence <SEQ ID 5196>. Analysis of this protein sequence reveals the following:

```
Possible Site: 19
>>> Seems to have no N-terminal signal sequence
----- Final Results -----
bacterial cytoplasm --- Certainty = 0.1602 (Affirmative) <succ>
  bacterial membrane --- Certainty = 0.0000 (Not Clear) <succ>
    bacterial outside --- Certainty = 0.0000 (Not Clear) <succ>
```

[9230] An alignment of the GAS and GBS proteins is shown below.

| Identities = 201/299 (67%), Positives = 248/299 (82%), Gaps = 1/299 (0%) | | |
|---|---|---|
| Query: 1 | MNKVSFLFAGQGAQKLGMARDLYETFPIVKETFDKASHVLGYDLRELIDKDLDKLNQTKY | 60 |
| | M K +FLFAGQGAQKLGMARD Y+ F IV++TFD+AS VLGYDLR LID D KLNQT Y | |
| Sbjct: 3 | MTKTAFLFAGQGAQKLGMARDFYDNFAIVRKTFDQASQVLGYDLRRLIDSDELKLNQTSY | 62 |
| Query: 61 | TQPAILTTSTAIYRLILKEIELRPDMVAGLSLGEYSALVASGAIRFEDAVVLVARRGQLM | 120 |
| | TQPAILT+S AIYR +L ++PDMVAGLSLGEYSALVASGA+ FED + LVA+RG+LM | |
| Sbjct: 63 | TQPAILTSSIAIYR-VLGLHHVKPDMVAGLSLGEYSALVASGALSFEDTLSLVAKRGRLM | 121 |
| Query: 121 | EAAAPAGSGKMVAVLNADRQIIEDACKKASQFGIVSPANYNTPKQIVIGGESIAVNAAVE | 180 |
| | E AAP GSGKMVAV+N D Q+IE+ C+ A++ G+V+PANYNTP QIVIGG++ AVN AVE | |
| Sbjct: 122 | EEAAPQGSGKMVAVMNTDVQVIEEVCQIAAKHGVVAPANYNTPSQIVIGGQTDAVNVAVE | 181 |
| Query: 181 | ELKQQGVKRLIPLNVSGPFHTALLKPASQKLSDVLDKVHFSVSEIPVIGNTEAQIMKKDD | 240 |
| | LK++GVKRLIPLNVSGPFHTALL+PAS+ L+ L++ +FS + IP++GNTEA IM+KD | |
| Sbjct: 182 | LLKERGVKRLIPLNVSGPFHTALLEPASRLLAKELERYNFSDFKIPLVGNTEANIMEKDR | 241 |
| Query: 241 | IKSLLARQVMEPVRFDESIETMKKMGMTQVVEIGPGKVLSGFLKKIDSSLSVHSVEDKI | 299 |
| | I LLARQVMEPVRF +S+ T+ + G+TQ +E+GPGKVL+GF+KKID +L SVE+ + | |
| Sbjct: 242 | IPELLARQVMEPVRFYDSVATLVESGITQFIEVGPGKVLTGFVKKIDKNLLCTSVENMV | 300 |

[9231] Based on this analysis, it was predicted that these proteins and their epitopes could be useful antigens for vaccines or diagnostics.

### EXAMPLE 1675

[9232] A DNA sequence (GBSx1779) was identified in S. agalactiae <SEQ ID 5197> which encodes the amino acid sequence <SEQ ID 5198>. This protein is predicted to be beta-ketoacyl-ACP reductase (fabG). Analysis of this protein sequence reveals the following:

```
Possible site: 29
>>> Seems to have no N-terminal signal sequence
----- Final Results -----
bacterial cytoplasm --- Certainty = 0.0930 (Affirmative) <succ>
  bacterial membrane --- Certainty = 0.0000 (Not Clear) <succ>
    bacterial outside --- Certainty = 0.0000 (Not Clear) <succ>
```

[9233] The protein has homology with the following sequences in the GENPEPT database.

| >GP:AAF98275 GB:AF197933 beta-ketoacyl-ACP reductase | | |
|---|---|---|
| [Streptococcus pneumoniae] | | |
| Identities = 184/243 (75%), Positives = 212/243 (86%) | | |
| Query: 1 | MQLKDKNIFITGSSRGIGLAIAHQFAQLGANIVLNGRSEISEDLIAEFADYGVKVIAISG | 60 |
| | M+L+ KNIFITGSSRGIGLAIAH+FAQ GANIVLN R ISE+L+AEF++YG+KV+ ISG | |
| Sbjct: 1 | MKLEHKNIFITGSSRGIGLAIAHKFAQAGANIVLNSRGAISEELLAEFSNYGIKVVPISG | 60 |
| Query: 61 | DVSSFEDANRMIKEAIASLGSVDVLVNNAGITNDKLMLKMTVEDFESVLKINLTGAFNMT | 120 |
| | DVS F DA RMI +AIA LGSVDVLVNNAGIT D LMLKMT DFE VLK+NLTGAFNMT | |
| Sbjct: 61 | DVSDFADAKRMIDQAIAELGSVDVLVNNAGITQDTLMLKMTEADFEKVLKVNLTGAFNMT | 120 |
| Query: 121 | QSVLKPMTKARQGAIINISSVVGLTGNVGQANYAASKAGLIGFTKSVAREVAARGIRVNA | 180 |
| | QSVLKPM KAR+GAIIN+SSVVGL GN+GQANYAASKAGLIGFTKSVAREVA+R IRVN | |
| Sbjct: 121 | QSVLKPMMKAREGAIINMSSVVGLMGNIGQANYAASKAGLIGFTKSVAREVASRNIRVNV | 180 |
| Query: 181 | IAPGFIESDMTDVIPEKMQEAILAQIPMKRIGKGKEVAQVASFLAEQEYLTGQVIAIDGG | 240 |
| | IAPG IESDMT ++ +K++EA LAQIPMK G+ ++VA + FLA Q+YLTGQV+AIDGG | |
| Sbjct: 181 | IAPGMIESDMTAILSDKIKEATLAQIPMKEFGQAEQVADLTVFLAGQDYLTGQVVAIDGG | 240 |
| Query: 241 | MTM | 243 |
| | ++M | |
| Sbjct: 241 | LSM | 243 |

[9234] A related DNA sequence was identified in S. pyogenes <SEQ ID 3865> which encodes the amino acid sequence <SEQ ID 3866>. Analysis of this protein sequence reveals the following:

```
Possible site: 29
>>> Seems to have no N-terminal signal sequence
----- Final Results -----
bacterial cytoplasm --- Certainty = 0.1088 (Affirmative) <succ>
  bacterial membrane --- Certainty = 0.0000 (Not Clear) <succ>
    bacterial outside --- Certainty = 0.0000 (Not Clear) <succ>
```

[9235] An alignment of the GAS and GBS proteins is shown below.

| Identities = 201/244 (82%), Positives = 220/244 (89%) | | |
|---|---|---|
| Query: 1 | MQLKDKNIFITGSSRGIGLAIAHQFAQLGANIVLNGRSEISEDLIAEFADYGVKVIAISG | 60 |
| | M++K KNIFITGS+RGIGLA+AHQFA L ANIVLNGRS ISE+L+A F DYGV V+ ISG | |
| Sbjct: 1 | MEIKGKNIFITGSTRGIGLAMAHQFASLEANIVLNGRSAISEELVASFTDYGVTVVTISG | 60 |
| Query: 61 | DVSSFEDANRMIKEAIASLGSVDVLVNNAGITNDKLMLKMTVEDFESVLKINLTGAFNMT | 120 |
| | DVS +A RM+ EAI SLGS+DVLVNNAGITNDKLMLKMT EDFE VLKINLTGAFNMT | |
| Sbjct: 61 | DVSEASEAKRMVNEAIESLGSIDVLVNNAGITNDKLMLKMTEEDFERVLKINLTGAFNMT | 120 |
| Query: 121 | QSVLKPMTKARQGAIINISSVVGLTGNVGQANYAASKAGLIGFTKSVAREVAARGIRVNA | 180 |
| | QSVLKPM KARQGAIIN+SSVVGLTGN+GQANYAASKAG+IGFTKSVAREVAAR I VNA | |
| Sbjct: 121 | QSVLKPMIKARQGAIINVSSVVGLTGNIGQANYAASKAGMIGFTKSVAREVAARNICVNA | 180 |
| Query: 181 | IAPGFIESDMTDVIPEKMQEAILAQIPMKRIGKGKEVAQVASFLAEQEYLTGQVIAIDGG | 240 |
| | IAPGFIESDMT V+PEKMQE IL+QIPMKRIGK +EVA +ASFL EQ+Y+TGQVIAIDGG | |
| Sbjct: 181 | IAPGFIESDMTGVLPEKMQEQILSQIPMKRIGKAQEVAHLASFLVEQDYITGQVIAIDGG | 240 |
| Query: 241 | MTMQ | 244 |
| | MTMQ | |
| Sbjct: 241 | MTMQ | 244 |

[9236] Based on this analysis, it was predicted that these proteins and their epitopes could be useful antigens for vaccines or diagnostics.

### EXAMPLE 1676

[9237] A DNA sequence (GBSx1780) was identified in S. agalactiae <SEQ ID 5199> which encodes the amino acid sequence <SEQ ID 5200>. This protein is predicted to be 3-oxoacyl-(acyl-carrier-protein) synthase II (fabF). Analysis of this protein sequence reveals the following:

| Possible site: 51 | | | | |
|---|---|---|---|---|
| >>> Seems to have no N-terminal signal sequence | | | | |
| | INTEGRAL | Likelihood = −0.37 | Transmembrane | 338-354 (338-354) |

```
----- Final Results -----
                              bacterial membrane --- Certainty = 0.1150(Affirmative) < succ>
                                bacterial outside --- Certainty = 0.0000(Not Clear) < succ>
                            bacterial cytoplasm --- Certainty = 0.0000(Not Clear) < succ>
```

[9238] The protein has homology with the following sequences in the GENPEPT database.

| >GP: AAF98276 GB: AF197933 beta-ketoacyl-ACP synthase II | | | |
|---|---|---|---|
| [Streptococcus pneumoniae] | | | |
| Identities = 340/410 (82%), Positives = 375/410 (90%) | | | |
| Query: | 1 | MTLQRVVVTGYGVTSPIGNTPEEFWNSLKEGNVGIGPITKFDSSDFMVKNAAEIHDFPFD | 60 |
| | | M L RVVVTGYGVTSPIGNTPEEFWNSL G +GIG ITKFD SDF V NAAEI DFPFD | |
| Sbjct: | 1 | MKLNRVVVTGYGVTSPIGNTPEEFWNSLATGKIGIGGITKFDHSDFDVHNAAEIQDFPFD | 60 |
| Query: | 61 | KYFVKKDLNRFDMYSLYALYASSEAIQHANLNLDEIDADRFGVIVASGIGGIQEIEEQVI | 120 |
| | | KYFVKKD NRFD YSLYALYA+ EA+ HANL+++ ++ DRFGVIVASGIGGI+EIE+QV+ | |
| Sbjct: | 61 | KYFVKKDTNRFDNYSLYALYAAQEAVNHANLDVEALNRDRFGVIVASGIGGIKEIEDQVL | 120 |
| Query: | 121 | RLHEKGPKRVKPMTLPKALPNMAAGNVAMRLGAHGVCKSINTACASSNDAIGDAFRNIKF | 180 |
| | | RLHEKGPKRVKPMTLPKALPNMA+GNVAMR GA+GVCKSINTAC+SSNDAIGDAFR+IKF | |
| Sbjct: | 121 | RLHEKGPKRVKPMTLPKALPNMASGNVAMRFGANGVCKSINTACSSSNDAIGDAFRSIKF | 180 |
| Query: | 181 | GIQDIMVVGGAEAAITKFAIAGFQSLTALSTTEDPSRASIPFDKDRNGFIMGEGSGMLVL | 240 |
| | | G QD+M+VGG EA+IT FAIAGFQ+LTALSTTEDP+RASIPFDKDRNGF+MGEGSGMLVL | |
| Sbjct: | 181 | GFQDVMLVGGTEASITPFAIAGFQALTALSTTEDPTRASIPFDKDRNGFVMGEGSGMLVL | 240 |
| Query: | 241 | ESLEHAEKRGATILAEVVGYGNTCDAYHMTSPHPEGLGATKAIQLALVEANIKPEEVNYV | 300 |
| | | ESLEHAEKRGATILAEVVGYGNTCDAYHMTSPHPEG GA KAI+LAL EA I PE+V YV | |
| Sbjct: | 241 | ESLEHAEKRGATILAEVVGYGNTCDAYHMTSPHPEGQGAIKAIKLALEEAEISPEQVAYV | 300 |
| Query: | 301 | NAHGTSTPANEKGESQAIVAALGTDVPVSSTKSFTGHLLGAAGAVEAIATIEAIRHSYVP | 360 |
| | | NAHGTSTPANEKGES AIVA LG +VPVSSTKSFTGHLLGAAGAVEAI TIEA+RH++VP | |
| Sbjct: | 301 | NAHGTSTPANEKGESGAIVAVLGKEVPVSSTKSFTGHLLGAAGAVEAIVTIEAMRHNFVP | 360 |
| Query: | 361 | MTAGTTELSEDITANVIFGQGQDADIRYAISNTFGFGGHNAVLAFKRWED | 410 |
| | | MTAGT+E+S+ I ANV++GQG + +I YAISNTFGFGGHNAVLAFKRWE+ | |
| Sbjct: | 361 | MTAGTSEVSDYIEANVVYGQGLEKEIPYAISNTFGFGGHNAVLAFKRWEN | 410 |

[9239] A related DNA sequence was identified in S. pyogenes <SEQ ID 3851> which encodes the amino acid sequence <SEQ ID 3852>. Analysis of this protein sequence reveals the following:

```
Possible site: 51
>>> Seems to have no N-terminal signal sequence
----- Final Results -----
                            bacterial cytoplasm --- Certainty = 0.0890(Affirmative) < succ>
                              bacterial membrane --- Certainty = 0.0000(Not Clear) < succ>
                                bacterial outside --- Certainty = 0.0000(Not Clear) < succ>
```

[9240] An alignment of the GAS and GBS proteins is shown below.

| Identities = 346/410 (84%), Positives = 377/410 (91%) | | | |
|---|---|---|---|
| Query: | 1 | MTLQRVVVTGYGVTSPIGNTPEEFWNSLKEGNVGIGPITKFDSSDFMVKNAAEIHDFPFD | 60 |
| | | MT +RVVVTGYG+TSPIG+ PE FWN+LK G +GIGPITKFD++D+ VKNAAEI DFPFD | |
| Sbjct: | 1 | MTFKRVVVTGYGLTSPIGHDPETFWNNLKAGQIGIGPITKFDTTDYAVKNAAEIQDFPFD | 60 |
| Query: | 61 | KYFVKKDLNRFDMYSLYALYASSEAIQHANLNLDEIDADRFGVIVASGIGGIQEIEEQVI | 120 |
| | | KYFVKKDLNRFD YSLYALYA+ EAI HA+LN++ +D+DRFGVIVASGIGGI EIEEQVI | |
| Sbjct: | 61 | KYFVKKDLNRFDRYSLYALYAAKEAINHADLNIEMVDSDRFGVIVASGIGGIAEIEEQVI | 120 |
| Query: | 121 | RLHEKGPKRVKPMTLPKALPNMAAGNVAMRLGAHGVCKSINTACASSNDAIGDAFRNIKF | 180 |
| | | RLHEKGPKRVKPMTLPKALPNMAAGNVAM L A GVCKSINTACASSNDAIGDAFR IKF | |
| Sbjct: | 121 | RLHEKGPKRVKPMTLPKALPNMAAGNVAMSLKAQGVCKSINTACASSNDAIGDAFRAIKF | 180 |
| Query: | 181 | GIQDIMVVGGAEAAITKFAIAGFQSLTALSTTEDPSRASIPFDKDRNGFIMGEGSGMLVL | 240 |
| | | G QD+M+VGG+EAAITKFAIAGFQSLTALSTTEDPSR+SIPFDKDRNGFIMGEGSGMLVL | |
| Sbjct: | 181 | GTQDVMIVGGSEAAITKFAIAGFQSLTALSTTEDPSRSSIPFDKDRNGFIMGEGSGMLVL | 240 |
| Query: | 241 | ESLEHAEKRGATILAEVVGYGNTCDAYHMTSPHPEGLGATKAIQLALVEANIKPEEVNYV | 300 |
| | | ESLEHA++RGATILAE+VGYGNTCDAYHMTSP+PEGLGA KAI LAL EA I+ +NYV | |
| Sbjct: | 241 | ESLEHAQERGATILAEIVGYGNTCDAYHMTSPNPEGLGARKAIHLALQEAGIEASAINYV | 300 |
| Query: | 301 | NAHGTSTPANEKGESQAIVAALGTDVPVSSTKSFTGHLLGAAGAVEAIATIEAIRHSYVP | 360 |
| | | NAHGTSTPANEKGESQAIVA LG DVPVSSTKSFTGHLLGAAGA+EAIATIEA+RH+YVP | |
| Sbjct: | 301 | NAHGTSTPANEKGESQAIVAVLGKDVPVSSTKSFTGHLLGAAGAIEAIATIEAMRHNYVP | 360 |
| Query: | 361 | MTAGTTELSEDITANVIFGQGQDADIRYAISNTFGFGGHNAVLAFKRWED | 410 |
| | | MTAGT LSEDI ANVIFG+G++ I YAISNTFGFGGHNAVLAFK WE+ | |
| Sbjct: | 361 | MTAGTQALSEDIEANVIFGEGKETAINYAISNTFGFGGHNAVLAFKCWEE | 410 |

[9241] Based on this analysis, it was predicted that these proteins and their epitopes could be useful antigens for vaccines or diagnostics.

### EXAMPLE 1677

[9242] A DNA sequence (GBSx1781) was identified in S. agalactiae <SEQ ID 5201> which encodes the amino acid sequence <SEQ ID 5202>. Analysis of this protein sequence reveals the following:

```
Possible site: 14
>>> Seems to have no N-terminal signal sequence
----- Final Results -----
                            bacterial cytoplasm --- Certainty = 0.3052(Affirmative) < succ>
                              bacterial membrane --- Certainty = 0.0000(Not Clear) < succ>
                                bacterial outside --- Certainty = 0.0000(Not Clear) < succ>
```

[9243] A related GBS nucleic acid sequence <SEQ ID 9553> which encodes amino acid sequence <SEQ ID 9554> was also identified.

[9244] The protein has homology with the following sequences in the GENPEPT database.

| >GP: AAF98277 GB: AF197933 biotin carboxyl carrier protein | | | |
|---|---|---|---|
| [Streptococcus pneumoniae] | | | |
| Identities = 103/169 (60%), Positives = 127/169 (74%), Gaps = 11/169 (6%) | | | |
| Query: | 19 | LDIQEIKDLMTQFDESSLREFSFKTSDGELSFSKNEGKAPLVPTMSPMSHQPEATPTIAT | 78 |
| | | +++ +IKDLMTQFD+SSLREFS+K EL FSKNE + VP ++ Q P +AT | |
| Sbjct: | 1 | MNLNDIKDLMTQFDQSSLREFSYKNGTDELQFSKNEARP--VPEVAT---QVAPAPVLAT | 55 |
| Query: | 79 | PVSNEAGEQTKQATEVVSEIP---ESTVTVAEGDVVESPLVGVAYLASGPDKPNFVSVGD | 135 |
| | | P + + A V E+P E++V EG++VESPLVGV YLA+GPDKP FV+VGD | |
| Sbjct: | 56 | P--SPVAPTSAPAETVAEEVPAPAEASVAT-EGNLVESPLVGVVYLAAGPDKPAFVTVGD | 112 |
| Query: | 136 | SVKKGQTLMIIEAMKVMNEVPAPHDGVVTEILVANEEVIEFGKGLVRIK | 184 |
| | | SVKKGQTL+IIEAMKVMNE+PAP DGVVTEILV+NEE++EFGKGLVRIK | |
| Sbjct: | 113 | SVKKGQTLVIIEAMKVMNEIPAPKDGVVTEILVSNEEMVEFGKGLVRIK | 161 |

[9245] A related DNA sequence was identified in S. pyogenes <SEQ ID 5203> which encodes the amino acid sequence <SEQ ID 5204>. Analysis of this protein sequence reveals the following:

```
Possible site: 48
>>> Seems to have no N-terminal signal sequence
----- Final Results -----
                            bacterial cytoplasm --- Certainty = 0.3132(Affirmative) < succ>
                              bacterial membrane --- Certainty = 0.0000(Not Clear) < succ>
                                bacterial outside --- Certainty = 0.0000(Not Clear) < succ>
```

[9246] An alignment of the GAS and GBS proteins is shown below.

| Identities = 107/171 (62%), Positives = 126/171 (73%), Gaps = 10/171 (5%) | | | |
|---|---|---|---|
| Query: | 19 | LDIQEIKDLMTQFDESSLREFSFKTSDGELSFSKNEGKAPLVPTMSPMSHQPEATPT--- | 75 |
| | | L+IQEIKDLM QFD SSLREF FKT++GEL FSKNE + S+Q A P | |
| Sbjct: | 1 | LNIQEIKDLMAQFDTSSLREFLFKTNEGELIFSKNEQHLN-----ASTSNQEHAVPVPQV | 55 |
| Query: | 76 | --IATPVSNEAGEQTKQATEVVSEIPESTVTVAEGDVVESPLVGVAYLASGPDKPNFVSV | 133 |
| | | + P ++EA V E P++ VAEGD+VESPLVGVAYLA+ PDKP FV+V | |
| Sbjct: | 56 | QLVPNPTASEASSPASVKDVPVEEQPQAESFVAEGDIVESPLVGVAYLAASPDKPPFVAV | 115 |
| Query: | 134 | GDSVKKGQTLMIIEAMKVMNEVPAPHDGVVTEILVANEEVIEFGKGLVRIK | 184 |
| | | GD+VKKGQTL+IIEAMKVMNEVPAP DGV+TEILV+NE+VIEFG+GLVRIK | |
| Sbjct: | 116 | GDTVKKGQTLVIIEAMKVMNEVPAPCDGVITEILVSNEDVIEFGQGLVRIK | 166 |

[9247] Based on this analysis, it was predicted that these proteins and their epitopes could be useful antigens for vaccines or diagnostics.

### EXAMPLE 1678

[9248] A DNA sequence (GBSx1782) was identified in S. agalactiae <SEQ ID 5205> which encodes the amino acid sequence <SEQ ID 5206>. This protein is predicted to be beta-hydroxyacyl-ACP dehydratase (fabZ). Analysis of this protein sequence reveals the following:

```
Possible site: 59
>>> Seems to have no N-terminal signal sequence
----- Final Results -----
                            bacterial cytoplasm --- Certainty = 0.2267(Affirmative) < succ>
                              bacterial membrane --- Certainty = 0.0000(Not Clear) < succ>
                                bacterial outside --- Certainty = 0.0000(Not Clear) < succ>
```

[9249] The protein has homology with the following sequences in the GENPEPT database.

>GP: AAF98278 GB: AF197933 beta-hydroxyacyl-ACP dehydratase
[Streptococcus pneumoniae]
Identities = 130/140 (92%), Positives = 135/140 (95%)

| | | | |
|---|---|---|---|
| Query: | 1 | MIDIKEIREALPHRYPMLLVDRVLEVSEDEIVAIKNVSINEPFFNGHFPEYPVMPGVLIM | 60 |
| | | MIDI+ I+EALPHRYPMLLVDRVLEVSED IVAIKNV+INEPFFNGHFP+YPVMPGV+IM | |
| Sbjct: | 1 | MIDIQGIKEALPHRYPMLLVDRVLEVSEDTIVAIKNVTINEPFFNGHFPQYPVMPGVVIM | 60 |
| Query: | 61 | EALAQTAGVLELSKEENKGKLVFYAGMDKVKFKKQVVPGDQLVMTAKFVKRRGTIAVVEA | 120 |
| | | EALAQTAGVLELSK ENKGKLVFYAGMDKVKFKKQVVPGDQLVMTA FVKRRGTIAVVEA | |
| Sbjct: | 61 | EALAQTAGVLELSKPENKGKLVFYAGMDKVKFKKQVVPGDQLVMTATFVKRRGTIAVVEA | 120 |
| Query: | 121 | IAEVDGKLAASGTLTFAIGN | 140 |
| | | AEVDGKLAASGTLTFAIGN | |
| Sbjct: | 121 | KAEVDGKLAASGTLTFAIGN | 140 |

[9250] A related DNA sequence was identified in S. pyogenes <SEQ ID 5207> which encodes the amino acid sequence <SEQ ID 5208>. Analysis of this protein sequence reveals the following:

```
Possible site: 59
>>> Seems to have no N-terminal signal sequence
----- Final Results -----
                            bacterial cytoplasm --- Certainty = 0.1882(Affirmative) < succ>
                              bacterial membrane --- Certainty = 0.0000(Not Clear) < succ>
                                bacterial outside --- Certainty = 0.0000(Not Clear) < succ>
```

[9251] An alignment of the GAS and GBS proteins is shown below.

| Identities = 127/139 (91%), Positives = 133/139 (95%) | | | |
|---|---|---|---|
| Query: | 1 | MIDIKEIREALPHRYPMLLVDRVLEVSEDEIVAIKNVSINEPFFNGHFPEYPVMPGVLIM | 60 |
| | | M+DI+EI+ ALPHRYPMLLVDRVLEVS+D IVAIKNV+INEPFFNGHFP YPVMPGVLIM | |
| Sbjct: | 1 | MMDIREIQAALPHRYPMLLVDRVLEVSDDHIVAIKNVTINEPFFNGHFPHYPVMPGVLIM | 60 |
| Query: | 61 | EALAQTAGVLELSKEENKGKLVFYAGMDKVKFKKQVVPGDQLVMTAKFIKRRGTIAVVEA | 120 |
| | | EALAQTAGVLELSKEENKGKLVFYAGMDKVKFKKQVVPGDQLVMTA F+KRRGTIAVVEA | |
| Sbjct: | 61 | EALAQTAGVLELSKEENKGKLVFYAGMDKVKFKKQVVPGDQLVMTATFIKRRGTIAVVEA | 120 |
| Query: | 121 | IAEVDGKLAASGTLTFAIG | 139 |
| | | AEVDGKLAASGTLTFA G | |
| Sbjct: | 121 | RAEVDGKLAASGTLTFACG | 139 |

[9252] Based on this analysis, it was predicted that these proteins and their epitopes could be useful antigens for vaccines or diagnostics.

### EXAMPLE 1679

[9253] A DNA sequence (GBSx1783) was identified in S. agalactiae <SEQ ID 5209> which encodes the amino acid sequence <SEQ ID 5210>. This protein is predicted to be acetyl-coenzyme A carboxylase, biotin carboxylase (accC). Analysis of this protein sequence reveals the following:

```
Possible site: 30
>>> Seems to have no N-terminal signal sequence
----- Final Results -----
                            bacterial cytoplasm --- Certainty = 0.1203(Affirmative) < succ>
                              bacterial membrane --- Certainty = 0.0000(Not Clear) < succ>
                                bacterial outside --- Certainty = 0.0000(Not Clear) < succ>
```

[9254] The protein has homology with the following sequences in the GENPEPT database.

| >GP: AAF98279 GB: AF197933 acetyl-CoA carboxylase biotin carboxylase | | | |
|---|---|---|---|
| subunit [Streptococcus pneumoniae] | | | |
| Identities = 361/451 (80%), Positives = 405/451 (89%) | | | |
| Query: | 1 | MFKKILIANRGEIAVRIIRAAREMGISTVAIYSEADKESLHTILADEAICVGPAKSAESY | 60 |
| | | MF+KILIANRGEIAVRIIRAARE+GI+TVA+YS ADKE+LHT+LADEA+C+GP K+ ESY | |
| Sbjct: | 1 | MFRKILIANRGEIAVRIIRAARELGIATVAVYSTADKEALHTLLADEAVCIGPGKATESY | 60 |
| Query: | 61 | LNVNAILSAAIVTGAEAVHPGFGFLSENSKFATMCEEMNLKFIGPSGEVMDKMGDKINAR | 120 |
| | | LN+NA+LSAA++T AEA+HPGFGFLSENSKFATMCEE+ +KFIGPSG VMD MGDKINAR | |
| Sbjct: | 61 | LNINAVLSAAVLTEAEAIHPGFGFLSENSKFATMCEEVGIKFIGPSGHVMDMMGDKINAR | 120 |
| Query: | 121 | TEMIKADVPVIPGSDGQVTSVEEAVSIAEEIGYPLMLKASAGGGGKGIRKVKSADELKPA | 180 |
| | | +MIKA VPVIPGSDG+V + EEA+ +AE+IGYP+MLKASAGGGGKGIRKV+ D+L A | |
| Sbjct: | 121 | AQMIKAGVPVIPGSDGEVHNSEEALIVAEKIGYPVMLKASAGGGGKGIRKVEKPDDLVSA | 180 |
| Query: | 181 | FESASQEALAAFGNGAMYIEKVIYPARHIEVQILGDSFGKIVHLGERDCSLQRNNQKVLE | 240 |
| | | FE+AS EA A +GNGAMYIE+VIYPARHIEVQILGD G ++HLGERDCSLQRNNQKVLE | |
| Sbjct: | 181 | FETASSEAKANYGNGAMYIERVIYPARHIEVQILGDEHGHVIHLGERDCSLQRNNQKVLE | 240 |
| Query: | 241 | ESPSVAIGNTLRQQIGEAAVRAAEAVSYENAGTIEFLLDENSGQFYFMEMNTRVQVEHPV | 300 |
| | | ESPS+AIG TLR +IG AAVRAAE V YENAGTIEFLLDE S FYFMEMNTRVQVEHPV | |
| Sbjct: | 241 | ESPSIAIGKTLRHEIGAAAVRAAEFVGYENAGTIEFLLDEASSNFYFMEMNTRVQVEHPV | 300 |
| Query: | 301 | TEFVTGVDIVKEQIRIAAGIPLSVSQNDIKLTGHAIECRINAENPQFNFAPCPGTINGLH | 360 |
| | | TEFV+GVDIVKEQI IAAG PLSV Q DI L GHAIECRINAENP FNFAP PG I L+ | |
| Sbjct: | 301 | TEFVSGVDIVKEQICIAAGQPLSVKQEDIVLRGHAIECRINAENPAFNFAPSPGKITNLY | 360 |
| Query: | 361 | LPAGGMGLRVDSAVYTGYTIPPYYDSMIAKVIVHGENRFDALMKMQRALYELEIDGIVTN | 420 |
| | | LP+GG+GLRVDSAVY GYTIPPYYDSMIAK+IVHGENRFDALMKMQRALYELEI+G+ TN | |
| Sbjct: | 361 | LPSGGVGLRVDSAVYPGYTIPPYYDSMIAKIIVHGENRFDALMKMQRALYELEIEGVQTN | 420 |
| Query: | 421 | TEFQMDLISDKKVLAGDYDTSFLMEDFLPRY | 451 |
| | | +FQ+DLISD+ V+AGDYDTSFLME FLP+Y | |
| Sbjct: | 421 | ADFQLDLISDRNVIAGDYDTSFLMETFLPKY | 451 |

[9255] A related DNA sequence was identified in S. pyogenes <SEQ ID 5211> which encodes the amino acid sequence <SEQ ID 5212>. Analysis of this protein sequence reveals the following:

```
Possible site: 48
>>> Seems to have no N-terminal signal sequence
----- Final Results -----
                            bacterial cytoplasm --- Certainty = 0.1784(Affirmative) < succ>
                              bacterial membrane --- Certainty = 0.0000(Not Clear) < succ>
                                bacterial outside --- Certainty = 0.0000(Not Clear) < succ>
```

[9256] An alignment of the GAS and GBS proteins is shown below.

| Identities = 369/451 (81%), Positives = 421/451 (92%) | | | |
|---|---|---|---|
| Query: | 1 | MFKKILIANRGEIAVRIIRAAREMGISTVAIYSEADKESLHTILADEAICVGPAKSAESY | 60 |
| | | MFKKILIANRGEIAVRIIRAARE+GISTVA+YSEADKE+LHTILADEAIC+GPA+S ESY | |
| Sbjct: | 17 | MFKKILIANRGEIAVRIIRAARELGISTVAVYSEADKEALHTILADEAICIGPARSKESY | 76 |
| Query: | 61 | LNVNAILSAAIVTGAEAVHPGFGFLSENSKFATMCEEMNLKFIGPSGEVMDKMGDKINAR | 120 |
| | | LN+N++LSAAIVTGA+A+HPGFGFLSENSKFATMCEEMN+KFIGPS VMDKMGDKINAR | |
| Sbjct: | 77 | LNMNSVLSAAIVTGAQAIHPGFGFLSENSKFATMCEEMNIKFIGPSASVMDKMGDKINAR | 136 |
| Query: | 121 | TEMIKADVPVIPGSDGQVTSVEEAVSIAEEIGYPLMLKASAGGGGKGIRKVKSADELKPA | 180 |
| | | +EMIKA VPVIPGSDG+V + +EA++IA +IGYP+MLKASAGGGGKGIRKV++ +L+ A | |
| Sbjct: | 137 | SEMIKAGVPVIPGSDGEVYNAQEALAIANKIGYPVMLKASAGGGGKGIRKVETEADLEAA | 196 |
| Query: | 181 | FESASQEALAAFGNGAMYIEKVIYPARHIEVQILGDSFGKIVHLGERDCSLQRNNQKVLE | 240 |
| | | F +ASQEAL AFGNGAMY+EKVIYPARHIEVQILGD++G I+HLGERDCSLQRNNQKVLE | |
| Sbjct: | 197 | FNAASQEALGAFGNGAMYLEKVIYPARHIEVQILGDAYGNIIHLGERDCSLQRNNQKVLE | 256 |
| Query: | 241 | ESPSVAIGNTLRQQIGEAAVRAAEAVSYENAGTIEFLLDENSGQFYFMEMNTRVQVEHPV | 300 |
| | | ESPS+AIGNTLR ++G+AAVRAAEAV+YENAGTIEFLLDE+S +FYFMEMNTR+QVEHPV | |
| Sbjct: | 257 | ESPSIAIGNTLRHEMGQAAVRAAEAVAYENAGTIEFLLDEDSEKFYFMEMNTRIQVEHPV | 316 |
| Query: | 301 | TEFVTGVDIVKEQIRIAAGIPLSVSQNDIKLTGHAIECRINAENPQFNFAPCPGTINGLH | 360 |
| | | TEFVTGVDIVKEQI+IAAG PL+++Q DI +TGHAIECRINAEN FNFAP PG I L+ | |
| Sbjct: | 317 | TEFVTGVDIVKEQIKIAAGQPLAINQEDITITGHAIECRINAENTAFNFAPSPGKITDLY | 376 |
| Query: | 361 | LPAGGMGLRVDSAVYTGYTIPPYYDSMIAKVIVHGENRFDALMKMQRALYELEIDGIVTN | 420 |
| | | +P+GG+GLRVDSAVY GY IPPYYDSMIAK+IVHG NRFDALMKMQRAL ELEI+GI+TN | |
| Sbjct: | 377 | MPSGGVGLRVDSAVYNGYAIPPYYDSMIAKIIVHGSNRFDALMKMQRALVELEIEGIITN | 436 |
| Query: | 421 | TEFQMDLISDKKVLAGDYDTSFLMEDFLPRY | 451 |
| | | T+FQ+DLISDK+V+AGDYDTSFLME FLP Y | |
| Sbjct: | 437 | TDFQLDLISDKRVIAGDYDTSFLMETFLPHY | 467 |

[9257] Based on this analysis, it was predicted that these proteins and their epitopes could be useful antigens for vaccines or diagnostics.

### EXAMPLE 1680

[9258] A DNA sequence (GBSx1784) was identified in S. agalactiae <SEQ ID 5213> which encodes the amino acid sequence <SEQ ID 5214>. This protein is predicted to be acetyl-CoA carboxylase beta subunit (accD). Analysis of this protein sequence reveals the following:

```
Possible site: 60
>>> Seems to have no N-terminal signal sequence
----- Final Results -----
                            bacterial cytoplasm --- Certainty = 0.3571(Affirmative) < succ>
                              bacterial membrane --- Certainty = 0.0000(Not Clear) < succ>
                                bacterial outside --- Certainty = 0.0000(Not Clear) < succ>
```

[9259] The protein has homology with the following sequences in the GENPEPT database.

| >GP: AAF98280 GB: AF197933 acetyl-CoA carboxylase beta subunit | | | |
|---|---|---|---|
| [Streptococcus pneumoniae] | | | |
| Identities = 221/285 (77%), Positives = 248/285 (86%), Gaps = 1/285 (0%) | | | |
| Query: | 1 | MALFSKKDKYIRISPNKALGSSDKRSLPEVPDELFAKCPSCKHMIYQKDLGLAKICPACS | 60 |
| | | MALFSKKDKYIRI+PN+++ + PEVPDELF++CP CKH IYQKDLG +ICP CS | |
| Sbjct: | 1 | MALFSKKDKYIRINPNRSVREKPQAK-PEVPDELFSQCPGCKHTIYQKDLGSERICPHCS | 59 |
| Query: | 61 | YNFRISAQERLLLTVDEDSFEELFTGIETKDPLNFPNYREKLAATRQKTNLDEAVVTGLA | 120 |
| | | Y FRISAQERL LT+D +F+ELFTGIE+KDPL+FP Y++KLA+ R+KT L EAVVTG A | |
| Sbjct: | 60 | YTFRISAQERLALTIDMGTFKELFTGIESKDPLHFPGYQKKLASMREKTGLHEAVVTGTA | 119 |
| Query: | 121 | KIKGQTTALAIMDSHFIMASMGTVVGEKLTRLFELATEKKLPIVIFTASGGARMQEGIMS | 180 |
| | | IKGQT AL IMDS+FIMASMGTVVGEK+TRLFE AT +KLP+V+FTASGGARMQEGIMS | |
| Sbjct: | 120 | LIKGQTVALGIMDSNFIMASMGTVVGEKITRLFEYATVEKLPVVLFTASGGARMQEGIMS | 179 |
| Query: | 181 | LMQMAKVSAAVKRHSNQGLFYLTILTDPTTGGVTASFAMEGDIILAEPQALVGFAGRRVI | 240 |
| | | LMQMAK+SAAVKRHSN GLFYLTILTDPTTGGVTASFAMEGDIILAEPQ+LVGFAGRRVI | |
| Sbjct: | 180 | LMQMAKISAAVKRHSNAGLFYLTILTDPTTGGVTASFAMEGDIILAEPQSLVGFAGRRVI | 239 |
| Query: | 241 | ETTVREDLPEGFQKAEFLLEHGFVDAIINRTELRDCIAQLIAFHG | 285 |
| | | E TVRE LPE FQKAEFLLEHGFVDAI+ R +L D IA L+ HG | |
| Sbjct: | 240 | ENTVRESLPEDFQKAEFLLEHGFVDAIVKRRDLPDTIASLVRLHG | 284 |

[9260] A related DNA sequence was identified in S. pyogenes <SEQ ID 5215> which encodes the amino acid sequence <SEQ ID 5216>. Analysis of this protein sequence reveals the following:

```
Possible site: 60
>>> Seems to have no N-terminal signal sequence
----- Final Results -----
                            bacterial cytoplasm --- Certainty = 0.4092(Affirmative) < succ>
                              bacterial membrane --- Certainty = 0.0000(Not Clear) < succ>
                                bacterial outside --- Certainty = 0.0000(Not Clear) < succ>
```

[9261] An alignment of the GAS and GBS proteins is shown below.

| Identities = 232/285 (81%), Positives = 253/285 (88%) | | | |
|---|---|---|---|
| Query: | 1 | MALFSKKDKYIRISPNKALGSSDKRSLPEVPDELFAKCPSCKHMIYQKDLGLAKICPACS | 60 |
| | | MALF KKDKYIRI+PN +L S ++PEVPDELFAKCP+CKHMIY+KDLGLAKICP CS | |
| Sbjct: | 1 | MALFRKKDKYIRITPNNSLKGSVSHNVPEVPDELFAKCPACKHMIYKKDLGLAKICPTCS | 60 |
| Query: | 61 | YNFRISAQERLLLTVDEDSFEELFTGIETKDPLNFPNYREKLAATRQKTNLDEAVVTGLA | 120 |
| | | YNFRISAQERL LTVDE SF+ELFT IETKDPL FP Y+EKL ++ T L EAV+TG A | |
| Sbjct: | 61 | YNFRISAQERLTLTVDEGSFQELFTSIETKDPLRFPGYQEKLQKAKETTGLHEAVLTGKA | 120 |
| Query: | 121 | KIKGQTTALAIMDSHFIMASMGTVVGEKLTRLFELATEKKLPIVIFTASGGARMQEGIMS | 180 |
| | | +K Q ALAIMDSHFIMASMGTVVGEK+TRLFELA E+ LP+VIFTASGGARMQEGIMS | |
| Sbjct: | 121 | MVKEQKIALAIMDSHFIMASMGTVVGEKITRLFELAIEENLPVVIFTASGGARMQEGIMS | 180 |
| Query: | 181 | LMQMAKVSAAVKRHSNQGLFYLTILTDPTTGGVTASFAMEGDIILAEPQALVGFAGRRVI | 240 |
| | | LMQMAKVSAAVKRHSN GLFYLTILTDPTTGGVTASFAMEGDIILAEPQ+LVGFAGRRVI | |
| Sbjct: | 181 | LMQMAKVSAAVKRHSNAGLFYLTILTDPTTGGVTASFAMEGDIILAEPQSLVGFAGRRVI | 240 |
| Query: | 241 | ETTVREDLPEGFQKAEFLLEHGFVDAIINRTELRDCIAQLIAFHG | 285 |
| | | ETTVRE+LP+ FQKAEFL +HGFVDAI+ RTELRD IA L+AFHG | |
| Sbjct: | 241 | ETTVRENLPDDFQKAEFLQDHGFVDAIVKRTELRDKIAHLVAFHG | 285 |

[9262] Based on this analysis, it was predicted that these proteins and their epitopes could be useful antigens for vaccines or diagnostics.

### EXAMPLE 1681

[9263] A DNA sequence (GBSx1785) was identified in S. agalactiae <SEQ ID 5217> which encodes the amino acid sequence <SEQ ID 5218>. This protein is predicted to be acetyl-CoA carboxylase alpha subunit (accA). Analysis of this protein sequence reveals the following:

| Possible site: 50 | | | | |
|---|---|---|---|---|
| >>> Seems to have no N-terminal signal sequence | | | | |
| | INTEGRAL | Likelihood = −1.22 | Transmembrane | 149-165 (149-165) |

```
----- Final Results -----
                              bacterial membrane --- Certainty = 0.1489(Affirmative) < succ>
                                bacterial outside --- Certainty = 0.0000(Not Clear) < succ>
                            bacterial cytoplasm --- Certainty = 0.0000(Not Clear) < succ>
```

[9264] A related GBS nucleic acid sequence <SEQ ID 9555> which encodes amino acid sequence <SEQ ID 9556> was also identified.

[9265] The protein has homology with the following sequences in the GENPEPT database.

| >GP: AAF98281 GB: AF197933 acetyl-CoA carboxylase alpha subunit | | | |
|---|---|---|---|
| [Streptococcus pneumoniae] | | | |
| Identities = 186/254 (73%), Positives = 222/254 (87%) | | | |
| Query: | 13 | DVTRILKDARDQGRLTALDYAELIFDNFMELHGDRQFADDKSIIGGLGYLAGRPVTIVGI | 72 |
| | | ++ +I+++AR+Q RLT LD+A IFD F++LHGDR F DD +++GG+G+L + VT+VGI | |
| Sbjct: | 2 | NIAKIVREAREQSRLTTLDFATGIFDEFIQLHGDRSFRDDGAVVGGIGWLGDQAVTVVGI | 61 |
| Query: | 73 | QKGKNLQDNLDRHFGQPHPEGYRKALRLMKQAEKFGRPVITFINTAGAYPGVGAEERGQG | 132 |
| | | QKGK+LQDNL R+FGQPHPEGYRKALRLMKQAEKFGRPV+TFINTAGAYPGVGAEERGQG | |
| Sbjct: | 62 | QKGKSLQDNLKRNFGQPHPEGYRKALRLMKQAEKFGRPVVTFINTAGAYPGVGAEERGQG | 121 |
| Query: | 133 | EAIARNLLEMSDLKVPIIAIIIGEGGSGGALALAVADKVWMLEHTVYSILSPEGFASILW | 192 |
| | | EAIARNL+EMSDLKVPIIAIIIGEGGSGGALALAVAD+VWMLE+++Y+ILSPEGFASILW | |
| Sbjct: | 122 | EAIARNLMEMSDLKVPIIAIIIGEGGSGGALALAVADRVWMLENSIYAILSPEGFASILW | 181 |
| Query: | 193 | KDGTRTTEAAQLMKMTAGELYHMEVVDKVIPEHGYFSSEIVDMIKTSLISELEVLSQLSL | 252 |
| | | KDGTR EAA+LMK+T+ EL M+VVDKVI E G S E++ +K L +EL LSQ L | |
| Sbjct: | 182 | KDGTRAMEAAELMKITSHELLEMDVVDKVISEIGLSSKELIKSVKKELQTELARLSQKPL | 241 |
| Query: | 253 | EDLLEQRYQRFRKY | 266 |
| | | E+LLE+RYQRFRKY | |
| Sbjct: | 242 | EELLEERYQRFRKY | 255 |

[9266] A related DNA sequence was identified in S. pyogenes <SEQ ID 5219> which encodes the amino acid sequence <SEQ ID 5220>. Analysis of this protein sequence reveals the following:

```
Possible site: 61
>>> Seems to have no N-terminal signal sequence
INTEGRAL Likelihood = −1.22 Transmembrane 139-155 (139-155)
----- Final Results -----
                            bacterial membrane --- Certainty = 0.1489 (Affirmative) < succ>
                              bacterial outside --- Certainty = 0.0000 (Not Clear) < succ>
                          bacterial cytoplasm --- Certainty = 0.0000 (Not Clear) < succ>
```

[9267] The protein has homology with the following sequences in the databases:

| >GP:AAF98281 GB:AF197933 acetyl-CoA carboxylase alpha subunit | | | |
|---|---|---|---|
| [Streptococcus pneumoniae] | | | |
| Identities = 189/254 (74%), Positives = 225/254 (88%) | | | |
| Query: | 3 | DVSRILKEARDQGRLTTLDYANLIFDDFMELHGDRHFSDDGAIVGGLAYLAGQPVTVIGI | 62 |
| | | ++++I++EAR+Q RLTTLD+A IFD+F++LHGDR F DDGA+VGG+ +L Q VTV+GI | |
| Sbjct: | 2 | NIAKIVREAREQSRLTTLDFATGIFDEFIQLHGDRSFRDDGAVVGGIGWLGDQAVTVVGI | 61 |
| Query: | 63 | QKGKNLQDNLARNFGQPNPEGYRKALRLNKQAEKFGRPVVTFINTAGAYPGVGAEERGQG | 122 |
| | | QKGK+LQDNL RNFGQP+PEGYRKALRLMKQAEKfGRPVVTFINThGAYPGVGAEERGQG | |
| Sbjct: | 62 | QKGRSLQDNLKRNFGQPHPEGYRKALRLmKQAEKFGRPVVTFINTAGAYPGVGAEERGQG | 121 |
| Query: | 123 | EAIARNLMEMSDLKVPIIAIIIGEGGSGGALALAVADQVWMLENTMYAVLSPEGFASILW | 182 |
| | | EAIA+NLMEMSDLKVPITAIlIGEGGSGGALALAVAD+VWMLEN++YA+LSPEGFASILW | |
| Sbjct: | 122 | EAIARNLMEMSDLKVPIIAIIIGEGGSGGALALAVADRVWMLENSIYAILSPEGFASILW | 181 |
| Query: | 183 | KDGSRATEAAELMKITAGELYKNGIVDRIIPEHGYFSSEIVDIIKANLIEQITSLQAKPL | 242 |
| | | KDG+RA EAAELMKIT+ EL +N +VD++I E G S E++ +K L ++ L RPL | |
| Sbjct: | 182 | KDGTRANEAAELMKITSHELLEMDVVDKVISEIGLSSKELIKSVKKELQTELARLSQKPL | 241 |
| Query: | 243 | DQLLDERYQRFRKY | 256 |
| | | ++LL+ERYQRFRKY | |
| Sbjct: | 242 | EELLEERYQRFRKY | 255 |

[9268] An alignment of the GAS and GBS proteins is shown below.

| Identities = 204/254 (80%), Positives = 236/254 (92%) | | | |
|---|---|---|---|
| Query: | 13 | DVTRILKDARDQGRLTALDYAELIFDNFMELHGDRQFADDKSIIGGLGYLAGRPVTIVGI | 72 |
| | | DV+RILK+ARDQGRLT LDYA LIFD+FNELHGDR F+DD +I+GGL YLAG+PVT++GI | |
| Sbjct: | 3 | DVSRILKEARDQGRLTTLDYANLIFDDFMELHGDRHFSDDGAIVGGLAYLAGQPVTVIGI | 62 |
| Query: | 73 | QKGKNLQDNLDRHFGQPHPEGYRKALRLMKQAEKFGRPVITFINTAGAYPGVGAEERGQG | 132 |
| | | QKGKNLQDNL R+FGQP+PEGYRKALRLMKQAEKFGRPV+TFINTAGAYPGVGAEERGQG | |
| Sbjct: | 63 | QKGKNLQDNLARNFGQPNPEGYRKALRLMKQAEKFGRPVVTFINTAGAYPGVGAEERGQG | 122 |
| Query: | 133 | EAIARNLLEMSDLKVPIIAIIIGEGGSGGALALAVADKVWMLEHTVYSILSPEGFASILW | 192 |
| | | EAIA+NL+EMSDLKVPIIAIIIGEGGSGGALALAVAD+VWMLE+T+Y++LSPEGFASILW | |
| Sbjct: | 123 | EAIAKNLMEMSDLKVPIIAIIIGEGGSGGALALAVADQVWMLENTMYAVLSPEGFASILW | 182 |
| Query: | 193 | KDGTRTTEAAQLMKMTAGELYHMEVVDKVIPEHGYFSSEIVDMIKTSLISELEVLSQLSL | 252 |
| | | KDG+R TEAA+LMK+TAGELY M +VD++IPEHGYFSSEIVD+IK +LI ++ L L | |
| Sbjct: | 183 | KDGSRATEAAELHKITAGELYKMGIVDRIIPEHGYFSSEIVDIIKANLIEQITSLQAKPL | 242 |
| Query: | 253 | EDLLEQRYQRFRKY | 266 |
| | | + LL++RYQRFRKY | |
| Sbjct: | 243 | DQLLDERYQRFRKY | 256 |

[9269] Based on this analysis, it was predicted that these proteins and their epitopes could be useful antigens for vaccines or diagnostics.

### EXAMPLE 1682

[9270] A DNA sequence (GBSx1786) was identified in S. agalactiae <SEQ ID 5221> which encodes the amino acid sequence <SEQ ID 5222>. This protein is predicted to be sakacin A production response regulator. Analysis of this protein sequence reveals the following:

```
Possible site: 56
>>> Seems to have no N-terminal signal sequence
----- Final Results -----
                            bacterial cytoplasm --- Certainty = 0.3304 (Affirmative) < succ>
                              bacterial membrane --- Certainty = 0.0000 (Not Clear) < succ>
                                bacterial outside --- Certainty = 0.0000 (Not Clear) < succ>
```

[9271] A related GBS nucleic acid sequence <SEQ ID 9557> which encodes amino acid sequence <SEQ ID 9558> was also identified.

[9272] The protein has homology with the following sequences in the GENPEPT database.

| >GP:BAA88824 GB:AB016077 sakacin A production response regulator | | | |
|---|---|---|---|
| [Streptococcus mutans] | | | |
| Identities = 76/142 (53%), Positives = 99/142 (69%) | | | |
| Query: | 36 | MQTFKAKGQLARNSFTELSRALEQRNDGFKMQRVSNWANQAQVGRPHFWVYYRKDTDQLD | 95 |
| | | M K GQ AR FTE+++ L ++ F+M RVSNWANQAQV RPHEW YY++ D D | |
| Sbjct: | 1 | MIALKTLGQSARAEFTEIAKVLALKVSPFEMMRVSNWANQAQVVRPHFWCYYKQPEDNQD | 60 |
| Query: | 96 | DVAVALRVYGVKDSFGVSLEVSFVERQKSDKTLEKQARVLSIPIASPLYFMVQRQGETHR | 155 |
| | | DV +A+R+YG +FG+S+EVSF+ER+KS TL KQ +VL IPIA PLY+ Q + E+HR | |
| Sbjct: | 61 | DVGLAIRLYGNSANFGISVEVSFIERKRSKATLAKQHKVLDIPIAEPLYYFAQEKSESHR | 120 |
| Query: | 156 | EEGNEENRQRLMQEIKSGKVRK | 177 |
| | | G E RQ L Q++G+VRK | |
| Sbjct: | 121 | VSGTEAYRQMLRQKVADGQVRK | 142 |

[9273] No corresponding DNA sequence was identified in S. pyogenes.

[9274] Based on this analysis, it was predicted that this protein and its epitopes, could be useful antigens for vaccines or diagnostics.

### EXAMPLE 1683

[9275] A DNA sequence (GBSx1787) was identified in S. agalactiae <SEQ ID 5223> which encodes the amino acid sequence <SEQ ID 5224>. This protein is predicted to be seryl-tRNA synthetase (serS). Analysis of this protein sequence reveals the following:

```
Possible site: 60
>>> Seems to have no N-terminal signal sequence
----- Final Results -----
                            bacterial cytoplasm --- Certainty = 0.1866 (Affirmative) < succ>
                              bacterial membrane --- Certainty = 0.0000 (Not Clear) < succ>
                                bacterial outside --- Certainty = 0.0000 (Not Clear) < succ>
```

[9276] The protein has homology with the following sequences in the GENPEPT database.

| >GP:CAB11789 GB:Z99104 seryl-tRNA synthetase [Bacillus subtilis] | | | |
|---|---|---|---|
| Identities = 262/425 (61%), Positives = 322/425 (75%), Gaps = 1/425 (0%) | | | |
| Query: | 1 | MLDLKRIRTDFDVVAKKLATRGVDQETLTTLKELDIKRRELLIKAEEAKAQRNVASAAIA | 6 |
| | | MLD K +R +F + KL +G D + LD +RREL+ K EE K +RN S +A | |
| Sbjct: | 1 | MLDTKNLRANFQEIKAKLVHKGEDLTDFDKFEALDDRRRELIGKVEELKGKRNEVSQQVA | 60 |
| Query: | 61 | QAKRNKENADEQIAAMQTLSADIKAIDAELADVDANLQSMVTVLPNTPADDVPLGADEDE | 120 |
| | | KR K++AD I M+ + +IK +D EL V+A L +++ +PN P + VP+G ED+ | |
| Sbjct: | 61 | VLKREKKDADHIIKEHREVGEEIKKLDEELRTVEAELDTILLSIPNIPHESVPVGETEDD | 120 |
| Query: | 121 | NVEVRRWGTPREFDFETKAHWDLGESLGILDWERGAKVTGSRFLFYKGLGARLERAIYSF | 180 |
| | | NVEVR+WG F +E K HWD+ + LGILD+ER AKVTGSRF+FYKGLGARLERA+Y+F | |
| Sbjct: | 121 | NVEVRKWGEKPSFAYEPKPHWDIADELGILDFERAAKVTGSRFVFYKGLGARLERALYNF | 180 |
| Query: | 181 | MLDEHAKE-GYTEVIPPYMVNHDSMFGTGQYPKFKEDTFELADSPFVLIPTAEVPLTNYY | 239 |
| | | MLD H E YTEVIPPYMVN SM GTGQ PKF+ED F++ + + LIPTAEVP+TN + | |
| Sbjct: | 181 | MLDLHVDEYNYTEVIPPYMVNRASMTGTGQLPKFEEDAFKIREEDYFLIPTAEVPITNMH | 240 |
| Query: | 240 | RDEIIDGKELPIYFTAMSPSFRSEAGSAGRDTRGLIRLHQFHKVEMVKFAKPEESYQELE | 299 |
| | | RDEI+ G LPI + A S FRSEAGSAGRDTRGLIR HQF+KVE+VKF KPE+SY+ELE | |
| Sbjct: | 241 | RDEILSGDSLPINYAAFSACFRSEAGSAGRDTRGLIRQHQFNKVELVKFVKPEDSYEELE | 300 |
| Query: | 300 | KMTANAENILQKLNLPYRVITLCTGDMGFSAAKTYDLEVWIPAQNTYREISSCSNTEDFQ | 359 |
| | | K+T AE +LQ L LPYRV+++CTGD+GF+AAK YD+SVWIP+Q+TYRSISSCSN E FQ | |
| Sbjct: | 301 | KLTNQAERVLQLLSLPYRVMSMCTGDLGFTAAKKYDISVWIPSQDTYRSISSCSNFSAFQ | 360 |
| Query: | 360 | ARRAQIRYRDSVDGKVRLLHTLNGSGLAVGRTVAAILSNYQNEDGSVTIPSVLRPYMGNI | 419 |
| | | ARRA IR+R E GK +HTLNGSGLAVGRTVAAILSNYQ EDGSV IP+VLRPYMGN | |
| Sbjct: | 361 | ARRANIRFRREAKGKPSHVHTLNGSGLAVGRTVAAILSNYQQEDGSVVIPKVLRPYMGNR | 420 |
| Query: | 420 | DIIKP | 424 |
| | | +++KP | |
| Sbjct: | 421 | EVMKP | 425 |

[9277] A related DNA sequence was identified in S. pyogenes <SEQ ID 5225> which encodes the amino acid sequence <SEQ ID 5226>. Analysis of this protein sequence reveals the following:

```
Possible site: 60
>>> Seems to have no N-terminal signal sequence
----- Final Results -----
                            bacterial cytoplasm --- Certainty = 0.2453 (Affirmative) < succ>
                              bacterial membrane --- Certainty = 0.0000 (Not Clear) < succ>
                                bacterial outside --- Certainty = 0.0000 (Not Clear) < succ>
```

[9278] An alignment of the GAS and GBS proteins is shown below.

| Identities = 357/424 (84%), Positives = 386/424 (90%) | | | |
|---|---|---|---|
| Query: | 1 | MLDLKRIRTDFDVVAKKLATRGVDQETLTTLKELDIKRRELLIKAEEAKAQRNVASAAIA | 60 |
| | | MLDLKRIRTDFD VA KL RGV ++TLT LKELD KRR LL+++EE KA+RN+ASAAIA | |
| Sbjct: | 1 | MLDLKRIRTDFDTVAAKLKNRGVSEDTLTHLKELDEKRRALLVQSEELKAERNIASAAIA | 60 |
| Query: | 61 | QAKRNKENADEQIAAMQTLSADIKAIDASLADVDANLQSMVTVLPNTPADDVPLGADEDE | 120 |
| | | QAKR KE+A +QIA MQ +SADIK ID +L +D + ++TVLPNTP D VP+GADE++ | |
| Sbjct: | 61 | QAKRQKEDATQQIADMQKVSADIKTIDNQLVAIDQQVTDIITVLPNTPHDSVPVGADEED | 120 |
| Query: | 121 | NVEVRRWGTPREFDFETKAHWDLGESLGILDWERGAKVTGSRFLFYKGLGARLERAIYSF | 180 |
| | | NVE+RRWGTPR+FDFE KAHWDLGE L ILDWERGAKVTG+RFLFYK LGARLERA+Y+F | |
| Sbjct: | 121 | NVEIRRWGTPRDFDFEVKAHWDLGEDLDILDWERGAKVTGARFLFYKNLGARLERALYNF | 180 |
| Query: | 181 | MLDEHAKEGYTEVIPPYMVNHDSMFGTGQYPKFKEDTFELADSPFVLIPTAEVPLTNYYR | 240 |
| | | MLDEH KEGY E+I PYMVNHDSMFGTGQYPKFKEDTFELAD+ FVLIPTAEVPLTNYYR | |
| Sbjct: | 181 | MLDSHIKEGYQEIITPYMVNHDSMFGTGQYPKFKEDTFELADTNFVLIPTAEVPLTNYYR | 240 |
| Query: | 241 | DEIIDGKELPIYFTAMSPSFRSEAGSAGRDTRGLIRLHQFHKVEMVKFAKPEESYQELEK | 300 |
| | | EI+DGKELPIYFTANSPSFRSEAGSAGRDTRGLIRLHQFHKVEMVKFAKPEESYQELEK | |
| Sbjct: | 241 | GEILDGKELPIYFTANSPSFRSEAGSAGRDTRGLIRLHQFHKVEMVKFAKPEESYQELEK | 300 |
| Query: | 301 | MTANAENILQKLNLPYRVITLCTGDMGFSAAKTYDLEVWIPAQNTYREISSCSNTEDFQA | 360 |
| | | MTANAENILQKL LPYRVI+LCTGDMGFSAAKTYDLEVWIPAQNTYREISSCSNTEDFQA | |
| Sbjct: | 301 | MTANAENILQKLGLPYRVISLCTGDMGFSAAKTYDLEVWIPAQNTYREISSCSNTEDFQA | 360 |
| Query: | 361 | RRAQIRYRDEVDGKVRLLHTLNGSGLAVGRTVAAILENYQNEDGSVTIPEVLRPYMGNID | 420 |
| | | RRAQIRYRDE DGKV+LLHTLNGSGLAVGRTVAAILENYQNEDGSVTIPEVLRPYMG | |
| Sbjct: | 361 | RRAQIRYRDEADGKVKLLHTLNGSGLAVGRTVAAILENYQNEDGSVTIPEVLRPYMGGET | 420 |
| Query: | 421 | IIKP | 424 |
| | | +I P | |
| Sbjct: | 421 | VISP | 424 |

[9279] Based on this analysis, it was predicted that these proteins and their epitopes could be useful antigens for vaccines or diagnostics.

### EXAMPLE 1684

[9280] A DNA sequence (GBSx1788) was identified in S. agalactiae <SEQ ID 5227> which encodes the amino acid sequence <SEQ ID 5228>. Analysis of this protein sequence reveals the following:

```
Possible site: 36
>>> Seems to have no N-terminal signal sequence
INTEGRAL Likelihood = −11.36 Transmembrane 313-329 (306-332)
INTEGRAL Likelihood = −9.24 Transmembrane 159-175 (155-179)
INTEGRAL Likelihood = −4.19 Transmembrane 20-36 (16-37)
INTEGRAL Likelihood = −3.29 Transmembrane 271-287 (271-287)
INTEGRAL Likelihood = −2.97 Transmembrane 210-226 (209-227)
INTEGRAL Likelihood = −2.87 Transmembrane 242-258 (241-258)
INTEGRAL Likelihood = −2.13 Transmembrane 52-68 (50-68)
----- Final Results -----
                            bacterial membrane --- Certainty = 0.5543 (Affirmative) < succ>
                              bacterial outside --- Certainty = 0.0000 (Not Clear) < succ>
                                bacterial cytoplasm --- Certainty = 0.0000 (Not Clear) < succ>
```

[9281] A related GBS nucleic acid sequence <SEQ ID 9559> which encodes amino acid sequence <SEQ ID 9560> was also identified.

[9282] The protein has homology with the following sequences in the GENPEPT database.

| >Gp:CAA07406 GB:AJ006986 transmembrane protein | | | |
|---|---|---|---|
| [Streptococcus pneumoniae] | | | |
| Identities = 72/330 (21%), Positives = 143/330 (42%), Gaps = 32/330 (9%) | | | |
| Query: | 14 | RHYGLDLLRIISMFNIVITHVLGKGGLRSSVEGHADSYFIVTWIIQVLVYGAVNCYALIS | 73 |
| | | R+ LDLL++++ +V+ H GG + + + +Y + ++ VN Y L+ | |
| Sbjct: | 5 | RNINLDLLKVLACVGVVLLHTT-MGGFKETGAWNFLTYLYYLGTYSIPLFFNVNGYLLL- | 62 |
| Query: | 74 | GYVGINSRYRYSKLLSIWAQVFFYTFTITALFAITGHE------VTLLNWRDAFFPIVSG | 127 |
| | | G I Y K+ + V +TF I LF E + L + FF | |
| Sbjct: | 63 | GKREITYSYILQKIKWLLITVSSWTF-IVWLFKRDFTENLIKKIIGSLIQKGYFF----- | 116 |
| Query: | 128 | QYWYITAYFGLLVFMPVINNGLNALTDKQLKQLVLLMFI--IFSILPAVLNNRVPEFSLS | 185 |
| | | Q+W+ A + + +P++ LN+ L L LLM I IF + +L + + + | |
| Sbjct: | 117 | QEWFFGALILIYLCLPILRQFLNS-KRSYLYSLSLLMTIGLIFELSNILLQMPIQTYVIQ | 175 |
| Query: | 186 | KGFEMTWLLILYIIGAYLKRIDL----NIFKTSYLLIIYLLSLVATYAMKFSVGDIW--- | 238 |
| | | TW Y++G Y+ + + + FK ++ LL L++ + F I+ | |
| Sbjct: | 176 | TFRLWTW-FFYYLLGGYIAQFTIEEIESRFKNWMKIVSILLLLISPIILFFIAKTIYHNL | 234 |
| Query: | 239 | ---YWYVSPTLTLGAVSLFILFARASIKPSGFLKKIIVVLAPSTLGVYLCHLHPLIVKYF | 295 |
| | | Y+Y + + + + +F+ ++ + ++ IV L+ T+GV++ +H I+K + | |
| Sbjct: | 235 | FAEYFYDTLFVKVSTLGIFLTILMLTLNEN--RRESIVSLSNQTMGVFI--IHTYIMKVW | 290 |
| Query: | 296 | VRDFAETFVYESIYLYPFLILGAGILIYLL | 325 |
| | | + FV + F + + I++ +L | |
| Sbjct: | 291 | SKVLGFNFVGAYLLFALFTLSVSFIIVGML | 320 |

[9283] No corresponding DNA sequence was identified in S. pyogenes.

[9284] Based on this analysis, it was predicted that this protein and its epitopes, could be useful antigens for vaccines or diagnostics.

### EXAMPLE 1685

[9285] A DNA sequence (GBSx1789) was identified in S. agalactiae <SEQ ID 5229> which encodes the amino acid sequence <SEQ ID 5230>. Analysis of this protein sequence reveals the following:

```
Possible site: 59
>>> Seems to have no N-terminal signal sequence
----- Final Results -----
                            bacterial cytoplasm --- Certainty = 0.2752 (Affirmative) < succ>
                              bacterial membrane --- Certainty = 0.0000 (Not Clear) < succ>
                                bacterial outside --- Certainty = 0.0000 (Not Clear) < succ>
```

[9286] A related GBS nucleic acid sequence <SEQ ID 9561> which encodes amino acid sequence <SEQ ID 9562> was also identified.

[9287] The protein has homology with the following sequences in the GENPEPT database.

| >GP:AAD46488 GB:AF130465 unknown [Streptococcus salivarius] | | | |
|---|---|---|---|
| Identities = 88/112 (78%), Positives = 96/112 (85%) | | | |
| Query: | 1 | MAQSLNKTVEFQTTGVSYLGNGNKVGKFLVGDQALEFYNDKNVNDYIQIPWTSINQIGAN | 60 |
| | | MAQSLNKTVE TTGVSY+ +G KVGKFL+GD ALEFY D NV YIQIPWTSI QIGAN | |
| Sbjct: | 1 | MAQSLNKTVELHTTGVSYMAIGGKVGKFLIGDVALEFYPDVNVEQYIQIPWTSITQIGAN | 60 |
| Query: | 61 | VSRKKISRHFEVFTDQGKFLFASKDSGTILKHARRHIGDDKVVKLPTLIQTI | 112 |
| | | VS K+ISRHFEV TD+ KFLFASKDSG ILK AR H+G++KVVKLPTLIQTI | |
| Sbjct: | 61 | VSGKRISRHFEVLTDKSKFLFASKDSGKILKIAREHLGNEKVVKLPTLIQTI | 112 |

[9288] A related DNA sequence was identified in S. pyogenes <SEQ ID 5231> which encodes the amino acid sequence <SEQ ID 5232>. Analysis of this protein sequence reveals the following:

```
Possible site: 59
>>> Seems to have no N-terminal signal sequence
----- Final Results -----
                            bacterial cytoplasm --- Certainty = 0.3301 (Affirmative) < succ>
                              bacterial membrane --- Certainty = 0.0000 (Not Clear) < succ>
                                bacterial outside --- Certainty = 0.0000 (Not Clear) < succ>
```

[9289] An alignment of the GAS and GBS proteins is shown below.

| Identities = 87/116 (75%), Positives = 101/116 (87%) | | | |
|---|---|---|---|
| Query: | 1 | MAQSLNKTVEFQTTGVSYLGMGNKVGKFLVGDQALEFYNDKNVNDYIQIPWTSINQIGAN | 60 |
| | | MAQSLN +VE++T VSYLGMG KVG L+GD+ALEFYNDKNVNDYIQIPWT+IN IGAN | |
| Sbjct: | 1 | MAQSLNTSVEYKTKAVSYLGMGGKVGHILLGDKALEFYNDKNVNDYIQIPWTAINHIGAN | 60 |
| Query: | 61 | VSRKKISRHFEVFTDQGKFLFASKDSGTILKHARRHIGDDKVVKLPTLIQTILKIF | 116 |
| | | VSRKK+SRHFE+FTDQGKFLFAS DSG ILK R+HIG++KV+ LPTL+QT + F | |
| Sbjct: | 61 | VSRKKVSRHFEIFTDQGKFLFASGDSGKILKITRQHIGNEKVITLPTLMQTFINKF | 116 |

[9290] Based on this analysis, it was predicted that these proteins and their epitopes could be useful antigens for vaccines or diagnostics.

### EXAMPLE 1686

[9291] A DNA sequence (GBSx1790) was identified in S. agalactiae <SEQ ID 5233> which encodes the amino acid sequence <SEQ ID 5234>. This protein is predicted to be mannose-specific phosphotransferase system component IID (manZ). Analysis of this protein sequence reveals the following:

```
Possible site: 39
>>> Seems to have no N-terminal signal sequence
INTEGRAL Likelihood = −8.92 Transmembrane 281-297 (279-302)
INTEGRAL Likelihood = −4.88 Transmembrane 187-203 (185-205)
INTEGRAL Likelihood = −4.35 Transmembrane 260-276 (257-277)
INTEGRAL Likelihood = −1.01 Transmembrane 129-145 (129-145)
----- Final Results -----
                              bacterial membrane --- Certainty = 0.4567 (Affirmative) < succ>
                                bacterial outside --- Certainty = 0.0000 (Not Clear) < succ>
                            bacterial cytoplasm --- Certainty = 0.0000 (Not Clear) < succ>
```

[9292] The protein has homology with the following sequences in the GENPEPT database.

| >GP:AAD46487 GB:AF130465 mannose-specific phosphotransferase system | | | |
|---|---|---|---|
| component IID [Streptococcus salivarius] | | | |
| Identities = 247/303 (81%) , Positives = 276/303 (90%) | | | |
| Query: | 1 | MTEQIKLSKSDRQKVWWRSQFLQGSWNYERNQNMGWAYALIPALKKLYTTKEDRAAALER | 60 |
| | | M E+I+LS++DR+KVWWRSQFLQGSWNYERNQN+GWAY+LIPA+KKLYT KED+AAAL+R | |
| Sbjct: | 1 | MAEKIQLSQADRKKVWWRSQFLQGSWNYERNQNLGWAYSLIPAIKKLYTNKEDQAAALKR | 60 |
| Query: | 61 | HMEFFNTHPYVAAPIIGVTLALEEEKASGTPVEDKAIQGVKIGMMGPLAGIGDPVFWFTV | 120 |
| | | H+EFFNTHPYVAAPI+GVTLALEEEKA+GT +ED AIQGVKIGMNGPLAGIGDPVFWFTV | |
| Sbjct: | 61 | HLEFFNTHPYVAAPIMGVTLALEEEKANGTDIEDAAIQGVKIGMMGPLAGIGDPVFWFTV | 120 |
| Query: | 121 | RPILGALGASLASAGNILGPIIFFVGWNLIRMSFLWYTQELGYKSGKEITKDMSGGILQD | 180 |
| | | RPILGALGASLA AGNI GP+IFF+GWNLIRM+FLWYTQELGYK+G EITKDMSGGIL+D | |
| Sbjct: | 121 | RPILGALGASLAQAGNIAGPLIFFIGWNLIRMAFLWYTQELGYKAGSEITKDMSGGILKD | 180 |
| Query: | 181 | ITKGASILGMFILAVLVKRWVAINFTVDLPKKTLSEGAYINFPKDHVSGQQLHDILGQVQ | 240 |
| | | ITKGASILGMFILAVLV+RWV+I FTV+LP K LS+GAYI +PK +VSG QL ILGQV | |
| Sbjct: | 181 | ITKGASILGMFILAVLVERWVSIVFTVNLPGKVLSKGAYIEWPKGNVSGDQLKTILGQVN | 240 |
| Query: | 241 | SGLSLDKNQFQTLQGQLDSLIPGLAGLLLTFFCNWLLKKKVSPITIIIGLFIVGILARLA | 300 |
| | | LS DK+Q TLQ QLDSLIPGL GLLLTF CNWLLKKKVSPITIIIGL +VGI+A | |
| Sbjct: | 241 | DKLSFDKIQVDTLQKQLDSLIPGLNGLLLTFACNWLLKKKVSPITIIIGLFVVGIVASFF | 300 |
| Query: | 301 | GVM | 303 |
| | | G+M | |
| Sbjct: | 301 | GIM | 303 |

[9293] A related DNA sequence was identified in S. pyogenes <SEQ ID 5235> which encodes the amino acid sequence <SEQ ID 5236>. Analysis of this protein sequence reveals the following:

```
Possible site: 55
>>> Seems to have no N-terminal signal sequence
INTEGRAL Likelihood = −8.39 Transmembrane 284-300 (279-302)
INTEGRAL Likelihood = −4.88 Transmembrane 261-277 (257-278)
INTEGRAL Likelihood = −4.51 Transmembrane 181-197 (180-198)
----- Final Results -----
                              bacterial membrane --- Certainty = 0.4354 (Affirmative) < succ>
                                bacterial outside --- Certainty = 0.0000 (Not Clear) < succ>
                            bacterial cytoplasm --- Certainty = 0.0000 (Not Clear) < succ>
```

[9294] The protein has homology with the following sequences in the databases:

| >GP:AAD46487 GB:AF130465 mannose-specific phosphotransferase system | | | |
|---|---|---|---|
| component IID [Streptococcus salivarius] | | | |
| Identities 239/303 (78%), Positives = 268/303 (87%) | | | |
| Query: | 1 | MTEQIKLTKSDRQRVWWRSQFLQGSWNYERNQNMGWAYALIPALKKLYTSPEDRAAALER | 60 |
| | | M E+I+L+++DR++VWWRSQFLQGSWNYERNQN+GWAY+LIPA+KKLYT+ ED+AAAL+R | |
| Sbjct: | 1 | MA KIQLSQADRKKVWWRSQFLQGSWNYERNQNLGWAYSLIPAIKKLYTNKEDQAAALKR | 60 |
| Query: | 61 | HMEFFNTHPYVAAPIIGVTLALEEERANGTPIDDKAIQGVKIGMMGPLAGIGDPVFWFTI | 120 |
| | | H+EFFNTHPYVAAPI+GVTLALEEE+ANGT I+D AIQGVKIGMNGPLAGIGDPVFWFT+ | |
| Sbjct: | 61 | HLEFFNTHPYVAAPIMGVTLALEEEKANGTDIEDAAIQGVRIGMMGPLAGIGDPVFWFTV | 120 |
| Query: | 121 | RPILGALGASLASTGNIVGPLLFFFGWNLIRMAFLWYTQEFGYKAGSEITKDMSGGILQD | 180 |
| | | RPILGALGASLA GNI GPL+FF GWNLIRMAFLWYTQE GYKAGSEITKDMSGGIL+D | |
| Sbjct: | 121 | RPILGALGASLAQAGNIAGPLIFFIGWNLIRMAFLWYTQELGYKAGSEITKDHSGGILKD | 180 |
| Query: | 181 | ITKGASILGMFILAVLVQRWVSINFTIDLPGKQLSDGAYVVFPDGAVKGAELKTILANAI | 240 |
| | | ITKGASILGMFILAVLV+RWVSI FT++LPGK LS GAY+ +P G V G +LKTIL | |
| Sbjct: | 181 | ITKGASILGMFILAVLVERWVSIVFTVNLPGKVLSKGAYIEWPKGNVSGDQLKTILGQVN | 240 |
| Query: | 241 | GGMSLDKVQAQTLQGQLDSLIPCLAGLLLTFLCMWLLKKKVSPIAIIIGLFAFGILAHLA | 300 |
| | | +S DK+Q TLQ QLDSLIPGL GLLLTF CMWLLKKKVSPI IIIGLF GI+A | |
| Sbjct: | 241 | DKLSFDKIQVDTLQKQLDSLIPGLHGLLLTFACMWLLKKKVSPITIIIGLFVVGIVASFF | 300 |
| Query: | 301 | GIM | 303 |
| | | GIM | |
| Sbjct: | 301 | GIM | 303 |

[9295] An alignment of the GAS and GBS proteins is shown below.

| Identities = 255/303 (84%), Positives = 277/303 (91%) | | | |
|---|---|---|---|
| Query: | 1 | MTEQIKLSKSDRQKVWWRSQFLQGSWNYERNQNMGWAYALIPALKKLYTTKEDRAAALER | 60 |
| | | MTEQIKL+KSDRQ+VWWRSQFLQGSWNYERNQNMGWAYALIPALKKLYT+ EDRAAALER | |
| Sbjct: | 1 | MTEQIKLTKSDRQRVWWRSQFLQGSWNYERMQNMGWAYALIPALKKLYTSPEDRAAALER | 60 |
| Query: | 61 | HMEFFNTHPYVAAPIIGVTLALESEKASGTPVEDKAIQGVKIGMMGPLAGIGDPVFWFTV | 120 |
| | | HMEFFNTHPYVAAPIIGVTLALEEE+A+GTP++DKAIQGVKIGMMGPLAGIGDPVFWFT+ | |
| Sbjct: | 61 | HMEFFNTHPYVAAPIIGVTLALEEERANGTPIDDKAIQGVKIGMMGPLAGIGDPVFWFTI | 120 |
| Query: | 121 | RPILGALGASLASAGNILGPIIFFVGWNLIRMSFLWYTQELGYKSGKEITKDMSGGILQD | 180 |
| | | RPILGALGASLAS GNI+GP++FF GWNLIRN+FLWYTQE GYK+G EITKDMSGGILQD | |
| Sbjct: | 121 | RPILGALGASLASTGNIVGPLLFFFGWNLIRNAFLWYTQEFGYKAGSEITKDMSGGILQD | 180 |
| Query: | 181 | ITKGASILGMFILAVLVKRWVAINFTVDLFKKTLSEGAYINFPKDHVSGQQLHDILGQVQ | 240 |
| | | ITKGASILGMFILAVLV+RWV+INFT+DLP K LS+GAY+ FP V G +L IL | |
| Sbjct: | 181 | ITKGASILGMFILAVLVQRWVSINFTIDLPGKQLSDGAYVVFPDGAVKGAELKTILANAI | 240 |
| Query: | 241 | SGLSLDKMQPQTLQGQLDSLIPGLAGLLLTFFCMWLLKKKVSPITIIIGLFIVGILARLA | 300 |
| | | G+SLDK+Q QTLQGQLDSLIPGLAGLLLTF CMWLLKKKVSPI IIIGLF GILA LA | |
| Sbjct: | 241 | GGMSLDKVQAQTLQGQLDSLIPGLAGLLLTFLCMWLLKKKVSPIAIIIGLFAFGILAHLA | 300 |
| Query: | 301 | GVM | 303 |
| | | G+M | |
| Sbjct: | 301 | GIM | 303 |

[9296] Based on this analysis, it was predicted that these proteins and their epitopes could be useful antigens for vaccines or diagnostics.

### EXAMPLE 1687

[9297] A DNA sequence (GBSx1791) was identified in S. agalactiae <SEQ ID 5237> which encodes the amino acid sequence <SEQ ID 5238>. Analysis of this protein sequence reveals the following:

```
Possible site: 22
>>> Seems to have no N-terminal signal sequence
----- Final Results -----
                            bacterial cytoplasm --- Certainty = 0.2580 (Affirmative) < succ>
                              bacterial membrane --- Certainty = 0.0000 (Not Clear) < succ>
                                bacterial outside --- Certainty = 0.0000 (Not Clear) < succ>
```

[9298] The protein has no significant homology with any sequences in the GENPEPT database.

[9299] No corresponding DNA sequence was identified in S. pyogenes.

[9300] Based on this analysis, it was predicted that this protein and its epitopes, could be useful antigens for vaccines or diagnostics.

### EXAMPLE 1688

[9301] A DNA sequence (GBSx1792) was identified in S. agalactiae <SEQ ID 5239> which encodes the amino acid sequence <SEQ ID 5240>. This protein is predicted to be mannose-specific phosphotransferase system component IIC (manY). Analysis of this protein sequence reveals the following:

```
Possible site: 39
>>> Seems to have a cleavable N-term signal seq.
INTEGRAL Likelihood = −5.95 Transmembrane 142-158 (137-165)
INTEGRAL Likelihood = −2.60 Transmembrane 65-81 (61-81)
INTEGRAL Likelihood = −1.97 Transmembrane 103-119 (103-122)
----- Final Results -----
                              bacterial membrane --- Certainty = 0.3378 (Affirmative) < succ>
                                bacterial outside --- Certainty = 0.0000 (Not Clear) < succ>
                            bacterial cytoplasm --- Certainty = 0.0000 (Not Clear) < succ>
```

[9302] A related GBS nucleic acid sequence <SEQ ID 9301> which encodes amino acid sequence <SEQ ID 9302> was also identified.

[9303] The protein has homology with the following sequences in the GENPEPT database.

| >GP:AAD46486 GB:AF130465 mannose-specific phosphotransferase system | | | |
|---|---|---|---|
| component IIC [Streptococcus salivarius] | | | |
| Identities = 134/186 (72%), Positives = 154/186 (82%), Gaps = 1/186 (0%) | | | |
| Query: | 1 | MVKSGDFTQKGINFAFSTAVPLAIAGLFLTMIVRTISTALVHAGDKAASEGNFAAIERFH | 60 |
| | | +VK G+FT +GI A +TA+PLA+AGLFLTM+VRT S ALVHA DKAA GN A +ER H | |
| Sbjct: | 86 | LVKGGNFTTEGIGVATATAIPLAVAGLFLTMLVRTASVALVHAADKAAESGNIAGVERAH | 145 |
| Query: | 61 | FIALLLQGLRIAFPAALLLAIPSSSVQSILEAHPDWLNGGMQVGGANVVAVGYAHVINHN | 120 |
| | | ++ALLLQGLRIA PAALLLAIP+ SVQ L HP WLN GM VGG MVVAVGYAHVIHHH | |
| Sbjct: | 146 | YLALLLQGLRIAVPAALLLAIPAESVQHALGLHPSWLNHGHVVGGGMVVAVGYAMVIHHN | 205 |
| Query: | 121 | ATREVWPFFALGFALAALHQLTLIAMGTIGVAIALIYISLSKHGGSK-GTSHAGSHDPIG | 179 |
| | | ATREVWPFFA+GFA AA++QLTLIA+G IGVAIA IY++LSK GG G +++ GS DPIG | |
| Sbjct: | 206 | ATREVWPFFAIGFAFAAISQLTLIALGAIGVAIAFIYLHLSKQGGGNGGGTSSGSGDPIG | 265 |
| Query: | 180 | DILEDY | 185 |
| | | DILEDY | |
| Sbjct: | 266 | DILEDY | 271 |

[9304] A related DNA sequence was identified in S. pyogenes <SEQ ID 5241> which encodes the amino acid sequence <SEQ ID 5242>. Analysis of this protein sequence reveals the following:

```
Possible Site: 36
>>> Seems to have an uncleavable N-term signal seq
INTEGRAL Likelihood = −11.30 Transmembrane 4-20 (1-28)
INTEGRAL Likelihood = −7.64 Transmembrane 226-242 (212-247)
INTEGRAL Likelihood = −4.14 Transmembrane 102-118 (101-123)
INTEGRAL Likelihood = −3.77 Transmembrane 71-87 (69-87)
INTEGRAL Likelihood = −3.40 Transmembrane 150-166 (146-167)
INTEGRAL Likelihood = −2.13 Transmembrane 186-202 (186-202)
INTEGRAL Likelihood = −0.37 Transmembrane 37-53 (37-53)
----- Final Results -----
                              bacterial membrane --- Certainty = 0.5522 (Affirmative) < succ>
                                bacterial outside --- Certainty = 0.0000 (Not Clear) < succ>
                            bacterial cytoplasm --- Certainty = 0.0000 (Not Clear) < succ>
```

[9305] The protein has homology with the following sequences in the databases:

| >GP:AAD46486 GB:AF130465 mannose-specific phosphotransferase system | | | |
|---|---|---|---|
| component IIC [Streptococcus salivarius] | | | |
| Identities = 211/271 (77%), Positives = 237/271 (86%), Gaps = 2/271 (0%) | | | |
| Query: | 1 | MSDISIISAILVVIIAFFAGLEGILDQFQMHQPLVACTLIGLVTGHLEAGVILGGTLQML | 60 |
| | | MSD+SIISAILVV++AF AGL GILDQFQ HQPLVACTLIG TG+L AG++LGG+LQM+ | |
| Sbjct: | 1 | MSDMSIISAILVVVVAFLAGLEGILDQFQFHQPLVACTLIGAATGNLTAGIMLGGSLQMI | 60 |
| Query: | 61 | ALGWANIGAAVAPDAALASVAAAIIMVKSGDFTQKGITFAYSTAIPLAVAGLFLTMIVRT | 120 |
| | | AL WANIGAAVAPDAALASVAAAII+VK G+FT +GI A +TAIPLAVAGLFLTM+VRT | |
| Sbjct: | 61 | ALAWANIGAAVAPDAALASVAAAIILVKGGNFTTEGIGVATATAIPLAVAGLFLTHLVRT | 120 |
| Query: | 121 | LSTALVHAGDKAAAEGNFAGIERFHFIALLLQGLRIAVPAALLVAVPTSAVQSVLNANPN | 180 |
| | | S ALVHA DKAA GN AG+ER H++ALLLQGLRIAVPAALL+A+P +VQ L MP+ | |
| Sbjct: | 121 | ASVALVHAADKAAESGNIAGVERAHYLALLLQGLRIAVPAALLLAIPAESVQHALGLMPS | 180 |
| Query: | 181 | WLNEGMQIGGAMVVAVGYAMVINMMATREVWPFFALGFALAAISQLTLIAMGVIGVAIAF | 240 |
| | | WLN GM +GG MVVAVGYAMVINMMATREVWPFFA+GFA AAISQLTLIA+G IGVAIAF | |
| Sbjct: | 181 | WLNHGMVVGGGMVVAVGYAMVINMMATREVWPFFAIGFAFAAISQLTLIALGAIGVAIAF | 240 |
| Query: | 241 | IYLNLSKKGG--NGGNAAGSADPIGDILEDY | 269 |
| | | IYLNLSK+GG GG ++GS DPIGDILEDY | |
| Sbjct: | 241 | IYLNLSKQGGGNGGGTSSGSGDPIGDILEDY | 271 |

[9306] An alignment of the GAS and GBS proteins is shown below.

| Identities = 155/185 (83%), Positives = 173/185 (92%), Gaps = 1/185 (0%) | | | |
|---|---|---|---|
| Query: | 1 | MVKSGDFTQKGINFAFSTAVPLAIAGLFLTMIVRTISTALVHAGDKAASEGNFAAIERFH | 60 |
| | | MVKSGDFTQKGI FA+STA+PLA+AGLFLTMIVRT+STALVHAGDKAA+EGNFA IERFH | |
| Sbjct: | 86 | MVKSGDFTQKGITFAYSTAIPLAVAGLFLTMIVRTLSTALVHAGDKAAAEGNFAGIERFH | 145 |
| Query: | 61 | FIALLLQGLRIAFPAALLLAIPSSSVQSILEAMPDWLNGGMQVGGAMVVAVGYAMVINMM | 120 |
| | | FIALLLQGLRIA PAALL+A+P+S+VQS+L AMP+WLN GMQ+GGAMVVAVGYAMVINMM | |
| Sbjct: | 146 | FIALLLQGLRIAVPAALLVAVPTSAVQSVLNAMPNWLNEGMQIGGANVVAVGYAMVINMM | 205 |
| Query: | 121 | ATREVWPFFALGFALAALNQLTLIAMGTIGVAIALIYISLSKMGGSKGTSNAGSNDPIGD | 180 |
| | | ATREVWPFFALGFALAA++QLTLIAMG IGVAIA IY++LSK GG+ G + AGS DPIGD | |
| Sbjct: | 206 | ATREVWPFFALGFALAAISQLTLIAMGVIGVAIAFIYLNLSKKGGNGGNA-AGSADPIGD | 264 |
| Query: | 181 | ILEDY | 185 |
| | | ILEDY | |
| Sbjct: | 265 | ILEDY | 269 |

[9307] Based on this analysis, it was predicted that these proteins and their epitopes could be useful antigens for vaccines or diagnostics.

### EXAMPLE 1689

[9308] A DNA sequence (GBSx1793) was identified in S. agalactiae <SEQ ID 5243> which encodes the amino acid sequence <SEQ ID 5244>. Analysis of this protein sequence reveals the following:

```
Possible site: 37
>>> Seems to have a cleavable N-terminal signal sequence
----- Final Results -----
                            bacterial cytoplasm --- Certainty = 0.3171 (Affirmative) < succ>
                              bacterial membrane --- Certainty = 0.0000 (Not Clear) < succ>
                                bacterial outside --- Certainty = 0.0000 (Not Clear) < succ>
```

[9309] The protein has no significant homology with any sequences in the GENPEPT database.

[9310] No corresponding DNA sequence was identified in S. pyogenes.

[9311] Based on this analysis, it was predicted that this protein and its epitopes, could be useful antigens for vaccines or diagnostics.

### EXAMPLE 1690

[9312] A DNA sequence (GBSx1794) was identified in S. agalactiae <SEQ ID 5245> which encodes the amino acid sequence <SEQ ID 5246>. This protein is predicted to be pseudouridine synthase (rluC). Analysis of this protein sequence reveals the following:

```
Possible site: 28
>>> Seems to have no N-terminal signal sequence
----- Final Results -----
                              bacterial cytoplasm --- Certainty = 0.2717 (Affirmative) < succ>
                                bacterial membrane --- Certainty = 0.0000 (Not Clear) < succ>
                                  bacterial outside --- Certainty = 0.0000 (Not Clear) < succ>
```

[9313] The protein has homology with the following sequences in the GENPEPT database.

| >GP:BAB06566 GB:AP001516 unknown conserved protein [Bacillus halodurans] | | | |
|---|---|---|---|
| Identities = 124/281 (44%), Positives = 171/281 (60%), Gaps = 8/281 (2%) | | | |
| Query: | 16 | LLKSHDVSRGLLAKIKYRGGKIFVNGEEQNAIFLLEIGDVVTIDIPDE-PSHETL-EPVP | 73 |
| | | L + VS+ LA IK++GG I +NGEE + + D VT+++P E PS + EPVP | |
| Sbjct: | 24 | LREGKHVSKRSLAAIKFKGGTILLNGEEVTVRETVHVNDQVTLELPHEYPSPSMIAEPVP | 83 |
| Query: | 74 | HDLDIIYEDDHFLILNKPFGFASIPSSIH-SNTIANFIKHYYVSNNYANQQVHIVTRLDR | 132 |
| | | D+IYE+DH+L++NKP G +IPS H T+AN + +Y+ A H V RLD+ | |
| Sbjct: | 84 | --FDVIYENDHYLVVNKPAGVPTIPSRDHPQGTLAHGLLNYFQRQKMA-ATFHAVHRLDK | 140 |
| Query: | 133 | DTSGLMLFAKHGYAHARLDKQLQAKAIEKRYYALVSGSGDLADSGDIIAPIARDVDSIIT | 192 |
| | | DTSGL++ AKH AH +L KQ + I++ Y A+V G + + G I APIAR +S+IT | |
| Sbjct: | 141 | DTSGLLIVARHQLAHDQLSKQQRQGNIKRTYMAIVQGEIEQQE-GTITAPIARKEESLIT | 199 |
| Query: | 193 | RRVHESGRYAHTSYQVVARYGDVRLVDIKLHTGRTHQIRVHFAHIGFPLLGDDLYGGRND | 252 |
| | | R V E G+ A T ++V+ R +V ++L TGRTHQIRVHF+++G+PL GDDLYGG | |
| Sbjct: | 200 | REVREDGQLAITHFKVIDRLNQGTIVQVQLETGRTHQIRVHFSYLGYPLFGDDLYGGERR | 259 |
| Query: | 253 | LGINRQALHCHSLSFYDPFMGKINKQTLDLTDDFDSVIMEL | 293 |
| | | GIRQALH L+ + PF T L D +I L | |
| Sbjct: | 260 | -GIERQALHSTELTIHCPFTEVEQTFTEGLPPDMKELIRHL | 299 |

[9314] A related DNA sequence was identified in S. pyogenes <SEQ ID 5247> which encodes the amino acid sequence <SEQ ID 5248>. Analysis of this protein sequence reveals the following:

```
Possible site: 28
>>> Seems to have no N-terminal signal sequence
----- Final Results -----
                              bacterial cytoplasm --- Certainty = 0.2786 (Affirmative) < succ>
                                bacterial membrane --- Certainty = 0.0000 (Not Clear) < succ>
                                  bacterial outside --- Certainty = 0.0000 (Not Clear) < succ>
```

[9315] An alignment of the GAS and GBS proteins is shown below.

| Identities = 223/294 (75%), Positives = 251/294 (84%), Gaps = 1/294 (0%) | | | |
|---|---|---|---|
| Query: | 1 | MKFEYVAKERCKVRTLLKSHDVSRGLLAKIKYRGGKIFVNGEEQNAIFLLEIGDVVTIDI | 60 |
| | | M+FE+VA +R KVKTLLKS+DVS+GLLAKIKY+GG I VNG EQNAI+LL++GDVVTIDI | |
| Sbjct: | 1 | MRFEFVADKRIKVKTLLKSYDVSKGLLAKIKYKGGNILVNGIEQNAIYLLQVGDVVTIDI | 60 |
| Query: | 61 | PDEPSHETLEPVPHDLDIIYEDDHFLILNKPFGFASIPSSIHSNTIANFIKHYYVSNNYA | 120 |
| | | P+E E LE +P DLDI++EDDHFL++NKP GFASIPS+IHSNTIANFIK YYV N+Y | |
| Sbjct: | 61 | PNEEPFEKLEAIPFDLDIVHEDDHFLVINKPIGFASIPSAIHSNTIANFIKAYYVDNHYL | 120 |
| Query: | 121 | NQQVHIVTRLDRDTSGLMLFAKHGYAHARLDKQLQAKAIEKRYYALVSGSGDLADSGDII | 180 |
| | | +QQVHIVTRLDRDTSGLMLFAKHGYAHARLDKQLQ ++IEKRY+ALVSG+G L D GDII | |
| Sbjct: | 121 | DQQVHIVTRLDRDTSGLMLFAKHGYAHARLDKQLQTRSIEKRYFALVSGNGMLPDEGDII | 180 |
| Query: | 181 | APIARDVDSIITRRVHESGKYAHTSYQVVARYGD-VRLVDIRLHTGRTHQIRVHFAHIGF | 239 |
| | | API R DSIITR V GKYA TSY+VVARY + V LVDIKLHTGRTHQIRVHFAHIGF | |
| Sbjct: | 181 | APIGRSKDSIITRAVDPMGKYAKTSYKVVARYSENVHLVDIKLHTGRTHQIRVHFAHIGF | 240 |
| Query: | 240 | PLLGDDLYGGRMDLGINRQALHCHSLSFYDFFMGKINKQTLDLTDDFDSVIMEL | 293 |
| | | PLLGDDLYGGR+DLGI RQALHCH L+F DPF + LTDDFDSVI+ L | |
| Sbjct: | 241 | PLLGDDLYGGRLDLGITRQALHCHYLNFKDPFTES0CSYAIHLTDDFDSVIIGL | 294 |

[9316] Based on this analysis, it was predicted that these proteins and their epitopes could be useful antigens for vaccines or diagnostics.

### EXAMPLE 1691

[9317] A DNA sequence (GBSx1795) was identified in S. agalactiae <SEQ ID 5249> which encodes the amino acid sequence <SEQ ID 5250>. Analysis of this protein sequence reveals the following:

```
Possible site: 33
>>> Seems to have no N-terminal signal sequence
----- Final Results -----
                              bacterial cytoplasm --- Certainty = 0.1521 (Affirmative) < succ>
                                bacterial membrane --- Certainty = 0.0000 (Not Clear) < succ>
                                  bacterial outside --- Certainty = 0.0000 (Not Clear) < succ>
```

[9318] A related GBS nucleic acid sequence <SEQ ID 9845> which encodes amino acid sequence <SEQ ID 9846> was also identified.

[9319] The protein has homology with the following sequences in the GENPEPT database.

| >GP:CAB13018 GB:Z99110 similar to hypothetical proteins | | | |
|---|---|---|---|
| [Bacillus subtilis] | | | |
| Identities = 120/267 (44%), Positives = 174/267 (64%), Gaps = 3/267 (1%) | | | |
| Query: | 13 | RVAIIANGKYQSKRVASKLFAAFKHDPDFYLSKKDPDIVISIGGDGMLLSAFHMYEKQLD | 72 |
| | | + A+ + G S + SK+ A+ D D L + +P+IVIS+GGDG LL AFH Y +LD | |
| Sbjct: | 2 | KFAVSSKGDQVSDTLKSKI-QAYLLDFDMELDENEPEIVISVGGDGTLLYAFHRYSDRLD | 60 |
| Query: | 73 | KVRFVGVHTGHLGFYTDYRDFEVDTLINNLKNDKGEQISYPILKVTITL-EDGRVIRARA | 131 |
| | | K FVGVHTGHLGFY D+ E++ L+ + + YP+L+V +T E+ R R A | |
| Sbjct: | 61 | KTAFVGVHTGHLGFYADWVPHEIEKLVLAIAKTPYHTVEYPLLEVIVTYHENEREERYLA | 120 |
| Query: | 132 | LNESTIKRIEKTMVADVVINQVVFERFRGDGILVSTPTGSTAYNKSLGGAVLHPTIEALQ | 191 |
| | | LNE TIK IE ++VADV I +FE FRGDG+ +STP+GSTAYNK+LGGA++HP+I A+Q | |
| Sbjct: | 121 | LNECTIKSIEGSLVADVEIKGQLFETFRGDGLCLSTPSGSTAYNKALGGAIIHPSIRAIQ | 180 |
| Query: | 192 | LTEISSLNNRVYRTLGSSVIIPKKDAIEIVPKRVGVYTISIDNKTVHYKNVTKIEYSIDE | 251 |
| | | L E++S+NNRV+RT+GS +++P I P+ + ++ID+ T+ +K+V I + | |
| Sbjct: | 181 | LAEMASINNRVFRTVGSPLLLPSHHDCMIKPRNEVDFQVTIDHLTLLHKDVKSIRCQVAS | 240 |
| Query: | 252 | KSINFVSTPSHTSFWERVNDAFIGEPE | 278 |
| | | + + F FW+RV D+FIG+ E | |
| Sbjct: | 241 | EKVRFARFRPF-PFWKRVQDSEIGKGE | 266 |

[9320] A related sequence was also identified in GAS <SEQ ID 9137> which encodes the amino acid sequence <SEQ ID 9138>. Analysis of this protein sequence reveals the following:

```
Possible site: 16
>>> Seems to have no N-terminal signal sequence
----- Final Results -----
                              bacterial cytoplasm --- Certainty = 0.2190 (Affirmative) < succ>
                                bacterial membrane --- Certainty = 0.0000 (Not Clear) < succ>
                                  bacterial outside --- Certainty = 0.0000 (Not Clear) < succ>
RGD motif: 155-157
```

[9321] An alignment of the GAS and GBS proteins is shown below.

| Identities = 232/276 (84%), Positives = 257/276 (93%) | | | |
|---|---|---|---|
| Query: | 1 | MMTQMNFTDRATRVAIIANGKYQSRRVASKLFAAFKHDPDFYLSKKDPDIVISIGGDGML | 60 |
| | | +MTQMN+T + RVAIIANGKYQSKRVASKLF+ FK DPDFYLSKK+PDIVISIGGDGML | |
| Sbjct: | 1 | VNTQMNYTGKVKRVAIIANGKYQSKRVASKLFSVFKDDPDFYLSKKNPDIVISIGGDGML | 60 |
| Query: | 61 | LSAFHMYEKQLDKVRFVGVHTGHLGFYTDYRDFEVDTLINNLKNDKGEQISYPILKVTIT | 120 |
| | | LSAFHMYEK+LDKVRFVG+HTGHLGFYTDYRDFEVD LI+NL+ DKGEQISYPILKV IT | |
| Sbjct: | 61 | LSAFHMYEKELDKVRFVGIHTGHLGFYTDYRDFEVDKLIDNLRKDKGEQISYPILKVAIT | 120 |
| Query: | 121 | LEDGRVIRARALNESTIKRIEKTMVADVVINQVVFERFRGDGILVSTPTGSTAYNKSLGG | 180 |
| | | L+DGRV++ARALNE+T+KRIEKTMVADV+IN V FE FRGDGI VSTPTGSTAYNKSLGG | |
| Sbjct: | 121 | LDDGRVVKARALNEATVKRIEKTMVADVIINHVKFESFRGDGISVSTPTGSTAYNKSLGG | 180 |
| Query: | 181 | AVLHPTIEALQLTEISSLNNRVYRTLGSSVIIPKKDAIEIVPKRVGVYTISIDNKTVHYK | 240 |
| | | AVLHPTIEALQLTEISSLNNRV+RTLGSS+IIPKKD IE+VPKR+G+YTISIDNKT K | |
| Sbjct: | 181 | AVLHPTIEALQLTEISSLNNRVFRTLGSSIIIPKKDKIELVPKRLGIYTISIDNKTYQLK | 240 |
| Query: | 241 | NVTKIEYSIDEKSINFVSTPSHTSFWERVNDAFIGE | 276 |
| | | NVTK+EY ID++ I+FVS+PSHTSFWERV DAFIGE | |
| Sbjct: | 241 | NVTKVEYFIDDEKIHFVSSPSHTSFNERVKDAFIGE | 276 |

[9322] A related GBS gene <SEQ ID 8879> and protein <SEQ ID 8880> were also identified. Analysis of this protein sequence reveals an RGD motif at residues 159-161.

[9323] The protein has homology with the following sequences in the databases:

[chemical structure]

[9324] A related DNA sequence was identified in S. pyogenes <SEQ ID 5251> which encodes the amino acid sequence <SEQ ID 5252>. Analysis of this protein sequence reveals the following:

```
Possible site: 20
>>> Seems to have no N-terminal signal sequence
----- Final Results -----
                              bacterial cytoplasm --- Certainty = 0.2190 (Affirmative) < succ>
                                bacterial membrane --- Certainty = 0.0000 (Not Clear) < succ>
                                  bacterial outside --- Certainty = 0.0000 (Not Clear) < succ>
```

[9325] An alignment of the GAS and GBS sequences follows:

| Score = 481 bits (1224), Expect = e−138 | | | |
|---|---|---|---|
| Identities = 233/276 (84%), Positives = 257/276 (92%) | | | |
| Query: | 1 | VMTQMNYTGKVKRVAIIANGKYQSKRVASKLFSVFKDDPDFYLSKRNPDIVISIGGDGML | 60 |
| | | VMTQMN+T + RVAIIANGKYQSKRVASKLF+ FR DFDFYLSKK+PDIVISIGGDGML | |
| Sbjct: | 1 | VMTQMNFTDRATRVAIIANGKYQSKRVASKLFAAFKHDPDFYLSKKDPDIVISIGGDGML | 60 |
| Query: | 61 | LSAFHMYEKELDKVRFVGIHTGHLGFYTDYRDFEVDKLIDNLRKDKGEQISYPILKVAIT | 120 |
| | | LSAFHMYEK+LDKVRFVG+HTGHLGFYTDYRDFEVD LI+NL+ DKGEQISYPILKV IT | |
| Sbjct: | 61 | LSAFHMYEKQLDKVRFVGVHTGHLGFYTDYRDFEVDTLINNLKNDKGEQISYPILKVTIT | 120 |
| Query: | 121 | LDDGRVVKARALNEATVKRIEKTMVADVIINHVEFESFRGDGISVSTPTGSTAYNKSLGG | 180 |
| | | L+DGRV++ARALNE+T+KRIEKTMVADV+IN V FE FRGDGI VSTPTGSTAYNKSLGG | |
| Sbjct: | 121 | LEDGRVIRARALNESTIKRIEKTMVADVVINQVVFERFRGDGILVSTPTGSTAYNKSLGG | 180 |
| Query: | 181 | AVLHPTIEALQLTEISSLNNRVFRTLGSSIIIPKKDKIELVPKRLGIYTISIDNKTYQLK | 240 |
| | | AVLHPTIEALQLTEISSLNNRV+RTLGSS+IIPKKD IE+VPKR+G+YTISIDNKT K | |
| Sbjct: | 181 | AVLHPTIEALQLTEISSLNNRVYRTLGSSVIIPKKDAIEIVPKRVGVYTISIDNKTVHYK | 240 |
| Query: | 241 | NVTKVEYFIDDEKIHFVSSPSHTSFWERVKDAFIGE | 276 |
| | | NVTK+EY ID++ I+FVS+PSHTSFWERV DAFIGE | |
| Sbjct: | 241 | NVTKIEYSIDEKSINFVSTPSHTSFWERVNDAFIGE | 276 |

[9326] Based on this analysis, it was predicted that these proteins and their epitopes could be useful antigens for vaccines or diagnostics.

### EXAMPLE 1692

[9327] A DNA sequence (GBSx1796) was identified in S. agalactiae <SEQ ID 5253> which encodes the amino acid sequence <SEQ ID 5254>. This protein is predicted to be permease. Analysis of this protein sequence reveals the following:

Possible site: 17
>>> Seems to have no N-terminal signal sequence
----- Final Results -----
bacterial cytoplasm --- Certainty = 0.3653 (Affirmative) < succ>
bacterial membrane --- Certainty = 0.0000 (Not Clear) < succ>
bacterial outside --- Certainty = 0.0000 (Not Clear) < succ>

[9328] The protein has homology with the following sequences in the GENPEPT database.

| >GP:BAB06568 GB:AP001516 GTP pyrophosphokinase | | | |
|---|---|---|---|
| [Bacillus halodurans] | | | |
| Identities = 115/208 (55%), Positives = 159/208 (76%), Gaps = 3/208 (1%) | | | |
| Query: | 4 | DWETFLDPYIQTVGELKIKLRGIRKQFRKQNRHSPIEFVTGRVKSVESIQEKMVLRGISE | 63 |
| | | +W+ FL PY Q V ELK+KL+GIR+Q++K ++H+PIEFVTGRVK + SI +K + + I | |
| Sbjct: | 3 | NWDVFLTPYKQAVEELKVKLKGIREQYQKSSKHTPIEFVTGRVKPISSILDKAIRKNIPL | 62 |
| Query: | 64 | ENLAQDLQDIAGLRIMVQFVDDVDEVLALLRKRHDMTVVQERDYITHMKSSGYRSYHVVV | 123 |
| | | + L + +QD+AGLRI+ QFV+D++ V+ L+R R D +V+ERDY+ K SGYRSYH+V+ | |
| Sbjct: | 63 | DQLEEKMQDLAGLRIVTQFVEDIETVVQLIRSRSDFEIVEERDYVEQKKDSGYRSYHLVL | 122 |
| Query: | 124 | EYPVDTIDGQKKVLAEIQIRTLAMNFWATIEHSLNYKYQGDFPEEIKQRLEKTAKIALEL | 183 |
| | | YPV TI+G+K++L E+QIRTLAMNFWATIEHSLNYKY G+ P IK RL++ A+ A L | |
| Sbjct: | 123 | RYPVQTIEGEKRILVELQIRTLAMNFWATIEHSLNYKYSGEIPLNIKTRLQRAAEAAFRL | 182 |
| Query: | 184 | DEEMRKIREDIREAQLLFDPLNRKLSDG | 211 |
| | | DEEM +IR+++REAQ + + RK G | |
| Sbjct: | 183 | DEEMSQIRDEVREAQQI---ITRKQEQG | 207 |

[9329] A related DNA sequence was identified in S. pyogenes <SEQ ID 5255> which encodes the amino acid sequence <SEQ ID 5256>. Analysis of this protein sequence reveals the following:

Possible site: 17
>>> Seems to have no N-terminal signal sequence
----- Final Results -----
bacterial cytoplasm --- Certainty = 0.4064 (Affirmative) < succ>
bacterial membrane --- Certainty = 0.0000 (Not Clear) < succ>
bacterial outside --- Certainty = 0.0000 (Not Clear) < succ>

[9330] An alignment of the GAS and GBS proteins is shown below.

| Identities = 196/223 (87%), Positives = 213/223 (94%) | | | |
|---|---|---|---|
| Query: | 1 | MSMDWETFLDPYIQTVGELKIKLRGIRKQFRKQNRHSPIEFVTGRVKSVESIQEKMVLRG | 60 |
| | | M++DWE FLDPYIQTVGELKIRLRGIRKQ+RKQNR+SPIEFVTGRVKS+ESI+EKM+LRG | |
| Sbjct: | 1 | MTLDWEEFLDPYIQTVGELKIKLRGIRKQYRKQNRYSPIEFVTGRVKSIESIKEKMILRG | 60 |
| Query: | 61 | ISEENLAQDLQDIAGLRIMVQFVDDVDEVLALLRKRHDMTVVQERDYITHMKSSGYRSYH | 120 |
| | | + EEN+AQD+QDIAGLRIMVQFVDDV+EVLALLR+R DMT+V ERDYI +MKSSGYRSYH | |
| Sbjct: | 61 | VIEENIAQDIQDIAGLRIMVQFVDDVEEVLALLRQRQDMTIVYERDYIRNMKSSGYRSYH | 120 |
| Query: | 121 | VVVEYPVDTIDGQKKVLAEIQIRTLAMNFWATIEHSLNYKYQGDFPEEIKQRLEKTAKIA | 180 |
| | | VVVEYPVDTI+GQKKVLAEIQIRTLAMNFWATIEHSLNYKY GDFPEEIK+RLE TAKIA | |
| Sbjct: | 121 | VVVEYPVDTIEGQKKVLAEIQIRTLAMNFWATIEHSLNYKYGGDFPEEIKKRLEVTAKIA | 180 |
| Query: | 181 | LELDEEMRKIREDIREAQLLFDPLNRKLSDGVGNSDDTDEFYR | 223 |
| | | LELDEEMRKIREDIREAQLLFDP+ R LSDGVGNSDDTDE YR | |
| Sbjct: | 181 | LELDEEMRKIREDIREAQLLFDPVTRNLSDGVGNSDDTDELYR | 223 |

[9331] Based on this analysis, it was predicted that these proteins and their epitopes could be useful antigens for vaccines or diagnostics.

### EXAMPLE 1693

[9332] A DNA sequence (GBSx1797) was identified in S. agalactiae <SEQ ID 5257> which encodes the amino acid sequence <SEQ ID 5258>. Analysis of this protein sequence reveals the following:

Possible site: 33
>>> Seems to have no N-terminal signal sequence
----- Final Results -----
bacterial cytoplasm --- Certainty = 0.2266 (Affirmative) < succ>
bacterial membrane --- Certainty = 0.0000 (Not Clear) < succ>
bacterial outside --- Certainty = 0.0000 (Not Clear) < succ>

[9333] The protein has homology with the following sequences in the GENPEPT database.

| >GP:CAB13015 GB:Z99110 yjbK [Bacillus subtilis] | | | |
|---|---|---|---|
| Identities = 63/184 (34%), Positives = 99/184 (53%), Gaps = 10/184 (5%) | | | |
| Query: | 4 | LEIEYKTLLNKDEFNRLTSLFSHVQP--ITQTNYYFDTETFEMKAHRMSLRIRTLPNRAE | 61 |
| | | +EIE+K +L K EF + S + Q N+YFDT++F +K +LRIR + | |
| Sbjct: | 5 | IEIEFKNMLTKQEFKNIASALQLTEKDFTDQKNHYFDTDSFALKQKHAALRIRRKNGKYV | 64 |
| Query: | 62 | LTLKIPREVGNLEHNHDLT--LEEAKYIVKNGQFPEDTEIASLILEKGVDPTKLAVFGQL | 119 |
| | | LTLK P +VG LE + L+ + A + V G P ++ L +D + FG L | |
| Sbjct: | 65 | LTLKEPADVGLLETHQQLSEVSDLAGFSVPEG--PVKDQLHKL----QIDTDAIQYFGSL | 118 |
| Query: | 120 | TTTRREMETSIGLMALDSNIYADIKDYELELEVKQPKQGKRDFDQFLKENNINFKYAKSK | 179 |
| | | T R E ET GL+ LD + Y + +DYE+E E +G++ F++ L++ +I + K+K | |
| Sbjct: | 119 | ATNRAEKETEKGLIVLDHSRYLNKEDYEIEFEAADWHEGRQAFEKLLQQFSIPQRETKNK | 178 |
| Query: | 180 | VARF | 183 |
| | | + RF | |
| Sbjct: | 179 | ILRF | 182 |

[9334] A related DNA sequence was identified in S. pyogenes <SEQ ID 5259> which encodes the amino acid sequence <SEQ ID 5260>. Analysis of this protein sequence reveals the following:

Possible site: 59
>>> Seems to have no N-terminal signal sequence
----- Final Results -----
bacterial cytoplasm --- Certainty = 0.3470 (Affirmative) < succ>
bacterial membrane --- Certainty = 0.0000 (Not Clear) < succ>
bacterial outside --- Certainty = 0.0000 (Not Clear) < succ>

[9335] An alignment of the GAS and GBS proteins is shown below.

| Identities = 114/188 (60%), Positives = 139/188 (73%), Gaps = 1/188 (0%) | | | |
|---|---|---|---|
| Query: | 1 | MTHLEIEYKTLLNKDEFNRLTSLFSHVQPITQTNYYFDTETFEMKAHRMSLRIRTLPNRA | 60 |
| | | MT+LEIEYKTLL K+E+NRL S HV P+TQTNYY DT+ F++KA++MSLRIRT N A | |
| Sbjct: | 1 | MTNLEIEYKTLLTKNEYNRLLSQMKHVTPVTQTNYYIDTKAFDLKANKMSLRIRTFVNSA | 60 |
| Query: | 61 | ELTLKIPREVGNLEHNHDLTLEEAKYIVKNGQFPEDTEIASLILEKGVDPTKLAVFGQLT | 120 |
| | | ELTLK+P +VGN E+N L LE+AK ++K+G PE T + +I+ KG+ P+ L FG LT | |
| Sbjct: | 61 | ELTLKVPEKVGNREYNVPLFLEQAKDMIKHGNLPESTAL-DIIISKGIKPSALVTFGNLT | 119 |
| Query: | 121 | TTRREMETSIGLMALDSNIYADIKDYELELEVKQPKQGKRDFDQFLKENNINFKYAKSKV | 180 |
| | | T RRE IG +ALD N+YA+ KDYELELEV QGK DFD FL E +I FKYAKSKV | |
| Sbjct: | 120 | TVRRETVIPIGKLALDYNLYANTKDYELELEVSDALQGKIDFDSFLSEYHITFKYAKSKV | 179 |
| Query: | 181 | ARFSATLK | 188 |
| | | AR TLK | |
| Sbjct: | 180 | ARCINTLK | 187 |

[9336] Based on this analysis, it was predicted that these proteins and their epitopes could be useful antigens for vaccines or diagnostics.

### EXAMPLE 1694

[9337] A DNA sequence (GBSx1798) was identified in S. agalactiae <SEQ ID 5261> which encodes the amino acid sequence <SEQ ID 5262>. Analysis of this protein sequence reveals the following:

Possible site: 30
>>> Seems to have no N-terminal signal sequence
----- Final Results ----
bacterial cytoplasm --- Certainty = 0.1815 (Affirmative) < succ>
bacterial membrane --- Certainty = 0.0000 (Not Clear) < succ>
bacterial outside --- Certainty = 0.0000 (Not Clear) < succ>

[9338] The protein has no significant homology with any sequences in the GENPEPT database.

[9339] No corresponding DNA sequence was identified in S. pyogenes.

[9340] Based on this analysis, it was predicted that this protein and its epitopes, could be useful antigens for vaccines or diagnostics.

### EXAMPLE 1695

[9341] A DNA sequence (GBSx1799) was identified in S. agalactiae <SEQ ID 5263> which encodes the amino acid sequence <SEQ ID 5264>. Analysis of this protein sequence reveals the following:

Possible site: 38
>>> Seems to have no N-terminal signal sequence
----- Final Results -----
bacterial cytoplasm --- Certainty = 0.0621 (Affirmative) < succ>
bacterial membrane --- Certainty = 0.0000 (Not Clear) < succ>
bacterial outside --- Certainty = 0.0000 (Not Clear) < succ>

[9342] The protein has no significant homology with any sequences in the GENPEPT database.

[9343] No corresponding DNA sequence was identified in S. pyogenes.

[9344] Based on this analysis, it was predicted that this protein and its epitopes, could be useful antigens for vaccines or diagnostics.

### EXAMPLE 1696

[9345] A DNA sequence (GBSx1800) was identified in S. agalactiae <SEQ ID 5265> which encodes the amino acid sequence <SEQ ID 5266>. This protein is predicted to be ribose-phosphate pyrophosphokinase (prsA). Analysis of this protein sequence reveals the following:

Possible site: 22
>>> Seems to have no N-terminal signal sequence
----- Final Results -----
bacterial cytoplasm --- Certainty = 0.3369 (Affirmative) < succ>
bacterial membrane --- Certainty = 0.0000 (Not Clear) < succ>
bacterial outside --- Certainty = 0.0000 (Not Clear) < succ>

[9346] The protein has homology with the following sequences in the GENPEPT database.

| >GP:CAB11827 GB:Z99104 phosphoribosyl pyrophosphate synthetase | | | |
|---|---|---|---|
| [Bacillus subtilis] | | | |
| Identities = 166/319 (52%), Positives = 231/319 (72%), Gaps = 4/319 (1%) | | | |
| Query: | 1 | MAEQYADKQIKLFSLTANREIAEKISQASGIPLGKMSSRQFSDGEIMINIEETVRGDDIY | 60 |
| | | M+ QY DK +K+FSL +N E+A++I+ G+ LGK S +FSDGE+ INIEE++RG D Y | |
| Sbjct: | 1 | MSNQYGDKNLKIFSLNSNPELAKEIADIVGVQLGKCSVTRFSDGEVQINIEESIRGCDCY | 60 |
| Query: | 61 | IIQSTSFPVNDNLWELLIMIDACKRASANTVNIVVPYFGYSRQDRIAASREPITAKLVAN | 120 |
| | | IIQSTS PVN+++ ELLIM+DA KRASA T+NIV+PY+GY+RQDR A SREPITAKL AN | |
| Sbjct: | 61 | IIQSTSDPVNEHIMELLIMVDALKRASAKTINIVIPYYGYARQDRKARSREPITAKLFAN | 120 |
| Query: | 121 | MLVKAGVDRVLTLDLHAVQVQGFFDIPVDNLFTVPLFAEHYNQLGLSGEDVVVVSPKNSG | 180 |
| | | +L AG RV+ LDLHA Q+QGFFDIP+D+L VP+ E++ G + ED+V+VSP + G | |
| Sbjct: | 121 | LLETAGATRVIALDLHAPQIQGFFDIPIDHLMGVPILGEYFE--GKNLEDIVIVSPDHGG | 178 |
| Query: | 181 | IKRARSLAEYLDSPIAIIDYAQD-DSEREEGYIIGEVEGKKAIIIDDILNTGKTFAEAAK | 239 |
| | | + RAR LA+ L +PIAIID + + E I+G +EGK AI+IDDI++T T AA | |
| Sbjct: | 179 | VTRARKLADRLKAPIAIIDKRRPRPNVAEVMNIVGNIEGKTAILIDDIIDTAGTITLAAN | 238 |
| Query: | 240 | ILERGGATEIYAVASHGLFAGGAADILESAPIREIIVTDSV-LSKERIPSNIKYLTASHL | 298 |
| | | L GA E+YA +H + +G A + + ++ I+E++VT+S+ L +E+ K L+ L | |
| Sbjct: | 239 | ALVENGAKEVYACCTHPVLSGPAVERINNSTIKELVVTNSIKLPEEKKIERFKQLSVGPL | 298 |
| Query: | 299 | IADAIIRIHERKPLSPLFS | 317 |
| | | +A+AIIR+HE++ +S LFS | |
| Sbjct: | 299 | LAEAIIRVHEQQSVSYLFS | 317 |

[9347] A related DNA sequence was identified in S. pyogenes <SEQ ID 5267> which encodes the amino acid sequence <SEQ ID 5268>. Analysis of this protein sequence reveals the following:

```
Possible site: 22
>>> Seems to have no N-terminal signal sequence
----- Final Results -----
                            bacterial cytoplasm --- Certainty = 0.1830 (Affirmative) < succ>
                              bacterial membrane --- Certainty = 0.0000 (Not Clear) < succ>
                                bacterial outside --- Certainty = 0.0000 (Not Clear) < succ>
```

[9348] An alignment of the GAS and GBS proteins is shown below.

| Identities = 278/324 (85%), Positives = 305/324 (93%) | | | |
|---|---|---|---|
| Query: | 1 | MAEQYADKQIKLFSLTANREIAEKISQASGIPLGKNSSRQFSDGEIMINIEETVRGDDIY | 60 |
| | | M E+YADKQIKLFSLT+N IAEKI++A+GIPLGKMSSRQFS+GEIMINIEETVRGDDIY | |
| Sbjct: | 1 | MTERYADKQIKLFSLTSNLPIAEKIAKAAGIPLGKMSSRQFSNGEIMINIEETVRGDDIY | 60 |
| Query: | 61 | IIQSTSFPVNDNLWELLINIDACKRASANTVNIVVPYFGYSRQDRIAASREPITAKLVAN | 120 |
| | | IIQSTSFPVNDNLWELLIMIDACKRASANTVNIV+PYFGYSRQDR+A REPITAKLVAN | |
| Sbjct: | 61 | IIQSTSFPVNDNLWELLIMIDACKRASANTVNIVLPYFGYSRQDRVAKPREPITAKLVAN | 120 |
| Query: | 121 | MLVKAGVDRVLTLDLHAVQVQGFFDIPVDNLFTVPLFAEHYNQLGLSGEDVVVVSPKNSG | 180 |
| | | ML KAG+DRV+TLDLHAVQVQGFFDIPVDNLFTVPLFAE Y++LGLSG DVVVVSPKNSG | |
| Sbjct: | 121 | MLTKAGIDRVVTLDLHAVQVQGFFDIPVDNLFTVPLFAERYSKLGLSGSDVVVVSPKNSG | 180 |
| Query: | 181 | IKRARSLAEYLDSPIAIIDYAQDDSEREEGYIIGEVEGKKAIIIDDILNTGKTFAEAAKI | 240 |
| | | IKRARSLAEYLDSPIAIIDYAQDDSERE+GYIIG+V GKKAI+IDDILNTGKTFAEAAKI | |
| Sbjct: | 181 | IKRARSLAEYLDSPIAIIDYAQDDSEREQGYIIGDVSGKKAILIDDILNTGKTFAEAAKI | 240 |
| Query: | 241 | LERGGATEIYAVASHGLFAGGAADILESAFIREIIVTDSVLSKERIPSNIKYLTASHLIA | 300 |
| | | LER GAT+ YAVASHGLFAGGAAD+LE+API+EIIVTDSV +K R+P N+ YL+AS LIA | |
| Sbjct: | 241 | LERSGATDTYAVASHGLFAGGAADVLETAPIKEIIVTDSVKTKNRVPENVTYLSASDLIA | 300 |
| Query: | 301 | DAIIRIHERKPLSPLFSYRSDKED | 324 |
| | | +AIIRIHER+PLSPLFSY+ K+ | |
| Sbjct: | 301 | EAIIRIHERRPLSPLFSYQPKGKN | 324 |

[9349] Based on this analysis, it was predicted that these proteins and their epitopes could be useful antigens for vaccines or diagnostics.

### EXAMPLE 1697

[9350] A DNA sequence (GBSx1801) was identified in S. agalactiae <SEQ ID 5269> which encodes the amino acid sequence <SEQ ID 5270>. This protein is predicted to be Fe—S cluster formation protein. Analysis of this protein sequence reveals the following:

```
Possible site: 16
>>> Seems to have no N-terminal signal sequence
----- Final Results -----
                            bacterial cytoplasm --- Certainty = 0.1981 (Affirmative) < succ>
                              bacterial membrane --- Certainty = 0.0000 (Not Clear) < succ>
                                bacterial outside --- Certainty = 0.0000 (Not Clear) < succ>
```

[9351] The protein has homology with the following sequences in the GENPEPT database.

| >GP:BAB04979 GB:AP001511 Fe—S cluster formation protein | | | |
|---|---|---|---|
| [Bacillus halodurans] | | | |
| Identities = 174/373 (46%), Positives = 237/373 (62%), Gaps = 6/373 (1%) | | | |
| Query: | 3 | IYLDNAATTALTPSVIEKMTNVMTSHYGNPSSIHTFGRQANQLLRECRQIIAEYLNVNSR | 62 |
| | | IYLD+AAT+ + P VI+M +GNPSSIH FGR+A Q + E R IA L + | |
| Sbjct: | 4 | IYLDHAATSPVHPEVIQAMLPYYEEQFGNPSSIHQFGRRARQGVDEARGTIARLLQADPS | 63 |
| Query: | 63 | EIIFTSGGTESNNTAIKGYALANQLKGKHIITSEIEHHSVLHTMTYLSSRFGFDITYLKP | 122 |
| | | E IFTSGGTE++N AI GYA ++ KG HIITS++EHH+VLH L E GF++TY+ | |
| Sbjct: | 64 | EFIFTSGGTEADNLAIFGYAYQHRGKGNHIITSQVEHHAVLHACQEL-EHQGFEVTYVPV | 122 |
| Query: | 123 | NH-GQITAKDVQEALRDDTIMVSLMFVNNETGDFLPIQEIGQLLRNHQAVFHVDAVQVFS | 181 |
| | | + G+++ +DV++ALRDDTI+V+LM+ NNE G PI EIG LL++HQAV H DAVQ F | |
| Sbjct: | 123 | DQTGRVSVEDVRQALRDDTILVTLMYGNNEVGTIQPIAEIGALLQDHQAVLHTDAVQAFG | 182 |
| Query: | 182 | KMELDPHSLGIDFLAASAHKFHGPKGVGILYCAPH-HFDSLLHGGDQEEKRRASTENIIG | 240 |
| | | + ++ L +D L+ SAHK +GPKGVG+LY L+GG+QE K+RA TEN+ | |
| Sbjct: | 183 | AISIELDHLPVDMLSVSAHKINGPKGVGLLYVRDGIVLKPALYGGEQERKKRAGTENVAA | 242 |
| Query: | 241 | IAGMSQALTDATTNTLKNWTHISQLRTTFLDAISD--LDFYLNNGQDC-LPHVLNIGFPG | 297 |
| | | I G ++A+ A N + TF D +F+N Q LPH+ N +FPG | |
| Sbjct: | 243 | IIGFAKAVEIAIANREERQKAYFDYCQTFFDQFQQEGVQFVMNGHQTWRLPHIFNVSFPG | 302 |
| Query: | 298 | QNNGLLLTQLDLAGFAVSTGSACTAGTVEPSHVLTSLYGANSPRLNESIRISFSELNTQE | 357 |
| | | + LL LDLAG A S+GSACTAG++EPSHVL +++G++S + +R SF NT+E | |
| Sbjct: | 303 | VHVEALLVNLDLAGIAASSGSACTAGSIEPSHVLVAHHGSDSELVTSGVRFSFGLGNTKE | 362 |
| Query: | 358 | EILELAKTLRKII | 370 |
| | | + AK KI+ | |
| Sbjct: | 363 | HVQWAAKETAKIV | 375 |

[9352] A related DNA sequence was identified in S. pyogenes <SEQ ID 5271> which encodes the amino acid sequence <SEQ ID 5272>. Analysis of this protein sequence reveals the following:

```
Possible site: 19
>>> Seems to have no N-terminal signal sequence
----- Final Results -----
                            bacterial cytoplasm --- Certainty = 0.1477 (Affirmative) < succ>
                              bacterial membrane --- Certainty = 0.0000 (Not Clear) < succ>
                                bacterial outside --- Certainty = 0.0000 (Not Clear) < succ>
```

[9353] An alignment of the GAS and GBS proteins is shown below.

| Identities = 235/370 (63%), Positives = 285/370 (76%) | | | |
|---|---|---|---|
| Query: | 2 | MIYLDNAATTALTPSVIEKMTNVMTSNYGNPSSIHTFGRQANQLLRECRQIIAEYLNVNS | 61 |
| | | M Y DNAATT L+P+VI MT M N+GNPSSIH +GR+AN++LRECRQ IA L + | |
| Sbjct: | 1 | MTYFDNAATTPLSPNVIRAMTAAMQDNFGNPSSIHFYGRRANKILRECRQAIARNLGASE | 60 |
| Query: | 62 | REIIFTSGGTESNNTAIKGYALANQLKGKHIITSEIEHHSVLHTMTYLSERFGWDITYLK | 121 |
| | | ++II TSGGTESMN AIKGYALA+Q KGKH+IT+ IEHHSVLHTM YL ERFGF++TYL | |
| Sbjct: | 61 | QQIIVTSGGTESNNMAIKGYALAHQAKGKHLITTTIEHHSVLHTMAYLEERFGFEVTYLP | 120 |
| Query: | 122 | PNHGQITAKDVQEALRDDTIMVSLMFVHNETGDFLPIQEIGQLLRNHQAVFHVDAVQVFS | 181 |
| | | +GQI D+++ALRDDTI+VS+M+ NNETGD LPI++IG LL++HQA FHVDAVQ | |
| Sbjct: | 121 | CQNGQINLSDLKQALRDDTILVSIMYANNETGDLLPIKDIGNLLKDHQAAFHVDAVQAVG | 180 |
| Query: | 182 | KMELDFHSLGIDFLAASAHKFHGPKGVGILYCAPHHFDSLLHGGDQEEKRRASTENIIGI | |
| | | K+++ P LGIDFL+ASAHKFHGPKG G LY D LLHGGDQE KRRASTEH++GI | |
| Sbjct: | 181 | KLKIIPSELGIDFLSASAHKFHGPKGCGFLYSNGQPIDPLLHGGDQEGKRRASTENMLGI | 240 |
| Query: | 242 | AGMSQALTDATTNTLKNWTHISQLRTTFLDAISDLDFYLNNGQDCLPHVLHIGFPGQNNG | 301 |
| | | GM+QALTDA T ++ HI LR + + L +Y+N G LPHVLNIGF G N | |
| Sbjct: | 241 | IGMAQALTDANTCLDQSTDHIISLRHHLISLLEGLPYYINQGTHYLPHVLNIGFLGYQNT | 300 |
| Query: | 302 | LLLTQLDLAGFAVSTGSACTAGTVEPSHVLTSLYGANSPRLNESIRISFSELNTQEEILE | 361 |
| | | +LLTQLDLAG AVSTGSACTAG V PSHVL + YG +S RL ESIRISFS+ N+ E++ + | |
| Sbjct: | 301 | ILLTQLDLAGIAVSTGSACTAGAVNPSHVLAAYYGDDSSRLKESIRISFSDQNSIEDVNQ | 360 |
| Query: | 362 | LAKTLRKIIG | 371 |
| | | LA+TL+ I+G | |
| Sbjct: | 361 | LAQTLKNILG | 370 |

[9354] Based on this analysis, it was predicted that these proteins and their epitopes could be useful antigens for vaccines or diagnostics.

### EXAMPLE 1698

[9355] A DNA sequence (GBSx1802) was identified in S. agalactiae <SEQ ID 5273> which encodes the amino acid sequence <SEQ ID 5274>. Analysis of this protein sequence reveals the following:

```
Possible site: 43
>>> Seems to have no N-terminal signal sequence
----- Final Results -----
                            bacterial cytoplasm --- Certainty = 0.2753(Affirmative) < succ>
                              bacterial membrane --- Certainty = 0.0000(Not Clear) < succ>
                                bacterial outside --- Certainty = 0.0000(Not Clear) < succ>
```

[9356] The protein has homology with the following sequences in the GENPEPT database.

| >GP:CAB12416 GB:Z99107 ydiH [Bacillus subtilis] | | | |
|---|---|---|---|
| Identities = 96/202 (47%), Positives = 140/202 (68%), Gaps = 4/202 (1%) | | | |
| Query: | 7 | IPKATAKRLSLYYRIFKRFNTDGIEKASSKQIADALGIDSATVRRDFSYFGELGRRGFGY | 66 |
| | | IP+ATAKRL LYYR K + G ++ SS +++DA+ +DSAT+RRDFSYFG LG++G+GY | |
| Sbjct: | 8 | IPQATAKRLPLYYRFLKNLHASGKQRVSSAELSDAVKVDSATIRRDFSYFGALGKKGYGY | 67 |
| Query: | 67 | DVKKLMNFFAEILNDHSTTNVMLVGCGNIGRALLHYRFHDRNKNQISHAFDLDSNDLVGK | 126 |
| | | +V L++FF + L+ T+V+L+G GN+G A LHY F N +ISMAFD++ + + | |
| Sbjct: | 68 | NVDYLLSFFRKTLDQDEMTDVILIGVGNLGTAFLHYNFTKNNNTKISMAFDINESKI--G | 125 |
| Query: | 127 | TTEDGIPVYGISTINDHLIDSDIETAILTVPSTEAQEVADILVKAGIKGILSFSPVHLTL | 186 |
| | | T G+PVY + + H+ D + AILTVP+ AQ + D LV GIKGIL+F+P L + | |
| Sbjct: | 126 | TEVGGVPVYNLDDLEQHVKDESV--AILTVPAVAAQSITDRLVALGIKGILNFTPARLNV | 183 |
| Query: | 187 | PKDIIVQYVDLTSELQTLLYFM | 208 |
| | | P+ I + ++DL ELQ+L+YF+ | |
| Sbjct: | 184 | PEHIRIHHIDLAVELQSLVYFL | 205 |

[9357] A related DNA sequence was identified in S. pyogenes <SEQ ID 5275> which encodes the amino acid sequence <SEQ ID 5276>. Analysis of this protein sequence reveals the following:

```
Possible site: 43
>>> Seems to have no N-terminal signal sequence
----- Final Results -----
                            bacterial cytoplasm --- Certainty = 0.2313 (Affirmative) < succ>
                              bacterial membrane --- Certainty = 0.0000 (Not Clear) < succ>
                                bacterial outside --- Certainty = 0.0000 (Not Clear) < succ>
```

[9358] An alignment of the GAS and GBS proteins is shown below.

| Identities = 167/210 (79%), Positives = 189/210 (89%) | | | |
|---|---|---|---|
| Query: | 1 | MINDKSIPKATAKRLSLYYRIFRRFNTDGIEKASSKQIADALGIDSATVRRDFSYFGELG | 60 |
| | | +++DKSIPKATAKRLSLYYRIFKRF+ D +EKASSKQIADA+GIDSATVRRDFSYFGELG | |
| Sbjct: | 1 | VVIDKSIPKATAKRLSLYYRIFKRFHADQVEKASSKQIADAMGIDSATVRRDFSYFGELG | 60 |
| Query: | 61 | RRGFGYDVKKLMNFFAEILNDHSTTNVMLVGCGNIGRALLHYRFHDRNKMQISMAFDLDS | 120 |
| | | RRGFGYDV KLMNFFA++LNDHSTTNV+LVGCGNIGRALLHYRFHDRNKMQI+M FD D | |
| Sbjct: | 61 | RRGFGYDVTKLMNEFADLLNDHSTTNVILVGCGNIGRALLHYRFHDRNKMQIAMGFDTDD | 120 |
| Query: | 121 | NDLVGKTTEDGIPVYGISTINDHLIDSDIETAILTVPSTEAQEVADILVKAGIKGILSFS | 180 |
| | | N LVG T D IPV+GIS++ + + ++DIETAILTVPS AQEV D L++AGIKGILSF+ | |
| Sbjct: | 121 | NALVGTKTADNIPVHGISSVKERIANTDIETAILTVPSIHAQEVTDQLIEAGIKGILSWA | 180 |
| Query: | 181 | PVHLTLPKDIIVQYVDLTSELQTLLYFMNQ | 210 |
| | | PVNL +PK +IVQ VDLTSELQTLLYFMNQ | |
| Sbjct: | 181 | PVNLQVPKGVIVQSVDLTSELQTLLYFMNQ | 210 |

[9359] Based on this analysis, it was predicted that these proteins and their epitopes could be useful antigens for vaccines or diagnostics.

### EXAMPLE 1699

[9360] A DNA sequence (GBSx1803) was identified in S. agalactiae <SEQ ID 5277> which encodes the amino acid sequence <SEQ ID 5278>. Analysis of this protein sequence reveals the following:

```
Possible site: 43
>>> Seems to have no N-terminal signal sequence
----- Final Results -----
                            bacterial cytoplasm --- Certainty = 0.2966 (Affirmative) < succ>
                              bacterial membrane --- Certainty = 0.0000 (Not Clear) < succ>
                                bacterial outside --- Certainty = 0.0000 (Not Clear) < succ>
```

[9361] A related GBS nucleic acid sequence <SEQ ID 9847> which encodes amino acid sequence <SEQ ID 9848> was also identified.

[9362] The protein has homology with the following sequences in the GENPEPT database.

| >GP:CAB14764 GB:Z99118 similar to DNA repair protein [Bacillus subtilis] | | | |
|---|---|---|---|
| Identities = 90/210 (42%), Positives = 136/210 (63%) | | | |
| Query: | 24 | PRERLVDLGADRLSNQELLAILLRTGIKEKPVLEISTQILENISSLADWGQLSLQELQSI | 83 |
| | | PRERL+ +GA+ L+N ELLAILLRTG K + VL++S ++L + L + S++EL SI | |
| Sbjct: | 19 | PRERLLKVGAENLANHELLAILLRTGTKHESVLDLSNRLLRSFDGLRLLKEASVEELSSI | 78 |
| Query: | 84 | KGIGQVKSVEIKAMLELAKRIHKAEYDRKEQILSSEQLARKMNLELGDKKQEHLVAIYMD | 143 |
| | | GIG VK+++I A +EL RIHK + I S E A +M ++ QEH V +Y++ | |
| Sbjct: | 79 | PGIGMVKAIQILAAVELGSRIHKLANEEHFVIRSPEDGANLVMEDMRFLTQEHFVCLYLN | 138 |
| Query: | 144 | TQNRIIEQRTIFIGTVRRSVAEPREILHYACKNMATSLIIIHNHPSGSPKPSESDLSFTK | 203 |
| | | T+N++I +RT+FIG++ S+ PRE+ A K A S I +HNHPSG P PS D+ T+ | |
| Sbjct: | 139 | TKNQVIHKRTVFIGSLNSSIVHPREVFKEAFKRSAASFICVHNHPSGDPTPSREDIEVTR | 198 |
| Query: | 204 | KIKRSCDHLGIVCLDHIIVGKNKYYSFREE | 233 |
| | | ++ + +GI LDH+++G K+ S +E+ | |
| Sbjct: | 199 | RLFECGNLIGIELLDHLVIGDKKFVSLKEK | 228 |

[9363] A related DNA sequence was identified in S. pyogenes <SEQ ID 5279> which encodes the amino acid sequence <SEQ ID 5280>. Analysis of this protein sequence reveals the following:

```
Possible site: 59
>>> Seems to have no N-terminal signal sequence
----- Final Results -----
                            bacterial cytoplasm --- Certainty = 0.3307 (Affirmative) < succ>
                              bacterial membrane --- Certainty = 0.0000 (Not Clear) < succ>
                                bacterial outside --- Certainty = 0.0000 (Not Clear) < succ>
```

[9364] An alignment of the GAS and GBS proteins is shown below.

| Identities = 145/225 (64%), Positives = 182/225 (80%) | | | |
|---|---|---|---|
| Query: | 12 | MYHIELKKEALLPRERLVDLGADRLSNQELLAILLRTGIKEKPVLEISTQILENISSLAD | 71 |
| | | MY I+ +PRERL+ LGA LSNQELLAILLRTG KEK VLE+S+ +L ++ SLAD | |
| Sbjct: | 1 | MYSIKCDDNKAMPRERLMRLGAESLSNQELLAILLRTGNKEKEVLELSSYLLSHLDSLAD | 60 |
| Query: | 72 | FGQLSLQELQSIKGIGQVKSVEIKAMLELAKRIHKAEYDRKEQILSSEQLARKMMLELGD | 131 |
| | | F ++SLQELQ + GIG+VK++EIKAM+EL RI + + +L+S Q+A KMM LGD | |
| Sbjct: | 61 | FKKMSLQELQHLAGIGKVKAIEIKAMIELVSRILATDKTLTDSVLTSVQVAEKMMAALGD | 120 |
| Query: | 132 | KKQEHLVAIYMDTQNRIIEQRTIFIGTVRRSVAEPREILHYACKNMATSLIIIHNHPSGS | 191 |
| | | KKQEELV +Y+D QNRIIE++TIFIGTVRRS+AEPREIL+YACKNMATSLI+IHNHPSG+ | |
| Sbjct: | 121 | KKQEHLVVLYLDNQNRIIEEKTIFIGTVRRSLAEPREILYYACKNMATSLIVIHNHPSGN | 180 |
| Query: | 192 | PKPSESDLSFTKKIKRSCDHLGIVCLDHIIVGKNKYYSFREEADI | 236 |
| | | +PS +D FT+KIKRSC+ LGI+CLDHIIV YYSFRE++ + | |
| Sbjct: | 181 | IEPSSNDYGFTEKIKRSCEDLGIICLDHIIVSYKDYYSFREKSTL | 225 |

[9365] Based on this analysis, it was predicted that these proteins and their epitopes could be useful antigens for vaccines or diagnostics.

### EXAMPLE 1700

[9366] A DNA sequence (GBSx1804) was identified in S. agalactiae <SEQ ID 5281> which encodes the amino acid sequence <SEQ ID 5282>. This protein is predicted to be a permease. Analysis of this protein sequence reveals the following:

```
Possible site: 29
>>> Seems to have an uncleavable N-term signal seq
INTEGRAL Likelihood = −7.86 Transmembrane 258-274 (255-290)
INTEGRAL Likelihood = −7.32 Transmembrane  89-105 (79-109)
INTEGRAL Likelihood = −4.88 Transmembrane 176-192 (170-194)
INTEGRAL Likelihood = −4.78 Transmembrane 339-355 (326-359)
INTEGRAL Likelihood = −4.57 Transmembrane 237-253 (236-257)
INTEGRAL Likelihood = −3.98 Transmembrane  39-55  (38-59)
INTEGRAL Likelihood = −3.40 Transmembrane 292-308 (282-308)
INTEGRAL Likelihood = −1.38 Transmembrane 317-333 (317-333)
INTEGRAL Likelihood = −0.27 Transmembrane  8-24  (8-24)
----- Final Results -----
                            bacterial membrane --- Certainty = 0.4142 (Affirmative) < succ>
                              bacterial outside --- Certainty = 0.0000 (Not Clear) < succ>
                          bacterial cytoplasm --- Certainty = 0.0000 (Not Clear) < succ>
```

[9367] The protein has homology with the following sequences in the GENPEPT database.

| >GP:AAC05771 GB:AF051356 putative permease [Streptococcus mutans] | | | |
|---|---|---|---|
| Identities = 88/366 (24%), Positives = 175/366 (47%), Gaps = 27/366 (7%) | | | |
| Query: | 3 | FEKRQVYYVVITFAICYAIQAYW---GAVSNILTTLHKAIF-PFLNGAGIAYIINIVMSV | 58 |
| | | F+ ++++ + + I W G++ N ++ K F PFL+G + YI N+++ | |
| Sbjct: | 2 | FKSSKLFFWTVEILLVTLILFIWRQMGSIFNPFFSVAKTFFLPFLLGGFLYYITNPIVTF | 61 |
| Query: | 59 | YERLYIKLFKGSRLLMAIKRSVSMILSYATFIGLIVWLFSIVIPDLISSLSSLLVIDTGA | 118 |
| | | E + IKR + L +A + L+V+ + +IP+LI+ L+ L+ | |
| Sbjct: | 62 | LENRF-----------KIKRIWGITLIFAVLLSLLVFSITSLIPNLINQLTDLISASQNI | 110 |
| Query: | 119 | LAKLVNNLNENKQISEVLNYMGTDKDLVSTLSGYSQQILKQVLSVLTNLLTSVSSIAATL | 178 |
| | | L + NE K N D+ L ++ + + +VL ++ SVSSI + | |
| Sbjct: | 111 | YVGLQDLFNEWKSNPAFKNI-----DIPVLLKQFNLSYVDILTNVLDSVTVSVSSIVYMI | 165 |
| Query: | 179 | LNVFVSFIFS----IYVLANKEQLGRQFNLLIDTYLGSTGKTFHYVRNILHQRFHGFFVS | 234 |
| | | N + + + Y+L +K+ L +L T L + + + +++ + | |
| Sbjct: | 166 | TNTVMILVLTPVILFYLLKDKDGL---MPMLDRTILKNDRHNISQLLNQMNKTISRYISG | 222 |
| Query: | 235 | QTLEANILGSLTVIGMLIFQFPYALTVGVLVAFTALIPVVGAYIGVTIGFILIATESLTE | 294 |
| | | ++A + +IG I YA ++ T +IP VG Y+G+T + + | |
| Sbjct: | 223 | VAIDAAFIFVFALIGYQIMGVQYAFLFALVAGITNVIPYVGPYLGLTPVVLAYVVSDPKK | 282 |
| Query: | 295 | AFLFVLFLILLQQFEGNVIYPKVVGGSIGLPSMWVLMAITIGGALWGILGNLLAVPVAAT | 354 |
| | | + +++++ LQQ +GN++YP+VVG ++ + + +++ + +GG + G++GML+AVP A | |
| Sbjct: | 283 | MIIAIIYIMTLQQIDGNIVYPRVVGSTMKIHPLTINVLLVLGGNIAGLVGMLVAVPAYAI | 342 |
| Query: | 355 | IYQIVK | 360 |
| | | I +IVK | |
| Sbjct: | 343 | IKEIVK | 348 |

[9368] A related DNA sequence was identified in S. pyogenes <SEQ ID 5283> which encodes the amino acid sequence <SEQ ID 5284>. Analysis of this protein sequence reveals the following:

```
Possible site: 55
>>> Seems to have an uncleavable N-term signal seq
INTEGRAL Likelihood = −8.70 Transmembrane  87-103 (83-116)
INTEGRAL Likelihood = −7.27 Transmembrane 178-194 (166-202)
INTEGRAL Likelihood = −6.74 Transmembrane 278-294 (256-297)
INTEGRAL Likelihood = −5.41 Transmembrane 299-315 (295-321)
INTEGRAL Likelihood = −4.46 Transmembrane  14-30  (13-32)
INTEGRAL Likelihood = −3.56 Transmembrane 340-356 (333-366)
INTEGRAL Likelihood = −3.35 Transmembrane 258-274 (256-277)
----- Final Results -----
                            bacterial membrane --- Certainty = 0.4482 (Affirmative) < succ>
                              bacterial outside --- Certainty = 0.0000 (Not Clear) < succ>
                          bacterial cytoplasm --- Certainty = 0.0000 (Not Clear) < succ>
```

[9369] The protein has homology with the following sequences in the databases:

| >GP:AAC05771 GB:AF051356 putative permease [Streptococcus mutans] | | | |
|---|---|---|---|
| Identities = 87/373 (23%), Positives = 168/373 (44%), Gaps = 41/373 (10%) | | | |
| Query: | 10 | FEKKQVFYLVLTFILCYGILANWRNGTAIVTTIYKTS----LPFFYGAAGAYIVNIVMSA | 65 |
| | | F+ ++F+ + +L IL WR +I + + LPF G YI N +++ | |
| Sbjct: | 2 | FKSSKLFFWTVEILLVTLILFIWRQMGSIFNPFFSVAKTFFLPFLLGGFLYYITNPIVTF | 61 |
| Query: | 66 | YEKVYVYIFKDWSHVLKVRRGICLLLAYLTFFILITWIISIVIPDLITSISTLTKFDT-- | 123 |
| | | E + K+KR + L + L+ + I+ +IP+LI ++ L | |
| Sbjct: | 62 | LENRF-----------KIKRIWGITLIFAVLLSLLVFSITSLIPNLINQLTDLISASQNI | 110 |
| Query: | 124 | -ITIQEVVNNLEHNKLLARTIQYIGGDGKLTETIANYSQQLLKQFLTVLTNILTSVTVIA | 182 |
| | | + +Q++ N + N I +Q ++ +LTN+L SVTV | |
| Sbjct: | 111 | YVGLQDLFNEWKSNPAFKNI------------DIPVLLKQFNLSYVDILTNVLDSVTVSV | 158 |
| Query: | 183 | SAIINLFISFVFSL--------YVLASKEDLCRQGNTLVDTYTGKYAKRIHYLLELLHQR | 234 |
| | | S+I+ + + V L Y+L K+ L L T I LL +++ | |
| Sbjct: | 159 | SSIVYMITNTVMILVLTPVILFYLLKDKDGLHPM---LDRTILKNDRHNISQLLNQMNKT | 215 |
| Query: | 235 | FHGFFVSQTLEAMILGSLTASGMFILRLPFAGTIGVLVAFTALIPVIGASIGAAIGFILI | 294 |
| | | + ++A + G I+ + +A ++ T +IP +G +G + | |
| Sbjct: | 216 | ISRYISGVAIDAAFIFVFALIGYQIMGVQYAFLFALVAGITNVIPYVGPYLGLTPVVLAY | 275 |
| Query: | 295 | MTQSMSQAIIFIIFLIILQQIEGNFIYPKVVGGSIGLPANWVLMAITIGASLKGIVGHII | 354 |
| | | + + II II+++ LQQI+GN +YP+VVG ++ + + +++ + +G ++ G+VGM++ | |
| Sbjct: | 276 | VVSDPKKMIIAIIYIMTLQQIDGNIVYPRVVGSTMKIHPLTIMVLLVLGGNIAGLVGMLV | 335 |
| Query: | 355 | AVPLAATLYQVIK | 367 |
| | | AVP A + +++K | |
| Sbjct: | 336 | AVPAYAIIKEIVK | 348 |

[9370] An alignment of the GAS and GBS proteins is shown below.

| Identities = 218/370 (58%), Positives = 291/370 (77%) | | | |
|---|---|---|---|
| Query: | 1 | MKFEKRQVYYVVITFAICYAIQAYWGAVSNILTTLHKAIFPFLMGAGIAYIINIVMSVYE | 60 |
| | | MKFEK+QV+Y+V+TF +CY I A W + I+TT++K PF GA AYI+NIVMS YE | |
| Sbjct: | 8 | MKFEKKQVFYLVLTFILCYGILANWRNGTAIVTTIYKTSLPFFYGAAGAYIVNIVMSAYE | 67 |
| Query: | 61 | RLYIKLFKGSRLLMAIKRSVSMILSYATFIGLIVWLFSIVIPDLISSLSSLLVIDTGALA | 120 |
| | | ++Y+ +FK ++ +KR + ++L+Y TF LI W+ SIVIPDLI+S+S+L DT + | |
| Sbjct: | 68 | KVYVYIFKDWSHVLKVKRGICLLLAYLTPFILITWIISIVIPDLITSISTLTKFDTITIQ | 127 |
| Query: | 121 | KLVNNLNENEQISEVLNYMGTDKDLVSTLSGYSQQILKQVLSVLTNLLTSVSSIAATLLN | 180 |
| | | ++VNNL NK ++ + Y+G D L T++ YSQQ+LKQ L+VLTN+LTSV+ IA+ ++N | |
| Sbjct: | 128 | EVVNNLEHNKLLARTIQYIGGDGKLTETIANYSQQLLKQFLTVLTNILTSVTVIASAIIN | 187 |
| Query: | 181 | VFVSFIFSIYVLANKEQLGRQFNLLIDTYLGSTGKTFHYVRHILHQRFHGFFVSQTLEAM | 240 |
| | | +F+SF+FS+YVLA+KE L RQ N L+DTY G K HY+ +LHQRPHGFFVSQTLEAM | |
| Sbjct: | 188 | LFISFVFSLYVLASKEDLCRQGNTLVDTYTGKYAKRIHYLLELLHQRFHGFFVSQTLEAM | 247 |
| Query: | 241 | ILGSLTVIGMLIFQFPYALTVGVLVAFTALIPVVGAYIGVTIGFILIATESLTEAFLFVL | 300 |
| | | ILGSLT GM I + P+A T+GVLVAFTALIPV+GA IG IGFILI T+S+++A +F++ | |
| Sbjct: | 248 | ILGSLTASGMFILRLPFAGTIGVLVAFTALIPVIGASIGAAIGFILIMTQSMSQAIIFII | 307 |
| Query: | 301 | WLILLQQFEGNVIYPKVVGGSIGLPSMWVLMAITIGGALWGILGMLLAVPVAATIYQIVK | 360 |
| | | FLI+LQQ EGN IYPKVVGGSIGLP+MWVLMAITIG +L GI+GM++AVP+AAT+YQ++K | |
| Sbjct: | 308 | FLIILQQIEGNFIYPKVVGGSIGLPANWVLMAITIGASLKGIVGMIIAVPLAATLYQVIK | 367 |
| Query: | 361 | DHIIKRQTLR | 370 |
| | | D+I KRQ ++ | |
| Sbjct: | 368 | DNIQKRQAIQ | 377 |

[9371] Based on this analysis, it was predicted that these proteins and their epitopes could be useful antigens for vaccines or diagnostics.

### EXAMPLE 1701

[9372] A DNA sequence (GBSx1805) was identified in S. agalactiae <SEQ ID 5285> which encodes the amino acid sequence <SEQ ID 5286>. Analysis of this protein sequence reveals the following:

```
Possible site: 18
>>> Seems to have no N-terminal signal sequence
----- Final Results -----
                            bacterial cytoplasm --- Certainty = 0.1081 (Affirmative) < succ>
                              bacterial membrane --- Certainty = 0.0000 (Not Clear) < succ>
                                bacterial outside --- Certainty = 0.0000 (Not Clear) < succ>
```

[9373] A related GBS nucleic acid sequence <SEQ ID 9849> which encodes amino acid sequence <SEQ ID 9850> was also identified.

[9374] The protein has homology with the following sequences in the GENPEPT database.

| >GP:AAA69226 GB:U29579 6-phospho-beta-glucosidase [Escherichia coli] | | | |
|---|---|---|---|
| Identities = 290/478 (60%), Positives = 369/478 (76%), Gaps = 2/478 (0%) | | | |
| Query: | 2 | MVKQVFPKGFLWGGATAANQCEGAYNVDGRGLANVDVVPTGEDRFAIISGQKKNFDFESG | 61 |
| | | M VFP+ FLWGGA AANQ EGA+ +GL VD++P GE R A+ G +K F + | |
| Sbjct: | 1 | MKMSVFPESFLWGGALAAWQSEGAFREGDKGLTTVDMIPHGEHRMAVKLGLEKRFQLRDD | 60 |
| Query: | 62 | YFYPARESIDFYHHYKEDLALLAEMGFKTYRNSIAWTRIFPKGDELYPNEAGLQFYENIF | 121 |
| | | FYP+ E+ DFYH YKED+AL+AEMGFK +R SIAW+R+FP+GDE+ PN+ G+ FY ++F | |
| Sbjct: | 61 | EFYPSHEATDFYHRYKEDIALMAEMGFKVFRTSIAWSRLFPQGDEITPNQQGIAFYRSVF | 120 |
| Query: | 122 | KECRKYGIEPLVTITHFDCPIYLIKHYGGWRSRKNIGFYERLVRALFTRFKGLVKYWLTF | 181 |
| | | +EC+KYGIEPLVT+ HFD P++L+ YG WR+RK++ F+ R R F F GLVKYWLTF | |
| Sbjct: | 121 | EECKKYGIEPLVTLCHFDVPNHLVTEYGSWRNRKLVEFFSRYARTCFEAFDGLVKYWLTF | 180 |
| Query: | 182 | NEINMILHAPFMGAGLYFEDGENQEQIKYQAAHHELVASAIAVKIAHEVDPNNQIGCMLA | 241 |
| | | NEIN++LH+PF GAGL FE+GENQ+Q+KYQAAHH+LVASA+A KIAHEV+P NQ+GCMLA | |
| Sbjct: | 181 | NEINIMLHSPFSGAGLVFEEGENQDQVKYQAAHHQLVASALATKIAHEVNPQNQVGCMLA | 240 |
| Query: | 242 | AGQYYPNTCHPQDYWASMQKNRENYFFIDVQARGKYPNYAKKHFEHLGISIQMTAEDLAL | 301 |
| | | G +YP +C P+D WA+++K+REN FFIDVQARG YP Y+ + F G++I D + | |
| Sbjct: | 241 | GGNFYPYSCKPEDVWAALEKDRENLFFIDVQARGTYPAYSARVFREKGVTINKAPGDDEI | 300 |
| Query: | 302 | LRDYTVDFISFSYYSSRVASGNPTVSEQVQENIFASLKNPYLKSSEWCWQIDPLGLRITL | 361 |
| | | L++ TVDF+SFSYY+SR AS + N+ SL+NPYL+ S+WGW IDPLGLRIT+ | |
| Sbjct: | 301 | LKN-TVDFVSFSYYASRCASAENNANNSSAANVVKSLRNPYLQVSDWGWGIDPLGLRITM | 359 |
| Query: | 362 | NAIWDRYQKPMFIVENGLGAVDIPDENGYVEDDYRIDYLRQHIAANRDAIYVDGVNLIGY | 421 |
| | | N ++DRYQKP+F+VENGLGA D NG + DDYRI YLR+HI AM +AI DG+ L+GY | |
| Sbjct: | 360 | NMNYDRYQKPLFLVENGLGAKDEFAANGEINDDYRISYLREHIRAMGEAI-ADGIPLMGY | 418 |
| Query: | 422 | TTWGCIDLVSAGTGEMEKRYGFIYVDRNNKGEGTLKRYKKKSFYWYKKVIASNGSQIE | 479 |
| | | TTWGCIDLVSA TGEM KRYGF++VDR++ G GTL R +KKSF+WYKKVIASNG +E | |
| Sbjct: | 419 | TTWGCIDLVSASTGEMSKRYGFVFVDRDDAGNGTLTRTRKKSFWWYKKVIASNGEDLE | 476 |

[9375] There is also homology to SEQ ID 5288.

[9376] Based on this analysis, it was predicted that this protein and its epitopes, could be useful antigens for vaccines or diagnostics.

### EXAMPLE 1702

[9377] A DNA sequence (GBSx1806) was identified in S. agalactiae <SEQ ID 5289> which encodes the amino acid sequence <SEQ ID 5290>. This protein is predicted to be platelet-activating factor acetylhydrolase isoform Ib beta subunit, pu. Analysis of this protein sequence reveals the following:

```
Possible site: 30
>>> Seems to have no N-terminal signal sequence
----- Final Results -----
                            bacterial cytoplasm --- Certainty = 0.5323(Affirmative) < succ>
                              bacterial membrane --- Certainty = 0.0000(Not Clear) < succ>
                                bacterial outside --- Certainty = 0.0000(Not Clear) < succ>
```

[9378] The protein has homology with the following sequences in the GENPEPT database.

| >GP: AAC27974 GB: AF016048 platelet-activating factor acetylhydrolase | | | |
|---|---|---|---|
| alpha 2 subunit [Rattus norvegicus] | | | |
| Identities = 43/177 (24%), Positives = 84/177 (47%), Gaps = 9/177 (5%) | | | |
| Query: | 28 | QEGAIVFTGDSIVEF---FPLKKHLGRDYPLVNRGVAGSDTYWLLENLRTQVWELLPSKV | 84 |
| | | +E ++F GDS+V+ + + + L +N G+ G T +L L+ E + KV | |
| Sbjct: | 38 | KEPDVLFVGDSMVQLMQQYEIWRELFSPLHALNFGIGGDTTRHVLWRLKNGELENIKPKV | 97 |
| Query: | 85 | FIL-IGTNDIGLGHSQSEIIANITDIIAEIRAESYMTEINILSVLPVSEEDDYIERVKVR | 143 |
| | | ++ +GTN+ ++ E+ I I+ I +I +L +LP E+ + + + + | |
| Sbjct: | 98 | IVVWVGTNNHE--NTAEEVAGGIEAIVQLINTRQPQAKIIVLGLLPRGEKPNPLRQKNAK | 155 |
| Query: | 144 | NNQTIKALNKTLSVISGINYIELYDLLVDEKGQLASSFTKDGLHLTDQAYAKISETI | 200 |
| | | NQ +K +L ++ + +++ V G ++ D LHLT YAKI + + | |
| Sbjct: | 156 | VNQLLKV---SLPKLANVQLLDIDGGFVHSDGAISCHDMFDFLHLTGGGYAKICKPL | 209 |

[9379] A related DNA sequence was identified in S. pyogenes <SEQ ID 5291> which encodes the amino acid sequence <SEQ ID 5292>. Analysis of this protein sequence reveals the following:

```
Possible site: 35
>>> Seems to have no N-terminal signal sequence
----- Final Results -----
                            bacterial cytoplasm --- Certainty = 0.5979(Affirmative) < succ>
                              bacterial membrane --- Certainty = 0.0000(Not Clear) < succ>
                                bacterial outside --- Certainty = 0.0000(Not Clear) < succ>
```

[9380] An alignment of the GAS and GBS proteins is shown below.

| Identities = 92/204 (45%), Positives = 133/204 (65%) | | | |
|---|---|---|---|
| Query: | 1 | MLEVIDKALRDYQMKREQFFEINNQTVQEGAIVFTGDSIVEFFPLKKHLGRDYPLVNRGV | 60 |
| | | MLE++ + LR YQ ++ + NQ +G IVF GDS++EFFPLKK G P++NRG+ | |
| Sbjct: | 1 | MLEIVSEELRHYQEQKLIEYRNKNQLAPKGGIVFAGDSLIEFFPLKKAFGSCLPIINRGI | 60 |
| Query: | 61 | AGSDTYWLLENLRTQVWELLPSKVFILIGTNDIGLGHSQSEIIANITDIIAEIRAESYMT | 120 |
| | | AG D+ WLL + Q+ +L P +F+LIG NDIGLG+ + I+ I ++I++IR+ + | |
| Sbjct: | 61 | AGIDSQWLLRHFSVQITDLEPKHIFLLIGCNDIGLGYDKCHIVKTIVELISQIRSHCVYS | 120 |
| Query: | 121 | EINILSVLPVSEEDDYIERVKVRNNQTIKALNKTLSVISGINYIELYDLLVDEKGQLASS | 180 |
| | | +I +LS+LPVS Y + VK+R N I A+NK L++I + +I L L DEKG L+ | |
| Sbjct: | 121 | QIYLLSLLPVSNNPRYQKTVKIRTNAMIDAINKDLAMIPTVEFINLNTCLKDEKGGLSDE | 180 |
| Query: | 181 | FTKDGLHLTDQAYAKISETIKLYL | 204 |
| | | T DGLHL AYAK++E IK Y+ | |
| Sbjct: | 181 | NTLDGLHLNFPAYAKLAEIIKSYI | 204 |

[9381] Based on this analysis, it was predicted that these proteins and their epitopes could be useful antigens for vaccines or diagnostics.

### EXAMPLE 1703

[9382] A DNA sequence (GBSx1807) was identified in S. agalactiae <SEQ ID 5293> which encodes the amino acid sequence <SEQ ID 5294>. Analysis of this protein sequence reveals the following:

```
Possible site: 43
>>> Seems to have no N-terminal signal sequence
----- Final Results -----
                            bacterial cytoplasm --- Certainty = 0.5226(Affirmative) < succ>
                              bacterial membrane --- Certainty = 0.0000(Not Clear) < succ>
                                bacterial outside --- Certainty = 0.0000(Not Clear) < succ>
```

[9383] A related GBS nucleic acid sequence <SEQ ID 9851> which encodes amino acid sequence <SEQ ID 9852> was also identified.

[9384] The protein has homology with the following sequences in the GENPEPT database.

| >GP: BAA35556 GB: D90723 Hypothetical 30.2 kd protein in idh-deoR | | | |
|---|---|---|---|
| intergenic region. [Escherichia coli] | | | |
| Identities = 104/265 (39%), Positives = 154/265 (57%), Gaps = 4/265 (1%) | | | |
| Query: | 2 | IKLIATDMDGTFLRSDKTYDKARFSSLLTLMEKYDIKFVAASGNLYDQLLLNFLEYPNRI | 61 |
| | | IKLIA DMDGTFL KTY++ RF + M+ I+FV ASGN Y QL+ F E N I | |
| sbjct: | 4 | IKLIAVDMDGTFLSDQKTYNRERFMAQYQQMKAQGIRFVVASGNQYYQLISFFPEIANEI | 63 |
| Query: | 62 | AYVAENGGRVIDQDGTLLKETYLSNDTVAAVLSYLYQNYPETLISLSGEKRSYLERRTPI | 121 |
| | | A+VAENGG V+ + G + LS D A V+ +L PE I G+ +Y ++ | |
| Sbjct: | 64 | AFVAENGGWVVSE-GKDVFNGELSKDAFATVVEHLLTR-PEVEIIACGKNSAYTLKKYDD | 121 |
| Query: | 122 | NRRTELEYYMPNFIYKDHLLPLDDDRYFQMTLWVNENLVSEMLLDISEHFKNHHIRLTSS | 181 |
| | | +T E Y Y D+ L+D +F+ L +++ L+ ++ + E + + + + | |
| Sbjct: | 122 | AMKTVAEMYYHRLEYVDNFDNLEDI-FFKFGLNLSDELIPQVQKALHEAIGDIMVSV-HT | 179 |
| Query: | 182 | GFGCIDVLPADVNKADGIAILLEKWGLKQDQVMVFGDGGNDVEMLRAANISYAMSNAPEE | 241 |
| | | G G ID++ V+KA+G+ L + WG+ +V+VFGDGGND+EMLR A S+AM NA | |
| Sbjct: | 180 | GNGSIDLIIPGVHKANGLRQLQKLWGIDDSEVVVFGDGGNDIEMLRQAGFSFAMENAGSA | 239 |
| Query: | 242 | IKAIAKYQTVSNDQDGVLETIENFL | 266 |
| | | + A AKY+ SN+++GVL+ I+ L | |
| Sbjct: | 240 | VVAAAKYRAGSNNREGVLDVIDKVL | 264 |

[9385] Based on this analysis, it was predicted that this protein and its epitopes, could be useful antigens for vaccines or diagnostics.

### EXAMPLE 1704

[9386] A DNA sequence (GBSx1808) was identified in S. agalactiae <SEQ ID 5295> which encodes the amino acid sequence <SEQ ID 5296>. This protein is predicted to be transcriptional regulator (AraC/XylSfamily). Analysis of this protein sequence reveals the following:

```
Possible site: 50
>>> Seems to have no N-terminal signal sequence
----- Final Results -----
                            bacterial cytoplasm --- Certainty = 0.4984(Affirmative) < succ>
                              bacterial membrane --- Certainty = 0.0000(Not Clear) < succ>
                                bacterial outside --- Certainty = 0.0000(Not Clear) < succ>
```

[9387] The protein has homology with the following sequences in the GENPEPT database.

| >GP: AAF89977 GB: AF206272 transcriptional regulator [Streptococcus | | | |
|---|---|---|---|
| mutans] | | | |
| Identities = 195/287 (67%), Positives = 237/287 (81%) | | | |
| Query: | 5 | DNLLSHNLEDNRHLLPYEHMHTEVRNGYPDILFHWHPELEISYVHEGTARYHIDYDFFNS | 64 |
| | | D H + + LLPY+ T + NGYPD LFHWHPELEISY++EGTA+YHIDYD+FNS | |
| Sbjct: | 10 | DENFKHEINFDNDLLPYKIYQTTIANGYPDTLFHWHPELEISYIYEGTAQYHIDYDYFNS | 69 |
| Query: | 65 | QSGDIILIRPNGMHSIHPIENKSHITDSIKFHLDLIGYSIVDQVSLRYLQPLQTSSFKFI | 124 |
| | | Q+ DIIL+RPNGMHSIHPI+NK ++ FHLDL+GYS++DQ+SLRYLQPLQ S+FK + | |
| Sbjct: | 70 | QTDDIILVRPNGMHSIHPIKNKMQKAQTLLFHLDLVGYSLLDQISLRYLQPLQNSTFKLV | 129 |
| Query: | 125 | QCIKPSMTGYNDIKNCLFDIFNISKEENRHFELLLKAKLNELLYLLYYHQYVIKKHTDDT | 184 |
| | | CIKP M GY DIKNCLF IF+I + + RHFELLLKAKL EL+YLLY+HQYV++KH+DD | |
| Sbjct: | 130 | PCIKPDMLGYQDIKNCLFAIFDIYQRQGRHFELLLKAKLQELIYLLYFHQYVLRKHSDDM | 189 |
| Query: | 185 | YRKNERIRDLIDYINNNYQQNLTIEFLADYMGYSKTHFMTVFKQHTGTSCTEFIIQVRLN | 244 |
| | | YRKNE+IR+LIDYI+ +YQ+ L+I LAD +GYSKTHFMTVFKQHTGTSCT+FIIQ RL+ | |
| Sbjct: | 190 | YRKNEKIRELIDYIHQHYQEKLSIISLADIIGYSKTHFMTVFKQHTGTSCTDFIIQFRLS | 249 |
| Query: | 245 | KASEHLINSTTAIIDIANSVGFNNLSNFNRQFKRYYHTTPRQYRKQF | 291 |
| | | KA + L+NS I+++A+ VGF NLSNFNRQFKRYY TP QYRKQF | |
| Sbjct: | 250 | KACDLLVNSIKPILEVASEVGFTNLSNFNRQFKRYYQITPSQYRKQF | 296 |

[9388] A related DNA sequence was identified in S. pyogenes <SEQ ID 5297> which encodes the amino acid sequence <SEQ ID 5298>. Analysis of this protein sequence reveals the following:

```
Possible site: 28
>>> Seems to have no N-terminal signal sequence
----- Final Results -----
                            bacterial cytoplasm --- Certainty = 0.1000(Affirmative) < succ>
                              bacterial membrane --- Certainty = 0.0000(Not Clear) < succ>
                                bacterial outside --- Certainty = 0.0000(Not Clear) < succ>
```

[9389] An alignment of the GAS and GBS proteins is shown below.

| Identities = 43/169 (25%), Positives = 83/169 (48%), Gaps = 16/169 (9%) | | | |
|---|---|---|---|
| Query: | 136 | DIKNCLFDIFNISKEENRHFELLLKAKLNELLYLLYYHQYV------IKKHTDDTYRKN- | 188 |
| | | D+K+ F +F+ + R F +L K ++ ++ Q + +KK D T + N | |
| sbjct: | 319 | DVKHVSFLLFS---DIYRQFPILDKMTYLSMVKTIHDSQSIDCILRELKKVLDVTNQNNS | 375 |
| Query: | 189 | ------ERIRDLIDYINNNYQQNLTIEFLADYMGYSKTHFMTVFKQHTGTSCTEFIIQVR | 242 |
| | | + + + ID I Y Q LT++ +AD + + + FK T S T+++ VR | |
| Sbjct: | 376 | PEKRYSDLVSETIDCIRKEYHQELTLKAIADRLHVNGVYLGQCFKNETERSFTQYLNHVR | 435 |
| Query: | 243 | LNKASEHLINSTTAIIDIANSVGFNNLSNFNRQFKRYYHTTPRQYRKQF | 291 |
| | | + KA + L+ + +I +IA G+N F +FK+ +P+++R ++ | |
| sbjct: | 436 | IQKAQQLLLYTNQSINEIAYETGYNTNHYFIKMFKKLNGLSPKEFRDRY | 484 |

[9390] Based on this analysis, it was predicted that these proteins and their epitopes could be useful antigens for vaccines or diagnostics.

### EXAMPLE 1705

[9391] A DNA sequence (GBSx1809) was identified in S. agalactiae <SEQ ID 5299> which encodes the amino acid sequence <SEQ ID 5300>. Analysis of this protein sequence reveals the following:

```
Possible site: 34
>>> Seems to have no N-terminal signal sequence
----- Final Results -----
                            bacterial cytoplasm --- Certainty = 0.3705(Affirmative) < succ>
                              bacterial membrane --- Certainty = 0.0000(Not Clear) < succ>
                                bacterial outside --- Certainty = 0.0000(Not Clear) < succ>
```

[9392] The protein has no significant homology with any sequences in the GENPEPT database.

[9393] No corresponding DNA sequence was identified in S. pyogenes.

[9394] Based on this analysis, it was predicted that this protein and its epitopes, could be useful antigens for vaccines or diagnostics.

### EXAMPLE 1706

[9395] A DNA sequence (GBSx1810) was identified in S. agalactiae <SEQ ID 5301> which encodes the amino acid sequence <SEQ ID 5302>. Analysis of this protein sequence reveals the following:

| Possible site: 39 | | | | |
|---|---|---|---|---|
| >>> Seems to have no N-terminal signal sequence | | | | |
| | INTEGRAL | Likelihood = −11.25 | Transmembrane | 59-75 (56-82) |
| | INTEGRAL | Likelihood = −7.48 | Transmembrane | 23-39 (12-41) |
| | INTEGRAL | Likelihood = −6.64 | Transmembrane | 231-247 (225-255) |
| | INTEGRAL | Likelihood = −5.15 | Transmembrane | 335-351 (333-355) |
| | INTEGRAL | Likelihood = −4.19 | Transmembrane | 309-325 (305-327) |
| | INTEGRAL | Likelihood = −4.14 | Transmembrane | 272-288 (268-292) |
| | INTEGRAL | Likelihood = −4.04 | Transmembrane | 402-418 (400-419) |
| | INTEGRAL | Likelihood = −3.88 | Transmembrane | 191-207 (190-208) |
| | INTEGRAL | Likelihood = −2.71 | Transmembrane | 365-381 (364-381) |
| | INTEGRAL | Likelihood = −1.86 | Transmembrane | 165-181 (164-182) |

```
----- Final Results -----
                              bacterial membrane --- Certainty = 0.5501(Affirmative) < succ>
                                bacterial outside --- Certainty = 0.0000(Not Clear) < succ>
                            bacterial cytoplasm --- Certainty = 0.0000(Not Clear) < succ>
```

[9396] The protein has homology with the following sequences in the GENPEPT database.

| >GP: AAF96429 GB: AE004383 conserved hypothetical protein | | | |
|---|---|---|---|
| [Vibrio cholerae] | | | |
| Identities = 142/443 (32%), Positives = 241/443 (54%), | | | |
| Gaps = 20/443 (4%) | | | |
| Query: | 6 | NEFQFSLESILGFVWRGIVVGLIAGFVVSIFRLAIEKIFLVVMELYKS--AHYQPIILLS | 63 |
| | | N+F ++ ++ ++VG++AG V + F A+ + + KS + P+ L + | |
| Sbjct: | 21 | NQFLSKDKTPFSVLFLSLLVGILAGLVGTYFEQAVHLVSETRTDWLKSEIGSFLPLWLAA | 80 |
| Query: | 64 | ITVTSIIAAVIIGFFI--KSDPDIKGSGIPHVEGELKGMLSPDWFSIVWKKFIAGILAIS | 121 |
| | | +++ +A IG+F+ + P+ GSGIP +EG + GM W+ ++ KF G+ A+ | |
| Sbjct: | 81 | FLISAFLA--FIGYFLVHRFAPEAAGSGIPEIEGAMDGMRPVRWWRVLPVKFFGGMGALG | 138 |
| Query: | 122 | SGLMLGREGPSIQLGAMTGKGIAQYLNASRMEKR-VLIASGAAAGLSAAFNAPIAGLLFV | 180 |
| | | SG++LGREGP++Q+G G+ I+ + R L+A+GAA GL+AAFNAP+AG++FV | |
| Sbjct: | 139 | SGMVLGREGPTVQMGGAVGRMISDIFRVKNEDTRHSLLAAGAAGGLAAAFNAPLAGIMFV | 198 |
| Query: | 181 | VEEIYHHFS-RLVWITALVASLV-ANFVSLNIFGLTPVLALPSELPSLNLNFYWIFLLMG | 238 |
| | | +EE+ F L+ +A++ S V AN V I G V+ +P + + L+ +FLL+G | |
| Sbjct: | 199 | IEEMRPQFRYTLISVRAVIISAVAANIVFRVINGQDAVITMP-QYDAPELSTLGLFLLLG | 257 |
| Query: | 239 | LFLGILGFIYEWVIL----RFHVIYDYLGKLFHLPSHLYGILAVIFILPIGYYFPQLLGG | 294 |
| | | G+ G ++ ++I F + K + L + G + +L Y P+L GG | |
| Sbjct: | 258 | ALFGVFGVLFNYLITLAQDLFVKFHRNDRKRYLLTGSMIGGCFGLLLL---YVPELTGG | 313 |
| Query: | 295 | GNGLIVSLPRSNLSLMMLGLFFLIRFLWSMLSYSSGLPGGIFLPILALGSLAG-AFFAVG | 353 |
| | | G LI ++ +L L F+ R ++L + SG PGGIF P+LALG+L G AF + | |
| Sbjct: | 314 | GISLIPTITNGGYGAGILLLLFVGRIFTTLLCFGSGAPGGIFAPMLALGTLFGYAFGLIA | 373 |
| Query: | 354 | MQYFGIISHQQISLFVVLGMAGYFGAISKAPLTAMILVTEMVGDLKQLMAIGIVTMVSYI | 413 |
| | | +F ++ + +F + GM F A +AP+T ++LV EM + ++ + I ++ + I | |
| Sbjct: | 374 | KMWFPELNIEP-GMFAIAGMGALFAATVRAPITGILLVIEMTNNYHLILPLIITSLGAVI | 432 |
| Query: | 414 | VMDLLKGEPIYEAMLAKMTFNPK | 436 |
| | | LL G+PIY +L + N K | |
| Sbjct: | 433 | FAQLLGGQPIYSQLLHRTLKNQK | 455 |

[9397] A related DNA sequence was identified in S. pyogenes <SEQ ID 5303> which encodes the amino acid sequence <SEQ ID 5304>. Analysis of this protein sequence reveals the following:

| Possible site: 31 | | | | |
|---|---|---|---|---|
| >>> Seems to have no N-terminal signal sequence | | | | |
| | INTEGRAL | Likelihood = −11.68 | Transmembrane | 71-87 (66-95) |
| | INTEGRAL | Likelihood = −9.45 | Transmembrane | 36-52 (26-56) |
| | INTEGRAL | Likelihood = −5.63 | Transmembrane | 346-362 (342-367) |
| | INTEGRAL | Likelihood = −5.36 | Transmembrane | 376-392 (375-393) |
| | INTEGRAL | Likelihood = −5.15 | Transmembrane | 413-429 (410-432) |
| | INTEGRAL | Likelihood = −5.10 | Transmembrane | 321-337 (318-340) |
| | INTEGRAL | Likelihood = −4.19 | Transmembrane | 203-219 (202-220) |
| | INTEGRAL | Likelihood = −4.19 | Transmembrane | 244-260 (242-265) |
| | INTEGRAL | Likelihood = −4.19 | Transmembrane | 284-300 (280-304) |
| | INTEGRAL | Likelihood = −1.86 | Transmembrane | 177-193 (176-194) |

```
----- Final Results -----
                              bacterial membrane --- Certainty = 0.5670(Affirmative) < succ>
                                bacterial outside --- Certainty = 0.0000(Not Clear) < succ>
                            bacterial cytoplasm --- Certainty = 0.0000(Not Clear) < succ>
```

[9398] The protein has homology with the following sequences in the databases:

| >GP: AAF96429 GB: AE004383 conserved hypothetical protein | | | |
|---|---|---|---|
| [Vibrio cholerae] | | | |
| Identities = 144/442 (32%), Positives = 236/442 (52%), | | | |
| Gaps = 30/442 (6%) | | | |
| Query: | 18 | NEFTFSNKSIIAYVWRGVVVGIIAGVIVSLFRLLIEVTADWVIEWYRYAHINSLLLLPIL | 77 |
| | | N+F +K+ + ++ ++VGI+AG++ + F + + ++ +W + + I S L L + | |
| Sbjct: | 21 | NQFLSKDKTPFSVLFLSLLVGILAGLVGTYFEQAVHLVSETRTDWLK-SEIGSFLPLWLA | 79 |
| Query: | 78 | SVSLLAVL-FVGFLV--KSDSDIKGSGIPHVEGELKGLMSPDWWSVLWKKFLGGIMAISM | 134 |
| | | + + A L F+G+ + + + GSGIP +EG + G+ WW VL KF GG+ A+ | |
| Sbjct: | 80 | AFLISAFLAFIGYFLVHRFAPEAAGSGIPEIEGAMDGMRPVRWWRVLPVKFFGGMGALGS | 139 |
| Query: | 135 | GFMLGREGPSIQLGAMSAKGLAKFLKSSRLEKR-VLIASGAAAGLSAAFNAPIAGLLFVV | 193 |
| | | G +LGREGP++Q+G + ++ + + R L+A+GAA GL+AAFNAP+AG++FV+ | |
| Sbjct: | 140 | GMVLGREGPTVQMGGAVGRMISDIFRVKNEDTRHSLLAAGAAGGLAAAFNAPLAGIMFVI | 199 |
| Query: | 194 | EEIYHHFS-RLIWITALVASLV-ANFISLNIFGLKPVLAMSEAMPFLGLNQYWLLLLLGL | 251 |
| | | EE+ F LI + A++ S V AN + I G V+ M + L+ L LLLG | |
| Sbjct: | 200 | EEMRPQFRYTLISVRAVIISAVAANIVFRVINGQDAVITMPQ-YDAPELSTLGLFLLLGA | 258 |
| Query: | 252 | FLGCLGYLYEIVIL-----------NFNKLYVILGSWLHLPDYFYGIIMVFLILPIGYYL | 300 |
| | | G G L+ +I N K Y++ GS + +G++++ Y+ | |
| Sbjct: | 259 | LFGVFGVLFNYLITLAQDLFVKFHRNDRKRYLLTGSMI---GGCFGLLLL--------YV | 307 |
| Query: | 301 | PQLLGGGHGLILSLSNQQLPLMTIFFYFIIRFIVSMFSYGSGLPGGIFLPILTLGALAGL | 360 |
| | | P+L GGG LI +++N + F+ R ++ +GSG PGGIF P+L LG L G | |
| Sbjct: | 308 | PELTGGGISLIPTITNGGYGAGILLLLFVGRIFTTLLCFGSGAPGGIFAPMLALGTLFGY | 367 |
| Query: | 361 | LFGQIASQLGLLNQSFLSLFLILGMAGYFAAISKAPLTGMILVTEMVGDLKPLMAIAVVT | 420 |
| | | FG IA +F I GM FAA +AP+TG++LV EM + ++ + + + | |
| Sbjct: | 368 | AFGLIAKMWFPELNIEPGMFAIAGMGALFAATVRAPITGILLVIEMTNNYHLILPLIITS | 427 |
| Query: | 421 | FVSYLVMDLLNGQPIYEAMLDK | 442 |
| | | + + LL GQPIY +L + | |
| Sbjct: | 428 | LGAVIFAQLLGGQPIYSQLLHR | 449 |

[9399] An alignment of the GAS and GBS proteins is shown below.

| Identities = 343/510 (67%), Positives = 410/510 (80%) | | | |
|---|---|---|---|
| Query: | 1 | MENHKNEFQFSLESILGFVWRGIVVGLIAGFVVSIFRLAIEKIFLVVMELYKSAHYQPII | 60 |
| | | MENHKNEF FS +SI+ +VWRG+VVG+IAG +VS+FRL IE V+E Y+ AH ++ | |
| Sbjct: | 13 | MENHKNEFTFSNKSIIAYVWRGVVVGIIAGVIVSLFRLLIEVTADWVIEWYRYAHINSLL | 72 |
| Query: | 61 | LLSITVTSIIAAVIIGFFIKSDPDIKGSGIPHVEGELKGMLSPDWFSIVWKKFIAGILAI | 120 |
| | | LL I S++A + +GF +KSD DIKGSGIPHVEGELKG++SPDW++WKKF+ GI+AI | |
| Sbjct: | 73 | LLPILSVSLLAVLFVGFLVKSDSDIKGSGIPHVEGELKGLMSPDWWSVLWKKFLGGIMAI | 132 |
| Query: | 121 | SSGLMLGREGPSIQLGAMTGKGIAQYLNASRMEKRVLIASGAAAGLSAAFNAPIAGLLFV | 180 |
| | | S G MLGREGPSIQLGAM+ KG+A++L +SR+EKRVLIASGAAAGLSAAFNAPIAGLLFV | |
| Sbjct: | 133 | SMGFMLGREGPSIQLGAMSAKGLAKFLKSSRLSKRVLIASGAAAGLSAAFNAPIAGLLFV | 192 |
| Query: | 181 | VEEIYHHFSRLVWITALVASLVANFVSLNIFGLTPVLALPSELPSLNLNFYWIFLLMGLF | 240 |
| | | VEEIYHHFSRL+WITALVASLVANF+SLNIFGL PVLA+ +P L LN YW +LL+GLF | |
| Sbjct: | 193 | VEEIYHHFSRLIWITALVASLVANFISLNIFGLKPVLAMSEAMPFLGLNQYWLLLLLGLF | 252 |
| Query: | 241 | LGILGFIYEWVILRFHVIYDYLGKLFHLPSHLYGILAVIFILPIGYYFPQLLGGGNGLIV | 300 |
| | | LG LG++YE VIL F+ +Y LG HLP + YGI+ V ILPIGYY PQLLGGG+GLI+ | |
| Sbjct: | 253 | LGCLGYLYEIVILNFNKLYVILGSWLHLPDYFYGIIMVFLILPIGYYLPQLLGGGHGLIL | 31 |
| Query: | 301 | SLPRSNLSLMMLGLFFLIRFLWSMLSYSSGLPGGIFLPILALGSLAGAFFAVGMQYFGII | 360 |
| | | SL L LM + +F+IRF+ SM SY SGLPGGIFLPIL LG+LAG F G++ | |
| Sbjct: | 313 | SLSNQQLPLMTIFFYFIIRFIVSMFSYGSGLPGGIFLPILTLGALAGLLFGQIASQLGLL | 372 |
| Query: | 361 | SHQQISLFVVLGMAGYFGAISKAPLTAMILVTEMVGDLKQLMAIGIVTMVSYIVMDLLKG | 420 |
| | | + +SLF++LGMAGYF AISKAPLT MILVTEMVGDLK LMAI +VT VSY+VMDLL G | |
| Sbjct: | 373 | NQSFLSLFLILGMAGYFAAISKAPLTGMILVTEMVGDLKPLMAIAVVTFVSYLVMDLLNG | 432 |
| Query: | 421 | EPIYEAMLAKMTFNPKDKVMTPTLIELTVSDKISGKYVRDLELPENVLITTQIMHKTSAV | 480 |
| | | +PIYEAML KM ++ PTLIELTV DKI+GKYV++L+LPENVLITTQIHH+ S V | |
| Sbjct: | 433 | QPIYEAMLDKMMAKHPTNLVEPTLIELTVGDKIAGKYVKELKLPENVLITTQIHHQKSQV | 492 |
| Query: | 481 | VSGNTILNAGDTIFLVVNESEIKEVREQLM | 510 |
| | | VSGNT L +G TIFLVVNE++ VRE LM | |
| Sbjct: | 493 | VSGNTRLLSGATIFLVVNEADTGFVREVLM | 522 |

[9400] Based on this analysis, it was predicted that these proteins and their epitopes could be useful antigens for vaccines or diagnostics.

### EXAMPLE 1707

[9401] A DNA sequence (GBSx1811) was identified in S. agalactiae <SEQ ID 5305> which encodes the amino acid sequence <SEQ ID 5306>. This protein is predicted to be spermidine/putrescine-binding periplasmic protein precursor (potD-1). Analysis of this protein sequence reveals the following:

| Possible site: 38 | | | | |
|---|---|---|---|---|
| >>> Seems to have an uncleavable N-term signal seq | | | | |
| | INTEGRAL | Likelihood = −9.02 | Transmembrane | 20-36(14-40) |

```
----- Final Results -----
                              bacterial membrane --- Certainty = 0.4609(Affirmative) < succ>
                                bacterial outside --- Certainty = 0.0000(Not Clear) < succ>
                            bacterial cytoplasm --- Certainty = 0.0000(Not Clear) < succ>
```

[9402] A related GBS nucleic acid sequence <SEQ ID 8881> which encodes amino acid sequence <SEQ ID 8882> was also identified. Analysis of this protein sequence reveals the following:

| Lipop: Possible site: −1 Crend: 2 | | | | |
|---|---|---|---|---|
| SRCFLG: 0 | | | | |
| McG: Length of UR: 22 | | | | |
| Peak Value of UR: 4.16 | | | | |
| Net Charge of CR: 2 | | | | |
| McG: Discrim Score: 18.94 | | | | |
| GvH: Signal Score (−7.5): −3.29 | | | | |
| Possible site: 25 | | | | |
| >>> Seems to have an uncleavable N-term signal seq | | | | |
| Amino Acid Composition: calculated from 1 | | | | |
| ALOM program count: 1 value: −9.02 threshold: 0.0 | | | | |
| | INTEGRAL | Likelihood = −9.02 | Transmembrane | 7-23 (1-27) |
| | PERIPHERAL | Likelihood = 6.05 | 170 | |

```
modified ALOM score: 2.30
icm1 HYPID: 7 CFP: 0.461
*** Reasoning Step: 3
----- Final Results -----
                              bacterial membrane --- Certainty = 0.4609(Affirmative) < succ>
                                bacterial outside --- Certainty = 0.0000(Not Clear) < succ>
                            bacterial cytoplasm --- Certainty = 0.0000(Not Clear) < succ>
```

[9403] The protein has homology with the following sequences in the GENPEPT database.

| >GP: AAF94581 GB: AE004221 spermidine/putrescine ABC transporter, | | | |
|---|---|---|---|
| periplasmic spermidine/putrescine-binding protein [Vibrio cholerae] | | | |
| Identities = 126/327 (38%), Positives = 196/327 (59%), | | | |
| Gaps = 2/327 (0%) | | | |
| Query: | 42 | SSSTPNSDKLVIYNWGDYIDPALLKKFTKETGIEVQYETFDSNEAMHTKIKQGGTTYDIA | 101 |
| | | +++ +L YNW +YI +L+ FTKETGI+V Y T++SNE+M+ K+K G YD+ | |
| Sbjct: | 18 | TNAMAKDQELYFYNWSEYIPSEVLEDFTKETGIKVIYSTYESNESMYAKLKTQGAGYDLV | 77 |
| Query: | 102 | VPSDYMIDKMIKENLLVKLDHSKIANWDAIGARFKNLSFDPKNKYSIPYFWGTVGIVYN- | 160 |
| | | VPS Y + KM KE +L ++DHSK+++++ + +F N FDP NK+SIPY WG GI N | |
| Sbjct: | 78 | VPSTYFVSKMRKEGMLQEIDHSKLSHFKDLDPNYLNKPFDPGNKFSIPYIWGATGIGINT | 137 |
| Query: | 161 | DQLVKTPPKHWDDLWRPEFRNKIMLVDSAREVIGVGLNSLGYGLNTKNISELKAASKKLD | 220 |
| | | D L K K+W DLW ++ ++ML+D AREV + L+ LGY NT N E+KAA ++L | |
| Sbjct: | 138 | DMLDKKSLKNWGDLWDAKWAGQLMLMDDAREVFHIALSKLGYSPNTTNPKEIKAAYRELK | 197 |
| Query: | 221 | ALTPNVKAIVADEMKGYMIQGDAAIGVTFSGEAREMLDGNKHLHYVVPSEGSNLWFDNIV | 280 |
| | | L PNV +D + G+ ++G+ ++G A + + P +G+ W D+I | |
| Sbjct: | 198 | KLMPNVLVFNSDFPANPYLAGEVSLGMLWNGSAYMARQEGAPIQIIWPEKGTIFWNDSIS | 257 |
| Query: | 281 | IPKTVKHRKEAYAFINFMMEPKNAAQNAEYIGYATPNLKAKALLPADIKNDKAFYPPDKT | 340 |
| | | IP K+ + A+ I+F++ P+NAA+ A IGY TP A LLP + ND + YPP | |
| Sbjct: | 258 | IPAGAKNIEAAHKMIDFLLRPENAAKIALEIGYPTPVKTAHDLLPKEFANDPSIYPPQSV | 317 |
| Query: | 341 | IDHLEVYNNLGQKWLGIYNDLYLQFKM | 367 |
| | | ID+ E + +G+ + +Y++ + + K+ | |
| Sbjct: | 318 | IDNGEWQDEVGEASV-LYDEYFQKLKV | 343 |

[9404] A related DNA sequence was identified in S. pyogenes <SEQ ID 5307> which encodes the amino acid sequence <SEQ ID 5308>. Analysis of this protein sequence reveals the following:

| Possible site: 22 | | | | |
|---|---|---|---|---|
| >>> Seems to have an uncleavable N-term signal seq | | | | |
| | INTEGRAL | Likelihood = −8.44 | Transmembrane | 8-24 (1-27) |

```
----- Final Results -----
                              bacterial membrane --- Certainty = 0.4376(Affirmative) < succ>
                                bacterial outside --- Certainty = 0.0000(Not Clear) < succ>
                            bacterial cytoplasm --- Certainty = 0.0000(Not Clear) < succ>
```

[9405] The protein has homology with the following sequences in the databases:

| >GP: AAC74207 GB: AE000212 spermidine/putrescine periplasmic transport | | | |
|---|---|---|---|
| protein [Escherichia coli] | | | |
| Identities = 134/342 (39%), Positives = 199/342 (58%), Gaps = 3/342 (0%) | | | |
| Query: | 17 | ILTSLSFILQKKSGSGSQSDKLVIYNWGDYIDPALLKKFTKETGIEVQYETFDSNEAMYT | 76 |
| | | +L + + L + ++ L YNW +Y+ P LL++FTKETGI+V Y T++SNE MY | |
| Sbjct: | 8 | LLAAGALALGMSAAHADDNNTLYFYNWTEYVPPGLLEQFTKETGIKVIYSTYESNETMYA | 67 |
| Query: | 77 | KIKQ-GGTTYDIAVPSDYTIDKMIKENLLNKLDKSKLVGMDNIGKEFLGKSFDPQNDYSL | 135 |
| | | K+K YD+ VPS Y +DKM KE ++ K+DKSKL N+ + L K FDP NDYS+ | |
| Sbjct: | 68 | KLKTYKDGAYDLVVPSTYYVDKMRKEGMIQKIDKSKLTNFSNLDPDMLNKPFDPNNDYSI | 127 |
| Query: | 136 | PYFWGTVGIVYNDQLVD-KAPMHWEDLWRPEYKNSIMLIDGAREMLGVGLTTFGYSVNSK | 194 |
| | | PY WG I N VD K+ W DLW+PEYK S++L D ARE+ + L GYS N+ | |
| Sbjct: | 128 | PYIWGATAIGVNGDAVDPKSVTSWADLWKPEYKGSLLLTDDAREVFQMALRKLGYSGNTT | 187 |
| Query: | 195 | NLEQLQAAERKLQQLTPNVKAIVADEMKGYMIQGDAAIGITFSGEASEMLDSNEHLHYIV | 254 |
| | | + ++++AA +L++L PNV A +D ++G+ +G+ ++G A + + + | |
| Sbjct: | 188 | DPKEIEAAYNELKKLMPNVAAFNSDNPANPYMEGEVNLGMIWNGSAFVARQAGTPIDVVW | 247 |
| Query: | 255 | PSEGSNLWFDNLVLPKTMKHEKEAYAFLNFINRPENAAQNAAYIGYATPNKKAKALLPDE | 314 |
| | | P EG W D+L +P K+++ A +NF+ RP+ A Q A IGY TPN A+ LL E | |
| Sbjct: | 248 | PKEGGIFWMDSLAIPANAKNKEGALKLINFLLRPDVAKQVAETIGYPTPNLAARKLLSPE | 307 |
| Query: | 315 | IKNDPAFYPTDDIIKKLEVYDNLGSRWLGIYNDLYLQFKMYR | 356 |
| | | + ND YP + IK E +++G+ IY + Y + K R | |
| Sbjct: | 308 | VANDKTLYPDAETIKNGEWQNDVGAA-SSIYEEYYQKLKAGR | 348 |

[9406] An alignment of the GAS and GBS proteins is shown below.

| Identities = 270/357 (75%), Positives = 306/357 (85%) | | | |
|---|---|---|---|
| Query: | 14 | MRRVYSFLGGIVLVILILFGLTTYLEKKSSSTPNSDKLVIYNWGDYIDPALLKKFTKETG | 73 |
| | | MR++YSFL G++ VI+IL L+ L+KKS S SDKLVIYNWGDYIDPALLKKFTKETG | |
| Sbjct: | 1 | MRKLYSFLAGVLGVIVILTSLSFILQKKSGSGSQSDKLVIYNWGDYIDPALLKKFTKETG | 60 |
| Query: | 74 | IEVQYETFDSNEAMHTKIKQGGTTYDIAVPSDYMIDKMIKENLLVKLDHSKIANWDAIGA | 133 |
| | | IEVQYETFDSNEAM+TKIKQGGTTYDIAVPSDY IDKMIKENLL KLD SK+ D IG | |
| Sbjct: | 61 | IEVQYETFDSNEAMYTKIKQGGTTYDIAVPSDYTIDKMIKENLLNKLDKSKLVGMDNIGK | 120 |
| Query: | 134 | RFKNLSFDPKNKYSIPYFWGTVGIVYNDQLVKTPPKHWDDLWRPEFRNKIMLVDSAREVI | 193 |
| | | F SFDP+N YS+PYFWGTVGIVYNDQLV P HW+DLWRPE++N IML+D ARE++ | |
| Sbjct: | 121 | EFLGKSFDPQNDYSLPYFWGTVGIVYNDQLVDKAPMHWEDLWRPEYKNSIMLIDGAREML | 180 |
| Query: | 194 | GVGLNSLGYGLNTKNISELKAASKKLDALTPNVKAIVADEMKGYMIQGDAAIGVTFSGEA | 253 |
| | | GVGL + GY +N+KN+ +L+AA +KL LTPNVKAIVADEMKGYMIQGDAAIG+TFSGEA | |
| Sbjct: | 181 | GVGLTTFGYSVNSKNLEQLQAAERKLQQLTPNVKAIVADEMKGYMIQGDAAIGITFSGEA | 240 |
| Query: | 254 | REMLDGNKHLHYVVPSEGSNLWFDNIVIPKTVKHRKEAYAFINFMMEPKNAAQNAEYIGY | 313 |
| | | EMLD N+HLHY+VPSEGSNLWFDN+V+PKT+KH KEAYAF+NF+ P+NAAQNA YIGY | |
| Sbjct: | 241 | SEMLDSNEHLHYIVPSEGSNLWFDNLVLPKTMKHEKEAYAFLNFINRPENAAQNAAYIGY | 300 |
| Query: | 314 | ATPNLKAKALLPADIKNDKAFYPPDKTIDHLEVYNNLGQKWLGIYNDLYLQFKMYRK | 370 |
| | | ATPN KAKALLP +IKND AFYP D I LEVY+NLG +WLGIYNDLYLQFKMYRK | |
| Sbjct: | 301 | ATPNKKAKALLPDEIKNDPAFYPTDDIIKKLEVYDNLGSRWLGIYNDLYLQFKMYRK | 357 |

[9407] Based on this analysis, it was predicted that these proteins and their epitopes could be useful antigens for vaccines or diagnostics.

### EXAMPLE 1708

[9408] A DNA sequence (GBSx1812) was identified in S. agalactiae <SEQ ID 5309> which encodes the amino acid sequence <SEQ ID 5310>. This protein is predicted to be spermidine/putrescine ABC transporter, permease protein (potC). Analysis of this protein sequence reveals the following:

| Possible site: 51 | | | | |
|---|---|---|---|---|
| >>> Seems to have an uncleavable N-term signal seq | | | | |
| | INTEGRAL | Likelihood = −12.05 | Transmembrane | 17-33 (10-37) |
| | INTEGRAL | Likelihood = −8.65 | Transmembrane | 236-252 (232-259) |
| | INTEGRAL | Likelihood = −7.75 | Transmembrane | 137-153 (132-158) |
| | INTEGRAL | Likelihood = −7.17 | Transmembrane | 63-79 (60-92) |
| | INTEGRAL | Likelihood = −6.32 | Transmembrane | 108-124 (107-136) |

```
----- Final Results -----
                              bacterial membrane --- Certainty = 0.5819(Affirmative) < succ>
                                bacterial outside --- Certainty = 0.0000(Not Clear) < succ>
                            bacterial cytoplasm --- Certainty = 0.0000(Not Clear) < succ>
```

[9409] A related GBS nucleic acid sequence <SEQ ID 8883> which encodes amino acid sequence <SEQ ID 8884> was also identified. Analysis of this protein sequence reveals the following:

| Lipop: Possible site: −1 Crend: 2 | | | | |
|---|---|---|---|---|
| SRCFLG: 0 | | | | |
| McG: Length of UR: 26 | | | | |
| Peak Value of UR: 3.65 | | | | |
| Net Charge of CR: 2 | | | | |
| McG: Discrim Score: 16.58 | | | | |
| GvH: Signal Score (−7.5): −6.17 | | | | |
| Possible site: 43 | | | | |
| >>> Seems to have an uncleavable N-term signal seq | | | | |
| Amino Acid Composition: calculated from 1 | | | | |
| ALOM program count: 4 value: −12.05 threshold: 0.0 | | | | |
| | INTEGRAL | Likelihood = −12.05 | Transmembrane | 9-25 (2-29) |
| | INTEGRAL | Likelihood = −7.75 | Transmembrane | 129-145 (124-150) |
| | INTEGRAL | Likelihood = −7.17 | Transmembrane | 55-71 (52-84) |
| | INTEGRAL | Likelihood = −6.32 | Transmembrane | 100-116 (99-128) |
| | PERIPHERAL | Likelihood = 0.53 | 174 | |

```
modified ALOM score: 2.91
icm1 HYPID: 7 CFP: 0.582
*** Reasoning Step: 3
----- Final Results -----
                              bacterial membrane --- Certainty = 0.5819(Affirmative) < succ>
                                bacterial outside --- Certainty = 0.0000(Not Clear) < succ>
                            bacterial cytoplasm --- Certainty = 0.0000(Not Clear) < succ>
```

[9410] The protein has homology with the following sequences in the GENPEPT database.

| >GP: AAB91527 GB: AE001165 spermidine/putrescine ABC transporter, | | | |
|---|---|---|---|
| permease protein (potC) [Borrelia burgdorferi] | | | |
| Identities = 97/249 (38%), Positives = 159/249 (62%), Gaps = 3/249 (1%) | | | |
| Query: | 10 | KKFANIYLALVFIILYIPIIYLIFYSFNKGGDMNSFTGFTFSHYGELFQDSRLMLILVQT | 69 |
| | | + F NI+L L+ +Y+PII LI YSFN G + GF+ Y E+F S++ + T | |
| Sbjct: | 3 | RAFKNIFLFLILSFIYLPIIILIIYSFNSGDSGFIWQGFSLKWYKEIFASSQIKSAIFNT | 62 |
| Query: | 70 | FFLAFLSALLATIIGTFGAIWIYQVRRRH-QTSILSLNNILLVAPDVMIGASFLLVFTVI | 128 |
| | | +A +S+L + +IG GA IY+ + +T +LS+N I ++ PD++ G S + ++ I | |
| Sbjct: | 63 | ILIAIISSLTSVVIGIIGAYAIYKSENKKLKTILLSVNKITIINPDIVTGISLMTFYSAI | 122 |
| Query: | 129 | GLQLGFTSVLLSHVAFSIPIVVLMVLPRLKEMNDDMINASYDLGASTWQMLKEVMLPYLS | 188 |
| | | +QLGF+++L+SH+ FS P VV+++LP+L + ++I+A+ DLGAS Q+ ++ P ++ | |
| Sbjct: | 123 | KMQLGFSTMLISHIIFSTPYVVIIILPKLYSLPKNIIDAAKDLGASEIQIFFNIIYPEIA | 182 |
| Query: | 189 | SGIISGFFMAFTYSLDDFAVTFFVTGNGFSTLSVEIYSRARRGISLEINALSTIVF--LF | 246 |
| | | I +G +AFT S+DDF ++FF TG GF+ LS+ I S +RGI INA+S I+F + | |
| Sbjct: | 183 | GSIATGALIAFTLSIDDFLISFFTTGQGFNNLSILINSLTKRGIKPVINAISAILFFTIL | 242 |
| Query: | 247 | SILLVIGYY | 255 |
| | | S+L +I + | |
| Sbjct: | 243 | SLLFIINKF | 251 |

[9411] A related DNA sequence was identified in S. pyogenes <SEQ ID 5311> which encodes the amino acid sequence <SEQ ID 5312>. Analysis of this protein sequence reveals the following:

| Possible site: 49 | | | | |
|---|---|---|---|---|
| >>> Seems to have an uncleavable N-term signal seq | | | | |
| | INTEGRAL | Likelihood = −8.17 | Transmembrane | 9-25 (4-29) |
| | INTEGRAL | Likelihood = −8.12 | Transmembrane | 228-244 (224-250) |
| | INTEGRAL | Likelihood = −7.91 | Transmembrane | 129-145 (124-150) |
| | INTEGRAL | Likelihood = −7.06 | Transmembrane | 62-78 (54-87) |
| | INTEGRAL | Likelihood = −3.93 | Transmembrane | 100-116 (99-118) |

```
----- Final Results -----
                              bacterial membrane --- Certainty = 0.4270(Affirmative) < succ>
                                bacterial outside --- Certainty = 0.0000(Not Clear) < succ>
                            bacterial cytoplasm --- Certainty = 0.0000(Not Clear) < succ>
```

[9412] The protein has homology with the following sequences in the databases:

| >GP: AAB91527 GB: AE001165 spermidine/putrescine ABC transporter, | | | |
|---|---|---|---|
| permease protein (potC) [Borrelia burgdorferi] | | | |
| Identities = 91/249 (36%), Positives = 154/249 (61%), Gaps = 3/249 (1%) | | | |
| Query: | 2 | KKFANLYLASVFVLLYIPIFYLIFYSFNKGGDMNGFTGFTLEHYQTMFEDSRLMTILLQT | 61 |
| | | + F N++L + +Y+PI LI YSFN G + GF+L+ Y+ +F S++ + + T | |
| Sbjct: | 3 | RAFKNIFLFLILSFIYLPIIILIIYSFNSGDSGFIWQGFSLKWYKEIFASSQIKSAIFNT | 62 |
| Query: | 62 | FVLAFSSALLATIIGIFGAIFIHHVRGK-YQNAMLSANNVLMVSPDVMIGASFLILFTSL | 120 |
| | | ++A S+L + +IGI GA I+ K + +LS N + +++PD++ G S + ++++ | |
| Sbjct: | 63 | ILIAIISSLTSVVIGIIGAYAIYKSENKKLKTILLSVNKITIINPDIVTGISLMTFYSAI | 122 |
| Query: | 121 | KFQLGMSSVLLSHIAFSIPIVVLMVLPRLKEMNQDMVNAAYDLGANYFQMLKEVMLPYFT | 180 |
| | | K QLG S++L+SHI FS P VV+++LP+L + +++++AA DLGA+ Q+ ++ P | |
| Sbjct: | 123 | KMQLGFSTMLISHIIFSTPYVVIIILPKLYSLPKNIIDAAKDLGASEIQIFFNIIYPEIA | 182 |
| Query: | 181 | PGIIAGYFMAFTYSLDDFAVTFFLTGNSVTTLSVEIYSRARQGISLDINALSTIVFF--F | 238 |
| | | I G +AFT S+DDF ++FF TG LS+ I S ++GI INA+S I+FF | |
| Sbjct: | 183 | GSIATGALIAFTLSIDDFLISFFTTGQGFNNLSILINSLTKRGIKPVINAISAILFFTIL | 242 |
| Query: | 239 | SILLVIGYY | 247 |
| | | S+L +I + | |
| Sbjct: | 243 | SLLFIINKF | 251 |

[9413] An alignment of the GAS and GBS proteins is shown below.

| Identities = 196/258 (75%), Positives = 231/258 (88%) | | | |
|---|---|---|---|
| Query: | 9 | MKKFANIYLALVFIILYIPIIYLIFYSFNKGGDMNSFTGFTFSHYGELFQDSRLMLILVQ | 68 |
| | | MKKFAN+YLA VF++LYIPI YLIFYSFNKGGDMN FTGFT HY +F+DSRLM IL+Q | |
| Sbjct: | 1 | MKKFANLYLASVFVLLYIPIFYLIFYSFNKGGDMNGFTGFTLEHYQTMFEDSRLMTILLQ | 60 |
| Query: | 69 | TFFLAFLSALLATIIGTFGAIWIYQVRRRHQTSILSLNNILLVAPDVMIGASFLLVFTVI | 128 |
| | | TF LAF SALLATIIG FGAI+I+ VR ++Q ++LS NN+L+V+PDVMIGASFL++FT + | |
| Sbjct: | 61 | TFVLAFSSALLATIIGIFGAIFIHHVRGKYQNAMLSANNVLMVSPDVMIGASFLILFTSL | 120 |
| Query: | 129 | GLQLGFTSVLLSHVAFSIPIVVLMVLPRLKEMNDDMINASYDLGASTWQMLKEVMLPYLS | 188 |
| | | QLG +SVLLSH+AFSIPIVVLMVLPRLKEMN DM+NA+YDLGA+ +QMLKEVMLPY + | |
| Sbjct: | 121 | KFQLGMSSVLLSHIAFSIPIVVLMVLPRLKEMNQDMVNAAYDLGANYFQMLKEVMLPYFT | 180 |
| Query: | 189 | SGIISGFFMAFTYSLDDFAVTFFVTGNGFSTLSVEIYSRARRGISLEINALSTIVFLFSI | 248 |
| | | GII+G+FMAFTYSLDDFAVTFF+TGN +TLSVEIYSRAR+GISL+INALSTIVF FSI | |
| Sbjct: | 181 | PGIIAGYFMAFTYSLDDFAVTFFLTGNSVTTLSVEIYSRARQGISLDINALSTIVFFFSI | 240 |
| Query: | 249 | LLVIGYYYISKEKGEKNA | 266 |
| | | LLVIGYYY+S++K EK+A | |
| Sbjct: | 241 | LLVIGYYYMSQDKEEKHA | 258 |

[9414] Based on this analysis, it was predicted that these proteins and their epitopes could be useful antigens for vaccines or diagnostics.

### EXAMPLE 1709

[9415] A DNA sequence (GBSx1813) was identified in S. agalactiae <SEQ ID 5313> which encodes the amino acid sequence <SEQ ID 5314>. This protein is predicted to be spermidine/putrescine ABC transporter, permease protein (potB). Analysis of this protein sequence reveals the following:

| Possible site: 35 | | | | |
|---|---|---|---|---|
| >>> Seems to have a cleavable N-term signal seq. | | | | |
| | INTEGRAL | Likelihood = −9.55 | Transmembrane | 250-266 (244-269) |
| | INTEGRAL | Likelihood = −3.93 | Transmembrane | 148-164 (146-166) |
| | INTEGRAL | Likelihood = −3.35 | Transmembrane | 65-81 (64-85) |
| | INTEGRAL | Likelihood = −1.97 | Transmembrane | 96-112 (96-115) |

```
----- Final Results -----
                              bacterial membrane --- Certainty = 0.4821(Affirmative) < succ>
                                bacterial outside --- Certainty = 0.0000(Not Clear) < succ>
                            bacterial cytoplasm --- Certainty = 0.0000(Not Clear) < succ>
```

[9416] A related GBS nucleic acid sequence <SEQ ID 9853> which encodes amino acid sequence <SEQ ID 9854> was also identified.

[9417] The protein has homology with the following sequences in the GENPEPT database.

| >GP: AAC22990 GB: U32813 spermidine/putrescine ABC transporter, | | | |
|---|---|---|---|
| permease protein (potB) [Haemophilus influenzae Rd] | | | |
| Identities = 90/255 (35%), Positives = 153/255 (59%), | | | |
| Gaps = 11/255 (4%) | | | |
| Query: | 21 | AWLFLFVLAPVALIAWNSFFDINGH------FTLANYQTFFSSGTYLKMSFNSVLYAGIV | 74 |
| | | +WL FVL P L+ SF +G T+ NY F+ Y ++ +NS+ +GI | |
| Sbjct: | 18 | SWLIFFVLIPNLLVLAVSFLTRDGSNFYAFPITIENYTNLFNP-LYAQVVWNSLSMSGIA | 76 |
| Query: | 75 | SFITLLISYPAAYLLTKL--KHKQLWLMLVILPTWINLLLKAYAFMGIFGQQGGINAFLT | 132 |
| | | + I LLI YP A++++K+ K++ L L LV+LP W N L++ Y G +G +N L | |
| Sbjct: | 77 | TIICLLIGYPFAFMMSKIHPKYRPLLLFLVVLPFWTNSLIRIYGMKVFLGVKGILNTMLI | 136 |
| Query: | 133 | FIGI--GPKQILFTDFSFLFVAAYIELPFMLLPIFNALDDIDQNLIYASDDLGANAWQTF | 190 |
| | | +GI P +IL T+ + + Y+ LPFM+LP+++A++ +D L+ A+ DLGAN +Q F | |
| Sbjct: | 137 | DMGILSAPIRILNTEIAVIIGLVYLLLPFMILPLYSAIEKLDNRLLEAARDLGANTFQRF | 196 |
| Query: | 191 | QKVIFPLSLNGVRAGVQSVFIPSLSLFMLTRLIGGNRVITLGTAIEQHFLITQNKGMGST | 250 |
| | | +VI PL++ G+ AG V +P++ +F + L+GG +V+ +G I+ FLI++N GS | |
| Sbjct: | 197 | FRVILPLTMPGIIAGCLLVLLPAMGMFYVADLLGGAKVLLVGNVIKSEFLISRNWPFGSA | 256 |
| Query: | 251 | IGVILILVMVAIMWL | 265 |
| | | + + L ++M ++++ | |
| Sbjct: | 257 | VSIGLTVLMALLIFV | 271 |

[9418] A related DNA sequence was identified in S. pyogenes <SEQ ID 5315> which encodes the amino acid sequence <SEQ ID 5316>. Analysis of this protein sequence reveals the following:

| Possible site: 31 | | | | |
|---|---|---|---|---|
| >>> Seems to have an uncleavable N-term signal seq | | | | |
| | INTEGRAL | Likelihood = −7.38 | Transmembrane | 19-35 (11-40) |
| | INTEGRAL | Likelihood = −6.79 | Transmembrane | 250-266 (245-268) |
| | INTEGRAL | Likelihood = −4.83 | Transmembrane | 65-81 (63-85) |
| | INTEGRAL | Likelihood = −1.97 | Transmembrane | 96-112 (96-115) |
| | INTEGRAL | Likelihood = −1.91 | Transmembrane | 148-164 (148-165) |

```
----- Final Results -----
                              bacterial membrane --- Certainty = 0.3951(Affirmative) < succ>
                                bacterial outside --- Certainty = 0.0000(Not Clear) < succ>
                            bacterial cytoplasm --- Certainty = 0.0000(Not Clear) < succ>
```

[9419] The protein has homology with the following sequences in the databases:

| >GP: AAC22990 GB: U32813 spermidine/putrescine ABC transporter, | | | |
|---|---|---|---|
| permease protein (potB) [Haemophilus influenzae Rd] | | | |
| Identities = 91/262 (34%), Positives = 158/262 (59%), Gaps = 11/262 (4%) | | | |
| Query: | 20 | FLWILFFVVAPVTLLFYKSFFDIEGR------VTLANYETFFSSWTYLRMSVNSILYAGI | 73 |
| | | F W++FFV+ P L+ SF +G +T+ NY F+ Y ++ NS+ +GI | |
| Sbjct: | 17 | FSWLIFFVLIPNLLVLAVSFLTRDGSNFYAFPITIENYTNLFNP-LYAQVVWNSLSMSGI | 75 |
| Query: | 74 | ITLVTLLISYPTALFLTRL--KHKQLWLMLIILPTWVNLLLKAYAFMGIFGQQGGINSFL | 131 |
| | | T++ LLI YP A ++++ K++ L L L++LP W N L++ Y G +G +N+ L | |
| Sbjct: | 76 | ATIICLLIGYPFAFMMSKIHPKYRPLLLFLVVLPFWTNSLIRIYGMKVFLGVKGILNTML | 135 |
| Query: | 132 | TFMGI--GPQQILFTDFSFIFVASYIELPFMMLPIFNALDDIDHNVINASRDLGASEFQA | 189 |
| | | MGI P +IL T+ + I Y+ LPFM+LP+++A++ +D+ ++ A+RDLGA+ FQ | |
| Sbjct: | 136 | IDMGILSAPIRILNTEIAVIIGLVYLLLPFMILPLYSAIEKLDNRLLEAARDLGANTFQR | 195 |
| Query: | 190 | FSKVIFPLSLNGVRAGVQSVFIPSLSLFMLTRLIGGNRVITLGTAIEQHFLTTQNWGMGS | 249 |
| | | F +VI PL++ G+ AG V +P++ +F + L+GG +V+ +G I+ FL ++NW GS | |
| Sbjct: | 196 | FFRVILPLTMPGIIAGCLLVLLPAMGMFYVADLLGGAKVLLVGNVIKSEFLISRNWPFGS | 255 |
| Query: | 250 | TIGVVLILTMVAIMWLTKEKSK | 271 |
| | | + + L + M ++++ +K | |
| Sbjct: | 256 | AVSIGLTVLMALLIFVYYRANK | 277 |

[9420] An alignment of the GAS and GBS proteins is shown below.

| Identities = 215/266 (80%), Positives = 239/266 (89%) | | | |
|---|---|---|---|
| Query: | 4 | RRREMKKTSSLFSIPYMAWLFLFVLAPVALIAWNSFFDINGHFTLANYQTFFSSGTYLKM | 63 |
| | | RR MKKTSSLFSIPY W+ FV+APV L+ + SFFDI G TLANY+TFFSS TYL+M | |
| Sbjct: | 4 | RRSVMKKTSSLFSIPYFLWILFFVVAPVTLLFYKSFFDIEGRVTLANYETFFSSWTYLRM | 63 |
| Query: | 64 | SFNSVLYAGIVSFITLLISYPAAYLLTKLKHKQLWLMLVILPTWINLLLKAYAFMGIFGQ | 123 |
| | | S NS+LYAGI++ +TLLISYP A LT+LKHKQLWLML+ILPTW+NLLLKAYAFMGIFGQ | |
| Sbjct: | 64 | SVNSILYAGIITLVTLLISYPTALFLTRLKHKQLWLMLIILPTWVNLLLKAYAFMGIFGQ | 123 |
| Query: | 124 | QGGINAFLTFIGIGPKQILFTDFSFLFVAAYIELPFMLLPIFNALDDIDQNLIYASDDLG | 183 |
| | | QGGIN+FLTF+GIGP+QILFTDFSF+FVA+YIELPFM+LPIFNALDDID N+I AS DLG | |
| Sbjct: | 124 | QGGINSFLTFMGIGPQQILFTDFSFIFVASYIELPFMMLPIFNALDDIDHNVINASRDLG | 183 |
| Query: | 184 | ANAWQTFQKVIFPLSLNGVRAGVQSVFIPSLSLFMLTRLIGGNRVITLGTAIEQHFLITQ | 243 |
| | | A+ +Q F KVIFPLSLNGVRAGVQSVFIPSLSLFMLTRLIGGNRVITLGTAIEQHFL TQ | |
| Sbjct: | 184 | ASEFQAFSKVIFPLSLNGVRAGVQSVFIPSLSLFMLTRLIGGNRVITLGTAIEQHFLTTQ | 243 |
| Query: | 244 | NKGMGSTIGVILILVMVAIMWLTKER | 269 |
| | | N GMGSTIGV+LIL MVAIMWLTKE+ | |
| Sbjct: | 244 | NWGMGSTIGVVLILTMVAIMWLTKEK | 269 |

[9421] Based on this analysis, it was predicted that these proteins and their epitopes could be useful antigens for vaccines or diagnostics.

### EXAMPLE 1710

[9422] A DNA sequence (GBSx1814) was identified in S. agalactiae <SEQ ID 5317> which encodes the amino acid sequence <SEQ ID 5318>. This protein is predicted to be spermidine/putrescine ABC transporter, ATP-binding protein (potA). Analysis of this protein sequence reveals the following:

```
Possible site: 47
>>> Seems to have no N-terminal signal sequence
----- Final Results -----
                            bacterial cytoplasm --- Certainty = 0.3031(Affirmative) < succ>
                              bacterial membrane --- Certainty = 0.0000(Not Clear) < succ>
                                bacterial outside --- Certainty = 0.0000(Not Clear) < succ>
```

[9423] The protein has homology with the following sequences in the GENPEPT database.

| >GP: AAB91525 GB: AE001165 spermidine/putrescine ABC transporter, | | | |
|---|---|---|---|
| ATP-binding protein (potA) [Borrelia burgdorferi] | | | |
| Identities = 166/345 (48%), Positives = 240/345 (69%), Gaps = 1/345 (0%) | | | |
| Query: | 1 | MTNPIIAFKNVSKVFEDSNTVVLKDINFELEEGKFYTLLGASGSGKSTILNIIAGLLEAS | 60 |
| | | M N I+ KN+S ++++ L +IN ++++ +F TLLG SG GK+T++ I+ G L | |
| Sbjct: | 1 | MDNCILEIKNLSHYYDNNGNKTLDNINLKIKKNEFITLLGPSGCGKTTLIKILGGFLSQK | 60 |
| Query: | 61 | TGDIYLDGKRINDVPTNKRDVHTVFQNYALFPHMTVFENVAFPLKLKKMDKKEIQKRVQE | 120 |
| | | G+IY K I+ NKR+++TVFQNYALFPHM VF+N++F L++KK K I+++V+ | |
| Sbjct: | 61 | NGEIYFFSKEISKTSPNKREINTVFQNYALFPHMNVFDNISFGLRMKKTPKDIIKEKVKT | 120 |
| Query: | 121 | TLKMVRLEGFEKRAIQKLSGGQRQRVAIARAIINQPKVVLLDEPLSALDLKLRTEMQYEL | 180 |
| | | +L ++ + + R I +LSGGQ+QRVAIARA++ +PK++LLDEPLSALDLK+R EMQ EL | |
| Sbjct: | 121 | SLSLIGMPKYAYRNINELSGGQKQRVAIARAMVMEPKLLLLDEPLSALDLKMRQEMQKEL | 180 |
| Query: | 181 | RELQQRLGITFVFVTHDQEEALAMSDWIFVMNEGEIVQSGTPVDIYDEPINHFVATFIGE | 240 |
| | | +++Q++LGITF++VTHDQEEAL MSD I VMNEG I+Q GTP +IY+EP FVA FIGE | |
| Sbjct: | 181 | KKIQRQLGITFIYVTHDQEEALTMSDRIVVMNEGIILQIGTPEEIYNEPKTKFVADFIGE | 240 |
| Query: | 241 | SNILSGKMIEDYLVEFNGKRFEAVDGGMRPNESVQVVIRPEDLQITLPDEGKLQVKVDTQ | 300 |
| | | SNI G ++ +V G FE +D G E+V +VIRPED+++ +G L + + | |
| Sbjct: | 241 | SNIFDGTYKKELVVSLLGHEFECLDKGFEAEEAVDLVIRPEDVKLLPKGKGHLSGTITSA | 300 |
| Query: | 301 | LFRGVHYEIIAYDDLGNEWMIHSTRKAIEGEVIGLDFTPEDIHIM | 345 |
| | | +F+GVHYE+ N W++ STR GE + + P+DIH+M | |
| Sbjct: | 301 | IFQGVHYEMTLEIQKTN-WIVQSTRLTKVGEEVDIFLEPDDIHVM | 344 |

[9424] There is also homology to SEQ ID 1292 Based on this analysis, it was predicted that this protein and its epitopes, could be useful antigens for vaccines or diagnostics.

### EXAMPLE 1711

[9425] A DNA sequence (GBSx1815) was identified in S. agalactiae <SEQ ID 5319> which encodes the amino acid sequence <SEQ ID 5320>. Analysis of this protein sequence reveals the following:

```
Possible site: 53
>>> Seems to have no N-terminal signal sequence
----- Final Results -----
                            bacterial cytoplasm --- Certainty = 0.4990(Affirmative) < succ>
                              bacterial membrane --- Certainty = 0.0000(Not Clear) < succ>
                                bacterial outside --- Certainty = 0.0000(Not Clear) < succ>
```

[9426] The protein has homology with the following sequences in the GENPEPT database.

| >GP: BAB06283 GB: AP001515 UDP-N-acetylenolpyruvoylglucosamine | | | |
|---|---|---|---|
| reductase [Bacillus halodurans] | | | |
| Identities = 119/286 (41%), Positives = 166/286 (57%), Gaps = 1/286 (0%) | | | |
| Query: | 13 | DIRFDEPLKKYTYTKVGGPADYLAFPRNRLELSRIVKFANSQNIPWMVLGNASNIIVRDG | 72 |
| | | ++R +E L +T K+GGPAD P + L +K W V+G SNI+V D | |
| Sbjct: | 15 | EVRVNESLAHHTTWKIGGPADVFVIPNDIEGLKNTMKLIQETGCKWRVIGRGSNILVSDK | 74 |
| Query: | 73 | GIRGFVIMFDK-LSTVTVNGYVIEAEAGANLIETTRIARYHSLTGFEFACGIPGSVGGAV | 131 |
| | | G+RG I DK L + VNG I AG +++ + L G EFA GIPGSVGGAV | |
| Sbjct: | 75 | GLRGVTIKLDKGLDHLEVNGESITVGAGFPVVKLATVISRQGLAGLEFAAGIPGSVGGAV | 134 |
| Query: | 132 | FMNAGAYGGEIAHILLSAQVLTPQGELKTIEARNMQFGYRHSVIQESGDIVISAKFALKP | 191 |
| | | FMNAGA+G +I+ IL A VL P G L+ + M F YR S++Q++ I + A F+L | |
| Sbjct: | 135 | FMNAGAHGSDISQILTKAHVLFPDGTLRWLTNEEMAFSYRTSLLQKNDGICVEAIFSLTR | 194 |
| Query: | 192 | GDHLMITQEMDRLTYLRELKQPLEYPSCGSVFKRPPGHFAGQLISEAHLKGQRIGGVEVS | 251 |
| | | GD I +++ + R QP +P+CGSVF+ P +AGQLI +A LKG +IGG ++S | |
| Sbjct: | 195 | GDKEDIKKKLQKNKDYRRDTQPWNHPTCGSVFRNPLPEYAGQLIEKAGLKGYQIGGAQIS | 254 |
| Query: | 252 | QKHAGFMVNIAEGSAQDYENLIEHVINTVESTSGVHLEPEVRIIGE | 297 |
| | | HA F+VN + A D LI HV +T++ +++E EV +IGE | |
| Sbjct: | 255 | TMHANFIVNTGDAKAADVLALIHHVKDTIQKQYQMNMETEVELIGE | 300 |

[9427] A related DNA sequence was identified in S. pyogenes <SEQ ID 5321> which encodes the amino acid sequence <SEQ ID 5322>. Analysis of this protein sequence reveals the following:

```
Possible site: 47
>>> Seems to have no N-terminal signal sequence
----- Final Results -----
                            bacterial cytoplasm --- Certainty = 0.4557(Affirmative) < succ>
                              bacterial membrane --- Certainty = 0.0000(Not Clear) < succ>
                                bacterial outside --- Certainty = 0.0000(Not Clear) < succ>
```

[9428] An alignment of the GAS and GBS proteins is shown below.

| Identities = 229/292 (78%), Positives = 267/292 (91%) | | | |
|---|---|---|---|
| Query: | 8 | ELEGLDIRFDEPLKKYTYTKVGGPADYLAFPRNRLELSRIVKFANSQNIPWMVLGNASNI | 67 |
| | | EL G+DIR +EPLK YTYTKVGGPAD+LAFPRN ELSRIV +AN +N+PW+VLGNASN+ | |
| Sbjct: | 4 | ELHGIDIRENEPLKHYTYTKVGGPADFLAFPRNHYELSRIVAYANKENMPWLVLGNASNL | 63 |
| Query: | 68 | IVRDGGIRGFVIMFDKLSTVTVNGYVIEAEAGANLIETTRIARYHSLTGFEFACGIPGSV | 127 |
| | | IVRDGGIRGFVIMFDKL+ V +NGY +EAEAGANLIETT+IA++HSLTGFEFACGIPGS+ | |
| Sbjct: | 64 | IVRDGGIRGFVIMFDKLNAVHLNGYTLEAEAGANLIETTKIAKFHSLTGFEFACGIPGSI | 123 |
| Query: | 128 | GGAVFMNAGAYGGEIAHILLSAQVLTPQGELKTIEARNMQFGYRHSVIQESGDIVISAKF | 187 |
| | | GGAVFMNAGAYGGEI+HI LSA+VLTP GE+KTI AR+M FGYRHS IQE+GDIVISAKF | |
| Sbjct: | 124 | GGAVFMNAGAYGGEISHIFLSAKVLTPSGEIKTISARDMAFGYRHSAIQETGDIVISAKF | 183 |
| Query: | 188 | ALKPGDHLMITQEMDRLTYLRELKQPLEYPSCGSVFKRPPGHFAGQLISEAHLKGQRIGG | 247 |
| | | ALKPG++ I+QEM+RL +LR+LKQPLE+PSCGSVFKRPPGHFAGQLI EA+LKG RIGG | |
| Sbjct: | 184 | ALKPGNYDTISQEMNRLNHLRQLKQPLEFPSCGSVFKRPPGHFAGQLIMEANLKGHRIGG | 243 |
| Query: | 248 | VEVSQKHAGFMVNIAEGSAQDYENLIEHVINTVESTSGVHLEPEVRIIGESL | 299 |
| | | VEVS+KH GFM+N+A+G+A+DYE+LI +VI TVE+ SGV LEPEVRIIGE+L | |
| Sbjct: | 244 | VEVSEKHTGFMINVADGTAKDYEDLIAYVIETVENHSGVRLEPEVRIIGENL | 295 |

[9429] Based on this analysis, it was predicted that these proteins and their epitopes could be useful antigens for vaccines or diagnostics.

### EXAMPLE 1712

[9430] A DNA sequence (GBSx1816) was identified in S. agalactiae <SEQ ID 5323> which encodes the amino acid sequence <SEQ ID 5324>. This protein is predicted to be 2-amino-4-hydroxy-6-hydroxymethyldihydropterin pyrophosphokinase/dihyd. Analysis of this protein sequence reveals the following:

```
Possible site: 47
>>> Seems to have no N-terminal signal sequence
----- Final Results -----
                            bacterial cytoplasm --- Certainty = 0.1122(Affirmative) < succ>
                              bacterial membrane --- Certainty = 0.0000(Not Clear) < succ>
                                bacterial outside --- Certainty = 0.0000(Not Clear) < succ>
```

[9431] The protein has homology with the following sequences in the GENPEPT database.

| >GP: BAB03814 GB: AP001507 | | | |
|---|---|---|---|
| 2-amino-4-hydroxy-6-hydroxymethyldihydropteridine | | | |
| pyrophosphokinase [Bacillus halodurans] | | | |
| Identities = 64/146 (43%), Positives = 94/146 (63%) | | | |
| Query: | 5 | YLSLGSNIGDRETFLKQALFSIDHLQKTKVAQISAIYETAAWGNTNQEDFFNICCQVETD | 64 |
| | | Y++LGSNIGDR FL++A+ + K V S+IYET G T+Q F N+ +V T | |
| Sbjct: | 6 | YIALGSNIGDRSRFLEEAIQQLAEHDKVTVTCCSSIYETDPVGYTDQSPFLNMVVEVSTS | 65 |
| Query: | 65 | LAPFELLDYCQEIEKCLKRVRHEHWGPRTIDIDILLFGNQVINQEDLVVPHPYMTKRAFV | 124 |
| | | L +LL+ Q+IE+ R RH WGPRT+D+DILL+ + E+L++PHP M +RAFV | |
| Sbjct: | 66 | LPVEQLLEVTQKIERYCGRERHIRWGPRTLDLDILLYDQENREMENLIIPHPRMWERAFV | 125 |
| Query: | 125 | LVPLLEIAPQLSLPNGSKLEDYLEKL | 150 |
| | | L+PL+E+ P + P+G +E + +L | |
| Sbjct: | 126 | LIPLMELNPSIVAPSGKTIEQVVREL | 151 |

[9432] A related DNA sequence was identified in S. pyogenes <SEQ ID 5325> which encodes the amino acid sequence <SEQ ID 5326>. Analysis of this protein sequence reveals the following:

Possible site: 45
>>> Seems to have no N-terminal signal sequence
----- Final Results -----
bacterial cytoplasm --- Certainty = 0.0479 (Affirmative) < succ>
bacterial membrane --- Certainty = 0.0000 (Not Clear) < succ>
bacterial outside --- Certainty = 0.0000 (Not Clear) < succ>

[9433] An alignment of the GAS and GBS proteins is shown below.

| Identities = 85/156 (54%), Positives = 111/156 (70%), Gaps = 1/156 (0%) | | | |
|---|---|---|---|
| Query: | 1 | MTTVYLSLGSNIGDRETFLKQALFSIDHLQKTKVAQISAIYETAAWGNTNQEDFFNICCQ | 60 |
| | | MT VYLSLG+N+GDR +L++AL ++ L +T++ S+IYET AWG T Q DF N+ CQ | |
| Sbjct: | 1 | MTIVYLSLGTNMGDRAAYLQKALEALADLPQTRLLAQSSIYETTAWGKTGQADFLNMACQ | 60 |
| Query: | 61 | VETDLAPFELLDYCQEIEKCLKRVRHEHWGPRTIDIDILLFGNQVINQEDLVVPHPYMTK | 120 |
| | | ++T L + L Q IE+ L RVRHE WG RTIDIDILLFG +V + ++L VPHPYMT+ | |
| Sbjct: | 61 | LDTQLTAADFLKETQAIEQSLGRVRHEKWGSRTIDIDILLFGEEVYDTKELKVPHPYMTE | 120 |
| Query: | 121 | RAFVLVPLLEIAPQLSLPNGSK-LEDYLEKLNLGEV | 155 |
| | | RAFVL+PLLE+ P L LP K L DYL L+ ++ | |
| Sbjct: | 121 | RAFVLIPLLELQPDLKLPPNHKFLRDYLAALDQSDI | 156 |

[9434] Based on this analysis, it was predicted that these proteins and their epitopes could be useful antigens for vaccines or diagnostics.

### EXAMPLE 1713

[9435] A DNA sequence (GBSx1817) was identified in S. agalactiae <SEQ ID 5327> which encodes the amino acid sequence <SEQ ID 5328>. Analysis of this protein sequence reveals the following:

Possible site: 44
>>> Seems to have no N-terminal signal sequence
----- Final Results -----
bacterial cytoplasm --- Certainty = 0.2826 (Affirmative) < succ>
bacterial membrane --- Certainty = 0.0000 (Not Clear) < succ>
bacterial outside --- Certainty = 0.0000 (Not Clear) < succ>

[9436] A related DNA sequence was identified in S. pyogenes <SEQ ID 5329> which encodes the amino acid sequence <SEQ ID 5330>. Analysis of this protein sequence reveals the following:

Possible site: 50
>>> Seems to have no N-terminal signal sequence
----- Final Results -----
bacterial cytoplasm --- Certainty = 0.3547 (Affirmative) < succ>
bacterial membrane --- Certainty = 0.0000 (Not Clear) < succ>
bacterial outside --- Certainty = 0.0000 (Not Clear) < succ>

[9437] An alignment of the GAS and GBS proteins is shown below.

| Identities = 75/119 (63%), Positives = 92/119 (77%) | | | |
|---|---|---|---|
| Query: | 1 | MDKIYLNKCRFYGYHGAFSEEQTLGQVFQVDAVLSLDLAKASQTDDLIDTVHYGEVFDCI | 60 |
| | | MDKI L CRFYGYHGAF EEQTLGQ+F VD LS+DL AS +D L DTVHYG VFD + | |
| Sbjct: | 1 | MDKIVLEGCRFYGYHGAFKEEQTLGQIFLVDLELSVDLQAASLSDQLTDTVHYGMVFDSV | 60 |
| Query: | 61 | KNHVENEQYQLIEKLAGVIVEDIFLQFHPVQAITLKITKDNPPINGHYESVGIELERRR | 119 |
| | | + VE E++ LIE+LAG I E +F +F P++AI + I K+NPPI GHY++VGIELER+R | |
| Sbjct: | 61 | RQLVEGEKFILIERLAGAICEQLFNEFPPIEAIKVAIKKENPPIAGHYKAVGIELERQR | 119 |

[9438] Based on this analysis, it was predicted that these proteins and their epitopes could be useful antigens for vaccines or diagnostics.

### EXAMPLE 1714

[9439] A DNA sequence (GBSx1818) was identified in S. agalactiae <SEQ ID 5331> which encodes the amino acid sequence <SEQ ID 5332>. Analysis of this protein sequence reveals the following:

Possible site: 26
>>> Seems to have an uncleavable N-term signal seq
----- Final Results -----
bacterial membrane --- Certainty = 0.0000 (Not Clear) < succ>
bacterial outside --- Certainty = 0.0000 (Not Clear) < succ>
bacterial cytoplasm --- Certainty = 0.0000 (Not Clear) < succ>

[9440] A related DNA sequence was identified in S. pyogenes <SEQ ID 5333> which encodes the amino acid sequence <SEQ ID 5334>. Analysis of this protein sequence reveals the following:

Possible site: 26
>>> Seems to have an uncleavable N-term signal seq
----- Final Results -----
bacterial membrane --- Certainty = 0.0000 (Not Clear) < succ>
bacterial outside --- Certainty = 0.0000 (Not Clear) < succ>
bacterial cytoplasm --- Certainty = 0.0000 (Not Clear) < succ>

[9441] An alignment of the GAS and GBS proteins is shown below.

| Identities = 181/267 (67%), Positives = 224/267 (83%), Gaps = 1/267 (0%) | | | |
|---|---|---|---|
| Query: | 1 | MKIGQYDITGKACIMGILNVTPDSFSDGGSYTTIDSALNQVGEMLEQGVAIVDIGGESTR | 60 |
| | | MKIG++ I G A IMGILNVTPDSFSDGGSYTT+ AL+ V +M+ G I+D+GGESTR | |
| Sbjct: | 1 | MKIGKFVIEGNAAIMGILNVTPDSFSDGGSYTTVQKALDHVEQMIADGAKIIDVGGESTR | 60 |
| Query: | 61 | PGAVFVTAEEEIKRVVPMIKAIREVYPDLLLSIDTYKTEVAQAALDAGVHILNDVWSGLY | 120 |
| | | PG FV+A +EI RVVP+IKAI+E Y D+L+SIDTYKTE A+AAL+AG ILNDVW+GLY | |
| Sbjct: | 61 | PGCQFVSATDEIDRVVPVIKAIKENY-DILISIDTYKTETARAALEAGADILNDVWAGLY | 119 |
| Query: | 121 | DGKMLSLAAERNVPIILMHNQEEAVYQDIKKEVCEFLLERAERALEAGVSKDNIWIDPGF | 180 |
| | | DG+M +LAAE + PIILMHNQ+E VYQ++ ++VC+FL RA+ AL+AGV K+NIW+DPGF | |
| Sbjct: | 120 | DGQMFALAAEYDAPIILMHNQDEEVYQEVTQDVCDFLGNRAQAALDAGVPKNNIWVDPGF | 179 |
| Query: | 181 | GFAKTEEQNLELLKGLEQVCDLGYPVLFGISRKRTVNYLLGGNREVTERDMGTAALSAWA | 240 |
| | | GFAK+ +QN ELLKGL++VC LGYPVLFGISRKR V+ LLGGN + ERD TAALSA+A | |
| Sbjct: | 180 | GFAKSVQQNTELLKGLDRVCQLGYPVLFGISRKRVVDALLGGNTKAKERDGATAALSAYA | 239 |
| Query: | 241 | IAKGCQIVRVHNVEVNKDIVTVISQLV | 267 |
| | | + KGCQIVRVH+V+ N+DIV V+SQL+ | |
| Sbjct: | 240 | LGKGCQIVRVHDVKANQDIVAVLSQLM | 266 |

[9442] Based on this analysis, it was predicted that these proteins and their epitopes could be useful antigens for vaccines or diagnostics.

### EXAMPLE 1715

[9443] A DNA sequence (GBSx1819) was identified in S. agalactiae <SEQ ID 5335> which encodes the amino acid sequence <SEQ ID 5336>. Analysis of this protein sequence reveals the following:

```
Possible site: 19
>>> Seems to have no N-terminal signal sequence
----- Final Results -----
                            bacterial cytoplasm --- Certainty = 0.2429(Affirmative) < succ>
                              bacterial membrane --- Certainty = 0.0000(Not Clear) < succ>
                                bacterial outside --- Certainty = 0.0000(Not Clear) < succ>
```

[9444] A related DNA sequence was identified in S. pyogenes <SEQ ID 5337> which encodes the amino acid sequence <SEQ ID 5338>. Analysis of this protein sequence reveals the following:

```
Possible site: 32
>>> Seems to have no N-terminal signal sequence
----- Final Results -----
                            bacterial cytoplasm --- Certainty = 0.1590(Affirmative) < succ>
                              bacterial membrane --- Certainty = 0.0000(Not Clear) < succ>
                                bacterial outside --- Certainty = 0.0000(Not Clear) < succ>
```

[9445] An alignment of the GAS and GBS proteins is shown below.

| Identities = 151/184 (82%), Positives = 166/184 (90%) | | | |
|---|---|---|---|
| Query: | 3 | NQEKMEKAIYQFLEALGENPNREGLKDTPKRVAKMYIEMFSGLNQDPKEQFTAVFSENHE | 62 |
| | | N+EK E AIYQFLEA+GENPNREGL DTPKRVAKMY EMF GL +DPKE+FTAVF E HE | |
| Sbjct: | 16 | NKEKAEAAIYQFLEAIGENPNREGLLDTPKRVAKMYAEMFLGLGKDPKEEFTAVFKEQHE | 75 |
| Query: | 63 | EVVIVKDIPFYSMCEHHLVPFYGKAHIAYLPNDGRVTGLSKLARAVEVASKRPQLQERLT | 122 |
| | | +VVIVKDI FYS+CEHHLVPFYGKAHIAYLP+DGRVTGLSKLARAVEVASKRPQLQERLT | |
| Sbjct: | 76 | DVVIVKDISFYSICEHHLVPFYGKAHIAYLPSDGRVTGLSKLARAVEVASKRPQLQERLT | 135 |
| Query: | 123 | AQVAQALEDALAPKGIFVMIEAEHMCMTMRGIKKPGSKTITTVARGLYKDDRYERQEILS | 182 |
| | | +Q+A AL +AL PKG VM+EAEHMCMTMRGIKKPGSKTITT ARGLYK+ R ERQE++S | |
| Sbjct: | 136 | SQIADALVEALNPKGTLVMVEAEHMCMTMRGIKKPGSKTITTTARGLYKESRAERQEVIS | 195 |
| Query: | 183 | LIQK | 186 |
| | | L+ K | |
| Sbjct: | 196 | LMTK | 199 |

[9446] Based on this analysis, it was predicted that these proteins and their epitopes could be useful antigens for vaccines or diagnostics.

### EXAMPLE 1716

[9447] A DNA sequence (GBSx1820) was identified in S. agalactiae <SEQ ID 5339> which encodes the amino acid sequence <SEQ ID 5340>. This protein is predicted to be folylpolyglutamate synthase (folC). Analysis of this protein sequence reveals the following:

Possible site: 17
>>> Seems to have no N-terminal signal sequence
----- Final Results -----
bacterial cytoplasm --- Certainty = 0.2836 (Affirmative) < succ>
bacterial membrane --- Certainty = 0.0000 (Not Clear) < succ>
bacterial outside --- Certainty = 0.0000 (Not Clear) < succ>

[9448] A related GBS nucleic acid sequence <SEQ ID 9855> which encodes amino acid sequence <SEQ ID 9856> was also identified.

[9449] The protein has homology with the following sequences in the GENPEPT database.

| >GP: CAB14768 GB: Z99118 folyl-polyglutamate synthetase [Bacillus subtilis] | | | |
|---|---|---|---|
| Identities = 154/426 (36%), Positives = 245/426 (57%), Gaps = 17/426 (3%) | | | |
| Query: | 3 | YQEALEWIHSKLAFGIKPGLERMRWMLEQLGNPQNNLSAIHVVGTNGKGSTTSYLQHIFT | 62 |
| | | YQ+A WIH +L FG+KPGL RM+ ++ +LG+P+ + A HV GTNGKGST ++++ + | |
| Sbjct: | 5 | YQDARSWIHGRLKFGVKPGLGRMKQLMARLGHPEKKIRAFHVAGTNGKGSTVAFIRSMLQ | 64 |
| Query: | 63 | NSGYQVGTFTSPYIVDFRERISIDGQMIPESDFIKLVETVRPVVERLHLETNLEPATEFE | 122 |
| | | +GY VGTFTSPYI+ F ERIS++G I + ++ LV ++P VE L +T TEFE | |
| Sbjct: | 65 | EAGYTVGTFTSPYIITFNERISVNGIPISDEEWTALVNQMKPHVEALD-QTEYGQPTEFE | 123 |
| Query: | 123 | VITVLMFYYFGNSCPVDIVIIEAGMGGYYDSTNMFKALAVTCPSIGLDHQEVLGRTYVDI | 182 |
| | | ++T F YF VD VI E G+GG +DSTN+ + L SIG DH +LG T +I | |
| Sbjct: | 124 | IMTACAFLYFAEFHKVDFVIFETGLGGRFDSTNVVEPLLTVITSIGHDHMNILGNTIEEI | 183 |
| Query: | 183 | AEQKVGVLKKGVPFVYANDRQDVEEVFQIKAKETHSQTYRLHNDFYIKEEE-----NYFN | 237 |
| | | A +K G++K+G+P V A + + +V + +A+ + LH+ I EE F+ | |
| Sbjct: | 184 | AGEKAGIIKEGIPIVTAVTQPEALQVIRHEAERHAAPFQSLHDACVIFNEEALPAGEQFS | 243 |
| Query: | 238 | YIGPQANIDHIQLQMPGHHQVSNASIAI-TTSLLLRDKYPKLTLQTIKDGLEMTKWVGRT | 296 |
| | | + + + I+ + G HQ NA+++I L ++ ++ + ++ GL W GR | |
| Sbjct: | 244 | FKTEEKCYEDIRTSLIGTHQRQNAALSILAAEWLNKENIAHISDEALRSGLVKAAWPGRL | 303 |
| Query: | 297 | ELI--FPNVMIDGAHNNESVDALVQVIK-KYQQKNVHILFAAINTKPIESMLESLSSIA- | 352 |
| | | EL+ P V +DGAHN E V+ L + +K ++ + ++F+A+ KP ++M++L +IA | |
| Sbjct: | 304 | ELVQEHPPVYLDGAHNEEGVEKLAETMKQRFANSRISVVFSALKDKPYQNMIKRLETIAH | 363 |
| Query: | 353 | PVSVTSFDYPK-SINLDKYPKAYTRVSDWKKWLHDI-----NLTSDKDFYVITGSLYFIS | 406 |
| | | + SFD+P+ S+ D Y + W + D+ + + +ITGSLYFIS | |
| Sbjct: | 364 | AIHFASFDFPRASLAKDLYDASEISNKSWSEDPDDVIKFIESKKGSNEIVLITGSLYFIS | 423 |
| Query: | 407 | QVRQEL | 412 |
| | | +R+ L | |
| Sbjct: | 424 | DIRKRL | 429 |

[9450] A related DNA sequence was identified in S. pyogenes <SEQ ID 5341> which encodes the amino acid sequence <SEQ ID 5342>. Analysis of this protein sequence reveals the following:

| Possible site: 26 | | | |
|---|---|---|---|
| >>> Seems to have an uncleavable N-term signal seq | | | |
| INTEGRAL | Likelihood = −1.28 | Transmembrane | 12-28 (12-28) |

----- Final Results -----
bacterial membrane --- Certainty = 0.1510 (Affirmative) < succ>
bacterial outside --- Certainty = 0.0000 (Not Clear) < succ>
bacterial cytoplasm --- Certainty = 0.0000 (Not Clear) < succ>

[9451] An alignment of the GAS and GBS proteins is shown below.

| Identities = 230/411 (55%), Positives = 295/411 (70%), Gaps = 1/411 (0%) | | | |
|---|---|---|---|
| Query: | 1 | MTYQEALEWIHSKLAFGIKPGLERMRWMLEQLGNPQNNLSAIHVVGTNGKGSTTSYLQHI | 60 |
| | | MTY+E LEWIH L FGIKPGL+RM W+L QLGNPQ N+ +H+VGTNGKGST ++LQHI | |
| Sbjct: | 34 | MTYEETLEWIHDHLVFGIKPGLKRMLWVLGQLGNPQKNVKGVHIVGTNGKGSTVNHLQHI | 93 |
| Query: | 61 | FTNSGYQVGTFTSPYIVDFRERISIDGQMIPESDFIKLVETVRPVVERLHLETNLEPATE | 120 |
| | | FT +GY+VGTFTSPYI+DF+ERISI+G+MI E D + +RP+ ERL ET+ TE | |
| Sbjct: | 94 | FTTAGYEVGTFTSPYIMDFKERISINGRMISEKDLVIAANRIRPLTERLVQETDFGEVTE | 153 |
| Query: | 121 | FEVITVLMFYYFGNSCPVDIVIIEAGMGGYYDSTNMFKALAVTCPSIGLDHQEVLGRTYV | 180 |
| | | FEVIT++MF YFG+ PVDI IIEAG+GG YDSTN+F+A+ V CPSIGLDHQ +LG TY | |
| Sbjct: | 154 | FEVITLIMFLYFGDMHPVDIAIIEAGLGGLYDSTNVFQAMVVVCPSIGLDHQAILGETYA | 213 |
| Query: | 181 | DIAEQKVGVLKKGVPFVYANDRQDVEEVFQIKAKETHSQTYRLHNDFYIKEEENYFNYIG | 240 |
| | | +IA QK GVL+ G V+A + EVF KA++ + + F + E + + + | |
| Sbjct: | 214 | NIAAQKAGVLEGGETLVFAVENPSAREVFLTKAEQVGASIWEWQEQFQMAENASGYRFTS | 273 |
| Query: | 241 | PQANIDHIQLQMPGHHQVSNASIAITTSLLLRDKYPKLTLQTIKDGLEMTKWVGRTELIF | 300 |
| | | P I I + MPGHHQVSNA++AI T L L+D+YP+LT I++GL + W+GRTEL+ | |
| Sbjct: | 274 | PLGVISDIHIAMPGHHQVSNAALAIMTCLTLQDRYPRLTPDHIREGLANSLWLGRTELLA | 333 |
| Query: | 301 | PNVMIDGAHNNESVDALVQVIK-KYQQKNVHILFAAINTKPIESMLESLSSIAPVSVTSF | 359 |
| | | PN+MIDGAHNNESV ALV V+K Y K +HILF AI+TKPI ML +L I + VTSF | |
| Sbjct: | 334 | PNLMIDGAHNNESVAALVAVLKNNYNDKKLHILFGAIDTKPIADMLVALEQIGDLQVTSF | 393 |
| Query: | 360 | DYPKSINLDKYPKAYTRVSDWKKWLHDINLTSDKDFYVITGSLYFISQVRQ | 410 |
| | | YP + L+KYP+ + RV+D+K +L DF+VITGSLYFIS++RQ | |
| Sbjct: | 394 | HYPNAYPLEKYPERFGRVADFKDFLALRKHAKADDFFVITGSLYFISEIRQ | 444 |

[9452] Based on this analysis, it was predicted that these proteins and their epitopes could be useful antigens for vaccines or diagnostics.

### EXAMPLE 1717

[9453] A DNA sequence (GBSx1821) was identified in S. agalactiae <SEQ ID 5343> which encodes the amino acid sequence <SEQ ID 5344>. This protein is predicted to be rarD. Analysis of this protein sequence reveals the following:

| Possible site: 38 | | | |
|---|---|---|---|
| >>> Seems to have a cleavable N-term signal seq. | | | |
| INTEGRAL | Likelihood = −12.31 | Transmembrane | 130-146 (125-151) |
| INTEGRAL | Likelihood = −10.24 | Transmembrane | 269-285 (262-291) |
| INTEGRAL | Likelihood = −7.75 | Transmembrane | 212-228 (207-233) |
| INTEGRAL | Likelihood = −5.52 | Transmembrane | 80-96 (75-99) |
| INTEGRAL | Likelihood = −4.14 | Transmembrane | 106-122 (104-125) |
| INTEGRAL | Likelihood = −3.50 | Transmembrane | 182-198 (180-204) |
| INTEGRAL | Likelihood = −2.44 | Transmembrane | 40-56 (39-57) |
| INTEGRAL | Likelihood = −0.96 | Transmembrane | 153-169 (152-169) |
| INTEGRAL | Likelihood = −0.32 | Transmembrane | 251-267 (250-267) |

----- Final Results -----
bacterial membrane --- Certainty = 0.5925 (Affirmative) < succ>
bacterial outside --- Certainty = 0.0000 (Not Clear) < succ>
bacterial cytoplasm --- Certainty = 0.0000 (Not Clear) < succ>

[9454] The protein has homology with the following sequences in the GENPEPT database.

| >GP: BAB07585 GB: AP001520 unknown conserved protein [Bacillus halodurans] | | | |
|---|---|---|---|
| Identities = 109/288 (37%), Positives = 185/288 (63%), Gaps = 6/288 (2%) | | | |
| Query: | 7 | GIILGLSAYVLWGLLSLYWKLLSGIEAYSTFAYRIIFTVLTMLIYMLVSGRKTVYLKDLK | 66 |
| | | G+I +SAY++WG L LYWKL+ + A A+RI++++ M+I + V + ++++ | |
| Sbjct: | 8 | GVIAAISAYLIWGFLPLYWKLVDEVPASEMLAHRIVWSLGFMVILLAVMKKNRQVMREIL | 67 |
| Query: | 67 | GLVNNKKSFWTMFVASILISINWLVYIFAVTHGHATEASLGYYMMPIISILLSVLVLREH | 126 |
| | | + NKK+ + + VA+ILIS+NW ++I+AV+ EASLGYY+ P+I++LL+++ LRE | |
| Sbjct: | 68 | DTLANKKTAFGITVAAILISMNWFIFIYAVSSDKVIEASLGYYINPLINVLLAIVFLRES | 127 |
| Query: | 127 | LARVVSLAILIAIMGVGILVYQTGHFPLISLTLALSFGFYGLLKKSISLSSDFSMLVESS | 186 |
| | | L++ + L+A GV + G FP ++ LA+SFG YGL+KK +SLS+ S+ +E+ | |
| Sbjct: | 128 | LSKWEVASFLLAAAGVLNITLHYGSFPWVAFALAISFGVYGLIKKVVSLSAWASLTIETL | 187 |
| Query: | 187 | FIAPFALIYIVFF----AKDFLTDYNILQLVLLSLSGIITAVPLLLFAEAIKRAPLNII | 241 |
| | | + PFAL+++++ A F ++ + L+ SG TA+PLLLFA KR ++I | |
| Sbjct: | 188 | IMTPFALLFLLYIPLSGGASAFSLNH-LSTAWLIIASGAATALPLLLFATGAKRISFSLI | 246 |
| Query: | 242 | GFIQYINPTIQLLLALFIFKETIVSGEVIGFIFIWLAILVFSIGQVHT | 289 |
| | | GF+QY+ PTI L+L +F+F+E + + F+ IW +++F+I + T | |
| Sbjct: | 247 | GFLQYLAPTIMLMLGVFLFQEPFSRVQFVSFLLIWTGLIIFTISRSRT | 294 |

[9455] No corresponding DNA sequence was identified in S. pyogenes.

[9456] A related GBS gene <SEQ ID 8885> and protein <SEQ ID 8886> were also identified. Analysis of this protein sequence reveals the following:

| Lipop: Possible site: −1 Crend: 3 | | | |
|---|---|---|---|
| McG: Discrim Score: 5.30 | | | |
| GvH: Signal Score (−7.5): −1.64 | | | |
| Possible site: 38 | | | |
| >>> Seems to have a cleavable N-term signal seq. | | | |
| ALOM program | count: 9 | value: −12.31 | threshold: 0.0 |

| | | | |
|---|---|---|---|
| INTEGRAL | Likelihood = −12.31 | Transmembrane | 130-146 (125-151) |
| INTEGRAL | Likelihood = −10.24 | Transmembrane | 269-285 (262-291) |
| INTEGRAL | Likelihood = −7.75 | Transmembrane | 212-228 (207-233) |
| INTEGRAL | Likelihood = −5.52 | Transmembrane | 80-96 (75-99) |
| INTEGRAL | Likelihood = −4.14 | Transmembrane | 106-122 (104-125) |
| INTEGRAL | Likelihood = −3.50 | Transmembrane | 182-198 (180-204) |
| INTEGRAL | Likelihood = −2.44 | Transmembrane | 40-56 (39-57) |
| INTEGRAL | Likelihood = −0.96 | Transmembrane | 153-169 (152-169) |
| INTEGRAL | Likelihood = −0.32 | Transmembrane | 251-267 (250-267) |

| | | |
|---|---|---|
| PERIPHERAL | Likelihood = 7.96 | 229 |

modified ALOM score: 2.96
*** Reasoning Step: 3
----- Final Results -----
bacterial membrane --- Certainty = 0.5925 (Affirmative) < succ>
bacterial outside --- Certainty = 0.0000 (Not Clear) < succ>
bacterial cytoplasm --- Certainty = 0.0000 (Not Clear) < succ>

[9457] The protein has homology with the following sequences in the databases:

[chemical structure]

[9458] Based on this analysis, it was predicted that these proteins and their epitopes could be useful antigens for vaccines or diagnostics.

### EXAMPLE 1718

[9459] A DNA sequence (GBSx1822) was identified in S. agalactiae <SEQ ID 5345> which encodes the amino acid sequence <SEQ ID 5346>. Analysis of this protein sequence reveals the following:

Possible site: 34
>>> Seems to have no N-terminal signal sequence
----- Final Results -----
bacterial cytoplasm --- Certainty = 0.5200 (Affirmative) < succ>
bacterial membrane --- Certainty = 0.0000 (Not Clear) < succ>
bacterial outside --- Certainty = 0.0000 (Not Clear) < succ>

[9460] The protein has no significant homology with any sequences in the GENPEPT database.

[9461] No corresponding DNA sequence was identified in S. pyogenes.

[9462] Based on this analysis, it was predicted that this protein and its epitopes, could be useful antigens for vaccines or diagnostics.

### EXAMPLE 1719

[9463] A DNA sequence (GBSx1823) was identified in S. agalactiae <SEQ ID 5347> which encodes the amino acid sequence <SEQ ID 5348>. Analysis of this protein sequence reveals the following:

```
Possible site: 20
>>> Seems to have no N-terminal signal sequence
----- Final Results -----
                            bacterial cytoplasm --- Certainty = 0.0881(Affirmative) < succ>
                              bacterial membrane --- Certainty = 0.0000(Not Clear) < succ>
                                bacterial outside --- Certainty = 0.0000(Not Clear) < succ>
```

[9464] The protein has homology with the following sequences in the GENPEPT database.

| >GP: AAC44297 GB: U41735 homoserine kinase homolog [Streptococcus | | | |
|---|---|---|---|
| pneumoniae] | | | |
| Identities = 188/289 (65%), positives = 232/289 (80%), Gaps = 1/289 (0%) | | | |
| Query: | 1 | MRIIVPATSANIGPGFDSIGVALSKYLIIEVLEESTEWLVEHNLVN-IPKDHTNLLIQTA | 59 |
| | | M+IIVPATSANIGPGFDS+GVA++KYL IEV EE EWL+EH + IP D NLL+ A | |
| Sbjct: | 1 | MKIIVPATSANIGPGFDSVGVAVTKYLQIEVSEERDEWLIEHQIGKWIPHDERNLLLTIA | 60 |
| Query: | 60 | LHVKSDLAPHRLKMFSDIPLARGLGSSSSVIVAGIELANQLGNLALSQKEKLEIATRLEG | 119 |
| | | L + DL P RLKM SD+PLARGLGSSSSVIVAGIELANQLG L LS EKL++AT++EG | |
| Sbjct: | 61 | LQIVPDLQPRRLKMTSDVPLARGLGSSSSVIVAGIELANQLGQLNLSDHEKLQLATKIEG | 120 |
| Query: | 120 | HPDNVAPAIFGDLVISSIVKNDIKSLEVMFPDSSFIAFIPNYELKTSDSRNVLPQKLSYE | 179 |
| | | HPDNVAPAI+G+LVI+S V+ + ++ FP+ F+A+IPNYEL+T DSR+VLP+KLSY+ | |
| Sbjct: | 121 | HPDNVAPAIYGNLVIASSVEGQVSAIVADFPECDFLAYIPNYELRTRDSRSVLPKKLSYK | 180 |
| Query: | 180 | DAVASSSVANVMVASLLKGDLVTAGWAIERDLFHERYRQPLVKEFEVIKQISTQNGAYAT | 239 |
| | | +AVA+SS+ANV VA+LL GD+VTAG AIE DLFHERYRQ LV+EF +IKQ++ +NGAYAT | |
| Sbjct: | 181 | EAVAASSIANVAVAALLAGDMVTAGQAIEGDLFHERYRQDLVREFAMIKQVTKENGAYAT | 240 |
| Query: | 240 | YLSGAGPTVMVLCSKEKEQAIVTELSKLCLGGQIQVLNIERKGVRVEKR | 288 |
| | | YLSGAGPTVMVL S +K I EL K G++ L ++ +GVRVE + | |
| Sbjct: | 241 | YLSGAGPTVMVLASHDKMPTIKAELEKQPFKGKLHDLRVDTQGVRVEAK | 289 |

[9465] No corresponding DNA sequence was identified in S. pyogenes.

[9466] Based on this analysis, it was predicted that this protein and its epitopes, could be useful antigens for vaccines or diagnostics.

### EXAMPLE 1720

[9467] A DNA sequence (GBSx1824) was identified in S. agalactiae <SEQ ID 5349> which encodes the amino acid sequence <SEQ ID 5350>. This protein is predicted to be homoserine dehydrogenase (hom). Analysis of this protein sequence reveals the following:

```
Possible site: 30
>>> Seems to have no N-terminal signal sequence
----- Final Results -----
                              bacterial membrane --- Certainty = 0.0000(Not Clear) < succ>
                                bacterial outside --- Certainty = 0.0000(Not Clear) < succ>
                            bacterial cytoplasm --- Certainty = 0.0000(Not Clear) < succ>
```

[9468] A related GBS nucleic acid sequence <SEQ ID 9857> which encodes amino acid sequence <SEQ ID 9858> was also identified.

[9469] The protein has homology with the following sequences in the GENPEPT database.

| >GP: CAA65713 GB: X96988 hom [Lactococcus lactis] | | | |
|---|---|---|---|
| Identities = 221/432 (51%), Positives = 307/432 (70%), Gaps = 11/432 (2%) | | | |
| Query: | 15 | MTIKIALLGFGTVAKGIPYLLKENQHKLLSLEGEDIVIDKVLVRDNESRQRFINQGFTYN | 74 |
| | | M + IA+LGFGTV G+P LL EN+ KL + E+IVI KVL+RDN++ ++ +QGF Y+ | |
| Sbjct: | 1 | MAVNIAILGFGTVGTGLPTLLSENKEKLAKILDEEIVISKVLMRDNKAIEKARSQGFNYD | 60 |
| Query: | 75 | FVTEINTILQDSQIDIVVELMGGIEPAKTYLSQALGFGKHIVTANKDLIALHGKELMDLA | 134 |
| | | FV ++ IL DS+I IVVELMG IEPAKTY++QA+ GK++VTANKDL+A+HG EL LA | |
| Sbjct: | 61 | FVLNLDDILADSEISIVVELMGRIEPAKTYITQAIEAGKNVVTANKDLLAVHGVELRSLA | 120 |
| Query: | 135 | DARGLALFYEGAVAGGIPILRTLSHSFASDKMTRLLGILNGTSNFMLTKMFEEGWSYEQA | 194 |
| | | +AL+YE AVAGGIPILRTL++SF+SDK+T LLGILNGTSNFM+TKM EEGW+Y+++ | |
| Sbjct: | 121 | QKHHVALYYEAAVAGGIPILRTLANSFSSDKITHLLGILNGTSNFMMTKMSEEGWTYDES | 180 |
| Query: | 195 | LKKAQELGYAESDPTNDVEGIDTAYKATILSQFGFGMPIDFDDVNYKGISSIRSEDVEVA | 254 |
| | | L KAQELGYAESDPTNDV+GID +YK ILS+F FGM + DD+ G+ SI+ DVE+A | |
| Sbjct: | 181 | LAKAQELGYAESDPTNDVDGIDASYKLAILSEFAFGMTLAPDDIAKSGLRSIQKTDVEIA | 240 |
| Query: | 255 | QEMGFAIKLVADLRETPTGISVDVSPTLISQKHPLAAVNHVMNAVFIESIGIGQSLFYGP | 314 |
| | | Q+ G+ +KL ++ E +GI +VSPT + + HPLA+VN VMNAVFIES GIG S+FYG | |
| Sbjct: | 241 | QQFGYVLKLTGEINEVDSGIFAEVSPTFLPKSHPLASVNGVMNAVFIESEGIGDSVFYGA | 300 |
| Query: | 315 | GAGQNPTATSVLADIIDISRSIRSQIKIKPMNTYHCPCRLSMQSDIFNEYYLAISLRNAE | 374 |
| | | GAGQ PTATSVLADI+ I + ++ K N Y L+ DI N+YY ++ E | |
| Sbjct: | 301 | GAGQKPTATSVLADIVRIVKRVKDGTIGKSFNEYARSTSLANPHDIENKYYFSV-----E | 355 |
| Query: | 375 | DSDTLGR------YFEQENIGLKNVIEKALGDKQQEIYVLTDEVSQEKITQFIEEFPESG | 428 |
| | | D+ G+ F EN+ + V+++ K+ + +++ ++++ +++ ++ + | |
| Sbjct: | 356 | TPDSTGQLLLLVELFTSENVSFEQVLQQKGNGKRAVVVIISHKINRVQLSAIQDKLNQEK | 415 |
| Query: | 429 | VIQLINVFKVIG | 440 |
| | | +L+N FKV+G | |
| Sbjct: | 416 | DFKLLNRFKVLG | 427 |

[9470] No corresponding DNA sequence was identified in S. pyogenes.

[9471] Based on this analysis, it was predicted that this protein and its epitopes, could be useful antigens for vaccines or diagnostics.

### EXAMPLE 1721

[9472] A DNA sequence (GBSx1825) was identified in S. agalactiae <SEQ ID 5351> which encodes the amino acid sequence <SEQ ID 5352>. Analysis of this protein sequence reveals the following:

```
Possible site: 21
>>> Seems to have no N-terminal signal sequence
----- Final Results -----
                            bacterial cytoplasm --- Certainty = 0.4548(Affirmative) < succ>
                              bacterial membrane --- Certainty = 0.0000(Not Clear) < succ>
                                bacterial outside --- Certainty = 0.0000(Not Clear) < succ>
```

[9473] The protein has no significant homology with any sequences in the GENPEPT database.

[9474] No corresponding DNA sequence was identified in S. pyogenes.

[9475] Based on this analysis, it was predicted that this protein and its epitopes, could be useful antigens for vaccines or diagnostics.

### EXAMPLE 1722

[9476] A DNA sequence (GBSx1826) was identified in S. agalactiae <SEQ ID 5353> which encodes the amino acid sequence <SEQ ID 5354>. Analysis of this protein sequence reveals the following:

| Possible site: 29 | | | | |
|---|---|---|---|---|
| >>> Seems to have an uncleavable N-term signal seq | | | | |
| | INTEGRAL | Likelihood = −12.79 | Transmembrane | 20-36 (14-41) |

```
----- Final Results -----
                              bacterial membrane --- Certainty = 0.6116(Affirmative) < succ>
                                bacterial outside --- Certainty = 0.0000(Not Clear) < succ>
                            bacterial cytoplasm --- Certainty = 0.0000(Not Clear) < succ>
```

[9477] The protein has homology with the following sequences in the GENPEPT database.

| >GP: CAB15906 GB: Z99123 similar to hypothetical proteins [Bacillus | | | |
|---|---|---|---|
| subtilis] | | | |
| Identities = 105/272 (38%), Positives = 149/272 (54%), Gaps = 20/272 (7%) | | | |
| Query: | 25 | FLLIALIGIFLFFNNRSKQEIKT-----KTNASSHRKIVTSIKKKK-----WIKQKTPVK | 74 |
| | | FL I L+G L + QE K K ++KK+ WIK + P K | |
| Sbjct: | 5 | FLSIFLLGSCLALAACADQEANAEQPMPKAEQKKPEKKAVQVQKKEDDTSAWIKTEKPAK | 64 |
| Query: | 75 | IPILMYHAVHVMDPSEAASANLIVAPDIFESHIKRLKKEGYYFLAPNEAYRALNENALPE | 134 |
| | | +PILMYH++ ++ +L V FE+H+K L GY L P EA L ++ P | |
| Sbjct: | 65 | LPILMYHSI-------SSGNSLRVPKKEFEAHMKWLHDNGYQTLTPKEASLMLTQDKKPS | 117 |
| Query: | 135 | KKVIWITFDDGNADFYTKAYPILKKYKVKATNNIITGFVQEGRESNLNVQQMLEMKQNGM | 194 |
| | | +K + ITFDDG D Y AYP+LKKY +KAT +I + G + +L +QM EM Q+G+ | |
| Sbjct: | 118 | EKCVLITFDDGYTDNYQDAYPVLKKYGMKATIFMIGKSI--GHKHHLTEEQMKEMAQHGI | 175 |
| Query: | 195 | SFQGHTVTHPNLSLLTPELQTQEMTLSKQFLDQKLSQDTLAIAYPSGRYNPTTLDIASQY | 254 |
| | | S + HT+ H L+ LTP+ Q EM SK+ D Q T I+YP GRYN TL A + | |
| Sbjct: | 176 | SIESHTIDHLELNGLTPQQQQSEMADSKKLFDNMFHQQTTIISYPVGRYNEETLKAAEKT | 235 |
| Query: | 255 | -YKLGLTTNEGVATKDNGLLSLNRIRILPTTS | 285 |
| | | Y++G+TT G A++D G+ +L+R+R+ P S | |
| Sbjct: | 236 | GYQMGVTTEPGAASRDQGMYALHRVRVSPGMS | 267 |

[9478] A related DNA sequence was identified in S. pyogenes <SEQ ID 5355> which encodes the amino acid sequence <SEQ ID 5356>. Analysis of this protein sequence reveals the following:

```
Possible site: 24
>>> May be a lipoprotein
----- Final Results -----
                              bacterial membrane --- Certainty = 0.0000(Not Clear) < succ>
                                bacterial outside --- Certainty = 0.0000(Not Clear) < succ>
                            bacterial cytoplasm --- Certainty = 0.0000(Not Clear) < succ>
```

[9479] The protein has homology with the following sequences in the databases:

| >GP: CAB15906 GB: Z99123 similar to hypothetical proteins [Bacillus | | | |
|---|---|---|---|
| subtilis] | | | |
| Identities = 97/240 (40%), Positives = 140/240 (57%), Gaps = 9/240 (3%) | | | |
| Query: | 71 | KKTHFDSSKSQKKAHSKLTWTKQETPVKIPILMYHAIHVMSPEETANANLIVNPDLFDQQ | 130 |
| | | KR + + QKK W K E P K+PILMYH+I ++ +L V F+ | |
| Sbjct: | 37 | KKPEKKAVQVQKKEDDTSAWIKTEKPAKLPILMYHSI-------SSGNSLRVPKKEFEAH | 89 |
| Query: | 131 | LQKMKDEGYYFLSPEEVYRALSNNELPAKKVVWLTFDDSMIDFYNVAYPILKKYDAKATN | 190 |
| | | ++ + D GY L+P+E L+ ++ P++K V +TFDD D Y AYP+LKKY KAT | |
| Sbjct: | 90 | MKWLHDNGYQTLTPKEASLMLTQDKKPSEKCVLITFDDGYTDNYQDAYPVLKKYGMKATI | 149 |
| Query: | 191 | NVITGLTEMGSAANLTLKQMKEMKQVGMSFQDHTVNHPDLEQASPDVQTTEMKDSKDYLD | 250 |
| | | +I +G +LT +QMKEM Q G+S + HT++H +L +P Q +EM DSK D | |
| Sbjct: | 150 | FMIG--KSIGHKKHHLTEEQMKEMAQHGISIESHTIDHLELNGLTPQQQQSEMADSKKLFD | 207 |
| Query: | 251 | KQLNQNTIAIAYPSGRYNDTTLQIAARLNYKLGVTTNEGIASAANGLLSLNRIRILPNMS | 310 |
| | | +Q T I+YP GRYN+TL+ A + Y++GVTT G AS G+ +L+R+R+ P MS | |
| Sbjct: | 208 | NMFHQQTTIISYPVGRYNEETLKAAEKTGYQMGVTTEPGAASRDQGMYALHRVRVSPGMS | 267 |

[9480] An alignment of the GAS and GBS proteins is shown below.

| Identities = 153/265 (57%), Positives = 199/265 (74%), Gaps = 4/265 (1%) | | | |
|---|---|---|---|
| Query: | 33 | IFLFFNNRSKQEIKTK---TNASSHRKIVTSIKKKKWIKQKTPVKIPILMYHAVHVMDPS | 89 |
| | | I LF + ++ ++ TK T+ S + + K W KQ+TPVKIPILMYHA+HVM P | |
| Sbjct: | 54 | ISLFHHKKTAKKETTKLKKTHFDSSKSQKKAHSKLTWTKQETPVKIPILMYHAIHVMSPE | 113 |
| Query: | 90 | EAASANLIVAPDIFESHIKRLKKEGYYFLAPNEAYRALNENALPEKKVIWITFDDGNADF | 149 |
| | | E A+ANLIV PD+F+ ++++K EGYYFL+P E YRAL+ N LP KKV+W+TFDD DF | |
| Sbjct: | 114 | ETANANLIVNPDLFDQQLQKMKDEGYYFLSPEEVYRALSNNELPAKKVVWLTFDDSMIDF | 173 |
| Query: | 150 | YTKAYPILKKYKVKATNNIITGFVQEGRESNLNVQQMLEMKQNGMSFQGHTVTHPNLSLL | 209 |
| | | Y AYPILKKY KATNN+ITG + G +NL ++QM EMKQ GMSFQ HTV HP+L | |
| Sbjct: | 174 | YNVAYPILKKYDAKATNNVITGLTEMGSAANLTLKQMKEMKQVGMSFQDHTVNHPDLEQA | 233 |
| Query: | 210 | TPELQTQEMTLSKQFLDQKLSQDTLAIAYPSGRYNPTTLDIASQY-YKLGLTTNEGVATK | 268 |
| | | +P++QT EM SK +LD++L+Q+T+AIAYPSGRYN TTL IA++ YKLG+TTNEG+A+ | |
| Sbjct: | 234 | SPDVQTTEMKDSKDYLDKQLNQNTIAIAYPSGRYNDTTLQIAARLNYKLGVTTNEGIASA | 293 |
| Query: | 269 | DNGLLSLNRIRILPTTSDDDLIKTI | 293 |
| | | NGLLSLNRIRILP S ++L++T+ | |
| Sbjct: | 294 | ANGLLSLNRIRILPNMSPENLLQTM | 318 |

[9481] SEQ ID 5354 (GBS287d) was expressed in E. coli as a GST-fusion product. SDS-PAGE analysis of total cell extract is shown in FIG. 145 (lane 3 & 4; MW 57 kDa) and in FIG. 185 (lane 2; MW 57 kDa). It was also expressed in E. coli as a His-fusion product. SDS-PAGE analysis of total cell extract is shown in FIG. 145 (lane 6; MW 32 kDa) and in FIG. 181 (lane 5; MW 32 kDa).

[9482] Purified GBS287d-GST is shown in FIG. 243, lanes 10-11; purified GBS287d-His is shown in FIG. 234, lanes 7-8.

[9483] Based on this analysis, it was predicted that these proteins and their epitopes could be useful antigens for vaccines or diagnostics.

### EXAMPLE 1723

[9484] A DNA sequence (GBSx1828) was identified in S. agalactiae <SEQ ID 5357> which encodes the amino acid sequence <SEQ ID 5358>. Analysis of this protein sequence reveals the following:

```
Possible site: 21
>>> Seems to have no N-terminal signal sequence
----- Final Results -----
                              bacterial membrane --- Certainty = 0.0000(Not Clear) < succ>
                                bacterial outside --- Certainty = 0.0000(Not Clear) < succ>
                            bacterial cytoplasm --- Certainty = 0.0000(Not Clear) < succ>
```

[9485] The protein has no significant homology with any sequences in the GENPEPT database.

[9486] No corresponding DNA sequence was identified in S. pyogenes.

[9487] Based on this analysis, it was predicted that this protein and its epitopes, could be useful antigens for vaccines or diagnostics.

### EXAMPLE 1724

[9488] A DNA sequence (GBSx1829) was identified in S. agalactiae <SEQ ID 5359> which encodes the amino acid sequence <SEQ ID 5360>. Analysis of this protein sequence reveals the following:

```
Possible site: 40
>>> Seems to have no N-terminal signal sequence
----- Final Results -----
                            bacterial cytoplasm --- Certainty = 0.3352(Affirmative) < succ>
                              bacterial membrane --- Certainty = 0.0000(Not Clear) < succ>
                                bacterial outside --- Certainty = 0.0000(Not Clear) < succ>
```

[9489] The protein has no significant homology with any sequences in the GENPEPT database.

[9490] No corresponding DNA sequence was identified in S. pyogenes.

[9491] Based on this analysis, it was predicted that this protein and its epitopes, could be useful antigens for vaccines or diagnostics.

### EXAMPLE 1725

[9492] A DNA sequence (GBSx1830) was identified in S. agalactiae <SEQ ID 5361> which encodes the amino acid sequence <SEQ ID 5362>. This protein is predicted to be glycine betaine transporter BetL (opuD). Analysis of this protein sequence reveals the following:

```
Possible site: 61
>>> Seems to have an uncleavable N-term signal seq
INTEGRAL Likelihood = −12.68 Transmembrane 439-455 (435-491)
INTEGRAL Likelihood = −12.10 Transmembrane 256-272 (249-281)
INTEGRAL Likelihood = −11.30 Transmembrane 464-480 (456-491)
INTEGRAL Likelihood = −10.83 Transmembrane 49-65 (44-74)
INTEGRAL Likelihood = −10.40 Transmembrane 11-27 (5-34)
INTEGRAL Likelihood = −9.98 Transmembrane 396-412 (390-419)
INTEGRAL Likelihood = −9.29 Transmembrane 224-240 (220-247)
INTEGRAL Likelihood = −7.11 Transmembrane 347-363 (341-366)
INTEGRAL Likelihood = −2.87 Transmembrane 143-159 (143-159)
INTEGRAL Likelihood = −2.60 Transmembrane 192-208 (191-208)
INTEGRAL Likelihood = −1.44 Transmembrane 86-102 (86-105)
----- Final Results -----
                              bacterial membrane --- Certainty = 0.6074 (Affirmative) < succ>
                                bacterial outside --- Certainty = 0.0000 (Not Clear) < succ>
                            bacterial cytoplasm --- Certainty = 0.0000 (Not Clear) < succ>
```

[9493] The protein has homology with the following sequences in the GENPEPT database.

| >GP:AAD30266 GB:AF102174 glycine betaine transporter BetL | | | |
|---|---|---|---|
| [Listeria monocytogenes] | | | |
| Identities = 277/503 (55%), Positives = 365/503 (72%), Gaps = 1/503 (0%) | | | |
| Query: | 4 | KHITPVFTGSLIVSLILVLLGIIVPRGFQSWTQILREQVSTNFGWLYLLLVTSILALCVF | 63 |
| | | K +T VF GS + L+ VL G +P F+++T +++ +++NFGW YL++V I+ C+F | |
| Sbjct: | 2 | KKLTNVFWGSGFLVLLAVLFGAFLPEQFETFTNHIQKFLTSNFGWYYLIVVAIIIIFCLF | 61 |
| Query: | 64 | FIMSPLGQIRLGQPHSRPEYSTVSWIAMMFSAGMGIGLVFYGAAEPLSHFAISTPGAPKE | 123 |
| | | ++SP+G IRLG+P P YS SW AM+FSAGMGIGLVF+GAAEPLSH+A+ PG | |
| Sbjct: | 62 | LVLSPIGSIRLGKPGEEPGYSNKSWFAMLFSAGMGIGLVFWGAAEPLSHYAVQAPGGEVG | 121 |
| Query: | 124 | SQTALADAFRFTFFHWGIHAWAVYALVALALAYFGFRKQEKYLLSVTLKPLFGDKTDGWL | 183 |
| | | +Q A+ DA R++FFHWGI AW++YA+VALALAYF FRK L+S TL P+ G G + | |
| Sbjct: | 122 | TQAAMKDALRYSFFHWGISAWSIYAIVALALAYFKFRKNAPGLISATLYPILGKHAKGPI | 181 |
| Query: | 184 | GKIVDITTVVATVIGVATTLGFGAAQINGGLSFLLGVPNNAFVQIVIILITTALFVMSAL | 243 |
| | | G+++DI V ATVIGVATTLG GA QINGGL++L GVPNN VQ II+I T LF++SA+ | |
| Sbjct: | 182 | GQLIDIIAVFATVIGVATTLGLGAQQINGGLTYLFGVPNNFTVQFTIIVIVTILFMLSAM | 241 |
| Query: | 244 | SGLGKGVKILSNLNLILAVALLALVIVLGPTVRIFDTLTESLGSYLQNFFGMSFRAAAFD | 303 |
| | | SGL KG+++LSN+N+ +A LL L ++LGPT+ I + T S G YLQN MSF+ A | |
| Sbjct: | 242 | SGLDKGIQLLSNVNIYVAGVLLVLTLILGPTLFIMNNFTNSFGDYLQNIIQMSFQTAPDA | 301 |
| Query: | 304 | NTKRSWIDNWTIFYWAWWISWSPFVGVFIARISKGRSIREFLTVVLLIPTLLSFVWFAAF | 363 |
| | | R WID+WTIFYWAWW+SWSPFVG+FIARIS+GR+IR+FL V+++P L+S WFA F | |
| Sbjct: | 302 | PDARKWIDSWTIFYWAWWLSWSPFVGIFIARISRGRTIRQFLLGVIVLPALVSVFWFAVF | 361 |
| Query: | 364 | GTLSTQVQQLG-TNLTKFATEEVLFATFNHYTLGWLLSIIAIILIFSFFITSADSATYVL | 422 |
| | | G + V+Q G + L+ ATE+VLF FN + G +LSI+A+ILI FFITSADSAT+VL | |
| Sbjct: | 362 | GGSAIFVEQHGNSGLSSLATEQVLFGVFNEFPGGMMLSIVAMILIAVFFITSADSATFVL | 421 |
| Query: | 423 | ANLTEDGNLNPKNRTKVIWGLVLAVIAIVLLLSGGLLALQNVLIIVALPFSFVMILMMLA | 482 |
| | | M T G+LNP N KV WGL+ A IA VLL +GGL ALQN II A PFS V+ILM+++ | |
| Sbjct: | 422 | GMQTTGGSLNPPNSVKVTWGLLQAGIASVLLYAGGLTALQNASIIAAFPFSIVIILMIVS | 481 |
| Query: | 483 | LLVELFHEKKEMGLSISPDRYPR | 505 |
| | | L V L E++++GL + P + R | |
| Sbjct: | 482 | LFVSLTREQEKLGLYVRPKKSQR | 504 |

[9494] No corresponding DNA sequence was identified in S. pyogenes.

[9495] A related GBS gene <SEQ ID 8887> and protein <SEQ ID 8888> were also identified. Analysis of this protein sequence reveals the following:

```
Lipop: Possible site: −1 Crend: 4
McG: Discrim Score: 15.28
GvH: Signal Score (−7.5): −4.24
Possible site: 61
>>> Seems to have an uncleavable N-term signal seq
ALOM program count: 11 value: −12.68 threshold: 0.0
INTEGRAL Likelihood = −12.68 Transmembrane 439-455 (435-491)
INTEGRAL Likelihood = −12.10 Transmembrane 256-272 (249-281)
INTEGRAL Likelihood = −11.30 Transmembrane 464-480 (456 491)
INTEGRAL Likelihood = −10.83 Transmembrane 49-65 (44-74)
INTEGRAL Likelihood = −10.40 Transmembrane 11-27 (5-34)
INTEGRAL Likelihood = −9.98 Transmembrane 396-412 (390-419)
INTEGRAL Likelihood = −9.29 Transmembrane 224-240 (220-247)
INTEGRAL Likelihood = −7.11 Transmembrane 347-363 (341-366)
INTEGRAL Likelihood = −2.87 Transmembrane 143-159 (143-159)
INTEGRAL Likelihood = −2.60 Transmembrane 192-208 (191-208)
INTEGRAL Likelihood = −1.44 Transmembrane 86-102 (86-105)
PERIPHERAL Likelihood = 3.50 319
modified ALOM score: 3.04
*** Reasoning Step: 3
----- Final Results -----
                              bacterial membrane --- Certainty = 0.6074 (Affirmative) < succ>
                                bacterial outside --- Certainty = 0.0000 (Not Clear) < succ>
                            bacterial cytoplasm --- Certainty = 0.0000 (Not Clear) < succ>
```

[9496] The protein has homology with the following sequences in the databases:

[chemical structure]

[9497] Based on this analysis, it was predicted that these proteins and their epitopes could be useful antigens for vaccines or diagnostics.

### EXAMPLE 1726

[9498] A DNA sequence (GBSx1831) was identified in S. agalactiae <SEQ ID 5363> which encodes the amino acid sequence <SEQ ID 5364>. This protein is predicted to be succinic semialdehyde dehydrogenase (gabD-1). Analysis of this protein sequence reveals the following:

```
Possible site: 43
>>> Seems to have no N-terminal signal sequence
----- Final Results -----
                              bacterial cytoplasm --- Certainty = 0.2733 (Affirmative) < succ>
                                bacterial membrane --- Certainty = 0.0000 (Not Clear) < succ>
                                  bacterial outside --- Certainty = 0.0000 (Not Clear) < succ>
```

[9499] A related GBS nucleic acid sequence <SEQ ID 9859> which encodes amino acid sequence <SEQ ID 9860> was also identified.

[9500] The protein has homology with the following sequences in the GENPEPT database.

| >GP:AAD19405 GB:AF102543 succinic semialdehyde dehydrogenase | | | |
|---|---|---|---|
| [Zymomonas mobilis] | | | |
| Identities = 229/455 (50%), Positives = 305/455 (66%), Gaps = 5/455 (1%) | | | |
| Query: | 10 | MAYKTIYPYTNEVLHEFDNISDSDLEQSLDIAHALYKTWRKEDNVEERQNQLHKVADLLR | 69 |
| | | MAY+++ P T E + ++ + SD ++ S+D A ++K + + ER LHK A++ R | |
| Sbjct: | 1 | MAYESVNPATGETVKKYPDFSDKQVKDSVDRAATVFKNDWSQRTIAERSKVLHKAAEIFR | 60 |
| Query: | 70 | KDRDKYAEVMTKDNGKLFTEAQGEVDLCADIADYYADNGQKFLKPVPLESPNGEAYYLKQ | 129 |
| | | D DKYA++T DMGK EA+GEV+L ADI DYYA NG+KFL P +E G A | |
| Sbjct: | 61 | SDVDKYAKLLTIDNGKKIAEARGEVNLSADILDYYAKNGEKFLAPQKVEEKPG-AVVKAF | 119 |
| Query: | 130 | AVGVLLAVEPWNFPFYQINRVFAPNFIVGNTNLLKHASICPASAQAFEDLVREAGAPEGA | 189 |
| | | +G+LLA+EPWNFP+YQ+ R+ P I GN +L+KH+S P SA AFE ++ EAGAP+G | |
| Sbjct: | 120 | PLGLLLAIEPWNFPYYQLARIAGPYLIAGNALLVKHSSSVPQSAHAFEAVLEEAGAPKGI | 179 |
| Query: | 190 | FKNIFASYDQVSNLISDFRVAGVCLTGSERGGASIAAEAGKNLKKSSMELGGNDAFLILD | 249 |
| | | + N+ AS DQVS +I DPRV GV +TGS GA +AA+AGK KKS MELGG+DAF++LD | |
| Sbjct: | 180 | YTNLDASPDQVSQIIEDPRVRGVTVTGSASVGAELAAKAGKNWKKSVMELGGSDAFIVLD | 239 |
| Query: | 250 | DADFD--LLSKTIFFARLYNAGQVCTSSKRFIVMADKYDE-FVNNVVETFKSAKWGDPND | 306 |
| | | D D L+ K + RL+NAGQV ++KRFI++ K E F + + F++ K GDPMD | |
| Sbjct: | 240 | GVDIDDKLIDKAAY-GRLFNAGQVWCAAKRFIIVGQKRAELFTEKLKQRFEALKIGDPND | 298 |
| Query: | 307 | SETTLAPLSSAGAKDDVLKQIKLAVDHGAEVVFGNDTIDHPGNFVNPTVLTNITKANPIY | 366 |
| | | T L PLSS GA+D V+KQ++ AV +GA++V G I+ G F+ +LT+I + NP Y | |
| Sbjct: | 299 | ESTDLGPLSSVGARDQVVKQVEKAVQNGAKLVCGGKAIEGKGAFMKAGILTDIKRENPAY | 358 |
| Query: | 367 | NQEIFGPVASIYKVDTEEEAIALANDSSYGLGSTVFSSDPEHAKKVAAQIETGMTFINSG | 426 |
| | | +E FGP+A IY V E EAI LANDS YGLG VF+ D E +KVA QIETGM IN | |
| Sbjct: | 359 | FEEFFGPIAQIYAVKDEAEAIELANDSPYGLGGAVFAPDVEQGRKVAEQIETGMVAINKP | 418 |
| Query: | 427 | WTSLPELPFGGIKNSGYGRELSQLGFDAFVNEHLV | 461 |
| | | + PELPFGG+K+SGYGRELS G F+N L+ | |
| Sbjct: | 419 | LWTAPELPFGGVKHSGYGRELSHFGIQEFINWKLI | 453 |

[9501] A related DNA sequence was identified in S. pyogenes <SEQ ID 5365> which encodes the amino acid sequence <SEQ ID 5366>. Analysis of this protein sequence reveals the following:

```
Possible site: 27
>>> Seems to have no N-terminal signal sequence
----- Final Results -----
                              bacterial cytoplasm --- Certainty = 0.2887 (Affirmative) < succ>
                                bacterial membrane --- Certainty = 0.0000 (Not Clear) < succ>
                                  bacterial outside --- Certainty = 0.0000 (Not Clear) < succ>
```

[9502] An alignment of the GAS and GBS proteins is shown below.

| Identities = 335/457 (73%), Positives = 397/457 (86%) | | | |
|---|---|---|---|
| Query: | 9 | IMAYRTIYPYTNEVLHEFDNISDSDLEQSLDIAHALYRTWRKEDNVEERQNQLHKVADLL | 68 |
| | | +MAY+TIYPYTNEVLH FDN++D L L+ AH LYK WRKED++EER+ QLH+VA++L | |
| Sbjct: | 1 | VMAYQTIYPYTWEVLHTFDNMTDQGLADVLERAHLLYKKWRKEDHLEERKAQLHQVANIL | 60 |
| Query: | 69 | RKDRDKYAEVMTKDMGKLFTEAQGEVDLCADIADYYADNGQKFLKPVPLESPNGEAYYLK | 128 |
| | | R+DRDKYAE+MTKDMGKLFTEAQGEV+LCADIADYYAD +FL PLE+ +G+AYYLK | |
| Sbjct: | 61 | RRDRDRYAEIMTKDMGKLFTEAQGEVNLCADIADYYADKADEFLMSTPLETDSGQAYYLK | 120 |
| Query: | 129 | QAVGVLLAVEPWNFPFYQIMRVFAPNFIVGNTMLLKHASICPASAQAFEDLVREAGAPEG | 188 |
| | | Q+ GV+LAVEPWNFP+YQIMRVFAPNFIVGN M+LKHASICP SAQ+FE+LV EAGA G | |
| Sbjct: | 121 | QSTGVILAVEPWNFPYYQIMRVFAPNFIVGNPMVLKHASICPRSAQSFEELVLEAGAEAG | 180 |
| Query: | 189 | AFKNIFASYDQVSNLISDPRVAGVCLTGSERGGASIAAEAGKNLKKSSMELGGNDAFLIL | 248 |
| | | + N+F SYDQVS +I+D RV GVCLTGSERGGASIA EAGKNLKK+++ELGG+DAF+IL | |
| Sbjct: | 181 | SITNLFISYDQVSQVIADKRVVGVCLTGSERGGASIAEEAGKNLKKTTLELGGDDAFIIL | 240 |
| Query: | 249 | DDADFDLLSKTIFFARLYNAGQVCTSSKRFIVMADKYDEFVNMVVETFKSAKWGDPMDSE | 308 |
| | | DDAD+D L K ++F+RLYNAGQVCTSSKRFIV+ YD F ++ + FK+AKWGDPMD E | |
| Sbjct: | 241 | DDADWDQLEKVLYFSRLYNAGQVCTSSKRFIVLDKDYDRFKELLTKVFKTAKWGDPMDPE | 300 |
| Query: | 309 | TTLAPLSSAGAKDDVLKQIKLAVDHGAEVVFGNDTIDHPGNFVMPTVLTNITKANPIYNQ | 368 |
| | | TTLAPLSSA AK DVL QIKLA+DHGAE+V+G + IDHPG+FVMPT++ +TK NPIY Q | |
| Sbjct: | 301 | TTLAPLSSAQAKADVLDQIKLALDHGAELVYGGEAIDHPGHFVMPTIIAGLTKDNPIYYQ | 360 |
| Query: | 369 | EIFGPVASIYKVDTEEEAIALANDSSYGLGSTVFSSDPKHAKKVAAQIETGMTFINSGWT | 428 |
| | | EIFGPV IYKV +EEEAI +ANDS+YGLG T+FSS+ EHAK VAA+IETGM+FINSGWT | |
| Sbjct: | 361 | EIFGPVGEIYKVSSEEEAIEVANDSNYGLGGTIFSSNQEHAKAVAAKIETGMSFINSGWT | 420 |
| Query: | 429 | SLPELPFGGIKNSGYGRELSQLGFDAFVNEHLVFTPN | 465 |
| | | SLPELPFGGIK+SGYGRELS+LGF +FVNEHL++ PN | |
| Sbjct: | 421 | SLPELPFGGIKHSGYGRELSELGFTSFVNEHLIYIPN | 457 |

[9503] Based on this analysis, it was predicted that these proteins and their epitopes could be useful antigens for vaccines or diagnostics.

### EXAMPLE 1727

[9504] A DNA sequence (GBSx1832) was identified in S. agalactiae <SEQ ID 5367> which encodes the amino acid sequence <SEQ ID 5368>. Analysis of this protein sequence reveals the following:

```
Possible site: 31
>>> Seems to have a cleavable N-term signal seq.
----- Final Results -----
                                bacterial outside --- Certainty = 0.3000 (Affirmative) < succ>
                              bacterial membrane --- Certainty = 0.0000 (Not Clear) < succ>
                            bacterial cytoplasm --- Certainty = 0.0000 (Not Clear) < succ>
```

[9505] The protein has no significant homology with any sequences in the GENPEPT database.

[9506] No corresponding DNA sequence was identified in S. pyogenes.

[9507] Based on this analysis, it was predicted that this protein and its epitopes, could be useful antigens for vaccines or diagnostics.

### EXAMPLE 1728

[9508] A DNA sequence (GBSx1833) was identified in S. agalactiae <SEQ ID 5369> which encodes the amino acid sequence <SEQ ID 5370>. Analysis of this protein sequence reveals the following:

| Possible site: 41 | | | |
|---|---|---|---|
| >>> Seems to have a cleavable N-term signal seq. | | | |
| INTEGRAL | Likelihood = −7.91 | Transmembrane | 94-110 (86-115) |
| INTEGRAL | Likelihood = −7.75 | Transmembrane | 154-170 (150-176) |
| INTEGRAL | Likelihood = −7.11 | Transmembrane | 316-332 (312-339) |
| INTEGRAL | Likelihood = −6.16 | Transmembrane | 258-274 (253-278) |
| INTEGRAL | Likelihood = −2.71 | Transmembrane | 218-234 (217-234) |
| INTEGRAL | Likelihood = −1.49 | Transmembrane | 286-302 (283-302) |
| INTEGRAL | Likelihood = −0.96 | Transmembrane | 73-89 (73-89) |
| INTEGRAL | Likelihood = −0.27 | Transmembrane | 121-137 (121-137) |

----- Final Results -----
bacterial membrane --- Certainty = 0.4163 (Affirmative) < succ>
bacterial outside --- Certainty = 0.0000 (Not Clear) < succ>
bacterial cytoplasm --- Certainty = 0.0000 (Not Clear) < succ>

[9509] A related GBS nucleic acid sequence <SEQ ID 9861> which encodes amino acid sequence <SEQ ID 9862> was also identified.

[9510] The protein has homology with the following sequences in the GENPEPT database.

| >GP: AAC75219 GB: AE000305 orf, hypothetical protein [Escherichia coli K12] | | | |
|---|---|---|---|
| Identities = 102/331 (30%), Positives = 172/331 (51%), Gaps = 26/331 (7%) | | | |
| Query: | 12 | IPGLILCFIIA-IPSWLLGLYLPLIGAPVF-----AILIGIIVGSFYQNR--QLFNKGIA | 63 |
| | | IPGL L +I + W G +P + F AIL+G+++G+ + + G+ | |
| Sbjct: | 17 | IPGLALSAVITGVALW---GGSIPAVAGAGFSALTLAILLGMVLGNTIYPHIWKSCDGGVL | 74 |
| Query: | 64 | FTSKYILQTAVVLLGFGLNLMQVMKVGISSLPIIIMTISISLIIAYVL-QKLFKLDKTIA | 122 |
| | | F +Y+L+ ++L GF L Q+ VGIS + I ++T+S + ++A L QK+F LDK + | |
| Sbjct: | 75 | FAKQYLLRLGIILYGFRLTFSQIADVGISGIIIDVLTLSSTFLLACFLGQKVFGLDKHTS | 134 |
| Query: | 123 | TLIGVGSSICGGSAIAATAPVINAKDDEVAQAISVIFLFNILAALIFPTLGNFIG--LSD | 180 |
| | | LIG GSSICG +A+ AT PV+ A+ +V A++ + +F +A ++P + + S | |
| Sbjct: | 135 | WLIGAGSSICGAAAVLATEPVVKAEASKVTVAVATVVIFGTVAIFLYPAIYPLMSQWFSP | 194 |
| Query: | 181 | HGFALFAGTAVNDTSSVTAT--ATAWDAINHSNTLGGATIVKLTRTLAIIPITIVLSIYH | 238 |
| | | F ++ G+ V++ + V A A + DA N A I K+ R + + P I+L+ | |
| Sbjct: | 195 | ETFGIYIGSTVHEVAQVVAAGHAISPDAEN------AAVISKMLRVMMLAPFLILLAA-R | 247 |
| Query: | 239 | MKQTQKEQSVSVTKI-FPKFVLYFILASLLTTIVASLGFSLRIFEPLKVLSKFFIVMAMG | 297 |
| | | +KQ S +KI P F + FI+ ++ + + L L F + MAM | |
| Sbjct: | 248 | VKQLSGANSGEKSKITIPWFAILFIVVAIFNSFHL---LPQSVVNMLVTLDTFLLAMAMA | 304 |
| Query: | 298 | AIGINTNVSKLIKTGGKSILLGAACWLGIII | 328 |
| | | A+G+ T+VS L K G K +L+ + +I+ | |
| Sbjct: | 305 | ALGLTTHVSALKKAGAKPLLMALVLFAWLIV | 335 |

[9511] A related DNA sequence was identified in S. pyogenes <SEQ ID 5371> which encodes the amino acid sequence <SEQ ID 5372>. Analysis of this protein sequence reveals the following:

| Possible site: 37 | | | |
|---|---|---|---|
| >>> Seems to have an uncleavable N-term signal seq | | | |
| INTEGRAL | Likelihood = −9.29 | Transmembrane | 30-46 (22-50) |
| INTEGRAL | Likelihood = −8.12 | Transmembrane | 314-330 (311-338) |
| INTEGRAL | Likelihood = −6.05 | Transmembrane | 8-24 (7-29) |
| INTEGRAL | Likelihood = −6.00 | Transmembrane | 150-166 (146-172) |
| INTEGRAL | Likelihood = −5.57 | Transmembrane | 257-273 (252-277) |
| INTEGRAL | Likelihood = −3.50 | Transmembrane | 91-107 (87-108) |
| INTEGRAL | Likelihood = −2.60 | Transmembrane | 69-85 (68-87) |
| INTEGRAL | Likelihood = −2.55 | Transmembrane | 289-305 (289-305) |

----- Final Results -----
bacterial membrane --- Certainty = 0.4715 (Affirmative) < succ>
bacterial outside --- Certainty = 0.0000 (Not Clear) < succ>
bacterial cytoplasm --- Certainty = 0.0000 (Not Clear) < succ>

[9512] The protein has homology with the following sequences in the databases:

| >GP: AAC75219 GB: AE000305 orf, hypothetical protein [Escherichia | | | |
|---|---|---|---|
| coli] | | | |
| Identities = 100/329 (30%), Positives = 173/329 (52%), Gaps = 21/329 (6%) | | | |
| Query: | 8 | LPGLLLCLLLALPAWCLGRLFPIIGAP----VFAILLGMLLA-LFYEHRDKTKEG-ISFT | 61 |
| | | +PGL L ++ A G + + GA AILLGM+L Y H K+ +G + F | |
| Sbjct: | 17 | IPGLALSAVITGVALWGGSIPAVAGAGFSALTLAILLGMVLGNTIYPHIWKSCDGGVLFA | 76 |
| Query: | 62 | SKYILQTAVVLLGFGLNLTQVMAVGMQSLPIIISTIATALLVAYGL-QKWLRLDVNTATL | 120 |
| | | +Y+L+ ++L GF L +Q+ VG+ + I + T+++ L+A L QK LD +T+ L | |
| Sbjct: | 77 | KQYLLRLGIILYGFRLTFSQIADVGISGIIIDVLTLSSTFLLACFLGQKVFGLDKHTSWL | 136 |
| Query: | 121 | VGVGSSICGGSAVAATAPVIKAKDDEVAKAISVIFLFNMLAALLFPSLGQLLG--LSNEG | 178 |
| | | +G GSSICG +AV AT PV+KA+ +V A++ + +F +A L+P++ L+ S E | |
| Sbjct: | 137 | IGAGSSICGAAAVLATEPVVKAEASKVTVAVATVVIFGTVAIFLYPAIYPLMSQWFSPET | 196 |
| Query: | 179 | FAIFAGTAVNDTSSVTATATAWDALHHSNTLDGATIVKLTRTLAILPITLGLSLYRAKKE | 238 |
| | | F I+ G+ V++ + V A A + + A I K+ R + + P + L+ R K+ | |
| Sbjct: | 197 | FGIYIGSTVHEVAQVVAAGHAIS----PDAENAAVISKMLRVMMLAPFLILLAA-RVKQL | 251 |
| Query: | 239 | HDIVTEENFSLRKSFPRFILFFLLASLITTLMTSLGVSADSFHYLKTLSKFFIVMAMAAI | 298 |
| | | + E + + P F + F++ ++ + + + L TL F + MAMAA+ | |
| Sbjct: | 252 | SGANSGEKSKI--TIPWFAILFIVVAIFNSFHL---LPQSVVNMLVTLDTFLLAMAMAAL | 306 |
| Query: | 299 | GLNTNLVKLIKTGGQAILLGAI--CWVAI | 325 |
| | | GL T++ L K G + +L+ + W+ + | |
| Sbjct: | 307 | GLTTHVSALKKAGAKPLLMALVLFAWLIV | 335 |

[9513] An alignment of the GAS and GBS proteins is shown below.

| Identities = 225/333 (67%), Positives = 277/333 (82%), Gaps = 3/333 (0%) | | | |
|---|---|---|---|
| Query: | 11 | KIPGLILCFIIAIPSWLLGLYLPLIGAPVFAILIGIIVGSFYQNRQLFNKGIAFTSKYIL | 70 |
| | | K+PGL+LC ++A+P+W LG P+IGAPVFAIL+G+++ FY++R +GI+FTSKYIL | |
| Sbjct: | 7 | KLPGLLLCLLLALPAWCLGRLFPIIGAPVFAILLGMLLALFYEHRDKTKEGISFTSKYIL | 66 |
| Query: | 71 | QTAVVLLGFGLNLMQVMKVGISSLPIIIMTISISLIIAYVLQKLFKLDKTIATLIGVGSS | 130 |
| | | QTAVVLLGFGLNL QVM VG+ SLPIII TI+ +L++AY LQK +LD ATL+GVGSS | |
| Sbjct: | 67 | QTAVVLLGFGLNLTQVMAVGMQSLPIIISTIATALLVAYGLQKWLRLDVNTATLVGVGSS | 126 |
| Query: | 131 | ICGGSAIAATAPVINAKDDEVAQAISVIFLFNILAALIFPTLGNFIGLSDHGFALFAGTA | 190 |
| | | ICGGSA+AATAPVI AKDDEVA+AISVIFLFN+LAAL+FP+LG +GLS+ GFA+FAGTA | |
| Sbjct: | 127 | ICGGSAVAATAPVIKAKDDEVAKAISVIFLFNMLAALLFPSLGQLLGLSNEGFAIFAGTA | 186 |
| Query: | 191 | VNDTSSVTATATAWDAINHSNTLGGATIVKLTRTLAIIPITIVLSIYHMKQTQ---KEQS | 247 |
| | | VNDTSSVTATATAWDA++HSNTL GATIVKLTRTLAI+PIT+ LS+Y K+ E++ | |
| Sbjct: | 187 | VNDTSSVTATATAWDALHHSNTLDGATIVKLTRTLAILPITLGLSLYRAKKEHDIVTEEN | 246 |
| Query: | 248 | VSVTKIFPKFVLYFILASLLTTIVASLGFSLRIFEPLKVLSKFFIVMAMGAIGINTNVSK | 307 |
| | | S+ K FP+F+L+F+LASL+TT++ SLG S F LK LSKFFIVMAM AIG+NTN+ K | |
| Sbjct: | 247 | FSLRKSFPRFILFFLLASLITTLMTSLGVSADSFHYLKTLSKFFIVMAMAAIGLNTNLVK | 306 |
| Query: | 308 | LIKTGGKSILLGAACWLGIIIVSLTMQAILGTW | 340 |
| | | LIKTGG++ILLGA CW+ I +VSL MQ LG W | |
| Sbjct: | 307 | LIKTGGQAILLGAICWVAITLVSLAMQLSLGIW | 339 |

[9514] A related GBS gene <SEQ ID 8889> and protein <SEQ ID 8890> were also identified. Analysis of this protein sequence reveals the following:

| Lipop: Possible site: −1 Crend: 10 | | | |
|---|---|---|---|
| McG: Discrim Score: 22.17 | | | |
| GvH: Signal Score (−7.5): −0.429999 | | | |
| Possible site: 41 | | | |
| >>> Seems to have a cleavable N-term signal seq. | | | |
| ALOM program | count: 8 | value: −7.91 | threshold: 0.0 |

| | | | |
|---|---|---|---|
| INTEGRAL | Likelihood = −7.91 | Transmembrane | 94-110 (86-115) |
| INTEGRAL | Likelihood = −7.75 | Transmembrane | 154-170 (150-176) |
| INTEGRAL | Likelihood = −7.11 | Transmembrane | 316-332 (312-339) |
| INTEGRAL | Likelihood = −6.16 | Transmembrane | 258-274 (253-278) |
| INTEGRAL | Likelihood = −2.71 | Transmembrane | 218-234 (217-234) |
| INTEGRAL | Likelihood = −1.49 | Transmembrane | 286-302 (283-302) |
| INTEGRAL | Likelihood = −0.96 | Transmembrane | 73-89 (73-89) |
| INTEGRAL | Likelihood = −0.27 | Transmembrane | 121-137 (121-137) |

| | | |
|---|---|---|
| PERIPHERAL | Likelihood = 3.29 | 175 |

modified ALOM score: 2.08
*** Reasoning Step: 3
----- Final Results -----
bacterial membrane --- Certainty = 0.4163 (Affirmative) < succ>
bacterial outside --- Certainty = 0.0000 (Not Clear) < succ>
bacterial cytoplasm --- Certainty = 0.0000 (Not Clear) < succ>

[9515] The protein has homology with the following sequences in the databases:

[chemical structure]

[9516] Based on this analysis, it was predicted that these proteins and their epitopes could be useful antigens for vaccines or diagnostics.

### EXAMPLE 1729

[9517] A DNA sequence (GBSx1834) was identified in S. agalactiae <SEQ ID 5373> which encodes the amino acid sequence <SEQ ID 5374>. Analysis of this protein sequence reveals the following:

| Possible site: 57 | | | |
|---|---|---|---|
| >>> Seems to have an uncleavable N-term signal seq | | | |
| INTEGRAL | Likelihood = −10.93 | Transmembrane | 7-23 (1-27) |

----- Final Results -----
bacterial membrane --- Certainty = 0.5373 (Affirmative) < succ>
bacterial outside --- Certainty = 0.0000 (Not Clear) < succ>
bacterial cytoplasm --- Certainty = 0.0000 (Not Clear) < succ>

[9518] The protein has no significant homology with any sequences in the GENPEPT database.

[9519] A related DNA sequence was identified in S. pyogenes <SEQ ID 5375> which encodes the amino acid sequence <SEQ ID 5376>. Analysis of this protein sequence reveals the following:

| Possible site: 40 | | | |
|---|---|---|---|
| >>> Seems to have an uncleavable N-term signal seq | | | |
| INTEGRAL | Likelihood = −16.34 | Transmembrane | 22-38 (13-42) |

----- Final Results -----
bacterial membrane --- Certainty = 0.7538 (Affirmative) < succ>
bacterial outside --- Certainty = 0.0000 (Not Clear) < succ>
bacterial cytoplasm --- Certainty = 0.0000 (Not Clear) < succ>

[9520] The protein has no significant homology with any sequences in the GENPEPT database.

[9521] An alignment of the GAS and GBS proteins is shown below.

| Identities = 56/215 (26%), Positives = 111/215 (51%), Gaps = 5/215 (2%) | | | |
|---|---|---|---|
| Query: | 7 | VFLTVLVLILIVGAGGLYFWNNHQSLEGKWRTVSLEKQVEKEIEQQLGSQAADMGISAAD | 66 |
| | | +F+ ++ LIL+ G+ + N+ S+EG WRT S+++++ + ++L I + | |
| Sbjct: | 22 | LFVFIIFLILLAVLFGVRYRNS--SIEGIWRTTSIDQKLGDDFAKRLTGLHQSPLIDDS- | 78 |
| Query: | 67 | LVKGANMHMNVKNDEAKITVTAQIDEVKFHQAIKTFIDKALEKQLKDQGLTYNDLSEAGK | 126 |
| | | L+ + M + VKN+ ++ + Q++ F + + + L K LK+ L DLS + | |
| Sbjct: | 79 | LLTSSQMILTVKNNNVDLSFSVQVERDIFVKRLAAYHQNELLKTLKENHLVVGDLSSKER | 138 |
| Query: | 127 | KIFDETKITDQQIDQQIDRSFQSAAQAAGGKYNTNTGEMTLPVMDGKVHRLTSVIKV-SH | 185 |
| | | +I + + +++ +D++F+ A GGKYN TG ++ V+ GKV+R+ I + | |
| Sbjct: | 139 | QIIENSMPASHELEMILDQAFEKLASQIGGKYNQKTGHLSAVVLKGKVNRILHTIDIKEE | 198 |
| Query: | 186 | INKKANAFYGNIVKNGEKTAYKKEGSKL-ILGNEK | 219 |
| | | + +F ++ Y + G KL +LG+EK | |
| Sbjct: | 199 | VAAGHTSFSKGLLTPNGYFDYTRFGKKLELLGDEK | 233 |

[9522] SEQ ID 5374 (GBS288) was expressed in E. coli as a GST-fusion product. SDS-PAGE analysis of total cell extract is shown in FIG. 59 (lane 3; MW 53.7 kDa).

[9523] GBS288d was expressed in E. coli as a His-fusion product. SDS-PAGE analysis of total cell extract is shown in FIG. 154 (lane 8-10; MW 26 kDa) and in FIG. 183 (lane 3; MW 26 kDa). It was also expressed in E. coli as a GST-fusion product. SDS-PAGE analysis of total cell extract is shown in FIG. 187 (lane 11; MW 51 kDa). Purified GBS288d-GST is shown in lane 8 of FIG. 237.

[9524] Based on this analysis, it was predicted that these proteins and their epitopes could be useful antigens for vaccines or diagnostics.

### EXAMPLE 1730

[9525] A DNA sequence (GBSx1835) was identified in S. agalactiae <SEQ ID 5377> which encodes the amino acid sequence <SEQ ID 5378>. Analysis of this protein sequence reveals the following:

Possible site: 51
>>> Seems to have no N-terminal signal sequence
----- Final Results -----
bacterial cytoplasm --- Certainty = 0.3885 (Affirmative) < succ>
bacterial membrane --- Certainty = 0.0000 (Not Clear) < succ>
bacterial outside --- Certainty = 0.0000 (Not Clear) < succ>

[9526] The protein has no significant homology with any sequences in the GENPEPT database.

[9527] No corresponding DNA sequence was identified in S. pyogenes.

[9528] Based on this analysis, it was predicted that this protein and its epitopes, could be useful antigens for vaccines or diagnostics.

### EXAMPLE 1731

[9529] A DNA sequence (GBSx1836) was identified in S. agalactiae <SEQ ID 5379> which encodes the amino acid sequence <SEQ ID 5380>. Analysis of this protein sequence reveals the following:

| Possible site: 51 | | | |
|---|---|---|---|
| >>> Seems to have no N-terminal signal sequence | | | |
| INTEGRAL | Likelihood = −12.37 | Transmembrane | 67-83 (63-89) |
| INTEGRAL | Likelihood = −3.72 | Transmembrane | 139-155 (137-158) |
| INTEGRAL | Likelihood = −1.54 | Transmembrane | 115-131 (114-131) |

----- Final Results -----
bacterial membrane --- Certainty = 0.5946 (Affirmative) < succ>
bacterial outside --- Certainty = 0.0000 (Not Clear) < succ>
bacterial cytoplasm --- Certainty = 0.0000 (Not Clear) < succ>

[9530] A related GBS nucleic acid sequence <SEQ ID 10905> which encodes amino acid sequence <SEQ ID 10906> was also identified.

[9531] The protein has no significant homology with any sequences in the GENPEPT database.

[9532] No corresponding DNA sequence was identified in S. pyogenes.

[9533] Based on this analysis, it was predicted that this protein and its epitopes, could be useful antigens for vaccines or diagnostics.

### EXAMPLE 1732

[9534] A DNA sequence (GBSx1837) was identified in S. agalactiae <SEQ ID 5381> which encodes the amino acid sequence <SEQ ID 5382>. Analysis of this protein sequence reveals the following:

Possible site: 38
>>> Seems to have no N-terminal signal sequence
----- Final Results -----
bacterial cytoplasm --- Certainty = 0.4709 (Affirmative) < succ>
bacterial membrane --- Certainty = 0.0000 (Not Clear) < succ>
bacterial outside --- Certainty = 0.0000 (Not Clear) < succ>

[9535] The protein has no significant homology with any sequences in the GENPEPT database.

[9536] No corresponding DNA sequence was identified in S. pyogenes.

[9537] Based on this analysis, it was predicted that this protein and its epitopes, could be useful antigens for vaccines or diagnostics.

### EXAMPLE 1733

[9538] A DNA sequence (GBSx1838) was identified in S. agalactiae <SEQ ID 5383> which encodes the amino acid sequence <SEQ ID 5384>. Analysis of this protein sequence reveals the following:

```
Possible site: 29
>>> Seems to have no N-terminal signal sequence
----- Final Results -----
                            bacterial cytoplasm --- Certainty = 0.2191(Affirmative) < succ>
                              bacterial membrane --- Certainty = 0.0000(Not Clear) < succ>
                                bacterial outside --- Certainty = 0.0000(Not Clear) < succ>
```

[9539] The protein has homology with the following sequences in the GENPEPT database.

| >GP: AAC98427 GB: M63481 20-kDa protein [Streptococcus sanguinis] | | | |
|---|---|---|---|
| Identities = 119/163 (73%), Positives = 146/163 (89%) | | | |
| Query: | 1 | MTTFLGNPVTFTGKQLQVGDIAKDFLLIATDLSQKSLKDFEGKKKVISVVPSIDTGICSK | 60 |
| | | MTTFLGNPVTFTGKQLQVGD A DF L ATDLS+K+L DF GKKKV+S++PSIDTG+CS | |
| Sbjct: | 1 | MTTFLGNPVTFTGKQLQVGDTAHDFSLTATDLSKKTLADFAGKKKVLSIIPSIDTGVCST | 60 |
| Query: | 61 | QTRTFNEELSELDNTVVITVSMDLPFAQKRWCSAEGLDNVILLSDFYDHSFGQEYALLMN | 120 |
| | | QTR FN+ELS+LDNTVVITVS+DLPFAQ +WC+AEG++N ++LSD++DHSFG++YA+L+N | |
| Sbjct: | 61 | QTRRFNQELSDLDNTVVITVSVDLPFAQGKWCAAEGIENAVMLSDYFDHSFGRDYAVLIN | 120 |
| Query: | 121 | EWHLLTRAVLILDEHNKVTYTEYVDNVNSDVDYEAAINAAKIL | 163 |
| | | EWHLL RAVL+LDE+N VTY EYVDN+N++ DY+AAI A K L | |
| Sbjct: | 121 | EWHLLARAVLVLDENNTVTYAEYVDNINTEPDYDAAIAAVKSL | 163 |

[9540] No corresponding DNA sequence was identified in S. pyogenes.

[9541] Based on this analysis, it was predicted that this protein and its epitopes, could be useful antigens for vaccines or diagnostics.

### EXAMPLE 1734

[9542] A DNA sequence (GBSx1839) was identified in S. agalactiae <SEQ ID 5385> which encodes the amino acid sequence <SEQ ID 5386>. This protein is predicted to be DNA alkylation repair enzyme. Analysis of this protein sequence reveals the following:

```
Possible site: 15
>>> Seems to have no N-terminal signal sequence
----- Final Results -----
                            bacterial cytoplasm --- Certainty = 0.4729(Affirmative) < succ>
                              bacterial membrane --- Certainty = 0.0000(Not Clear) < succ>
                                bacterial outside --- Certainty = 0.0000(Not Clear) < succ>
```

[9543] The protein has homology with the following sequences in the GENPEPT database.

| >GP: CAB40581 GB: AJ010128 DNA alkylation repair enzyme [Bacillus | | | |
|---|---|---|---|
| cereus] | | | |
| Identities = 67/217 (30%), Positives = 119/217 (53%), Gaps = 5/217 (2%) | | | |
| Query: | 6 | SLERKFKAASDKEVSKQQEAYLRHHFKCYGIKSPERRMLYKELIKAAKRQAKIDWQLLDK | 65 |
| | | +L+ F A + E ++ Y+++HF GI++PERR L K++I+ + D+Q++ + | |
| Sbjct: | 7 | ALQEHFIANQNPEKAEPMARYMKNHFPFLGIQTPERRQLLKDVIQIHTLPDQKDFQVIVR | 66 |
| Query: | 66 | -CWQSDYREYHHFVLDYLLAMSQFLTYNDCSRLEFYARHQQWWDSIDVLTKIF-GNLSLK | 123 |
| | | W RE+ LD + + LE + WWD++D + F GN+ L+ | |
| Sbjct: | 67 | ELWDLPEREFQAAALDMMQKYKMHINETHIPFLEELIVTKSWWDTVDSIVPTFLGNIFLQ | 126 |
| Query: | 124 | DDKVMNL-LSEWSLDQDFWMRRLAIEHQLGFKEKTNTDILSLFILRNTGSQEFFINKAIG | 182 |
| | | ++++ + +W + W++R AI QL +K+K + ++L I + S+EFFI KAIG | |
| Sbjct: | 127 | HPELISAYIPKWIASDNIWLQRAAILFQLKYKQKMDEELLFWVIGQLHSSKEFFIQKAIG | 186 |
| Query: | 183 | WALRDYSKYNKVWVKDFISNHCDELSTLSIREGSKYL | 219 |
| | | W LR+Y+K V +++ N +EL+ LS RE K++ | |
| Sbjct: | 187 | WVLREYAKTKSDVVWEYVQN--NELAPLSRREAIKHI | 221 |

[9544] No corresponding DNA sequence was identified in S. pyogenes.

[9545] Based on this analysis, it was predicted that this protein and its epitopes, could be useful antigens for vaccines or diagnostics.

### EXAMPLE 1735

[9546] A DNA sequence (GBSx1841) was identified in S. agalactiae <SEQ ID 5387> which encodes the amino acid sequence <SEQ ID 5388>. Analysis of this protein sequence reveals the following:

```
Possible site: 19
>>> Seems to have no N-terminal signal sequence
----- Final Results -----
                            bacterial cytoplasm --- Certainty = 0.2117(Affirmative) < succ>
                              bacterial membrane --- Certainty = 0.0000(Not Clear) < succ>
                                bacterial outside --- Certainty = 0.0000(Not Clear) < succ>
```

[9547] The protein has homology with the following sequences in the GENPEPT database.

| >GP: CAA81648 GB: Z27121 unknown [Mycoplasma hominis] | | | |
|---|---|---|---|
| Identities = 67/281 (23%), Positives = 113/281 (39%), Gaps = 52/281 (18%) | | | |
| Query: | 3 | FVFDIDGTLCFDGMS--LSKEIQGILERAQIDYGHRVTFATARSYRDTIGILGDKLSLSK | 60 |
| | | F D+DGTL D + + + + +++A + GH V+ T R +R T+ + +KL L+ | |
| Sbjct: | 14 | FAIDLDGTLLADSANGTVHPKTEEAIKKA-VAQGHIVSIITGRPWRSTLPVY-EKLGLNA | 71 |
| Query: | 61 | IIG-LNGATLHENGHLVDSYYLQSDFFSTIISYCHRHQIPYFVD------EVFNYATYQA | 113 |
| | | I+G NGA +H FF I+Y +++ Y + E+ NYA | |
| Sbjct: | 72 | IVGNYNGAHIHNPA---------DPFFIPAITYLDLNEVLYILGDEKVKKEITNYAIEGP | 122 |
| Query: | 114 | SKIPFIAYVDPQ-----------KRGELLEVSKIE----------KPIKMVLYFGDQLGR | 152 |
| | | + + + DP K E + + KI KP VL L R | |
| Sbjct: | 123 | DWVQLM-HRDPNLERVFGFNQATKFRECINLEKIPLKPTGIVFDVKPDTDVLELLTYLKR | 181 |
| Query: | 153 | ADQMLAELNRFGLSSHFFHEFEKCLYINPIAVDKGKATKKLFG------NRFIAFGNDKN | 206 |
| | | L E + + F+ I I +DKGK + + +A G+ N | |
| Sbjct: | 182 | RYGDLGEFSSWSKGEGLSPVFD----ITSIGIDKGKVISLIMRYYNIDIDDTVAMGDSYN | 237 |
| Query: | 207 | DISMFDAAHYSVQVGDFDELTPYANLRVSRESVHEGITTLF | 247 |
| | | D+SM++ A+ V + + L + V +++ EG F | |
| Sbjct: | 238 | DLSMYNVANVCVSPANAEPLIKKMSTVVMKQTNKEGAVGYF | 278 |

[9548] Based on this analysis, it was predicted that this protein and its epitopes, could be useful antigens for vaccines or diagnostics.

### EXAMPLE 1736

[9549] A DNA sequence (GBSx1842) was identified in S. agalactiae <SEQ ID 5389> which encodes the amino acid sequence <SEQ ID 5390>. Analysis of this protein sequence reveals the following:

```
Possible site: 27
>>> Seems to have no N-terminal signal sequence
----- Final Results -----
                            bacterial cytoplasm --- Certainty = 0.2383(Affirmative) < succ>
                              bacterial membrane --- Certainty = 0.0000(Not Clear) < succ>
                                bacterial outside --- Certainty = 0.0000(Not Clear) < succ>
```

[9550] The protein has homology with the following sequences in the GENPEPT database.

| >GP: AAB90005 GB: AE001018 A. fulgidus predicted | | | |
|---|---|---|---|
| coding region AF1244 [Archaeoglobus fulgidus] | | | |
| Identities = 22/48 (45%), Positives = 35/48 (72%) | | | |
| Query: | 150 | GKSIGELNVWHQTGATIVAIEHEGKFIVSPGPFSVIEQGDHIFFVGDE | 197 |
| | | GKSIGEL + +TGAT++A+ + K I+SP P +V+E GD + +G++ | |
| Sbjct: | 102 | GKSIGELGIRSKTGATVIAVLKKEKTIISPSPETVLEPGDKVVVIGEK | 149 |

[9551] A related DNA sequence was identified in S. pyogenes <SEQ ID 5391> which encodes the amino acid sequence <SEQ ID 5392>. Analysis of this protein sequence reveals the following:

```
Possible site: 27
>>> Seems to have no N-terminal signal sequence
----- Final Results -----
                            bacterial cytoplasm --- Certainty = 0.2446(Affirmative) < succ>
                              bacterial membrane --- Certainty = 0.0000(Not Clear) < succ>
                                bacterial outside --- Certainty = 0.0000(Not Clear) < succ>
```

[9552] An alignment of the GAS and GBS proteins is shown below.

| Identities = 163/213 (76%), Positives = 196/213 (91%) | | | |
|---|---|---|---|
| Query: | 1 | MVSEQSEIVTSKYQKIAVAVAQRIANGDYEVGEKLKSRTTIASTFNVSPETARKGLNILA | 60 |
| | | ++S + EI +SKYQKIA++VAQRIANG+YEVGEKLKSRTTIASTFNVSPETARKGLNILA | |
| Sbjct: | 1 | VISPKKEITSSKYQKIAISVAQRIANGEYEVGEKLKSRTTIASTFNVSPETARKGLNILA | 60 |
| Query: | 61 | DLQILTLKHGSGAIILSKEKAIEFLNQYETSHSVAILKGKIRDNIKAQQQEMEELATLVD | 120 |
| | | DL+ILTLKHGSGAI+LSKE+AIEF+NQYE++HS+A+LK KIR+ I Q + ME++A LV+ | |
| Sbjct: | 61 | DLKILTLKHGSGAIVLSKERAIEFINQYESTHSIAVLKEKIRETINDQGKAMEKMAVLVN | 120 |
| Query: | 121 | DFLLQTRAVSKQYPLAPYEIIVSEDSEHLGKSIGELNVWHQTGATIVAIEHEGKFIVSPG | 180 |
| | | DFL+Q+++VSKQYPLAPYEII ++DSEH GESIG LN+WHQTGATIVAIEH G+FIVSPG | |
| Sbjct: | 121 | DFLMQSQSVSKQYPLAPYEIICNQDSEHFGKSIGVLNIWHQTGATIVAIEHAGQFIVSPG | 180 |
| Query: | 181 | PFSVIEQGDHIFFVGDEDVYARMKTYFNLRMGL | 213 |
| | | P+SVIE+GDHI+FVGDE V +RMKT+FNLR GL | |
| Sbjct: | 181 | PYSVIEKGDHIYFVGDESVISRMKTFFNLRKGL | 213 |

[9553] Based on this analysis, it was predicted that these proteins and their epitopes could be useful antigens for vaccines or diagnostics.

### EXAMPLE 1737

[9554] A DNA sequence (GBSx1844) was identified in S. agalactiae <SEQ ID 5393> which encodes the amino acid sequence <SEQ ID 5394>. This protein is predicted to be gls24. Analysis of this protein sequence reveals the following:

```
Possible site: 16
>>> Seems to have no N-terminal signal sequence
----- Final Results -----
                            bacterial cytoplasm --- Certainty = 0.2855(Affirmative) < succ>
                              bacterial membrane --- Certainty = 0.0000(Not Clear) < succ>
                                bacterial outside --- Certainty = 0.0000(Not Clear) < succ>
```

[9555] A related GBS nucleic acid sequence <SEQ ID 9361> which encodes amino acid sequence <SEQ ID 9362> was also identified.

[9556] The protein has homology with the following sequences in the GENPEPT database.

| >GP: AAA86383 GB: U23376 putative 20-kDa protein [Lactococcus lactis] | | | |
|---|---|---|---|
| Identities = 63/124 (50%), Positives = 84/124 (66%) | | | |
| Query: | 1 | MSGGFFSNLKNSVVNSDSVTDGVNVEVGTKEVAVDLDIVVEYGKDIPAIVESIKAIVSQN | 60 |
| | | + GGFFSNL ++N+D VT GV+VEVG +VAVDL +V EY K++P I E IK ++ + | |
| Sbjct: | 55 | VEGGFFSNLTGKLINTDDVTTGVDVEVGKTQVAVDLKVVTEYRKNVPDIYEKIKEVIRKE | 114 |
| Query: | 61 | VEVMTHLKVVELNANVVDIKTKAEHEADSVTVQDRVSDAAQATGNFASEQAGKAKAAISS | 120 |
| | | V MT L+VVE+N V DIKTK + + D V++QDRV+ AAQ TG F SEQ K K + | |
| Sbjct: | 115 | VAAMTELEVVEVNVTVTDIKTKEQQKEDDVSIQDRVTSAAQTTGKFTSEQVDKVKDKVED | 174 |
| Query: | 121 | GAEK | 124 |
| | | +K | |
| Sbjct: | 175 | NTDK | 178 |

[9557] A related DNA sequence was identified in S. pyogenes <SEQ ID 5395> which encodes the amino acid sequence <SEQ ID 5396>. Analysis of this protein sequence reveals the following:

```
Possible site: 43
>>> Seems to have no N-terminal signal sequence
----- Final Results -----
                            bacterial cytoplasm --- Certainty = 0.2534(Affirmative) < succ>
                              bacterial membrane --- Certainty = 0.0000(Not Clear) < succ>
                                bacterial outside --- Certainty = 0.0000(Not Clear) < succ>
```

[9558] An alignment of the GAS and GBS proteins is shown below.

| Identities = 94/137 (68%), Positives = 108/137 (78%), Gaps = 8/137 (5%) | | | |
|---|---|---|---|
| Query: | 1 | MSGGFFSNLKNSVVNSDSVTDGVNVEVGTKEVAVDLDIVVEYGKDIPAIVESIKAIVSQN | 60 |
| | | ++GGFFSN+KN++VNS+SVTDGV+VEVG+KEVAVDL I+VEYGKDIPAI ESIKAIVSQN | |
| Sbjct: | 35 | VTGGFFSNIKNNLVNSESVTDGVSVEVGSKEVAVDLAIIVEYGKDIPAIAESIKAIVSQN | 94 |
| Query: | 61 | VEVMTHLKVVELNANVVDIKTKAEHEADSVTVQDRVSDAAQATGNFASEQAGKAKAAISS | 120 |
| | | V+ MTHLKVVE+N NVVDI+TK EHEA SVTVQDRV+ AA +T F SEQ K K IS | |
| Sbjct: | 95 | VDSMTHLKVVEVNVNVVDIRTKEEHEAASVTVQDRVTSAASSTSQFVSEQTEKLKDTISD | 154 |
| Query: | 121 | GAEKTKEAVSNGTEAAK | 137 |
| | | N EAAK | |
| Sbjct: | 155 | --------TVNSDEAAK | 163 |

[9559] Based on this analysis, it was predicted that these proteins and their epitopes could be useful antigens for vaccines or diagnostics.

### EXAMPLE 1738

[9560] A DNA sequence (GBSx1845) was identified in S. agalactiae <SEQ ID 5397> which encodes the amino acid sequence <SEQ ID 5398>. Analysis of this protein sequence reveals the following:

```
possible site: 21
>>> Seems to have no N-terminal signal sequence
----- Final Results -----
                            bacterial cytoplasm --- Certainty = 0.3393(Affirmative) < succ>
                              bacterial membrane --- Certainty = 0.0000(Not Clear) < succ>
                                bacterial outside --- Certainty = 0.0000(Not Clear) < succ>
```

[9561] The protein has no significant homology with any sequences in the GENPEPT database.

[9562] No corresponding DNA sequence was identified in S. pyogenes.

[9563] Based on this analysis, it was predicted that this protein and its epitopes, could be useful antigens for vaccines or diagnostics.

### EXAMPLE 1739

[9564] A DNA sequence (GBSx1846) was identified in S. agalactiae <SEQ ID 5399> which encodes the amino acid sequence <SEQ ID 5400>. Analysis of this protein sequence reveals the following:

```
Possible site: 16
>>> Seems to have no N-terminal signal sequence
----- Final Results -----
                            bacterial cytoplasm --- Certainty = 0.3168(Affirmative) < succ>
                              bacterial membrane --- Certainty = 0.0000(Not Clear) < succ>
                                bacterial outside --- Certainty = 0.0000(Not Clear) < succ>
```

[9565] The protein has no significant homology with any sequences in the GENPEPT database.

[9566] No corresponding DNA sequence was identified in S. pyogenes.

[9567] Based on this analysis, it was predicted that this protein and its epitopes, could be useful antigens for vaccines or diagnostics.

### EXAMPLE 1740

[9568] A DNA sequence (GBSx1847) was identified in S. agalactiae <SEQ ID 5401> which encodes the amino acid sequence <SEQ ID 5402>. This protein is predicted to be gls24. Analysis of this protein sequence reveals the following:

```
Possible site: 61
>>> Seems to have no N-terminal signal sequence
----- Final Results -----
                            bacterial cytoplasm --- Certainty = 0.2718(Affirmative) < succ>
                              bacterial membrane --- Certainty = 0.0000(Not Clear) < succ>
                                bacterial outside --- Certainty = 0.0000(Not Clear) < succ>
```

[9569] The protein has homology with the following sequences in the GENPEPT database.

| >GP: AAA86383 GB: U23376 putative 20-kDa protein [Lactococcus lactis] | | | |
|---|---|---|---|
| Identities = 95/157 (60%), Positives = 120/157 (75%) | | | |
| Query: | 18 | VRGELTFEDKVIEKIVGIAIEHVDGLLAVNGGFFSNLKNSVVNSDSVTDGVNVEVGKKQV | 77 |
| | | ++G LT+EDKV++KIVG+A+E VDGLL+V GGFFSNL ++N+D VT GV+VEVGK QV | |
| Sbjct: | 27 | IKGALTYEDKVVQKIVGLALESVDGLLSVEGGFFSNLTGKLINTDDVTTGVDVEVGKTQV | 86 |
| Query: | 78 | AVDLDIVAEYQKHVPTIFADIKKVVEAEVKRMTDLEVVEVNVNVVDIKTRAQHEEDSVTL | 137 |
| | | AVDL +V EY+K+VP I+ IK+V+ EV MT+LEVVEVNV V DIKT+ Q +ED V++ | |
| Sbjct: | 87 | AVDLKVVTEYRKNVPDIYEKIKEVIRKEVAAMTELEVVEVNVTVTDIKTKEQQKEDDVSI | 146 |
| Query: | 138 | QDRVTSAAQATGEFASNQVSNVKSAVGSGVDKVEDMK | 174 |
| | | QDRVTSAAQ TG+F S QV VK V DK +K | |
| Sbjct: | 147 | QDRVTSAAQTTGKFTSEQVDKVKDKVEDNTDKEARVK | 183 |

[9570] A related DNA sequence was identified in S. pyogenes <SEQ ID 5403> which encodes the amino acid sequence <SEQ ID 5404>. Analysis of this protein sequence reveals the following:

```
Possible site: 53
>>> Seems to have no N-terminal signal sequence
----- Final Results -----
                            bacterial cytoplasm --- Certainty = 0.3896(Affirmative) < succ>
                              bacterial membrane --- Certainty = 0.0000(Not Clear) < succ>
                                bacterial outside --- Certainty = 0.0000(Not Clear) < succ>
```

[9571] An alignment of the GAS and GBS proteins is shown below.

| Identities = 123/180 (68%), Positives = 158/180 (87%), Gaps = 1/180 (0%) | | | |
|---|---|---|---|
| Query: | 1 | MTETYIKNTTNNSGTTAVRGELTFEDKVIEKIVGIAIEHVDGLLAVNGGFFSNLKNSVVN | 60 |
| | | MTETYIKNT+ + T+A+RG+LT++DKVIEKIVG+A+E+VDGLL VNGGFF+NLK+ +VN | |
| Sbjct: | 1 | MTETYIKNTSKDL-TSAIRGQLTYDDKVIEKIVGLALENVDGLLGVNGGFFANLKDKLVN | 59 |
| Query: | 61 | SDSVTDGVNVEVGKKQVAVDLDIVAEYQKHVPTIFADIKKVVEAEVKRMTDLEVVEVNVN | 120 |
| | | ++SV DGVNVEVGKKQVAVDLDIVAEYQKHVPTI+ IK +VE EVKRMTDL+V+EVNV | |
| Sbjct: | 60 | TESVRDGVNVEVGKKQVAVDLDIVAEYQKHVPTIYDSIKSIVEEEVKRMTDLDVIEVNVK | 119 |
| Query: | 121 | VVDIKTRAQHEEDSVTLQDRVTSAAQATGEFASNQVSNVKSAVGSGVDKVEDMKSEPRVQ | 180 |
| | | VVDIKT+ Q E + V+LQD+V+ A++T EF S+QV NVK++V +GV+K++D K+EPRV+ | |
| Sbjct: | 120 | VVDIKTKEQFEAEKVSLQDKVSDMARSTSEFTSHQVENVKASVDNGVEKLQDQKAEPRVK | 179 |

[9572] Based on this analysis, it was predicted that these proteins and their epitopes could be useful antigens for vaccines or diagnostics.

### EXAMPLE 1741

[9573] A DNA sequence (GBSx1848) was identified in S. agalactiae <SEQ ID 5405> which encodes the amino acid sequence <SEQ ID 5406>. This protein is predicted to be a 6-kDa protein. Analysis of this protein sequence reveals the following:

| Possible site: 22 | | | |
|---|---|---|---|
| >>> Seems to have a cleavable N-term signal seq. | | | |
| INTEGRAL | Likelihood = −9.29 | Transmembrane | 25-41 (23-52) |

----- Final Results -----
bacterial membrane --- Certainty = 0.4715 (Affirmative) < succ>
bacterial outside --- Certainty = 0.0000 (Not Clear) < succ>
bacterial cytoplasm --- Certainty = 0.0000 (Not Clear) < succ>

[9574] The protein has homology with the following sequences in the GENPEPT database.

| >GP: AAA86382 GB: U23376 putative 6-kDa protein [Lactococcus lactis] | | | |
|---|---|---|---|
| Identities = 27/61 (44%), Positives = 45/61 (73%) | | | |
| Query: | 3 | EFVRKYRYPLGGAVIGLVLAAMIVTIGFFKTILALVIIVLGAYAGLYVQRTGMLDQFFNK | 62 |
| | | ++ K RYP+ G ++G ++A I TIGF+K IL L +I LG Y GL+++++G++DQF N+ | |
| Sbjct: | 2 | DYFEKNRYPIIGGIVGALIAVCIFTIGFWKMILVLFLIGLGIYIGLFLKKSGIIDQFINR | 61 |
| Query: | 63 | R | 63 |
| | | + | |
| Sbjct: | 62 | K | 62 |

[9575] A related DNA sequence was identified in S. pyogenes <SEQ ID 5407> which encodes the amino acid sequence <SEQ ID 5408>. Analysis of this protein sequence reveals the following:

| Possible site: 28 | | | |
|---|---|---|---|
| >>> Seems to have an uncleavable N-term signal seq | | | |
| INTEGRAL | Likelihood = −11.73 | Transmembrane | 11-27 (6-50) |
| INTEGRAL | Likelihood = −7.11 | Transmembrane | 33-49 (27-50) |

----- Final Results -----
bacterial membrane --- Certainty = 0.5692 (Affirmative) < succ>
bacterial outside --- Certainty = 0.0000 (Not Clear) < succ>
bacterial cytoplasm --- Certainty = 0.0000 (Not Clear) < succ>

[9576] An alignment of the GAS and GBS proteins is shown below.

| Identities = 28/61 (45%), Positives = 48/61 (77%) | | | |
|---|---|---|---|
| Query: | 3 | EFVRKYRYPLGGAVIGLVLAAMIVTIGFFKTILALVIIVLGAYAGLYVQRTGMLDQFFNKR | 63 |
| | | EF K++YP+ G ++GL++A +++ G FKT+LA++ I+LG Y GLY ++TG++DQF N++ | |
| Sbjct: | 2 | EFYEKFKYPIIGGLVGLIIAILLMAFGLFKTLLAIIFIILGIYGGLYAKKTGIIDQFLNRK | 62 |

[9577] A related GBS gene <SEQ ID 8891> and protein <SEQ ID 8892> were also identified. Analysis of this protein sequence reveals the following:

| Lipop: Possible site: −1 Crend: 8 | | | |
|---|---|---|---|
| McG: Discrim Score: 12.56 | | | |
| GvH: Signal Score (−7.5): −1.11 | | | |
| Possible site: 22 | | | |
| >>> Seems to have a cleavable N-term signal seq. | | | |
| ALOM program | count: 1 | value: −9.29 | threshold: 0.0 |

| | | | |
|---|---|---|---|
| INTEGRAL | Likelihood = −9.29 | Transmembrane | 25-41 (23-52) |

| | | |
|---|---|---|
| PERIPHERAL | Likelihood = 12.25 | 44 |

modified ALOM score: 2.36
*** Reasoning Step: 3
----- Final Results -----
bacterial membrane --- Certainty = 0.4715 (Affirmative) < succ>
bacterial outside --- Certainty = 0.0000 (Not Clear) < succ>
bacterial cytoplasm --- Certainty = 0.0000 (Not Clear) < succ>

[9578] The protein has homology with the following sequences in the databases:

[chemical structure]

[9579] SEQ ID 5406 (GBS14) was expressed in E. coli as a GST-fusion product. SDS-PAGE analysis of total cell extract is shown in FIG. 9 (lane 4; MW 33.3 kDa). The GBS14-GST fusion product was purified (FIG. 190, lane 8) and used to immunise mice. The resulting antiserum was used for FACS (FIG. 263), which confirmed that the protein is immunoaccessible on GBS bacteria.

[9580] Based on this analysis, it was predicted that these proteins and their epitopes could be useful antigens for vaccines or diagnostics.

### EXAMPLE 1742

[9581] A DNA sequence (GBSx1849) was identified in S. agalactiae <SEQ ID 5409> which encodes the amino acid sequence <SEQ ID 5410>. Analysis of this protein sequence reveals the following:

| Possible site: 27 | | | |
|---|---|---|---|
| >>> Seems to have an uncleavable N-term signal seq | | | |
| INTEGRAL | Likelihood = −18.63 | Transmembrane | 61-77 (51-83) |
| INTEGRAL | Likelihood = −7.91 | Transmembrane | 10-26 (7-28) |

----- Final Results -----
bacterial membrane --- Certainty = 0.8451 (Affirmative) < succ>
bacterial outside --- Certainty = 0.0000 (Not Clear) < succ>
bacterial cytoplasm --- Certainty = 0.0000 (Not Clear) < succ>

[9582] The protein has no significant homology with any sequences in the GENPEPT database.

[9583] A related DNA sequence was identified in S. pyogenes <SEQ ID 5411> which encodes the amino acid sequence <SEQ ID 5412>. Analysis of this protein sequence reveals the following:

| Possible site: 29 | | | |
|---|---|---|---|
| >>> Seems to have a cleavable N-term signal seq. | | | |
| INTEGRAL | Likelihood = −16.19 | Transmembrane | 71-87 (63-93) |

----- Final Results -----
bacterial membrane --- Certainty = 0.7474 (Affirmative) < succ>
bacterial outside --- Certainty = 0.0000 (Not Clear) < succ>
bacterial cytoplasm --- Certainty = 0.0000 (Not Clear) < succ>

[9584] The protein has no significant homology with any sequences in the GENPEPT database.

[9585] An alignment of the GAS and GBS proteins is shown below.

| Identities = 87/193 (45%), Positives = 127/193 (65%), Gaps = 4/193 (2%) | | | |
|---|---|---|---|
| Query: | 1 | MSKGLKSLYTLLGLISLTLLGFVAVISKQHIYLP-SFNWLDWDFN-LPSPIDVGMYHYFF | 58 |
| | | MSK LK Y L+GL+ L++ G+V I+ +IYLP S+ WL W + P+ +D + +Y+F | |
| Sbjct: | 9 | MSKLLKISYCLVGLVLLSVFGWVVGITGGYIYLPYSYRWLSWGMDSFPNLLDSALSYYYF | 68 |
| Query: | 59 | WGALVLFVIVLLAILVVLFYPRRYTEYKLA--DKTGKLMLKKSAIEGFVKTEVLKTGLMK | 116 |
| | | W ALVLFVI LA+LV++ YPR YTE +L +K G L+LKKSAIE +V T + GLM | |
| Sbjct: | 69 | WTALVLFVITFLALLVIILYPRIYTEVQLRHKNKKGTLLLKKSAIESYVATAIQTAGLMP | 128 |
| Query: | 117 | SPSVTAHLYKKKVKVDVKGLLTSRTNVPEQLEHIQSDVELGLKEFFGLEKKMNTRVFVKQ | 176 |
| | | +P+VTA LYK+K + VKG L SR V +Q+ ++ +E GL EFFG+ +N +V+VK | |
| Sbjct: | 129 | NPTVTAKLYKRKFNIIVKGRLASRVAVADQISGVKEGIEKGLTEFFGINYPVNFKVYVKD | 188 |
| Query: | 177 | VEEENVGNAKTNK | 189 |
| | | + + + + N+ | |
| Sbjct: | 189 | IADSDRKHITRNR | 201 |

[9586] Based on this analysis, it was predicted that these proteins and their epitopes could be useful antigens for vaccines or diagnostics.

### EXAMPLE 1743

[9587] A DNA sequence (GBSx1850) was identified in S. agalactiae <SEQ ID 5413> which encodes the amino acid sequence <SEQ ID 5414>. Analysis of this protein sequence reveals the following:

| Possible site: 17 | | | | |
|---|---|---|---|---|
| >>> Seems to have an uncleavable N-term signal seq | | | | |
| | INTEGRAL | Likelihood = −9.82 | Transmembrane | 56-72 (52-81) |
| | INTEGRAL | Likelihood = −6.42 | Transmembrane | 4-20 (1-23) |

```
----- Final Results -----
                              bacterial membrane --- Certainty = 0.4927(Affirmative) < succ>
                                bacterial outside --- Certainty = 0.0000(Not Clear) < succ>
                            bacterial cytoplasm --- Certainty = 0.0000(Not Clear) < succ>
```

[9588] The protein has homology with the following sequences in the GENPEPT database.

| >GP: CAB12244 GB: Z99106 similar to hypothetical proteins | | | |
|---|---|---|---|
| from B. subtilis [Bacillus subtilis] | | | |
| Identities = 31/76 (40%), Positives = 48/76 (62%) | | | |
| Query: | 1 | MSLIWSLIVGAIIGAIAGAVTNKGGSMGWIANILAGLVGSFVGQSLLGTWGPKLAGMALI | 60 |
| | | +S + SL+V +IG I A+ G +++AGL+G+++G LLGTWGP LAG A+ | |
| Sbjct: | 2 | LSFLVSLVVAIVIGLIGSAIVGNRLPGGIFGSMIAGLIGAWIGHGLLGTWGPSLAGFAIF | 61 |
| Query: | 61 | PSIVGAIIVVIVTSFV | 76 |
| | | P+I+GA I V + + | |
| Sbjct: | 62 | PAIIGAAIFVFLLGLI | 77 |

[9589] A related DNA sequence was identified in S. pyogenes <SEQ ID 5415> which encodes the amino acid sequence <SEQ ID 5416>. Analysis of this protein sequence reveals the following:

| Possible site: 55 | | | | |
|---|---|---|---|---|
| >>> Seems to have a cleavable N-term signal seq. | | | | |
| | INTEGRAL | Likelihood = −7.59 | Transmembrane | 60-76 (56-80) |

```
----- Final Results -----
                              bacterial membrane --- Certainty = 0.4036(Affirmative) < succ>
                                bacterial outside --- Certainty = 0.0000(Not Clear) < succ>
                            bacterial cytoplasm --- Certainty = 0.0000(Not Clear) < succ>
```

[9590] The protein has homology with the following sequences in the databases:

| >GP: CAB12244 GB: Z99106 similar to hypothetical | | | |
|---|---|---|---|
| proteins from B. subtilis [Bacillus subtilis] | | | |
| Identities = 28/76 (36%), Positives = 47/76 (61%) | | | |
| Query: | 1 | MGLIWTLIVGALIGVIAGALTKKGGSMGWIANIAAGLVGSSVGQALLGSWGPSLAGMSLI | 60 |
| | | + + +L+V +IG+I A+ G ++ AGL+G+ +G LLG+WGPSLAG ++ | |
| Sbjct: | 2 | LSFLVSLVVAIVIGLIGSAIVGNRLPGGIFGSMIAGLIGAWIGHGLLGTWGPSLAGFAIF | 61 |
| Query: | 61 | PSVIGAVIVVMITSFV | 76 |
| | | P++IGA I V + + | |
| Sbjct: | 62 | PAIIGAAIFVFLLGLI | 77 |

[9591] An alignment of the GAS and GBS proteins is shown below.

| Identities = 63/82 (76%), Positives = 74/82 (89%) | | | |
|---|---|---|---|
| Query: | 1 | MSLIWSLIVGAIIGAIAGAVTNKGGSMGWIANILAGLVGSFVGQSLLGTWGPKLAGMALI | 60 |
| | | M LIW+LIVGA+IG IAGA+T KGGSMGWIANI AGLVGS VGQ+LLG+WGP LAGM+LI | |
| Sbjct: | 1 | MGLIWTLIVGALIGVIAGALTKKGGSMGWIANIAAGLVGSSVGQALLGSWGPSLAGMSLI | 60 |
| Query: | 61 | PSIVGAIIVVIVTSFVLGKMNN | 82 |
| | | PS++GA+IVV++TSFVL K NN | |
| Sbjct: | 61 | PSVIGAVIVVMITSFVLNKTNN | 82 |

[9592] Based on this analysis, it was predicted that these proteins and their epitopes could be useful antigens for vaccines or diagnostics.

### EXAMPLE 1744

[9593] A DNA sequence (GBSx1851) was identified in S. agalactiae <SEQ ID 5417> which encodes the amino acid sequence <SEQ ID 5418>. Analysis of this protein sequence reveals the following:

| Possible site: 59 | | | | |
|---|---|---|---|---|
| >>> Seems to have no N-terminal signal sequence | | | | |
| | INTEGRAL | Likelihood = −9.82 | Transmembrane | 88-104 (84-111) |
| | INTEGRAL | Likelihood = −8.07 | Transmembrane | 29-45 (27-54) |

```
----- Final Results -----
                              bacterial membrane --- Certainty = 0.4927(Affirmative) < succ>
                                bacterial outside --- Certainty = 0.0000(Not Clear) < succ>
                            bacterial cytoplasm --- Certainty = 0.0000(Not Clear) < succ>
```

[9594] The protein has homology with the following sequences in the GENPEPT database.

| >GP: CAB12244 GB: Z99106 similar to hypothetical proteins | | | |
|---|---|---|---|
| from B. subtilis [Bacillus subtilis] | | | |
| Identities = 29/77 (37%), Positives = 47/77 (60%) | | | |
| Query: | 31 | IMGLIWSLIVGAIIGAIAGAITNKGGSMGWIANILAGLVGSFVGQSLLGTWGPKLADMAL | 90 |
| | | ++ + SL+V +IG I AI G +++AGL+G+++G LLGTWGP LA A+ | |
| Sbjct: | 1 | MLSFLVSLVVAIVIGLIGSAIVGNRLPGGIFGSMIAGLIGAWIGHGLLGTWGPSLAGFAI | 60 |
| Query: | 91 | IPSIVGAIIVIIVTSFV | 107 |
| | | P+I+GA I + + + | |
| Sbjct: | 61 | FPAIIGAAIFVFLLGLI | 77 |

[9595] There is also homology to SEQ ID 5416:

| Identities = 60/79 (75%), Positives = 72/79 (90%) | | | |
|---|---|---|---|
| Query: | 32 | MGLIWSLIVGAIIGAIAGAITNKGGSMGWIANILAGLVGSFVGQSLLGTWGPKLADMALI | 91 |
| | | MGLIW+LIVGA+IG IAGA+T KGGSMGWIANI AGLVGS VGQ+LLG+WGP LA M+LI | |
| Sbjct: | 1 | MGLIWTLIVGALIGVIAGALTKKGGSMGWIANIAAGLVGSSVGQALLGSWGPSLAGMSLI | 60 |
| Query: | 92 | PSIVGAIIVIIVTSFVLGK | 110 |
| | | PS++GA+IV+++TSFVL K | |
| Sbjct: | 61 | PSVIGAVIVVMITSFVLNK | 79 |

[9596] Based on this analysis, it was predicted that these proteins and their epitopes could be useful antigens for vaccines or diagnostics.

### EXAMPLE 1745

[9597] A DNA sequence (GBSx1852) was identified in S. agalactiae <SEQ ID 5419> which encodes the amino acid sequence <SEQ ID 5420>. This protein is predicted to be ATP-dependent DNA helicase Rep (uvrD). Analysis of this protein sequence reveals the following:

```
Possible site: 22
>>> Seems to have no N-terminal signal sequence
----- Final Results -----
                            bacterial cytoplasm --- Certainty = 0.1364(Affirmative) < succ>
                              bacterial membrane --- Certainty = 0.0000(Not Clear) < succ>
                                bacterial outside --- Certainty = 0.0000(Not Clear) < succ>
```

[9598] A related GBS nucleic acid sequence <SEQ ID 9863> which encodes amino acid sequence <SEQ ID 9864> was also identified.

[9599] The protein has homology with the following sequences in the GENPEPT database.

| >GP: AAD51119 GB: AF176554 DNA helicase | | | |
|---|---|---|---|
| PcrA [Leuconostoc citreum] | | | |
| Identities = 414/764 (54%), Positives = 537/764 (70%), | | | |
| Gaps = 23/764 (3%) | | | |
| Query: | 6 | VEMNPLIIGMNDKQAEAVQTTDGPLLIMAGAGSGKTRVLTHRIAYLIDEKYVNPWNILAI | 65 |
| | | + + L GMN+KQAEAVQTT+GPLLIMAGAGSGKTRVLTHRIA+L+ + V PW ILAI | |
| Sbjct: | 1 | MSVETLTNGMNNKQAEAVQTTEGPLLIMAGAGSGKTRVLTHRIAHLVQDLNVFPWRILAI | 60 |
| Query: | 66 | TFTNKAAREMRERAIAL--NPATQDTLIATFHSMCVRILRREADYIGYNRNFTIVDPGEQ | 123 |
| | | TFTNKAAREMRER AL +D ++TFH++ VRILRR+ + IG +NFTI+D Q | |
| Sbjct: | 61 | TFTNKAAREMRERIAALLSEDVARDIWVSTFHALAVRILRRDGEAIGLAKNFTIIDTSAQ | 120 |
| Query: | 124 | RTLMKRIIKQLNLDTKKWNERSILGTISNAKNDLLDEIAYEKQAGDMYTQVIAKCYKAYQ | 183 |
| | | RTLMKR+I LNLDT +++ R+ILG ISNAKND+L Y K A + + + +A+ Y AYQ | |
| Sbjct: | 121 | RTLMKRVINDLNLDTNQYDPRTILGMISNAKNDMLQPRDYAKAADNAFQETVAEVYTAYQ | 180 |
| Query: | 184 | EELRRSEAMDFDDLIMMTLRLFDQNKDVLAYYQQRYQYIHVDEYQDTNHAQYQLVKLLAS | 243 |
| | | EL+RS+++DFDDLIM+T+ LF DVLA YQQ+++Y+HVDEYQDTN AQY +V LLA | |
| Sbjct: | 181 | AELKRSQSVDFDDLIMLTIDLFQSAPDVLARYQQQFEYLHVDEYQDTNDAQYTIVNLLAQ | 240 |
| Query: | 244 | RFKNICVVGDADQSIYGWRGADMQNILDFEKDYPQAKVVLLEENYRSTKKILQAANNVIN | 303 |
| | | R KN+ VVGDADQSIYGWRGA+M NIL+FEKDYP A V+LE+NYRST+ IL AAN VIN | |
| Sbjct: | 241 | RSKNLAVVGDADQSIYGWRGANMNNILNFEKDYPNAHTVMLEQNYRSTQNILDAANAVIN | 300 |
| Query: | 304 | HNKNRRPKKLWTQNDEGEQIVYHRANNEQEEAVFVASTIDNIVREQGKNFKDFAVLYRTN | 363 |
| | | HN R PKKLWT+N +G+QI Y+RA E +EA F+ S I + + + DFAVLYRTN | |
| Sbjct: | 301 | HNNERVPKKLWTENGKGDQITYYRAQTEHDEANFILSNIQQLRETKHMAYSDFAVLYRTN | 360 |
| Query: | 364 | AQSRTIEEALLKSNIPYTMVGGTKFYSRKEIRDVIAYLNILANTSDNISFERIVNEPKRG | 423 |
| | | AQSR IEE+L+K+N+PY+MVGG KFY RKEI D++AY++++ N DN +FER+VNEPKRG | |
| Sbjct: | 361 | AQSRNIEESLVKANMPYSMVGGHKFYERKEILDIMAYMSLITNPDDNAAFERVVNEPKRG | 420 |
| Query: | 424 | VGPGTLEKIRSFAYEQSMSLLDASSNVMMSP-LKGKAAQAVWDLANLILTLRSNLDSLTV | 482 |
| | | +G +L ++R A ++S + A ++ ++P + KAA A ++ LR + L V | |
| Sbjct: | 421 | LGATSLTRLRELANRLNVSYMKAIGSIELAPSITTKAASKFLTFAEMMHNLRQQSEFLNV | 480 |
| Query: | 483 | TEITENLLDKTGYLEALQVQNTLESQARIENIEEFLSVTKNFDDNPEITVEGETGLDRLS | 542 |
| | | TE+TE ++ ++GY + L +N +SQAR+EN+EEFLSVTK FDD + E +D ++ | |
| Sbjct: | 481 | TELTELVMTQSGYRQMLAEKNDPDSQARLENLEEFLSVTKEFDD--KYQPEDPESIDPVT | 538 |
| Query: | 543 | RFLNDLALIADTDDSATETAEVTLMTLHAAKGLEFPVVFLIGMEEGVFPLSRAIEDADEL | 602 |
| | | FL AL++D DD VTLMTLHAAKGLEFPVVFLIG++EG+FPLSRA+ D D L | |
| Sbjct: | 539 | DFLGTTALMSDLDDFEEGDGAVTLMTLHAAKGLEFPVVFLIGLKEGIFPLSRAMMDEDLL | 598 |
| Query: | 603 | EEERRLAYVGITRAEQILFLTNANTRTLFGKTSYNRPTRFIREIDDELIQ--YQGLARPV | 660 |
| | | EEERRLAYVGITRA + LFLTNA +R L+G+T N P+RFI EI EL++ Y GL+R | |
| Sbjct: | 599 | EEERRLAYVGITRAMKKLFLTNAFSRLLYGRTQANEPSRFIAEISPELLETAYSGLSRDK | 658 |
| Query: | 661 | NSSFGVKYSKEQPTQFGQGMSLQQALQARKSNSQSQVTAQLQALN-ANNSHETSWEIGDV | 719 |
| | | + + ++ R + + Q T + N +TSW GD | |
| Sbjct: | 659 | TQKKTLPFDRK---------------MQRATATTYQATPVTKITNGVTGGDQTSWSTGDK | 703 |
| Query: | 720 | ATHKKWGDGTVLEVSGSGKTQELKINFPGIGLKKLLASVAPISK | 763 |
| | | +HKKWG GTV+ VSG QELK+ FP G+K+LLA+ API K | |
| Sbjct: | 704 | VSHKKWGVGTVISVSGRADDQELKVAFPSEGVKQLLAAFAPIQK | 747 |

[9600] A related DNA sequence was identified in S. pyogenes <SEQ ID 5421> which encodes the amino acid sequence <SEQ ID 5422>. Analysis of this protein sequence reveals the following:

```
Possible site: 15
>>> Seems to have no N-terminal signal sequence
----- Final Results -----
                            bacterial cytoplasm --- Certainty = 0.0214(Affirmative) < succ>
                              bacterial membrane --- Certainty = 0.0000(Not Clear) < succ>
                                bacterial outside --- Certainty = 0.0000(Not Clear) < succ>
```

[9601] An alignment of the GAS and GBS proteins is shown below.

| Identities = 622/772 (80%), Positives = 699/772 (89%), | | | |
|---|---|---|---|
| Gaps = 15/772 (1%) | | | |
| Query: | 8 | MNPLIIGMNDKQAEAVQTTDGPLLIMAGAGSGKTRVLTHRIAYLIDEKYVNPWNILAITF | 67 |
| | | MNPL+ GMND+QA+AVQTT+GPLLIMAGAGSGKTRVLTHRIAYLIDEK+VNPWNILAITF | |
| Sbjct: | 1 | MNPLLNGMNDRQAQAVQTTEGPLLIMAGAGSGKTRVLTHRIAYLIDEKFVNPWNILAITF | 60 |
| Query: | 68 | TNKAAREMRERAIALNPATQDTLIATFHSMCVRILRREADYIGYNRNFTIVDPGEQRTLM | 127 |
| | | TNKAAREM+ERA+ALNPAT+DTLIATFHSMCVRILRREAD+IGYNRNFTIVDPGEQRTLM | |
| Sbjct: | 61 | TNKAAREMKERALALNPATKDTLIATFHSMCVRILRREADHIGYNRNFTIVDPGEQRTLM | 120 |
| Query: | 128 | KRIIKQLNLDTKKWNERSILGTISNAKNDLLDEIAYEKQAGDMYTQVIAKCYKAYQEELR | 187 |
| | | KRI+KQLN+D KKWNERSILGTISNAKNDLLDE YE QA DMY+Q++A+CYKAYQEELR | |
| Sbjct: | 121 | KRILKQLNIDPKKWNERSILGTISNAKNDLLDEKGYEAQAADMYSQIVARCYKAYQEELR | 180 |
| Query: | 188 | RSEAMDFDDLIMMTLRLFDQNKDVLAYYQQRYQYIHVDEYQDTNHAQYQLVKLLASRFKN | 247 |
| | | RSEA+DFDDLIMMTLRLFD N DVLAYYQQRYQYIHVDEYQDTNHAQYQL+KLLASRFKN | |
| Sbjct: | 181 | RSEALDFDDLIMMTLRLFDANPDVLAYYQQRYQYIHVDEYQDTNHAQYQLIKLLASRFKN | 240 |
| Query: | 248 | ICVVGDADQSIYGWRGADMQNILDFEKDYPQAKVVLLEENYRSTKKILQAANNVINHNKN | 307 |
| | | ICVVGDADQSIYGWRGADMQNILDFEKDYP AKVVLLEENYRSTKKILQAAN+VIN+N+N | |
| Sbjct: | 241 | ICVVGDADQSIYGWRGADMQNILDFEKDYPDAKVVLLEENYRSTKKILQAANDVINNNRN | 300 |
| Query: | 308 | RRPKKLWTQNDEGEQIVYHRANNEQEEAVFVASTIDNIVREQGKNFKDFAVLYRTNAQSR | 367 |
| | | RRPKKLWTQN +GEQ+VY+RAN+E++EAVFVASTI N+ +E GKNFKDFAVLYRTNAQSR | |
| Sbjct: | 301 | RRPKKLWTQNADGEQLVYYRANDERDEAVFVASTISNMSQELGKNFKDFAVLYRTNAQSR | 360 |
| Query: | 368 | TIEEALLKSNIPYTMVGGTKFYSRKEIRDVIAYLNILANTSDNISFERIVNEPKRGVGPG | 427 |
| | | TIEEALLKSNIPYTMVGGTKFYSRKEIRD+IAYL I+AN +DNISFERIVNEPKRGVGPG | |
| Sbjct: | 361 | TIEEALLKSNIPYTMVGGTKFYSRKEIRDLIAYLTIVANPADNISFERIVNEPKRGVGPG | 420 |
| Query: | 428 | TLEKIRSFAYEQSMSLLDASSNVMMSPLKGKAAQAVWDLANLILTLRSNLDSLTVTEITE | 487 |
| | | TL+K+R FAYE SLL+A+SN++MSPLKGKAAQA+ DLAN++ LR +LD +++T++ E | |
| Sbjct: | 421 | TLDKLRQFAYESDQSLLEAASNLLMSPLKGKAAQAIMDLANILGQLRQDLDQMSITDLAE | 480 |
| Query: | 488 | NLLDKTGYLEALQVQNTLESQARIENIEEFLSVTKNFDDNPEITVEGETGLDRLSRFLND | 547 |
| | | LL+KTGYL++L++QNTLESQARIENIEEFLSVTKNFD++ E ETG+DRL RFLND | |
| Sbjct: | 481 | ALLEKTGYLDSLRLQNTLESQARIENIEEFLSVTKNFDESSASQEEDETGVDRLGRFLND | 540 |
| Query: | 548 | LALIADTDDSATETAEVTLMTLHAAKGLEFPVVFLIGMEEGVFPLSRAIEDADELEEERR | 607 |
| | | LALIADTDDS E AEVTLMTLHAAKGLEFPVVFLIGMEEGVFPLSRA ED DELEEERR | |
| Sbjct: | 541 | LALIADTDDSQAEAAEVTLMTLHAAKGLEFPVVFLIGMEEGVFPLSRASEDPDELEEERR | 600 |
| Query: | 608 | LAYVGITRAEQILFLTNANTRTLFGKTSYNRPTRFIREIDDELIQYQGLARPVNSSFGVK | 667 |
| | | LAYVGITRAE++LF+TNANTRTLFGK+SYNRPTRF++EI +EL+ Y+GLARP SSFGV+ | |
| Sbjct: | 601 | LAYVGITRAEEVLFMTNANTRTLFGKSSYNRPTRFLKEISEELLSYKGLARPAQSSFGVR | 660 |
| Query: | 668 | YSKEQPTQFGQGMSLQQALQARKSNSQSQVTAQ-LQA-------------LNANNS-HET | 712 |
| | | +S E TQFGQGMSL +ALQARK+ +Q + +AQ +QA +N+S E | |
| Sbjct: | 661 | FSTETHTQFGQGMSLSEALQARKAQAQVRQSAQPMQAHTIPSASTSSVLPFGSNSSVEEV | 720 |
| Query: | 713 | SWEIGDVATHKKWGDGTVLEVSGSGKTQELKINFPGIGLKKLLASVAPISKK | 764 |
| | | +W+IGD+A HKKWGDGTVLEVSGSGKT ELKI FP +GLKKLLASVAPI KK | |
| Sbjct: | 721 | TWQIGDIAHHKKWGDGTVLEVSGSGKTMELKIKFPEVGLKKLLASVAPIEKK | 772 |

[9602] Based on this analysis, it was predicted that these proteins and their epitopes could be useful antigens for vaccines or diagnostics.

### EXAMPLE 1746

[9603] A DNA sequence (GBSx1853) was identified in S. agalactiae <SEQ ID 5423> which encodes the amino acid sequence <SEQ ID 5424>. Analysis of this protein sequence reveals the following:

```
Possible site: 43
>>> Seems to have no N-terminal signal sequence
----- Final Results -----
                            bacterial cytoplasm --- Certainty = 0.4741(Affirmative) < succ>
                              bacterial membrane --- Certainty = 0.0000(Not Clear) < succ>
                                bacterial outside --- Certainty = 0.0000(Not Clear) < succ>
```

[9604] The protein has homology with the following sequences in the GENPEPT database.

| >GP:AAA88579 GB:M14339 unknown [Streptococcus pneumoniae] | | |
|---|---|---|
| Identities = 43/57 (75%), Positives = 50/57 (87%) | | |
| Query: 41 | AHGGYLFTLCDQVSGLVAISTGYEAVTLQSNINYLRAGRLDDLLTVIGTCVHNGRTT | 97 |
| | AHGGYLFTLCDQ+SGLV IS G + VTLQS+INYL+AG+LDD+LT+ G CVH GRTT | |
| Sbjct: 1 | AHGGYLFTLCDQISGLVVISLGLDGVTLQSSINYLKAGKLDDVLTIKGECVHQGRTT | 57 |

[9605] A related DNA sequence was identified in S. pyogenes <SEQ ID 5425> which encodes the amino acid sequence <SEQ ID 5426>. Analysis of this protein sequence reveals the following:

```
Possible site: 48
>>> Seems to have no N-terminal signal sequence
----- Final Results -----
bacterial cytoplasm --- Certainty = 0.1210 (Affirmative) <succ>
  bacterial membrane --- Certainty = 0.0000 (Not Clear) <succ>
    bacterial outside --- Certainty = 0.0000 (Not Clear) <succ>
```

[9606] An alignment of the GAS and GBS proteins is shown below.

| Identities = 57/97 (58%), Positives = 74/97 (75%) | | |
|---|---|---|
| Query: 2 | KFNLEQVKVFENYEIENWEEGQVTLTTKVVDSSLNYYGNAHGGYLFTLCDQVSGLVAIST | 61 |
| | + L + +F+NY+IE E+G + L+T+V +++LNYYGNAHGGYLFTLCDQV GLVA +T | |
| Sbjct: 7 | EMTLNVISIFDNYQIELAEKGHLILSTEVTETALNYYGNAHGGYLFTLCDQVGGLVARTT | 66 |
| Query: 62 | GYEAVTLQSNINYLRAGRLDDLLTVIGTCVHNGRTTK | 98 |
| | G E+VTLQ+N NYL+AG D L V G VH GRTT+ | |
| Sbjct: 67 | GVESVTLQANANYLKAGHKGDKLMVEGRLVHGGRTTQ | 103 |

[9607] Based on this analysis, it was predicted that these proteins and their epitopes could be useful antigens for vaccines or diagnostics.

### EXAMPLE 1747

[9608] A DNA sequence (GBSx1854) was identified in S. agalactiae <SEQ ID 5427> which encodes the amino acid sequence <SEQ ID 5428>. Analysis of this protein sequence reveals the following:

```
Possible site: 22
>>> Seems to have no N-terminal signal sequence
----- Final Results -----
bacterial cytoplasm --- Certainty = 0.3187 (Affirmative) <succ>
  bacterial membrane --- Certainty = 0.0000 (Not Clear) <succ>
    bacterial outside --- Certainty = 0.0000 (Not Clear) <succ>
```

[9609] The protein has no significant homology with any sequences in the GENPEPT database.

[9610] No corresponding DNA sequence was identified in S. pyogenes.

[9611] Based on this analysis, it was predicted that this protein and its epitopes, could be useful antigens for vaccines or diagnostics.

### EXAMPLE 1748

[9612] A DNA sequence (GBSx1855) was identified in S. agalactiae <SEQ ID 5429> which encodes the amino acid sequence <SEQ ID 5430>. This protein is predicted to be uracil permease (uraA). Analysis of this protein sequence reveals the following:

| Possible site: 54 | | |
|---|---|---|
| >>> Seems to have no N-terminal signal sequence | | |
| INTEGRAL | Likelihood = −8.65 | Transmembrane 122-138 (117-146) |
| INTEGRAL | Likelihood = −8.65 | Transmembrane 212-228 (204-233) |
| INTEGRAL | Likelihood = −7.32 | Transmembrane 60-76 (49-80) |
| INTEGRAL | Likelihood = −6.53 | Transmembrane 149-165 (145-172) |
| INTEGRAL | Likelihood = −6.48 | Transmembrane 402-418 (401-420) |
| INTEGRAL | Likelihood = −4.04 | Transmembrane 422-438 (420-445) |
| INTEGRAL | Likelihood = −3.72 | Transmembrane 365-381 (364-385) |
| INTEGRAL | Likelihood = −3.40 | Transmembrane 184-200 (182-202) |
| INTEGRAL | Likelihood = −3.08 | Transmembrane 346-362 (345-363) |
| INTEGRAL | Likelihood = −1.38 | Transmembrane 260-276 (260-276) |

```
----- Final Results -----
  bacterial membrane --- Certainty = 0.4461 (Affirmative) <succ>
    bacterial outside --- Certainty = 0.0000 (Not Clear) <succ>
bacterial cytoplasm --- Certainty = 0.0000 (Not Clear) <succ>
```

[9613] A related GBS nucleic acid sequence <SEQ ID 9865> which encodes amino acid sequence <SEQ ID 9866> was also identified.

[9614] The protein has homology with the following sequences in the GENPEPT database.

| >GP:CAA53697 GB:X76083 uracil permease [Bacillus caldolyticus] | | |
|---|---|---|
| Identities = 208/416 (50%), Positives = 291/416 (69%), Gaps = 11/416 (2%) | | |
| Query: 32 | LLDIDEKPELFQGLLLSFQHVFAMFGATILVPLILGMPVSVALFASGCGTLIYQVATKFK | 91 |
| | +LDI ++P + Q + LS QH+FAMFGATILVP ++G+ S+AL SG GTL + + TK++ | |
| Sbjct: 5 | VLDIQDRPTVGQWITLSLQHLFAMFGATILVPYLVGLDPSIALLTSGLGTLAFLLITKWQ | 64 |
| Query: 92 | VPVYLGSSFAYITAMALAMKQMHGDISAAQTGILFVGLIYVVVATVIKFVGNSWVDKILP | 151 |
| | VP YLGSSFAYI + A + G AA G GL+Y VVA +IK G WV K+LP | |
| Sbjct: 65 | VPAYLGSSFAYIAPIIAA--KTAGGPGAAMIGSFLAGLVYGVVALIIKKAGYRWVMKLLP | 122 |
| Query: 152 | PIIIGPMIIVIGLGLANSAVTNA--GFVAKGDWRKMLVAVVTFLIAAFINTKGKGFIKII | 209 |
| | P+++GP+IIVIGLGLA +AV A G K VA+VT + +G + +I | |
| Sbjct: 123 | PVVVGPVIIVIGLGLAGTAVGMAMNGPDGKYSLLHFSVALVTLAATIVCSVLARGMLSLI | 182 |
| Query: 210 | PFLFAIIGGYILSIILGLVDLSPVEKAAWFELPKFYLPFKTGLFHSYKLYFGPEMLAIL- | 268 |
| | P L I+ GY+ ++ +GLVDLS V A WFE P F +PF Y + E++ ++ | |
| Sbjct: 183 | PVLVGIVVGYLYALAVGLVDLSKVAAAKWFEWPDFLIPFA-----DYPVRVTWEIVMLMV | 237 |
| Query: 269 | PISIVTIAENIGDHTVLGQICGRNFLKKPGLNRLLIGDGLATAFSALIGGPAETTYGENT | 328 |
| | P++IVT++E+IG VL ++ GR+ ++KPGL+R ++GDG AT SAL+GGP +TTYGEN | |
| Sbjct: 238 | PVAIVTLSEHIGHQLVLSKVVGRDLIQKPGLHRSILGDGTATMISALLGGPPKTTYGENI | 297 |
| Query: 329 | GVIGMTRIASVTVIRNAAFIAIAFSFFGKFTALISTIPSAVLGGMAILLYGVIASNGLKV | 388 |
| | GV+ +TR+ SV V+ AA IAIAF F GK TALIS+IP+ V+GG++ILL+G+IAS+GL++ | |
| Sbjct: 298 | GVLAITRVYSVYVLAGAAVIAIAFGFVGKITALISSIPTPVMGGVSILLFGIIASSGLRM | 357 |
| Query: 389 | LIENRVNFAEVRNLIIASSMLVLGLGGAVLDLG-ALTLSGTALSAIVGIILNLILP | 443 |
| | LI++RV+F + RNL+IAS +LV+G+GGAVL + + ++G ALSAIVG++LNLILP | |
| Sbjct: 358 | LIDSRVDFGQTRNLVIASVILVIGIGGAVLKISDSFQITGMALSAIVGVLLNLILP | 413 |

[9615] A related DNA sequence was identified in S. pyogenes <SEQ ID 5431> which encodes the amino acid sequence <SEQ ID 5432>. Analysis of this protein sequence reveals the following:

| Possible site: 27 | | |
|---|---|---|
| >>> Seems to have no N-terminal signal sequence | | |
| INTEGRAL | Likelihood = −10.72 | Transmembrane 177-193 (171-206) |
| INTEGRAL | Likelihood = −8.55 | Transmembrane 313-329 (304-339) |
| INTEGRAL | Likelihood = −8.17 | Transmembrane 154-170 (152-175) |
| INTEGRAL | Likelihood = −7.91 | Transmembrane 376-392 (374-395) |
| INTEGRAL | Likelihood = −7.48 | Transmembrane 25-41 (22-43) |
| INTEGRAL | Likelihood = −5.84 | Transmembrane 120-136 (116-142) |
| INTEGRAL | Likelihood = −4.99 | Transmembrane 96-112 (90-117) |
| INTEGRAL | Likelihood = −3.29 | Transnembrane 339-355 (338-360) |
| INTEGRAL | Likelihood = −1.91 | Transnembrane 396-412 (396-413) |

```
----- Final Results -----
  bacterial membrane --- Certainty = 0.5288 (Affirmative) <succ>
    bacterial outside --- Certainty = 0.0000 (Not Clear) <succ>
bacterial cytoplasm --- Certainty = 0.0000 (Not Clear) <succ>
```

[9616] The protein has homology with the following sequences in the databases:

| >GP:CAB89870 GB:AJ132624 uracil transporter [Lactococcus lactis] | | |
|---|---|---|
| Identities = 294/421 (69%), Positives = 359/421 (84%), Gaps = 5/421 (1%) | | |
| Query: 3 | DVIYDVEEVPKAGMLVGLSFQHLFAMFGATVLVPILVGIDPSVALLSSGLGTLAHLSVTK | 62 |
| | D+I V+E P A GLSFQHLFAMFG+TVLVPILVGI+P++ALLSSGLGTLAH+SVTK | |
| Sbjct: 5 | DIILKVDEKPAASQWFGLSFQHLFAMFGSTVLVPILVGINPAIALLSSGLGTLAHMSVTK | 64 |
| Query: 63 | FKIPAYMGSSFAYIAAMQLLMKTNGIGAVAQGAMTGGLVYLIVALIVKAIGNDWIDNILP | 122 |
| | FK+PAYMGSSFAYI AM LLMK G+ A+AQGAMTGGLVYLIVALIVK G WID +LP | |
| Sbjct: 65 | FKVPAYMGSSFAYIGAMTLLMKNGGMPAIAQGAMTGGLVYLIVALIVKFAGKGWIDKVLP | 124 |
| Query: 123 | PIVVGPIVMVIGLSLASTAVNDVMLKN----GNYNLTYLVIGLVTLLSVIFFNIYGKGIV | 178 |
| | PIVVGPIVMVIGLSLA TA+ND M + Y+L Y++I L+T+LS++ ++IYGKG + | |
| Sbjct: 125 | PIVVGPIVMVIGLSLAPTAINDAMYTDVANLKGYSLAYIIIALITVLSIVVYSIYGKGFL | 184 |
| Query: 179 | AIVPLLLGLLVGYVVALLVGVLTGQEIVDFTNVAQAKWFSIPSVEIPFLTYGVKFYPSAI | 238 |
| | ++VP+LLG++ GYV A+++G +TG IV FT ++QAKW ++P +EIPF +Y FYPSAI | |
| Sbjct: 185 | SVVPILLGIITGYVAAMIIGKITGMNIVSFTGISQAKWLTLPPMEIPFASYKWAFYPSAI | 244 |
| Query: 239 | LTMAPIAFVTMTEHFGHIMVLNSLTKRDYFKDPGLEKTLTGDGFAQIIAGFLGAPPVTSY | 298 |
| | LTMAPIAFVTMTEHFGHIMVLNSLTK+DYFK+PGLEKTLTGDG AQIIAGF+GAPPVTSY | |
| Sbjct: 245 | LTMAPIAFVTMTEHFGHIMVLNSLTKKDYFKEPGLEKTLTGDGLAQIIAGFIGAPPVTSY | 304 |
| Query: 299 | GENIGVMALNKIFSVYVIAGAAVIAALLSFIGKVSALIQSIPTPVIGGISVALFGVIASS | 358 |
| | GENIGVMA+ KI S+YVIAGAAV+A ++SF+GK++AL+QSIP PVIGG S+ALFGVIA+S | |
| Sbjct: 305 | GENIGVMAITKIHSIYVIAGAAVLAIVVSFVGKITALLQSIPAPVIGGASIALFGVIAAS | 364 |
| Query: 359 | GLKILIESKVDMDNKKNLLIASVILVSGIGGLMLQV-NGLQISGVAFSTLLGIILYQVLPE | 418 |
| | GLKIL+E+KVD D K+NLLI+SV+LV GIGG+++ + LQIS VA +T+LGI+L VLP+ | |
| Sbjct: 365 | GLKILVENKVDFDIKRNLLISSVVLVIGIGGMIINITQNLQISSVAIATILGIVLNLVLPK | 425 |

[9617] An alignment of the GAS and GBS proteins is shown below.

| Identities = 186/425 (43%), Positives = 282/425 (65%), Gaps = 17/425 (4%) | | |
|---|---|---|
| Query: 30 | NLLLDIDEKPELFQGLLLSFQHVFAMFGATILVPLILGMPVSVALFASGCGTLIYQVATK | 89 |
| | +++ D++E P+ + LSFQH+FAMFGAT+LVP+++G+ SVAL +SG GTL + TK | |
| Sbjct: 3 | DVIYDVEEVPKAGMLVGLSFQHLFAMFGATVLVPILVGIDPSVALLSSGLGTLAHLSVTK | 62 |
| Query: 90 | FKVPVYLGSSFAYITAMALAMKQMHGDISAAQTGILFVGLIYVVVATVIKFVGNSWVDKI | 149 |
| | FK+P Y+GSSFAYI AM L MK I A G + GL+Y++VA ++K +GN W+D I | |
| Sbjct: 63 | FKIPAYMGSSFAYIAAMQLLMKT--NGIGAVAQGAMTGGLVYLIVALIVKAIGNDWIDNI | 120 |
| Query: 150 | LPPIIIGPMIIVIGLGLANSAVTNAGFVAKGDWRK--MLVAVVTFLIAAFINTKGKGFIK | 207 |
| | LPPI++GP+++VIGL LA++AV + + G++ +++ +VT L F N GKG + | |
| Sbjct: 121 | LPPIVVGPIVMVIGLSLASTAVNDV-MLKNGNYNLTYLVIGLVTLLSVIFFNIYGKGIVA | 179 |
| Query: 208 | IIPFLFAIIGGYILSIILG------LVDLSPVEKAAWFELPKFYLPFKTGLFHSYKLYFG | 261 |
| | I+P L ++ GY++++++G +VD + V +A WF +P +PF T Y + F | |
| Sbjct: 180 | IVPLLLGLLVGYVVALLVGVLTGQEIVDFTNVAQAKWFSIPSVEIPFLT-----YGVKFY | 234 |
| Query: 262 | PE-MLAILPISIVTIAENIGDHTVLGQICGRNFLKKPGLNRLLIGDGLATAFSALIGGPA | 320 |
| | P +L +PI +VT +E +G VL + R++ K PGL + L GDG A + +G P | |
| Sbjct: 235 | PSAILTMAPIAFVTMTEHFGHIMVLNSLTKRDYFKDPGLEKTLTGDGFAQIIAGFLGAPP | 294 |
| Query: 321 | ETTYGENTGVIGMTRIASVTVIRNAAFIAIAFSFFGKFTALISTIPSAVLGGMAILLYGV | 380 |
| | T+YGEN GV+ + +I SV VI AA IA SF GK +ALI +IP+ V+GG+++ L+GV | |
| Sbjct: 295 | VTSYGENIGVMALNKIFSVYVIAGAAVIAALLSFIGKVSALIQSIPTPVIGGISVALFGV | 354 |
| Query: 381 | IASNGLKVLIENRVNFAEVRNLIIASSMLVLGLGGAVLDLGALTLSGTALSAIVGIILNL | 440 |
| | IAS+GLK+LIE++V+ +NL+IAS +LV G+GG +L + L +SG A S ++GIIL | |
| Sbjct: 355 | IASSGLKILIESKVDMDNKKNLLIASVILVSGIGGLMLQVNGLQISGVAFSTLLGIILYQ | 414 |
| Query: 441 | ILPKE | 445 |
| | +LP++ | |
| Sbjct: 415 | VLPEK | 419 |

[9618] Based on this analysis, it was predicted that these proteins and their epitopes could be useful antigens for vaccines or diagnostics.

### EXAMPLE 1749

[9619] A DNA sequence (GBSx1856) was identified in S. agalactiae <SEQ ID 5433> which encodes the amino acid sequence <SEQ ID 5434>. Analysis of this protein sequence reveals the following:

```
Possible site: 20
>>> Seems to have no N-terminal signal sequence
----- Final Results -----
bacterial cytoplasm --- Certainty = 0.3863 (Affirmative) <succ>
  bacterial membrane --- Certainty = 0.0000 (Not Clear) <succ>
    bacterial outside --- Certainty = 0.0000 (Not Clear) <succ>
```

[9620] The protein has no significant homology with any sequences in the GENPEPT database.

[9621] No corresponding DNA sequence was identified in S. pyogenes.

[9622] Based on this analysis, it was predicted that this protein and its epitopes, could be useful antigens for vaccines or diagnostics.

### EXAMPLE 1750

[9623] A DNA sequence (GBSx1857) was identified in S. agalactiae <SEQ ID 5435> which encodes the amino acid sequence <SEQ ID 5436>. This protein is predicted to be sodium/alanine symporter. Analysis of this protein sequence reveals the following:

| Possible site: 22 | | |
|---|---|---|
| >>> Seems to have no N-terminal signal sequence | | |
| INTEGRAL | Likelihood = −10.88 | Transmembrane 191-207 (184-214) |
| INTEGRAL | Likelihood = −8.97 | Transmembrane 151-167 (148-171) |
| INTEGRAL | Likelihood = −8.39 | Transmembrane 217-233 (216-238) |
| INTEGRAL | Likelihood = −6.74 | Transmembrane 312-328 (310-333) |
| INTEGRAL | Likelihood = −6.26 | Transmembrane 357-373 (349-376) |
| INTEGRAL | Likelihood = −5.10 | Transmembrane 424-440 (422-441) |
| INTEGRAL | Likelihood = −5.04 | Transmembrane 396-412 (390-417) |
| INTEGRAL | Likelihood = −0.37 | Transmembrane 25-41 (25-41) |

```
----- Final Results -----
  bacterial membrane --- Certainty = 0.5352 (Affirmative) <succ>
    bacterial outside --- Certainty = 0.0000 (Not Clear) <succ>
bacterial cytoplasm --- Certainty = 0.0000 (Not Clear) <succ>
```

[9624] A related GBS nucleic acid sequence <SEQ ID 9867> which encodes amino acid sequence <SEQ ID 9868> was also identified.

[9625] The protein has homology with the following sequences in the GENPEPT database.

| >GP:AAC22541 GB:U32770 amino acid carrier protein, putative | | |
|---|---|---|
| [Haemophilus influenzae Rd] | | |
| Identities = 255/443 (57%), Positives = 333/443 (74%), Gaps = 4/443 (0%) | | |
| Query: 11 | TLFTHINSFVWGPPLLALLVGTGIYLSFRLGFIQLRQLSRAFKLIFREDNG-QGDISSYA | 69 |
| | ++ + I+SF+WG PLL LL GTG+YL+ RLGFIQ+R L RA +F++D G +GD+SS+A | |
| Sbjct: 5 | SILSAIDSFIWGAPLLILLSGTGLYLTLRLGFIQIRYLPRALGYLFKKDKGGKGDVSSFA | 64 |
| Query: 70 | ALATALAATVGTGNIVGVATAIKSGGPGALFWMWVAAFFGMATKYAEGLLAIKYRTKDTN | 129 |
| | AL TALAAT+GTGNIVGVATA+++GGPGA+FWMW+ A GMATKYAE LLA+KYR +D N | |
| Sbjct: 65 | ALCTALAATIGTGNIVGVATAVQAGGPGAIFWMWLVALLGMATKYAECLLAVKYRVRDKN | 124 |
| Query: 130 | GEISGGPMYYIINGMGQKWKPLAVFFSAAGILVALLGIGTFTQVNAIASSLEHTFKISTR | 189 |
| | G ++GGPMYYI G+G +W LA F+ G++VA GIGTF QVNAI +++ TF I | |
| Sbjct: 125 | GFMAGGPMYYIERGLGIRW--LAKLFALFGVMVAFFGIGTFPQVNAITHAMQDTFNIPVL | 182 |
| Query: 190 | FTSLILAVIVLFIIFGGIKSISKVSEKIVPFMAISYILATLIIIAVNYNKIPHTFQLIFS | 249 |
| | T++I+ ++V II GG+K I+ S IVPFMAI Y+ +L+II +N K+P LI | |
| Sbjct: 183 | VTAIIVTLLVGLIILGGVKRIATASSVIVPFMAILYVTTSLVIILLNIEKVPDAILLIID | 242 |
| Query: 250 | GAFSGTAAIGGFSGAIVKEAIQKGIARGVFSNESGLGSAPIAAAAAKTKEPVEQGLISMT | 309 |
| | AF AA+GG G V +AIQ G+ARG+FSNESGLGSAPIAAAAA+T+EPV QGLISMT | |
| Sbjct: 243 | SAFDPQAALGGAVGLTVMKAIQSGVARGIFSNESGLGSAPIAAAAAQTREPVRQGLISMT | 302 |
| Query: 310 | GTFIDTIVICTLTGIAILVTGKWLEFDLQGAPLTQASFNTVFG-SLGSFALTFCLVLFAF | 368 |
| | GTF+DTI++CT+TGI +++TG W +L GA +T +F G S+G+ +T L+ FAF | |
| Sbjct: 303 | GTFLDTIIVCTMTGIVLVLTGAWNNPELAGATVTNYAFAQGLGTSIGATIVTVGLLFFAF | 362 |
| Query: 369 | TTILGWSYYGERCFEYLFGTKFINAYRIIFVIMVGLGGFLQLDLIWVIADIVNGLMALPN | 428 |
| | TTILGW YYGERCF YL G + + YR+ ++++VGLG FL L+LIW+IADIVNGLMA PN | |
| Sbjct: 363 | TTILGWCYYGERCFVYLVGIRGVKLYRLAYIMLVGLGAFLHLNLIWIIADIVNGLMAFPN | 422 |
| Query: 429 | LIALLALSPIIVKETQKYFSETK | 451 |
| | LIAL+ L +I++ET+ YF K | |
| Sbjct: 423 | LIALIGLRKVIIEETKDYFQRLK | 445 |

[9626] A related DNA sequence was identified in S. pyogenes <SEQ ID 5437> which encodes the amino acid sequence <SEQ ID 5438>. Analysis of this protein sequence reveals the following:

| Possible site: 45 | | |
|---|---|---|
| >>> Seems to have an uncleavable N-term signal seq | | |
| INTEGRAL | Likelihood = −11.36 | Transmembrane 183-199 (175-206) |
| INTEGRAL | Likelihood = −7.80 | Transmembrane 143-159 (140-163) |
| INTEGRAL | Likelihood = −7.11 | Transmembrane 209-225 (208-229) |
| INTEGRAL | Likelihood = −5.95 | Transmembrane 416-432 (413-434) |
| INTEGRAL | Likelihood = −5.15 | Transmembrane 304-320 (302-324) |
| INTEGRAL | Likelihood = −4.46 | Transmembrane 387-403 (382-408) |
| INTEGRAL | Likelihood = −3.35 | Transmembrane 348-364 (345-366) |
| INTEGRAL | Likelihood = −1.17 | Transmembrane 11-27 (10-28) |

```
----- Final Results -----
  bacterial membrane --- Certainty = 0.5543 (Affirmative) <succ>
    bacterial outside --- Certainty = 0.0000 (Not Clear) <succ>
bacterial cytoplasm --- Certainty = 0.0000 (Not Clear) <succ>
```

[9627] The protein has homology with the following sequences in the databases:

| >GP:AAF94579 GB:AE004221 sodium/alanine symporter [Vibrio cholerae] | | |
|---|---|---|
| Identities = 261/441 (59%), Positives = 328/441 (74%), Gaps = 7/441 (1%) | | |
| Query: 3 | ALVKLIDNLVWGPPLLILLVGTGIYLTSHLGLIQILKLPRAFKLIFSDDEG---HGDISS | 59 |
| | + ++ +D+LVWGPPLLILLVGTG+Y T LGL+Q +LP A ++F ++ GD+SS | |
| Sbjct: 6 | SFLQTVDSLVWGPPLLILLVGTGVYFTFRLGLLQFRRLPTALAMVFGREKSSDKQGDVSS | 65 |
| Query: 60 | FAALATALAATVGTGNIVGVATAIKSGGPGALFWMWVAAFFGMATKYAEGVLAIKYRTKD | 119 |
| | FAAL TAL+AT+GTGNIVGVATAIK GGPGALFWMW+AA FGMATKYAE +LA+KYR D | |
| Sbjct: 66 | FAALCTALSATIGTGNIVGVATAIKLGGPGALFWMWLAALFGMATKYAECLLAVKYRQID | 125 |
| Query: 120 | ANGHISGGPMYYIVNGMGTKWKPLAVLFAGSGILVALFGIGTFAQVNSITSSLGHSFGLS | 179 |
| | G + GGPMYY+ +G+ +K LAVLFA + VA FGIGTF QVN+I + SFG+ | |
| Sbjct: 126 | DKGQMVGGPMYYLRDGVSSK--TLAVLFAVFAVGVACFGIGTFPQVNAILDATQISFGVP | 183 |
| Query: 180 | PQMVSIVLAIFVAAIIFGGIHSISKVAEKVVPFMAIFYILSSLAVIFSHYQQLLPVIRLV | 239 |
| | + ++VL + VA + GGI SI+KVA KVVP MA+FYI++ L+VI ++ +L + LV | |
| Sbjct: 184 | REASAVVLTVLVAIVTIGGIQSIAKVAGKVVPAMALFYIIACLSVIVTNADKLADAVELV | 243 |
| Query: 240 | FQSAFTPTAAIGGFAGSLMKDAIQKGIARGVFSNESGLRSAPIAAAAAKTNEPVEQGLIS | 299 |
| | SAFT TAA GGF G+ + AIQ GIARGVFSNESGL SAP+AAAAAKT+ VEQGLIS | |
| Sbjct: 244 | LVSAFTSTAATGGFLGASIMLAIQSGIARGVFSNESGLGSAPMAAAAAKTDSCVEQGLIS | 303 |
| Query: 300 | MTGTFIDTIIICTLTGLSILVTGQWTGQLEGAPLTQSAFATVFG--NLGTFGLTFSLVLF | 357 |
| | MTGTF DTIIICT+TGL++++TG W L GA +T AFAT +G ++ L+ F | |
| Sbjct: 304 | MTGTFFDTIIICTMTGLALILTGAWQSDLSGAAMTTYAFATGLNAQTIGPMLVSIGLMFF | 363 |
| Query: 358 | AFTTILGWSYYGERCFEFLFGITHLTYFRIVFILMVGLGGFLKLELIWVLADIVNGLMAL | 417 |
| | AFTTILGW+YYGERC FLFG + ++IVFI ++ G FL L+LIW++ADIVNGLMA+ | |
| Sbjct: 364 | AFTTILGWNYYGERCMVFLFGTKAVLPYKIVFIGLIASGAFLHLDLIWIIADIVNGLMAI | 423 |
| Query: 418 | PNLIALLALSPVVILETKHYF | 438 |
| | PNLI L+AL VV+ ETK YF | |
| Sbjct: 424 | PNLIGLVALRHVVVEETKQYF | 444 |

[9628] An alignment of the GAS and GBS proteins is shown below.

Identities = 323/439 (73%), Positives = 380/439 (85%), Gaps = 1/439 (0%)

| | | |
|---|---|---|
| Query: 9 | MLTLFTHINSFVWGPPLLALLVGTGIYLSFRLGFIQLRQLSRAFKLIFREDNGQGDISSY | 68 |
| | M+ L I++ VWGPPLL LLVGTGIYL+ LG IQ+ + L RAFKLIF +D G GDISS+ | |
| Sbjct: 1 | MIALVKLIDNLVWGPPLLILLVGTGIYLTSHLGLIQILKLPRAFKLIFSDDEGHGDISSF | 60 |
| Query: 69 | AALATALAATVGTGNIVGVATAIKSGGPGALFWMWVAAFFGMATKYAEGLLAIKYRTKDT | 128 |
| | AALATALAATVGTGNIVGVATAIKSGGPGALFWMWVAAFFGMATKYAEG+LAIKYRTKD | |
| Sbjct: 61 | AALATALAATVGTGNIVGVATAIKSGGPGALFWMWVAAFFGMATKYAEGVLAIKYRTKDA | 120 |
| Query: 129 | NGEISGGPMYYIINGMGQKWKPLAVFFSAAGILVALLGIGTFTQVNAIASSLEHTFKIST | 188 |
| | NG ISGGPMYYI+NGMG KWKPLAV F+ +GILVAL GIGTF QVN+I SSL H+F +S | |
| Sbjct: 121 | NGHISGGPNYYIVNGMGTKWKPLAVLFAGSGILVALFGIGTFAQVNSITSSLGHSFGLSP | 180 |
| Query: 189 | RFTSLILAVIVLFIIFGGIKSISKVSEKIVPFMAISYILATLIIIAVNYNKIPHTFQLIF | 248 |
| | + S++LA+ V IIFGGI SISKV+EK+VPFMAI YIL++L +I +Y ++ +L+F | |
| Sbjct: 181 | QMVSIVLAIFVAAIIFGGIHSISKVAEKVVPFMAIFYILSSLAVIFSHYQQLLPVIRLVF | 240 |
| Query: 249 | SGAFSGTAAIGGFSGAIVKEAIQKGIARGVFSNESGLGSAPIAAAAAKTKEPVEQGLISM | 308 |
| | AF+ TAAIGGF+G+++K+AIQKGIARGVFSNESGL SAPIAAAAAKT EPVEQGLISM | |
| Sbjct: 241 | QSAFTPTAAIGGFAGSLMKDAIQKGIARGVFSNESGLRSAPIAAAAAKTNEPVEQGLISM | 300 |
| Query: 309 | TGTFIDTIVICTLTGIAILVTGKWLEFDLQGAPLTQASFNTVFGSLGSFALTFCLVLFAF | 368 |
| | TGTFIDTI+ICTLTG++ILVTG+W L+GAPLTQ++F TVFG+LG+F LTF LVLFAF | |
| Sbjct: 301 | TGTFIDTIIICTLTGLSILVTGQWTG-QLEGAPLTQSAFATVFGNLGTFGLTFSLVLFAF | 359 |
| Query: 369 | TTILGWSYYGERCFEYLFGTKFINAYRIIFVIMVGLGGFLQLDLIWVIADIVNGLMALPN | 428 |
| | TTILGWSYYGERCFE+LFG + +RI+F++MVGLGGFL+L+LIWV+ADIVNGLMALPN | |
| Sbjct: 360 | TTILGWSYYGERCFEFLFGITHLTYFRIVFILMVGLGGFLKLELIWVLADIVNGLMALPN | 419 |
| Query: 429 | LIALLALSPIIVKETQKYF | 447 |
| | LIALLALSP+++ ET+ YF | |
| Sbjct: 420 | LIALLALSPVVILETKHYF | 438 |

[9629] Based on this analysis, it was predicted that these proteins and their epitopes could be useful antigens for vaccines or diagnostics.

### EXAMPLE 1751

[9630] A DNA sequence (GBSx1858) was identified in S. agalactiae <SEQ ID 5439> which encodes the amino acid sequence <SEQ ID 5440>. Analysis of this protein sequence reveals the following:

| Possible site: 33 | | |
|---|---|---|
| >>> Seems to have a cleavable N-term signal seq. | | |
| INTEGRAL | Likelihood = −6.16 | Transmembrane 85-101 (80-108) |
| INTEGRAL | Likelihood = −5.36 | Transmembrane 118-134 (115-137) |
| INTEGRAL | Likelihood = −2.81 | Transmembrane 177-193 (177-193) |
| INTEGRAL | Likelihood = −0.48 | Transmembrane 49-65 (49-65) |

```
----- Final Results -----
  bacterial membrane --- Certainty = 0.3463 (Affirmative) <succ>
    bacterial outside --- Certainty = 0.0000 (Not Clear) <succ>
bacterial cytoplasm --- Certainty = 0.0000 (Not Clear) <succ>
```

[9631] The protein has homology with the following sequences in the GENPEPT database.

| >GP:CAB12451 GB:Z99107 alternate gene name: ydxT~similar to cation | | |
|---|---|---|
| efflux system membrane protein [Bacillus subtilis] | | |
| Identities = 118/282 (41%), Positives = 181/282 (63%) | | |
| Query: 6 | ENLQLAKRGPIISIIAYITLAVAKLAAGYWFDATSLVADGFNNLSDILGNVALLIGLHLA | 65 |
| | + L+ + G ++SI AY+ L+ KL GY F + +L ADG NN +DI+ +VA+LIGL ++ | |
| Sbjct: 5 | DELKKGESGALVSIAAYLVLSAIKLIIGYLFHSEALTADGLNNTTDIIASVAVLIGLRIS | 64 |
| Query: 66 | SQPADSNHRFGHWKIEDLASLITSFIMFVVGIQVFIQTVTKIINNTDTNIDPLGAIVGAI | 125 |
| | +P D +H +GH++ E +ASLI SFIM VVG+QV I + D + A A | |
| Sbjct: 65 | QKPPDEDHPYGHFRAETIASLIASFIMMVVGLQVLFSAGESIFSAKQETPDMIAAWTAAG | 124 |
| Query: 126 | SALVMLGVYFYNKQLSQRVKSSALVAASKDNLSDAVTSIGTSIAIIAASLNFPIIDRLAA | 185 |
| | A++ML VY YNK+L+++VKS AL+AA+ DN SDA SIGT I I+AA + ID + A | |
| Sbjct: 125 | GAVLMLIVYRYNKRLAKKVKSQALLAAAADNKSDAFVSIGTFIGIVAAQFHLAWIDTVTA | 184 |
| Query: 186 | IIITYFILKTAYDIFIESAFSLSDGFDDYQLKQYEKAILTIPKISAVKSQRGRTYGSNIY | 245 |
| | +I I KTA+DIF ES+ SL+DGFD + Y++ I I +S +K + R GS ++ | |
| Sbjct: 185 | FVIGLLICKTAWDIFKESSHSLTDGFDIKDISAYKQTIEKISGVSRLKDIKARYLGSTVH | 244 |
| Query: 246 | LDIVLEMNPDLSVFESHAITERVEKLLSDKFSVYDIDIHVEP | 287 |
| | +D+V+E++ DL++ ESH I +E+ + ++ ++ +H+EP | |
| Sbjct: 245 | VDVVVEVSADLNITESHDIANEIERRMKEEHAIDYSHVHMEP | 286 |

[9632] A related DNA sequence was identified in S. pyogenes <SEQ ID 5441> which encodes the amino acid sequence <SEQ ID 5442>. Analysis of this protein sequence reveals the following:

| Possible site: 46 | | |
|---|---|---|
| >>> Seems to have a cleavable N-term signal seq. | | |
| INTEGRAL | Likelihood = −8.01 | Transmembrane 121-137 (114-139) |
| INTEGRAL | Likelihood = −5.41 | Transmembrane 86-102 (84-109) |
| INTEGRAL | Likelihood = −5.04 | Transmembrane 178-194 (176-197) |
| INTEGRAL | Likelihood = −0.69 | Transmembrane 50-66 (50-66) |
| INTEGRAL | Likelihood = −0.64 | Transmembrane 158-174 (158-174) |

```
----- Final Results -----
  bacterial membrane --- Certainty = 0.4206 (Affirmative) <succ>
    bacterial outside --- Certainty = 0.0000 (Not Clear) <succ>
bacterial cytoplasm --- Certainty = 0.0000 (Not Clear) <succ>
```

[9633] The protein has homology with the following sequences in the databases:

| >GP:CAB12451 GB:Z99107 alternate gene name: ydxT~similar to cation | | |
|---|---|---|
| efflux system membrane protein [Bacillus subtilis] | | |
| Identities = 127/280 (45%), Positives = 187/280 (66%) | | |
| Query: 9 | LKLARKGPIVSIIVYLSLSVAKLLAGYLLNASSLIADGFNNLSDIVGNVALLIGLHLASQ | 68 |
| | LK G +VSI YL LS KL+ GYL ++ +L ADG NN +DI+ +VA+LIGL ++ + | |
| Sbjct: 7 | LKKGESGALVSIAAYLVLSAIKLIIGYLFHSEALTADGLNNTTDIIASVAVLIGLRISQK | 66 |
| Query: 69 | PADANHKFGHWKIEDLSSLVTSFIMFLVGFQVLIHTIKSIFSGQQVDIDPLGAIVGIVSA | 128 |
| | P D +H +GH++ E ++SL+ SFIM +VG QVL +SIFS +Q D + A A | |
| Sbjct: 67 | PPDEDHPYGHFRAETIASLIASFIMMVVGLQVLFSAGESIFSAKQETPDMIAAWTAAGGA | 126 |
| Query: 129 | FVMLGVYVFNKRLSKRVKSSALVAASKDNLADAVTSIGTSIAIIAASLHLPVIDHIAAMI | 188 |
| | +ML VY +NKRL+K+VKS AL+AA+ DN +DA SIGT I I+AA HL ID + A + | |
| Sbjct: 127 | VLMLIVYRYNKRLAKKVKSQALLAAAADNKSDAFVSIGTFIGIVAAQFHLAWIDTVTAFV | 186 |
| Query: 189 | ITFFILKTAFDIFMESSFSLSDGFDSRHLKKYEKAILEIPKIVAVKSQRARTYGSNVYLD | 248 |
| | I I KTA+DIF ESS SL+DGFD + + Y++ I +I + + K +AR GS V++D | |
| Sbjct: 187 | IGLLICKTAWDIFKESSHSLTDGFDIKDISAYKQTIEKISGVSRLKDIKARYLGSTVHVD | 246 |
| Query: 249 | IVLEMNPDLSVYESHSITEKVEQLLSDQFSIYDIDIHVEP | 288 |
| | +V+E++ DL++ ESH I +E+ + ++ +I +H+EP | |
| Sbjct:247 | VVVEVSADLNITESHDIANEIERRMKEEHAIDYSHVNMEP | 286 |

[9634] An alignment of the GAS and GBS proteins is shown below.

| Identities = 274/406 (67%), Positives = 340/406 (83%), Gaps = 4/406 (0%) | | |
|---|---|---|
| Query: 7 | NLQLAKRGPIISIIAYITLAVAKLAAGYWFDATSLVADGFNNLSDILGNVALLIGLHLAS | 66 |
| | NL+LA++GPI+SII Y++L+VAKL AGY +A+SL+ADGFNNLSDI+GNVALLIGLHLAS | |
| Sbjct: 8 | NLKLARKGPIVSIIVYLSLSVAKLLAGYLLNASSLIADGFNNLSDIVGNVALLIGLHLAS | 67 |
| Query: 67 | QPADSNHRFGHWKIEDLASLITSFIMFVVGIQVFIQTVTKIINNTDTNIDPLGAIVGAIS | 126 |
| | QPAD+NH+FGHWKIEDL+SL+TSFIMF+VG QV I T+ I + +IDPLGAIVG +S | |
| Sbjct: 68 | QPADANHKFGHWKIEDLSSLVTSFIMFLVGFQVLIHTIKSIFSGQQVDIDPLGAIVGIVS | 127 |
| Query: 127 | ALVMLGVYFYNKQLSQRVKSSALVAASKDNLSDAVTSIGTSIAIIAASLNFPIIDRLAAI | 186 |
| | A VMLGVY +NK+LS+RVKSSALVAASKDNL+DAVTSIGTSIAIIAASL+ P+ID +AA+ | |
| Sbjct: 128 | AFVMLGVYVFNKRLSKRVKSSALVAASKDNLADAVTSIGTSIAIIAASLHLPVIDHIAAM | 187 |
| Query: 187 | IITYFILKTAYDIFIESAFSLSDGFDDYQLKQYEKAILTIPKISAVKSQRGRTYGSNIYL | 246 |
| | IIT+FILKTA+DIF+ES+FSLSDGFD LK+YEKAIL IPKI AVKSQR RTYGSN+YL | |
| Sbjct: 188 | IITFFILKTAFDIFMESSFSLSDGFDSRHLKKYEKAILEIPKIVAVKSQRARTYGSNVYL | 247 |
| Query: 247 | DIVLEMNPDLSVFESHAITERVEKLLSDKFSVYDIDIHVEPASIPEDEIFDNVYQKLYKN | 306 |
| | DIVLEMNPDLSV+ESH+ITE+VE+LLSD+FS+YDIDIHVEPA IPE+EIFDNV +KLY+ | |
| Sbjct: 248 | DIVLEMNPDLSVYESHSITEKVEQLLSDQFSIYDIDIHVEPAMIPEEEIFDNVAKKLYRY | 307 |
| Query: 307 | EKIILAKIPGYETFISPDFYMINEKGNIITSDMLTNATNHSLASNFKYFNVKSISQKTKL | 366 |
| | EK+IL+K+P Y+ +I+ F +I+ G + + N + SNF +F ++SISQKT L | |
| Sbjct: 308 | EKLILSKVPDYDHYIAKSFQLIDANGQTVNYEQFLNQEIY-YPSNFNHFQIESISQKTML | 366 |
| Query: 367 | VSYELEGKRHTSIWRRNEKWFLIYHQIT--AKSSPYKTRRYQITSL | 410 |
| | V+Y+L G + TSIWRR+E W L++HQIT AK + T Y+I + | |
| Sbjct: 367 | VTYQLNGNQRTSIWRRHESWSLLFHQITPIAKKQLHHT-HYRIVKM | 411 |

[9635] Based on this analysis, it was predicted that these proteins and their epitopes could be useful antigens for vaccines or diagnostics.

### EXAMPLE 1752

[9636] A DNA sequence (GBSx1859) was identified in S. agalactiae <SEQ ID 5443> which encodes the amino acid sequence <SEQ ID 5444>. Analysis of this protein sequence reveals the following:

| Possible site: 55 | | |
|---|---|---|
| >>> Seems to have no N-terminal signal sequence | | |
| INTEGRAL | Likelihood = −8.12 | Transmembrane 171-187 (161-194) |
| INTEGRAL | Likelihood = −6.32 | Transmembrane 118-134 (113-138) |
| INTEGRAL | Likelihood = −5.89 | Transmembrane 59-75 (53-77) |
| INTEGRAL | Likelihood = −5.52 | Transmembrane 231-247 (226-252) |
| INTEGRAL | Likelihood = −3.24 | Transmembrane 86-102 (84-103) |
| INTEGRAL | Likelihood = −0.32 | Transmembrane 31-47 (31-47) |

```
----- Final Results -----
  bacterial membrane --- Certainty = 0.4248 (Affirmative) <succ>
    bacterial outside --- Certainty = 0.0000 (Not Clear) <succ>
bacterial cytoplasm --- Certainty = 0.0000 (Not Clear) <succ>
```

[9637] A related GBS nucleic acid sequence <SEQ ID 9869> which encodes amino acid sequence <SEQ ID 9870> was also identified.

[9638] The protein has homology with the following sequences in the GENPEPT database.

| >GP:CAB14850 GB:Z99118 similar to hypothetical proteins [Bacillus subtilis] | | |
|---|---|---|
| Identities = 80/226 (35%), Positives = 136/226 (59%), Gaps = 1/226 (0%) | | |
| Query: 27 | TNNPIFGIMLTVWAYYIGIRIFRKYPSPAT-TPLLLATILLIAFLKLTHISYKDYYNGGS | 85 |
| | T +P FGI++++ A+ IG +F+K TPL +A +L IAFLK+ SY DY NGG | |
| Sbjct: 4 | TMSPYFGIVVSLAAFGIGTFLFKKTKGFFLFTPLFVAMVLGIAFLKIGGFSYADYNNGGE | 63 |
| Query: 86 | FLTMLITPSTVVLAIPLYRTFHLMKHHIKSISISIILASVINTVFTAIVAKFFGMKYFLA | 145 |
| | + + P+T+ AIPLY+ +K + I SII S+ + ++AK + + | |
| Sbjct: 64 | IIKFFLEPATIAFAIPLYKQRDKLKKYWWQIMASIIAGSICSVTIVYLLAKGIHLDSAVM | 123 |
| Query: 146 | ISLFPKSVTTAMAVGITSKAGGLATITLVVVVITGILTSVLGPIFLKLLRIEDPVAIGLA | 205 |
| | S+ P++ TTA+A+ ++ GG++ IT V+ ++ LG +FLK+ ++++P++ GLA | |
| Sbjct: 124 | KSMLPQAATTAIALPLSKGIGGISDITAFAVIFNAVIVYALGALFLKVFKVKNPISKGLA | 183 |
| Query: 206 | LGGTGHAIGTGQALKYGQVQGAMAGLAIGITGICYVIVSPLVAGLI | 251 |
| | LG +GHA+G ++ G+V+ AMA +A+ + G+ V+V P+ LI | |
| Sbjct: 184 | LGTSGHALGVAVGIEMGEVEAAMASIAVVVVGVVTVLVIPVFVQLI | 229 |

[9639] No corresponding DNA sequence was identified in S. pyogenes.

[9640] A related GBS gene <SEQ ID 8893> and protein <SEQ ID 8894> were also identified. Analysis of this protein sequence reveals the following:

| Lipop: | Possible site: −1 | Crend: 0 |
|---|---|---|
| SRCFLG: | 0 | |
| McG: | Length of UR: 22 | |
| | Peak Value of UR: 2.57 | |
| | Net Charge of CR: 0 | |
| McG: | Discrim Score: 6.51 | |
| GvH: | Signal Score | (−7.5): −5.91 |

| Possible site: 33 | | |
|---|---|---|
| >>> Seems to have an uncleavable N-term signal seq | | |
| Amino Acid Composition: calculated from 1 | | |
| ALOM program count: 6 value: 8.12 threshold: 0.0 | | |
| INTEGRAL | Likelihood = −8.12 | Transmembrane 149-165 (139-172) |
| INTEGRAL | Likelihood = −6.32 | Transmembrane 96-112 (91-116) |
| INTEGRAL | Likelihood = −5.89 | Transmembrane 37-53 (31-55) |
| INTEGRAL | Likelihood = −5.52 | Transmembrane 209-225 (204-230) |
| INTEGRAL | Likelihood = −3.24 | Transmembrane 64-80 (62-81) |
| INTEGRAL | Likelihood = −0.32 | Transmembrane 9-25 (9-25) |
| PERIPHERAL | Likelihood = 1.06 | 121 |

```
modified ALOM score: 2.12
icm1 HYPID: 7 CFP: 0.425
*** Reasoning Step: 3
----- Final Results -----
  bacterial membrane --- Certainty = 0.4248 (Affirmative) <succ>
    bacterial outside --- Certainty = 0.0000 (Not Clear) <succ>
bacterial cytoplasm --- Certainty = 0.0000 (Not Clear) <succ>
```

[9641] The protein has homology with the following sequences in the databases:

[chemical structure]

[9642] Based on this analysis, it was predicted that these proteins and their epitopes could be useful antigens for vaccines or diagnostics.

### EXAMPLE 1753

[9643] A DNA sequence (GBSx1860) was identified in S. agalactiae <SEQ ID 5445> which encodes the amino acid sequence <SEQ ID 5446>. Analysis of this protein sequence reveals the following:

```
Possible site: 28
>>> May be a lipoprotein
----- Final Results -----
  bacterial membrane --- Certainty = 0.0000 (Not Clear) <succ>
    bacterial outside --- Certainty = 0.0000 (Not Clear) <succ>
bacterial cytoplasm --- Certainty = 0.0000 (Not Clear) <succ>
```

[9644] The protein has homology with the following sequences in the GENPEPT database.

| >GP: CAA76857 GB: Y17797 hypothetical protein [Enterococcus faecalis] | | | |
|---|---|---|---|
| Identities = 44/194 (22%), Positives = 90/194 (45%), Gaps = 13/194 (6%) | | | |
| Query: | 21 | TACSSSNTQQTSTSKSNVSQHKNIKADHEELRLKFNKVKLGVKANNFKGGTSLAELKQLF | 80 |
| | | T S ++T++ S+ K + + K D+ +L+ ++K+ +G N+ +GG++ E+K + | |
| Sbjct: | 60 | TNSSKNDTKKESSEKKSEDKSK----DNSDLKATYDKINVGDIMNSSEGGSTEDEVKAIL | 115 |
| Query: | 81 | GGEPNEKFDTPAGNVTLKGYRW-NVDD----ISITIQLLNDSSIVRSISNFKFIRDANIT | 135 |
| | | GEP T ++ W NV SIT+ + + +S+S K + +T | |
| Sbjct: | 116 | -GEPASSSTTDIQGISTTTLSWTNVKGGDLLASITVSFSDGKAASKSVSGLKVAKHDKVT | 174 |
| Query: | 136 | TKDYNSLKNGMSYN--KVKELLGEPDDISQAVSSDKEELQAAWISGIQSSDSDPGINLTF | 193 |
| | | N++ SY+ + ++ LG+P I+ + ++ W+ + D + ++F | |
| Sbjct: | 175 | ADQVNNIATDGSYSEEQARKDLGDPTGITSTNINGEKNDTLIWMKNL-DGDLGATVTVSF | 233 |
| Query: | 194 | ENDKLTNKQQHGLK | 207 |
| | | N +K GLK | |
| Sbjct: | 234 | SNGNAISKSSSGLK | 247 |

[9645] A related DNA sequence was identified in S. pyogenes <SEQ ID 5447> which encodes the amino acid sequence <SEQ ID 5448>. Analysis of this protein sequence reveals the following:

```
Possible site: 21
>>> May be a lipoprotein
----- Final Results -----
  bacterial membrane --- Certainty = 0.0000 (Not Clear) <succ>
    bacterial outside --- Certainty = 0.0000 (Not Clear) <succ>
bacterial cytoplasm --- Certainty = 0.0000 (Not Clear) <succ>
```

[9646] The protein has homology with the following sequences in the databases:

| >GP:CAA76857 GB:Y17797 hypothetical protein [Enterococcus faecalis] | | |
|---|---|---|
| Identities = 34/166 (20%), Positives = 74/166 (44%), Gaps = 8/166 (4%) | | |
| Query: 47 | HQDKRANFEKIKLATVDSSFTGGTSLEELISLFGEPSQHDPKTAGEVTIDAYTWQFDQ-- | 104 |
| | + D +A ++KI + + +S GG++ +E+ ++ GEP+ ++ +W + | |
| Sbjct: 83 | NSDLKATYDKINVGDIMNSSEGGSTEDEVKAILGEPASSSTTDIQGISTTTLSWTNVKGG | 142 |
| Query: 105 | ---VTLTVNLYQNSSIVKTISNFTFARELGLSQKEYQQLQKGMSY--EDVKKILTEPDNY | 159 |
| | ++TV+ + K++S A+ ++ + + SY E +K L +P | |
| Sbjct: 143 | DLLASITVSFSDGKAASKSVSGLKVAKHDKVTADQVNNIATDGSYSEEQARKDLGDPTGI | 202 |
| Query: 160 | SQASSSDHQTLQAIWVSGLKTDTSGANISLVFENNQLTEMSQVGLE | 205 |
| | + + + + IW+ L D GA +++ F N S GL+ | |
| Sbjct: 203 | TSTNINGEKNDTLIWMKNLDGDL-GATVTVSFSNGNAISKSSSGLK | 247 |

[9647] An alignment of the GAS and GBS proteins is shown below.

| Identities = 84/199 (42%), Positives = 126/199 (63%), Gaps = 3/199 (1%) | | |
|---|---|---|
| Query: 11 | TIVCLSFLG--LTACSSSNTQQTSTSKSNVSQHKNIKADHEELRLKFNKVKLGVKANNFK | 68 |
| | T++ +SF L ACS++ ++ S S + + +A H++ R F K+KL ++F | |
| Sbjct: 8 | TLLLISFFTSFLVACSTTKDKEPQPSDSEIITPRLHQAAHQDKRANFEKIKLATVDSSFT | 67 |
| Query: 69 | GGTSLAELKQLFGGEPNEKFDTPAGNVTLKGYRWNVDDISITIQLLNDSSIVRSISNFKF | 128 |
| | GGTSL EL LFG EP++ AG VT+ Y W D +++T+ L +SSIV++ISNF F | |
| Sbjct: 68 | GGTSLEELISLFG-EPSQHDPKTAGEVTIDAYTWQFDQVTLTVNLYQNSSIVKTISNFTF | 126 |
| Query: 129 | IRDANITTKDYNSLKNGMSYNKVKELLGEPDDISQAVSSDKEELQAAWISGIQSSDSDPG | 188 |
| | R+ ++ K+Y L+ GMSY VK++L EPD+ SQA SSD + LQA W+SG+++ S | |
| Sbjct: 127 | ARELGLSQKEYQQLQKGMSYEDVKKILTEPDNYSQASSSDHQTLQAIWVSGLKTDTSGAN | 186 |
| Query: 189 | INLTFENDKLTNKQQHGLK | 207 |
| | I+L FEN++LT Q GL | |
| Sbjct: 187 | ISLVFENNQLTEMSQVGLE | 205 |

[9648] SEQ ID 5446 (GBS650) was expressed in E. coli as a His-fusion product. SDS-PAGE analysis of total cell extract is shown in FIG. 178 (lane 9; MW 28 kDa).

[9649] Based on this analysis, it was predicted that these proteins and their epitopes could be useful antigens for vaccines or diagnostics.

### EXAMPLE 1754

[9650] A DNA sequence (GBSx1861) was identified in S. agalactiae <SEQ ID 5449> which encodes the amino acid sequence <SEQ ID 5450>. This protein is predicted to be ribosomal protein S1 homolog; Sequence specific DNA-binding protein (r. Analysis of this protein sequence reveals the following:

```
Possible site: 46
>>> Seems to have no N-terminal signal sequence
----- Final Results -----
bacterial cytoplasm --- Certainty = 0.2950 (Affirmative) <succ>
  bacterial membrane --- Certainty = 0.0000 (Not Clear) <succ>
    bacterial outside --- Certainty = 0.0000 (Not Clear) <succ>
```

[9651] A related GBS nucleic acid sequence <SEQ ID 9363> which encodes amino acid sequence <SEQ ID 9364> was also identified.

[9652] The protein has homology with the following sequences in the GENPEPT database.

| >GP:AAA97575 GB:U27517 ribosomal S1 protein [Homo sapiens] | | |
|---|---|---|
| Identities = 156/305 (51%), Positives = 214/305 (70%), Gaps = 7/305 (2%) | | |
| Query: 1 | MEARKAWDKLVGREGEVVTVKGTRAVKGGLSVEFEGLRGFIPASMIDTRFVRNTEKFVGQ | 60 |
| | ++ARKAW+ L EG+ V K AV+GGL V+ G+RGF+PASM+ RFV + +F + | |
| Sbjct: 53 | LDARKAWENLSFAEGDTVDAKVINAVRGGLIVDVNGVRGFVPASMVAERFVSDLNQFKNK | 112 |
| Query: 61 | EFDAKIKEVDAAENRFILSRREVVEESAAAARKEVFSNIEVGSVVTGKVARLTSFGAFID | 120 |
| | + A++ E+D A R ILSR+ V + AA EVFS + VG VV G VARLT FGAF+D | |
| Sbjct: 113 | DIKAQVIEIDPANARLILSRKAVAAQERAAQLAEVFSKLSVGEVVEGTVARLTDFGAFVD | 172 |
| Query: 121 | LGGVDGLVHVTELSHERNVSPKSVVTVGEEVEVKVLSIDEEAGRVSLSLKATTPGPWDGV | 180 |
| | LGGVDGLVHV+E+SH+R +P V+T G++V+VK+L++D E GR+SLS+KAT GPWD | |
| Sbjct: 173 | LGGVDGLVHVSEISHDRVKNPADVLTKGDKVDVKILALDTEKGRISLSIKATQRGPWDEA | 232 |
| Query: 181 | EQKLAAGDVIEGKVKRLTDFGAFVEVLPGIDGLVHISQISHKRVENPKDVLSAGQEVTVK | 240 |
| | ++AAG V+EG VKR+ DFGAFVE+LPGI+GLVH+SQIS+KR+ENP +VL +G +V VK | |
| Sbjct: 233 | ADQIAAGSVLEGTVKRVKDFGAFVEILPGIEGLVHVSQISNKRIENPSEVLKSGDKVQVK | 292 |
| Query: 241 | VLEVNSDAERVSLSMKALEERPAQAEGEKEEKRQSRPRRPRRQEKRDYELPETQTGFSMA | 300 |
| | VL++ ER+SLSMKALEE+P + E R+ R + Y+ + + ++ | |
| Sbjct: 293 | VLDIKPAEERISLSMKALEEKP------EREDRRGNDGSASRADIAAYK-QQDDSAATLG | 345 |
| Query: 301 | DLFGD | 305 |
| | D+FGD | |
| Sbjct: 346 | DIFGD | 350 |

[9653] A related DNA sequence was identified in S. pyogenes <SEQ ID 5451> which encodes the amino acid sequence <SEQ ID 5452>. Analysis of this protein sequence reveals the following:

```
Possible site: 26
>>> Seems to have no N-terminal signal sequence
----- Final Results -----
bacterial cytoplasm --- Certainty = 0.3312 (Affirmative) <succ>
  bacterial membrane --- Certainty = 0.0000 (Not Clear) <succ>
    bacterial outside --- Certainty = 0.0000 (Not Clear) <succ>
```

[9654] An alignment of the GAS and GBS proteins is shown below.

| Identities = 284/309 (91%), Positives = 296/309 (94%), Gaps = 1/309 (0%) | | |
|---|---|---|
| Query: 1 | MEARKAWDKLVGREGEVVTVKGTRAVKGGLSVEFEGLRGFIPASMIDTRFVRNTEKFVGQ | 60 |
| | +EARKAWDKLVGREGEVVTVKGTRAVKGGLSVEFEGLRGFIPASMIDTRFVRNTEKFVGQ | |
| Sbjct: 93 | LEARKAWDKLVGREGEVVTVKGTRAVKGGLSVEFEGLRGFIPASMIDTRFVRNTEKFVGQ | 152 |
| Query: 61 | EFDAKIKEVDAAENRFILSRREVVEESAAAARKEVFSNIEVGSVVTGKVARLTSFGAFID | 120 |
| | EFDAKIKEVDAAENRFILSRREV+EE+A AR EVFS I G+VVTG VARLTSFGAFID | |
| Sbjct: 153 | EFDAKIKEVDAAENRFILSRREVIEEAAKEARAEVFSKISEGAVVTGTVARLTSFGAFID | 212 |
| Query: 121 | LGGVDGLVHVTELSHERNVSPKSVVTVGEEVSVKVLSIDEEAGRVSLSLKATTPGPWDGV | 180 |
| | LGGVDGLVHVTELSHERNVSPKSVV+VGEEVEVKVLSIDEEAGRVSLSLKATTPGPWDGV | |
| Sbjct: 213 | LGGVDGLVHVTELSHERNVSPKSVVSVGEEVEVKVLSIDEEAGRVSLSLKATTPGPWDGV | 272 |
| Query: 181 | EQKLAAGDVIEGKVKRLTDFGAFVEVLPGIDGLVHISQISHKRVENPKDVLSAGQEVTVK | 240 |
| | EQKLA GDV+EGKVKRLTDFGAFVEVLPGIDGLVHISQISHKRVENPKDVLS GQEVTVK | |
| Sbjct: 273 | EQKLAQGDVVEGKVKRLTDFGAFVEVLPGIDGLVHISQISHKRVENPKDVLSVGQEVTVK | 332 |
| Query: 241 | VLEVNSDAERVSLSMKALEERPAQAEGE-KEEKRQSRPRRPRRQEKRDYELPETQTGFSM | 299 |
| | VLEVN+ ERVSLS+KALEERPAQAEG+ KEEKRQSRPRRP+R+ +RDYELPETQTGFSM | |
| Sbjct: 333 | VLEVNAADERVSLSIKALEERPAQAEGDNKEEKRQSRPRRPKRESRRDYELPETQTGFSM | 392 |
| Query: 300 | ADLFGDIEL | 308 |
| | ADLFGDIEL | |
| Sbjct: 393 | ADLFGDIEL | 401 |

[9655] Based on this analysis, it was predicted that these proteins and their epitopes could be useful antigens for vaccines or diagnostics.

### EXAMPLE 1755

[9656] A DNA sequence (GBSx1862) was identified in S. agalactiae <SEQ ID 5453> which encodes the amino acid sequence <SEQ ID 5454>. This protein is predicted to be dihydroorotate dehydrogenase a (pyrD). Analysis of this protein sequence reveals the following:

```
Possible site: 33
>>> Seems to have no N-terminal signal sequence
----- Final Results -----
bacterial cytoplasm --- Certainty = 0.1708 (Affirmative) <succ>
  bacterial membrane --- Certainty = 0.0000 (Not Clear) <succ>
    bacterial outside --- Certainty = 0.0000 (Not Clear) <succ>
```

[9657] The protein has homology with the following sequences in the GENPEPT database.

| >GP:CAB51330 GB:AJ131985 dihydroorotate dehydrogenase | | |
|---|---|---|
| [Streptococcus pneumoniae] | | |
| Identities = 227/310 (73%), Positives = 268/310 (86%) | | |
| Query: 1 | MVSLKTEIAGFSFDNCLMNAAGIYCMTKEELLAIENSEAGSFVTKTGTLEAREGNPQPRY | 60 |
| | MVS KT+IAGF FDNCLMNAAG+ CMT EEL ++NS AG+FVTKT TL+ R+GNP+PRY | |
| Sbjct: 1 | MVSTKTQIAGFEFDNCLMNAAGVACMTIEELEEVKNSAAGTFVTKTATLDFRQGNPEPRY | 60 |
| Query: 61 | ADTDWGSINSMGLPNKGIDYYLDFVTELQDQDNSKNHVLSLVGLSPEETHIILKKVENSS | 120 |
| | D GSINSMGLPN G+DYYLD++ +LQ++++++ LSLVG+SPEETH ILKKV+ S | |
| Sbjct: 61 | QDVPLGSINSMGLPNNGLDYYLDYLLDLQEKESNRTFFLSLVGMSPEETHTILKKVQESD | 120 |
| Query: 121 | YNGLIELNLSCPNVPGKPQIAYDFEMTDLILSEIFSYYQKPLGIKLPPYFDIVHFDQAAT | 180 |
| | + GL ELNLSCPNVPGKPQIAYDFE TD IL+E+F+Y+ KPLGIKLPPYFDIV+FDQAA | |
| Sbjct: 121 | FRGLTELNLSCPNVPGKPQIAYDFETTDRILAEVFAYFTKPLGIKLPPYFDIVYFDQAAA | 180 |
| Query: 181 | IFNKYPLAFINCVNSIGNGLVIDDETVVIKPKNGFGGIGGDFIKPTALANVHAFYKRLNP | 240 |
| | IFNKYPL F+NCVNSIGNGL I+DE+VVI+PKNGFGGIGG++IKPTALANVHAFY+RLNP | |
| Sbjct: 181 | IFNKYPLKFVNCVNSIGNGLYIEDESVVIRPKNGFGGIGGEYIKPTALANVHAFYQRLNP | 240 |
| Query: 241 | SIKIIGTGGVKNGRDAFEHILCGASMVQIGTALQKEGPEIFQRVSRELKEIMADKGYQSL | 300 |
| | I+IIGTGGV GRDAFEHILCGASMVQ+GT L KEG F R++ ELK IM +KGY+SL | |
| Sbjct: 241 | QIQIIGTGGVLTGRDAFEHILCGASMVQVGTTLHKEGVSAFDRITNELKAIMVEKGYESL | 300 |
| Query: 301 | EDFRGQLNYL | 310 |
| | EDFRG+L Y+ | |
| Sbjct: 301 | EDFRGKLRYI | 310 |

[9658] A related DNA sequence was identified in S. pyogenes <SEQ ID 5455> which encodes the amino acid sequence <SEQ ID 5456>. Analysis of this protein sequence reveals the following:

```
Possible site: 33
>>> Seems to have no N-terminal signal sequence
----- Final Results -----
bacterial cytoplasm --- Certainty = 0.2689 (Affirmative) <succ>
  bacterial membrane --- Certainty = 0.0000 (Not Clear) <succ>
    bacterial outside --- Certainty = 0.0000 (Not Clear) <succ>
```

[9659] An alignment of the GAS and GBS proteins is shown below.

| Identities = 239/309 (77%), Positives = 262/309 (84%) | | |
|---|---|---|
| Query: 1 | MVSLKTEIAGFSFDNCLMNAAGIYCMTKEELLAIENSEAGSFVTKTGTLEAREGNPQPRY | 60 |
| | MVS T+I FSFDNCLMNAAG+YCMTKEEL+ +E S+A SFVTKTGTLE R GNP+PRY | |
| Sbjct: 5 | MVSTATQIGHFSFDNCLMNAAGVYCMTKEELMEVEKSQAASFVTKTGTLEVRPGNPEPRY | 64 |
| Query: 61 | ADTDWGSINSMGLPNKGIDYYLDFVTELQDQDNSKNHVLSLVGLSPEETHIILKKVENSS | 120 |
| | ADT GSINSMGLPN G YYLDFV++L K H LS+VGLSP ET ILK + S | |
| Sbjct: 65 | ADTRLGSINSMGLPNNGFRYYLDFVSDLAKTGQHKPHFLSVVGLSPTETETILKAIMASD | 124 |
| Query: 121 | YNGLIELNLSCPNVPGKPQIAYDFEMTDLILSEIFSYYQKPLGIKLPPYFDIVHFDQAAT | 180 |
| | Y GL+ELNLSCPNVPGKPQIAYDFE TD +L IF+YY KPLGIKLPPYFDIVHFDQAA | |
| Sbjct: 125 | YEGLVELNLSCPNVPGKPQIAYDFETTDQLLENIFTYYTKPLGIKLPPYFDIVHFDQAAA | 184 |
| Query: 181 | IFNKYPLAFINCVNSIGNGLVIDDETVVIKPKNGFGGIGGDFIKPTALANVHAFYKRLNP | 240 |
| | IFNKYPL+F+NCVNSIGNGLVI DE V+IKPKNGFGGIGGD+IKPTALANVHAFYKRL P | |
| Sbjct: 185 | IFNKYPLSFVNCVNSIGNGLVIKDEQVLIKPKNGFGGIGGDYIKPTALANVHAFYKRLKP | 244 |
| Query: 241 | SIKIIGTGGVKNGRDAFEHILCGASMVQIGTALQKEGPEIFQRVSRELKEIMADKGYQSL | 300 |
| | SI IIGTGGVK GRDAFEHILCGASMVQIGTAL +EGP IF+RV++ELK IM +KGYQSL | |
| Sbjct: 245 | SIHIIGTGGVKTGRDAFEHILCGASMVQIGTALHQEGPAIFERVTKELKTIMVEKGYQSL | 304 |
| Query: 301 | EDFRGQLNY | 309 |
| | +DFRG L Y | |
| Sbjct: 305 | DDFRGNLRY | 313 |

[9660] Based on this analysis, it was predicted that these proteins and their epitopes could be useful antigens for vaccines or diagnostics.

### EXAMPLE 1756

[9661] A DNA sequence (GBSx1863) was identified in S. agalactiae <SEQ ID 5457> which encodes the amino acid sequence <SEQ ID 5458>. This protein is predicted to be beta-lactam resistance factor. Analysis of this protein sequence reveals the following:

```
Possible site: 30
>>> Seems to have no N-terminal signal sequence
----- Final Results -----
bacterial cytoplasm --- Certainty = 0.4437 (Affirmative) <succ>
  bacterial membrane --- Certainty = 0.0000 (Not Clear) <succ>
    bacterial outside --- Certainty = 0.0000 (Not Clear) <succ>
```

[9662] The protein has homology with the following sequences in the GENPEPT database.

| >GP:CAB89121 GB:AJ277485 betalactani resistance factor | | |
|---|---|---|
| [Streptococcus pneumoniae] | | |
| Identities = 238/410 (58%), Positives = 304/410 (74%) | | |
| Query: 1 | MALKELTAKEFESYSGNYDLQSFMQTPEMAKLLKKRGYDITYMGYQIDGKMEIISIVYTI | 60 |
| | MAL LT +EF++YS +SFMQ+ +M LL+KRG I Y+ + +G++++ ++VY++ | |
| Sbjct: 1 | MALTTLTKEEFQTYSDQVSSRSFMQSVQMGDLLEKRGARIVYLALKQEGEIQVAALVYSL | 60 |
| Query: 61 | PMTGGLHMEVNSGPAHSNSKYLKHFYKELQNYAKSQGALELLIKPYDTYQEFTGEGKPKG | 120 |
| | PM GGLHME+NSGP ++ L FY EL+ YAK G LELL+KPY+TYQ F +G P | |
| Sbjct: 61 | PMLGGLHMELNSGPIYTQQDALPVFYAELKEYAKQNGVLELLVKPYETYQTFDSQGNPID | 120 |
| Query: 121 | APNTYLIDDLTSIGYHHDGLHIGYPGGEPDWHYVKNLEGITPQNLLKSFSKKGRPLVKKA | 180 |
| | A +I DLT +GY DGL GYPGGEPDW Y K+L +T ++LLKSFSKKG+PLVKKA | |
| Sbjct: 121 | AEKKSIIQDLTDLGYQFDGLTTGYPGGEPDWLYYKDLTELTEKSLLKSFSKKGKPLVKKA | 180 |
| Query: 181 | MSFGIKIRVLKREELHIFKDITSSTSDRRDYMDKSLDYYQDFYDSFGDKAEFVIATLNFR | 240 |
| | +FGI+++ LKREEL IFK+IT TS+RR+Y DKSL+YY+ FYD+FG++AEF+IA+LNF | |
| Sbjct: 181 | ETFGIRLKKLKREELSIFKNITKETSERREYSDKSLEYYEHFYDTFGEQAEFLIASLNFS | 240 |
| Query: 241 | EYDHNLQLNAKKLEEQITVLDNRHQNNTDSAKYHRQRTELVNQLASLDKRRKEVEPFIQK | 300 |
| | +Y LQ KLEE + L N S K Q E +Q + + R+ E I+K | |
| Sbjct: 241 | DYMSKLQGEQSKLEENLDKLRLDLSKNPHSEKKQNQLREYSSQFETFEVRKAEARDLIEK | 300 |
| Query: 301 | FGNQDVVLAGSLFIYSPKETVYLFSGSYTEFNKFYAPAVLQEYVMQEALKRQSTFYNFLG | 360 |
| | +G +D+VLAGSLF+Y P+ET YLFSGSYTEFNKFYAPA+LQ+YVM E++KR YNFLG | |
| Sbjct: 301 | YGEEDIVLAGSLFVYMPQETTYLFSGSYTEFNKFYAPALLQKYVMLESIKRGIPKYNFLG | 360 |
| Query: 361 | IQGNFDGSDGVLRFKQNFNGYIVRKMGTFRYYPNPLKYKSIQLLKRILRR | 410 |
| | IQG FDGSDGVLRFKQNFNGYIVRK GTFRY+P+PLKYK+IQLLKKI+ R | |
| Sbjct: 361 | IQGIFDGSDGVLRFKQNFNGYIVRKAGTFRYHPSPLKYKAIQLLKKIVGR | 410 |

[9663] A related DNA sequence was identified in S. pyogenes <SEQ ID 5459> which encodes the amino acid sequence <SEQ ID 5460>. Analysis of this protein sequence reveals the following:

```
Possible site: 34
>>> Seems to have no N-terminal signal sequence
----- Final Results -----
bacterial cytoplasm --- Certainty = 0.2652 (Affirmative) <succ>
  bacterial membrane --- Certainty = 0.0000 (Not Clear) <succ>
    bacterial outside --- Certainty = 0.0000 (Not Clear) <succ>
```

[9664] An alignment of the GAS and GBS proteins is shown below.

| Identities = 216/410 (52%), Positives = 291/410 (70%) | | |
|---|---|---|
| Query: 1 | MALKELTAKEFESYSGNYDLQSFMQTPEMAKLLKKRGYDITYMGYQIDGKMEIISIVYTI | 60 |
| | MAL E++ ++F+ Y + SF+QT EMA L+ KRG ++G + DG++++ ++V++ | |
| Sbjct: 1 | MALIEISQEQFDHYCHSLVHHSFIQTSEMASLMAKRGAKPQFLGLEKDGELKVAAMVFSQ | 60 |
| Query: 61 | PMTGGLHMEVNSGPAHSNSKYLKHFYKELQNYAKSQGALELLIKPYDTYQEFTGEGKPKG | 120 |
| | + GG ME+N+GP ++ + L+HFY +L++YAK + +EL++KPYD YQ F +G P | |
| Sbjct: 61 | KVAGGWRMELNAGPNTNHPEELEHFYTQLKDYAKQKDVIELILKPYDNYQSFDTDGIPIS | 120 |
| Query: 121 | APNTYLIDDLTSIGYHHDGLHIGYPGGEPDWHYVKNLEGITPQNLLKSFSKKGRPLVKKA | 180 |
| | PNT LI LT++GY HDGL GYP GEP WHYVK LEGI L +SFSKKG+ L+KKA | |
| Sbjct: 121 | RPNTDLISLLTALGYKHDGLKTGYPEGEPVWHYVKKLEGIDSSRLTRSFSKKGKALIKKA | 180 |
| Query: 181 | MSFGIKIRVLKREELHIFKDITSSTSDRRDYMDKSLDYYQDFYDSFGDKAEFVIATLNFR | 240 |
| | +FGIK+R LKR+ELH FK+IT +TSDRRDY+DKSL YYQDFYDSFGD EF++ATLNF | |
| Sbjct: 181 | NTFGIKLRQLKRDELHHFKEITEATSDRRDYLDKSLSYYQDFYDSFGDSCEFMVATLNFE | 240 |
| Query: 241 | EYDHNLQLNAKKLEEQITVLDNRHQNNTDSAKYHRQRTELVNQLASLDKRRKEVEPFIQK | 300 |
| | +Y +NL+ +L I + N S K + EL +Q + R E F+++ | |
| Sbjct: 241 | DYLNNLKQRQLQLATSINKVKGDLGKNPHSEKKQNRLKELSSQFETWQVRISEALHFLEE | 300 |
| Query: 301 | FGNQDVVLAGSLFIYSPKETVYLFSGSYTEFNKFYAPAVLQEYVMQEALKRQSTFYNFLG | 360 |
| | +G +DV LAGSLFIY+ +E VYLFSGSY +FNKFY+PA+LQE+ M +A+ + YNFLG | |
| Sbjct: 301 | YGTKDVFLAGSLFIYTEQEAVYLFSGSYPKFNKFYSPALLQEHAMLKAIHKGIKQYNFLG | 360 |
| Query: 361 | IQGNFDGSDGVLRFKQNFNGYIVRKMGTFRYYPNPLKYKSIQLLKKILRR | 410 |
| | I G FDGSDGVLRFKQNFNG+I++K GTFR YP P+KY I+L KK+L R | |
| Sbjct: 361 | ITGKFDGSDGVLRFKQNFNGFILQKPGTFRCYPFPIKYHFIRLAKKLLNR | 410 |

[9665] A related GBS gene <SEQ ID 8895> and protein <SEQ ID 8896> were also identified. Analysis of this protein sequence reveals the following:
[9666] Homology to resistance proteins

[9667] The protein has homology with the following sequences in the databases:

[chemical structure]

[9668] SEQ ID 8896 (GBS198) was expressed in E. coli as a His-fusion product. SDS-PAGE analysis of total cell extract is shown in FIG. 26 (lane 6; MW 48.8 kDa). It was also expressed in E. coli as a GST-fusion product. SDS-PAGE analysis of total cell extract is shown in FIG. 85 (lane 6; MW 73.8 kDa).

[9669] GBS198-GST was purified as shown in FIG. 223, lane 4.

[9670] Based on this analysis, it was predicted that these proteins and their epitopes could be useful antigens for vaccines or diagnostics.

### EXAMPLE 1757

[9671] A DNA sequence (GBSx1864) was identified in S. agalactiae <SEQ ID 5461> which encodes the amino acid sequence <SEQ ID 5462>. This protein is predicted to be MurM protein. Analysis of this protein sequence reveals the following:

```
Possible site: 52
>>> Seems to have no N-terminal signal sequence
----- Final Results -----
bacterial cytoplasm --- Certainty = 0.4418 (Affirmative) <succ>
  bacterial membrane --- Certainty = 0.0000 (Not Clear) <succ>
    bacterial outside --- Certainty = 0.0000 (Not Clear) <succ>
```

[9672] The protein has homology with the following sequences in the GENPEPT database.

| >GP:CAB89539 GB:AJ250767 MurM protein [Streptococcus pneumoniae] | | |
|---|---|---|
| Identities = 204/410 (49%), Positives = 286/410 (69%), Gaps = 17/410 (4%) | | |
| Query: 1 | MYRE---ITAVEHDRFVSESNQTNLLQSSNWPKVKDNWGSQLLGFFDGETQIASASILIK | 57 |
| | MYR I +E+D+FV E N+LQSS W KVK +W + LG ++GE +A AS+LIK | |
| Sbjct: 1 | MYRYQIGIPTLEYDQFVKEHELANVLQSSAWEKVKSDWNHERLGVYEGENLLAVASVLIK | 60 |
| Query: 58 | SLPLGFSMLYIPRGPIMDYSNLDIVTKVLKDLKAFGKKQRALFIKCDPLIYLK--MVNAK | 115 |
| | SLPLG+ M YIPRGPI+DY + +++ VL+ +K++ + +RA+F+ DP I L +VN | |
| Sbjct: 61 | SLPLGYKMFYIPRGPILDYMDKELLKFVLQSIKSYARSKRAVFVTFDPSICLSQHLVN-- | 118 |
| Query: 116 | DFENSPDEKEGLIAIDHLQRAGADWTGRTTDLAHTIQPRFQANLYANQFGLDKMSKKTRQ | 175 |
| | ++ + E L ++ L + G W+G+TT++ TIQPR QA +Y F DK+SK TRQ | |
| Sbjct: 119 | --QDKREYPENLAIVEILGQLGVKWSGQTTEMDDTIQPRIQAKIYKENFEEDKLSKSTRQ | 176 |
| Query: 176 | AIRTSKNKGVDIQFGSHELLEDFAELMKKTEDRKGINLRGIDYYQKLLDTYPNNSYITMA | 235 |
| | AIRT++NKG++IQ+G ELL+ F+ELMKKTE RK I+LR YY+KLLD + +SYIT+ | |
| Sbjct: 177 | AIRTARNKGLEIQYGGLELLDSFSELMKKTEKRKEIHLRNEAYYRKLLDNFKEDSYITLT | 236 |
| Query: 236 | SLDVAKRLEKIEKECQIAQSERIKS--LELNREKKVKQHQGTIDRLNKEIDFLKEAQKAY | 293 |
| | +LDV+KRL ++E+ Q+A+++ ++ E R KV+ + +RL +EIDFL + | |
| Sbjct: 237 | NLDVSKRLRELEE--QLAKNKALEEAFTESTRTSKVEAQKKEKERLVEEIDFL-QGYMNM | 293 |
| Query: 294 | DRDIIPLAATLTLEFGNTSENIYAGMDDYFKSYSAPIYTWFETAQRAFERGNIWQNMGGI | 353 |
| | ++ IPLAATL+LEFG TS N+YAGMDD FK Y+API TW+ETA+ AFERG +WQN+GG+ | |
| Sbjct: 294 | EKSNIPLAATLSLEFGTTSVNLYAGMDDDFKRYNAPILTWYETARYAFERGMVWQNLGGV | 353 |
| Query: 354 | ENDLSGGLYHFKSKFEPIIEEFIGEFNIPVN---RLLYKASNYVYALRRK | 400 |
| | EN L+GGLYHFK KF P IEE++GEF +P + LL A ++ LRKK | |
| Sbjct: 354 | ENSLNGGLYHFKEKFNPTIEEYLGEFTMPTHPLYPLLRLALDFRKTLRKK | 403 |

[9673] A related DNA sequence was identified in S. pyogenes <SEQ ID 5463> which encodes the amino acid sequence <SEQ ID 5464>. Analysis of this protein sequence reveals the following:

```
Possible site: 60
>>> Seems to have no N-terminal signal sequence
----- Final Results -----
bacterial cytoplasm --- Certainty = 0.2239 (Affirmative) <succ>
  bacterial membrane --- Certainty = 0.0000 (Not Clear) <succ>
    bacterial outside --- Certainty = 0.0000 (Not Clear) <succ>
```

[9674] An alignment of the GAS and GBS proteins is shown below.

| Identities = 203/399 (50%), Positives = 274/399 (67%), Gaps = 4/399 (1%) | | |
|---|---|---|
| Query: 5 | ITAVEHDRFVSESNQTNLLQSSNWPKVKDNWGSQLLGFFDGETQIASASILIKSLPLGFS | 64 |
| | I+ EHD+FV Q LLQSS W KVKDNW + + F++ Q+A+A+ LI+ LPLGF+ | |
| Sbjct: 13 | ISPEEHDQFVLAQPQAGLLQSSKWGKVKDNWKHERISFYENGVQVAAAACLIRKLPLGFT | 72 |
| Query: 65 | MLYIPRGPIMDYSNLDIVTKVLKDLKAFGKKQRALFIKCDPLIYLKMVNAKDFENSPDEK | 124 |
| | M+YIPRGPIMDY+N +++ V+K LK FGK +RALFIK DP + +K + + S + | |
| Sbjct: 73 | MIYIPRGPIMDYANFELLDFVIKTLKTFGKSKRALFIKIDPSLVIKQT--LEGKESKEND | 130 |
| Query: 125 | EGLIAIDHLQRAGADWTGRTTDLAHTIQPRFQANLYANQFGLDKMSKKTRQAIRTSKNKG | 184 |
| | L I L++ G +W+GRT +L TIQPR QAN+YA F D + KK +Q+IRT+ NEG | |
| Sbjct: 131 | VTLSIIAFLKKLGVEWSGRTKELEDTIQPRIQANIYAKDFDFDSLPKKAKQSIRTATNKG | 190 |
| Query: 185 | VDIQFGSHELLEDFAELMKKTEDRKGINLRGIDYYQKLLDTYPNNSYITMASLDVAKRLE | 244 |
| | V++ G ELL+DF+ LMKKTE+RKGI LRG YYQKLL Y SYITMASLD+ ++ + | |
| Sbjct: 191 | VNVTIGGSELLDDFSALMKKTENRKGIILRGKSYYQKLLGIYAGQSYITMASLDLPEQKK | 250 |
| Query: 245 | KIEKECQIAQSERIKSLELNREKKVKQHQGTIDRLNKEIDFLKEAQKAYDRDIIPLAATL | 304 |
| | + ++ A +E+ + + ++ KV ++Q TI RL K++ L E Q A + IPLAATL | |
| Sbjct: 251 | LLIQQLDKALAEQARLTDKSKPSKVAENQKTIARLQKDLTILSE-QLATGQTRIPLAATL | 309 |
| Query: 305 | TLEFGNTSENIYAGMDDYFKSYSAPIYTWFETAQRAFERGNIWQNMGGIENDLSGGLYHF | 364 |
| | TL +G TSEN+YAGNDD +++Y AP+ TW+ETA+ AF+RG W N+GG+EN GGLYHF | |
| Sbjct: 310 | TLIYGETSENLYAGMDDDYRNYQAPLLTWYETAKEAFKRGCRWHNLGGVENQQDGGLYHF | 369 |
| Query: 365 | KSKFEPIIEEFIGEFNIPVNRLLYKASNYVYALRKKRNS | 403 |
| | K++ P IEEF GEFNIPV L+ + Y LRKK S | |
| Sbjct: 370 | KARLNPTIEEFAGEFNIPVG-LVSSLAILTYNLRKKLRS | 407 |

[9675] Based on this analysis, it was predicted that these proteins and their epitopes could be useful antigens for vaccines or diagnostics.

### EXAMPLE 1758

[9676] A DNA sequence (GBSx1865) was identified in S. agalactiae <SEQ ID 5465> which encodes the amino acid sequence <SEQ ID 5466>. Analysis of this protein sequence reveals the following:

```
Possible site: 28
>>> Seems to have no N-terminal signal sequence
----- Final Results -----
bacterial cytoplasm --- Certainty = 0.2669 (Affirmative) <succ>
  bacterial membrane --- Certainty = 0.0000 (Not Clear) <succ>
    bacterial outside --- Certainty = 0.0000 (Not Clear) <succ>
```

[9677] The protein has no significant homology with any sequences in the GENPEPT database.

[9678] No corresponding DNA sequence was identified in S. pyogenes.

[9679] Based on this analysis, it was predicted that this protein and its epitopes, could be useful antigens for vaccines or diagnostics.

### EXAMPLE 1759

[9680] A DNA sequence (GBSx1866) was identified in S. agalactiae <SEQ ID 5467> which encodes the amino acid sequence <SEQ ID 5468>. This protein is predicted to be beta-lactam resistance factor. Analysis of this protein sequence reveals the following:

| Possible site: 41 | | |
|---|---|---|
| >>> Seems to have no N-terminal signal sequence | | |
| INTEGRAL | Likelihood = −2.07 | Transmembrane 56-72 (55-74) |

```
----- Final Results -----
  bacterial membrane --- Certainty = 0.1829 (Affirmative) <succ>
    bacterial outside --- Certainty = 0.0000 (Not Clear) <succ>
bacterial cytoplasm --- Certainty = 0.0000 (Not Clear) <succ>
```

[9681] A related GBS nucleic acid sequence <SEQ ID 9625> which encodes amino acid sequence <SEQ ID 9626> was also identified.

[9682] The protein has homology with the following sequences in the GENPEPT database.

| >GP:CAB89120 GB:AJ277484 beta-lactam resistance factor | | |
|---|---|---|
| [Streptococcus pneumoniae] | | |
| Identities = 166/410 (40%), Positives = 250/410 (60%), Gaps = 10/410 (2%) | | |
| Query: 6 | MYHVTVGISEKEYDAFAIASSQTNLLHSSKWAQVKSNWQNERLGFYKDDQLVAVASILIK | 65 |
| | MY +GI EYD F N+L SS W +VKSNWQ+E+ G Y++++L+A ASILI+ | |
| Sbjct: 1 | MYRYQIGIPTLEYDQFVKEHELANVLQSSAWEEVKSNWQHEKFGVYREEKLLATASILIR | 60 |
| Query: 66 | SLPLGFTMLYIPRGPIMDYSNKELVNFVLKTLKNFGRKKRAVFAKFDPALLLRQYHLKEE | 125 |
| | +LPLG+ M YIPRGPI+DY +KEL+NF ++++K++ R KRAVF FDP++ L Q + +E | |
| Sbjct: 61 | TLPLGYKMFYIPRGPILDYGDKELLNFAIQSIKSYARSKRAVFVTFDPSICLSQSLINQE | 120 |
| Query: 126 | NVAEEIDESRQAIDNLKSAGAQWIGPTKAISETIQPRFQANIYTKANIEENFPKHTKRLI | 185 |
| | E E+ ID+L+ G +W G T+ + +TIQPR QA IY + E+ K TK+ I | |
| Sbjct: 121 | KT--EFPENLAIIDSLQQMGVRWSGKTEEMGDTIQPRIQAKIYKENFEEDKLSKSTKQAI | 178 |
| Query: 186 | KDAKHRGVQIYRANIDDLPKFATVVALTENRKGVALRNENYFHQLMTIYGEDAYLYLAKV | 245 |
| | + A+++G++I ++ L F+ ++ TE RK + LRNE Y+ +L+ + + AY+ LA+ | |
| Sbjct: 179 | RTARNKGLEIQYGGLELLDSFSELMKKTEKRKEIHLRNEAYYKKLLDNFKDKAYITLATL | 238 |
| Query: 246 | NLPKRLAQFKEQLLQIQKDLSETPSHQKSRLTRLNQQEASVKQYILEFQEFSKKYPD--- | 302 |
| | ++ KR + +EQL + + L ET + + +R +++ Q+ K+ +LE F ++Y D | |
| Sbjct: 239 | DVSKRSQELEEQLAK-NRALEETFT-ESTRTSKVEAQKKE-KERLLEELTFLQEYIDVGQ | 295 |
| Query: 303 | -EPVIAGILSIRFGNVLEMLYAGMDDSFRKFYPQYLLNARVFEDAFKNDIVSANLGGVEG | 361 |
| | +A LS+ FG +YAGMDD F+++ L AF+ ++ NLGGVE | |
| Sbjct: 296 | ARVPLAATLSLEFGTTSVNIYAGMDDDFKRYNAPILTWYETARYAFERGMIWQNLGGVEN | 355 |
| Query: 362 | SLNDGLTKFKSNFNPMFEEYIGEFNLAINPLLYKLANLAYTIRKKQRHSH | 411 |
| | SLN GL FK FNP EEY+GEF + +P LY L LA RK R H | |
| Sbjct: 356 | SLNGGLYHFKEKFNPTIEEYLGEFTMPTHP-LYPLLRLALDFRKTLRKKH | 404 |

[9683] A related DNA sequence was identified in S. pyogenes <SEQ ID 5469> which encodes the amino acid sequence <SEQ ID 5470>. Analysis of this protein sequence reveals the following:

| Possible site: 32 | | |
|---|---|---|
| >>> Seems to have no N-terminal signal sequence | | |
| INTEGRAL | Likelihood = −0.32 | Transmembrane 59-75 (59-75) |

```
----- Final Results -----
  bacterial membrane --- Certainty = 0.1128 (Affirmative) <succ>
    bacterial outside --- Certainty = 0.0000 (Not Clear) <succ>
bacterial cytoplasm --- Certainty = 0.0000 (Not Clear) <succ>
```

[9684] The protein has homology with the following sequences in the databases:

| >GP:CAB89120 GB:AJ277484 beta-lactam resistance factor | | |
|---|---|---|
| [Streptococcus pneumoniae] | | |
| Identities = 166/402 (41%), Positives = 255/402 (63%), Gaps = 5/402 (1%) | | |
| Query: 9 | KIGISSEEHDSFVKEHQQISVLQGSDWAKIKNQWQNERIGIYKEEKQVASLSLLIKLLPL | 68 |
| | +IGI E+D FVKEH+ +VLQ S W ++K+ WQ+E+ G+Y+EEK +A+ S+LI+ LPL | |
| Sbjct: 5 | QIGIPTLEYDQFVKEHELANVLQSSAWEEVKSNWQHEKFGVYREEKLLATASILIRTLPL | 64 |
| Query: 69 | GRSIIYIPRGPVMDYLDRDLVAFTMKTLKDYGKTKKALFIKYDPAILLKQYALGQEEEEK | 128 |
| | G + YIPRGP++DY D++L+ F ++++K Y ++K+A+F+ +DP+I L Q + QE+ E | |
| Sbjct: 65 | GYKMFYIPRGPILDYGDKELLNFAIQSIKSYARSKRAVFVTFDPSICLSQSLINQEKTEF | 124 |
| Query: 129 | PLALAAIKNLQEAGVHWTGLTMEIADSIQPRFQANIYTQENLEMQFPKHTRRLIKDAKQR | 188 |
| | P LA I +LQ+ GV W+G T E+ D+IQPR QA IY + E + K T++ I+ A+ + | |
| Sbjct: 125 | PENLAIIDSLQQMGVRWSGKTEEMGDTIQPRIQAKIYKENFEEDKLSKSTKQAIRTARNK | 184 |
| Query: 189 | GVKTYRVSQSELHKFSKIVSLTEKRKNISLRNEAYFQKLMTTYGDKAYLHLAKVNIPQKL | 248 |
| | G++ L FS+++ TEKRK I LRNEAY++KL+ + DKAY+ LA +++ ++ | |
| Sbjct: 185 | GLEIQYGGLELLDSFSELMKKTEKRKEIHLRNEAYYKKLLDNFKDKAYITLATLDVSKRS | 244 |
| Query: 249 | DQYRQQLILINQDITRTQAHQKKRLKKLEDQKASLERYITE---FEGFTDQYPEEVVVAG | 305 |
| | + +QL N+ + T + R K+E QK ER + E + + D V +A | |
| Sbjct: 245 | QELEEQLAK-NRALEETFT-ESTRTSKVEAQKKEKERLLEELTFLQEYIDVGQARVPLAA | 302 |
| Query: 306 | ILSISYGNVMEMLYAGMNDDFKKFYPQYLLYPNVFQDAYQDGIIWANMGGVEGSLDDGLT | 365 |
| | LS+ +G +YAGM+DDFK++ L + + A++ G+IW N+GGVE SL+ GL | |
| Sbjct: 303 | TLSLEFGTTSVNIYAGMDDDFKRYNAPILTWYETARYAFERGMIWQNLGGVENSLNGGLY | 362 |
| Query: 366 | KFKANFAPTIEEFIGEFNLPVSPLYHIANTMYKIRKQLKNKH | 407 |
| | FK F PTIEE++GEF +P PLY + RK L+ KH | |
| Sbjct: 363 | HFKEKFNPTIEEYLGEFTMPTHPLYPLLRLALDFRKTLRKKH | 404 |

[9685] An alignment of the GAS and GBS proteins is shown below.

| Identities = 226/407 (55%), Positives = 318/407 (77%), Gaps = 3/407 (0%) | | |
|---|---|---|
| Query: 5 | LMYHVTVGISEKEYDAFAIASSQTNLLHSSKWAQVKSNWQNERLGFYKDDQLVAVASILI | 64 |
| | L ++ +GISE+E+D+F Q ++L S WA++K+ WQNER+G YK+++ VA S+LI | |
| Sbjct: 4 | LTFYAKIGISEEEHDSFVKEHQQISVLQGSDWAKIKNQWQNERIGIYKEEKQVASLSLLI | 63 |
| Query: 65 | KSLPLGFTMLYIPRGPIMDYSNKELVNFVLKTLKNFGRKKRAVFAKFDPALLLRQYHLKE | 124 |
| | K LPLG +++YIPRGP+MDY +++LV F +KTLK++G+ K+A+F K+DPA+LL+QY L + | |
| Sbjct: 64 | KLLPLGRSIIYIPRGPVMDYLDRDLVAFTMKTLKDYGKTKKALFIKYDPAILLKQYALGQ | 123 |
| Query: 125 | ENVAEEIDESRQAIDNLKSAGAQWIGPTKAISETIQPRFQANIYTKANIEENFPKHTKRL | 184 |
| | E EE + AI NL+ AG W G T I+++IQPRFQANIYT+ N+E FPKHT+RL | |
| Sbjct: 124 | EE--EEKPLALAAIKNLQEAGVHWTGLTMEIADSIQPRFQANIYTQENLEMQFPKHTRRL | 181 |
| Query: 185 | IKDAKHRGVQIYRANIDDLPKFATVVALTENRKGVALRNENYFHQLMTIYGEDAYLYLAK | 244 |
| | IKDAK RGV+ YR + +L KF+ +V+LTE RK ++LRNE YF +LMT YG+ AYL+LAK | |
| Sbjct: 182 | IKDAKQRGVKTYRVSQSELHKFSKIVSLTEKRKNISLRNEAYFQKLMTTYGDKAYLHLAK | 241 |
| Query: 245 | VNLPKRLAQFKEQLLQIQKDLSETPSHQKSRLTRLNQQEASVKQYILEFQEFSKKYPDEP | 304 |
| | VN+P++L Q+++QL+ I +D++ T +HQK RL +L Q+AS+++YI EF+ F+ +YP+E | |
| Sbjct: 242 | VNIPQKLDQYRQQLILINQDITRTQAHQKKRLKKLEDQKASLERYITEFEGFTDQYPEEV | 301 |
| Query: 305 | VIAGILSIRFGNVLEMLYAGMDDSFRKFYPQYLLNARVFEDAFKNDIVSANLGGVEGSLN | 364 |
| | V+AGILSI +GNV+EMLYAGM+D F+KFYPQYLL VF+DA+++ I+ AN+GGVEGSL+ | |
| Sbjct: 302 | VVAGILSISYGNVMEMLYAGMNDDFKKFYPQYLLYPNVFQDAYQDGIIWANMGGVEGSLD | 361 |
| Query: 365 | DGLTKFKSNFNPMFEEYIGEFNLAINPLLYKLANLAYTIRKKQRHSH | 411 |
| | DGLTKFK+NF P EE+IGEFNL ++P LY +AN Y IRK+ ++ H | |
| Sbjct: 362 | DGLTKFKANFAPTIEEFIGEFHLPVSP-LYHIANTMYKIRKQLKNKH | 407 |

[9686] SEQ ID 5468 (GBS377) was expressed in E. coli as a His-fusion product. SDS-PAGE analysis of total cell extract is shown in FIG. 65 (lane 4; MW 49 kDa). It was also expressed in E. coli as a GST-fusion product. SDS-PAGE analysis of total cell extract is shown in FIG. 71 (lane 4; MW 74 kDa).

[9687] GBS377-GST was purified as shown in FIG. 212, lane 4.

[9688] Based on this analysis, it was predicted that these proteins and their epitopes could be useful antigens for vaccines or diagnostics.

### EXAMPLE 1760

[9689] A DNA sequence (GBSx1867) was identified in S. agalactiae <SEQ ID 5471> which encodes the amino acid sequence <SEQ ID 5472>. Analysis of this protein sequence reveals the following:

```
Possible site: 22
>>> Seems to have no N-terminal signal sequence
----- Final Results -----
bacterial cytoplasm --- Certainty = 0.2073 (Affirmative) <succ>
  bacterial membrane --- Certainty = 0.0000 (Not Clear) <succ>
    bacterial outside --- Certainty = 0.0000 (Not Clear) <succ>
```

[9690] A related GBS nucleic acid sequence <SEQ ID 9627> which encodes amino acid sequence <SEQ ID 9628> was also identified.

[9691] The protein has homology with the following sequences in the GENPEPT database.

| >GP:AAC76720 GB:AE000446 orf, hypothetical protein [Escherichia coli K12] | | |
|---|---|---|
| Identities = 127/269 (47%), Positives = 189/269 (70%), Gaps = 1/269 (0%) | | |
| Query: 7 | SIKLVAVDIDGTLLNSKREITPEVAKAVQEAKSKGVKIVIATGRPIIGVQDLLEELKLNE | 66 |
| | +IKL+A+D+DGTLL I+P V A+ A+++GV +V+ TGRP GV + L+EL + + | |
| Sbjct: 2 | AIKLIAIDMDGTLLLPDHTISPAVKNAIAAARARGVNVVLTTGRPYAGVHNYLKELHMEQ | 61 |
| Query: 67 | EGDYVITFNGGLVQDTATGDDIIKETLTYEDYLDFELLARKLGVHMHAITKEGIYTANRD | 126 |
| | GDY IT+NG LVQ A G + + L+Y+DY E L+R++G H HA+ + +YTANRD | |
| Sbjct: 62 | PGDYCITYNGALVQKAADGSTVAQTALSYDDYRFLEKLSREVGSHFHALDRTTLYTANRD | 121 |
| Query: 127 | IGKYTIHEVTLVNMPLFYRTPEEMG-DKEIIKLMMIDQPDILDAAIAKIPKKVLDNYTIV | 185 |
| | I YT+HE + +PL + E+M + + +K+MMID+P ILD AIA+IP++V + YT++ | |
| Sbjct: 122 | ISYYTVHESFVATIPLVFCEAEKMDPNTQFLKVMMIDEPAILDQAIARIPQEVKEKYTVL | 181 |
| Query: 186 | KSTPFYLEILPKNVNKGTALLHLAEKMGLTVDQTMAIGDEENDRAMLEVVGNPVVMQNGN | 245 |
| | KS P++LEIL K VNKGT + LA+ +G+ ++ MAIGD+END AM+E G V M N | |
| Sbjct: 182 | KSAPYFLEILDKRVNKGTGVKSLADVLGIKPEEIMAIGDQENDIAMIEYAGVGVAMDNAI | 241 |
| Query: 246 | PELKKIAKYITKSNEESGVAYALREWVIN | 274 |
| | P +K++A ++TKSN E GVA+A+ ++V+N | |
| Sbjct: 242 | PSVKEVANFVTKSNLEDGVAFAIEKYVLN | 270 |

[9692] A related DNA sequence was identified in S. pyogenes <SEQ ID 3407> which encodes the amino acid sequence <SEQ ID 3408>. Analysis of this protein sequence reveals the following:

```
Possible site: 36
>>> Seems to have no N-terminal signal sequence
----- Final Results -----
                            bacterial cytoplasm --- Certainty = 0.3474(Affirmative) < succ>
                              bacterial membrane --- Certainty = 0.0000(Not Clear) < succ>
                                bacterial outside --- Certainty = 0.0000(Not Clear) < succ>
```

[9693] An alignment of the GAS and GBS proteins is shown below.

| Identities = 197/268 (73%), Positives = 235/268 (87%) | | | |
|---|---|---|---|
| Query: | 7 | SIKLVAVDIDGTLLNSKREITPEVAKAVQEAKSKGVKIVIATGRPIIGVQDLLEELKLNE | 66 |
| | | SIKLVAVDIDGTLL R IT +V +AVQEAK++GV +VIATGRPI GV LLE+L+LN | |
| Sbjct: | 2 | SIKLVAVDIDGTLLTDDRRITDDVFQAVQEAKAQGVHVVIATGRPIAGVISLLEQLELNH | 61 |
| Query: | 67 | EGDYVITFNGGLVQDTATGDDIIKETLTYEDYLDFELLARKLGVHMHAITKEGIYTANRD | 126 |
| | | +G++VITFNGGLVQD TG++I+KE +TY+DYL+ E L+RKLGVHMHAITKEGIYTANR+ | |
| Sbjct: | 62 | KGNHVITFNGGLVQDAETGEEIVKELMTYDDYLETEFLSRKLGVHMHAITKEGIYTANRN | 121 |
| Query: | 127 | IGKYTIHEVTLVNMPLFYRTPEEMGDKEIIKLMMIDQPDILDAAIAKIPKKVLDNYTIVK | 186 |
| | | IGKYT+HE TLVNMP+FYRTPEEM +KEIIK+MMID+PD+LDAAI +IP+ D YTIVK | |
| Sbjct: | 122 | IGKYTVHESTLVNMPIFYRTPEEMTNKEIIKMMMIDEPDLLDAAIKQIPQHFFDKYTIVK | 181 |
| Query: | 187 | STPFYLEILPKNVNKGTALLHLAEKMGLTVDQTMAIGDEENDRAMLEVVGNPVVMQNGNP | 246 |
| | | STPFYLE +PK V+KG A+ HLA+K+GL + QTMAIGD ENDRAMLEVV NPVVM+NG P | |
| Sbjct: | 182 | STPFYLEFMPKTVSKGNAIKHLAKKLGLDMSQTMAIGDAENDRAMLEVVANPVVMENGVP | 241 |
| Query: | 247 | ELKKIAKYITKSNEESGVAYALREWVIN | 274 |
| | | ELKKIAKYITKSN +SGVA+A+R+WV+N | |
| Sbjct: | 242 | ELKKIAKYITKSNNDSGVAHAIRKWVLN | 269 |

[9694] Based on this analysis, it was predicted that these proteins and their epitopes could be useful antigens for vaccines or diagnostics.

### EXAMPLE 1761

[9695] A DNA sequence (GBSx1868) was identified in S. agalactiae <SEQ ID 5473> which encodes the amino acid sequence <SEQ ID 5474>. Analysis of this protein sequence reveals the following:

```
Possible site: 48
>>> Seems to have no N-terminal signal sequence
----- Final Results -----
                            bacterial cytoplasm --- Certainty = 0.2360(Affirmative) < succ>
                              bacterial membrane --- Certainty = 0.0000(Not Clear) < succ>
                                bacterial outside --- Certainty = 0.0000(Not Clear) < succ>
```

[9696] The protein has homology with the following sequences in the GENPEPT database.

| >GP: BAB07537 GB: AP001520 unknown conserved protein [Bacillus halodurans] | | | |
|---|---|---|---|
| Identities = 211/423 (49%), Positives = 285/423 (66%), | | | |
| Gaps = 5/423 (1%) | | | |
| Query: | 3 | EKVFRDPVHTYIHVNNQVIYDLINTKEFQRLRRIKQTSTTSFTFHGAEHSRFSHCLGVYE | 62 |
| | | EKVF+DPVH YIHV +++I+ LI TKEFQRLRR++Q TT TFHGAEH+RF+H LGVYE | |
| Sbjct: | 12 | EKVFKDPVHRYIHVRDELIWALIGTKEFQRLRRVRQLGTTFLTFHGAEHTRFNHSLGVYE | 71 |
| Query: | 63 | LARKVTEIFDEHYSDLWNKNESLLTMAAALLHDIGHGAYSHTFERLFNTDHEAYTQEIIT | 122 |
| | | + R++ E+F WN+ E LLT+ AALLHDIGHG +SH+FE++F+TDHE +T+ +I | |
| Sbjct: | 72 | ITRRIIEVFQGR--PYWNEEERLLTLCAALLHDIGHGPFSHSFEKVFDTDHEEWTRRMIV | 129 |
| Query: | 123 | NPTTEINAILRKVAPDFPDKVASVINHSYPNKQVVQLISSQIDCDRMDYLLRDSYYTAAS | 182 |
| | | T EI+ +L K+ DFP KVA VI +YPNK V +ISSQID DRMDYL RD+YYT S | |
| Sbjct: | 130 | GDT-EIHNVLLKMGDDFPQKVADVIEKTYPNKLVTSIISSQIDADRMDYLQRDAYYTGVS | 188 |
| Query: | 183 | YGQFDLTRILRVIRPTDSGIAFARNGMHAVEDYIVSRFQMYMQVYFHPASRAMELLLQNL | 242 |
| | | YG FD+ RILRV+RP + + ++GMHAVEDYI+SR+QMY QVYFHP +R+ E++L + | |
| Sbjct: | 189 | YGHFDMERILRVMPMEDQVVIKQSGMHAVEDYIMSRYQMYWQVYFHPVTRSAEVILSKV | 248 |
| Query: | 243 | LKRARFLFDTHRDFFEQTSPNLIPFFTDQYDLQDYLALDDGVMNTYFQSWMQADDNILAD | 302 |
| | | KR + L++ F+Q + F L DYL LD+ + YFQ W + +D IL+D | |
| Sbjct: | 249 | FKRVKDLYEQGYK-FKQEPKHFYSLFEGNMSLDDYLRLDESITMYYFQIWQEEEDRILSD | 307 |
| Query: | 303 | LANRFINRKVFKSITFEESDKEN-LVKMKELVSQVGFDPDYYTGVHANFDLPYDVYRPEH | 361 |
| | | L RFINR++FK I F + + N ++++L +Q DP+YY V ++ DLPYD YRP | |
| Sbjct: | 308 | LCVRFINRQLFKYIEFNPNLQMNDWPRLQQLFAQAEIDPEYYLVVDSSSDLPYDFYRPGE | 367 |
| Query: | 362 | SNPRTEIQIIQKNGQLAELSSLSPIVKALTGSNYGDQRFYFPKEMLTLDSLFSSTKEEFQ | 421 |
| | | R I +I NG+L ELS S +V+A++G D + YFP + LT S K+E | |
| Sbjct: | 368 | EEERLPIHLIMPNGKLRELSRESDVVEAISGKKRTDHKLYFPMDCLTDQSDHKEIKQEIL | 427 |
| Query: | 422 | SYI | 424 |
| | | S + | |
| Sbjct: | 428 | SLL | 430 |

[9697] A related DNA sequence was identified in S. pyogenes <SEQ ID 5475> which encodes the amino acid sequence <SEQ ID 5476>. Analysis of this protein sequence reveals the following:

```
Possible site: 55
>>> Seems to have no N-terminal signal sequence
----- Final Results -----
                            bacterial cytoplasm --- Certainty = 0.2220(Affirmative) < succ>
                              bacterial membrane --- Certainty = 0.0000(Not Clear) < succ>
                                bacterial outside --- Certainty = 0.0000(Not Clear) < succ>
```

[9698] An alignment of the GAS and GBS proteins is shown below.

| Identities = 321/428 (75%), Positives = 379/428 (88%) | | | |
|---|---|---|---|
| Query: | 1 | MNEKVFRDPVHTYIHVNNQVIYDLINTKEFQRLRRIKQTSTTSFTFHGAEHSRFSHCLGV | 60 |
| | | MNEKVFRDPVH YIH++N +IYDLINTKEFQRLRRIKQ TT+FTFHGAEHSRFSHCLGV | |
| Sbjct: | 1 | MNEKVFRDPVHNYIHIDNPLIYDLINTKEFQRLRRIKQVPTTAFTFHGAEHSRFSHCLGV | 60 |
| Query: | 61 | YELARKVTEIFDEHYSDLWNKNESLLTMAAALLHDIGHGAYSHTFERLFNTDHEAYTQEI | 120 |
| | | YE+AR+VT IF+E Y+D+WNK+ESL+TM AALLHDIGHGAYSHTFE LF+TDHEA+TQEI | |
| Sbjct: | 61 | YEIARRVTAIFEEKYADIWNKDESLVTMTAALLHDIGHGAYSHTFEVLFHTDHEAFTQEI | 120 |
| Query: | 121 | ITNPTTEINAILRKVAPDFPDKVASVINHSYPNKQVVQLISSQIDCDRMDYLLRDSYYTA | 180 |
| | | ITNP TEINAIL + APDFPDKVASVINH+YPNKQVVQLISSQIDCDRMDYLLRDSY++A | |
| Sbjct: | 121 | ITNPETEINAILVRHAPDFPDKVASVINHTYPNKQVVQLISSQIDCDRMDYLLRDSYFSA | 180 |
| Query: | 181 | ASYGQFDLTRILRVIRPTDSGIAFARNGMHAVEDYIVSRFQMYMQVYFHPASRMELLLQ | 240 |
| | | A+YGQFDL RILRVIRP + GI F +GMHAVEDYIVSRFQMYMQVYFHPASRA+EL+LQ | |
| Sbjct: | 181 | ANYGQFDLMRILRVIRPVEDGIVFEHSGMHAVEDYIVSRFQMYMQVYFHPASRAVELILQ | 240 |
| Query: | 241 | NLLKRARFLFDTHRDFFEQTSPNLIPFFTDQYDLQDYLALDDGVMNTYFQSWMQADDNIL | 300 |
| | | NLLKRA+ L+ + +F++T+P LIPFF + +L DY+ALDDGVMNTYFQ WM ++D+IL | |
| Sbjct: | 241 | NLLKRAQHLYPEQQAYFQKTAPGLIPFFEKKANLADYIALDDGVMNTYFQVWMASEDHIL | 300 |
| Query: | 301 | ADLANRFINRKVFKSITFEESDKENLVKMKELVSQVGFDPDYYTGVHANFDLPYDVYRPE | 360 |
| | | +DLA+RFINRK+ KS+TF++ + L ++++LV VGFDPDYYTG+H NFDLPYD+YRPE | |
| Sbjct: | 301 | SDLASRFINRKILKSVTFDQDSQGELERLRQLVESVGFDPDYYTGIHINFDLPYDIYRPE | 360 |
| Query: | 361 | HSNPRTEIQIIQKNGQLAELSSLSPIVKALTGSNYGDQRFYFPKEMLTLDSLFSSTKEEF | 420 |
| | | NPRT+I+++QK+G LAELS LSPIVKALTG+ YGD+RFYFPKEML LD LF+ +KE F | |
| Sbjct: | 361 | LENPRTQIEMMQKDGSLAELSQLSPIVKALTGTTYGDRRFYFPKEMLELDDLFAPSKETF | 420 |
| Query: | 421 | QSYITNEH | 428 |
| | | SYI+N H | |
| Sbjct: | 421 | MSYISNGH | 428 |

[9699] Based on this analysis, it was predicted that these proteins and their epitopes could be useful antigens for vaccines or diagnostics.

### EXAMPLE 1762

[9700] A DNA sequence (GBSx1869) was identified in S. agalactiae <SEQ ID 5477> which encodes the amino acid sequence <SEQ ID 5478>. Analysis of this protein sequence reveals the following:

```
Possible site: 46
>>> Seems to have no N-terminal signal sequence
----- Final Results -----
                            bacterial cytoplasm --- Certainty = 0.4789(Affirmative) < succ>
                              bacterial membrane --- Certainty = 0.0000(Not Clear) < succ>
                                bacterial outside --- Certainty = 0.0000(Not Clear) < succ>
```

[9701] The protein has no significant homology with any sequences in the GENPEPT database.

[9702] A related DNA sequence was identified in S. pyogenes <SEQ ID 5479> which encodes the amino acid sequence <SEQ ID 5480>. Analysis of this protein sequence reveals the following:

```
Possible site: 57
>>> Seems to have no N-terminal signal sequence
----- Final Results -----
                            bacterial cytoplasm --- Certainty = 0.3650(Affirmative) < succ>
                              bacterial membrane --- Certainty = 0.0000(Not Clear) < succ>
                                bacterial outside --- Certainty = 0.0000(Not Clear) < succ>
```

[9703] An alignment of the GAS and GBS proteins is shown below.

| Identities = 64/127 (50%), Positives = 89/127 (69%) | | | |
|---|---|---|---|
| Query: | 5 | MKLEINNNIQIDNETEMIHEIHDCQFIEKGSYVYLNYINAEGERVVIKANHEELLMTRFS | 64 |
| | | MKL++ N+I+ +ETE+I EIHDC++ EKG Y YL Y N + E+VVIK N +EL M+RFS | |
| Sbjct: | 1 | MKLQLTNHIRFGDETEIIQEIHDCEWREKGGYQYLIYQNTDKEKVVIKYNETELTMSRFS | 60 |
| Query: | 65 | NPKSVMRFHRETPALVNIPTPLGVQHLITETSHYQFDLSQQRLHINYVLKQTETGDCFAN | 124 |
| | | NP+S+M+F L+ +PTP+GVQ +T+TSHY D S Q+L ++Y L Q +T FA+ | |
| Sbjct: | 61 | NPQSIMKFFAGKKVLIALPTPMGVQQFLTDTSHYHLDCSCQKLDLHYHLLQAQTEMLFAS | 120 |
| Query: | 125 | YELRIQW | 131 |
| | | Y L + W | |
| Sbjct: | 121 | YHLELSW | 127 |

[9704] Based on this analysis, it was predicted that these proteins and their epitopes could be useful antigens for vaccines or diagnostics.

### EXAMPLE 1763

[9705] A DNA sequence (GBSx1870) was identified in S. agalactiae <SEQ ID 5481> which encodes the amino acid sequence <SEQ ID 5482>. This protein is predicted to be cation-transporting ATPase PacL (ctpF). Analysis of this protein sequence reveals the following:

| Possible site: 14 | | | | |
|---|---|---|---|---|
| >>> Seems to have no N-terminal signal sequence | | | | |
| | INTEGRAL | Likelihood = −13.27 | Transmembrane | 256-272 (246-276) |
| | INTEGRAL | Likelihood = −9.02 | Transmembrane | 64-80 (58-85) |
| | INTEGRAL | Likelihood = −8.49 | Transmembrane | 833-849 (828-855) |
| | INTEGRAL | Likelihood = −8.17 | Transmembrane | 89-105 (81-107) |
| | INTEGRAL | Likelihood = −7.48 | Transmembrane | 864-880 (860-884) |
| | INTEGRAL | Likelihood = −3.29 | Transmembrane | 287-303 (284-306) |
| | INTEGRAL | Likelihood = −2.55 | Transmembrane | 754-770 (753-773) |
| | INTEGRAL | Likelihood = −0.85 | Transmembrane | 695-711 (694-711) |
| | INTEGRAL | Likelihood = −0.75 | Transmembrane | 793-809 (792-809) |

```
----- Final Results -----
                              bacterial membrane --- Certainty = 0.6307(Affirmative) < succ>
                                bacterial outside --- Certainty = 0.0000(Not Clear) < succ>
                            bacterial cytoplasm --- Certainty = 0.0000(Not Clear) < succ>
```

[9706] The protein has homology with the following sequences in the GENPEPT database.

| >GP: CAB13439 GB: Z99112 similar to calcium-transporting ATPase | | | |
|---|---|---|---|
| [Bacillus subtilis] | | | |
| Identities = 380/888 (42%), Positives = 545/888 (60%), | | | |
| Gaps = 49/888 (5%) | | | |
| Query: | 10 | FYTQGQEEVLTSLESS-REGLSTTEAKNRLEMYGRNELEEGKKRSLIAKFFDQFKDLMII | 68 |
| | | F+ GQ ++L + +S ++GL+ E K RL+ +G NEL+EGKK S + FF QFKD M++ | |
| Sbjct: | 3 | FHEMGQTDLLEATNTSMKQGLTEKEVKKRLDKHGPNELQEGKKTSALLLFFAQFKDFMVL | 62 |
| Query: | 69 | ILLVAAALSVITEGMHG-LTDALIILAVVILNAAFGVYQEGQAEAAIEALKDMSSPIARV | 127 |
| | | +LL A +S G G DA+ I+A+V +N G +QE +AE +++ALK++S+P | |
| Sbjct: | 63 | VLLAATLIS----GFLGEYVDAVAIIAIVFVNGILGFFQERRAEQSLQALKELSTPHVMA | 118 |
| Query: | 128 | RRDGHTIEVDSKELVPGDLVMLEAGDVVPADLRLLEAASLKIEEAALTGESVPVEKDISQ | 187 |
| | | R+G ++ SKELVPGD+V +GD + AD+R++EA SL+IEE+ALTGES+PV K + | |
| Sbjct: | 119 | LREGSWTKIPSKELVPGDIVKFTSGDRIGADVRIVEARSLEIEESALTGESIPVVKHADK | 178 |
| Query: | 188 | VVAEDAGIGDRVNMAYQNSNVTYGRGYGVVTNTGMYTEVGKIADMLANADESETPLKQSL | 247 |
| | | + D +GD NMA+ + VT G G GVV TGM T +GKIADML +A TPL++ L | |
| Sbjct: | 179 | LKKPDVSLGDITNMAFMGTIVTRGSGVGVVVGTGMNTAMGKIADMLESAGTLSTPLQRRL | 238 |
| Query: | 248 | VQLSKLLTYLIVIIAVITFLVGIFVRKEGWIEGLMTSVALAVAAIPEGLPAIVTIVLSMG | 307 |
| | | QL K+L + +++ V+ VG+ ++ + V+LAVAAIPEGLPAIVT+ LS+G | |
| Sbjct: | 239 | EQLGKILIVVALLLTVLVVAVGV-IQGHDLYSMFLAGVSLAVAAIPEGLPAIVTVALSLG | 297 |
| Query: | 308 | TKTLAKRNSIVRKLPAVETLGSTEIIASDKTGTLTMNQMTVEKVYT-------------- | 353 |
| | | + + K+ SIVRKLPAVETLG II SDKTGT+T N+MTV V++ | |
| Sbjct: | 298 | VQRMIKQKSIVRKLPAVETLGCASIICSDKTGTMTQNKMTVTHVWSGGKTWRVAGAGYEP | 357 |
| Query: | 354 | NGVLQSSSEEISVDNNTL--------RIMNFSNDTKIDPSGKLIGDPTETALVQFGLDKN | 405 |
| | | G + +EISV+ + + N SN K D L GDPTE AL+ | |
| Sbjct: | 358 | KGSFTLNEKEISVNEHKPLQQMLLFGALCNNSNIEKRDGEYVLDGDPTEGALLTAARKGG | 417 |
| Query: | 406 | FDVREVLKNEPRVAELPFDSDRKLMSTIHKESDGRYFIAVKGAPDQLLKRVTKIEDNGLV | 465 |
| | | F V N + E PFDS RK+M+ I + D + +I KGAPD L++R ++I +G | |
| Sbjct: | 418 | FSKEFVESNYRVIEEFPFDSARKMMTVIVENQDRKRYIITKGAPDVLMQRSSRIYYDGSA | 477 |
| Query: | 466 | RDITAEDKEAILNTNKELAKQALRVLMMAYK--YETQIPSLETDIVESDLVFSGLVGMID | 523 |
| | | + E K + LA QALR + +AY+ + PS+E E DL GL G+ID | |
| Sbjct: | 478 | ALFSNERKAETEAVLRHLASQALRTIAVAYRPIKAGETPSMEQ--AEKDLTMLGLSGIID | 535 |
| Query: | 524 | PERPEAAEAVRVAKEAGIRPIMITGDHQDTAEAIAKRLGIIDANDTEDHVFTGAELNELS | 583 |
| | | P RPE +A++ +EAGI+ +MITGDH +TA+AIAK L ++ + + G LNELS | |
| Sbjct: | 536 | PPRPEVRQAIKECREAGIKTVMITGDHVETAKAIAKDLRLLPKS---GKIMDGKMLNELS | 592 |
| Query: | 584 | DEEFQKVFKQYSVYARVSPEHKVRIVKAWQNDGKVVAMTGDGVNDAPSLKTADIGIGMGI | 643 |
| | | EE V + V+ARVSPEHK++IVKA+Q +G +VAMTGDGVNDAP++K ADIG+ MGI | |
| Sbjct: | 593 | QEELSHVVEDVYVFARVSPEHKLKIVKAYQENGHIVAMTGDGVNDAPAIKQADIGVSMGI | 652 |
| Query: | 644 | TGTEVSKGASDMVLADDNFATIIVAVEEGRKVFSNIQKSIQYLLSANMAEVFTIFFATLL | 703 |
| | | TGT+V+K AS +VL DDNFATI A++EGR ++ NI+K I+YLL++N+ E+ + FA LL | |
| Sbjct: | 653 | TGTDVAKEASSLVLVDDNFATIKSAIKEGRNIYENIRKFIRYLLASNVGEILVMLFAMLL | 712 |
| Query: | 704 | GWDV-LAPVHLLWINLVTDTLPAIALGVEPAEPGVMTHKPRGRQSNFFDGGVMGAIIYQG | 762 |
| | | + L P+ +LW+NLVTD LPA+ALG++ E VM KPR + F + ++ +G | |
| Sbjct: | 713 | ALPLPLVPIQILWVNLVTDGLPAMALGMDQPEGDVMKRKPRHPKEGVFARKLGWKVVSRG | 772 |
| Query: | 763 | ILQTILVLGVYGWALMY---PEHAGYRMIHADALTMAFATLGLIQLVHAFNVKSVYQSIF | 819 |
| | | L I V + + ++Y PE+ Y A T+AFATL L QL+H F+ +S S+F | |
| Sbjct: | 773 | FL--IGVATILAFIIVYHRNPENLAY------AQTIAFATLVLAQLIHVFDCRS-ETSVF | 823 |
| Query: | 820 | TVGAFKNRTFNWSIPVAFILLMVTIVVPGFNKLFHVTHLSSTQWLTVV | 867 |
| | | + F+N ++ + +L++V I P +FH ++ W+ V+ | |
| Sbjct: | 824 | SRNPFQNLYLIGAVLSSILLMLVVIYYPPLQPIFHTVAITPGDWMLVI | 871 |

[9707] A related DNA sequence was identified in S. pyogenes <SEQ ID 4171> which encodes the amino acid sequence <SEQ ID 4172>. Analysis of this protein sequence reveals the following:

| Possible site: 34 | | | | |
|---|---|---|---|---|
| >>> Seems to have no N-terminal signal sequence | | | | |
| | INTEGRAL | Likelihood = −12.47 | Transmembrane | 863-879 (856-883) |
| | INTEGRAL | Likelihood = −10.08 | Transmembrane | 64-80 (58-86) |
| | INTEGRAL | Likelihood = −8.97 | Transmembrane | 256-272 (249-275) |
| | INTEGRAL | Likelihood = −8.55 | Transmembrane | 89-105 (81-107) |
| | INTEGRAL | Likelihood = −5.84 | Transmembrane | 832-848 (827-850) |
| | INTEGRAL | Likelihood = −3.13 | Transmembrane | 287-303 (284-307) |
| | INTEGRAL | Likelihood = −2.66 | Transmembrane | 762-778 (761-779) |
| | INTEGRAL | Likelihood = −0.37 | Transmembrane | 685-701 (685-701) |

```
----- Final Results -----
                              bacterial membrane --- Certainty = 0.5989(Affirmative) < succ>
                                bacterial outside --- Certainty = 0.0000(Not Clear) < succ>
                            bacterial cytoplasm --- Certainty = 0.0000(Not Clear) < succ>
```

[9708] An alignment of the GAS and GBS proteins is shown below.

| Identities = 735/892 (82%), Positives = 813/892 (90%), Gaps = 1/892 (0%) | | | |
|---|---|---|---|
| Query: | 3 | KEQKKSLFYTQGQEEVLTSLESSREGLSTTEAKNRLEMYGRNELEEGKKRSLIAKFFDQF | 62 |
| | | KEQ+ FYTQ +E VL LE+SREGL++ +AK RL YGRNEL+EG+KRSL KF DQF | |
| Sbjct: | 3 | KEQRHEAFYTQSEETVLAQLETSREGLTSAQAKERLAEYGRNELDEGEKRSLFMRFLDQF | 62 |
| Query: | 63 | KDLMIIILLVAAALSVITEGMHGLTDALIILAVVILNAAFGVYQEGQAEAAIEALKDMSS | 122 |
| | | KDLMIIIL+VAA LSV+TEGM GLTDA+IILAVVILNAAFGVYQEGQAEAAIEALK MSS | |
| Sbjct: | 63 | KDLMIIILIVAALLSVLTEGMEGLTDAIIILAVVILNAAFGVYQEGQAEAAIEALKSMSS | 122 |
| Query: | 123 | PIARVRRDGHTIEVDSKELVPGDLVMLEAGDVVPADLRLLEAASLKIEEAALTGESVPVE | 182 |
| | | P+AR+RRDGH E+DSKELVPGD+V+LEAGDVVPADLRLLEA SLKIEEAALTGESVPVE | |
| Sbjct: | 123 | PLARIRRDGHVTEIDSKELVPGDIVLLEAGDVVPADLRLLEANSLKIEEAALTGESVPVE | 182 |
| Query: | 183 | KDISQVVAEDAGIGDRVNMAYQNSNVTYGRGYGVVTNTGMYTEVGKIADMLANADESETP | 242 |
| | | KD+S V+EDAGIGDRVNM YQNSNVTYGRG GV+TNTGMYTEVG IA MLANADE++TP | |
| Sbjct: | 183 | KDLSTAVSEDAGIGDRVNMGYQNSNVTYGRGIGVITNTGMYTEVGHIAGMLANADETDTP | 242 |
| Query: | 243 | LKQSLVQLSKLLTYLIVIIAVITFLVGIFVRKEGWIEGLMTSVALAVAAIPEGLPAIVTI | 302 |
| | | LKQ+L LSK+LTY I++IA +TF VG+F+R + +EGLMTSVALAVAAIPEGLPAIVT+ | |
| Sbjct: | 243 | LKQNLDNLSKILTYAILVIAAVTFAVGVFLRGQHPLEGLMTSVALAVAAIPEGLPAIVTV | 302 |
| Query: | 303 | VLSMGTKTLAKRNSIVRKLPAVETLGSTEIIASDKTGTLTMNQMTVEKVYTNGVLQSSSE | 362 |
| | | VLS+GT+ LAKRN+I+RKLPAVETLGSTEIIASDKTGTLTMNQMTVEKVYTNG LQSSS | |
| Sbjct: | 303 | VLSLGTQVLAKRNAIIRKLPAVETLGSTEIIASDKTGTLTMNQMTVEKVYTNGTLQSSSA | 362 |
| Query: | 363 | EISVDNNTLRIMNFSNDTKIDPSGKLIGDPTETALVQFGLDKNFDVREVLKNEPRVAELP | 422 |
| | | +I+ DN TLR+MNF+NDTK+DPSGKLIGDPTETALV+FGLD NFDVRE + EPRVAELP | |
| Sbjct: | 363 | DIAFDNTTLRVMNFANDTKVDPSGKLIGDPTETALVEFGLDHNFDVREAMVAEPRVAELP | 422 |
| Query: | 423 | FDSDRKLMSTIHKESDGRYFIAVKGAPDQLLKRVTKIEDNGLVRDITAEDKEAILNTNKE | 482 |
| | | FDSDRKLMSTIHK++DG+YFIAVKGAPDQLLKRVT+IE+NG +R IT DK+ IL+TNK | |
| Sbjct: | 423 | FDSDRKLMSTIHKQADGKYFIAVKGAPDQLLKRVTQIEENGQIRPITDADKKTILDTNKS | 482 |
| Query: | 483 | LAKQALRVLMMAYKYETQIPSLETDIVESDLVFSGLVGMIDPERPEAAEAVRVAKEAGIR | 542 |
| | | LAKQALRVLMMAYKY +P+LET+IVE++LVFSGLVGMIDPERPEAA+AV+VAKEAGIR | |
| Sbjct: | 483 | LAKQALRVLMMAYKYSDALPTLETEIVEANLVFSGLVGMIDPERPEAAQAVKVAKEAGIR | 542 |
| Query: | 543 | PIMITGDHQDTAEAIAKRLGIIDANDTEDHVFTGAELNELSDEEFQKVFKQYSVYARVSP | 602 |
| | | PIMITGDHQDTA+AIAKRLGII+ D DHVFTGAELNELSDEEFQKVFKQYSVYARVSP | |
| Sbjct: | 543 | PIMITGDHQDTAKAIAKRLGIIE-EDGVDHVFTGAELNELSDEEFQKVFKQYSVYARVSP | 601 |
| Query: | 603 | EHKVRIVKAWQNDGKVVAMTGDGVNDAPSLKTADIGIGMGITGTEVSKGASDMVLADDNF | 662 |
| | | EHKVRIVKAWQN+GKVVAMTGDGVNDAPSLKTADIGIGMGITGTEVSKGASDMVLADDNF | |
| Sbjct: | 602 | EHKVRIVKAWQNEGKVVAMTGDGVNDAPSLKTADIGIGMGITGTEVSKGASDMVLADDNF | 661 |
| Query: | 663 | ATIIVAVEEGRKVFSNIQKSIQYLLSANMAEVFTIFFATLLGWDVLAPVHLLWINLVTDT | 722 |
| | | ATIIVAVEEGRKVFSNIQK+IQYLLSANMAEVFTIF ATL GWDVL PVHLLWINLVTDT | |
| Sbjct: | 662 | ATIIVAVEEGRKVFSNIQKTIQYLLSANMAEVFTIFLATLFGWDVLQPVHLLWINLVTDT | 721 |
| Query: | 723 | LPAIALGVEPAEPGVMTHKPRGRQSNFFDGGVMGAIIYQGILQTILVLGVYGWALMYPEH | 782 |
| | | LPAIALGVEPAEPGVM HKPRGR+S+FFDGGV AI+YQG QTILVLGVYG+ALM+PEH | |
| Sbjct: | 722 | LPAIALGVEPAEPGVMKHKPRGRKSSFFDGGVKEAILYQGAFQTILVLGVYGFALMFPEH | 781 |
| Query: | 783 | AGYRMIHADALTMAFATLGLIQLVHAFNVKSVYQSIFTVGAFKNRTFNWSIPVAFILLMV | 842 |
| | | Y +HADALTMA+ TLGLIQLVHA+NVKSVYQSIFTVG FKN+ FN+SIPVAF+ LM | |
| Sbjct: | 782 | TSYHDVHADALTMAYVTLGLIQLVHAYNVKSVYQSIFTVGLFKNKLFNYSIPVAFVALMA | 841 |
| Query: | 843 | TIVVPGFNKLFHVTHLSSTQWLTVVIGSLLMVVLTEIVKFIQRKLGQDEKAI | 894 |
| | | T+VVPGFN+ FHVTHL+ TQWL V+IGSLLMVVL E+VK +QR LGQDEKAI | |
| Sbjct: | 842 | TVVVPGFNQFFHVTHLTITQWLVVIIGSLLMVVLVELVKAVQRSLGQDEKAI | 893 |

[9709] A related GBS gene <SEQ ID 8897> and protein <SEQ ID 8898> were also identified. Analysis of this protein sequence reveals the following:

| Lipop: Possible site: −1 Crend: 6 | | | |
|---|---|---|---|
| McG: Discrim Score: −9.88 | | | |
| GvH: Signal Score (−7.5): −6.96 | | | |
| Possible site: 14 | | | |
| >>> Seems to have no N-terminal signal sequence | | | |
| ALOM program | count: 9 | value: −13.27 | threshold: 0.0 |

| | | | |
|---|---|---|---|
| INTEGRAL | Likelihood = −13.27 | Transmembrane | 256-272 (246-276) |
| INTEGRAL | Likelihood = −9.02 | Transmembrane | 64-80 (58-85) |
| INTEGRAL | Likelihood = −8.49 | Transmembrane | 833-849 (828-855) |
| INTEGRAL | Likelihood = −8.17 | Transmembrane | 89-105 (81-107) |
| INTEGRAL | Likelihood = −7.48 | Transmembrane | 864-880 (860-884) |
| INTEGRAL | Likelihood = −3.29 | Transmembrane | 287-303 (284-306) |
| INTEGRAL | Likelihood = −2.55 | Transmembrane | 754-770 (753-773) |
| INTEGRAL | Likelihood = −0.85 | Transmembrane | 695-711 (694-711) |
| INTEGRAL | Likelihood = −0.75 | Transmembrane | 793-809 (792-809) |

| | | |
|---|---|---|
| PERIPHERAL | Likelihood = 1.06 | 714 |

modified ALOM score: 3.15
*** Reasoning Step: 3
----- Final Results -----
bacterial membrane --- Certainty = 0.6307 (Affirmative) < succ>
bacterial outside --- Certainty = 0.0000 (Not Clear) < succ>
bacterial cytoplasm --- Certainty = 0.0000 (Not Clear) < succ>

[9710] The protein has homology with the following sequences in the databases:

[chemical structure]

[9711] Based on this analysis, it was predicted that these proteins and their epitopes could be useful antigens for vaccines or diagnostics.

### EXAMPLE 1764

[9712] A DNA sequence (GBSx1871) was identified in S. agalactiae <SEQ ID 5483> which encodes the amino acid sequence <SEQ ID 5484>. Analysis of this protein sequence reveals the following:

Possible site: 48
>>> Seems to have no N-terminal signal sequence
----- Final Results -----
bacterial cytoplasm --- Certainty = 0.2905 (Affirmative) < succ>
bacterial membrane --- Certainty = 0.0000 (Not Clear) < succ>
bacterial outside --- Certainty = 0.0000 (Not Clear) < succ>

[9713] The protein has homology with the following sequences in the GENPEPT database.

| >GP: CAB48940 GB: AJ248283 hypothetical protein [Pyrococcus abyssi] | | | |
|---|---|---|---|
| Identities = 60/221 (27%), Positives = 100/221 (45%), Gaps = 37/221 (16%) | | | |
| Query: | 33 | KIDHLHIA------GDISNHFTKDTLP-FINNLKKH---IKLSYNLGNHDMLDLTE--TE | 80 |
| | | KID L I GD+SN+ D + I+ L + L GNHD+ L + | |
| Sbjct: | 15 | KIDVLKIPDIAIQLGDLSNYGEPDIIENLISELVTQLDPVPLLVIPGNHDIYGLNDIFAA | 74 |
| Query: | 81 | IQRLDFQTYR------------FDKKMLLAFHGWYDYSFSNN--RDIKDVEKLKKTFWFD | 126 |
| | | QR + R ++ ++ GWYDYS + KD ++K F F | |
| Sbjct: | 75 | FQRFNKLVKRAGAIPLMEGPLILEEIGIVGVPGWYDYSLAPGYLNMTKDEYEIK-AFGFR | 133 |
| Query: | 127 | RR-----LKRPNNDVTIQASILKRLDEILAKVDSS--NIIIAMHFVPHKQFTMT--HPRF | 177 |
| | | R +K +D + L L++ ++++ S ++I+A+HF P K +P | |
| Sbjct: | 134 | RLEDADYIKSSLSDEELVRWNLNLLEKFISEIRESVNDVILALHFAPFKDSLKYTGNPEI | 193 |
| Query: | 178 | SPFNAFLGSQAYHDLFQKYHIKDVVFGHAHRSFGDVKIGET | 218 |
| | | F+A++GSQ + + +++I +V GH HRS + IG+T | |
| Sbjct: | 194 | DYFSAYMGSQRFGEFALRHNIGLIVHGHTHRSI-EYYIGKT | 233 |

[9714] No corresponding DNA sequence was identified in S. pyogenes.

[9715] Based on this analysis, it was predicted that this protein and its epitopes, could be useful antigens for vaccines or diagnostics.

### EXAMPLE 1765

[9716] A DNA sequence (GBSx1872) was identified in S. agalactiae <SEQ ID 5485> which encodes the amino acid sequence <SEQ ID 5486>. Analysis of this protein sequence reveals the following:

| Possible site: 44 | | | |
|---|---|---|---|
| >>> Seems to have no N-terminal signal sequence | | | |
| INTEGRAL | Likelihood = −2.18 | Transmembrane | 173-189 (173-189) |

----- Final Results -----
bacterial membrane --- Certainty = 0.1871 (Affirmative) < succ>
bacterial outside --- Certainty = 0.0000 (Not Clear) < succ>
bacterial cytoplasm --- Certainty = 0.0000 (Not Clear) < succ>

[9717] The protein has homology with the following sequences in the GENPEPT database.

| >GP: CAB16056 GB: Z99124 fructose-1,6-bisphosphatase [Bacillus subtilis] | | | |
|---|---|---|---|
| Identities = 314/642 (48%), Positives = 446/642 (68%), Gaps = 7/642 (1%) | | | |
| Query: | 2 | SNFYKLLKEKFPRKEDIVTEMINLEAICQLPKGTEYFISDLHGEYDAVDYLLRTGAGSIR | 61 |
| | | S + LL +K+ +E +VTE+INL+AI LPKGTE+F+SDLHGEY A ++LR G+G ++ | |
| Sbjct: | 33 | SKYLDLLAQKYDCEEKVVTEIINLKAILNLPKGTEHFVSDLHGEYQAFQHVLRNGSGRVK | 92 |
| Query: | 62 | AKLLDCFDWQKIVAVDLDDFCILLYYPKEKLAFDKMNLSASAYKTKLW-EMIPLQIQVLK | 120 |
| | | K+ D F I ++D+ L+YYP++KL K + A + + E I I+++ | |
| Sbjct: | 93 | EKIRDIFSGV-IYDREIDELAALVYYPEDKLKLIKHDFDAKEALNEWYKETIHRMIKLVS | 151 |
| Query: | 121 | YFSSKYTKSKVRKQLSGKFAYIIEELLAEIDRNPEKKSYFDTIIEKLFELDQVEDLIIVL | 180 |
| | | Y SSKYT+SK+RK L +FAYI EELL + ++ K+ Y+ II+++ EL Q + LI L | |
| Sbjct: | 152 | YCSSKYTRSKLRKALPAQFAYITEELLYKTEQAGNKEQYYSEIIDQIIELGQADKLITGL | 211 |
| Query: | 181 | SQTIQVLIIDHLHVVGDIYDRGRYPDRILNRLMAFPNLDIQWGNHDVTWMGAASGSYLCN | 240 |
| | | + ++Q L++DHLHVVGDIYDRG PDRI+ L+ + ++DIQWGNHDV W+GA SGS +C+ | |
| Sbjct: | 212 | AYSVQRLVVDHLHVVGDIYDRGPQPDRIMEELINYHSVDIQWGNHDVLWIGAYSGSKVCL | 271 |
| Query: | 241 | VNVIRIAARYNNITLIEDRYGINLRRLVDYSRRYYEPLPSFVPILDGEEMTHPDELDLLN | 300 |
| | | N+IRI ARY+N+ +IED YGINLR L++ + +YY+ P+F P D E DE+ + | |
| Sbjct: | 272 | ANIIRICARYDNLDIIEDVYGINLRPLLNLAEKYYDDNPAFRPKAD--ENRPEDEIKQIT | 329 |
| Query: | 301 | MIQQATAILQFKLEAQLIDRRPEFQMHNRQLINQVNYKDLSISIKEVVHQLKDFNSRCID | 360 |
| | | I QA A++QFKLE+ +I RRP F M R L+ +++Y I++ +QL++ I+ | |
| Sbjct: | 330 | KIHQAIAMIQFKLESPIIKRRPNFNMEERLLLEKIDYDKNEITLNGKTYQLENTCFATIN | 389 |
| Query: | 361 | SKNPSRLTSEEEELLQQLMIAFQTSESLKKHIDFLFEKGSMYLTYNDNLLFHGCIPMHSN | 420 |
| | | + P +L EE E++ +L+ + Q SE L +H++F+ +KGS+YL YN NLL HGCIP+ N | |
| Sbjct: | 390 | PEQPDQLLEEEAEVIDKLLFSVQHSEKLGRHMNFMMKKGSLYLKYNGNLLIHGCIPVDEN | 449 |
| Query: | 421 | GDFKSFKIAGKTYGGRDLLDLFESQIRLAYARPEKHDDLATDIIWYLWCGENSSLFGKNA | 480 |
| | | G+ ++ I K Y GR+LLD+FE +R A+A PE+ DDLATD+ WYLW GE SSLFGK A | |
| Sbjct: | 450 | GNMETMMIEDKPYAGRELLDVFERFLREAFAHPEETDDLATDMAWYLWTGEYSSLFGKRA | 509 |
| Query: | 481 | MTTFERYYVSDKVTHQERKNPYFKLRDKDDICTALLQEFDL-PKFGHIVNGHTPVKEKNG | 539 |
| | | MTTFERY++ +K TH+E+KNPY+ LR+ + C +L EF L P GHI+NGHTPVKE G | |
| Sbjct: | 510 | MTTFERYFIKEKETHKEKKNPYYYLREDEATCRNILAEFGLNPDHGHIINGHTPVKEIEG | 569 |
| Query: | 540 | EQPIKANGKMLVIDGGFAKGYQKNTGLAGYTLIYNSYGIQLISHLPFTSIEEVLSGTNYI | 599 |
| | | E PIKANGKM+VIDGGF+K YQ TG+AGYTL+YNSYG+QL++H F S EVLS + | |
| Sbjct: | 570 | EDPIKANGKMIVIDGGFSKAYQSTTGIAGYTLLYNSYGMQLVAHKHFNSKAEVLSTGTDV | 629 |
| Query: | 600 | IDTKRLVEEAKDRILVKDTTIGQKLTKEIKDLDHL--YRHFQ | 639 |
| | | + KRLV++ +R VK+T +G++L +E+ L+ L YR+ + | |
| Sbjct: | 630 | LTVKRLVDKELERKKVKETNVGEELLQEVAILESLREYRYMK | 671 |

[9718] No corresponding DNA sequence was identified in S. pyogenes.

[9719] SEQ ID 5486 (GBS197) was expressed in E. coli as a His-fusion product. SDS-PAGE analysis of total cell extract is shown in FIG. 168 (lane 17 & 18; MW 89 kDa) and in FIG. 169 (lane 2; MW 89 kDa). It was also expressed in E. coli as a GST-fusion product. SDS-PAGE analysis of total cell extract is shown in FIG. 37 (lane 6; MW 99 kDa).

[9720] Purified Thio-GBS197-His is shown in FIG. 244, lane 6.

[9721] Based on this analysis, it was predicted that this protein and its epitopes, could be useful antigens for vaccines or diagnostics.

### EXAMPLE 1766

[9722] A DNA sequence (GBSx1873) was identified in S. agalactiae <SEQ ID 5487> which encodes the amino acid sequence <SEQ ID 5488>. Analysis of this protein sequence reveals the following:

Possible site: 24
>>> Seems to have no N-terminal signal sequence
----- Final Results -----
bacterial cytoplasm --- Certainty = 0.2433 (Affirmative) < succ>
bacterial membrane --- Certainty = 0.0000 (Not Clear) < succ>
bacterial outside --- Certainty = 0.0000 (Not Clear) < succ>

[9723] The protein has homology with the following sequences in the GENPEPT database.

| >GP: CAB12719 GB: Z99108 alternate gene name: ygaP~similar to | | | |
|---|---|---|---|
| hypothetical proteins [Bacillus subtilis] | | | |
| Identities = 176/367 (47%), Positives = 240/367 (64%), Gaps = 6/367 (1%) | | | |
| Query: | 3 | IKAEIQKLAKEIGISKIGFTTADNFDYLEKSLRASVEEGRNSGFEHKVIEDRIYPERLLE | 62 |
| | | +K E+ + AK IG+ KIGFTTAD FD L+ L G SGFE IE R+ P+ LL | |
| Sbjct: | 55 | LKEELIEYAKSIGVDKIGFTTADTFDSLKDRLILQESLGYLSGFEEPDIEKRVTPKLLLP | 114 |
| Query: | 63 | SAKTIISIGVAYPHKLPQQPQKT-SYKRGKITPNSWGLDYHYVVGEKLDRLSKGIEELCR | 121 |
| | | AK+I++I +AYP ++ P+ T + +RG SWG DYH V+ EKLD L ++ | |
| Sbjct: | 115 | KAKSIVAIALAYPSRMKDAPRSTRTERRGIFCRASWGKDYHDVLREKLDLLEDFLKSKHE | 174 |
| Query: | 122 | DFPLQQKAMVDTGALVDTAVAQRAGIGFIGKNGLVISKEYGSYMFLGELITNLEIEPDKP | 181 |
| | | D ++ K+MVDTG L D AVA+RAGIGF KN ++ + EYGSY++L E+ITN+ EPD P | |
| Sbjct: | 175 | D--IRTKSMVDTGELSDRAVAERAGIGFSAKNCMITTPEYGSYVYLAEMITNIPFEPDVP | 232 |
| Query: | 182 | VDYDCGDCRRCLDACPTSCLIGDGSMNAKRCLSFQTQDKGMMDIEFRKKIKTVIYGCDIC | 241 |
| | | ++ CG C +CLDACPT L+ G +NA+RC+SF TQ KG + EFR KI +YGCD C | |
| Sbjct: | 233 | IEDMCGSCTKCLDACPTGALVNPGQLNAQRCISFLTQTKGFLPDEFRTKIGNRLYGCDTC | 292 |
| Query: | 242 | QICCPYNKGINNPLATEI--DPELAQPELIPFLSLSNGQFKEKFGMIAGSWRGKNILQRN | 299 |
| | | Q CP NKG + L E+ DPE+A+P L P L++SN +FKEKFG ++GSWRGK +QRN | |
| Sbjct: | 293 | QTVCPLNKGKDFHLHPEMEPDPEIAKPLLKPLLAISNREFKEKFGHVSGSWRGKKPIQRN | 352 |
| Query: | 300 | AIIALANAHDKTAVVKLIEIIDKNNNPIHTATAIWALGEIVKKPNDEILEFMSNLTLKDE | 359 |
| | | AI+ALA+ D +A+ +L E++ K+ P+ TA WA+G+I E LE KDE | |
| Sbjct: | 353 | AILALAHFKDASALPELTELMHKDPRPVIRGTAAWAIGKIGDPAYAEELEKALEKE-KDE | 411 |
| Query: | 360 | DSRKELE | 366 |
| | | +++ E+E | |
| Sbjct: | 412 | EAKLEIE | 418 |

[9724] A related DNA sequence was identified in S. pyogenes <SEQ ID 5489> which encodes the amino acid sequence <SEQ ID 5490>. Analysis of this protein sequence reveals the following:

```
Possible site: 21
>>> Seems to have no N-terminal signal sequence
----- Final Results -----
                            bacterial cytoplasm --- Certainty = 0.3337(Affirmative) < succ>
                              bacterial membrane --- Certainty = 0.0000(Not Clear) < succ>
                                bacterial outside --- Certainty = 0.0000(Not Clear) < succ>
```

[9725] An alignment of the GAS and GBS proteins is shown below.

| Identities = 363/374 (97%), Positives = 367/374 (98%) | | | |
|---|---|---|---|
| Query: | 1 | MDIKAEIQKLAKEIGISKIGFTTADNFDYLEKSLRASVEEGRNSGFEHKVIEDRIYPERL | 60 |
| | | M IKAEI+ LAKEIGISKIGFTTADNFDYLEKSLRASVEEGRNSGFEHKVIEDRIY ERL | |
| Sbjct: | 18 | MTIKAEIKALAKEIGISKIGFTTADNFDYLEKSLRASVEEGRNSGFEHKVIEDRIYTERL | 77 |
| Query: | 61 | LESAKTIISIGVAYPHKLPQQPQKTSYKRGKITPNSWGLDYHYVVGEKLDRLSKGIEELC | 120 |
| | | LESAKTIISIGVAYPHKLPQQPQKT YKRGKITP+SWGLDYHYVVGEKLDRLSKGIEELC | |
| Sbjct: | 78 | LESAKTIISIGVAYPHKLPQQPQKTPYKRGKITPSSWGLDYHYVVGEKLDRLSKGIEELC | 137 |
| Query: | 121 | RDFPLQQKAMVDTGALVDTAVAQRAGIGFIGKNGLVISKEYGSYMFLGELITNLEIEPDK | 180 |
| | | RDFPLQQKAMVDTGALVDTAVAQRAGIGFIGKNGLVISKEYGSYMFLGELITNLEIEPDK | |
| Sbjct: | 138 | RDFPLQQKAMVDTGALVDTAVAQRAGIGFIGKNGLVISKEYGSYMFLGELITNLEIEPDK | 197 |
| Query: | 181 | PVDYDCGDCRRCLDACPTSCLIGDGSMNAKRCLSFQTQDKGMMDIEFRKKIKTVIYGCDI | 240 |
| | | PVDYDCGDCRRCLDACPTSCLIGDGSMNAKRCLSFQTQDKGMMDIEFRKKIKTVIYGCDI | |
| Sbjct: | 198 | PVDYDCGDCRRCLDACPTSCLIGDGSMNAKRCLSFQTQDKGMMDIEFRKKIKTVIYGCDI | 257 |
| Query: | 241 | CQICCPYNKGINNPLATEIDPELAQPELIPFLSLSNGQFKEKFGMIAGSWRGKNILQRNA | 300 |
| | | CQICCPYNKGINN ATEIDPELAQPELIPFLSLSNG+FKEKFGMIAGSWRGKNILQRNA | |
| Sbjct: | 258 | CQICCPYNKGINNSPATEIDPELAQPELIPFLSLSNGKFKEKFGMIAGSWRGKNILQRNA | 317 |
| Query: | 301 | IIALANAHDKTAVVKLIEIIDKNNNPIHTATAIWALGEIVKKPNDEILEFMSNLTLKDED | 360 |
| | | IIALANAHDKTAVVKLIEIIDKNNNPIHTATAIWALGEIVKKPNDEIL FMS+LTLKDED | |
| Sbjct: | 318 | IIALANAHDKTAVVKLIEIIDKNNNPIHTATAIWALGEIVKKPNDEILAFMSHLTLKDED | 377 |
| Query: | 361 | SRKELELIRHKWQF | 374 |
| | | SRKELELIRHKWQF | |
| Sbjct: | 378 | SRKELELIRHKWQF | 391 |

[9726] Based on this analysis, it was predicted that these proteins and their epitopes could be useful antigens for vaccines or diagnostics.

### EXAMPLE 1767

[9727] A DNA sequence (GBSx1874) was identified in S. agalactiae <SEQ ID 5491> which encodes the amino acid sequence <SEQ ID 5492>. This protein is predicted to be peptide chain release factor 2, fragment (prfB). Analysis of this protein sequence reveals the following:

```
Possible site: 23
>>> Seems to have no N-terminal signal sequence
----- Final Results -----
                            bacterial cytoplasm --- Certainty = 0.4903(Affirmative) < succ>
                              bacterial membrane --- Certainty = 0.0000(Not Clear) < succ>
                                bacterial outside --- Certainty = 0.0000(Not Clear) < succ>
```

[9728] The protein has homology with the following sequences in the GENPEPT database.

| >GP: AAC67303 GB: AF017113 putative peptide chain release factor RF-2 | | | |
|---|---|---|---|
| [Bacillus subtilis] | | | |
| Identities = 194/336 (57%), Positives = 251/336 (73%), Gaps = 2/336 (0%) | | | |
| Query: | 2 | EEEIALLENQMTEPDFWNDNIAAQKTSQELNELKGKYDTFHNMQELSDETELLLEMLDE- | 60 |
| | | E IA L+ QM +P+FWND AQ E N LK +++ + E +E ++ ++L E | |
| Sbjct: | 30 | EARIAELDEQMADPEFWNDQQKAQTVINEANGLKDYVNSYKKLNESHEELQMTHDLLKEE | 89 |
| Query: | 61 | -DDSLKEELEENLMQLDKIMGAYEMTLLLSEPYDHNNAILEIHPGSGGTEAQDWGDLLLR | 119 |
| | | D L+ ELE+ L L K +E+ LLLSEPYD NNAILE+HPG+GGTE+QDWG +LLR | |
| Sbjct: | 90 | PDTDLQLELEKELKSLTKEFNEFELQLLLSEPYDKNNAILELHPGAGGTESQDWGSMLLR | 149 |
| Query: | 120 | MYTRFGNANGFKVEVLDYQAGDEAGIKSVTLSFEGPNAYGLLKSEMGVHRLVRISPFDSA | 179 |
| | | MYTR+G GFKVE LDY GDEAGIKSVTL +G NAYG LK+E GVHRLVRISPFDS+ | |
| Sbjct: | 150 | MYTRWGERRGFKVETLDYLPGDEAGIKSVTLLIKGHNAYGYLKAEKGVHRLVRISPFDSS | 209 |
| Query: | 180 | KRRHTSFASVEVMPELDDTIEVEVRDDDIKMDTFRSGGAGGQNVNKVSTGVRLTHIPTGI | 239 |
| | | RRHTSF S EVMPE +D I++++R +DIK+DT+R+ GAGGQ+VN + VR+TH+PT + | |
| Sbjct: | 210 | GRRHTSFVSCEVMPEFNDEIDIDIRTEDIKVDTYRASGAGGQHVNTTDSAVRITHLPTNV | 269 |
| Query: | 240 | VVSSTVDRTQYGNRDRAMKMLQAKLYQLEQEKKAQEVDALKGDKKEITWGSQIRSYVFTP | 299 |
| | | VV+ +R+Q NR+RAMKML+AKLYQ E++ E+D ++G++KEI WGSQIRSYVF P | |
| Sbjct: | 270 | VVTCQTERSQIKNRERAMKMLKAKLYQRRIEEQQAELDEIRGEQKEIGWGSQIRSYVFHP | 329 |
| Query: | 300 | YTMVKDHRTNFELAQVDKVMDGEINGFIDAYLKWRI | 335 |
| | | Y+MVKDHRTN E+ V VMDG+I+ FIDAYL+ ++ | |
| Sbjct: | 330 | YSMVKDHRTNTEMGNVQAVMDGDIDTFIDAYLRSKL | 365 |

[9729] A related DNA sequence was identified in S. pyogenes <SEQ ID 5493> which encodes the amino acid sequence <SEQ ID 5494>. Analysis of this protein sequence reveals the following:

```
Possible site: 23
>>> Seems to have no N-terminal signal sequence
----- Final Results -----
                            bacterial cytoplasm --- Certainty = 0.4779(Affirmative) < succ>
                              bacterial membrane --- Certainty = 0.0000(Not Clear) < succ>
                                bacterial outside --- Certainty = 0.0000(Not Clear) < succ>
```

[9730] An alignment of the GAS and GBS proteins is shown below.

| Identities = 334/337 (99%), Positives = 336/337 (99%) | | | |
|---|---|---|---|
| Query: | 1 | MEEEIALLENQMTEPDFWNDNIAAQKTSQELNELKGKYDTFHNMQELSDETELLLEMLDE | 60 |
| | | +EEEIALLEN MTEPDFWNDNIAAQKTSQELNELKGKYDTFHNMQELSDETELLLEMLDE | |
| Sbjct: | 1 | LEEEIALLENHMTEPDFWNDNIAAQKTSQELNELKGKYDTFHNMQELSDETELLLEMLDE | 60 |
| Query: | 61 | DDSLKEELEENLMQLDKIMGAYEMTLLLSEPYDHNNAILEIHPGSGGTEAQDWGDLLLRM | 120 |
| | | DDSLKEELEENLMQLDKIMGAYEMTLLLSEPYDHNNAILEIHPGSGGTEAQDWGDLLLRM | |
| Sbjct: | 61 | DDSLKEELEENLMQLDKIMGAYEMTLLLSEPYDHNNAILEIHPGSGGTEAQDWGDLLLRM | 120 |
| Query: | 121 | YTRFGNANGFKVEVLDYQAGDEAGIKSVTLSFEGPNAYGLLKSEMGVHRLVRISPFDSAK | 180 |
| | | YTRFGNANGFK+EVLDYQAGDEAGIKSVTLSFEGPNAYGLLKSEMGVHRLVRISPFDSAK | |
| Sbjct: | 121 | YTRFGNANGFKIEVLDYQAGDEAGIKSVTLSFEGPNAYGLLKSEMGVHRLVRISPFDSAK | 180 |
| Query: | 181 | RRHTSFASVEVMPELDDTIEVEVRDDDIKMDTFRSGGAGGQNVNKVSTGVRLTHIPTGIV | 240 |
| | | RRHTSFASVEVMPELDDTIEVEVRDDDIKMDTFRSGGAGGQNVNKVSTGVRLTHIPTGIV | |
| Sbjct: | 181 | RRHTSFASVEVMPELDDTIEVEVRDDDIKMDTFRSGGAGGQNVNKVSTGVRLTHIPTGIV | 240 |
| Query: | 241 | VSSTVDRTQYGNRDRAMKMLQAKLYQLEQEKKAQEVDALKGDKKEITWGSQIRSYVFTPY | 300 |
| | | VSSTVDRTQYGNRDRAMKMLQAKLYQLEQEKKAQEVDALKGDKKEITWGSQIRSYVFTPY | |
| Sbjct: | 241 | VSSTVDRTQYGNRDRAMKMLQAKLYQLEQEKKAQEVDALKGDKKEITWGSQIRSYVFTPY | 300 |
| Query: | 301 | TMVKDHRTNFELAQVDKVMDGEINGFIDAYLKWRIED | 337 |
| | | TMVKDHRTNFELAQVDKVMDGEINGFIDAYLKWRIED | |
| Sbjct: | 301 | TMVKDHRTNFELAQVDKVMDGEINGFIDAYLKWRIED | 337 |

[9731] Based on this analysis, it was predicted that these proteins and their epitopes could be useful antigens for vaccines or diagnostics.

### EXAMPLE 1768

[9732] A DNA sequence (GBSx1875) was identified in S. agalactiae <SEQ ID 5495> which encodes the amino acid sequence <SEQ ID 5496>. This protein is predicted to be cell-division ATP-binding protein (ftsE). Analysis of this protein sequence reveals the following:

```
Possible site: 42
>>> Seems to have no N-terminal signal sequence
----- Final Results -----
                            bacterial cytoplasm --- Certainty = 0.3928(Affirmative) < succ>
                              bacterial membrane --- Certainty = 0.0000(Not Clear) < succ>
                                bacterial outside --- Certainty = 0.0000(Not Clear) < succ>
```

[9733] The protein has homology with the following sequences in the GENPEPT database.

| >GP: AAC67262 GB: AF017113 cell division ATP-binding protein | | | |
|---|---|---|---|
| [Bacillus subtilis] | | | |
| Identities = 138/228 (60%), Positives = 179/228 (77%) | | | |
| Query: | 3 | LIEMSGVTKKYRRSTTALRNLNLSIQQGEFVYLVGPSGAGKSSLIRLLYREEKLSSGRLK | 62 |
| | | +IEM V K Y AL ++++I GEFVY+VGPSGAGKS+ I+++YREEK + G++ | |
| Sbjct: | 1 | MIEMKEVYKAYPNGVKALNGISVTIHPGEFVYVVGPSGAGKSTFIKMIYREEKPTKGQIL | 60 |
| Query: | 63 | VGEFNLNKLKRRQIPILRRSIGVVFQDYKLLPTKTVYENVAFAMQVIGAKRRHIKKRVPE | 122 |
| | | + +L +K ++IP +RR IGVVFQD+KLLP TV+ENVAFA++VIG + IKKRV E | |
| Sbjct: | 61 | INHKDLATIKEKEIPFVRRKIGVVFQDFKLLPKLTVFENVAFALEVIGEQPSVIKKRVLE | 120 |
| Query: | 123 | VLELVGLKHKMRSFPTQLSGGEQQRVAIARAIVNNPKLLIADEPTGNLDPEIAWEIMHLL | 182 |
| | | VL+LV LKHK R FP QLSGGEQQRV+IAR+IVNNP ++IADEPTGNLDP+ +WE+M L | |
| Sbjct: | 121 | VLDLVQLKHKARQFPDQLSGGEQQRVSIARSIVNNPDVVIADEPTGNLDPDTSWEVMKTL | 180 |
| Query: | 183 | ERINLQGTTVLMATHNSQIVNTLRHRVIEIEAGSVIRDEEKGEYGYHD | 230 |
| | | E IN +GTTV+MATHN +IVNT++ RVI IE G ++RDE +GBYG +D | |
| Sbjct: | 181 | EEINNRGTTVVMATHNKEIVNTMKKRVIAIEDGIIVRDESRGEYGSYD | 228 |

[9734] A related DNA sequence was identified in S. pyogenes <SEQ ID 5497> which encodes the amino acid sequence <SEQ ID 5498>. Analysis of this protein sequence reveals the following:

```
Possible site: 47
>>> Seems to have no N-terminal signal sequence
----- Final Results -----
                            bacterial cytoplasm --- Certainty = 0.3728(Affirmative) < succ>
                              bacterial membrane --- Certainty = 0.0000(Not Clear) < succ>
                                bacterial outside --- Certainty = 0.0000(Not Clear) < succ>
```

[9735] An alignment of the GAS and GBS proteins is shown below.

| Identities = 191/230 (83%), Positives = 214/230 (93%) | | | |
|---|---|---|---|
| Query: | 1 | MALIEMSGVTKKYRRSTTALRNLNLSIQQGEFVYLVGPSGAGKSSLIRLLYREEKLSSGR | 60 |
| | | MALIEMSGVTKKYRRSTTALR++N+S+ QGEFVYLVGPSGAGKS+ I+LLYREE+L++G+ | |
| Sbjct: | 1 | MALIEMSGVTKKYRRSTTALRDVNVSVNQGEFVYLVGPSGAGKSTFIKLLYREEQLTTGK | 60 |
| Query: | 61 | LKVGEFNLNKLKRRQIPILRRSIGVVFQDYKLLPTKTVYENVAFAMQVIGAKRRHIKKRV | 120 |
| | | L VGEFNL KLK R +PILRR IGVVFQDYKLLP KTV+ENVA+AM+VIG KRRHIKKRV | |
| Sbjct: | 61 | LYVGEFNLTKLKARDVPILRRHIGVVFQDYKLLPRKTVFENVAYAMEVIGEKRRHIKKRV | 120 |
| Query: | 121 | PEVLELVGLKHKMRSFPTQLSGGEQQRVAIARAIVNNPKLLIADEPTGNLDPEIAWEIMH | 180 |
| | | PEVL+LVGLKHKMRSFP+QLSGGEQQRVAIARAIVNNPKLLIADEPTGNLDPEI+WEIM | |
| Sbjct: | 121 | PEVLDLVGLKHKMRSFPSQLSGGEQQRVAIARAIVNNPKLLIADEPTGNLDPEISWEIMQ | 180 |
| Query: | 181 | LLERINLQGTTVLMATHNSQIVNTLRHRVIEIEAGSVIRDEEKGEYGYHD | 230 |
| | | LLERIN+QGTT+LMATHNS IVNT RHRV+ IE G ++RDEEKG+YGY D | |
| Sbjct: | 181 | LLERINVQGTTILMATHNSHIVNTFRHRVVAIEDGRIVRDEEKGDYGYDD | 230 |

[9736] Based on this analysis, it was predicted that these proteins and their epitopes could be useful antigens for vaccines or diagnostics.

### EXAMPLE 1769

[9737] A DNA sequence (GBSx1876) was identified in S. agalactiae <SEQ ID 5499> which encodes the amino acid sequence <SEQ ID 5500>. This protein is predicted to be ftsE protein (ftsX). Analysis of this protein sequence reveals the following:

| Possible site: 45 | | | | |
|---|---|---|---|---|
| >>> Seems to have no N-terminal signal sequence | | | | |
| | INTEGRAL | Likelihood = −10.77 | Transmembrane | 296-312 (291-322) |
| | INTEGRAL | Likelihood = −9.24 | Transmembrane | 203-219 (198-228) |
| | INTEGRAL | Likelihood = −6.16 | Transmembrane | 49-65 (40-68) |
| | INTEGRAL | Likelihood = −3.40 | Transmembrane | 255-271 (252-273) |

```
----- Final Results -----
                              bacterial membrane --- Certainty = 0.5310(Affirmative) < succ>
                                bacterial outside --- Certainty = 0.0000(Not Clear) < succ>
                            bacterial cytoplasm --- Certainty = 0.0000(Not Clear) < succ>
```

[9738] A related GBS nucleic acid sequence <SEQ ID 9629> which encodes amino acid sequence <SEQ ID 9630> was also identified.

[9739] The protein has homology with the following sequences in the GENPEPT database.

| >GP: AAC67264 GB: AF017113 cell division protein [Bacillus subtilis] | | | |
|---|---|---|---|
| Identities = 112/311 (36%), Positives = 182/311 (58%), Gaps = 31/311 (9%) | | | |
| Query: | 27 | RHFWESLKNLKRNFWMTFASVTSVTITLLLVGLFSSVLLNVEKLTTDVSGNFTISAFLNV | 86 |
| | | RH ES K+L RN WMTFAS+++VT+TL+LVG+F ++LN+ + T+ I +++ | |
| Sbjct: | 7 | RHLRESFKSLGRNTWMTFASISAVTVTLILVGVFLVIMLNLNNMATNAEKQVEIKVLIDL | 66 |
| Query: | 87 | DSTDAQKQVKDKDGKLKDNPDYHKVYDKIKRISGVEKVTYSSKAEQLKEVQKEYGSDVID | 146 |
| | | + D K +D K+ + IK + G++ VT+SSK ++L ++ +G | |
| Sbjct: | 67 | TA----------DQKAQD-----KLQNDIKELKGIQSVTFSSREKELDQLVDSFGDSGKS | 111 |
| Query: | 147 | DTYKDA---LLDVYVVGTSSAKVSKSVSEAIGRIEGV---DYTKEPIDST-KLSNLTDNI | 199 |
| | | T KD L D +VV T+ + +V++ I +++ V Y KE + K+ ++ NI | |
| Sbjct: | 112 | LTMKDQENPLNDAFVVKTTDPHDTPNVAKKIEKMDHVYKVTYGKEEVSRLFKVVGVSRNI | 171 |
| Query: | 200 | RIWGFGGVALLIVL---AIFLISNTIRMSIMSRRTDIEIMRLVGAKNSYIRGPFFFEGAW | 256 |
| | | G+AL+I L A+FLISNTI+++I +RR +IEIM+LVGA N +IR PFF EG | |
| Sbjct: | 172 | ------GIALIIGLVFTAMFLISNTIKITIFARRKEIEIMKLVGATNWFIRWPFFLEGLL | 225 |
| Query: | 257 | VGILGAIVPSLIFYFGYQFVFNKFNPKFETSHVSLYPMDIMVPAIIGGMVIIGIIIGSLG | 316 |
| | | +G+ G+++P + YQ+V PK + S VSL P + V + ++ IG +IG G | |
| Sbjct: | 226 | LGVFGSVIPIALVLSTYQYVIGWVVPKVQGSFVSLLPYNPFVFQVSLVLIAIGAVIGVWG | 285 |
| Query: | 317 | SVLSMRRYLKI | 327 |
| | | S+ S+R++L++ | |
| Sbjct: | 286 | SLTSIRKFLRV | 296 |

[9740] A related DNA sequence was identified in S. pyogenes <SEQ ID 5501> which encodes the amino acid sequence <SEQ ID 5502>. Analysis of this protein sequence reveals the following:

| Possible site: 51 | | | | |
|---|---|---|---|---|
| >>> Seems to have no N-terminal signal sequence | | | | |
| | INTEGRAL | Likelihood = −7.70 | Transmembrane | 195-211 (189-219) |
| | INTEGRAL | Likelihood = −6.74 | Transmembrane | 39-55 (30-58) |
| | INTEGRAL | Likelihood = −5.52 | Transmembrane | 294-310 (288-314) |
| | INTEGRAL | Likelihood = −1.49 | Transmembrane | 246-262 (245-263) |

```
----- Final Results -----
                              bacterial membrane --- Certainty = 0.4079(Affirmative) < succ>
                                bacterial outside --- Certainty = 0.0000(Not Clear) < succ>
                            bacterial cytoplasm --- Certainty = 0.0000(Not Clear) < succ>
```

[9741] The protein has homology with the following sequences in the databases:

| >GP: AAC67264 GB: AF017113 cell division protein [Bacillus subtilis] | | | |
|---|---|---|---|
| Identities = 117/311 (37%), Positives = 184/311 (58%), Gaps = 19/311 (6%) | | | |
| Query: | 11 | MIRYFFRHIWESIKNLKRNFWMTFASVSMVAVTLTLVGVFAATLLNIQRVASGVENNVHI | 70 |
| | | MI+ RH+ ES K+L RN WMTFAS+S V VTL LVGVF +LN+ +A+ E V I | |
| Sbjct: | 1 | MIKILGRHLRESFKSLGRNTWMTFASISAVTVTLILVGVFLVIMLNLNNMATNAEKQVEI | 60 |
| Query: | 71 | NTYLQVDSTDAAKVIQNTAGEPVNNDNYHSVYDKIAQIKGVKKITFSSKDEQLKKLQETL | 130 |
| | | + + + A+ + + ND I ++KG++ +TFSSK+++L +L ++ | |
| Sbjct: | 61 | KVLIDLTADQKAQ-------DKLQND--------IKELKGIQSVTFSSKEKELDQLVDSF | 105 |
| Query: | 131 | GDVWN---MYDQDTNPLQDIYLIETQTPKQVKAITKKIRTIEGVEAADYGGINSDKLFKF | 187 |
| | | GD M DQ+ NPL D ++++T P + KKI ++ V YG +LFK | |
| Sbjct: | 106 | GDSGKSLTMKDQE-NPLNDAFVVKTTDPHDTPNVAKKIEKMDHVYKVTYGKEEVSRLFKV | 164 |
| Query: | 188 | STLIQTWGLIGTAMLLFVAVFLISNTIRMTIMSRKRDIEIMRLVGAKNSYIRGPFFFEGA | 247 |
| | | + + G+ L+F A+FLISNTI++TI +R+++IEIM+LVGA N +IR PFF EG | |
| Sbjct: | 165 | VGVSRNIGIALIIGLVFTAMFLISNTIKITIFARRKEIEIMKLVGATNWFIRWPFFLEGL | 224 |
| Query: | 248 | WVGLLGAVLPSLLIYYGYDLVYKHFAQELQRNNLSMYPLDPYVYYLIGALFVIGIMIGSL | 307 |
| | | +G+ G+V+P L+ Y V ++Q + +S+ P +P+V+ + L IG +IG | |
| Sbjct: | 225 | LLGVFGSVIPIALVLSTYQYVIGWVVPKVQGSFVSLLPYNPFVFQVSLVLIAIGAVIGVW | 284 |
| Query: | 308 | GSVLSMRRYLK | 318 |
| | | GS+ S+R++L+ | |
| Sbjct: | 285 | GSLTSIRKFLR | 295 |

[9742] An alignment of the GAS and GBS proteins is shown below.

| Identities = 173/318 (54%), Positives = 238/318 (74%), Gaps = 5/318 (1%) | | | |
|---|---|---|---|
| Query: | 13 | MKRRENMVIMIN-FFRHFWESLKNLKRNFWMTFASVTSVTITLLLVGLFSSVLLNVEKLT | 71 |
| | | MK++E MV MI FFRH WES+KNLKRNFWMTFASV+ V +TL LVG+F++ LLN++++ | |
| Sbjct: | 2 | MKKKEIMVTMIRYFFRHIWESIKNLKRNFWMTFASVSMVAVTLTLVGVFAATLLNIQRVA | 61 |
| Query: | 72 | TDVSGNFTISAFLNVDSTDAQKQVKDKDGKLKDNPDYHKVYDKIKRISGVEKVTYSSKAE | 131 |
| | | + V N I+ +L VDSTDA K +++ G+ +N +YH VYDKI +I GV+K+T+SSK E | |
| Sbjct: | 62 | SGVENNVHINTYLQVDSTDAAKVIQNTAGEPVNNDNYHSVYDKIAQIKGVKKITFSSKDE | 121 |
| Query: | 132 | QLKEVQKEYGSDVID--DTYKDALLDVYVVGTSSAKVSKSVSEAIGRIEGVDYTKEP-ID | 188 |
| | | QLK++Q+ G DV + D + L D+Y++ T + K K++++ I IEGV+ I+ | |
| Sbjct: | 122 | QLKKLQETLG-DVWNMYDQDTNPLQDIYLIETQTPKQVKAITKKIRTIEGVEAADYGGIN | 180 |
| Query: | 189 | STKLSNLTDNIRIWGFGGVALLIVLAIFLISNTIRMSIMSRRTDIEIMRLVGAKNSYIRG | 248 |
| | | S KL + I+ WG G A+L+ +A+FLISNTIRM+IMSR+ DIEIMRLVGAKNSYIRG | |
| Sbjct: | 181 | SDKLFKFSTLIQTWGLIGTAMLLFVAVFLISNTIRMTIMSRKRDIEIMRLVGAKNSYIRG | 240 |
| Query: | 249 | PFFFEGAWVGILGAIVPSLIFYFGYQFVFNKFNPKFETSHVSLYPMDIMVPAIIGGMVII | 308 |
| | | PFFFEGAWVG+LGA++PSL+ Y+GY V+ F + + +++S+YP+D V +IG + +I | |
| Sbjct: | 241 | PFFFEGAWVGLLGAVLPSLLIYYGYDLVYKHFAQELQRNNLSMYPLDPYVYYLIGALFVI | 300 |
| Query: | 309 | GIIIGSLGSVLSMRRYLK | 326 |
| | | GI+IGSLGSVLSMRRYLK | |
| Sbjct: | 301 | GIMIGSLGSVLSMRRYLK | 318 |

[9743] Based on this analysis, it was predicted that these proteins and their epitopes could be useful antigens for vaccines or diagnostics.

### EXAMPLE 1770

[9744] A DNA sequence (GBSx1877) was identified in S. agalactiae <SEQ ID 5503> which encodes the amino acid sequence <SEQ ID 5504>. This protein is predicted to be carboxymethylenebutenolidase-related protein. Analysis of this protein sequence reveals the following:

```
Possible site: 24
>>> Seems to have a cleavable N-term signal seq.
----- Final Results -----
                                bacterial outside --- Certainty = 0.3000(Affirmative) < succ>
                              bacterial membrane --- Certainty = 0.0000(Not Clear) < succ>
                            bacterial cytoplasm --- Certainty = 0.0000(Not Clear) < succ>
```

[9745] The protein has homology with the following sequences in the GENPEPT database.

| >GP: AAF10898 GB: AE001979 carboxymethylenebutenolidase-related | | | |
|---|---|---|---|
| protein [Deinococcus radiodurans] | | | |
| Identities = 65/183 (35%), Positives = 98/183 (53%), Gaps = 3/183 (1%) | | | |
| Query: | 56 | SKGKVKANIIFYQGALVEEEAYSQLARDLADKGDNTYILKTPLNLPVLSPHRAKTIINQN | 115 |
| | | + +VK ++FY G V +AY L R LA +G T I PL+L + +A+ +I + | |
| Sbjct: | 100 | ASAEVKTLLVFYPGGRVRPQAYEWLGRALAVRGVQTVIPAFPLDLAITGTERAEGLIARY | 159 |
| Query: | 116 | HL-TNVYLAGHSLGGVVASQNAKVAP--VRGLILLASYPSRKSDLSHKNLRVLSITASND | 172 |
| | | V LAGHSLGG VA+Q A + P + GL+LLA+YP+ +L LS+ A D | |
| Sbjct: | 160 | GAGKRVVLAGHSLGGTVAAQYAALRPDKIDGLLLLAAYPAPNVNLHDARFPALSLLAEKD | 219 |
| Query: | 173 | HILNWEKYEEAKKRLPNSSTFRTIVGGNHSRFGNYGHQKGDGKATLSHKSSEKQLATFIS | 232 |
| | | + + +RLP ++ + G HS FG YG Q+GDG T+S +E+++ + | |
| Sbjct: | 220 | GVADAGLVRGGLERLPKNTRLTVLPGAVHSFFGRYGPQQGDGVPTVSRARAEREIVQAVE | 279 |
| Query: | 233 | NFI | 235 |
| | | FI | |
| Sbjct: | 280 | TFI | 282 |

[9746] No corresponding DNA sequence was identified in S. pyogenes.

[9747] SEQ ID 5504 (GBS158) was expressed in E. coli as a His-fusion product. SDS-PAGE analysis of total cell extract is shown in FIG. 26 (lane 4; MW 27 kDa). It was also expressed in E. coli as a GST-fusion product. SDS-PAGE analysis of total cell extract is shown in FIG. 37 (lane 5; MW 52 kDa).

[9748] The GBS158-GST fusion product was purified (FIG. 113; see also FIG. 201, lane 4) and used to immunise mice (lane 1+2 product; 14.5 kg/mouse). The resulting antiserum was used for Western blot, FACS, and in the in vivo passive protection assay (Table III). These tests confirm that the protein is immunoaccessible on GBS bacteria and that it is an effective protective immunogen.

[9749] Based on this analysis, it was predicted that this protein and its epitopes, could be useful antigens for vaccines or diagnostics.

### EXAMPLE 1771

[9750] A DNA sequence (GBSx1878) was identified in S. agalactiae <SEQ ID 5505> which encodes the amino acid sequence <SEQ ID 5506>. Analysis of this protein sequence reveals the following:

```
Possible site: 54
>>> Seems to have no N-terminal signal sequence
----- Final Results -----
                            bacterial cytoplasm --- Certainty = 0.0281(Affirmative) < succ>
                              bacterial membrane --- Certainty = 0.0000(Not Clear) < succ>
                                bacterial outside --- Certainty = 0.0000(Not Clear) < succ>
```

[9751] The protein has homology with the following sequences in the GENPEPT database.

| >GP: BAB06539 GB: AP001516 unknown conserved protein [Bacillus halodurans] | | | |
|---|---|---|---|
| Identities = 83/197 (42%), Positives = 114/197 (57%), Gaps = 4/197 (2%) | | | |
| Query: | 35 | NTYYLVNDQAV-ILIDPGSNGQEIIAKIKSFEKPLVAILLTHTHYDHIFSLDLVRDTFDN | 93 |
| | | N Y NDQ I+ DPG +++I ++ + +AILLTH H+DHI +++ VR+TF + | |
| Sbjct: | 14 | NWYIQTNDQGEGIIFDPGGEVEKLITWLRDRQITPLAILLTHAHFDHIGAVEDVRNTF-H | 72 |
| Query: | 94 | PPVYVSEKEAAWLSSPDDNLSGLGRHDDIINVIARPAENFFKLKQPYQLNGFEFTVLPTP | 153 |
| | | PVY+ E E WL P N S L I AR AE+ +Q + F + VL TP | |
| Sbjct: | 73 | IPVYIHENEKEWLIDPQRNGSSLFIPGSSIK--AREAEHLITGEQDLSIGSFSYQVLETP | 130 |
| Query: | 154 | GHSWGGVSFVFHSDELVVTGDALFRETIGRTDLPTSNFEDLITGIRQELFTLPSHYSVHP | 213 |
| | | GHS G +S+ D++V +GDALF +IGRTDLP + + L+ I +L LP +V | |
| Sbjct: | 131 | GHSPGSLSYYAKEDKIVFSGDALFAGSIGRTDLPGGDHQLLLDSIHDKLLELPEDTTVAS | 190 |
| Query: | 214 | GHGMNTTIGHEKNFNPF | 230 |
| | | GHG TTIGHE + NPF | |
| Sbjct: | 191 | GHGPTTTIGHEMDGNPF | 207 |

[9752] A related DNA sequence was identified in S. pyogenes <SEQ ID 5507> which encodes the amino acid sequence <SEQ ID 5508>. Analysis of this protein sequence reveals the following:

```
Possible site: 54
>>> Seems to have no N-terminal signal sequence
----- Final Results -----
                            bacterial cytoplasm --- Certainty = 0.0407(Affirmative) < succ>
                              bacterial membrane --- Certainty = 0.0000(Not Clear) < succ>
                                bacterial outside --- Certainty = 0.0000(Not Clear) < succ>
```

[9753] An alignment of the GAS and GBS proteins is shown below.

| Identities = 217/231 (93%), Positives = 224/231 (96%) | | | |
|---|---|---|---|
| Query: | 1 | MPFIFRHSFFNKVLIFWYTIIMKIYKTINHIAGENTYYLVNDQAVILIDPGSNGQEIIAK | 60 |
| | | +PFIFR+SFFNKVLIFWYTI+MKIYKTINHIAGENTYYLVNDQAVILIDPGSNGQEIIAK | |
| Sbjct: | 1 | LPFIFRYSFFNKVLIFWYTILMKIYKTINHIAGENTYYLVNDQAVILIDPGSNGQEIIAK | 60 |
| Query: | 61 | IKSFEKPLVAILLTHTHYDHIFSLDLVRDTFDNPPVYVSEKEAAWLSSPDDNLSGLGRHD | 120 |
| | | IKSFEKPLVAILLTHTHYDHIFSLDLVRD FD+PPVYVSEKEAAWLSSPDDNLSGLGRHD | |
| Sbjct: | 61 | IKSFEKPLVAILLTHTHYDHIFSLDLVRDAFDHPPVYVSEKEAAWLSSPDDNLSGLGRHD | 120 |
| Query: | 121 | DIINVIARPAENFFKLKQPYQLNGFEFTVLPTPGHSWGGVSFVFHSDELVVTGDALFRET | 180 |
| | | DII VIARPAENFFKLKQPYQLNGFEFTVLPT GHSWGGVSFVFHSDELVVTGDALFRET | |
| Sbjct: | 121 | DIITVIARPAENFFKLKQPYQLNGFEFTVLPTSGHSWGGVSFVFHSDELVVTGDALFRET | 180 |
| Query: | 181 | IGRTDLPTSNFEDLITGIRQELFTLPSHYSVHPGHGMNTTIGHEKNFNPFF | 231 |
| | | IGRTDLPTSNFEDLITGIRQELFTLP+HY V+PGHG +TTI HEKN NPFF | |
| Sbjct: | 181 | IGRTDLPTSNFEDLITGIRQELFTLPNHYRVYPGHGPSTTICHEKNANPFF | 231 |

[9754] Based on this analysis, it was predicted that these proteins and their epitopes could be useful antigens for vaccines or diagnostics.

### EXAMPLE 1772

[9755] A DNA sequence (GBSx1879) was identified in S. agalactiae <SEQ ID 5509> which encodes the amino acid sequence <SEQ ID 5510>. This protein is predicted to be acetoin reductase (fabG). Analysis of this protein sequence reveals the following:

```
Possible site: 28
>>> Seems to have no N-terminal signal sequence
----- Final Results -----
                            bacterial cytoplasm --- Certainty = 0.1596(Affirmative) < succ>
                              bacterial membrane --- Certainty = 0.0000(Not Clear) < succ>
                                bacterial outside --- Certainty = 0.0000(Not Clear) < succ>
```

[9756] A related GBS nucleic acid sequence <SEQ ID 9631> which encodes amino acid sequence <SEQ ID 9632> was also identified.

[9757] The protein has homology with the following sequences in the GENPEPT database.

| >GP: AAC48769 GB: U71200 acetoin reductase [Bos taurus] | | | |
|---|---|---|---|
| Identities = 162/254 (63%), Positives = 188/254 (73%), Gaps = 2/254 (0%) | | | |
| Query: | 12 | KVAIVTGAGQGIGFAIAKRLHADGFKIGVLDYNEETAQAAVDKLSPED--AVAVVADVSK | 69 |
| | | KVA+VTG QGIG AI L ADGF + V D NE ++ + A+AV DVS | |
| Sbjct: | 4 | KVAMVTGGAQGIGEAIVXXLSADGFAVAVADLNEAKSKXVATDIEKNGGTAIAVKLDVSD | 63 |
| Query: | 70 | RDQVFDAFQKVVDTFGDLNVVVNNAGVAPTTPLDTITEEQFEKAFAINVGGTIWGSQAAQ | 129 |
| | | R+ F A ++V + G +V+VNNAG+ PTTP+DTIT E F+K + INV G IWG QAA | |
| Sbjct: | 64 | REGFFAAVKEVAEKLGGFDVLVNNAGLGPTTPIDTITPELFDKVYHINVAGDIWGIQAAV | 123 |
| Query: | 130 | KHFRELGHGGKIINATSQAGCEGNPNLTVYGGTKFAVRGITQTLAKDLASEGITVNAYAP | 189 |
| | | + F++ G+GGKIINATSQAG GNPNL++Y TKFAVR +T A+DLA + ITVNAYAP | |
| Sbjct: | 124 | EQFKKNGNGGKIINATSQAGVVGNPNLSLYSSTKFAVRCLTPVAARDLAEQNITVNAYAP | 183 |
| Query: | 190 | GIVKTPMMFDIAHEVGKNAGKDDEWGMEQFAKDITLKRLSEPEDVANAVGFLAGDDSNYI | 249 |
| | | GIVKTP FDIAHEVGKNAGKDDEWGM+ FAKDI LKRLSEPEDVA AV FLAG DSNYI | |
| Sbjct: | 184 | GIVKTPXXFDIAHEVGKNAGKDDEWGMQTFAKDIALKRLSEPEDVAAAVAFLAGPDSNYI | 243 |
| Query: | 250 | TGQTIVVDGGMVFH | 263 |
| | | TGQTI VDGGM FH | |
| Sbjct: | 244 | TGQTIEVDGGMQFH | 257 |

[9758] A related DNA sequence was identified in S. pyogenes <SEQ ID 5511> which encodes the amino acid sequence <SEQ ID 5512>. Analysis of this protein sequence reveals the following:

```
Possible site: 50
>>> Seems to have no N-terminal signal sequence
----- Final Results -----
                            bacterial cytoplasm --- Certainty = 0.1131(Affirmative) < succ>
                              bacterial membrane --- Certainty = 0.0000(Not Clear) < succ>
                                bacterial outside --- Certainty = 0.0000(Not Clear) < succ>
```

[9759] An alignment of the GAS and GBS proteins is shown below.

| Identities = 209/213 (98%), Positives = 212/213 (99%) | | | |
|---|---|---|---|
| Query: | 1 | MTKEYEVEDMSKVAIVTGAGQGIGFAIAKRLHADGFKIGVLDYNEETAQAAVDKLSPEDA | 60 |
| | | +TK+YEVEDMSKVAIVTGAGQGIGFAIAKRLHADGFKIG+LDYNEETAQAAVDKLSPEDA | |
| Sbjct: | 1 | LTKKYEVEDMSKVAIVTGAGQGIGFAIAKRLHADGFKIGILDYNEETAQAAVDKLSPEDA | 60 |
| Query: | 61 | VAVVADVSKRDQVFDAFQKVVDTFGDLNVVVNNAGVAPTTPLDTITEEQFEKAFAINVGG | 120 |
| | | VAVVADVSKRDQVFDAFQKVVDTFGDLNVVVNNAGVAPTTPLDTITEEQFEKAFAINVGG | |
| Sbjct: | 61 | VAVVADVSKRDQVFDAFQKVVDTFGDLNVVVNNAGVAPTTPLDTITEEQFEKAFAINVGG | 120 |
| Query: | 121 | TIWGSQAAQKHFRELGHGGKIINATSQAGCEGNPNLTVYGGTKFAVRGITQTLAKDLASE | 180 |
| | | TIWGSQAAQKHFRELGHGGKIINATSQAGCEGNPNLTVYGGTKFAVRGITQTLAKDLASE | |
| Sbjct: | 121 | TIWGSQAAQKHFRELGHGGKIINATSQAGCEGNPNLTVYGGTKFAVRGITQTLAKDLASE | 180 |
| Query: | 181 | GITVNAYAPGIVKTPMMFDIAHEVGKNAGKDDE | 213 |
| | | GITVNAYAPGIVKTPMMF IAHEVGKNAGKDDE | |
| Sbjct: | 181 | GITVNAYAPGIVKTPMMFAIAHEVGKNAGKDDE | 213 |

[9760] Based on this analysis, it was predicted that these proteins and their epitopes could be useful antigens for vaccines or diagnostics.

### EXAMPLE 1773

[9761] A DNA sequence (GBSx1880) was identified in S. agalactiae <SEQ ID 5513> which encodes the amino acid sequence <SEQ ID 5514>. This protein is predicted to be ATP-dependent DNA helicase. Analysis of this protein sequence reveals the following:

```
Possible site: 37
>>> Seems to have no N-terminal signal sequence
----- Final Results -----
                            bacterial cytoplasm --- Certainty = 0.3735(Affirmative) < succ>
                              bacterial membrane --- Certainty = 0.0000(Not Clear) < succ>
                                bacterial outside --- Certainty = 0.000(Not Clear) < succ>
```

[9762] The protein has homology with the following sequences in the GENPEPT database.

| >GP: AAB38451 GB: L47709 22.4% identity with Escherichia coli | | | |
|---|---|---|---|
| DNA-damage inducible protein . . . ; putative [Bacillus subtilis] | | | |
| Identities = 132/461 (28%), Positives = 231/461 (49%), Gaps = 22/461 (4%) | | | |
| Query: | 21 | RKYAVVDLEATGAGPNAS--IIQVGIVIIQGNKIIDSYETDVNPHESLDEHIVHLTGITD | 78 |
| | | +++ V+D+E TG P IIQ+ V+I+ +I + + +NP++S+ I LTGI++ | |
| Sbjct: | 4 | QRFVVIDVETTGNSPKKGDKIIQIAAVVIENGQITERFSKYINPNKSIPAFIEQLTGISN | 63 |
| Query: | 79 | KQLAKAPDFGQVAHHIYQLIEDCIFVAHNVKFDANLLAEQLFLEGCELRTPRI-DTVELS | 137 |
| | | + + F VA ++QL++ FVAHN+ FD + +L G +L + DTVELS | |
| Sbjct: | 64 | QMVENEQPFEAVAEEVFQLLDGAYFVAHNIHFDLGFVKYELHKAGFQLPDCEVLDTVELS | 123 |
| Query: | 138 | QVFYPCLEKYSLGALAESLNIELTDAHTAIADARATAQLFIKLKAKISSLPKEVLETILT | 197 |
| | | ++ +P E Y L L+E L + H A +DA T +F+++ K+ LP L+ + | |
| Sbjct: | 124 | RIVFPGFEGYKLTELSEELQLRHDQPHRADSDAEVTGLIFLEILEKLRQLPYPTLKQLRR | 183 |
| Query: | 198 | FADNLLFESYLLIEEAYQEADFVNPKEYYFWQGLVLKKEKAVGKPKKLSSDFQ------- | 250 |
| | | + + + + L++ E Y + +++ +A+ +F | |
| Sbjct: | 184 | LSQHFISDLTHLLDMFINENRHTEIPGYTRFSSFSVREPEAIDVRINEDENFSFEIESWE | 243 |
| Query: | 251 | ------VNMALLGMDARPKQVVFADLVKAHFNDQTTTFLEAQPGLGKTYGYLLP--LLDQ | 302 |
| | | ++ + G + R Q++ V F ++ +EA PG+GKT GYL+P L + | |
| Sbjct: | 244 | AGNEKALSELMPGYEKRDGQDMMMMREVADAFANREHALIEAPPGIGKTIGYLIPAALFAK | 303 |
| Query: | 303 | SQKQQIIVSVPTKILQDQIMAKEIKHIQELFHIPCHS--IKGPRNYLKLDAFYKSLQVQD | 360 |
| | | K+ +I+S + +LQ QI+ K++ +Q+LF P + +KG +YL L F + L +D | |
| Sbjct: | 304 | KSKKPVIISTYSTLLQQQILTKDLPIVQDLFPFPVTAAILKGQSHYLCLYKFEQVLHEED | 363 |
| Query: | 361 | RNRLINRFKMQLLVWLTETTTGDLDEIKQKQRLESYFDQLKHDGE-VTQSSLFYDLDFWK | 419 |
| | | N K QLLVWLTET TGD+ E+ + +D+L +D + +S + + F++ | |
| Sbjct: | 364 | DNYDAVLTKAQLLVWLTETNTGDVAELNLPSGGKLLWDRLAYDDDSYKRSRSEHVIGFYE | 423 |
| Query: | 420 | RSYDKVAQSQLVIINHAYFL-ERVQDDKDFAKGKVLVFDEA | 459 |
| | | R+ +S LVI NH+ L + K + + DEA | |
| Sbjct: | 424 | RAKQIAMRSDLVITNHSLLLTDEGSHKKRLPESGTFIIDEA | 464 |
| Identities = 63/195 (32%), Positives = 88/195 (44%), Gaps = 16/195 (8%) | | | |
| Query: | 629 | KVWIDTSMPNILDLSPEQYAYEIAKRLQDIMTLKQPT-LVLLTSKQTMFMVSDYLDKWEI | 687 |
| | | +V I M +I D ++ + A+ ++ + KQP LVL TS + V E+ | |
| Sbjct: | 720 | QVMIPKEMKSIQDTGQPEFIQDTARYIELMAKEKQPKILVLFTSHDMLKKVHQ-----EL | 774 |
| Query: | 688 | KH---------LTQD-KNGLAYNVKKRFDRGESNLLLGTGSFWEGVDFVHRDRLIEVITR | 737 |
| | | KH L Q G + K F +LLGT FWEGVDF + +I R | |
| Sbjct: | 775 | KHNMSASGIQLLAQGITGGSPGKLMKTFKTSNQAILLGTNHFWEGVDFPGDELTTVMIVR | 834 |
| Query: | 738 | LPFDTPKDYFIQKLSQSLTKEGKNFFYDYSLPMTVLKLKQALGRTTRREEQKSAVIILDS | 797 |
| | | LPF +P + K+GKN F SLP VL +Q +GR R K +IILD | |
| Sbjct: | 835 | LPFRSPDHPLHAAKCELARKKGKNPFQTVSLPEAVLTFRQGIGRLLRSAGDKGTIIILDR | 894 |
| Query: | 798 | RLVIKSYGQTIMHSL | 812 |
| | | R+ YG+ + +L | |
| Sbjct: | 895 | RIKTAGYGRLFLDAL | 909 |

[9763] A related DNA sequence was identified in S. pyogenes <SEQ ID 5515> which encodes the amino acid sequence <SEQ ID 5516>. Analysis of this protein sequence reveals the following:

```
Possible site: 37
>>> Seems to have no N-terminal signal sequence
----- Final Results -----
                            bacterial cytoplasm --- Certainty = 0.3735(Affirmative) < succ>
                              bacterial membrane --- Certainty = 0.0000(Not Clear) < succ>
                                bacterial outside --- Certainty = 0.0000(Not Clear) < succ>
```

[9764] An alignment of the GAS and GBS proteins is shown below.

| Identities = 500/835 (59%), Positives = 626/835 (74%), Gaps = 2/835 (0%) | | | |
|---|---|---|---|
| Query: | 1 | MFCFIDIACYNRLTMTQKKLRKYAVVDLEATGAGPNASIIQVGIVIIQGNKIIDSYETDV | 60 |
| | | MFCFIDIACYNRLTMTQKKLRKYAVVDLEATGAGPNASIIQVGIVIIQGNKIIDSYETDV | |
| Sbjct: | 1 | MFCFIDIACYNRLTMTQKKLRKYAVVDLEATGAGPNASIIQVGIVIIQGNKIIDSYETDV | 60 |
| Query: | 61 | NPHESLDEHIVHLTGITDKQLAKAPDFGQVAHHIYQLIEDCIFVAHNVKFDANLLAEQLF | 120 |
| | | NPHESLDEHIVHLTGITDKQLAKAPDFGQVAHHIYQLIEDCIFVAHNVKFDANLLAE LF | |
| Sbjct: | 61 | NPHESLDEHIVHLTGITDKQLAKAPDFGQVAHHIYQLIEDCIFVAHNVKFDANLLAEALF | 120 |
| Query: | 121 | LEGCELRTPRIDTVELSQVFYPCLEKYSLGALAESLNIELTDAHTAIADARATAQLFIKL | 180 |
| | | LEG EL PR+DTVEL+Q+F+P EKY+L L+ LNI+L +AHTAIADARATA LF++L | |
| Sbjct: | 121 | LEGYELTIPRVDTVELAQLFFPRFEKYNLSHLSRQLNIDLAEAHTAIADARATAILFLRL | 180 |
| Query: | 181 | KAKISSLPKEVLETILTFADNLLFESYLLIEEAYQEADFVNPKEYYFWQGLVLKKEKAVG | 240 |
| | | KI SLP E LE++L ++D+LLFE+ ++I+E +A +P +Y + ++L K | |
| Sbjct: | 181 | LQKIESLPIECLESLLVYSDSLLFETAMVIQEGLAKAKPYDPNKYIKIRQILLPKGSKAL | 240 |
| Query: | 241 | KPKKLSSDFQVNMALLGMDARPKQVVFADLVKAHFNDQTTTFLEAQPGLGKTYGYLLPLL | 300 |
| | | KP ++S F +NMALLG++ RPKQ FA L+ ++ +F+EAQ G+GKTYGYLLPLL | |
| Sbjct: | 241 | KPYQISKSFPINMALLGLEERPKQTQFAQLIDEDYHQGVASFIEAQTGIGKTYGYLLPLL | 300 |
| Query: | 301 | DQSQKQQIIVSVPTKILQDQIMAKEIKHIQELFHIPCHSIKGPRNYLKLDAFYKSLQVQD | 360 |
| | | + + QIIVSVPTK+LQDQ+MA E+ IQE FHI CHS+KGP NYLKLD+F SL D | |
| Sbjct: | 301 | AKEDQNQIIVSVPTKLLQDQLMAGEVAAIQEQFHIACHSLKGPANYLKLDSFADSLDQND | 360 |
| Query: | 361 | RNRLINRFKMQLLVWLTETTTGDLDEIKQKQRLESYFDQLKHDGEVTQSSLFYDLDFWKR | 420 |
| | | +NRL+NR+KMQLLVWL ET TGDLDEIKQKQR +YF+QLKHDG++ QSS FYD DFW+ | |
| Sbjct: | 361 | QNRLVNRYKMQLLVWLLETKTGDLDEIKQKQRFAAYFEQLKHDGDIKQSSEFYDYDFWRV | 420 |
| Query: | 421 | SYDKVAQSQLVIINHAYFLERVQDDKDFAKGKVLVFDEAQKLVLGLENFSRGQLDISHQL | 480 |
| | | SY+K ++L+I NHAYFL RVQDDKDFA+ KVLVFDEAQKL+L L+ SR QL+++ L | |
| Sbjct: | 421 | SYEKAKTARLLITNHAYFLHRVQDDKDFARNKVLVFDEAQKLMLQLDQLSRHQLNLTVFL | 480 |
| Query: | 481 | QVIQKIIDSSIPLLQKRLLESISYELSHAVELFYRHNSFEFSETWLKRLKNSINALEVVG | 540 |
| | | Q IQ + + +PLL+KRLLES+S+EL +Y++ + + W R+ L | |
| Sbjct: | 481 | QTIQAKLSNPLPLLEKRLLESLSFELGQVSSDYYQNKEHQLAHDW-SRIAGYAKELTGAD | 539 |
| Query: | 541 | LDELQTFFTATYTNYWFETDKVNEKRLTILRGAREDFLKFSKFLPPTKKTYMISATLQIS | 600 |
| | | ELQ FF + +YW ++K EKR+T L A + F+ F + LP T KTY +SATL IS | |
| Sbjct: | 540 | YQELQAFFATSDGDYWLSSEKQEEKRVTYLNSASKAFIHFQQLLPETVKTYFVSATLTIS | 599 |
| Query: | 601 | PKVYLSDLLGGFSSISTEKIAHEKNANQKVWIDTSMPNILDLSPEQYAYEIAKRLQDIMT | 660 |
| | | +V L+DLL GF I +K +Q V +D P + ++S + Y IAKR++ + | |
| Sbjct: | 600 | SEVTLADLL-GFEEYLYHVIEKDKKQDQLVLVDQEAPIVTEVSDQIYVEAIAKRIESLKQ | 658 |
| Query: | 661 | LKQPTLVLLTSKQTMFMVSDYLDKWEIKHLTQDKNGLAYNVKKRFDRGESNLLLGTGSFW | 720 |
| | | P LVL SK+ + +VSDYLD+W++ HL Q+KNG AYN+KKRFD+GE +LLG GSFW | |
| Sbjct: | 659 | EGYPILVLFNSKKHLLLVSDYLDQWQVPHLAQEKNGTAYNIKKRFDQGEQTILLGLGSFW | 718 |
| Query: | 721 | EGVDFVHRDRLIEVITRLPFDTPKDYFIQKLSQSLTKEGKNFFYDYSLPMTVLKLKQALG | 780 |
| | | EGVDF+ DR+I +I RLPFD P+D+F++K+S L ++GKN F DY LPMT+L+LKQA+G | |
| Sbjct: | 719 | EGVDFIQADRMITLIARLPFDNPEDFFVKKMSHYLLEKGKNPFRDYFLPMTILRLKQAIG | 778 |
| Query: | 781 | RTTRREEQKSAVIILDSRLVIKSYGQTIMHSLGRDFEISKEKINKVLTEMAKFLI | 835 |
| | | RT RR++QKS VIILD RL+ KSYGQ I+ LG++F IS++ + L E FLI | |
| Sbjct: | 779 | RTMRRQDQKSVVIILDRRLLTKSYGQVILEGLGQEFLISQQNFHDCLVETDCFLI | 833 |

[9765] Based on this analysis, it was predicted that these proteins and their epitopes could be useful antigens for vaccines or diagnostics.

### EXAMPLE 1774

[9766] A DNA sequence (GBSx1881) was identified in S. agalactiae <SEQ ID 5517> which encodes the amino acid sequence <SEQ ID 5518>. Analysis of this protein sequence reveals the following:

```
Possible site: 27
>>> Seems to have no N-terminal signal sequence
----- Final Results -----
                            bacterial cytoplasm --- Certainty = 0.2042(Affirmative) < succ>
                              bacterial membrane --- Certainty = 0.0000(Not Clear) < succ>
                                bacterial outside --- Certainty = 0.0000(Not Clear) < succ>
```

[9767] A related GBS nucleic acid sequence <SEQ ID 9633> which encodes amino acid sequence <SEQ ID 9634> was also identified.

[9768] The protein has homology with the following sequences in the GENPEPT database.

| >GP: AAF12702 GB: AF035157 aspartate aminotransferase [Lactococcus | | | |
|---|---|---|---|
| lactis] | | | |
| Identities = 270/391 (69%), Positives = 314/391 (80%) | | | |
| Query: | 7 | MTYLSERVLNMEESVTLAAGAKARELRVQGRDILSLTLGEPDFATPKNIQQAAIEAITDG | 66 |
| | | M S+ VL M+ESVTLAA +A+ L+ QGRDI+ LTLG+PDF TPK I QAAIEAI +G | |
| Sbjct: | 1 | MKKCSDFVLKMDESVTLAAANRAKALKAQGRDIIDLTLGQPDFPTPKKIGQAAIEAINNG | 60 |
| Query: | 67 | RASFYTPSSGLPELKSAINAYFERFYGYSLKPNQVVVGTGAKFILYTFFMTVLNPGDEVI | 126 |
| | | +ASFYT + GLPELK A+ Y+ RFY Y ++ N++++ GAKF LY +FM ++P DEVI | |
| Sbjct: | 61 | QASFYTQAGGLPELKKAVQHYWTRFYAYEIQTNEILITAGAKFALYAYFMATVDPLDEVI | 120 |
| Query: | 127 | IPTPYWVSYADQIKMAEGKPVFVTAKEVNHFKVTVEQLEAVRTDKTKVILLNSPSNPTGM | 186 |
| | | IP PYWVSY DQ+KMA G PV V AK+ N+FKVTVEQLE RT KTK++LLNSPSNPTGM | |
| Sbjct: | 121 | IPAPYWVSYVDQVKMAGGNPVIVEAKQENNFKVTVEQLEKARTSKTKILLLNSPSNPTGM | 180 |
| Query: | 187 | IYKAEELEAIGNWAVEHDILILADDIYGRLVYNGNIFTPISSLSESIRNQTIVINGVSKT | 246 |
| | | IY EEL AIG WAV HD+LILADDIY RLVYNG FT ISSLS+ IRN+T VINGVSKT | |
| Sbjct: | 181 | IYSKEELTAIGEWAVAHDLLILADDIYHRLVYNGAEFTAISSLSDEIRNRTTVINGVSKT | 240 |
| Query: | 247 | YAMTGWRVGFAVGNHDIIAAMSKVVSQTTSNLTAVSQYATIEALNGSQESFEKMRLAFEE | 306 |
| | | +AMTGWR+G AVG+ +IIAAM+K+ SQTTSN TAV+QYA IEA + +SFEKM AFEE | |
| Sbjct: | 241 | FAMTGWRIGLAVGDPEIIAAMTKIASQTTSNPTAVAQYAAIEAFEENDKSFEKMHAAFEE | 300 |
| Query: | 307 | RLNIIYPLLCQVPGFEVVKPQGAFYLFPNVTKAMEMKGYTDVTAFTDAILEEVGLALVTG | 366 |
| | | RLN IY L +VPGFE+VKP GAFYLFP VTKAM MKGYTDVT FT AILEE G+ALVTG | |
| Sbjct: | 301 | RLNKIYLQLSEVPGFELVKPNGAFYLFPKVTKAMAMKGYTDVTDFTTAILEEAGVALVTG | 360 |
| Query: | 367 | AGFGAPENVRLSYATDLETLKEAVRRLHVFM | 397 |
| | | AGFG+PENVRLSYAT LETL+ AV RL +M | |
| Sbjct: | 361 | AGFGSPENVRLSYATSLETLEAAVTRLKDWM | 391 |

[9769] A related DNA sequence was identified in S. pyogenes <SEQ ID 1005> which encodes the amino acid sequence <SEQ ID 1006>. Analysis of this protein sequence reveals the following:

| Possible site: 30 | | | | |
|---|---|---|---|---|
| >>> Seems to have no N-terminal signal sequence | | | | |
| | INTEGRAL | Likelihood = −0.48 | Transmembrane | 95-111 (95-113) |

```
----- Final Results -----
                              bacterial membrane --- Certainty = 0.1192(Affirmative) < succ>
                                bacterial outside --- Certainty = 0.0000(Not Clear) < succ>
                            bacterial cytoplasm --- Certainty = 0.0000(Not Clear) < succ>
```

[9770] An alignment of the GAS and GBS proteins is shown below.

| Identities = 301/397 (75%), Positives = 343/397 (85%) | | | |
|---|---|---|---|
| Query: | 7 | MTYLSERVLNMEESVTLAAGAKARELRVQGRDILSLTLGEPDFATPKNIQQAAIEAITDG | 66 |
| | | M LS+RVL M+ESVTLAAGA+A+ L+ QGRD+L+LTLGEPDF TPK+IQ AIE+I +G | |
| Sbjct: | 1 | MPKLSKRVLEMKESVTLAAGARAKALKAQGRDVLNLTLGEPDFFTPKHIQDKAIESIQNG | 60 |
| Query: | 67 | RASFYTPSSGLPELKSAINAYFERFYGYSLKPNQVVVGTGAKFILYTFFMTVLNPGDEVI | 126 |
| | | ASFYT +SGLPELK+AI Y + YGY L P+Q+V GTGAKFILY FFM VLNPGD+V+ | |
| Sbjct: | 61 | TASFYTNASGLPELKAAIATYLKNQYGYHLSPDQIVAGTGAKFILYAFFMAVLNPGDQVL | 120 |
| Query: | 127 | IPTPYWVSYADQIKMAEGKPVFVTAKEVNHFKVTVEQLEAVRTDKTKVILLNSPSNPTGM | 186 |
| | | IPTPYWVSY+DQ+KMAEG+P+FV E N FKVTV+QLE RT KTKV+L+NSPSNPTGM | |
| Sbjct: | 121 | IPTPYWVSYSDQVKMAEGQPIFVQGLEENQFKVTVDQLERARTSKTKVVLINSPSNPTGM | 180 |
| Query: | 187 | IYKAEELEAIGNWAVEHDILILADDIYGRLVYNGNIFTPISSLSESIRNQTIVINGVSKT | 246 |
| | | IY AEEL AIG WAV +DILILADDIYG LVYNGN F PIS+LSE+IR QTI +NGV+K+ | |
| Sbjct: | 181 | IYGAEELRAIGEWAVHNDILILADDIYGSLVYNGNQFVPISTLSEAIRRQTITVNGVAKS | 240 |
| Query: | 247 | YAMTGWRVGFAVGNHDIIAAMSKVVSQTTSNLTAVSQYATIEALNGSQESFEKMRLAFEE | 306 |
| | | YAMTGWRVGFA G +II+AMSK++ QTTSNLT VSQYA IEA GSQ S E+MRLAFEE | |
| Sbjct: | 241 | YAMTGWRVGFAAGEPEIISAMSKIIGQTTSNLTTVSQYAAIEAFCGSQSSLEEMRLAFEE | 300 |
| Query: | 307 | RLNIIYPLLCQVPGFEVVKPQGAFYLFPNVTKAMEMKGYTDVTAFTDAILEEVGLALVTG | 366 |
| | | RLNI YPLLCQVPGFEVVKPQGAFY FPNV KAMEM G++DVT+F +AILEEVGLA+V+G | |
| Sbjct: | 301 | RLNITYPLLCQVPGFEVVKPQGAFYFFPNVKKAMEMTGFSDVTSFANAILEEVGLAVVSG | 360 |
| Query: | 367 | AGFGAPENVRLSYATDLETLKEAVRRLHVFMGSNEIN | 403 |
| | | AGFGAPENVRLSYATD+ETLKEAVRRLHVFM SNEIN | |
| Sbjct: | 361 | AGFGAPENVRLSYATDIETLKEAVRRLHVFMESNEIN | 397 |

[9771] Based on this analysis, it was predicted that these proteins and their epitopes could be useful antigens for vaccines or diagnostics.

### EXAMPLE 1775

[9772] A DNA sequence (GBSx1882) was identified in S. agalactiae <SEQ ID 5519> which encodes the amino acid sequence <SEQ ID 5520>. This protein is predicted to be asparaginyl-tRNA synthetase (asnS). Analysis of this protein sequence reveals the following:

```
Possible site: 46
>>> Seems to have no N-terminal signal sequence
----- Final Results -----
                            bacterial cytoplasm --- Certainty = 0.1488(Affirmative) < succ>
                              bacterial membrane --- Certainty = 0.0000(Not Clear) < succ>
                                bacterial outside --- Certainty = 0.0000(Not Clear) < succ>
```

[9773] The protein has homology with the following sequences in the GENPEPT database.

| >GP: BAB05415 GB: AP001512 asparaginyl-tRNA synthetase | | | |
|---|---|---|---|
| [Bacillus halodurans] | | | |
| Identities = 252/442 (57%), Positives = 316/442 (71%), Gaps = 15/442 (3%) | | | |
| Query: | 7 | SIVDVKDYVGQEVTIGAWVANKSGKGKIAFVQLRDGSAFFQGVAFKPNFIEKYGEESGLE | 66 |
| | | +I + YV QEVT+GAW+ANK GKIAF+QLRDG+ F QGV K E G E | |
| Sbjct: | 4 | TIAKIGQYVDQEVTLGAWLANKRSSGKIAFLQLRDGTGFIQGVVVKA--------EVGDE | 55 |
| Query: | 67 | KFDVIKRLNQETSVYVTGIVKEDERSKFGYELDITDLEVIGESHEYPITPKEHGTDFLMD | 126 |
| | | F K L QE+S+YVTGIV++DER+ GYEL +T ++I E+ +YPITPKEHGT+FLMD | |
| Sbjct: | 56 | WFQKAKNLTQESSLYVTGIVRKDERAPSGYELTVTSFDIIHEATDYPITPKEHGTEFLMD | 115 |
| Query: | 127 | NRHLWLRSRKQMAVMQIRNAIIYSTYEFFDQNGFIKFDSPILSENAAEDSTELFETDYFG | 186 |
| | | +RHLW+RSRKQ AV++IRN II +TYEFF +NGF+K D PIL+ +A E +TELF T YF | |
| Sbjct: | 116 | HRHLWIRSRKQHAVLRIRNEIIRATYEFFHENGFVKVDPPILTGSAPEGTTELFHTKYFD | 175 |
| Query: | 187 | KPAFLSQSGQLYLEAGAMALGRVFDFGPVFRAEKSKTRRHLTEFWMMDAEYSFLSHEESL | 246 |
| | | + AFLSQSGQLY+EA A+A GRVF FGP FRAEKSKTRRHL EFWM++ E +F+ EESL | |
| Sbjct: | 176 | EDAFLSQSGQLYMEAAALAFGRVFSFGPTFRAEKSKTRRHLIEFWMIEPEMAFVEFEESL | 235 |
| Query: | 247 | DLQEAYVKALIQGVLDRAPQALDILERDVEALKRYIAEPFKRVSYDDAITLLQEHEADED | 306 |
| | | ++QE YV ++Q VL L L RD L+ I PF R+SYDDAI L E D+ | |
| Sbjct: | 236 | EIQENYVAYIVQSVLKHCAIELKTLGRDTSVLES-IQAPFPRISYDDAIKFLHEKGFDD- | 293 |
| Query: | 307 | TDYEHLEHGDDFGSPHETWISNYFGVPTFVVNYPASFKAFYMKPVPGNPERVLCADLLAP | 366 |
| | | +E GDDFG+PHET I+ +F P F+ +YP S K FYM+P P + VLCADL+AP | |
| Sbjct: | 294 | -----IEWGDDFGAPHETAIAEHFDKPVFITHYPTSLKPFYMEPDPNRDDVVLCADLIAP | 348 |
| Query: | 367 | EGYGEIIGGSMREDDYDALVAKMDELGMDKSEYDFYLDLRKYGSVPHGGFGIGIERMVTF | 426 |
| | | EGYGEIIGGS R DYD L +++E + Y +YLDLRKYGSVPH GFG+G+ER V + | |
| Sbjct: | 349 | EGYGEIIGGSQRISDYDLLKKRLEEHDLSLDAYAWYLDLRKYGSVPHSGFGLGLERTVGW | 408 |
| Query: | 427 | VAGTKHIREAIPFPRMLHRIKP | 448 |
| | | ++G H+RE IPFPR+L+R+ P | |
| Sbjct: | 409 | ISGAGHVRETIPFPRLLNRLYP | 430 |

[9774] A related DNA sequence was identified in S. pyogenes <SEQ ID 5521> which encodes the amino acid sequence <SEQ ID 5522>. Analysis of this protein sequence reveals the following:

```
Possible site: 46
>>> Seems to have no N-terminal signal sequence
----- Final Results -----
                            bacterial cytoplasm --- Certainty = 0.1488(Affirmative) < succ>
                              bacterial membrane --- Certainty = 0.0000(Not Clear) < succ>
                                bacterial outside --- Certainty = 0.0000(Not Clear) < succ>
```

[9775] An alignment of the GAS and GBS proteins is shown below.

| Identities = 443/448 (98%), Positives = 447/448 (98%) | | | |
|---|---|---|---|
| Query: | 1 | MSKKLISIVDVKDYVGQEVTIGAWVANKSGKGKIAFVQLRDGSAFFQGVAFKPNFIEKYG | 60 |
| | | MSKKLISIVDVKDYVGQEVTIGAWVANKSGKGKIAFVQLRDGSAFFQGVAFKPNFIEKYG | |
| Sbjct: | 1 | MSKKLISIVDVKDYVGQEVTIGAWVANKSGKGKIAFVQLRDGSAFFQGVAFKPNFIEKYG | 60 |
| Query: | 61 | EESGLEKFDVIKRLNQETSVYVTGIVKEDERSKFGYELDITDLEVIGESHEYPITPKEHG | 120 |
| | | EESGLEKFDVIKRLNQETSVYVTGIVKEDERSKFGYELDITDLE+IGESHEYPITPKEHG | |
| Sbjct: | 61 | EESGLEKFDVIKRLNQETSVYVTGIVKEDERSKFGYELDITDLEIIGESHEYPITPKEHG | 120 |
| Query: | 121 | TDFLMDNRHLWLRSRKQMAVMQIRNAIIYSTYEFFDQNGFIKFDSPILSENAAEDSTELF | 180 |
| | | TDFLMDNRHLWLRSRKQMAVMQIRNAIIY+TYEFFDQNGFIKFDSPILSENAAEDSTELF | |
| Sbjct: | 121 | TDFLMDNRHLWLRSRKQMAVMQIRNAIIYATYEFFDQNGFIKFDSPILSENAAEDSTELF | 180 |
| Query: | 181 | ETDYFGKPAFLSQSGQLYLEAGAMALGRVFDFGPVFRAEKSKTRRHLTEFWMMDAEYSFL | 240 |
| | | ETDYFGKPAFLSQSGQLYLEAGAMALGRVFDFGPVFRAEKSKTRRHLTEFWMMDAEYSFL | |
| Sbjct: | 181 | ETDYFGKPAFLSQSGQLYLEAGAMALGRVFDFGPVFRAEKSKTRRHLTEFWMMDAEYSFL | 240 |
| Query: | 241 | SHEESLDLQEAYVKALIQGVLDRAPQALDILERDVEALKRYIAEPFKRVSYDDAITLLQE | 300 |
| | | SHEESLDLQEAYVKALIQGVLDRAPQALDILERDVEALKRYI EPFKRVSYDDAITLLQE | |
| Sbjct: | 241 | SHEESLDLQEAYVKALIQGVLDRAPQALDILERDVEALKRYITEPFKRVSYDDAITLLQE | 300 |
| Query: | 301 | HEADEDTDYEHLEHGDDFGSPHETWISNYFGVPTFVVNYPASFKAFYMKPVPGNPERVLC | 360 |
| | | HEADEDTDYEHLEHGDDFGSPHETWISNYFGVPTFVVNYPASFKAFYMKPVPGNPERVLC | |
| Sbjct: | 301 | HEADEDTDYEHLEHGDDFGSPHETWISNYFGVPTFVVNYPASFKAFYMKPVPGNPERVLC | 360 |
| Query: | 361 | ADLLAPEGYGEIIGGSMREDDYDALVAKMDELGMDKSEYDFYLDLRKYGSVPHGGFGIGI | 420 |
| | | ADLLAPEGYGEIIGGSMRED+YDALVAKMDELGMDKSEYDFYLDLRKYGSVPHGGFGIGI | |
| Sbjct: | 361 | ADLLAPEGYGEIIGGSMREDNYDALVAKMDELGMDKSEYDFYLDLRKYGSVPHGGFGIGI | 420 |
| Query: | 421 | ERMVTFVAGTKHIREAIPFPRMLHRIKP | 448 |
| | | ERMVTFVAGTKHIREAIPFPRMLHRI+P | |
| Sbjct: | 421 | ERMVTFVAGTKHIREAIPFPRMLHRIRP | 448 |

[9776] Based on this analysis, it was predicted that these proteins and their epitopes could be useful antigens for vaccines or diagnostics.

### EXAMPLE 1776

[9777] A DNA sequence (GBSx1883) was identified in S. agalactiae <SEQ ID 5523> which encodes the amino acid sequence <SEQ ID 5524>. Analysis of this protein sequence reveals the following:

| Possible site: 17 | | | | |
|---|---|---|---|---|
| >>> Seems to have a cleavable N-term signal seq. | | | | |
| | INTEGRAL | Likelihood = −6.85 | Transmembrane | 103-119 (102-127) |
| | INTEGRAL | Likelihood = −5.04 | Transmembrane | 73-89 (68-93) |
| | INTEGRAL | Likelihood = −4.19 | Transmembrane | 31-47 (31-49) |
| | INTEGRAL | Likelihood = −1.86 | Transmembrane | 157-173 (157-173) |

```
----- Final Results -----
                              bacterial membrane --- Certainty = 0.3739(Affirmative) < succ>
                                bacterial outside --- Certainty = 0.0000(Not Clear) < succ>
                            bacterial cytoplasm --- Certainty = 0.0000(Not Clear) < succ>
```

[9778] The protein has homology with the following sequences in the GENPEPT database.

| >GP: AAD40355 GB: AF036485 hypothetical protein [Plasmid pNZ4000] | | | |
|---|---|---|---|
| Identities = 39/135 (28%), Positives = 72/135 (52%), Gaps = 4/135 (2%) | | | |
| Query: | 3 | KSPARLISFISIAIAINLVGANLALFLRLPIYLDTIGTLLIAVILGPWYAASTAFLSALI | 62 |
| | | K A ++ I A+ IN V LA L+LP++L ++GT L +++ GP A + F++ +I | |
| Sbjct: | 15 | KLSAATMTLIPAAVGINYVAKALAEGLKLPVWLGSLGTFLASMLAGPVAGAISGFINNVI | 74 |
| Query: | 63 | NWMTTDIFSLYYSPVAIVVAIITGILIKRNCKPSS--LLWKSLIISLPGTIIASVITVIL | 120 |
| | | +T S Y+ +I + I G+L S+ + ++II++ +I++ + VI | |
| Sbjct: | 75 | YGLTLSPISTVYAITSIGIGIAVGVLHANGWFSSARRVFVSAIIIAIVSAVISTPLNVIF | 134 |
| Query: | 121 | FKGIT--SSGSSIIA | 133 |
| | | + G T + G S+ A | |
| Sbjct: | 135 | WGGQTGIAWGDSLFA | 149 |

[9779] No corresponding DNA sequence was identified in S. pyogenes.

[9780] Based on this analysis, it was predicted that this protein and its epitopes, could be useful antigens for vaccines or diagnostics.

### EXAMPLE 1777

[9781] A DNA sequence (GBSx1884) was identified in S. agalactiae <SEQ ID 5525> which encodes the amino acid sequence <SEQ ID 5526>. Analysis of this protein sequence reveals the following:

```
Possible site: 25
>>> Seems to have no N-terminal signal sequence
----- Final Results -----
                            bacterial cytoplasm --- Certainty = 0.1873(Affirmative) < succ>
                              bacterial membrane --- Certainty = 0.0000(Not Clear) < succ>
                                bacterial outside --- Certainty = 0.0000(Not Clear) < succ>
```

[9782] The protein has homology with the following sequences in the GENPEPT database.

| >GP: AAC75223 GB: AE000305 orf, hypothetical protein [Escherichia coli K12] | | | |
|---|---|---|---|
| Identities = 97/305 (31%), Positives = 160/305 (51%), Gaps = 10/305 (3%) | | | |
| Query: | 1 | MNKEKIIIDCDPGIDDTLALMYAIQHPKLEVVAITITAGNSPVELGLKNTFVTLELLNRH | 60 |
| | | M K KII+DCDPG DD +A+M A +HP ++++ ITI AGN ++ L N + L | |
| Sbjct: | 1 | MEKRKIILDCDPGHDDAIAIMMAAKHPAIDLLGITIVAGNQTLDKTLINGLNVCQKL-EI | 59 |
| Query: | 61 | DIPVYVGDNLPLQREFVSAQDTHGMDGLGENNFTLAQPIIFQEESADC---FLANYFEHK | 117 |
| | | ++PVY G P+ R+ + A + HG GL F +P+ Q ES + | |
| Sbjct: | 60 | NVPVYAGMPQPIMRQQIVADNIHGETGLDGPVF---EPLTRQAESTHAVKYIIDTLMASD | 116 |
| Query: | 118 | NDTSIIALGPLTNIARALQTNPKLGKHCKRFISMGGSFKSHGNCSPVAEYNYWCDPHAAQ | 177 |
| | | D +++ +GPL+NIA A++ P + + + MGG++ + GN +P AE+N + DP AA+ | |
| Sbjct: | 117 | GDITLVPVGPLSNIAVAMRMQPAILPKIREIVLMGGAYGT-GNFTPSAEFNIFADPEAAR | 175 |
| Query: | 178 | YVFENLDKKIEMVGLDITRHIVLTPNHLSYMERINPDVSSFIQKITKFYFDFHWQYEHII | 237 |
| | | VF + + M+GLD+T V TP+ ++ MER I F ++ + | |
| Sbjct: | 176 | VVFTS-GVPLVMMGLDLTNQTVCTPDVIARMERAGGPAGELFSDIMNFTLKTQFENYGLA | 234 |
| Query: | 238 | GCVINDPLAIAYFVNENIATGFDSYTDVACH-GIAMGQTIVDQYHFYKKDANSKILTSVN | 296 |
| | | G ++D I Y +N + + Y +V + G G+T+ D+ K AN+K+ +++ | |
| Sbjct: | 235 | GGPVHDATCIGYLINPDGIKTQEMYVEVDVNSGPCYGRTVCDELGVLGKPANTKVGITID | 294 |
| Query: | 297 | TNLFW | 301 |
| | | T+ FW | |
| Sbjct: | 295 | TDWFW | 299 |

[9783] No corresponding DNA sequence was identified in S. pyogenes.

[9784] Based on this analysis, it was predicted that this protein and its epitopes, could be useful antigens for vaccines or diagnostics.

### EXAMPLE 1778

[9785] A DNA sequence (GBSx1885) was identified in S. agalactiae <SEQ ID 5527> which encodes the amino acid sequence <SEQ ID 5528>. Analysis of this protein sequence reveals the following:

```
Possible site: 53
>>> Seems to have no N-terminal signal sequence
----- Final Results -----
                            bacterial cytoplasm --- Certainty = 0.1860(Affirmative) < succ>
                              bacterial membrane --- Certainty = 0.0000(Not Clear) < succ>
                                bacterial outside --- Certainty = 0.0000(Not Clear) < succ>
```

[9786] The protein has homology with the following sequences in the GENPEPT database.

| >GP: CAB62728 GB: AL133423 hypothetical protein SC4A7.24c | | | |
|---|---|---|---|
| [Streptomyces coelicolor A3(2)] | | | |
| Identities = 36/134 (26%), Positives = 57/134 (41%), Gaps = 7/134 (5%) | | | |
| Query: | 1 | MLYEVTSSNTQGVDGKVYLSNGKIVETNHPLNHL----PGFNPEELIALAWSTCLNATIK | 56 |
| | | +LY ++ G DG+V +G++ +P + G NPE+L A +S C + | |
| Sbjct: | 8 | VLYTAVATAENGRDGRVATDDGRLDVVVNPPKEMGGNGAGTNPEQLFAAGYSACFQGALG | 67 |
| Query: | 57 | AILEQKGFKDLKSRVDVTCQLMKERQVGKGFYFQVNAVASIEKLSLSDSKLIVNKAHSRC | 116 |
| | | + Q+G S V + K GF V A I + + ++ +V KAH C | |
| Sbjct: | 68 | VVARQEGADISGSTVTAKVGIGKNDD---GFGIIVEISAEIPTVDAATARSLVEKAHQVC | 124 |
| Query: | 117 | PISKLISNAKTINL | 130 |
| | | P SK T+ L | |
| Sbjct: | 125 | PYSKATRGNITVTL | 138 |

[9787] No corresponding DNA sequence was identified in S. pyogenes.

[9788] Based on this analysis, it was predicted that this protein and its epitopes, could be useful antigens for vaccines or diagnostics.

### EXAMPLE 1779

[9789] A DNA sequence (GBSx1886) was identified in S. agalactiae <SEQ ID 5529> which encodes the amino acid sequence <SEQ ID 5530>. Analysis of this protein sequence reveals the following:

```
Possible site: 61
>>> Seems to have no N-terminal signal sequence
----- Final Results -----
                            bacterial cytoplasm --- Certainty = 0.0531(Affirmative) < succ>
                              bacterial membrane --- Certainty = 0.0000(Not Clear) < succ>
                                bacterial outside --- Certainty = 0.0000(Not Clear) < succ>
```

[9790] A related GBS nucleic acid sequence <SEQ ID 9635> which encodes amino acid sequence <SEQ ID 9636> was also identified.

[9791] The protein has homology with the following sequences in the GENPEPT database.

| >GP: CAB15482 GB: Z99121 similar to hypothetical proteins | | | |
|---|---|---|---|
| [Bacillus subtilis] | | | |
| Identities = 164/285 (57%), Positives = 207/285 (72%), Gaps = 2/285 (0%) | | | |
| Query: | 6 | IKLVIVTGMSGAGKTVAIQSFEDLGYFTIDNMPPTLVPKFLELAAQSGDT-SKIAMVVDM | 64 |
| | | I+LVI+TGMSGAGKTVAIQSFEDLGYF +DN+PP+L+PKFLEL +S SK+A+V+D+ | |
| Sbjct: | 9 | IQLVIITGMSGAGKTVAIQSFEDLGYFCVDNLPPSLLPKFLELMKESNSKMSKVALVMDL | 68 |
| Query: | 65 | RSRLFFREINSILDSLEINDNINFKILFLDATDTELVSRYKETRRSHPLAADGRVLDGIS | 124 |
| | | R R FF + LD + N I +ILFLDA D+ LV+RYKETRRSHPLAA G L+GI+ | |
| Sbjct: | 69 | RGREFFDRLIEALDEMAENPWITPRILFLDAKDSILVTRYKETRRSHPLAATGLPLEGIA | 128 |
| Query: | 125 | LERELLAPLKSMSQNVVDTSELTPRQLRKVISKEFSNQDSQSSFRIEVMSFGFKYGIPLD | 184 |
| | | LERELL LK SQ + DTS++ PR LR+ I K F+ ++ F + VMSFGFKYGIP+D | |
| Sbjct: | 129 | LERELLEELKGRSQIIYDTSDMKPRDLREKIVKHFATNQGET-FTVNVMSFGFKYGIPID | 187 |
| Query: | 185 | ADLVFDVRFLPNPYYKPELRDKTGLDTEVYDYVMSFDESDDFYDHLLALIKPILPGYQNE | 244 |
| | | ADLVFDVRFLPNPYY +R TG D EV YVM ++E+ F + L+ L+ +LP Y+ E | |
| Sbjct: | 188 | ADLVFDVRFLPNPYYIESMRPLTGKDKEVSSYVMKWNETQKFNEKLIDLLSFMLPSYKRE | 247 |
| Query: | 245 | GKSVLTVAIGCTGGQHRSTAFAHRLSEDLKADWTVNESHRDKNKR | 289 |
| | | GKS + +AIGCTGGQHRS A L++ K D+ + +HRD KR | |
| Sbjct: | 248 | GKSQVVIAIGCTGGQHRSVTLAENLADYFKKDYYTHVTHRDIEKR | 292 |

[9792] A related DNA sequence was identified in S. pyogenes <SEQ ID 5531> which encodes the amino acid sequence <SEQ ID 5532>. Analysis of this protein sequence reveals the following:

```
Possible site: 20
>>> Seems to have an uncleavable N-term signal seq
----- Final Results -----
                              bacterial membrane --- Certainty = 0.0000(Not Clear) < succ>
                                bacterial outside --- Certainty = 0.0000(Not Clear) < succ>
                            bacterial cytoplasm --- Certainty = 0.0000(Not Clear) < succ>
```

[9793] The protein has homology with the following sequences in the databases:

| >GP: CAB15482 GB: Z99121 similar to hypothetical proteins | | | |
|---|---|---|---|
| [Bacillus subtilis] | | | |
| Identities = 164/291 (56%), Positives = 213/291 (72%), Gaps = 3/291 (1%) | | | |
| Query: | 1 | MSDKH-INLVIVTGMSGAGKTVAIQSFEDLGYFTIDNMPPALVPKFLELIEQTNENR-RV | 58 |
| | | +S+ H I LVI+TGMSGAGKTVAIQSFEDLGYF +DN+PP+L+PKFLEL++++N +V | |
| Sbjct: | 3 | VSESHDIQLVIITGMSGAGKTVAIQSFEDLGYFCVDNLPPSLLPKFLELMKESNSKMSKV | 62 |
| Query: | 59 | ALVVDMRSRLFFKEINSTLDSIESNPSIDFRILFLDATDGELVSRYKETRRSHPLAADGR | 118 |
| | | ALV+D+R R FF + LD + NP I RILFLDA D LV+RYKETRRSHPLAA G | |
| Sbjct: | 63 | ALVMDLRGREFFDRLIEALDEMAENPWITPRILFLDAKDSILVTRYKETRRSHPLAATGL | 122 |
| Query: | 119 | VLDGIRLERELLSPLKSMSQHVVDTTKLTPRQLRKTISDQFSEGSNQASFRIEVMSFGFK | 178 |
| | | L+GI LERELL LK SQ + DT+ + PR LR+ I F+ + +F + VMSFGFK | |
| Sbjct: | 123 | PLEGIALERELLEELKGRSQIIYDTSDMKPRDLREKIVKHFATNQGE-TFTVNVMSFGFK | 181 |
| Query: | 179 | YGLPLDADLVFDVRFLPNPYYQVELREKTGLDEDVFNYVMSHPESEVFYKHLLNLIVPIL | 238 |
| | | YG+P+DADLVFDVRFLPNPYY +R TG D++V +YVM E++ F + L++L+ +L | |
| Sbjct: | 182 | YGIPIDADLVFDVRFLPNPYYIESMRPLTGKDKEVSSYVMKWNETQKFNEKLIDLLSFML | 241 |
| Query: | 239 | PAYQKEGKSVLTVAIGCTGGQHRSVAFAHCLAESLATDWSVNESHRDQNRR | 289 |
| | | P+Y++EGKS + +AIGCTGGQHRSV A LA+ D+ + +HRD +R | |
| Sbjct: | 242 | PSYKREGKSQVVIAIGCTGGQHRSVTLAENLADYFKKDYYTHVTHRDIEKR | 292 |

[9794] An alignment of the GAS and GBS proteins is shown below.

| Identities = 234/296 (79%), Positives = 263/296 (88%) | | | |
|---|---|---|---|
| Query: | 1 | MSDEQIKLVIVTGMSGAGKTVAIQSFEDLGYFTIDNMPPTLVPKFLELAAQSGDTSKIAM | 60 |
| | | MSD+ I LVIVTGMSGAGKTVAIQSFEDLGYFTIDNMPP LVPKFLEL Q+ + ++A+ | |
| Sbjct: | 1 | MSDKHINLVIVTGMSGAGKTVAIQSFEDLGYFTIDNMPPALVPKFLELIEQTNENRRVAL | 60 |
| Query: | 61 | VVDMRSRLFFREINSILDSLEINDNINFKILFLDATDTELVSRYKETRRSHPLAADGRVL | 120 |
| | | VVDMRSRLFF+EINS LDS+E N +I+F+ILFLDATD ELVSRYKETRRSHPLAADGRVL | |
| Sbjct: | 61 | VVDMRSRLFFKEINSTLDSIESNPSIDFRILFLDATDGELVSRYKETRRSHPLAADGRVL | 120 |
| Query: | 121 | DGISLERELLAPLKSMSQNVVDTSELTPRQLRKVISKEFSNQDSQSSFRIEVMSFGFKYG | 180 |
| | | DGI LERELL+PLKSMSQ+VVDT++LTPRQLRK IS +FS +Q+SFRIEVMSFGFKYG | |
| Sbjct: | 121 | DGIRLERELLSPLKSMSQHVVDTTKLTPRQLRKTISDQFSEGSNQASFRIEVMSFGFKYG | 180 |
| Query: | 181 | IPLDADLVFDVRFLPNPYYKPELRDKTGLDTEVYDYVMSFDESDDFYDHLLALIKPILPG | 240 |
| | | +PLDADLVFDVRFLPNPYY+ ELR+KTGLD +V++YVMS ES+ FY HLL LI PILP | |
| Sbjct: | 181 | LPLDADLVFDVRFLPNPYYQVELREKTGLDEDVFNYVMSHPESEVFYKHLLNLIVPILPA | 240 |
| Query: | 241 | YQNEGKSVLTVAIGCTGGQHRSTAFAHRLSEDLKADWTVNESHRDKNKRKETVNRS | 296 |
| | | YQ EGKSVLTVAIGCTGGQHRS AFAH L+E L DW+VNESHRD+N+RKETVNRS | |
| Sbjct: | 241 | YQKEGKSVLTVAIGCTGGQHRSVAFAHCLAESLATDWSVNESHRDQNRRKETVNRS | 296 |

[9795] Based on this analysis, it was predicted that these proteins and their epitopes could be useful antigens for vaccines or diagnostics.

### EXAMPLE 1780

[9796] A DNA sequence (GBSx1887) was identified in S. agalactiae <SEQ ID 5533> which encodes the amino acid sequence <SEQ ID 5534>. Analysis of this protein sequence reveals the following:

```
Possible site: 36
>>> Seems to have an uncleavable N-term signal seq
----- Final Results -----
                              bacterial membrane --- Certainty = 0.0000(Not Clear) < succ>
                                bacterial outside --- Certainty = 0.0000(Not Clear) < succ>
                            bacterial cytoplasm --- Certainty = 0.0000(Not Clear) < succ>
```

[9797] The protein has homology with the following sequences in the GENPEPT database.

| >GP: CAB96620 GB: AJ400630 hypothetical protein | | | |
|---|---|---|---|
| [Streptococcus pneumoniae bacteriophage MM1] | | | |
| Identities = 254/321 (79%), Positives = 286/321 (88%), Gaps = 1/321 (0%) | | | |
| Query: | 1 | MRKPKITVIGGGTGIPVILKSLRLEDVEITAVVTVADDGGSSGELRSVMQ-LTPPGDLRN | 59 |
| | | MRKPKITVIGGGTGIPVILKSLR +DVEI A+VTVADDGGSSGELR MQ LTPPGDLRN | |
| Sbjct: | 1 | MRKPKITVIGGGTGIPVILKSLREKDVEIAAIVTVADDGGSSGELRKNMQQLTPPGDLRN | 60 |
| Query: | 60 | VLVALSDMPKFYEQIFQYRFAEGDGDFAGHPLGNLIIAGVAEMQGSTYNAMQSLTQFFHT | 119 |
| | | VLVA+SDMPKFYE++FQYRF+E G FAGHPLGNLIIAG++EMQGSTYNAMQ L++FFHT | |
| Sbjct: | 61 | VLVAMSDMPKFYEKVFQYRFSEDAGAFAGHPLGNLIIAGLSEMQGSTYNANQLLSKFFHT | 120 |
| Query: | 120 | TGKIYPSSEHPLTLHAVFKDGHEVVGESQIADYKGMIDHVYVTNTYNEETPTASRKVVDA | 179 |
| | | TGKIYPSS+HPLTLHAVF+DG EV GES I D++G+ID+VYVTN N++TP ASR+VV | |
| Sbjct: | 121 | TGKIYPSSDHPLTLHAVFQDGTEVAGESHIVDHRGIIDNVYVTNALNDDTPLASRRVVQT | 180 |
| Query: | 180 | ILESDMIVLGPGSLFTSILPNLVIPEIKQALLETRAEVAYVCNIMTQRGETEHFTDADHV | 239 |
| | | ILESDMIVLGPGSLFTSILPN+VI EI +ALLET+AE+AYVCNIMTQRGETEHFTD+DHV | |
| Sbjct: | 181 | ILESDMIVLGPGSLFTSILPNIVIKEIGRALLETKAEIAYVCNIMTQRGETEHFTDSDHV | 240 |
| Query: | 240 | EVLKRHLGQDAIDTVLVNIEKVPESYMENNHFDEYLVQVEHDFSGLRKHARRVISSNFLK | 299 |
| | | EVL RHLG+ IDTVLVNIEKVP+ YM +N FDEYLVQVEHDF GL K RVISSNFL+ | |
| Sbjct: | 241 | EVLHRHLGRPFIDTVLVNIEKVPQEYMNSNRFDEYLVQVEHDFVGLCKQVSRVISSNFLR | 300 |
| Query: | 300 | LEKGGAFHHGDFVVEELMNLV | 320 |
| | | LE GGAFH GD +V+ELM ++ | |
| Sbjct: | 301 | LENGGAFHDGDLIVDELMRII | 321 |

[9798] A related DNA sequence was identified in S. pyogenes <SEQ ID 5535> which encodes the amino acid sequence <SEQ ID 5536>. Analysis of this protein sequence reveals the following:

```
Possible site: 36
>>> Seems to have an uncleavable N-term signal seq
----- Final Results -----
                              bacterial membrane --- Certainty = 0.0000(Not Clear) < succ>
                                bacterial outside --- Certainty = 0.0000(Not Clear) < succ>
                            bacterial cytoplasm --- Certainty = 0.0000(Not Clear) < succ>
```

[9799] An alignment of the GAS and GBS proteins is shown below.

| Identities = 251/320 (78%), Positives = 284/320 (88%) | | | |
|---|---|---|---|
| Query: | 1 | MRKPKITVIGGGTGIPVILKSLRLEDVEITAVVTVADDGGSSGELRSVMQLTPPGDLRNV | 60 |
| | | M+ PK+TVIGGGTGI +ILKSLR E V+ITAVVTVADDGGSSGELR+ MQL PPGDLRNV | |
| Sbjct: | 1 | MKNPKMTVIGGGTGISIILKSLRNEAVDITAVVTVADDGGSSGELRNAMQLAPPGDLRNV | 60 |
| Query: | 61 | LVALSDMPKFYEQIFQYRFAEGDGDFAGHPLGNLIIAGVAEMQGSTYNAMQSLTQFFHTT | 120 |
| | | L+A+SDMPKFYE++FQYRF E DG AGHPLGNLIIAG++EMQGSTYNA+Q LT+FFH T | |
| Sbjct: | 61 | LLAMSDMPKFYERVFQYRFNESDGALAGHPLGNLIIAGISEMQGSTYNAIQILTKFFHIT | 120 |
| Query: | 121 | GKIYPSSEHPLTLHAVFKDGHEVVGESQIADYKGMIDHVYVTNTYNEETPTASRKVVDAI | 180 |
| | | GKIYPSSE LTLHAVFKDGHEV GES IA Y GMIDHVYVTNTYN++ P ASRKVV+AI | |
| Sbjct: | 121 | GKIYPSSEQALTLHAVFKDGHEVAGESSIAKYPGMIDHVYVTNTYNDQKPQASRKVVEAI | 180 |
| Query: | 181 | LESDMIVLGPGSLFTSILPNLVIPEIKQALLETRAEVAYVCNIMTQRGETEHFTDADHVE | 240 |
| | | LESDMIVLGPGSLFTSILPNLVIPEIK+AL +T+AEV Y+CNIMTQ GETE F+DADHV | |
| Sbjct: | 181 | LESDMIVLGPGSLFTSILPNLVIPEIKEALRQTKAEVVYICNIMTQYGETEQFSDADHVA | 240 |
| Query: | 241 | VLKRHLGQDAIDTVLVNIEKVPESYMENNHFDEYLVQVEHDFSGLRKHARRVISSNFLKL | 300 |
| | | VL +HLG+D IDTVLVN+ KVP++YM +N FDEYLVQV+HDF+GL + A+RVISS FL+L | |
| Sbjct: | 241 | VLNQHLGRDLIDTVLVNVAKVPQAYMNSNKFDEYLVQVDHDFAGLCRAAKRVISSYFLRL | 300 |
| Query: | 301 | EKGGAFHHGDFVVEELMNLV | 320 |
| | | E GGAFH G+ VVEELMNLV | |
| Sbjct: | 301 | ENGGAFHDGNLVVEELMNLV | 320 |

[9800] SEQ ID 5534 (GBS269) was expressed in E. coli as a His-fusion product. SDS-PAGE analysis of total cell extract is shown in FIG. 49 (lane 12; MW 35 kDa). It was also expressed in E. coli as a GST-fusion product. SDS-PAGE analysis of total cell extract is shown in FIG. 54 (lane 5; MW 60.5 kDa).

[9801] Based on this analysis, it was predicted that these proteins and their epitopes could be useful antigens for vaccines or diagnostics.

### EXAMPLE 1781

[9802] A DNA sequence (GBSx1888) was identified in S. agalactiae <SEQ ID 5537> which encodes the amino acid sequence <SEQ ID 5538>. Analysis of this protein sequence reveals the following:

```
Possible site: 34
>>> Seems to have no N-terminal signal sequence
----- Final Results -----
                            bacterial cytoplasm --- Certainty = 0.2479(Affirmative) < succ>
                              bacterial membrane --- Certainty = 0.0000(Not Clear) < succ>
                                bacterial outside --- Certainty = 0.0000(Not Clear) < succ>
```

[9803] The protein has homology with the following sequences in the GENPEPT database.

| >GP: CAB96619 GB: AJ400630 hypothetical protein | | | |
|---|---|---|---|
| [Streptococcus pneumoniae bacteriophage MM1] | | | |
| Identities = 209/303 (68%), Positives = 260/303 (84%) | | | |
| Query: | 1 | MSFTVKVKEELLGHKSENKMELSAIIKMSGSLGLANHGLNLSITTENAKIARHIYSMLEE | 60 |
| | | MSFTV VKEE+LG ++ ELSAIIKMSGS+GL+ GL LS+ TENAK+ARH+Y | |
| Sbjct: | 1 | MSFTVAVKEEILGQHHLSRHELSAIIKMSGSIGLSTSGLTLSVVTENAKLARHLYESFLH | 60 |
| Query: | 61 | HYHLQPEIKYHQKTNLRKNRVYTVFIEEKVDVILADLKLADAFFGIETGIEHSILDNDEN | 120 |
| | | Y ++ EI++HQ++NLRKNRVYTVF +EKV +L+DL LAD+FFG+ETGI+ +IL ++E | |
| Sbjct: | 61 | FYEIKSEIRHHQRSNLRKNRVYTVFTDEKVQDLLSDLHLADSFFGLETGIDEAILSDEEA | 120 |
| Query: | 121 | GRAYLRGAFLSTGTVREPDSGKYQLEIFSVYLDHAQDLANLMKKFMLDAKVIEHKHGAVT | 180 |
| | | GRAYL GAFL+ G++R+P+SGKYQLEI SVYLDHAQ +A+L+++F+LDAKV+E K GAVT | |
| Sbjct: | 121 | GRAYLCGAFLANGSIRDPESGKYQLEISSVYLDHAQGIASLLQQFLLDAKVLERKKGAVT | 180 |
| Query: | 181 | YLQKAEDIMDFLIVIDAMEARDAFEEIKMIRETRNDINRANNVETANIARTITASMKTIN | 240 |
| | | YLQ+AEDIMDFLIVI AM+ARD FE +K++RETRND+NRANN ETANIART++ASMKTIN | |
| Sbjct: | 181 | YLQRAEDIMDFLIVIGAMQARDDFERVKILRETRNDLNRANNAETANIARTVSASMKTIN | 240 |
| Query: | 241 | NIIKIMDTIGFDALPSDLRQVAQVRVAHPDYSIQQIADSLETPLSKSGVNHRLRKINKIA | 300 |
| | | NI KI D +G + LP DL++VAQ+R+ HPDYSIQQ+ADSL TPL+KSGVNHRLRKINKIA | |
| Sbjct: | 241 | NISKIKDIMGLENLPVDLQEVAQLRIQHPDYSIQQLADSLSTPLTKSGVNHRLRKINKIA | 300 |
| Query: | 301 | DEL | 303 |
| | | DEL | |
| Sbjct: | 301 | DEL | 303 |

[9804] A related DNA sequence was identified in S. pyogenes <SEQ ID 5539> which encodes the amino acid sequence <SEQ ID 5540>. Analysis of this protein sequence reveals the following:

```
Possible site: 35
>>> Seems to have no N-terminal signal sequence
----- Final Results -----
                            bacterial cytoplasm --- Certainty = 0.1698(Affirmative) < succ>
                              bacterial membrane --- Certainty = 0.0000(Not Clear) < succ>
                                bacterial outside --- Certainty = 0.0000(Not Clear) < succ>
```

[9805] An alignment of the GAS and GBS proteins is shown below.

| Identities = 222/303 (73%), Positives = 269/303 (88%) | | | |
|---|---|---|---|
| Query: | 1 | MSFTVKVKEELLGHKSENKMELSAIIKMSGSLGLANHGLNLSITTENAKIARHIYSMLEE | 60 |
| | | MSFT KVKEEL+ + + EL+AIIK+SGSLGLA+ L+LSITTENAKIAR+IYS++E+ | |
| Sbjct: | 1 | MSFTTKVKEELIHLSTGDNNELAAIIKLSGSLGLAHQSLHLSITTENAKIARYIYSLIED | 60 |
| Query: | 61 | HYHLQPEIKYHQKTNLRKNRVYTVFIEEKVDVILADLKLADAFFGIETGIEHSILDNDEN | 120 |
| | | Y + PEI+YHQKTNLRKNRVYTV++E+ V+ ILADLKLAD+FFG+ETGIE +L +D | |
| Sbjct: | 61 | AYVIVPEIRYHQKTNLRKNRVYTVYVEQGVETILADLKLADSFFGLETGIEPQVLSDDNA | 120 |
| Query: | 121 | GRAYLRGAFLSTGTVREPDSGKYQLEIFSVYLDHAQDLANLMKKFMLDAKVIEHKHGAVT | 180 |
| | | GR+YL+GAFL+ G++R+P+SGKYQLEI+SVYLDHAQDLA LM+KFMLDAK IEHK GAVT | |
| Sbjct: | 121 | GRSYLKGAFLAAGSIRDPESGKYQLEIYSVYLDHAQDLAQLMQKFMLDAKTIEHKSGAVT | 180 |
| Query: | 181 | YLQKAEDIMDFLIVIDAMEARDAFEEIKMIRETRNDINRANNVETANIARTITASMKTIN | 240 |
| | | YLQKAEDIMDFLI+I AM ++ FE IK++RE RNDINRANN ETANIA+TI+ASMKTIN | |
| Sbjct: | 181 | YLQKAEDIMDFLIIIGAMSCKEDFEAIKLLREARNDINRANNAETANIAKTISASMKTIN | 240 |
| Query: | 241 | NIIKIMDTIGFDALPSDLRQVAQVRVAHPDYSIQQIADSLETPLSKSGVNHRLRKINKIA | 300 |
| | | NIIKIMDTIG ++LP +L+QVAQ+RV HPDYSIQQ+AD+LE P++KSGVNHRLRKINKIA | |
| Sbjct: | 241 | NIIKIMDTIGLESLPIELQQVAQLRVKHPDYSIQQVADALEFPITKSGVNHRLRKINKIA | 300 |
| Query: | 301 | DEL | 303 |
| | | D+L | |
| Sbjct: | 301 | DDL | 303 |

[9806] Based on this analysis, it was predicted that these proteins and their epitopes could be useful antigens for vaccines or diagnostics.

### EXAMPLE 1782

[9807] A DNA sequence (GBSx1889) was identified in S. agalactiae <SEQ ID 5541> which encodes the amino acid sequence <SEQ ID 5542>. This protein is predicted to be dipeptidase. Analysis of this protein sequence reveals the following:

```
Possible site: 23
>>> Seems to have no N-terminal signal sequence
----- Final Results -----
                            bacterial cytoplasm --- Certainty = 0.3544(Affirmative) < succ>
                              bacterial membrane --- Certainty = 0.0000(Not Clear) < succ>
                                bacterial outside --- Certainty = 0.0000(Not Clear) < succ>
```

[9808] The protein has homology with the following sequences in the GENPEPT database.

| >GP: CAA86210 GB: Z38063 dipeptidase [Lactobacillus helveticus] | | | |
|---|---|---|---|
| Identities = 218/473 (46%), Positives = 310/473 (65%), Gaps = 14/473 (2%) | | | |
| Query: | 3 | CTTILVGKKASYDGSTMIARTEDSVNGDFTPKKLKVMTSKDQPRHYKSVLSNFEVD---L | 59 |
| | | CTTILVGKKAS DGSTMIAR+ED P+ KV+ +DQP+HY SV+S ++D L | |
| Sbjct: | 6 | CTTILVGKKASIDGSTMIARSEDG-GRVIIPEGFKVVNPEDQPKHYTSVISKQKIDDEDL | 64 |
| Query: | 60 | PDNPLPYTSVPDALGKDGIWGEAGINSKNVAMSATETITTNSRVLGADPLVSD---GIGE | 116 |
| | | + PL YTS PD GK+GIWG AGIN+ NVAM+ATETITTNSR+ G DP++ G+GE | |
| Sbjct: | 65 | AETPLRYTSAPDVSGKNGIWGAAGINADNVAMTATETITTNSRIQGVDPILDPSEGGLGE | 124 |
| Query: | 117 | EDILTLVLPYIQSAREGVERLGAILEKYGTYESNGIAFSDTEEIWWLETIGGHHWIARRV | 176 |
| | | ED +TL LPY+ SA +GV+R+G ++EKYGTYE NG+AFSD + IW+LETIGGHHWIARR+ | |
| Sbjct: | 125 | EDFVTLTLPYLHSAFDGVKRVGYLVEKYGTYEMNGMAFSDKDNIWYLETIGGHHWIARRI | 184 |
| Query: | 177 | PDDVYVTNPNQLGIDHFEFNNCDDYMCSSDLKEFIEQYHLDLTYSNEHFNPRYAFGSQRD | 236 |
| | | PDD YV PN+L ID F+F++ +++ +SDLK+ I++YHL+ E +N R+ FGS | |
| Sbjct: | 185 | PDDAYVIAPNRLNIDTFDFDDSENFAAASDLKDLIDEYHLN--PDREGYNMRHIFGSSTI | 242 |
| Query: | 237 | KDRHYNTPRSWAMQRFLNPEIEQDPRSLFIPWCQKPYRKITVEDIKYVLSDHYQDSVYDP | 296 |
| | | KD HYN PR+W + + +P+ P P+ + R I++EDIK+ S HYQD+ YD | |
| Sbjct: | 243 | KDAHYNNPRAWYIHNYFDPDFGGTPADQDQPFICRANRLISIEDIKWAESSHYQDTPYDA | 302 |
| Query: | 297 | YGPEGDAVSRRAFRSVGINRTSQTSILQLRPNKSLETTGVQWLSYGSMPFATMVPLFTQV | 356 |
| | | YG +G ++ FR +GINR +T ILQ+R + E GVQWL++G F +M+P +T V | |
| Sbjct: | 303 | YGDQGTPEQKKTFRPIGINRNFETHILQIRNDVPAEIAGVQWLAFGPNTFNSMLPFYTNV | 362 |
| Query: | 357 | ETVPNYFSNTTKDASTDNFYWTNRLIAALADPHFYQHEADIESYIERTMAQGHAHINGVD | 416 |
| | | T P + T K + + +W N+L A L D ++ + +++ ++++AQ H + D | |
| Sbjct: | 363 | TTTPEAWQTTPK-FNLNKIFWLNKLTAQLGDTNYRVYGELEDAFEQKSLAQCHKIQHETD | 421 |
| Query: | 417 | REVAENKEIDFQQK----NQEMSDYIQKESQELLNRILFDASNLMTNRFSMGD | 465 |
| | | +EV + Q K NQ+MSD + + ELL +++ + LMT ++ + D | |
| Sbjct: | 422 | KEVKNLSGKELQDKLIAANQKMSDTVYNNTVELLGQMVDEGHGLMTLKYDLLD | 474 |

[9809] A related DNA sequence was identified in S. pyogenes <SEQ ID 5543> which encodes the amino acid sequence <SEQ ID 5544>. Analysis of this protein sequence reveals the following:

```
Possible site: 30
>>> Seems to have no N-terminal signal sequence
----- Final Results -----
                            bacterial cytoplasm --- Certainty = 0.0514(Affirmative) < succ>
                              bacterial membrane --- Certainty = 0.0000(Not Clear) < succ>
                                bacterial outside --- Certainty = 0.0000(Not Clear) < succ>
```

[9810] An alignment of the GAS and GBS proteins is shown below.

| Identities = 345/464 (74%), Positives = 407/464 (87%) | | | |
|---|---|---|---|
| Query: | 2 | ACTTILVGKKASYDGSTMIARTEDSVNGDFTPKKLKVMTSKDQPRHYKSVLSNFEVDLPD | 61 |
| | | +CTTILVGKKASYDGSTM+ARTEDS NGDFTPKK+ V+ +DQPRHY+SV S+FE+DLPD | |
| Sbjct: | 9 | SCTTILVGKKASYDGSTMVARTEDSQNGDFTPKKMIVVKPEDQPRHYRSVQSSFEMDLPD | 68 |
| Query: | 62 | NPLPYTSVPDALGKDGIWGEAGINSKNVAMSATETITTNSRVLGADPLVSDGIGEEDILT | 121 |
| | | NP+ YTSVPDALGKDGIW EAG+N NVAMSATETITTNSRVLGADPLV+ GIGEED++T | |
| Sbjct: | 69 | NPMTYTSVPDALGKDGIWAEAGVNEANVAMSATETITTNSRVLGADPLVASGIGEEDMVT | 128 |
| Query: | 122 | LVLPYIQSAREGVERLGAILEKYGTYESNGIAFSDTEEIWWLETIGGHHWIARRVPDDVY | 181 |
| | | LVLPYI+SAREGV RLGAILE YGTYESNG+AFSD +IWWLETIGGHHWIARRVPDD Y | |
| Sbjct: | 129 | LVLPYIRSAREGVLRLGAILEDYGTYESNGVAFSDEHDIWWLETIGGHHWIARRVPDDAY | 188 |
| Query: | 182 | VTNPNQLGIDHFEFNNCDDYMCSSDLKEFIEQYHLDLTYSNEHFNPRYAFGSQRDKDRHY | 241 |
| | | VTNPNQ GIDHFEFNN +DY+CS+DLK+FI+ YHLDLTYS+EHFNPRYAFGSQRDKDR Y | |
| Sbjct: | 189 | VTNPNQFGIDHFEFNNPEDYLCSADLKDFIDTYHLDLTYSHEHFNPRYAFGSQRDKDRQY | 248 |
| Query: | 242 | NTPRSWAMQRFLNPEIEQDPRSLFIPWCQKPYRKITVEDIKYVLSDHYQDSVYDPYGPEG | 301 |
| | | NTPR+W MQ+FLNPEI QDPRS + WCQKPYRKITVED+KYVLS HYQD+ YDPYG EG | |
| Sbjct: | 249 | NTPRAWIMQKFLNPEIVQDPRSFALAWCQKPYRKITVEDVKYVLSSHYQDTGYDPYGSEG | 308 |
| Query: | 302 | DAVSRRAFRSVGINRTSQTSILQLRPNKSLETTGVQWLSYGSMPFATMVPLFTQVETVPN | 361 |
| | | VS++ FR +GINRTSQT+IL +RPNK E +QW++YGSMPF TMVP FTQV+T+P+ | |
| Sbjct: | 309 | TPVSKKVFRPIGINRTSQTAILHIRPNKPQEIAAIQWMAYGSMPFNTMVPFFTQVKTIPD | 368 |
| Query: | 362 | YFSNTTKDASTDNFYWTNRLIAALADPHFYQHEADIESYIERTMAQGHAHINGVDREVAE | 421 |
| | | YF+NT ++ TDNFYWTNRLIAALADPH+ HE D+++Y+E TMA+GHA ++ V+ ++ | |
| Sbjct: | 369 | YFANTYENVFTDNFYWTNRLIAALADPHYNHHETDLDNYLEETMAKGHAMLHAVEVQLLA | 428 |
| Query: | 422 | NKEIDFQQKNQEMSDYIQKESQELLNRILFDASNLMTNRFSMGD | 465 |
| | | + +D +++NQ+MSDY+Q E+Q LLN+ILFDASNLMTNRFS+ D | |
| Sbjct: | 429 | GETVDLEEENQKMSDYVQGETQTLLNKILFDASNLMTNRFSLSD | 472 |

[9811] Based on this analysis, it was predicted that these proteins and their epitopes could be useful antigens for vaccines or diagnostics.

### EXAMPLE 1783

[9812] A DNA sequence (GBSx1890) was identified in S. agalactiae <SEQ ID 5545> which encodes the amino acid sequence <SEQ ID 5546>. Analysis of this protein sequence reveals the following:

```
Possible site: 15
>>> Seems to have a cleavable N-term signal seq.
----- Final Results -----
    bacterial outside --- Certainty = 0.3000 (Affirmative) <succ>
  bacterial membrane --- Certainty = 0.0000 (Not Clear) <succ>
bacterial cytoplasm --- Certainty = 0.0000 (Not Clear) <succ>
```

[9813] The protein has homology with the following sequences in the GENPEPT database.

| >GP:CAA96185 GB:Z71552 AdcA protein [Streptococcus pneumoniae] | | |
|---|---|---|
| Identities = 257/429 (59%), Positives = 312/429 (71%), Gaps = 7/429 (1%) | | |
| Query: 1 | MRKKFLLLMSFVAMFAAWQLVQVKQVWADSKLKVVTTFYPVYEFTKNVVGDKADVSMLIK | 60 |
| | M+K LLL S A+F + Q AD KL +VTTFYPVYEFTK V GD A+V +LI | |
| Sbjct: 1 | MKKISLLLASLCALFL---VACSNQKQADGKLNIVTTFYPVYEFTKQVAGDTANVELLIG | 57 |
| Query: 61 | AGTEPHDFEPSTKNIAAIQDSNAFVYMDDNMETWAPKVAKSVKSKKVTTIKGTGDMLLTK | 120 |
| | AGTEPH++EPS K +A IQD++ FVY ++NMETW PK+ ++ KKV TIK TGDMLL | |
| Sbjct: 58 | AGTEPHEYEPSAKAVAKIQDADTFVYENENMETWVPKLLDTLDKKKVKTIKATGDMLLLP | 117 |
| Query: 121 | GVEEEGEEHEGHGHEGHHHELDPHVWLSPERAISVVENIRNKFVKAYPKDAASFNKNADA | 180 |
| | G EEE +H+ HG EGHHHE DPHVWLSP RAI +VE+IR+ YP +F KNA A | |
| Sbjct: 118 | GGEEEEGDHD-HGEEGHHHEFDPHVWLSPVRAIKLVEHIRDTLSADYPDKKETFEKNAAA | 176 |
| Query: 181 | YIAKLKELDKEYKNGLSNAKQKSFVTQHAAFGYMALDYGLNQVPIAGLTPDAEPSSKRLG | 240 |
| | YI KL+ LDK Y GLS AK+KSFVTQHAAF Y+ALDYGL QV I+GL+PDAEPS+ RL | |
| Sbjct: 177 | YIEKLQSLDKAYAEGLSQAKEKSFVTQHAAFNYLALDYGLKQVAISGLSPDAEPSAARLA | 236 |
| Query: 241 | ELAKYIKKYNINYIYFEENASNKVAKTLADEVGVKTAVLSPLEGLSKKEMAAGEDYFSVM | 300 |
| | EL +Y+KK I YIYFEENAS +A TL+ E GVKT VL+PLE L++++ AGE+Y SVM | |
| Sbjct: 237 | ELTEYVKKNKIAYIYFEENASQALANTLSKEAGVKTDVLNPLESLTEEDTKAGENYISVM | 296 |
| Query: 301 | RRNLKVLKKTTDVAGKEVAPEE-DKTKTVETGYFKTKDVKDRKLTDYSGNWQSVYPLLQD | 359 |
| | +NLK LK+TTD G + PE+ + TKTV+ GYF+ VKDR L+DY+GNWQSVYP L+D | |
| Sbjct: 297 | EKNLKALKQTTDQEGPAIEPEKAEDTKTVQNGYFEDAAVKDRTLSDYAGNWQSVYPFLED | 356 |
| Query: 360 | GTLDPVWDYKAKSKKDMTAAEYKKYYTAGYKTDVESIKIDGKKHQMTFVRNGKSQTFTYK | 419 |
| | GT D V+DYKAK MT AEYK YYT GY+TDV I I + M FV+ G+S+ +TYK | |
| Sbjct: 357 | GTFDQVFDYKAKLTGKMTQAEYKAYYTKGYQTDVTKINI--TDNTMEFVQGGQSKKYTYK | 414 |
| Query: 420 | YAGYKILTY | 428 |
| | Y G KILTY | |
| Sbjct: 415 | YVGKKILTY | 423 |

[9814] A related DNA sequence was identified in S. pyogenes <SEQ ID 5547> which encodes the amino acid sequence <SEQ ID 5548>. Analysis of this protein sequence reveals the following:

```
Possible site: 17
>>> Seems to have a cleavable N-term signal seq.
----- Final Results -----
    bacterial outside --- Certainty = 0.3000 (Affirmative) <succ>
  bacterial membrane --- Certainty = 0.0000 (Not Clear) <succ>
bacterial cytoplasm --- Certainty = 0.0000 (Not Clear) <succ>
```

[9815] The protein has homology with the following sequences in the databases:

| >GP:CAA96185 GB:Z71552 AdcA protein [Streptococcus pneumoniae] | | |
|---|---|---|
| Identities = 259/438 (59%), Positives = 326/438 (74%), Gaps = 16/438 (3%) | | |
| Query: 1 | MKKKILLMMSLISVFFAWQLTQAKQVLAEGKVKVVTTFYPVYEFTKGVIGNDGDVFMLMK | 60 |
| | MKK LL+ SL ++F + + Q A+GK+ +VTTFYPVYEFTK V G+ +V +L+ | |
| Sbjct: 1 | MKKISLLLASLCALFL---VACSNQKQADGKLNIVTTFYPVYEFTKQVAGDTANVELLIG | 57 |
| Query: 61 | AGTEPHDFEPSTKDIKKIQDADAFVYMDDNMETWVSDVKKSLTSKKVTIVKGTGNMLLVA | 120 |
| | AGTEPH++EPS K + KIQDAD FVY ++NMETWV + +L KKV +K TG+MLL+ | |
| Sbjct: 58 | AGTEPHEYEPSAKAVAKIQDADTFVYENENMETWVPKLLDTLDKKKVKTIKATGDMLLLP | 117 |
| Query: 121 | GAGHDHPHEDADKKHEHNKHSEEGHNHAFDPHVWLSPYRSITVVENIRDSLSKAYPEKAE | 180 |
| | G E+ + H+H EEGH+H FDPHVWLSP R+I +VE+IRD+LS YP+K E | |
| Sbjct: 118 | GG------EEEEGDHDHG---EEGHHHEFDPHVWLSPVRAIKLVEHIRDTLSADYPDKKE | 168 |
| Query: 181 | NFKANAATYIEKLKELDKDYTAALSDAKQKSFVTQHAAFGYMALDYGLNQISINGVTPDA | 240 |
| | F+ NAA YIEKL+ LDK Y LS AK+KSFVTQHAAF Y+ALDYGL Q++I+G++PDA | |
| Sbjct: 169 | TFEKNAAAYIEKLQSLDKAYAEGLSQAKEKSFVTQHAAFNYLALDYGLKQVAISGLSPDA | 228 |
| Query: 241 | EPSAKRIATLSKYVKKYGIKYIYFEENASSKVAKTLAKEAGVKAAVLSPLEGLTEKEMKA | 300 |
| | EPSA R+A L++YVKK I YIYFEENAS +A TL+KEAGVK VL+PLE LTE++ KA | |
| Sbjct: 229 | EPSAARLAELTEYVKKNKIAYIYFEENASQALANTLSKEAGVKTDVLNPLESLTEEDTKA | 288 |
| Query: 301 | GQDYFTVMRKNLETLRLTTDVAGKEILPEK-DTTKTVYNGYFKDKEVKDRQLSDWSGSWQ | 359 |
| | G++Y +VM KNL+ L+ TTD G I PEK + TKTV NGYF+D VKDR LSD++G+WQ | |
| Sbjct: 289 | GENYISVMEKNLKALKQTTDQEGPAIEPEKAEDTKTVQNGYFEDAAVKDRTLSDYAGNWQ | 348 |
| Query: 360 | SVYPYLQDGTLDQVWDYKAKKSKGKMTAAEYKDYYTTGYKTDVEQIKINGKKKTMTFVRN | 419 |
| | SVYP+L+DGT DQV+DYKAK + GKMT AEYK YYT GY+TDV KIN TM FV+ | |
| Sbjct: 349 | SVYPFLEDGTFDQVFDYKAKLT-GKMTQAEYKAYYTKGYQTDV--TKINITDNTMEFVQG | 405 |
| Query: 420 | GEKKTFTYTYAGKEILTY | 437 |
| | G+ K +TY Y GK+ILTY | |
| Sbjct: 406 | GQSKKYTYKYVGKKILTY | 423 |

[9816] An alignment of the GAS and GBS proteins is shown below.

| Identities = 353/515 (68%), Positives = 422/515 (81%), Gaps = 9/515 (1%) | | |
|---|---|---|
| Query: 1 | MRKKFLLLMSFVAMFAAWQLVQVKQVWADSKLKVVTTFYPVYEFTKNVVGDKADVSMLIK | 60 |
| | M+KK LL+MS +++F AWQL Q KQV A+ K+KVVTTFYPVYEFTK V+G+ DV ML+K | |
| Sbjct: 1 | MKKKILLMMSLISVFFAWQLTQAKQVLAEGKVKVVTTFYPVYEFTKGVIGNDGDVFMLMK | 60 |
| Query: 61 | AGTEPHDFEPSTKNIAAIQDSNAFVYMDDNMETWAPKVAKSVKSKKVTTIKGTGDMLLTK | 120 |
| | AGTEPHDFEPSTK+I IQD++AFVYMDDNMETW V KS+ SKKVT +KGTG+MLL | |
| Sbjct: 61 | AGTEPHDFEPSTKDIKKIQDADAFVYMDDNMETWVSDVKKSLTSKKVTIVKGTGNMLLVA | 120 |
| Query: 121 | GV--------EEEGEEHEGHGHEGHHHELDPHVWLSPERAISVVENIRNKFVKAYPKDAA | 172 |
| | G ++ EH H EGH+H DPHVWLSP R+I+VVENIR+ KAYP+ A | |
| Sbjct: 121 | GAGHDHPHEDADKKHEHNKHSEEGHNHAFDPHVWLSPYRSITVVENIRDSLSKAYPEKAE | 180 |
| Query: 173 | SFNKNADAYIAKLKELDKEYKNGLSNAKQKSFVTQHAAFGYMALDYGLNQVPIAGLTPDA | 232 |
| | +F NA YI KLKELDK+Y LS+AKQKSFVTQHAAFGYMALDYGLNQ+ I G+TPDA | |
| Sbjct: 181 | NFKANAATYIEKLKELDKDYTAALSDAKQKSFVTQHAAFGYMALDYGLNQISINGVTPDA | 240 |
| Query: 233 | EPSSKRLGELAKYIKKYNINYIYFEENASNKVAKTLADEVGVKTAVLSPLEGLSKKEMAA | 292 |
| | EPS+KR+ L+KY+KKY I YIYFEENAS+KVAKTLA E GVK AVLSPLEGL++KEM A | |
| Sbjct: 241 | EPSAKRIATLSKYVKKYGIKYIYFEENASSKVAKTLAKEAGVKAAVLSPLEGLTEKEMKA | 300 |
| Query: 293 | GEDYFSVMRRNLKVLKKTTDVAGKEVAPEEDKTKTVETGYFKTKDVKDRKLTDYSGNWQS | 352 |
| | G+DYF+VMR+NL+ L+ TTDVAGKE+ PE+D TKTV GYFK K+VKDR+L+D+SG+WQS | |
| Sbjct: 301 | GQDYFTVMRKNLETLRLTTDVAGKEILPEKDTTKTVYNGYFKDKEVKDRQLSDWSGSWQS | 360 |
| Query: 353 | VYPLLQDGTLDPVWDYKA-KSKKDMTAAEYKKYYTAGYKTDVESIKIDGKKHQMTFVRNG | 411 |
| | VYP LQDGTLD VWDYKA KSK MTAAEYK YYT GYKTDVE IKI+GKK MTFVRNG | |
| Sbjct: 361 | VYPYLQDGTLDQVWDYKAKKSKGKMTAAEYKDYYTTGYKTDVEQIKINGKKKTMTFVRNG | 420 |
| Query: 412 | KSQTFTYKYAGYKILTYKKGNRGVRYLFEAKEKDAGQFKYIQFSDHGIKPNKAEHFHIFW | 471 |
| | ++TFTY YAG +ILTY KGNRGVR++FEAKE DAG+FKY+QFSDH I P KA+HFH++W | |
| Sbjct: 421 | EKKTFTYTYAGKEILTYPKGNRGVRFMFEAKEADAGEFKYVQFSDHAIAPEKAKHFHLYW | 480 |
| Query: 472 | GSESQEKLFEEMENWPTYFPAKMSGREVAQDLMSH | 506 |
| | G +SQEKL +E+E+WPTY+ + +SGRE+AQ++ +H | |
| Sbjct: 481 | GGDSQEKLHKELEHWPTYYGSDLSGREIAQEINAH | 515 |

[9817] Based on this analysis, it was predicted that these proteins and their epitopes could be useful antigens for vaccines or diagnostics.

[9818] A related GBS gene <SEQ ID 8899> and protein <SEQ ID 8900> were also identified. Analysis of this protein sequence reveals the following:

| | | |
|---|---|---|
| Lipop: | Possible site: −1 | Crend: 3 |
| SRCFLG: 0 | | |
| McG: | Length of UR: 19 | |
| | Peak Value of UR: 2.79 | |
| | Net Charge of CR: 3 | |
| McG: | Discrim Score: 9.08 | |
| GvH: | Signal Score (−7.5): 2.59 | |

| Possible site: 15 | | |
|---|---|---|
| >>> Seems to have a cleavable N-term signal seq. | | |
| Amino Acid Composition: calculated from 16 | | |
| ALOM program count: 0 value: 7.69 threshold: 0.0 | | |
| PERIPHERAL | Likelihood = 7.69 | 264 |

```
modified ALOM score: −2.04
*** Reasoning Step: 3
Rule gpol
----- Final Results -----
    bacterial outside --- Certainty = 0.3000 (Affirmative) <succ>
  bacterial membrane --- Certainty = 0.0000 (Not Clear) <succ>
bacterial cytoplasm --- Certainty = 0.0000 (Not Clear) <succ>
```

[9819] The protein has homology with the following sequences in the databases:

| 3758895\|emb\|CAA96185.1\|\|Z71552 AdcA protein {Streptococcus pneumoniae} | | |
|---|---|---|
| >PIR\|T46756\|T46756 Zn-binding lipoprotein adcA [imported] - | | |
| Streptococcus pneumoniae (fragment) | | |
| Score = 508 bits (1294), Expect = e−143 | | |
| Identities = 257/429 (59%), Positives = 312/429 (71%), Gaps = 7/429 (1%) | | |
| Query: 1 | MRKKFLLLMSFVAMFAAWQLVQVKQVWADSKLKVVTTFYPVYEFTKNVVGDKADVSMLIK | 60 |
| | M+K LLL S A+F + Q AD KL +VTTFYPVYEFTK V GD A+V +LI | |
| Sbjct: 1 | MKKISLLLASLCALFL---VACSNQKQADGKLNIVTTFYPVYEFTKQVAGDTANVELLIG | 57 |
| Query: 61 | AGTEPHDFEPSTKNIAAIQDSNAFVYMDDNMETWAPKVAKSVKSKKVTTIKGTGDMLLTK | 120 |
| | AGTEPH++EPS K +A IQD++ FVY ++NMETW PK+ ++ KKV TIK TGDMLL | |
| Sbjct: 58 | AGTEPHEYEPSAKAVAKIQDADTFVYENENMETWVPKLLDTLDKKKVKTIKATGDMLLLP | 117 |
| Query: 121 | GVEEEGEEHEGHGHEGHHHELDPHVWLSPERAISVVENIRNKFVKAYPKDAASFNKNADA | 180 |
| | G EEE +H+ HG EGHHHE DPHVWLSP RAI +VE+IR+ YP +F KNA A | |
| Sbjct: 118 | GGEEEEGDHD-HGEEGHHHEFDPHVWLSPVRAIKLVEHIRDTLSADYPDKKETFEKNAAA | 176 |
| Query: 181 | YIAKLKELDKEYKNGLSNAKQKSFVTQHAAFGYMALDYGLNQVPIAGLTPDAEPSSKRLG | 240 |
| | YI KL+ LDK Y GLS AK+KSFVTQHAAF Y+ALDYGL QV I+GL+PDAEPS+ RL | |
| Sbjct: 177 | YIEKLQSLDKAYAEGLSQAKEKSFVTQHAAFNYLALDYGLKQVAISGLSPDAEPSAARLA | 236 |
| Query: 241 | ELAKYIKKYNINYIYFEENASNKVAKTLADEVGVKTAVLSPLEGLSKKEMAAGEDYFSVM | 300 |
| | EL +Y+KK I YIYFEENAS +A TL+ E GVKT VL+PLE L++++ AGE+Y SVM | |
| Sbjct: 237 | ELTEYVKKNKIAYIYFEENASQALANTLSKEAGVKTDVLNPLESLTEEDTKAGENYISVM | 296 |
| Query: 301 | RRNLKVLKKTTDVAGKEVAPEE-DKTKTVETGYFKTKDVKDRKLTDYSGNWQSVYPLLQD | 359 |
| | +NLK LK+TTD G + PE+ + TKTV+ GYF+ VKDR L+DY+GNWQSVYP L+D | |
| Sbjct: 297 | EKNLKALKQTTDQEGPAIEPEKAEDTKTVQNGYFEDAAVKDRTLSDYAGNWQSVYPFLED | 356 |
| Query: 360 | GTLDPVWDYKAKSKKDMTAAEYKKYYTAGYKTDVESIKIDGKXHQMTFVRNGKSQTFTYK | 419 |
| | GT D V+DYKAK MT AEYK YYT GY+TDV I I + M FV+ G+S+ +TYK | |
| Sbjct: 357 | GTFDQVFDYKAKLTGKMTQAEYKAYYTKGYQTDVTKINI--TDNTMEFVQGGQSKKYTYK | 414 |
| Query: 420 | YAGYKILTY | 428 |
| | Y G KILTY | |
| Sbjct: 415 | YVGKKILTY | 423 |

[9820] SEQ ID 8900 (GBS325) was expressed in E. coli as a His-fusion product. SDS-PAGE analysis of total cell extract is shown in FIG. 65 (lane 3; MW 58 kDa).

[9821] The GBS325-His fusion product was purified (FIG. 210, lane 7) and used to immunise mice. The resulting antiserum was used for Western blot (FIG. 257A) and FACS (FIG. 257B). These tests confirm that the protein is immunoaccessible on GBS bacteria.

### EXAMPLE 1784

[9822] A DNA sequence (GBSx1891) was identified in S. agalactiae <SEQ ID 5549> which encodes the amino acid sequence <SEQ ID 5550>. This protein is predicted to be ribosomal protein L31 (r131). Analysis of this protein sequence reveals the following:

```
Possible site: 61
>>> Seems to have no N-terminal signal sequence
----- Final Results -----
bacterial cytoplasm --- Certainty = 0.1948 (Affirmative) <succ>
  bacterial membrane --- Certainty = 0.0000 (Not Clear) <succ>
    bacterial outside --- Certainty = 0.0000 (Not Clear) <succ>
```

[9823] A related GBS nucleic acid sequence <SEQ ID 9637> which encodes amino acid sequence <SEQ ID 9638> was also identified.

[9824] The protein has homology with the following sequences in the GENPEPT database.

| >GP:AAF80389 GB:AF160251 ribosomal protein L31 [Listeria innocua] | | |
|---|---|---|
| Identities = 61/81 (75%), Positives = 71/81 (87%), Gaps = 1/81 (1%) | | |
| Query: 9 | MKKDIHPDYRPVVFLDTTTGYKFLSGSTKSTKETVEFE-GETYPLIRVEISSDSHPFYTG | 67 |
| | MK IHP+YRPVVF+DT+T +KFLSGSTKS+ ET+++E G YPL+RVEISSDSHPFYTG | |
| Sbjct: 1 | MKTGIHPEYRPVVFVDTSTDFKFLSGSTKSSSETIKWEDGNEYPLLRVEISSDSHPFYTG | 60 |
| Query: 68 | RQKFTQADGRVDRFNKKYGLK | 88 |
| | +QK ADGRVDRFNKKYGLK | |
| Sbjct: 61 | KQKHATADGRVDRFNKKYGLK | 81 |

[9825] A related DNA sequence was identified in S. pyogenes <SEQ ID 5551> which encodes the amino acid sequence <SEQ ID 5552>. Analysis of this protein sequence reveals the following:

```
Possible site: 53
>>> Seems to have no N-terminal signal sequence
----- Final Results -----
bacterial cytoplasm --- Certainty = 0.1910 (Affirmative) <succ>
  bacterial membrane --- Certainty = 0.0000 (Not Clear) <succ>
    bacterial outside --- Certainty = 0.0000 (Not Clear) <succ>
```

[9826] An alignment of the GAS and GBS proteins is shown below.

| Identities = 81/86 (94%), Positives = 86/86 (99%) | | |
|---|---|---|
| Query: 9 | MKKDIHPDYRPVVFLDTTTGYKFLSGSTKSTKETVEFEGETYPLIRVEISSDSHPFYTGR | 68 |
| | M+KDIHPDYRPVVFLDTTTGY+FLSGSTK++KETVEFEGETYPLIRVEISSDSHPFYTGR | |
| Sbjct: 1 | MRKDIHPDYPRVVFLDTTTGYQFLSGSTKASKETVEFEGETYPLIRVEISSDSHPFYTGR | 60 |
| Query: 69 | QKFTQADGRVDRFNKKYGLKDANAAQ | 94 |
| | QKFTQADGRVDRFNKKYGLKDANAA+ | |
| Sbjct: 61 | QKFTQADGRVDRFNKKYGLKDANAAK | 86 |

[9827] Based on this analysis, it was predicted that these proteins and their epitopes could be useful antigens for vaccines or diagnostics.

### EXAMPLE 1785

[9828] A DNA sequence (GBSx1892) was identified in S. agalactiae <SEQ ID 5553> which encodes the amino acid sequence <SEQ ID 5554>. This protein is predicted to be aspartate aminotransferase (aspC). Analysis of this protein sequence reveals the following:

```
Possible site: 61
>>> Seems to have no N-terminal signal sequence
----- Final Results -----
                            bacterial cytoplasm --- Certainty = 0.1740(Affirmative) < succ>
                              bacterial membrane --- Certainty = 0.0000(Not Clear) < succ>
                                bacterial outside --- Certainty = 0.0000(Not Clear) < succ>
```

[9829] A related GBS nucleic acid sequence <SEQ ID 9421> which encodes amino acid sequence <SEQ ID 9422> was also identified.

[9830] The protein has homology with the following sequences in the GENPEPT database.

| >GP: AAC21948 GB: U32714 aminotransferase [Haemophilus influenzae Rd] | | | |
|---|---|---|---|
| Identities = 200/323 (61%), Positives = 264/323 (80%), Gaps = 1/323 (0%) | | | |
| Query: | 1 | MQYYQLQNI-HVDMDDIYIVNGVSEGISMSMQALLDNDDEVLVPMPDYPLWTACVSLAGG | 59 |
| | | +QYYQ + I ++D+YI NGVSE I+M+MQALL++ DEVLVPMPDYPLWTA V+L+GG | |
| Sbjct: | 82 | VQYYQSKGILGATVNDVYIGNGVSELITMAMQALLNDGDEVLVPMPDYPLWTAAVTLSGG | 141 |
| Query: | 60 | NAVHYICDEEANWYPDIDDIKSKITSKTKAIVLINPNNPTGAVYPREILQEIVDIARQND | 119 |
| | | AVHY+CDE+ANW+P IDDIK+K+ +KTKAIV+INPNNPTGAVY +E+LQEIV+IARQN+ | |
| Sbjct: | 142 | KAVHYLCDEDANWFPTIDDIKAKVNAKTKAIVIINPNNPTGAVYSKELLQEIVEIARQNN | 201 |
| Query: | 120 | LIIFSDEVYDRLVMDGMEHIPIASIAEDIFTVTLSGLSKSHRICGFRVGWMVLSGPRQHV | 179 |
| | | LIIF+DE+YD+++ DG H IA++A D+ TVTL+GLSK++R+ GFR GWM+L+GP+ + | |
| Sbjct: | 202 | LIIFADEIYDKILYDGAVHHHIAALAPDLLTVTLNGLSKAYRVAGFRQGWMILNGPKHNA | 261 |
| Query: | 180 | KGYIEGLNMLANMRLCSNVLAQQVIQTSLGGQQSIDSMLLPGGRIYEQRNYIHKAINEIP | 239 |
| | | KGYIEGL+MLA+MRLC+NV Q IQT+LGG QSI+ +LPGGR+ EQRN + I +IP | |
| Sbjct: | 262 | KGYIEGLDMLASMRLCANVPMQHAIQTALGGYQSINEFILPGGRLLEQRNKAYDLITQIP | 321 |
| Query: | 240 | GLSAVKPNAGLYLFPKIDTDMYRIDNDEEFVLNFLKQEKVLLTHGRGFNMNTADHFRIVY | 299 |
| | | G++ VKP +Y+FPKID + I +DE+ VL+ L+QEKVLL HG+GFN ++ DHFRIV | |
| Sbjct: | 322 | GITCVKPMGAMYMFPKIDVKKFNIHSDEKMVLDLLRQEKVLLVHGKGFNWHSPDHFRIVT | 381 |
| Query: | 300 | LPRVDELTELQEKMARFLSQYKR | 322 |
| | | LP V++L E K+ARFLS Y++ | |
| Sbjct: | 382 | LPYVNQLEEAITKLARFLSDYRQ | 404 |

[9831] There is also homology to SEQ ID 3662.

[9832] Based on this analysis, it was predicted that this protein and its epitopes, could be useful antigens for vaccines or diagnostics.

### EXAMPLE 1786

[9833] A DNA sequence (GBSx1893) was identified in S. agalactiae <SEQ ID 5555> which encodes the amino acid sequence <SEQ ID 5556>. Analysis of this protein sequence reveals the following:

| Possible site: 52 | | | | |
|---|---|---|---|---|
| >>> Seems to have no N-terminal signal sequence | | | | |
| | INTEGRAL | Likelihood = −2.02 | Transmembrane | 164-180 (163-181) |

```
----- Final Results -----
                              bacterial membrane --- Certainty = 0.1808(Affirmative) < succ>
                                bacterial outside --- Certainty = 0.0000(Not Clear) < succ>
                            bacterial cytoplasm --- Certainty = 0.0000(Not Clear) < succ>
```

[9834] A related GBS nucleic acid sequence <SEQ ID 10099> which encodes amino acid sequence <SEQ ID 10100> was also identified.

[9835] The protein has homology with the following sequences in the GENPEPT database.

| >GP: BAB06181 GB: AP001515 transcriptional pleiotropic repressor | | | |
|---|---|---|---|
| [Bacillus halodurans] | | | |
| Identities = 129/257 (50%), Positives = 181/257 (70%), Gaps = 3/257 (1%) | | | |
| Query: | 23 | NLLEKTRKITSILQRSVDSLDAELPYNTMAAQLADIIDCNACIINGGGNLLGYAMKYKTN | 82 |
| | | +LL + RKI +LQ+S + + MA L D+I N +++ G LLG+A+K + | |
| Sbjct: | 2 | SLLSRMRKINDMLQKSGVQ---HVNFREMAETLRDVISANIFVVSRRGKLLGFAIKQEIE | 58 |
| Query: | 83 | TDRVEEFFETKQFPDYYVKSASRVYDTEANLSVDNDLSIFPVETKENFQDGITTIAPIYG | 142 |
| | | +R+++ E +QFP+ Y +V +T ANL ++++ + FPVE KE F+ G+TTI PI G | |
| Sbjct: | 59 | NERMKKMLEDRQFPEEYTTGLFKVEETSANLDINSEFTAFPVENKELFKTGLTTIVPISG | 118 |
| Query: | 143 | GGMRLGTFIIWRNDKEFSDDDLILVEIASTVVGIQLLNLQTENLEENIRKQTAVTMAINT | 202 |
| | | GG RLGT I+ R + F+DDDLIL E +TVVG+++L+ +T+ +EE R + V MAI++ | |
| Sbjct: | 119 | GGQRLGTLILARLNDSFNDDDLILAEYGATVVGMEILHEKTQEIEEEARSKAVVQMAISS | 178 |
| Query: | 203 | LSYSEMKAVAAILGELDGLEGRLTASVIADRIGITRSVIVNALRKLESAGIIESRSLGMK | 262 |
| | | LSYSE++AV I ELDG EG L AS IADR+GITRSVIVNALRKLESAG+IESRSLGMK | |
| Sbjct: | 179 | LSYSELEAVEHIFEELDGKEGLLVASKIADRVGITRSVIVNALRKLESAGVIESRSLGMK | 238 |
| Query: | 263 | GTYLKVINEGIFDKLKE | 279 |
| | | GTY+KV+N+ +L++ | |
| Sbjct: | 239 | GTYIKVLNDKFLVELEK | 255 |

[9836] A related DNA sequence was identified in S. pyogenes <SEQ ID 5557> which encodes the amino acid sequence <SEQ ID 5558>. Analysis of this protein sequence reveals the following:

| Possible site: 38 | | | | |
|---|---|---|---|---|
| >>> Seems to have no N-terminal signal sequence | | | | |
| | INTEGRAL | Likelihood = −0.64 | Transmembrane | 144-160 (143-161) |

```
----- Final Results -----
                              bacterial membrane --- Certainty = 0.1256(Affirmative) < succ>
                                bacterial outside --- Certainty = 0.0000(Not Clear) < succ>
                            bacterial cytoplasm --- Certainty = 0.0000(Not Clear) < succ>
```

[9837] The protein has homology with the following sequences in the databases:

| >GP: CAB13490 GB: Z99112 transcriptional regulator [Bacillus subtilis] | | | |
|---|---|---|---|
| Identities = 131/255 (51%), Positives = 179/255 (69%), Gaps = 3/255 (1%) | | | |
| Query: | 4 | LLEKTRKITSILQRSVDSLETELPYNTMASRLADIIDCNACIINGGGTLLGYAMKYKTNT | 63 |
| | | LL+KTR I S+LQ + + + MA L D+ID N +++ G LLGY++ + | |
| Sbjct: | 3 | LLQKTRIINSMLQAAAGK---PVNFKEMAETLRDVIDSNIFVVSRRGKLLGYSINQQIEN | 59 |
| Query: | 64 | DRVEEFFEAKQFPDTYVKAASRVYDTEANLSVENELTIFPVESKDTYPGGLTTIAPIYGG | 123 |
| | | DR+++ E +QFP+ Y K V +T +NL + +E T FPVE++D + GLTTI PI GG | |
| Sbjct: | 60 | DRMKKMLEDRQFPEEYTKNLFNVPETSSNLDINSEYTAFPVENRDLFQAGLTTIVPIIGG | 119 |
| Query: | 124 | GMRLGSLIIWRNDNEFSDDDLILVEISSTVVGIQLLNLQTENLEDTIRKQTAVNMAINTL | 183 |
| | | G RLG+LI+ R ++F+DDDLIL E +TVVG+++L + E +E+ R + V MAI++L | |
| Sbjct: | 120 | GERLGTLILSRLQDQFNDDDLILAEYGATVVGMEILREKAEEIEEEARSKAVVQMAISSL | 179 |
| Query: | 184 | SYSEMKAVAAILGELDGNEGRLTASVIADRIGITRSVIVNALRKLESAGIIESRSLGMKG | 243 |
| | | SYSE++A+ I ELDGNEG L AS IADR+GITRSVIVNALRKLESAG+IESRSLGMKG | |
| Sbjct: | 180 | SYSELEAIEHIFEELDGNEGLLVASKIADRVGITRSVIVNALRKLESAGVIESRSLGMKG | 239 |
| Query: | 244 | TYLKVINEGIFAKLK | 258 |
| | | TY+KV+N +L+ | |
| Sbjct: | 240 | TYIKVLNNKFLIELE | 254 |

[9838] An alignment of the GAS and GBS proteins is shown below.

| Identities = 232/260 (89%), Positives = 247/260 (94%) | | | |
|---|---|---|---|
| Query: | 21 | MPNLLEKTRKITSILQRSVDSLDAELPYNTMAAQLADIIDCNACIINGGGNLLGYAMKYK | 80 |
| | | MPNLLEKTRKITSILQRSVDSL+ ELPYNTMA++LADIIDCNACIINGGG LLGYAMKYK | |
| Sbjct: | 1 | MPNLLEKTRKITSILQRSVDSLETELPYNTMASRLADIIDCNACIINGGGTLLGYAMKYK | 60 |
| Query: | 81 | TNTDRVEEFFETKQFPDYYVKSASRVYDTEANLSVDNDLSIFPVETKENFQDGITTIAPI | 140 |
| | | TNTDRVEEFFE KQFPD YVK+ASRVYDTEANLSV+N+L+IFPVE+K+ + G+TTIAPI | |
| Sbjct: | 61 | TNTDRVEEFFEAKQFPDTYVKAASRVYDTEANLSVENELTIFPVESKDTYPGGLTTIAPI | 120 |
| Query: | 141 | YGGGMRLGTFIIWRNDKEFSDDDLILVEIASTVVGIQLLNLQTENLEENIRKQTAVTMAI | 200 |
| | | YGGGMRLG+ IIWRND EFSDDDLILVEI+STVVGIQLLNLQTENLE+ IRKQTAV MAI | |
| Sbjct: | 121 | YGGGMRLGSLIIWRNDNEFSDDDLILVEISSTVVGIQLLNLQTENLEDTIRKQTAVNMAI | 180 |
| Query: | 201 | NTLSYSEMKAVAAILGELDGLEGRLTASVIADRIGITRSVIVNALRKLESAGIIESRSLG | 260 |
| | | NTLSYSEMKAVAAILGELDG EGRLTASVIADRIGITRSVIVNALRKLESAGIIESRSLG | |
| Sbjct: | 181 | NTLSYSEMKAVAAILGELDGNEGRLTASVIADRIGITRSVIVNALRKLESAGIIESRSLG | 240 |
| Query: | 261 | MKGTYLKVINEGIFDKLKEY | 280 |
| | | MKGTYLKVINEGIF KLKE+ | |
| Sbjct: | 241 | MKGTYLKVINEGIFAKLKEF | 260 |

[9839] A related GBS gene <SEQ ID 8901> and protein <SEQ ID 8902> were also identified. Analysis of this protein sequence reveals the following:

Lipop: Possible site: −1 Crend: 9
McG: Discrim Score: −6.84
GvH: Signal Score (−7.5): −5.37
Possible site: 13
>>> Seems to have no N-terminal signal sequence
ALOM program count: 1 value: −2.02 threshold: 0.0

| | | | |
|---|---|---|---|
| INTEGRAL | Likelihood = −2.02 | Transmembrane | 114-130 (113-131) |
| PERIPHERAL | Likelihood = 3.61 | 179 | |

```
modified ALOM score: 0.90
*** Reasoning Step: 3
----- Final Results -----
                              bacterial membrane --- Certainty = 0.1808(Affirmative) < succ>
                                bacterial outside --- Certainty = 0.0000(Not Clear) < succ>
                            bacterial cytoplasm --- Certainty = 0.0000(Not Clear) < succ>
```

[9840] The protein has homology with the following sequences in the databases:

[chemical structure]

[9841] SEQ ID 8902 (GBS431) was expressed in E. coli as a GST-fusion product. SDS-PAGE analysis of total cell extract is shown in FIG. 173 (lane 7; MW 54 kDa). It was also expressed in E. coli as a His-fusion product. SDS-PAGE analysis of total cell extract is shown in FIG. 77 (lane 6; MW 29 kDa).

[9842] GBS431-GST was purified as shown in FIG. 223, lane 8.

[9843] Based on this analysis, it was predicted that these proteins and their epitopes could be useful antigens for vaccines or diagnostics.

### EXAMPLE 1787

[9844] A DNA sequence (GBSx1894) was identified in S. agalactiae <SEQ ID 5559> which encodes the amino acid sequence <SEQ ID 5560>. This protein is predicted to be isochorismatase. Analysis of this protein sequence reveals the following:

| Possible site: 35 | | | | |
|---|---|---|---|---|
| >>> Seems to have no N-terminal signal sequence | | | | |
| | INTEGRAL | Likelihood = −2.81 | Transmembrane | 126-142 (125-142) |

```
----- Final Results -----
                              bacterial membrane --- Certainty = 0.2126(Affirmative) < succ>
                                bacterial outside --- Certainty = 0.0000(Not Clear) < succ>
                            bacterial cytoplasm --- Certainty = 0.0000(Not Clear) < succ>
```

[9845] The protein has homology with the following sequences in the GENPEPT database.

| >GP: CAB15164 GB: Z99120 similar to pyrazinamidase/nicotinamidase | | | |
|---|---|---|---|
| [Bacillus subtilis] | | | |
| Identities = 99/181 (54%), Positives = 132/181 (72%) | | | |
| Query: | 1 | MTKALISIDYTYDFVADDGKLTAGKPAQSIASAIADVTEKAYRSGDYIFFAIDNHDIGDV | 60 |
| | | M KALI IDYT DFVA DGKLT G+P + I AI ++T++ +GDY+ A+D+HD GD | |
| Sbjct: | 1 | MKKALICIDYTNDFVASDGKLTCGEPGRMIEEAIVNLTKEFITNGDYVVLAVDSHDEGDQ | 60 |
| Query: | 61 | FHPESNLFPEHNIKGTSGRNLYGPLGTLYETIKEDSRVFWIDKRHYSAFSGTDLDIRLRE | 120 |
| | | +HPE+ LFP HNIKGT G++LYG L LY+ + + V++++K YSAF+GTDL+++LRE | |
| Sbjct: | 61 | YHPETRLFPPHNIKGTEGKDLYGKLLPLYQKHEHEPNVYYMEKTRYSAFAGTDLELKLRE | 120 |
| Query: | 121 | RRVDTLILTGVLTDICVLHTAIDAYNLGYKIEVPAAAVASLNDSNHQWALNHFKTVLGATI | 181 |
| | | R++ L L GV TDICVLHTA+DAYN G++I V AVAS N H WAL+HF +GA + | |
| Sbjct: | 121 | RQIGELHLAGVCTDICVLHTAVDAYNKGFRIVVHKQAVASFNQEGHAWALSHFANSIGAQV | 181 |

[9846] A related DNA sequence was identified in S. pyogenes <SEQ ID 5561> which encodes the amino acid sequence <SEQ ID 5562>. Analysis of this protein sequence reveals the following:

| Possible site: 31 | | | | |
|---|---|---|---|---|
| >>> Seems to have no N-terminal signal sequence | | | | |
| | INTEGRAL | Likelihood = −2.60 | Transmembrane | 126-142 (126-142) |

```
----- Final Results -----
                              bacterial membrane --- Certainty = 0.2041(Affirmative) < succ>
                                bacterial outside --- Certainty = 0.0000(Not Clear) < succ>
                            bacterial cytoplasm --- Certainty = 0.0000(Not Clear) < succ>
```

[9847] The protein has homology with the following sequences in the databases:

| >GP: CAB15164 GB: Z99120 similar to pyrazinamidase/nicotinamidase | | | |
|---|---|---|---|
| [Bacillus subtilis] | | | |
| Identities = 90/179 (50%), Positives = 127/179 (70%) | | | |
| Query: | 3 | RALISIDYTNDFVADDGKLSAGKSAQAIATKIAEVTKTAFDQGDYIFFAIDCHDQNDSWH | 62 |
| | | +ALI IDYTNDFVA DGKL+ G+ + I I +TK GDY+ A+D HD+ D +H | |
| Sbjct: | 3 | KALICIDYTNDFVASDGKLTCGEPGRMIEEAIVNLTKEFITNGDYVVLAVDSHDEGDQYH | 62 |
| Query: | 63 | PESKLFAAHNIKGTTGRHLYGPLAEVYSYMKQHPRVFWIDKRYYSAFSGTDLDIRLRERG | 122 |
| | | PE++LF HNIKGT G+ LYG L +Y + P V++++K YSAF+GTDL+++LRER | |
| Sbjct: | 63 | PETRLFPPHNIKGTEGKDLYGKLLPLYQKHEHEPNVYYMEKTRYSAFAGTDLELKLRERQ | 122 |
| Query: | 123 | ITQLVLTGVLSDICVLHTAIDAYHLGYQLEIVKSAVASLTKESYEWSLAHFEQVLGAKL | 181 |
| | | I +L L GV +DICVLHTA+DAY+ G+++ + K AVAS +E + W+L+HF +GA++ | |
| Sbjct: | 123 | IGELHLAGVCTDICVLHTAVDAYNKGFRIVVHKQAVASFNQEGHAWALSHFANSIGAQV | 181 |

[9848] An alignment of the GAS and GBS proteins is shown below.

| Identities = 121/180 (67%), Positives = 150/180 (83%) | | | |
|---|---|---|---|
| Query: | 3 | KALISIDYTYDFVADDGKLTAGKPAQSIASAIADVTEKAYRSGDYIFFAIDNHDIGDVFH | 62 |
| | | +ALISIDYT DFVADDGKL+AGK AQ+IA+ IA+VT+ A+ GDYIFFAID HD D +H | |
| Sbjct: | 3 | RALISIDYTNDFVADDGKLSAGKSAQAIATKIAEVTKTAFDQGDYIFFAIDCHDQNDSWH | 62 |
| Query: | 63 | PESNLFPEHNIKGTSGRNLYGPLGTLYETIKEDSRVFWIDKRHYSAFSGTDLDIRLRERR | 122 |
| | | PES LF HNIKGT+GR+LYGPL +Y +K+ RVFWIDKR+YSAFSGTDLDIRLRER | |
| Sbjct: | 63 | PESKLFAAHNIKGTTGRHLYGPLAEVYSYMKQHPRVFWIDKRYYSAFSGTDLDIRLRERG | 122 |
| Query: | 123 | VDTLILTGVLTDICVLHTAIDAYNLGYKIEVPAAAVASLNDSNHQWALNHFKTVLGATIL | 182 |
| | | + L+LTGVL+DICVLHTAIDAY+LGY++E+ +AVASL +++W+L HF+ VLGA ++ | |
| Sbjct: | 123 | ITQLVLTGVLSDICVLHTAIDAYHLGYQLEIVKSAVASLTKESYEWSLAHFEQVLGAKLI | 182 |

[9849] Based on this analysis, it was predicted that these proteins and their epitopes could be useful antigens for vaccines or diagnostics.

### EXAMPLE 1788

[9850] A DNA sequence (GBSx1895) was identified in S. agalactiae <SEQ ID 5563> which encodes the amino acid sequence <SEQ ID 5564>. Analysis of this protein sequence reveals the following:

```
Possible site: 16
>>> Seems to have no N-terminal signal sequence
----- Final Results -----
                            bacterial cytoplasm --- Certainty = 0.1539(Affirmative) < succ>
                              bacterial membrane --- Certainty = 0.0000(Not Clear) < succ>
                                bacterial outside --- Certainty = 0.0000(Not Clear) < succ>
```

[9851] The protein has no significant homology with any sequences in the GENPEPT database.

[9852] No corresponding DNA sequence was identified in S. pyogenes.

[9853] Based on this analysis, it was predicted that this protein and its epitopes, could be useful antigens for vaccines or diagnostics.

### EXAMPLE 1789

[9854] A DNA sequence (GBSx1896) was identified in S. agalactiae <SEQ ID 5565> which encodes the amino acid sequence <SEQ ID 5566>. This protein is predicted to be 3-hydroxyacyl-CoA dehydrogenase (hbd-10). Analysis of this protein sequence reveals the following:

| Possible site: 46 | | | | |
|---|---|---|---|---|
| >>> Seems to have an uncleavable N-term signal seq | | | | |
| | INTEGRAL | Likelihood = −0.27 | Transmembrane | 3-19 (1-19) |
| | INTEGRAL | Likelihood = −0.11 | Transmembrane | 277-293 (277-294) |

```
----- Final Results -----
                              bacterial membrane --- Certainty = 0.1107(Affirmative) < succ>
                                bacterial outside --- Certainty = 0.0000(Not Clear) < succ>
                            bacterial cytoplasm --- Certainty = 0.0000(Not Clear) < succ>
```

[9855] The protein has homology with the following sequences in the GENPEPT database.

| >GP: AAF12219 GB: AE001862 3-hydroxyacyl-CoA dehydrogenase, putative | | | |
|---|---|---|---|
| [Deinococcus radiodurans] | | | |
| Identities = 151/321 (47%), Positives = 196/321 (61%), | | | |
| Gaps = 36/321 (11%) | | | |
| Query: | 56 | NMTIKNLTVAGSGVLGSQIAFQAAYKGMSVTIYDINDEALNKGKERIKKLAKVYQSEIET | 115 |
| | | +M+IK +TV GSGVLGSQIAFQ A+ G V +YDIND A+ K +E + KL YQ +++ | |
| Sbjct: | 51 | SMSIKTVTVCGSGVLGSQIAFQTAFHGFDVHLYDINDAAIAKARETLGKLQARYQQDLKV | 110 |
| Query: | 116 | AKEAYSDKAKSIKYNKNLLPSLDHIFLSKVADSLDLIADLPNQITFSKNLDQAVSDADLV | 175 |
| | | + D +I+F ++ +AV DLV | |
| Sbjct: | 111 | DAQQTGDAFA--------------------------------RISFFTDIAEAVKGVDLV | 138 |
| Query: | 176 | IEAVPETVSIKEDFYKQLAKVAPSKTIFATNSSTLVPSQFADITGRPDKFLAMHFANNIW | 235 |
| | | IEA+PE + IK FY QL +VA TIFATNSSTL+PSQF + TGRP+KFLA+HFAN IW | |
| Sbjct: | 139 | IEAIPENMDIKRKFYNQLGEVADPNTIFATNSSTLLPSQFMEETGRPEKFLALHFANEIW | 198 |
| Query: | 236 | QNNIVEIMGHKGTDDEVIKEALAFSKDIGMVPLHIHKEQPGYILNSILVPFLESALALYY | 295 |
| | | + N EIM TDD V + F+KDIGMV L ++KEQ GYILN++LVP L +AL L | |
| Sbjct: | 199 | KFNTAEIMRTPRTDDAVFDTVVQFAKDIGMVALPMYKEQAGYILNTLLVPLLGAALELVV | 258 |
| Query: | 296 | DKVSDSETIDKTWKLGTGAPMGPLEILDIIGIDTAYNIMKNYSDTNSDPNSLHAHLAKML | 355 |
| | | ++D +T+DKTW + TGAP GP LD+IG+ T YNI N + ++P S A AK + | |
| Sbjct: | 259 | KGIADPQTVDKTWMIATGAPRGPFAFLDVIGLTTPYNI--NMASAETNPGS--AAAAKYI | 314 |
| Query: | 356 | KEEFIDKGRTGKAAGHGFYDY | 376 |
| | | KE +IDKG+ G A G GFY Y | |
| Sbjct: | 315 | KENYIDKGKLGTATGEGFYKY | 335 |

[9856] No corresponding DNA sequence was identified in S. pyogenes.

[9857] Based on this analysis, it was predicted that this protein and its epitopes, could be useful antigens for vaccines or diagnostics.

[9858] A related GBS gene <SEQ ID 8903> and protein <SEQ ID 8904> were also identified. Analysis of this protein sequence reveals the following:

| Lipop: Possible site: −1 Crend: 3 | | | | |
|---|---|---|---|---|
| SRCFLG: 0 | | | | |
| McG: Length of UR: 20 | | | | |
| Peak Value of UR: 1.55 | | | | |
| Net Charge of CR: 1 | | | | |
| McG: Discrim Score: −0.60 | | | | |
| GvH: Signal Score (−7.5): −3.93 | | | | |
| Possible site: 21 | | | | |
| >>> Seems to have no N-terminal signal sequence | | | | |
| Amino Acid Composition: calculated from 1 | | | | |
| ALOM program count: 1 value: −0.11 threshold: 0.0 | | | | |
| | INTEGRAL | Likelihood = −0.11 | Transmembrane | 221-237 (221-238) |
| | PERIPHERAL | Likelihood = 4.61 | 6 | |

```
modified ALOM score: 0.52
icm1 HYPID: 7 CFP: 0.104
*** Reasoning Step: 3
----- Final Results -----
                              bacterial membrane --- Certainty = 0.1044(Affirmative) < succ>
                                bacterial outside --- Certainty = 0.0000(Not Clear) < succ>
                            bacterial cytoplasm --- Certainty = 0.0000(Not Clear) < succ>
```

[9859] The protein has homology with the following sequences in the databases:

[chemical structure]

[9860] SEQ ID 8904 (GBS112) was expressed in E. coli as a His-fusion product. SDS-PAGE analysis of total cell extract is shown in FIG. 28 (lane 5; MW 39 kDa). It was also expressed in E. coli as a GST-fusion product. SDS-PAGE analysis of total cell extract is shown in FIG. 34 (lane 3; MW 64 kDa).

[9861] GBS112-GST was purified as shown in FIG. 198, lane 10.

### EXAMPLE 1790

[9862] A DNA sequence (GBSx1897) was identified in S. agalactiae <SEQ ID 5567> which encodes the amino acid sequence <SEQ ID 5568>. Analysis of this protein sequence reveals the following:

```
Possible site: 14
>>> Seems to have no N-terminal signal sequence
----- Final Results -----
                            bacterial cytoplasm --- Certainty = 0.3332(Affirmative) < succ>
                              bacterial membrane --- Certainty = 0.0000(Not Clear) < succ>
                                bacterial outside --- Certainty = 0.0000(Not Clear) < succ>
```

[9863] A related GBS nucleic acid sequence <SEQ ID 10097> which encodes amino acid sequence <SEQ ID 10098> was also identified.

[9864] The protein has homology with the following sequences in the GENPEPT database.

>GP:CAB14467 GB:Z99117 similar to hypothetical proteins [Bacillus subtilis]
Identities = 62/169 (36%), Positives = 109/169 (63%), Gaps = 3/169 (1%)

| | | |
|---|---|---|
| Query: 1 | MAVLSMLGIIDAKPKVGYFYLGQYHASIGTSHFEKMTVSEIMGIPLTVHQKDSVYDVIVH | 60 |
| | +A+L+M G ++A+P+VGYFY G+ + +K+ V + IP+ +H+ SVYD I | |
| Sbjct: 43 | LAILTMSGFLEARPRVGYFYTGKTGTQLLADKLKKLQVKDFQSIPVVIHENVSVYDAICT | 102 |
| Query: 61 | IFMEDAGCAFILDDDDFLCGVVSRKDLLKISIGGGDLSKMPIGMVMTRMPHVTTVLENES | 120 |
| | +F+ED G F++D D L GV+SRKDLL+ SIG +L+ +P+ ++MTRMP++T + | |
| Sbjct: 103 | MFLEDVGTLFVVDRDAVLVGVLSRKDLLRASIGQQELTSVPVHIIMTRMPNITVCRREDY | 162 |
| Query: 121 | LFAAADKLVSRKVDSLPVVRHDKQYPEKFKVIGKLSKTILASLFLEIRD | 169 |
| | + A L+ +++D+LPV+ K + F+VIG+++KT + + + + + | |
| Sbjct: 163 | VMDIAKHLIEKQIDALPVI---KDTDKGFEVIGRVTKTNMTKILVSLSE | 208 |

[9865] No corresponding DNA sequence was identified in S. pyogenes.

[9866] Based on this analysis, it was predicted that this protein and its epitopes, could be useful antigens for vaccines or diagnostics.

### EXAMPLE 1791

[9867] A DNA sequence (GBSx1898) was identified in S. agalactiae <SEQ ID 5569> which encodes the amino acid sequence <SEQ ID 5570>. Analysis of this protein sequence reveals the following:

| Possible site: 22 | | |
|---|---|---|
| >>> Seems to have no N-terminal signal sequence | | |
| INTEGRAL | Likelihood = −0.53 | Transmembrane 60-76 (60-76) |

```
----- Final Results -----
  bacterial membrane --- Certainty = 0.1213 (Affirmative) <succ>
    bacterial outside --- Certainty = 0.0000 (Not Clear) <succ>
bacterial cytoplasm --- Certainty = 0.0000 (Not Clear) <succ>
```

[9868] The protein has homology with the following sequences in the GENPEPT database.

| >GP:BAB05092 GB:AP001511 unknown conserved protein [Bacillus halodurans] | | |
|---|---|---|
| Identities = 126/256 (49%), Positives = 183/256 (71%), Gaps = 1/256 (0%) | | |
| Query: 7 | IFIISDSLGETAKAIAKACLSQFPGHDDWHFQRFSYINSQERLEQVFEEASQKTVFMMFS | 66 |
| | ++++SDS+GETA+ + KA SQF G +R Y+ +E +++V + A Q + F+ | |
| Sbjct: 10 | VYVVSDSVGETAELVVKAAASQFSGAGI-EVRRIPYVEDKETVDEVIQLAKQADAIIAFT | 68 |
| Query: 67 | LVDVALASYAQKRCESEHYAYVDLLTNVIQGISRISGIDPLGEPGILRRLDNDYFKRVES | 126 |
| | LV + +Y ++ VD++ +++ IS ++ +P EPGI+ RLD DYF++VE+ | |
| Sbjct: 69 | LVVPGIRTYLLEKATEAKVETVDIIGPMLEKISSLTKEEPRYEPGIVYRLDEDYFRKVEA | 128 |
| Query: 127 | IEFAVKYDDGRDPRGILQADLVIIGISRTSKTPLSMFLADKNIKVINIPLVPEVPVPKEL | 186 |
| | IEFAVKYDDGRDPRGI++ADLV+IG+SRTSKTPLS +LA K +KV N+PLVPEV P+EL | |
| Sbjct: 129 | IEFAVKYDDGRDPRGIVRADLVLIGVSRTSKTPLSQYLAHKRLKVANVPLVPEVEPPEEL | 188 |
| Query: 187 | RMIDSRRIIGLTNSVDHLNQVRKVRLKSLGLSSTANYASLERILEETRYAEEVMKNLGCP | 246 |
| | + +++IGL S + LN +R RLK+LGL S ANYA+++RI EE YAE +MK +GCP | |
| Sbjct: 189 | FKLSPKKVIGLKISPEQLNGIRAERLKTLGLKSQANYANIDRIKEELAYAEGIMKRIGCP | 248 |
| Query: 247 | IINVSDKAIEETATII | 262 |
| | +I+VS+KA+EETA +I | |
| Sbjct: 249 | VIDVSNKAVEETANLI | 264 |

[9869] No corresponding DNA sequence was identified in S. pyogenes.

[9870] SEQ ID 5570 (GBS378) was expressed in E. coli as a His-fusion product. SDS-PAGE analysis of total cell extract is shown in FIG. 68 (lane 4; MW 34 kDa). It was also expressed in E. coli as a GST-fusion product. SDS-PAGE analysis of total cell extract is shown in FIG. 72 (lane 2; MW 59 kDa).

[9871] GBS378-GST was purified as shown in FIG. 212, lane 6.

[9872] Based on this analysis, it was predicted that this protein and its epitopes, could be useful antigens for vaccines or diagnostics.

### EXAMPLE 1792

[9873] A DNA sequence (GBSx1899) was identified in S. agalactiae <SEQ ID 5571> which encodes the amino acid sequence <SEQ ID 5572>. Analysis of this protein sequence reveals the following:

```
Possible site: 47
>>> Seems to have no N-terminal signal sequence
----- Final Results -----
bacterial cytoplasm --- Certainty = 0.3703 (Affirmative) <succ>
  bacterial membrane --- Certainty = 0.0000 (Not Clear) <succ>
    bacterial outside --- Certainty = 0.0000 (Not Clear) <succ>
```

[9874] The protein has homology with the following sequences in the GENPEPT database.

| >GP:AAD35361 GB:AE001709 pyruvate, orthophosphate dikinase | | |
|---|---|---|
| [Thermotoga maritima] | | |
| Identities = 494/882 (56%), Positives = 639/882 (72%), Gaps = 9/882 (1%) | | |
| Query: 1 | METKFVYHFD----EGCKEMKELLGGKGANLAEMTSIGLPVPQGFTITTQACNDYYDNAC | 56 |
| | M K+VY F EG +MK++LGGKGANLAEMT++G+PVP GFTI+ + C YYD+ | |
| Sbjct: 1 | MAKKYVYFFANGKAEGRADMKDILGGKGANLAEMTNLGIPVPPGFTISAEVCKYYYDHGR | 60 |
| Query: 57 | HIRESILSQIDQAMAQLEVEQNKQLGSVDDPLLVSVRSGSVFSMPGMMDTVLNLGLNDRS | 116 |
| | E + Q+++AM +LE K+ G ++PLLVSVRSG+ SMPGMMDTVLNLGLND + | |
| Sbjct: 61 | TYPEELKEQVEEAMRRLEEVTGKKFGDPNNPLLVSVRSGAAISMPGMMDTVLNLGLNDET | 120 |
| Query: 117 | VQGLVKKTEDERFAYDSYRRFIQMFADVVTGIPKYKFDTILDRLKTDKCYQDDTELTGSD | 176 |
| | V+GL K T +ERFAYD+YRRF+QMF DVV IP KF+ L+ LK +K + DTEL D | |
| Sbjct: 121 | VKGLAKLTNNERFAYDAYRRFLQMFGDVVLKIPHEKFEKALEELKKEKGVKLDTELDAED | 180 |
| Query: 177 | LKRLVEFYKELYQKEAGEKFPQDPKRQLLLAIEAVFKSWNNPRAKIYRKLNDIPE--TLG | 234 |
| | LK+LVE YK++Y KE G++FPQDP +QL LAI+AVF SW N RA YR+++ I E LG | |
| Sbjct: 181 | LKKLVERYKQIY-KEEGKEFPQDPWKQLWLAIDAVFGSWMNERAIKYRQIHGIKEGDLLG | 239 |
| Query: 235 | TAVNIQAMVFGNMGNNSGTGVAFTRNPSTGAANLFGEYLINAQGEDVVAGIRTPQSISKL | 294 |
| | TAVNI AMVFGNMG +SGTGVAFTR+P+TG +GE+L NAQGEDVVAGIRTP + +L | |
| Sbjct: 240 | TAVNIVAMVFGNMGEDSGTGVAFTRDPNTGEKKPYGEFLPNAQGEDVVAGIRTPLKLEEL | 299 |
| Query: 295 | AEQMPIIYQEFVSVTQKLEAHYRDMQDMEFTIENGNLYMLQTRSGKRTAKAAIKIAVDQV | 354 |
| | +MP +Y + + + KLE HYRDMQD+EFT+E G LY+LQTR+GKRT++AAI+IAVD V | |
| Sbjct: 300 | KNRMPEVYNQLLEIMDKLEKHYRDMQDIEFTVERGKLYILQTRNGKRTSQAAIRIAVDMV | 359 |
| Query: 355 | NEGLISKEEAILRIEPKQLDQLLHPSFDLKSLKKAIILTTGLPASPGAAYGKVYFHAEDV | 414 |
| | +EGLI+KEEAILR+ P+ ++Q+LHP FD K +A ++ GLPASPGAA GKV F+A+ | |
| Sbjct: 360 | HEGLITKEEAILRVRPEDVEQVLHPVFDPKEKAQAKVIAKGLPASPGAATGKVVFNAKKA | 419 |
| Query: 415 | VKEMKKGNPVLLVRQETSPEDIEGMVSANGIITARGGMTSHAAVVARGMGKPCVAGCSQL | 474 |
| | + K G V+LVR ETSPED+ GM +A GI+T+RGGMTSHAAVVARGMGKP V G + | |
| Sbjct: 420 | EELGKAGEQVILVRPETSPEDVGGMAAAQGILTSRGGMTSHAAVVARGMGKPAVVGAESI | 479 |
| Query: 475 | LVDEVRREISIGHQTIKEGEMLSIDGATGNVYIGQV-PMAETSVDRDFEIFMKWVDENRD | 533 |
| | V +G +KEGE +SIDG TG V +G+V + ++ ++W DE R | |
| Sbjct: 480 | EVHPEEGYFKVGDVVVKEGEWISIDGTTGEVLLGKVTTIKPQGLEGPVAELLQWADEIRR | 539 |
| Query: 534 | MMVCSNADNPRDAQKALDFGAEGIGLCRTEHMFFDDERIPVVREMILADEILSRRKALER | 593 |
| | + V +NAD PRDA+ A FGAEGIGLCRTEHMFF+ +RIP VR MILA R KAL+ | |
| Sbjct: 540 | LGVRTNADIPRDAEVARKFGAEGIGLCRTEHMFFEKDRIPKVRRMILAKTKEEREKALDE | 599 |
| Query: 594 | LLSFQRDDFYQIFKVLKGKACTIRLLDPPLHEFLPHDKESIESMARQMGISTLAIEKRIQ | 653 |
| | LL Q++DF +F+V+KG TIRL+DPPLHEFLP + E I+ +A QMG+S ++ ++ | |
| Sbjct: 600 | LLPLQKFDFKGLFRVMKGLPVTIRLIDPPLHEFLPQEDEQIKEVAEQMGVSFEELKNVVE | 659 |
| Query: 654 | TLEEFNPMLGHRGCRLAITYPEIYQMQVRALVQGAI-LAMKEGYEAKPEIMIPLVTAHEE | 712 |
| | L+E NPMLGHRGCRL ITYPEI MQ +A++ AI L +EG + PEIMIPLV E | |
| Sbjct: 660 | NLKELNPMLGHRGCRLTITYPEIAVMQTKAIIGAAIELKKEEGIDVIPEIMIPLVGHVNE | 719 |
| Query: 713 | ISIIRDLIEETIVEESKSKKINLSFPIGTMIETPRACMIADDIAKFADFFSFGTNDLTQM | 772 |
| | + ++ +I+ET K + L++ IGTMIE PRA + A IA+ A+FFSFGTNDLTQM | |
| Sbjct: 720 | LRYLKKIIKETADALIKEAGVELTYKIGTMIEVPRAAVTAHQIAEEAEFFSFGTNDLTQM | 779 |
| Query: 773 | SFGFSRDDAGKFLGEYVDKGLLKKDPFQVLDQKGIGRFIGQAVRLGKEVKPNLKIGICGE | 832 |
| | +FGFSRDD GKFL EY++KG+L+ DPF+ LD G+G + G+ +P+LK+ G+CGE | |
| Sbjct: 780 | TFGFSRDDVGKFLPEYLEKGILEHDPFKTLDYDGVGELVRMGKEKGRSTRPDLKVGVCGE | 839 |
| Query: 833 | HGGEPSSIEFCYQLGLHYVSCSPFRIPIAKLAAAQAKIKQSR | 874 |
| | HGG+P SI F ++GL YVSCSP+R+P+A+LAAAQA +K + | |
| Sbjct: 840 | HGGDPRSILFFDKIGLDYVSCSPYRVPVARLAAAQAALKNKK | 881 |

[9875] Based on this analysis, it was predicted that these proteins and their epitopes could be useful antigens for vaccines or diagnostics.

### EXAMPLE 1793

[9876] A DNA sequence (GBSx1900) was identified in S. agalactiae <SEQ ID 5573> which encodes the amino acid sequence <SEQ ID 5574>. This protein is predicted to be glutamyl-tRNA (Gln) amidotransferase subunit C (gatC). Analysis of this protein sequence reveals the following:

```
Possible site: 56
>>> Seems to have no N-terminal signal sequence
----- Final Results -----
bacterial cytoplasm --- Certainty = 0.3229 (Affirmative) <succ>
  bacterial membrane --- Certainty = 0.0000 (Not Clear) <succ>
    bacterial outside --- Certainty = 0.0000 (Not Clear) <succ>
```

[9877] The protein has homology with the following sequences in the GENPEPT database.

| >GP:BAB04384 GB:AP001509 glutamyl-tRNA (Gln) amidotransferase | | |
|---|---|---|
| subunit C [Bacillus halodurans] | | |
| Identities = 42/94 (44%), Positives = 63/94 (66%) | | |
| Query: 2 | KISEEEVRHVANLSKLRFSDQETKEFASSLSKIVDMIELLNEVDTEGVPVTTTMADRKTV | 61 |
| | +IS E+V+HVA+L++L +++E K F L I+ E LNE+DTEGV T+ + D K V | |
| Sbjct: 3 | RISMEQVKHVAHLARLAITEEEAKLFTEQLGDIIQFAEQLNELDTEGVEPTSHVLDMKNV | 62 |
| Query: 62 | MREDIAQPGHNRDDLFKNVPQHQDYYIKVPAILE | 95 |
| | +RED + G +D+ KN P H+D I+VP++LE | |
| Sbjct: 63 | LREDKPEKGLPVEDVLKNAPDHEDGQIRVPSVLE | 96 |

[9878] A related DNA sequence was identified in S. pyogenes <SEQ ID 5575> which encodes the amino acid sequence <SEQ ID 5576>. Analysis of this protein sequence reveals the following:

```
Possible site: 60
>>> Seems to have no N-terminal signal sequence
----- Final Results -----
bacterial cytoplasm --- Certainty = 0.3247 (Affirmative) <succ>
  bacterial membrane --- Certainty = 0.0000 (Not Clear) <succ>
    bacterial outside --- Certainty = 0.0000 (Not Clear) <succ>
```

[9879] An alignment of the GAS and GBS proteins is shown below.

| Identities = 72/100 (72%), Positives = 88/100 (88%) | | |
|---|---|---|
| Query: 1 | MKISEEEVRHVANLSKLRFSDQETKEFASSLSKIVDMIELLNEVDTEGVPVTTTMADRKT | 60 |
| | MKISEEEVRHVA LSKL FS+ ET FA++LSKIVDM+ELLNEVDTEGV +TTTMAD+K | |
| Sbjct: 5 | MKISEEEVRHVAKLSKLSFSESETTTFATTLSKIVDMVELLNEVDTEGVAITTTMADKKN | 64 |
| Query: 61 | VMREDIAQPGHNRDDLFKNVPQHQDYYIKVPAILEDGGDA | 100 |
| | VMR+D+A+ G +R LFKNVP+ ++++IKVPAIL+DGGDA | |
| Sbjct: 65 | VMRQDVAEEGTDRALLFKNVPEKENHFIKVPAILDDGGDA | 104 |

[9880] Based on this analysis, it was predicted that these proteins and their epitopes could be useful antigens for vaccines or diagnostics.

### EXAMPLE 1794

[9881] A DNA sequence (GBSx1900) was identified in S. agalactiae <SEQ ID 5577> which encodes the amino acid sequence <SEQ ID 5578>. Analysis of this protein sequence reveals the following:

| Possible site: 30 | | |
|---|---|---|
| >>> Seems to have an uncleavable N-term signal seq | | |
| INTEGRAL | Likelihood = −7.64 | Transmembrane 7-23 (6-24) |

```
----- Final Results -----
  bacterial membrane --- Certainty = 0.4057 (Affirmative) <succ>
    bacterial outside --- Certainty = 0.0000 (Not Clear) <succ>
bacterial cytoplasm --- Certainty = 0.0000 (Not Clear) <succ>
```

[9882] The protein has no significant homology with any sequences in the GENPEPT database.

[9883] No corresponding DNA sequence was identified in S. pyogenes.

[9884] Based on this analysis, it was predicted that this protein and its epitopes, could be useful antigens for vaccines or diagnostics.

### EXAMPLE 1795

[9885] A DNA sequence (GBSx1902) was identified in S. agalactiae <SEQ ID 5579> which encodes the amino acid sequence <SEQ ID 5580>. This protein is predicted to be glutamyl-tRNA amidotransferase, subunit A (gatA). Analysis of this protein sequence reveals the following:

```
Possible site: 55
>>> Seems to have no N-terminal signal sequence
----- Final Results -----
                            bacterial cytoplasm --- Certainty = 0.2855(Affirmative) < succ>
                              bacterial membrane --- Certainty = 0.0000(Not Clear) < succ>
                                bacterial outside --- Certainty = 0.0000(Not Clear) < succ>
```

[9886] The protein has homology with the following sequences in the GENPEPT database.

| >GP:BAB04385 GB:AP001509 glutamyl-tRNA (Gln) amidotransferase | | |
|---|---|---|
| subunit A [Bacillus halodurans] | | |
| Identities = 285/486 (58%), Positives = 367/486 (74%), Gaps = 4/486 (0%) | | |
| Query: 1 | MSFNNQSIDQLHDFLVKKEISATELTKATLEDIHAREQAVGSFITISDEMAIAQAKEID- | 59 |
| | MS + + +H L +KEIS ++L + I + V +F+ +++E A A AKE+D | |
| Sbjct: 1 | MSLFDLKLKDVHTKLHEKEISVSDLVDEAYKRIEQVDGQVEAFLALNEEKARAYAKELDA | 60 |
| Query: 60 | --DKGIDADNVMSGIPLAVKNDISTKGILTTAASKMLYNYEPIFDATAVEKLYAKDMIVI | 117 |
| | D+ +A ++ GIP+ VKDNI TK + TT +S++L N++PI+DAT V KL + I | |
| Sbjct: 61 | ALDRS-EARGLLFGIPIGVKDNIVTKNLRTTCSSRILGNFDPIYDATVVHKLREAQAVTI | 119 |
| Query: 118 | GKANMDEFAMGGSTETSYFKKTNNAWDNSKVPGGSSGGSAAAVASGQVRLSLGSDTGGSI | 177 |
| | GK NMDEFAMG STE S F+KT N W+ VPGGSSGGSAAAVA+G+V +LGSDTGGSI | |
| Sbjct: 120 | GKLNMDEFAMGSSTENSAFQKTKNPWNLEYVPGGSSGGSAAAVAAGEVPFTLGSDTGGSI | 179 |
| Query: 178 | RQPASFNGIVGMKPTYGRVSRFGLFAFGSSLDQIGPMSQTVKENAQLLTVISGHDVRDST | 237 |
| | RQPA++ G+VG+KPTYGRVSR+GL AF SSLDQIGP+++ V++NA LL ISGHD DST | |
| Sbjct: 180 | RQPAAYCGVVGLKPTYGRVSRYGLVAFASSLDQIGPITRNVEDNAYLLQAISGHDPMDST | 239 |
| Query: 238 | SSERTVGDFTAKIGQDIQGMKIALPKEYLGEGIAQGVKETIIKAAKHLEKLGAVIEEVSL | 297 |
| | S+ V D+ + + DI+G+KIA+PKEYLGEG+ + VK++++ A K LE LGA EEVSL | |
| Sbjct: 240 | SANLDVPDYLSALTGDIKGLKIAVPKEYLGEGVKEEVKOSVLDALKVLEGLGATWEEVSL | 299 |
| Query: 298 | PHSKYGVAVYYIVASSEASSNLQRFDGIRYGYRTENYKNLDDIYVNTRSEGFGDEVKRRI | 357 |
| | PHSKY +A YY++ASSEAS+NL RFDG+RYG+R++N NL D+Y TR+EGFGDEVKRRI | |
| Sbjct: 300 | PHSKYALATYYLLASSEASANLARFDGVRYGFRSDNADNLLDMYKQTRAEGFGDEVKRRI | 359 |
| Query: 358 | MLGTFSLSSGYYDAYYKKAGQVRSLIIQDFEKVFADYDLILGPTAPTTAFDLDSLNHDPV | 417 |
| | MLGTF+LSSGYYDAYYKKA QVR+LI QDFEKVF YD+I+GPT PT AF + DP+ | |
| Sbjct: 360 | MLGTFALSSGYYDAYYKKAQQVRTLIKQDFEKVFEQYDVIIGPTTPTPAFKIGEKTDDPL | 419 |
| Query: 418 | AMYLADILTIPVNLAGLPGISIPAGFDQGLPVGMQLIGPKFSEETIYQVAAAFEATTDYH | 477 |
| | MY DILTIPVNLAG+P IS+P GFD GLP+G+Q+IG F E ++Y+VA AFE TDYH | |
| Sbjct: 420 | TMYANDILTIPVNLAGVPAISVPCGFDNGLPLGLQIIGKNFDEGSVYRVAHAFEQATDYH | 479 |
| Query: 478 | KQQPKI | 483 |
| | ++P + | |
| Sbjct: 480 | TKRPTL | 485 |

[9887] A related DNA sequence was identified in S. pyogenes <SEQ ID 5581> which encodes the amino acid sequence <SEQ ID 5582>. Analysis of this protein sequence reveals the following:

```
Possible site: 57
>>> Seems to have no N-terminal signal sequence
----- Final Results -----
                            bacterial cytoplasm --- Certainty = 0.2364(Affirmative) < succ>
                              bacterial membrane --- Certainty = 0.0000(Not Clear) < succ>
                                bacterial outside --- Certainty = 0.0000(Not Clear) < succ>
```

[9888] An alignment of the GAS and GBS proteins is shown below.

| Identities = 392/487 (80%), Positives = 442/487 (90%) | | |
|---|---|---|
| Query: 1 | MSFNNQSIDQLHDFLVKKEISATELTKATLEDIHAREQAVGSFITISDEMAIAQAKEIDD | 60 |
| | MSFN+++I++LHD LV KEISATELT+ATLEDI +RE+AVGSFIT+S+E+A+ QA ID | |
| Sbjct: 1 | MSFNHKTIEELHDLLVAKEISATELTQATLEDIKSREEAVGSFITVSEEVALKQAAAIDA | 60 |
| Query: 61 | KGIDADNVMSGIPLAVKDNISTKGILTTAASKMLYNYEPIFDATAVEKLYAKDMIVIGKA | 120 |
| | KGIDADN+MSGIPLAVKDNISTK ILTTAASKMLYNYEPIF+AT+V YAKDMIVIGK | |
| Sbjct: 61 | KGIDADNLMSGIPLAVKDNISTKEILTTAASKMLYNYEPIFNATSVANAYAKDMIVIGKT | 120 |
| Query: 121 | NMDEFAMGGSTETSYFKKTNNAWDHSKVPGGSSGGSAAAVASGQVRLSLGSDTGGSIRQP | 180 |
| | NMDEFAMGGSTETSYFKKT NAWDH+KVPGGSSGGSA AVASGQVRLSLGSDTGGSIRQP | |
| Sbjct: 121 | NMDEFAMGGSTETSYFKKTKNAWDHTKVPGGSSGGSATAVASGQVRLSLGSDTGGSIRQP | 180 |
| Query: 181 | ASFNGIVGMKPTYGRVSRFGLFAFGSSLDQIGPMSQTVKENAQLLTVISGHDVRDSTSSE | 240 |
| | A+FN +VG+KPTYG VSR+GL AFGSSLDQIGP + TVKENAQLL VI+ DV+D+TS+ | |
| Sbjct: 181 | AAFNSVVGLKPTYGTVSRYGLIAFGSSLDQIGPFAPTVKENAQLLNVIASSDVKDATSAP | 240 |
| Query: 241 | RTVGDFTAKIGQDIQGMKIALPKEYLGEGIAQGVKETIIKAAKHLEKLGAVIEEVSLPHS | 300 |
| | + D+T+KIG+DI+GMKIALPKEYLGEGI +KET++ + K E LGA +EEVSLPHS | |
| Sbjct: 241 | VRIADYTSKIGRDIKGMKIALPKEYLGEGIDPEIKETVLASVKQFEALGATVEEVSLPHS | 300 |
| Query: 301 | KYGVAVYYIVASSEASSNLQRFDGIRYGYRTENYKNLDDIYVNTRSEGFGDEVKRRIMLG | 360 |
| | KYGVAVYYI+ASSEASSNLQRFDGIRYG+R ++ KNLD+IYVNTRS+GFGDEVKRRIMLG | |
| Sbjct: 301 | KYGVAVYYIIASSEASSNLQRFDGIRYGFRADDAKNLDEIYVNTRSQGFGDEVKRRIMLG | 360 |
| Query: 361 | TFSLSSGYYDAYYKKAGQVRSLIIQDFEKVFADYDLILGPTAPTTAFDLDSLNHDPVAMY | 420 |
| | TFSLSSGYYDAY+KKAGQVR+LIIQDF+KVFADYDLILGPT PT AF LD+LNHDPVAMY | |
| Sbjct: 361 | TFSLSSGYYDAYFKKAGQVRTLIIQDFDKVFADYDLILGPTTPTVAFGLDTLNHDPVAMY | 420 |
| Query: 421 | LADILTIPVNLAGLPGISIPAGFDQGLPVGMQLIGPKFSEETIYQVAAAFEATTDYHKQQ | 480 |
| | LAD+LTIPVNLAGLPGISIPAGF GLPVG+QLIGPK++EETIYQ AAAFEA TDYHKQQ | |
| Sbjct: 421 | LADLLTIPVNLAGLPGISIPAGFVDGLPVGLQLIGPKYAEETIYQAAAAFEAVTDYHKQQ | 480 |
| Query: 481 | PKIFGGE | 487 |
| | P IFGG+ | |
| Sbjct: 481 | PIIFGGD | 487 |

[9889] Based on this analysis, it was predicted that these proteins and their epitopes could be useful antigens for vaccines or diagnostics.

### EXAMPLE 1796

[9890] A DNA sequence (GBSx1903) was identified in S. agalactiae <SEQ ID 5583> which encodes the amino acid sequence <SEQ ID 5584>. This protein is predicted to be glutamyl-tRNAGln amidotransferase subunit B (gatB). Analysis of this protein sequence reveals the following:

```
Possible site: 27
>>> Seems to have no N-terminal signal sequence
------ Final Results ------
                              bacterial cytoplasm --- Certainty = 0.3935(Affirmative) < succ>
                                bacterial membrane --- Certainty = 0.0000(Not Clear) < succ>
                                  bacterial outside --- Certainty = 0.0000(Not Clear) < succ>
```

[9891] A related GBS nucleic acid sequence <SEQ ID 10095> which encodes amino acid sequence <SEQ ID 10096> was also identified.

[9892] The protein has homology with the following sequences in the GENPEPT database.

| >GP:BAB04386 GB:AP001509 glutamyl-tRNA (GLn) amidotransferase | | |
|---|---|---|
| subunit B [Bacillus halodurans] | | |
| Identities = 308/476 (64%), Positives = 361/476 (75%), Gaps = 1/476 (0%) | | |
| Query: 1 | MNFETVIGLEVHVELNTNSKIFSPSSAHFGQEQNANTNVIDWSFPGVLPVMNKGVIDAGI | 60 |
| | MNFETVIGLSVHVEL T SKIFS S HFG E NANT+VID +PGVLPV+NK ++ + | |
| Sbjct: 1 | MNFETVIGLEVHVELKTESKIFSASPNHFGAEPNANTSVIDLGYPGVLPVLNKAAVEFAM | 60 |
| Query: 61 | KAALALNMDIHQNMHFDRKNYFYPDNPKAYQISQFDEPIGYNGWIEIELEDGTRKKIRIE | 120 |
| | KAA+ALN ++ + FDRKNYFYPDNPKAYQISQFD+PIG NGWIEIE+ DGT+KKI I | |
| Sbjct: 61 | KAAMALNCEVATDTKFDRKNYFYPDNPKAYQISQFDKPIGENGWIEIEV-DGTKKKIGIT | 119 |
| Query: 121 | RAHLEEDAGKNTHGTDGYSYVDLNRQGVPLIEIVSEADMRSPEEAYAYLTALKEIIQYTG | 180 |
| | R HLEEDAGK TH +GYS VD NRQG PLIEIVSE D+R+P+EAYAYL LK IIQYTG | |
| Sbjct: 120 | RLHLEEDAGKLTHSGNGYSLVDFNRQGTPLIEIVSEPDIRTPQEAYAYLEKLKSIIQYTG | 179 |
| Query: 181 | ISDVKMEEGSMRVDANISLRPYGQEEFGTKAELKNLNSFNNVRKGLIHEEKRQAQVLRSG | 240 |
| | +SD KMEEGS+R DANISLRP GQEEFGTK ELKNLNSFN VRKGL +EEKRQAQVL SG | |
| SbjCt: 180 | VSDCKMEEGSLRCDANISLRPVGQEEFGTKTELKNLNSFNFVRKGLFYEEKRQAQVLLSG | 239 |
| Query: 241 | GQIQQETRRFDETTGETILMRVKEGSSDYRYFPEPDLPLFDISDEWIDQVRLELPEFPQE | 300 |
| | G+I QETRR+DE +T+LMRVKEGS DYRYFPEPDL I DEW ++R E+PE P | |
| Sbjct: 240 | GEILQETRRYDEAANKTVLMRVKEGSDDYRYFPEPDLVALHIDDEWKARIRSEIPELPDA | 299 |
| Query: 301 | RRAKYVSSFGLSSYDASQLTATKATSDFFEKAVAIGGDAKQVSNWLQGEVAQFLNSESKS | 360 |
| | R+ +YV GL +YDA LT TK SDFFE+ +A G D K SNWL GEV+ +LN+E K | |
| Sbjct: 300 | RKKRYVEELGLPAYDAMVLTLTKEMSDFFEETIAKGADPKLASNWLMGEVSGYLNAEQKE | 359 |
| Query: 361 | IEEIGLTPENLVEMIGLIADGTISSKIAKKVFVHLAKNGGSAEEFVKKAGLVQISDPEVL | 420 |
| | ++E+ LTP+ L +MI LI GTISSKIAKKVF L + GG EE VK GLVQISD L | |
| Sbjct: 360 | LDEVALTPDGLAKMIQLIEKGTISSKIAKKVFKDLIEKGGDPEEIVKAKGLVQISDEGEL | 419 |
| Query: 421 | IPIIHQVFADNEAAVIDFKSGKRNADKAFTGYLMKATKGQANPQVALKLLAQELAK | 476 |
| | + +V +N+ ++ DFK+GK A G +MKATKG+ANP + KLL +E+ K | |
| Sbjct: 420 | RKYVVEVLDNNQQSIDDFKNGKDRAIGFLVGQIMKATKGKANPPMVNKLLLEEIWK | 475 |

[9893] A related DNA sequence was identified in S. pyogenes <SEQ ID 5585> which encodes the amino acid sequence <SEQ ID 5586>. Analysis of this protein sequence reveals the following:

```
Possible site: 27
>>> Seems to have no N-terminal signal sequence
----- Final Results -----
                            bacterial cytoplasm --- Certainty = 0.3935(Affirmative) < succ>
                              bacterial membrane --- Certainty = 0.0000(Not Clear) < succ>
                                bacterial outside --- Certainty = 0.0000(Not Clear) <succ>
```

[9894] An alignment of the GAS and GBS proteins is shown below.

| Identities = 410/479 (85%), Positives = 447/479 (92%) | | |
|---|---|---|
| Query: 1 | MNFETVIGLEVHVELNTNSKIFSPSSAHFGQEQNANTNVIDWSFPGVLPVMNKGVIDAGI | 60 |
| | MNFET+IGLEVHVELNTNSKIFSPSSAHFG++ NANTNVIDWSFPGVLPVMNKGVIDAGI | |
| Sbjct: 1 | MNFETIIGLEVHVELNTNSKIFSPSSAHFGEDPNANTNVIDWSFPGVLPVMNKGVIDAGI | 60 |
| Query: 61 | KAALALNMDIHQNMHFDRKNYFYPDNPKAYQISQFDEPIGYNGWIEIELEDGTRKKIRIE | 120 |
| | KAALALNMDIH+ MHFDRKNYFYPDNPKAYQISQFDEPIGYNGWI+I+LEDG+ KKIRIE | |
| Sbjct: 61 | KAALALNMDIHKEMHFDRKNYFYPDNPKAYQISQFDEPIGYNGWIDIKLEDGSTKKIRIE | 120 |
| Query: 121 | RAHLEEDAGKNTHGTDGYSYVDLNRQGVPLIEIVSEADMRSPEEAYAYLTALKEIIQYTG | 180 |
| | RAHLEEDAGKNTHGTDGYSYVDLNRQGVPLIEIVSEADMRSPEEAYAYLTALKEIIQYTG | |
| Sbjct: 121 | RAHLEEDAGKNTHGTDGYSYVDLNRQGVPLIEIVSEADMRSPEEAYAYLTALKEIIQYTG | 180 |
| Query: 181 | ISDVKMEEGSMRVDANISLRPYGQEEFGTKAELKNLNSFNNVRKGLIHEEKRQAQVLRSG | 240 |
| | ISDVKMEEGSMRVDANISLRPYGQE+FGTK ELKNLNSF+NVRKGL E +RQA++LRSG | |
| Sbjct: 181 | ISDVKMEEGSMRVDANISLRPYGQEQFGTKTELKNLNSFSNVRKGLEFEVERQAKLLRSG | 240 |
| Query: 241 | GQIQQETRRFDETTGETILMRVKEGSSDYRYFPEPDLPLFDISDEWIDQVRLELPEFPQE | 300 |
| | G I+QETRR+DE TILMRVKEG++DYRYFPEPDLPL++I D WID++R +LP+FP + | |
| Sbjct: 241 | GVIRQETRRYDEANKGTILMRVKEGAADYRYFPEPDLPLYEIDDAWIDEMRAQLPQFPAQ | 300 |
| Query: 301 | RRAKYVSSFGLSSYDASQLTATKATSDFFEKAVAIGGDAKQVSNWLQGEVAQFLNSESKS | 360 |
| | RRAKY GLS+YDASQLTATK SDFFE AV++GGDAKQVSNWLQGEVAQFLN+E K+ | |
| Sbjct: 301 | RRARYEEELGLSAYDASQLTATKVLSDFFETAVSLGGDARQVSNWLQGEVAQFLNAEGKT | 360 |
| Query: 361 | IEEIGLTPENLVEMIGLIADGTISSKIAKKVFVHLAKNGGSAEEFVKKAGLVQISDPEVL | 420 |
| | IEEI LTPENLVEMI +IADGTISSK+AKKVFVHLAKNGGSA +V+KAGLVQISDP VL | |
| Sbjct: 361 | IEEIALTPENLVEMIAIIADGTISSKMAKKVFVHLAKNGGSARAYVEKAGLVQISDPAVL | 420 |
| Query: 421 | IPIIHQVFADNEAAVIDFKSGKRNADKAFTGYLMKATKGQANPQVALKLLAQELAKLKE | 479 |
| | +PIIHQVFADNEAAV DFKSGKRNADKAFTG+LMKATKGQANPQVA +LLAQEL KL++ | |
| Sbjct: 421 | VPIIHQVFADNEAAVADFKSGKRNADKAFTGFLMKATKGQANPQVAQQLLAQELQKLRD | 479 |

[9895] Based on this analysis, it was predicted that these proteins and their epitopes could be useful antigens for vaccines or diagnostics.

### EXAMPLE 1797

[9896] A DNA sequence (GBSx1904) was identified in S. agalactiae <SEQ ID 5587> which encodes the amino acid sequence <SEQ ID 5588>. Analysis of this protein sequence reveals the following:

| Possible site: 34 | | | | | |
|---|---|---|---|---|---|
| >>> Seems to have an uncleavable N-term signal seq | | | | | |
| | INTEGRAL | Likelihood = −7.27 | Transmembrane | 108-124 | (105-125) |
| | INTEGRAL | Likelihood = −7.27 | Transmembrane | 278-294 | (268-301) |
| | INTEGRAL | Likelihood = −6.05 | Transmembrane | 191-207 | (188-208) |
| | INTEGRAL | Likelihood = −5.63 | Transmembrane | 219-235 | (215-242) |
| | INTEGRAL | Likelihood = −3.93 | Transmembrane | 41-57 | (39-58) |
| | INTEGRAL | Likelihood = −3.88 | Transmembrane | 132-148 | (131-150) |
| | INTEGRAL | Likelihood = −3.03 | Transmembrane | 254-270 | (253-272) |
| | INTEGRAL | Likelihood = −3.03 | Transmembrane | 79-95 | (79-95) |

```
----- Final Results -----
                              bacterial membrane --- Certainty = 0.3909(Affirmative) < succ>
                                bacterial outside --- Certainty = 0.0000(Not Clear) < succ>
                            bacterial cytoplasm --- Certainty = 0.0000(Not Clear) < succ>
```

[9897] A related GBS nucleic acid sequence <SEQ ID 10093> which encodes amino acid sequence <SEQ ID 10094> was also identified.

[9898] The protein has homology with the following sequences in the GENPEPT database.

| >GP:CAA04271 GB:AJ000733 hypothetical protein [Bacillus megaterium] | | |
|---|---|---|
| Identities = 102/292 (34%), Positives = 169/292 (56%), Gaps = 3/292 (1%) | | |
| Query: 6 | TKKEKGTMMTLAAGLAWGISGISGQYLMSH-GVHVNLLTSLRLLITGIFLLSLARSKQKE | 64 |
| | +++ G ++ + WG+SG QYL H + L +R+L++G+ LL++A SKQ+ | |
| Sbjct: 1 | SRRAWGLLLVIIGATMWGVSGTVAQYLFQHKSFNAEWLVVVRMLVSGLLLLAIA-SKQR- | 58 |
| Query: 65 | HLVAAWKQPKFLKQVLLFSIFGLVLNQYAFLRAIHLTNAGTATVLQYMAPILILSIVCIL | 124 |
| | ++ A WI + +LLF + G++ QY + AI NA TATVLQY +PI I+ + + | |
| Sbjct: 59 | NIFAIWKTKEERTSLLLFGVIGMLGVQYTYFAAIEAGNAATATVLQYTSPIFIIGYLAVQ | 118 |
| Query: 125 | NRQRPTSFEIIAIAMAILGTYMIATHGRLGSLAITPKGLMWGLGSAITYSIYILLPVKLI | 184 |
| | R+ P E+I++ + I GT+ +AT G L+IT L WG+G+A+T + Y L P +L+ | |
| Sbjct: 119 | ARKWPVKVEMISVVLVIAGTFFLATSGNFNELSITGWALFWGIGAAVTSAFYTLQPKRLL | 178 |
| Query: 185 | HEWGSTIVIGSGHFIGGILFSLVTKAWQYPLQINVMSILAYIGIIGIGTIFAYTFFLKGV | 244 |
| | +W S V+G GM IGG FS + W + +++S+ A + +I GT+ A+ +L+ + | |
| Sbjct: 179 | AKWSSIEVVGWGMVIGGASFSFIHPPWHIAGEWSLLSLCAVLFVIIFGTLIAFYCYLESL | 238 |
| Query: 245 | SIVGAVKGSLLASVEPVSSVFLTVLVLGEIFYPIDLLGMLFIFLAVTLISYK | 296 |
| | + A + +LAS EP+S+ L+VL L F + LG + I V L+S + | |
| Sbjct: 239 | KHISASEAIVLASREPLSAAALSVLWLHVTFGWTEWLGTILIIATVFLLSQR | 290 |

[9899] No corresponding DNA sequence was identified in S. pyogenes.

[9900] Based on this analysis, it was predicted that this protein and its epitopes, could be useful antigens for vaccines or diagnostics.

### EXAMPLE 1798

[9901] A DNA sequence (GBSx1905) was identified in S. agalactiae <SEQ ID 5589> which encodes the amino acid sequence <SEQ ID 5590>. Analysis of this protein sequence reveals the following:

```
Possible site: 59
>>> Seems to have no N-terminal signal sequence
----- Final Results -----
                            bacterial cytoplasm --- Certainty = 0.2103(Affirmative) < succ>
                              bacterial membrane --- Certainty = 0.0000(Not Clear) < succ>
                                bacterial outside --- Certainty = 0.0000(Not Clear) < succ>
```

[9902] A related GBS nucleic acid sequence <SEQ ID 10091> which encodes amino acid sequence <SEQ ID 10092> was also identified.

[9903] The protein has homology with the following sequences in the GENPEPT database.

| >GP:CAB14510 GB:Z99117 similar to hypothetical proteins [Bacillus subtilis] | | |
|---|---|---|
| Identities = 52/153 (33%), Positives = 88/153 (56%) | | |
| Query: 17 | YRPTFVVEAVYDLRAEDLLRHGIRAVLVDLDNTLIAWNNPDGTAEVRAWLDEMTTADISV | 76 |
| | + P V+ ++ + E L ++ ++ DLDNTL+ W+ P+ T + W +EM I V | |
| Sbjct: 6 | FLPDEFVKNIFHITPERLKERNVKGIITDLDNTLVEWDRPNATPRLIEWFEEMKEHGIKV | 65 |
| Query: 77 | VVVSNNNHARVERAVSRFGVDFVSRAMKPFTRGINMAIERYGFDRDEVIMVGDQLMTDIR | 136 |
| | +VSNNN RV+ G+ F+ +A KP + N A+ +++ +++GDQL+TD+ | |
| Sbjct: 66 | TIVSNNNERRVKLFSEPLGIPFIYKARKPMGKAFNRAVRNMELKKEDCVVIGDQLLTDVL | 125 |
| Query: 137 | ASHRAGIKSVLVKPIVKSDAWNTKFNRLRERRV | 169 |
| | +R G ++LV P+ SD +T+FNR ERR+ | |
| Sbjct: 126 | GGNRNGYHTILVVPVASSDGFITRFNRQVERRI | 158 |

[9904] A related DNA sequence was identified in S. pyogenes <SEQ ID 5591> which encodes the amino acid sequence <SEQ ID 5592>. Analysis of this protein sequence reveals the following:

Possible site: 51
>>> Seems to have no N-terminal signal sequence
----- Final Results -----
bacterial cytoplasm --- Certainty = 0.4252 (Affirmative) < succ>
bacterial membrane --- Certainty = 0.0000 (Not Clear) < succ>
bacterial outside --- Certainty = 0.0000 (Not Clear) < succ>

[9905] An alignment of the GAS and GBS proteins is shown below.

| Identities = 147/175 (84%), Positives = 158/175 (90%) | | | |
|---|---|---|---|
| Query: | 12 | LSIDDYRPTFVVEAVYDLRAEDLLRHGIRAVLVDLDNTLIAWNNPDGTAEVRAWLDEMTT | 71 |
| | | +SIDDYRPT++VEA+YDLRA DLLRHGI AVLVDLDNTLIAWNNPDGT EVRAWLDEMT | |
| Sbjct: | 20 | MSIDDYRPTYMVEAIYDLRANDLLRHGITAVLVDLDNTLIAWNNPDGTPEVRAWLDEMTI | 79 |
| Query: | 72 | ADISVVVVSNNNHARVERAVSRFGVDFVSRAMKPFTRGINMAIERYGFDRDEVIMVGDQL | 131 |
| | | ADISVVVVSNN H+RVERAVSRFGVDF+SRA+KPF GI AI RYGFDR+EVIMVGDQL | |
| Sbjct: | 80 | ADISVVVVSNNKHSRVERAVSRFGVDFISRALKPFAYGIEKAIARYGFDRNEVIMVGDQL | 139 |
| Query: | 132 | MTDIRASHRAGIKSVLVKPIVKSDAWNTKFNRLRERRVWKKIEENYGKIVYQKGI | 186 |
| | | MTDIRASHRAGIKSVLVKP+V SDAWNTK NR RERRV K+EE YGK+ YQKGI | |
| Sbjct: | 140 | MTDIRASHRAGIKSVLVKPLVASDAWNTKINRWRERRVMAKLEEKYGKLSYQKGI | 194 |

[9906] Based on this analysis, it was predicted that these proteins and their epitopes could be useful antigens for vaccines or diagnostics.

### EXAMPLE 1799

[9907] A DNA sequence (GBSx1906) was identified in S. agalactiae <SEQ ID 5593> which encodes the amino acid sequence <SEQ ID 5594>. Analysis of this protein sequence reveals the following:

Possible site: 15
>>> Seems to have no N-terminal signal sequence
----- Final Results -----
bacterial cytoplasm --- Certainty = 0.1091 (Affirmative) < succ>
bacterial membrane --- Certainty = 0.0000 (Not Clear) < succ>
bacterial outside --- Certainty = 0.0000 (Not Clear) < succ>

[9908] The protein has homology with the following sequences in the GENPEPT database.

| >GP:CAB14509 GB:Z99117 similar to hypothetical proteins | | | |
|---|---|---|---|
| [Bacillus subtilis] | | | |
| Identities = 220/373 (58%), Positives = 280/373 (74%), Gaps = 8/373 (2%) | | | |
| Query: | 1 | MEELFCIGCGARIQTENKDAAGYTPRAALEKGLETGELYCQRCFRLRHYNEITDVHITDD | 60 |
| | | ME++ CIGCG IQTE+K GY P A+L K + CQRCFRL++YNEI DV +TDD | |
| Sbjct: | 1 | MEKVVCIGCGVTIQTEDKTGLGYAPPASLTKE----NVICQRCFRLKNYNEIQDVSLTDD | 56 |
| Query: | 61 | EFLKLLHEVGDSDALVVNVIDIFDFNGSIIPGLSRFVAGNDVLLVGNKKDILPKSVKDGK | 120 |
| | | +FL +LH +G++D+LVV ++DIFDFNGS I GL R V GN +LLVGNK DILPKS+K + | |
| Sbjct: | 57 | DFLNILHGIGETDSLVVKIVDIFDFNGSWINGLQRLVGGNPILLVGNKADILPKSLKRER | 116 |
| Query: | 121 | VTQWLTERAHEEGLRPVDVILTSAQNHHAIKDLIDTIEKYRHGQDVYVVGVTNVGKSTLI | 180 |
| | | + QW+ A E GL+PVDV L SA I+++ID IE YR+G+DVYVVG TNVGKST I | |
| Sbjct: | 117 | LIQWMKREAKELGLKPVDVFLVSAGRGQGIREVIDAIEHYRNGKDVYVVGCTNVGKSTFI | 176 |
| Query: | 181 | NAIIREITGSRDVITTSRFPGTTLDKIEIPLDDGSYIFDTPGIIHRHQMAHYLTAKNLKY | 240 |
| | | N II+E++G D+ITTS+FPGTTLD IEIPLDDGS ++DTPGII+ HQMAHY+ K+LK | |
| Sbjct: | 177 | NRIIKEVSGEEDIITTSQFPGTTLDAIEIPLDDGSSLYDTPGIINNHQMAHYVNKKDLKI | 236 |
| Query: | 241 | VSPKKEIKPKTYQLNSEQTLFLAGLARFDFISGQKQGFTAYFDNNLNLHRTKLVGADEFY | 300 |
| | | +SPKKE+KP+T+QLN +QTL+ GLARFD++SG++ F Y N L +HRTKL AD Y | |
| Sbjct: | 237 | LSPKKELKPRTFQLNDQQTLYFGGLARFDYVSGERSPFICYMPNELMIHRTKLENADALY | 296 |
| Query: | 301 | TKHVGKLLTPPTGKEVSDFPKLVRHEFTIKD-KMDIVYSGLGWIRVKSEAENPVVVAAWA | 359 |
| | | KH G+LLTPP E+ +FP+LV H FTIKD K DIV+SGLGW+ V + V A+A | |
| Sbjct: | 297 | EKHAGELLTPPGKDEMDEFPELVAHTFTIKDKKTDIVFSGLGWVTVHDADKK---VTAYA | 353 |
| Query: | 360 | PEGVAVVLRKALI | 372 |
| | | P+GV V +R++LI | |
| Sbjct: | 354 | PKGVHVFVRRSLI | 366 |

[9909] A related DNA sequence was identified in S. pyogenes <SEQ ID 5595> which encodes the amino acid sequence <SEQ ID 5596>. Analysis of this protein sequence reveals the following:

Possible site: 15
>>> Seems to have an uncleavable N-term signal seq
----- Final Results -----
bacterial membrane --- Certainty = 0.0000 (Not Clear) < succ>
bacterial outside --- Certainty = 0.0000 (Not Clear) < succ>
bacterial cytoplasm --- Certainty = 0.0000 (Not Clear) < succ>

[9910] The protein has homology with the following sequences in the databases:

| >GP:CAB14509 GB:Z99117 similar to hypothetical proteins | | | |
|---|---|---|---|
| [Bacillus subtilis] | | | |
| Identities = 220/373 (58%), Positives = 286/373 (75%), Gaps = 8/373 (2%) | | | |
| Query: | 1 | MEELFCIGCGIQIQTEDKEKAGFTPAAALKKGMETGELYCQRCFRLRHYNEITDVHITDD | 60 |
| | | ME++ CIGCG+ IQTEDK G+ P A+L K + CQRCFRL++YNEI DV +TDD | |
| Sbjct: | 1 | MEKVVCIGCGVTIQTEDKTGLGYAPPASLTKE----NVICQRCFRLKNYNEIQDVSLTDD | 56 |
| Query: | 61 | EFLRLLHEVGDSDALVVNVIDIFDFNGSIIPGLSRFISGNDVLLVGNKKDILPKSVKDGK | 120 |
| | | +FL +LH +G++D+LVV ++DIFDFNGS I GL R + GN +LLVGNK DILPKS+K + | |
| Sbjct: | 57 | DFLNILHGIGETDSLVVKIVDIFDFNGSWINGLQRLVGGNPILLVGNKADILPKSLKRER | 116 |
| Query: | 121 | VTQWLTERAHEEGLRPLDVMLTSAQNKYAIKDLIGRINELRNGRDVYVVGVTNVGKSTLI | 180 |
| | | + QW+ A E GL+P+DV L SA I+++I I RNG+DVYVVG TNVGKST I | |
| Sbjct: | 117 | LIQWMKREAKELGLKPVDVFLVSAGRGQGIREVIDAIEHYRNGKDVYVVGCTNVGKSTFI | 176 |
| Query: | 181 | NAIIQEITGNKDVITTSRFPGTTLDKIEIPLDDGTFIFDTPGIIHRHQMAHYLSPKELKI | 240 |
| | | N II+E++G +D+ITTS+FPGTTLD IEIPLDDG+ ++DTPGII+ HQMAHY++ K+LKI | |
| Sbjct: | 177 | NRIIKEVSGEEDIITTSQFPGTTLDAIEIPLDDGSSLYDTPGIINNHQMAHYVNKKDLKI | 236 |
| Query: | 241 | VSPKKEIKPKTYQLNPEQTLFLGGLARFDFINGERQGFTAFFDNQLELHRTKLAGADAFY | 300 |
| | | +SPKKE+KP+T+QLN +QTL+ GGLARFD+++GER F + N+L +HRTKL ADA Y | |
| Sbjct: | 237 | LSPKKELKPRTFQLNDQQTLYFGGLARFDYVSGERSPFICYMPNELMIHRTKLENADALY | 296 |
| Query: | 301 | DKHVGTLLTPPDKKELTAFPKLVRHEFTI-DQKMDIVFSGLGWIRVNGQKDSKAIVAAWA | 359 |
| | | +KH G LLTPP K E+ FP+LV H FTI D+K DIVFSGLGW+ V+ D+ V A+A | |
| Sbjct: | 297 | EKHAGELLTPPGKDEMDEFPELVAHTFTIKDKKTDIVFSGLGWVTVH---DADKKVTAYA | 353 |
| Query: | 360 | PEGVAVIVRKAII | 372 |
| | | P+GV V VR+++I | |
| Sbjct: | 354 | PKGVHVFVRRSLI | 366 |

[9911] An alignment of the GAS and GBS proteins is shown below.

| Identities = 308/372 (82%), Positives = 343/372 (91%) | | | |
|---|---|---|---|
| Query: | 1 | MEELFCIGCGARIQTENKDAAGYTPRAALEKGLETGELYCQRCFRLRHYNEITDVHITDD | 60 |
| | | MEELFCIGCG +IQTE+K+ AG+TP AAL+KG+ETGELYCQRCFRLRHYNEITDVHITDD | |
| Sbjct: | 1 | MEELFCIGCGIQIQTEDKEKAGFTPAAALKKGMETGELYCQRCFRLRHYNEITDVHITDD | 60 |
| Query: | 61 | EFLKLLHEVGDSDALVVNVIDIFDFNGSIIPGLSRFVAGNDVLLVGNKKDILPKSVKDGK | 120 |
| | | EFL+LLHEVGDSDALVVNVIDIFDFNGSIIPGLSRF++GNDVLLVGNKKDILPKSVKDGK | |
| Sbjct: | 61 | EFLRLLHEVGDSDALVVNVIDIFDFNGSIIPGLSRFISGNDVLLVGNKKDILPKSVKDGR | 120 |
| Query: | 121 | VTQWLTERAHEEGLRPVDVILTSAQNHHAIKDLIDTIEKYRHGQDVYVVGVTNVGKSTLI | 180 |
| | | VTQWLTERAHEEGLRP+DV+LTSAQN +AIKDLI I + R+G+DVYVVGVTNVGKSTLI | |
| Sbjct: | 121 | VTQWLTERAHEEGLRPLDVMLTSAQNKYAIKDLIGRINELRNGRDVYVVGVTNVGKSTLI | 180 |
| Query: | 181 | NAIIREITGSRDVITTSRFPGTTLDKIEIPLDDGSYIFDTPGIIHRHQMAHYLTAKNLKY | 240 |
| | | NAII+EITG++DVITTSRFPGTTLDKIEIPLDDG++IFDTPGIIHRHQMAHYL+ K LK | |
| Sbjct: | 181 | NAIIQEITGNKDVITTSRFPGTTLDKIEIPLDDGTFIFDTPGIIHRHQMAHYLSPKELKI | 240 |
| Query: | 241 | VSPKKEIKPKTYQLNSEQTLFLAGLARFDFISGQKQGFTAYFDNNLNLHRTKLVGADEFY | 300 |
| | | VSPKKEIKPKTYQLN EQTLFL GLARFDFI+G++QGFTA+FDN L LHRTKL GAD FY | |
| Sbjct: | 241 | VSPKKEIKPKTYQLNPEQTLFLGGLARFDFINGERQGFTAFFDNQLELHRTKLAGADAFY | 300 |
| Query: | 301 | TKHVGKLLTPPTGKEVSDFPKLVRHEFTIKDKMDIVYSGLGWIRVKSEAENPVVVAAWAP | 360 |
| | | KHVG LLTPP KE++ FPKLVRHEFTI KMDIV+SGLGWIRV + ++ +VAAWAP | |
| Sbjct: | 301 | DKHVGTLLTPPDKKELTAFPKLVRHEFTIDQKMDIVFSGLGWIRVNGQKDSKAIVAAWAP | 360 |
| Query: | 361 | EGVAVVLRKALI | 372 |
| | | EGVAV++RKA+I | |
| Sbjct: | 361 | EGVAVIVRKAII | 372 |

[9912] Based on this analysis, it was predicted that these proteins and their epitopes could be useful antigens for vaccines or diagnostics.

### EXAMPLE 1800

[9913] A DNA sequence (GBSx1907) was identified in S. agalactiae <SEQ ID 5597> which encodes the amino acid sequence <SEQ ID 5598>. Analysis of this protein sequence reveals the following:

Possible site: 18
>>>Seems to have no N-terminal signal sequence
----- Final Results -----
bacterial cytoplasm --- Certainty = 0.2948 (Affirmative) < succ>
bacterial membrane --- Certainty = 0.0000 (Not Clear) < succ>
bacterial outside --- Certainty = 0.0000 (Not Clear) < succ>

[9914] The protein has homology with the following sequences in the GENPEPT database.

| >GP:CAB14507 GB:Z99117 similar to dihydrodipicolinate reductase | | | |
|---|---|---|---|
| [Bacillus subtilis] | | | |
| Identities = 49/97 (50%), Positives = 67/97 (68%), Gaps = 2/97 (2%) | | | |
| Query: | 1 | MLTSKQRAFLKSEAHSMKPIIQIGKNGLNDQIKTSVRNALDARELIKVTLLQNTDEDIHD | 60 |
| | | MLT KQ+ FL+S+AH + PI Q+GK G+ND + + AL+ARELIKV++LQN +ED +D | |
| Sbjct: | 1 | MLTGKQKRFLRSKAHHLTPIFQVGKGGVNDNMIKQIAEALEARELIKVSVLQNCEEDKND | 60 |
| Query: | 61 | VAEVLEDEIGCDTVLKIGRILILYKESARKENRKISV | 97 |
| | | VAE L V IG ++LYKES KEN++I + | |
| Sbjct: | 61 | VAEALVKGSRSQLVQTIGNTIVLYKES--KENKQIEL | 95 |

[9915] A related DNA sequence was identified in S. pyogenes <SEQ ID 5599> which encodes the amino acid sequence <SEQ ID 5600>. Analysis of this protein sequence reveals the following:

Possible site: 42
>>> Seems to have no N-terminal signal sequence
----- Final Results ----
bacterial cytoplasm --- Certainty = 0.2839 (Affirmative) < succ>
bacterial membrane --- Certainty = 0.0000 (Not Clear) < succ>
bacterial outside --- Certainty = 0.0000 (Not Clear) < succ>

[9916] An alignment of the GAS and GBS proteins is shown below.

| Identities = 89/102 (87%), Positives = 98/102 (95%) | | | |
|---|---|---|---|
| Query: | 1 | MLTSKQRAFLKSEAHSMKPIIQIGKNGLNDQIKTSVRNALDARELIKVTLLQNTDEDIHD | 60 |
| | | MLTSKQRAFLKSEAHS+KPI+QIGKNGLND IKTS+R ALDARELIKVTLLQNTDEDIH+ | |
| Sbjct: | 1 | MLTSKQRAFLKSEAHSLKPIVQIGKNGLNDHIKTSIRQALDARELIKVTLLQNTDEDIHE | 60 |
| Query: | 61 | VAEVLEDEIGCDTVLKIGRILILYKESARKENRKISVKVKAV | 102 |
| | | VAE+LE+EIGCDTVLKIGRILILYK SA+KENRK+S KVKA+ | |
| Sbjct: | 61 | VAEILEEEIGCDTVLKIGRILILYKVSAKKENRKLSPKVKAI | 102 |

[9917] Based on this analysis, it was predicted that these proteins and their epitopes could be useful antigens for vaccines or diagnostics.

### EXAMPLE 1801

[9918] A DNA sequence (GBSx1908) was identified in S. agalactiae <SEQ ID 5601> which encodes the amino acid sequence <SEQ ID 5602>. Analysis of this protein sequence reveals the following:

| Possible site: 16 | | | | |
|---|---|---|---|---|
| >>> Seems to have no N-terminal signal sequence | | | | |
| INTEGRAL | Likelihood = −2.66 | Transmembrane | 3-19 | (1-21) |

----- Final Results -----
bacterial membrane --- Certainty = 0.2062 (Affirmative) < succ>
bacterial outside --- Certainty = 0.0000 (Not Clear) < succ>
bacterial cytoplasm --- Certainty = 0.0000 (Not Clear) < succ>

[9919] A related GBS nucleic acid sequence <SEQ ID 10089> which encodes amino acid sequence <SEQ ID 10090> was also identified.

[9920] The protein has homology with the following sequences in the GENPEPT database.

| >GP:CAB14506 GB:Z99117 similar to hypothetical proteins | | | |
|---|---|---|---|
| [Bacillus subtilis] | | | |
| Identities = 85/187 (45%), Positives = 134/187 (71%) | | | |
| Query: | 38 | KQIGIMGGNFNPVHNAHLVVADQVRQQLCLDQVLLMPEFQPPHIDKKETIDEQHRLKMLE | 97 |
| | | K+IGI GG F+P HN HL++A++V Q LD++ MP PPH ++ D HR++ML+ | |
| Sbjct: | 2 | KKIGIFGGTFDPPHNGHLLMANEVLYQAGLDEIWFMPNQIPPHKQNEDYTDSFHRVEMLK | 61 |
| Query: | 98 | LAIEGIDGLSIEPIEIERKGISYTYDTMKLLIEKNPDVDYYFIIGADMVEYLPKWHRIDE | 157 |
| | | LAI+ +E +E+ER+G SYT+DT+ LL ++ P+ +FIIGADM+EYLPKW+++DE | |
| Sbjct: | 62 | LAIQSNPSFKLELVEMEREGPSYTFDTVSLLKQRYPNDQLFFIIGADMIEYLPKWYKLDE | 121 |
| Query: | 158 | LVKMVQFVGVQRPKYKAGTSYPVIWVDLPLMDISSSMIRQFIKSNRQPNYLLPREVLDYI | 217 |
| | | L+ ++QF+GV+RP + T YP+++ D+P ++SS+MIR+ KS + +YL+P +V Y+ | |
| Sbjct: | 122 | LLNLIQFIGVKRPGFHVETPYPLLFADVPEFEVSSTMIRERFKSKKPTDYLIPDKVKKYV | 181 |
| Query: | 218 | RKEGLYK | 224 |
| | | + GLY+ | |
| Sbjct: | 182 | EENGLYE | 188 |

[9921] A related DNA sequence was identified in S. pyogenes <SEQ ID 5603> which encodes the amino acid sequence <SEQ ID 5604>. Analysis of this protein sequence reveals the following:

Possible site: 44
>>> Seems to have no N-terminal signal sequence
----- Final Results -----
bacterial cytoplasm --- Certainty = 0.4660 (Affirmative) < succ>
bacterial membrane --- Certainty = 0.0000 (Not Clear) < succ>
bacterial outside --- Certainty = 0.0000 (Not Clear) < succ>

[9922] An alignment of the GAS and GBS proteins is shown below.

| Identities = 172/210 (81%), Positives = 196/210 (92%) | | | |
|---|---|---|---|
| Query: | 15 | MALELLTPFTKVELEEKKRDTNRKQIGIMGGNFNPVHNAHLVVADQVRQQLCLDQVLLMP | 74 |
| | | MALELLTPFTKVELEE+K+++NRKQIGI+GGNFNP+HNAHLVVADQVRQQL LDQVLLMP | |
| Sbjct: | 1 | MALELLTPFTKVELEEEKKESNRKQIGILGGNFNPIHNAHLVVADQVRQQLGLDQVLLMP | 60 |
| Query: | 75 | EFQPPHIDKKETIDEQHRLKMLELAIEGIDGLSIEPIEIERKGISYTYDTMKLLIEKNPD | 134 |
| | | E +PPH+D KETIDE+HRL+MLELAIE ++GL+IE E+ER+GISYTYDTM L E++PD | |
| Sbjct: | 61 | ECKPPHVDAKETIDEKHRLRMLELAIEDVEGLAIETCELERQGISYTYDTMLYLTEQHPD | 120 |
| Query: | 135 | VDYYFIIGADMVEYLPKWHRIDELVKMVQFVGVQRPKYKAGTSYPVIWVDLPLMDISSSM | 194 |
| | | VD+YFIIGADMV+YLPKWHRIDELVK+VQFVGVQRPKYKAGTSYPVIWVDLPL+DISSSM | |
| Sbjct: | 121 | VDFYFIIGADMVDYLPKWHRIDELVKLVQFVGVQRPKYKAGTSYPVIWVDLPLIDISSSM | 180 |
| Query: | 195 | IRQFIKSNRQPNYLLPREVLDYIRKEGLYK | 224 |
| | | IR FIK RQPNYLLP+ VLDYI +EGLY+ | |
| Sbjct: | 181 | IRDFIKKGRQPNYLLPKRVLDYITQEGLYQ | 210 |

[9923] SEQ ID 5602 (GBS651) was expressed in E. coli as a GST-fusion product. SDS-PAGE analysis of total cell extract is shown in FIG. 132 (lane 8-10; MW 53.3 kDa) and in FIG. 186 (lane 8; MW 53 kDa). It was also expressed in E. coli as a His-fusion product. SDS-PAGE analysis of total cell extract is shown in FIG. 132 (lane 12; MW 28.4 kDa) and in FIG. 140 (lane 11; MW 20 kDa).

[9924] Purified GBS651-GST is shown in FIG. 243, lane 4; purified GBS651-His is shown in FIG. 229, lane 9.

[9925] Based on this analysis, it was predicted that these proteins and their epitopes could be useful antigens for vaccines or diagnostics.

### EXAMPLE 1802

[9926] A DNA sequence (GBSx1909) was identified in S. agalactiae <SEQ ID 5605> which encodes the amino acid sequence <SEQ ID 5606>. Analysis of this protein sequence reveals the following:

Possible site: 32
>>> Seems to have no N-terminal signal sequence
----- Final Results -----
bacterial cytoplasm --- Certainty = 0.4281 (Affirmative) < succ>
bacterial membrane --- Certainty = 0.0000 (Not Clear) < succ>
bacterial outside --- Certainty = 0.0000 (Not Clear) < succ>

[9927] The protein has homology with the following sequences in the GENPEPT database.

| >GP:CAB14505 GB:Z99117 similar to hypothetical proteins | | | |
|---|---|---|---|
| [Bacillus subtilis] | | | |
| Identities = 79/180 (43%), Positives = 115/180 (63%) | | | |
| Query: | 9 | LDRTELLSKVRHMMSDKRFNHVLGVERAAIELAERYGYDKEKAGLAALLHDYAKELSDDE | 68 |
| | | ++R E L+ V+ +++ R+ H +GV AIELAER+G D +KA +AA+ HDYAK +E | |
| Sbjct: | 1 | MNREEALACVKQQLTEHRYIHTVGVMNTAIELAERFGADSKKAEIAAIFHDYAKFRPKEE | 60 |
| Query: | 69 | FLRLIDKYQPDPDLKKWGNNIWHGLVGIYKIQEDLAIKDQDILAAIAKHTVGSAQMSTLD | 128 |
| | | ++I + + L +WH VG Y +Q + ++D+DIL AI HT G M+ L+ | |
| Sbjct: | 61 | MKQIIAREKMPAHLLDHNPELWHAPVGAYLVQREAGVQDEDILDAIRYHTSGRPGMTLLE | 120 |
| Query: | 129 | KIVYVADYIEHNRDFPGVEEARELAKVDLNKAVAYETARTVAFLASKAQPIYPKTIETYN | 188 |
| | | K++YVADYIE NR FPGV+E R+LA+ DLN+A+ T+ FL K QP++P T TYN | |
| Sbjct: | 121 | KVIYVADYIEPNRAFPGVDEVRKLAETDLNQALIQSIKNTMVFLMKKNQPVFPDTFLTYN | 180 |

[9928] A related DNA sequence was identified in S. pyogenes <SEQ ID 5607> which encodes the amino acid sequence <SEQ ID 5608>. Analysis of this protein sequence reveals the following:

Possible site: 41
>>> Seems to have no N-terminal signal sequence
----- Final Results -----
bacterial cytoplasm --- Certainty = 0.2615 (Affirmative) < succ>
bacterial membrane --- Certainty = 0.0000 (Not Clear) < succ>
bacterial outside --- Certainty = 0.0000 (Not Clear) < succ>

[9929] An alignment of the GAS and GBS proteins is shown below.

| Identities = 130/194 (67%), Positives = 159/194 (81%) | | | |
|---|---|---|---|
| Query: | 1 | MTYKDYTGLDRTELLSKVRHMMSDKRFNHVLGVERAAIELAERYGYDKEKAGLAALLHDY | 60 |
| | | MTY+DY RTELL+K+ MS KRF HVLGVE+AA+ LAE YG + +KAGLAALLHDY | |
| Sbjct: | 1 | MTYEDYLPYSRTELLAKIAEQMSPKRFKHVLGVEKAALSLAECYGCNPDKAGLAALLHDY | 60 |
| Query: | 61 | AKELSDDEFLRLIDKYQPDPDLKKWGNNIWHGLVGIYKIQEDLAIKDQDILAAIAKHTVG | 120 |
| | | AKE D FL LIDKYQ P+L KW NN+WHG+VGIYKIQEDL +KD+DIL AI HTVG | |
| Sbjct: | 61 | AKECPDQVFLDLIDKYQLSPELAKWNNNVWHGMVGIYKIQEDLGLKDKDILRAIEIHTVG | 120 |
| Query: | 121 | SAQMSTLDKIVYVADYIEHNRDFPGVEEARELAKVDLNKAVAYETARTVAFLASKAQPIY | 180 |
| | | +A+M+ LDK++YVADYIE R FP V++AR++AK+DLN+AVAYET TVA+LASKAQPI+ | |
| Sbjct: | 121 | AAEMTLLDKVLYVADYIEEGRIFPLVDDARKIAKLDLNQAVAYETVNTVAYLASKAQPIF | 180 |
| Query: | 181 | PKTIETYNAYIPYL | 194 |
| | | P+T++TYNA+ YL | |
| Sbjct: | 181 | PQTLDTYNAFCSYL | 194 |

[9930] Based on this analysis, it was predicted that these proteins and their epitopes could be useful antigens for vaccines or diagnostics.

### EXAMPLE 1803

[9931] A DNA sequence (GBSx1910) was identified in S. agalactiae <SEQ ID 5609> which encodes the amino acid sequence <SEQ ID 5610>. Analysis of this protein sequence reveals the following:

| Possible site: 56 | | | | |
|---|---|---|---|---|
| >>> Seems to have an uncleavable N-term signal seq | | | | |
| INTEGRAL | Likelihood = −2.34 | Transmembrane | 12-28 | (10-28) |

----- Final Results -----
bacterial membrane --- Certainty = 0.1935 (Affirmative) < succ>
bacterial outside --- Certainty = 0.0000 (Not Clear) < succ>
bacterial cytoplasm --- Certainty = 0.0000 (Not Clear) < succ>

[9932] A related GBS nucleic acid sequence <SEQ ID 10087> which encodes amino acid sequence <SEQ ID 10088> was also identified.

[9933] The protein has homology with the following sequences in the GENPEPT database.

| >GP:AAG19496 GB:AE005041 Vng1100c | | | |
|---|---|---|---|
| [Halobacterium sp. NRC-1] | | | |
| Identities = 46/175 (26%), Positives = 82/175 (46%), Gaps = 12/175 (6%) | | | |
| Query: | 22 | ALLLIDIQQGIMDKK--PKHLTNFAVLLDDLLLSAKGSNCEVIWIRHHDKE----LPQGS | 75 |
| | | AL+L+D QQG D ++ + ++LL + + + + +RH+ E L QG | |
| Sbjct: | 7 | ALVLVDFQQGFADPAWGDRNNPDAEAHAEELLAAWRDAAAPIAHVRHNSTEATSPLRQGE | 66 |
| Query: | 76 | PQWEIWEQRHLVTHHKIIDKTYNSCFKDTHLHDYLQSKHISQLIMMGLQTEYCFDTSVKV | 135 |
| | | P + + K+ N F DT L +L+ + L++ GL T++C T+V++ | |
| Sbjct: | 67 | PGFAYTDGLAPAADEPEFVKSVNGAFVDTALEGWLRDRDTGSLVVCGLTTDHCVSTTVRM | 126 |
| Query: | 136 | AFEYGYDIFIPQGGHLTFDTPTLSGDSIKK---HYENIWHHR--FATMVAKDSLL | 185 |
| | | A G+D+ + + T D TL G+ + H + H R FAT+ ++L | |
| Sbjct: | 127 | ADNRGFDVTLVRDATATHDR-TLDGERLPPSVVHRTALAHLRGEFATLATTATVL | 180 |

[9934] No corresponding DNA sequence was identified in S. pyogenes.

[9935] SEQ ID 5610 (GBS652) was expressed in E. coli as a GST-fusion product. SDS-PAGE analysis of total cell extract is shown in FIG. 133 (lane 2 & 3; MW 49.7 kDa)+lane 4; MW 27 kDa) and in FIG. 186 (lane 9; MW 50 kDa). It was also expressed in E. coli as a His-fusion product. SDS-PAGE analysis of total cell extract is shown in FIG. 133 (lane 5 & 7; MW 24.8 kDa) and in FIG. 178 (lane 10; MW 25 kDa). Purified GBS652-GST is shown in FIG. 243, lane 9; purified GBS652-His is shown in FIG. 229, lane 10.

[9936] Based on this analysis, it was predicted that this protein and its epitopes, could be useful antigens for vaccines or diagnostics.

### EXAMPLE 1804

[9937] A DNA sequence (GBSx1911) was identified in S. agalactiae <SEQ ID 5611> which encodes the amino acid sequence <SEQ ID 5612>. Analysis of this protein sequence reveals the following:

```
Possible site: 34
>>> Seems to have no N-terminal signal sequence
----- Final Results -----
bacterial cytoplasm --- Certainty = 0.0945 (Affirmative) <succ>
  bacterial membrane --- Certainty = 0.0000 (Not Clear) <succ>
    bacterial outside --- Certainty = 0.0000 (Not Clear) <succ>
```

[9938] The protein has homology with the following sequences in the GENPEPT database.

| >GP:CAB14504 GB:Z99117 similar to hypothetical proteins | | |
|---|---|---|
| [Bacillus subtilis] | | |
| Identities = 55/118 (46%), Positives = 82/118 (68%) | | |
| Query: 1 | MTEKDLLQLVVKAADEKRAEDIVILDLQPVTSVADYFVIMSASNSRQLEAIADNIREQVK | 60 |
| | M +K +L++ A D+KRAEDI+ LD++ ++ VADYF+I ++ +Q++AIA I++Q | |
| Sbjct: 1 | MNQKSILKIAAAACDDKRAEDILALDMEGISLVADYFLICHGNSDKQVQAIAREIKDQAD | 60 |
| Query: 61 | GNGGDASHLEGDSKAGWVLLDLNSVVVHIFSEDERQHYNLEKLWHEAPLLDAEVFMTE | 118 |
| | NG +EG +A WVL+DL VVVH+F +DER +YNLEKLW +APL D + M + | |
| Sbjct: 61 | ENGIQVKKMEGFDEARWVLVDLGDVVVHVFHKDERSYYNLEKLWGDAPLADLDFGMNQ | 118 |

[9939] A related DNA sequence was identified in S. pyogenes <SEQ ID 5613> which encodes the amino acid sequence <SEQ ID 5614>. Analysis of this protein sequence reveals the following:

| Possible site: 50 | | |
|---|---|---|
| >>> Seems to have no N-terminal signal sequence | | |
| INTEGRAL | Likelihood = −0.69 | Transmembrane 91-107 (91-107) |

```
----- Final Results -----
  bacterial membrane --- Certainty = 0.1277 (Affirmative) <succ>
    bacterial outside --- Certainty = 0.0000 (Not Clear) <succ>
bacterial cytoplasm --- Certainty = 0.0000 (Not Clear) <succ>
```

[9940] The protein has homology with the following sequences in the databases:

| >GP:CAB14504 GB:Z99117 similar to hypothetical proteins | | |
|---|---|---|
| [Bacillus subtilis] | | |
| Identities = 55/113 (48%), Positives = 80/113 (70%) | | |
| Query: 17 | MKKEELLKIVVEATEEKRAKDILALDLEGLTSLTDYFVIASATNSRQLEAIADNIREKVK | 76 |
| | M ++ +LKI A ++KRA+DILALD+EG++ + DYF+I + +Q++AIA I+++ | |
| Sbjct: 1 | MNQKSILKIAAAACDDKRAEDILALDMEGISLVADYFLICHGNSDKQVQAIAREIKDQAD | 60 |
| Query: 77 | EAGGDASHVEGNSQAGWVLLDLTDVVVHLFLEDERYHYNLEKLWHEAPAVALD | 129 |
| | E G +EG +A WVL+DL DVVVH+F +DER +YNLEKLW +AP LD | |
| Sbjct: 61 | ENGIQVKKMEGFDEARWVLVDLGDVVVHVFHKDERSYYNLEKLWGDAPLADLD | 113 |

[9941] An alignment of the GAS and GBS proteins is shown below.

| Identities = 78/116 (67%), Positives = 100/116 (85%) | | |
|---|---|---|
| Query: 1 | MTEKDLLQLVVKAADEKRAEDIVILDLQPVTSVADYFVIMSASNSRQLEAIADNIREQVK | 60 |
| | M +++LL++VV+A +EKRA+DI+ LDL+ +TS+ DYFVI SA+NSRQLEAIADNIRE+VK | |
| Sbjct: 17 | MKKEELLKIVVEATEEKRAKDILALDLEGLTSLTDYFVIASATNSRQLEAIADNIREKVK | 76 |
| Query: 61 | GNGGDASHLSGDSKAGWVLLDLNSVVVHIFSEDERQHYNLEKLWHEAPLLDAEVFM | 116 |
| | GGDASH+EG+S+AGWVLLDL VVVH+F EDER HYNLEKLWHEAP + + ++ | |
| Sbjct: 77 | EAGGDASHVEGNSQAGWVLLDLTDVVVHLFLEDERYHYNLEKLWHEAPAVALDAYL | 132 |

[9942] Based on this analysis, it was predicted that these proteins and their epitopes could be useful antigens for vaccines or diagnostics.

### EXAMPLE 1805

[9943] A DNA sequence (GBSx1912) was identified in S. agalactiae <SEQ ID 5615> which encodes the amino acid sequence <SEQ ID 5616>. Analysis of this protein sequence reveals the following:

```
Possible site: 19
>>> Seems to have no N-terminal signal sequence
----- Final Results -----
bacterial cytoplasm --- Certainty = 0.2415 (Affirmative) <succ>
  bacterial membrane --- Certainty = 0.0000 (Not Clear) <succ>
    bacterial outside --- Certainty = 0.0000 (Not Clear) <succ>
```

[9944] The protein has no significant homology with any sequences in the GENPEPT database.

[9945] No corresponding DNA sequence was identified in S. pyogenes.

[9946] Based on this analysis, it was predicted that this protein and its epitopes, could be useful antigens for vaccines or diagnostics.

### EXAMPLE 1806

[9947] A DNA sequence (GBSx1913) was identified in S. agalactiae <SEQ ID 5617> which encodes the amino acid sequence <SEQ ID 5618>. Analysis of this protein sequence reveals the following:

```
Possible site: 21
>>> Seems to have no N-terminal signal sequence
----- Final Results -----
bacterial cytoplasm --- Certainty = 0.1570 (Affirmative) <succ>
  bacterial membrane --- Certainty = 0.0000 (Not Clear) <succ>
    bacterial outside --- Certainty = 0.0000 (Not Clear) <succ>
```

[9948] The protein has homology with the following sequences in the GENPEPT database.

| >GP:CAB14503 GB:Z99117 similar to hypothetical proteins [Bacillus subtilis] | | |
|---|---|---|
| Identities = 86/242 (35%), Positives = 154/242 (63%), Gaps = 4/242 (1%) | | |
| Query: 4 | YETFAAVYDAVMDDTLYAKWTDFSLRHFPKGKKKLLELACGTGIQSVRFAQAGYAVTGLD | 63 |
| | Y+ FA+VYD +M Y +WT + P+ K ++L+LACGTG S+R A+ G+ VTG+D | |
| Sbjct: 3 | YQGFASVYDELMSHAPYDQWTKWIEASLPE-KGRILDLACGTGEISIRLAEKGFEVTGID | 61 |
| Query: 64 | LSGDMLKLAKKRATSAHQSIQFIEGNMLDLSNV-GKYDLITCYSDSICYMQDEVEVGDVF | 122 |
| | LS +ML A+++ +S+ Q I F++ +M +++ G++D + DS+ Y++ + +V + F | |
| Sbjct: 62 | LSEEMLSFAQQKVSSS-QPILFLQQDMREITGFDGQFDAVVICCDSLNYLKTKNDVIETF | 120 |
| Query: 123 | IEVYKALEENGVFIFDVHSTYQTDKVFPGYSYHENADDFAMVWDTYEDDAPHSIVHELTF | 182 |
| | V++ L+ G+ +FDVHS+++ +VFP ++ + +D + +W ++ S++H+++F | |
| Sbjct: 121 | KSVFRVLKPEGILLFDVHSSFKIAEVFPDSTFADQDEDISYIWQSFAGSDELSVIHDMSF | 180 |
| Query: 183 | FVQEEDGRFTRHDEVHEERTYDILTYDILLEQAGFKDVKVYADFEDKKPTATSARWFFVA | 242 |
| | FV + + R DE HE+RT+ + Y+ +L+ GF+ +V ADF D +P+A S R FF A | |
| Sbjct: 181 | FVWNGEA-YDRFDETHEQRTFPVEEYEEMLKNCGFQLHRVTADFTDTEPSAQSERLFFKA | 239 |
| Query: 243 | HK | 244 |
| | K | |
| Sbjct: 240 | QK | 241 |

[9949] A related DNA sequence was identified in S. pyogenes <SEQ ID 5619> which encodes the amino acid sequence <SEQ ID 5620>. Analysis of this protein sequence reveals the following:

```
Possible site: 53
>>> Seems to have no N-terminal signal sequence
----- Final Result -----
bacterial cytoplasm --- Certainty = 0.2315 (Affirmative) <succ>
  bacterial membrane --- Certainty = 0.0000 (Not Clear) <succ>
    bacterial outside --- Certainty = 0.0000 (Not Clear) <succ>
```

[9950] An alignment of the GAS and GBS proteins is shown below.

| Identities = 191/243 (78%), Positives = 215/243 (87%), Gaps = 2/243 (0%) | | |
|---|---|---|
| Query: 4 | YETFAAVYDAVMDDTLYAKWTDFSLRHFPK--GKKKLLELACGTGIQSVRFAQAGYAVTG | 61 |
| | YE FA+VYDAVMDD+LY WTDFSLRH PK G+ +LLELACGTGIQSVRFAQAG+ VTG | |
| Sbjct: 21 | YEKFASVYDAVMDDSLYDLWTDFSLRHLPKSKGRNRLLELACGTGIQSVRFAQAGFDVTG | 80 |
| Query: 62 | LDLSGDMLKLAKKRATSAHQSIQFIEGNMLDLSNVGKYDLITCYSDSICYMQDEVEVGDV | 121 |
| | LDLS DML +AKKRA SA + I FI+GNMLDLS VG++D +TCYSDSICYMQDEV+VGDV | |
| Sbjct: 81 | LDLSQDMLAIAKKRAQSAKKKIDFIQGNMLDLSQVGQFDFVTCYSDSICYMQDEVDVGDV | 140 |
| Query: 122 | FIEVYKALEENGVFIFDVHSTYQTDKVFPGYSYHENADDFAMVWDTYEDDAPHSIVHELT | 181 |
| | F EVY L +G+FIFDVHSTYQTD+ FPGYSYHENADDFAMVWDTY D+APHS+VHELT | |
| Sbjct: 141 | FKEVYDVLANDGIFIFDVHSTYQTDECEPGYSYHENADDFAMVWDTYADEAPHSVVHELT | 200 |
| Query: 182 | FFVQEEDGRFTRHDEVHEERTYDILTYDILLEQAGFKDVKVYADFEDKKPTATSARWFFV | 241 |
| | FF+QE+DGRF+R DEVHEERTY++LTYDILLEQAGFK KVYADFEDK+PT TS RWFFV | |
| Sbjct: 201 | FFIQEDDGRFSRFDEVHEERTYELLTYDILLEQAGFKSFKVYADFEDKEPTKTSKRWFFV | 260 |
| Query: 242 | AHK | 244 |
| | A+K | |
| Sbjct: 261 | AYK | 263 |

[9951] Based on this analysis, it was predicted that these proteins and their epitopes could be useful antigens for vaccines or diagnostics.

### EXAMPLE 1807

[9952] A DNA sequence (GBSx1914) was identified in S. agalactiae <SEQ ID 5621> which encodes the amino acid sequence <SEQ ID 5622>. Analysis of this protein sequence reveals the following:

```
Possible site: 54
>>> Seems to have no N-terminal signal sequence
----- Final Results -----
bacterial cytoplasm --- Certainty = 0.3538 (Affirmative) <succ>
  bacterial membrane --- Certainty = 0.0000 (Not Clear) <succ>
    bacterial outside --- Certainty = 0.0000 (Not Clear) <succ>
```

[9953] The protein has homology with the following sequences in the GENPEPT database.

| >GP:BAB06304 GB:AP001516 unknown conserved protein [Bacillus halodurans] | | |
|---|---|---|
| Identities = 129/367 (35%), Positives = 184/367 (49%), Gaps = 45/367 (12%) | | |
| Query: 1 | MTVTGIVAEFNPFHNGHKYLLEQAQ-----GIKVIAMSGNFMQRGEPAIVDKWTRSQMAL | 55 |
| | M G+V E+NPFHNGH + L +A+ + + MSG F+QRGEPAI+ KW R+ +AL | |
| Sbjct: 1 | MKAVGVVVEYNPFHNGHLHHLTEARKQAKADVVIAVMSGYFLQRGEPAILPKWERTSLAL | 60 |
| Query: 56 | ENGADLVIELPFLVSVQSADYFASGAVSILARLGVDNLCFGTEE--MLDYARIGDIYVNK | 113 |
| | + GADLV+ELP+ S Q A++FA+GAVSILA L D LCFG+EE + + R+ | |
| Sbjct: 61 | QGGADLVVELPYAFSTQKAEWFATGAVSILAALEADALCFGSEEGTIEPFHRLYHFMAKH | 120 |
| Query: 114 | KEEMEAFLKKQSD-SLSYPQKMQAMWQEFAGIT--FSGQTPNHILGLAYTKAA--SQNGI | 168 |
| | + + +K++ D +SYP ++ G PN+ILG Y KA I | |
| Sbjct: 121 | RLAWDRMIKEELDKGMSYPTATSLAFKRLEGSAEHLDLSRPNNILGFHYVKAIYDLHTSI | 180 |
| Query: 169 | RLNPIQRQGAGYHSSEKTE-IFASATSLRK--------HQSDRFF------VEKGMPNSD | 213 |
| | + I R AGYH E ASATS+RK DR + K | |
| Sbjct: 181 | KAMTIPRIKAGYHDDSLNESSIASATSIRKSLKTKEGWQMVDRVVPSYTTEMLRSFEKET | 240 |
| Query: 214 | LFLNSPQVVWQDYFSLLKYQIMTHS--DLTQIYQVNEEIANRIKSQIRYVETVDELVDKV | 271 |
| | FL S W+ F LLKY+++T + L IY+ E + R I + + + K+ | |
| Sbjct: 241 | TFLPS----WERLFPLLKYRLLTATPEQLHAIYEGEEGLEYRALKTIVSATSFHDWMTKM | 296 |
| Query: 272 | ATKRYTKARIRRLLTYILINAVESPIPNA----------IHVLGFTQKGQQHLKSVKK-- | 319 |
| | TKRYT RI+R T++ N + I + I +LG T +GQ +L KK | |
| Sbjct: 297 | KTKRYTWTRIQRYATHLFTNTTKEEIHSVLPRGTSSLPYIRLLGMTSRGQMYLNGKKKQL | 356 |
| Query: 320 | SVDIVTR | 326 |
| | + ++TR | |
| Sbjct: 357 | TTPVITR | 363 |

[9954] A related DNA sequence was identified in S. pyogenes <SEQ ID 5623> which encodes the amino acid sequence <SEQ ID 5624>. Analysis of this protein sequence reveals the following:

```
Possible site: 33
>>> Seems to have no N-terminal signal sequence
----- Final Results ------
                            bacterial cytoplasm --- Certainty = 0.3165(Affirmative) < succ>
                              bacterial membrane --- Certainty = 0.0000(Not Clear) < succ>
                                bacterial outside --- Certainty = 0.0000(Not Clear) < succ>
```

[9955] An alignment of the GAS and GBS proteins is shown below.

| Identities = 221/359 (61%), Positives = 288/359 (79%) | | |
|---|---|---|
| Query: 1 | MTVTGIVAEFNPFHNGHKYLLEQAQGIKVIAMSGNFMQRGEPAIVDKWTRSQMALENGAD | 60 |
| | MTVTGI+AEFNPFHNGHKYLLE A+G+K+IAMSGNFMQRGEPA++DKW RS+MAL+NGAD | |
| Sbjct: 1 | MTVTGIIAEFNPFHNGHKYLLETAEGLKIIAMSGNFMQRGEPALIDKWIRSEMALKNGAD | 60 |
| Query: 61 | LVIELPFLVSVQSADYFASGAVSILARLGVDNLCFGTEEMLDYARIGDIYVNKKEEMEAF | 120 |
| | +V+ELPF VSVQSADYFA GA+ IL +LG+ L FGTE ++DY ++ +Y K E+M A+ | |
| Sbjct: 61 | IVVELPFFVSVQSADYFAQGAIDILCQLGIQQLAFGTENVIDYQKLIKVYEKKSEQMTAY | 120 |
| Query: 121 | LKKQSDSLSYPQKMQAMWQEFAGITFSGQTPNHILGLAYTKAASQNGIRLNPIQRQGAGY | 180 |
| | L D+ SYPQK Q MW+ FAG+ FSGQTPNHILGL+Y KA++ I+L PI+RQGA Y | |
| Sbjct: 121 | LSTLEDTFSYPQKTQKMWEIFAGVKFSGQTPNHILGLSYAKASAGKHIQLCPIKRQGAAY | 180 |
| Query: 181 | HSSEKTEIFASATSLRKHQSDRFFVEKGMPNSDLFLNSPQVVWQDYFSLLKYQIMTHSDL | 240 |
| | HS +K + ASA+++R+H +D F+ +PN+ L +N+P + W YFS LKYQI+ HSDL | |
| Sbjct: 181 | HSKDKNHLLASASAIRQHLNDWDFISHSVPNAGLLINNPHMSWDHYFSFLKYQILNHSDL | 240 |
| Query: 241 | TQIYQVNEEIANRIKSQIRYVETVDELVDKVATKRYTKARIRRLLTYILINAVESPIPNA | 300 |
| | T I+QVN+E+A+RIK I+ + +D LVD VATKRYTKAR+RR+LTYIL+NA E +P | |
| Sbjct: 241 | TSIFQVNDELASRIKKAIKVSQNIDHLVDTVATKRYTKARVRRILTYILVNAKEPTLPKG | 300 |
| Query: 301 | IHVLGFTQKGQQHLKSVKKSVDIVTRIGSQTWDSLTQRADSVYQMGNANIAEQTWGRIP | 359 |
| | IH+LGFT KGQ HLK +KKS ++TRIG++TWD +TQ+ADS+YQ+G+ +I EQ++GRIP | |
| Sbjct: 301 | IHILGFTSKGQAHLKKLKKSRPLITRIGAETWDEMTQKADSIYQLGHQDIPEQSFGRIP | 359 |

[9956] Based on this analysis, it was predicted that these proteins and their epitopes could be useful antigens for vaccines or diagnostics.

### EXAMPLE 1808

[9957] A DNA sequence (GBSx1915) was identified in S. agalactiae <SEQ ID 5625> which encodes the amino acid sequence <SEQ ID 5626>. This protein is predicted to be transcriptional activator tipa. Analysis of this protein sequence reveals the following:

```
Possible site: 17
>>> Seems to have no N-terminal signal sequence
----- Final Results -----
                            bacterial cytoplasm --- Certainty = 0.3117(Affirmative) < succ>
                              bacterial membrane --- Certainty = 0.0000(Not Clear) < succ>
                                bacterial outside --- Certainty = 0.0000(Not Clear) < succ>
```

[9958] The protein has homology with the following sequences in the GENPEPT database.

| >GP:CAB15677 GB:Z99122 transcriptional regulator [Bacillus subtilis] | | |
|---|---|---|
| Identities = 91/246 (36%), Positives = 144/246 (57%), Gaps = 14/246 (5%) | | |
| Query: 4 | VKEISHISGISVRTLHYYDEIDLLSPSFVGENGYRYYDDESLIKLQEILLFKELEFPLKK | 63 |
| | VK+++ ISG+S+RTLH+YD I+LL+PS + + GYR Y D L +LQ+IL FKE+ F L + | |
| Sbjct: 5 | VKQVAEISGVSIRTLHHYDNIELLNPSALTDAGYRLYSDADLERLQQILFFKEIGFRLDE | 64 |
| Query: 64 | IKEIMDSPNYDRNQALLDQIRWLELKKQRLEEVIEHAK----SIQRGKNMSD---FTAYN | 116 |
| | IKE++D PN+DR AL Q L KKQR++E+I+ S+ G+ M+ F + | |
| Sbjct: 65 | IKEMLDHPNFDRKAALQSQKEILMKKKQRMDEMIQTIDRTLLSVDGGETMNKRDLFAGLS | 124 |
| Query: 117 | QEELEAFQ----EEARTRWGD--TDSYKEFENSHSKNDFSMISQAMSQIFKDFGQLKELS | 170 |
| | +++E Q +E R +G + ++ +++S +D+ I I++ + | |
| Sbjct: 125 | MKDIEEHQQTYADEVRKLYGKEIAEETEKRTSAYSADDWRTIMAEFDSIYRRIAARMKHG | 184 |
| Query: 171 | PTDEKVQKQVQILQDYITAQFYNCTNDLLASLGIMYIQDERFQKSIDNWGGQGTALFVSK | 230 |
| | P D ++Q V +D+I Y+CT D+ LG +YI DERF SI+ + G+G A F+ + | |
| Sbjct: 185 | PDDAEIQAAVGAFRDHICQYHYDCTLDIFRGLGEVYITDERFTDSINQY-GEGLAAFLRE | 243 |
| Query: 231 | AIDSYC | 236 |
| | AI YC | |
| Sbjct: 244 | AIIIYC | 249 |

[9959] There is also homology to SEQ ID 1712.

[9960] Based on this analysis, it was predicted that this protein and its epitopes, could be useful antigens for vaccines or diagnostics.

### EXAMPLE 1809

[9961] A DNA sequence (GBSx1916) was identified in S. agalactiae <SEQ ID 5627> which encodes the amino acid sequence <SEQ ID 5628>. Analysis of this protein sequence reveals the following:

```
Possible site: 39
>>> Seems to have no N-terminal signal sequence
----- Final Results -----
                            bacterial cytoplasm --- Certainty = 0.2590(Affirmative) < succ>
                              bacterial membrane --- Certainty = 0.0000(Not Clear) < succ>
                                bacterial outside --- Certainty = 0.0000(Not Clear) < succ>
```

[9962] The protein has homology with the following sequences in the GENPEPT database.

| >GP:CAB14597 GB:Z99117 yrkC [Bacillus subtilis] | | |
|---|---|---|
| Identities = 56/129 (43%), Positives = 74/129 (56%), Gaps = 7/129 (5%) | | |
| Query: 2 | KGFHGNIEKLTLGNTNFRQVLYTAEHCQLVLMTLPVGGEIGSEIHAENDQFFRFEAGHGK | 61 |
| | K F NI + T N FR L+T +H Q+ LM+L +G +IG EIH DQF R E G G | |
| Sbjct: 59 | KPFVVNINRATKQNNTFRTALWTGKHFQVTLMSLGIGEDIGLEIHPNVDQFLRIEQGRGI | 118 |
| Query: 62 | VVIDGN------EYEVADGDAIIVPAGAEHNVINTSETEMLKLYTIYSPAHHKDGIIRAT | 115 |
| | V + + + V D AI+VPAG HNVINT T LKLY+IY+P +H G + T | |
| Sbjct: 119 | VKMGKSKDHLNFQRNVYDDSAIVVPAGTWHNVINTGNTP-LKLYSIYAPPNHPFGTVHET | 177 |
| Query: 116 | REEAEENEE | 124 |
| | + +A E+ | |
| Sbjct: 178 | KADAVAAED | 186 |

[9963] No corresponding DNA sequence was identified in S. pyogenes.

[9964] Based on this analysis, it was predicted that this protein and its epitopes, could be useful antigens for vaccines or diagnostics.

### EXAMPLE 1810

[9965] A DNA sequence (GBSx1917) was identified in S. agalactiae <SEQ ID 5629> which encodes the amino acid sequence <SEQ ID 5630>. This protein is predicted to be glycerol uptake facilitator (glpF). Analysis of this protein sequence reveals the following:

Possible site: 61
>>>> Seems to have an uncleavable N-term signal seq

| | | | | |
|---|---|---|---|---|
| INTEGRAL | Likelihood = −9.08 | Transmembrane | 156-172 | (153-180) |
| INTEGRAL | Likelihood = −6.21 | Transmembrane | 135-151 | (132-155) |
| INTEGRAL | Likelihood = −4.09 | Transmembrane | 86-102 | (80-103) |
| INTEGRAL | Likelihood = −3.93 | Transmembrane | 213-229 | (212-230) |
| INTEGRAL | Likelihood = −3.72 | Transmembrane | 8-24 | (5-28) |
| INTEGRAL | Likelihood = −2.76 | Transmembrane | 38-54 | (36-58) |

```
----- Final Results -----
                              bacterial membrane --- Certainty = 0.4630(Affirmative) < succ>
                                bacterial outside --- Certainty = 0.0000(Not Clear) < succ>
                            bacterial cytoplasm --- Certainty = 0.0000(Not Clear) < succ>
```

[9966] The protein has homology with the following sequences in the GENPEPT database.

| >GP:BAB04811 GB:AP001510 glycerol uptake facilitator [Bacillus halodurans] | | |
|---|---|---|
| Identities = 135/230 (58%), Positives = 171/230 (73%) | | |
| Query: 1 | MTQFLGEFLGTFILVLLGDGVVAGNVLSKTKEEGTGWTAIVFGWGIACTVAVYVSGLFSP | 60 |
| | M+ FLGE +GT IL++LG GVVAG VL TK E GW I WG+A AVY G S | |
| Sbjct: 1 | MSPFLGEVIGTMILIILGGGVVAGVVLKGTKSENGGWIVITAAWGLAVATAVYCVGQISG | 60 |
| Query: 61 | AHLNPAVTLAMASIGAISWGQVIPFIIAQMLGAMVAATILWLHYYPHWKETKDSGLILAS | 120 |
| | AHLNPAVT+ +A +GA W QV +I+AQMLGAM+ AT+++LHYYPH+K T+D G LA | |
| Sbjct: 61 | AHLNPAVTIGLALVGAFEWSQVAGYIVAQMLGAMIGATLVFLHYYPHFKATEDQGAKLAV | 120 |
| Query: 121 | FSTGPAIRHTPSNLLGEIIGTAILVITIMAIGPSKVAAGLGPIIVGIVIFAVGFSLDPTT | 180 |
| | FST PAI+H P+N E++GT +LV+ I+AIG ++ GL P+IVG++I +G SL TT | |
| Sbjct: 121 | FSTDPAIKHLPANFFSEVLGTFVLVLGILAIGANEFTEGLNPLIVGLLIVVIGLSLGGTT | 180 |
| Query: 181 | GYAINPARDLGPRLMHAILPIEHKGNSDWSYAWIPVVGPIIGGVLGAILY | 230 |
| | GYAINPARDLGPR+ H +LPI KG+S+WSYAWIP+VGFIIGG +GA+ Y | |
| Sbjct: 181 | GYAINPARDLGPRIAHFLLPIPGKGSSNWSYAWIPIVGPIIGGGIGALTY | 230 |

[9967] There is also homology to SEQ ID 2854.

[9968] Based on this analysis, it was predicted that this protein and its epitopes, could be useful antigens for vaccines or diagnostics.

### EXAMPLE 1811

[9969] A DNA sequence (GBSx1918) was identified in S. agalactiae <SEQ ID 5631> which encodes the amino acid sequence <SEQ ID 5632>. Analysis of this protein sequence reveals the following:

```
Possible site: 37
>>> Seems to have no N-terminal signal sequence
----- Final Results -----
                            bacterial cytoplasm --- Certainty = 0.1694(Affirmative) < succ>
                              bacterial membrane --- Certainty = 0.0000(Not Clear) < succ>
                                bacterial outside --- Certainty = 0.0000(Not Clear) < succ>
```

[9970] The protein has homology with the following sequences in the GENPEPT database.

| >GP: BAB07114 GB: AP001518 unknown conserved protein in others | | | |
|---|---|---|---|
| [Bacillus halodurans] | | | |
| Identities = 64/118 (54%), Positives = 85/118 (71%) | | | |
| Query: | 5 | GIIVVSHSKNIAQGVVDLISEVAKDVSITYVGGTEDGEIGTSFDQVQQIVEQNDKKTLLA | 64 |
| | | GI++ SH +A+G+V L+ E AKDVSITY GGT+D ++G SF+++QQ V N+ L | |
| Sbjct: | 7 | GIVISSHVPALAEGIVTLLKEAAKDVSITYAGGTDDDQVGASFEKIQQAVMDNEADELFV | 66 |
| Query: | 65 | FFDLGSAKMNLELVADFSEKNIIINSVPVVEGAYTAAALLQAGADLDSIQSQLAELTI | 122 |
| | | F+DLGSAKMN+E+V + SEK I + V +VEGAYTAAAL Q GA ++I QL LTI | |
| Sbjct: | 67 | FYDLGSAKMNVEMVMELSEKTIHLMDVALVEGAYTAAALTQGGASFETIMEQLQPLTI | 124 |

[9971] No corresponding DNA sequence was identified in S. pyogenes.

[9972] Based on this analysis, it was predicted that this protein and its epitopes, could be useful antigens for vaccines or diagnostics.

### EXAMPLE 1812

[9973] A DNA sequence (GBSx1919) was identified in S. agalactiae <SEQ ID 5633> which encodes the amino acid sequence <SEQ ID 5634>. Analysis of this protein sequence reveals the following:

```
Possible site: 59
>>> Seems to have no N-terminal signal sequence
----- Final Results -----
                            bacterial cytoplasm --- Certainty = 0.4753 (Affirmative) < succ>
                              bacterial membrane --- Certainty = 0.0000 (Not Clear) < succ>
                                bacterial outside --- Certainty = 0.0000 (Not Clear) < succ>
```

[9974] The protein has homology with the following sequences in the GENPEPT database.

| >GP: BAB07115 GB: AP001518 unknown conserved protein in others | | | |
|---|---|---|---|
| [Bacillus halodurans] | | | |
| Identities = 98/190 (51%), Positives = 135/190 (70%), Gaps = 2/190 (1%) | | | |
| Query: | 3 | VKTAIEWMHTFNQKIQSNKDYLSELDTPIGDGDHGGNMARGMTAVIENLDNNEFSSAADV | 62 |
| | | V+ +W+H F++K+Q+N+ YLSELD+ IGDGDHG NMARG+ V L N F S +V | |
| Sbjct: | 4 | VENTTKWLHAFHEKVQANQSYLSELDSAIGDGDHGTNMARGLAEVERKLKENLFESPQEV | 63 |
| Query: | 63 | FKTVSMQLLSKVGGASGPLYGSAFMGITK-AEQSKSTISEALGAGLEMIQKRGKAELNEK | 121 |
| | | K +M L+SK GGASGPLYG+A + ++K I +++ AGL I KRGKA EK | |
| Sbjct: | 64 | LKMAAMALISKTGGASGPLYGTALLEMSKQVANDPQNIGKSIEAGLNGILKRGKATTGEK | 123 |
| Query: | 122 | TMVDVWHGVIEAI-EKNELTEDRIDSLVDATKGMKATKGRASYVGERSVGHIDPGSFSSG | 180 |
| | | TMVD+W V+E++ + +L+++RI V TK MKATKGRASY+GERS+GH+DPG+ SSG | |
| Sbjct: | 124 | TMVDIWKPVVESLMAEQQLSKERIQQFVSETKEMKATKGRASYLGERSLGHLDPGAVSSG | 183 |
| Query: | 181 | LLFKALLEVG | 190 |
| | | LF+A+++ G | |
| Sbict: | 184 | YLFEAMIDGG | 193 |

[9975] Based on this analysis, it was predicted that this protein and its epitopes, could be useful antigens for vaccines or diagnostics.

### EXAMPLE 1813

[9976] A DNA sequence (GBSx1920) was identified in S. agalactiae <SEQ ID 5637> which encodes the amino acid sequence <SEQ ID 5638>. This protein is predicted to be dihydroxyacetone kinase (b1200). Analysis of this protein sequence reveals the following:

```
Possible site: 59
>>> Seems to have no N-terminal signal sequence
----- Final Results -----
                            bacterial cytoplasm --- Certainty = 0.2080(Affirmative) < succ>
                              bacterial membrane --- Certainty = 0.0000(Not Clear) < succ>
                                bacterial outside --- Certainty = 0.0000(Not Clear) < succ>
```

[9977] The protein has homology with the following sequences in the GENPEPT database.

| >GP: BAB07116 GB: AP001518 dihydroxyacetone kinase [Bacillus halodurans] | | | |
|---|---|---|---|
| Identities = 204/329 (62%), Positives = 261/329 (79%) | | | |
| Query: | 1 | MKKILNQPTDVVTEMLDGLAYVHNDLVHRIEGFDIIARNEEKSGKVALISGGGSGHEPSH | 60 |
| | | MKKILN P +V+ EMLDG Y + LV R+ G +I R E GKVAL+SGGGSGHEPSH | |
| Sbjct: | 1 | MKKILNDPQNVLDEMLDGFVYANGHLVERVAGTGVIRRTYEDKGKVALVSGGGSGHEPSH | 60 |
| Query: | 61 | AGFVGEGMLSAAVCGAVFTSPTPDQVLEAIKEADEGAGVFMVIKNYSGDIMNFEMAQDMA | 120 |
| | | AGFVG+GMLSAAVCG VFTSPTPDQ+ E IK AD+G GV ++IKNY+GD+MNFEMA +MA | |
| Sbjct: | 61 | AGFVGQGMLSAAVCGEVFTSPTPDQIFEGIKAADQGGGVLLIIKNYTGDVMNFEMAGEMA | 120 |
| Query: | 121 | EMEGIEVASVVVDDDIAVEDSLYTQGKRGVAGTILVHKILGHAARHGKSLQEIKAIADEL | 180 |
| | | E EGI V ++V+DDIAVEDS +T G+RGVAGTI+VHKI+G AA G SLQ +K + + + | |
| Sbjct: | 121 | EAEGITVDHIIVNDDIAVEDSSFTAGRRGVAGTIIVHKIVGAAAEAGLSLQSLKVLGETV | 180 |
| Query: | 181 | VPNIHTVGLALSGATVPEVGKPGFVLAEDEIEFGIGIHGEPGYRKEKMQPSKALATELVD | 240 |
| | | + N T+G+++ ATVP VGKPGF L +DE+E+G+GIHGEPGYRKEK++ SK +A EL+ | |
| Sbjct: | 181 | IENTKTIGVSILPATVPAVGKPGFELGDDEMEYGVGIHGEPGYRKEKLKSSKEIAEELIL | 240 |
| Query: | 241 | KLIESFDAKSGEKYGVLINGMGATPLMEQYVFANDVAKLLEDKGIEVNYKKLGNYMTSID | 300 |
| | | KL E+F G+EYGVL+NG+GATPLMEQYVF NDVA L ++G+ + +KK+G++MTSID | |
| Sbjct: | 241 | KLKEAFGWSEGDEYGVLVNGLGATPLMEQYVFMNDVANELTEEGLNIQFKKVGSFMTSID | 300 |
| Query: | 301 | MAGLSLTLIKLENQEWLEALNSDVTTIAW | 329 |
| | | MAG+SLTLIK+ ++WL+ N +V T+ W | |
| Sbjct: | 301 | MAGVSLTLIKIVEEKWLDYWNHEVKTVDW | 329 |

[9978] No corresponding DNA sequence was identified in S. pyogenes.

[9979] Based on this analysis, it was predicted that this protein and its epitopes, could be useful antigens for vaccines or diagnostics.

### EXAMPLE 1814

[9980] A DNA sequence (GBSx1921) was identified in S. agalactiae <SEQ ID 5639> which encodes the amino acid sequence <SEQ ID 5640>. Analysis of this protein sequence reveals the following:

```
Possible site: 23
>>> Seems to have no N-terminal signal sequence
----- Final Results -----
                            bacterial cytoplasm --- Certainty = 0.1997(Affirmative) < succ>
                              bacterial membrane --- Certainty = 0.0000(Not Clear) < succ>
                                bacterial outside --- Certainty = 0.0000(Not Clear) < succ>
```

[9981] The protein has homology with the following sequences in the GENPEPT database.

| >GP: BAB07113 GB: AP001518 unknown [Bacillus halodurans] | | | |
|---|---|---|---|
| Identities = 59/142 (41%), Positives = 82/142 (57%), Gaps = 5/142 (3%) | | | |
| Query: | 1 | MTSSLITKKKIAKSFKRLFISQAFDKISVSDIMEDAGIRRQTFYNHFVDKYALLEWIFQT | 60 |
| | | MT+S+ITKK IAK+FK L Q F KISVSDIM A +RRQTFY HF DK+ LL WI++ | |
| Sbjct: | 1 | MTNSIITKKVIAKAFKDLMEVQPFSKISVSDIMNRANMRRQTFYYHFQDKFELLHWIYKQ | 60 |
| Query: | 61 | ELSEQVTDNLDYISGFQLLSELLTFFKMNQEFYIKLFQIEDQNDFSSYFESYCEQLVDKL | 120 |
| | | E E D L Y + L+ +F NQ FY + + QN F+ Y + + L | |
| Sbjct: | 61 | ETKEHSIDFLAYDDIHTIFRHLMHYFYENQTFYQRAMVVNGQNGFTDYLYEHIQTL---Y | 117 |
| Query: | 121 | LSDYSKSNFNQKERVTFINYHS | 142 |
| | | L++ + +QK+R +++S | |
| Sbjct: | 118 | LNEIDRR--SQKDREFISSFYS | 137 |

[9982] A related DNA sequence was identified in S. pyogenes <SEQ ID 5641> which encodes the amino acid sequence <SEQ ID 5642>. Analysis of this protein sequence reveals the following:

```
Possible site: 31
>>> Seems to have no N-terminal signal sequence
----- Final Results -----
                            bacterial cytoplasm --- Certainty = 0.2101(Affirmative) < succ>
                              bacterial membrane --- Certainty = 0.0000(Not Clear) < succ>
                                bacterial outside --- Certainty = 0.0000(Not Clear) < succ>
```

[9983] An alignment of the GAS and GBS proteins is shown below.

| Identities = 31/115 (26%), Positives = 58/115 (49%), Gaps = 6/115 (5%) | | | |
|---|---|---|---|
| Query: | 7 | TKKKIAKSFKRLFISQAFDKISVSDIMEDAGIRRQTFYNHFVDKYALLEWIFQTELSEQV | 66 |
| | | TK + + L Q+F+ ++VSD+ + AGI R TFY H+ DK+ ++ F+ + + + | |
| Sbjct: | 8 | TKAYVKTALTTLLTEQSFETLTVSDLTKKAGINRGTFYLHYTDKFDMMNH-FKNDTLDDL | 66 |
| Query: | 67 | TDNLD----YISGFQLLSELLTFFKMNQEFYIKLFQIEDQNDFSSYFESYCEQLV | 117 |
| | | L+ Y Q+L++ L++ ++EF L I F + +C Q + | |
| Sbjct: | 67 | YRLLNQAEIYTDTRQVLNQTLSYLIEHREFITALATI-SYLKFPQLIKDFCYQFL | 120 |

[9984] Based on this analysis, it was predicted that these proteins and their epitopes could be useful antigens for vaccines or diagnostics.

### EXAMPLE 1815

[9985] A DNA sequence (GBSx1922) was identified in S. agalactiae <SEQ ID 5643> which encodes the amino acid sequence <SEQ ID 5644>. Analysis of this protein sequence reveals the following:

```
Possible site: 45
>>> Seems to have no N-terminal signal sequence
----- Final Results -----
                            bacterial cytoplasm --- Certainty = 0.1974(Affirmative) < succ>
                              bacterial membrane --- Certainty = 0.0000(Not Clear) < succ>
                                bacterial outside --- Certainty = 0.0000(Not Clear) < succ>
```

[9986] The protein has no significant homology with any sequences in the GENPEPT database.

[9987] No corresponding DNA sequence was identified in S. pyogenes.

[9988] Based on this analysis, it was predicted that this protein and its epitopes, could be useful antigens for vaccines or diagnostics.

### EXAMPLE 1816

[9989] A DNA sequence (GBSx1923) was identified in S. agalactiae <SEQ ID 5645> which encodes the amino acid sequence <SEQ ID 5646>. This protein is predicted to be dihydroxyacetone kinase (b1200). Analysis of this protein sequence reveals the following:

```
Possible site: 55
>>> Seems to have no N-terminal signal sequence
----- Final Results -----
                            bacterial cytoplasm --- Certainty = 0.1806(Affirmative) < succ>
                              bacterial membrane --- Certainty = 0.0000(Not Clear) < succ>
                                bacterial outside --- Certainty = 0.0000(Not Clear) < succ>
```

[9990] The protein has homology with the following sequences in the GENPEPT database.

| >GP: BAB07112 GB: AP001518 dihydroxyacetone kinase [Bacillus halodurans] | | | |
|---|---|---|---|
| Identities = 141/285 (49%), Positives = 197/285 (68%), Gaps = 1/285 (0%) | | | |
| Query: | 45 | IPILSGGGSGHEPAHFGYVGEGMLSAAISGPIFVPPCASDILETIRFINRGKGVFVIIKN | 104 |
| | | +PI+SGGGSGHEP H GYVGEGML+AA+ G +FVPP A +L IR +++GKGV +IIKN | |
| Sbjct: | 46 | VPIISGGGSGHEPGHLGYVGEGMLAAAVHGDVFVPPSAQQVLAAIRQMDQGKGVLLIIKN | 105 |
| Query: | 105 | FEADLEEFSQAIEQARQEGIPIKYIVSHDDISVET-SNFKIRHRGVAGTVLLHKIIGQAA | 163 |
| | | F ADL F A QAR EG + +++ +DD+SVE+ ++F+ R RGVAG VL+HKIIG AA | |
| Sbjct: | 106 | FVADLATFLSAEVQARAEGRDVAHVIVNDDVSVESDASFEKRRRGVAGAVLVHKIIGAAA | 165 |
| Query: | 164 | LEGASLDELEQLGLSLTTSMATLGVASKSATILGQHQPVFDIEEGYISFGIGIHGEPGYR | 223 |
| | | EG SL+ L+++G + ++ATLGVA A + + +P F +EEG + FG+GIHGE GYR | |
| Sbjct: | 166 | KEGYSLEALQEIGEQVVKNLATLGVALTHADLPERREPQFLLEEGEVYFGVGIHGEQGYR | 225 |
| Query: | 224 | TMPFVSMEHLANELVNKLKMKLRWQDGEAFILLINNLGGSSKMEELLFTNAVMEFLALDD | 283 |
| | | VS E LA ELVNKLK RW + + +LIN LGG+ +E+ +F N V LA+++ | |
| Sbjct: | 226 | KEKLVSSELLAVELVNKLKSLYRWDKNDQYAVLINGLGGTPLIEQYVFANDVRRLLAIEN | 285 |
| Query: | 284 | LQLPFIKTGHLITSLDMAGLSVTLCRVKDSRWIDYLKHKTDARAW | 328 |
| | | L + F+R G +TSL+M G+S+T+ ++ D +W+ +L D W | |
| Sbjct: | 286 | LHVSFVKVGTQLTSLNMKGISLTMLKICDEQWVKWLYAPVDVAHW | 330 |

[9991] No corresponding DNA sequence was identified in S. pyogenes.

[9992] Based on this analysis, it was predicted that this protein and its epitopes, could be useful antigens for vaccines or diagnostics.

### EXAMPLE 1817

[9993] A DNA sequence (GBSx1924) was identified in S. agalactiae <SEQ ID 5647> which encodes the amino acid sequence <SEQ ID 5648>. Analysis of this protein sequence reveals the following:

```
Possible site: 53
>>> Seems to have no N-terminal signal sequence
----- Final Results -----
                            bacterial cytoplasm --- Certainty = 0.3902(Affirmative) < succ>
                              bacterial membrane --- Certainty = 0.0000(Not Clear) < succ>
                                bacterial outside --- Certainty = 0.0000(Not Clear) < succ>
```

[9994] A related GBS nucleic acid sequence <SEQ ID 10085> which encodes amino acid sequence <SEQ ID 10086> was also identified.

[9995] The protein has homology with the following sequences in the GENPEPT database.

| >GP: AAC75047 GB: AE000290 orf, hypothetical protein | | | |
|---|---|---|---|
| [Escherichia coli K12] | | | |
| Identities = 182/237 (76%), Positives = 201/237 (84%) | | | |
| Query: | 20 | MGRKWANIVAKKTAKDGANSKVYAKFGVEIYVAAKQGEPDPESNSALKFVLDRAKQAQVP | 79 |
| | | MGRKWANIVAKKTAKDGA SK+YAKFGVEIY AAKQGEPDPE N++LKFV++RAKQAQVP | |
| Sbjct: | 1 | MGRKWANIVAKKTAKDGATSKIYAKFGVEIYAAAKQGEPDPELNTSLKFVIERAKQAQVP | 60 |
| Query: | 80 | KHVIDKAIDKAKGNTDETFVEGRYEGFGPNGSMIIVDTLTSNVNRTAANVRTAYGKNGGN | 139 |
| | | KHVIDKAIDKAKG DETFV+GRYEGFGPNGSMII +TLTSNVNRT ANVRT + K GGN | |
| Sbjct: | 61 | KHVIDKAIDKAKGGGDETFVQGRYEGFGPNGSMIIAETLTSNVNRTIANVRTIFNKKGGN | 120 |
| Query: | 140 | MGASGSVSYLFDKKGVIVFAGDDADTVFEQLLEADVDVDDVEAEEGTITVYTAPTDLHKG | 199 |
| | | +GA+GSVSY+FD GVIVF G D D +FE LLEA+VDV DV EEG I +YT PTDLHKG | |
| Sbjct: | 121 | IGAAGSVSYMFDNTGVIVFKGTDPDHIFEILLEAEVDVRDVTEEEGNIVIYTEPTDLHKG | 180 |
| Query: | 200 | IQALRDNGVEEFQVTELEMIPQSEVVLEGDDLETFEKLIDALESDDDVQKVYHNVAD | 256 |
| | | I AL+ G+ EF TELEMI QSEV L +DLE FE L+DALE DDDVQKVYHNVA+ | |
| Sbjct: | 181 | IAALKAAGITEFSTTELEMIAQSEVELSPEDLEIFEGLVDALEDDDDVQKVYHNVAN | 237 |

[9996] A related DNA sequence was identified in S. pyogenes <SEQ ID 5649> which encodes the amino acid sequence <SEQ ID 5650>. Analysis of this protein sequence reveals the following:

```
Possible site: 34
>>> Seems to have no N-terminal signal sequence
----- Final Results -----
                            bacterial cytoplasm --- Certainty = 0.2926(Affirmative) < succ>
                              bacterial membrane --- Certainty = 0.0000(Not Clear) < succ>
                                bacterial outside --- Certainty = 0.0000(Not Clear) < succ>
```

[9997] An alignment of the GAS and GBS proteins is shown below.

| Identities = 233/238 (97%), Positives = 236/238 (98%) | | | |
|---|---|---|---|
| Query: | 20 | MGRKWANIVAKKTAKDGANSKVYAKFGVEIYVAAKQGEPDPESNSALKFVLDRAKQAQVP | 79 |
| | | MGRKWANIVAKKTAKDGA SKVYAKFGVEIYVAAKQGEPDPE N+ALKFV+DRAKQAQVP | |
| Sbjct: | 1 | MGRKWANIVAKKTAKDGATSKVYAKFGVEIYVAAKQGEPDPELNTALKFVIDRAKQAQVP | 60 |
| Query: | 80 | KHVIDKAIDKAKGNTDETFVEGRYEGFGPNGSMIIVDTLTSNVNRTAANVRTAYGKNGGN | 139 |
| | | KHVIDKAIDKAKGNTDETFVEGRYEGFGPNGSMIIVDTLTSNVNRTAANVRTAYGKNGGN | |
| Sbjct: | 61 | KHVIDKAIDKAKGNTDETFVEGRYEGFGPNGSMIIVDTLTSNVNRTAANVRTAYGKNGGN | 120 |
| Query: | 140 | MGASGSVSYLFDKKGVIVFAGDDADTVFEQLLEADVDVDDVEAEEGTITVYTAPTDLHKG | 199 |
| | | MGASGSVSYLFDKKGVIVFAGDDAD+VFEQLLEADVDVDDVEAEEGTITVYTAPTDLHKG | |
| Sbjct: | 121 | MGASGSVSYLFDKKGVIVFAGDDADSVFEQLLEADVDVDDVEAEEGTITVYTAPTDLHKG | 180 |
| Query: | 200 | IQALRDNGVEEFQVTELEMIPQSEVVLEGDDLETFEKLIDALESDDDVQKVYHNVADF | 257 |
| | | IQALRDNGVEEFQVTELEMIPQSEVVLEGDDLETFEKLIDALESDDDVQKVYHNVADF | |
| Sbjct: | 181 | IQALRDNGVEEFQVTELEMIPQSEVVLEGDDLETFEKLIDALESDDDVQKVYHNVADF | 238 |

[9998] Based on this analysis, it was predicted that these proteins and their epitopes could be useful antigens for vaccines or diagnostics.

### EXAMPLE 1818

[9999] A DNA sequence (GBSx1925) was identified in S. agalactiae <SEQ ID 5651> which encodes the amino acid sequence <SEQ ID 5652>. Analysis of this protein sequence reveals the following:

```
Possible site: 17
>>> Seems to have no N-terminal signal sequence
----- Final Results -----
                            bacterial cytoplasm --- Certainty = 0.2507(Affirmative) < succ>
                              bacterial membrane --- Certainty = 0.0000(Not Clear) < succ>
                                bacterial outside --- Certainty = 0.0000(Not Clear) < succ>
```

[10000] The protein has no significant homology with any sequences in the GENPEPT database.

[10001] No corresponding DNA sequence was identified in S. pyogenes.

[10002] Based on this analysis, it was predicted that this protein and its epitopes, could be useful antigens for vaccines or diagnostics.

### EXAMPLE 1819

[10003] A DNA sequence (GBSx1926) was identified in S. agalactiae <SEQ ID 5653> which encodes the amino acid sequence <SEQ ID 5654>. Analysis of this protein sequence reveals the following:

```
Possible site: 52
>>> Seems to have no N-terminal signal sequence
----- Final Results -----
                            bacterial cytoplasm --- Certainty = 0.1523(Affirmative) < succ>
                              bacterial membrane --- Certainty = 0.0000(Not Clear) < succ>
                                bacterial outside --- Certainty = 0.0000(Not Clear) < succ>
```

[10004] The protein has homology with the following sequences in the GENPEPT database.

| >GP: CAA20826 GB: AL031541 hypothetical protein SCI35.37 [Streptomyces | | | |
|---|---|---|---|
| coelicolor A3(2)] | | | |
| Identities = 73/178 (41%), Positives = 101/178 (56%), Gaps = 2/178 (1%) | | | |
| Query: | 35 | VKNAGGLPVILPISEAESAKAYVEMIDKLIISGGQNVLPSYYGEEKIIESDDYSLARDIF | 94 |
| | | V+ AGGL +LP E A A V +D ++I+GG +V P YG E + + ARD + | |
| Sbjct: | 37 | VQRAGGLAAMLPPDAPEHAAATVARVDGVVIAGGPDVEPVRYGAEPDPRTGPPARARDTW | 96 |
| Query: | 95 | EFALVEEALKQNKPIFAICRGMQLVNVALGGTLNQSIDNHYQEPYIGFAHYLNVEKGSFL | 154 |
| | | E AL+E AL P+ ICRGMQL+NVALGGTL Q I+ H + + H + G+ | |
| Sbjct: | 97 | ELALIEAALAARVPLLGICRGMQLLNVALGGTLVQHIERHAEVVGVFGGHPVRPVPGTLY | 156 |
| Query: | 155 | EGFISGDFKINSLHRQSVKLLAEGLIVSARDPRDGTVEAYESRT-EQCIIGVQWHPEL | 211 |
| | | G + + + + H Q+V L GL+ SA DGTVEA E + ++GVQWHPE+ | |
| Sbjct: | 157 | AGAVPEETFVPTYHHQAVDRLGSGLVASAH-AADGTVEALEMPSGSGWVLGVQWHPEM | 213 |

[10005] A related DNA sequence was identified in S. pyogenes <SEQ ID 5655> which encodes the amino acid sequence <SEQ ID 5656>. Analysis of this protein sequence reveals the following:

```
Possible site: 52
>>> Seems to have no N-terminal signal sequence
----- Final Results -----
                            bacterial cytoplasm --- Certainty = 0.1210(Affirmative) < succ>
                              bacterial membrane --- Certainty = 0.0000(Not Clear) < succ>
                                bacterial outside --- Certainty = 0.0000(Not Clear) < succ>
```

[10006] An alignment of the GAS and GBS proteins is shown below.

| Identities = 111/230 (48%), Positives = 145/230 (62%), Gaps = 3/230 (1%) | | |
|---|---|---|
| Query: 2 | LTKPIIGITGNEREMSDIPGYYYDSVSRHISEGVKNAGGLPVILPISEAESAKAYVEMID | 61 |
| | +TKPIIGIT N+R + + + V +GGLP++LPI + +AK YV M+D | |
| Sbjct: 1 | MTKPIIGITANQRLNMALDNLPWSYAPTGFVQAVTQSGGLPLLLPIGDEAAAKTYVSMVD | 60 |
| Query: 62 | KLIISGGQNVLPSYYGEEKIIESDDYSLARDIFEFALVEEALKQNKPIFAICRGMQLVNV | 121 |
| | K+I+ GGQNV P YY EEK DD+S RD FE A+++EA+ KPI ICRG QL+NV | |
| Sbjct: 61 | KIILIGGQNVDPKYYQEEKAAFDDDFSPERDTFELAIIKEAITLKKPILGICRGTQLMNV | 120 |
| Query: 122 | ALGGTLNQSIDNHYQE-PYIGFAHYLNVEKGSFLEGFISGDFKINSLHRQSVKLLAEGLI | 180 |
| | ALGG LNQ ID+H+QE P +H + +E S L INS HRQS+K +A+ L | |
| Sbjct: 121 | ALGGNLNQHIDSHWQEAPSDFLSHEMIIEPDSILYPIYGHKTLINSFHRQSLKTVAKDLK | 180 |
| Query: 181 | VSARDPRDGTVEAYESRTEQC-IIGVQWHPELMLH-QIENQTLFGYFVNE | 228 |
| | V ARDPRDGT+EA S + +GVQWHPEL+ + E+ LF FVN+ | |
| Sbjct: 181 | VIARDPRDGTIEAVISTNDAIPFLGVQWHPELLQGVRDEDLQLFRLFVND | 230 |

[10007] Based on this analysis, it was predicted that these proteins and their epitopes could be useful antigens for vaccines or diagnostics.

### EXAMPLE 1820

[10008] A DNA sequence (GBSx1927) was identified in S. agalactiae <SEQ ID 5657> which encodes the amino acid sequence <SEQ ID 5658>. Analysis of this protein sequence reveals the following:

```
Possible site: 31
>>> Seems to have no N-terminal signal sequence
----- Final Results -----
                            bacterial cytoplasm --- Certainty = 0.5794(Affirmative) < succ>
                              bacterial membrane --- Certainty = 0.0000(Not Clear) < succ>
                                bacterial outside --- Certainty = 0.0000(Not Clear) < succ>
```

[10009] The protein has no significant homology with any sequences in the GENPEPT database.

[10010] No corresponding DNA sequence was identified in S. pyogenes.

[10011] Based on this analysis, it was predicted that this protein and its epitopes, could be useful antigens for vaccines or diagnostics.

### EXAMPLE 1821

[10012] A DNA sequence (GBSx1928) was identified in S. agalactiae <SEQ ID 5659> which encodes the amino acid sequence <SEQ ID 5660>. Analysis of this protein sequence reveals the following:

```
Possible site: 15
>>> Seems to have no N-terminal signal sequence
----- Final Results -----
                            bacterial cytoplasm --- Certainty = 0.0524(Affirmative) < succ>
                              bacterial membrane --- Certainty = 0.0000(Not Clear) < succ>
                                bacterial outside --- Certainty = 0.0000(Not Clear) < succ>
```

[10013] A related GBS nucleic acid sequence <SEQ ID 8905> which encodes amino acid sequence <SEQ ID 8906> was also identified. Analysis of this protein sequence reveals the following:

```
Lipop: Possible site: 22 Crend: 4
McG: Discrim Score: 8.37
GvH: Signal Score (−7.5): 0.64
          Possible site: 21
>>> May be a lipoprotein
ALOM program count: 0  value: 6.74 threshold: 0.0
      PERIPHERAL Likelihood = 6.74 112
  modified ALOM score: −1.85
*** Reasoning Step: 3
----- Final Results -----
                              bacterial membrane --- Certainty = 0.0000(Not Clear) < succ>
                                bacterial outside --- Certainty = 0.0000(Not Clear) < succ>
                            bacterial cytoplasm --- Certainty = 0.0000(Not Clear)
```

[10014] A related DNA sequence was identified in S. pyogenes <SEQ ID 2919> which encodes the amino acid sequence <SEQ ID 2920>. Analysis of this protein sequence reveals the following:

```
Possible site: 21
>>> May be a lipoprotein
----- Final Results -----
                              bacterial membrane --- Certainty = 0.0000(Not Clear) < succ>
                                bacterial outside --- Certainty = 0.0000(Not Clear) < succ>
                            bacterial cytoplasm --- Certainty = 0.0000(Not Clear) < succ>
```

[10015] An alignment of the GAS and GBS proteins is shown below.

| Identities = 120/162 (74%), Positives = 141/162 (86%), Gaps = 5/162 (3%) | | |
|---|---|---|
| Query: 6 | LAACSSKSHTTKTGK----KEVNFATVGTTAPFSYVKDGKLTGFDIEVAKAVFKGSDNYK | 61 |
| | LAAC S S T ++G KEV FATVGTTAPFSY K G+LTG+DIEVAKAVFKGSD+YK | |
| SbjCt: 20 | LAACGS-SKTAESGNQGSSKEVLFATVGTTAPFSYEKGGQLTGYDIEVAKAVFKGSDDYK | 78 |
| Query: 62 | VTFKKTEWSSVFTGIDSGKFQMGGNNISYSSERSQKYLFSYPIGSTPSVLAVPKNSNIKA | 121 |
| | V+FKKTEWSS+FTG+DSGK+QMGGNNIS++ ERS KYLFSYPIGSTPSVL VPK+S+IK+ | |
| Sbjct: 79 | VSFKKTEWSSIFTGLDSGKYQMGGNNISFTKERSAKYLFSYPIGSTPSVLVVPKDSDIKS | 138 |
| Query: 122 | YNDISGHKTQVVQGTTTAKQLENFNKEHQKNPVTLKYTNENL | 163 |
| | ++DI GH TQVVQGTT+ QLE+FNK+H NPVTLK+TNEN+ | |
| Sbjct: 139 | FDDIQGHTTQVVQGTTSVAQLEDFNKKHSONPVTLKFTNENI | 180 |

[10016] Based on this analysis, it was predicted that these proteins and their epitopes could be useful antigens for vaccines or diagnostics.

### EXAMPLE 1822

[10017] A DNA sequence (GBSx1929) was identified in S. agalactiae <SEQ ID 5661> which encodes the amino acid sequence <SEQ ID 5662>. Analysis of this protein sequence reveals the following:

```
Possible site: 18
>>> Seems to have no N-terminal signal sequence
----- Final Results ------
                            bacterial cytoplasm --- Certainty = 0.2179(Affirmative) < succ>
                              bacterial membrane --- Certainty = 0.0000(Not Clear) < succ>
                                bacterial outside --- Certainty = 0.0000(Not Clear) < succ>
```

[10018] The protein has no significant homology with any sequences in the GENPEPT database.

[10019] There is also homology to SEQ ID 2920:

| Identities = 64/91 (70%), Positives = 78/91 (85%) | | |
|---|---|---|
| Query: 1 | MSDGKADFKLFDGPTVNAIIRNQGLTNLKTIPLTMRDQPYIYFIFGQDQKDLQKYVNNRL | 60 |
| | +S+GKADFK+FD PTVNAIIKNQGL NLKTI LT +QP+IYFIF QDQ+ LQ +VN R+ | |
| Sbjct: 187 | LSEGKADFKIFDAPTVNAIIRNQGLDNLKTIELTSTEQPFIYFIFSQDQEKLQSFVNKRI | 246 |
| Query: 61 | KQLRKDGTLSKIAKEYLGGDYVPNEKDLVTP | 91 |
| | K+L DGTLSK+AKE+LGGDYVP++K+L P | |
| Sbjct: 247 | KELTADGTLSKLAKEHLGGDYVPSDKELKLP | 277 |

[10020] Based on this analysis, it was predicted that this protein and its epitopes, could be useful antigens for vaccines or diagnostics.

### EXAMPLE 1823

[10021] A DNA sequence (GBSx1930) was identified in S. agalactiae <SEQ ID 5663> which encodes the amino acid sequence <SEQ ID 5664>. This protein is predicted to be 28 kDa outer membrane protein (yaeC). Analysis of this protein sequence reveals the following:

| Possible site: 41 | | | | | |
|---|---|---|---|---|---|
| >>> Seems to have no N-terminal signal sequence | | | | | |
| | INTEGRAL | Likelihood = 1.44 | Transmembrane | 25-41 | (25-42) |

```
----- Final Results -----
                              bacterial membrane --- Certainty = 0.1574(Affirmative) < succ>
                                bacterial outside --- Certainty = 0.0000(Not Clear) < succ>
                            bacterial cytoplasm --- Certainty = 0.0000(Not Clear) < succ>
```

[10022] The protein has homology with the following sequences in the GENPEPT database.

>GP:CAB59825 GB:AJ012388 hypothetical protein [Lactococcus lactis]
Identities = 110/283 (38%), Positives = 175/283 (60%), Gaps = 13/283 (4%)

| | | |
|---|---|---|
| Query: 22 | KLKHIVLGLALTTLLGV----TFSNQEVSASSTSSKVVKVGVMTFSDTEKARWDKIEKLV | 77 |
| | K ++I++ +A+ L+ + + ++Q +S K VKVG+M+ ++ W + | |
| Sbjct: 4 | KNRNIIIAVAVLILVALVAFFSLNHQGGVKASAGEKTVKVGIMSGDKQDQEVWKSVANTA | 63 |
| Query: 78 | GDK--AKIKETEFTDYTQPNQATANKDVDINAFQHYNFLENWNKENKKNLIPLEKTYLAP | 135 |
| | +K K+KF F+DY QPN+A + D+DINAFQ YN+++ WNK +K +++ + TY+ P | |
| Sbjct: 64 | KEKYDLKLKFVYFSDYNQPNEALLSGDIDINAFQSYNYVKTWNKAHKSDIVAVGNTYITP | 123 |
| Query: 136 | IRIYSEKVKSLKKLKKGATIAIPNDATNGSRALYVLQSAGLIKLNVS-GKKVATVANITS | 194 |
| | + IYS+++ L LK+G+T+AIPNDA+N SRAL+VLQSAGL+KL S K+ + +IT | |
| Sbjct: 124 | MHIYSKEISKLSDLKEGSTVAIPNDASNESRALFVLQSAGLLKLTTSDSSKLVGLPDITE | 183 |
| Query: 195 | NKKDINIQELDASQTPRALKDVDAAIINNTYIEQANLKPSDAIFVEKSDKNSKQWINIIA | 254 |
| | N + +E+DASQTPPAL V +++N Y A+L S+++F+E +K S Q+IN IA | |
| Sbjct: 184 | NPHQLKFKEVDASQTPRALDSVALSVVNYNYATAASLPKSESVFMEPLNKTSAQYINFIA | 243 |
| Query: 255 | GRKNWKKQKNAKAIQAILDAYHTDEVKKVIKDTSAD---IPQW | 294 |
| | K+KN K + + AY + +K IK+ D +P W | |
| Sbjct: 244 | ---TTSKEKNNKVYKEVAKAYASKATEKAIKEQYPDGGELPAW | 283 |

[10023] There is also homology to SEQ ID 2132.

[10024] Based on this analysis, it was predicted that this protein and its epitopes, could be useful antigens for vaccines or diagnostics.

[10025] A related GBS gene <SEQ ID 8907> and protein <SEQ ID 8908> were also identified. Analysis of this protein sequence reveals the following:

| Lipop: Possible site: −1 Crend: 4 | | | | |
|---|---|---|---|---|
| McG: Discrim Score: 7.47 | | | | |
| GVH: Signal Score (−7.5): −4.79 | | | | |
| Possible site: 21 | | | | |
| >>> Seems to have an uncleavable N-term signal seq | | | | |
| ALOM program count: 1 value: −1.44 threshold: 0.0 | | | | |
| INTEGRAL | Likelihood = −1.44 | Transmembrane | 5-21 | (5-22) |

```
    PERIPHERAL Likelihood = 5.20 147
modified ALOM score: 0.79
*** Reasoning Step: 3
----- Final Results -----
                              bacterial membrane --- Certainty = 0.1574(Affirmative) < succ>
                                bacterial outside --- Certainty = 0.0000(Not Clear) < succ>
                            bacterial cytoplasm --- Certainty = 0.0000(Not Clear) < succ>
```

[10026] The protein has homology with the following sequences in the databases:

[chemical structure]

[10027] SEQ ID 8908 (GBS35) was expressed in E. coli as a His-fusion product. SDS-PAGE analysis of total cell extract is shown in FIG. 11 (lane 2; MW 31.6 kDa).

[10028] The GBS35-His fusion product was purified (FIG. 96A; see also FIG. 192, lane 6) and used to immunise mice (lane 2 product; 20 kg/mouse). The resulting antiserum was used for Western blot (FIG. 96B), FACS (FIG. 96C), and in the in vivo passive protection assay (Table III). These tests confirm that the protein is immunoaccessible on GBS bacteria and that it is an effective protective immunogen.

### EXAMPLE 1824

[10029] A DNA sequence (GBSx1931) was identified in S. agalactiae <SEQ ID 5665> which encodes the amino acid sequence <SEQ ID 5666>. Analysis of this protein sequence reveals the following:

```
Possible site: 37
>>> Seems to have no N-terminal signal sequence
----- Final Results -----
                            bacterial cytoplasm --- Certainty = 0.3126(Affirmative) < succ>
                              bacterial membrane --- Certainty = 0.0000(Not Clear) < succ>
                                bacterial outside --- Certainty = 0.0000(Not Clear) < succ>
```

[10030] The protein has homology with the following sequences in the GENPEPT database.

| GP:AAF11560 GB:AE002038 ArgE/DapE/Acyl family protein {Deinococcus radiodurans} | | |
|---|---|---|
| Identities = 129/419 (30%), Positives = 210/419 (49%), Gaps = 14/419 (3%) | | |
| Query: 26 | LRDLIAIKSIFAQKVGLNDLSSYLGEVFIKAGAEVIIDDSYSAPFIVANFKSSKVDAKRI | 85 |
| | LR L+A+ S+ AQ L + + + + G V AP ++A + | |
| Sbjct: 16 | LRALVALPSVSAQGRMLPETADAVAGLLRAEGFGVQQFPGTVAPVLLAEAGEGPFT---L | 72 |
| Query: 86 | IFYNHYDTVPADEVEQWTEDPFTLSLRYGKMYGRGVDDDKGHITARLSAVKKYLSRHKGE | 145 |
| | + YNHYD P D +E W PF L+ R G++YGRG DDKG + +RL+AV+ + G | |
| Sbjct: 73 | LIYNHYDVQPEDPLELWDTPPFELTERGGRLYGRGASDDKGELASRLAAVRA-VREQLGH | 131 |
| Query: 146 | LPLDITFIVEGAEESASVGLDYYLEKYQEQLQGADLIVWEDGPKNPKGQLEIAGGNKGIV | 205 |
| | LP+ I +++EG EE S L+ ++ ++ +LQ AD WE G +P+G+ ++ G KG++ | |
| Sbjct: 132 | LPVKIKWLIEGEEEVGSPTLERFVAEHAAELQ-ADGCWWEFGGISPEGRPILSLGLKGVM | 190 |
| Query: 206 | TFDLSVSSADVDIHSSFGGVVDSSTWYLIQALNTLRDNKGHILVEGIYDKVIPPTKRELE | 265 |
| | +L AD D+HSS G V+D+ + L +A+ +LRD +G++ + G YD V + + + | |
| Sbjct: 191 | CLELRCRVADSDLHSSLGAVIDNPLYCLARAVASLRDEQGNVTIPGFYDDVRAASGADRQ | 250 |
| Query: 266 | LVEKYSYRSAKALEGAYQLVLPSLADSHKTFLRKLYFEPSIAIEGITSGYQGEGVKTILP | 325 |
| | + + +A+ + + P + + + P + + G GYQGEG KT+LP | |
| Sbjct: 251 | AIAQIP-GDGQAVRDTFGVRRP--LATGPAYNERTNLHPVVNVNGWGGGYQGEGSKTVLP | 307 |
| Query: 326 | AYAKCKAEVRLVPGLTPKGVLDSIQNHLKENGFKDIELT-YTLGEMSYRSDMSAPSILKV | 384 |
| | K + RLVP P VL ++ HL G DIE+ + R+D P + | |
| Sbjct: 308 | GAGFVKLDFRLVPDQDPARVLSLLREHLTAQGLSDIEVVELEAHQKPARADAGHPFVQAC | 367 |
| Query: 385 | VDLAEQFYPEGISLLPTSPGTGPMY-----LVHQALRAPIAAIGIGHANSRDHGVDENV | 438 |
| | V A + + + P+S +GPM+ L P A+GIG+ R H +EN+ | |
| Sbjct: 368 | VAAARAAHGQDPIVHPSSGASGPMFPFTGGAGGGGLGIPCVAVGIGNHAGRVHAPNENI | 426 |

[10031] There is also homology to SEQ ID 2588.

[10032] Based on this analysis, it was predicted that this protein and its epitopes, could be useful antigens for vaccines or diagnostics.

### EXAMPLE 1825

[10033] A DNA sequence (GBSx1932) was identified in S. agalactiae <SEQ ID 5667> which encodes the amino acid sequence <SEQ ID 5668>. This protein is predicted to be amino acid ABC transporter, ATP-binding protein. Analysis of this protein sequence reveals the following:

```
Possible site: 47
>>> Seems to have no N-terminal signal sequence
----- Final Results -----
                            bacterial cytoplasm --- Certainty = 0.5366(Affirmative) < succ>
                              bacterial membrane --- Certainty = 0.0000(Not Clear) < succ>
                                bacterial outside --- Certainty = 0.0000(Not Clear) < succ>
```

[10034] The protein has homology with the following sequences in the GENPEPT database.

| >GP:CAB59828 GB:AJ012388 hypothetical protein [Lactococcus lactis] | | |
|---|---|---|
| Identities = 187/338 (55%), Positives = 256/338 (75%), Gaps = 12/338 (3%) | | |
| Query: 6 | IIKLDNIDVTFHQKKREINAVKDVTIHINQGDIYGIVGYSGAGKSTLVRVINLLQEPSAG | 65 |
| | II+L+N+ V FHQK R + AVK+ T+HI +GDIYG++GYSGAGKSTLVR INLLQ+P+G | |
| Sbjct: 4 | IIELNNLSVQFHQKGRLVTAVKNATLHIEKGDIYGVIGYSGAGKSTLVRTINLLQKPTEG | 63 |
| Query: 66 | KITIDDQVIYD--NKVTLTSTQLREQRREIGMIFQHFNLMSQLTAEQNVAFALKHSG--- | 120 |
| | +I I+ + I+D N V T +LRE R++IGMIFQHFNL+S+ T NVAFAL+HS | |
| Sbjct: 64 | QIVINGEKIFDSENPVKFTGAKLREFRQKIGMIFQHFNLLSEKTVFNNVAFALQHSQIED | 123 |
| Query: 121 | -------LSKEAKAAKVAKLLELVGLSDRAQNYPSQLSGGQKQRVAIARALANDPKILIS | 173 |
| | L+K+ K KV +LL+LV L+D + YP+QLSGGQKQRVAIARALANDP+ILIS | |
| Sbjct: 124 | KNGKKRYLTKKEKNDKVTELLKLVDLADLSDKYPAQLSGGQKQRVAIARALANDPEILIS | 183 |
| Query: 174 | DESTSALDPKTTKQILALLQDLNKKLGLTIVLITHEMQIVKDIANRVAVMQNGKLIEEGS | 233 |
| | DE TSALDPKTT QIL LL+ L++KLG+T+VLITHEMQ+VK+IAN+VAVMQNG++IE+ S | |
| Sbjct: 184 | DEGTSALDPKTTNQILDLLKSLHEKLGITVVLITHEMQVVKEIANKVAVMQNGEIIEQNS | 243 |
| Query: 234 | VLDIFSHPRESLTQDFIKIATGIDEAMLKIEQQEVVKNLPVGSKLVQLKYAGHSTDEPLL | 293 |
| | ++DIF+ P+E+LT+ FI+ + ++ + + + E++ L +L+ L Y+G ++P++ | |
| Sbjct: 244 | LIDIFAQPKEALTKQFIETTSSVNRFIASLSKTELLAQLADDEELIHLDYSGSELEDPVV | 303 |
| Query: 294 | NQIYKEFEVTANILYGNIEILDGIPVGEMVVILSGDEE | 331 |
| | + I K+F+VT NI YGN+E+L G P G +V+ L G E | |
| Sbjct: 304 | SDITKKFDVTTNIFYGNVELLQGQPFGSLVLTLKGSSE | 341 |

[10035] There is also homology to SEQ ID 76.

[10036] Based on this analysis, it was predicted that this protein and its epitopes, could be useful antigens for vaccines or diagnostics.

### EXAMPLE 1826

[10037] A DNA sequence (GBSx1933) was identified in S. agalactiae <SEQ ID 5669> which encodes the amino acid sequence <SEQ ID 5670>. This protein is predicted to be ABC transporter, permease protein. Analysis of this protein sequence reveals the following:

| Possible site: 55 | | | | | |
|---|---|---|---|---|---|
| >>> Seems to have no N-terminal signal sequence | | | | | |
| | INTEGRAL | Likelihood = −12.79 | Transmembrane | 203-219 | (197-225) |
| | INTEGRAL | Likelihood = −8.86 | Transmembrane | 73-89 | (69-102) |
| | INTEGRAL | Likelihood = −7.38 | Transmembrane | 38-54 | (35-56) |
| | INTEGRAL | Likelihood = −1.12 | Transmembrane | 103-119 | (103-119) |

```
----- Final Results -----
                            bacterial membrane --- Certainty = 0.6116(Affirmative) < succ>
                              bacterial outside --- Certainty = 0.0000(Not Clear) < succ>
                          bacterial cytoplasm --- Certainty = 0.0000(Not Clear) < succ>
```

[10038] A related GBS nucleic acid sequence <SEQ ID 10083> which encodes amino acid sequence <SEQ ID 10084> was also identified.

[10039] The protein has homology with the following sequences in the GENPEPT database.

| >GP:CAB59829 GB:AJ012388 hypothetical protein [Lactococcus lactis] | | |
|---|---|---|
| Identities = 137/231 (59%), Positives = 171/231 (73%), Gaps = 1/231 (0%) | | |
| Query: 1 | MIEWIQTHLPNVYQMGWEGAYGWQTAIVQTLYMTFWSFLIGGLMGLLGGLFLVLTSPRGV | 60 |
| | M EW PNV +GW G GW TAIVQTLYMTF S LIGGL+GL+ G+ +V+T+ G+ | |
| Sbjct: 1 | MAEWFAHTFPNVVYLGWTGETGWWTAIVQTLYMTFISALIGGLLGLIFGIGVVVTAEDGI | 60 |
| Query: 61 | IANKLVFGVLDKVVSVFRALPFIILLALIAPVTRVIVGTTLGSPAALVPLSLAVFPFFAR | 120 |
| | N+ +F +LDK+VS+ RA PFIILLA IAP+T+++VGT +G AALVPL+L V PF+AR | |
| Sbjct: 61 | TPNRPLFWILDKIVSIGRAFPFIILLAAIAPLTKILVGTQIGVTAALVPLALGVAPFYAR | 120 |
| Query: 121 | QVQVVLAELDGGVIEAAQASGGTLWDII-VVYLREGLPDLIRVSTVTLISLVGETAMAGA | 179 |
| | QVQ L +D G +EAAQ G DI+ VYLRE L LIRVSTVTLISL+G TAMAGA | |
| Sbjct: 121 | QVQASLESVDHGKVEAAQTVGADFLDIVFTVYLREELASLIRVSTVTLISLIGLTAMAGA | 180 |
| Query: 180 | IGAGGLGSVAITKGYNYSRDDITLVATILILLLIFFIQFLGDFLTRRLSHK | 230 |
| | IGAGGLG+ AI+ GYN +D+T ATILIL+ + +Q +GDFL RR+SH+ | |
| Sbjct: 181 | IGAGGLGNTAISYGYNRFANDVTWFATILILIFVLLVQLVGDFLARRVSHR | 231 |

[10040] A related DNA sequence was identified in S. pyogenes <SEQ ID 5671> which encodes the amino acid sequence <SEQ ID 5672>. Analysis of this protein sequence reveals the following:

Possible site: 32
>>> Seems to have an uncleavable N-term signal seq

| | | | | |
|---|---|---|---|---|
| INTEGRAL | Likelihood = −11.15 | Transmembrane | 194-210 | (187-215) |
| INTEGRAL | Likelihood = −10.67 | Transmembrane | 28-44 | (20-52) |
| INTEGRAL | Likelihood = −8.12 | Transmembrane | 70-86 | (62-91) |

```
----- Final Results -----
                              bacterial membrane --- Certainty = 0.5458(Affirmative) < succ>
                                bacterial outside --- Certainty = 0.0000(Not Clear) < succ>
                            bacterial cytoplasm --- Certainty = 0.0000(Not Clear) < succ>
```

[10041] The protein has homology with the following sequences in the databases:

| >GP:CAB59829 GB:AJ012388 hypothetical protein [Lactococcus lactis] | | |
|---|---|---|
| Identities = 123/213 (57%), Positives = 153/213 (71%), Gaps = 1/213 (0%) | | |
| Query: 9 | GDAGWGLAIWNTLYMTIVPFIVGGAIGLLLGLLLVLTGPDGVIENKTICWVIDKVTSIFR | 68 |
| | G+ GW AI TLYMT + ++GG +GL+ G+ +V+T DG+ N+ + W++DK+ SI R | |
| Sbjct: 19 | GETGWWTAIVQTLYMTFISALIGGLLGLIFGIGVVVTAEDGITPNRPLFWILDKIVSIGR | 78 |
| Query: 69 | AIPFVILIAILASFTYLLLRTTLGATAALVPLTFATFPFYARQVQVVFSELDKGVIEAAQ | 128 |
| | A PF+IL+A +A T +L+ T +G TAALVPL PFYARQVQ +D G +EAAQ | |
| Sbjct: 79 | AFPFIILLAAIAPLTKILVGTQIGVTAALVPLALGVAPFYARQVQASLESVDHGKVEAAQ | 138 |
| Query: 129 | ASGATFWDIV-KVYLSEGLPDLIRVSTVTLISLVGETAMAGAIGAGGLGNVAISYGYNRF | 187 |
| | GA F DIV VYL E L LIRVSTVTLISL+G TAMAGAIGAGGLGN AISYGYNRF | |
| Sbjct: 139 | TVGADFLDIVFTVYLREELASLIRVSTVTLISLIGLTAMAGAIGAGGLGNTAISYGYNRF | 198 |
| Query: 188 | NNDVTWVATIIILLIIFAIQFIGDSLTRRFSHK | 220 |
| | NDVTW ATI+IL+ + +Q +GD L RR SH+ | |
| Sbjct: 199 | ANDVTWFATILILIFVLLVQLVGDFLARRVSHR | 231 |

[10042] An alignment of the GAS and GBS proteins is shown below.

| Identities = 146/212 (68%), Positives = 172/212 (80%) | | |
|---|---|---|
| Query: 19 | GAYGWQTAIVQTLYMTFWSFLIGGLMGLLGGLFLVLTSPRGVIANKLVFGVLDKVVSVFR | 78 |
| | G GW AI TLYMT F++GG +GLL GL LVLT P GVI NK + V+DKV S+FR | |
| Sbjct: 9 | GDAGWGLAIWNTLYMTIVPFIVGGAIGLLLGLLLVLTGPDGVIENKTICWVIDKVTSIFR | 68 |
| Query: 79 | ALPFIILLALIAPVTRVIVGTTLGSPAALVPLSLAVFPFFARQVQVVLAELDGGVIEAAQ | 138 |
| | A+PF+IL+A++A T +++ TTLG+ AALVPL+ A FPF+ARQVQVV +ELD GVIEAAQ | |
| Sbjct: 69 | AIPFVILIAILASFTYLLLRTTLGATAALVPLTFATFPFYARQVQVVFSELDKGVIEAAQ | 128 |
| Query: 139 | ASGGTLWDIIVVYLREGLPDLIRVSTVTLISLVGETAMAGAIGAGGLGSVAITKGYNYSR | 198 |
| | ASG T WDI+ VYL EGLPDLIRVSTVTLISLVGETAMAGAIGAGGLG+VAI+ GYN | |
| Sbjct: 129 | ASGATFWDIVKVYLSEGLPDLIRVSTVTLISLVGETAMAGAIGAGGLGNVAISYGYNRFN | 188 |
| Query: 199 | DDITLVATILILLLIFFIQFLGDFLTRRLSHK | 230 |
| | +D+T VATI+ILL+IF IQF+GD LTRR SHK | |
| Sbjct: 189 | NDVTWVATIIILLIIFAIQFIGDSLTRRFSHK | 220 |

[10043] Based on this analysis, it was predicted that these proteins and their epitopes could be useful antigens for vaccines or diagnostics.

### EXAMPLE 1827

[10044] A DNA sequence (GBSx1934) was identified in S. agalactiae <SEQ ID 5673> which encodes the amino acid sequence <SEQ ID 5674>. This protein is predicted to be alcohol dehydrogenase, zinc-containing (Zn-dependent). Analysis of this protein sequence reveals the following:

| Possible site: 21 | | | | | |
|---|---|---|---|---|---|
| >>> Seems to have no N-terminal signal sequence | | | | | |
| | INTEGRAL | Liklihood = −2.92 | Transmembrane | 71-87 | (69-87) |

```
----- Final Results -----
                              bacterial membrane --- Certainly = 0.2168(Affirmative) < succ>
                                bacterial outside --- Certainly = 0.0000(Not clear) < succ>
                            bacterial cytoplasm --- Certainly = 0.0000(Not clear) < succ>
```

[10045] A related GBS nucleic acid sequence <SEQ ID 9419> which encodes amino acid sequence <SEQ ID 9420> was also identified.

[10046] The protein has homology with the following sequences in the GENPEPT database.

| >GP:AAE41759 GB:AE002488 alcohol dehydrogenase, zinc-containing | | |
|---|---|---|
| [Neisseria meningitidis MC58] | | |
| Identities = 135/246 (54%), Positives = 186/246 (74%), Gaps = 1/246 (0%) | | |
| Query: 3 | SHCEDGGWILGHLIEGTQAEYVHIPHADGSLYHAPEGVCDDALVMLSDILPTSYEIGVLP | 62 |
| | SHC +GGWILG++I+GTQAEYV P+AD SL P+ V ++ ++LSD LPT++EIGV | |
| Sbjct: 102 | SHCRNGGWILGYMIDGTQAEYVRTPYADNSLVPLPDNVNEEIALLLSDALPTAHEIGVQY | 161 |
| Query: 63 | SHIKPGDTVCIVGAGPIGLSALLTAQFYSPAKIIMVDLSQRRLEASKKFGATHTILSTST | 122 |
| | +KPGDTV I GAGP+G+SALLTAQ YSPA II+D+ + RL+ +K+ GATHTI + ++ | |
| Sbjct: 162 | GDVKPGDTVFIAGAGPVGMSALLTAQLYSPAAIIVCDMDENRLKLAKELGATHTI-NPAS | 220 |
| Query: 123 | QEVKEEIDKITKGRGVDVVLECVGYPATFDICQNVVSIGGHIANVGVHGKPVEFNLQDLW | 182 |
| | EV +++ I GVD +E VG PAT+++CQ++V GGHIA VGVHG+ V+F L+ LW | |
| Sbjct: 221 | GEVSKQVFAIVGEDGVDCAIEAVGIPATWNMCQDIVKPGGHIAVVGVHGQSVDFKLEKLW | 280 |
| Query: 183 | IKNITLNTGLVNANTTEMLLEVLETGKIDATQLVTHHFKLSEIEEAYKVFKAAEENNTLK | 242 |
| | IK + + TGLVNANTTEML++ + + +D T+++THHFK SE+E+AY VEK A EN +K | |
| Sbjct: 281 | IKKLAITTGLVNANTTEMLNKAISSSSVDYTKMLTHHFKFSELEKAYDVFKHAAENQVMK | 340 |
| Query: 243 | VIIEND | 248 |
| | V++E D | |
| Sbjct: 341 | VVLEAD | 346 |

[10047] A related DNA sequence was identified in S. pyogenes <SEQ ID 785> which encodes the amino acid sequence <SEQ ID 786>. Analysis of this protein sequence reveals the following:

| Possible site: 23 | | | | | |
|---|---|---|---|---|---|
| >>> Seems to have no N-terminal signal sequence | | | | | |
| | INTEGRAL | Likelihood = −5.41 | Transmembrane | 184-200 | (183-203) |

```
----- Final Results -----
                              bacterial membrane --- Certainty = 0.3166(Affirmative) < succ>
                                bacterial outside --- Certainty = 0.0000(Not Clear) < succ>
                            bacterial cytoplasm --- Certainty = 0.0000(Not Clear) < succ>
```

[10048] An alignment of the GAS and GBS proteins is shown below.

| Identities = 199/250 (79%), Positives = 226/250 (89%) | | |
|---|---|---|
| Query: 1 | MPSHCEDGGWILGHLIEGTQAEYVHIPHADGSLYHAPEGVCDDALVMLSDILPTSYEIGV | 60 |
| | + SHC+DGGWILGHLI GTQAEYVHIPHADGSLYHAP+ + D+ALVMLSDILPTSYEIGV | |
| Sbjct: 114 | LSSHCQDGGWILGHLINGTQAEYVHIPHADGSLYHAPDTIDDEALVMLSDILPTSYEIGV | 173 |
| Query: 61 | LPSHIKPGDTVCIVGAGPIGLSALLTAQFYSPAKIIMVDLSQKRLEASKKFGATHTILST | 120 |
| | LPSH+KPGD VCIVGAGP+GL+ALLT QF+SPA IIMVDLSQ RLEA+K FGATHTI S | |
| Sbjct: 174 | LPSHVKPGDNVCIVGAGPVGLAALLTVQFFSPANIIMVDLSQNRLEAAKTFGATHTICSG | 233 |
| Query: 121 | STQEVKEEIDKITKGRGVDVVLECVGYPATFDICQNVVSIGGHIANVGVHGKPVEFNLQD | 180 |
| | S++EVK ID IT GRGVD+ +ECVGYPATFDICQ ++S+GGHIANVGVHGKPV+FNL + | |
| Sbjct: 234 | SSSEVKAIIDDITNGRGVDISMECVGYPATFDICQKIISVGGHIANVGVHGKPVDFNLDE | 293 |
| Query: 181 | LWIKNITLNTGLVNANTTEMLLEVLETGKIDATQLVTHHFKLSEIEEAYKVFKAAEENNT | 240 |
| | LWIKNITLNTGLVNANTTEMLL VL+TGKIDAT+L+THHFKLSE+E+AY+FK A NN | |
| Sbjct: 294 | LWIKNITLNTGLVNANTTEMLLNVLKTGKIDATRLITHHFKLSEVEKAYETFKHAGANNA | 353 |
| Query: 241 | LKVIIENDIT | 250 |
| | LKVII+NDI+ | |
| Sbjct: 354 | LKVIIDNDIS | 363 |

[10049] Based on this analysis, it was predicted that these proteins and their epitopes could be useful antigens for vaccines or diagnostics.

### EXAMPLE 1828

[10050] A DNA sequence (GBSx1935) was identified in S. agalactiae <SEQ ID 5675> which encodes the amino acid sequence <SEQ ID 5676>. This protein is predicted to be a dehydrogenase fragment. Analysis of this protein sequence reveals the following:

| Possible site: 20 | | | | | |
|---|---|---|---|---|---|
| >>> Seems to have no N-terminal signal sequence | | | | | |
| | INTEGRAL | Likelihood = −10.46 | Transmembrane | 47-63 | (33-66) |

```
----- Final Results -----
                              bacterial membrane --- Certainty = 0.5182(Affirmative) < succ>
                                bacterial outside --- Certainty = 0.0000(Not Clear) < succ>
                            bacterial cytoplasm --- Certainty = 0.0000(Not Clear) < succ>
```

[10051] The protein has no significant homology with any sequences in the GENPEPT database.

[10052] There is also homology to SEQ ID 786:

Identities = 23/38 (60%), Positives = 28/38 (73%)

| | | |
|---|---|---|
| Query: 7 | WRNSNMRAATYLSANELSLTDKAKPQVIKPTDAVVXLV | 44 |
| | ++ NM+AATYLS L L DK KP +IKPTDA+V LV | |
| Sbjct: 10 | YKKLNMKAATYLSTGNLQLIDKPKPVIIKPTDAIVQLV | 47 |

[10053] Based on this analysis, it was predicted that this protein and its epitopes, could be useful antigens for vaccines or diagnostics.

### EXAMPLE 1829

[10054] A DNA sequence (GBSx1936) was identified in S. agalactiae <SEQ ID 5677> which encodes the amino acid sequence <SEQ ID 5678>. Analysis of this protein sequence reveals the following:

```
Possible site: 39
>>> Seems to have no N-terminal signal sequence
----- Final Results -----
                            bacterial cytoplasm --- Certainty = 0.1001(Affirmative) < succ>
                              bacterial membrane --- Certainty = 0.0000(Not Clear) < succ>
                                bacterial outside --- Certainty = 0.0000(Not Clear) < succ>
```

[10055] The protein has no significant homology with any sequences in the GENPEPT database.

[10056] No corresponding DNA sequence was identified in S. pyogenes.

[10057] Based on this analysis, it was predicted that this protein and its epitopes, could be useful antigens for vaccines or diagnostics.

### EXAMPLE 1830

[10058] A DNA sequence (GBSx1937) was identified in S. agalactiae <SEQ ID 5679> which encodes the amino acid sequence <SEQ ID 5680>. This protein is predicted to be branched chain amino acid transport system II carrier protein (brnQ). Analysis of this protein sequence reveals the following:

| Possible site: 44 | | | | | |
|---|---|---|---|---|---|
| >>> Seems to have an uncleavable N-term signal seq | | | | | |
| | INTEGRAL | Likelihood = −9.66 | Transmembrane | 158-174 | (154-177) |
| | INTEGRAL | Likelihood = −6.64 | Transmembrane | 233-249 | (231-252) |
| | INTEGRAL | Likelihood = −5.20 | Transmembrane | 37-53 | (30-57) |
| | INTEGRAL | Likelihood = −3.98 | Transmembrane | 90-106 | (87-108) |
| | INTEGRAL | Likelihood = −0.80 | Transmembrane | 130-146 | (130-146) |

```
----- Final Results -----
                              bacterial membrane --- Certainty = 0.4864(Affirmative) < succ>
                                bacterial outside --- Certainty = 0.0000(Not Clear) < succ>
                            bacterial cytoplasm --- Certainty = 0.0000(Not Clear) < succ>
```

[10059] A related GBS nucleic acid sequence <SEQ ID 9417> which encodes amino acid sequence <SEQ ID 9418> was also identified.

[10060] The protein has homology with the following sequences in the GENPEPT database.

| >GP:AAC00400 G8:AF008220 branch-chain amino acid transporter | | |
|---|---|---|
| [Bacillus subtilis] | | |
| Identities = 89/250 (35%), Positives = 139/250 (55%), Gaps = 18/250 (7%) | | |
| Query: 1 | MDALASIAFAIIVIQASKQYGAITKKEITSMALKSGAIATFLLAFIYIFVGRIGATSQSL | 60 |
| | MDALASI F ++V+ A K G K + + +K+G IA L FIY+ + +GATS + | |
| Sbjct: 199 | MDALASIVFGVVVVNAVKSKGVTQSKALAAACIKAGVIAALGLTFIYVSLAYLGATSTNA | 258 |
| Query: 61 | FKFANGSFLLHNTPI-DGGHVLSQSANFYLGIVGQAILGTAIFLACLTTATGLITACAEY | 119 |
| | P+ +G +LS S+++ G +G +LG AI +ACLTT+ GL+T+C +Y | |
| Sbjct: 259 | IG-----------PVGEGAKILSASSHYLFGSLGNIVLGAAITVACLTTSIGLVTSCGQY | 307 |
| Query: 120 | FHKLLPKISHITWATIFTLIAITFYFGGLSEIIRWSLPVLYLLYPLTIVLIFLVFFDQKF | 179 |
| | F KL+P +S+ TI TL ++ GL++II +S+P+L +YPL IV+I L F D+ F | |
| Sbjct: 308 | FSKLIPALSYKIVVTIVTLFSLIIANFGLAQIIAFSVPILSAIYPLAIVIIVLSFIDKIF | 367 |
| Query: 180 | ESSRIVYQTSIAATAVAALYDALSKLGEMTGLFTIPSALTTFFTKVVPLGEYSMGWISFA | 239 |
| | + R VY + T + ++ D + G G +L F +PL +GW+ | |
| Sbjct: 368 | KERREVYIACLIGTGLFSILDGIKAAGFSLG------SLDVFLNANLPLYSLGIGWVLPG | 421 |
| Query: 240 | ICGVLVGLIL | 249 |
| | I G ++G +L | |
| Sbjct: 422 | IVGAVIGYVL | 431 |

[10061] A related DNA sequence was identified in S. pyogenes <SEQ ID 2233> which encodes the amino acid sequence <SEQ ID 2234>. Analysis of this protein sequence reveals the following:

| Possible site: 21 | | | | | |
|---|---|---|---|---|---|
| >>> Seems to have a cleavable N-term signal seq. | | | | | |
| | INTEGRAL | Likelihood = −10.83 | Transmembrane | 235-251 | (228-258) |
| | INTEGRAL | Likelihood = −8.49 | Transmembrane | 434-450 | (429-454) |
| | INTEGRAL | Likelihood = −8.12 | Transmembrane | 359-375 | (356-377) |
| | INTEGRAL | Likelihood = −7.86 | Transmembrane | 150-166 | (144-171) |
| | INTEGRAL | Likelihood = −6.00 | Transmembrane | 298-314 | (288-316) |
| | INTEGRAL | Likelihood = −5.95 | Transmembrane | 42-58 | (38-63) |
| | INTEGRAL | Likelihood = −3.35 | Transmembrane | 336-352 | (335-354) |
| | INTEGRAL | Likelihood = −2.81 | Transmembrane | 199-215 | (198-218) |
| | INTEGRAL | Likelihood = −2.18 | Transmembrane | 120-136 | (120-138) |
| | INTEGRAL | Likelihood = −1.81 | Transmembrane | 390-406 | (390-407) |
| | INTEGRAL | Likelihood = −1.01 | Transmembrane | 81-97 | (81-97) |

```
----- Final Results -----
                              bacterial membrane --- Certainty = 0.5331(Affirmative) < succ>
                                bacterial outside --- Certainty = 0.0000(Not Clear) < succ>
                            bacterial cytoplasm --- Certainty = 0.0000(Not Clear) < succ>
```

[10062] An alignment of the GAS and GBS proteins is shown below.

| Identities = 161/253 (63%), Positives = 197/253 (77%) | | |
|---|---|---|
| Query: 1 | MDALASIAFAIIVIQASKQYGAITKKEITSMALKSGAIATFLLAFIYIFVGRIGATSQSL | 60 |
| | MDALAS+ FAI+VI+A+KQ+GA T KE+T + L SGAIA LLA +YIFVGRIGATSQSL | |
| Sbjct: 202 | MDALASLVFAILVIEATKQFGAKTDKEMTKITLISGAIAILLLALVYIFVGRIGATSQSL | 261 |
| Query: 61 | FKFANGSFLLHNTPIDGGHVLSQSANFYLGIVGQAILGTAIFLACLTTATGLITACAEYF | 120 |
| | F F +GSF LH P++GG +LS ++ FYLG +GQA L IFLACLTT+TGLIT+ AEYF | |
| Sbjct: 262 | FPFIDGSFTLHGNPVNGGQILSHASRFYLGGIGQAFLAVVIFLACLTTSTGLITSSAEYF | 321 |
| Query: 121 | HKLLPKISHITWATIFTLIAITFYFGGLSEIIRWSLPVLYLLYPLTIVLIFLVFFDQKFE | 180 |
| | HKL+P +SHI WATIFTL++ FYFGGLS II WS PVL+LLYPLT+ LIFLV + F | |
| Sbjct: 322 | HKLVPALSHIAWATIFTLLSAFFYFGGLSVIINWSAPVLFLLYPLTVDLIFLVLAQKCFN | 381 |
| Query: 181 | SSRIVYQTSIAATAVAALYDALSKLGEMTGLFTIPSALTTFFTKVVPLGEYSMGWISFAI | 240 |
| | + IVY+T+I T + A++DAL L +MTGLF +P A+ TFF K VPLG++SMGWI FA | |
| Sbjct: 382 | NDPIVYRTTIGLTFIPAIFDALLTLSQMTGLFHLPEAVVTFFQKTVPLGQFSMGWIIFAA | 441 |
| Query: 241 | CGVLVGLILKKVK | 253 |
| | G L+GLIL K K | |
| Sbjct: 442 | IGFLIGLILSKTK | 454 |

[10063] Based on this analysis, it was predicted that these proteins and their epitopes could be useful antigens for vaccines or diagnostics.

### EXAMPLE 1831

[10064] A DNA sequence (GBSx1938) was identified in S. agalactiae <SEQ ID 5681> which encodes the amino acid sequence <SEQ ID 5682>. This protein is predicted to be 30S ribosomal protein S12 (rpsL). Analysis of this protein sequence reveals the following:

```
Possible site: 52
>>> Seems to have no N-terminal signal sequence
----- Final Results -----
                            bacterial cytoplasm --- Certainty = 0.3698(Affirmative) < succ>
                              bacterial membrane --- Certainty = 0.0000(Not Clear) < succ>
                                bacterial outside --- Certainty = 0.0000(Not Clear) < succ>
```

[10065] A related GBS nucleic acid sequence <SEQ ID 9429> which encodes amino acid sequence <SEQ ID 9430> was also identified.

[10066] The protein has homology with the following sequences in the GENPEPT database.

| >GP:CAA78825 GB:Z15120 ribosomal protein 512 [Streptococcus pneumoniae] | | |
|---|---|---|
| Identities = 64/71 (90%), Positives = 68/71 (95%) | | |
| Query: 1 | MPTINQLVRKPRKSKVEKSDSPALNIGYNSHRKVHTKLSAPQKRGVATRVGTMTPKKPNS | 60 |
| | MPTINQLVRKPRKSKVEKS SPALN+GYNSH+KV T +S+PQKRGVATRVGTMTPKKPNS | |
| Sbjct: 1 | MPTINQLVRKPRKSKVEKSKSPALNVGYNSHKKVQTNVSSPQKRGVATRVGTMTPKKPNS | 60 |
| Query: 61 | ALRKFARVRLS | 71 |
| | ALRKFARVRLS | |
| Sbjct: 61 | ALRKFARVRLS | 71 |

[10067] A related DNA sequence was identified in S. pyogenes <SEQ ID 5683> which encodes the amino acid sequence <SEQ ID 5684>. Analysis of this protein sequence reveals the following:

```
Possible Site: 29
>>> Seems to have no N-terminal signal sequence
----- Final Results -----
                            bacterial cytoplasm --- Certainty = 0.3879(Affirmative) < succ>
                              bacterial membrane --- Certainty = 0.0000(Not Clear) < succ>
                                bacterial outside --- Certainty = 0.0000(Not Clear) < succ>
```

[10068] An alignment of the GAS and GBS proteins is shown below.

| Identities = 44/48 (91%), Positives = 47/48 (97%) | | |
|---|---|---|
| Query: 24 | LNIGYNSHRKVHTKLSAPQKRGVATRVGTMTPKKPNSALRRFARVRLS | 71 |
| | LNIGYNSH+KV TK++APQKRGVATRVGTMTPKKPNSALRRFARVRLS | |
| Sbjct: 1 | LNIGYNSHKKVQTKMAAPQKRGVATRVGTMTPKKPNSALRKFARVRLS | 48 |

[10069] Based on this analysis, it was predicted that these proteins and their epitopes could be useful antigens for vaccines or diagnostics.

### EXAMPLE 1832

[10070] A DNA sequence (GBSx1939) was identified in S. agalactiae <SEQ ID 5685> which encodes the amino acid sequence <SEQ ID 5686>. This protein is predicted to be purR. Analysis of this protein sequence reveals the following:

| Possible site: 30 | | | | | |
|---|---|---|---|---|---|
| >>> Seems to have an uncleavable N-term signal seq | | | | | |
| | INTEGRAL | Likelihood = −0.37 | Transmembrane | 142-158 | (142-159) |

```
----- Final Results -----
                              bacterial membrane --- Certainty = 0.1150(Affirmative) < succ>
                                bacterial outside --- Certainty = 0.0000(Not Clear) < succ>
                            bacterial cytoplasm --- Certainty = 0.0000(Not Clear) < succ>
```

[10071] The protein has homology with the following sequences in the GENPEPT database.

| >GP:CAA10902 GB:AJ222642 purR [Lactococcus lactis] | | |
|---|---|---|
| Identities = 143/269 (53%), Positives = 195/269 (72%), Gaps = 1/269 (0%) | | |
| Query: 3 | LRRSERMVVISNYLINNPYTLTSLNTFASKYGAAKSSISEDIAIIKKAFEQAQIGDIKTV | 62 |
| | ++R+ER+V +N+LIN+P + +LN + Y AKSSISED+ IK+ FE +G ++T | |
| Sbjct: 1 | MKRNERLVDFTNFLINHPNQMLNLNELSKHYEVAKSSISEDLVFIKRVFENQGVGLVETF | 60 |
| Query: 63 | TGASGGVIFTPTIAEAEAKEIVEELRQRLSENDRILPGGYIYLSDLLSTPKMLQSIGRII | 122 |
| | G+ GGV FTP I + + E+ +E+ + L E +RILPGGYIYLSD+L TP L+ IG+II | |
| Sbjct: 61 | PGSLGGVRFTPYITDERSLEMSQEIAELLREENRILPGGYIYLSDILGTPSNLRKIGQII | 120 |
| Query: 123 | ANAYRGQKIDAVMTVATKGVPLANAVANVLDVPFVIVRRDLKITEGSTVSVNYASGSSGR | 182 |
| | A+ Y +++D VMT+ATKG+P+A +VA +LDVPFVIVRRD K+TEG+T++VNY SGSS R | |
| Sbjct: 121 | AHEYHEKQVDVVMTIATKGIPIAQSVAEILDVPFVIVRRDPKVTEGATLNVNYMSGSSSR | 180 |
| Query: 183 | IEKMFLSKRSLKPNSRVLIVDDFLKGGGTVSGMISLLSEFDSTLVGVAVFAENA-QEQRE | 241 |
| | +E M LSKRSL VLIVDDF+KG GT++GM SL+ EFD L GVAVF E + +R | |
| Sbjct: 181 | VENMTLSKRSLSIGQNVLIVDDFMKGAGTINGMRSLVHEFDCLLAGVAVFLEGPFKGERL | 240 |
| Query: 242 | KMAYKSLLRVSEIDVKNNRVSVEAGNIFD | 270 |
| | YKS+L+V ID+ N + V+ GNIF+ | |
| Sbjct: 241 | IDDYKSILKVDRIDIANRSIDVQLGNIFN | 269 |

[10072] A related DNA sequence was identified in S. pyogenes <SEQ ID 5687> which encodes the amino acid sequence <SEQ ID 5688>. Analysis of this protein sequence reveals the following:

| Possible site: 41 | | | | | |
|---|---|---|---|---|---|
| >>> Seems to have an uncleavable N-term signal seq | | | | | |
| | INTEGRAL | Likelihood = −1.97 | Transmembrane | 142-158 | (142-160) |

```
----- Final Results -----
                              bacterial membrane --- Certainty = 0.1786(Affirmative) < succ>
                                bacterial outside --- Certainty = 0.0000(Not Clear) < succ>
                            bacterial cytoplasm --- Certainty = 0.0000(Not Clear) < succ>
```

[10073] The protein has homology with the following sequences in the databases:

| >GP:CAA10902 GB:AJ222642 purR [Lactococcus lactis] | | |
|---|---|---|
| Identities = 142/269 (52%), Positives = 196/269 (72%), Gaps = 1/269 (0%) | | |
| Query: 3 | LRRSERMVVISNYLINNPYKLTSLNTFATKYEAAKSSISEDIAIIKKAFEEANIGDIDTL | 62 |
| | ++R+ER+V +N+LIN+P ++ +LN + YE AKSSISED+ IK+ FE +G ++T | |
| Sbjct: 1 | MKRNERLVDFTNFLINHPNQMLNLNELSKHYEVAKSSISEDLVFIKRVFENQGVGLVETF | 60 |
| Query: 63 | TGASGGVIFTPSISETEARTIVEDLCQRLSESDRILPGGYIYLSDLLSTPKILQNIGRII | 122 |
| | G+ GGV FTP I++ + + +++ + L E +RILPGGYIYLSD+L TP L+ IG+II | |
| Sbjct: 61 | PGSLGGVRFTPYITDERSLEMSQEIAELLREENRILPGGYIYLSDILGTPSNLRKIGQII | 120 |
| Query: 123 | ANAFKGEKIDAVMTVATKGVPLANAVANILSVPFVIVRRDLKITEGSTVSVNYASASSDR | 182 |
| | A+ + +++D VMT+ATRG+P+A +VA IL VPFVIVRRD K+TEG+T++VNY S SS R | |
| Sbjct: 121 | AHEYHEKQVDVVMTIATKGIPIAQSVAEILDVPFVIVRRDPKVTEGATLNVNYMSGSSSR | 180 |
| Query: 183 | IEKMFLSKRSLKPNSRVLIVDDFLKGGGTITGMISLLTEFDSTLVGVAVFAENA-QSERE | 241 |
| | +E M LSKRSL VLIVDDF+KG GTI GM SL+ EFD L GVAVF E + ER | |
| Sbjct: 181 | VENMTLSKRSLSIGQNVLIVDDFMKGAGTINGMRSLVHEFDCLLAGVAVFLEGPFKGERL | 240 |
| Query: 242 | QMTFKSLLKVSEIDVKNNNVVVEVGNIFD | 270 |
| | +KS+LKV ID+ N ++ V++GNIF+ | |
| Sbjct: 241 | IDDYKSILKVDRIDIANRSIDVQLGNIFN | 269 |

[10074] An alignment of the GAS and GBS proteins is shown below.

| Identities = 234/270 (86%) , Positives = 255/270 (93%) | | |
|---|---|---|
| Query: 1 | MKLRRSERMVVISNYLINNPYTLTSLNTFASKYGAAKSSISEDIAIIKKAFEQAQIGDIK | 60 |
| | MKLRRSERMVVISNYLINNPY LTSLNTFA+KY AAKSSISEDIAIIKKAFE+A IGDI | |
| Sbjct: 1 | MKLRRSERMVVISNYLINNPYKLTSLNTFATKYEAAKSSISEDIAIIKKAFEEANIGDID | 60 |
| Query: 61 | TVTGASGGVIFTPTIAEAEAKEIVEELRQRLSENDRILPGGYIYLSDLLSTPKMLQSIGR | 120 |
| | T+TGASGGVIFTP+I+E EA+ IVE+L QRLSE+DRILPGGYIYLSDLLSTPK+LQ+IGR | |
| Sbjct: 61 | TLTGASGGVIFTPSISETEARTIVEDLCQRLSESDRILPGGYIYLSDLLSTPKILQNIGR | 120 |
| Query: 121 | IIANAYRGQKIDAVMTVATKGVPLANAVANVLDVPFVIVRRDLKITEGSTVSVNYASGSS | 180 |
| | IIANA++G+KIDAVMTVATKGVPLANAVAN+L VPFVIVRRDLKITEGSTVSVNYAS SS | |
| Sbjct: 121 | IIANAFKGEKIDAVMTVATKGVPLANAVANILSVPFVIVRRDLKITEGSTVSVNYASASS | 180 |
| Query: 181 | GRIEKMFLSKRSLKPNSRVLIVDDFLKGGGTVSGMISLLSEFDSTLVGVAVFAENAQEQR | 240 |
| | RIEKMFLSKRSLKPNSRVLIVDDFLKGGGT++GMISLL+EFDSTLVGVAVFAENAQ +R | |
| Sbjct: 181 | DRIEKMFLSKRSLKPNSRVLIVDDFLKGGGTITGMISLLTEFDSTLVGVAVFAENAQSER | 240 |
| Query: 241 | EKMAYKSLLRVSEIDVKNNRVSVEAGNIFD | 270 |
| | E+M +KSLL+VSEIDVKNN V VE GNIFD | |
| Sbjct: 241 | EQMTFKSLLKVSEIDVKNNNVVVEVGNIFD | 270 |

[10075] Based on this analysis, it was predicted that these proteins and their epitopes could be useful antigens for vaccines or diagnostics.

### EXAMPLE 1833

[10076] A DNA sequence (GBSx1940) was identified in S. agalactiae <SEQ ID 5689> which encodes the amino acid sequence <SEQ ID 5690>. This protein is predicted to be cmp-binding-factor 1. Analysis of this protein sequence reveals the following:

```
Possible site: 53
>>> Seems to have no N-terminal signal sequence
----- Final Results -----
                            bacterial cytoplasm --- Certainty = 0.1753(Affirmative) < succ>
                              bacterial membrane --- Certainty = 0.0000(Not Clear) < succ>
                                bacterial outside --- Certainty = 0.0000(Not Clear) < succ>
```

[10077] The protein has homology with the following sequences in the GENPEPT database.

| >GP:AAC44803 GB:U21636 cmp-binding-factor 1 [Staphylococcus aureus] | | |
|---|---|---|
| Identities = 140/310 (45%), Positives = 195/310 (62%), Gaps = 6/310 (1%) | | |
| Query: 3 | INQMKKDELFEGFYLIKKASVRKTRAGKDFIAFTFQDDTGEISGNMWDAQTYNVEEFVAG | 62 |
| | I + + + F+L+ KA T GKD++ QD +GEI W A ++ | |
| Sbjct: 4 | IENLNPGDSVDHFFLVHKATQGVTAQGKDYMTLHLQDKSGEISAKFWTATKNDMATIKPE | 63 |
| Query: 63 | KIVHMKGRREVYNGTPQ--VNQITLRNIKDGEPNDPRDFKEKPPINVDNVREYMEQMLFK | 120 |
| | +IVH+KG Y G Q VNQI L +D + F + P++ ++E + L | |
| Sbjct: 64 | EIVHVKGDIINYRGNKQMKVNQIRLATTEDQLKTE--QFVDGAPLSPAEIQEEISHYLLD | 121 |
| Query: 121 | IENATWQRVVRALYRKYNKEFFTYPAAKTNHHAFESGLAYHTATMVRLADSIGDIYPELN | 180 |
| | IENA QR+ R L +KY + F+TYPAA ++HH F SGL+YH TM+R+A SI DIYP LN | |
| Sbjct: 122 | IENANLQRITRHLLKKYQERFYTYPAASSHHHNFASGLSYHVLTMLRIAKSICDIYPLLN | 181 |
| Query: 181 | KSLMFAGIMLHDLAKVIELSGPDNTEYTIRGNLIGHISLIDEELTKILAELNIDDTKEEV | 240 |
| | KSL+++GI+LHD+ KV ELSGP T YT+ GNL+GHIS+ +E+ + ELNI+ EE+ | |
| Sbjct: 182 | KSLLYSGIILHDIGKVRELSGPVATSYTVEGNLLGHISIASDEVVEAARELNIEG--EEI | 239 |
| Query: 241 | TVLRHVILSHHGQLEYGSPVRPRIMEAEIIHMIDNIDANMMMMTTALNRVNEGEMTNRIF | 300 |
| | +LRH+ILSHHG+LEYGSP P + EAEI+ IDNIDA M M A + ++G+ T++IF | |
| Sbjct: 240 | MLLRHHILSHHGKLEYGSPKLPYLKEAEILCYIDNIDARMNMFEKAYKKTDKGQFTDKIF | 299 |
| Query: 301 | AMDNRSFYKP | 310 |
| | ++NR FY P | |
| Sbjct: 300 | GLENRRFYNP | 309 |

[10078] A related DNA sequence was identified in S. pyogenes <SEQ ID 5691> which encodes the amino acid sequence <SEQ ID 5692>. Analysis of this protein sequence reveals the following:

```
Possible site: 38
>>> Seems to have no N-terminal signal sequence
----- Final Results -----
                            bacterial cytoplasm --- Certainty = 0.1822(Affirmative) < succ>
                              bacterial membrane --- Certainty = 0.0000(Not Clear) < succ>
                                bacterial outside --- Certainty = 0.0000(Not Clear) < succ>
```

[10079] An alignment of the GAS and GBS proteins is shown below.

| Identities = 275/311 (88%), Positives = 300/311 (96%) | | |
|---|---|---|
| Query: 1 | MKINQMKKDELFEGFYLIKKAEVRKTRAGKDFIAFTFQDDTGEISGNMWDAQTYNVEEFV | 60 |
| | MKINQMKKD+LFEGFYLIK AEVRKTRAGKDFI+ TFQDDTGEISGN+WDAQ YNVEEF | |
| Sbjct: 1 | MKINQMKKDQLFEGFYLIKSAEVRKTRAGKDFISLTFQDDTGEISGNLWDAQPYNVEEFT | 60 |
| Query: 61 | AGKIVNMKGRREVYNGTPQVNQITLRNIKDGEPNDPRDFKEKPPINVDNVREYMEQMLFK | 120 |
| | AGK+V MKGRREVYNGTPQVNQITLRN++ GEPNDP+DFKEK P++V VR+Y+EQMLFK | |
| Sbjct: 61 | AGKVVFMKGRREVYNGTPQVNQITLRNVRPGEPNDPKDFKEKAPVSVTEVRDYLEQMLFK | 120 |
| Query: 121 | IENATWQRVVRALYRKYNKEFFTYPAAKTNHHAFESGLAYHTATMVRLADSIGDIYPELN | 180 |
| | IENATWQR+VRALYRKY+KEF+TYPAAKTNHHAFESGLAYHTATMVRLADSIGDIYP+LN | |
| Sbjct: 121 | IENATWQRIVRALYRKYDKEFYTYPAAKTNHHAFESGLAYHTATMVRLADSIGDIYPDLN | 180 |
| Query: 181 | KSLMFAGIMLHDLAKVIELSGPDNTEYTIRGNLIGHISLIDEELTKILASLNIDDTKEEV | 240 |
| | KSL+FAGIMLHDLAKVIEL+GPDNTEYT+RGNLIGHISLI+EE+TK+++EL IDDTKEEV | |
| Sbjct: 181 | KSLLFAGIMLHDLAKVIELTGPDNTEYTVRGNLIGHISLINEEITKVISELQIDDTKESV | 240 |
| Query: 241 | TVLRHVILSHHGQLEYGSPVRPRIMEAEIIHMIDNIDANMMMMTTALNRVNEGEMTNRIF | 300 |
| | VLRHVILSHHGQLEYGSPVRPRIMEAEIIHMIDNIDANMMMMTTAL+RV+EGEMTNRIF | |
| Sbjct: 241 | IVLRHVILSHHGQLEYGSPVRPRIMEAEIIHMIDNIDANMMMMTTALSRVSEGEMTNRIF | 300 |
| Query: 301 | AMDNRSFYKPN | 311 |
| | AMDNRSFYKPN | |
| Sbjct: 301 | AMDNRSFYKPN | 311 |

[10080] Based on this analysis, it was predicted that these proteins and their epitopes could be useful antigens for vaccines or diagnostics.

### EXAMPLE 1834

[10081] A DNA sequence (GBSx1941) was identified in S. agalactiae <SEQ ID 5693> which encodes the amino acid sequence <SEQ ID 5694>. Analysis of this protein sequence reveals the following:

| Possible site: 21 | | | | | |
|---|---|---|---|---|---|
| >>> Seems to have an uncleavable N-term signal seq | | | | | |
| | INTEGRAL | Likelihood = −14.59 | Transmembrane | 2-18 | (1-22) |

```
----- Final Results -----
                              bacterial membrane --- Certainty = 0.6838(Affirmative) < succ>
                                bacterial outside --- Certainty = 0.0000(Not Clear) < succ>
                            bacterial cytoplasm --- Certainty = 0.0000(Not Clear) < succ>
```

[10082] A related DNA sequence was identified in S. pyogenes <SEQ ID 5695> which encodes the amino acid sequence <SEQ ID 5696>. Analysis of this protein sequence reveals the following:

| Possible site: 17 | | | | | |
|---|---|---|---|---|---|
| >>> Seems to have an uncleavable N-term signal seq | | | | | |
| | INTEGRAL | Likelihood = −12.05 | Transmembrane | 3-19 | (1-26) |

```
----- Final Results -----
                              bacterial membrane --- Certainty = 0.5819(Affirmative) < succ>
                                bacterial outside --- Certainty = 0.0000(Not Clear) < succ>
                            bacterial cytoplasm --- Certainty = 0.0000(Not Clear) < succ>
```

[10083] An alignment of the GAS and GBS proteins is shown below.

| Identities = 309/424 (72%), Positives = 370/424 (86%), Gaps = 3/424 (0%) | | |
|---|---|---|
| Query: 1 | MLVIILIIVLASLTVTIISYQKMTELTKSVEKQLEDNADNLSDQLTYQIEVAQKDQILTL | 60 |
| | +++ +L++VL L ++ K+ L + + LE NADNLSDQ+TYQ++ A K Q+L L | |
| Sbjct: 3 | LILFLLVLVLLGLGAYLLF--KVNGLQHQLAQTLEGNADNLSDQMTYQLDTANKQQLLEL | 60 |
| Query: 61 | TNQLNRMQQEIYQLLTDMRTELNQHLTESRDRSDKRLELINSNLSQSVQKMQDSNEKRLD | 120 |
| | T +NR Q +YQ LTD+R L++ L++SRDRSDKRLE IN ++QS++ MQ+SNEKRL+ | |
| Sbjct: 61 | TQLMNRQQAGLYQQLTDIRDVLHRSLSDSRDRSDKRLSKINQQVNQSLKNMQESNEKRLE | 120 |
| Query: 121 | QMRQTVEEKLEKTLQTRLQTSFETVSRQLESVNQGLGEMKTVAQDVGTLNKVLSNTKTRG | 180 |
| | +MRQ VEEKLE+TL+ RL SF++VS+QLESVN+GLGEM++VAQDVGTLNKVLSNTKTRG | |
| Sbjct: 121 | KMRQIVEEKLEETLKNRLHASFDSVSKQLESVNKGLGEMRSVAQDVGTLNKVLSNTKTRG | 180 |
| Query: 181 | ILGELQLGQIIEDIMTVSQYEREFPTVSGSSERVEYAIKLPGNGQGDYIYLPIDSKFPLE | 240 |
| | ILGELQLGQIIEDIMT SQYEREF TVSGSSERVEYAIKLPGNGQG YIYLPIDSKFPLE | |
| Sbjct: 181 | ILGELQLGQIIEDIMTSSQYEREFVTVSGSSERVEYAIKLPGNGQGGYIYLPIDSKFPLE | 240 |
| Query: 241 | DYYRLEDAYELGDKVQIELYRKSLLASIRKFAKDINNKYLNPPETTNFGIMFLPTEGLYS | 300 |
| | DYYRLEDAYE+GDK+ IE RK+LLA+I++FAKDI+ KYLNPPETTNFG+MFLPTEGLYS | |
| Sbjct: 241 | DYYRLEDAYEVGDKLAIEASRKALLAAIKRFAKDIHKKYLNPPETTNFGVMFLPTEGLYS | 300 |
| Query: 301 | EVVRNATFFDSLRRDENIVVAGPSTLSALLNSLSVGFKTLNIQKNANDISKILGNVKVEF | 360 |
| | EVVRNA+FFDSLRR+ENIVVAGPSTLSALLNSLSVGFKTLNIQKNA+DISKILGNVK+EF | |
| Sbjct: 301 | EVVRNASFFDSLRREENIVVAGPSTLSALLNSLSVGFKTLNIQKNADDISKILGNVKLEF | 360 |
| Query: 361 | GKFGGMLSKAQKQLNTASKSIDSLLTTRTNAIIRVLNTVEEHQDQATTSLLNLPITEEEE | 420 |
| | KFGG+L+KAQKQ+NTA+ ++D L++TRTNAI+R LNTVE +QDQAT SLLN+P+ EEE | |
| Sbjct: 361 | DKFGGLLAKAQKQMNTANNTLDQLISTRTNAIVRALNTVETYQDQATKSLLNMPLLEEEN | 420 |
| Query: 421 | INEN | 424 |
| | NEN | |
| Sbjct: 421 | -NEN | 423 |

[10084] SEQ ID 5694 (GBS88) was expressed in E. coli as a His-fusion product. SDS-PAGE analysis of total cell extract is shown in FIG. 18 (lane 2; MW 48 kDa).

[10085] Based on this analysis, it was predicted that these proteins and their epitopes could be useful antigens for vaccines or diagnostics.

### EXAMPLE 1835

[10086] A DNA sequence (GBSx1942) was identified in S. agalactiae <SEQ ID 5697> which encodes the amino acid sequence <SEQ ID 5698>. Analysis of this protein sequence reveals the following:

```
Possible site: 44
>>> Seems to have no N-terminal signal sequence
----- Final Results -----
                            bacterial cytoplasm --- Certainty = 0.2722(Affirmative) < succ>
                              bacterial membrane --- Certainty = 0.0000(Not Clear) < succ>
                                bacterial outside --- Certainty = 0.0000(Not Clear) < succ>
```

[10087] The protein has homology with the following sequences in the GENPEPT database.

| >GP:CAB13453 GB:Z99112 ylos [Bacillus subtilis] | | |
|---|---|---|
| Identities = 75/217 (34%), Positives = 109/217 (49%), Gaps = 12/217 (5%) | | |
| Query: 1 | MTKIALFAGG------DLTYFEYDFDYFVGIDRGSLFLLKNGLSLDMAVGDFDSITEDEL | 54 |
| | M I + AGG DLT + + ++G+D+G++ LL G+ A GDFDSITE E | |
| Sbjct: 1 | MKTINIVAGGPKNLIPDLTGYTDEHTLWIGVDKGTVTLLDAGIIPVEAFGDFDSITEQER | 60 |
| Query: 55 | LYIKHYCSNIVSASAEKNDTDTELALKTIFKEFPEAQVTVFGAFGGRIDHMMSNIFLPSD | 114 |
| | I+ + AEK+ TD +LAL ++ P+ + +FG GGR DH + NI L | |
| Sbjct: 61 | RRIEKAAPALHVYQAEKDQTDLDLALDWALEKQPDI-IQIFGITGGRADHFLGNIQLLYK | 119 |
| Query: 115 | RDLEPFMSQIRLKDEQNIVTYLPSGKNQVSRIEGMSYVSFMPESES--TLQISGAKYELN | 172 |
| | +IRL D+QN + P G+ + + E Y+SF+P SE L ++G KY LN | |
| Sbjct: 120 | GVKTNI--KIRLIDKQNHIQMFPPGEYDIEKDENKRYISFIPFSEDIHELTLTGFKYPLN | 177 |
| Query: 173 | KSNY-FKKKMYSSNEFMTSPIEVELKDGYLIIIYSKD | 208 |
| | + + SNE + S G LI+I S D | |
| Sbjct: 178 | NCHITLGSTLCISNELIHSRGTFSFAKGILIHIRSTD | 214 |

[10088] A related DNA sequence was identified in S. pyogenes <SEQ ID 5699> which encodes the amino acid sequence <SEQ ID 5700>. Analysis of this protein sequence reveals the following:

```
Possible site: 55
>>> Seems to have no N-terminal signal sequence
----- Final Results -----
                            bacterial cytoplasm --- Certainty = 0.2467(Affirmative) < succ>
                              bacterial membrane --- Certainty = 0.0000(Not Clear) < succ>
                                bacterial outside --- Certainty = 0.0000(Not Clear) < succ>
```

[10089] An alignment of the GAS and GBS proteins is shown below.

| Identities = 130/208 (62%), Positives = 166/208 (79%) | | | |
|---|---|---|---|
| Query: | 1 | MTKIALFAGGDLTYFEYDFDYFVGIDRGSLFLLKNGLSLDMAVGDFDSITEDELLYIKHY | 60 |
| | | M+K+ALFAGGDL+Y DFDYFVGIDRGSLFLL+NGL L+MAVGDFDS+++ IK | |
| Sbjct: | 1 | MSKVALFAGGDLSYISRDFDYFVGIDRGSLFLLENGLPLNMAVGDFDSVSQKAFTDIKEK | 60 |
| Query: | 61 | CSNIVSASAEKNDTDTELALKTIFKEFPEAQVTVFGAFGGRIDHMMSNIFLPSDRDLEPF | 120 |
| | | ++A EKNDTDTELALK +F FPEA+VT+FGAFGGR+DH++SNIFLPSD + PF | |
| Sbjct: | 61 | AELFITAHPEKNDTDTELALKEVFARFPEAEVTIFGAFGGRMDHLLSNIFLPSDPGIAPF | 120 |
| Query: | 121 | MSQIRLKDEQNIVTYLPSGKNQVSRIEGMSYVSFMPESESTLQISGAKYELNKSNYFKKK | 180 |
| | | M+QI L+D+QN++TY P+G++ + + EGM+YV+FM E E+ L I+GAK+EL + N+FKKK | |
| Sbjct: | 121 | MAQIALRDQQNMITYRPAGQHLIHQEEGMTYVAFMAEGEADLTITGAKFELTQDNFFKKK | 180 |
| Query: | 181 | MYSSNEFMTSPIEVELKDGYLIIIYSKD | 208 |
| | | +YSSN F+ PI V L GYLIII SKD | |
| Sbjct: | 181 | IYSSNAFIHQPITVSLPSGYLIIIQSKD | 208 |

[10090] Based on this analysis, it was predicted that these proteins and their epitopes could be useful antigens for vaccines or diagnostics.

### EXAMPLE 1836

[10091] A DNA sequence (GBSx1943) was identified in S. agalactiae <SEQ ID 5701> which encodes the amino acid sequence <SEQ ID 5702>. This protein is predicted to be ribulose-phosphate 3-epimerase (rpe). Analysis of this protein sequence reveals the following:

| Possible site: 18 | | | | | |
|---|---|---|---|---|---|
| >>> Seems to have no N-terminal signal sequence | | | | | |
| | INTEGRAL | Likelihood = −1.59 | Transmembrane | 124-140 | (124-141) |

```
----- Final Results -----
                              bacterial membrane --- Certainty = 0.1638(Atfirmative) < succ>
                                bacterial outside --- Certainty = 0.0000(Not Clear) < succ>
                            bacterial cytoplasm --- Certainty = 0.0000(Not Clear) < succ>
```

[10092] The protein has homology with the following sequences in the GENPEPT database.

| >GP:BAB0E221 GB:AP001515 unknown conserved protein [Bacillus halodurans] | | |
|---|---|---|
| Identities = 113/211 (53%), Positives = 153/211 (71%) | | |
| Query: 5 | KIAPSILAADYANFANELKRIEETTAEYVHIDIMDGQFVPNISFGADVVSSMRKHSKLVF | 64 |
| | KIAPSIL+AD+AN NE++ +E A+Y+H+D+MDG FVPNI+ G +V ++R + L | |
| Sbjct: 3 | KIAPSILSADFANLGNEIQDVERGGADYIHVDVMDGHFVPNITIGPLIVDAIRPVTTLPL | 62 |
| Query: 65 | DCHLMVVDPERYIEAFAQAGADIMTIHVEATKHIHGALQKIKEAGHKAGVVINPGTPVES | 124 |
| | D HLM+ P+ YI AFA+AGADI+T+HVEA H+H L IKE+G+KAGVV+NP TPV S | |
| Sbjct: 63 | DVHLMIEQPDGYIPAFAKAGADIITVHVEACPHLHRTLHLIKESGVKAGVVLNPATPVSS | 122 |
| Query: 125 | LIPILDLVDQILIMTVNPGFGGQAFIPEMMSKVKTVAAWRKEYGHHYDIEVDGGIDNTTI | 184 |
| | + +L VD +L MTVNPGFGGQ FIP ++ K+K +A+ +KE G ++IEVDGG++ T | |
| Sbjct: 123 | IQHVLSDVDMVLFMTVNPGFGGQRFIPSVLPKLKELASLKKEQGLTFEIEVDGGVNEETA | 182 |
| Query: 185 | KAAAEAGANVFVAGSYLFKASDLPAQVETLR | 215 |
| | K EAGANV VAGS +F D A ++ +R | |
| Sbjct: 183 | KQCVEAGANVLVAGSAVFNEEDRAAAIKGIR | 213 |

[10093] A related DNA sequence was identified in S. pyogenes <SEQ ID 5703> which encodes the amino acid sequence <SEQ ID 5704>. Analysis of this protein sequence reveals the following:

```
Possible site: 49
>>> Seems to have no N-terminal signal sequence
----- Final Results -----
                            bacterial cytoplasm --- Certainty = 0.0072(Affirmative) < succ>
                              bacterial membrane --- Certainty = 0.0000(Not Clear) < succ>
                                bacterial outside --- Certainty = 0.0000(Not Clear) < succ>
```

[10094] An alignment of the GAS and GBS proteins is shown below.

| Identities = 183/219 (83%), Positives = 198/219 (89%) | | |
|---|---|---|
| Query: 1 | MSTNKIAPSILAADYANFANELKRIEETTAEYVHIDIMDGQFVPNISFGADVVSSMRKHS | 60 |
| | MST KIAPSILAADYANFA+EL RIEET AEYVHIDIMDGQFVPNISFGADVV+SMRKHS | |
| Sbjct: 1 | MSTLKIAPSILAADYANFASELARIEETDAEYVHIDIMDGQFVPNISFGADVVASMRKHS | 60 |
| Query: 61 | KLVFDCHLMVVDPERYIEAFAQAGADIMTIHVEATKHIHGALQKIKEAGMKAGVVINPGT | 120 |
| | KLVFDCHLMVVDPERY+EAFAQAGADIMTIH E+T+HIHGALQKIK AGMKAGVVINPGT | |
| Sbjct: 61 | KLVFDCHLMVVDPERYVEAFAQAGADIMTIHTESTRHIHGALQKIKAAGMKAGVVINPGT | 120 |
| Query: 121 | PVESLIPILDLVDQILIMTVNPGFGGQAFIPEMMSKVKTVAAWRKEYGHHYDIEVDGGID | 180 |
| | P +L P+LDLVDQ+LIMTVNPGFGGQAFIPE + KV TVA WR E G +DIEVDGG+D | |
| Sbjct: 121 | PATALEPLLDLVDQVLIMTVNPGFGGQAFIPECLEKVATVAKWRDEKGLSFDIEVDGGVD | 180 |
| Query: 181 | NTTIKAAAEAGANVFVAGSYLFKASDLPAQVETLRVALD | 219 |
| | N TI+A EAGANVFVAGSYLFKASDL +QV+TLR AL+ | |
| Sbjct: 181 | NKTIRACYEAGANVFVAGSYLFKASDLVSQVQTLRTALN | 219 |

[10095] Based on this analysis, it was predicted that these proteins and their epitopes could be useful antigens for vaccines or diagnostics.

### EXAMPLE 1837

[10096] A DNA sequence (GBSx1944) was identified in S. agalactiae <SEQ ID 5705> which encodes the amino acid sequence <SEQ ID 5706>. Analysis of this protein sequence reveals the following:

```
Possible site: 17
>>> Seems to have no N-terminal signal sequence
----- Final Results -----
                            bacterial Cytoplasm --- Certainty = 0.2098(Affirmative) < succ>
                              bacterial membrane --- Certainty = 0.0000(Not Clear) < succ>
                                bacterial outside --- Certainty = 0.0000(Not Clear) < succ>
```

[10097] The protein has homology with the following sequences in the GENPEPT database.

| >GP: CAB13451 GB: Z99112 similar to hypothetical proteins | | | |
|---|---|---|---|
| [Bacillus subtilis] | | | |
| Identities = 148/296 (50%), Positives = 202/296 (68%), | | | |
| Gaps = 14/296 (4%) | | | |
| Query: | 2 | QGRIVKSLAGFYYV----ESDGVVYQTRARGNFRKKGQIPYVGDWVEFSSQDQSEGYILS | 57 |
| | | +G+I+K+L+GFYYV E V Q R RG FRK P VGD+V + +++ EGY++ | |
| Sbjct: | 3 | EGKIIKALSGFYYVLDESEDSDKVIQCRGRGIFRKNKITPLVGDYVVYQAENDKEGYLME | 62 |
| Query: | 58 | IEERKNSLVRPPIVNIDQAVVIMSAKEPDFNANLLDRFLVLLEYKMIQPIIYISKLDLLD | 117 |
| | | I+ER N L+RPPI N+DQAV++ SA +P F+ LLDRFLVL+E IQPII I+K+DL++ | |
| Sbjct: | 63 | IKERTNELIRPPICNVDQAVLVFSAVQPSFSTALLDRFLVLVEANDIQPIICITKMDLIE | 122 |
| Query: | 118 | DLVVIDDIR---EHYQNIGY-VFCYSQEE------LLPLLANKVTVFMGQTGVGKSTLLN | 167 |
| | | D D I+ E Y+NIGY V+ S ++ ++P +K TVF GQ+GVGKS+LLN | |
| Sbjct: | 123 | DQDTEDTIQAYAEDYRNIGYDVYLTSSKDQDSLADIIPHFQDKTTVFAGQSGVGKSSLLN | 182 |
| Query: | 168 | KIAPELKLETGEISGSLGRGRHTTRAVSFYNVHKGKIADTPGFSSLDYEVDNAEDLNESF | 227 |
| | | +PEL L T EIS LGRG+HTTR V + G +ADTPGFSSL++ E+L +F | |
| Sbjct: | 183 | AISPELGLRTNEISEHLGRGKHTTRHVELIHTSGGLVADTPGFSSLEFTDIEEEELGYTF | 242 |
| Query: | 228 | PELRRLSHFCKFRSCTHTHEPKCAVKEALTQGQLWQVRYDNYLQFLSEIESRRETY | 283 |
| | | P++R S CKFR C H EPKCAVK+A+ G+L Q RYD+Y++F++EI+ R+ Y | |
| Sbjct: | 243 | PDIREKSSSCKFRGCLHLKEPKCAVKQAVEDGELKQYRYDHYVEFMTEIKDRKPRY | 298 |

[10098] A related DNA sequence was identified in S. pyogenes <SEQ ID 5707> which encodes the amino acid sequence <SEQ ID 5708>. Analysis of this protein sequence reveals the following:

```
Possible site: 17
>>> Seems to have no N-terminal signal sequence
----- Final Results -----
                            bacterial cytoplasm --- Certainty = 0.2290(Affirmative) < succ>
                              bacterial membrane --- Certainty = 0.0000(Not Clear) < succ>
                                bacterial outside --- Certainty = 0.0000(Not Clear) < succ>
```

[10099] An alignment of the GAS and GBS proteins is shown below.

| Identities = 230/290 (79%), Positives = 257/290 (88%) | | | |
|---|---|---|---|
| Query: | 1 | MQGRIVKSLAGFYYVESDGVVYQTRARGNFRKKGQIPYVGDWVEFSSQDQSEGYILSIEE | 60 |
| | | +QG+I+KSLAGFYYVES+G VYQTRARGNFRK+G+ PYVGD V+FS++D SEGYIL+I | |
| Sbjct: | 1 | LQGKIIKSLAGFYYVESEGQVYQTRARGNFRKRGETPYVGDIVDFSAEDNSEGYILAIHP | 60 |
| Query: | 61 | RKNSLVRPPIVNIDQAVVIMSAKEPDFNANLLDRFLVLLEYKMIQPIIYISKLDLLDDLV | 120 |
| | | RKNSLVRPPIVNIDQAVVIMSAKEP+FN+NLLDRFL+LLE+K I P++YISK+DLLD | |
| Sbjct: | 61 | RKNSLVRPPIVNIDQAVVIMSAKEPEFNSNLLDRFLILLEHKAIHPVVYISKMDLLDSPE | 120 |
| Query: | 121 | VIDDIREHYQNIGYVFCYSQEELLPLLANKVTVFMGQTGVGKSTLLNKIAPELKLETGEI | 180 |
| | | I I YQ IGY F S EELLPLLA+K+TVFMGQTGVGKSTLLN+IAPEL LE GEI | |
| Sbjct: | 121 | EIKAIGRQYQAIGYDFVTSLEELLPLLADKITVFMGQTGVGKSTLLNRIAPELALEIGEI | 180 |
| Query: | 181 | SGSLGRGRHTTRAVSFYNVHKGKIADTPGFSSLDYEVDNAEDLNESFPELRRLSHFCKFR | 240 |
| | | S SLGRGRHTTRAVSFYN H GKIADTPGFSSLDY++ NAEDLNE+FPELRRLSH CKFR | |
| Sbjct: | 181 | SDSLGRGRHTTRAVSFYNTHGGKIADTPGFSSLDYDIANAEDLNEAFPELRRLSHECKFR | 240 |
| Query: | 241 | SCTHTHEPKCAVKEALTQGQLWQVRYDNYLQFLSEIESRRETYKKVIKRK | 290 |
| | | SCTHTHEPKCAVK AL G+LW VRY++YLQFLSEIE+RRETYKKVIKRK | |
| Sbjct: | 241 | SCTHTHEPKCAVKAALETGELWPVRYEHYLQFLSEIENRRETYKKVIKRK | 290 |

[10100] Based on this analysis, it was predicted that these proteins and their epitopes could be useful antigens for vaccines or diagnostics.

### EXAMPLE 1838

[10101] A DNA sequence (GBSx1945) was identified in S. agalactiae <SEQ ID 5709> which encodes the amino acid sequence <SEQ ID 5710>. This protein is predicted to be rRNA. Analysis of this protein sequence reveals the following:

| Possible site: 17 | | | | |
|---|---|---|---|---|
| >>> Seems to have no N-terminal signal sequence | | | | |
| | INTEGRAL | Likelihood = −0.43 | Transmembrane | 259-275 (259-275) |

```
----- Final Results -----
                              bacterial membrane --- Certainty = 0.1171(Affirmative) < succ>
                                bacterial outside --- Certainty = 0.0000(Not Clear) < succ>
                            bacterial cytoplasm --- Certainty = 0.0000(Not Clear) < succ>
```

[10102] The protein has homology with the following sequences in the GENPEPT database.

| >GP: CAB15937 GB: Z99124 similar to hypothetical proteins | | | |
|---|---|---|---|
| [Bacillus subtilis] | | | |
| Identities = 95/278 (34%), Positives = 147/278 (52%), | | | |
| Gaps = 16/278 (5%) | | | |
| Query: | 14 | SYFACPKCQNPLIKESN-SLKCSDN-HCFDLSKFGYVNLLGGKKVDEHYDKKSFENR-QL | 70 |
| | | S F CP C + + S SL C++ H FDLS+ GYVN L K V Y + FE R +L | |
| Sbjct: | 8 | SMFRCPLCDSSMDAASGKSLICTERGHTFDLSRHGYVNFLT-KPVKTSYGAELFEARSRL | 66 |
| Query: | 71 | VLENGYYNHILEAISKVLENNSQFH---SVLDIGCGEGFYSRQLVNKHEKTFLAF----D | 123 |
| | | + E G+++ + +AI++++ + H ++LD GCGEG + L A D | |
| Sbjct: | 67 | IGECGFFDPLHDAIAELISHPKSGHEAFTILDSGCGEGSHLNALCGFDYAGKAAIGTGID | 126 |
| Query: | 124 | ISKDSIQLAAKSDQSRLVKWFVSDLANLPIQDSSIDIILDIFSPANYKEFRRVLSDDGIL | 183 |
| | | +SKD I A+K+ + + W V+D+A P D D++L IFSP+NY EF R+L +DG+L | |
| Sbjct: | 127 | LSKDGILKASKAFKDLM--WAVADVARAPFHDRQFDVVLSIFSPSNYAEFHRLLKNDGML | 184 |
| Query: | 184 | VKVVPVAEHVQELREKASQYLKQKDYSNQKILDHFRENFEIISEQKVVQSYNCSQQERQA | 243 |
| | | +KVVP ++++ ELR+ ++ YSN ++ F N ++ QQ | |
| Sbjct: | 185 | IKVVPRSDYLIELRQFLYTDSPRRTYSNTAAVERFTANAAHSRPVRLRYVKTLDQQAIHW | 244 |
| Query: | 244 | FIDMTPLLFSVDKTTIDW---ASISEITVGALIVIGKK | 278 |
| | | + MTPL +S K + ++ITV I+IG K | |
| Sbjct: | 245 | LLKMTPLAWSAPKDRVSLLKEMKSADITVDVDILIGMK | 282 |

[10103] No corresponding DNA sequence was identified in S. pyogenes.

[10104] Based on this analysis, it was predicted that this protein and its epitopes, could be useful antigens for vaccines or diagnostics.

### EXAMPLE 1839

[10105] A DNA sequence (GBSx1946) was identified in S. agalactiae <SEQ ID 5711> which encodes the amino acid sequence <SEQ ID 5712>. This protein is predicted to be dimethyladenosine transferase (ksgA). Analysis of this protein sequence reveals the following:

```
Possible site: 61
>>> Seems to have no N-terminal signal sequence
----- Final Results -----
                            bacterial cytoplasm --- Certainty = 0.3257(Affirmative) < succ>
                              bacterial membrane --- Certainty = 0.0000(Not Clear) < succ>
                                bacterial outside --- Certainty = 0.0000(Not Clear) < succ>
```

[10106] The protein has homology with the following sequences in the GENPEPT database.

| >GP: CAB11818 GB: Z99104 dimethyladenosine transferase | | | |
|---|---|---|---|
| [Bacillus subtilis] | | | |
| Identities = 157/284 (55%), Positives = 215/284 (75%), | | | |
| Gaps = 2/284 (0%) | | | |
| Query: | 3 | IADKTVTRAILERHGFTFKKSFGQNFLTDTNILQKIVDTAEIDKGVNVIEIGPGIGALTE | 62 |
| | | IA T+ IL+++GF+FKKS GQNFL DTNIL +IVD AE+ + VIEIGPGIGALTE | |
| Sbjct: | 5 | IATPIRTKEILKKYGFSFKKSLGQNFLIDTNILNRIVDHAEVTEKTGVIEIGPGIGALTE | 64 |
| Query: | 63 | FLAENAAEVMAFEIDDRLIPILADTLARFDNVQVVNQDILKADLQTQIQA-FKNPDLPIK | 121 |
| | | LA+ A +V+AFEID RL+PIL DTL+ ++NV V++QD+LKAD+++ I+ F++ D I | |
| Sbjct: | 65 | QLAKRAKKVVAFEIDQRLLPILKDTLSPYENVTVIHQDVLKADVKSVIEEQFQDCD-EIM | 123 |
| Query: | 122 | VVANLPYYITTPILMHLIESKIPFAEFVVMIQKEVADRISAMPNTKAYGSLSIAVQYYMT | 181 |
| | | VVANLPYY+TTPI+M L+E +P VVM+QKEVA+R++A P++K YGSLSIAVQ+Y | |
| Sbjct: | 124 | VVANLPYYVTTPIIMKLLEEHLPLKGIVVMLQKEVAERMAADPSSKEYGSLSIAVQFYTE | 183 |
| Query: | 182 | AKVSFIVPRTVFVPAPNVDSAILKMVRRDQPVVSVQDEDFFFRVSKVAFVHRRKTLWNNL | 241 |
| | | AK IVP+TVFVP PNVDSA+++++ RD P V V++E FFF++ K +F RRKTL NNL | |
| Sbjct: | 184 | AKTVMIVPKTVFVPQPNVDSAVIRLILRDGPAVDVENESFFFQLIKASFAQRRKTLLNNL | 243 |
| Query: | 242 | TSHFGKSEDTKAKLEKALEIAKIKPSIRGEALSIPDFASLADAL | 285 |
| | | ++ + + K+ +E+ LE I RGE+LSI +FA+L++ L | |
| Sbjct: | 244 | VNNLPEGKAQKSTIEQVLEETNIDGKRRGESLSIEEFAALSNGL | 287 |

[10107] A related DNA sequence was identified in S. pyogenes <SEQ ID 5713> which encodes the amino acid sequence <SEQ ID 5714>. Analysis of this protein sequence reveals the following:

```
Possible site: 19
>>> Seems to have no N-terminal signal sequence
----- Final Results -----
                            bacterial cytoplasm --- Certainty = 0.2420(Affirmative) < succ>
                              bacterial membrane --- Certainty = 0.0000(Not Clear) < succ>
                                bacterial outside --- Certainty = 0.0000(Not Clear) < succ>
```

[10108] An alignment of the GAS and GBS proteins is shown below.

| Identities = 257/290 (88%), Positives = 275/290 (94%) | | | |
|---|---|---|---|
| Query: | 1 | MRIADKTVTRAILERHGFTFKKSFGQNFLTDTNILQKIVDTAEIDKGVNVIEIGPGIGAL | 60 |
| | | MRIAD +VT+A+L+RHGFTFKKSFGQNFLTDTNILQKIVDTAEID+ VNVIEIGPGIGAL | |
| Sbjct: | 9 | MRIADYSVTKAVLDRHGFTFKKSFGQNFLTDTNILQKIVDTAEIDQNVNVIEIGPGIGAL | 68 |
| Query: | 61 | TEFLAENAAEVMAFEIDDRLIPILADTLARFDNVQVVNQDILKADLQTQIQAFKNPDLPI | 120 |
| | | TEFLAENAAEVMAFEIDDRL+PILADTL FDNVQVVNQDILKADLQTQI+ FKNPDLPI | |
| Sbjct: | 69 | TEFLAENAAEVMAFEIDDRLVPILADTLRDFDNVQVVNQDILKADLQTQIKQFKNPDLPI | 128 |
| Query: | 121 | KVVANLPYYITTPILMHLIESKIPFAEFVVMIQKEVADRISAMPNTKAYGSLSIAVQYYM | 180 |
| | | KVVANLPYYITTPILMHLIESKIPF EFVVM+Q+EVADRISA PNTKAYGSLSIAVQYYM | |
| Sbjct: | 129 | KVVANLPYYITTPILMHLIESKIPFQEFVVMMQREVADRISAEPNTKAYGSLSIAVQYYM | 188 |
| Query: | 181 | TAKVSFIVPRTVFVPAPNVDSAILKMVRRDQPVVSVQDEDFFFRVSKVAFVHRRKTLWNN | 240 |
| | | TAKV+FIVPRTVFVPAPNVDSAILKMVRRDQP++ V+DEDFFFRVS+++FVHRRKTLWNN | |
| Sbjct: | 189 | TAKVAFIVPRTVFVPAPNVDSAILKMVRRDQPLIEVKDEDFFFRVSRLSFVHRRKTLWNN | 248 |
| Query: | 241 | LTSHFGKSEDTKAKLEKALEIAKIKPSIRGEALSIPDFASLADALKEVGI | 290 |
| | | LTSHFGKSED KAKLEK L +A IKPSIRGEALSI DF LADALKEVG+ | |
| Sbjct: | 249 | LTSHFGKSEDIKAKLEKGLALADIKPSIRGEALSIQDFGKLADALKEVGL | 298 |

[10109] Based on this analysis, it was predicted that these proteins and their epitopes could be useful antigens for vaccines or diagnostics.

### EXAMPLE 1840

[10110] A DNA sequence (GBSx1947) was identified in S. agalactiae <SEQ ID 5715> which encodes the amino acid sequence <SEQ ID 5716>. Analysis of this protein sequence reveals the following:

```
Possible site: 20
>>> Seems to have no N-terminal signal sequence
----- Final Results -----
bacterial cytoplasm --- Certainty = 0.0736 (Affirmative) <succ>
  bacterial membrane --- Certainty = 0.0000 (Not Clear) <succ>
    bacterial outside --- Certainty = 0.0000 (Not Clear) <succ>
```

[10111] The protein has no significant homology with any sequences in the GENPEPT database.

[10112] No corresponding DNA sequence was identified in S. pyogenes.

[10113] Based on this analysis, it was predicted that this protein and its epitopes, could be useful antigens for vaccines or diagnostics.

### EXAMPLE 1841

[10114] A DNA sequence (GBSx1948) was identified in S. agalactiae <SEQ ID 5717> which encodes the amino acid sequence <SEQ ID 5718>. Analysis of this protein sequence reveals the following:

```
Possible site: 59
>>> Seems to have no N-terminal signal sequence
----- Final Results -----
bacterial cytoplasm --- Certainty = 0.3031 (Affirmative) <succ>
  bacterial membrane --- Certainty = 0.0000 (Not Clear) <succ>
    bacterial outside --- Certainty = 0.0000 (Not Clear) <succ>
```

[10115] The protein has homology with the following sequences in the GENPEPT database.

| >GP:CAB11817 GB:Z99104 similar to hypothetical proteins | | |
|---|---|---|
| [Bacillus subtilis] | | |
| Identities = 81/179 (45%), Positives = 117/179 (65%), Gaps = 4/179 (2%) | | |
| Query: 7 | IQEVIVVEGKDDTANLRRFYNVDTYETRGSAIDEDDLERIERLHNLRGVIVFTDPDYNGE | 66 |
| | I+E+IVVEG+DDTA ++ + DT ET GSAID+ +++I RGVI+ TDPD+ GE | |
| Sbjct: 3 | IKEIIVVEGRDDTARIKLAVDADTIETNGSAIDDHVIDQIRLAQKTRGVIILTDPDFPGE | 62 |
| Query: 67 | RIRKIIMNAIPTVRHAFLNRDEAKPGSKTKGRSLGVEHASFEDLQKALSKVTQHFDDEDH | 126 |
| | +IRK I A+P +HAFL + AKP +K R +GVEHAS E ++ L V + + + | |
| Sbjct: 63 | KIRKTISEAVPGCKHAFLPKHLAKPKNK---RGIGVEHASVESIRACLENVHEEMEAQPS | 119 |
| Query: 127 | FDITQADLIRWGFITASDSRKRREYLGNQLRIGYSNGKQLLKRLRLFGVTKAEVEECME | 185 |
| | DI+ DLI G I ++ RRE LG+ L+IGY+NGKQL KRL++F + K++ ++ | |
| Sbjct: 120 | -DISAEDLIHAGLIGGPAAKCRRERLGDLLKIGYTNGKQLQKRLQMFQIKKSDFMSALD | 177 |

[10116] A related DNA sequence was identified in S. pyogenes <SEQ ID 5719> which encodes the amino acid sequence <SEQ ID 5720>. Analysis of this protein sequence reveals the following:

```
Possible site: 16
>>> Seems to have no N-terminal signal sequence
----- Final Results -----
bacterial cytoplasm --- Certainty = 0.1474 (Affirmative) <succ>
  bacterial membrane --- Certainty = 0.0000 (Not Clear) <succ>
    bacterial outside --- Certainty = 0.0000 (Not Clear) <succ>
```

[10117] An alignment of the GAS and GBS proteins is shown below.

| Identities = 146/187 (78%), Positives = 165/187 (88%) | | |
|---|---|---|
| Query: 1 | MMKKIDIQEVIVVEGKDDTANLRRFYNVDTYETRGSAIDEDDLERIERLHNLRGVIVFTD | 60 |
| | + +KI+IQEV+VVEGKDDTANLRRFY VDTYETRGSAI E+DLERI RL++LRGVIV TD | |
| Sbjct: 15 | LTEKINIQEVLVVEGKDDTANLRRFYEVDTYETRGSAITEEDLERINRLNDLRGVIVLTD | 74 |
| Query: 61 | PDYNGERIRKIIMNAIPTVRHAFLNRDEAKPGSKTKGRSLGVEHASFEDLQKALSKVTQH | 120 |
| | PDYNGERIRK+IM A+PT RHAFLNR+EA P SK+KGRSLGVEHA+FEDLQKAL+ VTQ | |
| Sbjct: 75 | PDYNGERIRKLIMAAVPTARHAFLNRNEAVPSSKSKGRSLGVEHANFEDLQKALAHVTQQ | 134 |
| Query: 121 | FDDEDHFDITQADLIRWGFITASDSRKRREYLGNQLRIGYSNGKQLLKRLRLFGVTKAEV | 180 |
| | +DDE +FDI Q DLIR G + ASDSRKRREYLG +LRIGY+NGKQLLKRL LFG+T AEV | |
| Sbjct: 135 | YDDESYFDIRQTDLIRLGLLMASDSRKRREYLGEKLRIGYANGKQLLKRLELFGITLAEV | 194 |
| Query: 181 | EECMEGY | 187 |
| | EE ME Y | |
| Sbjct: 195 | EEVMETY | 201 |

[10118] Based on this analysis, it was predicted that these proteins and their epitopes could be useful antigens for vaccines or diagnostics.

### EXAMPLE 1842

[10119] A DNA sequence (GBSx1949) was identified in S. agalactiae <SEQ ID 5721> which encodes the amino acid sequence <SEQ ID 5722>. Analysis of this protein sequence reveals the following:

```
Possible site: 15
>>> Seems to have no N-terminal signal sequence
----- Final Results -----
bacterial cytoplasm --- Certainty = 0.4955 (Affirmative) <succ>
  bacterial membrane --- Certainty = 0.0000 (Not Clear) <succ>
    bacterial outside --- Certainty = 0.0000 (Not Clear) <succ>
```

[10120] A related GBS nucleic acid sequence <SEQ ID 10139> which encodes amino acid sequence <SEQ ID 10140> was also identified.

[10121] The protein has homology with the following sequences in the GENPEPT database.

| >GP:CAB11815 GB:Z99104 similar to hypothetical proteins | | |
|---|---|---|
| [Bacillus subtilis] | | |
| Identities = 115/254 (45%), Positives = 172/254 (67%) | | |
| Query: 28 | IFDTHTHLNVENFEGKIDEEINLASELGVTKMNVVGFDQDTISKSLELSSQYAQVYSTIG | 87 |
| | +FDTH HLN E ++ ++E I A V ++ VVGFD+ TI++++E+ +Y +Y+ IG | |
| Sbjct: 2 | LFDTHAHLNAEQYDTDLEEVIERAKAEKVERIVVVGFDRPTITRAMEHIEEYDFIYAAIG | 61 |
| Query: 88 | WHPTEAGSYDDNIESMIISHLENPKVIALGEIGLDYYWMEDPKDIQIEVFKRQIELSKEY | 147 |
| | WHP +A + + I + KV+A+GE+GLDY+W + PKDIQ EVF+ QI L+KE | |
| Sbjct: 62 | WHPVDAIDMTEEDLAWIKELSAHEKVVAIGEMGLDYHWDKSPKDIQKEVFRNQIALAKEV | 121 |
| Query: 148 | NLPFVVHTRDALEDTYEVIKESGVGPFGGIMHSFSGSLEMAQKFIDLGMMISFSGVVTFK | 207 |
| | NLP ++H RDA ED ++KE G GGIMH F+GS E+A++ + + +SF G VTFK | |
| Sbjct: 122 | NLPIIIHNRDATEDVVTILKEEGAEAVGGIMHCFTGSAEVARECMKMNFYLSFGGPVTFK | 181 |
| Query: 208 | KALDVQEAARELPLDKILVETDAPYLAPVPKRGRENKTAYTRYVVEKIAELRGITVEEVA | 267 |
| | A +E +E+P D++L+ETD P+L P P RG+ N+ +Y +YV E+IAEL+ +T EE+A | |
| Sbjct: 182 | NAKKPKEVVKEIPNDRLLIETDCPFLTPHPFRGKRNEPSYVKYVAEQIAELKEMTFEEIA | 241 |
| Query: 268 | EATYQNAVRIFRLD | 281 |
| | T +NA R+FR++ | |
| Sbjct: 242 | SITTENAKRLFRIN | 255 |

[10122] A related DNA sequence was identified in S. pyogenes <SEQ ID 5723> which encodes the amino acid sequence <SEQ ID 5724>. Analysis of this protein sequence reveals the following:

```
Possible site: 52
>>> Seems to have no N-terminal signal sequence
----- Final Results -----
bacterial cytoplasm --- Certainty = 0.2817 (Affirmative) <succ>
  bacterial membrane --- Certainty = 0.0000 (Not Clear) <succ>
    bacterial outside --- Certainty = 0.0000 (Not Clear) <succ>
```

[10123] An alignment of the GAS and GBS proteins is shown below.

| Identities = 190/258 (73%), Positives = 227/258 (87%) | | |
|---|---|---|
| Query: 24 | DMIKIFDTHTHLNVENFEGKIDEEINLASELGVTKMNVVGFDQDTISKSLELSSQYAQVY | 83 |
| | + + IFDTHTHLNV F+G EE+ LA E+GV NVVGFDQ TIS +L L+++YA +Y | |
| Sbjct: 38 | EKLTIFDTHTHLNVAEFQGHETEELTLAQEMGVAYHNVVGFDQATISGALTLANKYANIY | 97 |
| Query: 84 | STIGWHPTEAGSYDDNIESMIISHLENPKVIALGEIGLDYYWMEDPKDIQIEVFKRQIEL | 143 |
| | +TIGWHPTEAGSY + +E I+S L + KVIALGEIGLDYYWMEDPK++QIEVFKRQ++L | |
| Sbjct: 98 | ATIGWHPTEAGSYSEAVEEAIVSQLSHSKVIALGEIGLDYYWMEDPKEVQIEVFKRQMQL | 157 |
| Query: 144 | SKEYNLPFVVHTRDALEDTYEVIKESGVGPFGGIMHSFSGSLEMAQKFIDLGMMISFSGV | 203 |
| | +K+++LPFVVHTRDALEDTYEVIK +GVGP GGIMHS+SGSLEMA++FI+LGMMISFSGV | |
| Sbjct: 158 | AKDHDLPFVVHTRDALEDTYEVIKAAGVGPRGGIMHSYSGSLEMAERFIELGMMISFSGV | 217 |
| Query: 204 | VTFKKALDVQEAARELPLDKILVETDAPYLAPVPKRGRENKTAYTRYVVEKIAELRGITV | 263 |
| | VTFKKALD+QEAA+ LPLDKILVETDAPYL PVPKRG++N TAYTRYVV+KIAELRG+TV | |
| Sbjct: 218 | VTFKKALDIQEAAQHLPLDKILVETDAPYLTPVPKRGKQNHTAYTRYVVDKIAELRGMTV | 277 |
| Query: 264 | EEVAEATYQNAVRIFRLD | 281 |
| | EEVA+AT NA R+F+LD | |
| Sbjct: 278 | EEVAKATTANAKRVFKLD | 295 |

[10124] Based on this analysis, it was predicted that these proteins and their epitopes could be useful antigens for vaccines or diagnostics.

### EXAMPLE 1843

[10125] A DNA sequence (GBSx1950) was identified in S. agalactiae <SEQ ID 5725> which encodes the amino acid sequence <SEQ ID 5726>. This protein is predicted to be endosome-associated protein. Analysis of this protein sequence reveals the following:

```
Possible site: 31
>>> Seems to have no N-terminal signal sequence
----- Final Results -----
bacterial cytoplasm --- Certainty = 0.5142 (Affirmative) <succ>
  bacterial membrane --- Certainty = 0.0000 (Not Clear) <succ>
    bacterial outside --- Certainty = 0.0000 (Not Clear) <succ>
```

[10126] The protein has no significant homology with any sequences in the GENPEPT database.

[10127] No corresponding DNA sequence was identified in S. pyogenes.

[10128] Based on this analysis, it was predicted that this protein and its epitopes, could be useful antigens for vaccines or diagnostics.

### EXAMPLE 1844

[10129] A DNA sequence (GBSx1951) was identified in S. agalactiae <SEQ ID 5727> which encodes the amino acid sequence <SEQ ID 5728>. This protein is predicted to be CG17785 gene product. Analysis of this protein sequence reveals the following:

```
Possible site: 14
>>> Seems to have no N-terminal signal sequence
----- Final Results -----
                            bacterial cytoplasm --- Certainty = 0.4730(Affirmative) < succ>
                              bacterial membrane --- Certainty = 0.0000(Not Clear) < succ>
                                bacterial outside --- Certainty = 0.0000(Not Clear) < succ>
```

[10130] The protein has no significant homology with any sequences in the GENPEPT database.

[10131] No corresponding DNA sequence was identified in S. pyogenes.

[10132] Based on this analysis, it was predicted that this protein and its epitopes, could be useful antigens for vaccines or diagnostics.

### EXAMPLE 1845

[10133] A DNA sequence (GBSx1952) was identified in S. agalactiae <SEQ ID 5729> which encodes the amino acid sequence <SEQ ID 5730>. Analysis of this protein sequence reveals the following:

```
Possible site: 45
>>> Seems to have no N-terminal signal sequence
----- Final Results -----
                            bacterial cytoplasm --- Certainty = 0.4032(Affirmative) < succ>
                              bacterial membrane --- Certainty = 0.0000(Not Clear) < succ>
                                bacterial outside --- Certainty = 0.0000(Not Clear) < succ>
```

[10134] The protein has homology with the following sequences in the GENPEPT database.

| >GP: BAB01041 GB: AB022220 gene_id: MLN21.14~unknown protein | | | |
|---|---|---|---|
| [Arabidopsis thaliana] | | | |
| Identities = 49/185 (26%), Positives = 85/185 (45%), Gaps = 46/185 (24%) | | | |
| Query: | 5 | LTDLDRVNIAKQEYELGSQLDTLVKIMSQDKVLPIGKVAHVQ------DGGKETGEQIYT | 58 |
| | | L +D V+ + + ELGS+ + +M+ K+ V+ D K+ Q++ | |
| Sbjct: | 154 | LEGIDSVDSGRVRIELGSRGLMDLCVMASKLAYENAKMNLVEFLDCWNDYQKQMSTQVFV | 213 |
| Query: | 59 | ITPNGTLDKPEDVKEVTVLFKGSTAPFGGDDWKTD----WFKNDIPIASKL---LLKKFG | 111 |
| | | T DK +D + + F+G T PF DDW TD W+ ++P KL L+ G | |
| Sbjct: | 214 | FT-----DKQKDANLIVISFRG-TEPFDADDWGTDFDYSWY--EVPNVGKLHMGFLEAMG | 265 |
| Query: | 112 | ---------------SQSVSHKQGTKQ-----LEQSAH-----LLKEVMNKYPNAKISVY | 146 |
| | | Q+ S ++ +K+ +E+SA+ +LK +++++ NA+ V | |
| Sbjct: | 266 | LGNRDDTTTFHYNLFEQTSSEEENSKKNLLDMVERSAYYAVRVILKRLLSEHENARFVVT | 325 |
| Query: | 147 | GHSLG | 151 |
| | | GHSLG | |
| Sbjct: | 326 | GHSLG | 330 |

[10135] No corresponding DNA sequence was identified in S. pyogenes.

[10136] Based on this analysis, it was predicted that this protein and its epitopes, could be useful antigens for vaccines or diagnostics.

### EXAMPLE 1846

[10137] A DNA sequence (GBSx1953) was identified in S. agalactiae <SEQ ID 5731> which encodes the amino acid sequence <SEQ ID 5732>. Analysis of this protein sequence reveals the following:

| Possible site: 52 | | | | |
|---|---|---|---|---|
| >>> Seems to have an uncleavable N-term signal seq | | | | |
| | INTEGRAL | Likelihood = −8.97 | Transmembrane | 12-28 (5-33) |

```
----- Final Results -----
                              bacterial membrane --- Certainty = 0.4588(Affirmative) < succ>
                                bacterial outside --- Certainty = 0.0000(Not Clear) < succ>
                            bacterial cytoplasm --- Certainty = 0.0000(Not Clear) < succ>
```

[10138] A related GBS nucleic acid sequence <SEQ ID 10141> which encodes amino acid sequence <SEQ ID 10142> was also identified.

[10139] The protein has no significant homology with any sequences in the GENPEPT database.

[10140] No corresponding DNA sequence was identified in S. pyogenes.

[10141] Based on this analysis, it was predicted that this protein and its epitopes, could be useful antigens for vaccines or diagnostics.

[10142] A related GBS gene <SEQ ID 8909> and protein <SEQ ID 8910> were also identified. Analysis of this protein sequence reveals the following:

| Lipop: Possible site: −1 Crend: 4 | | | | |
|---|---|---|---|---|
| McG: Discrim Score: 14.01 | | | | |
| GvH: Signal Score (−7.5): −5.55 | | | | |
| Possible site: 46 | | | | |
| >>> Seems to have an uncleavable N-term signal seq | | | | |
| ALOM program count: 1 value: −8.97 threshold: 0.0 | | | | |
| | INTEGRAL | Likelihood = −8.97 | Transmembrane | 6-22 (1-27) |
| | PERIPHERAL | Likelihood = 9.49 | 84 | |

```
modified ALOM score: 2.29
*** Reasoning Step: 3
----- Final Results -----
                              bacterial membrane --- Certainty = 0.4588(Affirmative) < succ>
                                bacterial outside --- Certainty = 0.0000(Not Clear) < succ>
                            bacterial cytoplasm --- Certainty = 0.0000(Not Clear) < succ>
```

[10143] SEQ ID 8910 (GBS32) was expressed in E. coli as a His-fusion product. SDS-PAGE analysis of total cell extract is shown in FIG. 10 (lane 2; MW 15.6 kDa).

[10144] GBS32-His was purified as shown in FIG. 191, lane 8.

### EXAMPLE 1847

[10145] A DNA sequence (GBSx1954) was identified in S. agalactiae <SEQ ID 5733> which encodes the amino acid sequence <SEQ ID 5734>. This protein is predicted to be extramembranal protein (dltD). Analysis of this protein sequence reveals the following:

| Possible site: 31 | | | | |
|---|---|---|---|---|
| >>> Seems to have an uncleavable N-term signal seq | | | | |
| | INTEGRAL | Likelihood = −10.24 | Transmembrane | 12-28 (4-31) |

```
----- Final Results -----
                              bacterial membrane --- Certainty = 0.5097(Affirmative) < succ>
                                bacterial outside --- Certainty = 0.0000(Not Clear) < succ>
                            bacterial cytoplasm --- Certainty = 0.0000(Not Clear) < succ>
```

[10146] The protein has homology with the following sequences in the GENPEPT database.

| >GP: AAC29041 GB: AF050517 unknown [Streptococcus mutans] | | | |
|---|---|---|---|
| Identities = 242/421 (57%), Positives = 309/421 (72%), Gaps = 1/421 (0%) | | | |
| Query: | 1 | MLKRLGKVFGPLVCALLLLVGLYFVFPVSQ-PHHLGKEKNSAVALTKAGFKSRVQKVRAF | 59 |
| | | MLKRL + GP+ CAL+L+ L +P H+ +EKN AVAL+ + FKS +K+RA | |
| Sbjct: | 1 | MLKRLWLILGPVFCALVLVFSLIMFYPAKHLSHNYNEEKNDAVALSPSSFKSTNKKMRAL | 60 |
| Query: | 60 | SDPKANFVPFFGSSEWLRFQAMHPSVLAEAYNRSYIPYLLGQKGAASLTQYYGIQQIKGQ | 119 |
| | | SD + FVPFFGSSEW R D MHPSVLAE YNRSY PYLLGQKG+ SL+ Y+G+QQI Q | |
| Sbjct: | 61 | SDKRHLFVPFFGSSEWQRIDNMHPSVLAERYNRSYRPYLLGQKGSTSLSHYFGMQQIGNQ | 120 |
| Query: | 120 | IKNKKAIYVISPQWFVRKGANKGAFQNYFSNDQTIRFLQNQTGTTYDRYAARRLLKLYPE | 179 |
| | | IKNKKA+YVISPQWFV KG + AFQ YFS++Q FL NQTG+T DRYAA+RLL + P | |
| Sbjct: | 121 | IKNKKAVYVISPQWFVPKGTSPIAFQQYFSSEQLADFLLNQTGSTADRYAAKRLLDIKPS | 180 |
| Query: | 180 | ASMSDLIEKVADGQKLSNKDKQRLKFNDWVFEKTDAIFSYLPLGKTYNQAIMPHVGKLPK | 239 |
| | | +++ +I+K+A G+ L++ D+ L+ +K DA+F L Y + ++PHV KLPK | |
| Sbjct: | 181 | SNLQGMIKKIAAGKTLNSFDRASLRLIKSFLKKEDALFGSLTFSDNYERRVLPHVKKLPK | 240 |
| Query: | 240 | AFSYNHLSRIASQDAKVATRSNQFGIQDRFYQTRIKKHLKKLKGSQRHFNYTKSPEFNDL | 299 |
| | | FSY LS+IAS+D + T++NQF I+D FY RIK LK+LKG Q+ +Y +SPE+NDL | |
| Sbjct: | 241 | HFSYGTLSQIASKDGQRLTKTNQFEINDHFYNKRIKGQLKRLKGFQKQLSYLQSPEYNDL | 300 |
| Query: | 300 | QLVLNEFSKQNTDVLFVIPPVNKKWTDYTGLDQKMYQKSVEKIKHQLQSQGFNHIADLSR | 359 |
| | | QL L + +K T V+FVIPPVN KW +YTGL Q MYQK+VEKIK+QLQSQGF++IADLS+ | |
| Sbjct: | 301 | QLALTQLAKSKTKVIFVIPPVNAKWVEYTGLSQDMYQKTVEKIKYQLQSQGFDNIADLSK | 360 |
| Query: | 360 | DGGKPYFMQDTIHLGWNGWLELDKHINPFLTEENSKPNYHINNKFLKKSWAKYTGRPSDYK | 420 |
| | | +G +PYFMQDTIHLGWNGWL DK +NPFL+++ +P Y INN FL K WA YTG P +K | |
| Sbjct: | 361 | NGDQPYFMQDTIHLGWNGWLAFDKEVNPFLSKKQLQPAYKINNHFLSKKWATYTGNPFQFK | 421 |

[10147] A related DNA sequence was identified in S. pyogenes <SEQ ID 5735> which encodes the amino acid sequence <SEQ ID 5736>. Analysis of this protein sequence reveals the following:

| Possible site: 41 | | | | |
|---|---|---|---|---|
| >>> Seems to have an uncleavable N-term signal seq | | | | |
| | INTEGRAL | Likelihood = −13.06 | Transmembrane | 7-23 (1-31) |

```
----- Final Results -----
                              bacterial membrane --- Certainty = 0.6222(Affirmative) < succ>
                                bacterial outside --- Certainty = 0.0000(Not Clear) < succ>
                            bacterial cytoplasm --- Certainty = 0.0000(Not Clear) < succ>
```

[10148] An alignment of the GAS and GBS proteins is shown below.

| Identities = 209/410 (50%), Positives = 278/410 (66%) | | | |
|---|---|---|---|
| Query: | 1 | MLKRLGKVFGPLVCALLLLVGLYFVFPVSQPHHLGKEKNSAVALTKAGFKSRVQKVRAFS | 60 |
| | | MLKRL + GPL+ A +L+V F FP H + +EK +AVA+T + FK+ + K +A S | |
| Sbjct: | 1 | MLKRLWLILGPLLIAFVLVVITIFSFPTQLDHSIAQEKANAVAITDSSFKNGLIKRQALS | 60 |
| Query: | 61 | DPKANFVPFFGSSEWLRFDAMHPSVLAEAYNRSYIPYLLGQKGAASLTQYYGIQQIKGQI | 120 |
| | | D FVPFFGSSEW R D+MHPSVLAE Y RSY P+L+G++G+ASL+ YYGIQQI ++ | |
| Sbjct: | 61 | DETCRFVPFFGSSEWSRMDSMHPSVLAERYKRSYRPFLIGKRGSASLSHYYGIQQITNEM | 120 |
| Query: | 121 | KNKKAIYVISPQWFVRKGANKGAFQNYFSNDQTIRFLQNQTGTTYDRYAARRLLKLYPEA | 180 |
| | | + KKAI+V+SPQWF +G N A Q Y SN Q I FL ++AA+RLL+L P | |
| Sbjct: | 121 | QKKKAIFVVSPQWFTAQGINPSAVQMYLSNTQVIEFLLKARTDKESQFAAKRLLELNPGV | 180 |
| Query: | 181 | SMSDLIEKVADGQKLSNKDKQRLKFNDWVFEKTDAIFSYLPLGKTYNQAIMPHVGKLPKA | 240 |
| | | S S+L++KV+ G+ LS D+ LK V + +++FS+L Y + I+P V LPK | |
| Sbjct: | 181 | SKSNLLKKVSKGKSLSRLDRAILKCQHQVALREESLFSFLGKSTNYEKRILPRVKGLPKV | 240 |
| Query: | 241 | FSYNHLSRIASQDAKVATRSNQFGIDDRFYQTRIKKHLKKLKGSQRHFNYTKSPEFNDLQ | 300 |
| | | FSY L+ +A++ ++AT +N+FGI + FY+ RI K Q +++Y SPE+ND Q | |
| Sbjct: | 241 | FSYKQLNALATKRGQLATTNNRFGIKNTFYRKRIAPKYNLYKNFQVNYSYLASPEYNDFQ | 300 |
| Query: | 301 | LVLNEFSKQNTDVLFVIPPVNKKWTDYTGLDQKMYQKSVEKIKHQLQSQGFNHIADLSRD | 360 |
| | | L+L+EF+K+ TDVLFVI PVNK W DYTGL+Q YQ +V KIK QL+SQGF+ IAD S+D | |
| Sbjct: | 301 | LLLSEFAKRKTDVLFVITPVNKAWADYTGLNQDKYQAAVRKIKFQLKSQGFHRIADFSKD | 360 |
| Query: | 361 | GGKPYFMQDTIHLGWNGWLELDKHINPFLTEENSKPNYHINNKFLKKSWA | 410 |
| | | GG+ YFMQDTIHLGWNGWL DK + PFL + PNY +N F K WA | |
| Sbjct: | 361 | GGESYFMQDTIHLGWNGWLAFDKKVQPFLETKQPVPNYKMNPYFYSKIWA | 410 |

[10149] A related GBS gene <SEQ ID 8911> and protein <SEQ ID 8912> were also identified. Analysis of this protein sequence reveals the following:

| Lipop: Possible site: −1 Crend: 6 | | | | |
|---|---|---|---|---|
| McG: Discrim Score: 15.50 | | | | |
| GvH: Signal Score (−7.5): −4.52 | | | | |
| Possible site: 31 | | | | |
| >>> Seems to have an uncleavable N-term signal seq | | | | |
| ALOM program count: 1 value: −10.24 threshold: 0.0 | | | | |
| | INTEGRAL | Likelihood = −10.24 | Transmembrane | 12-28 (4-31) |
| | PERIPHERAL | Likelihood = 8.33 | 301 | |

```
modified ALOM score: 2.55
*** Reasoning Step: 3
----- Final Results -----
                              bacterial membrane --- Certainty = 0.5097(Affirmative) < succ>
                                bacterial outside --- Certainty = 0.0000(Not Clear) < succ>
                            bacterial cytoplasm --- Certainty = 0.0000(Not Clear) < succ>
```

[10150] The protein has homology with the following sequences in the databases:

[chemical structure]

[10151] Based on this analysis, it was predicted that these proteins and their epitopes could be useful antigens for vaccines or diagnostics.

### EXAMPLE 1848

[10152] A DNA sequence (GBSx1955) was identified in S. agalactiae <SEQ ID 5737> which encodes the amino acid sequence <SEQ ID 5738>. This protein is predicted to be d-alanyl carrier protein (dltC). Analysis of this protein sequence reveals the following:

Possible site: 21
>>> Seems to have no N-terminal signal sequence
----- Final Results -----
bacterial cytoplasm --- Certainty = 0.1061 (Affirmative) < succ>
bacterial membrane --- Certainty = 0.0000 (Not Clear) < succ>
bacterial outside --- Certainty = 0.0000 (Not Clear) < succ>

[10153] The protein has homology with the following sequences in the GENPEPT database.

| >GP: AAC05776 GB: AF051356 D-alanyl carrier protein [Streptococcus mutans] | | | |
|---|---|---|---|
| Identities = 65/79 (82%), Positives = 74/79 (93%) | | | |
| Query: | 1 | MDIKSEVLAIIDDLFMEDVSSMMDEDLFDAGVLDSMGTVELIVELESHFNIDIPIAEFGR | 60 |
| | | MDIKSEVL IID+LFMEDVS MMDEDLFDAGVLDSMGTVELIVELE+HF+I +P++EFGR | |
| Sbjct: | 1 | MDIKSEVLKIIDELFMEDVSDMMDEDLFDAGVLDSMGTVELIVELENHFDITVPVSEFGR | 60 |
| Query: | 61 | NDWNTANKIVAGVTELCNA | 79 |
| | | +DWNTANKI+ G+TEL NA | |
| Sbjct: | 61 | DDWNTANKIIEGITELRNA | 79 |

[10154] A related DNA sequence was identified in S. pyogenes <SEQ ID 5739> which encodes the amino acid sequence <SEQ ID 5740>. Analysis of this protein sequence reveals the following:

Possible site: 38
>>> Seems to have no N-terminal signal sequence
----- Final Results -----
bacterial cytoplasm --- Certainty = 0.3976 (Affirmative) < succ>
bacterial membrane --- Certainty = 0.0000 (Not Clear) < succ>
bacterial outside --- Certainty = 0.0000 (Not Clear) < succ>

[10155] An alignment of the GAS and GBS proteins is shown below.

| Identities = 57/79 (72%), Positives = 65/79 (82%) | | | |
|---|---|---|---|
| Query: | 1 | MDIKSEVLAIIDDLFMEDVSSMMDEDLFDAGVLDSMGTVELIVELESHFNIDIPIAEFGR | 60 |
| | | M I+ V+ + D LFMEDVS MMDEDLFDAGVLDS+GTVELIVELES FNI +PI+EFGR | |
| Sbjct: | 1 | MSIEETVIELFDRLFMEDVSEMMDEDLFDAGVLDSLGTVELIVELESTFNIKVPISEFGR | 60 |
| Query: | 61 | NDWNTANKIVAGVTELCNA | 79 |
| | | +DWNT KIV GV EL +A | |
| Sbjct: | 61 | DDWNTVTKIVQGVEELQHA | 79 |

[10156] Based on this analysis, it was predicted that these proteins and their epitopes could be useful antigens for vaccines or diagnostics.

### EXAMPLE 1849

[10157] A DNA sequence (GBSx1956) was identified in S. agalactiae <SEQ ID 5741> which encodes the amino acid sequence <SEQ ID 5742>. Analysis of this protein sequence reveals the following:

| Possible site: 16 | | | | |
|---|---|---|---|---|
| >>> Seems to have an uncleavable N-term signal seq | | | | |
| | INTEGRAL | Likelihood = −8.55 | Transmembrane | 93-109 (91-117) |
| | INTEGRAL | Likelihood = −7.64 | Transmembrane | 21-37 (19-39) |
| | INTEGRAL | Likelihood = −6.79 | Transmembrane | 390-406 (387-410) |
| | INTEGRAL | Likelihood = −5.20 | Transmembrane | 41-57 (40-59) |
| | INTEGRAL | Likelihood = −2.07 | Transmembrane | 203-219 (200-221) |
| | INTEGRAL | Likelihood = −1.65 | Transmembrane | 65-81 (65-81) |
| | INTEGRAL | Likelihood = −0.75 | Transmembrane | 125-141 (125-141) |

```
----- Final Results -----
                              bacterial membrane --- Certainty = 0.4418(Affirmative) < succ>
                                bacterial outside --- Certainty = 0.0000(Not Clear) < succ>
                            bacterial cytoplasm --- Certainty = 0.0000(Not Clear) < succ>
```

[10158] A related DNA sequence was identified in S. pyogenes <SEQ ID 5743> which encodes the amino acid sequence <SEQ ID 5744>. Analysis of this protein sequence reveals the following:

| Possible site: 57 | | | |
|---|---|---|---|
| >>> Seems to have an uncleavable N-term signal seq | | | |
| INTEGRAL | Likelihood = −10.14 | Transmembrane | 387-403 (382-409) |
| INTEGRAL | Likelihood = −9.66 | Transmembrane | 18-34 (15-37) |
| INTEGRAL | Likelihood = −5.95 | Transmembrane | 64-80 (63-81) |
| INTEGRAL | Likelihood = −5.63 | Transmembrane | 92-108 (89-114) |
| INTEGRAL | Likelihood = −1.97 | Transmembrane | 40-56 (40-56) |

----- Final Results -----
bacterial membrane --- Certainty = 0.5055 (Affirmative) < succ>
bacterial outside --- Certainty = 0.0000 (Not Clear) < succ>
bacterial cytoplasm --- Certainty = 0.0000 (Not Clear) < succ>

[10159] The protein has homology with the following sequences in the databases:

| >GP: AAC05775 GB: AF051356 integral membrane protein [Streptococcus mutans] | | | |
|---|---|---|---|
| Identities = 246/413 (59%), Positives = 319/413 (76%) | | | |
| Query: | 1 | MMMFFSHIPYMEPYGNPIYFVYLILAFLPVIIGIFKQKRLSTYETLVSLVFILFMFGGDH | 60 |
| | | M+ FF ++P++E YGNP YF Y+ILA LP+ IG+F +KR YE VSL+FI+ M G+ | |
| Sbjct: | 1 | MIDFFKNLPHLEAYGNPQYFFYIILAVLPIFIGLFFKKRFPLYEAFVSLIFIVLMLTGEK | 60 |
| Query: | 61 | YQQLVAFLFYLLWQIISVFAYQKYRENANSAGVFYLAIAMALFPLIWVKVAPLTGPSSQT | 120 |
| | | Q+ A FY++WQI V++Y+ YR++ ++ +FYL + M++ PL VK+ P + Q+ | |
| Sbjct: | 61 | SHQIFALFFYIIWQIFCVYSYKFYRKSRDNKWIFYLHVFMSILPLSLVKITPAIWTNQQS | 120 |
| Query: | 121 | LFSFLGISYLTFKSIGMIIEMRDGTLQEVRLPDFIRFMIFFPTFSSGPIDRFRHFQEDYH | 180 |
| | | LF FLGISYLTF+S+GMI+EMRDG L +FIRFM+F PTFSSGPIDRFR F +DY | |
| Sbjct: | 121 | LFGFLGISYLTFRSVGMIMEMRDGVLTSFTFWEFIRFMLFMPTFSSGPIDRFRRFNDDYE | 180 |
| Query: | 181 | KLPERDDYFAMLNKAVMYLMLGFLYKHIISYCLGGILLPLLENKALMVGGYFNKETILVM | 240 |
| | | K+P++D+ ML ++V Y+MLGF YK +++ LG ++LP L+ AL GG+FN T+ VM | |
| Sbjct: | 181 | KIPDKDELLDMLEQSVHYIMLGFFYKFVLAQILGTMILPGLKEMALQKGGWFNWPTLGVM | 240 |
| Query: | 241 | YVYGLNLFFDFAGYSMFAIGISYLLGIRTPENFNMPFLSASLKDFWNRWHMSLSFWFRDY | 300 |
| | | YVYGL+LFFDFAGYSMFAI IS +GI++P NFN PF S LK+FWNRWHMSLSFWFRD+ | |
| Sbjct: | 241 | YVYGLDLFFDFAGYSMFAIAISNFMGIKSPTNFNQPFKSQDLKEFWNRWHMSLSFWFRDF | 300 |
| Query: | 301 | VFMRLVHLLIKHKTFKNRNVTSGVAYLVNMLVMGFWHGLTWYYIAYGLFHGIGLIINDAW | 360 |
| | | VFMRLV +L+K+K FKNRNVTS VAY+VNML+MGFWHG+TWYYI YGLFHG+GL++NDAW | |
| Sbjct: | 301 | VFMRLVKVLVKNKVFKNRNVTSSVAYIVNMLIMGFWHGVTWYYITYGLFHGVGLVLNDAW | 360 |
| Query: | 361 | IRKKKEINRHRKKKGLSPLFQSRAFHVLCIVVTFHVVMFSLLLFSGFLNDLWF | 413 |
| | | +RKKK +N+ RK K LSPL ++ L IV+TF+VVM S L+FSGFLNDLWF | |
| Sbjct: | 361 | LRKKKRLNKERKAKNLSPLPENGWTRALGIVITFNVVMLSFLIFSGFLNDLWF | 413 |

[10160] An alignment of the GAS and GBS proteins is shown below.

| Identities = 240/416 (57%), Positives = 317/416 (75%), Gaps = 5/416 (1%) | | | |
|---|---|---|---|
| Query: | 5 | FLEKLPHLDVYGNPQYFFYLILAVLPIYIGLFFKKRFALYEIIFSLSFIVMMLTGSTFNQ | 64 |
| | | F +P+++ YGNP YF YLILA LP+ IG+F +KR + YE + SL FI+ M G + Q | |
| Sbjct: | 4 | FFSHIPYMEPYGNPIYFVYLILAFLPVIIGIFKQKRLSTYETLVSLVFILFMFGGDHYQQ | 63 |
| Query: | 65 | LKSLLAYVVGQSLLVFIYKAYRKRFNHTLVFYVTVCLSIFPLFLVKLIPAISEDGHQSLF | 124 |
| | | L + L Y++ Q + VF Y+ YR+ N VFY+ + +++FPL VK+ P ++ Q+LF | |
| Sbjct: | 64 | LVAFLFYLLWQIISVFAYQKYRENANSAGVFYLAIAMALFPLIWVKVAP-LTGPSSQTLF | 122 |
| Query: | 125 | GFLGISYLTFRAVAMIIEMRDGVLKEFTLWEFLRFLLFFPTFSSGPIDRFKRFNEDYINI | 184 |
| | | FLGISYLTF+++ MIIEMRDG L+E L +F+RF++FFPTFSSGPIDRF+ F EDY + | |
| Sbjct: | 123 | SFLGISYLTFKSIGMIIEMRDGTLQEVRLPDFIRFMIFFPTFSSGPIDRFRHFQEDYNKL | 182 |
| Query: | 185 | PDRNELLDMLGQAIHYLMLGFLYKFILAYIFGSLIMPPLKELALEQGGVFNWPTLGVMYA | 244 |
| | | P+R++ ML +A+ YLMLGFLYK I++Y G +++P L+ AL GG FN T+ VMY | |
| Sbjct: | 183 | PERDDYFAMLNKAVMYLMLGFLYKHIISYCLGGILLPLLENKALMVGGYFNKETILVMYV | 242 |
| Query: | 245 | FGFDLFFDFAGYTMFALAISNLMGIKSPINFDKPFKSRDLKEFWNRWHMSLSFWFRDFVF | 304 |
| | | +G +LFFDFAGY+MFA+ IS L+GI++P NF+ PF S LK+FWNRWHMSLSFWFRD+VF | |
| Sbjct: | 243 | YGLNLFFDFAGYSMFAIGISYLLGIRTPENFNMPFLSASLKDFWNRWHMSLSFWFRDYVF | 302 |
| Query: | 305 | MRLVKLLVKNKVFKNRNVTSSVAYIINMLLMGFWHGLTWYYIAYGLFHGIGLVINDAWVR | 364 |
| | | MRLV LL+K+K FKNRNVTS VAY++NML+MGFWHGLTWYYIAYGLFHGIGL+INDAW+R | |
| Sbjct: | 303 | MRLVHLLIKHKTFKNRNVTSGVAYLVNMLVMGFWHGLTWYYIAYGLFHGIGLIINDAWIR | 362 |
| Query: | 365 | KKKNINKERRLAKKPLLP--ENKWTYALGVFITFNVVMFSFLIFSGFLDLLWFPQP | 418 |
| | | KKK IN+ R+ KK L P +++ + L + +TF+VVMFS L+FSGFL+ LWF +P | |
| Sbjct: | 363 | KKKEINRHRK--KKGLSPLFQSRAFHVLCIVVTFHVVMFSLLLFSGFLNDLWFNRP | 416 |

[10161] A related GBS gene <SEQ ID 8913> and protein <SEQ ID 8914> were also identified. Analysis of this protein sequence reveals the following:

| Lipop: Possible site: −1 Crend: 10 | | | |
|---|---|---|---|
| McG: Discrim Score: 3.22 | | | |
| GvH: Signal Score (−7.5): −4.56 | | | |
| Possible site: 16 | | | |
| >>> Seems to have an uncleavable N-term signal seq | | | |
| ALOM program | count: 7 | value: −8.55 | threshold: 0.0 |

| | | | |
|---|---|---|---|
| INTEGRAL | Likelihood = −8.55 | Transmembrane | 93-109 (91-117) |
| INTEGRAL | Likelihood = −7.64 | Transmembrane | 21-37 (19-39) |
| INTEGRAL | Likelihood = −6.79 | Transmembrane | 390-406 (387-410) |
| INTEGRAL | Likelihood = −5.20 | Transmembrane | 41-57 (40-59) |
| INTEGRAL | Likelihood = −2.07 | Transmembrane | 203-219 (200-221) |
| INTEGRAL | Likelihood = −1.65 | Transmembrane | 65-81 (65-81) |
| INTEGRAL | Likelihood = −0.75 | Transmembrane | 125-141 (125-141) |

| | | |
|---|---|---|
| PERIPHERAL | Likelihood = 1.01 | 322 |

modified ALOM score: 2.21
*** Reasoning Step: 3
----- Final Results -----
bacterial membrane --- Certainty = 0.4418 (Affirmative) < succ>
bacterial outside --- Certainty = 0.0000 (Not Clear) < succ>
bacterial cytoplasm --- Certainty = 0.0000 (Not Clear) < succ>

[10162] The protein has homology with the following sequences in the databases:

[chemical structure]

[10163] Based on this analysis, it was predicted that these proteins and their epitopes could be useful antigens for vaccines or diagnostics.

### EXAMPLE 1850

[10164] A DNA sequence (GBSx1957) was identified in S. agalactiae <SEQ ID 5745> which encodes the amino acid sequence <SEQ ID 5746>. Analysis of this protein sequence reveals the following:

Possible site: 45
>>> Seems to have no N-terminal signal sequence
----- Final Results -----
bacterial cytoplasm --- Certainty = 0.2611 (Affirmative) < succ>
bacterial membrane --- Certainty = 0.0000 (Not Clear) < succ>
bacterial outside --- Certainty = 0.0000 (Not Clear) < succ>

[10165] A related GBS nucleic acid sequence <SEQ ID 10143> which encodes amino acid sequence <SEQ ID 10144> was also identified.

[10166] The protein has homology with the following sequences in the GENPEPT database.

| >GP: AAC05774 GB: AF051356 D-alanine-D-alanyl carrier protein ligase | | | |
|---|---|---|---|
| [Streptococcus mutans] | | | |
| Identities = 404/510 (79%), Positives = 465/510 (90%) | | | |
| Query: | 5 | IHDMIKTIEHFAETQADFPVYDILGEVHTYGQLKVDSDSLAAHIDSLGLVEKSPVLVFGG | 64 |
| | | I DMI TIE+FA+ QA+FPVY+ILGE+HTYG+LK DSDSLAAH+D L L KSPV+VFGG | |
| Sbjct: | 6 | IKDMIATIENFAQEQAEFPVYNILGEIHTYGELKADSDSLAAHLDQLDLTAKSPVVVFGG | 65 |
| Query: | 65 | QEYEMLATFVALTKSGHAYIPVDQHSALDRIQAIMTVAQPSLIISIGEFPLEVDNVPILD | 124 |
| | | QEY MLA+FVALTKSGHAYIP+D HSAL+RI+AI+ VA+PSL+I++ +FP++ VP++ | |
| Sbjct: | 66 | QEYAMLASFVALTKSGHAYIPIDHHSALERIEAILEVAEPSLVIAVDDFPIDNLQVPVIQ | 125 |
| Query: | 125 | VSQVSAIFEEKTPYEVTHSVKGDDNYYIIFTSGTTGLPKGVQISHDNLLSFTNWMISDDE | 184 |
| | | SQ+ IF++K Y++ H+VKGDD YYIIFTSGTTG PKGVQISHDNLLSFTNWMI+ + | |
| Sbjct: | 126 | YSQLEEIFKQKLSYQINHAVKGDDTYYIIFTSGTTGKPKGVQISHDNLLSFTNWMINAEA | 185 |
| Query: | 185 | FSVPERPQMLAQPPYSFDLSVMYWAPTLAMGGTLFALPKTVVNDFKKLFATINELPIQVW | 244 |
| | | F+ P RPQMLAQPPYSFDLSVMYWAPTLA+GGTLFALPK + DFK+LF TIN+LPI VW | |
| Sbjct: | 186 | FATPHRPQMLAQPPYSFDLSVMYWAPTLALGGTLFALPKEITADFKQLFTTINQLPIGVW | 245 |
| Query: | 245 | TSTPSFADMALLSNDFNSETLPQLTHFYFDGEELTVKTAQKLRQRFPKARIVNAYGPTEA | 304 |
| | | TSTPSF DMA+LS+DFN++ LP LTHFYFDGEELTVKTA+KLRQRFP+ARIVNAYGPTEA | |
| Sbjct: | 246 | TSTPSFVDMAMLSDDFNAQQLPHLTHFYFDGEELTVKTAKKLRQRFPQARIVNAYGPTEA | 305 |
| Query: | 305 | TVALSAVAITDEMLETCKRLPIGYTKDDSPTYVIDEEGHKLPNGEQGEIIIAGPAVSKGY | 364 |
| | | TVALSA+A+TD+MLETCKRLPIGYTK DSPT++IDE GHKL NG+QGEII++GPAVSKGY | |
| Sbjct: | 306 | TVALSALAVTDKMLETCKRLPIGYTKPDSPTFIIDESGHKLANGQQGEIIVSGPAVSKGY | 365 |
| Query: | 365 | LNNPEKTAEAFFQFEGLPAYHTGDLGSMTDEGLLLYGGRMDFQIKFNGYRIELEDVSQNL | 424 |
| | | LNNPE+TA AFF+FEGLPAYHTGDLGSMTDEGLLLYGGRMDFQIKFNGYRIELE+VSQNL | |
| Sbjct: | 366 | LNNPERTAAAFFEFEGLPAYHTGDLGSMTDEGLLLYGGRMDFQIKFNGYRIELEEVSQNL | 425 |
| Query: | 425 | NKSQYVKSAVAVPRYNKDHKVQNLLAYIVLKEGVRDDFERDLDLTKAIKEDLKDIMMDYM | 484 |
| | | NKSQY+ SAVAVPRYNKDHKVQNLLAY+VLK+GV + FER LD+TKAIK DL+D+MMDYM | |
| Sbjct: | 426 | NKSQYIASAVAVPRYNKDHKVQNLLAYVVLKDGVEEQFERALDITKAIKADLQDVMMDYM | 485 |
| Query: | 485 | MPSKFIYREDLPLTPNGKIDIKGLMSEVNK | 514 |
| | | MPSKF+YR+DLPLTPNGKIDIKGLMSEVNK | |
| Sbjct: | 486 | MPSKFLYRKDLPLTPNGKIDIKGLMSEVNK | 515 |

[10167] A related DNA sequence was identified in S. pyogenes <SEQ ID 5747> which encodes the amino acid sequence <SEQ ID 5748>. Analysis of this protein sequence reveals the following:

| Possible site: 60 | | | |
|---|---|---|---|
| >>> Seems to have no N-terminal signal sequence | | | |
| INTEGRAL | Likelihood = −2.28 | Transmembrane | 92-108 (91-108) |
| INTEGRAL | Likelihood = −0.85 | Transmembrane | 43-59 (41-59) |

----- Final Results -----
bacterial membrane --- Certainty = 0.1914 (Affirmative) < succ>
bacterial outside --- Certainty = 0.0000 (Not Clear) < succ>
bacterial cytoplasm --- Certainty = 0.0000 (Not Clear) < succ>

[10168] The protein has homology with the following sequences in the databases:

| >GP: AAC05774 GB: AF051356 D-alanine-D-alanyl carrier protein ligase | | | |
|---|---|---|---|
| [Streptococcus mutans] | | | |
| Identities = 365/511 (71%), Positives = 438/511 (85%) | | | |
| Query: | 2 | IKDMIDSIEQFAQTQADFPVYDCLGERRTYGQLKRDSDSIAAFIDSLALLAKSPVLVFGA | 61 |
| | | IKDMI +IE FAQ QA+FPVY+ LGE TYG+LK DSDS+AA +D L L AKSPV+VFG | |
| Sbjct: | 6 | IKDMIATIENFAQEQAEFPVYNILGEIHTYGELKADSDSLAAHLDQLDLTAKSPVVVFGG | 65 |
| Query: | 62 | QTYDMLATFVALTKSGHAYIPVDVHSAPERILAIIEIAKPSLIIAIEEFPLTIEGISLVS | 121 |
| | | Q Y MLA+FVALTKSGHAYIP+D HSA ERI AI+E+A+PSL+IA+++FP+ + ++ | |
| Sbjct: | 66 | QEYAMLASFVALTKSGHAYIPIDHHSALERIEAILEVAEPSLVIAVDDFPIDNLQVPVIQ | 125 |
| Query: | 122 | LSEIESAKLAEMPYERTHSVKGDDNYYIIFTSGTTGQPKGVQISHDNLLSFTNWMIEDAA | 181 |
| | | S++E ++ Y+ H+VKGDD YYIIFTSGTTG+PKGVQISHDNLLSFTNWMI A | |
| Sbjct: | 126 | YSQLEEIFKQKLSYQINHAVKGDDTYYIIFTSGTTGKPKGVQISHDNLLSFTNWMINAEA | 185 |
| Query: | 182 | FDVPKQPQMLAQPPYSFDLSVMYWAPTLALGGTLFALPKELVADFKQLFTTIAQLPVGIW | 241 |
| | | F P +PQMLAQPPYSFDLSVMYWAPTLALGGTLFALPKE+ ADFKQLFTTI QLP+G+W | |
| Sbjct: | 186 | FATPHRPQMLAQPPYSFDLSVMYWAPTLALGGTLFALPKEITADFKQLFTTINQLPIGVW | 245 |
| Query: | 242 | TSTPSFADMAMLSDDFCQAKMPALTHFYFDGEELTVSTARKLFERFPSAKIINAYGPTEA | 301 |
| | | TSTPSF DMAMLSDDF ++P LTHFYFDGEELTV TA+KL +RFP A+I+NAYGPTEA | |
| Sbjct: | 246 | TSTPSFVDMAMLSDDFNAQQLPHLTHFYFDGEELTVKTAKKLRQRFPQARIVNAYGPTEA | 305 |
| Query: | 302 | TVALSAIEITREMVDNYTRLPIGYPKPDSPTYIIDEDGKELSSGEQGEIIVTGPAVSKGY | 361 |
| | | TVALSA+ +T +M++ RLPIGY KPDSPT+IIDE G +L++G+QGEIIV+GPAVSKGY | |
| Sbjct: | 306 | TVALSALAVTDKMLETCKRLPIGYTKPDSPTFIIDESGHKLANGQQGEIIVSGPAVSKGY | 365 |
| Query: | 362 | LNNPEKTAEAFFTFKGQPAYHTGDIGSLTEDNILLYGGRLDFQIKYAGYRIELEDVSQQL | 421 |
| | | LNNPE+TA AFF F+G PAYHTGD+GS+T++ +LLYGGR+DFQIK+ GYRIELE+VSQ L | |
| Sbjct: | 366 | LNNPERTAAAFFEFEGLPAYHTGDLGSMTDEGLLLYGGRMDFQIKFNGYRIELEEVSQNL | 425 |
| Query: | 422 | NQSPMVASAVAVPRYNKEHKVQNLLAYIVVKDGVKERFDRELELTKAIKASVKDHMMSYM | 481 |
| | | N+S+ +ASAVAVPRYNK+HKVQNLLAY+V+KDGV+E+F+R L++TKAIKA ++D MM YM | |
| Sbjct: | 426 | NKSQYIASAVAVPRYNKDHKVQNLLAYVVLKDGVEEQFERALDITKAIKADLQDVMMDYM | 485 |
| Query: | 482 | MPSKFLYRDSLPLTPNGKIDIKTLINEVNNR | 512 |
| | | MPSKFLYR LPLTPNGKIDIK L++EVN + | |
| Sbjct: | 486 | MPSKFLYRKDLPLTPNGKIDIKGLMSEVNKK | 516 |

[10169] An alignment of the GAS and GBS proteins is shown below.

| Identities = 374/510 (73%), Positives = 439/510 (85%) | | | |
|---|---|---|---|
| Query: | 4 | MIHDMIKTIEHFAETQADFPVYDILGEVHTYGQLKVDSDSLAAHIDSLGLVEKSPVLVFG | 63 |
| | | MI DMI +IE FA+TQADFPVYD LGE TYGQLK DSDS+AA IDSL L+ KSPVLVFG | |
| Sbjct: | 1 | MIKDMIDSIEQFAQTQADFPVYDCLGERRTYGQLKRDSDSIAAFIDSLALLAKSPVLVFG | 60 |
| Query: | 64 | GQEYEMLATFVALTKSGHAYIPVDQHSALDRIQAIMTVAQPSLIISIGEFPLEVDNVPIL | 123 |
| | | Q Y+MLATFVALTKSGHAYIPVD HSA +RI AI+ +A+PSLII+I EFPL ++ + ++ | |
| Sbjct: | 61 | AQTYDMLATFVALTKSGHAYIPVDVHSAPERILAIIEIAKPSLIIAIEEFPLTIEGISLV | 120 |
| Query: | 124 | DVSQVSAIFEEKTPYEVTHSVKGDDNYYIIFTSGTTGLPKGVQISHDNLLSFTNWMISDD | 183 |
| | | +S++ + + PYE THSVKGDDNYYIIFTSGTTG PKGVQISHDNLLSFTNWMI D | |
| Sbjct: | 121 | SLSEIESAKLAEMPYERTHSVKGDDNYYIIFTSGTTGQPKGVQISHDNLLSFTNWMIEDA | 180 |
| Query: | 184 | EFSVPERPQMLAQPPYSFDLSVMYWAPTLAMGGTLFALPKTVVNDFKKLFATINELPIQV | 243 |
| | | F VP++PQMLAQPPYSFDLSVMYWAPTLA+GGTLFALPK +V DFK+LF TI +LP+ + | |
| Sbjct: | 181 | AFDVPKQPQMLAQPPYSFDLSVMYWAPTLALGGTLFALPKELVADFKQLFTTIAQLPVGI | 240 |
| Query: | 244 | WTSTPSFADMALLSNDFNSETLPQLTHFYFDGEELTVKTAQKLRQRFPKARIVNAYGPTE | 303 |
| | | WTSTPSFADMA+LS+DF +P LTHFYFDGEELTV TA+KL +RFP A+I+NAYGPTE | |
| Sbjct: | 241 | WTSTPSFADMAMLSDDFCQAKMPALTHFYFDGEELTVSTARKLFERFPSAKIINAYGPTE | 300 |
| Query: | 304 | ATVALSAVAITDEMLETCKRLPIGYTKDDSPTYVIDEEGHKLPNGEQGEIIIAGPAVSKG | 363 |
| | | ATVALSA+ IT EM++ RLPIGY K DSPTY+IDE+G +L +GEQGEII+ GPAVSKG | |
| Sbjct: | 301 | ATVALSAIEITREMVDNYTRLPIGYPKPDSPTYIIDEDGKELSSGEQGEIIVTGPAVSKG | 360 |
| Query: | 364 | YLNNPEKTAEAFFQFEGLPAYHTGDLGSMTDEGLLLYGGRMDFQIKFNGYRIELEDVSQN | 423 |
| | | YLNNPEKTAEAFF F+G PAYHTGD+GS+T++ +LLYGGR+DFQIK+ GYRIELEDVSQ | |
| Sbjct: | 361 | YLNNPEKTAEAFFTFKGQPAYHTGDIGSLTEDNILLYGGRLDFQIKYAGYRIELEDVSQQ | 420 |
| Query: | 424 | LNKSQYVKSAVAVPRYNKDHKVQNLLAYIVLKEGVRDDFERDLDLTKAIKEDLKDIMMDY | 483 |
| | | LN+S V SAVAVPRYNK+HKVQNLLAYIV+K+GV++ F+R+L+LTKAIK +KD MM Y | |
| Sbjct: | 421 | LNQSPMVASAVAVPRYNKEHKVQNLLAYIVVKDGVKERFDRELELTKAIKASVKDHMMSY | 480 |
| Query: | 484 | MMPSKFIYREDLPLTPNGKIDIKGLMSEVN | 513 |
| | | MMPSKF+YR+ LPLTPNGKIDIK L++EVN | |
| Sbjct: | 481 | MNPSKFLYRDSLPLTPNGKIDIKTLINEVN | 510 |

[10170] Based on this analysis, it was predicted that these proteins and their epitopes could be useful antigens for vaccines or diagnostics.

### EXAMPLE 1851

[10171] A DNA sequence (GBSx1958) was identified in S. agalactiae <SEQ ID 5749> which encodes the amino acid sequence <SEQ ID 5750>. This protein is predicted to be a histidine protein kinase (phoR). Analysis of this protein sequence reveals the following:

| Possible site: 26 | | | |
|---|---|---|---|
| >>> Seems to have an uncleavable N-term signal seq | | | |
| INTEGRAL | Likelihood = −13.64 | Transmembrane | 9-25 (5-32) |
| INTEGRAL | Likelihood = −11.62 | Transmembrane | 136-152 (132-164) |

----- Final Results -----
bacterial membrane --- Certainty = 0.6456 (Affirmative) < succ>
bacterial outside --- Certainty = 0.0000 (Not Clear) < succ>
bacterial cytoplasm --- Certainty = 0.0000 (Not Clear) < succ>

[10172] The protein has homology with the following sequences in the GENPEPT database.

| >GP: CAB54569 GB: AJ006392 histidine kinase [Streptococcus pneumoniae] | | | |
|---|---|---|---|
| Identities = 105/416 (25%), Positives = 197/416 (47%), Gaps = 56/416 | | | |
| (13%) | | | |
| Query: | 7 | KKFVFLTMSILIVVVLFLFAVSNRYNQYWDEYDAYRIVKLVAKNDY---LGIPGDEPIAL | 63 |
| | | + F+F+ + + ++V+ L + NR + + ++ L+A DY L + G I | |
| Sbjct: | 12 | RDFIFILILLGFILVVTLLLLENRRDNIQLKQVNQKVKDLIA-GDYSKVLDMQGGSEITN | 70 |
| Query: | 64 | VTIDNQKMVKIQSNNTDLTNDVIEKSSLKL------LEQGKKSRKWKSFIYSIKE----- | 112 |
| | | +T + + ++ LT + +E+ S +L + G + + I I + | |
| Sbjct: | 71 | ITNNLNDLSEV----IRLTQENLEQESKRLNSILFYMTDGVLATNRRGQIIMINDTAKKQ | 126 |
| Query: | 113 | ---YKDKTYTIAIMDLASYEVPYARRFLILVFT--------IFGFCLLAAVSLYLSR--- | 158 |
| | | K+ +I++L E Y R LI I G L V L R | |
| Sbjct: | 127 | LGLVKEDVLNRSILELLKIEENYELRDLITQSPELLLDSQDINGEYLNLRVRFALIRRES | 186 |
| Query: | 159 | -FIVGPVE-----TEMTREKQ----FVSDASHELKTPIAAIRANVQVLEQ----QIPGNR | 204 |
| | | FI G V TE +E++ FVS+ SHEL+TP+ ++++ ++ L++ + | |
| Sbjct: | 187 | GFISGLVAVLHDTTEQEKEERERRLFVSNVSHELRTPLTSVKSYLEALDEGALCETVAPD | 246 |
| Query: | 205 | YLDHVVSETKRMEFLIEDLLNLSRLDEKRSKVNFKKLNLSVLCQEVLLTYESLAYEEEKC | 264 |
| | | ++ + ET RM ++ DLL+LSR+D S ++ + +N + +L ++ + +E++ | |
| Sbjct: | 247 | FIKVSLDETNRMMRMVTDLLHLSRIDNATSHLDVELINFTAFITFILNRFDKMKGQEKEK | 306 |
| Query: | 265 | LNDTIED----DVWIVGEESQIKQILIILLDNAIRHSLSKSAIQFSLKQARRKAILTISN | 320 |
| | | + + D +W+ + ++ Q++ +L+NAI++S I +K + IL+IS+ | |
| Sbjct: | 307 | KYELVRDYPINSIWMEIDTDKMTQVVDNILNNAIKYSPDGGKITVRMKTTEDQMILSISD | 366 |
| Query: | 321 | PSAIYSKEVMDNLFERFYQAKDDHADSLS---FGLGLSIAKAIVERHKGRIRAYQE | 373 |
| | | K+ + +F+RFY+ D A S + GLGLSIAK I+++HKG I A E | |
| Sbjct: | 367 | HGLGIPKQDLPRIFDRFYRV--DRARSRAQGGTGLGLSIAKEIIKQHKGFIWAKSE | 420 |

[10173] A related sequence was also identified in GAS <SEQ ID 9131> which encodes the amino acid sequence <SEQ ID 9132>. Analysis of this protein sequence reveals the following:

| >>> Seems to have an uncleavable N-term signal seq | | | |
|---|---|---|---|
| INTEGRAL | Likelihood = −11.30 | Transmembrane | 9-25 (4-33) |
| INTEGRAL | Likelihood = −10.35 | Transmembrane | 161-177 (154-190) |

| | | |
|---|---|---|
| PERIPHERAL | Likelihood = 4.35 | 142 |

----- Final Results -----
bacterial membrane --- Certainty = 0.5522 (Affirmative) < succ>
bacterial outside --- Certainty = 0.0000 (Not Clear) < succ>
bacterial cytoplasm --- Certainty = 0.0000 (Not Clear) < succ>

[10174] An alignment of the GAS and GBS proteins is shown below.

| Identities = 94/406 (23%), Positives = 190/406 (46%), Gaps = 31/406 (7%) | | | |
|---|---|---|---|
| Query: | 1 | MFSDLRKKFVFLTMSILIVVVLFLFAVSNRYNQYWDEYDAYRIVKLVAKNDYLGIPGDEP | 60 |
| | | MF+ +R +F+ + + +++ + + N Y + + RI+ L++ N +PG | |
| Sbjct: | 10 | MFNRIRIRFIMIASIAIFIILSSIVGIINTARCYQSQQEINRILHLISSNKGK-LPGTTE | 68 |
| Query: | 61 | IAL-----VTIDNQKMVKIQS-----NNTDLTNDVIEKSSLKLLE------------QGK | 98 |
| | | + ++ D+ + S N L+++ S+L E + K | |
| Sbjct: | 69 | SSKRLGTKLSEDSLSQFRYYSVIFNANGHLLSSNTANISALDREEAQYFARLFAKSGEEK | 128 |
| Query: | 99 | KSRKWKSFIYS--IKEYKDKTYTIAIMDLASYEVPYARRFLILVFTIFG-FCLLAAVSLY | 155 |
| | | S + + +YS I + ++ + I+D Y + V FG F + | |
| Sbjct: | 129 | GSYRHQDSVYSYLITQLPNEEKLVVILDTTFYFRSVGDLLAVSVMLAFGGFIFFVVLVSL | 188 |
| Query: | 156 | LSRFIVGPVETEMTREKQFVSDASHELKTPIAAIRANVQVLEQQIPGNRYLDHVVSETKR | 215 |
| | | S ++ P ++++F+++A HELKTP+A I AN +++E + + + KR | |
| Sbjct: | 189 | FSGMVIKPFVQNYEKQRRFITNAGHELKTPLAIISANNELVELMTGESEWTKSTSDQVKR | 248 |
| Query: | 216 | MEFLIEDLLNLSRLDEKRSKVNFKKLNLSVLCQEVLLTYESLAYEEEKCLNDTIEDDVWI | 275 |
| | | + LI ++ L+RL+E+ V ++ S + Q+ ++SL ++ K + TI+ ++ I | |
| Sbjct: | 249 | LTGLINQMITLARLEEQPDVV-LHMVDFSAIAQDAAEDFKSLVLKDGKRFDLTIQPNIMI | 307 |
| Query: | 276 | VGEESQIKQILIILLDNAIRHSLSKSAIQFSLK---QARRKAILTISNPSAIYSKEVMDN | 332 |
| | | EE + +++ IL+DNA ++ K ++ SL + R++A L +SN | |
| Sbjct: | 308 | KAEEKSLFELVTILVDNANKYCDPKGLVKVSLTTIGRRRKRAKLEVSNTYLEGKSIDYSR | 367 |
| Query: | 333 | LFERFYQAKDDH-ADSLSFGLGLSIAKAIVERHKGRIRAYQEKDQL | 377 |
| | | FERFY+ + H + +G+GLS+A+++V+ KG I + D + | |
| Sbjct: | 368 | FFERFYREDESHNSKEKGYGIGLSMAESMVKLFKGTITVNYKNDAI | 413 |

[10175] A related GBS gene <SEQ ID 8915> and protein <SEQ ID 8916> were also identified. Analysis of this protein sequence reveals the following:

| Lipop: Possible site: −1 Crend: 7 | | | |
|---|---|---|---|
| McG: Discrim Score: 17.50 | | | |
| GvH: Signal Score (−7.5): −2.9 | | | |
| Possible site: 26 | | | |
| >>> Seems to have an uncleavable N-term signal seq | | | |
| ALOM program | count: 2 | value: −13.64 | threshold: 0.0 |

| | | | |
|---|---|---|---|
| INTEGRAL | Likelihood = −13.64 | Transmembrane | 9-25 (5-32) |
| INTEGRAL | Likelihood = −11.62 | Transmembrane | 136-152 (132-164) |

| | | |
|---|---|---|
| PERIPHERAL | Likelihood = 2.49 | 345 |

modified ALOM score: 3.23
*** Reasoning Step: 3
----- Final Results -----
bacterial membrane --- Certainty = 0.6456 (Affirmative) < succ>
bacterial outside --- Certainty = 0.0000 (Not Clear) < succ>
bacterial cytoplasm --- Certainty = 0.0000 (Not Clear) < succ>

[10176] The protein has homology with the following sequences in the databases:

[chemical structure]

[10177] Based on this analysis, it was predicted that these proteins and their epitopes could be useful antigens for vaccines or diagnostics.

### EXAMPLE 1852

[10178] A DNA sequence (GBSx1959) was identified in S. agalactiae <SEQ ID 5753> which encodes the amino acid sequence <SEQ ID 5754>. This protein is predicted to be two-component response regulator (regX3). Analysis of this protein sequence reveals the following:

Possible site: 30
>>> Seems to have no N-terminal signal sequence
----- Final Results -----
bacterial cytoplasm --- Certainty = 0.1986 (Affirmative) < succ>
bacterial membrane --- Certainty = 0.0000 (Not Clear) < succ>
bacterial outside --- Certainty = 0.0000 (Not Clear) < succ>

[10179] The protein has homology with the following sequences in the GENPEPT database.

| >GP: BAB04091 GB: AP001508 two-component response regulator | | | |
|---|---|---|---|
| [Bacillus halodurans] | | | |
| Identities = 98/223 (43%), Positives = 145/223 (64%), Gaps = 5/223 (2%) | | | |
| Query: | 2 | RLLVVEDEKSIAEAIQALLADKGYSVDLAFDGDDGLEYILTGLYDLVLLDIMLPKRSGLS | 61 |
| | | R+L++EDEK IA +Q L +GY D AF G DGLE +DLVLLD+MLP+ SGL | |
| Sbjct: | 3 | RILIIEDEKKIARVLQLELEHEGYETDAAFSGSDGLETFQAHAWDLVLLDVMLPELSGLE | 62 |
| Query: | 62 | VLKRVREAGLETPIIFLTAKSQTYDKVNGLDLGADDYITKPFEADELLARIR--LRTRQS | 119 |
| | | VL+R+R TPII LTA++ DKV+GLDLGA+DYITKPFE +ELLAR+R LRT Q+ | |
| Sbjct: | 63 | VLRRIRMTDPVTPIILLTARNSIPDKVSGLDLGANDYITKPFEIEELLARVRACLRTVQT | 122 |
| Query: | 120 | SLIRANQLRLGNIRLNTDSHELESKESSVKLSNKEFLLMEVFMRNAKQIIPKNQLISKVW | 179 |
| | | + L + +N + +++ +++L+ KEF L+ F++N Q++ + Q+++ VW | |
| Sbjct: | 123 | RERVEDTLMFQELTINEKTRDVQRGNETIELTPKEFELLVFFIKNKGQVLSREQILTNVW | 182 |
| Query: | 180 | GPSDNSEYNQLEVFISFLRKKLRFLKADIEIITTKGFGYSLEE | 222 |
| | | G + N ++V++ +LRKKL +A + T +G GY L+E | |
| Sbjct: | 183 | GFDYYGDTNVIDVYVRYLRKKLSLTEA---LQTVRGVGYRLKE | 222 |

[10180] Based on this analysis, it was predicted that this protein and its epitopes, could be useful antigens for vaccines or diagnostics.

### EXAMPLE 1853

[10181] A DNA sequence (GBSx1960) was identified in S. agalactiae <SEQ ID 5755> which encodes the amino acid sequence <SEQ ID 5756>. This protein is predicted to be 50S ribosomal protein L34-related protein. Analysis of this protein sequence reveals the following:

```
Possible site: 32
>>> Seems to have no N-terminal signal sequence
----- Final Results -----
                            bacterial cytoplasm --- Certainty = 0.5923(Affirmative) < succ>
                              bacterial membrane --- Certainty = 0.0000(Not Clear) < succ>
                                bacterial outside --- Certainty = 0.0000(Not Clear) < succ>
```

[10182] The protein has homology with the following sequences in the GENPEPT database.

| >GP: AAC22660 GB: U32781 ribosomal protein L34 (rpL34) | | | |
|---|---|---|---|
| [Haemophilus influenzae Rd] | | | |
| Identities = 32/44 (72%), Positives = 37/44 (83%) | | | |
| Query: | 1 | MKRTYQPSKIRRQRKHGFRHRMSTKNGRRVLASRRRKGRKVLSA | 44 |
| | | MKRT+QPS ++R R HGFR RM+TKNGR+VLA RR KGRK LSA | |
| Sbjct: | 1 | MKRTFQPSVLKRSRTHGFRARMATKNGRQVLARRRAKGRKSLSA | 44 |

[10183] A related DNA sequence was identified in S. pyogenes <SEQ ID 5757> which encodes the amino acid sequence <SEQ ID 5758>. Analysis of this protein sequence reveals the following:

```
Possible site: 32
>>> Seems to have no N-terminal signal sequence
----- Final Results -----
                            bacterial cytoplasm --- Certainty = 0.5385(Affirmative) < succ>
                              bacterial membrane --- Certainty = 0.0000(Not Clear) < succ>
                                bacterial outside --- Certainty = 0.0000(Not Clear) < succ>
```

[10184] An alignment of the GAS and GBS proteins is shown below.

| Identities = 42/44 (95%), Positives = 44/44 (99%) | | | |
|---|---|---|---|
| Query: | 1 | MKRTYQPSKIRRQRKHGFRHRMSTKNGRRVLASRRRKGRKVLSA | 44 |
| | | +KRTYQPSKIRRQRKHGFRHRMSTKNGRRVLA+RRRKGRKVLSA | |
| Sbjct: | 1 | VKRTYQPSKIRRQRKHGFRHRMSTKNGRRVLAARRRKGRKVLSA | 44 |

[10185] Based on this analysis, it was predicted that these proteins and their epitopes could be useful antigens for vaccines or diagnostics.

### EXAMPLE 1854

[10186] A DNA sequence (GBSx1961) was identified in S. agalactiae <SEQ ID 5759> which encodes the amino acid sequence <SEQ ID 5760>. Analysis of this protein sequence reveals the following:

| Possible site: 61 | | | | |
|---|---|---|---|---|
| >>> Seems to have an uncleavable N-term signal seq | | | | |
| | INTEGRAL | Likelihood = −5.79 | Transmembrane | 122-138 (115-141) |
| | INTEGRAL | Likelihood = −4.35 | Transmembrane | 19-35 (15-40) |

```
----- Final Results -----
                              bacterial membrane --- Certainty = 0.3314(Affirmative) < succ>
                                bacterial outside --- Certainty = 0.0000(Not Clear) < succ>
                            bacterial cytoplasm --- Certainty = 0.0000(Not Clear) < succ>
```

[10187] The protein has homology with the following sequences in the GENPEPT database.

| >GP: AAF95990 GB: AE004350 conserved hypothetical protein [Vibrio cholerae] | | | |
|---|---|---|---|
| Identities = 79/145 (54%), Positives = 117/145 (80%) | | | |
| Query: | 1 | MKTFVNNASKTVLSLWFGVMPTIMTVGTIALIISVSTPIFKILGTPFLPFLELLGIPEAD | 60 |
| | | +++ + + + + FGV+P +M +GTIAL+I+ T +F +LG PF+PFLELLG+PEA | |
| Sbjct: | 314 | VQSVIGEGIRNAVDMVFGVLPVVMGLGTIALVIAEYTSVFSLLGQPFIPFLELLGVPEAT | 373 |
| Query: | 61 | IASQTMIVGFSDMVVPSIMAAEIHSEMTRFIVATVSIVQLIYMSETGAVILGSKIPINIL | 120 |
| | | AS+T++VGF+DM +P+I+AA I +EMTRF++A +S+ QLIYMSE GA++LGS+IP+NI+ | |
| Sbjct: | 374 | AASKTIVVGFADMFIPAILAASIDNEMTRFVIAAMSVTQLIYMSEVGALLLGSRIPVNIV | 433 |
| Query: | 121 | ELFIIFIERTIISLPIIVLMAHLFF | 145 |
| | | ELF+IFI RT+I+LP+I +AHL F | |
| Sbjct: | 434 | ELFVIFILRTLITLPVIAAVAHLLF | 458 |

[10188] No corresponding DNA sequence was identified in S. pyogenes.

[10189] Based on this analysis, it was predicted that this protein and its epitopes, could be useful antigens for vaccines or diagnostics.

### EXAMPLE 1855

[10190] A DNA sequence (GBSx1962) was identified in S. agalactiae <SEQ ID 5761> which encodes the amino acid sequence <SEQ ID 5762>. This protein is predicted to be D,D-carboxypeptidase (dacA-2). Analysis of this protein sequence reveals the following:

```
Possible site: 23
>>> Seems to have no N-terminal signal sequence
----- Final Results -----
                            bacterial cytoplasm --- Certainty = 0.2443(Affirmative) < succ>
                              bacterial membrane --- Certainty = 0.0000(Not Clear) < succ>
                                bacterial outside --- Certainty = 0.0000(Not Clear) < succ>
```

[10191] A related GBS nucleic acid sequence <SEQ ID 9485> which encodes amino acid sequence <SEQ ID 9486> was also identified. A further related GBS nucleic acid sequence <SEQ ID 10945> which encodes amino acid sequence <SEQ ID 10946> was also identified.

[10192] The protein has homology with the following sequences in the GENPEPT database.

| >GP: CAA67776 GB: X99400 D,D-carboxypeptidase [Streptococcus pneumoniae] | | | |
|---|---|---|---|
| Identities = 193/383 (50%), Positives = 282/383 (73%), Gaps = 6/383 (1%) | | | |
| Query: | 1 | MAVDLDSGKILYEKDANKPAAIASLTKIMTVYMVYKEIDNGNLKWNTKVNISDYPYQLTR | 60 |
| | | +AV+ ++GKILYEKDA +P IAS+TK++TVY+VY+ ++NG++ +T V+ISDYPYQLT | |
| Sbjct: | 33 | IAVEANTGKILYEKDATQPVEIASITKLITVYLVYEALENGSITLSTPVDISDYPYQLTT | 92 |
| Query: | 61 | ESDASNVPLEKRRYTVKQLVDAAMISSANSAAIALAEHISGTESKFVDKMTAQLEKWGIH | 120 |
| | | S+ASN+P+E R YTV++L++A ++SSANSAAIALAE I+G+E FVD M A+L +WGI | |
| Sbjct: | 93 | NSEASNIPMEARNYTVEELLEATLVSSANSAAIALAEKIAGSEKDFVDMMRAKLLEWGIQ | 152 |
| Query: | 121 | DSHLVNASGLNNSMLGNHIYPKSSQNDENKMSARDIAIVAYHLVNEYPSILKITSKSVAK | 180 |
| | | D+ +VN +GLNN LG++IYP S +++ENK+SA D+AIVA +L+ +YP +L+IT K + | |
| Sbjct: | 153 | DATVVNTTGLNNETLGDNIYPGSKKDEENKLSAYDVAIVARNLIKKYPQVLEITKKPSST | 212 |
| Query: | 181 | FDKDIMHSYNYMLPDMPVFRPGITGLKTGTTELAGQSFIATSTESGMRLLTVIMHADKAD | 240 |
| | | F + S NYML MP +R G GLKTGTT+ AG+SF+ T+ E GMR++TV+++AD D | |
| Sbjct: | 213 | FAGMTITSTNYMLEGMPAYRGGFDGLKTGTTDKAGESFVGTTVEKGMRVITVVLNADHQD | 272 |
| Query: | 241 | KDKYARFTATNSLLNYITNTYEPNLVLAKGAAYKGKEASVRDGKEQSVIAVAKNDLKVVQ | 300 |
| | | + YARFTAT+SL++YI++T+ ++ +G AY+ +A V+DGKE +VIAVA D+ +++ | |
| Sbjct: | 273 | NNPYARFTATSSLMDYISSTFTLRKIVQQGDAYQDSKAPVQDGKEDTVIAVAPEDIYLIE | 332 |
| Query: | 301 | KKNITKQNQLKINF---KKELTAPITKKENLGKAYYVDLNKVGKGYLIKE-PSVHLVAKD | 356 |
| | | + + Q+ + F K + AP+ +G Y D + +G+GY+ E PS +VA | |
| Sbjct: | 333 | R--VGNQSSQSVQFTPDSKAIPAPLEAGTVVGHLTYEDKDLIGQGYITTERPSFEMVADK | 390 |
| Query: | 357 | SIERSFFLKVWWNHFVRYVNEKL | 379 |
| | | IE++FFLKVWWN FVR+VNEKL | |
| Sbjct: | 391 | KIEKAFFLFVWWNQFVRFVNEKL | 413 |

[10193] A related DNA sequence was identified in S. pyogenes <SEQ ID 5763> which encodes the amino acid sequence <SEQ ID 5764>. Analysis of this protein sequence reveals the following:

```
Possible site: 21
>>> Seems to have a cleavable N-term signal seq.
----- Final Results -----
                                bacterial outside --- Certainty = 0.3000(Affirmative) < succ>
                              bacterial membrane --- Certainty = 0.0000(Not Clear) < succ>
                            bacterial cytoplasm --- Certainty = 0.0000(Not Clear) < succ>
```

[10194] An alignment of the GAS and GBS proteins is shown below.

| Identities = 176/380 (46%), Positives = 257/380 (67%), Gaps = 3/380 (0%) | | | |
|---|---|---|---|
| Query: | 1 | MAVDLDSGKILYEKDANKPAAIASLTKIMTVYMVYKEIDNGNLKWNTKVNISDYPYQLTR | 60 |
| | | +AVDL+SGK+LYEKDA + +AS++K++T Y+VYEE+ G L W++ V IS+YPY+LT | |
| Sbjct: | 33 | IAVDLESGKVLYEKDAKEVVPVASVSKLLTTYLVYKEVSKGKLNWDSPVTISNYPYELTT | 92 |
| Query: | 61 | ESDASNVPLEKRRYTVKQLVDAAMISSANSAAIALAEHISGTESKFVDKMTAQLEKWGIH | 120 |
| | | SNVPL+KR+YTVK+L+ A ++++ANS AIALAE I GTE KFVDKM QL +WGI | |
| Sbjct: | 93 | NYTISNVPLDKRKYTVKELLSALVVNNANSPAIALAEKIGGTEPKFVDKMKKQLRQWGIS | 152 |
| Query: | 121 | DSHLVNASGLNNSMLGNHIYPKSSQNDENKMSARDIAIVAYHLVNEYPSILKITSKSVAK | 180 |
| | | D+ +VN++GL N LG + YP + +DEN A D+AI+A HL+ E+P +LK++SKS | |
| Sbjct: | 153 | DAKVVNSTGLTNHFLGANTYPNTEPDDENCFCATDLAIIARHLLLEFPEVLKLSSKSSTI | 212 |
| Query: | 181 | FDKDIMHSYNYMLPDMPVFRPGITGLKTGTTELAGQSFIATSTESGMRLLTVIMHADKAD | 240 |
| | | F ++SYNYML MP +R G+ GL G ++ AG SF+ATS E+ MR++TV+++AD++ | |
| Sbjct: | 213 | FAGQTIYSYNYMLKGMPCYREGVDGLFVGYSKKAGASFVATSVENQMRVITVVLNADQSH | 272 |
| Query: | 241 | KDKYARFTATNSLLNYITNTYEPNLVLAKGAAYKGKEASVRDGKEQSVIAVAKNDLKVVQ | 300 |
| | | +D A F TN LL Y+ ++ ++ K V D E++V VA+N L ++ | |
| Sbjct: | 273 | EDDLAIFKTTNQLLQYLLINFQKVQLIENNKPV--KTLYVLDSPEKTVKLVAQNSLFFIK | 330 |
| Query: | 301 | KKNITKQNQLKINFKKE-LTAPITKKENLGKAYYVDLNKVGKGYLIKEPSVHLVAKDSIE | 359 |
| | | + +N + I K + AP++K + LG+A D + +G+GYL PS++L+ + +I | |
| Sbjct: | 331 | PIHTKTKNTVHITKKSSTMIAPLSKGQVLGRATLQDKHLIGQGYLDTPPSINLILQKNIS | 390 |
| Query: | 360 | RSFFLKVWWNHFVRYVNEKL | 379 |
| | | +SFFLKVWWN FVRYVN L | |
| Sbjct: | 391 | KSFFLKVWWNRFVRYVNTSL | 410 |

[10195] Based on this analysis, it was predicted that these proteins and their epitopes could be useful antigens for vaccines or diagnostics.

### EXAMPLE 1856

[10196] A DNA sequence (GBSx1963) was identified in S. agalactiae <SEQ ID 5765> which encodes the amino acid sequence <SEQ ID 5766>. This protein is predicted to be penicillin binding protein 4 (pdp4) (dacA-1). Analysis of this protein sequence reveals the following:

| Possible site: 23 | | | | |
|---|---|---|---|---|
| >>> Seems to have a cleavable N-term signal seq. | | | | |
| | INTEGRAL | Likelihood = −12.58 | Transmembrane | 368-384 (363-394) |

```
----- Final Results -----
                              bacterial membrane --- Certainty = 0.6031(Affirmative) < succ>
                                bacterial outside --- Certainty = 0.0000(Not Clear) < succ>
                            bacterial cytoplasm --- Certainty = 0.0000(Not Clear) < succ>
```

[10197] The protein has homology with the following sequences in the GENPEPT database.

| >GP: CAA60582 GB: X87104 penicillin binding protein 4 [Staphylococcus | | | |
|---|---|---|---|
| aureus] | | | |
| Identities = 117/333 (35%), Positives = 188/333 (56%), Gaps = 8/333 (2%) | | | |
| Query: | 5 | IVSFLCILLSLTCVNSVQAEEHKDIMQITREAGY-DVKDINKPKASIVIDNKGHILWEDN | 63 |
| | | I+ LC+ LS+ + A +Q + GY + +P +++ + G +L++ N | |
| Sbjct: | 7 | IIIILCLTLSIMTPYAQAANSDVTPVQAANQYGYAGLSAAYEPTSAVNVSQTGQLLYQYN | 66 |
| Query: | 64 | ADLERDPASMSKMFTLYLLFEDLAKGKTSLNTTVTATETDQAISKIYEISNNNIHAGVAY | 123 |
| | | D + +PASM+K+ T+YL E + KG+ SL+ TVT T + +S + E+SN ++ G + | |
| Sbjct: | 67 | IDTKWNPASMTKLMTMYLTLEAVNKGQLSLDDTVTMTNKEYIMSTLPELSNTKLYPGQVW | 126 |
| Query: | 124 | PIRELITMTAVPSSNVATIMIANHLSQNNPDAFIKRINETAKKLGMTKTHFYNPSGAVAS | 183 |
| | | I +L+ +T SSN A +++A +S+N D F+ +N AK +GM THF NP+GA S | |
| Sbjct: | 127 | TIADLLQITVSNSSNAAALILAKKVSKNTSD-FVDLMNNKAKAIGMKNTHFVNPTGAENS | 185 |
| Query: | 184 | AFNGLYSPKEYDNNATNVTTARDLSILTYHFLKKYPDILNYTKYPEVKAMVGTPYEETFT | 243 |
| | | ++P +Y + VTTARD +IL H +K+ P IL++T K + T + T+ | |
| Sbjct: | 186 | RLR-TFAPTKYKDQERTVTTARDYAILDLHVIKETPKILDFT-----KQLAPTTHAVTYY | 239 |
| Query: | 244 | TYNYSTPGAKFGLEGVDGLKTGSSPSAAFNALVTAKRQNTRLITVVLGVGDWSDQDGEYY | 303 |
| | | T+N+S GAK L G DGLKTGSS +A +N +T KR R+ V++G GD+ + GE | |
| Sbjct: | 240 | TFNFSLEGAKMSLPGTDGLKTGSSDTANYNHTITTKRGKFRINQVIMGAGDYKNLGGEKQ | 299 |
| Query: | 304 | RHPFVNALVEKGFKDAKNISSKTPVLKAVKPKK | 336 |
| | | R+ NAL+E+ F K + + + + KK | |
| Sbjct: | 300 | RNMMGNALMERSFDQYKYVKILSKGEQRINGKK | 332 |

[10198] A related DNA sequence was identified in S. pyogenes <SEQ ID 5767> which encodes the amino acid sequence <SEQ ID 5768>. Analysis of this protein sequence reveals the following:

| Possible site: 23 | | | |
|---|---|---|---|
| >>> Seems to have a cleavable N-term signal seq. | | | |
| INTEGRAL | Likelihood = −15.18 | Transmembrane | 371-387 (364-392) |

----- Final Results -----
bacterial membrane --- Certainty = 0.7071 (Affirmative) < succ>
bacterial outside --- Certainty = 0.0000 (Not Clear) < succ>
bacterial cytoplasm --- Certainty = 0.0000 (Not Clear) < succ>

[10199] The protein has homology with the following sequences in the databases:

| >GP: CAA62899 GB: X91786 penicillin-binding protein 4 [Staphylococcus | | | |
|---|---|---|---|
| aureus] | | | |
| Identities = 119/328 (36%), Positives = 184/328 (55%), Gaps = 19/328 (5%) | | | |
| Query: | 6 | ILTIFTFICF--SVMPLVHAEDVMDIT-----RQAGYT-VSEVNRPKSSIVVDANSSDIL | 57 |
| | | +++I +C S+M D+T Q GY +S P S++ V + + +L | |
| Sbjct: | 4 | LISIIIILCLTLSIMTPYAQATNSDVTPVQAANQYGYAGLSAAYEPTSAVNV-SQTGQLL | 62 |
| Query: | 58 | WQDNIDIPRDPASMSKMFTLYILFEELAKGKITMDTTITATPTDQAIANIYEISNNNIVA | 117 |
| | | +Q NID +PASM+K+ T+Y+ E + KG++++D T+T T + ++ + E+SN + | |
| Sbjct: | 63 | YQYNIDTKWNPASMTKLMTMYLTLEAVNKGQLSLDDTVTMTNKEYIMSTLPELSNTKLYP | 122 |
| Query: | 118 | GVAYPIRDLITMTAVPSSNAATVMIANYLSNNDASAFIDRVNATAKQLGMTNTHFSNASG | 177 |
| | | G + I DL+ +T SSNAA +++A +S N S F+D +N AK +GM NTHF N +G | |
| Sbjct: | 123 | GQVWTIADLLQITVSNSSNAAALILAKKVSKN-TSDFVDLMNNKAKAIGMKNTHFVNPTG | 181 |
| Query: | 178 | AAAQAFQGYYNPTKYDLSASNITTARDLSKLLYAFLKKYPEIISFTNKSVVHTMVGTPYE | 237 |
| | | A + + PTKY +TTARD + L +K+ P+I+ FT + T+ T | |
| Sbjct: | 182 | AENSRLR-TFAPTKYKDQERTVTTARDYAILDLHVIKETPKILDFTKQLAPTTLAVT--- | 237 |
| Query: | 238 | EEFHTYNHSLPDNQFGMKGVDGLKTGSSPSAAFNAMITAKRGKTRLITIVMGVGDWSDQN | 297 |
| | | ++T+N SL + + G DGLKTGSS +A +N IT KRGK R+ ++MG GD+ + | |
| Sbjct: | 238 | --YYTFNFSLEGAKMSLPGTDGLKTGSSDTANYNHTITTKRGKFRINQVIMGAGDYKNLG | 295 |
| Query: | 298 | GEFYRHPFVNALTEKGF---KDSKTLSK | 322 |
| | | GE R+ NAL E+ F K K LSK | |
| Sbjct: | 296 | GEKQRNMMGNALMERSFDQYKYVKILSK | 323 |

[10200] An alignment of the GAS and GBS proteins is shown below.

| Identities = 226/382 (59%), Positives = 289/382 (75%), Gaps = 7/382 (1%) | | | |
|---|---|---|---|
| Query: | 12 | LLSLTCVNSVQAEEHKDIMQITREAGYDVKDINKPKASIVID-NKGHILWEDNADLERDP | 70 |
| | | + + C + + +D+M ITR+AGY V ++N+PK+SIV+D N ILW+DN D+ RDP | |
| Sbjct: | 9 | IFTFICFSVMPLVHAEDVMDITRQAGYTVSEVNRPKSSIVVDANSSDILWQDNIDIPRDP | 68 |
| Query: | 71 | ASMSKMFTLYLLFEDLAKGKTSLNTTVTATETDQAISKIYEISNNNIHAGVAYPIRELIT | 130 |
| | | ASMSKMFTLY+LFE+LAKGK +++TT+TAT TDQAI+ IYEISNNNI AGVAYPIR+LIT | |
| Sbjct: | 69 | ASMSKMFTLYILFEELAKGKITMDTTITATPTDQAIANIYEISNNNIVAGVAYPIRDLIT | 128 |
| Query: | 131 | MTAVPSSNVATIMIANHLSQNNPDAFIKRINETAKKLGMTKTHFYNPSGAVASAFNGLYS | 190 |
| | | MTAVPSSN AT+MIAN+LS N+ AFI R+N TAK+LGMT THF N SGA A AF G Y+ | |
| Sbjct: | 129 | MTAVPSSNAATVMIANYLSNNDASAFIDRVNATAKQLGMTNTHFSNASGAAAQAFQGYYN | 188 |
| Query: | 191 | PKEYDNNATNVTTARDLSILTYHFLKKYPDILNYTKYPEVKAMVGTPYEETFTTYNYSTP | 250 |
| | | P +YD +A+N+TTARDLS L Y FLKKYP+I+++T V MVGTPYEE F TYN+S P | |
| Sbjct: | 189 | PTKYDLSASNITTARDLSKLLYAFLKKYPEIISFTNKSVVHTMVGTPYEEEFHTYNHSLP | 248 |
| Query: | 251 | GAKFGLEGVDGLKTGSSPSAAFNALVTAKRQNTRLITVVLGVGDWSDQDGEYYRHPFVNA | 310 |
| | | +FG++GVDGLKTGSSPSAAFNA++TAKR TRLIT+V+GVGDWSDQ+GE+YRHPFVNA | |
| Sbjct: | 249 | DNQFGMKGVDGLKTGSSPSAAFNAMITAKRGKTRLITIVMGVGDWSDQNGEFYRHPFVNA | 308 |
| Query: | 311 | LVEKGFKDAKNISSKT-PVLKAVKPKKEVTKTKTKSIQE--QPQTKEQWWTKTDQFIQSH | 367 |
| | | L EKGFKD+K +S K L+ + P+ TK +T S Q+ + K+ + + + F+ + | |
| Sbjct: | 309 | LTEKGFKDSKTLSKKARQKLEKLVPQ---TKKETSSKQQHFKATKKQSYLERVEDFMNHN | 365 |
| Query: | 368 | FVSILIVLGTIAILCLLAGIVL | 389 |
| | | +LI L I LL +V+ | |
| Sbjct: | 366 | HTFLLICLAIFIITILLLSLVV | 387 |

[10201] A related GBS gene <SEQ ID 8917> and protein <SEQ ID 8918> were also identified. Analysis of this protein sequence reveals the following:

| Lipop: Possible site: −1 Crend: 9 | | |
|---|---|---|
| McG: Discrim Score: −14.02 | | |
| GvH: Signal Score (−7.5): −2.54 | | |
| Possible site: 60 | | |
| >>> Seems to have no N-terminal signal sequence | | |
| ALOM program count: 1 | value: −12.58 | threshold: 0.0 |

| | | | |
|---|---|---|---|
| INTEGRAL | Likelihood = −12.58 | Transmembrane | 339-355 (334-365) |

| | | |
|---|---|---|
| PERIPHERAL | Likelihood = 1.38 | 99 |

modified ALOM score: 3.02
*** Reasoning Step: 3
----- Final Results -----
bacterial membrane --- Certainty = 0.6031 (Affirmative) < succ>
bacterial outside --- Certainty = 0.0000 (Not Clear) < succ>
bacterial cytoplasm --- Certainty = 0.0000 (Not Clear) < succ>

[10202] The protein has homology with the following sequences in the databases:

[chemical structure]

[10203] SEQ ID 8918 (GBS379) was expressed in E. coli as a His-fusion product. SDS-PAGE analysis of total cell extract is shown in FIG. 68 (lane 5; MW 44 kDa). It was also expressed in E. coli as a GST-fusion product. SDS-PAGE analysis of total cell extract is shown in FIG. 72 (lane 3; MW 68.9 kDa).

[10204] GBS379-GST was purified as shown in FIG. 212, lane 7.

[10205] Based on this analysis, it was predicted that these proteins and their epitopes could be useful antigens for vaccines or diagnostics.

### EXAMPLE 1857

[10206] A DNA sequence (GBSx1964) was identified in S. agalactiae <SEQ ID 5769> which encodes the amino acid sequence <SEQ ID 5770>. Analysis of this protein sequence reveals the following:

Possible site: 49
>>> Seems to have no N-terminal signal sequence
----- Final Results -----
bacterial cytoplasm --- Certainty = 0.4039 (Affirmative) < succ>
bacterial membrane --- Certainty = 0.0000 (Not Clear) < succ>
bacterial outside --- Certainty = 0.0000 (Not Clear) < succ>

[10207] The protein has homology with the following sequences in the GENPEPT database.

| >GP: CAB15256 GB: Z99120 similar to hypothetical proteins | | | |
|---|---|---|---|
| [Bacillus subtilis] | | | |
| Identities = 316/459 (68%), Positives = 386/459 (83%) | | | |
| Query: | 14 | DLGEYKFGFHDDVKPIYSTGKGLNEAVIRELSAAKGEPEWMLDFRLKSLETFNKMPMQTW | 73 |
| | | D+GEYK+GFHD I+ + +GL + ++ E+S K EP+WMLDFRLKSLE F MPM W | |
| Sbjct: | 7 | DIGEYKYGFHDKDVSIFRSERGLTKEIVEEISRMKEEPQWMLDFRLKSLEHFYNMPMPQW | 66 |
| Query: | 74 | GADLSDIDFDDIIYYQKASDKPARDWDDVPEKIKETFERIGIPEAERAYLAGASAQYESE | 133 |
| | | G DL+ ++FD+I YY K S++ R WD+VPE+IK+TF+++GIPEAE+ YLAG SAQYESE | |
| Sbjct: | 67 | GGDLNSLNFDEITYYVKPSERSERSWDEVPEEIKQTFDKLGIPEAEQKYLAGVSAQYESE | 126 |
| Query: | 134 | VVYHNMKEEYDKLGIVFTDTDSALKEYPELFKKYFAKLVPPTDNKLAALNSAVWSGGTFI | 193 |
| | | VVYHNMKE+ + GIVF DTDSALKE ++F++++AK++PPTDNK AALNSAVWSGG+FI | |
| Sbjct: | 127 | VVYHNMKEDLEAQGIVFKDTDSALKENEDIFREHWAKVIPPTDNKFAALNSAVWSGGSFI | 186 |
| Query: | 194 | YVPKGVKVDIPLQTYFRINNENTGQFERTLIIVDEGASVHYVEGCTAPTYSSNSLHAAIV | 253 |
| | | YVPKGVKV+ PLQ YFRIN+EN GQFERTLIIVDE ASVHYVEGCTAP Y++NSLH+A+V | |
| Sbjct: | 187 | YVPKGVKVETPLQAYFRINSENMGQFERTLIIVDEEASVHYVEGCTAPVYTTNSLHSAVV | 246 |
| Query: | 254 | EIFALDGAYMRYTTIQNWSDNVYNLVTKRATAKKDATVEWIDGNLGAKTTMKYPSVYLDG | 313 |
| | | EI G Y RYTTIQNW++NVYNLVTKR +++AT+EWIDGN+G+K TMKYP+ L G | |
| Sbjct: | 247 | EIIVKKGGYCRYTTIQNWANNVYNLVTKRTVCEENATMEWIDGNIGSKLTMKYPACILKG | 306 |
| Query: | 314 | EGARGTMLSIAFANKGQHQDTGAKMIHNAPHTSSSIVSKSIAKGGGKVDYRGQVTFNKDS | 373 |
| | | EGARG LSIA A KGQHQD GAKMIH AP+TSS+IVSKST+K GGKV YRG V F + + | |
| Sbjct: | 307 | EGARGMTLSIALAGKGQHQDAGAKMIHLAPNTSSTIVSKSISKQGGKVTYRGIVHFGRKA | 366 |
| Query: | 374 | KKSVSHIECDTILMDDISKSDTIPFNEIHNSQVALEHEAKVSKISEEQLYYLMSRGLSEA | 433 |
| | | + + S+IECDT++MD+ S SDTIP+NEI N ++LEHEAKVSK+SEEQL+YLMSRG+SE | |
| Sbjct: | 367 | EGARSNIECDTLIMDNKSTSDTIPYNEILNDNISLEHEAKVSKVSEEQLFYLMSRGISEE | 426 |
| Query: | 434 | EATEMIVMGFVEPFTKELPMEYAVELNRLISYEMEGSVG | 472 |
| | | EATEMIVMGF+EPFTKELPMEYAVE+NRLI +EMEGS+G | |
| Sbjct: | 427 | EATEMIVMGFIEPFTKELPMEYAVEMNRLIKFEMEGSIG | 465 |

[10208] A related DNA sequence was identified in S. pyogenes <SEQ ID 5771> which encodes the amino acid sequence <SEQ ID 5772>. Analysis of this protein sequence reveals the following:

Possible site: 47
>>> Seems to have no N-terminal signal sequence
----- Final Results -----
bacterial cytoplasm --- Certainty = 0.3780 (Affirmative) < succ>
bacterial membrane --- Certainty = 0.0000 (Not Clear) < succ>
bacterial outside --- Certainty = 0.0000 (Not Clear) < succ>

[10209] An alignment of the GAS and GBS proteins is shown below.

| Identities = 445/472 (94%), Positives = 461/472 (97%) | | | |
|---|---|---|---|
| Query: | 1 | MSEINEKVEPQPIDLGEYKFGFHDDVKPIYSTGKGLNEAVIRELSAAKGEPEWMLDFRLK | 60 |
| | | MS+INEKVEP+PIDLG+Y+FGFHDDV+PIYSTGKGL+EAV+RELSAAK EPEWML+FRLK | |
| Sbjct: | 1 | MSDINEKVEPKPIDLGDYQFGFHDDVEPIYSTGKGLSEAVVRELSAAKNEPEWMLEFRLK | 60 |
| Query: | 61 | SLETFNKMPMQTWGADLSDIDFDDIIYYQKASDKPARDWDDVPEKIKETFERIGIPEAER | 120 |
| | | SLETFNKMPMQTWGADLSDI+FDDIIYYQKASDKPAR WDDVPEKIKETF+RIGIPEAER | |
| Sbjct: | 61 | SLETFNKMPMQTWGADLSDINFDDIIYYQKASDKPARSWDDVPEKIKETFDRIGIPEAER | 120 |
| Query: | 121 | AYLAGASAQYESEVVYHNMKEEYDKLGIVFTDTDSALKEYPELFKKYFAKLVPPTDNKLA | 180 |
| | | AYLAGASAQYESEVVYHNMK E++KLGI+FTDTDSALKEYP+LFK+YFAKLVPPTDNKLA | |
| Sbjct: | 121 | AYLAGASAQYESEVVYHNMKGEFEKLGIIFTDTDSALKEYPDLFKQYFAKLVPPTDNKLA | 180 |
| Query: | 181 | ALNSAVWSGGTFIYVPKGVKVDIPLQTYFRINNENTGQFERTLIIVDEGASVHYVEGCTA | 240 |
| | | ALNSA WSGGTFIYVPKGVKVDIPLQTYFRINNENTGQFERTLIIVDEGASVHYVEGCTA | |
| Sbjct: | 181 | ALNSAAWSGGTFIYVPKGVKVDIPLQTYFRINNENTGQFERTLIIVDEGASVHYVEGCTA | 240 |
| Query: | 241 | PTYSSNSLHAAIVEIFALDGAYMRYTTIQNWSDNVYNLVTKRATAKKDATVEWIDGNLGA | 300 |
| | | PTYSSNSLHAAIVEIFALDGAYMRYTTIQNWSDNVYNLVTKRA A DATVEWIDGNLGA | |
| Sbjct: | 241 | PTYSSNSLHAAIVEIFALDGAYMRYTTIQNWSDNVYNLVTKRARALTDATVEWIDGNLGA | 300 |
| Query: | 301 | KTTMKYPSVYLDGEGARGTMLSIAFANKGQHQDTGAKMIHNAPHTSSSIVSKSIAKGGGK | 360 |
| | | KTTMKYPSVYLDG GARGTMLSIAFAN GQHQDTGAKMIHNAPHTSSSIVSKSIAK GGK | |
| Sbjct: | 301 | KTTMKYPSVYLDGPGARGTMLSIAFANAGQHQDTGAKMIHNAPHTSSSIVSKSIAKSGGK | 360 |
| Query: | 361 | VDYRGQVTFNKDSKKSVSHIECDTILMDDISKSDTIPFNEIHNSQVALEHEAKVSKISEE | 420 |
| | | VDYRGQVTFNK SKKSVSHIECDTILMDDISKSDTIPFNEIHNSQVALEHEAKVSKISEE | |
| Sbjct: | 361 | VDYRGQVTFNKQSKKSVSHIECDTILMDDISKSDTIPFNEIHNSQVALEHEAKVSKISEE | 420 |
| Query: | 421 | QLYYLMSRGLSEAEATEMIVMGFVEPFTKELPMEYAVELNRLISYEMEGSVG | 472 |
| | | QLYYLMSRGLSE+EATEMIVMGFVEPFTKELPMEYAVELNRLISYEMEGSVG | |
| Sbjct: | 421 | QLYYLMSRGLSESEATEMIVMGFVEPFTKELPMEYAVELNRLISYEMEGSVG | 472 |

[10210] Based on this analysis, it was predicted that these proteins and their epitopes could be useful antigens for vaccines or diagnostics.

### EXAMPLE 1858

[10211] A DNA sequence (GBSx1965) was identified in S. agalactiae <SEQ ID 5773> which encodes the amino acid sequence <SEQ ID 5774>. This protein is predicted to be nitrogen fixation protein (nifU). Analysis of this protein sequence reveals the following:

Possible site: 61
>>> Seems to have no N-terminal signal sequence
----- Final Results -----
bacterial cytoplasm --- Certainty = 0.1078 (Affirmative) < succ>
bacterial membrane --- Certainty = 0.0000 (Not Clear) < succ>
bacterial outside --- Certainty = 0.0000 (Not Clear) < succ>

[10212] The protein has homology with the following sequences in the GENPEPT database.

| >GP: CAB15257 GB: Z99120 similar to NifU protein homolog [Bacillus subtilis] | | | |
|---|---|---|---|
| Identities = 72/139 (51%), Positives = 92/139 (65%) | | | |
| Query: | 4 | SKLDNLYMAVVADHSKHPHHHGFLEGVEQVQLNNPTCGDVISLSVKFDGNIISDIAFAGN | 63 |
| | | + LD LY V+ DH K+P + G L V +NNPTCGD I L++K DG+I+ D F G | |
| Sbjct: | 5 | ANLDTLYRQVIMDHYKNPRNKGVLNDSIVVDMNNPTCGDRIRLTMKLDGDIVEDAKFEGE | 64 |
| Query: | 64 | GCTISTASSSMMTDAVIGKTKEEALQLADVFSKMVQGDQNPKQEKLGDAEFLAGVSKFPQ | 123 |
| | | GC+IS AS+SMMT A+ GK E AL ++ +FS M+QG + LGD E L GVSKFP | |
| Sbjct: | 65 | GCSISMASASMMTQAIKGKDIETALSMSKIFSDMMQGKEYDDSIDLGDIEALQGVSKFPA | 124 |
| Query: | 124 | RIKCATLSWNALRKAIERD | 142 |
| | | RIKCATLSW AL K + ++ | |
| Sbjct: | 125 | RIKCATLSWKALEKGVAKE | 143 |

[10213] A related DNA sequence was identified in S. pyogenes <SEQ ID 5775> which encodes the amino acid sequence <SEQ ID 5776>. Analysis of this protein sequence reveals the following:

Possible site: 14
>>> Seems to have no N-terminal signal sequence
----- Final Results -----
bacterial cytoplasm --- Certainty = 0.1202 (Affirmative) < succ>
bacterial membrane --- Certainty = 0.0000 (Not Clear) < succ>
bacterial outside --- Certainty = 0.0000 (Not Clear) < succ>

[10214] An alignment of the GAS and GBS proteins is shown below.

| Identities = 114/146 (78%), Positives = 133/146 (91%) | | | |
|---|---|---|---|
| Query: | 1 | MALSKLDNLYMAVVADHSKHPHHHGFLEGVEQVQLNNPTCGDVISLSVKFDGNIISDIAF | 60 |
| | | MALSKL++LYMAVVADHSK PHHHG L+GVE VQLNNPTCGDVISL+VKFD + I DIAF | |
| Sbjct: | 1 | MALSKLNHLYMAVVADHSKRPHHHGQLDGVEAVQLNNPTCGDVISLTVKFDEDKIEDIAF | 60 |
| Query: | 61 | AGNGCTISTASSSMMTDAVIGKTKEEALQLADVFSKMVQGDQNPKQEKLGDAEFLAGVSK | 120 |
| | | AGNGCTISTASSSMMTDAVIGK+KEEAL LAD+FS+MVQG +NP Q++LG+AE LAGV+K | |
| Sbjct: | 61 | AGNGCTISTASSSMMTDAVIGKSKEEALALADIFSEMVQGQENPAQKELGEAELLAGVAK | 120 |
| Query: | 121 | FPQRIKCATLSWNALRKAIERDNQAE | 146 |
| | | FPQRIKC+TL+WNAL++AI+R A+ | |
| Sbjct: | 121 | FPQRIKCSTLAWNALKEAIKRSANAQ | 146 |

[10215] Based on this analysis, it was predicted that these proteins and their epitopes could be useful antigens for vaccines or diagnostics.

### EXAMPLE 1859

[10216] A DNA sequence (GBSx1966) was identified in S. agalactiae <SEQ ID 5777> which encodes the amino acid sequence <SEQ ID 5778>. This protein is predicted to be nitrogen fixation protein (nifS) (b1680). Analysis of this protein sequence reveals the following:

Possible site: 43
>>> Seems to have no N-terminal signal sequence
----- Final Results -----
bacterial cytoplasm --- Certainty = 0.2453 (Affirmative) < succ>
bacterial membrane --- Certainty = 0.0000 (Not Clear) < succ>
bacterial outside --- Certainty = 0.0000 (Not Clear) < succ>

[10217] The protein has homology with the following sequences in the GENPEPT database.

| >GP: CAB15258 GB: Z99120 similar to NifS protein homolog [Bacillus subtilis] | | | |
|---|---|---|---|
| Identities = 240/400 (60%), Positives = 306/400 (76%), Gaps = 5/400 (1%) | | | |
| Query: | 9 | LKQDFPILNQLVNDEPLIYLDNAATTQKPNQVLEALRDYYQNDNANVHRGVHTLAERATA | 68 |
| | | +++ FPIL+Q VN L+YLD+AAT+QKP V+E L YY N+NVHRGVHTL RAT | |
| Sbjct: | 6 | IREQFPILHQQVNGHDLVYLDSAATSQKPRAVIETLDKYYNQYNSNVHRGVHTLGTRATD | 65 |
| Query: | 69 | QYENAREKARQFLNAKLSKEILFTRGTTTGLNWVA-KFAESILERGDEVLISIMEHHSNI | 127 |
| | | YE AREK R+F+NAK EI+FT+GTTT LN VA +A + L+ GDEV+I+ MEHH+NI | |
| Sbjct: | 66 | GYEGAREKVRKFINAKSMAEIIFTKGTTTSLNMVALSYARANLKPGDEVVITYMEHHANI | 125 |
| Query: | 128 | IPWQQACERTGAKLVYAYLK-DGSLDLEDFYNKLSSKTKFVSLAHISNVLGCVTPVKAIA | 186 |
| | | IPWQQA + TGA L Y L+ DG++ LED ++S TK V+++H+SNVLG V P+K +A | |
| Sbjct: | 126 | IPWQQAVKATGATLKYIPLQEDGTISLEDVRETVTSNTKIVAVSHVSNVLGTVNPIKEMA | 185 |
| Query: | 187 | ERVHQVGAYMVVDGAQSAPHMAIDVQDLDCDFFALSGHKMLGPTGIGVLYGKESILDKMF | 246 |
| | | + H GA +VVDGAQS PHW IDVQDLDCDFFALS HKM GPTG+GVLYGK+++L+ M | |
| Sbjct: | 186 | KIAHDNGAVIVVDGAQSTPHMKIDVQDLDCDFFALSSHKMCGPTGVGVLYGKKALLENME | 245 |
| Query: | 247 | PVEFGGEMIDFVYEQSATWKELPWKFEAGTPNIAGAIAFGEALDYLTDVGMDEIHQYEQS | 306 |
| | | P EFGGEMIDFV +TWKELPWKFEAGTP IAGAI G A+D+L ++G+DEI ++E | |
| Sbjct: | 246 | PAEFGGEMIDFVGLYESTWKELPWKFEAGTPIIAGAIGLGAAIDFLEEIGLDEISRHEHK | 305 |
| Query: | 307 | LVSYVLPKLQAIDGLTIYGPSDAESHVGVIAFNLEGLHPHDVATAMDYEGVAVRAGHHCA | 366 |
| | | L +Y L + + +DG+T+YGP E G++ FNL+ +HPHDVAT +D EG+AVRAGHHCA | |
| Sbjct: | 306 | LAAYALERFRQLDGVTVYGP---EERAGLVTFNLDDVHPHDVATVLDAEGIAVRAGHHCA | 362 |
| Query: | 367 | QPLINHLGIHSAVRASFYFYNTKEDCDKLVDAIQKTKEFF | 406 |
| | | QPL+ L + + RASFY YNT+E+ DKLV+A+QKTKE+F | |
| Sbjct: | 363 | QPLMKWLDVTATARASFYLYNTEEEIDKLVEALQKTKEYF | 402 |

[10218] A related DNA sequence was identified in S. pyogenes <SEQ ID 5779> which encodes the amino acid sequence <SEQ ID 5780>. Analysis of this protein sequence reveals the following:

Possible site: 41
>>> Seems to have no N-terminal signal sequence
----- Final Results -----
bacterial cytoplasm --- Certainty = 0.3714 (Affirmative) < succ>
bacterial membrane --- Certainty = 0.0000 (Not Clear) < succ>
bacterial outside ---- Certainty = 0.0000 (Not Clear) < succ>

[10219] An alignment of the GAS and GBS proteins is shown below.

| Identities = 293/408 (71%), Positives = 349/408 (84%) | | | |
|---|---|---|---|
| Query: | 3 | LLDSYKLKQDFPILNQLVNDEPLIYLDNAATTQKPNQVLEALRDYYQNDNANVHRGVHTL | 62 |
| | | LLD+ +KQDF ILNQ VNDEPL+YLDNAATTQKP VLEAL+ YYQ DNANVHRGVHTL | |
| Sbjct: | 1 | LLDAKDIKQDFQILNQQVNDEPLVYLDNAATTQKPALVLEALQSYYQEDNANVHRGVHTL | 60 |
| Query: | 63 | AERATAQYENAREKARQFLNAKLSKEILFTRGTTTGLNWVAKFAESILERGDEVLISIME | 122 |
| | | AERAT +YE +R++ F++AK SKE+LFTRGTTT LNWVA+FAE +L DEVLISIME | |
| Sbjct: | 61 | AERATLKYEASRQQVADFIHAKSSKEVLFTRGTTTSLNWVARFAEQVLTPEDEVLISIME | 120 |
| Query: | 123 | HHSNIIPWQQACERTGAKLVYAYLKDGSLDLEDFYNKLSSKTKFVSLAHISNVLGCVTPV | 182 |
| | | HH+NIIPWQQAC++TGA+LVY YLKDG LD++D NKL++KT+FVSL H+SNVLGC+ P+ | |
| Sbjct: | 121 | HHANIIPWQQACQKTGARLVYVYLKDGQLDMDDLANKLTTKTRFVSLVHVSNVLGCINPI | 180 |
| Query: | 183 | KAIAERVHQVGAYMVVDGAQSAPHMAIDVQDLDCDFFALSGHKMLGPTGIGVLYGKESIL | 242 |
| | | K IA+ H GAY+VVDGAQS PH+AIDVQDLDCDFFA S HKMLGPTG+GVLYGKE +L | |
| Sbjct: | 181 | KEIAKLAHAKGAYLVVDGAQSVPHLAIDVQDLDCDFFAFSAHKMLGPTGLGVLYGKEELL | 240 |
| Query: | 243 | DKMPPVEFGGEMIDFVYEQSATWKELPWKFEAGTPNIAGAIAFGEALDYLTDVGMDEIHQ | 302 |
| | | +++ P+EFGGEMIDFVYEQ ATWKELPWKFEAGTP+IAGAI A+ YL +GM +IH | |
| Sbjct: | 241 | NQVEPLEFGGEMIDFVYEQEATWKELPWKFEAGTPHIAGAIGLSAAISYLQRLGMADIHA | 300 |
| Query: | 303 | YEQSLVSYVLPKLQAIDGLTIYGPSDAESHVGVIAFNLEGLHPHDVATAMDYEGVAVRAG | 362 |
| | | +E L++YVLPKL+AI+GLTIYGPS + G+I+FNL+ LHPHD+ATA+DYEGVAVRAG | |
| Sbjct: | 301 | HEAELIAYVLPKLEAIEGLTIYGPSQPSARSGLISFNLDDLHPHDLATALDYEGVAVRAG | 360 |
| Query: | 363 | HHCAQPLINHLGIHSAVRASFYFYNTKEDCDKLVDAIQKTKEFFNGTL | 410 |
| | | HHCAQPL+++LG+ + VRASFY YNTK DCD+LV+AI K KEFFNGTL | |
| Sbjct: | 361 | HHCAQPLLSYLGVPATVRASFYIYNTKADCDRLVEAILKAKEFFNGTL | 408 |

[10220] Based on this analysis, it was predicted that these proteins and their epitopes could be useful antigens for vaccines or diagnostics.

### EXAMPLE 1860

[10221] A DNA sequence (GBSx1967) was identified in S. agalactiae <SEQ ID 5781> which encodes the amino acid sequence <SEQ ID 5782>. Analysis of this protein sequence reveals the following:

Possible site: 14
>>> Seems to have no N-terminal signal sequence
----- Final Results -----
bacterial cytoplasm --- Certainty = 0.1441 (Affirmative) < succ>
bacterial membrane --- Certainty = 0.0000 (Not Clear) < succ>
bacterial outside --- Certainty = 0.0000 (Not Clear) < succ>

[10222] The protein has homology with the following sequences in the GENPEPT database.

| >GP: BAB07189 GB: AP001518 unknown conserved protein [Bacillus halodurans] | | | |
|---|---|---|---|
| Identities = 171/430 (39%), Positives = 267/430 (61%), Gaps = 15/430 (3%) | | | |
| Query: | 1 | MSKEAILNFLQAKGEPTWLQELRLKAFEKIEELELPVIERVKFHRWNLG--DGTILENDY | 58 |
| | | + KE + +F A+ EP W +++RLK FE +E LELP ++ K WN D + E | |
| Sbjct: | 9 | IDKEYVQSFSDARNEPQWFKDIRLKGFELVETLELPKPDKTKITSWNFTNFDHKLPEVSP | 68 |
| Query: | 59 | TANVPDFTE---------LGNNPKLVQIGTQTVLEQVPMELIEKGVVFTDFYSALEEIPE | 109 |
| | | A++ + + LVQ V ++ L KGV+FTD +A++E + | |
| Sbjct: | 69 | VASIDELRDEVKGLIGEASDTQNLLVQRDATVVYSKLDEALKAKGVIFTDLLTAVKEHGD | 128 |
| Query: | 110 | VIERYFGK-ARPFEEDRLAAYHTAYFNSGAVLYIPDNVEITQPIEGLFYQDSQSKVPFNK | 168 |
| | | ++E+Y+ K A +E+RL A H A N G +Y+P NVEI P++ +F+ D++ FN | |
| Sbjct: | 129 | LVEKYYMKDAVKVDENRLTALHAALVNGGTFIYVPRNVEIEVPLQSVFWFDTEKAGLFN- | 187 |
| Query: | 169 | HILLIVGKNAKVSYLERFESIGDGTERTSANISVEVIAQAGSQIKFASIDRLGENVTTFI | 228 |
| | | H++++ N+ ++Y+E + S G +E ANI VEV A A +++ F ++D L VTT++ | |
| Sbjct: | 188 | HVIIVAEDNSSITYVENYASFG--SEEAVANIVVEVFAGANAKVSFGAVDNLAAGVTTYV | 245 |
| Query: | 229 | SRRGRHSSDATIDWALGVMNEGNVVADFDSDLIGDGSHANLKVVAASSGRQVQGIDTRVT | 288 |
| | | RR D+ ++WALG MN+GN V++ + L+GD S A+ K V+ G Q Q T++ | |
| Sbjct: | 246 | VRRAHVGRDSRVEWALGQMNDGNTVSENTTHLLGDNSWADTKTVSVGRGEQKQNFTTQIF | 305 |
| Query: | 289 | NYGCNSVGHILQHGVILERGTLTFNGIGHIIKGAKGADAQQESRVLMLSDKARSDANPIL | 348 |
| | | ++G +S G+IL+HGV+ E T FNGI I GA + +Q RVLMLS+KAR DANPIL | |
| Sbjct: | 306 | HNGKHSEGYILKHGVMREAATSIFNGISKIEHGATKSHGEQTERVLMLSEKARGDANPIL | 365 |
| Query: | 349 | LIDENDVTAGHAASIGQVDPEDLYYLMSRGLNQKTAEQLVIRGFLGTVIAEIPVKEVRDE | 408 |
| | | LIDE+DVTAGHAAS+G++DP ++YLMSRG+++ AE+LVI GFL V+ ++P++ V++ | |
| Sbjct: | 366 | LIDEDDVTAGHAASVGKIDPIQMFYLMSRGISRAEAERLVIHGFLAPVVGQLPIESVKER | 425 |
| Query: | 409 | MIAVIDTRLE | 418 |
| | | ++ I+ K++ | |
| Sbjct: | 426 | LVEAIERKVK | 435 |

[10223] A related DNA sequence was identified in S. pyogenes <SEQ ID 5783> which encodes the amino acid sequence <SEQ ID 5784>. Analysis of this protein sequence reveals the following:

| Possible site: 14 | | | |
|---|---|---|---|
| >>> Seems to have no N-terminal signal sequence | | | |
| INTEGRAL | Likelihood = −0.80 | Transmembrane | 387-403 (387-403) |

----- Final Results -----
bacterial membrane --- Certainty = 0.1319 (Affirmative) < succ>
bacterial outside --- Certainty = 0.0000 (Not Clear) < succ>
bacterial cytoplasm --- Certainty = 0.0000 (Not Clear) < succ>

[10224] The protein has homology with the following sequences in the databases:

| >GP: CAB15259 GB: Z99120 similar to hypothetical proteins [Bacillus subtilis] | | | |
|---|---|---|---|
| Identities = 177/428 (41%), Positives = 267/428 (62%), Gaps = 15/428 (3%) | | | |
| Query: | 3 | KEKLVAFSQAHAEPAWLQERRLAALEAIPNLELPTIERVKFHRWNLGDGT--LTENESLA | 60 |
| | | +E L +FS+ H EPAWL+ RL ALE +L +P ++ K WN + +NE L+ | |
| Sbjct: | 11 | QEYLKSFSEKHQEPAWLKNLRLQALEQAEDLPMPKPDKTKITNWNFTNFAKHTVDNEPLS | 70 |
| Query: | 61 | SVPDF-------IAIGDNPKLVQVGTQTVLEQLPMA--LIDKGVVFSDFYTALEEIPEVI | 111 |
| | | S+ D I I + K + V L ++ L DKGV+F+D TA E +++ | |
| Sbjct: | 71 | SLEDLTDEVKALIDIENEDKTLYVQRDQTPAHLSLSQELKDKGVIFTDILTAAREHSDLV | 130 |
| Query: | 112 | EAHFGQ-ALAFDEDKLAAYHTAYFNSAAVLYVPDHLEITTPIEAIFLQDSDSDVPFNKHV | 170 |
| | | E +F + + DE KL A H A N A LYVP ++++ TP++A+++ +S+ FN HV | |
| Sbjct: | 131 | EKYFMKDGVKVDEHKLTALHAALVNGGAFLYVPKNVQVETPVQAVYVHESNDTALFN-HV | 189 |
| Query: | 171 | LVIAGKESKFTYLERFESIGNATQKISANISVEVIAQAGSQIKFSAIDRLGPSVTTYISR | 230 |
| | | L++A S TY+E + S N + NI EVI + + + A+D L VTTY++R | |
| Sbjct: | 190 | LIVAEDHSSVTYVENYISTVNPKDAVF-NIISEVITGDNASVTYGAVDNLSSGVTTYVNR | 248 |
| Query: | 231 | RGRLE-KDANIDWALAVMNEGNVIADFDSDLIGQGSQADLKVVAASSGRQVQGIDTRVTN | 289 |
| | | RG +D+ I+WAL +MN+G+ I++ ++L G G+ D K V G Q + T++ + | |
| Sbjct: | 249 | RGAARGRDSKIEWALGLMNDGDTISENTTNLYGDGTYGDTKTVVVGRGEQTENFTTQIIH | 308 |
| Query: | 290 | YGQRTVGHILQHGVILERGTLTFNGIGHILKDAKGADAQQESRVLMLSDQARADANPILL | 349 |
| | | +G+ + G+IL+HGV+ + + FNGIG I A A+A+QESRVLMLS++AR DANPILL | |
| Sbjct: | 309 | FGKASEGYILKHGVMKDSASSIFNGIGKIEHGASKANAEQESRVLMLSEKARGDANPILL | 368 |
| Query: | 350 | IDENEVTAGHAASIGQVDPEDMYYLMSRGLDQETAERLVIRGFLGAVIAEIPIPSVRQEI | 409 |
| | | IDE++VTAGHAAS+G+VDP +YYLMSRG+ +E AERLVI GFL V+ E+PI V++++ | |
| Sbjct: | 369 | IDEDDVTAGHAASVGRVDPIQLYYLMSRGIPKEEAERLVIYGFLAPVVNELPIEGVKKQL | 428 |
| Query: | 410 | IKVLDEKL | 417 |
| | | + V++ K+ | |
| Sbjct: | 429 | VSVIERKV | 436 |

[10225] An alignment of the GAS and GBS proteins is shown below.

| Identities = 322/420 (76%), Positives = 368/420 (86%) | | | |
|---|---|---|---|
| Query: | 1 | MSKEAILNFLQAKGEPTWLQELRLKAFEKIEELELPVIERVKFHRWNLGDGTILENDYTA | 60 |
| | | M+KE ++ F QA EP WLQE RL A E I LELP IERVRFHRWNLGDGT+ EN+ A | |
| Sbjct: | 1 | MTKEKLVAFSQAHAEPAWLQERRLAALEAIPNLELPTIERVKFHRWNLGDGTLTENESLA | 60 |
| Query: | 61 | NVPDFTELGNNPKLVQIGTQTVLEQVPMELIEKGVVFTDFYSALEEIPEVIERYFGKARP | 120 |
| | | +VPDF +G+NPKLVQ+GTQTVLEQ+PM LI+KGVVF+DFY+ALEEIPEVIE +FG+A | |
| Sbjct: | 61 | SVPDFIAIGDNPKLVQVGTQTVLEQLPMALIDKGVVFSDFYTALEEIPEVIEAHFGQALA | 120 |
| Query: | 121 | FEEDRLAAYHTAYFNSGAVLYIPDNVEITQPIEGLFYQDSQSKVPFNKHILLIVGKNAKV | 180 |
| | | F+ED+LAAYHTAYFNS AVLY+PD++EIT PIE +F QDS S VPFNKH+L+I GK +K | |
| Sbjct: | 121 | FDEDKLAAYHTAYFNSAAVLYVPDHLEITTPIEAIFLQDSDSDVPFNKHVLVIAGKESKF | 180 |
| Query: | 181 | SYLERFESIGDGTERTSANISVEVIAQAGSQIKFASIDRLGENVTTFISRRGRHSSDATI | 240 |
| | | +YLERFESIG+ T++ SANISVEVIAQAGSQIKF++IDRLG +VTT+ISRRGR DA I | |
| Sbjct: | 181 | TYLERFESIGNATQKISANISVEVIAQAGSQIKFSAIDRLGPSVTTYISRRGRLEKDANI | 240 |
| Query: | 241 | DWALGVMNEGNVVADFDSDLIGDGSHANLKVVAASSGRQVQGIDTRVTNYGCNSVGHILQ | 300 |
| | | DWAL VMNEGNV+ADFDSDLIG GS A+LKVVAASSGRQVQGIDTRVTNYG +VGHILQ | |
| Sbjct: | 241 | DWALAVMNEGNVIADFDSDLIGQGSQADLKVVAASSGRQVQGIDTRVTNYGQRTVGHILQ | 300 |
| Query: | 301 | HGVILERGTLTFNGIGHIIKGAKGADAQQESRVLMLSDKARSDANPILLIDENDVTAGHA | 360 |
| | | HGVILERGTLTFNGIGHI+K AKGADAQQESRVLMLSD+AR+DANPILLIDEN+VTAGHA | |
| Sbjct: | 301 | HGVILERGTLTFNGIGHILKDAKGADAQQESRVLMLSDQARADANPILLIDENEVTAGHA | 360 |
| Query: | 361 | ASIGQVDPEDLYYLMSRGLNQKTAEQLVIRGFLGTVIAEIPVKEVRDEMIAVIDTKLEKR | 420 |
| | | ASIGQVDPED+YYLMSRGL+Q+TAE+LVIRGFLG VIAEIP+ VR E+I V+D KL R | |
| Sbjct: | 361 | ASIGQVDPEDMYYLMSRGLDQETAERLVIRGFLGAVIAEIPIPSVRQEIIKVLDEKLLNR | 420 |

[10226] Based on this analysis, it was predicted that these proteins and their epitopes could be useful antigens for vaccines or diagnostics.

### EXAMPLE 1861

[10227] A DNA sequence (GBSx1968) was identified in S. agalactiae <SEQ ID 5785> which encodes the amino acid sequence <SEQ ID 5786>. This protein is predicted to be ABC transporter, ATP-binding protein, Ycf16 family. Analysis of this protein sequence reveals the following:

```
Possible site: 59
>>> Seems to have no N-terminal signal sequence
----- Final Results -----
                            bacterial cytoplasm --- Certainty = 0.2253(Affirmative) < succ>
                              bacterial membrane --- Certainty = 0.0000(Not Clear) < succ>
                                bacterial outside --- Certainty = 0.0000(Not Clear) < succ>
```

[10228] The protein has homology with the following sequences in the GENPEPT database.

| >GP: CAB15260 GB: Z99120 similar to ABC transporter (ATP-binding | | | |
|---|---|---|---|
| protein) [Bacillus subtilis] | | | |
| Identities = 180/250 (72%), Positives = 212/250 (84%) | | | |
| Query: | 2 | SVLEIKNLHVSIEDKEILKGLNLTLKTGEIAAIMGPNGTGKSTLSAAIMGNPNYEVTAGE | 61 |
| | | S L IK+LHV IE KEILKG+NL +K GE A+MGPNGTGKSTLSAAIMG+P YEVT G | |
| Sbjct: | 4 | STLTIKDLHVEIEGKEILKGVNLEIKGGEFHAVMGPNGTGKSTLSAAIMGHPKYEVTKGS | 63 |
| Query: | 62 | ILFDGEDILELEVDERARLGLFLAMQYPSEVPGITNAEFIRAAMNAGKADDDKISIRQFI | 121 |
| | | I DG+D+LE+EVDERA+ GLFLAMQYPSE+ G+TNA+F+R+A+NA + + D+IS+ +FI | |
| Sbjct: | 64 | ITLDGKDVLEMEVDERAQAGLFLAMQYPSEISGVTNADFLRSAINARREEGDEISLMKFI | 123 |
| Query: | 122 | TKLDEKMELLGMKEEMAERYLNEGFSGGEKKRNEILQLLMLEPKFALLDEIDSGLDIDAL | 181 |
| | | K+DE ME L M EMA+RYLNEGFSGGEKKRNEILQL+M+EPK A+LDEIDSGLDIDAL | |
| Sbjct: | 124 | RKMDENMEFLEMDPEMAQRYLNEGFSGGEKKRNEILQLMMIEPKIAILDEIDSGLDIDAL | 183 |
| Query: | 182 | KVVSKGVNEMRGEGFGAMIITHYQRLLNYITPDKVHVMMDGKVVLSGGPELAVRLEKEGY | 241 |
| | | KVVSKG+H+MR E FG ++ITHYQRLLNYITPD VHVMM G+VV SGG ELA RLE EGY | |
| Sbjct: | 184 | KVVSKGINKMRSENFGCLMITHYQRLLNYITPDVVHVMMQGRVVKSGGAELAQRLEAEGY | 243 |
| Query: | 242 | AQIAEELGLE | 251 |
| | | I +ELG+E | |
| Sbjct: | 244 | DWIKQELGIE | 253 |

[10229] A related DNA sequence was identified in S. pyogenes <SEQ ID 5787> which encodes the amino acid sequence <SEQ ID 5788>. Analysis of this protein sequence reveals the following:

```
Possible site: 48
>>> Seems to have no N-terminal signal sequence
----- Final Results -----
                            bacterial cytoplasm --- Certainty = 0.2417(Affirmative) < succ>
                              bacterial membrane --- Certainty = 0.0000(Not Clear) < succ>
                                bacterial outside --- Certainty = 0.0000(Not Clear) < succ>
```

[10230] An alignment of the GAS and GBS proteins is shown below.

| Identities = 225/255 (88%), Positives = 241/255 (94%) | | | |
|---|---|---|---|
| Query: | 1 | MSVLEIKNLHVSIEDKEILKGLNLTLKTGEIAAIMGPNGTGKSTLSAAIMGNPNYEVTAG | 60 |
| | | MS+LEI NLHVSIE KEILKG+NLTLKTGE+AAIMGPNGTGKSTLSAAIMGNPNYEVT G | |
| Sbjct: | 1 | MSILEINNLHVSIEGKEILKGVNLTLKTGEVAAIMGPNGTGKSTLSAAIMGNPNYEVTQG | 60 |
| Query: | 61 | EILFDGEDILELEVDERARLGLFLAMQYPSEVPGITNAEFIRAAMNAGKADDDKISIRQF | 120 |
| | | +IL DG +IL+LEVDERARLGLFLAMQYPSE+PGITNAEF+RAAMNAGKAD+DKIS+R F | |
| Sbjct: | 61 | QILLDGVNILDLEVDERARLGLFLAMQYPSEIPGITNAEFMRAAMNAGKADEDKISVRDF | 120 |
| Query: | 121 | ITKLDEKMELLGMKEEMAERYLNEGFSGGEKKRNEILQLLMLEPKFALLDEIDSGLDIDA | 180 |
| | | ITKLDEKM LLGMKEEMAERYLNEGFSGGEKKRNEILQLLMLEPKFALLDEIDSGLDIDA | |
| Sbjct: | 121 | ITKLDEKMALLGMKEEMAERYLNEGFSGGEKKRNEILQLLMLEPKFALLDEIDSGLDIDA | 180 |
| Query: | 181 | LKVVSKGVNEMRGEGFGAMIITHYQRLLNYITPDKVHVMMDGKVVLSGGPELAVRLEKEG | 240 |
| | | LKVVSKGVNEMRG+ FGAMIITHYQRLLNYITPD VHVMMDG++VLSG LA RLEKEG | |
| Sbjct: | 181 | LKVVSKGVNEMRGKDFGAMIITHYQRLLNYITPDLVHVMMDGRIVLSGDAALATRLEKEG | 240 |
| Query: | 241 | YAQIAEELGLEYKEE | 255 |
| | | YA IA++LG+EYKEE | |
| Sbjct: | 241 | YAGIAQDLGIEYKEE | 255 |

[10231] Based on this analysis, it was predicted that these proteins and their epitopes could be useful antigens for vaccines or diagnostics.

### EXAMPLE 1862

[10232] A DNA sequence (GBSx1969) was identified in S. agalactiae <SEQ ID 5789> which encodes the amino acid sequence <SEQ ID 5790>. This protein is predicted to be RgpG (rfe). Analysis of this protein sequence reveals the following:

| Possible site: 40 | | | | |
|---|---|---|---|---|
| >>> Seems to have an uncleavable N-term signal seq | | | | |
| | INTEGRAL | Likelihood = −12.10 | Transmembrane | 312-328 (308-336) |
| | INTEGRAL | Likelihood = −10.03 | Transmembrane | 15-31 (6-41) |
| | INTEGRAL | Likelihood = −9.82 | Transmembrane | 205-221 (197-226) |
| | INTEGRAL | Likelihood = −8.60 | Transmembrane | 335-351 (329-358) |
| | INTEGRAL | Likelihood = −7.48 | Transmembrane | 257-273 (255-281) |
| | INTEGRAL | Likelihood = −5.52 | Transmembrane | 60-76 (56-79) |
| | INTEGRAL | Likelihood = −5.31 | Transmembrane | 151-167 (148-171) |
| | INTEGRAL | Likelihood = −4.88 | Transmembrane | 91-107 (90-108) |
| | INTEGRAL | Likelihood = −4.78 | Transmembrane | 184-200 (177-203) |
| | INTEGRAL | Likelihood = −3.13 | Transmembrane | 119-135 (119-135) |
| | INTEGRAL | Likelihood = −2.97 | Transmembrane | 229-245 (229-250) |

```
----- Final Results -----
                              bacterial membrane --- Certainty = 0.5840(Affirmative) < succ>
                                bacterial outside --- Certainty = 0.0000(Not Clear) < succ>
                            bacterial cytoplasm --- Certainty = 0.0000(Not Clear) < succ>
```

[10233] A related GBS nucleic acid sequence <SEQ ID 8919> which encodes amino acid sequence <SEQ ID 8920> was also identified. Analysis of this protein sequence reveals the following:

| Lipop: Possible site: −1 Crend: 10 | | | | |
|---|---|---|---|---|
| McG: Discrim Score: 5.18 | | | | |
| GvH: Signal Score (−7.5): −6.19 | | | | |
| Possible site: 15 | | | | |
| >>> Seems to have an uncleavable N-term signal seq | | | | |
| ALOM program count: 9 value: −12.10 threshold: 0.0 | | | | |
| | INTEGRAL | Likelihood = −12.10 | Transmembrane | 239-255 (235-263) |
| | INTEGRAL | Likelihood = −9.82 | Transmembrane | 132-148 (124-153) |
| | INTEGRAL | Likelihood = −8.60 | Transmembrane | 262-278 (256-285) |
| | INTEGRAL | Likelihood = −7.48 | Transmembrane | 184-200 (182-208) |
| | INTEGRAL | Likelihood = −5.31 | Transmembrane | 78-94 (75-98) |
| | INTEGRAL | Likelihood = −4.88 | Transmembrane | 18-34 (17-35) |
| | INTEGRAL | Likelihood = −4.78 | Transmembrane | 111-127 (104-130) |
| | INTEGRAL | Likelihood = −3.13 | Transmembrane | 46-62 (46-62) |
| | INTEGRAL | Likelihood = −2.97 | Transmembrane | 156-172 (156-177) |
| | PERIPHERAL | Likelihood = 12.63 | 284 | |

```
modified ALOM score: 2.92
*** Reasoning Step: 3
----- Final Results -----
                              bacterial membrane --- Certainty = 0.5840(Affirmative) < succ>
                                bacterial outside --- Certainty = 0.0000(Not Clear) < succ>
                            bacterial cytoplasm --- Certainty = 0.0000(Not Clear) < succ>
```

[10234] The protein has homology with the following sequences in the GENPEPT database.

| >GP: BAA82114 GB: AB022909 RgpG [Streptococcus mutans] | | | |
|---|---|---|---|
| Identities = 266/382 (69%), Positives = 317/382 (82%) | | | |
| Query: | 10 | TIEYIFVLIGAFLLSIILTPIIRVISLKVGAVDKPNARRINKVPMPSSGGLAIFLSFVVT | 69 |
| | | T++++ VLI L S++LTP++R +L+VGAVD PNARRINKVPMPS+GGLAI +SFV+ | |
| Sbjct: | 7 | TLKFVLVLIATLLTSLVLTPLVRFFALRVGAVDNPNARRINKVPMPSAGGLAIIISFVIA | 66 |
| Query: | 70 | TLFFMPMAASRHFIEVSYFHYILPVIIGGLVVTTTGFIDDIFELRPRYKMLGIIIAAIII | 129 |
| | | TL MPM SYF YILPV++G LV+ TGFIDD++EL P+ K LGI++ A+II | |
| Sbjct: | 67 | TLALMPMILKTQIGGKSYFEYILPVVLGALVIALTGFIDDVYELSPKIKFLGILLGAVII | 126 |
| Query: | 130 | WKFTHFRFDSFKIPIGGPLLEFGPILTFFLTVLWIISITNAINLIDGLDGLVSGVSIISL | 189 |
| | | W FT FRFDSFKIP GGP+L F P L+FFLT+LW+++ITNA+NLIDGLDGLVSGVS+ISL | |
| Sbjct: | 127 | WIFTDFRFDSFKIPFGGPMLHFNPFLSFFLTILWVVAITNAVNLIDGLDGLVSGVSMISL | 186 |
| Query: | 190 | ATMAVVSYFFLPKIDFFLTLTIVILIASIVGFFPYNYHPAIIYLGDAGALFIGFMIGVLS | 249 |
| | | TM +VSYFFL D FLTLTI +LI +I GFFPYNYHPAIIYLGD GALFIGFMI VLS | |
| Sbjct: | 187 | TTMGLVSYFFLYDTDIFLTLTIFVLIFAIAGFFPYNYHPAIIYLGDTGALFIGFMISVLS | 246 |
| Query: | 250 | LQGLKNSTAVAVITPVIILGVPILDTAVAIVRRKLSGKKISEADKMHLHHRLLSMGFTHR | 309 |
| | | LQGLKN+TAVAV+TP+I+LGVPI+DT VAI+RR LSG+K EAD MHLHHRLL+MGFTHR | |
| Sbjct: | 247 | LQGLKNATAVAVVTPIIVLGVPIVDTTVAIIRRTLSGQKFYEADNMHLHHRLLAMGFTHR | 306 |
| Query: | 310 | GAVLVVYGIAIIFSLIALLLNVSSRIGGIFLLLALLLAMEIFIEGLNIWGENRTPLFNLL | 369 |
| | | GAVLVVYGIA+ FSL++LLLNVSSR+GGI L++ + A+EIFIEGL IWG RTPLF LL | |
| Sbjct: | 307 | GAVLVVYGIAMFFSLVSLLLNVSSRLGGILLMIGVAFALEIFIEGLEIWGPKRTPLFRLL | 366 |
| Query: | 370 | KFIGNSDYRQSVIAKYSDKHQK | 391 |
| | | FIGNSDYRQ V+AKY K +K | |
| Sbjct: | 367 | AFIGNSDYRQEVVAKYRRKKKK | 388 |

[10235] A related DNA sequence was identified in S. pyogenes <SEQ ID 5791> which encodes the amino acid sequence <SEQ ID 5792>. Analysis of this protein sequence reveals the following:

| Possible site: 32 | | | | |
|---|---|---|---|---|
| >>> Seems to have an uncleavable N-term signal seq | | | | |
| | INTEGRAL | Likelihood = −8.28 | Transmembrane | 9-25 (1-33) |
| | INTEGRAL | Likelihood = −8.17 | Transmembrane | 201-217 (198-221) |
| | INTEGRAL | Likelihood = −7.64 | Transmembrane | 308-324 (305-329) |
| | INTEGRAL | Likelihood = −7.17 | Transmembrane | 55-71 (51-74) |
| | INTEGRAL | Likelihood = −7.06 | Transmembrane | 145-161 (138-170) |
| | INTEGRAL | Likelihood = −6.58 | Transmembrane | 260-276 (251-278) |
| | INTEGRAL | Likelihood = −6.21 | Transmembrane | 180-196 (172-198) |
| | INTEGRAL | Likelihood = −5.95 | Transmembrane | 331-347 (330-353) |
| | INTEGRAL | Likelihood = −5.68 | Transmembrane | 87-103 (82-104) |
| | INTEGRAL | Likelihood = −3.93 | Transmembrane | 113-129 (112-133) |
| | INTEGRAL | Likelihood = −2.60 | Transmembrane | 233-249 (232-250) |

```
----- Final Results -----
                              bacterial membrane --- Certainty = 0.4312(Affirmative) < succ>
                                bacterial outside --- Certainty = 0.0000(Not Clear) < succ>
                            bacterial cytoplasm --- Certainty = 0.0000(Not Clear) < succ>
```

[10236] The protein has homology with the following sequences in the databases:

| >GP: BAA82114 GB: AB022909 RgpG [Streptococcus mutans] | | | |
|---|---|---|---|
| Identities = 289/381 (75%), Positives = 334/381 (86%), Gaps = 1/381 (0%) | | | |
| Query: | 5 | TIDYVLVLIGALLMSLFLTPLVRFLAFRVGAVDNPNARRVNKVPMPTSGGLAIFMSFLVA | 64 |
| | | T+ +VLVLI LL SL LTPLVRF A RVGAVDNPNARR+NKVPMP++GGLAI +SF++A | |
| Sbjct: | 7 | TLKFVLVLIATLLTSLVLTPLVRFFALRVGAVDNPNARRINKVPMPSAGGLAIIISFVIA | 66 |
| Query: | 65 | SLGLIPIASKGAMFFGQTYFSYILPVVIGATVITLTGFLDDLYELSPKLKMFGILIGAVI | 124 |
| | | +L L+P+ K G++YF YILPVV+GA VI LTGF+DD+YELSPK+K GIL+GAVI | |
| Sbjct: | 67 | TLALMPMILK-TQIGGKSYFEYILPVVLGALVIALTGFIDDVYELSPKIKFLGILLGAVI | 125 |
| Query: | 125 | VWAFTDFKFDSFKIPFGGPLLVFGPFLTLFLTVLWIVSITNAINLIDGLDGLVSGVSIIS | 184 |
| | | +W FTDF+FDSFKIPFGGP+L F PFL+ FLT+LW+V+ITNA+NLIDGLDGLVSGVS+IS | |
| Sbjct: | 126 | IWIFTDFRFDSFKIPFGGPMLHFNPFLSFFLTILWVVAITNAVNLIDGLDGLVSGVSMIS | 185 |
| Query: | 185 | LVTMAIVSYFFLPQKDFFLTLTILVLISAIAGFFPYNYHPAMIYLGDTGALFIGFMIGVL | 244 |
| | | L TM +VSYFFL D FLTLTI VLI AIAGFFPYNYHPA+IYLGDTGALFIGFMI VL | |
| Sbjct: | 186 | LTTMGLVSYFFLYDTDIFLTLTIFVLIFAIAGFFPYNYHPAIIYLGDTGALFIGFMISVL | 245 |
| Query: | 245 | SLQGLKNSTAVAVVTPVIILGVPIMDTIVAIIRRSLSGQKFYEPDKMHLHHRLLSMGFTH | 304 |
| | | SLQGLKN+TAVAVVTP+I+LGVPI+DT VAIIRR+LSGQKFYE D MHLHHRLL+MGFTH | |
| Sbjct: | 246 | SLQGLKNATAVAVVTPIIVLGVPIVDTTVAIIRRTLSGQKFYEADNMHLHHRLLAMGFTH | 305 |
| Query: | 305 | RGAVLVVYGITMLFSLISLLLNVSSRIGGVLLMLGLLFGLEVFIEGLEIWGEKRTPLFNL | 364 |
| | | RGAVLVVYGI M FSL+SLLLNVSSR+GG+LLM+G+ F LE+FIEGLEIWG KRTPLF L | |
| Sbjct: | 306 | RGAVLVVYGIAMFFSLVSLLLNVSSRLGGILLMIGVAFALEIFIEGLEIWGPKRTPLFRL | 365 |
| Query: | 365 | LKFIGNSDYRQAMLLKWKEKK | 385 |
| | | L FIGNSDYRQ ++ K++ KK | |
| Sbjct: | 366 | LAFIGNSDYRQEVVAKYRRKK | 386 |

[10237] An alignment of the GAS and GBS proteins is shown below.

| Identities = 282/384 (73%), Positives = 334/384 (86%), Gaps = 1/384 (0%) | | | |
|---|---|---|---|
| Query: | 6 | MIPFTIEYIFVLIGAFLLSIILTPIIRVISLKVGAVDKPNARRINKVPMPSSGGLAIFLS | 65 |
| | | M FTI+Y+ VLIGA L+S+ LTP++R ++ +VGAVD PNARR+NKVPMP+SGGLAIF+S | |
| Sbjct: | 1 | MFSFTIDYVLVLIGALLMSLFLTPLVRFLAFRVGAVDNPNARRVNKVPMPTSGGLAIFMS | 60 |
| Query: | 66 | FVVTTLFFMPMAAS-RHFIEVSYFHYILPVIIGGLVVTTTGFIDDIFELRPRYKMLGIII | 124 |
| | | F+V +L +P+A+ F +YF YILPV+IG V+T TGF+DD++EL P+ KM GI+I | |
| Sbjct: | 61 | FLVASLGLIPIASKGAMFFGQTYFSYILPVVIGATVITLTGFLDDLYELSPKLKMFGILI | 120 |
| Query: | 125 | AAIIIWKFTHFRFDSFKIPIGGPLLEFGPILTFFLTVLWIISITNAINLIDGLDGLVSGV | 184 |
| | | A+I+W FT F+FDSFKIP GGPLL FGP LT FLTVLWI+SITNAINLIDGLDGLVSGV | |
| Sbjct: | 121 | GAVIVWAFTDFKFDSFKIPFGGPLLVFGPFLTLFLTVLWIVSITNAINLIDGLDGLVSGV | 180 |
| Query: | 185 | SIISLATMAVVSYFFLPKIDFFLTLTIVILIASIVGFFPYNYHPAIIYLGDAGALFIGFM | 244 |
| | | SIISL TMA+VSYFFLP+ DFFLTLTI++LI++I GFFPYNYHPA+IYLGD GALFIGFM | |
| Sbjct: | 181 | SIISLVTMAIVSYFFLPQKDFFLTLTILVLISAIAGFFPYNYHPAMIYLGDTGALFIGFM | 240 |
| Query: | 245 | IGVLSLQGLKNSTAVAVITPVIILGVPILDTAVAIVRRKLSGKKISEADKMHLHHRLLSM | 304 |
| | | IGVLSLQGLKNSTAVAV+TPVIILGVPI+DT VAI+RR LSG+K E DKMHLHHRLLSM | |
| Sbjct: | 241 | IGVLSLQGLKNSTAVAVVTPVIILGVPIMDTIVAIIRRSLSGQKFYEPDKMHLHHRLLSM | 300 |
| Query: | 305 | GFTHRGAVLVVYGIAIIFSLIALLLNVSSRIGGIFLLLALLLAMEIFIEGLNIWGENRTP | 364 |
| | | GFTHRGAVLVVYGI ++FSLI+LLLNVSSRIGG+ L+L LL +E+FIEGL IWGE RTP | |
| Sbjct: | 301 | GFTHRGAVLVVYGITMLFSLISLLLNVSSRIGGVLLMLGLLFGLEVFIEGLEIWGEKRTP | 360 |
| Query: | 365 | LFNLLKFIGNSDYRQSVIAKYSDK | 388 |
| | | LFNLLKFIGNSDYRQ+++ K+ +K | |
| Sbjct: | 361 | LFNLLKFIGNSDYRQAMLLKWKEK | 384 |

[10238] Based on this analysis, it was predicted that these proteins and their epitopes could be useful antigens for vaccines or diagnostics.

### EXAMPLE 1863

[10239] A DNA sequence (GBSx1970) was identified in S. agalactiae <SEQ ID 5793> which encodes the amino acid sequence <SEQ ID 5794>. This protein is predicted to be negative regulator of genetic competence. Analysis of this protein sequence reveals the following:

```
Possible site: 16
>>> Seems to have no N-terminal signal sequence
----- Final Results -----
                            bacterial cytoplasm --- Certainty = 0.3460(Affirmative) < succ>
                              bacterial membrane --- Certainty = 0.0000(Not Clear) < succ>
                                bacterial outside --- Certainty = 0.0000(Not Clear) < succ>
```

[10240] A related GBS nucleic acid sequence <SEQ ID 9483> which encodes amino acid sequence <SEQ ID 9484> was also identified.

[10241] The protein has homology with the following sequences in the GENPEPT database.

| >GP: BAA82113 GB: AB022909 negative regulator of genetic competence | | | |
|---|---|---|---|
| [Streptococcus mutans] | | | |
| Identities = 168/248 (67%), Positives = 205/248 (81%), Gaps = 9/248 (3%) | | | |
| Query: | 1 | MEMKQISETTLKITISMEDLEDRGMELKDFLIPQEKTEEFFYSVMDELDLPENFKNSGML | 60 |
| | | MEMKQISETTLKITISMEDLE+RGMELKDFLIPQEKTEEFFY+VMDELDLPENFK SGML | |
| Sbjct: | 1 | MEMKQISETTLKITISMEDLEERGMELKDFLIPQEKTEEFFYTVMDELDLPENFKGSGML | 60 |
| Query: | 61 | SFRVTPKKDRIDVFVTKSELSKDLNLEELADLGDISKMSPEDFFKTLEQSMLEKGDTDAH | 120 |
| | | SFRVTP+ DRIDVFVTKSE++K+LNLE+L+D DISKMSPEDFF TLE++M EKGD A | |
| Sbjct: | 61 | SFRVTPRNDRIDVFVTKSEINKNLNLEDLSDFDDISKMSPEDFFNTLEETMREKGDAAAL | 120 |
| Query: | 121 | AKLAEIENMMDKATQEVVEENVSEEQPEKEVETIGYVHYVFDFDNIEAVVRFSQTIDFPI | 180 |
| | | KLAEIE ++ TQ+ E+ ++E+ + YVH+V DF NI+ V+ F++T+D+ + | |
| Sbjct: | 121 | DKLAEIEKREEEKTQQ--EKGETKEKRD-------YVHFVLDFPNIQQVISFAKTVDYDV | 171 |
| Query: | 181 | EASELYKNGKGYHMTILLDLENQPSYFANLMYARMLEHANVGTKTRAYLKEHSIQLIHDD | 240 |
| | | EASEL+K YHMT+LL+LE++P Y+A+LM+ARMLEHA GTKTRAYL EH +QLI D | |
| Sbjct: | 172 | EASELFKESDAYHMTVLLNLEDKPDYYADLMFARMLEHAGRGTKTRAYLLEHGVQLIKAD | 231 |
| Query: | 241 | AISKLQMI | 248 |
| | | A+ +LQMI | |
| Sbjct: | 232 | ALQELQMI | 239 |

[10242] A related DNA sequence was identified in S. pyogenes <SEQ ID 5795> which encodes the amino acid sequence <SEQ ID 5796>. Analysis of this protein sequence reveals the following:

```
Possible site: 18
>>> Seems to have no N-terminal signal sequence
----- Final Results -----
                            bacterial cytoplasm --- Certainty = 0.3307(Affirmative) < succ>
                              bacterial membrane --- Certainty = 0.0000(Not Clear) < succ>
                                bacterial outside --- Certainty = 0.0000(Not Clear) < succ>
```

[10243] An alignment of the GAS and GBS proteins is shown below.

| Identities = 171/253 (67%), Positives = 209/253 (82%), Gaps = 2/253 (0%) | | | |
|---|---|---|---|
| Query: | 1 | MEMKQISETTLKITISMEDLEDRGMELKDFLIPQEKTEEFFYSVMDELDLPENFKNSGML | 60 |
| | | MEMKQISETTLKITISM+DLE+RGMELKDFLIPQEKTEEFFYSVMDELDLP+NFK+SGML | |
| Sbjct: | 3 | MEMKQISETTLKITISMDDLEERGMELKDFLIPQEKTEEFFYSVMDELDLPDNFKDSGML | 62 |
| Query: | 61 | SFRVTPKKDRIDVFVTKSELSKDLNLEELADLGDISKMSPEDFFKTLEQSMLEKGDTDAH | 120 |
| | | SFRVTP+KDR+DVFVTKSE++KD+NLE+LA+ GD+S+M+PEDFFK+LEQSM EKGD AH | |
| Sbjct: | 63 | SFRVTPRKDRLDVFVTKSEINKDINLEDLAEFGDMSQMTPEDFFKSLEQSMREKGDVKAH | 122 |
| Query: | 121 | AKLAEIENMMDKATQEVV--EENVSEEQPEKEVETIGYVHYVFDFDNIEAVVRFSQTIDF | 178 |
| | | KL +IE +M+ + + + ++ E E + YVHYV DF I V F++TIDF | |
| Sbjct: | 123 | EKLEKIEEIMEDVVEATLANQSEAADPSTNHESEPLDYVHYVLDFSTITEAVAFAKTIDF | 182 |
| Query: | 179 | PIEASELYKNGKGYHMTILLDLENQPSYFANLMYARMLEHANVGTKTRAYLKEHSIQLIH | 238 |
| | | IEASELYK YHMTILLD++ QPSYFAN+MYAR++EHAN G+KTRAYL+EH +QL+ | |
| Sbjct: | 183 | SIEASELYKGSNCYHMTILLDVQQQPSYFANVMYARLIEHANPGSKTRAYLQEHGLQLML | 242 |
| Query: | 239 | DDAISKLQMIEMG | 251 |
| | | D A+ +LQ IE+G | |
| Sbjct: | 243 | DGAVEQLQKIELG | 255 |

[10244] Based on this analysis, it was predicted that these proteins and their epitopes could be useful antigens for vaccines or diagnostics.

### EXAMPLE 1864

[10245] A DNA sequence (GBSx1971) was identified in S. agalactiae <SEQ ID 5797> which encodes the amino acid sequence <SEQ ID 5798>. This protein is predicted to be BacA (bacA). Analysis of this protein sequence reveals the following:

| Possible site: 17 | | | | |
|---|---|---|---|---|
| >>> Seems to have no N-terminal signal sequence | | | | |
| | INTEGRAL | Likelihood = −9.02 | Transmembrane | 115-131 (111-135) |
| | INTEGRAL | Likelihood = −8.97 | Transmembrane | 227-243 (219-247) |
| | INTEGRAL | Likelihood = −7.86 | Transmembrane | 48-64 (44-69) |
| | INTEGRAL | Likelihood = −7.27 | Transmembrane | 263-279 (260-279) |
| | INTEGRAL | Likelihood = −7.22 | Transmembrane | 87-103 (85-107) |
| | INTEGRAL | Likelihood = −3.50 | Transmembrane | 2-18 (1-19) |

```
----- Final Results -----
                              bacterial membrane --- Certainty = 0.4609(Affirmative) < succ>
                                bacterial outside --- Certainty = 0.0000(Not Clear) < succ>
                            bacterial cytoplasm --- Certainty = 0.0000(Not Clear) < succ>
```

[10246] The protein has homology with the following sequences in the GENPEPT database.

| >GP: AAD50462 GB: AF169967 BacA [Flavobacterium johnsoniae] | | | |
|---|---|---|---|
| Identities = 101/275 (36%), Positives = 165/275 (59%), Gaps = 22/275 (8%) | | | |
| Query: | 7 | LKALFLGVVEGVTEWLPVSSTGHLILVQEFMKLNQSKSFVEMFNIVIQLGAIMAVIVIYF | 66 |
| | | L+A+ L V+EG+TE+LPVSSTGH+I+ F + + F ++F IVIQLGAI++V+V+YF | |
| Sbjct: | 4 | LQAIVLAVIEGITEFLPVSSTGHMIIASSFFGIAH-EDFTKLFTIVIQLGAILSVVVLYF | 62 |
| Query: | 67 | KRLNPFQPGKSAREIRLTWQLWLKVVIACIPSILIALPFDNWFEAHFNFMIPIAIALIFY | 126 |
| | | KR FQ T + K+++A IP++++ L ++ + + +A++L+ | |
| Sbjct: | 63 | KRF--FQ----------TLDFYFKLLVAFIPAVVLGLLLSDFIDGLLENPVTVAVSLLIG | 110 |
| Query: | 127 | GFVFI----WVEKRNAHLKPQVTELASMSYKTAFLIGCFQVLSIVPGTSRSGATILGAII | 182 |
| | | G + + W NA Q ++Y A IG FQ ++++PG SRSGA+I+G + | |
| Sbjct: | 111 | GLILLKVDEWFNNPNAAETSQ-----KITYLQALKIGLFQCIAMIPGVSRSGASIVGGMS | 165 |
| Query: | 183 | IGTSRSVAADFTFFLAIPTMFGYSGLKAVKYFLDGNVLSLDQSLILLVASLTAFVVSLYV | 242 |
| | | SR+ AA+F+FFLA+PTM G + K Y+ G LS DQ IL++ ++ AF+V+L | |
| Sbjct: | 166 | QKLSRTTAAEFSFFLAVPTMLGATVKKCYDYYKAGFELSHDQVNILIIGNVVAFIVALLA | 225 |
| Query: | 243 | IRFLTDYVKRHDFTIFGKYRIVLGSLLILYWLVVH | 277 |
| | | I+ ++ ++ F +FG YRI+ G +L+L +H | |
| Sbjct: | 226 | IKTFISFLTKNGFKVFGYYRIIAGIILLLIHFFIH | 260 |

[10247] A related DNA sequence was identified in S. pyogenes <SEQ ID 5799> which encodes the amino acid sequence <SEQ ID 5800>. Analysis of this protein sequence reveals the following:

| Possible site: 56 | | | | |
|---|---|---|---|---|
| >>> Seems to have no N-terminal signal sequence | | | | |
| | INTEGRAL | Likelihood = −11.30 | Transmembrane | 225-241 (219-247) |
| | INTEGRAL | Likelihood = −9.24 | Transmembrane | 115-131 (109-135) |
| | INTEGRAL | Likelihood = −7.64 | Transmembrane | 48-64 (44-69) |
| | INTEGRAL | Likelihood = −7.43 | Transmembrane | 87-103 (85-108) |
| | INTEGRAL | Likelihood = −5.15 | Transmembrane | 263-279 (262-279) |
| | INTEGRAL | Likelihood = −3.82 | Transmembrane | 2-18 (1-19) |

```
----- Final Results -----
                              bacterial membrane --- Certainty = 0.5522(Affirmative) < succ>
                                bacterial outside --- Certainty = 0.0000(Not Clear) < succ>
                            bacterial cytoplasm --- Certainty = 0.0000(Not Clear) < succ>
```

[10248] The protein has homology with the following sequences in the databases:

| >GP: AAD50462 GB: AF169967 BacA [Flavobacterium johnsoniae] | | | |
|---|---|---|---|
| Identities = 102/269 (37%), Positives = 169/269 (61%), Gaps = 14/269 (5%) | | | |
| Query: | 7 | LKAIFFGIIEGITEWLPVSSTGHLILVQEFIRLNQDKAFIEMFNIVIQLGAIIAVMLIYF | 66 |
| | | L+AI +IEGITE+LPVSSTGH+I+ F + + F ++F IVIQLGAI++V+++YF | |
| Sbjct: | 4 | LQAIVLAVIEGITEFLPVSSTGHMIIASSFFGIAHED-FTKLFTIVIQLGAILSVVVLYF | 62 |
| Query: | 67 | ERLNPFQPGKTAREVQLTWQLWLKVVIACIPSILIAVPLDNWFEAHFYFMVPIAIALIVY | 126 |
| | | +R FQ T + K+++A IP++++ + L ++ + V +A++L++ | |
| Sbjct: | 63 | KRF--FQ----------TLDFYFKLLVAFIPAVVLGLLLSDFIDGLLENPVTVAVSLLIG | 110 |
| Query: | 127 | GIAFIWIEKRNAQQEPAVTELARMSYKTAFFIGCFQVLSIVPGTSRSGATILGAIILGTS | 186 |
| | | G+ + +++ A T +++Y A IG FQ ++++PG SRSGA+I+G + S | |
| Sbjct: | 111 | GLILLKVDEWFNNPNAAETS-QKITYLQALKIGLFQCIAMIPGVSRSGASIVGGMSQKLS | 169 |
| Query: | 187 | RTVAADFTFFLAIPTMFGYSGLKAVKFFLDGHHLDFAQVLILLVASLTAFVVSLLAIRFL | 246 |
| | | RT AA+F+FFLA+PTM G + K ++ G L QV IL++ ++ AF+V+LLAI+ | |
| Sbjct: | 170 | RTTAAEFSFFLAVPTMLGATVKKCYDYYKAGFELSHDQVNILIIGNVVAFIVALLAIKTF | 229 |
| Query: | 247 | TDYVKKHDFTIFGKYRIVLGSLLLIYSFF | 275 |
| | | ++ K+ F +FG YRI+ G +LL+ FF | |
| Sbjct: | 230 | ISFLTKNGFKVFGYYRIIAGIILLLIHFF | 258 |

[10249] An alignment of the GAS and GBS proteins is shown below.

| Identities = 227/272 (83%), Positives = 253/272 (92%) | | | |
|---|---|---|---|
| Query: | 1 | MLIIELLKALFLGVVEGVTEWLPVSSTGHLILVQEFMKLNQSKSFVEMFNIVIQLGAIMA | 60 |
| | | MLIIELLKA+F G++EG+TEWLPVSSTGHLILVQEF++LNQ K+F+EMFNIVIQLGAI+A | |
| Sbjct: | 1 | MLIIELLKAIFFGIIEGITEWLPVSSTGHLILVQEFIRLNQDKAFIEMFNIVIQLGAIIA | 60 |
| Query: | 61 | VIVIYFKRLNPFQPGKSAREIRLTWQLWLKVVIACIPSILIALPFDNWFEAHFNFMIPIA | 120 |
| | | V++IYF+RLNPFQPGK+ARE++LTWQLWLKVVIACIPSILIA+P DNWFEAHF FM+PIA | |
| Sbjct: | 61 | VMLIYFERLNPFQPGKTAREVQLTWQLWLKVVIACIPSILIAVPLDNWFEAHFYFMVPIA | 120 |
| Query: | 121 | IALIFYGFVFIWVEKRNAHLKPQVTELASMSYKTAFLIGCFQVLSIVPGTSRSGATILGA | 180 |
| | | IALI YG FIW+EKRNA +P VTELA MSYKTAF IGCFQVLSIVPGTSRSGATILGA | |
| Sbjct: | 121 | IALIVYGIAFIWIEKRNAQQEPAVTELARMSYKTAFFIGCFQVLSIVPGTSRSGATILGA | 180 |
| Query: | 181 | IIIGTSRSVAADFTFFLAIPTMFGYSGLKAVKYFLDGNVLSLDQSLILLVASLTAFVVSL | 240 |
| | | II+GTSR+VAADFTFFLAIPTMFGYSGLKAVK+FLDG+ L Q LILLVASLTAFVVSL | |
| Sbjct: | 181 | IILGTSRTVAADFTFFLAIPTMFGYSGLKAVKFFLDGHHLDFAQVLILLVASLTAFVVSL | 240 |
| Query: | 241 | YVIRFLTDYVKRHDFTIFGKYRIVLGSLLILY | 272 |
| | | IRFLTDYVK+HDFTIFGKYRIVLGSLL++Y | |
| Sbjct: | 241 | LAIRFLTDYVKKHDFTIFGKYRIVLGSLLLIY | 272 |

[10250] Based on this analysis, it was predicted that these proteins and their epitopes could be useful antigens for vaccines or diagnostics.

### EXAMPLE 1865

[10251] A DNA sequence (GBSx1972) was identified in S. agalactiae <SEQ ID 5801> which encodes the amino acid sequence <SEQ ID 5802>. Analysis of this protein sequence reveals the following:

| Possible site: 42 | | | | |
|---|---|---|---|---|
| >>> Seems to have no N-terminal signal sequence | | | | |
| | INTEGRAL | Likelihood = −8.65 | Transmembrane | 494-510 (488-519) |
| | INTEGRAL | Likelihood = −8.01 | Transmembrane | 263-279 (256-288) |
| | INTEGRAL | Likelihood = −5.95 | Transmembrane | 25-41 (20-43) |
| | INTEGRAL | Likelihood = −4.94 | Transmembrane | 475-491 (473-493) |

```
----- Final Results -----
                              bacterial membrane --- Certainty = 0.4461(Affirmative) < succ>
                                bacterial outside --- Certainty = 0.0000(Not Clear) < succ>
                            bacterial cytoplasm --- Certainty = 0.0000(Not Clear) < succ>
```

[10252] A related GBS nucleic acid sequence <SEQ ID 9481> which encodes amino acid sequence <SEQ ID 9482> was also identified.

[10253] The protein has homology with the following sequences in the GENPEPT database.

| >GP: AAB99606 GB: U67598 M. jannaschii predicted coding region MJ1577 | | | |
|---|---|---|---|
| [Methanococcus jannaschii] | | | |
| Identities = 41/172 (23%), Positives = 78/172 (44%), Gaps = 19/172 (11%) | | | |
| Query: | 479 | LISFVVIIYTLFLNYFTYFCIYLLLFGVILLLNKIIFMMTRKISNGYIVTEDGASRVYQW | 538 |
| | | +IS ++ ++ F+ ++ + ++ ++ II +T G ++ +W | |
| Sbjct: | 442 | VISILLAVFLYFIPKYSQTFNEVFYLSIVFVVQNIILALTPTSLFGRWKANYYKEKL-EW | 500 |
| Query: | 539 | TSFRNMLRDIKSFDRSELESIVLWNRILVYATLFGYADRVEKALR-VNQIDIPERFANID | 597 |
| | | +F+N L ++ + E I +W L+Y T G D+V +A++ +N ++ + I | |
| Sbjct: | 501 | DAFKNFLSNLAMIKKYSPEDISIWKDWLIYGTALGVGDKVVEAMKSLNLSELVADYVIIH | 560 |
| Query: | 598 | SHQFAISVNQSSNHFSTITEDVSHASNFSVNSGGSSGGFSGGGG--GGGGGA | 647 |
| | | S+ ++ + S + ST GS GGF GGG GGGGGA | |
| Sbjct: | 561 | SNYDSMKTSVDSVYSSTT GSGGGFGAGGGFGGGGGGA | 597 |

[10254] A related DNA sequence was identified in S. pyogenes <SEQ ID 5803> which encodes the amino acid sequence <SEQ ID 5804>. Analysis of this protein sequence reveals the following:

| Possible site: 21 | | | | |
|---|---|---|---|---|
| >>> Seems to have a cleavable N-term signal seq. | | | | |
| | INTEGRAL | Likelihood = −7.91 | Transmembrane | 486-502 (483-508) |
| | INTEGRAL | Likelihood = −5.89 | Transmembrane | 465-481 (460-483) |
| | INTEGRAL | Likelihood = −2.18 | Transmembrane | 244-260 (241-260) |

```
----- Final Results -----
                              bacterial membrane --- Certainty = 0.4163(Affirmative) < succ>
                                bacterial outside --- Certainty = 0.0000(Not Clear) < succ>
                            bacterial cytoplasm --- Certainty = 0.0000(Not Clear) < succ>
```

[10255] The protein has homology with the following sequences in the databases:

| >GP: AAB99606 GB: U67598 M. jannaschii predicted coding region MJ1577 | | | |
|---|---|---|---|
| [Methanococcus jannaschii] | | | |
| Identities = 59/263 (22%), Positives = 106/263 (39%), Gaps = 14/263 (5%) | | | |
| Query: | 369 | FLDMAFGNKVTLPVDQLFSQYHYDADTIKQLKKTYKGKKLEQEVRQSSEQVIKAMKKASA | 428 |
| | | ++ + G K+ + L + Y++D +K L K K + E +S Q K+ K | |
| Sbjct: | 346 | YIKIMNGGKIEILKTDLENLDVYESDVMKFLMKYSKNNVFDPEYIKSLAQKYKSSKDKLK | 405 |
| Query: | 429 | AITNNVLETIKKLNLPDTYRQMTPA--EKRKSNSVQGLGCLLLILNSGLLIYLAIKESGL | 486 |
| | | + + E K + P ++ A E R + L + ++L L ++ | |
| Sbjct: | 406 | KLKD---ELDKIMEYPRYSSKVVNAFLETRGKKIIIALLVISILLAVFLYFIPKYSQTFN | 462 |
| Query: | 487 | ALIYLALMVLTMCLGFYISLKLDQYKKLGIETPEGGVRLHQWQSFKNMIRDIDKFEDVAI | 546 |
| | | + YL+++ + I L L G +W +FKN + ++ + + | |
| Sbjct: | 463 | EVFYLSIVFVVQ----NIILALTPTSLFGRWKANYYKEKLEWDAFKNFLSNLAMIKKYSP | 518 |
| Query: | 547 | EGLVVWNRVLVYATLFGYAKKVERYLKVHRIALPEVYQAVRPGELSMVMYATTPTFVSSL | 606 |
| | | E + +W L+Y T G KV +K ++ + V + Y + T V S+ | |
| Sbjct: | 519 | EDISIWKDWLIYGTALGVGDKVVEAMKSLNLS-----ELVADYVIIHSNYDSMKTSVDSV | 573 |
| Query: | 607 | SSATTSSNFSVSSGGGISGGGGG | 629 |
| | | S+TT S +GGG GGGGG | |
| Sbjct: | 574 | YSSTTGSGGGFGAGGGFGGGGGG | 596 |

[10256] An alignment of the GAS and GBS proteins is shown below.

| Identities = 241/635 (37%), Positives = 372/635 (57%), Gaps = 18/635 (2%) | | | |
|---|---|---|---|
| Query: | 22 | MKKCFLAICLALSFFMVSVQADEVDYNIPHYEGNLTIHNDNSADFTEKVTYQFDSSYNGQ | 81 |
| | | MKK + + L S + ++A +VDY+I +YEG L + +N+A F +KVTYQFD+SYNGQ | |
| Sbjct: | 1 | MKKILMTLVLCFSLLGIRIKAADVDYSITNYEGQLLLSKENTARFEQKVTYQFDTSYNGQ | 60 |
| Query: | 82 | YVTLGTAGKLPDNFDINNKPQVEVSINGKVRKVSYQIEDLEDGYRLKVFNGGEAGDTVKV | 141 |
| | | Y++LG G LP F I+ KP+VEV NG+ VS + DL DGYRLK++N G+AGD V V | |
| Sbjct: | 61 | YISLGRTGHLPAGFAIDQKPKVEVYQNGQQVPVSQEFSDLGDGYRLKLYNAGQAGDKVDV | 120 |
| Query: | 142 | NVQWKLKNVLFMHKDVGELNWIPISDWDKTLEKVDFWISTDKKVALSRLWGHLGYL-KTP | 200 |
| | | V W+L ++L ++DV ELNW PISDWDKTLEKV ++T + S LW H GY K P | |
| Sbjct: | 121 | KVIWQLHHLLTAYQDVAELNWTPISDWDKTLEKVSLTVTTPTDIQDSNLWAHRGYYQKKP | 180 |
| Query: | 201 | PKIRQNNNRYHLTAFNVNKRLEFHGYWDRSYF--NLPTNSKNNYKKKIEYQEKMIERHGF | 258 |
| | | +++ N+RY + A NV+ +LE H YWD+ P + + K KI E I R | |
| Sbjct: | 181 | QVLKEGNSRYQINAKNVSGQLELHAYWDKKALLGKEPVDVSTSKKNKIVALETKISRRRT | 240 |
| Query: | 259 | ILSFLLRILLPSFFIIVTLFISIRVFLFRKKVNKYGQFPKEHHLYEAPEDLSPLELTQSI | 318 |
| | | +L L ++P + L+ 1+ +K+ N+Y H YE PEDLSPL LTQ+I | |
| Sbjct: | 241 | LLQLLFGKVIPLVEVGFLLWQLIQFTRLKKQFNRYHLANHTDHSYEVPEDLSPLVLTQAI | 300 |
| Query: | 319 | YSMSFKNFQ---DEEKKTHL---ISQEQLIQSILLDLIDRKVL----NYDDNLLSLANLD | 368 |
| | | Y SF E +K + ++ E L+Q+ LLDLID+KVL L ++ LD | |
| Sbjct: | 301 | YGQSFAYLSPTASESQKLLIPKGVTFEALVQATLLDLIDQKVLLLTKEEGKAYLEISQLD | 360 |
| Query: | 369 | RASDAEIDFIEFAFADSTSLKPDQLFSNYQFSYKETLRELKKQHKASDLQTQMRRRGSNA | 428 |
| | | R +D E F++ AF + +L DQLFS Y + +T+++LKK +K L+ ++R+ | |
| Sbjct: | 361 | RVTDEEAAFLDMAFGNKVTLPVDQLFSQYHYD-ADTIKQLKKTYKGKKLEQEVRQSSEQV | 419 |
| Query: | 429 | LSRITRLTRLISKDNINSLRRKGISSPYRKMSSEESKELSRLKRFSYLSPLISFVVIIYT | 488 |
| | | + + + + I+ + + ++++ + YR+M+ E ++ + ++ L +++ ++IY | |
| Sbjct: | 420 | IKAMKKASAAITNNVLETIKKLNLPDTYRQMTPAEKRKSNSVQGLGCLLLILNSGLLIY- | 478 |
| Query: | 489 | LFLNYFTYFCIYLLLFGVILLLNKIIFMMTRKISNGYIVTEDGASRVYQWTSFRNMLRDI | 548 |
| | | L + IYL L + + L I + + I T +G R++QW SF+NM+RDI | |
| Sbjct: | 479 | LAIKESGLALIYLALMVLTMCLGFYISLKLDQYKKLGIETPEGGVRLHQWQSFKNMIRDI | 538 |
| Query: | 549 | KSFDRSELESIVLWNRILVYATLFGYADRVEKALRVNQIDIPERFANIDSHQFAISVNQS | 608 |
| | | F+ +E +V+WNR+LVYATLFGYA +VE+ L+V++I +PE + + + ++ + + | |
| Sbjct: | 539 | DKFEDVAIEGLVVWNRVLVYATLFGYAKKVERYLKVHRIALPEVYQAVRPGELSMVMYAT | 598 |
| Query: | 609 | SNHFSTITEDVSHASNFSVNSGGSSGGFSGGGGGG | 643 |
| | | + F + + +SNFSV+SG GG SGGGGGG | |
| Sbjct: | 599 | TPTFVSSLSSATTSSNFSVSSG---GGISGGGGGG | 630 |

[10257] Based on this analysis, it was predicted that these proteins and their epitopes could be useful antigens for vaccines or diagnostics.

[10258] A related GBS gene <SEQ ID 8921> and protein <SEQ ID 8922> were also identified. Analysis of this protein sequence reveals the following:

| Lipop: Possible site: −1 Crend: 4 | | | |
|---|---|---|---|
| McG: Discrim Score: 10.29 | | | |
| GvH: Signal Score (−7.5): 3.11 | | | |
| Possible site: 23 | | | |
| >>> Seems to have a cleavable N-term signal seq. | | | |
| ALOM program | count: 3 | value: −8.65 | threshold: 0.0 |

| | | | |
|---|---|---|---|
| INTEGRAL | Likelihood = −8.65 | Transmembrane | 475-491 (469-500) |
| INTEGRAL | Likelihood = −8.01 | Transmembrane | 244-260 (237-269) |
| INTEGRAL | Likelihood = −4.94 | Transmembrane | 456-472 (454-474) |

| | | |
|---|---|---|
| PERIPHERAL | Likelihood = 2.28 | 540 |

modified ALOM score: 2.23
*** Reasoning Step: 3
----- Final Results -----
bacterial membrane --- Certainty = 0.4461 (Affirmative) < succ>
bacterial outside --- Certainty = 0.0000 (Not Clear) < succ>
bacterial cytoplasm --- Certainty = 0.0000 (Not Clear) < succ>

[10259] The protein has no homology with any sequences in the databases.

### EXAMPLE 1866

[10260] A DNA sequence (GBSx1973) was identified in S. agalactiae <SEQ ID 5805> which encodes the amino acid sequence <SEQ ID 5806>. This protein is predicted to be glutamine-binding periplasmic protein/glutamine transport system perme. Analysis of this protein sequence reveals the following:

| Possible site: 24 | | | |
|---|---|---|---|
| >>> Seems to have a cleavable N-term signal seq. | | | |
| INTEGRAL | Likelihood = −8.86 | Transmembrane | 301-317 (295-324) |
| INTEGRAL | Likelihood = −6.05 | Transmembrane | 479-495 (473-496) |
| INTEGRAL | Likelihood = −0.59 | Transmembrane | 369-385 (369-385) |

----- Final Results -----
bacterial membrane --- Certainty = 0.4545 (Affirmative) < succ>
bacterial outside --- Certainty = 0.0000 (Not Clear) < succ>
bacterial cytoplasm --- Certainty = 0.0000 (Not Clear) < succ>

[10261] The protein has homology with the following sequences in the GENPEPT database.

| >GP: BAA17584 GB: D90907 glutamine-binding periplasmic protein | | | |
|---|---|---|---|
| [Synechocystis sp.] | | | |
| Identities = 147/534 (27%), Positives = 256/534 (47%), Gaps = 75/534 (14%) | | | |
| Query: | 4 | ILLSLFTALLITFGGMTSIQADEYLRVGMEAAYAPFNWTQNDNTNGAVPIEGTDQYANGY | 63 |
| | | +LL++ LL F ++ + + V E + PF T E T Q G+ | |
| Sbjct: | 24 | VLLAIAIPLLPAFSQVSR----QTIIVATEPTFPPFEMTD----------EATGQLT-GF | 68 |
| Query: | 64 | DVQVAKKLAKKLNKKVVVVKTKWEGLVPALTSGKLDMIIAGMSPTEERKKEINFSKPYYI | 123 |
| | | DV + + + + V + ++G++PAL S + I+ ++ T ER + ++FS PY+ | |
| Sbjct: | 69 | DVDLIQAIGEAAQVTVDIQGYPFDGIIPALQSNTVGAAISAITITPERAQSVSFSSPYFK | 128 |
| Query: | 124 | SEPTLVVNAEGKYTNAKNISDFKNAKVTAQQGVYLYNLIDQINGVKKEVAMGDFNQLRQA | 183 |
| | | S L + + KN+ D + ++ G + + G K + +F+ + A | |
| Sbjct: | 129 | S--VLAIAVQDGNDTIKNLKDLEGKRLAVAIGTTGAMVATNVPGAK----VTNFDSITSA | 182 |
| Query: | 184 | VE---SGVVDAYVSERPDATSAQTANPKLKMIELHQGFKTSDADTNISVGMRKGDNRINQ | 240 |
| | | ++ +G DA +++RP A + L+ +++ + D I++ + INQ | |
| Sbjct: | 183 | LQELVNGNADAVINDRPVLLYA-IKDAGLRNVKISADVGSEDY-YGIAMPLAP-PGEINQ | 239 |
| Query: | 241 | VNQVL-----ESISRDKQIALMDKMIKEQ---------PSV------------KKEKNGK | 274 |
| | | +VL + I A+ +K E+---------PS+ + + N | |
| Sbjct: | 240 | TREVLNQGLFQIIENGTYNAIYEKWFGEKNPPFLPLVAPSLVGKVGTAQSLTERSQANPN | 299 |
| Query: | 275 | PNFFEQMATILKNNGSQFLRGTATTLLISMVGTIVGLFIGLLIGVFRTAPKSDNKLKAAL | 334 |
| | | NF + T+ +N +G+ T+L++ GL G + + A SD | |
| Sbjct: | 300 | DNF---LITLFRN----LFKGSILTVLLTAFSVFFGLIGGTGVAI---ALISD------- | 342 |
| Query: | 335 | QKLLGWLLNIYIEVFRGTPMIVQSMVIYYGTAQAF-----GVSLDRTLAAIFIVSINTGA | 389 |
| | | K L + IY+E FRGTPM+VQ +IY+G F G+++DR AAI +S+N A | |
| Sbjct: | 343 | IKPLQLIFRIYVEFFRGTPMLVQLFIIYFGLPALFKEIGLGITIDRFPAAIIALSLNVAA | 402 |
| Query: | 390 | YMSEIVRGGIFSVDKGQFEAATALGFTHGQTMRKIVLPQVVRNILPATGNEFVINIKDTS | 449 |
| | | Y++EI+RGGI S+D+GQ+EA +LG + QTM++++ PQ R ILP GNEF+ IKDTS | |
| Sbjct: | 403 | YLAEIIRGGIQSIDQGQWEACESLGMSPWQTMKEVIFPQAFRRILPPLGNEFITLIKDTS | 462 |
| Query: | 450 | VLNVISVVELYFSGNTVATQTYQYFQTFTIIAIIYFILTFTVTRILRYIEKRFD | 503 |
| | | + VI EL+ G + TY+ F+ + +A++Y +LT + + +++E D | |
| Sbjct: | 463 | LTAVIGFQELFREGQLIVATTYRAFEVYIAVALVYLLLTTISSFVFKWLENYMD | 516 |

[10262] There is also homology to SEQ ID 1194.

[10263] A related GBS gene <SEQ ID 8923> and protein <SEQ ID 8924> were also identified. Analysis of this protein sequence reveals the following:

| Lipop: Possible Site: −1 Crend: 2 | | | |
|---|---|---|---|
| McG: Discrim Score: 6.23 | | | |
| GvH: Signal Score (−7.5): 0.11 | | | |
| Possible site: 24 | | | |
| >>> Seems to have a cleavable N-term signal seq. | | | |
| ALOM program | count: 3 | value: −8.86 | threshold: 0.0 |

| | | | |
|---|---|---|---|
| INTEGRAL | Likelihood = −8.86 | Transmembrane | 301-317 (295-324) |
| INTEGRAL | Likelihood = −6.05 | Transmembrane | 479-495 (473-496) |

| | | |
|---|---|---|
| PERIPHERAL | Likelihood = 1.32 | 441 |

modified ALOM score: 2.27
*** Reasoning Step: 3
----- Final Results -----
bacterial membrane --- Certainty = 0.4545 (Affirmative) < succ>
bacterial outside --- Certainty = 0.0000 (Not Clear) < succ>
bacterial cytoplasm --- Certainty = 0.0000 (Not Clear) < succ>

[10264] The protein has homology with the following sequences in the databases:

[chemical structure]

[10265] There is also homology to SEQ ID 5804.

[10266] Based on this analysis, it was predicted that these proteins and their epitopes could be useful antigens for vaccines or diagnostics.

### EXAMPLE 1867

[10267] A DNA sequence (GBSx1974) was identified in S. agalactiae <SEQ ID 5807> which encodes the amino acid sequence <SEQ ID 5808>. This protein is predicted to be ATP-binding. Analysis of this protein sequence reveals the following:

Possible site: 44
>>> Seems to have no N-terminal signal sequence
----- Final Results -----
bacterial cytoplasm --- Certainty = 0.3208 (Affirmative) < succ>
bacterial membrane --- Certainty = 0.0000 (Not Clear) < succ>
bacterial outside --- Certainty = 0.0000 (Not Clear) < succ>

[10268] The protein has homology with the following sequences in the GENPEPT database.

| >GP: CAB73160 GB: AL139076 putative glutamine transport ATP-binding | | | |
|---|---|---|---|
| protein [Campylobacter jejuni] | | | |
| Identities = 132/241 (54%), Positives = 178/241 (73%), Gaps = 1/241 (0%) | | | |
| Query: | 5 | ILEIKHLKKSYGSNEVLKDISLSVNKGEVISIIGSSGSGKSTFLRSINLLEEPSGGEILY | 64 |
| | | ++E+K+L+K YG EVLK+I+ +++KG+VI+IIG SG GKSTFLR IN LE GEIL | |
| Sbjct: | 1 | MIEVKNLQKKYGELEVLKNINTTISKGDVIAIIGPSGGGKSTFLRCINRLELADSGEILI | 60 |
| Query: | 65 | HGHNVLEKGYDLNNYREKLGMVFQSFNLFENLNILENAIVAQTTVLKRERQEAEKIAKEN | 124 |
| | | + N+L+K D+N R+K+ MVFQ FNLF N N++EN + ++EA K AK | |
| Sbjct: | 61 | NKQNILDKEIDINKIRQKVSMVFQHFNLFANKNVMENLCLTPIKTGILSQEEAIKKAKLL | 120 |
| Query: | 125 | LNAVGMTEQYWKAKPKQLSGGQKQRVAIARALSVNPEAILFDEPTSALDPEMVGEVLKTM | 184 |
| | | L VG+ ++ P +LSGGQKQR+AIAR+L +NP+ ILFDEPTSALDPEM+GEVL M | |
| Sbjct: | 121 | LAKVGLADKE-NIMPHKLSGGQKQRIAIARSLMMNPDVILFDEPTSALDPEMIGEVLSIM | 179 |
| Query: | 185 | QDLAKSGLTMIIVTHEMEFAKEVSDRVIFMDKGIIAEQGTPKQLFENPTQERTKEFLQRFL | 245 |
| | | +D+AK GLTM++VTHEM FA+ V++R+ FMDKG IA +PK++FENP+ ER +EFL + L | |
| Sbjct: | 180 | KDVAKEGLTMLVVTHEMGFARNVANRIFFMDKGKIAVDASPKEVFENPSNERLREFLNKVL | 240 |

[10269] A related DNA sequence was identified in S. pyogenes <SEQ ID 2157> which encodes the amino acid sequence <SEQ ID 2158>. Analysis of this protein sequence reveals the following:

Possible site: 27
>>> Seems to have no N-terminal signal sequence
----- Final Results -----
bacterial cytoplasm --- Certainty = 0.1170 (Affirmative) < succ>
bacterial membrane --- Certainty = 0.0000 (Not Clear) < succ>
bacterial outside --- Certainty = 0.0000 (Not Clear) < succ>

[10270] An alignment of the GAS and GBS proteins is shown below.

| Identities = 212/246 (86%), Positives = 237/246 (96%) | | | |
|---|---|---|---|
| Query: | 1 | MTQAILEIKHLKKSYGSNEVLKDISLSVNKGEVISIIGSSGSGKSTFLRSINLLEEPSGG | 60 |
| | | M+ +I+EIK+LKKSYGSNEVLKDISLSVNKGEVISIIGSSGSGKST LRSINLLEEPS G | |
| Sbjct: | 24 | MSNSIIEIKNLKKSYGSNEVLKDISLSVNKGEVISIIGSSGSGKSTLLRSINLLEEPSAG | 83 |
| Query: | 61 | EILYHGHNVLEKGYDLNNYREKLGMVFQSFNLFENLNILENAIVAQTTVLKRERQEAEKI | 120 |
| | | +IL+HG +VL + Y+L +YREKLGMVFQSFNLFENLN+LENAIVAQTTVLKR+R +AE+I | |
| Sbjct: | 84 | QILFHGEDVLAEHYNLTHYREKLGMVFQSFNLFENLNVLENAIVAQTTVLKRDRAQAEQI | 143 |
| Query: | 121 | AKENLNAVGMTEQYWKAKPKQLSGGQKQRVAIARALSVNPEAILFDEPTSALDPEMVGEV | 180 |
| | | AKENLNAVGMTEQYW+AKPKQLSGGQKQRVAIARALSVNPEA+LFDEPTSALDPEMVGEV | |
| Sbjct: | 144 | AKENLNAVGMTEQYWQAKPKQLSGGQKQRVAIARALSVNPEAMLFDEPTSALDPEMVGEV | 203 |
| Query: | 181 | LKTMQDLAKSGLTMIIVTHEMEFAKEVSDRVIFMDKGIIAEQGTPKQLFENPTQERTKEF | 240 |
| | | LKTMQDLAKSGLTMIIVTHEMEFA++VSDR+IFMDKG+I E+G+P+Q+FENPTQ+RTKEF | |
| Sbjct: | 204 | LKTMQDLAKSGLTMIIVTHEMEFARDVSDRIIFMDKGLITEEGSPQQIFENPTQDRTKEF | 263 |
| Query: | 241 | LQRFLK | 246 |
| | | LQRFLK | |
| Sbjct: | 264 | LQRFLK | 269 |

[10271] Based on this analysis, it was predicted that these proteins and their epitopes could be useful antigens for vaccines or diagnostics.

### EXAMPLE 1868

[10272] A DNA sequence (GBSx1976) was identified in S. agalactiae <SEQ ID 5809> which encodes the amino acid sequence <SEQ ID 5810>. This protein is predicted to be hypersensitive-induced response protein. Analysis of this protein sequence reveals the following:

| Possible site: 31 | | | |
|---|---|---|---|
| >>> Seems to have an uncleavable N-term signal seq | | | |
| INTEGRAL | Likelihood = −17.94 | Transmembrane | 4-20 (1-28) |

----- Final Results -----
bacterial membrane --- Certainty = 0.8175 (Affirmative) < succ>
bacterial outside --- Certainty = 0.0000 (Not Clear) < succ>
bacterial cytoplasm --- Certainty = 0.0000 (Not Clear) < succ>

[10273] A related GBS nucleic acid sequence <SEQ ID 9479> which encodes amino acid sequence <SEQ ID 9480> was also identified.

[10274] The protein has homology with the following sequences in the GENPEPT database.

| >GP: AAF68390 GB: AF236374 hypersensitive-induced response protein | | | |
|---|---|---|---|
| [Zea mays] | | | |
| Identities = 127/275 (46%), Positives = 174/275 (63%), Gaps = 1/275 (0%) | | | |
| Query: | 19 | ITSLYVVKQQTVAIIERFGKYQKTATSGIHIRVPLGIDKIAARVQLRLLQSEIIVETKTK | 78 |
| | | I L V Q TVAI E FGK+ + G H +IA + LR+ Q ++ ETKTK | |
| Sbjct: | 4 | ILGLVQVDQSTVAIKENFGKFSEVLEPGCHFLPWCIGQQIAGYLSLRVRQLDVRCETKTK | 63 |
| Query: | 79 | DNVFVTLNIATQYRVNENNVTDAYYKLIKPEAQIKSYIEDALRSSVPKLTLDELFEKKDE | 138 |
| | | DNVFVT+ + QYR + +DA+YKL QI+SY+ D +R++VPKL LD+ FE+K+E | |
| Sbjct: | 64 | DNVFVTVVASVQYRALADKASDAFYKLSNTREQIQSYVFDVIRATVPKLGLDDAFEQKNE | 123 |
| Query: | 139 | IALEVQHQVAEEMSTYGYIIVKTLITKVEPDAEVKQSMNEINAAQRKRVAAQELANADKI | 198 |
| | | IA V+ ++ + MSTYGY IV+TLI +EPD VK++MNEINAA R RVAA E A A+KI | |
| Sbjct: | 124 | IAKAVEEELEKMNSTYGYQIVQTLIVDIEPDDRVKRAMNEINAAARMRVAASEKAEAEKI | 183 |
| Query: | 199 | KIVTAAEAEAEKDRLHGVGIAQQRKAIVDGLADSIQELKDANVTLTEEQIMSILLTNQYL | 258 |
| | | + AE EAE L GVGIA+QR+AIVDGL DS+ + T + IM ++L QY | |
| Sbjct: | 184 | LQIKKAEGEAESKYLAGVGIARQRQAIVDGLRDSVLAFSENVPGTTAKDIMDMVLVTQYF | 243 |
| Query: | 259 | DTLNTF-AINGNQTIFLPNNPEGVEDIRTQVLSAL | 292 |
| | | DT+ A + + ++F+P+ P V+D+ Q+ L | |
| Sbjct: | 244 | DTMREIGASSKSSSVFIPHGPGAVKDVSAQIRDGL | 278 |

[10275] A related DNA sequence was identified in S. pyogenes <SEQ ID 5811> which encodes the amino acid sequence <SEQ ID 5812>. Analysis of this protein sequence reveals the following:

| Possible Site: 32 | | | |
|---|---|---|---|
| >>> Seems to have an uncleavable N-term signal seq | | | |
| INTEGRAL | Likelihood = −13.06 | Transmembrane | 5-21 (1-29) |

----- Final Results -----
bacterial membrane --- Certainty = 0.6222 (Affirmative) < succ>
bacterial outside --- Certainty = 0.0000 (Not Clear) < succ>
bacterial cytoplasm --- Certainty = 0.0000 (Not Clear) < succ>

[10276] The protein has homology with the following sequences in the databases:

| >GP: AAF68390 GB: AF236374 hypersensitive-induced response protein | | | |
|---|---|---|---|
| [Zea mays] | | | |
| Identities = 126/273 (46%), Positives = 174/273 (63%), Gaps = 3/273 (1%) | | | |
| Query: | 23 | LYVVRQQSVAIVERFGRYQKTATSGIHIRLPFGI-DKIAARVQLRLLQSEIIVETKTKDN | 81 |
| | | L V Q +VAI E FG++ + G H LP+ I +IA + LR+ Q ++ ETKTKDN | |
| Sbjct: | 7 | LVQVDQSTVAIKENFGKFSEVLEPGCHF-LPWCIGQQIAGYLSLRVRQLDVRCETKTKDN | 65 |
| Query: | 82 | VFVTLNVATQYRVNEQNVTDAYYKLMKPESQIKSYIEDALRSSVPKLTLDELFEKKDEIA | 141 |
| | | VFVT+ + QYR +DA+YKL QI+SY+ D +R++VPKL LD+ FE+K+EIA | |
| Sbjct: | 66 | VFVTVVASVQYRALADKASDAFYKLSNTREQIQSYVFDVIRATVPKLGLDDAFEQKNEIA | 125 |
| Query: | 142 | LEVQHQVAEEMSTYGYIIVKTLITKVEPDAEVKQSMNEINAAQRKRVAAQELANADKIKI | 201 |
| | | V+ ++ + MSTYGY IV+TLI +EPD VK++MNEINAA R RVAA E A A+KI | |
| Sbjct: | 126 | KAVEEELEKAMSTYGYQIVQTLIVDIEPDDRVKRAMNEINAAARMRVAASEKAEAEKILQ | 185 |
| Query: | 202 | VTAAEAEAEKDRLHGVGIAQQRKAIVDGLAESIQELKEANISLNEEQIMSILLTNQYLDT | 261 |
| | | + AE EAE L GVGIA+QR+AIVDGL +S+ E + IM ++L QY DT | |
| Sbjct: | 186 | IKKAEGEAESKYLAGVGIARQRQAIVDGLRDSVLAFSENVPGTTAKDIMDMVLVTQYFDT | 245 |
| Query: | 262 | LNTFAAKG-NQTLFLPNTPSGVEDIRTQVLSAL | 293 |
| | | + A + ++F+P+ P V+D+ Q+ L | |
| Sbjct: | 246 | MREIGASSKSSSVFIPHGPGAVKDVSAQIRDGL | 278 |

[10277] An alignment of the GAS and GBS proteins is shown below.

| Identities = 254/291 (87%), Positives = 278/291 (95%) | | | |
|---|---|---|---|
| Query: | 5 | IILTVILVLVIVLLITSLYVVKQQTVAIIERFGKYQKTATSGIHIRVPLGIDKIAARVQL | 64 |
| | | I + +++++ ++ ++LYVV+QQ+VAI+ERFG+YQKTATSGIHIR+P GIDKIAARVQL | |
| Sbjct: | 6 | IFIAFGVIVILAIVASTLYVVRQQSVAIVERFGRYQKTATSGIHIRLPFGIDKIAARVQL | 65 |
| Query: | 65 | RLLQSEIIVETKTKDNVFVTLNIATQYRVNENNVTDAYYKLIKPEAQIKSYIEDALRSSV | 124 |
| | | RLLQSEIIVETKTKDNVFVTLN+ATQYRVNE NVTDAYYKL+KPE+QIKSYIEDALRSSV | |
| Sbjct: | 66 | RLLQSEIIVETKTKDNVFVTLNVATQYRVNEQNVTDAYYKLMKPESQIKSYIEDALRSSV | 125 |
| Query: | 125 | PKLTLDELFEKKDEIALEVQHQVAEEMSTYGYIIVKTLITKVEPDAEVKQSMNEINAAQR | 184 |
| | | PKLTLDELFEKKDEIALEVQHQVAEEMSTYGYIIVKTLITKVEPDAEVKQSMNEINAAQR | |
| Sbjct: | 126 | PKLTLDELFEKKDEIALEVQHQVAEEMSTYGYIIVKTLITKVEPDAEVKQSMNEINAAQR | 185 |
| Query: | 185 | KRVAAQELANADKIKIVTAAEAEAEKDRLHGVGIAQQRKAIVDGLADSIQELKDANVTLT | 244 |
| | | KRVAAQELANADKIKIVTAAEAEAEKDRLHGVGIAQQRKAIVDGLA+SIQELK+AN++L | |
| Sbjct: | 186 | KRVAAQELANADKIKIVTAAEAEAEKDRLHGVGIAQQRKAIVDGLAESIQELKEANISLN | 245 |
| Query: | 245 | EEQIMSILLTNQYLDTLNTFAINGNQTIFLPNNPEGVEDIRTQVLSALKTR | 295 |
| | | EEQIMSILLTNQYLDTLNTFA GNQT+FLPN P GVEDIRTQVLSALKT+ | |
| Sbjct: | 246 | EEQIMSILLTNQYLDTLNTFAAKGNQTLFLPNTPSGVEDIRTQVLSALKTK | 296 |

[10278] SEQ ID 5810 (GBS231) was expressed in E. coli as a GST-fusion product. SDS-PAGE analysis of total cell extract is shown in FIG. 55 (lane 7; MW 60.9 kDa).

[10279] GBS231d was expressed in E. coli as a GST-fusion product. SDS-PAGE analysis of total cell extract is shown in FIG. 155 (lane 5-7; MW 59 kDa) and in FIG. 239 (lane 11; MW 59 kDa). It was also expressed in E. coli as a His-fusion product. SDS-PAGE analysis of total cell extract is shown in FIG. 155 (lane 9; MW 34 kDa) and in FIG. 183 (lane 6; MW 34 kDa). Purified GBS231d-GST is shown in FIG. 246, lane 8.

[10280] Based on this analysis, it was predicted that these proteins and their epitopes could be useful antigens for vaccines or diagnostics.

### EXAMPLE 1869

[10281] A DNA sequence (GBSx1977) was identified in S. agalactiae <SEQ ID 5813> which encodes the amino acid sequence <SEQ ID 5814>. Analysis of this protein sequence reveals the following:

Possible site: 34
>>> Seems to have no N-terminal signal sequence
----- Final Results -----
bacterial cytoplasm --- Certainty = 0.2305 (Affirmative) < succ>
bacterial membrane --- Certainty = 0.0000 (Not Clear) < succ>
bacterial outside --- Certainty = 0.0000 (Not Clear) < succ>

[10282] A related GBS nucleic acid sequence <SEQ ID 9291> which encodes amino acid sequence <SEQ ID 9292> was also identified.

[10283] The protein has homology with the following sequences in the GENPEPT database.

| >GP: CAB13457 GB: Z99112 similar to hypothetical proteins | | | |
|---|---|---|---|
| [Bacillus subtilis] | | | |
| Identities = 259/514 (50%), Positives = 350/514 (67%), Gaps = 9/514 (1%) | | | |
| Query: | 1 | MGMTMENGAKEVSDKPATTVGEVGQILSKGVLMGARGNSGVITSQLFRGFGQSIKDKEEL | 60 |
| | | M ++M +GA+EV +G+VG LSKG+LMGARGNSGVI SQLFRGF ++I+ K+E+ | |
| Sbjct: | 46 | MNLSMTSGAREVEQMDTDDIGKVGSALSKGLLMGARGNSGVILSQLFRGFSKNIETKKEI | 105 |
| Query: | 61 | TGQDLAHAFQNGVEVAYKAVMKPVEGTILTVSRGAATAALKKAEETDDAVEVMRATLKGA | 120 |
| | | + A A Q GV++AYKAVMKPVEGTILTV++ AA A+ AE+ D +M A + A | |
| Sbjct: | 106 | NALEFAAALQAGVDMAYKAVMKPVEGTILTVAKDAAKKAMILAEKETDITALMTAVTEEA | 165 |
| Query: | 121 | KRALAKTPDMLPVLKEVGVVDSGGQGLVFIYEGFLSALTGEYIASEDFKATPATMTEMVN | 180 |
| | | + +L +TP++LPVLKEVGVVDSGG+GL+ +YEGFL++L GE + KA ++ +MV+ | |
| Sbjct: | 166 | EASLNRTPELLPVLKEVGVVDSGGKGLLCVYEGFLASLKGETVPQ---KAVLPSLDDMVS | 222 |
| Query: | 181 | AEHHKAVVGHVATEDIKYGYCTEVMVGLKQGPTYVKEFNYEEFQGYLSNLGDSLLVVNDD | 240 |
| | | AEHHK+ + TEDI++G+CTEVMV L Q +EF+ F+ LS GDSLLV+ D+ | |
| Sbjct: | 223 | AEHHKSAQSMMNTEDIEFGFCTEVMVRLDQTK---REFDEGTFRQDLSQFGDSLLVIADE | 279 |
| Query: | 241 | EIVKVHVHTEDPGLVMQEGLKYGSLVKVKVENMRNQHDA---QMQKVEVEETVKETKEYG | 297 |
| | | + KVH+H E+PG V+ YG L+K+K+ENMR QH + Q K ET + YG | |
| Sbjct: | 280 | SLAKVHIHAEEPGNVLNYAQHYGELIKIKIENMREQHTSIISQESKPADNETPPAKQPYG | 339 |
| Query: | 298 | IIAVVAGDGLAEIFKSQGVDYIISGGQTMNPSTEDIVKAIEKVNARNVIILPNNKNIFMA | 357 |
| | | I+ V G+G+A++FKS G +I GGQTMNPSTEDIV A++ VNA V ILPNN NI MA | |
| Sbjct: | 340 | IVTVAMGEGIADLFKSIGASVVIEGGQTMNPSTEDIVDAVKSVNADTVFILPNNSNIIMA | 399 |
| Query: | 358 | AQSAADVVDIPAAVVETRTVPQGFTSLLAFDPAKSLETNVADMTNSLSDVISGSVTLAVR | 417 |
| | | A AA VVD V+ +TVPQG ++LLAF+P + E N A+M +++ V SG VT +VR | |
| Sbjct: | 400 | ANQAASVVDEQVFVIPAKTVPQGMSALLAFNPDQEAEANEANMLSAIQQVKSGQVTFSVR | 459 |
| Query: | 418 | DTTIDGLEIHENDILGMVDGKILVSTPDMEKALKDTFDKMIDEDSEIVTIYVGEDGKQAL | 477 |
| | | DT IDG +I + D +G+++G I+ ++ + A K +MI ED EIVTI GED Q | |
| Sbjct: | 460 | DTHIDGKDIKKGDFMGILNGTIIGTSENQLSAAKMLLSEMIGEDDEIVTILYGEDASQEE | 519 |
| Query: | 478 | AETLSEYLEETYEDVEVEIHQGDQPVYPYLMSVE | 511 |
| | | AE L +L E YE++EVEIH G QP+Y Y++S E | |
| Sbjct: | 520 | AEQLEAFLSEKYEEIEVEIHNGKQPLYSYIVSAE | 553 |

[10284] A related DNA sequence was identified in S. pyogenes <SEQ ID 5635> which encodes the amino acid sequence <SEQ ID 5636>. Analysis of this protein sequence reveals the following:

Possible site: 15
>>> Seems to have no N-terminal signal sequence
----- Final Results -----
bacterial cytoplasm --- Certainty = 0.1816 (Affirmative) < succ>
bacterial membrane --- Certainty = 0.0000 (Not Clear) < succ>
bacterial outside --- Certainty = 0.0000 (Not Clear) < succ>

[10285] An alignment of the GAS and GBS proteins is shown below.

| Identities = 434/511 (84%), Positives = 475/511 (92%) | | | |
|---|---|---|---|
| Query: | 1 | MGMTMENGAKEVSDKPATTVGEVGQILSKGVLMGARGNSGVITSQLFRGFGQSIKDKEEL | 60 |
| | | M MTM+NGAKEV+DKPA+TVGEVGQ+LSKG+LMGARGNSGVITSQLFRGFGQSIK K+EL | |
| Sbjct: | 44 | MSMTMDNGAKEVADKPASTVGEVGQMLSKGLLMGARGNSGVITSQLFRGFGQSIKGKDEL | 103 |
| Query: | 61 | TGQDLAHAFQNGVEVAYKAVMKPVEGTILTVSRGAATAALKKAEETDDAVEVMRATLKGA | 120 |
| | | TG+DLA AFQ GVEVAYKAVMKPVEGTILTVSRGAATAALKKA+ TDDAVEVM+A L GA | |
| Sbjct: | 104 | TGKDLAQAFQVGVEVAYKAVMKPVEGTILTVSRGAATAALKKADLTDDAVEVMQAALDGA | 163 |
| Query: | 121 | KRALAKTPDMLPVLKEVGVVDSGGQGLVFIYEGFLSALTGEYIASEDFKATPATMTEMVN | 180 |
| | | K ALAKTPD+LPVLKEVGVVDSGGQGLVFIYEGFLSAL G+Y+ S DFKATPA M+EM+N | |
| Sbjct: | 164 | KGALAKTPDLLPVLKEVGVVDSGGQGLVFIYEGFLSALNGDYVTSADFKATPANMSEMIN | 223 |
| Query: | 181 | AEHHKAVVGHVATEDIKYGYCTEVMVGLKQGPTYVKEFNYEEFQGYLSNLGDSLLVVNDD | 240 |
| | | AEHHK+VVGHVATEDI YGYCTE+MV LKQGPTYVKEFNY+EFQGYLS LGDSLLVVNDD | |
| Sbjct: | 224 | AEHHKSVVGHVATEDITYGYCTEIMVALKQGPTYVKEFNYDEFQGYLSGLGDSLLVVNDD | 283 |
| Query: | 241 | EIVKVHVHTEDPGLVMQEGLKYGSLVKVKVENMRNQHDAQMQKVEVEETVKETKEYGIIA | 300 |
| | | EIVKVHVHTEDPGLVMQEGLKYGSL+K+KV+NMRNQH+AQ+QK +VE+ E K++G+IA | |
| Sbjct: | 284 | EIVKVHVHTEDPGLVMQEGLKYGSLIKIKVDNMRNQHEAQVQKTDVEKNKAEVKDFGLIA | 343 |
| Query: | 301 | VVAGDGLAEIFKSQGVDYIISGGQTMNPSTEDIVKAIEKVNARNVIILPNNKNIFMAAQS | 360 |
| | | VVAG+GL+EIFK+QGVDY+ISGGQTMNPSTEDIVKAIE VNA+ VIILPNNKNIFMAAQS | |
| Sbjct: | 344 | VVAGEGLSEIFKAQGVDYVISGGQTMNPSTEDIVKAIEAVNAKQVIILPNNKNIFMAAQA | 403 |
| Query: | 361 | AADVVDIPAAVVETRTVPQGFTSLLAFDPAKSLETNVADMTNSLSDVISGSVTLAVRDTT | 420 |
| | | AA+VVDIPAAVV TRTVPQGFTSLLAFDP+KSLE NVADM+ SLSDV+SGSVTLAVRDTT | |
| Sbjct: | 404 | AAEVVDIPAAVVATRTVPQGFTSLLAFDPSKSLEDNVADMSTSLSDVVSGSVTLAVRDTT | 463 |
| Query: | 421 | IDGLEIHENDILGMVDGKILVSTPDMEKALKDTFDKMIDEDSEIVTIYVGEDGKQALAET | 480 |
| | | IDGLEIHEND LGMVDGKI+VS PDME LK F+KMIDEDSEIVTI+VGE+G Q LAE | |
| Sbjct: | 464 | IDGLEIHENDFLGMVDGKIIVSNPDMEATLKAAFEKMIDEDSEIVTIFVGEEGDQDLAEE | 523 |
| Query: | 481 | LSEYLEETYEDVEVEIHQGDQPVYPYLMSVE | 511 |
| | | L+ YL ETYEDVEVEIHQGDQPVYPYLMSVE | |
| Sbjct: | 524 | LAGYLGETYEDVEVEIHQGDQPVYPYLMSVE | 554 |

[10286] Based on this analysis, it was predicted that these proteins and their epitopes could be useful antigens for vaccines or diagnostics.

### EXAMPLE 1870

[10287] A DNA sequence (GBSx1978) was identified in S. agalactiae <SEQ ID 5815> which encodes the amino acid sequence <SEQ ID 5816>. Analysis of this protein sequence reveals the following:

```
Possible site: 46
>>> Seems to have no N-terminal signal sequence
----- Final Results -----
                            bacterial cytoplasm --- Certainty = 0.4771(Affirmative) < succ>
                              bacterial membrane --- Certainty = 0.0000(Not Clear) < succ>
                                bacterial outside --- Certainty = 0.0000(Not Clear) < succ>
```

[10288] The protein has no significant homology with any sequences in the GENPEPT database.

[10289] No corresponding DNA sequence was identified in S. pyogenes.

[10290] Based on this analysis, it was predicted that this protein and its epitopes, could be useful antigens for vaccines or diagnostics.

### EXAMPLE 1871

[10291] A DNA sequence (GBSx1979) was identified in S. agalactiae <SEQ ID 5817> which encodes the amino acid sequence <SEQ ID 5818>. This protein is predicted to be proliferating-cell nucleolar antigen P120. Analysis of this protein sequence reveals the following:

```
Possible site: 55
>>> Seems to have no N-terminal signal sequence
----- Final Results -----
                            bacterial cytoplasm --- Certainty = 0.3774(Affirmative) < succ>
                              bacterial membrane --- Certainty = 0.0000(Not Clear) < succ>
                                bacterial outside --- Certainty = 0.0000(Not Clear) < succ>
```

[10292] A related GBS nucleic acid sequence <SEQ ID 9345> which encodes amino acid sequence <SEQ ID 9346> was also identified.

[10293] The protein has homology with the following sequences in the GENPEPT database.

| >GP: AAC74905 GB: AE000278 putative nucleolar proteins | | | |
|---|---|---|---|
| [Escherichia coli K12] | | | |
| Identities = 87/229 (37%), Positives = 128/229 (54%), Gaps = 8/229 (3%) | | | |
| Query: | 63 | GKSIEHTTGLVYSQEPAAQ--IVAQIAEPQEGMKVLDLAAAPGGKTTHLLSYLNNTGLLV | 120 |
| | | G + EH +GL Y QE ++ + A A+ +V+D+AAAPG KTT + + +NN G ++ | |
| Sbjct: | 89 | GSTAEHLSGLFYIQEASSMLPVAALFADGNAPQRVMDVAAAPGSKTTQISARMNNEGAIL | 148 |
| Query: | 121 | SNEISNKRSKILVENVERFGARNVIVTNESSQRLAKCFNSFFDLIVFDGPCSGEGMFRKD | 180 |
| | | +NE S R K+L N+ R G NV +T+ + FD I+ D PCSGEG+ RKD | |
| Sbjct: | 149 | ANEFSASRVKVLHANISRCGISNVALTHFDGRVFGAAVPEMFDAILLDAPCSGEGVVRKD | 208 |
| Query: | 181 | PQAIQYWHKDYPTECAQLQRDILKEAIKMLAHGGILVYSTCTWSPEENEEVVNWLLQEY- | 239 |
| | | P A++ W + E A QR+++ A L GG LVYSTCT + EENE V WL + Y | |
| Sbjct: | 209 | PDALKNWSPESNQEIAATQRELIDSAFHALRPGGTLVYSTCTLNQEENEAVCLWLKETYP | 268 |
| Query: | 240 | ---DYLELVDIPKLNGMVEGINVPQVARMYPHHFQGEGQFVAKLRDTRS | 285 |
| | | ++L L D+ G + + ++P + EG FVA+LR T++ | |
| Sbjct: | 269 | DAVEFLPLGDL--FPGANKALTEEGFLHVFPQIYDCEGFFVARLRKTQA | 315 |

[10294] A related DNA sequence was identified in S. pyogenes <SEQ ID 5819> which encodes the amino acid sequence <SEQ ID 5820>. Analysis of this protein sequence reveals the following:

```
Possible site: 34
>>> Seems to have no N-terminal signal sequence
----- Final Results -----
                            bacterial cytoplasm --- Certainty = 0.2316(Affirmative) < succ>
                              bacterial membrane --- Certaimty = 0.0000(Not Clear) < succ>
                                bacterial outside --- Certaimty = 0.0000(Not Clear) < succ>
```

[10295] An alignment of the GAS and GBS proteins is shown below.

| Identities = 213/311 (68%), Positives = 254/311 (81%), Gaps = 3/311 (0%) | | | |
|---|---|---|---|
| Query: | 1 | MKLPNEFIEKYQTILKDEAEAFFDSFEQKPISAYRTNPLKEKQLDFPNAIPSTPWGHYGK | 60 |
| | | M LP EFI YQ IL E E F SF Q+P++A+R NPLK + F + IP+T WG+YGK | |
| Sbjct: | 2 | MSLPKEFINTYQAILGKELEDFLASFNQEPVNAFRINPLKNQLKTFEHPIPNTLWGYYGK | 61 |
| Query: | 61 | ISGKSIEHTTGLVYSQEPAAQIVAQIAEPQEGMKVLDLAAAPGGKTTHLLSYLNNTGLLV | 120 |
| | | +SGKS EH +GLVYSQEPAAQ+VAQ+A PQ+G +VLDLAAAPGGK+THLL+YL+NTGLLV | |
| Sbjct: | 62 | LSGKSPEHVSGLVYSQEPAAQMVAQVAAPQKGSRVLDLAAAPGGKSTHLLAYLDNTGLLV | 121 |
| Query: | 121 | SNEISNKRSVILVENVERFGARNVIVTNESSQRLAKCFNSFFDLIVFDGPCSGEGMFRKD | 180 |
| | | SNEIS KRSK+LVEN+ERFGARNV+VTNES+ RLAK F+ +FD IVFDGPCSGEGMFRKD | |
| Sbjct: | 122 | SNEISKKRSKVLVENIERFGARNVVVTNESADRLAKVFSHYFDTIVFDGPCSGEGMFRKD | 181 |
| Query: | 181 | PQAIQYWHKDYPTECAQLQRDILKEAIKMLAHGGILVYSTCTWSPEENEEVVNWLLQEYD | 240 |
| | | P AIQYWH YP ECA+LQ+ IL++A+ ML GG L+YSTCTW+PEENE+VV WLL+ Y | |
| Sbjct: | 182 | PDAIQYWHHGYPAECAKLQKSILEDALAMLKPGGELIYSTCTWAPEENEDVVQWLLETYT | 241 |
| Query: | 241 | YLELVDIPKLNGMVEGINVPQVARMYPHHFQGEGQFVAKLRDTRSKEAQKIKPKAQKIN- | 299 |
| | | +LELVD+PKLNGMV GI +P+ ARMYPH +QGEGQFVAKL+D R +E Q K KA K N | |
| Sbjct: | 242 | FLELVDVPKLNGMVSGIGLPETARMYPHRYQGEGQFVAKLKDKR-QEGQSTKLKAPKSNL | 300 |
| Query: | 300 | -KMQLQLWQQF | 309 |
| | | K QL+LW+ F | |
| Sbjct: | 301 | IKDQLRLWKMF | 311 |

[10296] Based on this analysis, it was predicted that these proteins and their epitopes could be useful antigens for vaccines or diagnostics.

### EXAMPLE 1872

[10297] A DNA sequence (GBSx1980) was identified in S. agalactiae <SEQ ID 5821> which encodes the amino acid sequence <SEQ ID 5822>. Analysis of this protein sequence reveals the following:

```
Possible site: 41
>>> Seems to have no N-terminal signal sequence
----- Final Results -----
                            bacterial cytoplasm --- Certainty = 0.4l11(Affirmative) < succ>
                              bacterial membrane --- Certainty = 0.0000(Not Clear) < succ>
                                bacterial outside --- Certainty = 0.0000(Not Clear) < succ>
```

[10298] The protein has homology with the following sequences in the GENPEPT database.

>GP: AAC24940 GB: AF012285 unknown [Bacillus subtilis]
Identities = 86/240 (35%), Positives = 133/240 (54%), Gaps = 10/240 (4%)

| | | | |
|---|---|---|---|
| Query: | 6 | DFAKQLVYKAGQFIKSEMQNTFDVEEKSRFDDLVTSLDKKTQKLLIQEIIQHYPDDNILA | 65 |
| | | + AK+ + +AG I M + +E KS +DLVT++DK+T+K I I + +P IL | |
| Sbjct: | 9 | EIAKKWIREAGARITQSMHESLTIETKSNPNDLVTNIDKETEKFFIDRIQETFPGHRILG | 68 |
| Query: | 66 | EE---DBVRSPIAQGNVWVLDPIDGTVNFIVQKDNFAVMLAYYEEGVGQFGIIYDVMADI | 122 |
| | | EE D + S +G VW++DPIDGT+NF+ Q+ NFA+ + +E G G+ G+IYDV+ D | |
| Sbjct: | 69 | EEGQGDKIHS--LEGVVWIIDPIDGTMNFVHQQRNFAISIGIFENGEGKIGLIYDVVHDE | 126 |
| Query: | 123 | LYSGGGHFDVYANDKKIVPFQECPLERCLLGVNSAMYAEN----DCGIAHLASETLGVRI | 178 |
| | | LY Y N+ K+ P +E +E +L +N+ EN +A L G R | |
| Sbjct: | 127 | LYHAFSGRGAYMNETKLAPLKETVIEEAILAINATWVTENRRIDQSVLAPLVKRVRGTRS | 186 |
| Query: | 179 | YGGAGISMAKVMQGKLLAYFSY-IQPWDYAAAKIMGETLGFTLLTLDGEEPNYSTRQKVM | 237 |
| | | YG A + +A V G++ AY + + PWDYAA ++ +G T T++GE + V+ | |
| Sbjct: | 187 | YGSAALELANVAAGRIDAYITMRLAPWDYAAGCVLLNEVGGTYTTIEGEPFTFLENHSVL | 246 |

[10299] A related GBS nucleic acid sequence <SEQ ID 10937> which encodes amino acid sequence <SEQ ID 10938> was also identified.

[10300] A related DNA sequence was identified in S. pyogenes <SEQ ID 5823> which encodes the amino acid sequence <SEQ ID 5824>. Analysis of this protein sequence reveals the following:

```
Possible site: 15
>>> Seems to have no N-terminal signal sequence
----- Final Results -----
                            bacterial cytoplasm --- Certainty = 0.1843(Affirmative) < succ>
                              bacterial membrane --- Certainty = 0.0000(Not Clear) < succ>
                                bacterial outside --- Certainty = 0.0000(Not Clear) < succ>
```

[10301] An alignment of the GAS and GBS proteins is shown below.

| Identities = 155/253 (61%), Positives = 205/253 (80%) | | | |
|---|---|---|---|
| Query: | 1 | MDAKFDFAKQLVYKAGQFIKSEMQNTFDVEEKSRFDDLVTSLDKKTQKLLIQEIIQHYPD | 60 |
| | | ++ K+ FA+Q++ +AG FIKS+M D++ K++FDDLVT++D++TQ+LL+ I Q YP | |
| Sbjct: | 8 | LETKYAFARQIIKEAGLFIKSKMSEQLDIQVKTQFDDLVTNVDQETQQLLMDRIHQTYPC | 67 |
| Query: | 61 | DNILAEEDBVRSPIAQGNVWVLDPIDGTVNFIVQKDNFAVMLAYYEEGVGQFGIIYDVMA | 120 |
| | | D ILAEE++VR PI QGNVWV+DPIDGTVNFIVQ FAVM+AYYE+G+GQFG+IYDVMA | |
| Sbjct: | 68 | DAILAEENDVRHPINQGNVWVIDPIDGTVNFIVQGSQFAVMIAYYEQGIGQFGLIYDVMA | 127 |
| Query: | 121 | DILYSGGGHFDVYANDKKIVPFQECPLERCLLGVNSAMYAENDCGIAHLASETLGVRIYG | 180 |
| | | D L +GGG F+V N K+ +QE PLER L+G N+ M+A ND +AHL ++TLGVR+YG | |
| Sbjct: | 128 | DQLLAGGGDFEVTLNGDKLPAYQEKPLERSLIGCNAGMFARNDRNLAHLIAKTLGVRVYG | 187 |
| Query: | 181 | GAGISMAKVMQGKLLAYFSYIQPWDYAAAKIMGETLGFTLLTLDGEEPNYSTRQKVMFLP | 240 |
| | | GAGI M KVM+ +LLAYFS+IQPWDYAAAK++G+ LG+ LLT+DG EP++ TRQK+MF+P | |
| Sbjct: | 188 | GAGICMVKVMKQELLAYFSFIQPWDYAAAKVLGDKLGYVLLTIDGYEPDFQTRQKIMFVP | 247 |
| Query: | 241 | KSKLNLIQSYLTK | 253 |
| | | K +L I S+LTK | |
| Sbjct: | 248 | KCQLTRIASFLTK | 260 |

[10302] Based on this analysis, it was predicted that these proteins and their epitopes could be useful antigens for vaccines or diagnostics.

### EXAMPLE 1873

[10303] A DNA sequence (GBSx1981) was identified in S. agalactiae <SEQ ID 5825> which encodes the amino acid sequence <SEQ ID 5826>. Analysis of this protein sequence reveals the following:

```
Possible site: 16
>>> Seems to have no N-terminal signal sequence
----- Final Results -----
                            bacterial cytoplasm --- Certainty = 0.4131(Affirmative) < succ>
                              bacterial membrane --- Certainty = 0.0000(Not Clear) < succ>
                                bacterial outside --- Certainty = 0.0000(Not Clear) < succ>
```

[10304] The protein has homology with the following sequences in the GENPEPT database.

| >GP: AAC24938 GB: AF012285 unknown [Bacillus subtilis] | | | |
|---|---|---|---|
| Identities = 33/78 (42%), Positives = 50/78 (63%) | | | |
| Query: | 13 | YSYPLDPSWNTEDITKVLRFLNQVEHAYENSIKVDDLLDSYKEFKKVVKSKAQEKQIDRE | 72 |
| | | Y YP++ W TE+ V+ F QVE AYE ++LL +Y+ FK++V KA+EK++ E | |
| Sbjct: | 3 | YQYPMNEDWTTEEAVDVIAFFQQVELAYEKGADREELLKAYRRFKEIVPGKAEEKKLCGE | 62 |
| Query: | 73 | FQRTSGYSTYQAVKAAQQ | 90 |
| | | F+ S YS Y+ VK A++ | |
| Sbjct: | 63 | FEEQSTYSPYRTVKQARE | 80 |

[10305] A related DNA sequence was identified in S. pyogenes <SEQ ID 5827> which encodes the amino acid sequence <SEQ ID 5828>. Analysis of this protein sequence reveals the following:

```
Possible site: 60
>>> Seems to have no N-terminal signal sequence
----- Final Results -----
                            bacterial cytoplasm --- Certainty = 0.4442(Affirmative) < succ>
                              bacterial membrane --- Certainty = 0.0000(Not Clear) < succ>
                                bacterial outside --- Certainty = 0.0000(Not Clear) < succ>
```

[10306] An alignment of the GAS and GBS proteins is shown below.

| Identities = 59/91 (64%), Positives = 70/91 (76%) | | | |
|---|---|---|---|
| Query: | 9 | ISSNYSYPLDPSWNTEDITKVLRFLNQVEHAYENSIKVDDLLDSYKEFKKVVKSKAQEKQ | 68 |
| | | +S NY YPLD SW+TE+I+ VL FLN+VE AYE + LLDSYK +K +VKSKAQEKQ | |
| Sbjct: | 5 | MSGNYYYPLDLSWSTEEISSVLHFLNKVELAYEKKVDAKQLLDSYKTYKTIVKSKAQEKQ | 64 |
| Query: | 69 | IDREFQRTSGYSTYQAVKAAQQQAKGFISLG | 99 |
| | | IDR+FQ+ SGYSTYQ VK A+ KGF SLG | |
| Sbjct: | 65 | IDRDFQKVSGYSTYQVVKKAKAIEKGFFSLG | 95 |

[10307] Based on this analysis, it was predicted that these proteins and their epitopes could be useful antigens for vaccines or diagnostics.

### EXAMPLE 1874

[10308] A DNA sequence (GBSx1982) was identified in S. agalactiae <SEQ ID 5829> which encodes the amino acid sequence <SEQ ID 5830>. Analysis of this protein sequence reveals the following:

```
Possible site: 18
>>> Seems to have no N-terminal signal sequence (or aa 1-18)
----- Final Results -----
                            bacterial cytoplasm --- Certainty = 0.0952(Affirmative) < succ>
                              bacterial membrane --- Certainty = 0.0000(Not Clear) < succ>
                                bacterial outside --- Certainty = 0.0000(Not Clear) < succ>
```

[10309] The protein has homology with the following sequences in the GENPEPT database.

| >GP: AAF21893 GB: AF103794 unknown [Listeria monocytogenes] | | | |
|---|---|---|---|
| Identities = 74/126 (58%), Positives = 101/126 (79%) | | | |
| Query: | 1 | MITLFLSPSCTSCRKARAWLSKHEVAFEEHNIITSPLNKEELLQILSFTENGTEDIISTR | 60 |
| | | M+TL+ SPSCTSCRK+RAWL +H++ ++E NI + PL+ +E+ +IL TE+GT++IISTR | |
| Sbjct: | 1 | MVTLYTSPSCTSCRKSRAWLEEHDIPYKERNIFSEPLSLDEIKEILRMTEDGTDEIISTR | 60 |
| Query: | 61 | SKVFQKLAIDVDELSTSSLMELISENPSLLRRPIILDKKRMQIGFNEDEIRAFLPRDYRK | 120 |
| | | SK FQKL +D+D L L ELI +NP LLRRPII+D+KR+Q+G+NEDEIR FLPR R | |
| Sbjct: | 61 | SKTFQKLNVDLDSLPLQQLFELIQKNPGLLRRPIIIDEKRLQVGYNEDEIRRFLPRRVRT | 120 |
| Query: | 121 | QELKQA | 126 |
| | | +L++A | |
| Sbjct: | 121 | YQLREA | 126 |

[10310] A related DNA sequence was identified in S. pyogenes <SEQ ID 5831> which encodes the amino acid sequence <SEQ ID 5832>. Analysis of this protein sequence reveals the following:

```
Possible site: 49
>>> Seems to have no N-terminal signal sequence
----- Final Results -----
                            bacterial cytoplasm --- Certainty = 0.0511(Affirmative) < succ>
                              bacterial membrane --- Certainty = 0.0000(Not Clear) < succ>
                                bacterial outside --- Certainty = 0.0000(Not Clear) < succ>
```

[10311] An alignment of the GAS and GBS proteins is shown below.

| Identities = 112/134 (83%), Positives = 127/134 (94%) | | | |
|---|---|---|---|
| Query: | 1 | MITLFLSPSCTSCRKARAWLSKHEVAFEEHNIITSPLNKEELLQILSFTENGTEDIISTR | 60 |
| | | M+TLFLSPSCTSCRKARAWL KHEV F+EHNIITSPL+++EL+ ILSFTENGTEDIISTR | |
| Sbjct: | 1 | MVTLFLSPSCTSCRKARAWLVKHEVDFQEHNIITSPLSRDELMSILSFTENGTEDIISTR | 60 |
| Query: | 61 | SKVFQKLAIDVDELSTSSLMELISENPSLLRRPIILDKKRMQIGFNEDEIRAFLPRDYRK | 120 |
| | | SKVFQKL IDV+ELS S L++LI++NPSLLRRPII+D+KRMQIGFNEDEIRAFL RDYRK | |
| Sbjct: | 61 | SKVFQKLDIDVEELSISDLIDLIAKNPSLLRRPIIMDQKRMQIGFNEDEIRAFLSRDYRK | 120 |
| Query: | 121 | QELKQATIRAEIEG | 134 |
| | | QEL+QATI+AEIEG | |
| Sbjct: | 121 | QELRQATIKAEIEG | 134 |

[10312] Based on this analysis, it was predicted that these proteins and their epitopes could be useful antigens for vaccines or diagnostics.

### EXAMPLE 1875

[10313] A DNA sequence (GBSx1983) was identified in S. agalactiae <SEQ ID 5833> which encodes the amino acid sequence <SEQ ID 5834>. Analysis of this protein sequence reveals the following:

```
Possible site: 39
>>> Seems to have an uncleavable N-term signal seq
----- Final Results -----
                              bacterial membrane --- Certainty = 0.0000(Not Clear) < succ>
                                bacterial outside --- Certainty = 0.0000(Not Clear) < succ>
                            bacterial cytoplasm --- Certainty = 0.0000(Not Clear) < succ>
```

[10314] A related DNA sequence was identified in S. pyogenes <SEQ ID 5835> which encodes the amino acid sequence <SEQ ID 5836>. Analysis of this protein sequence reveals the following:

```
Possible site: 39
>>> Seems to have no N-terminal signal sequence
----- Final Results -----
                            bacterial cytoplasm --- Certainty = 0.1768(Affirmative) < succ>
                              bacterial membrane --- Certainty = 0.0000(Not Clear) < succ>
                                bacterial outside --- Certainty = 0.0000(Not Clear) < succ>
```

[10315] An alignment of the GAS and GBS proteins is shown below.

| Identities = 210/308 (68%), Positives = 252/308 (81%) | | | |
|---|---|---|---|
| Query: | 1 | MKIHYINDYKDIQAKEDCVLVLGYFDGLHLGHKALFDKAKKIATEKNLKIVVLTFNETPR | 60 |
| | | M+I YI DY+DI ++D VL+LGYFDGLH GHKALFDKA+++A ++ LK+VV TF E+P+ | |
| Sbjct: | 1 | MEIEYIKDYRDINQEDDTVLILGYFDGLHRGHKALFDKAREVANKEGLKVVVFTFTESPK | 60 |
| Query: | 61 | LTFARFQPELLLHLTSPEKRSEKFQEYGVDELYLMNFTSHFSKVSSDLFIKKYIYGLRAK | 120 |
| | | L F+RF PELLLH+T P+KR EKF +YGV++LYL++FTS FSKVSSD FI YI L+AK | |
| Sbjct: | 61 | LAFSRFSPELLLHITYPKKRYEKFADYGVNKLYLVDFTSKFSKVSSDHFITHYIKNLKAK | 120 |
| Query: | 121 | AAVVGFDYKFGHNRTSGDYLARNFKGPVYIIDEISEGGEKISSTRIRQLITEGNVEKANQ | 180 |
| | | VVGFDYKFGHNRT DYL RNF+G VY I+EI E KIS+T IR+LI EGNV KAN | |
| Sbjct: | 121 | HIVVGFDYKFGHNRTDSDYLTRNFEGQVYTIEEIKEDHRKISATWIRKLIQEGNVVKANH | 180 |
| Query: | 181 | LLGYEFSTCGMVVHGDARGRTIGFPTANLAPINRTYLPADGVYISNVLINGKYYRAMTSI | 240 |
| | | LLGY+ ST G VVHGDARGRTIGFPTANLAPI+ TYLPADGVY++NV++ K YR+MTS+ | |
| Sbjct: | 181 | LLGYDLSTRGRVVHGDARGRTIGFPTANLAPIDNTYLPADGVYVTNVIVANKIYRSMTSL | 240 |
| Query: | 241 | GKNITFGGTELRLEANIFDFDGDIYGETIEIFWLKRIREMVKFNGIDDLVKQLKKDKEIA | 300 |
| | | GKN+TFGG ELRLE NIFDFD +IYGE IEI WL +IR+M KF GI+DL +L+ DK A | |
| Sbjct: | 241 | GKNVTFGGKELRLEVNIFDFDEEIYGEIIEIVWLDKIRDMEKFEGIEDLTDRLEYDKRTA | 300 |
| Query: | 301 | LNWKKDSQ | 308 |
| | | LNWKKDS+ | |
| Sbjct: | 301 | LNWKKDSK | 308 |

[10316] Based on this analysis, it was predicted that these proteins and their epitopes could be useful antigens for vaccines or diagnostics.

### EXAMPLE 1876

[10317] A DNA sequence (GBSx1984) was identified in S. agalactiae <SEQ ID 5837> which encodes the amino acid sequence <SEQ ID 5838>. This protein is predicted to be tRNA pseudouridine 5S synthase (truB). Analysis of this protein sequence reveals the following:

```
Possible site: 56
>>> Seems to have no N-terminal signal sequence
----- Final Results -----
                            bacterial cytoplasm --- Certainty = 0.2576(Affirmative) < succ>
                              bacterial membrane --- Certainty = 0.0000(Not Clear) < succ>
                                bacterial outside --- Certainty = 0.0000(Not Clear) < succ>
```

[10318] A related GBS nucleic acid sequence <SEQ ID 9817> which encodes amino acid sequence <SEQ ID 9818> was also identified.

[10319] The protein has homology with the following sequences in the GENPEPT database.

| >GP: BAB06129 GB: AP0015l5 tRNA pseudouridine 5S synthase | | | |
|---|---|---|---|
| [Bacillus halodurans] | | | |
| Identities = 145/283 (51%), Positives 191/283 (67%), Gaps = 12/283 (4%) | | | |
| Query: | 2 | ITGIINLKKEAGMTSHDAVFKLRKILHTKKIGHGGTLDPDVVGVLPIAVGKATRVIEYMT | 61 |
| | | +TGI+ L K GMTSHD V KLR++L TKK+GH GTLDPDV GVLP+ +G AT+V +YM+ | |
| Sbjct: | 3 | MTGILPLAKPRGMTSHDCVAKLRRLLKTKKVGHTGTLDPDVYGVLPVCIGHATKVAQYMS | 62 |
| Query: | 62 | ESGKIYEGEITLGYATSTEDSSGEVISRTPLTQSDLSEDVVDHAMKSFTGPITQVPPMYS | 121 |
| | | + K YEGE+T+G++T+TED SG+ + T Q E VVD + +F G I Q+PPMYS | |
| Sbjct: | 63 | DYPKAYEGEVTVGFSTTTEDRSGDTVE-TKTIQQPFVEAVVDQVLATFVGEIKQIPPMYS | 121 |
| Query: | 122 | AVKVNGKKLYEYARSGEEVERPKRQITISEFRRTSPLYFEKGICRFSFYVSCSKGTYVRT | 181 |
| | | AVKV GK+LYEYAR+G VERP+R +TI R S + +E+G+CRF F VSCSKGTYVRT | |
| Sbjct: | 122 | AVKVRGKRLYEYARAGITVERPERTVTIFSLERMSDIVYEEGVCRFRFNVSCSKGTYVRT | 181 |
| Query: | 182 | LAVDLGIKLGYASHMSFLKRTSSAGLSITQSLTLEEINEKYKQ-EDFSFLLPIEYGVLDL | 240 |
| | | LAVD+G LGY +HMS L RT S S+ + T E+ E+ +Q E S LLPIE +LD+ | |
| Sbjct: | 182 | LAVDIGKALGYPAHMSDLVRTKSGPFSLEECFTFTELEERLEQGEGSSLLLPIETAILDI | 241 |
| Query: | 241 | PKVNLTEEDKVEISYGR----------RILLENEADTLAAFYE | 273 |
| | | P+V + +E + +I +G R + NE L A Y+ | |
| Sbjct: | 242 | PRVQVNKEIEEKIRHGAVLPQKWFNHPRFTVYNEEGALLAIYK | 284 |

[10320] A related DNA sequence was identified in S. pyogenes <SEQ ID 5839> which encodes the amino acid sequence <SEQ ID 5840>. Analysis of this protein sequence reveals the following:

```
Possible site: 56
>>> Seems to have no N-terminal signal sequence
----- Final Results -----
                            bacterial cytoplasm --- Certainty = 0.2698(Affirmative) < succ>
                              bacterial membrane --- Certainty = 0.0000(Not Clear) < succ>
                                bacterial outside --- Certainty = 0.0000(Not Clear) < succ>
```

[10321] An alignment of the GAS and GBS proteins is shown below.

| Identities = 201/295 (68%), Positives = 246/295 (83%), Gaps = 2/295 (0%) | | | |
|---|---|---|---|
| Query: | 1 | MITGIINLKKEAGMTSHDAVFKLRKILHTKKIGHGGTLDPDVVGVLPIAVGKATRVIEYM | 60 |
| | | MI GIINLKKEAGMTSHDAVFKLRK+L KKIGHGGTLDPDVVGVLPIAVGKATRVIEYM | |
| Sbjct: | 1 | MINGIINLKKEAGMTSHDAVFKLRKLLQEKKIGHGGTLDPDVVGVLPIAVGKATRVIEYM | 60 |
| Query: | 61 | TESGKIYEGEITLGYATSTEDSSGEVISRTPLTQSDLSEDVVDHAMKSFTGPITQVPPMY | 120 |
| | | TE+GK+YEG++TLGY+T+TED+SGEV++R+ L + L+E++VD M +F G ITQ PPMY | |
| Sbjct: | 61 | TEAGKVYEGQVTLGYSTTTEDASGEVVARSSL-PAVLTEELVDQTMTTFLGKITQTPPMY | 119 |
| Query: | 121 | SAVKVNGKKLYEYARSGEEVERPKRQITISEFRRTSPLYF-EKGICRFSFYVSCSKGTYV | 179 |
| | | SAVKVNG+KLYERAR+GE VERP+R++TIS F RTSPL F E G+CRFSF V+CSKGTYV | |
| Sbjct: | 120 | SAVKVNGRKLYERARAGESVERPRREVTISLFERTSPLNFTEDGLCRFSFKVACSKGTYV | 179 |
| Query: | 180 | RTLAVDLGIKLGYASHMSFLKRTSSAGLSITQSLTLEEINEKYKQEDFSFLLPIEYGVLD | 239 |
| | | RTLAVDLG LG SHMSFL+R++SAGL++ + TL EI + +++ SFLLPIEYGV D | |
| Sbjct: | 180 | RTLAVDLGRALGVESHMSFLQRSASAGLTLETAYTLGEIADMVSKQEMSFLLPIEYGVAD | 239 |
| Query: | 240 | LPKVNLTEEDKVEISYGRRILLENEADTLAAFYENRVIAILEKRGNEFKPHKVLL | 294 |
| | | LPK+ + + + EIS+GRR+ L ++ LAAF+ +VIAILEKR E+KP KVL+ | |
| Sbjct: | 240 | LPKMVIDDTELTEISFGRRLSLPSQEPLLAAFHGEKVIAILEKRDQEYKPKKVLI | 294 |

[10322] Based on this analysis, it was predicted that these proteins and their epitopes could be useful antigens for vaccines or diagnostics.

### EXAMPLE 1877

[10323] A DNA sequence (GBSx1985) was identified in S. agalactiae <SEQ ID 5841> which encodes the amino acid sequence <SEQ ID 5842>. Analysis of this protein sequence reveals the following:

```
Possible site: 50
>>> Seems to have no N-terminal signal sequence
----- Final Results -----
                            bacterial cytoplasm --- Certainty = 0.2776(Affirmative) < succ>
                              bacterial membrane --- Certainty = 0.0000(Not Clear) < succ>
                                bacterial outside --- Certainty = 0.0000(Not Clear) < succ>
```

[10324] A related GBS nucleic acid sequence <SEQ ID 9819> which encodes amino acid sequence <SEQ ID 9820> was also identified.

[10325] The protein has homology with the following sequences in the GENPEPT database.

| >GP: CAB12871 GB: Z99109 similar to hypothetical proteins | | | |
|---|---|---|---|
| [Bacillus subtilis] | | | |
| Identities = 39/145 (26%), Positives = 68/145 (46%), Gaps = 7/145 (4%) | | | |
| Query: | 3 | MKIRTATLDDSEKLVPLYQELG----YAISLSEIQSILKVILTHSDYGFLIAEDNGKLLA | 58 |
| | | M IR A D+ + PL+ + A L ++ LK L + + LIAE+NG+ + | |
| Sbjct: | 1 | MNIRQAKTSDAAAIAPLFNQYREFYRQASDLQFAEAFLKARLENHESVILIAEENGEFIG | 60 |
| Query | 59 | FVGYHKLYFFEKSGTYYRILALVVNEKHRRKGIASQLINHVKQLAKTDGSEVLALNSSLK | 118 |
| | | F + + Y + L V R KG +L++ K A +G++ L L + + | |
| Sbjct: | 61 | FTQLYPTFSSVSMKRIYILNDLFVVPHARTKGAGGRLLSAAKDYAGQNGAKCLTLQT--E | 118 |
| Query: | 119 | EYRQEAYHFYENLGFKKVSTGFSYY | 143 |
| | | + ++A YE G+++ TGF +Y | |
| Sbjct: | 119 | HHNRKARSLYEQNGYEE-DTGFVHY | 142 |

[10326] A related DNA sequence was identified in S. pyogenes <SEQ ID 5843> which encodes the amino acid sequence <SEQ ID 5844>. Analysis of this protein sequence reveals the following:

```
Possible site: 49
>>> Seems to have no N-terminal signal sequence
----- Final Results -----
                            bacterial cytoplasm --- Certainty = 0.0962(Affirmative) < succ>
                              bacterial membrane --- Certainty = 0.0000(Not Clear) < succ>
                                bacterial outside --- Certainty = 0.0000(Not Clear) < succ>
```

[10327] An alignment of the GAS and GBS proteins is shown below.

| Identities = 37/126 (29%), Positives = 64/126 (50%), Gaps = 16/126 (12%) | | | |
|---|---|---|---|
| Query: | 18 | PLYQE-----LGYAISLSEIQSILKVILTHSDYGFLIA--EDNGKLLAFVG---YHKLYF | 67 |
| | | P+ QE LGY +SL ++ + ++ + FL +D +LL +V Y LY | |
| Sbjct: | 11 | PMLQEINAKALGYLVSLDLLERQYERLIEDCHHYFLAYADKDTNQLLGYVHAERYETLY- | 69 |
| Query: | 68 | FEKSGTYYRILALVVNEKHRRKGIASQLINHVKQLAKTDGSEVLALNSSLKEYRQEAYHF | 127 |
| | | + +L L V ++R+GI S L+ ++ A+ +G + LNS+ +R+EA+ F | |
| Sbjct: | 70 | ---ASDGLNLLGLAVLPAYQRRGIGSALLRALESQARQEGIAFIRLNSA--SHRKEAHAF | 124 |
| Query: | 128 | YENLGF | 133 |
| | | Y NL + | |
| Sbjct: | 125 | YRNLDY | 130 |

[10328] Based on this analysis, it was predicted that these proteins and their epitopes could be useful antigens for vaccines or diagnostics.

### EXAMPLE 1878

[10329] A DNA sequence (GBSx1986) was identified in S. agalactiae <SEQ ID 5845> which encodes the amino acid sequence <SEQ ID 5846>. Analysis of this protein sequence reveals the following:

```
Possible site: 14
>>> Seems to have no N-terminal signal sequence
----- Final Results -----
                            bacterial cytoplasm --- Certainty = 0.1659(Affirmative) < succ>
                              bacterial membrane --- Certainty = 0.0000(Not Clear) < succ>
                                bacterial outside --- Certainty = 0.0000(Not Clear) < succ>
RGD motif 28-30
```

[10330] The protein has homology with the following sequences in the GENPEPT database.

| >GP: AAF30776 GB: AE002133 conserved hypothetical [Ureaplasma | | | |
|---|---|---|---|
| urealyticum] | | | |
| Identities = 106/440 (24%), Positives = 206/440 (46%), | | | |
| Gaps = 65/440 (14%) | | | |
| Query: | 13 | FAINESEYHQLLEQIRGDAFDKEVSERLEKERLILGEQAKNQLQEVVVE-KDKEIAKLQY | 71 |
| | | F N+ +Y++L++Q +D LEK+R L E+ KN+ + + KD + K | |
| Sbjct: | 71 | FLANDRDYNELVKQ----RYD------LEKQRDELKEKLKNEGNKAIAHFKDSDEYKNLI | 120 |
| Query: | 72 | KVKQFLIEKDNLLKDNEYQLAEQLNQKDMMLRD--------LENQIDRLRLEHENSLQEA | 123 |
| | | K ++ + + ++ NE +++ ++ L+ L+N I + ++ +N+ + A | |
| Sbjct: | 121 | KAQEKINSLNKTIESNEQSYKKEIENIELKLKSQFDEETKSLKNTIAKQEIKLDNAEKMA | 180 |
| Query: | 124 | LTKVERE-------RDAIQNQLHIQ--------------------EKEKDLALASVKSDY | 156 |
| | | + + +D I + I+ E +K + + ++S | |
| Sbjct: | 181 | IINFKESNEYQKIIKDKIDLDIEIEKLKFAIQAHEDNMKAAKENWESKKIVEIKELESKK | 240 |
| Query: | 157 | EVQLKAANEQVEFYKNFKAQQSTKAVGESLEHYAETEFNKVRHLAFPNAYFEKDNTLSSR | 216 |
| | | + ++ E +E K K+ + K VGE LE + + +F++ + P+ F K N | |
| Sbjct: | 241 | DKEIHKLTESIEQLKREKSS-NVKLVGEELEQWLKNKFDETYSFSCPDMTFTKINEAID- | 298 |
| Query: | 217 | GSKGDFIY------REKDENDLEFL-SIMFEMKNESDDTIKKHKNEDFFKELDKDRREKS | 269 |
| | | G K DF+ +E +D + + S E K E D K KN +K+LD+DR + | |
| Sbjct: | 299 | GKKADFLLEFFDFGKEMSNDDKKLIFSATIEAKTEFFDNQKGTKNSAHYKKLDQDRINQK | 358 |
| Query: | 270 | CEYAVLVTMLEADNDYYNIGIVDVSHKYPKMYVIRPQFFIQLIGILRNAALNTLKYKQEL | 329 |
| | | EYA+LVT LE ++ + ++ ++Y M+ +RPQ+FI L+ ++RN A TLK K | |
| Sbjct: | 359 | SEYAILVTELEPEDHF----VIKKINEYKNMFAVRPQYFIPLVDMIRNFA--TLKAKINS | 412 |
| Query: | 330 | ALMKEQNIDITHFEEDLDIFKNAFAKN-YNSASKNFQKAIDEIDKSIKRMEAV-KAALTT | 387 |
| | | +++ + D EE+LD K N + +K ID+ IK+ E++ ++A | |
| Sbjct: | 413 | QIIRYE--DRAKIEENLDELKKDIVDNTLKYINDKTKKIIDDSKAIIKKAESIEESAEDI | 470 |
| Query: | 388 | SENQLRLANNKLDDVSVKKL | 407 |
| | | +L K+++++++K+ | |
| Sbjct: | 471 | INKKLNTLKKKINELTIRKI | 490 |

[10331] A related DNA sequence was identified in S. pyogenes <SEQ ID 5847> which encodes the amino acid sequence <SEQ ID 5848>. Analysis of this protein sequence reveals the following:

```
Possible site: 33
>>> Seems to have no N-terminal signal sequence
----- Final Results -----
                            bacterial cytoplasm --- Certainty = 0.3192(Affirmative) < succ>
                              bacterial membrane --- Certainty = 0.0000(Not Clear) < succ>
                                bacterial outside --- Certainty = 0.0000(Not Clear) < succ>
```

[10332] An alignment of the GAS and GBS proteins is shown below.

| Identities = 310/445 (69%), Positives = 352/445 (78%), Gaps = 22/445 (4%) | | | |
|---|---|---|---|
| Query: | 1 | MNEIKCPHCGTAFAINESEYHQLLEQIRGDAFDKEVSERLEKERLILGEQAKNQLQEVVV | 60 |
| | | MNEIKCPHC T F INESEY QLLEQ+RG AFD+E+ +RL E +L E+AK+QL EVV | |
| Sbjct: | 1 | MNEIKCPHCHTLFTINESEYSQLLEQVRGQAFDEELKKRLINEIALLEEKAKHQLHEVVA | 60 |
| Query: | 61 | EKDKEIAKLQYKVKQF-----------LIEKDNLL-----------KDNEYQLAEQLNQK | 98 |
| | | +K+ I L +++Q L +KD L+ N +LA QL +K | |
| Sbjct: | 61 | KKETAITSLTNQLEQIEKEQAYLRQEELAKKDQLIASLEAKLDKLASQNALELANQLAEK | 120 |
| Query: | 99 | DMMLRDLENQIDRLRLEHENSLQEALTKVERERDAIQNQLHIQEKEKDLALASVKSDYEV | 158 |
| | | D + L NQ+D+L LE + + Q L +E+ERD I+NQL +Q KE +L+LASV+SDYE | |
| Sbjct: | 121 | DKEVVSLTNQLDKLALEKDATFQSKLATIEKERDGIKNQLALQAKESELSLASVRSDYEA | 180 |
| Query: | 159 | QLKAANEQVEFYKNFKAQQSTKAVGESLEHYAETEFNKVRHLAFPNAYFEKDNTLSSRGS | 218 |
| | | QLKAANEQVEFYKNFKAQQSTKA+GESLE YAETEFNKVR AFPNA F KDN LSSRGS | |
| Sbjct: | 181 | QLKAANEQVEFYKNFKAQQSTKAIGESLELYAETEFNKVRSYAFPNASFVKDNQLSSRGS | 240 |
| Query: | 219 | KGDFIYREKDENDLEFLSIMFEMKNESDDTIKKHKNEDFFKELDKDRREKSCEYAVLVTM | 278 |
| | | KGD+IYRE D N +E LSIMFEMKNE+D T KHKN DFFKELDKDRREK CEYAVLV+M | |
| Sbjct: | 241 | KGDYIYREVDANGVEILSIMFEMKNEADTTKTKHKNSDFFKELDKDRREKDCEYAVLVSM | 300 |
| Query: | 279 | LEADNDYYNTGIVDVSHKYPKMYVIRPQFFIQLIGILRNAALNTLKYKQELALMKEQNID | 338 |
| | | LEADNDYYNTGIVDVSH+Y KMYV+RPQ FIQLIGILRNAALN+L YKQELAL+KEQNID | |
| Sbjct: | 301 | LEADNDYYNTGIVDVSHEYQKMYVVRPQLFIQLIGILRNAALNSLHYKQELALVKEQNID | 360 |
| Query: | 339 | ITHFEEDLDIFKNAFAKNYNSASKNFQKAIDEIDKSIKRMEAVKAALTTSENQLRLANNK | 398 |
| | | ITHFEEDLD FKNAFAKNY SAS NF+KAIDEIDKSIKRME VK LTTSENQLRLANNK | |
| Sbjct: | 361 | ITHFEEDLDQFKNAFAKNYQSASNNFKKAIDEIDKSIKRMEEVKRFLTTSENQLRLANNK | 420 |
| Query: | 399 | LDDVSVKKLTRKNPTMKAKFDALKD | 423 |
| | | L+DVSVKKLTR+NPTM+KF+ALKD | |
| Sbjct: | 421 | LEDVSVKKLTRQNPTMREKFEALKD | 445 |

[10333] SEQ ID 5846 (GBS304) was expressed in E. coli as a His-fusion product. The purified protein is shown in FIG. 206, lane 7.

[10334] Based on this analysis, it was predicted that these proteins and their epitopes could be useful antigens for vaccines or diagnostics.

### EXAMPLE 1879

[10335] A DNA sequence (GBSx1987) was identified in S. agalactiae <SEQ ID 5849> which encodes the amino acid sequence <SEQ ID 5850>. This protein is predicted to be unnamed protein product. Analysis of this protein sequence reveals the following:

```
Possible site: 34
>>> Seems to have no N-terminal signal sequence
----- Final Results -----
                            bacterial cytoplasm --- Certainty = 0.1845(Affirmative) < succ>
                              bacterial membrane --- Certainty = 0.0000(Not Clear) < succ>
                                bacterial outside --- Certainty = 0.0000(Not Clear) < succ>
```

[10336] The protein has no significant homology with any sequences in the GENPEPT database.

[10337] A related DNA sequence was identified in S. pyogenes <SEQ ID 5851> which encodes the amino acid sequence <SEQ ID 5852>. Analysis of this protein sequence reveals the following:

```
Possible site: 51
>>> Seems to have no N-terminal signal sequence
----- Final Results -----
                            bacterial cytoplasm --- Certainty = 0.2492(Affirmative) < succ>
                              bacterial membrane --- Certainty = 0.0000(Not Clear) < succ>
                                bacterial outside --- Certainty = 0.0000(Not Clear) < succ>
```

[10338] An alignment of the GAS and GBS proteins is shown below.

| Identities = 113/180 (62%), Positives = 141/180 (77%) | | | |
|---|---|---|---|
| Query: | 16 | LSELVDCFKGKAVPSKAEAGDIRIINLSDMSPLGIDYHNLRTFQDEQRSLLKYLLQEGDV | 75 |
| | | L +VDCFKGKAV SK GD+ +INLSDM LGI YH LRTFQ ++R LL+YLL++GDV | |
| Sbjct: | 18 | LGTVVDCFKGKAVSSKVVPGDVGLINLSDMGTLGIQYHQLRTFQMDRRQLLRYLLEDGDV | 77 |
| Query: | 76 | LIASKGTVKKVAIFEEQDYPVVASANITILRPTQHIRGYYLKLFFDSEEGQQALENANKG | 135 |
| | | LIASKGT+KKV +F +Q+ VVAS+NIT+LRP + +RGYY+K F DS GQ L+ A+ G | |
| Sbjct: | 78 | LIASKGTLKKVCVFHKQNRDVVASSNITVLRPQKLLRGYYIKFFLDSPIGQALLDVADHG | 137 |
| Query: | 136 | KAVMNISTKELLNIAIPSIPLFRQDYLIQRYKQGLNDYKRKIARAEQEWERIQNDIRQQL | 195 |
| | | K V+N+STKELL+I IP IPL +QDYLI Y +GL DY RK+ RAEQEWE IQN+I++ L | |
| Sbjct: | 138 | KDVINLSTKELLDIPIPVIPLVKQDYLINHYLRGLTDYHRKLNRAEQEWEYIQNEIQKGL | 197 |

[10339] Based on this analysis, it was predicted that these proteins and their epitopes could be useful antigens for vaccines or diagnostics.

### EXAMPLE 1880

[10340] A DNA sequence (GBSx1988) was identified in S. agalactiae <SEQ ID 5853> which encodes the amino acid sequence <SEQ ID 5854>. Analysis of this protein sequence reveals the following:

| Possible site: 15 | | | | |
|---|---|---|---|---|
| >>> Seems to have a cleavable N-term signal seq. | | | | |
| | INTEGRAL | Likelihood = −7.43 | Transmembrane | 62-78 (55-82) |
| | INTEGRAL | Likelihood = −2.87 | Transmembrane | 130-146 (130-150) |
| | INTEGRAL | Likelihood = −1.28 | Transmembrane | 37-53 (37-53) |

```
----- Final Results -----
                              bacterial membrane --- Certainty = 0.3972(Affirmative) < succ>
                                bacterial outside --- Certainty = 0.0000(Not Clear) < succ>
                            bacterial cytoplasm --- Certainty = 0.0000(Not Clear) < succ>
```

[10341] A related GBS nucleic acid sequence <SEQ ID 9347> which encodes amino acid sequence <SEQ ID 9348> was also identified.

[10342] The protein has homology with the following sequences in the GENPEPT database.

| >GP: CAA22372 GB: AL034446 putative transmembrane protein | | | |
|---|---|---|---|
| [Streptomyces coelicolor A3(2)] | | | |
| Identities = 38/139 (27%), Positives = 64/139 (45%), Gaps = 5/139 (3%) | | | |
| Query: | 15 | SASVEILCRGWLLPVSATKYSKIVSVSISSIFFGLLHSANNHVSLISIFNLCL-FGLFLS | 73 |
| | | +A+ E++ RG L + +++ ++ + FGL+H N +L + + G L+ | |
| Sbjct: | 143 | AATEEVVFRGVLFRIIEEHIGTYLALGLTGLVFGLMHLLNEDATLWGALAIAIEAGFMLA | 202 |
| Query: | 74 | LYVILKGNIWGACGIHGAWNCVQGSVFGIEVSGEPMLSNSLVHVKTYGADWISGGKFGVE | 133 |
| | | N+W G+H WN G VF VSG S L+ G ++GG FG E | |
| Sbjct: | 203 | AAYAATRNLWLTIGVHFGWNFAAGGVFSTVVSGNGD-SEGLLDATMSGPKLLTGGDFGPE | 261 |
| Query: | 134 | GSMIT---SIVLIVACYWL | 149 |
| | | GS+ + ++L + WL | |
| Sbjct: | 262 | GSVYSVGFGVLLTLVFLWL | 280 |

[10343] No corresponding DNA sequence was identified in S. pyogenes.

[10344] Based on this analysis, it was predicted that these proteins and their epitopes could be useful antigens for vaccines or diagnostics.

### EXAMPLE 1881

[10345] A DNA sequence (GBSx1989) was identified in S. agalactiae <SEQ ID 5855> which encodes the amino acid sequence <SEQ ID 5856>, which is a methylase gene homolog. Analysis of this protein sequence reveals the following:

```
Possible site: 33
>>> Seems to have no N-terminal signal sequence
----- Final Results -----
                            bacterial cytoplasm --- Certainty = 0.2192(Affirmative) < succ>
                              bacterial membrane --- Certainty= 0.0000(Not Clear) < succ>
                                bacterial outside --- Certainty = 0.0000(Not Clear) < succ>
RGD motif: 264-266
```

[10346] A related GBS nucleic acid sequence <SEQ ID 9929> which encodes amino acid sequence <SEQ ID 9930> was also identified.

[10347] The protein has homology with the following sequences in the GENPEPT database.

| >GP: BAA87672 GB: AB016260 Hypothetical gene, methylase gene homolog | | | |
|---|---|---|---|
| [Agrobacterium tumefaciens] | | | |
| Identities = 358/1238 (28%), Positives = 595/1238 (47%), | | | |
| Gaps = 99/1238 (7%) | | | |
| Query: | 1072 | KEVARIKGMVDIRNAYQEVIAIQRYYDYDKETFNHLLGKLNRTYDSFVKHYGYLNSAV-- | 1129 |
| | | K V I+ ++ IR+A +EV+ Q + L +L + SFV+ +G +N | |
| Sbjct: | 497 | KHVRIIRKLIPIRDAVREVLKAQEL----DRPWKDLQVRLRVAWSSFVRDFGPINHTTVS | 552 |
| Query: | 1130 | -----------------NRNLFDSDDKYSLLASLEDESL--DPSGKSVIYTKSLAFEKAL | 1170 |
| | | N F D L+AS+ED L D + I+T E+ + | |
| Sbjct: | 553 | ITEDPESGETRESHRRPNLQPFADDPDCWLVASIEDYDLENDTAKPGAIFT-----ERVI | 607 |
| Query: | 1171 | VRPEKEVKKVHTALDALNSSLADGRGVDFAYMMSIYQVESQMTLIEELGDLIMPDPEKYL | 1230 |
| | | P V + +A DAL L + VD ++ + + ++ ELG I DP | |
| Sbjct: | 608 | SPPAPPV--ITSAADALAVVLNERGRVDLDHIAELLHRDPD-DVVAELGSAIFRDP---- | 660 |
| Query: | 1231 | NGELTYVSRQDFLSGDVVTKLEVVDLFVKQDNQDFNWSHYAGLLEAIKPARITLADIDYR | 1290 |
| | | + ++ +LSG V KL+V + D ++ L ++P + +DI R | |
| Sbjct: | 661 | -ADGSWQMADAYLSGPVRDKLKVAEAAAALDPV---YNRNVTALAGVQPVDLRPSDITAR | 716 |
| Query: | 1291 | IGSRWIPLAVYGKFAQETFMGKAYELSDQ-EVATVLEVSPIDGVITYQSKFAYTYSNATD | 1349 |
| | | +G+ WIP A F +E MG + E+A+ + G + A T TD | |
| Sbjct: | 717 | LGAPWIPAADVVAFVKE-MMGTDIRIHHMPELASWTVEARQLGYLA-----AGTSEWGTD | 770 |
| Query: | 1350 | RSLGVPASRYDSGRKIFENLLNSNQPTITKQVVEGDKKKNVTDVEKTTVLRAKETHLQEL | 1409 |
| | | R ++ + LNS P I + +GD ++ V +V T + K +++ | |
| Sbjct: | 771 | RR---------HAGELLSDALNSRVPQIFDTIRDGDSERRVLNVVDTEAAKEKLHKIKDA | 821 |
| Query: | 1410 | FQGFVAKYPEVQQMIEDTYNRLYNRTVSKSYDGSHLTIDGLAQNISLRPHQKNAIQRIVE | 1469 |
| | | FQ ++ P+ + YN +N + + G HL + G + L HQK I RI+ | |
| Sbjct: | 822 | FQRWIWSDPDRTDRLARVYNDRFNNIAPRKFSGDHLNLPGASGAFVLYGHQKRGIWRIIS | 881 |
| Query: | 1470 | EKRALLAHEVGSGKTLTMLGAGFKLKELGMVHKPLYVVPSSLTAQEGQEIMKFFPTKKVY | 1529 |
| | | LAH VG+GKT+TM + + + LG++ K + VVP AQ +E + +PT ++ | |
| Sbjct: | 882 | SGSTYLAHAVGAGKTMTMAASIMEQRRLGLIAKAMQVVPGHCLAQAAREFLALYPTARIL | 941 |
| Query: | 1530 | VTTKKDFAKAKRKQFVSRIITGDYDAIVIGDSQFEKIPMSREKQVTYINDKLEQLREIKL | 1589 |
| | | V + +F+K KR +F+SR T +DAI+I S F I + + I+D+LE + L | |
| Sbjct: | 942 | VADETNFSKDKRARFLSRAATATWDAIIITHSAFRFIGVPAAFESQMIHDELELYETLLL | 1001 |
| Query: | 1590 | GSDSDYTV--KEAERSIKGLEHQLEELQKLERDTFIEFENLGIDFLFVDEAHHFKNIRPI | 1647 |
| | | + + V K ER +GL+ +LE L +D + +G+D + VDEA F+ + | |
| Sbjct: | 1002 | KVEDEDRVSRKRLERLKEGLQERLEALST-RKDDLLTIAEIGVDQIIVDEAQEFRKLSFA | 1060 |
| Query: | 1648 | TGLGNVAGITNTTSKKNVDMEMKVRQVQAEHGDRNVVFATGTPVSNSISELFTMMDYIQP | 1707 |
| | | T + + G+ S++ D+ +K R ++ + R +V A+GTP++N++ E+F++ + | |
| Sbjct: | 1061 | TNMSTLKGVDPNGSQRAWDLYVKSRFIETINPGRALVLASGTPITNTLGEMFSVQRLMGH | 1120 |
| Query: | 1708 | DVLERYLVSNFDSWVGAFGNIENSMELAPTGDKYQPKKRFKKFVNLPELMRIYKETADI- | 1766 |
| | | LE + FD+W FG+ +EL P+G KY+P RF FVN+PEL+ +++ AD+ | |
| Sbjct: | 1121 | AALEERGLHEFDAWASTFGDTTTELELQPSG-KYKPVSRFASFVNVPELIAMFRSFADVV | 1179 |
| Query: | 1767 | ---QTSDMLDLP-VPEAKIIAVESELTQAQKYYLEELVKRSDAIKSGS--VDPSRDNMLK | 1820 |
| | | + + +P + + V S+ TQA K++ L +R AI+ P D +L | |
| Sbjct: | 1180 | MPADLREYVKVPAISTGRRQIVTSKPTQAFKHHQMVLAERIKAIEERERPPQPGDDILLS | 1239 |
| Query: | 1821 | ITGEARKLAIDMRLIDPTYSLSDNQKILQVVDNVERIYRDGAGDK-------------AT | 1867 |
| | | + + R AID+RL+D + K+ +V N RI++ AG A | |
| Sbjct: | 1240 | VITDGRHAAIDLRLVDADNDNEPDNKLNNLVSNAFRIWKATAGSVYLRHDSKPFEVPGAA | 1299 |
| Query: | 1868 | QMIFSDIGTPK-SKEEGFDVYNELKDLFVDRGIPKEEIAFVHDANTDEKKNSLSRKVNSG | 1926 |
| | | QMIFSD+GT K GF Y ++D + G+P EIAF+ D E K L V +G | |
| Sbjct: | 1300 | QMIFSDLGTISVEKTRGFSAYRWIRDELIRLGVPASEIAFMQDFKKSEAKQRLFGDVRAG | 1359 |
| Query: | 1927 | EVRILMASTEKGGTGLNVQSRMKAVHYLDVPWRPSDIVQRNGRLIRQGNMHQEVDIYHYI | 1986 |
| | | VR L+ S+E GTG+NVQ R+KA+H+LDVPW PS I QR GR++RQGN H EVDI+ Y | |
| Sbjct: | 1360 | RVRFLIGSSETMGTGVNVQLRLKALHHLDVPWLPSQIEQREGRIVRQGNQHDEVDIFAYA | 1419 |
| Query: | 1987 | TKGSFDNYLWQTQENKLKYITQIMTSKDPVRSAEDIDE-QTMTASDFKALATGNPYLKLK | 2045 |
| | | T+GS D +WQ E K ++I ++ +R EDI E Q + KA+A+G+ L K | |
| Sbjct: | 1420 | TEGSLDATMWQNNERKARFIAAALSGDTSIRRLEDIGEGQANQFAMAKAIASGDQRLMQK | 1479 |
| Query: | 2046 | MELENELTVLENQKRAFNRSKDEYRHTISYSEKHLPIMEKRLSQYDKDIAQSLATKSQDE | 2105 |
| | | LE ++ LE + A + R + +E+ + + +R+++ +DI + + T +DF | |
| Sbjct: | 1480 | AGLEADIARLERLRAAHIDDQHAVRRQLRDAERDIEVSTRRIAEIGQDITRLVPTTGEDF | 1539 |
| Query: | 2106 | VMRFDNQAMDNRAEAGDYLRK-LITYNRSETKEVRTLASFRGFDLKM-TTRGASEPLPET | 2163 |
| | | M + R EAG L K ++T + + +AS GF+L+ R + T | |
| Sbjct: | 1540 | TMTVAGKDYSERKEAGRALMKEILTLVQLSPEGEAVIASIGGFELEYHGQRYGKDGYRYT | 1599 |
| Query: | 2164 | ISLMIVGDNQYTVALDLK-SDVGTIQRISNAIDHIIDDQEKTQELVKDLKDKLRVAKVEV | 2222 |
| | | L G + Y + L + + +G + R+ +A+D ++E+ ++ + D + +L + | |
| Sbjct: | 1600 | TMLKRTGAD-YEIELPVTVTPLGAVSRLEHALDDFDGERERYRQRLGDARRRLASYQSRG | 1658 |
| Query: | 2223 | DKVFPKEEDYQLVKAKYDVLAPLVEKEAEIEEIDAALA | 2260 |
| | | + +++ L EK ++ E++ ALA | |
| Sbjct: | 1659 | E------------GSEFAFAGELAEKHRQLAEVETALA | 1684 |
| Identities = 99/271 (36%), Positives = 153/271 (55%), Gaps = 10/271 (3%) | | | |
| Query: | 607 | RDKVETNIVAIRLVKNLEVEHRNASPSEQELLAKYVGWGG--LANEFFD-----DYNPKF | 659 |
| | | +D+ NI AIRL +E R A+ EQE L ++ G+G LAN F ++ + | |
| Sbjct: | 80 | KDRARDNIAAIRLAAEIEASERPATREEQETLIRFTGFGASDLANGVFRRPGELEFRKGW | 139 |
| Query: | 660 | SKEREELKSLVTDKEYSDMKQSSLTAYYTDPSLIRQMWDKLERDGFTGGKILDPSMGTGN | 719 |
| | | + +L+ V + +Y+ + + + A++T ++R +W L+R G+ GG++L+P +GTG | |
| Sbjct: | 140 | DEIGSDLEDAVGETDYASLARCTQYAHFTPEFIVRAIWSGLQRLGWRGGRVLEPGIGTGL | 199 |
| Query: | 720 | FFAAMPKHLREKSELYGVELDTITGAIAKHLHPNSHIEIKGFETVAFNDNSFDLVISNVP | 779 |
| | | F A MP+ LR+ S + GVELD +T I + L P + I F SFDL I N P | |
| Sbjct: | 200 | FPALMPEALRDLSHVTGVELDPVTACIVRLLQPRARILTGDFARTEL-PASFDLAIGNPP | 258 |
| Query: | 780 | FANIRIADNRYDRP--YMIHDYFVKKSLDLLHDGGQVAIISSTGTMDKRTENILQDIRET | 837 |
| | | F++ + +R R +HDYFV +S+DLL G A ++S+GTMDK Q I T | |
| Sbjct: | 259 | FSDRTVRSDRAYRSLGLRLHDYFVARSIDLLKPGAFAAFVTSSGTMDKADSAARQHIATT | 318 |
| Query: | 838 | TEFLGGVRLPDSAFKAIAGTSVTTDMLFFQK | 868 |
| | | + + +RLP+ +F+A AGT V D+LFF+K | |
| Sbjct: | 319 | ADLIAAIRLPEGSFRADAGTDVVVDILFFRK | 349 |

[10348] SEQ ID 5856 (GBS327N) was expressed in E. coli as a GST-fusion product. SDS-PAGE analysis of total cell extract is shown in FIG. 148 (lane 8-10; MW 140 kDa). It was also expressed in E. coli as a His-fusion product. SDS-PAGE analysis of total cell extract is shown in FIG. 148 (lane 11-13; MW 115 kDa) and in FIG. 182 (lane 8; MW 115 kDa).

[10349] Purified GBS327N-GST is shown in FIG. 243, lane 5; Purified GBS327N-His is shown in FIG. 235, lane 5.

[10350] GBS327C was expressed in E. coli as a GST-fusion product. SDS-PAGE analysis of total cell extract is shown in FIG. 148 (lane 14; MW 73 kDa).

[10351] Based on this analysis, it was predicted that this protein and its epitopes, could be useful antigens for vaccines or diagnostics.

### EXAMPLE 1882

[10352] A DNA sequence (GBSx1990) was identified in S. agalactiae <SEQ ID 5857> which encodes the amino acid sequence <SEQ ID 5858>. Analysis of this protein sequence reveals the following:

```
Possible site: 13
>>> Seems to have no N-terminal signal sequence
----- Final Results -----
                            bacterial cytoplasm --- Certainty = 0.3656(Affirmative) < succ>
                              bacterial membrane --- Certainty = 0.0000(Not Clear) < succ>
                                bacterial outside --- Certainty = 0.0000(Not Clear) < succ>
```

[10353] The protein has no significant homology with any sequences in the GENPEPT database.

[10354] No corresponding DNA sequence was identified in S. pyogenes.

[10355] Based on this analysis, it was predicted that this protein and its epitopes, could be useful antigens for vaccines or diagnostics.

### EXAMPLE 1883

[10356] A repeated DNA sequence (GBSx1991) was identified in S. agalactiae <SEQ ID 5859> which encodes the amino acid sequence <SEQ ID 5860>. This protein is predicted to be giant membrane protein. Analysis of this protein sequence reveals the following:

```
Possible site: 33
>>> Seems to have no N-terminal signal sequence
----- Final Results -----
                            bacterial cytoplasm --- Certainty = 0.3698(Affirmative) < succ>
                              bacterial membrane --- Certainty = 0.0000(Not Clear) < succ>
                                bacterial outside --- Certainty = 0.0000(Not Clear) < succ>
```

[10357] The protein has homology with the following sequences in the GENPEPT database.

| >GP: AAG19662 GB: AE005054 calcium-binding protein | | | |
|---|---|---|---|
| homology; Cbp [Halobacterium sp. NRC-1] | | | |
| Identities = 22/43 (51%), Positives = 29/43 (67%), | | | |
| Gaps = 1/43 (2%) | | | |
| Query: | 9 | KDSDQDGLTDAQELAL-GTDPQSVDTDGDGQADLEELQSGHSP | 50 |
| | | +D+D DGL+D E+ + GTDP DTDGDG D EL++G P | |
| Sbjct: | 198 | RDTDDDGLSDGVEVRVAGTDPTERDTDGDGVDDAAELRAGSLP | 240 |

[10358] No corresponding DNA sequence was identified in S. pyogenes.

[10359] Based on this analysis, it was predicted that this protein and its epitopes, could be useful antigens for vaccines or diagnostics.

### EXAMPLE 1884

[10360] A DNA sequence (GBSx1992) was identified in S. agalactiae <SEQ ID 5861> which encodes the amino acid sequence <SEQ ID 5862>. Analysis of this protein sequence reveals the following:

| Possible site: 52 | | | | |
|---|---|---|---|---|
| >>> Seems to have no N-terminal signal sequence | | | | |
| | INTEGRAL | Likelihood = −2.39 | Transmembrane | 1609-1625 (1609-1625) |
| | INTEGRAL | Likelihood = −1.81 | Transmembrane | 30-46 (29-46) |

```
----- Final Results -----
                              bacterial membrane --- Certainty = 0.1956(Affirmative) < succ>
                                bacterial outside --- Certainty = 0.0000(Not Clear) < succ>
                            bacterial cytoplasm --- Certainty = 0.0000(Not Clear) < succ>
LPXTG motif 1600-1604
```

[10361] The protein has homology with the following sequences in the GENPEPT database.

| !GB: X57841 antigen I/II [Streptococcus sobrinus] (v . . . | | | |
|---|---|---|---|
| >GP: CAA40973 GB: X57841 antigen I/II [Streptococcus sobrinus] | | | |
| Identities = 419/1436 (29%), Positives = 608/1436 (42%), Gaps = 310/1436 (21%) | | | |
| Query: | 23 | KSKKYRTLCSVALGTMVTAVVAWGGTVAHADEVTTSV----DTTIQRTE--NPATNLPEA | 76 |
| | | K K RTL LGT + A A G A A+E +T+ DT + TE NPATNLP+ | |
| Sbjct: | 23 | KVKSGRTLSGALLGTAILASGA--GQKALAEETSTTSTSGGDTAVVGTETGNPATNLPDK | 80 |
| Query: | 77 | QPNP-------------------VSEQTESMASTGQSNGAIAVTVPHDTVT-----QAVE | 112 |
| | | Q NP V T + +S VTV D + + | |
| Sbjct: | 81 | QDNPSSQAETSQAQARQKTGAMSVDVSTSELDEAAKSPQEAGVTVSQDATVNKGTVEPSD | 140 |
| Query: | 113 | EAKAEGVSTVEDSPMDLGNTRSAVET---------------NQQIS-------------K | 144 |
| | | EA + +D + + A E NQ+I+ K | |
| Sbjct: | 141 | EANQKEPEIKDDYSKQAADIQKATEDYKASVAANQAETDRINQEIAAKKAQYEQDLAANK | 200 |
| Query: | 145 | AD-------------------ADTQKQVETINEVTK----TYKADKATYESNKARIEQEN | 181 |
| | | A+ A QK + I + Y A K Y+ AR++ N | |
| Sbjct: | 201 | AEVERSLMRMRKPRPIYEAKLAQNQKDLAAIQQANSDSQAAYAAAKEAYDKEWARVQAAN | 260 |
| Query: | 182 | KELSQAYEGANQTGKETNAWVDTKVNDLKARYADADVTVKEQ-------VVSSGNGTSVL | 234 |
| | | +AYE A N + ++ ++ R A AD K +GN + | |
| Sbjct: | 261 | AAAKKAYEEALAANTAKNDQIKAEIEAIQQRSAKADYEAKLAQYEKDLAAAQAGNAANEA | 320 |
| Query: | 235 | DY----TNYGKAVETIQSTNEQAVADY----LTKKTKADDIVAKNQAIQKENEA------ | 280 |
| | | DY Y + + +Q+ N A Y K I A+N+AIQ+ +A | |
| Sbjct: | 321 | DYQAKKAAYEQELARVQAANAAAKQAYEQALAANSAKNAQITAENEAIQQNAQAKADYEA | 380 |
| Query: | 281 | -------GLANAKADNEAIERRNQAGQAAVDAEN---RAGQAAVDQANQEKQQLVSDRAA | 330 |
| | | LA A++ N A E Q AA + E +A AA QA +++ Q + + A | |
| Sbjct: | 381 | KLAQYQKDLAAAQSGNAANEADYQEKLAAYEKELARVQAANAAAKQAYEQQVQQANAKNA | 440 |
| Query: | 331 | EIEAITKRNKEKEAAARKENEAIDAYNTKEMERYQRDLAEIS------------------ | 372 |
| | | EI + +E+ A A+ + E + +E+ +Y++DLAE | |
| Sbjct: | 441 | EITEANRAIRERNAKAKTDYELKLSKYQEELAQYKKDLAEYPAKLQAYADEQAAIKAALA | 500 |
| Query: | 373 | -----KGEEGYISEALAQALNLNNGEPQAQHGAITRN----------------------- | 404 |
| | | K E+G +SE AQ+L + + EP AQ +T | |
| Sbjct: | 501 | ELEKHKNEDGNLSEPSAQSL-VYDLEPNAQVALVTDGKLLKASALDEAFSHDEKNYNNHL | 559 |
| Query: | 405 | --PDQI----------ISTGDALLGGYSRILDSTGF-----------FVYDMFKTGETLS | 441 |
| | | PD + +++ L G + D G+ F + K G++ + | |
| Sbjct: | 560 | LQPDNLNVTYLEQADDVASSVELFGNFG---DKAGWTTTVSNGAEVKFASVLLKRGQSAT | 616 |
| Query: | 442 | FNYQNLQHARFDGKKISRVTYDITNLVSPAG-----TNAVKLVVPNDPTEGFIAYRNDGN | 496 |
| | | Y NL+++ ++GKKIS+V Y T V P T V L + DPT G A G | |
| Sbjct: | 617 | ATYTNLKNSYYNGKKISKVVYKYT--VDPDSKFQNPTGNVWLFIFTDPTLGVFASAYTGQ | 674 |
| Query: | 497 | GDWRTD---KMEFRVVAKYYLEDGSQVTFSKEKPGVFTHSSLNHNDIGLEYVKDSSGKFV | 553 |
| | | + T K EF +Y EDG+ + F + + +SLN +E KD SG FV | |
| Sbjct: | 675 | NEKDTSIFIKNEF----TFYDEDGNPIDFDN---ALLSVASLNREHNSIEMAKDYSGTFV | 727 |
| Query: | 554 | PINGSTVQVTN--------------EGLARSLGSNRASDLNLPEEWDTTSSRYAYKGAIV | 599 |
| | | I+GS++ N EG + RAS+ WD+ + ++ GA | |
| Sbjct: | 728 | KISGSSIGEKNGMIYATDTLNFKKGEGGSLHTMYTRASEPG--SGWDSADAPNSWYGAGA | 785 |
| Query: | 600 | STVTSGNTY--------TVTFGQGDMPQNVGL--------SYWFALN------------- | 630 |
| | | ++ N Y T +MPQ G + W++LN | |
| Sbjct: | 786 | VRMSGPNNYITLGATSATNVLSLAEMPQVPGKDNTAGKKPNIWYSLNGKIRAVNVPKVTK | 845 |
| Query: | 631 | --TLPVARTVTPYSPKPHVTVEL-----EPIPEPITVTPDIYTPKTFTPEKPVTFT---- | 679 |
| | | P P P V EL EP EP TP P PEKPV T | |
| Sbjct: | 846 | EKPTPPVEPTKPDEPTYEVEKELVDLPVEPKYEP-EPTPPSKNPDQSIPEKPVEPTYEVE | 904 |
| Query: | 680 | ----PKPLDEVVQPSLTLTKVT-------LPVKPIPKELPTPP------------QVPTV | 716 |
| | | P P++ + T + T PV+P + LPTPP VPTV | |
| Sbjct: | 905 | KELEPAPVEPSYEKEPTPPQSTPDQEEPEKPVEPSYQSLPTPPVEPVYETVPGPVSVPTV | 964 |
| Query: | 717 | HYHAYRLTTTSEIMKEVVNSDQANLHEKTVAKDSTVIYPLTVDALSPNRAQTTSLIFEDY | 776 |
| | | YH Y+L + KE+ N D ++ + VAK STV + L L R +TTS + D | |
| Sbjct: | 965 | RYHYYKLAVQPGVTKEIKNQDDLDIDKTLVAKQSTVKFQLKTADLPAGRPETTSFVLMDP | 1024 |
| Query: | 777 | LPAGYLFDKETTQKENGNYVLSFDETKNFVTLTAKENLLQEVNKDLTQVYQLTAPKLYGS | 836 |
| | | LP+GY + E T+ + + S+D + VT TA L +N+DLT+ P + G | |
| Sbjct: | 1025 | LPSGYQLNLEATKVASPGFEASYDAMTHTVTFTATAETLAALNQDLTKAVATIYPTVVGQ | 1084 |
| Query: | 837 | VQNDGATYSNSYKLLLNKGTTNAYTVTSNVVTVRTPG-----DGETTTLITPDKNNENAD | 891 |
| | | V NDGATY+N++ L++N +AY + SN+V V TPG D + ITP K N+N + | |
| Sbjct: | 1085 | VLNDGATYTNNFTLMVN----DAYGIKSNIVRVTTPGKPNDPDNPSNNYITPHKVNKNEN | 1140 |
| Query: | 892 | GVLINDTVVALGTTNHYRLTWDLDQYKGDRSAKETIARGFFFVDDYPEEVLDVVENGTAI | 951 |
| | | GV+I+ V GTTN+Y LTWDLDQYKGD+SAKE I +GFF+VDDYPEE LD+ + + | |
| Sbjct: | 1141 | GVVIDGKSVLAGTTNYYELTWDLDQYKGDKSAKEIIQKGFFYVDDYPEEALDLRTDLIKL | 1200 |
| Query: | 952 | TTLDGQKVSGITVKNYASLNEAPKDLQDKLARAKITPTGAFQVFMPDDNQAFYDQYVQTG | 1011 |
| | | T +G+ V+G++V +YASL AP +QD L +A I P GAFQVF DD QAFYD YV TG | |
| Sbjct: | 1201 | TDANGKAVTGVSVADYASLEAAPAAVQDMLKKANIIPKGAFQVFTADDPQAFYDAYVVTG | 1260 |
| Query: | 1012 | TSLALLTKMTVKDSLYGQTKTYTNKAYQVDFGNGYETKEVTNTLVSPEPKKQ-NLNKDKV | 1070 |
| | | T L ++T MTVK + +Y N+AYQ+DFGNGYE+ V N + P+K L D | |
| Sbjct: | 1261 | TDLTIVTPMTVKAEMGKTGGSYENRAYQIDFGNGYESNLVVNNVPKINPEKDVTLTMDPA | 1320 |
| Query: | 1071 | D---INGKPMLVGTQNHYTLSWDLDQYRGIKADNSQIAQGFYFVDDYPE-----EALLPD | 1122 |
| | | D ++G+ + + +Y L + I AD+++ + F DDY + | |
| Sbjct: | 1321 | DSTNVDGQTIALNQVFNYRLIGGI-----IPADHAEELFEYSFSDDYDQTGDQYTGQYKA | 1375 |
| Query: | 1123 | EAAIQFVTSDGKTV-SGITVKSY--SQLLEAPKTLQAAFSKQKIQPKGAFQVFMPE | 1175 |
| | | A + DG + +G + SY +Q+ EA + F + ++ F E | |
| Sbjct: | 1376 | FAKVDLTLKDGTIIKAGTDLTSYTEAQVDEANGQIVVTFKEDFLRSVSVDSAFQAE | 1431 |
| Identities = 209/442 (47%), Positives = 280/442 (63%), Gaps = 27/442 (6%) | | | |
| Query: | 1198 | TVLETMLNSGKSY-ENVAYQVDFGQAYETNTVTNFVPK------------VTPHKSNTNQ | 1244 |
| | | TV+ +LN G +Y N V+ ++N V P +TPHK N N+ | |
| Sbjct: | 1080 | TVVGQVLNDGATYTNNFTLMVNDAYGIKSNIVRVTTPGKPNDPDNPSNNYITPHKVNKNE | 1139 |
| Query: | 1245 | EGISIDGKTVLPNTVNYYKIVLDYSQYKDMVVTDDVLAKGFYMVDDYPEEALTLNPDGIQ | 1304 |
| | | G+ IDGK+VL T NYY++ D QYK +++ KGF+ VDDYPEEAL L D I+ | |
| Sbjct: | 1140 | NGVVIDGKSVLAGTTNYYELTWDLDQYKGDKSAKEIIQKGFFYVDDYPEEALDLRTDLIK | 1199 |
| Query: | 1305 | VLDKDGNRVSGISVSTYASLSEAPKVVQDAMAKRQFTPKGAIQVLSSDDPKVFYDTYVKT | 1364 |
| | | + D +G V+G+SV+ YASL AP VQD + K PKGA QV ++DDP+ FTD YV T | |
| Sbjct: | 1200 | LTDANGKAVTGVSVADYASLEAAPAAVQDMLKKANIIPKGAFQVFTADDPQAFYDAYVVT | 1259 |
| Query: | 1365 | GQTLVVTLPMTVKNELTKTGGQYENTAYQIDFGLAYVTETVVNNVPKLDPQKDVVIDLSH | 1424 |
| | | G L + PMTVK E+ KTGG YEN AYQIDFG Y + VVNNVPK++P+KDV + + | |
| Sbjct: | 1260 | GTDLTIVTPMTVKAEMGKTGGSYENRAYQIDFGNGYESNLVVNNVPKINPEKDVTLTMPP | 1319 |
| Query: | 1425 | KDA-SLDGKEVALHQTFNYRLVGAMIPSNRATDLFEYGFEDNYDEKHDEYNGVYRSYLMT | 1483 |
| | | D+ ++DG+ +AL+Q FNYRL+G +IP++ A +LFEY F D+YD+ D+Y G Y+++ | |
| Sbjct: | 1320 | ADSTNVDGQTIALNQVFNYRLIGGIIPADHAEELFEYSFSDDYDQTGDQYTGQYKAFAKV | 1379 |
| Query: | 1484 | DVILKDGSVLKEGTEVTKYTLQQVDTENGLVSISFDKSFLETVSDDSAFQADVYLQMKRI | 1543 |
| | | D+ LKDG+++K GT++T YT QVD NG + ++F + FL +VS DSAFQA+VYLQMKRI | |
| Sbjct: | 1380 | DLTLKDGTIIKAGTDLTSYTEAQVDEANGQIVVTFKEDFLRSVSVDSAFQAEVYLQMKRI | 1439 |
| Query: | 1544 | AAGQVENTYLHTVNGYVISSNTVVTHTPQPEEPSPNQP--------TPPQPPIETIEPPV | 1595 |
| | | A G NTY++TVNG SSNTV T TP+P++PSP P P Q PP | |
| Sbjct: | 1440 | AVGTFANTYVNTVNGITYSSNTVRTSTPEPKQPSPVDPKTTTTVVFQPRQGKAYQPAPPA | 1499 |
| Query: | 1596 | PASILPNTGEQES----LLGLI | 1613 |
| | | A LP TG+ + LLGL+ | |
| Sbjct: | 1500 | GAQ-LPATGDSSNAYLPLLGLV | 1520 |
| Identities = 100/210 (47%), Positives = 137/210 (64%), Gaps = 4/210 (1%) | | | |
| Query: | 1060 | PKKQNLNKDKVDINGKPMLVGTQNHYTLSWDLDQYRGIKADNSQIAQGFYFVDDYPEEAL | 1119 |
| | | P K N N++ V I+GK +L GT N+Y L+WDLDQY+G K+ I +GF++VDDYPEEAL | |
| Sbjct: | 1132 | PHKVNKNENGVVIDGKSVLAGTTNYYELTWDLDQYKGDKSAKEIIQKGFFYVDDYPEEAL | 1191 |
| Query: | 1120 | LPDEAAIQFVTSDGKTVSGITVKSYSQLLEAPKTLQAAFSKQKIQPKGAFQVFMPEDPQA | 1179 |
| | | I+ ++GK V+G++V Y+ L AP +Q K I PKGAFQVF +DPQA | |
| Sbjct: | 1192 | DLRTDLIKLTDANGKAVTGVSVADYASLEAAPAAVQDMLKKANIIPKGAFQVFTADDPQA | 1251 |
| Query: | 1180 | FFESYVTKGENITIVTPMTVLETMLNSGKSYENVAYQVDFGQAYETNTVTNFVPKVTPHK | 1239 |
| | | F+++YV G ++TIVTPMTV M +G SYEN AYQ+DFG YE+N V N VPK+ P K | |
| Sbjct: | 1252 | FYDAYVVTGTDLTIVTPMTVKAEMGKTGGSYENRAYQIDFGNGYESNLVVNNVPKINPEK | 1311 |
| Query: | 1240 | SNT----NQEGISIDGKTVLPNTVNYYKIV | 1265 |
| | | T + ++DG+T+ N V Y+++ | |
| Sbjct: | 1312 | DVTLTMDPADSTNVDGQTIALNQVFNYRLI | 1341 |

[10362] There is also homology to SEQ ID 598.

[10363] SEQ ID 5862 (GBS76) was expressed in E. coli as a His-fusion product. SDS-PAGE analysis of total cell extract is shown in FIG. 17 (lane 2; MW 17.4 kDa). The GBS76-His fusion product was purified (FIG. 196, lane 8) and used to immunise mice. The resulting antiserum was used for FACS (FIG. 294), which confirmed that the protein is immunoaccessible on GBS bacteria.

[10364] Based on this analysis, it was predicted that this protein and its epitopes, could be useful antigens for vaccines or diagnostics.

### EXAMPLE 1885

[10365] A DNA sequence (GBSx1993) was identified in S. agalactiae <SEQ ID 5863> which encodes the amino acid sequence <SEQ ID 5864>. This protein is predicted to be abortive infection bacteriophage resistance protein (abiEi). Analysis of this protein sequence reveals the following:

```
Possible site: 31
>>> Seems to have no N-terminal signal sequence
----- Final Results -----
                            bacterial cytoplasm --- Certainty = 0.2765(Affirmative) < succ>
                              bacterial membrane --- Certainty = 0.0000(Not Clear) < succ>
                                bacterial outside --- Certainty = 0.0000(Not Clear) < succ>
```

[10366] A related GBS nucleic acid sequence <SEQ ID 9931> which encodes amino acid sequence <SEQ ID 9932> was also identified.

[10367] The protein has homology with the following sequences in the GENPEPT database.

| >GP: AAB52382 GB: U36837 AbiEi [Lactococcus lactis] | | | |
|---|---|---|---|
| Identities = 51/206 (24%), Positives = 90/206 (42%), Gaps = 23/206 (11%) | | | |
| Query: | 17 | KNNGIVTNKDCKALGIPTIYLTRLEKEGIIFRVEKGIFLTQNGDYDEYYFFQYRFPKAIF | 76 |
| | | K G + K + GI YL + + + V+KG+++ + D + FQ ++ KA+ | |
| Sbjct: | 76 | KYKGNIIRKIVRDEGISDYYLRKFVLKYNLTEVDKGVYIFPHKKKDSLFIFQQKYSKAVI | 135 |
| Query: | 77 | SYISALYLQQFTDEIPQYFDVTVPRGYRF----------------------NTPPANLNI | 114 |
| | | S+ ++LYLQ D IPQ ++VP Y N N+ I | |
| Sbjct: | 136 | SHETSLYLQDVIDYIPQKIQMSVPEKYNISRIQEPHENRLTSYNYVDINSNNIMDKNIPI | 195 |
| Query: | 115 | HFV-SKEYSELGMTTVPTPMGNNVRVYDFERIICDFVIHREKIDSELFVKTLQSYGNYPK | 173 |
| | | + V +K S + TV + +G +RV R I D + K + E+ + ++ Y | |
| Sbjct: | 196 | NLVRNKSISPTQIETVNSFLGLPLRVTSIARSIVDVLKPSHKAEEEVKEQAIKYYLERFP | 255 |
| Query: | 174 | KNLAKLYEYATKMNTLEKVKQTLEVL | 199 |
| | | N+ +L A N L++++ L +L | |
| Sbjct: | 256 | DNIVRLKRIAKTQNVLKELEYYLILL | 281 |

[10368] No corresponding DNA sequence was identified in S. pyogenes.

[10369] Based on this analysis, it was predicted that this protein and its epitopes, could be useful antigens for vaccines or diagnostics.

### EXAMPLE 1886

[10370] A DNA sequence (GBSx1994) was identified in S. agalactiae <SEQ ID 5865> which encodes the amino acid sequence <SEQ ID 5866>. This protein is predicted to be abortive infection bacteriophage resistance protein (abiEii). Analysis of this protein sequence reveals the following:

| Possible site: 43 | | | | |
|---|---|---|---|---|
| >>> Seems to have no N-terminal signal sequence | | | | |
| | INTEGRAL | Likelihood = −1.12 | Transmembrane | 260-276 (259-277) |

```
----- Final Results -----
                              bacterial membrane --- Certainty = 0.1447(Affirmative) < succ>
                                bacterial outside --- Certainty = 0.0000(Not Clear) < succ>
                            bacterial cytoplasm --- Certainty = 0.0000(Not Clear) < succ>
```

[10371] The protein has homology with the following sequences in the GENPEPT database.

| >GP: AAB52383 GB: U36837 AbiEii [Lactococcus lactis] | | | |
|---|---|---|---|
| Identities = 76/276 (27%), Positives = 135/276 (48%), Gaps = 19/276 (6%) | | | |
| Query: | 14 | SKNTGLTFNSVMTYYFLEVILKKLSQSSYSNHYIFKGGFLLSNVIGVESRSTVDIDFLFH | 73 |
| | | ++N + + Y E L +LS S Y ++ KGGFL+ + R+T D+D | |
| Sbjct: | 12 | TRNDDIGIENYRIRYATERFLTRLSASQYKEKFVLKGGFLIGVTYNLSQRTTKDLDTALI | 71 |
| Query: | 74 | QITLSEETVKQQLKEIL-ADSEEGISFVIQSITTIKESDDYGGYRATISCQLE--NIKQV | 130 |
| | | +++++ + EI D E+ + F ++ +T+ ++ Y GYRA + N + | |
| Sbjct: | 72 | DFKSDAQSIERVITEICNIDLEDQVLFKLKELTSSQDMRIYPGYRAKLKMMFPDGNTRID | 131 |
| Query: | 131 | IHLDIATGDVVTPQPITYDYKAIFDE-----DNFPIIAYTIETILAEKLQTIYSRNFLNS | 185 |
| | | LDI GD +TP+ IF+E ++AY ETI AEKL+TI +R +N+ | |
| Sbjct: | 132 | FDLDIGVGDRITPEAKKIKIPLIFNEVKGVEKQIEVLAYPKETIQAEKLETILTRGKVNT | 191 |
| Query: | 186 | RSKDFYDVYIL--SKLKKKDIDFNQLKNACQRTFSYRE-TELDFEKIIE-----LLERFK | 237 |
| | | R KD+YD ++L + I F A + T+ +R T+ E++ E L E + | |
| Sbjct: | 192 | RMKDYYDFHLLLTDQENSNSISFYY---AFKNTWEFRNPTQFIDEELFEDWLFILDEILE | 248 |
| Query: | 238 | SDPTQNQQWQNYSKKYSYTKGISLANVLDEMISLIT | 273 |
| | | S + + W NY K +Y K +++ +++ E+ ++ | |
| Sbjct: | 249 | SKELKEKYWPNYIKDRNYAKHLNMDDIISEIKEFVS | 284 |

[10372] No corresponding DNA sequence was identified in S. pyogenes.

[10373] Based on this analysis, it was predicted that this protein and its epitopes, could be useful antigens for vaccines or diagnostics.

### EXAMPLE 1887

[10374] A DNA sequence (GBSx1995) was identified in S. agalactiae <SEQ ID 5867> which encodes the amino acid sequence <SEQ ID 5868>. Analysis of this protein sequence reveals the following:

```
Possible site: 23
>>> Seems to have no N-terminal signal sequence
----- Final Results -----
                            bacterial cytoplasm --- Certainty = 0.1137(Affirmative) < succ>
                              bacterial membrane --- Certainty = 0.0000(Not Clear) < succ>
                                bacterial outside --- Certainty = 0.0000(Not Clear) < succ>
```

[10375] The protein has no significant homology with any sequences in the GENPEPT database.

[10376] No corresponding DNA sequence was identified in S. pyogenes.

[10377] Based on this analysis, it was predicted that this protein and its epitopes, could be useful antigens for vaccines or diagnostics.

### EXAMPLE 1888

[10378] A DNA sequence (GBSx1996) was identified in S. agalactiae <SEQ ID 5869> which encodes the amino acid sequence <SEQ ID 5870>. Analysis of this protein sequence reveals the following:

```
Possible site: 44
>>> Seems to have no N-terminal signal sequence
----- Final Results -----
                            bacterial cytoplasm --- Certainty = 0.2782(Affirmative) < succ>
                              bacterial membrane --- Certainty = 0.0000(Not Clear) < succ>
                                bacterial outside --- Certainyl = 0.0000(Not Clear) < succ>
```

[10379] The protein has no significant homology with any sequences in the GENPEPT database.

[10380] No corresponding DNA sequence was identified in S. pyogenes.

[10381] Based on this analysis, it was predicted that this protein and its epitopes, could be useful antigens for vaccines or diagnostics.

### EXAMPLE 1889

[10382] A DNA sequence (GBSx1997) was identified in S. agalactiae <SEQ ID 5871> which encodes the amino acid sequence <SEQ ID 5872>. Analysis of this protein sequence reveals the following:

```
Possible site: 21
>>> Seems to have no N-terminal signal sequence
      INTEGRAL Likelihood = −10.14 Transmembrane 310-326 (301-334)
----- Final Results -----
                              bacterial membrane --- Certainty = 0.5055(Affirmative) < succ>
                                bacterial outside --- Certainty = 0.0000(Not Clear) < succ>
                            bacterial cytoplasm --- Certainty = 0.0000(Not Clear) < succ>
```

[10383] The protein has homology with the following sequences in the GENPEPT database.

| >GP: AAG38044 GB: AF295925 Orf28 [Streptococcus pneumonia] | | | |
|---|---|---|---|
| Identities = 272/344 (79%), Positives = 307/344 (89%) | | | |
| Query: | 568 | VYVNPAFYFPKVIQVQTTILPTIGQFGGDEFERAKAIYDYLKSKGATNQAIAAILGNWSV | 627 |
| | | +YVNP FYFPKVIQ+QTTILP IGQFGGDEFERAK IY++LKS+GA+ QAIAAILGNWSV | |
| Sbjct: | 1 | MYVNPQFYFPKVIQLQTTILPAIGQFGGDEFERAKHIYEFLKSQGASPQAIAAILGNWSV | 60 |
| Query: | 628 | ESSINPKRAEGDYLSPPVGATDSSWDDEGWLTLNGPTIYNGRYPNILKRGLGLGQWTDTA | 687 |
| | | ESSINPKRAEGDYL+PPVG WDDE WL + GP IY+G YPNIL RGLGLGQWTDTA | |
| Sbjct: | 61 | ESSINPKRAEGDYLTPPVGVPIPPWDDESWLAIGGPAIYSGAYPNILHRGLGLGQWTDTA | 120 |
| Query: | 688 | DGSRRHTLLLEYAKGKHQKWYDLGLQLDFMLYGDSPYYTNWLKDFFKNSGSPASLAQLFL | 747 |
| | | DGS RHT LL YA+ +++KWYDL LQLDFML+GDSPYY +WLKDFFKN+GS A+LAQLFL | |
| Sbjct: | 121 | DGSTRHTALLNYARTQNKKWYDLDLQLDFMLHGDSPYYQSWKKDFFKNTGSAANLAQLFL | 180 |
| Query: | 748 | IYWEGNSGDKLLERQTRASEWYYQIEKGFSQPNGGTAQSDPKALEAVREDLFENSIPGGG | 807 |
| | | YWEGNSGDKLLERQTRA+EWYYQIEKGFSQ NGG A+SDP++LE VR DL+++S+PGGG | |
| Sbjct: | 181 | TYWEGNSGDKLLERQTRATEWYYQIEKGFSQTNGGQAKSDPQSLEGVRGDLYDHSVPGGG | 240 |
| Query: | 808 | DGMGYAYGQCTWGVAARINQLGLKLKGKNGEKIPIISTMGNGQDWVRTAASLGGETGTSP | 867 |
| | | DGM YAYGQCTWGVAAR+NQLGLKLKG+NGEKI II+TMGNGQDWV T++SLGGETG++P | |
| Sbjct: | 241 | DGMAYAYGQCTWGVAARMNQLGLKLKGRNGEKISIINTMGNGQDWVATSSSLGGETGSTP | 300 |
| Query: | 868 | QEGAILSFAGGGHGTPTEYGHVAFVEKVYPDGSFLISETNYNGN | 911 |
| | | +GAI+SF GG HGTP YGHVAFVEKVT DGSFL+SETNY GN | |
| Sbjct: | 301 | RAGAIVSFVGGTHGTPASYGHVAFVEKVYDDGSFLVSETNYGGN | 344 |

[10384] SEQ ID 5872 (GBS74d) was expressed in E. coli as a GST-fusion product. SDS-PAGE analysis of total cell extract is shown in FIG. 121 (lane 3 & 4; MW 95.5 kDa). It was also expressed in E. coli as a His-fusion product. SDS-PAGE analysis of total cell extract is shown in FIG. 121 (lane 5-7; MW 70.5 kDa) and in FIG. 179 (lane 9; MW 70.5 kDa).

[10385] GBS74d-His was purified as shown in FIG. 233, lane 7-8.

[10386] Based on this analysis, it was predicted that this protein and its epitopes, could be useful antigens for vaccines or diagnostics.

### EXAMPLE 1890

[10387] A DNA sequence (GBSx1998) was identified in S. agalactiae <SEQ ID 5873> which encodes the amino acid sequence <SEQ ID 5874>. This protein is predicted to be TrsE-like protein. Analysis of this protein sequence reveals the following:

```
Possible site: 55
>>> Seems to have no N-terminal signal sequence
----- Final Results -----
                            bacterial cytoplasm --- Certainty = 0.5526(Affirmative) < succ>
                              bacterial membrane --- Certainty = 0.0000(Not Clear) < succ>
                                bacterial outside --- Certainty = 0.0000(Not Clear) < succ>
```

[10388] The protein has homology with the following sequences in the GENPEPT database.

>GP: AAG38042 GB: AF295925 Orf26 [Streptococcus pneumoniae]
Identities = 618/782 (79%), Positives = 712/782 (91%), Gaps = 1/782 (0%)

| | | | |
|---|---|---|---|
| Query: | 1 | MKKLKHSMKSK−TSSNDKKQKTKTQKQEISPSTVNTLAYQGLFQNGLMQVSPSYFSQTYL | 59 |
| | | MK+ +++K + TS++KK++ K +K+E+ PST NTL+YQ L+QNGLMQV YFSQ+YL | |
| Sbjct: | 3 | MKRKSNTLKKQQTSTTNKKEEVKDKKEEVLPSTANTLSYQALYQNGLMQVKEDYFSQSYL | 62 |
| Query: | 60 | LGDVNYQTVGLDDKGAIVEKYSDLINSLDDKTNFQLTIFNQKVNLEKFRKSILYPLQEDG | 119 |
| | | LGDVNYQTVGL+DKGAI+EKYSDLI SLDD+TNFQLTIFN+++NLEKFR S+LY +EDG | |
| Sbjct: | 63 | LGDVNYQTVGLEDKGAIIEKYSDLIKSLDDQTNFQLTIFNKRLNLEKFRSHVLYEEKEDG | 122 |
| Query: | 120 | FDTYRDELNRMMDANLEAGENNFSAVKFLSFGKSDQTPKLAFRSLSQIGEYFKSGFSEID | 179 |
| | | +D+YR ELNRMM+ NL++GENNFSAVK +SFG+ D PK A+RSLSQIGEYFKSGFSEID | |
| Sbjct: | 123 | YDSYRKELNRMMNQNLDSGENNFSAVKLISFGRKDSNPKQAYRSLSQIGEYFKSGFSEID | 182 |
| Query: | 180 | VSLGLLGGEERVNVLADMLRGENHLPFSYKDLTLSGQSTKHFIAPTYLSFKHKNHIELDD | 239 |
| | | L GEERVN+LADMLRGE+HLPFSY+DLT SGQ+T+HFIAP L FK+KN+++++D | |
| Sbjct: | 183 | ARFESLAGEERVNLLADMLRGEHHLPFSYRDLTRSGQTTRHFIAPNLLDFKNKNYLQIND | 242 |
| Query: | 240 | RLLQIVYVRDYGMELGDKFIRDLMQSDLEVMISLHAKGSTKSETMTKLRTKKTLMESQKI | 299 |
| | | RLLQIVYVRDYGMELGD+FIRDLMQ DLE+++SLHA+ STKS+ M KLRTKKTLMESQKI | |
| Sbjct: | 243 | RLLQIVYVRDYGMELGDQFIRDLMQGDLELIVSLHAQSSTKSDAMKKLRTKKTLMESQKI | 302 |
| Query: | 300 | GEQQKMARTGIYLEKVGHVLENNIDEAEALLQTMTQTGDKLFDTVFLIGVLADTEDQLKQ | 359 |
| | | GEQQK+ARTGIYLEKVGHVLE+NIDEAE LL+TMT+TGDKLF TVFLIGV E++LKQ | |
| Sbjct: | 303 | GEQQKLARTGIYLEKVGHVLESNIDEAEELLKTMTETGDKLFQTVFLIGVFGQDEEELKQ | 362 |
| Query: | 360 | SLDIIKQVAGSNDMIIDNLTYMQEAAFNSLLPFGKNYLEGVSRSLLTSNIAVNAPWTSVD | 419 |
| | | +LD ++QVAGSND++ID L YMQEAAFNSLLPFG ++LEGVSRSLLTSNIAVN+PWTSVD | |
| Sbjct: | 363 | ALDTVQQVAGSNDLMIDKLPYMQEAAFNSLLPFGCDGLEGVSRSLLTSNIAVNSPWTSVD | 422 |
| Query: | 420 | IHDKGGKFYGINQISSNIISIDRGKLNTPSGLILGTSGAGKGMATKHEIISTKLKEADSD | 479 |
| | | + D+ GK+YGINQISSNII+IDR LNTPSGLILGTSGAGKGMATKHEII+TK+KE+ + | |
| Sbjct: | 423 | LQDRSGKYYGINQISSNIITIDRSLLNTPSGLILGTSGAGKGMATKHEIITTKIKESGEN | 482 |
| Query: | 480 | TEIIIVDPENEYSIIGQAFGGESIDIAPDSTTFLNVLELSDENMDEDPVKVKSEFLLSWI | 539 |
| | | TEIIIVDPE EYS+IG+ FGGE IDIAPDS T+LNVL+LS+ENMDEDPVKVKSEFLLS+I | |
| Sbjct: | 483 | TEIIIVDPEAEYSVIGRTFGGEMIDIAPDSETYLNVLDLSEENMDEDPVKVKSEFLLSFI | 542 |
| Query: | 543 | GKLLDRKMDGREKSLIDRVTRLTYKHFDTPSLVEWVFVLSQQPEQEAKDLALDMELYVEG | 599 |
| | | GKLLDRKMDGREKS+IDRVTRLTY+ F PSL EWVFVLSQQPE+EA++LALDMELYVEG | |
| Sbjct: | 543 | GKLLDRKMDGREKSIIDRVTRLTYQSFKEPSLEEWVFVLSQQPEEEAQNLALDMELYVEG | 602 |
| Query: | 600 | SLDIFSHRTNIKTDSHFLIYNVKKLGDELKQIALMVIFDQIWNRVVKNQKLGKKTWIYFD | 659 |
| | | SLDIFSH+TNI+T S+FLIYNVKKLGDELKQIALMV+FDQIWNRVV+NQKLGKKTWIYFD | |
| Sbjct: | 603 | SLDIFSHKTNIQTGSNFLIYNVKKLGDELKQIALMVVFDQIWNRVVRNQKLGKKTWIYFD | 662 |
| Query: | 660 | EMQLLLLDKYASDFFFKLWSRVRKYGAIPTGITQNVETLLLDANGRRIIANSEFMILLKQ | 719 |
| | | E++LLLLDKY SDFFFKLWSRVRKYGA PTGITQNVETLLLD NGRRIIANSEFMILLKQ | |
| Sbjct: | 663 | EIELLLLDKYPSDFFFKLWSRVRKYGASPTGITQNVETLLLDPNGRRIIANSEFMILLKQ | 722 |
| Query: | 720 | AKSDREELVHMLGLSKELEKYLVNPEKGAGLIKAGSTVVPFKNKIPQHTKLFDIMSTDPE | 779 |
| | | AK+DREELV +LGLSKELEKYLVNPEKGAGLIKAGS VVPFKNKIPQ ++LFDIM +DP+ | |
| Sbjct: | 723 | AKNDREELVQLLGLSKELEKYLVNPEKGAGLIKAGSVVVPFKNKIPQGSQLFDIMRSDPD | 782 |
| Query: | 780 | KM | 781 |
| | | KM | |
| Sbjct: | 783 | KM | 784 |

[10389] No corresponding DNA sequence was identified in S. pyogenes.

[10390] Based on this analysis, it was predicted that this protein and its epitopes, could be useful antigens for vaccines or diagnostics.

[10391] A related GBS gene <SEQ ID 8925> and protein <SEQ ID 8926> were also identified. Analysis of this protein sequence reveals the following:

```
Lipop: Possible site: −1 Crend: 10
McG: Discrim Score: −26.26
GvH: Signal Score (−7.5): −3.87
          Possible site: 55
>>> Seems to have no N-terminal signal sequence
ALOM program count: 0 value: 6.26 threshold: 0.0
      PERIPHERAL Likelihood = 6.26 335
  modified ALOM score: −1.75
*** Reasoning Step: 3
----- Final Results -----
                            bacterial cytoplasm --- Certainty = 0.5526(Affirmitive) < succ>
                              bacterial membrane --- Certainty = 0.0000(Not Clear) < succ>
                                bacterial outside --- Certainty = 0.0000(Not Clear)
```

[10392] The protein has homology with the following sequences in the databases:

[chemical structure]

[10393] A related GBS gene <SEQ ID 8927> and protein <SEQ ID 8928> were also identified. Analysis of this protein sequence reveals the following:
[10394] This protein might be involved in vancomycin research

[10395] The protein has homology with the following sequences in the databases:

| >GP\|8100663\|gb\|AAF72347.1\|AF192329_8\|AF192329 TrsE-like protein | | | |
|---|---|---|---|
| {Enterococcus faecalis} | | | |
| Score = 427 bits (1086), Expect = e-118 | | | |
| Identities = 257/785 (32%), Positives = 431/785 (54%), Gaps = 28/785 (3%) | | | |
| Query: | 9 | DKKQKTKTQKQEIS-----------PSTVN-TLAYQGLFQNGLMQVSPSYFSQTYLLGDV | 56 |
| | | +K + T+ Q++EI++++++++++++P T ++ Y+ ++ +G+ +VSP FS+ D+ | |
| Sbjct: | 11 | EKTKLTRAQRKEIDAVIRKYKGDGRPHTAQQSIPYEVMYPDGVCRVSPGVFSKCIEFADI | 70 |
| Query: | 57 | NYQTVGLDDKGAIVEKYSDLINSLDDKTNFQLTIFNQKVNLEKFRKSILYPLQEDGFDTY | 116 |
| | | +YQ D + AI EK DL N +D + Q + N+KV+ ++ KS Q D FD | |
| Sbjct: | 71 | SYQLAQPDTQTAIFEKLCDLYNYVDASIHIQFSFLNRKVDPVQYAKSFEIAPQGDDFDDI | 130 |
| Query: | 117 | RDELNRMMDANLEAGENNFSAVKFLSFGKSDQTPKLAFRSLSQIGEYFKSGFSEIDVSLG | 176 |
| | | R E ++ L G N K+L+F ++ K A L +IG F + | |
| Sbjct: | 131 | RAEYTGILQKQLANGNNGMVKTKYLTFTIEAESVKAARARLKRIGFDLLGYFKSMGAVAH | 190 |
| Query: | 177 | LLGGEERVNVLADMLRGENHL-PFSYKDLTLSGQSTKHFIAPTYLSFKHKNHIELDDRLL | 235 |
| | | ++ G ER+N+L + + + F +K L++SG STK FIAP+ L F + + + | |
| Sbjct: | 191 | VMDGWERLNLLHGVYHPDGEIFNFDWKWLAPSGLSTKDFIAPSSLCFGNAKTFGMGGKYG | 250 |
| Query: | 236 | QIVYVRDYGMELGDKFIRDLMQSDLEVMISLHAKGSTKSETMTKLRTKKTLMESQKIGEQ | 295 |
| | | + +++ EL D + D + ++ V+++LH + +++ + ++ K T +++ KI EQ | |
| Sbjct: | 251 | AVSFLQILSPELSDMMLADFLNTESGVLVNLHVQAIEQTKAIKTIKRKITDLDAMKIAEQ | 310 |
| Query: | 296 | QKMARTGIYLEKVGHVLENNIDEAEALLQTMTQTGDKLFDTVFLIGVLADTEDQLKQSLD | 355 |
| | | +K R+G ++ + L ++A+ LL + ++LF FL+ +ADT+ +L + | |
| Sbjct: | 311 | KKAVRSGYDMDILPSDLATYGEDAKKLLTKLQTRNERLFQLTFLVLNVADTKQKLNNDVF | 370 |
| Query: | 356 | IIKQVAGSNDMIIDNLTYMQEAAFNSLLPFGKNYLEGVSRSLLTSNIAVNAPWTSVDIHD | 415 |
| | | VA ++ + L Y QE S LP G N ++ + RSL TS++AV P+ + ++ | |
| Sbjct: | 371 | QAAGVAQKHNCPLVRLDYQQEQGLASSLPLGVNQIK-IQRSLTTSSVAVFVPFVTQELFQ | 429 |
| Query: | 416 | KGGK-FYGINQISSNIISIDRGKLNTPSGLILGTSGAGKGMATKHEIISTKLKEADSDTE | 474 |
| | | G +YGIN S N+I +DR + P+ L LGT G+GK M+ K EI+S L D + | |
| Sbjct: | 430 | GGAAMYYGINAKSRNMIMLDRKQARCPNALKLGTPGSGKSMSCKSEIVSVFLTTPD---D | 486 |
| Query: | 475 | IIIVDPENEYSIIGQAFGGESIDIAPDSTTFLNVLELS-DENMDEDPVKVKSEFLLSWIG | 533 |
| | | I I DPE EY + + G+ I ++P S F+N L+++ + + D++P+ +KS+F+LS+ | |
| Sbjct: | 487 | IFISDPEAEYYPLVKRLHGQVIRLSPTSKDFVNPLDINLNYSEDDNPLALKSDFVLSFCE | 546 |
| Query: | 534 | KLLDRK--MDGREKSLIDRVTRLTYKHF-------DTPSLVEWVFVLSQQPEQEAKDLAL | 584 |
| | | ++ K ++ EK++IDR R+ Y+ + + P L + L Q EA +A | |
| Sbjct: | 547 | LVMGGKNGLEAIEKTVIDRAVRVIYRPYLADPRPENMPILSDLHKALLDQHVPEADRVAQ | 606 |
| Query: | 585 | DMELYVEGSLDIFSHRTNIKTDSHFLIYNVKKLGDELKQIALMVIFDQIWNRVVKNQKLG | 644 |
| | | ++LYV GSL++F+HRTN+ + + +++K+LG +LK++ ++++ DQIW RV N+ G | |
| Sbjct: | 607 | ALDLYVSGSLNVFNHRTNVDIGNRLVSFDIKELGKQLKKLGMLIVQDQIWGRVTANRSQG | 666 |
| Query: | 645 | KKTWIYFDEMQLLLLDKYASDFFFKLWSRVRKYGAIPTGITQNVETLLLDANGRRIIANS | 704 |
| | | K TW + DE++LLL ++ + + ++W R RK+G IPTG TQNV+ LL I+ NS | |
| Sbjct: | 667 | KATWYFADEFHLLLKEEQTAAYSAEIWKRFRKWGGIPTGATQNVKDLLSSPEIENILENS | 726 |
| Query: | 705 | EFMILLKQAKSDREELVHMLGLSKELEKYLVNPEKGAGLIKAGSTVVPFKNKIPQHTKLF | 764 |
| | | +F+ LL QA DR+ L L LS E +KY+ N E G GL+ + V+PF N IP +T+L+ | |
| Sbjct: | 727 | DFITLLNQASGDRKILAERLNLSTEQQKYIDNSEPGEGLLIFENVVLPFTNPIPHNTQLY | 786 |
| Query: | 765 | DIMST | 769 |
| | | IM+T | |
| Sbjct: | 787 | KIMTT | 791 |

[10396] SEQ ID 8926 (GBS75) was expressed in E. coli as a His-fusion product. SDS-PAGE analysis of total cell extract is shown in FIG. 17 (lane 11; MW 89.8 kDa). It was also expressed in E. coli as a GST-fusion product. SDS-PAGE analysis of total cell extract is shown in FIG. 20 (lane 6; MW 114.7 kDa).

[10397] GBS75-GST was purified as shown in FIG. 197, lane 8.

[10398] GBS329 was expressed in E. coli as a His-fusion product. SDS-PAGE analysis of total cell extract is shown in FIG. 77 (lane 8; MW 89 kDa). It was also expressed in E. coli as a GST-fusion product. SDS-PAGE analysis of total cell extract is shown in FIG. 174 (lane 2; MW 114 kDa).

[10399] GBS329-GST was purified as shown in FIG. 220, lanes 9 & 10.

### EXAMPLE 1891

[10400] A DNA sequence (GBSx1999) was identified in S. agalactiae <SEQ ID 5875> which encodes the amino acid sequence <SEQ ID 5876>. Analysis of this protein sequence reveals the following:

```
Possible site: 33
>>> Seems to have no N-terminal signal sequence
----- Final Results -----
                            bacterial cytoplasm --- Certainty = 0.2442(Affirmative) < succ>
                              bacterial membrane --- Certainty = 0.0000(Not Clear) < succ>
                                bacterial outside --- Certainty = 0.0000(Not Clear) < succ>
```

[10401] The protein has no significant homology with any sequences in the GENPEPT database.

[10402] No corresponding DNA sequence was identified in S. pyogenes.

[10403] Based on this analysis, it was predicted that this protein and its epitopes, could be useful antigens for vaccines or diagnostics.

### EXAMPLE 1892

[10404] A DNA sequence (GBSx2000) was identified in S. agalactiae <SEQ ID 5877> which encodes the amino acid sequence <SEQ ID 5878>. This protein is predicted to be DNA-directed RNA polymerase ii largest subunit. Analysis of this protein sequence reveals the following:

```
Possible site: 21
>>> Seems to have no N-terminal signal sequence
----- Final Results -----
                            bacterial cytoplasm --- Certainty = 0.4393(Affirmative) < succ>
                              bacterial membrane --- Certainty = 0.0000(Not Clear) < succ>
                                bacterial outside --- Certainty = 0.0000(Not Clear) < succ>
```

[10405] The protein has no significant homology with any sequences in the GENPEPT database.

[10406] No corresponding DNA sequence was identified in S. pyogenes.

[10407] Based on this analysis, it was predicted that this protein and its epitopes, could be useful antigens for vaccines or diagnostics.

### EXAMPLE 1893

[10408] A DNA sequence (GBSx2001) was identified in S. agalactiae <SEQ ID 5879> which encodes the amino acid sequence <SEQ ID 5880>. Analysis of this protein sequence reveals the following:

```
Possible site: 13
>>> Seems to have no N-terminal signal sequence
      INTEGRAL Likelihood = −9.92 Transmembrane 256-272 ( 250-277)
      INTEGRAL Likelihood = −8.28 Transmembrane 216-232 ( 213-244)
      INTEGRAL Likelihood = −8.12 Transmembrane 151-167 ( 148-191)
      INTEGRAL Likelihood = −7.27 Transmembrane 57-73 ( 54-80)
      INTEGRAL Likelihood = −6.74 Transmembrane 93-109 ( 88-111)
      INTEGRAL Likelihood = −3.50 Transmembrane 172-188 ( 168-191)
      INTEGRAL Likelihood = −2.76 Transmembrane 113-129 ( 110-130)
----- Final Results -----
                              bacterial membrane --- Certainty = 0.4970(Affirmative) < succ>
                                bacterial outside --- Certainty = 0.0000(Not Clear) < succ>
                            bacterial cytoplasm --- Certainty = 0.0000(Not Clear) < succ>
```

[10409] The protein has homology with the following sequences in the GENPEPT database.

>GP: AAG38039 GB: AF295925 Orf23 [Streptococcus pneumoniae]
Identities = 71/86 (82%), Positives = 83/86 (95%)

| | | | |
|---|---|---|---|
| Query: | 37 | VKSLADFNPTVWSYMTAITKGIMQPLGVAILAVVLVLEFSKMAKKIANSGGAMTFEAIAP | 96 |
| | | +KSL+ +NPTVW+YM++ITK +MQPLGVAIL+VVL+LEFSKMAKKIANSGGAMTFEA+AP | |
| Sbjct: | 1 | MKSLSSYNPTVWTYMSSITKSVMQPLGVAILSVVLILEFSKMAKKIANSGGMATFEALAP | 60 |
| Query: | 97 | MIVSYIMVAVVITNTTVIVEAIIAIA | 122 |
| | | M++SYIMVAVVITNTTVIVEAII IA | |
| Sbjct: | 61 | MLISYIMVAVVITNTTVIVEAIIGIA | 86 |

[10410] No corresponding DNA sequence was identified in S. pyogenes.

[10411] Based on this analysis, it was predicted that this protein and its epitopes, could be useful antigens for vaccines or diagnostics.

### EXAMPLE 1894

[10412] A DNA sequence (GBSx2002) was identified in S. agalactiae <SEQ ID 5881> which encodes the amino acid sequence <SEQ ID 5882>. Analysis of this protein sequence reveals the following:

```
Possible site: 25
      >>> Seems to have no N-terminal signal sequence
      INTEGRAL Likelihood = −7.54 Transmembrane 32-48 ( 25-52)
      INTEGRAL Likelihood = −4.09 Transmembrane 63-79 ( 62-80)
----- Final Results -----
                              bacterial membrane --- Certainty = 0.4015(Affirmative) < succ>
                                bacterial outside --- Certainty = 0.0000(Not Clear) < succ>
                            bacterial cytoplasm --- Certainty = 0.0000(Not Clear) < succ>
```

[10413] A related GBS nucleic acid sequence <SEQ ID 9933> which encodes amino acid sequence <SEQ ID 9934> was also identified. A related GBS nucleic acid sequence <SEQ ID 10777> which encodes amino acid sequence <SEQ ID 10778> was also identified.

[10414] The protein has no significant homology with any sequences in the GENPEPT database.

[10415] No corresponding DNA sequence was identified in S. pyogenes.

[10416] Based on this analysis, it was predicted that this protein and its epitopes, could be useful antigens for vaccines or diagnostics.

### EXAMPLE 1895

[10417] A DNA sequence (GBSx2003) was identified in S. agalactiae <SEQ ID 5883> which encodes the amino acid sequence <SEQ ID 5884>. This protein is predicted to be TrsK-like protein (traK). Analysis of this protein sequence reveals the following:

```
Possible site: 34
>>> Seems to have a cleavable N-term signal seq.
      INTEGRAL Likelihood = −7.38 Transmembrane 66-82 ( 62-85)
----- Final Results -----
                              bacterial membrane --- Certainty = 0.3951(Affirmative) < succ>
                                bacterial outside --- Certainty = 0.0000(Not Clear) < succ>
                            bacterial cytoplasm --- Certainty = 0.0000(Not Clear) < succ>
```

[10418] The protein has homology with the following sequences in the GENPEPT database.

>GP: AAG38037 GB: AF295925 Orf21 [Streptococcus pneumoniae]
Identities = 343/457 (75%), Positives = 385/457 (84%), Gaps = 24/457 (5%)

| | | | |
|---|---|---|---|
| Query: | 142 | LIVIGGSGAGKTFRFVKPNLIQLNCSNIVVDPKDHLAEKTGKLFLENGYQVKVLDLVNMT | 201 |
| | | + VIGGSG+GKTFRFVKPNLIQ+N SNIVVDPKDHLAEKTGKLFLE+GYQVKVLDLVNM | |
| Sbjct: | 1 | MAVIGGSGSGKTFRFVKPNLIQMNSSNIVVDPKDHLAEKTGKLFLEHGYQVKVLDLVNMK | 60 |
| Query: | 202 | NSDGFNPFRYVETENDLNRMLTVYFNNTKGNGSRSDPFWDEASMTLVRAIASYLVDFYNP | 261 |
| | | NSDGFNPFRY+ETENDLNRML VYFNNTKG+GSRSDPFWDEASMTLVRA+ASYLVDFYNP | |
| Sbjct: | 61 | NSDGFNPFRYIETENDLNRMLAVYFNNTKGSGSRSDPFWDEASMTLVRALASYLVDFYNP | 120 |
| Query: | 121 | PGS---------------------SKQEQEARRKRGRYPAFSEIGKLIKLLSKGDNQDKS | 300 |
| | | P + K+E E R+KRGR F E + + + KS | |
| Sbjct: | 121 | PKTREQLIEESRLSQKEYQNLLKRQKKEVEERKKRGRLSKFCESQNSLNTYPRVKTR-KS | 179 |
| Query: | 301 | ILEVLFEDYAKKYGHENFTMRNWADFQNYKDKTLDSVIAVTTAKFALFNIQSVIDLTQRD | 360 |
| | | +LE+LFE+YAKKYG ENFTMRNWADFQNYKDKTLDSVIAVTTAKFALFNIQSV+DLT+RD | |
| Sbjct: | 180 | VLEILFENYAKKYGTENFTMRNWADFQNYKDKTLDSVIAVTTAKFALFNIQSVMDLTKRD | 239 |
| Query: | 361 | TMDLKTWGTQKTMVYLVIPDNDTTFRFLSAL-FFSTVFSTLTRQADV-DFKGQLPIHVRS | 418 |
| | | T+D+KTWG +K+MVYLVIPDND+TFRFLSAL FF+ F T + + + + +LP+HVR | |
| Sbjct: | 240 | TLDMKTWGQEKSMVYLVIPDNDSTFRFLSALLFFNPYFQTPNKTSQILMLRVRLPLHVRV | 299 |
| Query: | 419 | YLDEFANVGEIPDFAEQTSTVRSRNMSLVPILQNIAQLQGLYKEKEAWKTILGNCDSLLY | 478 |
| | | YLDEFAN+GEIPDFAEQTSTVRSRNMSLVPILQNIAQLQGLYKEKEAWKTILGNCDSL+Y | |
| Sbjct: | 300 | YLDEFANIGEIPDFAEQTSTVRSRNMSLVPILQNIAQLQGLYKEKEAWKTILGNCDSLVY | 359 |
| Query: | 479 | LGGNDEETFKFMSGLLGKQTVDVRSTSRSFGQTGSSSTSHQKIARDLMTADEVGTMKRDE | 538 |
| | | LGGNDE+TFKFMSGLLGKQT+DVR+TSRSFGQTGS S SHQKIARDLMT DEVG MKR E | |
| Sbjct: | 360 | LGGNDEDTFKFMSGLLGKQTIDVRNTSRSFGQTGSGSLSHQKIARDLMTPDEVGNMKRHE | 419 |
| Query: | 539 | CLVRIAGVPVFRTKKYFPLKHKHWKLLADKETDDRWW | 575 |
| | | CLVRIA +PVF++KKY KH +WK LA++EDT+R W | |
| Sbjct: | 420 | VLCRIANMPVFKSKKYNSTKHPNWKYLANQETDERRW | 456 |

[10419] No corresponding DNA sequence was identified in S. pyogenes.

[10420] Based on this analysis, it was predicted that this protein and its epitopes, could be useful antigens for vaccines or diagnostics.

[10421] A related GBS gene <SEQ ID 8929> and protein <SEQ ID 8930> were also identified. Analysis of this protein sequence reveals the following:

```
Lipop: Possible site: −1 Crend: 5
McG: Discrim Score: 5.53
GvH: Signal Score (−7.5): −0.78
          Possible site: 34
>>> Seems to have a cleavable N-term signal seq.
ALOM program count: 1 value: −7.38 threshold: 0.0
      INTEGRAL Likelihood = −7.38 Transmembrane 66-82 ( 62-85)
      PERIPHERAL Likelihood = 1.75 338
  modified ALOM score: 1.98
*** Reasoning Step: 3
----- Final Results -----
                              bacterial membrane --- Certainty = 0.3951(Affirmative) < succ>
                                bacterial outside --- Certainty = 0.0000(Not Clear) < succ>
```

[10422] The protein has homology with the following sequences in the databases:

[chemical structure]

[10423] SEQ ID 5884 (GBS11d) was expressed in E. coli as a His-fusion product. SDS-PAGE analysis of total cell extract is shown in FIG. 151 (lane 6; MW 61 kDa) and in FIG. 182 (lane 10; MW 61 kDa). It was also expressed in E. coli as a GST-fusion product. SDS-PAGE analysis of total cell extract is shown in FIG. 12 (lane 5; MW 91.5 kDa).

### EXAMPLE 1896

[10424] A DNA sequence (GBSx2004) was identified in S. agalactiae <SEQ ID 5885> which encodes the amino acid sequence <SEQ ID 5886>. Analysis of this protein sequence reveals the following:

```
Possible site: 50
>>> Seems to have no N-terminal signal sequence
----- Final Results -----
                            bacterial cytoplasm --- Certainty = 0.4192(Affirmative) < succ>
                              bacterial membrane --- Certainty = 0.0000(Not Clear) < succ>
                                bacterial outside --- Certainty = 0.0000(Not Clear) < succ>
```

[10425] A related GBS nucleic acid sequence <SEQ ID 9935> which encodes amino acid sequence <SEQ ID 9936> was also identified.

[10426] The protein has no significant homology with any sequences in the GENPEPT database.

[10427] No corresponding DNA sequence was identified in S. pyogenes.

[10428] Based on this analysis, it was predicted that this protein and its epitopes, could be useful antigens for vaccines or diagnostics.

### EXAMPLE 1897

[10429] A DNA sequence (GBSx2005) was identified in S. agalactiae <SEQ ID 5887> which encodes the amino acid sequence <SEQ ID 5888>. Analysis of this protein sequence reveals the following:

```
Possible site: 16
>>> Seems to have no N-terminal signal sequence
----- Final Results -----
                            bacterial cytoplasm --- Certainty = 0.3391(Affirmative) < succ>
                              bacterial membrane --- Certainty = 0.0000(Not Clear) < succ>
                                bacterial outside --- Certainty = 0.0000(Not Clear) < succ>
```

[10430] The protein has no significant homology with any sequences in the GENPEPT database.

[10431] No corresponding DNA sequence was identified in S. pyogenes.

[10432] Based on this analysis, it was predicted that this protein and its epitopes, could be useful antigens for vaccines or diagnostics.

### EXAMPLE 1898

[10433] A DNA sequence (GBSx2006) was identified in S. agalactiae <SEQ ID 5889> which encodes the amino acid sequence <SEQ ID 5890>. Analysis of this protein sequence reveals the following:

```
Possible site: 45
>>> Seems to have an uncleavable N-term signal seq
      INTEGRAL Likelihood = −10.03 Transmembrane 68-84 ( 64-90)
      INTEGRAL Likelihood = −7.06 Transmembrane 33-49 ( 27-50)
      INTEGRAL Likelihood = −5.73 Transmembrane 106-122 ( 105-123)
      INTEGRAL Likelihood = −4.46 Transmembrane 6-22 ( 3-24)
      INTEGRAL Likelihood = −2.13 Transmembrane 154-170 ( 154-170)
      INTEGRAL Likelihood = −0.53 Transmembrane 180-196 ( 180-196)
----- Final Results -----
                              bacterial membrane --- Certainty = 0.5012(Affirmative) < succ>
                                bacterial outside --- Certainty = 0.0000(Not Clear) < succ>
                            bacterial cytoplasm --- Certainty = 0.0000(Not Clear) < succ>
```

[10434] A related GBS nucleic acid sequence <SEQ ID 9937> which encodes amino acid sequence <SEQ ID 9938> was also identified.

[10435] The protein has homology with the following sequences in the GENPEPT database.

| >GP: BAA11325 GB: D78257 ORF8 [Enterococcus faecalis] | | | |
|---|---|---|---|
| Identities = 35/102 (34%), Positives = 57/102 (55%), Gaps = 4/102 (3%) | | | |
| Query: | 90 | TRNQAVLVQVGKQVPPIIFLLFL-VNASILEEIVYRQLLWEKLTF--PFEQIGVTSFLFV | 146 |
| | | T N + L+++ V P++ +L L + A I+EEIV+R + L I ++SFLF | |
| Sbjct: | 7 | TANDSTLIKLFSGVSPVLVVLLLGIAAPIMEEIVFRGGIIGYLVENNALLAILISSFLFG | 66 |
| Query: | 147 | LSHGPNQLGSWLIYSCLGLTLAVVRLKT-DCMTAIALHLLWN | 187 |
| | | + HGP S+ +Y +G+ L+V KT D +I++H L N | |
| Sbjct: | 67 | IIHGPTNFISFGMYFFMGIILSVSYYKTKDLRVSISIHFLNN | 108 |

[10436] No corresponding DNA sequence was identified in S. pyogenes.

[10437] A related GBS gene <SEQ ID 8931> and protein <SEQ ID 8932> were also identified. Analysis of this protein sequence reveals the following:

```
Lipop: Possible site: −1 Crend: 4
McG: Discrim Score: 9.32
GvH: Signal Score (−7.5): −5.41
          Possible site: 45
>>> Seems to have an uncleavable N-term signal seq
ALOM program count: 6 value: −10.03 threshold: 0.0
      INTEGRAL Likelihood = −10.03 Transmembrane 68-84 ( 64-90)
      INTEGRAL Likelihood = −7.06 Transmembrane 33-49 ( 27-50)
      INTEGRAL Likelihood = −5.73 Transmembrane 106-122 ( 105-123)
      INTEGRAL Likelihood = −4.46 Transmembrane 6-22 ( 3-24)
      INTEGRAL Likelihood = −2.13 Transmembrane 154-170 ( 154-170)
      INTEGRAL Likelihood = −0.53 Transmembrane 180-196 ( 180-196)
      PERIPHERAL Likelihood = 1.38 131
  modified ALON score: 2.51
*** Reasoning Step: 3
----- Final Results -----
                              bacterial membrane --- Certainty = 0.5012(Affirmative) < succ>
                                bacterial outside --- Certainty = 0.0000(Not Clear) < succ>
                            bacterial cytoplasm --- Certainty = 0.0000(Not Clear) < succ>
```

[10438] The protein has homology with the following sequences in the databases:

[chemical structure]

[10439] Based on this analysis, it was predicted that these proteins and their epitopes could be useful antigens for vaccines or diagnostics.

### EXAMPLE 1899

[10440] A DNA sequence (GBSx2007) was identified in S. agalactiae <SEQ ID 5891> which encodes the amino acid sequence <SEQ ID 5892>. Analysis of this protein sequence reveals the following:

```
Possible site: 23
>>> Seems to have no N-terminal signal sequence
----- Final Results -----
                            bacterial cytoplasm --- Certainty = 0.2490(Affirmative) < succ>
                              bacterial membrane --- Certainty = 0.0000(Not Clear) < succ>
                                bacterial outside --- Certainty = 0.0000(Not Clear) < succ>
```

[10441] A related GBS nucleic acid sequence <SEQ ID 9939> which encodes amino acid sequence <SEQ ID 9940> was also identified.

[10442] The protein has no significant homology with any sequences in the GENPEPT database.

[10443] No corresponding DNA sequence was identified in S. pyogenes.

[10444] Based on this analysis, it was predicted that this protein and its epitopes, could be useful antigens for vaccines or diagnostics.

### EXAMPLE 1900

[10445] A DNA sequence (GBSx2008) was identified in S. agalactiae <SEQ ID 5893> which encodes the amino acid sequence <SEQ ID 5894>. Analysis of this protein sequence reveals the following:

```
Possible site: 46
>>> Seems to have no N-terminal signal sequence
----- Final Results -----
                            bacterial cytoplasm --- Certainty = 0.5298(Affirmative) < succ>
                              bacterial membrane --- Certainty = 0.0000(Not Clear) < succ>
                                bacterial outside --- Certainty = 0.0000(Not Clear) < succ>
```

[10446] The protein has homology with the following sequences in the GENPEPT database.

| >GP: AAC98423 GB: L29323 unknown [Streptococcus pneumoniae] | | | |
|---|---|---|---|
| Identities = 68/126 (53%), Positives = 88/126 (68%) | | | |
| Query: | 1 | MNLLHKKSILDCTELEERIHQAETNQLLQKILSLPNFDCDFEVTFEDDYHKEMNDPLFYE | 60 |
| | | M L+K+SILDC ELE +H AE QL ++I +PN+ C+FEVTF DDYHK+ N PLFYE | |
| Sbjct: | 1 | MKALNKESILDCDELETELHDAEIKQLDEQIFLMPNYPCEFEVTFLDDYHKKHNYPLFYE | 60 |
| Query: | 61 | SNLHQISDFMETRDIKNGVDTLLTKDNHLAFRAFGENYSARGKEGILTTLVTVKCFGEGR | 120 |
| | | S L I +F+E++DIKNG D + +L F +G+ Y A GKEGILTT VTVK F E + | |
| Sbjct: | 61 | SYLQNIMEFLESQDIKNGADAFVDDHQNLVFVLYGQGYRAEGKEGILTTQVTVKAFDEDK | 120 |
| Query: | 121 | MPIDMS | 126 |
| | | PI+ + | |
| Sbjct: | 121 | KPINFA | 126 |

[10447] No corresponding DNA sequence was identified in S. pyogenes.

[10448] Based on this analysis, it was predicted that this protein and its epitopes, could be useful antigens for vaccines or diagnostics.

### EXAMPLE 1901

[10449] A DNA sequence (GBSx2009) was identified in S. agalactiae <SEQ ID 5895> which encodes the amino acid sequence <SEQ ID 5896>. This protein is predicted to be methyl transferase. Analysis of this protein sequence reveals the following:

```
Possible site: 46
>>> Seems to have no N-terminal signal sequence
----- Final Results -----
                            bacterial cytoplasm --- Certainty = 0.1209(Affirmative) < succ>
                              bacterial membrane --- Certainty = 0.0000(Not Clear) < succ>
                                bacterial outside --- Certainty = 0.0000(Not Clear) < succ>
```

[10450] The protein has homology with the following sequences in the GENPEPT database.

| >GP: AAC98421 GB: L29323 methyl transferase [Streptococcus pneumoniae] | | | |
|---|---|---|---|
| Identities = 323/449 (71%), Positives 389/449 (85%), Gaps = 3/449 (0%) | | | |
| Query: | 1 | MKFLDLFAGIGGFRLGMESQGHKCLGFCEIDKFARTSYKAMFNTEGEIEYHDIKEVTDHD | 60 |
| | | M+F+DLF+GIGGFRLGMES GH+C+GFCEIDKFAR SYK++F TEGEIE+HDI++V+D + | |
| Sbjct: | 1 | MRFIDLFSGIGGFRLGMESVGHECIGFCEIDKFARESYKSIFQTEGEIEFHDIRDVSDDE | 60 |
| Query: | 61 | FRQFRGQVDIICGGFPCQAFSLAFRRLGFEDTRGTLFFEIARAAKQIQPRFLFLENVKGL | 120 |
| | | F++ RG+VD+ICGGFPCQAFS+AGRRLGFEDTRGTLFFEIARAAKQIQPRFLFLENVKGL | |
| Sbjct: | 61 | FKKLRGKVDVICGGFPCQAFSIAGRRLGFEDTRGTLFFEIARAAKQIQPRFLFLENVKGL | 120 |
| Query: | 121 | LNHDEGRTFATILSTLDELGYDVEWQVLNSKDFQVPQNRERVFIIGHSRRYRSRFIFPLR | 180 |
| | | LNHD+GRTF TIL+TLDELG+DVEWQ+LNSKDF VPQNRERVFIIGHSR+ +R FP R | |
| Sbjct: | 121 | LNHDKGRTFTTILTTLDELGFDVEWQMLNSKDFGVPQNRERVFIIGHSRKRGTRLGFPFR | 180 |
| Query: | 181 | RED---SPAHLERLGNINPSKHGLNGEVYLTSGLAPTLTRGKGEGAKIAIPVLTPDRLEK | 237 |
| | | RE +P L+ LGN+NPSK G++G+VY + GLAPTL RGKGEG KIAIP +TPDRL+K | |
| Sbjct: | 181 | REGQATNPETLKILGNLNPSKSGMSGKVYYSEGLAPTLVRGKGEGFKIAIPCMTPDRLDK | 240 |
| Query: | 238 | RQHGRRFKDNQDPMFTLTSQDKHGVVVAGNLPTSFDQTGRVFDISGLSPTLTTMQGGDKV | 297 |
| | | RQ+GRRFKDNQ+PMFTL +QD+HG+VV G+LPTSF +TGRV+ GLSPTLTTMQGGDK+ | |
| Sbjct: | 241 | RQNGRRFKDNQEPMFTLNTQDRHGIVVVGDLPTSFKETGRVYGSEGLSPTLTTMQGGDKI | 300 |
| Query: | 298 | PKILLREELPFLKIKEATKTGYAKATLGDSVNLAYPDSTKRRGRVGKGISNTLTTSDNMG | 357 |
| | | PKIL+ E + FLK++EATK GYA+A +GDS+NL P S RRGRVGKGI+NTLTTS MG | |
| Sbjct: | 301 | PKILIPEPIQFLKVREATKKGYQAQEIGDSINLERPSSQHRRGRVGKGIANTLTTSGQMG | 360 |
| Query: | 358 | VVVAALEYRQDKWYEVTGIVLEGKLYRLRIRRLTPRECFRLQGFPDWAYERAESVSSKSQ | 417 |
| | | VVVA+ E + Y+V G++++G+ YRLRIRR+TP+ECFRLQGFPDWA+E A VSS SQ | |
| Sbjct: | 361 | VVVASYEGEDKQVYQVAGVLIDGQFYRLRIRRITPKECFRLQGFPDWAFEAARKVSSNSQ | 420 |
| Query: | 418 | LYKQAGNSVTVTVIEAIAREFRRTEEEEK | 446 |
| | | LYKQAGNSVTV VI AIA++ + EE+++ | |
| Sbjct: | 421 | LYKQAGNSVTVPVIAAIAKKLKEVEEKDE | 449 |

[10451] A related DNA sequence was identified in S. pyogenes <SEQ ID 2435> which encodes the amino acid sequence <SEQ ID 2436>. Analysis of this protein sequence reveals the following:

```
Possible site: 49
>>> Seems to have no N-terminal signal sequence
----- Final Results -----
                            bacterial cytoplasm --- Certainty = 0.1725(Affirmative) < succ>
                              bacterial membrane --- Certainty = 0.0000(Not Clear) < succ>
                                bacterial outside --- Certainty = 0.0000(Not Clear) < succ>
```

[10452] An alignment of the GAS and GBS proteins is shown below.

| Identities = 60/75 (80%), Positives = 69/75 (92%) | | | |
|---|---|---|---|
| Query: | 1 | MKFLDLFAGIGGFRLGMESQGHKCLGFCEIDKFARTSYKAMFNTEGEIEYHDIKEVTDHD | 60 |
| | | MKFLDLFAGIGGFRLG+ +Q H+C+GFCEIDKFAR SYKA++ TEGEIE+HDI++VTD D | |
| Sbjct: | 4 | MKFLDLFAGIGGFRLGLINQCHECIGFCEIDKFARQSYKAIYETEGEIEFHDIRQVTDQD | 63 |
| Query: | 61 | FRQFRGQVDIICGGF | 75 |
| | | FRQ RGQVDIICGGF | |
| Sbjct: | 64 | FRQLRGQVDIICGGF | 78 |

[10453] Based on this analysis, it was predicted that these proteins and their epitopes could be useful antigens for vaccines or diagnostics.

### EXAMPLE 1902

[10454] A DNA sequence (GBSx2010) was identified in S. agalactiae <SEQ ID 5897> which encodes the amino acid sequence <SEQ ID 5898>. Analysis of this protein sequence reveals the following:

```
Possible site: 16
>>> Seems to have an uncleavable N-term signal seq
      INTEGRAL Likelihood = −9.71 Transmembrane 8-24 ( 3-30)
----- Final Results -----
                              bacterial membrane --- Certainty = 0.4885(Affirmative) < succ>
                                bacterial outside --- Certainty = 0.0000(Not Clear) < succ>
                            bacterial cytoplasm --- Certainty = 0.0000(Not Clear) < succ>
```

[10455] A related GBS nucleic acid sequence <SEQ ID 9941> which encodes amino acid sequence <SEQ ID 9942> was also identified.

[10456] The protein has no significant homology with any sequences in the GENPEPT database.

[10457] A related DNA sequence was identified in S. pyogenes <SEQ ID 5899> which encodes the amino acid sequence <SEQ ID 5900>. Analysis of this protein sequence reveals the following:

| Possible site: 28 | | | | |
|---|---|---|---|---|
| >>> Seems to have no N-terminal signal sequence | | | | |
| | INTEGRAL | Likelihood = −1.81 | Transmembrane | 20-36 (19-36) |

```
----- Final Results -----
                              bacterial membrane --- Certainty = 0.1723(Affirmative) < succ>
                                bacterial outside --- Certainty = 0.0000(Not Clear) < succ>
                            bacterial cytoplasm --- Certainty = 0.0000(Not Clear) < succ>
```

[10458] An alignment of the GAS and GBS proteins is shown below.

Identities = 16/33 (48%), Positives = 26/33 (78%)

| | | | |
|---|---|---|---|
| Query: | 1 | MNKMIWWILGGIYLISIIILIVEIIRAPEMDDH | 33 |
| | | ++KM WW+L G++ + I LI+E+I APEM+D+ | |
| Sbjct: | 12 | VSKMFWWLLLGVWGLRTIWLIIEVITAPEMEDY | 44 |

[10459] Based on this analysis, it was predicted that these proteins and their epitopes could be useful antigens for vaccines or diagnostics.

### EXAMPLE 1903

[10460] A DNA sequence (GBSx2011) was identified in S. agalactiae <SEQ ID 5901> which encodes the amino acid sequence <SEQ ID 5902>. This protein is predicted to be ifn-response binding factor 1 (irebf-1). Analysis of this protein sequence reveals the following:

```
Possible site: 53
>>> Seems to have no N-terminal signal sequence
----- Final Results -----
                            bacterial cytoplasm --- Certainty = 0.4771(Affirmative) < succ>
                              bacterial membrane --- Certainty = 0.0000(Not Clear) < succ>
                                bacterial outside --- Certainty = 0.0000(Not Clear) < succ>
```

[10461] The protein has homology with the following sequences in the GENPEPT database.

| >GP: AAD41248 GB: AF106927 unknown [Streptococcus suis] | | | |
|---|---|---|---|
| Identities = 258/272 (94%), Positives = 266/272 (96%) | | | |
| Query: | 1 | MKRITANQYQTSERYYKLPKILFESERYKDMKLEVKVAYAVLKDRLELSLSKGWIDEDGA | 60 |
| | | MKRITANQYQTSERYYKLPKILFESERYKDMKLEVKVAYAVLKDRLELSLSKGWIDEDGA | |
| Sbjct: | 1 | MKRITANQYQTSERYYKLPKILFESERYKDMKLEVKVAYAVLKDRLELSLSKGWIDEDGA | 60 |
| Query: | 61 | IYLIYSNSNLMALLGCSKSKLLSIKKTLREYGLIDEVQQSSSERGRMANKIYLGELEHEP | 120 |
| | | IYLIYSNSNLMALLGCSKSKLLSIKKTLREYGLIDEVQQSSSE+GRMANKIYLGELEHE | |
| Sbjct: | 61 | IYLIYSNSNLMALLGCSKSKLLSIKKTLREYGLIDEVQQSSSEKGRMANKIYLGELEHET | 120 |
| Query: | 121 | TPVLHTDGASVKKTLGESQRKTGPVLYSAPSETEGSETKYSETEGSDLVMKDEEERQLVD | 180 |
| | | TPVLHTDGASVKKTLG SQRKTGPVL SAPSETEGSETKYSET+GSD +++DEEERQ VD | |
| Sbjct: | 121 | TPVLHTDGASVKKTLGGSQRKTGPVLNSAPSETEGSETKYSETKGSDFLIEDEEERQQVD | 180 |
| Query: | 181 | EKKEENFTSKVDGVTKYDRDYIWGLVHDQLRQTGLSQSASDYAMIYFSDRYQYALEQMRF | 240 |
| | | EK+EENFTSKVDGVT+YDRDYIWGLVHDQLRQTGLSQSASDYAMIYFSDRYQYALE MRF | |
| Sbjct: | 181 | EKQEENFTSKVDGVTRYDRDYIWGLVHDQLRQTGLSQSASDYAMIYFSDRYQYALEHMRF | 240 |
| Query: | 241 | ARSAEVIAEYVFNGVLSEWTKQLRRQEVKGGE | 272 |
| | | ARSAEVIAEYVFNGVLSEWTKQLRRQEVKGG+ | |
| Sbjct: | 241 | ARSAEVIAEYVFNGVLSEWTKQLRRQEVKGGD | 272 |

[10462] A related DNA sequence was identified in S. pyogenes <SEQ ID 5903> which encodes the amino acid sequence <SEQ ID 5904>. Analysis of this protein sequence reveals the following:

```
Possible site: 55
>>> Seems to have no N-terminal signal sequence
----- Final Results -----
                            bacterial cytoplasm --- Certainty = 0.5248(Affirmative) < succ>
                              bacterial membrane --- Certainty = 0.0000(Not Clear) < succ>
                                bacterial outside --- Certainty = 0.0000(Not Clear) < succ>
```

[10463] An alignment of the GAS and GBS proteins is shown below.

| Identities = 84/122 (68%), Positives = 99/122 (80%), | | | |
|---|---|---|---|
| Gaps = 2/122 (1%) | | | |
| Query: | 145 | VLYSAPSETEGSETKYSETEGSDLVMKDEEERQLVD--EKKEENFTSKVDGVTKYDRDYI | 202 |
| | | VL SAPSETE SET+ SET+ S+LV++DEEER+ +K E +FT +VD VTKYD+DYI | |
| Sbjct: | 1 | VLNSAPSETEKSETEGSETKESNLVIEDEEERKECTSVKKTEGHFTRQVDQVTKYDKDYI | 60 |
| Query: | 203 | WGLVHDQLRQTGLSQSASDYAMIYFSDRYQYALEQMRFARSAEVIAEYVFNGVLSEWTKQ | 262 |
| | | W LVH QLR+ GLSQ+ASD M YF +RY YALE +RFAR+AE IAEYVFNGVLSEWTKQ | |
| Sbjct: | 61 | WSLVHSQLREGGLSQAASDLVMSYFEERYAYALEHIRFARTAEAIAEYVFNGVLSEWTKQ | 120 |
| Query: | 263 | LR | 264 |
| | | LR | |
| Sbjct: | 121 | LR | 122 |

[10464] Based on this analysis, it was predicted that these proteins and their epitopes could be useful antigens for vaccines or diagnostics.

### EXAMPLE 1904

[10465] A DNA sequence (GBSx2012) was identified in S. agalactiae <SEQ ID 5905> which encodes the amino acid sequence <SEQ ID 5906>. Analysis of this protein sequence reveals the following:

```
Possible site: 17
>>> Seems to have no N-terminal signal sequence
----- Final Results -----
                            bacterial cytoplasm --- Certainty = 0.4191(Affirmative) < succ>
                              bacterial membrane --- Certainty = 0.0000(Not Clear) < succ>
                                bacterial outside --- Certainty = 0.0000(Not Clear) < succ>
```

[10466] A related GBS nucleic acid sequence <SEQ ID 9375> which encodes amino acid sequence <SEQ ID 9376> was also identified.

[10467] The protein has no significant homology with any sequences in the GENPEPT database.

[10468] No corresponding DNA sequence was identified in S. pyogenes.

[10469] Based on this analysis, it was predicted that this protein and its epitopes, could be useful antigens for vaccines or diagnostics.

### EXAMPLE 1905

[10470] A DNA sequence (GBSx2013) was identified in S. agalactiae <SEQ ID 5907> which encodes the amino acid sequence <SEQ ID 5908>. Analysis of this protein sequence reveals the following:

```
Possible site: 15
>>> Seems to have no N-terminal signal sequence
----- Final Results -----
                            bacterial cytoplasm --- Certainty = 0.3723(Affirmative) < succ>
                              bacterial membrane --- Certainty = 0.0000(Not Clear) < succ>
                                bacterial outside --- Certainty = 0.0000(Not Clear) < succ>
```

[10471] The protein has no significant homology with any sequences in the GENPEPT database.

[10472] No corresponding DNA sequence was identified in S. pyogenes.

[10473] Based on this analysis, it was predicted that this protein and its epitopes, could be useful antigens for vaccines or diagnostics.

### EXAMPLE 1906

[10474] A DNA sequence (GBSx2014) was identified in S. agalactiae <SEQ ID 5909> which encodes the amino acid sequence <SEQ ID 5910>. Analysis of this protein sequence reveals the following:

```
Possible site: 44
>>> Seems to have no N-terminal signal sequence
----- Final Results -----
                            bacterial cytoplasm --- Certainty = 0.3053(Affirmative) < succ>
                              bacterial membrane --- Certainty = 0.0000(Not Clear) < succ>
                                bacterial outside --- Certainty = 0.0000(Not Clear) < succ>
```

[10475] The protein has no significant homology with any sequences in the GENPEPT database.

[10476] No corresponding DNA sequence was identified in S. pyogenes.

[10477] Based on this analysis, it was predicted that this protein and its epitopes, could be useful antigens for vaccines or diagnostics.

### EXAMPLE 1907

[10478] A DNA sequence (GBSx2015) was identified in S. agalactiae <SEQ ID 5911> which encodes the amino acid sequence <SEQ ID 5912>. This protein is predicted to be 50S ribosomal protein L7/112 (rplL). Analysis of this protein sequence reveals the following:

```
Possible site: 56
>>> Seems to have no N-terminal signal sequence
----- Final Results -----
                            bacterial cytoplasm --- Certainty = 0.1034(Affirmative) < succ>
                              bacterial membrane --- Certainty = 0.0000(Not Clear) < succ>
                                bacterial outside --- Certainty = 0.0000(Not Clear) < succ>
```

[10479] A related GBS nucleic acid sequence <SEQ ID 9943> which encodes amino acid sequence <SEQ ID 9944> was also identified.

[10480] The protein has homology with the following sequences in the GENPEPT database.

| >GP: CAB11881 GB: Z99104 ribosomal protein L12 (BL9) [Bacillus subtilis] | | | |
|---|---|---|---|
| Identities = 83/123 (67%), Positives = 95/123 (76%), Gaps = 2/123 (1%) | | | |
| Query: | 6 | MALNIENIIAEIKEATILELNDLVKAIEEEFGVTAAAPVAAA--AAGGEAAAAKDSFDVE | 63 |
| | | MALNIE IIA +KEAT+LELNDLVKAIEEEFGVTAAAPVA A AA G AA + FD+ | |
| Sbjct: | 1 | MALNIEEIIASVKEATVLELNDLVKAIEEEFGVTAAAPVAVAGGAAAGGAAEEQSEFDLI | 60 |
| Query: | 64 | LTAAGDKKVGVIKVVREITGEGLKEAKAIVDNAPSVIKEGASEAEANEIKEKLEAAGASV | 123 |
| | | L AG +K+ VIKVVREITG GLKEAK +VDN P +KEG ++ EA E+K KLE GASV | |
| Sbjct: | 61 | LAGAGSQKIKVIKVVREITGLGLKEAKELVDNTPRPLKEGIAKEEAEELKAKLEEVGASV | 120 |
| Query: | 124 | TLK | 126 |
| | | +K | |
| Sbjct: | 121 | EVK | 123 |

[10481] A related DNA sequence was identified in S. pyogenes <SEQ ID 5913> which encodes the amino acid sequence <SEQ ID 5914>. Analysis of this protein sequence reveals the following:

```
Possible site: 51
>>> Seems to have no N-terminal signal sequence
----- Final Results -----
                            bacterial cytoplasm --- Certainty = 0.1164(Affirmative) < succ>
                              bacterial membrane --- Certainty = 0.0000(Not Clear) < succ>
                                bacterial outside --- Certainty = 0.0000(Not Clear) < succ>
```

[10482] An alignment of the GAS and GBS proteins is shown below.

| Identities = 104/126 (82%), Positives = 113/126 (89%) | | | |
|---|---|---|---|
| Query: | 1 | MEEITMALNIENIIAEIKEATILELNDLVKAIEEEFGVTAAAPVAAAAAGGEAAAAKDSF | 60 |
| | | +EEITMALNIENIIAEIKEA+ILELNDLVKAIEEEFGVTAAAPVAAAAAGG AAKDSF | |
| Sbjct: | 1 | LEEITMALNIENIIAEIKEASILELNDLVKAIEEEFGVTAAAPVAAAAAGGAEEAAKDSF | 60 |
| Query: | 61 | DVELTAAGDKKVGVIKVVREITGEGLKEAKAIVDNAPSVIKEGASEAEANEIKEKLEAAG | 120 |
| | | DVELT+AGDKKVGVIK VREITG GLKEAK +VD AP+ +KEG + AEA EIK KLE AG | |
| Sbjct: | 61 | DVELTSAGDKKVGVIKAVREITGLGLKEAKGLVDGAPANVKEGVAAAEAEEIKAKLEEAG | 120 |
| Query: | 121 | ASVTLK | 126 |
| | | A++TLK | |
| Sbjct: | 121 | ATITLK | 126 |

[10483] Based on this analysis, it was predicted that these proteins and their epitopes could be useful antigens for vaccines or diagnostics.

### EXAMPLE 1908

[10484] A DNA sequence (GBSx2017) was identified in S. agalactiae <SEQ ID 5915> which encodes the amino acid sequence <SEQ ID 5916>. This protein is predicted to be ribosomal protein L10 (rplJ). Analysis of this protein sequence reveals the following:

```
Possible site: 37
>>> Seems to have no N-terminal signal sequence
----- Final Results -----
                            bacterial cytoplasm --- Certainty = 0.1251(Affirmative) < succ>
                              bacterial membrane --- Certainty = 0.0000(Not Clear) < succ>
                                bacterial outside --- Certainty = 0.0000(Not Clear) < succ>
```

[10485] The protein has homology with the following sequences in the GENPEPT database.

| >GP: CAB11880 GB: Z99104 ribosomal protein L10 (BL5) [Bacillus subtilis] | | | |
|---|---|---|---|
| Identities = 96/164 (58%), Positives = 125/164 (75%), Gaps = 1/164 (0%) | | | |
| Query: | 14 | MSEAIIAKKAEQVELIAEKMKAAASIVVVDSRGLTVEQDTNLRRSLRESDVEFKVIKNSI | 73 |
| | | MS AI KK VE IA K+K + S ++VD RGL V + T LR+ LRE++VE KV KN++ | |
| Sbjct: | 1 | MSSAIETKKVV-VEEIASKLKESKSTIIVDYRGLNVSEVTELRKQLREANVESKVYKNTM | 59 |
| Query: | 74 | LTRAAEKAGLEDLKELFVGPSAVAESNEDVIAPAKVISDFAKDAEALEIKGGSVDGKFTS | 133 |
| | | RA E+A L L + GP+A+AFS EDV+APAKV++DFAK+ EALEIK G ++GK ++ | |
| Sbjct: | 60 | TRRAVEQAELNGLNDFLTGPNAIAFSTEDVVAPAKVLNDFAKNHEALEIKAGVIEGKVST | 119 |
| Query: | 134 | VEEINALAKLPNKEGMLSMLLSVLQAPVRNVAYAVKAVAEKDEE | 177 |
| | | VEE+ ALA+LP +EG+LSMLLSVL+APVRN+A A KAVAE+ EE | |
| Sbjct: | 120 | VEEVKALAELPPREGLLSMLLSVLKAPVRNLALAAKAVAEQKEE | 163 |

[10486] A related DNA sequence was identified in S. pyogenes <SEQ ID 5917> which encodes the amino acid sequence <SEQ ID 5918>. Analysis of this protein sequence reveals the following:

| Possible site: 56 | | | | |
|---|---|---|---|---|
| >>> Seems to have an uncleavable N-term signal seq | | | | |
| | INTEGRAL | Likelihood = −5.47 | Transmembrane | 7-23 (5-24) |

```
----- Final Results -----
                              bacterial membrane --- Certainty = 0.3187(Affirmative) < succ>
                                bacterial outside --- Certainty = 0.0000(Not Clear) < succ>
                            bacterial cytoplasm --- Certainty = 0.0000(Not Clear) < succ>
```

[10487] An alignment of the GAS and GBS proteins is shown below.

| Identities = 149/176 (84%), Positives = 162/176 (91%) | | | |
|---|---|---|---|
| Query: | 4 | SQKIKTEVKLMSEAIIAKKAEQVELIAEKMKAAASIVVVDSRGLTVEQDTNLRRSLRESD | 63 |
| | | S KIKTEVKLMSEAIIAKKAEQVELIAEKMKAAASIV+VDSRGLTV+QDT LRRSLRES | |
| Sbjct: | 23 | SPKIKTEVKLMSEAIIAKKAEQVELIAEKMKAAASIVIVDSRGLTVDQDTVLRRSLRESG | 82 |
| Query: | 64 | VEFKVIKNSILTRAAEKAGLEDLKELFVGPSAVAFSNEDVIAPAKVISDFAKDAEALEIK | 123 |
| | | VEFKVIKNSILTRAAEKAGL++LK++FVGPSAVAFSNEDVIAPAKVI+DF K A+ALEIK | |
| Sbjct: | 83 | VEFKVIKNSILTRAAEKAGLDELKDVFVGPSAVAFSNEDVIAPAKVINDFTKTADALEIK | 142 |
| Query: | 124 | GGSVDGKFTSVEEINALAKLPNKEGMLSMLLSVLQAPVRNVAYAVKAVAEKDEEVA | 179 |
| | | GG+++G +S EEI ALA LPN+EGMLSMLLSVLQAPVRNVAYAVKAVAE E A | |
| Sbjct: | 143 | GGAIEGAVSSKEEIQALATLPNREGMLSMLLSVLQAPVRNVAYAVKAVAENKEGAA | 198 |

[10488] Based on this analysis, it was predicted that these proteins and their epitopes could be useful antigens for vaccines or diagnostics.

### EXAMPLE 1909

[10489] A DNA sequence (GBSx2018) was identified in S. agalactiae <SEQ ID 5919> which encodes the amino acid sequence <SEQ ID 5920>. Analysis of this protein sequence reveals the following:

| Possible site: 40 | | | | |
|---|---|---|---|---|
| >>> Seems to have no N-terminal signal sequence | | | | |
| | INTEGRAL | Likelihood = −7.22 | Transmembrane | 125-141 (106-143) |
| | INTEGRAL | Likelihood = −1.91 | Transmembrane | 108-124 (106-124) |

```
----- Final Results -----
                              bacterial membrane --- Certainty = 0.3888(Affirmative) < succ>
                                bacterial outside --- Certainty = 0.0000(Not Clear) < succ>
                            bacterial cytoplasm --- Certainty = 0.0000(Not Clear) < succ>
```

[10490] A related GBS nucleic acid sequence <SEQ ID 10931> which encodes amino acid sequence <SEQ ID 10932> was also identified.

[10491] The protein has no significant homology with any sequences in the GENPEPT database.

[10492] No corresponding DNA sequence was identified in S. pyogenes.

[10493] Based on this analysis, it was predicted that this protein and its epitopes, could be useful antigens for vaccines or diagnostics.

### EXAMPLE 1910

[10494] A DNA sequence (GBSx2019) was identified in S. agalactiae <SEQ ID 5921> which encodes the amino acid sequence <SEQ ID 5922>. This protein is predicted to be Clp-like ATP-dependent protease binding subunit (clpC). Analysis of this protein sequence reveals the following:

```
Possible site: 31
>>> Seems to have no N-terminal signal sequence
----- Final Results -----
                            bacterial cytoplasm --- Certainty = 0.3483(Affirmative) < succ>
                              bacterial membrane --- Certainty = 0.0000(Not Clear) < succ>
                                bacterial outside --- Certainty = 0.0000(Not Clear) < succ>
```

[10495] The protein has homology with the following sequences in the GENPEPT database.

| >GP: AAA68910 GB: L34677 Clp-like ATP-dependent protease binding | | | |
|---|---|---|---|
| subunit [Bos taurus] | | | |
| Identities = 437/589 (74%), Positives = 514/589 (87%), Gaps = 5/589 (0%) | | | |
| Query: | 10 | DPFGN-MDDIFNSLMGNMGGYNSENKRYLINGREVTPEEFSQYRQTGKLPGQELNNQNTP | 68 |
| | | DPF N MDD+FN LMG M G NSEN+RYLINGREVTPEE++ +RQTGKLPG Q | |
| Sbjct: | 2 | DPFNNDMDDLFNQLMGGMNGVNSENRRYLINGREVTPEEYAAFRQTGKLPGVTDPTQ-AK | 60 |
| Query: | 69 | TNQVSADSVLTKLGTNLTDQARQHLLDPVIGRNKEIQETAEILARRTKNNPVLVGDAGVG | 128 |
| | | T Q DS+L KLG NLT +A++ LDPVIGRNKEIQETAEIL+RRTKNNPVLVGDAGVG | |
| Sbjct: | 61 | TKQPQPDSMLAKLGRNLTQEAKEGKLDPVIGRNKEIQETAEILSRRTKNNPVLVGDAGVG | 120 |
| Query: | 129 | KTAVIEGLAQAIINGDVPAAIKNKEIISIDISSLEAGTQYRGSFEENIQNIIKEVKETGN | 188 |
| | | KTAV+EGLAQAI+ GDVPAAIKNK+IISIDISSLEAGTQYRGSFEEN+Q +I EVK+ GN | |
| Sbjct: | 121 | KTAVVEGLAQAIVAGDVPAAIKNKQIISIDISSLEAGTQYRGSFEENMQKLIDEVKKDGN | 180 |
| Query: | 189 | IILFFDEIHQILGAGSTGGDSGSKGLADILKPALSRGELTVIGATTQDEYRNTILKNAAL | 248 |
| | | +ILFFDEIHQI+GAG+ G SGSKG+ADILKPALSRGE+T+IGATTQDEYRNTILK+AAL | |
| Sbjct: | 181 | VILFFDEIHQIIGAGNAGDASGSKGMADILKPALSRGEVTLIGATTQDEYRNTILKDAAL | 240 |
| Query: | 249 | ARRFNEVKVNAPSAQDTFNILMGIRNLYEQHHNVVLPDSVLKAAVDLSIQYIPQRSLPDK | 308 |
| | | +RRFN+V VNAPS +DTF IL G+R LYE+HHNV LPD VLKAA+D S+QYIPQRSLPDK | |
| Sbjct: | 241 | SRRFNQVTVNAPSKEDTFKILQGLRKLYEKHHNVSLPDEVLKAAIDYSVQYIPQRSLPDK | 300 |
| Query: | 309 | AIDLIDMTAAHLAAQHPVTDLKSLEKEIAEQRDKQEKAVNTEDFEEALKVKTRIEELQNQ | 368 |
| | | AIDLID+TAAHLA++HPV D K++E+EI + KQ++AV ED++ A + K ++ +LQ+Q | |
| Sbjct: | 301 | AIDLIDVTAAHLASKHPVKDAKTIEEEIKKTEAKQQEAVEKEDYQAAQEAKDQVAKLQDQ | 360 |
| Query: | 369 | IDNHTEGQKVTATINDIAMSIERLTGVPVSNMGASDIERLKELGNRLKGKVIGQNDAVEA | 428 |
| | | + +H+E ++V AT +D+A ++ER+TG+PVS MGASDIERLK L RL+GKVIGQ +AVEA | |
| Sbjct: | 361 | LKDHSESERVVATPSDVAAAVERMTGIPVSKMGASDIERLKGLATRLEGKVIGQQEAVEA | 420 |
| Query: | 429 | VARAIRRNRAGFDDGNRPIGSFLFVGPTGVGKTELAKQLAFDMFGSKDAIVRLDMSEYND | 488 |
| | | V+RAIRRNRAGFD+GNRPIGSFLFVGPTGVGKTELAKQLA DMFGS + I+RLDMSEY D | |
| Sbjct: | 421 | VSRAIRRNRAGFDEGNRPIGSFLFVGPTGVGKTELAKQLALDMFGSTNDIIRLDMSEYTD | 480 |
| Query: | 489 | RTAVSKLIGATAGYVGYDDNSNTLTERIRRNPYSIVLLDEIEKADPQVITLLLQVLDDGR | 548 |
| | | RTAVSKLIG TAGYVGYDDNSNTLTE++RR+PYSIVLLDEIEKA+PQVITLLLQVLDDGR | |
| Sbjct: | 481 | RTAVSKLIGTTAGYVGYDDNSNTLTEKVRRHPYSIVLLDEIEKANPQVITLLLQVLDDGR | 540 |
| Query: | 549 | LTDGQGNTINFKNTVIIATSNAGFGNEAFTGDSDKDLKIMERISPYERP | 597 |
| | | LTDGQGNT++FKNT+IIATSNAGF ++A G+ D K+M+++ PYFRP | |
| Sbjct: | 541 | LTDGQGNTVDFKNTIIIATSNAGFSSDAVAGE---DAKLMDKLQPYFRP | 586 |

[10496] A related DNA sequence was identified in S. pyogenes <SEQ ID 5923> which encodes the amino acid sequence <SEQ ID 5924>. Analysis of this protein sequence reveals the following:

```
Possible site: 22
>>> Seems to have no N-terminal signal sequence
----- Final Results -----
                            bacterial cytoplasm --- Certainty = 0.2718(Affirmative) < succ>
                              bacterial membrane --- Certainty = 0.0000(Not Clear) < succ>
                                bacterial outside --- Certainty = 0.0000(Not Clear) < succ>
```

[10497] An alignment of the GAS and GBS proteins is shown below.

| Identities = 551/697 (79%), Positives = 616/697 (88%), Gaps = 3/697 (0%) | | | |
|---|---|---|---|
| Query: | 5 | NFYNRDPFGNMDDIFNSLMGNMGGYNSENKRYLINGREVTPEEFSQYRQTGKLPGQELNN | 64 |
| | | +F +DPF NMDDIFN LM NMGGY SEN RYL+NGRE+TPEEF YRQTG+LP | |
| Sbjct: | 3 | HFSGKDPFVNMDDIFNQLMANMGGYRSENPRYLVNGREITPEEFQHYRQTGQLPVATTKA | 62 |
| Query: | 65 | QNTPTNQVSADSVLTKLGTNLTDQARQHLLDPVIGRNKEIQETAEILARRTKNNPVLVGD | 124 |
| | | N+ ADSVLT+LGTNLT +ARQ LDPVIGRNKEIQ+TAEILARRTKNNPVLVGD | |
| Sbjct: | 63 | TNSQMLTPKADSVLTQLGTNLTQEARQGHLDPVIGRNKEIQDTAEILARRTKNNPVLVGD | 122 |
| Query: | 125 | AGVGKTAVIEGLAQAIINGDVPAAIKNKEIISIDISSLEAGTQYRGSFEENIQNIIKEVK | 184 |
| | | AGVGKTAVIEGLAQAI+NGDVPAAIKNKEI+SIDISSLEAGTQYRGSFEE IQN+I+EVK | |
| Sbjct: | 123 | AGVGKTAVIEGLAQAIVNGDVPAAIKNKEIVSIDISSLEAGTQYRGSFEETIQNLIQEVK | 182 |
| Query: | 185 | ETGNIILFFDEIHQILGAGSTGGDSGSKGLADILKPALSRGELTVIGATTQDEYRNTILK | 244 |
| | | E GNIILFFDEIHQI+GAG+T DSGSKGLADILKPALSRGELT+IGATTQDEYRNTILK | |
| Sbjct: | 183 | EAGNIILFFDEIHQIVGAGATSSDSGSKGLADILKPALSRGELTLIGATTQDEYRNTILK | 242 |
| Query: | 245 | NAALARRFNEVKVNAPSAQDTFNILMGIRNLYEQHHNVVLPDSVLKAAVDLSIQYIPQRS | 304 |
| | | NAALARRFNEVKVNAPSA+DTF+ILMGIRNLYEQHH++ LPD+VLKAAVD SIQYIPQRS | |
| Sbjct: | 243 | NAALARRFNEVKVNAPSAEDTFHILMGIRNLYEQHHHITLPDNVLKAAVDYSIQYIPQRS | 302 |
| Query: | 305 | LPDKAIDLIDMTAAHLAAQHPVTDLKSLEKEIAEQRDKQEKAVNTEDFEEALKVKTRIEE | 364 |
| | | LPDKAIDL+DMTAAHLAAQHPVTDLK+LE EIA+Q++ QEKAV EDFE+AL KTRIE | |
| Sbjct: | 303 | LPDKAIDLLDMTAAHLAAQHPVTDLKTLETEIAKQKESQEKAVAKEDFEKALAAKTRIET | 362 |
| Query: | 365 | LQNQIDNHTEGQKVTATINDIAMSIERLTGVPVSNMGASDIERLKELGNRLKGKVIGQND | 424 |
| | | LQ QI+ H + Q VTAT+NDIA S+ERLTG+PVSNMG +D+ERLK + +RLK VIGQ++ | |
| Sbjct: | 363 | LQKQIEQHNQSQNVTATVNDIAESVERLTGIPVSNMGTNDLERLKGISSRLKSHVIGQDE | 422 |
| Query: | 425 | AVEAVARAIRRNRAGFDDGNRPIGSFLFVGPTGVGKTELAKQLAFDMFGSKDAIVRLDMS | 484 |
| | | AV AVARAIRRNRAGFDDG RPIGSFLFVGPTGVGKTELAKQLA D+FGSKDAI+RLDMS | |
| Sbjct: | 423 | AVAAVARAIRRNRAGFDDGKRPIGSFLFVGPTGVGKTELAKQLALDLFGSKDAIIRLDMS | 482 |
| Query: | 485 | EYNDRTAVSKLIGATAGYVGYDDNSNTLTERIRRNPYSIVLLDEIEKADPQVITLLLQVL | 544 |
| | | EYNDRTAVSKLIG TAGYVGYDDN+NTLTER+RRNPY+IVLLDEIEKADPQ+ITLLLQVL | |
| Sbjct: | 483 | EYNDRTAVSKLIGTTAGYVGYDDNNNTLTERVRRNPYAIVLLDEIEKADPQIITLLLQVL | 542 |
| Query: | 545 | DDGRLTDGQGNTINFKNTVIIATSNAGFGNEAFTGDSDKDLKIMERISPYFRPEFLNRFN | 604 |
| | | DDGRLTDGQGNTINFKNTVIIATSNAGFG + + IM+RI+PYFRPEFLNRFN | |
| Sbjct: | 543 | DDGRLTDGQGNTINFKNTVIIATSNAGFGQQ---DTETSESNIMDRIAPYFRPEFLNRFN | 599 |
| Query: | 605 | GVIEFSHLSKDDLSEIVDLMLDEVNQTIGKKGIDLVVDENVKSHLIELGYDEAMGVRPLR | 664 |
| | | +I+F+HL K+ L EIVDLML EVNQT KKGI L + ++ K+HLI+LGY+ AMG RPLR | |
| Sbjct: | 600 | SIIKFNHLQKESLEEIVDLMLAEVNQTTAKKGISLTITDDAKAHLIDLGYNHAMGARPLR | 659 |
| Query: | 665 | RVIEQEIRDRITDYYLDHTDVKHLKANLQDGQIVISE | 701 |
| | | R+IEQEIRDRITDYYLDH +VK L+A L++GQ+VI + | |
| Sbjct: | 660 | RIIEQEIRDRITDYYLDHPEVKKLQAILKEGQLVIRQ | 696 |

[10498] Based on this analysis, it was predicted that these proteins and their epitopes could be useful antigens for vaccines or diagnostics.

### EXAMPLE 1911

[10499] A DNA sequence (GBSx2020) was identified in S. agalactiae <SEQ ID 5925> which encodes the amino acid sequence <SEQ ID 5926>. Analysis of this protein sequence reveals the following:

| Possible Site: 20 | | | | |
|---|---|---|---|---|
| >>> Seems to have an uncleavable N-term signal seq | | | | |
| | INTEGRAL | Likelihood = −4.78 | Transmembrane | 8-24 (7-25) |

```
----- Final Results -----
                              bacterial membrane --- Certainty = 0.2911(Affirmative) < succ>
                                bacterial outside --- Certainty = 0.0000(Not Clear) < succ>
                            bacterial cytoplasm --- Certainty = 0.0000(Not Clear) < succ>
```

[10500] A related GBS nucleic acid sequence <SEQ ID 9945> which encodes amino acid sequence <SEQ ID 9946> was also identified.

[10501] The protein has homology with the following sequences in the GENPEPT database.

| >GP: AAC73364 GB: AE000134 putative enzyme [Escherichia coli K12] | | | |
|---|---|---|---|
| Identities = 142/307 (46%), Positives = 195/307 (63%), Gaps = 6/307 (1%) | | | |
| Query: | 39 | KELLESKKTLILHGALGTELESRGCDVSGKLWSAKYLIEDPAAIQTIHEDYIRAGADIVT | 98 |
| | | + LL+ + L+L GA+ TELE+RGC+++ LWSAK L+E+P I+ +H DY RAGA | |
| Sbjct: | 8 | RALLDKQDILLLDGAMATELEARGCNLADSLWSAKVLVENPELIREVHLDYYRAGAQCAI | 67 |
| Query: | 99 | TSTYQATLQGLAQVGVSESQTEDLIRLTVQLAKAAREQVWKSLTKEEKSERIYPLISGDV | 158 |
| | | T++YQAT G A G+ E+Q++ LI +V+LA+ ARE L + ++ + L++G V | |
| Sbjct: | 68 | TASYQATPAGFAARGLDEAQSKALIGKSVELARKAREAY---LAENPQAGTL--LVAGSV | 122 |
| Query: | 159 | GPYAAFLADGSEYTGLYDIDKQGLKNFHRHRIELLLDEGVDILALETIPNAQEAEALIEL | 218 |
| | | GPY A+LADGSEY G Y + + FHR R+E LLD G D+LA ET+PN E EAL EL | |
| Sbjct: | 123 | GPYGAYLADGSEYRGDYHCSVEAFQAFHRPRVEALLDAGADLLACETLPNFSEIEALAEL | 182 |
| Query: | 219 | LAEDFPQVEAYMSFTSQDGKTISDGSAVADLAKAIDVSPQVVALGINCSSPSLVADFLQA | 278 |
| | | L +P+ A+ SFT +D + +SDG+ + D+ + PQVVALGINC + LQ | |
| Sbjct: | 183 | LTA-YPRARAWFSFTLRDSEHLSDGTPLRDVVALLAGYPQVVALGINCIALENTTAALQH | 241 |
| Query: | 279 | IAEQTNKPLVTYPNSGEVYDGASQSWQSSPDHSHTLLENTSDWQKLGAQVVGGCCRTRPA | 338 |
| | | + T PLV YPNSGE YD S++W +H L + WQ GA+++GGCCRT PA | |
| Sbjct: | 242 | LHGLTVLPLVVYPNSGEHYDAVSKTWHHHGEHCAQLADYLPQWQAAGARLIGGCCRTTPA | 301 |
| Query: | 339 | DIADLSA | 345 |
| | | DIA L A | |
| Sbjct: | 302 | DIAALKA | 308 |

[10502] No corresponding DNA sequence was identified in S. pyogenes.

[10503] Based on this analysis, it was predicted that this protein and its epitopes, could be useful antigens for vaccines or diagnostics.

[10504] A related GBS gene <SEQ ID 8933> and protein <SEQ ID 8934> were also identified. Analysis of this protein sequence reveals the following:

| Lipop: Possible site: −1 Crend: 5 | | | | |
|---|---|---|---|---|
| McG: Discrim Score: 5.48 | | | | |
| GvH: Signal Score (−7.5): −2.64 | | | | |
| Possible site: 20 | | | | |
| >>> Seems to have an uncleavable N-term signal seq | | | | |
| ALOM program count: 1 value: −4.78 threshold: 0.0 | | | | |
| | INTEGRAL | Likelihood = −4.78 | Transmembrane | 8-24 (7-25) |

| | |
|---|---|
| PERIPHERAL | Likelihood = 2.49 259 |

```
modified ALOM score: 1.46
*** Reasoning Step: 3
----- Final Results -----
                              bacterial membrane --- Certainty = 0.2911(Affirmative) < succ>
                                bacterial outside --- Certainty = 0.0000(Not Clear) < succ>
                            bacterial cytoplasm --- Certainty = 0.0000(Not Clear) < succ>
```

[10505] The protein has homology with the following sequences in the databases:

[chemical structure]

[10506] SEQ ID 8934 (GBS381) was expressed in E. coli as a His-fusion product. SDS-PAGE analysis of total cell extract is shown in FIG. 68 (lane 6; MW 42 kDa). It was also expressed in E. coli as a GST-fusion product. SDS-PAGE analysis of total cell extract is shown in FIG. 72 (lane 4; MW 66.9 kDa).

### EXAMPLE 1912

[10507] A DNA sequence (GBSx2021) was identified in S. agalactiae <SEQ ID 5927> which encodes the amino acid sequence <SEQ ID 5928>. Analysis of this protein sequence reveals the following:

```
Possible site: 51
>>> Seems to have no N-terminal signal sequence
----- Final Results -----
                            bacterial cytoplasm --- Certainty = 0.2996(Affirmative) < succ>
                              bacterial membrane --- Certainty = 0.0000(Not Clear) < succ>
                                bacterial outside --- Certainty = 0.0000(Not Clear) < succ>
```

[10508] The protein has no significant homology with any sequences in the GENPEPT database.

[10509] No corresponding DNA sequence was identified in S. pyogenes.

[10510] Based on this analysis, it was predicted that this protein and its epitopes, could be useful antigens for vaccines or diagnostics.

### EXAMPLE 1913

[10511] A DNA sequence (GBSx2022) was identified in S. agalactiae <SEQ ID 5929> which encodes the amino acid sequence <SEQ ID 5930>. Analysis of this protein sequence reveals the following:

| Possible site: 59 | | | | |
|---|---|---|---|---|
| >>> Seems to have no N-terminal signal sequence | | | | |
| | INTEGRAL | Likelihood = −11.62 | Transmembrane | 176-192 (168-198) |
| | INTEGRAL | Likelihood = −11.57 | Transmembrane | 89-105 (80-111) |
| | INTEGRAL | Likelihood = −10.03 | Transmembrane | 337-353 (332-359) |
| | INTEGRAL | Likelihood = −9.87 | Transmembrane | 292-308 (285-316) |
| | INTEGRAL | Likelihood = −4.51 | Transmembrane | 58-74 (52-78) |
| | INTEGRAL | Likelihood = −3.88 | Transmembrane | 267-283 (267-286) |
| | INTEGRAL | Likelihood = −3.08 | Transmembrane | 125-141 (125-142) |
| | INTEGRAL | Likelihood = −2.13 | Transmembrane | 212-228 (212-228) |

```
----- Final Results -----
                              bacterial membrane --- Certainty = 0.5649(Affirmative) < succ>
                                bacterial outside --- Certainty = 0.0000(Not Clear) < succ>
                            bacterial cytoplasm --- Certainty = 0.0000(Not Clear) < succ>
```

[10512] A related GBS nucleic acid sequence <SEQ ID 9377> which encodes amino acid sequence <SEQ ID 9378> was also identified.

[10513] The protein has homology with the following sequences in the GENPEPT database.

| >GP: CAB12034 GB: Z99105 similar to histidine permease [Bacillus | | | |
|---|---|---|---|
| subtilis] | | | |
| Identities = 221/384 (57%), Positives = 291/384 (75%), Gaps = 2/384 (0%) | | | |
| Query: | 2 | PVTGSFHTYATKFISPGTGFTVAWLYWICWTVALGTEFLGAAMLMQRWFPNVPAWAFASF | 61 |
| | | PVTG+FHTYA K+I PGTGFTVAWLYW+ WTVALG+EF A +LMQRWFP+ W +++ | |
| Sbjct: | 76 | PVTGAFHTYAAKYIGPGTGFTVAWLYWLTWTVALGSEFTAAGLLMQRWFPHTSVWMWSAV | 135 |
| Query: | 62 | FALVIFGLNALSVRFFAEAESFFSSIKVIAIIIFIILGLGAMFGLVSFEGQHKAILETHL | 121 |
| | | FAL IF LNA SV+FFAE+E +FSSIKV+AI++FI+LG AMFG++ +G A +++ | |
| Sbjct: | 136 | FALFIFLLNAFSVKFFAESEFWFSSIKVLAIVLFILLGGSAMFGIIPIKGGEAAPMLSNF | 195 |
| Query: | 122 | TANGA-FPNGIVAVVSVMLAVNYAFSGTELIGIAAGETDNPKEAVPRAIKTTIGRLVVFF | 180 |
| | | TA G FPNG V ++ ML+VN+AFSGTELIGIAAGE+ +P + +P+AIKTT+ RL +FF | |
| Sbjct: | 196 | TAEGGLFPNGFVPILMTMLSVNFAFSGTELIGIAAGESVDPDKTIPKAIKTTVWRLSLFF | 255 |
| Query: | 181 | VLTIVVLASLLPMKEAGVSTAPFVDVFDKMGIPFTADIMNFVILTAILSAGNSGLYASSR | 240 |
| | | V TI VL+ L+P+++AGV +PFV VFD++G+P+ ADIMNFVILTAILSA NSGLYASSR | |
| Sbjct: | 256 | VGTIFVLSGLIPIQDAGVIKSPFVAVFDRVGVPYAADIMNFVILTAILSAANSGLYASSR | 315 |
| Query: | 241 | MLWSLANEGMLSKSVVKINKHGVPMRALLLSMAGAVLSLFSSIYAADTVYLALVSIAGFA | 300 |
| | | MLWSL+ E L + K+ G P AL+ SM G +LSL SS++A DTVY+ LVSI+GFA | |
| Sbjct: | 316 | MLWSLSKEKTLHPTFAKLTSKGTPFNALVFSMIGGILSLLSSVFAPDTVYVVLVSISGFA | 375 |
| Query: | 301 | VVVVWLAIPVAQINFRKEFLKE-NQLEDLSYKTPFTPVLPYITIILLLISIVGIAWDSSQ | 359 |
| | | VVVVW+ I +Q FRK +++ N++ DL Y+TP P +P +L L S+VGIA+D +Q | |
| Sbjct: | 376 | VVVVWMGIAASQFMFRKRYIEAGNKVTDLKYRTPLYPFVPIAAFLLCLASVVGIAFDPNQ | 435 |
| Query: | 360 | RAGLYFGVPFIIFCYIYHKLRYKK | 383 |
| | | R LY GVPF+ CY + ++ +K | |
| Sbjct: | 436 | RIALYCGVPFMAICYAIYYVKNRK | 459 |

[10514] There is also homology to SEQ ID 4070.

[10515] Based on this analysis, it was predicted that this protein and its epitopes, could be useful antigens for vaccines or diagnostics.

### EXAMPLE 1914

[10516] A DNA sequence (GBSx2023) was identified in S. agalactiae <SEQ ID 5931> which encodes the amino acid sequence <SEQ ID 5932>. Analysis of this protein sequence reveals the following:

```
Possible site: 32
>>> Seems to have no N-terminal signal sequence
----- Final Results -----
                            bacterial cytoplasm --- Certainty = 0.2378(Affirmative) < succ>
                              bacterial membrane --- Certainty = 0.0000(Not Clear) < succ>
                                bacterial outside --- Certainty = 0.0000(Not Clear) < succ>
```

[10517] There is also homology to SEQ ID 5642.

[10518] Based on this analysis, it was predicted that this protein and its epitopes, could be useful antigens for vaccines or diagnostics.

### EXAMPLE 1915

[10519] A DNA sequence (GBSx2024) was identified in S. agalactiae <SEQ ID 5933> which encodes the amino acid sequence <SEQ ID 5934>. Analysis of this protein sequence reveals the following:

```
Possible site: 25
>>> Seems to have no N-terminal signal sequence
----- Final Results -----
                            bacterial cytoplasm --- Certainty = 0.4935(Affirmative) < succ>
                              bacterial membrane --- Certainty = 0.0000(Not Clear) < succ>
                                bacterial outside --- Certainty = 0.0000(Not Clear) < succ>
```

[10520] The protein has no significant homology with any sequences in the GENPEPT database.

[10521] No corresponding DNA sequence was identified in S. pyogenes.

[10522] Based on this analysis, it was predicted that this protein and its epitopes, could be useful antigens for vaccines or diagnostics.

### EXAMPLE 1916

[10523] A DNA sequence (GBSx2025) was identified in S. agalactiae <SEQ ID 5935> which encodes the amino acid sequence <SEQ ID 5936>. Analysis of this protein sequence reveals the following:

```
Possible site: 42
>>> Seems to have no N-terminal signal sequence
----- Final Results -----
                            bacterial cytoplasm --- Certainty = 0.0530(Affirmative) < succ>
                              bacterial membrane --- Certainty = 0.0000(Not Clear) < succ>
                                bacterial outside --- Certainty = 0.0000(Not Clear) < succ>
```

[10524] The protein has no significant homology with any sequences in the GENPEPT database.

[10525] No corresponding DNA sequence was identified in S. pyogenes.

[10526] Based on this analysis, it was predicted that this protein and its epitopes, could be useful antigens for vaccines or diagnostics.

### EXAMPLE 1917

[10527] A DNA sequence (GBSx2026) was identified in S. agalactiae <SEQ ID 5937> which encodes the amino acid sequence <SEQ ID 5938>. Analysis of this protein sequence reveals the following:

```
Possible site: 17
>>> Seems to have no N-terminal signal sequence
----- Final Results -----
                            bacterial cytoplasm --- Certainty = 0.0175(Affirmative) < succ>
                              bacterial membrane --- Certainty = 0.0000(Not Clear) < succ>
                                bacterial outside --- Certainty = 0.0000(Not Clear) < succ>
```

[10528] The protein has homology with the following sequences in the GENPEPT database.

| >GP: AAF63739 GB: AF236863 hypothetical GTP-binding protein | | | |
|---|---|---|---|
| [Lactococcus lactis] | | | |
| Identities = 142/193 (73%), Positives = 165/193 (84%) | | | |
| Query: | 6 | LNTHNASILLSAANKSHYPQDDLPEVALAGRSNVGKSSFINTLLGRKNLARTSSKPGKTQ | 65 |
| | | +NT+N +I +SAA+K YP++D PE+ALAGRSNEGKSSFINTLL RKN ARTS +PGKTQ | |
| Sbjct: | 3 | INTNNLTITISAASKKQYPENDWPEIALAGRSNVGKSSFINTLLNRKNFARTSGQPGKTQ | 62 |
| Query: | 66 | LLNFYNIDDKLRFVDVPGYGYAKVSKTERAKWGKMIEEYLVTRDNLRVVVSLVDFRHDPS | 125 |
| | | LLNFYNIDD+L FVDVPGYGYA+VSK ER KWGKMIEEYL TR+NL+ VVSLVD RH+PS | |
| Sbjct: | 63 | LLNFYNIDDQLHFVDVPGYGYARVSKKEREKWGKMIEEYLTTRENLKAVVSLVDIRHEPS | 122 |
| Query: | 126 | ADDIQMYEFLKYYEIPVIIVATKADKIPRGKWNKHESSIKKKLNFDKKDHFIVFSSVDRT | 185 |
| | | DD+ MYEFLKYY IPVI+VATKADK+PRGKWNKHES IKK + FD D FI+FSS D+T | |
| Sbjct: | 123 | EDDLMMYEFLKYYHIPVILVATKADKVPRGKWNKHESIIKKAMKFDSTDDFIIFSSTDKT | 182 |
| Query: | 186 | GLDESWDTILSEL | 198 |
| | | G++E+W IL L | |
| Sbjct: | 183 | GIEEAWTAILKYL | 195 |

[10529] A related DNA sequence was identified in S. pyogenes <SEQ ID 5939> which encodes the amino acid sequence <SEQ ID 5940>. Analysis of this protein sequence reveals the following:

```
Possible site: 18
>>> Seems to have no N-terminal signal sequence
----- Final Results -----
                            bacterial cytoplasm --- Certainty = 0.0123(Affirmative) < succ>
                              bacterial membrane --- Certainty = 0.0000(Not Clear) < succ>
                                bacterial outside --- Certainty = 0.0000(Not Clear) < succ>
```

[10530] An alignment of the GAS and GBS proteins is shown below.

| Identities = 167/196 (85%), Positives = 183/196 (93%) | | | |
|---|---|---|---|
| Query: | 3 | EEFLNTHNASILLSAANKSHYPQDDLPEVALAGRSNVGKSSFINTLLGRKNLARTSSKPG | 62 |
| | | E+ LNTHNASILLSAANKSHYPQDDLPE+ALAGRSNVGKSSFINT+LGRKNLARTSSKPG | |
| Sbjct: | 4 | EQVLNTHNASILLSAANKSHYPQDDLPEIALAGRSNVGKSSFINTILGRKNLARTSSKPG | 63 |
| Query: | 63 | KTQLLNFYNIDDKLRFVDVPGYGYAKVSKTERAKWGKMIEEYLVTRDNLRVVVSLVDFRH | 122 |
| | | KTQLLNF+NIDDKLRFVDVPGYGYAKVSK+ERAKWGKMIEEYL +RDNLR VVSLVD RH | |
| Sbjct: | 64 | KTQLLNFFNIDDKLRFVDVPGYGYAKVSKSERAKWGKMIEEYLTSRDNLRAVVSLVDLRH | 123 |
| Query: | 123 | DPSADDIQMYEFLKYYEIPVIIVATKADKIPRGKWNKHESSIKKKLNFDKKDHFIVFSSV | 182 |
| | | PS +DIQMY+FLKYY+IPVI+VATKADKIPRGKWNKHES +KK LNFDR D FIVFSSV | |
| Sbjct: | 124 | APSKEDIQMYDFLKYYDIPVIVVATKADKIPRGKWNKHESVVKKALNFDKSDTFIVFSSV | 183 |
| Query: | 183 | DRTGLDESWDTILSEL | 198 |
| | | +R G+D+SWD IL ++ | |
| Sbjct: | 184 | ERIGIDDSWDAILEQV | 199 |

[10531] Based on this analysis, it was predicted that these proteins and their epitopes could be useful antigens for vaccines or diagnostics.

### EXAMPLE 1918

[10532] A DNA sequence (GBSx2027) was identified in S. agalactiae <SEQ ID 5941> which encodes the amino acid sequence <SEQ ID 5942>. This protein is predicted to be protease ClpX (clpX). Analysis of this protein sequence reveals the following:

```
Possible site: 50
>>> Seems to have no N-terminal signal sequence
----- Final Results -----
                            bacterial cytoplasm --- Certainty = 0.2389(Affirmative) < succ>
                              bacterial membrane --- Certainty = 0.0000(Not Clear) < succ>
                                bacterial outside --- Certainty = 0.0000(Not Clear) < succ>
```

[10533] A related GBS nucleic acid sequence <SEQ ID 9947> which encodes amino acid sequence <SEQ ID 9948> was also identified.

[10534] The protein has homology with the following sequences in the GENPEPT database.

| >GP: AAF63738 GB: AF236863 protease ClpX [Lactococcus lactis] | | | |
|---|---|---|---|
| Identities = 305/395 (77%), Positives = 357/395 (90%), Gaps = 1/395 (0%) | | | |
| Query: | 18 | NVYCSFCGKSQDEVKKIIAGNGVFICNECVALSQEIIKEELAEEVLADLAEVPKPKELLE | 77 |
| | | N+ CSFCGKSQD+VKK+IAG+ V+ICNEC+ LS I++EEL EE +++ EV PKE+ + | |
| Sbjct: | 8 | NIQCSFCGKSQDDVKKMIAGSDVYICNECIELSTRILEEELKEEQDSEMLEVKTPKEMFD | 67 |
| Query: | 78 | ILNQYVVGQDRAKRALAVAVYNHYKRVSYTESS-DDDVDLQKSNILMIGPTGSGKTFLAQ | 136 |
| | | LN+YV+GQ++AKRALAVAVYNHYKR+++T S +D++LQKSNIL+IGPTGSGKTFLAQ | |
| Sbjct: | 68 | HLNEYVIGQEKAKRALAVAVYNHYKRINFTASKIAEDIELQKSNILLIGPTGSGKTFLAQ | 127 |
| Query: | 137 | TLAKSLNVPFAIADATSLTEAGYVGEDVENILLKLIQAADYNVERAERGIIYVDEIDKIA | 196 |
| | | TLAKSLNVPFAIADATSLTEAGYVGEDVENILLKL+QA+D+N+ERAERGIIY+DEIDKIA | |
| Sbjct: | 128 | TLAKSLNVPFAIADATSLTEAGYVGEDVENILLKLLQASDFNIERAERGIIYIDEIDKIA | 187 |
| Query: | 197 | KKGENVSITRDVSGEGVQQALLKIIEGTVASVPPQGGRKHPNQEMIQINTKNILFIVGGA | 256 |
| | | KK+ENVSITRDVSGEGVQQALLKIIEGTVASVPPQGGRKHPNQEMIQI+TKNILFIVGGA | |
| Sbjct: | 188 | KKSENVSITRDVSGEGVQQALLKIIEGTVASVPPQGGRKHPNQEMIQIDTKNILFIVGGA | 247 |
| Query: | 257 | FDGIEDLVKQRLGEKVIGFGQTSRKIDDNASYMQEIISEDIQKFGLIPEFIGRLPVVAAL | 316 |
| | | FDGIE++VKQRLGEK+IGFG ++K+ D SYMQEII+EDIQKFGLIPEFIGRLP+VAAL | |
| Sbjct: | 248 | FDGIEEIVKQRLGEKIIGFGANNKKLSDEDSYMQEIIAEDIQKFGLIPEFIGRLPIVAAL | 307 |
| Query: | 317 | ELLTAEDLVRILTEPRNALVKQYQTLLSYDGVELEFDQDALLAIADKAIERKTGARGLRS | 376 |
| | | E LT EDL++ILTEP+NAL+KQY+ LL +D VELEF AL+AIA KAIERKTGARGLRS | |
| Sbjct: | 308 | ERLTEEDLIQILTEPKNALIKQYKQLLLFDNVELEFKDGALMAIAKKAIERKTGARGLRS | 367 |
| Query: | 377 | IIEETMLDIMFEIPSQEDVTKVRITKAAVEGTDKP | 411 |
| | | IIEE M+DIMFE+PS E++TKV IT+A V+G +P | |
| Sbjct: | 368 | IIEEVMMDIMFEVPSHEEITKVIITEAVVDGKAEP | 402 |

[10535] A related DNA sequence was identified in S. pyogenes <SEQ ID 5943> which encodes the amino acid sequence <SEQ ID 5944>. Analysis of this protein sequence reveals the following:

```
Possible site: 42
>>> Seems to have no N-terminal signal sequence
----- Final Results -----
                            bacterial cytoplasm --- Certainty = 0.2711(Affirmative) < succ>
                              bacterial membrane --- Certainty = 0.0000(Not Clear) < succ>
                                bacterial outside --- Certainty = 0.0000(Not Clear) < succ>
```

[10536] An alignment of the GAS and GBS proteins is shown below.

| Identities = 378/409 (92%), Positives = 393/409 (95%), Gaps = 1/409 (0%) | | | |
|---|---|---|---|
| Query: | 9 | MAGNRNNDMNVYCSFCGKSQDEVKKIIAGNGVFICNECVALSQEIIKEELAEEVLADLAE | 68 |
| | | MAG+R ND+ VYCSFCGKSQD+VKKIIAGN VFICNECVALSQEIIKEELAEEVLADL E | |
| Sbjct: | 1 | MAGSRTNDIKVYCSFCGKSQDDVKKIIAGNNVFICNECVALSQEIIKEELAEEVLADLTE | 60 |
| Query: | 69 | VPKPKELLEILNQYVVGQDRAKRALAVAVYNHYKRVSYTES-SDDDVDLQKSNILMIGPT | 127 |
| | | VPKPKELL++LNQYVVGQDRAKRAL+VAVYNHYKRVS+TES DDDVDLQKSNILMIGPT | |
| Sbjct: | 61 | VPKPKELLDVLNQYVVGQDRAKRALSVAVYNHYKRVSFTESRDDDDVDLQKSNILMIGPT | 120 |
| Query: | 128 | GSGKTFLAQTLAKSLNVPFAIADATSLTEAGYVGEDVENILLKLIQAADYNVERAERGII | 187 |
| | | GSGKTFLAQTLAKSLNVPFAIADATSLTEAGYVGEDVENILLKLIQAADYNVERAERGII | |
| Sbjct: | 121 | GSGKTFLAQTLAKSLNVPFAIADATSLTEAGYVGEDVENILLKLIQAADYNVERAERGII | 180 |
| Query: | 188 | YVDEIDKIAKKGENVSITRDVSGEGVQQALLKIIEGTVASVPPQGGRKHPNQEMIQINTK | 247 |
| | | YVDEIDKIAKKGENVSITRDVSGEGVQQALLKIIEGTVASVPPQGGRKHPNQEMIQI+TK | |
| Sbjct: | 181 | YVDEIDKIAKKGENVSITRDVSGEGVQQALLKIIEGTVASVPPQGGRKHPNQEMIQIDTK | 240 |
| Query: | 248 | NILFIVGGAFDGIEDLVKQRLGEKVIGFGQTSRKIDDNASYMQEIISEDIQKFGLIPEFI | 307 |
| | | NILFIVGGAFDGIE++VKQRLGEKVIGFGQ SRKIDDNASYMQEIISEDIQKFGLIPEFI | |
| Sbjct: | 241 | NILFIVGGAFDGIEEIVKQRLGEKVIGFGQNSRKIDDNASYMQEIISEDIQKFGLIPEFI | 300 |
| Query: | 308 | GRLPVVAALELLTAEDLVRILTEPRNALVKQYQTLLSYDGVELEFDQDALLAIADKAIER | 367 |
| | | GRLPVVAALE L DL++ILTEPRNALVKQYQ LLSYDGVEL FD++AL AIA+KAIER | |
| Sbjct: | 301 | GRLPVVAALEQLNTSDLIQILTEPRNALVKQYQALLSYDGVELAFDKEALEAIANKAIER | 360 |
| Query: | 368 | KTGARGLRSIIEETMLDIMFEIPSQEDVTKVRITKAAVEGTDKPVLETA | 416 |
| | | KTGARGLRSIIEETMLDIMFEIPSQEDVTKVRITKAAVEG KPVLETA | |
| Sbjct: | 361 | KTGARGLRSIIEETMLDIMFEIPSQEDVTKVRITKAAVEGKSKPVLETA | 409 |

[10537] Based on this analysis, it was predicted that these proteins and their epitopes could be useful antigens for vaccines or diagnostics.

### EXAMPLE 1919

[10538] A DNA sequence (GBSx2028) was identified in S. agalactiae <SEQ ID 5945> which encodes the amino acid sequence <SEQ ID 5946>. Analysis of this protein sequence reveals the following:

```
Possible site: 26
>>> Seems to have an uncleavable N-term signal seq
----- Final Results -----
                              bacterial membrane --- Certainty = 0.0000(Not Clear) < succ>
                                bacterial outside --- Certainty = 0.0000(Not Clear) < succ>
                            bacterial cytoplasm --- Certainty = 0.0000(Not Clear) < succ>
```

[10539] The protein has no significant homology with any sequences in the GENPEPT database.

[10540] No corresponding DNA sequence was identified in S. pyogenes.

[10541] Based on this analysis, it was predicted that this protein and its epitopes, could be useful antigens for vaccines or diagnostics.

### EXAMPLE 1920

[10542] A DNA sequence (GBSx2029) was identified in S. agalactiae <SEQ ID 5947> which encodes the amino acid sequence <SEQ ID 5948>. Analysis of this protein sequence reveals the following:

```
Possible site: 36
>>> Seems to have no N-terminal signal sequence
----- Final Results -----
                            bacterial cytoplasm --- Certainty = 0.4029(Affirmative) < succ>
                              bacterial membrane --- Certainty = 0.0000(Not Clear) < succ>
                                bacterial outside --- Certainty = 0.0000(Not Clear) < succ>
```

[10543] A related GBS nucleic acid sequence <SEQ ID 9949> which encodes amino acid sequence <SEQ ID 9950> was also identified.

[10544] The protein has homology with the following sequences in the GENPEPT database.

| >GP: AAC33872 GB: AF055727 dihydrofolate | | | |
|---|---|---|---|
| reductase [Streptococcus pneumoniae] | | | |
| Identities = 83/162 (51%), Positives = 118/162 (72%), | | | |
| Gaps = 1/162 (0%) | | | |
| Query: | 25 | MTKQIIAIWAEDEDHLIGVNGGLPWRLPKELHHFKETTMGQALLMGRKTFDGMNRRVLPG | 84 |
| | | MTK+I+AIWA+DE+ LIG LPW LP EL HFKETT+ A+LMGR TFDGM RR+LP | |
| Sbjct: | 1 | MTKKIVAIWAQDEEGLIGKENRLPWHLPAELQHFKETTLNHAILMGRVTFDGMGRRLLPK | 60 |
| Query: | 85 | RETIILTKDEQFQADGVTVLNSVEQVIKWFQEHNKTLFIVGGASIYKAFLPYCEAIIKTK | 144 |
| | | RET+ILT++ + + DGV V+ V+ W+Q+ K L+I+GG I++AF PY + +I T | |
| Sbjct: | 61 | RETLILTRNPEEKIDGVATFQDVQSVLDWYQDQEKNLYIIGGKQIFQAFEPYLDEVIVTH | 120 |
| Query: | 145 | VHGKFKGDTYFP-DVNLSEFKVISRDYFEKDEQNAHAFTVTY | 185 |
| | | +H + +GDTYFP +++LS F+ +S ++ KDE+N + FT+ Y | |
| Sbjct: | 121 | IHARVEGDTYFPEELDLSLFETVSSKFYAKDEKNPYDFTIQY | 162 |

[10545] A related DNA sequence was identified in S. pyogenes <SEQ ID 5949> which encodes the amino acid sequence <SEQ ID 5950>. Analysis of this protein sequence reveals the following:

```
Possible site: 51
>>> Seems to have no N-terminal signal sequence
----- Final Results -----
                            bacterial cytoplasm --- Certainty = 0.1214(Affirmative) < succ>
                              bacterial membrane --- Certainty = 0.0000(Not Clear) < succ>
                                bacterial outside --- Certainty = 0.0000(Not Clear) < succ>
```

[10546] An alignment of the GAS and GBS proteins is shown below.

| Identities = 82/160 (51%), Positives = 119/160 (74%) | | | |
|---|---|---|---|
| Query: | 25 | MTKQIIAIWAEDEDHLIGVNGGLPWRLPKELHHFKETTMGQALLMGRKTFDGMNRRVLPG | 84 |
| | | MTK+IIAIWAEDE LIG+ G LPW LPKEL HFK+TT+ QA+LMGR TF+GMN + LP | |
| Sbjct: | 1 | MTKEIIAIWAEDEAGLIGIAGKLPWYLPKELEHFKKTTLHQAILMGRVTFEGMNCKRLPQ | 60 |
| Query: | 85 | RETIILTKDEQFQADGVTVLNSVEQVIKWFQEHNKTLFIVGGASIYKAFLPYCEAIIKTK | 144 |
| | | R+T+++T++ +Q D V + S+E+V++W+ +KTL+I+GG + +AF Y + IIKT | |
| Sbjct: | 61 | RQTLVMTRNRDYQVDEVLTMTSIEKVLEWYHAQDKTLYIIGGNKVLEAFNGYFDRIIKTV | 120 |
| Query: | 145 | VHGKFKGDTYFPDVNLSEFKVISRDYFEKDEQNAHAFTVT | 184 |
| | | +H +FKGDTY P+++ S F S+ ++ +D +N + FTVT | |
| Sbjct: | 121 | IHHRFKGDTYRPNLDFSHFTQESQTFYARDAKNPYDFTVT | 160 |

[10547] Based on this analysis, it was predicted that these proteins and their epitopes could be useful antigens for vaccines or diagnostics.

### EXAMPLE 1921

[10548] A DNA sequence (GBSx2030) was identified in S. agalactiae <SEQ ID 5951> which encodes the amino acid sequence <SEQ ID 5952>. Analysis of this protein sequence reveals the following:

```
Possible site: 45
>>> Seems to have no N-terminal signal sequence
----- Final Results -----
                            bacterial cytoplasm --- Certainty = 0.1577(Affirmative) < succ>
                              bacterial membrane --- Certainty = 0.0000(Not Clear) < succ>
                                bacterial outside --- Certainty = 0.0000(Not Clear) < succ>
```

[10549] The protein has homology with the following sequences in the GENPEPT database.

| >GP: AAA25221 GB: M33770 thymidylate synthase (EC 2.1.1.45) | | | |
|---|---|---|---|
| [Lactococcus lactis] | | | |
| Identities = 215/280 (76%), Positives = 245/280 (86%), Gaps = 2/280 (0%) | | | |
| Query: | 1 | MTKADLLFKDNITKIMSEGVFSEQARPRYKNGEMANSKYITGAFAEYDLSKGEFPITTLR | 60 |
| | | MT AD +FK NI I+ GVFSE ARP+YK+G+MANSKY+TG+F YDL KGEFPITTLR | |
| Sbjct: | 1 | MTYADQVFKQNIQNILDNGVFSENARPKYKDGQMANSKYVTGSFVTYDLQKGEFPITTLR | 60 |
| Query: | 61 | PIPIKSAIKEIFWIYQDQTNDLAVLNDKYGVTYWNDWEVGHTGTIGQRYGAVVKKHNIIS | 120 |
| | | PIPIKSAIKE+ WIYQDQT++L+VL +KYGV YW +W +G GTIGQRYGA VKK+NII | |
| Sbjct: | 61 | PIPIKSAIKELMWIYQDQTSELSVLEEKYGVKYWGEWGIGD-GTIGQRYGATVKKYNIIG | 119 |
| Query: | 121 | KLLKQLEDNPWNRRNVISLWDYEAFEETEGLLPCAFQTMFDVRRV-NGELYLDATLTQRS | 179 |
| | | KLL+ L NPWNRRN+I+LW YE FEETEGLLPCAFQTMFDVRR +G++YLDATL QRS | |
| Sbjct: | 120 | KLLEGLAKNPWNRRNIINLWQYEDFEETEGLLPCAFQTMFDVRREKDGQIYLDATLIQRS | 179 |
| Query: | 180 | NDMLVAHHINAMQYVALQMMIAKHFGWRVGKFFYFINNLHIYDNQFEQAQELLKRQPSEC | 239 |
| | | NDMLVAHHINAMQYVALQMMIAKHF W+VGKFFYF+NNLHIYDNQFEQA EL+KR SE | |
| Sbjct: | 180 | NDMLVAHHINAMQYVALQMMIAKHFSWKVGKFFYFVNNLHIYDNQFEQANELMKRTASEK | 239 |
| Query: | 240 | NPKLVLNVPDGTDFFDIKPDDFALVDYDPIKPQLRFDLAI | 279 |
| | | P+LVLNVPDGT+FFDIKP+DF LVDY+P+KPQL+FDLAI | |
| Sbjct: | 240 | EPRLVLNVPDGTNFFDIKPEDFELVDYEPVKPQLKFDLAI | 279 |

[10550] A related DNA sequence was identified in S. pyogenes <SEQ ID 5953> which encodes the amino acid sequence <SEQ ID 5954>. Analysis of this protein sequence reveals the following:

```
Possible site: 53
>>> Seems to have no N-terminal signal sequence
----- Final Results -----
                            bacterial cytoplasm --- Certainty = 0.3131(Aftirmative) < succ>
                              bacterial membrane --- Certainty = 0.0000(Not Clear) < succ>
                                bacterial outside --- Certainty = 0.0000(Not Clear) < succ>
```

[10551] An alignment of the GAS and GBS proteins is shown below.

| Identities = 227/279 (81%), Positives = 251/279 (89%) | | | |
|---|---|---|---|
| Query: | 1 | MTKADLLFKDNITKIMSEGVFSEQARPRYKNGEMANSKYITGAFAEYDLSKGEFPITTLR | 60 |
| | | MTKAD +FK NI KI++EG SEQARP+YK+G A+SKYITGAFAEYDL+KGEFPITTLR | |
| Sbjct: | 9 | MTKADQIFKANIQKIINEGSLSEQARPKYKDGRTAHSKYITGAFAEYDLAKGEFPITTLR | 68 |
| Query: | 61 | PIPIKSAIKEIFWIYQDQTNDLAVLNDKYGVTYWNDWEVGHTGTIGQRYGAVVKKHNIIS | 120 |
| | | PIPIKSAIKE+FWIYQDQ+N L VL KY V YWN+WEV T TIGQRYGAVVKKH+IIS | |
| Sbjct: | 69 | PIPIKSAIKELFWIYQDQSNSLDVLEAKYNVHYWNEWEVDQTRTIGQRYGAVVKKHDIIS | 128 |
| Query: | 121 | KLLKQLEDNPWNRRNVISLWDYEAFEETEGLLPCAFQTMFDVRRVNGELYLDATLTQRSN | 180 |
| | | K+LKQL +NPWNRRNVISLWDYEAFEET+GLLPCAFQ MFDVRRV +LYLDA+LTQRSN | |
| Sbjct: | 129 | KILKQLAENPWNRRNVISLWDYEAFEETKGLLPCAFQIMFDVRRVGEDLYLDASLTQRSN | 188 |
| Query: | 181 | DMLVAHHINAMQYVALQMMIAKHFGWRVGKFFYFINNLHIYDNQFEQAQELLKRQPSECN | 240 |
| | | D+LVAHHINAMQYVALQMMIAKHFGW++GKFFYF+NNLHIYDNQF+QAQELLKRQP | |
| Sbjct: | 189 | DILVAHHINAMQYVALQMMIAKHFGWKIGKFFYFVNNLHIYDNQFDQAQELLKRQPVASQ | 248 |
| Query: | 241 | PKLVLNVPDGTDFFDIKPDDFALVDYDPIKPQLRFDLAI | 279 |
| | | PKLVLNVPD T+FFDIKPDDF L +YDP+KPQL FDLAI | |
| Sbjct: | 249 | PKLVLNVPDRTNFFDIKPDDFELQNYDPVKPQLHFDLAI | 287 |

[10552] Based on this analysis, it was predicted that these proteins and their epitopes could be useful antigens for vaccines or diagnostics.

### EXAMPLE 1922

[10553] A DNA sequence (GBSx2031) was identified in S. agalactiae <SEQ ID 5955> which encodes the amino acid sequence <SEQ ID 5956>. This protein is predicted to be HMG-CoA synthase. Analysis of this protein sequence reveals the following:

```
Possible site: 60
>>> Seems to have no N-terminal signal sequence
----- Final Results -----
                            bacterial cytoplasm --- Certainty = 0.0816(Affirmative) < succ>
                              bacterial membrane --- Certainty = 0.0000(Not Clear) < succ>
                                bacterial outside --- Certainty = 0.0000(Not Clear) < succ>
```

[10554] A related DNA sequence was identified in S. pyogenes <SEQ ID 5957> which encodes the amino acid sequence <SEQ ID 5958>. Analysis of this protein sequence reveals the following:

```
Possible site: 58
>>> Seems to have no N-terminal signal sequence
----- Final Results -----
                            bacterial cytoplasm --- Certainty = 0.1670(Affirmative) < succ>
                              bacterial membrane --- Certainty = 0.0000(Not Clear) < succ>
                                bacterial outside --- Certainty = 0.0000(Not Clear) < succ>
```

[10555] An alignment of the GAS and GBS proteins is shown below.

| Identities = 260/385 (67%), Positives = 325/385 (83%) | | | |
|---|---|---|---|
| Query: | 36 | MKIGIDKIGFATSQYVLEMTDLAIARQVDPEKFSKGLLLDSLSITPVTEDIVTLAASAAN | 95 |
| | | M IGIDKIGFATSQYVL++ DLA+ARQVDP KFS+GLL++S S+ P+TEDI+TLAASAA+ | |
| Sbjct: | 14 | MTIGIDKIGFATSQYVLKLEDLALARQVDPAKFSQGLLIESFSVAPITEDIITLAASAAD | 73 |
| Query: | 96 | DILSDEDKETIDMVIVATESSIDQSKAASVYVHQLLEIQPFARSFEMKEACYSATAALDY | 155 |
| | | IL+DED+ IDMVI+ATESS DQSKA+++YVH L+ IQPFARSFE+K+ACYSATAALDY | |
| Sbjct: | 74 | QILTDEDRAKIDMVILATESSTDQSKASAIYVHHLVGIQPFARSFEVKQACYSATAALDY | 133 |
| Query: | 156 | AKLHVEKHPDSKVLVIASDIAKYGIKSTGESTQGAGSIAMLISQNPSILELKEDHLAQTR | 215 |
| | | AKLHV PDS+VLVIASDIA+YG+ S GESTQG+GSIA+L++ NP IL L ED++AQTR | |
| Sbjct: | 134 | AKLHVASKPDSRVLVIASDIARYGVGSPGESTQGSGSIALLVTANPRILALNEDNVAQTR | 193 |
| Query: | 216 | DIMDFWRPNYSDVPYVNGMFSTKQYLDMLKTTWKVYQKRFNTSLSDYAAFCFHIPFPKLA | 275 |
| | | DIMDFWRPNYS PYV+G++STKQYL+ L+TTW+ YQKR N LSD AA CFHIPFPKLA | |
| Sbjct: | 194 | DIMDFWRPNYSFTPYVDGIYSTKQYLNCLETTWQAYQKRENLQLSDLAAVCFHIPFPKLA | 253 |
| Query: | 276 | LKGFNKILDNNLDEQKKAELQENFEHSITYSKKIGNCYTGSLYLGLLSLLENSQNLKAGD | 335 |
| | | LKG N I+DN + + + +L E F+ SI+YSK+IGN YTGSLYLGLLSLLENS+ L++GD | |
| Sbjct: | 254 | LKGLNNIMDNTVPPEHREKLIEAFQASISYSKQIGNIYTGSLYLGLLSLLENSKVLQSGD | 313 |
| Query: | 336 | QIAFFSYGSGAVAEIFTGQLVDGYQNKLQSDRMDQLNKRQKITVTEYEKLFFEKTILDEN | 395 |
| | | +I FFSYGSGAV+E ++GQLV GY L ++R L++R +++V++YE LF+E+ LD+N | |
| Sbjct: | 314 | KIGFFSYGSGAVSEFYSGQLVAGYDKMLNTNRQALLDQRTRLSVSKYEDLFYEQVQLDDN | 373 |
| Query: | 396 | GNANFNTYRTGTFSLDSICEHQRIY | 420 |
| | | GNANF+ Y TG F+L +I EH+RIY | |
| Sbjct: | 374 | GNANFDIYLTGKFALTAIKEHRRIY | 398 |

[10556] Based on this analysis, it was predicted that these proteins and their epitopes could be useful antigens for vaccines or diagnostics.

### EXAMPLE 1923

[10557] A DNA sequence (GBSx2032) was identified in S. agalactiae <SEQ ID 5959> which encodes the amino acid sequence <SEQ ID 5960>. This protein is predicted to be HMG-CoA reductase (mvaA). Analysis of this protein sequence reveals the following:

| Possible site: 50 | | | | |
|---|---|---|---|---|
| >>> Seems to have no N-terminal signal sequence | | | | |
| | INTEGRAL | Likelihood = −1.49 | Transmembrane | 348-364 (348-364) |
| | INTEGRAL | Likelihood = −1.33 | Transmembrane | 53-69 (53-69) |

```
----- Final Results -----
                              bacterial membrane --- Certainty = 0.1595(Affirmative) < succ>
                                bacterial outside --- Certainty = 0.0000(Not Clear) < succ>
                            bacterial cytoplasm --- Certainty = 0.0000(Not Clear) < succ>
```

[10558] The protein has homology with the following sequences in the GENPEPT database.

| >GP: AAG02454 GB: AF290098 HMG-CoA reductase [Streptococcus pneumoniae] | | | |
|---|---|---|---|
| Identities = 266/421 (63%), Positives = 343/421 (81%), Gaps = 3/421 (0%) | | | |
| Query: | 3 | KISWTGFSKKSPEERIHYLEEQDFLADSSLEIVTNQDLLSLSLANQMAENVIGRIALPFS | 62 |
| | | KISW GFSKKS +ER+ L+ Q L+ + + +S+++A+Q++ENV+G +LP+S | |
| Sbjct: | 2 | KISWNGFSKKSYQERLELLKAQALLSPERQASLEKDEQMSVTVADQLSENVVGTFSLPYS | 61 |
| Query: | 63 | LVPDVLVNGKVYQVPYVTEEPSVVAAASFAAKIIKRSGGFLTTVHNRKMIGQVALYDVQD | 122 |
| | | LVP+VLVNG+ Y VPYVTEEPSVVAAAS+A+KIIKR+GGF VH R+MIGQVALY V + | |
| Sbjct: | 62 | LVPEVLVNGQGYTVPYVTEEPSVVAAASYASKIIKRAGGFTAQVHQRQMIGQVALYQVAN | 121 |
| Query: | 123 | SQHTKESILNQKQQLLEIANAAHPSIVKRGGGACDLTIEI---KEDFLIVYLMVDTKEAM | 179 |
| | | + +E I ++K +LLE+AN A+PSIVKRGGGA DL +E + DFL+VY+ VDT+EAM | |
| Sbjct: | 122 | PKLAQEKIASKKAELLELANQAYPSIVKRGGGARDLHVEQIKGEPDFLVVYIHVDTQEAM | 181 |
| Query: | 180 | GANMVNTMMEALSSPLEDISKGKSLMSILSNYATESLVTATCRVDLRFLSRQKEEAIKLA | 239 |
| | | GANM+NTM+EAL LE++S+G+SLM ILSNYAT+SLVTA+CR+ R+LSRQK++ ++A | |
| Sbjct: | 182 | GANMLNTMLEALKPVLEELSQGQSLMGILSNYATDSLVTASCRIAFRYLSRQKDQGREIA | 241 |
| Query: | 240 | QKMTMASQLAQVDPYRASTHNKGIFNGIDAIVLATGNDWRAIEAGAHTYAVKDGQYRGLS | 299 |
| | | +K+ +ASQ AQ DPYRA+THNKGIFNGIDAI++ATGNDWRAIEAGAH +A +DG+Y+GLS | |
| Sbjct: | 242 | EKIALASQFAQADPYRAATHNKGIFNGIDAILIATGNDWRAIEAGAHAFASRDGRYQGLS | 301 |
| Query: | 300 | RWSYKVDDNCLEGTLTLPMPVATKGGSIGINPSVHLAHDLLGRPNAKELASIILSIGLAQ | 359 |
| | | W+ ++ L G +TLPMPVATKGGSIG+NP V L+HDLLG P+A+ELA II+SIGLAQ | |
| Sbjct: | 302 | CWTLDLEREELVGEMTLPMPVATKGGSIGLNPRVALSHDLLGNPSARELAQIIVSIGLAQ | 361 |
| Query: | 360 | NFAALKALVSTGIQAGHMKLQAKSLALLAGAKEEQISEVVKQLLDSKHMNLETAQKIVNKL | 420 |
| | | NFAALKALVSTGIQ GHMKLQAKSLALLAGA E +++ +V++L+ K NLETAQ+ + L | |
| Sbjct: | 362 | NFAALKALVSTGIQQGHMKLQAKSLALLAGASESEVAPLVERLISDKTFNLETAQRYLENL | 422 |

[10559] A related DNA sequence was identified in S. pyogenes <SEQ ID 5961> which encodes the amino acid sequence <SEQ ID 5962>. Analysis of this protein sequence reveals the following:

```
Possible site: 31
>>> Seems to have no N-terminal signal sequence
----- Final Results -----
                            bacterial cytoplasm --- Certainty = 0.3929(Affirmative) < succ>
                              bacterial membrane --- Certainty = 0.0000(Not Clear) < succ>
                                bacterial outside --- Certainty = 0.0000(Not Clear) < succ>
```

[10560] An alignment of the GAS and GBS proteins is shown below.

| Identities = 257/422 (60%), Positives = 330/422 (77%) | | | |
|---|---|---|---|
| Query: | 2 | TKISWTGFSKKSPEERIHYLEEQDFLADSSLEIVTNQDLLSLSLANQMAENVIGRIALPF | 61 |
| | | T ++W+GFSKK+ EER+ +E+ L +L + LL + ANQM ENV+GR+ALPF | |
| Sbjct: | 4 | TNLNWSGFSKKTFEERLQLIEKFKLLNAENLNQLKTDVLLPIQTANQMTENVLGRLALPF | 63 |
| Query: | 62 | SLVPDVLVNGKVYQVPYVTEEPSVVAAASFAAKIIKRSGGFLTTVHNRKMIGQVALYDVQ | 121 |
| | | S+ PD LVNG YQ+P+VTEEPSVVAAASFAAK+IKRSGGF NR+MIGQ+ LYD+ | |
| Sbjct: | 64 | SIAPDFLVNGSTYQMPFVTEEPSVVAAASFAAKLIKRSGGFKAQTLNRQMIGQIVLYDID | 123 |
| Query: | 122 | DSQHTKESILNQKQQLLEIANAAHPSIVKRGGGACDLTIEIKEDFLIVYLMVDTKEAMGA | 181 |
| | | + K +IL++ ++L+ +AN A+PSIVKRGGGA + +E K +FLI YL VDT+EAMGA | |
| Sbjct: | 124 | QIDNAKAAILHKTKKLIALANKAYPSIVKRGGGARTIHLEEKGEFLIFYLTVDTQEAMGA | 183 |
| Query: | 182 | NMVNTMMEALSSPLEDISKGKSLMSILSNYATESLVTATCRVDLRFLSRQKEEAIKLAQK | 241 |
| | | NMVNTMMEAL L +SKG LM+ILSNYATESLVT +C + +R L K ++++LAQK | |
| Sbjct: | 184 | NMVNTMMEALVPDLTRLSKGHCLMAILSNYATESLVTTSCEIPVRLLDHDKTKSLQLAQK | 243 |
| Query: | 242 | MTMASQLAQVDPYRASTHNKGIFNGIDAIVLATGNDWRAIEAGAHTYAVKDGQYRGLSRW | 301 |
| | | + +AS+LAQVDPYRA+THNKGIFNGIDA+V+ATGNDWRAIEAGAH YA ++G Y+GLS+W | |
| Sbjct: | 244 | IELASRLAQVDPYRATTHNKGIFNGIDAVVIATGNDWRAIEAGAHAYASRNGSYQGLSQW | 303 |
| Query: | 302 | SYKVDDNCLEGTLTLPMPVATKGGSIGINPSVHLAHDLLGRPNAKELASIILSIGLAQNF | 361 |
| | | + D L G +TLPMP+A+KGGSIG+NP+V +AHDLL +P+AK LA +I S+GLAQNF | |
| Sbjct: | 304 | HFDQDKQVLLGQMTLPMPIASKGGSIGLNPTVSIAHDLLNQPDAKTLAQLIASVGLAQNF | 363 |
| Query: | 362 | AALKALVSTGIQAGHMKLQAKSLALLAGAKEEQISEVVKQLLDSKHMNLETAQKIVNKLT | 421 |
| | | AALKAL S+GIQAGHMKL AKSLALLAGA +++I+ +V LL K +NLE A +++L | |
| Sbjct: | 364 | AALKALTSSGIQAGHMKLHAKSLALLAGATQDEIAPLVNALLADKPINLEKAHFYLSQLR | 423 |
| Query: | 422 | KS | 423 |
| | | +S | |
| Sbjct: | 424 | QS | 425 |

[10561] Based on this analysis, it was predicted that these proteins and their epitopes could be useful antigens for vaccines or diagnostics.

### EXAMPLE 1924

[10562] A DNA sequence (GBSx2033) was identified in S. agalactiae <SEQ ID 5963> which encodes the amino acid sequence <SEQ ID 5964>. Analysis of this protein sequence reveals the following:

```
Possible site: 52
>>> Seems to have no N-terminal signal sequence
----- Final Results -----
                            bacterial cytoplasm --- Certainty = 0.2355(Affirmative) < succ>
                              bacterial membrane --- Certainty = 0.0000(Not Clear) < succ>
                                bacterial outside --- Certainty = 0.0000(Not Clear) < succ>
```

[10563] The protein has no significant homology with any sequences in the GENPEPT database.

[10564] A related DNA sequence was identified in S. pyogenes <SEQ ID 5965> which encodes the amino acid sequence <SEQ ID 5966>. Analysis of this protein sequence reveals the following:

```
Possible site: 53
>>> Seems to have no N-terminal signal sequence
----- Final Results -----
                            bacterial cytoplasm --- Certainty = 0.2687(Affirmative) < succ>
                              bacterial membrane --- Certainty = 0.0000(Not Clear) < succ>
                                bacterial outside --- Certainty = 0.0000(Not Clear) < succ>
```

[10565] An alignment of the GAS and GBS proteins is shown below.

| Identities = 76/138 (55%), Positives = 100/138 (72%), Gaps = 2/138 (1%) | | | |
|---|---|---|---|
| Query: | 7 | PKWEELPELDLYLDQVLLYVNQLINPKTITNDKLLTASMINNYVKHNYISKPIKKKYNRR | 66 |
| | | P W++LP+LDLYLDQVLLYVNQ + ++++K LTASMINNYVKH Y++KPIKKKY ++ | |
| Sbjct: | 7 | PYWKDLPDLDLYLDQVLLYVNQCTDFSEVSDNKSLTASMINNYVKHGYVTKPIKKKYQKQ | 66 |
| Query: | 67 | QVARLIVITAFKQVFAIQEISQTLELLTADNHSEEAYNGFAACMNKEE--VHDLPPVVIS | 124 |
| | | Q+ARLI I+ FK VF IQ+IS+ LE L A SE YN F C N++ D+PP+V | |
| Sbjct: | 67 | QLARLIAISLFKTVFPIQDISRVLEELQAQADSESLYNTFVTCWNQKAPIEEDIPPIVQV | 126 |
| Query: | 125 | ACQTLNLYQETQKLVLEL | 142 |
| | | ACQT+ Y +T L+ E+ | |
| Sbjct: | 127 | ACQTVKDYHKTIYLLQEV | 144 |

[10566] Based on this analysis, it was predicted that these proteins and their epitopes could be useful antigens for vaccines or diagnostics.

### EXAMPLE 1925

[10567] A DNA sequence (GBSx2034) was identified in S. agalactiae <SEQ ID 5967> which encodes the amino acid sequence <SEQ ID 5968>. This protein is predicted to be hemolysin iii. Analysis of this protein sequence reveals the following:

| Possible site: 43 | | | | |
|---|---|---|---|---|
| >>> Seems to have no N-terminal signal sequence | | | | |
| | INTEGRAL | Likelihood = −9.08 | Transmembrane | 142-158 (140-165) |
| | INTEGRAL | Likelihood = −6.79 | Transmembrane | 26-42 (19-44) |
| | INTEGRAL | Likelihood = −5.63 | Transmembrane | 200-216 (196-217) |
| | INTEGRAL | Likelihood = −5.41 | Transmembrane | 104-120 (102-121) |
| | INTEGRAL | Likelihood = −3.98 | Transmembrane | 51-67 (49-69) |
| | INTEGRAL | Likelihood = −1.86 | Transmembrane | 172-188 (169-188) |

```
----- Final Results -----
                              bacterial membrane --- Certainty = 0.4630(Affirmative) < succ>
                                bacterial outside --- Certainty = 0.0000(Not Clear) < succ>
                            bacterial cytoplasm --- Certainty = 0.0000(Not Clear) < succ>
```

[10568] A related GBS nucleic acid sequence <SEQ ID 9951> which encodes amino acid sequence <SEQ ID 9952> was also identified.

[10569] The protein has homology with the following sequences in the GENPEPT database.

| >GP: CAA58877 GB: X84058 novel hemolytic factor [Bacillus cereus] | | | |
|---|---|---|---|
| Identities = 79/204 (38%), Positives = 132/204 (63%), Gaps = 4/204 (1%) | | | |
| Query: | 17 | EELANSITHAVGALLMLILLPITAVYSHNHFGLQAALGTSIFVTSLFLMFLSSSIYHSMT | 76 |
| | | EE+AN+ITH +GA+L + L I +++ H A + +++ S+FL++L S++ HS+ | |
| Sbjct: | 14 | EEIANAITHGIGAILSIPALIILIIHASKHGTASAVVAFTVYGVSMFLLYLFSTLLHSIH | 73 |
| Query: | 77 | YNSLQKYVLBMIDHSMIYIAIAGSYTPVALSLIGGWLGYLIIFLQWGITLFGILYKIFAP | 136 |
| | | + ++K + ++DHS IY+ IAG+YTP L + G LG+ ++ + W + + GI++KIF | |
| Sbjct: | 74 | HPKVEK-LFTILDHSAIYLLIAGTYTPFLLITLRGPLGWTLLAIIWTLAIGGIIFKIFFV | 132 |
| Query: | 137 | KINDKFSLVLYLIMGWLVIF-IFPAIITKTGPAFWGLLLAGGICYTIGALFYA-RKRPYD | 194 |
| | | + K S + Y+IMGWL+I I P TG F LLLAGGI Y++GA+F+ K P++ | |
| Sbjct: | 133 | RRFIKASTLCYIIMGWLIIVAIKPLYENLTGHGF-SLLLAGGILYSVGAIFFLWSKLPFN | 191 |
| Query: | 195 | HMIWHLFILLASILQYIGIVYFML | 218 |
| | | H IWHLF+L S + + +++++L | |
| Sbjct: | 192 | HAIWHLFVLGGSAMMFFCVLFYVL | 215 |

[10570] A related DNA sequence was identified in S. pyogenes <SEQ ID 5969> which encodes the amino acid sequence <SEQ ID 5970>. Analysis of this protein sequence reveals the following:

| Possible site: 41 | | | | |
|---|---|---|---|---|
| >>> Seems to have no N-terminal signal sequence | | | | |
| | INTEGRAL | Likelihood = −10.51 | Transmembrane | 144-160 (138-163) |
| | INTEGRAL | Likelihood = −9.87 | Transmembrane | 49-65 (45-71) |
| | INTEGRAL | Likelihood = −7.11 | Transmembrane | 198-214 (193-215) |
| | INTEGRAL | Likelihood = −6.16 | Transmembrane | 102-118 (100-120) |
| | INTEGRAL | Likelihood = −2.97 | Transmembrane | 20-36 (20-41) |
| | INTEGRAL | Likelihood = −1.01 | Transmembrane | 167-183 (167-185) |

```
----- Final Results -----
                              bacterial membrane --- Certainty = 0.5203(Affirmative) < succ>
                                bacterial outside --- Certainty = 0.0000(Not Clear) < succ>
                            bacterial cytoplasm --- Certainty = 0.0000(Not Clear) < succ>
```

[10571] The protein has homology with the following sequences in the databases:

| >GP: CAA58877 GB: X84058 novel hemolytic factor [Bacillus cereus] | | | |
|---|---|---|---|
| Identities = 82/204 (40%), Positives = 128/204 (62%), Gaps = 4/204 (1%) | | | |
| Query: | 15 | EEVANSVTHAIGAFAMLILLPISASYAYQTYDLKAAIGISIFVISLFLMFLSSTIYHSMA | 74 |
| | | EE+AN++TH IGA + L I +A + A + +++ +S+FL++L ST+ HS+ | |
| Sbjct: | 14 | EEIANAITHGIGAILSIPALIILIIHASKHGTASAVVAFTVYGVSMFLLYLFSTLLHSIH | 73 |
| Query: | 75 | YGSVHKYILRIIDHSMIYIAIAGSYTPVALSLVSGWLGYIIIVLQWGITLFGILYKIFAK | 134 |
| | | + V K + I+DHS IY+ IAG+YTP L + G LG+ ++ + W + + GI++KIF | |
| Sbjct: | 74 | HPKVEK-LFTILDHSAIYLLIAGTYTPFLLITLRGPLGWTLLAIIWTLAIGGIIFKIFFV | 132 |
| Query: | 135 | RINEKFSLMLYIVMGWL-VVFILPVIIQKTSLAFGLLMLFGGLSYTIGAVFYA-KKRPYF | 192 |
| | | R K S + YI+HGWL +V I P+ T F LL L GG+ Y++GA+F+ +K P+ | |
| Sbjct: | 133 | RRFIKASTLCYIIMGWLIIVAIKPLYENLTGHGFSLL-LAGGILYSVGAIFFLWEKLPFN | 191 |
| Query: | 193 | HHIWHLFILLASALQFIAITFFML | 216 |
| | | H IWHLF+L SA+ F + F++L | |
| Sbjct: | 192 | HAIWHLFVLGGSAMMFFCVLFYVL | 215 |

[10572] An alignment of the GAS and GBS proteins is shown below.

| Identities = 153/213 (71%), Positives = 181/213 (84%) | | | |
|---|---|---|---|
| Query: | 6 | SIKLSPQLSFGEELANSITHAVGALLMLILLPITAVYSHNHFGLQAALGTSIFVTSLFLM | 65 |
| | | + K S LSF EE+ANS+THA+GA MLILLPI+A Y++ + L+AA+G SIEV SLFLM | |
| Sbjct: | 4 | TFKQSLPLSFSEEVANSVTHAIGAFAMLILLPISASYAYQTYDLKAAIGISIFVISLFLM | 63 |
| Query: | 66 | FLSSSIYHSMTYNSLQKYVLRMIDHSMIYIAIAGSYTPVALSLIGGWLGYLIIFLQWGIT | 125 |
| | | FLSS+IYHSM Y S+ KY+LR+IDHSMIYIAIAGSYTPVALSL+ GWLGY+II LQWGIT | |
| Sbjct: | 64 | FLSSTIYHSMAYGSVHKYILRIIDHSMIYIAIAGSYTPVALSLVSGWLGYIIIVLQWGIT | 123 |
| Query: | 126 | LFGILYKIFAPKINDKFSLVLYLIMGWLVIFIFPAIITKTGPAFWGLLLAGGICYTIGAL | 185 |
| | | LFGILYKIFA +IN+KFSL+LY++MGWLV+FI P II KT AF L+L GG+ YTIGA+ | |
| Sbjct: | 124 | LFGILYKIFAKRINEKFSLMLYIVMGWLVVFILPVIIQKTSLAFGLLMLFGGLSYTIGAV | 183 |
| Query: | 186 | FYARKRPYDHMIWHLFILLASILQYIGIVYFML | 218 |
| | | FYA+KRPY HMIWHLFILLAS LQ+I I +FML | |
| Sbjct: | 184 | FYAKKRPYFHMIWHLFILLASALQFIAITFFML | 216 |

[10573] Based on this analysis, it was predicted that these proteins and their epitopes could be useful antigens for vaccines or diagnostics.

### EXAMPLE 1926

[10574] A DNA sequence (GBSx2035) was identified in S. agalactiae <SEQ ID 5971> which encodes the amino acid sequence <SEQ ID 5972>. Analysis of this protein sequence reveals the following:

```
Possible site: 52
>>> Seems to have no N-terminal signal sequence
----- Final Results -----
                            bacterial cytoplasm --- Certainty = 0.3641(Affirmative) < succ>
                              bacterial membrane --- Certainty = 0.0000(Not Clear) < succ>
                                bacterial outside --- Certainty = 0.0000(Not Clear) < succ>
```

[10575] The protein has homology with the following sequences in the GENPEPT database.

| >GP: CAB12492 GB: Z99107 similar to hypothetical proteins [Bacillus | | | |
|---|---|---|---|
| subtilis] | | | |
| Identities = 81/302 (26%), Positives = 157/302 (51%), Gaps = 10/302 (3%) | | | |
| Query: | 1 | MKSAYIFFNPKSGKDEQALAKEVKSYLIEHDFQDDY-VRIITPSSVEEAVALAKKASEDH | 59 |
| | | MK A I +NP SG++ + K+ + +++ Q Y + +A AK+A+ | |
| Sbjct: | 1 | MKRARIIYNPTSGRE---IFKKHLAQVLQKFEQAGYETSTHATTCAGDATHAAREAALRE | 57 |
| Query: | 60 | IDLVIPLGGDGTINKICGGVYAGGAYPTIGLVPAGTVNNFSKALNIPQERNL-ALENLLN | 118 |
| | | DL+I GGDGTIN++ G+ PT+G++P GT N+F++AL IP+E L A + ++N | |
| Sbjct: | 58 | FDLIIAAGGDGTINEVVNGLAPLDNRPTLGVIPVGTTNDFARALGIPREDILKAADTVIN | 117 |
| Query: | 119 | GHVKSVDICKVNDDYMISSLTLGLLADIAANVTSEMKRKLGPFAFLGDAYRILKRNRSYS | 178 |
| | | G + +DI +VN Y I+ G L ++ +V S++K LG A+ +L R | |
| Sbjct: | 118 | GVARPIDIGQVNGQYFINIAGGGRLTELTYDVPSKLKTMLGQLAYYLKGMEMLPSLRPTE | 177 |
| Query: | 179 | ITLAYDNNVRSLRTRLLLITMTNSIAGMPAFSPEATIDDGLFRVYTMEHIHFFKLLLHLR | 238 |
| | | + + YD + L L+T+TNS+ G +P+++++DG+F + ++ + + + | |
| Sbjct: | 178 | VEIEYDGKLFQGEIMLFLVTLTNSVGGFEKLAPDSSLNDGMFDLMILKKANLAEFIRVAT | 237 |
| Query: | 239 | QFRKGDFSQAKEIKHFHTNNLTISTFKRKKSAIPKVRIDGDPGDQLPVKVEVIPKALKFI | 298 |
| | | +G+ + I + N + ++ ++ ++ +DG+ G LP + + + + + | |
| Sbjct: | 238 | MALRGEHINDQHIIYTKANRVKVNVSEKM-----QLNLDGEYGGMLPGEFVNLYRHIHVV | 292 |
| Query: | 299 | IP | 300 |
| | | +P | |
| Sbjct: | 293 | MP | 294 |

[10576] A related DNA sequence was identified in S. pyogenes <SEQ ID 5119> which encodes the amino acid sequence <SEQ ID 5120>. Analysis of this protein sequence reveals the following:

```
Possible site: 58
>>> Seems to have no N-terminal signal sequence
----- Final Results -----
                            bacterial cytoplasm --- Certainty = 0.4258(Affirmative) < succ>
                              bacterial membrane --- Certainty = 0.0000(Not Clear) < succ>
                                bacterial outside --- Certainty = 0.0000(Not Clear) < succ>
```

[10577] An alignment of the GAS and GBS proteins is shown below.

| Identities = 172/300 (57%), Positives = 229/300 (76%) | | | |
|---|---|---|---|
| Query: | 1 | MKSAYIFFNPKSGKDEQALAKEVKSYLIEHDFQDDYVRIITPSSVEEAVALAKKASEDHI | 60 |
| | | MK+ IF+NP SGK E LA++VK Y +H F +D V++ITP ++A LAK+A++D I | |
| Sbjct: | 1 | MKTVRIFYNPNSGKKESQLARQVKDYFCQHGFSEDSVKVITPKDADQAFQLAKQAAKDKI | 60 |
| Query: | 61 | DLVIPLGGDGTINKICGGVYAGGAYPTIGLVPAGTVNNFSKALNIPQERNLALENLLNGH | 120 |
| | | DLVIPLGGDGT+NKI GG+Y GGA+ IGLVP+GTVNNF+KA++IP + AL+ +L G | |
| Sbjct: | 61 | DLVIPLGGDGTLNKIIGGIYEGGAHCLIGLVPSGTVNNFAKAMHIPLQITEALDTILTGQ | 120 |
| Query: | 121 | VKSVDICKVNDDYMISSLTLGLLADIAANVTSEMKRKLGPFAFLGDAYRILKRNRSYSIT | 180 |
| | | +K VDICK N YMISSLTLGLLADIAA+VT+E KR+ GP AFL D+ RILKRNRSY+I+ | |
| Sbjct: | 121 | IKQVDICKANQQYMISSLTLGLLADIAADVTAEEKRRFGPLAFLKDSIRILKRNRSYAIS | 180 |
| Query: | 181 | LAYDNNVRSLRTRLLLITMTNSIAGMPAFSPEATIDDGLFRVYTMEHIHFFKLLLHLRQF | 240 |
| | | L N+ L+T+ LLITMTN+IAG P+FSP A DDG F+VYTM+ + FFK L H+ F | |
| Sbjct: | 181 | LISHNHRIHLKTKFLLITMTNTIAGFPSFSPGAQADDGYFQVYTMKKVSFFKFLWHINDF | 240 |
| Query: | 241 | RRGDFSQAKEIKHFHTNNLTISTFKRKKSAIPKVRIDGDPGDQLPVKVEVIPKALKFIIP | 300 |
| | | ++GDFS+A+EI HF N L++ +K++ +P+ RIDGD D LP+++++IPKA+ I+P | |
| Sbjct: | 241 | KQGDFSKAEEISHFQANTLSLLPQAKKQAILPRTRIDGDKSDYLPIQLDIIPKAVSIIVP | 300 |

[10578] Based on this analysis, it was predicted that these proteins and their epitopes could be useful antigens for vaccines or diagnostics.

### EXAMPLE 1927

[10579] A DNA sequence (GBSx2036) was identified in S. agalactiae <SEQ ID 5973> which encodes the amino acid sequence <SEQ ID 5974>. Analysis of this protein sequence reveals the following:

```
Possible site: 35
>>> Seems to have no N-terminal signal sequence
----- Final Results -----
                            bacterial cytoplasm --- Certainty = 0.3628(Affirmative) < succ>
                              bacterial membrane --- Certainty = 0.0000(Not Clear) < succ>
                                bacterial outside --- Certainty = 0.0000(Not Clear) < succ>
```

[10580] The protein has homology with the following sequences in the GENPEPT database.

| >GP: BAB10885 GB: AB010693 gene_id: K21C13.21~pir\| \|T04769~strong | | | |
|---|---|---|---|
| similarity to unknown protein [Arabidopsis thaliana] | | | |
| Identities = 85/291 (29%), Positives = 150/291 (51%), Gaps = 28/291 (9%) | | | |
| Query: | 10 | DQEWEVPVESGRYHMIVGSFCPYAQRPQIARQLLGLDKHISISFVDDV------------ | 57 |
| | | D + + P ESGRYH+ + CP+A R ++ GLD+ I+ S V + | |
| Sbjct: | 29 | DPDSQFPAESGRYHLYISYACPWACRCLSYLKIKGLDEAITFSSVHAIWGRTKETDDHRG | 88 |
| Query: | 58 | ----PSDIGLIFSQPEQVTGAKSLRDIYHLTDPTYQGPYTIPILIDKTDNRIVCKESADL | 113 |
| | | SD L ++P+ + GAKS+R++Y + P Y+G YT+P+L DK +V ES+++ | |
| Sbjct: | 89 | WVFPDSDTELPGAEPDYLNGAKSVRELYEIASPNYEGKYTVPVLWDKKLKTVVNNESSEI | 148 |
| Query: | 114 | LRLFTTDFSDLHQEDAPVLFSQETASLIDNDIKDINKNFQSLMYKLAFLDKQADYDTYSK | 173 |
| | | +R+F T+F+ + + + L+ +I+ + + +YK F KQ Y+ | |
| Sbjct: | 149 | IRMFNTEFNGIAKTPSLDLYPSHLRDVINETNGWVFNGINNGVYKCGFARKQEPYNEAVN | 208 |
| Query: | 174 | EFFTFLDQKEHLLGQRPFLLGDNLSEVDIHFFTPLVRWDIAGRDLLLLNQKALEDYPNIF | 233 |
| | | + + +D+ E +LG++ ++ G+ +E DI F L+R+D N++ L +YPNIF | |
| Sbjct: | 209 | QLYEAVDRCEEVLGKQRYICGNTFTEADIRLFVTLIRFDEVYAVHFKCNKRLLREYPNIF | 268 |
| Query: | 234 | SWAKTLYNDFNLKTLTNPQSIKNNYY-----LGKFGRAVRHHTIVPTGPNM | 279 |
| | | ++ K +Y + + N + IK +YY + FG I+P GPN+ | |
| Sbjct: | 269 | NYIKDIYQIHGMSSTVNMEHIKQHYYGSHPTINPFG-------IIPHGPNI | 312 |

[10581] No corresponding DNA sequence was identified in S. pyogenes.

[10582] Based on this analysis, it was predicted that this protein and its epitopes, could be useful antigens for vaccines or diagnostics.

### EXAMPLE 1928

[10583] A DNA sequence (GBSx2037) was identified in S. agalactiae <SEQ ID 5975> which encodes the amino acid sequence <SEQ ID 5976>. Analysis of this protein sequence reveals the following:

```
Possible site: 59
>>> Seems to have no N-terminal signal sequence
----- Final Results -----
                            bacterial cytoplasm --- Certainty = 0.2647(Affirmative) < succ>
                              bacterial membrane --- Certainty = 0.0000(Not Clear) < succ>
                                bacterial outside --- Certainty = 0.0000(Not Clear) < succ>
```

[10584] The protein has homology with the following sequences in the GENPEPT database.

| >GP: BAB07793 GB: AB037666 hypothetical protein [Streptomyces sp. | | | |
|---|---|---|---|
| CL190] | | | |
| Identities = 127/331 (38%), Positives = 194/331 (58%), Gaps = 9/331 (2%) | | | |
| Query: | 4 | RKDDHIKYALKYQSHY---NSFDDIELIHSSLPKYNVNDIDLSTHFAGQSFEFPFYINAM | 60 |
| | | RKDDH++ A++ + + N FDD+ +H +L + D+ L+T FAG S++ P YINAM | |
| Sbjct: | 6 | RKDDHVRLAIEQHNAHSGRNQFDDVSFVHHALAGIDRPDVSLATSFAGISWQVPIYINAM | 65 |
| Query: | 61 | TGGSEKGKAVNHKLAQVAQATGIVMVTGSYSAALKNDE--DDSYPTTDLYPDLKLATNIG | 118 |
| | | TGGSEK +N LA A+ TG+ + +GS +A +K+ D D P+ + NI | |
| Sbjct: | 66 | TGGSEKTGLINRDLATAARETGVPIASGSMNAYIKDPSCADTFRVLRDENPNGFVIANIN | 125 |
| Query: | 119 | LDKPVPAAESTVKAMNPIFLQVHVNVMQELLMPEGEREFHMWRSHLKEYVDNIQCPLILK | 178 |
| | | V A+ + + LQ+H+N QE MPEG+R F W +++ + P+I+K | |
| Sbjct: | 126 | ATTTVDNAQRAIDLIEANALQIHINTAQETPMPEGDRSFASWVPQIEKIAAAVDIPVIVK | 185 |
| Query: | 179 | EVGFGMDLQSIKDAYDIGITTVDISGRGGTSFAYIENQRGR--DRSYLNTWGQTTAQSLI | 236 |
| | | EVG G+ Q+I D+G+ D+SGRGGT FA IEN R D ++L+ WGQ+TA L+ | |
| Sbjct: | 186 | EVGNGLSRQTILLLADLGVQAADVSGRGGTDFARIENGRRELGDYAFLHGWGQSTAACLL | 245 |
| Query: | 237 | NAQSMMDKMDILASGGIRHPLDMVKCLVLGAKAVGLSRTVLELVERYPVDDVIAILNSWK | 296 |
| | | +AQ + + +LASGG+RHPLD+V+ L LGA+AVG S L + VD +I L +W | |
| Sbjct: | 246 | DAQDI--SLPVLASGGVRHPLDVVRALALGARAVGSSAGFLRTLMDDGVDALITKLTTWL | 303 |
| Query: | 297 | EDLRMIMCALNCKKITDLRQVNYILYGQLKE | 327 |
| | | + L + L + DL + + +L+G+L++ | |
| Sbjct: | 304 | DQLAALQTMLGARTPADLTRCDVLLHGELRD | 334 |

[10585] A related DNA sequence was identified in S. pyogenes <SEQ ID 5977> which encodes the amino acid sequence <SEQ ID 5978>. Analysis of this protein sequence reveals the following:

```
Possible site: 51
>>> Seems to have no N-terminal signal sequence
----- Final Results -----
                            bacterial cytoplasm --- Certainty = 0.2823(Affirmative) < succ>
                              bacterial membrane --- Certainty = 0.0000(Not Clear) < succ>
                                bacterial outside --- Certainty = 0.0000(Not Clear) < succ>
```

[10586] An alignment of the GAS and GBS proteins is shown below.

| Identities = 244/329 (74%), Positives = 284/329 (86%) | | | |
|---|---|---|---|
| Query: | 1 | MTNRKDDHIKYALKYQSHYNSFDDIELIHSSLPKYNVNDIDLSTHFAGQSFEFPFYINAM | 60 |
| | | MTNRKDDHIKYALKYQS YN+FDDIELIH SLP Y+++DIDLSTHFAGQ F+FPFYINAM | |
| Sbjct: | 31 | MTNRKDDHIKYALKYQSPYNAFDDIELIHHSLPSYDLSDIDLSTHFAGQDFDFPFYINAM | 90 |
| Query: | 61 | TGGSEKGKAVNHKLAQVAQATGIVMVTGSYSAALKNDEDDSYPTTDLYPDLKLATNIGLD | 120 |
| | | TGGS+KGKAVN KLA+VA ATGIVMVTGSYSAALKN DDSY ++ +LKLATNIGLD | |
| Sbjct: | 91 | TGGSQKGKAVNEKLAKVAAATGIVMVTGSYSAALKNPNDDSYRLHEVADNLKLATNIGLD | 150 |
| Query: | 121 | KPVPAAESTVKAMNPIFLQVHVNVMQELLMPEGEREFHMWRSHLKEYVDNIQCPLILKEV | 180 |
| | | KPV + TV+ M P+FLQVHVNVMQELLMPEGER FH W+ HL EY I P+ILKEV | |
| Sbjct: | 151 | KPVALGQQTVQEMQPLFLQVHVNVMQELLMPEGERVFHTWKKHLAEYASQIPVPVILKEV | 210 |
| Query: | 181 | GFGMDLQSIKDAYDIGITTVDISGRGGTSFAYIENQRGRDRSYLNTWGQTTAQSLINAQS | 240 |
| | | GFGMD+ SIK A+D+GI T DISGRGGTSFAYIENQRG DRSYLN WGQTT Q L+NAQ | |
| Sbjct: | 211 | GFGMDVNSIKLAHDLGIQTFDISGRGGTSFAYIENQRGGDRSYLNDWGQTTVQCLLNAQG | 270 |
| Query: | 241 | MMDKMDILASGGIRHPLDMVKCLVLGAKAVGLSRTVLELVERYPVDDVIAILNSWKEDLR | 300 |
| | | +MD+++ILASGG+RHPLDM+KC VLGA+AVGLSRTVLELVE+YP + VIAI+N WKE+L+ | |
| Sbjct: | 271 | LMDQVEILASGGVRHPLDMIKCFVLGARAVGLSRTVLELVEKYPTERVIAIVNGWKEELK | 330 |
| Query: | 301 | MIMCALNCKKITDLRQVNYILYGQLKEAN | 329 |
| | | +IMCAL+CK I +L+ V+Y+LYG+L++ N | |
| Sbjct: | 331 | IIMCALDCKTIKELKGVDYLLYGRLQQVN | 359 |

[10587] Based on this analysis, it was predicted that these proteins and their epitopes could be useful antigens for vaccines or diagnostics.

### EXAMPLE 1929

[10588] A DNA sequence (GBSx2038) was identified in S. agalactiae <SEQ ID 5979> which encodes the amino acid sequence <SEQ ID 5980>. This protein is predicted to be phosphomevalonate kinase. Analysis of this protein sequence reveals the following:

```
Possible site: 41
>>> Seems to have no N-terminal signal sequence
----- Final Results -----
                            bacterial cytoplasm --- Certainty = 0.0785(Affirmative) < succ>
                              bacterial membrane --- Certainty = 0.0000(Not Clear) < succ>
                                bacterial outside --- Certainty = 0.0000(Not Clear) < succ>
```

[10589] The protein has homology with the following sequences in the GENPEPT database.

| >GP: AAG02457 GB: AF290099 phosphomevalonate kinase | | | |
|---|---|---|---|
| [Streptococcus pneumoniae] | | | |
| Identities = 170/330 (51%), Positives = 233/330 (70%), Gaps = 1/330 (0%) | | | |
| Query: | 1 | MVKVQTGGKLYIAGEYAILYPGQVAILKNVPIYMTALATFADNYSLYSDMFNYTASLQPD | 60 |
| | | M+ V+T GKLY AGEYAIL PGQ+A++K++PIYM A F+D+Y +YSDMF++ L+P+ | |
| Sbjct: | 1 | MIAVKTCGKLYWAGEYAILEPGQLALIKDIPIYMRAEIAFSDSYRIYSDMFDFAVDLRPN | 60 |
| Query: | 61 | KQYSLIQETILLMEEWLINFGKNIKPIHLEITGKLERYGLKFGIGSSGSVVVLTIKAMAA | 120 |
| | | YSLIQETI LM ++L G+N++P L+I GK+ER G KFG+GSSGSVVVL +KA+ A | |
| Sbjct: | 61 | PDYSLIQETIALMGDFLAVRGQNLRPFSLKICGKMEREGKKFGLGSSGSVVVLVVKALLA | 120 |
| Query: | 121 | LYEIEMPSDLLFKLSAYVLLKRGDNGSMGDIACIAYEHLISYSAFDRRAVSKMIETKPLE | 180 |
| | | LY + + +LLFKL++ VLLKRGDNGSMGD+ACI E L+ Y +FDR+ + +E + L | |
| Sbjct: | 121 | LYNLSVDQNLLFKLTSAVLLKRGDNGSMGDLACIVAEDLVLYQSFDRQKAAAWLEEENLA | 180 |
| Query: | 181 | QVLEAEWGYRITKIQALLEMDFLVGWTMQPSISKEMINIVKSTITQRFLDDTKYQVVQLL | 240 |
| | | VLE +WG+ I++++ LE DFLVGWT + ++S M+ +K I Q FL +K VV L+ | |
| Sbjct: | 181 | TVLERDWGFFISQVKPTLECDFLVGWTKEVAVSSHMVQQIKQNINQNFLSSSKETVVSLV | 240 |
| Query: | 241 | SAFKEGDKEAIKRCLEEISLLLFNLHPSIYTDKLQKLKEASKGLDIVTKSSGSGGGDCGI | 300 |
| | | A ++G E + +E S LL L IYT L++LKEAS+ L V KSSG+GGGDCGI | |
| Sbjct: | 241 | EALEQGKAEKVIEQVEVASKLLEGLSTDIYTPLLRQLKEASQDLQAVAKSSGAGGGDCGI | 300 |
| Query: | 301 | AISFN-KNDNQTLIKRWESAGIELLSKETL | 329 |
| | | A+SF+ ++ TL RW GIELL +E + | |
| Sbjct: | 301 | ALSFDAQSSRNTLKNRWADLGIELLYQERI | 330 |

[10590] A related DNA sequence was identified in S. pyogenes <SEQ ID 5981> which encodes the amino acid sequence <SEQ ID 5982>. Analysis of this protein sequence reveals the following:

```
Possible site: 59
>>> Seems to have no N-terminal signal sequence
----- Final Results -----
                            bacterial cytoplasm --- Certainty = 0.2669(Affirmative) < succ>
                              bacterial membrane --- Certainty = 0.0000(Not Clear) < succ>
                                bacterial outside --- Certainty = 0.0000(Not Clear) < succ>
```

[10591] An alignment of the GAS and GBS proteins is shown below.

| Identities = 171/325 (52%), Positives = 227/325 (69%), Gaps = 2/325 (0%) | | | |
|---|---|---|---|
| Query: | 4 | VQTGGKLYIAGEYAILYPGQVAILKNVPIYMTALATFADNYSLYSDMFNYTASLQPDKQY | 63 |
| | | VQTGGKLY+ GEYAIL PGQ A++ +P+ MTA + A + L SDMF++ A + PD Y | |
| Sbjct: | 22 | VQTGGKLYLTGEYAILTPGQKALIHFIPLMMTAEISPAAHIQLASDMFSHKAGMTPDASY | 81 |
| Query: | 64 | SLIQETILLMEEWLINFGKNIKPIHLEITGKLERYGLKFGIGSSGSVVVLTIKAMAALYE | 123 |
| | | +LIQ T+ ++L ++P L ITGK+ER G KFGIGSSGSV +LT+KA++A Y+ | |
| Sbjct: | 82 | ALIQATVKTFADYLGQSIDQLEPFSLIITGKMERDGKKFGIGSSGSVTLLTLKALSAYYQ | 141 |
| Query: | 124 | IEMPSDLLFKLSAYVLLKRGDNGSMGDIACIAYEHLISYSAFDRRAVSKMIETKPLEQVL | 183 |
| | | I + +LLFKL+AY LLK+GDNGSMGDIACIAY+ L++Y++FDR VS ++T PL+++L | |
| Sbjct: | 142 | ITLTPELLFKLAAYTLLKQGDNGSMGDIACIAYQTLVAYTSFDREQVSNWLQTMPLKKLL | 201 |
| Query: | 184 | EAEWGYRITKIQALLEMDFLVGWTMQPSISKEMINIVKSTITQRFLDDTKYQVVQ-LLSA | 242 |
| | | +WGY I IQ L DFLVGWT P+IS++MI V ++IT FL T YQ+ Q + A | |
| Sbjct: | 202 | VKDWGYHIQVIQPALPCDFLVGWTKIPAISRQMIQQVTASITPAFL-RTSYQLTQSAMVA | 260 |
| Query: | 243 | FKEGDKEAIKRCLEEISLLLFNLHPSIYTDKLQKLKEASKGLDIVTKSSGSGGGDCGIAI | 302 |
| | | +EG KE +K+ L S LL LHP+IY KL L A + D V KSSGSGGGDCGIA+ | |
| Sbjct: | 261 | LQEGHKEELKKSLAGASHLLKELHPAIYHPKLVTLVAACQKQDAVAKSSGSGGGDCGIAL | 320 |
| Query: | 303 | SFNKNDNQTLIKRWESAGIELLSKE | 327 |
| | | +FN++ TLI +W+ A I LL +E | |
| Sbjct: | 321 | AFNQDARDTLISKWQEADIALLYQE | 345 |

[10592] Based on this analysis, it was predicted that these proteins and their epitopes could be useful antigens for vaccines or diagnostics.

### EXAMPLE 1930

[10593] A DNA sequence (GBSx2039) was identified in S. agalactiae <SEQ ID 5983> which encodes the amino acid sequence <SEQ ID 5984>. Analysis of this protein sequence reveals the following:

| Possible site: 32 | | | | |
|---|---|---|---|---|
| >>> Seems to have an uncleavable N-term signal seq | | | | |
| | INTEGRAL | Likelihood = −1.75 | Transmembrane | 20-36 (18-36) |

```
----- Final Results -----
                              bacterial membrane --- Certainty = 0.1720(Affirmative) < succ>
                                bacterial outside --- Certainty = 0.0000(Not Clear) < succ>
                            bacterial cytoplasm --- Certainty = 0.0000(Not Clear) < succ>
```

[10594] The protein has no significant homology with any sequences in the GENPEPT database.

[10595] No corresponding DNA sequence was identified in S. pyogenes.

[10596] Based on this analysis, it was predicted that this protein and its epitopes, could be useful antigens for vaccines or diagnostics.

### EXAMPLE 1931

[10597] A DNA sequence (GBSx2040) was identified in S. agalactiae <SEQ ID 5985> which encodes the amino acid sequence <SEQ ID 5986>. This protein is predicted to be mevalonate diphosphate decarboxylase. Analysis of this protein sequence reveals the following:

```
Possible site: 25
>>> Seems to have no N-terminal signal sequence
----- Final Results -----
                            bacterial cytoplasm --- Certainty = 0.1557(Affirmative) < succ>
                              bacterial membrane --- Certainty = 0.0000(Not Clear) < succ>
                                bacterial outside --- Certainty = 0.0000(Not Clear) < succ>
```

[10598] The protein has homology with the following sequences in the GENPEPT database.

| >GP: AAG02456 GB: AF290099 mevalonate diphosphate decarboxylase | | | |
|---|---|---|---|
| [Streptococcus pneumoniae] | | | |
| Identities = 219/312 (70%), Positives = 264/312 (84%) | | | |
| Query: | 1 | MDGKSISVKSYANIAIIKYWGKADAEKMIPATSSISLTLENMYTETRLTALGKDAKKDEF | 60 |
| | | MD + ++V+SYANIAIIKYWGK ++M+PATSSISLTLENMYTET L+ L + DEF | |
| Sbjct: | 1 | MDREPVTVRSYANIAIIKYWGKKKEKEMVPATSSISLTLENMYTETTLSPLPANVTADEF | 60 |
| Query: | 61 | YISGVLQNDHEHDKMSAILDRFRQNRSGFVKIETTNNMPTAAGLSSSSSGLSALVKACND | 120 |
| | | YI+G LQN+ EH KMS I+DR+R GFV+I+T NNMPTAAGLSSSSSGLSALVKACN | |
| Sbjct: | 61 | YINGQLQNEVEHAKMSKIIDRYRPAGEGFVRIDTQNNMPTAAGLSSSSSGLSALVKACNA | 120 |
| Query: | 121 | FFGTNLSQSQLAQEAKFASGSSSRSFFGPVAAWDKDSGDIYKVHTNLDLAMIMLVLNDKR | 180 |
| | | +F L +SQLAQEAKFASGSSSRSF+GP+ AWDKDSG+IY V T+L LAMIMLVL DK+ | |
| Sbjct: | 121 | YFKLGLDRSQLAQEAKFASGSSSRSFYGPLGAWDKDSGEIYPVETDLKLAMIMLVLEDKK | 180 |
| Query: | 181 | KPISSREGMKICTETSTTFNEWVRQSEQDYQDMLVYLKNNDFQKVGQLTERNALAMHSTT | 240 |
| | | KPISSR+GMK+C ETSTTF++WVRQSE+DYQDML+YLK NDF K+G+LTE+NALAMH+TT | |
| Sbjct: | 181 | KPISSRDGMKLCVETSTTFDDWVRQSEKDYQDMLIYLKENDFAKIGELTEKNALAMHATT | 240 |
| Query: | 241 | KTATPAFSYLTEETYKAMDVVKKLREKGHECYYTMDAGPNVKVLCLRQDLEALAAILEKD | 300 |
| | | KTA+PAFSYLT+ +Y+AM V++LREKG CY+TMDAGPNVKV C +DLE L+ I + | |
| Sbjct: | 241 | KTASPAFSYLTDASYEAMAFVRQLREKGEACYFTMDAGPNVKVFCQEKDLEHLSEIFGQR | 300 |
| Query: | 301 | YRIIVSTTKELA | 312 |
| | | YR+IVS TK+L+ | |
| Sbjct: | 301 | YRLIVSKTKDLS | 312 |

[10599] A related DNA sequence was identified in S. pyogenes <SEQ ID 5987> which encodes the amino acid sequence <SEQ ID 5988>. Analysis of this protein sequence reveals the following:

```
Possible site: 36
>>> Seems to have no N-terminal signal sequence
----- Final Results -----
                            bacterial cytoplasm --- Certainty = 0.1271(Affirmative) < succ>
                              bacterial membrane --- Certainty = 0.0000(Not Clear) < succ>
                                bacterial outside --- Certainty = 0.0000(Not Clear) < succ>
```

[10600] An alignment of the GAS and GBS proteins is shown below.

| Identities = 221/313 (70%), Positives = 258/313 (81%) | | | |
|---|---|---|---|
| Query: | 1 | MDGKSISVKSYANIAIIKYWGKADAEKMIPATSSISLTLENMYTETRLTALGKDAKKDEF | 60 |
| | | +D I+V SYANIAIIKYWGK + KMIP+TSSISLTLENM+T T ++ L A D+F | |
| Sbjct: | 1 | VDPNVITVTSYANIAIIKYWGKENQAKMIPSTSSISLTLENMFTTTSVSFLPDTATSDQF | 60 |
| Query: | 61 | YISGVLQNDHEHDKMSAILDRFRQNRSGFVKIETTNNMPTAAGLSSSSSGLSALVKACND | 120 |
| | | YI+G+LQND EH K+SAI+D+FRQ FVK+ET NNMPTAAGLSSSSSGLSALVKAC+ | |
| Sbjct: | 61 | YINGILQNDEEHTKISAIIDQFRQPGQAFVKMETQNNMPTAAGLSSSSSGLSALVKACDQ | 120 |
| Query: | 121 | FFGTNLSQSQLAQEAKFASGSSSRSFFGPVAAWDKDSGDIYKVHTNLDLAMIMLVLNDKR | 180 |
| | | F T L Q LAQ+AKFASGSSSRSFFGPVAAWDKDSG IYKV T+L +AMIMLVLN + | |
| Sbjct: | 121 | LFDTQLDQKALAQKAKFASGSSSRSFFGPVAAWDKDSGAIYKVETDLKMAMIMLVLNAAK | 180 |
| Query: | 181 | KPISSREGMKICTETSTTFNEWVRQSEQDYQDMLVYLKNNDFQKVGQLTERNALAMHSTT | 240 |
| | | KPISSREGMK+C +TSTTF++WV QS DYQ ML YLK N+F+KVGQLTE NALAMH+TT | |
| Sbjct: | 181 | KPISSREGMKLCRDTSTTFDQWVEQSAIDYQHMLTYLKTNNFEKVGQLTEANALAMHATT | 240 |
| Query: | 241 | KTATPAFSYLTEETYKAMDVVKKLREKGHECYYTMDAGPNVKVLCLRQDLEALAAILEKD | 300 |
| | | KTA P FSYLT+E+Y+AM+ VK+LR++G CY+TMDAGPNVKVLCL +DL LA L K+ | |
| Sbjct: | 241 | KTANPPFSYLTKESYQAMEAVKELRQEGFACYFTMDAGPNVKVLCLEKDLAQLAERLGKN | 300 |
| Query: | 301 | YRIIVSTTKELAD | 313 |
| | | YRIIVS TK+L D | |
| Sbjct: | 301 | YRIIVSKTKDLPD | 313 |

[10601] Based on this analysis, it was predicted that these proteins and their epitopes could be useful antigens for vaccines or diagnostics.

### EXAMPLE 1932

[10602] A DNA sequence (GBSx2041) was identified in S. agalactiae <SEQ ID 5989> which encodes the amino acid sequence <SEQ ID 5990>. Analysis of this protein sequence reveals the following:

```
Possible site: 59
>>> Seems to have no N-terminal signal sequence
----- Final Results -----
                            bacterial cytoplasm --- Certainty = 0.1512(Affirmative) < succ>
                              bacterial membrane --- Certainty = 0.0000(Not Clear) < succ>
                                bacterial outside --- Certainty = 0.0000(Not Clear) < succ>
```

[10603] A related DNA sequence was identified in S. pyogenes <SEQ ID 5991> which encodes the amino acid sequence <SEQ ID 5992>. Analysis of this protein sequence reveals the following:

```
Possible site: 35
>>> Seems to have no N-terminal signal sequence
----- Final Results -----
                            bacterial cytoplasm --- Certainty = 0.1117(Affirmative) < succ>
                              bacterial membrane --- Certainty = 0.0000(Not Clear) < succ>
                                bacterial outside --- Certainty = 0.0000(Not Clear) < succ>
```

[10604] An alignment of the GAS and GBS proteins is shown below.

| Identities = 182/290 (62%), Positives = 223/290 (76%) | | | |
|---|---|---|---|
| Query: | 1 | MKEKFGIGKAHSKIILMGEHSVVYGYPAIAIPLKNIEVTCLIEEAPQLIALDMTDPLSTA | 60 |
| | | M E G GKAHSKIIL+GEH+VVYGYPAIA+PL +IEV C I A + + D D LSTA | |
| Sbjct: | 6 | MNENIGYGKAHSKIILIGEHAVVYGYPAIALPLTDIEVVCHIFPADKPLVFDFYDTLSTA | 65 |
| Query: | 61 | IFAALDYLGKTSSKIAYHIESQVPERRGMGSSAAVAIAAIRAVFDYFDEDLEADLLECLV | 120 |
| | | I+A+LDYL + IAY I SQVP++RGMGSSAAV+IAAIRAVF Y E L DLLE LV | |
| Sbjct: | 66 | IYASLDYLQRLQEPIAYEIVSQVPQKRGMGSSAAVSIAAIRAVFSYCQEPLSDDLLEILV | 125 |
| Query: | 121 | NRAEMIAHSNPSGLDAKTCLSENTIKFIRNIGFSTVPMHLNAYLVIADTGIHGHTKEAVD | 180 |
| | | N+AE+IAH+NPSGLDAKTCLS++ IKFIRNIGF T+ + LN YL+IADTGIHGHT+EAV+ | |
| Sbjct: | 126 | NKAEIIAHTNPSGLDAKTCLSDHAIKFIRNIGFETIEIALNGYLIIADTGIHGHTREAVN | 185 |
| Query: | 181 | KVKSSGEAVLPFLKELGYLAEASEDAIHKSDSKQLGSLMTKAHQSLKQLGVSSLEADHLV | 240 |
| | | KV E LP+L +LG L +A E AI++ + +G LMT+AH +LK +GVS +AD LV | |
| Sbjct: | 186 | KVAQFEETNLPYLAKLGALTQALERAINQKNKVAIGQLMTQAHSALKAIGVSISKADQLV | 245 |
| Query: | 241 | EVAISCGALGAKMSGGGLGGCIIALVKEKREAERLSQQLEREGAVNTWTE | 290 |
| | | E A+ GALGAKM+GGGLGGC+IAL K AE++S +L+ EGAVNTW + | |
| Sbjct: | 246 | EAALRAGALGAKMTGGGLGGCMIALADTKDMAEKISHRLKEEGAVNTWIQ | 295 |

[10605] Based on this analysis, it was predicted that these proteins and their epitopes could be useful antigens for vaccines or diagnostics.

### EXAMPLE 1933

[10606] A DNA sequence (GBSx2042) was identified in S. agalactiae <SEQ ID 5993> which encodes the amino acid sequence <SEQ ID 5994>. This protein is predicted to be a histidine protein kinase. Analysis of this protein sequence reveals the following:

| Possible site: 26 | | | | |
|---|---|---|---|---|
| >>> Seems to have an uncleavable N-term signal seq | | | | |
| | INTEGRAL | Likelihood = −13.43 | Transmembrane | 12-28 (4-33) |
| | INTEGRAL | Likelihood = −9.29 | Transmembrane | 163-179 (157-191) |

```
----- Final Results -----
                              bacterial membrane --- Certainty = 0.6371(Affirmative) < succ>
                                bacterial outside --- Certainty = 0.0000(Not Clear) < succ>
                            bacterial cytoplasm --- Certainty = 0.0000(Not Clear) < succ>
```

[10607] The protein has homology with the following sequences in the GENPEPT database.

| >GP: AAF79919 GB: AF039082 putative histidine protein kinase | | | |
|---|---|---|---|
| [Lactococcus lactis] | | | |
| Identities = 78/315 (24%), Positives = 154/315 (48%), Gaps = 33/315 (10%) | | | |
| Query: | 101 | SDRQIKNYAKRIVSQNSHSGHITYNFSTYSYLLKKVGKNDYLVVFLDTTNQYLDNQRLLQ | 160 |
| | | +++QI N + + +N + + Y + T S + V++ + Q + | |
| Sbjct: | 84 | NEKQI-NTIQTVSVKNPYGDNWHYRYLTTSQFIITNSDGTVTPVYVQIFSNVDQIQDAMS | 142 |
| Query: | 161 | LSIWM---SLVSFIVFMVIVSV-LSGRVILPFVANYEKQRRFITNAGHELKTPLAIISAN | 216 |
| | | ++W+ ++++F + VI+S+ L+ + P +A YEKQ+ F+ NA HEL+TPLAI+ | |
| Sbjct: | 143 | RAMWVIVTTMITFWILSVIISLYLANWTLKPILAAYEKQKEFVENASHELRTPLAILQNR | 202 |
| Query: | 217 | NELV-----EMMSGESEWTKSTNDQIQRLTGLINGMVSLAR------FEEQPDISM---- | 261 |
| | | EL+ + +SE + +++ + L + +++LAR E +P + | |
| Sbjct: | 203 | LELLFQKPTATIIDQSENISESLSEVRNMRLLTSNLLNLARRDSGIKIEPEPTTATYFEN | 262 |
| Query: | 262 | VDLDFSHITKDAAEDFKGPIIKDGKDFIMSIQPGIHVKAEEKSLFELVTLLVDNANKYCD | 321 |
| | | + + +T++A + F G + +G V ++ + +L+T+L DNA KY D | |
| Sbjct: | 263 | IFNSYEMLTENAGKKFSGNLKLEGT-----------VNLDQALIKQLLTILFDNALKYTD | 311 |
| Query: | 322 | PMGTVTVKLSRSSRLRRAKLEVSNTYKNGKDIDYSKFFERFYREDESHNNKKSGYGIGLS | 381 |
| | | G ++V + ++ V++ + D D K F+RF+R D++ +K G G+GLS | |
| Sbjct: | 312 | SEGEISVDVIKNGGF--LTFAVADNGEGISDEDKKKIFDRFFRVDKARTRQKGGLGLGLS | 369 |
| Query: | 382 | IVTSLVHLFKGSIDV | 396 |
| | | + +V + G I V | |
| Sbjct: | 370 | LAKQIVEAYNGKITV | 384 |

[10608] A related DNA sequence was identified in S. pyogenes <SEQ ID 5751> which encodes the amino acid sequence <SEQ ID 5752>. Analysis of this protein sequence reveals the following:

| Possible site: 24 | | | | |
|---|---|---|---|---|
| >>> Seems to have an uncleavable N-term signal seq | | | | |
| | INTEGRAL | Likelihood = −11.30 | Transmembrane | 18-34 (13-42) |
| | INTEGRAL | Likelihood = −10.35 | Transmembrane | 170-186 (163-199) |

```
----- Final Results -----
                              bacterial membrane --- Certainty = 0.5522(Affirmative) < succ>
                                bacterial outside --- Certainty = 0.0000(Not Clear) < succ>
                            bacterial cytoplasm --- Certainty = 0.0000(Not Clear) < succ>
```

[10609] An alignment of the GAS and GBS proteins is shown below.

| Identities = 233/410 (56%), Positives = 303/410 (73%), Gaps = 1/410 (0%) | | | |
|---|---|---|---|
| Query: | 1 | MFRNLRLRFIGIAALAILVVLFSVVGVLNSANHYQTKNEIYRVLTILADNNGRIPNKLEF | 60 |
| | | MF +R+RFI IA++AI ++L S+VG++N+A YQ++ EI R+L +++ N G++P E | |
| Sbjct: | 10 | MFNRIRIRFIMIASIAIFIILSSIVGIINTARCYQSQQEINRILHLISSNKGKLPGTTES | 69 |
| Query: | 61 | SKELGDDLSTDAIFQFRYFSARTDAKGNVTSFDSRNIFEVSDRQIKNYAKRIVSQNSHSG | 120 |
| | | SK LG LS D++ QFRY+S +A G++ S ++ NI + + + +A+ G | |
| Sbjct: | 70 | SKRLGTKLSEDSLSQFRYYSVIFNANGHLLSSNTANISALDREEAQYFARLFAKSGEEKG | 129 |
| Query: | 121 | HITYNFSTYSYLLKKVGKNDYLVVFLDTTNQYLDNQRLLQLSIWMSLVSFIVFMVIVSVL | 180 |
| | | + S YSYL+ ++ + LVV LDTT + LL +S+ ++ FI F+V+VS+ | |
| Sbjct: | 130 | SYRHQDSVYSYLITQLPNEEKLVVILDTTFYFRSVGDLLAVSVMLAFGGFIFFVVLVSLF | 189 |
| Query: | 181 | SGRVILPFVANYEKQRRFITNAGHELKTPLAIISANNELVEMMSGESEWTKSTNDQIQRL | 240 |
| | | SG VI PFV NYEKQRRFITNAGHELKTPLAIISANNELVE+M+GESEWTKST+DQ++RL | |
| Sbjct: | 190 | SGMVIKPFVQNYEKQRRFITNAGHELKTPLAIISANNELVELMTGESEWTKSTSDQVKRL | 249 |
| Query: | 241 | TGLINGMVSLARFEEQPDISMVDLDFSHITKDAAEDFKGPIIKDGKDFIMSIQPGIHVKA | 300 |
| | | TGLIN M++LAR EEQPD+ + +DFS I +DAAEDFK ++KDGK F ++IQP I +KA | |
| Sbjct: | 250 | TGLINQMITLARLEEQPDVVLHMVDFSAIAQDAAEDFKSLVLKDGKRFDLTIQPNIMIKA | 309 |
| Query: | 301 | EEKSLFELVTLLVDNANKYCDPMGTVTVKLSRSSRLR-RAKLEVSNTYKNGKDIDYSKFF | 359 |
| | | EEKSLFELVT+LVDNANKYCDP G V V L+ R R RAKLEVSNTY GK IDYS+FF | |
| Sbjct: | 310 | EEKSLFELVTILVDNANKYCDPKGLVKVSLTTIGRRRKRAKLEVSNTYLEGKSIDYSRFF | 369 |
| Query: | 360 | ERFYREDESHNNKKSGYGIGLSIVTSLVHLFKGSIDVNYKHDTITFVIYI | 409 |
| | | ERFYREDESHN+K+ GYGIGLS+ S+V LFKG+I VNYK+D I F + I | |
| Sbjct: | 370 | ERFYREDESHNSKEKGYGIGLSMAESMVKLFKGTITVNYKNDAIVFTVVI | 419 |

[10610] SEQ ID 5994 (GBS273) was expressed in E. coli as a His-fusion product. SDS-PAGE analysis of total cell extract is shown in FIG. 51 (lane 14; MW 46 kDa). It was also expressed in E. coli as a GST-fusion product. SDS-PAGE analysis of total cell extract is shown in FIG. 56 (lane 5; MW 71 kDa).

[10611] GBS273-GST was purified as shown in FIG. 208, lane 4.

[10612] Based on this analysis, it was predicted that these proteins and their epitopes could be useful antigens for vaccines or diagnostics.

### EXAMPLE 1934

[10613] A DNA sequence (GBSx2043) was identified in S. agalactiae <SEQ ID 5995> which encodes the amino acid sequence <SEQ ID 5996>. Analysis of this protein sequence reveals the following:

```
Possible site: 16
>>> Seems to have no N-terminal signal sequence
----- Final Results -----
                            bacterial cytoplasm --- Certainty = 0.2181(Affirmative) < succ>
                              bacterial membrane --- Certainty = 0.0000(Not Clear) < succ>
                                bacterial outside --- Certainty = 0.0000(Not Clear) < succ>
```

[10614] The protein has no significant homology with any sequences in the GENPEPT database.

[10615] No corresponding DNA sequence was identified in S. pyogenes.

[10616] Based on this analysis, it was predicted that this protein and its epitopes, could be useful antigens for vaccines or diagnostics.

### EXAMPLE 1935

[10617] A DNA sequence (GBSx2044) was identified in S. agalactiae <SEQ ID 5997> which encodes the amino acid sequence <SEQ ID 5998>. This protein is predicted to be two-component response regulator (trcR). Analysis of this protein sequence reveals the following:

```
Possible site: 56
>>> Seems to have no N-terminal signal sequence
----- Final Results -----
                            bacterial cytoplasm --- Certainty = 0.2503(Affirmative) < succ>
                              bacterial membrane --- Certainty = 0.0000(Not Clear) < succ>
                                bacterial outside --- Certainty = 0.0000(Not Clear) < succ>
```

[10618] A related GBS nucleic acid sequence <SEQ ID 9379> which encodes amino acid sequence <SEQ ID 9380> was also identified.

[10619] The protein has homology with the following sequences in the GENPEPT database.

| >GP: BAB04091 GB: AP001508 two-component response regulator | | | |
|---|---|---|---|
| [Bacillus halodurans] | | | |
| Identities = 71/183 (38%), Positives = 120/183 (64%), Gaps = 3/183 (1%) | | | |
| Query: | 9 | RVLIAEDEEQMSRVLSTAISHQGYVVDVAYDGQTAIDLANQNAYDVMVMDVMMPVKTGIE | 68 |
| | | R+LI EDE++++RVL + H+GY D A+ G ++ +A+D++++DVM+P +G+E | |
| Sbjct: | 3 | RILIIEDEKKIARVLQLELEHEGYETDAAFSGSDGLETFQAHAWDLVLLDVMLPELSGLE | 62 |
| Query: | 69 | AVKEIRQSGNKSHIIMLTAMAEIDDRVTGLDAGADDYLTKPFSLKELLARLRSMSRRLE- | 127 |
| | | ++ IR + + II+LTA I D+V+GLD GA+DY+TKPF ++ELLAR+R+ R ++ | |
| Sbjct: | 63 | VLRRIRMTDPVTPIILLTARNSIPDKVSGLDLGANDYITKPFEIEELLARVRACLRTVQT | 122 |
| Query: | 128 | -DFTPNVLSLGRVTLSVGEQELQCEN-TIRLAGKEAKMLAFFMLNHDKELSTQQLFEHVW | 185 |
| | | + + L +T++ +++Q N TI L KE ++L FF+ N + LS +Q+ +VW | |
| Sbjct: | 123 | RERVEDTLMFQELTINEKTRDVQRGNETIELTPKEFELLVFFIKNKGQVLSREQILTNVW | 182 |
| Query: | 186 | GAD | 188 |
| | | G D | |
| Sbjct: | 183 | GFD | 185 |

[10620] A related DNA sequence was identified in S. pyogenes <SEQ ID 5999> which encodes the amino acid sequence <SEQ ID 6000>. Analysis of this protein sequence reveals the following:

```
Possible site: 21
>>> Seems to have no N-terminal signal sequence
----- Final Results -----
                            bacterial cytoplasm --- Certainty = 0.2391(Affirmative) < succ>
                              bacterial membrane --- Certainty = 0.0000(Not Clear) < succ>
                                bacterial outside --- Certainty = 0.0000(Not Clear) < succ>
```

[10621] An alignment of the GAS and GBS proteins is shown below.

| Identities = 125/185 (67%), Positives = 151/185 (81%) | | | |
|---|---|---|---|
| Query: | 8 | MRVLIAEDEEQMSRVLSTAISHQGYVVDVAYDGQTAIDLANQNAYDVMVMDVMMPVKTGI | 67 |
| | | M++L+AEDE QMS VL+TA++HQGY VDV ++GQ AID A NAYD+M++D+MMP+K+GI | |
| Sbjct: | 1 | MKILLAEDEWQMSNVLTTAMTHQGYDVDVVFNGQEAIDKAKDNAYDIMILDIMMPIKSGI | 60 |
| Query: | 68 | EAVKEIRQSGNKSHIIMLTAMAEIDDRVTGLDAGADDYLTKPFSLKELLARLRSMSRRLE | 127 |
| | | EA+KEIR SGN SHIIMLTAMAEI+DRVTGLDAGADDYLTKPFSLKELLARLRSM RR+E | |
| Sbjct: | 61 | EALKEIRASGNCSHIIMLTAMAEINDRVTGLDAGADDYLTKPFSLKELLARLRSMERRVE | 120 |
| Query: | 128 | DFTPNVLSLGRVTLSVGEQELQCENTIRLAGKEAKMLAFFMLNHDKELSTQQLFEHVWGA | 187 |
| | | FTP VL VTL++ EQEL N IRLA KE K++AF MLN K L T+ L++HVW | |
| Sbjct: | 121 | SFTPQVLQFAGVTLNINEQELSAGNAIRLASKEGKLMAFLMLNQGKYLDTKTLYQHVWSD | 180 |
| Query: | 188 | DKDQE | 192 |
| | | +D + | |
| Sbjct: | 181 | QEDYD | 185 |

[10622] Based on this analysis, it was predicted that these proteins and their epitopes could be useful antigens for vaccines or diagnostics.

### EXAMPLE 1936

[10623] A DNA sequence (GBSx2045) was identified in S. agalactiae <SEQ ID 6001> which encodes the amino acid sequence <SEQ ID 6002>. Analysis of this protein sequence reveals the following:

```
Possible site: 26
>>> Seems to have no N-terminal signal sequence
----- Final Results -----
                            bacterial cytoplasm --- Certainty = 0.2627(Affirmative) < succ>
                              bacterial membrane --- Certainty = 0.0000(Not Clear) < succ>
                                bacterial outside --- Certainty = 0.0000(Not Clear) < succ>
```

[10624] The protein has homology with the following sequences in the GENPEPT database.

| >GP: BAB05604 GB: AP001513 unknown conserved protein [Bacillus | | | |
|---|---|---|---|
| halodurans] | | | |
| Identities = 67/182 (36%), Positives = 111/182 (60%), Gaps = 4/182 (2%) | | | |
| Query: | 17 | LEDFSQRIQLENDKAKVETGYKLYEHIIGRIKTSDSMIEKCRRKQLPVTVDSALKTIRDS | 76 |
| | | L++ + +I + + + Y EH+ R+K+ +S++ K +R+ T++S + +RD | |
| Sbjct: | 29 | LQELNTKIDILKQEFQYIHDYNPIEHVSSRVKSPESIVNKIQRRGNDFTLESIRENVRDI | 88 |
| Query: | 77 | IGVRIICGFVNDIYQIIERIKAFDDCRIVVEKDYIQHVKPNGYRSYHVILEIDTPYPDCL | 136 |
| | | G+RI C F +DIY + E++ D +V KDYI++ KPNGYRS H+IL I P + | |
| Sbjct: | 89 | AGIRITCSFESDIYTLSEQLMQQHDISVVETKDYIKNPKPNGYRSLHLILSI----PIFM | 144 |
| Query: | 137 | GNSDGKYYIEIQLRTIAQDSWASLEHQMKYKHDIENPERIVRELKRCADEMASVDLTMQT | 196 |
| | | + Y+E+Q+RTIA D WASLEH++ YK++ PE +++ELK A+ A +D M+ | |
| Sbjct: | 145 | SDRVQDVYVEVQIRTIAMDFWASLEHKIYYKYNKNVPEHLLKELKDAAESAALLDQKMEK | 204 |
| Query: | 197 | IR | 198 |
| | | I+ | |
| Sbjct: | 205 | IQ | 206 |

[10625] A related DNA sequence was identified in S. pyogenes <SEQ ID 6003> which encodes the amino acid sequence <SEQ ID 6004>. Analysis of this protein sequence reveals the following:

```
Possible Site: 33
>>> Seems to have no N-terminal signal sequence
----- Final Results -----
                            bacterial cytoplasm --- Certainty = 0.1057(Affirmative) < succ>
                              bacterial membrane --- Certainty = 0.0000(Not Clear) < succ>
                                bacterial outside --- Certainty = 0.0000(Not Clear) < succ>
```

[10626] An alignment of the GAS and GBS proteins is shown below.

| Identities = 127/206 (61%), Positives = 162/206 (77%) | | | |
|---|---|---|---|
| Query: | 3 | TNIYGDYGRYLPLILEDFSQRIQLENDKAKVETGYKLYEHIIGRIKTSDSMIEKCRRKQL | 62 |
| | | ++IY + YLPL+L+ + I EN K+K ETG+KLYEH RIK+ SMIEKC+RKQL | |
| Sbjct: | 11 | SSIYSGFEVYLPLVLQTITDVIIAENIKSKKETGFKLYEHFTSRIKSEASMIEKCQRKQL | 70 |
| Query: | 63 | PVTVDSALKTIRDSIGVRIICGFVNDIYQIIERIKAFDDCRIVVEKDYIQHVKPNGYRSY | 122 |
| | | P+T SALK I+DSIG+RIICGF++DIY++++ +K+ + EKDYI + KPNGYRSY | |
| Sbjct: | 71 | PLTSKSALKIIKDSIGIRIICGFIDDIYRMVDLLKSIPGMSVNTEKDYILNAKPNGYRSY | 130 |
| Query: | 123 | HVILEIDTPYPDCLGNSDGKYYIEIQLRTIAQDSWASLEHQMKYKHDIENPERIVRELKR | 182 |
| | | H+ILE++T +PD LG G Y+IE+QLRTIAQDSWASLEHQMKYKH + N E I RELKR | |
| Sbjct: | 131 | HLILELETHFPDILGEKKGCYFIEVQLRTIAQDSWASLEHQMKYKHQVANAEMITRELKR | 190 |
| Query: | 183 | CADEMASVDLTMQTIRQLIESGTKKE | 208 |
| | | CADE+AS D+TMQTIRQLI+ T++E | |
| Sbjct: | 191 | CADELASCDVTMQTIRQLIQETTEEE | 216 |

[10627] Based on this analysis, it was predicted that these proteins and their epitopes could be useful antigens for vaccines or diagnostics.

### EXAMPLE 1937

[10628] A DNA sequence (GBSx2046) was identified in S. agalactiae <SEQ ID 6005> which encodes the amino acid sequence <SEQ ID 6006>. Analysis of this protein sequence reveals the following:

```
Possible site: 40
>>> Seems to have no N-terminal signal sequence
----- Final Results -----
                            bacterial cytoplasm --- Certainty = 0.3250(Affirmative) < succ>
                              bacterial membrane --- Certainty = 0.0000(Not Clear) < succ>
                                bacterial outside --- Certainty = 0.0000(Not Clear) < succ>
```

[10629] The protein has homology with the following sequences in the GENPEPT database.

| >GP: CAA37193 GB: X53013 ORF1 (AA 1-384) [Lactococcus lactis] | | | |
|---|---|---|---|
| Identities = 30/55 (54%), Positives = 37/55 (66%) | | | |
| Query: | 1 | MEFYYKTLKRKFINDADTIFIEQSQFEIFIYIETDHNSSSSHVVLDYQSQKEFEK | 55 |
| | | ME +YKTLKR+ +NDA ++ EIF YIET +N+ H LDYQS K+FEK | |
| Sbjct: | 327 | MESFYKTLKRELINDAHFETRAEATQEIFKYIETYYNTKWMHSGLDYQSPKDFEK | 381 |

[10630] A related DNA sequence was identified in S. pyogenes <SEQ ID 6007> which encodes the amino acid sequence <SEQ ID 6008>. Analysis of this protein sequence reveals the following:

```
Possible site: 36
>>> Seems to have no N-terminal signal sequence
----- Final Results -----
                            bacterial cytoplasm --- Certainty = 0.3065(Affirmative) < succ>
                              bacterial membrane --- Certainty = 0.0000(Not Clear) < succ>
                                bacterial outside --- Certainty = 0.0000(Not Clear) < succ>
```

[10631] An alignment of the GAS and GBS proteins is shown below.

| Identities = 31/59 (52%), Positives = 39/59 (65%) | | | |
|---|---|---|---|
| Query: | 1 | MEFYYKTLKRKFINDADTIFIEQSQFEIFIYIETDHNSSSSHVVLDYQSQKEFEKIITN | 59 |
| | | ME +YKTLKR+ +NDA I+Q+Q EIF Y ET +N H L Y S EFEKI+T+ | |
| Sbjct: | 13 | MEAFYKTLKRELVNDAHFATIKQAQLEIFKYSETYYNPKRLHSALGYLSPVEFEKIVTH | 71 |

[10632] Based on this analysis, it was predicted that these proteins and their epitopes could be useful antigens for vaccines or diagnostics.

### EXAMPLE 1938

[10633] A DNA sequence (GBSx2047) was identified in S. agalactiae <SEQ ID 6009> which encodes the amino acid sequence <SEQ ID 6010>. This protein is predicted to be R5 protein. Analysis of this protein sequence reveals the following:

| Possible site: 51 | | | | |
|---|---|---|---|---|
| >>> Seems to have no N-terminal signal sequence | | | | |
| | INTEGRAL | Likelihood = −3.98 | Transmembrane | 30-46 (29-51) |
| | INTEGRAL | Likelihood = −2.76 | Transmembrane | 967-983 (966-985) |

```
----- Final Results -----
                              bacterial membrane --- Certainty = 0.2593(Affirmative) < succ>
                                bacterial outside --- Certainty = 0.0000(Not Clear) < succ>
                            bacterial cytoplasm --- Certainty = 0.0000(Not Clear) < succ>
```

[10634] A related GBS nucleic acid sequence <SEQ ID 8935> which encodes amino acid sequence <SEQ ID 8936> was also identified. Analysis of this protein sequence reveals the following:

```
Lipop: Possible site: −1 Crend: 8
SRCFLG: 0
McG: Length of UR: 2
          Peak Value of UR: 2.44
          Net Charge of CR: 2
McG: Discrim Score: 0.78
GvH: Signal Score (−7.5): −0.0599995
          Possible site: 39
>>> Seems to have a cleavable N-term signal seq.
Amino Acid Composition: calculated from 40
ALOM program count: 0 value: 7.37 threshold: 0.0
PERIPHERAL Likelihood = 7.37 194
modified ALOM score: −1.97
*** Reasoning Step: 3
Rule gpo1
----- Final Results -----
                                bacterial outside --- Certainty = 0.3000(Affirmative) < succ>
                              bacterial membrane --- Certainty = 0.0000(Not Clear) < succ>
                            bacterial cytoplasm --- Certainty = 0.0000(Not Clear) < succ>
LPXTG motif: 944-948
```

[10635] No corresponding DNA sequence was identified in S. pyogenes.

[10636] SEQ ID 8936 (GBS200) was expressed in E. coli as a His-fusion product. SDS-PAGE analysis of total cell extract is shown in FIG. 29 (lane 3; MW 107.4 kDa), in FIG. 169 (lane 4; MW 122 kDa) and in FIG. 238 (lane 11; MW 122 kDa). It was also expressed in E. coli as a GST-fusion product. SDS-PAGE analysis of total cell extract is shown in FIG. 35 (lane 3; MW 132 kDa).

[10637] Purified Thio-GBS200-His is shown in FIG. 244, lane 9.

[10638] Based on this analysis, it was predicted that this protein and its epitopes, could be useful antigens for vaccines or diagnostics.

### EXAMPLE 1939

[10639] A DNA sequence (GBSx2048) was identified in S. agalactiae <SEQ ID 6011> which encodes the amino acid sequence <SEQ ID 6012>. This protein is predicted to be a 16.1 kDa transcriptional regulator. Analysis of this protein sequence reveals the following:

```
Possible site: 25
>>> Seems to have no N-terminal signal sequence
----- Final Results -----
                            bacterial cytoplasm --- Certainty = 0.3919(Affirmative) < succ>
                              bacterial membrane --- Certainty = 0.0000(Not Clear) < succ>
                                bacterial outside --- Certainty = 0.0000(Not Clear) < succ>
```

[10640] A related GBS nucleic acid sequence <SEQ ID 9953> which encodes amino acid sequence <SEQ ID 9954> was also identified.

[10641] The protein has homology with the following sequences in the GENPEPT database.

| >GP: CAB16108 GB: Z99124 similar to transcriptional regulator (MarR | | | |
|---|---|---|---|
| family) [Bacillus subtilis] | | | |
| Identities = 30/114 (26%), Positives = 59/114 (51%), Gaps = 3/114 (2%) | | | |
| Query: | 29 | DVEHLAGPQGHLVMYLYKHPDKDMSIKAVEEILHISKSVASNLVKRMEKNGFIAIVPSKT | 88 |
| | | D++ G +LV +Y++P + + + E++ + ++ A+ +K++E GFI +P + | |
| Sbjct: | 25 | DLDLTRGQYLYLVR-IYENPG--IIQEKLAEMIKVDRTTAARAIKKLEMQGFIQKLPDEQ | 81 |
| Query: | 89 | DKRVKYLYLTHLGKKKATQFEIFLEKLHSTMLAGITKEEIRTTKKVIRTLAKNM | 142 |
| | | +K++K L+ T GKK E L+G T EE T ++ + KN+ | |
| Sbjct: | 82 | NKKIKKLFPTEKGKKVYPLLRREGEHSTEVALSGFTSEEKETISALLHRVRKNI | 135 |

[10642] A related DNA sequence was identified in S. pyogenes <SEQ ID 6013> which encodes the amino acid sequence <SEQ ID 6014>. Analysis of this protein sequence reveals the following:

```
Possible site: 43
>>> Seems to have no N-terminal signal sequence
----- Final Results -----
                            bacterial cytoplasm --- Certainty = 0.4175(Affirmative) < succ>
                              bacterial membrane --- Certainty = 0.0000(Not Clear) < succ>
                                bacterial outside --- Certainty = 0.0000(Not Clear) < succ>
```

[10643] An alignment of the GAS and GBS proteins is shown below.

| Identities = 27/64 (42%), Positives = 46/64 (71%) | | | |
|---|---|---|---|
| Query: | 3 | MENPLQKARILVNQLEKYLDHYAKEYDVEHLAGPQGHLVMYLYKHPDKDMSIKAVEEILH | 62 |
| | | M + R L++Q+E+ D AK+YDVEHLAGPQG+++++L KH ++++ +K +E+ L | |
| Sbjct: | 1 | MSQVIGDLRELIHQIEQISDEIAKKYDVEHLAGPQGYVLVFLAKHQNQEIFVKDIEKQLR | 60 |
| Query: | 63 | ISKS | 66 |
| | | I +S | |
| Sbjct: | 61 | IFQS | 64 |

[10644] Based on this analysis, it was predicted that these proteins and their epitopes could be useful antigens for vaccines or diagnostics.

### EXAMPLE 1940

[10645] A DNA sequence (GBSx2049) was identified in S. agalactiae <SEQ ID 6015> which encodes the amino acid sequence <SEQ ID 6016>. This protein is predicted to be 5′-nucleotidase family protein. Analysis of this protein sequence reveals the following:

| Possible site: 27 | | | | |
|---|---|---|---|---|
| >>> Seems to have a cleavable N-term signal seq. | | | | |
| | INTEGRAL | Likelihood = −2.66 | Transmembrane | 668-684 (665-684) |

```
----- Final Results -----
                              bacterial membrane --- Certainty = 0.2062(Affirmative) < succ>
                                bacterial outside --- Certainty = 0.0000(Not Clear) < succ>
                            bacterial cytoplasm --- Certainty = 0.0000(Not Clear) < succ>
```

[10646] The protein has homology with the following sequences in the GENPEPT database.

| >GP: CAB12747 GB: Z99108 similar to 5′-nucleotidase [Bacillus subtilis] | | | |
|---|---|---|---|
| Identities = 178/535 (33%), Positives = 270/535 (50%), Gaps = 55/535 (10%) | | | |
| Query: | 28 | DQVGVQVIGVNDFHGALDNTGTANMPDGKVANAGTAAQLD---AYMDDAQKDFKQTNPNG | 84 |
| | | + V ++++ +ND HG +D ++ DG GT ++D AY+ + + + K | |
| Sbjct: | 586 | EHVPLRILSMNDLHGKIDQQYELDL-DGNGTVDGTFGRMDYAAAYLKEKKAEKKN----- | 639 |
| Query: | 85 | ESIRVQAGDMVGASPANSGLLQDEPTVKNFNAMNVEYGTLGNHEFDEGLAEYNRIVTGKA | 144 |
| | | S+ V AGDM+G S S LLQDEPTV+ + + GT+GNHEFDEG E RI+ G | |
| Sbjct: | 640 | -SLIVHAGDMIGGSSPVSSLLQDEPTVELMEDIGFDVGTVGNHEFDEGTDELLRILNG-G | 697 |
| Query: | 145 | PAPDSNINNITKSYPHEAAKQEIVVANVIDKVNKQIPYNWKPYAIKNIPVNNKSVNVGFI | 204 |
| | | P +++P +V AN ++ +P+ +N + V V FI | |
| Sbjct: | 698 | DHPKGTSGYDGQNFP-------LVCANC------KMKSTGEPFLPAYDIINVEGVPVAFI | 744 |
| Query: | 205 | GIVTKDIPNLVLRKNYEQYEFLDEAETIVKYAKELQAKNVKAIVVLAHVPATSKNDIAEG | 264 |
| | | G+VT+ +V+ + + EF DEA + K A+EL+ K VKAI VLAH+ A + G | |
| Sbjct: | 745 | GVVTQSAAGMVMPEGIKNIEFTDEATAVNKAAEELKKKGVKAIAVLAHMSAEQNGNAITG | 804 |
| Query: | 265 | EAAEMMKKVNQLFPENSVDIVFAGHNHQYTNGLVGKTRIVQALSQGKAYADVRGVLDTDT | 324 |
| | | E+A++ K ++ +D++FA HNHQ NG V IVQA GKA V +D T | |
| Sbjct: | 805 | ESADLANKT-----DSEIDVIFAAHNHQVVNGEVNGKLIVQAFEYGKAIGVVDVEIDKTT | 859 |
| Query: | 325 | QDFIETPSAKVIAVAPGKKTGSADIQAIVDQANTIVKQVTEAKIGTAEVSVMITRSVDQD | 384 |
| | | +D ++ SA+++ V K AI+ + TI + + +G A V + S D D | |
| Sbjct: | 860 | KDIVK-KSAEIVYVDQSKIEPDVSASAILKKYETIAEPIISEVVGEAAVDMEGGYSNDGD | 918 |
| Query: | 385 | NVSPVGSLITEAQLAIARKSWPDIDFAMTNNGGIRADLLIKPDGTITWGAAQAVQPFGNI | 444 |
| | | +P+G+LI + A + DFA+ N GGIR L G ITWG +QPFGN+ | |
| Sbjct: | 919 | --TPLGNLIADGMRAAMK-----TDFALMNGGGIREAL---KKGPITWGDLYNIQPFGNV | 968 |
| Query: | 445 | LQVVEITGRDLYKALNEQYDQKQNFFLQIAGLRYTYTDNKEGGEETPFKVVKAYKSNGEE | 504 |
| | | L +EI G+DL + +N Q I+G +TYT +KE G+ K+ ++G E | |
| Sbjct: | 969 | LTKLEIKGKDLREIINAQISPVFGPDYSISG--FTYTWDKETGKAVDMKM-----ADGTE | 1021 |
| Query: | 505 | INPDAKYKLVINDFLFGGGDGFASFRNAKLLGAINP-----DTEVFMAYITDLEK | 554 |
| | | I PDA Y L +N+F+ A ++ LLG NP D E + Y+ ++ | |
| Sbjct: | 1022 | IQPDATYTLTVNNFMATATG--AKYQPIGLLGK-NPVTGPEDLEATVEYVKSFDE | 1073 |

[10647] A related DNA sequence was identified in S. pyogenes <SEQ ID 1607> which encodes the amino acid sequence <SEQ ID 1608>. Analysis of this protein sequence reveals the following:

| Possible site: 40 | | | | |
|---|---|---|---|---|
| >>> Seems to have no N-terminal signal sequence | | | | |
| | INTEGRAL | Likelihood = −4.67 | Transmembrane | 662-678 (661-679) |
| | INTEGRAL | Likelihood = −2.02 | Transmembrane | 19-35 (18-35) |

```
----- Final Results -----
                              bacterial membrane --- Certainty = 0.2869(Affirmative) < succ>
                                bacterial outside --- Certainty = 0.0000(Not Clear) < succ>
                            bacterial cytoplasm --- Certainty = 0.0000(Not Clear) < succ>
```

[10648] An alignment of the GAS and GBS proteins is shown below.

| Identities = 415/688 (60%), Positives = 517/688 (74%), Gaps = 21/688 (3%) | | | |
|---|---|---|---|
| Query: | 1 | MKKKIILKSSVLGLVAGTSIMFSSVFADQVGVQVIGVNDFHGALDNTGTANMPDGKVANA | 60 |
| | | MKK ILKSSVL ++ +++ + V ADQV VQ +GVNDFHGALDNTGTA P GK+ NA | |
| Sbjct: | 14 | MKKYFILKSSVLSILTSFTLLVTDVQADQVDVQFLGVNDFHGALDNTGTAYTPSGKIPNA | 73 |
| Query: | 61 | GTAAQLDAYMDDAQKDFKQTNPNGESIRVQAGDMVGASPANSGLLQDEPTVKNFNAMNVE | 120 |
| | | GTAAQL AYMDDA+ DFKQ N +G SIRVQAGDMVGASPANS LLQDEPTVK FN M E | |
| Sbjct: | 74 | GTAAQLGAYMDDAEIDFKQANQDGTSIRVQAGDMVGASPANSALLQDEPTVKVFNKMKFE | 133 |
| Query: | 121 | YGTLGNHEFDEGLAEYNRIVTGKAPAPDSNINNITKSYPHEAAKQEIVVANVIDKVNKQI | 180 |
| | | YGTLGNHEFDEGL E+NRI+TG+AP P+S IN+ITK Y HEA+ Q IV+ANVIDK K I | |
| Sbjct: | 134 | YGTLGNHEFDEGLDEFNRIMTGQAPDPESTINDITKQYEHEASHQTIVIANVIDKKTKDI | 193 |
| Query: | 181 | PYNWKPYAIKNIPVNNKSVNVGFIGIVTKDIPNLVLRKNYEQYEFLDEAETIVKYAKELQ | 240 |
| | | PY WKPYAIK+I +N+K V +GFIG+VT +IPNLVL++NYE Y+FLD AETI KYAKELQ | |
| Sbjct: | 194 | PYGWKPYAIKDIAINDKIVKIGFIGVVTTEIPNLVLKQNYEHYQFLDVAETIAKYAKELQ | 253 |
| Query: | 241 | AKNVKAIVVLAHVPATSKNDIAEGEAAEMMKKVNQLFPENSVDIVFAGHNHQYTNGLVGK | 300 |
| | | ++V AIVVLAHVPATSK+ + + E A +M+KVNQ++PE+S+DI+FAGHNHQYTNG +GK | |
| Sbjct: | 254 | EQHVHAIVVLAHVPATSKDGVVDHEMATVMEKVNQIYPEHSIDIIFAGHNHQYTNGTIGK | 313 |
| Query: | 301 | TRIVQALSQGKAYADVRGVLDTDTQDFIETPSAKVIAVAPGKKTGSADIQAIVDQANTIV | 360 |
| | | TRIVQALSQGKAYADVRG LDTDT DFI+TPSA V+AVAPG KT ++DI+AI++ AN IV | |
| Sbjct: | 314 | TRIVQALSQGKAYADVRGTLDTDTNDFIKTPSANVVAVAPGIKTENSDIKAIINHANDIV | 373 |
| Query: | 361 | KQVTEAKIGTAEVSVMITRSVDQDNVSPVGSLITEAQLAIARKSWPDIDFAMTNNGGIRA | 420 |
| | | K VTE KIGTA S I+++ + D SPVG+L T AQL IA+K++P +DFAMTNNGGIR+ | |
| Sbjct: | 374 | KTVTERKIGTATNSSTISKTENIDKESPVGNLATTAQLTIAKKTFPTVDFAMTNNGGIRS | 433 |
| Query: | 421 | DLLIKPDGTITWGAAQAVQPFGNILQVVEITGRDLYKALNEQYDQKQNFFLQIAGLRYTY | 480 |
| | | DL++K D TITWGAAQAVQPFGNILQV+++TG+ +Y LN+QYD+ Q +FLQ++GL YTY | |
| Sbjct: | 434 | DLVVKNDRTITWGAAQAVQPFGNILQVIQMTGQHIYDVLNQQYDENQTYFLQMSGLTYTY | 493 |
| Query: | 481 | TDNKEGGEETPFKVVKAYKSNGEEINPDAKYKLVINDFLFGGGDGFASFRNAKLLGAINP | 540 |
| | | TDN +TPFK+VK YK NGEEIN Y +V+NDFL+GGGDGF++F+ AKL+GAIN | |
| Sbjct: | 494 | TDNDPKNSDTPFKIVKVYKDNGEEINLTTTYTVVVNDFLYGGGDGFSAFKKAKLIGAINT | 553 |
| Query: | 541 | DTEVFMAYITDLEKAGKKVSVPNNKPKIYVTMKMVNETITQNDGTHSIIKKLYLDRQGNI | 600 |
| | | DTE F+ YIT+LE +GK V+ K YVT + + T + G HSII K++ +R GN | |
| Sbjct: | 554 | DTEAFITYITNLEASGKTVNATIKGVKNYVTSNLESSTKVNSAGKHSIISKVFRNRDGNT | 613 |
| Query: | 601 | VAQEIVSDTLNQTKSKSTKINPVTTIHKKQLHQFTAINPMRNYGKPSNSTTVKSKQLPKT | 660 |
| | | V+ E++SD L T++ + + T +N T+ S LP T | |
| Sbjct: | 614 | VSSEVISDLLTSTENTNNSLGKKET--------------------TTNKNTISSSTLPIT | 653 |
| Query: | 661 | NSEYGQSFLMSVFG-VGLIGIALNTKKK | 687 |
| | | Y S +M++ + L G+ KK+ | |
| Sbjct: | 654 | GDNYKMSPIMTILALISLGGLNAFIKKR | 681 |

[10649] SEQ ID 6016 (GBS328) was expressed in E. coli as a His-fusion product. SDS-PAGE analysis of total cell extract is shown in FIG. 69 (lane 4; MW 73 kDa). The GBS328-His fusion product was purified (FIG. 213, lane 9) and used to immunise mice. The resulting antiserum was used for FACS (FIG. 268), which confirmed that the protein is immunoaccessible on GBS bacteria.

[10650] Based on this analysis, it was predicted that these proteins and their epitopes could be useful antigens for vaccines or diagnostics.

### EXAMPLE 1941

[10651] A DNA sequence (GBSx2050) was identified in S. agalactiae <SEQ ID 6017> which encodes the amino acid sequence <SEQ ID 6018>. This protein is predicted to be peptide deformylase (def-2). Analysis of this protein sequence reveals the following:

| Possible site: 21 | | | | |
|---|---|---|---|---|
| >>> Seems to have no N-terminal signal sequence | | | | |
| | INTEGRAL | Likelihood = −1.70 | Transmembrane | 55-71 (55-74) |

```
----- Final Results -----
                              bacterial membrane --- Certainty = 0.1680(Affirmative) < succ>
                                bacterial outside --- Certainty = 0.0000(Not Clear) < succ>
                            bacterial cytoplasm --- Certainty = 0.0000(Not Clear) < succ>
```

[10652] The protein has homology with the following sequences in the GENPEPT database.

| >GP: CAB09662 GB: Z96934 peptide deformylase [Clostridium | | | |
|---|---|---|---|
| beijerinckii] | | | |
| Identities = 71/136 (52%), Positives = 96/136 (70%) | | | |
| Query: | 1 | MIKPIVRDTFFLQQKSQMASRADVSLAKDLQETLHANQNYCVGMAANMIGSLKRVIIINV | 60 |
| | | MIKPIV+D FL QKS+ A++ D+ + DL +TL AN +CVG+AANMIG KR+++ V | |
| Sbjct: | 1 | MIKPIVKDILFLGQKSEEATKNDMVVIDDLIDTLRANLEHCVGLAANMIGVKKRILVFTV | 60 |
| Query: | 61 | GITNLVMFNPVVVAKSDPYETEESCLSLVGCRSTQRYCHITISYRDINWKEQQIKLTDFP | 120 |
| | | G + M NPV++ K PYETEESCLSL+G R T+RY I ++Y D N+ +++ F | |
| Sbjct: | 61 | GNLIVPMINPVILKKEKPYETEESCLSLIGFRKTKRYETIEVTYLDRNFNKKKQVFNGFT | 120 |
| Query: | 121 | AQICQHELDHLEGILI | 136 |
| | | AQI QHE+DH EGI+I | |
| Sbjct: | 121 | AQIIQHEMDHFEGIII | 136 |

[10653] A related DNA sequence was identified in S. pyogenes <SEQ ID 6019> which encodes the amino acid sequence <SEQ ID 6020>. Analysis of this protein sequence reveals the following:

| Possible site: 45 | | | | |
|---|---|---|---|---|
| >>> Seems to have no N-terminal signal sequence | | | | |
| | INTEGRAL | Likelihood = −3.61 | Transmembrane | 55-71 (55-73) |

```
----- Final Results -----
                              bacterial membrane --- Certainty = 0.2444(Affirmative) < succ>
                                bacterial outside --- Certainty = 0.0000(Not Clear) < succ>
                            bacterial cytoplasm --- Certainty = 0.0000 (Not Clear) < succ>
```

[10654] An alignment of the GAS and GBS proteins is shown below.

| Identities = 77/136 (56%), Positives = 103/136 (75%) | | | |
|---|---|---|---|
| Query: | 1 | MIKPIVRDTFFLQQKSQMASRADVSLAKDLQETLHANQNYCVGMAANMIGSLKRVIIINV | 60 |
| | | MI+ I+ D F LQQK+Q+A + D+ + +DLQ+TL + C+GMAANMIG KR++I+++ | |
| Sbjct: | 1 | MIREIITDHFLLQQKAQVAKKEDLWIGQDLQDTLAFYRQECLGMAANMIGEQKRIVIVSM | 60 |
| Query: | 61 | GITNLVMFNPVVVAKSDPYETEESCLSLVGCRSTQRYCHITISYRDINWKEQQIKLTDFP | 120 |
| | | G +LVMFNPV+V+K Y+T+ESCLSL G R TQRY IT+ Y D NW+ +++ LT | |
| Sbjct: | 61 | GFIDLVMFNPVMVSKKGIYQTKESCLSLSGYRKTQRYDKITVEYLDHNWRPKRLSLTGLT | 120 |
| Query: | 121 | AQICQHELDHLEGILI | 136 |
| | | AQICQHELDHLEGILI | |
| Sbjct: | 121 | AQICQHELDHLEGILI | 136 |

[10655] Based on this analysis, it was predicted that these proteins and their epitopes could be useful antigens for vaccines or diagnostics.

### EXAMPLE 1942

[10656] A DNA sequence (GBSx2051) was identified in S. agalactiae <SEQ ID 6021> which encodes the amino acid sequence <SEQ ID 6022>. Analysis of this protein sequence reveals the following:

```
Possible site: 28
>>> Seems to have no N-terminal signal sequence
----- Final Results -----
                            bacterial cytoplasm --- Certainty = 0.2880(Affirmative) < succ>
                              bacterial membrane --- Certainty = 0.0000(Not Clear) < succ>
                                bacterial outside --- Certainty = 0.0000(Not Clear) < succ>
```

[10657] The protein has homology with the following sequences in the GENPEPT database.

| >GP: BAB05820 GB: AP001514 NADP-specific glutamate dehydrogenase | | | |
|---|---|---|---|
| [Bacillus halodurans] | | | |
| Identities = 298/444 (67%), Positives = 362/444 (81%), Gaps = 2/444 (0%) | | | |
| Query: | 7 | YVASVLEKVKKQNEHEEEFLQAVEEVFESLVPVFDKYPQYIEENLLERLVEPERVISFRV | 66 |
| | | YV V E VK++N +E EF QAV+EVF+SL+PV K+PQY+++ +LER+VEPERVISFRV | |
| Sbjct: | 16 | YVQHVYETVKRRNPNEHEFHQAVKEVFDSLLPVLVKHPQYVKQAILERIVEPERVISFRV | 75 |
| Query: | 67 | PWVDDKGQVQVNRGYRVQFSSAIGPYKGGLRFHPTVTQSIVKFLGFEQIFKNSLTGLPIG | 126 |
| | | PWVDD+G VQVNRG+RVQF+SA+GPYKGGLRFHP+V SI+KFLGFEQIFKN+LTG PIG | |
| Sbjct: | 76 | PWVDDQGNVQVNRGFRVQFNSALGPYKGGLRFHPSVNASIIKFLGFEQIFKNALTGQPIG | 135 |
| Query: | 127 | GGKGGSNFDPKGKSDNEVMRFTQSFMTELQKYIGPDLDVPAGDIGVGGREIGYLYGQYKR | 186 |
| | | GGKGGS+FDPKGKSD E+MRF+QSFM+EL YIGPD+DVPAGDIGVG +EIGY++GQYK+ | |
| Sbjct: | 136 | GGKGGSDFDPKGKSDGEIMRFSQSFMSELSNYIGPDIDVPAGDIGVGAKEIGYMFGQYKK | 195 |
| Query: | 187 | L-NGYQNGVLTGKGLTYGGSLARTEATGYGAVYFAKEMLAARGQDLTGKVALVSGSGNVA | 245 |
| | | + G++ GVLTGKG+ YGGSLAR EATGYG VYF +EM+ G G +VSGSGNV+ | |
| Sbjct: | 196 | MRGGFEAGVLTGKGIGYGGSLARKEATGYGTVYFVEEMIKDHGFSFAGSTVVVSGSGNVS | 255 |
| Query: | 246 | IYATEKLQELGATVVAVSDSSGYVYDPDGIDLETLKQIKEVERARIVKYTEKHPKANFTP | 305 |
| | | IYA EK +LGA VVA SDS GYVYD +GIDL+T+K++KEVER RI +Y +HP A++ | |
| Sbjct: | 256 | IYAMEKAMQLGAKVVACSDSGGYVYDKNGIDLQTVKRLKEVERKRISEYVNEHPHAHYVQ | 315 |
| Query: | 306 | ADQGSIWSIKADLAFPCATQNELDEEDAKLLVENGVLAVTEGANMPSTLGAIKVFQKAGV | 365 |
| | | G IWS+ D+A PCATQNELDE A +L+ NGV AV EGANMPSTL A+ FQ+ GV | |
| Sbjct: | 316 | GCSG-IWSVPCDIALPCATQNELDEAAATMLIANGVKAVGEGANMPSTLQAVHTFQEHGV | 374 |
| Query: | 366 | AFGPAKAANAGGVAVSALEMAQNSSRRAWTFEEVDQELQRIMKTIFVNASEAADEFGDSG | 425 |
| | | F PAKAANAGGV+VSALEMAQNS+R AWTFEEVD +L IMK I+ + +AA+ + SG | |
| Sbjct: | 375 | LFAPAKAANAGGVSVSALEMAQNSTRLAWTFEEVDAKLYEIMKNIYRESIKAAELYEASG | 434 |
| Query: | 426 | NLVLGANIAGFLKVAQAMSAQGIV | 449 |
| | | NLV+GANIAGF+KVA AM + G+V | |
| Sbjct: | 435 | NLVVGANIAGFVKVADAMISHGVV | 458 |

[10658] No corresponding DNA sequence was identified in S. pyogenes.

[10659] Based on this analysis, it was predicted that this protein and its epitopes, could be useful antigens for vaccines or diagnostics.

### EXAMPLE 1943

[10660] A DNA sequence (GBSx2052) was identified in S. agalactiae <SEQ ID 6023> which encodes the amino acid sequence <SEQ ID 6024>. Analysis of this protein sequence reveals the following:

| Possible site: 58 | | | | |
|---|---|---|---|---|
| >>> Seems to have no N-terminal signal sequence | | | | |
| | INTEGRAL | Likelihood = −8.55 | Transmembrane | 61-77 (55-87) |
| | INTEGRAL | Likelihood = −7.70 | Transmembrane | 177-193 (175-202) |
| | INTEGRAL | Likelihood = −7.06 | Transmembrane | 99-115 (95-122) |
| | INTEGRAL | Likelihood = −5.89 | Transmembrane | 42-58 (40-60) |
| | INTEGRAL | Likelihood = −3.08 | Transmembrane | 160-176 (159-176) |
| | INTEGRAL | Likelihood = −2.44 | Transmembrane | 124-140 (122-144) |

```
----- Final Results -----
                              bacterial membrane --- Certainty = 0.4418(Affirmative) < succ>
                                bacterial outside --- Certainty = 0.0000(Not Clear) < succ>
                            bacterial cytoplasm --- Certainty = 0.0000(Not Clear) < succ>
```

[10661] A related GBS nucleic acid sequence <SEQ ID 9955> which encodes amino acid sequence <SEQ ID 9956> was also identified.

[10662] The protein has no significant homology with any sequences in the GENPEPT database.

[10663] No corresponding DNA sequence was identified in S. pyogenes.

[10664] Based on this analysis, it was predicted that this protein and its epitopes, could be useful antigens for vaccines or diagnostics.

### EXAMPLE 1944

[10665] A DNA sequence (GBSx2053) was identified in S. agalactiae <SEQ ID 6025> which encodes the amino acid sequence <SEQ ID 6026>. This protein is predicted to be ABC transporter, ATP-binding protein (msbA). Analysis of this protein sequence reveals the following:

| Possible site: 37 | | | | |
|---|---|---|---|---|
| >>> Seems to have a cleavable N-term signal seq. | | | | |
| | INTEGRAL | Likelihood = −10.72 | Transmembrane | 152-168 (147-192) |
| | INTEGRAL | Likelihood = −5.47 | Transmembrane | 267-283 (264-288) |
| | INTEGRAL | Likelihood = −4.30 | Transmembrane | 171-187 (169-192) |
| | INTEGRAL | Likelihood = −2.13 | Transmembrane | 67-83 (67-83) |
| | INTEGRAL | Likelihood = −0.32 | Transmembrane | 493-509 (493-509) |

```
----- Final Results -----
                              bacterial membrane --- Certainty = 0.5288(Affirmative) < succ>
                                bacterial outside --- Certainty = 0.0000(Not Clear) < succ>
                            bacterial cytoplasm --- Certainty = 0.0000(Not Clear) < succ>
```

[10666] The protein has homology with the following sequences in the GENPEPT database.

| >GP: CAB69752 GB: AL137187 putative ABC transporter [Streptomyces coelicolor | | | |
|---|---|---|---|
| A3(2)] | | | |
| Identities = 269/611 (44%), Positives = 392/611 (64%), Gaps = 31/611 (5%) | | | |
| Query: | 9 | RLWSYLTRYKATLFLAIFLKVLSSFMSILEPFILGLAITELTANLV--DMAKG------- | 59 |
| | | RL S +ATLF + V+S ++++ P ILG A + A +V DM G | |
| Sbjct: | 27 | RLVSQFRPERATLFTLLACVVVSVGLNVVGPKILGRATDLVFAGIVGRDMPSGATKEQVL | 86 |
| Query: | 60 | --------------------VSGAELNVPYIAGILIIYFFRGVFYELGSYGSNYFMTTVV | 99 |
| | | V G ++ + +L++ L + + V | |
| Sbjct: | 87 | ATMREHGDGNVADMLRSTDFVPGQGIDFGAVGEVLLLALATFAVAGLLMAVATRLVNRAV | 146 |
| Query: | 100 | QKSIRDIRHDLNRKINKVPVSYFDKHQFGDMLGRFTSDVETVSNALQQSFLQIINAFLSI | 159 |
| | | +++ +R D+ K++++P+SYFDK Q G++L R T+D++ + LQQS Q+IN+ L+I | |
| Sbjct: | 147 | NRTMFRLREDVQTKLSRLPLSYFDKRQRGEVLSRATNDIDNIGQTLQQSMGQLINSLLTI | 206 |
| Query: | 160 | ILVVVMVLYLNVPLAMIIIACIPVTYFSAQAILKRSQPYFKEQAKILGELNGFVQEKLTG | 219 |
| | | I V+ M+ Y++ LA++ + +P+++ A + KRSQP F +Q + G+LN ++E TG | |
| Sbjct: | 207 | IGVLAMMFYVSWILALVALVTVPLSFVVATRVGKRSQPQFVQQWRSTGQLNAHIEEMYTG | 266 |
| Query: | 220 | FNIIKLYGREEASSQEFRDITDNLRHVGFKASFISGIMMPVLNSISDFIYLIIAFVGGLQ | 279 |
| | | ++K++GR+E S+++F + D L GFKA F SGIM P++ +S+ Y+++A VGGL+ | |
| Sbjct: | 267 | HALVKVFGRQEESAKQFASQNDALYEAGFKAQFNSGIMQPLMMCVSNLNYVLVAVVGGLR | 326 |
| Query: | 280 | VIAGTLTIGNMQAFVQYVWQISQPVQTITQLAGVLQSAKSSLERIFEVLD-EEEEANQVT | 338 |
| | | V +G L+IG++QAF+QY Q S P+ + +A ++QS +S ER+FE+LD EE+ A+ + | |
| Sbjct: | 327 | VASGQLSIGDVQAFIQYSRQFSMPLTQVASMANLVQSGVASAERVFELLDAEEQSADPIP | 386 |
| Query: | 339 | EKLSHDLTGQVSFHGVDFHYSPDKPLIRDFNLDVEPGQMIAIVGPTGAGKTTLINLLMRF | 398 |
| | | DL G+V V F Y P+KPLI D +L VEPG +AIVGPTGAGKTTL+NLLMRF | |
| Sbjct: | 387 | GARPEDLRGRVELEHVSFRYDPEKPLIEDLSLKVEPGHTVAIVGPTGAGKTTLVNLLMRF | 446 |
| Query: | 399 | YDVSEGAITVDGHDIRHLSRQDFRQQFGMVLQDAWLYEGTIKENLRFG-NLEASDEDIVA | 457 |
| | | Y+VS G IT+DG DI +SR + R GMVLQD WL+ GTI EN+ +G + E + +I | |
| Sbjct: | 447 | YEVSGGRITLDGVDIAKMSRDELRAGIGMVLQDTWLFGGTIAENIAYGASREVTRGEIEE | 506 |
| Query: | 458 | AAKAANVDHFIRTLPGGYNMVMNQESSNISLGQKQLLTIARALLADPKILILDEATSSVD | 517 |
| | | AA+AA+ D F+RTLP GY+ V++ E + +S G+KQL+TIARA L+DP IL+LDEATSSVD | |
| Sbjct: | 507 | AARAAHADRFVRTLPDGYDTVIDDEGTGVSAGEKQLITIARAFLSDPVILVLDEATSSVD | 566 |
| Query: | 518 | TRLELLIQKAMKKLMEGRTSFVIAHRLSTIQEADNILVLKDGQIIEQGNHQKLLADKGFY | 577 |
| | | TR E+LIQKAM KL GRTSFVIAHRLSTI++AD ILV++DG I+EQG H +LL G Y | |
| Sbjct: | 567 | TRTEVLIQKAMAKLAHGRTSFVIAHRLSTIRDADTILVMEDGAIVEQGAHTELLTADGAY | 626 |
| Query: | 578 | YELYNSQFSNS | 588 |
| | | LY +QF+ + | |
| Sbjct: | 627 | ARLYKAQFAEA | 637 |

[10667] There is also homology to SEQ IDs 160 and 6546.

[10668] Based on this analysis, it was predicted that this protein and its epitopes, could be useful antigens for vaccines or diagnostics.

### EXAMPLE 1945

[10669] A DNA sequence (GBSx2054) was identified in S. agalactiae <SEQ ID 6027> which encodes the amino acid sequence <SEQ ID 6028>. Analysis of this protein sequence reveals the following:

| Possible site: 37 | | | | |
|---|---|---|---|---|
| >>> Seems to have a cleavable N-term signal seq. | | | | |
| | INTEGRAL | Likelihood = −10.88 | Transmembrane | 242-258 (235-263) |
| | INTEGRAL | Likelihood = −9.82 | Transmembrane | 159-175 (129-177) |
| | INTEGRAL | Likelihood = −9.71 | Transmembrane | 52-68 (49-77) |
| | INTEGRAL | Likelihood = −8.49 | Transmembrane | 134-150 (129-158) |
| | INTEGRAL | Likelihood = −1.17 | Transmembrane | 272-288 (272-289) |

```
----- Final Results -----
                              bacterial membrane --- Certainty = 0.5352(Affirmative) < succ>
                                bacterial outside --- Certainty = 0.0000(Not Clear) < succ>
                            bacterial cytoplasm --- Certainty = 0.0000(Not Clear) < succ>
```

[10670] The protein has homology with the following sequences in the GENPEPT database.

| >GP: CAB69751 GB: AL137187 putative ABC transporter [Streptomyces | | | |
|---|---|---|---|
| coelicolor A3(2)] | | | |
| Identities = 226/565 (40%), Positives = 342/565 (60%), Gaps = 1/565 (0%) | | | |
| Query: | 6 | SYLKRYPNWLWLDLLGAMLFVTVILGMPTALAGMIDNGVTKGDRTGVYLWTFIMFIFVVL | 65 |
| | | +YL+ Y + L + L L +PT A +ID GV KGD + + +M + | |
| Sbjct: | 8 | TYLRPYKKPIALLVALQFLQTCASLYLPTLNAHIIDEGVVKGDSGYILSYGALMIGISLA | 67 |
| Query: | 66 | GIIGRITMAYASSRLTTTMIRDMRNDMYAKLQEYSHHEYEQIGVSSLVTRMTSDTFVLMQ | 125 |
| | | ++ I + +R + RD+R ++ ++Q +S E G SL+TR T+D + | |
| Sbjct: | 68 | QVVCNIGAVFYGARTAAALGRDVRGAVFDRVQSFSAREVGHFGAPSLITRTTNDVQQVQM | 127 |
| Query: | 126 | FAEMSLRLGLVTPMVMIFSVVMILITSPSLAWLVAVAMPLLVGVILYVAIKTKPLSERQQ | 185 |
| | | A M+ L + P++ + +VM L L+ ++ +P+L + + K +PL + Q | |
| Sbjct: | 128 | LALMTFTLMVSAPIMCVGGIVMALGLDVPLSGVLLGVVPVLAICVTLIVRKLRPLFRKMQ | 187 |
| Query: | 186 | TMLDKINQYVRENLTGLRVVRAFARENFQSQKFQVANQRYTDTSTGLFKLTGLTEPLFVQ | 245 |
| | | LD +N+ +RE +TG RV+RAF R+ ++ Q+F+ AN T+ + G L L P+ + | |
| Sbjct: | 188 | VRLDTVNRVLREQITGNRVIRAFVRDEYEQQRFRKANTELTEVALGTGNLLALMFPVVMT | 247 |
| Query: | 246 | IIIAMIVAIVWFALDPLQRGAIKIGDLVAFIEYSFHALFSFLLFANLFTMYPRMVVSSHR | 305 |
| | | ++ +A+VWF + G ++IGDL AF+ Y + S ++ +F M PR V + R | |
| Sbjct: | 248 | VVNLSSIAVVWFGAHRIDSGGMQIGDLTAFLAYLMQIVMSVMMATFMFMMVPRAEVCAER | 307 |
| Query: | 306 | IREVMDMPISINPNTEGVTDTKLKGHLEFDNVTFAYPGETESPVLHDISFKAKPGETIAF | 365 |
| | | I+EV++ S+ P VT+ + GHLE F YPG E PVL I A+PGET A | |
| Sbjct: | 308 | IQEVLETESSVVPPVAPVTELRRHGHLEIREAGFRYPG-AEEPVLRHIDLVARPGETTAV | 366 |
| Query: | 366 | IGSTGSGKSSLVNLIPRFYDVTLGKILVDGVDVRDYNLKSLRQKIGFIPQKALLFTGTIG | 425 |
| | | IGSTGSGKS+L+ L+PR +D T G++LV+GVDVR + K+L + + +PQK LF GT+ | |
| Sbjct: | 367 | IGSTGSGKSTLLGLVPRLFDATDGEVLVNGVDVRTVDPKTLAKVVSLVPQKPYLFAGTVA | 426 |
| Query: | 426 | ENLKYGKADATIDDLRQAVDISQAKEFIESHQEAFETHLAEGGSNLSGGQKQRLSIARAV | 485 |
| | | NL+YG DAT ++L A+ ++QAKEF+ + + +A+GG+N+SGGQ+QRL+IAR + | |
| Sbjct: | 427 | TNLRYGNPDATDEELWHALAVAQAKEFVSELEGGLDAPIAQGGTNVSGGQRQRLAIARTL | 486 |
| Query: | 486 | VKDPDLYIFDDSFSALDYKTDATLRARLKEVTGDSTVLIVAQRVGTIMDADQIIVLDEGE | 545 |
| | | V+ P++Y+FDDSFSALDY TDA LRA L + T ++TV+IVAQRV TI DAD+I+VLDEG | |
| Sbjct: | 487 | VQRPEIYLFDDSFSALDYATDAALRAELAQETAEATVVIVAQRVATIRDADRIVVLDEGR | 546 |
| Query: | 546 | IVGRGTHAQLIENNAIYREIAESQL | 570 |
| | | +VG G H +L+ +N YREI SQL | |
| Sbjct: | 547 | VVGVGRHHELMADNETYREIVLSQL | 571 |

[10671] A related DNA sequence was identified in S. pyogenes <SEQ ID 4985> which encodes the amino acid sequence <SEQ ID 4986>. Analysis of this protein sequence reveals the following:

| Possible site: 22 | | | | |
|---|---|---|---|---|
| >>> Seems to have an uncleavable N-term signal seq | | | | |
| | INTEGRAL | Likelihood = −16.24 | Transmembrane | 155-171 (145-176) |
| | INTEGRAL | Likelihood = −7.48 | Transmembrane | 130-146 (122-150) |
| | INTEGRAL | Likelihood = −5.04 | Transmembrane | 13-29 (12-30) |
| | INTEGRAL | Likelihood = −5.04 | Transmembrane | 56-72 (52-75) |
| | INTEGRAL | Likelihood = −4.14 | Transmembrane | 239-255 (238-259) |
| | INTEGRAL | Likelihood = −1.70 | Transmembrane | 269-285 (269-288) |

```
----- Final Results -----
                              bacterial membrane --- Certainty = 0.7496(Affirmative) < succ>
                                bacterial outside --- Certainty = 0.0000(Not Clear) < succ>
                            bacterial cytoplasm --- Certainty = 0.0000(Not Clear) < succ>
```

[10672] An alignment of the GAS and GBS proteins is shown below.

| Identities = 175/511 (34%), Positives = 296/511 (57%), Gaps = 3/511 (0%) | | | |
|---|---|---|---|
| Query: | 59 | MFIFVVLGIIGRITMAYASSRLTTTMIRDMRNDMYAKLQEYSHHEYEQIGVSSLVTRMTS | 118 |
| | | + I +LG++ ++++ + DMR + K+Q++S+ E +LV R+T+ | |
| Sbjct: | 56 | LLIIALLGLMSGAINTVLAAKIAQGVSADMREKTFRKIQDFSYANIEAFNAGNLVVRLTN | 115 |
| Query: | 119 | DTFVLMQFAEMSLRLGLVTPMVMIFSVVMILITSPSLAWLVAVAMPLLVGVILYVAIKTK | 178 |
| | | D + M ++ P++ I + +M + T P L W++ V + L+ ++ V + | |
| Sbjct: | 116 | DINQIQSLVMMMFQILFRLPILFIGAFIMAVQTFPQLWWVIVVMVILIALIMGLVMRQMG | 175 |
| Query: | 179 | PLSERQQTMLDKINQYVRENLTGLRVVRAFARENFQSQKFQVANQRYTDTSTGLFKLTGL | 238 |
| | | P + Q ++DKIN+ +ENL G+RVV++F +E Q KF+ + + + L | |
| Sbjct: | 176 | PRFGKFQRLMDKINRIAKENLRGVRVVKSFVQEQQQYTKFKETSNDLLALNLSIGYGFSL | 235 |
| Query: | 239 | TEPLFVQIIIAMIVAIVWFALDPLQRGAIKIGDLVAFIEYSFHALFSFLLFANLFTMYPR | 298 |
| | | +P + + + + ++ IG++ +F+ Y +FS ++ ++ R | |
| Sbjct: | 236 | MQPALMLVSYLAVYVSINVVSTMVETDPTVIGNIASFMTYMMQIMFSIIVVGSMGMQVSR | 295 |
| Query: | 299 | MVVSSHRIREVMDMPISINPNTEGVTDTKLKGHLEFDNVTFAYPGETESPVLHDISFKAK | 358 |
| | | VS RIR+++ ++ E + + G + FD+V+F YP + E P L ISF + | |
| Sbjct: | 296 | AFVSMARIRQILSTEPAMTFENE--KEETISGSIVFDDVSFTYPNDDE-PTLKHISFAIE | 352 |
| Query: | 359 | PGETIAFIGSTGSGKSSLVNLIPRFYDVTLGKILVDGVDVRDYNLKSLRQKIGFIPQKAL | 418 |
| | | PG+ + +G+TGSGKS+L LIPR +D G+IL+ G ++ + +LRQ + + QKA+ | |
| Sbjct: | 353 | PGQMVGIVGATGSGKSTLAQLIPRLFDPQDGQILLGGKPIKTLSQTTLRQSVSIVLQKAI | 412 |
| Query: | 419 | LFTGTIGENLKYGKADATIDDLRQAVDISQAKEFIESHQEAFETHLAEGGSNLSGGQKQR | 478 |
| | | LF+GTI +NL+ G A A ID +++A I+QAKEFI+ +E+ + E GSNLSGGQKQR | |
| Sbjct: | 413 | LFSGTIADNLRQGSAKADIDAMQKAAQIAQAKEFIDRMDSRYESQVEERGSNLSGGQKQR | 472 |
| Query: | 479 | LSIARAVVKDPDLYIFDDSFSALDYKTDATLRARLKEVTGDSTVLIVAQRVGTIMDADQI | 538 |
| | | LSIAR V+ P + I DDS SALD K++ ++ L +T +IVAQ++ +++ AD+I | |
| Sbjct: | 473 | LSIARGVINHPKILILDDSTSALDAKSEKRVQEALSHKLEGTTTVIVAQKISSVVKADKI | 532 |
| Query: | 539 | IVLDEGEIVGRGTHAQLIENNAIYREIAESQ | 569 |
| | | +VLD+G+++G GTHA+L+ NNAIYREI E+Q | |
| Sbjct: | 533 | LVLDQGQLIGEGTHAELVANNAIYREIYETQ | 563 |

[10673] There is also homology to SEQ IDs 72 and 6552.

[10674] Based on this analysis, it was predicted that these proteins and their epitopes could be useful antigens for vaccines or diagnostics.

### EXAMPLE 1946

[10675] A DNA sequence (GBSx2055) was identified in S. agalactiae <SEQ ID 6029> which encodes the amino acid sequence <SEQ ID 6030>. Analysis of this protein sequence reveals the following:

```
Possible site: 24
>>> Seems to have no N-terminal signal sequence
----- Final Results -----
                            bacterial cytoplasm --- Certainty = 0.2391(Affirmative) < succ>
                              bacterial membrane --- Certainty = 0.0000(Not Clear) < succ>
                                bacterial outside --- Certainty = 0.0000(Not Clear) < succ>
```

[10676] The protein has homology with the following sequences in the GENPEPT database.

| >GP: CAA51784 GB: X73368 ORF 18.3 [Salmonella typhimurium] | | | |
|---|---|---|---|
| Identities = 58/162 (35%), Positives = 92/162 (55%), Gaps = 8/162 (4%) | | | |
| Query: | 1 | MIIRPIIKNDDQAVAQLIRQSLRAYDL--DKPDTAYSDPHLDHLTSYYEKIEKSGFFVIE | 58 |
| | | + +R I D+ A+A++IRQ Y L DK T +DP+LD L Y + + ++V+E | |
| Sbjct: | 9 | LTVRRITTADNAAIARVIRQVSAEYGLTADKGYTV-ADPNLDELYQVYSQ-PGAAYWVVE | 66 |
| Query: | 59 | ERDEIIGCGGFGPLKNL---IAEMQKVYIAERFRGKGLATDLVKMIEVEARKIGYRQLYL | 115 |
| | | + ++G GG PL I E+QK+Y RG+GLA L M AR+ G+++ YL | |
| Sbjct: | 67 | QNGCVVGGGGVAPLSCSEPDICELQKMYFLPVIRGQGLAKKLALMALDHAREQGFKRCYL | 126 |
| Query: | 116 | ETASTLSRATAVYKHMGYCALSQPIANDQGHTAMDIWMIKDL | 157 |
| | | ET + L A A+Y+ +G+ +S+P+ GH ++ M+KDL | |
| Sbjct: | 127 | ETTAFLREAIALYERLGFEHISEPL-GCTGHVDCEVRMLKDL | 167 |

[10677] No corresponding DNA sequence was identified in S. pyogenes.

[10678] Based on this analysis, it was predicted that this protein and its epitopes, could be useful antigens for vaccines or diagnostics.

### EXAMPLE 1947

[10679] A DNA sequence (GBSx2056) was identified in S. agalactiae <SEQ ID 6031> which encodes the amino acid sequence <SEQ ID 6032>. This protein is predicted to be ABC transporter. Analysis of this protein sequence reveals the following:

```
Possible site: 25
>>> Seems to have no N-terminal signal sequence
----- Final Results -----
                            bacterial cytoplasm --- Certainty = 0.1738(Affirmative) < succ>
                              bacterial membrane --- Certainty = 0.0000(Not Clear) < succ>
                                bacterial outside --- Certainty = 0.0000(Not Clear) < succ>
```

[10680] The protein has homology with the following sequences in the GENPEPT database.

| >GP: CAB12566 GB: Z99108 similar to ABC transporter (ATP binding | | | |
|---|---|---|---|
| protein) [Bacillus subtilis] | | | |
| Identities = 269/625 (43%), Positives = 397/625 (63%), Gaps = 11/625 (1%) | | | |
| Query: | 1 | MSDFLVDGLTKSVGDKTVFSNVSFIIHSLDRIGIIGVNGTGKTTLLDVISGELGFDGDRS | 60 |
| | | MS + L K+ GDKT+F ++SF I +RIG+IG NGTGK+TLL VI+G + | |
| Sbjct: | 1 | MSILKAENLYKTYGDKTLFDHISFHIEENERIGLIGPNGTGKSTLLKVIAGLESIE--EG | 58 |
| Query: | 61 | PFSSANDYKIAYLKQEPDFDDSQTILDTVLSSDLREMALIKEYELLLNHY-----EESKQ | 115 |
| | | + + ++ +L Q+P+ QT+L+ + S + M ++EYE L E +Q | |
| Sbjct: | 59 | EITKSGSVQVEFLHQDPELPAGQTVLEHIYSGESAVMKTLREYEKALYELGKDPENEQRQ | 118 |
| Query: | 116 | SRLEKVMAEMDSLDAWSIESEVKTVLSKLGITDLQLSVGELSGGLRRRVQLAQVLLNDAD | 175 |
| | | L A+MD+ +AW + KTVLSKLG+ D+ V ELSGG ++RV +A+ L+ AD | |
| Sbjct: | 119 | KHLLAAQAKMDANNAWDANTLAKTVLSKLGVNDVTKPVNELSGGQKKRVAIAKNLIQPAD | 178 |
| Query: | 176 | LLLLDEPTNHLDIDTIAWLTNFLKNSKKTVLFITHDRYFLDNVATRIFELDKAQITEYQG | 235 |
| | | LL+LDEPTNHLD +TI WL +L V+ +THDRYFL+ V RI+EL++ + Y+G | |
| Sbjct: | 179 | LLILDEPTNHLDNETIEWLEGYLSQYPGAVMLVTHDRYFLNRVTNRIYELERGSLYTYKG | 238 |
| Query: | 236 | NYQDYVRLRAEQDERDAASLHKKKQLYKQELAWMRTQPQARATKQQARINRFQNLKNDLH | 295 |
| | | NY+ ++ RAE++ + K++ L ++ELAW+R +AR+TKQ+ARI+R + LK | |
| Sbjct: | 239 | NYEVFLEKRAEREAQAEQKETKRQNLLRRELAWLRRGAKARSTKQKARIDRVETLKEQTG | 298 |
| Query: | 296 | QTSDTSDLEMTFETSRIGKKVINFENVSFSYPDKSILKDFNLLIQNKDRIGIVGDNGVGK | 355 |
| | | S S L+ + R+GK+VI ENV +Y + ++ FN L+ +RIGI+G NG+GK | |
| Sbjct: | 299 | PQSSGS-LDFAIGSHRLGKQVIEAENVMIAYDGRMLVDRFNELVIPGERIGIIGPNGIGK | 357 |
| Query: | 356 | STLLNLIVQDLQPDSGNVSIGETIRVGYFSQQLHNMDGSKRVINYLQEVADEVKTSVGTT | 415 |
| | | +TLLN + PD G+++IG+T+R+GY++Q M+G +VI+Y++E A+ VKT+ G | |
| Sbjct: | 358 | TTLLNALAGRHTPDGGDITIGQTVRIGYYTQDHSEMNGELKVIDYIKETAEVVKTADGDM | 417 |
| Query: | 416 | SVTE-LLEQFLFPRSTHGTQIAKLSGGEKKRLYLLKILIEKPNVLLLDEPTNDLDIATLT | 474 |
| | | E +LE+FLFPRS T I KLSGGEK+RLYLL++L+++PNVL LDEPTNDLD TL+ | |
| Sbjct: | 418 | ITAEQMLERFLFPRSMQQTYIRKLSGGEKRRLYLLQVLMQEPNVLFLDEPTNDLDTETLS | 477 |
| Query: | 475 | VLENFLQGFGGPVITVSHDRYFLDKVANKIIAFEDND-IREFFGNYTDYLDEKAFNEQNN | 533 |
| | | VLE+++ F G VITVSHDRYFLD+V +++I FE N I F G+Y+DY++E + | |
| Sbjct: | 478 | VLEDYIDQFPGVVITVSHDRYFLDRVVDRLIVFEGNGVISRFQGSYSDYMEESKAKKAAP | 537 |
| Query: | 534 | EVISKKESTKTSREKQSRKRMSYFEKQEWATIEDDIMILENTITRIENDMQTCGSDFTRL | 593 |
| | | + + +E T + K+ RK++SY ++ EW IED I LE ++E D+ GSDF ++ | |
| Sbjct: | 538 | KP-AAEEKTAEAEPKKKRKKLSYKDQLEWDGIEDKIAQLEEKHEQLEADIAAAGSDFGKI | 596 |
| Query: | 594 | SDLQKELDAKNEALLEKYDRYEYLS | 618 |
| | | +L E E L DR+ LS | |
| Sbjct: | 597 | QELMAEQAKTAEELEAAMDRWTELS | 621 |

[10681] A related DNA sequence was identified in S. pyogenes <SEQ ID 6033> which encodes the amino acid sequence <SEQ ID 6034>. Analysis of this protein sequence reveals the following:

```
Possible site: 60
>>> Seems to have no N-terminal signal sequence
----- Final Results -----
                            bacterial cytoplasm --- Certainty = 0.2591(Affirmative) < succ>
                              bacterial membrane --- Certainty = 0.0000(Not Clear) < succ>
                                bacterial outside --- Certainty = 0.0000(Not Clear) < succ>
```

[10682] An alignment of the GAS and GBS proteins is shown below.

| Identities = 467/624 (74%), Positives = 535/624 (84%), Gaps = 3/624 (0%) | | | |
|---|---|---|---|
| Query: | 1 | MSDFLVDGLTKSVGDKTVFSNVSFIIHSLDRIGIIGVNGTGKTTLLDVISGELGFDGDRS | 60 |
| | | MS FLV+ LTK+VGDKTVF ++SFIIH DRIGIIGVNGTGKTTLLDV+SG LGFDGD S | |
| Sbjct: | 1 | MSHFLVEKLTKTVGDKTVFQDISFIIHDFDRIGIIGVNGTGKTTLLDVLSGRLGFDGDHS | 60 |
| Query: | 61 | PFSSANDYKIAYLKQEPDFDDSQTILDTVLSSDLREMALIKEYELLLNHYEESKQSRLEK | 120 |
| | | PFS ANDYKIAYL Q+P+F+D+ ++LDTVLS+D++ + LI++YELL+ +Y E KQ LE | |
| Sbjct: | 61 | PFSKANDYKIAYLTQDPEFNDAASVLDTVLSADVKAIQLIRQYELLMANYTEDKQESLES | 120 |
| Query: | 121 | VMAEMDSLDAWSIESEVKTVLSKLGITDLQLSVGELSGGLRRRVQLAQVLLNDADLLLLD | 180 |
| | | +M+EMD LDAWSIES+VKTVLSKLGITDL+ VG+LSGG+RRRVQLAQVLL ADLLLLD | |
| Sbjct: | 121 | LMSEMDRLDAWSIESDVKTVLSKLGITDLEQKVGDLSGGMRRRVQLAQVLLGAADLLLLD | 180 |
| Query: | 181 | EPTNHLDIDTIAWLTNFLKNSKKTVLFITHDRYFLDNVATRIFELDKAQITEYQGNYQDY | 240 |
| | | EPTNHLDIDTIAWLT +LK +KKTVLFITHDRYFLD+VATRIFELDKA +TEYQGNYQDY | |
| Sbjct: | 181 | EPTNHLDIDTIAWLTTYLKTAKKTVLFITHDRYFLDHVATRIFELDKAGLTEYQGNYQDY | 240 |
| Query: | 241 | VRLRAEQDERDAASLHKKKQLYKQELAWMRTQPQARATKQQARINRFQNLKNDLHQTSDT | 300 |
| | | VRL+AEQDERDAA+LHKKKQLYKQELAWMRTQPQARATKQQARINRF +LK ++HQ S | |
| Sbjct: | 241 | VRLKAEQDERDAANLHKKKQLYKQELAWMRTQPQARATKQQARINRFSDLKKEVHQDSSA | 300 |
| Query: | 301 | SDLEMTFETSRIGKKVINFENVSFSYPDKSILKDFNLLIQNKDRIGIVGDNGVGKSTLLN | 360 |
| | | LEMTFETSRIGKKVI+FE++SF+Y D+ ++KDFNL+IQNKDRIGIVGDNGVGKSTLLN | |
| Sbjct: | 301 | DKLEMTFETSRIGKKVIHFEDLSFAYGDRQLIKDFNLIIQNKDRIGIVGDNGVGKSTLLN | 360 |
| Query: | 361 | LIVQDLQPDSGNVSIGETIRVGYFSQQLHNMDGSKRVINYLQEVADEVKTSVGTTSVTEL | 420 |
| | | +I DL+P SG + IG+TIRVGYFSQQL +MD +KRVINYLQEVADEVKTSVGTTS++EL | |
| Sbjct: | 361 | IINGDLKPTSGKLDIGDTIRVGYFSQQLKDMDETKRVINYLQEVADEVKTSVGTTSISEL | 420 |
| Query: | 421 | LEQFLFPRSTHGTQIAKLSGGEKKRLYLLKILIEKPNVLLLDEPTNDLDIATLTVLENFL | 480 |
| | | LEQFLFPRS+HGT IAKLSGGEKKRLYLLK+LIEKPNVLLLDEPTNDLDIATL VLENFL | |
| Sbjct: | 421 | LEQFLFPRSSHGTLIAKLSGGEKKRLYLLKLLIEKPNVLLLDEPTNDLDIATLKVLENFL | 480 |
| Query: | 481 | QGFGGPVITVSHDRYFLDKVANKIIAFEDNDIREFFGNYTDYLDEKAFNEQNNEVISKKE | 540 |
| | | F GPVITVSHDRYFLDKVA KI+AFE+ DIR F+GNY+DYLDEK F ++ E K | |
| Sbjct: | 481 | ANFAGPVITVSHDRYFLDKVATKILAFEEGDIRVFYGNYSDYLDEKVFEKETVEADLAKT | 540 |
| Query: | 541 | STKTS---REKQSRKRMSYFEKQEWATIEDDIMILENTITRIENDMQTCGSDFTRLSDLQ | 597 |
| | | + +K+ RKRMSY EKQEWA IED I +E I IEN M T SD+ +L+ LQ | |
| Sbjct: | 541 | TVTEEVPLPQKEERKRMSYLEKQEWAQIEDKIATIEANIEEIENQMLTVVSDYGQLAQLQ | 600 |
| Query: | 598 | KELDAKNEALLEKYDRYEYLSELD | 621 |
| | | KELD +N LL Y+R+EYLS LD | |
| Sbjct: | 601 | KELDQRNNDLLLAYERFEYLSGLD | 624 |

[10683] Based on this analysis, it was predicted that these proteins and their epitopes could be useful antigens for vaccines or diagnostics.

### EXAMPLE 1948

[10684] A DNA sequence (GBSx2057) was identified in S. agalactiae <SEQ ID 6035> which encodes the amino acid sequence <SEQ ID 6036>. This protein is predicted to be poly(a) polymerase (papS). Analysis of this protein sequence reveals the following:

```
Possible site: 14
>>> Seems to have no N-terminal signal sequence
----- Final Results -----
                            bacterial cytoplasm --- Certainty = 0.2658(Affirmative) < succ>
                              bacterial membrane --- Certainty = 0.0000(Not Clear) < succ>
                                bacterial outside --- Certainty = 0.0000(Not Clear) < succ>
```

[10685] A related GBS nucleic acid sequence <SEQ ID 9957> which encodes amino acid sequence <SEQ ID 9958> was also identified.

[10686] The protein has homology with the following sequences in the GENPEPT database.

| >GP: AAB38446 GB: L47709 poly(A) polymerase [Bacillus subtilis] | | | |
|---|---|---|---|
| Identities = 157/395 (39%), Positives = 235/395 (58%), Gaps = 14/395 (3%) | | | |
| Query: | 11 | FQKALPILKKIKKAGYEAYFVGGSVRDVLLDRPIHDVDIATSSYPEETKQIFKRTVDVGI | 70 |
| | | F KALP+L+ + +AG++AYFVGG+VRD + R I DVDIAT + P++ +++F+RTVDVG | |
| Sbjct: | 5 | FIKALPVLRILIEAGHQAYFVGGAVRDSYMKRTIGDVDIATDAAPDQVERLFQRTVDVGK | 64 |
| Query: | 71 | EHGTVLVLEKGGEYEITTFRTEEVYVDYRRPSQVNFVRSLEEDLKRRDFTVNAFALNEDG | 130 |
| | | EHGT++VL + YE+TTFRTE YVD+RRPS+V F+ SLEEDLKRRD T+NA A+ DG | |
| Sbjct: | 65 | EHGTIIVLWEDETYEVTTFRTESDYVDFRRPSEVQFISSLEEDLKRRDLTINAMAMTADG | 124 |
| Query: | 131 | EVIDLFHGLDDLDNHLLRAVGLASERFNEDALRIMRGLRFSASLNFDIETTTFEAMKKHA | 190 |
| | | +V+D F G D+D ++R VG +RF EDALR++R +RF + L F + T EA+ K | |
| Sbjct: | 125 | KVLDYFGGKKDIDQKVIRTVGKPEDRFQEDALRMLRAVRFMSQLGFTLSPETEEAIAKEK | 184 |
| Query: | 191 | SLLEKISVERSFIEFDKLLLAPYWRKGMLALIDSHAFNYLPCLKNRELQLSAFLSQLDKD | 250 |
| | | SLL +SVER IEF+KLL R+ + LI + + LP ++ L +S + | |
| Sbjct: | 185 | SLLSHVSVERKTIEFEKLLQGRASRQALQTLIQTRLYEELPGFYHKRENL---ISTSEFP | 241 |
| Query: | 251 | FLFETS-EQAWASLILSMEV--EHTKTFLKKWKTSTHFQKDVEHIVDVYRIREQMGLTKE | 307 |
| | | F TS E+ WA+L++++ + + FLK WK K+ HI D + L | |
| Sbjct: | 242 | FFSLTSREELWAALLINLGIVLKDAPLFLKAWKLPGKVIKEAIHIADTF----GQSLDAM | 297 |
| Query: | 308 | HLYRYGKTIIKQAEGIRKAR-GLMVDFEKIEQLD---SELAIHDRHEIVVNGGTLIKKLG | 363 |
| | | +YR GK + A I + R +D +K++ + L I ++ + G L+ | |
| Sbjct: | 298 | TMYRAGKKALLSAAKISQLRQNEKLDEKKLKDIQYAYQNLPIKSLKDLDITGKDLLALRN | 357 |
| Query: | 364 | IKPGPQMGDIISQIELAIVLGQLINEEEAILHFVK | 398 |
| | | G + + + IE A+V G+L N+++ I ++K | |
| Sbjct: | 358 | RPAGKWVSEELQWIEQAVVTGKLSNQKKHIEEWLK | 392 |

[10687] A related DNA sequence was identified in S. pyogenes <SEQ ID 6037> which encodes the amino acid sequence <SEQ ID 6038>. Analysis of this protein sequence reveals the following:

```
Possible site: 13
>>> Seems to have no N-terminal signal sequence
----- Final Results -----
                            bacterial cytoplasm --- Certainty = 0.2023(Affirmative) < succ>
                              bacterial membrane --- Certainty = 0.0000(Not Clear) < succ>
                                bacterial outside --- Certainty = 0.0000(Not Clear) < succ>
```

[10688] An alignment of the GAS and GBS proteins is shown below.

| Identities = 256/400 (64%), Positives = 312/400 (78%) | | | |
|---|---|---|---|
| Query: | 2 | MRLNYLPSEFQKALPILKKIKKAGYEAYFVGGSVRDVLLDRPIHDVDIATSSYPEETKQI | 61 |
| | | M+L +PSEFQKALPIL KIK+AGYEAYFVGGSVRDVLL+RPIHDVDIATSSYPEETK I | |
| Sbjct: | 1 | MKLMTMPSEFQKALPILTKIKEAGYEAYFVGGSVRDVLLERPIHDVDIATSSYPEETKAI | 60 |
| Query: | 62 | FKRTVDVGIEHGTVLVLEKGGEYEITTFRTEEVYVDYRRPSQVNFVRSLEEDLKRRDFTV | 121 |
| | | F RTVDVGIEHGTVLVLE GGEYEITTFRTE++YVDYRRPSQV+FVRSLEEDLKRRDFTV | |
| Sbjct: | 61 | FNRTVDVGIEHGTVLVLENGGEYEITTFRTEDIYVDYRRPSQVSFVRSLEEDLKRRDFTV | 120 |
| Query: | 122 | NAFALNEDGEVIDLFHGLDDLDNHLLRAVGLASERFNEDALRIMRGLRFSASLNFDIETT | 181 |
| | | NA AL+E+G+VID F GL DL LRAVG A ERF EDALRIMRG RF+ASL+FDIE | |
| Sbjct: | 121 | NALALDENGQVIDKFRGLIDLKQKRLRAVGKAEERFEEDALRIMRGFRFAASLDFDIEAI | 180 |
| Query: | 182 | TFEAMKKHASLLEKISVERSFIEFDKLLLAPYWRKGMLALIDSHAFNYLPCLKNRELQLS | 241 |
| | | TFEAM+ H+ LLEKISVERSF EFDKLL+AP+WRKG+ A+I A++YLP LK +E L+ | |
| Sbjct: | 181 | TFEAMRSHSPLLEKISVERSFTEFDKLLMAPHWRKGISAMIACQAYDYLPGLKQQEAGLN | 240 |
| Query: | 242 | AFLSQLDKDFLFETSEQAWASLILSMEVEHTKTFLKKWKTSTHFQKDVEHIVDVYRIREQ | 301 |
| | | + L +F F QAWA +++S+ +E K+FLK WKTS FQ+ V ++ +YRIR++ | |
| Sbjct: | 241 | HLIVSLKDNFTFSDYHQAWAYVMISLAIEDPKSFLKAWKTSNDFQRYVTKLIALYRIRQE | 300 |
| Query: | 302 | MGLTKEHLYRYGKTIIKQAEGIRKARGLMVDFEKIEQLDSELAIHDRHEIVVNGGTLIKK | 361 |
| | | K +Y+YGK + E +RKA+ L VD ++I LD L IHD+H+IV+NG LIK | |
| Sbjct: | 301 | RSFEKLDIYQYGKKMASLVEDLRKAQSLSVDMDRINTLDQALVIHDKHDIVLNGSHLIKD | 360 |
| Query: | 362 | LGIKPGPQMGDIISQIELAIVLGQLINEEEAILHFVKQYL | 401 |
| | | G+K GPQ+G ++ ++ELAIV G+L N+ I FV++ L | |
| Sbjct: | 361 | FGMKSGPQLGLMLEKVELAIVEGRLDNDFTTIEAFVREEL | 400 |

[10689] Based on this analysis, it was predicted that these proteins and their epitopes could be useful antigens for vaccines or diagnostics.

### EXAMPLE 1949

[10690] A DNA sequence (GBSx2058) was identified in S. agalactiae <SEQ ID 6039> which encodes the amino acid sequence <SEQ ID 6040>. Analysis of this protein sequence reveals the following:

```
Possible site: 13
>>> Seems to have no N-terminal signal sequence
----- Final Results -----
                            bacterial cytoplasm --- Certainty = 0.2939(Affirmative) < succ>
                              bacterial membrane --- Certainty = 0.0000(Not Clear) < succ>
                                bacterial outside --- Certainty = 0.0000(Not Clear) < succ>
```

[10691] The protein has homology with the following sequences in the GENPEPT database.

| >GP: BAB07346 GB: AP001519 unknown conserved protein | | | |
|---|---|---|---|
| [Bacillus halodurans] | | | |
| Identities = 94/274 (34%), Positives = 153/274 (55%), Gaps = 2/274 (0%) | | | |
| Query: | 2 | KLALITDTSAYLPEAIENHEDVYVLDIPIIIDGKTYIEGQNLTLDQYYDKLAASKELPKT | 61 |
| | | K+A++TD++AYL V V+ + ++ + Y E L+ +Y+KL ++LP T | |
| Sbjct: | 3 | KIAIVTDSTAYLGPKRAKELGVIVVPLSVVFGEEAYQEEVELSSADFYEKLKHEEKLPTT | 62 |
| Query: | 62 | SQPSLAELDDLLCQLEKEGYTHVLGLFIAAGISGFWQNIQFLIEEHPNLTIAFPDTKITS | 121 |
| | | SQP++ + +L KEG+ V+ + +++ ISG +Q+ + + D+ I+ | |
| Sbjct: | 63 | SQPAVGLFVETFERLAKEGFEVVISIHLSSKISGTYQSALTAGSMVEGIEVIGYDSGISC | 122 |
| Query: | 122 | APQGNLVRNALMCSREGMDFDVIVNKIQSQIEKIEGFIVVNDLNHLVKGGRLSNGSAIIG | 181 |
| | | PQ N V A +EG D I++ + ++ VV+DL+HL +GGRL+ ++G | |
| Sbjct: | 123 | EPQANFVAEAAKLVKEGADPQTIIDHLDEVKKRTNALFVVHDLSHLHRGGRLNAAQLVVG | 182 |
| Query: | 182 | NLLSIKPVLHFNEEGKIVVYEKVRTEKKALKRLAEI-VKEMTADGEYDIAIIHSRAQDKA | 240 |
| | | +LL IKP+LHF E+G IV EKVRTEKKA R+ E+ +E ++ +IH+ D A | |
| Sbjct: | 183 | SLLKIKPILHF-EDGSIVPLEKVRTEKKAWARVKELFAEEASSASSVKATVIHANRLDGA | 241 |
| Query: | 241 | EQLYNLLAKAGLKDDLEIVSFGGVIATHLGEGAV | 274 |
| | | E+L + + D+ I FG VI THLGEG++ | |
| Sbjct: | 242 | EKLADEIRSQFSHVDVSISHFGPVIGTHLGEGSI | 275 |

[10692] A related DNA sequence was identified in S. pyogenes <SEQ ID 6041> which encodes the amino acid sequence <SEQ ID 6042>. Analysis of this protein sequence reveals the following:

```
Possible site: 14
>>> Seems to have no N-terminal signal sequence
----- Final Results -----
                            bacterial cytoplasm --- Certainty = 0.3379(Affirmative) < succ>
                              bacterial membrane --- Certainty = 0.0000(Not Clear) < succ>
                                bacterial outside --- Certainty = 0.0000(Not Clear) < succ>
```

[10693] An alignment of the GAS and GBS proteins is shown below.

| Identities = 181/281 (64%), Positives = 233/281 (82%) | | | |
|---|---|---|---|
| Query: | 1 | MKLALITDTSAYLPEAIENHEDVYVLDIPIIIDGKTYIEGQNLTLDQYYDKLAASKELPK | 60 |
| | | MKLA+ITD++A LP ++ + ++ LDIP+IID +TY EG+NL++D +Y K+A S+ LPK | |
| Sbjct: | 1 | MKLAVITDSTATLPTDLKQDKAIFSLDIPVIIDDETYFEGRNLSIDDFYQKMADSQNLPK | 60 |
| Query: | 61 | TSQPSLAELDDLLCQLEKEGYTHVLGLFIAAGISGFWQNIQFLIEEHPNLTIAFPDTKIT | 120 |
| | | TSQPSL+ELD+LL L +GYTHV+GLF+A GISGFWQNIQFL EEHP + +AFPD+KIT | |
| Sbjct: | 61 | TSQPSLSELDNLLGLLSSKGYTHVIGLFLAGGISGFWQNIQFLAEEHPEIEMAFPDSKIT | 120 |
| Query: | 121 | SAPQGNLVRNALMCSREGMDFDVIVNKIQSQIEKIEGFIVVNDLNHLVKGGRLSNGSAII | 180 |
| | | SAP G++V+N L SR+GM F I+NK+Q QI+ FI+V+DLNHLVKGGRLSNGSA++ | |
| Sbjct: | 121 | SAPLGSMVKNVLDWSRQGMTFQAILNKLQEQIDGTTAFIMVDDLNHLVKGGRLSNGSALL | 180 |
| Query: | 181 | GNLLSIKPVLHFNEEGKIVVYEKVRTEKKALKRLAEIVKEMTADGEYDIAIIHSRAQDKA | 240 |
| | | GNLLSIKP+L F+EEGKIVVYEKVRTEKKA+KRL EI+ ++ ADG+Y++ IIHS+AQDKA | |
| Sbjct: | 181 | GNLLSIKPILRFDEEGKIVVYEKVRTEKKAMKRLVEILNDLIADGQYNVFIIHSKAQDKA | 240 |
| Query: | 241 | EQLYNLLAKAGLKDDLEIVSFGGVIATHLGEGAVAFGITPK | 281 |
| | | + L LL +G + D+E V FG VIATHLGEGA+AFG+TP+ | |
| Sbjct: | 241 | DYLKRLLQDSGYQYDIEEVHFGAVIATHLGEGAIAFGVTPR | 281 |

[10694] Based on this analysis, it was predicted that these proteins and their epitopes could be useful antigens for vaccines or diagnostics.

### EXAMPLE 1950

[10695] A DNA sequence (GBSx2059) was identified in S. agalactiae <SEQ ID 6043> which encodes the amino acid sequence <SEQ ID 6044>. Analysis of this protein sequence reveals the following:

| Possible site: 46 | | | | |
|---|---|---|---|---|
| >>> Seems to have no N-terminal signal sequence | | | | |
| | INTEGRAL | Likelihood = −1.59 | Transmembrane | 51-67 (50-67) |

```
----- Final Results -----
                              bacterial membrane --- Certainty = 0.1638(Affirmative) < succ>
                                bacterial outside --- Certainty = 0.0000(Not Clear) < succ>
                            bacterial cytoplasm --- Certainty = 0.0000(Not Clear) < succ>
```

[10696] The protein has no significant homology with any sequences in the GENPEPT database.

[10697] A related DNA sequence was identified in S. pyogenes <SEQ ID 6045> which encodes the amino acid sequence <SEQ ID 6046>. Analysis of this protein sequence reveals the following:

| Possible site: 61 | | | | |
|---|---|---|---|---|
| >>> Seems to have no N-terminal signal sequence | | | | |
| | INTEGRAL | Likelihood = −3.19 | Transmembrane | 50-66 (49-67) |

```
----- Final Results -----
                              bacterial membrane --- Certainty = 0.2275(Affirmative) < succ>
                                bacterial outside --- Certainty = 0.0000(Not Clear) < succ>
                            bacterial cytoplasm --- Certainty = 0.0000(Not Clear) < succ>
```

[10698] The protein has no significant homology with any sequences in the GENPEPT database.

[10699] An alignment of the GAS and GBS proteins is shown below.

| Identities = 94/126 (74%), Positives = 115/126 (90%) | | | |
|---|---|---|---|
| Query: | 1 | MEVIREQEFVNQYHYDARNLEWEEENGTPKTNFEVTFQLANRDEAAKVTSIVAVLQFVIV | 60 |
| | | M+++RE+EFVNQYHYDARNLEWE+ENGTP+TNFEVTFQL ++DE K T IV+VLQFVIV | |
| Sbjct: | 1 | MQLVREKEFVNQYHYDARNLEWEKENGTPETNFEVTFQLIDKDEQQKETVIVSVLQFVIV | 60 |
| Query: | 61 | RDEFVISGVISQMAHIQGRLINEPSEFSQDEVENLAAPLLEIVKRLTYEVTEIALDRPGV | 120 |
| | | ++EFVISGVISQM I RL+++PSEF+Q+EVE+LAAPLL++VKRLTYEVTEIALDRPG+ | |
| Sbjct: | 61 | KEEFVISGVISQMVRILDRLVDKPSEFTQEEVESLAAPLLDMVKRLTYEVTEIALDRPGI | 120 |
| Query: | 121 | TLEFNS | 126 |
| | | LEF + | |
| Sbjct: | 121 | HLEFKN | 126 |

[10700] SEQ ID 6044 (GBS416) was expressed in E. coli as a His-fusion product. SDS-PAGE analysis of total cell extract is shown in FIG. 79 (lane 4; MW 17.5 kDa).

[10701] GBS416-His was purified as shown in FIG. 214, lane 7.

[10702] Based on this analysis, it was predicted that these proteins and their epitopes could be useful antigens for vaccines or diagnostics.

### EXAMPLE 1951

[10703] A DNA sequence (GBSx2060) was identified in S. agalactiae <SEQ ID 6047> which encodes the amino acid sequence <SEQ ID 6048>. Analysis of this protein sequence reveals the following:

```
Possible site: 36
>>> Seems to have no N-terminal signal sequence
----- Final Results -----
                            bacterial cytoplasm --- Certainty = 0.3875(Affirmative) < succ>
                              bacterial membrane --- Certainty = 0.0000(Not Clear) < succ>
                                bacterial outside --- Certainty = 0.0000(Not Clear) < succ>
```

[10704] The protein has no significant homology with any sequences in the GENPEPT database.

[10705] No corresponding DNA sequence was identified in S. pyogenes.

[10706] Based on this analysis, it was predicted that this protein and its epitopes, could be useful antigens for vaccines or diagnostics.

### EXAMPLE 1952

[10707] A DNA sequence (GBSx2061) was identified in S. agalactiae <SEQ ID 6049> which encodes the amino acid sequence <SEQ ID 6050>. Analysis of this protein sequence reveals the following:

```
Possible site: 17
>>> Seems to have an uncleavable N-term signal seq
----- Final Results -----
                              bacterial membrane --- Certainty = 0.0000(Not Clear) < succ>
                                bacterial outside --- Certainty = 0.0000(Not Clear) < succ>
                            bacterial cytoplasm --- Certainty = 0.0000(Not Clear) < succ>
```

[10708] The protein has no significant homology with any sequences in the GENPEPT database.

[10709] No corresponding DNA sequence was identified in S. pyogenes.

[10710] Based on this analysis, it was predicted that this protein and its epitopes, could be useful antigens for vaccines or diagnostics.

### EXAMPLE 1953

[10711] A DNA sequence (GBSx2062) was identified in S. agalactiae <SEQ ID 6051> which encodes the amino acid sequence <SEQ ID 6052>. This protein is predicted to be PTS system, fructose-specific enzyme II, BC component (fruA-1). Analysis of this protein sequence reveals the following:

| Possible site: 23 | | | | |
|---|---|---|---|---|
| >>> Seems to have no N-terminal signal sequence | | | | |
| | INTEGRAL | Likelihood = −10.56 | Transmembrane | 630-646 (618-653) |
| | INTEGRAL | Likelihood = −7.43 | Transmembrane | 307-323 (303-331) |
| | INTEGRAL | Likelihood = −7.01 | Transmembrane | 415-431 (412-435) |
| | INTEGRAL | Likelihood = −7.01 | Transmembrane | 448-464 (444-474) |
| | INTEGRAL | Likelihood = −3.72 | Transmembrane | 595-611 (591-612) |
| | INTEGRAL | Likelihood = −3.61 | Transmembrane | 530-546 (529-553) |
| | INTEGRAL | Likelihood = −2.39 | Transmembrane | 350-366 (350-371) |
| | INTEGRAL | Likelihood = −1.70 | Transmembrane | 486-502 (486-506) |
| | INTEGRAL | Likelihood = −1.49 | Transmembrane | 376-392 (376-392) |

```
----- Final Results -----
                              bacterial membrane --- Certainty = 0.5225(Affirmative) < succ>
                                bacterial outside --- Certainty = 0.0000(Not Clear) < succ>
                            bacterial cytoplasm --- Certainty = 0.0000(Not Clear) < succ>
```

[10712] A related GBS nucleic acid sequence <SEQ ID 9959> which encodes amino acid sequence <SEQ ID 9960> was also identified.

[10713] The protein has homology with the following sequences in the GENPEPT database.

| >GP: BAB04547 GB: AP001510 PTS system, fructose-specific enzyme II, BC | | | |
|---|---|---|---|
| component [Bacillus halodurans] | | | |
| Identities = 320/659 (48%), Positives = 438/659 (65%), Gaps = 46/659 (6%) | | | |
| Query: | 1 | MKIQDLLKKEVMIMDLKATSKEAAIDEMITKLVDTGVVTNFAIFKDGIMKREAQTSTGLG | 60 |
| | | +KI LLKK+ M+++L+A SKEA IDE++ L G + + FK I++RE+Q++TG+G | |
| Sbjct: | 2 | LKISELLKKDTMVLNLRAASKEAVIDELVRTLDKAGRLNDAQAFKRAILERESQSTTGVG | 61 |
| Query: | 61 | DGIAMPHSKNAAVKEATVLFAKSASGVDYEALDGQPTDLFFMIAAPDGANDTHLAALAEL | 120 |
| | | +GIA+PH+K AAVK+ + F +S +G+DYE+LDGQP+ LFFMIAA +GAN+ HL L+ L | |
| Sbjct: | 62 | EGIAIPHAKTAAVKQPAIAFGRSDAGIDYESLDGQPSHLFFMIAASEGANNEHLETLSRL | 121 |
| Query: | 121 | SKYLLKEGFADQLRQAKTPDDIIATFDSNSISQETVAPQTVQSTSKGSDYIVAVTACTTG | 180 |
| | | S +L+ E F L +A++ D+I+A D +E + +G + ++AVT C TG | |
| Sbjct: | 122 | STFLMDETFRSTLMKAQSEDEILAAID----KKEAETAGEAEEKQEGYE-LLAVTGCPTG | 176 |
| Query: | 181 | IAHTYMAEEALKKKAAEMGVGIKVETNGASGVGNKLTSSDIARAKGVIIAADKAVEMDRF | 240 |
| | | IAHTYMA + LK KA E+GV IKVETNG+ GV N+LT +I+ AK +I+AAD VEMDRF | |
| Sbjct: | 177 | IAHTYMAADNLKSKAQELGVSIKVETNGSGGVKNRLTDEEISAAKAIIVAADTKVEMDRF | 236 |
| Query: | 241 | DGKPLVSRPVADGIKKSEDLINIILDNKAQTYHAKNQNDKQSGESDGKSGLGS---AFYK | 297 |
| | | GKP++ PV DGI++ ++LI+ L KA Y + Q+ DG +G G FYK | |
| Sbjct: | 237 | HGKPVIQVPVTDGIRRPKELIDQALAGKAPVY----EGGAQASGEDGSAGGGRPKLGFYK | 292 |
| Query: | 298 | HLMGGVSQMLPFVIGGGIMIAIAFLFDNILGVPKDQLSNLGSYHEIAALFKNIGGA-AFA | 356 |
| | | HLM GVS MLPFV+GGGI+IAI+F+F P D SYH A + IGG AF | |
| Sbjct: | 293 | HLMNGVSNMLPFVVGGGILIAISFMFGIKAFDPSDP-----SYHPFAEMLMTIGGGNAFG | 347 |
| Query: | 357 | FMLPVLAGYIAYSIAEKPGLVAGFVAGSIASSGLAFGKVPFAEGGKATLALAGVPSGFLG | 416 |
| | | M+PVLA +IA SIA++PG AG + G IAS+G A GFLG | |
| Sbjct: | 348 | LMIPVLAAFIAMSIADRPGFAAGMIGGLIASTGEA---------------------GFLG | 386 |
| Query: | 417 | ALVGGFLAGGVILLLRKLLSGLPKSLEGIKSILLYPLLGVLITGFLMLLVNIPMAAINTA | 476 |
| | | L+ GFLAG V L ++K+L+ LP++L+GIK+IL YP+ + ITG +ML++ P+AA NT | |
| Sbjct: | 387 | GLIAGFLAGYVALGVKKVLANLPQTLDGIKTILFYPVFNIFITGMIMLVIVGPLAAFNTG | 446 |
| Query: | 477 | LNTFLQGLSGSSAVLMGLLVGGMMAVDMGGPVNKAAYVFGTGTLAATVANGGSVVMAAVM | 536 |
| | | L +L + ++ V++G+++GGMMAVDMGGP+NKAA+ FG + A G AAVM | |
| Sbjct: | 447 | LQDWLGSMGTANMVILGVILGGMMAVDMGGPINKAAFTFGIAMIDA----GNFGPHAAVM | 502 |
| Query: | 537 | AGGMVPPLAVFVATLLFKDKFNNEERQSGLTNIVMGLSFITEGAIPFGAADPARAIPSFI | 596 |
| | | AGGMVPPL + +AT LFK KF +ER++G TN ++G SFITEGAIPF AADP R IPS I | |
| Sbjct: | 503 | AGGMVPPLGIALATTLFKKKFTKQEREAGKTNYILGASFITEGAIPFAAADPGRVIPSII | 562 |
| Query: | 597 | VGSALTGALVGLAGIKLMAPHGGIFVI---ALTSNPLLYILFILIGAVVSGVLFGLFRK | 652 |
| | | VGSA G L L + L APHGG FVI + +NPLLY++ I+ G++V+ +L G ++K | |
| Sbjct: | 563 | VGSAFAGGLTALFNVTLSAPHGGAFVIFIGNIVNNPLLYLVAIIAGSIVTALLLGFWKK | 621 |

[10714] A related DNA sequence was identified in S. pyogenes <SEQ ID 6053> which encodes the amino acid sequence <SEQ ID 6054>. Analysis of this protein sequence reveals the following:

| Possible site: 18 | | | | |
|---|---|---|---|---|
| >>> Seems to have no N-terminal signal sequence | | | | |
| | INTEGRAL | Likelihood = −10.77 | Transmembrane | 624-640 (612-646) |
| | INTEGRAL | Likelihood = −7.59 | Transmembrane | 301-317 (297-321) |
| | INTEGRAL | Likelihood = −6.85 | Transmembrane | 442-458 (439-468) |
| | INTEGRAL | Likelihood = −5.95 | Transmembrane | 409-425 (406-426) |
| | INTEGRAL | Likelihood = −3.61 | Transmembrane | 524-540 (523-547) |
| | INTEGRAL | Likelihood = −2.50 | Transmembrane | 337-353 (337-353) |
| | INTEGRAL | Likelihood = −2.44 | Transmembrane | 589-605 (589-605) |
| | INTEGRAL | Likelihood = −1.70 | Transmembrane | 480-496 (480-500) |
| | INTEGRAL | Likelihood = −1.44 | Transmembrane | 370-386 (370-386) |

```
----- Final Results -----
                              bacterial membrane --- Certainty = 0.5310(Affirmative) < succ>
                                bacterial outside --- Certainty = 0.0000(Not Clear) < succ>
                            bacterial cytoplasm --- Certainty = 0.0000(Not Clear) < succ>
```

[10715] The protein has homology with the following sequences in the databases:

| >GP: BAB04547 GB: AP001510 PTS system, fructose-specific enzyme II, BC | | | |
|---|---|---|---|
| component [Bacillus halodurans] | | | |
| Identities = 322/659 (48%), Positives = 431/659 (64%), Gaps = 48/659 (7%) | | | |
| Query: | 1 | MKIQDLLRKDIMILDLQAISKEVAIDEMITKLVEKDIVHDFDVFKKSIMTREEQTSTGLG | 60 |
| | | +KI +LL+KD M+L+L+A SKE IDE++ L + ++D FK++I+ RE Q++TG+G | |
| Sbjct: | 2 | LKISELLKKDTMVLNLRAASKEAVIDELVRTLDKAGRLNDAQAFKRAILERESQSTTGVG | 61 |
| Query: | 61 | DGIAMPHSKNIVVDKPAVLFAKSNKGVDYKALDGQPTDLFFMIAAPQGANDTHLAALAEL | 120 |
| | | +GIA+PH+K V +PA+ F +S+ G+DY++LDGQP+ LFFMIAA +GAN+ HL L+ L | |
| Sbjct: | 62 | EGIAIPHAKTAAVKQPAIAFGRSDAGIDYESLDGQPSHLFFMIAASEGANNEHLETLSRL | 121 |
| Query: | 121 | SQYLLKDGFADKLRAAATPEAVIAVFD--EASTAKEEVVAPTSGQDFIVAVTACPTGIAH | 178 |
| | | S +L+ + F L A + + ++A D EA TA E + ++AVT CPTGIAH | |
| Sbjct: | 122 | STFLMDETFRSTLMKAQSEDEILAAIDKKEAETAGEAEEKQEGYE--LLAVTGCPTGIAH | 179 |
| Query: | 179 | TYMAEEALKKQAAEMGVAIKVETNGASGVANRLTAEDIQRAKGVIVAADKAVEMDRFDGK | 238 |
| | | TYMA + LK +A E+GV+IKVETNG+ GV NRLT E+I AK +IVAAD VEMDRF GK | |
| Sbjct: | 180 | TYMAADNLKSKAQELGVSIKVETNGSGGVKNRLTDEEISAAKAIIVAADTKVEMDRFHGK | 239 |
| Query: | 239 | QFIARPVADGIKKSQELISLILNNEGNTYHAKNGKSETAVSTEKTSLGG-----AFYKHL | 293 |
| | | I PV DGI++ +ELI L + Y + S E S GG FYKHL | |
| Sbjct: | 240 | PVIQVPVTDGIRRPKELIDQALAGKAPVY-----EGGAQASGEDGSAGGGRPKLGFYKHL | 294 |
| Query: | 294 | MGGVSQMLPFVIGGGIMIALAFLLDNMLGVPNDQLGSLGSYHEIAAIFMNIGGA-AFSFM | 352 |
| | | M GVS MLPFV+GGGI+IA++F+ P+D SYH A + M IGG AF M | |
| Sbjct: | 295 | MNGVSNMLPFVVGGGILIAISFMFGIKAFDPSDP-----SYHPFAEMLMTIGGGNAFGLM | 349 |
| Query: | 353 | LPVLAGYIAYSIAEKPGLVAGFVAGAIASNGLAFGKVPFAAGGEVSLGLTGVPSGFLGAL | 412 |
| | | +PVLA +IA SIA++PG AG + G IAS G A GFLG L | |
| Sbjct: | 350 | IPVLAAFIAMSIADRPGFAAGMIGGLIASTGEA---------------------GFLGGL | 388 |
| Query: | 413 | VGGFLAGGVILALRKLLAGLPRSLEGVKSILLYPLLGVLVTGFLMLFVNIPMAAINTALN | 472 |
| | | + GFLAG V L ++K+LA LP++L+G+K+IL YP+ + +TG +ML + P+AA NT L | |
| Sbjct: | 389 | IAGFLAGYVALGVKKVLANLPQTLDGIKTILFYPVFNIFITGMIMLVIVGPLAAFNTGLQ | 448 |
| Query: | 473 | DFLQGLSGSSAVLMGLLVGGMMAVDMGGPVNKAAYVFGTGTLAATVANGGSVVMAAVMAG | 532 |
| | | D+L + ++ V++G+++GGMMAVDMGGP+NKAA+ FG + A G AAVMAG | |
| Sbjct: | 449 | DWLGSMGTANMVILGVILGGMMAVDMGGPINKAAFTFGIAMIDA----GNFGPHAAVMAG | 504 |
| Query: | 533 | GMVPPLAVFVATLLFKDKFTKEERESGLTNIVMGLSFITEGAIPFGAADPARAIPSFIAG | 592 |
| | | GMVPPL + +AT LFK KFTK+ERE+G TN ++G SFITEGAIPF AADP R IPS I G | |
| Sbjct: | 505 | GMVPPLGIALATTLFKKKFTKQEREAGKTNYILGASFITEGAIPFAAADPGRVIPSIIVG | 564 |
| Query: | 593 | SALTGALVGLAGIKLMAPHGGIFVI---ALTSNPILYLVFVVIGALVSGILFGALRKKA | 648 |
| | | SA G L L + L APHGG FVI + +NP+LYLV ++ G++V+ +L G +K A | |
| Sbjct: | 565 | SAFAGGLTALFNVTLSAPHGGAFVIFIGNIVNNPLLYLVAIIAGSIVTALLLGFWKKDA | 623 |

[10716] An alignment of the GAS and GBS proteins is shown below.

| Identities = 526/652 (80%), Positives = 581/652 (88%), Gaps = 6/652 (0%) | | | |
|---|---|---|---|
| Query: | 1 | MKIQDLLKKEVMIMDLKATSKEAAIDEMITKLVDTGVVTNFAIFKDGIMKREAQTSTGLG | 60 |
| | | MKIQDLL+K++MI+DL+A SKE AIDEMITKLV+ +V +F +FK IM RE QTSTGLG | |
| Sbjct: | 1 | MKIQDLLRKDIMILDLQAISKEVAIDEMITKLVEKDIVHDFDVFKKSIMTREEQTSTGLG | 60 |
| Query: | 61 | DGIAMPHSKNAAVKEATVLFAKSASGVDYEALDGQPTDLFFMIAAPDGANDTHLAALAEL | 120 |
| | | DGIAMPHSKN V + VLFAKS GVDY+ALDGQPTDLFFMIAAP GANDTHLAALAEL | |
| Sbjct: | 61 | DGIAMPHSKNIVVDKPAVLFAKSNKGVDYKALDGQPTDLFFMIAAPQGANDTHLAALAEL | 120 |
| Query: | 121 | SKYLLKEGFADQLRQAKTPDDIIATFDSNSISQETVAPQTVQSTSKGSDYIVAVTACTTG | 180 |
| | | S+YLLK+GFAD+LR A TP+ +IA FD S ++E V T G D+IVAVTAC TG | |
| Sbjct: | 121 | SQYLLKDGFADKLRAAATPEAVIAVFDEASTAKEEVVAPT-----SGQDFIVAVTACPTG | 175 |
| Query: | 181 | IAHTYMAEEALKKKAAEMGVGIKVETNGASGVGNKLTSSDIARAKGVIIAADKAVEMDRF | 240 |
| | | IAHTYMAEEALKK+AAEMGV IKVETNGASGV N+LT+ DI RAKGVI+AADKAVEMDRF | |
| Sbjct: | 176 | IAHTYMAEEALKKQAAEMGVAIKVETNGASGVANRLTAEDIQRAKGVIVAADKAVEMDRF | 235 |
| Query: | 241 | DGKPLVSRPVADGIKKSEDLINIILDNKAQTYHAKNQNDKQSGESDGKSGLGSAFYKHLM | 300 |
| | | DGK ++RPVADGIKKS++LI++IL+N+ TYHAKN ++ S K+ LG AFYKHLM | |
| Sbjct: | 236 | DGKQFIARPVADGIKKSQELISLILNNEGNTYHAKN-GKSETAVSTEKTSLGGAFYKHLM | 294 |
| Query: | 301 | GGVSQMLPFVIGGGIMIAIAFLFDNILGVPKDQLSNLGSYHEIAALFKNIGGAAFAFMLP | 360 |
| | | GGVSQMLPFVIGGGIMIA+AFL DN+LGVP DQL +LGSYHEIAA+F NIGGAAF+FMLP | |
| Sbjct: | 295 | GGVSQMLPFVIGGGIMIALAFLLDNMLGVPNDQLGSLGSYHEIAAIFMNIGGAAFSFMLP | 354 |
| Query: | 361 | VLAGYIAYSIAEKPGLVAGFVAGSIASSGLAFGKVPFAEGGKATLALAGVPSGFLGALVG | 420 |
| | | VLAGYIAYSIAEKPGLVAGFVAG+IAS+GLAFGKVPFA GG+ +L L GVPSGFLGALVG | |
| Sbjct: | 355 | VLAGYIAYSIAEKPGLVAGFVAGAIASNGLAFGKVPFAAGGEVSLGLTGVPSGFLGALVG | 414 |
| Query: | 421 | GFLAGGVILLLRKLLSGLPKSLEGIKSILLYPLLGVLITGFLMLLVNIPMAAINTALNTF | 480 |
| | | GFLAGGVIL LRKLL+GLP+SLEG+KSILLYPLLGVL+TGFLML VNIPMAAINTALN F | |
| Sbjct: | 415 | GFLAGGVILALRKLLAGLPRSLEGVKSILLYPLLGVLVTGFLMLFVNIPMAAINTALNDF | 474 |
| Query: | 481 | LQGLSGSSAVLMGLLVGGMMAVDMGGPVNKAAYVFGTGTLAATVANGGSVVMAAVMAGGM | 540 |
| | | LQGLSGSSAVLMGLLVGGMMAVDMGGPVNKAAYVFGTGTLAATVANGGSVVMAAVMAGGM | |
| Sbjct: | 475 | LQGLSGSSAVLMGLLVGGMMAVDMGGPVNKAAYVFGTGTLAATVANGGSVVMAAVMAGGM | 534 |
| Query: | 541 | VPPLAVFVATLLFKDKFNNEERQSGLTNIVMGLSFITEGAIPFGAADPARAIPSFIVGSA | 600 |
| | | VPPLAVFVATLLFKDKF EER+SGLTNIVMGLSFITEGAIPFGAADPARAIPSFI GSA | |
| Sbjct: | 535 | VPPLAVFVATLLFKDKFTKEERESGLTNIVMGLSFITEGAIPFGAADPARAIPSFIAGSA | 594 |
| Query: | 601 | LTGALVGLAGIKLMAPHGGIFVIALTSNPLLYILFILIGAVVSGVLFGLFRK | 652 |
| | | LTGALVGLAGIKLMAPHGGIFVIALTSNP+LY++F++IGA+VSG+LFG RK | |
| Sbjct: | 595 | LTGALVGLAGIKLMAPHGGIFVIALTSNPILYLVFVVIGALVSGILFGALRK | 646 |

[10717] Based on this analysis, it was predicted that these proteins and their epitopes could be useful antigens for vaccines or diagnostics.

### EXAMPLE 1954

[10718] A DNA sequence (GBSx2063) was identified in S. agalactiae <SEQ ID 6055> which encodes the amino acid sequence <SEQ ID 6056>. Analysis of this protein sequence reveals the following:

```
Possible site: 29
>>> Seems to have no N-terminal signal sequence
----- Final Results -----
                            bacterial cytoplasm --- Certainty = 0.1532(Affirmative) < succ>
                              bacterial membrane --- Certainty = 0.000(Not Clear) < succ>
                                bacterial outside --- Certainty = 0.0000(Not Clear) < succ>
```

[10719] The protein has homology with the following sequences in the GENPEPT database.

| >GP: AAC24914 GB: AF012285 fructose-1-phosphate kinase | | | |
|---|---|---|---|
| [Bacillus subtilis] | | | |
| Identities = 146/303 (48%), Positives = 197/303 (64%) | | | |
| Query: | 1 | MIYTVTLNPSIDFIVRLDTLLLGSVNRMTSDDKYVGGKGINVSRILKRLKIDNTATGFIG | 60 |
| | | MIYTVTLNPS+D+IV ++ +G +NR + D KY GGKGINVSR+LKR + + A GF+G | |
| Sbjct: | 1 | MIYTVTLNPSVDYIVHVEDFTVGGLNRSSYDTKYPGGKGINVSRLLKRHHVASKALGFVG | 60 |
| Query: | 61 | GFTGHFVEDGLVLEGIKTDFVSVNEDTRINVKVKAKIETEINGGGPRITNEQLHRLEKLL | 120 |
| | | GFTG +++ L E ++T F V DTRINVK+K ETEING GP I++E + | |
| Sbjct: | 61 | GFTGEYIKTFLREENLETAFSEVKGDTRINVKLKTGDETEINGQGPTISDEDFKAFLEQF | 120 |
| Query: | 121 | SRLTPEDTVVFAGSAPASLGNKVYNTLIPIAKKTGAEVVCDFEGQTLLDALAYQPLLVKP | 180 |
| | | L D VV AGS P+SL + Y + K+ A VV D G+ LL A +P L+KP | |
| Sbjct: | 121 | QSLQEGDIVVLAGSIPSSLPHDTYEKIAEACKQQNARVVLDISGEALLKATEMKPFLMKP | 180 |
| Query: | 181 | NNHELADIFGVELEGLPDIEKYAHKILDKGAKNVIVSMAGDGALLVTPEASYFAKPIKGE | 240 |
| | | N+HEL ++FG + + + Y K++++GA++VIVSMAGDGALL T EA YFA KG+ | |
| Sbjct: | 181 | NHHELGEMFGTAITSVEEAVPYGKKLVEQGAEHVIVSMAGDGALLFTNEAVYFANVPKGK | 240 |
| Query: | 241 | VKNSVGAGDSMVAGFTGEFVKSKNPVEALKWGVACGTATTFSDDLATAEFIQDIYNKVEV | 300 |
| | | + NSVGAGDS+VAGF K EA + GV G+AT FS++L T EF+Q + +V+V | |
| Sbjct: | 241 | LVNSVGAGDSVVAGFLAGISKQLPLEEAFRLGVTSGSATAFSEELGTEEFVQQLLPEVKV | 300 |
| Query: | 301 | EKL | 303 |
| | | +L | |
| Sbjct: | 301 | TRL | 303 |

[10720] A related DNA sequence was identified in S. pyogenes <SEQ ID 6057> which encodes the amino acid sequence <SEQ ID 6058>. Analysis of this protein sequence reveals the following:

```
Possible site: 57
>>> Seems to have no N-terminal signal sequence
----- Final Results -----
                            bacterial cytoplasm --- Certainty = 0.1738(Affirmative) < succ>
                              bacterial membrane --- Certainty = 0.0000(Not Clear) < succ>
                                bacterial outside --- Certainty = 0.0000(Not Clear) < succ>
```

[10721] An alignment of the GAS and GBS proteins is shown below.

| Identities = 222/302 (73%), Positives = 261/302 (85%) | | | |
|---|---|---|---|
| Query: | 1 | MIYTVTLNPSIDFIVRLDTLLLGSVNRMTSDDKYVGGKGINVSRILKRLKIDNTATGFIG | 60 |
| | | MIYTVTLNPSIDFIVR+D + LGSVNRM SDDK+ GGKGINVSRIL+RL I +TATGF+G | |
| Sbjct: | 1 | MIYTVTLNPSIDFIVRIDQINLGSVNRMASDDKFAGGKGINVSRILQRLDIASTATGFLG | 60 |
| Query: | 61 | GFTGHFVEDGLVLEGIKTDFVSVNEDTRINVKVKAKIETEINGGGPRITNEQLHRLEKLL | 120 |
| | | GFTG F+E+ L EG+KTDFV ++DTRINVK+K++ ETE+NG GP I+ EQL L+ L | |
| Sbjct: | 61 | GFTGRFIEESLSAEGVKTDFVKGDQDTRINVKIKSQEETELNGQGPIISQEQLEDLKTKL | 120 |
| Query: | 121 | SRLTPEDTVVFAGSAPASLGNKVYNTLIPIAKKTGAEVVCDFEGQTLLDALAYQPLLVKP | 180 |
| | | S+LT EDTVVFAGSAPA+LGN VY L+P+ +++GA+VVCDFEGQTL+DALAY PLLVKP | |
| Sbjct: | 121 | SQLTAEDTVVFAGSAPANLGNAVYKELLPLVRQSGAQVVCDFEGQTLIDALAYNPLLVKP | 180 |
| Query: | 181 | NNHELADIFGVELEGLPDIEKYAHKILDKGAKNVIVSMAGDGALLVTPEASYFAKPIKGE | 240 |
| | | NNHEL IFG L L D+E YA ++L+ GA+NVI+SMAGDGALLVT EA+YFAKPIKGE | |
| Sbjct: | 181 | NNHELEAIFGTILTSLDDVETYARRLLEMGAQNVIISMAGDGALLVTKEATYFAKPIKGE | 240 |
| Query: | 241 | VKNSVGAGDSMVAGFTGEFVKSKNPVEALKWGVACGTATTFSDDLATAEFIQDIYNKVEV | 300 |
| | | VKNSVGAGDSMVAGFTGEF+KS+NP+EALKWGVACGTAT FSDDLAT FI++ Y+KVEV | |
| Sbjct: | 241 | VKNSVGAGDSMVAGFTGEFMKSQNPIEALKWGVACGTATAFSDDLATIAFIKETYHKVEV | 300 |
| Query: | 301 | EK | 302 |
| | | EK | |
| Sbjct: | 301 | EK | 302 |

[10722] Based on this analysis, it was predicted that these proteins and their epitopes could be useful antigens for vaccines or diagnostics.

### EXAMPLE 1955

[10723] A DNA sequence (GBSx2064) was identified in S. agalactiae <SEQ ID 6059> which encodes the amino acid sequence <SEQ ID 6060>. Analysis of this protein sequence reveals the following:

```
Possible site: 26
>>> Seems to have no N-terminal signal sequence
----- Final Results -----
                            bacterial cytoplasm --- Certainty = 0.2769(Affirmative) < succ>
                              bacterial membrane --- Certainty = 0.0000(Not Clear) < succ>
                                bacterial outside --- Certainty = 0.0000(Not Clear) < succ>
```

[10724] A related GBS nucleic acid sequence <SEQ ID 9961> which encodes amino acid sequence <SEQ ID 9962> was also identified.

[10725] The protein has homology with the following sequences in the GENPEPT database.

| >GP: AAC24913 GB: AF012285 FruR [Bacillus subtilis] | | | |
|---|---|---|---|
| Identities = 97/247 (39%), Positives = 148/247 (59%), Gaps = 4/247 (1%) | | | |
| Query: | 23 | MLKSKRKEIILSRLEQNKSVTLDELTSILETSESTVRRDLDELESAGFLKRVHGGAELPY | 82 |
| | | ML +R ++I+ ++E++ V + EL ++ SEST+RRDL LE GFLKRVHGGA | |
| Sbjct: | 1 | MLTPERHQLIIDQIEKHDVVKIQELINLTNASESTIRRDLSTLEERGFLKRVHGGAAKLS | 60 |
| Query: | 83 | SLGQELSNQEKAIKNVQKKLDIARQTAKLIAKQDVIFIDAGTTTELLIDFLPH-EQLTVV | 141 |
| | | + E EK+ KN+ KL IA + A L+ + D I++DAGTTT +IDF+ + + VV | |
| Sbjct: | 61 | DIRLEPDMLEKSSKNLHDKLKIAEKAASLLEEGDCIYLDAGTTTLHMIDFMDKTKDIVVV | 120 |
| Query: | 142 | TNSIHHAAKLVDRGIKTIIIGGAVKHSTDASIGQVAINQIRQITVDKAFLGMNGID-EVY | 200 |
| | | TN + H L+ + I ++GG VKH T A IG ++ + Q DK+FLG NG+ E | |
| Sbjct: | 121 | TNGVMHIDALIRKEISFYLLGGYVKHRTGAIIGGASLVAMDQYRFDKSFLGTNGVHTEAG | 180 |
| Query: | 201 | LTTPDLEEAAIKEAIINNSQQTFILMDSSKIGQVTFAKVKEINDINLVTNKTDSELMTII | 260 |
| | | TTPD +EA +K+ I ++ ++L D SK G+++F+ I D ++T TD+E +T | |
| Sbjct: | 181 | FTTPDPDEALLKQKAIKQAKHAYVLADPSKFGEISFSAFAGIGDATIIT--TDAEELTFD | 238 |
| Query: | 261 | KEKMKVI | 267 |
| | | + K + | |
| Sbjct: | 239 | NYQEKTV | 245 |

[10726] A related DNA sequence was identified in S. pyogenes <SEQ ID 6061> which encodes the amino acid sequence <SEQ ID 6062>. Analysis of this protein sequence reveals the following:

```
Possible site: 27
>>> Seems to have no N-terminal signal sequence
----- Final Results -----
                            bacterial cytoplasm --- Certainty = 0.2604(Affirmative) < succ>
                              bacterial membrane --- Certainty = 0.0000(Not Clear) < succ>
                                bacterial outside --- Certainty = 0.0000(Not Clear) < succ>
```

[10727] An alignment of the GAS and GBS proteins is shown below.

| Identities = 135/237 (56%), Positives = 184/237 (76%) | | | |
|---|---|---|---|
| Query: | 33 | LSRLEQNKSVTLDELTSILETSESTVRRDLDELESAGFLKRVHGGAELPYSLGQELSNQE | 92 |
| | | ++++ + V+L++L +L +SEST+RRDL ELE G L RVHGGAEL +SL +ELSNQE | |
| Sbjct: | 1 | MAKITEENYVSLEDLMQLLNSSESTIRRDLGELEQEGRLHRVHGGAELFHSLQEELSNQE | 60 |
| Query: | 93 | KAIKNVQKKLDIARQTAKLIAKQDVIFIDAGTTTELLIDFLPHEQLTVVTNSIHHAAKLV | 152 |
| | | K++KN K IA++ ++LI DVIFIDAGTTTE L+ FL + LTVVTNSIHHAA+LV | |
| Sbjct: | 61 | KSVKNSHIKKAIAQRASQLIYDNDVIFIDAGTTTEFLLPFLQAKNLTVVTNSIHHAARLV | 120 |
| Query: | 153 | DRGIKTIIIGGAVKHSTDASIGQVAINQIRQITVDKAFLGMNGIDEVYLTTPDLEEAAIK | 212 |
| | | + I+TII+GG VK +TDASIG VA+ QIRQ+ DKAFLGMNG+D+ YLTTPD+EEA IK | |
| Sbjct: | 121 | ELSIETIIVGGYVKQTTDASIGNVALEQIRQMNFDKAFLGMNGVDDSYLTTPDNEEAVIK | 180 |
| Query: | 213 | EAIINNSQQTFILMDSSKIGQVTFAKVKEINDINLVTNKTDSELMTIIKEKMKVIQV | 269 |
| | | +A+++N++ +IL+D +KIGQV+F KV IND+ ++T + ++ IKEK KVI++ | |
| Sbjct: | 181 | KAVLSNAKLAYILVDGTKIGQVSFVKVAPINDVTIITLGGSASILKQIKEKAKVIEL | 237 |

[10728] Based on this analysis, it was predicted that these proteins and their epitopes could be useful antigens for vaccines or diagnostics.

### EXAMPLE 1956

[10729] A DNA sequence (GBSx2065) was identified in S. agalactiae <SEQ ID 6063> which encodes the amino acid sequence <SEQ ID 6064>. This protein is predicted to be beta-lactam resistance factor. Analysis of this protein sequence reveals the following:

```
Possible site: 32
>>> Seems to have no N-terminal signal sequence
----- Final Results -----
                            bacterial cytoplasm --- Certainty = 0.5777(Affirmative) < succ>
                              bacterial membrane --- Certainty = 0.0000(Not Clear) < succ>
                                bacterial outside --- Certainty = 0.0000(Not Clear) < succ>
```

[10730] The protein has homology with the following sequences in the GENPEPT database.

| >GP: CAB89121 GB: AJ277485 beta-lactam resistance factor | | | |
|---|---|---|---|
| [Streptococcus pneumoniae] | | | |
| Identities = 215/410 (52%), Positives = 283/410 (68%) | | | |
| Query: | 1 | MTLRELTIEEFKEHSGNYDSQSFLQTPEMAKLLEKRGYDVRYLGYQVENKLEIISLSYIM | 60 |
| | | M L LT EEF+ +S S+SF+Q+ +M LLEKRG + YL + E ++++ +L Y + | |
| Sbjct: | 1 | MALTTLTKEEFQTYSDQVSSRSFMQSVQMGDLLEKRGARIVYLALKQEGEIQVAALVYSL | 60 |
| Query: | 61 | PVTGGFQMKIDSGPVHSNSKYLKQFYKALQGYAKSNGVLELIVEPYDDYQLFTSSGVPSN | 120 |
| | | P+ GG M+++SGP+++ L FY L+ YAK NGVLEL+V+PY+ YQ F S G P + | |
| Sbjct: | 61 | PMLGGLHMELNSGPIYTQQDALPVFYAELKEYAKQNGVLELLVKPYETYQTFDSQGNPID | 120 |
| Query: | 121 | QGNDNLIEDFTSSGYHHDGLTTGFTGKYLSWHYVKNLEGVTSETLLSSFSKTGRALVKKA | 180 |
| | | ++I+D T GY DGLTTG+ G W Y K+L +T ++LL SFSK G+ LVKKA | |
| Sbjct: | 121 | AEKKSIIQDLTDLGYQFDGLTTGYPGGEPDWLYYKDLTELTEKSLLKSFSKKGKPLVKKA | 180 |
| Query: | 181 | MSFGIKVRVLKRDELHLFKEITTSTSNRRDYMDKSLDYYQDFYDSFEGKAEFVIATLNFR | 240 |
| | | +FGI+++ LKR+EL +FK IT TS RR+Y DKSL+YY+ FYD+F +AEF+IA+LNF | |
| Sbjct: | 181 | ETFGIRLKKLKREELSIFKNITKETSERREYSDKSLEYYEHFYDTFGEQAEFLIASLNFS | 240 |
| Query: | 241 | EYDHNLQIKAEALENKLKLLDERFRENADSPKYHRQRSEIINQLASFETRRQEVQSFIQK | 300 |
| | | +3 LQ + LE L L +N S K Q E +Q +FE R+ E + I+K | |
| Sbjct: | 241 | DYMSKLQGEQSKLEENLDKLRLDLSKNPHSEKKQNQLREYSSQFETFEVRKAEARDLIEK | 300 |
| Query: | 301 | YDNQDVVLAGSLFVYSLKETVYFFSGSYTEFNKFYAPAVLQEYVMQEALKRGSTFYNLLG | 360 |
| | | Y +D+VLAGSLFVY +ET Y FSGSYTEFNKFYAPA+LQ+YVM E++KRG YN LG | |
| Sbjct: | 301 | YGEEDIVLAGSLFVYMPQETTYLFSGSYTEFNKFYAPALLQKYVMLESIKRGIPKYNFLG | 360 |
| Query: | 361 | IQGTFDGSDSILRFKQNFNGCIIRKMGTFNYYPSPFKYKGIQLLKKVLKR | 410 |
| | | IQG FDGSD +LRFKQNFNG I+RK GTF Y+PSP KYK IQLLKK++ R | |
| Sbjct: | 361 | IQGIFDGSDGVLRFKQNFNGYIVRKAGTFRYHPSPLKYKAIQLLKKIVGR | 410 |

[10731] There is also homology to SEQ ID 5460.

[10732] Based on this analysis, it was predicted that this protein and its epitopes, could be useful antigens for vaccines or diagnostics.

### EXAMPLE 1957

[10733] A DNA sequence (GBSx2066) was identified in S. agalactiae <SEQ ID 6065> which encodes the amino acid sequence <SEQ ID 6066>. This protein is predicted to be cell wall protein, 40 kDa (sr 5′ region). Analysis of this protein sequence reveals the following:

| Possible site: 42 | | | | |
|---|---|---|---|---|
| >>> Seems to have no N-terminal signal sequence | | | | |
| | INTEGRAL | Likelihood = −3.45 | Transmembrane | 25-41 (23-42) |

```
----- Final Results -----
                              bacterial membrane --- Certainty = 0.2381(Affirmative) < succ>
                                bacterial outside --- Certainty = 0.0000(Not Clear) < succ>
                            bacterial cytoplasm --- Certainty = 0.0000(Not Clear) < succ>
```

[10734] A related GBS nucleic acid sequence <SEQ ID 9963> which encodes amino acid sequence <SEQ ID 9964> was also identified.

[10735] The protein has homology with the following sequences in the GENPEPT database.

| !GB: AF278686 choline binding protein D; CbpD [Strept . . . | | | |
|---|---|---|---|
| !GB: AF278686 choline binding protein D; CbpD [trept . . . | | | |
| >GP: AAF87768 GB: AF278686 choline binding protein D; CbpD | | | |
| [Streptococcus pneumoniae] | | | |
| Identities = 63/230 (27%), Positives = 108/230 (46%), Gaps = 34/230 (14%) | | | |
| Query: | 324 | WTEQGGQDDIKWYTAVTTGDG------NYKVAVSFADHKNEKGLYNIHLYYQEASGTLVG | 377 |
| | | W+ G + W + V GD-------NY S+ + +++++ G VG | |
| Sbjct: | 123 | WSTAGTYGHVAWVSNVM-GDQISIEEYNYGYTESYNKRVIKANTMTGFIHFKDLDGGSVG | 181 |
| Query: | 378 | VTGTKVTVAGTNSSQEPIENGLAKTGVYNIIGSTEVKNEAKISSQTQFTLEKGDKINYDQ | 437 |
| | | + + + GT+ + + +K E S G+K++YDQ | |
| Sbjct: | 182 | NSQSSTSTGGTHYFKT----------------KSAIKTEPLASGTVIDYYYPGEKVHYDQ | 225 |
| Query: | 438 | VLTADGYQWISYKSYSGVRRYIPVKKLTTSSEKAKDEATKPTSYPNLPKTG-TYTFTKTV | 496 |
| | | +L DGY+W+SY +Y+G RY+ ++ + + P L TG T+ F | |
| Sbjct: | 226 | ILEKDGYKWLSYTAYNGSYRYVQLEAVNKN----------PLGNSVLSSTGGTHYFKTKS | 275 |
| Query: | 497 | DVKSQPKVSSPVEFNFQKGEKIHYDQVLVVDGHQWISYKSYSGIRRYIEI | 546 |
| | | +K++P VS+ V + GEK+HYDQ+L DG++W+SY +Y+G RRYI++ | |
| Sbjct: | 276 | AIKTEPLVSATVIDYYYPGEKVHYDQILEKDGYKWLSYTAYNGSRRYIQL | 325 |
| Identities = 49/161 (30%), Positives = 85/161 (52%), Gaps = 14/161 (8%) | | | |
| Query: | 116 | GNYVYSKETEVKNTPSKSAPVAFYAKKGDKVFYDQVFNKDNVKWISYKSFCGVRRYAAIE | 175 |
| | | G + + ++ +K P S V Y G+KV YDQ+ KD KW+SY ++ G RY +E | |
| Sbjct: | 191 | GTHYFKTKSAIKTEPLASGTVIDYYYPGEKVHYDQILEKDGYKWLSYTAYNGSYRYVQLE | 250 |
| Query: | 176 | SLDPSGGSETKAPTPVTNSGSNNQEKIATQGNYTFSHKVEVKNEAKVASPTQFTLDKGDR | 235 |
| | | +++ + P+ NS + +T G + F K +K E V++ G++ | |
| Sbjct: | 251 | AVNKN---------PLGNSVLS-----STGGTHYFKTKSAIKTEPLVSATVIDYYYPGEK | 296 |
| Query: | 236 | IFYDQILTIEGNQWLSYKSFNGVRRFVLLGKASSVEKTEDK | 276 |
| | | + YDQIL +G +WLSY ++NG RR++ L +S + +++ | |
| Sbjct: | 297 | VHYDQILEKDGYKWLSYTAYNGSRRYIQLEGVTSSQNYQNQ | 337 |
| Identities = 52/192 (27%), Positives = 90/192 (46%), Gaps = 3/192 (6%) | | | |
| Query: | 295 | ISNETTTGFDILITNIKDDNGIAAVKVPVWTEQGGQDDIKWYTAVTTGDGNYKVAVSFAD | 354 |
| | | I T TGF + KD +G + T GG K +A+ T + + | |
| Sbjct: | 161 | IKANTMTGF----IHFKDLDGGSVGNSQSSTSTGGTHYFKTKSAIKTEPLASGTVIDYY- | 215 |
| Query: | 355 | HKNEKGLYNIHLY---YQEASGTLVGVTGTKVTVAGTNSSQEPIENGLAKT--GVYNIIG | 409 |
| | | + EK Y+ L Y+ S T + V + N + P+ N + + G + | |
| Sbjct: | 216 | YPGEKVHYDQILEKDGYKWLSYTAYNGSYRYVQLEAVNKN--PLGNSVLSSTGGTHYFKT | 273 |
| Query: | 410 | STEVKNEAKISSQTQFTLEKGDKINYDQVLTADGYQWISYKSYSGVRRYIPVKKLTTSSE | 469 |
| | | + +K E +S+ G+K++YDQ+L DGY+W+SY +Y+G RRYI ++ + TSS+ | |
| Sbjct: | 274 | KSAIKTEPLVSATVIDYYYPGEKVHYDQILEKDGYKWLSYTAYNGSRRYIQLEGV-TSSQ | 332 |
| Query: | 470 | KAKDEATKPTSY | 481 |
| | | ++++ +SY | |
| Sbjct: | 333 | NYQNQSGNISSY | 344 |
| Identities = 33/113 (29%), Positives = 56/113 (49%), Gaps = 2/113 (1%) | | | |
| Query: | 91 | NTATKDITTPLVETKPMVEKTLPEQGNYVYSK-ETEVKNTPSKSAPVAFYAKKGDKVFYD | 149 |
| | | N + + + V P+ L G Y K ++ +K P SA V Y G+KV YD | |
| Sbjct: | 241 | NGSYRYVQLEAVNKNPLGNSVLSSTGGTHYFKTKSAIKTEPLVSATVIDYYYPGEKVHYD | 300 |
| Query: | 150 | QVFNKDNVKWISYKSFCGVRRYAAIESLDPSGGSETKAPTPVTNSGSNNQEKI | 202 |
| | | Q+ KD KW+SY ++ G RRY +E + S + ++ +++ GS++ + | |
| Sbjct: | 301 | QILEKDGYKWLSYTAYNGSRRYIQLEGVTSSQNYQNQSGN-ISSYGSHSSSTV | 352 |

[10736] A related GBS gene <SEQ ID 8937> and protein <SEQ ID 8938> were also identified. Analysis of this protein sequence reveals the following:

Lipop: Possible site: −1 Crend: 10
McG: Discrim Score: −6.74
GvH: Signal Score (−7.5): 1.26
Possible site: 42
>>> Seems to have no N-terminal signal sequence
ALOM program count: 1 value: -3.45 threshold: 0.0

| | | | |
|---|---|---|---|
| INTEGRAL | Likelihood = −3.45 | Transmembrane | 22-39 (23-42) |

| | |
|---|---|
| PERIPHERAL | Likelihood = 6.26 371 |

```
modified ALOM score: 1.19
*** Reasoning Step: 3
----- Final Results -----
                              bacterial membrane --- Certainty = 0.2381(Affirmative) < succ>
                                bacterial outside --- Certainty = 0.0000(Not Clear) < succ>
                            bacterial cytoplasm --- Certainty = 0.0000(Not Clear)
```

[10737] The protein has homology with the following sequences in the databases:

[chemical structure]

[10738] A related DNA sequence was identified in S. pyogenes <SEQ ID 6067> which encodes the amino acid sequence <SEQ ID 6068>. Analysis of this protein sequence reveals the following:

```
Possible site: 23
>>> Seems to have a cleavable N-term signal seq.
----- Final Results -----
                                bacterial outside --- Certainty = 0.3000(Affirmative) < succ>
                              bacterial membrane --- Certainty = 0.0000(Not Clear) < succ>
                            bacterial cytoplasm --- Certainty = 0.0000(Not Clear) < succ>
```

[10739] The protein has homology with the following sequences in the databases:

| >GP: AAF87768 GB: AF278686 choline binding protein D; CbpD | | | |
|---|---|---|---|
| [Streptococcus pneumoniae] | | | |
| Identities = 93/217 (42%), Positives = 136/217 (61%), Gaps = 18/217 (8%) | | | |
| Query: | 42 | GDNYPSKWKKGNG-IDSWNMYIRQCTSFAAFRLSSANGFQLPKGYGNACTWGHIAKNQGY | 100 |
| | | GD+YP+ +K G+ ID W MY RQCTSF AFRLS+ NGF++P YGNA WGH A+ +GY | |
| Sbjct: | 51 | GDDYPAYYKNGSQEIDQWRMYSRQCTSFVAFRLSNVNGFEIPAAYGNANEWGHRARREGY | 110 |
| Query: | 101 | PVNKTPSIGAIAWFDKNAYQSNAAYGHVAWVADIRGDTVTIEEYNYNAGQGPERYHKRQI | 160 |
| | | V+ TP+IG+I W + YGHVAWV+++ GD + IEEYNY E Y+KR I | |
| Sbjct: | 111 | RVDNTPTIGSITW------STAGTYGHVAWVSNVMGDQIEIEEYNYGY---TESYNKRVI | 161 |
| Query: | 161 | PKSQVSGYIHFKDLSSQTSHSYPRQLKHISQASFDPSGTYHFTTRLPVKGQTSIDSPDLA | 220 |
| | | + ++G+IHFKDL + + SQ+S GT++F T+ +K + + | |
| Sbjct: | 162 | KANTMTGFIHFRDLDGGSVGN--------SQSSTSTGGTHYFKTKSAIKTEPLASGTVID | 213 |
| Query: | 221 | YYEAGQSVYYDKVVTAGGYTWLSYLSFSGNRRYIPIK | 257 |
| | | YY G+ V+YD+++ GY WLSY +++G+RY+ ++ | |
| Sbjct: | 214 | YYYPGEKVHYDQILEKDGYKWLSYTAYNGSYRYVQLE | 250 |

[10740] An alignment of the GAS and GBS proteins is shown below.

| Identities = 34/94 (36%), Positives = 52/94 (55%) | | | |
|---|---|---|---|
| Query: | 453 | SGVRRYIPVKKLTTSSEKAKDSATKPTSYPNLPKTGTYTFTKTVDVKSQPKVSSPVEFNF | 512 |
| | | S V YI K L++ + + K S + +GTY FT + VK Q + SP + | |
| Sbjct: | 163 | SQVSGYIHFKDLSSQTSHSYPRQLKHISQASFDPSGTYHFTTRLPVKGQTSIDSPDLAYY | 222 |
| Query: | 513 | QKGEKIHYDQVLVVDGHQWISYKSYSGIRRYIEI | 546 |
| | | + G+ ++YD+V+ G+ W+SY S+SG RRYI I | |
| Sbjct: | 223 | EAGQSVYYDKVVTAGGYTWLSYLSFSGNRRYIPI | 256 |
| Identities = 30/78 (38%), Positives = 45/78 (57%), Gaps = 2/78 (2%) | | | |
| Query: | 402 | TGVYNIIGSTEVKNEAKISSQTQFTLEKGDKINYDQVLTADGYQWISYKSYSGVRRYIPV | 461 |
| | | +G Y+ VK + I S E G + YD+V+TA GY W+SY S+SG RRYIP+ | |
| Sbjct: | 197 | SGTYHFTTRLPVKGQTSIDSPDLAYYEAGQSVYYDKVVTAGGYTWLSYLSFSGNRRYIPI | 256 |
| Query: | 462 | KKLTTSSEKAKDEATKPT | 479 |
| | | K+ + +++ TKP+ | |
| Sbjct: | 257 | KS--PAQSVVQNDNTKPS | 272 |
| Identities = 27/94 (28%), Positives = 47/94 (49%) | | | |
| Query: | 198 | NQEKIATQGNYTFSHKVEVKNEAKVASPTQFTLDKGDRIFYDQILTIEGNQWLSYKSFNG | 257 |
| | | +Q G Y F+ ++ VK + + SP + G ++YD+++T G WLSY SF+G | |
| Sbjct: | 190 | SQASFDPSGTYHFTTRLPVKGQTSIDSPDLAYYEAGQSVYYDKVVTAGGYTWLSYLSFSG | 249 |
| Query: | 258 | VRRFVLLGKASSVEKTEDKEKVSPQPQARITKTG | 291 |
| | | RR++ + + + D K S + +T G | |
| Sbjct: | 250 | NRRYIPIKEPAQSVVQNDNTKPSIKVGDTVTFPG | 283 |
| Identities = 23/73 (31%), Positives = 35/73 (47%) | | | |
| Query: | 103 | ETKPMVEKTLPEQGNYVYSKETEVKNTPSKSAPVAFYAKKGDKVFYDQVFNKDNVKWISY | 162 |
| | | + K + + + G Y ++ VK S +P Y + G V+YD+V W+SY | |
| Sbjct: | 185 | QLKHISQASFDPSGTYHFTTRLPVKGQTSIDSPDLAYYEAGQSVYYDKVVTAGGYTWLSY | 244 |
| Query: | 163 | KSFCGVRRYAAIE | 175 |
| | | SF G RRY I+ | |
| Sbjct: | 245 | LSFSGNRRYIPIK | 257 |

[10741] SEQ ID 8938 (GBS91) was expressed in E. coli as a His-fusion product. SDS-PAGE analysis of total cell extract is shown in FIG. 18 (lane 7; MW 63 kDa).

[10742] The GBS91-His fusion product was purified (FIG. 195, lane 9) and used to immunise mice. The resulting antiserum was used for FACS (FIG. 283), which confirmed that the protein is immunoaccessible on GBS bacteria.

[10743] Based on this analysis, it was predicted that these proteins and their epitopes could be useful antigens for vaccines or diagnostics.

### EXAMPLE 1958

[10744] A DNA sequence (GBSx2067) was identified in S. agalactiae <SEQ ID 6069> which encodes the amino acid sequence <SEQ ID 6070>. This protein is predicted to be thiamine biosynthesis protein. Analysis of this protein sequence reveals the following:

```
Possible site: 40
>>> Seems to have no N-terminal signal sequence
----- Final Results -----
                            bacterial cytoplasm --- Certainty = 0.0984(Affirmative) < succ>
                              bacterial membrane --- Certainty = 0.0000(Not Clear) < succ>
                                bacterial outside --- Certainty = 0.0000(Not Clear) < succ>
```

[10745] The protein has homology with the following sequences in the GENPEPT database.

| >GP: CAB49673 GB: AJ248285 PROBABLE 2-DEHYDROPANTOATE 2-REDUCTASE (EC | | | |
|---|---|---|---|
| 1.1.1.169) [Pyrococcus abyssi] | | | |
| Identities = 85/301 (28%), Positives = 150/301 (49%), Gaps = 7/301 (2%) | | | |
| Query: | 1 | MLVYIAGSGAMGCRFGYQISKTNHDVILLDNWADHIMAIKENGLKVTGDTEDLVKLPIMK | 60 |
| | | M +YI G+GA+G FG ++ DV+L+ H+ AI E GLK+G + VK+ | |
| Sbjct: | 1 | MKIYILGAGAIGSLFGGLLANAGEDVLLIGR-DPHVSAINEKGLKIVGIKDLNVKVEATT | 59 |
| Query: | 61 | PTDATEEADLIILFTKAMQLPNMLQDIKKIIGKKTKVLCLLNGLGHEDVIRQYIPEHNIL | 120 |
| | | E+ DLI+L TK+ L+ + I+ K + VL + NG+G+ED I ++ + | |
| Sbjct: | 60 | RVPE-EKPDLIVLATKSYSTIEALKSARHIV-KGSWVLSIQNGIGNEDKIIEF--GGKAI | 115 |
| Query: | 121 | MGVTVWTAGLKGPGHAHLEGVGSVNLQSIDPNNQEAGHRVTELLNEAKLQATYDENVLPN | 180 |
| | | G+T A ++ PG G G + ++ +V ++ N A ++ EN++ | |
| Sbjct: | 116 | GGITTNGAMVEAPGVIKWTGKGVTIIGLYPQGREKFIEKVADVFNSADIETHVSENIISW | 175 |
| Query: | 181 | IWRKACVNGTMNSTCALLDCTIGQLFASEDGVNMVHEIIHEFVTVGKAEGVELDEEEITK | 240 |
| | | IW KA VN +N LL+ + ++ ++M E++ E V G+E D + | |
| Sbjct: | 176 | IWAKAIVNSAINPIGTLLEVKNKVIRENDFLLSMAMEVVKEGCRVALQNGIEFDVPPMDL | 235 |
| Query: | 241 | YVMDTSVKAAHHYPSMHQDLVQNQRLTEIDFLNGAVNKKGENLGIDTPYCRLITQLIHTKE | 301 |
| | | + T + +Y SM QD+ + ++ TE+D++NG + + + + ++ P L+ LI KE | |
| Sbjct: | 236 | F-FQTLEQTRENYNSMLQDIWRGKK-TEVDYINGKIVEYAKAVNLEAPMNLLLWGLIKGKE | 294 |

[10746] A related DNA sequence was identified in S. pyogenes <SEQ ID 6071> which encodes the amino acid sequence <SEQ ID 6072>. Analysis of this protein sequence reveals the following:

```
Possible site: 22
>>> Seems to have no N-terminal signal sequence
----- Final Results -----
                            bacterial cytoplasm --- Certainty = 0.1392(Affirmative) < succ>
                              bacterial membrane --- Certainty = 0.0000(Not Clear) < succ>
                                bacterial outside --- Certainty = 0.0000(Not Clear) < succ>
```

[10747] An alignment of the GAS and GBS proteins is shown below.

| Identities = 262/307 (85%), Positives = 288/307 (93%) | | | |
|---|---|---|---|
| Query: | 1 | MLVYIAGSGAMGCRFGYQISKTNHDVILLDNWADHIMAIKENGLKVTGDTEDLVKLPIMK | 60 |
| | | MLVYIAGSGAMGCRFGYQISKTN+DVILLDNW DHI AIKENGL VTGD E+ VKLPIMK | |
| Sbjct: | 1 | MLVYIAGSGAMGCRFGYQISKTNNDVILLDNWEDHINAIKENGLVVTGDVEETVKLPIMK | 60 |
| Query: | 61 | PTDATEEADLIILFTKAMQLPNMLQDIKKIIGKKTKVLCLLNGLGHEDVIRQYIPEHNIL | 120 |
| | | PT+AT+EADLIILFTKAMQLP MLQDIK IIGK+TKVLCLLNGLGHEDVIRQYIPEHNIL | |
| Sbjct: | 61 | PTEATQEADLIILFTKAMQLPQMLQDIKGIIGKETKVLCLLNGLGHEDVIRQYIPEHNIL | 120 |
| Query: | 121 | MGVTVWTAGLKGPGHAHLEGVGSVNLQSIDPNNQEAGHRVTELLNEAKLQATYDENVLPN | 180 |
| | | MGVTVWTAGL+GPG AHL+GVG++NLQS+DP+NQEAGH+V +LLNEA L ATYDENV+PN | |
| Sbjct: | 121 | MGVTVWTAGLEGPGRAHLQGVGALNLQSMDPSNQEAGHQVADLLNEANLNATYDENVVPN | 180 |
| Query: | 181 | IWRKACVNGTMNSTCALLDCTIGQLFASEDGVNMVHEIIHEFVTVGKAEGVELDEEEITK | 240 |
| | | IWRKACVNGTMNSTCALLDCTIG+LFASEDG+ MV EIIHEFV VG+AEGVEL+EEEIT+ | |
| Sbjct: | 181 | IWRKACVNGTMNSTCALLDCTIGELFASEDGLKMVKEIIHEFVIVGQAEGVELNEEEITQ | 240 |
| Query: | 241 | YVMDTSVKAAHHYPSMHQDLVQNQRLTEIDFLNGAVNKKGENLGIDTPYCRLITQLIHTK | 300 |
| | | YVMDTSVKAAHHYPSMHQDLVQN RLTEIDF+NGAVN KGE LGI+TPYCR+IT+L+H K | |
| Sbjct: | 241 | YVMDTSVKAAHHYPSMHQDLVQNHRLTEIDFINGAVNTKGEKLGINTPYCRMITELVHAK | 300 |
| Query: | 301 | ENVLSIK | 307 |
| | | E VL+I+ | |
| Sbjct: | 301 | EAVLNIQ | 307 |

[10748] Based on this analysis, it was predicted that these proteins and their epitopes could be useful antigens for vaccines or diagnostics.

### EXAMPLE 1959

[10749] A DNA sequence (GBSx2068) was identified in S. agalactiae <SEQ ID 6073> which encodes the amino acid sequence <SEQ ID 6074>. Analysis of this protein sequence reveals the following:

| Possible site: 36 | | | | |
|---|---|---|---|---|
| >>> Seems to have no N-terminal signal sequence | | | | |
| | INTEGRAL | Likelihood = −3.03 | Transmembrane | 61-77 (61-78) |
| | INTEGRAL | Likelihood = −1.33 | Transmembrane | 80-96 (79-96) |

```
----- Final Results -----
                              bacterial membrane --- Certainty = 0.2211(Affirmative) < succ>
                                bacterial outside --- Certainty = 0.0000(Not Clear) < succ>
                            bacterial cytoplasm --- Certainty = 0.0000(Not Clear) < succ>
```

[10750] The protein has no significant homology with any sequences in the GENPEPT database.

[10751] No corresponding DNA sequence was identified in S. pyogenes.

[10752] Based on this analysis, it was predicted that this protein and its epitopes, could be useful antigens for vaccines or diagnostics.

### EXAMPLE 1960

[10753] A DNA sequence (GBSx2069) was identified in S. agalactiae <SEQ ID 6075> which encodes the amino acid sequence <SEQ ID 6076>. This protein is predicted to be regulatory protein (pfoS/R). Analysis of this protein sequence reveals the following:

| Possible site: 49 | | | | |
|---|---|---|---|---|
| >>> Seems to have no N-terminal signal sequence | | | | |
| | INTEGRAL | Likelihood = −9.82 | Transmembrane | 317-333 (304-335) |
| | INTEGRAL | Likelihood = −7.64 | Transmembrane | 187-203 (183-217) |
| | INTEGRAL | Likelihood = −5.26 | Transmembrane | 24-40 (18-44) |
| | INTEGRAL | Likelihood = −5.04 | Transmembrane | 143-159 (139-161) |
| | INTEGRAL | Likelihood = −2.34 | Transmembrane | 116-132 (115-136) |
| | INTEGRAL | Likelihood = −2.13 | Transmembrane | 55-71 (55-71) |
| | INTEGRAL | Likelihood = −0.96 | Transmembrane | 268-284 (268-284) |

```
----- Final Results -----
                              bacterial membrane --- Certainty = 0.4927(Affirmative) < succ>
                                bacterial outside --- Certainty = 0.0000(Not Clear) < succ>
                            bacterial cytoplasm --- Certainty = 0.0000(Not Clear) < succ>
```

[10754] The protein has homology with the following sequences in the GENPEPT database.

| >GP: AAC65034 GB: AE001189 regulatory protein (pfoS/R) [Treponema | | | |
|---|---|---|---|
| pallidum] | | | |
| Identities = 138/358 (38%), Positives = 220/358 (60%), Gaps = 18/358 (5%) | | | |
| Query: | 2 | TNTVTPKETAGSFINKVLGGTATAIVVALIPNAILATFLKPFLSYG-LAAEFLHIVQVFQ | 60 |
| | | T +++P++ F+ K+L G++ IV+ L+P AI + L A H+V Q | |
| Sbjct: | 3 | TQSLSPRQ----FMMKILNGSSAGIVIGLVPPAIAGELFRALAPLSPLFAALYHVVLPIQ | 58 |
| Query: | 61 | FFTPIMAGFLIGQQFKFTPMQQLAVGGAAYIGSGAWAYTEVIQKGVATGSFQLRGIGDLI | 120 |
| | | F P + G L+G QF + + + + I SG + G++ + GIGD+I | |
| Sbjct: | 59 | FSVPALIGTLVGLQFHCSAPEVATLAFVSVIASG--------NVTLQNGAWLITGIGDVI | 110 |
| Query: | 121 | NMMLTAALAVLAVKWFGNKFGSLTIILLPIIIGTGVGYLGWKLLPYVSYVTTLIGQGINS | 180 |
| | | N+ML +ALA++ V+ K GSLTII LP+I+ G +G LPYV +T +G+ I + | |
| Sbjct: | 111 | NVMLISALAIILVRALRGKLGSLTIIALPVIVAVVAGGVGSFSLPYVKMITLFVGRVIAT | 170 |
| Query: | 181 | FTTLQPIAMSILIAMAFSMLIVSPISTVAIGLAIGLNGMSASAASMGVASTTAVLVWATM | 240 |
| | | F LQP+ MSIL++M+FS++I+SP+S+VA+G+A+GL G+++ AA++GV+S L+ TM | |
| Sbjct: | 171 | FIALQPLLMSILLSMSFSLIIISPVSSVAVGIAVGLTGLASGAANIGVSSCAMTLIVGTM | 230 |
| Query: | 241 | KANKSGVPIAIALGAMKMMMPNFLKHPVMAIPMLMTATVSSLTVPLFKLVGTPASSGFGL | 300 |
| | | + NK GVP+A+ GAMKM+MPN++++P++ IP+L+ V + LF L GTPAS+GFG | |
| Sbjct: | 231 | RVNKIGVPLAMFAGAMKMLMPNWIRYPILNIPLLLNGLVCGVLAWLFNLQGTPASAGFGF | 290 |
| Query: | 301 | VGAVGPIASFE--AGASML---IVILSWLVIPFAVGFVSHKICKDILKLYKDDIFVFE | 353 |
| | | +G VGPI ++ A M+ I+ L + V+ F ++ I D LKLY+ ++F+ E | |
| Sbjct: | 291 | IGLVGPINAYRLMAYTPMVRAGILFLVYFVLSFLAAYLIDFILVDRLKLYRRELFIPE | 348 |

[10755] There is also homology to SEQ ID 1280.

[10756] A related GBS gene <SEQ ID 8939> and protein <SEQ ID 8940> were also identified. Analysis of this protein sequence reveals the following:

| Lipop: Possible site: −1 Crend: 8 | | | | |
|---|---|---|---|---|
| McG: Discrim Score: −7.24 | | | | |
| GvH: Signal Score (−7.5): −2.94 | | | | |
| Possible site: 49 | | | | |
| >>> Seems to have no N-terminal signal sequence | | | | |
| ALOM program count: 7 value: −9.82 threshold: 0.0 | | | | |
| | INTEGRAL | Likelihood = −9.82 | Transmembrane | 317-333 (304-335) |
| | INTEGRAL | Likelihood = −7.64 | Transmembrane | 187-203 (183-217) |
| | INTEGRAL | Likelihood = −6.37 | Transmembrane | 143-159 (136-161) |
| | INTEGRAL | Likelihood = −5.26 | Transmembrane | 24-40 (18-44) |
| | INTEGRAL | Likelihood = −2.34 | Transmembrane | 116-132 (115-136) |
| | INTEGRAL | Likelihood = −2.13 | Tramsmembrane | 55-71 (55-71) |
| | INTEGRAL | Likelihood = −0.96 | Transmembrane | 268-284 (268-284) |

| | |
|---|---|
| PERIPHERAL | Likelihood = 0.69 205 |

```
modified ALOM score: 2.46
*** Reasoning Step: 3
----- Final Results -----
                              bacterial membrane --- Certainty = 0.4927(Affirmative) < succ>
                                bacterial outside --- Certainty = 0.0000(Not Clear) < succ>
                            bacterial cytoplasm --- Certainty = 0.0000(Not Clear) < succ>
```

[10757] The protein has homology with the following sequences in the databases:

[chemical structure]

[10758] There is also homology to SEQ ID 1276 Based on this analysis, it was predicted that these proteins and their epitopes could be useful antigens for vaccines or diagnostics.

### EXAMPLE 1961

[10759] A DNA sequence (GBSx2070) was identified in S. agalactiae <SEQ ID 6077> which encodes the amino acid sequence <SEQ ID 6078>. Analysis of this protein sequence reveals the following:

```
Possible site: 20
>>> Seems to have a cleavable N-term signal seq.
----- Final Results -----
                                bacterial outside --- Certainty = 0.3000(Affirmative) < succ>
                              bacterial membrane --- Certainty = 0.0000(Not Clear) < succ>
                            bacterial cytoplasm --- Certainty = 0.0000(Not Clear) < succ>
```

[10760] The protein has homology with the following sequences in the GENPEPT database.

| >GP: BAB07127 GB: AP001518 thioredoxin reductase [Bacillus halodurans] | | | |
|---|---|---|---|
| Identities = 163/325 (50%), Positives = 222/325 (68%), Gaps = 3/325 (0%) | | | |
| Query: | 5 | IYDITIVGGGPVGLFAAFYAGLRGVSVKIIESLSELGGQPAILYPEKKIYDIPGYPVITG | 64 |
| | | +YDITI+GGGP GLFAAFY G+R VKIIES+ +LGGQ A LYPEK IYD+ G+P + | |
| Sbjct: | 7 | LYDITIIGGGPTGLFAAFYGGMRQAKVKIIESMPQLGGQLAALYPEKYIYDVAGFPKVKA | 66 |
| Query: | 65 | RELIDKHIEQLERFKDSIEICLKEEVLSFEK-VDDVFTIQTDKDQHLSRAIVFACGNGAF | 123 |
| | | ++L++ Q E+F +I L++ V + K DD FTI+TDK+ H S+AI+ G GAF | |
| Sbjct: | 67 | QDLVNDLKRQAEQFNPTI--ALEQSVQNVTKETDDTFTIKTDKETHYSKAIIITAGAGAF | 124 |
| Query: | 124 | APRLLGLENEENYADNNLFYNVTKLEQFAGKHVVICGGGDSAVDWANELDKIAASVAIVH | 183 |
| | | PR L +E + Y NL Y V L +AGK+V+I GGGDSAVDWA L+ +A +V ++H | |
| Sbjct: | 125 | QPRRLEVEGAKQYEGKNLQYFVNDLNAYAGKNVLISGGGDSAVDWALMLEPVAKNVTLIH | 184 |
| Query: | 184 | RRDAFRAHEHSVDILKASGVRILTPYVPIGLNGDSQRVSSLVVQKVKGDEVIELPLDNLI | 243 |
| | | RRD FRAHEHSV++L+ S V ILTP+ L+GD +++ + +Q+VKGD V L +D +I | |
| Sbjct: | 185 | RRDKFRAHEHSVELLQKSSVNILTPFAISELSGDGEKIHHVTIQEVKGDAVETLDVDEVI | 244 |
| Query: | 244 | VSFGFSTSNKNLRYWNLDYKRSSINVSSLFETTQEGVYAIGDAANYPGKVELIATGYGEA | 303 |
| | | V+FGF +S ++ W L+ +++SI V++ ET G+YA GD YPGKV+LIATG+GEA | |
| Sbjct: | 245 | VNFGFVSSLGPIKGWGLEIEKNSIVVNTKMETNIPGIYAAGDICTYPGKVKLIATGFGEA | 304 |
| Query: | 304 | PVAINQAINYIYPDRDNRVVHSTSL | 328 |
| | | P A+N A +I P HSTSL | |
| Sbjct: | 305 | PTAVNNAKAFIDPTARVFPGHSTSL | 329 |

[10761] A related DNA sequence was identified in S. pyogenes <SEQ ID 6079> which encodes the amino acid sequence <SEQ ID 6080>. Analysis of this protein sequence reveals the following:

| Possible site: 20 | | | | |
|---|---|---|---|---|
| >>> Seems to have an uncleavable N-term signal seq | | | | |
| | INTEGRAL | Likelihood = −0.37 | Transmembrane | 8-24 (8-24) |

```
----- Final Results -----
                              bacterial membrane --- Certainty = 0.1150(Affirmative) < succ>
                                bacterial outside --- Certainty = 0.0000(Not Clear) < succ>
                            bacterial cytoplasm --- Certainty = 0.0000(Not Clear) < succ>
```

[10762] The protein has homology with the following sequences in the databases:

| >GP: CAB15201 GB: Z99120 similar to thioredoxin reductase | | | |
|---|---|---|---|
| [Bacillus subtilis] | | | |
| Identities = 173/328 (52%), Positives = 223/328 (67%), Gaps = 4/328 (1%) | | | |
| Query: | 4 | KAYDITIIGGGPIGLFAAFYAGLRGVTVKIIESLSELGGQPAILYPEKMIYDIPAYPSLT | 63 |
| | | K YDITIIGGGP+GLF AFY G+R +VKIIESL +LGGQ + LYPEK IYD+ +P + | |
| Sbjct: | 6 | KVYDITIIGGGPVGLFTAFYGGMRQASVKIIESLPQLGGQLSALYPEKYIYDVAGFPKIR | 65 |
| Query: | 64 | GVELTENLIKQLSRFEDRTTICLKEEVLTFDKVKGG-FSIRTNKAEHFSKAIIIACGNGA | 122 |
| | | EL NL +Q+++F+ TICL++ V + +K G F + K K I GNGA | |
| Sbjct: | 66 | AQELINNLKEQMAKFDQ--TICLEQAVESVEKQADGVFKLVQMKKPTTLKRSCITAGNGA | 123 |
| Query: | 123 | FAPRTLGLESEENFADHNLFYNVHQLDQFAGQKVVICGGGDSAVDWALALEDIAESVTVV | 182 |
| | | F PR L LE+ E + NL Y V L +FAG++V I GGGDSAVDWAL LE IA+ V+++ | |
| Sbjct: | 124 | FKPRKLELENAEQYEGKNLHYFVDDLQKFAGRRVAILGGGDSAVDWALMLEPIAKEVSII | 183 |
| Query: | 183 | HRRDAFRAHEHSVELLKASTVNLLTPYVPKALKGIGNLAEKLVIQKVKEDEVLELELDSL | 242 |
| | | HRRD FRAHEHSVE L AS VN+LTP+VP L G + E+LV+++VK D LE+D L | |
| Sbjct: | 184 | HRRDKFRAHEHSVENLHASKVNVLTPFVPAELIGEDKI-EQLVLEEVKGDRKEILEIDDL | 242 |
| Query: | 243 | IVSFGFSTSNKNLKNWNLDYKRSSITVSPLFQTSQEGIFAIGDAAAYNGKVDLIATGFGE | 302 |
| | | IV++GF +S +KNW LD +++SI V +T+ EG FA GD Y GKV+LIA+GFGE | |
| Sbjct: | 243 | IVNYGFVSSLGPIKNWGLDIEKNSIVVKSTMETNIEGFFAAGDICTYEGKVNLIASGFGE | 302 |
| Query: | 303 | APTAVNQAINYIYPDRDNRVVHSTSLID | 330 |
| | | APTAVN A Y+ P + +HSTSL + | |
| Sbjct: | 303 | APTAVNNAKAYMDPKARVQPLHSTSLFE | 330 |

[10763] An alignment of the GAS and GBS proteins is shown below.

| Identities = 242/324 (74%), Positives = 279/324 (85%) | | | |
|---|---|---|---|
| Query: | 6 | YDITIVGGGPVGLFAAFYAGLRGVSVKIIESLSELGGQPAILYPEKKIYDIPGYPVITGR | 65 |
| | | YDITI+GGGP+GLFAAFYAGLRGV+VKIIESLSELGGQPAILYPEK IYDIP YP +TG | |
| Sbjct: | 6 | YDITIIGGGPIGLFAAFYAGLRGVTVKIIESLSELGGQPAILYPEKMIYDIPAYPSLTGV | 65 |
| Query: | 66 | ELIDKHIEQLERFKDSIEICLKEEVLSFEKVDDVFTIQTDKDQHLSRAIVFACGNGAFAP | 125 |
| | | EL + I+QL RF+D ICLKEEVL+F+KV F+I+T+K +H S+AI+ ACGNGAFAP | |
| Sbjct: | 66 | ELTENLIKQLSRFEDRTTICLKEEVLTFDKVKGGFSIRTNKAEHFSKAIIIACGNGAFAP | 125 |
| Query: | 126 | RLLGLENEENYADNNLFYNVTKLEQFAGKHVVICGGGDSAVDWANELDKIAASVAIVHRR | 185 |
| | | R LGLE+EEN+AD+NLFYNV +L+QFAG+ VVICGGGDSAVDWA L+ IA SV +VHRR | |
| Sbjct: | 126 | RTLGLESEENFADHNLFYNVHQLDQFAGQKVVICGGGDSAVDWALALEDIAESVTVVHRR | 185 |
| Query: | 186 | DAFRAHEHSVDILKASGVRILTPYVPIGLNGDSQRVSSLVVQKVKGDEVIELPLDNLIVS | 245 |
| | | DAFRAHEHSV++LKAS V +LTPYVP L G LV+QKVK DEV+EL LD+LIVS | |
| Sbjct: | 186 | DAFRAHEHSVELLKASTVNLLTPYVPKALKGIGNLAEKLVIQKVKEDEVLELELDSLIVS | 245 |
| Query: | 246 | FGFSTSNKNLRYWNLDYKRSSINVSSLFETTQEGVYAIGDAANYPGKVELIATGYGEAPV | 305 |
| | | FGFSTSNKNL+ WNLDYKRSSI VS LF+T+QEG++AIGDAA Y GKV+LIATG+GEAP | |
| Sbjct: | 246 | FGFSTSNKNLKNWNLDYKRSSITVSPLFQTSQEGIFAIGDAAAYNGKVDLIATGFGEAPT | 305 |
| Query: | 306 | AINQAINYIYPDRDNRVVHSTSLI | 329 |
| | | A+NQAINYIYPDRDNRVVHSTSLI | |
| Sbjct: | 306 | AVNQAINYIYPDRDNRVVHSTSLI | 329 |

[10764] SEQ ID 6078 (GBS178) was expressed in E. coli as a His-fusion product. SDS-PAGE analysis of total cell extract is shown in FIG. 38 (lane 5; MW 37.4 kDa). It was also expressed in E. coli as a GST-fusion product. SDS-PAGE analysis of total cell extract is shown in FIG. 41 (lane 8; MW 62.4 kDa).

[10765] Based on this analysis, it was predicted that this protein and its epitopes, could be useful antigens for vaccines or diagnostics.

### EXAMPLE 1962

[10766] A DNA sequence (GBSx2071) was identified in S. agalactiae <SEQ ID 6081> which encodes the amino acid sequence <SEQ ID 6082>. This protein is predicted to be tRNA methyltransferase (trnD). Analysis of this protein sequence reveals the following:

```
Possible site: 25
>>> Seems to have no N-terminal signal sequence
----- Final Results -----
                            bacterial cytoplasm --- Certainty = 0.1496(Affirmative) < succ>
                              bacterial membrane --- Certainty = 0.0000(Not Clear) < succ>
                                bacterial outside --- Certainty = 0.0000(Not Clear) < succ>
```

[10767] The protein has homology with the following sequences in the GENPEPT database.

| >GP: BAB06198 GB: AP001515 tRNA methyltransferase [Bacillus halodurans] | | | |
|---|---|---|---|
| Identities = 144/246 (58%), Positives = 186/246 (75%), Gaps = 6/246 (2%) | | | |
| Query: | 2 | MKIDILTLFPEMFAPLEHS-IVGKAKERGLLEINYHNFRENAE-KSRHVDDEPYGGGQGM | 59 |
| | | MKID LTLFPEMF + HS I+ +A+ERG + NFRE +E K + VDD PYGGG GM | |
| Sbjct: | 1 | MKIDFLTLFPEMFQGVLHSSILKQAQERGAVSFRVVNFREYSENKHKKVDDYPYGGGAGM | 60 |
| Query: | 60 | LLRAQPIFDTIDKIDAQKA---RVILLDPAGRTFDQDFAEELSKEDELIFICGHYEGYDE | 116 |
| | | +L QP+FD ++ + + + RVIL+ P G TF Q AEEL++ + LI +CGHYEGYDE | |
| Sbjct: | 61 | VLSPQPLFDAVEDLTKKSSSTPRVILMCPQGETFTQRKAEELAQAEHLILLCGHYEGYDE | 120 |
| Query: | 117 | RIKS-LVTDEVSLGDFVLTGGELAAMTMVDATVRLIPEVIGKETSHQDDSFSSGLLEYPQ | 175 |
| | | RI+S LVTDE+S+GD+VLTGGEL AM + D+ RL+P V+G ETS Q DSFS+GLLEYPQ | |
| Sbjct: | 121 | RIRSYLVTDELSIGDYVLTGGELGAMVIADSVTRLLPAVLGNETSAQTDSFSTGLLEYPQ | 180 |
| Query: | 176 | YTRPYDYLGMTVPDVLMSGHHENIRKWRLEQSLRKTLERRPDLLENYAMTDEERLILEKI | 235 |
| | | YTRP D+ G VPDVL+SGHH+NI +WR EQSL++TLERRPDLLE +T+EE+ +L+ I | |
| Sbjct: | 181 | YTRPADFRGWKVPDVLLSGHHQNIERWRKEQSLKRTLERRPDLLEGRKLTEEEQELLDSI | 240 |
| Query: | 236 | KTEIER | 241 |
| | | + + E+ | |
| Sbjct: | 241 | RKQQEK | 246 |

[10768] A related DNA sequence was identified in S. pyogenes <SEQ ID 6083> which encodes the amino acid sequence <SEQ ID 6084>. Analysis of this protein sequence reveals the following:

```
Possible site: 24
>>> Seems to have no N-terminal signal sequence
----- Final Results -----
                            bacterial cytoplasm --- Certainty = 0.2705(Affirmative) < succ>
                              bacterial membrane --- Certainty = 0.0000(Not Clear) < succ>
                                bacterial outside --- Certainty = 0.0000(Not Clear) < succ>
```

[10769] An alignment of the GAS and GBS proteins is shown below.

| Identities = 195/240 (81%), Positives = 224/240 (93%) | | | |
|---|---|---|---|
| Query: | 2 | MKIDILTLFPEMFAPLEHSIVGKAKERGLLEINYHNFRENAEKSRHVDDEPYGGGQGMLL | 61 |
| | | MKIDILTLFPEMFAPLEHSIVGKAKE+GLL+I+YHNFR+ AEK+RHVDDEPYGGGQGMLL | |
| Sbjct: | 1 | MKIDILTLFPEMFAPLEHSIVGKAKEKGLLDIHYHNFRDYAEKARHVDDEPYGGGQGMLL | 60 |
| Query: | 62 | RAQPIFDTIDKIDAQKARVILLDPAGRTFDQDFAEELSKEDELIFICGHYEGYDERIKSL | 121 |
| | | RAQPIFDTI++I+A+K R+ILLDPAG+ F Q +AEEL+ E+ELIFICGHYEGYDERIK+L | |
| Sbjct: | 61 | RAQPIFDTIEQIEAKKPRIILLDPAGKPFTQAYAEELALEEELIFICGHYEGYDERIKTL | 120 |
| Query: | 122 | VTDEVSLGDFVLTGGELAAMTMVDATVRLIPEVIGKETSHQDDSFSSGLLEYPQYTRPYD | 181 |
| | | VTDE+SLGDFVLTGGELAAMTMVDATVRLIP+V+GKE+SHQDDSFSSGLLEYPQYTRPYD | |
| Sbjct: | 121 | VTDEISLGDFVLTGGELAAMTMVDATVRLIPQVLGKESSHQDDSFSSGLLEYPQYTRPYD | 180 |
| Query: | 182 | YLGMTVPDVLMSGHHENIRKWRLEQSLRKTLERRPDLLENYAMTDEERLILEKIKTEIER | 241 |
| | | Y GMTVPDVLMSGHHE IR WRLE+SL+KT RRPDLLE+Y ++EER +L+KIK +++ | |
| Sbjct: | 181 | YRGMTVPDVLMSGHHERIRLWRLEESLKKTYLRRPDLLEHYNFSEEERKLLDKIKEALDQ | 240 |

[10770] Based on this analysis, it was predicted that these proteins and their epitopes could be useful antigens for vaccines or diagnostics.

### EXAMPLE 1963

[10771] A DNA sequence (GBSx2072) was identified in S. agalactiae <SEQ ID 6085> which encodes the amino acid sequence <SEQ ID 6086>. This protein is predicted to be 16S rRNA processing protein. Analysis of this protein sequence reveals the following:

| Possible site: 43 | | | | |
|---|---|---|---|---|
| >>> Seems to have no N-terminal signal sequence | | | | |
| | INTEGRAL | Likelihood = −2.71 | Transmembrane | 32-48 (32-52) |

```
----- Final Results -----
                              bacterial membrane --- Certainty = 0.2084(Affirmative) < succ>
                                bacterial outside --- Certainty = 0.0000(Not Clear) < succ>
                            bacterial cytoplasm --- Certainty = 0.0000(Not Clear) < succ>
```

[10772] A related GBS nucleic acid sequence <SEQ ID 9381> which encodes amino acid sequence <SEQ ID 9382> was also identified.

[10773] The protein has homology with the following sequences in the GENPEPT database.

| >GP: CAB13475 GB: Z99112 similar to hypothetical proteins | | | |
|---|---|---|---|
| [Bacillus subtilis] | | | |
| Identities = 88/174 (50%), Positives = 128/174 (72%), Gaps = 1/174 (0%) | | | |
| Query: | 54 | VTMEYFNVGKIVNTQGLQGEMRVLSVTDFVEERFKKGQVLALFDEKNQFVMDIEIASHRK | 113 |
| | | +T +FNVGKIVNT G++GE+RV+S TDF EER+K G L LF + +++ + +HR | |
| Sbjct: | 1 | MTKRWFNVGKIVNTHGIKGEVRVISKTDFAEERYKPGNTLYLFMDGRNEPVEVTVNTHRL | 60 |
| Query: | 114 | QKNFDIIKFKGMYHINDIEKYKGFTLKVAEDQLSDLKDGEFYYHEIIGLDVYEGE-ELIG | 172 |
| | | K F +++FK ++N++E+ K +KV E++L +L +GEFY+HEIIG +V+ E ELIG | |
| Sbjct: | 61 | HKQFHLLQFKERQNLNEVEELKNAIIKVPEEELGELNEGEFYFHEIIGCEVFTEEGELIG | 120 |
| Query: | 173 | KIKEILQPGANDVWVVERHGKRDLLLPYIPPVVLEVDLSNQRVQVELMEGLDDE | 226 |
| | | K+KEIL PGANDVWV+ R GK+D L+PYI VV +D+ +++++ELMEGL DE | |
| Sbjct: | 121 | KVKEILTPGANDVWVIGRKGKKDALIPYIESVVKHIDVREKKIEIELMEGLIDE | 174 |

[10774] A related DNA sequence was identified in S. pyogenes <SEQ ID 6087> which encodes the amino acid sequence <SEQ ID 6088>. Analysis of this protein sequence reveals the following:

```
Possible site: 28
>>> Seems to have no N-terminal signal sequence
----- Final Results -----
                            bacterial cytoplasm --- Certainty = 0.2787(Affirmative) < succ>
                              bacterial membrane --- Certainty = 0.0000(Not Clear) < succ>
                                bacterial outside --- Certainty = 0.0000(Not Clear) < succ>
```

[10775] An alignment of the GAS and GBS proteins is shown below.

| Identities = 133/172 (77%), Positives = 153/172 (88%) | | | |
|---|---|---|---|
| Query: | 56 | MEYFNVGKIVNTQGLQGEMRVLSVTDFVEERFKKGQVLALFDEKNQFVMDIEIASHRKQK | 115 |
| | | MEYFNVGKIVNTQGLQGEMRVLSV+DF EERFKKG LALFD+K++FV ++ I SHRKQK | |
| Sbjct: | 1 | MEYFNVGKIVNTQGLQGEMRVLSVSDFAEERFKKGSQLALFDDKDRFVQEVTIVSHRKQK | 60 |
| Query: | 116 | NFDIIKFKGMYHINDIEKYKGFTLKVAEDQLSDLKDGEFYYHEIIGLDVYEGEELIGKIK | 175 |
| | | +FDIIKFK MYHIN IEKYKG+TLKV++D DL++GEFYYH+IIG+ VYE + LIG +K | |
| Sbjct: | 61 | HFDIIKFKDMYHINAIEKYKGYTLKVSKDNQGDLQEGEFYYHQIIGMAVYEKDVLIGHVK | 120 |
| Query: | 176 | EILQPGANDVWVVERHGKRDLLLPYIPPVVLEVDLSNQRVQVELMEGLDDED | 227 |
| | | EILQPGANDVW+V+R GKRDLLLPYIPPVVL VD+ N+RV VELMEGLDDED | |
| Sbjct: | 121 | EILQPGANDVWIVKRQGKRDLLLPYIPPVVLNVDVPNKRVDVELMEGLDDED | 172 |

[10776] Based on this analysis, it was predicted that these proteins and their epitopes could be useful antigens for vaccines or diagnostics.

### EXAMPLE 1964

[10777] A DNA sequence (GBSx2073) was identified in S. agalactiae <SEQ ID 6089> which encodes the amino acid sequence <SEQ ID 6090>. This protein is predicted to be similar to E. coli ykfc (11). Analysis of this protein sequence reveals the following:

```
Possible site: 55
>>> Seems to have no N-terminal signal sequence
----- Final Results -----
                            bacterial cytoplasm --- Certainty = 0.3488(Affirmative) < succ>
                              bacterial membrane --- Certainty = 0.0000(Not Clear) < succ>
                                bacterial outside --- Certainty = 0.0000(Not Clear) < succ>
```

[10778] A related GBS nucleic acid sequence <SEQ ID 9909> which encodes amino acid sequence <SEQ ID 9910> was also identified.

[10779] The protein has homology with the following sequences in the GENPEPT database.

| >GP: AAC38715 GB: AF030367 maturase-related protein | | | |
|---|---|---|---|
| [Streptococcus pneumoniae] | | | |
| Identities = 366/425 (86%), Positives = 396/425 (93%) | | | |
| Query: | 12 | MSELLDKILSRNNMLEAYKQVKSNKGSAGINGVTIEQMDDYLHQNWRETKQLIKERSYKP | 71 |
| | | MS+LLDKILSR NMLEAY QVKSNKGSAGI+G+TIE+MD+YL QNWR TK+LIK+R YKP | |
| Sbjct: | 1 | MSKLLDKILSRENMLEAYNQVKSNKGSAGIDGMTIEEMDNYLRQNWRLTKELIKQRKYKP | 60 |
| Query: | 72 | QPVLRVEIPKPNGGVRNLGIPTAMDRMIQQAIVQVLSPLCEKHFSEYSYGFRPNRSCETA | 131 |
| | | QPVL+VEIPKP+GG+R LGIPT MDRMIQQAIVQV+SP+CE HFS+ SYGFRPNRSCE A | |
| Sbjct: | 61 | QPVLKVEIPKPDGGIRQLGIPTVMDRMIQQAIVQVMSPICEPHFSDTSYGFRPNRSCEKA | 120 |
| Query: | 132 | IVQLLEYLNDGYEWIVDIDLEKFFDTVPQDRLMSLVHNIIQDGDTESLIRKYLHSGVVIN | 191 |
| | | I++LLEYLNDGYEWIVDIDLEKFFDTVPQDRLMSLVHNII+DGDTESLIRKYLHSGV+IN | |
| Sbjct: | 121 | IMKLLEYLNDGYEWIVDIDLEKFFDTVPQDRLMSLVHNIIEDGDTESLIRKYLHSGVIIN | 180 |
| Query: | 192 | GQRHKTLVGTPQGGNLSPLLSNIMLNELDKGLEKRGLRFVRYADDCVITVGSEAAAKRVM | 251 |
| | | GQR+KTLVGTPQGGNLSPLLSNIMLNELDK LEKRGLRFVRYADDCVITVGSEAAAKRVM | |
| Sbjct: | 181 | GQRYKTLVGTPQGGNLSPLLSNIMLNELDKELEKRGLRFVRYADDCVITVGSEAAAKRVM | 240 |
| Query: | 252 | HSVSSYIEKRLGLKVNMTKTKIVRPNKLKYLGFGFWKSPKGWKCRPHQDSVQSFKRKLKQ | 311 |
| | | +SVS +IEKRLGLKVNMTKTKI RP +LKYLGFGFWKS GWK RPHQDSV+ FK KLK+ | |
| Sbjct: | 241 | YSVSRFIEKRLGLKVNMTKTKITRPRELKYLGFGFWKSSDGWKSRPHQDSVRRFKLKLKK | 300 |
| Query: | 312 | LTMRKWSIDLITRIERLNWVIRGWINYFSLGNMKSIMTQIDERLRTRIRVIIWKQWKKKA | 371 |
| | | LT RKWSIDL RIE+LN IRGWINYFSLGNMKSI+ IDERLRTR+R+IIWKQWKKK+ | |
| Sbjct: | 301 | LTQRKWSIDLTRRIEQLNLSIRGWINYFSLGNMKSIVASIDERLRTRLRMIIWKQWKKKS | 360 |
| Query: | 372 | KRLWGLLKLGVARWIADKVSGWGDHYQLVAQKSVLKRAISKPALAKRGLVSCLDYYLERH | 431 |
| | | +RLWGLLKLGV +WIADKVSGWGDHYQLVAQKSVLKRAISKP L KRGLVSCLDYYLERH | |
| Sbjct: | 361 | RRLWGLLKLGVPKWIADKVSGWGDHYQLVAQKSVLKRAISKPVLEKRGLVSCLDYYLERH | 420 |
| Query: | 432 | ALKVS | 436 |
| | | ALKVS | |
| Sbjct: | 421 | ALKVS | 425 |

[10780] No corresponding DNA sequence was identified in S. pyogenes.

[10781] Based on this analysis, it was predicted that this protein and its epitopes, could be useful antigens for vaccines or diagnostics.

### EXAMPLE 1965

[10782] A DNA sequence (GBSx2074) was identified in S. agalactiae <SEQ ID 6091> which encodes the amino acid sequence <SEQ ID 6092>. Analysis of this protein sequence reveals the following:

| Possible site: 25 | | | | |
|---|---|---|---|---|
| >>> Seems to have an uncleavable N-term signal seq | | | | |
| | INTEGRAL | Likelihood = −0.37 | Transmembrane | 7-23 (7-23) |

```
----- Final Results -----
                              bacterial membrane --- Certainty = 0.1150(Affirmative) < succ>
                                bacterial outside --- Certainty = 0.0000(Not Clear) < succ>
                            bacterial cytoplasm --- Certainty = 0.0000(Not Clear) < succ>
```

[10783] A related DNA sequence was identified in S. pyogenes <SEQ ID 821> which encodes the amino acid sequence <SEQ ID 822>. Analysis of this protein sequence reveals the following:

| Possible site: 25 | | | | |
|---|---|---|---|---|
| >>> Seems to have an uncleavable N-term signal seq | | | | |
| | INTEGRAL | Likelihood = −2.87 | Transmembrane | 1157-1173 (1157-1174) |

```
----- Final Results -----
                              bacterial membrane --- Certainty = 0.2147(Affirmative) < succ>
                                bacterial outside --- Certainty = 0.0000(Not Clear) < succ>
                            bacterial cytoplasm --- Certainty = 0.0000(Not Clear) < succ>
```

[10784] An alignment of the GAS and GBS proteins is shown below.

| Identities = 1031/1064 (96%), Positives = 1042/1064 (97%) | | | |
|---|---|---|---|
| Query: | 1 | MRKKQKLPFDKLAIALISTSILLNAQSDIKANTVTEDTPATEQAVEPPQPIAVSEESPSS | 60 |
| | | +RKKQKLPFDKLAIAL+STSILLNAQSDIKANTVTEDTPATEQAVE PQP AVSEE+PSS | |
| Sbjct: | 1 | LRKKQKLPFDKLAIALMSTSILLNAQSDIKANTVTEDTPATEQAVETPQPTAVSEEAPSS | 60 |
| Query: | 61 | KETKTSQTPSDVGETVADDANDLAPQAPAKTADTPATSKATIRDLNDPSHVKTLQEKAGK | 120 |
| | | KETKT QTP D ET+ADDANDLAPQAPAKTADTPATSKATIRDLNDPS VKTLQEKAGK | |
| Sbjct: | 61 | KETKTPQTPDDAEETIADDANDLAPQAPAKTADTPATSKATIRDLNDPSQVKTLQEKAGK | 120 |
| Query: | 121 | GVGTVVAVIDAGFDKNHEAWRLTDKTKARYQSKENLEKAKKEHGITYGEWVNDKVAYYHD | 180 |
| | | G GTVVAVIDAGFDKNHEAWRLTDKTKARYQSKE+LEKAKKEHGITYGEWVNDKVAYYHD | |
| Sbjct: | 121 | GAGTVVAVIDAGFDKNHEAWRLTDKTKARYQSKEDLEKAKKEHGITYGEWVNDKVAYYHD | 180 |
| Query: | 181 | YSKDGKNAVDQEHGTHVSGILSGNAPSEMKEPYRLEGAMPEAQLLLMRVEIVNGLADYAR | 240 |
| | | YSKDGK AVDQEHGTHVSGILSGNAPSE KEPYRLEGAMPEAQLLLMRVEIVNGLADYAR | |
| Sbjct: | 181 | YSKDGKTAVDQEHGTHVSGILSGNAPSETKEPYRLEGAMPEAQLLLMRVEIVNGLADYAR | 240 |
| Query: | 241 | NYAQAIRDAVNLGAKVINMSFGNAALAYANLPDETKKAFDYAKSKGVSIVTSAGNDSSFG | 300 |
| | | NYAQAI DAVNLGAKVINMSFGNAALAYANLPDETKKAFDYAKSKGVSIVTSAGNDSSFG | |
| Sbjct: | 241 | NYAQAIIDAVNLGAKVINMSFGNAALAYANLPDETKKAFDYAKSKGVSIVTSAGNDSSFG | 300 |
| Query: | 301 | GKPRLPLADHPDYGVVGTPAAADSTLTVASYSPDKQLTETATVKTDDHQDKEMPVLSTNR | 360 |
| | | GK RLPLADHPDYGVVGTPAAADSTLTVASYSPDKQLTETATVKT D QDKEMPVLSTNR | |
| Sbjct: | 301 | GKTRLPLADHPDYGVVGTPAAADSTLTVASYSPDKQLTETATVKTADQQDKEMPVLSTNR | 360 |
| Query: | 361 | FEPNKAYDYAYANRGTKEDDFKDVEGKIALIERGDIDFKDKIANAKKAGAVGVLIYDNQD | 420 |
| | | FEPNKAYDYAYANRG KEDDFKDV+GKIALIERGDIDFKDKIANAKKAGAVGVLIYDNQD | |
| Sbjct: | 361 | FEPNKAYDYAYANRGMKEDDFKDVKGKIALIERGDIDFKDKIANAKKAGAVGVLIYDNQD | 420 |
| Query: | 421 | KGFPIELPNVDQMPAAFISRRDGLLLKDNPQKTITFNATPKVLPTASGTKLSRFSSWGLT | 480 |
| | | KGFPIELPNVDQMPAAFISR+DGLLLK+NPQKTITFNATPKVLPTASGTKLSRFSSWGLT | |
| Sbjct: | 421 | KGFPIELPNVDQMPAAFISRKDGLLLKENPQKTITFNATPKVLPTASGTKLSRFSSWGLT | 480 |
| Query: | 481 | ADGNIKPDIAAPGQDILSSVANNKYAKLSGTSMSAPLVAGIMGLLQKQYETQYPDMTPSE | 540 |
| | | ADGNIKPDIAAPGQDILSSVANNKYAKLSGTSMSAPLVAGIMGLLQKQYETQYPDMTPSE | |
| Sbjct: | 481 | ADGNIKPDIAAPGQDILSSVANNKYAKLSGTSMSAPLVAGIMGLLQKQYETQYPDMTPSE | 540 |
| Query: | 541 | RLDLAKKVLMSSATALYDEDEKAYFSPRQQGAGAVDAKKASAATMYVTDKDNTSSKVHLN | 600 |
| | | RLDLAKKVLMSSATALYDEDEKAYFSPRQQGAGAVDAKKASAATMYVTDKDNTSSKVHLN | |
| Sbjct: | 541 | RLDLAKKVLMSSATALYDEDEKAYFSPRQQGAGAVDAKKASAATMYVTDKDNTSSKVHLN | 600 |
| Query: | 601 | NVSDKFEVTVTVHNKSDKPQELYYQVTVQTDKVDGKHFALAPKALYETSWQKITIPANSS | 660 |
| | | NVSDKFEVTVTVHNKSDKPQELYYQ TVQTDKVDGK FALAPKALYETSWQKITIPANSS | |
| Sbjct: | 601 | NVSDKFEVTVTVHNKSDKPQELYYQATVQTDKVDGKLFALAPKALYETSWQKITIPANSS | 660 |
| Query: | 661 | KQVTVPIDASRFSKDLLAQMKNGYFLEGFVRFKQDPTKEELMSIPYIGFRGDFGNLSALE | 720 |
| | | KQVT+PID S+FSKDLLA MKNGYFLEGFVRFKQDPTKEELMSIPYIGFRGDFGNLSALE | |
| Sbjct: | 661 | KQVTIPIDVSQFSKDLLAPMKNGYFLEGFVRFKQDPTKEELMSIPYIGFRGDFGNLSALE | 720 |
| Query: | 721 | KPIYDSKDGSSYYHEANSDAKDQLDGDGLQFYALKNNFTALTTESNPWTIIKAVKEGVEN | 780 |
| | | KPIYDSKDGSSYYHEANSDAKDQLDGDGLQFYALKNNFTALTTESNPWTIIKAVKEGVEN | |
| Sbjct: | 721 | KPIYDSKDGSSYYHEANSDAKDQLDGDGLQFYALKNNFTALTTESNPWTIIKAVKEGVEN | 780 |
| Query: | 781 | IEDIESSEITETIFAGTFAKQDDDSHYYIHRHANGKPYAAISPNGDGNRDYVQFQGTFLR | 840 |
| | | IEDIESSEITETIFAGTFAKQDDDSHYYIHRHANGKPYAAISPNGDGNRDYVQFQGTFLR | |
| Sbjct: | 781 | IEDIESSEITETIFAGTFAKQDDDSHYYIHRHANGKPYAAISPNGDGNRDYVQFQGTFLR | 840 |
| Query: | 841 | NAKNLVAEVLDKEGNVVWTSEVTEQVVKNYNNDLASTLGSTRFEKTRWDGKNKDGKVVAN | 900 |
| | | NAKNLVAEVLDKEGNVVWTSEVTEQVVKNYNNDLASTLGSTRFEKTRWDGK+KDGKVVAN | |
| Sbjct: | 841 | NAKNLVAEVLDKEGNVVWTSEVTEQVVKNYNNDLASTLGSTRFEKTRWDGKDKDGKVVAN | 900 |
| Query: | 901 | GTYTYRVRYTPISSGAKEQHTDFDVIVDNTTPEVATSATFSTEDSRLTLASKPKTSQPVY | 960 |
| | | GTYTYRVRYTPISSGAKEQHTDFDVIVDNTTPEVATSATFSTED RLTLASKPKTSQPVY | |
| Sbjct: | 901 | GTYTYRVRYTPISSGAKEQHTDFDVIVDNTTPEVATSATFSTEDRRLTLASKPKTSQPVY | 960 |
| Query: | 961 | RERIAYTYMDEDLPTTEYISPNEDGTFTLPEEAETMEGATVPLKMSDFTYVVEDMAGNIT | 1020 |
| | | RERIAYTYMDEDLPTTEYISPNEDGTFTLPEEAETMEGATVPLKMSDFTYVVEDMAGNIT | |
| Sbjct: | 961 | RERIAYTYMDEDLPTTEYISPNEDGTFTLPEEAETMEGATVPLKMSDFTYVVEDMAGNIT | 1020 |
| Query: | 1021 | YTPVTKLLEGHSNKPEQDGSDQAPDKKPEAKPEQDGSGQTPDKK | 1064 |
| | | YTPVTKLLEGHSNKPEQDGSDQAPDKKPE KPEQDGSGQ PDKK | |
| Sbjct: | 1021 | YTPVTKLLEGHSNKPEQDGSDQAPDKKPETKPEQDGSGQAPDKK | 1064 |

[10785] A related GBS gene <SEQ ID 8941> and protein <SEQ ID 8942> were also identified. Analysis of this protein sequence reveals the following:

| Lipop Possible site: −1 Crend: 10 | | | | |
|---|---|---|---|---|
| McG: Discrim Score: 5.69 | | | | |
| GvH: Signal Score (−7.5): −3.33 | | | | |
| Possible site: 25 | | | | |
| >>> Seems to have an uncleavable N-term signal seq | | | | |
| ALOM program count: 1 value: −0.37 threshold: 0.0 | | | | |
| | INTEGRAL | Likelihood = −0.37 | Transmembrane | 7-23 (7-23) |
| | PERIPHERAL | Likelihood = 2.81 | 508 | |

```
modified ALOM score: 0.57
*** Reasoning Step: 3
----- Final Results -----
                              bacterial membrane --- Certainty = 0.1150(Affirmative) < succ>
                                bacterial outside --- Certainty = 0.0000(Not Clear) < succ>
                            bacterial cytoplasm --- Certainty = 0.0000(Not Clear) < succ>
```

[10786] SEQ ID 8942 (GBS276) was expressed in E. coli as a His-fusion product. SDS-PAGE analysis of total cell extract is shown in FIG. 46 (lane 2; MW 123 kDa). It was also expressed in E. coli as a GST-fusion product. SDS-PAGE analysis of total cell extract is shown in FIG. 60 (lane 5; MW 46.5 kDa).

[10787] The GBS276-His fusion product was purified (FIG. 206, lane 9) and used to immunise mice. The resulting antiserum was used for FACS (FIG. 296), which confirmed that the protein is immunoaccessible on GBS bacteria.

[10788] Based on this analysis, it was predicted that these proteins and their epitopes could be useful antigens for vaccines or diagnostics.

### EXAMPLE 1966

[10789] A DNA sequence (GBSx2075) was identified in S. agalactiae <SEQ ID 6093> which encodes the amino acid sequence <SEQ ID 6094>. Analysis of this protein sequence reveals the following:

```
Possible site: 58
>>> Seems to have no N-terminal signal sequence
----- Final Results -----
                            bacterial cytoplasm --- Certainty = 0.4286(Affirmative) < succ>
                              bacterial membrane --- Certainty = 0.0000(Not Clear) < succ>
                                bacterial outside --- Certainty = 0.0000(Not Clear) < succ>
```

[10790] The protein has no significant homology with any sequences in the GENPEPT database.

[10791] No corresponding DNA sequence was identified in S. pyogenes.

[10792] Based on this analysis, it was predicted that this protein and its epitopes, could be useful antigens for vaccines or diagnostics.

### EXAMPLE 1967

[10793] A DNA sequence (GBSx2076) was identified in S. agalactiae <SEQ ID 6095> which encodes the amino acid sequence <SEQ ID 6096>. Analysis of this protein sequence reveals the following:

| Possible site: 30 | | | | |
|---|---|---|---|---|
| >>> Seems to have an uncleavable N-term signal seq | | | | |
| | INTEGRAL | Likelihood = −11.15 | Transmembrane | 19-35 (11-39) |

```
----- Final Results -----
                              bacterial membrane --- Certainty = 0.5458(Affirmative) < succ>
                                bacterial outside --- Certainty = 0.0000(Not Clear) < succ>
                            bacterial cytoplasm --- Certainty = 0.0000(Not Clear) < succ>
```

[10794] A related GBS nucleic acid sequence <SEQ ID 9911> which encodes amino acid sequence <SEQ ID 9912> was also identified.

[10795] The protein has no significant homology with any sequences in the GENPEPT database.

[10796] No corresponding DNA sequence was identified in S. pyogenes.

[10797] SEQ ID 6096 (GBS654) was expressed in E. coli as a GST-fusion product. SDS-PAGE analysis of total cell extract is shown in FIG. 142 (lane 8 & 10; MW 51.2 kDa+lane 9; MW 27 kDa). Purified GBS654-GST is shown in FIG. 245, lane 11.

[10798] Based on this analysis, it was predicted that this protein and its epitopes, could be useful antigens for vaccines or diagnostics.

### EXAMPLE 1968

[10799] A DNA sequence (GBSx2077) was identified in S. agalactiae <SEQ ID 6097> which encodes the amino acid sequence <SEQ ID 6098>. Analysis of this protein sequence reveals the following:

```
Possible site: 14
>>> Seems to have no N-terminal signal sequence
----- Final Results -----
                            bacterial cytoplasm --- Certainty = 0.4174(Affirmative) < succ>
                              bacterial membrane --- Certainty = 0.0000(Not Clear) < succ>
                                bacterial outside --- Certainty = 0.0000(Not Clear) < succ>
```

[10800] A related GBS nucleic acid sequence <SEQ ID 9913> which encodes amino acid sequence <SEQ ID 9914> was also identified.

[10801] The protein has homology with the following sequences in the GENPEPT database.

| >GP: AAF27324 GB: AF178424 unknown [Lactococcus lactis] | | | |
|---|---|---|---|
| Identities = 26/75 (34%), Positives = 45/75 (59%), Gaps = 4/75 (5%) | | | |
| Query: | 11 | MAFEPKNSELTKVLKES-LDEEKKEIFSSEMNIRDFERTKQYQFTLQPSVRKKIDRLSKE | 69 |
| | | MAF+ + ++ VL S L + K E+ I E K Y FTL+PSV++ +++L+++ | |
| Sbjct: | 1 | MAFDVDDKKVKTVLSNSSLAKSKVEL---PKKIESEENKKSYSFTLEPSVKEGLEKLAEK | 57 |
| Query: | 70 | KGYRSASSFINDFFK | 84 |
| | | + Y++ S F+ND K | |
| Sbjct: | 58 | QNYKNTSQFLNDLIK | 72 |

[10802] No corresponding DNA sequence was identified in S. pyogenes.

[10803] Based on this analysis, it was predicted that this protein and its epitopes, could be useful antigens for vaccines or diagnostics.

### EXAMPLE 1969

[10804] A DNA sequence (GBSx2078) was identified in S. agalactiae <SEQ ID 6099> which encodes the amino acid sequence <SEQ ID 6100>. This protein is predicted to be ParA. Analysis of this protein sequence reveals the following:

```
Possible site: 45
>>> Seems to have an uncleavable N-term signal seq
----- Final Results -----
                              bacterial membrane --- Certainty = 0.0000(Not Clear) < succ>
                                bacterial outside --- Certainty = 0.0000(Not Clear) < succ>
                            bacterial cytoplasm --- Certainty = 0.0000(Not Clear) < succ>
```

[10805] The protein has homology with the following sequences in the GENPEPT database.

| >GP: AAF27325 GB: AF178424 ParA [Lactococcus lactis] | | | |
|---|---|---|---|
| Identities = 49/104 (47%), Positives = 72/104 (69%) | | | |
| Query: | 22 | LSERLEEFKTEAFDFKTRASYVTAKLFFLGNMIKHNTNSSKELIRSLKNDKSVLAMIPHK | 81 |
| | | L ERL+ FK E D +TR +Y+TA +F+GN I+HNT SS+E + DK +AMIP K | |
| Sbjct: | 157 | LIERLQNFKDEVIDARTRETYITAIPYFVGNRIRHNTKSSREFSEKISQDKGTIAMIPEK | 216 |
| Query: | 82 | ELFNRSTLDKKSLSYMMSDKELYSRDSKFFKEIDFTFRKITDKL | 125 |
| | | ELFNRSTLD L M DK++++ + F+++++F F +IT+K+ | |
| Sbjct: | 217 | ELFNRSTLDGVPLVEMEKDKDVFNSNKVFYEKLNFAFNEITNKI | 260 |

[10806] No corresponding DNA sequence was identified in S. pyogenes.

[10807] Based on this analysis, it was predicted that this protein and its epitopes, could be useful antigens for vaccines or diagnostics.

### EXAMPLE 1970

[10808] A DNA sequence (GBSx2079) was identified in S. agalactiae <SEQ ID 6101> which encodes the amino acid sequence <SEQ ID 6102>. This protein is predicted to be transposase (orfA). Analysis of this protein sequence reveals the following:

```
Possible site: 42
>>> Seems to have no N-terminal signal sequence
----- Final Results -----
                            bacterial cytoplasm --- Certainty = 0.2830(Affirmative) < succ>
                              bacterial membrane --- Certainty = 0.0000(Not Clear) < succ>
                                bacterial outside --- Certainty = 0.0000(Not Clear) < succ>
```

[10809] Based on this analysis, it was predicted that this protein and its epitopes, could be useful antigens for vaccines or diagnostics.

### EXAMPLE 1971

[10810] A DNA sequence (GBSx2080) was identified in S. agalactiae <SEQ ID 6103> which encodes the amino acid sequence <SEQ ID 6104>. This protein is predicted to be transposase (orfB). Analysis of this protein sequence reveals the following:

```
Possible site: 16
>>> Seems to have no N-terminal signal sequence
----- Final Results -----
                            bacterial cytoplasm --- Certainty = 0.2618(Affirmative) < succ>
                              bacterial membrane --- Certainty = 0.0000(Not Clear) < succ>
                                bacterial outside --- Certainty = 0.0000(Not Clear) < succ>
```

[10811] The protein has homology with the following sequences in the GENPEPT database.

| >GP: CAB90834 GB: AJ250837 putative transposase [Streptococcus | | | |
|---|---|---|---|
| dysgalactiae] | | | |
| Identities = 242/259 (93%), Positives = 249/259 (95%) | | | |
| Query: | 1 | MCRWLNMPHSSYYYQAVESVSETEFEETIKRIFLDSESRYGSRKIKICLNNEGITLSRRR | 60 |
| | | MCRWLN+P SSYYY+AVE VSE E EE+IK IFL+S++RYGSRKIKICLNNEGITLSRRR | |
| Sbjct: | 1 | MCRWLNIPRSSYYYKAVEPVSEAELEESIKAIFLESKARYGSRKIKICLNNEGITLSRRR | 60 |
| Query: | 61 | IRRIMKRLNLVSVYQKATFKPHSRGKNEAPIPNHLDRQFKQERPLQALVTDLTYVRVGNR | 120 |
| | | IRRIMKRLNLVSVYQKATFKPHSRGKNEAPIPNHLDRQFK ERPLQALVTDLTYVRVGNR | |
| Sbjct: | 61 | IRRIMKRLNLVSVYQKATFKPHSRGKNEAPIPNHLDRQFKPERPLQALVTDLTYVRVGNR | 120 |
| Query: | 121 | WAYVCLIIDLYNREIIGLSLGWHKTAELVKQAIQSIPYALTKVKMFHSDRXKEFDNQLID | 180 |
| | | WAYVCLIIDLYNREIIGLSLGWHKTAELVKQAIQSIPY LTKVKMFHSDR KEF+NQLID | |
| Sbjct: | 121 | WAYVCLIIDLYNREIIGLSLGWHKTAELVKQAIQSIPYPLTKVKMFHSDRGKEFNNQLID | 180 |
| Query: | 181 | EILEAFGITRSLSQAGCPYDNAVAESTYRAFKIEFVYQETFQLLEELALKTKDYVHWWNY | 240 |
| | | EILEAFGITRSLSQAGCPYDNAVAESTYRAFKIEFVYQETFQ LEELALKTK YVHWWNY | |
| Sbjct: | 181 | EILEAFGITRSLSQAGCPYDNAVAESTYRAFKIEFVYQETFQSLEELALKTKAYVHWWNY | 240 |
| Query: | 241 | HRIHGSLNYQTPMTKRLIA | 259 |
| | | HRIHGSLNYQTPMTKRLIA | |
| Sbjct: | 241 | HRIHGSLNYQTPMTKRLIA | 259 |

[10812] There is also homology to SEQ ID 32.

[10813] Based on this analysis, it was predicted that this protein and its epitopes, could be useful antigens for vaccines or diagnostics.

### EXAMPLE 1972

[10814] A DNA sequence (GBSx2081) was identified in S. agalactiae <SEQ ID 6105> which encodes the amino acid sequence <SEQ ID 6106>. Analysis of this protein sequence reveals the following:

```
Possible site: 16
>>> Seems to have no N-terminal signal sequence
----- Final Results -----
                            bacterial cytoplasm --- Certainty = 0.3325(Affirmative) < succ>
                              bacterial membrane --- Certainty = 0.0000(Not Clear) < succ>
                                bacterial outside --- Certainty = 0.0000(Not Clear) < succ>
```

[10815] The protein has no significant homology with any sequences in the GENPEPT database.

[10816] No corresponding DNA sequence was identified in S. pyogenes.

[10817] Based on this analysis, it was predicted that this protein and its epitopes, could be useful antigens for vaccines or diagnostics.

### EXAMPLE 1973

[10818] A DNA sequence (GBSx2082) was identified in S. agalactiae <SEQ ID 6107> which encodes the amino acid sequence <SEQ ID 6108>. Analysis of this protein sequence reveals the following:

```
Possible site: 59
>>> Seems to have no N-terminal signal sequence
----- Final Results -----
                            bacterial cytoplasm --- Certainty = 0.4442(Affirmative) < succ>
                              bacterial membrane --- Certainty = 0.0000(Not Clear) < succ>
                                bacterial outside --- Certainty = 0.0000(Not Clear) < succ>
```

[10819] A related GBS nucleic acid sequence <SEQ ID 9917> which encodes amino acid sequence <SEQ ID 9918> was also identified.

[10820] The protein has homology with the following sequences in the GENPEPT database.

| >GP: AAD44095 GB: AF115103 orf359 gp [Streptococcus thermophilus | | | |
|---|---|---|---|
| bacteriophage Sfi21] | | | |
| Identities = 92/357 (25%), Positives = 162/357 (44%), Gaps = 33/357 (9%) | | | |
| Query: | 45 | RKNQYGKTFETMKEAYDELVRIKYEFANKVSLENYNMTFENYMNKIYLRAYKQK-VQSVT | 103 |
| | | RK + F T EA ++ + + V+++ ++T +Y K + YK+ V +T | |
| Sbjct: | 24 | RKPKTKGGFRTKSEAIKAAAEMELKLQDNVNVDE-DITLYDYF-KQWCEVYKKPTVSKIT | 81 |
| Query: | 104 | YKTALPHHKLFIQYFGLKPLKAITPRDCEAFRLHIIENYSENYAKNLWSRF----KACMG | 159 |
| | | YK + + +FG K LK+IT + + ++ +Y++ +A++ RF KAC+ | |
| Sbjct: | 82 | YKAYINSQRKIELFFGDKKLKSITATEYQ----RVLNSYAKTHAQDTVERFNVHVKACIE | 137 |
| Query: | 160 | YAERLGYISNMPCKALD---NPRGKHPETPFWTYAEFQTFIKSFDLHDYEELQRFTAIWL | 216 |
| | | A GYI CK +G+ ET F E++ I ++ + E + A+++ | |
| Sbjct: | 138 | MAVHEGYIKRNFCKFAKINAKNKGRDIETKFLEVEEYERLI--YETSKHPEYASYAALYI | 195 |
| Query: | 217 | YYMTGVRVSEGLSLCWEDIDFDKKFLKVHTTLEKDENGNWYRKDQTKTPAGERLIELDDI | 276 |
| | | TG+R +E L L +DI D L V+ T + N + TKT + R I LDD | |
| Sbjct: | 196 | IAKTGIRFAECLGLTVDDIKRDTGMLSVNKTWDYKNNTGFM---PTKTKSSIREIPLDDE | 252 |
| Query: | 277 | TIEVLQVWRKNQFANQDTDFIISRFGDPFCKSTICRIIKRKAQQVGVPVITGKGLRHSHA | 336 |
| | | I + +Q D I+ + T+ +I+ R+ + LRH++A | |
| Sbjct: | 253 | FINFI-----DQLPPTDDGRILPSLSNNAVNKTLRKIVGRE--------VRVHSLRHTYA | 299 |
| Query: | 337 | SYLINVLKKDILYVARRMGHADKSTTLNTYSHWFNALDKTVSEEITQNIKSAGLDSI | 393 |
| | | SYLI D++ V++ +GH + + TL Y+H E+I Q G +++ | |
| Sbjct: | 300 | SYLI-AHDIDLISVSQVLGHENLNITLEVYAHQLQEQKSRNDEKIKQMWTECGRNAL | 355 |

[10821] A related DNA sequence was identified in S. pyogenes <SEQ ID 6109> which encodes the amino acid sequence <SEQ ID 6110>. Analysis of this protein sequence reveals the following:

```
Possible site: 61
>>> Seems to have no N-terminal signal sequence
----- Final Results -----
                            bacterial cytoplasm --- Certainty = 0.5549(Affirmative) < succ>
                              bacterial membrane --- Certainty = 0.0000(Not Clear) < succ>
                                bacterial outside --- Certainty = 0.0000(Not Clear) < succ>
```

[10822] An alignment of the GAS and GBS proteins is shown below.

| Identities = 111/127 (87%), Positives = 119/127 (93%) | | | |
|---|---|---|---|
| Query: | 242 | LKVHTTLEKDENGNWYRKDQTKTPAGERLIELDDITIEVLQVWRKNQFANQDTDFIISRF | 301 |
| | | LKVHTTLEKDENGNWYRKDQTKTPAGERLIELDD+TI VL+ WR+NQ N DTDFIISRF | |
| Sbjct: | 1 | LKVHTTLEKDENGNWYRKDQTKTPAGERLIELDDVTIVVLENWRRNQVVNTDTDFIISRF | 60 |
| Query: | 302 | GDPFCKSTICRIIKRKAQQVGVPVITGKGLRHSHASYLINVLKKDILYVARRMGHADKST | 361 |
| | | G+PFCKSTICR+IK KAQ +GVPVITGKGLRHS+ASYLINVLKKDILYVA+ MGHADKST | |
| Sbjct: | 61 | GEPFCKSTICRVIKHKAQSIGVPVITGKGLRHSYASYLINVLKKDILYVAKCMGHADKST | 120 |
| Query: | 362 | TLNTYSH | 368 |
| | | TLNTYSH | |
| Sbjct: | 121 | TLNTYSH | 127 |

[10823] Based on this analysis, it was predicted that these proteins and their epitopes could be useful antigens for vaccines or diagnostics.

### EXAMPLE 1974

[10824] A DNA sequence (GBSx2083) was identified in S. agalactiae <SEQ ID 6111> which encodes the amino acid sequence <SEQ ID 6112>. Analysis of this protein sequence reveals the following:

```
Possible site: 20
>>> Seems to have no N-terminal signal sequence
----- Final Results -----
                            bacterial cytoplasm --- Certainty = 0.3299(Affirmative) < succ>
                              bacterial membrane --- Certainty = 0.0000(Not Clear) < succ>
                                bacterial outside --- Certainty = 0.0000(Not Clear) < succ>
```

[10825] The protein has no significant homology with any sequences in the GENPEPT database.

[10826] No corresponding DNA sequence was identified in S. pyogenes.

[10827] Based on this analysis, it was predicted that this protein and its epitopes, could be useful antigens for vaccines or diagnostics.

### EXAMPLE 1975

[10828] A DNA sequence (GBSx2084) was identified in S. agalactiae <SEQ ID 6113> which encodes the amino acid sequence <SEQ ID 6114>. This protein is predicted to be repressor protein-related protein. Analysis of this protein sequence reveals the following:

```
Possible site: 32
>>> Seems to have no N-terminal signal sequence
----- Final Results -----
                            bacterial cytoplasm --- Certainty = 0.2721(Affirmative) < succ>
                              bacterial membrane --- Certainty = 0.0000(Not Clear) < succ>
                                bacterial outside --- Certainty = 0.0000 (Not Clear) < succ>
```

[10829] A related GBS nucleic acid sequence <SEQ ID 9919> which encodes amino acid sequence <SEQ ID 9920> was also identified.

[10830] The protein has homology with the following sequences in the GENPEPT database.

| >GP: AAC98432 GB: L29324 repressor protein [Streptococcus pneumoniae] | | | |
|---|---|---|---|
| Identities = 38/65 (58%), Positives = 52/65 (79%), Gaps = 1/65 (1%) | | | |
| Query: | 2 | MYRRLRDLREDNDFTQKYVAEK-LSFTHSAYSKIERGERILSADVIIKLSNLYNVSTDYL | 60 |
| | | M +R+RDLRED+D TQ+YVA+ L+ T SAYSK+E G R++S D +IKL++ YNVS DYL | |
| Sbjct: | 1 | MLKRIRDLREDDDLTQEYVAKTILNCTRSAYSKMESGTRLISIDDLIKLADFYNVSLDYL | 60 |
| Query: | 61 | LGQTD | 65 |
| | | +G+ D | |
| Sbjct: | 61 | VGRVD | 65 |

[10831] There is also homology to SEQ ID 582.

[10832] Based on this analysis, it was predicted that this protein and its epitopes, could be useful antigens for vaccines or diagnostics.

### EXAMPLE 1976

[10833] A DNA sequence (GBSx2085) was identified in S. agalactiae <SEQ ID 6115> which encodes the amino acid sequence <SEQ ID 6116>. This protein is predicted to be relaxase. Analysis of this protein sequence reveals the following:

```
Possible site: 40
>>> Seems to have no N-terminal signal sequence
----- Final Results -----
                            bacterial cytoplasm --- Certainty = 0.3160(Affirmative) < succ>
                              bacterial membrane --- Certainty = 0.0000(Not Clear) < succ>
                                bacterial outside --- Certainty = 0.0000(Not Clear) < succ>
```

[10834] The protein has homology with the following sequences in the GENPEPT database.

| >GP:AAC98434 GB:L29324 relaxase [Streptococcus pneumoniae] | | | |
|---|---|---|---|
| Identities = 223/417 (53%), Positives = 310/417 (73%), Gaps = 5/417 (1%) | | | |
| Query: | 1 | MVITKHYAVHGKKYRRQLIKYILDPKKTRNLSLISDFGMSNYLDFPDYVELVRMYQNNFL | 60 |
| | | MVITKH+A+HGR YR +LIKYIL+P KT+NL+L+SDFGM NYLDFP Y ELVKMY +NFL | |
| Sbjct: | 1 | MVITKHFAIHGKNYRSKLIKYILNPSKTKNLTLVSDFGMRNYLDFPSYKELVKMYNDNFL | 60 |
| Query: | 61 | SNDQLYDSRFDRQEKKQQKIHAHHIIQSFSPEDKLSPEEINRIGYETIRELIGGQYKFIV | 120 |
| | | SND LY+ R DRQE Q+KIH+HHIIQSFSP+D L+PE+INRIGYE KEL GG+++FIV | |
| Sbjct: | 61 | SNDTLYEFRHDRQEVNQRRIHSHHIIQSFSPDDHLTPEQINRIGYEAARELTGGRFRFIV | 120 |
| Query: | 121 | ATHVDQDHCHNHIIINSINSQSQKKLLWDYALERNLQMISDRISKVAGAKIIPPKRYSHR | 180 |
| | | ATHVD+ H HNHII+NSI+ S KK WDY E NL+M+SDR+SK+AGAKII RYSHR | |
| Sbjct: | 121 | ATHVDKGHIHNHIILNSIDQNSDKKFLWDYKAEHNLRMVSDRLSKIAGAKII-ENRYSHR | 179 |
| Query: | 181 | DYEVYRRSNHKYELKQRLFFLMEHSIDFNDFMQKAEQLNVKIDFSRKHSRFFMTDRNMKQ | 240 |
| | | YEVYR++N+KYE+KQR++FL+E+S +F D +KA+ L++KIDF KH +FMTD NMRQ | |
| Sbjct: | 180 | QYEVYRKTNYKYEIKQRVYFLIENSKNFEDLKKKAKALHLKIDFRHKHVTYFMTDSNMRQ | 239 |
| Query: | 241 | VIQGDKLNKREPYSKEYFQRYFAKKKIELILEFLLLRSNSFDDLVEKARLLGLELRSKKK | 300 |
| | | V++ KL++++PY++ YF++ F +++I ILEFLL + + ++L+++A + GL++ K+K | |
| Sbjct: | 240 | VVRDSKLSRKQPYNETYFEKKFVQREIINILEFLLPKMKNMNELIQRAEVFGLKIIPKEK | 299 |
| Query: | 301 | TIDFVLSDGKSCISIPNKSLRKKNLYDTTYFDSYFKEHDVFEVLHNNEVKIEFEKFETQQ | 360 |
| | | +F DG I + + L K NLY +YF YF + VL N + + + + + | |
| Sbjct: | 300 | HVLFEF-DG---IKLAEQELVRSNLYSVSYFQDYFNNKNETFVLDNKNLVELYNEEKIIK | 355 |
| Query: | 361 | LSEILTVEEITEAYETYKTKRDAVHEFEVEITEEQIEKIVLDGLFVKVWMGIGQEGL | 417 |
| | | E+ + E + ++Y+ +K RDAVHEFEVE+ QIE++V G+++KV GI ++ L | |
| Sbjct: | 356 | EKELPSEEMVWKSYQDFKRNRDAVHEFEVELNLNQIEEVVEHGIYIRVQFGIDKKDL | 412 |

[10835] A related DNA sequence was identified in S. pyogenes <SEQ ID 6117> which encodes the amino acid sequence <SEQ ID 6118>. Analysis of this protein sequence reveals the following:

```
Possible site: 20
>>> Seems to have no N-terminal signal sequence
----- Final Results -----
                            bacterial cytoplasm --- Certainty = 0.3114(Affirmative) < succ>
                              bacterial membrane --- Certainty = 0.0000(Not Clear) < succ>
                                bacterial outside --- Certainty = 0.0000(Not Clear) < succ>
```

[10836] An alignment of the GAS and GBS proteins is shown below.

| Identities = 103/218 (47%), Positives = 170/218 (77%) | | | |
|---|---|---|---|
| Query: | 393 | EEQIEKIVLDGLFVKVWMGIGQEGLIFIPNHQLNILEQENKKQYQVFIRETSSYFIYHKE | 452 |
| | | E QIE+++ + +++KV + Q GLIFIPN+QL+I ++EN K+Y+V+IRET+ +FIY+KE | |
| Sbjct: | 2 | EHQIERLIAEDIYIKVSFSVKQSGLIFIPNYQLDIRKEENHKKYKVYIRETAQFFIYNKE | 61 |
| Query: | 453 | DSEMNRFMKGRDLIRQLTFDNKSLPYKRRISLVSLQQKIEEINLLMTLNIQNKSFLELKD | 512 |
| | | SE+NR+M+G +LI QLT D+KS+P +RR ++ +L++KIEEI+LL+ L+ +NK + ++KD | |
| Sbjct: | 62 | ASELNRYMRGHELICQLTNDSKSIPKRRRQTIDTLKKKIEEISLLIELDTENKPYQDIKD | 121 |
| Query: | 513 | ELVGDIAQLDIELTNLQDKNTTLNKMAEVVVNLQSDNQDTKQLAKYECSKMNLSQNVTIG | 572 |
| | | ++V D+AQLD+ +T LQD LNK+AEV++NL +++ + ++LA+Y+ +KMNL+ + I | |
| Sbjct: | 122 | DIVKDMAQLDLTITELQDHIAHLNKVAEVLLNLNNNDIENRRLARYDYAKMNLTAAIKIE | 181 |
| Query: | 573 | QIESEIEMIQNQLDNKIEEYENAVRKLDEYVRVLNMDK | 610 |
| | | ++E EIE QN+L+ I+EYE VR+L+++ +L+ K | |
| Sbjct: | 182 | EVEKEIETSQNELNISIDEYEYLVRRLEKFGEILSDSK | 219 |

[10837] Based on this analysis, it was predicted that these proteins and their epitopes could be useful antigens for vaccines or diagnostics.

### EXAMPLE 1977

[10838] A DNA sequence (GBSx2086) was identified in S. agalactiae <SEQ ID 6119> which encodes the amino acid sequence <SEQ ID 6120>. Analysis of this protein sequence reveals the following:

```
Possible site: 40
>>> Seems to have no N-terminal signal sequence
----- Final Results -----
                            bacterial cytoplasm --- Certainty = 0.4006(Affirmative) < succ>
                              bacterial membrane --- Certainty = 0.0000(Not Clear) < succ>
                                bacterial outside --- Certainty = 0.0000(Not Clear) < succ>
```

[10839] The protein has homology with the following sequences in the GENPEPT database.

| >GP: AAC98436 GB: L29324 unknown [Streptococcus pneumoniae] | | | |
|---|---|---|---|
| Identities = 53/115 (46%), Positives = 77/115 (66%), | | | |
| Gaps = 2/115 (1%) | | | |
| Query: | 5 | VREIRKEVNFSIEEYQQIQNFMEQEGYEQFSPFARGKLLKIDHQPSQQLEEWIKYLQHQK | 64 |
| | | +R IRK+ + E +QI + M ++G + FS F R LL D Q +Q+E+W + QK | |
| Sbjct: | 5 | IRSIRKQFRLTETEEKQILDLMREKGDDNFSDFLRKSLLLSDGQ--KQMEKWFNLWKKQK | 62 |
| Query: | 65 | VEQIYRDVHEILVLAKLSQSVTMEHLEIILTCIKDLMKEIEVTIPLSYSFKDKYM | 119 |
| | | +EQI RDVHE+ ++AK + VT EH+ I+LTCI++L+KE+E T PLS F +KYM | |
| Sbjct: | 63 | LEQISRDVHEVFIIAKTNHQVTHEHVSILLTCIQELIKEVEKTGPLSEDFCNKYM | 117 |

[10840] No corresponding DNA sequence was identified in S. pyogenes.

[10841] Based on this analysis, it was predicted that this protein and its epitopes, could be useful antigens for vaccines or diagnostics.

### EXAMPLE 1978

[10842] A DNA sequence (GBSx2087) was identified in S. agalactiae <SEQ ID 6121> which encodes the amino acid sequence <SEQ ID 6122>. This protein is predicted to be TnpA. Analysis of this protein sequence reveals the following:

```
Possible site: 34
>>> Seems to have no N-terminal signal sequence
----- Final Results -----
                            bacterial cytoplasm --- Certainty = 0.2935(Affirmative) < succ>
                              bacterial membrane --- Certainty = 0.0000(Not Clear) < succ>
                                bacterial outside --- Certainty = 0.0000(Not Clear) < succ>
```

[10843] The protein has homology with the following sequences in the GENPEPT database.

| >GP: AAC82523 GB: AF027768 TnpA [Serratia marcescens] | | | |
|---|---|---|---|
| Identities = 176/413 (42%), Positives = 243/413 (58%), | | | |
| Gaps = 18/413 (4%) | | | |
| Query: | 26 | MMFKVEAVGPPERCPECGFD-KLYKHSSRNQLIMDLPIRLKRVGLHLNRRRYKCRECGST | 84 |
| | | M F+V+ V P C ECG + + R+ DLPI KRV L + RRRY CR C +T | |
| Sbjct: | 1 | MHFQVD-VPDPIACEECGVQGEFVRFGKRDVPYRDLPIHGKRVTLWVVRRRYTCRACRTT | 59 |
| Query: | 85 | IS------VDEKRSMTKRLLKSIQEQSMSKTFVEVAESVGVDEKTIRNVFKDYVALKERE | 138 |
| | | VD R MT RL + ++++S + + VA G+DEKT+R++F R | |
| Sbjct: | 60 | FRPQLPEMVDGFR-MTLRLHEYVEKESFNHPYTFVAAQTGLDEKTVRDIFNARAEFLGRW | 118 |
| Query: | 139 | YQFETPKWLGIDEIHIIRRPRLVLTNIERRTIYDIKPNRNKETVIQRLSEISDRTYIEYV | 198 |
| | | ++FETP+ LGIDE+++ +R R +LTNIE RT+ D+ R ++ V L ++ DR +E V | |
| Sbjct: | 119 | HRFETPRILGIDELYLNKRYRCILTNIEERTLLDLLATRRQDVVTNYLMKLKDRQKVEIV | 178 |
| Query: | 199 | TMDMWKPYKDAVNTILPQAKVVVDKFHVVRMANQALDNVRKSLKAHMSQKERRTLMRERF | 258 |
| | | +MDMW PY+ AV +LPQA++VVDKFHVVRMAN AL+ VRK L+ + + RTL +R | |
| Sbjct: | 179 | SMDMWNPYRAAVKAVLPQARIVVDKFHVVRMANDALERVRKGLRKELKPSQSRTLKGDRK | 238 |
| Query: | 259 | ILLKRKHDLNERESFLLDTWLGNLPALKEAYELKEEFYWIWDTPDPDEGHLRYSQWRHRC | 318 |
| | | ILLKR H++++RE +++TW G P L AYE KE FY IWD + +W | |
| Sbjct: | 239 | ILLKRAHEVSDRERLIMETWTGAFPQLLAAYEHKERFYGIWDATTRLQAEAALDEW-IAT | 297 |
| Query: | 319 | MSSNSKDAYKDLVRAVDNWHVEIFNYF--DKRLTNAYTESINSIIRQVERMGRGYSFDAL | 376 |
| | | + K+ + DLVRAV NW E YF D +TNAYTESIN + + R GRGYSF+ + | |
| Sbjct: | 298 | IPKGQKEVWSDLVRAVGNWREETMTYFETDMPVTNAYTESINRLAKDKNREGRGYSFEVM | 357 |
| Query: | 377 | RAKILFNEKLHKKRKPRFNSSAFNKAMLYDTFNWYEVNDHDITDNLGVDFSTL | 429 |
| | | RA++L+ K HKK+ P S F K + Y + D N GVD ST+ | |
| Sbjct: | 358 | RARMLYTTK-HKKKAPTAKVSPFYKKTI-----GYGLPDFAEELNYGVDLSTI | 404 |

[10844] No corresponding DNA sequence was identified in S. pyogenes.

[10845] Based on this analysis, it was predicted that this protein and its epitopes, could be useful antigens for vaccines or diagnostics.

### EXAMPLE 1979

[10846] A DNA sequence (GBSx2088) was identified in S. agalactiae <SEQ ID 6123> which encodes the amino acid sequence <SEQ ID 6124>. This protein is predicted to be mercuric reductase. Analysis of this protein sequence reveals the following:

```
>>> Seems to have no N-terminal signal sequence
----- Final Results -----
                            bacterial cytoplasm --- Certainty = 0.2115(Affirmative) < succ>
                              bacterial membrane --- Certainty = 0.0000(Not Clear) < succ>
                                bacterial outside --- Certainty = 0.0000(Not Clear) < succ>
```

[10847] The protein has homology with the following sequences in the GENPEPT database.

| >GP: CAA70224 GB: Y09024 mercuric reductase [Bacillus cereus] | | | |
|---|---|---|---|
| Identities = 412/546 (75%), Positives = 484/546 (88%) | | | |
| Query: | 1 | MNKFKVNISGMTCTGCEKHVESALEKIGAKNIESSYRRGEAVFELPDDIEVESAIKAIDE | 60 |
| | | M K++V++ GMTCTGCE+HV ALE +GA IE +RRGEAVFELP+ + VE+A KAI + | |
| Sbjct: | 1 | MKKYRVDVQGMTCTGCEEHVAVALENMGATGIEVDFRRGEAVFELPNALGVETAKKAISD | 60 |
| Query: | 61 | ANYQAGEIEEVSSLENVALINEDNYDLLIIGSGAAAFSSAIKAIEYGAKVGMIERGTVGG | 120 |
| | | A YQ G+ EEV S E V L NE +YD +IIGSG AAFSSAI+A++YGAKV MIERGT+GG | |
| Sbjct: | 61 | AKYQPGKAEEVQSQEMVQLGNEGDYDYIIIGSGGAAFSSAIEAVKYGAKVAMIERGTIGG | 120 |
| Query: | 121 | TCVNIGCVPSKTLLRAGEINHLSKDNPFIGLQTSAGEVDLASLITQKDKLVSELRNQKYM | 180 |
| | | TCVNIGCVPSKTLLBAGEINHL+K+NPF+GL TSAGEVDLA LI QK++LV+ELRN KY+ | |
| Sbjct: | 121 | TCVNIGCVPSKTLLRAGEINHLAKNNPFVGLHTSAGEVDLAPLIKQKNELVTELRNSKYV | 180 |
| Query: | 181 | DLIDEYNFDLIKGEAKFVDASTVEVNGTKLSAKRFLIATGASPSLPQISGLEKMDYLTST | 240 |
| | | DLID+Y F+LI+GEAKFVD TVEVNG +SAKRFLIATGASP+ P I GL ++DYLTST | |
| Sbjct: | 181 | DLIDDYGFELIEGEAKFVDEKTVEVNGAPISAKRFLIATGASPAKPNIPGLNEVDYLTST | 240 |
| Query: | 241 | TLLELKKIPKRLTVIGSGYIGMELGQLFHHLGSEITLMQRSERLLKEYDPEISESVEKAL | 300 |
| | | +LLELKK+PKRL VIGSGYIGMELGQLFH+LGSE+TL+QRSERLLKEYDPEISESVEK+L | |
| Sbjct: | 241 | SLLELKKVPKRLVVIGSGYIGMELGQLFHNLGSEVTLIQRSERLLKEYDPEISESVEKSL | 300 |
| Query: | 301 | IEQGINLVKGATFERVEQSGEIKRVYVTVNGSREVIESDQLLVATGRKPNTDSLNLSAAG | 360 |
| | | +EQGINLVKGAT+ER+EQ+G+IK+V+V VNG + +IE+DQLLVATGR PNT +LNL AAG | |
| Sbjct: | 301 | VEQGINLVKGATYERIEQNGDIKKVHVEVNGKKRIIEADQLLVATGRTPNTATLNLRAAG | 360 |
| Query: | 361 | VETGKNNEILINDFGQTSNEKIYAAGDVTLGPQFVYVAAYEGGIITDNAIGGLNKIKDLS | 420 |
| | | VE G EI+I+D+ +T+N +IYAAGDVTLGPQFVYVAAY+GG+ NAIGGLNKK++L | |
| Sbjct: | 361 | VEIGSRGEIIIDDYSRTTNTRIYAAGDVTLGPQFVYVAAYQGGVAAPNAIGGLNKKLNLE | 420 |
| Query: | 421 | VVPAVTFTNPTVATVGLTEEQAKEKGYDVKTSVLPLDAVPRAIVNRETTGVFKLVADAET | 480 |
| | | VVP VTFT P +ATVGLTE+QAKE GY+VKTSVLPLDAVPRA+VNRETTGVFKLVAD++T | |
| Sbjct: | 421 | VVPGVTFTAPAIATVGLTEQQAKENGYEVKTSVLPLDAVPRALVNRETTGVFKLVADSKT | 480 |
| Query: | 481 | LKVLGVHIVSENAGDVIYAASLAVKFGLTIEDLTETLAPYLTMAEGLKLVALTFDKDISK | 540 |
| | | +KVLG H+V+ENAGDVIYAA+LAVKFGLT++D+ ETLAPYLTMAEGLKL ALTFDKDISK | |
| Sbjct: | 481 | MKVLGAHVVAENAGDVIYAATLAVKFGLTVDDIRETLAPYLTMAEGLKLAALTFDKDISK | 540 |
| Query: | 541 | LSCCAG | 546 |
| | | LSCCAG | |
| Sbjct: | 541 | LSCCAG | 546 |

[10848] There is also homology to SEQ ID 1820.

[10849] Based on this analysis, it was predicted that this protein and its epitopes, could be useful antigens for vaccines or diagnostics.

### EXAMPLE 1980

[10850] A DNA sequence (GBSx2089) was identified in S. agalactiae <SEQ ID 6125> which encodes the amino acid sequence <SEQ ID 6126>. This protein is predicted to be regulatory protein. Analysis of this protein sequence reveals the following:

```
Possible site: 36
>>> Seems to have no N-terminal signal sequence
----- Final Results -----
                            bacterial cytoplasm --- Certainty = 0.4529(Affirmative) < succ>
                              bacterial membrane --- Certainty = 0.0000(Not Clear) < succ>
                                bacterial outside --- Certainty = 0.0000(Not Clear) < succ>
```

[10851] The protein has homology with the following sequences in the GENPEPT database.

| >GP: AAA83973 GB: AF138877 mercury resistance operon negative | | | |
|---|---|---|---|
| regulator MerR1 [Bacillus sp. RC607] | | | |
| Identities = 83/129 (64%), Positives = 104/129 (80%) | | | |
| Query: | 1 | MIYRISEFADKCGVNKETIRYYERKNLLQEPHRTEAGYRIYSYDDVKRVGFIKRIQEFGF | 60 |
| | | M +RI E ADKCGVNKETIRYYER L+ EP RTE GYR+YS V R+ FIKR+QE GF | |
| Sbjct: | 1 | MKFRIGELADKCGVNKETIRYYERLGLIPEPERTEKGYRMYSQQTVDRLHFIKRMQELGF | 60 |
| Query: | 61 | SLSEIYKLLGVVDKDEVRCQDMFEFVSKKQKEVQKQIEDLKRIETMLDDLKQRCPDEKKL | 120 |
| | | +L+EI KLLGVVD+DE +C+DM++F K +++Q++IEDLKRIE ML DLK+RCP+ K + | |
| Sbjct: | 61 | TLNEIDKLLGVVDRDEAKCRDMYDFTILKIEDIQRKIEDLKRIERMLMDLKERCPENKDI | 120 |
| Query: | 121 | HSCPIIETL | 129 |
| | | + CPIIETL | |
| Sbjct: | 121 | YECPIIETL | 129 |

[10852] There is also homology to SEQ ID 1712.

[10853] Based on this analysis, it was predicted that this protein and its epitopes, could be useful antigens for vaccines or diagnostics.

### EXAMPLE 1981

[10854] A DNA sequence (GBSx2090) was identified in S. agalactiae <SEQ ID 6127> which encodes the amino acid sequence <SEQ ID 6128>. Analysis of this protein sequence reveals the following:

| Possible site: 44 | | | | |
|---|---|---|---|---|
| >>> Seems to have no N-terminal signal sequence | | | | |
| | INTEGRAL | Likelihood = −7.86 | Transmembrane | 80-96 (78-100) |

```
----- Final Results -----
                              bacterial membrane --- Certainty = 0.4142(Affirmative) < succ>
                                bacterial outside --- Certainty = 0.0000(Not Clear) < succ>
                            bacterial cytoplasm --- Certainty = 0.0000(Not Clear) < succ>
```

[10855] The protein has no significant homology with any sequences in the GENPEPT database.

[10856] No corresponding DNA sequence was identified in S. pyogenes.

[10857] Based on this analysis, it was predicted that this protein and its epitopes, could be useful antigens for vaccines or diagnostics.

[10858] A related GBS gene <SEQ ID 8943> and protein <SEQ ID 8944> were also identified. Analysis of this protein sequence reveals the following:

| Lipop: Possible site: −1 Crend: 8 | | | | |
|---|---|---|---|---|
| McG: Discrim Score: −13.52 | | | | |
| GvH: Signal Score (−7.5): −6.14 | | | | |
| Possible site: 44 | | | | |
| >>> Seems to have no N-terminal signal sequence | | | | |
| ALOM program count: 1 value: −7.86 threshold: 0.0 | | | | |
| | INTEGRAL | Likelihood = −7.86 | Transmembrane | 80-96 (78-100) |

| | |
|---|---|
| PERIPHERAL | Likelihood = 1.80 136 |

```
modified ALOM score: 2.07
*** Reasoning Step: 3
----- Final Results -----
                              bacterial membrane --- Certainty = 0.4142(Affirmative) < succ>
                                bacterial outside --- Certainty = 0.0000(Not Clear) < succ>
                            bacterial cytoplasm --- Certainty = 0.0000(Not Clear) < succ>
```

[10859] The protein has homology with the following sequences in the databases:

[chemical structure]

[10860] SEQ ID 8944 (GBS415) was expressed in E. coli as a His-fusion product. SDS-PAGE analysis of total cell extract is shown in FIG. 79 (lane 3; MW 21.2 kDa).

### EXAMPLE 1982

[10861] A DNA sequence (GBSx2092) was identified in S. agalactiae <SEQ ID 6129> which encodes the amino acid sequence <SEQ ID 6130>. Analysis of this protein sequence reveals the following:

```
Possible site: 14
>>> Seems to have no N-terminal signal sequence
----- Final Results -----
                            bacterial cytoplasm --- Certainty = 0.3402(Affirmative) < succ>
                              bacterial membrane --- Certainty = 0.0000(Not Clear) < succ>
                                bacterial outside --- Certainty = 0.0000(Not Clear) < succ>
```

[10862] The protein has no significant homology with any sequences in the GENPEPT database.

[10863] No corresponding DNA sequence was identified in S. pyogenes.

[10864] Based on this analysis, it was predicted that this protein and its epitopes, could be useful antigens for vaccines or diagnostics.

### EXAMPLE 1983

[10865] A DNA sequence (GBSx2093) was identified in S. agalactiae <SEQ ID 6131> which encodes the amino acid sequence <SEQ ID 6132>. This protein is predicted to be ATPase. Analysis of this protein sequence reveals the following:

| Possible site: 27 | | | | |
|---|---|---|---|---|
| >>> Seems to have no N-terminal signal sequence | | | | |
| | INTEGRAL | Likelihood = −10.08 | Transmembrane | 324-340 (317-343) |
| | INTEGRAL | Likelihood = −5.73 | Transmembrane | 662-678 (660-690) |
| | INTEGRAL | Likelihood = −5.41 | Transmembrane | 350-366 (346-378) |
| | INTEGRAL | Likelihood = −3.40 | Transmembrane | 94-110 (93-110) |
| | INTEGRAL | Likelihood = −2.87 | Transmembrane | 681-697 (680-699) |
| | INTEGRAL | Likelihood = −1.38 | Transmembrane | 148-164 (148-164) |

```
----- Final Results -----
                              bacterial membrane --- Certainty = 0.5034(Affirmative) < succ>
                                bacterial outside --- Certainty = 0.0000(Not Clear) < succ>
                            bacterial cytoplasm --- Certainty = 0.0000(Not Clear) < succ>
```

[10866] The protein has homology with the following sequences in the GENPEPT database.

| >GP: AAA22858 GB: M90750 cadmium-efflux ATPase [Bacillus firmus] | | | |
|---|---|---|---|
| Identities = 486/725 (67%), Positives = 584/725 (80%), Gaps = 18/725 (2%) | | | |
| Query: | 1 | MSRGKAKQSEKEMKAYRVQGFTCTNCAAIFENNVKELPGVQDAKVNFGASKVYVKGTTTI | 60 |
| | | MS KA SE+EMKAYRVQGFTC NCA FE NVK+L GV+DAKVNFGASK+ V G TI | |
| Sbjct: | 1 | MSDQKAITSEQEMKAYRVQGFTCANCAGKFEKNVKQLSGVEDAKVNFGASKIAVYGNATI | 60 |
| Query: | 61 | EELEKAGAFENLKIRDEKEQRVGGE-----------PFWKQKENIKVYISALLLVVSWFL | 109 |
| | | EELEKAGAFENLK+ EK R + PF+K K + +Y S LL+ + | |
| Sbjct: | 61 | EELEKAGAFSNLKVTPEKSARQASQEVKEDTKEDKVPFYK-KHSTLLYAS-LLITFGYLS | 118 |
| Query: | 110 | GEQYGEEHVLPTIGYAASILIGGYSLFIKGLKNLRRLNFDMNTLMTIAIIGAAIIGEWGE | 169 |
| | | GEE+++ T+ + AS+ IGG SLF GL+NL R FDM TLMT+A+IG AIIGEW E | |
| Sbjct: | 119 | SYVNGEENIVTTLLFLASMFIGGLSLFKVGLQNLLRFEFDMKTLMTVAVIGGAIIGEWAE | 178 |
| Query: | 170 | GATVVILFAISEALERYSMDKARQSIESLMDIAPKEALIRRGNEEMMIHVDEIQVGDIMI | 229 |
| | | A VVILFAISEALER+SMD+ARQSI SLMDIAPKEAL++R +E+MIHVD+I VGDIMI | |
| Sbjct: | 179 | VAIVVILFAISEALERFSMDRARQSIRSLMDIAPKEALVKRNGQEIMIHVDDIAVGDIMI | 238 |
| Query: | 230 | VKPGQKLAMDGIVVKGTSTLNQAAITGESVPVTKITNDEVFAGTLNEEGLLEVKVTKRVE | 289 |
| | | VKPGQK+AMDG+VV G S +NQ AITGESVPV K ++EVFAGTLNEEGLLEV++TK VE | |
| Sbjct: | 239 | VKPGQKIAMDGVVVSGYSAVNQTAITGESVPVEKTVDNEVFAGTLNEEGLLEVEITKLVE | 298 |
| Query: | 290 | DTTLSKIIHLVEEAQAERAPSQAFVDKFAKYYTPAIVILALLIAVVPPL-FGGDWSQWIY | 348 |
| | | DTT+SKIIHLVEEAQ ERAPSQAFVDKFAKYYTP I+I+A L+A+VPPL F G W WIY | |
| Sbjct: | 299 | DTTISKIIHLVEEAQGERAPSQAFVDKFAKYYTPIIMIIATLVAIVPPLFFDGSWETWIY | 358 |
| Query: | 349 | QGLAVLVVGCPCALVVSTPVAVVTAIGNAAKNGVLIKGGIHLEAAGHLKAIAFDKTGTLT | 408 |
| | | QGLAVLVVGCPCALV+STP+++V+AIGNAAK GVL+KGG++LE G LKAIAFDKTGTLT | |
| Sbjct: | 359 | QGLAVLVVGCPCALVISTPISIVSAIGNAAKKGVLVKGGVYLEEMGALKAIAFDKTGTLT | 418 |
| Query: | 409 | KGIPAVTD--IVTYGRNENELITITSAIEKGSQHPLASAIMRKAEENGLKFNEVTVEDFQ | 466 |
| | | KG+PAVTD ++ NE EL++I +A+E SQHPLASAIM+KAEE + +++V VEDF | |
| Sbjct: | 419 | KGVPAVTDYNVLNKQINEKELLSIITALEYRSQHPLASAIMKKAEEENITYSDVQVEDFS | 478 |
| Query: | 467 | SITGKGVKAKINNEMYYVGSQNLFEE-LHGSISSDKKEKIADMQTQGKTVMVLGTEKEIL | 525 |
| | | SITGKG+K +N YY+GS LF+E L D ++ + +Q QGKT M++GTEKEIL | |
| Sbjct: | 479 | SITGKGIKGIVNGTTYYIGSPKLFKELLTNDFDKDLEQNVTTLQNQGRTAMIIGTEKEIL | 538 |
| Query: | 526 | SFIAVADEMRESSKEVIGKLNNMGI-ETVMLTGDNQRTATAIGKQVGVSDIKADLLPEDK | 584 |
| | | + IAVADE+RESSKE++ KL+ +GI +T+MLTGDN+ TA AIG QVGVSDI+A+L+P+DK | |
| Sbjct: | 539 | AVIAVADEVRESSKEILQKLHQLGIKKTIMLTGDNKGTANAIGGQVGVSDIEAELMPQDK | 598 |
| Query: | 585 | LNFIKELREKHQSVGMVGDGVNDAPALAASTVGVAMGGAGTDTALETADIALMSDDLSKL | 644 |
| | | L+FIK+LR ++ +V MVGDGVNDAPALAASTVG+AMGGAGTDTALETAD+ALM DDL KL | |
| Sbjct: | 599 | LDFIKQLRSEYGNVAMVGDGVNDAPALAASTVGIAMGGAGTDTALETADVALMGDDLRKL | 658 |
| Query: | 645 | PYTIKLSRKALAIIKQNITFSLAIKLVALLLVMPGWLTLWIAIFADMGATLLVTLNSLRL | 704 |
| | | P T+KLSRK L IIK NITF++AIK +A LLV+PGWLTLWIAI +DMGATLLV LN LRL | |
| Sbjct: | 659 | PSTVKLSRKTLNIIKANITFAIAIKFIASLLVIPGWLTLWIAILSDMGATLLVALNGLRL | 718 |
| Query: | 705 | LKIKE | 709 |
| | | +++KE | |
| Sbjct: | 719 | MRVKE | 723 |

[10867] There is also homology to SEQ ID 3506.

[10868] Based on this analysis, it was predicted that this protein and its epitopes, could be useful antigens for vaccines or diagnostics.

### EXAMPLE 1984

[10869] A DNA sequence (GBSx2094) was identified in S. agalactiae <SEQ ID 6133> which encodes the amino acid sequence <SEQ ID 6134>. Analysis of this protein sequence reveals the following:

```
Possible site: 19
>>> Seems to have no N-terminal signal sequence
----- Final Results -----
                            bacterial cytoplasm --- Certainty = 0.0779(Affirmative) < succ>
                              bacterial membrane --- Certainty = 0.0000(Not Clear) < succ>
                                bacterial outside --- Certainty = 0.0000(Not Clear) < succ>
```

[10870] The protein has no significant homology with any sequences in the GENPEPT database.

[10871] No corresponding DNA sequence was identified in S. pyogenes.

[10872] Based on this analysis, it was predicted that this protein and its epitopes, could be useful antigens for vaccines or diagnostics.

### EXAMPLE 1985

[10873] A DNA sequence (GBSx2095) was identified in S. agalactiae <SEQ ID 6135> which encodes the amino acid sequence <SEQ ID 6136>. Analysis of this protein sequence reveals the following:

Possible site: 58
>>> Seems to have no N-terminal signal sequence

| | | | |
|---|---|---|---|
| INTEGRAL | Likelihood = −8.92 | Transmembrane | 123-139 (115-145) |
| INTEGRAL | Likelihood = −6.74 | Transmembrane | 172-188 (167-190) |
| INTEGRAL | Likelihood = −1.81 | Transmembrane | 80-96 (80-96) |

```
----- Final Results -----
                              bacterial membrane --- Certainty = 0.4567(Affirmative) < succ>
                                bacterial outside --- Certainty = 0.0000(Not Clear) < succ>
                            bacterial cytoplasm --- Certainty = 0.0000(Not Clear) < succ>
```

[10874] A related GBS nucleic acid sequence <SEQ ID 9923> which encodes amino acid sequence <SEQ ID 9924> was also identified.

[10875] The protein has no significant homology with any sequences in the GENPEPT database, but there is homology to SEQ ID 4216.

[10876] A related GBS gene <SEQ ID 8945> and protein <SEQ ID 8946> were also identified. Analysis of this protein sequence reveals the following:

| Lipop: Possible site: −1 Crend: 10 | | | | |
|---|---|---|---|---|
| McG: Discrim Score: −6.41 | | | | |
| GvH: Signal Score (−7.5): −2.23 | | | | |
| Possible site: 58 | | | | |
| >>> Seems to have no N-terminal signal sequence | | | | |
| ALOM program count: 3 value: −8.92 threshold: 0.0 | | | | |
| | INTEGRAL | Likelihood = −8.92 | Transmembrane | 123-139 (115-145) |
| | INTEGRAL | Likelihood = −6.74 | Transmembrane | 172-188 (167-190) |
| | INTEGRAL | Likelihood = −1.81 | Transmembrane | 80-96 (80-96) |

| | |
|---|---|
| PERIPHERAL | Likelihood = −2.92 46 |

```
modified ALOM score: 2.28
*** Reasoning Step: 3
----- Final Results -----
                              bacterial membrane --- Certainty = 0.4567(Affirmative) < succ>
                                bacterial outside --- Certainty = 0.0000(Not Clear) < succ>
                            bacterial cytoplasm --- Certainty = 0.0000(Not Clear) < succ>
```

[10877] Based on this analysis, it was predicted that these proteins and their epitopes could be useful antigens for vaccines or diagnostics.

### EXAMPLE 1986

[10878] A DNA sequence (GBSx2096) was identified in S. agalactiae <SEQ ID 6137> which encodes the amino acid sequence <SEQ ID 6138>. This protein is predicted to be histidine rich P type ATPase (HRA-1) (copB). Analysis of this protein sequence reveals the following:

| Possible site: 54 | | | | |
|---|---|---|---|---|
| >>> Seems to have no N-terminal signal sequence | | | | |
| | INTEGRAL | Likelihood = −13.37 | Transmembrane | 318-334 (307-345) |
| | INTEGRAL | Likelihood = −5.84 | Transmembrane | 347-363 (335-364) |
| | INTEGRAL | Likelihood = −5.15 | Transmembrane | 88-104 (86-112) |
| | INTEGRAL | Likelihood = −5.04 | Transmembrane | 651-667 (649-669) |
| | INTEGRAL | Likelihood = −4.30 | Transmembrane | 156-172 (155-173) |
| | INTEGRAL | Likelihood = −4.30 | Transmembrane | 669-685 (668-690) |
| | INTEGRAL | Likelihood = −3.03 | Transmembrane | 62-78 (60-80) |

```
----- Final Results -----
                              bacterial membrane --- Certainty = 0.6349(Affirmative) < succ>
                                bacterial outside --- Certainty = 0.0000(Not Clear) < succ>
                            bacterial cytoplasm --- Certainty = 0.0000(Not Clear) < succ>
```

[10879] The protein has homology with the following sequences in the GENPEPT database.

| >GP: AAA62113 GB: U16658 histidine rich P type ATPase [Escherichia | | | |
|---|---|---|---|
| coli] | | | |
| Identities = 598/731 (81%), Positives = 651/731 (88%), Gaps = 36/731 (4%) | | | |
| Query: | 1 | MRNNKKHSSHSHHNHGDIDHSKHDHNEMEHSQMDHS------------------------ | 36 |
| | | MRNNK+HSSHSHHNHGD++HSKHDHNEMEHSQMDHS | |
| Sbjct: | 1 | MRNNKQHSSHSHHNHGDMEHSKHDHNEMEHSQMDHSAMGHCAMGGHAHHHHGDMDHSKHD | 60 |
| Query: | 37 | ------------NMDHSEMDHGAMGGHAHHHHGSFKEIFLKSLPLGIAILLITPMMDIQL | 84 |
| | | MD+SEMDHGAMGGHAHHHHGSFK+IFLKSLPLGIAILLITP+M IQL | |
| Sbjct: | 61 | HNEMKHSQMDHSKMDYSEMDHGAMGGHAHHHHGSFKDIFLKSLPLGIAILLITPLMGIQL | 120 |
| Query: | 85 | PFQIIFPYADVVAAVLATILYIFGGKPFYMGAKDEFNSKAPGMMSLITLGITVSYAYSVY | 144 |
| | | PFQIIFPYADVVAAVLATILYIFGGKPF MGAKDEFNSK PGMMSLITLGITVSYAYSVY | |
| Sbjct: | 121 | PFQIIFPYADVVAAVLATILYIFGGKPFLMGAKDEFNSKVPGMMSLITLGITVSYAYSVY | 180 |
| Query: | 145 | AVAARYVTGEHVMDFFFEFTTLILIMLLGHWIEMKALGEAGDAQKALAELVPKDAHVVLE | 204 |
| | | AVAARYVTGE VMDFFFEFTTLILIMLLGHWIEMKALGEAG+AQKALAELVPKDAHVVLE | |
| Sbjct: | 181 | AVAARYVTGEPVMDFFFEFTTLILIMLLGHWIEMKALGEAGNAQKALAELVPKDAHVVLE | 240 |
| Query: | 205 | DDSIETRPVSELQIGDVIRVQAGENVPADGIIIRGESRVNEALVTGESKPIEKKTGDEVI | 264 |
| | | DDSIETRPV++LQ+GD+IRVQAGENVPADG I RGESRVNEALVTGESKPIEK GDEVI | |
| Sbjct: | 241 | DDSIETRPVADLQVGDLIRVQAGENVPADGTIQRGESRVNEALVTGESKPIEKNPGDEVI | 300 |
| Query: | 265 | GGSTNGGGVLYVEIKQTGDQSFISQVQTLISQAQSQPSRAENVAQKVASWLFYIAVVVAL | 324 |
| | | GGSTNG GVLYVEIKQTGD+SFISQVQTLISQAQSQPSRAEN+AQKVA WLFYIAV+ AL | |
| Sbjct: | 301 | GGSTNGDGVLYVEIKQTGOKSFISQVQTLISQAQSQPSRAENLAQKVAGWLFYIAVIAAL | 360 |
| Query: | 325 | IALLIWTIIADLPTAVIFTVTALVIACPHALGLAIPLVVSRSTSLGASRGLLVKNREALE | 384 |
| | | IAL+IW +IAD+PTAVIFTVT LVIACPHALGLAIPLV +RSTSLGASRGLLVK+R+ALE | |
| Sbjct: | 361 | IALVIWMVIADVPTAVIFTVTTLVIACPHALGLAIPLVTARSTSLGASRGLLVKDRDALE | 420 |
| Query: | 385 | LTTKADVMVLDKTGTLTTGEFKVLDVTVLSDKYSEEEITGLLAGIEAGSSHPIAQSIVNH | 444 |
| | | LTT ADVMVLDKTGTLTTGEFKVLDV + +DKY+++EI LL+GIE GSSHPIAQSI+++ | |
| Sbjct: | 421 | LTTNADVMVLDKTGTLTTGEFKVLDVELFNDKYTKDEIVALLSGIEGGSSHPIAQSIISY | 480 |
| Query: | 445 | AEAKGIKSVSFDSIEIVSGAGIEGEANGHHYQLISQKAYGKALRMDIPKGATLSILVENN | 504 |
| | | AE +GI+ VSFDSI+++SGAG+EG+ANGH YQLISQKAYG+ L MDIPKGAT+S+LVEN+ | |
| Sbjct: | 481 | AEQQGIRPVSFDSIDVMSGAGVEGQANGHRYQLISQKAYGRNLDMDIPKGATISVLVEND | 540 |
| Query: | 505 | EAIGAVALGDELKETSRNLIEVLKKYGIEPLMATGDNEEAAQGVAEVLGIQYQANQSPED | 564 |
| | | EAIGAVALGDELK TS++LI+ LKK I+P+MATGDNE+AAQG AE+LGI Y ANQSP+D | |
| Sbjct: | 541 | EAIGAVALGDELKPTSKDLIQALKKNKIQPIMATGDNEKAAQGAAEILGIDYLANQSPQD | 600 |
| Query: | 565 | KYKLVESMRNQNKTVIMVGDGVNDAPSLALADVGIAIGAGTQVALDSADIILTQSDPGDI | 624 |
| | | KY+LVE +K + K VIMVGDGVNDAPSLALADVGIAIGAGTQVALDSADIILTQ PGDI | |
| Sbjct: | 601 | KYELVEKLKAEGKKVIMVGDGVNDAPSLALADVGIAIGAGTQVALDSADIILTQYSPGDI | 660 |
| Query: | 625 | ESFIELANKTTRKMKQNLVWGAGYNFIAIPIAAGLLAPIGITLGPAFGAVLMSLSTVIVA | 684 |
| | | SFIELA KTTRKMK+NLVWGAGYNFIAIPIAAG+LAPIGITL PA AVLMSLSTVIVA | |
| Sbjct: | 661 | ASFIELAQKTTRKMKENLVWGAGYNFIAIPIAAGILAPIGITLSPAVAAVLMSLSTVIVA | 720 |
| Query: | 685 | INAMTLKLEPK | 695 |
| | | INAMTLKLEPK | |
| Sbjct: | 721 | INAMTLKLEPK | 731 |

[10880] There is also homology to SEQ ID 3506.

[10881] A related GBS gene <SEQ ID 8947> and protein <SEQ ID 8948> were also identified. Analysis of this protein sequence reveals the following:

| Lipop: Possible site: −1 Crend: 7 | | | | |
|---|---|---|---|---|
| McG: Discrim Score: −19.12 | | | | |
| GvH: Signal Score (−7.5): −3.71 | | | | |
| Possible site: 27 | | | | |
| >>> Seems to have no N-terminal signal sequence | | | | |
| ALOM program count: 7 value: −13.37 threshold: 0.0 | | | | |
| | INTEGRAL | Likelihood = 13.37 | Transmembrane | 291-307 (280-318) |
| | INTEGRAL | Likelihood = −5.84 | Transmembrane | 320-336 (308-337) |
| | INTEGRAL | Likelihood = −5.15 | Transmembrane | 61-77 (59-85) |
| | INTEGRAL | Likelihood = −5.04 | Transmembrane | 624-640 (622-642) |
| | INTEGRAL | Likelihood = −4.30 | Transmembrane | 129-145 (128-146) |
| | INTEGRAL | Likelihood = −4.30 | Transmembrane | 642-658 (641-663) |
| | INTEGRAL | Likelihood = −3.03 | Transmembrane | 35-51 (33-53) |
| | PERIPHERAL | Likelihood = 0.74 | 103 | |

```
modified ALOM score: 3.17
*** Reasoning Step: 3
----- Final Results -----
                              bacterial membrane --- Certainty = 0.6349(Affirmative) < succ>
                                bacterial outside --- Certainty = 0.0000(Not Clear) < succ>
                            bacterial cytoplasm --- Certainty = 0.0000(Not Clear) < succ>
```

[10882] The protein has homology with the following sequences in the databases:

[chemical structure]

[10883] Based on this analysis, it was predicted that these proteins and their epitopes could be useful antigens for vaccines or diagnostics.

### EXAMPLE 1987

[10884] A DNA sequence (GBSx2097) was identified in S. agalactiae <SEQ ID 6139> which encodes the amino acid sequence <SEQ ID 6140>. This protein is predicted to be CopA. Analysis of this protein sequence reveals the following:

```
Possible site: 59
>>> Seems to have no N-terminal signal sequence
----- Final Results -----
                            bacterial cytoplasm --- Certainty = 0.2197(Affirmative) < succ>
                              bacterial membrane --- Certainty = 0.0000(Not Clear) < succ>
                                bacterial outside --- Certainty = 0.0000(Not Clear) < succ>
```

[10885] The protein has homology with the following sequences in the GENPEPT database.

| >GP: CAA40599 GB: X57326 ORF-1 [Thiobacillus ferrooxidans] | | | |
|---|---|---|---|
| Identities = 26/65 (40%), Positives = 40/65 (61%), Gaps = 2/65 (3%) | | | |
| Query: | 1 | MKQEILL--DGVKCAGCANTVQERFSAIEGVESVEVDLATKKAVLESQTEIDTETLNAAL | 58 |
| | | M Q+I L G+ CA CA++V++ I G++S +V LAT +A + Q+ I TE L AA+ | |
| Sbjct: | 1 | MSQKIFLRITGMTCAHCAHSVEKALLGIHGIDSAQVSLATNQAEVFLQSSIPTEALLAAV | 60 |
| Query: | 59 | AETNY | 63 |
| | | + Y | |
| Sbjct: | 61 | TQAGY | 65 |

[10886] There is also homology to SEQ ID 3510.

[10887] Based on this analysis, it was predicted that this protein and its epitopes, could be useful antigens for vaccines or diagnostics.

### EXAMPLE 1988

[10888] A DNA sequence (GBSx2098) was identified in S. agalactiae <SEQ ID 6141> which encodes the amino acid sequence <SEQ ID 6142>. Analysis of this protein sequence reveals the following:

```
Possible site: 28
>>> Seems to have no N-terminal signal sequence
----- Final Results -----
                            bacterial cytoplasm --- Certainty = 0.3220(Affirmative) < succ>
                              bacterial membrane --- Certainty = 0.0000(Not Clear) < succ>
                                bacterial outside --- Certainty = 0.0000(Not Clear) < succ>
```

[10889] The protein has no significant homology with any sequences in the GENPEPT database.

[10890] No corresponding DNA sequence was identified in S. pyogenes.

[10891] Based on this analysis, it was predicted that this protein and its epitopes, could be useful antigens for vaccines or diagnostics.

### EXAMPLE 1989

[10892] A DNA sequence (GBSx2099) was identified in S. agalactiae <SEQ ID 6143> which encodes the amino acid sequence <SEQ ID 6144>. This protein is predicted to be heavy-metal transporting P-type ATPase (b0484). Analysis of this protein sequence reveals the following:

| Possible site: 27 | | | | |
|---|---|---|---|---|
| >>> Seems to have no N-terminal signal sequence | | | | |
| | INTEGRAL | Likelihood = −4.09 | Transmembrane | 131-147 (130-150) |

```
----- Final Results -----
                              bacterial membrane --- Certainty = 0.2635(Affirmative) < succ>
                                bacterial outside --- Certainty = 0.0000(Not Clear) < succ>
                            bacterial cytoplasm --- Certainty = 0.0000(Not Clear) < succ>
```

[10893] The protein has homology with the following sequences in the GENPEPT database.

| >GP: AAB01764 GB: U42410 heavy-metal transporting P-type ATPase | | | |
|---|---|---|---|
| [Proteus mirabilis] | | | |
| Identities = 98/153 (64%), Positives = 123/153 (80%) | | | |
| Query: | 2 | KAVKALRRRGVEVIMITGDNKRTAKAIAKQVGIDSVLSEVLPEDKAEEVKKLQEAGKKVA | 61 |
| | | +A+KAL G++V MITGDNK TAKAIAKQ+GID +++EVLP+ K +K+L + G KVA | |
| Sbjct: | 649 | EAIKALHALGLKVAMITGDNKATAKAIAKQLGIDEIVAEVLPDGKVAALKQLSQKGDKVA | 708 |
| Query: | 62 | MVGDGINDAPALAQANVGIAVGSGTDVAIESADIVLMRNDLTAVLTTIDLSHATLRNIKQ | 121 |
| | | VGDGINDAPALAQA+VG+A+G+GTDVAIE+AD+VLM DL V+ I LS AT+RNIKQ | |
| Sbjct: | 709 | FVGDGINDAPALAQADVGLAIGTGTDVAIEAADVVLMSGDLRGVVDAIALSQATIRNIKQ | 768 |
| Query: | 122 | NLFWAFAYNLVGIPVAMGLLYIFGGLLMSPMLA | 154 |
| | | NLFW FAYN + IPVA G+LY G+L+SP+ A | |
| Sbjct: | 769 | NLFWTFAYNALLIPVAAGMLYPINGMLLSPIFA | 801 |

[10894] A related DNA sequence was identified in S. pyogenes <SEQ ID 3505> which encodes the amino acid sequence <SEQ ID 3506>. Analysis of this protein sequence reveals the following:

| Possible site: 36 | | | | |
|---|---|---|---|---|
| >>> Seems to have no N-terminal signal sequence | | | | |
| | INTEGRAL | Likelihood = −10.83 | Transmembrane | 328-344 (314-348) |
| | INTEGRAL | Likelihood =−7.01 | Transmembrane | 354-370 (347-377) |
| | INTEGRAL | Likelihood =−3.24 | Transmembrane | 101-117 (100-117) |
| | INTEGRAL | Likelihood =−2.97 | Transmembrane | 165-181 (165-185) |
| | INTEGRAL | Likelihood =−2.34 | Transmembrane | 665-681 (662-684) |
| | INTEGRAL | Likelihood =−2.18 | Transmembrane | 67-83 (66-83) |
| | INTEGRAL | Likelihood =−0.64 | Transmembrane | 491-507 (490-508) |
| | INTEGRAL | Likelihood =−0.59 | Transmembrane | 691-707 (691-707) |
| | INTEGRAL | Likelihood =−0.43 | Transmembrane | 140-156 (139-156) |

```
----- Final Results -----
                              bacterial membrane --- Certainty = 0.5331(Affirmative) < succ>
                                bacterial outside --- Certainty = 0.0000(Not Clear) < succ>
                            bacterial cytoplasm --- Certainty = 0.0000(Not Clear) < succ>
```

[10895] An alignment of the GAS and GBS proteins is shown below.

| Identities = 92/152 (60%), Positives = 123/152 (80%) | | | |
|---|---|---|---|
| Query: | 4 | VKALRRRGVEVIMITGDNKRTAKAIAKQVGIDSVLSEVLPEDKAEEVKKLQEAGKKVAMV | 63 |
| | | V+AL + G+ IM+TGD+ TAKAIA QVGI V+S+VLP+ KA + L+ G+KVAMV | |
| Sbjct: | 544 | VEALHQLGIHTIMLTGDHDATAKAIASQVGITDVISQVLPDQKAGVIADLRSQGRKVAMV | 603 |
| Query: | 64 | GDGINDAPALAQANVGIAVGSGTDVAIESADIVLMRNDLTAVLTTIDLSHATLRNIKQNL | 123 |
| | | GDGINDAPALA A++GIA+GSGTD+AIESAD++LM+ D+ ++ + LS T+R +K+NL | |
| Sbjct: | 604 | GDGINDAPALAVADIGIAMGSGTDIAIESADVILMKPDMLDLVKAMSLSRVTMRIVKENL | 663 |
| Query: | 124 | FWAFAYNLVGIPVAMGLLYIFGGLLMSPMLAG | 155 |
| | | FWAF YN++ IPVAMGLL++FGG L++PMLAG | |
| Sbjct: | 664 | FWAFIYNVLMIPVAMGLLHLFGGPLLNPMLAG | 695 |

[10896] Based on this analysis, it was predicted that these proteins and their epitopes could be useful antigens for vaccines or diagnostics.

### EXAMPLE 1990

[10897] A DNA sequence (GBSx2100) was identified in S. agalactiae <SEQ ID 6145> which encodes the amino acid sequence <SEQ ID 6146>. This protein is predicted to be CopY. Analysis of this protein sequence reveals the following:

```
Possible site: 23
>>> Seems to have no N-terminal signal sequence
----- Final Results -----
                            bacterial cytoplasm --- Certainty = 0.2067(Affirmative) < succ>
                              bacterial membrane --- Certainty = 0.0000(Not Clear) < succ>
                                bacterial outside --- Certainty = 0.0000(Not Clear) < succ>
```

[10898] The protein has homology with the following sequences in the GENPEPT database.

| >GP: AAG10085 GB: AF296446 CopY [Streptococcus mutans] | | | |
|---|---|---|---|
| Identities = 63/139 (45%), Positives = 96/139 (68%) | | | |
| Query: | 8 | TSITDAEWEVMRVVWANDLVTSKTVISVLKEKMDWTESTIKTILGRLVEKGVLNTEQEGR | 67 |
| | | TSI++AEWEVMRVVWA + +S +I++L W+ STIKT++ RL EKG L ++++GR | |
| Sbjct: | 2 | TSISNAEWEVMRVVWAKQMTSSSEIIAILSRTYCWSASTIKTLITRLSEKGYLTSQRQGR | 61 |
| Query: | 68 | KFIYTANIVEKEAVRDFAEDIFNRICKKKVGNVIGSIIEDHVLSFDDIDRLEKILEIKKS | 127 |
| | | K+IY++ I E+EA+ ++F+RIC K +I ++E+ ++ DI++LE +L KK+ | |
| Sbjct: | 62 | KYIYSSLISEEEALEQQVSEVFSRICVTKHQALIRHLVEETPMTLSDIEKLEALLLSKKA | 121 |
| Query: | 128 | FAVEEVDCQCTEGQCDCHE | 146 |
| | | AV EV C C GQC C+E | |
| Sbjct: | 122 | NAVPEVKCNCIVGQCSCYE | 140 |

[10899] There is also homology to SEQ ID 3502.

[10900] Based on this analysis, it was predicted that this protein and its epitopes, could be useful antigens for vaccines or diagnostics.

### EXAMPLE 1991

[10901] A DNA sequence (GBSx2101) was identified in S. agalactiae <SEQ ID 6147> which encodes the amino acid sequence <SEQ ID 6148>. Analysis of this protein sequence reveals the following:

```
Possible site: 29
>>> Seems to have no N-terminal signal sequence
----- Final Results -----
                            bacterial cytoplasm --- Certainty = 0.2829(Affirmative) < succ>
                              bacterial membrane --- Certainty = 0.0000(Not Clear) < succ>
                                bacterial outside --- Certainty = 0.0000(Not Clear) < succ>
```

[10902] The protein has no significant homology with any sequences in the GENPEPT database.

[10903] No corresponding DNA sequence was identified in S. pyogenes.

[10904] Based on this analysis, it was predicted that this protein and its epitopes, could be useful antigens for vaccines or diagnostics.

### EXAMPLE 1992

[10905] A DNA sequence (GBSx2102) was identified in S. agalactiae <SEQ ID 6149> which encodes the amino acid sequence <SEQ ID 6150>. This protein is predicted to be DS RF protein. Analysis of this protein sequence reveals the following:

| Possible site: 57 | | | | |
|---|---|---|---|---|
| >>> Seems to have a cleavable N-term signal seq. | | | | |
| | INTEGRAL | Likelihood = −13.21 | Transmembrane | 142-158 (136-169) |
| | INTEGRAL | Likelihood = −3.45 | Transmembrane | 70-86 (66-88) |
| | INTEGRAL | Likelihood = −3.13 | Transmembrane | 178-194 (176-195) |

```
----- Final Results -----
                              bacterial membrane --- Certainty = 0.6286(Affirmative) < succ>
                                bacterial outside --- Certainty = 0.0000(Not Clear) < succ>
                            bacterial cytoplasm --- Certainty = 0.0000(Not Clear) < succ>
```

[10906] The protein has homology with the following sequences in the GENPEPT database.

| >GP: AAA26611 GB: L10909 putative [Staphylococcus aureus] | | | |
|---|---|---|---|
| Identities = 98/204 (48%), Positives = 148/204 (72%), Gaps = 3/204 (1%) | | | |
| Query: | 4 | TIISAIGVYISTSIDYLIVLIILFAQLSQNKQKWHIYAGQYLGTGLLVGASLVAAY-VVN | 62 |
| | | TI++A VY++T IDYL++LI+LF+Q+ + + K HI+ GQY+GT +++GASL+ A VVN | |
| Sbjct: | 18 | TILTATAVYVATGIDYLVILILLFSQVKKGQVK-HIWIGQYIGTAIVIGASLLVAQGVVN | 76 |
| Query: | 63 | FVPEAWMVGLLGLIPIYLGIRFAIVGEGEEEEEEEIIERLEQSKANQLFWTVTLLTIASG | 122 |
| | | +P+ W++GLLGL+P+YLG++ I GE E+E+E I+ K NQLF T+ + +AS | |
| Sbjct: | 77 | LIPQQWVIGLLGLLPLYLGVKIWIKGE-EDEDESSILSLFSSGKFNQLFLTMIFIVLASS | 135 |
| Query: | 123 | GDNLGIYIPYFASLDWSQTLVVLLVFAIGIIIFCELSWVLSSIPLISETIEKYQRIIVPL | 182 |
| | | D+ IYIPYF +L S+ +V +VF I + + C +S+ L+S ISETIEKY+R IVP+ | |
| Sbjct: | 136 | ADDFSIYIPYFTTLSMSEIFIVTIVFLIMVGVLCYVSYRLASFDFISETIEKYERWIVPI | 195 |
| Query: | 183 | VFIPLGLYIMYESGTIETFLNFIL | 206 |
| | | VFI LG+YI++E+GT ++F+L | |
| Sbjct: | 196 | VFIGLGIYILFENGTSNALISFLL | 219 |

[10907] A related DNA sequence was identified in S. pyogenes <SEQ ID 6151> which encodes the amino acid sequence <SEQ ID 6152>. Analysis of this protein sequence reveals the following:

| Possible site: 34 | | | | |
|---|---|---|---|---|
| >>> Seems to have an uncleavable N-term signal seq | | | | |
| | INTEGRAL | Likelihood = −13.16 | Transmembrane | 143-159 (135-165) |
| | INTEGRAL | Likelihood = −9.13 | Transmembrane | 49-65 (43-71) |
| | INTEGRAL | Likelihood = −7.17 | Transmembrane | 73-89 (72-94) |
| | INTEGRAL | Likelihood = −6.00 | Transmembrane | 13-29 (9-33) |
| | INTEGRAL | Likelihood = −2.71 | Transmembrane | 180-196 (179-197) |
| | INTEGRAL | Likelihood = −0.59 | Transmembrane | 112-128 (109-128) |

```
----- Final Results -----
                              bacterial membrane --- Certainty = 0.6265(Affirmative) < succ>
                                bacterial outside --- Certainty = 0.0000(Not Clear) < succ>
                            bacterial cytoplasm --- Certainty = 0.0000(Not Clear) < succ>
```

[10908] The protein has homology with the following sequences in the databases:

| >GP: AAF42284 GB: AE002544 cadmium resistance protein [Neisseria | | | |
|---|---|---|---|
| meningitidis MC58] | | | |
| Identities = 201/208 (96%), Positives = 205/208 (97%) | | | |
| Query: | 1 | MRCFMIQNVVTSIILYSGTAVDLLIILMLFFAKRKSRKDIINIYLGQFLGSVSLILLSLL | 60 |
| | | MRCFMIQNVVTSIILYSGTAVDLLIILMLFFAKRKSRKDIINIYLGQFLGSVSLILLSLL | |
| Sbjct: | 1 | MRCFMIQNVVTSIILYSGTAVDLLIILMLFFAKRKSRKDIINIYLGQFLGSVSLILLSLL | 60 |
| Query: | 61 | FAFVLDYIPSKEILGLLGLIPIFLGLKVLLLGDSDGEAIAKEGLSKDNKNLIFLVAMITF | 120 |
| | | FAFVLDYIPSKEILGLLGLIPI LG+KVLLLGDSDGEAIAKEGL KDNKNLIFLVAMITF | |
| Sbjct: | 61 | FAFVLDYIPSKEILGLLGLIPILLGIKVLLLGDSDGEAIAKEGLRKDNKNLIFLVAMITF | 120 |
| Query: | 121 | ASCGADNIGVFVPYFTTLNLANLIVALLTFLVMIYLLVFSAQKLAQVPSVGETLEKYSRW | 180 |
| | | ASCGADNIGVFVPYFTTLNLANLIVALLTFLVMIYLLVFSAQKLAQVPSVGETLEKYSRW | |
| Sbjct: | 121 | ASCGADNIGVFVPYFTTLNLANLIVALLTFLVMIYLLVFSAQKLAQVPSVGETLEKYSRW | 180 |
| Query: | 181 | FIAVVYLGLGMYILIENNSFDMLWAVLG | 208 |
| | | F+AVVYLGLG+YIL+ENNSFDMLW VLG | |
| Sbjct: | 181 | FVAVVYLGLGIYILVENNSFDMLWTVLG | 208 |

[10909] An alignment of the GAS and GBS proteins is shown below.

| Identities = 71/200 (35%), Positives = 130/200 (64%), Gaps = 4/200 (2%) | | | |
|---|---|---|---|
| Query: | 1 | MGQTIISAIGVYISTSIDYLIVLIILFAQLSQNKQKWHIYAGQYLGTGLLVGASLVAAYV | 60 |
| | | M Q ++++I +Y T++D LI+L++ FA+ K +IY GQ+LG+ L+ SL+ A+V | |
| Sbjct: | 5 | MIQNVVTSIILYSGTAVDLLIILMLFFAKRKSRKDIINIYLGQFLGSVSLILLSLLFAFV | 64 |
| Query: | 61 | VNFVPEAWMVGLLGLIPIYLGIRFAIVGEGEEEEEEEIIERLEQSKANQLFWTVTLLTIA | 120 |
| | | ++++P ++GLLGLIPI+LG++ ++G+ + E + E L + N +F V ++T A | |
| Sbjct: | 65 | LDYIPSKEILGLLGLIPIFLGLKVLLLGDSDGEAIAK--EGLSKDNKNLIF-LVAMITFA | 121 |
| Query: | 121 | S-GGDNLGIYIPYFASLDWSQTLVVLLVFAIGIIIFCELSWVLSSIPLISETIEKYQRII | 179 |
| | | S G DN+G+++PYF +L+ + +V LL F + I + + L+ +P + ET+EKY R | |
| Sbjct: | 122 | SCGADNIGVFVPYFTTLNLANLIVALLTFLVMIYLLVFSAQKLAQVPSVGETLEKYSRWF | 181 |
| Query: | 180 | VPLVFIPLGLYIMYESGTIE | 199 |
| | | + +V++ LG+YI+ E+ + + | |
| Sbjct: | 182 | IAVVYLGLGMYILIENNSFD | 201 |

[10910] SEQ ID 6150 (GBS174) was expressed in and purified from E. coli. The purified protein is shown in lane 7 of FIG. 223.

[10911] Based on this analysis, it was predicted that this protein and its epitopes, could be useful antigens for vaccines or diagnostics.

### EXAMPLE 1993

[10912] A DNA sequence (GBSx2103) was identified in S. agalactiae <SEQ ID 6153> which encodes the amino acid sequence <SEQ ID 6154>. This protein is predicted to be Pgm. Analysis of this protein sequence reveals the following:

```
Possible site: 53
>>> Seems to have no N-terminal signal sequence
----- Final Results -----
                            bacterial cytoplasm --- Certainty = 0.4324(Affirmative) < succ>
                              bacterial membrane --- Certainty = 0.0000(Not Clear) < succ>
                                bacterial outside --- Certainty = 0.0000(Not Clear) < succ>
```

[10913] The protein has homology with the following sequences in the GENPEPT database.

| >GP: CAB96418 GB: AJ243290 | | | |
|---|---|---|---|
| phosphoglucomutase [Streptococcus thermophilus] | | | |
| Identities = 65/76 (85%), Positives = 71/76 (92%) | | | |
| Query: | 1 | MTYTENLQKWLDFEQLPDYLRQELLSMDEKTKEDAFYTNLEFGTAGMRGYIGAGTNRINI | 60 |
| | | M+YTEN QKWLDF +LP YLR EL+SMDEKTKEDAFYTNLEFGTAGMRG IGAGTNRINI | |
| Sbjct: | 1 | MSYTENYQKWLDFAELPAYLRDELVSMDEKTKEDAFYTNLEFGTAGMRGLIGAGTNRINI | 60 |
| Query: | 61 | YVVRQATEGLAKLIET | 76 |
| | | YVVRQATEGLA+LI++ | |
| Sbjct: | 61 | YVVRQATEGLAQLIDS | 76 |

[10914] A related DNA sequence was identified in S. pyogenes <SEQ ID 6155> which encodes the amino acid sequence <SEQ ID 6156>. Analysis of this protein sequence reveals the following:

```
Possible site: 53
>>> Seems to have no N-terminal signal sequence
----- Final Results -----
                            bacterial Cytoplasm --- Certainty = 0.4324(Affirmative) < succ>
                              bacterial membrane --- Certainty = 0.0000(Not Clear) < succ>
                                bacterial outside --- Certainty = 0.0000(Not Clear) < succ>
```

[10915] An alignment of the GAS and GBS proteins is shown below.

| Identities = 75/76 (98%), Positives = 75/76 (98%) | | | |
|---|---|---|---|
| Query: | 1 | MTYTENLQKWLDFEQLPDYLRQELLSMDEKTKEDAFYTNLEFGTAGMRGYIGAGTNRINI | 60 |
| | | MTYTEN QKWLDFEQLPDYLRQELLSMDEKTKEDAFYTNLEFGTAGMRGYIGAGTNRINI | |
| Sbjct: | 1 | MTYTENFQKWLDFEQLPDYLRQELLSMDEKTKEDAFYTNLEFGTAGMRGYIGAGTNRINI | 60 |
| Query: | 61 | YVVRQATEGLAKLIET | 76 |
| | | YVVRQATEGLAKLIET | |
| Sbjct: | 61 | YVVRQATEGLAKLIET | 76 |

[10916] Based on this analysis, it was predicted that these proteins and their epitopes could be useful antigens for vaccines or diagnostics.

### EXAMPLE 1994

[10917] A DNA sequence (GBSx2104) was identified in S. agalactiae <SEQ ID 6157> which encodes the amino acid sequence <SEQ ID 6158>. This protein is predicted to be a membrane protein. Analysis of this protein sequence reveals the following:

```
Possible site: 53
>>> Seems to have a cleavable N-term signal seq.
INTEGRAL Likelihood = −6.21 Transmembrane  94-110 ( 93-115)
INTEGRAL Likelihood = −4.14 Transmembrane 172-188 ( 166-188)
INTEGRAL Likelihood = −1.97 Transmembrane 130-146 ( 129-149)
INTEGRAL Likelihood = −0.16 Transmembrane  62-78 ( 62-79)
----- Final Results -----
                            bacterial membrane --- Certainty = 0.3484(Affirmative) < succ>
                              bacterial outside --- Certainty = 0.0000(Not Clear) < succ>
                          bacterial cytoplasm --- Certainty = 0.0000(Not Clear) < succ>
```

[10918] The protein has homology with the following sequences in the GENPEPT database.

>GP:CAA80247 GB:Z22520 membrane protein [Bacillus acidopullulyticus]
Identities = 47/185 (25%), Positives = 80/185 (42%), Gaps = 23/185 (12%)

| | | | |
|---|---|---|---|
| Query: | 1 | MKKKNKSSNIAIIAIFFAIMLVIHFLSSFIFSFWLVPIKPTLMHIPVIIASIAYGPRIGA | 60 |
| | | MKK +I I + A+ +++ T+MHIP II I GP +G | |
| Sbjct: | 1 | MKKSLTVRDIVIAGVLGAVAILLGVTRLGYIPVPTAAGNATIMHIPAIIGGIMQGPVVGL | 60 |
| Query: | 61 | TLGALMGGISVANSSIVLLPTSYLFSPFVENGNFYSLIIALVPRILIGIIPYFVYKLLHN | 120 |
| | | +GA+ G S N+++ L F +++++PR+ IG++ +VY + | |
| Sbjct: | 61 | IVGAIFGISSFLNATVPL---------------FKDPLVSILPRLFIGVVAWLVYIGIRR | 105 |
| Query: | 121 | R---FGLAISGAIGSLTNTVFVLSGIFIFFSSTYNGNIKLMLAGIISSNSLAEMVIAAII | 177 |
| | | + + +S IG+LTNT VL+ F + +A +N L E V+ I+ | |
| Sbjct: | 106 | KSEYVAVGLSAFIGTLTNTALVLA--MAVFRHYLTAGVAWTVA---ITNGLPEAVVGTIV | 160 |
| Query: | 178 | VYLTV | 182 |
| | | V | |
| Sbjct: | 161 | TLAVV | 165 |

[10919] A related DNA sequence was identified in S. pyogenes <SEQ ID 6159> which encodes the amino acid sequence <SEQ ID 6160>. Analysis of this protein sequence reveals the following:

```
Possible site: 31
>>> Seems to have an uncleavable N-term signal seq
INTEGRAL Likelihood = −8.97 Transmembrane 18-34 ( 10-41)
INTEGRAL Likelihood = −7.43 Transmembrane 170-186 ( 160-191)
INTEGRAL Likelihood = −5.63 Transmembrane 96-112 ( 94-117)
INTEGRAL Likelihood = −4.67 Transmembrane 140-156 ( 131-158)
INTEGRAL Likelihood = −3.66 Transmembrane 64-80 ( 63-84)
INTEGRAL Likelihood = −0.22 Transmembrane 39-55 ( 39-55)
----- Final Results -----
                            bacterial membrane --- Certainty = 0.4588(Affirmative) < succ>
                              bacterial outside --- Certainty = 0.0000(Not Clear) < succ>
                          bacterial cytoplasm --- Certainty = 0.0000(Not Clear) < succ>
```

[10920] The protein has homology with the following sequences in the databases:

>GP:0AA80247 GB:Z22520 membrane protein [Bacillus acidopullulyticus]
Identities = 47/193 (24%), Positives = 86/193 (44%), Gaps = 28/193 (14%)

| | | | |
|---|---|---|---|
| Query: | 8 | RKSADISRIAIFFAIMLVIHFVSSLVFNIWPIPI---KPTLVHIPVIIASVLYGPRIGAI | 64 |
| | | +KS + I I + V + P+P T++HIP II ++ GP +G I | |
| Sbjct: | 2 | KKSLTVRDIVIAGVLGAVAILLGVTRLGYIPVPTAAGNATIMHIPAIIGGIMQGPVVGLI | 61 |
| Query: | 65 | LGGLMGIISVITNTIILLPTNYLFSPFVDHGTFASLIIAIIPRILIGITPYYCYKLIPNQ | 124 |
| | | +G + GI S + T+ L F +++I+PR+ IG+ + Y I + | |
| Sbjct: | 62 | VGAIFGISSFLNATVPL---------------FKDPLVSILPRLFIGVVAWLVYIGIRRK | 106 |
| Query: | 125 | FGLIVSGI---IGSLTNTIFVLS-GIFIFFATVFDGNIKALLTAIISSNAIVEMIISAII | 180 |
| | | + G+ IG+LTNT VL+ +F + T + + +N + E ++ I+ | |
| Sbjct: | 107 | SEYVAVGLSAFIGTLTNTALVLAMAVFRHYLTA------GVAWTVAITNGLPEAVVGTIV | 160 |
| Query: | 181 | TFVLIPTLSRLKR | 193 |
| | | T ++ ++ R | |
| Sbjct: | 161 | TLAVVLAWKQIGR | 173 |

[10921] An alignment of the GAS and GBS proteins is shown below.

| Identities = 121/184 (65%), Positives = 157/184 (84%) | | | |
|---|---|---|---|
| Query: | 6 | KSSNIAIIAIFFAIMLVIHFLSSFIFSFWLVPIKPTLMHIPVIIASIAYGPRIGATLGAL | 65 |
| | | KS++I+ IAIFFAIMLVIHF+SS +F+ W +PIKPTL+HIPVIIAS+ YGPRIGA LG L | |
| Sbjct: | 9 | KSADISRIAIFFAIMLVIHFVSSLVFNIWPIPIKPTLVHIPVIIASVLYGPRIGAILGGL | 68 |
| Query: | 66 | MGGISVANSSIVLLPTSYLFSPFVENGNFYSLIIALVPRILIGIIPYFVYKLLHNRFGLA | 125 |
| | | MG ISV ++I+LLPT+YLFSPFV++G F SLIIA++PRILIGI PY+ YKL+ N+FGL | |
| Sbjct: | 69 | MGIISVITNTIILLPTNYLFSPFVDHGTFASLIIAIIPRILIGITPYYCYKLIPNQFGLI | 128 |
| Query: | 126 | ISGAIGSLTNTVFVLSGIFIFFSSTYNGNIKLMLAGIISSNSLAEMVIAAIIVYLTVPRI | 185 |
| | | +SG IGSLTNT+FVLSGIFIFF++ ++GNIK +L IISSN++ EM+I+AII ++ +P + | |
| Sbjct: | 129 | VSGIIGSLTNTIFVLSGIFIFFATVFDGNIKALLTAIISSNAIVEMIISAIITFVLIPTL | 188 |
| Query: | 186 | LNIK | 189 |
| | | +K | |
| Sbjct: | 189 | SRLK | 192 |

[10922] A related GBS gene <SEQ ID 8949> and protein <SEQ ID 8950> were also identified. Analysis of this protein sequence reveals the following:

```
Lipop: Possible site: −1 Crend: 5
McG: Discrim Score: 13.42
GvH: Signal Score (−7.5): −1.93
Possible site: 53
>>> Seems to have a cleavable N-term signal seq.
ALOM program count: 2 value: −6.21 threshold: 0.0
INTEGRAL Likelihood = −6.21 Transmembrane 94-110 ( 93-115)
INTEGRAL Likelihood = −0.16 Transmembrane 62-78 ( 62-79)
PERIPHERAL Likelihood = 1.70 123
modified ALOM score: 1.74
*** Reasoning Step: 3
----- Final Results -----
                            bacterial membrane --- Certainty = 0.3484(Affirmative) < succ>
                              bacterial outside --- Certainty = 0.0000(Not Clear) < succ>
                          bacterial cytoplasm --- Certainty = 0.0000(Not Clear) < succ>
```

[10923] The protein has homology with the following sequences in the databases:

[chemical structure]

[10924] Based on this analysis, it was predicted that these proteins and their epitopes could be useful antigens for vaccines or diagnostics.

### EXAMPLE 1995

[10925] A DNA sequence (GBSx2105) was identified in S. agalactiae <SEQ ID 6161> which encodes the amino acid sequence <SEQ ID 6162>. Analysis of this protein sequence reveals the following:

```
Possible site: 18
>>> Seems to have no Nterminal signal sequence (or aa 1-18)
----- Final Results -----
                            bacterial cytoplasm --- Certainty = 0.0165(Affirmative) < succ>
                              bacterial membrane --- Certainty = 0.0000(Not Clear) < succ>
                                bacterial outside --- Certainty = 0.0000 (Not Clear) < succ>
```

[10926] The protein has homology with the following sequences in the GENPEPT database.

| >GP:AAC44502 GB:E148885 DNA/pantothenate metabolism flavoprotein | | | |
|---|---|---|---|
| [i Streptococcus mutans] | | | |
| Identities = 101/145 (69%), Positives = 122/145 (83%) | | | |
| Query: | 1 | MIKRITLAVTGSISAYKAADLTSQLTKIGYDVHIIMTQAATEFITPLTLQVLSKNPIHLD | 60 |
| | | M K+I LAV+GSI+AYKAADL+ QLTK+GY V++ MT AA +FI PLTLQVLSKNP++ + | |
| Sbjct: | 1 | MTKKILLAVSGSIAAYKAADLSHQLTKLGYHVNVFMTNAAKQFIPPLTLQVLSKNPVYSN | 60 |
| Query: | 61 | VMDEHNPKIINHIELAKRTDLFIVAPASANTIAHLAYGFADNIVTSVALANPDETPKLIA | 120 |
| | | VM E +P++INNI LAK+ DLF++ PASANT+AHLA+GFADNIVTSVALA+P E PK A | |
| Sbjct: | 61 | VMKEDDPQVINHIALAKQADLFLLPPASANTLAHLAHGFADNIVTSVALALPLEVPKFFA | 120 |
| Query: | 121 | PAMNTKMYHNTITQRNIDILKKIGY | 145 |
| | | PANNTKMY N ITQ NI +LKK GY | |
| Sbjct: | 121 | PANNTKNYENPITQSNITLLKKWGY | 145 |

[10927] A related DNA sequence was identified in S. pyogenes <SEQ ID 6163> which encodes the amino acid sequence <SEQ ID 6164>. Analysis of this protein sequence reveals the following:

```
Possible site: 18
>>> Seems to have no N-terminal signal sequence
----- Final Results -----
                            bacterial cytoplasm --- Certainty = 0.0076(Affirmative) < succ>
                              bacterial membrane --- Certainty = 0.0000(Not Clear) < succ>
                                bacterial outside --- Certainty = 0.0000(Not Clear) < succ>
```

[10928] An alignment of the GAS and GBS proteins is shown below.

| Identities = 146/178 (82%), Positives = 155/178 (87%) | | | |
|---|---|---|---|
| Query: | 1 | MIKRITLAVTGSISAYKAADLTSQLTKIGYDVHIIMTQAATEFITPLTLQVLSKNPIHLD | 60 |
| | | M K ITLAV+GSISAYKAADLTSQLTKIGYDVHIIMTQAAT+FITPLTLQVLSKN IHLD | |
| Sbjct: | 1 | MTKHITLAVSGSISAYKAADLTSQLTKIGYDVHIIMTQAATQFITPLTLQVLSKNAIHLD | 60 |
| Query: | 61 | VMDEHNPKIINHIELAKRTDLFIVAPASANTIAHLAYGFADNIVTSVALAMPDETPKLIA | 120 |
| | | VMDEH+PK+INHIELAKRTDLFIVAPASANTIAHLAYGFADN+VTSVALA+P TPKLIA | |
| Sbjct: | 61 | VMDEHDPKVINHIELAKRTDLFIVAPASANTIAHLAYGFADNLVTSVALALPATTPKLIA | 120 |
| Query: | 121 | PAMNTKMYHNTITQRNIDILKKIGYQEIEPRISLLACGDTGQGALADISTILKCIQEV | 178 |
| | | PAMNTKMY N ITQ NI L IG+ EI P+ SLLACGD G GALADI IL I + | |
| Sbjct: | 121 | PAMNTKMYQNPITQENIKRLSTIGFTEIPPKSSLLACGDKGPGALADIDVILATIDTI | 178 |

[10929] SEQ ID 6162 (GBS236) was expressed in E. coli as a His-fusion product. SDS-PAGE analysis of total cell extract is shown in FIG. 52 (lane 5; MW 21.6 kDa).

[10930] Purified GBS236-GST is shown in FIG. 208 (lane 6) and in FIG. 225 (lanes 4-5).

[10931] Based on this analysis, it was predicted that these proteins and their epitopes could be useful antigens for vaccines or diagnostics.

### EXAMPLE 1996

[10932] A DNA sequence (GBSx2106) was identified in S. agalactiae <SEQ ID 6165> which encodes the amino acid sequence <SEQ ID 6166>. This protein is predicted to be pantothenate metabolism flavoprotein homolog (dfp). Analysis of this protein sequence reveals the following:

```
Possible site: 13
>>> Seems to have no N-terminal signal sequence
----- Final Results -----
                            bacterial cytoplasm --- Certainty = 0.2325(Affirmative) < succ>
                              bacterial membrane --- Certainty = 0.0000(Not Clear) < succ>
                                bacterial outside --- Certainty = 0.0000(Not Clear) < succ>
```

[10933] A related GBS nucleic acid sequence <SEQ ID 9835> which encodes amino acid sequence <SEQ ID 9836> was also identified.

[10934] The protein has homology with the following sequences in the GENPEPT database.

| >GP: AAG39941 GB: AF301375 MTW1216 [Methanothermobacter wolfeii | | | |
|---|---|---|---|
| prophage psiM100] | | | |
| Identities = 71/229 (31%), Positives = 117/229 (51%), Gaps = 27/229 (11%) | | | |
| Query: | 6 | MKILITSGGTTEKIDTVRSITNHATGTLGKIIAEKYLREGHQVTLVTTKNAVKPESATNL | 65 |
| | | +++L++ GGT E ID VR ITN ++G +G +A + +G VTLV V + + L | |
| Sbjct: | 172 | LRVLVSLGGTLEPIDPVRVITNRSSGRMGLAVAREAYIQGADVTLVA--GTVSVDIPSQL | 229 |
| Query: | 66 | STFEIEDVDSLIKTLKPLVKEHDILIHSMAVSDYTPVYMADFEKVKSSDHLDTFLRKDNH | 125 |
| | | T E + + + L+ EHD+ + + AVSD+ PVY | |
| Sbjct: | 230 | RTVRAETAHEMAEAVAELIGEHDVFVSAAAVSDFRPVYS--------------------- | 268 |
| Query: | 126 | EGKISSESEYQVLFLKKTPKVISLVKKWNPQITLVGFKLLVNVTKENLFKVARHSLIKNK | 185 |
| | | E KISS+SE L LK PK+I + ++ NP+ +VGFK V++E L AR + + | |
| Sbjct: | 269 | EEKISSDSEI-TLRLKPNPKIIRMARETNPEAFIVGFKAEHGVSEEELIAAARKQIEDSV | 327 |
| Query: | 186 | ATFILANDL-IDITSKHHIAYLLDHDNVYKATT--KEDIAQLIYEKVKK | 231 |
| | | A ++AND+ ++ + ++ + V + T KE++A LI ++ K | |
| Sbjct: | 328 | ADMVVANDVSVEGFGSENNRAIIVSEGVTELPTMKKEELAGLIIGEIMK | 376 |

[10935] A related DNA sequence was identified in S. pyogenes <SEQ ID 6167> which encodes the amino acid sequence <SEQ ID 6168>. Analysis of this protein sequence reveals the following:

```
Possible site: 54
>>> Seems to have no N-terminal signal sequence
----- Final Results -----
                            bacterial cytoplasm --- Certainty = 0.1737(Affirmative) < succ>
                              bacterial membrane --- Certainty = 0.0000(Not Clear) < succ>
                                bacterial outside --- Certainty = 0.0000(Not Clear) < succ>
```

[10936] An alignment of the GAS and GBS proteins is shown below.

| Identities = 142/230 (61%), Positives = 170/230 (73%) | | | |
|---|---|---|---|
| Query: | 4 | MAMKILITSGGTTEKIDTVRSITNHATGTLGKIIAEKYLREGHQVTLVTTKNAVKPESAT | 63 |
| | | M MK++ITSGGTTE ID VR ITNH+TG LGK+I E++L+ H VTLVTTK A KP | |
| Sbjct: | 1 | MTMKLIITSGGTTEPIDAVRGITNHSTGQLGKLITERFLQYHHDVTLVTTKTATKPLPNK | 60 |
| Query: | 64 | NLSTFEIEDVDSLIKTLKPLVKEHDILIHSMAVSDYTPVYMADFEKVKSSDHLDTFLRKD | 123 |
| | | L E+E V+ L+ LK V HDILIHSMAVSDYTPVYM D E+V +D+L+ FL + | |
| Sbjct: | 61 | RLRIIEVETVNDLMAALKDQVPHHDILIHSMAVSDYTPVYMTDLEQVSQADNLNCFLCEH | 120 |
| Query: | 124 | NHEGKISSESEYQVLFLKKTPKVISLVKKWNPQITLVGFKLLVNVTKENLFKVARHSLIK | 183 |
| | | N E KISS S+YQVLFLKKTPKVIS VK+WNP I LVGFKLLVNV +E L KVAR SL K | |
| Sbjct: | 121 | NSEPKISSASDYQVLFLKKTPKVISYVKQWNPNIKLVGFKLLVNVPQEELIKVARASLAK | 180 |
| Query: | 184 | NKATFILANDLIDITSKHHIAYLLDHDNVYKATTKEDIAQLIYEKVKKYD | 233 |
| | | N A +ILANDL+DI + H A L+ ++ V A TKE IA L+YE++ K+D | |
| Sbjct: | 181 | NHADYILANDLVDIQTGMHKALLISNNEVASADTKEAIADLLYERMTKHD | 230 |

[10937] Based on this analysis, it was predicted that these proteins and their epitopes could be useful antigens for vaccines or diagnostics.

### EXAMPLE 1997

[10938] A DNA sequence (GBSx2107) was identified in S. agalactiae <SEQ ID 6169> which encodes the amino acid sequence <SEQ ID 6170>. Analysis of this protein sequence reveals the following:

| Possible site: 49 | | | | |
|---|---|---|---|---|
| >>> Seems to have no N-terminal signal sequence | | | | |
| | INTEGRAL | Likelihood = −0.22 | Transmembrane | 117-133 (117-133) |

```
----- Final Results -----
                              bacterial membrane --- Certainty = 0.1086(Affirmative) < succ>
                                bacterial outside --- Certainty = 0.0000(Not Clear) < succ>
                            bacterial cytoplasm --- Certainty = 0.0000(Not Clear) < succ>
```

[10939] A related GBS nucleic acid sequence <SEQ ID 9833> which encodes amino acid sequence <SEQ ID 9834> was also identified.

[10940] The protein has homology with the following sequences in the GENPEPT database.

| >GP: BAB07541 GB: AP001520 unknown conserved protein in B. subtilis | | | |
|---|---|---|---|
| [Bacillus halodurans] | | | |
| Identities = 94/221 (42%), Positives = 133/221 (59%), Gaps = 2/221 (0%) | | | |
| Query: | 52 | AEKPFIWTEVFLREINRSNQEIILHIWPMTKTVILGMLDRELPHLELAKKEIISRGYEPV | 111 |
| | | A + F + + I +S L W TV+LG+ D LP ++ + + ++ + | |
| Sbjct: | 27 | ALQSFAYDDTLCTSIGKSQSPPTLRAWVHHNTVVLGIQDSRLPQIKAGIEALKGFQHDVI | 86 |
| Query: | 112 | VRNFGGLAVVADEGILNFSLVIPDVFERKLSISDGYLIMVDFIRSIFSDFYQPIEHFEVE | 171 |
| | | VRN GGLAVV D GILN SLV+ + E+ SI DGY +M + I S+F D + IE E+ | |
| Sbjct: | 87 | VRNSGGLAVVLDSGILNLSLVLKE--EKGFSIDDGYELMYELICSMFQDHREQIEAREIV | 144 |
| Query: | 172 | TSYCPGKFDLSINGKKFAGLAQRRIKNGIAVSIYLSVCGDQKGRSQMISDFYKIGLGDTG | 231 |
| | | SYCPG +DLSI+GKKFAG++QRRI+ G+AV IYL V G R++MI FY + | |
| Sbjct: | 145 | GSYCPGSYDLSIDGKKFAGISQRRIRGGVAVQIYLCVSGSGAERAKMIRTFYDKAVAGQP | 204 |
| Query: | 232 | SPIAYPNVDPEIMANLSDLLDCPMTVEDVIDRMLISLKQVG | 272 |
| | | + YP + PE MA+LS+LL P V DV+ + L++L+Q G | |
| Sbjct: | 205 | TKFVYPRIKPETMASLSELLGQPHNVSDVLLKALMTLQQHG | 245 |

[10941] A related DNA sequence was identified in S. pyogenes <SEQ ID 6171> which encodes the amino acid sequence <SEQ ID 6172>. Analysis of this protein sequence reveals the following:

| Possible site: 61 | | | | |
|---|---|---|---|---|
| >>> Seems to have an uncleavable N-term signal seq | | | | |
| | INTEGRAL | Likelihood = −0.22 | Transmembrane | 95-111 (95-111) |

```
----- Final Results -----
                              bacterial membrane --- Certainty = 0.1086(Affirmative) < succ>
                                bacterial outside --- Certainty = 0.0000(Not Clear) < succ>
                            bacterial cytoplasm --- Certainty = 0.0000(Not Clear) < succ>
```

[10942] The protein has homology with the following sequences in the databases:

| >GP: BAB07541 GB: AP001520 unknown conserved protein in B. subtilis | | | |
|---|---|---|---|
| [Bacillus halodurans] | | | |
| Identities = 97/228 (42%), Positives = 138/228 (59%), Gaps = 2/228 (0%) | | | |
| Query: | 30 | ALSPFVWTEVFLKTINQEPNQLILHIWPMTRTVILGMLDRQLPYFELAKTEIGNNGYVPV | 89 |
| | | AL F + + +I + + L W TV+LG+ D +LP + + + + | |
| Sbjct: | 27 | ALQSFAYDDTLCTSIGKSQSPPTLRAWVHHNTVVLGIQDSRLPQIKAGIEALKGFQHDVI | 86 |
| Query: | 90 | TRNIGGLAVVADDGILNFSLVIPDHFSESISISNAYLIMVDVIRESFSDYYQRIEYHEIK | 149 |
| | | RN GGLAVV D GILN SLV+ + + SI + Y +M ++I F D+ ++IE EI | |
| Sbjct: | 87 | VRNSGGLAVVLDSGILNLSLVLKEE--KGFSIDDGYELMYELICSMFQDHREQIEAREIV | 144 |
| Query: | 150 | NSYCPGNFDLSIAGRKFAGIAQRRIKKGIVVSIYLSVCGDQAARGQLIKDFYEAGTQGEV | 209 |
| | | SYCPG++DLSI G+KFAGI+QRRI+ G+ V IYL V G A R ++I+ FY+ G+ | |
| Sbjct: | 145 | GSYCPGSYDLSIDGKKFAGISQRRIRGGVAVQIYLCVSGSGAERAKMIRTFYDKAVAGQP | 204 |
| Query: | 210 | TKVNYPQIDPECMATLSELLETPFTVAEVLERLRLTLRQLGFSLTEKS | 257 |
| | | TK YP+I PE MA+LSELL P V++VL + +TL+Q G SL +S | |
| Sbjct: | 205 | TKFVYPRIKPETMASLSELLGQPHNVSDVLLKALMTLQQHGASLLTES | 252 |

[10943] An alignment of the GAS and GBS proteins is shown below.

| Identities = 155/275 (56%), Positives = 199/275 (72%), Gaps = 8/275 (2%) | | | |
|---|---|---|---|
| Query: | 32 | QDLAQLPVSIFKDYVTDAQDAEKPFIWTEVFLREINRSNQEIILHIWPMTKTVILGMLDR | 91 |
| | | +DLA LP+ ++ D A PF+WTEVFL+ IN+ ++ILHIWPNT+TVILGMLDR | |
| Sbjct: | 10 | RDLASLPIFVYGDGNKKVPGALSPFVWTEVFLKTINQEPNQLILHIWPMTRTVILGMLDR | 69 |
| Query: | 92 | ELPHLELAKKEIISRGYEPVVRNFGGLAVVADEGILNFSLVIPDVFERKLSISDGYLIMV | 151 |
| | | +LP+ ELAK EI + GY PV RN GGLAVVAD+GILNFSLVIPD F +SIS+ YLIMV | |
| Sbjct: | 70 | QLPYFELAKTEIGNNGYVPVTRNIGGLAVVADDGILNFSLVIPDHFSESISISNAYLIMV | 129 |
| Query: | 152 | DFIRSIFSDFYQPIEHFEVETSYCPGKFDLSINGKKFAGLAQRRIKNGIAVSIYLSVCGD | 211 |
| | | D IR FSD+YQ IE+ E++ SYCPG FDLSI G+KFAG+AQRRIK GI VSIYLSVCGD | |
| Sbjct: | 130 | DVIRESFSDYYQRIEYHEIKNSYCPGNFDLSIAGRKFAGIAQRRIKKGIVVSIYLSVCGD | 189 |
| Query: | 212 | QKGRSQMISDFYKIGLGDTGSPIAYPNVDPEIMANLSDLLDGPMTVEDVIDRMLISLKQV | 271 |
| | | Q R Q+I DFY+ G + + YP +DPE MA LS+LL+ P TV +V++R+ ++L+Q+ | |
| Sbjct: | 190 | QAARGQLIKDFYSAGTQGEVTKVNYPQIDPECMATLSELLETPFTVAEVLERLRLTLRQL | 249 |
| Query: | 272 | GFN------DRLLNIRPDLVAEFNRFQAKSMANKG | 300 |
| | | GF+ D+ L+ D V + R Q + + +G | |
| Sbjct: | 250 | GFSLTEKSPDQALLTNFDAV--YERMQLEVVRKEG | 282 |

[10944] A related GBS gene <SEQ ID 8951> and protein <SEQ ID 8952> were also identified. Analysis of this protein sequence reveals the following:

```
Lipop: Possible site: = −1 Crend: 10
McG: Discrim Score: 16.85
GvH: Signal Score (−7.5): −5.07
Possible site: 49
>>> Seems to have no N-terminal signal sequence
ALOM program count: 1 value: −0.22 threshold: 0.0
INTEGRAL Likelihood = −0.22 Transmembrane 117-133 ( 117-133)
PERIPHERAL Likelihood = 0.47 73
modified ALOM score: 0.54
*** Reasoning Step: 3
----- Final Results -----
                            bacterial membrane --- Certainty = 0.1086(Affirmative) < succ>
                              bacterial outside --- Certainty = 0.0000(Not Clear) < succ>
                          bacterial cytoplasm --- Certainty = 0.0000(Not Clear) < succ>
```

[10945] The protein has homology with the following sequences in the databases:

[chemical structure]

[10946] SEQ ID 8952 (GBS390) was expressed in E. coli as a His-fusion product. SDS-PAGE analysis of total cell extract is shown in FIG. 73 (lane 7; MW 37 kDa). It was also expressed in E. coli as a GST-fusion product. SDS-PAGE analysis of total cell extract is shown in FIG. 82 (lane 3; MW 62 kDa).

[10947] GBS390-GST was purified as shown in FIG. 216, lane 12.

[10948] Based on this analysis, it was predicted that these proteins and their epitopes could be useful antigens for vaccines or diagnostics.

### EXAMPLE 1998

[10949] A DNA sequence (GBSx2108) was identified in S. agalactiae <SEQ ID 6173> which encodes the amino acid sequence <SEQ ID 6174>. This protein is predicted to be probable trimethylamine dehydrogenase (nemA). Analysis of this protein sequence reveals the following:

```
Possible site: 36
>>> Seems to have no N-terminal signal sequence
----- Final Results -----
                            bacterial cytoplasm ---- Certainty = 0.2218(Affirmative) < succ>
                              bacterial membrane ---- Certainty = 0.0000(Not Clear) < succ>
                                bacterial outside --- Certainty = 0.0000(Not Clear) < succ>
```

[10950] The protein has homology with the following sequences in the GENPEPT database.

| >GP:CAA83700 GB:Z33015 similar to trimethylamine DH [Mycoplasma capricolum] | | | |
|---|---|---|---|
| Identities = 162/311 (52%), Positives = 219/311 (70%), Gaps = 1/311 (0%) | | | |
| Query: | 3 | NVQGNLFRPLTLPNGLSLENRFVLSPMVTNSSTSEGFVTDDDIAYAVRRAKSAPLQITGA | 62 |
| | | N LF P L NG LENRFVLSPM + +T +G +TD + Y RR+ SAPLQITG | |
| Sbjct: | 2 | NKYEKLFEPFYL-NGWKLENRFVLSPMTLSLATLDGKITDKEADYVKRRSHSAPLQITGG | 60 |
| Query: | 63 | AYITEYGQLFEYGFSVSKDEDIPGLTKLAKANKSKGAKAVLQLTHAGRFSSHTLARHGYV | 122 |
| | | Y E+GQLFEYG S D+DIP LT+L + MK+ +LQL HAG+WS +L ++GY+ | |
| Sbjct: | 61 | VYFDEFGQLFEYGISAKSDDDIPSLTRLYQEMKTDSNCVILQLAHAGKFSKTSLKKYGYL | 120 |
| Query: | 123 | YGPSPMQLQSPYPHQVKELTHKDILRIIDEYVQATRRAIQAGFDGVEISSAQRLLIQTFF | 182 |
| | | YGPS + +P H+V EL + I +II +Y AT R I+AGF+G+EIS AQRLLIQTFF | |
| Sbjct: | 121 | YGPSYEKNNTPIEHEVLELPKEKIKQIIQDYKDATLRVIKAGFNGIEISMAQRLLIQTFF | 180 |
| Query: | 183 | STFSNQRKOEYGPQTLTNRCRLGLEVFKAVQKVIREEAESDFILGFRATPEETRGSQIGY | 242 |
| | | S N+R DEY NR R LEV KA+++VI + A +FI GFRATPEET G +GY | |
| Sbjct: | 181 | SQIIMKRTDEYSATNFENRSRFCLEVVKAIREVIDKYAPKNFIFGFRATPEETYGDILGY | 240 |
| Query: | 243 | SIEEFMEFLEKILAIAQVDYLAIASWGHDVFRNTIRSEGVYKGQLVNQVIFEHFGDRVPI | 302 |
| | | +IE+F++ ++KI+ I ++ YLAIASWGMD++ N +RS YKGQLVN+VI++ + +++PI | |
| Sbjct: | 241 | TIEDFIQLVDKIIEIGKISYLAIASWGHDIYLMKVRSMTKYKGQLVNKVIYDIYKNKLPI | 300 |
| Query: | 303 | MATGGINSASK | 313 |
| | | +++GGIN+ +K | |
| Sbjct: | 301 | ISSGGINTPTK | 311 |

[10951] A related DNA sequence was identified in S. pyogenes <SEQ ID 6175> which encodes the amino acid sequence <SEQ ID 6176>. Analysis of this protein sequence reveals the following:

```
Possible site: 35
>>> Seems to have no N-terminal signal sequence
----- Final Results -----
                            bacterial cytoplasm --- Certainty = 0.3055(Affirmative) < succ>
                              bacterial membrane --- Certainty = 0.0000(Not Clear) < succ>
                                bacterial outside --- Certainty = 0.0000(Not Clear) < succ>
```

[10952] An alignment of the GAS and GBS proteins is shown below.

| Identities = 265/390 (67%), Positives = 321/390 (81%) | | | |
|---|---|---|---|
| Query: | 8 | LFRPLTLPNGLSLENRFVLSPMVTNSSTSEGFVTDDDIAYAVRRAKSAPLQITGAAYITE | 67 |
| | | LE PLTLPNG L+NRFVLSPMVTNSST +G+VT DD++YA+RRA SAPLQITGAAY+ | |
| Sbjct: | 8 | LFEPLTLPNGSQLDNRFVLSPMVTNSSTKDGYVTQDDVSYALRRAASAPLQITGAAYVDP | 67 |
| Query: | 68 | YGQLFEYGFSVSKDEDIPGLTKLAKAMKSKGAKAVLQLTHAGRESSHTLARHGYVYGPSP | 127 |
| | | YGQLFEYGFSV+KD DI GL +LA+AMK+KGAKAVLQLTHAGRF+SH L ++G+VYGPS | |
| Sbjct: | 68 | YGQLFEYGFSVTKDADISGLKELAQAMKAKGAKAVLQLTHAGRFASHALTKYGFVYGPSY | 127 |
| Query: | 128 | MQLQSPYPHQVKELTHKDILRIIDEYVQATRRAIQAGFDGVEISSAQRLLIQTFFSTFSN | 187 |
| | | MQL+SP PH+VK LT + I +I Y QATRRAIQAGFDGVE+SSAQRLLIQTFFSTFSN | |
| Sbjct: | 128 | MQLRSPQPHEVKPLTGQQIEELIAAYAQATRRAIQAGFDGVEVSSAQRLLIQTFFSTFSN | 187 |
| Query: | 188 | QRKDEYGPQTLTNRCRLGLEVFKAVQKVIREEAESDFILGFRATPEETRGSQIGYSIEEF | 247 |
| | | +R D YG QTL HR +L L V +AVQ+VI++EA FI GFRATPEETRG+ IGYSI+EF | |
| Sbjct: | 188 | KRTDSYGCQTLFNRSKLTLAVLQAVQQVIKQEAPDGFIFGFRATPEETRGNDIGYSIDEF | 247 |
| Query: | 248 | MEFLEKILAIAQVDYLAIASWGHDVFRNTIRSEGVYKGQLVNQVIFEHFGDRVPIMATGG | 307 |
| | | ++ ++ +L +A++DYLAIASWG VFRNT+RS G Y G+ VNQV+ ++ +++P+MATGG | |
| Sbjct: | 248 | LQLMDWVLNVAKLDYLAIASWGRHVFRNTVRSPGPYYGRRVNQVVRDYLRHKLPVMATGG | 307 |
| Query: | 308 | INSASKVFEALQHAHMIGASTPLVVDPEFLQKIKAKCSDQINLRIKVSDLEGLAIPKASF | 367 |
| | | +N+ K EAL HA IG STP VVDPEF KIK C + I+LRI+ +DL+ LAIP+ASF | |
| Sbjct: | 308 | MNTPDKAIEALAHADFIGVSTPFVVDPEFAHKIKEGCEESIHLRIRPADLKSLAIPQASF | 367 |
| Query: | 368 | KDIVPLMDYGESLPKEAREVFRELRSNYRE | 397 |
| | | KDIVPLMDYGESLPKE+R +FR L NY+E | |
| Sbjct: | 368 | KDIVPLMDYGESLPKESRTLFRSLTHNYKE | 397 |

[10953] Based on this analysis, it was predicted that these proteins and their epitopes could be useful antigens for vaccines or diagnostics.

### EXAMPLE 1999

[10954] A DNA sequence (GBSx2109) was identified in S. agalactiae <SEQ ID 6177> which encodes the amino acid sequence <SEQ ID 6178>. Analysis of this protein sequence reveals the following:

```
Possible site: 53
>>> Seems to have no N-terminal signal sequence
----- Final Results -----
                            bacterial cytoplasm --- Certainty = 0.3748(Affirmative) < succ>
                              bacterial membrane --- Certainty = 0.0000(Not Clear) < succ>
                                bacterial outside --- Certainty = 0.0000(Not Clear) < succ>
```

[10955] The protein has homology with the following sequences in the GENPEPT database.

| >GP:BAB04594 GB:AP001510 unknown conserved protein [Bacillus halodurans] | | | |
|---|---|---|---|
| Identities = 121/333 (36%), Positives = 192/333 (57%), Gaps = 12/333 (3%) | | | |
| Query: | 1 | MKLSVLDYGLIDYGKTASDAIQETILLSQEAERLGYHQFWVAEHHGVKAFSISNPELMIM | 60 |
| | | MKLSVLD I YG A +A+++T L++ E LGYH+FWV+EHH +S+PE++I | |
| Sbjct: | 1 | MKLSVLDQSPIAYGSNAKEALRQTTELAKVTEALGYHRFWVSEHHDASTLAGSSPEVLIA | 60 |
| Query: | 61 | HLANQTKSIKIGSGGINPLHYSSFKLAETLKTLSTCHPNRVSIGLGNSLGTVKVSNALRS | 120 |
| | | HLA TK I++GSGG+M HYS++K+AE K LE HP R+ +GLG + G + ++ | |
| Sbjct: | 61 | HLAAHTKKIRLGSGGVMLPHYSAYKVAENFKLLEALHPGRIDVGLGRAPGGMPIAKMALQ | 120 |
| Query: | 121 | LHK---AHDYEEVLEELKSWLIDESSSKEPL----VQPTLSSFPDLYVLGSGQKSAYLAA | 173 |
| | | K HY ++++ +L D+ + P + + PD+++LGS SA +AA | |
| Sbjct: | 121 | EGKEQNIHKYPLQVKDVIGYLQDDLPTDHRFHGLKATPLIDTVPDVWLLGSSGGSANVAA | 180 |
| Query: | 174 | KLGLGFTFGVFPFMDKDPLTEAKKLSSLYYHQFEEYYPNKSPNLMVAAFVVIADTSEEAE | 233 |
| | | + G GF F F++ + +A + Y F+ P VA FV+ ADT E+A+ | |
| Sbjct: | 181 | ENGTGFAFA--HFINGEGGVQAVE---SYRETFQPSALFDRPQTSVAIFVICADTDEQAD | 235 |
| Query: | 234 | NIAKTLDIWMLGNKDFNFATFPTIEEANHYQLTPEQKAKIKSNRDRMIVGDPKQVKESL | 293 |
| | | IA +LD+ ++ ++ P+IE A Y +P ++A+I+ NR RMIVG PK V++ L | |
| Sbjct: | 236 | QIASSLDLSLIMLENGQLSKGTPSIESALSYPYSPFERARIRENRKRMIVGSPKAVRQQL | 295 |
| Query: | 294 | DALVNASQAEELLLIPLVPGLDQRIKSLKLLSQ | 326 |
| | | L A + EE++++ + + RI+S +LL + | |
| Sbjct: | 296 | VELARAYETEEVIVVTITHREEDRIRSYELLGE | 328 |

[10956] A related DNA sequence was identified in S. pyogenes <SEQ ID 6179> which encodes the amino acid sequence <SEQ ID 6180>. Analysis of this protein sequence reveals the following:

```
Possible site: 51
>>> Seems to have no N-terminal signal sequence
INTEGRAL Likelihood = −2.60 Transmembrane 212-228 ( 210-229)
----- Final Results -----
                            bacterial membrane --- Certainty = 0.2041(Affirmative) < succ>
                              bacterial outside --- Certainty = 0.0000(Not Clear) < succ>
                          bacterial Cytoplasm --- Certainty = 0.0000(Not Clear) < succ>
```

[10957] An alignment of the GAS and GBS proteins is shown below.

| Identities = 173/329 (52%), Positives = 241/329 (72%), Gaps = 1/329 (0%) | | | |
|---|---|---|---|
| Query: | 1 | MKLSVLDYGLIDYGKTASDAIQETILLSQEAERLGYHQFWVAEHHGVKAFSISNPELMIM | 60 |
| | | MK+S+LDYG+ID KT +A+ ET L+Q A++LG+H+FWVAEHH + AF+IS+PEL++M | |
| Sbjct: | 1 | MKVSILDYGVIDKEKTPQEALLETRCLAQVADKLGFHRFWVAEHHNIYAFAISSPELLMM | 60 |
| Query: | 61 | HLANQTKSIKIGSGGIMPLHYSSFKLAETLKTLETCHPNRVSIGLGNSLGTVKVSNALRS | 120 |
| | | HLA+ TK I+IGSGGIMPLHYSSFK+AE + TLE HPNR+ +G+GNSLGT V AL S | |
| Sbjct: | 61 | HLADHTKQIRIGSGGIMPLHYSSFKIAEWIMTLEALHPNRIDLGIGNSLGTTLVQRALSS | 120 |
| Query: | 121 | LHKAHDYEEVLEELKSWLIDESSSKEPL-VQPTLSSFPDLYVLGSGQKSAYLAAKLGLGF | 179 |
| | | +H Y +V+ EL +L + S P+ V P +++P ++ L + ++A LA +LGLG+ | |
| Sbjct: | 121 | IHCKDSYSQVVTELYQYLNPDHLSPLPIFVNPRGNTYPQIWTLSNSLETAELAGQLGLGY | 180 |
| Query: | 180 | TFGVFPFMDKDPLTEAKKLSSLYYHQFEEYYPNKSPNLMVAAFVVIADTSEEAENIAKTL | 239 |
| | | TFG+FP++ KDP+TEAK++S+ Y F K P L++A F+V++DT E+AE +AK L | |
| Sbjct: | 181 | TFGIFPYIPKDPITEAKRVSAHYRKAFRPSKLLKIPKLILAVFIVLSDTDEKAEALAKPL | 240 |
| Query: | 240 | DIWMLGNKDFNEFATFPTIEEANHYQLTPEQKAKIKSNRDRMIVGDPKQVKESLDALVNA | 299 |
| | | DIWMLG +DFNEF T+P +EEA +Y LT +Q+ I +NR RM++G P VK+ LD L+ A | |
| Sbjct: | 241 | DIWMLGQQDFNEFKTYPDVEEARNYHLTEKQREAIAANRSRMVIGSPHTVKKQLDRLIEA | 300 |
| Query: | 300 | SQAEELLLIPLVPGLDQRIKSLKLLSQLY | 328 |
| | | QA+ELL IPLVP R ++L+LL+ LY | |
| Sbjct: | 301 | CQADELLAIPLVPEFANRQRTLELLADLY | 329 |

[10958] Based on this analysis, it was predicted that these proteins and their epitopes could be useful antigens for vaccines or diagnostics.

### EXAMPLE 2000

[10959] A DNA sequence (GBSx2110) was identified in S. agalactiae <SEQ ID 6181> which encodes the amino acid sequence <SEQ ID 6182>. Analysis of this protein sequence reveals the following:

```
Possible site: 60
>>> Seems to have no N-terminal signal sequence
----- Final Results -----
                            bacterial cytoplasm --- Certainty = 0.2384(Affirmative) < succ>
                              bacterial membrane --- Certainty = 0.0000(Not Clear) < succ>
                                bacterial outside --- Certainty = 0.0000(Not Clear) < succ>
```

[10960] The protein has homology with the following sequences in the GENPEPT database.

| >GP: AAF81345 GB: AC007767 Identical to a glycine cleavage system | | | |
|---|---|---|---|
| H-protein precursor from Arabidopsis thaliana gb\|P25855. | | | |
| It contains a glycine cleavage H-protein domain | | | |
| PF\|01597. ESTs gb\|R90208, gb\|AI | | | |
| Identities = 30/91 (32%), Positives = 53/91 (57%), Gaps = 1/91 (1%) | | | |
| Query: | 18 | TISLTPELQDDLGTVGYVEFTD-DANLEVDDVILNIEASKTVMAILSPLTGKVVKVNTAA | 76 |
| | | TI +T QD LG V +VE + ++++ + +E+ K ILSP++G+V++VNT | |
| Sbjct: | 59 | TIGITDHAQDHLGEVVFVELPEANSSVSKEKSFGAVESVKATSEILSPISGEVIEVNTKL | 118 |
| Query: | 77 | SQEPTLLNSEKADENWLVVLTEVDYAAFEAL | 107 |
| | | ++ P L+NS ++ W++ + A EAL | |
| Sbjct: | 119 | TESPGLINSSPYEDGWMIKVKPSSPAELEAL | 149 |

[10961] A related DNA sequence was identified in S. pyogenes <SEQ ID 6183> which encodes the amino acid sequence <SEQ ID 6184>. Analysis of this protein sequence reveals the following:

```
Possible Site: 60
>>> Seems to have no N-terminal signal sequence
----- Final Results -----
                            bacterial cytoplasm --- Certainty = 0.3544(Affirmative) < succ>
                              bacterial membrane --- Certainty = 0.0000(Not Clear) < succ>
                                bacterial outside --- Certainty = 0.0000(Not Clear) < succ>
```

[10962] An alignment of the GAS and GBS proteins is shown below.

| Identities = 80/110 (72%), Positives = 98/110 (88%) | | | |
|---|---|---|---|
| Query: | 1 | MKKIANYLLIEKNEELYTISLTPELQDDLGTVGYVEFTDDANLEVDDVILNIEASKTVMA | 60 |
| | | MKKIANYLLIEK ++ YTIS+TPELQDD+GT+GY EFTD+ +L VDD+ILN+EASKTVM+ | |
| Sbjct: | 1 | MKKIANYLLIEKTDDRYTISMTPELQDDIGTIGYAEFTDNDHLAVDDIILNLEASKTVMS | 60 |
| Query: | 61 | ILSPLTGKVVKVNTAASQEPTLLNSEKADENWLVVLTEVDYAAFEALENA | 110 |
| | | +LSPL G VV+ N AA+ PTLLNSEKA+ENW+VVLT+VD AAF+ALE+A | |
| Sbjct: | 61 | VLSPLAGAVVERNEAATLTPTLLNSEKAEENWIVVLTDVDQAAFDALEDA | 110 |

[10963] Based on this analysis, it was predicted that these proteins and their epitopes could be useful antigens for vaccines or diagnostics.

### EXAMPLE 2001

[10964] A DNA sequence (GBSx2111) was identified in S. agalactiae <SEQ ID 6185> which encodes the amino acid sequence <SEQ ID 6186>. This protein is predicted to be LRP16 (b1045). Analysis of this protein sequence reveals the following:

```
Possible site: 17
>>> Seems to have no N-terminal signal sequence
----- Final Results -----
                            bacterial cytoplasm --- Certainty = 0.0608(Affirmative) < succ>
                              bacterial membrane --- Certainty = 0.0000(Not Clear) < succ>
                                bacterial outside --- Certainty = 0.0000(Not Clear) < succ>
```

[10965] The protein has homology with the following sequences in the GENPEPT database.

| >GP: AAF15294 GB: AF202922 LRP16 [Homo sapiens] | | | |
|---|---|---|---|
| Identities = 73/171 (42%), Positives = 98/171 (56%), Gaps = 13/171 (7%) | | | |
| Query: | 88 | DICLLQVDAIVNAANSKLLGCFIPNHHCIDNQIHTFAGSRLRLACHQLMTQQGRMEAVGQ | 147 |
| | | DI L+VDAIVNAANS LLG +D IH AG L C L + + G+ | |
| Sbjct: | 78 | DITKLEVDAIVNAANSSLLG-----GGGVDGCIHRAAGPLLTDECRTLQSCK-----TGK | 127 |
| Query: | 148 | AKLTESYHLPCKYVIHTVGPYVKVDQKPSRIREDLLKSSYKSCLQLAVRANLKTIVFPCI | 207 |
| | | AK+T Y LP KYVIHTVGP + S+ E L+S Y S L L + L+++ FPCI | |
| Sbjct: | 128 | AKITGGYRLPAKYVIHTVGPIAYGEPSASQAAE--LRSCYLSSLDLLLEHRLRSVAFPCI | 185 |
| Query: | 208 | STGEFGFPNQRAAELAVQAILEWQRENQHKL-YIIFNTFTPKDQDIYQKLL | 257 |
| | | STG FG+P + AAE+ + + EW +++ K+ +I F KD+DIY+ L | |
| Sbjct: | 186 | STGVFGYPCEAAAEIVLATLREWLEQHKDKVDRLIICVFLEKDEDIYRSRL | 236 |

[10966] A related DNA sequence was identified in S. pyogenes <SEQ ID 6187> which encodes the amino acid sequence <SEQ ID 6188>. Analysis of this protein sequence reveals the following:

```
Possible site: 25
>>> Seems to have no N-terminal signal sequence
----- Final Results -----
                            bacterial cytoplasm --- Certainty = 0.1992(Affirmative) < succ>
                              bacterial membrane --- Certainty = 0.0000(Not Clear) < succ>
                                bacterial outside --- Certainty = 0.0000(Not Clear) < succ>
```

[10967] An alignment of the GAS and GBS proteins is shown below.

Identities = 139/266 (52%), Positives = 178/266 (66%), Gaps = 6/266 (2%)

| | | | |
|---|---|---|---|
| Query: | 1 | MPNQKQLLLAMIEYLQSEKLTDVDDL----RTTDLQTVWRGLVNQQDPQNISQEYLSLED | 56 |
| | | MP+ LL MI LQ+E+LT T Q +WR L+NQ+ +S++YL+LED | |
| Sbjct: | 1 | MPSSFDLLGEMIGLLQTEQLTSSWACPLPNALTKRQDLWRALINQRPALPLSKDYLNLED | 60 |
| Query: | 57 | RYLSHWWNTQKVKTIDVCHQTVYSNVFTYHGDICLLQVDAIVNAANSKLLGCFIPNHHCI | 116 |
| | | YL W + ++ C +T Y+++F YHGDI L VDAIVNAANS+LLGCF PNH CI | |
| Sbjct: | 61 | AYLDDWRASFVPVSVKDCQKTNYTSLFLYHGDIRYLAVDAIVNAANSELLGCFSPNHGCI | 120 |
| Query: | 117 | DNQIHTFAGSRLRLACHQLMTQQGRMEAVGQAKLTESYHLPCKYVIHTVGPYVKVDQKPS | 176 |
| | | DN IHTFAGSRLRLAC +MT+QGR EA+GQAKLT +YHLP Y+IHTVGP + S | |
| Sbjct: | 121 | DNAIHTFAGSRLRLACQAIMTEQGRKEAIGQAKLTSAYHLPASYIIHTVGPRITKGHHVS | 180 |
| Query: | 177 | RIREDLLKSSYKSCLQLAVRANLKTIVFPCISTGEFGFPNQRAAELAVQAILEWQRENQH | 236 |
| | | IR DLL Y+S L LAV+A L ++ F ISTGEFGFP + AA++A++ +L+WQ E+ | |
| Sbjct: | 181 | PIRADLLARCYRSSLDLAVKAGLTSLAFCSISTGEFGFPKKEAAQIAIKTVLKWQAEHPE | 240 |
| Query: | 237 | K--LYIIFNTFTPKDQDIYQKLLLKE | 260 |
| | | L IFNTFT +D+ +Y L KE | |
| Sbjct: | 241 | SKTLTTIFNTFTSEDKALYDTYLQKE | 266 |

[10968] Based on this analysis, it was predicted that these proteins and their epitopes could be useful antigens for vaccines or diagnostics.

### EXAMPLE 2002

[10969] A DNA sequence (GBSx2112) was identified in S. agalactiae <SEQ ID 6189> which encodes the amino acid sequence <SEQ ID 6190>. Analysis of this protein sequence reveals the following:

```
Possible site: 41
>>> Seems to have no N-terminal signal sequence
----- Final Results -----
                            bacterial cytoplasm --- Certainty = 0.2171(Affirmative) < succ>
                              bacterial membrane --- Certainty = 0.0000(Not Clear) < succ>
                                bacterial outside --- Certainty = 0.0000(Not Clear) < succ>
```

[10970] The protein has no significant homology with any sequences in the GENPEPT database.

[10971] A related DNA sequence was identified in S. pyogenes <SEQ ID 6191> which encodes the amino acid sequence <SEQ ID 6192>. Analysis of this protein sequence reveals the following:

```
Possible site: 41
>>> Seems to have no N-terminal signal sequence
----- Final Results -----
                            bacterial cytoplasm --- Certainty = 0.2477(Affirmative) < succ>
                              bacterial membrane --- Certainty = 0.0000(Not Clear) < succ>
                                bacterial outside --- Certainty = 0.0000(Not Clear) < succ>
```

[10972] An alignment of the GAS and GBS proteins is shown below.

| Identities = 218/284 (76%), Positives = 250/284 (87%) | | | |
|---|---|---|---|
| Query: | 4 | WKTLEKTNHSQSEILSQLIEESDAIVVGIGAGMSAADGFTYIGPRFEEAFPDFIAKYQLL | 63 |
| | | W T + N +Q+E L+QLI+E+DA+VVGIGAGMSAADGFTYIG RFE AFPDFIAKYQ L | |
| Sbjct: | 4 | WTTYPQKNLTQAEQLAQLIKEADALVVGIGAGMSAADGFTYIGSRFETAFPDFIAKYQFL | 63 |
| Query: | 64 | DMLQASLYDFEDWEEYWAFQSRFVALNYLDQPVGQAYLDLKDILAKKEYHIITTNADNAF | 123 |
| | | DMLQASL+DFEDW+EYWAFQSRFVALNYLDQPVGQ+YLDLK+IL K+YHIITTNADNAF | |
| Sbjct: | 64 | DMLQASLFDFEDWQEYWAFQSRFVALNYLDQPVGQSYLDLKEILGTKDYHIITTNADNAF | 123 |
| Query: | 124 | AVADYNLEKVFHIQGEYGLWQCSQHCHQQTYRNDQAIRQMIAQQKDMKIPSNLIPKCPKC | 183 |
| | | VA Y+ +FHIQGEYGLWQCSQHCHQQTY++D IRQMIA+QK+MK+P LIP CP+C | |
| Sbjct: | 124 | WVAGYDPHNIFHIQGEYGLWQCSQHCHQQTYKDDTVIRQMIAEQKNMKVPGQLIPHCPEC | 183 |
| Query: | 184 | DQPFEINKRNEEKGMVEDADFHAQRQRYENFLSQHQNDKVLYLEIGVGHTTPQFIKHPFW | 243 |
| | | + PFEINKRNEEKGMVEDADFHAQ+ RYE FLS+H+ KVLYLEIGVGHTTPQFIKHPFW | |
| Sbjct: | 184 | EAPFEINKRNEEKGMVEDADFHAQKARYEAFLSEHKEGKVLYLEIGVGHTTPQFIKHPFW | 243 |
| Query: | 244 | RFVSLNENSLFVTLNHKHYRIPQKIRSRSVQLTQHIAELIAEAK | 287 |
| | | + VS N N+LFVTLNHKHYRIP IR +S++LT+HIA+LI+ K | |
| Sbjct: | 244 | KRVSENPNALFVTLNHKHYRIPLSIRRQSLELTEHIAQLISATK | 287 |

[10973] Based on this analysis, it was predicted that these proteins and their epitopes could be useful antigens for vaccines or diagnostics.

### EXAMPLE 2003

[10974] A DNA sequence (GBSx2113) was identified in S. agalactiae <SEQ ID 6193> which encodes the amino acid sequence <SEQ ID 6194>. Analysis of this protein sequence reveals the following:

```
Possible site: 21
>>> Seems to have no N-terminal signal sequence
----- Final Results -----
                            bacterial cytoplasm --- Certainty = 0.1086(Affirmative) < succ>
                              bacterial membrane --- Certainty = 0.0000(Not Clear) < succ>
                                bacterial outside --- Certainty = 0.0000(Not Clear) < succ>
```

[10975] The protein has homology with the following sequences in the GENPEPT database.

| >GP: CAB12865 GB: Z99109 similar to lipoate-protein ligase | | | |
|---|---|---|---|
| [Bacillus subtilis] | | | |
| Identities = 130/331 (39%), Positives = 206/331 (61%), Gaps = 5/331 (1%) | | | |
| Query: | 9 | NGKRITDGAIALAMQVYILQNVFLDDDILFPYYCDPKVEIGKFQNAVIETNQEYLKEHDI | 68 |
| | | + + I D I LA++ Y ++++ + L Y P + IGK QN + E N +Y++E+ I | |
| Sbjct: | 5 | DNQNINDPRINLAIEEYCVKHLDPEQQYLLFYVNQPSIIIGKNQNTIEEINTKYVEENGI | 64 |
| Query: | 69 | PVVRRDTGGGAVYVDSGAVNICYLMKDHGQ-FGDFKRAYEPAIKALKTLGASSVEMRERN | 127 |
| | | VVRR +GGGAVY D G +N ++ KD G F +FK+ EP I+AL LG + E+ RN | |
| Sbjct: | 65 | IVVRRLSGGGAVYHDLGNLNFSFITKDDGDSFHNFKKFTEPVIQALHQLGVEA-ELSGRN | 123 |
| Query: | 128 | DLVIDGKKVSGAAMTIVNGRIYGGYSLLLDVDVDAMEKVLNPNRKKIESKGIKSVRSRVG | 187 |
| | | D+V+DG+K+SG A GRI+ +L+ D D + L + KIESKGIKS+RSRV | |
| Sbjct: | 124 | DIVVDGRKISGNAQFATKGRIFSHGTLMFDSAIDHVVSALKVKKDKIESKGIKSIRSRVA | 183 |
| Query: | 188 | DIRSHLSEDYRHITTDQFKDLMVCQLLHIDHIDQAKRYHLTEKDWAAIDALADEKYKNWD | 247 |
| | | +I L + +TT++F+ ++ + + + + Y LTEKDW I ++ E+Y+NWD | |
| Sbjct: | 184 | NISEFLDDK---MTTEEFRSHLLRHIFNTNDVGNVPEYKLTEKDWETIHQISKERYQNWD | 240 |
| Query: | 248 | WNYGNSPQYSYHRDARFPSGTYDFHLEIEKGIITNCRIYGDFFSSKDISDIENLLIGCPM | 307 |
| | | WNYG SP+++ + R+P G+ D HLE++KG I +C+I+GDFF D+S+IENLL+G | |
| Sbjct: | 241 | WNYGRSPRFNLNHSKRYPVGSIDLHLEVKKGKIEDCKIFGDFFGVGDVSEIENLLVGKQY | 300 |
| Query: | 308 | KEELVLEKLSTLSLEDYFGQTSPEEIKAVLF | 338 |
| | | + ++ + L ++L+ YFG + E+ +++ | |
| Sbjct: | 301 | ERSVIADVLEGVNLKHYFGNITKEDFLDLIY | 331 |

[10976] A related DNA sequence was identified in S. pyogenes <SEQ ID 6195> which encodes the amino acid sequence <SEQ ID 6196>. Analysis of this protein sequence reveals the following:

```
Possible site: 21
>>> Seems to have no N-terminal signal sequence
----- Final Results -----
                            bacterial Cytoplasm --- Certainty = 0.0939(Affirmative) < succ>
                              bacterial membrane --- Certainty = 0.0000(Not Clear) < succ>
                                bacterial outside --- Certainty = 0.0000(Not Clear) < succ>
```

[10977] An alignment of the GAS and GBS proteins is shown below.

| Identities = 248/339 (73%), Positives = 283/339 (83%) | | | |
|---|---|---|---|
| Query: | 1 | MYLIEPIRNGKRITDGAIALAMQVYILQNVFLDDDILFPYYCDPKVEIGKFQNAVIETNQ | 60 |
| | | MYLIEPIRNGKRITDGA+ALAMQVY+ +N+FLDDDILFPYYCDPKVEIGKFQNAV+ETNQ | |
| Sbjct: | 1 | MYLIEPIRNGKRITDGAVALAMQVYVQENLFLDDDILFPYYCDPKVEIGKFQNAVVETNQ | 60 |
| Query: | 61 | EYLKEHDIPVVRRDTGGGAVYVDSGAVNICYLMKDHGQFGDFKRAYEPAIKALKTLGASS | 120 |
| | | EYLKEH IPVVRRDTGGGAVYVDSGAVNICYL+ D+G FGDFKR Y+PAI+AL LGA+ | |
| Sbjct: | 61 | EYLKEHHIPVVRRDTGGGAVYVDSGAVNICYLINDNGIFGDFKRTYQPAIEALHHLGATE | 120 |
| Query: | 121 | VEMRERNDLVIDGKKVSGAAMTIVNGRIYGGYSLLLDVDFDAMEKVLNPNRKKIESKGIK | 180 |
| | | VEM RNDLVIDGKKVSGAAMTI NGR+YGGYSLLLDVDF+AMEK L PNRKKIESKGI+ | |
| Sbjct: | 121 | VEMSGRNDLVIDGKKVSGAAMTIANGRVYGGYSLLLDVDFEAMEKALKPNRKKIESKGIR | 180 |
| Query: | 181 | SVRSRVGDIRSHLSEDYRHITTDQFKDLMVCQLLHIDHIDQAKRYHLTEKDWAAIDALAD | 240 |
| | | SVRSRVG+IR HL+ Y+ IT ++FKDLMVCQLL I+ I QAKRY LTEKDW IDAL + | |
| Sbjct: | 181 | SVRSRVGNIREHLAPQYQGITIEEFKDLMVCQLLQIETISQAKRYDLTEKDWQQIDALTE | 240 |
| Query: | 241 | EKYKNWDWNYGNSPQYSYHRDARFPSGTYDFHLEIEKGIITNCRIYGDFFSSKDISDIEN | 300 |
| | | KY NW+WNYGN+PQY YHRD RF GT D HL+I+KG I CRIYGDFF DI+++E | |
| Sbjct: | 241 | RKYHNWEWNYGNAPQYRYHRDGRFTGGTVDIHLDIKKGYIAACRIYGDFFGKADIAELEG | 300 |
| Query: | 301 | LLIGCPMKEELVLEKLSTLSLEDYFGQTSPEEIKAVLFS | 339 |
| | | LIG M++E VL L+ + L Y G + EE+ ++FS | |
| Sbjct: | 301 | HLIGTRMEKEDVLATLNAIDLAPYLGAITAEELGDLIFS | 339 |

[10978] Based on this analysis, it was predicted that these proteins and their epitopes could be useful antigens for vaccines or diagnostics.

### EXAMPLE 2004

[10979] A DNA sequence (GBSx2114) was identified in S. agalactiae <SEQ ID 6197> which encodes the amino acid sequence <SEQ ID 6198>. Analysis of this protein sequence reveals the following:

| Possible site: 17 | | | | |
|---|---|---|---|---|
| >>> Seems to have no N-terminal signal sequence | | | | |
| | INTEGRAL | Likelihood = −1.49 | Transmembrane | 196-212 (196-212) |

```
----- Final Results -----
                              bacterial membrane --- Certainty = 0.1595(Affirmative) < succ>
                                bacterial outside --- Certainty = 0.0000(Not Clear) < succ>
                            bacterial cytoplasm --- Certainty = 0.0000(Not Clear) < succ>
```

[10980] The protein has homology with the following sequences in the GENPEPT database.

| >GP: AAB49329 GB: U39612 formyl-tetrahydrofolate synthetase | | | |
|---|---|---|---|
| [Streptococcus mutans] | | | |
| Identities = 432/556 (77%), Positives = 493/556 (87%) | | | |
| Query: | 1 | MKTDIEIAQSVALKPIAEIVEQVGIGFDDIELYGKYKAKLSFDKIEAVKSQKVGKLILVT | 60 |
| | | MKTDIEIAQSV L+PI +V+++GI FDD+ELYGKYKAKL+FDKI+AV+ GKL+LVT | |
| Sbjct: | 1 | MKTDIEIAQSVDLRPITNVVKKLGIDFDDLELYGKYKAKLTFDKIKAVEENAPGKLVLVT | 60 |
| Query: | 61 | AINPTPAGEGKSTMSIGLADALNKIGKKTMIALREPSLGPVMGIKGGAAGGGYAQVLPME | 120 |
| | | AINPTPAGEGKST++IGLADALNKIGKKTMIA+REPSLGPVMGIKGGAAGGGYAQVLPME | |
| Sbjct: | 61 | AINPTPAGEGKSTITIGLADALNKIGKKTMIAIREPSLGPVMGIKGGAAGGGYAQVLPME | 120 |
| Query: | 121 | DINLHFTGDMHAITTANNALSALLDNHIHQGNELDIDQRRVIWKRVVDLNDRALRQVIVG | 180 |
| | | DINLHFTGDMHAITTANNALSAL+DNH+HQGNEL IDQRR+IWKRVVDLNDRALR V VG | |
| Sbjct: | 121 | DINLHFTGDMHAITTANNALSALIDNHLHQGNELGIDQRRIIWKRVVDLNDRALRHVTVG | 180 |
| Query: | 181 | LGSPVNGIPREDGFDITVASEIMAILCLATDLSDLKKRLSNIVVAYSRNRKPIYVKDLKI | 240 |
| | | LGSP+NGIPRSDGFDITVASEIMAILCLAT++ DLK+RL+NIV+ Y +R P+YV+DL++ | |
| Sbjct: | 181 | LGSPINGIPREDGFDITVASEIMAILCLATNVEDLKERLANIVIGYRFDRSPVYVRDLEV | 240 |
| Query: | 241 | EGALTLILKDTIKPNLVQTIYGTPALVHGGPFANIAHGCNSVLATSTALRLADYVVTEAG | 300 |
| | | +GAL LILK+ IKPNLVQTIYGTPA VHGGPFANIAHGCNSVLATSTALRLADY +TEAG | |
| Sbjct: | 241 | QGALALILKEAIKPNLVQTIYGTPAFVHGGPFANIAHGCNSVLATSTALRLADYTITEAG | 300 |
| Query: | 301 | FGADLGAEKFLDIKTPNLPTSPDAIVIVATLRALKMHGGVSKEDLSQENVEAVKRGFTNL | 360 |
| | | FGADLGAEKFLDIK PNLPTSPDA+VIVAT+RALKH+GGV+K+ L+QENVEAVK GF NL | |
| Sbjct: | 301 | FGADLGAEKFLDIKAPNLPTSPDAVVIVATIRALKMNGGVAKDALNQENVEAVKAGFANL | 360 |
| Query: | 361 | ERHVNNMRQYGVPVVVAINQFTADTESEIATLKTLCSNIDVAVELASVWEDGADGGLELA | 420 |
| | | RHV NMR+YGVPVVVAIN+F DT EIA L+ LC+ IDV VELASVW +GADGG++LA | |
| Sbjct: | 361 | ARHVENMRKYGVPVVVAINEFITDTNDEIAVLRNLCAAIDVPVELASVWANGADGGVDLA | 420 |
| Query: | 421 | QTVANVIETQSSNYKRLYNDEDTIEEKIKKIVTKIYGGNKVHFGPKAQIQLKEFSDNGWD | 480 |
| | | T+ N IE S+YKRLY++ ++EEK+ +I +IY +KV F KA+ Q+ + NGWD | |
| Sbjct: | 421 | NTLINTIENNPSHYKRLYDNNLSVEEKVTEIAKEIYRADKVIFEKKAKTQIAQIVKNGWD | 480 |
| Query: | 481 | KMPICMAKTQYSFSDNPNLLGAPTDFDITVREFVPKTGAGFIVALTGDVLTMPGLPKKPA | 540 |
| | | +PICMAKTQYSFSD+P LLGAPT FDIT+RE VPK GAGFIVALTGDV+TMPGLPKKPA | |
| Sbjct: | 481 | NLPICMAKTQYSFSDDPKLLGAPTGFDITIRELVPKLGAGFIVALTGDVMTMPGLPKKPA | 540 |
| Query: | 541 | ALNMDVLEDGTAIGLF | 556 |
| | | ALNMDV DGTA+GLF | |
| Sbjct: | 541 | ALNMDVAADGTALGLF | 556 |

[10981] A related DNA sequence was identified in S. pyogenes <SEQ ID 6199> which encodes the amino acid sequence <SEQ ID 6200>. Analysis of this protein sequence reveals the following:

| Possible site: 50 | | | | |
|---|---|---|---|---|
| >>> Seems to have no N-terminal signal sequence | | | | |
| | INTEGRAL | Likelihood = −1.49 | Transmembrane | 196-212 (196-212) |

```
----- Final Results -----
                              bacterial membrane --- Certainty = 0.1595(Affirmative) < succ>
                                bacterial outside --- Certainty = 0.0000(Not Clear) < succ>
                            bacterial cytoplasm --- Certainty = 0.0000(Not Clear) < succ>
```

[10982] The protein has homology with the following sequences in the databases:

| >GP: AAB49329 GB: U39612 formyl-tetrahydrofolate synthetase | | | |
|---|---|---|---|
| [Streptococcus mutans] | | | |
| Identities = 432/556 (77%), Positives = 490/556 (87%) | | | |
| Query: | 1 | MKSDIEIAQSVALQPITDIVKKVGIDGDDIELYGKYKAKLSFEKMKAVEANEPGKLILVT | 60 |
| | | MK+DIEIAQSV L+PIT++VKK+GID DD+ELYGKYKAKL+F+K+KAVE N PGKL+LVT | |
| Sbjct: | 1 | MKTDIEIAQSVDLRPITNVVKKLGIDFDDLELYGKYKAKLTFDKIKAVEENAPGKLVLVT | 60 |
| Query: | 61 | AINPTPAGEGKSTMSIGLADALNQMGKKTMLALREPSLGPVMGIKGGAAGGGYAQVLPME | 120 |
| | | AINPTPAGEGKST++IGLADALN++GKKTM+A+REPSLGPVMGIKGGAAGGGYAQVLPME | |
| Sbjct: | 61 | AINPTPAGEGKSTITIGLADALNKIGKKTMIAIREPSLGPVMGIKGGAAGGGYAQVLPME | 120 |
| Query: | 121 | DINLHFTGDMHAITTANNALSALIDNHLQQGNDLGIDPRRIIWKRVLDLNDRALRQVIVG | 180 |
| | | DINLHFTGDMHAITTANNALSALIDNHL QGN+LGID RRIIWKRV+DLNDRALR V VG | |
| Sbjct: | 121 | DINLHFTGDMHAITTANNALSALIDNHLHQGNELGIDQRRIIWKRVVDLNDRALRHVTVG | 180 |
| Query: | 181 | LGSPVNGVPREDGFDITVASEINAILCLATDLKDLKKRLADIVVAYTYDRKPVYVRDLKV | 240 |
| | | LGSP+NG+PREDGFDITVASEIMAILCLAT+++DLK+RLA+IV+ Y +DR PVYVRDL+V | |
| Sbjct: | 181 | LGSPINGIPREDGFDITVASEINAILCLATNVEDLKERLANIVIGYRFDRSPVYVRDLEV | 240 |
| Query: | 241 | EGALTLILKDAIKPNLVQTIYGTPALIHGGPFANIANGCNSVLATSTALRLADYTVTEAG | 300 |
| | | +GAL LILK+AIKPNLVQTIYGTPA +HGGPFANIAHGCNSVLATSTALRLADYT+TEAG | |
| Sbjct: | 241 | QGALALILKEAIKPNLVQTIYGTPAFVNGGPFANIAHGCNSVLATSTALRLADYTITEAG | 300 |
| Query: | 301 | FGADLGAEKFLNIKVPNLPKAPDAIVIVATLRALKMHGGVAKSDLAAENCEAVRLGFANL | 360 |
| | | FGADLGAEKFL+IK PNLP +PDA+VIVAT+RALKN+GGVAK L EN EAV+ GFANL | |
| Sbjct: | 301 | FGADLGAEKFLDIKAPNLPTSPDAVVIVATIRALKMNGGVAKDALNQENVEAVKAGFANL | 360 |
| Query: | 361 | KRHVENMRQFKVPVVVAINEFVADTEAEIATLKALCEEIKVPVELASVWANGAEGGLALA | 420 |
| | | RHVENMR++ VPVVVAINEF+ DT EIA L+ LC I VPVELASVWANGA+GG+ LA | |
| Sbjct: | 361 | ARHVENMRKYGVPVVVAINEFITDTNDEIAVLRNLCAAIDVPVELASVWANGADGGVDLA | 420 |
| Query: | 421 | KTVVRVIDQEAADYKRLYSDEDTLEEKVINIVTQIYGGKAVQFGPKAKTQLKQFAEFGWD | 480 |
| | | T++ I+ + YKRLY + ++EEKV I +IY V F KAKTQ+ Q + GWD | |
| Sbjct: | 421 | NTLINTIENNPSHYKRLYDNNLSVEEKVTEIAKEIYRADKVIFEKKAKTQIAQIVKNGWD | 480 |
| Query: | 481 | KLPVCMAKTQYSFSDNPSLLGAPTDFDITIREFVPKTGAGFIVGLTGDVMTMPGLPKVPA | 540 |
| | | LP+CMAKTQYSFSD+P LLGAPT FDITIRE VPK GAGFIV LTGDVMTMPGLPK PA | |
| Sbjct: | 481 | NLPICMAKTQYSFSDDPKLLGAPTGFDITIRELVPKLGAGFIVALTGDVMTMPGLPKKPA | 540 |
| Query: | 541 | AMAMDVAENGTALGLF | 556 |
| | | A+ MDVA +GTALGLF | |
| Sbjct: | 541 | ALNMDVAADGTALGLF | 556 |

[10983] An alignment of the GAS and GBS proteins is shown below.

| Identities = 452/556 (81%), Positives = 513/556 (91%) | | | |
|---|---|---|---|
| Query: | 1 | MKTDIEIAQSVALKPIAEIVEQVGIGFDDIELYGKYKAKLSFDKIEAVKSQKVGKLILVT | 60 |
| | | MK+DIEIAQSVAL+PI +IV++VGI DDIELYGKYKAKLSF+K++AV++ + GKLILVT | |
| Sbjct: | 1 | MKSOIEIAQSVALQPITDIVKKVGIDGDDIELYGKYKAKLSFERNKAVEANEPGKLILVT | 60 |
| Query: | 61 | AINPTPAGEGKSTMSIGLADALNKICKKTMIALREPSLGPVNGIKGGAAGGGYAQVLPME | 120 |
| | | AINPTPAGEGKSTMSIGLADALN++GKKTM+ALREPSLGPVNGIKGGAAGGGYAQVLPME | |
| Sbjct: | 61 | AINPTPAGEGKSTMSIGLADALNQMGKKTMLALREPSLGPVNGIKGGAAGGGYAQVLPNE | 120 |
| Query: | 121 | DINLHFTGDMHAITTANNALSALLDNNIHQGNELDIDQRRVIWKRVVDLNDRALRQVIVG | 180 |
| | | DINLHFTGDMHAITTANNALSAL+DNH+ QGN+L ID RR+IWKRV+DLNDRALRQVIVG | |
| Sbjct: | 121 | DINLHFTGDMHAITTANNALSALIDNNLQQGNDLGIDPRRIIWKRVLDLNDRALRQVIVG | 180 |
| Query: | 181 | LGSPVNGIPREDGFDITVASEIMAILCLATDLSDLKKRLSNIVVAYSRNRKPIYVKDLKI | 240 |
| | | LGSPVNG+PREDGFDITVASEIMAILCLATDL DLKKRL++IVVAY+ +RKP+YV+DLK+ | |
| Sbjct: | 181 | LGSPVNGVPREDGFDITVASEINAILCLATDLKDLKKRLADIVVAYTYDRKPVYVRDLKV | 240 |
| Query: | 241 | EGALTLILKDTIKPNLVQTIYGTPALVHGGPFANIAHGCNSVLATSTALRLADYVVTEAG | 300 |
| | | EGALTLILKD IKPNLVQTIYGTPAL+HGGPFANIANGCNSVLATSTALRLADY VTEAG | |
| Sbjct: | 241 | EGALTLILKDAIKPNLVQTIYGTPALINGGPFANIAHGCNSVLATSTALRLADYTVTEAG | 300 |
| Query: | 301 | FGADLGAEKFLDIKTPNLPTSFDAIVIVATLRALKMHGGVSKEDLSQENVEAVKRGFTNL | 360 |
| | | FGADLGAEKFL+IK PNLP +PDAIVIVATLRALKMHGGV+E DL+ EN EAV+ GF NL | |
| Sbjct: | 301 | FGADLGAEKFLNIKVPNLPKAPOAIVIVATLRALKMHGGVAKSDLAAENCEAVRLGFANL | 360 |
| Query: | 361 | ERHVNNMRQYGVPVVVAINQFTADTESEIATLKTLCSNIDVAVELASVWEDGADGGLELA | 420 |
| | | +RHV NNRQ+VPVVVAIN+F ADTE+EIATLK LC I V VELASVW +GA+GGL LA | |
| Sbjct: | 361 | KRHVENMRQFKVPVVVAINEFVADTEAEIATLKALCEEIKVPVELASVWANGAEGGLALA | 420 |
| Query: | 421 | QTVANVIETQSSNYKRLYNDEDTIEEKIKKIVTKIYGGNKVNFGPKAQIQLKEFSDNGWD | 480 |
| | | +TV VI+ ++++YKRLY+DEDT+EEK+ IVT+IYGG V FGPKA+ QLK+F++ GWD | |
| Sbjct: | 421 | KTVVRVIDQEAADYKRLYSDEDTLEEKVINIVTQIYGGKAVQFGPKAKTQLRQFAEFGWD | 480 |
| Query: | 481 | KHPICMAKTQYSFSDNPNLLGAPTDFOITVREFVPKTGAGFIVALTGDVLTMPGLPKKPA | 540 |
| | | K+P+CMAKTQYSFSDNP+LLGAPTDFDIT+REFVPKTGAGFIV LTGDV+TNPGLPK PA | |
| Sbjct: | 481 | KLPVCMAKTQYSFSDNPSLLGAPTDFDITIREFVPKTGAGFIVGLTGDVMTNPGLPKVPA | 540 |
| Query: | 541 | ALNMDVLEDGTAIGLF | 556 |
| | | A+ MDV E+GTA+GLF | |
| Sbjct: | 541 | AMAMDVAENGTALGLF | 556 |

[10984] A related DNA sequence was identified in S. pyogenes <SEQ ID 9057> which encodes amino acid sequence <SEQ ID 9058>. Analysis of this protein sequence reveals the following:

```
Possible site: 13
>>> Seems to have no N-terminal signal sequence
INTEGRAL Likelihood = −1.49 Transmembrane 516-532 ( 516-533)
----- Final Results -----
                            bacterial membrane --- Certainty = 0.1595(Affirmative) < succ>
                              bacterial outside --- Certainty = 0.0000(Not Clear) < succ>
                          bacterial cytoplasm --- Certainty = 0.0000(Not Clear) < succ>
```

[10985] An alignment of the GAS and GBS sequences follows:

Score = 604 bits (1540), Expect e-174
Identities = 304/555 (54%), Positives = 389/555 (69%), Gaps = 2/555 (0%)

| | | | |
|---|---|---|---|
| Query: | 4 | SDIEIANSVTMEPISKVADQLGIDKEALCLYGKYKAKIDARQLVALKNKPDGKLILVTAI | 63 |
| | | +DIEIA SV ++PI+++ +Q+GI + + LYGKYKAK+ ++ A+K++ GKLILVTAI | |
| Sbjct: | 3 | TDIEIAQSVALKPIAEIVEQVGIGF00IELYGKYKAKLSFDKIEAVKSQKVGKLILVTAI | 62 |
| Query: | 64 | SPTPAGEGKTTTSVGLVDALSAIGKKAVIALREPSLXXXXXXXXXXXXXXXXXXXPMEDI | 123 |
| | | +PTPAGEGK+T S+GL DAL+ IGKK +IALREPSL PMEDI | |
| Sbjct: | 63 | NPTPAGEGKSTNSIGLADALNKIGKKTMIALREPSLGPVNGIKGGAAGGGYAQVLPMEDI | 122 |
| Query: | 124 | NLNFTGDFHAIGVANNLLAALIDNHIHHGNSLGIDSRRITWKRVVDMNDRQLRHIVDGLQ | 183 |
| | | NLHFTGD HAI ANN L+AL+DNHIH GN L ID RR+ WKRVVD+NDR LE ++ GL | |
| Sbjct: | 123 | NLHFTGDNHAITTANNALSALLDNHIHQGNELDIDQRRVIWKRVVDLNDRALRQVIVGLG | 182 |
| Query: | 184 | GKVNGIPREDGYDITVASEIMAILCLSENISDLKARLEKIIIGYNYQGEPVTXXXXXXXX | 243 |
| | | VNGIPREDG+DITVASEIMAILCL+ ++SDLK RL I++ Y+ +P+ | |
| Sbjct: | 183 | SPVNGIPREDGFDITVASEIMAILCLATDLSDLKKRLSNIVVAYSRNRKPIYVKDLKIEG | 242 |
| Query: | 244 | XXXXXXXXXIHPNLVQTLEHTPALIHGGPFANIAHGCNSVLATKLALKYGDYAVTEAGFG | 303 |
| | | I PNLVQT+ TPAL+HGGPFANIAHGCNSVLAT AL+ DY VTEAGFG | |
| Sbjct: | 243 | ALTLILKDTIKPNLVQTIYGTPALVHGGPFANIAHGCNSVLATSTALRLADYVVTEAGFG | 302 |
| Query: | 304 | ADLGAEKFTDIKCRNSGLRPAAVVLVATIRALKNHGGVPKADLATENVQAVVDGLPNLDK | 363 |
| | | ADLGAEKF+DIK P A+V+VAT+RALKNHGGV K DL+ ENV+AV G NL++ | |
| Sbjct: | 303 | ADLGAEKFLDIKTPNLPTSPDAIVIVATLRALKNHGGVSKEDLSQENVEAVKRGFTNLER | 362 |
| Query: | 364 | HLANIQDVYGLPVVVAINKFPLDTDAELQAVYDACDKRGVDVVISDVWANGGAGGRELAE | 423 |
| | | H+N++ YG+PVVVAIN+F DT++E+ + C V V ++ VW +G GG ELA+ | |
| Sbjct: | 363 | HVNNMRQ-YGVPVVVAINQFTADTESEIATLKTLCSNIDVAVELASVWEDGADGGLELAQ | 421 |
| Query: | 424 | KVVTLAE-QDNQFRFVYEEDDSIETKLTKIVTKVYGGKGINLSSAAKRELADLERLGFGN | 482 |
| | | V + E Q + ++ +Y ++D+IE K+ KIVTK+YGG ++ A+ +L + G+ | |
| Sbjct: | 422 | TVANVIETQSSNYKRLYNDEDTIEEKIKKIVTKIYGGNKVNFGPKAQIQLKEFSDNGWDK | 481 |
| Query: | 483 | YPICMAKTQYSFSDDAKKLGAPTDFTVTISNLKVSAGAGFIVALTGAINTMPGLPKVPAS | 542 |
| | | PICMAKTQYSFSD+ LGAPTDF +T+ GAGFIVALTG ++TMPGLPK PA+ | |
| Sbjct: | 482 | NPICMAKTQYSFSDNPNLLGAPTDFDITVREFVPKTGAGFIVALTGDVLTMPGLPKKPAA | 541 |
| Query: | 543 | ETIDIDEEGNITGLW | 557 |
| | | +D+ E+G GLF | |
| Sbjct: | 542 | LNMDVLEDGTAIGLF | 556 |

[10986] SEQ ID 6198 (GBS131) was expressed in E. coli as a His-fusion product. SDS-PAGE analysis of total cell extract is shown in FIG. 29 (lane 6; MW 64.8 kDa). It was also expressed in E. coli as a GST-fusion product. SDS-PAGE analysis of total cell extract is shown in FIG. 35 (lane 4; MW 90 kDa).

[10987] GBS131-GST was purified as shown in FIG. 201, lane 5.

[10988] Based on this analysis, it was predicted that these proteins and their epitopes could be useful antigens for vaccines or diagnostics.

### EXAMPLE 2005

[10989] A DNA sequence (GBSx2115) was identified in S. agalactiae <SEQ ID 6201> which encodes the amino acid sequence <SEQ ID 6202>. Analysis of this protein sequence reveals the following:

| | |
|---|---|
| Possible site: 53 | |
| >>> Seems to have no N-terminal signal sequence | |
| INTEGRAL Likelihood = −10.03 Transmembrane 34-50 ( 29-56) | |
| INTEGRAL Likelihood = − 7.70 Transmembrane 90-106 ( 84 | - 110) |
| INTEGRAL Likelihood = − 1.97 Transmembrane 62-78 ( 62 - 78) | |
| INTEGRAL Likelihood = − 0.69 Transmembrane 275-291 ( 275 - 291) | |
| ----- Final Results ----- | |
| bacterial membrane --- Certainty = 0.5012(Affirmative) < succ> | |
| bacterial outside --- Certainty = 0.0000(Not Clear) < succ> | |
| bacterial cytoplasm --- Certainty = 0.0000(Not Clear) < succ> | |

[10990] The protein has homology with the following sequences in the GENPEPT database.

| >GP:AAA88609 GB:M37842 unknown protein [Streptococcus mutans] | | | |
|---|---|---|---|
| Identities = 243/373 (65%), Positives = 302/373 (80%), Gaps = 1/373 (0%) | | | |
| Query: | 71 | IGAVLYLVNSEMDALSRVTWLILVMIAPLLGAMFLMYTKFDWGYRGLKQRLETLI0ESQI | 130 |
| | | IG+VLYLVNS+MD LS +TWL++++ P+LG +FL+YTK OWGYR LK ++ + | |
| Sbjct: | 2 | IGSVLYLVNSQMDTLSIITWLLVILPFPILGTLFLIYTKQDWGYRELKSLIKKSTQAIIP | 61 |
| Query: | 131 | YLEDDPETLNQLKSSTSTTYHLVQYFEKAHGNFPVYRNTOVTFLPTGEAFFEK4KEELLK | 190 |
| | | Y + D L +LR S + TY+L QY ++ G FPVY+NT VT+ P G++ FE+MK++LLK | |
| Sbjct: | 62 | YFQYOQRILYKLKESHARTYNLAQYLHRS-GGFPVYKNTKVTYFPNGQSKFEEMKKQLLK | 120 |
| Query: | 191 | AKKYIFLEFFIIDEGIMWGEILSILEQKVEEGVEVRILYDGMIEITKLSFDYTKRLEKIG | 250 |
| | | A+K+IFLE+FII EG+MWGEILSILEQKV+EGVEVR++YDGM+E++LSFDY KRLEKIG | |
| Sbjct: | 121 | ASKFIFLEYFIIAEGLMWGEILSILEQKVQEGVEVRVMYDGMLELSTLSFDYAKRLEKIG | 180 |
| Query: | 251 | IKAKAFSPISPFISTYYNYRDHRKIVVIDGVVGMTGGVNLADEYINHIELFGHWKDSGIM | 310 |
| | | IKAK FSPI+PF+STYYNYROHRKI+VID V GG+NLAOEYIN IE FG+WKD+ +M | |
| Sbjct: | 181 | IKAKVFSPITPFVSTYYNYRDHRKILVIDNKVAFNGGINLADEYINQIERFGYWKDTAVM | 240 |
| Query: | 311 | LKGKAVDSFLLLFLQMWSITEEKMLVAPYLGVHDDLVENEGYVIPYGDSPLDTDKVGENV | 370 |
| | | L+G+ V SF L+FLQMWS T + APYL + + GYVIPY DSPLD +KVGENV | |
| Sbjct: | 241 | LEGEGVASFTLMFLQMWSTTNKOYEFAPYLTQNFHEIVANGYVIPYSDSPLDHEKVGENV | 300 |
| Query: | 371 | YIDILNHAREYVYIMTPYLILDSELEHAIQFAAERGVDVRIIMPGIPDKPIPYALAKTYY | 430 |
| | | YIDILN AR+YVYIMTPYLILDSE+EHA+QFAAERGVDV+IIMPGIPDK +P+ALAK Y+ | |
| Sbjct: | 301 | YIDILNQARDYVYIMTPYLILOSEMEHALQFAAERGVOVKIIMPGIPDKKVPFALAKRYF | 360 |
| Query: | 431 | QALTKSGVKIYEY | 443 |
| | | AL +GVKIYE+ | |
| Sbjct: | 361 | PALLDAGVKIYEF | 373 |

[10991] A related DNA sequence was identified in S. pyogenes <SEQ ID 6203> which encodes the amino acid sequence <SEQ ID 6204>. Analysis of this protein sequence reveals the following:

```
Possible site: 47
>>> Seems to have no N-terminal signal sequence
INTEGRAL Likelihood = −8.86 Transmembrane 84-100 ( 81-104)
INTEGRAL Likelihood = −8.33 Transmembrane 28-44 ( 23-49)
INTEGRAL Likelihood = −6.74 Transmembrane 56-72 ( 53-74)
----- Final Results -----
                            bacterial membrane --- Certainty = 0.4545(Affirmative) < succ>
                              bacterial outside --- Certainty = 20.0000(Not Clear) < succ>
                          bacterial cytoplasm --- Certainty = 0.0000(Not Clear) < succ>
```

[10992] The protein has homology with the following sequences in the databases:

| >GP:AAA23240 GB:J02911 formtyltetrahydrofolate synthetase (FTHFS) | | | |
|---|---|---|---|
| (ttg start codon) (EC 6.3.4.3) [Moorella thermoacetica] | | | |
| Identities = 350/557 (62%), Positives = 438/557 (77%), Gaps = 2/557 (0%) | | | |
| Query: | 2 | VLSDIEIANSVTMEPISKVADQLGIDKEALCLYGKYKAKIDARQLVALKNKPDGELILVT | 61 |
| | | V SDIEIA + M+P+ ++A LGI ++ + LYGEYKAKI LK+KPDGKLILVT | |
| Sbjct: | 4 | VPSDIEIAQAAKMKPVMELARGLGIQEDEVELYGKYKAKISLDVYRRLKDKPDGKLILVT | 63 |
| Query: | 62 | AISPTPAGEGKTTTSVGLVDALSAIGKKAVIALREPSLGPVFGVKGGAAGGGHAQVVPME | 121 |
| | | AI+PTPAGEGKTTTSVGL DAL+ +GK+ ++ LREPSLGP FG+KGGAAGGG+AQVVPME | |
| Sbjct: | 64 | AITPTPAGEGKTTTSVGLTDALARLGKRVMVCLREPSLGPSFGIKGGAAGGGYAQVVPME | 123 |
| Query: | 122 | DINLHFTGDFHAIGVANNLLAALIDNHIHHGNSLGIDSRRITWKRVVDMNDRQLRHIVDG | 181 |
| | | DINLHFTGD HA+ A+NLLAA++DNH+ GM L ID R ITW+RV+D+NDR LR+IV G | |
| Sbjct: | 124 | DINLHFTGDIHAVTYAHNLLAAMVDNHLQQGMVLNIDPRTITWRRVIDLNDRALRNIVIG | 183 |
| Query: | 182 | LQGKVNGIPREDGYDITVASEIMAILCLSEMISDLKARLEKIIIGYNYQGEPVTAKDLKA | 241 |
| | | L GK NG+PRE G+DI+VASE+MA LCL+ ++ DLK R +I++GY Y G+PVTA DL+A | |
| Sbjct: | 184 | LGGKANGVPRETGFDISVASEVMACLCLASDLMDLKERFSRIVVGYTYDGKPVTAGDLEA | 243 |
| Query: | 242 | GGALAALLKDAIHPNLVQTLEHTPALIHGGPFANIAHGCNSVLATKLALKYGDYAVTEAG | 301 |
| | | G++A L+KDAI PNLVQTLE+TPA IHGGPFANIAHGCNS++ATK ALK DY VTEAG | |
| Sbjct: | 244 | QGSMALLMKDAIKPNLVQTLEMTPAFIHGGPFANIAHGCNSIIATKTALKLADYVVTEAG | 303 |
| Query: | 302 | FGADLGAEKFIDIKCRNSGLRPAAVVLVATIRALKMHGGVPKA0LATENVQAVVDGLPNL | 361 |
| | | FGADLGAEKF D+KCR +G +P A V+VAT+RALKMHGGVPK+DLATEN++A++G NL | |
| Sbjct: | 304 | FGADLGAEKFYDVKCRYAGFKPDATVIVATVRALKMNGGVPKSDLATENLEALREGFANL | 363 |
| Query: | 362 | DKHLANIQDVYGLPVVVAINKFPLDTDAELQAVYDACDKRGVOVVISDVWANGGAGGREL | 421 |
| | | +KH+ NI +G+P VVAIN FP DT+AEL +Y+ C K G +V +S+VWA GG GG EL | |
| Sbjct: | 364 | EKHIENI-GKFGVPAVVAINAFPTDTEAELNLLYELCAKAGAEVALSEVWAKGGEGGLEL | 422 |
| Query: | 422 | AEKVV-TLAEQDNQFRFVYEEDOSIETKLTKIVTKVYGGKGINLSSAAKRELADLERLGF | 480 |
| | | A KV+ TL + + F +Y D SI+ K+ KI T++YG G+N ++ A + + E LG+ | |
| Sbjct: | 423 | ARKVLQTLESRPSNFNVLYNLDLSIKDKIAKIATEIYGADGVNYTAEADKAIQRYESLGY | 482 |
| Query: | 481 | GNYPICNAKTQYSFSDDAKKLGAPTDFTVTISNLKVSAGAGFIVALTGAIMTMPGLPKVP | 540 |
| | | GN P+ MAKTQYSFSDD KLG P +FT+T+ +++SAG IV +TGAIMTMPGLPK P | |
| Sbjct: | 483 | GNLPVVMAKTQYSFSDDNTKLGRPRNFTITVREVRLSAGGRLIVPITGAIMTNPGLPKRP | 542 |
| Query: | 541 | ASETIDIDEEGNITGLF | 557 |
| | A+ IDID +G ITGLF | | |
| Sbjct: | 543 | AACNIDIDADGVITGLF | 559 |
| >GB:M37842unknown protein [Streptococcus mutans] (v . . . 517 e-145 | | | |
| >GP:AAA88609 GB:M37842 unknown protein υStreptococcus mutans] | | | |
| Identities = 246/370 (66%), Positives = 303/370 (81%), Gaps = 1/370 (0%) | | | |
| Query: | 68 | VLYLVNSDMOAISRMTWLILINIAPLLGSLFLIYTKLDWGYRGLKQRINHLVDLSAPYLS | 127 |
| | | VLYLVNS MD +S +TWL++I+ P+LG+LFLIYTK DWGYR LK I PY | |
| Sbjct: | 5 | VLYLVNSQMOTLSIITWLLVILPFPILGTLFLIYTKQDWGYRELKSLIKKSTQAIKPYFQ | 64 |
| Query: | 128 | DDDAILEVLKDSTSTTYHLVQYLERSRGNFPIYNNTRVTYFPTGETFFDSLKEQLFLAKK | 187 |
| | | D IL LK+S + TY+L QYL RS G FP+Y NT+VTYFP G++ F+ +K+QL A+K | |
| Sbjct: | 65 | YDQRILYKLKESHARTYNLAQYLHRS-GGFPVYKNTKVTYFPNGQSKFEEMKKQLLKAEK | 123 |
| Query: | 188 | YIFLEFFIIAEOQMWGSILSILEKKVSEGVEVRVLFDGMNELSTLSSOYAKRLEQIGIKA | 247 |
| | | +IFLE+FIIAEG MWOEILSILE+KV EGVEVRV++DGM ELSTLS DYAKRLE+IGIKA | |
| Sbjct: | 124 | FIFLEYFIIAEGLMWGEILSILEQKVQEGVEVRVMYDGMLELSTLSFDYAKRLEKIGIKA | 183 |
| Query: | 248 | KSFLPISPFISTYYNYRDHRKIVVIDGEVSFTGGINLADEYINEVERFGHWKDAGLMLEG | 307 |
| | | K F PI+PF+STYYNYRDHRKI+VID +V+F GGINLADEYIN++ERFF+WKD +MLEG | |
| Sbjct: | 184 | KVFSPITPFVSTYYNYRDHRKILVIDNKVAFNGGINLADEYINQIERFGYWKDTAVMLEG | 243 |
| Query: | 308 | EATDSFLILFLQMWSITEKELIIDPYLSDHSLKLPSDGYVIPYGDSPLDTDKIGKNVYID | 367 |
| | | E SF ++FLQMWS T K+ PYL+ + ++ ++GYVIPY DSPLD +K+G+NVYID | |
| Sbjct: | 244 | EGVASFTLMFLQMWSTTNKDYEFAPYLTQNFNEIVANGYVIPYSDSPLDNEKVGENVYID | 303 |
| Query: | 368 | ILNHAKEYVYIMTPYLILDSEMENALRFASERGVDIRIINPGVPDRGVPYALAKTYYKAL | 427 |
| | | ILN A++YVYIMTPYLILDSEMEHAL+FA+ERGVD++IINPG+PDK VP+ALAK Y+ AL | |
| Sbjct: | 304 | ILNQARDYVYIMTPYLILDSEMEHALQFAAERGVDVKIINPGIPDKKVPFALAKRYFPAL | 363 |
| Query: | 428 | MSSGVKIYEY | 437 |
| | | + +GVKIYE+ | |
| Sbjct: | 364 | LDAGVKIYEF | 373 |

[10993] An alignment of the GAS and GBS proteins is shown below.

| Identities = 362/524 (69%), Positives = 437/524 (83%) | | | |
|---|---|---|---|
| Query: | 8 | LISNKVKIVRLLNKSKKSLLRGIFSRTTVIAILLILQLLFLLASYSWLEQYRVWLATVEH | 67 |
| | | +I K K+ LL+K K LRGIFSRTT+I +L+ILQL+FL SY+W+EQYRVW+ +E | |
| Sbjct: | 2 | IIKKKAKVKYLLHKGKHGFLRGIFSRTTIIVLLIILQLVFLFQSYAWMEQYRVWITILES | 61 |
| Query: | 68 | ILTIGAVLYLVNSEMDALSRVTWLILVMIAPLLGAMFLMYTKFDWGYRGLKQRLETLIDE | 127 |
| | | + I VLYLVNS+MDA+SR+TWLIL+MIAPLLG++FL+YTK DWGYRGLKQR+ L+D | |
| Sbjct: | 62 | VFAITIVLYLVNSDMDAISRMTWLILIMIAPLLGSLFLIYTKLDWGYRGLKQRINHLVDL | 121 |
| Query: | 128 | SQIYLEDDPETLNQLKSSTSTTYHLVQYFEKANGNFPVYRNTDVTFLPTGEAFFEKMKEE | 187 |
| | | S YL DD L LK STSTTYHLVQY E++ GNFP+Y NT VT+ PTGE FF+ +KE+ | |
| Sbjct: | 122 | SAPYLSDDDAILEVLKDSTSTTYNLVQYLERSRGNFPIYNNTRVTYFPTGETFFDSLKEQ | 181 |
| Query: | 188 | LLKAKKYIFLEFFIIDEGIMWGEILSILEQKVEEGVEVRILYDGMISITKLSFDYTKRLE | 247 |
| | | L AKKYIFLEFFII EG MWGEILSILE+KV EGVEVR+L+DGM E++ LS DY ERLE | |
| Sbjct: | 182 | LFLAKKYIFLEFFIIAEGQNWGEILSILEKKVSEGVEVRVLFDGMNELSTLSSDYAKRLE | 241 |
| Query: | 248 | KIGIKAKAFSPISPFISTYYNYRDHRKIVVIDGVVGMTGGVNLADEYINHIELFGHWKDS | 307 |
| | | +IGIKAK+F PISPFISTYYNYRDHRKIVVIDG V TGG+NLADEYIN +E FGHWKD+ | |
| Sbjct: | 242 | QIGIKAKSFLPISPFISTYYNYRDHRKIVVIDGEVSFTGGINLADEYINEVERFGHWKDA | 301 |
| Query: | 308 | GIMLKGKAVDSFLLLFLQMWSITEEKMLVAPYLGVHDDLVENEGYVIPYGDSPLDTDKVG | 367 |
| | | G+ML+G+A DSFL+LFLQMWSITS+++++ PYL H + ++GYVIPYGDSPLDTDK+G | |
| Sbjct: | 302 | GLMLEG˜ATDSFLILFLQMWSITEKELIIDPYLSDHSLKLPSDGYVIPYGDSPLDTDKIG | 361 |
| Query: | 368 | ENVYIDILNHAREYVYIMTPYLILDSELEHAIQFAAERGVDVRIIMPGIPDKPIPYALAK | 427 |
| | | +NVYIDILNHA+EYVYIMTPYLILDSE+EHA++FA+ERGVD+RIIMPG+PDK +PYALAK | |
| Sbjct: | 362 | KNVYIDILNHAKEYVYIMTPYLILDSEMEHALRFASERGVDIRIIMPGVPDKGVPYALAK | 421 |
| Query: | 428 | TYYQALTKSGVKIYEYTLGFVHSKIFLSDNTRAVVGTINLDYRSLYHHFECAVYLYKVDA | 487 |
| | | TYY+AL SGVKIYEY GFVHSK+F+SDNTKAVVGTINLDYRSLYHHFECA YLY+V | |
| Sbjct: | 422 | TYYKALMSSGVKIYEYQPGFVHSKVFISDNTKAVVGTINLDYRSLYHHFECATYLYRVSV | 481 |
| Query: | 488 | IQDIYRDYMDTLNKSRLVSLKDINNIPKFQKVIGIVTKTIAPLL | 531 |
| | | I DI D+ + +S L++ + P +QK+IG++ + IAPLL | |
| Sbjct: | 482 | IADIVNDFNEAQKQSLLMTSDHLTQRPWYQKLIGLLVRIIAPLL | 525 |

[10994] A related GBS gene <SEQ ID 8953> and protein <SEQ ID 8954> were also identified. Analysis of this protein sequence reveals the following:

```
Lipop Possible site: −1 Crend: 6
McG: Discrim Score: −8.80
GvH: Signal Score (−7.5): −1.94
Possible site: 53
>>> Seems to have no N-terminal signal sequence
ALOM program count: 4 value: −10.03 threshold: 0.0
INTEGRAL Likelihood = −10.03 Transmembrane 34-50 ( 29-56)
INTEGRAL Likelihood = −7.70 Transmembrane 90-106 ( 84-110)
INTEGRAL Likelihood = −1.97 Transmembrane 62-78 ( 62-78)
PERIPHERAL Likelihood = −1.22 199
modified ALOM score: 2.51
*** Reasoning Step: 3
----- Final Results -----
                            bacterial membrane --- Certainty = 0.5012(Affirmative) < succ>
                              bacterial outside --- Certainty = 0.0000(Not Clear) < succ>
                          bacterial cytoplasm --- Certainty = 0.0000(Not Clear) < succ>
```

[10995] The protein has homology with the following sequences in the databases:

[chemical structure]

[10996] SEQ ID 8954 (GBS277d) was expressed in E. coli as a His-fusion product. SDS-PAGE analysis of total cell extract is shown in FIG. 150 (lane 18; MW 51 kDa), in FIG. 151 (lane 17 & 18; MW 51 kDa) and in FIG. 182 (lane 12; MW 51 kDa). It was also expressed in E. coli as a GST-fusion product. SDS-PAGE analysis of total cell extract is shown in FIG. 151 (lane 15 & 16; MW 76 kDa) and in FIG. 58 (lane 5; MW 87 kDa).

[10997] GBS277d-His was purified as shown in FIG. 235, lane 8.

[10998] Based on this analysis, it was predicted that these proteins and their epitopes could be useful antigens for vaccines or diagnostics.

### EXAMPLE 2006

[10999] A DNA sequence (GBSx2116) was identified in S. agalactiae <SEQ ID 6205> which encodes the amino acid sequence <SEQ ID 6206>. This protein is predicted to be aspartate-semialdehyde dehydrogenase. Analysis of this protein sequence reveals the following:

```
Possible site: 42
>>> Seems to have an uncleavable N-term signal seq
----- Final Results -----
                            bacterial membrane --- Certainty = 0.0000(Not Clear) < succ>
                              bacterial outside --- Certainty = 0.0000(Not Clear) < succ>
                          bacterial cytoplasm --- Certainty = 0.000(Not Clear) < succ>
```

[11000] A related GBS nucleic acid sequence <SEQ ID 9831> which encodes amino acid sequence <SEQ ID 9832> was also identified.

[11001] The protein has homology with the following sequences in the GENPEPT database.

| >GP: AAA26850 GB: J02667 aspartate beta-semialdehyde dehydrogenase (EC | | | |
|---|---|---|---|
| 1.2.1.11) [Streptococcus mutans] | | | |
| Identities = 261/357 (73%), Positives = 304/357 (85%), Gaps = 1/357 (0%) | | | |
| Query: | 1 | MGYTVAIVGATGAVGTQMIRQLEQSNLPIEQVKLLSSSRSAGKILHFKDEAIRVEETTKE | 60 |
| | | MGYTVAIVGATGAVGT+MI+QLEQS LP+++V+LLSSSRSAGK+L +KD+ + VE TTK+ | |
| Sbjct: | 1 | MGYTVAIVGATGAVGTRMIQQLEQSTLPVDKVRLLSSSRSAGKVLQYKDQDVTVELTTKD | 60 |
| Query: | 61 | SFYDVDIALFSAGGSISAKFAPYAVKSGAVVVDNTSYFRQNPDVPLVVPEVNAHAMIGHN | 120 |
| | | SF VDIALFSAGGS+SAKFAPYAVK+GAVVVDNTS+FRQNPDVPLVVPEVNA+AM HN | |
| Sbjct: | 61 | SFEAVDIALFSAGGSVSAKFAPYAVKAGAVVVDNTSHFRQNPDVPLVVPEVNAYAMDAHN | 120 |
| Query: | 121 | GIIACPNCSTIQMMIALEPIRQKWGIERVIVSTYQAVSGSGARAVEETKEQLRQVLNDNL | 180 |
| | | GIIACPNCSTIQMM+ALEPIRQKWG+ RVIVSTYQAVSG+G A+ ET ++++V+ND + | |
| Sbjct: | 121 | GIIACPNCSTIQMMVALEPIRQKWGLSRVIVSTYQAVSGAGQSAINETVREIKEVVNDGV | 180 |
| Query: | 181 | SPDQLIATVLPCSSDQKHYPIAFNALPQIDIFTDNDYTYEEMKMTLETKKIMEDATIKVS | 240 |
| | | P + A + P D+KHYPIAFNAL QID+FTDNDYTYEEMKMT ETKKIME+ + VS | |
| Sbjct: | 181 | DPKAVHADIFPSGGDKKHYPIAFNALAQIDVFTDNDYTYEEMKMTNETKKIMEEPELPVS | 240 |
| Query: | 241 | ATCVRIPVLSGHSESIYIETKELASISEIKKAIANFPGAVLQDLPSQQIYPQAINAVGHR | 300 |
| | | A CVR+P+L HSE++YIETK++A I E+K AIA FPGAVL+D QIYPQA NAVG R | |
| Sbjct: | 241 | AHCVRVPILFSHSEAVYIETKDVAPIEEVKAAIAAFPGAVLEDDIKHQIYPQAANAVGSR | 300 |
| Query: | 301 | ETFVGRIRKDLDQENGVHMWVVSDNLLKGAAWNSVQIAETLHKNGLVKPAKELKFEL | 357 |
| | | TFVGRIRKDLD ENG+HMWVVSDNLLKGAAWNS+ A LH+ GLV+ ELKFEL | |
| Sbjct: | 301 | -TFVGRIRKDLDIENGIHMWVVSDNLLKGAAWNSIITANRLHERGLVRSTSELKFEL | 356 |

[11002] No corresponding DNA sequence was identified in S. pyogenes.

[11003] Based on this analysis, it was predicted that this protein and its epitopes, could be useful antigens for vaccines or diagnostics.

### EXAMPLE 2007

[11004] A DNA sequence (GBSx2117) was identified in S. agalactiae <SEQ ID 6207> which encodes the amino acid sequence <SEQ ID 6208>. Analysis of this protein sequence reveals the following:

| Possible site: 22 | | | | |
|---|---|---|---|---|
| >>> Seems to have no N-terminal signal sequence | | | | |
| | INTEGRAL | Likelihood = −2.66 | Transmembrane | 33-49 (33-49) |

```
----- Final Results -----
                              bacterial membrane --- Certainty = 0.2062(Affirmative) < succ>
                                bacterial outside --- Certainty = 0.0000(Not Clear) < succ>
                            bacterial cytoplasm --- Certainty = 0.0000(Not Clear) < succ>
```

[11005] The protein has no significant homology with any sequences in the GENPEPT database, but there is homology to SEQ ID 500.

[11006] Based on this analysis, it was predicted that this protein and its epitopes, could be useful antigens for vaccines or diagnostics.

### EXAMPLE 2008

[11007] A DNA sequence (GBSx2119) was identified in S. agalactiae <SEQ ID 6209> which encodes the amino acid sequence <SEQ ID 6210>. Analysis of this protein sequence reveals the following:

```
Possible site: 24
>>> Seems to have no N-terminal signal sequence
----- Final Results -----
                            bacterial cytoplasm --- Certainty = 0.3853(Affirmative) < succ>
                              bacterial membrane --- Certainty = 0.0000(Not Clear) < succ>
                                bacterial outside --- Certainty = 0.0000(Not Clear) < succ>
```

[11008] The protein has no significant homology with any sequences in the GENPEPT database.

[11009] No corresponding DNA sequence was identified in S. pyogenes.

[11010] Based on this analysis, it was predicted that this protein and its epitopes, could be useful antigens for vaccines or diagnostics.

### EXAMPLE 2009

[11011] A DNA sequence (GBSx2120) was identified in S. agalactiae <SEQ ID 6211> which encodes the amino acid sequence <SEQ ID 6212>. This protein is predicted to be unnamed protein product (clpP). Analysis of this protein sequence reveals the following:

```
Possible site: 45
>>> Seems to have no N-terminal signal sequence
----- Final Results -----
                            bacterial cytoplasm --- Certainty = 0.3883(Affirmative) < succ>
                              bacterial membrane --- Certainty = 0.0000(Not Clear) < succ>
                                bacterial outside --- Certainty = 0.0000(Not Clear) < succ>
```

[11012] A related GBS nucleic acid sequence <SEQ ID 10061> which encodes amino acid sequence <SEQ ID 10062> was also identified.

[11013] A related DNA sequence was identified in S. pyogenes <SEQ ID 6213> which encodes the amino acid sequence <SEQ ID 6214>. Analysis of this protein sequence reveals the following:

```
Possible site: 41
>>> Seems to have no N-terminal signal sequence
----- Final Results -----
                            bacterial cytoplasm --- Certainty = 0.2682(Affirmative) < succ>
                              bacterial membrane --- Certainty = 0.0000(Not Clear) < succ>
                                bacterial outside --- Certainty = 0.0000(Not Clear) < succ>
```

[11014] An alignment of the GAS and GBS proteins is shown below.

| Identities = 175/196 (89%), Positives = 187/196 (95%) | | | |
|---|---|---|---|
| Query: | 5 | MIPVVIEQTSRGERSYDIYSRLLKDRIIMLTGQVEDNMANSIIAQLLFLDAQDNTKDIYL | 64 |
| | | MIPVVIEQTSRGERSYDIYSRLLKDRIIMLTG VEDNMANS+IAQLLFLDAQDNTKDIYL | |
| Sbjct: | 1 | MIPVVIEQTSRGERSYDIYSRLLKDRIIMLTGPVEDNMANSVIAQLLFLDAQDNTKDIYL | 60 |
| Query: | 65 | YVNTPGGSVSAGLAIVDTMNFIKSDVQTIVMGMAASMGTIIASSGAKGKRFMLPNAEYMI | 124 |
| | | YVNTPGGSVSAGLAIVDTMNFIK+DVQTIVMGMAASMGT+IASSG KGKRFMLPNAEYMI | |
| Sbjct: | 61 | YVNTPGGSVSAGLAIVDTMNFIKADVQTIVMGMAASMGTVIASSGTKGKRFMLPNAEYMI | 120 |
| Query: | 125 | HQPMGGTGGGTQQSDMAIAAEHLLKTRHTLEKILADNSGQSIEKVHDDAERDRWMSAQET | 184 |
| | | HQPMGGTGGGTQQ+DMAIAAEHLLKTRH LEKILA N+G++I+++H DAERD WMSA+ET | |
| Sbjct: | 121 | HQPMGGTGGGTQQTDMAIAAEHLLKTRHRLEKILAQNAGKTIKQIHKDAERDYWMSAEET | 180 |
| Query: | 185 | LDYGFIDAIMENNNLQ | 200 |
| | | L YGFID IMENN L+ | |
| Sbjct: | 181 | LAYGFIDEIMENNELK | 196 |

[11015] Based on this analysis, it was predicted that these proteins and their epitopes could be useful antigens for vaccines or diagnostics.

### EXAMPLE 2010

[11016] A DNA sequence (GBSx2121) was identified in S. agalactiae <SEQ ID 6215> which encodes the amino acid sequence <SEQ ID 6216>. This protein is predicted to be uracil phosphoribosyltransferase (upp). Analysis of this protein sequence reveals the following:

| Possible site: 26 | | | | |
|---|---|---|---|---|
| >>> Seems to have no N-terminal signal sequence | | | | |
| | INTEGRAL | Likelihood = −0.43 | Transmembrane | 127-143 (127-144) |
| | INTEGRAL | Likelihood = −0.06 | Transmembrane | 72-88 (72-89) |
| | INTEGRAL | Likelihood = −0.06 | Transmembrane | 154-170 (154-170) |

```
----- Final Results -----
                              bacterial membrane --- Certainty = 0.1171(Affirmative) < succ>
                                bacterial outside --- Certainty = 0.0000(Not Clear) < succ>
                            bacterial cytoplasm --- Certainty = 0.0000(Not Clear) < succ>
```

[11017] A related GBS nucleic acid sequence <SEQ ID 10063> which encodes amino acid sequence <SEQ ID 10064> was also identified.

[11018] The protein has homology with the following sequences in the GENPEPT database.

| >GP: AAA26890 GB: L07793 uracil phosphoribosyltransferase | | | |
|---|---|---|---|
| [Streptococcus salivarius] | | | |
| Identities = 192/209 (91%), Positives 202/209 (95%) | | | |
| Query: | 1 | MGKFQVISHPLIQHKLSILRRTTTSTKDFRELVDEIAMLMGYEVSRDLPLEDVEIQTPVA | 60 |
| | | MGKFQVISHPLIQHKLSILRR TSTKDFRELV+EIAMLMGYEVSRDLPLE+VEIQTP+ | |
| Sbjct: | 1 | MGKFQVISHPLIQHKLSILRREDTSTKDFRELVNEIAMLMGYEVSRDLPLEEVEIQTPIT | 60 |
| Query: | 61 | TTVQKQLAGKKLAIVPILRAGIGMVDGFLSLVPAAKVGHIGMYRDEETFQPVEYLVKLPE | 120 |
| | | TVQKQL+GKKLAIVPILRAGIGMVDGFLSLVPAAKVGHIGMYRDEET +PVEYLVKLPE | |
| Sbjct: | 61 | KTVQKQLSGKKLAIVPILRAGIGMVDGFLSLVPAAKVGHIGMYRDEETLEPVEYLVKLPE | 120 |
| Query: | 121 | DIDQRQIFVVDPMLATGGSAILAVDSLKKRGAASIKFVCLVAAPEGVAALQEAHPDVDIY | 180 |
| | | DIDQRQIFVVDPMLATGGSAILAVDSLKKRGAA+IKFVCLVAAPEGV LQ+AHPD+DIY | |
| Sbjct: | 121 | DIDQRQIFVVDPMLATGGSAILAVDSLKKRGAANIKFVCLVAAPEGVKKLQDAHPDIDIY | 180 |
| Query: | 181 | TAALDEKLNEHGYIVPGLGDAGDRLFGTK | 209 |
| | | TA+LDEKLNE+GYIVPGLGDAGDRLFGTK | |
| Sbjct: | 181 | TASLDEKLNENGYIVPGLGDAGDRLFGTK | 209 |

[11019] A related DNA sequence was identified in S. pyogenes <SEQ ID 6217> which encodes the amino acid sequence <SEQ ID 6218>. Analysis of this protein sequence reveals the following:

| Possible site: 26 | | | | |
|---|---|---|---|---|
| >>> Seems to have no N-terminal signal sequence | | | | |
| | INTEGRAL | Likelihood = −0.59 | Transmembrane | 72-88 (72-89) |
| | INTEGRAL | Likelihood = −0.22 | Transmembrane | 127-143 (127-144) |

```
----- Final Results -----
                              bacterial membrane --- Certainty = 0.1235(Affirmative) < succ>
                                bacterial outside --- Certainty = 0.0000(Not Clear) < succ>
                            bacterial cytoplasm --- Certainty = 0.0000(Not Clear) < succ>
```

[11020] The protein is similar to uracil phosphoribosyltransferase from S. salivarius:

| >GP: AAA26890 GB: L07793 uracil phosphoribosyltransferase | | | |
|---|---|---|---|
| [Streptococcus salivarius] | | | |
| Identities = 191/209 (91%), Positives = 205/209 (97%) | | | |
| Query: | 1 | MGKCQVISHPLIQHKLSILRRQTTSTKDFRELVNEIAMLMGYEVSRDLPLEDVDIQTPVS | 60 |
| | | MGK QVISHPLIQHKLSILRR+ TSTKDFRELVNEIAMLMGYEVSRDLPLE+V+IQTP++ | |
| Sbjct: | 1 | MGKFQVISHPLIQHKLSILRREDTSTKDFRELVNEIAMLMGYEVSRDLPLEEVEIQTPIT | 60 |
| Query: | 61 | KTVQKQLAGKKLAIVPILRAGIGMVDGLLSLVPAAKVGHIGMYRNEETLEPVEYLVKLPE | 120 |
| | | KTVQKQL+GKKLAIVPILRAGIGMVDG LSLVPAAKVGHIGMYR+EETLEPVEYLVKLPE | |
| Sbjct: | 61 | KTVQKQLSGKKLAIVPILRAGIGMVDGFLSLVPAAKVGHIGMYRDEETLEPVEYLVKLPE | 120 |
| Query: | 121 | DINQRQIFLVDPMLATGGSAILAVDSLKKRGAANIKFVCLVAAPEGVKKLQEAHPDIDIF | 180 |
| | | DI+QRQIF+VDPMLATGGSAILAVDSLKKRGAANIKFVCLVAAPEGVKKLQ+AHPDIDI+ | |
| Sbjct: | 121 | DIDQRQIFVVDPMLATGGSAILAVDSLKKRGAANIKFVCLVAAPEGVKKLQDAHPDIDIY | 180 |
| Query: | 181 | TAALDDHLNEHGYIVPGLGDAGDRLFGTK | 209 |
| | | TA+LD+ LNE+GYIVPGLGDAGDRLFGTK | |
| Sbjct: | 181 | TASLDEKLNENGYIVPGLGDAGDRLFGTK | 209 |

[11021] An alignment of the GAS and GBS proteins is shown below.

| Identities = 190/209 (90%), Positives = 201/209 (95%) | | | |
|---|---|---|---|
| Query: | 1 | MGKFQVISHPLIQHKLSILRRTTTSTKDFRELVDEIAMLMGYEVSRDLPLEDVEIQTPVA | 60 |
| | | MGK QVISHPLIQHKLSILRR TTSTKDFRELV+EIAMLMGYEVSRDLPLEDV+IQTPV+ | |
| Sbjct: | 1 | MGKCQVISHPLIQHKLSILRRQTTSTKDFRELVNEIAMLMGYEVSRDLPLEDVDIQTPVS | 60 |
| Query: | 61 | TTVQKQLAGKKLAIVPILRAGIGMVDGFLSLVPAAKVGHIGMYRDEETFQPVEYLVKLPE | 120 |
| | | TVQKQLAGKKLAIVPILRAGIGMVDG LSLVPAAKVGHIGMYR+EET +PVEYLVKLPE | |
| Sbjct: | 61 | KTVQKQLAGKKLAIVPILRAGIGMVDGLLSLVPAAKVGHIGMYRNEETLEPVEYLVKLPE | 120 |
| Query: | 121 | DIDQRQIFVVDPMLATGGSAILAVDSLKKRGAASIKFVCLVAAPEGVAALQEAHPDVDIY | 180 |
| | | DI+QRQIF+VDPMLATGGSAILAVDSLKKRGAA+IKFVCLVAAPEGV LQEAHPD+DI+ | |
| Sbjct: | 121 | DINQRQIFLVDPMLATGGSAILAVDSLKKRGAANIKFVCLVAAPEGVKKLQEAHPDIDIF | 180 |
| Query: | 181 | TAALDEKLNEHGYIVPGLGDAGDRLFGTK | 209 |
| | | TAALD+ LNEHGYIVPGLGDAGDRLFGTK | |
| Sbjct: | 181 | TAALDDHLNEHGYIVPGLGDAGDRLFGTK | 209 |

[11022] Based on this analysis, it was predicted that these proteins and their epitopes could be useful antigens for vaccines or diagnostics.

### EXAMPLE 2011

[11023] A DNA sequence (GBSx2122) was identified in S. agalactiae <SEQ ID 6219> which encodes the amino acid sequence <SEQ ID 6220>. This protein is predicted to be hemolysin (patB). Analysis of this protein sequence reveals the following:

| Possible site: 48 | | | | |
|---|---|---|---|---|
| >>> Seems to have no N-terminal signal sequence | | | | |
| | INTEGRAL | Likelihood = −3.29 | Transmembrane | 88-104 (86-106) |

```
----- Final Results -----
                              bacterial membrane --- Certainty = 0.2317(Affirmative) < succ>
                                bacterial outside --- Certainty = 0.0000(Not Clear) < succ>
                            bacterial cytoplasm --- Certainty = 0.0000(Not Clear) < succ>
```

[11024] The protein has homology with the following sequences in the GENPEPT database.

| >GP: CAB15133 GB: Z99120 aminotransferase [Bacillus subtilis] | | | |
|---|---|---|---|
| Identities = 130/381 (34%), Positives = 221/381 (57%), Gaps = 4/381 (1%) | | | |
| Query: | 5 | DFTSLPERFSSNTIKWKAVQK---DQEILPLWIADMDFPIFPEMSEAIEDFSHQMVFGYD | 61 |
| | | +F ER + ++KW + + LP+W+ADNDF ++EA+++ +FGY | |
| Sbjct: | 2 | NFDKREERLGTQSVKWDKTGELFGVTDALPMWVADMDFRAPEAITEALKERLDHGIFGYT | 61 |
| Query: | 62 | SPKDSLYQAISNWEVQEHGYQFDKKSLLLIDGVVPAISVAIQAFTKEGDAVLINTPVYPP | 121 |
| | | +P A+ W HG++ + +S+ GVV A+S+A+QAFT+ GD V++ PVY P | |
| Sbjct: | 62 | TPDQKTKDAVCGWMQNRHGWKVNPESITFSPGVVTALSMAVQAFTEPGDQVVVQPPVYTP | 121 |
| Query: | 122 | FARTIKYNNRHLVSNSLLNNNQYFEIDFKQLEKDIIENNVKLYIFCSPHNPGGRVWTKGE | 181 |
| | | F ++ N RH++ N LL + + IDF+ LE + + +V L+I C+PHNP GR W++ + | |
| Sbjct: | 122 | FYHMVEKNGRHILHNPLLEKDGAYAIDFEDLETKLSDPSVTLFILCNPHNPSGRSWSRED | 181 |
| Query: | 182 | IQKIGDICKRYNVILVSDEIHQDLVLFDNVHHSFNTVDSSFKELSVILSSATKTFNIAGT | 241 |
| | | + K+G++C + V +VSDEIH DL+L+ + H F ++ F ++SV ++ +KTFNIAG | |
| Sbjct: | 182 | LLKLGELCLEHGVTVVSDEIHSDLMLYGHKHTPFASLSDDFADISVTCAAPSKTFNIAGL | 241 |
| Query: | 242 | KNSFAIIENEKLRSDFKKRQIANNQQEISSLGLLATEVAFTKEKQWLKALKMELEGSIEY | 301 |
| | | + S II + R+ F N +++ + A E A++K WL L +E ++ | |
| Sbjct: | 242 | QASAIIIPDRLKRAKFSASLQRNGLGGLNAFAVTAIEAAYSKGGPWLDELITYIEKNMNE | 301 |
| Query: | 302 | LYEQL-TQKTNIKVMKPEGTYLVWLDFSAYNLTHLEIQEKLRYDAKLILNDGLTFGKEGK | 360 |
| | | L T+ +K+MKP+ +YL+WLDFSAY L+ E+Q+++ K+IL G +G G+ | |
| Sbjct: | 302 | AEAFLSTELPKVKMMKPDASYLIWLDFSAYGLSDAELQQRMLKKGKVILEPGTKYGPGGE | 361 |
| Query: | 361 | KHARINVAAPRSVIEEAVLRL | 381 |
| | | R+N + +++ + R+ | |
| Sbjct: | 362 | GFMRLNAGCSLATLQDGLRRI | 382 |

[11025] There is also homology to SEQ ID 1006.

[11026] SEQ ID 6220 (GBS392) was expressed in E. coli as a His-fusion product. SDS-PAGE analysis of total cell extract is shown in FIG. 75 (lane 2; MW 46.4 kDa). It was also expressed in E. coli as a GST-fusion product. SDS-PAGE analysis of total cell extract is shown in FIG. 83 (lane 5; MW 71 kDa).

[11027] GBS392-GST was purified as shown in FIG. 217, lane 4.

[11028] Based on this analysis, it was predicted that this protein and its epitopes, could be useful antigens for vaccines or diagnostics.

### EXAMPLE 2012

[11029] A DNA sequence (GBSx2123) was identified in S. agalactiae <SEQ ID 6221> which encodes the amino acid sequence <SEQ ID 6222>. This protein is predicted to be rRNA methylase, SpoU family (cspR). Analysis of this protein sequence reveals the following:

```
Possible site: 39
>>> Seems to have no N-terminal signal sequence
----- Final Results -----
                            bacterial cytoplasm --- Certainty = 0.1436(Affirmative) < succ>
                              bacterial membrane --- Certainty = 0.0000(Not Clear) < succ>
                                bacterial outside --- Certainty = 0.0000(Not Clear) < succ>
```

[11030] The protein has homology with the following sequences in the GENPEPT database.

| >GP: AAB02738 GB: U58864 CspR [Bacillus subtilis] | | | |
|---|---|---|---|
| Identities = 84/155 (54%), Positives = 120/155 (77%), Gaps = 3/155 (1%) | | | |
| Query: | 19 | HIVLFEPQIPANTGNIARTCAATNAPLHIIRPMGFPIDDKKMKRAGLDYWDKLDVSFYDG | 78 |
| | | H+VL++P+IPANTGNIARTCAATN LH+IRP+GF DDK +KRAGLDYW+ ++V ++D | |
| Sbjct: | 4 | HVVLYQPEIPANTGNIARTCAATNTTLHLIRPLGFSTDDKMLKRAGLDYWEFVNVVYHDS | 63 |
| Query: | 79 | LEE-FMLSCRGKVHLISKFADKVYSDENYND-DQDHYFMFGREDKGLPETFMREHAEKAL | 136 |
| | | LEE F +GK I+KF + ++ +Y D D+D++F+FGRE GLP+ ++ + ++ L | |
| Sbjct: | 64 | LEELFEAYKKGKFFFITKFGQQPHTSFDYTDLDEDYFFVFGRETSGLPKDLIQNNMDRCL | 123 |
| Query: | 137 | RIPMNDEHVRSLNVSNTVCMIVYEALRQQSFPNLE | 171 |
| | | R+PM EHVRSLN+SNT ++VYEALRQQ++ +L+ | |
| Sbjct: | 124 | RLPMT-EHVRSLNLSNTAAILVYEALRQQNYRDLK | 157 |

[11031] A related DNA sequence was identified in S. pyogenes <SEQ ID 6223> which encodes the amino acid sequence <SEQ ID 6224>. Analysis of this protein sequence reveals the following:

```
Possible site: 51
>>> Seems to have no N-terminal signal sequence
----- Final Results -----
                            bacterial cytoplasm --- Certainty = 0.2236(Affirmative) < succ>
                              bacterial membrane --- Certainty = 0.0000(Not Clear) < succ>
                                bacterial outside --- Certainty = 0.0000(Not Clear) < succ>
```

[11032] An alignment of the GAS and GBS proteins is shown below.

| Identities = 135/182 (74%), Positives = 150/182 (82%) | | | |
|---|---|---|---|
| Query: | 1 | MNIETLTQKNHRSDSGRNHIVLFEPQIPANTGNIARTCAATNAPLHIIRPMGFPIDDKKM | 60 |
| | | M + L KN + RNHIVLF+PQIP NTGNIARTCAATNAPLHII+PMGFPIDD+KM | |
| Sbjct: | 13 | MTTKELINKNDKVKKARNHIVLFQPQIPQNTGNIARTCAATNAPLHIIKPMGFPIDDRKM | 72 |
| Query: | 61 | KRAGLDYWDKLDVSFYDGLEEFMLSCRGKVHLISKFADKVYSDENYNDDQDHYFMFGRED | 120 |
| | | KRAGLDYWDKL++ FYD LE+F+ C G++HLISKFA YS Y D HYF+FGRED | |
| Sbjct: | 73 | KRAGLDYWDKLELHFYDHLEQFINQCHGQLHLISKFAVNNYSQATYADGDSHYFLFGRED | 132 |
| Query: | 121 | KGLPETFMREHAEKALRIPMNDEHVRSLNVSNTVCMIVYEALRQQSFPNLELSHTYENDK | 180 |
| | | GLPE FMREHAEKALRIPMNDSHVRSLNVSNTVCM++YEALRQQ F LEL HTYE+DK | |
| Sbjct: | 133 | TGLPEDFMREHAEKALRIPMNDEHVRSLNVSNTVCMVIYEALRQQGFQGLELKHTYEHDK | 192 |
| Query: | 181 | LK | 182 |
| | | LK | |
| Sbjct: | 193 | LK | 194 |

[11033] Based on this analysis, it was predicted that these proteins and their epitopes could be useful antigens for vaccines or diagnostics.

### EXAMPLE 2013

[11034] A DNA sequence (GBSx2124) was identified in S. agalactiae <SEQ ID 6225> which encodes the amino acid sequence <SEQ ID 6226>. Analysis of this protein sequence reveals the following:

| Possible site: 60 | | | | |
|---|---|---|---|---|
| >>> Seems to have no N-terminal signal sequence | | | | |
| | INTEGRAL | Likelihood = −6.79 | Transmembrane | 82-98 (69-100) |
| | INTEGRAL | Likelihood = −6.48 | Transmembrane | 27-43 (24-47) |
| | INTEGRAL | Likelihood = −5.52 | Transmembrane | 132-148 (126-151) |
| | INTEGRAL | Likelihood = −5.10 | Transmembrane | 162-178 (161-185) |

```
----- Final Results -----
                              bacterial membrane --- Certainty = 0.3718(Affirmative) < succ>
                                bacterial outside --- Certainty = 0.0000(Not Clear) < succ>
                            bacterial cytoplasm --- Certainty = 0.0000(Not Clear) < succ>
```

[11035] A related GBS nucleic acid sequence <SEQ ID 9411> which encodes amino acid sequence <SEQ ID 9412> was also identified.

[11036] The protein has homology with the following sequences in the GENPEPT database.

| >GP: CAB13143 GB: Z99110 similar to amino acid permease | | | |
|---|---|---|---|
| [Bacillus subtilis] | | | |
| Identities = 46/143 (32%), Positives = 81/143 (56%), Gaps = 1/143 (0%) | | | |
| Query: | 3 | FAYDGWTIFVNIAPEVKNPKKNLPLAFVIGPALILLSYLAFFYGLTQILGASFIMTTGND | 62 |
| | | FAYDGW + + E+KNP+K LP A G ++ Y+ + L IL A+ I+T G + | |
| Sbjct: | 203 | FAYDGWILLAALGGEMKNPEKLLPRAMTGGLLIVTAIYIFINFALLHILSANEIVTLGEN | 262 |
| Query: | 63 | AINYAANIIFGPSVGRLLSFIVILSVLGVANGLLLGTMRLPQAFAERGWIK-SERMANIN | 121 |
| | | A + AA ++FG G+L+S +I+S+ G NG +L R+ A AER + +E++++++ | |
| Sbjct: | 263 | ATSTAATMLFGSIGGKLISVGIIVSIFGCLNGKVLSFPRVSFAMAERKQLPFAEKLSHVH | 322 |
| Query: | 122 | LKYQMSLPASLTVTAVAIFWLFV | 144 |
| | | ++ A A+A+ + + | |
| Sbjct: | 323 | PSFRTPWIAISFQIALALIMNLI | 345 |

[11037] There is also homology to SEQ ID 3114.

[11038] Based on this analysis, it was predicted that this protein and its epitopes, could be useful antigens for vaccines or diagnostics.

### EXAMPLE 2014

[11039] A DNA sequence (GBSx2125) was identified in S. agalactiae <SEQ ID 6227> which encodes the amino acid sequence <SEQ ID 6228>. Analysis of this protein sequence reveals the following:

```
Possible site: 20
>>> Seems to have no N-terminal signal sequence
----- Final Results -----
                            bacterial cytoplasm --- Certainty = 0.1849(Affirmative) < succ>
                              bacterial membrane --- Certainty = 0.0000(Not Clear) < succ>
                                bacterial outside --- Certainty = 0.0000(Not Clear) < succ>
```

[11040] A related GBS nucleic acid sequence <SEQ ID 9439> which encodes amino acid sequence <SEQ ID 9440> was also identified.

[11041] The protein has homology with the following sequences in the GENPEPT database.

| >GP: AAD23454 GB: AF117741 cochaperonin GroES | | | |
|---|---|---|---|
| [Streptococcus pneumoniae] | | | |
| Identities = 31/52 (59%), Positives = 42/52 (80%) | | | |
| Query: | 2 | GDGIRTLTGELVAPSVAEGDTVLVENGAGLEVKDGNEKVTVVRESDIVAVVK | 53 |
| | | G G+RTL G+LVAPSV GD VLVE AGL+VKDG+EK +V E++I+A+++ | |
| Sbjct: | 42 | GQGVRTLNGDLVAPSVKTGDRVLVEAHAGLDVKDGDEKYIIVGEANILAIIE | 93 |

[11042] A related DNA sequence was identified in S. pyogenes <SEQ ID 6229> which encodes the amino acid sequence <SEQ ID 6230>. Analysis of this protein sequence reveals the following:

```
Possible site: 50
>>> Seems to have no N-terminal signal sequence
----- Final Results -----
                            bacterial cytoplasm --- Certainty = 0.3290(Affirmative) < succ>
                              bacterial membrane --- Certainty = 0.0000(Not Clear) < succ>
                                bacterial outside --- Certainty = 0.0000(Not Clear) < succ>
```

[11043] An alignment of the GAS and GBS proteins is shown below.

| Identities = 29/49 (59%), Positives = 39/49 (79%) | | | |
|---|---|---|---|
| Query: | 4 | GIRTLTGELVAPSVAEGDTVLVENGAGLEVKDGNEKVTVVRESDIVAVV | 52 |
| | | G+RT+TG+ V PSV+ G VLVENG LEV +EKV+++RESDI+A+V | |
| Sbjct: | 60 | GVRTITGDSVLPSVSVGQEVLVENGHDLEVTVDDEKVSIIRESDIIAIV | 108 |

[11044] Based on this analysis, it was predicted that these proteins and their epitopes could be useful antigens for vaccines or diagnostics.

### EXAMPLE 2015

[11045] A DNA sequence (GBSx2126) was identified in S. agalactiae <SEQ ID 6231> which encodes the amino acid sequence <SEQ ID 6232>. Analysis of this protein sequence reveals the following:

```
Possible site: 13
>>> Seems to have no N-terminal signal sequence
----- Final Results -----
                            bacterial cytoplasm --- Certainty = 0.1272(Affirmative) < succ>
                              bacterial membrane --- Certainty = 0.0000(Not Clear) < succ>
                                bacterial outside --- Certainty = 0.0000(Not Clear) < succ>
```

[11046] The protein has homology with the following sequences in the GENPEPT database.

| >GP: AAD23455 GB: AF117741 chaperonin GroEL [Streptococcus pneumoniae] | | | |
|---|---|---|---|
| Identities = 472/539 (87%), Positives = 513/539 (94%), Gaps = 1/539 (0%) | | | |
| Query: | 1 | MAKDIKFSADARSAMVRGVDILADTVKVTLGPKGRNVVLEKAFGSPLITNDGVTIAKEIE | 60 |
| | | M+K+IKFS+DARSAMVRGVDILADTVKVTLGPK RNVVLEK+FGSPLITNDGVTIAKEIE | |
| Sbjct: | 1 | MSKEIKFSSDARSAMVRGVDILADTVKVTLGPKDRNVVLEKSFGSPLITNDGVTIAKEIE | 60 |
| Query: | 61 | LEDHFENMGAKLVSEVASKTNDIAGDGTTTATVLTQAIVREGLKNVTAGANPIGIRRGIE | 120 |
| | | LEDHFENMGAKLVSE+ASKTNDIAGDGTTTATVLTQAIVREG+KNVTAGANPIGIRRGIE | |
| Sbjct: | 61 | LEDHFENMGAKLVSEIASKTNDIAGDGTTTATVLTQAIVREGIKNVTAGANPIGIRRGIE | 120 |
| Query: | 121 | TAVSAAVEELKEIAQPVSGKEAIAQVAAVSSRSEKVGEYISEAMERVGNDGVITIEESRG | 180 |
| | | TAV+AAVE LK A PV+ KEAI+QVAAVSSRSEKVGEYISEAME+VG DGVITIEESRG | |
| Sbjct: | 121 | TAVAAAVEALKNNAIPVANKEAISQVAAVSSRSEKVGEYISEAMEKVGKDGVITIEESRG | 180 |
| Query: | 181 | METELEVVEGMQFDRGYLSQYMVTDNEKNVSELENPYILITDKKISNIQEILPLLEEVLK | 240 |
| | | METELEVVEGMQFDRGYLSQYMVTD+EKMV++LENPYILITDKKISNIQEILPLLE +L+ | |
| Sbjct: | 181 | METELEVVEGMQFDRGYLSQYMVTDSEKMVADLENPYILITDKKISNIQEILPLLESILQ | 240 |
| Query: | 241 | TNRPLLIIADDVDGEALPTLVLNKIRGTFNVVAVKAPGFGDRRKAMLEDIAILTGGTVVT | 300 |
| | | +NRPLLIIADDVDGEALPTLVLNKIRGTFNVVAVKAPGFGDRRKAMLEDIAILTGGTV+T | |
| Sbjct: | 241 | SNRPLLIIADDVDGEALPTLVLNKIRGTFNVVAVKAPGFGDRRKAMLEDIAILTGGTVIT | 300 |
| Query: | 301 | EDLGLDLKDATMQVLGQSAKVTVDKDSTVIVEGAGDSSAIANRVAIIKSQMEATTSDFDR | 360 |
| | | EDLGL+LKDAT++ LGQ+A+VTVDKDSTVIVEGAG+ AI++RVA+IKSQ+E TTS+FDR | |
| Sbjct: | 301 | EDLGLELKDATIEALGQAARVTVDKDSTVIVEGAGNPEAISHRVAVIKSQIETTTSEFDR | 360 |
| Query: | 361 | EKLQERLAKLAGGVAVIKVGAATETELKEMKLRIEDALNATRAAVEEGIVSGGGTALVNV | 420 |
| | | EKLQERLAKL+GGVAVIKVGAATETELKEMKLRIEDALNATRAAVEEGIV+GGGTAL NV | |
| Sbjct: | 361 | EKLQERLAKLSGGVAVIKVGAATETELKEMKLRIEDALNATRAAVEEGIVAGGGTALANV | 420 |
| Query: | 421 | IEKVAALKLNGDEETGRNIVLRALEEPVRQIAYNAGYEGSVIIERLKQSEIGTGFNAANG | 480 |
| | | I A L+L GDE TGRNIVLRALEEPVRQIA+NAG+EGS++I+RLK +E+G GFNAA G | |
| Sbjct: | 421 | IPAEATLELTGDEATGRNIVLRALEEPVRQIAHNAGFEGSIVIDRLKNAELGIGFNAATG | 480 |
| Query: | 481 | EWVDMVTTGIIDPVKVTRSALQNAASVASLILTTEAVVANKPEPEAPTAPAMDPSMMGG | 539 |
| | | EWV+M+ GIIDPVKV+RSALQNAASVASLILTTEAVVANKPEP AP APAMDPSMMGG | |
| Sbjct: | 481 | EWVNMIDQGIIDPVKVSRSALQNAASVASLILTTEAVVANKPEPVAP-APAMDPSMMGG | 538 |

[11047] A related DNA sequence was identified in S. pyogenes <SEQ ID 6233> which encodes the amino acid sequence <SEQ ID 6234>. Analysis of this protein sequence reveals the following:

```
Possible site: 15
>>> Seems to have no N-terminal signal sequence
----- Final Results -----
                            bacterial cytoplasm --- Certainty = 0.1070(Affirmative) < succ>
                              bacterial membrane --- Certainty = 0.0000(Not Clear) < succ>
                                bacterial outside --- Certainty = 0.0000(Not Clear) < succ>
```

[11048] An alignment of the GAS and GBS proteins is shown below.

| Identities = 491/543 (90%), Positives = 515/543 (94%), Gaps = 3/543 (0%) | | | |
|---|---|---|---|
| Query: | 1 | MAKDIKFSADARSAMVRGVDILADTVKVTLGPKGRNVVLEKAFGSPLITNDGVTIAKEIE | 60 |
| | | MAKDIKFSADAR+AMVRGVD+LADTVKVTLGPKGRNVVLEKAFGSPLITNDGVTIAKEIE | |
| Sbjct: | 3 | MAKDIKFSADARAAMVRGVDMLADTVKVTLGPKGRNVVLEKAFGSPLITNDGVTIAKEIE | 62 |
| Query: | 61 | LEDHFENMGAKLVSEVASKTNDIAGDGTTTATVLTQAIVREGLKNVTAGANPIGIRRGIE | 120 |
| | | LEDHFENMGAKLVSEVASKTNDIAGDGTTTATVLTQAIV EGLKNVTAGANPIGIRRGIE | |
| Sbjct: | 63 | LEDHFENMGAKLVSEVASKTNDIAGDGTTTATVLTQAIVHEGLKNVTAGANPIGIRRGIE | 122 |
| Query: | 121 | TAVSAAVEELKEIAQPVSGKEAIAQVAAVSSRSEKVGEYISEAMERVGNDGVITIEESRG | 180 |
| | | TA + AVE LK IAQPVSGKEAIAQVAAVSSRSEKVGEYISEAMERVGNDGVITIEESRG | |
| Sbjct: | 123 | TATATAVEALKAIAQPVSGKEAIAQVAAVSSRSEKVGEYISEAMERVGNDGVITIEESRG | 182 |
| Query: | 181 | METELEVVEGMQFDRGYLSQYMVTDNEKMVSELENPYILITDKKISNIQEILPLLEEVLK | 240 |
| | | METELEVVEGMQFDRGYLSQYMVTDNEKMV++LENP+ILITDKK+SNIQ+ILPLLEEVLK | |
| Sbjct: | 183 | METELEVVEGMQFDRGYLSQYMVTDNEKMVADLENPFILITDKKVSNIQDILPLLEEVLK | 242 |
| Query: | 241 | TNRPLLIIADDVDGEALPTLVLNKIRGTFNVVAVKAPGFGDRRKAMLEDIAILTGGTVVT | 300 |
| | | TNRPLLIIADDVDGEALPTLVLNKIRGTFNVVAVKAPGFGDRRKAMLEDIAILTGGTV+T | |
| Sbjct: | 243 | TNRPLLIIADDVDGEALPTLVLNKIRGTFNVVAVKAPGFGDRRKAMLEDIAILTGGTVIT | 302 |
| Query: | 301 | EDLGLDLKDATMQVLGQSAKVTVDKDSTVIVEGAGDSSAIANRVAIIKSQMEATTSDFDR | 360 |
| | | EDLGL+LKDATM LGQ+AK+TVDKDSTVIVEG+G S AIANR+A+IKSQ+E TTSDFDR | |
| Sbjct: | 303 | EDLGLELKDATMTALGQAAKITVDKDSTVIVEGSGSSEAIANRIALIKSQLETTTSDFDR | 362 |
| Query: | 361 | EKLQERLAKLAGGVAVIKVGAATETELKEMKLRIEDALNATRAAVEEGIVSGGGTALVNV | 420 |
| | | EKLQERLAKLAGGVAVIKVGA TET LKEMKLRIEDALNATRAAVEEGIV+GGGTAL+ V | |
| Sbjct: | 363 | EKLQERLAKLAGGVAVIKVGAPTETALKEMKLRIEDALNATRAAVEEGIVAGGGTALITV | 422 |
| Query: | 421 | IEKVAALKLNGDEETGRNIVLRALEEPVRQIAYNAGYEGSVIIERLKQSEIGTGFNAANG | 480 |
| | | IEKVAAL+L GD+ TGRNIVLRALEEPVRQIA NAGYEGSV+I++LK S GTGFNAA G | |
| Sbjct: | 423 | IEKVAALELEGDDATGRNIVLRALEEPVRQIALNAGYEGSVVIDKLKNSPAGTGFNAATG | 482 |
| Query: | 481 | EWVDMVTTGIIDPVKVTRSALQNAASVASLILTTEAVVANKPEP--EAPTAPA-MDPSMM | 537 |
| | | EWVDM+ TGIIDPVKVTRSALQNAASVASLILTTEAVVANKPEP AP PA MDP MM | |
| Sbjct: | 483 | EWVDMIKTGIIDPVKVTRSALQNAASVASLILTTEAVVANKPEPATPAPAMPAGMDPGMM | 542 |
| Query: | 538 | GGF | 540 |
| | | GGF | |
| Sbjct: | 543 | GGF | 545 |

[11049] Based on this analysis, it was predicted that these proteins and their epitopes could be useful antigens for vaccines or diagnostics.

### EXAMPLE 2016

[11050] A DNA sequence (GBSx2127) was identified in S. agalactiae <SEQ ID 6235> which encodes the amino acid sequence <SEQ ID 6236>. Analysis of this protein sequence reveals the following:

```
Possible site: 40
>>> Seems to have no N-terminal signal sequence
----- Final Results -----
                            bacterial cytoplasm --- Certainty = 0.3216(Affirmative) < succ>
                              bacterial membrane --- Certainty = 0.0000(Not Clear) < succ>
                                bacterial outside --- Certainty = 0.0000(Not Clear) < succ>
```

[11051] A related GBS nucleic acid sequence <SEQ ID 10247> which encodes amino acid sequence <SEQ ID 10248> was also identified.

[11052] The protein has homology with the following sequences in the GENPEPT database.

| >GP: BAB06113 GB: AP001515 transcriptional regulator (GntR family) | | | |
|---|---|---|---|
| [Bacillus halodurans] | | | |
| Identities = 50/171 (29%), Positives = 86/171 (50%), Gaps = 17/171 (9%) | | | |
| Query: | 21 | HVQVYNKIFNMIQDGTYSPGMQLPSEPELAGQLNVSRATLRKSLALLQEDHLVKNIRGKG | 80 |
| | | ++QV +K+ + ++ G Y G +LPSE EL+ QL VSRATLR++L LL+E+ +V G G | |
| Sbjct: | 10 | YLQVIDKLKHDMEAGVYEEGEKLPSEFELSKQLGVSRATLREALRLLEEEGVVVRRHGVG | 69 |
| Query: | 81 | NFIRENSSNLSENGYENRQHPIKTCLTSKITEVELE--------FRVEVPAEAITASLKQ | 132 |
| | | F+ ++ L G E +T I ++E +++E + | |
| Sbjct: | 70 | TFV--HTKPLFSAGIEELY-----SVTDMIRHADMEPGTIFLSSYQIEATDDDKRRFQTD | 122 |
| Query: | 133 | ETPVVVIADRWYHTDDGPLAYTLSFIPIELISDAEISLHDTKQLLNFIEEG | 183 |
| | | +++ +R D P+ Y L +P ELI + S+H+ +L+ +E G | |
| Sbjct: | 123 | NLDQLMMIERVRTADGVPIVYCLDKLPAELI--GQHSVHEINSILDHLESG | 171 |

[11053] A related DNA sequence was identified in S. pyogenes <SEQ ID 6237> which encodes the amino acid sequence <SEQ ID 6238>. Analysis of this protein sequence reveals the following:

```
Possible site: 34
>>> Seems to have no N-terminal signal sequence
----- Final Results -----
                            bacterial cytoplasm --- Certainty = 0.2297(Affirmative) < succ>
                              bacterial membrane --- Certainty = 0.0000(Not Clear) < succ>
                                bacterial outside --- Certainty = 0.0000(Not Clear) < succ>
```

[11054] An alignment of the GAS and GBS proteins is shown below.

| Identities = 154/244 (63%), Positives = 189/244 (77%) | | | |
|---|---|---|---|
| Query: | 7 | MPKNELNNKLNKLKHVQVYNKIFNMIQDGTYSPGMQLPSEPELAGQLNVSRATLRKSLAL | 66 |
| | | M N+L KL KLKHVQVYN IF +IQDGTYSPGMQLPSEPELA QLNVSR TLRKSLAL | |
| Sbjct: | 1 | MSTNDLTKKLKKLKHVQVYNTIFQLIQDGTYSPGMQLPSEPELARQLNVSRMTLRKSLAL | 60 |
| Query: | 67 | LQEDHLVKNIRGKGNFIRENSSNLSENGYENRQHPIKTCLTSKITEVELEFRVEVPAEAI | 126 |
| | | LQEDHL+KNIRGKGNFI + G+E QHPI L+S IT+VELE+R+EVP AI | |
| Sbjct: | 61 | LQEDHLIKNIRGKGNFILKTPETKYHQGFEYLQHPIYASLSSDITKVELEYRIEVPTVAI | 120 |
| Query: | 127 | TASLKQETPVVVIADRWYHTDDGPLAYTLSFIPIELISDAEISLHDTKQLLNFIEEGIYQ | 186 |
| | | TASLKQETPVV+I DRWYH+ + +AY+LSFIPIE+IS I+L+ + LL F+EE IY+ | |
| Sbjct: | 121 | TASLKQETPVVIIVDRWYHSQNKAIAYSLSFIPIEVISKYAINLNQEEPLLTFLEEKIYE | 180 |
| Query: | 187 | EGISSHSQSHLGYATSGNFSATKYTLSDHGQFILIQETIFKQEKILMCNKHYVPIEHFEL | 246 |
| | | G +SHS + +GY +GN++ATKYTLS++ FILIQET++ + IL+ KHYVP + F+L | |
| Sbjct: | 181 | SGKASHSCNQIGYTKTGNYTATKYTLSENSAFILIQETLYNGKDILVSTKHYVPADLFDL | 240 |
| Query: | 247 | SITS | 250 |
| | | + S | |
| Sbjct: | 241 | KVQS | 244 |

[11055] Based on this analysis, it was predicted that these proteins and their epitopes could be useful antigens for vaccines or diagnostics.

### EXAMPLE 2017

[11056] A DNA sequence (GBSx2128) was identified in S. agalactiae <SEQ ID 6239> which encodes the amino acid sequence <SEQ ID 6240>. This protein is predicted to be purine nucleoside phosphorylase (udp-1). Analysis of this protein sequence reveals the following:

```
Possible site: 47
>>> Seems to have no N-terminal signal sequence
----- Final Results -----
                            bacterial cytoplasm --- Certainty = 0.3910(Affirmative) < succ>
                              bacterial membrane --- Certainty = 0.0000(Not Clear) < succ>
                                bacterial outside --- Certainty = 0.0000(Not Clear) < succ>
```

[11057] The protein has homology with the following sequences in the GENPEPT database.

| >GP: AAC65977 GB: AE001270 uridine phosphorylase (udp) [Treponema | | | |
|---|---|---|---|
| pallidum] | | | |
| Identities = 145/246 (58%), Positives = 171/246 (68%) | | | |
| Query: | 11 | QYHLQIRPGDVGRYVIMPGDPKRCAKIAEHFDNAVLVADSREYVTYTGTLNGEKVSVTST | 70 |
| | | +YH+ ++ D+G YVI+PGDP R KIA+HF + V +REYVTYTGTL VSV ST | |
| Sbjct: | 10 | EYHIGLKASDIGHYVILPGDPARSEKIAQHFSHPHKVGHNREYVTYTGTLCETPVSVMST | 69 |
| Query: | 71 | GIGGPSASIAMEELKLCGADTFIRVGTCGGIDLDVKGGDIVIATGAIRMEGTSKEYAPIE | 130 |
| | | GIGGPS +I +EEL GA TFIRVGT GG+ D+ G +VIATGAIR EGTSKEYAP+E | |
| Sbjct: | 70 | GIGGPSTAIGVEELIHLGAHTFIRVGTSGGMQPDILAGTVVIATGAIRFEGTSKEYAPVE | 129 |
| Query: | 131 | FPAVADLEVTNALVNAAKKLGYTSHAGVVQCKDAFYGQHEPERMPVSYELLNKWEAWKRL | 190 |
| | | FPAV D VT AL +AA+ + GVVQCKD FYGQH P MPV EL KW AW | |
| Sbjct: | 130 | FPAVPDFTVTAALKHAAEDVQVRHALGVVQCKDNFYGQHSPHTMPVHAELTQKWHAWIAC | 189 |
| Query: | 191 | GTKASEMESAALFVAASHLGVRCGSDFLVVGNQERNALGMDNPMAHDTEAAIQVAVEALR | 250 |
| | | T ASEMESAALFV S VR G+ LV+GNQ R A G+++ HDTE AI+VAVEA++ | |
| Sbjct: | 190 | NTLASEMESAALFVLGSVRRVRTGAVLLVIGNQTRRAQGLEDIQVHDTENAIRVAVEAVK | 249 |
| Query: | 251 | TLIEND | 256 |
| | | LI D | |
| Sbjct: | 250 | LLITQD | 255 |

[11058] A related DNA sequence was identified in S. pyogenes <SEQ ID 6241> which encodes the amino acid sequence <SEQ ID 6242>. Analysis of this protein sequence reveals the following:

```
Possible site: 47
>>> Seems to have no N-terminal signal sequence
----- Final Results -----
                            bacterial cytoplasm --- Certainty = 0.3910(Affirmative) < succ>
                              bacterial membrane --- Certainty = 0.0000(Not Clear) < succ>
                                bacterial outside --- Certainty = 0.0000(Not Clear) < succ>
```

[11059] An alignment of the GAS and GBS proteins is shown below.

| Identities = 259/259 (100%), Positives = 259/259 (100%) | | | |
|---|---|---|---|
| Query: | 1 | MQNYSGEVGLQYHLQIRPGDVGRYVIMPGDPKRCAKIAEHFDNAVLVADSREYVTYTGTL | 60 |
| | | MQNYSGEVGLQYHLQIRPGDVGRYVIMPGDPKRCAKIAENFDNAVLVADSREYVTYTGTL | |
| Sbjct: | 1 | MQNYSGEVGLQYHLQIRPGDVGRYVIMPGDPKRCAKIAEHFDNAVLVADSREYVTYTGTL | 60 |
| Query: | 61 | NGEKVSVTSTGIGGPSASIAMEELKLCGADTFIRVGTCGGIDLDVKGGDIVIATGAIRME | 120 |
| | | NGEKVSVTSTGIGGPSASIAMEELKLCGADTFIRVGTCGGIDLDVKGGDIVIATGAIRME | |
| Sbjct: | 61 | NGEKVSVTSTGIGGPSASIAMEELKLCGADTFIRVGTCGGIDLDVKGGDIVIATGAIRME | 120 |
| Query: | 121 | GTSKEYAPIEFPAVADLEVTNALVNAAKKLGYTSHAGVVQCRDAFYGQHEPERMPVSYEL | 180 |
| | | GTSKEYAPIEFPAVADLEVTNALVNAAKKLGYTSHAGVVQCKDAFYGQHEPERMPVSYEL | |
| Sbjct: | 121 | GTSKEYAPIEFPAVADLEVTNALVNAAKKLGYTSHAGVVQCKDAFYGQHEPERMPVSYEL | 180 |
| Query: | 181 | LNKWEAWKRLGTKASEMESAALFVAASHLGVRCGSDFLVVGNQSRNALGMDNPMAHDTEA | 240 |
| | | LNKWEAWKRLGTKASEMESAALFVAASHLGVRCGSDFLVVGNQERNALGMDNPMAHDTEA | |
| Sbjct: | 181 | LNKWEAWKRLGTKASEMESAALFVAASHLGVRCGSDFLVVGNQERNALGMDNPMAHDTEA | 240 |
| Query: | 241 | AIQVAVEALRTLIENDKSQ | 259 |
| | | AIQVAVEALRTLIENDKSQ | |
| Sbjct: | 241 | AIQVAVEALRTLIENDKSQ | 259 |

[11060] Based on this analysis, it was predicted that these proteins and their epitopes could be useful antigens for vaccines or diagnostics.

### EXAMPLE 2018

[11061] A DNA sequence (GBSx2129) was identified in S. agalactiae <SEQ ID 6243> which encodes the amino acid sequence <SEQ ID 6244>. This protein is predicted to be nucleoside transporter. Analysis of this protein sequence reveals the following:

```
Possible site: 25
>>> Seems to have an uncleavable N-term signal seq
INTEGRAL Likelihood = −9.45 Transmembrane 35-51 ( 30-57)
INTEGRAL Likelihood = −9.29 Transmembrane 8-24 ( 1-28)
INTEGRAL Likelihood = −8.07 Transmembrane 388-404 ( 379-404)
INTEGRAL Likelihood = −7.27 Transmembrane 104-120 ( 100-127)
INTEGRAL Likelihood = −6.58 Transmembrane 259-275 ( 255-284)
INTEGRAL Likelihood = −4.35 Transmembrane 172-188 ( 171-190)
INTEGRAL Likelihood = −3.50 Transmembrane 200-216 ( 199-221)
INTEGRAL Likelihood = −2.18 Tranamembrane 352-368 ( 352-371)
----- Final Results -----
                              bacterial membrane --- Certainty = 0.4779(Affirmative) < succ>
                                bacterial outside --- Certainty = 0.0000(Not Clear) < succ>
                            bacterial cytoplasm --- Certainty = 0.0000(Not Clear) < succ>
```

[11062] A related GBS nucleic acid sequence <SEQ ID 10245> which encodes amino acid sequence <SEQ ID 10246> was also identified.

[11063] The protein has homology with the following sequences in the GENPEPT database.

| >GP:3AB05165 GB:AP001512 nucleoside transporter [Bacillus halodurans] | | | |
|---|---|---|---|
| Identities = 160/405 (39%), Positives = 256/405 (62%), Gaps = 8/405 (1%) | | | |
| Query: | 5 | MQFIYSIIGILLVLGIVYAISFNRKSVSLSLIGKALIVQFIIALILVRIPLGQQVVSVVS | 64 |
| | | M ++ ++GI++V I +A S NR+++ I L +Q + A+I+++IP GQ ++ ++ | |
| Sbjct: | 1 | MNILWGLLGIVVVFLIAFAFSTNRRAIKPRTILGGLAIQLLFAIIVLKIPAGQALLESLT | 60 |
| Query: | 65 | TGVTKVINCGQAGLNFVFGSLADSGAKTGFIFAIQTLGNIVFLSALVSLLYYVGILGFVV | 124 |
| | | V+ I+ G++FVFG + G+ GF+FAI L ++F SAL+S+LYY+GI+ FV+ | |
| Sbjct: | 61 | NVVLNIISYANEGIDFVFGGFFEEGSGVGFVFAINVLSVVIFFSALISILYYLGIMQFVI | 120 |
| Query: | 125 | KWIGKGVGKIMKSSEVESFVAVANMFLGQTDSPILVSKYLGRMTDSEIMVVLVSGMGSMS | 184 |
| | | K IG + ++ +S+ ES A AN+F+GQT++P++V YL +MT SE+ V+ G+ S++ | |
| Sbjct: | 121 | KIIGGALSWLLGTSKAESMSAAANIFVGQTEAPLVVKPYLPKNTQSELFAVMTGGLASVA | 180 |
| Query: | 185 | VSILGGYIALGIPMEYLLIASTMVPIGSILIAKILLPQTEPVQKI-DDIKMDNKGNNANV | 243 |
| | | S+L GY LG+P++YLL AS M +++AK+++P+TE DD K+ +N+ | |
| Sbjct: | 181 | GSVLIGYSLLGVPLQYLLAASFMAAPAGLIMAKMIMPETEKTTDAEDDFKLAKDEESTNL | 240 |
| Query: | 244 | IDAIAEGASTGAQMAFSIGASLIAFVGLVSLINMMLSGLG-------IRLEQIFSYVFAP | 296 |
| | | IDA A GASTG + +I A L+AFV L++LIN +L +G + LE I YVFAP | |
| Sbjct: | 241 | IDAAANGASTGLMLVLNIAANLLAFVALIALINGILGWIGGLFGASQLSLELILGYVFAP | 300 |
| Query: | 297 | FGFLMGFDHKNILLEGNLLGSKLILNEFVSFQQLGDLIKSLDYRTALVATISLCGFANLS | 356 |
| | | F++G L G+ +G KL++NEFV++ I++L + +V + +LCGFAN S | |
| Sbjct: | 301 | LAFVIGIPWAEALQAGSYIGQKLVVNEFVAYLSFAPEIENLSDKAVMVISFALCGFANFS | 360 |
| Query: | 357 | SLGICVSGIAVLCPEKRGTLARLVFRANIGGIAVSMLSAFIVGIV | 401 |
| | | SLGI + G+ L P +R +ARL RA++ G S+LSA I G++ | |
| Sbjct: | 361 | SLGILLGGLGKLAPSRRPDIARLGLRAILAGTLASLLSASIAGML | 405 |

[11064] A related DNA sequence was identified in S. pyogenes <SEQ ID 6245> which encodes the amino acid sequence <SEQ ID 6246>. Analysis of this protein sequence reveals the following:

```
Possible site: 25
>>> Seems to have an uncleavable N-term signal seq
INTEGRAL Likelihood = −9.45 Transmembrane 35-51 ( 30-57)
INTEGRAL Likelihood = −9.29 Transmembrane 8-24 ( 1-28)
INTEGRAL Likelihood = −8.07 Transmembrane 388-404 ( 379-404)
INTEGRAL Likelihood = −7.27 Transmembrane 104-120 ( 100-127)
INTEGRAL Likelihood = −6.58 Transmembrane 259-275 ( 255-284)
INTEGRAL Likelihood = −4.35 Transmembrane 172-188 ( 171-190)
INTEGRAL Likelihood = −3.50 Transmembrane 200-216 ( 199-221)
INTEGRAL Likelihood = −2.18 Tranamembrane 352-368 ( 352-371)
----- Final Results -----
                              bacterial membrane --- Certainty = 0.4779(Affirmative) < succ>
                                bacterial outside --- Certainty = 0.0000(Not Clear) < succ>
                            bacterial cytoplasm --- Certainty = 0.0000(Not Clear) < succ>
```

[11065] The protein has homology with the following sequences in the databases:

| >GP:BAB05165 GB:AP001512 nucleoside transporter [Bacillus halodurans] | | | |
|---|---|---|---|
| Identities = 160/405 (39%), Positives = 257/405 (62%), Gaps = 8/405 (1%) | | | |
| Query: | 5 | MQFIYSIIGILLVLGIVYAISFNRKSVSLSLIGKALIVQFIIALILVRIPLGQQIVSVVS | 64 |
| | | M ++ ++GI++V I +A S NR+++ I L +Q + A+I+++IP GQ ++ ++ | |
| Sbjct: | 1 | MNILWGLLGIVVVFLIAFAFSTNRRAIKPRTILGGLAIQLLFAIIVLKIPAGQALLESLT | 60 |
| Query: | 65 | TGVTSVINCGQAGLNFVFGSLADSGAKTGFIFAIQTLGNIVFLSALVSLLYYVGILGFVV | 124 |
| | | V ++I+ G++FVFG + G+ GF+FAI L ++F SAL+S+LYY+GI+ FV+ | |
| Sbjct: | 61 | NVVLNIISYANEGIDFVFGGFFEEGSGVGFVFAINVLSVVIFFSALISILYYLGIMQFVI | 120 |
| Query: | 125 | KWIGKGVGKIMKSSEVESFVAVANHFLGQTDSPILVSKYLGRNTDSEIMVVLVSGMGSMS | 184 |
| | | K IG + +++S+ES A AN+F+GQT++P++V YL +MT SE+ V+ G+S++ | |
| Sbjct: | 121 | KIIGGALSWLLGTSKAESMSAAANIFVGQTEAPLVVKPYLPKMTQSELFAVMTGGLASVA | 180 |
| Query: | 185 | VSILGGYIALGIPMEYLLIASTMVPIGSILIAKILLPQTEPVQKI-DDIKMDNKGNNANV | 243 |
| | | S+L GY LG+P++YLL AS M +++AK+++P+TE DD K+ + N+ | |
| Sbjct: | 181 | GSVLIGYSLLGVPLQYLLAASFMAAPAGLIMAKMIMPETEKTTDAEDDFKLAKDEESTNL | 240 |
| Query: | 244 | IDAIAEGASTGAQMAFSIGASLIAFVGLVSLINMNLSGLG-------IRLEQIFSYVFAP | 296 |
| | | IDA A GASTG + +I A L+AFV L++LIN +L +G + LE I YVFAP | |
| Sbjct: | 241 | IDAAANGASTGLMLVLNIAAMLLAFVALIALINGILGWIGGLFGASQLSLELILGYVFAP | 300 |
| Query: | 297 | EGFLMGFDHKNILLEGNLLGSKLILNEFVSFQQLGHLIKSLDYRTALVATISLCGFANLS | 356 |
| | | F++G L G+ +G KL++NEFV++ I++L + +V + +LCGFAN S | |
| Sbjct: | 301 | LAFVIGIPWAEALQAGSYIGQKLVVNEFVAYLSFAPEIENLSOKAVMVISFALCGFANFS | 360 |
| Query: | 357 | SLGICVSGIAVLCPEKRSTLARLVFRAMIGGIAVSMLSAFIVGIV | 401 |
| | | SLGI + G+ L P +R +ARL RA++ G S+LSA I G++ | |
| Sbjct: | 361 | SLGILLGGLGKLAPSRRPDIARLGLRAILAGTLASLLSASIAGML | 405 |

[11066] An alignment of the GAS and GBS proteins is shown below.

| Identities = 399/404 (98%), Positives = 401/404 (98%) | | | |
|---|---|---|---|
| Query: | 1 | MEVIMQFIYSIIGILLVLGIVYAISFNRKSVSLSLIGKALIVQFIIALILVRIPLGQQVV | 60 |
| | | +EVIMQFIYSIIGILLVLGIVYAISFNRKSVSLSLIGKALIVQFIIALILVRIPLGQQ+V | |
| Sbjct: | 1 | LEVIMQFIYSIIGILLVLGIVYAISFNRKSVSLSLIGKALIVQFIIALILVRIPLGQQIV | 60 |
| Query: | 61 | SVVSTGVTKVINCGQAGLNFVFGSLADSGAKTGFIFAIQTLGNIVFLSALVSLLYYVGIL | 120 |
| | | SVVSTGVT VINCGQAGLNFVFGSLADSGAKTGFIFAIQTLGNIVFLSALVSLLYYVGIL | |
| Sbjct: | 61 | SVVSTGVTSVINCGQAGLNFVFGSLADSGAKTGFIFAIQTLGNIVFLSALVSLLYYVGIL | 120 |
| Query: | 121 | GFVVKWIGKGVGKIMKSSEVESFVAVANMFLGQTDSPILVSKYLGRMTDSEIMVVLVSGN | 180 |
| | | GFVVKWIGKGVGKIMKSSEVESFVAVANMFLGQTDSPILVSKYLGRMTDSEIMVVLVSGM | |
| Sbjct: | 121 | GFVVKWIGKGVGKIMKSSEVESFVAVANMFLGQTDSPILVSRYLGRMTDSEIMVVLVSGM | 180 |
| Query: | 181 | GSMSVSILGGYIALGIPMEYLLIASTMVPIGSILIAKILLPQTEPVQKIDDIKMDNKGNN | 240 |
| | | GSMSVSILGGYIALGIPMEYLLIASTMVPIGSILIAKILLPQTEPVQKIDDIKMDNKGNN | |
| Sbjct: | 181 | GSMSVSILGGYIALGIPMEYLLIASTMVPIGSILIAKILLPQTEPVQKIDDIKMDNKGNN | 240 |
| Query: | 241 | ANVIDAIAEGASTGAQMAFSIGASLIAFVGLVSLINMMLSGLGIRLEQIFSYVFAPFGFL | 300 |
| | | ANVIDAIAEGASTGAQMAFSIGASLIAFVGLVSLINMMLSGLGIRLEQIFSYVFAPFGFL | |
| Sbjct: | 241 | ANVIDAIAEGASTGAQMAFSIGASLIAFVGLVSLINMMLSGLGIRLEQIFSYVFAPFGFL | 300 |
| Query: | 301 | MGFDHKNILLEGNLLGSKLILNEFVSFQQLGDLIKSLDYRTALVATISLCGFANLSSLGI | 360 |
| | | MGFDHKNILLEGNLLGSKLILNEFVSFQQLG LIKSLDYRTALVATISLCGFANLSSLGI | |
| Sbjct: | 301 | MGFDHKNILLEGNLLGSKLILNEFVSFQQLGHLIKSLDYRTALVATISLCGFANLSSLGI | 360 |
| Query: | 361 | CVSGIAVLCPEKRGTLARLVFRAMIGGIAVSMLSAFIVGIVTLF | 404 |
| | | CVSGIAVLCPEKR TLARLVFRAMIGGIAVSMLSAFIVGIVTLF | |
| Sbjct: | 361 | CVSGIAVLCPEKRSTLARLVFRAMIGGIAVSMLSAFIVGIVTLF | 404 |

[11067] A related GBS gene <SEQ ID 8955> and protein <SEQ ID 8956> were also identified. Analysis of this protein sequence reveals the following:

```
Lipop: Possible site: −1 Crend: 1
McG: Discrim Score: 13.83
GvH: Signal Score (7.5): 2.63
Possible site: 25
>>> Seems to have an uncleavable N-term signal seq
INTEGRAL Likelihood = −9.45 Transmembrane 35-51 ( 30-57)
INTEGRAL Likelihood = −9.29 Transmembrane 8-24 ( 1-28)
INTEGRAL Likelihood = −8.07 Transmembrane 388-404 ( 379-404)
INTEGRAL Likelihood = −7.27 Transmembrane 104-120 ( 100-127)
INTEGRAL Likelihood = −6.58 Transmembrane 259-275 ( 255-284)
INTEGRAL Likelihood = −4.35 Transmembrane 172-188 ( 171-190)
INTEGRAL Likelihood = −3.50 Transmembrane 200-216 ( 199-221)
INTEGRAL Likelihood = −2.18 Tranamembrane 352-368 ( 352-371)
PERIPHERAL Likelihood = 3.82 286
modified ALON score: 2.39
*** Reasoning Step: 3
----- Final Results -----
                              bacterial membrane --- Certainty = 0.4779(Affirmative) < succ>
                                bacterial outside --- Certainty = 0.0000(Not Clear) < succ>
                            bacterial cytoplasm --- Certainty = 0.0000(Not Clear) < succ>
```

[11068] The protein has homology with the following sequences in the databases:

[chemical structure]

[11069] Based on this analysis, it was predicted that these proteins and their epitopes could be useful antigens for vaccines or diagnostics.

### EXAMPLE 2019

[11070] A DNA sequence (GBSx2130) was identified in S. agalactiae <SEQ ID 6247> which encodes the amino acid sequence <SEQ ID 6248>. This protein is predicted to be deoxyribose-phosphate aldolase (deoC). Analysis of this protein sequence reveals the following:

```
Possible site: 49
>>> Seems to have no N-terminal signal sequence
----- Final Results -----
                            bacterial cytoplasm --- Certainty = 0.2196(Affirmative) < succ>
                              bacterial membrane --- Certainty = 0.0000(Not Clear) < succ>
                                bacterial outside --- Certainty = 0.0000(Not Clear) < succ>
```

[11071] The protein has homology with the following sequences in the GENPEPT database.

| >GP: CAA81646 GB: Z27121 deoxyribose aldolase [Mycoplasma hominis] | | | |
|---|---|---|---|
| Identities = 99/199 (49%), Positives = 140/199 (69%), Gaps = 1/199 (0%) | | | |
| Query: | 5 | DILKTVDHTLLATTATWPEIQTILDDAMAYETASACIPASYVKKAAEYVSGK-LAICTVI | 63 |
| | | ++ K +DHT L+ +AT +I ++ +A+ Y+ S CI SYVK A E + + +CTVI | |
| Sbjct: | 3 | ELNKYIDHTNLSPSATSKDIDKLIQEAIKYDFKSVCIAPSYVKYAKEALKNSDVLVCTVI | 62 |
| Query: | 64 | GFPNGYSTTAAKVFECQDAIKNGADEIDMVINLTDVKNGDFDTVEEEIRQIKAACQDHIL | 123 |
| | | GFP GY+ T+ KV+E + A+++GADEIDMVIN+ K+G ++ V EI+ IK AC L | |
| Sbjct: | 63 | GFPLGYNATSVKVYETKIAVEHGADEIDMVINVGRFKDGQYEYVLNEIKAIKEACNGKTL | 122 |
| Query: | 124 | KVIVETCQLTKEELIELCGVVTRSGADFIKTSTGFSTAGATFEDVEVMAKYVGEGVKIKA | 183 |
| | | KVIVET LTK ELI++ +V +SGADFIKTSTGFS GA+FED++ M + G+ + IKA | |
| Sbjct: | 123 | KVIVETALLTKAELIKITELVMQSGADFIKTSTGFSYRGASFEDIQTMKETCGDKLLIKA | 182 |
| Query: | 184 | AGGISSLSDAEKFIALGAS | 202 |
| | | +GGI +L DA++ I LGA+ | |
| Sbjct: | 183 | SGGIKNLADAQEMIRLGAN | 201 |

[11072] A related DNA sequence was identified in S. pyogenes <SEQ ID 6249> which encodes the amino acid sequence <SEQ ID 6250>. Analysis of this protein sequence reveals the following:

```
Possible site: 49
>>> Seems to have no N-terminal signal sequence
----- Final Results -----
                            bacterial cytoplasm --- Certainty = 0.2196(Affirmative) < succ>
                              bacterial membrane --- Certainty = 0.0000(Not Clear) < succ>
                                bacterial outside --- Certainty = 0.0000(Not Clear) < succ>
```

[11073] An alignment of the GAS and GBS proteins is shown below.

| Identities = 211/223 (94%), Positives = 217/223 (96%) | | | |
|---|---|---|---|
| Query: | 1 | MEVKDILKTVDHTLLATTATWPEIQTILDDAMAYETASACIPASYVKKAAEYVSGKLAIC | 60 |
| | | +EVKDILKTVDHTLLATTATWPEIQTILDDAMAYETASACIPASYVKKAAEYVSGKLAIC | |
| Sbjct: | 1 | VEVKDILKTVDHTLLATTATWPEIQTILDDAMAYETASACIPASYVKKAAEYVSGKLAIC | 60 |
| Query: | 61 | TVIGFPNGYSTTAAKVFECQDAIKNGADEIDMVINLTDVKNGDFDTVEEEIRQIKAACQD | 120 |
| | | TVIGFPNGYSTTAAKVFECQDAI+NGADEIDMVINLTDVKNGDFDTVEEEIRQIKA CQD | |
| Sbjct: | 61 | TVIGFPNGYSTTAAKVFECQDAIQNGADEIDMVINLTDVKNGDFDTVEEEIRQIKAKCQD | 120 |
| Query: | 121 | HILKVIVETCQLTKEELIELCGVVTRSGADFIKTSTGFSTAGATFEDVEVMAKYVGEGVK | 180 |
| | | HILKVIVETCQLTKEELIELCGVVTRSGADFIKTSTGFSTAGATFEDVEVMAKYVGEGVK | |
| Sbjct: | 121 | HILKVIVETCQLTKEELIELCGVVTRSGADFIKTSTGFSTAGATFEDVEVMAKYVGEGVK | 180 |
| Query: | 181 | IKAAGGISSLEDAEKFIALGASRLGTSRIIKIVKNQKVEEGTY | 223 |
| | | IKAAGGISSLEDA+ FIALGASRLGTSRIIKIVKN+ + +Y | |
| Sbjct: | 181 | IKAAGGISSLEDAKTFIALGASRLGTSRIIKIVKNEATKTDSY | 223 |

[11074] Based on this analysis, it was predicted that these proteins and their epitopes could be useful antigens for vaccines or diagnostics.

### EXAMPLE 2020

[11075] A DNA sequence (GBSx2131) was identified in S. agalactiae <SEQ ID 6251> which encodes the amino acid sequence <SEQ ID 6252>. This protein is predicted to be phosphopentomutase (deoB). Analysis of this protein sequence reveals the following:

```
Possible site: 22
>>> Seems to have no N-terminal signal sequence
----- Final Results -----
                            bacterial cytoplasm --- Certainty = 0.0546(Affirmative) < succ>
                              bacterial membrane --- Certainty = 0.0000(Not Clear) < succ>
                                bacterial outside --- Certainty = 0.0000(Not Clear) < succ>
```

[11076] The protein has homology with the following sequences in the GENPEPT database.

| >GP: AAC45496 GB: U80410 phosphopentomutase [Lactococcus lactis subsp. | | | |
|---|---|---|---|
| cremoris] | | | |
| Identities = 275/408 (67%), Positives = 325/408 (79%), Gaps = 7/408 (1%) | | | |
| Query: | 3 | QFDRIHLVVLDSVGIGAAPDANDFVNAGVP------DGASDTLGHISKTVGLAVPNMAKI | 56 |
| | | +F RIHLVV+DSVGIGAAFDA+ F N V D SDT+GHIS+ GL VPN+ K+ | |
| Sbjct: | 4 | KFGRIHLVVMDSVGIGAAPDADKFFNHDVETHEAINDVKSDTIGHISEIRGLDVPNLQKL | 63 |
| Query: | 57 | GLGNIPRPQALKTVPAEENPSGYATKLQEVSLGKDTMTGMWEIMGLNITEPFDTFWNGFP | 116 |
| | | G GNIPR LKT+PA + P+ Y TKL+E+S GKDTMTGHWEIMGLNI PF T+ G+P | |
| Sbjct: | 64 | GWGNIPRESPLKTIPAAQKPAAYVTKLEEISKGKDTMTGHWEIMGLNIQTPFPTYPEGYP | 123 |
| Query: | 117 | EDIITKIEDFSGRKVIREANKPYSGTAVIDDFGPRQMETGELIIYTSADPVLQIAAHEDI | 176 |
| | | ED++ KIE+FSGRK+IREANKPYSGTAVI+DFGPRQ+ETGELIIYTSADPVLQIAAHED+ | |
| Sbjct: | 124 | EDLLEKIEEFSGRKIIREANKPYSGTAVIEDFGPRQLETGELIIYTSADPVLQIAAHEDV | 183 |
| Query: | 177 | IPLEELYRICEYARSITMERPALL-GRIIARPYVGEPGNFTRTANRHDYAVSPFEDTVLN | 235 |
| | | I EELY+ICEY RSIT+E ++ GRIIARPYVGE GNF RT R DYA+SPF +TVL | |
| Sbjct: | 184 | ISREELYKICEYVRSITLEGSGIMIGRIIARPYVGEAGNFERTDGRRDYALSPFAETVLE | 243 |
| Query: | 236 | KLDQAGIDTYAVGKINDIFNGSGINHDMGHNKSNSHGIDTLIKTMGLSEFEKGFSFTNLV | 295 |
| | | KL +AGIDTY+VGKI+DIFN G+ +DMGHN ++ G+D L+K M +EF +GFSFTNLV | |
| Sbjct: | 244 | KLYKAGIDTYSVGKISDIFNTVGVKYDMGHNHNDMDGVDRLLKAMTKTEFTEGFSFTNLV | 303 |
| Query: | 296 | DFDALYGHRRDPHGYRDCLHEFDERLPEIISAMRDKDLLLITADHGNDPTYAGTDHTREY | 355 |
| | | DFDA YGHRRD GY + +FD RLPEII AM++ DLL+ITADHGNDP+Y GTDHTREY | |
| Sbjct: | 304 | DFDAKYGHRRDVEGYGKAIEDFDGRLPEIIDAMKEDDLLMITADHGNDPSYVGTDHTREY | 363 |
| Query: | 356 | IPLLAYSPSFTGNGLIPVGHFADISATVADNFGVDTAMIGESFLQDLV | 403 |
| | | IPL+ +S SF ++PVGHFADISAT+A+NF V A GESFL LV | |
| Sbjct: | 364 | IPLVIFSKSFKEPKVLPVGHFADISATIAENFSVKKAQTGESFLDALV | 411 |

[11077] There is also homology to SEQ ID 2740:

| Identities = 348/402 (86%), Positives = 374/402 (92%) | | | |
|---|---|---|---|
| Query: | 1 | MSQFDRIHLVVLDSVGIGAAPDANDFVNAGVPDGASDTLGHISKTVGLAVPNMAKIGLGN | 60 |
| | | MS+F+RIHLVVLDSVGIGAAPDA+ F NAGV D SDTLGHIS+ GL+VPNMAKIGLGN | |
| Sbjct: | 1 | MSKFNRIHLVVLDSVGIGAAPDADKFFNAGVADTDSDTLGHISEAAGLSVPNMAKIGLGN | 60 |
| Query: | 61 | IPRPQALKTVPAEENPSGYATKLQEVSLGKDTMTGHWEIMGLNITEPFDTFWNGFPEDII | 120 |
| | | I RP LKTVP E+NP+GY TKL+EVSLGKDTMTGHWEIMGLNITEPFDTFWNGFPE+I+ | |
| Sbjct: | 61 | ISRPIPLKTVPTEDNPTGYVTKLEEVSLGKDTMTGHWEIMGLNITEPFDTFWNGFPEEIL | 120 |
| Query: | 121 | TKIEDFSGRKVIREANKPYSGTAVIDDFGPRQMETGELIIYTSADPVLQIAAHEDIIPLE | 180 |
| | | TKIE+FSGRK+IREANKPYSGTAVIDDFGPRQMETGELI+YTSADPVLQIAAHEDIIP+E | |
| Sbjct: | 121 | TKIEEFSGRKIIREANKPYSGTAVIDDFGPRQMETGELIVYTSADPVLQIAAHEDIIPVE | 180 |
| Query: | 181 | ELYRICEYARSITMERPALLGRIIARPYVGEPGNFTRTANRHDYAVSPFEDTVLNKLDQA | 240 |
| | | ELY+ICEYARSIT+ERPALLGRIIARPYVG+PGNFTRTANRHDYAVSPF+DTVLNKL A | |
| Sbjct: | 181 | ELYKICEYARSITLERPALLGRIIARPYVGDPGNFTRTANRHDYAVSPFQDTVLNKLADA | 240 |
| Query: | 241 | GIDTYAVGKINDIFNGSGINHDMGHNKSNSHGIDTLIKTMGLSEFEKGFSFTNLVDFDAL | 300 |
| | | G+ TYAVGKINDIFNGSGI +DMGHNKSNSHGIDTLIKT+ L EF KGFSFTNLVDFDA | |
| Sbjct: | 241 | GVPTYAVGKINDIFNGSGITNDMGHNKSNSHGIDTLIKTLQLPEFTKGFSFTNLVDFDAN | 300 |
| Query: | 301 | YGHRRDPHGYRDCLHEFDERLPEIISAMRDKDLLLITADHGNDPTYAGTDHTREYIPLLA | 360 |
| | | +GHRRDP GYRDCLHEFD RLPEII+ M++ DLLLITADHGNDPTYAGTDHTREYIPLLA | |
| Sbjct: | 301 | FGHRRDPEGYRDCLHEFDNRLPEIIANMKEDDLLLITADHGNDPTYAGTDHTREYIPLLA | 360 |
| Query: | 361 | YSPSFTGNGLIPVGHFADISATVADNFGVDTAMIGESFLQDL | 402 |
| | | YS SFTGNGLIP GHFADISATVA+NFGVDTANIGESFL L | |
| Sbjct: | 361 | YSVSFTGNGLIPQGHFADISATVAENFGVDTAMIGESFLSHL | 402 |

[11078] Based on this analysis, it was predicted that this protein and its epitopes, could be useful antigens for vaccines or diagnostics.

### EXAMPLE 2021

[11079] A DNA sequence (GBSx2132) was identified in S. agalactiae <SEQ ID 6253> which encodes the amino acid sequence <SEQ ID 6254>. Analysis of this protein sequence reveals the following:

| Possible site: 35 | | | | |
|---|---|---|---|---|
| >>> Seems to have an uncleavable N-term signal seq | | | | |
| | INTEGRAL | Likelihood = −12.05 | Transmembrane | 9-25(4-35) |

```
----- Final Results -----
                              bacterial membrane --- Certainty = 0.5819(Affirmative) < succ>
                                bacterial outside --- Certainty = 0.0000(Not Clear) < succ>
                            bacterial cytoplasm --- Certainty = 0.0000(Not Clear) < succ>
```

[11080] The protein has no significant homology with any sequences in the GENPEPT database.

[11081] A related DNA sequence was identified in S. pyogenes <SEQ ID 6255> which encodes the amino acid sequence <SEQ ID 6256>. Analysis of this protein sequence reveals the following:

| Possible site: 56 | | | | |
|---|---|---|---|---|
| >>> Seems to have no N-terminal signal sequence | | | | |
| | INTEGRAL | Likelihood = −5.57 | Transmembrane | 41-57 (38-60) |

```
----- Final Results -----
                              bacterial membrane --- Certainty = 0.3230(Affirmative) < succ>
                                bacterial outside --- Certainty = 0.0000(Not Clear) < succ>
                            bacterial cytoplasm --- Certainty = 0.0000(Not Clear) < succ>
```

[11082] A related sequence was also identified in GAS <SEQ ID 9143> which encodes the amino acid sequence <SEQ ID 9144>. Analysis of this protein sequence reveals the following:

| Possible cleavage site: 49 | | | | |
|---|---|---|---|---|
| >>> Seems to have an uncleavable N-term signal seq | | | | |
| | INTEGRAL | Likelihood = −5.57 | Transmembrane | 13-29 (10-32) |

```
----- Final Results -----
                              bacterial membrane --- Certainty = 0.323(Affirmative) < succ>
                                bacterial outside --- Certainty = 0.000(Not Clear) < succ>
                            bacterial cytoplasm --- Certainty = 0.000(Not Clear) < succ>
```

[11083] An alignment of the GAS and GBS proteins is shown below.

| Identities = 276/544 (50%), Positives = 368/544 (66%), Gaps = 5/544 (0%) | | | |
|---|---|---|---|
| Query: | 5 | FKKKVVKVCLVIFGIVLVSLLSLGFFYFSKGQVLSRFVAARSRTSGQAFDNIKEYMVWSD | 64 |
| | | F K +K +I L L G FY+SK ++ ++ ARS SG F+NIK Y+VW D | |
| Sbjct: | 33 | FHHKKLKQITIIAATSLFLFLIGGAFYYSKNHCINAYLKARSAQSGPVFENIKAYLVWDD | 92 |
| Query: | 65 | TGESITNDEANYANFEPLSKSEARKLGQEIKEGNKNDSMYLKRVGSRLGIFPDYRIANKP | 124 |
| | | T E ITNDEA Y F S+ E R+ Q++K +++ ++ +K VG R IFPDYRIA KP | |
| Sbjct: | 93 | TNEQITNDEAMYTKFRRYSQKELRQKKQDLKAASQDSAVQVKSVGRRFWIFPDYRIAIKP | 152 |
| Query: | 125 | MSLTLKTNVPKLDVLLNQKKVATSNSDHFSVTVERLPRTHYTASLEGTSDGKEIKLKKDY | 184 |
| | | M LT+KTNVP+ DVLLNQKKVA S+S+ FSV ++RLP YTAS+ G +G+ IK+ K Y | |
| Sbjct: | 153 | NDLTIKTNVPQADVLLNQKKVAVSDSEQFSVKLDRLPTAEYTASIRGKHNGRNIKVNKSY | 212 |
| Query: | 185 | DGKNQTIDLSVAFKSFTVTSNLMDGNLYFGDNRIAKLKDGSHSVENYPVTDGSKAYIKKV | 244 |
| | | DG N +DLSV+F++F VTSN G+LYF DN I LKDG VE+YPVT+ ++AY+K | |
| Sbjct: | 213 | DGDNPVLDLSVSFRTFLVTSNAKQGDLYFDDNHIGTLKDGQLQVEDYPVTENAQAYMKTT | 272 |
| Query: | 245 | FNDGEITSHKQKLISIADNQTIKLDVDGLLNEKEAGQKLITAFNQLILYVSTGQDPQTLG | 304 |
| | | F DGE+ S K L + + T+++ V LL E +AG+ L++AF+QL+ Y+STGQD L | |
| Sbjct: | 273 | FPDGELRSQKYALADVEEGATLEILVTDLLEEDKAGELLVSAFDQLMHYLSTGQDSSNLR | 332 |
| Query: | 305 | TVFEKGAENDFYKGLKEGIKAKFVTDNRKASHFTIPNIVLNKMTQVGKESYQVNFAADYD | 364 |
| | | +VFE G+ N FY+GLKESIKAKF TD RKAS IP+I+L MTQVGK +Y ++F A Y+ | |
| Sbjct: | 333 | SVFEAGSSNAFYRGLKESIKAKFQTDTRKASRLNIPSILLTTMTQVGKTTYVLDFTATYE | 392 |
| Query: | 365 | FNYDKSTDPDKKTYGHIIQNLTGNFIMKKSGNSYLISNDGKKDITVAKETNKVKADPVSI | 424 |
| | | F YDKSTDP++ T GHI Q+LTG +KK G YLIS G K+ITV KE N++KA S+ | |
| Sbjct: | 393 | FLYDKSTDPEQHTSGHINQDLTGKVTVKKVGQHYLISQSGSKNITVVKEDNQLKAP--SV | 450 |
| Query: | 425 | FPENLVGSWKESVEDGTVTMTFDKDGKVTQK-KVYKDSKSKESNHSAKVTKLEDKGNGLY | 483 |
| | | FPE+++G+W G+ ++ M+ DG +T K + K ++SKE+ +AK++K+EDKGNG Y | |
| Sbjct: | 451 | FPESILGTWTGQANGLSIHMSLASDGTITTKVEDQKGNRSKET-RTAKISKVEDKGNGFY | 509 |
| Query: | 484 | LYQYESGTDTTTFV-TGGIGGLKVKYAYGIKIEGNKIIPVIWQTSSDGEFDYHKPLLSKP | 542 |
| | | LY + G+D + V GG+GG VKYAYG KI G PV+WQ + EFDY KPL | |
| Sbjct: | 510 | LYTPDPGSDISALVPEGGLGGANVKYAYGFKISGKTASPVVWQAALTHSFDYTKPLSGVT | 569 |
| Query: | 543 | LTKQ | 546 |
| | | L KQ | |
| Sbjct: | 570 | LQKQ | 573 |

[11084] A related DNA sequence was identified in S. pyogenes <SEQ ID 9065> which encodes amino acid sequence <SEQ ID 9066>. An alignment of the GAS and GBS sequences follows:

| Score = 47.3 bits (110), Expect = 4e−07 | | | |
|---|---|---|---|
| Identities = 65/303 (21%), Positives = 119/303 (38%), Gaps = 18/303 (5%) | | | |
| Query: | 153 | FYILGIGTSISIVVALTRFVKEISLNFKEIKKLANKMGIEVLSENENYSQII---EFDDI | 209 |
| | | +YIL + T I+ +V + +S F +KKL KM + +QI EF D+ | |
| Sbjct: | 37 | YYILSV-TIIACIVGGIVNLFLLSSVFTSLKKLKQKMKDISQRCFDTKAQICSPQEFKDL | 95 |
| Query: | 210 | LRTLHIKGDNLKSLIEREILEKQDLSFQIAALSHDIKTPXXXXXXXXXXXXXXXXXXXQE | 269 |
| | | + L+S + +++ + IA LSHDIKTP + | |
| Sbjct: | 96 | ETAFNQMSSELESTFKSLNESEREKTMMIAQLSHDIKTPITSIQSTVEGILDGIISEEEV | 155 |
| Query: | 270 | GYIVSMNNSISVFEGYFNSLISYTRML--------SEDRSVKLILVEELLSELHFEVDDL | 321 |
| | | Y + N+IS N L+ + +E + I +++LL ++ E + | |
| Sbjct: | 156 | NYYL---NTISRQTNRLNHLVEELSFITLETMSDTAEPHKEETIYLDKLLIDILSEFQLV | 212 |
| Query: | 322 | LNINNIEFSICNRLIITSFYGDEENLIRALSNLLVNAIRFMPVLDKKIEVILSESGEQIH | 381 |
| | | N + I ++ + L R L NL+ NA ++ + + + + I | |
| Sbjct: | 213 | FEKENRQVMIDVAPDVSKLSSQYDKLSRILLNLISNAXKYSDP-GSPLTIKAYSNRQDIV | 271 |
| Query: | 382 | FEIWNNGERFSDSTLKKGDKLFYTEDYSRGNK--HYGIGLAFVKGVAIKHGGNLQLNNPA | 439 |
| | | +I + G D L Y + SR K +G+GL + +A + G++ + + | |
| Sbjct: | 272 | IDIIDQGYGIKDEDLASIFNRLYRVESSRNMKTGGHGLGLYIARQLAHQLNGDILVESQY | 331 |
| Query: | 440 | RGG | 442 |
| | | + G | |
| Sbjct: | 332 | QKG | 334 |

[11085] A related sequence was also identified in GAS <SEQ ID 9135> which encodes the amino acid sequence <SEQ ID 9136>. Analysis of this protein sequence reveals the following:

```
Possible site: 37
>>> Seems to have a cleavable N-term signal seq.
INTEGRAL Likelihood = −3.56 Transmembrane 145-161 ( 145-164)
----- Final Results -----
                            bacterial membrane --- Certainty = 0.2423(Affirmative) < succ>
                              bacterial outside --- Certainty = 0.0000(Not Clear) < succ>
                          bacterial cytoplasm --- Certainty = 0.0000(Not Clear) < succ>
```

[11086] SEQ ID 6254 (GBS280) was expressed in E. coli as a His-fusion product. SDS-PAGE analysis of total cell extract is shown in FIG. 52 (lane 8; MW 63.7 kDa). It was also expressed in E. coli as a GST-fusion product. SDS-PAGE analysis of total cell extract is shown in FIG. 58 (lane 7; MW 88.7 kDa).

[11087] Based on this analysis, it was predicted that these proteins and their epitopes could be useful antigens for vaccines or diagnostics.

### EXAMPLE 2022

[11088] A DNA sequence (GBSx2133) was identified in S. agalactiae <SEQ ID 6257> which encodes the amino acid sequence <SEQ ID 6258>. This protein is predicted to be ribosomal large subunit pseudouridine synthase D (rluC). Analysis of this protein sequence reveals the following:

```
Possible site: 22
>>> Seems to have an uncleavable N-term signal seq
INTEGRAL Likelihood = −4.62 Transmembrane 2-18 ( 1-19)
----- Final Results -----
                            bacterial membrane --- Certainty = 0.2848(Affirmative) < succ>
                              bacterial outside --- Certainty = 0.0000(Not Clear) < succ>
                          bacterial cytoplasm --- Certainty = 0.0000(Not Clear) < succ>
```

[11089] The protein has homology with the following sequences in the GENPEPT database.

| >GP:CAB12749 GB:Z99108 similar to hypothetical proteins [Bacillus subtilis] | | | |
|---|---|---|---|
| Identities = 97/251 (38%), Positives = 147/251 (57%), Gaps = 15/251 (5%) | | | |
| Query: | 86 | KHVLINNEFINWQTVVQENDTITLIFDDEDYFTKKIPLGRAELIDCLYEDEHLIIVNKPE | 145 |
| | | + + +N+E + +V++ D + + + + + G +D L+ED H++I+NKP | |
| Sbjct: | 43 | QQIKVNHESVLNNMIVKKGDRVFIDLQESEASSVIPEYGE---LDILFEDNHMLIINKPA | 99 |
| Query: | 146 | GMKTHGNQPHEIALLNHVSAY----SGQTCYV--VHRLDMETSGAVLFAKNPFILPLINQ | 199 |
| | | G+ TH N+ + L ++ AY +G+TC V VHRLD +TSGA++FAK+ +++Q | |
| Sbjct: | 100 | GIATHPNEDGQTGTLANLIAYHYQINGETCKVRHVHRLDQDTSGAIVFAKHRLAHAILDQ | 159 |
| Query: | 200 | RLERKEIWREYWALVEGKFSPKHQVLRDKIGRNR-HDRRKRIIDSKNGQHAMTIIDVL-- | 256 |
| | | +LE+K + R Y A+ EGK K + IGR+R H R+R+ S GQ A+T V+ | |
| Sbjct: | 160 | QLEKKTLKRTYTAIAEGKLRTKKGTINPPIGRDRSHPTRRRV--SPGGQTAVTHFKVMAS | 217 |
| Query: | 257 | KYIQNSSLIKCRLETGRTHQIRVHLSHHGHPLIGDPLYNPSSN-NERLMLHAHRLTLSHP | 315 |
| | | + SL++ LETGRTHQIRVHL+ GHPL GD LY S R LHA+++ HP | |
| Sbjct: | 218 | NAKERLSLVELELETGRTHQIRVHLASLGHPLTGDSLYGGGSKLLNRQALHANKVQAVHP | 277 |
| Query: | 316 | LTCETISVEAP | 326 |
| | | +T E I EAP | |
| Sbjct: | 278 | ITDELIVAEAP | 288 |

[11090] A related DNA sequence was identified in S. pyogenes <SEQ ID 6259> which encodes the amino acid sequence <SEQ ID 6260>. Analysis of this protein sequence reveals the following:

```
Possible site: 38
>>> Seems to have no N-terminal signal sequence
----- Final Results -----
                            bacterial cytoplasm --- Certainty = 0.4198(Affirmative) < succ>
                              bacterial membrane --- Certainty = 0.0000(Not Clear) < succ>
                                bacterial outside --- Certainty = 0.0000(Not Clear) < succ>
```

[11091] An alignment of the GAS and GBS proteins is shown below.

| Identities = 172/278 (61%), Positives = 212/278 (75%), Gaps = 2/278 (0%) | | | |
|---|---|---|---|
| Query: | 63 | TVKELLEDYFLIPRKIRHFLRVKKHVLINNEFINWQTVVQENDTITLIFDDEDYPTKKIP | 122 |
| | | TVK LLE+ LIPRKIRNFLR KKHVLIN +NWQ+ V+ D + L FD EDYP K I | |
| Sbjct: | 2 | TVKALLEEQLLIPRKIRHFLRTKKHVLINGHSVNWQSCVKYGDQVKLFFDHEDYPSKIIV | 61 |
| Query: | 123 | LGRAELIDCLYEDEHLIIVNKPEGMKTHGNQPNEIALLNHVSAYSGQTCYVVHRLDMETS | 182 |
| | | +G+AE + CLYEDEH+IIVNKPEGMKTHGN P E+ALLNHVSAY+GQTCYVVHRLD ETS | |
| Sbjct: | 62 | MGQAEKVTCLYEDEHIIIVNKPEGMKTHGNDPTELALLNHVSAYTGQTCYVVNRLDKETS | 121 |
| Query: | 183 | GAVLFAKNPFILPLINQRLERKEIWREYWALVEGKFSPKNQVLRDKIGRNRHDRRKRIID | 242 |
| | | GA+LFAK PFILP++N+ LE+++I REY ALV G IGR+RHDRRKR++D | |
| Sbjct: | 122 | GAILFAKTPFILPILNRLLEKRDIHREYLALVHGSLDSPRVTYHHPIGRHRHDRRKRVVD | 181 |
| Query: | 243 | SKNGQNANTIIDVLK-YIQNSSLIKCRLETGRTHQIRVHLSHHGHPLIGDPLY-NPSSNN | 300 |
| | | NG+ A+T + ++K + + +SL+ C+L+TGRTHQIRVHL+H GH L GDPLY N + | |
| Sbjct: | 182 | PINGKKAITEVTLVKNFHKTASLLTCQLQTGRTHQIRVHLAHQGHVLFGDPLYSNGKKDC | 241 |
| Query: | 301 | ERLMLHANRLTLSHPLTCETISVEAPSSTFEKILNNYK | 338 |
| | | RLMLHA++L L HPLT E I V+A S+TF++LN K | |
| Sbjct: | 242 | ARLMLHAYQLRLKHPLTQEDICVQAKSATFDAVLNAQK | 279 |

[11092] Based on this analysis, it was predicted that these proteins and their epitopes could be useful antigens for vaccines or diagnostics.

### EXAMPLE 2023

[11093] A DNA sequence (GBSx2134) was identified in S. agalactiae <SEQ ID 6261> which encodes the amino acid sequence <SEQ ID 6262>. Analysis of this protein sequence reveals the following:

```
Possible site: 52
>>> Seems to have no N-terminal signal sequence
INTEGRAL Likelihood = −9.02 Transmembrane 98-114 ( 93-119)
----- Final Results -----
                            bacterial membrane --- Certainty = 0.4609(Affirmative) < succ>
                              bacterial outside --- Certainty = 0.0000(Not Clear) < succ>
                          bacterial cytoplasm --- Certainty = 0.0000(Not Clear) < succ>
```

[11094] The protein has homology with the following sequences in the GENPEPT database.

| >GP:AAF04735 GB:AF101780 penicillin-binding protein 2a | | | |
|---|---|---|---|
| [Streptococcus pneumoniae] | | | |
| Identities = 424/773 (54%), Positives = 555/773 (70%), Gaps = 47/773 (6%) | | | |
| Query: | 2 | KLFDKFIDLFRVOEDNDEMTRKNEQETREETSNLDGEEVYDIDDITRPSKSQYQRGIRHQ | 61 |
| | | KLF+KF+ LF+ +ETS L+ + I R S+S | |
| Sbjct: | 5 | KLFEKFLSLFK-----------------KETSELEDSD----STILRRSRS--------- | 34 |
| Query: | 62 | KENAKSRPEWLQKVDRYLPSPKNPIRRFWRRYRIGKLLFIALMAFILIFGSYLFYLSKTA | 121 |
| | | DR + PIR+FWRRY + K++ I ++ L+ G YLF ++K+ | |
| Sbjct: | 35 | --------------DRKKLAQVGPIRKFWRRYHLTKIILILGLSAGLLVGIYLFAVAKST | 80 |
| Query: | 122 | TVSDLQSALKTTTTIYDKNKEYAGKLSGQKGTYVELNAISDHLKNAVIATEDRTFYSNNG | 181 |
| | | V+DLQ+ALKT T I+D+ ++ AG LSGQKGTYVEL IS +L+NAVIATEDR+FY+N+G | |
| Sbjct: | 81 | NVNDLQNALKTRTLIFDREEKEAGALSGQKGTYVELTDISKNLQNAVIATEORSFYKNDG | 140 |
| Query: | 182 | VNFKRFFLAVATLGKFGGGSTITQQLAKNAYLSQDQTIKRKAREFFLALELTKKYSKAEI | 241 |
| | | +N+ RFFLA+ T G+ GGGSTITQQLAKNAYLSQDQT++RKA+EFFLALEL+KKYSK +I | |
| Sbjct: | 141 | INYGRFFLAIVTAGRSGGGSTITQQLAKNAYLSQDQTVERRAKEFFLALELSKKYSKSQI | 200 |
| Query: | 242 | LTMYLNNSYFGNGVWGVEDASRKYFGTSAANLTVDEAATLAGMLKGPEVYNPYYSVENAT | 301 |
| | | LTMYLNN+YFGNGVWGVEDAS+KYFG SA+ +++D+AATLAGMLKGPE+YNP SVE++T | |
| Sbjct: | 201 | LTMYLNNAYFGNGVWGVEDASKKYFGVSASEVSLDQAATLAGMLKGPELYNPLNSVEDST | 260 |
| Query: | 302 | NRRDTVLAAMVDAGKLTKSQAKEAASIGMKNRLADTYAGKINDYRYPSYFDAVVNSAIDT | 361 |
| | | NRRDTVL MV AG + K+Q EAA + M ++L D Y GKI+DYRYPSYFDAVVNEA+ | |
| Sbjct: | 261 | NRRDTVLQNMVAAGYIDKNQSTSAAEVDMTSQLHDKYEGKISDYRYPSYFDAVVNSAVSK | 320 |
| Query: | 362 | YGISEKDIVNNGYKIYTALDQNYQSGMQKTFDDTSLFPVSDYDGQSAQGASVALDPKTGG | 421 |
| | | Y ++E++IVNNGY+IYT LDQNYQ+ MQ +++TSLFP ++ DG AQ SVAL+PKTGG | |
| Sbjct: | 321 | YNLTSEEIVNNGYRIYTELDQNYQANMQIVYENTSLFPRAE-DGTFAQSGSVALEPKTGG | 379 |
| Query: | 422 | VRGLVGRVQSTKDAQFRSFNYATQSKRSPASTIKPLVVYSPAIASGWSIDKELPNKVQDF | 481 |
| | | VRG+VG+V FR+FNYATQSKRSP STIKPLVVY+PA+ +GW+++K+L N + | |
| Sbjct: | 380 | VRGVVGQVADNDKTGFRNFNYATQSKRSPGSTIKPLVVYTPAVEAGWALNKQLDNHTMQY | 439 |
| Query: | 482 | HGYKPSNYGGIET-ESIPMYQALANSYNIPAVYTLDKLGINKAFTYGRKFGLNMSSANKE | 540 |
| | | YK NY GI+T +PMYQ+LA S N+PAV T++ LG++KAF G KFGLNM ++ | |
| Sbjct: | 440 | DSYKVDNYAGIKTSREVPMYQSLAESLNLPAVATVNDLGVDKAFEAGEKFGLNMEKVDRV | 499 |
| Query: | 541 | LGVALGGSVTTNPLEMAQAYSTFANDGIMHRANLITRIETANGKLVKQFTDKPKRVISRS | 600 |
| | | LGVALG V TNPL+MAQAY+ FAN+G+M AH I+RIE A+G+++ + KRVI +S | |
| Sbjct: | 500 | LGVALGSGVETNPLQNAQAYAAFANEGLMPEAHFISRIENASGQVIASHKNSQKRVIDKS | 559 |
| Query: | 601 | VASKMTSMMLGTFSNGTAINANVYGYTMAGKTGTTSTDFNPNLSGDQWVVGYTPDVVISQ | 660 |
| | | VA KMTSMNLGTF+NGT I+++ Y MAGKTGTTE FNP + DQWV+GYTPDVVIS | |
| Sbjct: | 560 | VADKMTSMMLGTFTNGTGISSSPADYVMAGKTGTTEAVFNPEYTSDQWVIGYTPDVVISH | 619 |
| Query: | 661 | WVGFKNTDKHHYLTDSSAGTASNIFSTQASYILPYTKGSSFTHIENAYFQNGIGSVYNAQ | |
| | | W+GF TD++HYL S++ A+++F A+ ILPYT GS+FT +ENAY QNGI + | |
| Sbjct: | 620 | WLGFPTTDENNYLAGSTSNGAAHVFRNIANTILPYTPGSTFT-VENAYKQNGIAPANTKR | 678 |
| Query: | 721 | DASNTTNQESRSIINDLKDSASKAAQDISRAVEDSNFQEKVKDAWNSLKDYFR | 773 |
| | | N ++ ++D++ A + SRA+ D+ +EK + W+S+ +FR | |
| Sbjct: | 679 | QVQTNDNSQTDDNLSDIRGRAQSLVDEASRAISDAKIKEKAQTIWDSIVNLWR | 731 |

[11095] A related DNA sequence was identified in S. pyogenes <SEQ ID 6263> which encodes the amino acid sequence <SEQ ID 6264>. Analysis of this protein sequence reveals the following:

```
Possible site: 52
>>> Seems to have no N-terminal signal sequence
INTEGRAL Likelihood = −7.96 Transmembrane 104-120 ( 99-124)
----- Final Results -----
                            bacterial membrane --- Certainty = 0.4185(Affirmative) < succ>
                              bacterial outside --- Certainty = 0.0000(Not Clear) < succ>
                          bacterial cytoplasm --- Certainty = 0.0000(Not Clear) < succ>
```

[11096] The protein has homology with the following sequences in the databases:

>GP:AAF04735 GB:AF101780 penicillin-binding protein 2a [Streptococcus pneumoniae]
Identities = 414/730 (56%), Positives = 539/730 (73%), Gaps = 17/730 (2%)

| | | | |
|---|---|---|---|
| Query: | 50 | TKNSEQDPATALQRSRAYEGSPKSRPAWLQKLEAVLPSPQRPIRRFWRRYHIGKLLMILI | 109 |
| | | T E +T L+RSR+ +KL V PIR+EWRRYH+ K+++IL | |
| Sbjct: | 18 | TSELEDSDSTILRRSRSDR----------KKLAQV-----GPIRKFWRRYHLTKIILILG | 62 |
| Query: | 110 | GTLVLLLGSYLFYLSKTAKVSDLQDALKATTVIYDHKGEYAGSLSGQKGSYVELNAISDD | 169 |
| | | + LL+G YLF ++K+ V+DLQ+ALK T+I+D + + AG+LSGQKG+YVEL IS + | |
| Sbjct: | 63 | LSAGLLVGIYLFAVAKSTNVNDLQNALKTRTLIFDREEKEAGALSGQKGTYVELTDISKN | 122 |
| Query: | 170 | LENAVIATEDRTFYSNSGINLKRFLLAVVTAGRFGGGSTITQQLAKNAYLSQDQTIKRKA | 229 |
| | | L+NAVIATEDR+FY N GIN RF LA+VTAGRGGG STITQQLAKNAYLSQDQT++RKA | |
| Sbjct: | 123 | LQNAVIATEDRSFYKNDGINYGRFFLAIVTAGRSGGGSTITQQLAKNAYLSQDQTVERKA | 182 |
| Query: | 230 | REFFLALELTKKYSKKDILTMYLNNSYFGNGVWGVEDASQKYFGTTAANLTLDEAATLAG | 289 |
| | | +EFFLALEL+KKYSK+ ILTMYLNN+YFGNGVWGVEDAS+KYFG +A+ ++LD+AATLAG | |
| Sbjct: | 183 | KEFFLALELSKKYSKEQILTNYLNNAYFGNGVWGVEDASKKYFGVSASEVSLDQAATLAG | 242 |
| Query: | 290 | MLKGPEIYNPYHSLRNATHRRDTVLGAMVDAKKITQTKAQQARAVGLKNRLADTYVGKTD | 349 |
| | | MLKGPE+YNP +S++++T+RRDTVL MV A I + + +A V + ++L D Y GK | |
| Sbjct: | 243 | NLKGPSLYNPLNSVEDSTNRRDTVLQNMVAAGYIDKNQETEAAEVDMTSQLHDKYEGKIS | 302 |
| Query: | 350 | DYKYPSYFDAVISEAIATYGLSEKDIVNNGYKVYTELDQNYQTGMQTTFNNDELFPVSAY | 409 |
| | | DY+YPSYFDAV++EA++ Y L+E++IVNNGY++YTELDQNYQ MQ + N LFP A | |
| Sbjct: | 303 | DYRYPSYFDAVVNEAVSKYNLTEEEIVNNGYRIYTELDQNYQANMQIVYENTSLFP-RAE | 361 |
| Query: | 410 | DGSSAQAASVALDPKTGGVRGLIGRVNSSENPTFRSFNYATQAKRSPASTIKPLVVYAPA | 469 |
| | | DG+AQ+ SVAL+PKTGGVRG++G+V ++ FR+FNYATQ+KRSP STIKPLVVY PA | |
| Sbjct: | 362 | DGTFAQSGSVALEPKTGGVRGVVGQVADNDKTGFRNFNYATQSKRSPGSTIKPLVVYTPA | 421 |
| Query: | 470 | VASGWSIEKELPNTVQDFDGYQPHNY-GNYESEDVPMYQALANSYNIPAVSTLNDIGIDK | 528 |
| | | V +GW++ K+L N +D Y+ NY G S +VPMYQ+LA S N+PAV+T+ND+G+DK | |
| Sbjct: | 422 | VEAGWALNKQLDNHTMQYDSYKVDNYAGIKTSREVPMYQSLAESLNLPAVATVNDLGVDK | 481 |
| Query: | 529 | AFTYGKTFGLDMSSAKKELGVALGGSVTTNPLEMAQAYAAFANNGVIHPAHLINRIENAR | 588 |
| | | AF G+ FGL+M + LGVALG V TNPL+MAQAYAAFAN G++ AH I+RIENA | |
| Sbjct: | 482 | AFEAGEKFGLNMEKVDRVLGVALGSGVETNPLQMAQAYAAFANEGLMPEAHFISRIENAS | 541 |
| Query: | 589 | GEVLKTFTDKAKRVVSQSVADKMTAMNLGTFSNGTAVNANVYGYTLAGKTGTTETNFNPD | 648 |
| | | G+V+ + + KRV+ +SVADKT+MMLGTF+NGT ++++ Y +AGKTGTTE FNP+ | |
| Sbjct: | 542 | GQVIASHKNSQKRVIDKSVADKMTSMMLGTFTNGTGISSSPADYVMAGKTGTTEAVFNPE | 601 |
| Query: | 649 | LAGDQWVIGYTPDVVISQWVGFNQTDENHYLTDSSAGTASAIFSTQASYILPYTKGSQFH | 708 |
| | | DQWVIGYTPDVVIS W+GF TDENHYL S++ A+ +F A+ ILPYT GS F | |
| Sbjct: | 602 | YTSDQWVIGYTPDVVISHWLGFPTTDENHYLAGSTSNGAAHVFRNIANTILPYTPGSTFT | 661 |
| Query: | 709 | VDNAYAQNGISAVYGVNETGNQSGVDTQSIIDGLRKSAQEASQSLSKAVDQSGLRDKAQS | 768 |
| | | V+NAY QNGI+ + T + +R AQ S+A+ + +++KAQ+ | |
| Sbjct: | 662 | VENAYKQNGIAPANTKRQVQTNDNSQTDDNLSDIRGRAQSLVDEASRAISDAKIKEKAQT | 721 |
| Query: | 769 | IWKEIVDYFR | 778 |
| | | IW IV+ FR | |
| Sbjct: | 722 | IWDSIVNLFR | 731 |

[11097] An alignment of the GAS and GBS proteins is shown below.

| Identities = 530/715 (74%), Positives = 623/715 (87%), Gaps = 1/715 (0%) | | | |
|---|---|---|---|
| Query: | 59 | RHQKENAKSRPEWLQKVDRYLPSPKNPIRRFWRRYRIGKLLFIALMAFILIFGSYLFYLS | 118 |
| | | R + + KSRP WLQK++ LPSP+ PIRRFWRRY IGKLL I + +L+ GSYLFYLS | |
| Sbjct: | 65 | RAYEGSPKSRPAWLQKLEAVLFSPQRPIRRFWRRYHIGKLLMILIGTLVLLLGSYLFYLS | 124 |
| Query: | 119 | KTATVSDLQSALKTTTTIYDKNKEYAGKLSGQKGTYVELNAISDHLKNAVIATEDRTFYE | 178 |
| | | KTA VSDLQ ALK TT IYD EYAG LSGQKG+YVELNAISD L+NAVIATEDRTFY | |
| Sbjct: | 125 | KTAKVSDLQDALKATTVIYDHKGEYAGSLSGQKGSYVELNAISDDLENAVIATEDRTFYS | 184 |
| Query: | 179 | NNGVNFKRFFLAVATLGKFGGGSTITQQLAKNAYLSQDQTIKRKAREFFLALELTKKYSK | 238 |
| | | N+G+N KRF LAV T G+FGGGSTITQQLAKNAYLSQDQTIKRKAREFFLALELTKKYSK | |
| Sbjct: | 185 | NSGINLKRFLLAVVTAGRFGGGSTITQQLAKNAYLSQDQTIKRKAREFFLALSLTKKYSK | 244 |
| Query: | 239 | AEILTMYLNNSYFGNGVWGVEDASRKYFGTSAANLTVDEAATLAGNLKGPEVYNPYYSVE | 298 |
| | | +ILTMYLNNSYFGNGVWGVEDAS+KYFGT+AANLT+DEAATLAGNLKGPE+YNPY+S++ | |
| Sbjct: | 245 | KDILTMYLNNSYFGNGVWGVEDASQKYFGTTAANLTLDEAATLAGNLKGPEIYNPYHSLK | 304 |
| Query: | 299 | NATNRRDTVLAAMVDAGKLTKSQAKEAASIGMKNRLADTYAGKINDYRYPSYFDAVVNEA | 358 |
| | | NAT+RRDTVL AMVDA K+T+++A++A ++G+KNRLADTY GK +DY+YFSYFDAV++EA | |
| Sbjct: | 305 | NATHRRDTVLGANVDAKKITQTKAQQARAVGLKNRLADTYVGKTDDYKYPSYFDAVISEA | 364 |
| Query: | 359 | IDTYGISEKDIVNNGYKIYTALDQNYQSGMQKTFDDTSLFPVSDYDGQSAQGASVALDPK | 418 |
| | | I TYG+SEKDIVNNGYK+YT LDQNYQ+GMQ TF++ LFPVS YDG SAQ ASVALDPK | |
| Sbjct: | 365 | IATYGLSSKDIVNNGYKVYTELDQNYQTGMQTTFNNDELFPVSAYDGSSAQAASVALDPK | 424 |
| Query: | 419 | TGGVRGLVGRVQSTKDAQFRSFNYATQSKRSPASTIKPLVVYSPAIASGWSIDKELPNKV | 478 |
| | | TGGVRGL+GRV S+++ERSFNYATQ+KRSPASTIKPLVVY+PA+ASGWSI+KELPN V | |
| Sbjct: | 425 | TGGVRGLIGRVNSSENPTFRSFNYATQAKRSPASTIKPLVVYAPAVASGWSIEKSLPNTV | 484 |
| Query: | 479 | QDFHGYKPSNYGGIETESIPHYQALANSYNIPAVYTLDKLGINKAFTYGRKFGLNMSSAN | 538 |
| | | QDF GY+P NYG E+E +PNYQALANSYNIPAV TL+ +GI+KAFTYG+ FGL+MSSA | |
| Sbjct: | 485 | QDFDGYQPHNYGNYESEDVPNYQALANSYNIPAVSTLNDIGIDKAFTYGKTFGLDMSSAK | 544 |
| Query: | 539 | KELGVALGGSVTTNPLEMAQAYSTFANDGIMHRAHLITRIETANGKLVKQFTDKFKRVIS | 598 |
| | | KELGVALGGSVTTNPLEMAQAY+ FAN+G++H AHLI RIE A G+++K FTDK KRV+S | |
| Sbjct: | 545 | KELGVALGGSVTTNPLEMAQAYAAFANNGVIHPAHLINRIENARGEVLKTFTDKAKRVVS | 604 |
| Query: | 599 | RSVASKMTSMMLGTFSNGTAINANVYGYTNAGKTGTTETDFNPNLSGDQWVVGYTPDVVI | 658 |
| | | +SVA KMT+MNLGTFSNGTA+NANVYGYT+AGKTGTTET+FNP+L+GDQWV+GYTPDVVI | |
| Sbjct: | 605 | QSVADKMTAMNLGTFSNGTAVNANVYGYTLAGKTGTTETNFNPDLAGDQWVIGYTPDVVI | 664 |
| Query: | 659 | SQWVGFKNTDKHHYLTDSSAGTASNIFSTQASYILPYTKGSSFTHIENAYFQNGIGSVYN | 718 |
| | | SQWVGF TD++HYLTDSSAGTAS IFSTQASYILPYTKGS F H++NAY QNGI +VY | |
| Sbjct: | 665 | SQWVGFNQTDENNYLTDSSAGTASAIFSTQASYILPYTKGSQF-HVDNAYAQNGISAVYG | 723 |
| Query: | 719 | AQDASNTTNQESRSIINDLKDSASKAAQDISRAVEDSNFQEKVKDAWNSLKDYFR | 773 |
| | | + N + +++SII+ L+ SA +A+Q +S+AV+ S ++K + W +DYFR | |
| Sbjct: | 724 | VNETGNQSGVDTQSIIDGLRKSAQEASQSLSKAVDQSGLRDKAQSIWKEIVDYFR | 778 |

[11098] SEQ ID 6262 (GBS397d) was expressed in E. coli as a His-fusion product. SDS-PAGE analysis of total cell extract is shown in FIG. 153 (lane 13; MW 76 kDa) and in FIG. 184 (lane 9; MW 76 kDa).

[11099] Based on this analysis, it was predicted that these proteins and their epitopes could be useful antigens for vaccines or diagnostics.

### EXAMPLE 2024

[11100] A DNA sequence (GBSx2135) was identified in S. agalactiae <SEQ ID 6265> which encodes the amino acid sequence <SEQ ID 6266>. This protein is predicted to be M-like protein. Analysis of this protein sequence reveals the following:

```
Possible site: 27
>>> Seems to have no N-terminal signal sequence
INTEGRAL Likelihood = −10.56 Transmembrane 609-625 ( 599-628)
INTEGRAL Likelihood = −0.00 Transmembrane 19-35 ( 19-35)
----- Final Results -----
                            bacterial membrane --- Certainty = 0.5225(Affirmative) < succ>
                              bacterial outside --- Certainty = 0.0000(Not Clear) < succ>
                          bacterial cytoplasm --- Certainty = 0.0000(Not Clear) < succ>
```

[11101] The protein has homology with the following sequences in the GENPEPT database.

| >GP:CAB91647 GB:AJ130830 cell wall protein, putative [Zea mays] | | | |
|---|---|---|---|
| Identities = 106/182 (58%), Positives = 123/182 (67%), Gaps = 8/182 (4%) | | | |
| Query: | 396 | KSDKKPDVKPEAKPEAK--PDVKPEAKPDVKPEAKPDVKPEAKPDVKPEAKPDV--KPEA | 451 |
| | | K + KP+ KPE KPE K P KPE KP+ KPE KP+ KPE KP KPE KP+ KPE | |
| Sbjct: | 116 | KPEPKPEPKPEPKPKPKIKPKPKPEPKPEPKPSHKPEPKPEPKPKPKPEPKPEPQPKPEP | 175 |
| Query: | 452 | KPDVKPKAKPDVKPEA--KPDVKPDVKPDVKPEA--KPEDKPDVKPDVKPEAKPDVKPEA | 507 |
| | | KP+ KP+ KP+ KPE KP+ KP+ KP+ KPE KPE KP+ KP+ KPE KP+ KPE | |
| Sbjct: | 176 | KPEPKPEPKPEPKPEPQPKPEPKPEPKPEPKPEPQPKPEPKPEPKPEPKPEPKPEPKPEP | 235 |
| Query: | 508 | KPEAKPEAKPEAKPEAKPEAKPDVKPEAKPDVKPEAKPKAKPEAKSEAKPEAKLEAKPEA | 567 |
| | | KPE KPE +PE KPE KPE KP P+ +P KPE KPE KPE K E KPE K E KPE | |
| Sbjct: | 236 | KPEPKPEPRPEPKPEPKPEPKPKPDPKPEPQPKPEPKPEPKPEPKPEPKPEPKPEPKPEP | 295 |
| Query: | 568 | KP | 569 |
| | | KP | |
| Sbjct: | 296 | KP | 297 |

[11102] There is also homology to SEQ ID 822.

[11103] A related GBS gene <SEQ ID 8957> and protein <SEQ ID 8958> were also identified. Analysis of this protein sequence reveals the following:

```
Lipop: Possible Site: −1 Crend: 8
McG: Discrim Score: −5.20
GvH: Signal Score (−7.5): 3.07
Possible site: 27
>>> Seems to have no N-terminal signal sequence
ALOM program count: 2 value: −10.56 threshold: 0.0
INTEGRAL Likelihood = −10.56 Transmembrane 609-625 ( 599-628)
INTEGRAL Likelihood = −0.00 Transmembrane 19-35 ( 19-35)
PERIPHERAL Likelihood = 8.54 139
modified ALOM score: 2.61
*** Reasoning Step: 3
----- Final Results -----
                            bacterial membrane --- Certainty = 0.5225(Affirmative) < succ>
                              bacterial outside --- Certainty = 0.0000(Not Clear) < succ>
                          bacterial cytoplasm --- Certainty = 0.0000(Not Clear) < succ>
LPXTG motif: 596-600
```

[11104] The protein has homology with the following sequences in the databases:

[chemical structure]

[11105] SEQ ID 6266 (GBS3) was expressed in E. coli as a His-fusion product. SDS-PAGE analysis of total cell extract is shown in FIG. 3 (lane 5; MW 65 kDa). The GBS3-His fusion product was purified (FIG. 189, lane 8) and used to immunise mice. The resulting antiserum was used for FACS (FIG. 261), which confirmed that the protein is immunoaccessible on GBS bacteria.

[11106] Based on this analysis, it was predicted that these proteins and their epitopes could be useful antigens for vaccines or diagnostics.

### EXAMPLE 2025

[11107] A DNA sequence (GBSx2136) was identified in S. agalactiae <SEQ ID 6267> which encodes the amino acid sequence <SEQ ID 6268>. This protein is predicted to be transcription antitermination protein nusg (nusG). Analysis of this protein sequence reveals the following:

```
Possible site: 48
>>> Seems to have no N-terminal signal sequence
----- Final Results -----
                            bacterial cytoplasm --- Certainty = 0.3203(Affirmative) < succ>
                              bacterial membrane --- Certainty = 0.0000(Not Clear) < succ>
                                bacterial outside --- Certainty = 0.0000(Not Clear) < succ>
```

[11108] The protein has homology with the following sequences in the GENPEPT database.

| >GP:CAA53738 GB:X76134 nusG [Staphylococcus carnosus] | | | |
|---|---|---|---|
| Identities = 90/175 (51%), Positives = 118/175 (67%), Gaps = 2/175 (1%) | | | |
| Query: | 7 | KGWFVLQTYSGYENKVKENLLQRAQTYNMLDNILRVEIPTQTVNVEKNGKTKEIEENRFP | 66 |
| | | K W+ + TYSGYENKVK+NL +R ++ NM + I RV IP + K+GK K++ + FP | |
| Sbjct: | 8 | KRWYAVHTYSGYENKVKKNLEKRVESMNMTEQIFRVVIPEEEETQVKDGKAKKLTKKTFP | 67 |
| Query: | 67 | GYVLVEMVMTDEAWFVVRNTPNVTGFVGSHGNRSKPTPLLEEEIRSILISMGQTVDVFDT | 126 |
| | | GYVLVE+VMTDE+W+VVRNTP VTGFVGS G SKP PLL +E+R IL MG D | |
| Sbjct: | 68 | GYVLVELVMTDESWYVVRNTPGVTGFVGSAGAGSKPNPLLPDEVRFILKQMGMKEKTIDV | 127 |
| Query: | 127 | NIKEGDVVQIIDGAFIGQEGRVVEIENNKVKL--MINMFGSETQAELELYQVAEL | 179 |
| | | ++ G+ V+I G F Q G V EIE +K KL +++MFG ET E+E Q+ +L | |
| Sbjct: | 128 | EVEVGEQVRIKSGPFANQVGEVQEIEADKFKLTVLVDMFGRETPVEVEFDQIEKL | 182 |

[11109] A related DNA sequence was identified in S. pyogenes <SEQ ID 6269> which encodes the amino acid sequence <SEQ ID 6270>. Analysis of this protein sequence reveals the following:

```
Possible site: 53
>>> Seems to have no N-terminal signal sequence
----- Final Results -----
                            bacterial cytoplasm --- Certainty = 0.3874(Affirmative) < succ>
                              bacterial membrane --- Certainty = 320.0000(Not Clear) < succ>
                                bacterial outside --- Certainty = 0.0000(Not Clear) < succ>
```

[11110] An alignment of the GAS and GBS proteins is shown below.

| Identities = 170/179 (94%), Positives = 178/179 (98%) | | | |
|---|---|---|---|
| Query: | 1 | MLDSFDKGWFVLQTYSGYENKVKENLLQPAQTYNMLDNILRVEIPTQTVNVEKNGKTKEI | 60 |
| | | MLDSFDKGWFVLQTYSGYENKVKENLLQRAQTYNMLDNILRVEIPTQTVNVEKNG+TKEI | |
| Sbjct: | 6 | MLDSEDRGWFVLQTYSGYENKVKENLLQRAQTYNMLDNILRVEIPTQTVNVEKNGQTKEI | 65 |
| Query: | 61 | EENRFPGYVLVEMVMTDEAWFVVRNTPNVTGFVGSHGNRSKFTPLLEEEIRSILISMGQT | 120 |
| | | EENRFPGYVLVEMVMTDEAWFVVRNTPNVTGFVGSHGNRSKPTPLLEEEIR+IL+SMGQT | |
| Sbjct: | 66 | EENRFPGYVLVEMVMTDEAWFVVRNTPNVTGFVGSHGNRSKPTPLLEEEIRAILLSMGQT | 125 |
| Query: | 121 | VDVFDTNIKEGDVVQIIDGAFIGQEGRVVEIENNKVKLMINMFGSETQAELELYQVAEL | 179 |
| | | +DVFDTNIKEGDVVQIIDGAF+GQEGRVVEIENNKVKLM+NMFGSET AE+ELYQ+AEL | |
| Sbjct: | 126 | IDVFDTNIKEGDVVQIIDGAFMGQEGRVVEIENNKVKLMLNMFGSETVAEVELYQIAEL | 184 |

[11111] Based on this analysis, it was predicted that these proteins and their epitopes could be useful antigens for vaccines or diagnostics.

### EXAMPLE 2026

[11112] A DNA sequence (GBSx2137) was identified in S. agalactiae <SEQ ID 6271> which encodes the amino acid sequence <SEQ ID 6272>. This protein is predicted to be a glycosyl transferase. Analysis of this protein sequence reveals the following:

```
Possible site: 16
>>> Seems to have no N-terminal signal sequence
----- Final Results -----
                            bacterial cytoplasm --- Certainty = 0.1558(Affirmative) < succ>
                              bacterial membrane --- Certainty = 0.0000(Not Clear) < succ>
                                bacterial outside --- Certainty = 0.0000(Not Clear) < succ>
```

[11113] The protein has homology with the following sequences in the GENPEPT database.

| >GP:AAF28363 GS:AF224467 putative glycosyl transferase [Haemophilus ducreyi] | | | |
|---|---|---|---|
| Identities = 98/259 (37%), Positives = 155/259 (59%), Gaps = 10/259 (3%) | | | |
| Query: | 5 | VALAVDSNYLDRALVTIKSICVYNRNITFYLFNQDTPVEWVRNINRKLEPLGSKLINVKI | 64 |
| | | + LA + +Y + L TIKSI ++N++I FYL N+D P EW +N KL L S++I++K+ | |
| Sbjct: | 10 | IVLAANQSYSEYILTTIKSIYLHNKHIRFYLLNRDYPTEWFDILNNKLRKLNSEIIDIKV | 69 |
| Query: | 65 | YNYDIAHLTTFLTVS---TWFRLFLADYIPSSRVLYLDSDIIVNTNLDYLFELDFKGYYL | 121 |
| | | N I + T+ +S---T+FR F++D+I +V+YLD+DI+VN +L L++ D Y+L | |
| Sbjct: | 70 | TNDTIKNFKTYSHISSDTTFFRYFISDFISQDKVIYLDADIVVNGSLTELYQTDISNYFL | 129 |
| Query: | 122 | AAVKDPHKNE----EGGFNAGNLLANLELWREDGLTKTLLKTAEELHRVVKTGDQSILNI | 177 |
| | | AAVKD + FNAGMLL N + WRE +T+ L +E+ + DQSILN+ | |
| Sbjct: | 130 | AAVKDIISEKIYVNNHIFNAGNLLINNKKWREHNITQFCLSLSEKYINSLPDADQSILNL | 189 |
| Query: | 178 | VCHNRWLSLNKTWNF--QTYDVVSRYNHRSYLYLNIENRTPNIIHFLTSDKPWNENSVAR | 235 |
| | | + ++WL LN++N+ T + +Y YL ++ P IIN+ T KPW R | |
| Sbjct: | 190 | IFKDKWLKLNRGYNYLIGTDYLFFKYGKTRYLE-DLGETIPLIIHYNTEAKPWLNIFNTR | 248 |
| Query: | 236 | FRELWWYYFQLDFCQLTGK | 254 |
| | | FR ++W+Y++L++ + K | |
| Sbjct: | 249 | FRNIYWFYYELNWQDIYAK | 267 |

[11114] No corresponding DNA sequence was identified in S. pyogenes.

[11115] Based on this analysis, it was predicted that this protein and its epitopes, could be useful antigens for vaccines or diagnostics.

### EXAMPLE 2027

[11116] A DNA sequence (GBSx2138) was identified in S. agalactiae <SEQ ID 6273> which encodes the amino acid sequence <SEQ ID 6274>. Analysis of this protein sequence reveals the following:

```
Possible site: 20
>>> Seems to have no N-terminal signal sequence
----- Final Results -----
                            bacterial cytoplasm --- Certainty = 0.0417(Affirmative) < succ>
                              bacterial membrane --- Certainty = 0.0000(Not Clear) < succ>
                                bacterial outside --- Certainty = 0.0000(Not Clear) < succ>
```

[11117] The protein has no significant homology with any sequences in the GENPEPT database.

[11118] No corresponding DNA sequence was identified in S. pyogenes.

[11119] Based on this analysis, it was predicted that this protein and its epitopes, could be useful antigens for vaccines or diagnostics.

### EXAMPLE 2028

[11120] A DNA sequence (GBSx2139) was identified in S. agalactiae <SEQ ID 6275> which encodes the amino acid sequence <SEQ ID 6276>. Analysis of this protein sequence reveals the following:

```
Possible site: 57
>>> Seems to have no N-terminal signal sequence
INTEGRAL Likelihood = −2.60 Transmembrane 306-322 (306-322)
----- Final Results -----
                            bacterial membrane --- Certainty = 0.2041(Affirmative) < succ>
                              bacterial outside --- Certainty = 0.0000(Not Clear) < succ>
                          bacterial cytoplasm --- Certainty = 0.0000(Not Clear) < succ>
```

[11121] The protein has homology with the following sequences in the GENPEPT database.

| >GP:AAF28363 GB:AF224467 putative glycosyl transferase [Haemophilus ducreyi] | | | |
|---|---|---|---|
| Identities = 88/259 (33%), Positives = 156/259 (59%), Gaps = 11/259 (4%) | | | |
| Query: | 7 | VVLAGDYSYIRQIETTLKSLCVYHENLSIFIFNQDIPQEWFLAMKDRVGQTGNQIQDVKL | 66 |
| | | +VLA + SY I TT+KS+ ++++++ ++ N+D P EWF + +++ + ++I D+K+ | |
| Sbjct: | 10 | IVLAANQSYSEYILTTIKSIYLHNKHIRFYLLNRDYPTEWFDILNNKLRKLNSEIIDIKV | 69 |
| Query: | 67 | FHDHLSPKWENKKLNHINY-MTYARYFIPQYISADTVLYLDSDLVVTTNLDNLFQISLDN | 125 |
| | | +D + K +HI+ T+ RYFI +I D V+YLD+D+VV +L L+Q + N | |
| Sbjct: | 70 | TNDTIK---NFKTYSHISSDTTFFRYFISDFIEQDKVIYLDADIVVNGSLTELYQTDISN | 126 |
| Query: | 126 | AYLAAVP-----ALFGLGYGFNAGVNVINNQRWRQENMTIKLIEKNQKEIENANEGDQTI | 180 |
| | | +LAAV ++ + FNAG+++INN++WR+ N+T + ++K I + + DQ+I | |
| Sbjct: | 127 | YFLAAVKDIISEKIYVNNHIFNAGMLLINNKKWREHNITQFCLSLSEKYINSLPDADQSI | 186 |
| Query: | 181 | LNRNFENQVIYLDDTYNFQIGFD-MGAAIDGHKFIFDIPITPLPKIIHYISGIKPWQTLS | 239 |
| | | LN +F+++ + L+ YN+ IG D + +++ D+ T +P IIHY + KPW + | |
| Sbjct: | 187 | LNLIFKDKWLKLNRGYNYLIGTDYLFFKYGKTRYLEDLGET-IPLIIHYNTEAKPWLNIF | 245 |
| Query: | 240 | NMRLRSVWWHYNLLEWSSI | 258 |
| | | N R R ++W Y L W I | |
| Sbjct: | 246 | NTRFRNIYWFYYELNWQDI | 264 |

[11122] No corresponding DNA sequence was identified in S. pyogenes.

[11123] SEQ ID 6276 (GBS395) was expressed in E. coli as a His-fusion product. SDS-PAGE analysis of total cell extract is shown in FIG. 75 (lane 5; MW 47.4 kDa). It was also expressed in E. coli as a GST-fusion product. SDS-PAGE analysis of total cell extract is shown in FIG. 83 (lane 8; MW 72 kDa) and in FIG. 177 (lane 5; MW 72 kDa).

[11124] GBS395-GST was purified as shown in FIG. 217, lane 7.

[11125] Based on this analysis, it was predicted that this protein and its epitopes, could be useful antigens for vaccines or diagnostics.

### EXAMPLE 2029

[11126] A DNA sequence (GBSx2140) was identified in S. agalactiae <SEQ ID 6277> which encodes the amino acid sequence <SEQ ID 6278>. Analysis of this protein sequence reveals the following:

```
Possible site: 48
>>> Seems to have no N-terminal signal sequence
----- Final Results -----
                            bacterial Cytoplasm --- Certainty = 0.1633(Affirmative) < succ>
                              bacterial membrane --- Certainty = 0.0000(Not Clear) < succ>
                                bacterial outside --- Certainty = 0.0000(Not Clear) < succ>
```

[11127] The protein has no significant homology with any sequences in the GENPEPT database.

[11128] No corresponding DNA sequence was identified in S. pyogenes.

[11129] Based on this analysis, it was predicted that this protein and its epitopes, could be useful antigens for vaccines or diagnostics.

### EXAMPLE 2030

[11130] A DNA sequence (GBSx2141) was identified in S. agalactiae <SEQ ID 6279> which encodes the amino acid sequence <SEQ ID 6280>. Analysis of this protein sequence reveals the following:

```
Possible site: 44
>>> Seems to have no N-terminal signal sequence
      INTEGRAL Likelihood = −0.16 Transmembrane 36 − 52 (36 − 52)
----- Final Results -----
                            bacterial membrane --- Certainty = 0.1065(Affirmative) < succ>
                              bacterial outside --- Certainty = 0.0000(Not Clear) < succ>
                          bacterial cytoplasm --- Certainty = 0.0000(Not Clear) < succ>
```

[11131] A related GBS nucleic acid sequence <SEQ ID 10243> which encodes amino acid sequence <SEQ ID 10244> was also identified.

[11132] The protein has homology with the following sequences in the GENPEPT database.

| >GP:AAC77330 GB:AE000508 orf, hypothetical protein [Escherichia coli K12] | | | |
|---|---|---|---|
| Identities = 75/260 (28%), Positives = 123/260 (46%), Gaps = 22/260 (8%) | | | |
| Query: | 6 | VGLVLEGGGMRGLYTAGVLDAFLDAGIK-IDGIVSVSAGALFGVNFVSRQRERALRYNKK | 64 |
| | | + LV EGGG RG++TAGVLD F+A D + SAGA F+ Q A + + | |
| Sbjct: | 25 | IALVCEGGGQRGIFTAGVLDEFMRAQFNPFDLYLGTSAGAQNLSAFICNQPGYARKVIMR | 84 |
| Query: | 65 | YLSHPKYMSLRSWFRTGNFVNKDF----TYYEVPMKLD----VFDDEAFKKSSIDFYVVA | 116 |
| | | Y + ++ + R GN ++ D+ T ++P+++D +FD S FY+ A | |
| Sbjct: | 85 | YTTKREFFDPLRFVRGGNLIDLDWLVEATASQMPLQMDTAARLFD------SGKSFYMCA | 138 |
| Query: | 117 | TEMTSGKPEYFKIDSVFEQMEILRASSALPVVSKM-VDWQGKKYLDGGLSDSIPVDFARG | 175 |
| | | P YF + + ++++RASSA+P + V +G YLDGG+SD+IPV A | |
| Sbjct: | 139 | CRQDDYAPNYF-LPTKQNWLDVIRASSAIPGFYRSGVSLEGINYLDGGISDAIPVKEAAR | 197 |
| Query: | 176 | LGFDKLIVVMTRPLNYQKKPSSGR-----LYKTLYRKYPNFVKTASNRYQQYNNSLEKVM | 230 |
| | | G L+V+ T P P + L + + N V+ Y+ +EK | |
| Sbjct: | 198 | QGAKTLVVIRTVPSQMYYTPQWFKRMERWLGDSSLQPLVNLVQHHETSYRDIQQFISKPP | 257 |
| Query: | 231 | SLEKTGDLFAIRPSKSLVIG | 250 |
| | | + +++ +P S+ +G | |
| Sbjct: | 258 | GKLRIFEIYPPKPLHSIALG | 277 |

[11133] No corresponding DNA sequence was identified in S. pyogenes.

[11134] Based on this analysis, it was predicted that this protein and its epitopes, could be useful antigens for vaccines or diagnostics.

[11135] A related GBS gene <SEQ ID 8959> and protein <SEQ ID 8960> were also identified. Analysis of this protein sequence reveals the following:

| Lipop: Possible site: −1 Crend: 10 | | | | | |
|---|---|---|---|---|---|
| McG: Discrim Score: −5.16 | | | | | |
| GvH: Signal Score (−7.5): −2.17 | | | | | |
| Possible site: 44 | | | | | |
| >>> Seems to have no N-terminal signal sequence | | | | | |
| ALOM program count: 1 value: 0.16 threshold: 0.0 | | | | | |
| | INTEGRAL | Likelihood = −0.16 | Transmembrane | 36 − 52 | (36 − 52) |
| | PERIPHERAL | Likelihood = 4.14 | 18 | | |

```
  modified ALOM score: 0.53
*** Reasoning Step: 3
----- Final Results -----
                            bacterial membrane --- Certainty = 0.1065(Affirmative) < succ>
                              bacterial outside --- Certainty = 0.0000(Not Clear) < succ>
                          bacterial cytoplasm --- Certainty = 0.0000(Not Clear) < succ>
```

[11136] The protein has homology with the following sequences in the databases:

[chemical structure]

[11137] SEQ ID 8960 (GBS394) was expressed in E. coli as a His-fusion product. SDS-PAGE analysis of total cell extract is shown in FIG. 75 (lane 4; MW 34.7 kDa). It was also expressed in E. coli as a GST-fusion product. SDS-PAGE analysis of total cell extract is shown in FIG. 83 (lane 7; MW 60 kDa).

[11138] GBS394-GST was purified as shown in FIG. 217, lane 6.

### EXAMPLE 2031

[11139] A DNA sequence (GBSx2142) was identified in S. agalactiae <SEQ ID 6281> which encodes the amino acid sequence <SEQ ID 6282>. Analysis of this protein sequence reveals the following:

```
Possible site: 21
>>> Seems to have no N-terminal signal sequence
----- Final Results -----
                            bacterial cytoplasm --- Certainty = 0.3004(Affirmative) < succ>
                              bacterial membrane --- Certainty = 0.0000(Not Clear) < succ>
                                bacterial outside --- Certainty = 0.0000(Not Clear) < succ>
```

[11140] The protein has no significant homology with any sequences in the GENPEPT database.

[11141] No corresponding DNA sequence was identified in S. pyogenes.

[11142] Based on this analysis, it was predicted that this protein and its epitopes, could be useful antigens for vaccines or diagnostics.

### EXAMPLE 2032

[11143] A DNA sequence (GBSx2143) was identified in S. agalactiae <SEQ ID 6283> which encodes the amino acid sequence <SEQ ID 6284>. This protein is predicted to be transporter protein. Analysis of this protein sequence reveals the following:

| Possible site: 49 | | | | | |
|---|---|---|---|---|---|
| >>> Seems to have a cleavable N-term signal seq. | | | | | |
| | INTEGRAL | Likelihood = −6.85 | Transmembrane | 373 − 389 | (370 − 395) |
| | INTEGRAL | Likelihood = −6.74 | Transmembrane | 168 − 184 | (162 − 187) |
| | INTEGRAL | Likelihood = −6.32 | Transmembrane | 259 − 275 | (257 − 280) |
| | INTEGRAL | Likelihood = −4.78 | Transmembrane | 286 − 302 | (285 − 306) |
| | INTEGRAL | Likelihood = −3.19 | Transmembrane | 55 − 71 | (54 − 71) |
| | INTEGRAL | Likelihood = −2.97 | Transmembrane | 84 − 100 | (79 − 101) |
| | INTEGRAL | Likelihood = −2.87 | Transmembrane | 311 − 327 | (310 − 328) |
| | INTEGRAL | Likelihood = −1.44 | Transmembrane | 355 − 371 | (355 − 371) |
| | INTEGRAL | Likelihood = −0.64 | Transmembrane | 108 − 124 | (108 − 125) |

```
----- Final Results -----
                            bacterial membrane --- Certainty = 0.3739(Affirmative) < succ>
                              bacterial outside --- Certainty = 0.0000(Not Clear) < succ>
                          bacterial cytoplasm --- Certainty = 0.0000(Not Clear) < succ>
```

[11144] The protein has homology with the following sequences in the GENPEPT database.

| >GP:AAC22759 GB:U32790 transporter protein [Haemophilus influenzae Rd] | | | |
|---|---|---|---|
| Identities = 139/391 (35%), Positives = 221/391 (55%), Gaps = 4/391 (1%) | | | |
| Query: | 6 | INKNNWRALIAAIVASGTDDLNIMFLAFSMSTIITDLHLSAAQAGWIGTITNLGMLVGGL | 65 |
| | | +N W+ALI + V G D +++ L F +S I DL+L+ AQ G + T T +G + GG+ | |
| Sbjct: | 5 | VNSYGWKALIGSAVGYGMDGFDLLILGFMLSAISADLNLTPAQGGSLVTWTLIGAVFGGI | 64 |
| Query: | 66 | IFGLLADRYNKFKVFKWTILIFSIATGLVFFTTNLSYLYIMRFIAGIGVGGEYGIAIAIM | 125 |
| | | +FG L+D+Y + +V WTIL+F++ TGL L I R IAGIG+GGE+GI +A+ | |
| Sbjct: | 65 | LFGALSDKYGRVRVLTWTILLFAVFTGLCAIAQGYWDLLIYRTIAGIGLGGEFGIGMALA | 124 |
| Query: | 126 | AGIVPTNKMGRISSLNGIAGQVGSISSALLAGWLAPALGWRGLFLFGLLPIVLVLWMQFA | 185 |
| | | A P + +S + QVG + +ALL L P +GWRG+FL G+ P + +++ | |
| Sbjct: | 125 | AEAWPARHRAKAASYVALGWQVGVLGAALLTPLLLPHIGWRGMFLVGIFPAFVAWFLRSH | 184 |
| Query: | 186 | VDDKDILDQYNTDADDEPLDI----SIKALFDTPVLATQSLALMVMTTVQIAGYFGMMNW | 241 |
| | | + + +I Q T + S + L + SL ++V+T+VQ GY+G+M W | |
| Sbjct: | 185 | LHEPEIFTQKQTALSTQSSFTDKLRSFQLLIKDKATSKISLGIVVLTSVQNFGYYGIMIW | 244 |
| Query: | 242 | LPTIIQTNLNVSVKNSSLWMIATILGMCLGMLVFGQLLDKFGPRLVYGCFLLSSAICVYL | 301 |
| | | LP + L S+ S LW T+ GM G+ +FGQL D+ G + + F L + I + + | |
| Sbjct: | 245 | LPNFLSKQLGFSLTKSGLWTAVTVCGMMAGIWIFGQLADRIGRKPSFLLFQLGAVISIVV | 304 |
| Query: | 302 | FQFATTMPSMIIGGAVVGFFVNGMFAGYGAMITRLYPHHIRSTANNLILNVGRAIGGFSS | 361 |
| | | + T M++ GA +G FVNGM GYGA++ YP R+TA N++ N+GRA+GGF | |
| Sbjct: | 305 | YSQLTDPDIMLLAGAFLGMFVNGMLGGYGALMAEAYPTEARATAQNVLFNIGRAVGGFGP | 364 |
| Query: | 362 | VIIGMILDVSNVSMVMLFLASLYIVSFLSML | 392 |
| | | V++G ++ + + LA +Y++ L+ + | |
| Sbjct: | 365 | VVVGSVVLAYSFQTAIALLAIIYVIDMLATI | 395 |

[11145] A related DNA sequence was identified in S. pyogenes <SEQ ID 2377> which encodes the amino acid sequence <SEQ ID 2378>. Analysis of this protein sequence reveals the following:

| Possible site: 39 | | | | | |
|---|---|---|---|---|---|
| >>> Seems to have a cleavable N-term signal seq. | | | | | |
| | INTEGRAL | Likelihood = −8.92 | Transmembrane | 168 − 184 | (162 − 188) |
| | INTEGRAL | Likelihood = −5.41 | Transmembrane | 286 − 302 | (285 − 306) |
| | INTEGRAL | Likelihood = −5.15 | Transmembrane | 372 − 388 | (362 − 394) |
| | INTEGRAL | Likelihood = −3.45 | Transmembrane | 259 − 275 | (257 − 276) |
| | INTEGRAL | Likelihood = −2.87 | Transmembrane | 311 − 327 | (306 − 328) |
| | INTEGRAL | Likelihood = −2.81 | Transmembrane | 55 − 71 | (51 − 71) |
| | INTEGRAL | Likelihood = −0.48 | Transmembrane | 108 − 124 | (108 − 125) |
| | INTEGRAL | Likelihood = −0.37 | Transmembrane | 84 − 100 | (84 − 100) |

```
----- Final Results -----
                            bacterial membrane --- Certainty = 0.4567(Affirmative) < succ>
                              bacterial outside --- Certainty = 0.0000(Not Clear) < succ>
                          bacterial cytoplasm --- Certainty = 0.0000(Not Clear) < succ>
```

[11146] An alignment of the GAS and GBS proteins is shown below.

| Identities = 306/402 (76%), Positives = 354/402 (87%) | | | |
|---|---|---|---|
| Query: | 1 | MSPLNINKNNWRALIAAIVASGTDDLNIMFLAFSMSTIITDLHLSAAQAGWIGTITNLGN | 60 |
| | | MS L+++ N RAL+AAI ASGTDDLN+MFLAFSMS+I+TDL LS Q GWI TITNLGM | |
| Sbjct: | 1 | MSTLSLDTTNKRALVAAIAASGTDDLNVMFLAFSMSSIMTDLGLSGTQGGWIATITNLGM | 60 |
| Query: | 61 | LVGGLIFGLLADRYNKFKVFKWTILIFSIATGLVFFTTNLSYLYIMRFIAGIGVGGSYGI | 120 |
| | | LVGGL+FGLLADR++KFKVFKWTIL+FS+ATGL++FT +L YLY+MRFIAGIGVGGEYG+ | |
| Sbjct: | 61 | LVGGLLFGLLADRHHKFKVFKWTILLFSVATGLIYFTQSLPYLYLMRFIAGIGVGGEYGV | 120 |
| Query: | 121 | AIAIMAGIVPTNKMGRISSLNGIAGQVGSISSALLAGWLAPALGWRGLFLFGLLPIVLVL | 180 |
| | | AIAIMAGIVP KMGR+SSLNGIAGQ+GSISSALLAGWLAP+LGWRGLFLFGLLPI+LV+ | |
| Sbjct: | 121 | AIAIMAGIVPPEKMGRMSSLNGIAGQLGSISSALLAGWLAPSLGWRGLFLFGLLPILLVI | 180 |
| Query: | 181 | WMQFAVDDKDILDQYNTDADDEPLDISIKALFDTPVLATQSLALMVMTTVQIAGYFGMMN | 240 |
| | | WM A+DD+ I D Y + ++ I I LF T L Q+LALMVMTTVQIAGYFGMMN | |
| Sbjct: | 181 | WMTLAIDDQKIWDHYGQEEEECSQPIKINELFKTKSLTAQTLALMVMTTVQIAGYFGMMN | 240 |
| Query: | 241 | WLPTIIQTNLNVSVKNSSLWMIATILGMCLGMLVFGQLLDKFGPRLVYGCFLLSSAICVY | 300 |
| | | WLPTIIQT+LN+SVK+SSLWM+ATI+GMCLGML FGQLLD FGPRL+Y FLL+S+ICVY | |
| Sbjct: | 241 | WLPTIIQTSLNLSVKSSSLWMVATIVGMCLGMLYFGQLLDCFGPRLIYSLFLLASSICVY | 300 |
| Query: | 301 | LFQFATTMPSMIIGGAVVGFFVNGMFAGYGAMITRLYPHHIRSTANNLILNVGRAIGGFS | 360 |
| | | LFQFA +M SM+IGGA+VGFFVNGMFAGYGAMITRLYPHHIRSTANN+ILNVGRA+GGFS | |
| Sbjct: | 301 | LFQFANSMASMVIGGAIVGFFVNGMFAGYGAMITRLYPHHIRSTANNVILNVGRALGGFS | 360 |
| Query: | 361 | SVIIGMILDVSNVSMVMLFLASLYIVSFLSMLSIKQLKRQKY | 402 |
| | | SV IG ILD S +SMVM+FLASLY++SF +M SI QLK ++Y | |
| Sbjct: | 361 | SVAIGSILDASGISMVMIFLASLYVISFGAMWSIGQLKAERY | 402 |

[11147] Based on this analysis, it was predicted that these proteins and their epitopes could be useful antigens for vaccines or diagnostics.

### EXAMPLE 2033

[11148] A DNA sequence (GBSx2144) was identified in S. agalactiae <SEQ ID 6285> which encodes the amino acid sequence <SEQ ID 6286>. This protein is predicted to be leucyl-tRNA synthetase (leuS). Analysis of this protein sequence reveals the following:

```
Possible site: 52
>>> Seems to have no N-terminal signal sequence
----- Final Results -----
                            bacterial cytoplasm --- Certainty = 0.3481(Affirmative) < succ>
                              bacterial membrane --- Certainty = 0.0000(Not Clear) < succ>
                                bacterial outside --- Certainty = 0.0000(Not Clear) < succ>
```

[11149] A related GBS nucleic acid sequence <SEQ ID 10241> which encodes amino acid sequence <SEQ ID 10242> was also identified.

[11150] The protein has homology with the following sequences in the GENPEPT database.

| >GP: AAC00259 GB: AF008220 leucine tRNA synthetase [Bacillus subtilis] | | | |
|---|---|---|---|
| Identities = 569/835 (68%), Positives = 666/835 (79%), Gaps = 42/835 (5%) | | | |
| Query: | 10 | YNHKEIEPKWQAFWADNHTFKTGTDASKPKFYALDMFPYPSGAGLHVGHPEGYTATDILS | 69 |
| | | + HKETE KWQ +W +N TF T + K KFYALDMFPYPSGAGLHVGHPEGYTATDILS | |
| Sbjct: | 3 | FQHKEIEKKWQTYWLENKTFATLDNNEKQKFYALDMFPYPSGAGLHVGHPEGYTATDILS | 62 |
| Query: | 70 | RFKRAQGHNVLHPMGWDAFGLPAEQYAMDTGNDPAEFTAENIANFKRQINALGFSYDWDR | 129 |
| | | R KR QG++VLHPMGWDAFGLPAEQYA+DTGNDPA FT +NI NF+RQI ALGFSYDWDR | |
| Sbjct: | 63 | RMKRMQGYDVLHPMGWDAFGLPAEQYALDTGNDPAVFTKQNIDNFRRQIQALGFSYDWDR | 122 |
| Query: | 130 | EVNTTDPNYYKWTQWIFTKLYEKGLAYEAEVPVNWVEELGTAIANEEVLPDGTSERGGYP | 189 |
| | | E+NTTDP YYKWTQWIF KLYEKGLAY EVPVNW LGT +ANEEV+ DG SERGG+P | |
| Sbjct: | 123 | EINTTDPEYYKWTQWIFLKLYEKGLAYVDEVPVNWCPALGTVLANEEVI-DGKSERGGHP | 181 |
| Query: | 190 | VVRKPMRQWMLKITAYAERLLEDLEEVDWPESIKDMQRNWIGKSTGANVTFKVKDTDKDF | 249 |
| | | V R+PM+QWMLKITAYA+RLLEDLEE+DWPESIKDMQRNWIG+S GA+V F + D F | |
| Sbjct: | 182 | VERRPMKQWMLKITAYADRLLEDLEELDWPESIKDMQRNWIGRSEGAHVHFAIDGHDDSF | 241 |
| Query: | 250 | TVFTTRPDTLFGATYAVLAPEHALVDAITTADQAEAVAEYKRQASLKSDLARTDLAKEKT | 309 |
| | | TVFTTRPDTLFGATY VLAPEHALV+ ITTA+Q EAV Y ++ KSDL RTDLAK KT | |
| Sbjct: | 242 | TVFTTRPDTLFGATYTVLAPEHALVENITTAEQKEAVEAYIKEIQSKSDLERTDLAKTKT | 301 |
| Query: | 310 | GVWTGAYAINPVNGKEIPVWIADYVLASYGTGAIMAVPAHDERDWEFAKQFNLDIIPVLE | 369 |
| | | GV+TGAYAINPVNG+++P+WIADYVLASYGTGA+MAVP HDERD+EFAK F L + V++ | |
| Sbjct: | 302 | GVFTGAYAINPVNGEKLPIWIADYVLASYGTGAVMAVPGHDERDFEFAKTFGLPVKEVVK | 361 |
| Query: | 370 | GGNVEEAAFTEDGLHINSDFLDGLDKAAAIAKMVEWLEAEGVGNEKVTYRLRDWLFSRQR | 429 |
| | | GGNVEEAA+T DG H+NSDFL+GL K AI K++ WLE G +KVTYRLRDWLFSRQR | |
| Sbjct: | 362 | GGNVEEAAYTGDGEHVNSDFLNGLHKQEAIEKVIAWLEETKNGEKKVTYRLRDWLFSRQR | 421 |
| Query: | 430 | YWGEPIPIIHWEDGTSTAVPESELPLVLPVTKDIRPSGTGESPLANLTDWLEVT-REDGV | 488 |
| | | YWGEPIP+IHWEDGTSTAVPE ELPL+LP T +I+PSGTGESPLAN+ +W+EVT E G | |
| Sbjct: | 422 | YWGEPIPVIHWEDGTSTAVPEEELPLILPKTDEIKPSGTGESPLANIKEWVEVTDPETGK | 481 |
| Query: | 489 | KGRRETNTMPQWAGSSWYYLRYIDPHNTEKLADEELLKQWLPVDIYVGGAEHAVLHLLYA | 548 |
| | | KGRRETNTMPQWAGS WY+LRYIDPHN ++LA E L++WLPVD+Y+GGAEHAVLHLLYA | |
| Sbjct: | 482 | KGRRETNTMPQWAGSCWYFLRYIDPHNPDQLASPEKLEKWLPVDMYIGGAEHAVLHLLYA | 541 |
| Query: | 549 | RFWHKVLYDLGVVPTKEPFQKLFNQGMILGTSYRDSRGALVATDKVEKRDGSFFHVETGE | 608 |
| | | RFWHK LYD+GVVPTKEPFQKL+NQGMILG E E | |
| Sbjct: | 542 | RFWHKFLYDIGVVPTKEPFQKLYNQGMILG--------------------------ENNE | 575 |
| Query: | 609 | ELEQAPAKMSKSLKNVVNPDDVVEQYGADTLRVYEMFMGPLDASIAWSEEGLEGSRKFLD | 668 |
| | | KMSKS NVVNPD++V +GADTLR+YEMFMGPLDASIAWSE GL+G+R+FLD | |
| Sbjct: | 576 | -------KMSKSKGNVVNPDEIVASHGADTLRLYEMFMGPLDASIAWSESGLDGARRFLD | 628 |
| Query: | 669 | RVYRLI------TTKEITEENSGALDKVYNETVKAVTEQVDQMKFNTAIAQLMVFVNAAN | 722 |
| | | RV+RL +I E L++VY+ETV VT+ + ++FNT I+QLMVF+N A | |
| Sbjct: | 629 | RVWRLFIEDSGELNGKIVEGAGETLERVYHETVMKVTDHYEGLRFNTGISQLMVFINEAY | 688 |
| Query: | 723 | KEDKLFSDYAKGFVQLIAPFAPHLGEELWQVLTASGQSISYVPWPSYDESKLVENEIEIV | 782 |
| | | K +L +Y +GFV+L++P APHL EELW+ L SG +I+Y WP YDE+KLV++E+EIV | |
| Sbjct: | 689 | KATELPKEYMEGFVKLLSPVAPHLAEELWEKLGHSG-TIAYEAWPVYDETKLVDDEVEIV | 747 |
| Query: | 783 | VQIKGKVKAKLVVAKDLSREELQDLALANEKVQAEIAGKDIIKVIAVPNKLVNIV | 837 |
| | | VQ+ GKVKAKL V D ++E+L+ LA A+EKV+ ++ GK I K+IAVP KLVNIV | |
| Sbjct: | 748 | VQLNGKVKAKLQVPADATKEQLEQLAQADEKVKEQLEGKTIRKIIAVPGKLVNIV | 802 |

[11151] A related DNA sequence was identified in S. pyogenes <SEQ ID 6287> which encodes the amino acid sequence <SEQ ID 6288>. Analysis of this protein sequence reveals the following:

```
Possible site: 46
>>> Seems to have no N-terminal signal sequence
----- Final Results -----
                            bacterial cytoplasm --- Certainty = 0.4358(Affirmative) < succ>
                              bacterial membrane --- Certainty = 0.0000(Not Clear) < succ>
                                bacterial outside --- Certainty = 0.0000(Not Clear) < succ>
```

[11152] An alignment of the GAS and GBS proteins is shown below.

| Identities = 815/833 (97%), Positives = 827/833 (98%) | | | |
|---|---|---|---|
| Query: | 7 | MTFYNHKEIEPKWQAFWADNHTFKTGTDASKPKFYALDMFPYPSGAGLHVGHPEGYTATD | 66 |
| | | MTFY+H IEPKWQAFWADNHTFKTGTDASKPKFYALDMFPYPSGAGLHVGHPEGYTATD | |
| Sbjct: | 1 | MTFYDHTAIEPKWQAFWADNHTFKTGTDASKPKFYALDMFPYPSGAGLHVGHPEGYTATD | 60 |
| Query: | 67 | ILSRFKRAQGHNVLHPMGWDAFGLPAEQYAMDTGNDPAEFTAENIANFKRQINALGFSYD | 126 |
| | | ILSRFKRAQGHN+LHPMGWDAFGLPAEQYAMDTGNDPAEFTAENIANFKRQINALGFSYD | |
| Sbjct: | 61 | ILSRFKRAQGHNILHPMGWDAFGLPAEQYAMDTGNDPAEFTAENIANFKRQINALGFSYD | 120 |
| Query: | 127 | WDREVNTTDPNYYKWTQWIFTKLYEKGLAYEAEVPVNWVEELGTAIANEEVLPDGTSERG | 186 |
| | | WDREVNTTDPNYYKWTQWIFTKLYEKGLAYEAEVPVNWVEELGTAIANEEVLPDGTSERG | |
| Sbjct: | 121 | WDREVNTTDPNYYKWTQWIFTKLYEKGLAYEAEVPVNWVEELGTAIANEEVLPDGTSERG | 180 |
| Query: | 187 | GYPVVRKPMRQWMLKITAYAERLLEDLEEVDWPESIKDMQRNWIGKSTGANVTFKVKDTD | 246 |
| | | GYPVVRKPMRQWMLKITAYAERLLEDLEEVDWPESIKDMQRNWIGKSTGANVTFKVKDTD | |
| Sbjct: | 181 | GYPVVRKPMRQWMLKITAYAERLLEDLEEVDWPESIKDMQRNWIGKSTGANVTFKVKDTD | 240 |
| Query: | 247 | KDFTVFTTRPDTLFGATYAVLAPEHALVDAITTADQAEAVAEYKRQASLKSDLARTDLAK | 306 |
| | | KDFTVETTRPDTLFGATYAVLAPEHALVDAITTADQAEAVA+YKRQASLKSDLARTDLAK | |
| Sbjct: | 241 | KDFTVFTTRPDTLFGATYAVLAPEHALVDAITTADQAEAVAKYKRQASLKSDLARTDLAK | 300 |
| Query: | 307 | EKTGVWTGAYAINPVNGKEIPVWIADYVLASYGTGAIMAVPAHDERDWEFARQFNLDIIP | 366 |
| | | EKTGVWTGAYAINPVNG E+PVWIADYVLASYGTGAIMAVPAHDERDWEFAKQF LDIIP | |
| Sbjct: | 301 | EKTGVWTGAYAINPVNGNEMPVWIADYVLASYGTGAIMAVPAHDERDWEFAKQFKLDIIP | 360 |
| Query: | 367 | VLEGGNVEEAAFTEDGLHINSDFLDGLDKAAAIAKMVEWLEAEGVGNEKVTYRLRDWLFS | 426 |
| | | VLEGGNVEEAAFTEDGLHINS FLDGLDKA+AIAKMVEWLEAEGVGNEKVTYRLRDWLFS | |
| Sbjct: | 361 | VLEGGNVEEAAFTEDGLHINSGFLDGLDKASAIAKMVEWLEAEGVGNEKVTYRLRDWLFS | 420 |
| Query: | 427 | RQRYWGEPIPIIHWEDGTSTAVPESELPLVLPVTKDIRPSGTGESPLANLTDWLEVTRED | 486 |
| | | RQRYWGEPIPIIHWEDGTSTAVPESELPLVLPVTKDIRPSGTGESPLAN+TDWLEVTRED | |
| Sbjct: | 421 | RQRYWGEPIPIIHWEDGTSTAVPESELPLVLPVTKDIRPSGTGESPLANVTDWLEVTRED | 480 |
| Query: | 487 | GVKGRRETNTMPQWAGSSWYYLRYIDPHNTEKLADEELLKQWLPVDIYVGGAEHAVLHLL | 546 |
| | | GVKGRRETNTMPQWAGSSWYYLRYIDPHNTEKLADEELLKQWLPVDIYVGGAEHAVLHLL | |
| Sbjct: | 481 | GVKGRRETNTMPQWAGSSWYYLRYIDPHNTEKLADEELLKQWLPVDIYVGGAEHAVLHLL | 540 |
| Query: | 547 | YARFWHKVLYDLGVVPTKEPFQKLFNQGMILGTSYRDSRGALVATDKVEKRDGSFFHVET | 606 |
| | | YARFWHKVLYDLGVVPTKEPFQKLFNQGMILGTSYRDSRGALVATDKVEKRDGSFFHVET | |
| Sbjct: | 541 | YARFWHKVLYDLGVVPTKEPFQKLFNQGMILGTSYRDSRGALVATDKVEKRDGSFFHVET | 600 |
| Query: | 607 | GEELEQAPAKMSKSLKNVVNPDDVVEQYGADTLRVYEMFMGPLDASIAWSEEGLEGSRKF | 666 |
| | | GEELEQAPAKMSKSLKNVVNPDDVVEQYGADTLRVYEMFMGPLDASIAWSEEGLEGSRKF | |
| Sbjct: | 601 | GEELEQAPAKMSKSLKNVVNPDDVVEQYGADTLRVYEMFMGPLDASIAWSEEGLEGSRKF | 660 |
| Query: | 667 | LDRVYRLITTKEITEENSGALDKVYNETVKAVTEQVDQMKFNTAIAQLMVFVNAANKEDK | 726 |
| | | LDRVYRLITTKEITEENSGALDKVYNETVKAVTEQVDQMKFNTAIAQLMVFVNAANKEDK | |
| Sbjct: | 661 | LDRVYRLITTKEITEENSGALDKVYNETVKAVTEQVDQMKFNTAIAQLMVFVNAANKEDK | 720 |
| Query: | 727 | LFSDYAKGFVQLIAPFAPHLGEELWQVLTASGQSISYVPWPSYDESKLVENEIEIVVQIK | 786 |
| | | LFSDYAKGFVQLIAPFAPHLGEELWQ LTASG+SISYVPWPSYDESKLVEN++EIVVQIK | |
| Sbjct: | 721 | LFSDYAKGFVQLIAPFAPHLGEELWQALTASGESISYVPWPSYDESKLVENDVEIVVQIK | 780 |
| Query: | 787 | GKVKAKLVVAKDLSREELQDLALANEKVQAEIAGKDIIKVIAVPNKLVNIVVK | 839 |
| | | GKVKAKLVVAKDLSREELQ++ALANEKVQAEIAGKDIIKVIAVPNKLVNIV+K | |
| Sbjct: | 781 | GKVKAKLVVAKDLSREELQEVALANEKVQAEIAGKDIIKVIAVPNKLVNIVIK | 833 |

[11153] Based on this analysis, it was predicted that these proteins and their epitopes could be useful antigens for vaccines or diagnostics.

### EXAMPLE 2034

[11154] A DNA sequence (GBSx2145) was identified in S. agalactiae <SEQ ID 6289> which encodes the amino acid sequence <SEQ ID 6290>. This protein is predicted to be KLAA1074 protein. Analysis of this protein sequence reveals the following:

```
Possible site: 35
>>> Seems to have an uncleavable N-term signal seq
----- Final Results -----
                              bacterial membrane --- Certainty = 0.0000(Not Clear) < succ>
                                bacterial outside --- Certainty = 0.0000(Not Clear) < succ>
                            bacterial cytoplasm --- Certainty = 0.0000(Not Clear) < succ>
```

[11155] A related GBS nucleic acid sequence <SEQ ID 8961> which encodes amino acid sequence <SEQ ID 8962> was also identified. Analysis of this protein sequence reveals the following:

```
Lipop: Possible site: −1 Crend: 7
SRCFLG: 0
McG: Length of UR: 19
          Peak Value of UR: 2.86
          Net Charge of CR: 4
McG: Discrim Score: 10.27
GvH: Signal Score (−7.5): −3.61
          Possible site: 31
>>> Seems to have an uncleavable N-term signal seq
Amino Acid Composition: calculated from 1
ALOM program Count: 0 value: 2.12 threshold: 0.0
      PERIPHERAL Likelihood = 2.12 7
modified ALOM score: −0.92
*** Reasoning Step: 3
----- Final Results -----
                              bacterial membrane --- Certainty = 0.0000(Not Clear) < succ>
                                bacterial outside --- Certainty = 0.0000(Not Clear) < succ>
                            bacterial cytoplasm --- Certainty = 0.0000(Not Clear) < succ>
```

[11156] The protein has no significant homology with any sequences in the GENPEPT database.

[11157] No corresponding DNA sequence was identified in S. pyogenes.

[11158] SEQ ID 8962 (GBS117) was expressed in E. coli as a His-fusion product. SDS-PAGE analysis of total cell extract is shown in FIG. 29 (lane 8; MW 22.5 kDa).

[11159] GBS117-His was purified as shown in FIG. 200, lane 7.

[11160] Based on this analysis, it was predicted that this protein and its epitopes, could be useful antigens for vaccines or diagnostics.

### EXAMPLE 2035

[11161] A DNA sequence (GBSx2146) was identified in S. agalactiae <SEQ ID 6291> which encodes the amino acid sequence <SEQ ID 6292>. This protein is predicted to be YirC (resE). Analysis of this protein sequence reveals the following:

| Possible site: 28 | | | | |
|---|---|---|---|---|
| >>> Seems to have an uncleavable N-term signal seq | | | | |
| | INTEGRAL | Likelihood = −10.88 | Transmembrane | 177-193 (173-196) |
| | INTEGRAL | Likelihood = −4.09 | Transmembrane | 10-26 (5-29) |

```
----- Final Results -----
                              bacterial membrane --- Certainty = 0.5352(Affirmative) < succ>
                                bacterial outside --- Certainty = 0.0000(Not Clear) < succ>
                            bacterial cytoplasm --- Certainty = 0.0000(Not Clear) < succ>
```

[11162] The protein has homology with the following sequences in the GENPEPT database.

| >GP: CAB15292 GB: Z99120 similar to two-component sensor histidine | | | |
|---|---|---|---|
| kinase [YvqA] [Bacillus subtilis] | | | |
| Identities = 108/379 (28%), Positives = 193/379 (50%), Gaps = 33/379 (8%) | | | |
| Query: | 92 | DNHKKESHDIIRYLTQKRLWQISKEKDGMFVTIKKKTYYVMTKDYSGILVDGSIKKVPKA | 151 |
| | | +N + S + L+ + ++ K D KKK Y + D +G V IKK | |
| Sbjct: | 86 | ENEEASSDKDLSILSSSFIHKVYKLADKQ--EAKKKRY---SADVNGEKVFFVIKKGLSV | 140 |
| Query: | 152 | QSQLFHVINFS------DITYTQHLITKINHFLIVILVLTYIPMLFIMRKTFTGIRESIQ | 205 |
| | | Q +++++ D+ YT L ++ + V+++L++IP +++ + + + | |
| Sbjct: | 141 | NGQSAMMLSYALDSYRDDLAYT--LFKQLLFIIAVVILLSWIPAIWLAKY----LSRPLV | 194 |
| Query: | 206 | SVQTYISSLWKNQGNHQSSQKEIVFSDFDPLLLESQEMANRIYQAEESQRNFFQNASHEL | 265 |
| | | S + ++ + ++ + K + L +EM ++ Q +E++R QN SH+L | |
| Sbjct: | 195 | SFEKHVKRI--SEQDWDDPVKVDRKDEIGKLGHTIEEMRQKLVQKDETERTLLQNISHDL | 252 |
| Query: | 266 | RTPLMSIQGYTEGVQEGII---DAELAHSVILQESKKMKQLVDDIILLSKLD--SNLSDQ | 320 |
| | | +TP+M I+GYT+ +++GI D K VI E+ K+++ + D++ L+KLD + Q | |
| Sbjct: | 253 | KTPVMVIRGYTQSIKDGIFPKGDLENTVDVIECEALKLEKKIKDLLYLTKLDYLAKQKVQ | 312 |
| Query: | 321 | KDEFSLNELLNSIIAYFKPLANKQKISITYRPDKHEKLLK-GNEELIQRAINNILSNALR | 379 |
| | | D FS+ E+ +I K A K+ +++ D E +L G+ E + + NIL N +R | |
| Sbjct: | 313 | HDMFSIVEVTEEVIERLK-WARKE---LSWEIDVEEDILMPGDPEQWNKLLENILENQIR | 368 |
| Query: | 380 | YAVSHIEISYT----NQKLTISNDGPAISKEDLPYIFDRFYKGHGGQTGIGLAMTKEIIK | 435 |
| | | YA + IEIS N +TI NDGP I E L +++ F KG G+ GIGL++ K I+ | |
| Sbjct: | 369 | YAETKIEISMKQDDRNIVITIKNDGPHIEDEMLSSLYEPFNKGKKGEFGIGLSIVKRILT | 428 |
| Query: | 436 | QHHGNIIAESDSTSTTFTI | 454 |
| | | H +I E+D T ++ I | |
| Sbjct: | 429 | LHKASISIENDKTGVSYRI | 447 |

[11163] There is also homology to SEQ ID 1178.

[11164] SEQ ID 6292 (GBS279) was expressed in E. coli as a His-fusion product. SDS-PAGE analysis of total cell extract is shown in FIG. 52 (lane 7; MW 54.5 kDa). It was also expressed in E. coli as a GST-fusion product. SDS-PAGE analysis of total cell extract is shown in FIG. 58 (lane 6; MW 79.4 kDa).

[11165] Based on this analysis, it was predicted that this protein and its epitopes, could be useful antigens for vaccines or diagnostics.

### EXAMPLE 2036

[11166] A DNA sequence (GBSx2147) was identified in S. agalactiae <SEQ ID 6293> which encodes the amino acid sequence <SEQ ID 6294>. This protein is predicted to be two-component response regulator (mtrA). Analysis of this protein sequence reveals the following:

```
Possible site: 37
>>> Seems to have no N-terminal signal sequence
----- Final Results -----
                            bacterial cytoplasm --- Certainty = 0.1706(Affirmative) < succ>
                              bacterial membrane --- Certainty = 0.0000(Not Clear) < succ>
                                bacterial outside --- Certainty = 0.0000(Not Clear) < succ>
```

[11167] A related GBS nucleic acid sequence <SEQ ID 10239> which encodes amino acid sequence <SEQ ID 10240> was also identified.

[11168] The protein has homology with the following sequences in the GENPEPT database.

| >GP: BAB05663 GB: A2001513 two-component response regulator | | | |
|---|---|---|---|
| [Bacillus halodurans] | | | |
| Identities = 87/220 (39%), Positives = 124/220 (55%), Gaps = 4/220 (1%) | | | |
| Query: | 11 | IYFADDEKNIRDLVVPFLEHDGFTVRAFETGDLLLEAYKNQKPDLVILDIMMPGTNGLDV | 70 |
| | | I DDE ++R+LV +L +GF V ETGD ++ + + DLV+LD+MM +G | |
| Sbjct: | 7 | ILIVDDELDLRELVTSYLRKEGFAVYTAETGDEAIKRLEQEPMDLVVLDVMMDEMDGFTA | 66 |
| Query: | 71 | MKSIRQYDNIPIIMLTARDSDVDFITAFNLGTDDYFTKPFSPIKLSLHVKALFKRLDEKA | 130 |
| | | K IR + IPIIMLTAR + D + +G DDY KPFSP +L ++ +R | |
| Sbjct: | 67 | CKEIRAFSQIPIIMLTARGGEDDKVMGLQIGADDYIVKPFSPRELVARIEVALRRTQGIQ | 126 |
| Query: | 131 | IKNDTQYQFLDLTLDTEKRIALLSNEEMPLTKTEFDFLLVLIEKPETAFSRETLLNRIWG | 190 |
| | | +DT Y+F +L + R ++ +E+ LTK E+D L+ L+E F+RE L +R+WG | |
| Sbjct: | 127 | QVDDTGYRFNELRIQPSGRKVFVNGQEISLTKKEYDLLVFLLEHRGRVFTREHLHDRLWG | 186 |
| Query: | 191 | FDDIES--RAVDDTIKRLRKKFKQYHSQVSIKTVWGYGFK | 228 |
| | | D + R VD IK LR K K + IKTVWG G+K | |
| Sbjct: | 187 | MDTQQGTLRTVDTHIKTLRLKLKP--ADRFIKTVWGVGYK | 224 |

[11169] There is also homology to SEQ ID 3260.

[11170] Based on this analysis, it was predicted that this protein and its epitopes, could be useful antigens for vaccines or diagnostics.

### EXAMPLE 2037

[11171] A DNA sequence (GBSx2148) was identified in S. agalactiae <SEQ ID 6295> which encodes the amino acid sequence <SEQ ID 6296>. Analysis of this protein sequence reveals the following:

| Possible Site: 55 | | | | |
|---|---|---|---|---|
| >>> Seems to have a cleavable N-term signal seq. | | | | |
| | INTEGRAL | Likelihood = −2.18 | Transmembrane | 1568-1584 (1568-1585) |
| | INTEGRAL | Likelihood = −0.16 | Transmembrane | 338-354 (338-354) |

```
----- Final Results -----
                              bacterial membrane --- Certainty = 0.1871(Affirmative) < succ>
                                bacterial outside --- Certainty = 0.0000(Not Clear) < succ>
                            bacterial cytoplasm --- Certainty = 0.0000(Not Clear) < succ>
```

[11172] A related GBS nucleic acid sequence <SEQ ID 10237> which encodes amino acid sequence <SEQ ID 10238> was also identified.

[11173] The protein has homology with the following sequences in the GENPEPT database.

| >GP: AAG09771 GB: AF243528 cell envelope proteinase | | | |
|---|---|---|---|
| [Streptococcus thermophilus] | | | |
| Identities = 797/1594 (50%), Positives = 1056/1594 (66%), Gaps = 39/1594 (2%) | | | |
| Query: | 21 | MNTKQRFSIRKYKLGAVSVLLGTLFFLGGITNVAADSVINKPSDIAVEQQVKDSPTS-IA | 79 |
| | | M K+ FS+RKYK+G VSVLLG +F G +VAAD + + + VE V D+ S A | |
| Sbjct: | 1 | MKKKETFSLRKYKIGTVSVLLGAVFLFAGAPSVAADELTSLV-ETKVEATVPDAIVSESA | 59 |
| Query: | 80 | NETPTNN--TSSALASTAQDNLVTKANNSPTETQPVAESHSQATETFSPVANQPVESTQE | 137 |
| | | +E+P +++ +T+ D T ++ + S + ET P P S ++ | |
| Sbjct: | 60 | SESPVVEELVDTSVEATSTDVTTTDNEEETPGSEALENSANTEVETTQPAVETPAISEKK | 119 |
| Query: | 138 | VSKTPLTKQNLAVKSTPAISKET--PQNIDSNKIITVPKVWNTGYKGEGTVVAIIDSGLD | 195 |
| | | V + K ++A ++T ++E PQNIDSN IITVPKVW +GYKGEGTVVAIIDSGLD | |
| Sbjct: | 120 | VEEEE--KLSVADETTAITNQEEAKPQNIDSNTIITVPKVWYSGYKGEGTVVAIIDSGLD | 177 |
| Query: | 196 | INHDALQLNDSTKAKYQNEQQMNAAKAKAGINYGKWYNNKVIFGHNYVDVNTELKEVKST | 255 |
| | | ++HD L ++D + AKY++E+++ AAK AGI YG+W+N+KV+FG+NYVDVNT LKE | |
| Sbjct: | 178 | VDHDVLHISDLSTAKYKSEKEIEAAKEAAGITYGEWFNDKVVFGYNYVDVNTVLKEEDKR | 237 |
| Query: | 256 | SHGMHVTSIATANPSKKDTNELIYGVAPEAQVMFMRVFSDEKRGTGPALYVKAIEDAVKL | 315 |
| | | SHGMHVTSIAT NP++ +L+YGVAPEAQVMFMRVFSD K TG ALYVKAIEDAVKL | |
| Sbjct: | 238 | SHGMHVTSIATGNPTQPVAGQLMYGVAPEAQVMFMRVFSDLKATTGAALYVKAIEDAVKL | 297 |
| Query: | 316 | GADSINLSLGGANGSLVNADDRLIKALEMARLAGVSVVIAAGNDGTFGSGASKPSALYPD | 375 |
| | | GADSINLSLGGANGS+VN ++ + A+E AR AGVSVVIAAGNDGTFGSG S PSA YPD | |
| Sbjct: | 298 | GADSINLSLGGANGSVVNMNENVTAAIEAARRAGVSVVIAAGNDGTFGSGHSNPSADYPD | 357 |
| Query: | 376 | YGLVGSPSTAREAISVASYNNTTLVNKVFNIIGLENNRNLNNGLAAYADPKVSDKTFEVG | 435 |
| | | YGLVG+PSTA +AISVASYNNTT+ +KV NIIGLENN +LN G +++ +P+ S FE+G | |
| Sbjct: | 358 | YGLVGAPSTAHDAISVASYNNTTVGSKVINIIGLENNADLNYGKSSFDNPEKSPVPFEIG | 417 |
| Query: | 436 | KQYDYVFVGKGNDNDYKDKTLNGKIALIERGDITFTKKVVNAINHGAVGAIIFNNKAGEA | 495 |
| | | K+Y+YV+ G G +D+ L GK+ALI+RG ITF++K+ NA GAVG +IFN++ GEA | |
| Sbjct: | 418 | KEYEYVYAGIGQASDFDGLDLTGKLALIKRGTITFSEKIANATAAGAVGVVIFNSRPGEA | 477 |
| Query: | 496 | NLTMSLDPEASAIPAIFTQKEFGDVLAKNNYKIVFNNIKNKQANPNAGVLSDFSSWGLTA | 555 |
| | | N++M LD A AIP++F EFG+ LA N+YKI FNN + + NP AG+LSDFSSWGL+A | |
| Sbjct: | 478 | NVSMQLDDTAIAIPSVFIPLEFGEALAANSYKIAFNNETDIRPNPEAGLLSDFSSWGLSA | 537 |
| Query: | 556 | DGQLKPDLSAPGGSIYAAINDNEYDMMSGTSMASPHVAGATALVKQYLLKEHPELKKGDI | 615 |
| | | DG+LKPDL+APGG+IYAAINDN+Y M GTSMASPHVAGA LVKQYLL +P +I | |
| Sbjct: | 538 | DGELKPDLAAPGGAIYAAINDNDYANMQGTSMASPHVAGAAVLVKQYLLATYPTKSPQEI | 597 |
| Query: | 616 | ERTVKYLLMSTAKAHLNKDTGAYTSPRQQGAGIIDVAAAVQTGLYLTGGENNYGSVTLGN | 675 |
| | | E VK+LLMSTAKAH+NK+T AYTSPRQQGAGIID AAA+ TGLYLT GE+ YGS+TLGN | |
| Sbjct: | 598 | EALVKHLLMSTAKAHVNKETTAYTSPRQQGAGIIDTAAAISTGLYLT-GEDGYGSITLGN | 656 |
| Query: | 676 | IKDKISFDVTVHNINKVAKDLHYTTYLNTDQVKDGFVTLAPQQLGTFTGKTIRIEPGQTQ | 735 |
| | | ++D SF VT+HNI K L+Y+T L TD + L + + + + ++ + | |
| Sbjct: | 657 | VEDTFSFTVTLHNITNEDKTLNYSTQLTTDTAQKRIDHLGSTSISRDSWRKVTVKANSST | 716 |
| Query: | 736 | TITIDIDVSKYHDMLKKVMPNGYFLEGYVRFTDPVDGGEVLSIPYVGFKGEFQNLEVLEK | 795 |
| | | T+TI++D S + + L +M NGY+LEG+VRFTD D G+++SIPYVGF+GEFQNL VLE+ | |
| Sbjct: | 717 | TVTINVDASSFAEELTGLMKNGYYLEGFVRFTDVADDGDIVSIPYVGFRGEFQNLAVLEE | 776 |
| Query: | 796 | SIYKLVANKEKGFYFQP--KQTNEVPGSEDYTALMTTSSEPIYSTDGTSPIQLKALGSYK | 853 |
| | | IY L+A+ + GFYF+P Q N V S YT L+T S+E IYSTD S +K LG++K | |
| Sbjct: | 777 | PIYNLIADGKGGFYFEPVTAQPNTVDISHHYTGLVTGSTELIYSTDKRSDSAIKTLGTFK | 836 |
| Query: | 854 | SIDGKWILQLDQKGQPHLAISPNDDQNQDAVAVKGVFLRNFNNLRAKVYRADDVNLQKPL | 913 |
| | | + G ++L+LD+ G+PHLAISPN D NQD++ KGVFLRN+ +L A VY ADD PL | |
| Sbjct: | 837 | NKAGYFVLELDESGKPHLAISPNGDDNQDSLVFKGVFLRNYTDLVASVYAADDTERTNPL | 896 |
| Query: | 914 | WVSAPQAGDKNYYSGNTENPKSTFLYDTEWKGTTTDGIPLEDGKYKYVLTYYSDVPGSKP | 973 |
| | | W S PQ+GDKN YSGN +NPKS+ +Y TEW GT +DG L DGKY+YVLTY S VPG+ | |
| Sbjct: | 897 | WESQPQSGDKNIYSGNPKNPKSSIIYPTEWNGTDSDGNALADGKYQYVLTYSSKVPGAAV | 956 |
| Query: | 974 | QQMVFDITLDRQAPTLTTATYDKDRRIFKARPAVEHGESGIFREQVFYLKKDKDGHYNSV | 1033 |
| | | Q M+FD+ +DR++P +TTATYD+ F RPA+E GESG++REQVFYL D G ++ | |
| Sbjct: | 957 | QTMIFDVIIDRESPVITTATYDETNFTFNPRPAIEKGESGLYREQVFYLVADASG-VTTI | 1015 |
| Query: | 1034 | LRQQGEDGILVEDNKVFIKQEKDGSFILPKEVNDFSHVYYTVEDYAGNLVSAKLEDLINI | 1093 |
| | | + V DNKVF+ Q DGSF LP ++ D S YYTVEDYAGN+ K+E+LI+I | |
| Sbjct: | 1016 | PSLLKNGDVTVSDNKVFVAQNDDGSFTLPLDLADISKFYYTVEDYAGNISYEKVENLISI | 1075 |
| Query: | 1094 | GNKNGLVNVKVFSPELNSNVDIDFSYSVKDDKGNIIKK-QHHGKDLNLLKLPFGTYTFDL | 1152 |
| | | GN+ GLV V + + NS V I FSYSV D+ G I+ + + D ++LKLPFGTYTFDL | |
| Sbjct: | 1076 | GNEKGLVTVNILDKDTNSPVPILFSYSVTDETSKIVAELPRYAGDTSVLKLPFGTYTFDL | 1135 |
| Query: | 1153 | FLYDEERANLISPKSVTVTISEKDSLKDVLFKVNLLKKAALLVEFDKLLPKGATVQLVTK | 1212 |
| | | FLYD E ++L VTI E +S +V F V L KA LL++ D LLP G+T+QLVT | |
| Sbjct: | 1136 | FLYDTEWSSLAGETKAVVTILEDNSTAEVNFYVTLKDKANLLIDIDALLPSGSTIQLVTA | 1195 |
| Query: | 1213 | TNTVVDLPKATYSPTDYGKNIPVGDYRLNVTLPSGYSTLENLDDLLVSVKEDQVNLTKLT | 1272 |
| | | + LP A YS TDYGK +PVG Y + TLP GY LE LD V+V +Q N+ KLT | |
| Sbjct: | 1196 | DGQAIQLPNAKYSKTDYGKFVPVGTYTILPTLPEGYEFLEELD---VAVLANQSNVKKLT | 1252 |
| Query: | 1273 | LINKAPLINALAEQTDIITQPVFYNAGTHLKNNYLANLEKAQTLIKNRVEQTSIDNAIAA | 1332 |
| | | LINK L +AE + +YNA L+ Y LE A + N+ Q +D+A+A+ | |
| Sbjct: | 1253 | LINKVALKELIAELAGLEETARYYNASPELQTAYAKALEDANAVYANKHNQAQVDSALAS | 1312 |
| Query: | 1333 | LRESRQALNGKETDTSLLAKAILAETEIKGNYQFVNASPLSQSTYINQVQLAKNLLQKPN | 1392 |
| | | L +R+ LNG+ TD L + T + N+ + NA Q Y V+ A+ +L + N | |
| Sbjct: | 1313 | LVAAREQLNGQATDKEKLIAEVSNYTPTQANFIYYNAENTKQIAYDTAVRSAQLVLNQEN | 1372 |
| Query: | 1393 | VTQSEVDKALENLDIAKNQLNGHETDYSGLHHMIIKANVLKQTSSKYQNASQFAKENYNN | 1452 |
| | | VTQ+ V++AL +L AK L+G +TD S L + ++VLK T +KY NAS+ K+ Y+ | |
| Sbjct: | 1373 | VTQAVVNQALADLLAAKANLDGQKTDISALRSAVSVSSVLKATDAKYLNASENVKQAYDQ | 1432 |
| Query: | 1453 | LIKKAELLLSNRQATQAQVEELLNQIKATEQELDG----RDRVSSAENYSQSLNDNDSLN | 1508 |
| | | ++ A+ +L + A+QA V++ L + + + ELDG + N + D ++ | |
| Sbjct: | 1433 | AVEAAKAILVDESASQASVDQALAVLTSAQAELDGVATSTNDAKEPANTATDKKDEGTVT | 1492 |
| Query: | 1509 | TTPIN--------PP-----NQPQALIFKKGMTKESEVAQKRVLGVTSQTDNQKVKTNKL | 1555 |
| | | PI+ PP N I +K + + + L + + NQ+ + +L | |
| Sbjct: | 1493 | PPPIDSEIVDVQAPPVKDTGNSEHVPIGQK-PNPQPTLPRPVTLQASLSSPNQEKQVTQL | 1551 |
| Query: | 1556 | PKTGESTPKITYTILLFSLSMLGLATIKLKSIKR | 1589 |
| | | P TGE+ K L ++GL T+ L SI+R | |
| Sbjct: | 1552 | PNTCENDTK----YYLVPGVIIGLGTL-LVSIRR | 1580 |

[11174] A related GBS gene <SEQ ID 8963> and protein <SEQ ID 8964> were also identified. Analysis of this protein sequence reveals the following:

| Lipop: Possible site: −1 Crend: 10 | | | | | |
|---|---|---|---|---|---|
| SRCFLG: 0 | | | | | |
| McG: Length of UR: 1 | | | | | |
| Peak Value of UR: 2.55 | | | | | |
| Net Charge of CR: 4 | | | | | |
| McG: Discrim Score: 2.60 | | | | | |
| GvH: Signal Score (−7.5): −0.78 | | | | | |
| Possible site: 35 | | | | | |
| >>> Seems to have a cleavable N-term signal seq. | | | | | |
| Amino Acid Composition: calculated from 36 | | | | | |
| ALOM program count: 1 value: −0.16 threshold: 0.0 | | | | | |
| | INTEGRAL | Likelihood = −0.16 | Transmembrane | 318 − 334 | (318 − 334) |
| | PERIPHERAL | Likelihood = 2.54 | 1161 | | |

```
  modified ALOM score: 0.53
icml HYPID: 7 CFP: 0.106
*** Reasoning Step: 3
----- Final Results -----
                            bacterial membrane --- Certainty = 0.1065(Affirmative) < succ>
                              bacterial outside --- Certainty = 0.0000(Not Clear) < succ>
                          bacterial cytoplasm --- Certainty = 0.0000(Not Clear) < succ>
LPXTG motif: 1535-1539
```

[11175] The protein has homology with the following sequences in the databases:

[chemical structure]

[chemical structure]

[11176] A related GBS nucleic acid sequence <SEQ ID 10965> which encodes amino acid sequence <SEQ ID 10966> was also identified.

[11177] A related DNA sequence was identified in S. pyogenes <SEQ ID 6297> which encodes the amino acid sequence <SEQ ID 6298>. Analysis of this protein sequence reveals the following:

```
LPXTG motif: 1614-1619
          Possible site: 33
>>> Seems to have a cleavable N-term signal seq.
      INTEGRAL Likelihood = −4.46 Transmembrane 1623 − 1639 (1621 − 1641)
----- Final Results -----
                            bacterial membrane --- Certainty = 0.2784(Affirmative) < succ>
                              bacterial outside --- Certainty = 0.0000(Not Clear) < succ>
                          bacterial cytoplasm --- Certainty = 0.0000(Not Clear) < succ>
```

[11178] The protein has homology with the following sequences in the databases:

| >GP:AAG09771 GB:AF243528 cell envelope proteinase [Streptococcus thermophilus] | | | |
|---|---|---|---|
| Identities = 465/1125 (41%), Positives = 668/1125 (59%), Gaps = 61/1125 (5%) | | | |
| Query: | 1 | VEKKQRFSLRKYKSGTFSVLIGSVFLVM-TTTVAADELSTMSEPTITNHAQQQAQHLTNT | 59 |
| | | ++KK+ FSLRKYK GT SVL+G+VFL +VAADEL+++E + T | |
| Sbjct: | 1 | MKKKETFSLRKYKIGTVSVLLGAVFLFAGAPSVAADELTSLVETKVKA-----------T | 49 |
| Query: | 60 | ELSSAESKSQDTSQITLKTNREKEQSQDLVSEPTTTELADTDAASMANTGSDATQKSASL | 119 |
| | | + S+S S + E+ D E T+T++ TD GS+A + SA | |
| Sbjct: | 50 | VPDAIVSESASESPVV-------EELVDTSVEATSTDVTTTDNEE-ETPGSEALENSA-- | 99 |
| Query: | 120 | PPVNTDVHDWVKTKGAWDKGYKGQGKVVAVIDTGIDPAHQSMRISDVSTAKVKSKEDMLA | 179 |
| | | NT+V T+ A + + KV + + ++D +TA +E | |
| Sbjct: | 100 | ----NTEVET---TQPAVETPAISEKKV--------EEEEKLSVADETTAITNQEE---- | 140 |
| Query: | 180 | RQKAAGINYGSWINDKVVFAHNYVENSDNIKE-NQFEDFDEDWENFEFDAEAEPKAIKKH | 238 |
| | | K I+ + I V+ Y + + D D D + + A+ K+ K+ | |
| Sbjct: | 141 | -AKPQNIDSNTIITVPKVWYSGYKGEGTVVAIIDSGLDVDHDVLHISDLSTAKYKSEKEI | 199 |
| Query: | 239 | KIYRPQSTQAPKETVIKTEETDGSHDIDWTQTDDDTKYESHGMHVTGIVAGNSKEAAATG | 298 |
| | | + + + E + G + +D + SHGMHVT I GN + A G | |
| Sbjct: | 200 | EAAKEAAGITYGEW-FNDKVVFGYNYVDVNTVLKEEDKRSHGMHVTSIATGNPTQPVA-G | 257 |
| Query: | 299 | ERFLGIAPEAQVMFMRVFANDIMGSAESLFIKAIEDAVALGADVINLSLGTANGAQLSGS | 358 |
| | | + G+APEAQVMFMRVF++ + +L++KAIEDAV LGAD INLSLG ANG+ ++ + | |
| Sbjct: | 258 | QLMYGVAPEAQVMFMRVFSDLKATTGAALYVKAIEDAVKLGADSINLSLGGANGSVVNMN | 317 |
| Query: | 359 | KPLMEAIEKAKKAGVSVVVAAGNERVYGSDHDDPLATNPDYGLVGSPSTGRTPTSVAAIN | 418 |
| | | + + AIE A++AGVSVV+AAGN+ +GS H +P A PDYGLVG+PST SVA+ N | |
| Sbjct: | 318 | ENVTAAIEAARRAGVSVVIAAGNDGTFGSGHSNFSADYPDYGLVGAPSTAHDAISVASYN | 377 |
| Query: | 419 | SKWVIQRLMTVKELENRADLNHGKAIYSESVDFKDIKDSLGYDKSHQFAYVKESTDAGYN | 478 |
| | | + V +++ + LEN ADLN+GK+ + ++ + + +G + + +A + +++D ++ | |
| Sbjct: | 378 | NTTVGSKVINIIGLENNADLNYGKSSF-DNPEKSPVPFEIGKEYEYVYAGIGQASD--FD | 434 |
| Query: | 479 | AQDVKGKIALIERDPNKTYDEMIALAKKHGALGVLIFNNKPGQSNRSMRLTANGMGIPSA | 538 |
| | | D+ GK+ALI+R T+ E IA A GA+GV+IFN++PG++N SM+L + IPS | |
| Sbjct: | 435 | GLDLTGKLALIKRG-TITFSEKIANATAAGAVGVVIFNSRPGEANVSMQLDDTAIAIPSV | 493 |
| Query: | 539 | FISHEFGKAMSQLNGNGTGSLEFDSVVSKAPSQKGNEMNHFSNWGLTSDGYLKPDITAPG | 598 |
| | | FI EFG+A++ + + F++ P+ + ++ FS+WGL++DG LKPD+ APG | |
| Sbjct: | 494 | FIPLEFGEALAA----NSYKIAFNNETDIRPNPEAGLLSDFSSWGLSADGELKPDLAAPG | 549 |
| Query: | 599 | GDIYSTYNDNHYGSQTGTSMASPQIAGASLLVKQYLEKTQPNLPKEKIADIVKNLLMSNA | 658 |
| | | G IY+ NDN Y + GTSMASP +AGA++LVKQYL T P ++I +VK+LLMS A | |
| Sbjct: | 550 | GAIYAAINDNDYANMQGTSMASPHVAGAAVLVKQYLLATYPTKSPQEIEALVKHLLMSTA | 609 |
| Query: | 659 | QIHVNPETKTTTSPRQQGAGLLNIDGAVTSGLYVTGKDNYGSISLGNITDTMTFDVTVHN | 718 |
| | | + HVN ET TSPRQQOAG+++ A+++GLY+TG+D YGSI+LGN+ DT +F VT+HN | |
| Sbjct: | 610 | KAHVNKETTAYTSPRQQGAGIIDTAAAISTGLYLTGEDGYGSITLGNVEDTFSFTVTLHN | 669 |
| Query: | 719 | LSNKDKTLRYDTELLTDHVDPQKGRFTLTSHSLKTYQGGEVTVPANGKVTVRVTMDVSQF | 778 |
| | | ++N+DKTL Y T+L TD + TS S +++ +VTV AN TV + +D S F | |
| Sbjct: | 670 | ITNEDKTLNYSTQLTTDTAQKRIDHLGSTSISRDSWR--KVTVKANSSTTVTINVDASSF | 727 |
| Query: | 779 | TKELTKQMPNGYYLEGFVRFRDSQDDQLNRVNIPFVGFKGQFENLAVAEESIYRLKSQGK | 838 |
| | | +ELT M NGYYLEGFVRF D DD + V+IP+VGF+G+F+NLAV EE IY L + GK | |
| Sbjct: | 728 | AEELTGLMKNGYYLEGFVRFTDVADDG-DIVSIPYVGFRGEFQNLAVLEEPIYNLIADGK | 786 |
| Query: | 839 | TGFYFDE-SGPKDDIYVGKHFTGLVTLGSETNVSTKTISDNGLHTLGTFKNADGKFILEK | 897 |
| | | GFYF+ + + + + H+TGLVT +E ST SD+ + TLGTFKN G F+LE | |
| Sbjct: | 787 | GGFYFEPVTAQPNTVDISHHYTGLVTGSTELIYSTDKRSDSAIKTLGTFKNKAGYFVLEL | 846 |
| Query: | 898 | NAQGNPVLAISPNGDNNQDFAAFKGVFLRKYQGLKASVYHASDKEHKNPLWVS-PESFKG | 956 |
| | | + G P LAISPNGD+NQD FKGVFLR Y L ASVY A D E NPLW S P+S G | |
| Sbjct: | 847 | DESGKPHLAISPNGDDNQDSLVFKGVFLRNYTDLVASVYAADDTERTNPLWESQPQS--G | 904 |
| Query: | 957 | DKN-FNSDIRFAKSTTLLGTAFSGKSLTGAELPDGHYHYVVSYYPDVVGAKRQEMTFDMI | 1015 |
| | | DKN ++ + + KS+ + T ++G G L DG Y YV++Y V GA Q M FD+I | |
| Sbjct: | 905 | DKNIYSGNPKNPKSSIIYPTEWNGTDSDGNALADGKYQYVLTYSSKVPGAAVQTMIFDVI | 964 |
| Query: | 1016 | LDRQKPVLSQATFDPETNRFKPEPLKDRGLAGVRKDSVFYLERKDNKPYTVTINDSYKYV | 1075 |
| | | +DR+ PV++ AT+D F P P ++G +G+ ++ VFYL + T+ V | |
| Sbjct: | 965 | IDRESPVITTATYDETNFTFNPRPAIEKGESGLYREQVFYLVADASGVTTIPSLLKNGDV | 1024 |
| Query: | 1076 | SVEDNKTFVERQADGSFILPLDKAKLGDFYYMVEDFAGNVAIAKL | 1120 |
| | | +V DNK FV + DGSF LPLD A + FYY VED+AGN++ K+ | |
| Sbjct: | 1025 | TVSDNKVFVAQNDDGSFTLPLDLADISKFYYTVEDYAGNISYEKV | 1069 |

[11179] An alignment of the GAS and GBS proteins is shown below.

| Identities = 543/1676 (32%), Positives = 821/1676 (48%), Gaps = 158/1676 (9%) | | | |
|---|---|---|---|
| Query: | 24 | KQRFSIRKYKLGAVSVLLGTLFFLGGITNVAAD--SVINKPSDIAVEQQVKDSPTSI--- | 78 |
| | | KQRFS+RKYK G SVL+G++F + T VAAD S +++P+ QQ T+ | |
| Sbjct: | 4 | KQRFSLRKYKSGTFSVLIGSVFLVM-TTTVAADELSTMSEPTITNHAQQQAQHLTNTELS | 62 |
| Query: | 79 | ANETPTNNTSSALASTAQD-----NLVTKANNSPTETQPVAESHSQATETFSPVANQPVE | 133 |
| | | + E+ + +TS T ++ +LV++ + A + ++ A+ P | |
| Sbjct: | 63 | SAESKSQDTSQITLKTNREKEQSQDLVSEPTTTELADTDAASMANTGSDATQKSASLPPV | 122 |
| Query: | 134 | STQEVSKTPLTKQ--NLAVKSTPAISKETPQNID-SNKIITVPKVWNTGYKGEGTVVAI- | 189 |
| | | +T +V TK + K + ID +++ + + V K + ++A | |
| Sbjct: | 123 | NT-DVHDWVKTKGAWDKGYKGQGKVVAVIDTGIDPAHQSMRISDVSTAKVKSKEDMLARQ | 181 |
| Query: | 190 | ----IDSGLDIN------HDALQLNDSTKAK--------YQNEQQMNAAKAKAGINYGKW | 231 |
| | | I+ G IN H+ ++ +D+ K ++N + A+ KA I K | |
| Sbjct: | 182 | KAAGINYGSWINDKVVFAHNYVENSDNIKENQFEDFDEDWENFEFDAEAEPKA-IKKHKI | 240 |
| Query: | 232 | YN-------------NKVIFGHNYVDVNTELKEVKSTSHGMHVTSIATANPSKKD-TNEL | 277 |
| | | Y + G + +D + K SHGMHVT I N + T E | |
| Sbjct: | 241 | YRPQSTQAPKETVIKTEETDGSHDIDWTQTDDDTKYESHGMHVTGIVAGNSKEAAATGER | 300 |
| Query: | 278 | IYGVAPEAQVMFMRVFSDEKRGTGPALYVKAIEDAVKLGADSINLSLGGANGSLVNADDR | 337 |
| | | C+APEAQVMFMRVF+++ G+ +L++KAIEDAV LGAD INLSLG ANG+ ++ | |
| Sbjct: | 301 | FLGIAPEAQVMFMRVFANDIMGSAESLFIKAIEDAVALGADVINLSLGTANGAQLSGSKP | 360 |
| Query: | 338 | LIKALEMARLAGVSVVIAAGNDGTFGSGASKPSALYPDYGLVGSPSTAREAISVASYNNT | 397 |
| | | L++A+E A+ AGVSVV+AAGN+ +GS P A PDYGLVGSPST R SVA+ N+ | |
| Sbjct: | 361 | LMEAIEKAKKAGVSVVVAAGNERVYGSDHDDPLATNPDYGLVGSPSTGRTPTSVAAINSK | 420 |
| Query: | 398 | TLVNKVFNIIGLENNRNLNNGLAAYA---DPKVSDKTFEVGKQYDYVFVGKGNDNDYKDK | 454 |
| | | ++ ++ + LEN +LN+G A Y+ D K + K + + +V + D Y + | |
| Sbjct: | 421 | WVIQRLMTVKELENRADLNHGKAIYSESVDFKDIKDSLGYDKSHQFAYVKESTDAGYNAQ | 480 |
| Query: | 455 | TLNGKIALIERG-DITFTKKVVNAINHGAVGAIIFNNKAGEANLTMSLDPEASAIPAIFT | 513 |
| | | + GKIALIER + T+ + + A HGA+G +IFNNK G++N +M L IP+ F | |
| Sbjct: | 481 | DVKGKIALIERDPNKTYDEMIALAKKHGALGVLIFNNKPGQSMRSMRLTANGMGIPSAFI | 540 |
| Query: | 514 | QKEFGDVLAKNNYK----IVFNNIKNKQANPNAGVLSDFSSWGLTADGQLKPDLSAPGGS | 569 |
| | | EFG +++ N + F+++ +K + ++ FS+WGLT+DG LKPD++APGG | |
| Sbjct: | 541 | SHEFGKAMSQLNGNGTGSLEFDSVVSKAPSQKGNEMNHFSNWGLTSDGYLKPDITAPGGD | 600 |
| Query: | 570 | IYAAINDNEYDMMSGTSMASPHVAGATALVKQYLLKEHPELKKGDIERTVKYLLMSTAKA | 629 |
| | | IY+ NDN Y +GTSMASP +AGA+ LVKQYL K P L K I VK LLMS A+ | |
| Sbjct: | 601 | IYSTYNDNHYGSQTGTSMASPQIAGASLLVKQYLEKTQPNLPKEKIADIVKNLLMSNAQI | 660 |
| Query: | 630 | HLNKDTGAYTSPRQQGAGIIDVAAAVQTGLYLTGGENNYGSVTLGNIKDKISFDVTVHNI | 689 |
| | | H+N +T TSPRQQGAG++++ AV +GLY+TG ++NYGS++LGNI D ++FDVTVHN+ | |
| Sbjct: | 661 | HVNPETKTTTSPRQQGAGLLNIDGAVTSGLYVTG-KDNYGSISLGNITDTMTFDVTVHNL | 719 |
| Query: | 690 | NKVAKDLHYTTYLNTDQV--KDGFVTLAPQQLGTFTGKTIRIEPGQTQTITIDIDVSKYH | 747 |
| | | + K L Y T L TD V + G TL L T+ G + + T+ + +DVS++ | |
| Sbjct: | 720 | SNKDKTLRYDTELLTDHVDPQKGRFTLTSHSLKTYQGGEVTVPANGKVTVRVTMDVSQFT | 779 |
| Query: | 748 | DMLKKVMPNGYFLEGYVRFTDPVDGG-EVLSIPYVGFKGEFQNLEVLEKSIYKLVANKEK | 806 |
| | | L K MPNGY+LEG+VRF D D ++IP+VGFKG+F+NL V E+SIY+L + + | |
| Sbjct: | 780 | KELTKQMPNGYYLEGFVRFRDSQDDQLNRVNIPFVGFKGQFENLAVAEESIYRLKSQGKT | 839 |
| Query: | 807 | GFYFQPK-QTNEVPGSEDYTALMTTSSEPIYSTDGTSPIQLKALGSYKSIDGKWILQLDQ | 865 |
| | | GEYF +++ + +T L+T SE ST S L LG++K+ DGK+IL+ + | |
| Sbjct: | 840 | GFYFDESGPKDDIYVGKHFTGLVTLGSETNVSTKTISDNGLHTLGTFKNADGKFILEKNA | 899 |
| Query: | 866 | KGQPHLAISPNDDQNQDAVAVKGVFLRNFNNLRAKVYRADDVNLQKPLWVSAPQ-AGDKN | 924 |
| | | +G P LAISPN D NQD A KGVFLR + L+A VY A D + PLWVS GDKN | |
| Sbjct: | 900 | QGNPVLAISPNGDNNQDFAAFKGVFLRKYQGLKASVYHASDKEHKNPLWVSPESFKGDKN | 959 |
| Query: | 925 | YYSGNTENPKSTFLYDTEWKGTTTDGIPLEDGKYKYVLTYYSDVPGSKPQQMVFDITLDR | 984 |
| | | + S + KST L T + G + G L DG Y YV++YY DV G+K Q+M FD+ LDR | |
| Sbjct: | 960 | FNS-DIRFAKSTTLLGTAFSGKSLTGAELPDGHYHYVVSYYPDVVGAKRQEMTFDMILDR | 1018 |
| Query: | 985 | QAPTLTTATYDKDRRIFKARPAVEHGESGIFREQVFYLKKDKDGHYNSVLRQQGEDGILV | 1044 |
| | | Q P L+ AT+D + FK P + G +G+ ++ VFYL++ KD +V + V | |
| Sbjct: | 1019 | QKPVLSQATFDPETNRFKPEPLKDRGLAGVRKDSVFYLER-KDNKPYTVTINDSYKYVSV | 1077 |
| Query: | 1045 | EDNKVFIKQEKDGSFILPKEVNDFSHVYYTVEDYAGNLVSAKLEDLINIGNKNGLVNVKV | 1104 |
| | | EDNK F++++ DGSFILP + YY VED+AGN+ AKL D + + +K+ | |
| Sbjct: | 1078 | EDNKTFVERQADGSFILPLDKAKLGDFYYMVEDFAGNVAIAKLGDHLPQTLGKTPIKLKL | 1137 |
| Query: | 1105 | FSPELNSNVDIDFSYSVKDDKGNIIKKQ------HHGKDLNLLKLPFGTYTFDLFLYDEE | 1158 |
| | | + + + + ++ Q H + + L D F+ E | |
| Sbjct: | 1138 | TDGNYQTKETLKDNLEMTQSDTGLVTNQAQLAVVHRNQPQSQLT----KMNQDFFISFNE | 1193 |
| Query: | 1159 | RANLISPKSVTVTISEKDSLKDVLFKVNLLKKAALLVEFDKLLP-----KGATVQLVTKT | 1213 |
| | | N K K+++ + L VN+ K + K P GA+V + T | |
| Sbjct: | 1194 | DGN----KDFVAFKGLKNNVYNDL-TVNVYAKD----DHQKQTPIWSSQAGASVSAIEST | 1244 |
| Query: | 1214 | NTVVDLPKATYSPTDYGKNIPVGDYRLNVTLPSGYSTLENLDDLLVSVKEDQVNLT--KL | 1271 |
| | | A Y T G + GDY+ VT + E+ +SV + + +T | |
| Sbjct: | 1245 | --------AWYGITARGSKVMPGDYQYVVTYRDEHGK-EHQKQYTISVNDKKPMITQGRF | 1295 |
| Query: | 1272 | TLINK----APLINALAEQTDIITQPVFYNAGTHLKNNYLANLEKAQTLIKNRVEQTSID | 1327 |
| | | IN P + + I+ + VFY A KN ++ + + I T D | |
| Sbjct: | 1296 | DTINGVDHFTPDKTKALDSSGIVREEVFYLA---KKNGRKFDVTEGKDGI------TVSD | 1346 |
| Query: | 1328 | NAIAALRESRQALNGKETDTSLLAKAILAETEIKGNYQFVNASPL----SQSTYIN---- | 1379 |
| | | N + + + + D L+ + GN F L +N | |
| Sbjct: | 1347 | NKVYIPKNPDGSYTISKRDGVTLSDYYYLVEDRAGNVSFATLRDLKAVGKDKAVVNFGLD | 1406 |
| Query: | 1380 | -QVQLAKNLLQKPNVTQSEVDKALENLDIAKNQLNGHETDYS--GLHHMIIKANVLKQTS | 1436 |
| | | V K ++ + + K+ ENL+ N N Y + + N K S | |
| Sbjct: | 1407 | LPVPEDKQIVNFTYLVRDADGKPIENLEYYNNSGNSLILPYGKYTVELLTYDTNAAKLES | 1466 |
| Query: | 1437 | SKYQNASQFAKSNYNNLIKKAELLLSNR----------QATQAQVEELLNQIKATEQEL- | 1485 |
| | | K + + A N+ + K +L +++ + ++ ++ +Q+ EQ L | |
| Sbjct: | 1467 | DKIVSFTLSADNNFQQVTFKITMLATSQITAHFDHLLPEGSRVSLKTAQDQLIPLEQSLY | 1526 |
| Query: | 1486 | ----------DGRDRVSSAENYSQSLNDNDSLNTTPINPPNQPQALIFKKGMTKES---- | 1531 |
| | | +G V + + N +NT P N ++ + K G +S | |
| Sbjct: | 1527 | VPKAYGKTVQEGTYEVVVSLPKGYRIEGNTKVNTLP-NEVHELSLRLVKVGDASDSTGDH | 1585 |
| Query: | 1532 | -----EVAQKRVLGVTSQTDNQKVKTNKLPKTGESTPKITYTILLFSLSMLGLATI | 1582 |
| | | +Q T LP TGE K+ + + L +LGL + | |
| Sbjct: | 1586 | KVMSKNNSQALTASATPTKSTTSATAKALPSTGE---KMGLKLRIVGLVLLGLTCV | 1638 |

[11180] SEQ ID 8964 (GBS92) was expressed in E. coli as a His-fusion product. SDS-PAGE analysis of total cell extract is shown in FIG. 31 (lane 2; MW 48 kDa).

[11181] GBS92-His was purified as shown in FIG. 199, lane 9.

[11182] Based on this analysis, it was predicted that these proteins and their epitopes could be useful antigens for vaccines or diagnostics.

### EXAMPLE 2038

[11183] A DNA sequence (GBSx2149) was identified in S. agalactiae <SEQ ID 6299> which encodes the amino acid sequence <SEQ ID 6300>. This protein is predicted to be AzlC family protein. Analysis of this protein sequence reveals the following:

| Possible site: 33 | | | | | |
|---|---|---|---|---|---|
| >>> Seems to have no N-terminal signal sequence | | | | | |
| | INTEGRAL | Likelihood = −7.80 | Transmembrane | 212 − 228 | (196 − 230) |
| | INTEGRAL | Likelihood = −7.27 | Transmembrane | 167 − 183 | (159 − 185) |
| | INTEGRAL | Likelihood = −5.68 | Transmembrane | 189 − 205 | (188 − 210) |
| | INTEGRAL | Likelihood = −2.28 | Transmembrane | 17 − 33 | (13 − 34) |
| | INTEGRAL | Likelihood = −1.06 | Transmembrane | 135 − 151 | (135 − 151) |
| | INTEGRAL | Likelihood = −1.01 | Transmembrane | 61 − 77 | (60 − 77) |

```
----- Final Results -----
                            bacterial membrane --- Certainty = 0.4121(Affirmative) < succ>
                              bacterial outside --- Certainty = 0.0000(Not Clear) < succ>
                          bacterial cytoplasm --- Certainty = 0.0000(Not Clear) < succ>
```

[11184] A related GBS nucleic acid sequence <SEQ ID 10235> which encodes amino acid sequence <SEQ ID 10236> was also identified.

[11185] The protein has homology with the following sequences in the GENPEPT database.

| >GP:AAF10212 GB:AE001921 AzlC family protein [Deinococcus radiodurans] | | | |
|---|---|---|---|
| Identities = 72/224 (32%), Positives = 117/224 (52%), Gaps = 8/224 (3%) | | | |
| Query: | 6 | FKEGVKDALPTALGYISIGLAFGIVASASDLSAIEVGLMSALVYGGSAQFAMCALLLAKA | 65 |
| | | F +G + +P LG + LA+ + A A+ LS + LMS + G++QFA L A A | |
| Sbjct: | 7 | FWQGFRALVPLWLGTVPFALAYAVTARAAGLSVGDTCLMSLTTFAGASQFAAAGLFGAHA | 66 |
| Query: | 66 | DLMTITMTVFLVNLRNMLMSLHATTIFKSAHLMNQLAIGTLITDESYGV-LLGEALHHKV | 124 |
| | | ++I +T FL+N R++L L + L ++ +TDE+YGV ++ A | |
| Sbjct: | 67 | GGLSIVLTTFLLNARHLLYGLSLARELRLT-LPQRVVAAQFLTDEAYGVAVVSGARLPGG | 125 |
| Query: | 125 | VSPSWMHGNNVMSYLTWVISTIIGTLLGSTIPNPEMFGLDFALVAMFIGLFVFQLFGMLS | 184 |
| | | ++ +++ G + YL+W +ST++G L GS +P PE G+ F+GL V ++ | |
| Sbjct: | 126 | LTFAFLLGAELSLYLSWNVSTLLGALAGSVLPPPEQLGVGVVFPLAFLGLLV----PLVV | 181 |
| Query: | 185 | DGKRLVVYVLASVGLSYFLLATFLSGALSVLLATVVGCSVGVVL | 228 |
| | | D RL + V + GL + L+ L G L +LLA V G +G L | |
| Sbjct: | 182 | D--RLSLLVALAAGLGGWALSRVLPGGLVILLAGVGGALLGAAL | 223 |

[11186] No corresponding DNA sequence was identified in S. pyogenes.

[11187] Based on this analysis, it was predicted that this protein and its epitopes, could be useful antigens for vaccines or diagnostics.

### EXAMPLE 2039

[11188] A DNA sequence (GBSx2150) was identified in S. agalactiae <SEQ ID 6301> which encodes the amino acid sequence <SEQ ID 6302>. Analysis of this protein sequence reveals the following:

```
Possible site: 60
>>> Seems to have no N-terminal signal sequence
----- Final Results -----
                            bacterial cytoplasm --- Certainty = 0.3794(Affirmative) < succ>
                              bacterial membrane --- Certainty = 0.0000(Not Clear) < succ>
                                bacterial outside --- Certainty = 0.0000(Not Clear) < succ>
```

[11189] The protein has no significant homology with any sequences in the GENPEPT database.

[11190] No corresponding DNA sequence was identified in S. pyogenes.

[11191] Based on this analysis, it was predicted that this protein and its epitopes, could be useful antigens for vaccines or diagnostics.

### EXAMPLE 2040

[11192] A DNA sequence (GBSx21151) was identified in S. agalactiae <SEQ ID 6303> which encodes the amino acid sequence <SEQ ID 6304>. Analysis of this protein sequence reveals the following:

```
Possible site: 13
>>> Seems to have no N-terminal signal sequence
----- Final Results -----
                            bacterial cytoplasm --- Certainty = 0.5087(Affirmative) < succ>
                              bacterial membrane --- Certainty = 0.0000(Not Clear) < succ>
                                bacterial outside --- Certainty = 0.0000(Not Clear) < succ>
```

[11193] A related GBS nucleic acid sequence <SEQ ID 10233> which encodes amino acid sequence <SEQ ID 10234> was also identified.

[11194] The protein has homology with the following sequences in the GENPEPT database.

| >GP:BAB04157 GB:AP001508 homosystein methyl transferase [Bacillus halodurans] | | | |
|---|---|---|---|
| Identities = 397/751 (52%), Positives = 519/751 (68%), Gaps = 14/751 (1%) | | | |
| Query: | 10 | SNLGYPRLGEQREWKQAIEAFWAGNLEQKDLEKQLKQLRINHLKKQKEAGIDLIPVGDFS | 69 |
| | | SNLGYPR+GE REWK+A+E+FWA + ++ L +K+LR+NHL+ Q+E +DLIPVGDF+ | |
| Sbjct: | 4 | SNLGYPRIGENREWKKALESFWANDTTEEQLLATMKELRLNHLRVQQEQEVDLIPVGDFT | 63 |
| Query: | 70 | CYDHVLDLSFQFNVIPKRFDEY--ERNLDLYFAIARGDKDNVASSMKKWFNTNYHYIVPE | 127 |
| | | YDHVLD++ F +IPKRF + L YFA+ARG K+ A M KW+NTNYHYIVPE | |
| Sbjct: | 64 | LYDHVLDMAVMFGIIPKRFLQQGDTPTLSTYFAMARGSKNAQACEMTKWYNTNYHYIVPE | 123 |
| Query: | 128 | WEVETKPHLQNNYLLDLYLEAREVVGDKAKPVITGPITYVSLSSGIVD--FEATVQRLLP | 185 |
| | | + P L N L+ YLEA+ +G KPVI GP ++V L+ G + + T+Q LLP | |
| Sbjct: | 124 | LH-DAAPRLTKNAPLEAYLEAKNELGIDGKPVILGPYSFVKLAKGYEEDKLQETIQSLLP | 182 |
| Query: | 186 | LYKQVFQDLIDAGATYIQIDEPIFVTDEGELLVDIAKSVYDFFAREVPQAHFIFQTYFES | 245 |
| | | LY QV Q+L+DAGA IQ+DEP VT + + +Y+ + A QTYF++ | |
| Sbjct: | 183 | LYIQVIQELVDAGARSIQVDEPSLVTSISAREMALVTRIYEQINEAIADAPLFLQTYFDA | 242 |
| Query: | 246 | AVCLDKLSKLPVTGFGLDFIHGRAENLAAVKQ-GLFREKELFAGIVNGRNIWAVNLEETL | 304 |
| | | +++ LPV G GLDF+HG A+NL A++ G +K L AGI++GRNIW NL E | |
| Sbjct: | 243 | VTFYEEVVSLPVKGIGLDFVHGGAKNLEALRTFGFPEDKVLAAGIIDGRNIWISNLRERH | 302 |
| Query: | 305 | ALLEEIGPFVK--RLTLQPSSSLLHVPVTTKYETHLDPVLKNGLSFADEKLKELELLASA | 362 |
| | | L+ ++ V RL LQPS SLLHVPVTTK E LDP L L+FA+EKL EL L | |
| Sbjct: | 303 | ELVHQLEQHVAKDRLVLQPSCSLLHVPVTTKREEKLDPTLLGVLAFANEKLTELHTLKQL | 362 |
| Query: | 363 | FDGNKTKGYHEALSR----FSALQAADFRHVALESL-AEVKLERSPYKLRQALQAEKLQL | 417 |
| | | GN++ EAL +AL+ + +R A S E K + R+ LQ EK QL | |
| Sbjct: | 363 | AAGNEAE-VKEALEANDDALAALEKSGWRSGAATSHNLENKKRPQSFNERRPLQEEKWQL | 421 |
| Query: | 418 | PILPTTTIGSFPQSPEIRKKRLAWKRGNLSDSDYKDFIKTEIRRWIAIQEDLDLDVLVHG | 477 |
| | | P+LPTTTIGSFPQ+ ++R+ R W++G LS +Y+ +K+ I +WI IQE+L LDVLVHG | |
| Sbjct: | 422 | PLLPTTTIGSFPQTKDVRRTRSLWRKGELSTVEYERTMKSYIEKWINIQEELGLDVLVHG | 481 |
| Query: | 478 | EFERVDMVEFFGQKLAGFTTTKLGWVQSYGSRAVKPPIIYGDVKHIQPLSLEETVYAQSL | 537 |
| | | EFER DMVEFFG+KL GF T GWVQSYGSR VKPPIIYG+V +P+++ ETVYAQSL | |
| Sbjct: | 482 | EFERNDMVEFFGEKLDGFAFTANGWVQSYGSRCVKPPIIYGNVSFTEPMTVAETVYAQSL | 541 |
| Query: | 538 | TKKPVKGMLTGPITITNWSFERDDISRSDLFNQIALAIKDEIQLLEQSGIAIIQVDEAAL | 597 |
| | | T KPVKGMLTGP+TI NWSF RDD+ + + +QIA A+ E+ LE++GI +IQ+DE A+ | |
| Sbjct: | 542 | TDKPVKGMLTGPVTILNWSFVRDDLPLTVIAHQIAEALTHEVTALEEAGIEMIQIDEPAI | 601 |
| Query: | 598 | REGLPLRQQKQQAYLDDAVAAFKIATSSVKDETQIHTHMCYSKFDEIIDSIRALDADVIS | 657 |
| | | REGLPL+ + QQ YLD AV+AF+ + + VK TQIHTHMCYS+F E+I++I LDADVIS | |
| Sbjct: | 602 | REGLPLKAEDQQEYLDWAVSAFRASCAHVKATTQIHTHMCYSEFHEMIEAIDDLDADVIS | 661 |
| Query: | 658 | IETSRSHGDIIESFETAVYPLGIGLGVYDIHSPRIPTKEEIIVNIQRSLKCLSKEQFWVN | 717 |
| | | IETSRSHG++I +FE Y GIGLGVYDIHSPR+P++EE++ I+R+L L FWVN | |
| Sbjct: | 662 | IETSRSHGEMISAFEKTTYEKGIGLGVYDIHSPRVPSEEEMLNVIRRALTVLPASLFWVN | 721 |
| Query: | 718 | PDCGLKTRREAETIAALEVLVSATKEVRQQL | 748 |
| | | PDCGLKTR E ET+AAL+ +V+A + R++L | |
| Sbjct: | 722 | PDCGLKTRAEKETVAALKNMVAAARAAREEL | 752 |

[11195] No corresponding DNA sequence was identified in S. pyogenes.

[11196] Based on this analysis, it was predicted that this protein and its epitopes, could be useful antigens for vaccines or diagnostics.

### EXAMPLE 2041

[11197] A DNA sequence (GBSx2152) was identified in S. agalactiae <SEQ ID 6305> which encodes the amino acid sequence <SEQ ID 6306>. This protein is predicted to be metH. Analysis of this protein sequence reveals the following:

```
Possible site: 20
>>> Seems to have no N-terminal signal sequence
----- Final Results -----
                            bacterial cytoplasm --- Certainty = 0.0753(Affirmative) < succ>
                              bacterial membrane --- Certainty = 0.0000(Not Clear) < succ>
                                bacterial outside --- Certainty = 0.0000(Not Clear) < succ>
```

[11198] The protein has homology with the following sequences in the GENPEPT database.

| >GP:BAB05348 GB:AP001512 unknown conserved protein [Bacillus halodurans] | | | |
|---|---|---|---|
| Identities = 301/610 (49%), Positives = 437/610 (71%), Gaps = 9/610 (1%) | | | |
| Query: | 1 | MSKFLEKLKTDILVADGAMGTLLYTYGLDTCHESYNVTHPEKVLAIHQAYIEAGADVIQT | 60 |
| | | M+ +E LKT+ILV DGAMGTLLY G+D C E NVT PEK++A H AY+EAGADVIQT | |
| Sbjct: | 1 | MTNLVEALKTNILVGDGAMGTLLYEQGIDRCFEELNVTDPEKIVAAHVAYVEAGADVIQT | 60 |
| Query: | 61 | NTYGAQRHRLKNYGLEDQVVSINQAAVNIAHQATLGKETFILGTVGGFRSQRQCDLTLDN | 120 |
| | | NTY A R +L Y L+DQV+ IN+AAV +A +A +ETF+LGT+GG RS + ++ + | |
| Sbjct: | 61 | NTYAANRMKLAKYQLDDQVLEINRAAVRLARKAAK-QETFVLGTIGGIRSVQFEEVEIQE | 119 |
| Query: | 121 | IVEETLEQVEALLATGQLDGLLFETYYDIEEITTVLKIVREMTDLPIITNISLHEAGVTS | 180 |
| | | + + LEQ++AL++ G +DGLL ET+YD+EE + + R +TDLP+I ++S+ E GV | |
| Sbjct: | 120 | VQDVFLEQMKALVSEG-VDGLLLSTFYDLEEAKLAVSLARSLTDLPVIAHLSIAEIGVLQ | 178 |
| Query: | 181 | NGKPIVEALSQLVMLGADVIGLNCHLGPYHMIQSLKQVPLFAQSYLSVYPNASQLSLDGE | 240 |
| | | GK + EA ++L LGAD++G+NC +GPY M++SL+ V L ++Y S YPNAS D | |
| Sbjct: | 179 | GGKLLEEAFAELEGLGADLVGINCRMGPYQMLRSLETVQLLDRAYYSAYPNASLP--DYR | 236 |
| Query: | 241 | NSQYQFSQNSEYFGKSAELLVAEGVRLIGGCCGTTPDHIRAVKRSIRGLKPIERKVVTPI | 300 |
| | | + + + N EYF + + V +GVRL+GGCCGTTP+H+RA + ++GLKP+ K V | |
| Sbjct: | 237 | DGRLYYHSNPEYFYEMGKRFVQQGVRLLGGCCGTTPEHVRAFAKVVKGLKPVVSKPVR-- | 294 |
| Query: | 301 | IPVKDFVRRIRRT---DTLVDKVKKEVTIIAELDPPKHLDIVQFQKAIRAIDQKGIAAIT | 357 |
| | | + +K+ + + + L +KVKK+ +II ELDPPK+L I +F + A+ G+ A+T | |
| Sbjct: | 295 | LEIKETLSSTGQKTAREPLAEKVKKQPSIIVELDPPKNLAIDRFVEGAAALKNAGVDAVT | 354 |
| Query: | 358 | LADNSLSNTRICNLSIASLLKDEISTPFLLHIACRDHNLIGLQSRLLGMELLGFNHILAI | 417 |
| | | +ADNSL++ R+ NL++ ++++ ++ L+H+ CRD NLIGLQS L+G+ LG +LAI | |
| Sbjct: | 355 | MADNSLASPRVDNLALGAIIQQQVGARPLVHVTCRDRNLIGLQSHLMGLHALGMTDLLAI | 414 |
| Query: | 418 | TGDPTKLGDFPGATSVYDVTSFKLLSLIKQLNQGLSYSGASLRRPTDFTVAAAFNPNVKN | 477 |
| | | TGDPTK+GDFPGATSVYDVTSF+L+SLIKQLN+G+S+SG L + +F+V AAFNPNV++ | |
| Sbjct: | 415 | TGDFTKVGDFPGATSVYDVTSFQLISLIKQLNEGISFSGKELGQKANFSVGAAFNPNVRH | 474 |
| Query: | 478 | LTRTVKLIEKKVASGADYFMTQPIFDHSVLKELADLTKTVEQPFFIGIMPITSYNNAVFL | 537 |
| | | L R V+ +EKK+ +GADYFMTQPI++ ++++ + TK +E+P +IGIMP+ + NA FL | |
| Sbjct: | 475 | LERAVQRMEKKIEAGADYFMTQPIYNEKQIEDIYEATKHIEKPIYIGIMPLINGRNAEFL | 534 |
| Query: | 538 | HNEVPGIKLSESFLSALEKVKDDKEACLTLALNESKSLIDEALNYFNGIYLITPFLRYDL | 597 |
| | | HNEVPGIKL++ + + +D++ L +KSL+D A +YFNGIYLITPFLRY + | |
| Sbjct: | 535 | HNEVPGIKLTDQIRERMARAGEDRQKGEREGLAIAKSLLDVATHYFNGIYLITPFLRYGM | 594 |
| Query: | 598 | TLELIDYIQK | 607 |
| | | T++L Y+++ | |
| Sbjct: | 595 | TVDLTHYVKE | 604 |

[11199] No corresponding DNA sequence was identified in S. pyogenes.

[11200] Based on this analysis, it was predicted that this protein and its epitopes, could be useful antigens for vaccines or diagnostics.

### EXAMPLE 2042

[11201] A DNA sequence (GBSx2153) was identified in S. agalactiae <SEQ ID 6307> which encodes the amino acid sequence <SEQ ID 6308>. Analysis of this protein sequence reveals the following:

| Possible site: 53 | | | | | |
|---|---|---|---|---|---|
| >>> Seems to have no N-terminal signal sequence | | | | | |
| | INTEGRAL | Likelihood = −9.55 | Transmembrane | 127 − 143 | (121 − 147) |
| | INTEGRAL | Likelihood = −1.44 | Transmembrane | 157 − 173 | (155 − 175) |

```
----- Final Results -----
                            bacterial membrane --- Certainty = 0.4821(Affirmative) < succ>
                              bacterial outside --- Certainty = 0.0000(Not Clear) < succ>
                          bacterial cytoplasm --- Certainty = 0.0000(Not Clear) < succ>
```

[11202] A related GBS nucleic acid sequence <SEQ ID 10231> which encodes amino acid sequence <SEQ ID 10232> was also identified.

[11203] The protein has homology with the following sequences in the GENPEPT database.

| >GP:CAC01354 GB:AL390975 putative integral membrane protein | | | |
|---|---|---|---|
| [Streptomyces coelicolor A3(2)] | | | |
| Identities = 38/98 (38%), Positives = 59/98 (59%) | | | |
| Query: | 113 | RIADDVARFGGSWTFIIVFVSIMAIWMLVNIMKPFGIQFDPYPFILLNLALSTIAAIQAP | 172 |
| | | R+++ VARF G+ FI+ ++ +W++ N+ P G++FD YPFI L L LS A+ AP | |
| Sbjct: | 47 | RLSERVARFLGTGRFIVWMTVVIILWVVWNVSAPSGLRFDEYPFIFLTLMLSLQASYAAP | 106 |
| Query: | 173 | LIMMSQNRAADYDRLQARNDFNVNKTSELEIRLLHEKI | 210 |
| | | LI+++QNR D DR+ D N+ S L +I | |
| Sbjct: | 107 | LILLAQNRQDDRDRVNLEQDRKQNERSIADTEYLTREI | 144 |

[11204] No corresponding DNA sequence was identified in S. pyogenes.

[11205] Based on this analysis, it was predicted that this protein and its epitopes, could be useful antigens for vaccines or diagnostics.

[11206] A related GBS gene <SEQ ID 8965> and protein <SEQ ID 8966> were also identified. Analysis of this protein sequence reveals the following:

| Lipop: Possible site: −1 Crend: 7 | | | | | |
|---|---|---|---|---|---|
| McG: Discrim Score: −3.84 | | | | | |
| GvH: Signal Score (−7.5): −5.05 | | | | | |
| Possible site: 53 | | | | | |
| >>> Seems to have no N-terminal signal sequence | | | | | |
| ALOM program count: 2 value: −9.55 threshold: 0.0 | | | | | |
| | INTEGRAL | Likelihood = −9.55 | Transmembrane | 127 − 143 | (121 − 147) |
| | INTEGRAL | Likelihood = −1.44 | Transmembrane | 157 − 173 | (155 − 175) |
| | PERIPHERAL | Likelihood = 5.46 | 27 | | |

```
modified ALOM score: 2.41
*** Reasoning Step: 3
----- Final Results -----
                            bacterial membrane --- Certainty = 0.4821(Affirmative) < succ>
                              bacterial outside --- Certainty = 0.0000(Not Clear) < succ>
                          bacterial cytoplasm --- Certainty = 0.0000(Not Clear) < succ>
```

[11207] The protein has homology with the following sequences in the databases:

[chemical structure]

[11208] SEQ ID 8966 (GBS393) was expressed in E. coli as a His-fusion product. SDS-PAGE analysis of total cell extract is shown in FIG. 75 (lane 3; MW 30.8 kDa). It was also expressed in E. coli as a GST-fusion product. SDS-PAGE analysis of total cell extract is shown in FIG. 177 (lane 4; MW 56 kDa) and in FIG. 83 (lane 6; MW 56 kDa).

[11209] GBS393-GST was purified as shown in FIG. 217, lane 5.

### EXAMPLE 2043

[11210] A DNA sequence (GBSx2154) was identified in S. agalactiae <SEQ ID 6309> which encodes the amino acid sequence <SEQ ID 6310>. Analysis of this protein sequence reveals the following:

| Possible site: 36 | | | | | |
|---|---|---|---|---|---|
| >>> Seems to have no N-terminal signal sequence | | | | | |
| | INTEGRAL | Likelihood = −3.29 | Transmembrane | 274 − 290 | (271 − 291) |

```
----- Final Results ----
                            bacterial membrane --- Certainty = 0.2317(Affirmative) < succ>
                              bacterial outside --- Certainty = 0.0000(Not Clear) < succ>
                          bacterial cytoplasm --- Certainty = 0.0000(Not Clear) < succ>
```

[11211] The protein has homology with the following sequences in the GENPEPT database.

| >GP:AAD35508 GB:AE001721 glycerol dehydrogenase [Thermotoqa maritima] | | | |
|---|---|---|---|
| Identities = 94/307 (30%), Positives = 157/307 (50%), Gaps = 21/307 (6%) | | | |
| Query: | 63 | VYGTDSTQSNIDKLVANPQVQAADAILGFGGGKALDTAKMVAKELGKNSFTIPTICSNCS | 122 |
| | | ++G + + I++L + + D ++G GGGK LDTAK VA +L K +PTI S + | |
| Sbjct: | 62 | IFGGECSDEEIERLSGLVE-EETDVVVGIGGGKTLDTAKAVAYKLKKPVVIVPTIASTDA | 120 |
| Query: | 123 | AGTAIAVVYNDDHSFLRYGY-PESPLHIFINTRIIAQAPSKYFWAGIGDGISKAPEVERA | 181 |
| | | +A++V+Y + F RY + P +P + ++T I+A+AP+++ AG+GD ++ E E | |
| Sbjct: | 121 | PCSALSVIYTPNGEFKRYLFLPRNPDVVLVDTEIVAKAPARFLVAGMGDALATWFEAESC | 180 |
| Query: | 182 | TLEAKTNKLPHT-AVLGQAVALSSKEAFYQFGEQGLKDVEANLASRAVEEI--ALDILIS | 238 |
| | | + N ++ A+A E ++G + VE + A+E+I A +L | |
| Sbjct: | 181 | KQKYAPNMTGRLGSMTAYALARLCYETLLEYGVLAKRSVEEKSVTPALEKIVEANTLLSG | 240 |
| Query: | 239 | TGYASNLVNQPDFYYNSCHAHAFYYGTTAIQRQGEFLHGVVVAFGVLV-LHAYFNELEEL | 297 |
| | | G+ S AHA + G T ++ ++LHG VA GVL L + + | |
| Sbjct: | 241 | LGFESG---------GLAAAHAIHNGLTVLENTHKYLHGEKVAIGVLASLFLTDKPRKMI | 291 |
| Query: | 298 | EKVARFNKSLGLPTTLADVSL---SEKDIPKIVEIAMTTNE---YKNTPFDPKMFAQAIL | 351 |
| | | E+V F + +GLPTTLA++ L S++D+ K+ E A NE + P K A+ | |
| Sbjct: | 292 | EEVYSFCEEVGLPTTLAEIGLDGVSDEDLMKVAEKACDKNETIHNEPQPVTSKDVFFALK | 351 |
| Query: | 352 | AADAFGQ | 358 |
| | | AAD +G+ | |
| Sbjct: | 352 | AADRYGR | 358 |

[11212] There is also homology to SEQ ID 3078.

[11213] SEQ ID 6310 (GBS123) was expressed in E. coli as a His-fusion product. SDS-PAGE analysis of total cell extract is shown in FIG. 29 (lane 7; MW 43.3 kDa).

[11214] Based on this analysis, it was predicted that this protein and its epitopes, could be useful antigens for vaccines or diagnostics.

### EXAMPLE 2044

[11215] A DNA sequence (GBSx2155) was identified in S. agalactiae <SEQ ID 6311> which encodes the amino acid sequence <SEQ ID 6312>. Analysis of this protein sequence reveals the following:

```
Possible site: 39
>>> Seems to have no N-terminal signal sequence
----- Final Results -----
                            bacterial cytoplasm --- Certainty = 0.0974(Affirmative) < succ>
                              bacterial membrane --- Certainty = 0.0000(Not Clear) < succ>
                                bacterial outside --- Certainty = 0.0000(Not Clear) < succ>
```

[11216] A related DNA sequence was identified in S. pyogenes <SEQ ID 6313> which encodes the amino acid sequence <SEQ ID 6314>. Analysis of this protein sequence reveals the following:

```
Possible site: 17
>>> Seems to have no N-terminal signal sequence
----- Final Results -----
                            bacterial cytoplasm --- Certainty = 0.2368(Affirmative) < succ>
                              bacterial membrane --- Certainty = 0.0000(Not Clear) < succ>
                                bacterial outside --- Certainty = 0.0000(Not Clear) < succ>
```

[11217] An alignment of the GAS and GBS proteins is shown below.

| Identities = 92/167 (55%), Positives = 121/167 (72%) | | | |
|---|---|---|---|
| Query: | 1 | MKIAIIGYSGSGKSTLARKLGNYYNCNVLHLDSIHFAPNWEERKYDDMIDDVSNMLEKRT | 60 |
| | | +KIAIIG+SGSGKSTLAR LG +Y+C V HLD +HF+ NW+ER DMI D+S L K+ | |
| Sbjct: | 1 | LKIAIIGHSGSGKSTLARFLGQHYHCEVFHLDQLHFSSNWQERSDHDMIADLSTCLLKQD | 60 |
| Query: | 61 | WIIEGNYKKLLYQERLADADEIIFFDFNRFNCLWRAFKRYCKFRGKTRPDMANGCPEKLD | 120 |
| | | IIEGNY LY+ER+++AD II+ +F+RF+C++RAFKRY +RGKTRPDMA+ C EK D | |
| Sbjct: | 61 | LIIEGNYANCLYEERMSEADYIIYVNFSRFHCVYRAFKRYLNYRGKTRPDMADNCQEKFD | 120 |
| Query: | 121 | FEFISWILKDGRSDKQKSNYKQVVEDYPQKIKILKHQRDLDQYLKEL | 167 |
| | | F+ WIL DGRS Q Y+ VV+ Y K +L +Q+ L Y+ + | |
| Sbjct: | 121 | VAFVKWILLDGRSRNQLKKYQSVVQKYSHKTIVLTNQKQLSHYMNTI | 167 |

[11218] Based on this analysis, it was predicted that this protein and its epitopes, could be useful antigens for vaccines or diagnostics.

### EXAMPLE 2045

[11219] A DNA sequence (GBSx2156) was identified in S. agalactiae <SEQ ID 6315> which encodes the amino acid sequence <SEQ ID 6316>. Analysis of this protein sequence reveals the following:

```
Possible site: 55
>>> Seems to have no N-terminal signal sequence
----- Final Results -----
                            bacterial cytoplasm --- Certainty = 0.3874(Affirmative) < succ>
                              bacterial membrane --- Certainty = 0.0000(Not Clear) < succ>
                                bacterial outside --- Certainty = 0.0000(Not Clear) < succ>
```

[11220] The protein has homology with the following sequences in the GENPEPT database.

| >GP:CAA41941 GB:X59250 initiation factor IF-1 [Lactococcus lactis] | | | |
|---|---|---|---|
| Identities = 62/72 (86%), Positives = 70/72 (97%) | | | |
| Query: | 1 | MAKEDVIEIEGKVVETMPNAMFTVELENGHQILATVSGKIRKNYIRILVGDRVTVEMSPY | 60 |
| | | MAK+DVIE++GKVV+TMPNAMFTVELENGHQ+LAT+SGKIRKNYIRIL GD+V VE+SPY | |
| Sbjct: | 1 | MAKDDVIEVDGKVVDTMPNAMFTVELENGHQVLATISGKIRKNYIRILPGDKVQVELSPY | 60 |
| Query: | 61 | DLTRGRITYRFK | 72 |
| | | DLTRGRITYRFK | |
| Sbjct: | 61 | DLTRGRITYRFK | 72 |

[11221] A related DNA sequence was identified in S. pyogenes <SEQ ID 6317> which encodes the amino acid sequence <SEQ ID 6318>. Analysis of this protein sequence reveals the following:

```
Possible site: 50
>>> Seems to have no N-terminal signal sequence
----- Final Results -----
                            bacterial cytoplasm --- Certainty = 0.3253(Affirmative) < succ>
                              bacterial membrane --- Certainty = 0.0000(Not Clear) < succ>
                                bacterial outside --- Certainty = 0.0000(Not Clear) < succ>
```

[11222] An alignment of the GAS and GBS proteins is shown below.

| Identities = 67/67 (100%), Positives = 67/67 (100%) | | | |
|---|---|---|---|
| Query: | 6 | VIEIEGKVVETMPNAMFTVELENGHQILATVSGKIRKNYIRILVGDRVTVEMSPYDLTRG | 65 |
| | | VIEIEGKVVETMPNAMFTVELENGHQILATVSGKIRKNYIRILVGDRVTVEMSPYDLTRG | |
| Sbjct: | 1 | VIEIEGKVVETMPNAMFTVELENGHQILATVSGKIRKNYIRILVGDRVTVEMSPYDLTRG | 60 |
| Query: | 66 | RITYRFK | 72 |
| | | RITYRFK | |
| Sbjct: | 61 | RITYRFK | 67 |

[11223] Based on this analysis, it was predicted that this protein and its epitopes, could be useful antigens for vaccines or diagnostics.

### EXAMPLE 2046

[11224] A DNA sequence (GBSx2157) was identified in S. agalactiae <SEQ ID 6319> which encodes the amino acid sequence <SEQ ID 6320>. This protein is predicted to be adenylate kinase (adk). Analysis of this protein sequence reveals the following:

```
Possible site: 17
>>> Seems to have no N-terminal signal sequence
----- Final Results -----
                            bacterial membrane --- Certainty = 0.0000(Not Clear) < succ>
                              bacterial outside --- Certainty = 0.0000(Not Clear) < succ>
                          bacterial cytoplasm --- Certainty = 0.0000(Not Clear) < succ>
```

[11225] The protein has homology with the following sequences in the GENPEPT database.

| >GP:CAA41940 GB:X59250 adenylate kinase [Lactococcus lactis] | | | |
|---|---|---|---|
| Identities = 146/214 (68%), Positives = 170/214 (79%), Gaps = 6/214 (2%) | | | |
| Query: | 1 | MNLLIMGLPGAGKGTQAAKIVEEFGVAHISTGDMFRAAMANQTEMGRLAKSYIDKGELVP | 60 |
| | | MNLLIMGLPGAGKGTQA IV+ +GV HISTGDMFRAAM N+TEMG+LAKS+IDKGELVP | |
| Sbjct: | 1 | MNLLIMGLPGAGKGTQAEFIVKNYGVNHISTGDMFRAAMKNETEMGKLAKSFIDKGELVP | 60 |
| Query: | 61 | DEVTNGIVKERLAEDDIAEKGFLLDGYPRTIEQAHALDATLEELGLRLDGVINIKVDPSC | 120 |
| | | DEVTNGIVKERLA+DDI GFLLDGYPRTI+QAHALD LEELG++LD V+NI V+P+ | |
| Sbjct: | 61 | DEVTNGIVKERLAQDDIKASGFLLDGYPRTIDQAHALDTMLEELGIKLDAVVNIVVNPNI | 120 |
| Query: | 121 | LIERLSGRIINRKTGETFHKVFNPPV------DYKEEDYYQREDDKPETVKRRLDVNIAQ | 174 |
| | | L++RLSGR I R G T+HK+FNP D YQR DD PETVK RLDVNI + | |
| Sbjct: | 121 | LVDRLSGRYICRNCGATYHKIFNPTKVEGTCDVCGSHDLYQRADDVPETVKNRLDVNIKE | 180 |
| Query: | 175 | GEPILEHYRKLGLVTDIEGNQEITEVFADVEKAL | 208 |
| | | PI+EHY +LGLV +IEG QEI++V D++K L | |
| Sbjct: | 181 | SAPIIEHYTELGLVKNIEGEQEISQVTDDIKKVL | 214 |

[11226] A related DNA sequence was identified in S. pyogenes <SEQ ID 6321> which encodes the amino acid sequence <SEQ ID 6322>. Analysis of this protein sequence reveals the following:

```
Possible site: 17
>>> Seems to have no N-terminal signal sequence
----- Final Results -----
                            bacterial membrane --- Certainty = 0.0000(Not Clear) < succ>
                              bacterial outside --- Certainty = 0.0000(Not Clear) < succ>
                          bacterial cytoplasm --- Certainty = 0.0000(Not Clear) < succ>
```

[11227] An alignment of the GAS and GBS proteins is shown below.

| Identities = 208/212 (98%), Positives = 212/212 (99%) | | | |
|---|---|---|---|
| Query: | 1 | MNLLIMGLPGAGKGTQAAKIVEEFGVAHISTGDMFRAAMANQTEMGRLAKSYIDKGELVP | 60 |
| | | MNLLIMGLPGAGKGTQAAKIVEEFG+AHISTGDMFRAAMANQTEMGRLAKSYIDKGELVP | |
| Sbjct: | 1 | MNLLIMGLPGAGKGTQAAKIVEEFGIAHISTGDMFRAAMANQTEMGRLAKSYIDKGELVP | 60 |
| Query: | 61 | DEVTNGIVKERLAEDDIAEKGFLLDGYPRTIEQAHALDATLEELGLRLDGVINIKVDPSC | 120 |
| | | DEVTNGIVKERLAEDDIAEKGFLLDGYPRTIEQAHALDATLEELGLRLDGVINIKVDPSC | |
| Sbjct: | 61 | DEVTNGIVKERLAEDDIAEKGFLLDGYPRTIEQAHALDATLEELGLRLDGVINIKVDPSC | 120 |
| Query: | 121 | LIERLSGRIINRKTGETFHKVFNPPVDYKEEDYYQREDDKPETVKRRLDVNIAQGEPILE | 180 |
| | | L+ERLSGRIINRKTGETFHKVFNPPVDYKEEDYYQREDDKPETVKRRLDVN+AQGEPILE | |
| Sbjct: | 121 | LVERLSGRIINRKTGETFHKVFNPPVDYKEEDYYQREDDKPETVKRRLDVNMAQGEPILE | 180 |
| Query: | 181 | HYRKLGLVTDIEGNQEITEVFADVEKALLELK | 212 |
| | | HYRKLGLVTDIEGNQEIT+VFADVEKALLELK | |
| Sbjct: | 181 | HYRKLGLVTDIEGNQEITDVFADVEKALLELK | 212 |

[11228] Based on this analysis, it was predicted that this protein and its epitopes, could be useful antigens for vaccines or diagnostics.

[11229] A related GBS gene <SEQ ID 8967> and protein <SEQ ID 8968> were also identified. Analysis of this protein sequence reveals the following:

```
Lipop: Possible site: −1 Crend: 0
McG: Discrim Score: −1.04
GvH: Signal Score (−7.5): −1.08
            Possible site: 17
>>> Seems to have no N-terminal signal sequence
ALOM program count: 0 value: 6.79 threshold: 0.0
      PERIPHERAL Likelihood = 6.79 106
  modified ALOM score: −1.86
*** Reasoning Step: 3
----- Final Results -----
                            bacterial membrane --- Certainty = 0.0000(Not Clear) < succ>
                              bacterial outside --- Certainty = 0.0000(Not Clear) < succ>
                          bacterial cytoplasm --- Certainty = 0.0000(Not Clear) < succ>
```

[11230] The protein has homology with the following sequences in the databases:

[chemical structure]

[11231] SEQ ID 8968 (GBS114) was expressed in E. coli as a His-fusion product. SDS-PAGE analysis of total cell extract is shown in FIG. 29 (lane 9; MW 26.9 kDa).

[11232] The GBS114-His fusion product was purified (FIG. 108A; see also FIG. 200, lane 8) and used to immunise mice (lane 1+2+3 product; 20 μg/mouse). The resulting antiserum was used for Western blot (FIG. 108B), FACS (FIG. 108C), and in the in vivo passive protection assay (Table III). These tests confirm that the protein is immunoaccessible on GBS bacteria and that it is an effective protective immunogen.

### EXAMPLE 2047

[11233] A DNA sequence (GBSx2158) was identified in S. agalactiae <SEQ ID 6323> which encodes the amino acid sequence <SEQ ID 6324>. This protein is predicted to be preprotein translocase secy subunit (secY). Analysis of this protein sequence reveals the following:

| Possible site: 35 | | | | | |
|---|---|---|---|---|---|
| >>> Seems to have an uncleavable N-term signal seq | | | | | |
| | INTEGRAL | Likelihood = −14.01 | Transmembrane | 217-233 | (209-240) |
| | INTEGRAL | Likelihood = −8.65 | Transmembrane | 314-330 | (307-334) |
| | INTEGRAL | Likelihood = −6.16 | Transmembrane | 369-385 | (363-392) |
| | INTEGRAL | Likelihood = −5.36 | Transmembrane | 19-35 | (17-40) |
| | INTEGRAL | Likelihood = −3.93 | Transmembrane | 180-196 | (179-199) |
| | INTEGRAL | Likelihood = −3.03 | Transmembrane | 395-411 | (392-412) |
| | INTEGRAL | Likelihood = −2.55 | Transmembrane | 151-167 | (151-168) |
| | INTEGRAL | Likelihood = −2.02 | Transmembrane | 117-133 | (117-133) |
| | INTEGRAL | Likelihood = −0.64 | Transmembrane | 270-286 | (269-286) |

```
----- Final Results -----
                            bacterial membrane --- Certainty = 0.6604(Affirmative) < succ>
                              bacterial outside --- Certainty = 0.0000(Not Clear) < succ>
                          bacterial cytoplasm --- Certainty = 0.0000(Not Clear) < succ>
```

[11234] A related GBS nucleic acid sequence <SEQ ID 9467> which encodes amino acid sequence <SEQ ID 9468> was also identified.

[11235] The protein has homology with the following sequences in the GENPEPT database.

| >GP:CAA41939 GB:X59250 SecY protein [Lactococcus lactis] | | | |
|---|---|---|---|
| Identities = 292/433 (67%), Positives = 361/433 (82%), Gaps = 2/433 (0%) | | | |
| Query: | 1 | MFLKLLRDALKVKMVRNKILFTIFILLVFRIGTHITVPGINVKSLEQMGELPFLNMLNLV | 60 |
| | | MF K L++A KVK VR +ILFTIFIL VFR+G HIT PG+NV++L+Q+ +LPFL+M+NLV | |
| Sbjct: | 1 | MFFKTLKEAFKVKDVRARILFTIFILFVFRLGAHITAPGVNVQNLQQVADLPFLSMMNLV | 60 |
| Query: | 61 | SGNAMRNFSVFSMGVSPYITASIVVQLLQMDILPKFVEWGKQGEVGRRKLNQATRYISLF | 120 |
| | | SGNAM+N+S+F+MGVSPYITASI+VQLLQMDILPKFVEW KQGE+GRRKLNQATRYI+L | |
| Sbjct: | 61 | SGNAMQNYSLFAMGVSPYITASIIVQLLQMDILPKFVEWSKQGEIGRRKLNQATRYITLV | 120 |
| Query: | 121 | LAFVQSIGITAGFNTLSSVALVKTPNVQTYLLIGAILTTGSMVVTWLGEQITDKGFGNGV | 180 |
| | | LA QSIGITAGF +SS+ +V+ PN Q+YL+IG +LTTGSMVVTW+GEQI +KGFG+GV | |
| Sbjct: | 121 | LAMAQSIGITAGFQAMSSLNIVQNPNWQSYLMIGVLLTTGSMVVTWMGEQINEKGFGSGV | 180 |
| Query: | 181 | SMIIFAGIISSIPSAITTIYEDFFVNVRSSAITNSYIFVGILIVAVLAIVFFTTFIQQAE | 240 |
| | | S+IIFAGI+S IPSAI ++Y++ F+NVR S I S+IFV LI++ + I++ TTF+QQAE | |
| Sbjct: | 181 | SVIIFAGIVSGIPSAIKSVYDEKFLNVRPSEIPMSWIFVIGLILSAIVIIYVTTFVQQAE | 240 |
| Query: | 241 | YKIPIQYTKLVQGAPTSSYLPLKVNPAGVIPVIFASSITTIPSTIIPFFQ--NGKEIPWL | 298 |
| | | K+PIQYTKL QGAPTSSYLPL+VNPAGVIPVIFA SITT P+TI+ F Q G + WL | |
| Sbjct: | 241 | RKVPIQYTKLTQGAPTSSYLPLRVNPAGVIPVIFAGSITTAPATILQFLQRSQGSNVGWL | 300 |
| Query: | 299 | TKLQELLNYQTPVGMIIYAILIILFSFFYTFVQVNPEKTAENLQKNSSYIPSIRPGRETE | 358 |
| | | + LQ L+Y T GM+ YA+LI+LF+FFY+FVQVNPEK AENLQK SYIPS+RPG+ TE | |
| Sbjct: | 301 | STLQNALSYTTWTGMLFYALLIVLFTFFYSFVQVNPEKMAENLQKQGSYIPSVRPGKGTE | 360 |
| Query: | 359 | EYMSSLLKKLATIGSVFLAFISLLPIIAQQALHLSSSIALGGTSLLILIATGIEGMKQLE | 418 |
| | | +Y+S LL +LAT+GS+FL IS++PI AQ L +ALGGTSLLILI I+ +KQLE | |
| Sbjct: | 361 | KYVSRLLMRLATVGSLFLGLISIIPIAAQNVWGLPKIVALGGTSLLILIQVAIQAVKQLE | 420 |
| Query: | 419 | GYLLKRRYVGFMN | 431 |
| | | GYLLKR+Y GFM+ | |
| Sbjct: | 421 | GYLLKRKYAGFMD | 433 |

[11236] A related DNA sequence was identified in S. pyogenes <SEQ ID 3987> which encodes the amino acid sequence <SEQ ID 3988>. Analysis of this protein sequence reveals the following:

| Possible site: 55 | | | | | |
|---|---|---|---|---|---|
| >>> Seems to have an uncleavable N-term signal seq | | | | | |
| | INTEGRAL | Likelihood = −14.70 | Transmembrane | 233 - 249 | (226 − 255) |
| | INTEGRAL | Likelihood = −8.12 | Transmembrane | 330 − 346 | (323 − 350) |
| | INTEGRAL | Likelihood = −6.10 | Transmembrane | 384 − 400 | (378 − 403) |
| | INTEGRAL | Likelihood = −5.20 | Transmembrane | 35 − 51 | (33 − 56) |
| | INTEGRAL | Likelihood = −4.09 | Transmembrane | 199 − 215 | (195 − 215) |
| | INTEGRAL | Likelihood = −3.56 | Transmembrane | 167 − 183 | (165 − 184) |
| | INTEGRAL | Likelihood = −1.65 | Transmembrane | 411 − 427 | (411 − 428) |
| | INTEGRAL | Likelihood = −1.49 | Transmembrane | 133 − 149 | (133 − 149) |
| | INTEGRAL | Likelihood = −0.64 | Transmembrane | 286 − 302 | (285 − 302) |

```
----- Final Results -----
                            bacterial membrane --- Certainty = 0.6880(Affirmative) < succ>
                              bacterial outside --- Certainty = 0.0000(Not Clear) < succ>
                          bacterial cytoplasm --- Certainty = 0.0000(Not Clear) < succ>
```

[11237] An alignment of the GAS and GBS proteins is shown below.

| Identities = 377/434 (86%), Positives = 417/434 (95%) | | | |
|---|---|---|---|
| Query: | 1 | MFLKLLRDALKVKMVRNKILFTIFILLVFRIGTHITVPGINVKSLEQMGELPFLNMLNLV | 60 |
| | | MFLK+L+DALK+K VRNKI FTIFI+LVFRIGTHITVPG+N KSLEQ+ ELPFLNMLNLV | |
| Sbjct: | 17 | MFLKILKDALKIKTVRNKIFFTIFIILVFRIGTHITVPGVNAKSLEQLSELPFLNMLNLV | 76 |
| Query: | 61 | SGNAMRNFSVFSMGVSPYITASIVVQLLQMDILPKFVEWGKQGEVGRRKLNQATRYISLF | 120 |
| | | SGNAMRNFSVFSMGVSPYITASIVVQLLQMDILPKFVEWGKQGEVGRRKLNQATRYISL | |
| Sbjct: | 77 | SGNAMRNFSVFSMGVSPYITASIVVQLLQMDILPKFVEWGKQGEVGRRKLNQATRYISLV | 136 |
| Query: | 121 | LAFVQSIGITAGFNTLSSVALVKTPNVQTYLLIGAILTTGSMVVTWLGEQITDKGFGNGV | 180 |
| | | LAF QSIGITAGFNTLS+VALVKTP+++TYLLIGA+LTTGS++VTWLGEQITDKGFGNGV | |
| Sbjct: | 137 | LAFAQSIGITAGFNTLSNVALVKTPDIKTYLLIGALLTTGSVIVTWLGEQITDKGFGNGV | 196 |
| Query: | 181 | SMIIFAGIISSIPSAITTIYEDFFVNVRSSAITNSYIFVGILIVAVLAIVFFTTFIQQAE | 240 |
| | | SMIIFAGIISSIPSAI TI ED+FVNV++S + +SY+ VGILI+AVLAIVFFTT++QQAE | |
| Sbjct: | 197 | SMIIFAGIISSIPSAIATIREDYFVNVKASDLHSSYLIVGILIIAVLAIVFFTTYVQQAE | 256 |
| Query: | 241 | YKIPIQYTKLVQGAPTSSYLPLKVNPAGVIPVIFASSITTIPSTIIPFFQNGKEIPWLTK | 300 |
| | | YKIPIQYTKL+QGAPTSSYLPLKVNPAGVIPVIFASSITTIPSTIIPF QNG+++PWL + | |
| Sbjct: | 257 | YKIPIQYTKLMQGAPTSSYLPLKVNPAGVIPVIFASSITTIPSTIIPFVQNGRDLPWLNR | 316 |
| Query: | 301 | LQELLNYQTPVGMIIYAILIILFSFFYTFVQVNPEKTAENLQKNSSYIPSIRPGRETEEY | 360 |
| | | LQE+ NYQTPVGMI+YA+LIILFSFFYTFVQVNPEKTAENLQKNSSYIPS+RPGRETE++ | |
| Sbjct: | 317 | LQEIFNYQTPVGMIVYALLIILFSFFYTFVQVNPEKTAENLQKNSSYIPSVRPGRETEQF | 376 |
| Query: | 361 | MSSLLKKLATIGSVFLAFISLLPIIAQQALHLSSSIALGGTSLLILIATGIEGMKQLEGY | 420 |
| | | MS+LLKKLAT+G++FLAFISL PI AQQAL+LSSSIALGGTSLLILI+TGIEGMKQLEGY | |
| Sbjct: | 377 | MSALLKKLATVGAIFLAFISLAPIAAQQALNLSSSIALGGTSLLILISTGIEGMKQLEGY | 436 |
| Query: | 421 | LLKRRYVGFMNTTE | 434 |
| | | LLKR+YVGFMNT E | |
| Sbjct: | 437 | LLKRKYVGFMNTAE | 450 |

[11238] A related GBS gene <SEQ ID 8969> and protein <SEQ ID 8970> were also identified. Analysis of this protein sequence reveals the following:

| Lipop: Possible site: −1 Crend: 10 | | | | | |
|---|---|---|---|---|---|
| McG: Discrim Score: 6.16 | | | | | |
| GvH: Signal Score (−7.5): −4.32 | | | | | |
| Possible site: 35 | | | | | |
| >>> Seems to have an uncleavable N-term signal seq | | | | | |
| ALOM program count: 9 value: −14.01 threshold: 0.0 | | | | | |
| | INTEGRAL | Likelihood = −14.01 | Transmembrane | 217 − 233 | (209 − 240) |
| | INTEGRAL | Likelihood = −9.98 | Transmembrane | 311 − 327 | (307 − 334) |
| | INTEGRAL | Likelihood = −6.16 | Transmembrane | 369 − 385 | (363 − 392) |
| | INTEGRAL | Likelihood = −5.36 | Transmembrane | 19 − 35 | (17 − 40) |
| | INTEGRAL | Likelihood = −3.93 | Transmembrane | 180 − 196 | (179 − 199) |
| | INTEGRAL | Likelihood = −3.03 | Transmembrane | 395 − 411 | (392 − 412) |
| | INTEGRAL | Likelihood = −2.55 | Transmembrane | 151 − 167 | (151 − 168) |
| | INTEGRAL | Likelihood = −2.02 | Transmembrane | 117 − 133 | (117 − 133) |
| | INTEGRAL | Likelihood = −0.64 | Transmembrane | 270 − 286 | (269 − 286) |
| | PERIPHERAL | Likelihood = 0.95 | 69 | | |

```
  modified ALOM score: 3.30
*** Reasoning Step: 3
----- Final Results -----
                            bacterial membrane --- Certainty = 0.6604(Affirmative) < succ>
                              bacterial outside --- Certainty = 0.0000(Not Clear) < succ>
                          bacterial cytoplasm --- Certainty = 0.0000(Not Clear) < succ>
```

[11239] The protein has homology with the following sequences in the databases:

[chemical structure]

[11240] Based on this analysis, it was predicted that these proteins and their epitopes could be useful antigens for vaccines or diagnostics.

### EXAMPLE 2048

[11241] A DNA sequence (GBSx2159) was identified in S. agalactiae <SEQ ID 6325> which encodes the amino acid sequence <SEQ ID 6326>. This protein is predicted to be 50S ribosomal protein L15 (rplO). Analysis of this protein sequence reveals the following:

```
Possible site: 59
>>> Seems to have no N-terminal signal sequence
----- Final Results -----
                            bacterial cytoplasm --- Certainty = 0.5259(Affirmative) < succ>
                              bacterial membrane --- Certainty = 0.0000(Not Clear) < succ>
                                bacterial outside --- Certainty = 0.0000(Not Clear) < succ>
```

[11242] The protein has homology with the following sequences in the GENPEPT database.

| >GP:AAB54021 GB:U96620 ribosomal protein L15 [Staphylococcus aureus] | | | |
|---|---|---|---|
| Identities = 116/146 (79%), Positives = 128/146 (87%) | | | |
| Query: | 1 | MKLHELKPAEGSRKVRNRVGRGTSSGNGKTSGRGQKGQKARSGGGVRLGFEGGQTPLFRR | 60 |
| | | MKLHELKPAEGSRK RNRVGRG ++GNGKTSGRG KGQKARSGGGVR GFEGGQ PLFRR | |
| Sbjct: | 1 | MKLHELKPAEGSRKERNRVGRGVATGNGKTSGRGHKGQKARSGGGVRPGFEGGQLPLFRR | 60 |
| Query: | 61 | MPKRGFSNINAKEYALVNLDQLNVFEDGTEVTPVVLKEAGIVRAEKSGVKILGNGELTKK | 120 |
| | | +PKRGF+NIN KEYA+VNLDQLN FEDGTEVTP +L E+G+V+ EKSG+KILGNG L KK | |
| Sbjct: | 61 | LPKRGFTNINRKEYAIVNLDQLNKFEDGTEVTPALLVESGVVKNEKSGIKILGNGSLDKK | 120 |
| Query: | 121 | LSVKAAKFSKSAEAAITAKGGSIEVI | 146 |
| | | L+VKA KFS SA AI AKGG+ EVI | |
| Sbjct: | 121 | LTVKAHKFSASAAEAIDAKGGAHEVI | 146 |

[11243] A related DNA sequence was identified in S. pyogenes <SEQ ID 6327> which encodes the amino acid sequence <SEQ ID 6328>. Analysis of this protein sequence reveals the following:

```
Possible site: 59
>>> Seems to have no N-terminal signal sequence
----- Final Results -----
                            bacterial cytoplasm --- Certainty = 0.5329(Affirmative) < succ>
                              bacterial membrane --- Certainty = 0.0000(Not Clear) < succ>
                                bacterial outside --- Certainty = 0.0000(Not Clear) < succ>
```

[11244] An alignment of the GAS and GBS proteins is shown below.

| Identities = 135/146 (92%), Positives = 142/146 (96%) | | | |
|---|---|---|---|
| Query: | 1 | MKLHELKPAEGSRKVRNRVGRGTSSGNGKTSGRGQKGQKARSGGGVRLGFEGGQTPLFRR | 60 |
| | | MKLHELK AEGSRKVRNRVGRGTSSGNGKTSGRGQKGQKARSGGGVRLGFEGGQTPLFRR | |
| Sbjct: | 1 | MKLHELKAAEGSRKVRNRVGRGTSSGNGKTSGRGQKGQKARSGGGVRLGFEGGQTPLFRR | 60 |
| Query: | 61 | MPKRGFSNINAKEYALVNLDQLNVFEDGTEVTPVVLKEAGIVRAEKSGVKILGNGELTKK | 120 |
| | | +PKRGF+NIN KEYALVNLDQLNVF+DGTEVTP +LK+AGIVRAEKSGVK+LGNGELTKK | |
| Sbjct: | 61 | IPKRGFTNINTKEYALVNLDQLNVFDDGTEVTPAILKDAGIVRAEKSGVKVLGNGELTKK | 120 |
| Query: | 121 | LSVRAAKFSKSAEAAITAKGGSIEVI | 146 |
| | | L+VKAAKFSKSAEAAI AKGGSIEVI | |
| Sbjct: | 121 | LTVKAAKFSKSAEAAIIAKGGSIEVI | 146 |

[11245] Based on this analysis, it was predicted that this protein and its epitopes, could be useful antigens for vaccines or diagnostics.

### EXAMPLE 2049

[11246] A DNA sequence (GBSx2160) was identified in S. agalactiae <SEQ ID 6329> which encodes the amino acid sequence <SEQ ID 6330>. Analysis of this protein sequence reveals the following:

```
Possible site: 53
>>> Seems to have no N-terminal signal sequence
----- Final Results -----
                            bacterial cytoplasm --- Certainty = 0.1162(Affirmative) < succ>
                              bacterial membrane --- Certainty = 0.0000(Not Clear) < succ>
                                bacterial outside --- Certainty = 0.0000(Not Clear) < succ>
```

[11247] The protein has homology with the following sequences in the GENPEPT database.

| >GP:AAB54020 GB:U96620 ribosomal protein L30 [Staphylococcus aureus] | | | |
|---|---|---|---|
| Identities = 40/58 (68%), Positives = 46/58 (78%) | | | |
| Query: | 1 | MAQIKITLTKSPIGRKPEQRKTVVALGLGKLNSSVVKEDNAAIRGMVNAISHLVTVEE | 58 |
| | | MA+++ITLT+S IGR QRKTV ALGL K NSSVV EDN AIRG +N + HLVTVEE | |
| Sbjct: | 1 | MAKLQITLTRSVIGRPETQRKTVEALGLKKTNSSVVVEDNPAIRGQINKVKHLVTVEE | 58 |

[11248] A related DNA sequence was identified in S. pyogenes <SEQ ID 6331> which encodes the amino acid sequence <SEQ ID 6332>. Analysis of this protein sequence reveals the following:

```
Possible site: 53
>>> Seems to have no N-terminal signal sequence
----- Final Results -----
                            bacterial cytoplasm --- Certainty = 0.1088(Affirmative) < succ>
                              bacterial membrane --- Certainty = 0.0000(Not Clear) < succ>
                                bacterial outside --- Certainty = 0.0000(Not Clear) < suc>
```

[11249] An alignment of the GAS and GBS proteins is shown below.

| Identities = 56/58 (96%), Positives = 57/58 (97%) | | | |
|---|---|---|---|
| Query: | 1 | MAQIKITLTKSPIGRKPEQRKTVVALGLGKLNSSVVKEDNAAIRGMVNAISHLVTVEE | 58 |
| | | MAQIKITLTKSPIGRKPEQRKTVVALGLGKLNSSVVKEDNAAIRGMV AISHLVTVE+ | |
| Sbjct: | 1 | MAQIKITLTKSPIGRKPEQRKTVVALGLGKLNSSVVKEDNAAIRGMVTAISHLVTVED | 58 |

[11250] Based on this analysis, it was predicted that this protein and its epitopes, could be useful antigens for vaccines or diagnostics.

### EXAMPLE 2050

[11251] A DNA sequence (GBSx2161) was identified in S. agalactiae <SEQ ID 6333> which encodes the amino acid sequence <SEQ ID 6334>. Analysis of this protein sequence reveals the following:

```
Possible site: 36
>>> Seems to have no N-terminal signal sequence
---- Final Results -----
                          bacterial cytoplasm --- Certainty = 0.3226(Affirmative) < succ>
                            bacterial membrane --- Certainty = 0.0000(Not Clear) < succ>
                              bacterial outside --- Certainty = 0.0000(Not Clear) < succ>
```

[11252] The protein has no significant homology with any sequences in the GENPEPT database.

[11253] No corresponding DNA sequence was identified in S. pyogenes.

[11254] Based on this analysis, it was predicted that this protein and its epitopes, could be useful antigens for vaccines or diagnostics.

### EXAMPLE 2051

[11255] A DNA sequence (GBSx2162) was identified in S. agalactiae <SEQ ID 6335> which encodes the amino acid sequence <SEQ ID 6336>. This protein is predicted to be 30S ribosomal protein S5 (rpsE). Analysis of this protein sequence reveals the following:

```
Possible site: 26
>>> Seems to have no N-terminal signal sequence
----- Final Results -----
                            bacterial cytoplasm --- Certainty = 0.3179(Affirmative) < succ>
                              bacterial membrane --- Certainty = 0.0000(Not Clear) < succ>
                                bacterial outside --- Certainty = 0.0000(Not Clear) < succ>
```

[11256] The protein has homology with the following sequences in the GENPEPT database.

| >GP:AAA22699 GB:M57621 ribosomal protein S5 [Bacillus stearothermophilus] | | | |
|---|---|---|---|
| Identities = 119/158 (75%), Positives = 139/158 (87%) | | | |
| Query: | 6 | NAVELEERVVAINRVTKVVKGGRRLRFAALVVVGDRNGRVGFGTGKAQEVPEAIRKAVEA | 65 |
| | | N +ELEERVVA+NRV KVVKGGRRLRF+ALVVVGD+NG VGFGTGKAQEVPEAIRKA+E | |
| Sbjct: | 7 | NKLELEERVVAVNRVAKVVKGGRRLRFSALVVVGDKNGHVGFGTGKAQEVPEAIRKAIED | 66 |
| Query: | 66 | AKKNMVEVPMVGTTIPHEVRSEFGGAKVLLKPAVEGAGVAAGGAVRAVIELAGVADITSK | 125 |
| | | AKKN++EVP+VGTTIPHEV FG +++LKPA EG GV AGG RAV+ELAG++DI SK | |
| Sbjct: | 67 | AKKNLIEVPIVGTTIPHEVIGHFGAGEIILKPASEGTGVIAGGPARAVLELAGISDILSK | 126 |
| Query: | 126 | SLGSNTPINIVRATVEGLKQLKRAEEVAALRGISVSDL | 163 |
| | | S+GSNTPIN+VRAT +GLKQLKRAE+VA LRG +V +L | |
| Sbjct: | 127 | SIGSNTPINMVRATFDGLKQLKRAEDVAKLRGKTVEEL | 164 |

[11257] A related DNA sequence was identified in S. pyogenes <SEQ ID 6337> which encodes the amino acid sequence <SEQ ID 6338>. Analysis of this protein sequence reveals the following:

```
Possible site: 26
>>> Seems to have no N-terminal siqnal sequence
----- Final Results -----
                            bacterial cytoplasm --- Certainty = 0.3179(Affirmative) < succ>
                              bacterial membrane --- Certainty = 0.0000(Not Clear) < succ>
                                bacterial outside --- Certainty = 0.0000(Not Clear) < succ>
```

[11258] An alignment of the GAS and GBS proteins is shown below.

| Identities = 158/164 (96%), Positives = 161/164 (97%) | | | |
|---|---|---|---|
| Query: | 1 | MAFKDNAVELEERVVAINRVTKVVKGGRRLRFAALVVVGDRNGRVGFGTGKAQEVPEAIR | 60 |
| | | MAFKDNAVELEERVVAINRVTKVVKGGRRLRFAALVVVGD NGRVGFGTGKAQEVPEAIR | |
| Sbjct: | 1 | MAFKDNAVELEERVVAINRVTKVVKGGRRLRFAALVVVGDGNGRVGFGTGKAQEVPEAIR | 60 |
| Query: | 61 | KAVEAAKKNMVEVPMVGTTIPHEVRSEFGGAKVLLKPAVEGAGVAAGGAVRAVIELAGVA | 120 |
| | | KAVEAAKKNM+EVPMVGTTIPHEV + FGGAKVLLKPAVEG+GVAAGGAVRAVIELAGVA | |
| Sbjct: | 61 | KAVEAAKKNMIEVPMVGTTIPHEVYTNFGGAKVLLKPAVEGSGVAAGGAVRAVIELAGVA | 120 |
| Query: | 121 | DITSKSLGSNTPINIVRATVEGLKQLKRAEEVAALRGISVSDLA | 164 |
| | | DITSKSLGSNTPINIVRATVEGLKQLKRAEEVAALRGISVSDLA | |
| Sbjct: | 121 | DITSKSLGSNTPINIVRATVEGLKQLKRAEEVAALRGISVSDLA | 164 |

[11259] Based on this analysis, it was predicted that this protein and its epitopes, could be useful antigens for vaccines or diagnostics.

### EXAMPLE 2052

[11260] A DNA sequence (GBSx2163) was identified in S. agalactiae <SEQ ID 6339> which encodes the amino acid sequence <SEQ ID 6340>. This protein is predicted to be 50S ribosomal protein L18 (rplR). Analysis of this protein sequence reveals the following:

```
Possible site: 61
>>> Seems to have no N-terminal signal sequence
----- Final Results -----
                            bacterial cytoplasm --- Certainty = 0.4488(Affirmative) < succ>
                              bacterial membrane --- Certainty = 0.0000(Not Clear) < succ>
                                bacterial outside --- Certainty = 0.0000(Not Clear) < succ>
```

[11261] A related GBS nucleic acid sequence <SEQ ID 9465> which encodes amino acid sequence <SEQ ID 9466> was also identified.

[11262] The protein has homology with the following sequences in the GENPEPT database.

| >GP:AAB06815 GB:L47971 ribosomal protein L18 [Bacillus subtilis] | | | |
|---|---|---|---|
| Identities = 86/120 (71%), Positives = 97/120 (80%), Gaps = 2/120 (1%) | | | |
| Query: | 4 | VISKPDKNKIRQKRHRRVRGKLSGTADRPRLNIFRSNTGIYAQVIDDVAGVTLASASTLD | 63 |
| | | +I+K KN R KRH RVR KLSGTA+RPRLN+FRSN IYAQ+IDDV GVTLASASTLD | |
| Sbjct: | 1 | MITKTSKNAARLKRHARVRAKLSGTAERPRLNVFRSNKHIYAQIIDDVNGVTLASASTLD | 60 |
| Query: | 64 | KE--VSNGTKTEQAVVVGKLVAERAVAKGISEVVFDRGGYLYHGRVKALADSARENGLKF | 121 |
| | | K+ V + T A VG+LVA+RA KGIS+VVFDRGGYLYHGRVKALAD+ARE GLKF | |
| Sbjct: | 61 | KDLNVESTGDTSAATKVGELVAKRAAEKGISDVVFDRGGYLYHGRVKALADAAREAGLKF | 120 |

[11263] A related DNA sequence was identified in S. pyogenes <SEQ ID 6341> which encodes the amino acid sequence <SEQ ID 6342>. Analysis of this protein sequence reveals the following:

```
Possible site: 61
>>> Seems to have no N-terminal signal sequence
----- Final Results -----
                            bacterial cytoplasm --- Certainty = 0.4488(Affirmative) < succ>
                              bacterial membrane --- Certainty = 0.0000(Not Clear) < succ>
                                bacterial outside --- Certainty = 0.0000(Not Clear) < succ>
```

[11264] An alignment of the GAS and GBS proteins is shown below.

| Identities = 116/121 (95%), Positives = 120/121 (98%) | | | |
|---|---|---|---|
| Query: | 1 | MKIVISKPDKNKIRQKRHRRVRGKLSGTADRPRLNIFRSNTGIYAQVIDDVAGVTLASAS | 60 |
| | | +KIVISKPDKNKIRQKRHRRVRGKLSGTADRPRLN+FRSNTGIYAQVIDDVAGVTLASAS | |
| Sbjct: | 1 | VKIVISKPDKNKIRQKRHRRVRGKLSGTADRPRLNVFRSNTGIYAQVIDDVAGVTLASAS | 60 |
| Query: | 61 | TLDKEVSNGTKTEQAVVVGKLVAERAVAKGISEVVFDRGGYLYHGRVKALADSARENGLKF | 121 |
| | | TLDK+VS GTKTEQAVVVGKLVAERAVAKGISEVVFDRGGYLYHGRVKALAD+ARENGLKF | |
| Sbjct: | 61 | TLDKDVSKGTKTEQAVVVGKLVAERAVAKGISEVVFDRGGYLYHGRVKALADAARENGLKF | 121 |

[11265] Based on this analysis, it was predicted that this protein and its epitopes, could be useful antigens for vaccines or diagnostics.

### EXAMPLE 2053

[11266] A DNA sequence (GBSx2164) was identified in S. agalactiae <SEQ ID 6343> which encodes the amino acid sequence <SEQ ID 6344>. Analysis of this protein sequence reveals the following:

```
Possible site: 53
>>> Seems to have no N-terminal signal sequence
----- Final Results -----
                            bacterial cytoplasm --- Certainty = 0.1530(Affirmative) < succ>
                              bacterial membrane --- Certainty = 0.0000(Not Clear) < succ>
                                bacterial outside --- Certainty = 0.0000(Not Clear) < succ>
```

[11267] The protein has homology with the following sequences in the GENPEPT database.

| >GP: AAA22700 GB: M57622 ribosomal protein L6 [Bacillus | | | |
|---|---|---|---|
| stearothermophilus] | | | |
| Identities = 108/178 (60%), Positives = 133/178 (74%) | | | |
| Query: | 1 | MSRIGNKVITLPAGVEIINKDNVVTVKGPKGQLTREFNKNIGITVEGTEVTVTRPNDSKE | 60 |
| | | M R+G K I +PAGV + N VTVKGPKG+LTR F+ ++ ITVEG +TVTRP+D K | |
| Sbjct: | 1 | MXRVGKKPIEIPAGVTVTVNGNTVTVKGPKGELTRTFHPDMTITVEGNVITVTRPSDEKH | 60 |
| Query: | 61 | MKTIHGTTRANLNNMVVGVSEGFKKALEMRGVGYRAQLQGSKLVLSVGKSHQDEVEAPEG | 120 |
| | | + +HGTTR+ L NMV GVS+G++KALE+ GVGYRA QG KLVLSVG SH E+E EG | |
| Sbjct: | 61 | HRALHGTTRSLLANMVEGVSKGYEKALELVGVGYRASKQGKKLVLSVGYSHPVEIEPEEG | 120 |
| Query: | 121 | VTFEVPTPTTINVIGINKESVGQTAAYVRSLRSPEPYKGKGIRYVGEFVRRKEGKTGK | 178 |
| | | + EVP+ T I V G +K+ VG+ AA +R++R PEPYKGKGIRY GE VR KEGKTGK | |
| Sbjct: | 121 | LEIEVPSQTKIIVKGADKQRVGELAANIRAVRPPEPYKGKGIRYEGELVRLKEGKTGK | 178 |

[11268] A related DNA sequence was identified in S. pyogenes <SEQ ID 6345> which encodes the amino acid sequence <SEQ ID 6346>. Analysis of this protein sequence reveals the following:

```
Possible site: 17
>>> Seems to have no N-terminal signal sequence
----- Final Results -----
                            bacterial cytoplasm --- Certainty = 0.1704(Affirmative) < succ>
                              bacterial membrane --- Certainty = 0.0000(Not Clear) < succ>
                                bacterial outside --- Certainty = 0.0000(Not Clear) < succ>
```

[11269] An alignment of the GAS and GBS proteins is shown below.

| Identities = 153/178 (85%), Positives = 166/178 (92%) | | | |
|---|---|---|---|
| Query: | 1 | MSRIGNKVITLPAGVEIINKDNVVTVKGPKGQLTREFNKNIGITVEGTEVTVTRPNDSKE | 60 |
| | | MSRIGNKVIT+PAGVE+ N +NV+TVKGPKG+LTREFNKNI I VEGTE+TV RPNDSKE | |
| Sbjct: | 1 | MSRIGNKVITMPAGVELTNNNNVITVKGPKGELTREFNKNIEIKVEGTEITVVRPNDSKE | 60 |
| Query: | 61 | MKTIHGTTRANLNNMVVGVSEGFKKALEMRGVGYRAQLQGSKLVLSVGKSHQDEVEAPEG | 120 |
| | | MKTIHGTTRANLNNMVVGVSEGFKK LEM+GVGYRAQLQG+KLVLSVGKSHQDEVEAPEG | |
| Sbjct: | 61 | MKTIHGTTRANLNNMVVGVSEGFKKDLEMKGVGYRAQLQGTKLVLSVGKSHQDEVEAPEG | 120 |
| Query: | 121 | VTFEVPTPTTINVIGINKESVGQTAAYVRSLRSPEPYKGKGIRYVGEFVRRKEGKTGK | 178 |
| | | +TF V PT+I+V GINKE VGQTAAY+RSLRSPEPYKGKGIRYVGE+VR KEGKTGK | |
| Sbjct: | 121 | ITFTVANPTSISVEGINKEVVGQTAAYIRSLRSPEPYKGKGIRYVGEYVRLKEGKTGK | 178 |

[11270] Based on this analysis, it was predicted that this protein and its epitopes, could be useful antigens for vaccines or diagnostics.

### EXAMPLE 2054

[11271] A DNA sequence (GBSx2165) was identified in S. agalactiae <SEQ ID 6347> which encodes the amino acid sequence <SEQ ID 6348>. This protein is predicted to be 30S ribosomal protein S8 (rpsH). Analysis of this protein sequence reveals the following:

```
Possible site: 19
>>> Seems to have no N-terminal signal sequence
----- Final Results -----
                            bacterial cytoplasm --- Certainty = 0.4356(Affirmative) < succ>
                              bacterial membrane --- Certainty = 0.0000(Not Clear) < succ>
                                bacterial outside --- Certainty = 0.0000(Not Clear) < succ>
```

[11272] The protein has homology with the following sequences in the GENPEPT database.

| >GP: AAB06813 GB: L47971 ribosomal protein S8 [Bacillus subtilis] | | | |
|---|---|---|---|
| Identities = 100/132 (75%), Positives = 116/132 (87%) | | | |
| Query: | 1 | MVMTDPIADFLTRIRNANQAKHEVLEVPASNIKKGIADILKREGFVKNVEVIEDDKQGII | 60 |
| | | MVMTDPIAD LTRIRNAN +HE LE+PAS +K+ IA+ILKREGF+++VE +ED KQGII | |
| Sbjct: | 1 | MVMTDPIADMLTRIRNANMVRHEKLEIPASKLKREIAEILKREGFIRDVEFVEDSKQGII | 60 |
| Query: | 61 | RVFLKYGQNGERVITNLKRISKPGLRVYTKHEDMPKVLNGLGIAIVSTSEGLLTDKEARQ | 120 |
| | | RVFLKYGQN ERVIT LKRISKPGLRVY K ++P+VLNGLGIAI+STS +G+LTDKEAR | |
| Sbjct: | 61 | RVFLKYGQNNERVITGLKRISKPGLRVYAKSNEVPRVLNGLGIAIISTSQGVLTDKEARA | 120 |
| Query: | 121 | KNIGGEVLAYIW | 132 |
| | | K GGEVLAY+W | |
| Sbjct: | 121 | KQAGGEVLAYVW | 132 |

[11273] A related DNA sequence was identified in S. pyogenes <SEQ ID 6349> which encodes the amino acid sequence <SEQ ID 6350>. Analysis of this protein sequence reveals the following:

```
Possible site: 19
>>> Seems to have no N-terminal signal sequence
----- Final Results -----
                            bacterial cytoplasm --- Certainty = 0.4327(Affirmative) < succ>
                              bacterial membrane --- Certainty = 0.0000(Not Clear) < succ>
                                bacterial outside --- Certainty = 0.0000(Not Clear) < succ>
```

[11274] An alignment of the GAS and GBS proteins is shown below.

| Identities = 122/132 (92%), Positives = 129/132 (97%) | | | |
|---|---|---|---|
| Query: | 1 | MVMTDPIADFLTRIRNANQAKHEVLEVPASNIKKGIADILKREGFVKNVEVIEDDKQGII | 60 |
| | | MVMTDPIADFLTRIRNANQ KHEVLEVPASNIKKGIA+ILKREGFVKNVEVIEDDKQGII | |
| Sbjct: | 1 | MVMTDPIADFLTRIRNANQVKHEVLEVPASNIKKGIAEILKREGFVKNVEVIEDDKQGII | 60 |
| Query: | 61 | RVFLKYGQNGERVITNLKRISKPGLRVYTKHEDMPKVLNGLGIAIVSTSEGLLTDKEARQ | 120 |
| | | RVFLKYG+NGERVITNLKRISKPGLRVY K +DMPKVLNGLGIAI+STSEGLLTDKEARQ | |
| Sbjct: | 61 | RVFLKYGKNGERVITNLKRISKPGLRVYAKRDDMPKVLNGLGIAIISTSEGLLTDKEARQ | 120 |
| Query: | 121 | KNIGGEVLAYIW | 132 |
| | | KN+GGEV+AY+W | |
| Sbjct: | 121 | KNVGGEVIAYVW | 132 |

[11275] Based on this analysis, it was predicted that this protein and its epitopes, could be useful antigens for vaccines or diagnostics.

### EXAMPLE 2055

[11276] A DNA sequence (GBSx2166) was identified in S. agalactiae <SEQ ID 6351> which encodes the amino acid sequence <SEQ ID 6352>. This protein is predicted to be ribosomal protein S14 (rpsN). Analysis of this protein sequence reveals the following:

```
Possible site: 59
>>> Seems to have no N-terminal signal sequence
----- Final Results -----
                            bacterial cytoplasm --- Certainty = 0.3833(Affirmative) < succ>
                              bacterial membrane --- Certainty = 0.0000(Not Clear) < succ>
                                bacterial outside --- Certainty = 0.0000(Not Clear) < succ>
```

[11277] The protein has homology with the following sequences in the GENPEPT database.

| >GP: CAB11905 GB: Z99104 ribosomal protein S14 [Bacillus subtilis] | | | |
|---|---|---|---|
| Identities = 47/61 (77%), Positives = 53/61 (86%) | | | |
| Query: | 1 | MAKKSMIAKNKRPAKFSTQAYTRCEKCGRPHSVYRKFQLCRVCFRDLAYKGQVPGVTKAS | 60 |
| | | MAKKSMIAK +R KF Q YTRCE+CGRPHSV RKF+LCR+CFR+LAYKGQ+PGV KAS | |
| Sbjct: | 1 | MAKKSMIAKQQRTPKFKVQEYTRCERCGRPHSVIRKFKLCRICFRELAYKGQIPGVKKAS | 60 |
| Query: | 61 | W | 61 |
| | | W | |
| Sbjct: | 61 | W | 61 |

[11278] A related DNA sequence was identified in S. pyogenes <SEQ ID 6353> which encodes the amino acid sequence <SEQ ID 6354>. Analysis of this protein sequence reveals the following:

```
Possible site: 59
>>> Seems to have no N-terminal signal sequence
----- Final Results -----
                            bacterial cytoplasm --- Certainty = 0.4747(Affirmative) < succ>
                              bacterial membrane --- Certainty = 0.0000(Not Clear) < succ>
                                bacterial outside --- Certainty = 0.0000(Not Clear) < succ>
```

[11279] An alignment of the GAS and GBS proteins is shown below.

| Identities = 55/61 (90%), Positives = 59/61 (96%) | | | |
|---|---|---|---|
| Query: | 1 | MAKKSMIAKNKRPAKFSTQAYTRCEKCGRPHSVYRKFQLCRVCFRDLAYKGQVPGVTKAS | 60 |
| | | +AKKSMIAKNKRPAK STQAYTRCEKCGRPHSVYRKF+LCRVCFR+LAYKGQ+PGV KAS | |
| Sbjct: | 1 | LAKKSMIAKNKRPAKHSTQAYTRCEKCGRPHSVYRKFKLCRVCFRELAYKGQIPGVVKAS | 60 |
| Query: | 61 | W | 61 |
| | | W | |
| Sbjct: | 61 | W | 61 |

[11280] Based on this analysis, it was predicted that this protein and its epitopes, could be useful antigens for vaccines or diagnostics.

### EXAMPLE 2056

[11281] A DNA sequence (GBSx2167) was identified in S. agalactiae <SEQ ID 6355> which encodes the amino acid sequence <SEQ ID 6356>. This protein is predicted to be 50S ribosomal protein L5 (rplE). Analysis of this protein sequence reveals the following:

```
Possible site: 48
>>> Seems to have no N-terminal signal sequence
----- Final Results -----
                            bacterial cytoplasm --- Certainty = 0.1845(Affirmative) < succ>
                              bacterial membrane --- Certainty = 0.0000(Not Clear) < succ>
                                bacterial outside --- Certainty = 0.0000(Not Clear) < succ>
```

[11282] The protein has homology with the following sequences in the GENPEPT database.

| >GP: BAB03865 GB: AP001507 ribosomal protein L5 (BL6) | | | |
|---|---|---|---|
| [Bacillus halodurans] | | | |
| Identities = 143/178 (80%), Positives = 162/178 (90%) | | | |
| Query: | 3 | NRLKEKYTNEVVPALTEKFNYSSVMAVPKVEKIVLNMGVGDAVSNAKNLEKAAAELALIS | 62 |
| | | NRLKEKY E+VP+LTERFNYSSVMAVPK+EKIV+NMGVGDAV NAK L+KA EL I+ | |
| Sbjct: | 2 | NRLKEKYQKEIVPSLTEKFNYSSVMAVPKLEKIVVNMGVGDAVQNAKALDKAVEELTEIT | 61 |
| Query: | 63 | GQKPLITKAKKSIAGFRLREGVAIGAKVTLRGERMYEFLDKLVSVSLPRVRDFHGVPTKS | 122 |
| | | GQKP+ITKAKKSIAGF+LREG+ IGAKVTLRGERMYEFLDKL+SVSLPRVRDF G+ K+ | |
| Sbjct: | 62 | GQKPIITKAKKSIAGFKLREGMPIGAKVTLRGERMYEFLDKLISVSLPRVRDFRGISKKA | 121 |
| Query: | 123 | FDGRGNYTLGVKEQLIFPEINFDDVDKVRGLDIVIVTTANTDEESRELLKGLGMPFAK | 180 |
| | | FDGRGNYTLGVKEQLIFPEI++D VDKVRG+D+VIVTTA+TDEE+RELL +GMPF K | |
| Sbjct: | 122 | FDGRGNYTLGVKEQLIFPEIDYDKVDKVRGMDVVIVTTASTDEEARELLSQMGMPFQK | 179 |

[11283] A related DNA sequence was identified in S. pyogenes <SEQ ID 6357> which encodes the amino acid sequence <SEQ ID 6358>. Analysis of this protein sequence reveals the following:

```
Possible site: 48
>>> Seems to have no N-terminal signal sequence
----- Final Results -----
                            bacterial cytoplasm --- Certainty = 0.1793(Affirmative) < succ>
                              bacterial membrane --- Certainty = 0.0000(Not Clear) < succ>
                                bacterial outside --- Certainty = 0.0000(Not Clear) < succ>
```

[11284] An alignment of the GAS and GBS proteins is shown below.

| Identities = 177/180 (98%), Positives = 180/180 (99%) | | | |
|---|---|---|---|
| Query: | 1 | MANRLKEKYTNEVVPALTEKFNYSSVMAVPKVEKIVLNMGVGDAVSNAKNLEKAAAELAL | 60 |
| | | MANRLKEKYTNEV+PALTEKFNY+SVMAVPKVEKIVLNMGVGDAVSNAKNLEKAAAELAL | |
| Sbjct: | 1 | MANRLKEKYTNEVIPALTEKFNYTSVMAVPKVEKIVLNMGVGDAVSNAKNLEKAAAELAL | 60 |
| Query: | 61 | ISGQKPLITKAKKSIAGFRLREGVAIGAKVTLRGERMYEFLDKLVSVSLPRVRDFHGVPT | 120 |
| | | ISGQKPLITKAKKSIAGFRLREGVAIGAKVTLRGERMYEFLDKLVSVSLPRVRDFHGVPT | |
| Sbjct: | 61 | ISGQKPLITKAKKSIAGFRLREGVAIGAKVTLRGERMYEFLDKLVSVSLPRVRDFHGVPT | 120 |
| Query: | 121 | KSFDGRGNYTLGVKEQLIFPEINFDDVDKVRGLDIVIVTTANTDEESRELLKGLGMPFAK | 180 |
| | | KSFDGRGNYTLGVKEQLIFPEI+FDDVDKVRGLDIVIVTTANTDEESRELLKGLGMPFAK | |
| Sbjct: | 121 | KSFDGRGNYTLGVKEQLIFPEISFDDVDKVRGLDIVIVTTANTDEESRELLKGLGMPFAK | 180 |

[11285] Based on this analysis, it was predicted that this protein and its epitopes, could be useful antigens for vaccines or diagnostics.

### EXAMPLE 2057

[11286] A DNA sequence (GBSx2169) was identified in S. agalactiae <SEQ ID 6359> which encodes the amino acid sequence <SEQ ID 6360>. This protein is predicted to be 50S ribosomal protein L24 (rplX). Analysis of this protein sequence reveals the following:

```
Possible site: 26
>>> Seems to have no N-terminal signal sequence
----- Final Results -----
                            bacterial cytoplasm --- Certainty = 0.1850(Affirmative) < succ>
                              bacterial membrane --- Certainty = 0.0000(Not Clear) < succ>
                                bacterial outside --- Certainty = 0.0000(Not Clear) < succ>
```

[11287] The protein has homology with the following sequences in the GENPEPT database.

| >GP: AAD33285 GB: AF126061 RpL24 [Streptococcus pneumoniae] | | | |
|---|---|---|---|
| Identities = 89/101 (88%), Positives = 94/101 (92%) | | | |
| Query: | 1 | MFVKKGDKVRVIAGKDKGTEAVVLKALPKVNKVVVEGVALIKKHQKPNNENPQGAIVEKE | 60 |
| | | MFVKKGDKVRVIAGKDKGTEAVVL ALPKVNKV+VEGV ++KKHQ+P NE PQG I+EKE | |
| Sbjct: | 1 | MFVKKGDKVRVIAGKDKGTEAVVLTALPKVNKVIVEGVNIVKKHQRPTNELPQGGIIEKE | 60 |
| Query: | 61 | APIHVSNVQVLDKNGVAGRVGYKVVDGKKVRYNKKSGEVLD | 101 |
| | | A IHVSNVQVLDKNGVAGRVGYK VDGKKVRYNKKSGEVLD | |
| Sbjct: | 61 | AAIHVSNVQVLDKNGVAGRVGYKFVDGKKVRYNKKSGEVLD | 101 |

[11288] A related DNA sequence was identified in S. pyogenes <SEQ ID 6361> which encodes the amino acid sequence <SEQ ID 6362>. Analysis of this protein sequence reveals the following:

```
Possible site: 26
>>> Seems to have no N-terminal signal sequence
----- Final Results -----
                            bacterial cytoplasm --- Certainty = 0.1850(Affirmative) < succ>
                              bacterial membrane --- Certainty = 0.0000(Not Clear) < succ>
                                bacterial outside --- Certainty = 0.0000(Not Clear) < succ>
```

[11289] An alignment of the GAS and GBS proteins is shown below.

| Identities = 95/101 (94%), Positives = 99/101 (97%) | | | |
|---|---|---|---|
| Query: | 1 | MFVKKGDKVRVIAGKDKGTEAVVLKALPKVNKVVVEGVALIKKHQKPNNENPQGAIVEKE | 60 |
| | | MFVKKGDKVRVIAGKDKGTEAVVLKALFKVNKV+VEGV +IKKHQKPN ENPQGAIVEKE | |
| Sbjct: | 1 | MFVKKGDKVRVIAGKDKGTEAVVLKALPKVNKVIVEGVGMIKKHQKPNTENPQGAIVEKE | 60 |
| Query: | 61 | APIHVSNVQVLDKNGVAGRVGYKVVDGKKVRYNKKSGEVLD | 101 |
| | | APIHVSNVQVLDKNGVAGR+GYKVVDGKKVRY+KKSGEVLD | |
| Sbjct: | 61 | APIHVSNVQVLDKNGVAGRIGYKVVDGKKVRYSKKSGEVLD | 101 |

[11290] Based on this analysis, it was predicted that this protein and its epitopes, could be useful antigens for vaccines or diagnostics.

### EXAMPLE 2058

[11291] A DNA sequence (GBSx2170) was identified in S. agalactiae <SEQ ID 6363> which encodes the amino acid sequence <SEQ ID 6364>. This protein is predicted to be 50S ribosomal protein L14 (rplN). Analysis of this protein sequence reveals the following:

```
Possible site: 16
>>> Seems to have no N-terminal signal sequence
----- Final Results -----
                            bacterial cytoplasm --- Certainty = 0.1004(Affirmative) < succ>
                              bacterial membrane --- Certainty = 0.0000(Not Clear) < succ>
                                bacterial outside --- Certainty = 0.0000(Not Clear) < succ>
```

[11292] The protein has homology with the following sequences in the GENPEPT database.

| >GP: AAD33284 GB: AF126061 RpL14 [Streptococcus pneumoniae] | | | |
|---|---|---|---|
| Identities = 116/122 (95%), Positives = 120/122 (98%) | | | |
| Query: | 1 | MIQQETRLKVADNSGAREILTIKVLGGSGRKFANIGDVIVASVKQATPGGAVKKGDVVKA | 60 |
| | | MIQ ETRLKVADNSGAREILTIKVLGGSGRKFANIGDVIVASVKQATPGGAVKKGDVVKA | |
| Sbjct: | 1 | MIQTETRLKVADNSGAREILTIKVLGGSGRKFANIGDVIVASVKQATPGGAVKKGDVVKA | 60 |
| Query: | 61 | VIVRTKTGARRPDGSYIKFDDNAAVIIRDDKTPRGTRIFGPVARELREGGYMKIVSLAPE | 120 |
| | | VIVRTK+GARR DGSYIKFD+NAAVIIR+DKTPRGTRIFGPVARELREGG+MKIVSLAPE | |
| Sbjct: | 61 | VIVRTKSGARRADGSYIKFDENAAVIIREDKTPRGTRIFGPVARELREGGFMKIVSLAPE | 120 |
| Query: | 121 | VL | 122 |
| | | VL | |
| Sbjct: | 121 | VL | 122 |

[11293] A related DNA sequence was identified in S. pyogenes <SEQ ID 6365> which encodes the amino acid sequence <SEQ ID 6366>. Analysis of this protein sequence reveals the following:

```
Possible site: 16
>>> Seems to have no N-terminal siqnal sequence
----- Final Results -----
                            bacterial cytoplasm --- Certainty = 0.1004(Affirmative) < succ>
                              bacterial membrane --- Certainty = 0.0000(Not Clear) < succ>
                                bacterial outside --- Certainty = 0.0000(Not Clear) < succ>
```

[11294] An alignment of the GAS and GBS proteins is shown below.

| Identities = 122/122 (100%), Positives = 122/122 (100%) | | | |
|---|---|---|---|
| Query: | 1 | MIQQETRLKVADNSGAREILTIKVLGGSGRKFANIGDVIVASVKQATPGGAVKKGDVVKA | 60 |
| | | MIQQETRLKVADNSGAREILTIKVLGGSGRKFANIGDVIVASVKQATPGGAVKKGDVVKA | |
| Sbjct: | 1 | MIQQETRLKVADNSGAREILTIKVLGGSGRKFANIGDVIVASVKQATPGGAVKKGDVVKA | 60 |
| Query: | 61 | VIVRTKTGARRPDGSYIKFDDNAAVIIRDDKTPRGTRIFGPVARELREGGYMKIVSLAPE | 120 |
| | | VIVRTKTGARRPDGSYIKFDDNAAVIIRDDKTPRGTRIFGPVARELREGGYMKIVSLAPE | |
| Sbjct: | 61 | VIVRTKTGARRPDGSYIKFDDNAAVIIRDDKTPRGTRIFGPVARELREGGYMKIVSLAPE | 120 |
| Query: | 121 | VL | 122 |
| | | VL | |
| Sbjct: | 121 | VL | 122 |

[11295] Based on this analysis, it was predicted that this protein and its epitopes, could be useful antigens for vaccines or diagnostics.

### EXAMPLE 2059

[11296] A DNA sequence (GBSx2171) was identified in S. agalactiae <SEQ ID 6367> which encodes the amino acid sequence <SEQ ID 6368>. Analysis of this protein sequence reveals the following:

```
Possible site: 47
>>> Seems to have no N-terminal signal sequence
----- Final Results -----
                            bacterial cytoplasm --- Certainty = 0.3415(Affirmative) < succ>
                              bacterial membrane --- Certainty = 0.0000(Not Clear) < succ>
                                bacterial outside --- Certainty = 0.0000(Not Clear) < succ>
```

[11297] The protein has homology with the following sequences in the GENPEPT database.

| >GP: AAD33283 GB: AF126061 RpS17 [Streptococcus pneumoniae] | | | |
|---|---|---|---|
| Identities = 82/86 (95%), Positives = 83/86 (96%) | | | |
| Query: | 1 | MERNQRKTLYGRVVSDKMDKTITVVVETKRNHPVYGKRINYSKKYKAHDENNVAKEGDIV | 60 |
| | | MERN RK L GRVVSDKMDKTITVVVETKRNHPVYGKRINYSKKYKAHDENNVAKEGDIV | |
| Sbjct: | 1 | MERNNRKVLVGRVVSDKMDKTITVVVETKRNHPVYGKRINYSKKYKAHDENNVAKEGDIV | 60 |
| Query: | 61 | RIMETRPLSATKRFRLVEVVEKAVII | 86 |
| | | RIMETRPLSATKRFRLVEVVE+AVII | |
| Sbjct: | 61 | RIMETRPLSATKRFRLVEVVEKAVII | 86 |

[11298] A related DNA sequence was identified in S. pyogenes <SEQ ID 6369> which encodes the amino acid sequence <SEQ ID 6370>. Analysis of this protein sequence reveals the following:

```
Possible site: 47
>>> Seems to have no N-terminal signal sequence
----- Final Results -----
                            bacterial cytoplasm --- Certainty = 0.3415(Affirmative) < succ>
                              bacterial membrane --- Certainty = 0.0000(Not Clear) < succ>
                                bacterial outside --- Certainty = 0.0000(Not Clear) < succ>
```

[11299] An alignment of the GAS and GBS proteins is shown below.

| Identities = 86/86 (100%), Positives = 86/86 (100%) | | | |
|---|---|---|---|
| Query: | 1 | MERNQRKTLYGRVVSDKMDKTITVVVETKRNHPVYGKRINYSKKYKAHDENNVAKEGDIV | 60 |
| | | MERNQRKTLYGRVVSDKMDKTITVVVETKRNHPVYGKRINYSKKYKAHDENNVAKEGDIV | |
| Sbjct: | 1 | MERNQRKTLYGRVVSDKMDKTITVVVETKRNHPVYGKRINYSKKYKAHDENNVAKEGDIV | 60 |
| Query: | 61 | RIMETRPLSATKRFRLVEVVEKAVII | 86 |
| | | RIMETRPLSATKRFRLVEVVEKAVII | |
| Sbjct: | 61 | RIMETRPLSATKRFRLVEVVEKAVII | 86 |

[11300] Based on this analysis, it was predicted that this protein and its epitopes, could be useful antigens for vaccines or diagnostics.

### EXAMPLE 2060

[11301] A DNA sequence (GBSx2172) was identified in S. agalactiae <SEQ ID 6371> which encodes the amino acid sequence <SEQ ID 6372>. Analysis of this protein sequence reveals the following:

```
Possible site: 43
>>> Seems to have no N-terminal signal sequence
----- Final Results -----
                            bacterial cytoplasm --- Certainty = 0.4329(Affirmative) < succ>
                              bacterial membrane --- Certainty = 0.0000(Not Clear) < succ>
                                bacterial outside --- Certainty = 0.0000(Not Clear) < succ>
```

[11302] The protein has homology with the following sequences in the GENPEPT database.

| >GP: AAD33282 GB: AF126061 RpL29 [Streptococcus pneumoniae] | | | |
|---|---|---|---|
| Identities = 58/68 (85%), Positives = 64/68 (93%) | | | |
| Query: | 1 | MKLQEIKDFVKELRGLSQEELAKKENELKKELFDLRFQAAAGQLEKTARLDEVKKQIARV | 60 |
| | | MKL E+K+FVKELRGLSQEELAK+ENELKKELF+LRFQAA GQLE+TARL EVKKQIAR+ | |
| Sbjct: | 1 | MKLNEVKEFVKELRGLSQEELAKRENELKKELFELRFQAATGQLEQTARLKEVKKQIARI | 60 |
| Query: | 61 | KTVQSEMK | 68 |
| | | KTVQSE K | |
| Sbjct: | 61 | KTVQSEAK | 68 |

[11303] Based on this analysis, it was predicted that this protein and its epitopes, could be useful antigens for vaccines or diagnostics.

### EXAMPLE 2061

[11304] A DNA sequence (GBSx2174) was identified in S. agalactiae <SEQ ID 6373> which encodes the amino acid sequence <SEQ ID 6374>. This protein is predicted to be RpL16 (rplP). Analysis of this protein sequence reveals the following:

```
Possible site: 52
>>> Seems to have no N-terminal signal sequence
----- Final Results -----
                            bacterial cytoplasm --- Certainty = 0.4574(Affirmative) < succ>
                              bacterial membrane --- Certainty = 0.0000(Not Clear) < succ>
                                bacterial outside --- Certainty = 0.0000(Not Clear) < succ>
```

[11305] The protein has homology with the following sequences in the GENPEPT database.

| >GP: AAD33263 GB: AF126059 RpL16 [Streptococcus pneumoniae] | | | |
|---|---|---|---|
| Identities = 135/137 (98%), Positives = 137/137 (99%) | | | |
| Query: | 1 | MLVPKRVKHRREFRGKMRGEAKGGKEVSFGEYGLQATTSHWITNRQIEAARIANTRYMKR | 60 |
| | | MLVPKRVKHRREFRGKMRGEAKGGKEV+FGEYGLQATTSHWITNRQIEAARIANTRYMKR | |
| Sbjct: | 1 | MLVPKRVKHRREFRGKMRGEAKGGKEVAFGEYGLQATTSHWITNRQIEAARIANTRYMKR | 60 |
| Query: | 61 | GGKVWIKIFPHKSYTAKAIGVRMGSGKGAPEGWVAPVKRGKVMFEIAGVSEEVAREALRL | 120 |
| | | GGKVWIKIFPHKSYTAKAIGVRMGSGKGAPEGWVAPVKRGKVMFEIAGVSEE+AREALRL | |
| Sbjct: | 61 | GGKVWIKIFPHKSYTAKAIGVRMGSGKGAPEGWVAPVKRGKVMFEIAGVSEEIAREALRL | 120 |
| Query: | 121 | ASHKLPVKCKFVKREAE | 137 |
| | | ASHKLPVKCKFVKREAE | |
| Sbjct: | 121 | ASHKLPVKCKFVKREAE | 137 |

[11306] A related DNA sequence was identified in S. pyogenes <SEQ ID 6375> which encodes the amino acid sequence <SEQ ID 6376>. Analysis of this protein sequence reveals the following:

```
Possible site: 52
>>> Seems to have no N-terminal signal sequence
----- Final Results -----
                            bacterial cytoplasm --- Certainty = 0.4574(Affirmative) < succ>
                              bacterial membrane --- Certainty = 0.0000(Not Clear) < succ>
                                bacterial outside --- Certainty = 0.0000(Not Clear) < succ>
```

[11307] An alignment of the GAS and GBS proteins is shown below.

| Identities = 136/137 (99%), Positives = 137/137 (99%) | | | |
|---|---|---|---|
| Query: | 1 | MLVPKRVKHRREFRGKMRGEAKGGKEVSFGEYGLQATTSHWITNRQIEAARIAMTRYMKR | 60 |
| | | MLVPKRVKHRREFRGKMRGEAKGGKEVSFGEYGLQATTSHWITNRQIEAARIAMTRYMKR | |
| Sbjct: | 1 | MLVPKRVKHRREFRGRMRGEAKGGKEVSFGEYGLQATTSHWITNRQIEAARIAMTRYMKR | 60 |
| Query: | 61 | GGKVWIKIFPHKSYTAKAIGVRMGSGKGAPEGWVAPVKRGKVMFEIAGVSEEVAREALRL | 120 |
| | | GGKVWIKIFPHKSYTAKAIGVRMGSGKGAPEGWVAPVKRGKVMFEIAGVSEE+AREALRL | |
| Sbjct: | 61 | GGKVWIKIFPHKSYTAKAIGVRMGSGKGAPEGWVAPVKRGKVMFEIAGVSEEIAREALRL | 120 |
| Query: | 121 | ASHKLPVKCKFVKREAE | 137 |
| | | ASHKLPVKCKFVKREAE | |
| Sbjct: | 121 | ASHKLPVKCKFVKREAE | 137 |

[11308] Based on this analysis, it was predicted that this protein and its epitopes, could be useful antigens for vaccines or diagnostics.

### EXAMPLE 2062

[11309] A DNA sequence (GBSx2175) was identified in S. agalactiae <SEQ ID 6377> which encodes the amino acid sequence <SEQ ID 6378>. Analysis of this protein sequence reveals the following:

```
Possible site: 53
>>> Seems to have no N-terminal signal sequence
----- Final Results -----
                            bacterial cytoplasm --- Certainty = 0.3758(Affirmative) < succ>
                              bacterial membrane --- Certainty = 0.0000(Not Clear) < succ>
                                bacterial outside --- Certainty = 0.0000(Not Clear) < succ>
```

[11310] The protein has homology with the following sequences in the GENPEPT database.

| >GP: AAD33280 GB: AF126061 RpS3 [Streptococcus pneumoniae] | | | |
|---|---|---|---|
| Identities = 200/208 (96%), Positives = 203/208 (97%) | | | |
| Query: | 10 | MRVGIIRDWDAKWYAEKEYADYLHEDLAIRKFINKELADASVSTIEIERAVNKVIVSLHT | 69 |
| | | MRVGIIRDWDAKWYAEKEYADYLHEDLAIRKF+ KELADA+VSTIEIERAVNKV VSLHT | |
| Sbjct: | 1 | MRVGIIRDWDAKWYAEKEYADYLHEDLAIRKFVQKELADAAVSTIEIERAVNKVNVSLHT | 60 |
| Query: | 70 | AKPGMVIGKGGANVDALRGQLNKLTGKQVHINIIEIKQPDLDAHLVGENIARQLEQRVAF | 129 |
| | | AKPGMVIGKGGANVDALR +LNKLTGKQVHINIIEIKQPDLDAHLVGE IARQLEQRVAF | |
| Sbjct: | 61 | AKPGMVIGKGGANVDALRAKLNKLTGKQVHINIIEIKQPDLDAHLVGEGIARQLEQRVAF | 120 |
| Query: | 130 | RRAQKQAIQRTMRAGAKGIKTQVSGRLNGADIARAEGYSEGTVPLHTLRADIDYAWEEAD | 189 |
| | | RRAQKQAIQR MRAGAKGIKTQVSGRLNGADIARAEGYSEGTVPLHTLRADIDYAWEEAD | |
| Sbjct: | 121 | RRAQKQAIQRAMRAGAKGIKTQVSGRLNGADIARAEGYSEGTVPLHTLRADIDYAWEEAD | 180 |
| Query: | 190 | TTYGKLGVKVWIYRGEVLPARKNTKGGK | 217 |
| | | TTYGKLGVKVWIYRGEVLPARKNTKGGK | |
| Sbjct: | 181 | TTYGKLGVKVWIYRGEVLPARKNTKGGK | 208 |

[11311] A related DNA sequence was identified in S. pyogenes <SEQ ID 6379> which encodes the amino acid sequence <SEQ ID 6380>. Analysis of this protein sequence reveals the following:

```
Possible site: 53
>>> Seems to have no N-terminal signal sequence
----- Final Results -----
                            bacterial cytoplasm --- Certainty = 0.3758(Affirmative) < succ>
                              bacterial membrane --- Certainty = 0.0000(Not Clear) < succ>
                                bacterial outside --- Certainty = 0.0000(Not Clear) < succ>
```

[11312] Based on this analysis, it was predicted that this protein and its epitopes, could be useful antigens for vaccines or diagnostics.

### EXAMPLE 2063

[11313] A DNA sequence (GBSx2176) was identified in S. agalactiae <SEQ ID 6381> which encodes the amino acid sequence <SEQ ID 6382>. This protein is predicted to be 50S ribosomal protein L22 (rplV). Analysis of this protein sequence reveals the following:

```
Possible site: 36
>>> Seems to have no N-terminal signal sequence
----- Final Results -----
                            bacterial cytoplasm --- Certainty = 0.2704(Affirmative) < succ>
                              bacterial membrane --- Certainty = 0.0000(Not Clear) < succ>
                                bacterial outside --- Certainty = 0.0000(Not Clear) < succ>
```

[11314] The protein has homology with the following sequences in the GENPEPT database.

| >GP: AAD33279 GB: AF126061 RpL22 [Streptococcus pneumoniae] | | | |
|---|---|---|---|
| Identities = 99/114 (86%), Positives = 106/114 (92%) | | | |
| Query: | 1 | MAEITSAKAMARTVRVSPRKTRLVLDLIRGKNVADAIAILKFTPNKAARVIEKTLNSAIA | 60 |
| | | MAEITSAKAMARTVRVSPRK+RLVLD IRGK+VADAIAIL FTPNKAA +I K LNSA+A | |
| Sbjct: | 1 | MAEITSAKAMARTVRVSPRKSRLVLDNIRGKSVADAIAILTFTPNKAAEIILKVLNSAVA | 60 |
| Query: | 61 | NAENNFGLEKANLVVSETFANEGPTMKRFRPRAKGSASPINKRTTHVTVVVSEK | 114 |
| | | NAENNFGL+KANLVVSE FANEGPTMKRFRPRAKGSASPINKRT H+TV V+EK | |
| Sbjct: | 61 | NAENNFGLDKANLVVSEAFANEGPTMKRFRPRAKGSASPINKRTAHITVAVAEK | 114 |

[11315] A related DNA sequence was identified in S. pyogenes <SEQ ID 6383> which encodes the amino acid sequence <SEQ ID 6384>. Analysis of this protein sequence reveals the following:

```
Possible site: 36
>>> Seems to have no N-terminal signal sequence
----- Final Results -----
                            bacterial cytoplasm --- Certainty = 0.2794(Affirmative) < succ>
                              bacterial membrane --- Certainty = 0.0000(Not Clear) < succ>
                                bacterial outside --- Certainty = 0.0000(Not Clear) < succ>
```

[11316] An alignment of the GAS and GBS proteins is shown below.

| Identities = 113/114 (99%), Positives = 113/114 (99%) | | | |
|---|---|---|---|
| Query: | 1 | MAEITSAKAMARTVRVSPRKTRLVLDLIRGKNVADAIAILKFTPNKAARVIEKTLNSAIA | 60 |
| | | MAEITSAKAMARTVRVSPRKTRLVLDLIRGK VADAIAILKFTPNKAARVIEKTLNSAIA | |
| Sbjct: | 1 | MAEITSAKAMARTVRVSPRKTRLVLDLIRGKKVADAIAILKFTPNKAARVIEKTLNSAIA | 60 |
| Query: | 61 | NAENNFGLEKANLVVSETFANEGPTMKRFRPRAKGSASPINKRTTHVTVVVSEK | 114 |
| | | NAENNFGLEKANLVVSETFANEGPTMKRFRPRAKGSASPINKRTTHVTVVVSEK | |
| Sbjct: | 61 | NAENNFGLEKANLVVSETFANEGPTMKRFRPRAKGSASPINKRTTHVTVVVSEK | 114 |

[11317] Based on this analysis, it was predicted that this protein and its epitopes, could be useful antigens for vaccines or diagnostics.

### EXAMPLE 2064

[11318] A DNA sequence (GBSx2177) was identified in S. agalactiae <SEQ ID 6385> which encodes the amino acid sequence <SEQ ID 6386>. This protein is predicted to be 30S ribosomal protein S19 (rpsS). Analysis of this protein sequence reveals the following:

```
Possible site: 23
>>> Seems to have no N-terminal signal sequence
----- Final Results -----
                            bacterial cytoplasm --- Certainty = 0.2991(Affirmative) < succ>
                              bacterial membrane --- Certainty = 0.0000(Not Clear) < succ>
                                bacterial outside --- Certainty = 0.0000(Not Clear) < succ>
```

[11319] The protein is similar to ribosomal protein S19 from S. pneumoniae.

[11320] A related DNA sequence was identified in S. pyogenes <SEQ ID 6387> which encodes the amino acid sequence <SEQ ID 6388>. Analysis of this protein sequence reveals the following:

```
Possible site: 41
>>> Seems to have no N-terminal signal sequence
----- Final Results -----
                            bacterial cytoplasm --- Certainty = 0.3319(Affirmative) < succ>
                              bacterial membrane --- Certainty = 0.0000(Not Clear) < succ>
                                bacterial outside --- Certainty = 0.0000(Not Clear) < succ>
```

[11321] An alignment of the GAS and GBS proteins is shown below.

Identities = 92/92 (100%), Positives = 92/92 (100%)

| | | | |
|---|---|---|---|
| Query: | 1 | MGRSLKKGPFVDEHLMKKVEAQANDEKKKVIKTWSRRSTIFPSFIGYTIAVYDGRKHVPV | 60 |
| | | MGRSLKKGPFVDEHLMKKVEAQANDEKKKVIKTWSRRSTIFPSFIGYTIAVYDGRKHVPV | |
| Sbjct: | 19 | MGRSLKKGPFVDEHLMKKVEAQANDEKKKVIKTWSRRSTIFPSFIGYTIAVYDGRKHVPV | 78 |
| Query: | 61 | YIQEDMVGHKLGEFAPTRTYKGHAADDKKTRR | 92 |
| | | YIQEDMVGHKLGEFAPTRTYKGHAADDKKTRR | |
| Sbjct: | 79 | YIQEDMVGHKLGEFAPTRTYKGHAADDKKTRR | 110 |

[11322] Based on this analysis, it was predicted that this protein and its epitopes, could be useful antigens for vaccines or diagnostics.

### EXAMPLE 2065

[11323] A DNA sequence (GBSx2178) was identified in S. agalactiae <SEQ ID 6389> which encodes the amino acid sequence <SEQ ID 6390>. This protein is predicted to be L2 (rplB). Analysis of this protein sequence reveals the following:

```
Possible site: 22
>>> Seems to have no N-terminal signal sequence
----- Final Results -----
                            bacterial cytoplasm --- Certainty = 0.3182(Affirmative) < succ>
                              bacterial membrane --- Certainty = 0.0000(Not Clear) < succ>
                                bacterial outside --- Certainty = 0.0000(Not Clear) < succ>
```

[11324] The protein has homology with the following sequences in the GENPEPT database.

| >GP: AAC45959 GB: U43929 L2 [Bacillus subtilis] | | | |
|---|---|---|---|
| Identities = 208/277 (75%), Positives = 239/277 (86%) | | | |
| Query: | 1 | MGIKVYKPTTNGRRNMTSLDFAEITTNTPEKSLLVSLKNKAGRNNNGRITVRHQGGGHKR | 60 |
| | | M IK YKP++NGRR MT+ DFAEITT+ PEKSLL L K GRNN G++TVRHQGGGHKR | |
| Sbjct: | 1 | MAIKKYKPSSNGRRGMTTSDFAEITTDKPEKSLLAPLHKKGGRNNQGKLTVRHQGGGHKR | 60 |
| Query: | 61 | HYRLIDFKRNKDGVEAVVKTIEYDPNRTANIALVHYTDGVKAYILAPKGLEVGQRIISGP | 120 |
| | | YR+IDFKR+KDG+ V T+EYDPNR+ANIAL++Y DG K YILAPKG++VG ++SGP | |
| Sbjct: | 61 | QYRVIDFKRDKDGIPGRVATVEYDPNRSANIALINYADGEKRYILAPKGIQVGTEVMSGP | 120 |
| Query: | 121 | EADIKVGNALPLANIPVGTVIHNIELQPGKGAELIRAAGASAQVLGQEGKYVLVRLQSGE | 180 |
| | | EADIKVGNALPL NIPVGTV+HNIEL+PGKG +L+R+AG SAQVLG+EGKYVLVRL SGE | |
| Sbjct: | 121 | EADIKVGNALPLINIPVGTVVHNIELKPGKGGQLVRSAGTSAQVLGKEGKYVLVRLNSGE | 180 |
| Query: | 181 | VRMILGTCRATIGTVGNEQQSLVNIGKAGRNRWKGVRPTVRGSVMNPNDHPHGGGEGKAP | 240 |
| | | VRMIL CRA+IG VGNEQ L+NIGKAGR+RWKG+RPTVRGSVMNPNDHPHGGGEG+AP | |
| Sbjct: | 181 | VRMILSACRASIGQVGNEQHELINIGKAGRSRWKGIRPTVRGSVMNPNDHPHGGGEGRAP | 240 |
| Query: | 241 | VGRKAPSTPWGKPALGLKTRNKKAKSDKLIVRRRNQK | 277 |
| | | +GRK+P +PWGKP LG KTR KK KSDK IVRRR K | |
| Sbjct: | 241 | IGRKSPMSPWGKPTLGFKTRKKKNKSDKFIVRRRKNK | 277 |

[11325] A related DNA sequence was identified in S. pyogenes <SEQ ID 6391> which encodes the amino acid sequence <SEQ ID 6392>. Analysis of this protein sequence reveals the following:

```
Possible site: 41
>>> Seems to have no N-terminal signal sequence
----- Final Results -----
                            bacterial cytoplasm --- Certainty = 0.2560(Affirmative) < succ>
                              bacterial membrane --- Certainty = 0.0000(Not Clear) < succ>
                                bacterial outside --- Certainty = 0.0000(Not Clear) < succ>
```

[11326] An alignment of the GAS and GBS proteins is shown below.

| Identities = 264/277 (95%), Positives = 276/277 (99%) | | | |
|---|---|---|---|
| Query: | 1 | MGIKVYKPTTNGRRNMTSLDFAEITTNTPEKSLLVSLKNKAGRNNNGRITVRHQGGGHKR | 60 |
| | | +GIKVYKPTTNGRRNMTSLDFAEITT+TPEKSLLVSLK+KAGRNNNGRITVRHQGGGHKR | |
| Sbjct: | 1 | VGIKVYKPTTNGRRNMTSLDFAEITTSTPEKSLLVSLKSKAGRNNNGRITVRHQGGGHKR | 60 |
| Query: | 61 | HYRLIDFKRNKDGVEAVVKTIEYDPNRTANIALVHYTDGVKAYILAPKGLEVGQRIISGP | 120 |
| | | HYRLIDFKRNKDGVEAVVKTIEYDPNRTANIALVHYTDGVKAYI+APKGLEVGQRI+SGP | |
| Sbjct: | 61 | HYRLIDFKRNKDGVEAVVKTIEYDPNRTANIALVHYTDGVKAYIIAPKGLEVGQRIVSGP | 120 |
| Query: | 121 | EADIKVGNALPLANIPVGTVIHNIELQPGKGAELIRAAGASAQVLGQEGKYVLVRLQSGE | 180 |
| | | +ADIKVGNALPLANIPVGTV+HNIEL+PGKG EL+RAAGASAQVLGQEGKYVLVRLQSGE | |
| Sbjct: | 121 | DADIKVGNALPLANIPVGTVVHNIELKPGKGGELVRAAGASAQVLGQEGKYVLVRLQSGE | 180 |
| Query: | 181 | VRMILGTCRATIGTVGNEQQSLVNIGKAGRNRWKGVRPTVRGSVMNPNDHPHGGGEGKAP | 240 |
| | | VRMILGTCRATIGTVGNEQQSLVNIGKAGR+RWKG+RPTVRGSVMNPNDHPHGGGEGKAP | |
| Sbjct: | 181 | VRMILGTCRATIGTVGNEQQSLVNIGKAGRSRWKGIRPTVRGSVMNPNDHPHGGGEGKAP | 240 |
| Query: | 241 | VGRKAPSTPWGKPALGLKTRNKKAKSDKLIVRRRNQK | 277 |
| | | VGRKAPSTPWGKPALGLKTRNKKAKSDKLIVRRRN+K | |
| Sbjct: | 241 | VGRKAPSTPWGKPALGLKTRNKKAKSDKLIVRRRNEK | 277 |

[11327] Based on this analysis, it was predicted that this protein and its epitopes, could be useful antigens for vaccines or diagnostics.

### EXAMPLE 2066

[11328] A DNA sequence (GBSx2180) was identified in S. agalactiae <SEQ ID 6393> which encodes the amino acid sequence <SEQ ID 6394>. This protein is predicted to be 50S ribosomal protein L23 (rplW). Analysis of this protein sequence reveals the following:

```
Possible site: 44
>>> Seems to have no N-terminal signal sequence
----- Final Results -----
                            bacterial cytoplasm --- Certainty = 0.1669(Affirmative) < succ>
                              bacterial membrane --- Certainty = 0.0000(Not Clear) < succ>
                                bacterial outside --- Certainty = 0.0000(Not Clear) < succ>
```

[11329] The protein has homology with the following sequences in the GENPEPT database.

| >GP: BAB03855 GB: AP001507 ribosomal protein L23 | | | |
|---|---|---|---|
| [Bacillus halodurans] | | | |
| Identities = 56/92 (60%), Positives = 67/92 (71%), Gaps = 1/92 (1%) | | | |
| Query: | 2 | NLYDVIKKPVITEKSMVALEAGKYTFEVDTRAHKLLIKQAVEAAFDGVKVASVNTVTVKP | 61 |
| | | N DVIK+PVITE+S + KYTFEVD RA+K IK A+E FD VKVA VNT+ K | |
| Sbjct: | 3 | NARDVIKRPVITERSTEVMGDKKYTFEVDVRANKTQIKDAIEEIFD-VKVAKVNTMNYKG | 61 |
| Query: | 62 | KAKRVGRYTGFTSKTKKAIITLTADSKAIELF | 93 |
| | | K KR GRYTGFT++ KKAI+TLT DSK ++ F | |
| Sbjct: | 62 | KPKRFGRYTGFTARRKKAIVTLTPDSKELDFF | 93 |

[11330] A related DNA sequence was identified in S. pyogenes <SEQ ID 6395> which encodes the amino acid sequence <SEQ ID 6396>. Analysis of this protein sequence reveals the following:

```
Possible site: 44
>>> Seems to have no N-terminal signal sequence
----- Final Results -----
                            bacterial cytoplasm --- Certainty = 0.1617(Affirmative) < succ>
                              bacterial membrane --- Certainty = 0.0000(Not Clear) < succ>
                                bacterial outside --- Certainty = 0.0000(Not Clear) < succ>
```

[11331] An alignment of the GAS and GBS proteins is shown below.

| Identities = 96/98 (97%), Positives = 97/98 (98%) | | | |
|---|---|---|---|
| Query: | 1 | MNLYDVIKKPVITEKSMVALEAGKYTFEVDTRAHKLLIKQAVEAAFDGVKVASVNTVTVK | 60 |
| | | MNLYDVIKKPVITEKSM+ALEAGKYTFEVDTRAHKLLIKQAVEAAFDGVKVASVNTV VK | |
| Sbjct: | 1 | MNLYDVIKKPVITEKSMIALEAGKYTFEVDTRAHKLLIKQAVEAAFDGVKVASVNTVNVK | 60 |
| Query: | 61 | PKAKRVGRYTGFTSKTKKAIITLTADSKAIELFAAEAE | 98 |
| | | PKAKRVGRYTGFTSKTKKAIITLTADSKAIELFAAEAE | |
| Sbjct: | 61 | PKAKRVGRYTGFTSKTKKAIITLTADSKAIELFAAEAE | 98 |

[11332] Based on this analysis, it was predicted that this protein and its epitopes, could be useful antigens for vaccines or diagnostics.

### EXAMPLE 2067

[11333] A DNA sequence (GBSx2181) was identified in S. agalactiae <SEQ ID 6397> which encodes the amino acid sequence <SEQ ID 6398>. This protein is predicted to be 50S ribosomal protein L4 (rplD). Analysis of this protein sequence reveals the following:

| Possible site: 60 | | | | |
|---|---|---|---|---|
| >>> Seems to have no N-terminal signal sequence | | | | |
| | INTEGRAL | Likelihood = −1.54 | Transmembrane | 140-156 (139-156) |

```
----- Final Results -----
                              bacterial membrane --- Certainty = 0.1617(Affirmative) < succ>
                                bacterial outside --- Certainty = 0.0000(Not Clear) < succ>
                            bacterial cytoplasm --- Certainty = 0.0000(Not Clear) < succ>
```

[11334] The protein has homology with the following sequences in the GENPEPT database.

| >GP: AAC45957 GB: U43929 L4 [Bacillus subtilis] | | | |
|---|---|---|---|
| Identities = 130/207 (62%), Positives = 160/207 (76%) | | | |
| Query: | 1 | MANVKLFDQTGKEVSSVELNEAIFGIEPNESVVFDVVISQRASLRQGTHAVKNRSAVSGG | 60 |
| | | M V L++Q G +ELN ++FGIEPNESVVFD ++ QRASLRQGTH VKNRS V GG | |
| Sbjct: | 1 | MPKVALYNQNGSTAGDIELNASVFGIEPNESVVFDAILMQRASLRQGTHKVKNRSEVRGG | 60 |
| Query: | 61 | GRKPWRQKGTGRARQGSIRSPQWRGGGVVFGPTPRSYGYKLPQKVRRLALKSVYSAKVAE | 120 |
| | | GRKPWRQKGTGRARQGSIRSPQWRGGGVVFGPTPRSY YKLP+KVRRLA+KSV S+KV + | |
| Sbjct: | 61 | GRKPWRQKGTGRARQGSIRSPQWRGGGVVFGPTPRSYSYKLPKKVRRLAIKSVLSSKVID | 120 |
| Query: | 121 | DKFVAVENLSFAAPKTAEFASVLSALSIDSKVLVILEEGNEFAALSARNLPNVTVATATT | 180 |
| | | + + +E+L+ KT E A++L LS++ K L++ + NE ALSARN+P VTV A | |
| Sbjct: | 121 | NNIIVLEDLTLDTAKTKEMAAILKGLSVEKKALIVTADANEAVALSARNIPGVTVVEANG | 180 |
| Query: | 181 | ASVLDIVNADKLLVTKEAISTIEGVLA | 207 |
| | | +VLD+VN +KLL+TK A+ +E VLA | |
| Sbjct: | 181 | INVLDVVNHEKLLITKAAVEKVEEVLA | 207 |

[11335] A related DNA sequence was identified in S. pyogenes <SEQ ID 6399> which encodes the amino acid sequence <SEQ ID 6400>. Analysis of this protein sequence reveals the following:

```
Possible site: 60
>>> Seems to have no N-terminal signal sequence
----- Final Results -----
                            bacterial cytoplasm --- Certainty = 0.2544(Affirmative) < succ>
                              bacterial membrane --- Certainty = 0.0000(Not Clear) < succ>
                                bacterial outside --- Certainty = 0.0000(Not Clear) < succ>
```

[11336] An alignment of the GAS and GBS proteins is shown below.

| Identities = 199/207 (96%), Positives = 203/207 (97%) | | | |
|---|---|---|---|
| Query: | 1 | MANVKLFDQTGKEVSSVELNEAIFGIEPNESVVFDVVISQRASLRQGTHAVKNRSAVSGG | 60 |
| | | MANVKLFDQTGKEVSSVELN+AIFGIEPNESVVFDVVISQRASLRQGTHAVKNRSAVSGG | |
| Sbjct: | 1 | MANVKLFDQTGKEVSSVELNDAIFGIEPNESVVFDVVISQRASLRQGTHAVKNRSAVSGG | 60 |
| Query: | 61 | GRKPWRQKGTGRARQGSIRSPQWRGGGVVFGPTPRSYGYKLPQRVRRLALKSVYSAKVAE | 120 |
| | | GRKPWRQKGTGRARQGSIRSPQWRGGGVVFGPTPRSYGYKLPQKVRRLALKSVYSAKVAE | |
| Sbjct: | 61 | GRKPWRQKGTGRARQGSIRSPQWRGGGVVFGPTPRSYGYKLPQKVRRLALKSVYSAKVAE | 120 |
| Query: | 121 | DKFVAVENLSFAAPKTAEFASVLSALSIDSKVLVILEEGNEFAALSARNLPNVTVATATT | 180 |
| | | DKFVAVE LSFAAPKTAEFA VLSALSID+KVLV++EEGNEFAALSARNLPNVTVATA T | |
| Sbjct: | 121 | DKFVAVEGLSFAAPKTAEFAKVLSALSIDTKVLVLVEEGNEFAALSARNLPNVTVATAAT | 180 |
| Query: | 181 | ASVLDIVNADKLLVTKEAISTIEGVLA | 207 |
| | | ASVLDIVNADKLLVTKEAISTIE VLA | |
| Sbjct: | 181 | ASVLDIVNADKLLVTKEAISTIEEVLA | 207 |

[11337] Based on this analysis, it was predicted that this protein and its epitopes, could be useful antigens for vaccines or diagnostics.

### EXAMPLE 2068

[11338] A DNA sequence (GBSx2183) was identified in S. agalactiae <SEQ ID 6401> which encodes the amino acid sequence <SEQ ID 6402>. This protein is predicted to be 50S ribosomal protein L3 (rplC). Analysis of this protein sequence reveals the following:

```
Possible site: 40
>>> Seems to have no N-terminal signal sequence
----- Final Results -----
                            bacterial cytoplasm --- Certainty = 0.2090(Affirmative) < succ>
                              bacterial membrane --- Certainty = 0.0000(Not Clear) < succ>
                                bacterial outside --- Certainty = 0.0000(Not Clear) < succ>
```

[11339] The protein has homology with the following sequences in the GENPEPT database.

| >GP: AAC45956 GB: U43929 L3 [Bacillus subtilis] | | | |
|---|---|---|---|
| Identities = 157/208 (75%), Positives = 180/208 (86%), Gaps = 2/208 (0%) | | | |
| Query: | 1 | MTKGILGKKVGMTQIFTESGEFIPVTVIEATPNVVLQVKTVETDGYEAVQVGFDDKREVL | 60 |
| | | MTKGILG+K+GMTQ+F E+G+ IPVTVIEA PNVVLQ KT E DGYEA+Q+GFDDKRE L | |
| Sbjct: | 1 | MTKGILGRKIGMTQVFAENGDLIPVTVIEAAPNVVLQKKTAENDGYEAIQLGFDDKREKL | 60 |
| Query: | 61 | SNKPAKGHVAKANTAPKRFIREFKNIE--GLEVGAELSVEQFEAGDVVDVTGTSKGKGFQ | 118 |
| | | SNKP KGHVAKA TAPKRF++E + +E EVG E+ VE F AG++VDVTG SKGKGFQ | |
| Sbjct: | 61 | SNKPEKGHVAKAETAPKRFVKELRGVEMDAYEVGQEVKVEIFSAGEIVDVTGVSKGKGFQ | 120 |
| Query: | 119 | GVIKRHGQSRGPMAHGSRYHRRPGSMGPVAPNRVFKNKRLAGRMGGNRVTVQNLEIVQVI | 178 |
| | | G IKRHGQSRGPM+HGSRYHRRPGSMGPV PNRVFK K L GRMGG ++TVQNLEIV+V | |
| Sbjct: | 121 | GAIKRHGQSRGPMSHGSRYHRRPGSMGPVDPNRVFKGKLLPGPMGGEQITVQNLEIVKVD | 180 |
| Query: | 179 | PEKNVVLIKGNVPGAKKSLITIKSAVKA | 206 |
| | | E+N++LIKGNVPGAKKSLIT+KSAVK+ | |
| Sbjct: | 181 | AERNLLLIKGNVPGAKKSLITVKSAVKS | 208 |

[11340] A related DNA sequence was identified in S. pyogenes <SEQ ID 6403> which encodes the amino acid sequence <SEQ ID 6404>. Analysis of this protein sequence reveals the following:

```
Possible site: 40
>>> Seems to have no N-terminal signal sequence
----- Final Results -----
                            bacterial cytoplasm --- Certainty = 0.2090(Affirmative) < succ>
                              bacterial membrane --- Certainty = 0.0000(Not Clear) < succ>
                                bacterial outside --- Certainty = 0.0000(Not Clear) < succ>
```

[11341] An alignment of the GAS and GBS proteins is shown below.

| Identities = 205/208 (98%), Positives = 207/208 (98%) | | | |
|---|---|---|---|
| Query: | 1 | MTKGILGKKVGMTQIFTESGEFIPVTVIEATPNVVLQVKTVETDGYEAVQVGFDDKREVL | 60 |
| | | MTKGILGKKVGMTQIFTESGEFIPVTVIEATPNVVLQVKTVETDGYEAVQVGFDDKREVL | |
| Sbjct: | 1 | MTKGILGKKVGMTQIFTESGEFIPVTVIEATPNVVLQVKTVETDGYEAVQVGFDDKREVL | 60 |
| Query: | 61 | SNKPAKGHVAKANTAPKRFIREFKNIEGLEVGAELSVEQFEAGDVVDVTGTSKGKGFQGV | 120 |
| | | SNKPAKGHVAKANTAPKRFIREFKNIEGLEVGAELSVEQFEAGDVVDVTG SKGKGFQGV | |
| Sbjct: | 61 | SNKPAKGHVAKANTAPKRFIREFKNIEGLEVGAELSVEQFEAGDVVDVTGISKGKGFQGV | 120 |
| Query: | 121 | IKRHGQSRGPMAHGSRYHRRPGSMGPVAPNRVFKNKRLAGRMGGNRVTVQNLEIVQVIPE | 180 |
| | | IKRHGQSRGPMAHGSRYHRRPGSMGPVAPNRVFKNKRLAGRMGGNRVTVQNLEIVQVIPE | |
| Sbjct: | 121 | IKRHGQSRGPMAHGSRYHRRPGSMGPVAPNRVFKNKRLAGRMGGNRVTVQNLEIVQVIPE | 180 |
| Query: | 181 | KNVVLIKGNVPGAKKSLITIKSAVKAAK | 208 |
| | | KNV+L+KGNVPGAKKSLITIKSAVKAAK | |
| Sbjct: | 181 | KNVILVKGNVPGAKKSLITIKSAVKAAK | 208 |

[11342] Based on this analysis, it was predicted that this protein and its epitopes, could be useful antigens for vaccines or diagnostics.

### EXAMPLE 2069

[11343] A DNA sequence (GBSx2184) was identified in S. agalactiae <SEQ ID 6405> which encodes the amino acid sequence <SEQ ID 6406>. Analysis of this protein sequence reveals the following:

| Possible site: 20 | | | | |
|---|---|---|---|---|
| >>> Seems to have an uncleavable N-term signal seq | | | | |
| | INTEGRAL | Likelihood = −0.43 | Transmembrane | 5-21 (5-21) |

```
----- Final Results -----
                              bacterial membrane --- Certainty = 0.1171(Affirmative) < succ>
                                bacterial outside --- Certainty = 0.0000(Not Clear) < succ>
                            bacterial cytoplasm --- Certainty = 0.0000(Not Clear) < succ>
```

[11344] The protein has no significant homology with any sequences in the GENPEPT database.

[11345] No corresponding DNA sequence was identified in S. pyogenes.

[11346] Based on this analysis, it was predicted that this protein and its epitopes, could be useful antigens for vaccines or diagnostics.

### EXAMPLE 2070

[11347] A DNA sequence (GBSx2185) was identified in S. agalactiae <SEQ ID 6407> which encodes the amino acid sequence <SEQ ID 6408>. This protein is predicted to be 30S ribosomal protein S10 (rpsJ). Analysis of this protein sequence reveals the following:

```
Possible site: 37
>>> Seems to have no N-terminal signal sequence
----- Final Results -----
                            bacterial cytoplasm --- Certainty = 0.3160(Affirmative) < succ>
                              bacterial membrane --- Certainty = 0.0000(Not Clear) < succ>
                                bacterial outside --- Certainty = 0.0000(Not Clear) < succ>
```

[11348] The protein has homology with the following sequences in the GENPEPT database.

| >GP: AAB46363 GB: L29637 S10 ribosomal protein [Streptococcus mutans] | | | |
|---|---|---|---|
| Identities = 98/102 (96%), Positives = 102/102 (99%) | | | |
| Query: | 1 | MANKKIRIRLKAYEHRTLDTAAEKIVETATRTGATVAGPVPLPTERSLYTIIRATHKYKD | 60 |
| | | MANKKIRIRLKAYEHRTLDTAAEKIVETATRTGA+VAGPVPLPTERSLYT+IRATHKYKD | |
| Sbjct: | 1 | MANKKIRIRLKAYEHRTLDTAAEKIVETATRTGASVAGPVPLPTERSLYTVIPATHKYKD | 60 |
| Query: | 61 | SREQFEMRTHKRLVDIINPTQKTVDALMKLDLPSGVNVEIKL | 102 |
| | | SREQFEMRTHKRL+DI+NPTQKTVDALMKLDLPSGVNVEIKL | |
| Sbjct: | 61 | SREQFEMRTHKRLIDIVNPTQKTVDALMKLDLPSGVNVEIKL | 102 |

[11349] A related DNA sequence was identified in S. pyogenes <SEQ ID 6409> which encodes the amino acid sequence <SEQ ID 6410>. Analysis of this protein sequence reveals the following:

```
Possible site: 37
>>> Seems to have no N-terminal signal sequence
----- Final Results -----
                            bacterial cytoplasm --- Certainty = 0.3160(Affirmative) < succ>
                              bacterial membrane --- Certainty = 0.0000(Not Clear) < succ>
                                bacterial outside --- Certainty = 0.0000(Not Clear) < succ>
```

[11350] An alignment of the GAS and GBS proteins is shown below.

| Identities = 102/102 (100%), Positives = 102/102 (100%) | | | |
|---|---|---|---|
| Query: | 1 | MANKKIRIRLKAYEHRTLDTAAEKIVETATRTGATVAGPVPLPTERSLYTIIRATHKYKD | 60 |
| | | MANKKIRIRLKAYEHRTLDTAAEKIVETATRTGATVAGPVPLPTERSLYTIIRATHKYKD | |
| Sbjct: | 1 | MANKKIRIRLKAYEHRTLDTAAEKIVETATRTGATVAGPVPLPTERSLYTIIRATHKYKD | 60 |
| Query: | 61 | SREQFEMRTHKRLVDIINPTQKTVDALMKLDLPSGVNVEIKL | 102 |
| | | SREQFEMRTHKRLVDIINPTQKTVDALMKLDLPSGVNVEIKL | |
| Sbjct: | 61 | SREQFEMRTHKRLVDIINPTQKTVDALMKLDLPSGVNVEIKL | 102 |

[11351] Based on this analysis, it was predicted that this protein and its epitopes, could be useful antigens for vaccines or diagnostics.

### EXAMPLE 2071

[11352] A DNA sequence (GBSx2186) was identified in S. agalactiae <SEQ ID 6411> which encodes the amino acid sequence <SEQ ID 6412>. Analysis of this protein sequence reveals the following:

```
Possible site: 34
>>> Seems to have no N-terminal signal sequence
----- Final Results -----
                            bacterial cytoplasm --- Certainty = 0.2538(Affirmative) < succ>
                              bacterial membrane --- Certainty = 0.0000(Not Clear) < succ>
                                bacterial outside --- Certainty = 0.0000(Not Clear) < succ>
```

[11353] The protein has no significant homology with any sequences in the GENPEPT database.

[11354] No corresponding DNA sequence was identified in S. pyogenes.

[11355] Based on this analysis, it was predicted that this protein and its epitopes, could be useful antigens for vaccines or diagnostics.

### EXAMPLE 2072

[11356] A DNA sequence (GBSx2187) was identified in S. agalactiae <SEQ ID 6413> which encodes the amino acid sequence <SEQ ID 6414>. Analysis of this protein sequence reveals the following:

| Possible site: 46 | | | | |
|---|---|---|---|---|
| >>> Seems to have no N-terminal signal sequence | | | | |
| | INTEGRAL | Likelihood = −11.41 | Transmembrane | 88-104 (79-110) |
| | INTEGRAL | Likelihood = −8.39 | Transmembrane | 304-320 (300-324) |
| | INTEGRAL | Likelihood = −6.58 | Transmembrane | 185-201 (180-206) |
| | INTEGRAL | Likelihood = −5.63 | Transmembrane | 338-354 (331-357) |
| | INTEGRAL | Likelihood = −5.52 | Transmembrane | 240-256 (237-259) |
| | INTEGRAL | Likelihood = −4.99 | Transmembrane | 383-399 (375-407) |
| | INTEGRAL | Likelihood = −3.82 | Transmembrane | 49-65 (48-73) |
| | INTEGRAL | Likelihood = −2.87 | Transmembrane | 127-143 (121-144) |
| | INTEGRAL | Likelihood = −2.81 | Transmembrane | 159-175 (159-177) |
| | INTEGRAL | Likelihood = −2.18 | Transmembrane | 30-46 (30-47) |

```
----- Final Results -----
                              bacterial membrane --- Certainty = 0.5564(Affirmative) < succ>
                                bacterial outside --- Certainty = 0.0000(Not Clear) < succ>
                            bacterial cytoplasm --- Certainty = 0.0000(Not Clear) < succ>
```

[11357] The protein has homology with the following sequences in the GENPEPT database.

| >GP: BAB06655 GB: AP001517 unknown conserved protein | | | |
|---|---|---|---|
| [Bacillus halodurans] | | | |
| Identities = 132/423 (31%), Positives = 210/423 (49%), Gaps = 16/423 (3%) | | | |
| Query: | 7 | IIQLAIPAMIENILQMLMGVVDNYLVAQLGVVAVSGVSVANNIITIYQAIF--IALGASI | 64 |
| | | + L P IE +L MLMG D +++Q AV+ V V+N I+ + +F +A G SI | |
| Sbjct: | 11 | LFALTWPIFIEILLHMLMGNADTLMLSQYSDDAVAAVGVSNQILAVIIVMFGFVATGTSI | 70 |
| Query: | 65 | ASLLAKSLAGSKKDDAISVCSQAIFLTLLIGAVLGIISIVFGQTFFKLLGTTKSVAQVGG | 124 |
| | | L+A+ L ++++A V +I L+ G VLG++ I FG K + S+ Q | |
| Sbjct: | 71 | --LVAQHLGAKERENAGKVAVVSIGANLIFGIVLGLLLIAFGPPILKAMQLDDSLLQEAT | 128 |
| Query: | 125 | LYLAIVGGGVVTLGMLTTLGSFLRVQGQPRLPMYVSIFVNFLNAVLSGFAIFEWR----Y | 180 |
| | | LYL IVGG V ++ T G+ LR + MYV+I +N LN + + IF | |
| Sbjct: | 129 | LYLQIVGGFSVVQSLIMTAGAILRSHSFTKDVMYVTIGMNILNVIGNYLFIFGPFGIPVL | 188 |
| Query: | 181 | GLVGVAVSTLIARLIGICILAKYL--------PIKKIIKRMTWKISAQIWNLALPSAGER | 232 |
| | | G+ GVA+ST+++R IG+ ++A L P ++KR + + +PSAGE+ | |
| Sbjct: | 189 | GVTGVALSTVVSRTIGLFVIAILLYKRIRGELPFAYLLKRFPRVELRNLLKIGIPSAGEQ | 248 |
| Query: | 233 | LMNRAGDVVIVAIVVQLGTNVVAGNAIGETLTQFNYMPGLGIATATIILTAKYVGQKNRE | 292 |
| | | L A +VI + +GT + + L F ++ + I T IL VG K + | |
| Sbjct: | 249 | LSYNASQLVITYFIAMMGTEALTTKVYTQNLMMFVFLFAVAIGQGTQILIGHQVGAKQIQ | 308 |
| Query: | 293 | SIEETIQSSYYIGLVLMILISSFMLLAGKPLTQLFTNNPSAIKGSLIVILLSFVGVPATI | 352 |
| | | + S +I + + + ++ PL +FT+NP + ++LL+ + P | |
| Sbjct: | 309 | AAYVRCFRSLWIAMTVSVSMAVVFFAFSTPLLGIFTDNPDILSLGTTLLLLTIILEPGRA | 368 |
| Query: | 353 | GTLVYTAAWQGLGNAKLPFYTTTIGMWLIRVVLGYLLGIVFELGLLGVWMATIADNIFRW | 412 |
| | | LV ++ + G+ K P Y + MW I V + YLLG+ LGL+GVW+A IAD FR | |
| Sbjct: | 369 | CNLVVISSLRAAGDVKFPVYLAIVSMWGIAVPIAYLLGLPLGLGLIGVWIAFIADEWFRG | 428 |
| Query: | 413 | LFL | 415 |
| | | L + | |
| Sbjct: | 429 | LLM | 431 |

[11358] A related DNA sequence was identified in S. pyogenes <SEQ ID 6415> which encodes the amino acid sequence <SEQ ID 6416>. Analysis of this protein sequence reveals the following:

| Possible site: 48 | | | | |
|---|---|---|---|---|
| >>> Seems to have no N-terminal signal sequence | | | | |
| | INTEGRAL | Likelihood = −5.26 | Transmembrane | 89-105 (85-108) |
| | INTEGRAL | Likelihood = −4.35 | Transmembrane | 305-321 (302-322) |
| | INTEGRAL | Likelihood = −3.82 | Transmembrane | 161-177 (161-180) |
| | INTEGRAL | Likelihood = −3.82 | Transmembrane | 192-208 (189-208) |
| | INTEGRAL | Likelihood = −3.77 | Transmembrane | 129-145 (128-151) |
| | INTEGRAL | Likelihood = −3.24 | Transmembrane | 242-258 (240-258) |
| | INTEGRAL | Likelihood = −2.81 | Transmembrane | 378-394 (377-394) |
| | INTEGRAL | Likelihood = −2.66 | Transmembrane | 339-355 (338-358) |
| | INTEGRAL | Likelihood = −2.60 | Transmembrane | 58-74 (58-75) |
| | INTEGRAL | Likelihood = −2.50 | Transmembrane | 32-48 (32-49) |

```
----- Final Results -----
                              bacterial membrane --- Certainty = 0.3102(Affirmative) < succ>
                                bacterial outside --- Certainty = 0.0000(Not Clear) < succ>
                            bacterial cytoplasm --- Certainty = 0.0000(Not Clear) < succ>
```

[11359] The protein has homology with the following sequences in the databases:

| >GP: BAB06655 GB: AP001517 unknown conserved | | | |
|---|---|---|---|
| protein [Bacillus halodurans] | | | |
| Identities = 119/435 (27%), Positives = 214/435 (48%), | | | |
| Gaps = 14/435 (3%) | | | |
| Query: | 9 | IFSLALPSMIENILQMLMGMVDNYLVAQIGLVAVSGVSIANNIISIYQSLFIALGAAVSS | 68 |
| | | +F+L P IE +L MLMG D +++Q AV+ V ++N I+++ +F + S | |
| Sbjct: | 11 | LFALTWPIFIEILLHMLMGNADTLMLSQYSDDAVAAVGVSNQILAVIIVMFGFVATGTSI | 70 |
| Query: | 69 | LIARSIGENNQNKQLNYMAGVLQVTLLLSVGLGLLSVAGHHQVLEWLGAEASVTLVGGQY | 128 |
| | | L+A+ +G + + L+ + LGLL +A +L+ + + S+ Y | |
| Sbjct: | 71 | LVAQHLGAKERENAGKVAVVSIGANLIFGIVLGLLLIAFGPPILKAMQLDDSLLQEATLY | 130 |
| Query: | 129 | LSIVGGMIVSLGLLTSLGAIVRAQGYPKIPMQVSLLINVLNAIFSALSIY----VWGFGL | 184 |
| | | L IVGG V L+ + GAI+R+ + K M V++ +N+LN I + L I+ + G+ | |
| Sbjct: | 131 | LQIVGGFSVVQSLIMTAGAILRSHSFTKDVMYVTIGMNILNVIGNYLFIFGPFGIPVLGV | 190 |
| Query: | 185 | LGVAWATVLSRLVGVFLLCQF--------IPIKQVAKRLMRPLDKIIFDLSLPAAGERLM | 236 |
| | | GVA +TV+SR +G+F++ +P + KR R + + + +P+AGE+L | |
| Sbjct: | 191 | TGVALSTVVSRTIGLFVIAILLYKRIRGELPFAYLLKRFPRVELRNLLKIGIPSAGEQLS | 250 |
| Query: | 237 | MRAGDVLIIGIVVRFGTTALAGNAIGETLTQFNYMPGLAMATATIILVARQLGGGKVTEI | 296 |
| | | A ++I + GT AL + L F ++ +A+ T IL+ Q+G ++ | |
| Sbjct: | 251 | YNASQLVITYFIAMMGTEALTTKVYTQNLMMFVFLFAVAIGQGTQILIGHQVGAKQIQAA | 310 |
| Query: | 297 | RYIIREAFILSTLMMLVMGALTYLLGPSLLPLFTQNTDAQRSAMIVLLFSLLGAPATAGT | 356 |
| | | + ++ + + M + + LL +FT N D +LL +++ P A | |
| Sbjct: | 311 | YVRCFRSLWIAMTVSVSMAVVFFAFSTPLLGIFTDNPDILSLGTTLLLLTIILEPGRACN | 370 |
| Query: | 357 | LVYTAVWQGLGKAKLPFYATTIGMWVIRIGLGYVIGVVWQYGLIGVWMATVLDNTSRWFI | 416 |
| | | LV + + G K P Y + MW I + + Y++G+ GLIGVW+A + D R + | |
| Sbjct: | 371 | LVVISSLRAAGDVKFPVYLAIVSMWGIAVPIAYLLGLPLGLGLIGVWIAFIADEWFRGLL | 430 |
| Query: | 417 | LSKHFK--KYQEITF | 429 |
| | | + ++ K+QE++F | |
| Sbjct: | 431 | MIWRWRKGKWQEMSF | 445 |

[11360] An alignment of the GAS and GBS proteins is shown below.

| Identities = 219/418 (52%), Positives = 316/418 (75%) | | | |
|---|---|---|---|
| Query: | 5 | KEIIQLAIPAMIENILQMLMGVVDNYLVAQLGVVAVSGVSVANNIITIYQAIFIALGASI | 64 |
| | | ++I LA+P+MIENILQMLMG+VDNYLVAQ+G+VAVSGVS+ANNII+IYQ++FIALGA++ | |
| Sbjct: | 7 | RKIFSLALPSMIENILQMLMGMVDNYLVAQIGLVAVSGVSIANNIISIYQSLFIALGAAV | 66 |
| Query: | 65 | ASLLAKSLAGSKKDDAISVCSQAIFLTLLIGAVLGIISIVFGQTFFKLLGTTKSVAQVGG | 124 |
| | | +SL+A+S+ + ++ ++ + + +TLL+ LG++S+ + LG SV VGG | |
| Sbjct: | 67 | SSLIARSIGENNQNKQLNYMAGVLQVTLLLSVGLGLLSVAGHHQVLEWLGAEASVTLVGG | 126 |
| Query: | 125 | LYLAIVGGGVVTLGMLTTLGSFLRVQGQPRLPMYVSIFVNFLNAVLSGFAIFEWRYGLVG | 184 |
| | | YL+IVGG +V+LG+LT+LG+ +R QG P++PM VS+ +N LNA+ S +I+ W +GL+G | |
| Sbjct: | 127 | QYLSIVGGMIVSLGLLTSLGAIVRAQGYPKIPMQVSLLINVLNAIFSALSIYVWGFGLLG | 186 |
| Query: | 185 | VAVSTLIARLIGICILAKYLPIKKIIKRMTWKISAQIWNLALPSAGERLMMRAGDVVIVA | 244 |
| | | VA +T+++RL+G+ +L +++PIK++ KR+ + I++L+LP+AGERLMMRAGDV+I+ | |
| Sbjct: | 187 | VAWATVLSRLVGVFLLCQFIPIKQVAKRLMRPLDKIIFDLSLPAAGERLMMRAGDVLIIG | 246 |
| Query: | 245 | IVVQLGTNVVAGNAIGETLTQFNYMPGLGIATATIILTAKYVGQKNRESIEETIQSSYYI | 304 |
| | | IVV+ GT +AGNAIGETLTQFNYMPGL +ATATIIL A+ +G I I+ ++ + | |
| Sbjct: | 247 | IVVRFGTTALAGNAIGETLTQFNYMPGLAMATATIILVARQLGGGKVTEIRYIIREAFIL | 306 |
| Query: | 305 | GLVLMILISSFMLLAGKPLTQLFTNNPSAIKGSLIVILLSFVGVPATIGTLVYTAAWQGL | 364 |
| | | ++M+++ + L G L LFT N A + ++IV+L S +G PAT GTLVYTA WQGL | |
| Sbjct: | 307 | STLMMLVMGALTYLLGPSLLPLFTQNTDAQRSAMIVLLFSLLGAPATAGTLVYTAVWQGL | 366 |
| Query: | 365 | GNAKLPFYTTTIGMWLIRVVLGYLLGIVFELGLLGVWMATIADNIFRWLFLKVHYHRY | 422 |
| | | G AKLPFY TTIGMW+IR+ LGY++G+V++ GL+GVWMAT+ DN RW L H+ +Y | |
| Sbjct: | 367 | GKAKLPFYATTIGMWVIRIGLGYVIGVVWQYGLIGVWMATVLDNTSRWFILSKHFKKY | 424 |
| Identities = 48/211 (22%), Positives = 89/211 (41%), | | | |
| Gaps = 29/211 (13%) | | | |
| Query: | 213 | MTWKISAQIWNLALPSAGERLMMRAGDVVIVAIVVQLGTNVVAGNAIGETLTQFNYMPGL | 272 |
| | | M + +I++LALPS E ++ +V +V Q+G V+G +I + + | |
| Sbjct: | 1 | MIYNNRRKIFSLALPSMIENILQMLMGMVDNYLVAQIGLVAVSGVSIANNIISIYQSLFI | 60 |
| Query: | 273 | GIATATIILTAKYVGQKNRESIEETIQSSYYIGLVLMILISSFML--------------L | 318 |
| | | + A L A+ +G+ N+ Q +Y G++ + L+ S L L | |
| Sbjct: | 61 | ALGAAVSSLIARSIGENNQNK-----QLNYMAGVLQVTLLLSVGLGLLSVAGHHQVLEWL | 115 |
| Query: | 319 | AGKPLTQLFTNNPSAIKGSLIVILLSFVGVPATIGTLVYTAAWQGLGNAKLPFYTTTIGM | 378 |
| | | + L +I G +IV L G+ ++G +V + G K+P + + + | |
| Sbjct: | 116 | GAEASVTLVGGQYLSIVGGMIVSL----GLLTSLGAIV-----RAQGYPKIPMQVSLL-I | 165 |
| Query: | 379 | WLIRVVLGYLLGIVFELGLLGVWMATIADNI | 409 |
| | | ++ + L V+ GLLGV AT+ + | |
| Sbjct: | 166 | NVLNAIFSALSIYVWGFGLLGVAWATVLSRL | 196 |

[11361] A related GBS gene <SEQ ID 8971> and protein <SEQ ID 8972> were also identified. Analysis of this protein sequence reveals the following:

| Lipop: Possible site: −1 Crend: 5 | | | | |
|---|---|---|---|---|
| McG: Discrim Score: −0.68 | | | | |
| GvH: Signal Score (−7.5): −1.3 | | | | |
| Possible site: 46 | | | | |
| >>> Seems to have no N-terminal signal sequence | | | | |
| ALOM program count: 10 value: −11.41 threshold: 0.0 | | | | |
| | INTEGRAL | Likelihood = −11.41 | Transmembrane | 88-104 (79-110) |
| | INTEGRAL | Likelihood = −8.39 | Transmembrane | 304-320 (300-324) |
| | INTEGRAL | Likelihood = −6.58 | Transmembrane | 185-201 (180-206) |
| | INTEGRAL | Likelihood = −5.63 | Transmembrane | 338-354 (331-357) |
| | INTEGRAL | Likelihood = −5.52 | Transmembrane | 240-256 (237-259) |
| | INTEGRAL | Likelihood = −4.99 | Transmembrane | 383-399 (375-407) |
| | INTEGRAL | Likelihood = −3.82 | Transmembrane | 49-65 (48-73) |
| | INTEGRAL | Likelihood = −2.87 | Transmembrane | 127-143 (121-144) |
| | INTEGRAL | Likelihood = −2.81 | Transmembrane | 159-175 (159-177) |
| | INTEGRAL | Likelihood = −2.18 | Transmembrane | 30-46 (30-47) |
| | PERIPHERAL | Likelihood = 0.32 | 11 | |

```
modified ALOM score: 2.78
*** Reasoning Step: 3
----- Final Results -----
                              bacterial membrane --- Certainty = 0.5564(Affirmative) < succ>
                                bacterial outside --- Certainty = 0.0000(Not Clear) < succ>
                            bacterial cytoplasm --- Certainty = 0.0000(Not Clear) < succ>
```

[11362] The protein has homology with the following sequences in the databases:

[chemical structure]

[11363] Based on this analysis, it was predicted that these proteins and their epitopes could be useful antigens for vaccines or diagnostics.

### EXAMPLE 2073

[11364] A DNA sequence (GBSx2188) was identified in S. agalactiae <SEQ ID 6417> which encodes the amino acid sequence <SEQ ID 6418>. Analysis of this protein sequence reveals the following:

```
Possible site: 20
>>> Seems to have no N-terminal signal sequence
----- Final Results -----
                            bacterial cytoplasm --- Certainty = 0.2200(Affirmative) < succ>
                              bacterial membrane --- Certainty = 0.0000(Not Clear) < succ>
                                bacterial outside --- Certainty = 0.0000(Not Clear) < succ>
```

[11365] The protein has homology with the following sequences in the GENPEPT database.

| >GP: AAD05671 GB: AE001448 THREONINE SYNTHASE [Helicobacter pylori | | | |
|---|---|---|---|
| J99] | | | |
| Identities = 161/479 (33%), Positives = 259/479 (53%), | | | |
| Gaps = 17/479 (3%) | | | |
| Query: | 14 | KVTASQAILKGLADDGGLFTPITFPKVDLDFTKLKDASYQEVAKLVLSAFFDDFTEQELD | 73 |
| | | K+ +A+L A GGL+T F L++ SY E+ + V + + L | |
| Sbjct: | 13 | KIDFIEAVLNPNAPKGGLYTLEHFET--LEWQDCLGMSYSELVEHVFELLNLEIPKNLLA | 70 |
| Query: | 74 | YCISQAYDTKFDTTEIAPIVKIGDRYHL-ELFHGPTIAFKDMALSILPYLLTTAAKKQGV | 132 |
| | | + + Y+ + API + +R + EL+HGP++AFKDMAL L L + A G | |
| Sbjct: | 71 | SALKR-YENFDNPKNPAPIFALNERLFVQELYHGPSLAFKDMALQPLASLFSNLAV--GK | 127 |
| Query: | 133 | DNKIVILTATSGDTGKAAMAGFADVPGTEIIVFYPKNGVSYIQELQMITQAGQNTHVVAI | 192 |
| | | + K ++L +TSGDTG A + G A +P ++ YPK+G S +Q+LQM+TQ N V + | |
| Sbjct: | 128 | NEKYLVLVSTSGDTGPATLEGLAGMPNVFVVCLYPKDGTSLVQKLQMVTQNASNLKVFGV | 187 |
| Query: | 193 | EGNFDDAQTSVKEMFNNSLLRLKLSQQHMQLSSANSMNIGRLVPQIVYYIYAYAQLVKSK | 252 |
| | | G+FDDAQ ++K + + L + ++LS ANS+N GR+ QIVY+I+ + +L K | |
| Sbjct: | 188 | SGDFDDAQNALKNLLKDDDFNEALKARQLKLSVANSVNFGRIAFQIVYHIWGFLELYKKG | 247 |
| Query: | 253 | EISIGQPINFSVPTGNFGNILAAYYASQIGLPVTKLICASNDNNVLTDFFKTQTYD-KNR | 311 |
| | | I+ + I ++P+GNFGN L A+YA ++GL + K+ +N N+VL +F +T YD R | |
| Sbjct: | 248 | AINSKEKITLAIPSGNFGNALGAFYAKKMGLNIAKIKVVTNSNDVLREFIETGRYDLTKR | 307 |
| Query: | 312 | EFKVTSSPSMDILVSSNLERLIFHLLGDDAETTKKLMEDLVTTGEYALEARQANIL-ESF | 370 |
| | | K T SP+MDIL SSN+ER +F L G E T +LM+ L YAL+ ++ +L E F | |
| Sbjct: | 308 | SLKQTFSPAMDILKSSNVERALFSLFG--FERTLELMQALEEEKFYALKPKELALLQEHF | 365 |
| Query: | 371 | VAGFATEQFVELDIKHLFDQYQYIEDPHTAVASAVYQAYQTETKDQTPAVIVSTASPYKF | 430 |
| | | +++ I+ ++ ++QY+ DPHTA A K ++ +TAS KF | |
| Sbjct: | 366 | SCASCSDEDCLKTIQEVYAEHQYLIDPHTAT------ALNASLKTHEKTLVSATASYEKF | 419 |
| Query: | 431 | PCVVTKAIT-NKEEIQDFAAISILNDLSGVSLPKAVTDLQKAEVIHRTVVPTSNMRETV | 488 |
| | | P A+ K+ D AA+ L + + + DL + + H+ V+ + ++ ++ | |
| Sbjct: | 420 | PKTTLLALNEQKKNDDDKAALETLKNSYNTPDSQRLDDLFERGIKHQEVLKLNEIKSSI | 478 |

[11366] No corresponding DNA sequence was identified in S. pyogenes.

[11367] Based on this analysis, it was predicted that this protein and its epitopes, could be useful antigens for vaccines or diagnostics.

### EXAMPLE 2074

[11368] A DNA sequence (GBSx2189) was identified in S. agalactiae <SEQ ID 6419> which encodes the amino acid sequence <SEQ ID 6420>. Analysis of this protein sequence reveals the following:

```
Possible site: 27
>>> Seems to have no N-terminal signal sequence
----- Final Results -----
                            bacterial cytoplasm --- Certainty = 0.3153(Affirmative) < succ>
                              bacterial membrane --- Certainty = 0.0000(Not Clear) < succ>
                                bacterial outside --- Certainty = 0.0000(Not Clear) < succ>
```

[11369] A related GBS nucleic acid sequence <SEQ ID 9279> which encodes amino acid sequence <SEQ ID 9280> was also identified.

[11370] The protein has homology with the following sequences in the GENPEPT database.

| >GP: AAF40975 GB: AE002410 alcohol dehydrogenase, propanol-preferring | | | |
|---|---|---|---|
| [Neisseria meningitidis MC58] | | | |
| Identities = 202/282 (71%), Positives = 228/282 (80%), Gaps = 1/282 (0%) | | | |
| Query: | 1 | MGHEGIGIVEEIGEGVTSLRVGDRVSIAWFFEGCGHCEYCTTGRETLCRSVKNAGYSVDG | 60 |
| | | +GHEGIG+V+E+ +GV +L+VGDRVSIAW F+ CG CEYC TGRETLCRSV NAGY+ DG | |
| Sbjct: | 60 | LGHEGIGLVKEVADGVKNLKVGDRVSIAWLFQSCGSCEYCNTGRETLCRSVLNAGYTADG | 119 |
| Query: | 61 | GMSEYAIVTADYAVKVPEGLDPAQASSITCAGVTTYKAIKEAGAAPGQWIAVYGAGGLGN | 120 |
| | | GM+ + IV+ADYAVKVPEGLDPAQASSITCAGVTTYKAIK +G PGQWIA+YGAGGLGN | |
| Sbjct: | 120 | GMATHCIVSADYAVKVPEGLDPAQASSITCAGVTTYKAIKVSGVRPGQWIAIYGAGGLGN | 179 |
| Query: | 121 | LAVQYAKKVFNAHVVAVDINADKLQLAKEVGADLTVNGKEIKDVAAYIQEKTGGCHGVVV | 180 |
| | | L VQYAKKVF AHVVA+DIN DKL AKE GADL VN + +D A IQEKTGG H VV | |
| Sbjct: | 180 | LGVQYAKKVFGAHVVAIDINDDKLAFAKETGADLVVNAAK-EDAAKVIQEKTGGAHAAVV | 238 |
| Query: | 181 | TAVSKVAFNQAIDSVRAGGTVVAVGLPSEYMELSIVKTVLDGIRVVGSLVGTRKDLEEAF | 240 |
| | | TAVS AFN A++ VRAGG VVA+GLP E M+LSI + VLDGI VVGSLVGTRKDLEEAF | |
| Sbjct: | 239 | TAVSAAAFNSAVNCVRAGGRVVAIGLPPESMDLSIPRLVLDGIEVVGSLVGTRKDLEEAF | 298 |
| Query: | 241 | AFGAEGLVVPVVEKVPVDTAPQVFDEMERGLIQGRKVLDFTK | 282 |
| | | FGAEGLVVP V+ +D AP +F EM G I GR V+D K | |
| Sbjct: | 299 | QFGAEGLVVPKVQLRALDEAPAIFQEMREGKITGRMVIDMKK | 340 |

[11371] A related DNA sequence was identified in S. pyogenes <SEQ ID 6421> which encodes the amino acid sequence <SEQ ID 6422>. Analysis of this protein sequence reveals the following:

```
Possible site: 31
>>> Seems to have no N-terminal signal sequence
----- Final Results -----
                            bacterial cytoplasm --- Certainty = 0.2356(Affirmative) < succ>
                              bacterial membrane --- Certainty = 0.0000(Not Clear) < succ>
                                bacterial outside --- Certainty = 0.0000(Not Clear) < succ>
```

[11372] An alignment of the GAS and GBS proteins is shown below.

| Identities = 263/280 (93%), Positives = 273/280 (96%) | | | |
|---|---|---|---|
| Query: | 1 | MGHEGIGIVEEIGEGVTSLRVGDRVSIAWFFEGCGHCEYCTTGRETLCRSVKNAGYSVDG | 60 |
| | | +GHEGIGIVEEIGEGVTSL+VGDRVSIAWFFEGCGHCEYCTTGRETLCRSVKNAGYSVDG | |
| Sbjct: | 76 | LGHEGIGIVEEIGEGVTSLKVGDRVSIAWFFEGCGHCEYCTTGRETLCRSVKNAGYSVDG | 135 |
| Query: | 61 | GMSEYAIVTADYAVKVPEGLDPAQASSITCAGVTTYKAIKEAGAAPGQWIAVYGAGGLGN | 120 |
| | | GMSEYA+VTADYAVKVPEGLDPAQASSITCAGVTTYKAIKEAGAAPGQWI ++GAGGLGN | |
| Sbjct: | 136 | GMSEYAVVTADYAVKVPEGLDPAQASSITCAGVTTYKAIKEAGAAPGQWIVIFGAGGLGN | 195 |
| Query: | 121 | LAVQYAKKVFNAHVVAVDINADKLQLAKEVGADLTVNGKEIKDVAAYIQEKTGGCHGVVV | 180 |
| | | LAVQYAKKVFNAHVVAVDIN DKL+LAKEVGAD+ VNGKEI+DV YIQEKTGG HGVVV | |
| Sbjct: | 196 | LAVQYAKKVFNAHVVAVDINNDKLELAKEVGADILVNGKEIEDVPGYIQEKTGGAHGVVV | 255 |
| Query: | 181 | TAVSKVAFNQAIDSVRAGGTVVAVGLPSEYMELSIVKTVLDGIRVVGSLVGTRKDLEEAF | 240 |
| | | TAVSKVAFNQAIDSVRAGGTVVAVGLPSEYMELSIVKTVLDGI+VVGSLVGTRKDLEEAF | |
| Sbjct: | 256 | TAVSKVAFNQAIDSVRAGGTVVAVGLPSEYMELSIVKTVLDGIKVVGSLVGTRKDLEEAF | 315 |
| Query: | 241 | AFGAEGLVVPVVEKVPVDTAPQVFDEMERGLIQGRKVLDF | 280 |
| | | AFGAEGLV PVVEKVPVDTAP+VFDEMERGLIQGRKVLDF | |
| Sbjct: | 316 | AFGAEGLVAPVVEKVPVDTAPEVFDEMERGLIQGRKVLDF | 355 |

[11373] Based on this analysis, it was predicted that this protein and its epitopes, could be useful antigens for vaccines or diagnostics.

### EXAMPLE 2075

[11374] A DNA sequence (GBSx2190) was identified in S. agalactiae <SEQ ID 6423> which encodes the amino acid sequence <SEQ ID 6424>. Analysis of this protein sequence reveals the following:

| Possible site: 42 | | | | |
|---|---|---|---|---|
| >>> Seems to have a cleavable N-term signal seq. | | | | |
| | INTEGRAL | Likelihood = −9.82 | Transmembrane | 83-99 (76-108) |
| | INTEGRAL | Likelihood = −7.27 | Transmembrane | 46-62 (43-65) |
| | INTEGRAL | Likelihood = −7.22 | Transmembrane | 187-203 (182-209) |
| | INTEGRAL | Likelihood = −6.00 | Transmembrane | 243-259 (229-262) |
| | INTEGRAL | Likelihood = −4.25 | Transmembrane | 404-420 (402-422) |
| | INTEGRAL | Likelihood = −3.98 | Transmembrane | 120-136 (119-136) |
| | INTEGRAL | Likelihood = −3.88 | Transmembrane | 308-324 (307-324) |
| | INTEGRAL | Likelihood = −2.13 | Transmembrane | 378-394 (376-394) |
| | INTEGRAL | Likelihood = −1.38 | Transmembrane | 152-168 (152-168) |
| | INTEGRAL | Likelihood = −1.17 | Transmembrane | 271-287 (271-287) |

```
----- Final Results -----
                              bacterial membrane --- Certainty = 0.4927(Affirmative) < succ>
                                bacterial outside --- Certainty = 0.0000(Not Clear) < succ>
                            bacterial cytoplasm --- Certainty = 0.0000(Not Clear) < succ>
```

[11375] A related GBS nucleic acid sequence <SEQ ID 9371> which encodes amino acid sequence <SEQ ID 9372> was also identified.

[11376] The protein has homology with the following sequences in the GENPEPT database.

| >GP: AAC17857 GB: AF026147 YojI [Bacillus subtilis] | | | |
|---|---|---|---|
| Identities = 183/432 (42%), Positives = 266/432 (61%), Gaps = 1/432 (0%) | | | |
| Query: | 1 | MKLFIPVLIYQFANFSATFIDSVMTGQYSQLHLAGVSTASNLWTPFFALLVGMISALVPV | 60 |
| | | + + IP+ I Q TF+D+VM+G+ S LAGV+ S+LWTP + L G++ A+ P+ | |
| Sbjct: | 15 | LHILIPIFITQAGLSLITFLDTVMSGKVSPADLAGVAIGSSLWTPVYTGLAGILMAVTPI | 74 |
| Query: | 61 | VGQHLGRGNKEQIRTEFHQFLYLGLILSLILFLIMQFIAQPVLGSLGLEDEVLAVGRGYL | 120 |
| | | V Q LG K++I Q +Y+ +LS+ + +I +LG L L+ V + + +L | |
| Sbjct: | 75 | VAQLLGAEKKQKIPFTVLQAVYVAALLSIAVLVIGYAAVDLILGRLNLDIHVHQIAKHFL | 134 |
| Query: | 121 | NYMLIGIMPLVLFSICRSFFDALGLTRLSMYLMLLILPFNSFFNYNLIYGKFGMPRLGGA | 180 |
| | | ++ +GI PL ++++ RSF D+LG TR++M + L LP N NY+ I+GKFGMP LGG | |
| Sbjct: | 135 | GFLSLGIFPLFVYTVLRSFIDSLGKTRVTMMITLSSLPINFVLNYVFIFGKFGMPALGGV | 194 |
| Query: | 181 | GAGLGTSLTYWAIFIVIIIVMSLHPQIKTYHIW-TLERIKAPLIIEDIRLGLPIGLQIFA | 239 |
| | | GAGL ++LTYW I I+ ++ + Y I+ T+ + +++GLPIG +F | |
| Sbjct: | 195 | GAGLASALTYWCICIISFFIIHKNAPFSEYGIFLTMYKFSWKACKNLLKIGLPIGFAVFF | 254 |
| Query: | 240 | EVAIFAVVGLFMAKFSSIIIAAHQAAMNFSSLMYAFPLSISTALAITISFEVGAERFQDA | 299 |
| | | E +IFA V L M+ F ++ IA+HQAAMNF+SL+Y PLS+S AL I + FE GA RF+DA | |
| Sbjct: | 255 | ETSIFAAVTLLMSHFHTVTIASHQAAMNFASLLYMLPLSVSMALTIVVGFEAGAARFKDA | 314 |
| Query: | 300 | NTYSRIGRLTAVGITSGTLLFLFLFRENVAAMYNSDPHFVAITAQFLTYSLFFQFADAYA | 359 |
| | | +YS IG + A+G + T + LFRE +A MY SDP + +T FL Y+LFFQ +DA A | |
| Sbjct: | 315 | RSYSLIGIMMAIGFSLFTAACILLFREQIAGMYTSDPDVLRLTQHFLIYALFFQLSDAVA | 374 |
| Query: | 360 | APVQGILRGYKDTTKPFMIGAGSYWLCALPLAVILEKNSQLGPFAYWIGLITGIFVCGLF | 419 |
| | | AP+QG LRGYKD SYW+ LP+ ++ + LG F YWIGLI G+ + | |
| Sbjct: | 375 | APIQGALRGYKDVNYTLAAAFVSYWVIGLPVGYMVGTFTSLGAFGYWIGLIAGLAAGAVG | 434 |
| Query: | 420 | LNQRLQKIKKLY | 431 |
| | | L RL K++K Y | |
| Sbjct: | 435 | LFFRLAKLQKRY | 446 |

[11377] Based on this analysis, it was predicted that this protein and its epitopes, could be useful antigens for vaccines or diagnostics.

### EXAMPLE 2076

[11378] A DNA sequence (GBSx2191) was identified in S. agalactiae <SEQ ID 6425> which encodes the amino acid sequence <SEQ ID 6426>. Analysis of this protein sequence reveals the following:

| Possible site: 20 | | | | |
|---|---|---|---|---|
| >>> Seems to have no N-terminal signal sequence | | | | |
| | INTEGRAL | Likelihood = −2.60 | Transmembrane | 23-39 (23-39) |

```
----- Final Results -----
                              bacterial membrane --- Certainty = 0.2041(Affirmative) < succ>
                                bacterial outside --- Certainty = 0.0000(Not Clear) < succ>
                            bacterial cytoplasm --- Certainty = 0.0000(Not Clear) < succ>
```

[11379] The protein has no significant homology with any sequences in the GENPEPT database.

[11380] No corresponding DNA sequence was identified in S. pyogenes.

[11381] Based on this analysis, it was predicted that this protein and its epitopes, could be useful antigens for vaccines or diagnostics.

### EXAMPLE 2077

[11382] A DNA sequence (GBSx2192) was identified in S. agalactiae <SEQ ID 6427> which encodes the amino acid sequence <SEQ ID 6428>. Analysis of this protein sequence reveals the following:

```
Possible site: 52
>>> Seems to have no N-terminal signal sequence
----- Final Results -----
                            bacterial cytoplasm --- Certainty = 0.3829(Affirmative) < succ>
                              bacterial membrane --- Certainty = 0.0000(Not Clear) < succ>
                                bacterial outside --- Certainty = 0.0000(Not Clear) < succ>
```

[11383] The protein has homology with the following sequences in the GENPEPT database.

| >GP: AAC06891 GB: AE000703 hypothetical protein [Aquifex aeolicus] | | | |
|---|---|---|---|
| Identities = 72/213 (33%), Positives = 115/213 (53%), Gaps = 11/213 (5%) | | | |
| Query: | 36 | RPKILMHVCCAPCSTYTLEYLSQ---WADVTIYFANSNIHPKDEYYRREYVTQKFVHDFN | 92 |
| | | + KIL+H+CCAP + Y L+ L + +++ YF + NIHP +EY R T++ + | |
| Sbjct: | 3 | KSKILVHICCAPDAIYFLKKLREDYPESEIIGYFYDPNIHPYEEYRLRYLETERICKELG | 62 |
| Query: | 93 | KNTGYSVQFLSAPYEPNEFFKIVHGLEEEPEGGDRCKVCYDFRLDKTAEKAVELGFDYFG | 152 |
| | | N + Y+ + + V G E+EPE G RC++C+D+RL+K+AE A ELG D | |
| Sbjct: | 63 | IN------LIEGEYDLENWLERVKGYEDEPERGKRCQICFDYRLEKSAEVAKELGCDALT | 116 |
| Query: | 153 | SALTISPHKNSQTINTIGIDVQKIYDTQYLPSDLKKNKGYQRSVEMCKDYDIYRQCYCGC | 212 |
| | | + L +SP K+ + G + K ++L D +K G Q ++ K+ +IY+Q YCGC | |
| Sbjct: | 117 | TTLLMSPKKSIPQLKKAGEEATKRTGIEFLAPDYRKGGGTQEMFKLSKEREIYQQDYCGC | 176 |
| Query: | 213 | IFGAKDQGINLLQIKKDAKAFVSDKDGKEEFPN | 245 |
| | | I+G Q +I D F+ + G +E N | |
| Sbjct: | 177 | IYGLFKQKNG--KIFWDLVGFLGRRPGSKEERN | 207 |

[11384] A related DNA sequence was identified in S. pyogenes <SEQ ID 6429> which encodes the amino acid sequence <SEQ ID 6430>. Analysis of this protein sequence reveals the following:

```
Possible site: 55
>>> Seems to have no N-terminal signal sequence
----- Final Results -----
                            bacterial cytoplasm --- Certainty = 0.3498(Affirmative) < succ>
                              bacterial membrane --- Certainty = 0.0000(Not Clear) < succ>
                                bacterial outside --- Certainty = 0.0000(Not Clear) < succ>
RGD motif: 254-256
```

[11385] The protein has homology with the following sequences in the databases:

| >GP: AAC06891 GB: AE000703 hypothetical protein [Aquifex aeolicus] | | | |
|---|---|---|---|
| Identities = 65/182 (35%), Positives = 106/182 (57%), Gaps = 9/182 (4%) | | | |
| Query: | 39 | RPSILMHVCCAPCSTYTLEYLTQF---ADITVYFANSNIHPKDEYHRRAYVTQQFVSEFN | 95 |
| | | + IL+H+CCAP + Y L+ L + ++I YF + NIHP +EY R T++ E | |
| Sbjct: | 3 | KSKILVHICCAPDAIYFLKKLREDYPESEIIGYFYDPNIHPYEEYRLRYLETERICKELG | 62 |
| Query: | 96 | AKTGNTVQFLEADYVPNEYVRQVRGLEEEPEGGDRCRVCFDYRLDKTAQKAVELGFDYFA | 155 |
| | | + +E +Y ++ +V+G E+EPE G RC++CFDYRL+K+A+ A ELG D | |
| Sbjct: | 63 | ------INLIEGEYDLENWLERVKGYEDEPERGKRCQICFDYRLEKSAEVAKELGCDALT | 116 |
| Query: | 156 | SALTISPHKNSQTINDVGIDVQKVYTTKYLPSDFKKNNGYRRSVEMCEEYDIYRQCYCGC | 215 |
| | | + L +SP K+ + G + K ++L D++K G + ++ +E +IY+Q YCGC | |
| Sbjct: | 117 | TTLLMSPKKSIPQLKKAGEEATKRTGIEFLAPDYRKGGGTQEMFKLSKEREIYQQDYCGC | 176 |
| Query: | 216 | VY | 217 |
| | | +Y | |
| Sbjct: | 177 | IY | 178 |

[11386] An alignment of the GAS and GBS proteins is shown below.

| Identities = 184/255 (72%), Positives = 219/255 (85%) | | | |
|---|---|---|---|
| Query: | 1 | MIDVENILEKMKPNQKINYDWVMQQMVKQWQASDIRPKILMHVCCAPCSTYTLEYLSQWA | 60 |
| | | MID++ IL M PNQKINYD VMQQM K W+ +RP ILMHVCCAPCSTYTLEYL+Q+A | |
| Sbjct: | 4 | MIDLQEILANMNPNQKINYDRVMQQMAKVWEKESVRPSILMHVCCAPCSTYTLEYLTQFA | 63 |
| Query: | 61 | DVTIYFANSNIHPKDEYYRREYVTQKFVHDFNKNTGYSVQFLSAPYEPNEFFKIVHGLEE | 120 |
| | | D+T+YFANSNIHPKDEY+RR YVTQ+FV +FN TG +VQFL A Y PNE+ + V GLEE | |
| Sbjct: | 64 | DITVYFANSNIHPKDEYHRRAYVTQQFVSEFNAKTGNTVQFLEADYVPNEYVRQVRGLEE | 123 |
| Query: | 121 | EPEGGDRCKVCYDFRLDKTAEKAVELGFDYFGSALTISPHKNSQTINTIGIDVQKIYDTQ | 180 |
| | | EPEGGDRC+VC+D+RLDKTA+KAVELGFDYF SALTISPHKNSQTIN +GIDVQK+Y T+ | |
| Sbjct: | 124 | EPEGGDRCRVCFDYRLDKTAQKAVELGFDYFASALTISPHKNSQTINDVGIDVQKVYTTK | 183 |
| Query: | 181 | YLPSDLKKNKGYQRSVEMCKDYDIYRQCYCGCIFGAKDQGINLLQIKKDAKAFVSDKDGK | 240 |
| | | YLPSD KKN GY+RSVEMC++YDIYRQCYCGC++ AK QGI+L+Q+KKDAKAF++DKD | |
| Sbjct: | 184 | YLPSDFKKNNGYRRSVEMCEEYDIYRQCYCGCVYAAKMQGIDLVQVKKDAKAFMADKDLD | 243 |
| Query: | 241 | EEFPNIRFTFNGKSM | 255 |
| | | +F +IRF++ G M | |
| Sbjct: | 244 | NDFTHIRFSYRGDEM | 258 |

[11387] Based on this analysis, it was predicted that this protein and its epitopes, could be useful antigens for vaccines or diagnostics.

### EXAMPLE 2078

[11388] A DNA sequence (GBSx2193) was identified in S. agalactiae <SEQ ID 6431> which encodes the amino acid sequence <SEQ ID 6432>. Analysis of this protein sequence reveals the following:

```
Possible site: 53
>>> Seems to have no N-terminal signal sequence
----- Final Results -----
                            bacterial cytoplasm --- Certainty = 0.4216(Affirmative) < succ>
                              bacterial membrane --- Certainty = 0.0000(Not Clear) < succ>
                                bacterial outside --- Certainty = 0.0000(Not Clear) < succ>
```

[11389] The protein has homology with the following sequences in the GENPEPT database.

| >GP: CAB14809 GB: Z99118 excinuclease ABC (subunit C) [Bacillus subtilis] | | | |
|---|---|---|---|
| Identities = 189/333 (56%), Positives = 244/333 (72%) | | | |
| Query: | 1 | MNELIKHKLELLPDSPGCYLHKDKNGTIIYVGKAKNLKNRVKSYFHGSHNTKTELLVSEI | 60 |
| | | MN+ +K KL LLPD PGCYL KD+ T+IYVGKAK LKNRV+SYF GSH+ KT+ LV+EI | |
| Sbjct: | 1 | MNKQLKEKLALLPDQPGCYLMKDRQQTVIYVGKAKVLKNRVRSYFTGSHDAKTQRLVTEI | 60 |
| Query: | 61 | EDFEYIVTTSNTEALLLEINLIQENMPKYNIRLKDDKSYPYIKITNERYPRLMITRQVKK | 120 |
| | | EDFEYIVT+SN EAL+LE+NLI+++ PKYN+ LKDDK+YP+IK+T+ER+PRL++TR VKK | |
| Sbjct: | 61 | EDFEYIVTSSNLEALILEMNLIKKHDPKYNVMLKDDKTYPFIKLTHERHPRLIVTRNVKK | 120 |
| Query: | 121 | SDGTYFGPYPDSGAATEIKRLLDRLFPFKKCTNPANKVCFYYHLGQCNAHTVCQTNKAYW | 180 |
| | | G YFGPYP+ AA E K+LLDRL+P +KC+ ++VC YYHLGQC A V ++ | |
| Sbjct: | 121 | DKGRYFGPYPNVQAARETKKLLDRLYPLRKCSKLPDRVCLYYHLGQCLAPCVKDISEETN | 180 |
| Query: | 181 | DSLREDVKQFLNGKDNKIVNGLTEKMKSAAMTMEFERAAEYRDLIEAISLLRTKQRVIHQ | 240 |
| | | L E + +FL G N++ L EKM AA +EFERA E RD I I KQ++ | |
| Sbjct: | 181 | RELVESITRFLRGGYNEVKKELEEKMHEAAENLEFERAKELRDQIAHIESTMEKQKMTMN | 240 |
| Query: | 241 | DMKDRDVFGYFVDKGWMCVQVFFVRNGKLIQRDVNMFPYYNEPEEDFLTYIGQFYQDTKH | 300 |
| | | D+ DRDVF Y DKGWMCVQVFF+R GKLI+RDV+MFP Y E +E+FLT+IGQFY H | |
| Sbjct: | 241 | DLVDRDVFAYAYDKGWMCVQVFFIRQGKLIERDVSMFPLYQEADEEFLTFIGQFYSKNNH | 300 |
| Query: | 301 | FLPKEVFIPQDIDAKSVETIVGCKIVKPQRGKR | 333 |
| | | FLPKE+ +P ID +E ++ + +P++G + | |
| Sbjct: | 301 | FLPKEILVPDSIDQSMIEQLLETNVHQPKKGPK | 333 |

[11390] There is also homology to SEQ ID 2568.

[11391] Based on this analysis, it was predicted that this protein and its epitopes, could be useful antigens for vaccines or diagnostics.

### EXAMPLE 2079

[11392] A DNA sequence (GBSx2194) was identified in S. agalactiae <SEQ ID 6433> which encodes the amino acid sequence <SEQ ID 6434>. This protein is predicted to be maltose operon transcriptional repressor (rbsR). Analysis of this protein sequence reveals the following:

```
Possible site: 52
>>> Seems to have no N-terminal signal sequence
----- Final Results -----
                            bacterial cytoplasm --- Certainty = 0.3761(Affirmative) < succ>
                              bacterial membrane --- Certainty = 0.0000(Not Clear) < succ>
                                bacterial outside --- Certainty = 0.0000(Not Clear) < succ>
```

[11393] A related GBS nucleic acid sequence <SEQ ID 9393> which encodes amino acid sequence <SEQ ID 9394> was also identified.

[11394] The protein has homology with the following sequences in the GENPEPT database.

| >GP: AAD02112 GB: AF039082 putative maltose operon transcriptional | | | |
|---|---|---|---|
| repressor [Lactococcus lactis] | | | |
| Identities = 64/166 (38%), Positives = 105/166 (62%), Gaps = 13/166 (7%) | | | |
| Query: | 1 | MGKSAIDYLYKKGHKSIQFVTDDLNSEVSEERYLGYFKGARKLGLNQKPALLFDRGNPQV | 60 |
| | | +G+ A+ L + H++I FVTD +EV EERY G+ A +LGL+ LLF N + | |
| Sbjct: | 169 | LGREAVRLLAQLNHQNISFVTDTKETEVFEERYQGFKDEAERLGLSHD--LLFMDSNFSL | 226 |
| Query: | 61 | LEEFINRVKEEETTALIVIGDTVSVRVMQFLSFYKLKVPDDISIMTFNNSLFSHLIHPYL | 120 |
| | | E TAL+V+ D +S++V++ L L VP+D+S++T+NNS+F +IHPYL | |
| Sbjct: | 227 | RNE----------TALVVMDDVLSLKVVERLRSQGLNVPEDVSLITYNNSIFGAMIHPYL | 276 |
| Query: | 121 | STFDINVNNLGRTSVRRLIDIIKSPDKVFSETIIVPFTLEERESVR | 166 |
| | | +TFDI++ LG +++++++D+ + + + +TII PF L RES + | |
| Sbjct: | 277 | TTFDIHIEQLGASAIKKILDLRDNKENLPEKTII-PFELIVRESTK | 321 |

[11395] There is also homology to SEQ ID 5082.

[11396] Based on this analysis, it was predicted that this protein and its epitopes, could be useful antigens for vaccines or diagnostics.

### EXAMPLE 2080

[11397] A DNA sequence (GBSx2195) was identified in S. agalactiae <SEQ ID 6435> which encodes the amino acid sequence <SEQ ID 6436>. This protein is predicted to be 4-alpha-glucanotransferase (malQ). Analysis of this protein sequence reveals the following:

```
Possible site: 30
>>> Seems to have no N-terminal signal sequence
----- Final Results -----
                            bacterial cytoplasm --- Certainty = 0.2003(Affirmative) < succ>
                              bacterial membrane --- Certainty = 0.0000(Not Clear) < succ>
                                bacterial outside --- Certainty = 0.0000(Not Clear) < succ>
```

[11398] The protein has homology with the following sequences in the GENPEPT database.

| >GP: AAA26923 GB: J01796 amylomaltase [Streptococcus pneumoniae] | | | |
|---|---|---|---|
| Identities = 250/500 (50%), Positives = 329/500 (65%), Gaps = 4/500 (0%) | | | |
| Query: | 1 | MKKRASGVLMHITSLPGDLGIGTFGREAYAFVDFLVETDQKFWQILPLTTTSFGDSPYQS | 60 |
| | | MKKR SGVLMHI+SLPG GIG+FG+ AY FVDFLV T Q++WQILPL TS+GDSPYQS | |
| Sbjct: | 1 | MKKRQSGVLMHISSLPGAYGIGSFGQSAYDFVDFLVRTKQRYWQILPLGATSYGDSPYQS | 60 |
| Query: | 61 | FSAVAGNTHLIDFDLLTLEGFISKDDYQNISFGQDPEVVDYAGLFEKRRPVLEKAVKNFL | 120 |
| | | FSA AGNTH ID D+L +G + D + + FG D VDYA ++ RRP+LEKAVK F | |
| Sbjct: | 61 | FSAFAGNTHFIDLDILVEQGLLEASDLEGVDFGSDASEVDYAKIYYARRPLLEKAVKRFF | 120 |
| Query: | 121 | QEERATRMLSDFLQE-EKWVTDFAEFMAIKEHFGNKALQEWDDKAIIRREEEALAGYRQK | 179 |
| | | E + F Q+ + W+ FAE+MAIKE+F N A EW D R+ AL YR++ | |
| Sbjct: | 121 | -EVGDVKDFEKFAQDNQSWLELFAEYMAIKEYFDNLAWTEWPDADARARKASALESYREQ | 179 |
| Query: | 180 | LSEVIKYHEVTQYFFYKQWFELKEYANDKGIQIIGDMPIYVSADSVEVWTMPELFKLDRD | 239 |
| | | L++ + YH VTQYFF++QW +LK YAND I+I+GDMPIYV+ DS ++W P LFK D + | |
| Sbjct: | 180 | LADKLVYHRVTQYFFFQQWLKLKAYANDNHIEIVGDMPIYVAEDSSDMWANPHLFKTDVN | 239 |
| Query: | 240 | KQPLAIAGVPADDFSDDGQLWGNPIYNWDYHKESDFDWWIYRIQSGVKMYDYLRIDHFKG | 299 |
| | | + IAG P D+FS GQLWGNPIY+W+ + + WWI R++ K+YD +RIDHF+G | |
| Sbjct: | 240 | GKATCIAGCPPDEFSVTGQLWGNPIYDWEAMDKDGYKWWIERLRESFKIYDIVRIDHFRG | 299 |
| Query: | 300 | FSDYWEIRGDYQTANDGSWQPAPGPELFATIKEKLGDLPIIAENLGYIDERAERLLAGTG | 359 |
| | | F YWEI TA G W PG +LFA +KE+LG+L IIAE+LG++ + L TG | |
| Sbjct: | 300 | FESYWEIPAGSDTAAPGEWVKGPGYKLFAAVKEELGELNIIAEDLGFMTDEVIELRERTG | 359 |
| Query: | 360 | FPGMKIMEFGFYDTTGNSIDIPHNYTENTIAYAGTHDNEVINGWFEN-LTVEQKAYAENY | 418 |
| | | FPGMKI++F F + SID PH N++ Y GTHDN + GW+ N + + Y Y | |
| Sbjct: | 360 | FPGMKILQFAF-NPEDESIDSPHLAPANSVMYTGTHDNNTVLGWYRNEIDDATREYMARY | 418 |
| Query: | 419 | MRRLPNEPITETVLRTLYATVSQTTITCMQDLLDKPADSRMNMPNTVGGNWQWRMRKEDL | 478 |
| | | R E + +LRT++++VS I MQDLL+ +RMN P+T+GGNW WRM ++ L | |
| Sbjct: | 419 | TNRKEYETVVHAMLRTVFSSVSFMAIATMQDLLELDEAARMNFPSTLGGNWSWRMTEDQL | 478 |
| Query: | 479 | TENRKAFLKEITTIYNRGNK | 498 |
| | | T + L ++TTIY R N+ | |
| Sbjct: | 479 | TPAVEEGLLDLTTIYRRINE | 498 |

[11399] A related DNA sequence was identified in S. pyogenes <SEQ ID 6437> which encodes the amino acid sequence <SEQ ID 6438>. Analysis of this protein sequence reveals the following:

| Possible site: 17 | | | | |
|---|---|---|---|---|
| >>> Seems to have no N-terminal signal sequence | | | | |
| | INTEGRAL | Likelihood = −0.85 | Transmembrane | 435-451 (435-451) |

```
----- Final Results -----
                              bacterial membrane --- Certainty = 0.1341(Affirmative) < succ>
                                bacterial outside --- Certainty = 0.0000(Not Clear) < succ>
                            bacterial cytoplasm --- Certainty = 0.0000(Not Clear) < succ>
```

[11400] An alignment of the GAS and GBS proteins is shown below.

| Identities = 313/495 (63%), Positives = 387/495 (77%) | | | |
|---|---|---|---|
| Query: | 1 | MKKRASGVLMHITSLPGDLGIGTFGREAYAFVDFLVETDQKFWQILPLTTTSFGDSPYQS | 60 |
| | | M KRASG+LMHI+SLPG GIGTFG+ A+ FVDFL ET Q +WQILPLTTTSFGDSPYQS | |
| Sbjct: | 1 | MNKRASGILMHISSLPGKFGIGTFGKSAFEFVDFLAETKQTYWQILPLTTTSFGDSPYQS | 60 |
| Query: | 61 | FSAVAGNTHLIDFDLLTLEGFISKDDYQNISFGQDPEVVDYAGLFEKRRPVLEKAVKNFL | 120 |
| | | FSA+AGNTH IDF+LL + + D +I+FG +PE VDYA LF+ RRP+LEKAV+ F+ | |
| Sbjct: | 61 | FSAIAGNTHFIDFELLVDDELLEAADLCDITFGTNPEAVDYAQLFQVRRPLLEKAVRAFV | 120 |
| Query: | 121 | QEERATRMLSDFLQEEKWVTDFAEFMAIKEHFGNKALQEWDDKAIIRREEEALAGYRQKL | 180 |
| | | E+ L F W+TDFAEFMA+KE+F NKALQ+WDD+ +I+R+E++L YR+ L | |
| Sbjct: | 121 | AEQENVCKLEAFETASSWLTDFAEFMALKEYFNNKALQDWDDETVIKRQEDSLNNYRELL | 180 |
| Query: | 181 | SEVIKYHEVTQYFFYKQWFELKEYANDKGIQIIGDMPIYVSADSVEVWTMPELFKLDRDK | 240 |
| | | ++ I YH+V QYFFY+QW LK YAN KGI+IIGDMPIYVSADSVEVWTMPELFK+D DK | |
| Sbjct: | 181 | AKKITYHKVCQYFFYQQWSALKTYANHKGIEIIGDMPIYVSADSVEVWTMPELFKVDSDK | 240 |
| Query: | 241 | QPLAIAGVPADDFSDDGQLWGNPIYNWDYHKESDFDWWIYRIQSGVKMYDYLRIDHFKGF | 300 |
| | | +PL IAGVPAD FS+DGQLWGNP YNW H++S+F WWIYRIQ K+YD LRIDHFKGF | |
| Sbjct: | 241 | KPLFIAGVPADGFSEDGQLWGNPTYNWSAHEKSNFAWWIYRIQESFKLYDQLRIDHFKGF | 300 |
| Query: | 301 | SDYWEIRGDYQTANDGSWQPAPGPELFATIKEKLGDLPIIAENLGYIDERAERLLAGTGF | 360 |
| | | SD+WEI +TA +G W APG LF+ ++E LG+LPIIAENLGYIDE+AE+LLA TGF | |
| Sbjct: | 301 | SDFWEIPAGDKTARNGHWASAPGIALFSAVREALGELPIIAENLGYIDEKAEQLLASTGF | 360 |
| Query: | 361 | PGMKIMEFGFYDTTGNSIDIPHNYTENTIAYAGTHDNEVINGWFENLTVEQKAYAENYMR | 420 |
| | | PGMKI+EFG +D T SID+PH Y N +AY GTHDNEV+NGW++NL+ EQ + NY+ | |
| Sbjct: | 361 | PGMKILEFGLFDITSQSIDLPHYYDRNCVAYTGTHDNEVVNGWYDNLSEEQVHFVNNYLH | 420 |
| Query: | 421 | RLPNEPITETVLRTLYATVSQTTITCMQDLLDKPADSRMNMPNTVGGNWQWRMRKEDLTE | 480 |
| | | + +E IT+ +LRT++A+V T I C+QDLLDK SRMNMPNT+GGNWQWRM +L + | |
| Sbjct: | 421 | KHADESITKAMLRTIFASVCDTAILCIQDLLDKDGKSRMNMPNTIGGNWQWRMLDGELNQ | 480 |
| Query: | 481 | NRKAFLKEITTIYNR | 495 |
| | | + K +L +T +Y R | |
| Sbjct: | 481 | DHKDYLIYLTDLYGR | 495 |

[11401] Based on this analysis, it was predicted that this protein and its epitopes, could be useful antigens for vaccines or diagnostics.

### EXAMPLE 2081

[11402] A DNA sequence (GBSx2196) was identified in S. agalactiae <SEQ ID 6439> which encodes the amino acid sequence <SEQ ID 6440>. This protein is predicted to be glycogen phosphorylase (malP). Analysis of this protein sequence reveals the following:

```
Possible site: 40
>>> Seems to have no N-terminal signal sequence
----- Final Results -----
                            bacterial cytoplasm --- Certainty = 0.2678(Affirmative) < succ>
                              bacterial membrane --- Certainty = 0.0000(Not Clear) < succ>
                                bacterial outside --- Certainty = 0.0000(Not Clear) < succ>
```

[11403] The protein has homology with the following sequences in the GENPEPT database.

| >GP: AAC00218 GB: AF008220 glycogen phosphorylase [Bacillus subtilis] | | | |
|---|---|---|---|
| Identities = 297/776 (38%), Positives = 452/776 (57%), Gaps = 41/776 (5%) | | | |
| Query: | 13 | GKVLSELTNEEIYVELLNFVKEEAAA-------KSKNSSQRKVYYISAEFLIGKLLSNNL | 65 |
| | | GK + + Y L N V+E +A KS+++S ++ YY+S EFL+G+LL NL | |
| Sbjct: | 21 | GKSFKDSAKLDQYKTLGNMVREYISADWIETNEKSRSNSGKQTYYLSIEFLLGQLLEQNL | 80 |
| Query: | 66 | INLGIYKDVKKELELVGKSIAEIEDVEPEPSLGNGGLGRLASCFIDSISSLGINGEGVGL | 125 |
| | | +NLG+ V+ L+ +G ++ EI +E + LGNGGLGRLA+CF+DS++SL + G G+G+ | |
| Sbjct: | 81 | MNLGVRDVVEAGLKEIGINLEEILQIENDAGLGNGGLGRLAACFLDSLASLNLPGHGMGI | 140 |
| Query: | 126 | NYHCGLFKQVFRNNQQEAEANYWIEN-NSWLVPT-DISYDVPF--------RDFTLKSRL | 175 |
| | | Y GLF+Q + Q W++N N W V D + DVPF + L R | |
| Sbjct: | 141 | RYKHGLFEQKIVDGHQVELPEQWLKNGNVWEVRNADQAVDVPFWGEVHMTEKSGRLHFRH | 200 |
| Query: | 176 | DR----------IDVLGYKKDTKNYLNLFDIDGLDYNLIEKGITFDKTEIKKNLTLFLYP | 225 |
| | | ++ I ++GY+ T N L L++ + Y G + ++ FLYP | |
| Sbjct: | 201 | EQATIVTAVPYDIPIIGYETGTVNTLRLWNAE--PYAHYHGGNILSYKRETEAVSEFLYP | 258 |
| Query: | 226 | DDSDKNGELLRIYQQYFMVSNAAQLLIDEAIERGSNLHDLAEYAYVQINDTHPSMVIPEL | 285 |
| | | DD+ G++LR+ QQYF+V + + +++ + +L L + + INDTHP++ +PEL | |
| Sbjct: | 259 | DDTHDEGKILRLKQQYFLVCASLKSIVNNYRKTHKSLSGLHKKVSIHINDTHPALAVPEL | 318 |
| Query: | 286 | IRLLTEKHGFEFDEAVSVVRNMVGYTNHTILAEALEKWPLEYLNEVVPHLVTIIKKLDQM | 345 |
| | | +R+L ++ ++EA + + + YTNHT L+EALEKWP+ ++P + II+++++ | |
| Sbjct: | 319 | MRILLDEENMSWEEAWHITVHTISYTNHTTLSEALEKWPIHLFKPLLPRMYMIIEEINER | 378 |
| Query: | 346 | IRE--------EQTNPEVQIIDEAGRVHMAHMDIHFSTSVNGVAALHTEILKNSELKVFY | 397 |
| | | + E I G V MAH+ I S SVNGVA +H++ILK E++ F+ | |
| Sbjct: | 379 | FCRAVWEKYPGDWKRIENMAITAHGVVKMAHLAIVGSYSVNGVAKIHSDILKEREMRDFH | 438 |
| Query: | 398 | DIYPDKFNNKTNGITFRRWLEFANQDLADYLKELIGDSYLTDATQLEKLLTYADSNEVHD | 457 |
| | | ++P++FNNKTNGI RRWL AN L+ + E IGD ++ L +L YA + | |
| Sbjct: | 439 | LLFPNRFNNKTNGIAHRRWLLKANPGLSAIITEAIGDEWVKQPESLIRLEPYATDPAFIE | 498 |
| Query: | 458 | KLAAIKFKNKLALKRYLKENKGIELDEYSIIDTQIKRFHEYKRQQMNALYVIHKYLEIKR | 517 |
| | | + K K K L + G+ ++ SI D Q+KR H YKRQ +N L++++ Y +K | |
| Sbjct: | 499 | QFQNNKSKKKQELADLIFCTAGVVVNPESIFDVQVKRLHAYKRQLLNVLHIMYLYNRLKE | 558 |
| Query: | 518 | GH-FPSRKLTVIFGGKAAPAYTIAQDIIHLILCLSELINNDPEVNKYLNVHLVENYNVTV | 576 |
| | | F T IFG KA+P+Y A+ II LI ++E +N DP V + + V +ENY V++ | |
| Sbjct: | 559 | DSGFSIYPQTFIFGAKASPSYYYAKKIIKLIHSVAEKVNYDPAVKQLIKVVFLENYRVSM | 618 |
| Query: | 577 | AEKLIPATDISEQISLASKEASGTGNMKFMLNGALTLGTMDGANVEIAELAGKENIYTFG | 636 |
| | | AE++ PA+D+SEQIS ASKEASGTGNMKFM+NGALT+GT DGAN+EI E G + IYTFG | |
| Sbjct: | 619 | AERIFPASDVSEQISTASKEASGTGNMKFMMNGALTIGTHDGANIEILERVGPDCIYTFG | 678 |
| Query: | 637 | KDSDTIINLYETSGYRSKDYYDKDKVIREAVDFIISDDIVSLGNAERLKRLHDELV-GKD | 695 |
| | | +D +++ E GYRS++YY D+ IR+ D +I+ G A+ + + D L+ D | |
| Sbjct: | 679 | LKADEVLSYQENGGYRSREYYQHDRRIRQVADQLINGFFE--GEADEFESIFDSLLPHND | 736 |
| Query: | 696 | WFMTLIDLKEYIAVKEQVLADYEDYESWNKKVIHNIAKAGFFSSDRTIEQYNQDIW | 751 |
| | | + L D Y +E++ ADY + W++ I NIA +G+FSSDRTI +Y +DIW | |
| Sbjct: | 737 | EYFVLKDFSSYADAQERIQADYRERRKWSEHSIVNIAHSGYFSSDRTIREYAKDIW | 792 |

[11404] A related DNA sequence was identified in S. pyogenes <SEQ ID 6441> which encodes the amino acid sequence <SEQ ID 6442>. Analysis of this protein sequence reveals the following:

| Possible site: 19 | | | | |
|---|---|---|---|---|
| >>> Seems to have no N-terminal signal sequence | | | | |
| | INTEGRAL | Likelihood = −2.71 | Transmembrane | 538-554 (538-554) |

```
----- Final Results -----
                              bacterial membrane --- Certainty = 0.2084(Affirmative) < succ>
                                bacterial outside --- Certainty = 0.0000(Not Clear) < succ>
                            bacterial cytoplasm --- Certainty = 0.0000(Not Clear) < succ>
```

[11405] An alignment of the GAS and GBS proteins is shown below.

| Identities = 629/754 (83%), Positives = 696/754 (91%), Gaps = 2/754 (0%) | | | |
|---|---|---|---|
| Query: | 1 | MTRNFTTYVGQQ-GKVLSELTNEEIYVELLNFVKEEAAAKSKNSSQRKVYYISAEFLIGK | 59 |
| | | MTR FT YV + GK L++ +NEEIY+ LLNFVKEEA+ K+KNS++RKVYYISAEFLIGK | |
| Sbjct: | 1 | MTR-FTEYVETKLGKSLTQASNEEIYLSLLNFVKEEASHKAKNSAKRKVYYISAEFLIGK | 59 |
| Query: | 60 | LLSNNLINLGIYKDVKKELELVGKSIAEIEDVEPEPSLGNGGLGRLASCFIDSISSLGIN | 119 |
| | | LLSNNLINLGIYKD+K+EL GKSIAE+EDVE EPSLGNGGLGRLASCFIDSI+SLGIN | |
| Sbjct: | 60 | LLSNNLINLGIYKDIKEELAAAGKSIAEVEDVELEPSLGNGGLGRLASCFIDSIASLGIN | 119 |
| Query: | 120 | GEGVGLNYHCGLFKQVFRNNQQEAEANYWIENNSWLVPTDISYDVPFRDFTLKSRLDRID | 179 |
| | | GEGVGLNYHCGLFKQVF++N+QEAE N+WIE++SWLVPTDISYDVPF++FTLKSRLDRID | |
| Sbjct: | 120 | GEGVGLNYHCGLFKQVFKHNEQEAEPNFWIEDDSWLVPTDISYDVPFKNFTLKSRLDRID | 179 |
| Query: | 180 | VLGYKKDTKNYLNLFDIDGLDYNLIEKGITFDKTEIKKNLTLFLYPDDSDKNGELLRIYQ | 239 |
| | | VLGYK+DTKNYLNLFDI+G+DY LI+ GI+FDKT+I KNLTLFLYPDDSDKNGELLRIYQ | |
| Sbjct: | 180 | VLGYKRDTKNYLNLFDIEGVDYGLIKDGISFDKTQIAKNLTLFLYPDDSDKNGELLRIYQ | 239 |
| Query: | 240 | QYFMVSNAAQLLIDEAIERGSNLHDLAEYAYVQINDTHPSMVIPELIRLLTEKHGFEFDE | 299 |
| | | QYFMVSNAAQL+IDEAIERGSNLHDLA+YAYVQINDTHPSMVIPELIRLLTEKHGF+FDE | |
| Sbjct: | 240 | QYFMVSNAAQLIIDEAIERGSNLHDLADYAYVQINDTHPSMVIPELIRLLTEKHGFDFDE | 299 |
| Query: | 300 | AVSVVRNMVGYTNHTILAEALEKWPLEYLNEVVPHLVTIIKKLDQMIREEQTNPEVQIID | 359 |
| | | AV+VV+NMVGYTNHTILAEALEKWP YLNEVVPHLVTII+KLD ++R E ++P VQIID | |
| Sbjct: | 300 | AVAVVKNMVGYTNHTILAEALEKWPTAYLNEVVPHLVTIIEKLDALVRSEVSDPAVQIID | 359 |
| Query: | 360 | EAGRVHMAHMDIHFSTSVNGVAALHTEILKNSELKVFYDIYPDKFNNKTNGITFRRWLEF | 419 |
| | | E+GRVHMAHMDIHF+TSVNGVAALHTEILKNSELK FYD+YP+KFNNKTNGITFRRWLEF | |
| Sbjct: | 360 | ESGRVHMAHMDIHFATSVNGVAALHTEILKNSELKAFYDLYPEKFNNKTNGITFRRWLEF | 419 |
| Query: | 420 | ANQDLADYLKELIGDSYLTDATQLEKLLTYADSNEVHDKLAAIKFKNKLALKRYLKENKG | 479 |
| | | ANQDLADY+KELIGD YLTDAT+LEKL+ +AD VH KLA IKF NKLALKRYLK+NK | |
| Sbjct: | 420 | ANQDLADYIKELIGDEYLTDATKLEKLMAFADDKAVHAKLAEIKFNNKLALKRYLKDNKD | 479 |
| Query: | 480 | IELDEYSIIDTQIKRFHEYKRQQMNALYVIHKYLEIKRGHFPSRKLTVIFGGKAAPAYTI | 539 |
| | | IELDE+SIIDTQIKRFHEYKRQQMNALYVIHKYLEIK+G+ P RK+TVIFGGKAAPAY I | |
| Sbjct: | 480 | IELDEHSIIDTQIKRFHEYKRQQMNALYVIHKYLEIKKGNLPKRKITVIFGGKAAPAYII | 539 |
| Query: | 540 | AQDIIHLILCLSELINNDPEVNKYLNVHLVENYNVTVAEKLIPATDISEQISLASKEASG | 599 |
| | | AQDIIHLILCLSELINNDPEV+ YLNVHLVENYNVTVAE LIPATDISEQISLASKEASG | |
| Sbjct: | 540 | AQDIIHLILCLSELINNDPEVSPYLNVHLVENYNVTVAEHLIPATDISEQISLASKEASG | 599 |
| Query: | 600 | TGNMKFMLNGALTLGTMDGANVEIAELAGKENIYTFGKDSDTIINLYETSGYRSKDYYDK | 659 |
| | | TGNMKFMLNGALTLGTMDGANVEIAELAG ENIYTFGKDSDTIINLY T+ Y +KDYYD | |
| Sbjct: | 600 | TGNMKFMLNGALTLGTMDGANVEIAELAGMENIYTFGKDSDTIINLYATASYVAKDYYDN | 659 |
| Query: | 660 | DKVIREAVDFIISDDIVSLGNAERLKRLHDELVGKDWFMTLIDLKEYIAVKEQVLADYED | 719 |
| | | I+ AV+FIIS ++++ GN ERL RL+ EL+ KDWFMTLIDL+EYI VKE++LADYED | |
| Sbjct: | 660 | HPAIKAAVNFIISPELLAFGNEERLDRLYKELISKDWFMTLIDLEEYIEVKEKMLADYED | 719 |
| Query: | 720 | YESWNKKVIHNIAKAGFFSSDRTIEQYNQDIWHS | 753 |
| | | + W KV+HNIAKAGFFSSDRTIEQYN+DIWHS | |
| Sbjct: | 720 | QDLWMTKVVHNIAKAGFFSSDRTIEQYNEDIWHS | 753 |

[11406] Based on this analysis, it was predicted that this protein and its epitopes, could be useful antigens for vaccines or diagnostics.

### EXAMPLE 2082

[11407] A DNA sequence (GBSx2197) was identified in S. agalactiae <SEQ ID 6443> which encodes the amino acid sequence <SEQ ID 6444>. This protein is predicted to be glycerol-3-phosphatase transporter (glpT). Analysis of this protein sequence reveals the following:

| Possible site: 59 | | | | |
|---|---|---|---|---|
| >>> Seems to have no N-terminal signal sequence | | | | |
| | INTEGRAL | Likelihood = −10.88 | Transmembrane | 339-355 (333-359) |
| | INTEGRAL | Likelihood = −8.01 | Transmembrane | 432-448 (426-450) |
| | INTEGRAL | Likelihood = −6.74 | Transmembrane | 92-108 (91-127) |
| | INTEGRAL | Likelihood = −6.69 | Transmembrane | 194-210 (190-214) |
| | INTEGRAL | Likelihood = −3.77 | Transmembrane | 367-383 (364-385) |
| | INTEGRAL | Likelihood = −2.81 | Transmembrane | 111-127 (109-127) |
| | INTEGRAL | Likelihood = −2.28 | Transmembrane | 407-423 (406-424) |
| | INTEGRAL | Likelihood = −2.02 | Transmembrane | 165-181 (165-182) |
| | INTEGRAL | Likelihood = −0.64 | Transmembrane | 29-45 (29-45) |

```
----- Final Results -----
                              bacterial membrane --- Certainty = 0.5352(Affirmative) < succ>
                                bacterial outside --- Certainty = 0.0000(Not Clear) < succ>
                            bacterial cytoplasm --- Certainty = 0.0000(Not Clear) < succ>
```

[11408] The protein has homology with the following sequences in the GENPEPT database.

| >GP: AAC44575 GB: U28354 IS629 ORFB fused with | | | |
|---|---|---|---|
| sequences similar to E. coli | | | |
| GlpT and UhpT proteins, Swiss-Prot Accession Number | | | |
| P08194 and P09836; Method: conceptual translation | | | |
| supplied by author [Shig | | | |
| Identities = 174/321 (54%), Positives = 241/321 (74%), Gaps = 4/321 (1%) | | | |
| Query: | 109 | GVIPSVITSIWLFTIMYLINGWLQGMGYPPGARTLVYWYDNKERIKYATIWNLSHNFGGA | 168 |
| | | GV P V + + + YL+NGW+QGMGYPPGA+TLV+WY+++ERI +AT+WNLSHN GGA | |
| Sbjct: | 12 | GVGP-VCSELHIAPSTYLLNGWIQGMGYPPGAKTLVFWYEHRERISWATLWNLSHNVGGA | 70 |
| Query: | 169 | IAPILTGVGLALAGNDSLNQARAAYWFPGVVACLLAVLVYFLQEDTPESIGLPPIEEYHK | 228 |
| | | +AP+L G G+ +L+ ARAA+ FPGV+ ++VL+YF+Q D P S+GLPPIEE+ | |
| Sbjct: | 71 | LAPVLIGFSFGFFGDSALDHARAAFIFPGVLCMAMSVLIYFIQVDRPVSVGLPPIEEWKG | 130 |
| Query: | 229 | EQYTNVVDSSDILEEPEVLGMGEIIKKYILPNTKLMWASLYSIFVYILRYGIVSWTPKFL | 288 |
| | | ++ E+ L + +II+K+I+ N KL++ +Y FVYILRYGIVSW PKFL | |
| Sbjct: | 131 | NVVSHPAKGR---EQGPRLSIPDIIRKHIIRNNKLIYCCIYGSFVYILRYGIVSWAPKFL | 187 |
| Query: | 289 | ATSVQDGGKGITATAGMGGFSLFEIGGIIGMLTAGYLSAKVFKNSKPLTNVAFLVVAILL | 348 |
| | | + S+ GGK + A MGG S+FEIGG+ GML AGYLS ++F+NSKPLTN FL + I+L | |
| Sbjct: | 188 | SDSLDVGGKDMGKLASMGGGSVFEIGGVAGMLLAGYLSVRLFRNSKPLTNTLFLALTIIL | 247 |
| Query: | 349 | LAAYWFIPAGPQYMALDFIILLGLGASIYGPVMMVGLYAMELVPKAAAGAASGLTGTFSY | 408 |
| | | L AYW++P+G +Y+ L++ IL+ LG ++YGPVM +GLY+MELVPK AAGAASGL+GTFSY | |
| Sbjct: | 248 | LIAYWYVPSGNEYLWLNYTILILLGLAVYGPVMFIGLYSMELVPKEAAGAASGLSGTFSY | 307 |
| Query: | 409 | VGGATIATLAIGIIIDHFGWG | 429 |
| | | + G+ +ATL +G+++D+ GWG | |
| Sbjct: | 308 | IFGSIVATLGMGLVVDYLGWG | 328 |

[11409] A related DNA sequence was identified in S. pyogenes <SEQ ID 6445> which encodes the amino acid sequence <SEQ ID 6446>. Analysis of this protein sequence reveals the following:

| Possible site: 36 | | | | |
|---|---|---|---|---|
| >>> Seems to have no N-terminal signal sequence | | | | |
| | INTEGRAL | Likelihood = −12.37 | Transmembrane | 185-201 (175-208) |
| | INTEGRAL | Likelihood = −9.13 | Transmembrane | 114-130 (90-134) |
| | INTEGRAL | Likelihood = −7.75 | Transmembrane | 322-338 (320-345) |
| | INTEGRAL | Likelihood = −6.79 | Transmembrane | 421-437 (419-439) |
| | INTEGRAL | Likelihood = −6.37 | Transmembrane | 91-107 (90-113) |
| | INTEGRAL | Likelihood = −5.36 | Transmembrane | 163-179 (161-181) |
| | INTEGRAL | Likelihood = −5.20 | Transmembrane | 350-366 (347-371) |
| | INTEGRAL | Likelihood = −4.41 | Transmembrane | 23-39 (22-41) |
| | INTEGRAL | Likelihood = −3.77 | Transmembrane | 257-273 (249-273) |
| | INTEGRAL | Likelihood = −1.33 | Transmembrane | 61-77 (61-77) |
| | INTEGRAL | Likelihood = −1.28 | Transmembrane | 383-399 (383-399) |
| | INTEGRAL | Likelihood = −0.90 | Transmembrane | 299-315 (299-315) |

```
----- Final Results -----
                              bacterial membrane --- Certainty = 0.5946(Affirmative) < succ>
                                bacterial outside --- Certainty = 0.0000(Not Clear) < succ>
                            bacterial cytoplasm --- Certainty = 0.0000(Not Clear) < succ>
```

[11410] The protein has homology with the following sequences in the databases:

| >GP: AAF96050 GB: AE004355 glycerol-3-phosphate transporter | | | |
|---|---|---|---|
| [Vibrio cholerae] | | | |
| Identities = 128/438 (29%), Positives = 215/438 (48%), Gaps = 17/438 (3%) | | | |
| Query: | 1 | LFMEEDYNKREP-EKFTQFLRRQKVVFFVAFF-GYVCAYLVRNNFKLMSNTIMVQNGWDK | 58 |
| | | LF + +R P +K R + F+ F GY YL R NF L + +++ G+ + | |
| Sbjct: | 21 | LFKPAAHTQRLPSDKVDSVYSRLRWQLFIGIFVGYAGYYLGRKNFSL-AMPYLIEQGFSR | 79 |
| Query: | 59 | AQIAILLSCLTVSYGLAKFYMGALGDRVSLRKLFSISLGASALICILIGFF---NSSMVV | 115 |
| | | + + L ++++YGL+KF MG + DR + R S L SAL+ GF S+ | |
| Sbjct: | 80 | GDLGVALGAVSIAYGLSKFLMGNVSDRSNPRYFLSAGLLLSALVMFCFGFMPWATGSITA | 139 |
| Query: | 116 | LGILLVLCGVVQGALAPASQAMIANYFPNKTRGGAIAGWNISQNMGSALLPLTIALLTSM | 175 |
| | | + ILL L G QG PA + +++ K RG ++ WN++ N+G L I + + | |
| Sbjct: | 140 | MFILLFLNGWFQGMGWPACGRTMVHWWSRKERGEIVSVWNVAHNVGGGL----IGPIFLL | 195 |
| Query: | 176 | GLVVPANGNILLAFLIPGVLVFLFALCCWKLGGDNPESEGLDSLRTMYGDAGESAVASEE | 235 |
| | | GL + N + AF +P L A+ W + D P+S GL + D + S E | |
| Sbjct: | 196 | GLWM-FNDDWRTAFYVPAFFAVLVAVFTWLVMRDTPQSCGLPPIEEYKNDYPDDYDKSHE | 254 |
| Query: | 236 | EKHNLSYWQLIWKYVFCNPSLLLVAAVNVALYFVRFGIEDWMPIYLSQVANMSEAHIHFA | 295 |
| | | + ++ ++ +KYVF N L +A N +Y +R+G+ DW P+YL + + + +A | |
| Sbjct: | 255 | NE--MTAKEIFFKYVFNNKLLWSIAIANAFVYLIRYGVLDWAPVYLKEAKHFTVDKSSWA | 312 |
| Query: | 296 | ISMLEWVAIPGSLVFAWLAVR-YPNKMAKVGAIGLFVLAAIVFVYERLTATGAPNYFLLL | 354 |
| | | + EW IPG+L+ W++ + + + A G + + ++ V VY G P + | |
| Sbjct: | 313 | YFLYEWAGIPGTLLCGWISDKVFKGRRAPAGILFMVLVTLAVLVY-WFNPAGNPAVDMAA | 371 |
| Query: | 355 | VIAGILGSLIYGPQLIVNILTINFVPLNVAGTAIGFVGVTAYLIGNMGANWLMPILADGF | 414 |
| | | ++A +G LIYGP +++ + + P AGTA G G+ YL G + AN ++ D F | |
| Sbjct: | 372 | LVA--IGFLIYGPVMLIGLYALELAPKKAAGTAAGLTGLFGYLGGAVAANAILGYTVDHF | 429 |
| Query: | 415 | GWFWSYIVVAALSAFSAV | 432 |
| | | GW ++V+ A S + | |
| Sbjct: | 430 | GWDGGFMVLVASCVLSVL | 447 |

[11411] An alignment of the GAS and GBS proteins is shown below.

| Identities = 117/439 (26%), Positives = 203/439 (45%), Gaps = 27/439 (6%) | | | |
|---|---|---|---|
| Query: | 23 | KYPRYRVQVLISIFVGYMGYYFVRNTTSILSGILNMS----ATEIGIITCASYIAYGLSK | 78 |
| | | ++ R + V F GY+ Y VRN ++S + + +I I+ ++YGL+K | |
| Sbjct: | 17 | QFLRRQKVVFFVAFFGYVCAYLVRNNFKLMSNTIMVQNGWDKAQIAILLSCLTVSYGLAK | 76 |
| Query: | 79 | FISGLISDESNSKIFLPVGLFLTGLVNVLIGVIPSVITSIWLFTIMYLINGWLQGHGYPP | 138 |
| | | F G + D + + + L + L+ +LIG S S+ + I+ ++ G +QG P | |
| Sbjct: | 77 | FYMGALGDRVSLRKLFSISLGASALICILIGFFNS---SMVVLGILLVLCGVVQGALAPA | 133 |
| Query: | 139 | GARTLVYWYDNKERIKYATIWNLSHNFGGAIAPI----LTGVGLALAGNDSLNQARAAYW | 194 |
| | | + ++ NK R WN+S N G A+ P+ LT +GL + N ++ A+ | |
| Sbjct: | 134 | SQAMIANYFPNKTRGGAIAGWNISQNMGSALLPLTIALLTSMGLVVPANGNI---LLAFL | 190 |
| Query: | 195 | FPGVVACLLAVLVYFLQEDTPESIGLPPIEEYHKEQYTNVVDSSDILEEPEVLGMGEIIK | 254 |
| | | PGV+ L A+ + L D PES GL + + + + V S EE L ++I | |
| Sbjct: | 191 | IPGVLVFLFALCCWKLGGDNPESEGLDSLRTMYGDAGESAVASE---EEKHNLSYWQLIW | 247 |
| Query: | 255 | KYILPNTKLMWASLYSIFVYILRYGIVSWTPKFLATSVQDGGKGITATAGMGGFSLFEIG | 314 |
| | | KY+ N L+ + ++ +Y +R+GI W P +L+ I S+ E | |
| Sbjct: | 248 | KYVFCNPSLLLVAAVNVALYFVRFGIEDWMPIYLSQVANMSEAHIHFA-----ISMLEWV | 302 |
| Query: | 315 | GIIGMLTAGYLSAKVFKNSKPLTNVAFLVVAILLLAAYWFIPAG-PQYMALDFIILLG-L | 372 |
| | | I G L +L+ + + + V+A ++ G P Y L +++ G L | |
| Sbjct: | 303 | AIPGSLVFAWLAVRYPNKMAKVGAIGLFVLAAIVFVYERLTATGAPNYFLL--LVIAGIL | 360 |
| Query: | 373 | GASIYGPVMMVGLYAMELVPKAAAGAASGLTGTFSYVGGATIATLAIGIIIDHFGWGVAF | 432 |
| | | G+ IYGP ++V + + VP AG A G G +Y+ G A + I+ D FGW ++ | |
| Sbjct: | 361 | GSLIYGPQLIVNILTINFVPLNVAGTAIGFVGVTAYLIGNMGANWLMPILADGFGWFWSY | 420 |
| Query: | 433 | IIF-GISGFAAIVCTLLSR | 450 |
| | | I+ +S F+A+ +L++ | |
| Sbjct: | 421 | IVVAALSAFSAVGYLILAK | 439 |

[11412] Based on this analysis, it was predicted that this protein and its epitopes, could be useful antigens for vaccines or diagnostics.

### EXAMPLE 2083

[11413] A DNA sequence (GBSx2198) was identified in S. agalactiae <SEQ ID 6447> which encodes the amino acid sequence <SEQ ID 6448>. Analysis of this protein sequence reveals the following:

```
Possible site: 21
>>> Seems to have no N-terminal signal sequence
----- Final Results -----
                            bacterial cytoplasm --- Certainty = 0.3202(Affirmative) < succ>
                              bacterial membrane --- Certainty = 0.0000(Not Clear) < succ>
                                bacterial outside --- Certainty = 0.0000(Not Clear) < succ>
```

[11414] The protein has no significant homology with any sequences in the GENPEPT database.

[11415] A related DNA sequence was identified in S. pyogenes <SEQ ID 6449> which encodes the amino acid sequence <SEQ ID 6450>. Analysis of this protein sequence reveals the following:

```
Possible site: 19
>>> Seems to have no N-terminal signal sequence
----- Final Results -----
                            bacterial cytoplasm --- Certainty = 0.4473(Affirmative) < succ>
                              bacterial membrane --- Certainty = 0.0000(Not Clear) < succ>
                                bacterial outside --- Certainty = 0.0000(Not Clear) < succ>
```

[11416] An alignment of the GAS and GBS proteins is shown below.

| Identities = 54/100 (54%), Positives = 67/100 (67%) | | | |
|---|---|---|---|
| Query: | 1 | MTYELCLEYGTYPLRPVDAWADEINTAPAFITEDKKLLELLEEVNTLFHELFLTIECSFH | 60 |
| | | MTYELCLEYGTYPL VDA+ E P FI ED+ L LE +N LFH+LF+TIE FH | |
| Sbjct: | 1 | MTYELCLEYGTYPLSRVDAYWGEDQNPPTFIQEDRLLCHKLETMNHLFHDLFVTIESQFH | 60 |
| Query: | 61 | YIGHDFPEKRAKITQIYHVIIEHLSIHYPEYDIKIESLLM | 100 |
| | | Y+G + PEKRA+I +Y + L Y +Y IKIE+ L+ | |
| Sbjct: | 61 | YVGFNMPEKRAQIRILYQEVATILKSKYKDYPIKIETFLL | 100 |

[11417] Based on this analysis, it was predicted that this protein and its epitopes, could be useful antigens for vaccines or diagnostics.

### EXAMPLE 2084

[11418] A DNA sequence (GBSx2199) was identified in S. agalactiae <SEQ ID 6451> which encodes the amino acid sequence <SEQ ID 6452>. Analysis of this protein sequence reveals the following:

```
Possible site: 19
>>> Seems to have no N-terminal signal sequence
----- Final Results -----
                            bacterial cytoplasm --- Certainty = 0.2369(Affirmative) < succ>
                              bacterial membrane --- Certainty = 0.0000(Not Clear) < succ>
                                bacterial outside --- Certainty = 0.0000(Not Clear) < succ>
```

[11419] The protein has homology with the following sequences in the GENPEPT database.

| >GP: AAB81912 GB: U92974 unknown [Lactococcus lactis] | | | |
|---|---|---|---|
| Identities = 213/322 (66%), Positives = 260/322 (80%), Gaps = 5/322 (1%) | | | |
| Query: | 1 | MSEKIRVLLYYKYVSIENAEEYAAKHLEFCKSIGLKGRILIADEGINGTVSGDYETTQKY | 60 |
| | | M++ RVLLYY+YV IE+ E +A KHL CK +GLKGRIL+ADEGINGTVSG E T Y | |
| Sbjct: | 1 | MTQDYRVLLYYQYVPIEDGETFAQKHLADCKELGLKGRILVADEGINGTVSGTIEQTNAY | 60 |
| Query: | 61 | MDWVHSDERFADLWFKIDEENQQAFRKMFVRYKKEIVHLGLEDNNFDSDINPLETTGEYL | 120 |
| | | M+ + +D RF+ FKIDE Q AF+KM VRY+ E+V+L LED D+NPLE TG YL | |
| Sbjct: | 61 | MELMKNDPRFSSTIFKIDEAEQNAFKKMHVRYRPELVNLSLED-----DVNPLELTGAYL | 115 |
| Query: | 121 | NPKQFKEALLDEDTVVLDTRNDYEYDLGHFRGAIRPDIRNFRELPQWVRDNKDKFMEKRV | 180 |
| | | +PK+F+EA+LDE+TVV+D RNDYE+DLGHFRGAIRP+IR+FRELPQW+RDNK++FMEKRV | |
| Sbjct: | 116 | DPKEFREAMLDENTVVIDARNDYEFDLGHFRGAIRPEIRSFRELPQWIRDNKEQFMEKRV | 175 |
| Query: | 181 | VVYCTGGVRCEKFSGWMVREGFKDVGQLHGGIATYGKDPEVQGELWDGAMYVFDDRISVP | 240 |
| | | + YCTGG+RCEKFSGW+VREGFKDVGQL GGIATYGKDPEVQG+LWDG MYVFD RI+VP | |
| Sbjct: | 176 | LTYCTGGIRCEKFSGWLVREGFKDVGQLLGGIATYGKDPEVQGDLWDGQMYVFDSRIAVP | 235 |
| Query: | 241 | INHVNPTVISKDYFDGTPCERYVNCANPFCNKQIFASEENEAKYVRGCSPECRAHERNRY | 300 |
| | | IN ++ +D+FDG+PCERY+NC NP CN+Q+ ASEENEAKY+ CS ECR H NRY | |
| Sbjct: | 236 | INQKEHVIVGRDWFDGSPCERYINCGNPECNRQMLASEENEAKYLGACSHECRVHPNNRY | 295 |
| Query: | 301 | VQENGLSRQEWAERLEAIGESL | 322 |
| | | ++ + LS QE ERL + + L | |
| Sbjct: | 296 | IKAHQLSNQEVQERLALLEKDL | 317 |

[11420] A related DNA sequence was identified in S. pyogenes <SEQ ID 6453> which encodes the amino acid sequence <SEQ ID 6454>. Analysis of this protein sequence reveals the following:

```
Possible site: 51
>>> Seems to have no N-terminal signal sequence
----- Final Results -----
                            bacterial cytoplasm --- Certainty = 0.2443(Affirmative) < succ>
                              bacterial membrane --- Certainty = 0.0000(Not Clear) < succ>
                                bacterial outside --- Certainty = 0.0000(Not Clear) < succ>
```

[11421] An alignment of the GAS and GBS proteins is shown below.

| Identities = 321/324 (99%), Positives = 323/324 (99%) | | | |
|---|---|---|---|
| Query: | 1 | MSEKIRVLLYYKYVSIENAEEYAAKHLEFCKSIGLKGRILIADEGINGTVSGDYETTQKY | 60 |
| | | MSEKIRVLLYYKYVSIENA+EYAAKHLEFCKSIGLKGRILIADEGINGTVSGDYETTQKY | |
| Sbjct: | 1 | MSEKIRVLLYYKYVSIENAQEYAAKHLEFCKSIGLKGRILIADEGINGTVSGDYETTQKY | 60 |
| Query: | 61 | MDWVHSDERFADLWFKIDEENQQAFRKMFVRYKKEIVHLGLEDNNFDSDINPLETTGEYL | 120 |
| | | MDWVHSDERFADLWFKIDEENQQAFRKMFVRYKKEIVHLGLEDNNFDSDINPLETTGEYL | |
| Sbjct: | 61 | MDWVHSDERFADLWFKIDEENQQAFRKMFVRYKKEIVHLGLEDNNFDSDINPLETTGEYL | 120 |
| Query: | 121 | NPKQFKEALLDEDTVVLDTRNDYEYDLGHFRGAIRPDIRNFRELPQWVRDNKDKFMEKRV | 180 |
| | | NPKQFKEALLDEDTVVLDTRNDYEYDLGHFRGAIRPDIRNFRELPQWVRDNKDKFMEKRV | |
| Sbjct: | 121 | NPKQFKEALLDEDTVVLDTRNDYEYDLGHFRGAIRPDIRNFRELPQWVRDNKDKFMEKRV | 180 |
| Query: | 181 | VVYCTGGVRCEKFSGWMVREGFKDVGQLHGGIATYGKDPEVQGELWDGAMYVFDDRISVP | 240 |
| | | VVYCTGGVRCEKFSGWMVREGFKDVGQLHGGIATYGKDPEVQGELWDGAMYVFDDRISVP | |
| Sbjct: | 181 | VVYCTGGVRCEKFSGWMVREGFKDVGQLHGGIATYGKDPEVQGELWDGAMYVFDDRISVP | 240 |
| Query: | 241 | INHVNPTVISKDYFDGTPCERYVNCANPFCNKQIFASEENEAKYVRGCSPECRAHERNRY | 300 |
| | | INHVNPTVISKDYFDGTPCERYVNCANPFCNKQIFASEENE KYVRGCSPECRAHERNRY | |
| Sbjct: | 241 | INHVNPTVISKDYFDGTPCERYVNCANPFCNKQIFASEENETKYVRGCSPECRAHERNRY | 300 |
| Query: | 301 | VQENGLSRQEWAERLEAIGESLPQ | 324 |
| | | VQENGLSRQEWAERLEAIGESLP+ | |
| Sbjct: | 301 | VQENGLSRQEWAERLEAIGESLPE | 324 |

[11422] Based on this analysis, it was predicted that this protein and its epitopes, could be useful antigens for vaccines or diagnostics.

### EXAMPLE 2085

[11423] A DNA sequence (GBSx2200) was identified in S. agalactiae <SEQ ID 6455> which encodes the amino acid sequence <SEQ ID 6456>. Analysis of this protein sequence reveals the following:

```
Possible site: 57
>>> Seems to have an uncleavable N-term signal seq
----- Final Results -----
                              bacterial membrane --- Certainty = 0.0000(Not Clear) < succ>
                                bacterial outside --- Certainty = 0.0000(Not Clear) < succ>
                            bacterial cytoplasm --- Certainty = 0.0000(Not Clear) < succ>
```

[11424] The protein has homology with the following sequences in the GENPEPT database.

| >GP: AAC83954 GB: L47648 putative [Bacillus subtilis] | | | |
|---|---|---|---|
| Identities = 54/192 (28%), Positives = 89/192 (46%), Gaps = 14/192 (7%) | | | |
| Query: | 5 | QTIIIGAGAAGIGFGSAMQRLGLTNFLIIEKGHIGESFLRWPRTTQFITPSFTTNGFGFP | 64 |
| | | + IIIG G G+ ++++G+ + L+IEKG++ S +P F + S | |
| Sbjct: | 5 | KAIIIGGGPCGLSAAIHLKQIGI-DALVIEKGNVVNSIYNYPTHQTFFSSSEKLE----- | 58 |
| Query: | 65 | DLNAVIPDTSPAFSFEKEHLSGVEYARYLQLVAAHYNLPIQNETSVLSIDK-RDSLFVIK | 123 |
| | | I D AF E ++ Y + V N+ + V + K +++ FVI+ | |
| Sbjct: | 59 | -----IGDV--AFITENRKPVRIQALSYYREVVKRKNIRVNAFEMVRKVTKTQNNTFVIE | 111 |
| Query: | 124 | TSKGDFSADYLIMATGEFQNPNTIDIKGADLGMHYGQVDNFHIKSDNPFIIIGGNESACD | 183 |
| | | TSK ++ Y I+ATG + +PN + + G DL + H D ++IGG S+ D | |
| Sbjct: | 112 | TSKETYTTPYCIIATGYYDHPNYMGVPGEDLPKVFHYFKEGHPYFDKDVVVIGGKNSSVD | 171 |
| Query: | 184 | ALTHLVYLGNQV | 195 |
| | | A LV G +V | |
| Sbjct: | 172 | AALELVKSGARV | 183 |

[11425] No corresponding DNA sequence was identified in S. pyogenes.

[11426] Based on this analysis, it was predicted that this protein and its epitopes, could be useful antigens for vaccines or diagnostics.

[11427] A related GBS gene <SEQ ID 8973> and protein <SEQ ID 8974> were also identified. Analysis of this protein sequence reveals the following:

| Lipop Possible site: −1 Crend: 2 | | | |
|---|---|---|---|
| McG: Discrim Score: 5.05 | | | |
| GvH: Signal Score (−7.5): −3.14 | | | |
| Possible site: 57 | | | |
| >>> Seems to have an uncleavable N-term signal seq | | | |
| ALOM program count: 0 value: 0.26 threshold: 0.0 | | | |
| | PERIPHERAL | Likelihood = 0.26 | 6 |

```
modified ALOM score: −0.55
*** Reasoning Step: 3
----- Final Results -----
                              bacterial membrane --- Certainty = 0.0000(Not Clear) < succ>
                                bacterial outside --- Certainty = 0.0000(Not Clear) < succ>
                            bacterial cytoplasm --- Certainty = 0.0000(Not Clear) < succ>
```

[11428] The protein has homology with the following sequences in the databases:

[chemical structure]

[11429] SEQ ID 8974 (GBS284) was expressed in E. coli as a His-fusion product. SDS-PAGE analysis of total cell extract is shown in FIG. 52 (lane 10; MW 42.7 kDa). It was also expressed in E. coli as a GST-fusion product. SDS-PAGE analysis of total cell extract is shown in FIG. 58 (lane 9; MW 67.6 kDa).

[11430] GBS284-GST was purified as shown in FIG. 225, lane 7.

### EXAMPLE 2086

[11431] A DNA sequence (GBSx2201) was identified in S. agalactiae <SEQ ID 6457> which encodes the amino acid sequence <SEQ ID 6458>. This protein is predicted to be NrgA-like protein. Analysis of this protein sequence reveals the following:

| Possible site: 24 | | | | |
|---|---|---|---|---|
| >>> Seems to have an uncleavable N-term signal seq | | | | |
| | INTEGRAL | Likelihood = −11.73 | Transmembrane | 7-23 (1-31) |
| | INTEGRAL | Likelihood = −6.42 | Transmembrane | 86-102 (82-108) |
| | INTEGRAL | Likelihood = −6.42 | Transmembrane | 324-340 (318-342) |
| | INTEGRAL | Likelihood = −5.26 | Transmembrane | 210-226 (207-229) |
| | INTEGRAL | Likelihood = −5.10 | Transmembrane | 113-129 (112-133) |
| | INTEGRAL | Likelihood = −1.49 | Transmembrane | 246-262 (246-263) |
| | INTEGRAL | Likelihood = −1.17 | Transmembrane | 183-199 (183-199) |
| | INTEGRAL | Likelihood = −0.43 | Transmembrane | 41-57 (41-57) |
| | INTEGRAL | Likelihood = −0.00 | Transmembrane | 265-281 (265-282) |

```
----- Final Results -----
                              bacterial membrane --- Certainty = 0.5692(Affirmative) < succ>
                                bacterial outside --- Certainty = 0.0000(Not Clear) < succ>
                            bacterial cytoplasm --- Certainty = 0.0000(Not Clear) < succ>
```

[11432] A related GBS nucleic acid sequence <SEQ ID 9997> which encodes amino acid sequence <SEQ ID 9998> was also identified.

[11433] The protein has homology with the following sequences in the GENPEPT database.

| >GP: CAB15668 GB: Z99122 ammonium transporter [Bacillus subtilis] | | | |
|---|---|---|---|
| Identities = 105/378 (27%), Positives = 181/378 (47%), Gaps = 41/378 (10%) | | | |
| Query: | 3 | VKKGLFVFLLLCILSMWLMIFGVAFYYFGSLH-QSLTSRIIYQFVLTVLLTTTAWFMGAY | 61 |
| | | ++ G VF+ C L +WLM G+A +Y G + +++ S ++ F ++ + + W + Y | |
| Sbjct: | 1 | MQMGDTVFMFFCALLVWLMTPGLALFYGGMVKSKNVLSTAMHSFS-SIAIVSIVWVLFGY | 59 |
| Query: | 62 | FLAFEGHFKTVFQFQEADGKQI--------------VNCLFQLCFALYAVVMLIGSIIDR | 107 |
| | | LAF + + A K + + +FQ+ FA+ ++ G+ +R | |
| Sbjct: | 60 | TLAFAPGNSIIGGLEWAGLKGVGFDPGDYSDTIPHSLFMMFQMTFAVLTTAIISGAFAER | 119 |
| Query: | 108 | VQTKRLLLAVVSWLFLVYTPLAYLIWNSEGVFAKMGVLDFSGGMIVHLSAGLSSYILAHV | 167 |
| | | ++ LL V W LVYTP+A+ +W G ++G LDF+GG +VH+S+G++ +LA V | |
| Sbjct: | 120 | MRFGAFLLFSVLWASLVYTPVAHWVWGG-GWIGQLGALDFAGGNVVHISSGVAGLVLAIV | 178 |
| Query: | 168 | IGK-----SEHQHNKVKNDSLFLGMILITFGWFGFNMGPVGEWNSQAIMILLNTIFAIIG | 222 |
| | | +GK + HN + FLG LI FGWFGFN+G + A+ +NT A | |
| Sbjct: | 179 | LGKRKDGTASSPHNLIYT---FLGGALIWFGWFGFNVGSALTLDGVAMYAFINTNTAAAA | 235 |
| Query: | 223 | GGLAWTLAAKWNGEEEKTGSLLNGIIVGLVTSTAGVGYLLTWQLLAVTFFASLFTYFVTD | 282 |
| | | G W L ++ ++G I GLV T G++ + + + ++ | |
| Sbjct: | 236 | GIAGWILVEWIINKKPTMLGAVSGAIAGLVAITPAAGFVTPFASIIIGIIGGAVCFWGVF | 295 |
| Query: | 283 | YVAKAFAIDDVVSSFGMNGIGGLLGSLGVGLFKLSHMP----------------VQLLAL | 326 |
| | | + K F DD + +FG++GIGG G + GLF + + Q++A+ | |
| Sbjct: | 296 | SLKKKFGYDDALDAFGLHGIGGTWGGIATGLFATTSVNSAGADGLFYGDASLIWKQIVAI | 355 |
| Query: | 327 | ATTILLSIIMTYIISKAI | 344 |
| | | A T + I+T++I K + | |
| Sbjct: | 356 | AATYVFVFIVTFVIIKIV | 373 |

[11434] No corresponding DNA sequence was identified in S. pyogenes.

[11435] A related GBS gene <SEQ ID 8975> and protein <SEQ ID 8976> were also identified. Analysis of this protein sequence reveals the following:

| Lipop: Possible site: −1 Crend: 4 | | | | |
|---|---|---|---|---|
| McG: Discrim Score: 17.19 | | | | |
| GVH: Signal Score (−7.5): −4.07 | | | | |
| Possible site: 24 | | | | |
| >>> Seems to have an uncleavable N-term signal seq | | | | |
| ALOM program count: 9 value: −11.73 threshold: 0.0 | | | | |
| | INTEGRAL | Likelihood = −11.73 | Transmembrane | 7-23 (1-31) |
| | INTEGRAL | Likelihood = −6.42 | Transmembrane | 86-102 (82-108) |
| | INTEGRAL | Likelihood = −6.42 | Transmembrane | 324-340 (318-342) |
| | INTEGRAL | Likelihood = −5.26 | Transmembrane | 210-226 (207-229) |
| | INTEGRAL | Likelihood = −5.10 | Transmembrane | 113-129 (112-133) |
| | INTEGRAL | Likelihood = −1.49 | Transmembrane | 246-262 (246-263) |
| | INTEGRAL | Likelihood = −1.17 | Transmembrane | 183-199 (183-199) |
| | INTEGRAL | Likelihood = −0.43 | Transmembrane | 41-57 (41-57) |
| | INTEGRAL | Likelihood = −0.00 | Transmembrane | 265-281 (265-282) |
| | PERIPHERAL | Likelihood = 0.26 | 152 | |

```
modified ALOM score: 2.85
*** Reasoning Step: 3
----- Final Results -----
                              bacterial membrane --- Certainty = 0.5692(Affirmative) < succ>
                                bacterial outside --- Certainty = 0.0000(Not Clear) < succ>
                            bacterial cytoplasm --- Certainty = 0.0000(Not Clear) < succ>
```

[11436] The protein has homology with the following sequences in the databases:

[chemical structure]

[11437] Based on this analysis, it was predicted that these proteins and their epitopes could be useful antigens for vaccines or diagnostics.

### EXAMPLE 2087

[11438] A DNA sequence (GBSx2202) was identified in S. agalactiae <SEQ ID 6459> which encodes the amino acid sequence <SEQ ID 6460>. This protein is predicted to be dUTPase (dut). Analysis of this protein sequence reveals the following:

```
Possible site: 51
>>> Seems to have no N-terminal signal sequence
----- Final Results -----
                            bacterial cytoplasm --- Certainty = 0.2731(Affirmative) < succ>
                              bacterial membrane --- Certainty = 0.0000(Not Clear) < succ>
                                bacterial outside --- Certainty = 0.0000(Not Clear) < succ>
```

[11439] A related GBS nucleic acid sequence <SEQ ID 9471> which encodes amino acid sequence <SEQ ID 9472> was also identified.

[11440] The protein has homology with the following sequences in the GENPEPT database.

| >GP: CAA72644 GB: Y11901 dUTPase [Lactococcus lactis] | | | |
|---|---|---|---|
| Identities = 67/144 (46%), Positives = 90/144 (61%), Gaps = 8/144 (5%) | | | |
| Query: | 40 | RGFELVSQFSNKELLPKRETAHAAGYDLKVAKKTVIEPGEITLVPTGIKAYMQPGEVLYL | 99 |
| | | RGF+ + +P+R T H+AGYD+ ++ I+P EI +V TG+ + EVL L | |
| Sbjct: | 3 | RGFK---KLDGNATIPERATKHSAGYDISASETVTIQPDEIKMVSTGLAVQLGDDEVLKL | 59 |
| Query: | 100 | YDRSSNPRKKGIVLINSVGVIDGDYYNNQVNEGHIFAQMQNITDQAVILEEGERIVQAVF | 159 |
| | | YDRSSNP K+GI LINSVG+ID DYY + NI+ + V + +G+RI+Q VF | |
| Sbjct: | 60 | YDRSSNPVKRGIALINSVGIIDSDYYPQEFK-----GLFMNISKEPVTISKGQRIMQGVF | 114 |
| Query: | 160 | APFLLADDDQATGMRTGGFGSTGK | 183 |
| | | +L DDD A G RTGGFGSTG+ | |
| Sbjct: | 115 | VKYLTIDDDNANGKRTGGFGSTGE | 138 |

[11441] A related DNA sequence was identified in S. pyogenes <SEQ ID 6461> which encodes the amino acid sequence <SEQ ID 6462>. Analysis of this protein sequence reveals the following:

```
Possible site: 37
>>> Seems to have no N-terminal signal sequence
----- Final Results -----
                            bacterial cytoplasm --- Certainty = 0.2519(Affirmative) < succ>
                              bacterial membrane --- Certainty = 0.0000(Not Clear) < succ>
                                bacterial outside --- Certainty = 0.0000(Not Clear) < succ>
```

[11442] An alignment of the GAS and GBS proteins is shown below.

| Identities = 115/148 (77%), Positives = 125/148 (83%) | | | |
|---|---|---|---|
| Query: | 36 | MSKVRGFELVSQFSNKELLPKRETAHAAGYDLKVAKKTVIEPGEITLVPTGIKAYMQPGE | 95 |
| | | M+K+RGFELVS F+N +LLPKRET HAAGYDL VA+ I PGEI LVPTG+KAYMQ GE | |
| Sbjct: | 1 | MTKIRGFELVSSFTNPDLLPKRETTHAAGYDLSVAEAVTIAPGEIKLVPTGVKAYMQDGE | 60 |
| Query: | 96 | VLYLYDRSSNPRKKGIVLINSVGVIDGDYYNNQVNEGHIFAQMQNITDQAVILEEGERIV | 155 |
| | | VLYLYDRSSNPRKKGI+LINSVGVID DYY N+ NEGHIFAQMQNITD V L GERIV | |
| Sbjct: | 61 | VLYLYDRSSNPRKKGIILINSVGVIDADYYGNEANEGHIFAQMQNITDHPVTLAVGERIV | 120 |
| Query: | 156 | QAVFAPFLLADDDQATGMRTGGFGSTGK | 183 |
| | | Q VF PFL+AD DQA G RTGGFGSTG+ | |
| Sbjct: | 121 | QGVFMPFLIADGDQARGERTGGFGSTGQ | 148 |

[11443] Based on this analysis, it was predicted that this protein and its epitopes, could be useful antigens for vaccines or diagnostics.

### EXAMPLE 2088

[11444] A DNA sequence (GBSx2203) was identified in S. agalactiae <SEQ ID 6463> which encodes the amino acid sequence <SEQ ID 6464>. This protein is predicted to be RadA homolog (radA). Analysis of this protein sequence reveals the following:

```
Possible site: 34
>>> Seems to have no N-terminal signal sequence
----- Final Results -----
                            bacterial cytoplasm --- Certainty = 0.2628(Affirmative) < succ>
                              bacterial membrane --- Certainty = 0.0000(Not Clear) < succ>
                                bacterial outside --- Certainty = 0.0000(Not Clear) < succ>
```

[11445] The protein has homology with the following sequences in the GENPEPT database.

| >GP: CAB11863 GB: Z99104 DNA repair protein homolog [Bacillus subtilis] | | | |
|---|---|---|---|
| Identities = 285/453 (62%), Positives = 358/453 (78%), Gaps = 4/453 (0%) | | | |
| Query: | 1 | MAKKKSVFTCQECGYQSPKYLGRCPNCSAWSSFVEEVEVQEVKNARVSLNGEKSRPTKLK | 60 |
| | | MAK KS F CQ CGY+SPK++G+CP C AW++ VEE+ + N R + + K | |
| Sbjct: | 1 | MAKTKSKFICQSCGYESPKWMGKCPGCGAWNTMVEEMIKKAPANRRAAFSHSVQTVQKPS | 60 |
| Query: | 61 | DVSSINYS---RTKTDMDEFNRVLGGGVVPGSLVLIGGDPGIGKSTLLLQVSTQLA-NKG | 116 |
| | | ++SI S R KT + EFNRVLGGGVV GSLVLIGGDPGIGKSTLLLQVS QL+ + | |
| Sbjct: | 61 | PITSIETSEEPRVKTQLGEFNRVLGGGVVKGSLVLIGGDPGIGKSTLLLQVSAQLSGSSN | 120 |
| Query: | 117 | TVLYVSGEESAEQIKLRSERLGDIDNEFYLYAETNMQSIRSEIEKIKPDFLIIDSIQTIM | 176 |
| | | +VLY+SGEES +Q KLR++RLG + ++ +ET+M+ I S I+++ P F+++DSIQT+ | |
| Sbjct: | 121 | SVLYISGEESVKQTKLRADRLGINNPSLHVLSETDMEYISSAIQEMNPSFVVVDSIQTVY | 180 |
| Query: | 177 | SPEVSSVQGSVSQVREVTAELMQLAKTNNIATFIVGHVTKEGTLAGPRMLEHMVDTVLYF | 236 |
| | | +++S GSVSQVRE TAELM++AKT I FIVGHVTKEG++AGPR+LEHMVDTVLYF | |
| Sbjct: | 181 | QSDITSAPGSVSQVRECTAELMKIAKTKGIPIFIVGHVTKEGSIAGPRLLEHMVDTVLYF | 240 |
| Query: | 237 | EGERHHTFRILRAVKNRFGSTNEIGIFEMQSGGLVEVLNPSQVFLEERLDGATGSAIVVT | 296 |
| | | EGERHHTFRILRAVKNRFGSTNE+GIFEM+ GL EVLNPS++FLEER G+ GS+I + | |
| Sbjct: | 241 | EGERHHTFRILRAVKNRFGSTNEMGIFEMREEGLTEVLNPSEIFLEERSAGSAGSSITAS | 300 |
| Query: | 297 | MEGTRPILAEVQALVTPTVFGNAKRTTTGLDFNRVSLIMAVLEKRCGLLLQNQDAYLKSA | 356 |
| | | MEGTRPIL E+QAL++PT FGN +R TG+D NRVSL+MAVLEKR GLLLQNQDAYLK A | |
| Sbjct: | 301 | MEGTRPILVEIQALISPTSFGNPRRMATGIDHNRVSLLMAVLEKRVGLLLQNQDAYLKVA | 360 |
| Query: | 357 | GGVKLDEPAIDLAVAVAIASSYKEKPTNPQESFIGEIGLTGEIRRVTRIEQRINEASKLG | 416 |
| | | GGVKLDEPAIDLA+ ++IASS+++ P NP + FIGE+GLTGE+RRV+RIEQR+ EA+KLG | |
| Sbjct: | 361 | GGVKLDEPAIDLAIVISIASSFRDTPPNPADCFIGEVGLTGEVRRVSRIEQRVKEAAKLG | 420 |
| Query: | 417 | FTKIYAPKNSLAGIEIPKGIDVIGVTTVSQVLK | 449 |
| | | F ++ P +L G PKGI+VIGV V++ L+ | |
| Sbjct: | 421 | FKRMIIPAANLDGWTKPKGIEVIGVANVAEALR | 453 |

[11446] A related DNA sequence was identified in S. pyogenes <SEQ ID 6465> which encodes the amino acid sequence <SEQ ID 6466>. Analysis of this protein sequence reveals the following:

```
Possible site: 34
>>> Seems to have no N-terminal signal sequence
----- Final Results -----
                            bacterial cytoplasm --- Certainty = 0.2191(Affirmative) < succ>
                              bacterial membrane --- Certainty = 0.0000(Not Clear) < succ>
                                bacterial outside --- Certainty = 0.0000(Not Clear) < succ>
```

[11447] An alignment of the GAS and GBS proteins is shown below.

| Identities = 416/453 (91%), Positives = 441/453 (96%) | | | |
|---|---|---|---|
| Query: | 1 | MAKKKSVFTCQECGYQSPKYLGRCPNCSAWSSFVEEVEVQEVKNARVSLNGEKSRPTKLK | 60 |
| | | MAKKK+ F CQECGYQSPKYLGRCPNCSAWSSFVEEVEV+EVKNARVSL GEKSRP KLK | |
| Sbjct: | 1 | MAKKKATFICQECGYQSPKYLGRCPNCSAWSSFVEEVEVKEVKNARVSLAGEKSRPVKLK | 60 |
| Query: | 61 | DVSSINYSRTKTDMDEFNRVLGGGVVPGSLVLIGGDPGIGKSTLLLQVSTQLANKGTVLY | 120 |
| | | DV +I+Y RT+TDM EFNRVLGGGVVPGSL+LIGGDPGIGKSTLLLQVSTQLANKGTVLY | |
| Sbjct: | 61 | DVDNISYHRTQTDMSEFNRVLGGGVVPGSLILIGGDPGIGKSTLLLQVSTQLANKGTVLY | 120 |
| Query: | 121 | VSGEESAEQIKLRSERLGDIDNEFYLYAETNMQSIRSEIEKIKPDFLIIDSIQTIMSPEV | 180 |
| | | VSGEESAEQIKLRSERLGDIDNEFYLYAETNMQ+IR+EIE IKPDFLIIDSIQTIMSP++ | |
| Sbjct: | 121 | VSGEESAEQIKLRSERLGDIDNEFYLYAETNMQAIRTEIENIKPDFLIIDSIQTIMSPDI | 180 |
| Query: | 181 | SSVQGSVSQVREVTAELMQLAKTNNIATFIVGHVTKEGTLAGPRMLEHMVDTVLYFEGER | 240 |
| | | + VQGSVSQVREVTAELMQLAKTNNIATFIVGHVTKEGTLAGPRMLEHMVDTVLYFEGER | |
| Sbjct: | 181 | TGVQGSVSQVREVTAELMQLAKTNNIATFIVGHVTKEGTLAGPRMLEHMVDTVLYFEGER | 240 |
| Query: | 241 | HHTFRILRAVKNRFGSTNEIGIFEMQSGGLVEVLNPSQVFLEERLDGATGSAIVVTMEGT | 300 |
| | | HHTFRILRAVKNRFGSTNEIGIFEMQSGGLVEVLNPSQVFLEERLDGATGSA+VVTMEG+ | |
| Sbjct: | 241 | HHTFRILRAVKNRFGSTNEIGIFEMQSGGLVEVLNPSQVFLEERLDGATGSAVVVTMEGS | 300 |
| Query: | 301 | RPILAEVQALVTPTVFGNAKRTTTGLDFNRVSLIMAVLEKRCGLLLQNQDAYLKSAGGVK | 360 |
| | | RPILAEVQ+LVTPTVFGNA+RTTTGLDFNRVSLIMAVLEKRCGLLLQNQDAYLKSAGGVK | |
| Sbjct: | 301 | RPILAEVQSLVTPTVFGNARRTTTGLDFNRVSLIMAVLEKRCGLLLQNQDAYLKSAGGVK | 360 |
| Query: | 361 | LDEPAIDLAVAVAIASSYKEKPTNPQESFIGEIGLTGEIRRVTRIEQRINEASKLGFTKI | 420 |
| | | LDEPAIDLAVAVAIASSYKEKPT+PQE+F+GEIGLTGEIRRVTRIEQRINEA+KLGFTK+ | |
| Sbjct: | 361 | LDEPAIDLAVAVAIASSYKEKPTSPQEAFLGEIGLTGEIRRVTRIEQRINEAAKLGFTKV | 420 |
| Query: | 421 | YAPKNSLAGIEIPKGIDVIGVTTVSQVLKAVFS | 453 |
| | | YAPKN+L GI+IP+GI+V+GVTTV QVL AVFS | |
| Sbjct: | 421 | YAPKNALQGIDIPQGIEVVGVTTVGQVLNAVFS | 453 |

[11448] Based on this analysis, it was predicted that this protein and its epitopes, could be useful antigens for vaccines or diagnostics.

### EXAMPLE 2089

[11449] A DNA sequence (GBSx2204) was identified in S. agalactiae <SEQ ID 6467> which encodes the amino acid sequence <SEQ ID 6468>. Analysis of this protein sequence reveals the following:

```
Possible site: 49
>>> Seems to have no N-terminal signal sequence
----- Final Results -----
                            bacterial cytoplasm --- Certainty = 0.3488(Affirmative) < succ>
                              bacterial membrane --- Certainty = 0.0000(Not Clear) < succ>
                                bacterial outside --- Certainty = 0.0000(Not Clear) < succ>
```

[11450] The protein has homology with the following sequences in the GENPEPT database.

| >GP: CAA97750 GB: Z73419 hypothetical protein Rv1284 [Mycobacterium | | | |
|---|---|---|---|
| tuberculosis] | | | |
| Identities = 69/162 (42%), Positives = 100/162 (61%), Gaps = 2/162 (1%) | | | |
| Query: | 3 | TYFDNFLKTNQAYADLHGTAHLPIKPKTKVAIVTCMDSRLHVAQALGLALGDAHILRNAG | 62 |
| | | T D++L N YA LP+ P AIV CMD+RL V + LG+ G+AH++RNAG | |
| Sbjct: | 2 | TVTDDYLANNVDYASGF-KGPLPMPPSKHIAIVACMDARLDVYRMLGIKEGEAHVIRNAG | 60 |
| Query: | 63 | GRVTDDVLRSLVISQQQLGTREIVVLHHTDCGAQTFTNEAFAAQLQRDLGVDMHGHDFLP | 122 |
| | | VTDDV+RSL ISQ+ LGTREI++LHHTDCG TFT++ F +Q + G+ | |
| Sbjct: | 61 | CVVTDDVIRSLAISQRLLGTREIILLHNTDCGMLTFTDDDFKRAIQDETGIRPTWSP-ES | 119 |
| Query: | 123 | FNDIEESVREDVAKLHASPLIPDDVVISGAIYDVDTGRMVEV | 164 |
| | | + D E VR+ + ++ +P + + G ++DV TG++ EV | |
| Sbjct: | 120 | YPDAVEDVRQSLRRIEVNPFVTKHTSLRGFVFDVATGKLNEV | 161 |

[11451] There is also homology to SEQ ID 6470:

| Identities = 126/164 (76%), Positives = 146/164 (88%) | | | |
|---|---|---|---|
| Query: | 1 | MTTYFDNFLKTNQAYADLHGTAHLPIKPKTKVAIVTCMDSRLHVAQALGLALGDAHILRN | 60 |
| | | + +YF++F+ NQAY LHGTAHLP+KPKTKVAIVTCMDSRLHVAQALGLALGDAHILRN | |
| Sbjct: | 1 | LMSYFEHFMAANQAYVALHGTAHLPLKPKTKVAIVTCMDSRLHVAQALGLALGDAHILRN | 60 |
| Query: | 61 | AGGRVTDDVLRSLVISQQQLGTREIVVLHHTDCGAQTFTNEAFAAQLQRDLGVDMHGHDF | 120 |
| | | AGGRVT+D++RSLVISQQQ+GTREIVVLHHTDCGAQTFTNE FA + LGVD+ G DF | |
| Sbjct: | 61 | AGGRVTEDMIRSLVISQQQMGTREIVVLHHTDCGAQTFTNEGFAKHIHEHLGVDVSGQDF | 120 |
| Query: | 121 | LPFNDIEESVREDVAKLHASPLIPDDVVISGAIYDVDTGRMVEV | 164 |
| | | LPF D+E+SVRED+AK+ AS LI DDVVI+GA+YDVDTG+M +V | |
| Sbjct: | 121 | LPFQDVSDSVREDMAKIRASSLISDDVVINGAVYDVDTGKMTQV | 164 |

[11452] Based on this analysis, it was predicted that this protein and its epitopes, could be useful antigens for vaccines or diagnostics.

### EXAMPLE 2090

[11453] A DNA sequence (GBSx2205) was identified in S. agalactiae <SEQ ID 6471> which encodes the amino acid sequence <SEQ ID 6472>. Analysis of this protein sequence reveals the following:

```
Possible site: 19
>>> Seems to have no N-terminal signal sequence
----- Final Results -----
                            bacterial cytoplasm --- Certainty = 0.0536(Affirmative) < succ>
                              bacterial membrane --- Certainty = 0.0000(Not Clear) < succ>
                                bacterial outside --- Certainty = 0.0000(Not Clear) < succ>
```

[11454] A related GBS nucleic acid sequence <SEQ ID 9473> which encodes amino acid sequence <SEQ ID 9474> was also identified.

[11455] The protein has homology with the following sequences in the GENPEPT database.

| >GP: AAC73407 GB: AE000137 putative oxidoreductase [Escherichia coli K12] | | | |
|---|---|---|---|
| Identities = 199/438 (45%), Positives = 286/438 (64%) | | | |
| Query: | 1 | MKKYDVIVLGFGKAGKTLAAKLATQGKSVAMVEEDDKMYGGTCINIGCIPTKTLLVSASK | 60 |
| | | M KY +++GFGKAGKTLA LA G VA++E+ + MYGGTCINIGCIPTKTL+ A + | |
| Sbjct: | 10 | MNKYQAVIIGFGKAGKTLAVTLAKAGWRVALIEQSNAMYGGTCINIGCIPTKTLVHDAQQ | 69 |
| Query: | 61 | NHDFQEAMTTRNEVTSRLRAKNFAMLDNKDTVDVYNAKARFISNKVVELTGGADKQELTA | 120 |
| | | + DF A+ +NEV + LR KNF L + +DV + +A FI+N + + E+ | |
| Sbjct: | 70 | HTDFVRAIQRKNEVVNFLRNKNFHNLADMPNIDVIDGQAEFINNHSLRVHRPEGNLEIHG | 129 |
| Query: | 121 | DVIIINTGAKSVQLPIPGLADSQHVYDSTAIQELAHLPKRLGIIGGGNIGLEFATLYSEL | 180 |
| | | + I INTGA++V PIPG+ + VYDST + L LP LGI+GGG IG+EFA++++ | |
| Sbjct: | 130 | EKIFINTGAQTVVPPIPGITTTPGVYDSTGLLNLKELPGHLGILGGGYIGVEFASMFANF | 189 |
| Query: | 181 | GSKVTVIDSQSRIFAREEEELSEMAQDYLEEMGISFKLSADIKSVQNEDEDVVISFEDEK | 240 |
| | | GSKVT++++ S RE+ ++++ L + G+ L+A ++ + + + V + E + | |
| Sbjct: | 190 | GSKVTILEAASLFLPREDRDIADNIATILRDQGVDIILNAHVERISHHENQVQVHSEHAQ | 249 |
| Query: | 241 | LSFDAVLYATGRKPNTEGLALENTDIKLTERGAIAVDEYCQTSVENIFAVGDVNGGPQFT | 300 |
| | | L+ DA+L A+GR+P T L EN I + ERGAI VD+ T+ +NI+A+GDV GG QFT | |
| Sbjct: | 250 | LAVDALLIASGRQPATASLHPENAGIAVNERGAIVVDKRLHTTADNIWAMGDVTGGLQFT | 309 |
| Query: | 301 | YISLDDSRIVLNYLNCDKDYSLKNRGAVPTSTFTNPPLATVGLDEKTAKEKGYQVKSNSL | 360 |
| | | YISLDD RIV + L + S +R VP S F PPL+ VG+ E+ A+E G ++ +L | |
| Sbjct: | 310 | YISLDDYRIVRDELLGEGKRSTDDRKNVPYSVFMTPPLSRVGMTEEQARESGADIQVVTL | 369 |
| Query: | 361 | LVSAMPRAHVNNDLRGIFKVVVDTETNLILGARLFGAESHELINIITMAMDNKIPYTYFQ | 420 |
| | | V+A+PRA V ND RG+ K +VD +T +LGA L +SHE+INI+ M MD +PY+ + | |
| Sbjct: | 370 | PVAAIPRARVMNDTRGVLKAIVDNKTQRMLGASLLCVDSHEMINIVKMVMDAGLPYSILR | 429 |
| Query: | 421 | KQIFTHPTMVENFNDLFN | 438 |
| | | QIFTHP+M E+ NDLF+ | |
| Sbjct: | 430 | DQIFTHPSMSESLNDLFS | 447 |

[11456] There is also homology to SEQ ID 1820.

[11457] Based on this analysis, it was predicted that this protein and its epitopes, could be useful antigens for vaccines or diagnostics.

### EXAMPLE 2091

[11458] A DNA sequence (GBSx2206) was identified in S. agalactiae <SEQ ID 6473> which encodes the amino acid sequence <SEQ ID 6474>. This protein is predicted to be glutamyl-tRNA synthetase (gltX). Analysis of this protein sequence reveals the following:

```
Possible site: 43
>>> Seems to have no N-terminal signal sequence
----- Final Results -----
                            bacterial cytoplasm --- Certainty = 0.2245(Affirmative) < succ>
                              bacterial membrane --- Certainty = 0.0000(Not Clear) < succ>
                                bacterial outside --- Certainty = 0.0000(Not Clear) < succ>
```

[11459] A related GBS nucleic acid sequence <SEQ ID 9475> which encodes amino acid sequence <SEQ ID 9476> was also identified. A further related GBS nucleic acid sequence <SEQ ID 10953> which encodes amino acid sequence <SEQ ID 10954> was also identified.

[11460] The protein has homology with the following sequences in the GENPEPT database.

| >GP: AAC31971 GB: U49789 glutamyl-tRNA synthetase [Bacillus subtilis] | | | |
|---|---|---|---|
| Identities = 273/491 (55%), Positives = 353/491 (71%), Gaps = 19/491 (3%) | | | |
| Query: | 20 | LANKIRVRYAPSPTGLLHIGNARTALFNYLYARHHGGDFVIRIEDTDRKRHVEDGERSQL | 79 |
| | | + N++RVRYAPSPTG LHIGNARTALFNYL+AR+ GG F+IR+EDTD+KR++E GE+SQL | |
| Sbjct: | 1 | MGNEVRVRYAPSPTGHLHIGNARTALFNYLFARNQGGKFIIRVEDTDKKRNIEGGEQSQL | 60 |
| Query: | 80 | ENLRWLGMDWDESPET---HENYRQSERLELYQRYIDQLLAEGKAYKSYVTEEELAAERE | 136 |
| | | L+WLG+DWDES + + YRQSER ++Y+ Y ++LL +G AYK Y TEEEL ERE | |
| Sbjct: | 61 | NYLKWLGIDWDESVDVGGEYGPYRQSERNDIYKVYYEELLEKGLAYKCYCTEEELEKERE | 120 |
| Query: | 137 | RQELAGETPRYINEFIGMSETEKEAYIAEREAAGIIPTVRLAVNESGIYKWTDMVKGDIE | 196 |
| | | Q GE PRY + +++ E+E +IAE G P++R V E + + D+VKG+I | |
| Sbjct: | 121 | EQIARGEMPRYSGKHRDLTQEEQEKFIAE----GRKPSIRFRVPEGKVIAFNDIVKGEIS | 176 |
| Query: | 197 | FEGSNIGGDWVIQKKDGYPTYNFAVVIDDHDMQISHVIRGDDHIANTPKQLMVYEALGWE | 256 |
| | | FE IG D+VI KKDG PTYNFAV IDD+ M+++HV+RG+DHI+NTPKQ+M+Y+A GW+ | |
| Sbjct: | 177 | FESDGIG-DFVIVKKDGTPTYNFAVAIDDYLMKMTHVLRGEDHISNTPKQIMIYQAFGWD | 235 |
| Query: | 257 | APQFGHMTLIINSETGKKLSKRDTNTLQFIEDYRKKGYMSEAVFNFIALLGWNPGGEEEI | 316 |
| | | PQFGHMTLI+N E+ KKLSKRD + +QFIE Y++ GY+ EA+FNFI LLGW+P GEEE+ | |
| Sbjct: | 236 | IPQFGHMTLIVN-ESRKKLSKRDESIIQFIEQYKELGYLPEALFNFIGLLGWSPVGEEEL | 294 |
| Query: | 317 | FSREQLINLFDENRLSKSPAAFDQKKMDWMSNDYLKNADFESVFALCKPFLEEAGRL--- | 373 |
| | | F++EQ I +FD NRLSKSPA FD K+ W++N Y+K D + V L P L++AG++ | |
| Sbjct: | 295 | FTKEQFIEIFDVNRLSKSPALFDMHKLKWVNNQYVKKLDLDQVVELTLPHLQKAGKVGTE | 354 |
| Query: | 374 | -----TDKAEKLVELYQPQLKSADEIVPLTDLFFADFPELTEAEKEVMAAETVPTVLSAF | 428 |
| | | + KL+ LY QL EIV LTDLFF D E + K V+ E VP VLS F | |
| Sbjct: | 355 | LSAEEQEWVRKLISLYHEQLSYGAEIVELTDLFFTDEIEYNQEAKAVLEEEQVPEVLSTF | 414 |
| Query: | 429 | KEKLVSLSDEEFTRDTIFPQIKAVQKETGIKGKNLFMPIRIAVSGEMHGPELPDTIYLLG | 488 |
| | | KL L EEFT D I IKAVQKETG KGK LFMPIR+AV+G+ HGPELP +I L+G | |
| Sbjct: | 415 | AAKLEEL--EEFTPDNIKASIKAVQKETGHKGKKLFMPIRVAVTGQTHGPELPQSIELIG | 472 |
| Query: | 489 | KEKSVQHIDNM | 499 |
| | | KE ++Q + N+ | |
| Sbjct: | 473 | KETAIQRLKNI | 483 |

[11461] A related DNA sequence was identified in S. pyogenes <SEQ ID 6475> which encodes the amino acid sequence <SEQ ID 6476>. Analysis of this protein sequence reveals the following:

```
Possible site: 24
>>> Seems to have no N-terminal signal sequence
----- Final Results -----
                            bacterial cytoplasm --- Certainty = 0.1966(Affirmative) < succ>
                              bacterial membrane --- Certainty = 0.0000(Not Clear) < succ>
                                bacterial outside --- Certainty = 0.0000(Not Clear) < succ>
```

[11462] An alignment of the GAS and GBS proteins is shown below.

| Identities = 434/481 (90%), Positives = 459/481 (95%) | | | |
|---|---|---|---|
| Query: | 20 | LANKIRVRYAPSPTGLLHIGNARTALFNYLYARHHGGDFVIRIEDTDRKRHVEDGERSQL | 79 |
| | | ++ IRVRYAPSPTGLLHIGNARTALFNYLYAR HGG F+IRIEDTDRKRHVEDGERSQL | |
| Sbjct: | 1 | MSKPIRVRYAPSPTGLLHIGNARTALFNYLYARRHGGTFIIRIEDTDRKRHVEDGERSQL | 60 |
| Query: | 80 | ENLRWLGMDWDESPETHENYRQSERLELYQRYIDQLLAEGKAYKSYVTEEELAAERERQE | 139 |
| | | ENL+WLGMDWDESPETHENYRQSERL LYQ+YIDQLLAEGKAYKSYVTEEELAAERERQE | |
| Sbjct: | 61 | ENLKWLGMDWDESPETHENYRQSERLALYQQYIDQLLAEGKAYKSYVTEEELAAERERQE | 120 |
| Query: | 140 | LAGETPRYINEFIGMSETEKEAYIAEREAAGIIPTVRLAVNESGIYKWTDMVKGDIEFEG | 199 |
| | | AGETPRYINEFIGMS EK YIAEREAAGI+PTVRLAVNESGIYKWTDMVKGDIEFEG | |
| Sbjct: | 121 | AAGETPRYINEFIGMSADEKAKYIAEREAAGIVPTVRLAVNESGIYKWTDMVKGDIEFEG | 180 |
| Query: | 200 | SNIGGDWVIQKKDGYPTYNFAVVIDDHDMQISHVIRGDDHIANTPKQLMVYEALGWEAPQ | 259 |
| | | NIGGDWVIQKKDGYPTYNFAVV+DDHDMQISHVIRGDDHIANTPKQLMVYEALGWEAP+ | |
| Sbjct: | 181 | GNIGGDWVIQKKDGYPTYNFAVVVDDHDMQISHVIRGDDHIANTPKQLMVYEALGWEAPE | 240 |
| Query: | 260 | FGHMTLIINSETGKKLSKRDTNTLQFIEDYRKKGYMSEAVFNFIALLGWNPGGEEEIFSR | 319 |
| | | FGHMTLIINSETGKKLSKRDTNTLQFIEDYRKKGYM EAVFNFIALLGWNPGGEEEIFSR | |
| Sbjct: | 241 | FGHMTLIINSETGKKLSKRDTNTLQFIEDYRKKGYMPEAVFNFIALLGWNPGGEEEIFSR | 300 |
| Query: | 320 | EQLINLFDENRLSKSPAAFDQKKMDWMSNDYLKNADFESVFALCKPFLEEAGRLTDKAEK | 379 |
| | | EQLI LFDENRLSKSPAAFDQKKMDWMSN+YLK+ADFE+V+ALCKPFLEEAGRLT+KAEK | |
| Sbjct: | 301 | EQLIALFDENRLSKSPAAFDQKKMDWMSNEYLKHADFETVYALCKPFLEEAGRLTEKAEK | 360 |
| Query: | 380 | LVELYQPQLKSADEIVPLTDLFFADFPELTEAEKEVMAAETVPTVLSAFKEKLVSLSDEE | 439 |
| | | LVELY+PQLKSADEI+PLTDLFF+DFPELTEAEKEVMA ETV TVL AFK KL ++SDE+ | |
| Sbjct: | 361 | LVELYKPQLKSADEIIPLTDLFFSDFPELTEAEKEVMAGETVSTVLQAFKAKLEAMSDED | 420 |
| Query: | 440 | FTRDTIFPQIKAVQKETGIKGKNLFMPIRIAVSGEMHGPELPDTIYLLGKEKSVQHIDNML | 500 |
| | | F + IFPQIKAVQKETGIKGKNLFMPIRIAVSGEMHGPELP+TIYLLG++KS++HI NML | |
| Sbjct: | 421 | FKPENIFPQIKAVQKETGIKGKNLFMPIRIAVSGEMHGPELPNTIYLLGRDKSIEHIKNML | 481 |

[11463] Based on this analysis, it was predicted that this protein and its epitopes, could be useful antigens for vaccines or diagnostics.

### EXAMPLE 2092

[11464] A DNA sequence (GBSx2207) was identified in S. agalactiae <SEQ ID 6477> which encodes the amino acid sequence <SEQ ID 6478>. This protein is predicted to be d-ribose-binding protein precursor, fragment (rbsB). Analysis of this protein sequence reveals the following:

```
Possible site: 24
>>> May be a lipoprotein
----- Final Results -----
                              bacterial membrane --- Certainty = 0.0000(Not Clear) < succ>
                                bacterial outside --- Certainty = 0.0000(Not Clear) < succ>
                            bacterial cytoplasm --- Certainty = 0.0000(Not Clear) < succ>
```

[11465] The protein has homology with the following sequences in the GENPEPT database.

| >GP: CAB15613 GB: Z99122 ribose ABC transporter (ribose-binding | | | |
|---|---|---|---|
| protein) [Bacillus subtilis] | | | |
| Identities = 143/301 (47%), Positives = 205/301 (67%), Gaps = 1/301 (0%) | | | |
| Query: | 14 | MSIVLILGACGKTGLGNSSGNSTKNVTKKSAKDLKLGVSISTTNNPYFVAMKDGIDKYAS | 73 |
| | | +S++L L T K + K+ +G+S+ST NNP+FV++K GI+K A | |
| Sbjct: | 5 | VSVILTLSLFLLTACSLEPPQWAKPSNSGNKKEFTIGLSVSTLNNPFFVSLKKGIEKEAK | 64 |
| Query: | 74 | NKKISIKVADAQDDAARQADDVQNFISQNVDAILINPVDSKAIVTAIKSANNANIPVILM | 133 |
| | | + + + + DAQ+D+++Q DV++ I Q VDA+LINP DS AI TA++SAN +PV+ + | |
| Sbjct: | 65 | KRGMKVIIVDAQNDSSKQTSDVEDLIQQGVDALLINPTDSSAISTAVESANAVGVPVVTI | 124 |
| Query: | 134 | DRGSEGGKVLTTVASDNVAAGKMAADYAVKKLGKKAKAFELSGVPGASATVDRGKGFHSV | 193 |
| | | DR +E GKV T VASDNV G+MAA + KLGK AK EL GVPGASAT +RG GFH++ | |
| Sbjct: | 125 | DRSAEQGKVETLVASDNVKGGEMAAAFIADKLGKGAKVAELEGVPGASATRERGSGFHNI | 184 |
| Query: | 194 | AKSKLDILSSQSANFDRAKALNTTQNMIQGHKDVQIIFAQNDEMALGAAQAVKSAGLQNV | 253 |
| | | A KL +++ QSA+FDR K L +N++QGH D+Q +FA NDEMALGA +A+ S+G +++ | |
| Sbjct: | 185 | ADQKLQVVTKQSADFDRTKGLTVMENLLQGHPDIQAVFAHNDEMALGALEAINSSG-KDI | 243 |
| Query: | 254 | LIVGIDGQPDAHDAIKKGDISATIAQQPAKMGEIAIQAAIDYYKGKKVEKETISPIYLVTK | 314 |
| | | L++G DG DA +IK +SAT+AQQP +G++A +AA D GKKV+K +P+ L T+ | |
| Sbjct: | 244 | LVIGFDGNKDALASIKDRKLSATVAQQPELIGKLATEAADDILHGKKVQKTISAPLKLETQ | 304 |

[11466] No corresponding DNA sequence was identified in S. pyogenes.

[11467] SEQ ID 6478 (GBS203) was expressed in E. coli as a His-fusion product. SDS-PAGE analysis of total cell extract is shown in FIG. 52 (lane 12; MW 36.8 kDa).

[11468] GBS203-His was purified as shown in FIG. 208, lane 8.

[11469] Based on this analysis, it was predicted that this protein and its epitopes, could be useful antigens for vaccines or diagnostics.

### EXAMPLE 2093

[11470] A DNA sequence (GBSx2208) was identified in S. agalactiae <SEQ ID 6479> which encodes the amino acid sequence <SEQ ID 6480>. This protein is predicted to be galactoside ABC transporter, permease protein (rbsC). Analysis of this protein sequence reveals the following:

| Possible site: 14 | | | | |
|---|---|---|---|---|
| >>> Seems to have no N-terminal signal sequence | | | | |
| | INTEGRAL | Likelihood = −11.15 | Transmembrane | 63-79 (52-85) |
| | INTEGRAL | Likelihood = −3.66 | Transmembrane | 111-127 (110-128) |
| | INTEGRAL | Likelihood = −2.71 | Transmembrane | 168-184 (168-188) |
| | INTEGRAL | Likelihood = −2.44 | Transmembrane | 189-205 (188-205) |
| | INTEGRAL | Likelihood = −0.80 | Transmembrane | 17-33 (17-33) |

```
----- Final Results -----
                              bacterial membrane --- Certainty = 0.5458(Affirmative) < succ>
                                bacterial outside --- Certainty = 0.0000(Not Clear) < succ>
                            bacterial cytoplasm --- Certainty = 0.0000(Not Clear) < succ>
```

[11471] A related GBS nucleic acid sequence <SEQ ID 9287> which encodes amino acid sequence <SEQ ID 9288> was also identified.

[11472] The protein has homology with the following sequences in the GENPEPT database.

| 22 GP: CAB15612 GB: Z99122 ribose ABC transporter (permease) | | | |
|---|---|---|---|
| [Bacillus subtilis] | | | |
| Identities = 144/211 (68%), Positives = 182/211 (86%), Gaps = 1/211 (0%) | | | |
| Query: | 1 | MGMLNGLFISYGKLAPFIVTLATMTIFRGATLVYSNGNPITAGLSDSFLFQFLGQGYIVG | 60 |
| | | +GM+NGL I+ GK+APFI TLATMT+FRG TLVY++GNPIT GL ++ FQ G+GY +G | |
| Sbjct: | 113 | LGMINGLLITKGKMAPFIATLATMTVFRGLTLVYTDGNPIT-GLGTNYGFQMFGRGYFLG | 171 |
| Query: | 61 | IPFPVILMFLTFIILYILLHKTAFGKSVYALGGNEKAAYISGIKLNKVKIIIYTISGIMA | 120 |
| | | IP P I M L F+IL++LLHKT FG+ YA+GGNEKAA ISGIK+ +VK++IY+++G+++ | |
| Sbjct: | 172 | IPVPAITMVLAFVILWVLLHKTPFGRRTYAIGGNEKAALISGIKVTRVKVMIYSLAGLLS | 231 |
| Query: | 121 | SISGLIITSRLSSAQPTAGASYEMDAIAAVVLGGTSLSGGKGRIIGTLIGALIIGVLNNG | 180 |
| | | +++G I+TSRL SAQPTAG SYE+DAIAAVVLGGTSLSGG+GRI+GTLIG LIIG LNNG | |
| Sbjct: | 232 | ALAGAILTSRLHSAQPTAGESYELDAIAAVVLGGTSLSGGRGRIVGTLIGVLIIGTLNNG | 291 |
| Query: | 181 | LNIIGVSAFWQQVVKGIVILMAVLLDRFKVA | 211 |
| | | LN++GVS+F+Q VVKGIVIL+AVLLDR K A | |
| Sbjct: | 292 | LNLLGVSSFYQLVVKGIVILIAVLLDRKKSA | 322 |

[11473] A related GBS gene <SEQ ID 8977> and protein <SEQ ID 8978> were also identified.

[11474] Based on this analysis, it was predicted that this protein and its epitopes, could be useful antigens for vaccines or diagnostics.

### EXAMPLE 2094

[11475] A DNA sequence (GBSx2209) was identified in S. agalactiae <SEQ ID 6481> which encodes the amino acid sequence <SEQ ID 6482>. Analysis of this protein sequence reveals the following:

| Possible site: 35 | | | | |
|---|---|---|---|---|
| >>> Seems to have no N-terminal signal sequence | | | | |
| | INTEGRAL | Likelihood = −1.12 | Transmembrane | 75-91 (74-91) |
| | INTEGRAL | Likelihood = −0.64 | Transmembrane | 96-112 (96-112) |

```
----- Final Results -----
                              bacterial membrane --- Certainty = 0.1447(Affirmative) < succ>
                                bacterial outside --- Certainty = 0.0000(Not Clear) < succ>
                            bacterial cytoplasm --- Certainty = 0.0000(Not Clear) < succ>
```

[11476] The protein has no significant homology with any sequences in the GENPEPT database.

[11477] No corresponding DNA sequence was identified in S. pyogenes.

[11478] Based on this analysis, it was predicted that this protein and its epitopes, could be useful antigens for vaccines or diagnostics.

### EXAMPLE 2095

[11479] A DNA sequence (GBSx2210) was identified in S. agalactiae <SEQ ID 6483> which encodes the amino acid sequence <SEQ ID 6484>. This protein is predicted to be ribose transport ATP-binding protein rbsa (rbsA). Analysis of this protein sequence reveals the following:

| Possible site: 35 | | | | |
|---|---|---|---|---|
| >>> Seems to have no N-terminal signal sequence | | | | |
| | INTEGRAL | Likelihood = −0.00 | Transmembrane | 401-417 (401-417) |

```
----- Final Results -----
                              bacterial membrane --- Certainty = 0.1001(Affirmative) < succ>
                                bacterial outside --- Certainty = 0.0000(Not Clear) < succ>
                            bacterial cytoplasm --- Certainty = 0.0000(Not Clear) < succ>
```

[11480] The protein has homology with the following sequences in the GENPEPT database.

| >GP: CAB15611 GB: Z99122 ribose ABC transporter (ATP-binding protein) | | | |
|---|---|---|---|
| [Bacillus subtilis] | | | |
| Identities = 297/493 (60%), Positives = 375/493 (75%), Gaps = 1/493 (0%) | | | |
| Query: | 1 | MKIDMRNISKSFGTNKVLEKIDLELQSGQIHALMGENGAGKSTLMNILTGLFPASTGTIY | 60 |
| | | M+I+M++I K+FG N+VL + +L G++HALMGENGAGKSTLMNILTGL A G I | |
| Sbjct: | 1 | MQIEMKDIHKTFGKNQVLSGVSFQLMPGEVHALMGENGAGKSTLMNILTGLHKADKGQIS | 60 |
| Query: | 61 | IDGEERTFSNPQEAEEFGISFIHQEMNTWPEMTVLENLFLGREIKTTFGLLNQKLMRQKA | 120 |
| | | I+G E FSNP+EAE+ GI+FIHQE+N WPEMTVLENLF+G+EI + G+L + M+ A | |
| Sbjct: | 61 | INGNETYFSNPKEAEQHGIAFIHQELNIWPEMTVLENLFIGKEISSKLGVLQTRKMKALA | 120 |
| Query: | 121 | LETFKRLGVTIPLDIPIGNLSVGQQQMIEIAKSLLNQLSILVMDEPTAALTDRETENLFR | 180 |
| | | E F +L V++ LD G SVGQQQMIEIAK+L+ +++MDEPTAALT+RE LF | |
| Sbjct: | 121 | KEQFDKLSVSLSLDQEAGECSVGQQQMIEIAKALMTNAEVIIMDEPTAALTEREISKLFE | 180 |
| Query: | 181 | VIRGLKQEGVGVVYISHRMEEIFKITDFVTVMRDGVIVDTKETSLTNSDELVKKMVGRKL | 240 |
| | | VI LK+ GV +VYISHRMEEIF I D +T+MRDG VDT S T+ DE+VKKMVGR+L | |
| Sbjct: | 181 | VITALKKNGVSIVYISHRMEEIFAICDRITIMRDGKTVDTTNISETDFDEVVKKMVGREL | 240 |
| Query: | 241 | EDYYPEKHSEIGPVAFEVSNL-CGDNFEDVSFYVRKGEILGFSGLMGAGRTEVMRTIFGI | 299 |
| | | + YP++ +G FEV N +FEDVSFYVR GEI+G SGLMGAGRTE+MR +FG+ | |
| Sbjct: | 241 | TERYPKRTPSLGDKVFEVKNASVKGSFEDVSFYVRSGEIVGVSGLMGAGRTEMMRALFGV | 300 |
| Query: | 300 | DKKKSGKVKIDDQEITITTPSQAIKQGIGFLTENRKDEGLILDFNIKDNMTLPSTKDFSK | 359 |
| | | D+ +G++ I ++ I P +A+K+G+GF+TENRKDEGL+LD +I++N+ LP+ FS | |
| Sbjct: | 301 | DRLDTGEIWIAGKKTAIKNPQEAVKKGLGFITENRKDEGLLLDTSIRENIALPNLSSFSP | 360 |
| Query: | 360 | HGFFDEKTSTTFVQQLINRLYIKSGRPDLEVGNLSGGNQQKVVLAKWIGIAPKVLILDEP | 419 |
| | | G D K FV LI RL IK+ P+ +LSGGNQQKVV+AKWIGI PKVLILDEP | |
| Sbjct: | 361 | KGLIDHKREAEFVDLLIKRLTIKTASPETHARHLSGGNQQKVVIAKWIGIGPKVLILDEP | 420 |
| Query: | 420 | TRGVDVGAKREIYQLMNELADRGVPIVMVSSDLPEILGVSDRIMVMHEGRISGELSRKEA | 479 |
| | | TRGVDVGAKREIY LMNEL +RGV I+MVSS+LPEILG+SDRI+V+HEGRISGE+ +EA | |
| Sbjct: | 421 | TRGVDVGAKREIYTLMNELTERGVAIIMVSSELPEILGMSDRIIVVHEGRISGEIHAREA | 480 |
| Query: | 480 | DQEKVMQLATGGK | 492 |
| | | QE++M LATGG+ | |
| Sbjct: | 481 | TQERIMTLATGGR | 493 |

[11481] There is also homology to SEQ ID 4678.

[11482] SEQ ID 6484 (GBS407d) was expressed in E. coli as a GST-fusion product. SDS-PAGE analysis of total cell extract is shown in FIG. 147 (lane 24; MW 72 kDa). It was also expressed in E. coli as a His-fusion product. SDS-PAGE analysis of total cell extract is shown in FIG. 147 (lane 5 & 6; MW 47 kDa).

[11483] GBS407d-His was purified as shown in FIG. 235, lane 9-10.

[11484] Based on this analysis, it was predicted that this protein and its epitopes, could be useful antigens for vaccines or diagnostics.

### EXAMPLE 2096

[11485] A DNA sequence (GBSx2211) was identified in S. agalactiae <SEQ ID 6485> which encodes the amino acid sequence <SEQ ID 6486>. This protein is predicted to be high affinity ribose transport protein rbsd (rbsD). Analysis of this protein sequence reveals the following:

```
Possible site: 14
>>> Seems to have no N-terminal signal sequence
----- Final Results -----
                            bacterial cytoplasm --- Certainty = 0.2673(Affirmative) < succ>
                              bacterial membrane --- Certainty = 0.0000(Not Clear) < succ>
                                bacterial outside --- Certainty = 0.0000(Not Clear) < succ>
```

[11486] The protein has homology with the following sequences in the GENPEPT database.

| >GP: CAB15610 GB: Z99122 ribose ABC transporter (membrane protein) | | | |
|---|---|---|---|
| [Bacillus subtilis] | | | |
| Identities = 74/131 (56%), Positives = 95/131 (72%), Gaps = 1/131 (0%) | | | |
| Query: | 1 | MKKTGILNSHLAKLADDLGHTDRVCIGDLGLPVPNGIPKIDLSLTSGIPSFQEVLDIYLE | 60 |
| | | MKK GILNSHLAK+ DLGHTD++ I D GLPVP+G+ KIDLSL G+P+FQ+ + E | |
| Sbjct: | 1 | MKKHGILNSHLAKILADLGHTDKIVIADAGLPVPDGVLKIDLSLKPGLPAFQDTAAVLAE | 60 |
| Query: | 61 | NILVEKVILAEEIKEANPDQLSRLLAKLDNSVSIEYVSHNHLKQMTQDVKAVIRTGENTP | 120 |
| | | + VEKVI A EIK +N + ++ L L + IEY+SH K +T+D KAVIRTGE TP | |
| Sbjct: | 61 | EMAVEKVIAAAEIKASNQEN-AKFLENLFSEQEIEYLSHEEFKLLTKDAKAVIRTGEFTP | 119 |
| Query: | 121 | YSNIILQSGVI | 131 |
| | | Y+N ILQ+GV+ | |
| Sbjct: | 120 | YANCILQAGVL | 130 |

[11487] No corresponding DNA sequence was identified in S. pyogenes.

[11488] Based on this analysis, it was predicted that this protein and its epitopes, could be useful antigens for vaccines or diagnostics.

### EXAMPLE 2097

[11489] A DNA sequence (GBSx2212) was identified in S. agalactiae <SEQ ID 6487> which encodes the amino acid sequence <SEQ ID 6488>. This protein is predicted to be ribokinase (rbsK). Analysis of this protein sequence reveals the following:

```
Possible site: 47
>>> Seems to have an uncleavable N-term signal seq
----- Final Results -----
                              bacterial membrane --- Certainty = 0.0000(Not Clear) < succ>
                                bacterial outside --- Certainty = 0.0000(Not Clear) < succ>
                            bacterial cytoplasm --- Certainty = 0.0000(Not Clear) < succ>
```

[11490] The protein has homology with the following sequences in the GENPEPT database.

| >GP: CAB15609 GB: Z99122 ribokinase [Bacillus subtilis] | | | |
|---|---|---|---|
| Identities = 132/293 (45%), Positives = 177/293 (60%), Gaps = 4/293 (1%) | | | |
| Query: | 1 | MSNIVIIGSISMDLVMETNRIAKEGETVFGQRFSMVPGGKGANQAVAIGRLSQERDNITI | 60 |
| | | M NI +IGS SMDLV+ +++ K GETV G F VPGGKGANQAVA RL + + + | |
| Sbjct: | 1 | MRNICVIGSCSMDLVVTSDKRPKAGETVLGTSFQTVPGGKGANQAVAAARLGAQ---VFM | 57 |
| Query: | 61 | LGAIGEDSFGPILLDNLNKNHVTTDFVGTIP-SSSGVAQITLYNNDNRIIYCPGANGKVD | 119 |
| | | +G +G+D +G +L+NL N V TD++ + + SG A I L DN I+ GAN + | |
| Sbjct: | 58 | VGKVGDDHYGTAILNNLKANGVRTDYMEPVTHTESGTAHIVLAEGDNSIVVVKGANDDIT | 117 |
| Query: | 120 | TKKWSQEWSIIKEADLVVLQNEIPHQANMKIANFCKEHSIKLLYNPAPSRETDIEMLDKV | 179 |
| | | I++ D+V++Q EIP + ++ +C H I ++ NPAP+R E +D | |
| Sbjct: | 118 | PAYALNALEQIEKVDMVLIQQEIPEETVDEVCKYCHSHDIPIILNPAPARPLKQETIDHA | 177 |
| Query: | 180 | DYFTPNEHECQELFPNQKLEDILATYPEKLIVTLGTKGAIYSDGKESHLIPALETKAVDT | 239 |
| | | Y TPNEHE LFP + + LA YP KL +T G +G YS G + LIP+ + VDT | |
| Sbjct: | 178 | TYLTPNEHEASILFPELTISEALALYPAKLFITEGKQGVRYSAGSKEVLIPSFPVEPVDT | 237 |
| Query: | 240 | TGAGDTFNGAFGYAISKKFKIAKALRFATLAAHLSVQKFGAQGGMPTIKEMED | 292 |
| | | TGAGDTFN AF A+++ I ALRFA AA LSV FGAQGGMPT E+E+ | |
| Sbjct: | 238 | TGAGDTFNAAFAVALAEGKDIEAALRFANRAASLSVCSFGAQGGMPTRNEVEE | 290 |

[11491] No corresponding DNA sequence was identified in S. pyogenes.

[11492] Based on this analysis, it was predicted that this protein and its epitopes, could be useful antigens for vaccines or diagnostics.

### EXAMPLE 2098

[11493] A DNA sequence (GBSx2213) was identified in S. agalactiae <SEQ ID 6489> which encodes the amino acid sequence <SEQ ID 6490>. Analysis of this protein sequence reveals the following:

```
Possible site: 31
>>> Seems to have no N-terminal signal sequence
----- Final Results -----
                            bacterial cytoplasm --- Certainty = 0.2272(Affirmative) < succ>
                              bacterial membrane --- Certainty = 0.0000(Not Clear) < succ>
                                bacterial outside --- Certainty = 0.0000(Not Clear) < succ>
```

[11494] A related GBS nucleic acid sequence <SEQ ID 9477> which encodes amino acid sequence <SEQ ID 9478> was also identified.

[11495] The protein has homology with the following sequences in the GENPEPT database.

| >GP: CAB15608 GB: Z99122 transcriptional regulator (LacI family) | | | |
|---|---|---|---|
| [Bacillus subtilis] | | | |
| Identities = 141/327 (43%), Positives = 204/327 (62%), Gaps = 4/327 (1%) | | | |
| Query: | 13 | MSTIRQVAEKAGVSTSTVSRYISQNGYVSQKASQKIEQAIRELHYVPNFLAQSLKTKKNQ | 72 |
| | | M+TI+ VA AGVS +TVSR ++ NGYV ++ ++ A+ +L+Y PN +A+SL ++++ | |
| Sbjct: | 1 | MATIKDVAGAAGVSVATVSRNLNDNGYVHEETRTRVIAAMAKLNYYPNEVARSLYKRESR | 60 |
| Query: | 73 | LVGLLLPDISNPFFPRLARGVEEFLKEQGYRVMLGNTNNKSHLEEEYLNVLLQSNAAGII | 132 |
| | | L+GLLLPDI+NPFFP+LARG E+ L +GYR++ GN++ + E EYL Q++ AGII | |
| Sbjct: | 61 | LIGLLLPDITNPFFPQLARGAEDELNREGYRLIFGNSDEELKKELEYLQTFKQNHVAGII | 120 |
| Query: | 133 | --TTHDFTKNHPEIDIPVVVVDRVNQETQYGVFSDNKEGGKLAAQAIWTAGATNILLIRG | 190 |
| | | T + + + ++ PVV +DR E V SD G KLAAQAI + I L+RG | |
| Sbjct: | 121 | AATNYPDLEEYSGMNYPVVFLDR-TLEGAPSVSSDGYTGVKLAAQAIIHGKSQRITLLRG | 179 |
| Query: | 191 | PLDKADNLNQRFQGSQNYLLNKGACFAIEDSASFDFAEIQIEAKTLLDHHPDIDSIIAPS | 250 |
| | | P RF G+ L F + ++ASF + Q AK L +P D +IA + | |
| Sbjct: | 180 | PA-HLPTAQDRFNGALEILKQAEVDFQVIETASFSIKDAQSMAKELFASYPATDGVIASN | 238 |
| Query: | 251 | DIHAIAYLHEILNRGKRIPEDVQIIGYDDILMSQFIYPSLSTIHQSSYIMGQKAAELIFK | 310 |
| | | DI A A LHE L RGK +PED+QIIGYDDI S ++P LSTI Q +Y MG++AA+L+ | |
| Sbjct: | 239 | DIQAAAVLHEALRRGKNVPEDIQIIGYDDIPQSGLLFPPLSTIKQPAYDMGKEAAKLLLG | 298 |
| Query: | 311 | ITNQLPITNKRIKLPVHYVERETLRRK | 337 |
| | | I + P+ I++PV Y+ R+T R++ | |
| Sbjct: | 299 | IIKKQPLAETAIQMPVTYIGRKTTRKE | 325 |

[11496] A related DNA sequence was identified in S. pyogenes <SEQ ID 6491> which encodes the amino acid sequence <SEQ ID 6492>. Analysis of this protein sequence reveals the following:

```
Possible site: 35
>>> Seems to have no N-terminal signal sequence
----- Final Results -----
                            bacterial cytoplasm --- Certainty = 0.1657(Affirmative) < succ>
                              bacterial membrane --- Certainty = 0.0000(Not Clear) < succ>
                                bacterial outside --- Certainty = 0.0000(Not Clear) < succ>
```

[11497] An alignment of the GAS and GBS proteins is shown below.

| Identities = 232/328 (70%), Positives = 274/328 (82%) | | | |
|---|---|---|---|
| Query: | 10 | GVSMSTIRQVAEKAGVSTSTVSRYISQNGYVSQKASQKIEQAIRELHYVPNFLAQSLKTK | 69 |
| | | G +M TI+QVAE+AGVS STVSRYISQ GYVS A KI+ AI +LHY PN LAQSLKTK | |
| Sbjct: | 14 | GKAMVTIKQVAEEAGVSRSTVSRYISQKGYVSDDARHKIKAAIAKLHYTPNVLAQSLKTK | 73 |
| Query: | 70 | KNQLVGLLLPDISNPFFPRLARGVEEFLKEQGYRVMLGNTNNKSHLEEEYLNVLLQSNAA | 129 |
| | | KNQLVGLLLPDISNPFFPRLARG EE+LKE+GYRVMLGN ++ LEEEY++VLLQSNAA | |
| Sbjct: | 74 | KNQLVGLLLPDISNPFFPRLARGAEEYLKEKGYRVMLGNISDSEALEEEYVHVLLQSNAA | 133 |
| Query: | 130 | GIITTHDFTKNHPEIDIPVVVVDRVNQETQYGVFSDNKEGGKLAAQAIWTAGATNILLIR | 189 |
| | | GIITTHDFTK +P + IPVVVVDRV+QETQYGVFSDN+ GG LAAQ +W AGA +LLIR | |
| Sbjct: | 134 | GIITTHDFTKRYPTLAIPVVVVDRVDQETQYGVFSDNRAGGLLAAQTVWQAGAKEVLLIR | 193 |
| Query: | 190 | GPLDKADNLNQRFQGSQNYLLNKGACFAIEDSASFDFAEIQIEAKTLLDHHPDIDSIIAP | 249 |
| | | GPLD A+N+N+RF+ S +YL + + DS +FDF IQ+EA L +P IQSIIAP | |
| Sbjct: | 194 | GPLDNAENINERFEASFSYLQKQDVTMYVCDSQNFDFESIQLEASYNLKCYPTIDSIIAP | 253 |
| Query: | 250 | SDIHAIAYLHEILNRGKRIPEDVQIIGYDDILMSQFIYPSLSTIHQSSYIMGQKAAELIF | 309 |
| | | SDIHAIAY+HE+ ++GK+IP+DVQIIGYDDILMSQFIYPSLSTIHQSSY+MG+ AAEL++ | |
| Sbjct: | 254 | SDIHAIAYIHELHSQGKKIPQDVQIIGYDDILMSQFIYPSLSTIHQSSYLMGRYAAELVY | 313 |
| Query: | 310 | KITNQLPITNKRIKLPVHYVERETLRRK | 337 |
| | | I +QL + RIKLPVHYVERET+R++ | |
| Sbjct: | 314 | TIASQLTVKANRIKLPVHYVERETIRKR | 341 |

[11498] Based on this analysis, it was predicted that this protein and its epitopes, could be useful antigens for vaccines or diagnostics.

### EXAMPLE 2099

[11499] A DNA sequence (GBSx2214) was identified in S. agalactiae <SEQ ID 6493> which encodes the amino acid sequence <SEQ ID 6494>. Analysis of this protein sequence reveals the following:

| Possible site: 57 | | | | |
|---|---|---|---|---|
| >>> Seems to have no N-terminal signal sequence | | | | |
| | INTEGRAL | Likelihood = −13.80 | Transmembrane | 27-43 (24-51) |
| | INTEGRAL | Likelihood = −10.61 | Transmembrane | 337-353 (329-362) |
| | INTEGRAL | Likelihood = −9.18 | Transmembrane | 257-273 (249-276) |
| | INTEGRAL | Likelihood = −8.92 | Transmembrane | 302-318 (291-326) |

```
----- Final Results -----
                              bacterial membrane --- Certainty = 0.6519(Affirmative) < succ>
                                bacterial outside --- Certainty = 0.0000(Not Clear) < succ>
                            bacterial cytoplasm --- Certainty = 0.0000(Not Clear) < succ>
```

[11500] A related GBS nucleic acid sequence <SEQ ID 8979> which encodes amino acid sequence <SEQ ID 8980> was also identified. Analysis of this protein sequence reveals the following:

| Lipop Possible site: −1 Crend: 6 | | | | |
|---|---|---|---|---|
| SRCFLG: 0 | | | | |
| McG: Length of UR: 4 | | | | |
| Peak Value of UR: 3.20 | | | | |
| Net Charge of CR: 1 | | | | |
| McG: Discrim Score: 6.06 | | | | |
| GvH: Signal Score (−7.5): 0.0500002 | | | | |
| Possible site: 46 | | | | |
| >>> Seems to have a cleavable N-term signal seq. | | | | |
| Amino Acid Composition: calculated from 47 | | | | |
| ALOM program count: 3 value: −10.61 threshold: 0.0 | | | | |
| | INTEGRAL | Likelihood = −10.61 | Transmembrane | 326-342 (318-348) |
| | INTEGRAL | Likelihood = −9.18 | Transmembrane | 246-262 (238-265) |
| | INTEGRAL | Likelihood = −8.92 | Transmembrane | 291-307 (280-315) |
| | PERIPHERAL | Likelihood = 4.98 | 152 | |

```
modified ALOM score: 2.62
icml HYPID: 7 CFP: 0.525
*** Reasoning Step: 3
----- Final Results -----
                              bacterial membrane --- Certainty = 0.5246(Affirmative) < succ>
                                bacterial outside --- Certainty = 0.0000(Not Clear) < succ>
                            bacterial cytoplasm --- Certainty = 0.0000(Not Clear) < succ>
```

[11501] The protein has homology with the following sequences in the GENPEPT database.

| >GP: AAF12525 GB: AE001863 hypothetical protein | | | |
|---|---|---|---|
| [Deinococcus radiodurans] | | | |
| Identities = 103/352 (29%), Positives = 191/352 (54%), | | | |
| Gaps = 9/352 (2%) | | | |
| Query: | 15 | AWKELTFYKKKYLLIELLIIVMMFMVVFLSGLANGLGRAVSAAIENNPAQTYILNEGAEQ | 74 |
| | | A +EL K + LLI ++ ++ FMV L+GL GL R ++ + + PAQ+++ + A+ | |
| Sbjct: | 4 | ALRELQHQKLRSLLIGGIVALIAFMVFMLTGLTRGLSRDSASLLLDTPAQSFVTTKEADG | 63 |
| Query: | 75 | VITSSVLTTKDQTDLNSLNLKDSTTLNIQRSSLTRQGHEKKIDISYFAIDKDSFMAPTLS | 134 |
| | | V+ S L+ + +++L + ++ ++ +K++ +D F+AP +S | |
| Sbjct: | 64 | VLNRSFLSPEQ---VSALQQDNEDAAAFAQTFVSFSHGDKQLSGVLLGVDPRGFLAPDVS | 120 |
| Query: | 135 | EGKQLTSYKKAIILNDSLKAEGIKLGDKVIDKSSSISLTVVGFVHNSMYGHGPVAFIDKD | 194 |
| | | EG+ L A++ ++SL+ +G+K+GD + K S L V GF ++ H P ++ | |
| Sbjct: | 121 | EGQTLRVAGGAVV-DESLREDGVKVGDVLTLKPSGDQLRVSGFTRSARLNHQPGMYVSLA | 179 |
| Query: | 195 | IYTEINKKINPQYQFLPQALVMKNDKSISHLP-TQLEAVSKKDVIQHIPGYSAEQSTLNM | 253 |
| | | + +K+NP+ A+ + + +L L ++ +Q +PGY EQ +L M | |
| Sbjct: | 180 | RW----QKLNPRMHGTVNAVALPAAPAQVNLGGADLSVTNRAQTLQVLPGYKEEQGSLTM | 235 |
| Query: | 254 | ILWVLVVASAGILGVFFYIITLQKRHEFSVMKAIGTKMSEIALFQLSQVIILALFGIIVG | 313 |
| | | I L+ +A +L FFY++TLQK +F ++KAIG +A ++Q++IL L + + | |
| Sbjct: | 236 | IQVFLIAVAAFVLATFFYVMTLQKTAQFGLLKAIGASNRTLAGSVVAQMLILTLLAVAIA | 295 |
| Query: | 314 | DGLAVALSYVLPAQMPFVINWQNIILVSFVFLVIAMISSALSIVKVAKIDPV | 365 |
| | | + + + +LPA MPF + NI S + LV+A ++S LS+ +VAK+DP+ | |
| Sbjct: | 296 | AAVTLGMVQLLPAGMPFHLTAANIASASGLLLVVAALASLLSVRRVAKVDPL | 347 |

[11502] A related DNA sequence was identified in S. pyogenes <SEQ ID 6495> which encodes the amino acid sequence <SEQ ID 6496>. Analysis of this protein sequence reveals the following:

| Possible site: 58 | | | | |
|---|---|---|---|---|
| >>> Seems to have a cleavable N-term signal seq. | | | | |
| | INTEGRAL | Likelihood = −12.31 | Transmembrane | 246-262 (233-270) |
| | INTEGRAL | Likelihood = −8.49 | Transmembrane | 327-343 (321-351) |
| | INTEGRAL | Likelihood = −1.01 | Transmembrane | 301-317 (301-317) |

```
----- Final Results -----
                              bacterial membrane --- Certainty = 0.5925(Affirmative) < succ>
                                bacterial outside --- Certainty = 0.0000(Not Clear) < succ>
                            bacterial cytoplasm --- Certainty = 0.0000(Not Clear) < succ>
```

[11503] The protein has homology with the following sequences in the databases:

| >GP: AAF12525 GB: AE001863 hypothetical protein | | | |
|---|---|---|---|
| [Deinococcus radiodurans] | | | |
| Identities = 101/360 (28%), Positives = 175/360 (48%), | | | |
| Gaps = 11/360 (3%) | | | |
| Query: | 1 | MFLALNEMKQSKLRYGLIAGLLCLVAYLMFFLSGLAFGLMQENRSAVDLWKADSVLLAKD | 60 |
| | | M+LAL E++ KLR LI G++ L+A+++F L+GL GL +++ S + A S + K+ | |
| Sbjct: | 1 | MYLALRELQHQKLRSLLIGGIVALIAFMVFMLTGLTRGLSRDSASLLLDTPAQSFVTTKE | 60 |
| Query: | 61 | ADATLTLSQVSRAQENQITADKVAPLAQLNTVAWSVKNPKDADKVKVSLFGIDSNSFIRP | 120 |
| | | AD L S +S Q + + D A T K V L G+D F+ P | |
| Sbjct: | 61 | ADGVLNRSFLSPEQVSALQQDNEDAAAFAQTFVSFSHGDKQLSGV---LLGVDPRGFLAP | 117 |
| Query: | 121 | NIVKGRLFKTNKEVVLDQSLAKEEAFAIGKDFYTSSSSQALTIVGYTQNARFSVAPVVYM | 180 |
| | | ++ +G+ + V+D+SL +E+ +G S L + G+T++AR + P +Y+ | |
| Sbjct: | 118 | DVSEGQTLRVAGGAVVDESL-REDGVKVGDVLTLKPSGDQLRVSGFTRSARLNHQPGMYV | 176 |
| Query: | 181 | NLEAFETLKYGEPLPKDKQVVNAFITKGS--LTDYPKKDFQKLDIKTFITKLPGYSAQLL | 238 |
| | | +L ++ L P+ VNA + + D + + LPGY + | |
| Sbjct: | 177 | SLARWQKLN-----PRMHGTVNAVALPAAPAQVNLGGADLSVTNRAQTLQVLPGYKEEQG | 231 |
| Query: | 239 | TFGFMISFLVIISAIIIGIFMYILTIQKAPIFGIMKAQGISNKTITTAVLMQTFFLSFLG | 298 |
| | | + + FL+ ++A ++ F Y++T+QK FG++KA G SN+T+ +V+ Q L+ L | |
| Sbjct: | 232 | SLTMIQVFLIAVAAFVLATFFYVMTLQKTAQFGLLKAIGASNRTLAGSVVAQMLILTLLA | 291 |
| Query: | 299 | SGLGLLGTWLTSLLLPTVVPFQSNWFLYLAIFVSMICFALLGTLFSVFNIIRIDPLKAIG | 358 |
| | | + T LLP +PF + ++ A L +L SV + ++DPL A+G | |
| Sbjct: | 292 | VAIAAAVTLGMVQLLPAGMPFHLTAANIASASGLLLVVAALASLLSVRRVAKVDPLIALG | 351 |

[11504] An alignment of the GAS and GBS proteins is shown below.

| Identities = 96/356 (26%), Positives = 178/356 (49%), | | | |
|---|---|---|---|
| Gaps = 4/356 (1%) | | | |
| Query: | 15 | AWKELTFYKKKYLLIELLIIVMMFMVVFLSGLANGLGRAVSAAIENNPAQTYILNEGAEQ | 74 |
| | | A E+ K +Y LI L+ ++ +++ FLSGLA GL + +A++ A + +L + A+ | |
| Sbjct: | 4 | ALNEMKQSKLRYGLIAGLLCLVAYLMFFLSGLAFGLMQENRSAVDLWKADSVLLAKDADA | 63 |
| Query: | 75 | VITSSVLTTKDQTDLNSLNLKDSTTLNIQRSSLTRQGHEKKIDISYFAIDKDSFMAPTLS | 134 |
| | | +T S ++ + + + + LN S+ K+ +S F ID +SF+ P + | |
| Sbjct: | 64 | TLTLSQVSRAQENQITADKVAPLAQLNTVAWSVKNPKDADKVKVSLFGIDSNSFIRPNIV | 123 |
| Query: | 135 | EGKQLTSYKKAIILNDSLKAEGIKLGDKVIDKSSSISLTVVGFVHNSMYGHGPVAFIDKD | 194 |
| | | +G+ + K+ ++ K E +G SSS +LT+VG+ N+ + PV +++ + | |
| Sbjct: | 124 | KGRLFKTNKEVVLDQSLAKEEAFAIGKDFYTSSSSQALTIVGYTQNARFSVAPVVYMNLE | 183 |
| Query: | 195 | IYTEIN-KKINPQYQFLPQALVMKNDKSISHLPTQ-LEAVSKKDVIQHIPGYSAEQSTLN | 252 |
| | | + + + P+ + + A + K S++ P + + + K I +PGYSA+ T | |
| Sbjct: | 184 | AFETLKYGEPLPKDKQVVNAFITKG--SLTDYPKKDFQKLDIKTFITKLPGYSAQLLTFG | 241 |
| Query: | 253 | MILWVLVVASAGILGVFFYIITLQKRHEFSVMKAIGTKMSEIALFQLSQVIILALFGIIV | 312 |
| | | ++ LV+ SA I+G+F YI+T+QK F +MKA G I L Q L+ G + | |
| Sbjct: | 242 | FMISFLVIISAIIIGIFMYILTIQKAPIFGIMKAQGISNKTITTAVLMQTFFLSFLGSGL | 301 |
| Query: | 313 | GDGLAVALSYVLPAQMPFVINWQNIILVSFVFLVIAMISSALSIVKVAKIDPVEVI | 368 |
| | | G S +LP +PF NW + + + A++ + S+ + +IDP++ I | |
| Sbjct: | 302 | GLLGTWLTSLLLPTVVPFQSNWFLYLAIFVSMICFALLGTLFSVFNIIRIDPLKAI | 357 |

[11505] SEQ ID 8980 (GBS239) was expressed in E. coli as a GST-fusion product. SDS-PAGE analysis of total cell extract is shown in FIG. 175 (lane 13; MW 64 kDa).

[11506] GBS239-GST was purified as shown in FIG. 227, lane 4.

[11507] Based on this analysis, it was predicted that this protein and its epitopes, could be useful antigens for vaccines or diagnostics.

### EXAMPLE 2100

[11508] A DNA sequence (GBSx2215) was identified in S. agalactiae <SEQ ID 6497> which encodes the amino acid sequence <SEQ ID 6498>. This protein is predicted to be heterocyst maturation protein (devA) (b0879). Analysis of this protein sequence reveals the following:

```
Possible site: 33
>>> Seems to have no N-terminal signal sequence
----- Final Results -----
                            bacterial cytoplasm --- Certainty = 0.1751(Affirmative) < succ>
                              bacterial membrane --- Certainty = 0.0000(Not Clear) < succ>
                                bacterial outside --- Certainty = 0.0000(Not Clear) < succ>
```

[11509] The protein has homology with the following sequences in the GENPEPT database.

| >GP: CAA05977 GB: AJ003195 ATP-binding subunit | | | |
|---|---|---|---|
| [Anabaena variabilis] | | | |
| Identities = 87/225 (38%), Positives = 146/225 (64%), | | | |
| Gaps = 1/225 (0%) | | | |
| Query: | 3 | AILELKHISKHYPDGDELLSILDNLDLSVSAGEFVAILGPSGSGKSTLLSIAGLLLGADQ | 62 |
| | | A++ +K ++ +Y G IL +++L + GE V + GPSGSGK+TLLS+ G L + | |
| Sbjct: | 5 | AVIAIKSLNHYYGKGALKRQILFDINLEIYPGEIVIMTGPSGSGKTTLLSLIGGLRSVQE | 64 |
| Query: | 63 | GSLYVNHENVTDLSQRQRTQLRREALGFIFQSHQLLPYLTIQEQLQQEARFAKHYDKKTS | 122 |
| | | G+L ++ SQ + Q+RR ++G+IFQ+H LL +LT ++ +Q +H ++ + | |
| Sbjct: | 65 | GNLQFLGVELSGASQNKLVQIRR-SIGYIFQAHNLLGFLTARQNVQMAVELNEHISQEEA | 123 |
| Query: | 123 | LEEINKLLSDLGIEQCAHKYPNQLSGGQKQRAAIARAFINHPKVILADEPTASLDEERGR | 182 |
| | | + + +L +G+E YP+ LSGGQKQR AIARA +N+P ++LADEPTA+LD++ GR | |
| Sbjct: | 124 | IAKAEAMLKAVGLENRVDYYPDNLSGGQKQRVAIARALVNNPPLVLADEPTAALDKQSGR | 183 |
| Query: | 183 | QVTELIRQEVKSHNTAAIMVTHDERVLDLVDTVYRLKDGKLVKEN | 227 |
| | | V E++++ K T+ ++VTHD R+LD+ D + ++DG L +++ | |
| Sbjct: | 184 | DVVEIMQRLAKDQGTSILLVTHDNRILDIADRIVEMEDGILARDS | 228 |

[11510] A related DNA sequence was identified in S. pyogenes <SEQ ID 6499> which encodes the amino acid sequence <SEQ ID 6500>. Analysis of this protein sequence reveals the following:

```
Possible site: 13
>>> Seems to have no N-terminal signal sequence
----- Final Results -----
                            bacterial cytoplasm --- Certainty = 0.4181(Affirmative) < succ>
                              bacterial membrane --- Certainty = 0.0000(Not Clear) < succ>
                                bacterial outside --- Certainty = 0.0000(Not Clear) < succ>
```

[11511] An alignment of the GAS and GBS proteins is shown below.

| Identities = 103/224 (45%), Positives = 149/224 (65%), | | | |
|---|---|---|---|
| Gaps = 4/224 (1%) | | | |
| Query: | 3 | AILELKHISKHYPDGDELLSILDNLDLSVSAGEFVAILGPSGSGKSTLLSIAGLLLGADQ | 62 |
| | | ++L K ++K + DG ++ L D S+ AGEFVAI+GPSGSGKST L+IAG L | |
| Sbjct: | 3 | SVLTFKQVTKTFQDGHHEINALKATDFSIEAGEFVAIIGPSGSGKSTFLTIAGGLQTPSS | 62 |
| Query: | 63 | GSLYVNHENVTDLSQRQRTQLRREALGFIFQSHQLLPYLTIQEQLQQEARFAKHYDKKTS | 122 |
| | | G L ++ + T LS+++R++LR +++GFI Q+ L+P+ T+Q+QL+ H | |
| Sbjct: | 63 | GQLIIDGTDYTHLSEKERSRLRFKSVGFILQASNLIPFSTVQQQLE----LVDHLTGSKE | 118 |
| Query: | 123 | LEEINKLLSDLGIEQCAHKYPNQLSGGQKQRAAIARAFINHPKVILADEPTASLDEERGR | 182 |
| | | + N+L DLGI H+ P +LSGG++QRAAIARA + P +ILADEPTASLD E+ | |
| Sbjct: | 119 | KAKANQLFDDLGITGLKHQLPQELSGGERQRAAIARALYHDPALILADEPTASLDTEKAY | 178 |
| Query: | 183 | QVTELIRQEVKSHNTAAIMVTHDERVLDLVDTVYRLKDGKLVKE | 226 |
| | | +V +L+ +E K N A IMVTHD+R+L D VYR++DG+L +E | |
| Sbjct: | 179 | EVVKLLAKESKEKNKAIIMVTHDDRMLKYCDKVYRMQDGELCQE | 222 |

[11512] Based on this analysis, it was predicted that this protein and its epitopes, could be useful antigens for vaccines or diagnostics.

### EXAMPLE 2101

[11513] A DNA sequence (GBSx2216) was identified in S. agalactiae <SEQ ID 6501> which encodes the amino acid sequence <SEQ ID 6502>. Analysis of this protein sequence reveals the following:

```
Possible site: 34
>>> Seems to have no N-terminal signal sequence
----- Final Results -----
                            bacterial cytoplasm --- Certainty = 0.2645(Affirmative) < succ>
                              bacterial membrane --- Certainty = 0.0000(Not Clear) < succ>
                                bacterial outside --- Certainty = 0.0000(Not Clear) < succ>
```

[11514] The protein has homology with the following sequences in the GENPEPT database.

| >GP: CAB64972 GB: AJ012050 VicR protein | | | |
|---|---|---|---|
| [Enterococcus faecalis] | | | |
| Identities = 86/229 (37%), Positives = 132/229 (57%), Gaps = 10/229 (4%) | | | |
| Query: | 3 | KILVVEDNIVQQKIITTKLTQEGYQFITASNGQEALNCLDTEEVQLIITDIMMPMMDGYQ | 62 |
| | | KILVV+D +I+ L +EGY+ TA +G+EAL ++ E LII D+M+P MDG + | |
| Sbjct: | 52 | KILVVDDEKPISEIVKYNLVKEGYEVFTAYDGEEALEKVEEVEPDLIILDLMLPKMDGLE | 111 |
| Query: | 63 | LIQELRSAAYNVPIIVMTAKSQMEDMTKGFGLGADDYMVKPVQLQELALRIKALLRR--- | 119 |
| | | + +E+R +++PII++TAK D G LGADDY+ KP +EL R+KA LRR | |
| Sbjct: | 112 | VAREVRK-THDMPIIMVTAKDSEIDKVLGLELGADDYVTKPFSNRELVARVKANLRRGAT | 170 |
| Query: | 120 | ----ANIVAQHQLIIGNTCLNEDELSLKYFEQEIIFPQKEFRVLFHLLSYPNRIFTRLEL | 175 |
| | | A + Q +L IG+ ++ D + ++I +EF +L++L + ++ TR L | |
| Sbjct: | 171 | NAKEAEVTTQSELTIGDLTIHPDAYMVSKRGEKIELTHREFELLYYLAKHIGQVMTREHL | 230 |
| Query: | 176 | LDSIWGMDTDLDERVVDACINKIRRKVEHLPDFK--IETVRGVGYRAKN | 222 |
| | | L ++WG D D R VD + ++R K+E P + T RGVGY +N | |
| Sbjct: | 231 | LQTVWGYDYFGDVRTVDVTVRRLREKIEDSPSHPTYLVTRRGVGYYLRN | 279 |

[11515] There is also homology to SEQ ID 1182.

[11516] Based on this analysis, it was predicted that this protein and its epitopes, could be useful antigens for vaccines or diagnostics.

### EXAMPLE 2102

[11517] A DNA sequence (GBSx2217) was identified in S. agalactiae <SEQ ID 6503> which encodes the amino acid sequence <SEQ ID 6504>. This protein is predicted to be sensor protein. Analysis of this protein sequence reveals the following:

| Possible site: 38 | | | | |
|---|---|---|---|---|
| >>> Seems to have a cleavable N-term signal seq. | | | | |
| | INTEGRAL | Likelihood = −8.97 | Transmembrane | 53-69 (47-77) |

```
----- Final Results -----
                              bacterial membrane --- Certainty = 0.4588(Affirmative) < succ>
                                bacterial outside --- Certainty = 0.0000(Not Clear) < succ>
                            bacterial cytoplasm --- Certainty = 0.0000(Not Clear) < succ>
```

[11518] The protein has homology with the following sequences in the GENPEPT database.

| >GP: AAC62214 GB: AF049873 sensor protein [Lactococcus lactis] | | | |
|---|---|---|---|
| Identities = 97/307 (31%), Positives = 169/307 (54%), Gaps = 16/307 (5%) | | | |
| Query: | 57 | SALAVVFLSLVIASISMWYGSYHLTKPILDISHIVSNVADGDFEGHIYRNSNRRKSYEYY | 116 |
| | | + LAV+ +L++ + S++Y + +T+P+L I +A GD + N+ | |
| Sbjct: | 170 | AVLAVI--TLIVTAFSIFYITRTVTRPLLKIKLGTDKIAQGDLSIQLNVNTE-------- | 219 |
| Query: | 117 | NELDELSESINQMIVSLSHMDHMRKDFITNVSHELKTPIAAVANIVELLQDPELDEETQS | 176 |
| | | +EL EL++SI + L M R +F+++V+HEL+TP+ + ++ E ++ | |
| Sbjct: | 220 | DELGELAKSIEDLAEKLDFMKRERNEFLSSVAHELRTPLTFIKGYADIANRSTTSLEDKT | 279 |
| Query: | 177 | ELLGLVKTESLRLTRLCDTMLQMSRVDNQETIGELSSVRVDEQIRQAMISLTERWQAKRI | 236 |
| | | + L +++ ES LT+L + ++ +++++ E V + E I + + ++ + KRI | |
| Sbjct: | 280 | QYLRIIREESRHLTQLMEDLMNLAQLEENGFKVEKHQVLIQELINEVVSKVSGVFSEKRI | 339 |
| Query: | 237 | NFQLDSKPYTVYSNSDLLM--QVWINLLDNAIKYSEDIVDLSVRMEETNNHYLRVIISDK | 294 |
| | | NF L S Y+N D + QV +NLL NA KYS D D+ + ++ +++ISDK | |
| Sbjct: | 340 | NF-LISGEGNFYANIDFMRIEQVLVNLLMNAYKYSADESDIKLAFIPEKENF-KIVISDK | 397 |
| Query: | 295 | GRGISQYDVQHIFDKFYQADQSHNQQ--GNGLGLAIVKRIIVLCKGRISVSSQLEIGTEF | 352 |
| | | G GI + D+ +IF++FY+ D+S + G GLGLAIV+ I+ G+I V S GT F | |
| Sbjct: | 398 | GEGIPEQDLPYIFERFYRVDKSRTRTTGGVGLGLAIVQDIVKKHNGKIIVESIQNQGTTF | 457 |
| Query: | 353 | CVELPLS | 359 |
| | | +ELP S | |
| Sbjct: | 458 | IIELPYS | 464 |

[11519] Based on this analysis, it was predicted that this protein and its epitopes, could be useful antigens for vaccines or diagnostics.

[11520] A related GBS gene <SEQ ID 8981> and protein <SEQ ID 8982> were also identified. Analysis of this protein sequence reveals the following:

| Lipop: Possible site: −1 Crend: 10 | | | | |
|---|---|---|---|---|
| McG: Discrim Score: 4.84 | | | | |
| GvH: Signal Score (−7.5): 0.179999 | | | | |
| Possible site: 35 | | | | |
| >>> Seems to have a cleavable N-term signal seq. | | | | |
| ALOM program count: 1 value: −8.97 threshold: 0.0 | | | | |
| | INTEGRAL | Likelihood = −8.97 | Transmembrane | 50-66 (47-77) |
| | PERIPHERAL | Likelihood = 1.27 | 324 | |

```
modified ALOM score: 2.29
*** Reasoning Step: 3
----- Final Results -----
                              bacterial membrane --- Certainty = 0.4588(Affirmative) < succ>
                                bacterial outside --- Certainty = 0.0000(Not Clear) < succ>
                            bacterial cytoplasm --- Certainty = 0.0000(Not Clear) < succ>
```

[11521] The protein has homology with the following sequences in the databases:

[chemical structure]

[11522] SEQ ID 8982 (GBS170d) was expressed in E. coli as a His-fusion product. SDS-PAGE analysis of total cell extract is shown in FIG. 181 (lane 4; MW 35 kDa) and in FIG. 123 (lane 5-7; MW 35 kDa). It was also expressed in E. coli as a GST-fusion product. SDS-PAGE analysis of total cell extract is shown in FIG. 123 (lane 24; MW 60 kDa) and in FIG. 184 (lane 3; MW 60 kDa). Purified GBS170d-GST is shown in FIG. 243, lane 7; purified GBS170d-His is shown in FIG. 234, lanes 5-6.

### EXAMPLE 2103

[11523] A DNA sequence (GBSx2218) was identified in S. agalactiae <SEQ ID 6505> which encodes the amino acid sequence <SEQ ID 6506>. Analysis of this protein sequence reveals the following:

```
Possible site: 21
>>> Seems to have no N-terminal signal sequence
----- Final Results -----
                            bacterial cytoplasm --- Certainty = 0.0502(Affirmative) < succ>
                              bacterial membrane --- Certainty = 0.0000(Not Clear) < succ>
                                bacterial outside --- Certainty = 0.0000(Not Clear) < succ>
```

[11524] The protein has homology with the following sequences in the GENPEPT database.

| >GP: BAB06906 GB: AP001518 argininosuccinate synthase | | | |
|---|---|---|---|
| [citrulline-asparate ligase) [Bacillus halodurans] | | | |
| Identities = 262/396 (66%), Positives = 321/396 (80%), Gaps = 1/396 (0%) | | | |
| Query: | 1 | MGKEKLILAYSGGLDTSVAIAWLK-KDYDVIAVCMDVGEGKDLDFIHDKALTIGAIESYI | 59 |
| | | M K+K++LAYSGGLDTSVAI WL K YDVIAV +DVGEGKDL+F+ +KAL +GAIESY | |
| Sbjct: | 1 | MSKKKVVLAYSGGLDTSVAIKWLSDKGYDVIAVGLDVGEGKDLEFVKEKALKVGAIESYT | 60 |
| Query: | 60 | LDVKDEFAEHFVLPALQAHAMYEQKYPLVSALSRPIIAQKLVEMAHQTGATTIAHGCTGK | 119 |
| | | +D K EFAE FVLPALQAHA+YEQKYPLVSALSRP+I++KLVE+A QTGA +AHGCTGK | |
| Sbjct: | 61 | IDAKKEFAEEFVLPALQAHALYEQKYPLVSALSRPLISKKLVEIAEQTGAQAVAHGCTGK | 120 |
| Query: | 120 | GNDQVRFEVAIAALDPELKVIAPVREWKWHREEEITFAKANGVPIPADLDNPYSIDQNLW | 179 |
| | | GNDQVRFEV+I AL+P L+V+APVREW W R+EEI +AK N +PIP DLDNPYS+DQNLW | |
| Sbjct: | 121 | GNDQVRFEVSIQALNPNLEVLAPVREWAWSRDEEIEYAKKNNIPIPIDLDNPYSVDQNLW | 180 |
| Query: | 180 | GRANECGVLENPWNQAPEEAFGITKSPEEAPDCAEYIDITFQNGKPIAINNQEMTLADLI | 239 |
| | | GR+NECG+LE+PW PE A+ +T + E+APD E ++I F+ G P+ +N + + +LI | |
| Sbjct: | 181 | GRSNECGILEDPWATPPEGAYELTVAIEDAPDQPEIVEIGFEKGIPVTLNGKSYPVHELI | 240 |
| Query: | 240 | LSLNEIAGKHGIGRIDHVENRLVGIKSREIYECPAAMVLLAAHKEIEDLTLVREVSHFKP | 299 |
| | | L LN+IAGKHG+GRIDHVENRLVGIKSRE+YECP AM L+ AHKE+EDLTL +EV+HFKP | |
| Sbjct: | 241 | LELNQIAGKHGVGRIDHVENRLVGIKSREVYECPGAMTLIKAHKELEDLTLTKEVAHFKP | 300 |
| Query: | 300 | ILENELSNLIYNALWFSPATKAIIAYVKETQKVVNGTTKVKLYKGSAQVVARHSSNSLYD | 359 |
| | | ++E +++ LIY LWFSP A+ A++KETQ V G +VKL+KG A V R S SLY+ | |
| Sbjct: | 301 | VVEKKIAELIYEGLWFSPLQPALSAFLKETQSTVTGVVRVKLFKGHAIVEGRKSEYSLYN | 360 |
| Query: | 360 | ENLATYTAADSFDQDAAVGFIKLWGLPTQVNAQVNK | 395 |
| | | E LATYT D FD +AAVGFI LWGLPT+V + VNK | |
| Sbjct: | 361 | EKLATYTPDDEFDHNAAVGFISLWGLPTKVYSMVNK | 396 |

[11525] No corresponding DNA sequence was identified in S. pyogenes.

[11526] Based on this analysis, it was predicted that this protein and its epitopes, could be useful antigens for vaccines or diagnostics.

### EXAMPLE 2104

[11527] A DNA sequence (GBSx2219) was identified in S. agalactiae <SEQ ID 6507> which encodes the amino acid sequence <SEQ ID 6508>. This protein is predicted to be argininosuccinate lyase (argH). Analysis of this protein sequence reveals the following:

```
Possible site: 43
>>> Seems to have no N-terminal signal sequence
----- Final Results -----
                            bacterial cytoplasm --- Certainty = 0.2131(Affirmative) < succ>
                              bacterial membrane --- Certainty = 0.0000(Not Clear) < succ>
                                bacterial outside --- Certainty = 0.0000(Not Clear) < succ>
```

[11528] The protein has homology with the following sequences in the GENPEPT database.

| >GP: BAB06905 GB: AP001518 argininosuccinate lyase [Bacillus halodurans] | | | |
|---|---|---|---|
| Identities = 284/454 (62%), Positives = 350/454 (76%) | | | |
| Query: | 6 | KLWGGRFESSLEKWVEEFGASISFDQKLAPYDMKASMAHVTMLGKTDIISQEEAGLIKDG | 65 |
| | | KLWGGRF + E WV+EFGASI FDQ+L D++ S+AHVTML K+ I++ EE IK G | |
| Sbjct: | 3 | KLWGGRFTKTAEAWVDEFGASIGFDQQLVEEDIEGSLAHVTMLEKSGILANEEVEQIKKG | 62 |
| Query: | 66 | LKILQDKYRAGQLTFSISNEDIHMNIESLLTAEIGEVAGKLHTARSRNDQVATDMHLYLK | 125 |
| | | L IL +K + G+L +S++NEDIH+NIE LL EIG V GKLHT RSRNDQVATDMHLYL+ | |
| Sbjct: | 63 | LHILLEKAKKGELNYSVANEDIHLNIEKLLIDEIGPVGGKLHTGRSRNDQVATDMHLYLR | 122 |
| Query: | 126 | DKLQEMMKKLLHLRTTLVNLAENHIYTVMPGYTHLQHAQPISFGHHLMAYYNMFTRDTER | 185 |
| | | + +E+++ + +++ LV A+ H+ T++PGYTHLQ AQPISF HHL+AY+ M RD R | |
| Sbjct: | 123 | KQTKEILQLVKNVQAALVEQAKQHVETLIPGYTHLQRAQPISFAHHLLAYFWMLERDYGR | 182 |
| Query: | 186 | LEFNMKHTNLSPLGAAALAGTTFPIDRHMTTRLLDFEKPYSNSLDAVSDRDFIIEFLSNA | 245 |
| | | E ++K N+SPLGA ALAGTTFPIDR T LL F+ Y NSLDAVSDRDFI+EFLS + | |
| Sbjct: | 183 | YEDSLKRLNVSPLGAGALAGTTFPIDREYTAELLGFDGIYENSLDAVSDRDFIVEFLSAS | 242 |
| Query: | 246 | SILMMHLSRFCEEIINWCSYEYQFITLSDTFSTGSSIMPQKKNPDMAELIRGKTGRVYGN | 305 |
| | | S+LM HLSR CEE+I W S E+QF+ + D F+TGSSIMPQKKNPDMAELIRGKTGRVYG+ | |
| Sbjct: | 243 | SLLMTHLSRLCEELILWSSQEFQFVEMDDAFATGSSIMPQKKNPDMAELIRGKTGRVYGS | 302 |
| Query: | 306 | LFSLLTVMKSLPLAYNKDLQEDKEGMFDSVETVSIAIEIMANMLETMTVNEHIMMTSTET | 365 |
| | | LFSLLTV+K LPLAYNKD+QEDKEGMFD+V+TV ++ I A M++TM V E M + | |
| Sbjct: | 303 | LFSLLTVLKGLPLAYNKDMQEDKEGMFDAVKTVKGSLAIFAGMIQTMKVKEETMTKAVHQ | 362 |
| Query: | 366 | DFSNATELADYLASKGVPFRKAHEIVGKLVLECSKNGSYLQDIPLKYYQEISELIENDIY | 425 |
| | | DFSNATELADYLA+KG+PFR+AHE+VGKLVL C + G YL D+PL Y+ S+L + DIY | |
| Sbjct: | 363 | DFSNATELADYLATKGMPFREAHEVVGKLVLLCIQKGIYLLDLPLSDYKAASDLFDEDIY | 422 |
| Query: | 426 | EILTAKTAVKRRNSLGGTGFDQVKKQILLARKEL | 459 |
| | | ++L KT V RR S GGTGF +VKK I A K L | |
| Sbjct: | 423 | DVLQPKTVVARRTSAGGTGFTEVKKAIAKAEKIL | 456 |

[11529] Based on this analysis, it was predicted that this protein and its epitopes, could be useful antigens for vaccines or diagnostics.

### EXAMPLE 2105

[11530] A DNA sequence (GBSx2220) was identified in S. agalactiae <SEQ ID 6509> which encodes the amino acid sequence <SEQ ID 6510>. This protein is predicted to be class-II aldolase (fba). Analysis of this protein sequence reveals the following:

```
Possible site: 42
>>> Seems to have no N-terminal signal sequence
----- Final Results -----
                            bacterial cytoplasm --- Certainty = 0.2930(Affirmative) < succ>
                              bacterial membrane --- Certainty = 0.0000(Not Clear) < succ>
                                bacterial outside --- Certainty = 0.0000(Not Clear) < succ>
```

[11531] A related GBS nucleic acid sequence <SEQ ID 9289> which encodes amino acid sequence <SEQ ID 9290> was also identified. Analysis of this sequence reveals:

```
GvH: Signal Score (−7.5): −2.92
          Possible site: 42
>>> Seems to have no N-terminal signal seq.
ALOM program count: 0 value: 0.37 threshold: 0.0
      PERIPHERAL Likelihood = 0.37 66
modified ALOM score: −0.57
*** Reasoning Step: 3
----- Final Results -----
                            bacterial cytoplasm --- Certainty = 0.2930(Affirmative) < succ>
                              bacterial membrane --- Certainty = 0.0000(Not Clear) < succ>
                                bacterial outside --- Certainty = 0.0000(Not Clear) < succ>
```

[11532] The protein has homology with the following sequences in the GENPEPT database.

| >GP: BAB16889 GB: AB050113 class-II aldolase [Streptococcus bovis] | | | |
|---|---|---|---|
| Identities = 221/242 (91%), Positives = 234/242 (96%) | | | |
| Query: | 1 | MAIVSAEKFVQAARDNGYAVGGFNTNNLEWTQAILRAAEAKKAPVLIQTSMGAAKYMGGY | 60 |
| | | MAIVSAEKF++AAR+NGYAVGGFNTNNLEWTQAILRAAEAKKAP+LIQTSMGAAKYMGGY | |
| Sbjct: | 1 | MAIVSAEKFIKAARENGYAVGGFNTNNLEWTQAILRAAEAKKAPILIQTSMGAAKYMGGY | 60 |
| Query: | 61 | KLCKQLIETLVESMGITVPVAIHLDHGHYDDALECIEVGYTSIMFDGSHLPVEENLEKAR | 120 |
| | | KLCK LIE LVESMGITVPVAIHLDHGH++DALECIEVGYTS+MFDGSHLPVEENLEKA+ | |
| Sbjct: | 61 | KLCKTLIENLVESNGITVPVAIHLDHGHFEDALECIEVGYTSVMFDGSHLPVEENLEKAK | 120 |
| Query: | 121 | EVVAKAHAKGISVEAEVGTIGGEEDGIVGKGELAPIEDAKAMVETGIDFLAAGIGNIHGP | 180 |
| | | EVVAKAHAKG+SVEAEVGTIGGEEDGIVG GELAPIEDAKANV TGIDFLAAGIGNIHGP | |
| Sbjct: | 121 | EVVAKAHAKGVSVEAEVGTIGGEEDGIVGGGELAPIEDAKAMVATGIDFLAAGIGNIHGP | 180 |
| Query: | 181 | YPANWEGLDLDHLKKLTEAVPGFPIVLHGGSGIPDDQIQEAIKLGVAKVNVNTECQLAFC | 240 |
| | | YPANW+GL LDHLKKLT AVPGFPIVLHGGSGIPDDQI+ AIKLGVAKVNVNTECQ+AF | |
| Sbjct: | 181 | YPANWQGLHLDHLKKLTAAVPGFPIVLHGGSGIPDDQIKAAIKLGVAKVNVNTECQIAFA | 240 |
| Query: | 241 | QA | 242 |
| | | +A | |
| Sbjct: | 241 | KA | 242 |

[11533] A related DNA sequence was identified in S. pyogenes <SEQ ID 6511> which encodes the amino acid sequence <SEQ ID 6512>. Analysis of this protein sequence reveals the following:

```
Possible site: 42
>>> Seems to have no N-terminal signal sequence
----- Final Results -----
                            bacterial cytoplasm --- Certainty = 0.2930(Affirmative) < succ>
                              bacterial membrane --- Certainty = 0.0000(Not Clear) < succ>
                                bacterial outside --- Certainty = 0.0000(Not Clear) < succ>
```

[11534] An alignment of the GAS and GBS proteins is shown below.

| Identities = 217/242 (89%), Positives = 228/242 (93%) | | | |
|---|---|---|---|
| Query: | 1 | MAIVSAEKFVQAARDNGYAVGGFNTNNLEWTQAILRAAEAKKAPVLIQTSMGAAKYMGGY | 60 |
| | | MAIVSAEKFVQAAR+NGYAVGGFNTNNLEWTQAILRAAEAK+APVLIQTSMGAAKYMGGY | |
| Sbjct: | 1 | MAIVSAEKFVQAARENGYAVGGFNTNNLEWTQAILRAAEAKQAPVLIQTSMGAAKYMGGY | 60 |
| Query: | 61 | KLCKQLIETLVESHGITVPVAIHLDHGHYDDALECIEVGYTSIMFDGSHLPVEENLEKAR | 120 |
| | | K+C+ LI LVESMGITVPVAIHLDHGHY+DALECIEVGYTSIMFDGSHLPVEENL K | |
| Sbjct: | 61 | KVCQSLITNLVESMGITVPVAIHLDHGHYEDALECIEVGYTSIMFDGSHLPVEENLAKTA | 120 |
| Query: | 121 | EVVAKAHAKGISVEAEVGTIGGEEDGIVGKGELAPIEDAKAMVETGIDFLAAGIGNIHGP | 180 |
| | | EVV AHAKG+SVEAEVGTIGGEEDGI+GKGELAPIEDAKAMVETGIDFLAAGIGNIHGP | |
| Sbjct: | 121 | EVVKIAHAKGVSVEAEVGTIGGEEDGIIGKGELAPIEDAKAMVETGIDFLAAGIGNIHGP | 180 |
| Query: | 181 | YPANWEGLDLDHLKKLTEAVPGFPIVLHGGSGIPDDQIQEAIKLGVAKVNVNTECQLAFC | 240 |
| | | YP NWEGL LDHL+KLT AVPGFPIVLHGGSGIPDDQI+EAI+LGVAKVNVNTE Q+AF | |
| Sbjct: | 181 | YPENWEGLALDHLEKLTAAVPGFPIVLHGGSGIPDDQIKEAIRLGVAKVNVNTESQIAFS | 240 |
| Query: | 241 | QA | 242 |
| | | A | |
| Sbjct: | 241 | NA | 242 |

[11535] SEQ ID 9290 (GBS683) was expressed in E. coli as a GST-fusion product. SDS-PAGE analysis of total cell extract is shown in FIG. 150 (lane 8 & 10; MW 55 kDa). It was also expressed in E. coli as a His-fusion product. SDS-PAGE analysis of total cell extract is shown in FIG. 150 (lane 11-13; MW 30 kDa) and in FIG. 184 (lane 11; MW 30 kDa).

[11536] Based on this analysis, it was predicted that this protein and its epitopes, could be useful antigens for vaccines or diagnostics.

### EXAMPLE 2106

[11537] A DNA sequence (GBSx2221) was identified in S. agalactiae <SEQ ID 6513> which encodes the amino acid sequence <SEQ ID 6514>. Analysis of this protein sequence reveals the following:

```
Possible site: 22
>>> Seems to have no N-terminal signal sequence
----- Final Results -----
                            bacterial cytoplasm --- Certainty = 0.2775(Affirmative) < succ>
                              bacterial membrane --- Certainty = 0.0000(Not Clear) < succ>
                                bacterial outside --- Certainty = 0.0000(Not Clear) < succ>
```

[11538] The protein has homology with the following sequences in the GENPEPT database.

| >GP: AAA88585 GB: M18954 unknown protein [Streptococcus mutans] | | | |
|---|---|---|---|
| Identities = 109/229 (47%), Positives = 156/229 (67%), Gaps = 1/229 (0%) | | | |
| Query: | 1 | MFSGKRLKKRRITLGYSQSELADKLHINRSSYFNWENEKTKPNQSNLKQLAILLDVPETY | 60 |
| | | MFS ++LK+RR LG SQ++ ADKL I+R SYFNWE KTKPNQ NL +LA LL V Y | |
| Sbjct: | 1 | MFSSQKLKERRKKLGLSQAQTADKLGISRPSYFNWEIGKTKPNQKNLDKLAHLLKVDSAY | 60 |
| Query: | 61 | FESEYKIVNTYLQLSLQNQEKVEKYAEELLQTQKVHEKIVPLFAVEVLSEIQLSAGPGEG | 120 |
| | | F S++ IV Y +L+ N+ K KY++ LL+ Q ++ +LSAG G | |
| Sbjct: | 61 | FLSQHDIVEIYTRLNESNKTKTLKYSQHLLEQQDKKRNLMKNKRYPYRVYEKLSAGTGYS | 120 |
| Query: | 121 | LYDEFETETVYSEDEYTGFDIATWISGNSMEPVYKDGEVALIRSTGFDHDGAVYALNWNG | 180 |
| | | + + +TV+ ++E D A+WI G+SMEP++ +GEVALI+ TGFD+DGA+YA++W+G | |
| Sbjct: | 121 | YFGDGNFDTVFYDEEID-HDFASWIFGDSMEPIFLNGEVALIKQTGFDYDGAIYAIDWDG | 179 |
| Query: | 181 | SLYIKKLYREEDGFRMVSINPDVAERFIPFEDEIRIVGKIVGHFMPVIG | 229 |
| | | YIKK+YREE G R+VS+N A++F P+++ RI+G IVG+F+P+ G | |
| Sbjct: | 180 | QTYIKKVYREETGLRLVSLNKKYADKFAPYDENPRIIGLIVGNFIPLEG | 228 |

[11539] A related DNA sequence was identified in S. pyogenes <SEQ ID 6515> which encodes the amino acid sequence <SEQ ID 6516>. Analysis of this protein sequence reveals the following:

```
Possible site: 38
>>> Seems to have no N-terminal signal sequence
----- Final Results -----
                            bacterial cytoplasm --- Certainty = 0.4340(Affirmative) < succ>
                              bacterial membrane --- Certainty = 0.0000(Not Clear) < succ>
                                bacterial outside --- Certainty = 0.0000(Not Clear) < succ>
```

[11540] An alignment of the GAS and GBS proteins is shown below.

| Identities = 84/209 (40%), Positives = 130/209 (62%), Gaps = 9/209 (4%) | | | |
|---|---|---|---|
| Query: | 25 | LHINRSSYFNWENEKTKPNQSNLKQLAILLDVPETYFESEYKIVNTYLQLSLQNQEKVEK | 64 |
| | | LH+N+ + NWE K PN+ +L L L +V YF+ Y+++ Y QL++ N+EKV | |
| Sbjct: | 5 | LHVNKMTISNWEKGKNIPNEKHLNALLHLFNVTSDYFDPNYRLLTPYNQLTISNKEKVIG | 84 |
| Query: | 85 | YAEELLQTQ------KVHEKIVPLFAVEVLSEIQLSAGPGEGLYDEFETETVYSEDEYTG | 138 |
| | | Y+E LL Q + +K L+A V LSAG G + + + V+ DE | |
| Sbjct: | 65 | YSERLLNHQIDKKSKDLIDKPSQLYAYRVYES--LSAGTGYSYFGDGNFDVVFY-DEQLE | 121 |
| Query: | 139 | FDIATWISGNSMEPVYKDGEVALIRSTGFDHDGAVYALNWNGSLYIKKLYREEDGFRMVS | 198 |
| | | +D A+W+ G+SMEP Y +GEV LI+ FD+DGA+YA+ W+G YIKK++RE++G R+VS | |
| Sbjct: | 122 | YDFASWVFGDSMEPTYLNGEVVLIKQNSFDYDGAIYAVEWDGQTYIKKVFREDEGLRLVS | 181 |
| Query: | 199 | INPDVAERFIPFEDEIRIVGKIVGHFMPV | 227 |
| | | +N +++F P+ +E RI+GKI+ +F P+ | |
| Sbjct: | 182 | LNKKYSDKFAPYSEEPRIIGKIIANFRPL | 210 |

[11541] Based on this analysis, it was predicted that this protein and its epitopes, could be useful antigens for vaccines or diagnostics.

### EXAMPLE 2107

[11542] A DNA sequence (GBSx2222) was identified in S. agalactiae <SEQ ID 6517> which encodes the amino acid sequence <SEQ ID 6518>. Analysis of this protein sequence reveals the following:

```
Possible site: 41
>>> Seems to have no N-terminal signal sequence
----- Final Results -----
                            bacterial cytoplasm --- Certainty = 0.2387(Affirmative) < succ>
                              bacterial membrane --- Certainty = 0.0000(Not Clear) <succ>
                                bacterial outside --- Certainty = 0.0000(Not Clear) <succ>
```

[11543] The protein has no significant homology with any sequences in the GENPEPT database.

[11544] No corresponding DNA sequence was identified in S. pyogenes.

[11545] Based on this analysis, it was predicted that this protein and its epitopes, could be useful antigens for vaccines or diagnostics.

### EXAMPLE 2108

[11546] A DNA sequence (GBSx2223) was identified in S. agalactiae <SEQ ID 6519> which encodes the amino acid sequence <SEQ ID 6520>. This protein is predicted to be UmuC MucB homolog (uvrX). Analysis of this protein sequence reveals the following:

```
Possible site: 47
>>> Seems to have no N-terminal signal sequence
----- Final Results -----
                            bacterial cytoplasm --- Certainty = 0.2195(Affirmative) < succ>
                              bacterial membrane --- Certainty = 0.0000(Not Clear) < succ>
                                bacterial outside --- Certainty = 0.0000(Not Clear) < succ>
```

[11547] A related GBS nucleic acid sequence <SEQ ID 9925> which encodes amino acid sequence <SEQ ID 9926> was also identified.

[11548] The protein has homology with the following sequences in the GENPEPT database.

| >GP: AAC98439 GB: L29324 UmuC MucB homolog [Streptococcus pneumoniae] | | | |
|---|---|---|---|
| Identities = 303/436 (69%), Positives = 360/436 (82%) | | | |
| Query: | 39 | LHTSLCVMSRADNSAGLILASSPMFKKVFGKGNVGRAYDLPFDVHTRKFNYYRAKISGLP | 98 |
| | | L LCVMSRADNSAGLILASSPMFKKVFGK NVGR+YDLPFDV TRKF+YY AK GLP | |
| Sbjct: | 5 | LRLRLCVMSRADNSAGLILASSPMFKKVFGKSNVGRSYDLPFDVKTRKFSYYNAKKQGLP | 64 |
| Query: | 99 | TDAKFVSFIENWAKRTFIVPPRMDLYIQKNLEIQKVFQNYADPTDILPYSIDEGFIDLTS | 158 |
| | | T +V +IE WAK T IVP L I N+EIQK+FQ++A P DI PYSIDEGFIDLTS | |
| Sbjct: | 65 | TTIDYVRYIEEWAKSTVIVPREWILTIAVNMEIQKIFQDFAAPDDIYPYSIDEGFIDLTS | 124 |
| Query: | 159 | SLNYFVEDKSLSRKDKLDVVSAKIQHDIWEKTGVYSTVGMSNANPLLAKLALDNEAKTTA | 218 |
| | | SLNYFV DKS+SRKDKLD++SA IQ IW KTG+YSTVGMSNANPLLAKLALDNEAK T | |
| Sbjct: | 125 | SLNYFVPDKSISRKDKLDIISAAIQKKIWRKTGIYSTVGMSNANPLLAKLALDNEAKKTP | 184 |
| Query: | 219 | TMRANWSYEDVETKVWNIPKMTDFWGIGSRTEKRLNKLGIYSIKELANCDPTILKKEFGV | 278 |
| | | TMRANWSYEDVE KVW IPKMTDFWGIG+R EKRL+ LGI+SIKELA +P ++KKE G+ | |
| Sbjct: | 185 | TMRANWSYEDVEKKVWTIPKMTDFWGIGNRMEKRLHNLGIFSIKELAQANPDLIKKELGI | 244 |
| Query: | 279 | IGVQHWFHANGIDESNVHEPYRPKAVGIGNSQVLHKDYTRQSDIELVLREMAEQVAIRLR | 338 |
| | | +G++ WFHANGIDESNVH+PY+PK+ GIGNSQVL KDY +Q DIE++LREMAEQVA+RLR | |
| Sbjct: | 245 | MGLELWFHANGIDESNVHKPYKPKSKGIGNSQVLPKDYIKQRDIEIILREMAEQVAVRLR | 304 |
| Query: | 339 | RRHKKATVVAINVGYSNFENKKSINVQRKINPNNRTLVFQDEVVSLFRSKYDGGAVRSIA | 398 |
| | | R KKATVV+I++GYS E K+SIN Q KI P N+T + + V+ LF +KY GA+R++A | |
| Sbjct: | 305 | RSGKKATVVSIHLGYSKVEQKRSINTQMKIEPTNQTALLTNYVLKLFHTKYTSGAIRNVA | 364 |
| Query: | 399 | VRYDGLVDENFAVISLFDDFEESEKEEKLETTIDSIRDRFGFLAVQKASSLLENSRAISR | 458 |
| | | V Y GLVDE+F +ISLFDD E+ EKEE+L++ ID+IR FGF ++ K ++L + SR I+R | |
| Sbjct: | 365 | VNYSGLVDESFGLISLFDDIEKIEKEERLQSAIDAIRTEFGFTSLLKGNALDQASRTIAR | 424 |
| Query: | 459 | SRLVGGHSAGGLEGLK | 474 |
| | | S+L+GGHSAGGL+GLK | |
| Sbjct: | 425 | SKLIGGHSAGGLDGLK | 440 |

[11549] Based on this analysis, it was predicted that this protein and its epitopes, could be useful antigens for vaccines or diagnostics.

### EXAMPLE 2109

[11550] A DNA sequence (GBSx2224) was identified in S. agalactiae <SEQ ID 6521> which encodes the amino acid sequence <SEQ ID 6522>. Analysis of this protein sequence reveals the following:

```
Possible site: 45
>>> Seems to have no N-terminal signal sequence
----- Final Results -----
                            bacterial cytoplasm --- Certainty = 0.4016(Affirmative) < succ>
                              bacterial membrane --- Certainty = 0.0000(Not Clear) < succ>
                                bacterial outside --- Certainty = 0.0000(Not Clear) < succ>
```

[11551] The protein has no significant homology with any sequences in the GENPEPT database.

[11552] No corresponding DNA sequence was identified in S. pyogenes.

[11553] Based on this analysis, it was predicted that this protein and its epitopes, could be useful antigens for vaccines or diagnostics.

### EXAMPLE 2110

[11554] A DNA sequence (GBSx2225) was identified in S. agalactiae <SEQ ID 6523> which encodes the amino acid sequence <SEQ ID 6524>. Analysis of this protein sequence reveals the following:

```
Possible site: 32
>>> Seems to have no N-terminal signal sequence
----- Final Results -----
                            bacterial cytoplasm --- Certainty = 0.2088(Affirmative) < succ>
                              bacterial membrane --- Certainty = 0.0000(Not Clear) < succ>
                                bacterial outside --- Certainty = 0.0000(Not Clear) < succ>
```

[11555] The protein has homology with the following sequences in the GENPEPT database.

| >GP: AAG13001 GB: AF227520 unknown [Streptococcus pneumoniae] | | | |
|---|---|---|---|
| Identities = 68/122 (55%), Positives = 89/122 (72%), Gaps = 6/122 (4%) | | | |
| Query: | 1 | MIDRSYLPFKVAREYQDRKMAKWMGFFLSEHTAGLDSELNKVDYTSELSISDKLLLLNQL | 60 |
| | | MIDRSYLPF+ AREYQD KM KWMGFFLSEHT+ L + NKV Y S+LS+ KLLLL+Q+ | |
| Sbjct: | 1 | MIDRSYLPFQSAREYQDTKMQKWMGFFLSEHTSALTDDANKVTYMSDLSLEKKLLLLSQV | 60 |
| Query: | 61 | YSNQLNGIIAVPGQ----YYSGKVDNLTFNHVSLKTKTGFVSIPIKDILSIDL--EVEYE | 114 |
| | | Y+ QLN I V + Y+G + +LT + + +KT TG +++ +KDI+SI+L EV YE | |
| Sbjct: | 61 | YAGQLNTRIHVVKKNNQVSYTGTIPSLTKDFILIKTTTGHINLKLKDIVSIELVEEVLYE | 120 |
| Query: | 115 | SA | 116 |
| | | SA | |
| Sbjct: | 121 | SA | 122 |

[11556] No corresponding DNA sequence was identified in S. pyogenes.

[11557] Based on this analysis, it was predicted that this protein and its epitopes, could be useful antigens for vaccines or diagnostics.

### EXAMPLE 2111

[11558] A DNA sequence (GBSx2226) was identified in S. agalactiae <SEQ ID 6525> which encodes the amino acid sequence <SEQ ID 6526>. Analysis of this protein sequence reveals the following:

```
Possible site: 48
>>> Seems to have no N-terminal signal sequence
----- Final Results -----
                            bacterial cytoplasm --- Certainty = 0.4025(Affirmative) < succ>
                              bacterial membrane --- Certainty = 0.0000(Not Clear) < succ>
                                bacterial outside --- Certainty = 0.0000(Not Clear) < succ>
```

[11559] A related GBS nucleic acid sequence <SEQ ID 9927> which encodes amino acid sequence <SEQ ID 9928> was also identified.

[11560] The protein has no significant homology with any sequences in the GENPEPT database.

[11561] No corresponding DNA sequence was identified in S. pyogenes.

[11562] Based on this analysis, it was predicted that this protein and its epitopes, could be useful antigens for vaccines or diagnostics.

### EXAMPLE 2112

[11563] A DNA sequence (GBSx2227) was identified in S. agalactiae <SEQ ID 6527> which encodes the amino acid sequence <SEQ ID 6528>. This protein is predicted to be soluble transducer HtrXIII. Analysis of this protein sequence reveals the following:

```
Possible site: 56
>>> Seems to have no N-terminal signal sequence
----- Final Results -----
                            bacterial cytoplasm --- Certainty = 0.5246(Affirmative) < succ>
                              bacterial membrane --- Certainty = 0.0000(Not Clear) < succ>
                                bacterial outside --- Certainty = 0.0000(Not Clear) < succ>
```

[11564] The protein has no significant homology with any sequences in the GENPEPT database.

[11565] No corresponding DNA sequence was identified in S. pyogenes.

[11566] Based on this analysis, it was predicted that this protein and its epitopes, could be useful antigens for vaccines or diagnostics.

### EXAMPLE 2113

[11567] A DNA sequence (GBSx2228) was identified in S. agalactiae <SEQ ID 6529> which encodes the amino acid sequence <SEQ ID 6530>. Analysis of this protein sequence reveals the following:

```
Possible site: 60
>>> Seems to have no N-terminal signal sequence
----- Final Results -----
                            bacterial cytoplasm --- Certainty = 0.5131(Affirmative) < succ>
                              bacterial membrane --- Certainty = 0.0000(Not Clear) < succ>
                                bacterial outside --- Certainty = 0.0000(Not Clear) < succ>
```

[11568] The protein has no significant homology with any sequences in the GENPEPT database.

[11569] No corresponding DNA sequence was identified in S. pyogenes.

[11570] Based on this analysis, it was predicted that this protein and its epitopes, could be useful antigens for vaccines or diagnostics.

### EXAMPLE 2114

[11571] A DNA sequence (GBSx2229) was identified in S. agalactiae <SEQ ID 6531> which encodes the amino acid sequence <SEQ ID 6532>. This protein is predicted to be pXO2-78. Analysis of this protein sequence reveals the following:

```
Possible site: 43
>>> Seems to have no N-terminal signal sequence
----- Final Results -----
                            bacterial cytoplasm --- Certainty = 0.2105(Affirmative) < succ>
                              bacterial membrane --- Certainty = 0.0000(Not Clear) < succ>
                                bacterial outside --- Certainty = 0.0000(Not Clear) < succ>
```

[11572] The protein has homology with the following sequences in the GENPEPT database.

| >GP: AAF13682 GB: AF188935 pXO2-78 [Bacillus anthracis] | | | |
|---|---|---|---|
| Identities = 101/314 (32%), Positives = 147/314 (46%), Gaps = 46/314 (14%) | | | |
| Query: | 27 | SGQIYEHPDHDSFRIFADTNTFKWFSRDIQGDVIDFVQLVAGVSFKKALSYLETG--GFE | 84 |
| | | S + Y +HDS I N F W SR + G++I FVQ V SF A+ L G +E | |
| Sbjct: | 39 | SERYYRLTEHDSLIIDRKKNQFYWNSRGVNGNIIKFVQEVEDASFPGAMQRLLDGEQDYE | 98 |
| Query: | 85 | EAKVIEETYQPFQYYLREEP----FQQARTYLKDIRGLSNQTINSFGRQGLLAQATYQAE | 140 |
| | | +A I +P+ Y E+ F +AR YL + R + Q +++ +GL+ Q Y | |
| Sbjct: | 99 | KASEITFVSEPYDYEHFEQKEVSRFDRAREYLIEERKIDPQVVDALHNKGLIKQDKYN-- | 156 |
| Query: | 141 | SVLVFKSFDHNGTLQAASLQGLVKNEEKYDRGYLKKIMKGSHGHVGISFDIGNPKRLIFC | 200 |
| | | +VL G + S QG+VK++ KY RG K I K S + G + G P+ L F | |
| Sbjct: | 157 | NVLFLWKDRETGAVMGGSEQGVVKSD-KYKRGAWKSIQKNSTANYGFNVLNGEPRNLKFY | 215 |
| Query: | 201 | ESVIDMMSYYQLHQKQLSDVRLISMEGLKLSVIAYQTLRLAAEEQGKLAFLDTVKPIRLS | 260 |
| | | ES ID++SY LH+ L D LISMEGLK VI + | |
| Sbjct: | 216 | ESDIDLLSYATLHKHNLKDTHLISMEGLKPQVI-------------------------FN | 250 |
| Query: | 261 | HYLQAIQETTTFFQTHSNVITMAVDNDEAGREFYQKL-------SDKGFPIFQ-DLPPLQ | 312 |
| | | +Y++A + + +++ VDND+AG+ F ++L +D F+ + P | |
| Sbjct: | 251 | YYMKACERIGDV----PDSLSLCVDNDKAGKAFVERLIHFRYEKNDGSIVAFKPEYPQAP | 306 |
| Query: | 313 | RLETKSDWNDIVKR | 326 |
| | | E K DWND KR | |
| Sbjct: | 307 | SEEKKWDWNDECKR | 320 |

[11573] No corresponding DNA sequence was identified in S. pyogenes.

[11574] Based on this analysis, it was predicted that this protein and its epitopes, could be useful antigens for vaccines or diagnostics.

### EXAMPLE 2115

[11575] A DNA sequence (GBSx2230) was identified in S. agalactiae <SEQ ID 6533> which encodes the amino acid sequence <SEQ ID 6534>. Analysis of this protein sequence reveals the following:

```
Possible site: 20
>>> Seems to have no N-terminal signal sequence
----- Final Results -----
                            bacterial cytoplasm --- Certainty = 0.7013(Affirmative) < succ>
                              bacterial membrane --- Certainty = 0.0000(Not Clear) < succ>
                                bacterial outside --- Certainty = 0.0000(Not Clear) < succ>
```

[11576] The protein has no significant homology with any sequences in the GENPEPT database.

[11577] No corresponding DNA sequence was identified in S. pyogenes.

[11578] Based on this analysis, it was predicted that this protein and its epitopes, could be useful antigens for vaccines or diagnostics.

### EXAMPLE 2116

[11579] A DNA sequence (GBSx2231) was identified in S. agalactiae <SEQ ID 6535> which encodes the amino acid sequence <SEQ ID 6536>. Analysis of this protein sequence reveals the following:

```
Possible site: 48
>>> Seems to have no N-terminal signal sequence
----- Final Results -----
                            bacterial cytoplasm --- Certainty = 0.1310(Affirmative) < succ>
                              bacterial membrane --- Certainty = 0.0000(Not Clear) < succ>
                                bacterial outside --- Certainty = 0.0000(Not Clear) < succ>
```

[11580] The protein has no significant homology with any sequences in the GENPEPT database.

[11581] No corresponding DNA sequence was identified in S. pyogenes.

[11582] Based on this analysis, it was predicted that this protein and its epitopes, could be useful antigens for vaccines or diagnostics.

### EXAMPLE 2117

[11583] A DNA sequence (GBSx2232) was identified in S. agalactiae <SEQ ID 6537> which encodes the amino acid sequence <SEQ ID 6538>. Analysis of this protein sequence reveals the following:

```
Possible site: 31
>>> Seems to have no N-terminal signal sequence
----- Final Results -----
                            bacterial cytoplasm --- Certainty = 0.6726(Affirmative) < succ>
                              bacterial membrane --- Certainty = 0.0000(Not Clear) < succ>
                                bacterial outside --- Certainty = 0.0000(Not Clear) < succ>
```

[11584] A related GBS nucleic acid sequence <SEQ ID 9373> which encodes amino acid sequence <SEQ ID 9374> was also identified.

[11585] The protein has no significant homology with any sequences in the GENPEPT database.

[11586] No corresponding DNA sequence was identified in S. pyogenes.

[11587] Based on this analysis, it was predicted that this protein and its epitopes, could be useful antigens for vaccines or diagnostics.

### EXAMPLE 2118

[11588] A DNA sequence (GBSx2233) was identified in S. agalactiae <SEQ ID 6539> which encodes the amino acid sequence <SEQ ID 6540>. This protein is predicted to be phosphoglucomutase (manB). Analysis of this protein sequence reveals the following:

```
Possible site: 38
>>> Seems to have no N-terminal signal sequence
----- Final Results -----
                            bacterial cytoplasm --- Certainty = 0.2147(Affirmative) < succ>
                              bacterial membrane --- Certainty = 0.0000(Not Clear) < succ>
                                bacterial outside --- Certainty = 0.0000(Not Clear) < succ>
```

[11589] A related GBS nucleic acid sequence <SEQ ID 9355> which encodes amino-acid sequence <SEQ ID 9356> was also identified.

[11590] The protein has homology with the following sequences in the GENPEPT database.

| >GP: CAB96418 GB: AJ243290 phosphoglucomutase [Streptococcus thermophilus] | | | |
|---|---|---|---|
| Identities = 391/465 (84%), Positives = 424/465 (91%), Gaps = 1/465 (0%) | | | |
| Query: | 1 | MAQHGIKSYVFEALRPTPELSFAVRHLNAYAGIMVTASHNPAPFNGYKVYGQDGGQLPPA | 60 |
| | | +A HGIKSYVFE+LRPTPELSFAVRHL+ +AGIM+TASHNPAPFNGYKVYG+DGGQ+PPA | |
| Sbjct: | 107 | LAAHGIKSYVFESLRPTPELSFAVRHLHTFAGIMITASHNPAPFNGYKVYGEDGGQMPPA | 166 |
| Query: | 61 | DADALTDFIRAIENPFAVELADLDESKSSGLIQVIGEDVDIEYLREVKDVNINQDLINNF | 120 |
| | | DADALTD+IRAI+NPF V+LADL++SK+SGLI++IGE+VD EYL+EVKDVNINQDLIN + | |
| Sbjct: | 167 | DADALTDYIRAIDNPFTVKLADLEDSKASGLIEIIGENVDAEYLKEVKDVNINQDLINEY | 226 |
| Query: | 121 | GKDMKIVYTPLHGTGEMLTRRALAQAGFESVVVVESQAKADPDFSTVKSPNPESQAAFAL | 180 |
| | | G+DMKIVYT LHGTGEML RRALAQAGF++V VVE+QA DF TVKSPNPE+Q AFAL | |
| Sbjct: | 227 | GRDMKIVYTSLHGTGEMLVRRALAQAGFDAVQVVEAQAVPHADFLTVKSPNPENQDAFAL | 286 |
| Query: | 181 | AEELGREVDADVLVATDPDADRLGVEIRQPDGSYKNLSGNQIGAIIAKYILEAHKTAGTL | 240 |
| | | AEELGR VDADVLVATDPDADRLGVEIRQPDGSY NLSGNQIGAIIAKYILEAHKTAGTL | |
| Sbjct: | 287 | AEELGRNVDADVLVATDPDADRLGVEIRQPDGSYLNLSGNQIGAIIAKYILEAHKTAGTL | 346 |
| Query: | 241 | PENAALAKSIVSTELVTKIAESYGATMFNVLTGFKFIAEKIQEFEEKHNHTYMFGFEESF | 300 |
| | | P NAAL KSIVSTELVTKIAESYGATMFNVLTGFKFI EKI EFE +HN+TYMFGFEESF | |
| Sbjct: | 347 | PANAALCKSIVSTELVTKIAESYGATMFNVLTGFKFIGEKIHEFETQHNYTYMFGFEESF | 406 |
| Query: | 301 | GYLIKPFVRDKDAIQAVLLVAEIAAYYRSRGLTLADGIDEIYKEYGYFAEKTISVTLSGV | 360 |
| | | GYLIKPFVRDKDAIQAVL+VAEIAAYYRSRG+TLADGI+EIYK+YGYF+EKTISVTLSGV | |
| Sbjct: | 407 | GYLIKPFVRDKDAIQAVLIVAEIAAYYRSRGMTLADGIEEIYKQYGYFSEKTISVTLSGV | 466 |
| Query: | 361 | DGAAEIKKIMDKFRENGPKQFNNTDIVLLEDFQKQTATKNDGTISNLTTPPSNVLKYTLA | 420 |
| | | DGAAEIKKIMDKFR N PKQFNNTDI EDF +QTAT DG + LTTPPSNVLKY LA | |
| Sbjct: | 467 | DGAAEIKKIMDKFRRNAPKQFNNTDIAKTEDFLEQTATTADG-VEKLTTPPSNVLKYILA | 525 |
| Query: | 421 | DDSWIAVRPSGTEPKIKFYIATVGNDLADAETKIANIEKEITTFV | 465 |
| | | DDSW AVRPSGTEPKIKFYIATVG ADA+ KIANIE EI FV | |
| Sbjct: | 526 | DDSWFAVRPSGTEPKIKFYIATVGETEADAKEKIANIEAEINAFV | 570 |

[11591] There is also homology to SEQ ID 6156:

| | | | |
|---|---|---|---|
| Query: | 1 | MAQHGIKSYVFEALRPTPELSFAVRHLNAYAGIMVTASHNPAPFNGYKVYGQDGGQLPPA | 60 |
| | | +AQHGIKSYVFEALRPTPELSFAVRHLNAYAGIMVTASHNPAPFNGYKVYGQDGGQLPPA | |
| Sbjct: | 107 | LAQHGIKSYVFEALRPTPELSFAVRHLNAYAGIMVTASHNPAPFNGYKVYGQDGGQLPPA | 166 |
| Query: | 61 | DADALTDFIRAIENPFAVELADLDESKSSGLIQVIGEDVDIEYLREVKDVNINQDLINNF | 120 |
| | | DADALTDFIRAIENPFAVELADLDE+KSSGLIQVIGEDVD+EYLREVKDVNINQDLINNF | |
| Sbjct: | 167 | DADALTDFIRAIENPFAVELADLDENKSSGLIQVIGEDVDMEYLREVKDVNINQDLINNF | 226 |
| Query: | 121 | GKDMKIVYTPLHGTGEMLTRRALAQAGFESVVVVESQAKADPDFSTVKSPNPESQAAFAL | 180 |
| | | GKDMKIVYTPLHGTGEMLTRRALAQAGFESVVVVESQAKADPDFSTVKSPNPESQAAFAL | |
| Sbjct: | 227 | GKDMKIVYTPLHGTGEMLTRRALAQAGFESVVVVESQAKADPDFSTVKSPNPESQAAFAL | 286 |
| Query: | 181 | AEELGREVDADVLVATDPDADRLGVEIRQPDGSYKNLSGNQIGAIIAKYILEAHKTAGTL | 240 |
| | | AEELGREV+ADVLVATDPDADRLGVEIRQPDGSYKNLSGNQIGAIIAKYILEAHKTAGTL | |
| Sbjct: | 287 | AEELGREVEADVLVATDPDADRLGVEIRQPDGSYKNLSGNQIGAIIAKYILEAHKTAGTL | 346 |
| Query: | 241 | PENAALAKSIVSTELVTKIAESYGATMFNVLTGFKFIAEKIQEFEEKHNHTYMFGFEESF | 300 |
| | | PENAALAKSIVSTELVTKIAESYGATMFNVLTGFKFIAEKIQEFEEKHNHTYMFGFEESF | |
| Sbjct: | 347 | PENAALAKSIVSTELVTKIAESYGATMFNVLTGFKFIAEKIQEFEEKHNHTYMFGFEESF | 406 |
| Query: | 301 | GYLIKPFVRDKDAIQAVLLVAEIAAYYRSRGLTLADGIDEIYKEYGYFAEKTISVTLSGV | 360 |
| | | GYLIKPFVRDKDAIQAVLLVAEIAAYYRSRGLTLADGIDEIYKEYGYFAEKTISVTLSGV | |
| Sbjct: | 407 | GYLIKPFVRDKDAIQAVLLVAEIAAYYRSRGLTLADGIDEIYKEYGYFAEKTISVTLSGV | 466 |
| Query: | 361 | DGAAEIKKIMDKFRENGPKQFNNTDIVLLEDFQKQTATKNDGTISNLTTPPSNVLKYTLA | 420 |
| | | DGAAEIKKIMDKFRENGPKQFNNTDIVLLEDFQKQTATKNDGTISNLTTPPSNVLKYTLA | |
| Sbjct: | 467 | DGAAEIKKIMDKFRENGPKQFNNTDIVLLEDFQKQTATKNDGTISNLTTPPSNVLKYTLA | 526 |
| Query: | 421 | DDSWIAVRPSGTEPKIKFYIATVGNDLADAETKIANIEKEITTFV | 465 |
| | | DDSWIAVRPSGTEPKIKFYIAT+G+ L A+ KIANIE EI TFV | |
| Sbjct: | 527 | DDSWIAVRPSGTEPKIKFYIATIGDTLDIAQEKIANIETEINTFV | 571 |

[11592] Based on this analysis, it was predicted that this protein and its epitopes, could be useful antigens for vaccines or diagnostics.

### EXAMPLE 2119

[11593] A DNA sequence (GBSx2235) was identified in S. agalactiae <SEQ ID 6541> which encodes the amino acid sequence <SEQ ID 6542>. Analysis of this protein sequence reveals the following:

```
Possible site: 20
>>> Seems to have no N-terminal signal sequence
----- Final Results -----
                            bacterial cytoplasm --- Certainty = 0.1564(Affirmative) < succ>
                              bacterial membrane --- Certainty = 0.0000(Not Clear) < succ>
                                bacterial outside --- Certainty = 0.0000(Not Clear) < succ>
```

[11594] A related GBS nucleic acid sequence <SEQ ID 9905> which encodes amino acid sequence <SEQ ID 9906> was also identified. There is also homology to SEQ ID 32.

[11595] Based on this analysis, it was predicted that this protein and its epitopes, could be useful antigens for vaccines or diagnostics.

### EXAMPLE 2120

[11596] A DNA sequence (GBSx2236) was identified in S. agalactiae <SEQ ID 6543> which encodes the amino acid sequence <SEQ ID 6544>. This protein is predicted to be ABC transporter, ATP-binding protein (msbA). Analysis of this protein sequence reveals the following:

| Possible site: 48 | | | | |
|---|---|---|---|---|
| >>> Seems to have an uncleavable N-term signal seq | | | | |
| | INTEGRAL | Likelihood = −9.92 | Transmembrane | 162-178 (135-184) |
| | INTEGRAL | Likelihood = −7.11 | Transmembrane | 58-74 (56-78) |
| | INTEGRAL | Likelihood = −6.42 | Transmembrane | 136-152 (135-161) |
| | INTEGRAL | Likelihood = −5.20 | Transmembrane | 23-39 (21-49) |
| | INTEGRAL | Likelihood = −1.75 | Transmembrane | 485-501 (485-501) |

```
----- Final Results -----
                              bacterial membrane --- Certainty = 0.4970(Affirmative) < succ>
                                bacterial outside --- Certainty = 0.0000(Not Clear) < succ>
                            bacterial cytoplasm --- Certainty = 0.0000(Not Clear) < succ>
```

[11597] The protein has homology with the following sequences in the GENPEPT database.

| >GP: AAD35376 GB: AE001710 ABC transporter, ATP-binding protein | | | |
|---|---|---|---|
| [Thermotoga maritima] | | | |
| Identities = 216/552 (39%), Positives = 336/552 (60%), Gaps = 3/552 (0%) | | | |
| Query: | 26 | MALLGTVVQVCLTVYLPVLIGQAVDVVLSPHSMILLLPIMWKMIAVILANTIIQWINPLL | 85 |
| | | M + V L V P LIG+ +DVV P LL M + + +++ W+ + | |
| Sbjct: | 41 | MVFVFVTVSSILGVLSPYLIGKTIDVVFVPRRFDLLPRYMLILGTIYALTSLLFWLQGKI | 100 |
| Query: | 86 | YNRLIFHYVASLRKAVMEKLNLLPIAYLDKRGIGDLISRVTTDTEQLSNGLLMVFNQFFV | 145 |
| | | L V LRK + EKL +P+ + D+ GD+ISRV D + ++N L QFF | |
| Sbjct: | 101 | MLTLSQDVVFRLRKELFEKLQRVPVGFFDRTPHGDIISRVINDVDNINNVLGNSIIQFFS | 160 |
| Query: | 146 | GLLTIIVTIFSMAKIDLLMLFLVLFLTPLSLFLARFIAKKSY-HLYQNQTASRGRQTQFI | 204 |
| | | G++T+ + M ++++++ + L + PL++ + + ++ ++ + Y+NQ G+ I | |
| Sbjct: | 161 | GIVTLAGAVIMMFRVNVILSLVTLSIVPLTVLITQIVSSQTRKYFYENQRVL-GQLNGII | 219 |
| Query: | 205 | EEMVSQESLIQAFSAQEESSDHFRTINQEYANFSQSAIFYSSTVNPSTRFINSLIYGFLA | 264 |
| | | EE +S ++I+ F+ +E+ + F +N+ A +S + P +N+L + ++ | |
| Sbjct: | 220 | EEDISGLTVIKLFTREEKEMEKFDRVNESLRKVGTKAQIFSGVLPPLMNMVNNLGFALIS | 279 |
| Query: | 265 | GIGALRIMSGAFSVGQLITFLNYVNQYTKPFNDISSVLSEMQSALACAERLYSILEESSP | 324 |
| | | G G + +VG + TF+ Y Q+T+P N++S+ + +Q ALA AER++ IL+ | |
| Sbjct: | 280 | GFGGWLALKDIITVGTIATFIGYSRQFTRPLNELSNQFNMIQMALASAERIFEILDLEEE | 339 |
| Query: | 325 | NITGTEKLDSSTVKGQIDFKNVVFGYNKSKLLLNGINLHIPAGAKVAIVGPTGAGKSTLI | 384 |
| | | + ++ V+G+I+FKNV F Y+K K +L I HI G KVA+VGPTG+GK+T++ | |
| Sbjct: | 340 | K-DDPDAVELREVRGEIEFKNVWFSYDKKKPVLKDITFHIKPGQKVALVGPTGSGKTTIV | 398 |
| Query: | 385 | NLIMRFYEVDGGNILLDCKPITDYEPSQLRQEIGMVLQETWLKSATIHDNIAYANPKASR | 444 |
| | | NL+MRFY+VD G IL+D I + S LR IG+VLQ+T L S T+ +N+ Y NP A+ | |
| Sbjct: | 399 | NLLMRFYDVDRGQILVDGIDIRKIKRSSLRSSIGIVLQDTILFSTTVKENLKYGNPGATD | 458 |
| Query: | 445 | EEVIEAAKAANADFFIKQLPNGYDTYLEDAGDSLSQGQCQLLTIARIFLKLPRILILDEA | 504 |
| | | EE+ EAAK ++D FIK LP GY+T L D G+ LSQGQ QLL I R FL P+ILILDEA | |
| Sbjct: | 459 | EEIKEAAKLTHSDHFIKHLPEGYETVLTDNGEDLSQGQRQLLAITRAFLANPKILILDEA | 518 |
| Query: | 505 | TSSIDTRTEVLVQEAFQMLMKGRTSFIIAHRLSTIQTADIILVMVSGEIVEVGNHSELMA | 564 |
| | | TS++DT+TE +Q A LM+G+TS IIAHRL+TI+ AD+I+V+ GEIVE+G H EL+ | |
| Sbjct: | 519 | TSNVDTKTEKSIQAAMWKLMEGKTSIIIAHRLNTIKNADLIIVLRDGEIVEMGKHDELIQ | 578 |
| Query: | 565 | QKGIYYQMQNAQ | 576 |
| | | ++G YY++ +Q | |
| Sbjct: | 579 | KRGFYYELFTSQ | 590 |

[11598] A related DNA sequence was identified in S. pyogenes <SEQ ID 6545> which encodes the amino acid sequence <SEQ ID 6546>. Analysis of this protein sequence reveals the following:

| Possible site: 56 | | | | |
|---|---|---|---|---|
| >>> Seems to have an uncleavable N-term signal seq | | | | |
| | INTEGRAL | Likelihood = −8.07 | Transmembrane | 162-178 (159-182) |
| | INTEGRAL | Likelihood = −7.17 | Transmembrane | 143-159 (137-161) |
| | INTEGRAL | Likelihood = −5.84 | Transmembrane | 23-39 (19-45) |
| | INTEGRAL | Likelihood = −5.68 | Transmembrane | 68-84 (60-86) |
| | INTEGRAL | Likelihood = −2.55 | Transmembrane | 261-277 (256-278) |

```
----- Final Results -----
                              bacterial membrane --- Certainty = 0.4227(Affirmative) < succ>
                                bacterial outside --- Certainty = 0.0000(Not Clear) < succ>
                            bacterial cytoplasm --- Certainty = 0.0000(Not Clear) < succ>
```

[11599] The protein has homology with the following sequences in the databases:

| >GP: AAD35376 GB: AE001710 ABC transporter, ATP-binding protein | | | |
|---|---|---|---|
| [Thermotoga maritima] | | | |
| Identities = 206/572 (36%), Positives = 342/572 (59%), Gaps = 5/572 (0%) | | | |
| Query: | 2 | IKTDHHLLKRVLQDLLKKPLPVCILVIASFVQVG--LSVYLPVLIGKAVDMSLSVNSWQT | 59 |
| | | +K L+R+L L +P ++++ FV V L V P LIGK +D+ + | |
| Sbjct: | 18 | LKNPTATLRRLLGYL--RPHTFTLIMVFVFVTVSSILGVLSPYLIGKTIDVVFVPRRFDL | 75 |
| Query: | 60 | LKWLLGQMLVIIVVNTLIQWVMPLVYSRLLYQYSQQLKDKLLEKIHRLPFAYLDRQTIGD | 119 |
| | | L + + I + +L+ W+ + L +L+ +L EK+ R+P + DR GD | |
| Sbjct: | 76 | LPRYMLILGTIYALTSLLFWLQGKIMLTLSQDVVFRLRKELFEKLQRVPVGFFDRTPHGD | 135 |
| Query: | 120 | LVSRVITDTEQLINGLQMVFNQFILGLLTILCTIIAMAQIDWLMLILVLVLTPSSLFLAR | 179 |
| | | ++SRVI D + + N L QF G++T+ +I M +++ ++ ++ L + P ++ + + | |
| Sbjct: | 136 | IISRVINDVDNINNVLGNSIIQFFSGIVTLAGAVIMMFRVNVILSLVTLSIVPLTVLITQ | 195 |
| Query: | 180 | FIAQKSFHYAQAQTKSRGNLAQFTEEILRQEGLVQLFNAQEQSICDYHVLNKTYCEASQK | 239 |
| | | ++ ++ Y + G L EE + +++LF +E+ + + +N++ + K | |
| Sbjct: | 196 | IVSSQTRKYFYENQRVLGQLNGIIEEDISGLTVIKLFTREEKEMEKFDRVNESLRKVGTK | 255 |
| Query: | 240 | AIFYASTVNPATRFINSVIYALLAGLGAVRIMAGLFSVGQLTTFLNVVVQYTKPFNDISS | 299 |
| | | A ++ + P +N++ +AL++G G + + +VG + TF+ Q+T+P N++S+ | |
| Sbjct: | 256 | AQIFSGVLPPLMNMVNNLGFALISGFGGWLALKDIITVGTIATFIGYSRQFTRPLNELSN | 315 |
| Query: | 300 | VLAEIQSSLACAQRLYDLLDIEIKEQEHFLTFKASAVKGQIDFEEVSFSYQKDRPLLKDI | 359 |
| | | IQ +LA A+R++++LD+E +E++ + V+G+I+F+ V FSY K +P+LKDI | |
| Sbjct: | 316 | QFNMIQMALASAERIFEILDLE-EEKDDPDAVELREVRGEIEFKNVWFSYDKKKPVLKDI | 374 |
| Query: | 360 | NFSVPAGSKVAIVGPTGAGKSTLINLLMRFYELDAGSIKLDKVPIKCYAKEELRSITGIV | 419 |
| | | F + G KVA+VGPTG+GK+T++NLLMRFY++D G I +D + I+ + LRS GIV | |
| Sbjct: | 375 | TFHIKPGQKVALVGPTGSGKTTIVNLLMRFYDVDRGQILVDGIDIRKIKRSSLRSSIGIV | 434 |
| Query: | 420 | LQETWLKDATVHELIAYGSEEASRDEVVAAAKAAHAHFFIMQLPKTYDTYLSASDDALSQ | 479 |
| | | LQ+T L TV E + YG+ A+ +E+ AAK H+ FI LP+ Y+T L+ + + LSQ | |
| Sbjct: | 435 | LQDTILFSTTVKENLKYGNPGATDEEIKEAAKLTHSDHFIKHLPEGYETVLTDNGEDLSQ | 494 |
| Query: | 480 | GQLQLLAIARMFLKKPKVLVLDEATSSIDIRTEAVIQEALKELMRGRTSFIIAHRLSTIQ | 539 |
| | | GQ QLLAI R FL PK+L+LDEATS++D +TE IQ A+ +LM G+TS IIAHRL+TI+ | |
| Sbjct: | 495 | GQRQLLAITRAFLANFKILILDEATSNVDTKTEKSIQAAMWKLMEGKTSIIIAHRLNTIK | 554 |
| Query: | 540 | SADLILVMDQGRLVEWGTHASLMSKNGCYVRL | 571 |
| | | +ADLI+V+ G +VE G H L+ K G Y L | |
| Sbjct: | 555 | NADLIIVLRDGEIVEMGKHDELIQKRGFYYEL | 586 |

[11600] An alignment of the GAS and GBS proteins is shown below.

| Identities = 340/566 (60%), Positives = 433/566 (76%) | | | |
|---|---|---|---|
| Query: | 11 | KKLVQDLLSKKSLVGMALLGTVVQVCLTVYLPVLIGQAVDVVLSPHSMILLLPIMWKMIA | 70 |
| | | K+++QDLL K V + ++ + VQV L+VYLPVLIG+AVD+ LS +S L ++ +M+ | |
| Sbjct: | 10 | KRVLQDLLKKPLPVCILVIASFVQVGLSVYLPVLIGKAVDMSLSVNSWQTLKWLLGQMLV | 69 |
| Query: | 71 | VILANTIIQWINPLLYNRLIFHYVASLRKAVMEKLNLLPIAYLDKRGIGDLISRVTTDTE | 130 |
| | | +I+ NT+IQW+ PL+Y+RL++ Y L+ ++EK++ LP AYLD++ IGDL+SRV TDTE | |
| Sbjct: | 70 | IIVVNTLIQWVMPLVYSRLLYQYSQQLKDKLLEKIHRLPFAYLDRQTIGDLVSRVITDTE | 129 |
| Query: | 131 | QLSNGLLMVFNQFFVGLLTIIVTIFSMAKIDLLMLFLVLFLTPLSLFLARFIAKKSYHLY | 190 |
| | | QL NGL MVFNQF +GLLTI+ TI +MA+ID LML LVL LTP SLFLARFIA+KS+H | |
| Sbjct: | 130 | QLINGLQMVFNQFILGLLTILCTIIAMAQIDWLMLILVLVLTPSSLFLARFIAQKSFHYA | 189 |
| Query: | 191 | QNQTASRGRQTQFIEEMVSQESLIQAFSAQEESSDHFRTINQEYANFSQSAIFYSSTVNP | 250 |
| | | Q QT SRG QF EE++ QE L+Q F+AQE+S + +N+ Y SQ AIFY+STVNP | |
| Sbjct: | 190 | QAQTKSRGNLAQFTEEILRQEGLVQLFNAQEQSICDYHVLNKTYCEASQKAIFYASTVNP | 249 |
| Query: | 251 | STRFINSLIYGFLAGIGALRIMSGAFSVGQLITFLNYVNQYTKPFNDISSVLSEMQSALA | 310 |
| | | +TRFINS+IY LAG+GA+RIM+G FSVGQL TFLN V QYTKPFNDISSVL+E+QS+LA | |
| Sbjct: | 250 | ATRFINSVIYALLAGLGAVRIMAGLFSVGQLTTFLNVVVQYTKPFNDISSVLAEIQSSLA | 309 |
| Query: | 311 | CAERLYSILEESSPNITGTEKLDSSTVKGQIDFKNVVFGYNKSKLLLNGINLHIPAGAKV | 370 |
| | | CA+RLY +L+ +S VKGQIDF+ V F Y K + LL IN +PAG+KV | |
| Sbjct: | 310 | CAQRLYDLLDIEIKEQEHFLTFKASAVKGQIDFEEVSFSYQKDRPLLKDINFSVPAGSKV | 369 |
| Query: | 371 | AIVGPTGAGKSTLINLIMRFYEVDGGNILLDCKPITDYEPSQLRQEIGMVLQETWLKSAT | 430 |
| | | AIVGPTGAGKSTLINL+MRFYE+D G+I LD PI Y +LR G+VLQETWLK AT | |
| Sbjct: | 370 | AIVGPTGAGKSTLINLLMRFYELDAGSIKLDKVPIKCYAKEELRSITGIVLQETWLKDAT | 429 |
| Query: | 431 | IHDNIAYANPKASREEVIEAAKAANADFFIKQLPNGYDTYLEDAGDSLSQGQCQLLTIAR | 490 |
| | | +H+ IAY + +ASR+EV+ AAKAA+A FFI QLP YDTYL +D+LSQGQ QLL IAR | |
| Sbjct: | 430 | VHELIAYGSEEASRDEVVAAAKAAHAHFFIMQLPKTYDTYLSASDDALSQGQLQLLAIAR | 489 |
| Query: | 491 | IFLKLPRILILDEATSSIDTRTEVLVQEAFQMLMKGRTSFIIAHRLSTIQTADIILVMVS | 550 |
| | | +FLK P++L+LDEATSSID RTE ++QEA + LM+GRTSFIIAHRLSTIQ+AD+ILVM | |
| Sbjct: | 490 | MFLKKPKVLVLDEATSSIDIRTEAVIQEALKELMRGRTSFIIAHRLSTIQSADLILVMDQ | 549 |
| Query: | 551 | GEIVEVGNHSELMAQKGIYYQMQNAQ | 576 |
| | | G +VE G H+ LM++ G Y ++Q + | |
| Sbjct: | 550 | GRLVEWGTHASLMSKNGCYVRLQKIE | 575 |

[11601] Based on this analysis, it was predicted that this protein and its epitopes, could be useful antigens for vaccines or diagnostics.

### EXAMPLE 2121

[11602] A DNA sequence (GBSx2237) was identified in S. agalactiae <SEQ ID 6547> which encodes the amino acid sequence <SEQ ID 6548>. Analysis of this protein sequence reveals the following:

```
Possible site: 26
>>> Seems to have no N-terminal signal sequence
----- Final Results -----
                            bacterial cytoplasm --- Certainty = 0.1099(Affirmative) < succ>
                              bacterial membrane --- Certainty = 0.0000(Not Clear) < succ>
                                bacterial outside --- Certainty = 0.0000(Not Clear) < succ>
```

[11603] The protein has no significant homology with any sequences in the GENPEPT database.

[11604] No corresponding DNA sequence was identified in S. pyogenes.

[11605] Based on this analysis, it was predicted that this protein and its epitopes, could be useful antigens for vaccines or diagnostics.

### EXAMPLE 2122

[11606] A DNA sequence (GBSx2238) was identified in S. agalactiae <SEQ ID 6549> which encodes the amino acid sequence <SEQ ID 6550>. This protein is predicted to be ABC transporter, ATP-binding protein (msbA). Analysis of this protein sequence reveals the following:

| Possible site: 37 | | | | |
|---|---|---|---|---|
| >>> Seems to have no N-terminal signal sequence | | | | |
| | INTEGRAL | Likelihood = −13.69 | Transmembrane | 157-173 (130-182) |
| | INTEGRAL | Likelihood = −10.88 | Transmembrane | 56-72 (49-77) |
| | INTEGRAL | Likelihood = −7.75 | Transmembrane | 239-255 (235-258) |
| | INTEGRAL | Likelihood = −6.42 | Transmembrane | 133-149 (130-156) |
| | INTEGRAL | Likelihood = −4.78 | Transmembrane | 271-287 (270-289) |
| | INTEGRAL | Likelihood = −1.91 | Transmembrane | 20-36 (20-37) |

```
----- Final Results -----
                              bacterial membrane --- Certainty = 0.6477(Affirmative) < succ>
                                bacterial outside --- Certainty = 0.0000(Not Clear) < succ>
                            bacterial cytoplasm --- Certainty = 0.0000(Not Clear) < succ>
```

[11607] The protein has homology with the following sequences in the GENPEPT database.

| >GP: AAD35375 GB: AE001710 ABC transporter, ATP-binding protein | | | |
|---|---|---|---|
| [Thermotoga maritima] | | | |
| Identities = 196/570 (34%), Positives = 327/570 (56%), Gaps = 5/570 (0%) | | | |
| Query: | 1 | MKRLTYYFKGYIKETIFGPLFKLLEASFELLVPIVIAKMIDETIPRGDRSGLLLQIGLIF | 60 |
| | | MK L Y K Y + PLF ++E +L P ++A+++DE I RGD S L+L+ G++ | |
| Sbjct: | 1 | MKTLARYLKPYWIFAVLAPLFMVVEVICDLSQPTLLARIVDEGIARGDFS-LVLKTGILM | 59 |
| Query: | 61 | FLAA-VGVVVAITAQYYSSKAAVGYTRQLTEDLYQKVMSLGKKDRDELGTASLITRLTAD | 119 |
| | | + A +G V I ++S A+ + L DL++KV+S + + T+SLITRLT D | |
| Sbjct: | 60 | LIVALIGAVGGIGCTVFASYASQNFGADLRRDLFRKVLSFSISNVNRFHTSSLITRLTND | 119 |
| Query: | 120 | TFQIQTGLNQFLRLFLRAPIIVFGAIIMAFSISPSLTIWFLVMVVTLFIIVFVMSRLLNP | 179 |
| | | Q+Q + LR+ +RAP++ G I+MA SI+ L+ + ++ + ++ +++ NP | |
| Sbjct: | 120 | VTQLQNLVMMLLRIVVRAPLLFVGGIVMAVSINVKLSSVLIFLIPPIVLLFVWLTKKGNP | 179 |
| Query: | 180 | IYLKIRTSTDYLVKLTRQQLQGVRVIRAFNQVDRESEAFNDINYHYTNLQLKAGRLSSLV | 239 |
| | | ++ KI+ STD + ++ R+ L GVRV+RAF + + E+E F N + A L | |
| Sbjct: | 180 | LFRKIQESTDEVNRVVRENLLGVRVVRAFRREEYENENFRKANESLRRSIISAFSLIVFA | 239 |
| Query: | 240 | TPLTFLVVNITLVVIIWRGNLNIANHLLSQGMLVALINYLLQILVELLKMTMLVTSLNQS | 299 |
| | | PL +VN+ ++ ++W G + + N+ + G ++A NYL+QI+ L+ + ++ + ++ | |
| Sbjct: | 240 | LPLFIFIVNMGMIAVLWFGGVLVRNNQMEIGSIMAYTNYLMQIMFSLMMIGNILNFIVRA | 299 |
| Query: | 300 | YISAKRIIAVF-ERPS-EIIDDKLEPKYSNKALEVQEMAFSYPNSSEKALSDITFSMNVG | 357 |
| | | SAKR++ V E+P+ E D+ L ++ + + F Y +++ LS + FS+ G | |
| Sbjct: | 300 | SASAKRVLEVLNEKPAIEEADNALALPNVEGSVSFENVEFRYFENTDPVLSGVNFSVKPG | 359 |
| Query: | 358 | ETLGIIGGTGSGKSTLINLLLHIYKVQEGDIDIYHQGKSPDTISNWRTLVRVVPQNAQLF | 417 |
| | | + ++G TGSGKSTL+NL+ + + G +++ + + R + VPQ LF | |
| Sbjct: | 360 | SLVAVLGETGSGKSTLMNLIPRLIDPERGRVEVDELDVRTVKLKDLRGHISAVPQETVLF | 419 |
| Query: | 418 | KGTIRSNLSLGLGKVSEEKLWTALEIAQASDFVKEKDGQLDAPVESFGRNFSGGQRQRLT | 477 |
| | | GTI+ NL G +++++ A +IAQ DF+ D+ VE GRNFSGGQ+QRL+ | |
| Sbjct: | 420 | SGTIKENLKWGREDATDDEIVEAAKIAQIHDFIISLPEGYDSRVERGGRNFSGGQKQRLS | 479 |
| Query: | 478 | IARALVQDKIPFLILDDATSALDYLTEARLFKAITKHFNQTNLIIVSQRINSIQNADRIL | 537 |
| | | IARALV+ K LILDD TS++D +TE R+ + ++ I++Q+I + AD+IL | |
| Sbjct: | 480 | IARALVK-KPKVLILDDCTSSVDPITEKRILDGLKRYTKGCTTFIITQKIPTALLADKIL | 538 |
| Query: | 538 | LLDKGKQVGFDNHQSLLAHNKVYKSIYHSQ | 567 |
| | | +L +GK GF H+ LL H K Y+ IY SQ | |
| Sbjct: | 539 | VLHEGKVAGFGTHKELLEHCKPYREIYESQ | 568 |

[11608] A related DNA sequence was identified in S. pyogenes <SEQ ID 6551> which encodes the amino acid sequence <SEQ ID 6552>. Analysis of this protein sequence reveals the following:

| Possible site: 37 | | | | |
|---|---|---|---|---|
| >>> Seems to have no N-terminal signal sequence | | | | |
| | INTEGRAL | Likelihood = −12.47 | Transmembrane | 157-173 (149-185) |
| | INTEGRAL | Likelihood = −7.75 | Transmembrane | 55-71 (51-74) |
| | INTEGRAL | Likelihood = −4.25 | Transmembrane | 239-255 (237-260) |
| | INTEGRAL | Likelihood = −3.77 | Transmembrane | 20-36 (19-37) |
| | INTEGRAL | Likelihood = −3.50 | Transmembrane | 271-287 (270-288) |
| | INTEGRAL | Likelihood = −2.55 | Transmembrane | 133-149 (130-151) |

```
----- Final Results -----
                              bacterial membrane --- Certainty = 0.5989(Affirmative) < succ>
                                bacterial outside --- Certainty = 0.0000(Not Clear) < succ>
                            bacterial cytoplasm --- Certainty = 0.0000(Not Clear) < succ>
```

[11609] The protein has homology with the following sequences in the databases:

| !GB: AL137187 putative ABC transporter [Streptomyces . . . 296 6e−79 | | | |
|---|---|---|---|
| >GP: CAB69751 GB: AL137187 putative ABC transporter [Streptomyces | | | |
| coelicolor A3(2)] | | | |
| Identities = 185/569 (32%), Positives = 306/569 (53%), Gaps = 8/569 (1%) | | | |
| Query: | 1 | MKRLRPYVKGYLKESILGPLFKLLEALFELLVPLLIANMIDISISQHNSQGILRVVLTLF | 60 |
| | | ++ LR Y++ Y K L + L+ L +P L A++ID + + +S IL + | |
| Sbjct: | 3 | IRLLRTYLRPYKKPIALLVALQFLQTCASLYLPTLNAHIIDEGVVKGDSGYILSYGALMI | 62 |
| Query: | 61 | GLATIGLLLSVTAQYFSSKAAVGFTRQMTDDLFKKIMFLSKEDQDHLGYASLLSRLTSDS | 120 |
| | | G++ ++ ++ A ++ ++ A R + +F ++ S + H G SL++R T+D | |
| Sbjct: | 63 | GISLAQVVCNIGAVFYGARTAAALGRDVRGAVFDRVQSFSAREVGHFGAPSLITRTTNDV | 122 |
| Query: | 121 | FQIQTGINQFLRLFLRAPIIVCGAMVMAYWISPSLTLWFVMMVIVLLTLVFVMSHLLGPL | 180 |
| | | Q+Q L + API+ G +VMA + L+ + +V VL V ++ L PL | |
| Sbjct: | 123 | QQVQMLALMTFTLMVSAPIMCVGGIVMALGLDVPLSGVLLGVVPVLAICVTLIVRKLRPL | 182 |
| Query: | 181 | YLLIRRETDHLVRLTSQQLQGIRVIKAFNQTQKELQAFKQQNMLLSRHQYQAATLANVLN | 240 |
| | | + ++ D + R+ +Q+ G RVI+AF + + E Q F++ N L+ L ++ | |
| Sbjct: | 183 | FRKMQVRLDTVNRVLREQITGNRVIRAFVRDEYEQQRFRKANTELTEVALGTGNLLALMF | 242 |
| Query: | 241 | PMTFLVVNLTLLILIWQGSWQVAHRSLSQGMLVALINYLLQILAELLKMTMLMGTINQSV | 300 |
| | | P+ VVNL+ + ++W G+ ++ + G L A + YL+QI+ ++ T + + ++ | |
| Sbjct: | 243 | PVVMTVVNLSSIAVVWFGAHRIDSGGMQIGDLTAFLAYLMQIVMSVMMATFMFMMVPRAE | 302 |
| Query: | 301 | TAAKRINQVFVLADEAPLPLLKDGPISTH-LLTIRHLTFTYPGAAEPSLYDIQLSADQGE | 359 |
| | | A+RI +V P+ + H L IR F YPGA EP L I L A GE | |
| Sbjct: | 303 | VCAERIQEVLETESSVVPPVAPVTELRRHGHLEIREAGFRYPGAEEPVLRHIDLVARPGE | 362 |
| Query: | 360 | WIGIIGGTGAGKTTLIDLICQTYSQYSGEISLNW---QGEVPKTLTEWRNVIALVPQKAQ | 416 |
| | | +IG TG+GK+TL+ L+ + + GE+ +N + PKTL + V++LVPQK | |
| Sbjct: | 363 | TTAVIGSTGSGKSTLLGLVPRLFDATDGEVLVNGVDVRTVDPKTLAK---VVSLVPQKPY | 419 |
| Query: | 417 | LFKGTIRSNLLLGQSMPISDEELWRALELAQAKEFVAALPEQLEAPVEAFGRHFSGGQRQ | 476 |
| | | LF GT+ +NL G + +DEELW AL +AQAKEFV+ L L+AP+ G + SGGQRQ | |
| Sbjct: | 420 | LFAGTVATNLRYG-NPDATDEELWHALAVAQAKEFVSELEGGLDAPIAQGGTNVSGGQRQ | 478 |
| Query: | 477 | RLAIARALLKPKPILILDDASSALDNETRGRLFKALKEELSDVLVILVTQSIKNLQFADK | 536 |
| | | RLAIAR L++ I + DD+ SALD T L L +E ++ V++V Q + ++ AD+ | |
| Sbjct: | 479 | RLAIARTLVQRPEIYLFDDSFSALDYATDAALRAELAQETAEATVVIVAQRVATIRDADR | 538 |
| Query: | 537 | ILVLEQGHQLDFASHDQLKVSNALYQEML | 565 |
| | | I+VL++G + H +L N Y+E++ | |
| Sbjct: | 539 | IVVLDEGRVVGVGRHHELMADNETYREIV | 567 |

[11610] An alignment of the GAS and GBS proteins is shown below.

| Identities = 313/568 (55%), Positives = 428/568 (75%), Gaps = 9/568 (1%) | | | |
|---|---|---|---|
| Query: | 1 | MKRLTYYFKGYIKETIFGPLFKLLEASFELLVPIVIAKMIDETIPRGDRSGLLLQIGLIF | 60 |
| | | MKRL Y KGY+KE+I GPLFKLLEA FELLVP++IA MID +I + + G+L + +F | |
| Sbjct: | 1 | MKRLRPYVKGYLKESILGPLFKLLEALFELLVPLLIANMIDISISQHNSQGILRVVLTLF | 60 |
| Query: | 61 | FLAAVGVVVAITAQYYSSKAAVGYTRQLTEDLYQKVMSLGKKDRDELGTASLITRLTADT | 120 |
| | | LA +G+++++TAQY+SSKAAVG+TRQ+T+DL++K+M L K+D+D LG ASL++RLT+D+ | |
| Sbjct: | 61 | GLATIGLLLSVTAQYFSSKAAVGFTRQMTDDLFKKIMFLSKEDQDHLGYASLLSRLTSDS | 120 |
| Query: | 121 | FQIQTGLNQFLRLFLRAPIIVFGAIIMAFSISPSLTIWFLVMVVTLFIIVFVMSRLLNPI | 180 |
| | | FQIQTG+NQFLRLFLRAPIIV GA++MA+ ISPSLT+WF++MV+ L +VFVMS LL P+ | |
| Sbjct: | 121 | FQIQTGINQFLRLFLRAPIIVCGAMVMAYWISPSLTLWFVMMVIVLLTLVFVMSHLLGPL | 180 |
| Query: | 181 | YLKIRTSTDYLVKLTRQQLQGVRVIRAFNQVDRESEAFNDINYHYTNLQLKAGRLSSLVT | 240 |
| | | YL IR TD+LV+LT QQLQG+RVI+AFNQ +E +AF N + Q +A L++++ | |
| Sbjct: | 181 | YLLIRRETDHLVRLTSQQLQGIRVIKAFNQTQKELQAFKQQNMLLSRHQYQAATLANVLN | 240 |
| Query: | 241 | PLTFLVVNITLVVIIWRGNLNIANHLLSQGMLVALINYLLQILVELLKMTMLVTSLNQSY | 300 |
| | | P+TFLVVN+TL+++IW+G+ +A+ LSQGMLVALINYLLQIL ELLKMTML+ ++NQS | |
| Sbjct: | 241 | PMTFLVVNLTLLILIWQGSWQVAHRSLSQGMLVALINYLLQILAELLKMTMLMGTINQSV | 300 |
| Query: | 301 | ISAKRIIAVF----ERPSEIIDDKLEPKYSNKALEVQEMAFSYPNSSEKALSDITFSMNV | 356 |
| | | +AKRI VF E P ++ D S L ++ + F+YP ++E +L DI S + | |
| Sbjct: | 301 | TAAKRINQVFVLADEAPLPLLKD---GPISTHLLTIRHLTFTYPGAAEPSLYDIQLSADQ | 357 |
| Query: | 357 | GETLGIIGGTGSGKSTLINLLLHIYKVQEGDIDIYHQGKSPDTISNWRTLVRVVPQNAQL | 416 |
| | | GE +GIIGGTG+GK+TLI+L+ Y G+I + QG+ P T++ WR ++ +VPQ AQL | |
| Sbjct: | 358 | GEWIGIIGGTGAGKTTLIDLICQTYSQYSGEISLNWQGEVPKTLTEWRNVIALVPQKAQL | 417 |
| Query: | 417 | FKGTIRSNLSLGLG-KVSEEKLWTALEIAQASDFVKEKDGQLDAPVESFGRNFSGGQRQR | 475 |
| | | FKGTIRSNL LG +S+E+LW ALE+AQA +FV QL+APVE+FGR+FSGGQRQR | |
| Sbjct: | 418 | FKGTIRSNLLLGQSMPISDEELWRALELAQAKEFVAALPEQLEAPVEAFGRHFSGGQRQR | 477 |
| Query: | 476 | LTIARALVQDKIPFLILDDATSALDYLTEARLFKAITKHFNQTNLIIVSQRINSIQNADR | 535 |
| | | L IARAL++ K P LILDDA+SALD T RLFKA+ + + +I+V+Q I ++Q AD+ | |
| Sbjct: | 478 | LAIARALLKPK-PILILDDASSALDNETRGRLFKALKEELSDVLVILVTQSIKNLQFADK | 536 |
| Query: | 536 | ILLLDKGKQVGFDNHQSLLAHNKVYKSI | 563 |
| | | IL+L++G Q+ F +H L N +Y+ + | |
| Sbjct: | 537 | ILVLEQGHQLDFASHDQLKVSNALYQEM | 564 |

[11611] Based on this analysis, it was predicted that this protein and its epitopes, could be useful antigens for vaccines or diagnostics.

### EXAMPLE 2123

[11612] A DNA sequence (GBSx2239) was identified in S. agalactiae <SEQ ID 6553> which encodes the amino acid sequence <SEQ ID 6554>. Analysis of this protein sequence reveals the following:

| Possible site: 43 | | | | |
|---|---|---|---|---|
| >>> Seems to have an uncleavable N-term signal seq | | | | |
| | INTEGRAL | Likelihood = −12.26 | Transmembrane | 8-24 (1-28) |

```
----- Final Results -----
                              bacterial membrane --- Certainty = 0.5904(Affirmative) < succ>
                                bacterial outside --- Certainty = 0.0000(Not Clear) < succ>
                            bacterial cytoplasm --- Certainty = 0.0000(Not Clear) < succ>
```

[11613] The protein has homology with the following sequences in the GENPEPT database.

| >GP: AAB84433 GB: AF027868 RAS-related protein [Bacillus subtilis] | | | |
|---|---|---|---|
| Identities = 53/140 (37%), Positives = 78/140 (54%), Gaps = 2/140 (1%) | | | |
| Query: | 28 | VKKVLQYHDLVQNTLAENGSEANVHLVLSMIYTETKGDAIDVMQSSESISGTTNSITDSH | 87 |
| | | ++++ Y LV+ L G L+L M+Y E+KG D MQSSES+ N ITD | |
| Sbjct: | 49 | LERLTDYKPLVEEELESQGLSNYTSLILGMMYQESKGKGNDPMQSSESLGLKRNEITDPQ | 108 |
| Query: | 88 | TSIKHGVTLLSQNISQAKKAKVDVWTAVQAYNFGSSYIDYVADHGGENSIELAKNYSKNV | 147 |
| | | S+K G+ + K+ VD+ T +Q+YN G+ YID+VA+HGG ++ ELAK YS+ | |
| Sbjct: | 109 | LSVKQGIKQFTLMYKTGKEKGVDLDTIIQSYNMGAGYIDFVAEHGGTHTEELAKQYSEQQ | 168 |
| Query: | 148 | VA--PSLGNYNGDTYFYYHP | 165 |
| | | V P L G+ + +P | |
| Sbjct: | 169 | VKKNPDLYTCGGNAKNFRYP | 188 |

[11614] A related DNA sequence was identified in S. pyogenes <SEQ ID 4143> which encodes the amino acid sequence <SEQ ID 4144>. Analysis of this protein sequence reveals the following:

| Possible site: 42 | | | | |
|---|---|---|---|---|
| >>> Seems to have an uncleavable N-term signal seq | | | | |
| | INTEGRAL | Likelihood = −2.66 | Transmembrane | 8-24 (7-25) |

```
----- Final Results -----
                              bacterial membrane --- Certainty = 0.2062(Affirmative) < succ>
                                bacterial outside --- Certainty = 0.0000(Not Clear) < succ>
                            bacterial cytoplasm --- Certainty = 0.0000(Not Clear) < succ>
```

[11615] An alignment of the GAS and GBS proteins is shown below.

| Identities = 134/200 (67%), Positives = 165/200 (82%), Gaps = 1/200 (0%) | | | |
|---|---|---|---|
| Query: | 1 | MFKFLKRLIALIIIIFIGYRLVIIHENVKKVLQYHDLVQNTLAENGSEANVHLVLSMIYT | 60 |
| | | MF+ LKR + +++ F+ Y+ +IH NV++VL Y +V+ TLAEN ++ANV LVL+MIYT | |
| Sbjct: | 1 | MFRLLKRACSFLLL-FVIYQSFVIHHNVQRVLAYKPMVEKTLAENDTKANVDLVLAMIYT | 59 |
| Query: | 61 | ETKGDAIDVMQSSESISGTTNSITDSHTSIKHGVTLLSQNISQAKKAKVDVWTAVQAYNF | 120 |
| | | ETKG DVMQSSES SG NSITDS SI+HGV LLS N++ A++A VD WTAVQAYNF | |
| Sbjct: | 60 | ETKGGEADVMQSSESSSGQKNSITDSQASIEHGVNLLSHNLALAEEAGVDSWTAVQAYNF | 119 |
| Query: | 121 | GSSYIDYVADHGGENSIELAKNYSKNVVAPSLGNYNGDTYFYYHPLALISGGKLYKNGGN | 180 |
| | | G++YIDY+A+HGG+N+++LA YSK VVAPSLGN +G TYFYYHPLALISGGKLYKNGGN | |
| Sbjct: | 120 | GTAYIDYIAEHGGQNTVDLATTYSKTVVAPSLGNTSGQTYFYYHPLALISGGKLYKNGGN | 179 |
| Query: | 181 | IYYSREVQFNLYLIKIMELF | 200 |
| | | IYYSREV FNLYLI++M LF | |
| Sbjct: | 180 | IYYSREVHFNLYLIELMSLF | 199 |

[11616] SEQ ID 6554 (GBS244) was expressed in E. coli as a His-fusion product. SDS-PAGE analysis of total cell extract is shown in FIG. 59 (lane 4; MW 23.1 kDa). It was also expressed in E. coli as a GST-fusion product. SDS-PAGE analysis of total cell extract is shown in FIG. 67 (lane 2; MW 48 kDa).

[11617] GBS244-GST was purified as shown in FIG. 211, lane 5.

[11618] Based on this analysis, it was predicted that this protein and its epitopes, could be useful antigens for vaccines or diagnostics.

### EXAMPLE 2124

[11619] A DNA sequence (GBSx2240) was identified in S. agalactiae <SEQ ID 6555> which encodes the amino acid sequence <SEQ ID 6556>. Analysis of this protein sequence reveals the following:

```
Possible site: 38
>>> Seems to have no N-terminal signal sequence
----- Final Results -----
                            bacterial cytoplasm --- Certainty = 0.2401(Affirmative) < succ>
                              bacterial membrane --- Certainty = 0.0000(Not Clear) < succ>
                                bacterial outside --- Certainty = 0.0000(Not Clear) < succ>
```

[11620] A related GBS nucleic acid sequence <SEQ ID 9837> which encodes amino acid sequence <SEQ ID 9838> was also identified.

[11621] The protein has homology with the following sequences in the GENPEPT database.

| >GP: CAB71302 GB: AJ130879 hypothetical protein [Clostridium | | | |
|---|---|---|---|
| sticklandii] | | | |
| Identities = 32/95 (33%), Positives = 53/95 (55%), Gaps = 1/95 (1%) | | | |
| Query: | 235 | LSPEKLADQLFDDNLTARLTFVDELKDAIPGPVQVSDIDHSRQIKKLENQKLSLSNGIEL | 294 |
| | | LS EK + F++ + + + L A Q+ ++ + +K E QK+ +GIE+ | |
| Sbjct: | 2 | LSVEKALETAFEETDEIKAIYKEALSKAGIENEQI-EVSETALKRKFEIQKIITESGIEV | 60 |
| Query: | 295 | IVPNNVYQDAESVEFIQNPDGTYSILIKNIQDIQN | 329 |
| | | +P N Y D +EF+ N DGT S++IKNI +IQ+ | |
| Sbjct: | 61 | KIPVNYYGDPSKLEFVANGDGTVSLVIKNIGNIQS | 95 |

[11622] A related DNA sequence was identified in S. pyogenes <SEQ ID 6557> which encodes the amino acid sequence <SEQ ID 6558>. Analysis of this protein sequence reveals the following:

```
Possible site: 52
>>> Seems to have no N-terminal signal sequence
----- Final Results -----
                            bacterial cytoplasm --- Certainty = 0.3336(Affirmative) < succ>
                              bacterial membrane --- Certainty = 0.0000(Not Clear) < succ>
                                bacterial outside --- Certainty = 0.0000(Not Clear) < succ>
```

[11623] An alignment of the GAS and GBS proteins is shown below.

| Identities = 246/325 (75%), Positives = 286/325 (87%) | | | |
|---|---|---|---|
| Query: | 6 | MMDFYIKQIIIHQFSPNDTELVLSDTPLTLTPRIDDYFRKKLSKVFSDEAKRGYFGEDNV | 65 |
| | | M+D YIK+I+IHQFSPNDTEL+LSD +++TPRID+YFRKKL+KVFSDEAKRG F +N | |
| Sbjct: | 1 | MLDSYIKRIVIHQFSPNDTELLLSDRLVSITPRIDEYFRKKLAKVFSDEAKRGQFEANNT | 60 |
| Query: | 66 | FMSHLQDDLYVSSCQIAQLWKEEFVISEDQKTNDLVFIQFDKDGMEHFAFLRISLKEQFA | 125 |
| | | F + + DDL +S IAQLWKE FVISEDQKTNDLVF+QFDKDG FAFLRI+LKEQFA | |
| Sbjct: | 61 | FFTTIGDDLLETSVTIAQLWKEAFVISEDQKTNDLVFVQFDKDGEPFFAFLRIALKEQFA | 120 |
| Query: | 126 | HVSENQEQPITITQNNLPSAAQTPDEALVVNKSSKQYYLIEKRIKHNGSFANYFSENLLQ | 185 |
| | | H+S+N E P T+TQNNLPS QTPDEALV+N S QYYLIEKR+KHNGSFANYFSE+LL+ | |
| Sbjct: | 121 | HLSDNYEHPFTVTQNNLPSPTQTPDEALVINLKSGQYYLIEKRVKHNGSFANYFSEHLLK | 180 |
| Query: | 186 | VQPEQSVKKSIKMVEQTAQKIAENFNKDDFSFQSKMKSAIYKNLEEEQELSPEKLADQLF | 245 |
| | | V PEQSVKKSIKM+EQTAQKIAE+FN+DDF+FQSKMKS ++K LE + LSPEKLADQLF | |
| Sbjct: | 181 | VTPEQSVKKSIKMIEQTAQKIAEHFNQDDFTFQSKMKSTLFKQLEADDVLSPEKLADQLF | 240 |
| Query: | 246 | DDNLTARLTFVDELKDAIPGPVQVSDIDHSRQIKKLENQKLSLSNGIELIVPNNVYQDAE | 305 |
| | | DDNLTARLTFVD++KD IP P+++SDI+HSRQIKKLENQKLSLSNGIEL VPN +YQDAE | |
| Sbjct: | 241 | DDNLTARLTFVDQVKDVIPEPIKISDIEHSRQIKKLENQKLSLSNGIELTVPNAIYQDAE | 300 |
| Query: | 306 | SVEFIQNPDGTYSILIKNIQDIQNK | 330 |
| | | +VEF+ N DGTYSILIKNI+DI+ K | |
| Sbjct: | 301 | AVEFLLNDDGTYSILIKNIEDIKTK | 325 |

[11624] Based on this analysis, it was predicted that this protein and its epitopes, could be useful antigens for vaccines or diagnostics.

### EXAMPLE 2125

[11625] A DNA sequence (GBSx2241) was identified in S. agalactiae <SEQ ID 6559> which encodes the amino acid sequence <SEQ ID 6560>. This protein is predicted to be Serine hydroxymethyltransferase (glyA-1). Analysis of this protein sequence reveals the following:

```
Possible site: 45
>>> Seems to have no N-terminal signal sequence
----- Final Results -----
                            bacterial cytoplasm --- Certainty = 0.3876(Affirmative) < succ>
                              bacterial membrane --- Certainty = 0.0000(Not Clear) < succ>
                                bacterial outside --- Certainty = 0.0000(Not Clear) < succ>
```

[11626] The protein has homology with the following sequences in the GENPEPT database.

| >GP: AAD35802 GB: AE001743 serine hydroxymethyltransferase | | | |
|---|---|---|---|
| [Thermotoga maritima] | | | |
| Identities = 243/416 (58%), Positives = 307/416 (73%), Gaps = 7/416 (1%) | | | |
| Query: | 9 | KEFDQELWQAIHDEEIRQQNNIELIASENVVSKAVMAAQGSVLTNKYAEGYPSHRYYGGT | 68 |
| | | K+ D E+++ + +E RQ+ +ELIASEN S AV+ GS+LTNKYAEGYP RYYGG | |
| Sbjct: | 6 | KQVDPEIYEVLVNELKRQEYGLELIASENFASLAVIETMGSMLTNKYAEGYPKKRYYGGC | 65 |
| Query: | 69 | DCVDVVESLAIERAKTLFNAEFANVQPHSGSQANAAAYMALIEPGDTVLGMDLAAGGHLT | 128 |
| | | + VD E AIERAK LF A+FANVQPHSGSQAN A Y+AL +PGDT++GM L+ GGHLT | |
| Sbjct: | 66 | EWVDRAEERAIERAKRLFGAKFANVQPHSGSQANMAVYLALAQPGDTIMGMSLSHGGHLT | 125 |
| Query: | 129 | HGASVSFSGKTYHFVSYSVDPKTEMLDYDNILKIAQETQPKLIVAGASAYSRIIDFEKFR | 188 |
| | | HGA V+FSGK + V Y V+ +TE +DYD + ++A E +PK+IVAG SAY+RIIDF++FR | |
| Sbjct: | 126 | HGAPVNFSGKIFKVVPYGVNLETETIDYDEVRRLALEHKPKIIVAGGSAYARIIDFKRFR | 185 |
| Query: | 189 | QIADAVDAYLMVDMAHIAGLVASGHHPSPIPYAHVTTTTTHKTLRGPRGGLILTNDEAIA | 248 |
| | | +IAD V AYLMVDMAH AGLVA+G HP+P+ YAHV T+TTHKTLRGPRGGLILTND IA | |
| Sbjct: | 186 | EIADEVGAYLMVDMAHFAGLVAAGIHPNPLEYAHVVTSTTHKTLRGPRGGLILTNDPEIA | 245 |
| Query: | 249 | KKINSAVFPGLQGGPLEHVIAAKAVALKEALDPSFKIYGEDIIKNAQAMAKVFKEDDDFH | 308 |
| | | K ++ +FPG+QGGPL HVIAAKAV KEA+ FK Y + ++KNA+ MA+ F++ + | |
| Sbjct: | 246 | KAVDKTIFPGIQGGPLMHVIAAKAVCFKEAMTEEFKEYQKQVVKNAKKMAEEFQK-RGYR | 304 |
| Query: | 309 | LISDGTDNHLFLVDVTKVIENGKKAQNVLEEVNITLNKNSIPFERLSPFKTSGIRIGTPA | 368 |
| | | ++S GTD HLFLVD+T GK A+ LE IT+NKN+IP E+ SPF SGIRIGTPA | |
| Sbjct: | 305 | IVSGGTDTHLFLVDLTPKDITGKAAEKALESCGITVNKNTIPNEKRSPFVASGIRIGTPA | 364 |
| Query: | 369 | ITSRGMGVEESRRIAELMIKALKN--HENQDVLTEVRQE----IKSLTDAFPLYEN | 418 |
| | | +T+RGM EE IAE++ L N EN V EVR+E ++ L + FPLY + | |
| Sbjct: | 365 | VTTRGMKEEEMEEIAEMIDLVLSNVIDENGTVKPEVREEVSKKVRELCERFPLYRD | 420 |

[11627] A related DNA sequence was identified in S. pyogenes <SEQ ID 6561> which encodes the amino acid sequence <SEQ ID 6562>. Analysis of this protein sequence reveals the following:

| Possible site: 47 | | | | |
|---|---|---|---|---|
| >>> Seems to have no N-terminal signal sequence | | | | |
| | INTEGRAL | Likelihood = −0.00 | Transmembrane | 196-212 (196-212) |

```
----- Final Results -----
                              bacterial membrane --- Certainty = 0.1001(Affirmative) < succ>
                                bacterial outside --- Certainty = 0.0000(Not Clear) < succ>
                            bacterial cytoplasm --- Certainty = 0.0000(Not Clear) < succ>
```

[11628] The protein has homology with the following sequences in the databases:

| >GP: CAB15707 GB: Z99122 serine hydroxymethyltransferase | | | |
|---|---|---|---|
| [Bacillus subtilis] | | | |
| Identities = 250/407 (61%), Positives = 311/407 (75%), Gaps = 2/407 (0%) | | | |
| Query: | 14 | DKELWDAIHAEEERQEHHIELIASENMVSKAVMAAQGSVLTNKYAEGYPGNRYYGGTECV | 73 |
| | | D+++++AI E ERQ+ IELIASEN VS+AVM AQGSVLTNKYAEGYPG RYYGG E V | |
| Sbjct: | 8 | DEQVFNAIKNERERQQTKIELIASENFVSEAVMEAQGSVLTNKYAEGYPGKRYYGGCEHV | 67 |
| Query: | 74 | DIVETLAIERAKKLFGAAFANVQAHSGSQANAAAYMALIEAGDTVLGMDLAAGGHLTHGS | 133 |
| | | D+VE +A +RAK++FGA NVQ HSG+QAN A Y ++E GDTVLGM+L+ GGHLTHGS | |
| Sbjct: | 68 | DVVEDIARDRAKEIFGAEHVNVQPHSGAQANMAVYFTILEQGDTVLGMNLSHGGHLTHGS | 127 |
| Query: | 134 | PVNFSGKTYHFVGYSVDTDTEMLNYEAILEQAKAVQPKLIVAGASAYSRSIDFEKFRAIA | 193 |
| | | PVNFSG Y+FV Y VD +T+ ++Y+ + E+A A +PKLIVAGASAY R+IDF+KFR IA | |
| Sbjct: | 128 | PVNFSGVQYNFVEYGVDKETQYIDYDDVREKALAHKPKLIVAGASAYPRTIDFKKFREIA | 187 |
| Query: | 194 | DHVGAYLMVDMAHIAGLVAAGVHPSPVPYAHIVTSTTHKTLRGPRGGLILTNDEALAKKI | 253 |
| | | D VGAY MVDMAHIAGLVAAG+HP+PVPYA VT+TTHKTLRGPRGG+IL +E KKI | |
| Sbjct: | 188 | DEVGAYFMVDMAHIAGLVAAGLHPNPVPYADFVTTTTHKTLRGPRGGMILCREE-FGKKI | 246 |
| Query: | 254 | NSAVFPGLQGGPLEHVIAAKAVAFKEALDPAFKDYAQAIIDNTAAMAAVFAQDDRFRLIS | 313 |
| | | + ++FPG+QGGPL HVIAAKAV+F E L FK YAQ +I N +A ++ +L+S | |
| Sbjct: | 247 | DKSIFPGIQGGPLMHVIAAKAVSFGEVLQDDFKTYAQNVISNAKRLAEALTKEG-IQLVS | 305 |
| Query: | 314 | GGTDNHVFLVDVTKVIANGKLAQNLLDEVNITLNKNAIPFETLSPFKTSGIRIGCAAITS | 373 |
| | | GGTDNH+ LVD+ + GK+A+++LDE+ IT NKNAIP++ PF TSGIR+G AA+TS | |
| Sbjct: | 306 | GGTDNHLILVDLRSLGLTGKVAEHVLDEIGITSNKNAIPYDPEKPFVTSGIRLGTAAVTS | 365 |
| Query: | 374 | RGMGVKESQTIARLIIKALVNHDQETILEEVRQEVRQLTDAFPLYKK | 420 |
| | | RG + + +I AL NH+ E LEE RQ V LTD FPLYK+ | |
| Sbjct: | 366 | RGFDGDALEEVGAIIALALKNHEDEGKLEEARQRVAALTDKFPLYKE | 412 |

[11629] An alignment of the GAS and GBS proteins is shown below.

| Identities = 330/417 (79%), Positives = 368/417 (88%) | | | |
|---|---|---|---|
| Query: | 1 | MIFDKDNFKEFDQELWQAIHDEEIRQQNNIELIASENVVSKAVMAAQGSVLTNKYAEGYP | 60 |
| | | MIFDK N ++FD+ELW AIH EE RQ+++IELIASEN+VSKAVMAAQGSVLTNKYAEGYP | |
| Sbjct: | 3 | MIFDKGNVEDFDKELWDAIHAEEERQEHHIELIASENMVSKAVMAAQGSVLTNKYAEGYP | 62 |
| Query: | 61 | SHRYYGGTDCVDVVESLAIERAKTLFNAEFANVQPHSGSQANAAAYMALIEPGDTVLGMD | 120 |
| | | +RYYGGT+CVD+VE+LAIERAK LF A FANVQ HSGSQANAAAYMALIE GDTVLGMD | |
| Sbjct: | 63 | GNRYYGGTECVDIVETLAIERAKKLFGAAFANVQAHSGSQANAAAYMALIEAGDTVLGMD | 122 |
| Query: | 121 | LAAGGHLTHGASVSFSGKTYHFVSYSVDPKTEMLDYDNILKIAQETQPKLIVAGASAYSR | 180 |
| | | LAAGGHLTHG+ V+FSGKTYHFV YSVD TEML+Y+ IL+ A+ QPKLIVAGASAYSR | |
| Sbjct: | 123 | LAAGGHLTHGSPVNFSGKTYHFVGYSVDTDTEMLNYEAILEQAKAVQPKLIVAGASAYSR | 182 |
| Query: | 181 | IIDFEKFRQIADAVDAYLMVDMAHIAGLVASGHHPSPIPYAHVTTTTTHKTLRGPRGGLI | 240 |
| | | IDFEKFR IAD V AYLMVDMAHIAGLVA+G HPSP+PYAH+ T+TTHKTLRGPRGGLI | |
| Sbjct: | 183 | SIDFEKFRAIADHVGAYLMVDMAHIAGLVAAGVHPSPVPYAHIVTSTTHKTLRGPRGGLI | 242 |
| Query: | 241 | LTNDEAIAKKINSAVFPGLQGGPLEHVIAAKAVALKEALDPSFKIYGEDIIKNAQAMAKV | 300 |
| | | LTNDEA+AKKINSAVFPGLQGGPLEHVIAAKAVA KEALDP+FK Y + II N AMA V | |
| Sbjct: | 243 | LTNDEALAKKINSAVFPGLQGGPLEHVIAAKAVAFKEALDPAFKDYAQAIIDNTAAMAAV | 302 |
| Query: | 301 | FKEDDDFHLISDGTDNHLFLVDVTKVIENGKKAQNVLEEVNITLNKNSIPFERLSPFKTS | 360 |
| | | F +DD F LIS GTDNH+FLVDVTKVI NGK AQN+L+EVNITLNKN+IPFE LSPFKTS | |
| Sbjct: | 303 | FAQDDRFRLISGGTDNHVFLVDVTKVIANGKLAQNLLDEVNITLNKNAIPFETLSPFKTS | 362 |
| Query: | 361 | GIRIGTPAITSRGMGVEESRRIAELMIKALKNHENQDVLTEVRQEIKSLTDAFPLYE | 417 |
| | | GIRIG AITSRGMGV+ES+ IA L+IKAL NH+ + +L EVRQE++ LTDAFPLY+ | |
| Sbjct: | 363 | GIRIGCAAITSRGMGVKESQTIARLIIKALVNHDQETILEEVRQEVRQLTDAFPLYK | 419 |

[11630] Based on this analysis, it was predicted that these proteins and their epitopes could be useful antigens for vaccines or diagnostics.

### EXAMPLE 2126

[11631] A DNA sequence (GBSx2242) was identified in S. agalactiae <SEQ ID 6563> which encodes the amino acid sequence <SEQ ID 6564>. Analysis of this protein sequence reveals the following:

```
Possible site: 30
>>> Seems to have no N-terminal signal sequence
----- Final Results -----
                            bacterial cytoplasm --- Certainty = 0.2289(Affirmative) < succ>
                              bacterial membrane --- Certainty = 0.0000(Not Clear) < succ>
                                bacterial outside --- Certainty = 0.0000(Not Clear) < succ>
```

[11632] A related GBS nucleic acid sequence <SEQ ID 9839> which encodes amino acid sequence <SEQ ID 9840> was also identified.

[11633] The protein has homology with the following sequences in the GENPEPT database.

| >GP: AAD35934 GB: AE001752 conserved hypothetical protein | | | |
|---|---|---|---|
| [Thermotoga maritima] | | | |
| Identities = 71/198 (35%), Positives = 114/198 (56%), Gaps = 4/198 (2%) | | | |
| Query: | 1 | MNDLGQILEDHGAVIMPTETVYGIFAKALSEEAVNHVYELKKRPRDKAMNLNICDFETIL | 60 |
| | | + + ++L + +I PTETVYGI A A +EEA +++LK+RP D + ++I F+ + | |
| Sbjct: | 17 | LKEAAELLRNGEVIIFPTETVYGIGADAYNEEACKKIFKLKERPADNPLIVHIHSFKQLE | 76 |
| Query: | 61 | KYSKNQPTYLKQLYDAFLPGPLTIIL-EASQEVPHWINSGLLSVGFRMPKHPVTLDMIAN | 119 |
| | | + ++ +L L F PGPLT+I + S+++P + + L +V RMP HPV L +I | |
| Sbjct: | 77 | EIAEGYEPHLDFL-KKFWPGPLTVIFRKKSEKIPPVVTADLPTVAVRMPAHPVALKLIEL | 135 |
| Query: | 120 | HG-PLIGPSANISGCDSGRVFSEIQKQFNHQV-LGIEDDKALTGVDSTIIDLSGDRVKIL | 177 |
| | | G P+ PSANISG S + + F +V L I+ G++STI+DL+ ++ +L | |
| Sbjct: | 136 | FGHPIAAPSANISGRPSATNVKHVIEDFMGKVKLIIDAGDTPFGLESTIVDLTKEKPVLL | 195 |
| Query: | 178 | RQGAITQEVLTATIPELI | 195 |
| | | R G + E L PEL+ | |
| Sbjct: | 196 | RPGPVEVERLKELFPELV | 213 |

[11634] A related DNA sequence was identified in S. pyogenes <SEQ ID 6565> which encodes the amino acid sequence <SEQ ID 6566>. Analysis of this protein sequence reveals the following:

```
Possible site: 46
>>> Seems to have no N-terminal signal sequence
----- Final Results -----
                            bacterial cytoplasm --- Certainty = 0.0282(Affirmative) < succ>
                              bacterial membrane --- Certainty = 0.0000(Not Clear) < succ>
                                bacterial outside --- Certainty = 0.0000(Not Clear) < succ>
```

[11635] An alignment of the GAS and GBS proteins is shown below.

| Identities = 127/196 (64%), Positives = 154/196 (77%) | | | |
|---|---|---|---|
| Query: | 1 | MNDLGQILEDHGAVIMPTETVYGIFAKALSEEAVNHVYELKKRPRDKAMNLNICDFETIL | 60 |
| | | M L I+E A+++PTETVYG+FAKAL E+AVN VY+LK+RPRDKAMNLN+ DF +IL | |
| Sbjct: | 11 | MEYLASIIESGDALVLPTETVYGLFAKALDEKAVNAVYDLKQRPRDKAMNLNVADFNSIL | 70 |
| Query: | 61 | KYSKNQPTYLKQLYDAFLPGPLTIILEASQEVPHWINSGLLSVGFRMPKHPVTLDMIANH | 120 |
| | | +SK QP YLK+LY AFLPGPLTIIL+A+ +VP+WINSGL +VGFR+P HP+T +I | |
| Sbjct: | 71 | AFSKEQPRYLKKLYQAFLPGPLTIILKANDQVPYWINSGLSTVGFRLPSHPITAALIQKT | 130 |
| Query: | 121 | GPLIGPSANISGCDSGRVFSEIQKQFNHQVLGIEDDKALTGVDSTIIDLSGDRVKILRQG | 180 |
| | | GPLIGPSAN+SG SGRVF I + F+ QV G DD LTG DSTI+DLSG+R ILRQG | |
| Sbjct: | 131 | GPLIGPSANLSGKASGRVFDHIMQDFDFQVFGYADDPFLTGKDSTILDLSGERAVILRQG | 190 |
| Query: | 181 | AITQEVLTATIPELIF | 196 |
| | | AIT+E L A +PEL F | |
| Sbjct: | 191 | AITKEELLANVPELRF | 206 |

[11636] Based on this analysis, it was predicted that these proteins and their epitopes could be useful antigens for vaccines or diagnostics.

### EXAMPLE 2127

[11637] A DNA sequence (GBSx2243) was identified in S. agalactiae <SEQ ID 6567> which encodes the amino acid sequence <SEQ ID 6568>. This protein is predicted to be protoporphyrinogen oxidase (hemK). Analysis of this protein sequence reveals the following:

```
Possible site: 50
>>> Seems to have no N-terminal signal sequence
----- Final Results -----
                            bacterial cytoplasm --- Certainty = 0.3000(Affirmative) < succ>
                              bacterial membrane --- Certainty = 0.0000(Not Clear) < succ>
                                bacterial outside --- Certainty = 0.0000(Not Clear) < succ>
```

[11638] The protein has homology with the following sequences in the GENPEPT database.

| >GP: BAB07493 GB: AP001519 protoporphyrinogen oxidase | | | |
|---|---|---|---|
| [Bacillus halodurans] | | | |
| Identities = 94/236 (39%), Positives = 132/236 (55%), Gaps = 12/236 (5%) | | | |
| Query: | 49 | DTDQQLMENIFQQLKKHRSP---QYITGKAYFRDLIFFVDERVLIPRPETEELVDLILSE | 105 |
| | | + D +L + + + L H S Q++ G F F VD+ VLIPRPETEELV +L E | |
| Sbjct: | 46 | ELDGELFQRLEEDLAAHASGVPVQHLIGVESFYGRQFQVDQHVLIPRPETEELVLAVLKE | 105 |
| Query: | 106 | -----NKVEDCSVLDIGTGSGAIAISLKKERPSWDVLASDISVSALDLAKENANNCDAEV | 160 |
| | | K E+ ++LDIGTGSGAIA++L E +V A DIS AL +A +NA A V | |
| Sbjct: | 106 | IRRQFKKEEEITILDIGTGSGAIAVTLALEEERTNVTAVDISRDALQVAADNARRLGANV | 165 |
| Query: | 161 | TFIESDV---FSNISGKFDIIVSNPPYISYNDKDEVGKNVLASEPHSALFADEEGLAIYR | 217 |
| | | I D+ F +FD+IVSNPPYI +KD + +V EP ALF +GL +YR | |
| Sbjct: | 166 | QLIHGDLGEPFLKTGERFDVIVSNPPYIPTVEKDTLAVHVRDHEPALALFGGVDGLDVYR | 225 |
| Query: | 218 | KIIENSREYL-QPRGKLYFEIGYKQGDDLRSLLKRYFPNNRCRVLKDIFGKDRMVV | 272 |
| | | +++ + +G + EIG QG D+ L++ +P VL D+ GKDR+V+ | |
| Sbjct: | 226 | RLMSQLPALTKEEKGMVALEIGAGQGMDVEKLMQTAYPKAAVDVLYDLNGKDRIVL | 281 |

[11639] A related DNA sequence was identified in S. pyogenes <SEQ ID 6569> which encodes the amino acid sequence <SEQ ID 6570>. Analysis of this protein sequence reveals the following:

```
Possible site: 48
>>> Seems to have no N-terminal signal sequence
----- Final Results -----
                            bacterial cytoplasm --- Certainty = 0.4324(Affirmative) < succ>
                              bacterial membrane --- Certainty = 0.0000(Not Clear) < succ>
                                bacterial outside --- Certainty = 0.0000(Not Clear) < succ>
```

[11640] An alignment of the GAS and GBS proteins is shown below.

| Identities = 174/274 (63%), Positives = 207/274 (75%) | | | |
|---|---|---|---|
| Query: | 1 | MNYAQLIKHYGQLLEACGEEVENFIYVLKDLKQWSTTDYLLNQNSSVSDTDQQLMENIFQ | 60 |
| | | MNYA LI+ Y LE E+ EN YV +++K+WS+ D L++QN +V+ D L+E+IF | |
| Sbjct: | 1 | MNYATLIRTYEDKLEQIDEDRENLAYVFREIKEWSSLDMLIHQNQAVTPEDAVLLEHIFC | 60 |
| Query: | 61 | QLKKHRSPQYITGKAYFRDLIFFVDERVLIPRPETEELVDLILSENKVEDCSVLDIGTGS | 120 |
| | | L +H SPQYITG AYFRDL VD+RVLIPRPETEELVD+IL+EN +VLDIGTGS | |
| Sbjct: | 61 | SLSQHLSPQYITGNAYFRDLKLAVDKRVLIPRPETEELVDMILAENLDAPLNVLDIGTGS | 120 |
| Query: | 121 | GAIAISLKKERPSWDVLASDISVSALDLAKENANNCDAEVTFIESDVFSNISGKFDIIVS | 180 |
| | | GAIAISLKKERP+W V ASDIS +ALDLAK NA+ ++TFIESDVFS IS FDIIVS | |
| Sbjct: | 121 | GAIAISLKKERPNWQVTASDISRAALDLAKANADAYQLDITFIESDVFSLISETFDIIVS | 180 |
| Query: | 181 | NPPYISYNDKDEVGKNVLASEPHSALFADEEGLAIYRKIIENSREYLQPRGKLYFEIGYK | 240 |
| | | NPPYISY DK+EV NVL SEPH ALFA E G AIYRKIIE + YL GKLYFEIGYK | |
| Sbjct: | 181 | NPPYISYEDKEEVSLNVLQSEPHLALFAKENGYAIYRKIIEQADNYLTKEGKLYFEIGYK | 240 |
| Query: | 241 | QGDDLRSLLKRYFPNNRCRVLKDIFGKDRMVVLD | 274 |
| | | Q + ++ +L+ YFP R + DIFGK+RMVV+D | |
| Sbjct: | 241 | QAEGIKDMLQAYFPQRHIRAVTDIFGKERMVVVD | 274 |

[11641] Based on this analysis, it was predicted that these proteins and their epitopes could be useful antigens for vaccines or diagnostics.

### EXAMPLE 2128

[11642] A DNA sequence (GBSx2244) was identified in S. agalactiae <SEQ ID 6571> which encodes the amino acid sequence <SEQ ID 6572>. This protein is predicted to be peptide chain release factor RF-1 (prfA). Analysis of this protein sequence reveals the following:

```
Possible site: 28
>>> Seems to have no N-terminal signal sequence
----- Final Results -----
                            bacterial cytoplasm --- Certainty = 0.3446(Affirmative) < succ>
                              bacterial membrane --- Certainty = 0.0000(Not Clear) < succ>
                                bacterial outside --- Certainty = 0.0000(Not Clear) < succ>
```

[11643] The protein has homology with the following sequences in the GENPEPT database.

| >GP: CAB15718 GB: Z99122 peptide chain release factor 1 | | | |
|---|---|---|---|
| [Bacillus subtilis] | | | |
| Identities = 211/351 (60%), Positives = 280/351 (79%), Gaps = 1/351 (0%) | | | |
| Query: | 5 | DQLQAVEDRYEELGELLSDPDVVSDTKRFMELSREEASTRETVTAYREYKQVIQNISDAE | 64 |
| | | D+L+++E+RYE+L ELLSDP+VV+D K+ E S+E++ +ETV YR+Y+ + ++DA+ | |
| Sbjct: | 3 | DRLKSIEERYEKLNELLSDPEVVNDPKKLREYSKEQSDIQETVDVYRQYRDASEQLADAK | 62 |
| Query: | 65 | EMIKDASGDAELEEMAKEELKESKAAKEEYEERLKILLLPKDPNDDKNIILEIRGAAGGD | 124 |
| | | M+++ DAE+ +M KEE+ E + E ERLK+LL+PKDPNDDKN+I+EIRGAAGG+ | |
| Sbjct: | 63 | AMLEEKL-DAEMRDMVKEEISELQKETETLSERLKVLLIPKDPNDDKNVIMEIRGAAGGE | 121 |
| Query: | 125 | EAALFAGDLLTMYQKYAETQGWRFEVMESSVNGVGGIKEVVAMVSGQSVYSKLKYESGAH | 184 |
| | | EAALFAG+L MY +YAE QGW+ EVME++V G GG KE++ M++G YSKLKYE+GAH | |
| Sbjct: | 122 | EAALFAGNLYRMYSRYAELQGWKTEVMEANVTGTGGYKEIIFMITGSGAYSKLKYENGAH | 181 |
| Query: | 185 | RVQRVPVTESQGRVHTSTATVLVMPEVEEVEYEIDQKDLRVDIYHASGAGGQNVNKVATA | 244 |
| | | RVQRVP TES GR+HTSTATV +PE EEVE +I +KD+RVD + +SG GGQ+VN +A | |
| Sbjct: | 182 | RVQRVPETESGGRIHTSTATVACLPEAEEVEVDIHEKDIRVDTFASSGPGGQSVNTTMSA | 241 |
| Query: | 245 | VRMVHIPTGIKVEMQEERTQQKNRDKAMKIIRARVADHFAQIAQDEQDAERKSTVGTGDR | 304 |
| | | VR+ H+PTG+ V Q+E++Q KN++KAMK++RAR+ D F Q AQ E D RKS VG+GDR | |
| Sbjct: | 242 | VRLTHLPTGVVVSCQDEKSQIKNKEKAMKVLRARIYDKFQQEAQAEYDQTRKSAVGSGDR | 301 |
| Query: | 305 | SERIRTYNFPQNRVTDHRIGLTLQKLDTILSGKMDEVIDALVMYDQTQKLE | 355 |
| | | SERIRTYNFPQNRVTDHRIGLT+QKLD IL GK+DEV++AL++ DQ KL+ | |
| Sbjct: | 302 | SERIRTYNFPQNRVTDHRIGLTIQKLDQILEGKLDEVVEALIVEDQASKLQ | 352 |

[11644] A related DNA sequence was identified in S. pyogenes <SEQ ID 6573> which encodes the amino acid sequence <SEQ ID 6574>. Analysis of this protein sequence reveals the following:

```
Possible site: 28
>>> Seems to have no N-terminal signal sequence
----- Final Results -----
                            bacterial cytoplasm --- Certainty = 0.3446(Affirmative) < succ>
                              bacterial membrane --- Certainty = 0.0000(Not Clear) < succ>
                                bacterial outside --- Certainty = 0.0000(Not Clear) < succ>
```

[11645] An alignment of the GAS and GBS proteins is shown below.

| Identities = 349/358 (97%), Positives = 354/358 (98%) | | | |
|---|---|---|---|
| Query: | 1 | MNIYDQLQAVEDRYEELGELLSDPDVVSDTKRFMELSREEASTRETVTAYREYKQVIQNI | 60 |
| | | MNIYDQLQAVEDRYEELGELLSDPDVVSDTKRFMELSREE +TRETVTAYREYKQVIQ I | |
| Sbjct: | 1 | MNIYDQLQAVEDRYEELGELLSDPDVVSDTKRFMELSREETNTRETVTAYREYKQVIQTI | 60 |
| Query: | 61 | SDAEEMIKDASGDAELEEMAKEELKESKAAKEEYEERLKILLLPKDPNDDKNIILEIRGA | 120 |
| | | SDAEEMIKDASGD ELEEMAKEELKESKAAKEEYEE+LKILLLPKDPNDDKNIILEIRGA | |
| Sbjct: | 61 | SDAEEMIKDASGDPELEEMAKEELKESKAAKEEYEEKLKILLLPKDPNDDKNIILEIRGA | 120 |
| Query: | 121 | AGGDEAALFAGDLLTMYQKYAETQGWRFEVMESSVNGVGGIKEVVAMVSGQSVYSKLKYE | 180 |
| | | AGGDEAALFAGDLLTMYQKYAETQGWRFEVMESSVNGVGGIKEVVAMVSGQSVYSKLKYE | |
| Sbjct: | 121 | AGGDEAALFAGDLLTMYQKYAETQGWRFEVMESSVNGVGGIKEVVAMVSGQSVYSKLKYE | 180 |
| Query: | 181 | SGAHRVQRVPVTESQGRVHTSTATVLVMPEVEEVEYEIDQKDLRVDIYHASGAGGQNVNK | 240 |
| | | SGAHRVQRVPVTESQGRVHTSTATVLVMPEVEEVEY+ID KDLRVDIYHASGAGGQNVNK | |
| Sbjct: | 181 | SGAHRVQRVPVTESQGRVHTSTATVLVMPEVEEVEYDIDPKDLRVDIYHASGAGGQNVNK | 240 |
| Query: | 241 | VATAVRMVHIPTGIKVEMQEERTQQKNRDKAMKIIRARVADHFAQIAQDEQDAERKSTVG | 300 |
| | | VATAVRMVHIPTGIKVEMQEERTQQKNRDKAMKIIRARVADHFAQIAQDEQDAERKSTVG | |
| Sbjct: | 241 | VATAVRMVHIPTGIKVEMQEERTQQKNRDKAMKIIRARVADHFAQIAQDEQDAERKSTVG | 300 |
| Query: | 301 | TGDRSERIRTYNFPQNRVTDHRIGLTLQKLDTILSGKMDEVIDALVMYDQTQKLEALN | 358 |
| | | TGDRSERIRTYNFPQNRVTDHRIGLTLQKLDTILSGKMDEVIDALVMYDQT+KLE+LN | |
| Sbjct: | 301 | TGDRSERIRTYNFPQNRVTDHRIGLTLQKLDTILSGKMDEVIDALVMYDQTKKLESLN | 358 |

[11646] Based on this analysis, it was predicted that these proteins and their epitopes could be useful antigens for vaccines or diagnostics.

### EXAMPLE 2129

[11647] A DNA sequence (GBSx2245) was identified in S. agalactiae <SEQ ID 6575> which encodes the amino acid sequence <SEQ ID 6576>. This protein is predicted to be thymidine kinase (tdk). Analysis of this protein sequence reveals the following:

```
Possible site: 39
>>> Seems to have no N-terminal signal sequence
----- Final Results -----
                            bacterial cytoplasm --- Certainty = 0.2244(Affirmative) < succ>
                              bacterial membrane --- Certainty = 0.0000(Not Clear) < succ>
                                bacterial outside --- Certainty = 0.0000(Not Clear) < succ>
```

[11648] A related GBS nucleic acid sequence <SEQ ID 9841> which encodes amino acid sequence <SEQ ID 9842> was also identified.

[11649] The protein has homology with the following sequences in the GENPEPT database.

| >GP: AAB02289 GB: L40415 thymidine kinase [Streptococcus gordonii] | | | |
|---|---|---|---|
| Identities = 158/189 (83%), Positives = 175/189 (91%) | | | |
| Query: | 1 | MAQLYYKYGTMNSGKTIEILKVAHNYEEQGKPVVIMTSALDTRDEFGVVSSRIGMRREAV | 60 |
| | | MAQLYYKYGTMNSGKTIEILKVAHNYEEQGK VVIMTSA+DTRD G VSSRIGM+R+A+ | |
| Sbjct: | 1 | MAQLYYKYGTMNSGKTIEILKVAHNYEEQGKGVVIMTSAVDTRDGVGYVSSRIGMKRQAM | 60 |
| Query: | 61 | PISDDMDIFSYIQNLPQKPYCVLIDECQFLSKKNVYDLARVVDDLDVPVMAFGLKNDFQN | 120 |
| | | I DD DI YI+NLP+KPYC+LIDE QFL + +VYDLARVVD+LDVPVMAFGLKNDF+N | |
| Sbjct: | 61 | AIEDDTDILGYIKNLPEKPYCILIDEAQFLKRHHVYDLARVVDELDVPVMAFGLKNDFRN | 120 |
| Query: | 121 | NLFEGSKHLLLLADKIDEIKTICQYCSKKATMVLRTENGKPVYEGDQIQIGGNETYIPVC | 180 |
| | | LFEGSKHLLLLADKI+EIKTICQYCS+KATMVLRT++GKPVY+G+QIQIGGNETYIPVC | |
| Sbjct: | 121 | ELFEGSKHLLLLADKIEEIKTICQYCSRKATMVLRTDHGKPVYDGEQIQIGGNETYIPVC | 180 |
| Query: | 181 | RKHYFNPDI | 189 |
| | | RKHYF PDI | |
| Sbjct: | 181 | RKHYFKPDI | 189 |

[11650] A related DNA sequence was identified in S. pyogenes <SEQ ID 6577> which encodes the amino acid sequence <SEQ ID 6578>. Analysis of this protein sequence reveals the following:

```
Possible site: 39
>>> Seems to have no N-terminal signal sequence
----- Final Results -----
                            bacterial cytoplasm --- Certainty = 0.2244(Affirmative) < succ>
                              bacterial membrane --- Certainty = 0.0000(Not Clear) < succ>
                                bacterial outside --- Certainty = 0.0000(Not Clear) < succ>
```

[11651] An alignment of the GAS and GBS proteins is shown below.

| Identities = 174/189 (92%), Positives = 184/189 (97%) | | | |
|---|---|---|---|
| Query: | 1 | MAQLYYKYGTMNSGKTIEILKVAHNYEEQGKPVVIMTSALDTRDEFGVVSSRIGMRREAV | 60 |
| | | +AQLYYKYGTMNSGKTIEILKVAHNYEEQGKPVVIMTSALDTRD FG+VSSRIGMRREA+ | |
| Sbjct: | 1 | LAQLYYKYGTMNSGKTIEILKVAHNYEEQGKPVVIMTSALDTRDGFGIVSSRIGMRREAI | 60 |
| Query: | 61 | PISDDMDIFSYIQNLPQKPYCVLIDECQFLSKKNVYDLARVVDDLDVPVMAFGLKNDFQN | 120 |
| | | PIS+DMDIF++I L +KPYCVLIDE QFLSK+NVYDLARVVD+L+VPVMAFGLKNDFQN | |
| Sbjct: | 61 | PISNDMDIFTFIAQLEEKPYCVLIDESQFLSKQNVYDLARVVDELNVPVMAFGLKNDFQN | 120 |
| Query: | 121 | NLFEGSKHLLLLADKIDEIKTICQYCSKKATMVLRTENGKPVYEGDQIQIGGNETYIPVC | 180 |
| | | NLFEGSKHLLLLADKIDEIKTICQYCSKKATMVLRTENGKPVYEGDQIQIGGNETYIPVC | |
| Sbjct: | 121 | NLFEGSKHLLLLADKIDEIKTICQYCSKKATMVLRTENGKPVYEGDQIQIGGNETYIPVC | 180 |
| Query: | 181 | RKHYFNPDI | 189 |
| | | RKHYFNPDI | |
| Sbjct: | 181 | RKHYFNPDI | 189 |

[11652] Based on this analysis, it was predicted that these proteins and their epitopes could be useful antigens for vaccines or diagnostics.

### EXAMPLE 2130

[11653] A DNA sequence (GBSx2246) was identified in S. agalactiae <SEQ ID 6579> which encodes the amino acid sequence <SEQ ID 6580>. Analysis of this protein sequence reveals the following:

```
Possible site: 34
>>> Seems to have no N-terminal signal sequence
----- Final Results -----
                            bacterial cytoplasm --- Certainty = 0.3995(Affirmative) < succ>
                              bacterial membrane --- Certainty = 0.0000(Not Clear) < succ>
                                bacterial outside --- Certainty = 0.0000(Not Clear) < succ>
```

[11654] The protein has homology with the following sequences in the GENPEPT database.

| >GP: AAA26046 GB: M95650 4-oxalocrotonate tautomerase [Plasmid pWW0] | | | |
|---|---|---|---|
| Identities = 27/60 (45%), Positives = 36/60 (60%) | | | |
| Query: | 1 | MPFVKIDLFEGRSQEQKNELAREVTEVVSRIAKAPKENIHVFINDMPEGTYYPQGELKKK | 60 |
| | | MP +I + EGRS EQK L REV+E +SR AP ++ V I +M +G + GEL K | |
| Sbjct: | 1 | MPIAQIHILEGRSDEQKETLIREVSEAISRSLDAPLTSVRVIITEMAKGHFGIGGELASK | 60 |

[11655] A related DNA sequence was identified in S. pyogenes <SEQ ID 6581> which encodes the amino acid sequence <SEQ ID 6582>. Analysis of this protein sequence reveals the following:

```
Possible site: 34
>>> Seems to have no N-terminal signal sequence
----- Final Results -----
                            bacterial cytoplasm --- Certainty = 0.4128(Affirmative) < succ>
                              bacterial membrane --- Certainty = 0.0000(Not Clear) < succ>
                                bacterial outside --- Certainty = 0.0000(Not Clear) < succ>
```

[11656] An alignment of the GAS and GBS proteins is shown below.

| Identities = 56/60 (93%), Positives = 59/60 (98%) | | | |
|---|---|---|---|
| Query: | 1 | MPFVKIDLFEGRSQEQKNELAREVTEVVSRIAKAPKENIHVFINDMPEGTYYPQGELKKK | 60 |
| | | MPFV IDLFEGRSQEQKN+LAREVTEVVSRIAKAPKENIHVFINDMPEGTYYPQGE+K+K | |
| Sbjct: | 1 | MPFVTIDLFEGRSQEQKNQLAREVTEVVSRIAKAPKENIHVFINDMPEGTYYPQGEMKQK | 60 |

[11657] Based on this analysis, it was predicted that these proteins and their epitopes could be useful antigens for vaccines or diagnostics.

### EXAMPLE 2131

[11658] A DNA sequence (GBSx2247) was identified in S. agalactiae <SEQ ID 6583> which encodes the amino acid sequence <SEQ ID 6584>. Analysis of this protein sequence reveals the following:

```
Possible site: 57
>>> Seems to have no N-terminal signal sequence
----- Final Results -----
                            bacterial cytoplasm --- Certainty = 0.2154(Affirmative) < succ>
                              bacterial membrane --- Certainty = 0.0000(Not Clear) < succ>
                                bacterial outside --- Certainty = 0.0000(Not Clear) < succ>
```

[11659] A related GBS nucleic acid sequence <SEQ ID 9843> which encodes amino acid sequence <SEQ ID 9844> was also identified.

[11660] The protein has homology with the following sequences in the GENPEPT database.

| >GP: AAC65759 GB: AE001250 conserved hypothetical protein [Treponema | | | |
|---|---|---|---|
| pallidum] | | | |
| Identities = 103/317 (32%), Positives = 163/317 (50%), Gaps = 15/317 (4%) | | | |
| Query: | 7 | QLSHSLRLMGTTIDIQINSKNAQKQIR----EVIELLELYKNRFSANDFNSELMAINNNA | 62 |
| | | + S + ++GT +++ SK ++ EV LL+ + SAN +S L A+N A | |
| Sbjct: | 31 | EYSRAELVIGTLCRVRVYSKRPAAEVHAALEEVFTLLQQQEMVLSANRDDSALAALNAQA | 90 |
| Query: | 63 | GIKPIQVHPDLFELITIGKEHSLARPSNLNIAIGPLVQTWRIGFSDAKLPSPSEISEAMI | 122 |
| | | G P+ V L+ L+ + N A+G V+ W IGF A +P P + EA+ | |
| Sbjct: | 91 | GSAPVVVDRSLYALLERALFFAEKSGGAFNPALGAXVKLWNIGFDRAAVPDPDALKEALT | 150 |
| Query: | 123 | LSDPTHILLDSN-----KQSVFLNQIGMKIDLGALAKGYIADKIMTYLKNEMIDSAIINL | 177 |
| | | D + L + +V L Q GM++DLGA+AKG++ADKI+ L +DSA+++L | |
| Sbjct: | 151 | RCDFRQVHLRAGVSVGAPHTVQLAQAGMQLDLGAIAKGFLADKIVQLLTAHALDSALVDL | 210 |
| Query: | 178 | GGNV----LVHGDNPNRSEGY--WVIGIQHPKKKRGKNIGTVKIKNQSVVTSGTYERRLI | 231 |
| | | GGN+ L +GD + + W +GI+ P K V +++ SVVTSG YER | |
| Sbjct: | 211 | GGNIFALGLKYGDVRSAAAQRLEWNVGIRDPHGTGQKPALVVSVRDCSVVTSGAYERFFE | 270 |
| Query: | 232 | IDDKEYHHIFDRQTGYPIQTEMASISIVSKQSVDCEIWTTRLFGLSIKEALDILNAVSYI | 291 |
| | | D YHHI D TG+P T++ S+SI + +S D + T F L +++ +L + | |
| Sbjct: | 271 | RDGVRYHHIIDPVTGFPAHTDVDSVSIFAPRSTDADALATACFVLGYEKSCALLREFPGV | 330 |
| Query: | 292 | EGIIITKDDRIYLSDGL | 308 |
| | | + + I D R+ S G+ | |
| Sbjct: | 331 | DALFIFPDKRVRASAGI | 347 |

[11661] A related DNA sequence was identified in S. pyogenes <SEQ ID 6585> which encodes the amino acid sequence <SEQ ID 6586>. Analysis of this protein sequence reveals the following:

```
Possible site: 52
>>> Seems to have no N-terminal signal sequence
----- Final Results -----
                            bacterial cytoplasm --- Certainty = 0.1020(Affirmative) < succ>
                              bacterial membrane --- Certainty = 0.0000(Not Clear) < succ>
                                bacterial outside --- Certainty = 0.0000(Not Clear) < succ>
```

[11662] An alignment of the GAS and GBS proteins is shown below.

| Identities = 182/310 (58%), Positives = 232/310 (74%) | | | |
|---|---|---|---|
| Query: | 8 | LSHSLRLMGTTIDIQINSKNAQKQIREVIELLELYKNRFSANDFNSELMAINNNAGIKPI | 67 |
| | | ++ L+LMGT IDIQI S A +Q+ VI+LL YKNRFSAND NSELMAIN AG+KP+ | |
| Sbjct: | 3 | VTQQLKLMGTVIDIQIESDKACQQLSRVIDLLYTYKNRFSANDSNSELMAINQAAGVKPV | 62 |
| Query: | 68 | QVHPDLFELITIGKEHSLARPSNLNIAIGPLVQTWRIGFSDAKLPSPSEISEAMILSDPT | 127 |
| | | VH DLF LI IGK HSL+ PSNLNIAIGPLVQ WRIGF DA++PS + IS+ + L+DP | |
| Sbjct: | 63 | SVHSDLFNLIQIGKAHSLSTPSNLNIAIGPLVQAWRIGFEDARVPSHNLISQQLALTDPR | 122 |
| Query: | 128 | HILLDSNKQSVFLNQIGMKIDLGALAKGYIADKIMTYLKNEMIDSAIINLGGNVLVHGDN | 187 |
| | | +L+D KQ+VFL Q+GM +DLGALAKGYI DKIM YL + IDSA+INLGGNV VHG N | |
| Sbjct: | 123 | QVLIDDKKQTVFLQQVGMALDLGALAKGYITDKIMAYLIEDGIDSALINLGGNVRVHGPN | 182 |
| Query: | 188 | PNRSEGYWVIGIQHPKKKRGKNIGTVKIKNQSVVTSGTYERRLIIDDKEYHHIFDRQTGY | 247 |
| | | P + + IGIQ P KRG+++G +K+ N SVVTSG YER+ K+YHHI DRQTGY | |
| Sbjct: | 183 | PKSPDKTFRIGIQKPDAKRGQHLGVIKVNNHSVVTSGIYERQFTSKGKQYHHILDRQTGY | 242 |
| Query: | 248 | PIQTEMASISIVSKQSVDCEIWTTRLFGLSIKEALDILNAVSYIEGIIITKDDRIYLSDG | 307 |
| | | PI+T+M S++I++ S C+IWTTRLFGL + +LN IEG+++T+ + +S+G | |
| Sbjct: | 243 | PIETDMLSLTIMAPSSFYCDIWTTRLFGLDSSMIITLLNTFDNIEGLLVTRKHHVLMSNG | 302 |
| Query: | 308 | LKHHFQLFYH | 317 |
| | | L+H+FQ +YH | |
| Sbjct: | 303 | LRHYFQPYYH | 312 |

[11663] Based on this analysis, it was predicted that these proteins and their epitopes could be useful antigens for vaccines or diagnostics.

### EXAMPLE 2132

[11664] A DNA sequence (GBSx2248) was identified in S. agalactiae <SEQ ID 6587> which encodes the amino acid sequence <SEQ ID 6588>. Analysis of this protein sequence reveals the following:

```
Possible site: 31
>>> Seems to have no N-terminal signal sequence
----- Final Results -----
                            bacterial cytoplasm --- Certainty = 0.0966(Affirmative) < succ>
                              bacterial membrane --- Certainty = 0.0000(Not Clear) < succ>
                                bacterial outside --- Certainty = 0.0000(Not Clear) < succ>
```

[11665] The protein has homology with the following sequences in the GENPEPT database.

| >GP: AAG18632 GB: AY007504 unknown [Streptococcus mitis] | | | |
|---|---|---|---|
| Identities = 92/160 (57%), Positives = 119/160 (73%), Gaps = 1/160 (0%) | | | |
| Query: | 1 | MKLIGIVGTNSNKSTNRQLLQYMQQHFADKAEIELIEVKDLPLFNKPADKNVPQVILDIA | 60 |
| | | MKL+ IVGTNSN+STNR+LL++MQ+HF+DKA+IE++E+K LP FN+P D+ P + + | |
| Sbjct: | 1 | MKLVAIVGTNSNRSTNRKLLKFMQKHFSDKADIEVLEIKQLPAFNEPEDEQAPAEVQAFS | 60 |
| Query: | 61 | AKIEETDGVIIGTPEYDHSIPSALMSVLAWLSYGIYPLLNKPVMITGASYGTLGSSRAQL | 120 |
| | | KI DGVII TPEYDH+IP+ L S L W++Y L+NKP MI GAS G LG+SRAQ | |
| Sbjct: | 61 | EKILAADGVIISTPEYDHTIPAPLASALEWIAYTSRALINKPTMIVGASLGLLGTSRAQA | 120 |
| Query: | 121 | QLRQILNAPELKASVLP-DEFLLSHSLQAFDKDGNLHDIE | 159 |
| | | LRQIL+APELKA V+P EF L HS Q D + +L++ E | |
| Sbjct: | 121 | HLRQILDAPELKARVMPGTEFFLGHSEQVLDDECHLNNPE | 160 |

[11666] A related DNA sequence was identified in S. pyogenes <SEQ ID 6589> which encodes the amino acid sequence <SEQ ID 6590>. Analysis of this protein sequence reveals the following:

```
Possible site: 24
>>> Seems to have an uncleavable N-term signal seq
----- Final Results -----
                              bacterial membrane --- Certainty = 0.0000(Not Clear) < succ>
                                bacterial outside --- Certainty = 0.0000 (Not Clear) < succ>
                            bacterial cytoplasm --- Certainty = 0.0000(Not Clear) < succ>
```

[11667] The protein has homology with the following sequences in the databases:

| >GP: CAB62679 GB: AL133422 putative secreted protein. [Streptomyces | | | |
|---|---|---|---|
| coelicolor A3(2)] | | | |
| Identities = 68/192 (35%), Positives = 94/192 (48%), Gaps = 25/192 (13%) | | | |
| Query: | 4 | ILFIVGSLREGSFNHQLAAQAQK-ALEHQAVVSYLNWKDVPVLNQDIEANAPLPVVDA-- | 60 |
| | | IL +VGSLR GS N QLA A + A E V + ++P N+DI+ +P A | |
| Sbjct: | 5 | ILALVGSLRAGSHNRQLAEAAVRFAPEGAEVQLFEGLAEIPFYNEDIDVEGSVPAAAAKL | 64 |
| Query: | 61 | RQAVQSADAIWIFTPVYNFSIPGSVKNLLDWLSRALDLSDPTGPSAIGGKVVTVSSVANG | 120 |
| | | R+A Q A A +F+P YN +IP +KN +DWLSR P G A GK V V A G | |
| Sbjct: | 65 | REAAQGAQAFLLFSPEYNGTIPAVLKNAIDWLSR------PYGAGAFTGKPVAVVGTAFG | 118 |
| Query: | 121 | GHDQVFDQFKA----------LLPFIRTSVAGEFTK-ATVNP--DAWGTGRLEISKETKA | 167 |
| | | + V+ Q +A ++ I+ S+ G T+ A +P DA +L E A | |
| Sbjct: | 119 | QYGGVWAQDEARKAVGIAGGKVIEDIKLSIPGSVTRFAETHPADDAEVAAQL---TEVVA | 175 |
| Query: | 168 | NLLSQAEALLAA | 179 |
| | | L A+ +AA | |
| Sbjct: | 176 | RLHGHADEAIAA | 187 |

[11668] An alignment of the GAS and GBS proteins is shown below.

| Identities = 28/90 (31%), Positives = 49/90 (54%) | | | |
|---|---|---|---|
| Query: | 3 | LIGIVGTNSNKSTNRQLLQYMQQHFADKAEIELIEVKDLPLFNKPADKNVPQVILDIAAK | 62 |
| | | ++ IVG+ S N QL Q+ +A + + KD+P+ N+ + N P ++D | |
| Sbjct: | 4 | ILFIVGSLREGSFNHQLAAQAQKALEHQAVVSYLNWKDVPVLNQDIEANAPLPVVDARQA | 63 |
| Query: | 63 | IEETDGVIIGTPEYDHSIPSALMSVLAWLS | 92 |
| | | ++ D + I TP Y+ SIP ++ ++L WLS | |
| Sbjct: | 64 | VQSADAIWIFTPVYNFSIPGSVKNLLDWLS | 93 |

[11669] Based on this analysis, it was predicted that these proteins and their epitopes could be useful antigens for vaccines or diagnostics.

### EXAMPLE 2133

[11670] A DNA sequence (GBSx2249) was identified in S. agalactiae <SEQ ID 6591> which encodes the amino acid sequence <SEQ ID 6592>. Analysis of this protein sequence reveals the following:

```
Possible site: 13
>>> Seems to have no N-terminal signal sequence
----- Final Results -----
                            bacterial cytoplasm --- Certainty = 0.1160(Affirmative) < succ>
                              bacterial membrane --- Certainty = 0.0000(Not Clear) < succ>
                                bacterial outside --- Certainty = 0.0000(Not Clear) < succ>
```

[11671] The protein has no significant homology with any sequences in the GENPEPT database.

[11672] No corresponding DNA sequence was identified in S. pyogenes.

[11673] Based on this analysis, it was predicted that this protein and its epitopes, could be useful antigens for vaccines or diagnostics.

### EXAMPLE 2134

[11674] A DNA sequence (GBSx2250) was identified in S. agalactiae <SEQ ID 6593> which encodes the amino acid sequence <SEQ ID 6594>. Analysis of this protein sequence reveals the following:

```
Possible site: 14
>>> Seems to have no N-terminal signal sequence
----- Final Results -----
                            bacterial cytoplasm --- Certainty = 0.2132(Affirmative) < succ>
                              bacterial membrane --- Certainty = 0.0000(Not Clear) < succ>
                                bacterial outside --- Certainty = 0.0000(Not Clear) < succ>
```

[11675] The protein has homology with the following sequences in the GENPEPT database.

| >GP: AAG18632 GB: AY007504 unknown [Streptococcus mitis] | | | |
|---|---|---|---|
| Identities = 80/162 (49%), Positives = 112/162 (68%) | | | |
| Query: | 1 | MKFVGIVGSNAEQSYNRMLLEFIRKNFKTKFELEVLEIDDIPMFNQDQNWEESFQLRLLN | 60 |
| | | MK V IVG+N+ +S NR LL+F++K+F K ++EVLEI +P FN+ ++ + +++ + | |
| Sbjct: | 1 | MKLVAIVGTNSNRSTNRKLLKFMQKHFSDKADIEVLEIKQLPAFNEPEDEQAPAEVQAFS | 60 |
| Query: | 61 | NKITRADGVIIATPEHNHTITAALKSVLEWLSFAVHPLENKPVMIVGASYYDQGTSRAQI | 120 |
| | | KI ADGVII+TPE++HTI A L S LEW+++ L NKP MIVGAS GTSRAQ | |
| Sbjct: | 61 | EKILAADGVIISTPEYDHTIPAPLASALEWIAYTSRALINKPTMIVGASLGLLGTSRAQA | 120 |
| Query: | 121 | HLRKILDAPGVNAYTLPGNEFLLGKAKEAFDDNGNIINPGTV | 162 |
| | | HLR+ILDAP + A +PG EF LG +++ DD ++ NP V | |
| Sbjct: | 121 | HLRQILDAPELKARVMPGTEFFLGHSEQVLDDECHLNNPEKV | 162 |

[11676] Based on this analysis, it was predicted that this protein and its epitopes, could be useful antigens for vaccines or diagnostics.

### EXAMPLE 2135

[11677] A DNA sequence (GBSx2251) was identified in S. agalactiae <SEQ ID 6597> which encodes the amino acid sequence <SEQ ID 6598>. Analysis of this protein sequence reveals the following:

| Possible site: 21 | | | | |
|---|---|---|---|---|
| >>> Seems to have no N-terminal signal sequence | | | | |
| | INTEGRAL | Likelihood = −7.32 | Transmembrane | 13-29 (11-29) |

```
----- Final Results -----
                              bacterial membrane --- Certainty = 0.3930(Affirmative) < succ>
                                bacterial outside --- Certainty = 0.0000(Not Clear) < succ>
                            bacterial cytoplasm --- Certainty = 0.0000(Not Clear) < succ>
```

[11678] The protein has no significant homology with any sequences in the GENPEPT database.

[11679] No corresponding DNA sequence was identified in S. pyogenes.

[11680] Based on this analysis, it was predicted that this protein and its epitopes, could be useful antigens for vaccines or diagnostics.

### EXAMPLE 2136

[11681] A DNA sequence (GBSx2252) was identified in S. agalactiae <SEQ ID 6599> which encodes the amino acid sequence <SEQ ID 6600>. This protein is predicted to be potential nitrite transporter. Analysis of this protein sequence reveals the following:

| Possible site: 42 | | | | |
|---|---|---|---|---|
| >>> Seems to have no N-terminal signal sequence | | | | |
| | INTEGRAL | Likelihood = −9.92 | Transmembrane | 61-77 (54-82) |
| | INTEGRAL | Likelihood = −5.57 | Transmembrane | 106-122 (103-126) |
| | INTEGRAL | Likelihood = −5.15 | Transmembrane | 160-176 (159-177) |
| | INTEGRAL | Likelihood = −4.09 | Transmembrane | 180-196 (179-199) |
| | INTEGRAL | Likelihood = −1.01 | Transmembrane | 233-249 (233-249) |

```
----- Final Results -----
                              bacterial membrane --- Certainty = 0.4970(Affirmative) < succ>
                                bacterial outside --- Certainty = 0.0000(Not Clear) < succ>
                            bacterial cytoplasm --- Certainty = 0.0000(Not Clear) < succ>
```

[11682] The protein has homology with the following sequences in the GENPEPT database.

| >GP: CAB15832 GB: Z99123 alternate gene name: ipa-48r~similar to | | | |
|---|---|---|---|
| nitrite transporter [Bacillus subtilis] | | | |
| Identities = 82/253 (32%), Positives = 119/253 (46%), Gaps = 10/253 (3%) | | | |
| Query: | 6 | EKIAYNCAKKEALYKESLGRYALRSMLAGAYLTMSTAAGIVAADTIGK-ISPALSGFVF- | 63 |
| | | +K+ KK+ ++ S RY LRS+LA ++ GI AA G A S F F | |
| Sbjct: | 7 | QKVEQYALKKQNIFASSKIRYVLRSILASIFIGF----GITAASKTGSYFFMADSPFAFP | 62 |
| Query: | 64 | --AFIFSFGLIYVLIFNGELATSNMLYLTAGAYNKNISWKKAMTILIYCTFFNLVGACIL | 121 |
| | | A F ++ + G+L T N Y T A K ISW+ + + + NL+GA + | |
| Sbjct: | 63 | AAAVTFGAAILMIAYGGGDLFTGNTFYFTYTALRKKISWRDTLYLWMSSYAGNLIGAILF | 122 |
| Query: | 122 | AWLFNQSYSFQHLTNDSFLGHVVAKKLGKPSSGAFLEGIIANMFVNLAILAYMLLKEESA | 181 |
| | | A L + + F+ + SFL H+ K+ P+S F G++ N V LA M LK E A | |
| Sbjct: | 123 | AILISATGLFEEPSVHSFLIHLAEHKMEPPASELFFRGMLCNWLVCLAFFIPMSLKGEGA | 182 |
| Query: | 182 | KMTVILSAIFMFVFLSNEHLIANFASFMLAAFSHIEHIKGFTLLNIIRQWTLVFFGNWIG | 241 |
| | | K+ ++ +F F EH IAN +F ++ IEH TL+ +R V GN | |
| Sbjct: | 183 | KLFTMMLFVFCFFISGFEHSIANMCTFAISLL--IEHPDTVTLMGAVRNLIPVTLGNLTA | 240 |
| Query: | 242 | GGVFIGLAYAWLN | 254 |
| | | G V +G Y LN | |
| Sbjct: | 241 | GIVMMGWMYYTLN | 253 |

[11683] A related DNA sequence was identified in S. pyogenes <SEQ ID 6601> which encodes the amino acid sequence <SEQ ID 6602>. Analysis of this protein sequence reveals the following:

| Possible site: 32 | | | | |
|---|---|---|---|---|
| >>> Seems to have no N-terminal signal sequence | | | | |
| | INTEGRAL | Likelihood = −9.77 | Transmembrane | 142-158 (139-171) |
| | INTEGRAL | Likelihood = −9.34 | Transmembrane | 95-111 (89-119) |
| | INTEGRAL | Likelihood = −2.02 | Transmembrane | 61-77 (61-79) |
| | INTEGRAL | Likelihood = −1.12 | Transmembrane | 261-277 (261-279) |
| | INTEGRAL | Likelihood = −0.53 | Transmembrane | 191-207 (191-207) |

```
----- Final Results -----
                              bacterial membrane --- Certainty = 0.4906(Affirmative) < succ>
                                bacterial outside --- Certainty = 0.0000(Not Clear) < succ>
                            bacterial cytoplasm --- Certainty = 0.0000(Not Clear) < succ>
```

[11684] The protein has homology with the following sequences in the databases:

| >GP: AAB80864 GB: U93874 formate dehydrogenase | | | |
|---|---|---|---|
| [Bacillus subtilis] | | | |
| Identities = 133/258 (51%), Positives = 181/258 (69%) | | | |
| Query: | 36 | KTPEQILEATIHIGEHKVTKTFLAKSILGFIGGAMISLGYLLYVRIAASGLETFGAFSSI | 95 |
| | | + P++I EA I G K+ + +LGF+GGA I+LGYLL +R+ + +G+ SS+ | |
| Sbjct: | 4 | RKPDEIAEAAIEAGMKKIKLPLPSLLVLGFLGGAFIALGYLLDIRVIGDLPKEWGSLSSL | 63 |
| Query: | 96 | VGACAFPIGLIIILMAGGELITGNMMAVSAALLAKKIKFSELAKNWLIITLFNVIGAVFV | 155 |
| | | +GA FP+GLI++++AG ELITGNMM+V+ AL ++KI ELA NW I+T+ N+IGA+FV | |
| Sbjct: | 64 | IGAAVFPVGLILVVLAGAELITGNMMSVAMALFSRKISVKELAINWGIVTIMNLIGALFV | 123 |
| Query: | 156 | AFVFGHFLGLTSAGIFKEEVIEVAHAKIAASPLQALVSGIGCNWFVGLALWLCYGANDAA | 215 |
| | | A+ FGH +GLT G + E+ I VA K+ S + L+S IGCNW V LA+WL +GA DAA | |
| Sbjct: | 124 | AYFFGHLVGLTETGPYLEKTIAVAQGKLDMSFGKVLISAIGCNWLVCLAVWLSFGAQDAA | 183 |
| Query: | 216 | GKFLGTWFPVMTFVALGFQHSVANAFVIPAAIFEGGATWLDFVTNFIFVYSGNIIGGAIF | 275 |
| | | GK LG WFP+M FVA+GFQH VAN FVIPAAIF G TW F+ N I + GN+IGGA+F | |
| Sbjct: | 184 | GKILGIWFPIMAFVAIGFQHVVANMFVIPAAIFAGSFTWGQFIGNIIPAFIGNVIGGAVF | 243 |
| Query: | 276 | VSFLYFKVYYHPQKSKTQ | 293 |
| | | V +YF Y+ +S+ + | |
| Sbjct: | 244 | VGLIYFIAYHKKDRSRKE | 261 |

[11685] An alignment of the GAS and GBS proteins is shown below.

| Identities = 69/240 (28%), Positives = 101/240 (41%), | | | |
|---|---|---|---|
| Gaps = 18/240 (7%) | | | |
| Query: | 15 | KEALYKESLGRYALRSMLAGAYLTMSTAAGIVAADTIGKISPALSGFVFAFIFSFGLIYV | 74 |
| | | K L K LG + G L + AA +T G A S V A F GLI + | |
| Sbjct: | 55 | KTFLAKSILGFIGGAMISLGYLLYVRIAAS--GLETFG----AFSSIVGACAFPIGLIII | 108 |
| Query: | 75 | LIFNGELATSNMLYLTAGAYNKNISWKKAMTILIYCTFFNLVGACILAWLFNQSYSFQHL | 134 |
| | | L+ GEL T NM+ ++A K I + + + T FN++GA +A++F F L | |
| Sbjct: | 109 | LMAGGELITGNMMAVSAALLAKKIKFSELAKNWLIITLFNVIGAVFVAFVFGH---FLGL | 165 |
| Query: | 135 | TNDSFLGHVVAK----KLGKPSSGAFLEGIIANMFVNLAILAYMLLKEESAKMTVILSAI | 190 |
| | | T+ V + K+ A + GI N FV LA+ + + K + | |
| Sbjct: | 166 | TSAGIFKEEVIEVAHAKIAASPLQALVSGIGCNWFVGLALWLCYGANDAAGKFLGTWFPV | 225 |
| Query: | 191 | FMFVFLSNEHLIANFASFMLAAFSHIEHIKGFTLLNIIRQWTLVFFGNWIGGGVFIGLAY | 250 |
| | | FV L +H +AN A F G T L+ + + V+ GN IGG +F+ Y | |
| Sbjct: | 226 | MTFVALGFQHSVANAFVIPAAIFE-----GGATWLDFVTNFIFVYSGNIIGGAIFVSFLY | 280 |

[11686] Based on this analysis, it was predicted that these proteins and their epitopes could be useful antigens for vaccines or diagnostics.

### EXAMPLE 2137

[11687] A DNA sequence (GBSx2253) was identified in S. agalactiae <SEQ ID 6603> which encodes the amino acid sequence <SEQ ID 6604>. Analysis of this protein sequence reveals the following:

```
Possible site: 56
>>> Seems to have no N-terminal signal sequence
----- Final Results -----
                            bacterial cytoplasm --- Certainty = 0.1342(Affirmative) < succ>
                              bacterial membrane --- Certainty = 0.0000 (Not Clear) < succ>
                                bacterial outside --- Certainty = 0.0000(Not Clear) < succ>
```

[11688] The protein has no significant homology with any sequences in the GENPEPT database.

[11689] No corresponding DNA sequence was identified in S. pyogenes.

[11690] Based on this analysis, it was predicted that this protein and its epitopes, could be useful antigens for vaccines or diagnostics.

### EXAMPLE 2138

[11691] A DNA sequence (GBSx2254) was identified in S. agalactiae <SEQ ID 6605> which encodes the amino acid sequence <SEQ ID 6606>. Analysis of this protein sequence reveals the following:

| Possible site: 50 | | | | |
|---|---|---|---|---|
| >>> Seems to have no N-terminal signal sequence | | | | |
| | INTEGRAL | Likelihood = −0.22 | Transmembrane | 44-60 (44-60) |

```
----- Final Results -----
                              bacterial membrane --- Certainty = 0.1086(Affirmative) < succ>
                                bacterial outside --- Certainty = 0.0000 (Not Clear) < succ>
                            bacterial cytoplasm --- Certainty = 0.0000(Not Clear) < succ>
```

[11692] The protein has no significant homology with any sequences in the GENPEPT database.

[11693] No corresponding DNA sequence was identified in S. pyogenes.

[11694] Based on this analysis, it was predicted that this protein and its epitopes, could be useful antigens for vaccines or diagnostics.

### EXAMPLE 2139

[11695] A DNA sequence (GBSx2255) was identified in S. agalactiae <SEQ ID 6607> which encodes the amino acid sequence <SEQ ID 6608>. This protein is predicted to be xanthine permease (pbuX). Analysis of this protein sequence reveals the following:

| Possible site: 23 | | | | |
|---|---|---|---|---|
| >>> Seems to have no N-terminal signal sequence | | | | |
| | INTEGRAL | Likelihood = −7.91 | Transmembrane | 160-176 (156-188) |
| | INTEGRAL | Likelihood = −6.48 | Transmembrane | 184-200 (179-211) |
| | INTEGRAL | Likelihood = −6.21 | Transmembrane | 101-117 (96-121) |
| | INTEGRAL | Likelihood = −4.04 | Transmembrane | 309-325 (306-332) |
| | INTEGRAL | Likelihood = −3.98 | Transmembrane | 334-350 (331-353) |
| | INTEGRAL | Likelihood = −3.88 | Transmembrane | 400-416 (396-420) |
| | INTEGRAL | Likelihood = −3.45 | Transmembrane | 19-35 (18-38) |
| | INTEGRAL | Likelihood = −2.81 | Transmembrane | 127-143 (127-146) |
| | INTEGRAL | Likelihood = −2.71 | Transmembrane | 228-244 (227-249) |
| | INTEGRAL | Likelihood = −2.02 | Transmembrane | 47-63 (47-63) |
| | INTEGRAL | Likelihood = −1.97 | Transmembrane | 75-91 (73-92) |
| | INTEGRAL | Likelihood = −0.85 | Transmembrane | 368-384 (368-384) |

```
----- Final Results -----
                              bacterial membrane --- Certainty = 0.4163(Affirmative) < succ>
                                bacterial outside --- Certainty = 0.0000(Not Clear) < succ>
                            bacterial cytoplasm --- Certainty = 0.0000(Not Clear) < succ>
```

[11696] The protein has homology with the following sequences in the GENPEPT database.

| >GP: CAB14123 GB: Z99115 xanthine permease | | | |
|---|---|---|---|
| [Bacillus subtilis] | | | |
| Identities = 213/412 (51%), Positives = 292/412 (70%), | | | |
| Gaps = 5/412 (1%) | | | |
| Query: | 14 | LGLQHLLAMYAGSILVPIMIASALGYNAKQLTYLIATDIFMCGIATLLQLRLSKHFGVGL | 73 |
| | | LG+QH+LAMYAG+I+VP+++ A+G +QLTYL++ DIFMCG+ATLLQ+ ++ FG+GL | |
| Sbjct: | 11 | LGIQHVLAMYAGAIVVPLIVGKAMGLTVEQLTYLVSIDIFMCGVATLLQVWSNRFFGIGL | 70 |
| Query: | 74 | PVVLGCAFQSVAPLSIIGAQQGSGYMFGALIASGIYVVLVAGIFSKVANFFPPIVTGSVI | 133 |
| | | PVVLGC F +V+P+ IG++ G ++G++IASGI V+L++ F K+ +FFPP+VTGSV+ | |
| Sbjct: | 71 | PVVLGCTFTAVSPMIAIGSEYGVSTVYGSIIASGILVILISFFFGKLVSFFPPVVTGSVV | 130 |
| Query: | 134 | TTIGLTLIPVAMGNMGD---NAKEPSLQSLTLSLVTIGVVLLINIFAKGFLKSISILIGL | 190 |
| | | T IG+TL+PVAM NM +A L +L L+ + +++L+ F KGF+KS+SILIG+ | |
| Sbjct: | 131 | TIIGITLMPVAMNNMAGGEGSADFGDLSNLALAFTVLSIIVLLYRFTKGFIKSVSILIGI | 190 |
| Query: | 191 | ISGTILAAFMGLVDASVVADAPLVHIPKPFYFGAPRFEFTSILMMCIIATVSMVESTGVY | 250 |
| | | + GT +A FMG V V+DA +V + +PFYFGAP F I+ M I+A VS+VESTGVY | |
| Sbjct: | 191 | LIGTFIAYFMGKVQFDNVSDAAVVQMIQPFYFGAPSFHAAPIITMSIVAIVSLVESTGVY | 250 |
| Query: | 251 | LALSDITNDKLDSKRLRNGYRSEGLAVLLGGLFNTFPYTGFSQNVGLVQISGIRTRKPIY | 310 |
| | | AL D+TN +L L GYR+EGLAVLLGG+FN FPYT FSQNVGLVQ++GI+ I | |
| Sbjct: | 251 | FALGDLTNRRLTEIDLSKGYRAEGLAVLLGGIFNAFPYTAFSQNVGLVQLTGIKKNAVIV | 310 |
| Query: | 311 | FTALFLVILGLLPKFGAMAQMIPSPVLGGAMLVLFGMVALQGMKMLNQVDFEHNEHNFII | 370 |
| | | T + L+ GL PK A +IPS VLGGAM+ +FGMV G+KML+++DF E N +I | |
| Sbjct: | 311 | VTGVILMAFGLFPKIAAFTTIIPSAVLGGAMVAMFGMVIAYGIKMLSRIDFAKQE-NLLI | 369 |
| Query: | 371 | AAVSIAAGVGFNGT-NLFISLPNTLQMFLTNGIVISTLTAVVLNIILNGLPK | 421 |
| | | A S+ G+G ++F LP+ L + TNGIV + TAVVLNI+ N K | |
| Sbjct: | 370 | VACSVGLGLGVTVVPDIFKQLPSALTLLTTNGIVAGSFTAVVLNIVYNVFSK | 421 |

[11697] A related DNA sequence was identified in S. pyogenes <SEQ ID 6609> which encodes the amino acid sequence <SEQ ID 6610>. Analysis of this protein sequence reveals the following:

| Possible site: 29 | | | | |
|---|---|---|---|---|
| >>> Seems to have no N-terminal signal sequence | | | | |
| | INTEGRAL | Likelihood = −7.32 | Transmembrane | 160-176 (158-181) |
| | INTEGRAL | Likelihood = −6.37 | Transmembrane | 103-119 (98-124) |
| | INTEGRAL | Likelihood = −5.84 | Transmembrane | 130-146 (126-152) |
| | INTEGRAL | Likelihood = −5.68 | Transmembrane | 187-203 (182-207) |
| | INTEGRAL | Likelihood = −3.98 | Transmembrane | 337-353 (334-356) |
| | INTEGRAL | Likelihood = −3.82 | Transmembrane | 232-248 (225-252) |
| | INTEGRAL | Likelihood = −3.35 | Transmembrane | 403-419 (399-421) |
| | INTEGRAL | Likelihood = −2.50 | Transmembrane | 22-38 (21-41) |
| | INTEGRAL | Likelihood = −2.07 | Transmembrane | 312-328 (312-328) |
| | INTEGRAL | Likelihood = −1.97 | Transmembrane | 78-94 (76-95) |

```
----- Final Results -----
                              bacterial membrane --- Certainty = 0.3930(Affirmative) < succ>
                                bacterial outside --- Certainty = 0.0000(Not Clear) < succ>
                            bacterial cytoplasm --- Certainty = 0.0000(Not Clear) < succ>
```

[11698] The protein has homology with the following sequences in the databases:

| >GP: CAB15234 GB: Z99120 similar to purine permease | | | |
|---|---|---|---|
| [Bacillus subtilis] | | | |
| Identities = 216/421 (51%), Positives = 302/421 (71%), | | | |
| Gaps = 5/421 (1%) | | | |
| Query: | 6 | KQEHSHSQSAVLGLQHVLSMYAGSILVPIMIAGALGYSARELTYLISTDIFMCGVATFLQ | 65 |
| | | K++H+ Q +LGLQH+L+MYAG+ILVP+++ A+G +A +LTYLI+ D+FMCG AT LQ | |
| Sbjct: | 2 | KEQHNALQLMMLGLQHMLAMYAGAILVPLIVGAAIGLNAGQLTYLIAIDLFMCGAATLLQ | 61 |
| Query: | 66 | LKLTKHTGVGLPVVLGCAFQSVAPLSIIGAQQGSGAMFGALIASGIYVILVAGIFSKIAR | 125 |
| | | L ++ G+GLPVVLGC F +V P+ IG+ G A++GA+IA+G+ V+L AG F K+ R | |
| Sbjct: | 62 | LWRNRYFGIGLPVVLGCTFTAVGPMISIGSTYGVPAIYGAIIAAGLIVVLAAGFFGKLVR | 121 |
| Query: | 126 | FFPPIVTGSVITVIGLSLVGVAMGNM--GDNVKE-PTAQSMMLSLLTIVIILLVQKFTKG | 182 |
| | | FFPP+VTGSV+ +IG+SL+ AM N+ G+ KE + +++L ILL+ F KG | |
| Sbjct: | 122 | FFPPVVTGSVVMIIGISLIPTAMNNLAGGEGSKEFGSLDNVLLGFGVTAFILLLFYFFKG | 181 |
| Query: | 183 | FVKSISILIGLVAGTLVSAMMGLVDTTPVVEASWIHVPTPFYFGMPTFEITSIVMMCIIA | 242 |
| | | F++SI+IL+GL+AGT + MG VD + V+EASW+HVP+ FYFG PTFE+ ++V M ++A | |
| Sbjct: | 182 | FIRSIAILLGLIAGTAAAYFMGKVDFSEVLEASWLHVPSLFYFGPPTFELPAVVTMLLVA | 241 |
| Query: | 243 | TVSMVESTGVYLALSDLTNDQLDEKRLRNGYRSEGIAVFLGGLFNTFPYTGFSQNVGLVQ | 302 |
| | | VS+VESTGVY AL+D+TN +L EK L GYR+EG+A+ LGGLFN FPYT FSQNVG+VQ | |
| Sbjct: | 242 | IVSLVESTGVYFALADITNRRLSEKDLEKGYRAEGLAILLGGLFNAFPYTAFSQNVGIVQ | 301 |
| Query: | 303 | ISGIKTRRPIYYAAGILVVIGLLPKFRAMAQMIPSPVLGGAMLVLFGMVALQGMQMLNRV | 362 |
| | | +S +K+ I ILV IGL+PK A+ +IP+PVLGGAM+V+FGMV G++ML+ V | |
| Sbjct: | 302 | LSKMKSVNVIAITGIILVAIGLVPKAAALTTVIPTPVLGGAMIVMFGMVISYGIKMLSSV | 361 |
| Query: | 363 | DFQKNEYNFIIAAVSISAGLGFNGT-NLFASLPETAQMFLTNGIVIATLTSVVLNLVLNGK | 422 |
| | | D ++ N +I A S+S GLG LF+SL A + +GIVI +LT++ L+ K | |
| Sbjct: | 362 | DLD-SQGNLLIIASSVSLGLGATTVPALFSSLSGAASVLAGSGIVIGSLTAIALHAFFQTK | 421 |

[11699] An alignment of the GAS and GBS proteins is shown below.

| Identities = 328/416 (78%), Positives = 380/416 (90%) | | | |
|---|---|---|---|
| Query: | 7 | SNSQAALLGLQHLLAMYAGSILVPIMIASALGYNAKQLTYLIATDIFMCGIATLLQLRLS | 66 |
| | | S+SQ+A+LGLQH+L+MYAGSILVPIMIA ALGY+A++LTYLI+TDIFMCG+AT LQL+L+ | |
| Sbjct: | 10 | SHSQSAVLGLQHVLSMYAGSILVPIMIAGALGYSARELTYLISTDIFMCGVATFLQLKLT | 69 |
| Query: | 67 | KHFGVGLPVVLGCAFQSVAPLSIIGAQQGSGYMFGALIASGIYVVLVAGIFSKVANFFPP | 126 |
| | | KH GVGLPVVLGCAFQSVAPLSIIGAQQGSG MFGALIASGIYV+LVAGIFSK+A FFPP | |
| Sbjct: | 70 | KHTGVGLPVVLGCAFQSVAPLSIIGAQQGSGAMFGALIASGIYVILVAGIFSKIARFFPP | 129 |
| Query: | 127 | IVTGSVITTIGLTLIPVAMGNMGDNAKEPSLQSLTLSLVTIGVVLLINIFAKGFLKSISI | 186 |
| | | IVTGSVIT IGL+L+ VAMGNMGDN KEP+ QS+ LSL+TI ++LL+ F KGF+KSISI | |
| Sbjct: | 130 | IVTGSVITVIGLSLVGVAMGNMGDNVKEPTAQSMMLSLLTIVIILLVQKFTKGFVKSISI | 189 |
| Query: | 187 | LIGLISGTILAAFMGLVDASVVADAPLVHIPKPFYFGAPRFEFTSILMMCIIATVSMVES | 246 |
| | | LIGL++GT+++A MGLVD + V +A +H+P PFYFG P FE TSI+MMCIIATVSMVES | |
| Sbjct: | 190 | LIGLVAGTLVSAMNGLVDTTPVVEASWIHVPTPFYFGMPTFEITSIVMMCIIATVSMVES | 249 |
| Query: | 247 | TGVYLALSDITNDKLDSKRLRNGYRSEGLAVLLGGLFNTFPYTGFSQNVGLVQISGIRTR | 306 |
| | | TGVYLALSD+TND+LD KRLRNGYRSEG+AV LGGLFNTFPYTGFSQNVGLVQISGI+TR | |
| Sbjct: | 250 | TGVYLALSDLTNDQLDEKRLRNGYRSEGIAVFLGGLFNTFPYTGFSQNVGLVQISGIKTR | 309 |
| Query: | 307 | KPIYFTALFLVILGLLPKFGAMAQMIPSPVLGGAMLVLFGMVALQGMKMLNQVDFEHNEH | 366 |
| | | +PIY+ A LV++GLLPKF AMAQMIPSPVLGGAMLVLFGMVALQGM+MLN+VDF+ NE+ | |
| Sbjct: | 310 | RPIYYAAGILVVIGLLPKFRAMAQMIPSPVLGGAMLVLFGMVALQGMQMLNRVDFQKNEY | 369 |
| Query: | 367 | NFIIAAVSIAAGVGFNGTNLFISLPNTLQMFLTNGIVISTLTAVVLNIILNGLPKK | 422 |
| | | NFIIAAVSI+AG+GFNGTNLF SLP T QMFLTNGIVI+TLT+VVLN++LNG K+ | |
| Sbjct: | 370 | NFIIAAVSISAGLGFNGTNLFASLPETAQMFLTNGIVIATLTSVVLNLVLNGKDKQ | 425 |

[11700] Based on this analysis, it was predicted that these proteins and their epitopes could be useful antigens for vaccines or diagnostics.

### EXAMPLE 2140

[11701] A DNA sequence (GBSx2256) was identified in S. agalactiae <SEQ ID 6611> which encodes the amino acid sequence <SEQ ID 6612>. This protein is predicted to be xanthine phosphoribosyltransferase (xpt). Analysis of this protein sequence reveals the following:

```
Possible site: 43
>>> Seems to have no N-terminal signal sequence
----- Final Results -----
                            bacterial cytoplasm --- Certainty = 0.1921(Affirmative) < succ>
                              bacterial membrane --- Certainty = 0.0000(Not Clear) < succ>
                                bacterial outside --- Certainty = 0.0000(Not Clear) < succ>
```

[11702] The protein has homology with the following sequences in the GENPEPT database.

| >GP: CAA13587 GB: AJ233894 xanthine phosphoribosyltransferase | | | |
|---|---|---|---|
| [Streptococcus pneumoniae] | | | |
| Identities = 133/162 (82%), Positives = 144/162 (88%) | | | |
| Query: | 16 | GENILKVDSFLTHQVDFELMQEIGKVFADKYKEAGITKVVTIEASGIAPAVYAAQALGVP | 75 |
| | | G+NILKVDSFLTHQVDF LM+EIGKVFA+K+ AGITKVVTIEASGIAPA++ A+AL VP | |
| Sbjct: | 1 | GDNILKVDSFLTHQVDFSLMREIGKVFAEKFASAGITKVVTIEASGIAPALFTAEALNVP | 60 |
| Query: | 76 | MIFAKKAKNITMTEGILTAEVYSFTKQVTSQVSIVSRFLSNDDTVLIIDDFLANGQAAKG | 135 |
| | | MIFAKKAKNITM EGILTAEVYSFTKQVTS VSI +FLS +D VLIIDDFLANGQAAKG | |
| Sbjct: | 61 | MIFAKKAKNITMNEGILTAEVYSFTKQVTSTVSIAGKFLSPEDKVLIIDDFLANGQAAKG | 120 |
| Query: | 136 | LLEIIGQAGAKVAGIGIVIEKSFQDGRDLLEKTGVPVTSLAR | 177 |
| | | L++II QAGA V IGIVIEKSFQDGRDLLEK G PV SLAR | |
| Sbjct: | 121 | LIQIIEQAGATVEAIGIVIEKSFQDGRDLLEKAGYPVLSLAR | 162 |

[11703] A related DNA sequence was identified in S. pyogenes <SEQ ID 6613> which encodes the amino acid sequence <SEQ ID 6614>. Analysis of this protein sequence reveals the following:

```
Possible site: 43
>>> Seems to have no N-terminal signal sequence
----- Final Results -----
                            bacterial cytoplasm --- Certainty = 0.2576(Affirmative) < succ>
                              bacterial membrane --- Certainty = 0.0000(Not Clear) < succ>
                                bacterial outside --- Certainty = 0.0000(Not Clear) < succ>
```

[11704] An alignment of the GAS and GBS proteins is shown below.

| Identities = 156/193 (80%), Positives = 172/193 (88%) | | | |
|---|---|---|---|
| Query: | 1 | MKLLEERILKDGDVLGENILKVDSFLTHQVDFELMQEIGKVFADKYKEAGITKVVTIEAS | 60 |
| | | M+LLEERIL DG++LGENILKVD+FLTHQVD+ LM+ IGKVFA KY EAGITKVVTIEAS | |
| Sbjct: | 1 | MQLLEERILTDGNILGENILKVDNFLTHQVDYRLMKAIGKVFAQKYAEAGITKVVTIEAS | 60 |
| Query: | 61 | GIAPAVYAAQALGVPMIFAKKAKNITMTEGILTAEVYSFTKQVTSQVSIVSRFLSNDDTV | 120 |
| | | GIAPAVYAA+A+ VPMIFAKK KNITMTEGILTAEVYSFTKQVTS VSI +FLS +D V | |
| Sbjct: | 61 | GIAPAVYAAEAMDVPMIFAKKHKNITMTEGILTAEVYSFTKQVTSTVSIAGKFLSKEDKV | 120 |
| Query: | 121 | LIIDDFLANGQAAKGLLEIIGQAGAKVAGIGIVIEKSFQDGRDLLEKTGVPVTSLARIKA | 180 |
| | | LIIDDFLANGQAAKGL+EIIGQAGA+V G+GIVIEKSFQDGR L+E G+ VTSLARIK | |
| Sbjct: | 121 | LIIDDFLANGQAAKGLIEIIGQAGAQVVGVGIVIEKSFQDGRRLIEDMGIEVTSLARIKN | 180 |
| Query: | 181 | FENGRVVFAEADA | 193 |
| | | FENG + F EADA | |
| Sbjct: | 181 | FENGNLNFLEADA | 193 |

[11705] Based on this analysis, it was predicted that these proteins and their epitopes could be useful antigens for vaccines or diagnostics.

### EXAMPLE 2141

[11706] A DNA sequence (GBSx2257) was identified in S. agalactiae <SEQ ID 6615> which encodes the amino acid sequence <SEQ ID 6616>. Analysis of this protein sequence reveals the following:

```
Possible site: 28
>>> Seems to have no N-terminal signal sequence
----- Final Results -----
                            bacterial cytoplasm --- Certainty = 0.2546(Affirmative) < succ>
                              bacterial membrane --- Certainty = 0.0000(Not Clear) < succ>
                                bacterial outside --- Certainty = 0.0000(Not Clear) < succ>
```

[11707] The protein has homology with the following sequences in the GENPEPT database.

| >GP: CAB15203 GB: Z99120 similar to GMP reductase [Bacillus subtilis] | | | |
|---|---|---|---|
| Identities = 243/321 (75%), Positives = 286/321 (88%), Gaps = 2/321 (0%) | | | |
| Query: | 7 | VFDYEDIQLIPNKCIISSRSQADTSVKLGNYTFKLPVIPANMQTIIDEEVAETLACEGYF | 66 |
| | | VFDYEDIQLIP KCI++SRS+ DTSV+LG +TFKLPV+PANMQTIIDE++A +LA GYF | |
| Sbjct: | 4 | VFDYEDIQLIPAKCIVNSRSECDTSVRLGGHTFKLPVVPANMQTIIDEKLAISLAENGYF | 63 |
| Query: | 67 | YIMHRFNEEERKPFIKRMHDKGLIASISVGVKDYEYDFVTSLKED--APEFITIDIAHGH | 124 |
| | | Y+MHRF E R FIK M+ +GL +SISVGVKD EY+FV L E+ PE++TIDIAHGH | |
| Sbjct: | 64 | YVMHRFEPETRIDFIKDMNARGLFSSISVGVKDEEYEFVRQLAEENLTPEYVTIDIAHGH | 123 |
| Query: | 125 | SNSVIEMIQHIKQELPETFVIAGNVGTPEAVRELENAGADATKVGIGPGKVCITKVKTGF | 184 |
| | | SN+VIEMIQH+K+ LP++FVIAGNVGTPEAVRELENAGADATKVGIGPGKVCITK+KTGF | |
| Sbjct: | 124 | SNAVIEMIQHLKKHLPDSFVIAGNVGTPEAVRELENAGADATKVGIGPGKVCITKIKTGF | 183 |
| Query: | 185 | GTGGWQLAALRWCSKAARKPIIADGGIRTHGDIAKSIRFGASMVMIGSLFAGHLESPGKL | 244 |
| | | GTGGWQLAALRWC+KAA KPIIADGGIRTHGDIAKSIRFGA+MVMIGSLFAGH ESPG+ | |
| Sbjct: | 184 | GTGGWQLAALRWCAKAASKPIIADGGIRTHGDIAKSIRFGATMVMIGSLFAGHEESPGQT | 243 |
| Query: | 245 | VEVEGQQFKEYYGSASEYQKGEHKNVEGKKILLPVKGRLEDTLTEMQQDLQSSISYAGGK | 304 |
| | | +E +G+ +KEY+GSASE+ KGE KNVEGKK+ + KG ++DTL EM+QDLQSSISYAGG | |
| Sbjct: | 244 | IEKDGKLYKEYFGSASEFPKGEKKNVEGKKMHVAHKGSIKDTLIEMEQDLQSSISYAGGT | 303 |
| Query: | 305 | ELDSLRHVDYVIVKNSIWNGD | 325 |
| | | +L+++R+VDYVIVKNSI+NGD | |
| Sbjct: | 304 | KLNAIRNVDYVIVKNSIFNGD | 324 |

[11708] A related DNA sequence was identified in S. pyogenes <SEQ ID 6617> which encodes the amino acid sequence <SEQ ID 6618>. Analysis of this protein sequence reveals the following:

```
Possible site: 35
>>> Seems to have no N-terminal signal sequence
----- Final Results -----
                            bacterial cytoplasm --- Certainty = 0.2405(Affirmative) < succ>
                              bacterial membrane --- Certainty = 0.0000(Not Clear) < succ>
                                bacterial outside --- Certainty = 0.0000(Not Clear) < succ>
```

[11709] An alignment of the GAS and GBS proteins is shown below.

| Identities = 297/327 (90%), Positives = 311/327 (94%) | | | |
|---|---|---|---|
| Query: | 1 | MFNDIPVFDYEDIQLIPNKCIISSRSQADTSVKLGNYTFKLPVIPANMQTIIDEEVAETL | 60 |
| | | MFNDIPVFDYEDIQLIPNKCII+SRSQADTSV LG Y FKLPVIPANMQTIIDE +AE L | |
| Sbjct: | 8 | MFNDIPVFDYEDIQLIPNKCIITSRSQADTSVTLGKYQFKLPVIPANMQTIIDETIAEQL | 67 |
| Query: | 61 | ACEGYFYIMHRFNEEERKPFIKRMHDKGLIASISVGVKDYEYDFVTSLKEDAPEFITIDI | 120 |
| | | A EGYFYIMHRF+E+ RKPFIKRMH++GLIASISVGVK EY+FVTSLKEDAPEFITIDI | |
| Sbjct: | 68 | AKEGYFYIMHRFDEDSRKPFIKRMHEQGLIASISVGVKACEYEFVTSLKEDAPEFITIDI | 127 |
| Query: | 121 | AHGHSNSVIEMIQHIKQELPETFVIAGNVGTPEAVRELENAGADATKVGIGPGKVCITKV | 180 |
| | | AHGH+NSVI+MI+HIK ELPETFVIAGNVGTPEAVRELENAGADATKVGIGPGKVCITKV | |
| Sbjct: | 128 | AHGHANSVIDMIKHIKTELPETFVIAGNVGTPEAVRELENAGADATKVGIGPGKVCITKV | 187 |
| Query: | 181 | KTGFGTGGWQLAALRWCSKAARKPIIADGGIRTHGDIAKSIRFGASMVMIGSLFAGHLES | 240 |
| | | KTGFGTGGWQLAALRWC+KAARKPIIADGGIRTHGDIAKSIRFGASMVMIGSLFAGH ES | |
| Sbjct: | 188 | KTGFGTGGWQLAALRWCAKAARKPIIADGGIRTHGDIAKSIRFGASMVMIGSLFAGHFES | 247 |
| Query: | 241 | PGKLVEVEGQQFKEYYGSASEYQKGEHKNVEGKKILLPVKGRLEDTLTEMQQDLQSSISY | 300 |
| | | PGK VEV+G+ FKEYYGSASEYQKGEHKNVEGKKILLP KG L DTLTEMQQDLQSSISY | |
| Sbjct: | 248 | PGKTVEVDGETFKEYYGSASEYQKGEHKNVEGKKILLPTKGHLSDTLTEMQQDLQSSISY | 307 |
| Query: | 301 | AGGKELDSLRHVDYVIVKNSIWNGDSI | 327 |
| | | AGGK+LDSLRHVDYVIVKNSIWNGDSI | |
| Sbjct: | 308 | AGGKDLDSLRHVDYVIVKNSIWNGDSI | 334 |

[11710] Based on this analysis, it was predicted that these proteins and their epitopes could be useful antigens for vaccines or diagnostics.

### EXAMPLE 2142

[11711] A DNA sequence (GBSx2258) was identified in S. agalactiae <SEQ ID 6619> which encodes the amino acid sequence <SEQ ID 6620>. Analysis of this protein sequence reveals the following:

| Possible site: 57 | | | | |
|---|---|---|---|---|
| >>> Seems to have an uncleavable N-term signal seq | | | | |
| | INTEGRAL | Likelihood = −16.98 | Transmembrane | 421-437 (413-443) |
| | INTEGRAL | Likelihood = −8.81 | Transmembrane | 166-182 (159-186) |
| | INTEGRAL | Likelihood = −8.55 | Transmembrane | 220-236 (208-238) |
| | INTEGRAL | Likelihood = −6.69 | Transmembrane | 322-338 (319-353) |
| | INTEGRAL | Likelihood = −5.26 | Transmembrane | 199-215 (196-218) |
| | INTEGRAL | Likelihood = −4.35 | Transmembrane | 343-359 (342-361) |
| | INTEGRAL | Likelihood = −4.09 | Transmembrane | 291-307 (287-308) |
| | INTEGRAL | Likelihood = −3.66 | Transmembrane | 8-24 (8-27) |
| | INTEGRAL | Likelihood = −3.66 | Transmembrane | 133-149 (133-151) |
| | INTEGRAL | Likelihood = −3.19 | Transmembrane | 254-270 (253-278) |
| | INTEGRAL | Likelihood = −2.50 | Transmembrane | 53-69 (53-72) |
| | INTEGRAL | Likelihood = −1.81 | Transmembrane | 77-93 (76-95) |
| | INTEGRAL | Likelihood = −1.33 | Transmembrane | 109-125 (109-125) |

```
----- Final Results -----
                              bacterial membrane --- Certainty = 0.7793(Affirmative) < succ>
                                bacterial outside --- Certainty = 0.0000(Not Clear) < succ>
                            bacterial cytoplasm --- Certainty = 0.0000(Not Clear) < succ>
```

[11712] The protein has homology with the following sequences in the GENPEPT database.

| >GP: CAB61253 GB: AJ250422 ORFC [Oenococcus oeni] | | | |
|---|---|---|---|
| Identities = 157/447 (35%), Positives = 252/447 (56%), Gaps = 13/447 (2%) | | | |
| Query: | 11 | AIITTAILGFSGILIETSMNVTFPLLMKEFGVNPAVIQWVTTGNLLAVAVTVPLSAFMIK | 70 |
| | | AI+ A L F G+LIETSMNVTFP LM++F ++ +QW+TT LL VA T+ ++AF+ K | |
| Sbjct: | 15 | AILGLAGLAFCGVLIETSMNVTFPTLMQQFSISLNKVQWLTTAYLLLVAATISIAAFIEK | 74 |
| Query: | 71 | NLSERQIFTLANVLFLSGVLIDSFAPNLAILLVGRVLQGVGTGLALPLLFHIILTQIPME | 130 |
| | | ++IF A +LF+ GV+ + APN ILL+GR++Q + TGLA+PLL I+ QIP + | |
| Sbjct: | 75 | RFIFKKIFFWAGLLFIIGVICSALAPNFLILLIGRLIQALSTGLAIPLLITEIMQQIPQK | 134 |
| Query: | 131 | RRGLMMGVAAMVTLLAPAVGPTYGGVISGMLGWKMIFMLLAPILIISTFIGLASIPKRQV | 190 |
| | | ++G M + + L P++GPTYGGVI+ L W++IF + PI +I+ IGL+ I ++ | |
| Sbjct: | 135 | KQGSYMELVEWLLLWQPSLGPTYGGVITQDLSWRLIFWFVLPIGLIAWLIGLSFIEQKSS | 194 |
| Query: | 191 | RINDKLNFPAFISLGIGLATLLLAIEKMSIF---------YLLVAIVSFVIFYYL--NKQ | 239 |
| | | + FISL + L ++ +A+ I+ +LL+A++ ++F L N + | |
| Sbjct: | 195 | PSKIPFAWKQFISLILALLSITVAVNNAGIYGWTSIKFYGFLLIAVILLIVFIKLSTNSR | 254 |
| Query: | 240 | LEFLNLNVFKDKDFSILLYGVLAFQMIPLALSFLLPNLLQLVLHQTSTKAGLFMFPGAIA | 299 |
| | | +++++FK +F L Q I L+L+FLLPN QL+L + +G+ + G++ | |
| Sbjct: | 255 | QALISISIFKKWEFVCPLLIYFLIQFIQLSLTFLLPNYAQLILKKGVMISGIMLLCGSLI | 314 |
| Query: | 300 | VVFLSPFAGYLLDKIGAFKPIMIGISLSLIGLIGTAIFIPAKSVVVLLAFDILTKIGMGI | 359 |
| | | L P G +LD P++IG + I IF SV ++ A ++ IG | |
| Sbjct: | 315 | SAILQPLTGRMLDSFSVKIPLVIGAFFLITSTISFTIFQRYLSVFLIAALYVIYMIGFSF | 374 |
| Query: | 360 | GASNMVTTALTKLKPAQSADGNSILNTLQQFAGAFATAVASQIFTIGQVAIPKNGAIIGS | 419 |
| | | +N +T AL KL +DGN++ NTLQQ+AG+ T+VAS + G K GS | |
| Sbjct: | 375 | VFNNSLTYALQKLPLKLISDGNAVFNTLQQYAGSLGTSVASALLANGIGTDGKQSNYTGS | 434 |
| Query: | 420 | Q--FAVLFVIVVVILAIVGLTYLRKRK | 444 |
| | | + F + F+ +++ ++ +K K | |
| Sbjct: | 435 | RHIFILNFISCAIVVILIFSIQRKKNK | 461 |

[11713] There is also homology to SEQ ID 46.

[11714] Based on this analysis, it was predicted that this protein and its epitopes, could be useful antigens for vaccines or diagnostics.

### EXAMPLE 2143

[11715] A DNA sequence (GBSx2259) was identified in S. agalactiae <SEQ ID 6621> which encodes the amino acid sequence <SEQ ID 6622>. Analysis of this protein sequence reveals the following:

```
Possible site: 52
>>> Seems to have no N-terminal signal sequence
----- Final Results -----
                            bacterial cytoplasm --- Certainty = 0.2151(Affirmative) < succ>
                              bacterial membrane --- Certainty = 0.0000(Not Clear) < succ>
                                bacterial outside --- Certainty = 0.0000(Not Clear) < succ>
```

[11716] The protein has no significant homology with any sequences in the GENPEPT database.

[11717] A related DNA sequence was identified in S. pyogenes <SEQ ID 6595> which encodes the amino acid sequence <SEQ ID 6596>. Analysis of this protein sequence reveals the following:

```
Possible site: 32
>>> Seems to have an uncleavable N-term signal seq
----- Final Results -----
                              bacterial membrane --- Certainty = 0.0000(Not Clear) < succ>
                                bacterial outside --- Certainty = 0.0000(Not Clear) < succ>
                            bacterial cytoplasm --- Certainty = 0.0000(Not Clear) < succ>
```

[11718] An alignment of the GAS and GBS proteins is shown below.

| Identities = 74/214 (34%), Positives = 112/214 (51%), Gaps = 5/214 (2%) | | | |
|---|---|---|---|
| Query: | 13 | NESENNFFITLKTYFNYLFSIQIIT---DISTLNHADFDGSFAFHDIETSIPHLVIDSNY | 69 |
| | | N+ E F L +F++LF + I+T +I + + F G F+FH+ + +P L ++ | |
| Sbjct: | 15 | NQLEETFIRELSHHFSHLFEVTILTSKANIQSNQLSTFQGIFSFHEHDIDLPTLYFKTSQ | 74 |
| Query: | 70 | LAISQTNSKIEANDIKTFSELSKTMTEFHYMLNFDLFNHLPYRFRLHNKDGQTIYSNHKP | 129 |
| | | ++ + LS+ +T F+ + +LP + RL + +G I NH | |
| Sbjct: | 75 | HGQGFLVTESVFDQATAVLSLSQYLTGFYQKFDGHFLQYLPLQARLSDANGNIIVDNHAF | 134 |
| Query: | 130 | EDPFDIYPEEEYPIDKWVQNSLIEKKAKELHLLLPSASQDYILVQSYKRLENDSGQLVGY | 189 |
| | | F P + I+ W+ L LLPS S D+I +Q Y+ L+N GQLVG | |
| Sbjct: | 135 | NGSF--LPTTDKEIEDWILAELRLSDNPCKTFLLPSGSLDHIYMQHYQALKNPQGQLVGV | 192 |
| Query: | 190 | IEHVHNIKPLLEGYLKESGQAIVGWSDVTSGASI | 223 |
| | | ++ V +IKPLL YL+E+GQAIVGWSDVTSG SI | |
| Sbjct: | 193 | LDTVQDIKPLLNQYLEETGQAIVGWSDVTSGPSI | 226 |

[11719] Based on this analysis, it was predicted that these proteins and their epitopes could be useful antigens for vaccines or diagnostics.

### EXAMPLE 2144

[11720] A DNA sequence (GBSx2260) was identified in S. agalactiae <SEQ ID 6623> which encodes the amino acid sequence <SEQ ID 6624>. Analysis of this protein sequence reveals the following:

| Possible site: 18 | | | | |
|---|---|---|---|---|
| >>> Seems to have an uncleavable N-term signal seq | | | | |
| | INTEGRAL | Likelihood = −12.10 | Transmembrane | 431-447 (423-452) |
| | INTEGRAL | Likelihood = −8.92 | Transmembrane | 149-165 (147-174) |
| | INTEGRAL | Likelihood = −8.86 | Transmembrane | 404-420 (402-428) |
| | INTEGRAL | Likelihood = −7.91 | Transmembrane | 299-315 (293-318) |
| | INTEGRAL | Likelihood = −6.42 | Transmembrane | 380-396 (374-398) |
| | INTEGRAL | Likelihood = −5.31 | Transmembrane | 350-366 (347-367) |
| | INTEGRAL | Likelihood = −4.57 | Transmembrane | 56-72 (54-74) |
| | INTEGRAL | Likelihood = −3.24 | Transmembrane | 172-188 (171-198) |
| | INTEGRAL | Likelihood = −1.33 | Transmembrane | 224-240 (224-240) |
| | INTEGRAL | Likelihood = −0.59 | Transmembrane | 101-117 (101-117) |

```
----- Final Results -----
                              bacterial membrane --- Certainty = 0.5840(Affirmative) < succ>
                                bacterial outside --- Certainty = 0.0000(Not Clear) < succ>
                            bacterial cytoplasm --- Certainty = 0.0000(Not Clear) < succ>
```

[11721] The protein has homology with the following sequences in the GENPEPT database.

| >GP: AAF84709 GB: AE004010 potassium uptake protein [Xylella | | | |
|---|---|---|---|
| fastidiosa] | | | |
| Identities = 201/570 (35%), Positives 319/570 (55%), Gaps = 34/570 (5%) | | | |
| Query: | 1 | MAEMQHVNHSSFDKASKAGFII--ALGIVYGDIGTSPLYTMQSLVENQGGISSVTESFIL | 58 |
| | | M+ H + ++ G II A+G+V+GDIGTSPLYT++ G++ ++ +L | |
| Sbjct: | 1 | MSTSSHSGDCTAVPSNSNGTIILSAIGVVFGDIGTSPLYTLKEAFSPNYGLTPNHDT-VL | 59 |
| Query: | 59 | GSISLIIWTLTLITTIKYVLVALKADNHHEGGIFSLYTLVRKMTPW-------LIVPAVI | 111 |
| | | G +SLI W + L+ TIKYV V ++ DN EGGI +L L ++ P+ + + + | |
| Sbjct: | 60 | GILSLIFWAMMLVVTIKYVAVIMRVDNDGEGGIMALTALTQRTMPFGSRSIYIVGILGIF | 119 |
| Query: | 112 | GGATLLSDGALTPAVTVTSAVEGLKVVPSLQHIFQNQSNVIFATLFILLLLFAIQRFGTG | 171 |
| | | G + DG +TPA++V SAVEGL+V F V+ TL +L+LLF QRFGT | |
| Sbjct: | 120 | GTSLFFGDGVITPAISVLSAVEGLEVAEPHMKAF-----VVPITLAVLILLFLCQRFGTE | 174 |
| Query: | 172 | VIGKLFGPIMFIWFAFLGISGLLNSFAHPEVFKAINPYYGLKLLFSPENHKGIFILGSIF | 231 |
| | | +GK FGPI +WF +G+ G+ N PEV AINP +GL F +F+LG++ | |
| Sbjct: | 175 | RVGKTFGPITLLWFIAIGVVGVYNIAQAPEVLHAINPSWGLH-FFLEHGWHSMFVLGAVV | 233 |
| Query: | 232 | LATTGAEALYSDLGHVGRGNIHVSWPFVKVAII-LSYCGQGAWILANKNAGNELNPFFAS | 290 |
| | | LA TG EALY+D+GH G I +W +V + ++ L+Y GQGA +L+N A NPF+ S | |
| Sbjct: | 234 | LAVTGGEALYADMGHFGAKAIRHAWMYVVLPMLALNYLGQGALVLSNPTAIG--NPFYQS | 291 |
| Query: | 291 | IPSQFTMHVVILATLAAIIASQALISGSFTLVSEAMRLKIFPQFRSTYPGDN-IGQTYIP | 349 |
| | | IP ++ LAT AA+IASQALI+GS++L S+AM+L P+ + + IGQ Y+P | |
| Sbjct: | 292 | IPDWGLYPMIALATAAAVIASQALITGSYSLSSQAMQLGYIPRMNVRHTSQSTIGQIYVP | 351 |
| Query: | 350 | VINWFLFAITTSIVLLFKTSAHMEAAYGLAITITMLMTTILLSFFL-IQKGVKRGLVLLM | 408 |
| | | +NW L + V+ F S M +AYG+A+T TM++TT+L+ + V R ++ +M | |
| Sbjct: | 352 | TVNWTLLTLVILTVIGFGDSTSMASAYGVAVTGTMMITTVLMIIYARANPRVPRLMLWMM | 411 |
| Query: | 409 | MIFFGILEGIFFLASAVKFMHGGYVVVIIAVAIIFIMTIWYKGSKIVSRYVKL--LDLKD | 466 |
| | | I F ++G FF A+ +KFM G + +++ V I M W +G K++ ++ ++L + | |
| Sbjct: | 412 | AIVFIAVDGAFFYANIIKFMDGAWFPLLLGVVIFTFMRTWLRGRKLLHEEMRKDGINLDN | 471 |
| Query: | 467 | YIGQLDKLRHDHRYPIYHTNVVYLTNRMEEDMIDKSIMYSILDKRPKKAQVYWFVNIKVT | 526 |
| | | ++ L L + P V+LT + ++ ++M+++ + + F+ +K | |
| Sbjct: | 472 | FLPGL-MLAPPVKVP---GTAVFLT--ADSTVVPHALMHNLKHNKVLHERNV-FLTVKTL | 524 |
| Query: | 527 | DEPYTA---EYKVDMMGTDFIVKVELYLGF | 553 |
| | | PY A K++ + F +V + GF | |
| Sbjct: | 525 | KIPYAANSERLKIEPISNGF-YRVHIRFGF | 553 |

[11722] A related DNA sequence was identified in S. pyogenes <SEQ ID 6625> which encodes the amino acid sequence <SEQ ID 6626>. Analysis of this protein sequence reveals the following:

| Possible site: 15 | | | | |
|---|---|---|---|---|
| >>> Seems to have an uncleavable N-term signal seq | | | | |
| | INTEGRAL | Likelihood = −11.78 | Transmembrane | 428-444 (421-453) |
| | INTEGRAL | Likelihood = −8.70 | Transmembrane | 146-162 (144-171) |
| | INTEGRAL | Likelihood = −7.64 | Transmembrane | 404-420 (398-426) |
| | INTEGRAL | Likelihood = −4.88 | Transmembrane | 296-312 (294-315) |
| | INTEGRAL | Likelihood = −4.57 | Transmembrane | 53-69 (51-71) |
| | INTEGRAL | Likelihood = −3.93 | Transmembrane | 347-363 (343-363) |
| | INTEGRAL | Likelihood = −2.50 | Transmembrane | 372-388 (371-388) |
| | INTEGRAL | Likelihood = −1.33 | Transmembrane | 169-185 (169-185) |
| | INTEGRAL | Likelihood = −1.33 | Transmembrane | 221-237 (221-237) |

```
----- Final Results -----
                              bacterial membrane --- Certainty = 0.5713(Affirmative) < succ>
                                bacterial outside --- Certainty = 0.0000(Not Clear) < succ>
                            bacterial cytoplasm --- Certainty = 0.0000(Not Clear) < succ>
```

[11723] The protein has homology with the following sequences in the databases:

| >GP: AAF84709 GB: AE004010 potassium uptake protein [Xylella fastidiosa] | | | |
|---|---|---|---|
| Identities = 177/467 (37%), Positives = 270/467 (56%), Gaps = 20/467 (4%) | | | |
| Query: | 7 | TAFDKASKAGFII-ALGIVYGDIGTSPLYTIQSLVENQGGVNQVSESFILGSISLIIWTL | 65 |
| | | TA S I+A+G+V+GDIGTSPLYT++ G+ ++ +LG +SLI W + | |
| Sbjct: | 11 | TAVPSNSNGTIILSAIGVVFGDIGTSPLYTLKEAFSPNYGLTPNHDT-VLGILSLIFWAM | 69 |
| Query: | 66 | TLITTIKYVLIALKADNHHEGGIFSLFTLVRKMSPW-------LIIPAMIGGATLLSDGA | 118 |
| | | L+ TIKYV + ++ DN EGGI +L L ++ P+ + I + G + DG | |
| Sbjct: | 70 | MLVVTIKYVAVIMRVDNDGEGGIMALTALTQRTMPFGSRSIYIVGILGIFGTSLFFGDGV | 129 |
| Query: | 119 | LTPAVTVTSAIEGLKAVPGLSHIYQNQTNVIITTLVILIVLFGIQRFGTGFIGKIFGPVM | 178 |
| | | +TPA++V SA+EGL+ + V+ TL +LI+LF QRFGT +GK FGP+ | |
| Sbjct: | 130 | ITPAISVLSAVEGLEVAEPHMKAF-----VVPITLAVLILLFLCQRFGTERVGKTFGPIT | 184 |
| Query: | 179 | FIWFSFLGVSGFFNTLGHLEIFKAINPYYALHLLFSPENHRGIFILGSIFLATTGAEALY | 238 |
| | | +WF +GV G +N E+ AINP + LH F +F+LG++ LA TG EALY | |
| Sbjct: | 185 | LLWFIAIGVVGVYNIAQAPEVLHAINPSWGLH-FFLEHGWHSMFVLGAVVLAVTGGEALY | 243 |
| Query: | 239 | SDLGHVGRGNIYVSWPFVKM-CIVLSYCGQAAWILANKHSGIELNPFFASVPSQLRVYLV | 297 |
| | | +D+GH G I +W +V + + L+Y GQ A +L+N + NPF+ S+P ++ | |
| Sbjct: | 244 | ADMGHFGAKAIRHAWMYVVLPMLALNYLGQGALVLSNPTA--IGNPFYQSIPDWGLYPMI | 301 |
| Query: | 298 | SLATLAAIIASQALISGSFTLVSEAMRLKIFPLFRVTYPG-ANLGQLYIPVINWILFAVT | 356 |
| | | +LAT AA+IASQALI+GS++L S+AM+L P V + + +GQ+Y+P +NW L + | |
| Sbjct: | 302 | ALATAAAVIASQALITGSYSLSSQAMQLGYIPRMNVRHTSQSTIGQIYVPTVNWTLLTLV | 361 |
| Query: | 357 | SCTVLAFRTSAHMEAAYGLAITITMLMTTILLKYYLIKKGTRPILAHLVMAF-FALVEFI | 415 |
| | | TV+ F S M +AYG+A+T TM++TT+L+ Y P L +MA F V+ | |
| Sbjct: | 362 | ILTVIGFGDSTSMASAYGVAVTGTMMITTVLMIIYARANPRVPRLMLWMMAIVFIAVDGA | 421 |
| Query: | 416 | FFLASAIKFMHGGYAVVILALAIVFVMFIWHAGTRIVFKYVKSLNLN | 462 |
| | | FF A+ IKFM G + ++L + I M W G +++ + ++ +N | |
| Sbjct: | 422 | FFYANIIKFMDGAWFPLLLGVVIFTFMRTWLRGRKLLHEEMRKDGIN | 468 |

[11724] An alignment of the GAS and GBS proteins is shown below.

| Identities = 485/651 (74%), Positives = 575/651 (87%) | | | |
|---|---|---|---|
| Query: | 10 | SSFDKASKAGFIIALGIVYGDIGTSPLYTMQSLVENQGGISSVTESFILGSISLIIWTLT | 69 |
| | | ++FDKASKAGFIIALGIVYGDIGTSPLYT+QSLVENQGG++ V+ESFILGSISLIIWTLT | |
| Sbjct: | 7 | TAFDKASKAGFIIALGIVYGDIGTSPLYTIQSLVENQGGVNQVSESFILGSISLIIWTLT | 66 |
| Query: | 70 | LITTIKYVLVALKADNHHEGGIFSLYTLVRKMTPWLIVPAVIGGATLLSDGALTPAVTVT | 129 |
| | | LITTIKYVL+ALKADNHHEGGIFSL+TLVRKN+PWLI+PA+IGGATLLSDGALTPAVTVT | |
| Sbjct: | 67 | LITTIKYVLIALKADNHHEGGIFSLFTLVRKMSPWLIIPAMIGGATLLSDGALTPAVTVT | 126 |
| Query: | 130 | SAVEGLKVVPSLQHIFQNQSNVIFATLFILLLLFAIQRFGTGVIGKLFGPIMFIWFAFLG | 189 |
| | | SA+EGLK VP L HI+QNQ+NVI TL IL++LF IQRFGTG IGK+FGP+MFIWF+FLG | |
| Sbjct: | 127 | SAIEGLKAVPGLSHIYQNQTNVIITTLVILIVLFGIQRFGTGFIGKIFGPVMFIWFSFLG | 186 |
| Query: | 190 | ISGLLNSFAHPEVFKAINPYYGLKLLFSPENHKGIFILGSIFLATTGAEALYSDLGHVGR | 249 |
| | | +SG N+ H E+FKAINPYY L LLFSPENH+GIFILGSIFLATTGAEALYSDLGHVGR | |
| Sbjct: | 187 | VSGFFNTLGHLEIFKAINPYYALHLLFSPENHRGIFILGSIFLATTGAEALYSDLGHVGR | 246 |
| Query: | 250 | GNIHVSWPFVKVAIILSYCGQGAWILANKNAGNELNPFFASIPSQFTMHVVILATLAAII | 309 |
| | | GNI+VSWPFVK+ I+LSYCGQ AWILANK++G ELNPFFAS+PSQ +++V LATLAAII | |
| Sbjct: | 247 | GNIYVSWPFVKMCIVLSYCGQAAWILANKHSGIELNPFFASVPSQLRVYLVSLATLAAII | 306 |
| Query: | 310 | ASQALISGSFTLVSEAMRLKIFPQFRSTYPGDNIGQTYIPVINWFLFAITTSIVLLFKTS | 369 |
| | | ASQALISGSFTLVSEAMRLKIFP FR TYPG N+GQ YIPVINW LFA+T+ VL F+TS | |
| Sbjct: | 307 | ASQALISGSFTLVSEAMRLKIFPLFRVTYPGANLGQLYIPVINWILFAVTSCTVLAFRTS | 366 |
| Query: | 370 | AHMEAAYGLAITITMLMTTILLSFFLIQKGVKRGLVLLMMIFFGILEGIFFLASAVKFMH | 429 |
| | | AHMEAAYGLAITITMLMTTILL ++LI+KG + L L+M FF ++E IFFLASA+KFMH | |
| Sbjct: | 367 | AHMEAAYGLAITITMLMTTILLKYYLIKKGTRPILAHLVMAFFALVEFIFFLASAIKFMH | 426 |
| Query: | 430 | GGYVVVIIAVAIIFIMTIWYKGSKIVSRYVKLLDLKDYIGQLDKLRHDHRYPIYRTNVVY | 489 |
| | | GGY VVI+A+AI+F+M IW+ G++IV +YVK L+L DY Q+ +LR D + +Y TNVVY | |
| Sbjct: | 427 | GGYAVVILALAIVFVMFIWHAGTRIVFKYVKSLNLNDYKEQIKQLRDDVCFDLYQTNVVY | 486 |
| Query: | 490 | LTNRMEEDMIDKSIMYSILDKRPKKAQVYWFVNIKVTDEPYTAEYKVDMMGTDFIVKVEL | 549 |
| | | L+NRM++ MID+SI+YSILDKRPK+AQVYWFVN++VTDEPYTA+YKVDMMGTD++V+V L | |
| Sbjct: | 487 | LSNRMQDHMIDRSILYSILDKRPKRAQVYWFVNVQVTDEPYTAKYKVDMMGTDYMVRVNL | 546 |
| Query: | 550 | YLGFKMRQTVSRYLRTIVEELLESGRLPKQGKTYSVRPDSNVGDFRFIVLDERFSSSQNL | 609 |
| | | YLGF+M QTV RYLRTIV++L+ESGRLPKQ + Y++ P +VGDFRF++++ER S+++ L | |
| Sbjct: | 547 | YLGFRMPQTVPRYLRTIVQDLMESGRLPKQEQEYTITPGRDVGDFRFVLIEERVSNARQL | 606 |
| Query: | 610 | KPGERFVMLMKSSIKHWTATPIRWFGLQFSEVTTEVVPLIFTANRGLPIKE | 660 |
| | | ERF+M K+SIKH TA+P+RWFGLQ+SEVT EVVPLI + LPIKE | |
| Sbjct: | 607 | SNFERFIMQTKASIKHVTASPMRWFGLQYSEVTLEVVPLILSDVLKLPIKE | 657 |

[11725] A related GBS gene <SEQ ID 8983> and protein <SEQ ID 8984> were also identified. Analysis of this protein sequence reveals the following:

| Lipop: Possible site: −1 Crend: 8 | | | | |
|---|---|---|---|---|
| McG: Discrim Score: 5.84 | | | | |
| GvH: Signal Score (−7.5): −4.59 | | | | |
| Possible site: 18 | | | | |
| >>> Seems to have an uncleavable N-term signal seq | | | | |
| ALOM program count: 10 value: −12.10 threshold: 0.0 | | | | |
| | INTEGRAL | Likelihood = −12.10 | Transmembrane | 431-447 (423-452) |
| | INTEGRAL | Likelihood = −8.92 | Transmembrane | 149-165 (147-174) |
| | INTEGRAL | Likelihood = −8.86 | Transmembrane | 404-420 (402-428) |
| | INTEGRAL | Likelihood = −7.91 | Transmembrane | 299-315 (293-318) |
| | INTEGRAL | Likelihood = −6.42 | Transmembrane | 380-396 (374-398) |
| | INTEGRAL | Likelihood = −5.31 | Transmembrane | 350-366 (347-367) |
| | INTEGRAL | Likelihood = −4.57 | Transmembrane | 56-72 (54-74) |
| | INTEGRAL | Likelihood = −3.24 | Transmembrane | 172-188 (171-198) |
| | INTEGRAL | Likelihood = −1.33 | Transmembrane | 224-240 (224-240) |
| | INTEGRAL | Likelihood = −0.59 | Transmembrane | 101-117 (101-117) |
| | PERIPHERAL | Likelihood = −0.85 | 20 | |

```
modified ALOM score: 2.92
*** Reasoning Step: 3
----- Final Results -----
                              bacterial membrane --- Certainty = 0.5840(Affirmative) < succ>
                                bacterial outside --- Certainty = 0.0000(Not Clear) < succ>
                            bacterial cytoplasm --- Certainty = 0.0000(Not Clear) < succ>
```

[11726] The protein has homology with the following sequences in the databases:

[chemical structure]

[11727] Based on this analysis, it was predicted that these proteins and their epitopes could be useful antigens for vaccines or diagnostics.

### EXAMPLE 2145

[11728] A DNA sequence (GBSx2261) was identified in S. agalactiae <SEQ ID 6627> which encodes the amino acid sequence <SEQ ID 6628>. This protein is predicted to be serine dehydrogenase. Analysis of this protein sequence reveals the following:

```
Possible site: 26
>>> Seems to have no N-terminal signal sequence
----- Final Results -----
                            bacterial cytoplasm --- Certainty = 0.3261(Affirmative) < succ>
                              bacterial membrane --- Certainty = 0.0000(Not Clear) < succ>
                                bacterial outside --- Certainty = 0.0000(Not Clear) < succ>
```

[11729] The protein has homology with the following sequences in the GENPEPT database.

>GP: AAD07424 GB: AE000552 short chain alcohol
dehydrogenase
[Helicobacter pylori 26695]
Identities = 18/31 (58%), Positives = 25/31 (80%)

| | | | |
|---|---|---|---|
| Query: | 3 | WVASQPEHININRIEIMPVSQTYGPQPVYRD | 33 |
| | | W+ QP H+NINRIEIMP+SQT+ P P +++ | |
| Sbjct: | 219 | WIYEQPLHVNINRIEIMPISQTFAPLPTHKN | 249 |

[11730] A related DNA sequence was identified in S. pyogenes <SEQ ID 6629> which encodes the amino acid sequence <SEQ ID 6630>. Analysis of this protein sequence reveals the following:

```
Possible site: 21
>>> Seems to have no N-terminal signal sequence
----- Final Results -----
                            bacterial cytoplasm --- Certainty = 0.1021(Affirmative) < succ>
                              bacterial membrane --- Certainty = 0.0000(Not Clear) < succ>
                                bacterial outside --- Certainty = 0.0000(Not Clear) < succ>
```

[11731] An alignment of the GAS and GBS proteins is shown below.

Identities = 24/33 (72%), Positives = 29/33 (87%)

| | | | |
|---|---|---|---|
| Query: | 1 | MSWVASQPEHININRIEIMPVSQTYGPQPVYRD | 33 |
| | | +SWV QP H+N+NRIE+MPVSQ+YGPQPV RD | |
| Sbjct: | 20 | VSWVIHQPPHVNVNRIELMPVSQSYGPQPVTRD | 52 |

[11732] Based on this analysis, it was predicted that these proteins and their epitopes could be useful antigens for vaccines or diagnostics.

### EXAMPLE 2146

[11733] A DNA sequence (GBSx2262) was identified in S. agalactiae <SEQ ID 6631> which encodes the amino acid sequence <SEQ ID 6632>. Analysis of this protein sequence reveals the following:

```
Possible site: 21
>>> May be a lipoprotein
----- Final Results -----
                              bacterial membrane --- Certainty = 0.0000(Not Clear) < succ>
                                bacterial outside --- Certainty = 0.0000(Not Clear) < succ>
                            bacterial cytoplasm --- Certainty = 0.0000(Not Clear) < succ>
```

[11734] A related GBS nucleic acid sequence <SEQ ID 9337> which encodes amino acid sequence <SEQ ID 9338> was also identified. A further related GBS nucleic acid sequence <SEQ ID 10781> which encodes amino acid sequence <SEQ ID 10782> was also identified. A further related GBS nucleic acid sequence <SEQ ID 10951> which encodes amino acid sequence <SEQ ID 10952> was also identified.

[11735] The protein has homology with the following sequences in the GENPEPT database.

| >GP: CAA32349 GB: X14130 ORF (AA 1 to 299) [Lactococcus lactis subsp. | | | |
|---|---|---|---|
| cremoris] | | | |
| Identities = 72/215 (33%), Positives = 110/215 (50%), Gaps = 8/215 (3%) | | | |
| Query: | 4 | RSKLAAGFLTLMSVATLAACSGKTSNGTN--VVTMKGDTITVSDFYDQVKTSKAAQQSML | 61 |
| | | + K+ L + L SG SN T+ V T G +T S FY ++K S + + | |
| Sbjct: | 2 | KKKMRLKVLLASTATALLLLSGCQSNQTDQTVATYSGGKVTESSFYKELKQSPTTKTMLA | 61 |
| Query: | 62 | TLILSRVFDTQYGDKVSDKKVSEAYNKTAKGYGNSFSSALSQAGLTPEGYKQQIRTTMLV | 121 |
| | | +++R + YG VS K V++AY+ + YG +F + LSQ G + +K+ +RT L | |
| Sbjct: | 62 | NMLIYRALNHAYGKSVSTKTVNDAYDSYKQQYGENFDAFLSQNGFSRSSFKESLRTNFLS | 121 |
| Query: | 122 | EYAVKEAAKKELTEANYKEAYKNYTPETSVQVIKLDAEDKAKSVLKDVKADGADFAKIAK | 181 |
| | | E A+K+ K+++E+ K A+K Y P+ +VQ I ED AK V+ D+ A G DFA +AK | |
| Sbjct: | 122 | EVALKKL--KKVSESQLKAAWKTYQPKVTVQHILTSDEDTAKQVISDLAA-GKDFAMLAK | 178 |
| Query: | 182 | E---KTTATDKKVEYKFDSAGTTLPKEVMSAAFKL | 213 |
| | | T D + F+ TL AA+KL | |
| Sbjct: | 179 | TDSIDTATKDNGGKISFELNNKTLDATFKDAAYKL | 213 |

[11736] A related DNA sequence was identified in S. pyogenes <SEQ ID 6633> which encodes the amino acid sequence <SEQ ID 6634>. Analysis of this protein sequence reveals the following:

```
Possible site: 21
>>> May be a lipoprotein
----- Final Results -----
                              bacterial membrane --- Certainty = 0.0000(Not Clear) < succ>
                                bacterial outside --- Certainty = 0.0000(Not Clear) < succ>
                            bacterial cytoplasm --- Certainty = 0.0000(Not Clear) < succ>
```

[11737] The protein has homology with the following sequences in the databases:

| >GP: AAA25247 GB: M83946 maturation protein [Lactobacillus paracasei] | | | |
|---|---|---|---|
| Identities = 88/294 (29%), Positives = 146/294 (48%), Gaps = 14/294 (4%) | | | |
| Query: | 7 | LIASVVTLASVMALAACQSTNDNTKVISMKGDTISVSDFYNETKNTEVSQKAMLNLVISR | 66 |
| | | L+AS T +++ L+ CQS + KV + G ++ S+FY E K + ++ + N++I R | |
| Sbjct: | 10 | LLASTAT--ALLLLSGCQSNQADQKVATYSGGKVTESNFYKELKQSPTTKTMLANMLIYR | 67 |
| Query: | 67 | VFEAQYGDKVSKKEVEKAYHKTAEQYGASFSAALAQSSLTPETFKRQIRSSKLVEYAVKE | 126 |
| | | YG VS K V AY +QYG +F A L+Q+ + +FK +R++ L E A+K+ | |
| Sbjct: | 68 | ALNHAYGKSVSTKTVNDAYDSYKQQYGENFDAFLSQNGFSRSSFKESLRTNFLSEVALKK | 127 |
| Query: | 127 | AAKKELTTQEYKKAYESYTPTMAVEMITLDNEETAKSVLEELKAEGADFTAIAKE---KT | 183 |
| | | K+++ + K +++Y P + V+ I +E+TAK V+ +L A G DF +AK T | |
| Sbjct: | 128 | L--KKVSESQLKAVWKTYQPKVTVQHILTSDEDTAKQVISDL-AAGKDFATLAKTDSIDT | 184 |
| Query: | 184 | TTPEKKVTYKFDSGATNVPTDVVKAASSLNEGGISDVISVLDPTSYQKKFYIVKVTKKAE | 243 |
| | | T + F+S + AA L G + P + ++K+ | |
| Sbjct: | 185 | ATKDNGGKISFESNNKTLDATFKDAAYKLKNGDYTQT-----PVKVTNGYEVIKMINH-P | 238 |
| Query: | 244 | KKSDWQEYKKRLKAIIIAEKSKDMNFQNKVIANALDKANVKIKDKAFANILAQY | 297 |
| | | K + KK L A + A+ S+D + +VI+ L +V IKDK A+ L Y | |
| Sbjct: | 239 | AKGTFTSSKKALTASVYAKWSRDSSIMQRVISQVLKNQHVTIKDKDLADALDSY | 292 |

[11738] An alignment of the GAS and GBS proteins is shown below.

| Identities = 125/213 (58%), Positives = 168/213 (78%), Gaps = 1/213 (0%) | | | |
|---|---|---|---|
| Query: | 1 | MKTRSKLAAGFLTLMSVATLAACSGKTSNGTNVVTMKGDTITVSDFYDQVKTSKAAQQSM | 60 |
| | | MK +KL A +TL SV LAAC T++ T V++MKGDTI+VSDFY++ K ++ +Q++M | |
| Sbjct: | 1 | MKNSNKLIASVVTLASVMALAACQS-TNDNTKVISMKGDTISVSDFYNETKNTEVSQKAM | 59 |
| Query: | 61 | LTLILSRVFDTQYGDKVSDKKVSEAYNKTAKGYGNSFSSALSQAGLTPEGYKQQIRTTML | 120 |
| | | L L++SRVF+ QYGDKVS K+V +AY+KTA+ YG SFS+AL+Q+ LTPE +K+QIR++ L | |
| Sbjct: | 60 | LNLVISRVFEAQYGDKVSKKEVEKAYHKTAEQYGASFSAALAQSSLTPETFKRQIRSSKL | 119 |
| Query: | 121 | VEYAVKEAAKKELTEANYKEAYKNYTPETSVQVIKLDAEDKAKSVLKDVKADGADFAKIA | 180 |
| | | VEYAVKEAAKKELT YK+AY++YTP +V++I LD E+ AKSVL+++KA+GADF IA | |
| Sbjct: | 120 | VEYAVKEAAKKELTTQEYKKAYESYTPTMAVEMITLDNEETAKSVLEELKAEGADFTAIA | 179 |
| Query: | 181 | KEKTTATDKKVEYKFDSAGTTLPKEVMSAAFKL | 213 |
| | | KEKTT +KKV YKFDS T +P +V+ AA L | |
| Sbjct: | 180 | KEKTTTPEKKVTYKFDSGATNVPTDVVKAASSL | 212 |

[11739] SEQ ID 10782 (GBS657) was expressed in E. coli as a GST-fusion product. SDS-PAGE analysis of total cell extract is shown in FIG. 143 (lane 8-10; MW 62.8 kDa) and in FIG. 187 (lane 3; MW 63 kDa).

[11740] Purified GBS657-GST is shown in FIG. 245, lanes 2 & 3.

[11741] Based on this analysis, it was predicted that these proteins and their epitopes could be useful antigens for vaccines or diagnostics.

### EXAMPLE 2147

[11742] A DNA sequence (GBSx2263) was identified in S. agalactiae <SEQ ID 6635> which encodes the amino acid sequence <SEQ ID 6636>. This protein is predicted to be methyltransferase. Analysis of this protein sequence reveals the following:

```
Possible site: 44
>>> Seems to have no N-terminal signal sequence
----- Final Results -----
                            bacterial cytoplasm --- Certainty = 0.2576(Affirmative) < succ>
                              bacterial membrane --- Certainty = 0.0000(Not Clear) < succ>
                                bacterial outside --- Certainty = 0.0000(Not Clear) < succ>
```

[11743] The protein has homology with the following sequences in the GENPEPT database.

>GP: CAA68045 GB: X99710 methyltransferase [Lactococcus lactis]
Identities = 132/227 (58%), Positives = 169/227 (74%)

| | | | |
|---|---|---|---|
| Query: | 1 | MVQSYSKNANHNMRRPVVKEEIVQYMRQHQKQNNGCLAELEAFAKQENIPIIPHETATYF | 60 |
| | | MV++Y +N M RPVVK E+V++MR Q Q G LAE+ FAK+ NIP+IPHET YF | |
| Sbjct: | 1 | MVETYKSTSNPMMNRPVVKAELVEWMRSSQTQVTGELAEVLNFAKENNIPVIPHETVLYF | 60 |
| Query: | 61 | RFLMQTLQPKHILEIGTAIGFSALLMAENAPEAKITTIDRNEEMIALAKENFAKYDNHNQ | 120 |
| | | + L+ L+PK ILEIGTAIGFSAL+MA+ PEA+I TIDRN EMI LAK+N AKYD+ NQ | |
| Sbjct: | 61 | QMLLSLLKPKRILEIGTAIGFSALVMAQEVPEAEIVTIDRNPEMIELAKKNLAKYDHRNQ | 120 |
| Query: | 121 | ITLLEGDAVDVLQTLDKSYDFVFMDSAKSKYIVFLPQVLKHLDVGGVVVLDDIFQGGDIA | 180 |
| | | I L EGDA DVLQ L +D VFMDSAKSKY+ FLP+ L+ L G++++DD+FQ G+I | |
| Sbjct: | 121 | IQLKEGDAADVLQELKGPFDLVFMDSAKSKYVEFLPKSLELLSENGLILMDDVFQAGEIL | 180 |
| Query: | 181 | KPIDEVRRGQRTIYRGLQRLFDSTLQHPDLTATLVPLGDGLLMIRKN | 227 |
| | | PI EV+R QR + RGL++LFD +P +++PLGDGLLMI+K+ | |
| Sbjct: | 181 | LPIMEVKRNQRALERGLRKLFDEVFDNPKYMTSVLPLGDGLLMIKKH | 227 |

[11744] A related DNA sequence was identified in S. pyogenes <SEQ ID 6637> which encodes the amino acid sequence <SEQ ID 6638>. Analysis of this protein sequence reveals the following:

| Possible site: 46 | | | | |
|---|---|---|---|---|
| >>> Seems to have no N-terminal signal sequence | | | | |
| | INTEGRAL | Likelihood = −1.38 | Transmembrane | 153-169 (152-170) |

```
----- Final Results -----
                              bacterial membrane --- Certainty = 0.1553(Affirmative) < succ>
                                bacterial outside --- Certainty = 0.0000(Not Clear) < succ>
                            bacterial cytoplasm --- Certainty = 0.0000(Not Clear) < succ>
```

[11745] The protein has homology with the following sequences in the databases:

| >GP: CAA68045 GB: X99710 methyltransferase [Lactococcus lactis] | | | |
|---|---|---|---|
| Identities = 134/227 (59%), Positives = 169/227 (74%) | | | |
| Query: | 1 | MVKSYSKTANHNMRRPVVKEELVHYMRTRQKQTTGFLAELEQFARQENIPIIQPEVVAYF | 60 |
| | | MV++Y T+N M RPVVK ELV +MR+ Q Q TG LAE+ FA++ NIP+I E V YF | |
| Sbjct: | 1 | MVETYKSTSNPMMNRPVVKAELVEWMRSSQTQVTGELAEVLNFAKENNIPVIPHETVLYF | 60 |
| Query: | 61 | RFLLQSLQPKHILEIGTAIGFSALLMAENAPDATIVTIDRNREMIDFAKANFAKYDSRQQ | 120 |
| | | + LL L+PK ILEIGTAIGFSAL+MA+ P+A IVTIDRN EMI+ AK N AKYD R Q | |
| Sbjct: | 61 | QMLLSLLKPKRILEIGTAIGFSALVMAQEVPEAEIVTIDRNPEMIELAKKNLAKYDHRNQ | 120 |
| Query: | 121 | IRLLEGDAADILSTLEGNFDFVFMDSAKSKYIVFLPEILRLLKVGGVVILDDVFQGGDIT | 180 |
| | | I+L EGDAAD+L L+G FD VFMDSAKSKY+ FLP+ L LL G++++DDVFQ G+I | |
| Sbjct: | 121 | IQLKEGDAADVLQELKGPFDLVFMDSAKSKYVEFLPKSLELLSENGLILMDDVFQAGEIL | 180 |
| Query: | 181 | KPIEDIRRGQRTIYRGLQSLFDATLTHPNLTTSLVPLSDGLLMIRKN | 227 |
| | | PI +++R QR + RGL+ LFD +P TS++PL DGLLMI+K+ | |
| Sbjct: | 181 | LPIMEVKRNQRALERGLRKLFDEVFDNPKYMTSVLPLGDGLLMIKKH | 227 |

[11746] An alignment of the GAS and GBS proteins is shown below.

| Identities = 177/235 (75%), Positives = 199/235 (84%) | | | |
|---|---|---|---|
| Query: | 1 | MVQSYSKNANHNMRRPVVKEEIVQYMRQHQKQNNGCLAELEAFAKQENIPIIPHETATYF | 60 |
| | | MV+SYSK ANHNMRRPVVKEE+V YMR QKQ G LAELE FA+QENIPII E YF | |
| Sbjct: | 1 | MVKSYSKTANHNMRRPVVKEELVHYMRTRQKQTTGFLAELEQFARQENIPIIQPEVVAYF | 60 |
| Query: | 61 | RFLMQTLQPKHILEIGTAIGFSALLMAENAPEAKITTIDRNEEMIALAKENFAKYDNHNQ | 120 |
| | | RFL+Q+LQPKHILEIGTAIGFSALLMAENAP+A I TIDRN EMI AK NFAKYD+ Q | |
| Sbjct: | 61 | RFLLQSLQPKHILEIGTAIGFSALLMAENAPDATIVTIDRNREMIDFAKANFAKYDSRQQ | 120 |
| Query: | 121 | ITLLEGDAVDVLQTLDKSYDFVFMDSAKSKYIVFLPQVLKHLDVGGVVVLDDIFQGGDIA | 180 |
| | | I LLEGDA D+L TL+ ++DFVFMDSAKSKYIVFLP++L+ L VGGVV+LDD+FQGGDI | |
| Sbjct: | 121 | IRLLEGDAADILSTLEGNFDFVFMDSAKSKYIVFLPEILRLLKVGGVVILDDVFQGGDIT | 180 |
| Query: | 181 | KPIDEVRRGQRTIYRGLQRLFDSTLQHPDLTATLVPLGDGLLMIRKNADHIVLED | 235 |
| | | KPI+++RRGQRTIYRGLQ LFD+TL HP+LT +LVPL DGLLMIRKN IVL D | |
| Sbjct: | 181 | KPIEDIRRGQRTIYRGLQSLFDATLTHPNLTTSLVPLSDGLLMIRKNQADIVLPD | 235 |

[11747] Based on this analysis, it was predicted that these proteins and their epitopes could be useful antigens for vaccines or diagnostics.

### EXAMPLE 2148

[11748] A DNA sequence (GBSx2264) was identified in S. agalactiae <SEQ ID 6639> which encodes the amino acid sequence <SEQ ID 6640>. This protein is predicted to be phosphoglycolate phosphatase. Analysis of this protein sequence reveals the following:

```
Possible site: 50
>>> Seems to have no N-terminal signal sequence
----- Final Results -----
                            bacterial cytoplasm --- Certainty = 0.2193(Affirmative) < succ>
                              bacterial membrane --- Certainty = 0.0000(Not Clear) < succ>
                                bacterial outside --- Certainty = 0.0000(Not Clear) < succ>
```

[11749] A related GBS nucleic acid sequence <SEQ ID 8985> which encodes amino acid sequence <SEQ ID 8986> was also identified. This protein appears to be a hydrolase i.e. an exposed protein.

[11750] The protein has homology with the following sequences in the GENPEPT database.

| >GP: CAA91552 GB: Z67740 unidentified [Streptococcus pneumoniae] | | | |
|---|---|---|---|
| Identities = 39/117 (33%), Positives = 67/117 (56%), Gaps = 9/117 (7%) | | | |
| Query: | 98 | KEQESRDSKIHLM-PYAKEILEWTKEQDIPNFMYTHKGASTHSVLETLQISHYFDEILTG | 156 |
| | | KE E+R+ + ++ ++LE Q +F+ +H+ +LE I+ YF E++T | |
| Sbjct: | 25 | KENEARELEHPILFEGVSDLLEDILNQGGRHFLVSHRNDQVLEILEKTSIAAYFTEVVTS | 84 |
| Query: | 157 | VSGFERKPHPQGINYLVKRYSLDKSMTYYIGDRPLDLEVAQNAGIKS------INLR | 207 |
| | | SGF+RKP+P+ + YL ++Y + + IGDRP+D+E Q AG+ + +NLR | |
| Sbjct: | 85 | SSGFKRKPNPESMLYLREKYQISSGLV--IGDRPIDIEAGQAAGLDTHLFTSIVNLR | 139 |

[11751] SEQ ID 8986 (GBS240) was expressed in E. coli as a His-fusion product. SDS-PAGE analysis of total cell extract is shown in FIG. 57 (lane 2; MW 26 kDa). It was also expressed in E. coli as a GST-fusion product. SDS-PAGE analysis of total cell extract is shown in FIG. 61 (lane 3; MW 51.5 kDa).

[11752] GBS240-GST was purified as shown in FIG. 225, lane 12.

[11753] Based on this analysis, it was predicted that this protein and its epitopes, could be useful antigens for vaccines or diagnostics.

### EXAMPLE 2149

[11754] A DNA sequence (GBSx2265) was identified in S. agalactiae <SEQ ID 6641> which encodes the amino acid sequence <SEQ ID 6642>. Analysis of this protein sequence reveals the following:

```
Possible site: 36
>>> Seems to have no N-terminal signal sequence
----- Final Results -----
                            bacterial cytoplasm --- Certainty = 0.2620(Affirmative) < succ>
                              bacterial membrane --- Certainty = 0.0000(Not Clear) < succ>
                                bacterial outside --- Certainty = 0.0000(Not Clear) < succ>
```

[11755] A related DNA sequence was identified in S. pyogenes <SEQ ID 6643> which encodes the amino acid sequence <SEQ ID 6644>. Analysis of this protein sequence reveals the following:

```
Possible site: 54
>>> Seems to have no N-terminal signal sequence
----- Final Results -----
                            bacterial cytoplasm --- Certainty = 0.2967(Affirmative) < succ>
                              bacterial membrane --- Certainty = 0.0000(Not Clear) < succ>
                                bacterial outside --- Certainty = 0.0000(Not Clear) < succ>
```

[11756] An alignment of the GAS and GBS proteins is shown below.

| Identities = 463/599 (77%), Positives = 541/599 (90%) | | | |
|---|---|---|---|
| Query: | 1 | MSDNRSHIEEKYQWDLTTVFATDELWETEVVELTQAIDNAKGFSGHLLDSSQSLLEITEV | 60 |
| | | M+DNRSH+EEKY WDL+T+FATD+ WE EV +L ++ +KGF+GHLLDSS +LL++T+ | |
| Sbjct: | 1 | MTDNRSHLEEKYTWDLSTIFATDKDWEAEVSDLATEVEASKGFAGHLLDSSANLLKVTKT | 60 |
| Query: | 61 | ELDLSRRLEKVYVYASMKNDQDTTVAKYQEFQAKATALYAKFSETFSFYEPELLQLSESD | 120 |
| | | L+L+RR+EKVYVYA MKNDQDTTVAKYQE+QAKA+ LYAKFSE FSFY+PE++ L + D | |
| Sbjct: | 61 | YLELARRVEKVYVYAHMKNDQDTTVAKYQEYQAKASGLYAKFSEVFSFYDPEVMMLHQED | 120 |
| Query: | 121 | YQSFLLEMPDLQKYDHFFEKIFANKPHVLSQNEEELLAGASEIFGAAGETFEILDNADMV | 180 |
| | | YQ+FL E P+L+ Y+HFF+K+F + HVLSQ EEELLAGA EIF A ETF ILDNAD+V | |
| Sbjct: | 121 | YQAFLTETPELKVYNHFFDKLFQAREHVLSQAEEELLAGAQEIFNGAEETFSILDNADIV | 180 |
| Query: | 181 | FPVVKNAKGEEVELTHGNFISLMESSDRTVRKEAYQAMYSTYEQFQHTYAKTLQTNVKSQ | 240 |
| | | FPVVKN KGE+VELTHGNFISLMES DR+VR+ AY+AMYSTYEQFQHTYAKTLQTNVK Q | |
| Sbjct: | 181 | FPVVKNDKGEDVELTHGNFISLMESKDRSVRQAAYEAMYSTYEQFQHTYAKTLQTNVKVQ | 240 |
| Query: | 241 | NFKARVHHYQSARQSALSANFIPEEVYETLIKTVNHHLPLLHRYMKLRQKVLGLDDLKMY | 300 |
| | | N+KARVH Y SARQ+A++ANFIPE VY+TL++TVN HLPLLHRY+KLRQ+VLGLDDLKMY | |
| Sbjct: | 241 | NYKARVHKYDSARQAAMAANFIPEAVYDTLLETVNKHLPLLHRYLKLRQEVLGLDDLKMY | 300 |
| Query: | 301 | DVYTPLSQMDMSFTYDEALKKSEEVLAIFGEAYSERVHRAFTERWIDVHVNKGKRSGAYS | 360 |
| | | DVYTPLS+ D++ YDEAL+K+E+VLA+FG+ Y++RVHRAFTERWIDVHVNKGKRSGAYS | |
| Sbjct: | 301 | DVYTPLSETDLAIGYDEALEKAEKVLAVFGKDYADRVHRAFTERWIDVHVNKGKRSGAYS | 360 |
| Query: | 361 | GGSYDTNAFMLLNWQDTLDNLYTLVHETGHSLHSTFTRENQPYVYGDYSIFLAEIASTTN | 420 |
| | | GGSYDTNAF+LLNWQDTLDNLYTLVHETGHSLHSTFTRE QPYVYGDYSIFLAEIASTTN | |
| Sbjct: | 361 | GGSYDTNAFILLNWQDTLDNLYTLVHETGHSLHSTFTRETQPYVYGDYSIFLAEIASTTN | 420 |
| Query: | 421 | ENILTETLLKEVKDDKNRFAILNHYLDGFKGTIFRQTQFAEFEHAIHVADQEGQVLTSEY | 480 |
| | | ENI+TE LL EV+D+K RFAILNHYLDGF+GT+FRQTQFAEFEHAIH ADQ+G+VLTSEY | |
| Sbjct: | 421 | ENIMTEALLNEVQDEKERFAILNHYLDGFRGTVFRQTQFAEFEHAIHQADQKGEVLTSEY | 480 |
| Query: | 481 | LNNLYAELNEKYYGLTKEDNHFIQYEWARIPHFYYNYYVFQYATGFAAANYLAERIVNGN | 540 |
| | | LN LYA+LNEKYYGL+K+DNHFIQYEWARIPHFYYNYYV+QYATGFAAA+YLA++IV+G | |
| Sbjct: | 481 | LNQLYADLNEKYYGLSKKDNHFIQYEWARIPHFYYNYYVYQYATGFAAASYLADKIVHGT | 540 |
| Query: | 541 | PEDKEAYLNYLKAGNSDYPLNVIAKAGVDMTSADYLDAAFRVFEERLVELENLVAKGVH | 599 |
| | | +D + YL YLK+GNSDYPL VIAKAGVDM DYL+AAF+VF+ERL ELE LV+KG+H | |
| Sbjct: | 541 | QDDIDHYLAYLKSGNSDYPLEVIAKAGVDMEKGDYLEAAFKVFDERLTELEVLVSKGIH | 599 |

[11757] Based on this analysis, it was predicted that these proteins and their epitopes could be useful antigens for vaccines or diagnostics.

### EXAMPLE 2150

[11758] A DNA sequence (GBSx2266) was identified in S. agalactiae <SEQ ID 6645> which encodes the amino acid sequence <SEQ ID 6646>. This protein is predicted to be competence protein. Analysis of this protein sequence reveals the following:

```
Possible site: 22
>>> Seems to have no N-terminal signal sequence
----- Final Results -----
                            bacterial cytoplasm --- Certainty = 0.2955(Affirmative) < succ>
                              bacterial membrane --- Certainty = 0.0000(Not Clear) < succ>
                                bacterial outside --- Certainty = 0.0000(Not Clear) < succ>
```

[11759] The protein has homology with the following sequences in the GENPEPT database.

| >GP: AAC23746 GB: AF052209 competence protein [Streptococcus pneumoniae] | | | |
|---|---|---|---|
| Identities = 127/269 (47%), Positives = 176/269 (65%), Gaps = 8/269 (2%) | | | |
| Query: | 1 | MLIAKDKQGNLINLLESHPGKGQYFCPTCCSAVRLKAGRIMRRHFAHISLKNCQFYHENE | 60 |
| | | M +A+D +G L+N+LE K Y CP C + L+ G +R HFAH SLK+C F+ ENE | |
| Sbjct: | 1 | MFVARDARGELVNVLEDKLEKQAYTCPACGGQLHLRQGPSVRTHFAHKSLKDCDFFFENE | 60 |
| Query: | 61 | SNEHLQLKAKLYMSLSRENETMLEHHLPEINQIADLFVNETLALE----VQCSRLSEQRL | 116 |
| | | S EHL K LY L +E + LE+ L E+ QIAD+FVN LALE V C + + L | |
| Sbjct: | 61 | SPEHLANKESLYHWLKKETKVQLEYPLSELKQIADVFVNGNLALESSVVVPCLK---KVL | 117 |
| Query: | 117 | RERTKAYLQADFQVRWLLGEKLWLKHRLTNLHKQFLQFSQSIGFHIWELDLRLEVLRLKY | 176 |
| | | +ER++ Y +QV WLLG+KLWLK RLT L FL FSQ++GF++WELD +VLRLKY | |
| Sbjct: | 118 | KERSEGYRSQGYQVLWLLGQKLWLKERLTRLQAGFLYFSQNMGFYVWELDKGKQVLRLKY | 177 |
| Query: | 177 | LIYEDLRGHVYYLSKTCPL-SGDVLAFLKWPYQSKNLNFYKVKQDRNIRDYVRQQLRYGN | 235 |
| | | LIY+DLRG ++Y K G +L L+ PY+ + ++ + V +D++I Y+RQQL Y N | |
| Sbjct: | 178 | LIYQDLRGKLHYQIKEFSYGQGSLLEILRLPYKKQKISHFTVSEDKDICRYIRQQLYYQN | 237 |
| Query: | 236 | QFWLRKQEKAYLSGQNLLTQELMMFFPQI | 264 |
| | | FW+++Q +AY G+N+LT L ++PQI | |
| Sbjct: | 238 | LFWMKEQAEAYQKGENILTYGLKEWYPQI | 266 |

[11760] A related DNA sequence was identified in S. pyogenes <SEQ ID 6647> which encodes the amino acid sequence <SEQ ID 6648>. Analysis of this protein sequence reveals the following:

```
Possible site: 61
>>> Seems to have no N-terminal signal sequence
----- Final Results -----
                            bacterial cytoplasm --- Certainty = 0.1034(Affirmative) < succ>
                              bacterial membrane --- Certainty = 0.0000(Not Clear) < succ>
                                bacterial outside --- Certainty = 0.0000(Not Clear) < succ>
```

[11761] An alignment of the GAS and GBS proteins is shown below.

| Identities = 154/312 (49%), Positives = 204/312 (65%), Gaps = 1/312 (0%) | | | |
|---|---|---|---|
| Query: | 1 | MLIAKDKQGNLINLL-ESHPGKGQYFCPTCCSAVRLKAGRIMRRHFAHISLKNCQFYHEN | 59 |
| | | +L A D + LI+L+ + K + CP C S VRL+ G I R HFAH+ L +CQF EN | |
| Sbjct: | 4 | ILTALDDKNQLISLVTQPISTKPPFRCPACKSPVRLRQGTIRRPHFAHVQLAHCQFQAEN | 63 |
| Query: | 60 | ESNEHLQLKAKLYMSLSRENETMLEHHLPEINQIADLFVNETLALEVQCSRLSEQRLRER | 119 |
| | | ES EHL LKAKLY SL R +E +LPE+ QIADL+VN+ LALE+QCS L +RL++R | |
| Sbjct: | 64 | ESEEHLTLKAKLYTSLVRTEAVCIEKYLPELQQIADLWVNDKLALEIQCSPLPVERLKKR | 123 |
| Query: | 120 | TKAYLQADFQVRWLLGEKLWLKHRLTNLHKQFLQFSQSIGFHIWELDLRLEVLRLKYLIY | 179 |
| | | TKAY + + VRWLLG KLWL LT L KQFL FS S+GFH+WELD +LRLKYLI+ | |
| Sbjct: | 124 | TKAYQEKGYPVRWLLGRKLWLNTHLTALQKQFLYFSSSLGFHLWELDAAANLLRLKYLIH | 183 |
| Query: | 180 | EDLRGHVYYLSKTCPLSGDVLAFLKWPYQSKNLNFYKVKQDRNIRDYVRQQLRYGNQFWL | 239 |
| | | EDL G V YL+KT L +++ + PYQ + L Y+ K N+ +++ L + WL | |
| Sbjct: | 184 | EDLFGKVSYLTKTISLDHNIMEMFRLPYQQEILYSYQKKMTVNLSKRIQRALLARHPKWL | 243 |
| Query: | 240 | RKQEKAYLSGQNLLTQELMMFFPQIQPPRVDTDFCQITNSLTSFYQNFTNYYQKNKNNLD | 299 |
| | | R+QEKAYLSG NLL F+PQ +P + + FCQI +L +Y++F YY+K K+ | |
| Sbjct: | 244 | RRQEKAYLSGYNLLMLTTDAFYPQWRPVQSSSGFCQIKGNLRPYYESFKVYYKKEKDKKV | 303 |
| Query: | 300 | QTLYPPVFYDKI | 311 |
| | | QTL+ P +Y K+ | |
| Sbjct: | 304 | QTLFSPKYYVKM | 315 |

[11762] Based on this analysis, it was predicted that these proteins and their epitopes could be useful antigens for vaccines or diagnostics.

### EXAMPLE 2151

[11763] A DNA sequence (GBSx2267) was identified in S. agalactiae <SEQ ID 6649> which encodes the amino acid sequence <SEQ ID 6650>. This protein is predicted to be bicyclomycin resistance protein. Analysis of this protein sequence reveals the following:

| Possible site: 25 | | | | |
|---|---|---|---|---|
| >>> Seems to have a cleavable N-term signal seq. | | | | |
| | INTEGRAL | Likelihood = −8.33 | Transmembrane | 78-94 (75-96) |
| | INTEGRAL | Likelihood = −8.33 | Transmembrane | 269-285 (267-287) |
| | INTEGRAL | Likelihood = −7.38 | Transmembrane | 290-306 (287-314) |
| | INTEGRAL | Likelihood = −7.06 | Transmembrane | 203-219 (199-225) |
| | INTEGRAL | Likelihood = −6.69 | Transmembrane | 157-173 (143-184) |
| | INTEGRAL | Likelihood = −6.42 | Transmembrane | 53-69 (44-73) |
| | INTEGRAL | Likelihood = −6.42 | Transmembrane | 362-378 (357-381) |
| | INTEGRAL | Likelihood = −3.72 | Transmembrane | 242-258 (240-261) |
| | INTEGRAL | Likelihood = −3.24 | Transmembrane | 329-345 (328-346) |
| | INTEGRAL | Likelihood = −1.28 | Transmembrane | 107-123 (106-123) |

```
----- Final Results -----
                              bacterial membrane --- Certainty = 0.4333(Affirmative) < succ>
                                bacterial outside --- Certainty = 0.0000(Not Clear) < succ>
                            bacterial cytoplasm --- Certainty = 0.0000(Not Clear) < succ>
```

[11764] The protein has homology with the following sequences in the GENPEPT database.

| >GP: CAA15047 GB: AJ235272 BICYCLOMYCIN RESISTANCE PROTEIN (bcr1) | | | |
|---|---|---|---|
| [Rickettsia prowazekii] | | | |
| Identities = 86/336 (25%), Positives = 159/336 (46%), Gaps = 28/336 (8%) | | | |
| Query: | 73 | GKKNTVLLGLCLILMSGFISFFTSNFSLAMASRLLLGIGIGLYNSLSISIITDLYEADER | 132 |
| | | G++ VLLGL + ++S IS F+ N + M +R + G+ + + + S+ D Y+ E | |
| Sbjct: | 70 | GRRPIVLLGLFIYIVSSIISIFSFNIEMLMIARFIQAFGVSVGSVIGQSMARDSYQGAEL | 129 |
| Query: | 133 | ASMIGLRTASLNIGKALTTFIVGLVLA-IGVNYIYLVYLLVIPVFF-FFWKNVPEVENQT | 190 |
| | | + + + + L AL ++I G ++ + +Y+++ + L + +++ +PE | |
| Sbjct: | 130 | SYVYAILSPWLLFIPALGSYIGGYIIEYLSWHYVFIFFSLAGTILLALYYQILPETNYYI | 189 |
| Query: | 191 | HTLKASTTFDT-----KAALLMLITFLVGI---AYIGATVKIPTLLVTKYHYATSFSSNM | 242 |
| | | ++S F+ K +L L F++G Y G ++ P +L+ + SF + | |
| Sbjct: | 190 | AFSQSSKYFEVFNIIIKDKMLWLYAFIIGAFNGIYYGFFIEAPFILIDQMRVLPSFYGKL | 249 |
| Query: | 243 | LTLLAFSGILVGSVFGKLVK---VFQEKTLLIMILAMGIGNVLFALANNQIIFIVAS--I | 297 |
| | | LL+F+ I G + G L+K V+ +K + I + G +LFA+ + + FI+ S | |
| Sbjct: | 250 | AFLLSFASIFGGFLGGYLIKKRQVYDKKVMSIGFIFSLCGCILFAVDSFILEFILVSNVF | 309 |
| Query: | 298 | LIGASFVGTM-----SSVFFYISKNYAKEHNNFITSLALTAGNI-GVILTPLI--LTKLP | 349 |
| | | I F+ M S+ I+ YA E +T TAG+I G I +I +T | |
| Sbjct: | 310 | AIAMIFMPMMIHMIGHSLLIAITLRYALEDYATVTG---TAGSIFGAIYYVVIASVTYCV | 366 |
| Query: | 350 | SQLHLEPFMTPFLITSGLMVINV--FVYLVLMSKNK | 383 |
| | | S++H E L+ L + +V F Y+ L+ K K | |
| Sbjct: | 367 | SKIHGETISNFSLLCLVLSISSVISFYYICLLYKKK | 402 |

[11765] A related GBS gene <SEQ ID 8987> and protein <SEQ ID 8988> were also identified. Analysis of this protein sequence reveals the following:

| Lipop: Possible site: −1 Crend: 7 | | | | |
|---|---|---|---|---|
| McG: Discrim Score: 6.28 | | | | |
| GvH: Signal Score (−7.5): −2.45 | | | | |
| Possible site: 25 | | | | |
| >>> Seems to have a cleavable N-term signal seq. | | | | |
| ALOM program count: 10 value: −8.33 threshold: 0.0 | | | | |
| | INTEGRAL | Likelihood = −8.33 | Transmembrane | 78-94 (75-96) |
| | INTEGRAL | Likelihood = −8.33 | Transmembrane | 269-285 (267-287) |
| | INTEGRAL | Likelihood = −7.38 | Transmembrane | 290-306 (287-314) |
| | INTEGRAL | Likelihood = −7.06 | Transmembrane | 203-219 (199-225) |
| | INTEGRAL | Likelihood = −6.69 | Transmembrane | 157-173 (143-184) |
| | INTEGRAL | Likelihood = −6.42 | Transmembrane | 53-69 (44-73) |
| | INTEGRAL | Likelihood = −6.42 | Transmembrane | 362-378 (357-381) |
| | INTEGRAL | Likelihood = −3.72 | Transmembrane | 242-258 (240-261) |
| | INTEGRAL | Likelihood = −3.24 | Transmembrane | 329-345 (328-346) |
| | INTEGRAL | Likelihood = −1.28 | Transmembrane | 107-123 (106-123) |
| | PERIPHERAL | Likelihood = −3.71 | 140 | |

```
modified ALOM score: 2.17
*** Reasoning Step: 3
----- Final Results -----
                              bacterial membrane --- Certainty = 0.4333(Affirmative) < succ>
                                bacterial outside --- Certainty = 0.0000(Not Clear) < succ>
                            bacterial cytoplasm --- Certainty = 0.0000(Not Clear) < succ>
```

[11766] The protein has homology with the following sequences in the databases:

[chemical structure]

[11767] There is also homology to SEQ ID 400 Based on this analysis, it was predicted that these proteins and their epitopes could be useful antigens for vaccines or diagnostics.

### EXAMPLE 2152

[11768] A DNA sequence (GBSx2268) was identified in S. agalactiae <SEQ ID 6651> which encodes the amino acid sequence <SEQ ID 6652>. This protein is predicted to be 16S pseudouridylate synthase (rsuA). Analysis of this protein sequence reveals the following:

```
Possible site: 52
>>> Seems to have no N-terminal signal sequence
----- Final Results -----
                            bacterial cytoplasm --- Certainty = 0.2645(Affirmative) < succ>
                              bacterial membrane --- Certainty = 0.0000(Not Clear) < succ>
                                bacterial outside --- Certainty = 0.0000(Not Clear) < succ>
```

[11769] The protein has homology with the following sequences in the GENPEPT database.

| >GP: BAB06992 GB: AP001518 16S pseudouridylate synthase [Bacillus halodurans] | | | |
|---|---|---|---|
| Identities 106/234 (45%), Positives = 141/234 (59%), Gaps = 1/234 (0%) | | | |
| Query: | 1 | MRLDKLLGQAGFGSRNQVKKLICSRQVSVDGQIVTKDNVIVDSGLQSIFVGKERVCLKES | 60 |
| | | MR+DK L GFGSR VKKL++ V V GQ + + V+ +SI V E V K | |
| Sbjct: | 1 | MRIDKFLANMGFGSRKDVKKLLKTGAVRVQGQPIKDPSTHVEPESESITVYGEEVEYKPY | 60 |
| Query: | 61 | SYYLLYKPSGVVSAVRDSEHKTVIDLISEKDKVEGLYPIGRLDRDTEGLLIVTNNGPLGY | 120 |
| | | Y ++ KP GV+ A D EH+TVIDL+E+++ P+GRLD+DT GLL++TN+G + | |
| Sbjct: | 61 | VYLMMNKPKGVICATEDLEHETVIDLLGEEERHYEPSPVGRLDKDTVGLLLITNDGKFNH | 120 |
| Query: | 121 | RMLHPKHHVAKTYYVEVNGFLERDAITFFEEGVVFDDGTKCKPAELTIDTANNDKSTARI | 180 |
| | | ++ PKHHV KTY V G + ++ F GVV DDG KPA L I A +S + | |
| Sbjct: | 121 | WLMSPKHHVPKTYRALVEGHVTEEDVGAFSHGVVLDDGYVTKPATLHILEA-GARSHIEL | 179 |
| Query: | 181 | TITEGKFHQVKKMFLAYGVKVIYLRRISFGDLRLDMNLKPGQYRRLRDSEAAIL | 234 |
| | | +TEGKFHQVK+MF A G +V+ L RI G+L LD L G+YR L E A+L | |
| Sbjct: | 180 | ILTEGKFHQVKRMFQAVGKRVLELERIKIGNLLLDPELARGEYRELTKEEIALL | 233 |

[11770] A related DNA sequence was identified in S. pyogenes <SEQ ID 6653> which encodes the amino acid sequence <SEQ ID 6654>. Analysis of this protein sequence reveals the following:

```
Possible Site: 56
>>> Seems to have no N-terminal signal sequence
----- Final Results -----
                            bacterial cytoplasm --- Certainty = 0.3310(Affirmative) < succ>
                              bacterial membrane --- Certainty = 0.0000(Not Clear) < succ>
                                bacterial outside --- Certainty = 0.0000(Not Clear) < succ>
```

[11771] An alignment of the GAS and GBS proteins is shown below.

| Identities = 111/194 (57%), Positives = 138/194 (70%) | | | |
|---|---|---|---|
| Query: | 1 | MRLDKLLGQAGFGSRNQVKKLICSRQVSVDGQIVTKDNVIVDSGLQSIFVGKERVCLKES | 60 |
| | | MRLDKLL GSR+QVKKLI ++ V VD VD GLQ I V +RV + | |
| Sbjct: | 1 | MRLDKLLEGTKVGSRSQVKKLIKAQGVWVDHMPARNGRQNVDPGLQLIEVTGQRVTHPKH | 60 |
| Query: | 61 | SYYLLYKPSGVVSAVRDSEHKTVIDLISEKDKVEGLYPIGRLDRDTEGLLIVTNNGPLGY | 120 |
| | | SY +L KPSGVVSA +D+ + TVID ++E+DK LYP+GRLDRDTEGL+++T+NGPLG+ | |
| Sbjct: | 61 | SYIILNKPSGVVSAKKDTNYLTVIDQLAEEDKSPDLYPVGRLDRDTEGLVLLTDNGPLGF | 120 |
| Query: | 121 | RMLHPKHHVAKTYYVEVNGFLERDAITFFEEGVVFDDGTKCKPAELTIDTANNDKSTARI | 180 |
| | | RMLHP HHV+KTY V VNG L DA FF G+ F G +C+PA+LTI A+ D+S A + | |
| Sbjct: | 121 | RMLHPSHHVSKTYLVTVNGLLAEDASDFFAAGICFPTGEQCQPAQLTILKADTDQSQASL | 180 |
| Query: | 181 | TITEGKFHQVKKMF | 194 |
| | | TI+EGKFHQVKK F | |
| Sbjct: | 181 | TISEGKFHQVKKCF | 194 |

[11772] Based on this analysis, it was predicted that these proteins and their epitopes could be useful antigens for vaccines or diagnostics.

### EXAMPLE 2153

[11773] A DNA sequence (GBSx2269) was identified in S. agalactiae <SEQ ID 6655> which encodes the amino acid sequence <SEQ ID 6656>. Analysis of this protein sequence reveals the following:

```
Possible site: 42
>>> Seems to have an uncleavable N-term signal seq
----- Final Results -----
                              bacterial membrane --- Certainty = 0.0000(Not Clear) < succ>
                                bacterial outside --- Certainty = 0.0000(Not Clear) < succ>
                            bacterial cytoplasm --- Certainty = 0.0000(Not Clear) < succ>
```

[11774] A related GBS nucleic acid sequence <SEQ ID 9745> which encodes amino acid sequence <SEQ ID 9746> was also identified.

[11775] The protein has homology with the following sequences in the GENPEPT database.

| >GP: BAA18872 GB: D90917 hypothetical protein [Synechocystis sp.] | | | |
|---|---|---|---|
| Identities = 197/318 (61%), Positives = 243/318 (75%) | | | |
| Query: | 22 | MGLLVDGKWVDQWYDTASTGGKFVRTVTQFRHWVTKDGSAGPSGDAGFKAESGRYHLYVS | 81 |
| | | MGLLV+G W DQWYDT STGG+FVR +QFRHW+T DGS GP+G GFKAE+GRYHLYVS | |
| Sbjct: | 1 | MGLLVNGIWQDQWYDTESTGGRFVRHDSQFRHWITPDGSPGPTGHGGFKAEAGRYHLYVS | 60 |
| Query: | 82 | LACPWASRVLIMRKLKNLESHISISIVNPLMLENGWTFQEYKGVIPDMINQSQYLYQIYQ | 141 |
| | | LACPWA R LI RKLK LE I +S+V+ LM ENGWTF GV+PD + ++YLYQIY | |
| Sbjct: | 61 | LACPWAHRTLIFRKLKGLEGMIDVSVVHWLMRENGWTFAPGPGVMPDPLFNAEYLYQIYT | 120 |
| Query: | 142 | ASQSDYTGRVTVPVLWDKKFHTIVNNESSEIMRMLNTAFNHITGNTDDYYPDSLQGQIDE | 201 |
| | | + + Y+GRVTVP+LWDK+ TIVNNESSEI+R+ N+AF+ + + DYYP +L+ QID | |
| Sbjct: | 121 | RADAQYSGRVTVPILWDKQKQTIVNNESSEIIRIFNSAFDGLGAKSGDYYPKALRTQIDA | 180 |
| Query: | 202 | MNNFIYPKINNGVYKAGFATSQNVYQKEVETLFTALDQLEKHLSDNHYLVGEQFTEADIR | 261 |
| | | +N+ IY INNGVYK GFAT+Q Y++ + LF +LD LE L + YL G++ TEAD R | |
| Sbjct: | 181 | LNDRIYHTINNGVYKCGFATTQTAYEEAIAPLFESLDWLEGILQGHQYLTGDEITEADWR | 240 |
| Query: | 262 | LFTTLVRFDTVYYGHFKCNLKALHDYPHLWHYTKRIYNLPGIAETVNFDHIKKHYYGSHK | 321 |
| | | LFTTL+RFD VY GHFKCNL+ + DYP+LW Y + +Y+ PGIAETVNF HIK HYY SH | |
| Sbjct: | 241 | LFTTLIRFDVVYVGHFKCNLRRIQDYPNLWRYLRDLYHQPGIAETVNFQHIKGHYYESHL | 300 |
| Query: | 322 | TINPTGIIPAGPNLDWTI | 339 |
| | | INPTGI+P GP LD ++ | |
| Sbjct: | 301 | NINPTGIVPMGPALDLSL | 318 |

[11776] No corresponding DNA sequence was identified in S. pyogenes.

[11777] SEQ ID 6656 (GBS655) was expressed in E. coli as a GST-fusion product. SDS-PAGE analysis of total cell extract is shown in FIG. 143 (lane 24; MW 27 kDa).

[11778] Based on this analysis, it was predicted that this protein and its epitopes, could be useful antigens for vaccines or diagnostics.

### EXAMPLE 2154

[11779] A DNA sequence (GBSx2270) was identified in S. agalactiae <SEQ ID 6657> which encodes the amino acid sequence <SEQ ID 6658>. Analysis of this protein sequence reveals the following:

```
Possible site: 43
>>> Seems to have no N-terminal signal sequence
----- Final Results -----
                            bacterial cytoplasm --- Certainty = 0.1116(Affirmative) < succ>
                              bacterial membrane --- Certainty = 0.0000(Not Clear) < succ>
                                bacterial outside --- Certainty = 0.0000(Not Clear) < succ>
```

[11780] The protein has homology with the following sequences in the GENPEPT database.

| >GP: CAB12030 GB: Z99105 similar to glucosamine-6-phosphate isomerase | | | |
|---|---|---|---|
| [Bacillus subtilis] | | | |
| Identities = 112/243 (46%), Positives = 163/243 (66%), Gaps = 10/243 (4%) | | | |
| Query: | 1 | MRVITVKNDIEGGKIAFTLLEEKMKAGAQT-LGLATGSSPITFYEEIVKS----NLDFSN | 55 |
| | | M+++ ++ E K++ +++E+++A LGLATGS+P+ Y++++ +DFS | |
| Sbjct: | 1 | MKILIAEHYEELCKLSAAIIKEQIQAKKDAVLGLATGSTPVGLYKQLISDYQAGEIDFSK | 60 |
| Query: | 56 | MVSINLDEYVGIAASNDQSYSYFMHKHLFDAKPFKENNL--PNGLAKDLKEEIKRYDAVI | 113 |
| | | + + NLDEY G++ S+ QSY++FMH+HLF + +++ P G L+ K Y+ +I | |
| Sbjct: | 61 | VTTFNLDEYAGLSPSHPQSYNHFMHEHLFQHINMQPDHIHIPQGDNPQLEAACKVYEDLI | 120 |
| Query: | 114 | N-ANPIDFQILGIGRNGHIGFNEPGTPFDITTHVVDLAPSTIEANSRFFNSIDD-VPKQA | 171 |
| | | A ID QILGIG NGHIGFNEPG+ F+ T VV L+ STI+AN+RFF VP+ A | |
| Sbjct: | 121 | RQAGGIDVQILGIGANGHIGFNEPGSDFEDRTRVVKLSESTIQANARFFGGDPVLVPRLA | 180 |
| Query: | 172 | LSMGIGSIMK-SKTIVLVAYGIEKAEAIASMIKGPITEDMPASILQKHDDVVIIVDEAAA | 230 |
| | | +SMGI +IM+ SK IVL+A G EKA+AI M +GP+T D+PASILQKH+ V +I D AA | |
| Sbjct: | 181 | ISMGIKTIMEFSKHIVLLASGEEKADAIQKMAEGPVTTDVPASILQKHNHVTVIADYKAA | 240 |
| Query: | 231 | SKL | 233 |
| | | KL | |
| Sbjct: | 241 | QKL | 243 |

[11781] A related DNA sequence was identified in S. pyogenes <SEQ ID 6659> which encodes the amino acid sequence <SEQ ID 6660>. Analysis of this protein sequence reveals the following:

| Possible site: 43 | | | | |
|---|---|---|---|---|
| >>> Seems to have no N-terminal signal sequence | | | | |
| | INTEGRAL | Likelihood = −0.59 | Transmembrane | 174-190 (174-190) |

```
----- Final Results -----
                              bacterial membrane --- Certainty = 0.1235(Affirmative) < succ>
                                bacterial outside --- Certainty = 0.0000(Not Clear) < succ>
                            bacterial cytoplasm --- Certainty = 0.0000(Not Clear) < succ>
```

[11782] The protein has homology with the following sequences in the databases:

| >GP: CAB12030 GB: Z99105 similar to glucosamine-6-phosphate isomerase | | | |
|---|---|---|---|
| [Bacillus subtilis] | | | |
| Identities = 120/244 (49%), Positives = 162/244 (66%), Gaps = 12/244 (4%) | | | |
| Query: | 1 | MKIIRVQDQIEGGKIAFTLLKDSL-AKGAKTLGLATGSSPISFYQEMVKS----PLDFSD | 55 |
| | | MKI+ + E K++ ++K+ + AK LGLATGS+P+ Y++++ +DFS | |
| Sbjct: | 1 | MKILIAEHYEELCKLSAAIIKEQIQAKKDAVLGLATGSTPVGLYKQLISDYQAGEIDFSK | 60 |
| Query: | 56 | LTSINLDEYVGLSVESDQSYDYFMRQNLF---NAKPFKKNYLPNGLATDVEAEAKRYNQI | 112 |
| | | +T+ NLDEY GLS QSY++FM ++LF N +P ++P G +EA K Y + | |
| Sbjct: | 61 | VTTFNLDEYAGLSPSHPQSYNHFMHEHLFQHINMQP-DHIHIPQGDNPQLEAACKVYEDL | 119 |
| Query: | 113 | IAEHP-IDFQVLGIGRNGHIGFNEPGTSFEEETHVVDLQESTIEANSRFFTSIED-VPKQ | 170 |
| | | I + ID Q+LGIG NGHIGFNEPG+ FE+ T VV L ESTI+AN+RFF VP+ | |
| Sbjct: | 120 | IRQAGGIDVQILGIGANGHIGFNEPGSDFEDRTRVVKLSESTIQANARFFGGDPVLVPRL | 179 |
| Query: | 171 | AISMGIASIMK-SEMIVLLAFGQEKADAIKGMVFGPITEHLPASILQKHDHVIVIVDEAA | 229 |
| | | AISMGI +IM+ S+ IVLLA G+EKADAI+ M GP+T +PASILQKH+HV VI D A | |
| Sbjct: | 180 | AISMGIKTIMEFSKHIVLLASGEEKADAIQKMAEGPVTTDVPASILQKHNHVTVIADYKA | 239 |
| Query: | 230 | ASQL | 233 |
| | | A +L | |
| Sbjct: | 240 | AQKL | 243 |

[11783] An alignment of the GAS and GBS proteins is shown below.

| Identities = 163/233 (69%), Positives = 201/233 (85%) | | | |
|---|---|---|---|
| Query: | 1 | MRVITVKNDIEGGKIAFTLLEEKMKAGAQTLGLATGSSPITFYEEIVKSNLDFSNMVSIN | 60 |
| | | M++I V++ IEGGKIAFTLL++ + GA+TLGLATGSSPI+FY+E+VKS LDFS++ SIN | |
| Sbjct: | 1 | MKIIRVQDQIEGGKIAFTLLKDSLAKGAKTLGLATGSSPISFYQEMVKSPLDFSDLTSIN | 60 |
| Query: | 61 | LDEYVGIAASNDQSYSYFMHKHLFDAKPFKENNLPNGLAKDLKEEIKRYDAVINANPIDF | 120 |
| | | LDEYVG++ +DQSY YFM ++LF+AKPFK+N LPNGLA D++ E KRY+ +I +PIDF | |
| Sbjct: | 61 | LDEYVGLSVESDQSYDYFMRQNLFNAKPFKKNYLPNGLATDVEAEAKRYNQIIAEHPIDF | 120 |
| Query: | 121 | QILGIGRNGHIGFNEPGTPFDITTHVVDLAPSTIEANSRFFNSIDDVPKQALSMGIGSIM | 180 |
| | | Q+LGIGRNGHIGFNEPGT F+ THVVDL STIEANSRFF SI+DVPKQA+SMGI SIM | |
| Sbjct: | 121 | QVLGIGRNGHIGFNEPGTSFEEETHVVDLQESTIEANSRFFTSIEDVPKQAISMGIASIM | 180 |
| Query: | 181 | KSKTIVLVAYGIEKAEAIASMIKGPITEDMPASILQKHDDVVIIVDEAAASKL | 233 |
| | | KS+ IVL+A+G EKA+AI M+ GPITE +PASILQKHD V++IVDEAAAS+L | |
| Sbjct: | 181 | KSEMIVLLAFGQEKADAIKGMVFGPITEHLPASILQKHDHVIVIVDEAAASQL | 233 |

[11784] Based on this analysis, it was predicted that these proteins and their epitopes could be useful antigens for vaccines or diagnostics.

### EXAMPLE 2155

[11785] A DNA sequence (GBSx2271) was identified in S. agalactiae <SEQ ID 6661> which encodes the amino acid sequence <SEQ ID 6662>. Analysis of this protein sequence reveals the following:

| Possible site: 61 | | | | |
|---|---|---|---|---|
| >>> Seems to have no N-terminal signal sequence | | | | |
| | INTEGRAL | Likelihood = −8.12 | Transmembrane | 169-185 (161-194) |
| | INTEGRAL | Likelihood = −6.37 | Transmembrane | 151-167 (145-168) |
| | INTEGRAL | Likelihood = −5.15 | Transmembrane | 42-58 (41-62) |
| | INTEGRAL | Likelihood = −1.59 | Transmembrane | 207-223 (207-224) |
| | INTEGRAL | Likelihood = −1.12 | Transmembrane | 24-40 (23-40) |

```
----- Final Results -----
                              bacterial membrane --- Certainty = 0.4248(Affirmative) < succ>
                                bacterial outside --- Certainty = 0.0000(Not Clear) < succ>
                            bacterial cytoplasm --- Certainty = 0.0000(Not Clear) < succ>
```

[11786] The protein has homology with the following sequences in the GENPEPT database.

| >GP: AAF13747 GB: AF117351 unknown [Zymomonas mobilis] | | | |
|---|---|---|---|
| Identities = 88/216 (40%), Positives = 123/216 (56%) | | | |
| Query: | 9 | QQLNILRAGVLGANDGIISVAGVVIGVASATHNLWIIFLSAASAILAGAFSMAGGEYVSV | 68 |
| | | +Q+ LRA VLGANDGI+S + ++IGVASA + I L+ S ++AGA SMA GEYVSV | |
| Sbjct: | 17 | RQMGWLRASVLGANDGILSTSSLMIGVASAHGSSGNILLAGMSGLIAGALSMAAGEYVSV | 76 |
| Query: | 69 | STQKDTEQAAVAREEKLLENNPELAKKSLVDIYLAKGESHEHAQWLVDKAFSKNAIEHLV | 128 |
| | | S+Q D EQA VARE L+ NP K L +IY+ +G E A + ++ + NA+E + | |
| Sbjct: | 77 | SSQHDMEQADVAREHAELKANPHAEKHELAEIYVERGLDRELALQVAEQLMAHNALEAHL | 136 |
| Query: | 129 | EEKYGIEFGEYTSPWHAAISSFIAFAIGSIFPTITILLLPFSVRIVGTVIIVIVSLLSTG | 188 |
| | | ++ G+ P AA++S I+F+ G+I P +T L P + + +I I+ L G | |
| Sbjct: | 137 | RDELGLTDSLIARPVQAALASAISFSGGAIVPFLTALFSPPEIINITISLISILCLAVLG | 196 |
| Query: | 189 | YVSAKLGQAPTVPAMRRNVMIGCLTMLATYVIGQLF | 224 |
| | | V A LG A A R G L M+ T IG F | |
| Sbjct: | 197 | MVGAHLGGANVPKAALRVTFCGALAMIGTAAIGSFF | 232 |

[11787] No corresponding DNA sequence was identified in S. pyogenes.

[11788] Based on this analysis, it was predicted that this protein and its epitopes, could be useful antigens for vaccines or diagnostics.

### EXAMPLE 2156

[11789] A DNA sequence (GBSx2272) was identified in S. agalactiae <SEQ ID 6663> which encodes the amino acid sequence <SEQ ID 6664>. This protein is predicted to be S-adenosylmethionine tRNA ribosyltransferase (queA). Analysis of this protein sequence reveals the following:

```
Possible site: 41
>>> Seems to have no N-terminal signal sequence
----- Final Results -----
                            bacterial cytoplasm --- Certainty = 0.3438(Affirmative) < succ>
                              bacterial membrane --- Certainty = 0.0000(Not Clear) < succ>
                                bacterial outside --- Certainty = 0.0000(Not Clear) < succ>
```

[11790] The protein has homology with the following sequences in the GENPEPT database.

| >GP: CAB14732 GB: Z99118 S-adenosylmethionine tRNA ribosyltransferase | | | |
|---|---|---|---|
| [Bacillus subtilis] | | | |
| Identities = 228/341 (66%), Positives = 279/341 (80%) | | | |
| Query: | 1 | MNTNDFDFYLPEELIAQTPLEKRDASKLLVIDHKNKTMTDSHFDHILDELKPGDALVMNN | 60 |
| | | M + FDF LPE LIAQ PLE+RDAS+L+V+D +TDS F HI+ GD LV+NN | |
| Sbjct: | 1 | MKVDLFDFELPERLIAQVPLEQRDASRLMVLDKHTGELTDSSFKHIISFFNEGDCLVLNN | 60 |
| Query: | 61 | TRVLPARLYGEKQDTHGHVELLLLKNTEGDQWEVLAKPAKRLRVGTKVSFGDGRLIATVT | 120 |
| | | TRVLPARL+G K+DT VELLLLK GD+WE LAKPAKR++ GT V+FGDGRL A T | |
| Sbjct: | 61 | TRVLPARLFGTKEDTGAKVELLLLKQETGDKWETLAKPAKRVKKGTVVTFGDGRLKAICT | 120 |
| Query: | 121 | KELEHGGRIVEFSYDGIFLEVLESLGEMPLPPYIHEKLEDRDRYQTVYAKENGSAAAPTA | 180 |
| | | +ELEHGGR +EF YDGIF EVLESLGEMPLPPYI E+L+D++RYQTVY+KE GSAAAPTA | |
| Sbjct: | 121 | EELEHGGRKMEFQYDGIFYEVLESLGEMPLPPYIKEQLDDKERYQTVYSKEIGSAAAPTA | 180 |
| Query: | 181 | GLHFTKELLEKIETKGVKLVYLTLHVGLGTFRPVSVDNLDEHEMHSEFYQLSKEAADTLN | 240 |
| | | GLHFT+E+L++++ KGV++ ++TLHVGLGTFRPVS D ++EH MH+EFYQ+S+E A LN | |
| Sbjct: | 181 | GLHFTEEILQQLKDKGVQIEFITLHVGLGTFRPVSADEVEEHNMHAEFYQMSEETAAALN | 240 |
| Query: | 241 | AVKESGGRIVAVGTTSIRTLETIGSKFNGELKADSGWTNIFIKPGYQFKVVDAFSTNFHL | 300 |
| | | V+E+GGRI++VGTTS RTLETI + +G+ KA SGWT+IFI PGY+FK +D TNFHL | |
| Sbjct: | 241 | KVRENGGRIISVGTTSTRTLETIAGEHDGQFKASSGWTSIFIYPGYEFKAIDGMITNFHL | 300 |
| Query: | 301 | PKSTLVMLVSAFAGRDFVLEAYNHAVEERYRFFSFGDAMFV | 341 |
| | | PKS+L+MLVSA AGR+ +L AYNHAVEE YRFFSFGDAM + | |
| Sbjct: | 301 | PKSSLIMLVSALAGRENILRAYNHAVEEEYRFFSFGDAMLI | 341 |

[11791] A related DNA sequence was identified in S. pyogenes <SEQ ID 6665> which encodes the amino acid sequence <SEQ ID 6666>. Analysis of this protein sequence reveals the following:

```
Possible site: 41
>>> Seems to have no N-terminal signal sequence
----- Final Results -----
                            bacterial cytoplasm --- Certainty = 0.3864(Affirmative) < succ>
                              bacterial membrane --- Certainty = 0.0000(Not Clear) < succ>
                                bacterial outside --- Certainty = 0.0000(Not Clear) < succ>
```

[11792] An alignment of the GAS and GBS proteins is shown below.

| Identities = 297/341 (87%), Positives = 322/341 (94%) | | | |
|---|---|---|---|
| Query: | 1 | MNTNDFDFYLPEELIAQTPLEKRDASKLLVIDHKNKTMTDSHFDHILDELKPGDALVMNN | 60 |
| | | MNTN+FDF LPEELIAQTPLEKRD+SKLL+IDH+ KTM DSHFDHI+D+L PGDALVMNN | |
| Sbjct: | 1 | MNTNNFDFELPEELIAQTPLEKRDSSKLLIIDHRQKTMVDSHFDHIIDQLNPGDALVMNN | 60 |
| Query: | 61 | TRVLPARLYGEKQDTHGHVELLLLKNTEGDQWEVLAKPAKRLRVGTKVSFGDGRLIATVT | 120 |
| | | TRVLPARLYGEK DTHGHVELLLLKNT+GDQWEVLAKPAKRL+VG++V+FGDGRL AT+ | |
| Sbjct: | 61 | TRVLPARLYGEKPDTHGHVELLLLKNTQGDQWEVLAKPAKRLKVGSQVNFGDGRLKATII | 120 |
| Query: | 121 | KELEHGGRIVEFSYDGIFLEVLESLGEMPLPPYIHEKLEDRDRYQTVYAKENGSAAAPTA | 180 |
| | | ELEHGGRIVEFSYDGIFLEVLESLGEMPLPPYIHEKLED +RYQTVYAKENGSAAAPTA | |
| Sbjct: | 121 | DELEHGGRIVEFSYDGIFLEVLESLGEMPLPPYIHEKLEDAERYQTVYAKENGSAAAPTA | 180 |
| Query: | 181 | GLHFTKELLEKIETKGVKLVYLTLHVGLGTFRPVSVDNLDEHEMHSEFYQLSKEAADTLN | 240 |
| | | GLHFT +LL+KIE KGV LVYLTLHVGLGTFRPVSVDNLDEH+MHSEFY LS+EAA TL | |
| Sbjct: | 181 | GLHFTTDLLKKIEAKGVHLVYLTLHVGLGTFRPVSVDNLDEHDMHSEFYSLSEEAAQTLR | 240 |
| Query: | 241 | AVKESGGRIVAVGTTSIRTLETIGSKFNGELKADSGWTNIFIKPGYQFKVVDAFSTNFHL | 300 |
| | | VK++GGR+VAVGTTSIRTLETIG KF G+++ADSGWTNIFIKPGYQFKVVDAFSTNFHL | |
| Sbjct: | 241 | DVKQAGGRVVAVGTTSIRTLETIGGKFQGDIQADSGWTNIFIKPGYQFKVVDAFSTNFHL | 300 |
| Query: | 301 | PKSTLVMLVSAFAGRDFVLEAYNHAVEERYRFFSFGDAMFV | 341 |
| | | PKSTLVMLVSAFAGRDFVLEAY HAV+E+YRFFSFGDAMFV | |
| Sbjct: | 301 | PKSTLVMLVSAFAGRDFVLEAYRHAVDEKYRFFSFGDAMFV | 341 |

[11793] Based on this analysis, it was predicted that these proteins and their epitopes could be useful antigens for vaccines or diagnostics.

### EXAMPLE 2157

[11794] A DNA sequence (GBSx2273) was identified in S. agalactiae <SEQ ID 6667> which encodes the amino acid sequence <SEQ ID 6668>. Analysis of this protein sequence reveals the following:

Possible site: 36
>>> Seems to have an uncleavable N-term signal seq

| | | | |
|---|---|---|---|
| INTEGRAL | Likelihood = −14.22 | Transmembrane | 14-30 (6-34) |

```
----- Final Results -----
                              bacterial membrane --- Certainty = 0.6689(Affirmative) < succ>
                                bacterial outside --- Certainty = 0.0000(Not Clear) < succ>
                            bacterial cytoplasm --- Certainty = 0.0000(Not Clear) < succ>
```

[11795] The protein has no significant homology with any sequences in the GENPEPT database.

[11796] A related DNA sequence was identified in S. pyogenes <SEQ ID 6669> which encodes the amino acid sequence <SEQ ID 6670>. Analysis of this protein sequence reveals the following:

```
Possible site: 51
>>> Seems to have no N-terminal signal sequence
----- Final Results -----
                            bacterial cytoplasm --- Certainty = 0.2655(Affirmative) < succ>
                              bacterial membrane --- Certainty = 0.0000(Not Clear) < succ>
                                bacterial outside --- Certainty = 0.0000(Not Clear) < succ>
```

[11797] An alignment of the GAS and GBS proteins is shown below.

| Identities = 126/195 (64%), Positives = 155/195 (78%), Gaps = 1/195 (0%) | | | |
|---|---|---|---|
| Query: | 160 | MEERFDITETDYEYIGEHNNYVAAFSGAMSIDDMQKYSLVYSENTPAYALAERIGGMDSA | 219 |
| | | M ERFDITETDYEY EH+ YVA F+GAMSI DMQ+YSLVYSENTPAYALAER+GGM+ A | |
| Sbjct: | 1 | MTERFDITETDYEYDQEHHAYVAQFNGAMSIPDMQEYSLVYSENTPAYALAERLGGMNKA | 60 |
| Query: | 220 | YSKFGRYGQSKGDIKNIQKNGNKVTTDYYIQVLDYLWKHRKKYDSLITYLEEAFPTDYYR | 279 |
| | | Y F RYG+ G I I +NGNK+TT YY+QVLDYLW+H+ KY ++ Y+ E+FP YY+ | |
| Sbjct: | 61 | YQLFDRYGKVSGAITTIDRNGNKITTAYYLQVLDYLWQHQDKYKDILYYIGESFPDLYYK | 120 |
| Query: | 280 | ALIPSDVVVAQKPGYVREALNVGAIVKEEVPYIVAIYTAGLGGSTQEDSEINGVGLYQLE | 339 |
| | | +P V V QKPGYVREALNVGAIV EE PY++A+Y++GLGG+TQ E+NG+G QL | |
| Sbjct: | 121 | TYLP-HVKVYQKPGYVREALNVGAIVCEESPYLIALYSSGLGGATQASEEVNGLGYVQLV | 179 |
| Query: | 340 | QLCFVINQWHRVNMN | 354 |
| | | QL +VIN+W+R N+N | |
| Sbjct: | 180 | QLPYVINEWYRGNLN | 194 |

[11798] SEQ ID 6668 (GBS680) was expressed in E. coli as a GST-fusion product. SDS-PAGE analysis of total cell extract is shown in FIG. 164 (lane 10-12; MW 64 kDa) and in FIG. 239 (lane 9; MW 64 kDa). It was also expressed in E. coli as a His-fusion product. SDS-PAGE analysis of total cell extract is shown in FIG. 164 (lane 15; MW 40 kDa) and in FIG. 188 (lane 9; MW 40 kDa). Purified GBS680-His is shown in FIG. 242, lane 8. Purified GBS680-GST is shown in FIG. 246, lanes 6 & 7.

[11799] Based on this analysis, it was predicted that these proteins and their epitopes could be useful antigens for vaccines or diagnostics.

### EXAMPLE 2158

[11800] A DNA sequence (GBSx2274) was identified in S. agalactiae <SEQ ID 6671> which encodes the amino acid sequence <SEQ ID 6672>. Analysis of this protein sequence reveals the following:

| Possible site: 17 | | | | |
|---|---|---|---|---|
| >>> Seems to have no N-terminal signal sequence | | | | |
| | INTEGRAL | Likelihood = −4.57 | Transmembrane | 8-24 (4-25) |
| | INTEGRAL | Likelihood = −2.13 | Transmembrane | 66-82 (65-84) |
| | INTEGRAL | Likelihood = −1.65 | Transmembrane | 107-123 (107-125) |
| | INTEGRAL | Likelihood = −0.69 | Transmembrane | 36-52 (36-52) |
| | INTEGRAL | Likelihood = −0.48 | Transmembrane | 89-105 (89-105) |

```
----- Final Results -----
                              bacterial membrane --- Certainty = 0.2826(Affirmative) < succ>
                                bacterial outside --- Certainty = 0.0000(Not Clear) < succ>
                            bacterial cytoplasm --- Certainty = 0.0000(Not Clear) < succ>
```

[11801] The protein has no significant homology with any sequences in the GENPEPT database.

[11802] No corresponding DNA sequence was identified in S. pyogenes.

[11803] Based on this analysis, it was predicted that this protein and its epitopes, could be useful antigens for vaccines or diagnostics.

### EXAMPLE 2159

[11804] A DNA sequence (GBSx2275) was identified in S. agalactiae <SEQ ID 6673> which encodes the amino acid sequence <SEQ ID 6674>. Analysis of this protein sequence reveals the following:

| Possible site: 59 | | | | |
|---|---|---|---|---|
| >>> Seems to have an uncleavable N-term signal seq | | | | |
| | INTEGRAL | Likelihood = −9.87 | Transmembrane | 108-124 (97-133) |
| | INTEGRAL | Likelihood = −9.08 | Transmembrane | 181-197 (173-201) |
| | INTEGRAL | Likelihood = −7.43 | Transmembrane | 220-236 (216-248) |
| | INTEGRAL | Likelihood = −6.69 | Transmembrane | 6-22 (3-28) |
| | INTEGRAL | Likelihood = −3.72 | Transmembrane | 401-417 (400-417) |
| | INTEGRAL | Likelihood = −3.35 | Transmembrane | 279-295 (278-295) |
| | INTEGRAL | Likelihood = −2.87 | Transmembrane | 31-47 (30-50) |
| | INTEGRAL | Likelihood = −2.87 | Transmembrane | 244-260 (242-264) |
| | INTEGRAL | Likelihood = −0.80 | Transmembrane | 62-78 (62-78) |

```
----- Final Results -----
                              bacterial membrane --- Certainty = 0.4949(Affirmative) < succ>
                                bacterial outside --- Certainty = 0.0000(Not Clear) < succ>
                            bacterial cytoplasm --- Certainty = 0.0000(Not Clear) < succ>
```

[11805] The protein has homology with the following sequences in the GENPEPT database.

| >GP: AAC21770 GB: U32694 H. influenzae predicted coding region HI0092 | | | |
|---|---|---|---|
| [Haemophilus influenzae Rd] | | | |
| Identities = 232/416 (55%), Positives = 314/416 (74%), Gaps = 3/416 (0%) | | | |
| Query: | 4 | TFTTTGALIGLALAILLIIKKVHPAYSLILGALVGGLIGGGDLVTIVNTMVLGAQGMMSS | 63 |
| | | T + GAL+ L +AI LI+KKV PAY +++GALVGGLIGG DL V+ M+ GAQG+ ++ | |
| Sbjct: | 3 | TVSAIGALVALIVAIFLILKKVSPAYGMLVGALVGGLIGGADLSQTVSLMIGGAQGITTA | 62 |
| Query: | 64 | ILRILTSGILAGALIKTGSAEKIAESIIKKLGQQRAITALAIATMIICAVGVFIDIAVIT | 123 |
| | | ++RIL +G+LAG LI++G+A I E+I KLG+ RA+ ALA+ATMI+ AVGVF+D+AVIT | |
| Sbjct: | 63 | VMRILAAGVLAGVLIESGAANSITETITNKLGETRALLALALATMILTAVGVFVDVAVIT | 122 |
| Query: | 124 | VAPIALAIGKKANLSKSSILLAMIGGGKAGNIISPNPNTIAASEAFKVDLTSLMVQNIIP | 183 |
| | | V+PIALA+ ++++LSK++ILLAMIGGGKAGNI+SPNPN IAA++ F + LTS+M+ IIP | |
| Sbjct: | 123 | VSPIALALSRRSDLSKAAILLAMIGGGKAGNIMSPNPNAIAAADTFHLPLTSVMMAGIIP | 182 |
| Query: | 184 | AIAALVVTIILAKIVSKKNNDISYDSEEQV--GSDLPAFLPAISGPLVVICLLALRPLFG | 241 |
| | | A+ L++T LAK + K + ++ D E V +LP+FL A+ PLV I LLALRPLF | |
| Sbjct: | 183 | ALFGLILTYFLAKRLINKGSKVT-DKEVIVLETQNLPSFLTALVAPLVAILLLALRPLFD | 241 |
| Query: | 242 | ITIDPLIALPLGGLISILATGYLKETVPFVEYGLSKVVGVSILLIGTGTLSGIIKASNLQ | 301 |
| | | I +DPLIALPLGGLI G L+ + GLSK+ V+I+L+GTG L+GII S L+ | |
| Sbjct: | 242 | IKVDPLIALPLGGLIGAFCMGKLRNINSYAINGLSKMTPVAIMLLGTGALAGIIANSGLK | 301 |
| Query: | 302 | FDMIHLLEFLNMPTFILAPLSGIFMGAATASTTSGTTIASQTFAETLIKSGVPAVSGAAM | 361 |
| | | +I LE +P++ILAP+SG+ M ATASTT+GT +AS F+ TL++ GV +++GAAM | |
| Sbjct: | 302 | EVLIQGLEHSGLPSYILAPISGVLMSLATASTTAGTAVASNVFSSTLLELGVSSLAGAAM | 361 |
| Query: | 362 | IHAGATVLDSLPHGSFFHATGGAVNMAIKDRMKLISYEALIGLTSTIVAVVYYCFF | 417 |
| | | IHAGATV D +PHGSFFHATGG+VNM IK+R+KLI YE+ +GL TIV+ + + F | |
| Sbjct: | 362 | IHAGATVFDHMPHGSFFHATGGSVNMDIKERLKLIPYESAVGLMMTIVSTLIFGVF | 417 |

[11806] A related DNA sequence was identified in S. pyogenes <SEQ ID 6675> which encodes the amino acid sequence <SEQ ID 6676>. Analysis of this protein sequence reveals the following:

| Possible site: 51 | | | | |
|---|---|---|---|---|
| >>> Seems to have an uncleavable N-term signal seq | | | | |
| | INTEGRAL | Likelihood = −11.15 | Transmembrane | 240-256 (236-265) |
| | INTEGRAL | Likelihood = −10.88 | Transmembrane | 3-19 (1-32) |
| | INTEGRAL | Likelihood = −10.14 | Transmembrane | 269-285 (263-289) |
| | INTEGRAL | Likelihood = −7.27 | Transmembrane | 107-123 (102-141) |
| | INTEGRAL | Likelihood = −7.17 | Transmembrane | 307-323 (303-330) |
| | INTEGRAL | Likelihood = −6.64 | Transmembrane | 24-40 (23-43) |
| | INTEGRAL | Likelihood = −5.63 | Transmembrane | 422-438 (420-442) |
| | INTEGRAL | Likelihood = −3.77 | Transmembrane | 124-140 (124-141) |
| | INTEGRAL | Likelihood = −3.24 | Transmembrane | 189-205 (184-207) |
| | INTEGRAL | Likelihood = −2.60 | Transmembrane | 65-81 (65-82) |
| | INTEGRAL | Likelihood = −2.34 | Transmembrane | 393-409 (393-409) |
| | INTEGRAL | Likelihood = −0.11 | Transmembrane | 149-165 (149-166) |

```
----- Final Results -----
                              bacterial membrane --- Certainty = 0.5458(Affirmative) < succ>
                                bacterial outside --- Certainty = 0.0000(Not Clear) < succ>
                            bacterial cytoplasm --- Certainty = 0.0000(Not Clear) < succ>
```

[11807] The protein has homology with the following sequences in the databases:

| >GP: BAB07616 GB: AP001520 unknown conserved protein | | | |
|---|---|---|---|
| [Bacillus halodurans] | | | |
| Identities = 155/435 (35%), Positives = 248/435 (56%), Gaps = 21/435 (4%) | | | |
| Query: | 7 | LGVLVGVIVIIYLYVKEVNIIIAAPLATSLVILFNQMDPTTTLLGKEPNQFMGALSTYIL | 66 |
| | | LG+++G+++++ L + +II AP+A +V LF +D LL + +M + | |
| Sbjct: | 2 | LGIVLGLVILMVLAYRGWSIIWVAPIAAGVVALFGGLD----LLPAYTDTYMEGFVNFAK | 57 |
| Query: | 67 | NYFAIFLLGSILAKLMETSGATTSIADYILKKVGHDSPYKVLVAIFLISAILTYGGISLF | 126 |
| | | +F +F+LG+I KLME +GA S+A I K +G + ++ + L A+LTYGGISLF | |
| Sbjct: | 58 | QWFPVFMLGAIFGKLMEDTGAARSVASAITKLIGTK---RAILGVMLGCAVLTYGGISLF | 114 |
| Query: | 127 | VVMFAVLPLARSLFKKMDLAWNLIQVPLWLGIATFTMTILPGTPAIQNVIPIQYLDTSLT | 186 |
| | | VV+FA+ PLA +LF++ +++ LI + LG TFTMT +PGTP IQN+IP Y T+ | |
| Sbjct: | 115 | VVVFAMYPLALALFREANISRRLIPGTIALGAFTFTMTAVPGTPQIQNLIPTSYYGTNAM | 174 |
| Query: | 187 | AAAIPSIVGSIGCVAFGLFYMKYCLAKSMARGETYATYAFDNEIQVKTKNLPHFLASILP | 246 |
| | | AA + ++ ++ G Y+ + K GE + T + E + + + +P+ S LP | |
| Sbjct: | 175 | AAPMMGVIAALIMGIGGYTYLVWREKKLKEAGE-FFTEPKNGEKEEEGEKVPNPWLSFLP | 233 |
| Query: | 247 | LLLLIIIALTGSLFGNDFFKKNIIFIALLAVILTASWLFRQFIPNKIAVFNLGASSSIAP | 306 |
| | | L+ +I+ T +L D I +AL++ I+ L + I N GA S+ | |
| Sbjct: | 234 | LVSVIV---TLNLLQWD------IVLALISGIVLIMLLNVGKVKGFIQSMNQGAGGSVLA | 284 |
| Query: | 307 | IFATASAVAFGAVVMIVPGFTFFSDLILNIPGNPLISLAVLTSSMSAITGSSSGALGIVM | 366 |
| | | I T++AV FG+VV VPGF ++L+L I G+PLIS AV + ++ TGS+SG +GI + | |
| Sbjct: | 285 | IINTSAAVGFGSVVRAVPGFERLTELLLGIQGSPLISQAVAINVLAGATGSASGGMGIAL | 344 |
| Query: | 367 | ----PNFAQYYLDQGLNPEMIHRVATIASNIFTIVPQSGVFLTFLALTGLNHKNAFKETF | 422 |
| | | + Q ++ G++PE HRVA+IAS +P +G LT LA+TGL+HK ++K+ F | |
| Sbjct: | 345 | EALGDRYMQLAMETGMSPEAFHRVASIASGGLDTLPHNGAVLTLLAITGLSHKESYKDIF | 404 |
| Query: | 423 | ITVSVSTFIAQVIVI | 437 |
| | | + V ++ I | |
| Sbjct: | 405 | VVGCVIPIVSVAFAI | 419 |

[11808] An alignment of the GAS and GBS proteins is shown below.

| Identities = 88/395 (22%), Positives = 167/395 (42%), Gaps = 40/395 (10%) | | | |
|---|---|---|---|
| Query: | 9 | GALIGLALAILLIIKKVHPAYSLILGALVGGLIGGGDLVTIV----NTMVLGAQG--MMS | 62 |
| | | G L+G+ + I L +K+V+ + L + L D T + +GA +++ | |
| Sbjct: | 8 | GVLVGVIVIIYLYVKEVNIIIAAPLATSLVILFNQMDPTTTLLGKEPNQFMGALSTYILN | 67 |
| Query: | 63 | SILRILTSGILAGALIKTGSAEKIAESIIKKLGQQ---RAITALAIATMIICAVGVFIDI | 119 |
| | | L ILA + +G+ IA+ I+KK+G + + A+ + + I+ G+ + + | |
| Sbjct: | 68 | YFAIFLLGSILAKLMETSGATTSIADYILKKVGHDSPYKVLVAIFLISAILTYGGISLFV | 127 |
| Query: | 120 | AVITVAPIALAIGKKANLSKSSILLAMIGGGKAGNII----SPNPNTIAASEAFKVDLTS | 175 |
| | | + V P+A ++ KK +L+ + I + + G + +P + + LT+ | |
| Sbjct: | 128 | VMFAVLPLARSLFKKMDLAWNLIQVPLWLGIATFTMTILPGTPAIQNVIPIQYLDTSLTA | 187 |
| Query: | 176 | LMVQNIIPAIAALVVTII-----LAKIVSKKNNDISY--DSEEQVGS-DLPAFLPAISGP | 227 |
| | | + +I+ +I + + LAK +++ +Y D+E QV + +LP FL +I | |
| Sbjct: | 188 | AAIPSIVGSIGCVAFGLFYMKYCLAKSMARGETYATYAFDNEIQVKTKNLPHFLASILPL | 247 |
| Query: | 228 | LVVICLLALRPLFG-------ITIDPLIALPLGGLISILATGYLKETVPFVEYGLSKVVG | 280 |
| | | L++I + LFG I L+A+ L S L ++ + G S + | |
| Sbjct: | 248 | LLLIIIALTGSLFGNDFFKKNIIFIALLAVIL--TASWLFRQFIPNKIAVFNLGASSSIA | 305 |
| Query: | 281 | ---VSILLIGTGTLSGIIKASNLQFDMIHLLEFLNMPTFILAPLSGIFMGAATASTTSGT | 337 |
| | | + + G + I+ D+I L P LA L+ M A T S++ | |
| Sbjct: | 306 | PIFATASAVAFGAVVMIVPGFTFFSDLI--LNIPGNPLISLAVLTS-SMSAITGSSSGAL | 362 |
| Query: | 338 | TIASQTFAETLIKSGVPAVSGAAMIHAGATVLDSL | 372 |
| | | I FA+ + G+ MIH AT+ ++ | |
| Sbjct: | 363 | GIVMPNFAQYYLDQGL----NPEMIHRVATIASNI | 393 |

[11809] Based on this analysis, it was predicted that these proteins and their epitopes could be useful antigens for vaccines or diagnostics.

### EXAMPLE 2160

[11810] A DNA sequence (GBSx2277) was identified in S. agalactiae <SEQ ID 6677> which encodes the amino acid sequence <SEQ ID 6678>. Analysis of this protein sequence reveals the following:

| Possible site: 21 | | | | |
|---|---|---|---|---|
| >>> Seems to have no N-terminal signal sequence | | | | |
| | INTEGRAL | Likelihood = −3.24 | Transmembrane | 85-101 (84-101) |

```
----- Final Results -----
                              bacterial membrane --- Certainty = 0.2296(Affirmative) < succ>
                                bacterial outside --- Certainty = 0.0000(Not Clear) < succ>
                            bacterial cytoplasm --- Certainty = 0.0000(Not Clear) < succ>
```

[11811] The protein has homology with the following sequences in the GENPEPT database.

| >GP: CAB16041 GB: Z99124 similar to hypothetical proteins | | | |
|---|---|---|---|
| [Bacillus subtilis] | | | |
| Identities = 176/377 (46%), Positives = 234/377 (61%), Gaps = 2/377 (0%) | | | |
| Query: | 1 | MKVVVAIDSLKGSLSSLEAGNAIKESINEVISGADVEVHPLADGGEGTVEALTLGMGGTI | 60 |
| | | MK+++A DS K SLS+LEA AI+ V GAD P+ADGGEGTV++L G I | |
| Sbjct: | 1 | MKIIIAPDSFKESLSALEAAEAIERGFKSVFPGADYRKLPVADGGEGTVQSLVDATNGRI | 60 |
| Query: | 61 | ETIPVKGPLGEKVHASYGIIPQRQLAIIEMAAAAGITLIATEERNPLHTTTYGVGEMIKD | 120 |
| | | V GPLGE V A +G++ + A+IEMAAA+G+ L+ ++RNPL TTT G GE+I | |
| Sbjct: | 61 | IEQVVTGPLGEPVRAFFGMMGDGRTAVIEMAAASGLHLVPVDKRNPLITTTRGTGELIGA | 120 |
| Query: | 121 | AISKGCRHFIIGIGGSATNDGGAGMLQALGYALLDKDNQEISLGAQGLADLKSISTDKVI | 180 |
| | | A+ G IIGIGGSATNDGGAGM+QALG LLD EI G L+ L SI + | |
| Sbjct: | 121 | ALDAGAERLIIGIGGSATNDGGAGMIQALGGRLLDNSGSEIGPGGGALSQLASIDVSGLD | 180 |
| Query: | 181 | EELKECDFKIACDVTNPLCGAQGCSSIFGPQKGADEDMITKMDTWLSNYATLATSVSEKA | 240 |
| | | L+ ++AC+V NPL G +G +++FGPQKGA DM+ +D +S++A +A | |
| Sbjct: | 181 | SRLRNVKLEVACNVDNPLTGPKGATAVFGPQKGATADMLDVLDQNVSHFADMAEKALGST | 240 |
| Query: | 241 | DATIEGTGAAGGLGFAFLAFTNATLEPGIDIILSEINIEKAISEADLVVTGEGRLDGQTV | 300 |
| | | EG GAAGGLG++ L + A L+ GIDI+L ++ E + +ADLV+TGEGR+D QTV | |
| Sbjct: | 241 | FRDTEGAGAAGGLGWSLLTYLQADLKRGIDIVLEAVDFESIVQDADLVITGEGRIDSQTV | 300 |
| Query: | 301 | MGKAPIGVAKLAKKYGKKVVAFSGSVTEDAILCNQHGIDAFFPIVRRLISLDEAMSKEVA | 360 |
| | | GK PIGVAK AK Y V+ +GS++ D+ QHGIDA F IV + L++A | |
| Sbjct: | 301 | HGKTPIGVAKAAKSYDVPVIGIAGSISRDSNAVYQHGIDALFSIVPGAVPLEDAFEHAAE | 360 |
| Query: | 361 | YKNMKETATQVFRLINL | 377 |
| | | Y M+ TA + I L | |
| Sbjct: | 361 | Y--MERTARDIAASIKL | 375 |

[11812] A related DNA sequence was identified in S. pyogenes <SEQ ID 6679> which encodes the amino acid sequence <SEQ ID 6680>. Analysis of this protein sequence reveals the following:

| Possible site: 49 | | | | |
|---|---|---|---|---|
| >>> Seems to have no N-terminal signal sequence | | | | |
| | INTEGRAL | Likelihood = −0.27 | Transmembrane | 360-376 (360-376) |

```
----- Final Results -----
                              bacterial membrane --- Certainty = 0.1107(Affirmative) < succ>
                                bacterial outside --- Certainty = 0.0000(Not Clear) < succ>
                            bacterial cytoplasm --- Certainty = 0.0000(Not Clear) < succ>
```

[11813] The protein has homology with the following sequences in the databases:

| >GP: AAA57927 GB: U18997 ORF_f408 [Escherichia coli] | | | |
|---|---|---|---|
| Identities = 115/345 (33%), Positives = 182/345 (52%), Gaps = 25/345 (7%) | | | |
| Query: | 24 | MKILVAIDSFKGSVTSPELNTSVAQALLSVDKQLVIETRAIADGGEGSLVALSQTVAGRW | 83 |
| | | MKI++A DS+K S+++ E+ ++ + + + +ADGGEG++ A+ G | |
| Sbjct: | 28 | MKIVIAPDSYKESLSASEVAQAIEKGFREIFPDAQYVSVPVADGGEGTVEAMIAATQGAE | 87 |
| Query: | 84 | HQVKTIDLLRRPIKVAY--YRHAKQAFIESASIIGIDKITSNSVTYAQATSYGLGLAVKD | 141 |
| | | L + ++ K AFIE A+ G++ + + TS G G + | |
| Sbjct: | 88 | RHAWVTGPLGEKVNASWGISGDGKTAFIEMAAASGLELVPAEKRDPLVTTSRGTGELILQ | 147 |
| Query: | 142 | AIQKGATQIEIMLGGTGTSDGGKGFLESLNYDFMT--------GRSYLDTLASPVTLLGL | 193 |
| | | A++ GAT I I +GG+ T+DGG G +++L G L+TL + + + GL | |
| Sbjct: | 148 | ALESGATNIIIGIGGSATNDGGAGMVQALGAKLCDANGNEIGFGGGSLNTL-NDIDISGL | 206 |
| Query: | 194 | T------------DVTNPYHGPQGFAAVFGPQKGGSLSQIEETDQIASNFAKKVFCQTTI | 241 |
| | | DVTNP G G + +FGPQKG S + I E D S++A+ + + | |
| Sbjct: | 207 | DPRLKDCVIRVACDVTNPLVGDNGASRIFGPQKGASEAMIVELDNNLSHYAEVIKKALHV | 266 |
| Query: | 242 | DLQTIPGSGAAGGLGGAIV-LLGGTLTSGFSRIAELLNLDNSLQSCDLVITGEGCLDTQS | 300 |
| | | D++ +PG+GAAGG+G A++ LG L SG + LNL+ + C LVITGEG +D+QS | |
| Sbjct: | 267 | DVKDVPGAGAAGGMGAALMAFLGAELKSGIEIVTTALNLEEHIHDCTLVITGEGRIDSQS | 326 |
| Query: | 301 | QSGKVPVAIARMAKKYQVPTIALCGSVKIETGLAAEDFL-AVFSI | 344 |
| | | GKVP+ +A +AKKY P I + GS+ + G+ + + AVFS+ | |
| Sbjct: | 327 | IHGKVPIGVANVAKKYHKPVIGIAGSLTDDVGVVHQHGIDAVFSV | 371 |

[11814] An alignment of the GAS and GBS proteins is shown below.

| Identities = 128/379 (33%), Positives = 194/379 (50%), Gaps = 23/379 (6%) | | | |
|---|---|---|---|
| Query: | 1 | MKVVVAIDSLKGSLSSLEAGNAIKESINEVISGADVEVHPLADGGEGTVEALTLGMGGTI | 60 |
| | | MK++VAIDS KGS++S E ++ +++ V +E +ADGGEG++ AL+ + G | |
| Sbjct: | 24 | MKILVAIDSFKGSVTSPELNTSVAQALLSVDKQLVIETRAIADGGEGSLVALSQTVAGRW | 83 |
| Query: | 61 | ETIPVKGPLGEKVHASYGIIPQRQLAIIEMAAAAGITLIATEERNPLHTTTYGVGEMIKD | 120 |
| | | + L + +Y + A IE A+ GI I + T+YG+G +KD | |
| Sbjct: | 84 | HQVKTIDLLRRPIKVAY--YRHAKQAFIESASIIGIDKITSNSVTYAQATSYGLGLAVKD | 141 |
| Query: | 121 | AISKGCRHFIIGIGGSATNDGGAGMLQALGYALLDKDNQEISLGAQGLADLKSISTDKVI | 180 |
| | | AI KG I +GG+ T+DGG G L++L Y + G + L ++++ + | |
| Sbjct: | 142 | AIQKGATQIEIMLGGTGTSDGGKGFLESLNYDFMT-----------GRSYLDTLASPVTL | 190 |
| Query: | 181 | EELKECDFKIACDVTNPLCGAQGCSSIFGPQKGADEDMITKMDTWLSNYATLATSVSEKA | 240 |
| | | L DVTNP G QG +++FGPQKG I + D SN+A + | |
| Sbjct: | 191 | LGLT--------DVTNPYHGPQGFAAVFGPQKGGSLSQIEETDQIASNFAKKVFCQTTID | 242 |
| Query: | 241 | DATIEGTGAAGGLGFAFLAFTNATLEPGIDIILSEINIEKAISEADLVVTGEGRLDGQTV | 300 |
| | | TI G+GAAGGLG A + TL G I +N++ ++ DLV+TGEG LD Q+ | |
| Sbjct: | 243 | LQTIPGSGAAGGLGGA-IVLLGGTLTSGFSRIAELLNLDNSLQSCDLVITGEGCLDTQSQ | 301 |
| Query: | 301 | MGKAPIGVAKLAKKYGKKVVAFSGSVTEDAILCNQHGIDAFFPIVRRLISLDEAMSKEVA | 360 |
| | | GK P+ +A++AKKY +A GSV + L + + A F I ++ ISL+ A+ K | |
| Sbjct: | 302 | SGKVPVAIARMAKKYQVPTIALCGSVKIETGLAAEDFL-AVFSIQQQPISLEAAIDKTTT | 360 |
| Query: | 361 | YKNMKETATQVFRLINLYN | 379 |
| | | N+K A + LI +N | |
| Sbjct: | 361 | LSNIKILAANLMLLIAQFN | 379 |

[11815] SEQ ID 6678 (GBS409) was expressed in E. coli as a His-fusion product. SDS-PAGE analysis of total cell extract is shown in FIG. 76 (lane 7; MW 45.4 kDa).

[11816] GBS409-His was purified as shown in FIG. 214, lane 6.

[11817] GBS409d was expressed in E. coli as a His-fusion product. SDS-PAGE analysis of total cell extract is shown in FIG. 166 (lane 3 & 4; MW 35 kDa) and in FIG. 188 (lane 12; MW 35 kDa). Purified protein is shown in FIG. 240, lanes 9-10.

[11818] Based on this analysis, it was predicted that these proteins and their epitopes could be useful antigens for vaccines or diagnostics.

### EXAMPLE 2161

[11819] A DNA sequence (GBSx2278) was identified in S. agalactiae <SEQ ID 6681> which encodes the amino acid sequence <SEQ ID 6682>. Analysis of this protein sequence reveals the following:

```
Possible site: 36
>>> Seems to have no N-terminal signal sequence
----- Final Results -----
                            bacterial cytoplasm --- Certainty = 0.1886(Affirmative) < succ>
                              bacterial membrane --- Certainty = 0.0000(Not Clear) < succ>
                                bacterial outside --- Certainty = 0.0000(Not Clear) < succ>
```

[11820] The protein has homology with the following sequences in the GENPEPT database.

| >GP: AAC21771 GB: U32695 conserved hypothetical protein | | | |
|---|---|---|---|
| [Haemophilus influenzae Rd] | | | |
| Identities = 97/383 (25%), Positives = 175/383 (45%), Gaps = 52/383 (13%) | | | |
| Query: | 1 | MKLRKQLAQQIVTSIKDVCQQDINFINTKGIIFASTNPKRVGEFHEIGLKVAQTGQMIEV | 60 |
| | | M+L K A++IV + +N ++ G+I AS N R+ + H + + +++E+ | |
| Sbjct: | 1 | MQLDKYTAKKIVKRAMKIIHHSVNVMDHDGVIIASGNSTRLNQRHTGAVLALRENRVVEI | 60 |
| Query: | 61 | TD---QESYFGTQAGINIPFYYNCELLATIGISGNPNQVGKYALLAQKMTRLILKEHE-L | 116 |
| | | Q+ F Q GIN+P +Y + + +GISG P QV +YA L + LI+++ L | |
| Sbjct: | 61 | DQALAQKWNFEAQPGINLPIHYLGKNIGVVGISGEPTQVKQYAELVKMTAELIVEQQALL | 120 |
| Query: | 117 | DYLDFGRKNEASIVLHHLVEGRELDYYYLNQFLNQYHLSEKTDYRLLTFEINSQKQKLLL | 176 |
| | | + + R+ + +L L+ LN + ++ + +F++N + +L+ | |
| Sbjct: | 121 | EQESWHRRYKEEFILQ-----------LLHCNLNWKEMEQQA--KFFSFDLNKSRVVVLI | 167 |
| Query: | 177 | S------QSEMSLLNFFDK-----------LDTAIYTFNYPNQYWLLLSDHMFDYYYPNI | 219 |
| | | + +L+N+ ++ LD + + N +LS M | |
| Sbjct: | 168 | KLLNPALDNLQNLINYLEQSEFAQDVAILSLDQVVVLKTWQNS--TVLSAQM------KT | 219 |
| Query: | 220 | LSKFECEKGLYKVGIGQKSSLSLLKR---SYETSILALK-ALKGQQK--VNLVDDLDLEL | 273 |
| | | L + K YK+ +G +L L ++ S++++ L LK + + + D+ L + | |
| Sbjct: | 220 | LLPADYSKQDYKIAVGACLNLPLFEQLPLSFQSAQSTLSYGLKHHPRKGIYVFDEHRLPV | 279 |
| Query: | 274 | LLTSIDSNIKQYVLNKALVNL-SENDKIL---LNSYFKHNLSLKECSQELFIHKNTVQYR | 329 |
| | | LL + + + L K L L SE + IL L YF N L +++LF+H NT++YR | |
| Sbjct: | 280 | LLAGLSHSWQGNELIKPLSPLFSEENAILYKTLQQYFLSNCDLYLTAEKLFVHPNTLRYR | 339 |
| Query: | 330 | LNKIYESTQLNPRNFKDATLLYL | 352 |
| | | LNKI + T L D LYL | |
| Sbjct: | 340 | LNKIEQITGLFFNKIDDKLTLYL | 362 |

[11821] No corresponding DNA sequence was identified in S. pyogenes.

[11822] Based on this analysis, it was predicted that this protein and its epitopes, could be useful antigens for vaccines or diagnostics.

### EXAMPLE 2162

[11823] A DNA sequence (GBSx2279) was identified in S. agalactiae <SEQ ID 6683> which encodes the amino acid sequence <SEQ ID 6684>. Analysis of this protein sequence reveals the following:

```
Possible site: 15
>>> Seems to have no N-terminal signal sequence
----- Final Results -----
                            bacterial cytoplasm --- Certainty = 0.0290(Affirmative) < succ>
                              bacterial membrane --- Certainty = 0.0000(Not Clear) < succ>
                                bacterial outside --- Certainty = 0.0000(Not Clear) < succ>
```

[11824] The protein has homology with the following sequences in the GENPEPT database.

| >GP: AAF89979 GB: AF206272 beta-glucosidase [Streptococcus mutans] | | | |
|---|---|---|---|
| Identities = 334/475 (70%), Positives = 392/475 (82%), Gaps = 8/475 (1%) | | | |
| Query: | 4 | FPKHFLWGGAVAANQVEGAFRTDGKGLSVQDVLPNGGLGD-------FTAKPTPDNLKLE | 56 |
| | | FP++FLWGGA AANQ EGA+ DGKGLSVQDV P GG+ T KPT DNLKL | |
| Sbjct: | 6 | FPENFLWGGATAANQFEGAYNQDGKGLSVQDVTPKGGVAQSGSSSPLITEKPTEDNLKLV | 65 |
| Query: | 57 | AIDFYHNYKNDIKLFAEMGFKVFRTSIAWSRIFPNGDDSAPNEAGLQFYDNLFDELLKYN | 116 |
| | | IDFY+ YK DI LFAEMGFKVFR SIAW+RIFPNGDD PNEAGL FYD +FDEL KY+ | |
| Sbjct: | 66 | GIDFYNRYKEDIALFAEMGFKVFRLSIAWTRIFPNGDDLEPNEAGLAFYDKVFDELAKYD | 125 |
| Query: | 117 | IEPLVTLSHYETPLHLAKTYNGWADRRLIAFFEKFAQTVMERYKDKVKYWLTFNEVNSIL | 176 |
| | | IEPLVTLSHYETPLHLA+ YNGWA+R LIAF+E++A+TV RYKDKVKYWLTFNEVNS+L | |
| Sbjct: | 126 | IEPLVTLSHYETPLHLARKYNGWANRELIAFYERYARTVFTRYKDKVKYWLTFNEVNSVL | 185 |
| Query: | 177 | HMPFTSGAIMTDKSQLSPQELYQAIHHELVASARVTKLGRSINPNFKIGCMILAMPAYPM | 236 |
| | | H PF SG I+TD QLS Q+LYQA+HHELV SA TK+G INP+FKIGCM+LAMPAYPM | |
| Sbjct: | 186 | HAPFMSGGIITDPEQLSKQDLYQAVHHELVVSALATKVGHEINPDFKIGCMVLAMPAYPM | 245 |
| Query: | 237 | TSDPRDVLAARQFEQHNLLFSDIHVRGKYPTYIQSYFKNNGIKIKFEEGDEEVLAQNTVD | 296 |
| | | T+DP D LA R+FE N LFSD+H RGKYP YI+ YFK+N I IK EGD+E++ +NTVD | |
| Sbjct: | 246 | TADPLDQLAVREFENQNYLFSDLHARGKYPNYIKRYFKDNNIDIKMGEGDKELMLENTVD | 305 |
| Query: | 297 | FLSFSYYMSVTQAYDFENYQSGQGNILGGLTNPHLTTSEWGWQIDPIGLRLVLNQYYERY | 356 |
| | | F+SFSYYMSV A++ E+Y SG+GN+LGGL+NP+L SEWGWQIDP+GLRLVLN Y+RY | |
| Sbjct: | 306 | FISFSYYMSVAAAHNPEDYNSGRGNVLGGLSNPYLQASEWGWQIDPVGLRLVLNDSYDRY | 365 |
| Query: | 357 | QIPLFIVENGLGAKDQLIETLDGDYTVEDDYRIDYMNQHLVQVAKAIEDGVEIMGYTSWG | 416 |
| | | Q+PLFIVENGLGAKD L++ DG TVEDDYRIDY+ +HL+QV +A++DGV+++GYT+WG | |
| Sbjct: | 366 | QLPLFIVENGLGAKDVLVQGPDGP-TVEDDYRIDYLQKHLMQVGEALQDGVDLLGYTTWG | 424 |
| Query: | 417 | CIDCVSMSTAQLSKRYGLIYVDRNDDGTGSLQRYKKKSFGWYQKVIKTNGQSLFE | 471 |
| | | ID VS ST +LSKRYG IYV NDDG+GSL RYKKKSF WY+KVI+TNG SL+E | |
| Sbjct: | 425 | PIDLVSESTVELSKRYGFIYVACNDDGSGSLARYKKKSFAWYKKVIETNGASLYE | 479 |

[11825] A related DNA sequence was identified in S. pyogenes <SEQ ID 5287> which encodes the amino acid sequence <SEQ ID 5288>. Analysis of this protein sequence reveals the following:

```
Possible site: 15
>>> Seems to have no N-terminal signal sequence
----- Final Results -----
                            bacterial cytoplasm --- Certainty = 0.0763(Affirmative) < succ>
                              bacterial membrane --- Certainty = 0.0000(Not Clear) < succ>
                                bacterial outside --- Certainty = 0.0000(Not Clear) < succ>
```

[11826] An alignment of the GAS and GBS proteins is shown below.

| Identities = 390/469 (83%), Positives = 423/469 (90%) | | | |
|---|---|---|---|
| Query: | 1 | MTVFPKHFLWGGAVAANQVEGAFRTDGKGLSVQDVLPNGGLGDFTAKPTPDNLKLEAIDF | 60 |
| | | M +FPK FLWGGAVAANQVEGAF D KGLSVQDVLPNGGLG++T PT DNL LEAIDF | |
| Sbjct: | 1 | MGIFPKDFLWGGAVAANQVEGAFEADAKGLSVQDVLPNGGLGEWTDSPTSDNLTLEAIDF | 60 |
| Query: | 61 | YHNYKNDIKLFAEMGFKVFRTSIAWSRIFPNGDDSAPNEAGLQFYDNLFDELLKYNIEPL | 120 |
| | | YH YK DI LFAEMGFKVFRTSIAWSRIFPNGDD PNEAGLQFYD+LFDELL Y IEPL | |
| Sbjct: | 61 | YHRYKEDIALFAEMGFKVFRTSIAWSRIFPNGDDDQPNEAGLQFYDDLFDELLNYGIEPL | 120 |
| Query: | 121 | VTLSHYETPLHLAKTYNGWADRRLIAFFEKFAQTVMERYKDKVKYWLTFNEVNSILHMPF | 180 |
| | | VTLSHYETPLHLAK YNGW DRRLI FFE+FAQTVMERYKDKVKYWLTFNEVNSILHMPF | |
| Sbjct: | 121 | VTLSHYETPLHLAKAYNGWTDRRLIGFFERFAQTVMERYKDKVKYWLTFNEVNSILHMPF | 180 |
| Query: | 181 | TSGAIMTDKSQLSPQELYQAIHHELVASARVTKLGRSINPNFKIGCMILAMPAYPMTSDP | 240 |
| | | TSG IMT+K +LS Q+LYQAIHHELVASA VTKL INP+ K+GCMILAMPAYPMTSDP | |
| Sbjct: | 181 | TSGGIMTEKEKLSLQDLYQAIHHELVASASVTKLAHEINPDVKVGCMILAMPAYPMTSDP | 240 |
| Query: | 241 | RDVLAARQFEQHNLLFSDIHVRGKYPTYIQSYFKNNGIKIKFEEGDEEVLAQNTVDFLSF | 300 |
| | | RD+LAA FE NLLFSDIHVRGKYP+YI+SYFK NGI+I FE+GD+E+LA++TVDFLSF | |
| Sbjct: | 241 | RDILAAHAFENLNLLFSDIHVRGKYPSYIKSYFKENGIEIVFEDGDKELLAEHTVDFLSF | 300 |
| Query: | 301 | SYYMSVTQAYDFENYQSGQGNILGGLTNPHLTTSEWGWQIDPIGLRLVLNQYYERYQIPL | 360 |
| | | SYYMSVTQA++ E Y SGQGNILGGL+NP+L +SEWGWQIDPIGLRLVLNQYY+RYQIPL | |
| Sbjct: | 301 | SYYMSVTQAHNPEAYTSGQGNILGGLSNPYLESSEWGWQIDPIGLRLVLNQYYDRYQIPL | 360 |
| Query: | 361 | FIVENGLGAKDQLIETLDGDYTVEDDYRIDYMNQHLVQVAKAIEDGVEIMGYTSWGCIDC | 420 |
| | | FIVENGLGAKDQL++T DG TV DDYRIDYM+QHLVQVAKAIEDGVE+MGYTSWGCIDC | |
| Sbjct: | 361 | FIVENGLGAKDQLVQTADGSMTVHDDYRIDYMSQHLVQVAKAIEDGVEVMGYTSWGCIDC | 420 |
| Query: | 421 | VSMSTAQLSKRYGLIYVDRNDDGTGSLQRYKKKSFGWYQKVIKTNGQSL | 469 |
| | | VSMSTAQLSKRYG IYVDRNDDGTG L RYKKKSF WY++VI+TNG+ L | |
| Sbjct: | 421 | VSMSTAQLSKRYGFIYVDRNDDGTGQLTRYKKKSFDWYRQVIQTNGRYL | 469 |

[11827] Based on this analysis, it was predicted that these proteins and their epitopes could be useful antigens for vaccines or diagnostics.

### EXAMPLE 2163

[11828] A DNA sequence (GBSx2280) was identified in S. agalactiae <SEQ ID 6685> which encodes the amino acid sequence <SEQ ID 6686>. Analysis of this protein sequence reveals the following:

| Possible site: 16 | | | | |
|---|---|---|---|---|
| >>> Seems to have no N-terminal signal sequence | | | | |
| | INTEGRAL | Likelihood = −10.40 | Transmembrane | 247-263 (241-273) |
| | INTEGRAL | Likelihood = −8.55 | Transmembrane | 429-445 (424-450) |
| | INTEGRAL | Likelihood = −4.88 | Transmembrane | 285-301 (280-303) |
| | INTEGRAL | Likelihood = −3.82 | Transmembrane | 207-223 (205-225) |
| | INTEGRAL | Likelihood = −3.40 | Transmembrane | 113-129 (112-139) |
| | INTEGRAL | Likelihood = −1.97 | Transmembrane | 309-325 (305-328) |
| | INTEGRAL | Likelihood = −1.59 | Transmembrane | 395-411 (395-411) |
| | INTEGRAL | Likelihood = −1.49 | Transmembrane | 174-190 (173-193) |

```
----- Final Results -----
                              bacterial membrane --- Certainty = 0.5161(Affirmative) < succ>
                                bacterial outside --- Certainty = 0.0000(Not Clear) < succ>
                            bacterial cytoplasm --- Certainty = 0.0000(Not Clear) < succ>
```

[11829] The protein has homology with the following sequences in the GENPEPT database.

| >GP: CAA84286 GB: Z34526 beta-glucoside permease [Bacillus subtilis] | | | |
|---|---|---|---|
| Identities = 225/594 (37%), Positives = 351/594 (58%), Gaps = 11/594 (1%) | | | |
| Query: | 4 | YQETAKAILAAVGGEKNIQHVTHCVTRLRLVLDNDEIVNDQVIKTIPNVIGVMRKNDQYQ | 63 |
| | | Y + +K IL VGGE+N+Q V HC+TRLR L ++ + ++ +P V+G +Q+Q | |
| Sbjct: | 3 | YDKLSKDILQLVGGEENVQRVIHCMTRLRFNLHDNAKADRSQLEQLPGVMGTNISGEQFQ | 62 |
| Query: | 64 | IILGNDVNNYYNAFLALGHFENTTREFSSQKKSSILEKLIETIAGVITPLIPALLGGGML | 123 |
| | | II+GNDV Y A + + + SS +K ++L + + I+GV TP++PA+ G GM+ | |
| Sbjct: | 63 | IIIGNDVPKVYQAIVRHSNLSDEKSAGSSSQKKNVLSAVFDVISGVFTPILPAIAGAGMI | 122 |
| Query: | 124 | KVIGILLPMLGIASSSSQTVAFINFFGDAAYYFMPIMIAYSAASRFKVTPVLAATVGGIL | 183 |
| | | K + L G + SQ + GD A+YF+P+++A SAA +F P +AA + + | |
| Sbjct: | 123 | KGLVALAVTFGWMAEKSQVHVILTAVGDGAFYFLPLLLAMSAARKFGSNPYVAAAIAAAI | 182 |
| Query: | 184 | LHPAFVTMVAEGKPLSLFGAPVTLASYGSSVIPILIMVFLMQYIERWINKIVPSVMKSFL | 243 |
| | | LHP ++ GKP+S G PVT A+Y S+VIPIL+ +++ Y+E+WI++ + +K + | |
| Sbjct: | 183 | LHPDLTALLGAGKPISFIGLPVTAATYSSTVIPILLSIWIASYVEKWIDRFTHASLKLIV | 242 |
| Query: | 244 | QPTLIILISGFLALVVVGPLGVIIGKGLSSAMLSIYHVAPWLALSILGAIMPLVVMTGMH | 303 |
| | | PT +LI L L+ VGPLG I+G+ LSS + ++ A +A+ +L L++MTGMH | |
| Sbjct: | 243 | VPTFTLLIVVPLTLITVGPLGAILGEYLSSGVNYLFDHAGLVAMILLAGTFSLIIMTGMH | 302 |
| Query: | 304 | WAFAPIFLAASVATPDVLILPAMLASNLAQGAASLAVAVKAKQKQTRQVAFAAGLSALLA | 363 |
| | | +AF PI + +LPAM +N+ Q AS AV ++++ K+ + +A ++AL+ | |
| Sbjct: | 303 | YAFVPIMINNIAQNGHDYLLPAMFLANMGQAGASFAVFLRSRNKKFKSLALTTSITALM- | 361 |
| Query: | 364 | GITEPALYGVTLKFKKPLYAAMISGGLVGAYIGLVNIASYTFVVPSIIGLPQYINPQGGN | 423 |
| | | GITEPA+YGV ++ KKP AA+I G GA+ G+ +ASY +V GLP I G | |
| Sbjct: | 362 | GITEPAMYGVNMRLKKPFAAALIGGAAGGAFYGMTGVASY--IVGGNAGLPS-IPVFIGP | 418 |
| Query: | 424 | NFSNAVIAAIATIILTFIITWFLGIDEGENEKSSINAQEHTHIRSGLSKKETLYSPMVGN | 483 |
| | | F A+I + + LG ++ ++ S Q H S +E ++SP+ G | |
| Sbjct: | 419 | TFIYAMIGLVIAFAAETAAAYLLGFEDVPSDGSQ---QPAVHEGS----REIIHSPIKGE | 471 |
| Query: | 484 | VLPLSKVPDETFSSKLLGEGLAITPSVGEVYAPFDGEIISLFPTKHAIALKDDKGVEVLI | 543 |
| | | V LS+V D FS+ ++G+G AI P GEV +P G + ++F TKHAI + D+G E+LI | |
| Sbjct: | 472 | VKALSEVKDGVFSAGVMGKGFAIEPEEGEVVSPVRGSVTTIFKTKHAIGITSDQGAEILI | 531 |
| Query: | 544 | HIGIDTVELNGEGFEQLVKVGDFVKRGQLLLRMDIDFISSKGYSLISPVVVTNS | 597 |
| | | HIG+DTV+L G+ F +K GD V G L+ D++ I + GY +I+PV+VTN+ | |
| Sbjct: | 532 | HIGLDTVKLEGQWFTAHIKEGDKVAPGDPLVSFDLEQIKAAGYDVITPVIVTNT | 585 |

[11830] A related DNA sequence was identified in S. pyogenes <SEQ ID 2883> which encodes the amino acid sequence <SEQ ID 2884>. Analysis of this protein sequence reveals the following:

| Possible site: 20 | | | | |
|---|---|---|---|---|
| >>> Seems to have no N-terminal signal sequence | | | | |
| | INTEGRAL | Likelihood = −10.40 | Transmembrane | 246-262 (240-271) |
| | INTEGRAL | Likelihood = −6.26 | Transmembrane | 284-300 (279-304) |
| | INTEGRAL | Likelihood = −4.14 | Transmembrane | 173-189 (172-194) |
| | INTEGRAL | Likelihood = −3.24 | Transmembrane | 112-128 (111-137) |
| | INTEGRAL | Likelihood = −2.39 | Transmembrane | 428-444 (425-445) |
| | INTEGRAL | Likelihood = −2.13 | Transmembrane | 383-399 (380-401) |
| | INTEGRAL | Likelihood = −1.97 | Transmembrane | 308-324 (304-327) |

```
----- Final Results -----
                              bacterial membrane --- Certainty = 0.5161(Affirmative) < succ>
                                bacterial outside --- Certainty = 0.0000(Not Clear) < succ>
                            bacterial cytoplasm --- Certainty = 0.0000(Not Clear) < succ>
```

[11831] An alignment of the GAS and GBS proteins is shown below.

| Identities = 508/619 (82%), Positives = 561/619 (90%), Gaps = 1/619 (0%) | | | |
|---|---|---|---|
| Query: | 4 | YQETAKAILAAVGGEKNIQHVTHCVTRLRLVLDNDEIVNDQVIKTIPNVIGVMRKNDQYQ | 63 |
| | | YQETAKAILAAVGG+ NIQ VTHCVTRLRLVL NDE V DQ +K I NVIGVMRKN QYQ | |
| Sbjct: | 3 | YQETAKAILAAVGGKTNIQRVTHCVTRLRLVLKNDEKVKDQQVKAISNVIGVMRKNGQYQ | 62 |
| Query: | 64 | IILGNDVNNYYNAFLALGHFENTTREFSSQKKSSILEKLIETIAGVITPLIPALLGGGML | 123 |
| | | IILGNDVNNYY AFL+LGHF+N + SS+ K SILE+LIETIAGVITPLIPALLGGGML | |
| Sbjct: | 63 | IILGNDVNNYYQAFLSLGHFDNQDEDHSSKAKGSILERLIETIAGVITPLIPALLGGGML | 122 |
| Query: | 124 | KVIGILLPMLGIASSSSQTVAFINFFGDAAYYFMPIMIAYSAASRFKVTPVLAATVGGIL | 183 |
| | | KV+GILLPMLG+AS+ SQTVAFINFFGDAAYYFMP+MIAYSAA+RFKVTPVLAAT+ GIL | |
| Sbjct: | 123 | KVVGILLPMLGLASADSQTVAFINFFGDAAYYFMPVMIAYSAAARFKVTPVLAATIAGIL | 182 |
| Query: | 184 | LHPAFVTMVAEGKPLSLFGAPVTLASYGSSVIPILIMVFLMQYIERWINKIVPSVMKSFL | 243 |
| | | LHPAFV MVAEGKPL+LFGAPVT ASYGSSVIPIL+MV+LMQYIE+W+N++VPSVMKSFL | |
| Sbjct: | 183 | LHPAFVAMVAEGKPLTLFGAPVTPASYGSSVIPILMMVYLMQYIEKWVNRLVPSVMKSFL | 242 |
| Query: | 244 | QPTLIILISGFLALVVVGPLGVIIGKGLSSAMLSIYHVAPWLALSILGAIMPLVVMTGMH | 303 |
| | | QPTLIILISGFLALVVVGPLGVIIG+GLS+ ML+IYHVAPWLAL+ILGAIMPLVVMTGMH | |
| Sbjct: | 243 | QPTLIILISGFLALVVVGPLGVIIGQGLSNTMLAIYHVAPWLALAILGAIMPLVVMTGMH | 302 |
| Query: | 304 | WAFAPIFLAASVATPDVLILPAMLASNLAQGAASLAVAVKAKQKQTRQVAFAAGLSALLA | 363 |
| | | WAFAPIFLAASVATPDVLILPAMLASNLAQGAASLAVA K KQKQTRQVA AAG+SALLA | |
| Sbjct: | 303 | WAFAPIFLAASVATPDVLILPAMLASNLAQGAASLAVAFKTKQKQTRQVALAAGISALLA | 362 |
| Query: | 364 | GITEPALYGVTLKFKKPLYAAMISGGLVGAYIGLVNIASYTFVVPSIIGLPQYINPQGGN | 423 |
| | | GITEPALYGVTLKFKKPLYAAMISGGLVGA+IG VNIASYTFVVPSIIGLPQYINP GG | |
| Sbjct: | 363 | GITEPALYGVTLKFKKPLYAAMISGGLVGAFIGFVNIASYTFVVPSIIGLPQYINPSGGA | 422 |
| Query: | 424 | NFSNAVIAAIATIILTFIITWFLGIDEGENEKSSINAQEHTHIRSGLSKKETLYSPMVGN | 483 |
| | | NF+NA+IA ATI+L F +TWF+GIDE E+ K A + + ++SGLS K+TLY+PM G | |
| Sbjct: | 423 | NFTNALIAGTATIVLAFSLTWFMGIDE-ESPKQVSVAADMSQVKSGLSTKQTLYAPMTGE | 481 |
| Query: | 484 | VLPLSKVPDETFSSKLLGEGLAITPSVGEVYAPFDGEIISLFPTKHAIALKDDKGVEVLI | 543 |
| | | +L LS+VPDETFSSKLLGEG AI PS GEVYAPFDGE+I+ FPTKHA+ALK+ +GVEVLI | |
| Sbjct: | 482 | MLFLSEVPDETFSSKLLGEGFAILPSEGEVYAPFDGEVITFFPTKHAVALKNTRGVEVLI | 541 |
| Query: | 544 | HIGIDTVELNGEGFEQLVKVGDFVKRGQLLLRMDIDFISSKGYSLISPVVVTNSIDQLEI | 603 |
| | | H+GIDTVEL G+GFEQLV VGD VKRGQ LL+MDIDFI+SKGYSLISPVVVTNS +QLEI | |
| Sbjct: | 542 | HVGIDTVELKGQGFEQLVSVGDVVKRGQALLKMDIDFITSKGYSLISPVVVTNSAEQLEI | 601 |
| Query: | 604 | IVKDAETMVTNEDDLLVIL | 622 |
| | | I++D + MVT ED LLVIL | |
| Sbjct: | 602 | IIQDDKKMVTKEDALLVIL | 620 |

[11832] Based on this analysis, it was predicted that these proteins and their epitopes could be useful antigens for vaccines or diagnostics.

### EXAMPLE 2164

[11833] A DNA sequence (GBSx2281) was identified in S. agalactiae <SEQ ID 6687> which encodes the amino acid sequence <SEQ ID 6688>. Analysis of this protein sequence reveals the following:

```
Possible site: 18
>>> Seems to have no N-terminal signal sequence
----- Final Results -----
                            bacterial cytoplasm --- Certainty = 0.1148(Affirmative) < succ>
                              bacterial membrane --- Certainty = 0.0000(Not Cleat) < succ>
                                bacterial outside --- Certainty = 0.0000(Not Clear) < succ>
```

[11834] The protein has homology with the following sequences in the GENPEPT database.

| >GP: CAB15944 GB: Z99124 transcriptional antiterminator (BglG family) | | | |
|---|---|---|---|
| [Bacillus subtilis] | | | |
| Identities = 118/275 (42%), Positives = 183/275 (65%) | | | |
| Query: | 1 | MIIKRVLNHNAVISVTHQGLDVLLMGKGIAFKKRIGDRINSDAIEKSFVLKNSDNMNRFT | 60 |
| | | M I +V+N+N + V QG ++++MG+G+AF+K+ GD ++ IEK F L N D +F | |
| Sbjct: | 1 | MKIAKVINNNVISVVNEQGKELVVMGRGLAFQKKSGDDVDEARIEKVFTLDNKDVSEKFK | 60 |
| Query: | 61 | ELFITVPEEVVACSERIINLGKIKLGKNLDEILYINLTDHIHSAIERHEQGMVIQNPLRL | 120 |
| | | L +P E + SE II+ K++LGK L++ +Y++LTDHI+ AI+R+++G+ I+N L | |
| Sbjct: | 61 | TLLYDIPIECMEVSEEIIHYAKLQLGKKLNDSIYVSLTDHINFAIQRNQKGLDIKNALLW | 120 |
| Query: | 121 | EIQRYYPDEYSIGMKALELIKDELGICLTIDESAFIAMHFVNAGLDNPFNEAHKITEIVS | 180 |
| | | E +R Y DE++IG +AL ++K++ G+ L DE+ FIA+H VNA L+ IT+++ | |
| Sbjct: | 121 | ETKRLYKDEFAIGKEALVMVKNKTGVSLPEDEAGFIALHIVNAELNEEMPNIINITKVMQ | 180 |
| Query: | 181 | YIEQKVKIDFRTELDESSIDYYRFMTHTKLFAQRVLSGMKYEDDDADLLLVVKKKYPREY | 240 |
| | | I VK F+ E +E S+ YYRF+TH K FAQR+ +G E D LL VK+KY R Y | |
| Sbjct: | 181 | EILSIVKYHFKIEFNEESLHYYRFVTHLKFFAQRLFNGTHMESQDDFLLDTVKEKYHRAY | 240 |
| Query: | 241 | KCVKEIGNNMAIQYQYQLNSSELLYLTVHVKRLVK | 275 |
| | | +C K+I + +Y+++L S ELLYLT+H++R+VK | |
| Sbjct: | 241 | ECTKKIQTYIEREYEHKLTSDELLYLTIHIERVVK | 275 |

[11835] A related DNA sequence was identified in S. pyogenes <SEQ ID 6689> which encodes the amino acid sequence <SEQ ID 6690>. Analysis of this protein sequence reveals the following:

```
Possible site: 32
>>> Seems to have no N-terminal signal sequence
----- Final Results -----
                            bacterial cytoplasm --- Certainty = 0.0680(Affirmative) < succ>
                              bacterial membrane --- Certainty = 0.0000(Not Clear) < succ>
                                bacterial outside --- Certainty = 0.0000(Not Clear) < succ>
```

[11836] An alignment of the GAS and GBS proteins is shown below.

| Identities = 220/279 (78%), Positives = 246/279 (87%) | | | |
|---|---|---|---|
| Query: | 1 | MIIKRVLNHNAVISVTHQGLDVLLMGKGIAFKKRIGDRINSDAIEKSFVLKNSDNMNRFT | 60 |
| | | M+IKRVLNHNA IS HQGLD+LLMGKGI F K++GD I +AIE SFVLKNSDNMNRFT | |
| Sbjct: | 1 | MLIKRVLNHNAAISTNHQGLDILLMGKGITFGKKVGDSIELNAIETSFVLKNSDNMNRFT | 60 |
| Query: | 61 | ELFITVPEEVVACSERIINLGKIKLGKNLDEILYINLTDHIHSAIERHEQGMVIQNPLRL | 120 |
| | | ELFITVP+EVVACSERIINLGKIKLGK LDEILYINLTDHIHSAIERHEQGM+I NPLR | |
| Sbjct: | 61 | ELFITVPQEVVACSERIINLGKIKLGKTLDEILYINLTDHIHSAIERHEQGMLIHNPLRW | 120 |
| Query: | 121 | EIQRYYPDEYSIGMKALELIKDELGICLTIDESAFIAMHFVNAGLDNPFNEAHKITEIVS | 180 |
| | | EIQRYYPDEYS+G+KALELI+ LG+ L IDE+AFIAMHFVNA LD PF E H++TEIVS | |
| Sbjct: | 121 | EIQRYYPDEYSLGVKALELIERNLGVTLAIDEAAFIAMHFVNASLDTPFKEPHRLTEIVS | 180 |
| Query: | 181 | YIEQKVKIDFRTELDESSIDYYRFMTHTKLFAQRVLSGMKYEDDDADLLLVVKKKYPREY | 240 |
| | | YIEQK+K DF+TELD++SIDYYRFMTH KLFAQRVLS M Y+DDDA+LLLVVK KYP+EY | |
| Sbjct: | 181 | YIEQKIKTDFKTELDDTSIDYYRFMTHIKLFAQRVLSQMSYDDDDAELLLVVKTKYPKEY | 240 |
| Query: | 241 | KCVKEIGNNMAIQYQYQLNSSELLYLTVHVKRLVKNLKE | 279 |
| | | +CV +I + +Y Y LNSSELLYLTVHVKRLVK+LKE | |
| Sbjct: | 241 | RCVLDISEEIKKRYNYHLNSSELLYLTVHVKRLVKHLKE | 279 |

[11837] Based on this analysis, it was predicted that these proteins and their epitopes could be useful antigens for vaccines or diagnostics.

### EXAMPLE 2165

[11838] A DNA sequence (GBSx2282) was identified in S. agalactiae <SEQ ID 6691> which encodes the amino acid sequence <SEQ ID 6692>. Analysis of this protein sequence reveals the following:

```
Possible site: 16
>>> Seems to have no N-terminal signal sequence
----- Final Results -----
                            bacterial cytoplasm --- Certainty = 0.1104(Affirmative) < succ>
                              bacterial membrane --- Certainty = 0.0000(Not Clear) < succ>
                                bacterial outside --- Certainty = 0.0000(Not Clear) < succ>
```

[11839] A related GBS nucleic acid sequence <SEQ ID 9335> which encodes amino acid sequence <SEQ ID 9336> was also identified.

[11840] A related DNA sequence was identified in S. pyogenes <SEQ ID 6693> which encodes the amino acid sequence <SEQ ID 6694>. Analysis of this protein sequence reveals the following:

```
Possible site: 23
>>> Seems to have no N-terminal signal sequence
----- Final Results -----
                            bacterial cytoplasm --- Certainty = 0.3314(Affirmative) < succ>
                              bacterial membrane --- Certainty = 0.0000(Not Clear) < succ>
                                bacterial outside --- Certainty = 0.0000(Not Clear) < succ>
```

[11841] An alignment of the GAS and GBS proteins is shown below.

| Identities = 143/178 (80%), Positives = 161/178 (90%) | | | |
|---|---|---|---|
| Query: | 1 | MTLHHDKHHATYVANANAALEKHPEIGEDLEALLADVSQIPEDIRQAVINNGGGHLNHAL | 60 |
| | | MTLHHDKHHATYVAN NAALEKHPEIGE+LE LLADV++IPEDIRQ +INNGGGHLNHAL | |
| Sbjct: | 24 | MTLHHDKHHATYVANTNAALEKHPEIGENLEELLADVTKIPEDIRQTLINNGGGHLNHAL | 83 |
| Query: | 61 | FWELMSPEETQISQELSEDINATFGSFEDFKAAFTAAATGRFGSGWAWLVVNAEGKLEVL | 120 |
| | | FWEL+SPE+ ++ ++++ I+ FGSF+ FK FTAAATGRFGSGWAWLVVN EG+LE+ | |
| Sbjct: | 84 | FWELLSPEKQDVTPDVAQAIDDAFGSFDAFKEQFTAAATGRFGSGWAWLVVNKEGQLEIT | 143 |
| Query: | 121 | STANQDTPIMEGKKPILGLDVWEHAYYLNYRNVRPNYIKAFFEIINWNKVNELYQAAK | 178 |
| | | STANQDTPI EGKKPIL LDVWEHAYYLNYRNVRPNYIKAFFEI+NW KV+ELYQAAK | |
| Sbjct: | 144 | STANQDTPISEGKKPILALDVWEHAYYLNYRNVRPNYIKAFFEIVNWKKVSELYQAAK | 201 |

[11842] Based on this analysis, it was predicted that these proteins and their epitopes could be useful antigens for vaccines or diagnostics.

### EXAMPLE 2166

[11843] A DNA sequence (GBSx2283) was identified in S. agalactiae <SEQ ID 6695> which encodes the amino acid sequence <SEQ ID 6696>. Analysis of this protein sequence reveals the following:

```
Possible site: 39
>>> Seems to have no N-terminal signal sequence
----- Final Results -----
                            bacterial cytoplasm --- Certainty = 0.3331(Affirmative) < succ>
                              bacterial membrane --- Certainty = 0.0000(Not Clear) < succ>
                                bacterial outside --- Certainty = 0.0000(Not Clear) < succ>
```

[11844] The protein has no significant homology with any sequences in the GENPEPT database.

[11845] No corresponding DNA sequence was identified in S. pyogenes.

[11846] Based on this analysis, it was predicted that this protein and its epitopes, could be useful antigens for vaccines or diagnostics.

### EXAMPLE 2167

[11847] A DNA sequence (GBSx2284) was identified in S. agalactiae <SEQ ID 6697> which encodes the amino acid sequence <SEQ ID 6698>. This protein is predicted to be DNA polymerase III delta subunit. Analysis of this protein sequence reveals the following:

```
Possible site: 32
>>> Seems to have no N-terminal signal sequence
----- Final Results -----
                            bacterial cytoplasm --- Certainty = 0.0511(Affirmative) < succ>
                              bacterial membrane --- Certainty = 0.0000(Not Clear) < succ>
                                bacterial outside --- Certainty = 0.0000(Not Clear) < succ>
```

[11848] A related GBS nucleic acid sequence <SEQ ID 9743> which encodes amino acid sequence <SEQ ID 9744> was also identified.

[11849] A related DNA sequence was identified in S. pyogenes <SEQ ID 6699> which encodes the amino acid sequence <SEQ ID 6700>. Analysis of this protein sequence reveals the following:

| Possible site: 43 | | | | |
|---|---|---|---|---|
| >>> Seems to have no N-terminal signal sequence | | | | |
| | INTEGRAL | Likelihood = −1.22 | Transmembrane | 250-266 (249-266) |

```
----- Final Results -----
                              bacterial membrane --- Certainty = 0.1489(Affirmative) < succ>
                                bacterial outside --- Certainty = 0.0000(Not Clear) < succ>
                            bacterial cytoplasm --- Certainty = 0.0000(Not Clear) < succ>
```

[11850] An alignment of the GAS and GBS proteins is shown below.

| Identities = 222/340 (65%), Positives = 282/340 (82%) | | | |
|---|---|---|---|
| Query: | 1 | MIAIEEIGRITPDNLGLVTVLAGEDLGQYAQMKEKLFQVIGFNKDDLAYSYFDLSEEDYQ | 60 |
| | | MIAIE+I +++ +NLGL+T++ G+D+GQY+Q+K +L + I F+KDDLAYSYFD+SE YQ | |
| Sbjct: | 1 | MIAIEKIEKLSKENLGLITLVTGDDIGQYSQLKSRLMEQIAFDKDDLAYSYFDMSEAAYQ | 60 |
| Query: | 61 | NAELDLESLPFLSDYKVVIFDQFQDITTDKKTYLDEQAMKRFEAYLQNPVDTTRLVICAP | 120 |
| | | +AE+DL SLPF ++ KVVIFD DITT+KK++L E+ +K FEAYL+NP++TTRL+I AP | |
| Sbjct: | 61 | DAEMDLVSLPFFAEQKVVIFDHLLDITTNKKSFLKEKDLKAFEAYLENPLETTRLIIFAP | 120 |
| Query: | 121 | GKLDGKRRLVKLLKRDARVLEANTLKESDLKTYFQKYAHQEGLVFEAGVFDELLIKSNYD | 180 |
| | | GKLD KRRLVKLLKRDA VLEAN LKE++L+TYFQKY+HQ GL FE+G FD+LL+KSN D | |
| Sbjct: | 121 | GKLDSKRRLVKLLKRDALVLEANPLKSAELRTYFQKYSHQLGLGFESGAFDQLLLKSNDD | 180 |
| Query: | 181 | FSDTLTNIAFLKSYKTDGHISSNDVREAIPKSLQDNIFDLTQDVLLGRIDLARDLVRDLR | 240 |
| | | FS + N+AFLK+YK G+IS D+ +AIPKSLQDNIFDLT+ VL G+ID ARDL+ DLR | |
| Sbjct: | 181 | FSQIMKNMAFLKAYKKTGNISLTDIEQAIPKSLQDNIFDLTRLVLGGKIDAARDLIHDLR | 240 |
| Query: | 241 | LQGEDEIKLIAIMLGQFRMFLQVKILASKGKSESQIVSELSHYIGRKINPYQVKFAVRDS | 300 |
| | | L GED+IKLIAIMLGQFR+FLQ+ ILA K+E Q+V LS +GR++NPYQVK+A++DS | |
| Sbjct: | 241 | LSGEDDIKLIAIMLGQFRLFLQLTILARDVKNEQQLVISLSDILGRRVNPYQVKYALKDS | 300 |
| Query: | 301 | RNLPLAFLKEAIRILIETDYAIKRGTYDKDYLFDLALLKI | 340 |
| | | R L LAFL A++ LIETDY IK G Y+K YL D+ALLKI | |
| Sbjct: | 301 | RTLSLAFLTGAVKTLIETDYQIKTGLYEKSYLVDIALLKI | 340 |

[11851] Based on this analysis, it was predicted that these proteins and their epitopes could be useful antigens for vaccines or diagnostics.

### EXAMPLE 2168

[11852] A DNA sequence (GBSx2285) was identified in S. agalactiae <SEQ ID 6701> which encodes the amino acid sequence <SEQ ID 6702>. Analysis of this protein sequence reveals the following:

```
Possible site: 37
>>> Seems to have no N-terminal signal sequence
----- Final Results -----
                            bacterial cytoplasm --- Certainty = 0.3071(Affirmative) < succ>
                              bacterial membrane --- Certainty = 0.0000(Not Clear) <succ>
                                bacterial outside --- Certainty = 0.0000(Not Clear) < succ>
```

[11853] No corresponding DNA sequence was identified in S. pyogenes.

[11854] Based on this analysis, it was predicted that this protein and its epitopes, could be useful antigens for vaccines or diagnostics.

### EXAMPLE 2169

[11855] A DNA sequence (GBSx2286) was identified in S. agalactiae <SEQ ID 6703> which encodes the amino acid sequence <SEQ ID 6704>. This protein is predicted to be esterase. Analysis of this protein sequence reveals the following:

| Possible site: 26 | | | | |
|---|---|---|---|---|
| >>> Seems to have a cleavable N-term signal seq. | | | | |
| | INTEGRAL | Likelihood = −0.32 | Transmembrane | 175-191(175-191) |

```
----- Final Results -----
                              bacterial membrane --- Certainty = 0.1128(Affirmative) < succ>
                                bacterial outside --- Certainty = 0.0000(Not Clear) < succ>
                            bacterial cytoplasm --- Certainty = 0.0000(Not Clear) < succ>
```

[11856] The protein has homology with the following sequences in the GENPEPT database.

| >GP: AAB17013 GB: L38252 esterase [Acinetobacter lwoffii] | | | |
|---|---|---|---|
| Identities = 63/218 (28%), Positives = 107/218 (48%), | | | |
| Gaps = 3/218 (1%) | | | |
| Query: | 105 | KVIFYVHGGSYIHQASELQYIFVNKLAKKLDAKVVFPIYPKAPTYNYSDAIPKIKKLYQN | 164 |
| | | ++IF++HGG++ + + LA + +V+ YP AP + Y +AI I +YQ | |
| Sbjct: | 73 | QLIFHIHGGAFFLGSLNTHRALMTDLAARTQMQVIHVDYPLAPEHPYPEAIDAIFDVYQA | 132 |
| Query: | 165 | TLASVTSPKQIILVGESAGGGLALGLADNLVTEHIKQPKEIILISPWLDIATNNPKIEKV | 224 |
| | | L PK II+ G+S G LAL L L + P +IL+SP+LD+ + + | |
| Sbjct: | 133 | LLVQGIKPKDIIISGDSCGANLALALCLRLKQQPELMPSGLILMSPYLDLTLTSESLRFN | 192 |
| Query: | 225 | QKKDPLLKAWQLQQVAPYWANGKKNFKNPQVSPLYSSQFNKMAPISFFIGTHDIFYPDNQ | 284 |
| | | QK D LL LQ ++ +P+VSPL+ + + P +G+ +I D++ | |
| Sbjct: | 193 | QKHDALLSIEALQAGIKHYLTDDIQPGDPRVSPLF-DDLDGLPPTLVQVGSKEILLDDSK | 251 |
| Query: | 285 | LLHQKLAKENIKHHYIVGQKMNHVYPVLP--IPEAETA | 320 |
| | | +K + ++K H+ + M H + + PEA+ A | |
| Sbjct: | 252 | RFREKAEQADVKVHFKLYTGMWHNFQMFNAWFPEAKQA | 289 |

[11857] There is also homology to SEQ ID 3498.

[11858] Based on this analysis, it was predicted that this protein and its epitopes, could be useful antigens for vaccines or diagnostics.

### EXAMPLE 2170

[11859] A DNA sequence (GBSx2287) was identified in S. agalactiae <SEQ ID 6705> which encodes the amino acid sequence <SEQ ID 6706>. This protein is predicted to be purine nucleotide synthesis repressor. Analysis of this protein sequence reveals the following:

```
Possible site: 51
>>> Seems to have no N-terminal signal sequence
----- Final Results -----
                            bacterial cytoplasm --- Certainty = 0.2970(Affirmative) < succ>
                              bacterial membrane --- Certainty = 0.0000(Not Clear) < succ>
                                bacterial outside --- Certainty = 0.0000(Not Clear) < succ>
```

[11860] The protein has homology with the following sequences in the GENPEPT database.

| >GP: CAB16124 GB: Z99124 similar to transcriptional regulator | | | |
|---|---|---|---|
| (LacI family) [Bacillus subtilis] | | | |
| Identities = 111/300 (37%), Positives = 175/300 (58%), | | | |
| Gaps = 4/300 (1%) | | | |
| Query: | 1 | MTSISDIAKKAGVAKSTVSRVINHHPHVSDETRQKVMALITELDYIPNQLARDLSRGKTQ | 60 |
| | | M +I +IA+ A V+ STVSRV+NHHP+VS+E R+ V ++ ELDY PN+ A DL RGKT | |
| Sbjct: | 1 | MANIKEIARLANVSVSTVSRVLNHHPYVSEEKRKLVHQVMKELDYTPNRTAIDLIRGKTH | 60 |
| Query: | 61 | KIGVVIPHTRHPYFTQLINGLLDAAKTTDYQLVMMPSDYNQELELSYLKQLKMEAIDALI | 120 |
| | | +GV++P++ HP F +++NG+ AA +Y ++P++YN ++E+ YL+ L+ + ID LI | |
| Sbjct: | 61 | TVGVILPYSDHPCFDKIVNGITKAAFQHEYATTLLPTNYNPDIEIKYLELLRTKKIDGLI | 120 |
| Query: | 121 | FTSRAISLDIIETYAKYGRIVVCEKLQEYNHLSSAYLDRYSSFLEAFSDMKLRGLEHLVL | 180 |
| | | TSRA D I Y +YG ++ CE + + + A+ DR +++ E+F +K RG E++ | |
| Sbjct: | 121 | ITSRANHWDSILAYQEYGPVIACEDTGDID-VPCAFNDRKTAYAESFRYLKSRGHENIAF | 179 |
| Query: | 181 | LFSRNNESSATYQSALLAYQEVYGQLSSPYMVVGNVHDFNDG-LNLSYQLVKEVSIDGIL | 239 |
| | | R + S + AY+ V G+L +M+ G +D NDG L + + I | |
| Sbjct: | 180 | TCVREADRSPSTADKAAAYKAVCGRLEDRHMLSG-CNDMNDGELAAEHFYMSGRVPTAIY | 238 |
| Query: | 240 | ATSDEVAAGLIKGYEESRKKCPYIIGQECLLVGQLLKLPTIDHKSYYLGKLAFKQALAEK | 299 |
| | | A SDEVAAG I + + IIG+ + ++L P++D LG AF L ++ | |
| Sbjct: | 239 | ANSDEVAAG-IHLFAKKNNWDVEIIGEGNTSISRVLGFPSLDLNLEQLGIAAFSLFLQDE | 297 |

[11861] Based on this analysis, it was predicted that this protein and its epitopes, could be useful antigens for vaccines or diagnostics.

### EXAMPLE 2171

[11862] A DNA sequence (GBSx2288) was identified in S. agalactiae <SEQ ID 6707> which encodes the amino acid sequence <SEQ ID 6708>. Analysis of this protein sequence reveals the following:

```
Possible site: 45
>>> Seems to have no N-terminal signal sequence
----- Final Results -----
                            bacterial cytoplasm --- Certainty = 0.3451(Affirmative) < succ>
                              bacterial membrane --- Certainty = 0.0000(Not Clear) < succ>
                                bacterial outside --- Certainty = 0.0000(Not Clear) < succ>
```

[11863] The protein has homology with the following sequences in the GENPEPT database.

| >GP: AAC21682 GB: U32686 conserved hypothetical protein | | | |
|---|---|---|---|
| [Haemophilus influenzae Rd ] | | | |
| Identities = 79/264 (29%), Positives = 134/264 (49%), | | | |
| Gaps = 16/264 (6%) | | | |
| Query: | 1 | MTIKRIFCDMDGTLLNSEGQVSKSNATLIREAA---IPVTLVSARAPMEMKDAVDALQLG | 57 |
| | | M K +F D +GTLL S+ +S +I+ IP +SAR+P+ + L+ | |
| Sbjct: | 1 | MMYKAVFSDFNGTLLTSQHTISPRTVVVIKRLTANGIPFVPISARSPLGILPYWKQLETN | 60 |
| Query: | 58 | GVQVAFNGGLIYRIGDNNQVLPIHTQIIKKSTVKQLLRGIRFHFPQVSLSYYDLNNWYCD | 117 |
| | | V VAF+G LI N + PI++ I+ + ++ + H P + ++YY N+ + | |
| Sbjct: | 61 | NVLVAFSGALIL----NQNLEPIYSVQIEPKDILEINTVLAEH-PLLGVNYYTNNDCHAR | 115 |
| Query: | 118 | KID-EGIRYEHSLTQQCPTFIHNEDQFLEGHTNTFKIMMITFDEANMLELEKYLQSLELP | 176 |
| | | ++ + + YE S+T+ IH D+ T + + I + ++E+E L+ + P | |
| Sbjct: | 116 | DVENKWVIYERSVTK---IEIHPFDEVA---TRSPHKIQIIGEAEEIIEIEVLLKE-KFP | 168 |
| Query: | 177 | EITIQRSGKAYLEITHLLAKKSKGIAYILQKEQLAREETAAFGDGHNDLPMLEMVGYPIV | 236 |
| | | ++I RS +LE+ H A K + ++ + E AFGD NDL MLE VG + | |
| Sbjct: | 169 | HLSICRSHANFLEVMHKSATKGSAVRFLEDYFGVQTNEVIAFGDNFNDLDMLEHVGLGVA | 228 |
| Query: | 237 | MDNAFDDIKAIAYQLTKSNDEDGV | 260 |
| | | M NA ++IK A +T +N+EDG+ | |
| Sbjct: | 229 | MGNAPNEIKQAANVVTATNNEDGL | 252 |

[11864] Based on this analysis, it was predicted that this protein and its epitopes, could be useful antigens for vaccines or diagnostics.

### EXAMPLE 2172

[11865] A DNA sequence (GBSx2289) was identified in S. agalactiae <SEQ ID 6709> which encodes the amino acid sequence <SEQ ID 6710>. Analysis of this protein sequence reveals the following:

```
Possible site: 60
>>> Seems to have no N-terminal signal sequence
----- Final Results -----
                            bacterial cytoplasm --- Certainty = 0.2854 (Affirmative) < succ>
                              bacterial membrane --- Certainty = 0.0000(Not Clear) < succ>
                                bacterial outside --- Certainty = 0.0000(Not Clear) < succ>
```

[11866] The protein has no significant homology with any sequences in the GENPEPT database.

[11867] No corresponding DNA sequence was identified in S. pyogenes.

[11868] Based on this analysis, it was predicted that this protein and its epitopes, could be useful antigens for vaccines or diagnostics.

### EXAMPLE 2173

[11869] A DNA sequence (GBSx2290) was identified in S. agalactiae <SEQ ID 6711> which encodes the amino acid sequence <SEQ ID 6712>. Analysis of this protein sequence reveals the following:

| Possible site: 40 | | | | |
|---|---|---|---|---|
| >>> Seems to have an uncleavable N-term signal seq | | | | |
| | INTEGRAL | Likelihood = −10.51 | Transmembrane | 392-408 (376-417) |
| | INTEGRAL | Likelihood = −9.92 | Transmembrane | 440-456 (433-461) |
| | INTEGRAL | Likelihood = −6.42 | Transmembrane | 52-68 (51-70) |
| | INTEGRAL | Likelihood = −6.32 | Transmembrane | 29-45 (9-48) |
| | INTEGRAL | Likelihood = −6.32 | Transmembrane | 309-325 (308-328) |
| | INTEGRAL | Likelihood = −4.46 | Transmembrane | 12-28 (9-29) |
| | INTEGRAL | Likelihood = −3.29 | Transmembrane | 463-479 (462-479) |
| | INTEGRAL | Likelihood = −2.07 | Transmembrane | 353-369 (352-369) |
| | INTEGRAL | Likelihood = −1.17 | Transmembrane | 374-390 (374-390) |
| | INTEGRAL | Likelihood = −0.85 | Transmembrane | 247-263 (247-263) |
| | INTEGRAL | Likelihood = −0.06 | Transmembrane | 278-294 (278-294) |

```
----- Final Results -----
                              bacterial membrane --- Certainty = 0.5203(Affirmative) < succ>
                                bacterial outside --- Certainty = 0.0000(Not Clear) < succ>
                            bacterial cytoplasm --- Certainty = 0.0000(Not Clear) < succ>
```

[11870] The protein has homology with the following sequences in the GENPEPT database.

| >GP: AAC23742 GB: AF052208 competence protein [Streptococcus pneumoniae] | | | |
|---|---|---|---|
| Identities = 325/705 (46%), Positives = 478/705 (67%), Gaps = 3/705 (0%) | | | |
| Query: | 1 | MLQLTKYFPLKPIYLALLVFQIYLLVFSWTMLGCAFLLFSFIFLIYQYDRETIFKTIAIV | 60 |
| | | MLQ K F + IYL+ L+ +Y +FS + L +F + L Q+ ++ K + I | |
| Sbjct: | 1 | MLQWIKNFSIPLIYLSFLLLWLYYAIFSASYLALLGFVFLLVCLFIQFPWKSAGKVLIIC | 60 |
| Query: | 61 | IFFLFYFLWQNHNMNVQYQRVPNHISQIKVRIDTISINGDVLSFQADASGNTYQAFYTLK | 120 |
| | | F F+F++QN + Q + + + ++++ DT+ +NGD LSF+ A G +Q +Y L+ | |
| Sbjct: | 61 | GIFGFWFVFQNWQQSQASQNLADSVERVRILPDTVKVNGDSLSFRGKADGRIFQVYYKLQ | 120 |
| Query: | 121 | NKSEKDYFQNLDNNIMIIADIKLEEAEERRHFNGFDYRQYLKRHGIYRIAKVTKIKQIRL | 180 |
| | | ++ EK+ FQ L + I + KL E E +R+F GF+Y+ YLK GIY+ + KI+ ++ | |
| Sbjct: | 121 | SEEEKEAFQALTDLHEIGLEGKLSEPEGQRNFGGFNYQAYLKTQGIYQTLNIKKIQSLQK | 180 |
| Query: | 181 | FQHRSFFALMSKWRRSAIVISQT-FPNPMRHYMSGLLFGYLDKTFDDMSDLYSSLGIIHL | 239 |
| | | +S RR A+V +T FP+PMR+YM+GLL G+LD F++M++LYSSLGIIHL | |
| Sbjct: | 181 | IGSWDIGENLSSLRRKAVVWIKTHFPDPMRNYMTGLLLGHLDTDFEEMNELYSSLGIIHL | 240 |
| Query: | 240 | FALSGMQVGFFLGIFRYICLRIGLRLDHVWLLQIPFSLIYAGLTGFSISVVRALIQSLLS | 299 |
| | | FALSGMQVGFF+ F+ + LR+GL + + L PFSLIYAGLTGFS SV+R+L+Q LL+ | |
| Sbjct: | 241 | FALSGMQVGFFMNGFKKLLLRLGLTQEKLKWLTYPFSLIYAGLTGFSASVIRSLLQKLLA | 300 |
| Query: | 300 | HSGVKKDENFALCLLICLISLPHSLLTTGGVLSFAYAFILTMTSFDHFSSIKKVAIESLT | 359 |
| | | GVK +N AL +L+ I +P+ T GGVLS AYAFILTM S + +K VA ESL | |
| Sbjct: | 301 | QHGVKGLDNCALTVLVLFIVMPNFFFTAGGVLSCAYAFILTMPSKEG-EGLKAVASESLV | 359 |
| Query: | 360 | VSVGILPILTYYFSGFQPISIILTALLSFAFDIIFLPLLTVIFVLSPIVKLSCINSLFEI | 419 |
| | | +S+GILPIL++YF+ FQP SI+LT + SF FD+ FLPLL+++FVLS + + +N +FE | |
| Sbjct: | 360 | ISLGILPILSFYFAEFQPWSILLTFVFSFLFDLTFLPLLSILFVLSFLYPVIQLNFIFEW | 419 |
| Query: | 420 | LEVLLKWTGQLFPRPLIFGKPSLFLLIVMIIILGLLYDYYHSKCFRYCSLLIIFTLFFIT | 479 |
| | | LE +++ Q+ RPL+FG+P+ +LLI+++I L L+YD + L+I LF +T | |
| Sbjct: | 420 | LEGIIRLVSQVTSRPLVFGQPNTWLLILLLISLALVYDLRKNIKKLTVLCLLITGLFLLT | 479 |
| Query: | 480 | KNPITNEVAILDVGQGDSILVRDWLGKTILIDTGGRVR-FEQPEEWKQKVNQSNAKRTLI | 538 |
| | | K+P+ NE+ +LDVGQG+SI +RD GKTILID GG+ +++ ++W++K+ SNA+R+LI | |
| Sbjct: | 480 | KHPLENEITMLDVGQGESIFLRDVTGKTILIDVGGKAESYKKIKKWQEKMTTSNAQRSLI | 539 |
| Query: | 539 | PYLKSRGISKIDDLVITHTDTDHMGDMEVISKHFKVARLITSSGSLTNSQYVKHLSKIGV | 598 |
| | | PYLKSRG++KID L++T+TD +H+GD+ ++K F V ++ S SL ++V L | |
| Sbjct: | 540 | PYLKSRGVAKIDQLILTNTDKEHVGDLSEMTKAFHVGEILVSKDSLKQKEFVAELQATQT | 599 |
| Query: | 599 | AVKSIEAGDKLAVMGSYLQVLYPWHKGDGKNNDSIVLYGHLLGKGFLFTGDLEEEGEKQL | 658 |
| | | V+S+ G+ L + GS L+VL P GDG ++D++VLYG L K FLFTG+LEE+GEK L | |
| Sbjct: | 600 | KVRSMIVGENLPIFGSQLEVLSPRKMGDGGHDDTLVLYGKFLDKQFLFTGNLEEKGEKDL | 659 |
| Query: | 659 | LEAYPNLSVDILKAGHHGSKGSSSLSFLKKLSPSVVLVSAGKNNR | 703 |
| | | L+ YP+L V++LKA HG+K SSS +FL+KL P + L+S GK+NR | |
| Sbjct: | 660 | LKHYPDLKVNVLKASQHGNKKSSSPAFLEKLKPELTLISVGKSNR | 704 |

[11871] A related DNA sequence was identified in S. pyogenes <SEQ ID 6713> which encodes the amino acid sequence <SEQ ID 6714>. Analysis of this protein sequence reveals the following:

| Possible site: 29 | | | | |
|---|---|---|---|---|
| >>> Seems to have an uncleavable N-term signal seq | | | | |
| | INTEGRAL | Likelihood = −10.19 | Transmembrane | 394-410 (380-422) |
| | INTEGRAL | Likelihood = −8.28 | Transmembrane | 54-70 (52-72) |
| | INTEGRAL | Likelihood = −6.32 | Transmembrane | 356-372 (355-377) |
| | INTEGRAL | Likelihood = −4.73 | Transmembrane | 8-24 (7-25) |
| | INTEGRAL | Likelihood = −4.30 | Transmembrane | 30-46 (29-50) |
| | INTEGRAL | Likelihood = −3.88 | Transmembrane | 249-265 (249-267) |
| | INTEGRAL | Likelihood = −3.40 | Transmembrane | 467-483 (465-484) |
| | INTEGRAL | Likelihood = −2.39 | Transmembrane | 325-341 (325-347) |
| | INTEGRAL | Likelihood = −0.43 | Transmembrane | 441-457 (441-458) |

```
----- Final Results -----
                              bacterial membrane --- Certainty = 0.5076(Affirmative) < succ>
                                bacterial outside --- Certainty = 0.0000(Not Clear) < succ>
                            bacterial cytoplasm --- Certainty = 0.0000(Not Clear) < succ>
```

[11872] The protein has homology with the following sequences in the databases:

| >GP: AAC23742 GB: AF052208 competence | | | |
|---|---|---|---|
| protein [Streptococcus pneumoniae] | | | |
| Identities = 311/706 (44%), Positives = 458/706 (64%), | | | |
| Gaps = 10/706 (1%) | | | |
| Query: | 5 | WTKLVPLSKIQFAFLILVFFYQIHSPSWLTFL-LSLSLICLLVKRLSKK--EFLGVFAIL | 61 |
| | | W K + I +FL+L +Y I S S+L L L+CL ++ K + L + I | |
| Sbjct: | 4 | WIKNFSIPLIYLSFLLLWLYYAIFSASYLALLGFVFLLVCLFIQFPWKSAGKVLIICGIF | 63 |
| Query: | 62 | SFCALFLLYQKQQLVQKLEIQPVQITSVALVPDSIRINGDQLAVLGRHGKHSYQLFYRLK | 121 |
| | | F +F +Q+ Q Q L + V ++PD++++NGD L+ G+ +Q++Y+L+ | |
| Sbjct: | 64 | GFWFVFQNWQQSQASQNLADS---VERVRILPDTVKVNGDSLSFRGKADGRIFQVYYKLQ | 120 |
| Query: | 122 | SQAEAQLFKKEHRWLVMHAKVTLEKAEEVRNFKGFNYQTFLTYQGIYRIGKVEQIEQLEV | 181 |
| | | S+ E + F+ + + L + E RNF GFNYQ +L QGIY+ +++I+ L+ | |
| Sbjct: | 121 | SEEEKEAFQALTDLHEIGLEGKLSEPEGQRNFGGFNYQAYLKTQGIYQTLNIKKIQSLQK | 180 |
| Query: | 182 | ISPESICDYLSSLRRRAIVHCQQHFPRPMSHYLTGLLFGYLDKSFGEMTDYYSQLGIIHL | 241 |
| | | I I + LSSLRR+A+V + HFP PM +Y+TGLL G+LD F EM + YS LGIIHL | |
| Sbjct: | 181 | IGSWDIGENLSSLRRKAVVWIKTHFPDPMRNYMTGLLLGHLDTDFEEMNELYSSLGIIHL | 240 |
| Query: | 242 | FALSGMQVGFFLTCFRRVLLLLAVPLEWIKWIELPFACFYAALTGYSISVIRSLVQSQLR | 301 |
| | | FALSGMQVGFF+ F+++LL L + E +KW+ PF+ YA LTG+S SVIRSL+Q L | |
| Sbjct: | 241 | FALSGMQVGFFMNGFKKLLLRLGLTQEKLKWLTYPFSLIYAGLTGFSASVIRSLLQKLLA | 300 |
| Query: | 302 | HLGIKGLDNLACTFLLVFLWDAHFLMTVGGVLTFSYAFLLTVVTVEELSGAKRQLVQVLT | 361 |
| | | G+KGLDN A T L++F+ +F T GGVL+ +YAF+LT+ + +E G K + L | |
| Sbjct: | 301 | QHGVKGLDNCALTVLVLFIVMPNFFFTAGGVLSCAYAFILTMPS-KEGEGLKAVASESLV | 359 |
| Query: | 362 | ISLGILPFLLFYFSSFNPMSMVLTGLLSYLFDLFILPLLCLVFCLSPLVTVSICNHLFIL | 421 |
| | | ISLGILP L FYF+ F P S++LT + S+LFDL LPLL ++F LS L V N +F | |
| Sbjct: | 360 | ISLGILPILSFYFAEFQPWSILLTFVFSFLFDLTFLPLLSILFVLSFLYPVIQLNFIFEW | 419 |
| Query: | 422 | LEKVIQFLGNTFNSSLVFGSPTSWHLLILVISFAIFYDYRQ-VRQRVITCGLVIALTLLS | 480 |
| | | LE +I+ + + LVFG P +W L++L+IS A+ YD R+ +++ + C L+ L LL+ | |
| Sbjct: | 420 | LEGIIRLVSQVTSRPLVFGQPNTWLLILLLISLALVYDLRKNIKKLTVLCLLITGLFLLT | 479 |
| Query: | 481 | VKYPLTNEVTFIDIGQGDSILVREWTGKNLLIDVGGR-PFFSSKEHWRRGHHVANAQKTL | 539 |
| | | K+PL NE+T +D+GQG+SI +R+ TGK +LIDVGG+ + + W+ +NAQ++L | |
| Sbjct: | 480 | -KHPLENEITMLDVGQGESIFLRDVTGKTILIDVGGKAESYKKIKKWQEKMTTSNAQRSL | 538 |
| Query: | 540 | IPYLKSRGIHTIDQLLVTHADTDHMGDIEVVAKAIRIKEILTSQGSLSHPSFVRRLRRLK | 599 |
| | | IPYLKSRG+ IDQL++T+ D +H+GD+ + KA + EIL S+ SL FV L+ + | |
| Sbjct: | 539 | IPYLKSRGVAKIDQLILTNTDKEHVGDLSEMTKAFHVGEILVSKDSLKQKEFVAELQATQ | 598 |
| Query: | 600 | CHVRVLAAGDQLPIMGSVLQVLYPWQLGDGKNNDSLVLYGRLLNRTFLFTGDLEKEGENE | 659 |
| | | VR + G+ LPI GS L+VL P ++GDG ++D+LVLYG+ L++ FLFTG+LE++GE + | |
| Sbjct: | 599 | TKVRSMIVGENLPIFGSQLEVLSPRKMGDGGHDDTLVLYGKFLDKQFLFTGNLEEKGEKD | 658 |
| Query: | 660 | IIKRYPQLRVDYLKAGHHGSNTSSSAAFLDHIQPKVAFISAGKNNR | 705 |
| | | ++K YP L+V+ LKA HG+ SSS AFL+ ++P++ IS GK+NR | |
| Sbjct: | 659 | LLKHYPDLKVNVLKASQHGNKKSSSPAFLEKLKPELTLISVGKSNR | 704 |

[11873] An alignment of the GAS and GBS proteins is shown below.

| Identities = 346/743 (46%), Positives = 491/743 (65%), Gaps = 3/743 (0%) | | | |
|---|---|---|---|
| Query: | 5 | TKYFPLKPIYLALLVFQIYLLVFSWTMLGCAFLLFSFIFLIYQYDRETIFKTIAIVIFFL | 64 |
| | | TK PL I A L+ + + S + L L L+ + ++ AI+ F | |
| Sbjct: | 6 | TKLVPLSKIQFAFLILVFFYQIHSPSWLTFLLSLSLICLLVKRLSKKEFLGVFAILSFCA | 65 |
| Query: | 65 | FYFLWQNHNMNVQYQRVPNHISQIKVRIDTISINGDVLSFQADASGNTYQAFYTLKNKSE | 124 |
| | | + L+Q + + + P I+ + + D+I INGD L+ ++YQ FY LK+++E | |
| Sbjct: | 66 | LFLLYQKQQLVQKLEIQPVQITSVALVPDSIRINGDQLAVLGRHGKHSYQLFYRLKSQAE | 125 |
| Query: | 125 | KDYFQNLDNNIMIIADIKLEEAEERRHFNGFDYRQYLKRHGIYRIAKVTKIKQIRLFQHR | 184 |
| | | F+ +++ A + LE+AEE R+F GF+Y+ +L GIYRI KV +I+Q+ + | |
| Sbjct: | 126 | AQLFKKEHRWLVMHAKVTLEKAEEVRNFKGFNYQTFLTYQGIYRIGKVEQIEQLEVISPE | 185 |
| Query: | 185 | SFFALMSKWRRSAIV-ISQTFPNPMRHYMSGLLFGYLDKTFDDMSDLYSSLGIIHLFALS | 243 |
| | | S +S RR AIV Q FP PM HY++GLLFGYLDK+F +M+D YS LGIIHLFALS | |
| Sbjct: | 186 | SICDYLSSLRRRAIVHCQQHFPRPMSHYLTGLLFGYLDKSFGEMTDYYSQLGIIHLFALS | 245 |
| Query: | 244 | GMQVGFFLGIFRYICLRIGLRLDHVWLLQIPFSLIYAGLTGFSISVVRALIQSLLSHSGV | 303 |
| | | GMQVGFFL FR + L + + L+ + +++PF+ YA LTG+SISV+R+L+QS L H G+ | |
| Sbjct: | 246 | GMQVGFFLTCFRRVLLLLAVPLEWIKWIELPFACFYAALTGYSISVIRSLVQSQLRHLGI | 305 |
| Query: | 304 | KKDENFALCLLICLISLPHSLLTTGGVLSFAYAFILTMTSFDHFSSIKKVAIESLTVSVG | 363 |
| | | K +N A L+ + H L+T GGVL+F+YAF+LT+ + + S K+ ++ LT+S+G | |
| Sbjct: | 306 | KGLDNLACTFLLVFLWDAHFLMTVGGVLTFSYAFLLTVVTVEELSGAKRQLVQVLTISLG | 365 |
| Query: | 364 | ILPILTYYFSGFQPISIILTALLSFAFDIIFLPLLTVIFVLSPIVKLSCINSLFEILEVL | 423 |
| | | ILP L +YFS F P+S++LT LLS+ FD+ LPLL ++F LSP+V +S N LF +LE + | |
| Sbjct: | 366 | ILPFLLFYFSSFNPMSMVLTGLLSYLFDLFILPLLCLVFCLSPLVTVSICNHLFILLEKV | 425 |
| Query: | 424 | LKWTGQLFPRPLIFGKPSLFLLIVMIIILGLLYDYYHSKC-FRYCSLLIIFTLFFITKNP | 482 |
| | | +++ G F L+FG P+ + L++++I + YDY + C L+I TL + K P | |
| Sbjct: | 426 | IQFLGNTFNSSLVFGSPTSWHLLILVISFAIFYDYRQVRQRVITCGLVIALTLLSV-KYP | 484 |
| Query: | 483 | ITNEVAILDVGQGDSILVRDWLGKTILIDTGGRVRFEQPEEWKQKVNQSNAKRTLIPYLK | 542 |
| | | +TNEV +D+GQGDSILVR+W GK +LID GGR F E W++ + +NA++TLIPYLK | |
| Sbjct: | 485 | LTNEVTFIDIGQGDSILVREWTGKNLLIDVGGRPFFSSKEHWRRGHHVANAQKTLIPYLK | 544 |
| Query: | 543 | SRGISKIDDLVITHTDTDHMGDMEVISKHFKVARLITSSGSLTNSQYVKHLSKIGVAVKS | 602 |
| | | SRGI ID L++TH DTDHMGD+EV++K ++ ++TS GSL++ +V+ L ++ V+ | |
| Sbjct: | 545 | SRGIHTIDQLLVTHADTDHMGDIEVVAKAIRIKEILTSQGSLSHPSFVRRLRRLKCHVRV | 604 |
| Query: | 603 | IEAGDKLAVMGSYLQVLYPWHKGDGKNNDSIVLYGHLLGKGFLFTGDLEEEGEKQLLEAY | 662 |
| | | + AGD+L +MGS LQVLYPW GDGKNNDS+VLYG LL + FLFTGDLE+EGE ++++ Y | |
| Sbjct: | 605 | LAAGDQLPIMGSVLQVLYPWQLGDGKNNDSLVLYGRLLNRTFLFTGDLEKEGENEIIKRY | 664 |
| Query: | 663 | PNLSVDILKAGHHGSKGSSSLSFLKKLSPSVVLVSAGKNNRYQHPHQETLQRFQKIKSKI | 722 |
| | | P L VD LKAGHHGS SSS +FL + P V +SAGKNNRYQHPH+ETL R + + | |
| Sbjct: | 665 | PQLRVDYLKAGHHGSNTSSSAAFLDHIQPKVAFISAGKNNRYQHPHRETLARLEDRQITY | 724 |
| Query: | 723 | FRTDQSGTIRLTGWWKWHIQTVR | 745 |
| | | +RTD G IRLTG WH++TVR | |
| Sbjct: | 725 | YRTDTQGAIRLTGRTSWHLETVR | 747 |

[11874] Based on this analysis, it was predicted that these proteins and their epitopes could be useful antigens for vaccines or diagnostics.

### EXAMPLE 2174

[11875] A DNA sequence (GBSx2291) was identified in S. agalactiae <SEQ ID 6715> which encodes the amino acid sequence <SEQ ID 6716>. This protein is predicted to be competence protein (comEA). Analysis of this protein sequence reveals the following:

| Possible site: 38 | | | | |
|---|---|---|---|---|
| >>> Seems to have an uncleavable N-term signal seq | | | | |
| | INTEGRAL | Likelihood = −3.77 | Transmembrane | 18-34 (14-36) |

```
----- Final Results -----
                              bacterial membrane --- Certainty = 0.2508(Affirmative) < succ>
                                bacterial outside --- Certainty = 0.0000(Not Clear) < succ>
                            bacterial cytoplasm --- Certainty = 0.0000(Not Clear) < succ>
```

[11876] The protein has homology with the following sequences in the GENPEPT database.

| >GP: AAC23741 GB: AF052208 competence protein [Streptococcus pneumoniae] | | | |
|---|---|---|---|
| Identities = 96/217 (44%), Positives = 138/217 (63%), Gaps = 4/217 (1%) | | | |
| Query: | 3 | EIVLEKIKSHKWETTGIIVGLLLFGILGLNHFG-THHKEDNLNINLEK-KVSTITEKKVP | 60 |
| | | E ++EKIK +K +GLL+ G L T KE NL + ++EK+V | |
| Sbjct: | 2 | EAIIEKIKEYKIIVICTGLGLLVGGFFLLKPAPQTPVKETNLQAEVAAVSKDLVSEKEVN | 61 |
| Query: | 61 | MISHVKDKVSNQVTVDVKGAVNHPGVYSLPSQSRVTDAIKRAGGLSNLADSKSVNLAQKL | 120 |
| | | + + +TVDVKGAV PG+Y LP SR+ DA+++AGGL+ ADSKS+NLAQK+ | |
| Sbjct: | 62 | KEEKEEPLEQDLITVDVKGAVKSPGIYDLPVGSRINDAVQKAGGLTEQADSKSLNLAQKV | 121 |
| Query: | 121 | QDETVIYVAQKGEKITVVEEEKANNIATQGNSKGKINLNKADLSSLQTISGVGAKRAQDI | 180 |
| | | DE ++YV KGE+ V ++ A+ + + K+NLNKA L L+ + G+G KRAQDI | |
| Sbjct: | 122 | SDEALVYVPTKGEE--AVSQQTGLGTASSISKEKKVNLNKASLEELKQVKGLGGKRAQDI | 179 |
| Query: | 181 | LDYRDSQGGFKTIDDLKNVSGIGEKTLEKLRQDVTID | 217 |
| | | +D+R++ G FK++D+LK VSGIG KT+EKL+ VT+D | |
| Sbjct: | 180 | IDHREANGKFKSVDELKKVSGIGGKTIEKLKDYVTVD | 216 |

[11877] A related DNA sequence was identified in S. pyogenes <SEQ ID 6717> which encodes the amino acid sequence <SEQ ID 6718>. Analysis of this protein sequence reveals the following:

| Possible site: 36 | | | | |
|---|---|---|---|---|
| >>> Seems to have no N-terminal signal sequence | | | | |
| | INTEGRAL | Likelihood = −9.61 | Transmembrane | 22-38 (16-42) |

```
----- Final Results -----
                              bacterial membrane --- Certainty = 0.4843(Affirmative) < succ>
                                bacterial outside --- Certainty = 0.0000(Not Clear) < succ>
                            bacterial cytoplasm --- Certainty = 0.0000(Not Clear) < succ>
```

[11878] The protein has homology with the following sequences in the databases:

| >GP: AAC23741 GB: AF052208 competence protein [Streptococcus pneumoniae] | | | |
|---|---|---|---|
| Identities = 82/179 (45%), Positives = 124/179 (68%), Gaps = 4/179 (2%) | | | |
| Query: | 42 | NRQSKAAVPALREISPVKQQVSEEKKEIQEDSSILVDLKGAVQKEGVYKLTASSRVRDVI | 101 |
| | | N Q++ A + +++ K+ EEK+E E I VD+KGAV+ G+Y L SR+ D + | |
| Sbjct: | 42 | NLQAEVAAVS-KDLVSEKEVNKEEKEEPLEQDLITVDVKGAVKSPGIYDLPVGSRINDAV | 100 |
| Query: | 102 | ELAGGLTSEADKHAINFAEKLTDEQVVYVPKQGEEISVLPRSLVSGKKETASKDQSKVHI | 161 |
| | | + AGGLT +AD ++N A+K++DE +VYVP +GEE + + G + SK++ KV++ | |
| Sbjct: | 101 | QKAGGLTEQADSKSLNLAQKVSDEALVYVPTKGEE--AVSQQTGLGTASSISKEK-KVNL | 157 |
| Query: | 162 | NKASLEELQHIPGIGAKRAQDIIDMRDKLGGFKALEDLRQVSGIGEKTLEKLKDDIFLD | 220 |
| | | NKASLEEL+ + G+G KRAQDIID R+ G FK++++L++VSGIG KT+EKLKD + +D | |
| Sbjct: | 158 | NKASLEELKQVKGLGGKRAQDIIDHREANGKFKSVDELKKVSGIGGKTIEKLKDYVTVD | 216 |

[11879] An alignment of the GAS and GBS proteins is shown below.

| Identities = 81/166 (48%), Positives = 111/166 (66%), Gaps = 10/166 (6%) | | | |
|---|---|---|---|
| Query: | 62 | ISHVKDKVSNQ---------VTVDVKGAVNHPGVYSLPSQSRVTDAIKRAGGLSNLADSK | 112 |
| | | IS VK +VS + + VD+KGAV GVY L + SRV D I+ AGGL++ AD | |
| Sbjct: | 55 | ISPVKQQVSEEKKEIQEDSSILVDLKGAVQKEGVYKLTASSRVRDVIELAGGLTSEADKH | 114 |
| Query: | 113 | SVNLAQKLQDETVIYVAQKGEKITVVEEEKANNIA-TQGNSKGKINLNKADLSSLQTISG | 171 |
| | | ++N A+KL DE V+YV ++GE+I+V+ + T + K+++NKA L LQ I G | |
| Sbjct: | 115 | AINFAEKLTDEQVVYVPKQGEEISVLPRSLVSGKKETASKDQSKVHINKASLEELQHIPG | 174 |
| Query: | 172 | VGAKRAQDILDYRDSQGGFKTIDDLKNVSGIGEKTLEKLRQDVTID | 217 |
| | | +GAKRAQDI+D RD GGFK ++DL+ VSGIGEKTLEKL+ D+ +D | |
| Sbjct: | 175 | IGAKRAQDIIDMRDKLGGFKALEDLRQVSGIGEKTLEKLKDDIFLD | 220 |

[11880] A related GBS gene <SEQ ID 8989> and protein <SEQ ID 8990> were also identified. Analysis of this protein sequence reveals the following:

| Lipop: Possible site: −1 Crend: 9 | | | | |
|---|---|---|---|---|
| McG: Discrim Score: 5.70 | | | | |
| GvH: Signal Score (−7.5): −2.58 | | | | |
| Possible site: 38 | | | | |
| >>> Seems to have an uncleavable N-term signal seq | | | | |
| ALOM program count: 1 value: −3.77 threshold: 0.0 | | | | |
| | INTEGRAL | Likelihood = −3.77 | Transmembrane | 18-34 (14-36) |
| | PERIPHERAL | Likelihood = 10.40 | 73 | |

```
modified ALOM score: 1.25
*** Reasoning Step: 3
----- Final Results -----
                              bacterial membrane --- Certainty = 0.2508(Affirmative) < succ>
                                bacterial outside --- Certainty = 0.0000(Not Clear) < succ>
                            bacterial cytoplasm --- Certainty = 0.0000(Not Clear) < succ>
```

[11881] The protein has homology with the following sequences in the databases:

[chemical structure]

[11882] SEQ ID 8990 (GBS129) was expressed in E. coli as a GST-fusion product. SDS-PAGE analysis of total cell extract is shown in FIG. 41 (lane 4; MW 43.8 kDa).

[11883] Based on this analysis, it was predicted that these proteins and their epitopes could be useful antigens for vaccines or diagnostics.

### EXAMPLE 2175

[11884] A DNA sequence (GBSx2292) was identified in S. agalactiae <SEQ ID 6719> which encodes the amino acid sequence <SEQ ID 6720>. Analysis of this protein sequence reveals the following:

| Possible site: 54 | | | | |
|---|---|---|---|---|
| >>> Seems to have a cleavable N-term signal seq. | | | | |
| | INTEGRAL | Likelihood = −14.01 | Transmembrane | 215-231 (208-240) |

```
----- Final Results -----
                              bacterial membrane --- Certainty = 0.6604(Affirmative) < succ>
                                bacterial outside --- Certainty = 0.0000(Not Clear) < succ>
                            bacterial cytoplasm --- Certainty = 0.0000(Not Clear) < succ>
```

[11885] The protein has homology with the following sequences in the GENPEPT database.

| >GP: CAB12793 GB: Z99109 similar to 1-acylglycerol-3-phosphate | | | |
|---|---|---|---|
| O-acyltransferase [Bacillus subtilis] | | | |
| Identities = 66/200 (33%), Positives = 111/200 (55%), Gaps = 10/200 (5%) | | | |
| Query: | 3 | YTYLRTLVMFLIWVANGNAHYHNEDKMLKDDENYILVAPHRTFWDPVYMAFAARPKQFIF | 62 |
| | | Y + + ++ + G Y+E+ L D +++ H + D + + P Q + | |
| Sbjct: | 2 | YKFCANALKVILSLRGGVKVYNKEN--LPADSGFVIACTHSGWVDVITLGVGILPYQIHY | 59 |
| Query: | 63 | MAKKELFTNRLFGWWIKMCGAFPIDREKPGQDAIRYPVKMLKNSNRSLVMFPSGSRHSKD | 122 |
| | | MAKKELF N+ G ++K AFP+DRE PG +I+ P+K+LK + +FPSG+R S+D | |
| Sbjct: | 60 | MAKKELFQNKWIGSFLKKIHAFPVDRENPGPSSIKTPIKLLK-EGEIVGIFPSGTRTSED | 118 |
| Query: | 123 | V--KGGVAVIAKMAKVRIMPAAYRGPMVFKNLLKGHRVDMNFGNPIDVSDIKRMDA-EGI | 179 |
| | | V K G IA+M K ++PAAY+GP K L K +++ G P+ +D + + E + | |
| Sbjct: | 119 | VPLKRGAVTIAQMGKAPLVPAAYQGPSSGKELFKKGKMKLIIGEPLHQADFAHLPSKERL | 178 |
| Query: | 180 | A----EVSRRIQEEFDRLDR | 195 |
| | | A +++RI+E ++LD+ | |
| Sbjct: | 179 | AAMTEALNQRIKELENKLDQ | 198 |

[11886] A related DNA sequence was identified in S. pyogenes <SEQ ID 6721> which encodes the amino acid sequence <SEQ ID 6722>. Analysis of this protein sequence reveals the following:

| Possible site: 49 | | | | |
|---|---|---|---|---|
| >>> Seems to have no N-terminal signal sequence | | | | |
| | INTEGRAL | Likelihood = −11.83 | Transmembrane | 241-257 (234-266) |
| | INTEGRAL | Likelihood = −4.41 | Transmembrane | 27-43 (26-44) |

```
----- Final Results -----
                              bacterial membrane --- Certainty = 0.5734(Affirmative) < succ>
                                bacterial outside --- Certainty = 0.0000(Not Clear) < succ>
                            bacterial cytoplasm --- Certainty = 0.0000(Not Clear) < succ>
```

[11887] The protein has homology with the following sequences in the databases:

| >GP: CAB12793 GB: Z99109 similar to 1-acylglycerol-3-phosphate | | | |
|---|---|---|---|
| O-acyltransferase [Bacillus subtilis] | | | |
| Identities = 59/198 (29%), Positives = 104/198 (51%), Gaps = 6/198 (3%) | | | |
| Query: | 29 | YAYLRGLVVFLLWVVNGNAHYHHEEKMLDASENYILVAPHRTFWDPVYHAFAARPKQFIF | 88 |
| | | Y + + +L + G Y+ E L A +++ H + D + + P Q + | |
| Sbjct: | 2 | YKFCANALKVILSLRGGVKVYNKEN--LPADSGFVIACTHSGWVDVITLGVGILPYQIHY | 59 |
| Query: | 89 | MAKKELFANRLFAWWIKMCGAFPIDRDKPSPDAIRYPVNMLKKSNRSLLMFPSGSRHSQE | 148 |
| | | MAKKELF N+ ++K AFP+DR+ P P +I+ P+ +LK+ + +FPSG+R S++ | |
| Sbjct: | 60 | MAKKELFQNKWIGSFLKKIHAFPVDRENPGPSSIKTPIKLLKE-GEIVGIFPSGTRTSED | 118 |
| Query: | 149 | V--KGGVAVIAKLAKVKIMPAAYQGPMSVKGLLAGERVDMTFGNPIDVSDIKRM-NDEGI | 205 |
| | | V K G IA++ K ++PAAYQGP S K L ++ + G P+ +D + + E + | |
| Sbjct: | 119 | VPLKRGAVTIAQMGKAPLVPAAYQGPSSGKELFKKGKMKLIIGEPLHQADFAHLPSKERL | 178 |
| Query: | 206 | AEVANRIQAEFDRIDDEL | 223 |
| | | A + + ++++L | |
| Sbjct: | 179 | AAMTEALNQRIKELENKL | 196 |

[11888] An alignment of the GAS and GBS proteins is shown below.

| Identities = 186/244 (76%), Positives = 212/244 (86%) | | | |
|---|---|---|---|
| Query: | 1 | MFYTYLRTLVMFLIWVANGNAHYHNSDKMLKDDENYILVAPHRTFWDPVYMAFAARPKQF | 60 |
| | | +FY YLR LV+FL+WV NGNAHYH+E+KML ENYILVAPHRTFWDPVYMAFAARPKQF | |
| Sbjct: | 27 | VFYAYLRGLVVFLLWVVNGNAHYHHEEKMLDASENYILVAPHRTFWDPVYMAFAARPKQF | 86 |
| Query: | 61 | IFMAKKELFTNRLFGWWIKMCGAFPIDREKPGQDAIRYPVKMLKNSNRSLVMFPSGSRHS | 120 |
| | | IFMAKKELF NRLF WWIKMCGAFPIDR+KP DAIRYPV MLK SNRSL+MFPSGSRHS | |
| Sbjct: | 87 | IFMAKKELFANRLFAWWIKMCGAFPIDRDKPSPDAIRYPVNMLKKSNRSLLMFPSGSRHS | 146 |
| Query: | 121 | KDVKGGVAVIAKMAKVRIMPAAYRGPMVFKNLLKGHRVDMNFGNPIDVSDIKRMDAEGIA | 180 |
| | | ++VKGGVAVIAK+AKV+IMPAAY+GPM K LL G RVDM FGNPIDVSDIKRM+ EGIA | |
| Sbjct: | 147 | QEVKGGVAVIAKLAKVKIMPAAYQGPMSVKGLLAGERVDMTFGNPIDVSDIKRMNDEGIA | 206 |
| Query: | 181 | EVSRRIQEEFDRLDRENETYDDGKKLNPLTYIYRLPLAIIAIVLLVLTLIFSYLASFVWD | 240 |
| | | EV+ RIQ EFDR+D E + GK NPLTY+YRLPL ++ +V+L+LT++FSY+ASFVW+ | |
| Sbjct: | 207 | EVANRIQAEFDRIDDELAPFQPGKARNPLTYLYRLPLGLVLVVVLLLTMLFSYIASFVWN | 266 |
| Query: | 241 | PQKH | 244 |
| | | P KH | |
| Sbjct: | 267 | PDKH | 270 |

[11889] SEQ ID 6720 (GBS171) was expressed in E. coli as a His-fusion product. SDS-PAGE analysis of total cell extract is shown in FIG. 36 (lane 2; MW 25 kDa). It was also expressed in E. coli as a GST-fusion product. SDS-PAGE analysis of total cell extract is shown in FIG. 41 (lane 3; MW 49.8 kDa).

[11890] Based on this analysis, it was predicted that these proteins and their epitopes could be useful antigens for vaccines or diagnostics.

### EXAMPLE 2176

[11891] A DNA sequence (GBSx2293) was identified in S. agalactiae <SEQ ID 6723> which encodes the amino acid sequence <SEQ ID 6724>. Analysis of this protein sequence reveals the following:

```
Possible site: 48
>>> Seems to have no N-terminal signal sequence
----- Final Results -----
                            bacterial cytoplasm --- Certainty = 0.3268(Affirmative) < succ>
                              bacterial membrane --- Certainty = 0.0000(Not Clear) < succ>
                                bacterial outside --- Certainty = 0.0000(Not Clear) < succ>
```

[11892] The protein has homology with the following sequences in the GENPEPT database.

| >GP: CAB11810 GB: Z99104 similar to hypothetical proteins [Bacillus subtilis] | | | |
|---|---|---|---|
| Identities = 113/244 (46%), Positives = 173/244 (70%), Gaps = 2/244 (0%) | | | |
| Query: | 6 | LKENERIDQLFSTDVKIIQNKEVFSYSIDSVLLSRFPKLP-SRGLIVDLCSGNGAVGLFA | 64 |
| | | L ++ER+D L + D+KIIQ+ VF++S+D+VLLS+F +P +G IVDLC+GNG V L | |
| Sbjct: | 4 | LHDDERLDYLLAEDMKIIQSPTVFAFSLDAVLLSKFAYVPIQKGKIVDLCTGNGIVPLLL | 63 |
| Query: | 65 | STKTNATIIEIELQESLADMAKRSIKLNKLEKQVTMINDDLKNLLDHVQRSNVDLMLCNP | 124 |
| | | ST++ A I+ +E+QE L DMA RS++ NKL+ Q+ +I+DDLKN+ + + + D++ CNP | |
| Sbjct: | 64 | STRSKADILGVEIQERLHDMAVRSVEYNKLDDQIQIIHDDLKNMPEKLGHNRYDVVTCNP | 123 |
| Query: | 125 | PYFKASETSKKNLSPHYLLARHEITTNLREICQIAQHALKTKGRIAMVHRPDRFLEIIDT | 184 |
| | | PYFK + +++N++ H +ARHEI L ++ ++ LK G+ A+VHRP R LEI + | |
| Sbjct: | 124 | PYFKTPKQTEQNMNEHLRIARHEIHCTLEDVISVSSKLLKQGGKAALVHRPGRLLEIFEL | 183 |
| Query: | 185 | MRQFNLAPKRIQFVYPKLGKDANMLLIEAIKDGSTEGMKILPPLVVHQDNGDYTETIFDI | 244 |
| | | M+ + + PKR+QFVYPK GK+AN +L+E IK G + +KILPPL V+ + +YT+ I I | |
| Sbjct: | 184 | MKAYQIEPKRVQFVYPKQGKEANTILVEGIKGGRPD-LKILPPLFVYDEQNEYTKEIRTI | 242 |
| Query: | 245 | YFGE | 248 |
| | | +G+ | |
| Sbjct: | 243 | LYGD | 246 |

[11893] A related DNA sequence was identified in S. pyogenes <SEQ ID 6725> which encodes the amino acid sequence <SEQ ID 6726>. Analysis of this protein sequence reveals the following:

```
Possible site: 48
>>> Seems to have no N-terminal signal sequence
----- Final Results -----
                            bacterial cytoplasm --- Certainty = 0.2183(Affirmative) < succ>
                              bacterial membrane --- Certainty = 0.0000(Not Clear) < succ>
                                bacterial outside --- Certainty = 0.0000(Not Clear) < succ>
```

[11894] An alignment of the GAS and GBS proteins is shown below.

| Identities = 200/257 (77%), Positives = 228/257 (87%), Gaps = 3/257 (1%) | | | |
|---|---|---|---|
| Query: | 1 | MIDTILKENERIDQLFSTDVKIIQNKEVFSYSIDSVLLSRFPKLPSRGLIVDLCSGNGAV | 60 |
| | | MI ILKE ERIDQLFS+DV IIQNK+VFSYSIDSVLLSRFPK+PS+GLIVDLCSGNGAV | |
| Sbjct: | 1 | MIKAILKEGERIDQLFSSDVGIIQNKDVFSYSIDSVLLSRFPKMPSKGLIVDLCSGNGAV | 60 |
| Query: | 61 | GLFASTKTNATIIEIELQESLADMAKRSIKLNKLEKQVTMINDDLKNLLDHVQRSNVDLM | 120 |
| | | GLFAST+T A I+E+ELQE LADM +RSI+LN+LE QVTMI DDLKNLL+HV RS VDLM | |
| Sbjct: | 61 | GLFASTRTKAAIVEVELQERLADMGQRSIQLNQLEDQVTMICDDLKNLLNHVPRSGVDLM | 120 |
| Query: | 121 | LCNPPYFKASETSKKNLSPHYLLARHEITTNLREICQIAQHALKTKGRIAMVHRPDRFLE | 180 |
| | | LCNPPYFK+ E+SKKN+S HYLLARHE+TTNL EICQ+A+HALK+ GR+AMVHRPDRFLE | |
| Sbjct: | 121 | LCNPPYFKSHESSKKNVSEHYLLARHEVTTNLEEICQVARHALKSNGRLAMVHRPDRFLE | 180 |
| Query: | 181 | IIDTMRQFNLAPKRIQFVYPKLGKDANMLLIEAIKDGSTEGMKILPPLVVHQDNGDYTET | 240 |
| | | IID++R LAPKR+QFVYPKLGK ANMLLIEAIKDGS EGM ILPPLVVH++NG+YT+ | |
| Sbjct: | 181 | IIDSLRANGLAPKRVQFVYPKLGKSANMLLIEAIKDGSIEGMTILPPLVVHKENGEYTDH | 240 |
| Query: | 241 | IFDIYFGENGK---SHD | 254 |
| | | IF+IYFG K +HD | |
| Sbjct: | 241 | IFEIYFGAASKGKPNHD | 257 |

[11895] Based on this analysis, it was predicted that these proteins and their epitopes could be useful antigens for vaccines or diagnostics.

### EXAMPLE 2177

[11896] A DNA sequence (GBSx2294) was identified in S. agalactiae <SEQ ID 6727> which encodes the amino acid sequence <SEQ ID 6728>. Analysis of this protein sequence reveals the following:

```
Possible site: 55
>>> Seems to have no N-terminal signal sequence
----- Final Results -----
                            bacterial cytoplasm --- Certainty = 0.1512(Affirmative) < succ>
                              bacterial membrane --- Certainty = 0.0000(Not Clear) < succ>
                                bacterial outside --- Certainty = 0.0000(Not Clear) < succ>
```

[11897] The protein has homology with the following sequences in the GENPEPT database.

| >GP: CAB11811 GB: Z99104 similar to hypothetical proteins [Bacillus subtilis] | | | |
|---|---|---|---|
| Identities = 40/82 (48%), Positives = 63/82 (76%) | | | |
| Query: | 7 | YMYVLECSDGTLYTGYTTDVKRRLNTHNTGKGAKYTRARLPVKLLYSEAFNSKQEAMRAE | 66 |
| | | + YV++C D + Y GYT D+ +R+ THN GKGAKYT+ R PV+L+++E+F++K+EAM+AE | |
| Sbjct: | 7 | FFYVVKCKDNSWYAGYTNDLHKRVKTHNDGKGAKYTKVRRPVELIFAESFSTKREAMQAE | 66 |
| Query: | 67 | ALFKQKTRQAKLTYIKQHKNEQ | 88 |
| | | FK+ TR+ K YI++ +N + | |
| Sbjct: | 67 | YYFKKLTRKKKELYIEEKRNSK | 88 |

[11898] A related DNA sequence was identified in S. pyogenes <SEQ ID 6729> which encodes the amino acid sequence <SEQ ID 6730>. Analysis of this protein sequence reveals the following:

```
Possible site: 61
>>> Seems to have no N-terminal signal sequence
----- Final Results -----
                            bacterial cytoplasm --- Certainty = 0.1838(Affirmative) < succ>
                              bacterial membrane --- Certainty = 0.0000(Not Clear) < succ>
                                bacterial outside --- Certainty = 0.0000(Not Clear) < succ>
```

[11899] An alignment of the GAS and GBS proteins is shown below.

| Identities = 60/84 (71%), Positives = 67/84 (79%), Gaps = 1/84 (1%) | | | |
|---|---|---|---|
| Query: | 6 | AYMYVLECSDGTLYTGYTTDVKRRLNTHNTGKGAKYTRARLPVKLLYSEAFNSKQEAMRA | 65 |
| | | AYMYVLEC D TLYTGYTTD+K+RL THN GKGAKYTR RLPV LLY E F+SK+ AM A | |
| Sbjct: | 6 | AYMYVLECVDKTLYTGYTTDLKKRLATHNAGKGAKYTRYRLPVSLLYYEVFDSREAAMSA | 65 |
| Query: | 66 | EALF-KQKTRQAKLTYIKQHKNEQ | 88 |
| | | EALF K+KTR KL YI H+ E+ | |
| Sbjct: | 66 | EALFKKRKTRSQKLAYIATHQKEK | 89 |

[11900] Based on this analysis, it was predicted that these proteins and their epitopes could be useful antigens for vaccines or diagnostics.

### EXAMPLE 2178

[11901] A DNA sequence (GBSx2295) was identified in S. agalactiae <SEQ ID 6731> which encodes the amino acid sequence <SEQ ID 6732>. This protein is predicted to be autoaggregation-mediating protein (deaD). Analysis of this protein sequence reveals the following:

```
Possible site: 56
>>> Seems to have no N-terminal signal sequence
----- Final Results -----
                            bacterial cytoplasm --- Certainty = 0.2287(Affirmative) < succ>
                              bacterial membrane --- Certainty = 0.0000(Not Clear) < succ>
                                bacterial outside --- Certainty = 0.0000(Not Clear) < succ>
```

[11902] The protein has homology with the following sequences in the GENPEPT database.

| >GP: AAD20136 GB: AF091502 autoaggregation-mediating protein | | | |
|---|---|---|---|
| [Lactobacillus reuteri] | | | |
| Identities = 289/504 (57%), Positives = 366/504 (72%), Gaps = 18/504 (3%) | | | |
| Query: | 1 | MKFTELNLSQDILSAVEKAGFVEPSPIQEMTIPLALEGKDVIGQAQTGTGKTAAFGLPTL | 60 |
| | | MKF+EL LS +L A++++G+ E +PIQE TIP+ LEGKDVIGQAQTGTGKTAAFGLP + | |
| Sbjct: | 1 | MKFSELGLSDSLLKAIKRSGYEEATPIQEQTIPMVLEGKDVIGQAQTGTGKTAAFGLPII | 60 |
| Query: | 61 | NKIHTEDNTIQALIIAPTRELAVQSQEELFRFGRDKGVKVRSVYGGSSIEKQIKALRSGA | 120 |
| | | + TE+ IQA+II+PTRELA+Q+QEEL+R G+DK V+V+ VYGG+ I +QIK+L+ | |
| Sbjct: | 61 | ENVDTENPNIQAIIISPTRELAIQTQEELYRLGKDKHVRVQVVYGGADIRRQIKSLKQHP | 120 |
| Query: | 121 | HVVVGTPGRLLDLIKRKALKLNHIETLILDEADEMLNMGFLEDIEAIISRVPETRQTLLF | 180 |
| | | ++VGTPGRL D I R +KL+HI+TL+LDEADEMLNMGFLEDIE+II P+ RQTLLF | |
| Sbjct: | 121 | QILVGTPGRLRDHINRHTVKLDHIKTLVLDEADEMLNMGFLEDIESIIKETPDDRQTLLF | 180 |
| Query: | 181 | SATMPDPIKRIGVKFMKDPEHVKIKATELTNVNVDQYYVRVKENEKFDTMTRLMDVDQPE | 240 |
| | | SATMP IKRIGV+FM DPE V+IKA ELT VDQYYVR ++ EKFD MTRL+DV P+ | |
| Sbjct: | 181 | SATMPPEIKRIGVQFMSDPETVRIKAKELTTDLVDQYYVRARDYEKFDIMTRLIDVQDPD | 240 |
| Query: | 241 | LSIVFGRTKRRVDELTRGLKLRGFRAEGIHGDLDQNKRLRVIRDFKNDHIDILVATDVAA | 300 |
| | | L+IVFGRTKRRVDEL++GL RG+ A GIHGDL Q+KR +++ FKN+ +DILVATDVAA | |
| Sbjct: | 241 | LTIVFGRTKRRVDELSKGLIARGYNAAGIHGDLTQDKRSKIMWKFKNNELDILVATDVAA | 300 |
| Query: | 301 | RGLDISGVTHVYNYDIPQDPESYVHRIGRTGRAGKSGQSITFVSPNEMGYLTIIENLTKK | 360 |
| | | RGLDISGVTHVYNYDIP DP+SYVHRIGRTGRAG G S+TFV+PNEM YL IE LT+ | |
| Sbjct: | 301 | RGLDISGVTHVYNYDIPSDPDSYVHRIGRTGRAGHHGVSLTFVTPNEMDYLHEIEKLTRV | 360 |
| Query: | 361 | RMTGMKPATASEAFQAKKKVALKRIARDFED-QELVSK--FDKFKADALELATQYTPEEL | 417 |
| | | RM +KP TA EAF+ ++A F D EL+++ D+++ A +L + +L | |
| Sbjct: | 361 | RMLPLKPPTAEEAFKG-------QVASAFNDIDELIAQDSTDRYEEAAEKLLETHNATDL | 413 |
| Query: | 418 | ALYVLSLTVQDPESLPEVEITREKPLPFKPSGGGFKGKGGRGNGRGGD--RRRNDRGDRR | 475 |
| | | +L+ ++ S V+IT E+PLP + G R N GG+ RR+N R + | |
| Sbjct: | 414 | VAALLNNMTKEAASEVPVKITPERPLPRRNKRN--NRNGNRNNSHGGNHYRRKNFRRHQH | 471 |
| Query: | 476 | GNRDRDDRG----SRCDFKRRDDK | 495 |
| | | G+ D+ G SR F R K | |
| Sbjct: | 472 | GSHRNDNHGKSHSSRHSFNIRHRK | 495 |

[11903] A related DNA sequence was identified in S. pyogenes <SEQ ID 6733> which encodes the amino acid sequence <SEQ ID 6734>. Analysis of this protein sequence reveals the following:

```
Possible site: 56
>>> Seems to have no N-terminal signal sequence
----- Final Results -----
                            bacterial cytoplasm --- Certainty = 0.1108(Affirmative) < succ>
                              bacterial membrane --- Certainty = 0.0000(Not Clear) < succ>
                                bacterial outside --- Certainty = 0.0000(Not Clear) < succ>
```

[11904] An alignment of the GAS and GBS proteins is shown below.

| Identities 430/545 (78%), Positives = 463/545 (84%), Gaps = 24/545 (4%) | | | |
|---|---|---|---|
| Query: | 1 | MKFTELNLSQDILSAVEKAGFVEPSPIQEMTIPLALEGKDVIGQAQTGTGKTAAFGLPTL | 60 |
| | | +KFTE NLSQDI SAV AGF + SPIQEMTIPLALEGKDVIGQAQTGTGKTAAFGLPTL | |
| Sbjct: | 1 | LKFTEFNLSQDIQSAVVTAGFEKASPIQEMTIPLALEGKDVIGQAQTGTGKTAAFGLPTL | 60 |
| Query: | 61 | NKIHTEDNTIQALIIAPTRELAVQSQEELFRFGRDKGVKVRSVYGGSSIEKQIKALRSGA | 120 |
| | | NKI T +N IQAL+IAPTRELAVQSQEELFRFGR+KGVKVRSVYGGSSIEKQIKAL+SGA | |
| Sbjct: | 61 | NKIRTNENIIQALVIAPTRELAVQSQEELFRFGREKGVKVRSVYGGSSIEKQIKALKSGA | 120 |
| Query: | 121 | HVVVGTPGRLLDLIKRKALKLNHIETLILDEADEMLNMGFLEDIEAIISRVPETRQTLLF | 180 |
| | | H+VVGTPGRLLDLIKRKAL L+H+ETLILDEADEMLNMGFLEDIEAIISRVP RQTLLF | |
| Sbjct: | 121 | HIVVGRPGRLLDLIKRKALILDHVETLILDEADEMLNMGFLEDIEAIISRVPADRQTLLF | 180 |
| Query: | 181 | SATMPDPIKRIGVKFMKDPEHVKIKATELTNVNVDQYYVRVKENEKFDTMTRLMDVDQPE | 240 |
| | | SATMP PIK+IGVKFMKDPEHV+IK ELTNVNVDQYYVRVKE EKFDTMTRLMDV+QPE | |
| Sbjct: | 181 | SATMPAPIKQIGVKFMKDPEHVQIKNKELTNVNVDQYYVRVKEQEKFDTMTRLMDVNQPE | 240 |
| Query: | 241 | LSIVFGRTKRRVDELTRGLKLRGFRAEGIHGDLDQNKRLRVIRDFKNDHIDILVATDVAA | 300 |
| | | LSIVFGRTKRRVDE+TRGLKLRGFRAEGIHGDLDQNKRLRVIRDFKND IDILVATDVAA | |
| Sbjct: | 241 | LSIVFGRTKRRVDEITRGLKLRGFRAEGIHGDLDQNKRLRVIRDFKNDQIDILVATDVAA | 300 |
| Query: | 301 | RGLDISGVTHVYNYDIPQDPESYVHRIGRTGRAGKSGQSITFVSPNEMGYLTIIENLTKK | 360 |
| | | RGLDISGVTHVYNYDI QDPESYVHRIGRTGRAGKSG+SITFVSPNEMGYL++IENLTKK | |
| Sbjct: | 301 | RGLDISGVTHVYNYDITQDPESYVHRIGRTGRAGKSGESITFVSPNEMGYLSMIENLTKK | 360 |
| Query: | 361 | RMTGMKPATASEAFQAKKKVALKRIARDFEDQELVSKFDKFKADALELATQYTPEELALY | 420 |
| | | +M ++PATA EAFQAKKKVALK+I RDF D+ + S FDKFK DA++LA ++TPEELALY | |
| Sbjct: | 361 | QMKPLRPATAEEAFQAKKKVALKKIERDFADETIRSNFDKFKGDAVQLAAEFTPEELALY | 420 |
| Query: | 421 | VLSLTVQDPESLPEVEITREKPLPFKPSGGGF---KGKGGRG--NGRGGDRRRNDRGDR- | 474 |
| | | +LSLTVQDP+SLPEVEI REKPLPFK GGG GKGGRG N GDRR RGDR | |
| Sbjct: | 421 | ILSLTVQDPDSLPEVEIAREKPLPFKYVGGGHGNKNGKGGRGRDNRNRGDRRGGYRGDRN | 480 |
| Query: | 475 | ------------RGNRDRDDRGSRCDFKRRDDKFKKDNRRQENKKPHKNTSSEKQTGFVI | 522 |
| | | R RD D DFKR+ + KD +E K SS K TGFVI | |
| Sbjct: | 481 | RDERDGDRRRQKRDKRDGHDGSGNRDFKRKSKRNSKDFFNKEKK------SSAKNTFFVI | 534 |
| Query: | 523 | RNKGD | 527 |
| | | R+KG+ | |
| Sbjct: | 535 | RHKGE | 539 |

[11905] A related GBS gene <SEQ ID 8991> and protein <SEQ ID 8992> were also identified. Analysis of this protein sequence reveals the following:
[11906] RGD motif 471-473

[11907] The protein has homology with the following sequences in the databases:

[chemical structure]

[11908] There is also homology to SEQ ID 4454.

[11909] SEQ ID 8992 (GBS307) was expressed in E. coli as a His-fusion product. SDS-PAGE analysis of total cell extract is shown in FIG. 56 (lane 7; MW 62 kDa). It was also expressed in E. coli as a GST-fusion product. SDS-PAGE analysis of total cell extract is shown in FIG. 61 (lane 2; MW 86.7 kDa).

[11910] The GBS307-GST fusion product was purified (FIG. 208, lane 9; FIG. 225, lane 10-11) and used to immunise mice. The resulting antiserum was used for FACS (FIG. 272), which confirmed that the protein is immunoaccessible on GBS bacteria.

[11911] Based on this analysis, it was predicted that these proteins and their epitopes could be useful antigens for vaccines or diagnostics.

### EXAMPLE 2179

[11912] A DNA sequence (GBSx2296) was identified in S. agalactiae <SEQ ID 6735> which encodes the amino acid sequence <SEQ ID 6736>. This protein is predicted to be outer membrane protein (yaeC). Analysis of this protein sequence reveals the following:

```
Possible site: 19
>>> May be a lipoprotein
----- Final Results -----
                              bacterial membrane --- Certainty = 0.0000(Not Clear) < succ>
                                bacterial outside --- Certainty = 0.0000(Not Clear) < succ>
                            bacterial cytoplasm --- Certainty = 0.0000(Not Clear) < succ>
```

[11913] The protein has homology with the following sequences in the GENPEPT database.

| >GP: CAB73036 GB: AL139076 putative periplasmic protein | | | |
|---|---|---|---|
| [Campylobacter jejuni] | | | |
| Identities = 89/237 (37%), Positives = 132/237 (55%), Gaps = 3/237 (1%) | | | |
| Query: | 40 | ITVATYSKPTSTFLDLVKDNVKEKGYTLKVVMVSDYIQANIALENKEHDANLLQHEFFMS | 99 |
| | | IT+ P + L+L+KD+ K KGY LK+V SDYI N ALE KE DANL QH+ F+ | |
| Sbjct: | 23 | ITIGATPNPFGSLLELMKDDFKNKGYELKIVEFSDYILPNRALEEKELDANLYQHKPFLE | 82 |
| Query: | 100 | IFNKENDGHLVSITPIYHSLAGFYGQHLKNIAELKDGAKVAIPSDPANMTRALLLLQEKK | 159 |
| | | +N + +L++ TP+ + G Y + +KN+ LK+GA+VAIP+D N +RAL LL++ K | |
| Sbjct: | 83 | EYNLKKGSNLIATTPVLIAPVGVYSKKIKNLENLKEGARVAIPNDATNESRALELLEKAK | 142 |
| Query: | 160 | LITLKNTSKKTKAIEDIITNPKKLRIEPVALLNLNQAYFEYDLVFNFPGYVTKINLVPKR | 219 |
| | | LI L + KT DI NPKKL+ + L +A + D+ + L P + | |
| Sbjct: | 143 | LIELNKNTLKTPL--DINKNPKKLKFIELKAAQLPRALDDVDIAIINSNFALGAGLNPSK | 200 |
| Query: | 220 | DRLLYEKKPDIRFAGALVAREDNKNSDKIKVLKEVLTSKEIRHYITKEIPSEAAVAF | 276 |
| | | D + E K + + +V R + KNS+K KV+ E+L S + + I + AF | |
| Sbjct: | 201 | DTIFREDK-NSPYVNYVVVRSEGKNSEKTKVIDEILRSDKFKAIINEHYKDILIPAF | 256 |

[11914] SEQ ID 6736 (GBS126) was expressed in E. coli as a His-fusion product. SDS-PAGE analysis of total cell extract is shown in FIG. 34 (lane 7; MW 32 kDa).

[11915] Based on this analysis, it was predicted that this protein and its epitopes, could be useful antigens for vaccines or diagnostics.

### EXAMPLE 2180

[11916] A DNA sequence (GBSx2297) was identified in S. agalactiae <SEQ ID 6737> which encodes the amino acid sequence <SEQ ID 6738>. This protein is predicted to be probable permease of ABC transporter. Analysis of this protein sequence reveals the following:

```
Possible site: 34
>>> Seems to have no N-terminal signal sequence
      INTEGRAL Likelihood = −11.99 Transmembrane 190-206 ( 187-215)
      INTEGRAL Likelihood = −8.44 Transmembrane 25-41 ( 16-45)
      INTEGRAL Likelihood = −6.48 Transmembrane 69-85 ( 68-90)
      INTEGRAL Likelihood = −3.77 Transmembrane 90-106 ( 88-109)
      INTEGRAL Likelihood = −1.44 Transmembrane 145-161 ( 145-161)
----- Final Results -----
                              bacterial membrane --- Certainty = 0.5798(Affirmative) < succ>
                                bacterial outside --- Certainty = 0.0000(Not Clear) < succ>
                            bacterial cytoplasm --- Certainty = 0.0000(Not Clear) < succ>
```

[11917] The protein has homology with the following sequences in the GENPEPT database.

| >GP: AAG08889 GB: AE004963 probable permease of ABC transporter | | | |
|---|---|---|---|
| [Pseudomonas aeruginosa] | | | |
| Identities = 80/206 (38%), Positives = 127/206 (60%), Gaps = 4/206 (1%) | | | |
| Query: | 15 | SFWETNLMLGLTLILCFLIAFPTGILLFSLRKSYLIKHSLAYQLLNLFLGTLRSVPFLIF | 74 |
| | | +FW MLG +L+ ++ P G+LLF + + Y LL+L + LRS+PF+I | |
| Sbjct: | 24 | TFW----MLGGSLLFTVVLGLPLGVLLFLTGPRQMFEQKAVYTLLSLVVNILRSLPFIIL | 79 |
| Query: | 75 | IFILIPLNRLIFGTSFGTIAAILPLTLVSVSLYARYVEQALLNIPQVVVDRALSLGANKR | 134 |
| | | + IPL LI GTS G AI PL + + +AR VE AL + + +++ ++GA+ R | |
| Sbjct: | 80 | LIVMIPLTVLITGTSLGVAGAIPPLVVGATPFFARLVETALREVDKGIIEATQAMGASTR | 139 |
| Query: | 135 | QIIYYFLIPSIKIDLVLSFTATAISILGYSTIMGVIGAGGLGEYAYRFGYQEYDYPVMYL | 194 |
| | | QII+ L+P + ++ + T TAI+++ Y+ + GV+GAGGLG+ A RFGYQ + VM + | |
| Sbjct: | 140 | QIIWNALLPEARPGIIAAITVTAITLVSYTAMAGVVGAGGLGDLAIRFGYQRFQTDVMVV | 199 |
| Query: | 195 | IVVLFIIYVFILQSLGYFIANRYSRK | 220 |
| | | VV+ +I V ILQ++G + +SRK | |
| Sbjct: | 200 | TVVMLLILVQILQTVGDKLVVHFSRK | 225 |

[11918] Based on this analysis, it was predicted that this protein and its epitopes, could be useful antigens for vaccines or diagnostics.

### EXAMPLE 2181

[11919] A DNA sequence (GBSx2298) was identified in S. agalactiae <SEQ ID 6739> which encodes the amino acid sequence <SEQ ID 6740>. This protein is predicted to be ABC transporter, ATP-binding protein (oppF). Analysis of this protein sequence reveals the following:

```
Possible site: 48
>>> Seems to have no N-terminal signal sequence
----- Final Results -----
                            bacterial cytoplasm --- Certainty = 0.5454(Affirmative) < succ>
                              bacterial membrane --- Certainty = 0.0000(Not Clear) < succ>
                                bacterial outside --- Certainty = 0.0000(Not Clear) < succ>
```

[11920] A related GBS nucleic acid sequence <SEQ ID 9333> which encodes amino acid sequence <SEQ ID 9334> was also identified.

[11921] The protein has homology with the following sequences in the GENPEPT database.

| >GP: AAC22280 GB: U32744 ABC transporter, ATP-binding protein | | | |
|---|---|---|---|
| [Haemophilus influenzae Rd] | | | |
| Identities = 62/174 (35%), Positives = 104/174 (59%), Gaps = 2/174 (1%) | | | |
| Query: | 1 | MKMINGLIPYDKGNIYYQGKEVKSFSDNKLRQMRKDIAYIFQNHNLLAGESVYYHLALVY | 60 |
| | | ++ +N L G++ G E+ SD +L R+ I IFQ+ NLL+ +V+ ++AL | |
| Sbjct: | 48 | IRCVNLLEKPTSGSVIVDGVELTKLSDRELVLARRQIGMIFQHFNLLSSRTVFENVALPL | 107 |
| Query: | 61 | KLNHQKVN--HDAINDILDFLGLMDLKQVKCHSLSGGQQQKVAIAMAVLQKPKLILCDEI | 118 |
| | | +L + + I +LD +GL + + +LSGGQ+Q+VAIA A+ PK++LCDE | |
| Sbjct: | 108 | ELESESKAKIQEKITALLDLVGLSEKRDAYPSNLSGGQKQRVAIARALASDPKVLLCDEA | 167 |
| Query: | 119 | SSALDTNSEKEIFNLLSDLREKYGISILMIAHHLSLLKQYCDRVMILDHQTIVD | 172 |
| | | +SALD + + I LL ++ GI+IL+I H + ++KQ CD+V ++D +V+ | |
| Sbjct: | 168 | TSALDPATTQSILKLLKEINRTLGITILLITHEMEVVKQICDQVAVIDQGRLVE | 221 |

[11922] There is also homology to SEQ ID 76.

[11923] Based on this analysis, it was predicted that this protein and its epitopes, could be useful antigens for vaccines or diagnostics.

### EXAMPLE 2182

[11924] A DNA sequence (GBSx2299) was identified in S. agalactiae <SEQ ID 6741> which encodes the amino acid sequence <SEQ ID 6742>. Analysis of this protein sequence reveals the following:

```
Possible site: 21
>>> Seems to have an uncleavable N-term signal seq
----- Final Results -----
                              bacterial membrane --- Certainty = 0.0000(Not Clear) < succ>
                                bacterial outside --- Certainty = 0.0000(Not Clear) < succ>
                            bacterial cytoplasm --- Certainty = 0.0000(Not Clear) < succ>
```

[11925] The protein has no significant homology with any sequences in the GENPEPT database.

[11926] No corresponding DNA sequence was identified in S. pyogenes.

[11927] Based on this analysis, it was predicted that this protein and its epitopes, could be useful antigens for vaccines or diagnostics.

### EXAMPLE 2183

[11928] A DNA sequence (GBSx2300) was identified in S. agalactiae <SEQ ID 6743> which encodes the amino acid sequence <SEQ ID 6744>. Analysis of this protein sequence reveals the following:

```
Possible site: 18
>>> Seems to have no N-terminal signal sequence
----- Final Results -----
                            bacterial cytoplasm --- Certainty = 0.0904(Affirmative) < succ>
                              bacterial membrane --- Certainty = 0.0000(Not Clear) < succ>
                                bacterial outside --- Certainty = 0.0000(Not Clear) < succ>
```

[11929] A related GBS nucleic acid sequence <SEQ ID 9741> which encodes amino acid sequence <SEQ ID 9742> was also identified.

[11930] The protein has homology with the following sequences in the GENPEPT database.

| >GP: AAB87515 GB: AF034138 unknown [Bacillus subtilis] | | | |
|---|---|---|---|
| Identities = 74/125 (59%), Positives = 92/125 (73%) | | | |
| Query: | 5 | MGIFSGLMGNASQMDTDKVENQLSDILISDEQVDLAYTLIRDLIVFTNYRLILVDKQGVT | 64 |
| | | MG GL+GNAS + T V+ +L+ IL+ E+V+ A+ L+RDLIVFT+ RLILVDKQG+T | |
| Sbjct: | 1 | MGFIDGLLGNASTLSTAAVQEELAHILLEGEKVEAAFKLVRDLIVFTDKRLILVDKQGIT | 60 |
| Query: | 65 | GKKVSYNSIPYASISRFTVETSGHFDLDAELKIWISSAIEPAEVLQFKNDRNIVSIQKAL | 124 |
| | | GKK + SIPY SISRF+VET+G FDLD+ELKIWIS A PA QFK D +I IQK L | |
| Sbjct: | 61 | GKKTEFQSIPYKSISRFSVETAGRFDLDSELKIWISGAELPAVSKQFKKDESIYDIQKVL | 120 |
| Query: | 125 | ATAVL | 129 |
| | | A + | |
| Sbjct: | 121 | AAVCM | 125 |

[11931] No corresponding DNA sequence was identified in S. pyogenes.

[11932] Based on this analysis, it was predicted that this protein and its epitopes, could be useful antigens for vaccines or diagnostics.

### EXAMPLE 2184

[11933] A DNA sequence (GBSx2301) was identified in S. agalactiae <SEQ ID 6745> which encodes the amino acid sequence <SEQ ID 6746>. Analysis of this protein sequence reveals the following:

```
Possible site: 59
>>> Seems to have no N-terminal signal sequence
----- Final Results -----
                            bacterial cytoplasm --- Certainty = 0.0921(Affirmative) < succ>
                              bacterial membrane --- Certainty = 0.0000(Not Clear) < succ>
                                bacterial outside --- Certainty = 0.0000(Not Clear) < succ>
```

[11934] A related GBS nucleic acid sequence <SEQ ID 9331> which encodes amino acid sequence <SEQ ID 9332> was also identified.

[11935] The protein has homology with the following sequences in the GENPEPT database.

| >GP: CAA74739 GB: Y14370 peptide chain release factor 3 | | | |
|---|---|---|---|
| [Staphylococcus aureus] | | | |
| Identities = 274/462 (59%), Positives = 349/462 (75%), Gaps = 9/462 (1%) | | | |
| Query: | 1 | MDIEKQRGISVTSSVMQFDYAGKRVNILDTPGHEDFSEDTYRTLMAVDAAVMVVDSAKGI | 60 |
| | | M +E++RGISVTSSVMQFDY +NILDTPGHEDFSEDTYRTLMAVD+AVMV+D AKG+ | |
| Sbjct: | 57 | MKVEQERGISVTSSVMQFDYDDYEINILDTPGHEDFSEDTYRTLMAVDSAVMVIDCAKGV | 116 |
| Query: | 61 | EAQTKKLFEVVKHRNIPVFTFINKLDRDGREPLDLLEELEEVLGIASYPMNWPIGMGKSF | 120 |
| | | E T KLF+V K R IP+FTFINKLDR G+EP +LL+E+EE L I +YPMNWPIGMG+SF | |
| Sbjct: | 117 | EPPTLKLFKVCKMRGIPIFTFINKLDRVGKEPFELLDEIEETLNIETYPMNWPIGMGQSF | 176 |
| Query: | 121 | EGLYDLHNKRLELYKGDERFASIEDG-----DQLFANNPFYEQVKEDIELLQEAGNDFSE | 175 |
| | | G+ D +K +E ++ +E + D D N+ +EQ E++ L++EAG F | |
| Sbjct: | 177 | FGIIDRKSKTIEPFRDEENILHLNDDFELEEDHAITNDSDFEQAIEELMLVEEAGEAFDN | 236 |
| Query: | 176 | QAILDGDLTPVFFGSALTNFGVQTFLDTFLEFAPEPHGHKTTEGNVIDPLAKDFSGFVFK | 235 |
| | | A+L GDLTPVFFGSAL NFGVQ FL+ +++FAP P+ +T E + P FSGF+FK | |
| Sbjct: | 237 | DALLSGDLTPVFFGSALANFGVQNFLNAYVDFAPMPNARQTKENVEVSPFDDSFSGFIFK | 296 |
| Query: | 236 | IQANMDPRHRDRIAFVRIVSGEFERGMGVNLTRTGKGAKLSNVTQFMAES-RENVTNAVA | 294 |
| | | IQANMDP+HRDRIAF+R+VSG FER + + L +K S+V + + ++ ++ V +AVA | |
| Sbjct: | 297 | IQANMDPKHRDRIAFMRVVSGAFER-VWMLLCNVLIKSKRSHVQRHLWQTIKKLVNHAVA | 355 |
| Query: | 295 | GDIIGVYDTGTYQVGDTLTVGKNKFEFEPLPTFTPELFMKVSAKNVMKQKSFHKGIEQLV | 354 |
| | | GDIIG+YDTG YQ+GDTL GK + F+ LP FTPE+FMKVSAKNVMKQK FHKGIEQLV | |
| Sbjct: | 356 | GDIIGLYDTGNYQIGDTLVGGKQTYSFQDLPQFTPEIFMKVSAKNVMKQKHFHKGIEQLV | 415 |
| Query: | 355 | QEGAIQLYKNYQTGEYMLGAVGQLQFEVFKHRMEGEYNAEVVMTPMGKKTVRW--INSDD | 412 |
| | | QEGAIQ YK T + +LGAVGQLQFEVF+HRM+ EYN +VVM P+G+K RW N D | |
| Sbjct: | 416 | QEGAIQYYKTLHTNQIILGAVGQLQFEVFEHRMKNEYNVDVVMEPVGRKIARWDIENEDQ | 475 |
| Query: | 413 | LDERMSSSRNILAKDRFDQPVFLFENDFALRWFADKYPDVKL | 454 |
| | | + ++M++SR+IL KDR+D VFLFEN+FA RWF +K+P++KL | |
| Sbjct: | 476 | ITDKMNTSRSILVKDRYDDLVFLFENEFATRWFEEKFPEIKL | 517 |

[11936] A related DNA sequence was identified in S. pyogenes <SEQ ID 6747> which encodes the amino acid sequence <SEQ ID 6748>. Analysis of this protein sequence reveals the following:

```
Possible site: 52
>>> Seems to have no N-terminal signal sequence
----- Final Results -----
                            bacterial cytoplasm --- Certainty = 0.2070(Affirmative) < succ>
                              bacterial membrane --- Certainty = 0.0000(Not Clear) < succ>
                                bacterial outside --- Certainty = 0.0000(Not Clear) < succ>
```

[11937] An alignment of the GAS and GBS proteins is shown below.

| Identities = 447/458 (97%), Positives = 455/458 (98%) | | | |
|---|---|---|---|
| Query: | 1 | MDIEKQRGISVTSSVMQFDYAGKRVNILDTPGHEDFSEDTYRTLMAVDAAVMVVDSAKGI | 60 |
| | | MDIEKQRGISVTSSVMQFDYAGKRVNILDTPGHEDFSEDTYRTLMAVDAAVMVVDSAKGI | |
| Sbjct: | 57 | MDIEKQRGISVTSSVMQFDYAGKRVNILDTPGHEDFSEDTYRTLMAVDAAVMVVDSAKGI | 116 |
| Query: | 61 | EAQTKKLFEVVKHRNIPVFTFINKLDRDGREPLDLLEELEEVLGIASYPMNWPIGMGKSF | 120 |
| | | EAQTKKLFEVVKHRNIPVFTFINKLDRDGREPL+LLEELEEVLGIASYPMNWPIGMG++F | |
| Sbjct: | 117 | EAQTKKLFEVVKHRNIPVFTFINKLDRDGREPLELLEELEEVLGIASYPMNWPIGMGRAF | 176 |
| Query: | 121 | EGLYDLHNKRLELYKGDERFASIEDGDQLFANNPFYEQVKEDIELLQEAGNDFSEQAILD | 180 |
| | | EGLYDLHNKRLELYKGDERFASIEDGDQLFANNPFYEQVKEDIELLQEAGNDFSEQAILD | |
| Sbjct: | 177 | EGLYDLHNKRLELYKGDERFASIEDGDQLFANNPFYEQVKEDIELLQEAGNDFSEQAILD | 236 |
| Query: | 181 | GDLTPVFFGSALTNFGVQTFLDTFLEFAPEPHGHKTTEGNVIDPLAKDFSGFVFKIQANM | 240 |
| | | GDLTPVFFGSALTNFGVQTFLDTFLEFAPEPHGHKTTEGNV+DPLAKDFSGFVFKIQANM | |
| Sbjct: | 237 | GDLTPVFFGSALTNFGVQTFLDTFLEFAPEPHGHKTTEGNVVDPLAKDFSGFVFKIQANM | 296 |
| Query: | 241 | DPRHRDRIAFVRIVSGEFERGMGVNLTRTGKGAKLSNVTQFMAESRENVTNAVAGDIIGV | 300 |
| | | DP+HRDRIAFVRIVSGEFERGMGVNLTRTGKGAKLSNVTQFMAESRENVTNAVAGDIIGV | |
| Sbjct: | 297 | DPKHRDRIAFVRIVSGEFERGMGVNLTRTGKGAKLSNVTQFMAESRENVTNAVAGDIIGV | 356 |
| Query: | 301 | YDTGTYQVGDTLTVGKNKFEFEPLPTFTPELFMKVSAKNVMKQKSFHKGIEQLVQEGAIQ | 360 |
| | | YDTGTYQVGDTLTVGKNKFEFEPLPTFTPE+FMKVS KNVMKQKSFHKGIEQLVQEGAIQ | |
| Sbjct: | 357 | YDTGTYQVGDTLTVGKNKFEFEPLPTFTPEIFMKVSPKNVMKQKSFHKGIEQLVQEGAIQ | 416 |
| Query: | 361 | LYKNYQTGEYMLGAVGQLQFEVFKHRMEGEYNAEVVMTPMGKKTVRWINSDDLDERMSSS | 420 |
| | | LYKNYQTGEYMLGAVGQLQFEVFKHRMEGEYNAEVVMTPMGKKTVRWI+ DDLD+RMSSS | |
| Sbjct: | 417 | LYKNYQTGEYMLGAVGQLQFEVFKHRMEGEYNAEVVMTPMGKKTVRWISEDDLDQRMSSS | 476 |
| Query: | 421 | RNILAKDRFDQPVFLFENDFALRWFADKYPDVKLEEKM | 458 |
| | | RNILAKDRFDQPVFLFENDFALRWFADKYPDV LEEKM | |
| Sbjct: | 477 | RNILAKDRFDQPVFLFENDFALRWFADKYPDVTLEEKM | 514 |

[11938] Based on this analysis, it was predicted that these proteins and their epitopes could be useful antigens for vaccines or diagnostics.

### EXAMPLE 2185

[11939] A DNA sequence (GBSx2302) was identified in S. agalactiae <SEQ ID 6749> which encodes the amino acid sequence <SEQ ID 6750>. Analysis of this protein sequence reveals the following:

```
Possible site: 17
>>> Seems to have no N-terminal signal sequence
----- Final Results -----
                            bacterial cytoplasm --- Certainty = 0.3061(Affirmative) < succ>
                              bacterial membrane --- Certainty = 0.0000(Not Clear) < succ>
                                bacterial outside --- Certainty = 0.0000(Not Clear) < succ>
```

[11940] The protein has homology with the following sequences in the GENPEPT database.

| >GP: AAC38046 GB: AF000954 No definition line found | | | |
|---|---|---|---|
| [Streptococcus mutans] | | | |
| Identities = 122/142 (85%), Positives = 138/142 (96%) | | | |
| Query: | 1 | MLEFAAQKTGKENKEMAVTFVTNERSHELNLEYRDTDRPTDVISLEYKPEVDISFDEEDL | 60 |
| | | +LEFAAQKTGKE+KEMAVTFVTNERSHELNL+YRDT+RPTDVISLEYKPE +SFDEEDL | |
| Sbjct: | 23 | ILEFAAQKTGKEDKEMAVTFVTNERSHELNLKYRDTNRPTDVISLEYKPESSLSFDEEDL | 82 |
| Query: | 61 | AENPELAEMLEDFDSYIGELFISIDKAKEQAEEYGHSYEREMGFLAVHGFLHINGYDHYT | 120 |
| | | A++P+LAE+L +FD+YIGELFIS+DKA+EQA+EYGHS+EREMGFLAVHGFLHINGYDHYT | |
| Sbjct: | 83 | ADDPDLAEVLTEFDAYIGELFISVDKAREQAQEYGHSFEREMGFLAVHGFLHINGYDHYT | 142 |
| Query: | 121 | PEEEKEMFSLQEEILTAYGLKR | 142 |
| | | P+EEKEMFSLQEEIL AYGLKR | |
| Sbjct: | 143 | PQEEKEMFSLQEEILDAYGLKR | 164 |

[11941] There is also homology to SEQ ID 120.

[11942] Based on this analysis, it was predicted that this protein and its epitopes, could be useful antigens for vaccines or diagnostics.

### EXAMPLE 2186

[11943] A DNA sequence (GBSx2303) was identified in S. agalactiae <SEQ ID 6751> which encodes the amino acid sequence <SEQ ID 6752>. Analysis of this protein sequence reveals the following:

| Possible site: 59 | | | | |
|---|---|---|---|---|
| >>> Seems to have no N-terminal signal sequence | | | | |
| | INTEGRAL | Likelihood = −15.39 | Transmembrane | 108-124 (100-131) |
| | INTEGRAL | Likelihood = −8.92 | Transmembrane | 61-77 (52-82) |
| | INTEGRAL | Likelihood = −5.36 | Transmembrane | 41-57 (40-60) |

```
----- Final Results -----
                              bacterial membrane --- Certainty = 0.7156(Affirmative) < succ>
                                bacterial outside --- Certainty = 0.0000(Not Clear) < succ>
                            bacterial cytoplasm --- Certainty = 0.0000(Not Clear) < succ>
```

[11944] The protein has homology with the following sequences in the GENPEPT database.

| >GP: AAC38047 GB: AF000954 diacyglycerol kinase [Streptococcus mutans] | | | |
|---|---|---|---|
| Identities = 107/133 (80%), Positives = 121/133 (90%), Gaps = 2/133 (1%) | | | |
| Query: | 1 | MDLNDN--NHKKWKNRTLTSSMEFAVTGIFTAFKEERNMRKHLVSAILVILAGLTFQVSM | 58 |
| | | MDL DN + KKWKNRTLTSS+EFA+TGIFTAFKEERNM+KH VSA+L ++AGL F+VS+ | |
| Sbjct: | 3 | MDLRDNKQSQKKWKNRTLTSSLEFALTGIFTAFKEERNMKKHAVSALLAVIAGLVFKVSV | 62 |
| Query: | 59 | VEWLFLLLSIFLVITFEIINSAIENVVDLASNYHFSMLAKNAKDMAAGAVLVVSLFAVLV | 118 |
| | | +EWLFLLLSIFLVITFEI+NSAIENVVDLAS+YHFSMLAKNAKDMAAGAVLV+S FA L | |
| Sbjct: | 63 | IEWLFLLLSIFLVITFEIVNSAIENVVDLASDYHFSMLAKNAKDMAAGAVLVISGFAALT | 122 |
| Query: | 119 | GLIIFIPKILALL | 131 |
| | | GLIIF+PKI LL | |
| Sbjct: | 123 | GLIIFVPKIWFLL | 135 |

[11945] A related DNA sequence was identified in S. pyogenes <SEQ ID 6753> which encodes the amino acid sequence <SEQ ID 6754>. Analysis of this protein sequence reveals the following:

| Possible site: 34 | | | | |
|---|---|---|---|---|
| >>> Seems to have no N-terminal signal sequence | | | | |
| | INTEGRAL | Likelihood = −10.67 | Transmembrane | 63-79 (41-84) |
| | INTEGRAL | Likelihood = −7.32 | Transmembrane | 110-126 (105-129) |
| | INTEGRAL | Likelihood = −5.41 | Transmembrane | 43-59 (41-62) |

```
----- Final Results -----
                              bacterial membrane --- Certainty = 0.5267(Affirmative) < succ>
                                bacterial outside --- Certainty = 0.0000(Not Clear) < succ>
                            bacterial cytoplasm --- Certainty = 0.0000(Not Clear) < succ>
```

[11946] The protein has homology with the following sequences in the databases:

| >GP: AAC38047 GB: AF000954 diacyglycerol kinase [Streptococcus mutans] | | | |
|---|---|---|---|
| Identities = 104/135 (77%), Positives = 119/135 (88%) | | | |
| Query: | 1 | MALHDNNTTKRKWKNRTITSSLEFALTGVFTAFKEERNLRSHLLSACLACVAGLFFSISA | 60 |
| | | M L DN +++KWKNRT+TSSLEFALTG+FTAFKEERN++ H +SA LA +AGL F +S | |
| Sbjct: | 3 | MDLRDNKQSQKKWKNRTLTSSLEFALTGIFTAFKEERNMKKHAVSALLAVIAGLVFKVSV | 62 |
| Query: | 61 | IEWLFLLLAIFLVITLEIVNSAIENVVDLASDYHFSMLAKNAKDMAAGAVLMISGYAVLT | 120 |
| | | IEWLFLLL+IFLVIT EIVNSAIENVVDLASDYHFSMLAKNAKDMAAGAVL+ISG+A LT | |
| Sbjct: | 63 | IEWLFLLLSIFLVITFEIVNSAIENVVDLASDYHFSMLAKNAKDMAAGAVLVISGFAALT | 122 |
| Query: | 121 | GLIIFIPKIWNIFVH | 135 |
| | | GLIIF+PKIW + H | |
| Sbjct: | 123 | GLIIFVPKIWFLLFH | 137 |

[11947] An alignment of the GAS and GBS proteins is shown below.

| Identities = 98/129 (75%), Positives = 115/129 (88%), Gaps = 2/129 (1%) | | | |
|---|---|---|---|
| Query: | 1 | MDLNDNN--HKKWKNRTLTSSMEFAVTGIFTAFKEERNMRKHLVSAILVILAGLTFQVSM | 58 |
| | | M L+DNN +KWKNRT+TSS+EFA+TG+FTAFKEERN+R HL+SA L +AGL F +S | |
| Sbjct: | 1 | MALHDNNTTKRKWKNRTITSSLEFALTGVFTAFKEERNLRSHLLSACLACVAGLFFSISA | 60 |
| Query: | 59 | VEWLFLLLSIFLVITFEIINSAIENVVDLASNYHFSMLAKNAKDMAAGAVLVVSLFAVLV | 118 |
| | | +EWLFLLL+IFLVIT EI+NSAIENVVDLAS+YHFSMLAKNAKDMAAGAVL++S +AVL | |
| Sbjct: | 61 | IEWLFLLLAIFLVITLEIVNSAIENVVDLASDYHFSMLAKNAKDMAAGAVLMISGYAVLT | 120 |
| Query: | 119 | GLIIFIPKI | 127 |
| | | GLIIFIPKI | |
| Sbjct: | 121 | GLIIFIPKI | 129 |

[11948] Based on this analysis, it was predicted that these proteins and their epitopes could be useful antigens for vaccines or diagnostics.

### EXAMPLE 2187

[11949] A DNA sequence (GBSx2304) was identified in S. agalactiae <SEQ ID 6755> which encodes the amino acid sequence <SEQ ID 6756>. This protein is predicted to be GTPase Era (era). Analysis of this protein sequence reveals the following:

```
Possible site: 54
>>> Seems to have no N-terminal signal sequence
----- Final Results -----
                            bacterial cytoplasm --- Certainty = 0.1871(Affirmative) < succ>
                              bacterial membrane --- Certainty = 0.0000(Not Clear) < succ>
                                bacterial outside --- Certainty = 0.0000(Not Clear) < succ>
```

[11950] A related GBS nucleic acid sequence <SEQ ID 10017> which encodes amino acid sequence <SEQ ID 10018> was also identified.

[11951] The protein has homology with the following sequences in the GENPEPT database.

| >GP: AAD41632 GB: AF072811 GTPase Era [Streptococcus pneumoniae] | | | |
|---|---|---|---|
| Identities = 273/299 (91%), Positives = 290/299 (96%) | | | |
| Query: | 16 | MTFKSGFVAILGRPNVGKSTFLNHVMGQKIAIMSDKAQTTRNKIMGIYTTETEQIVFIDT | 75 |
| | | MTFKSGFVAILGRPNVGKSTFLNHVMGQKIAIMSDKAQTTRNKIMGIYTT+ EQIVFIDT | |
| Sbjct: | 1 | MTFKSGFVAILGRPNVGKSTFLNHVMGQKIAIMSDKAQTTRNKIMGIYTTDKEQIVFIDT | 60 |
| Query: | 76 | PGIHKPKTALGDFMVESAYSTLREVETVLFMVPADEKRGKGDDMIIERLKAAKIPVILVI | 135 |
| | | PGIHKPKTALGDFMVESAYSTLREV+TVLFMVPADE RGKGDDMIIERLKAAK+PVILV+ | |
| Sbjct: | 61 | PGIHKPKTALGDFMVESAYSTLREVDTVLFMVPADEARGKGDDMIIERLKAAKVPVILVV | 120 |
| Query: | 136 | NKIDKVHPDQLLEQIDDFRSQMDFKEVVPISALQGNNVPTLIKLLTDNLEEGFQYFPEDQ | 195 |
| | | NKIDKVHPDQLL QIDDFR+QMDFKE+VPISALQGNNV L+ +L++NL+EGFQYFP DQ | |
| Sbjct: | 121 | NKIDKVHPDQLLSQIDDFRNQMDFKEIVPISALQGNNVSRLVDILSENLDEGFQYFPSDQ | 180 |
| Query: | 196 | ITDHPERFLVSEMVREKVLHLTQQEVPHSVAVVVESMKRDEETDKVHIRATIMVERDSQK | 255 |
| | | ITDHPERFLVSEMVREKVLHLT++E+PHSVAVVV+SMKRDEETDKVHIRATIMVERDSQK | |
| Sbjct: | 181 | ITDHPERFLVSEMVREKVLHLTREEIPHSVAVVVDSMKRDEETDKVHIRATIMVERDSQK | 240 |
| Query: | 256 | GIIIGKQGAMLKKIGKMARRDIELMLGDKVYLETWVKVKKNWRDKKLDLADFGYNEKEY | 314 |
| | | GIIIGK GAMLKKIG MARRDIELMLGDKV+LETWVKVKKNWRDKKLDLADFGYNE+EY | |
| Sbjct: | 241 | GIIIGKGGAMLKKIGSMARRDIELMLGDKVFLETWVKVKKNWRDKKLDLADFGYNEREY | 299 |

[11952] A related DNA sequence was identified in S. pyogenes <SEQ ID 6757> which encodes the amino acid sequence <SEQ ID 6758>. Analysis of this protein sequence reveals the following:

```
Possible site: 38
>>> Seems to have no N-terminal signal sequence
----- Final Results -----
                            bacterial cytoplasm --- Certainty = 0.1088(Affirmative) < succ>
                              bacterial membrane --- Certainty = 0.0000(Not Clear) < succ>
                                bacterial outside --- Certainty = 0.0000(Not Clear) < succ>
```

[11953] An alignment of the GAS and GBS proteins is shown below.

| Identities = 295/297 (99%), Positives = 296/297 (99%) | | | |
|---|---|---|---|
| Query: | 18 | FKSGFVAILGRPNVGKSTFLNHVMGQKIAIMSDKAQTTRNKIMGIYTTETEQIVFIDTPG | 77 |
| | | FKSGFVAILGRPNVGKSTFLNHVMGQKIAIMSDKAQTTRNKIMGIYTTETEQIVFIDTPG | |
| Sbjct: | 2 | FKSGFVAILGRPNVGKSTFLNHVMGQKIAIMSDKAQTTRNKIMGIYTTETEQIVFIDTPG | 61 |
| Query: | 78 | IHKPKTALGDFMVESAYSTLREVETVLFMVPADEKRGKGDDMIIERLKAAKIPVILVINK | 137 |
| | | IHKPKTALGDFMVESAYSTLREVETVLFMVPADEKRGKGDDMIIERLKAAKIPVILVINK | |
| Sbjct: | 62 | IHKPKTALGDFMVESAYSTLREVETVLFMVPADEKRGKGDDMIIERLKAAKIPVILVINK | 121 |
| Query: | 138 | IDKVHPDQLLEQIDDFRSQMDFKEVVPISALQGNNVPTLIKLLTDNLEEGFQYFPEDQIT | 197 |
| | | IDKVHPDQLLEQIDDF SQMDFKEVVPISAL+GNNVPTLIKLLTDNLEEGFQYFPEDQIT | |
| Sbjct: | 122 | IDKVHPDQLLEQIDDFHSQMDFKEVVPISALEGNNVPTLIKLLTDNLEEGFQYFPEDQIT | 181 |
| Query: | 198 | DHPERFLVSEMVREKVLHLTQQEVPHSVAVVVESMKRDEETDKVHIRATIMVERDSQKGI | 257 |
| | | DHPERFLVSEMVREKVLHLTQQEVPHSVAVVVESMKRDEETDKVHIRATIMVERDSQKGI | |
| Sbjct: | 182 | DHPERFLVSEMVREKVLHLTQQEVPHSVAVVVESMKRDEETDKVHIRATIMVERDSQKGI | 241 |
| Query: | 258 | IIGKQGAMLKKIGKMARRDIELMLGDKVYLETWVKVKKNWRDKKLDLADFGYNEKEY | 314 |
| | | IIGKQGAMLKKIGKMARRDIELMLGDKVYLETWVKVKKNWRDKKLDLADFGYNEKEY | |
| Sbjct: | 242 | IIGKQGAMLKKIGKMARRDIELMLGDKVYLETWVKVKKNWRDKKLDLADFGYNEKEY | 298 |

[11954] Based on this analysis, it was predicted that these proteins and their epitopes could be useful antigens for vaccines or diagnostics.

### EXAMPLE 2188

[11955] A DNA sequence (GBSx2305) was identified in S. agalactiae <SEQ ID 6759> which encodes the amino acid sequence <SEQ ID 6760>. Analysis of this protein sequence reveals the following:

```
Possible site: 27
>>> Seems to have no N-terminal signal sequence
----- Final Results -----
                            bacterial cytoplasm --- Certainty = 0.2679(Affirmative) < succ>
                              bacterial membrane --- Certainty = 0.0000(Not Clear) < succ>
                                bacterial outside --- Certainty = 0.0000(Not Clear) < succ>
```

[11956] The protein has no significant homology with any sequences in the GENPEPT database.

[11957] No corresponding DNA sequence was identified in S. pyogenes.

[11958] Based on this analysis, it was predicted that this protein and its epitopes, could be useful antigens for vaccines or diagnostics.

### EXAMPLE 2189

[11959] A DNA sequence (GBSx2306) was identified in S. agalactiae <SEQ ID 6761> which encodes the amino acid sequence <SEQ ID 6762>. Analysis of this protein sequence reveals the following:

```
Possible site: 21
>>> Seems to have a cleavable N-term signal seq.
----- Final Results -----
                                bacterial outside --- Certainty = 0.3000(Affirmative) < succ>
                              bacterial membrane --- Certainty = 0.0000(Not Clear) < succ>
                            bacterial cytoplasm --- Certainty = 0.0000(Not Clear) < succ>
```

[11960] The protein has homology with the following sequences in the GENPEPT database.

| >GP: BAA16793 GB: D90900 hypothetical protein [Synechocystis sp.] | | | |
|---|---|---|---|
| Identities = 36/119 (30%), Positives = 57/119 (47%), Gaps = 15/119 (12%) | | | |
| Query: | 390 | TSDYEKAKVIHDHLVNNYTYATEELATTRETASGISIHAPEALYKDKRGVCQAFAVMFKD | 449 |
| | | ++D+E+A++ + + N Y +A TR I PE + +C ++ +++ | |
| Sbjct: | 153 | SNDWEEARLAYSWITQNIAYDVP-MAETRN----IDDLRPETVLARGETICSGYSNLYQA | 207 |
| Query: | 450 | MAATAGLSVWYVTGQAGGG----------NHAWNIVTINGVKYYVDTTWDNNIKSNKYF | 498 |
| | | +A GL V + G A GG NHAWN V I+G Y +DTTW I S+ F | |
| Sbjct: | 208 | LAKELGLDVVIIEGFAKGGDVIVGDDPDVNHAWNGVKIDGQWYLLDTTWGAGIVSDGKF | 266 |

[11961] A related DNA sequence was identified in S. pyogenes <SEQ ID 6763> which encodes the amino acid sequence <SEQ ID 6764>. Analysis of this protein sequence reveals the following:

```
Possible site: 23
>>> May be a lipoprotein
----- Final Results -----
                              bacterial membrane --- Certainty = 0.0000(Not Clear) < succ>
                                bacterial outside --- Certainty = 0.0000(Not Clear) < succ>
                            bacterial cytoplasm --- Certainty = 0.0000(Not Clear) < succ>
```

[11962] The protein has no significant homology with any sequences in the GENPEPT database.

[11963] An alignment of the GAS and GBS proteins is shown below.

| Identities = 41/181 (22%), Positives = 79/181 (42%), Gaps = 17/181 (9%) | | | |
|---|---|---|---|
| Query: | 355 | ITITYTLKGDMVGLHKEYKQFVDSFVKENITNKNITSDYEKAKVIHDHLVNNYTYATE-- | 412 |
| | | + +T+ + D ++++ Q + + + N +K+ YE+ K ++ ++ + Y + | |
| Sbjct: | 124 | VFVTFPIPEDAKNIYQDL-QAIGNDIVANTPSKD---RYEQVKYFYEVIIRDTDYNKKAF | 179 |
| Query: | 413 | ELATTRETASGISIHAPEALYKDKRGVCQAFAVMFKDMAATAGLSVWYVTGQAGGGN--- | 469 |
| | | E + A S ++++ D VC +A F+ + AG+ V Y+ G | |
| Sbjct: | 180 | EAYQSGSQAQVASNQDIKSVFIDHLSVCNGYAQAFQFLCQKAGIPVAYIRGTGTSQQPQQ | 239 |
| Query: | 470 | ---HAWNIVTINGVKYYVDTTW-----DNNIKSNKYFLVGKTIMDADHLLDSQYNALAKDI | 522 |
| | | HAWN V IN Y VD TW DN++ K + + + L + + +KDI | |
| Sbjct: | 240 | SFAHAWNAVQINNTYYGVDVTWGDPVFDNHLSHQKQGTINYSFLCLPDYLMALSHQPSKDI | 300 |

[11964] Based on this analysis, it was predicted that this protein and its epitopes, could be useful antigens for vaccines or diagnostics.

### EXAMPLE 2190

[11965] A DNA sequence (GBSx2307) was identified in S. agalactiae <SEQ ID 6765> which encodes the amino acid sequence <SEQ ID 6766>. This protein is predicted to be rgg protein. Analysis of this protein sequence reveals the following:

| Possible site: 29 | | | | |
|---|---|---|---|---|
| >>> Seems to have no N-terminal signal sequence | | | | |
| | INTEGRAL | Likelihood = −0.16 | Transmembrane | 187-203 (187-203) |

```
----- Final Results -----
                              bacterial membrane --- Certainty = 0.1065(Affirmative) < succ>
                                bacterial outside --- Certainty = 0.0000(Not Clear) < succ>
                            bacterial cytoplasm --- Certainty = 0.0000(Not Clear) < succ>
```

[11966] A related GBS nucleic acid sequence <SEQ ID 10015> which encodes amino acid sequence <SEQ ID 10016> was also identified.

[11967] The protein has homology with the following sequences in the GENPEPT database.

| >GP: AAA26968 GB: M89776 rgg [Streptococcus gordonii] | | | |
|---|---|---|---|
| Identities = 71/273 (26%), Positives = 140/273 (51%), Gaps = 16/273 (5%) | | | |
| Query: | 8 | KELGKTLRRLRKGKKVSISSLADEHLSKSQISRFERGESEITCSRLLNILDKLNITIDEF | 67 |
| | | K GK L+ +R+ K +S+ +A +S +Q+SR+ERG S +T + L +++++ EF | |
| Sbjct: | 5 | KSSGKILKIIRESKNMSLKEVAAGDISVAQLSRYERGISSLTVDSFYSCLRNMSVSLAEF | 64 |
| Query: | 68 | VSI-HSKAHTHFFILLNRVRKYCAEKNVTKLVALL-----------EDHNHKDYEKIMIK | 115 |
| | | + H+ +L ++ + E N+ KL ++L E N+K I+I+ | |
| Sbjct: | 65 | QYVYHNYREADDVVLSQKLSEAQRENNIVKLESILAGSEAMAQEFPEKKNYK-LNTIVIR | 123 |
| Query: | 116 | ALIFSIDQSIEPNQEELARLTDYLFTVEQWGYYEIILLGNCSRLINYNTLFLLTKEMVNS | 175 |
| | | A + S + + ++ ++LTDYLF+VE+WG YE+ L N L+ TL EM+N | |
| Sbjct: | 124 | ATLTSCNPDYQVSKGDIEFLTDYLFSVEEWGRYELWLFTNSVNLLTLETLETFASEMINR | 183 |
| Query: | 176 | FAYSEQNKTNKILVTQLAINCLIISIDHSYFEHSHYLIDKVRSLLQDEVNFYEKTVFLYV | 235 |
| | | + N+ + ++ +N + I++++ + + ++ + + E + Y++ + Y | |
| Sbjct: | 184 | TQFYNNLPENRRRIIKMLLNVVSACIENNHLQVAMKFLNYIDNTKIPETDLYDRVLIKYH | 243 |
| Query: | 236 | TGYYHLKLGDTSSGKEDMRKALQIFKYLGEDSF | 268 |
| | | Y K+G+ + + D+ + L F+YL DSF | |
| Sbjct: | 244 | KALYSYKVGNPHA-RHDIEQCLSTFEYL--DSF | 273 |

[11968] There is also homology to SEQ ID 628.

[11969] Based on this analysis, it was predicted that this protein and its epitopes, could be useful antigens for vaccines or diagnostics.

### EXAMPLE 2191

[11970] A DNA sequence (GBSx2308) was identified in S. agalactiae <SEQ ID 6767> which encodes the amino acid sequence <SEQ ID 6768>. Analysis of this protein sequence reveals the following:

```
Possible site: 36
>>> Seems to have no N-terminal signal sequence
----- Final Results -----
                            bacterial cytoplasm --- Certainty = 0.3234(Affirmative) < succ>
                              bacterial membrane --- Certainty = 0.0000(Not Clear) < succ>
                                bacterial outside --- Certainty = 0.0000(Not Clear) < succ>
```

[11971] The protein has homology with the following sequences in the GENPEPT database.

| >GP: BAA05066 GB: D26071 formamidopyrimidine-DNA glycosylase | | | |
|---|---|---|---|
| [Streptococcus mutans] | | | |
| Identities = 182/271 (67%), Positives = 217/271 (79%) | | | |
| Query: | 1 | MPELPEVETVRKGLERLVVNQEIASITIKVPKMVKTDLNDFMISLPGKTIQQVLRRGKYL | 60 |
| | | MPELPEVETVR+GLE L+V ++I S+ ++VPKMVKT + DF + + G+T + + RRGKYL | |
| Sbjct: | 1 | MPELPEVETVRRGLEHLIVGKKIVSVEVRVPKMVKTGVEDFQLDILGQTFESIGRRGKYL | 60 |
| Query: | 61 | LFDFGEMVMVSHLRMEGKYLLFPNKVPDNKHFHLYFKLTNGSTLVYQDVRKFGTFELVRK | 120 |
| | | L + ++SHLRMEGKYLLF ++VPDNKHFHL+F L GSTLVYQDVRKFGTFEL+ K | |
| Sbjct: | 61 | LLNLNRQTIISHLRMEGKYLLFEDEVPDNKHFHLFFGLDGGSTLVYQDVRKFGTFELLPK | 120 |
| Query: | 121 | SSLKDYFTQKKLGPEPTADTFQFEPFSKGLANSKKPIKPLLLDQRLVAGLGNIYVDEVLW | 180 |
| | | S ++ YF QKK+GPEP A F+ +PF +GLA S K IK LLLDQ LVAGLGNIYVDEVLW | |
| Sbjct: | 121 | SQVEAYFVQKKIGPEPNAKDFKLKPFEEGLAKSHKVIKTLLLDQHLVAGLGNIYVDEVLW | 180 |
| Query: | 181 | AAKIHPQRLANQLTESETSLLHKEIIRILTLGIEKGGSTIRTYKNALGEDGTMQKYLQVY | 240 |
| | | AAK+ P+RLA+QL SE +H E IRIL L IEKGGSTIR+YKN+LGEDG+MQ LQVY | |
| Sbjct: | 181 | AAKVDPERLASQLKTSEIKRIHDETIRILQLAIEKGGSTIRSYKNSLGEDGSMQDCLQVY | 240 |
| Query: | 241 | GKTGQPCPRCGCLIKKIKVGGRGTHYCPRCQ | 271 |
| | | GKT QPC RC I+KIKVGGRGTH+CP CQ | |
| Sbjct: | 241 | GKTDQPCARCATPIEKIKVGGRGTHFCPSCQ | 271 |

[11972] A related DNA sequence was identified in S. pyogenes <SEQ ID 6769> which encodes the amino acid sequence <SEQ ID 6770>. Analysis of this protein sequence reveals the following:

```
Possible site: 54
>>> Seems to have no N-terminal signal sequence
----- Final Results -----
                            bacterial cytoplasm --- Certainty = 0.2068(Affirmative) < succ>
                              bacterial membrane --- Certainty = 0.0000(Not Clear) < succ>
                                bacterial outside --- Certainty = 0.0000(Not Clear) < succ>
```

[11973] An alignment of the GAS and GBS proteins is shown below.

| Identities = 190/271 (70%), Positives = 229/271 (84%) | | | |
|---|---|---|---|
| Query: | 1 | MPELPEVETVRKGLERLVVNQEIASITIKVPKMVKTDLNDFMISLPGKTIQQVLRRGKYL | 60 |
| | | MPELPEVETVR+GLE LV+ QEI ++T+KVPKMVKTDL F ++LPG+ IQ V RRGKYL | |
| Sbjct: | 1 | MPELPEVETVRRGLETLVLGQEIVAVTLKVPKMVKTDLETFALTLPGQIIQSVGRRGKYL | 60 |
| Query: | 61 | LFDFGEMVMVSHLRMEGKYLLFPNKVPDNKHFHLYFKLTNGSTLVYQDVRKFGTFELVRK | 120 |
| | | L D G++V+VSHLRMEGKYLLFP++VPDNKHFH++F+L NGSTLVYQDVRKFGTE+L+ K | |
| Sbjct: | 61 | LIDLGQLVLVSHLRMEGKYLLFPDEVPDNKHFHVFFELKNGSTLVYQDVRKFGTFDLIAK | 120 |
| Query: | 121 | SSLKDYFTQKKLGPEPTADTFQFEPFSKGLANSKKPIKPLLLDQRLVAGLGNIYVDEVLW | 180 |
| | | S L +F ++KLGPEP +TF+ + F L +S+KPIKP LLDQ LVAGLGNIYVDEVLW | |
| Sbjct: | 121 | SQLSAFFAKRKLGPEFKKETFKLKTFEAALLSSQKPIKPHLLDQTLVAGLGNIYVDEVLW | 180 |
| Query: | 181 | AAKIHPQRLANQLTESETSLLHKEIIRILTLGIEKGGSTIRTYKNALGEDGTMQKYLQVY | 240 |
| | | AAK+HP+ +++L ++E LH E IRIL LGIEKGGST+RTY+NALG DGTMQ YLQVY | |
| Sbjct: | 181 | AAKVHPETASSRLNKAEIKRLHDETIRILALGIEKGGSTVRTYRNALGADGTMQDYLQVY | 240 |
| Query: | 241 | GKTGQPCPRCGCLIKKIKVGGRGTHYCPRCQ | 271 |
| | | G+TG+PCPRCG I K+KVGGRGTH CP+CQ | |
| Sbjct: | 241 | GQTGKPCPRCGQAIVKLKVGGRGTHICPKCQ | 271 |

[11974] Based on this analysis, it was predicted that these proteins and their epitopes could be useful antigens for vaccines or diagnostics.

### EXAMPLE 2192

[11975] A DNA sequence (GBSx2309) was identified in S. agalactiae <SEQ ID 6771> which encodes the amino acid sequence <SEQ ID 6772>. Analysis of this protein sequence reveals the following:

```
Possible site: 26
>>> Seems to have no N-terminal signal sequence
----- Final Results -----
                            bacterial cytoplasm --- Certainty = 0.0797(Affirmative) < succ>
                              bacterial membrane --- Certainty = 0.0000(Not Clear) < succ>
                                bacterial outside --- Certainty = 0.0000(Not Clear) < succ>
```

[11976] A related GBS nucleic acid sequence <SEQ ID 10013> which encodes amino acid sequence <SEQ ID 10014> was also identified.

[11977] The protein has homology with the following sequences in the GENPEPT database.

| >GP: AAC00353 GB: AF008220 YtaG [Bacillus subtilis] | | | |
|---|---|---|---|
| Identities = 80/189 (42%), Positives = 113/189 (59%), Gaps = 1/189 (0%) | | | |
| Query: | 8 | MTKIIGLTGGIASGKSTVTKIIRESGFKVIDADQVVHKLQAKGGKLYQALLEWLGPEILD | 67 |
| | | MT +IGLTGGIASGKSTV ++ E G VIDAD + + KG Y+ +++ G +IL | |
| Sbjct: | 1 | MTLVIGLTGGIASGKSTVANMLIEKGITVIDADIIAKQAVEKGMPAYRQIIDEFGEDILL | 60 |
| Query: | 68 | ADGELDRPKLSQMIFANPDNMKTSARLQNSIIRQELACQRDQLKQTEEIF-FMDIPLLIE | 126 |
| | | ++G++DR KL ++F N + + +RQE+ +RD+ E F +DIPLL E | |
| Sbjct: | 61 | SNGDIDRKKLGALVFTNEQKRLALNAIVHPAVRQEMLNRRDEAVANREAFVVLDIPLLFE | 120 |
| Query: | 127 | EKYIKWFDEIWLVFVDKEKQLQRLMARNNYSREEAELRLSHQMPLTDKKSFASLIIDNNG | 186 |
| | | K D+I +V V KE QL+RLM RN + EEA R+ QMPL +K + A +IDN+G | |
| Sbjct: | 121 | SKLESLVDKIIVVSVTKELQLERLMKRNQLTEEEAVSRIRSQMPLEEKTARADQVIDNSG | 180 |
| Query: | 187 | DLITLKEQI | 195 |
| | | L K Q+ | |
| Sbjct: | 181 | TLEETKRQL | 189 |

[11978] A related sequence was also identified in GAS <SEQ ID 9111> which encodes the amino acid sequence <SEQ ID 9112>. Analysis of this protein sequence reveals the following:

```
Possible cleavage site: 59
>>> Seems to have no N-terminal signal sequence
----- Final Results -----
                            bacterial cytoplasm --- Certainty = 0.101(Affirmative) < succ>
                              bacterial membrane --- Certainty = 0.000(Not Clear) < succ>
                                bacterial outside --- Certainty = 0.000(Not Clear) < succ>
```

[11979] An alignment of the GAS and GBS proteins is shown below.

| Identities = 118/191 (61%), Positives = 153/191 (79%) | | | |
|---|---|---|---|
| Query: | 9 | TKIIGLTGGIASGKSTVTKIIRESGFKVIDADQVVHKLQAKGGKLYQALLEWLGPEILDA | 68 |
| | | T IIG+TGGIASGKSTV K+IR++G++VIDADQVVH LQ KGG+LY+AL E G +IL A | |
| Sbjct: | 9 | TMIIGITGGIASGKSTVVKVIRKAGYQVIDADQVVHDLQEKGGRLYEALREAFGNQILKA | 68 |
| Query: | 69 | DGELDRPKLSQMIFANPDNMKTSARLQNSIIRQELACQRDQLKQTEEIFFMDIPLLIEEK | 128 |
| | | DGELDR KLS+M+F+NPDNM TS+ +QN II++ELA +RD L Q++ IFFMDIPLL+E | |
| Sbjct: | 69 | DGELDRTKLSEMLFSNPDNMATSSAIQNQIIKEELAAKRDHLAQSQAIFFMDIPLLMELG | 128 |
| Query: | 129 | YIKWFDEIWLVFVDKEKQLQRLMARNNYSREEAELRLSHQMPLTDKKSFASLIIDNNGDL | 188 |
| | | Y WFD IWLV+VD + QLQRLMARN + +A R++ Q+P+ +KK +ASL+IDN+GD+ | |
| Sbjct: | 129 | YQDWFDAIWLVYVDAQTQLQRLMARNRLDKGKARQRIASQLPIEEKKPYASLVIDNSGDI | 188 |
| Query: | 189 | ITLKEQILDAL | 199 |
| | | L +Q+ AL | |
| Sbjct: | 189 | AALIKQVQSAL | 199 |

[11980] A related GBS gene <SEQ ID 8993> and protein <SEQ ID 8994> were also identified. Analysis of this protein sequence reveals a signal peptide at residues 1-16.

[11981] The protein has homology with the following sequences in the databases:

[chemical structure]

[11982] A related DNA sequence was identified in S. pyogenes <SEQ ID 6773> which encodes amino acid sequence <SEQ ID 6774>. An alignment of the GAS and GBS sequences follows:

| Score = 218 bits (550), Expect = 4e−59 | | | |
|---|---|---|---|
| Identities = 104/175 (59%), Positives = 138/175 (78%) | | | |
| Query: | 25 | VVKVIRKAGYQVIDADQVVHDLQEKGGRLYEALREAFGNQILKADGELDRTKLSEMLFSN | 84 |
| | | V K+IR++G++VIDADQVVH LQ KGG+LY+AL E G +IL ADGELDR KLS+M+F+N | |
| Sbjct: | 20 | VTKIIRESGFKVIDADQVVHKLQAKGGKLYQALLEWLGPEILDADGELDRPKLSQMIFAN | 79 |
| Query: | 85 | PDNMATSSAIQNQIIKEELAAKRDHLAQSQAIFFMDIPLLMELGYQDWFDAIWLVYVDAQ | 144 |
| | | PDNM TS+ +QN II++ELA +RD L Q++ IFFMDIPLL+E Y WFD IWLV+VD + | |
| Sbjct: | 80 | PDNMKTSARLQNSIIRQELACQRDQLKQTEEIFFMDIPLLIEEKYIKWFDEIWLVFVDKE | 139 |
| Query: | 145 | TQLQRLMARNRLDKGKARQRIASQLPIEEKKPYASLVIDNSGDIAALIKQVQSAL | 199 |
| | | QLQRLMARN + +A R++ Q+P+ +KK +ASL+IDN+GD+ L +Q+ AL | |
| Sbjct: | 140 | KQLQRLMARNNYSREEAELRLSHQMPLTDKKSFASLIIDNNGDLITLKEQILDAL | 194 |

[11983] SEQ ID 8994 (GBS245) was expressed in E. coli as a His-fusion product. SDS-PAGE analysis of total cell extract is shown in FIG. 61 (lane 6; MW 23.7 kDa). It was also expressed in E. coli as a GST-fusion product, and purified GBS245-GST is shown in FIG. 211, lane 6.

[11984] The purified GST fusion product was used to immunise mice ands the resulting antiserum was used for FACS (FIG. 278). This confirmed that the protein is immunoaccessible on GBS bacteria.

[11985] Based on this analysis, it was predicted that these proteins and their epitopes could be useful antigens for vaccines or diagnostics.

### EXAMPLE 2193

[11986] A DNA sequence (GBSx2310) was identified in S. agalactiae <SEQ ID 6775> which encodes the amino acid sequence <SEQ ID 6776>. Analysis of this protein sequence reveals the following:

```
Possible site: 35
>>> Seems to have no N-terminal signal sequence
----- Final Results -----
                            bacterial cytoplasm --- Certainty = 0.4073(Affirmative) < succ>
                              bacterial membrane --- Certainty - 0.0000(Not Clear) < succ>
                                bacterial outside --- Certainty = 0.0000(Not Clear) < succ>
```

[11987] The protein has homology with the following sequences in the GENPEPT database.

| >GP: BAA30330 GB: AP000005 253aa long hypothetical ATP-binding | | | |
|---|---|---|---|
| transport protein [Pyrococcus horikoshii] | | | |
| Identities = 78/240 (32%), Positives = 130/240 (53%), Gaps = 13/240 (5%) | | | |
| Query: | 3 | LVIRDIRKRFQETEVLRGASYRFYSGKITGVLGRNGAGKTTLFNILYGDLAADNGTICLL | 62 |
| | | +++ ++RK+F EVL+G ++ G+I G+LG NG+GK+T IL G + G + + | |
| Sbjct: | 2 | IIVENLRKKFGSKEVLKGINFTVNDGEIYGLLGPNGSGKSTTMRILSGIITDFEGKVMVA | 61 |
| Query: | 63 | -KDNHEYPLTDKDI-GIVYSENYLPEFLTGYEFVKFYMDLH--PSDDL-MTIDDYLDFME | 117 |
| | | D P+ K+I G V L E LT EF F + P D L + +D | |
| Sbjct: | 62 | GVDVSRDPMKVKEIVGYVPETPALYESLTPAEFFSFIGGVRRIPQDILEERVKRLVDAFG | 121 |
| Query: | 118 | IGQTERHRIIKGYSDGMKSKLSLICLMISKPKVILLDEPLTAVDVVSSIAIKRLLLELSE | 177 |
| | | IG+ +++I S G K K+SLI ++ P+V++LDE + +D S+ + LL E E | |
| Sbjct: | 122 | IGK-YMNQLIGTLSFGTKQKISLISALLHDPQVLILDEAMNGLDPKSARIFRELLFEFKE | 180 |
| Query: | 178 | D-HIIILSTHIMALAEDLCDIVAVLDKGKL---QTLDIDR---KHEQFEERLLQVLKGDE | 230 |
| | | + I+ STHI+ALAE +CD + ++ +G++ T+D R + E+ E+ L++ + E | |
| Sbjct: | 181 | EGKSIVFSTHILALAEVMCDRIGIIYEGRIVAEGTIDELREIAREEKLEDIFLKLTQAKE | 240 |

[11988] There is also homology to SEQ ID 2876.

[11989] Based on this analysis, it was predicted that this protein and its epitopes, could be useful antigens for vaccines or diagnostics.

### EXAMPLE 2194

[11990] A DNA sequence (GBSx2311) was identified in S. agalactiae <SEQ ID 6777> which encodes the amino acid sequence <SEQ ID 6778>. Analysis of this protein sequence reveals the following:

```
Possible site: 14
>>> Seems to have no N-terminal signal sequence
----- Final Results -----
                            bacterial cytoplasm --- Certainty = 0.6138(Affirmative) < succ>
                              bacterial membrane --- Certainty = 0.0000(Not Clear) < succ>
                                bacterial outside --- Certainty = 0.0000(Not Clear) < succ>
```

[11991] The protein has no significant homology with any sequences in the GENPEPT database.

[11992] No corresponding DNA sequence was identified in S. pyogenes.

[11993] Based on this analysis, it was predicted that this protein and its epitopes, could be useful antigens for vaccines or diagnostics.

### EXAMPLE 2195

[11994] A DNA sequence (GBSx2312) was identified in S. agalactiae <SEQ ID 6779> which encodes the amino acid sequence <SEQ ID 6780>. Analysis of this protein sequence reveals the following:

| Possible site: 20 | | | | |
|---|---|---|---|---|
| >>> Seems to have no N-terminal signal sequence | | | | |
| | INTEGRAL | Likelihood = −15.34 | Transmembrane | 526-542 (511-546) |
| | INTEGRAL | Likelihood = −9.61 | Transmembrane | 340-356 (335-359) |
| | INTEGRAL | Likelihood = −8.17 | Transmembrane | 455-471 (451-476) |
| | INTEGRAL | Likelihood = −8.01 | Transmembrane | 97-113 (95-121) |
| | INTEGRAL | Likelihood = −8.01 | Transmembrane | 216-232 (207-236) |
| | INTEGRAL | Likelihood = −3.40 | Transmembrane | 50-66 (46-67) |
| | INTEGRAL | Likelihood = −1.33 | Transmembrane | 178-194 (178-194) |

```
----- Final Results -----
                              bacterial membrane --- Certainty = 0.7135(Affirmative) < succ>
                                bacterial outside --- Certainty = 0.0000(Not Clear) < succ>
                            bacterial cytoplasm --- Certainty = 0.0000(Not Clear) < succ>
```

[11995] A related GBS nucleic acid sequence <SEQ ID 10011> which encodes amino acid sequence <SEQ ID 10012> was also identified.

[11996] The protein has no significant homology with any sequences in the GENPEPT database, but there is homology to SEQ ID 376.

[11997] No corresponding DNA sequence was identified in S. pyogenes.

[11998] Based on this analysis, it was predicted that this protein and its epitopes, could be useful antigens for vaccines or diagnostics.

### EXAMPLE 2196

[11999] A DNA sequence (GBSx2314) was identified in S. agalactiae <SEQ ID 6781> which encodes the amino acid sequence <SEQ ID 6782>. Analysis of this protein sequence reveals the following:

| Possible site: 32 | | | | |
|---|---|---|---|---|
| >>> Seems to have no N-terminal signal sequence | | | | |
| | INTEGRAL | Likelihood = −8.17 | Transmembrane | 140-156 (134-160) |
| | INTEGRAL | Likelihood = −6.64 | Transmembrane | 255-271 (253-274) |
| | INTEGRAL | Likelihood = −5.79 | Transmembrane | 345-361 (343-363) |
| | INTEGRAL | Likelihood = −3.29 | Transmembrane | 184-200 (183-202) |
| | INTEGRAL | Likelihood = −2.34 | Transmembrane | 66-82 (65-83) |
| | INTEGRAL | Likelihood = −1.65 | Transmembrane | 221-237 (221-239) |
| | INTEGRAL | Likelihood = −0.00 | Transmembrane | 121-137 (121-137) |

```
----- Final Results -----
                              bacterial membrane --- Certainty = 0.4270(Affirmative) < succ>
                                bacterial outside --- Certainty = 0.0000(Not Clear) < succ>
                            bacterial Cytoplasm --- Certainty = 0.0000(Not Clear) < succ>
```

[12000] A related GBS nucleic acid sequence <SEQ ID 9401> which encodes amino acid sequence <SEQ ID 9402> was also identified.

[12001] The protein has homology with the following sequences in the GENPEPT database.

| >GP: CAA07482 GB: AJ007367 multi-drug resistance efflux pump | | | |
|---|---|---|---|
| [Streptococcus pneumoniae] | | | |
| Identities = 213/372 (57%), Positives = 295/372 (79%) | | | |
| Query: | 1 | MPFMVLYVEQLGAPSNKVEWYAGLSVSLSALSSALVAPLWGRLADKYGRKPMMVRAGLMM | 60 |
| | | +PFM ++VE LG S +V +YAGL++S+SA+S+AL +P+WG LADKYGRKPMM+RAGL M | |
| Sbjct: | 28 | VPFMPIFVENLGVGSQQVAFYAGLAISVSAISAALFSPIWGILADKYGRKPMMIRAGLAM | 87 |
| Query: | 61 | TFTMGGLAFIHSVTGLLILRILNGIFAGYVPNSTALIASQAPQEESGYALGTLATGVTGG | 120 |
| | | T TMGGLAF+ ++ L+ LR+LNG+FAG+VPN+TALIASQ P+E+SG ALGTL+TGV G | |
| Sbjct: | 88 | TITMGGLAFVPNIYWLIFLRLLNGVFAGFVPNATALIASQVPKEKSGSALGTLSTGVVAG | 147 |
| Query: | 121 | MLIGPLLGGLLAEWFGIREVFLLVGTILLISTLMTIFMVKEDFKPISNEETMPTTEVFKS | 180 |
| | | L GP +GG +AE FGIR VFLLVG+ L ++ ++TI +KEDF+P++ E+ +PT E+F S | |
| Sbjct: | 148 | TLTGPFIGGFIAELFGIRTVFLLVGSFLFLAAILTICFIKEDFQPVAKEKAIPTKELFTS | 207 |
| Query: | 181 | VKSLQILIGLFVTSMIIQISAQSIAPILTLYIRHLGQTENLMFVSGLIVSGMGFSSILSS | 240 |
| | | VK +L+ LF+TS +IQ SAQSI PIL LY+R LGQTENL+FVSGLIVS MGFSS++S+ | |
| Sbjct: | 208 | VKYPYLLLNLFLTSFVIQFSAQSIGPILALYVRDLGQTENLLFVSGLIVSSMGFSSMMSA | 267 |
| Query: | 241 | PKLGRIGDRIGNHRLLLLALLYSFLMYVLCSLAQTSLQLGVIRFLYGFGTGALMPSINSI | 300 |
| | | +G++GD++GNHRLL++A YS ++Y+LC+ A + LQLG+ RFL+G GTGAL+P +N++ | |
| Sbjct: | 268 | GVMGKLGDKVGNHRLLVVAQFYSVIIYLLCANASSPLQLGLYRFLFGLGTGALIPGVNAL | 327 |
| Query: | 301 | LTKIAPRQGLSRIFSYNQMFSNLGQVLGPFVGSAVSIHLGFRWVFFVTSFIVLANFVWCF | 360 |
| | | L+K+ P+ G+SR+F++NQ+F LG V+GP GSAV+ G+ VF+ TS V + ++ | |
| Sbjct: | 328 | LSKMTPKAGISRVFAFNQVFFYLGGVVGPMAGSAVAGQFGYHAVFYATSLCVAFSCLFNL | 387 |
| Query: | 361 | INFRKYIRVKEI | 372 |
| | | I FR ++VKEI | |
| Sbjct: | 388 | IQFRTLLKVKEI | 399 |

[12002] A related DNA sequence was identified in S. pyogenes <SEQ ID 6783> which encodes the amino acid sequence <SEQ ID 6784>. Analysis of this protein sequence reveals the following:

| Possible site: 58 | | | | |
|---|---|---|---|---|
| >>> Seems to have a cleavable N-term signal seq. | | | | |
| | INTEGRAL | Likelihood = −10.14 | Transmembrane | 165-181 (150-185) |
| | INTEGRAL | Likelihood = −7.43 | Transmembrane | 371-387 (367-391) |
| | INTEGRAL | Likelihood = −3.88 | Transmembrane | 90-106 (86-109) |
| | INTEGRAL | Likelihood = −3.35 | Transmembrane | 145-161 (143-162) |
| | INTEGRAL | Likelihood = −1.70 | Transmembrane | 279-295 (279-297) |
| | INTEGRAL | Likelihood = −0.85 | Transmembrane | 209-225 (209-226) |
| | INTEGRAL | Likelihood = −0.27 | Transmembrane | 347-363 (347-363) |

```
----- Final Results -----
                              bacterial membrane --- Certainty = 0.5055(Affirmative) < succ>
                                bacterial outside --- Certainty = 0.0000(Not Clear) < succ>
                            bacterial cytoplasm --- Certainty = 0.0000(Not Clear) < succ>
```

[12003] The protein has homology with the following sequences in the databases:

| >GP: CAA07482 GB: AJ007367 multi-drug resistance efflux pump | | | |
|---|---|---|---|
| [Streptococcus pneumoniae] | | | |
| Identities = 236/396 (59%), Positives = 309/396 (77%) | | | |
| Query: | 1 | VNWRQNLKVAWLGNFFTGASFSLVMPFMALYVENLGTPTELVEYYAGLAVAVTALASALF | 60 |
| | | +NW+ NL++AW GNF TGAS SLV+PFM ++VENLG ++ V +YAGLA++V+A+++ALF | |
| Sbjct: | 4 | INWKDNLRIAWFGNFLTGASISLVVPFMPIFVENLGVGSQQVAFYAGLAISVSAISAALF | 63 |
| Query: | 61 | APVWGKLADRYGRKPMMLRASFVMTFTMGGLAIIPNVFWLLILRLLTGVSAGYVPNATAL | 120 |
| | | +P+WG LAD+YGRKPMM+RA MT TMGGLA +PN++WL+ LRLL GV AG+VPNATAL | |
| Sbjct: | 64 | SPIWGILADKYGRKPMMIRAGLAMTITMGGLAFVPNIYWLIFLRLLNGVFAGFVPNATAL | 123 |
| Query: | 121 | IASQAPKEESGYALGTLATGVTAGALIGPLLGGILAELLGIRQVFLLVGVILFLCSLMTA | 180 |
| | | IASQ PKE+SG ALGTL+TGV AG L GP +GG +AEL GIR VFLLVG LFL +++T | |
| Sbjct: | 124 | IASQVPKEKSGSALGTLSTGVVAGTLTGPFIGGFIAELFGIRTVFLLVGSFLFLAAILTI | 183 |
| Query: | 181 | VYVKEEFKPVRRFEMIPTKVILKQVKSPQIMLGLFVTSMIIQISAQSVAPILSLYIRHLG | 240 |
| | | ++KE+F+PV + + IPTK + VK P ++L LF+TS +IQ SAQS+ PIL+LY+R LG | |
| Sbjct: | 184 | CFIKEDFQPVAKEKAIPTKELFTSVKYPYLLLNLFLTSFVIQFSAQSIGPILALYVRDLG | 243 |
| Query: | 241 | QTHNLMFTSGLVVSAMGFSSLFSSSYLGKLGDRFGNHRLLLAALCYSFIMYFSSALAQTS | 300 |
| | | QT NL+F SGL+VS+MGFSS+ S+ +GKLGD+ GNHRLL+ A YS I+Y A A + | |
| Sbjct: | 244 | QTENLLFVSGLIVSSMGFSSMMSAGVMGKLGDKVGNHRLLVVAQFYSVIIYLLCANASSP | 303 |
| Query: | 301 | FQLGVLRFAYGFGVGALMPSINSLLTKLTPKEGISRVFAYNQMFSNLGQVIGPFIGSNVA | 360 |
| | | QLG+ RF +G G GAL+P +N+LL+K+TPK GISRVFA+NQ+F LG V+GP GS VA | |
| Sbjct: | 304 | LQLGLYRFLFGLGTGALIPGVNALLSKMTPKAGISRVFAFNQVFFYLGGVVGPMAGSAVA | 363 |
| Query: | 361 | VVLGYRSVFYVTSLIVFVNLIWSLIIFRKYIKVKDI | 396 |
| | | GY +VFY TSL V + +++LI FR +KVK+I | |
| Sbjct: | 364 | GQFGYHAVFYATSLCVAFSCLFNLIQFRTLLKVKEI | 399 |

[12004] An alignment of the GAS and GBS proteins is shown below.

| Identities = 262/373 (70%), Positives = 314/373 (83%) | | | |
|---|---|---|---|
| Query: | 1 | MPFMVLYVEQLGAPSNKVEWYAGLSVSLSALSSALVAPLWGRLADKYGRKPMMVRAGLMM | 60 |
| | | MPFM LYVE LG P+ VE+YAGL+V+++AL+SAL AP+WG+LAD+YGRKPMM+RA +M | |
| Sbjct: | 25 | MPFMALYVENLGTPTELVEYYAGLAVAVTALASALFAPVWGKLADRYGRKPMMLRASFVM | 84 |
| Query: | 61 | TFTMGGLAFIHSVTGLLILRILNGIFAGYVPNSTALIASQAPQEESGYALGTLATGVTGG | 120 |
| | | TFTMGGLA I +V LLILR+L G+ AGYVPN+TALIASQAP+EESGYALGTLATGVT G | |
| Sbjct: | 85 | TFTMGGLAIIPNVFWLLILRLLTGVSAGYVPNATALIASQAPKEESGYALGTLATGVTAG | 144 |
| Query: | 121 | MLIGPLLGGLLAEWFGIREVFLLVGTILLISTLMTIFMVKEDFKPISNEETMPTTEVFKS | 180 |
| | | LIGPLLGG+LAE GIR+VFLLVG IL + +LMT VKE+FKP+ E +PT + K | |
| Sbjct: | 145 | ALIGPLLGGILAELLGIRQVFLLVGVILFLCSLMTAVYVKEEFKPVRRFEMIPTKVILKQ | 204 |
| Query: | 181 | VKSLQILIGLFVTSMIIQISAQSIAPILTLYIRHLGQTENLMFVSGLIVSGMGFSSILSS | 240 |
| | | VKS QI++GLFVTSMIIQISAQS+APIL+LYIRHLGQT NLMF SGL+VS MGFSS+ SS | |
| Sbjct: | 205 | VKSPQIMLGLFVTSMIIQISAQSVAPILSLYIRHLGQTHNLMFTSGLVVSAMGFSSLFSS | 264 |
| Query: | 241 | PKLGRIGDRIGNHRLLLLALLYSFLMYVLCSLAQTSLQLGVIRFLYGFGTGALMPSINSI | 300 |
| | | LG++GDR GNHRLLL AL YSF+MY +LAQTS QLGV+RF YGFG GALMPSINS+ | |
| Sbjct: | 265 | SYLGKLGDRFGNHRLLLAALCYSFIMYFSSALAQTSFQLGVLRFAYGFGVGALMPSINSL | 324 |
| Query: | 301 | LTKIAPRQGLSRIFSYNQMFSNLGQVLGPFVGSAVSIHLGFRWVFFVTSFIVLANFVWCF | 360 |
| | | LTK+ P++G+SR+F+YNQMFSNLGQV+GPF+GS V++ LG+R VF+VTS IV N +W | |
| Sbjct: | 325 | LTKLTPKEGISRVFAYNQMFSNLGQVIGPFIGSNVAVVLGYRSVFYVTSLIVFVNLIWSL | 384 |
| Query: | 361 | INFRKYIRVKEIV | 373 |
| | | I FRKYI+VK+IV | |
| Sbjct: | 385 | IIFRKYIKVKDIV | 397 |

[12005] Based on this analysis, it was predicted that these proteins and their epitopes could be useful antigens for vaccines or diagnostics.

### EXAMPLE 2197

[12006] A DNA sequence (GBSx2315) was identified in S. agalactiae <SEQ ID 6785> which encodes the amino acid sequence <SEQ ID 6786>. Analysis of this protein sequence reveals the following:

```
Possible site: 20
>>> Seems to have no N-terminal signal sequence
----- Final Results -----
                            bacterial cytoplasm --- Certainty = 0.2343(Affirmative) < succ>
                              bacterial membrane --- Certainty = 0.0000(Not Clear) < succ>
                                bacterial outside --- Certainty = 0.0000(Not Clear) < succ>
```

[12007] The protein has homology with the following sequences in the GENPEPT database.

| >GP: AAB69986 GB: U94356 glycerol kinase [Enterococcus faecalis] | | | |
|---|---|---|---|
| Identities = 156/186 (83%), Positives = 167/186 (88%), Gaps = 1/186 (0%) | | | |
| Query: | 3 | SEEKYIMAIDQGTTSSRAIIFNKKGEKIASSQKEFPQIFPQAGWVEHNANQIWNSVQSVI | 62 |
| | | +EEKYIMAIDQGTTSSRAIIF+KKG KI SSQKEF Q FP AGWVEHNAN+IWNSVQSVI | |
| Sbjct: | 2 | AEEKYIMAIDQGTTSSRAIIFDKKGNKIGSSQKEFTQYFPNAGWVEHNANEIWNSVQSVI | 61 |
| Query: | 63 | AGAFIESSIKPGQIEAIGITNQRETTVVWDKKTGLPIYNAIVWQSRQTAPIADQLKQEGH | 122 |
| | | AG+ IES +KP I IGITNQRETTVVWDK TGLPIYNAIVWQSRQT PIADQLK++G+ | |
| Sbjct: | 62 | AGSLIESGVRPTDIAGIGITNQRETTVVWDKATGLPIYNAIVWQSRQTTPIADQLKEDGY | 121 |
| Query: | 123 | TNMIHEKTGLVIDAYFSATKVRWILDHVPGAQERAEKGELLFGTIDTWLVWKLTDGLVHV | 182 |
| | | + MIHEKTGL+IDAYFSATKVRWILDHV GAQERAE GEL+FGTIDTWLVWKLT G HV | |
| Sbjct: | 122 | SEMIHEKTGLIIDAYFSATKVRWILDHVEGAQERAENGELMFGTIDTWLVWKLT-GDTHV | 180 |
| Query: | 183 | TDYSNA | 188 |
| | | TDYSNA | |
| Sbjct: | 181 | TDYSNA | 186 |

[12008] There is also high homology to SEQ ID 2844:

| Identities = 174/186 (93%), Positives = 182/186 (97%) | | | |
|---|---|---|---|
| Query: | 3 | SEEKYIMAIDQGTTSSRAIIFNKKGEKIASSQKEFPQIFPQAGWVEHNANQIWNSVQSVI | 62 |
| | | S+EKYIMAIDQGTTSSRAIIFN+KGEK++SSQKEFPQIFP AGWVEHNANQIWNSVQSVI | |
| Sbjct: | 2 | SQEKYIMAIDQGTTSSRAIIFNQKGEKVSSSQKEFPQIFPHAGWVEHNANQIWNSVQSVI | 61 |
| Query: | 63 | AGAFIESSIKPGQIEAIGITNQRETTVVWDKKTGLPIYNAIVWQSRQTAPIADQLKQEGH | 122 |
| | | AGAFIESSIKP QIEAIGITNQRETTVVWDKKTG+PIYNAIVWQSRQTAPIA+QLKQ+GH | |
| Sbjct: | 62 | AGAFIESSIKPSQIEAIGITNQRETTVVWDKKTGVPIYNAIVWQSRQTAPIAEQLKQDGH | 121 |
| Query: | 123 | TNMIHEKTGLVIDAYFSATKVRWILDHVPGAQERAEKGELLFGTIDTWLVWKLTDGLVHV | 182 |
| | | T MIHEKTGLVIDAYFSATK+RWILDHVPGAQERAEKGELLFGTIDTWLVWKLTDG VHV | |
| Sbjct: | 122 | TKMIHEKTGLVIDAYFSATKIRWILDHVPGAQERAEKGELLFGTIDTWLVWKLTDGAVHV | 181 |
| Query: | 183 | TDYSNA | 188 |
| | | TDYSNA | |
| Sbjct: | 182 | TDYSNA | 187 |

[12009] Based on this analysis, it was predicted that these proteins and their epitopes could be useful antigens for vaccines or diagnostics.

### EXAMPLE 2198

[12010] A DNA sequence (GBSx2317) was identified in S. agalactiae <SEQ ID 6787> which encodes the amino acid sequence <SEQ ID 6788>. This protein is predicted to be glycyl-tRNA synthetase beta chain (glyS). Analysis of this protein sequence reveals the following:

```
Possible site: 18
>>> Seems to have no N-terminal signal sequence
----- Final Results -----
                            bacterial cytoplasm --- Certainty = 0.2933(Affirmative) < succ>
                              bacterial membrane --- Certainty = 0.0000(Not Clear) < succ>
                                bacterial outside --- Certainty = 0.0000(Not Clear) < succ>
```

[12011] The protein has homology with the following sequences in the GENPEPT database.

| >GP: CAB14468 GB: Z99117 glycyl-tRNA synthetase (beta subunit) | | | |
|---|---|---|---|
| [Bacillus subtilis] | | | |
| Identities = 315/687 (45%), Positives = 447/687 (64%), Gaps = 21/687 (3%) | | | |
| Query: | 3 | KDLLLELGLEELPAYVVTPSEKQLGQKMVKFLEDHRLSFETVQIFSTPRRLAVRVKGLAD | 62 |
| | | +DLLLE+GLEE+PA + S QLG K+ +L++ ++ V++F+TPRRLAV VK +A+ | |
| Sbjct: | 4 | QDLLLEIGLEEMPARFLNESMVQLGDKLTGWLKEKNITHGEVKLFNTPRRLAVFVKDVAE | 63 |
| Query: | 63 | QQTDLTEDFKGPSKKIALDAEGNFSKAAQGFVRGKGLSVDDIEFREVKGEEYVYVTKHET | 122 |
| | | +Q D+ E+ KGP+KKIALDA+GN++KAA GF +G+G +V+D+ +EVKG EYV+V K + | |
| Sbjct: | 64 | KQDDIKEEAKGPAKKIALDADGNWTKAAIGFSKGQGANVEDLYIKEVKGIEYVFVQKFQA | 123 |
| Query: | 123 | GKSAIDVLASVTEVLTELTFPVNMHWANNSFEYIRPVHTLVVLLDDQALELDFLDIHSGR | 182 |
| | | G+ +L ++ ++T L FP NM W N YIRP+ +V L + ++ SGR | |
| Sbjct: | 124 | GQETKSLLPELSGLITSLHFPKNMRWGNEDLRYIRPIKWIVALFGQDVIPFSITNVESGR | 183 |
| Query: | 183 | ISRGHRFLGSDTEISSASSYEDDLRQQFVIADAKERQQMIVNQIHAIEEKKNISVEIDED | 242 |
| | | ++GHRFLG + I S S+YE+ L+ Q VIAD R+QMI +Q+ + + N S+ +DED | |
| Sbjct: | 184 | TTQGHRFLGHEVSIESPSAYEEQLKGQHVIADPSVRKQMIQSQLETMAAENNWSIPVDED | 243 |
| Query: | 243 | LLNEVLNLVEYPTAFLGSFDEKYLDVPEEVLVTSMKNHQRYFVVRDRDGKLLPNFISVRN | 302 |
| | | LL+EV +LVEYPTA GSF+ ++L +PEEVLVT+MK HQRYF V+D++G LLP+FI+VRN | |
| Sbjct: | 244 | LLDEVNHLVEYPTALYGSFESEFLSIPEEVLVTTMKEHQRYFPVKDKNGDLLPHFITVRN | 303 |
| Query: | 303 | GNAEHIENVIKGNEKVLVARLEDGEFFWQEDQKLNIADLVEKLKQVTFHEKIGSLYEHMD | 362 |
| | | GN+ IENV +GNEKVL ARL D FF++EDQKLNI V+KL+ + FHE++GSL + + | |
| Sbjct: | 304 | GNSHAIENVARGNEKVLRARLSDASFFYKEDQKLNIDANVKKLENIVFHEELGSLADKVR | 363 |
| Query: | 363 | RVKVISQYLAEKADLSDEEKLAVLRAASIYKFDLLTGMVDEFDELQGIMGEKYALLAGEQ | 422 |
| | | RV I++ LA + ++ V RAA I KFDL+T M+ EF ELQGIMGEKYA + GE | |
| Sbjct: | 364 | RVTSIAEKLAVRLQADEDTLKHVKRAAEISKFDLVTHMIYEFPELQGIMGEKYARMLGED | 423 |
| Query: | 423 | PAVAAAIREHYMPTSADGELPETRVGAILALADKFDTLLSFFSVGLIPSGSNDPYALRRA | 482 |
| | | AVAAA+ EHYMP SA GE P T GA++A+ADK DT+ SFFS+G+IP+GS DPY L R | |
| Sbjct: | 424 | EAVAAAVNEHYMPRSAGGETPSTFTGAVVAMADKLDTIASFFSIGVIPTGSQDPYGLPRQ | 483 |
| Query: | 483 | TQGIVRILEAFGWDIPLDELVTNLYGLSFASLDYANQKEVMAFISARIEKMIGS-KVPKD | 541 |
| | | GIV IL W I +EL+T F D N E++ F + R++ ++ + ++ D | |
| Sbjct: | 484 | ASGIVAILLDRNWGISFEELLT------FVQTDKEN--ELLDFFTQRLKYVLNAEQIRHD | 535 |
| Query: | 542 | IREAVLESDTYIVSLILEASQALVQKSKDAQYKVSVESLSRAFNLAEKVTHSVLVDSSLF | 601 |
| | | + +AVLES L +Q L QK +K + E+L R ++++K + LF | |
| Sbjct: | 536 | VIDAVLESSELEPYSALHKAQVLEQKLGAPGFKETAEALGRVISISKKGVRGD-IQPDLF | 594 |
| Query: | 602 | ENNQEKALYQAILSLELTEDMHDNLDK---------LFALSPIINDFFDNTMVMTDDEKM | 652 |
| | | EN E L+ A + + E++ +N K L AL I+ +FD+TMV+ D+E + | |
| Sbjct: | 595 | ENEYEAKLFDAYQTAK--ENLQENFSKKDYEAALASLAALKEPIDAYFDHTMVIADNESL | 652 |
| Query: | 653 | KQNRLAILNSLVAKARTVAAFNLLNTK | 679 |
| | | K NRLA + SL + ++ A N L K | |
| Sbjct: | 653 | KANRLAQMVSLADEIKSFANMNALIVK | 679 |

[12012] A related DNA sequence was identified in S. pyogenes <SEQ ID 2835> which encodes the amino acid sequence <SEQ ID 2836>. Analysis of this protein sequence reveals the following:

| Possible site: 42 | | | | |
|---|---|---|---|---|
| >>> Seems to have no N-terminal signal sequence | | | | |
| | INTEGRAL | Likelihood = −0.96 | Transmembrane | 450-466 (450-466) |

```
----- Final Results -----
                              bacterial membrane --- Certainty = 0.1383(Affirmative) < succ>
                                bacterial outside --- Certainty = 0.0000(Not Clear) < succ>
                            bacterial cytoplasm --- Certainty = 0.0000(Not Clear) < succ>
```

[12013] An alignment of the GAS and GBS proteins is shown below.

| Identities = 505/679 (74%), Positives = 578/679 (84%) | | | |
|---|---|---|---|
| Query: | 1 | MTKDLLLELGLEELPAYVVTPSEKQLGQKMVKFLEDHRLSFETVQIFSTPRRLAVRVKGL | 60 |
| | | M+K+LL+ELGLEELPAYVVTPSEKQLG+++ FL ++RLSFE +Q FSTPRRLAVRV GL | |
| Sbjct: | 1 | MSKNLLIELGLEELPAYVVTPSEKQLGERLATFLTENRLSFEDIQTFSTPRRLAVRVSGL | 60 |
| Query: | 61 | ADQQTDLTEDFKGPSKKIALDAEGNFSKAAQGFVRGKGLSVDDIEFREVKGEEYVYVTKH | 120 |
| | | ADQQTDLTEDFKGP+KKIALDA+GNFSKAAQGFVRGKGL+ D IEFREVKGEEYVYVTKH | |
| Sbjct: | 61 | ADQQTDLTEDFKGPAKKIALDADGNFSKAAQGFVRGKGLTTDAIEFREVKGEEYVYVTKH | 120 |
| Query: | 121 | ETGKSAIDVLASVTEVLTELTFPVNMHWANNSFEYIRPVHTLVVLLDDQALELDFLDIHS | 180 |
| | | E GK A +VL VTEVL+ +TFPV+MHWANNSFEYIRPVHTL VLL+D+ALELDFLDIHS | |
| Sbjct: | 121 | EAGKPAKEVLLGVTEVLSAMTFPVSMHWANNSFEYIRPVHTLTVLLNDEALELDFLDIHS | 180 |
| Query: | 181 | GRISRGHRFLGSDTEISSASSYEDDLRQQFVIADAKERQQMIVNQIHAIEEKKNISVEID | 240 |
| | | GR+SRGHRFLG++T I+SA SYE DLR QFVIADAKERQ+MIV QI +E ++ + V+ID | |
| Sbjct: | 181 | GRVSRGHRFLGTETTITSADSYEADLRSQFVIADAKERQEMIVEQIKTLEVEQGVQVDID | 240 |
| Query: | 241 | EDLLNEVLNLVEYPTAFLGSFDEKYLDVPEEVLVTSMKNHQRYFVVRDRDGKLLPNFISV | 300 |
| | | EDLLNEVLNLVE+PTAF+GSF+ KYLDVPEEVLVTSMKNHQRYFVVRD+ G L+PNF+SV | |
| Sbjct: | 241 | EDLLNEVLNLVEFPTAFMGSFEAKYLDVPEEVLVTSMKNHQRYFVVRDQAGHLMPNFVSV | 300 |
| Query: | 301 | RNGNAEHIENVIKGNEKVLVARLEDGEFFWQEDQKLNIADLVEKLKQVTFHEKIGSLYEH | 360 |
| | | RNGN + IENVIKGNEKVLVARLEDGEFFW+EDQKL IADLV KL VTFHEKIGSL EH | |
| Sbjct: | 301 | RNGNDQAIENVIKGNEKVLVARLEDGEFFWREDQKLQIADLVAKLTNVTFHEKIGSLAEH | 360 |
| Query: | 361 | MDRVKVISQYLAEKADLSDEEKLAVLRAASIYKFDLLTGMVDEFDELQGIMGEKYALLAG | 420 |
| | | MDR +VI+ LA++A+LS EE AV RAA IYKFDLLTGMV EFDELQGIMGEKYALLAG | |
| Sbjct: | 361 | MDRTRVIAASLAKEANLSAEEVTAVDRAAQIYKFDLLTGMVGEFDELQGIMGEKYALLAG | 420 |
| Query: | 421 | EQPAVAAAIREHYMPTSADGELPETRVGAILALADKFDTLLSFFSVGLIPSGSNDPYALR | 480 |
| | | E AVA AIREHY+P +A G LPET+VGA+LALA K DTLLSFFSVGLIPSGSNDPYALR | |
| Sbjct: | 421 | EDAAVATAIREHYLPDAAGGALPETKVGAVLALAAKLDTLLSFFSVGLIPSGSNDPYALR | 480 |
| Query: | 481 | RATQGIVRILEAFGWDIPLDELVTNLYGLSFASLDYANQKEVMAFISARIEKMIGSKVPK | 540 |
| | | RATQGIVRIL+ FGW IP+D+LV +LY LSF SL YAN+ +VM FI AR++KM+G PK | |
| Sbjct: | 481 | RATQGIVRILDHFGWRIPMDKLVDSLYDLSFDSLTYANKADVMNFIRARVDKMMGKAAPK | 540 |
| Query: | 541 | DIREAVLESDTYIVSLILEASQALVQKSKDAQYKVSVESLSRAFNLAEKVTHSVLVDSSL | 600 |
| | | DIREA+L S T++V +L A++ALV+ S YK +VESLSRAFNLAEK SV VD SL | |
| Sbjct: | 541 | DIREAILASSTFVVPEMLAAAEALVKASHTENYKPAVESLSRAFNLAEKADASVQVDPSL | 600 |
| Query: | 601 | FENNQEKALYQAILSLELTEDMHDNLDKLFALSPIINDFFDNTMVMTDDEKMKQNRLAIL | 660 |
| | | FEN QE L+ AI L L L+++FALSP+INDFFDNTMVM D+ +K NRLAIL | |
| Sbjct: | 601 | FENEQENTLFAAIQGLTLAGSAAQQLEQVFALSPVINDFFDNTMVMAGDQALKNNRLAIL | 660 |
| Query: | 661 | NSLVAKARTVAAFNLLNTK | 679 |
| | | + LV+KA+T+ AFN LNTK | |
| Sbjct: | 661 | SDLVSKAKTIVAFNQLNTK | 679 |

[12014] Based on this analysis, it was predicted that these proteins and their epitopes could be useful antigens for vaccines or diagnostics.

### EXAMPLE 2199

[12015] A DNA sequence (GBSx2318) was identified in S. agalactiae <SEQ ID 6789> which encodes the amino acid sequence <SEQ ID 6790>. Analysis of this protein sequence reveals the following:

```
Possible site: 13
>>> Seems to have no N-terminal signal sequence
----- Final Results -----
                            bacterial cytoplasm --- Certainty = 0.2182(Affirmative) < succ>
                              bacterial membrane --- Certainty = 0.0000(Not Clear) < succ>
                                bacterial outside --- Certainty = 0.0000(Not Clear) < succ>
```

[12016] The protein has homology with the following sequences in the GENPEPT database.

| >GP: AAD24436 GB: AF112858 NAD(P)H dehydrogenase [Bacillus | | | |
|---|---|---|---|
| stearothermophilus] | | | |
| Identities = 64/174 (36%), Positives = 98/174 (55%), Gaps = 6/174 (3%) | | | |
| Query: | 2 | NTLIVNSHPDFSNPYSFTTILQEKFIELYNEHFPNHQLSILNLYDCVLPEITKEVLLSIW | 61 |
| | | N L + +HP + S++ + + FI+ Y + P+H++ L+LY +PEI +V S W | |
| Sbjct: | 3 | NVLYITAHPH-DDTQSYSMAVGKAFIDTYKQVHPDHEVIHLDLYKEYIPEIDVDVF-SGW | 60 |
| Query: | 62 | SKQRKGL---ELTADEIVQAKISKDLLEQFKSHHRIVFVSPMHNYNVTARAKTYIDNIFI | 118 |
| | | K R G EL+ +E + +L EQF S + VFV+PM N++ K YID + + | |
| Sbjct: | 61 | GKLRSGKSFEELSDEEKAKVGRMNELCEQFISADKYVFVTPMWNFSFPPVLKAYIDAVAV | 120 |
| Query: | 119 | AGETFKYTENGSVGLMTDDYRLLMLESAGSIYSKGQYSPYEFPVHYLKAIFKDF | 172 |
| | | AG+TFKYTE G VGL+TD + L +++ G YS+G + E YL I + F | |
| Sbjct: | 121 | AGKTFKYTEQGPVGLLTDK-KALHIQARGGFYSEGPAAEMEMGHRYLSVIMQFF | 173 |

[12017] No corresponding DNA sequence was identified in S. pyogenes.

[12018] Based on this analysis, it was predicted that this protein and its epitopes, could be useful antigens for vaccines or diagnostics.

### EXAMPLE 2200

[12019] A DNA sequence (GBSx2319) was identified in S. agalactiae <SEQ ID 6791> which encodes the amino acid sequence <SEQ ID 6792>. This protein is predicted to be glycyl-tRNA synthetase (glyQ). Analysis of this protein sequence reveals the following:

```
Possible site: 56
>>> Seems to have no N-terminal signal sequence
----- Final Results -----
                            bacterial cytoplasm --- Certainty = 0.1364(Affirmative) < succ>
                              bacterial membrane --- Certainty = 0.0000(Not Clear) < succ>
                                bacterial outside --- Certainty = 0.0000(Not Clear) < succ>
```

[12020] A related GBS nucleic acid sequence <SEQ ID 9521> which encodes amino acid sequence <SEQ ID 9522> was also identified.

[12021] The protein has homology with the following sequences in the GENPEPT database.

| >GP: BAB05089 GB: AP001511 glycyl-tRNA synthetase (alpha subunit) | | | |
|---|---|---|---|
| [Bacillus halodurans] | | | |
| Identities = 222/287 (77%), Positives = 250/287 (86%) | | | |
| Query: | 6 | LTFQEIILTLQQFWNDQGCMLMQAYDNEKGAGTMSPYTFLRAIGPEPWNAAYVEPSRRPA | 65 |
| | | + Q +ILTLQ++W+ Q C+L+QAYD EKGAGTMSPYT LR IGPEPWN AYVEPSRRPA | |
| Sbjct: | 1 | MNVQTMILTLQEYWSKQNCILLQAYDTEKGAGTMSPYTMLRTIGPEPWNVAYVEPSRRPA | 60 |
| Query: | 66 | DGRYGENPNRLYQHHQFQVVMKPSPSNIQELYLKSLELLGINPLEHDIRFVEDNWENPST | 125 |
| | | DGRYGENPNRLYQHHQFQV+MKPSP+NIQELYL SL LGINPLEHDIRFVEDNWENPS | |
| Sbjct: | 61 | DGRYGENPNRLYQHHQFQVIMKPSPTNIQELYLDSLRALGINPLEHDIRFVEDNWENPSL | 120 |
| Query: | 126 | GSAGLGWEVWLDGMEITQFTYFQQVGGLQTGPVTSEVTYGLERLASYIQEVDSVYDIEWA | 185 |
| | | G AGLGWEVWLDGMEITQFTYFQQVGGL+ PV++E+TYGLERLASYIQ+ ++V+D+EW | |
| Sbjct: | 121 | GCAGLGWEVWLDGMEITQFTYFQQVGGLEANPVSAEITYGLERLASYIQDKENVFDLEWV | 180 |
| Query: | 186 | PGVKYGEIFTQPEYEHSKYSFEISDQVMLLENFEKFEREAKRALEEGLVHPAYDYVLKCS | 245 |
| | | G YG+IFTQPEYEHSKY+FE+SD ML E F +E+EA RALEE LV PAYDYVLKCS | |
| Sbjct: | 181 | EGFTYGDIFTQPEYEHSKYTFEVSDSAMLFELFSTYEKEADRALEENLVFPAYDYVLKCS | 240 |
| Query: | 246 | HTFNLLDARGAVSVTERAGYIARIRNLARVVAKTFVAERKKLGFPLL | 292 |
| | | HTFNLLDARGA+SVTER GYI R+RNLAR AK + ER+KLGFP+L | |
| Sbjct: | 241 | HTFNLLDARGAISVTERTGYIGRVRNLARKCAKKYYEEREKLGFPML | 287 |

[12022] A related DNA sequence was identified in S. pyogenes <SEQ ID 6793> which encodes the amino acid sequence <SEQ ID 6794>. Analysis of this protein sequence reveals the following:

```
Possible site: 55
>>> Seems to have no N-terminal signal sequence
----- Final Results -----
                            bacterial cytoplasm --- Certainty = 0.2081(Affirmative) < succ>
                              bacterial membrane --- Certainty = 0.0000(Not Clear) < succ>
                                bacterial outside --- Certainty = 0.0000(Not Clear) < succ>
```

[12023] An alignment of the GAS and GBS proteins is shown below.

| Identities = 290/304 (95%), Positives = 294/304 (96%) | | | |
|---|---|---|---|
| Query: | 2 | MSKKLTFQEIILTLQQFWNDQGCMLMQAYDNEKGAGTMSPYTFLRAIGPEPWNAAYVEPS | 61 |
| | | MSKKLTFQEIILTLQQ+WNDQGCMLMQAYDNEKGAGTMSPYTFLRAIGPEPWNAAYVEPS | |
| Sbjct: | 1 | MSKKLTFQEIILTLQQYWNDQGCMLMQAYDNEKGAGTMSPYTFLRAIGPEPWNAAYVEPS | 60 |
| Query: | 62 | RRPADGRYGENPNRLYQHHQFQVVMKPSPSNIQELYLKSLELLGINPLEHDIRFVEDNWE | 121 |
| | | RRPADGRYGENPNRLYQHHQFQVVMKPSPSNIQELYL SLE LGINPLEHDIRFVEDNWE | |
| Sbjct: | 61 | RRPADGRYGENPNRLYQHHQFQVVMKPSPSNIQELYLASLEKLGINPLEHDIRFVEDNWE | 120 |
| Query: | 122 | NPSTGSAGLGWEVWLDGMEITQFTYFQQVGGLQTGPVTSEVTYGLERLASYIQEVDSVYD | 181 |
| | | NPSTGSAGLGWEVWLDGMEITQFTYFQQVGGL T PVT+EVTYGLERLASYIQEVDSVYD | |
| Sbjct: | 121 | NPSTGSAGLGWEVWLDGMEITQFTYFQQVGGLATSPVTAEVTYGLERLASYIQEVDSVYD | 180 |
| Query: | 182 | IEWAPGVKYGEIFTQPEYEHSKYSFEISDQVMLLENFEKFEREAKRALEEGLVHPAYDYV | 241 |
| | | IEWAPGVKYGEIF QPEYEHSKYSFEISDQ MLLENFEKFE+EA RALEEGLVHPAYDYV | |
| Sbjct: | 181 | IEWAPGVKYGEIFLQPEYEHSKYSFEISDQDMLLENFEKFEKEASRALEEGLVHPAYDYV | 240 |
| Query: | 242 | LKCSHTFNLLDARGAVSVTERAGYIARIRNLARVVAKTFVAERKKLGFPLLDEETRIKLL | 301 |
| | | LKCSHTFNLLDARGAVSVTERAGYIARIRNLARVVAKTFVAERKKLGFPLLDE TR LL | |
| Sbjct: | 241 | LKCSHTFNLLDARGAVSVTERAGYIARIRNLARVVAKTFVAERKKLGFPLLDEATRAILL | 300 |
| Query: | 302 | AEED | 305 |
| | | AE+D | |
| Sbjct: | 301 | AEDD | 304 |

[12024] Based on this analysis, it was predicted that these proteins and their epitopes could be useful antigens for vaccines or diagnostics.

### EXAMPLE 2201

[12025] A DNA sequence (GBSx2320) was identified in S. agalactiae <SEQ ID 6795> which encodes the amino acid sequence <SEQ ID 6796>. This protein is predicted to be vacB protein (vacB). Analysis of this protein sequence reveals the following:

```
Possible site: 60
>>> Seems to have no N-terminal signal sequence
----- Final Results -----
                            bacterial cytoplasm --- Certainty = 0.2966(Affirmative) < succ>
                              bacterial membrane --- Certainty = 0.0000(Not Clear) < succ>
                                bacterial outside --- Certainty = 0.0000(Not Clear) < succ>
```

[12026] A related GBS nucleic acid sequence <SEQ ID 9399> which encodes amino acid sequence <SEQ ID 9400> was also identified.

[12027] The protein has homology with the following sequences in the GENPEPT database.

| >GP: CAB15366 GB: Z99121 similar to hypothetical proteins [Bacillus subtilis] | | | |
|---|---|---|---|
| Identities = 338/780 (43%), Positives = 485/780 (61%), Gaps = 47/780 (6%) | | | |
| Query: | 4 | AKAFPKLIKTISNLESHRQL---RFDDNGSLSLQKKEAKKKEITVRGLFRANKAGFGFL- | 59 |
| | | A+ F +L+K + LE + R D G +K ++G A+ GF FL | |
| Sbjct: | 36 | AEEFKELVKALVALEEKGLIVRTRSDRYG--------IPEKMNLIKGKISAHAKGFAFLL | 87 |
| Query: | 60 | SIDQDEDDMFIGKNDIAYAIDGDTVEAVVKKPADRLNGTAAEARVVNIVERSLKTLVGKF | 119 |
| | | D D+FI N++ A++GD V + + +G+ E V+ I+ER+++ +VG + | |
| Sbjct: | 88 | PEDTSLSDVFIPPNELNTAMNGDIVMVRLNSQS---SGSRQEGTVIRILERAIQRVVGTY | 144 |
| Query: | 120 | VLDDERPKYAGYIKSKNQKINQKIYIRKEPV--VLDGTEIIKVDIDKYPTRGHDYFVASV | 177 |
| | | + G++ ++KI I+I K +G +++ V + YP G V | |
| Sbjct: | 145 | T----ETRNFGFVIPDDKKITSDIFIPKNGKNGAAEGHKVV-VKLTSYP-EGRMNAEGEV | 198 |
| Query: | 178 | RDIVGHQGDVGIDVLEVLESMDIVSEFPEDVIAEANAIPDAPTEKDLIGRVDLRQEVTFT | 237 |
| | | I+GH+ D GID+L V+ + EFP D + +A++ PD EKDL R DLR +V T | |
| Sbjct: | 199 | ETILGHKNDPGIDILSVIHKHGLPGEFPADAMEQASSTPDTIDEKDLKDRRDLRDQVIVT | 258 |
| Query: | 238 | IDGADAKDLDDAVHIKLLDNGHFELGVHIADVSYYVTEGSALNREALSRGTSVYVTDRVV | 297 |
| | | IDGADAKDLDDAV + LD+G ++LGVHIADVS+YVTE S +++EAL RGTSVY+ DRV+ | |
| Sbjct: | 259 | IDGADAKDLDDAVTVTKLDDGSYKLGVHIADVSHYVTENSPIDKEALERGTSVYLVDRVI | 318 |
| Query: | 298 | PMLPERLSNGICSLNPNLDRLTQSCIMEIDQNGRVVNHQITQSVINTTYRMTYTAVNDII | 357 |
| | | PM+P RLSNGICSLNP +DRLT SC M I+ G+V H+I QSVI TT RMTY+ VN I+ | |
| Sbjct: | 319 | PMIPHRLSNGICSLNPKVDRLTLSCEMTINSQGQVTEHEIFQSVIKTTERMTYSDVNKIL | 378 |
| Query: | 358 | A-GDEEICSEYESIVSSVQHMVTLHHTLEAMRTRRGALNFDTSEAKIMVNDKGMPVDIVI | 416 |
| | | DEE+ +YE +V + M L L R RGA++FD EAK++V+D+G D+VI | |
| Sbjct: | 379 | VDDDEELKQKYEPLVPMFKDMERLAQILRDKRMDRGAVDFDFKEAKVLVDDEGAVKDVVI | 438 |
| Query: | 417 | RNRGIAERMIESFMLAANETVAEHYARLKLPFIYRIHEEPKAEKLQKFIDYASVFGVQIQ | 476 |
| | | R R +AE++IE FML ANETVAEH+ + +PFIYRIHEEP AEKLQKF+++ + FG ++ | |
| Sbjct: | 439 | RERSVAEKLIEEFMLVANETVAEHFHWMNVPFIYRIHEEPNAEKLQKFLEFVTTFGYVVK | 498 |
| Query: | 477 | GTATKITQSALQDFMKKVQGQPGSEVLSMMLLRSMQQARYSEHNHGHYGLAAEYYTHFTS | 536 |
| | | GTA I ALQ + V+ +P V+S ++LRSM+QA+Y + GH+GL+ E+YTHFTS | |
| Sbjct: | 499 | GTAGNIHPRALQSILDAVRDRPEETVISTVMLRSMKQAKYDPQSLGHFGLSTEFYTHFTS | 558 |
| Query: | 537 | PIRRYPDLLVHRMIRDY-DDKAMDKA--DHFANLIPEIATQTSSLERRAIDAERIVEAMK | 593 |
| | | PIRRYPDL+VHR+IR Y + +D+A + +A +P+IA TSS+ERRA+DAER + +K | |
| Sbjct: | 559 | PIRRYPDLIVHRLIRTYLINGKVDEATQEKWAERLPDIAEHTSSMERRAVDAERETDDLK | 618 |
| Query: | 594 | KAEYMEEYVGEEFEGVVASVVKFGMFVELPNTIEGLIHVTTL-PEYYHFNERTLTLQGEK | 652 |
| | | KAEYM + +GEEF+G+++SV FGMFVELPNTIEGL+HV+ + +YY F+E+ + GE+ | |
| Sbjct: | 619 | KAEYMLDKIGEEFDGMISSVTNFGMFVELPNTIEGLVHVSFMTDDYYRFDEQHFAMIGER | 678 |
| Query: | 653 | SGKVFRVGQQIKVKLIRSDKETGDIDFDYLPSDFDIVEKVSKSSREGRPNRSSKREHQHR | 712 |
| | | +G VFR+G +I VK++ +K+ +IDF+ + +G P R + + | |
| Sbjct: | 679 | TGNVFRIGDEITVKVVDVNKDERNIDFEIV-------------GMKGTPRRPRELD---- | 721 |
| Query: | 713 | ISDRDNKNKNTSKKKASRKPKRNSDSKSHHHKDDRTTGSTKKKTKKPFYKGVAKKGQKRK | 772 |
| | | S R K ++K+ S + S K + T KKK K+ F +K +K+K | |
| Sbjct: | 722 | -SSRSRKRGKPARKRVQSTNTPVSPAPS-EEKGEWFTKPKKKKKKRGFQNAPKQKRKKKK | 779 |

[12028] A related DNA sequence was identified in S. pyogenes <SEQ ID 6797> which encodes the amino acid sequence <SEQ ID 6798>. Analysis of this protein sequence reveals the following:

```
Possible site: 30
>>> Seems to have no N-terminal signal sequence
----- Final Results -----
                            bacterial cytoplasm --- Certainty = 0.0811(Affirmative) < succ>
                              bacterial membrane --- Certainty = 0.0000(Not Clear) < succ>
                                bacterial outside --- Certainty = 0.0000(Not Clear) < succ>
```

[12029] An alignment of the GAS and GBS proteins is shown below.

| Identities = 579/773 (74%), Positives = 664/773 (84%), Gaps = 22/773 (2%) | | | |
|---|---|---|---|
| Query: | 1 | MAGAKAFPKLIKTISNLESHRQLRFDDNGSLSLQKKEAKKKEITVRGLFRANKAGFGFLS | 60 |
| | | MAGAK FP LIKTIS +ES LRF D+GSL+L+K+ KKKE TV+G+FRANKAGFGFL | |
| Sbjct: | 27 | MAGAKHFPSLIKTISKMESQSLLRFSDDGSLALRKEREKKKEPTVQGVFRANKAGFGFLH | 86 |
| Query: | 61 | IDQDEDDMFIGKNDIAYAIDGDTVEAVVKKPADRLNGTAAEARVVNIVERSLKTLVGKFV | 120 |
| | | +D++EDDMFIG+ND+ YAIDGDTVE VVKKPADRL GTAAEA+VV IV+RSLKT VG F+ | |
| Sbjct: | 87 | VDENEDDMFIGRNDVGYAIDGDTVEVVVKKPADRLKGTAAEAKVVAIVDRSLKTAVGTFI | 146 |
| Query: | 121 | LDDERPKYAGYIKSKNQKINQKIYIRKEPVVLDGTEIIKVDIDKYPTRGHDYFVASVRDI | 180 |
| | | LDD++PKYAGYI+SKNQKI QKIYI+KEPVVL GTEIIKVDIDKYP RGHDYFVASVRDI | |
| Sbjct: | 147 | LDDDKPKYAGYIRSKNQKIQQKIYIKKEPVVLKGTEIIKVDIDKYPIRGHDYFVASVRDI | 206 |
| Query: | 181 | VGHQGDVGIDVLEVLESMDIVSEFPEDVIAEANAIPDAPTEKDLIGRVDLRQEVTFTIDG | 240 |
| | | VGHQGDVGIDVLEVLESMDIVSEFP +V+AEANAI +APT KDLIGRVDLRQE T TIDG | |
| Sbjct: | 207 | VGHQGDVGIDVLEVLESMDIVSEFPAEVLAEANAISEAPTAKDLIGRVDLRQETTITIDG | 266 |
| Query: | 241 | ADAKDLDDAVHIKLLDNGHFELGVHIADVSYYVTEGSALNREALSRGTSVYVTDRVVPML | 300 |
| | | ADAKDLDDA+HIKLLDNG++ELGVHIADVSYYVTEGSAL++EA++RGTSVYVTDRVVPML | |
| Sbjct: | 267 | ADAKDLDDAIHIKLLDNGNYELGVHIADVSYYVTEGSALDKEAIARGTSVYVTDRVVPML | 326 |
| Query: | 301 | PERLSNGICSLNPNLDRLTQSCIMEIDQNGRVVNHQITQSVINTTYRMTYTAVNDIIAGD | 360 |
| | | PERLSNGICSLNPN+DRLTQS +MEI+ G VVN+QI QSVI TTYRMTY+ VND+IAGD | |
| Sbjct: | 327 | PERLSNGICSLNPNIDRLTQSALMEINSQGHVVNYQICQSVIKTTYRMTYSTVNDMIAGD | 386 |
| Query: | 361 | EEICSEYESIVSSVQHMVTLHHTLEAMRTRRGALNFDTSEAKIMVNDKGMPVDIVIRNRG | 420 |
| | | EE E+ SI V MV LH LEAMR++RGALNFDT EAKI+VNDKGMPVD+V+R RG | |
| Sbjct: | 387 | EEALQEFASIADDVTLMVALHRILEAMRSKRGALNFDTQEAKIIVNDKGMPVDVVLRQRG | 446 |
| Query: | 421 | IAERMIESFMLAANETVAEHYARLKLPFIYRIHEEPKAEKLQKFIDYASVFGVQIQGTAT | 480 |
| | | IAERMIESFMLAANE VAEH+A+ KLPFIYRIHEEPKAEKLQ+FIDYAS FG+ IQGTA | |
| Sbjct: | 447 | IAERMIESFMLAANECVAEHFAKAKLPFIYRIHEEPKAEKLQQFIDYASTFGIHIQGTAN | 506 |
| Query: | 481 | KITQSALQDFMKKVQGQPGSEVLSMMLLRSMQQARYSEHNHGHYGLAAEYYTHFTSPIRR | 540 |
| | | KI+Q ALQ FM KV+GQPG+EVL+MMLLRSMQQARYSEHNHGHYGLAAEYYTHFTSPIRR | |
| Sbjct: | 507 | KISQEALQAFMAKVEGQPGAEVLNMMLLRSMQQARYSEHNHGHYGLAAEYYTHFTSPIRR | 566 |
| Query: | 541 | YPDLLVHRMIRDYDDKAMDKADHFANLIPEIATQTSSLERRAIDAERIVEAMKKAEYMEE | 600 |
| | | YPDLLVHRM+R+Y+ + +K DHFA +IPE+AT +S LERRAIDAER+VEAMKKAEYM E | |
| Sbjct: | 567 | YPDLLVHRMVREYNQPSQEKRDHFAQIIPELATSSSQLERRAIDAERVVEAMKKAEYMAE | 626 |
| Query: | 601 | YVGEEFEGVVASVVKFGMFVELPNTIEGLIHVTTLPEYYHFNERTLTLQGEKSGKVFRVG | 660 |
| | | YVGEEF+G+V+SVVKFG FVELPNTIEGL+H+T+LPEYYHFNERTL+LQGEKSGKVF+VG | |
| Sbjct: | 627 | YVGEEFDGIVSSVVKFGFFVELPNTIEGLVHITSLPEYYHFNERTLSLQGEKSGKVFKVG | 686 |
| Query: | 661 | QQIKVKLIRSDKETGDIDFDYLPSDFDIVEKVSKSSREGRPNRSSKREHQHRISDRDNKN | 720 |
| | | Q I+VKL+++DKETGDIDF+YLPSDFD+VEK+ S + R +R K+ | |
| Sbjct: | 687 | QPIRVKLVKADKETGDIDFEYLPSDFDVVEKIKMSDKASRRDR--------------RKS | 732 |
| Query: | 721 | KNTSKKKASRKPKRNSDSKSHHHKDDRTTGSTKKKTKKPFYKGVAKKGQKRKS | 773 |
| | | +SK ++PK + +K T G TKK +KKPFYK AKK +++S | |
| Sbjct: | 733 | SKSSKGTKKKEPKEVAKAK--------TKGKTKKGSKKPFYKEQAKKKSRKRS | 777 |

[12030] Based on this analysis, it was predicted that these proteins and their epitopes could be useful antigens for vaccines or diagnostics.

### EXAMPLE 2202

[12031] A DNA sequence (GBSx2321) was identified in S. agalactiae <SEQ ID 6799> which encodes the amino acid sequence <SEQ ID 6800>. This protein is predicted to be VacB homolog (smpB). Analysis of this protein sequence reveals the following:

```
Possible site: 41
>>> Seems to have no N-terminal signal sequence
----- Final Results -----
                            bacterial cytoplasm --- Certainty = 0.2988(Affirmative) < succ>
                              bacterial membrane --- Certainty = 0.0000(Not Clear) < succ>
                                bacterial outside --- Certainty = 0.0000(Not Clear) < succ>
```

[12032] The protein has homology with the following sequences in the GENPEPT database.

| >GP: AAC23745 GB: AF052209 VacB homolog [Streptococcus pneumoniae] | | | |
|---|---|---|---|
| Identities = 121/155 (78%), Positives = 139/155 (89%) | | | |
| Query: | 1 | MVKGQGNVVAQNKKAHHDYTIVETIEAGIVLTGTEIKSVRAARITLKDGYAQIKNGEAWL | 60 |
| | | M KG+G VVAQNKKA HDYTIV+T+EAG+VLTGTEIKSVRAARI LKDG+AQ+KNGE WL | |
| Sbjct: | 1 | MAKGEGKVVAQNKKARHDYTIVDTLEAGMVLTGTEIKSVRAARINLKDGFAQVKNGEVWL | 60 |
| Query: | 61 | INVHITPYDQGNIWNQDPDRTRKLLLKKREIEKISNELKGTGMTLVPLKVYLKDGFAKVL | 120 |
| | | NVHI PY++GNIWNQ+P+R RKLLL K++I+K+ E KGTGMTLVPLKVY+KDG+AK+L | |
| Sbjct: | 61 | SNVHIAPYEEGNIWNQEPERRRKLLLHKKQIQKLEQETKGTGMTLVPLKVYIKDGYAKLL | 120 |
| Query: | 121 | LGLAKGKHDYDKRESIKRREQNRDIARQLKNYNSR | 155 |
| | | LGLAKGKHDYDKRESIKRREQNRDIAR +K N R | |
| Sbjct: | 121 | LGLAKGKHDYDKRESIKRREQNRDIARVMKAVNQR | 155 |

[12033] A related DNA sequence was identified in S. pyogenes <SEQ ID 6801> which encodes the amino acid sequence <SEQ ID 6802>. Analysis of this protein sequence reveals the following:

```
Possible site: 41
>>> Seems to have no N-terminal signal sequence
----- Final Results -----
                            bacterial cytoplasm --- Certainty = 0.2918(Affirmative) < succ>
                              bacterial membrane --- Certainty = 0.0000(Not Clear) < succ>
                                bacterial outside --- Certainty = 0.0000(Not Clear) < succ>
```

[12034] An alignment of the GAS and GBS proteins is shown below.

| Identities = 124/155 (80%), Positives = 145/155 (93%) | | | |
|---|---|---|---|
| Query: | 1 | MVKGQGNVVAQNKKAHHDYTIVETIEAGIVLTGTEIKSVRAARITLKDGYAQIKNGEAWL | 60 |
| | | M KG+G+++AQNKKA HDY IVET+EAGIVLTGTEIKSVRAARI LKDG+AQIKNGEAWL | |
| Sbjct: | 1 | MAKGEGHILAQNKKARHDYHIVETVEAGIVLTGTEIKSVRAARIQLKDGFAQIKNGEAWL | 60 |
| Query: | 61 | INVHITPYDQGNIWNQDPDRTRKLLLKKREIEKISNELKGTGMTLVPLKVYLKDGFAKVL | 120 |
| | | +NVHI P++QGNIWN DP+RTRKLLLKKREI ++NELKG+GMTLVPLKVYLKDGFAKVL | |
| Sbjct: | 61 | VNVHIAPFEQGNIWNADPERTRKLLLKKREITHLANELKGSGMTLVPLKVYLKDGFAKVL | 120 |
| Query: | 121 | LGLAKGKHDYDKRESIKRREQNRDIARQLKNYNSR | 155 |
| | | +GLAKGKH+YDKRE+IKRR+Q RDI +Q+K+YN+R | |
| Sbjct: | 121 | IGLAKGKHEYDKRETIKRRDQERDIKKQMKHYNAR | 155 |

[12035] Based on this analysis, it was predicted that these proteins and their epitopes could be useful antigens for vaccines or diagnostics.

### EXAMPLE 2203

[12036] A DNA sequence (GBSx2322) was identified in S. agalactiae <SEQ ID 6803> which encodes the amino acid sequence <SEQ ID 6804>. Analysis of this protein sequence reveals the following:

```
Possible site: 14
>>> Seems to have no N-terminal signal sequence
----- Final Results -----
                            bacterial cytoplasm --- Certainty = 0.6876(Affirmative) < succ>
                              bacterial membrane --- Certainty = 0.0000(Not Clear) < succ>
                                bacterial outside --- Certainty = 0.0000(Not Clear) < succ>
```

[12037] The protein has no significant homology with any sequences in the GENPEPT database.

[12038] No corresponding DNA sequence was identified in S. pyogenes.

[12039] Based on this analysis, it was predicted that this protein and its epitopes, could be useful antigens for vaccines or diagnostics.

### EXAMPLE 2204

[12040] A DNA sequence (GBSx2323) was identified in S. agalactiae <SEQ ID 6805> which encodes the amino acid sequence <SEQ ID 6806>. This protein is predicted to be d-serine/d-alanine/glycine transporter (cycA). Analysis of this protein sequence reveals the following:

| Possible site: 55 | | | | |
|---|---|---|---|---|
| >>> Seems to have a cleavable N-term signal seq. | | | | |
| | INTEGRAL | Likelihood = −9.02 | Transmembrane | 71-87 (62-90) |
| | INTEGRAL | Likelihood = −8.92 | Transmembrane | 320-336 (316-344) |
| | INTEGRAL | Likelihood = −8.33 | Transmembrane | 254-270 (251-275) |
| | INTEGRAL | Likelihood = −6.00 | Transmembrane | 158-174 (154-175) |
| | INTEGRAL | Likelihood = −2.76 | Transmembrane | 197-213 (196-213) |
| | INTEGRAL | Likelihood = −2.50 | Transmembrane | 117-133 (116-136) |
| | INTEGRAL | Likelihood = −1.38 | Transmembrane | 282-298 (279-298) |
| | INTEGRAL | Likelihood = −0.32 | Transmembrane | 342-358 (342-360) |

```
----- Final Results -----
                              bacterial membrane --- Certainty = 0.4609(Affirmative) < succ>
                                bacterial outside --- Certainty = 0.0000(Not Clear) < succ>
                            bacterial cytoplasm --- Certainty = 0.0000(Not Clear) < succ>
```

[12041] A related GBS nucleic acid sequence <SEQ ID 9397> which encodes amino acid sequence <SEQ ID 9398> was also identified.

[12042] The protein has homology with the following sequences in the GENPEPT database.

| >GP: CAB14651 GB: Z99117 amino acid permease | | | |
|---|---|---|---|
| [Bacillus subtilis] | | | |
| Identities = 165/361 (45%), Positives = 227/361 (62%), Gaps = 17/361 (4%) | | | |
| Query: | 1 | MGIFLT-LSYWISLIFIGMAEITAVGEYVQFWFPEWPSWIIQIVFLAILSSINLIAVKAF | 59 |
| | | M F+T +YW I + MA++TAVG Y Q+W P+ P W+ ++ L IL +NL VK F | |
| Sbjct: | 95 | MAAFITGWTYWFCWISLAMADLTAVGIYTQYWLPDVPQWLPGLLALIILLIMNLATVKLF | 154 |
| Query: | 60 | GETEFWFAMIKVIAILGLIATGIFMVLTNFDTGHGYHASISNITNHFEWFPKGKLNFFMA | 119 |
| | | GE EFWFA+IKVIAIL LI TGI ++ F G AS++N+ +H FP G F ++ | |
| Sbjct: | 155 | GELEFWFALIKVIAILALIVTGILLIAKGFSAASG-PASLNNLWSHGGMFPNGWHGFILS | 213 |
| Query: | 120 | FQMVFFAYLAIEFVGVTTSETANPRKVLPKAIQEIPMRIILFYAGSLLAIMAIFPWQQLP | 179 |
| | | FQMV FA++ IE VG+T ET NP+KV+PKAI +IP+RI+LFY G+L IM I+PW L | |
| Sbjct: | 214 | FQMVVFAFVGIELVGLTAGETENPQKVIPKAINQIPVRILLFYVGALFVIMCIYPWNVLN | 273 |
| Query: | 180 | VNESPFVTVFKLAGIKWAAALINFVVLTSAASALNSTLYSTGRHLFQLANE--SPNALTK | 237 |
| | | NESPFV VF GI AA+LINFVVLTSAASA NS L+ST R ++ LA + +P L K | |
| Sbjct: | 274 | PNESPFVQVFSAVGIVVAASLINFVVLTSAASAANSALFSTSRMVYSLAKDHHAPGLLKK | 333 |
| Query: | 238 | ALKLDQLSRQSVPSRAIIAS--AVIVGASALISVLPGISDAFSLITASSSGVYISIYVLI | 295 |
| | | L+ +VPS A+ S A+++G S L ++P F+LIT+ S+ +I I+ + | |
| Sbjct: | 334 | ------LTSSNVPSNALFFSSIAILIGVS-LNYLMP--EQVFTLITSVSTICFIFIWGIT | 384 |
| Query: | 296 | MIAHWKYRKS--PDFMEDGYKMPAYKILSPITLLFFLFVFVSLFLQDSTYIGAIGATIWII | 354 |
| | | +I H KYRK+ + + +KMP Y + + +TL F F+ V L L + T I +W + | |
| Sbjct: | 385 | VICHLKYRKTRQHEAKANKFKMPFYPLSNYLTLAFLAFILVILALANDTRIALFVTPVWFV | 445 |

[12043] There is also homology to SEQ ID 4070:

| Identities = 286/364 (78%), Positives = 322/364 (87%), | | | |
|---|---|---|---|
| Gaps = 1/364 (0%) | | | |
| Query: | 2 | GIFLTLSYWISLIFIGMAEITAVGEYVQFWFPEWPSWIIQIVFLAILSSINLIAVKAFGE | 61 |
| | | G F LSYWISLIFIGMAEITAVG YVQFWFP WP+W+IQ+VFL +LSSINLIAV+ FGE | |
| Sbjct: | 101 | GYFSGLSYWISLIFIGMAEITAVGAYVQFWFPSWPAWLIQLVFLVLLSSINLIAVRVFGE | 160 |
| Query: | 62 | TEFWFAMIKVIAILGLIATGIFMVLTNFDTGHGYHASISNITNHFEWFPKGKLNFFMAFQ | 121 |
| | | TEFWFAMIK++AIL LIAT IFMVLT F+T H HAS+SNI +HF FP GKL FFMAFQ | |
| Sbjct: | 161 | TEFWFAMIKILAILALIATAIFMVLTGFET-HTGHASLSNIFDHFSMFPNGKLKFFMAFQ | 219 |
| Query: | 122 | MVFFAYLAIEFVGVTTSETANPRKVLPKAIQEIPMRIILFYAGSLLAIMAIFPWQQLPVN | 181 |
| | | MVFFAY AIEFVG+TTSETANPRKVLPKAIQEIP RI++FY G+L++IMAI PW QLPV+ | |
| Sbjct: | 220 | MVFFAYQAIEFVGITTSETANPRKVLPKAIQEIPTRIVIFYVGALVSIMAIVPWHQLPVD | 279 |
| Query: | 182 | ESPFVTVFKLAGIKWAAALINFVVLTSAASALNSTLYSTGRHLFQLANESPNALTKALKL | 241 |
| | | ESPFV VFKL GIKWAAALINFVVLTSAASALNSTLYSTGRHL+Q+ANE+PNALT LK+ | |
| Sbjct: | 280 | ESPFVMVFKLIGIKWAAALINFVVLTSAASALNSTLYSTGRHLYQIANETPNALTNRLKI | 339 |
| Query: | 242 | DQLSRQSVPSRAIIASAVIVGASALISVLPGISDAFSLITASSSGVYISIYVLIMIAHWK | 301 |
| | | + LSRQ VPSRAIIASAV+VG SALI++LPG++DAFSLITASSSGVYI+IY L MIAHWK | |
| Sbjct: | 340 | NTLSRQGVPSRAIIASAVVVGISALINILPGVADAFSLITASSSGVYIAIYALTMIAHWK | 399 |
| Query: | 302 | YRKSPDFMEDGYKMPAYKILSPITLLFFLFVFVSLFLQDSTYIGAIGATIWIIGFGLYSH | 361 |
| | | YR+S DFM DGY MP YK+ +P+TL FF FVF+SLFLQ+STYIGAIGATIWII FG+YS+ | |
| Sbjct: | 400 | YRQSKDFMADGYLMPKYKVTTPLTLAFFAFVFISLFLQESTYIGAIGATIWIIIFGIYSN | 459 |
| Query: | 362 | FKHK | 365 |
| | | K K | |
| Sbjct: | 460 | VKFK | 463 |

[12044] Based on this analysis, it was predicted that these proteins and their epitopes could be useful antigens for vaccines or diagnostics.

### EXAMPLE 2205

[12045] A DNA sequence (GBSx2324) was identified in S. agalactiae <SEQ ID 6807> which encodes the amino acid sequence <SEQ ID 6808>. Analysis of this protein sequence reveals the following:

| Possible site: 38 | | | | |
|---|---|---|---|---|
| >>> Seems to have an uncleavable N-term signal seq | | | | |
| | INTEGRAL | Likelihood = −8.33 | Transmembrane | 194-210 (191-215) |
| | INTEGRAL | Likelihood = −5.47 | Transmembrane | 17-33 (14-38) |
| | INTEGRAL | Likelihood = −5.15 | Transmembrane | 125-141 (119-144) |
| | INTEGRAL | Likelihood = −3.88 | Transmembrane | 155-171 (153-176) |
| | INTEGRAL | Likelihood = −1.38 | Transmembrane | 96-112 (94-114) |
| | INTEGRAL | Likelihood = −0.43 | Transmembrane | 49-65 (49-65) |

```
----- Final Results -----
                              bacterial membrane --- Certainty = 0.4333(Affirmative) < succ>
                                bacterial outside --- Certainty = 0.0000(Not Clear) < succ>
                            bacterial cytoplasm --- Certainty = 0.0000(Not Clear) < succ>
```

[12046] The protein has homology with the following sequences in the GENPEPT database.

| >GP: AAC95438 GB: AF068901 unknown [Streptococcus pneumoniae] | | | |
|---|---|---|---|
| Identities = 80/214 (37%), Positives = 122/214 (56%), | | | |
| Gaps = 3/214 (1%) | | | |
| Query: | 4 | FFSNIRTEIPQMPLLIHSLILSVLPFLMWLTLVNRDKPLYKTIWSILLGLQLITIYTWFF | 63 |
| | | FF+ T+ P+ L + + ++L + R+K +Y+ + IL +QLI +Y W++ | |
| Sbjct: | 7 | FFTTQATKPPKFDLFWYVSLFTLLALTFYTAHRYREKKVYQRFFQILQTVQLILLYGWYW | 66 |
| Query: | 64 | WAKLPLSESLPLYHCRIGMFVVLLARPGI--LKDYFALLGVVGGVLAMIHPDFYPYQFLH | 121 |
| | | +PLSESLP YHCR+ MFVVLL PG K YFALLG G + A ++P Y F H | |
| Sbjct: | 67 | VNHMPLSESLPFYHCRMAMFVVLLL-PGQSKYKQYFALLGTFGTLAAFVYPVPDAYPFPH | 125 |
| Query: | 122 | VTNIFFFIGHFALFVLSLLHLMTQSNLDKLNPKLIIQLTLLINMSLIFINLLTGGNYGFM | 181 |
| | | +T + F GH AL SL++L+ Q N L+ K I +T +N + +NL+TGG+YGF+ | |
| Sbjct: | 126 | ITILSFIFGHLALLGNSLVYLLRQYNARLLDVKGIFLMTFALNALIFVVNLVTGGDYGFL | 185 |
| Query: | 182 | MKTPILGITNPFLNLFIVTTLLSFLVLFVKQIFQ | 215 |
| | | K P++G N +V+ +L + K+I + | |
| Sbjct: | 186 | TKPPLVGDHGLVANYLLVSIVLVATISLTKKILE | 219 |

[12047] A related DNA sequence was identified in S. pyogenes <SEQ ID 6809> which encodes the amino acid sequence <SEQ ID 6810>. Analysis of this protein sequence reveals the following:

| Possible site: 35 | | | | |
|---|---|---|---|---|
| >>> Seems to have no N-terminal signal sequence | | | | |
| | INTEGRAL | Likelihood = −11.25 | Transmembrane | 16-32 (11-39) |
| | INTEGRAL | Likelihood = −3.45 | Transmembrane | 154-170 (153-173) |
| | INTEGRAL | Likelihood = −3.08 | Transmembrane | 96-112 (94-112) |
| | INTEGRAL | Likelihood = −1.91 | Transmembrane | 191-207 (191-209) |
| | INTEGRAL | Likelihood = −1.12 | Transmembrane | 71-87 (71-87) |

```
----- Final Results -----
                              bacterial membrane --- Certainty = 0.5501(Affirmative) < succ>
                                bacterial outside --- Certainty = 0.0000(Not Clear) < succ>
                            bacterial cytoplasm --- Certainty = 0.0000(Not Clear) < succ>
```

[12048] The protein has homology with the following sequences in the databases:

| >GP: AAC95438 GB: AF068901 unknown [Streptococcus pneumoniae] | | | |
|---|---|---|---|
| Identities = 90/231 (38%), Positives = 128/231 (54%), | | | |
| Gaps = 7/231 (3%) | | | |
| Query: | 3 | FFAIDPIGLPHTSLIFYLSSLLIALLLVFLTFQAYRLKS-HRYFFLFLQLSQVIGLYTWY | 61 |
| | | FF P L +Y+S L L L F T YR K ++ FF LQ Q+I LY WY | |
| Sbjct: | 7 | FFTTQATKPPKFDLFWYVS-LFTLLALTFYTAHRYREKKVYQRFFQILQTVQLILLYGWY | 65 |
| Query: | 62 | VLRGFPLDEALPLYHCRIAMLAIFFLPDRNKFKQLFMVLGIGGTFLALL--SPDLYPFRL | 119 |
| | | + PL E+LP YHCR+AM + LP ++K+KQ F +LG GT A + PD YPF | |
| Sbjct: | 66 | WVNHMPLSESLPFYHCRMAMFVVLLLPGQSKYKQYFALLGTFGTLAAFVYPVPDAYPFP- | 124 |
| Query: | 120 | WHVANVSFYFGHYALLVNGLIYLLRFYDASQLRLLSVVRYLATVNFLLLLVSLATKGNYG | 179 |
| | | H+ +SF FGH ALL N L+YLLR Y+A L + + +N L+ +V+L T G+YG | |
| Sbjct: | 125 | -HITILSFIFGHLALLGNSLVYLLRQYNARLLDVKGIFLMTFALNALIFVVNLVTGGDYG | 183 |
| Query: | 180 | FVMDIPVIHTRHLLLNFVIVTSGLTFMVKITEYFYLKFGEAQQLALAFSKE | 230 |
| | | F+ P++ L+ N+++V+ L + +T+ L+F AQ+ KE | |
| Sbjct: | 184 | FLTKPPLVGDHGLVANYLLVSIVLVATISLTKKI-LEFFLAQEAEKMIVKE | 233 |

[12049] An alignment of the GAS and GBS proteins is shown below.

| Identities = 70/216 (32%), Positives = 117/216 (53%), | | | |
|---|---|---|---|
| Gaps = 1/216 (0%) | | | |
| Query: | 2 | IEFFSNIRTEIPQMPLLIHSLILSVLPFLMWLTLVNRDKPLYKTIWSILLGLQLITIYTW | 61 |
| | | ++FF+ +P L+ + L + L++LT ++ + L Q+I +YTW | |
| Sbjct: | 1 | MDFFAIDPIGLPHTSLIFYLSSLLIALLLVFLTFQAYRLKSHRYFFLFLQLSQVIGLYTW | 60 |
| Query: | 62 | FFWAKLPLSESLPLYHCRIGMFVVL-LARPGILKDYFALLGVVGGVLAMIHPDFYPYQFL | 120 |
| | | + PL E+LPLYHCRI M + L K F +LG+ G LA++ PD YP++ | |
| Sbjct: | 61 | YVLRGFPLDEALPLYHCRIAMLAIFFLPDRNKFKQLFMVLGIGGTFLALLSPDLYPFRLW | 120 |
| Query: | 121 | HVTNIFFFIGHFALFVLSLLHLMTQSNLDKLNPKLIIQLTLLINMSLIFINLLTGGNYGF | 180 |
| | | HV N+ F+ GH+AL V L++L+ + +L +++ +N L+ ++L T GNYGF | |
| Sbjct: | 121 | HVANVSFYFGHYALLVNGLIYLLRFYDASQLRLLSVVRYLATVNFLLLLVSLATKGNYGF | 180 |
| Query: | 181 | MMKTPILGITNPFLNLFIVTTLLSFLVLFVKQIFQK | 216 |
| | | +M P++ + LN IVT+ L+F+V + + K | |
| Sbjct: | 181 | VMDIPVIHTRHLLLNFVIVTSGLTFMVKITEYFYLK | 216 |

[12050] Based on this analysis, it was predicted that these proteins and their epitopes could be useful antigens for vaccines or diagnostics.

### EXAMPLE 2206

[12051] A DNA sequence (GBSx2325) was identified in S. agalactiae <SEQ ID 6811> which encodes the amino acid sequence <SEQ ID 6812>. Analysis of this protein sequence reveals the following:

```
Possible site: 13
>>> Seems to have no N-terminal signal sequence
----- Final Results -----
                            bacterial cytoplasm --- Certainty = 0.3297(Affirmative) < succ>
                              bacterial membrane --- Certainty = 0.0000(Not Clear) < succ>
                                bacterial outside --- Certainty = 0.0000(Not Clear) < succ>
```

[12052] The protein has no significant homology with any sequences in the GENPEPT database.

[12053] No corresponding DNA sequence was identified in S. pyogenes.

[12054] Based on this analysis, it was predicted that this protein and its epitopes, could be useful antigens for vaccines or diagnostics.

### EXAMPLE 2207

[12055] A DNA sequence (GBSx2326) was identified in S. agalactiae <SEQ ID 6813> which encodes the amino acid sequence <SEQ ID 6814>. This protein is predicted to be oxalate:formate antiporter (oxlT-2). Analysis of this protein sequence reveals the following:

| Possible site: 27 | | | | |
|---|---|---|---|---|
| >>> Seems to have a cleavable N-term signal seq. | | | | |
| | INTEGRAL | Likelihood = −7.80 | Transmembrane | 380-396 (376-399) |
| | INTEGRAL | Likelihood = −7.43 | Transmembrane | 291-307 (284-310) |
| | INTEGRAL | Likelihood = −5.63 | Transmembrane | 169-185 (163-186) |
| | INTEGRAL | Likelihood = −4.99 | Transmembrane | 226-242 (223-245) |
| | INTEGRAL | Likelihood = −4.19 | Transmembrane | 46-62 (39-63) |
| | INTEGRAL | Likelihood = −4.09 | Transmembrane | 311-327 (308-329) |
| | INTEGRAL | Likelihood = −1.49 | Transmembrane | 261-277 (260-278) |
| | INTEGRAL | Likelihood = −1.06 | Transmembrane | 133-149 (133-150) |
| | INTEGRAL | Likelihood = −0.85 | Transmembrane | 98-114 (98-114) |
| | INTEGRAL | Likelihood = −0.06 | Transmembrane | 77-93 (77-93) |

```
----- Final Results -----
                              bacterial membrane --- Certainty = 0.4121(Affirmative) < succ>
                                bacterial outside --- Certainty = 0.0000(Not Clear) < succ>
                            bacterial cytoplasm --- Certainty = 0.0000(Not Clear) < succ>
```

[12056] The protein has homology with the following sequences in the GENPEPT database.

| >GP: AAF36228 GB: AF168363 oxalate: formate antiporter [Lactococcus | | | |
|---|---|---|---|
| lactis] | | | |
| Identities = 220/398 (55%), Positives = 306/398 (76%), Gaps = 3/398 (0%) | | | |
| Query: | 5 | NRYVVAVSGVVLHLMLGSTYAWSVFRNPIISETGWDISSVSFAFSLAIFCLGMSAAFMGH | 64 |
| | | NRYVVA +GV+ HLM+GS YAWSVF NPI + GW SSV+ AFS+AI+ LGMSAAFMG | |
| Sbjct: | 4 | NRYVVAFAGVMFHLMIGSVYAWSVFTNPIAKQNGWAESSVALAFSIAIYFLGMSAAFMGK | 63 |
| Query: | 65 | LVERFGPRIMGMISAILYGAGNVLTGLAIETQQLWLLYVAYGILGGIGLGSGYITPVSTI | 124 |
| | | +VE+ GPR+ G I++ LYG G ++TG AI +WLLY++YG++GG+GLG+GY+TPVSTI | |
| Sbjct: | 64 | VVEKIGPRLTGTIASFLYGTGTIMTGWAIHQNSIWLLYLSYGVIGGLGLGAGYVTPVSTI | 123 |
| Query: | 125 | IKWFPDRRGLATGFAIMGFGFASLVTSPLAQSLMIRIGVGKTFYILGLVYFFVMMIASQF | 184 |
| | | IKWFPD+RGLATG AINGFGFA+++T P+AQ LM +G+ +TFY+LG YF +M++A+QF | |
| Sbjct: | 124 | IKWFPDKRGLATGLAIMGFGFAAMLTGPVAQQLMASVGLEQTFYLLGTFYFVIMLLAAQF | 183 |
| Query: | 185 | IKQPPQEKITILTHDGKKNAMNSQIITG--LKANAAIKSKTFYIIWLTLFINISCGLGLI | 242 |
| | | I + P ++ T + +++ G L AN A+K+K+F +W+ FINI+CG+GL+ | |
| Sbjct: | 184 | IVR-PNLALSSTTENSISQKKGTRLTRGPELTANQALKTKSFTFLWIMFFINITCGIGLV | 242 |
| Query: | 243 | SAASPMAQDLAGYSAESAALLVGVLGIFNGFGRLLWASLSDYIGRPLTFIILFIVNFIMT | 302 |
| | | SAASPMAQ + G S ++AA++VG++G+FNGFGRL+WA+LSDYIGRP TF +FI++ +M | |
| Sbjct: | 243 | SAASPMAQSMTGMSVQTAAIMVGIIGLFNGFGRLIWATLSDYIGRPATFSAIFILDIVML | 302 |
| Query: | 303 | SSLFLSFNAIVFAIAMSILMTCYGAGFSLLPAYLSDIFGTKELATLHGYSLTAWAIAGLF | 362 |
| | | S++ + ++F IA+ +LM+CYGAGFS++PAYL D+FGTKEL +HGY LTAWA AG+ | |
| Sbjct: | 303 | SAILIFKLPLLFVIALCLLMSCYGAGFSVIPAYLGDVFGTKELGAVHGYVLTAWAAAGVV | 362 |
| Query: | 363 | GPLLLSKTYSWGNSYQLTLMVFGFLFLFGLLLSLYLRK | 400 |
| | | GPLLLS T+ ++Y LTL F + L LL+S ++++ | |
| Sbjct: | 363 | GPLLLSLTHQLFHNYTLTLAAFILIDLLALLISFWIQR | 400 |

[12057] A related DNA sequence was identified in S. pyogenes <SEQ ID 6815> which encodes the amino acid sequence <SEQ ID 6816>. Analysis of this protein sequence reveals the following:

| Possible site: 27 | | | | |
|---|---|---|---|---|
| >>> Seems to have a cleavable N-term signal seq. | | | | |
| | INTEGRAL | Likelihood = −12.95 | Transmembrane | 289-305 (282-321) |
| | INTEGRAL | Likelihood = −11.83 | Transmembrane | 376-392 (372-397) |
| | INTEGRAL | Likelihood = −8.55 | Transmembrane | 163-179 (160-189) |
| | INTEGRAL | Likelihood = −7.75 | Transmembrane | 227-243 (221-247) |
| | INTEGRAL | Likelihood = −5.89 | Transmembrane | 44-60 (41-67) |
| | INTEGRAL | Likelihood = −1.38 | Transmembrane | 310-326 (309-327) |
| | INTEGRAL | Likelihood = −0.90 | Transmembrane | 353-369 (353-369) |
| | INTEGRAL | Likelihood = −0.37 | Transmembrane | 138-154 (138-154) |
| | INTEGRAL | Likelihood = −0.06 | Transmembrane | 98-114 (98-114) |
| | INTEGRAL | Likelihood = −0.00 | Transmembrane | 259-275 (259-275) |

```
----- Final Results -----
                              bacterial membrane --- Certainty = 0.6180(Affirmative) < succ>
                                bacterial outside --- Certainty = 0.0000(Not Clear) < succ>
                            bacterial cytoplasm --- Certainty = 0.0000(Not Clear) < succ>
```

[12058] The protein has homology with the following sequences in the databases:

| >GP: AAF36228 GB: AF168363 oxalate: formate antiporter [Lactococcus | | | |
|---|---|---|---|
| lactis] | | | |
| Identities = 222/399 (55%), Positives = 305/399 (75%), Gaps = 3/399 (0%) | | | |
| Query: | 3 | KTKRYIIATAGILLHLMLGSTYAWSVYRNPILQETGWDQAPVAFAFSLAIFCLGLSAAFM | 62 |
| | | KT RY++A AG++ HLM+GS YAWSV+ NPI ++ GW ++ VA AFS+AI+ LG+SAAFM | |
| Sbjct: | 2 | KTNRYVVAFAGVMFHLMIGSVYAWSVFTNPIAKQNGWAESSVALAFSIAIYFLGMSAAFM | 61 |
| Query: | 63 | GNLVEQYGPRLTGTVSAILYASGNMLTGLAIDRKEIWLLYIGYGVIGGLGLGAGYITPIS | 122 |
| | | G +VE+ GPRLTGT+++ LY +G ++TG AI + IWLLY+ YGVIGGLGLGAGY+TP+S | |
| Sbjct: | 62 | GKVVEKIGPRLTGTIASFLYGTGTIMTGWAIHQNSIWLLYLSYGVIGGLGLGAGYVTPVS | 121 |
| Query: | 123 | TIIKWFPDKRGMATGFAIMGFGFASLLTSPIAQWLIETEGLVATFYLLGLIYLIVMLFAS | 182 |
| | | TIIKWFPDKRG+ATG AIMGFGFA++LT P+AQ L+ + GL TFYLLG Y ++ML A+ | |
| Sbjct: | 122 | TIIKWFPDKRGLATGLAIMGFGFAAMLTGPVAQQLMASVGLEQTFYLLGTFYFVIMLLAA | 181 |
| Query: | 183 | QLIIKPTAAEIAILDKKRLQ-NNSYLIEG--MTAKEALKTKSFYCLWVILFINITCGLGL | 239 |
| | | Q I++P A + + Q + L G +TA +ALKTKSF LW++ FINITCG+GL | |
| Sbjct: | 182 | QFIVRPNLALSSTTENSISQKKGTRLTRGPELTANQALKTKSFTFLWIMFFINITCGIGL | 241 |
| Query: | 240 | ISVVAPMAQDLTGMSPEMSAIVVGAMGIFNGFGRLVWASLSDYIGRRVTVILLFLVSIIM | 299 |
| | | +S +PMAQ +TGMS + +AI+VG +G+FNGFGRL+WA+LSDYIGR T F++I+M | |
| Sbjct: | 242 | VSAASPMAQSMTGMSVQTAAIMVGIIGLFNGFGRLIWATLSDYIGRPATFSAIFILDIVM | 301 |
| Query: | 300 | TISLIFAHSSLIFMISIATLMTCYGAGFSLIPPYLSDLFGAKELATLHGYILTAWAIAAL | 359 |
| | | +++ L+F+I++ LM+CYGAGFS+IP YL D+FG KEL +HGY+LTAWA A + | |
| Sbjct: | 302 | LSAILIFKLPLLFVIALCLLMSCYGAGFSVIPAYLGDVFGTKELGAVHGYVLTAWAAAGV | 361 |
| Query: | 360 | TGPMLLSITVEWTHNYLLTLCVFIVLYILGLMVALRLKK | 398 |
| | | GP+LLS+T + HNY LTL FI++ +L L+++ +++ | |
| Sbjct: | 362 | VGPLLLSLTHQLFHNYTLTLAAFILIDLLALLISFWIQR | 400 |

[12059] An alignment of the GAS and GBS proteins is shown below.

| Identities = 252/400 (63%), Positives = 329/400 (82%), Gaps = 2/400 (0%) | | | |
|---|---|---|---|
| Query: | 1 | MKNLNRYVVAVSGVVLHLMLGSTYAWSVFRNPIISETGWDISSVSFAFSLAIFCLGMSAA | 60 |
| | | M+ RY++A +G++LHLMLGSTYAWSV+RNPI+ ETGWD + V+FAFSLAIFCLG+SAA | |
| Sbjct: | 1 | MEKTKRYIIATAGILLHLMLGSTYAWSVYRNPILQETGWDQAPVAFAFSLAIFCLGLSAA | 60 |
| Query: | 61 | FMGHLVERFGPRIMGMISAILYGAGNVLTGLAIETQQLWLLYVAYGILGGIGLGSGYITP | 120 |
| | | FMG+LVE++GPR+ G +SAlLY +GN+LTGLAI+ +++WLLY+ YG++GG+GLG+GYITP | |
| Sbjct: | 61 | FMGNLVEQYGPRLTGTVSAILYASGNMLTGLAIDRKEIWLLYIGYGVIGGLGLGAGYITP | 120 |
| Query: | 121 | VSTIIKWFPDRRGLATGFAIMGFGFASLVTSPLAQSLMIRIGVGKTFYILGLVYFFVMMI | 180 |
| | | +STIIKWFPD+RG+ATGFAIMGFGFASL+TSP+AQ L+ G+ TFY+LGL+Y VM+ | |
| Sbjct: | 121 | ISTIIKWFPDKRGMATGFAIMGFGFASLLTSPIAQWLIETEGLVATFYLLGLIYLIVMLF | 180 |
| Query: | 181 | ASQFIKQPPQEKITILTHDGKKNAMNSQIITGLKANAAIKSKTFYIIWLTLFINISCGLG | 240 |
| | | ASQ I +P +I IL D K+ NS +I G+ A A+K+K+FY +W+ LFINI+CGLG | |
| Sbjct: | 181 | ASQLIIKPTAAEIAIL--DKKRLQNNSYLIEGMTAKEALKTKSFYCLWVILFINITCGLG | 238 |
| Query: | 241 | LISAASPMAQDLAGYSAESAALLVGVLGIFNGFGRLLWASLSDYIGRPLTFIILFIVNFI | 300 |
| | | LIS +PMAQDL G S E +A++VG +GIFNGFGRL+WASLSDYIGR +T I+LF+V+ I | |
| Sbjct: | 239 | LISVVAPMAQDLTGMSPEMSAIVVGAMGIFNGFGRLVWASLSDYIGRRVTVILLFLVSII | 298 |
| Query: | 301 | MTSSLFLSFNAIVFAIAMSILMTCYGAGFSLLPAYLSDIFGTKELATLHGYSLTAWAIAG | 360 |
| | | MT SL + ++++F I+++ LMTCYGAGFSL+P YLSD+FG KELATLHGY LTAWAIA | |
| Sbjct: | 299 | MTISLIFAHSSLIFMISIATLMTCYGAGFSLIPPYLSDLFGAKELATLHGYILTAWAIAA | 358 |
| Query: | 361 | LFGPLLLSKTYSWGNSYQLTLMVFGFLFLFGLLLSLYLRK | 400 |
| | | L GP+LLS T W ++Y LTL VF L++ GL+++L L+K | |
| Sbjct: | 359 | LTGPMLLSITVEWTHNYLLTLCVFIVLYILGLMVALRLKK | 398 |

[12060] A related GBS gene <SEQ ID 8995> and protein <SEQ ID 8996> were also identified. Analysis of this protein sequence reveals the following:

| Lipop: Possible site: −1 Crend: 5 | | | | |
|---|---|---|---|---|
| McG: Discrim Score: 5.06 | | | | |
| GvH: Signal Score (−7.5): 4.38 | | | | |
| Possible site: 27 | | | | |
| >>> Seems to have a cleavable N-term signal seq. | | | | |
| ALOM program count: 10 value: —.80 threshold: 0.0 | | | | |
| | INTEGRAL | Likelihood = −7.80 | Transmembrane | 380-396 (376-399) |
| | INTEGRAL | Likelihood = −7.43 | Transmembrane | 291-307 (284-310) |
| | INTEGRAL | Likelihood = −5.63 | Transmembrane | 169-185 (163-186) |
| | INTEGRAL | Likelihood = −4.99 | Transmembrane | 226-242 (223-245) |
| | INTEGRAL | Likelihood = −4.19 | Transmembrane | 46-62 (39-63) |
| | INTEGRAL | Likelihood = −4.09 | Transmembrane | 311-327 (308-329) |
| | INTEGRAL | Likelihood = −1.49 | Transmembrane | 261-277 (260-278) |
| | INTEGRAL | Likelihood = −1.06 | Transmembrane | 133-149 (133-150) |
| | INTEGRAL | Likelihood = −0.85 | Transmembrane | 98-114 (98-114) |
| | INTEGRAL | Likelihood = −0.06 | Transmembrane | 77-93 (77-93) |
| | PERIPHERAL | Likelihood = −0.42 | 352 | |

```
modified ALOM score: 2.06
*** Reasoning Step: 3
----- Final Results -----
                              bacterial membrane --- Certainty = 0.4121(Affirmative) < succ>
                                bacterial outside --- Certainty = 0.0000(Not Clear) < succ>
                            bacterial cytoplasm --- Certainty = 0.0000(Not Clear) < succ>
```

[12061] The protein has homology with the following sequences in the databases:

[chemical structure]

[12062] Based on this analysis, it was predicted that these proteins and their epitopes could be useful antigens for vaccines or diagnostics.

### EXAMPLE 2208

[12063] A DNA sequence (GBSx2327) was identified in S. agalactiae <SEQ ID 6817> which encodes the amino acid sequence <SEQ ID 6818>. This protein is predicted to be D-Ala-D-Ala adding enzyme (murF). Analysis of this protein sequence reveals the following:

```
Possible site: 45
>>> Seems to have no N-terminal signal sequence
----- Final Results -----
                            bacterial cytoplasm --- Certainty = 0.1311(Affirmative) < succ>
                              bacterial membrane --- Certainty = 0.0000(Not Clear) < succ>
                                bacterial outside --- Certainty = 0.0000(Not Clear) < succ>
```

[12064] A related GBS nucleic acid sequence <SEQ ID 9739> which encodes amino acid sequence <SEQ ID 9740> was also identified.

[12065] The protein has homology with the following sequences in the GENPEPT database.

| >GP: AAC95436 GB: AF068901 D-Ala-D-Ala adding | | | |
|---|---|---|---|
| enzyme [Streptococcus pneumoniae] | | | |
| Identities = 313/453 (69%), Positives = 375/453 (82%) | | | |
| Query: | 32 | MKLSLHEVAKVVGAKNQVSEFEDVPLGNIEFDSRNISEGDLFLPLKGARDGHEFIEMAFD | 91 |
| | | MKL++HE+A+VVGAKN +S FED L EFDSR I GDLF+PLKGARDGH+FIE AF+ | |
| Sbjct: | 1 | MKLTIHEIAQVVGAKNDISIFEDTQLEKAEFDSRLIGTGDLFVPLKGARDGHDFIETAFE | 60 |
| Query: | 92 | NGAIATISEKEIEGHPYLLVSDALKAFQVLAQYYIEKMNVDVIAVTGSNGKTTTKDMIAA | 151 |
| | | NGA T+SEKE+ HPY+LV D L AFQ LA YY+EK VDV AVTGSNGKTTTKDM+A | |
| Sbjct: | 61 | NGAAVTLSEKEVSNHPYILVDDVLTAFQSLASYYLEKTTVDVFAVTGSNGKTTTKDMLAH | 120 |
| Query: | 152 | ILSTTYKTYKTQGNYNNEIGLPYTVLHMPEDTEKIILEMGQDHLGDIHVLSEIAKPRIAV | 211 |
| | | +LST YKTYKTQGNYNNEIGLPYTVLHMPE TEK++LEMGQDHLGDIH+LSE+A+P+ A+ | |
| Sbjct: | 121 | LLSTRYKTYKTQGNYNNEIGLPYTVLHMPEGTEKLVLEMGQDHLGDIHLLSELARPKTAI | 180 |
| Query: | 212 | VTLIGEAHLEFFGSREKIAEGKMQITDGMSSDGILIAPGDPIIDPYLPANQMTIRFGHDQ | 271 |
| | | VTL+GEAHL FF R +IA+GKMQI DGM+S +L+AP DPI++ YLP ++ +RFG | |
| Sbjct: | 181 | VTLVGEAHLAFFKDRSEIAKGKMQIADGMASGSLLLAPADPIVEDYLPTDKKVVRFGQGA | 240 |
| Query: | 272 | ELQVTELKEEKHSLTFKTNALEHQLRIPVPGKYNATNAMVAAYVGKLLAVAEEDIVDALE | 331 |
| | | EL++T+L E K SLTFK N LE L +PV GKYNATNAM+A+YV V+EE I A + | |
| Sbjct: | 241 | ELEITDLVERKDSLTFKANFLEQVLDLPVTGKYNATNAMIASYVALQEGVSEEQIHQAFQ | 300 |
| Query: | 332 | NLQLTRNRTEWKKSANGADILSDVYNANPTAMRLILETFSAIPNNDGGKKIALLADMKEL | 391 |
| | | +L+LTRNRTEWKK+ANGADILSDVYNANPTAM+LILETFSAIP N+GGKKIA+LADMKEL | |
| Sbjct: | 301 | DLELTRNRTEWKKAANGADILSDVYNANPTAMKLILETFSAIPANEGGKKIAVLADMKEL | 360 |
| Query: | 392 | GEQSVDLHNQMIMSIRPDSIDTLICYGQDIEGLAQLASQMFPIGKVYFFKKNQEVDQFDQ | 451 |
| | | G QSV LHNQMI+S+ PD +DT+I YG+DI LAQLASQMFPIG VY+FKK ++ DQF+ | |
| Sbjct: | 361 | GNQSVQLHNQMILSLSPDVLDTVIFYGEDIAELAQLASQMFPIGHVYYFKKTEDQDQFED | 420 |
| Query: | 452 | LLAKVKDTLKEKDQILLKGSNSMNLSKIVDILE | 484 |
| | | L+ +VK++L DQILLKGSNSMNL+ +V+ LE | |
| Sbjct: | 421 | LVKQVKESLSANDQILLKGSNSMNLAMLVESLE | 453 |

[12066] A related DNA sequence was identified in S. pyogenes <SEQ ID 6819> which encodes the amino acid sequence <SEQ ID 6820>. Analysis of this protein sequence reveals the following:

```
Possible site: 14
>>> Seems to have no N-terminal signal sequence
----- Final Results -----
                            bacterial cytoplasm --- Certainty = 0.3299(Affirmative) < succ>
                              bacterial membrane --- Certainty = 0.0000(Not Clear) < succ>
                                bacterial outside --- Certainty = 0.0000(Not Clear) < succ>
```

[12067] An alignment of the GAS and GBS proteins is shown below.

| Identities = 323/452 (71%), Positives = 387/452 (85%) | | | |
|---|---|---|---|
| Query: | 32 | MKLSLHEVAKVVGAKNQVSEFEDVPLGNIEFDSRNISEGDLFLPLKGARDGHEFIEMAFD | 91 |
| | | MKL+LHEVAK+V A+N VS+ +DVPL +IEFDSR I++GDLFLPLKG RDGHEFI++AF | |
| Sbjct: | 1 | MKLTLHEVAKIVDAQNNVSDLDDVPLHHIEFDSRKITKGDLFLPLKGQRDGHEFIDLAFQ | 60 |
| Query: | 92 | NGAIATISEKEIEGHPYLLVSDALKAFQVLAQYYIEKMNVDVIAVTGSNGKTTTKDMIAA | 151 |
| | | NGA+AT SEKE+ G P+LLV D LKAFQ LA YYI+KM VDVIAVTGSNGKT+TKDMI A | |
| Sbjct: | 61 | NGAVATFSEKELPGKPHLLVEDCLKAFQKLAHYYIDKMRVDVIAVTGSNGKTSTKDMIGA | 120 |
| Query: | 152 | ILSTTYKTYKTQGNYNNEIGLPYTVLHMPEDTEKIILEMGQDHLGDIHVLSEIAKPRIAV | 211 |
| | | +LSTTYKTYKTQGNYNNEIGLPYTVLHMP+DTEKI+LEMGQDH+GDI +LSEIA+PRIAV | |
| Sbjct: | 121 | VLSTTYKTYKTQGNYNNEIGLPYTVLHMPDDTEKIVLEMGQDHMGDIRLLSEIARPRIAV | 180 |
| Query: | 212 | VTLIGEAHLEFFGSREKIAEGKMQITDGMSSDGILIAPGDPIIDPYLPANQMTIRFGHDQ | 271 |
| | | +TL+GEAHLE+FGSR+KIA+GKMQI DGM+SDGILIAPGDPIIDPYLP NQM IRFG+ Q | |
| Sbjct: | 181 | LTLVGEAHLEYFGSRDKIAQGKMQIVDGMNSDGILIAPGDPIIDPYLPENQMVIRFGNQQ | 240 |
| Query: | 272 | ELQVTELKEEKHSLTFKTNALEHQLRIPVPGKYNATNAMVAAYVGKLLAVAEEDIVDALE | 331 |
| | | E+ VT ++E+K SLTF TN L + +P+PGKYNATNAMVAAYVGKLLAV +EDI+ AL+ | |
| Sbjct: | 241 | EIDVTGIQEDKDSLTFTTNVLATPVSLPLPGKYNATNAMVAAYVGKLLAVTDEDIIAALQ | 300 |
| Query: | 332 | NLQLTRNRTEWKKSANGADILSDVYNANPTAMRLILETFSAIPNNDGGKKIALLADMKEL | 391 |
| | | + LT NRTEWKK+ANGADILSDVYNANPTAMRLILETF+ I N GGKKIA+LADMKEL | |
| Sbjct: | 301 | TVTLTGNRTEWKKAANGADILSDVYNANPTAMRLILETFANIAKNPGGKKIAVLADMKEL | 360 |
| Query: | 392 | GEQSVDLHNQMIMSIRPDSIDTLICYGQDIEGLAQLASQMFPIGKVYFFKKNQEVDQFDQ | 451 |
| | | G+ SV LH+Q+I S+ +ID L+ YG I+ LA+LASQ++P +V++F K ++ DQF+ | |
| Sbjct: | 361 | GKDSVILHSQLIDSLTSGNIDQLVFYGDHIKELARLASQVYPAEQVHYFLKTEQEDQFEA | 420 |
| Query: | 452 | LLAKVKDTLKEKDQILLKGSNSMNLSKIVDIL | 483 |
| | | + V++ L DQILLKGS+SM+L K+VD L | |
| Sbjct: | 421 | MAQYVQNILNPFDQILLKGSHSMSLEKLVDRL | 452 |

[12068] Based on this analysis, it was predicted that these proteins and their epitopes could be useful antigens for vaccines or diagnostics.

### EXAMPLE 2209

[12069] A DNA sequence (GBSx2328) was identified in S. agalactiae <SEQ ID 6821> which encodes the amino acid sequence <SEQ ID 6822>. Analysis of this protein sequence reveals the following:

```
Possible site: 17
>>> Seems to have no N-terminal signal sequence
----- Final Results -----
                            bacterial cytoplasm --- Certainty = 0.1381(Affirmative) < succ>
                              bacterial membrane --- Certainty = 0.0000(Not Clear) < succ>
                                bacterial outside --- Certainty = 0.0000(Not Clear) < succ>
```

[12070] The protein has homology with the following sequences in the GENPEPT database.

| >GP: AAC95435 GB: AF068901 D-Ala-D-Ala ligase [Streptococcus pneumoniae] | | | |
|---|---|---|---|
| Identities = 243/346 (70%), Positives = 289/346 (83%) | | | |
| Query: | 3 | KETLILLYGGRSAEREVSVLSAESVMRAINYDKFFVKTYFITQVGQFIKTQEFDEMPSSD | 62 |
| | | K+T+ILLYGGRSAEREVSVLSAESVMRA+NYD+F VKT+FI+Q G FIKTQEF P + | |
| Sbjct: | 2 | KQTIILLYGGRSAEREVSVLSAESVMRAVNYDRFTVKTFFISQSGDFIKTQEFSHAPGQE | 61 |
| Query: | 63 | EKLMTNQTVDLDKMVRPSDIYDDNAIVFPVLHGPMGEDGSIQGFLEVLRMPYVGTNILSS | 122 |
| | | ++LMTN+T+D DK V PS IY++ A+VFPVLHGPMGEDGS+QGFLEVL+MPYVG NILSS | |
| Sbjct: | 62 | DRLMTNETIDWDKKVAPSAIYEEGAVVFPVLHGPMGEDGSVQGFLEVLKMPYVGCNILSS | 121 |
| Query: | 123 | SVAMDKITTKQVLATVGVPQVAYQTYFEGDDLEHAIKLSLETLSFPIFVKPANMGSSVGI | 182 |
| | | S+AMDKITTK+VL + G+ QV Y EGDD+ I E L++P+F KP+NMGSSVGI | |
| Sbjct: | 122 | SLAMDKITTKRVLESAGIAQVPYVAIVEGDDVTAKIAEVEEKLAYPVFTKPSNMGSSVGI | 181 |
| Query: | 183 | SKATDESSLRSAIDLALKYDSRILIEQGVTAREIEVGILGNNDVKTTFPGEVVKDVDFYD | 242 |
| | | SK+ ++ LR A+ LA +YDSR+L+EQGV AREIEVG+LGN DVK+T PGEVVKDV FYD | |
| Sbjct: | 182 | SKSENQEELRQALKLAFRYDSRVLVEQGVNAREIEVGLLGNYDVKSTLPGEVVKDVAFYD | 241 |
| Query: | 243 | YDAKYIDNKITMDIPAKVDEATMEAMRQYASKAFKAIGACGLSRCDFFLTKDGQIFLNEL | 302 |
| | | YDAKYIDNKITMDIPAK+ + + MRQ A AF+AIG GLSRCDFF T G+IFLNEL | |
| Sbjct: | 242 | YDAKYIDNKITMDIPAKISDDVVAVMRQNAETAFRAIGGLGLSRCDFFYTDKGEIFLNEL | 301 |
| Query: | 303 | NTMPGFTQWSMYPLLWENMGLTYSDLIEKLVMLAKEMFEKRESHLI | 348 |
| | | NTMPGFTQWSMYPLLW+NMG++Y +LIE+LV LAKE F+KRE+HLI | |
| Sbjct: | 302 | NTMPGFTQWSMYPLLWDNMGISYPELIERLVDLAKESFDKREAHLI | 347 |

[12071] A related DNA sequence was identified in S. pyogenes <SEQ ID 4559> which encodes the amino acid sequence <SEQ ID 4560>. Analysis of this protein sequence reveals the following:

```
Possible site: 23
>>> Seems to have no N-terminal signal sequence
----- Final Results -----
                            bacterial cytoplasm --- Certainty = 0.1451(Affirmative) < succ>
                              bacterial membrane --- Certainty = 0.0000(Not Clear) < succ>
                                bacterial outside --- Certainty = 0.0000(Not Clear) < succ>
```

[12072] An alignment of the GAS and GBS proteins is shown below.

| Identities = 261/348 (75%), Positives = 306/348 (87%) | | | |
|---|---|---|---|
| Query: | 1 | MSKETLILLYGGRSAEREVSVLSAESVMRAINYDKFFVKTYFITQVGQFIKTQEFDEMPS | 60 |
| | | MSK+TL+LLYGGRSAEREVSVLSAESVMRA+NYDKF VKTYFITQ+GQFIKTQ+F E PS | |
| Sbjct: | 1 | MSKQTLVLLYGGRSAEREVSVLSAESVMRAVNYDKFLVKTYFITQMGQFIKTQQFSEKPS | 60 |
| Query: | 61 | SDEKLMTNQTVDLDKMVRPSDIYDDNAIVFPVLHGPMGEDGSIQGFLEVLRMPYVGTNIL | 120 |
| | | E+LMTN+T++L + ++PSDIY++ A+VFPVLHGPMGEDGSIQGFLEVLRMPY+GTN++ | |
| Sbjct: | 61 | ESERLMTNETIELTQKIKPSDIYEEGAVVFPVLHGPMGEDGSIQGFLEVLRMPYIGTNVM | 120 |
| Query: | 121 | SSSVAMDKITTKQVLATVGVPQVAYQTYFEGDDLEHAIKLSLETLSFPIFVKPANMGSSV | 180 |
| | | SSS+AMDKITTK+VL ++G+PQVAY Y +G DLE + +L L+FPIFVKPANMGSSV | |
| Sbjct: | 121 | SSSIAMDKITTKRVLESIGIPQVAYTVYIDGQDLEACLVETLARLTFPIFVKPANMGSSV | 180 |
| Query: | 181 | GISKATDESSLRSAIDLALKYDSRILIEQGVTAREIEVGILGNNDVKTTFPGEVVKDVDF | 240 |
| | | GISKA + LR AI LAL YDSR+LIEQGV AREIEVG+LGN+ VK+T PGEV+KDVDF | |
| Sbjct: | 181 | GISKAQTKVELRKAIQLALTYDSRVLIEQGVVAREIEVGLLGNDKVKSTLPGEVIKDVDF | 240 |
| Query: | 241 | YDYDAKYIDNKITMDIPAKVDEATMEAMRQYASKAFKAIGACGLSRCDFFLTKDGQIFLN | 300 |
| | | YDY AKY+DNKITM IPA VD++ + MR YA AFKA+G CGLSRCDFFLT+DGQ++LN | |
| Sbjct: | 241 | YDYQAKYVDNKITMAIPADVDQSIVTEMRSYAEVAFKALGGCGLSRCDFFLTQDGQVYLN | 300 |
| Query: | 301 | ELNTMPGFTQWSMYPLLWENMGLTYSDLIEKLVMLAKEMFEKRESHLI | 348 |
| | | ELNTMPGFTQWSMYPLLWENMGL Y DLIE+LV LA+EMF++RESHLI | |
| Sbjct: | 301 | ELNTMPGFTQWSMYPLLWENMGLAYPDLIEELVTLAQEMFDQRESHLI | 348 |

[12073] Based on this analysis, it was predicted that these proteins and their epitopes could be useful antigens for vaccines or diagnostics.

### EXAMPLE 2210

[12074] A DNA sequence (GBSx2329) was identified in S. agalactiae <SEQ ID 6823> which encodes the amino acid sequence <SEQ ID 6824>. This protein is predicted to be recombination protein (recR). Analysis of this protein sequence reveals the following:

```
Possible site: 36
>>> Seems to have no N-terminal signal sequence
----- Final Results -----
                            bacterial cytoplasm --- Certainty = 0.2540(Affirmative) < succ>
                              bacterial membrane --- Certainty = 0.0000(Not Clear) < succ>
                                bacterial outside --- Certainty = 0.0000(Not Clear) < succ>
```

[12075] The protein has homology with the following sequences in the GENPEPT database.

| >GP: AAC44615 GB: U58210 RecM [Streptococcus thermophilus] | | | |
|---|---|---|---|
| Identities = 181/198 (91%), Positives = 189/198 (95%) | | | |
| Query: | 1 | MLYPTPIAKLIDSFSKLPGIGTKTATRLAFYTIGMSDEDVNEFAKNLLAAKRELTYCSVC | 60 |
| | | MLYPTPIAKLIDSFSKLPGIG KTATRLAFYTI MSDEDVN+FAKNLLAAKRELTYCSVC | |
| Sbjct: | 1 | MLYPTPIAKLIDSFSKLPGIGAKTATRLAFYTISMSDEDVNDFAKNLLAAKRELTYCSVC | 60 |
| Query: | 61 | GNLTDDDPCLICTDKTRDQSVILVVEDSKDVSAMEKIQEYNGLYHVLHGLISPMNGISPD | 120 |
| | | G LTDDDPC+ICTD+TRD++ ILVVEDSKDVSAMEKIQEY GLYHVL GLISPMNG+ PD | |
| Sbjct: | 61 | GRLTDDDPCIICTDETRDRTKILVVEDSKDVSAMEKIQEYRGLYHVLQGLISPMNGVGPD | 120 |
| Query: | 121 | DINLKSLITRLMDGQVTEVIVATNATADGEATSMYISRVLKPAGIKVTRLARGLAVGSDI | 180 |
| | | DINLKSLITRLMD +V EVI+ATNATADGEATSMYISRVLKPAGIKVTRLARGLAVGSDI | |
| Sbjct: | 121 | DINLKSLITRLMDSEVDEVIIATNATADGEATSMYISRVLKPAGIKVTRLARGLAVGSDI | 180 |
| Query: | 181 | EYADEVTLLRAIENRTEL | 198 |
| | | EYADEVTLLRAIENRTEL | |
| Sbjct: | 181 | EYADEVTLLRAIENRTEL | 198 |

[12076] A related DNA sequence was identified in S. pyogenes <SEQ ID 6825> which encodes the amino acid sequence <SEQ ID 6826>. Analysis of this protein sequence reveals the following:

```
Possible site: 36
>>> Seems to have no N-terminal signal sequence
----- Final Results -----
                            bacterial cytoplasm --- Certainty = 0.2652(Affirmative) < succ>
                              bacterial membrane --- Certainty = 0.0000(Not Clear) < succ>
                                bacterial outside --- Certainty = 0.0000(Not Clear) < succ>
```

[12077] An alignment of the GAS and GBS proteins is shown below.

| Identities = 180/198 (90%), Positives = 192/198 (96%) | | | |
|---|---|---|---|
| Query: | 1 | MLYPTPIAKLIDSFSKLPGIGTKTATRLAFYTIGMSDEDVNEFAKNLLAAKRELTYCSVC | 60 |
| | | +LYPTPIAKLIDS+SKLPGIG KTATRLAFYTIGMS+EDVN+FAKNLLAAKRELTYCS+C | |
| Sbjct: | 1 | VLYPTPIAKLIDSYSKLPGIGIKTATRLAFYTIGMSNEDVNDFAKNLLAAKRELTYCSIC | 60 |
| Query: | 61 | GNLTDDDPCLICTDKTRDQSVILVVEDSKDVSAMEKIQEYNGLYHVLHGLISPMNGISPD | 120 |
| | | GNLTDDDPC ICTD +RDQ+ ILVVED+KDVSAMEKIQEY+G YHVLHGLISPMNG+ PD | |
| Sbjct: | 61 | GNLTDDDPCHICTDTSRDQTTILVVEDAKDVSAMEKIQEYHGYYHVLHGLISPMNGVGPD | 120 |
| Query: | 121 | DINLKSLITRLMDGQVTEVIVATNATADGEATSMYISRVLKPAGIKVTRLARGLAVGSDI | 180 |
| | | DINLKSLITRLMDG+V+EVIVATNATADGEATSMYISRVLKPAGIKVTRLARGLAVGSDI | |
| Sbjct: | 121 | DINLKSLITRLMDGKVSEVIVATNATADGEATSMYISRVLKPAGIKVTRLARGLAVGSDI | 180 |
| Query: | 181 | EYADEVTLLRAIENRTEL | 198 |
| | | EYADEVTLLRAIENRTEL | |
| Sbjct: | 181 | EYADEVTLLRAIENRTEL | 198 |

[12078] Based on this analysis, it was predicted that these proteins and their epitopes could be useful antigens for vaccines or diagnostics.

### EXAMPLE 2211

[12079] A DNA sequence (GBSx2330) was identified in S. agalactiae <SEQ ID 6827> which encodes the amino acid sequence <SEQ ID 6828>. Analysis of this protein sequence reveals the following:

```
Possible site: 23
>>> Seems to have no N-terminal signal sequence
----- Final Results -----
                            bacterial cytoplasm --- Certainty = 0.3144(Affirmative) < succ>
                              bacterial membrane --- Certainty = 0.0000(Not Clear) < succ>
                                bacterial outside --- Certainty = 0.0000(Not Clear) < succ>
```

[12080] The protein has no significant homology with any sequences in the GENPEPT database.

[12081] No corresponding DNA sequence was identified in S. pyogenes.

[12082] Based on this analysis, it was predicted that this protein and its epitopes, could be useful antigens for vaccines or diagnostics.

### EXAMPLE 2212

[12083] A DNA sequence (GBSx2331) was identified in S. agalactiae <SEQ ID 6829> which encodes the amino acid sequence <SEQ ID 6830>. This protein is predicted to be penicillin-binding protein 2b. Analysis of this protein sequence reveals the following:

| Possible site: 52 | | | | |
|---|---|---|---|---|
| >>> Seems to have no N-terminal signal sequence | | | | |
| | INTEGRAL | Likelihood = −13.69 | Transmembrane | 23-39 (17-46) |

```
----- Final Results -----
                              bacterial membrane --- Certainty = 0.6477(Affirmative) < succ>
                                bacterial outside --- Certainty = 0.0000(Not Clear) < succ>
                            bacterial cytoplasm --- Certainty = 0.0000(Not Clear) < succ>
```

[12084] The protein has homology with the following sequences in the GENPEPT database.

| >GP: AAC44614 GB: U58210 penicillin-binding protein 2b [Streptococcus | | | |
|---|---|---|---|
| thermophilus] | | | |
| Identities = 341/683 (49%), Positives = 477/683 (68%), Gaps = 12/683 (1%) | | | |
| Query: | 4 | RKKRYRLTVKKQNASIPRRLNLLFFIIVLLFTVLILRLEQMQIGQQSFYMKKLTALTSYT | 63 |
| | | ++K R ++ +I RR+ LLF ++ +LF +L RL MQ+ +SFY KKL + YT | |
| Sbjct: | 18 | KRKEKRANKPRKPVNISRRVYLLFGVVFVLFLLLFARLTYMQVYNKSFYTKKLEDNSKYT | 77 |
| Query: | 64 | VKESKARGQIFDAKGVVLVENDERPTVAFSRGNNISSQSIKELANKLSHYITLTEVASSD | 123 |
| | | V+ + RGQIFDAKG+ L N + + F+R N +SS ++K +A +L+ +TLTE +D | |
| Sbjct: | 78 | VRIASERGQIFDAKGIALTTNQSKDVITFTRSNLVSSDTMKSVAERLATLVTLTETKVTD | 137 |
| Query: | 124 | RAKRDYYLADKANYKKVVESLPDSKRYDKFGNHLAESTVYANAVAAVPVSAINYSEDELK | 183 |
| | | R KR++YLAD ANYK+VV LP+ K+ DKFGN LAE+T+Y NA+ AVP A++YSEDELK | |
| Sbjct: | 138 | RQKREFYLADSANYKRVVNDLPNDKKTDKFGNKLAEATIYNNAINAVPDEAVDYSEDELK | 197 |
| Query: | 184 | VVALFNQMNATPTFGSVKLSTGELSDDQIKKLDADKKELLGISVTSNWHRRKKGTSLSDI | 243 |
| | | +V +++ MNA F +V L T +L+ DQI + A +KEL GI V +W R +SLS + | |
| Sbjct: | 198 | IVYIYSHMNAVSNFSTVILKTADLTPDQIAIVAAKQKELNGIRVAKDWERHTSDSSLSPL | 257 |
| Query: | 244 | LGTISTEKAGLPREEVKKYLKKGYSLNDRVGTSYLEKQYEDDLQGIRQIRKVVVNKKGKV | 303 |
| | | +G +S+ +AGLP+E+ K YLKKGY+LNDRVGTSYLEK+YE++LQG +R++ V+K+GKV | |
| Sbjct: | 258 | IGRVSSSEAGLPQEDAKDYLKKGYALNDRVGTSYLEKEYEEELQGKHTVREITVDKEGKV | 317 |
| Query: | 304 | VSDNITQEGKSGRNLKLTIDLNYQNKVESILKQYYGSELSSGRASFSEGMYAVAIEPSTG | 363 |
| | | SD I Q+G G NLKLTIDL++Q VE IL Q SE+S +A++SEGMYAV + TG | |
| Sbjct: | 318 | DSDKIIQKGSKGNNLKLTIDLDFQKGVEDILGQQLSSEISGNKATYSEGMYAVVMNADTG | 377 |
| Query: | 364 | KVLAMAGLKNDHG--NLVDDSLGTIAKNFTPGSVVKGATLSSGWENKVLRGNEVLYDQEI | 421 |
| | | VLAMAG K++ G + D+LGTI FTPGSVVKGATL++GW + + G++VL DQ I | |
| Sbjct: | 378 | AVLAMAGQKHEQGAQDFKADALGTITDVFTPGSVVKGATLTAGWRSGAIYGDQVLTDQPI | 437 |
| Query: | 422 | -----ANIRSWFT-RGLTPISAAQALEYSSNTYMVQVALRLMGQDYNTGDALTDRGYQEA | 475 |
| | | I SWFT +G I+A QALEYSSNTYMVQ+A++ +GQ Y G +L+ ++A | |
| Sbjct: | 438 | NIASSPPITSWFTDKGSRAITATQALEYSSNTYMVQIAIKRLGQQYVPGMSLSTDNMEKA | 497 |
| Query: | 476 | MAKLRKTYGEYGLGVSTGLDLP-ESEGYVPGKYSLGTTLMESFGQYDAYTPMQLGQYIST | 534 |
| | | M LR TY E+G+GVSTGLDLP ESEGY+P Y++ L E+FGQYD+YT +QL QY+++ | |
| Sbjct: | 498 | MTTLRDTYAEFGMGVSTGLDLPGESEGYIPKNYNVANVLTEAFGQYDSYTTIQLAQYVAS | 557 |
| Query: | 535 | IANNGNRLAPHVVSDIYEGNDSNKFAQLVRSITPKTLNKIAISDQELAIIQEGFYNVVNS | 594 |
| | | IAN G R+APH+V IY+ + L ++ + LNK+++ ++L IIQ+GF++VVNS | |
| Sbjct: | 558 | IANGGKRVAPHIVGGIYDAGKNGSLGTLSSTVDTRVLNKLSLDSKQLGIIQQGFHDVVNS | 617 |
| Query: | 595 | GSGYATGTSMRGNVTTISGKTGTAETFAKNVNGQTVSTYNLNAIAYDTNR---KIAVAVM | 651 |
| | | GS ATG +M ++ ISGKTGTAET+A + +G +V+T NLNA+AY T + K+AV +M | |
| Sbjct: | 618 | GSSLATGKAMASSIIPISGKTGTAETYATDGSGNSVTTVNLNAVAYATAKDGTKLAVGIM | 677 |
| Query: | 652 | YPHVTTDTTKSHQLVARDMIDQY | 674 |
| | | YPH +K+HQ + +++ Y | |
| Sbjct: | 678 | YPHALDWKSKAHQNAVKAIMELY | 700 |

[12085] A related GBS gene <SEQ ID 8997> and protein <SEQ ID 8998> were also identified. Analysis of this protein sequence reveals the following:

| Lipop Possible site: −1 Crend: 8 | | | | |
|---|---|---|---|---|
| McG: Discrim Score: −12.38 | | | | |
| GvH: Signal Score (−7.5): −5.9 | | | | |
| Possible site: 35 | | | | |
| >>> Seems to have no N-terminal signal sequence | | | | |
| ALOM program count: 1 value: −12.42 threshold: 0.0 | | | | |
| | INTEGRAL | Likelihood = −12.42 | Transmembrane | 23-39 (18-46) |
| | PERIPHERAL | Likelihood = 4.56 | 355 | |

```
modified ALOM score: 2.98
*** Reasoning Step: 3
----- Final Results -----
                              bacterial membrane --- Certainty = 0.5967(Affirmative) < succ>
                                bacterial outside --- Certainty = 0.0000(Not Clear) < succ>
                            bacterial cytoplasm --- Certainty = 0.0000(Not Clear) < succ>
```

[12086] The protein has homology with the following sequences in the databases:

[chemical structure]

[12087] SEQ ID 8998 (GBS292) was expressed in E. coli as a GST-fusion product. SDS-PAGE analysis of total cell extract is shown in FIG. 68 (lane 9; MW 103 kDa).

[12088] GBS292-GST was purified as shown in FIG. 211, lane 7.

[12089] Based on this analysis, it was predicted that these proteins and their epitopes could be useful antigens for vaccines or diagnostics.

### EXAMPLE 2213

[12090] A DNA sequence (GBSx2332) was identified in S. agalactiae <SEQ ID 6831> which encodes the amino acid sequence <SEQ ID 6832>. Analysis of this protein sequence reveals the following:

```
Possible site: 47
>>> Seems to have no N-terminal signal sequence
----- Final Results -----
                            bacterial cytoplasm --- Certainty = 0.2644(Affirmative) < succ>
                              bacterial membrane --- Certainty = 0.0000(Not Clear) < succ>
                                bacterial outside --- Certainty = 0.0000(Not Clear) < succ>
```

[12091] The protein has homology with the following sequences in the GENPEPT database.

| >GP: CAB51328 GB: AJ131985 phosphoglyceromutase [Streptococcus | | | |
|---|---|---|---|
| pneumoniae] | | | |
| Identities = 219/230 (95%), Positives = 226/230 (98%) | | | |
| Query: | 1 | MVKLVFARHGESEWNKANLFTGWADVDLSEKGTQQAIDAGKLIQAAGIEFDLAFTSVLKR | 60 |
| | | MVKLVFARHGESEWNKANLFTGWADVDLSEKGTQQAIDAGKLI+ AGI+FD A+TSVLKR | |
| Sbjct: | 1 | MVKLVFARHGESEWNKANLFTGWADVDLSEKGTQQAIDAGKLIKEAGIKFDQAYTSVLKR | 60 |
| Query: | 61 | AIKTTNLALEAADQLWVPVEKSWRLNERHYGGLTGKNKAEAAEQFGDEQVHIWRRSYDVL | 120 |
| | | AIKTTNLALEA+DQLWVPVEKSWRLNERHYGGLTGKNKAEAAEQFGDEQVHIWRRSYDVL | |
| Sbjct: | 61 | AIKTTNLALEASDQLWVPVEKSWRLNERHYGGLTGKNKAEAAEQFGDEQVHIWRRSYDVL | 120 |
| Query: | 121 | PPDMAKDDEHSAHTDRRYASLDDSVIPDAENLKVTLERALPFWEDKIAPALKDGKNVFVG | 180 |
| | | PP+M +DDEHSAHTDRRYASLDDSVIPDAENLKVTLERALPFWEDKIAPALKDGKNVFVG | |
| Sbjct: | 121 | PPNMDRDDEHSAHTDRRYASLDDSVIPDAENLKVTLERALPFWEDKIAPALKDGKNVFVG | 180 |
| Query: | 181 | AHGNSIRALVKHIKQLSDDEIMDVEIPNFPPLVFEFDEKLNLVSEYYLGK | 230 |
| | | AHGNSIRALVKHIK LSDDEIMDVEIPNFPPLVFEFDEKLN+VSEYYLGK | |
| Sbjct: | 181 | AHGNSIRALVKHIKGLSDDEIMDVEIPNFPPLVFEFDEKLNVVSEYYLGK | 230 |

[12092] A related DNA sequence was identified in S. pyogenes <SEQ ID 6833> which encodes the amino acid sequence <SEQ ID 6834>. Analysis of this protein sequence reveals the following:

```
Possible Site: 61
>>> Seems to have no N-terminal signal sequence
----- Final Results -----
                            bacterial cytoplasm --- Certainty = 0.2646(Affirmative) < succ>
                              bacterial membrane --- Certainty = 0.0000(Not Clear) < succ>
                                bacterial outside --- Certainty = 0.0000(Not Clear) < succ>
```

[12093] An alignment of the GAS and GBS proteins is shown below.

| Identities = 206/229 (89%), Positives = 214/229 (92%) | | | |
|---|---|---|---|
| Query: | 1 | MVKLVFARHGESEWNKANLFTGWADVDLSSKGTQQAIDAGKLIQAAGIEFDLAFTSVLKR | 60 |
| | | MVKLVFARHGESEWNKANLFTGWADVDLSEKGTQQAIDAGKLI+ AGIEFDLAFTSVL R | |
| Sbjct: | 1 | MVKLVFARHGESEWNKANLFTGWADVDLSEKGTQQAIDAGKLIKEAGIEFDLAFTSVLTR | 60 |
| Query: | 61 | AIKTTNLALEAADQLWVPVEKSWRLNERHYGGLTGKNKAEAAEQFGDEQVHIWRRSYDVL | 120 |
| | | AIKTTNLALE A QLWVP EKSWRLNERHYG LTGKNKAEAAEQF DEQVHIWRRSYDVL | |
| Sbjct: | 61 | AIKTTNLALENAGQLWVPTEKSWRLNERHYGALTGKNKAEAAEQFCDEQVHIWRRSYDVL | 120 |
| Query: | 121 | PPDMAKDDEHSAHTDRRYASLDDSVIPDAENLKVTLERALPFWEDKIAPALKDGKNVFVG | 180 |
| | | PP MAKDDE+SAH DRRYA LD ++IPDAENLKVTLERA+P+WE+KIAPAL DGKNVFVG | |
| Sbjct: | 121 | PPAMAKDDEYSAHKDRRYADLDPALIPDAENLKVTLERAMPYWEEKIAPALLDGKNVFVG | 180 |
| Query: | 181 | AHGNSIRALVKHIKQLSDDEIMDVEIPNFPPLVFEFDEKLNLVSEYYLG | 229 |
| | | AHGNSIRALVKHIK LSDDEIMDVEIPNFPPLVFE DEKLN+V EYYLG | |
| Sbjct: | 181 | AHGNSIRALVKHIKGLSDDEIMDVEIPNFPPLVFELDEKLNIVKEYYLG | 229 |

[12094] SEQ ID 6832 (GBS110) was expressed in E. coli as a His-fusion product. SDS-PAGE analysis of total cell extract is shown in FIG. 38 (lane 8; MW 28.9 kDa). It was also expressed in E. coli as a GST-fusion product. SDS-PAGE analysis of total cell extract is shown in FIG. 41 (lane 10; MW 53.9 kDa).

[12095] The GBS110-GST fusion product was purified (FIG. 204, lane 5) and used to immunise mice. The resulting antiserum was used for Western blot (FIG. 252A), FACS (FIG. 252B), and in the in vivo passive protection assay (Table III). These tests confirm that the protein is immunoaccessible on GBS bacteria and that it is an effective protective immunogen.

[12096] Based on this analysis, it was predicted that these proteins and their epitopes could be useful antigens for vaccines or diagnostics.

### EXAMPLE 2214

[12097] A DNA sequence (GBSx2333) was identified in S. agalactiae <SEQ ID 6835> which encodes the amino acid sequence <SEQ ID 6836>. This protein is predicted to be triosephosphate isomerase (tpiA). Analysis of this protein sequence reveals the following:

| Possible site: 54 | | | | |
|---|---|---|---|---|
| >>> Seems to have no N-terminal signal sequence | | | | |
| | INTEGRAL | Likelihood = −0.37 | Transmembrane | 36-52 (36-52) |

```
----- Final Results -----
                              bacterial membrane --- Certainty = 0.1150(Affirmative) < succ>
                                bacterial outside --- Certainty = 0.0000(Not Clear) < succ>
                            bacterial cytoplasm --- Certainty = 0.0000(Not Clear) < succ>
```

[12098] The protein has homology with the following sequences in the GENPEPT database.

| >GP: AAC43268 GB: U07640 triosephosphate isomerase [Lactococcus | | | |
|---|---|---|---|
| lactis] | | | |
| Identities = 164/252 (65%), Positives = 202/252 (80%) | | | |
| Query: | 1 | MSRKPFIAGNWKMNKNPEEAKAFIEAVASKLPSSELVEAGIAAPALTLSTVLEAAKGSEL | 60 |
| | | MSRKP IAGNWKMNK EA+AF+EAV + LPSS+ VE+ I APAL L+ + +GSEL | |
| Sbjct: | 1 | MSRKPIIAGNWKMNKTLSEAQAFVEAVKNNLPSSDNVESVIGAPALFLAPMAYLRQGSEL | 60 |
| Query: | 61 | KIAAQNSYFENSGAFTGENSPKVLAEMGTDYVVIGHSERRDYFHETDQDINKKAKAIFAN | 120 |
| | | K+AA+NSYFEN+GAFTGENSP + ++G +Y++IGHSERR+YFHETD+DINKKAKAIFA | |
| Sbjct: | 61 | KLAAENSYFENAGAFTGENSPAAIVDLGIEYIIIGHSERREYFHETDEDINKKAKAIFAA | 120 |
| Query: | 121 | GLTPIICCGESLETYEAGKAVEFVGAQVSAALAGLSEEQVSSLVIAYEPIWAIGTGKSAT | 180 |
| | | G TPI+CCGE+LET+EAGK E+V Q+ A LAGL+ EQVS+LVIAYEPIWAIGTGK+AT | |
| Sbjct: | 121 | GATPILCCGETLETFEAGKTAEWVSGQIEAGLAGLTAEQVSNLVIAYEPIWAIGTGKTAT | 180 |
| Query: | 181 | QDDAQNMCKAVRDVVAADFGQAVADKVRVQYGGSVKPENVAEYMACPDVDGALVGGASLE | 240 |
| | | + A C VR V +G+ V++ VR+QYGGSVKPE + MA ++DGALVGGASLE | |
| Sbjct: | 181 | NEIADETCGVVRSTVEKLYGKEVSEAVRIQYGGSVKPETIEGLMAKENIDGALVGGASLE | 240 |
| Query: | 241 | AESFLALLDFVK | 252 |
| | | A+SFLALL+ K | |
| Sbjct: | 241 | ADSFLALLEMYK | 252 |

[12099] A related DNA sequence was identified in S. pyogenes <SEQ ID 6837> which encodes the amino acid sequence <SEQ ID 6838>. Analysis of this protein sequence reveals the following:

| Possible site: 42 | | | | |
|---|---|---|---|---|
| >>> Seems to have no N-terminal signal sequence | | | | |
| | INTEGRAL | Likelihood = −1.81 | Transmembrane | 36-52 (36-52) |

```
----- Final Results -----
                              bacterial membrane --- Certainty = 0.1723(Affirmative) < succ>
                                bacterial outside --- Certainty = 0.0000(Not Clear) < succ>
                            bacterial cytoplasm --- Certainty = 0.0000(Not Clear) < succ>
```

[12100] An alignment of the GAS and GBS proteins is shown below.

| Identities = 220/251 (87%), Positives = 237/251 (93%) | | | |
|---|---|---|---|
| Query: | 1 | MSRKPFIAGNWKMNKNPEEAKAFIEAVASKLPSSELVEAGIAAPALTLSTVLEAAKGSEL | 60 |
| | | MSRKP IAGNWKMNKNP+EAKAF+EAVASKLPS++LV+ +AAPA+ L T +EAAK S L | |
| Sbjct: | 1 | MSRKPIIAGNWKMNKNPQEAKAFVEAVASKLPSTDLVDVAVAAPAVDLVTTIEAAKDSVL | 60 |
| Query: | 61 | KIAAQNSYFENSGAFTGENSPKVLAEMGTDYVVIGHSERRDYFHETDQDINKKAKAIFAN | 120 |
| | | K+AAQN YFEN+GAFTGE SPKVLAEMG DYVVIGHSERRDYFHETD+DINKKAKAIFAN | |
| Sbjct: | 61 | KVAAQNCYFENTGAFTGETSPKVLAEMGADYVVIGHSERRDYFHETDEDINKKAKAIFAN | 120 |
| Query: | 121 | GLTPIICCGESLETYEAGKAVEFVGAQVSAALAGLSEEQVSSLVIAYEPIWAIGTGKSAT | 180 |
| | | GLTPI+CCGESLETYEAGKAVEFVGAQVSAALAGLS EQV+SLV+AYEPIWAIGTGKSAT | |
| Sbjct: | 121 | GLTPIVCCGESLETYEAGKAVEFVGAQVSAALAGLSAEQVASLVLAYEPIWAIGTGKSAT | 180 |
| Query: | 181 | QDDAQNMCKAVRDVVAADFGQAVADKVRVQYGGSVKPENVAEYMACPDVDGALVGGASLE | 240 |
| | | QDDAQNMCKAVRDVVAADFGQ VADKVRVQYGGSVKPENV +YMACPDVDGALVGGASLE | |
| Sbjct: | 181 | QDDAQNMCKAVRDVVAADFGQEVADKVRVQYGGSVKPENVKDYMACPDVDGALVGGASLE | 240 |
| Query: | 241 | AESFLALLDFV | 251 |
| | | A+SFLALLDF+ | |
| Sbjct: | 241 | ADSFLALLDFL | 251 |

[12101] Based on this analysis, it was predicted that these proteins and their epitopes could be useful antigens for vaccines or diagnostics.

### EXAMPLE 2215

[12102] A DNA sequence (GBSx2334) was identified in S. agalactiae <SEQ ID 6839> which encodes the amino acid sequence <SEQ ID 6840>. Analysis of this protein sequence reveals the following:

```
Possible site: 23
>>> Seems to have no N-terminal signal sequence
----- Final Results -----
                            bacterial cytoplasm --- Certainty = 0.3050(Affirmative) < succ>
                              bacterial membrane --- Certainty = 0.0000(Not Clear) < succ>
                                bacterial outside --- Certainty = 0.0000(Not Clear) < succ>
```

[12103] The protein has homology with the following sequences in the GENPEPT database.

| >GP: AAB41198 GB: U75481 elongation factor-Tu [Streptococcus | | | |
|---|---|---|---|
| mutans] | | | |
| Identities = 44/45 (97%), Positives = 45/45 (99%) | | | |
| Query: | 1 | MVMPGDNVTIEVELIHPIAVEQGTTFSIREGGRTVGSGIVSEIEA | 45 |
| | | MVMPGDNVTI+VELIHPIAVEQGTTFSIREGGRTVGSGIVSEIEA | |
| Sbjct: | 117 | MVMPGDNVTIDVELIHPIAVEQGTTFSIREGGRTVGSGIVSEIEA | 161 |

[12104] There is also homology to SEQ ID 1022:

| Identities = 44/45 (97%), Positives = 44/45 (97%) | | | |
|---|---|---|---|
| Query: | 1 | MVMPGDNVTIEVELIHPIAVEQGTTFSIREGGRTVGSGIVSEIEA | 45 |
| | | MVMPGDNVTI VELIHPIAVEQGTTFSIREGGRTVGSGIVSEIEA | |
| Sbjct: | 371 | MVMPGDNVTINVELIHPIAVEQGTTFSIREGGRTVGSGIVSEIEA | 415 |

[12105] Based on this analysis, it was predicted that these proteins and their epitopes could be useful antigens for vaccines or diagnostics.

### EXAMPLE 2216

[12106] A DNA sequence (GBSx2335) was identified in S. agalactiae <SEQ ID 6841> which encodes the amino acid sequence <SEQ ID 6842>. Analysis of this protein sequence reveals the following:

| Possible site: 32 | | | | |
|---|---|---|---|---|
| >>> Seems to have no N-terminal signal sequence | | | | |
| | INTEGRAL | Likelihood = −2.66 | Transmembrane | 81-97 (80-97) |
| | INTEGRAL | Likelihood = −2.60 | Transmembrane | 18-34 (17-34) |

```
----- Final Results -----
                              bacterial membrane --- Certainty = 0.2062(Affirmative) < succ>
                                bacterial outside --- Certainty = 0.0000(Not Clear) < succ>
                            bacterial cytoplasm --- Certainty = 0.0000(Not Clear) < succ>
```

[12107] The protein has no significant homology with any sequences in the GENPEPT database.

[12108] No corresponding DNA sequence was identified in S. pyogenes.

[12109] Based on this analysis, it was predicted that this protein and its epitopes, could be useful antigens for vaccines or diagnostics.

### EXAMPLE 2217

[12110] A DNA sequence (GBSx2336) was identified in S. agalactiae <SEQ ID 6843> which encodes the amino acid sequence <SEQ ID 6844>. Analysis of this protein sequence reveals the following:

```
Possible site: 26
>>> Seems to have no N-terminal signal sequence
----- Final Results -----
                            bacterial cytoplasm --- Certainty = 0.0596(Affirmative) < succ>
                              bacterial membrane --- Certainty = 0.0000(Not Clear) < succ>
                                bacterial outside --- Certainty = 0.0000(Not Clear) < succ>
```

[12111] The protein has no significant homology with any sequences in the GENPEPT database.

[12112] No corresponding DNA sequence was identified in S. pyogenes.

[12113] Based on this analysis, it was predicted that this protein and its epitopes, could be useful antigens for vaccines or diagnostics.

### EXAMPLE 2218

[12114] A DNA sequence (GBSx2337) was identified in S. agalactiae <SEQ ID 6845> which encodes the amino acid sequence <SEQ ID 6846>. Analysis of this protein sequence reveals the following:

```
Possible site: 14
>>> Seems to have no N-terminal signal sequence
----- Final Results -----
                            bacterial cytoplasm --- Certainty = 0.3559(Affirmative) < succ>
                              bacterial membrane --- Certainty = 0.0000(Not Clear) < succ>
                                bacterial outside --- Certainty = 0.0000(Not Clear) < succ>
```

[12115] The protein has no significant homology with any sequences in the GENPEPT database.

[12116] No corresponding DNA sequence was identified in S. pyogenes.

[12117] Based on this analysis, it was predicted that this protein and its epitopes, could be useful antigens for vaccines or diagnostics.

### EXAMPLE 2219

[12118] A DNA sequence (GBSx2338) was identified in S. agalactiae <SEQ ID 6847> which encodes the amino acid sequence <SEQ ID 6848>. Analysis of this protein sequence reveals the following:

```
Possible site: 33
>>> Seems to have an uncleavable N-term signal seq
----- Final Results -----
                              bacterial membrane --- Certainty = 0.0000(Not Clear) < succ>
                                bacterial outside --- Certainty = 0.0000(Not Clear) < succ>
                            bacterial cytoplasm --- Certainty = 0.0000(Not Clear) < succ>
```

[12119] The protein has homology with the following sequences in the GENPEPT database.

| >GP: AAF96286 GB: AE004374 hypothetical protein [Vibrio cholerae] | | | |
|---|---|---|---|
| Identities = 56/167 (33%), Positives = 89/167 (52%), Gaps = 12/167 (7%) | | | |
| Query: | 18 | LAIIKSLPLNDCWLCAGTLRNFVWNKLS-GINETLTSDIDVVFFDKNI---SYEETVVLE | 73 |
| | | L + L L C++ AG +RN VW+ L + T +DIDV+FFD + YE++ LE | |
| Sbjct: | 41 | LECVYQLELPQCYIAAGFVRNLVWDSLHHNVKLTPLNDIDVIFFDADCLDSDYEKS--LE | 98 |
| Query: | 74 | QQLKDNYPQYDWELKNEFYMNTHSPNTPKYTSSKDAISKFPEKCTAVGARLDDRNQLELY | 133 |
| | | +L + PQ +W++KN+ M+ + + P Y S+ DA+S +PEK TAV R + ++ E | |
| Sbjct: | 99 | LKLSEQMPQLNWQVKNQAKMHLQNGDNP-YQSTLDAMSYWPEKETAVAVRKVEHDRYECI | 157 |
| Query: | 134 | LPYGEEEILNFIVSPTPYFEEDLLRYNVYLKRVDKKKWNNIWPRLTI | 180 |
| | | +G E + ++ P Y ++ RV K W +WP L I | |
| Sbjct: | 158 | SAFGFESLFQGFITHNP-----KRAYGIFENRVKSKGWLAMWPNLRI | 199 |

[12120] No corresponding DNA sequence was identified in S. pyogenes.

[12121] Based on this analysis, it was predicted that this protein and its epitopes, could be useful antigens for vaccines or diagnostics.

### EXAMPLE 2220

[12122] A DNA sequence (GBSx2339) was identified in S. agalactiae <SEQ ID 6849> which encodes the amino acid sequence <SEQ ID 6850>. Analysis of this protein sequence reveals the following:

```
Possible site: 17
>>> Seems to have no N-terminal signal sequence
----- Final Results -----
                            bacterial cytoplasm --- Certainty = 0.2779(Affirmative) < succ>
                              bacterial membrane --- Certainty = 0.0000(Not Clear) < succ>
                                bacterial outside --- Certainty = 0.0000(Not Clear) < succ>
```

[12123] The protein has homology with the following sequences in the GENPEPT database.

| >GP: CAB13060 GB: Z99110 yjdF [Bacillus subtilis] | | | |
|---|---|---|---|
| Identities = 47/138 (34%), Positives = 93/138 (67%), Gaps = 2/138 (1%) | | | |
| Query: | 1 | MKMTVYFDGNFWLGLIEYDDDGDYKVFRYFFGKEPKDDDVFNFINHKLNDLIKKYEFVKT | 60 |
| | | MK+T+Y+DG FW+G++E D+G + FR+ FGKEP+D +V F++++L +++ + E + | |
| Sbjct: | 24 | MKLTIYYDGQFWVGVVEVVDNGKLRAFRHLFGKEPRDSEVLEFVHNQLLNMMAQAE--QE | 81 |
| Query: | 61 | DISLKRTNEHKKSPKRMQREINREKRKPVVSTKAQLAMKTIHMSIKNERQLSQKCKKNEL | 120 |
| | | + L+ + K +PKR+QR++++E + V++KAQ A+K + K +++ K ++ + | |
| Sbjct: | 82 | GVRLQGRRQKKINPKRLQRQVSKELKNAGVTSKAQEAIKLELEARKQKKKQIMKEQREHV | 141 |
| Query: | 121 | RKHRYQLKQEKRYQKKKG | 138 |
| | | ++ RY LK++K +K +G | |
| Sbjct: | 142 | KEQRYMLKKQKAKKKHRG | 159 |

[12124] No corresponding DNA sequence was identified in S. pyogenes.

[12125] Based on this analysis, it was predicted that this protein and its epitopes, could be useful antigens for vaccines or diagnostics.

### EXAMPLE 2221

[12126] A DNA sequence (GBSx2340) was identified in S. agalactiae <SEQ ID 6851> which encodes the amino acid sequence <SEQ ID 6852>. This protein is predicted to be ComX1. Analysis of this protein sequence reveals the following:

```
Possible site: 52
>>> Seems to have no N-terminal signal sequence
----- Final Results -----
                            bacterial cytoplasm --- Certainty = 0.3143(Affirmative) < succ>
                              bacterial membrane --- Certainty = 0.0000(Not Clear) < succ>
                                bacterial outside --- Certainty = 0.0000(Not Clear) < succ>
```

[12127] A related GBS nucleic acid sequence <SEQ ID 9469> which encodes amino acid sequence <SEQ ID 9470> was also identified.

[12128] The protein has homology with the following sequences in the GENPEPT database.

| >GP: AAD50429 GB: AF161701 ComX2 [Streptococcus pneumoniae] | | | |
|---|---|---|---|
| Identities = 61/152 (40%), Positives = 95/152 (62%) | | | |
| Query: | 5 | EELFDKVKPIVMKLRRNYFVQLWEYDDWIQEGRIVLFRLLEEEPYLLDNESKLFIYFKTK | 64 |
| | | +EL+++V+ V K R Y++ LWE DW QEG + L L+ L+D+ +L YFKTK | |
| Sbjct: | 3 | KELYEEVQGTVYKCRNEYYLHLWELSDWDQEGMLCLHELISREEGLVDDIPRLRKYFKTK | 62 |
| Query: | 65 | FSNYLNDVLRHQDCQKRQFNKMPYEEISEVSHYVKSKGLVLDDYIAYRDTLTKVEETLSD | 124 |
| | | F N + D +R Q+ QKR+++K PYEE+ E+SH + GL LDDY + +TL S | |
| Sbjct: | 63 | FRNRILDYIRKQESQKRRYDKEPYEEVGEISHRISEGGLWLDDYYLFHETLRDYRNKQSK | 122 |
| Query: | 125 | IDKEKFEKLISGERFAGKKQFIRDIQPFFNAF | 156 |
| | | +E+ E+++S ERF G+++ +RD++ F F | |
| Sbjct: | 123 | EKQEELERVLSNERFRGRQRVLRDLRIVFKEF | 154 |

[12129] A related DNA sequence was identified in S. pyogenes <SEQ ID 6853> which encodes the amino acid sequence <SEQ ID 6854>. Analysis of this protein sequence reveals the following:

| Possible site: 39 | | | | |
|---|---|---|---|---|
| >>> Seems to have an uncleavable N-term signal seq | | | | |
| | INTEGRAL | Likelihood = −10.35 | Transmembrane | 9-25 (7-28) |

```
----- Final Results -----
                              bacterial membrane --- Certainty = 0.5140(Affirmative) < succ>
                                bacterial outside --- Certainty = 0.0000(Not Clear) < succ>
                            bacterial cytoplasm --- Certainty = 0.0000(Not Clear) < succ>
```

[12130] A related sequence was also identified in GAS <SEQ ID 9163> which encodes the amino acid sequence <SEQ ID 9164>. Analysis of this protein sequence reveals the following:

| Possible site: 29 | | | | |
|---|---|---|---|---|
| >>> Seems to have an uncleavable N-term signal seq | | | | |
| | INTEGRAL | Likelihood = −10.35 | Transmembrane | 2-18 (1-18) |

```
----- Final Results -----
                              bacterial membrane --- Certainty = 0.160(Affirmative) < succ>
                                bacterial outside --- Certainty = 0.0000(Not Clear) < succ>
                            bacterial cytoplasm --- Certainty = 0.0000(Not Clear) < succ>
```

[12131] The protein has homology with the following sequences in the databases:

| >GP: AAD50429 GB: AF161701 ComX2 [Streptococcus pneumoniae] | | | |
|---|---|---|---|
| Identities = 60/149 (40%), Positives = 98/149 (65%) | | | |
| Query: | 41 | FEKVKPIILKLKRHYYIQLWDRDDWLQEGHIILLQLLERYPELIEEEERLYRYFKTKFSS | 100 |
| | | +E+V+ + K + YY+ LW+ DW QEG + L +L+ R L+++ RL +YFKTKF + | |
| Sbjct: | 6 | YEEVQGTVYKCRNEYYLHLWELSDWDQEGMLCLHELISREEGLVDDIPRLRKYFKTKFRN | 65 |
| Query: | 101 | YLKDLLRRQESQKRQFHKLAYEEIGEVAHAIPSRGLWLDDYVAYQEVIASLENQLNSQER | 160 |
| | | + D +R+QESQKR++ K YEE+GE++H I GLWLDDY + E + N+ + +++ | |
| Sbjct: | 66 | RILDYIRKQESQKRRYDKEPYEEVGEISHRISEGGLWLDDYYLFHETLRDYRNKQSKEKQ | 125 |
| Query: | 161 | MQFQALIRGERFKGRRALLRKISPYFKEF | 189 |
| | | + + ++ ERF+GR+ +LR + FKEF | |
| Sbjct: | 126 | EELERVLSNERFRGRQRVLRDLRIVFKEF | 154 |

[12132] An alignment of the GAS and GBS proteins is shown below.

| Identities = 78/149 (52%), Positives = 116/149 (77%) | | | |
|---|---|---|---|
| Query: | 8 | FDKVKPIVMKLRRNYFVQLWEYDDWIQEGRIVLFRLLEEHPYLLDNESKLFIYFKTKFSN | 67 |
| | | F+KVKPI++KL+R+Y++QLW+ DDW+QEG I+L +LLE +P L++ E +L+ YFKTKFS+ | |
| Sbjct: | 41 | FEKVKPIILKLKRHYYIQLWDRDDWLQEGHIILLQLLERYPELIEEEERLYRYFKTKFSS | 100 |
| Query: | 68 | YLNDVLRHQDCQKRQFNKMPYEEISEVSHYVKSKGLVLDDYIAYRDTLTKVEETLSDIDK | 127 |
| | | YL D+LR Q+ QKRQF+K+ YEEI EV+H + S+GL LDDY+AY++ + +E L+ ++ | |
| Sbjct: | 101 | YLKDLLRRQESQKRQFHKLAYEEIGEVAEAIPSRGLWLDDYVAYQEVIASLENQLNSQER | 160 |
| Query: | 128 | EKFEKLISGERFAGKKQFIRDIQPFFNAF | 156 |
| | | +F+ LI GERF G++ +R I P+F F | |
| Sbjct: | 161 | MQFQALIRGERFKGRRALLRKISPYFKEF | 189 |

[12133] Based on this analysis, it was predicted that these proteins and their epitopes could be useful antigens for vaccines or diagnostics.

### EXAMPLE 2222

[12134] A DNA sequence (GBSx2341) was identified in S. agalactiae <SEQ ID 6855> which encodes the amino acid sequence <SEQ ID 6856>. Analysis of this protein sequence reveals the following:

| Possible site: 57 | | | | |
|---|---|---|---|---|
| >>> Seems to have no N-terminal signal sequence | | | | |
| | INTEGRAL | Likelihood = −2.23 | Transmembrane | 166-182 (166-182) |

```
----- Final Results -----
                              bacterial membrane --- Certainty = 0.1893(Affirmative) < succ>
                                bacterial outside --- Certainty = 0.0000(Not Clear) < succ>
                            bacterial cytoplasm --- Certainty = 0.0000(Not Clear) < succ>
```

[12135] The protein has homology with the following sequences in the GENPEPT database.

| >GP: CAA99510 GB: Z75191 ORF YOR283w [Saccharomyces cerevisiae] | | | |
|---|---|---|---|
| Identities = 57/226 (25%), Positives = 97/226 (42%), Gaps = 22/226 (9%) | | | |
| Query: | 4 | VRLYIARHGKTMFNTIGRAQGWSDTPLTTFGELGIKELGLGLKASNISFKEAFSSDSGRT | 63 |
| | | +RL+I RHG+T N QG DT+ GE +LG L++ I F + SSD R | |
| Sbjct: | 17 | IRLFIIRHGQTEHNVKKILQGHKDTSINPTGEEQATKLGHYLRSRGIHFDKVVSSDLKRC | 76 |
| Query: | 64 | LQTMEIILREVQQENIPYTRDKRIREWCFGSLDGGYDGDLFNGVLPRVSNGDMSHLTHEE | 123 |
| | | QT ++L+ +QEN+P + +RE G ++G M E+ | |
| Sbjct: | 77 | RQTTALVLKHSKQENVPTSYTSGLRERYMGVIEG------------------MQITEAEK | 118 |
| Query: | 124 | IANLICQVDTAGWAEPWAILSNRILSGFTAIAKKIEDIGGGNAIVVSHGMTIATFL-WL- | 181 |
| | | A+ + + E R+ + + G N +VSHG I L WL | |
| Sbjct: | 119 | YADKHGSGSFRNFGEKSDDFVARLTGCVEEEVAEASNEGVKNLALVSHGGAIRMILQWLK | 178 |
| Query: | 182 | IDHSTPRSLGLDNGSVSVVDF--EDGTFSIQSIGDMSYREKGREIL | 225 |
| | | ++ + + N SV++VD+ + F ++ +G+ + G ++ | |
| Sbjct: | 179 | YENHQAHKIIVFNTSVTIVDYVKDSKQFIVRRVGNTQHLGDGEFVV | 224 |

[12136] A related DNA sequence was identified in S. pyogenes <SEQ ID 6857> which encodes the amino acid sequence <SEQ ID 6858>. Analysis of this protein sequence reveals the following:

| Possible site: 57 | | | | |
|---|---|---|---|---|
| >>> Seems to have no N-terminal signal sequence | | | | |
| | INTEGRAL | Likelihood = −0.69 | Transmembrane | 170-186 (170-186) |

```
----- Final Results -----
                              bacterial membrane --- Certainty = 0.1277(Affirmative) < succ>
                                bacterial outside --- Certainty = 0.0000(Not Clear) < succ>
                            bacterial cytoplasm --- Certainty = 0.0000(Not Clear) < succ>
```

[12137] The protein has homology with the following sequences in the databases:

| >GP: CAA99510 GB: Z75191 ORF YOR283w [Saccharomyces cerevisiae] | | | |
|---|---|---|---|
| Identities = 64/231 (27%), Positives = 98/231 (41%), Gaps = 27/231 (11%) | | | |
| Query: | 5 | RLYIARHGKTMFNTIGRAQGWSDTPLTKKGEEGIRELGLGLKDATIPFKAAFSSDSGRTM | 64 |
| | | RL+I RHG+T N QG DT + GEE +LG L+ I F SSD R | |
| Sbjct: | 18 | RLFIIRHGQTEHNVKKILQGHKDTSINPTGEEQATKLGHYLRSRGIHFDKVVSSDLKRCR | 77 |
| Query: | 65 | QTIEIILRESENEFLPYTKDNRIREWCFGSLEGTYDSELFLGVLPRTKAFENRDNLRDVP | 124 |
| | | QT ++L+ S+ E +P + + +RE G +EG +E | |
| Sbjct: | 78 | QTTALVLKHSKQENVPTSYTSGLRERYMGVIEGMQITEA--------------------- | 116 |
| Query: | 125 | YSELAESIVEVDTANWAEPWEVLRKRIWEGFEAIALSIQNAGGGNALVVSHGMTIGTFL- | 183 |
| | | + A+ E N+ E + R+ E N G N +VSHG I L | |
| Sbjct: | 117 | -EKYADKHGEGSFRNFGEKSDDFVARLTGCVEEEVAEASNEGVKNLALVSHGGAIRMILQ | 175 |
| Query: | 184 | WL--IDPDRDKQYIDNGSVTVVEF--DDGQFTIKTIGDMSYRYRGREIIEE | 230 |
| | | WL + K + N SVT+V++ D QF ++ +G+ + G ++ + | |
| Sbjct: | 176 | WLKYENHQAHKIIVFNTSVTIVDYVKDSKQFIVRRVGNTQHLGDGEFVVSD | 226 |

[12138] An alignment of the GAS and GBS proteins is shown below.

| Identities = 150/231 (64%), Positives = 182/231 (77%), Gaps = 5/231 (2%) | | | |
|---|---|---|---|
| Query: | 1 | MSKVRLYIARHGKTMFNTIGRAQGWSDTPLTTFGELGIKELGLGLKASNISFKEAFSSDS | 60 |
| | | M+K RLYIARHGRTMFNTIGRAQGWSDTPLT GE GI+ELGLGLK + I FK AFSSDS | |
| Sbjct: | 1 | MTKTRLYIARHGKTMFNTIGRAQGWSDTPLTKKGEEGIRELGLGLKDATIPFKAAFSSDS | 60 |
| Query: | 61 | GRTLQTMEIILREVQQENIPYTRDKRIREWCFGSLDGGYDGDLFNGVLPRV----SNGDM | 116 |
| | | GRT+QT+EIILRE + E +PYT+D RIREWCFGSL+G YD +LF GVLPR + ++ | |
| Sbjct: | 61 | GRTMQTIEIILRESENEFLPYTKDNRIREWCFGSLEGTYDSELFLGVLPRTKAFENRDNL | 120 |
| Query: | 117 | SHLTHEEIANLICQVDTAGWAEPWAILSNRILSGFTAIAKKIEDIGGGNAIVVSHGMTIA | 176 |
| | | + + E+A I +VDTA WAEPW +L RI GF AIA I++ GGGNA+VVSHGMTI | |
| Sbjct: | 121 | RDVPYSELAESIVEVDTANWAEPWEVLRKRIWEGFEAIALSIQNAGGGNALVVSHGMTIG | 180 |
| Query: | 177 | TFLWLIDHSTPRSLGLDNGSVSVVDFEDGTFSIQSIGDMSYREKGREILEK | 227 |
| | | TFLWLID + +DNGSV+VV+F+DG F+I++IGDMSYR +GREI+E+ | |
| Sbjct: | 181 | TFLWLIDPDRDKQY-IDNGSVTVVEFDDGQFTIKTIGDMSYRYRGREIIEE | 230 |

[12139] A related GBS gene <SEQ ID 8999> and protein <SEQ ID 9000> were also identified. Analysis of this protein sequence reveals the following:

[chemical structure]

[12140] Purified Thio-GBS44-His is shown in FIG. 244, lanes 7 & 8.

[12141] Based on this analysis, it was predicted that these proteins and their epitopes could be useful antigens for vaccines or diagnostics.

### EXAMPLE 2223

[12142] A DNA sequence (GBSx2342) was identified in S. agalactiae <SEQ ID 6859> which encodes the amino acid sequence <SEQ ID 6860>. This protein is predicted to be d-alanyl-d-alanine carboxypeptidase. Analysis of this protein sequence reveals the following:

```
Possible Site: 27
>>> Seems to have a cleavable N-term signal seq.
----- Final Results -----
                                bacterial outside --- Certainty = 0.3000(Affirmative) < succ>
                              bacterial membrane --- Certainty = 0.0000(Not Clear) < succ>
                            bacterial cytoplasm --- Certainty = 0.0000(Not Clear) < succ>
```

[12143] The protein has homology with the following sequences in the GENPEPT database.

| >GP: AAD00280 GB: U78599 putative D,D-carboxypeptidase [Streptococcus mutans] | | | |
|---|---|---|---|
| Identities = 108/169 (63%), Positives = 139/169 (81%) | | | |
| Query: | 79 | ELSPDVVPVENIYLDKRITKQATQFLEAARAIDSREHLISGYRSVAYQEKLFNSYVTQEM | 138 |
| | | E++PDV ++ + +D RI + +FL AA+ IDS EHLISGYRSVAYQE+L+N+Y+ QE | |
| Sbjct: | 4 | EMNPDVTDIDGVKVDSRIAENTRKFLAAAQEIDSSEHLISGYRSVAYQEELYNNYIAQEK | 63 |
| Query: | 139 | TSNPNLTRGQAEKLVKTYSQPAGASEHQTGLAMDMSTVDSLNESDPRVVSQLKKIAPQYG | 198 |
| | | +NP+L++ +A+K V+TYSQP G+SEHQTGLA+DMSTVDSLN+SD VV+++ IAP+YG | |
| Sbjct: | 64 | ANNPSLSQEEAQKQVQTYSQPPGSSEHQTGLAIDMSTVDSLNQSDANVVAKVAAIAPKYG | 123 |
| Query: | 199 | FVLRFPDGKTAETGVGYEDWHYRYVGVESAKYMAKHHLTLEEYITLLKE | 247 |
| | | FVLRFP+GK TG+ YEDWHYRYVGV+SAKYM KH LTLEEY+ LKE | |
| Sbjct: | 124 | FVLRFPEGKKDATGIDYEDWHYRYVGVKSAKYMTKHDLTLEEYLKKLKE | 172 |

[12144] A related DNA sequence was identified in S. pyogenes <SEQ ID 6861> which encodes the amino acid sequence <SEQ ID 6862>. Analysis of this protein sequence reveals the following:

| Possible site: 26 | | | | |
|---|---|---|---|---|
| >>> Seems to have an uncleavable N-term signal seq | | | | |
| | INTEGRAL | Likelihood = −9.66 | Transmembrane | 10-26 (3-29) |

```
----- Final Results -----
                              bacterial membrane --- Certainty = 0.4864(Affirmative) < succ>
                                bacterial outside --- Certainty = 0.0000(Not Clear) < succ>
                            bacterial cytoplasm --- Certainty = 0.0000(Not Clear) < succ>
```

[12145] The protein has homology with the following sequences in the databases:

| >GP: AAD00280 GB: U78599 putative D,D-carboxypeptidase [Streptococcus mutans] | | | |
|---|---|---|---|
| Identities = 118/173 (68%), Positives = 139/173 (80%) | | | |
| Query: | 74 | ITKEMSPELADINGISVDKRIEQATSDFLAAAQAIDLQEHLISGYRSVDYQTELYQSYIK | 133 |
| | | IT EM+P++ DI+G+ VD RI + T FLAAAQ ID EHLISGYRSV YQ ELY +YI | |
| Sbjct: | 1 | ITAEMNPDVTDIDGVKVDSRIAENTRKFLAAAQEIDSSEHLISGYRSVAYQEELYNNYIA | 60 |
| Query: | 134 | KEMANDPTLTQEAAEALVQTYSQPPGASEHHTGLAIDMSTVDTLNASDPSVAKAVQKIAP | 193 |
| | | +E AN+P+L+QE A+ VQTYSQPPG+SEH TGLAIDHSTVD+LN SD +V V IAP | |
| Sbjct: | 61 | QEKANNPSLSQEEAQKQVQTYSQPPGSSEHQTGLAIDMSTVDSLNQSDANVVAKVAAIAP | 120 |
| Query: | 194 | DYGFVLRFPEGKKTSTGVDYEDWHYRYVGKASARYMAQHNLTLEEYIAALKEK | 246 |
| | | YGFVLRFPEGKK +TG+DYEDWHYRYVG SA+YM +H+LTLEEY+ LKEK | |
| Sbjct: | 121 | KYGFVLRFPEGKKDATGIDYEDWHYRYVGVKSAKYMTKHDLTLEEYLKKLKEK | 173 |

[12146] An alignment of the GAS and GBS proteins is shown below.

| Identities = 131/235 (55%), Positives = 172/235 (72%), Gaps = 3/235 (1%) | | | |
|---|---|---|---|
| Query: | 15 | LLAILCF--SLFALLKPNSQQSSSQKLRNEDIKKISSQKRNKKLQLPAVSSKDWNLILVN | 72 |
| | | LL ++ F L+ +KP + +Q L ++I++ +K ++ LP VS +DW L+LVN | |
| Sbjct: | 12 | LLIVIVFLGGLYLFIKPEESVTPTQ-LNKKEIQQKDIKKTDRLRALPKVSVEDWELVLVN | 70 |
| Query: | 73 | RDHKHEELSPDVVPVENIYLDKRITKQATQFLEAARAIDSREHLISGYRSVAYQEKLFNS | 132 |
| | | RDH +E+SP++ + I +DKRI + + FL AA+AID +EHLISGYRSV YQ +L+ S | |
| Sbjct: | 71 | RDHITKEMSPELADINGISVDKRIEQATSDFLAAAQAIDLQEHLISGYRSVDYQTELYQS | 130 |
| Query: | 133 | YVTQEMTSNPNLTRGQAEKLVKTYSQPAGASEHQTGLAMDMSTVDSLNESDPRVVSQLKK | 192 |
| | | Y+ +EM ++P LT+ AE LV+TYSQP GASEH TGLA+DMSTVD+LN SDP V ++K | |
| Sbjct: | 131 | YIKKEMANDPTLTQEAAEALVQTYSQPPGASEHHTGLAIDMSTVDTLNASDPSVAKAVQK | 190 |
| Query: | 193 | IAPQYGFVLRFPDGKTAETGVGYEDWHYRYVGVESAKYMAKHHLTLEEYITLLKE | 247 |
| | | IAP YGFVLRFP+GK TGV YEDWHYRYVG SA+YMA+H+LTLEEYI LKE | |
| Sbjct: | 191 | IAPDYGFVLRFPEGKKTSTGVDYEDWHYRYVGKASARYMAQHNLTLEEYIAALKE | 245 |

[12147] A related GBS gene <SEQ ID 9001> and protein <SEQ ID 9002> were also identified. Analysis of this protein sequence reveals the following:

| Lipop: Possible site: −1 Crend: 7 | | | |
|---|---|---|---|
| McG: Discrim Score: 14.03 | | | |
| GvH: Signal Score (−7.5): −1.02 | | | |
| Possible site: 27 | | | |
| >>> Seems to have a cleavable N-term signal seq. | | | |
| ALOM program count: 0 value: 10.08 threshold: 0.0 | | | |
| | PERIPHERAL | Likelihood = 10.08 | 56 |

```
modified ALOM score: −2.52
*** Reasoning Step: 3
----- Final Results -----
                                bacterial outside --- Certainty = 0.3000(Affirmative) < succ>
                              bacterial membrane --- Certainty = 0.0000(Not Clear) < succ>
                            bacterial cytoplasm --- Certainty = 0.0000(Not Clear) < succ>
```

[12148] The protein has homology with the following sequences in the databases:

[chemical structure]

[12149] SEQ ID 6860 (GBS18) was expressed in E. coli as a His-fusion product. SDS-PAGE analysis of total cell extract is shown in FIG. 4 (lane 3; MW 31 kDa).

[12150] The GBS18-His fusion product was purified (FIG. 93A; see also FIG. 189, lane 11) and used to immunise mice (lane 2 product; 20 μg/mouse). The resulting antiserum was used for Western blot (FIG. 93B), FACS (FIG. 93C), and in the in vivo passive protection assay (Table III). These tests confirm that the protein is immunoaccessible on GBS bacteria and that it is an effective protective immunogen.

### EXAMPLE 2224

[12151] A DNA sequence (GBSx2343) was identified in S. agalactiae <SEQ ID 6863> which encodes the amino acid sequence <SEQ ID 6864>. This protein is predicted to be unnamed protein product. Analysis of this protein sequence reveals the following:

```
Possible site: 34
>>> Seems to have an uncleavable N-term signal seq
INTEGRAL Likelihood = −12.58 Transmembrane 10-26 ( 3-29)
----- Final Results -----
                            bacterial membrane --- Certainty = 0.6031(Affirmative) < succ>
                              bacterial outside --- Certainty = 0.0000(Not Clear) < succ>
                          bacterial cytoplasm --- Certainty = 0.0000(Not Clear) < succ>
```

[12152] A related DNA sequence was identified in S. pyogenes <SEQ ID 6865> which encodes the amino acid sequence <SEQ ID 6866>. Analysis of this protein sequence reveals the following:

```
Possible site: 33
>>> Seems to have an uncleavable N-term signal seq
INTEGRAL Likelihood = −11.83 Transmembrane 10-26 ( 4-33)
----- Final Result -----
                            bacterial membrane --- Certainty = 0.5734(Affirmative) < succ>
                              bacterial outside --- Certainty = 0.0000(Not Clear) < succ>
                          bacterial cytoplasm --- Certainty = 0.0000(Not Clear) < succ>
```

[12153] The protein has homology with the following sequences in the databases:

| >GP:AAD00279 GB:U78599 putative N-acetyl-muramidase [Streptococcus mutans] | | | |
|---|---|---|---|
| Identities = 66/150 (44%), Positives = 97/150 (64%), Gaps = 5/150 (3%) | | | |
| Query: | 18 | LLLIVCPLLSSQRIASADKEVRVNYSQKQFITKNGKEVKPLAKYYGIRPSILIAQILLET | 77 |
| | | LL+I+ P+L+S +A A+K++ YS K+F+ ++ + L+K YG+R SI+I Q L++ | |
| Sbjct: | 3 | LLVILLPILASGGLADANKKNPSPYSHKEFVKEIAPTAQKLSKIYGVRSSIIIGQAALDS | 62 |
| Query: | 78 | HDGKTLLASKYHNLFSKKATPGQVAITLKSPKQTN---QNV--RYAIYKDDASAIRDYLR | 132 |
| | | H G TLLASKYHNLFS +A+PGQ A+ LKS + N Q V RY +Y+ ++ DY+ | |
| Sbjct: | 63 | HFGSTLLASKYHNLFSIEASPGQGAVRLKSHEYKNGRWQEVTNRYLVYESWKESLYDYMA | 122 |
| Query: | 133 | MLRQGKEVDKRLYRNLATEKGYKAPAKSLQ | 162 |
| | | +L K DK LY + T GYK A++LQ | |
| Sbjct: | 123 | ILHGNKIWDKALYTTMMTSSGYKTVARALQ | 152 |

[12154] An alignment of the GAS and GBS proteins is shown below.

| Identities = 67/190 (35%), Positives = 102/190 (53%), Gaps = 1/190 (0%) | | | |
|---|---|---|---|
| Query: | 1 | MRKRFSLLNFIVVTFIFFFWILFPLLNHKGKVDANSRQSVTYTKEEFIQKIVPDAQDLGK | 60 |
| | | MRKR F+ + F I+ PLL+ + A+ V Y++++FI K+ + + L K | |
| Sbjct: | 1 | MRKRLKFPYFLTLLACFLLLIVCPLLSSQRIASADKEVRVNYSQKQFITKMGKEVKPLAK | 60 |
| Query: | 61 | SYGIRPSFIIAQAALDSDFGEKILANKYHNLFGLLAEPGTPSITLNDSSTGKKQEKQFTH | 120 |
| | | YGIRPS +IAQ L++ G+ +LA+KYHNLF A PG +ITL S Q ++ | |
| Sbjct: | 61 | YYGIRPSILIAQILLETHDGKTLLASKYHNLFSKKATPGQVAITLK-SPKQTNQNVRYAI | 119 |
| Query: | 121 | YKSWKYSMYDYLAHIKSGATGKKDSYTIMVSVKNPKTLVQKLQDSGFDNDKKYAKKMTEI | 180 |
| | | YK ++ DYL ++G K Y + + K K + LQ DK YA+++++ | |
| Sbjct: | 120 | YKDDASAIRDYLRMLRQGKEVDKRLYRNLATEKGYKAPAKSLQKYLHYTDKTYARRLIQV | 179 |
| Query: | 181 | IDLYDLTRYD | 190 |
| | | I+ DLT YD | |
| Sbjct: | 180 | IESNDLTNYD | 189 |

[12155] Based on this analysis, it was predicted that these proteins and their epitopes could be useful antigens for vaccines or diagnostics.

### EXAMPLE 2225

[12156] A DNA sequence (GBSx2344) was identified in S. agalactiae <SEQ ID 6867> which encodes the amino acid sequence <SEQ ID 6868>. Analysis of this protein sequence reveals the following:

```
Possible site: 44
>>> Seems to have no N-terminal signal sequence
----- Final Results -----
                            bacterial cytoplasm --- Certainty = 0.2541(Affirmative) < succ>
                              bacterial membrane --- Certainty = 0.0000(Not Clear) < succ>
                                bacterial outside --- Certainty = 0.0000(Not Clear) < succ>
```

[12157] The protein has homology with the following sequences in the GENPEPT database.

| >GP:AAC45610 GB:U78296 repressor of class I heat shock gene | | | |
|---|---|---|---|
| expression HrcA [Streptococcus mutans] | | | |
| Identities = 227/345 (65%), Positives = 287/345 (82%), Gaps = 1/345 (0%) | | | |
| Query: | 17 | VITQRQNDILNLIVELFTQTHEPVGSKALQRTIDSSSATIRNDMAKLEKLGLLEKAHTSS | 76 |
| | | +ITQRQ DILNLIVELFT+THEP+GSK LQ +I SS ATIRNDMA LEKLGLLEKA T | |
| Sbjct: | 1 | MITQRQKDILNLIVELFTKTHEPIGSKTLQNSIASSRATIRNDMAALEKLGLLEKATTPP | 60 |
| Query: | 77 | GRM-PSPAGFKYFVEHSLRLDSIDEQDIYHVIKAFDFEAFKLEDMLQKASHILSEMTGYT | 135 |
| | | +P +YFVEHSL DS+DEQD+Y VIKAFDFEAF+L D+LQ+AS +L+ +TGYT | |
| Sbjct: | 61 | AVVCPVKKAIRYFVEHSLNPDSLDEQDVYQVIKAFDFEAFRLGDLLQRASDVLANLTGYT | 120 |
| Query: | 136 | SVILDVEPARQRLTGFDVVQLSNHDALAVNTLDESKPVTVQFAIPRNFLTRDLIAFKAIV | 195 |
| | | ++ILDVEP +QRLT FD+V+LSNHDALAV+TLDE+ PVTVQFAIP+NFL DL+ I | |
| Sbjct: | 121 | ALILDVEPKKQRLTTFDIVKLSNHDALAVLTLDEASPVTVQFAIPKNFLDSDLMTVAKIA | 180 |
| Query: | 196 | EERLLDGSVMDIHYKLRTEIPQIVQKYFVTTDNVLQLFDYVFSELFLETVFVAGKVNSLT | 255 |
| | | ER L+ +V+DIHY+LRTE PQI+QKYF TDNVL LFD++F+ +F E VF++GK+ +L | |
| Sbjct: | 181 | RERFLNQTVLDIHYRLRTEPPQIIQKYFPRTDNVLDLFDHIFNPIFQEEVEISGKIKTLE | 240 |
| Query: | 256 | YSDLSTYQFLDNEQQVAISLRQSLKEGEMASVQVADSQEAALADVSVLTHKFLIPYRGFG | 315 |
| | | ++ L TYQFL+N Q VA+ +RQSL E E+ VQVADS+E +LAD++V++ KFLIPYRGFG | |
| Sbjct: | 241 | FAGLDTYQFLENLQSVALEIRQSLPEDELHRVQVADSKEKSLADLTVISQKFLIPYRGFG | 300 |
| Query: | 316 | LLSLIGPIDMDYRRSVSLVNIIGKVLAAKLGDYYRYLNSNHYEVH | 360 |
| | | +L++IGP+D+DY+R++SL+N+I +VLA KLGD+YRYLNSNHYEVH | |
| Sbjct: | 301 | ILTVIGPVDLDYQRTISLINVISRVLAVKLGDFYRYLNSNHYEVH | 345 |

[12158] A related DNA sequence was identified in S. pyogenes <SEQ ID 6869> which encodes the amino acid sequence <SEQ ID 6870>. Analysis of this protein sequence reveals the following:

```
Possible site: 28
>>> Seems to have no N-terminal signal sequence
----- Final Results -----
                            bacterial cytoplasm --- Certainty = 0.0695(Affirmative) < succ>
                              bacterial membrane --- Certainty = 0.0000(Not Clear) < succ>
                                bacterial outside --- Certainty = 0.0000(Not Clear) < succ>
```

[12159] An alignment of the GAS and GBS proteins is shown below.

| Identities = 341/344 (99%), Positives = 343/344 (99%) | | | |
|---|---|---|---|
| Query: | 17 | VITQRQNDILNLIVELFTQTHEPVGSKALQRTIDSSSATIRNDMAKLEKLGLLEKAHTSS | 76 |
| | | VITQRQNDILNLIVELFTQTHEPVGSKALQRTIDSSSATIRNDMAKLEKLGLLEKAHTSS | |
| Sbjct: | 1 | VITQRQNDILNLIVELFTQTHEPVGSKALQRTIDSSSATIRNDMAKLEKLGLLEKAHTSS | 60 |
| Query: | 77 | GRMPSPAGFKYFVEHSLRLDSIDEQDIYHVIKAFDFEAFKLEDMLQKASHILSEMTGYTS | 136 |
| | | GRMPSPAGFKYFVEHSLRLDSIDEQDIYHVIKAFDFEAFKLEDMLQKASHIL+EMTGYTS | |
| Sbjct: | 61 | GRMPSPAGFKYFVEHSLRLDSIDEQDIYHVIKAFDFEAFKLEDMLQKASHILAEMTGYTS | 120 |
| Query: | 137 | VILDVEPARQRLTGFDVVQLSNHDALAVMTLDESKPVTVQFAIPRNFLTRDLIAFKAIVE | 196 |
| | | VILDVEPARQRLTGFDVVQLSNHDALAVMTLDESKPVTVQFAIPRNFLTRDLIAFKAIVE | |
| Sbjct: | 121 | VILDVEPARQRLTGFDVVQLSNHDALAVMTLDESKPVTVQFAIPRNFLTRDLIAFKAIVE | 180 |
| Query: | 197 | ERLLDGSVMDIHYKLRTEIPQIVQKYFVTTDNVLQLFDYVFSELFLETVFVAGKVNSLTY | 256 |
| | | ERLLD SV+DIHYKLRTEIPQIVQKYFVTTDNVLQLFDYVFSELFLETVFVAGKVNSLTY | |
| Sbjct: | 181 | ERLLDNSVIDIHYKLRTEIPQIVQKYFVTTDNVLQLFDYVFSELFLETVFVAGKVNSLTY | 240 |
| Query: | 257 | SDLSTYQFLDNEQQVAISLRQSLKEGEMASVQVADSQEAALADVSVLTHKFLIPYRGFGL | 316 |
| | | SDLSTYQFLDNEQQVAISLRQSLKEGEMASVQVADSQEAALADVSVLTHKFLIPYRGFGL | |
| Sbjct: | 241 | SDLSTYQFLDNEQQVAISLRQSLKEGEMASVQVADSQEAALADVSVLTHKFLIPYRGFGL | 300 |
| Query: | 317 | LSLIGPIDMDYRRSVSLVNIIGKVLAAKLGDYYRYLNSNHYEVH | 360 |
| | | LSLIGPIDMDYRRSVSLVNIIGKVLAAKLGDYYRYLNSNHYEVH | |
| Sbjct: | 301 | LSLIGPIDMDYRRSVSLVNIIGKVLAAKLGDYYRYLNSNHYEVH | 344 |

[12160] Based on this analysis, it was predicted that these proteins and their epitopes could be useful antigens for vaccines or diagnostics.

### EXAMPLE 2226

[12161] A DNA sequence (GBSx2345) was identified in S. agalactiae <SEQ ID 6871> which encodes the amino acid sequence <SEQ ID 6872>. This protein is predicted to be grpe protein (grpE). Analysis of this protein sequence reveals the following:

```
Possible site: 15
>>> Seems to have no N-terminal signal sequence
----- Final Results -----
                            bacterial cytoplasm --- Certainty = 0.5138(Affirmative) < succ>
                              bacterial membrane --- Certainty = 0.0000(Not Clear) < succ>
                                bacterial outside --- Certainty = 0.0000(Not Clear) < succ>
```

[12162] The protein has homology with the following sequences in the GENPEPT database.

| >GP: AAC45611 GB: U78296 GrpE [Streptococcus mutans] | | | |
|---|---|---|---|
| Identities = 130/180 (72%), Positives = 151/180 (83%), | | | |
| Gaps = 3/180 (1%) | | | |
| Query: | 14 | VSEEIKKDDLQEEVEATE--TEETVEEVIEEIPEKSELELANERADEFENKYLRAHAEM- | 70 |
| | | +S++ KK++ +EEVEATE TEE+VEEV EE E EL+ A ERA++FENKYLRAHAEM | |
| Sbjct: | 1 | MSKKDKKEEYKEEVEATEPTTEESVEEVAEETSENKELQEALERAEDFENKYLRAHAEMP | 60 |
| Query: | 71 | QNIQRRSSEERQQLQRYRSQDLAKAILPSLDNLERALAVEGLTDDVKKGLEMTRDSLIQA | 130 |
| | | + + + QRYRSQDL KAILPSLDNLERALAVEGLTDDVKKGLEM ++SLIQA | |
| Sbjct: | 61 | KTFSVALMKSDKVCQRYRSQDLRKAILPSLDNLERALAVEGLTDDVKKGLEMVQESLIQA | 120 |
| Query: | 131 | LKEEGVEEVEVDSFDHNFHMAVQTLPADDEHPADSIAEVFQKGYKLHERLLRPAMVVVYN | 190 |
| | | LKEEGVEEVE+++FD N HMAVQTL ADD+HPADSIA+V QKGY+LHERLLRPAMVVVYN | |
| Sbjct: | 121 | LKEEGVEEVELENFDANLHMAVQTLDADDDHPADSIAQVHQKGYQLHERLLRPAMVVVYN | 180 |

[12163] A related DNA sequence was identified in S. pyogenes <SEQ ID 6873> which encodes the amino acid sequence <SEQ ID 6874>. Analysis of this protein sequence reveals the following:

```
Possible site: 15
>>> Seems to have no N-terminal signal sequence
----- Final Results -----
                            bacterial cytoplasm --- Certainty = 0.5138(Affirmative) < succ>
                              bacterial membrane --- Certainty = 0.0000(Not Clear) < succ>
                                bacterial outside --- Certainty = 0.0000(Not Clear) < succ>
```

[12164] An alignment of the GAS and GBS proteins is shown below.

| Identities = 189/190 (99%), Positives = 189/190 (99%) | | | |
|---|---|---|---|
| Query: | 1 | MAVFNKLFKRRHSVSEEIKKDDLQEEVEATETEETVEEVIEEIPEKSELELANERADEFE | 60 |
| | | MAVFNKLFKRRHSVSEEIKKDDLQEEVEATETEETVEEVIEE PEKSELELANERADEFE | |
| Sbjct: | 1 | MAVFNKLFKRRHSVSEEIKKDDLQEEVEATETEETVEEVIEETPEKSELELANERADEFE | 60 |
| Query: | 61 | NKYLRAHAEMQNIQRRSSEERQQLQRYRSQDLAKAILPSLDNLERALAVEGLTDDVKKGL | 120 |
| | | NKYLRAHAEMQNIQRRSSEERQQLQRYRSQDLAKAILPSLDNLERALAVEGLTDDVKKGL | |
| Sbjct: | 61 | NKYLRAHAEMQNIQRRSSEERQQLQRYRSQDLAKAILPSLDNLERALAVEGLTDDVKKGL | 120 |
| Query: | 121 | EMTRDSLIQALKEEGVEEVEVDSFDHNFHMAVQTLPADDEHPADSIAEVFQKGYKLHERL | 180 |
| | | EMTRDSLIQALKEEGVEEVEVDSFDHNFHMAVQTLPADDEHPADSIAEVFQKGYKLHERL | |
| Sbjct: | 121 | EMTRDSLIQALKEEGVEEVEVDSFDHNFHMAVQTLPADDEHPADSIAEVFQKGYKLHERL | 180 |
| Query: | 181 | LRPAMVVVYN | 190 |
| | | LRPAMVVVYN | |
| Sbjct: | 181 | LRPAMVVVYN | 190 |

[12165] Based on this analysis, it was predicted that these proteins and their epitopes could be useful antigens for vaccines or diagnostics.

### EXAMPLE 2227

[12166] A DNA sequence (GBSx2346) was identified in S. agalactiae <SEQ ID 6875> which encodes the amino acid sequence <SEQ ID 6876>. This protein is predicted to be heat shock protein 70 (dnaK). Analysis of this protein sequence reveals the following:

```
Possible Site: 17
>>> Seems to have no N-terminal signal sequence
----- Final Results -----
                            bacterial cytoplasm --- Certainty = 0.0996(Affirmative) < succ>
                              bacterial membrane --- Certainty = 0.0000(Not Clear) < succ>
                                bacterial outside --- Certainty = 0.0000(Not Clear) < succ>
```

[12167] A related DNA sequence was identified in S. pyogenes <SEQ ID 6877> which encodes the amino acid sequence <SEQ ID 6878>. Analysis of this protein sequence reveals the following:

```
Possible site: 17
>>> Seems to have no N-terminal signal sequence
----- Final Results -----
                            bacterial cytoplasm --- Certainty = 0.0996(Affirmative) < succ>
                              bacterial membrane --- Certainty = 0.0000(Not Clear) < succ>
                                bacterial outside --- Certainty = 0.0000(Not Clear) < succ>
```

[12168] An alignment of the GAS and GBS proteins is shown below.

| Identities = 594/609 (97%), Positives = 603/609 (98%), | | | |
|---|---|---|---|
| Gaps = 1/609 (0%) | | | |
| Query: | 1 | MSKIIGIDLGTTNSAVAVLEGTESKIIANPEGNRTTPSVVSFKNGEIIVGDAAKRQAVTN | 60 |
| | | MSKIIGIDLGTTNSAVAVLEGTESKIIANPEGNRTTPSVVSFKNGEIIVGDAAKRQAVTN | |
| Sbjct: | 1 | MSKIIGIDLGTTNSAVAVLEGTESKIIANPEGNRTTPSVVSFKNGEIIVGDAAKRQAVTN | 60 |
| Query: | 61 | PDTVISIKSKMGTSEKVSANGKEYTPQEISAMILQYLKGYAEDYLGEKVEKAVITVPAYF | 120 |
| | | P+TVISIKSKMGTSEKVSANGKEYTPQEISAMILQYLKGYAEDYLGEKVEKAVITVPAYF | |
| Sbjct: | 61 | PETVISIKSKMGTSEKVSANGKEYTPQEISAMILQYLKGYAEDYLGEKVEKAVITVPAYF | 120 |
| Query: | 121 | NDAQRQATKDAGKIAGLEVERIVNEPTAAALAYGMDKTDKDEKILVFDLGGGTFDVSILE | 180 |
| | | NDAQRQATKDAGKIAGLEVERIVNEPTAAALAYGMDKTDKDEKILVFDLGGGTFDVSILE | |
| Sbjct: | 121 | NDAQRQATKDAGKIAGLEVERIVNEPTAAALAYGMDKTDKDEKILVFDLGGGTFDVSILE | 180 |
| Query: | 181 | LGDGVFDVLATAGDNKLGGDDFDQKIIDFLVEEFKKENGIDLSQDKMALQRLKDAAEKAK | 240 |
| | | LGDGVFDVLATAGDNKLGGDDFDQKIIDFLV EFKKENGIDLSQDKMALQRLKDAAEKAK | |
| Sbjct: | 181 | LGDGVFDVLATAGDNKLGGDDFDQKIIDFLVAEFKKENGIDLSQDKMALQRLKDAAEKAK | 240 |
| Query: | 241 | KDLSGVTQTQISLPFITAGSAGPLHLEMSLSRAKFDDLTRDLVERTKTPVRQALSDAGLS | 300 |
| | | KDLSGVTQTQISLPFITAGSAGPLHLEMSLSRAKFDDLTRDLVERTKTPVRQALSDAGLS | |
| Sbjct: | 241 | KDLSGVTQTQISLPFITAGSAGPLHLEMSLSRAKFDDLTRDLVERTKTPVRQALSDAGLS | 300 |
| Query: | 301 | LSEIDEVILVGGSTRIPAVVEAVKAETGKEPNKSVNPDEVVAMGAAIQGGVITGDVKDVV | 360 |
| | | LSEIDEVILVGGSTRIPAVVEAVKAETGKEPNKSVNPDEVVAMGAAIQGGVITGDVKDVV | |
| Sbjct: | 301 | LSEIDEVILVGGSTRIPAVVEAVKAETGKEPNKSVNPDEVVAMGAAIQGGVITGDVKDVV | 360 |
| Query: | 361 | LLDVTPLSLGIETMGGVFTKLIDRNTTIPTSKSQVFSTAADNQPAVDIHVLQGERPMAAD | 420 |
| | | LLDVTPLSLGIETMGGVFTKLIDRNTTIPTSKSQVFSTAADNQPAVDIHVLQGERPMAAD | |
| Sbjct: | 361 | LLDVTPLSLGIETMGGVFTKLIDRNTTIPTSKSQVFSTAADNQPAVDIHVLQGERPMAAD | 420 |
| Query: | 421 | NKTLGRFQLTDIPAAPRGIPQIEVTFDIDKNGIVSVKAKDLGTQKEQHIVIQSNSGLTDE | 480 |
| | | NKTLGRFQLTDIPAAPRGIPQIEVTFDIDKNGIVSVKAKDLGTQKEQHIVI+SN GL++E | |
| Sbjct: | 421 | NKTLGRFQLTDIPAAPRGIPQIEVTFDIDKNGIVSVKAKDLGTQKEQHIVIKSNDGLSEE | 480 |
| Query: | 481 | EIDKMMKDAEANAEADAKRKEEVDLKNEVDQAIFATEKTIKETEGKGFDTERDAAQSALD | 540 |
| | | EID+MMKDAEANAEADAKRKEEVDLKNEVDQAIFATEKTIKETEGKGFDTERDAAQSALD | |
| Sbjct: | 481 | EIDRMMKDAEANAEADAKRKEEVDLKNEVDQAIFATEKTIKETEGKGFDTERDAAQSALD | 540 |
| Query: | 541 | ELKKAQESGNLDDMKAKLEALNEKAQALAVKLYEQAAAAQQAAQGAEGAQSADSSSKGDD | 600 |
| | | ELK AQESGNLDDMKAKLEALNEKAQALAVK+YEQAAAAQQAAQGAEGAQ+ DS++ DD | |
| Sbjct: | 541 | ELKAAQESGNLDDMKAKLEALNEKAQALAVKMYEQAAAAQQAAQGAEGAQANDSAN-NDD | 599 |
| Query: | 601 | VVDGEFTEK | 609 |
| | | VVDGEFTEK | |
| Sbjct: | 600 | VVDGEFTEK | 608 |

[12169] Based on this analysis, it was predicted that these proteins and their epitopes could be useful antigens for vaccines or diagnostics.

### EXAMPLE 2228

[12170] A DNA sequence (GBSx2347) was identified in S. agalactiae <SEQ ID 6879> which encodes the amino acid sequence <SEQ ID 6880>. This protein is predicted to be Streptococcus pneumoniae DnaJ protein homologue (dnaJ). Analysis of this protein sequence reveals the following:

```
Possible site: 18
>>> Seems to have no N-terminal signal sequence
----- Final Results -----
                            bacterial cytoplasm --- Certainty = 0.4180(Affirmative) < succ>
                              bacterial membrane --- Certainty = 0.0000(Not Clear) < succ>
                                bacterial outside --- Certainty = 0.0000(Not Clear) < succ>
```

[12171] A related DNA sequence was identified in S. pyogenes <SEQ ID 6881> which encodes the amino acid sequence <SEQ ID 6882>. Analysis of this protein sequence reveals the following:

```
Possible site: 16
>>> Seems to have no N-terminal signal sequence
----- Final Results -----
                            bacterial cytoplasm --- Certainty = 0.1322(Affirmative) < succ>
                              bacterial membrane --- Certainty = 0.0000(Not Clear) < succ>
                                bacterial outside --- Certainty = 0.0000(Not Clear) < succ>
```

[12172] An alignment of the GAS and GBS proteins is shown below.

| Identities = 330/377 (87%), Positives = 357/377 (94%), | | | |
|---|---|---|---|
| Gaps = 1/377 (0%) | | | |
| Query: | 1 | MNNTEFYDRLGVSKDASQDEIKKAYRRMSKKYHPDINKETGAEEKYKEVQEAYETLSDTQ | 60 |
| | | MNNTE+YDRLGVSKDASQD+IKKAYR+MSKKYHPDINKE GAE+KYK+VQEAYETLSD+Q | |
| Sbjct: | 19 | MNNTEYYDRLGVSKDASQDDIKKAYRKMSKKYHPDINKEAGAEQKYKDVQEAYETLSDSQ | 78 |
| Query: | 61 | KRAAYDQYGAAGANGGFGGFDGGGFGGFDGGGFGGFEDIFSSFFGGGGMRNPNAPRQGDD | 120 |
| | | KRAAYDQYGAAGA GGFGG GGFGGFDGGGFGGFEDIFSSFFGGGG RNPNAPRQGDD | |
| Sbjct: | 79 | KRAAYDQYGAAGAQGGFGG-GAGGFGGFDGGGFGGFEDIFSSFFGGGGSRNPNAPRQGDD | 137 |
| Query: | 121 | LQYRVNLSFEEAIFGAEKEVSYNRESSCHTCSGSGAKPGTSPVTCQKCHGSGVINVDTQT | 180 |
| | | LQYRVNLSFEEA+FG EKEVSYNRE++C TC GSGAKPGT+PVTC+KCHGSGV+ +DTQT | |
| Sbjct: | 138 | LQYRVNLSFEEAVFGVEKEVSYNREATCGTCLGSGAKPGTAPVTCRKCHGSGVMTIDTQT | 197 |
| Query: | 181 | PLGTMRRQVTCDVCQGSGQEIKEKCPTCHGTGHEKKTHKVSVKIPAGVETGQQIRLTGQG | 240 |
| | | PLG MRRQVTCD+C GSG+EIKE C TCHGTGHEK+ HKVSVKIPAGVETGQQIRL GQG | |
| Sbjct: | 198 | PLGMMRRQVTCDICHGSGKEIKEPCQTCHGTGHEKQAHKVSVKIPAGVETGQQIRLQGQG | 257 |
| Query: | 241 | EAGFNGGPYGDLFVIINVLPSQQFERNGSTIYYTLNISFVQAALGDTIDIPTVHGAVEMS | 300 |
| | | EAGFNGGPYGDLFVI+NVLPS+QFERNGSTIYY L+ISF QAALGDT++IPTVHG VEM+ | |
| Sbjct: | 258 | EAGFNGGPYGDLFVILNVLPSKQFERNGSTIYYNLDISFTQAALGDTVEIPTVHGDVEMA | 317 |
| Query: | 301 | IPAGTQTGKTFRLRGKGAPKLRGGGQGDQHVTVNIVTPTKLNDAQKEALHAFAEASGDKM | 360 |
| | | IPAGTQTGKTFRL+GKGAPKLRGGGQGDQHVTVNIVTPTKLNDAQ+EAL AFAEASG+KM | |
| Sbjct: | 318 | IPAGTQTGKTFRLKGKGAPKLRGGGQGDQHVTVNIVTPTKLNDAQREALQAFAEASGEKM | 377 |
| Query: | 361 | VHPKKKGFFDKVKDALD | 377 |
| | | +HPKKKGFFDKVKDAL+ | |
| Sbjct: | 378 | LHPKKKGFFDKVKDALE | 394 |

[12173] Based on this analysis, it was predicted that these proteins and their epitopes could be useful antigens for vaccines or diagnostics.

### EXAMPLE 2229

[12174] A DNA sequence (GBSx2348) was identified in S. agalactiae <SEQ ID 6883> which encodes the amino acid sequence <SEQ ID 6884>. Analysis of this protein sequence reveals the following:

| Possible site: 59 | | | | |
|---|---|---|---|---|
| >>> Seems to have no N-terminal signal sequence | | | | |
| | INTEGRAL | Likelihood = −0.22 | Transmembrane | 281-297 (281-297) |

```
----- Final Results -----
                              bacterial membrane --- Certainty = 0.1086(Affirmative) < succ>
                                bacterial outside --- Certainty = 0.0000(Not Clear) < succ>
                            bacterial cytoplasm --- Certainty = 0.0000(Not Clear) < succ>
```

[12175] The protein has homology with the following sequences in the GENPEPT database.

| >GP: AAD24445 GB: AF118389 unknown [Streptococcus suis] | | | |
|---|---|---|---|
| Identities = 182/373 (48%), Positives = 257/373 (68%), Gaps = 5/373 (1%) | | | |
| Query: | 4 | KVEEIRSYLIASIQNGKLAPGDRLPSIRQLANQFSCNKDTVQRVLMELRFDNYIYAKPRS | 63 |
| | | K + I ++ I+ + G++LPSIRQL Q+ C+KDTVQ+ ++EL++ N IYA +S | |
| Sbjct: | 3 | KYQVIIQDILTGIEEHRFKRGEKLPSIRQLREQYHCSKDTVQKAMLELKYQNKIYAVEKS | 62 |
| Query: | 64 | GYYVFDSHQEEVEEGVSLPNSEIANIAYDDFRLCLNETLIGREDYLFNYYYRQEGLLDLS | 123 |
| | | GYY+ + + + + ++ I Y+DFR+CL E+LIGRE+YLFNYY++QEGL +L | |
| Sbjct: | 63 | GYYILEDRDFQ-DHTCRAQSYRLSRITYEDFRICLKESLIGRENYLFNYYHQQEGLAELI | 121 |
| Query: | 124 | KAVAKLMEETGVYVPLDDIVITAGTQQALFILTQVTFPNRKSRVLIEEPTYPRMIELIKT | 183 |
| | | +V L+ + VY D +VITAG+QQAL+ILTQ+ K+ +LIE PTY RMIELI+ | |
| Sbjct: | 122 | SSVQSLLMDYHVYTKKDQLVITAGSQQALYILTQMETLAGKTEILIENPTYSRMIELIRH | 181 |
| Query: | 184 | QNLPYETISRGTHGIDFQRLEEIFQTQSIKFFYVIPRMHNPLGTSYNPVEMKRLIEMAEK | 243 |
| | | Q +PY+TI R GID + LE IFQT IKFFY IPR+HNPLG++Y+ ++++A++ | |
| Sbjct: | 182 | QGIPYQTIERNLDGIDLEELESIFQTGKIKFFYTIPRLHNPLGSTYDIATKTAIVKLAKQ | 241 |
| Query: | 244 | YDVYIVEDDYMSDFASQS--PLHYYDTHGRVIYLKSFSKAIFPALRLAAICLPQALKSTF | 301 |
| | | YDVYI+EDDY++DF S PLHY DT RVIY+KSF+ +FPALR+ AI LP L+ F | |
| Sbjct: | 242 | YDVYIIEDDYLADFDSSHSLPLHYLDTDNRVIYIKSFTPTLFPALRIGAISLPNQLRDIF | 301 |
| Query: | 302 | MAYKKLMDYDTNLILQKALALYIENGLYAKNSQYLKYRYQKDLANSKSILADHP-NLPSY | 360 |
| | | + +K L+DYDTNLI+QKAL+LYI+NG++A+N+Q+L + Y K L + N+P Y | |
| Sbjct: | 302 | IKHKSLIDYDTNLIMQKALSLYIDNGMFARNTQHLHHIYHAQWNKIKDCLEKYALNIP-Y | 360 |
| Query: | 361 | SLHHDSVLFDCSK | 373 |
| | | + SV F SK | |
| Sbjct: | 361 | RIPKGSVTFQLSK | 373 |

[12176] A related DNA sequence was identified in S. pyogenes <SEQ ID 6885> which encodes the amino acid sequence <SEQ ID 6886>. Analysis of this protein sequence reveals the following:

```
Possible site: 59
>>> Seems to have no N-terminal signal sequence
----- Final Results -----
                            bacterial cytoplasm --- Certainty = 0.3043(Affirmative) < succ>
                              bacterial membrane --- Certainty = 0.0000(Not Clear) < succ>
                                bacterial outside --- Certainty = 0.0000(Not Clear) < succ>
```

[12177] An alignment of the GAS and GBS proteins is shown below.

| Identities = 176/382 (46%), Positives = 255/382 (66%), Gaps = 7/382 (1%) | | | |
|---|---|---|---|
| Query: | 1 | MVTKVEEIRSYLIASIQNGKLAPGDRLPSIRQLANQFSCNKDTVQRVLMELRFDNYIYAK | 60 |
| | | M TK + I S + IQ +L GD+LPSIR L+ + C+KDTVQR L+EL++ + IYA | |
| Sbjct: | 1 | MTTKYQTIISNIEQDIQKQRLKKGDKLPSIRVLSKVYYCSKDTVQRALLELKYRHLIYAV | 60 |
| Query: | 61 | PRSGYYVFDSHQEEVEEGVSLPNSEIANIAYDDFRLCLNETLIGREDYLFNYYYRQEGLL | 120 |
| | | P+SGYYV + + ++L + N+AY+DFRLCLNE L ++ YLF+YY++ EGL | |
| Sbjct: | 61 | PKSGYYVL-GNVSMPDNVLNLSLEDYNNMAYEDFRLCLNEALSAKDKYLFHYYHKTEGLE | 119 |
| Query: | 121 | DLSKAVAKLMEETGVYVPLDDIVITAGTQQALFILTQVTFPNRKSRVLIEEPTYPRMIEL | 180 |
| | | +L +A+ + E VY D ++IT+GTQQAL+IL+Q+ FPN +L+E+PTY RM + | |
| Sbjct: | 120 | ELREALLLYLAENSVYSNKDQLLITSGTQQALYILSQMPFPNTGKTILLEKPTYHRMEAI | 179 |
| Query: | 181 | IKTQNLPYETISRGTHGIDFQRLEEIFQTQSIKFFYVIPRMHNPLGTSYNPVEMKRLIEM | 240 |
| | | + LPY+TISR +G+D + LE +FQT IKFFY I R +PLG SY+ E + ++ + | |
| Sbjct: | 180 | VAQLGLPYQTISRHFNGLDLELLESLFQTGDIKFFYTISRFSHPLGLSYSTKEKEAIVRL | 239 |
| Query: | 241 | AEKYDVYIVEDDYMSDFA--SQSPLHYYDTHGRVIYLKSFSKAIFPALRLAAICLPQALK | 298 |
| | | A++Y VYI+EDDY+ DF + P+HYYDTH R+IYLKSFS ++FPALR+ A+ LP LK | |
| Sbjct: | 240 | AQRYQVYILEDDYLGDFVKLKEPPIHYYDTHHRIIYLKSFSMSVFPALRIGALVLPSGLK | 299 |
| Query: | 299 | STFMAYKKLMDYDTNLILQKALALYIENGLYAKNSQYLKYRYQKDLANSKSILADHPNLP | 358 |
| | | F+ K L+D DTNL++QKALALY+ENG++ KN +++K RY K ++ N P | |
| Sbjct: | 300 | PHFLTQKSLIDLDTNLLMQKALALYLENGMFQKNLRFIK-RYLKQRERQLALFLKQ-NCP | 357 |
| Query: | 359 | S--YSLHHDSVLFDCSKLDNFK | 378 |
| | | Y L ++ D + D+++ | |
| Sbjct: | 358 | DIHYQLTPTHLVIDYTTSDSYR | 379 |

[12178] SEQ ID 6884 (GBS423) was expressed in E. coli as a His-fusion product. SDS-PAGE analysis of total cell extract is shown in FIG. 79 (lane 7; MW 49.3 kDa). It was also expressed in E. coli as a GST-fusion product. SDS-PAGE analysis of total cell extract is shown in FIG. 172 (lane 2; MW 74 kDa).

[12179] GBS423-GST was purified as shown in FIG. 219, lane 2-3.

[12180] Based on this analysis, it was predicted that these proteins and their epitopes could be useful antigens for vaccines or diagnostics.

### EXAMPLE 2230

[12181] A DNA sequence (GBSx2349) was identified in S. agalactiae <SEQ ID 6887> which encodes the amino acid sequence <SEQ ID 6888>. This protein is predicted to be pseudouridylate synthase I (truA). Analysis of this protein sequence reveals the following:

```
Possible site: 58
>>> Seems to have no N-terminal signal sequence
----- Final Results -----
                            bacterial cytoplasm --- Certainty = 0.3265(Affirmative) < succ>
                              bacterial membrane --- Certainty = 0.0000(Not Clear) < succ>
                                bacterial outside --- Certainty = 0.0000(Not Clear) < succ>
```

[12182] The protein has homology with the following sequences in the GENPEPT database.

| >GP: BAB03886 GB: AP001507 tRNA pseudouridine synthase A | | | |
|---|---|---|---|
| (pseudouridylate synthase I) [Bacillus halodurans] | | | |
| Identities = 105/240 (43%), Positives = 147/240 (60%), Gaps = 2/240 (0%) | | | |
| Query: | 1 | MTRYKAQISYDGSAFSGFQRQPNCRTVQEEIERTLKRLNSGNDVIIHGAGRTDVGVHAYG | 60 |
| | | M R +++YDG+ F+G+Q QPN RTVQ E+E LK ++ G + + +GRTD GVHA G | |
| Sbjct: | 1 | MKRIGLKVAYDGTDFAGYQIQPNERTVQGELESVLKNIHKGMSIRVTASGRTDTGVHARG | 60 |
| Query: | 61 | QVIHFDLPQARDVEKLRFGLDTQCPDDIDIVKVEQVSDDFHCRYDKHIKTYEFLVDIGRP | 120 |
| | | Q++HFD + V++ L++Q P DI +++ V DFH RY K Y + V | |
| Sbjct: | 61 | QIVHFDTSLSFPVDRWPIALNSQLPADICVLEAADVPADFHARYSAKTKEYRYRVLTSAQ | 120 |
| Query: | 121 | KNPMMRNYATHYPYPVIIELMQEAIKDLVGTHDFTGFTASGTSVENKVRTIFDAKIQFEA | 180 |
| | | + RNY H YP+ +E MQ A L+GTHDF+ F A+ VE+KVRTI D + E | |
| Sbjct: | 121 | ADVFRRNYTYHVRYPLDVEAMQRAAVQLLGTHDFSSFCAAKAEVEDKVRTIEDVALWREG | 180 |
| Query: | 181 | SKNLLIFTFTGNGFLYKQVRNMVGTLLKIGNGRMPISQIKTILQAKNRDLAGPTAAGNGL | 240 |
| | | + LIF+ GNGFLY VR +VGTLL+IG G+ ++ IL A++R+ AG TA G+GL | |
| Sbjct: | 181 | DE--LIFSIRGNGFLYNMVRIIVGTLLEIGAGKRSAEEVAKILAARSREAAGKTAPGHGL | 238 |

[12183] A related DNA sequence was identified in S. pyogenes <SEQ ID 6889> which encodes the amino acid sequence <SEQ ID 6890>. Analysis of this protein sequence reveals the following:

```
Possible site: 58
>>> Seems to have no N-terminal signal sequence
----- Final Results -----
                            bacterial cytoplasm --- Certainty = 0.2558(Affirmative) < succ>
                              bacterial membrane --- Certainty = 0.0000(Not Clear) < succ>
                                bacterial outside --- Certainty = 0.0000(Not Clear) < succ>
```

[12184] An alignment of the GAS and GBS proteins is shown below.

| Identities = 184/249 (73%), Positives = 214/249 (85%) | | | |
|---|---|---|---|
| Query: | 1 | MTRYKAQISYDGSAFSGFQRQPNCRTVQEEIERTLKRLNSGNDVIIHGAGRTDVGVHAYG | 60 |
| | | M RYKA ISYDG+ FSGFQRQ + RTVQEEIE+TL +LN+G +IIHGAGRTD GVHAYG | |
| Sbjct: | 1 | MVRYKATISYDGTLFSGFQRQRHLRTVQEEIEKTLYKLNNGTKIIIHGAGRTDAGVHAYG | 60 |
| Query: | 61 | QVIHFDLPQARDVEKLRFGLDTQCPDDIDIVKVEQVSDDFHCRYDKHIKTYEFLVDIGRP | 120 |
| | | QVIHFDLPQ ++VEKLRF LDTQ P+DID+V +E+V+DDFHCRY KH+KTYEFLVD GRP | |
| Sbjct: | 61 | QVIHFDLPQEQEVEKLRFALDTQTPEDIDVVNIEKVADDFHCRYQKHLKTYEFLVDNGRP | 120 |
| Query: | 121 | KNPMMRNYATHYPYPVIIELMQEAIKDLVGTHDFTGFTASGTSVENKVRTIFDAKIQFEA | 180 |
| | | KNPMMR+Y THYPY + I+LMQEAI LVGTHDFTGFTA+GTSV+NKVRTI A + + | |
| Sbjct: | 121 | KNPMMRHYTTHYPYTLNIKLMQEAINGLVGTHDFTGFTAAGTSVQNKVRTITKATVSRDE | 180 |
| Query: | 181 | SKNLLIFTFTGNGFLYKQVRNMVGTLLKIGNGRMPISQIKTILQAKNRDLAGPTAAGNGL | 240 |
| | | + L+FTF+GNGFLYKQVRNMVGTLLKIGNG+MP+ Q+K IL +KNR LAGPT +GNGL | |
| Sbjct: | 181 | KTDFLVFTFSGNGFLYKQVRNMVGTLLKIGNGQMPVEQVKVILSSKNRQLAGPTISGNGL | 240 |
| Query: | 241 | YLKEIIYED | 249 |
| | | YLKEI YE+ | |
| Sbjct: | 241 | YLKEICYEN | 249 |

[12185] Based on this analysis, it was predicted that these proteins and their epitopes could be useful antigens for vaccines or diagnostics.

### EXAMPLE 2231

[12186] A DNA sequence (GBSx2350) was identified in S. agalactiae <SEQ ID 6891> which encodes the amino acid sequence <SEQ ID 6892>. This protein is predicted to be phosphomethypyrimidine kinase (thiD). Analysis of this protein sequence reveals the following:

```
Possible site: 45
>>> Seems to have no N-terminal signal sequence
----- Final Results -----
                            bacterial cytoplasm --- Certainty = 0.2051(Affirmative) < succ>
                              bacterial membrane --- Certainty = 0.0000(Not Clear) < succ>
                                bacterial outside --- Certainty = 0.0000(Not Clear) < succ>
```

[12187] The protein has homology with the following sequences in the GENPEPT database.

| >GP: CAB15828 GB: Z99123 phosphomethylpyrimidine kinase | | | |
|---|---|---|---|
| [Bacillus subtilis] | | | |
| Identities = 95/253 (37%), Positives = 150/253 (58%), Gaps = 13/253 (5%) | | | |
| Query: | 1 | MKTRNVLAISGNDIFSGGGLHADLATYVVNKLHGFVAVTCLTAMSDKG---FEVIPIEAS | 57 |
| | | M L I+G+D G G+ ADL T+ ++G A+T + AM +V PI+ | |
| Sbjct: | 1 | MSMHKALTIAGSDSSGGAGIQADLKTFQEKNVYGMTALTVIVAMDPNNSWNHQVFPIDTD | 60 |
| Query: | 58 | ILKQQLESLKD-VEFGSIKLGLLPNVETAQVVLEFVKSKQECPVVLDPVLVCKENHDL-- | 114 |
| | | ++ QL ++ D + ++K G+LP V+ ++ + +K KQ VV+DPV+VCK +++ | |
| Sbjct: | 61 | TIRAQLATITDGIGVDAMKTGMLPTVDIIELAAKTIKEKQLKNVVIDPVMVCKGANEVLY | 120 |
| Query: | 115 | --EVSQLREQLIAFFPYADVITPNLVEAQLLTGLS-IENLDQMKIAAEKLYDMGAKHVVI | 171 |
| | | LREQL P A VITPNL EA L+G+ ++ +D M AA+K++ +GA++VVI | |
| Sbjct: | 121 | PEHAQALREQLA---PLATVITPNLFEASQLSGMDELKTVDDMIEAAKKIHALGAQYVVI | 177 |
| Query: | 172 | KGGNRLNAEEATDLYYDGERFETYVFPVVDANNT-GAGCTFASSIASQLAMGKNVEDAVK | 230 |
| | | GG +L E+A D+ YDGE E ++D T GAGCTF++++ ++LA G V++A+ | |
| Sbjct: | 178 | TGGGKLKHEKAVDVLYDGETAEVLESEMIDTPYTHGAGCTFSAAVTAELAKGAEVKEAIY | 237 |
| Query: | 231 | MSKGFVYQAIKAS | 243 |
| | | +K F+ AIK S | |
| Sbjct: | 238 | AAKEFITAAIKES | 250 |

[12188] A related DNA sequence was identified in S. pyogenes <SEQ ID 4407> which encodes the amino acid sequence <SEQ ID 4408>. Analysis of this protein sequence reveals the following:

```
Possible site: 36
>>> Seems to have no N-terminal signal sequence
----- Final Results -----
                            bacterial cytoplasm --- Certainty = 0.2029(Affirmative) < succ>
                              bacterial membrane --- Certainty = 0.0000(Not Clear) < succ>
                                bacterial outside --- Certainty = 0.0000(Not Clear) < succ>
```

[12189] An alignment of the GAS and GBS proteins is shown below.

| Identities = 135/252 (53%), Positives = 174/252 (68%) | | | |
|---|---|---|---|
| Query: | 1 | MKTRNVLAISGNDIFSGGGLHADLATYVVNKLHGFVAVTCLTAMSDKGFEVIPIEASILK | 60 |
| | | MKT ++ ISGNDI SGGGL+ADLATY+ L FVAVTCLT S++GF + P+ I + | |
| Sbjct: | 1 | MKTDYIVTISGNDILSGGGLYADLATYIRYDLQAFVAVTCLTTRSEEGFSLFPVAKEIFR | 60 |
| Query: | 61 | QQLESLKDVEFGSIKLGLLPNVETAQVVLEFVKSKQECPVVLDPVLVCKENHDLEVSQLR | 120 |
| | | QL S + +IK+GLLPN E ++VL+F+K PVVLDPVL CKE D+++ LR | |
| Sbjct: | 61 | DQLNSFTNAPISAIKIGLLPNAEMCEIVLDFIKGHLGIPVVLDPVLACKEIDDVKIVPLR | 120 |
| Query: | 121 | EQLIAFFPYADVITPNLVEAQLLTGLSIENLDQMKIAAEKLYDMGAKHVVIKGGNRLNAE | 180 |
| | | ++++ PY V+TPNLVEAQLL+ I +L M+ AA+ Y +GAK VVIKGGNR + + | |
| Sbjct: | 121 | QEILQLLPYVTVVTPNLVEAQLLSQKEIVSLKDMQEAAKYFYQLGAKQVVIKGGNRFSQK | 180 |
| Query: | 181 | EATDLYYDGERFETYVFPVVDANNTGAGCTFASSIASQLAMGKNVEDAVKMSKGFVYQAI | 240 |
| | | +A DL+YDG+ T PV++ NN GAGCTFASSIASQL K +AVK SK VYQAI | |
| Sbjct: | 181 | KAIDLFYDGKEIVTLECPVLEKNNIGAGCTFASSIASQLVKKKTPLEAVKNSKELVYQAI | 240 |
| Query: | 241 | KASDKYGVVQHF | 252 |
| | | SD+YGV Q + | |
| Sbjct: | 241 | LQSDRYGVKQSY | 252 |

[12190] Based on this analysis, it was predicted that these proteins and their epitopes could be useful antigens for vaccines or diagnostics.

### EXAMPLE 2232

[12191] A DNA sequence (GBSx2351) was identified in S. agalactiae <SEQ ID 6893> which encodes the amino acid sequence <SEQ ID 6894>. Analysis of this protein sequence reveals the following:

| Possible site: 45 | | | | |
|---|---|---|---|---|
| >>> Seems to have a cleavable N-term signal seq. | | | | |
| | INTEGRAL | Likelihood = −6.05 | Transmembrane | 97-113 (96-119) |
| | INTEGRAL | Likelihood = −0.22 | Transmembrane | 54-70 (54-70) |

```
----- Final Results -----
                              bacterial membrane --- Certainty = 0.3421(Affirmative) < succ>
                                bacterial outside --- Certainty = 0.0000(Not Clear) < succ>
                            bacterial cytoplasm --- Certainty = 0.0000(Not Clear) < succ>
```

[12192] The protein has homology with the following sequences in the GENPEPT database.

| >GP: BAA30952 GB: AP000007 202aa long hypothetical protein [Pyrococcus | | | |
|---|---|---|---|
| horikoshii] | | | |
| Identities = 48/148 (32%), Positives = 78/148 (52%), Gaps = 9/148 (6%) | | | |
| Query: | 10 | VQLAIVTAISIVLGMFISIPTPTGFLTLLDAGIFFAAFYFGKKEGAVVGALAGFLIDLLK | 69 |
| | | V A+VTA+++V+ I IP G+L D I + FG G G + DLL | |
| Sbjct: | 49 | VMAALVTAMTMVIR--IPIPASQGYLNFGDIMIMLTSVLFGPLVGGFAGGVGSAFADLL- | 105 |
| Query: | 70 | GYPNWMFFSLLIHGTQGYLAGLPGR------RRLLGLISATLVMVLGYAIASGLMYGWGA | 123 |
| | | GYP+W F+L+I GT+G + G + + LLG + VMV+GY + ++YG | |
| Sbjct: | 106 | GYPSWALFTLVIKGTEGIIVGYFSKGEANYGKILLGTVLGGSVMVIGYVSVAYVLYGPAG | 165 |
| Query: | 124 | VLPDIPGNIMQNMVGMVVGFALNKSLER | 151 |
| | | + ++ +I+Q + G+V+G L L++ | |
| Sbjct: | 166 | AIGELYNDIVQAVSGIVIGGGLGYILKK | 193 |

[12193] A related DNA sequence was identified in S. pyogenes <SEQ ID 6895> which encodes the amino acid sequence <SEQ ID 6896>. Analysis of this protein sequence reveals the following:

| Possible site: 54 | | | | |
|---|---|---|---|---|
| >>> Seems to have a cleavable N-term signal seq. | | | | |
| | INTEGRAL | Likelihood = −4.62 | Transmembrane | 98-114 (97-119) |
| | INTEGRAL | Likelihood = −0.00 | Transmembrane | 135-151 (135-151) |

```
----- Final Results -----
                              bacterial membrane --- Certainty = 0.2848(Affirmative) < succ>
                                bacterial outside --- Certainty = 0.0000(Not Clear) < succ>
                            bacterial cytoplasm --- Certainty = 0.0000(Not Clear) < succ>
```

[12194] The protein has homology with the following sequences in the databases:

| >GP: CAB49310 GB: AJ248284 hypothetical protein [Pyrococcus abyssi] | | | |
|---|---|---|---|
| Identities = 42/145 (28%), Positives = 73/145 (49%), Gaps = 10/145 (6%) | | | |
| Query: | 7 | RQMSLTGILTALVVVLGRFVMLPTPT--GFLTLLDAGIYAVSFSFGSAQGAIVGGLSGFL | 64 |
| | | R ++++ + ALV + + +P P G+L D I V+ FG G GG+ + | |
| Sbjct: | 39 | RTVAISAVAAALVTAMTMVIRIPIPASQGYLNFGDIMIMLVAVLFGPLVGGFAGGVGSAI | 98 |
| Query: | 65 | IDLVAGYPQWMFHSLIAHSVQGYFAGWRGR------KRWLGVVIGSFIMIFWYFLGSLML | 118 |
| | | DL+ GYP W +LI +G G+ + K +G V+G FIM+ Y S +L | |
| Sbjct: | 99 | ADLI-GYPSWALFTLIIKGSEGLVVGYFSKGEPNYSKILIGTVLGGFIMVLGYVSVSYVL | 157 |
| Query: | 119 | GYGLSGSLAGIWGNVMQNTLGLFVG | 143 |
| | | YG +G+++ ++ + +Q G+ +G | |
| Sbjct: | 158 | -YGPAGAISELYNDTVQAVSGIVIG | 181 |

[12195] An alignment of the GAS and GBS proteins is shown below.

| Identities = 77/155 (49%), Positives = 106/155 (67%), Gaps = 1/155 (0%) | | | |
|---|---|---|---|
| Query: | 1 | MRKEKTSQLVQLAIVTAISIVLGMFISIPTFTGFLTLLDAGIFFAAFYFGKKEGAVVGAL | 60 |
| | | M+ K Q+ I+TA+ +VLG F+ +PTPTGFLTLLDAGI+ +F FG +GA+VG L | |
| Sbjct: | 1 | MQNSKIRQMSLTGILTALVVVLGRFVMLPTPTGFLTLLDAGIYAVSFSFGSAQGAIVGGL | 60 |
| Query: | 61 | AGFLIDLLKGYPNWMFFSLLIHGTQGYLAGLPGRRRLLGLISATLVMVLGYAIASGLM-Y | 119 |
| | | +GFLIDL+ GYP WMF SL+ H QGY AG GR+R LG++ + +M+ Y + S ++ Y | |
| Sbjct: | 61 | SGFLIDLVAGYPQWMFHSLIAHSVQGYFAGWRGRKRWLGVVIGSFIMIFWYFLGSLMLGY | 120 |
| Query: | 120 | GWGAVLPDIPGNIMQNMVGMVVGFALNKSLERVKK | 154 |
| | | G L I GN+MQN +G+ VGF + K++ R KK | |
| Sbjct: | 121 | GLSGSLAGIWGNVMQNTLGLFVGFIIFKAILRQKK | 155 |

[12196] Based on this analysis, it was predicted that these proteins and their epitopes could be useful antigens for vaccines or diagnostics.

### EXAMPLE 2233

[12197] A DNA sequence (GBSx2352) was identified in S. agalactiae <SEQ ID 6897> which encodes the amino acid sequence <SEQ ID 6898>. Analysis of this protein sequence reveals the following:

```
Possible site: 43
>>> Seems to have no N-terminal signal sequence
----- Final Results -----
                            bacterial cytoplasm --- Certainty = 0.0881(Affirmative) < succ>
                              bacterial membrane --- Certainty = 0.0000(Not Clear) < succ>
                                bacterial outside --- Certainty = 0.0000(Not Clear) < succ>
```

[12198] The protein has homology with the following sequences in the GENPEPT database.

| >GP: CAB15708 GB: Z99122 alternate gene name: ipc-33d [Bacillus subtilis] | | | |
|---|---|---|---|
| Identities = 91/176 (51%), Positives = 115/176 (64%) | | | |
| Query: | 6 | NKLKQETKAIVVDIIERSALKKGQIFVLGLSSSEVSGGLIGKNSSSEIGEIIVEVILKEL | 65 |
| | | N+LKQ K ++ + +++ LK+ Q+FVLG S+SEV+G IG + S +I E I + + | |
| Sbjct: | 2 | NELKQTWKTMLSEFQDQAELKQDQLFVLGCSTSEVAGSRIGTSGSVDIAESIYSGLAELR | 61 |
| Query: | 66 | HSRGIYLAVQGCEHVNRALVVEAELAERQQLEVVNVVPNLHAGGSGQVAAFKLMTSPVEV | 125 |
| | | GI+LA Q CEH+NRALVVEAE A+ +L V+ VP AGG+ AFK M SPV V | |
| Sbjct: | 62 | EKTGIHLAFQCCEHLNRALVVEAETAKLFRLPTVSAVPVPKAGGAMASYAFKQMKSPVLV | 121 |
| Query: | 126 | EEIVAHAGIDIGDTSIGMHIKRVQVPLIPISRELGGAHVTALASRPKLIGGARAGY | 181 |
| | | E I A AGIDIGDT IGMH+K V VP+ LG AHVT +RPKLIGG RA Y | |
| Sbjct: | 122 | ETIQADAGIDIGDTFIGMHLKPVAVPVRVSQNSLGSAHVTLARTRPKLIGGVRAVY | 177 |

[12199] A related DNA sequence was identified in S. pyogenes <SEQ ID 6899> which encodes the amino acid sequence <SEQ ID 6900>. Analysis of this protein sequence reveals the following:

```
Possible site: 40
>>> Seems to have no N-terminal signal sequence
----- Final Results -----
                            bacterial cytoplasm --- Certainty = 0.2166(Affirmative) < succ>
                              bacterial membrane --- Certainty = 0.0000(Not Clear) < succ>
                                bacterial outside --- Certainty = 0.0000(Not Clear) < succ>
```

[12200] An alignment of the GAS and GBS proteins is shown below.

| Identities = 132/183 (72%), Positives = 161/183 (87%) | | | |
|---|---|---|---|
| Query: | 6 | NKLKQETKAIVVDIIERSALKKGQIFVLGLSSSEVSGGLIGKNSSSEIGEIIVEVILKEL | 65 |
| | | N L+++T+ IV+D++ERSA++ G +FVLGLSSSE+ G IGK SS E+G+I+VEV+L EL | |
| Sbjct: | 3 | NNLEKQTREIVIDVVERSAIQPGNLFVLGLSSSEILGSRIGKQSSLEVGQIVVEVVLDEL | 62 |
| Query: | 66 | HSRGIYLAVQGCEHVNRALVVEAELAERQQLEVVNVVPNLHAGGSGQVAAFKLMTSPVEV | 125 |
| | | + RG++LAVQGCEHVNRALVVE +AE +QLE+VNVVPNLHAGGS Q+AAF+LM+ PVEV | |
| Sbjct: | 63 | NKRGVHLAVQGCEHVNRALVVERHVAESKQLEIVNVVPNLHAGGSAQMAAFQLMSDPVEV | 122 |
| Query: | 126 | EEIVAHAGIDIGDTSIGMHIKRVQVPLIPISRELGGAHVTALASRPKLIGGARAGYTSDP | 185 |
| | | EE++AHAG+DIGDT+IGMHIKRVQ+PLIP RELGGAHVTALASRPKLIGGARA Y D | |
| Sbjct: | 123 | EEVIAHAGLDIGDTAIGMHIKRVQIPLIPCQRELGGAHVTALASRPKLIGGARADYNMDI | 182 |
| Query: | 186 | IRK | 188 |
| | | IRK | |
| Sbjct: | 183 | IRK | 185 |

[12201] Based on this analysis, it was predicted that these proteins and their epitopes could be useful antigens for vaccines or diagnostics.

### EXAMPLE 2234

[12202] A DNA sequence (GBSx2353) was identified in S. agalactiae <SEQ ID 6901> which encodes the amino acid sequence <SEQ ID 6902>. Analysis of this protein sequence reveals the following:

| Possible site: 56 | | | | |
|---|---|---|---|---|
| >>> Seems to have no N-terminal signal sequence | | | | |
| | INTEGRAL | Likelihood = −11.25 | Transmembrane | 21-37 (13-46) |
| | INTEGRAL | Likelihood = −4.30 | Transmembrane | 78-94 (76-113) |
| | INTEGRAL | Likelihood = −2.07 | Transmembrane | 96-112 (95-113) |

```
----- Final Results -----
                              bacterial membrane --- Certainty = 0.5501(Affirmative) < succ>
                                bacterial outside --- Certainty = 0.0000(Not Clear) < succ>
                            bacterial cytoplasm --- Certainty = 0.0000(Not Clear) < succ>
```

[12203] The protein has homology with the following sequences in the GENPEPT database.

| >GP: BAB06385 GB: AP001516 unknown conserved protein [Bacillus halodurans] | | | |
|---|---|---|---|
| Identities = 105/261 (40%), Positives = 150/261 (57%), Gaps = 2/261 (0%) | | | |
| Query: | 12 | NVEEVLFTFFTKLIS--ILLLIIAFVIVRQVINYLFEKTVNRSLAFSRQKVARQKTLAKL | 69 |
| | | N+ F T +I+ +L+ +IAF+IVR + + + R ++ R TL KL | |
| Sbjct: | 7 | NITSGAFLASTFIIAGKVLVAVIAFLIVRAIGKRIISNSFARMAKNNQLSSGRVVTLEKL | 66 |
| Query: | 70 | SHNVLNYTLYFFLFYWILSILGVPISSLLAGAGIAGVAIGLGAQGFLSDVVNGFFILLEN | 129 |
| | | S N +YTL F +L+I G+ S+L+AGAGI G+AIG GAQG +SD+V GFFILLE | |
| Sbjct: | 67 | SLNAFSYTLMFIFATTLLTIFGLNPSALIAGAGIVGLAIGFGAQGLVSDIVTGFFILLEK | 126 |
| Query: | 130 | QFDVGDIINVGTVSGTVTNVGIRTTQIHDFDGTLHFIPNRNITIVSNKSRSNMRAQIDIP | 189 |
| | | Q DVGD + G V G V VG+RT I FDGTLH+IPNRNI VSN SR NMRA +DI | |
| Sbjct: | 127 | QIDVGDYVTAGGVDGIVEEVGLRTALIRGFDGTLHYIPNRNIANVSNHSRGNMRALVDIS | 186 |
| Query: | 190 | LFVHTNLDQISDIVTKINEEYVSKHPAIVGEPTVFGPTTNANGQFVYRINIFTQNGAQFD | 249 |
| | | + + N+D+ ++ K+ ++ + I+ P V G + V RI T+N Q+ | |
| Sbjct: | 187 | ISYNDNIDEAISVMQKVCDQLAEQDERIIEGPDVIGVQNLGDSDVVIRIIAKTENMEQWS | 246 |
| Query: | 250 | IYAEFYKLYQKAILEEGIDLP | 270 |
| | | + K ++A+ I++P | |
| Sbjct: | 247 | VERLLRKQLKEALEAHNIEIP | 267 |

[12204] A related DNA sequence was identified in S. pyogenes <SEQ ID 6903> which encodes the amino acid sequence <SEQ ID 6904>. Analysis of this protein sequence reveals the following:

| Possible site: 54 | | | | |
|---|---|---|---|---|
| >>> Seems to have no N-terminal signal sequence | | | | |
| | INTEGRAL | Likelihood = −8.49 | Transmembrane | 24-40 (15-45) |
| | INTEGRAL | Likelihood = −4.83 | Transmembrane | 78-94 (73-99) |
| | INTEGRAL | Likelihood = −2.07 | Transmembrane | 96-112 (95-113) |

```
----- Final Results -----
                              bacterial membrane --- Certainty = 0.4397(Affirmative) < succ>
                                bacterial outside --- Certainty = 0.0000(Not Clear) < succ>
                            bacterial cytoplasm --- Certainty = 0.0000(Not Clear) < succ>
```

[12205] The protein has homology with the following sequences in the databases:

| >GP: BAB06385 GB: AP001516 unknown conserved protein | | | |
|---|---|---|---|
| [Bacillus halodurans] | | | |
| Identities = 104/249 (41%), Positives = 151/249 (59%), Gaps = 4/249 (1%) | | | |
| Query: | 22 | KKLVSLIILLLFFAILKRVTNYLFEKTINKSFAYSRQSEARKKTLSKLTHNILNYLLYFL | 81 |
| | | K LV++I L+ AI KR+ + F + + + S R TL KL+ N +Y L F+ | |
| Sbjct: | 23 | KVLVAVIAFLIVRAIGKRIISNSFARMAKNN----QLSSGRVVTLEKLSLNAFSYTLMFI | 78 |
| Query: | 82 | LIYWILSLFGIPVSSLLAGAGIAGVAIGLGAQGFLSDVVNGFFILFENQFEVGDNVTISD | 141 |
| | | +L++FG+ S+L+AGAGI G+AIG GAQG +SD+V GFFIL E Q +VGD VT | |
| Sbjct: | 79 | FATTLLTIFGLNPSALIAGAGIVGLAIGFGAQGLVSDIVTGFFILLEKQIDVGDYVTAGG | 138 |
| Query: | 142 | IEGSVFGVGIRTTQIRGFDGTLHFIPNRSITVVSNKSRGNMRALIEIPLYSTVNLSQVTR | 201 |
| | | ++G V VG+RT IRGFDGTLH+IPNR+I VSN SRGNMRAL++I + N+ + | |
| Sbjct: | 139 | VDGIVEEVGLRTALIRGFDGTLHYIPNRNIANVSNHSRGNMRALVDISISYNDNIDEAIS | 198 |
| Query: | 202 | IIDEVNQKELPNHPQIVGKPNILGPQNNSNGQFTFRIAIFTENGEQFKIYHTFYRLYQEA | 261 |
| | | ++ +V + +I+ P+++G QN + RI TEN EQ+ + + +EA | |
| Sbjct: | 199 | VMQKVCDQLAEQDERIIEGPDVIGVQNLGDSDVVIRIIAKTENMEQWSVERLLRKQLKEA | 258 |
| Query: | 262 | LLKEGIQLP | 270 |
| | | L I++P | |
| Sbjct: | 259 | LEAHNIEIP | 267 |

[12206] An alignment of the GAS and GBS proteins is shown below.

| Identities = 164/265 (61%), Positives = 215/265 (80%) | | | |
|---|---|---|---|
| Query: | 7 | FIDHLNVEEVLFTFFTKLISILLLIIAFVIVRQVINYLFEKTVNRSLAFSRQKVARQKTL | 66 |
| | | +++ ++E + T F KL+S+++L++ F I+++V NYLFEKT+N+S A+SRQ AR+KTL | |
| Sbjct: | 7 | YLEQSHIENIGLTIFKKLVSLIILLLFFAILKRVTNYLFEKTINKSFAYSRQSEARKKTL | 66 |
| Query: | 67 | AKLSHNVLNYTLYFFLFYWILSILGVPISSLLAGAGIAGVAIGLGAQGFLSDVVNGFFIL | 126 |
| | | +KL+HN+LNY LYF L YWILS+ G+P+SSLLAGAGIAGVAIGLGAQGFLSDVVNGFFIL | |
| Sbjct: | 67 | SKLTHNILNYLLYFLLIYWILSLFGIPVSSLLAGAGIAGVAIGLGAQGFLSDVVNGFFIL | 126 |
| Query: | 127 | LENQFDVGDIINVGTVSGTVTNVGIRTTQIHDFDGTLHFIPNRNITIVSNKSRSNMRAQI | 186 |
| | | ENQF+VGD + + + G+V VGIRTTQI FDGTLHFIPNR+IT+VSNKSR NMRA I | |
| Sbjct: | 127 | FENQFEVGDNVTISDIEGSVFGVGIRTTQIRGFDGTLHFIPNRSITVVSNKSRGNMRALI | 186 |
| Query: | 187 | DIPLFVHTNLDQISDIVTKINEEYVSKHPAIVGEPTVFGPTTNANGQFVYRINIFTQNGA | 246 |
| | | +IPL+ NL Q++ I+ ++N++ + HP IVG+P + GP N+NGQF +RI IFT+NG | |
| Sbjct: | 187 | EIPLYSTVNLSQVTRIIDEVNQKELPNHPQIVGKPNILGPQNNSNGQFTFRIAIFTENGE | 246 |
| Query: | 247 | QFDIYAEFYKLYQKAILEEGIDLPT | 271 |
| | | QF IY FY+LYQ+A+L+EGI LPT | |
| Sbjct: | 247 | QFKIYHTFYRLYQEALLKEGIQLPT | 271 |

[12207] Based on this analysis, it was predicted that these proteins and their epitopes could be useful antigens for vaccines or diagnostics.

### EXAMPLE 2235

[12208] A DNA sequence (GBSx2354) was identified in S. agalactiae <SEQ ID 6905> which encodes the amino acid sequence <SEQ ID 6906>. This protein is predicted to be RopA (tig). Analysis of this protein sequence reveals the following:

```
Possible site: 20
>>> Seems to have no N-terminal signal sequence
----- Final Results -----
                            bacterial cytoplasm --- Certainty = 0.1785(Affirmative) < succ>
                              bacterial membrane --- Certainty = 0.0000(Not Clear) < succ>
                                bacterial outside --- Certainty = 0.0000(Not Clear) < succ>
```

[12209] A related GBS nucleic acid sequence <SEQ ID 9283> which encodes amino acid sequence <SEQ ID 9284> was also identified.

[12210] A related DNA sequence was identified in S. pyogenes <SEQ ID 6907> which encodes the amino acid sequence <SEQ ID 6908>. Analysis of this protein sequence reveals the following:

```
Possible site: 49
>>> Seems to have no N-terminal signal sequence
----- Final Results -----
                            bacterial cytoplasm --- Certainty = 0.0776(Affirmative) < succ>
                              bacterial membrane --- Certainty = 0.0000(Not Clear) < succ>
                                bacterial outside --- Certainty = 0.0000(Not Clear) < succ>
```

[12211] An alignment of the GAS and GBS proteins is shown below.

| Identities = 303/354 (85%), Positives = 337/354 (94%) | | | |
|---|---|---|---|
| Query: | 1 | MSTSFENKATNRGIITFTISQDEIKPALDQAFNKVKKDLNVPGFRKGHMPRTVFNQKFGE | 60 |
| | | MSTSFENKATNRG+ITFTISQD+IKPALD+AFNK+KKDLN PGFRKGHMPR VFNQKFGE | |
| Sbjct: | 30 | MSTSFENKATNRGVITFTISQDKIKPALDKAFNKIKKDLNAPGFRKGHMPRPVFNQKFGE | 89 |
| Query: | 61 | EALYENALNLVLPKAYEAAVAELGLDVVAQPKIDVVSMEKGQDWKLTAEVVTKPEVKLGD | 120 |
| | | E LYE+ALN+VLP+AYEAAV ELGLDVVAQPKIDVVSMEKG++W L+AEVVTKPEVKLGD | |
| Sbjct: | 90 | EVLYEDALNIVLPEAYEAAVTELGLDVVAQPKIDVVSMEKGKEWTLSAEVVTKPEVKLGD | 149 |
| Query: | 121 | YKDLSVEVDASKEVSDEEVDAKVERERNNLAELTVKDGEAAQGDTVVIDFVGSVDGVEFD | 180 |
| | | YK+L VEVDASKEVSDE+VDAK+ERER NLAEL +KDGEAAQGDTVVIDFVGSVDGVEFD | |
| Sbjct: | 150 | YKNLVVEVDASKEVSDEDVDAKIERERQNLAELIIKDGEAAQGDTVVIDFVGSVDGVEFD | 209 |
| Query: | 181 | GGKGDNFSLELGSGQFIPGFEEQLVGSKAGQTVDVNVTFPEDYQAEDLAGKDAKFVTTIH | 240 |
| | | GGKGDNFSLELGSGQFIPGFE+QLVG+KAG V+VNVTFPE YQAEDLAGK AKF+TTIH | |
| Sbjct: | 210 | GGKGDNFSLELGSGQFIPGFEDQLVGAKAGDEVEVNVTFPESYQAEDLAGKAAKFMTTIH | 269 |
| Query: | 241 | EVKTKEVPALDDELAKDIDDEVETLDELKAKYRKELESAKEIAFDDAVEGAAIELAVANA | 300 |
| | | EVKTKEVP LDDELAKDID++V+TL++LK KYRKELE+A+E A+DDAVEGAAIELAVANA | |
| Sbjct: | 270 | EVKTKEVPELDDELAKDIDEDVDTLEDLKVKYRKELEAAQETAYDDAVEGAAIELAVANA | 329 |
| Query: | 301 | EIVELPEEMVHDEVHRAMNEFMGNMQRQGISPEMYFQLTGTTEEDLHKQYQADA | 354 |
| | | EIV+LPEEM+H+EV+R++NEFMGNMQRQGISPEMYFQLTGTT+EDLH QY A+A | |
| Sbjct: | 330 | EIVDLPEEMIHEEVNRSVNEFMGNMQRQGISPEMYFQLTGTTQEDLHNQYSAEA | 383 |

[12212] Based on this analysis, it was predicted that these proteins and their epitopes could be useful antigens for vaccines or diagnostics.

### EXAMPLE 2236

[12213] A DNA sequence (GBSx2355) was identified in S. agalactiae <SEQ ID 6909> which encodes the amino acid sequence <SEQ ID 6910>. This protein is predicted to be galactose-6-phosphate isomerase laca subunit (rpiB). Analysis of this protein sequence reveals the following:

```
Possible site: 26
>>> Seems to have no N-terminal signal sequence
----- Final Results -----
                            bacterial cytoplasm --- Certainty = 0.3491(Affirmative) < succ>
                              bacterial membrane --- Certainty = 0.0000(Not Clear) < succ>
                                bacterial outside --- Certainty = 0.0000(Not Clear) < succ>
```

[12214] The protein has homology with the following sequences in the GENPEPT database.

| >GP: AAA25177 GB: M60447 galactose 6-P isomerase [Lactococcus lactis] | | | |
|---|---|---|---|
| Identities = 92/141 (65%), Positives = 115/141 (81%) | | | |
| Query: | 1 | MTIIIGADAHGVELKEVIRQHLTSLGKEIIDLTDTSKDFVDNTLAIVAKVNQKEDNLGIM | 60 |
| | | M I++GAD G LK+V++ L G E+ID+T +DFVD TLA+ ++VN+ E NLGI+ | |
| Sbjct: | 1 | MAIVVGADLKGTRLKDVVKNFLVEEGFEVIDVTKDGQDFVDVTLAVASEVNKDEQNLGIV | 60 |
| Query: | 61 | VDAYGVGPFMVATKVKGMIAAEVSDERSAYMTRAHNNARMITLGSEIVGPGVAKHIVEGF | 120 |
| | | +DAYG GPFMVATK+KGM+AAEVSDERSAYMTR HNNARMIT+G+EIVG +AK+I + F | |
| Sbjct: | 61 | IDAYGAGPFMVATKIKGMVAAEVSDERSAYMTRGHNNARMITVGAEIVGDELAKNIAKAF | 120 |
| Query: | 121 | VDGTYDAGRHQIRVDMLNKMC | 141 |
| | | V+G YD GRHQ+RVDMLNKMC | |
| Sbjct: | 121 | VNGKYDGGRHQVRVDMLNKMC | 141 |

[12215] A related DNA sequence was identified in S. pyogenes <SEQ ID 6911> which encodes the amino acid sequence <SEQ ID 6912>. Analysis of this protein sequence reveals the following:

```
Possible site: 45
>>> Seems to have no N-terminal signal sequence
----- Final Results -----
                            bacterial cytoplasm --- Certainty = 0.3224(Affirmative) < succ>
                              bacterial membrane --- Certainty = 0.0000(Not Clear) < succ>
                                bacterial outside --- Certainty = 0.0000(Not Clear) < succ>
```

[12216] An alignment of the GAS and GBS proteins is shown below.

| Identities = 101/140 (72%), Positives = 117/140 (83%) | | | |
|---|---|---|---|
| Query: | 1 | MTIIIGADAHGVELKEVIRQHLTSLGKEIIDLTDTSKDFVDNTLAIVAKVNQKEDNLGIM | 60 |
| | | M II+GADAHG LKE+I+ L G +IID+TD + DF+DNTLA+ VN+ E LGIM | |
| Sbjct: | 1 | MAIILGADAHGNALKELIKSFLQEEGYDIIDVTDINSDFIDNTLAVAKAVNEAEGRLGIM | 60 |
| Query: | 61 | VDAYGVGPFMVATKVKGMIAAEVSDERSAYMTRAHNNARMITLGSEIVGPGVAKHIVEGF | 120 |
| | | VDAYG GPFMVATK+KGM+AAEVSDERSAYMTR HNNARMIT+G+EIVGP +AK+IV+GF | |
| Sbjct: | 61 | VDAYGAGPFMVATKLKGMVAAEVSDERSAYMTRGHNNARMITIGAEIVGPELAKNIVKGF | 120 |
| Query: | 121 | VDGTYDAGRHQIRVDMLNKM | 140 |
| | | V G YD GRHQIRVDMLNKM | |
| Sbjct: | 121 | VTGPYDGGRHQIRVDMLNKM | 140 |

[12217] Based on this analysis, it was predicted that these proteins and their epitopes could be useful antigens for vaccines or diagnostics.

### EXAMPLE 2237

[12218] A DNA sequence (GBSx2356) was identified in S. agalactiae <SEQ ID 6913> which encodes the amino acid sequence <SEQ ID 6914>. This protein is predicted to be galactose-6-phosphate isomerase lacb subunit (rpiB). Analysis of this protein sequence reveals the following:

```
Possible site: 35
>>> Seems to have no N-terminal signal sequence
----- Final Results -----
                            bacterial cytoplasm --- Certainty = 0.2511(Affirmative) < succ>
                              bacterial membrane --- Certainty = 0.0000(Not Clear) < succ>
                                bacterial outside --- Certainty = 0.0000(Not Clear) < succ>
```

[12219] A related GBS nucleic acid sequence <SEQ ID 10189> which encodes amino acid sequence <SEQ ID 10190> was also identified.

[12220] The protein has homology with the following sequences in the GENPEPT database.

| >GP: AAA25178 GB: M60447 galactose 6-P isomerase [Lactococcus lactis] | | | |
|---|---|---|---|
| Identities = 138/171 (80%), Positives = 157/171 (91%) | | | |
| Query: | 10 | MKIAVGCDHIVTYDKIAVVDYLKTKGYEVIDCGTYDNIRTHYPIYGKKVGEAVASGKADL | 69 |
| | | M+IA+GCDHIVT K+AV ++LK+KGYEV+D GTYD++RTHYPIYGKKVGEAV SG+ADL | |
| Sbjct: | 1 | MRIAIGCDHIVTDVKMAVSEFLKSKGYEVLDFGTYDHVRTHYPIYGKKVGEAVVSGQADL | 60 |
| Query: | 70 | GVCICGTGVGINNAVNKVPGIRSALVRDLTSAIYAKEELNANVIGFGGKITGGLLMTDII | 129 |
| | | GVCICGTGVGINNAVNKVPG+RSALVRD+TSA+YAKEELNANVIGFGG ITGGLLM DII | |
| Sbjct: | 61 | GVCICGTGVGINNAVNKVPGVRSALVRDMTSALYAKEELNANVIGFGGMITGGLLMNDII | 120 |
| Query: | 130 | EAFIRAKYKPTKENKVLIEKIAEVETHNAHQEENDFFTEFLDKWNRGEYHD | 180 |
| | | EAFI A+YKPT+ENK LI KI VETHNAHQ + +FFTEFL+KW+RGEYHD | |
| Sbjct: | 121 | EAFIEAEYKPTEENKKLIAKIEHVETHNAHQADEEFFTEFLEKWDRGEYHD | 171 |

[12221] A related DNA sequence was identified in S. pyogenes <SEQ ID 6915> which encodes the amino acid sequence <SEQ ID 6916>. Analysis of this protein sequence reveals the following:

```
Possible site: 57
>>> Seems to have no N-terminal signal sequence
----- Final Results -----
                            bacterial cytoplasm --- Certainty = 0.3048(Affirmative) < succ>
                              bacterial membrane --- Certainty = 0.0000(Not Clear) < succ>
                                bacterial outside --- Certainty = 0.0000(Not Clear) < succ>
```

[12222] An alignment of the GAS and GBS proteins is shown below.

| Identities = 136/171 (79%), Positives = 160/171 (93%) | | | |
|---|---|---|---|
| Query: | 10 | MKIAVGCDHIVTYDKIAVVDYLKTKGYEVIDCGTYDNIRTHYPIYGKKVGEAVASGKADL | 69 |
| | | MKIA+GCDHIVT +K+AV D+LK+KGY+VIDCGTYD+ RTHYPI+GKKVGEAV +G+ADL | |
| Sbjct: | 2 | MKIAIGCDHIVTNEKMAVSDFLKSKGYDVIDCGTYDHTRTHYPIFGKKVGEAVVNGQADL | 61 |
| Query: | 70 | GVCICGTGVGINNAVNKVPGIRSALVRDLTSAIYAKEELNANVIGFGGKITGGLLMTDII | 129 |
| | | GVCICGTGVGINNAVNKVPGIRSALVRD+T+A+YAKEELNANVIGFGGKITG LLM DII | |
| Sbjct: | 62 | GVCICGTGVGINNAVNKVPGIRSALVRDMTTALYAKEELNANVIGFGGKITGELLMCDII | 121 |
| Query: | 130 | EAFIRAKYKPTKENKVLIEKIAEVETHNAHQEENDFFTEFLDKWNRGEYHD | 180 |
| | | +AFI+A+YK T+ENK LI KIA +E+H+A+QE+ DFFTEFL+KW+RGEYHD | |
| Sbjct: | 122 | DAFIKAEYKETEENKKLIAKIAHLESHHANQEDPDFFTEFLEKWDRGEYHD | 172 |

[12223] Based on this analysis, it was predicted that these proteins and their epitopes could be useful antigens for vaccines or diagnostics.

### EXAMPLE 2238

[12224] A DNA sequence (GBSx2357) was identified in S. agalactiae <SEQ ID 6917> which encodes the amino acid sequence <SEQ ID 6918>. Analysis of this protein sequence reveals the following:

```
Possible site: 24
>>> Seems to have an uncleavable N-term signal seq
----- Final Results -----
                              bacterial membrane --- Certainty = 0.0000(Not Clear) < succ>
                                bacterial outside --- Certainty = 0.0000(Not Clear) < succ>
                            bacterial cytoplasm --- Certainty = 0.0000(Not Clear) < succ>
```

[12225] A related GBS nucleic acid sequence <SEQ ID 10187> which encodes amino acid sequence <SEQ ID 10188> was also identified.

[12226] The protein has homology with the following sequences in the GENPEPT database.

| >GP: AAA25179 GB: M60447 tagatose 6-P kinase [Lactococcus lactis] | | | |
|---|---|---|---|
| Identities = 192/310 (61%), Positives = 236/310 (75%) | | | |
| Query: | 11 | MILTVTLNPSIDISYCLENFNMDTVNRVTDVSKTPGGKGLNVTRVLSQLGDNVVATGLLG | 70 |
| | | MILTVTLNPS+DISY LE +DTVNRV DVSKT GGKGLNVTRVL + GD V ATG LG | |
| Sbjct: | 1 | MILTVTLNPSVDISYPLETLKIDTVNRVKDVSKTAGGKGLNVTRVLYESGDKVTATGFLG | 60 |
| Query: | 71 | GDFGDFIRSGLDALEIRHQFLSIGGETRHCIAVLHEGQQTEILEKGPHITKDEADAFLNH | 130 |
| | | G G+FI S L+ + F I G TR+CIA+LHEG QTEILE+GP I+ +EA+ FL+H | |
| Sbjct: | 61 | GKIGEFIESELEQSPVSPAFYKISGNTRNCIAILHEGNQTEILEQGPTISHEEAEGFLDH | 120 |
| Query: | 131 | LKLIFDAATIITVSGSLPKGLPSDYYARLISLANHFNKKVVLDCSGEALRSVLKSSAKPT | 190 |
| | | + + ++T+SGSLP GLP+DYY +LI LA+ VVLDCSG L +VLKSSAKPT | |
| Sbjct: | 121 | YSNLIKQSEVVTISGSLPSGLPNDYYEKLIQLASDEGVAVVLDCSGAPLETVLKSSAKPT | 180 |
| Query: | 191 | VIKPNLEELTQLIGKPISYSLDELKSTLQQDLFRGIDWVIVSLGARGAFAKHGNHYYQVT | 250 |
| | | IKPN EEL+QL+GK ++ ++ELK L++ LF GI+W++VSLG GAFAKHG+ +Y+V | |
| Sbjct: | 181 | AIKPNNEELSQLLGKEVTKDIEELKDVLKESLFSGIEWIVVSLGRNGAFAKHGDVFYKVD | 240 |
| Query: | 251 | IPKIEVINPVGSGDATVAGIASALEHQLDDTNLLKRANVLGMLNAQETLTGHINLTYYQE | 310 |
| | | IP I V+NPVGSGD+TVAGIASAL + D +LLK A LGMLNAQET+TGH+N+T Y+ | |
| Sbjct: | 241 | IPDIPVVNPVGSGDSTVAGIASALNSKKSDADLLKHAMTLGMLNAQETMTGHVNMTNYET | 300 |
| Query: | 311 | LISQIQVKEV | 320 |
| | | L SQI VKEV | |
| Sbjct: | 301 | LNSQIGVKEV | 310 |

[12227] A related DNA sequence was identified in S. pyogenes <SEQ ID 6919> which encodes the amino acid sequence <SEQ ID 6920>. Analysis of this protein sequence reveals the following:

```
Possible site: 14
>>> Seems to have no N-terminal signal sequence
----- Final Results -----
                            bacterial cytoplasm --- Certainty = 0.1178(Affirmative) < succ>
                              bacterial membrane --- Certainty = 0.0000(Not Clear) < succ>
                                bacterial outside --- Certainty = 0.0000(Not Clear) < succ>
```

[12228] An alignment of the GAS and GBS proteins is shown below.

| Identities = 184/310 (59%), Positives = 232/310 (74%), Gaps = 1/310 (0%) | | | |
|---|---|---|---|
| Query: | 11 | MILTVTLNPSIDISYCLENFNMDTVNRVTDVSKTPGGKGLNVTRVLSQLGDNVVATGLLG | 70 |
| | | +ILTVTLNP+ID+SY L+ DTVNRV DV+KTPGGKGLNV+RVL++ G+ V ATG +G | |
| Sbjct: | 1 | VILTVTLNPAIDVSYPLDELKCDTVNRVVDVTKTPGGKGLNVSRVLNEFGETVKATGCVG | 60 |
| Query: | 71 | GDFGDFIRSGLDALEIRHQFLSIGGETRHCIAVLHEGQQTEILEKGPHITKDEADAFLNH | 130 |
| | | G+ GDFI + L I +F I G+TR CIA+LHEG QTEILEKGP ++ DE D F +H | |
| Sbjct: | 61 | GESGDFIINHLPD-SILSRFYKISGDTRTCIAILHEGNQTEILEKGPMLSVDEIDGFTHH | 119 |
| Query: | 131 | LKLIFDAATIITVSGSLPKGLPSDYYARLISLANHFNKKVVLDCSGEALRSVLKSSAKPT | 190 |
| | | K + + ++T+SGSLP G+P DYY +LI +AN KK VLDCSG AL +VLK +KPT | |
| Sbjct: | 120 | FKYLLNDVDVVTLSGSLPAGMPDDYYQKLIKIANLNGKKTVLDCSGNALEAVLKGDSKPT | 179 |
| Query: | 191 | VIKPNLEELTQLIGKPISYSLDELKSTLQQDLFRGIDWVIVSLGARGAFAKHGNHYYQVT | 250 |
| | | VIKPNLEEL+QL+GK ++ D LK LQ +LF GI+W+IVSLGA G FAKH + +Y V | |
| Sbjct: | 180 | VIKPNLEELSQLLGKEMTKDFDALKEVLQDELFDGIEWIIVSLGADGVFAKHKDTFYNVD | 239 |
| Query: | 251 | IPKIEVINPVGSGDATVAGIASALEHQLDDTNLLKRANVLGMLNAQETLTGHINLTYYQE | 310 |
| | | IPKI++++ VGSGD+TVAGIAS L + DD LL +ANVLGMLNAQE TGH+N+ Y + | |
| Sbjct: | 240 | IPKIKIVSAVGSGDSTVAGIASGLANDEDDRALLTKANVLGMLNAQEKTTGHVNMANYDK | 299 |
| Query: | 311 | LISQIQVKEV | 320 |
| | | L I+VKEV | |
| Sbjct: | 300 | LYQSIKVKEV | 309 |

[12229] Based on this analysis, it was predicted that these proteins and their epitopes could be useful antigens for vaccines or diagnostics.

### EXAMPLE 2239

[12230] A DNA sequence (GBSx2358) was identified in S. agalactiae <SEQ ID 6921> which encodes the amino acid sequence <SEQ ID 6922>. This protein is predicted to be tagatose 1,6-diphosphate aldolase. Analysis of this protein sequence reveals the following:

```
Possible site: 25
>>> Seems to have no N-terminal signal sequence
----- Final Results -----
                            bacterial cytoplasm --- Certainty = 0.0369(Affirmative) < succ>
                              bacterial membrane --- Certainty = 0.0000(Not Clear) < succ>
                                bacterial outside --- Certainty = 0.0000(Not Clear) < succ>
```

[12231] The protein has homology with the following sequences in the GENPEPT database.

| >GP: AAA25180 GB: M60447 tagatose 1,6-diP aldolase [Lactococcus | | | |
|---|---|---|---|
| lactis] | | | |
| Identities = 253/325 (77%), Positives = 295/325 (89%) | | | |
| Query: | 1 | MGLTEQKQKHMEQLSDKNGIISALAFDQRGALKRLMAKYQSEEPTVSQIEALKVLVAEEL | 60 |
| | | M LTEQK+K +E+LSDKNG ISALAFDQRGALKRLMA+YQ EPTV+Q+E LKVLVA+EL | |
| Sbjct: | 1 | MVLTEQKRKSLEKLSDKNGFISALAFDQRGALKRLMAQYQDTEPTVAQMEELKVLVADEL | 60 |
| Query: | 61 | TPYASSMLLDPEYGLPATKVLDDNAGLLLAYEKTGYDTSSTKRLPDCLDIWSAKRIKEEG | 120 |
| | | T YASSMLLDPEYGLPATK LD AGLLLA+EKTGYDTSSTKRLPDCLD+WSAKRIKE+G | |
| Sbjct: | 61 | TKYASSMLLDPEYGLPATKALDKEAGLLLAFEKTGYDTSSTKRLPDCLDVWSAKRIKEQG | 120 |
| Query: | 121 | ADAVKFLLYYDVDSSDEVNEEKEAYIERIGSECVAEDIPFFLEILSYDEKITDSSGIEYA | 180 |
| | | ADAVKFLLYYDVDSSDE+N++K+AYIER+GSECVAEDIPFFLEIL+YDE+I+D+ +EYA | |
| Sbjct: | 121 | ADAVKFLLYYDVDSSDELNQQKQAYIERVGSECVAEDIPFFLEILAYDEEISDAGSVEYA | 180 |
| Query: | 181 | KIKPRKVIEAMKVFSNPRFNIDVLKVEVPVNMDYVEGFAQGETAYNKATAAAYFREQDQA | 240 |
| | | K+KPRKVIEAMKVFS+PRFNIDVLKVEVPVN+ YVEGFA GE Y+KA AA +F+ Q++A | |
| Sbjct: | 181 | KVKPRKVIEAMKVFSDPRFNIDVLKVEVPVNVKYVEGFADGEVVYSKAEAADFFKAQEEA | 240 |
| Query: | 241 | TLLPYIFLSAGVPAQLFQETLVFAKEAGAKFNGVLCGRATWAGSVKEYVEKGEAGARQWL | 300 |
| | | T LPYI+LSAGV A+LFQETL FA ++GAKFNGVLCGRATWAGSV+ Y+++GE AR+WL | |
| Sbjct: | 241 | TNLPYIYLSAGVSAKLFQETLQFAHDSGAKFNGVLCGRATWAGSVEPYIKEGEKAAREWL | 300 |
| Query: | 301 | RTIGFQNIDELNKILQKTATSWKER | 325 |
| | | RT GF+NIDELNK+L KTA+ W ++ | |
| Sbjct: | 301 | RTTGFENIDELNKVLVKTASPWTDK | 325 |

[12232] A related DNA sequence was identified in S. pyogenes <SEQ ID 6923> which encodes the amino acid sequence <SEQ ID 6924>. Analysis of this protein sequence reveals the following:

```
Possible site: 26
>>> Seems to have no N-terminal signal sequence
----- Final Results -----
                            bacterial cytoplasm --- Certainty = 0.0600(Affirmative) < succ>
                              bacterial membrane --- Certainty = 0.0000(Not Clear) < succ>
                                bacterial outside --- Certainty = 0.0000(Not Clear) < succ>
```

[12233] An alignment of the GAS and GBS proteins is shown below.

| Identities = 230/323 (71%), Positives = 276/323 (85%), Gaps = 1/323 (0%) | | | |
|---|---|---|---|
| Query: | 3 | LTEQKQKHMEQLSDKNGIISALAFDQRGALKRLMAKYQSEEPTVSQIEALKVLVAEELTP | 62 |
| | | LTE K+K ME+LS +G+ISALAFDQRGALKR+MA++Q++EPTV QIE LK LV+EELTP | |
| Sbjct: | 5 | LTENKRKSMEKLS-VDGVISALAFDQRGALKRMMAQHQTKEPTVEQIEELKSLVSEELTP | 63 |
| Query: | 63 | YASSMLLDPEYGLPATKVLDDNAGLLLAYEKTGYDTSSTKRLPDCLDIWSAKRIKEEGAD | 122 |
| | | +ASS+LLDPEYGLPA++V + AGLLLAYEKTGYD ++T RLPDCLD+WSAKRIKE GA+ | |
| Sbjct: | 64 | FASSILLDPEYGLPASRVRSEEAGLLLAYEKTGYDATTTSRLPDCLDVWSAKRIKEAGAE | 123 |
| Query: | 123 | AVKFLLYYDVDSSDEVNEEKEAYIERIGSECVAEDIPFFLEILSYDEKITDSSGIEYAKI | 182 |
| | | AVKFLLYYD+D +VNE+K+AYIERIGSEC AEDIPF+LEIL+YDEKI D++ E+AK+ | |
| Sbjct: | 124 | AVKFLLYYDIDGDQDVNEQKKAYIERIGSECRAEDIPFYLEILTYDEKIADNASPEFAKV | 183 |
| Query: | 183 | KPRKVIEAMKVFSNPRFNIDVLKVEVPVNMDYVEGFAQGETAYNKATAAAYFREQDQATL | 242 |
| | | K KV EAMKVFS RF +DVLKVEVPVNM +VEGFA GE + K AA FR+Q+ +T | |
| Sbjct: | 184 | KAHKVNEAMKVFSKERFGVDVLKVEVPVNMKFVEGFADGEVLFTKEEAAQAFRDQEASTD | 243 |
| Query: | 243 | LPYIFLSAGVPAQLFQETLVFAKEAGAKFNGVLCGRATWAGSVKEYVEKGEAGARQWLRT | 302 |
| | | LPYI+LSAGV A+LFQ+TLVFA E+GAKFNGVLCGRATWAGSVK Y+E+G AR+WLRT | |
| Sbjct: | 244 | LPYIYLSAGVSAKLFQDTLVFAAESGAKFNGVLCGRATWAGSVKVYIEEGPQAAREWLRT | 303 |
| Query: | 303 | IGFQNIDELNKILQKTATSWKER | 325 |
| | | GF+NIDELNK+L KTA+ W E+ | |
| Sbjct: | 304 | EGFKNIDELNKVLDKTASPWTEK | 326 |

[12234] Based on this analysis, it was predicted that these proteins and their epitopes could be useful antigens for vaccines or diagnostics.

### EXAMPLE 2240

[12235] A DNA sequence (GBSx2359) was identified in S. agalactiae <SEQ ID 6925> which encodes the amino acid sequence <SEQ ID 6926>. This protein is predicted to be lacx protein, chromosomal. Analysis of this protein sequence reveals the following:

```
Possible site: 52
>>> Seems to have no N-terminal signal sequence
----- Final Results -----
                            bacterial cytoplasm --- Certainty = 0.0643(Affirmative) < succ>
                              bacterial membrane --- Certainty = 0.0000(Not Clear) < succ>
                                bacterial outside --- Certainty = 0.0000(Not Clear) < succ>
```

[12236] A related GBS nucleic acid sequence <SEQ ID 10185> which encodes amino acid sequence <SEQ ID 10186> was also identified.

[12237] The protein has homology with the following sequences in the GENPEPT database.

| >GP: AAA25184 GB: M60447 ORF [Lactococcus lactis] | | | |
|---|---|---|---|
| Identities = 173/298 (58%), Positives = 219/298 (73%) | | | |
| Query: | 24 | MAITIQNHELQVTLKALGATMTSITDSQGVEYLWQGDATYWGGQAPILFPICGSVRNDCV | 83 |
| | | M I ++N L V K LG +TSI D G+EYLWQ D YW GQAPILFPICGS+RND | |
| Sbjct: | 1 | MTIELKNEYLTVQFKTLGGQLTSIKDKDGLEYLWQADPEYWNGQAPILFPICGSLRNDWA | 60 |
| Query: | 84 | IYRPAQAPHFTGIIPRHGFVRHKTFDYDYISDSSVRFTIKSSKEMLINYPYRFSLEITYT | 143 |
| | | IYRP + P FTG+I RHGFVR + F + ++++SV F+IK + EML NY Y+F L + YT | |
| Sbjct: | 61 | IYRPQERPFFTGLIRRHGFVRKEEFTLEEVNENSVTFSIKPNAEMLDNYLYQFELRVVYT | 120 |
| Query: | 144 | LRNKSIAITYIVKNLESEKNMPYAIGAHPGFNCPLFEKEVFSDYYLEFEQFETCTIPESF | 203 |
| | | L KSI + V NLE+EK MPY IGAHP FNCPL E E + DY LEF + E+C+IP+SF | |
| Sbjct: | 121 | LNGKSIRTEFQVTNLETEKTMPYFIGAHPAFNCPLVEGEKYEDYSLEFSEVESCSIPKSF | 180 |
| Query: | 204 | PDTGLLDLQARHPFLENQKQLSLNHALFEKDAITLDQLRSKTVYLKSRNHAKGIQLDFDD | 263 |
| | | P+TGLLDLQ R PFLENQK L L+++LF DAITLD+L+S++V L+SR KG+++DFDD | |
| Sbjct: | 181 | PETGLLDLQDRTPFLENQKSLDLDYSLFSHDAITLDRLKSRSVTLRSRKSGKGLRVDFDD | 240 |
| Query: | 264 | FENLILWTSNNGGPFLALEPWSSLSTSIEESDILEDKQNIVRLNPKQSKQHSIRITIL | 321 |
| | | F NLILW++ N PF+ALEPWS LSTS+EE +ILEDK + ++ P + + S ITIL | |
| Sbjct: | 241 | FPNLILWSTTNKSPFIALEPWSGLSTSLEEGNILEDKPQVTKVLPLDTSKKSYDITIL | 298 |

[12238] No corresponding DNA sequence was identified in S. pyogenes.

[12239] Based on this analysis, it was predicted that this protein and its epitopes, could be useful antigens for vaccines or diagnostics.

### EXAMPLE 2241

[12240] A DNA sequence (GBSx2361) was identified in S. agalactiae <SEQ ID 6927> which encodes the amino acid sequence <SEQ ID 6928>. This protein is predicted to be ABC transporter. Analysis of this protein sequence reveals the following:

```
Possible site: 49
>>> Seems to have no N-terminal signal sequence
----- Final Results -----
                            bacterial cytoplasm --- Certainty = 0.3272(Affirmative) < succ>
                              bacterial membrane --- Certainty = 0.0000(Not Clear) < succ>
                                bacterial outside --- Certainty = 0.0000(Not Clear) < succ>
```

[12241] A related GBS nucleic acid sequence <SEQ ID 10183> which encodes amino acid sequence <SEQ ID 10184> was also identified.

[12242] The protein has homology with the following sequences in the GENPEPT database.

| >GP: CAA51350 GB: X72832 leucine rich protein [Streptococcus | | | |
|---|---|---|---|
| equisimilis] | | | |
| Identities = 101/278 (36%), Positives = 160/278 (57%), Gaps = 1/278 (0%) | | | |
| Query: | 10 | MDFKELFPEVITKQEVKQSEDYIIVEQDGHVLHFPKSSLTKRELYLLQMTPSLEDASSVD | 69 |
| | | M+ K+ FPE+ ++++ V++ +HFPKS L+++E LL++ + | |
| Sbjct: | 1 | MELKDYFPEMQVGPHPLGDKEWVSVKEGDQYVHFPKSCLSEKERLLLEVGLGQYEVLQ-P | 59 |
| Query: | 70 | SQNPWYRYLVEGRGRLPQSHSAVQFIFIEHQFTLSEELKDFLSPLVINVETIMTINQTQS | 129 |
| | | +PW RYL++ +G PQ QFI++HQ L +L + L ++ +E I+ I+ TQ+ | |
| Sbjct: | 60 | LGSPWQRYLLDHQGNPPQLFETSQFIYLNHQQVLPADLVELLQQMIAGLEVILPISTTQT | 119 |
| Query: | 130 | VMILNQDNFFNATELLTDILPTIENDFNTRLRCYFGNSWTHLQAVDWKELYEEEYKLFTL | 189 |
| | | + Q L +LPT+E+DF L + GN+W + A +E +EEE +L T | |
| Sbjct: | 120 | AFLCRQATSIKVLRSLEGLLPTLESDFGLALTMFVGNAWYQVAAGTLRECFEEECQLLTA | 179 |
| Query: | 190 | FLSHKAEQHYCRFPKMALWALANQSPMPSIKAKCLQHILDTSDTSAIIKALWQEQGNLAK | 249 |
| | | +L K+ F ++ LW++ + P++ + Q + SD + ++ ALW E GNL + | |
| Sbjct: | 180 | YLKQKSGGKLLTFAEVMLWSILSHQSFPALTRQFHQFLNPQSDMADVVHALWSEHGNLVQ | 239 |
| Query: | 250 | TAKALFIHRNSLQYKLDKFTQSSGLNLKILDDLAYAYL | 287 |
| | | TA+ L+IHRNSLQYKLDKF Q SGL+LK LDDLA+AYL | |
| Sbjct: | 240 | TAQRLYIHRNSLQYKLDKFAQQSGLHLKQLDDLAFAYL | 277 |

[12243] A related DNA sequence was identified in S. pyogenes <SEQ ID 6929> which encodes the amino acid sequence <SEQ ID 6930>. Analysis of this protein sequence reveals the following:

```
Possible site: 14
>>> Seems to have no N-terminal signal sequence
----- Final Results -----
                            bacterial cytoplasm --- Certainty = 0.4332(Affirmative) < succ>
                              bacterial membrane --- Certainty = 0.0000(Not Clear) < succ>
                                bacterial outside --- Certainty = 0.0000(Not Clear) < succ>
```

[12244] An alignment of the GAS and GBS proteins is shown below.

| Identities = 106/287 (36%), Positives = 169/287 (57%), Gaps = 4/287 (1%) | | | |
|---|---|---|---|
| Query: | 3 | KTVVED-AMDFKELFPEVITKQEVKQSEDYIIVEQDGHVLHFPKSSLTKRELYLLQM-TP | 60 |
| | | KTV++ AM+ K+ FPE+ +D++ +++ +HFPKS L+++E LL++ | |
| Sbjct: | 7 | KTVMKGMAMELKDYFPEMQVGPHPLGDKDWMSIKEGDQYVHFPKSCLSEKERLLLEVGLG | 66 |
| Query: | 61 | SLEDASSVDSQNPWYRYLVEGRGRLPQSHSAVQFIFIEHQFTLSEELKDFLSPLVINVET | 120 |
| | | E + S PW RYL++ +G PQ + QFI++ HQ L ++L + L ++ +E | |
| Sbjct: | 67 | QCEVLQPLGS--PWQRYLLDHQGNPPQLYETSQFIYLNHQQALPDDLVELLQQMIAGLEV | 124 |
| Query: | 121 | IMTINQTQSVMILNQDNFFNATELLTDILPTIENDFNTRLRCYFGNSWTHLQAVDWKELY | 180 |
| | | I+ I+ TQ+ + Q L D+LPT+E+DF L + GN+W + A +E + | |
| Sbjct: | 125 | ILPISATQTAFLCRQAISIKVLRWLEDLLPTLESDFGLALTMFVGNAWYQVAAGTLRECF | 184 |
| Query: | 181 | EEEYKLFTLFLSHKAEQHYCRFPKMALWALANQSPMPSIKAKCLQHILDTSDTSAIIKAL | 240 |
| | | EEE +L T +L ++ + F + LW+L + ++ + Q + SD + ++ AL | |
| Sbjct: | 185 | EEECQLLTAYLRQQSGRKLLTFSGLMLWSLLSHHTFLALTRQFHQFLSPQSDMADVVHAL | 244 |
| Query: | 241 | WQEQGNLAKTAKALFIHRNSLQYKLDKFTQSSGLNLKILDDLAYAYL | 287 |
| | | W E GNL +TA+ L+IHRNSLQYKLDKF Q SGL+LK LDDLA+A+L | |
| Sbjct: | 245 | WSEHGNLVQTAQRLYIHRNSLQYKLDKFAQQSGLHLKQLDDLAFAHL | 291 |

[12245] Based on this analysis, it was predicted that these proteins and their epitopes could be useful antigens for vaccines or diagnostics.

### EXAMPLE 2242

[12246] A DNA sequence (GBSx2362) was identified in S. agalactiae <SEQ ID 6931> which encodes the amino acid sequence <SEQ ID 6932>. This protein is predicted to be multiple sugar-binding transport ATP-binding protein msmk (malK). Analysis of this protein sequence reveals the following:

```
Possible site: 17
>>> Seems to have no N-terminal signal sequence
----- Final Results -----
                            bacterial cytoplasm --- Certainty = 0.4392(Affirmative) < succ>
                              bacterial membrane --- Certainty = 0.0000(Not Clear) < succ>
                                bacterial outside --- Certainty = 0.0000(Not Clear) < succ>
```

[12247] The protein has homology with the following sequences in the GENPEPT database.

| >GP: AAA26938 GB: M77351 ATP-binding protein [Streptococcus mutans] | | | |
|---|---|---|---|
| Identities = 320/377 (84%), Positives = 359/377 (94%) | | | |
| Query: | 1 | MVELNLNHIYKKYPSASHYSVEDFDLDIKDKEFIVFVGPSGCGKSTTLRMIAGLEDISEG | 60 |
| | | MVELNLNHIYKKYP++SHYSVEDFDLDIK+KEFIVFVGPSGCGKSTTLRM+AGLEDI++G | |
| Sbjct: | 1 | MVELNLNHIYKKYPNSSHYSVEDFDLDIKNKEFIVFVGPSGCGKSTTLRMVAGLEDITKG | 60 |
| Query: | 61 | ELKIDGEVVNDKSPKDRDIAMVFQNYALYPHMTVYDNMAFGLKLRKFSKQEIDKRVREAA | 120 |
| | | ELKIDGEVVNDK+PKDRDIAMVFQNYALYPHM+VYDNMAFGLKLR +SK+ IDKRV+EAA | |
| Sbjct: | 61 | ELKIDGEVVNDKAPKDRDIAMVFQNYALYPHMSVYDNMAFGLKLRHYSKEAIDKRVKEAA | 120 |
| Query: | 121 | ANIGLTEFLERKPADLSGGQRQRVAMGRAIVRDAKVFLMDEPLSNLDAKLRVSMRAEIAK | 180 |
| | | +GLTEFLERKPADLSGGQRQRVAMGRAIVRDAKVFLMDEPLSNLDAKLRVSMRAEIAK | |
| Sbjct: | 121 | QILGLTEFLERKPADLSGGQRQRVAMGRAIVRDAKVFLMDEPLSNLDAKLRVSMRAEIAK | 180 |
| Query: | 181 | IHQRIGSTTIYVTHDQTEAMTLADRIVIMSATKNPDGDGTIGKIEQVGSPQELYNLPANK | 240 |
| | | IH+RIG+TTIYVTHDQTEAMTLADRIVIMS+TKN DG GTIG++EQVG+PQELYN PANK | |
| Sbjct: | 181 | IHRRIGATTIYVTHDQTEAMTLADRIVIMSSTKNEDGSGTIGRVEQVGTPQELYNRPANK | 240 |
| Query: | 241 | FVAGFIGSPSMNFFKVKVENGMIISEDGLRIAIPEGQEKLLESRGYKGKELIFGIRPEDI | 300 |
| | | FVAGFIGSP+MNFF V +++G ++S+DGL IA+ EGQ K+LES+G+K K LIFGIRPEDI | |
| Sbjct: | 241 | FVAGFIGSPAMNFFDVTIKDGHLVSKDGLTIAVTEGQLKMLESKGFKNKNLIFGIRPEDI | 300 |
| Query: | 301 | SSNLLVQDTYPNANVEAEVLVSELLGSETMLYVKLGQTEFASRVEARDFHNPGEKVNLTF | 360 |
| | | SS+LLVQ+TYP+A V+AEV+VSELLGSETMLY+KLGQTEFA+RV+ARDFH PGEKV+LTF | |
| Sbjct: | 301 | SSSLLVQETYPDATVDAEVVVSELLGSETMLYLKLGQTEFAARVDARDFHEPGEKVSLTF | 360 |
| Query: | 361 | NVAKGHFFDADTEQAIR | 377 |
| | | NVAKGHFFDA+TE AIR | |
| Sbjct: | 361 | NVAKGHFFDAETEAAIR | 377 |

[12248] A related DNA sequence was identified in S. pyogenes <SEQ ID 6933> which encodes the amino acid sequence <SEQ ID 6934>. Analysis of this protein sequence reveals the following:

```
Possible site: 48
>>> Seems to have no N-terminal signal sequence
----- Final Results -----
                            bacterial cytoplasm --- Certainty = 0.4642(Affirmative) < succ>
                              bacterial membrane --- Certainty = 0.0000(Not Clear) < succ>
                                bacterial outside --- Certainty = 0.0000(Not Clear) < succ>
```

[12249] An alignment of the GAS and GBS proteins is shown below.

| Identities = 332/377 (88%), Positives = 359/377 (95%) | | | |
|---|---|---|---|
| Query: | 1 | MVELNLNHIYKKYPSASHYSVEDFDLDIKDKEFIVFVGPSGCGKSTTLRMIAGLEDISEG | 60 |
| | | MVELNLNHIYKKYP+ +HY+VEDFDLDIKDKEFIVFVGPSGCGKSTTLRMIAGLEDISEG | |
| Sbjct: | 1 | MVELNLNHIYKKYPNTTHYAVEDFDLDIKDKEFIVFVGPSGCGKSTTLRMIAGLEDISEG | 60 |
| Query: | 61 | ELKIDGEVVNDKSPKDRDIAMVFQNYALYPHMTVYDNMAFGLKLRKFSKQEIDKRVREAA | 120 |
| | | ELKI GEVVNDKSPKDRDIAMVFQNYALYPHMTVYDNMAFGLKLRK+ K +ID+RV+EAA | |
| Sbjct: | 61 | ELKIGGEVVNDKSPKDRDIAMVFQNYALYPHMTVYDNMAFGLKLRKYKKDDIDRRVKEAA | 120 |
| Query: | 121 | ANIGLTEFLERKPADLSGGQRQRVAMGRAIVRDAKVFLMDEPLSNLDAKLRVSMRAEIAK | 180 |
| | | +GLTEFLERKPADLSGGQRQRVAMGRAIVRDAKVFLMDEPLSNLDAKLRVSMRAEIAK | |
| Sbjct: | 121 | QILGLTEFLERKPADLSGGQRQRVAMGRAIVRDAKVFLMDEPLSNLDAKLRVSMRAEIAK | 180 |
| Query: | 181 | IHQRIGSTTIYVTHDQTEAMTLADRIVIMSATKNPDGDGTIGKIEQVGSPQELYNLPANK | 240 |
| | | IH+RIGSTTIYVTHDQTEAMTLADRIVIMSATKNP G+GTIGKIEQVGSPQELYNLPANK | |
| Sbjct: | 181 | IHRRIGSTTIYVTHDQTEAMTLADRIVIMSATKNPQGNGTIGKIEQVGSPQELYNLPANK | 240 |
| Query: | 241 | FVAGFIGSPSMNFFKVKVENGMIISEDGLRIAIPEGQEKLLESRGYKGKELIFGIRPEDI | 300 |
| | | FVAGFIGSP+MNFF+V+V++G I+SEDGL IAIPEGQ K+LE+ GYKG+++ FGIRPEDI | |
| Sbjct: | 241 | FVAGFIGSPAMNFFEVEVKDGRIVSEDGLDIAIPEGQAKMLEAAGYKGEKVTFGIRPEDI | 300 |
| Query: | 301 | SSNLLVQDTYPNANVEAEVLVSELLGSETMLYVKLGQTEFASRVEARDFHNPGEKVNLTF | 360 |
| | | SS +V DTYP+A V AEVLVSELLGSETMLYVKLGQTEFASRV+ARDFH+PGE+V+LTF | |
| Sbjct: | 301 | SSRQIVHDTYPSATVTAEVLVSELLGSETMLYVKLGQTEFASRVDARDFHSPGEQVSLTF | 360 |
| Query: | 361 | NVAKGHFFDADTEQAIR | 377 |
| | | NVAKGHFFD DTEQAIR | |
| Sbjct: | 361 | NVAKGHFFDRDTEQAIR | 377 |

[12250] Based on this analysis, it was predicted that these proteins and their epitopes could be useful antigens for vaccines or diagnostics.

### EXAMPLE 2243

[12251] A DNA sequence (GBSx2363) was identified in S. agalactiae <SEQ ID 6935> which encodes the amino acid sequence <SEQ ID 6936>. This protein is predicted to be glucan 1,6-alpha-glucosidase (dexB) (treC). Analysis of this protein sequence reveals the following:

```
Possible site: 56
>>> Seems to have no N-terminal signal sequence
----- Final Results -----
                            bacterial cytoplasm --- Certainty = 0.2525(Affirmative) < succ>
                              bacterial membrane --- Certainty = 0.0000(Not Clear) < succ>
                                bacterial outside --- Certainty = 0.0000(Not Clear) < succ>
```

[12252] The protein has homology with the following sequences in the GENPEPT database.

| >GP: CAA51348 GB: X72832 glucan 1,6-alpha-glucosidase [Streptococcus | | | |
|---|---|---|---|
| equisimilis] | | | |
| Identities = 413/535 (77%), Positives = 476/535 (88%), Gaps = 1/535 (0%) | | | |
| Query: | 1 | MKKHWWHKATIYQIYPRSFMDSDGDGVGDIKGITSKLDYLEKLGITAIWLSPVYQSPMDD | 60 |
| | | M+K WWHKATIYQIYPRSF D+ G+G+GD+KGITS+LDYL+KLGITAIWLSPVYQSPMDD | |
| Sbjct: | 1 | MQKQWWHKATIYQIYPRSFKDTSGNGIGDLKGITSQLDYLQKLGITAIWLSPVYQSPMDD | 60 |
| Query: | 61 | NGYDISDYQAIADIFGDMNDMDQLLQEANQRGIKIIMDLVVNHTSDEHAWFVEARENPNS | 120 |
| | | NGYDISDY+AIA++FG+M+DMD LL AN+RGIKIIMDLVVNHTSDEHAWFVEARENPNS | |
| Sbjct: | 61 | NGYDISDYEAIAEVFGNMDDMDDLLAAANERGIKIIMDLVVNHTSDEHAWFVEARENPNS | 120 |
| Query: | 121 | PERDFYIWRDEPNDLTSIFSGSAWEYDKVSGQYYLHLFSKRQPDLNWENEALRHKIYDMM | 180 |
| | | PERD+YIWRDEPN+L SIFSGSAWE D+ SGQYYLHLFSK+QPDLNWEN +R KIYDMM | |
| Sbjct: | 121 | PERDYYIWRDEPNNLMSIFSGSAWELDEASGQYYLHLFSKKQPDLNWENAHVRQKIYDMM | 180 |
| Query: | 181 | NFWIDKGIGGFRMDVIDLIGKIPDKGITGNGPKLHDYLKEMNRASFGKHDLLTVGETWGA | 240 |
| | | NFWI KGIGGFRMDVIDLIGKIPD ITGNGP+LHDYLKEMN+A+FG HD++TVGETWGA | |
| Sbjct: | 181 | NFWIAKGIGGFRMDVIDLIGKIPDSEITGNGPRLHDYLKEMNQATFGNHDVMTVGETWGA | 240 |
| Query: | 241 | TPDIAKQYSNPDNEELSMVFQFEHVGLQHKPDAPKWDYSDGLDVPALKDIFTKWQTQLEL | 300 |
| | | TP+IA+QYS P+N+ELSMVFQFEHVGLQHKP+APKWDY++ LDVPALK IF+KWQT+L+L | |
| Sbjct: | 241 | TPEIARQYSRPENKELSMVFQFEHVGLQHKPNAPKWDYAEELDVPALKTIFSKWQTELKL | 300 |
| Query: | 301 | GQGWNSLFWNNHDLPRVLSIWGNDSDNRKQSAKALAILLHLMRGTPYIYQGEEIGMTNYP | 360 |
| | | G+GWNSLFWNNHDLPRVLSIWGNDS R++SAKALAILLHLMRGTPYIYQGEEIGMTNYP | |
| Sbjct: | 301 | GEGWNSLFWNNHDLPRVLSIWGNDSIYREKSAKALAILLHLMRGTPYIYQGEEIGMTNYP | 360 |
| Query: | 361 | FECLADVDDIESLNYAKEAMDNGVSEATILDSIRKVGRDNARTPMQWSQEHQAGFTKG-T | 419 |
| | | F+ L +VDDIESLNYAKEAM+NGV A ++ SIRKVGRDNARTPMQWS++ AGF++ | |
| Sbjct: | 361 | FKDLTEVDDIESLNYAKEAMENGVPAARVMSSIRKVGRDNARTPMQWSKDTHAGFSEAQE | 420 |
| Query: | 420 | PWLAVNPNYQEINVEAALNDTESIFYTYQKLVALRKEHDWLVDADFKLLETADKVFAYVR | 479 |
| | | WL VNPNYQEINV AL + +SIFYTYQ+L+ALRK+ DWLV+AD+ LL TADKVFAY R | |
| Sbjct: | 421 | TWLPVNPNYQEINVADALANQDSIFYTYQQLIALRKDQDWLVEADYHLLPTADKVFAYQR | 480 |
| Query: | 480 | QTDKERYLIVANLSDQNQSFEFPEAVKETIISNTEVQEVLSSNTLKPWDAFCIEL | 534 |
| | | Q +E Y+IV N+SDQ Q F A E +I+NT+V +VL + L+PWDAFC++L | |
| Sbjct: | 481 | QFGEETYVIVVNVSDQEQVFAKDLAGAEVVITNTDVDKVLETKHLQPWDAFCVKL | 535 |

[12253] A related DNA sequence was identified in S. pyogenes <SEQ ID 6937> which encodes the amino acid sequence <SEQ ID 6938>. Analysis of this protein sequence reveals the following:

```
Possible site: 56
>>> Seems to have no N-terminal signal sequence
----- Final Results -----
                            bacterial cytoplasm --- Certainty = 0.2793(Affirmative) < succ>
                              bacterial membrane --- Certainty = 0.0000(Not Clear) < succ>
                                bacterial outside --- Certainty = 0.0000(Not Clear) < succ>
```

[12254] An alignment of the GAS and GBS proteins is shown below.

| Identities = 418/535 (78%), Positives = 474/535 (88%), Gaps = 1/535 (0%) | | | |
|---|---|---|---|
| Query: | 1 | MKKHWWHKATIYQIYPRSFMDSDGDGVGDIKGITSKLDYLEKLGITAIWLSPVYQSPMDD | 60 |
| | | M HWWHKATIYQIYPRSF D+ G+G+GD+KGITS+LDYL+KLGITAIWLSPVYQSPMDD | |
| Sbjct: | 1 | MNNHWWHKATIYQIYPRSFKDTSGNGIGDLKGITSQLDYLQKLGITAIWLSPVYQSPMDD | 60 |
| Query: | 61 | NGYDISDYQAIADIFGDMNDMDQLLQEANQRGIKIIMDLVVNHTSDEHAWFVEARENPNS | 120 |
| | | NGYDISDY+AIAD+FGDM DMD+LL AN+RGIKIIMDLVVNHTSDEHAWFVEARENPNS | |
| Sbjct: | 61 | NGYDISDYEAIADVFGDMADMDELLAAANERGIKIIMDLVVNHTSDEHAWFVEARENPNS | 120 |
| Query: | 121 | PERDFYIWRDEPNDLTSIFSGSAWEYDKVSGQYYLHLFSKRQPDLNWENEALRHKIYDMM | 180 |
| | | PERD+YIWRDEPN+L SIFSGSAWE D+ SGQYYLHLFSK+QPDLNWEN LR KIYDMM | |
| Sbjct: | 121 | PERDYYIWRDEPNNLMSIFSGSAWELDEASGQYYLHLFSKKQPDLNWENAQLRQKIYDMM | 180 |
| Query: | 181 | NFWIDKGIGGFRMDVIDLIGKIPDKGITGNGPKLHDYLKEMNRASFGKHDLLTVGETWGA | 240 |
| | | NFWI KGIGGFRMDVIDLIGK+PD ITGNGP+LHDYLKEMN+A+FG HD++TVGETWGA | |
| Sbjct: | 181 | NFWIAKGIGGFRMDVIDLIGKVPDLEITGNGPRLHDYLKEMNQATFGNHDVMTVGETWGA | 240 |
| Query: | 241 | TPDIAKQYSNPDNEELSMVFQFEHVGLQHKPDAPKWDYSDGLDVPALKDIFTKWQTQLEL | 300 |
| | | TP+IA+QYS P+N+ELSMVFQFEHVGLQHKPDAPKWDY+ LDVPALK IF+KWQT+L+L | |
| Sbjct: | 241 | TPEIARQYSRPENKELSMVFQFEHVGLQHKPDAPKWDYAKELDVPALKAIFSKWQTELKL | 300 |
| Query: | 301 | GQGWNSLFWNNHDLPRVLSIWGNDSDNRKQSAKALAILLHLMRGTPYIYQGEEIGMTNYP | 360 |
| | | G+GWNSLFWNNHDLPRVLSIWGNDS R++SAKALAILLHLMRGTPYIYQGEEIGMTNYP | |
| Sbjct: | 301 | GEGWNSLFWNNHDLPRVLSIWGNDSTYREKSAKALAILLHLMRGTPYIYQGEEIGMTNYP | 360 |
| Query: | 361 | FECLADVDDIESLNYAKEAMDNGVSEATILDSIRKVGRDNARTPMQWSQEHQAGFTKG-T | 419 |
| | | F+ L +V+DIESLNYAKEAM NGVS A ++DSIRKVGRDNARTPMQWS++ AGF++ | |
| Sbjct: | 361 | FKDLTEVNDIESLNYAKEAMGNGVSAARVMDSIRKVGRDNARTPMQWSKDTHAGFSEAKE | 420 |
| Query: | 420 | PWLAVNPNYQEINVEAALNDTESIFYTYQKLVALRKEHDWLVDADFKLLETADKVFAYVR | 479 |
| | | WL VNPNYQ+INV AL D +SIFYTYQKL+ALRKE DWLV+AD+ LL TADKVFAY R | |
| Sbjct: | 421 | TWLPVNPNYQDINVADALADPDSIFYTYQKLIALRKEQDWLVEADYHLLPTADKVFAYQR | 480 |
| Query: | 480 | QTDKERYLIVANLSDQNQSFEFPEAVKETIISNTEVQEVLSSNTLKPWDAFCIEL | 534 |
| | | Q +E Y+IV N+SD+ Q F A + II+NT+V VL + L+PWDAFC++L | |
| Sbjct: | 481 | QLGEETYVIVVNVSDEEQVFATDLAGAQVIIANTDVDTVLETKHLQPWDAFCLKL | 535 |

[12255] Based on this analysis, it was predicted that these proteins and their epitopes could be useful antigens for vaccines or diagnostics.

### EXAMPLE 2244

[12256] A DNA sequence (GBSx2364) was identified in S. agalactiae <SEQ ID 6939> which encodes the amino acid sequence <SEQ ID 6940>. Analysis of this protein sequence reveals the following:

```
Possible site: 44
>>> Seems to have an uncleavable N-term signal seq
----- Final Results -----
                            bacterial membrane --- Certainty = 0.0000(Not Clear) < succ>
                              bacterial outside --- Certainty = 0.0000(Not Clear) < succ>
                          bacterial cytoplasm --- Certainty = 0.0000(Not Clear) < succ>
```

[12257] The protein has homology with the following sequences in the GENPEPT database.

| >GP:AAB49738 GB:U21942 UDP-galactose 4-epimerase [Streptococcus mutans] | | | |
|---|---|---|---|
| Identities = 267/331 (80%), Positives = 306/331 (91%) | | | |
| Query: | 1 | MAVLILGGAGYIGSHMVDQLITQGKEKVIVVDNLVTGHRQAVHSDAIFYEGDLSDKTFMR | 60 |
| | | MA+L+LGGAGYIGSHMVD+LI +G+E+V+VVD+LVTGHR AVH A FY+GDL+D+ FM | |
| Sbjct: | 1 | MAILVLGGAGYIGSHMVORLIEKGEEEVVVVDSLVTGHRAAVHPAAKFYQGDLADREFMS | 60 |
| Query: | 61 | QVFRENPDVDAVIHFAAFSLVAESMENPLKYFDNNTAGMIKLLEVMNECDIKNIVFSSTA | 120 |
| | | VFRENPDVDAVIHFAA+SLVAESM+ PLKYFDNNTAGMIKLLEVM+E +K IVFSSTA | |
| Sbjct: | 61 | MVFRENPDVDAVIHFAAYSLVAESMKKPLKYFDNNTAGMIKLLEVMSEFGVKYIVFSSTA | 120 |
| Query: | 121 | ATYGIPSQVPILETAFQNPINPYGESKLMMETIMKWADQAYGIKFVALRYFNVAGDKPDG | 180 |
| | | ATYGIP ++PI ET PQ PINPYGESKLMMETIMKW+D+AYGIKFV +RYFNVAG RPDG | |
| Sbjct: | 121 | ATYGIPNEIPIKETTPQRPINPYGESKLMMETIMKWS0RAYGIKFVPVRYFNVAGAKPDG | 180 |
| Query: | 181 | SIGEDHKPETHLLPIILQVAQGVRDKIMIFGDDYNTPDGTNVRDYVHPFDLADAHILAVD | 240 |
| | | SIGEDH PETHLLPIILQVAQGVR+KIMIFGDDYNTPDGTNVRDYVHPFDLAD H+LA++ | |
| Sbjct: | 181 | SIGEDHSPETHLLPIILQVAQGVREKIMIFGDDYNTPDGTNVRDYVHPFDLADRHLLALN | 240 |
| Query: | 241 | YLRQGNESNVFNLGSSTGFSNLQMLEAARRITGKEIPAQKAARRPGDPDTLIASSERARQ | 300 |
| | | YLRQGN S FNLGSSTGFSNLQ+LEAAR++TG++IPA+KAARR GDPDTLIASSEKAR+ | |
| Sbjct: | 241 | YLRQGNPSTAFNLGSSTGFSNLQILEAARRVTGQKIPAEKAARRSGDPDTLIASSEKARE | 300 |
| Query: | 301 | ILGWEPKFDNIDKIISSAWAWHSSHPNGYED | 331 |
| | | ++GW+P+FD+I+KII+SAWAWHSSHP GY+D | |
| Sbjct: | 301 | VVGWKPQFDDIEKIIASAWAWHSSHPKGYDD | 331 |

[12258] Based on this analysis, it was predicted that this protein and its epitopes, could be useful antigens for vaccines or diagnostics.

### EXAMPLE 2245

[12259] A DNA sequence (GBSx2366) was identified in S. agalactiae <SEQ ID 6941> which encodes the amino acid sequence <SEQ ID 6942>. This protein is predicted to be two-component response regulator. Analysis of this protein sequence reveals the following:

```
Possible Site: 40
>>> Seems to have no N-terminal signal sequence
----- Final Results -----
                            bacterial cytoplasm --- Certainty = 0.3945(Affirmative) < succ>
                              bacterial membrane --- Certainty = 0.0000(Not Clear) < succ>
                                bacterial outside --- Certainty = 0.0000(Not Clear) < succ>
```

[12260] The protein has homology with the following sequences in the GENPEPT database.

| >GP:BAB06470 GB:AP001516 two component response regulator | | | |
|---|---|---|---|
| [Bacillus halodurans] | | | |
| Identities = 71/223 (31%), Positives = 139/223 (61%), Gaps = 7/223 (3%) | | | |
| Query: | 3 | VLIIEDDPMVEFIHRNYLEKLNYFQNIYSTASQTQAIAYLNDIKIQLVLLDIHIKEGNGL | 62 |
| | | VL+IEDDPMV+ ++R ++EKL+ F + +TA+ + + +++ L+LLDI + + +GL | |
| Sbjct: | 9 | VLLIEDDPMVQEVNRMFVEKLSGFTIVGTTATGEEGMVKTRELQPDLILLDIFMPKQDGL | 68 |
| Query: | 63 | ELLKLLRNQHQNTEVIVISAANEANTVKEAFHLGIVDYLIKPFTFERFESSIEKFLNHYH | 122 |
| | | +K +R Q+ + ++I ++AAN+ T+K G++DYL+KPFTFER ++++ ++ + | |
| Sbjct: | 69 | SFIKQIREQYIDVDIIAVTAANDTKTIKTLLRYGVMDYLVKPFTFERLKAALTQYEEMFR | 128 |
| Query: | 123 | TFEAD-KIYQDNIOHFQKIDSGWLEGEVKLDE--KGLSEITYQHILDAIQELEQPFTIQE | 179 |
| | | + + ++ QD++D K + + +D+ KGL T Q +++ ++EL++P + +E | |
| Sbjct: | 129 | KMQKEAELSQDSLDEMIK----QKQAQANMDDLPKGLHAHTLQQVIERLEELDEPKSAEE | 184 |
| Query: | 180 | LAKCSQFSHVSVRKYIAYMEEKGLLTSQQIYTKVGRPYKVYKL | 222 |
| | | + + + V+VR+Y+ Y+E G + Y +GRP + YKL | |
| Sbjct: | 185 | IGRDVGLARVTVRRYLNYLESVGQVEMDLTYGSIGRPIQTYKL | 227 |

[12261] A related DNA sequence was identified in S. pyogenes <SEQ ID 6943> which encodes the amino acid sequence <SEQ ID 6944>. Analysis of this protein sequence reveals the following:

```
Possible site: 37
>>> Seems to have no N-terminal signal sequence
----- Final Results -----
                            bacterial cytoplasm --- Certainty = 0.4053(Affirmative) < succ>
                              bacterial membrane --- Certainty = 0.0000(Not Clear) < succ>
                                bacterial outside --- Certainty = 0.0000(Not Clear) < succ>
```

[12262] An alignment of the GAS and GBS proteins is shown below.

Identities = 123/220 (55%), Positives = 156/220 (70%)

| | | | |
|---|---|---|---|
| Query: | 1 | MDVLIIEDDPMVEFIHRNYLEKLNYFQNIYSTASQTQAIAYLNDIKIQLVLLDIHIKEGN | 60 |
| | | M+VLIIEDDPMV+FIHRNYLEKLN F I S+ S + L D I L+LLDIHI +GN | |
| Sbjct: | 1 | MNVLIIEDDPMVDFIHRNYLEKLNLFDRIISSDSMKAVQSILTDYAIDLILLDIHITDGN | 60 |
| Query: | 61 | GLELLKLLRNQHQNTEVIVISAANEAHTVKEAFHLGIVDYLIKPFTFEREESSIEKFLNH | 120 |
| | | G++ L+ R QH EVI+ISAAN+ + +++FHLGI+DYLIKPFTFSRF+ SI++F+ H | |
| Sbjct: | 61 | GIQFLEKWRTQHIPCEVIIISAANDGNIIRDGFHLGIIDYLIKPFTFERFQESIQQFVTH | 120 |
| Query: | 121 | YHTFEADKIYQDNIDHFQKIDSGWLEGEVKLDEKGLSEITYQHILDAIQELEQPFTIQEL | 180 |
| | | ++ Q ID + + S +L EKGLSE T+Q I++ I+ +QPFTIQEL | |
| Sbjct: | 121 | REHLANQQLEQAQIDQLKCLTSKKDTKNRQLLEKGLSESTFQWIMENIKVFDQPFTIQEL | 180 |
| Query: | 181 | AKCSQFSHVSVRKYIAYMEEKGLLTSQQIYTKVGRPYKVY | 220 |
| | | A SHVSVRKYIAY+EE L SQQI+TKVGRPY+VY | |
| Sbjct: | 181 | ASACHLSHVSVRKYIAYLEENKQLNSQQIFTKVGRPYRVY | 220 |

[12263] Based on this analysis, it was predicted that these proteins and their epitopes could be useful antigens for vaccines or diagnostics.

### EXAMPLE 2246

[12264] A DNA sequence (GBSx2367) was identified in S. agalactiae <SEQ ID 6945> which encodes the amino acid sequence <SEQ ID 6946>. Analysis of this protein sequence reveals the following:

```
Possible site: 21
>>> Seems to have an uncleavable N-term signal seq
INTEGRAL Likelihood = −8.76 Transmembrane 12-28 ( 6-34)
INTEGRAL Likelihood = −7.43 Transmembrane 178-194 ( 173-197)
----- Final Results -----
                            bacterial membrane --- Certainty = 0.4503(Affirmative) < succ>
                              bacterial outside --- Certainty = 0.0000(Not Clear) < succ>
                          bacterial cytoplasm --- Certainty = 0.0000(Not Clear) < succ>
```

[12265] A related GBS nucleic acid sequence <SEQ ID 9003> which encodes amino acid sequence <SEQ ID 9004> was also identified. Analysis of this protein sequence reveals the following:

```
Lipop: Possible site: −1 Crend: 3
SRCFLG: 0
McG: Length of UR: 27
Peak Value of CR: 2.99
Net Charge of CR: 3
McG: Discrim Score: 12.92
GvH: Signal Score (−7.5): −2.57
Possible site: 19
>>> Seems to have an uncleavable N-term signal seq
Amino Acid Composition: calculated from 1
ALOM program count: 2 value: −8.76 threshold: 0.0
INTEGRAL Likelihood = −8.76 Transmembrane 10-26 ( 4-32)
INTEGRAL Likelihood = −7.43 Transmembrane 176-192 ( 171-195)
PERIPHERAL Likelihood = 3.18 149
modified ALOM score: 2.25
icm1 HYPID: 7 CFP: 0.450
*** Reasoning Step: 3
----- Final Results -----
                            bacterial membrane --- Certainty = 0.4503(Affirmative) < succ>
                              bacterial outside --- Certainty = 0.0000(Not Clear) < succ>
                          bacterial cytoplasm --- Certainty = 0.0000(Not Clear) < succ>
```

[12266] The protein has homology with the following sequences in the GENPEPT database.

| >GP:CAB15141 GB:Z99120 similar to two-component sensor histidine | | | |
|---|---|---|---|
| kinase [YufM] [Bacillus subtilis] | | | |
| Identities = 132/461 (28%), Positives = 245/461 (52%), Gaps = 7/461 (1%) | | | |
| Query: | 3 | MKKKLSLWAFLSLILVTMTICIFSIFYYVTIHQSYRMVRVQEEKILKNTGYALSRNPQVI | 62 |
| | | MKKLL L L++ + + + I ++ Q+ + +R QE+ T ++ P | |
| Sbjct: | 1 | MKKTLKLQTRLTIFVCIVVLIALLITFWTVGAQTTKRIRDQEKATALQTAEMVAEAPMTA | 60 |
| Query: | 63 | QTLKDNHYDQSLQKQNLFLSKKSNLDYIVLINLKGIRFTHPDSTKIGKPFQGGDEQAVEK | 122 |
| | | L+ + LQ + K + +++V++++ GIR THPD +KIGK F+GGDE V K | |
| Sbjct: | 61 | AALESGKKQKELQSYTKRVQKITGTEFVVVMDMNGIRKTHPDPSKIGKKFRGGDESEVLK | 120 |
| Query: | 123 | GKAINSTAEGSLGKSLRYLIPVY-DHQKQVGAIAVGLKLTTLGDLSQSSIKEFSKPLLIS | 181 |
| | | G +STA G+LGKS R +PVY ++ KQVGA+AVG+ + + ++ S++ ++S | |
| Sbjct: | 121 | GHVHISTASGTLGKSQRAFVPVYAENGKQVGAVAVGITVNEIDEVISHSLRPLYFIICVS | 180 |
| Query: | 182 | ILISLVVTSIISYGLKKQLHNLHPSDIFQHLEERNATLDQIQAAVFVIDQRHIIKRNNPA | 241 |
| | | I + ++ I++ +K ++L P +I LEER+A L+ + + +D+ IK N | |
| Sbjct: | 181 | IFVGVIGAVIVARTVKNIMYGLEPYEIATLLEERSAMLESTKEGILAVDEHGKIKLANAE | 240 |
| Query: | 242 | ASLLFKKEGQRDLFSGKLLESLIP--QLKQDHFSKK--TEQVLHFQGQDYLLSISPITVK | 297 |
| | | A LF K G + ++ ++P +LK+ +KK ++ + G + + + PI +K | |
| Sbjct: | 241 | AKRLFVKMGINTNPIDQDVDDILPKSRLKKVIETKKPLQDRDVRINGLELVFNEVPIQLK | 300 |
| Query: | 298 | TQNRGYVVFLRNVTETLFTLDQLAHTTAYASALQAQTHQFNNQLHVIYGLADIEYYDELK | 357 |
| | | Q G + R+ TE +QL+ YA+AL+AQ+H+FNN+LHVI GL ++ YD+L | |
| Sbjct: | 301 | GQTVGAIATFRDKTEVKHLAEQLSGVKNYANALRAQSHEFNNKLHVILGLVQLKEYDDLG | 360 |
| Query: | 358 | IYLKELLEPQNEFLARLSNLVREPRLASFIIGSREKFAEKHINLSTEILVEIPTKSTVED | 417 |
| | | Y+K++ Q + + V+ LA F++G++ E+ NL E IP + | |
| Sbjct: | 361 | DYIKDIAIQQKSETSEIINDVKSSVLAGFLLGKQSFIREQGANLDIECNGVIPNAADPSV | 420 |
| Query: | 418 | VNNYL-LLHRYINTKILTLLN-STTLVSLRLNYQNNLIETD | 456 |
| | | ++ + ++ IN + + + +++ + + N++++ + | |
| Sbjct: | 421 | IHELITIIGNLINNGLDAVADMPKKQITHSMRFHNSILDIE | 461 |

[12267] A related DNA sequence was identified in S. pyogenes <SEQ ID 6947> which encodes the amino acid sequence <SEQ ID 6948>. Analysis of this protein sequence reveals the following:

```
Possible site: 57
>>> Seems to have a cleavable N-term signal seq.
INTEGRAL Likelihood = −10.03 Transmembrane 174-190 ( 170-195)
----- Final Results -----
                            bacterial membrane --- Certainty = 0.5012(Affirmative) < succ>
                              bacterial outside --- Certainty = 0.0000(Not Clear) < succ>
                          bacterial cytoplasm --- Certainty = 0.0000(Not Clear) < succ>
```

[12268] An alignment of the GAS and GBS proteins is shown below.

| Identities = 236/488 (48%), Positives = 337/488 (68%), Gaps = 3/488 (0%) | | | |
|---|---|---|---|
| Query: | 3 | MKKKLSLWAFLSLILVTMTICIFSIFYYVTIHQSYRNVRVQEEKILKNTGYALSRNPQVI | 62 |
| | | MKK L LWA LSLILV+M + S+FY + +H +++ ++ QE +L +TG L+ + + | |
| Sbjct: | 1 | MKKPLRLWASLSLILVSMIVVTTSLFYGIMLHDTHQSIKNQETHLLTSTGKNLASHQAIK | 60 |
| Query: | 63 | QTLKDNHYDQSLQKQMLFLSKKSNLDYIVLINLKGIRFTHPDSTKIGKPFQGGDEQAVFK | 122 |
| | | + L +N + ++ NLDY+V++N+KGIR THP+ IGKPFQGGDE+AV | |
| Sbjct: | 61 | ELLLNNQPNAKTTAYTNSIASIYNLDYVVVMNMKGIRLTNPNPKNIGKPFQGGDEEAVLA | 120 |
| Query: | 123 | GKAIMSTAEGSLGKSLRYLIPVYDHQKQVGAIAVGLKLTTLGDLSQSSIKEFSKPLLISI | 182 |
| | | GK ++STA+G+LGKSLRYL+PV+D KQ+GAIAVG+KLTTL D++ +S + ++ LL+ + | |
| Sbjct: | 121 | GKKVISTAKGTLGKSLRYLVPVFDGDKQIGAIAVGIKLTTLNDVALTSKRNYTLSLLLCL | 180 |
| Query: | 183 | LISLVVTSIISYGLKKQLHNLHPSDIFQHLEERNATLDQIQAAVFVIDQRHIIKRNNPAA | 242 |
| | | LISL+VTS IS+ LK+QLH L PS+I+Q EERNA LDQI+AAVFV+D+ I++ N A | |
| Sbjct: | 181 | LISLLVTSFISFRLKRQLHQLEPSEIYQLFEERNAMLDQIEAAVFVVDKAGILQLCNQAG | 240 |
| Query: | 243 | SLLFKKEGQRDLFSGKLLESLIPQLKQDHFSKKTEQVLHFQGQDYLLSISPITVKTQNRG | 302 |
| | | L ++ Q +G L P + + EQ+ + +DYLL+ISPI VK +RG | |
| Sbjct: | 241 | QKLIARKCQLGKPTGNSFNYLFPOFPKLSLQEGHEQLFRYGEEDYLLAISPICVKNDHRG | 300 |
| Query: | 303 | YVVFLRNVTETLWTLDQLAHTTAYASALQAQTHQFMNQLHVIYGLADIEYYDELKIYLKE | 362 |
| | | +++F+R + + TLDQLA+TTAYASALQAQTH+FMNQLHVIYGL DI YYD+LKIYL | |
| Sbjct: | 301 | HIIFMREAVKAIDTLDQLAYTTAYASALQAQTNKFMNQLHVIYGLVDIAYYDQLKIYLDS | 360 |
| Query: | 363 | LLEPQNEFLARLSNLVREPRLASFIIGEREKFAEKHINLSTEILVEIPTKSTVEDVNNYL | 422 |
| | | +LEP+NE L LS+LV+EP LASF+IGE+EK+ E +++L ++L EIP +T +NN L | |
| Sbjct: | 361 | ILEPENEILTSLSVLVKEPLLASFLIGEQEKYQELNVHLKIDVLSEIPHSATKNQLNNGL | 420 |
| Query: | 423 | LLHRYINTKILTLLNSTTLVSLRLNYQNNLIETDYQWENEKWL-LNOYHQYFNDAYFQQL | 481 |
| | | +++R+I+T +LT L +LV + QN+LI + + W+ L F+ YFQQL | |
| Sbjct: | 421 | MIYRFIHTNLLTTLRPKSLVLSIQHDQNHLI--SHYTLTDNWIDLERVQPIFDLPYFQQL | 478 |
| Query: | 482 | LVDSRATY | 489 |
| | | L D+ + + | |
| Sbjct: | 479 | LTDTNSQF | 486 |

[12269] Based on this analysis, it was predicted that these proteins and their epitopes could be useful antigens for vaccines or diagnostics.

### EXAMPLE 2247

[12270] A DNA sequence (GBSx2368) was identified in S. agalactiae <SEQ ID 6949> which encodes the amino acid sequence <SEQ ID 6950>. Analysis of this protein sequence reveals the following:

```
Possible site: 51
>>> Seems to have no N-terminal signal sequence
INTEGRAL Likelihood = −11.52 Transmembrane 364-380 ( 353-386)
INTEGRAL Likelihood = −9.66 Transmembrane 33-49 ( 26-57)
INTEGRAL Likelihood = −7.80 Transmembrane 87-103 ( 82-105)
INTEGRAL Likelihood = −6.85 Transmembrane 153-169 ( 144-174)
INTEGRAL Likelihood = −4.41 Transmembrane 301-317 ( 300-318)
INTEGRAL Likelihood = −2.81 Transmembrane 216-232 ( 212-235)
INTEGRAL Likelihood = −2.39 Transmembrane 120-136 ( 120-136)
INTEGRAL Likelihood = −1.65 Transmembrane 57-73 ( 56-73)
INTEGRAL Likelihood = −1.17 Transmembrane 428-444 ( 428-444)
INTEGRAL Likelihood = −0.32 Transmembrane 276-292 ( 276-292)
----- Final Results -----
                            bacterial membrane --- Certainty = 0.5607(Affirmative) < succ>
                              bacterial outside --- Certainty = 0.0000(Not Clear) < succ>
                          bacterial cytoplasm --- Certainty = 0.0000(Not Clear) < succ>
```

[12271] The protein has homology with the following sequences in the GENPEPT database.

>GP:AAB18291 GB:U35658 L-malate permease [Streptococcus bovis]
Identities = 329/428 (76%), Positives = 375/428 (86%)

| | | | |
|---|---|---|---|
| Query: | 18 | DLKAKLFHIKIGSVPLPVYVCLALLILLAGFLQKLPVNMLGGFAVILTMGWFLGTIGASI | 77 |
| | | D + KL +IGSV LPVY+ A +IL+ L++LPVNMLGGFAVILTMGW LGTIG +I | |
| Sbjct: | 14 | DWRNKLTKTRIGSVTLPVYLVTASIILVTALLEQLPVMMLGGFAVILTMGWLLGTIGGNI | 73 |
| Query: | 78 | PGFKNFGGPAILSLLVPSILVFFNLINKNVLESTNMLMKQANFLYFYIACLVSGSILGMN | 137 |
| | | P K+FGGPAILSLLVPSI+VFFNL+N+NVL+ST++LMKQANFLYFYIACLV GSILGMN | |
| Sbjct: | 74 | PILKHFGGPAILSLLVPSIMVFFNLLNQNVLDSTDILMKQANFLYFYIACLVCGSILGMN | 133 |
| Query: | 138 | RKMLIQGLLPMIFPMLLGMVCAMMVGTFVGVILGLEWRHTLFYIVTPVLAGGIGEGILPL | 197 |
| | | RK+L+QGL+RMI PM LGM+ AM VGT VG +LGL W+H+LEYIVTPVLAGGIGEGILPL | |
| Sbjct: | 134 | RKILVQGLMRMIVPMALGMILAMGVGTLVGTLLGLGWKHSLFYIVTPVLAGGIGEGILPL | 193 |
| Query: | 198 | SLGYSSITGVASEQLVAQLIPATIIGMFFAILCTALLMRLGSKKPHLSGQGQLVRLMKGE | 257 |
| | | SLGYS+ITG+SEQLV QLIPATIIGMWFAI+C+ LL+RLGEK+P LSGQGQL+++ + | |
| Sbjct: | 194 | SLGYSAITGLPSEQLVGQLIPATIIGMFFAIMCSGLLSRLGEKRPELSGQGQLIEITMSD | 253 |
| Query: | 258 | DMSDIIADHSGPIDVKKMGGGVLTACSLFIFGHLLQQLTGFPGPVLMIVAAAILRYINVI | 317 |
| | | D+SD + + PIDVE MG GVL AC+LFI G LLQ LTGFPGPVLMIV AA LKY+NV+ | |
| Sbjct: | 254 | DLSDALEEDKAPIDVKLMGAGVLIACTLFITGGLLQHLTGFPGPVLMIVVAAFLKYLNVV | 313 |
| Query: | 318 | PRETQNGAKQLYKFISGNFTFPLMAGLGLLYIPLKDVVATLSIQYFIVVISVVFTVISVG | 377 |
| | | P+ETQ G+KQLYKFISGNFTFPLM GLG+LYIPLKDVV LS QYF+VVISVVFTVI+ G | |
| Sbjct: | 314 | PKETQRGSKQLYKFISGMFTFPLMVGLGMLYIPLKDVVGMLSWQYFVVVISVVFTVIATG | 373 |
| Query: | 378 | FFVSRFLNMNPVEAGIISACQSGMGGTGDVAILSTADRMNLMPFAQVATRLGGAITVITM | 437 |
| | | FFVSRF+NMMPVEA I+SACQSGMGGTGDVAILSTA+RM LMPFAQVATRLGGAITVITM | |
| Sbjct: | 374 | FFVSRFMNMNPVEAAIVSACQSGMGGTGDVAILSTANRMTLMPFAQVATRLGGAITVITM | 433 |
| Query: | 438 | TAILRMLF | 445 |
| | | TAI RMLF | |
| Sbjct: | 434 | TAIFRMLF | 441 |

[12272] A related DNA sequence was identified in S. pyogenes <SEQ ID 6951> which encodes the amino acid sequence <SEQ ID 6952>. Analysis of this protein sequence reveals the following:

```
Possible site: 48
>>> Seems to have no N-terminal signal sequence
INTEGRAL Likelihood = −11.89 Transmembrane 361-377 ( 350-383)
INTEGRAL Likelihood = −7.43 Transmembrane 84-100 ( 79-102)
INTEGRAL Likelihood = −6.16 Transmembrane 150-166 ( 137-171)
INTEGRAL Likelihood = −4.88 Transmembrane 30-46 ( 24-48)
INTEGRAL Likelihood = −4.35 Transmembrane 299-315 ( 297-316)
INTEGRAL Likelihood = −4.14 Transmembrane 117-133 ( 115-134)
INTEGRAL Likelihood = −3.19 Transmembrane 54-70 ( 51-75)
INTEGRAL Likelihood = −2.92 Transmembrane 425-441 ( 425-442)
INTEGRAL Likelihood = −2.81 Transmembrane 213-229 ( 209-232)
INTEGRAL Likelihood = −2.44 Transmembrane 273-289 ( 271-290)
----- Final Results -----
                            bacterial membrane --- Certainty = 0.5755(Affirmative) < succ>
                              bacterial outside --- Certainty = 0.0000(Not Clear) < succ>
                          bacterial cytoplasm --- Certainty = 0.0000(Not Clear) < succ>
```

[12273] The protein has homology with the following sequences in the databases:

| >GP: AAB18291 GB: U35658 L-malate permease [Streptococcus bovis] | | | |
|---|---|---|---|
| Identities = 344/443 (77%), Positives = 394/443 (88%), Gaps = 6/443 (1%) | | | |
| Query: | 4 | ISKKMPQKDLSEHSKAWQNR----RIGSVPLPVYLVLATLILVTGWLQQLPVNMLGGFAV | 59 |
| | | + KK+P +E W+N+ RIGSV LPVYLV A++ILVT L+QLPVNMLGGFAV | |
| Sbjct: | 1 | MEKKLPATAANETD--WRNKLTKTRIGSVTLPVYLVTASIILVTALLEQLPVNMLGGFAV | 58 |
| Query: | 60 | ILTLGWLLGTIGATIPGLKHFGGPAILSLLVPSILVFFNLLNPNVLEATNVLMKQANFLY | 119 |
| | | ILT+GWLLGTIG IP LKHFGGPAILSLLVPSI+VFFNLLN NVL++T++LMKQANFLY | |
| Sbjct: | 59 | ILTMGWLLGTIGGNIPILKHFGGPAILSLLVPSIMVFFNLLNQNVLDSTDILMKQANFLY | 118 |
| Query: | 120 | FYIACLVCGSILGMNRKILIQGLFRMIIPMLLGMVCAMGVGTLVGVILGLDWQHTLFYVV | 179 |
| | | FYIACLVCGSILGMNRKIL+QGL RMI+PM LGM+ AMGVGTLVG +LGL W+H+LFY+V | |
| Sbjct: | 119 | FYIACLVCGSILGMNRKILVQGLMRMIVPMALGMILAMGVGTLVGTLLGLGWKHSLFYIV | 178 |
| Query: | 180 | TPVLAGGIGEGILPLSLGYSAITGVGSEQLVAQLIPATIIGNFFAILCTALLNRFGEKHP | 239 |
| | | TPVLAGGIGEGILPLSLGYSAITG+ SEQLV QLIPATIIGNFFAI+C+ LL+R GEK P | |
| Sbjct: | 179 | TPVLAGGIGEGILPLSLGYSAITGLPSEQLVGQLIPATIIGNFFAIMCSGLLSRLGEKRP | 238 |
| Query: | 240 | SYSGQGQLVKIGHSEDMSDALKDNSGALDVKLMGAGVLTACSLFIAGGLLQHLTDFPGPV | 299 |
| | | SGQGQL+KI +S+D+SDAL+++ +DVKLMGAGVL AC+LFI GGLLQHLT FPGPV | |
| Sbjct: | 239 | ELSGQGQLIKITNSDDLSDALEEDKAPIDVKLMGAGVLIACTLFITGGLLQHLTGFPGPV | 298 |
| Query: | 300 | LMIILAAFLKYLNVIPQETQNGAKQLYKFISSNFTFPLMAGLGLLYIPLKEVVATLSWQY | 359 |
| | | LMI++AAFLKYLNV+P+ETQ G+KQLYKFIS NFTFPLM GLG+LYIPLK+VV LSWQY | |
| Sbjct: | 299 | LMIVVAAFLKYLNVVPKETQRGSKQLYKFISGNFTFPLMVGLGMLYIPLKDVVGMLSWQY | 358 |
| Query: | 360 | FIVVISVVLTVVSVGFFVSRFLNMSPVEAAIISACQSGMGGTGDVAILSTADRMNLMPFA | 419 |
| | | F+VVISVV TV++ GFFVSRF+NM+PVEAAI+SACQSGMGGTGDVAILSTA+RM LMPFA | |
| Sbjct: | 359 | FVVVISVVFTVIATGFFVSRFMNMNPVEAAIVSACQSGMGGTGDVAILSTANRMTLMPFA | 418 |
| Query: | 420 | QVATRLGGAITVITMTAILRIIF | 442 |
| | | QVATRLGGAITVITMTAI R++F | |
| Sbjct: | 419 | QVATRLGGAITVITMTAIFRMLF | 441 |

[12274] An alignment of the GAS and GBS proteins is shown below.

| Identities = 356/419 (84%), Positives = 385/419 (90%) | | | |
|---|---|---|---|
| Query: | 27 | KIGSVPLPVYVCLALLILLAGFLQKLPVNMLGGFAVILTMGWFLGTIGASIPGFKNFGGP | 86 |
| | | +IGSVPLPVY+ LA LIL+ G+LQ+LPVNMLGGFAVILT+GW LGTIGA+IPG K+FGGP | |
| Sbjct: | 24 | RIGSVPLPVYLVLATLILVTGWLQQLPVNMLGGFAVILTLGWLLGTIGATIPGLKHFGGP | 83 |
| Query: | 87 | AILSLLVPSILVFFNLINKNVLESTNMLMKQANFLYFYIACLVSGSILGMNRKMLIQGLL | 146 |
| | | AILSLLVPSILVFFNL+N NVLE+TN+LMKQANFLYFYIACLV GSILGMNRK+LIQGL | |
| Sbjct: | 84 | AILSLLVPSILVFFNLLNPNVLEATNVLMKQANFLYFYIACLVCGSILGMNRKILIQGLF | 143 |
| Query: | 147 | RMIFPMLLGMVCAMMVGTFVGVILGLEWRHTLFYIVTPVLAGGIGEGILPLSLGYSSITG | 206 |
| | | RMI PMLLGMVCAM VGT VGVILGL+W+HTLFY+VTPVLAGGIGEGILPLSLGYS+ITG | |
| Sbjct: | 144 | RMIIPMLLGMVCAMGVGTLVGVILGLDWQHTLFYVVTPVLAGGIGEGILPLSLGYSAITG | 203 |
| Query: | 207 | VASEQLVAQLIPATIIGNFFAILCTALLNRLGEKKPHLSGQGQLVRLNKGEDMSDIIADH | 266 |
| | | V SEQLVAQLIPATIIGNFFAILCTALLNR GEK P SGQGQLV++ EDMSD + D+ | |
| Sbjct: | 204 | VGSEQLVAQLIPATIIGNFFAILCTALLNRFGEKHPSYSGQGQLVKIGHSEDMSDALKDN | 263 |
| Query: | 267 | SGPIDVKKMGGGVLTACSLFIFGHLLQQLTGFPGPVLMIVAAAILKYINVIPRETQNGAK | 326 |
| | | SG +DVK MG GVLTACSLFI G LLQ LT FPGPVLMI+ AA LKY+NVIP+ETQNGAK | |
| Sbjct: | 264 | SGALDVKLMGAGVLTACSLFIAGGLLQHLTDFPGPVLMIILAAFLKYLNVIPQETQNGAK | 323 |
| Query: | 327 | QLYKFISGNFTFPLMAGLGLLYIPLKDVVATLSIQYFIVVISVVFTVISVGFFVSRFLNM | 386 |
| | | QLYKFIS NFTFPLMAGLGLLYIPLK+VVATLS QYFIVVISVV TV+SVGFFVSRFLNM | |
| Sbjct: | 324 | QLYKFISSNFTFPLMAGLGLLYIPLKEVVATLSWQYFIVVISVVLTVVSVGFFVSRFLNM | 383 |
| Query: | 387 | NPVEAGIISACQSGMGGTGDVAILSTADRMNLMPFAQVATRLGGAITVITMTAILRMLF | 445 |
| | | +PVEA IISACQSGMGGTGDVAILSTADRMNLMPFAQVATRLGGAITVITMTAILR++F | |
| Sbjct: | 384 | SPVEAAIISACQSGMGGTGDVAILSTADRMNLMPFAQVATRLGGAITVITMTAILRIIF | 442 |

[12275] Based on this analysis, it was predicted that these proteins and their epitopes could be useful antigens for vaccines or diagnostics.

### EXAMPLE 2248

[12276] A DNA sequence (GBSx2369) was identified in S. agalactiae <SEQ ID 6953> which encodes the amino acid sequence <SEQ ID 6954>. This protein is predicted to be malic enzyme (mae). Analysis of this protein sequence reveals the following:

| Possible site: 48 | | | | |
|---|---|---|---|---|
| >>> Seems to have no N-terminal signal sequence | | | | |
| | INTEGRAL | Likelihood = −2.28 | Transmembrane | 164-180 (164-181) |

```
----- Final Results -----
                              bacterial membrane --- Certainty = 0.1914(Affirmative) < succ>
                                bacterial outside --- Certainty = 0.0000(Not Clear) < succ>
                            bacterial cytoplasm --- Certainty = 0.0000(Not Clear) < succ>
```

[12277] The protein has homology with the following sequences in the GENPEPT database.

| >GP: AAB07709 GB: U35659 malic enzyme [Streptococcus bovis] | | | |
|---|---|---|---|
| Identities = 285/386 (73%), Positives = 332/386 (85%), Gaps = 1/386 (0%) | | | |
| Query: | 2 | SENLGQLAINQARENGGKLEVISKVKVEDKRDLSIAYTPGVASVSSAIAEDVELAYELTT | 61 |
| | | ++++ +LAI QA++ GGKLEV KV +E K DL IAYTPGVA+VSSAI E E AYELTT | |
| Sbjct: | 3 | TKDVKELAIEQAKKFGGKLEVCPKVPIETKADLGIAYTPGVAAVSSAIYEKKERAYELTT | 62 |
| Query: | 62 | KKNTVAVVSDGSAVLGLGDIGPEAAMPVMEGKAALFKRFANVDAVPIVLKTNDTEEIISI | 121 |
| | | KKNTVAV+SDGSAVLGLG+IGPEAAMPVMEGKAALFKRFA VD++P+VL T DTEEII | |
| Sbjct: | 63 | KKNTVAVISDGSAVLGLGNIGPEAAMPVMEGKAALFKRFAGVDSIPLVLDTQDTEEIIQT | 122 |
| Query: | 122 | VKAISPTFGGINLEDISAPRCFEIEQRLIEECDIPVFHDDQHGTAIVVLAALFNSLKLVK | 181 |
| | | VK ++PTFGGINLEDISAPRCFEIEQRLI+E DIPVFHDDQHGTAIVVLAAL+NSLKL+ | |
| Sbjct: | 123 | VKFLAPTFGGINLEDISAPRCFEIEQRLIDELDIPVFHDDQHGTAIVVLAALYNSLKLIN | 182 |
| Query: | 182 | KDIEDIRVVVNGGGSAGLSITRKLLSAGAKHVTVVDRFGIINDKDRESLAPHHKAIAKLT | 241 |
| | | K IEDI VV+NGGGSAGLSITRK L+AG KH+ +VDR GI+++ D +L PHH IAKLT | |
| Sbjct: | 183 | KKIEDIHVVINGGGSAGLSITRKFLAAGVKHIIIVDRTGILSETD-TALPPHHAEIAKLT | 241 |
| Query: | 242 | NREFQSGSLEDALENADVFIGVSAPEALHAEWISKMADKPIVFAMANPIPEIYPDQALKA | 301 |
| | | NRE ++G L ALE ADVF+GVSAP L EWI +M ++P++FAMANP+PEI+PD+AL A | |
| Sbjct: | 242 | NREHRTGDLATALEGADVFVGVSAPGVLKPEWIQQMNEQPVIFAMANPVPEIFPDEALAA | 301 |
| Query: | 302 | GAYIVGTGRSDFPNQINNVLAFPGIFRGALDARAKTITVEMQIAAARGIASLIPEEELST | 361 |
| | | GAYIVGTGRSDFPNQINNVLAFPGIFRGALDARAK IT+EMQIAAA+GIA LIP+ EL+ | |
| Sbjct: | 302 | GAYIVGTGRSDFPNQINNVLAFPGIFRGALDARAKKITIEMQIAAAKGIAKLIPDNELTP | 361 |
| Query: | 362 | THIIPNAFQNDVADVVAKSVSNAVQK | 387 |
| | | T+IIP+ FQ VA VVA+SV NAV++ | |
| Sbjct: | 362 | TNIIPDPFQEGVAKVVAESVRNAVKE | 387 |

[12278] A related DNA sequence was identified in S. pyogenes <SEQ ID 6955> which encodes the amino acid sequence <SEQ ID 6956>. Analysis of this protein sequence reveals the following:

| Possible site: 48 | | | | |
|---|---|---|---|---|
| >>> Seems to have no N-terminal signal sequence | | | | |
| | INTEGRAL | Likelihood = −2.44 | Transmembrane | 164-180 (164-181) |
| | INTEGRAL | Likelihood = −1.75 | Transmembrane | 94-110 (94-110) |

```
----- Final Results -----
                              bacterial membrane --- Certainty = 0.1977(Affirmative) < succ>
                                bacterial outside --- Certainty = 0.0000(Not Clear) < succ>
                            bacterial cytoplasm --- Certainty = 0.0000(Not Clear) < succ>
```

[12279] The protein has homology with the following sequences in the databases:

| >GP: AAB07709 GB: U35659 malic enzyme [Streptococcus bovis] | | | |
|---|---|---|---|
| Identities = 289/379 (76%), Positives = 334/379 (87%), Gaps = 1/379 (0%) | | | |
| Query: | 7 | QLALEQAKTFGGKLEVQPKVDIKTKHDLSIAYTPGVASVSSAIAKDKTLAYDLTTKKNTV | 66 |
| | | +LA+EQAK FGGKLEV PKV I+TK DL IAYTPGVA+VSSAI + K AY+LTTKKNTV | |
| Sbjct: | 8 | ELAIEQAKKFGGKLEVCPKVPIETKADLGIAYTPGVAAVSSAIYEKKERAYELTTKKNTV | 67 |
| Query: | 67 | AVISDGTAVLGLGDIGPEAAMPVMEGKAALFKAFAGVDAIPIVLDTKDTEEIISIVKALA | 126 |
| | | AVISDG+AVLGLG+IGPEAAMPVMEGKAALFK FAGVD+IP+VLDT+DTEEII VK LA | |
| Sbjct: | 68 | AVISDGSAVLGLGNIGPEAAMPVMEGKAALFKRFAGVDSIPLVLDTQDTEEIIQTVKFLA | 127 |
| Query: | 127 | PTFGGINLEDISAPRCFEIEQRLIKECHIPVFHDDQHGTAIVVLAAIFNSLKLLKKSLDE | 186 |
| | | PTFGGINLEDISAPRCFEIEQRLI E IPVFHDDQHGTAIVVLAA++NSLKL+ K +++ | |
| Sbjct: | 128 | PTFGGINLEDISAPRCFEIEQRLIDELDIPVFHDDQHGTAIVVLAALYNSLKLINKKIED | 187 |
| Query: | 187 | VSIVVNGGGSAGLSITRKLLAAGATKVTVVDKFGIINEQEAAQLAPHHLDIAKVTNREFK | 246 |
| | | + +V+NGGGSAGLSITRK LAAG + +VD+ GI++E + A L PHH +IAK+TNRE + | |
| Sbjct: | 188 | IHVVINGGGSAGLSITRKFLAAGVKHIIIVDRTGILSETDTA-LPPHHAEIAKLTNREHR | 246 |
| Query: | 247 | SGTLEDALEGADIFIGVSAPGVLKAEWISKMAARPVIFAMANPIPEIYPDEALEAGAYIV | 306 |
| | | +G L ALEGAD+F+GVSAPGVLK EWI +M +PVIFAMANP+PEI+PDEAL AGAYIV | |
| Sbjct: | 247 | TGDLATALEGADVFVGVSAPGVLKPEWIQQMNEQPVIFAMANPVPEIFPDEALAAGAYIV | 306 |
| Query: | 307 | GTGRSDFPNQINNVLAFPGIFRGALDARAKTITVEMQIAAAKGIASLVPDDALSTTNIIP | 366 |
| | | GTGRSDFPNQINNVLAFPGIFRGALDARAK IT+EMQIAAAKGIA L+PD+ L+ TNIIP | |
| Sbjct: | 307 | GTGRSDFPNQINNVLAFPGIFRGALDARAKKITIEMQIAAAKGIAKLIPDNELTPTNIIP | 366 |
| Query: | 367 | DAFKEGVAEIVAKSVRSVV | 385 |
| | | D F+EGVA++VA+SVR+ V | |
| Sbjct: | 367 | DPFQEGVAKVVAESVRNAV | 385 |

[12280] An alignment of the GAS and GBS proteins is shown below.

| Identities = 306/387 (79%), Positives = 349/387 (90%) | | | |
|---|---|---|---|
| Query: | 1 | MSENLGQLAINQARENGGKLEVISKVKVEDKRDLSIAYTPGVASVSSAIAEDVELAYELT | 60 |
| | | M LGQLA+ QA+ GGKLEV KV ++ K DLSIAYTPGVASVSSAIA+D LAY+LT | |
| Sbjct: | 1 | MKNQLGQLALEQAKTFGGKLEVQPKVDIKTKHDLSIAYTPGVASVSSAIAKDKTLAYDLT | 60 |
| Query: | 61 | TKKNTVAVVSDGSAVLGLGDIGPEAAMPVMEGKAALFKRFANVDAVPIVLKTNDTEEIIS | 120 |
| | | TKKNTVAV+SDG+AVLGLGDIGPEAAMPVMEGKAALFK FA VDA+PIVL T DTEEIIS | |
| Sbjct: | 61 | TKKNTVAVISDGTAVLGLGDIGPEAAMPVMEGKAALFKAFAGVDAIPIVLDTKDTEEIIS | 120 |
| Query: | 121 | IVKAISPTFGGINLEDISAPRCFEIEQRLIEECDIPVFHDDQHGTAIVVLAALFNSLKLV | 180 |
| | | IVKA++PTFGGINLEDISAPRCFEIEQRLI+EC IPVFHDDQHGTAIVVLAA+FNSLKL+ | |
| Sbjct: | 121 | IVKALAPTFGGINLEDISAPRCFEIEQRLIKECHIPVFHDDQHGTAIVVLAAIFNSLKLL | 180 |
| Query: | 181 | KKDIEDIRVVVNGGGSAGLSITRKLLSAGAKHVTVVDRFGIINDKDRESLAPHHKAIAKL | 240 |
| | | KK ++++ +VVNGGGSAGLSITRKLL+AGA VTVVD+FGIIN+++ LAPHH IAK+ | |
| Sbjct: | 181 | KKSLDEVSIVVNGGGSAGLSITRKLLAAGATKVTVVDKFGIINEQEAAQLAPHHLDIAKV | 240 |
| Query: | 241 | TNREFQSGSLEDALENADVFIGVSAPEALHAEWISKMADKPIVFAMANPIPEIYPDQALK | 300 |
| | | TNREF+SG+LEDALE AD+FIGVSAP L AEWISKMA +P++FAMANPIPEIYPD+AL+ | |
| Sbjct: | 241 | TNREFKSGTLEDALEGADIFIGVSAPGVLKAEWISKMAARPVIFAMANPIPEIYPDEALE | 300 |
| Query: | 301 | AGAYIVGTGRSDFPNQINNVLAFPGIFRGALDARAKTITVEMQIAAARGIASLIPEEELS | 360 |
| | | AGAYIVGTGRSDFPNQINNVLAFPGIFRGALDARAKTITVEMQIAAA+GIASL+P++ LS | |
| Sbjct: | 301 | AGAYIVGTGRSDFPNQINNVLAFPGIFRGALDARAKTITVEMQIAAAKGIASLVPDDALS | 360 |
| Query: | 361 | TTHIIPNAFQNDVADVVAKSVSNAVQK | 387 |
| | | TT+IIP+AF+ VA++VAKSV + V K | |
| Sbjct: | 361 | TTNIIPDAFKEGVAEIVAKSVRSVVLK | 387 |

[12281] Based on this analysis, it was predicted that these proteins and their epitopes could be useful antigens for vaccines or diagnostics.

### EXAMPLE 2249

[12282] A DNA sequence (GBSx2370) was identified in S. agalactiae <SEQ ID 6957> which encodes the amino acid sequence <SEQ ID 6958>. This protein is predicted to be Bta. Analysis of this protein sequence reveals the following:

| Possible site: 19 | | | | |
|---|---|---|---|---|
| >>> Seems to have no N-terminal signal sequence | | | | |
| | INTEGRAL | Likelihood = −2.02 | Transmembrane | 29-45 (29-45) |

```
----- Final Results -----
                              bacterial membrane --- Certainty = 0.1808(Affirmative) < succ>
                                bacterial outside --- Certainty = 0.0000(Not Clear) < succ>
                            bacterial cytoplasm --- Certainty = 0.0000(Not Clear) < succ>
```

[12283] The protein has homology with the following sequences in the GENPEPT database.

| >GP: AAD56628 GB: AF165218 Bta [Streptococcus pneumoniae] | | | |
|---|---|---|---|
| Identities = 35/112 (31%), Positives = 63/112 (56%) | | | |
| Query: | 1 | MYSFEELLATMTLITAAEIEDKIDSNQDFVLFIGRISCPFCHLFVPKIVEVADEDEFELF | 60 |
| | | M F + + + + T ++ +D + FIGR +CP+C F + V E + ++ | |
| Sbjct: | 1 | MEQFLDNIKDLEVTTVVRAQEALDKKETATFFIGRKTCPYCRKFAGTLSGVVAETKAHIY | 60 |
| Query: | 61 | HLDSEDFDHWTANKEFRNKYDIPTVPGLMVVKNGTIKVKCDSKMTKEEIREF | 112 |
| | | ++SE+ + FR++Y IPTVPG + + +G I V+CDS M+ +EI++F | |
| Sbjct: | 61 | FINSEEASQLNDLQAFRSRYGIPTVPGFVHITDGQINVRCDSSMSAQEIKDF | 112 |

[12284] A related DNA sequence was identified in S. pyogenes <SEQ ID 6959> which encodes the amino acid sequence <SEQ ID 6960>. Analysis of this protein sequence reveals the following:

```
Possible site: 25
>>> Seems to have no N-terminal signal sequence
----- Final Results -----
                            bacterial cytoplasm --- Certainty = 0.0900(Affirmative) < succ>
                              bacterial membrane --- Certainty = 0.0000(Not Clear) < succ>
                                bacterial outside --- Certainty = 0.0000(Not Clear) < succ>
```

[12285] An alignment of the GAS and GBS proteins is shown below.

| Identities = 39/111 (35%), Positives = 66/111 (59%) | | | |
|---|---|---|---|
| Query: | 3 | SFEELLATMTLITAAEIEDKIDSNQDFVLFIGRISCPFCHLFVPKIVEVADEDEFELFHL | 62 |
| | | +FEE++A + AE+ I S +D ++F+GR SCP+C F PK+ +VA +++ E++ + | |
| Sbjct: | 11 | TFEEIVANFIPSSVAEVTSAIASGKDMIVFLGRSSCPYCRRFAPKLAQVATDNQKEVYFV | 70 |
| Query: | 63 | DSEDFDHWTANKEFRNKYDIPTVPGLMVVKNGTIKVKCDSKMTKEEIREFI | 113 |
| | | DSE+ FR Y + TVP L+V + + CDS +T ++I F+ | |
| Sbjct: | 71 | DSENAADAAELAAFRENYQLVTVPALLVSYDQHQRAVCDSSLTPDDILAFL | 121 |

[12286] Based on this analysis, it was predicted that this protein and its epitopes, could be useful antigens for vaccines or diagnostics.

### EXAMPLE 2250

[12287] A DNA sequence (GBSx2371) was identified in S. agalactiae <SEQ ID 6961> which encodes the amino acid sequence <SEQ ID 6962>. Analysis of this protein sequence reveals the following:

| Possible site: 26 | | | | |
|---|---|---|---|---|
| >>> Seems to have an uncleavable N-term signal seq | | | | |
| | INTEGRAL | Likelihood = −7.75 | Transmembrane | 2-18 (1-21) |

```
----- Final Results -----
                              bacterial membrane --- Certainty = 0.4100(Affirmative) < succ>
                                bacterial outside --- Certainty = 0.0000(Not Clear) < succ>
                            bacterial cytoplasm --- Certainty = 0.0000(Not Clear) < succ>
```

[12288] A related GBS nucleic acid sequence <SEQ ID 9437> which encodes amino acid sequence <SEQ ID 9438> was also identified.

[12289] The protein has homology with the following sequences in the GENPEPT database.

| >GP: BAA11328 GB: D78257 ORF11 [Enterococcus faecalis] | | | |
|---|---|---|---|
| Identities = 36/80 (45%), Positives = 58/80 (72%) | | | |
| Query: | 1 | MSLPIIMLVVMVGMMFFMQRQQKKQAQERQKQLNAVQKGDEIVTIGGLFGVVDEVNTEAQ | 60 |
| | | M L +IML+V+V M F++ R QKKQ +ERQ LN +Q GD +VTIGGL GV+ E++++ + | |
| Sbjct: | 1 | MKLMLIMLLVIVAMYFYLFRTQKKQQKERQDFLNNLQPGDAVVTIGGLHGVISEISSDKK | 60 |
| Query: | 61 | RMVLDVDGVYLTFELAAIKS | 80 |
| | | ++ LD +G + F+ +I++ | |
| Sbjct: | 61 | KVTLDCEGAFFDFDQQSIRT | 80 |

[12290] A related DNA sequence was identified in S. pyogenes <SEQ ID 6963> which encodes the amino acid sequence <SEQ ID 6964>. Analysis of this protein sequence reveals the following:

| Possible site: 60 | | | | |
|---|---|---|---|---|
| >>> Seems to have an uncleavable N-term signal seq | | | | |
| | INTEGRAL | Likelihood = −6.10 | Transmembrane | 3-19 (1-22) |
| | INTEGRAL | Likelihood = −3.03 | Transmembrane | 63-79 (63-79) |

```
----- Final Results -----
                              bacterial membrane --- Certainty = 0.3442(Affirmative) < succ>
                                bacterial outside --- Certainty = 0.0000(Not Clear) < succ>
                            bacterial cytoplasm --- Certainty = 0.0000(Not Clear) < succ>
```

[12291] The protein has homology with the following sequences in the databases:

| >GP: BAA11328 GB: D78257 ORF11 [Enterococcus faecalis] | | | |
|---|---|---|---|
| Identities = 29/75 (38%), Positives = 52/75 (68%) | | | |
| Query: | 6 | ILMFVVMLGLIWFMQRQQKKQAQERQNQLNAIEKGDEVVTIGGMFAIVDEVDTTAKKIVL | 65 |
| | | ++M +V++ + +++ R QKKQ +ERQ+ LN ++ GD VVTIGG+ ++ E+ + KK+ L | |
| Sbjct: | 5 | LIMLLVIVAMYFYLFRTQKKQQKERQDFLNNLQPGDAVVTIGGLHGVISEISSDKKKVTL | 64 |
| Query: | 66 | DVDGVFLTFELLAIK | 80 |
| | | D +G F F+ +I+ | |
| Sbjct: | 65 | DCEGAFFDFDQQSIR | 79 |

[12292] An alignment of the GAS and GBS proteins is shown below.

| Identities = 63/90 (70%), Positives = 80/90 (88%) | | | |
|---|---|---|---|
| Query: | 4 | PIIMLVVMVGMMFFMQRQQKKQAQERQKQLNAVQKGDEIVTIGGLFGVVDEVNTEAQRMV | 63 |
| | | PI+M VVM+G+++FMQRQQKKQAQERQ QLNA++KGDE+VTIGG+F +VDEV+T A+++V | |
| Sbjct: | 5 | PILMFVVMLGLIWFMQRQQKKQAQERQNQLNAIEKGDEVVTIGGMFAIVDEVDTTAKKIV | 64 |
| Query: | 64 | LDVDGVYLTFELAAIKSVVSKAATPTEPVE | 93 |
| | | LDVDGV+LTFEL AIK +V+KA T T VE | |
| Sbjct: | 65 | LDVDGVFLTFELLAIKRIVTKATTETTLVE | 94 |

[12293] Based on this analysis, it was predicted that these proteins and their epitopes could be useful antigens for vaccines or diagnostics.

### EXAMPLE 2251

[12294] A DNA sequence (GBSx2372) was identified in S. agalactiae <SEQ ID 6965> which encodes the amino acid sequence <SEQ ID 6966>. Analysis of this protein sequence reveals the following:

```
Possible site: 21
>>> Seems to have an uncleavable N-term signal seq
----- Final Results -----
                              bacterial membrane --- Certainty = 0.0000(Not Clear) < succ>
                                bacterial outside --- Certainty = 0.0000(Not Clear) < succ>
                            bacterial cytoplasm --- Certainty = 0.0000(Not Clear) < succ>
```

[12295] The protein has no significant homology with any sequences in the GENPEPT database.

[12296] No corresponding DNA sequence was identified in S. pyogenes.

[12297] Based on this analysis, it was predicted that this protein and its epitopes, could be useful antigens for vaccines or diagnostics.

### EXAMPLE 2252

[12298] A DNA sequence (GBSx2373) was identified in S. agalactiae <SEQ ID 6967> which encodes the amino acid sequence <SEQ ID 6968>. Analysis of this protein sequence reveals the following:

| Possible site: 16 | | | | |
|---|---|---|---|---|
| >>> Seems to have no N-terminal signal sequence | | | | |
| | INTEGRAL | Likelihood = −1.38 | Transmembrane | 164-180 (164-180) |

```
----- Final Results -----
                              bacterial membrane --- Certainty = 0.1553(Affirmative) < succ>
                                bacterial outside --- Certainty = 0.0000(Not Clear) < succ>
                            bacterial cytoplasm --- Certainty = 0.0000(Not Clear) < succ>
```

[12299] The protein has homology with the following sequences in the GENPEPT database.

| >GP: CAB61731 GB: AL133220 putative oxidoreductase. | | | |
|---|---|---|---|
| [Streptomyces coelicolor A3(2)] | | | |
| Identities = 72/216 (33%), Positives = 120/216 (55%), | | | |
| Gaps = 1/216 (0%) | | | |
| Query: | 14 | AQALEARGQKLYSVANRTYDKGLEFATKYGIQKVYDHIDQVFEDPEVDIIYISTPHNTHI | 73 |
| | | A ++ ++ +VA+RT FA ++GI + Y + + D +VD++Y++TPH+ H | |
| Sbjct: | 25 | ADLVDLPDAEVVAVASRTEASAKTFAERFGIPRAYGGWETLARDEDVDVVYVATPHSAHR | 84 |
| Query: | 74 | SFLRKALANGKHVLCEKSITLNSTELKEAIDLAETNHVVLAEAMTIFHMPIYRQLKTLVD | 133 |
| | | + L G++VLCEK TLN+ E E + LA N V L EAM ++ P+ R+LK LV | |
| Sbjct: | 85 | TAAGLCLEAGRNVLCEKPFTLNAREAAELVALARENGVFLMEAMWMYCNPLVRRLKELVA | 144 |
| Query: | 134 | SGKLGPLKMIQMNFGSYKEYDMTNRFFSRDLAGGALLDIGVYALSCIRWFMSEAPHNITS | 193 |
| | | G +G ++ +Q +FG + +R GGALLD+GVY +S + + E P ++ + | |
| Sbjct: | 145 | DGAIGEVRSLQADFGLAGPFPAAHRLRDPAQGGGALLDLGVYPVSFAQLLLGE-PTDVAA | 203 |
| Query: | 194 | QVTFAPTGVDEQVGILLTNPANEMATVSLSLHAKQP | 229 |
| | | + + GVD Q G LL+ + +A++ S+ P | |
| Sbjct: | 204 | RAVLSEEGVDLQTGALLSYGNDALASIHCSITGGTP | 239 |

[12300] Based on this analysis, it was predicted that this protein and its epitopes, could be useful antigens for vaccines or diagnostics.

### EXAMPLE 2253

[12301] A DNA sequence (GBSx2374) was identified in S. agalactiae <SEQ ID 6969> which encodes the amino acid sequence <SEQ ID 6970>. This protein is predicted to be surface protein Rib. Analysis of this protein sequence reveals the following:

```
Possible site: 45
>>> Seems to have no N-terminal signal sequence
----- Final Results -----
                            bacterial cytoplasm --- Certainty = 0.4957(Affirmative) < succ>
                              bacterial membrane --- Certainty = 0.0000(Not Clear) < succ>
                                bacterial outside --- Certainty = 0.0000(Not Clear) < succ>
```

[12302] No corresponding DNA sequence was identified in S. pyogenes.

[12303] Based on this analysis, it was predicted that this protein and its epitopes, could be useful antigens for vaccines or diagnostics.

### EXAMPLE 2254

[12304] A DNA sequence (GBSx2375) was identified in S. agalactiae <SEQ ID 6971> which encodes the amino acid sequence <SEQ ID 6972>. This protein is predicted to be surface protein Rib. Analysis of this protein sequence reveals the following:

```
Possible site: 24
>>> Seems to have no N-terminal signal sequence
----- Final Results -----
                            bacterial cytoplasm --- Certainty = 0.1892(Affirmative) < succ>
                              bacterial membrane --- Certainty = 0.0000(Not Clear) < succ>
                                bacterial outside --- Certainty = 0.0000(Not Clear) < succ>
```

[12305] No corresponding DNA sequence was identified in S. pyogenes.

[12306] Based on this analysis, it was predicted that this protein and its epitopes, could be useful antigens for vaccines or diagnostics.

### EXAMPLE 2255

[12307] A DNA sequence (GBSx2376) was identified in S. agalactiae <SEQ ID 6973> which encodes the amino acid sequence <SEQ ID 6974>. This protein is predicted to be a host cell surface-exposed lipoprotein. Analysis of this protein sequence reveals the following:

| Possible site: 38 | | | | |
|---|---|---|---|---|
| >>> Seems to have an uncleavable N-term signal seq | | | | |
| | INTEGRAL | Likelihood = −7.75 | Transmembrane | 9-25 (5-28) |

```
----- Final Results -----
                              bacterial membrane --- Certainty = 0.4100(Affirmative) < succ>
                                bacterial outside --- Certainty = 0.0000(Not Clear) < succ>
                            bacterial cytoplasm --- Certainty = 0.0000(Not Clear) < succ>
```

[12308] A related GBS nucleic acid sequence <SEQ ID 9005> which encodes amino acid sequence <SEQ ID 9006> was also identified. Analysis of this protein sequence reveals the following:

| Lipop: Possible site: −1 Crend: 3 | | | | |
|---|---|---|---|---|
| SRCFLG: 0 | | | | |
| McG: Length of UR: 24 | | | | |
| Peak Value of UR: 2.84 | | | | |
| Net Charge of CR: 2 | | | | |
| McG: Discrim Score: 10.29 | | | | |
| GvH: Signal Score (−7.5): −4.34 | | | | |
| Possible site: 34 | | | | |
| >>> Seems to have an uncleavable N-term signal seq | | | | |
| Amino Acid Composition: calculated from 1 | | | | |
| ALOM program count: 1 value: −7.75 threshold: 0.0 | | | | |
| | INTEGRAL | Likelihood = −7.75 | Transmembrane | 5-21 (1-24) |
| | PERIPHERAL | Likelihood = 13.31 | 86 | |

```
modified ALOM score: 2.05
icml HYPID: 7 CFP: 0.410
*** Reasoning Step: 3
----- Final Results -----
                              bacterial membrane --- Certainty = 0.4100(Affirmative) < succ>
                                bacterial outside --- Certainty = 0.0000(Not Clear) < succ>
                            bacterial cytoplasm --- Certainty = 0.0000(Not Clear) < succ>
```

[12309] The protein has homology with the following sequences in the GENPEPT database.

| >GP: AAC03455 GB: AF020798 putative host cell surface-exposed | | | |
|---|---|---|---|
| lipoprotein [Streptococcus thermophilus bacteriophage TP-J34] | | | |
| Identities = 40/102 (39%), Positives = 63/102 (61%), Gaps = 10/102 (9%) | | | |
| Query: | 101 | KNALISAKIYSKTMNLSKQSIFEQLYSESPDKATHSDKFTKEESQYAIDHLKVDFKENAL | 160 |
| | | + A+ AK Y+ T+++SK+ + QL S DK++++ S YA+++ +D+ + AL | |
| Sbjct: | 51 | RTAVSKAKQYASTVHMSKEELRSQLVS--------FDKYSQDASDYAVENSGIDYNKQAL | 102 |
| Query: | 161 | ETAKSYQSSSSLSKEEIYKQLTSTLGDKFTNDEAQYAVDHLK | 202 |
| | | E AK YQ + S+S + I QL S DKFT +EA YAV +LK | |
| Sbjct: | 103 | EKAKQYQDTLSMSPDAIRDQLVSF--DKFTQEEADYAVANLK | 142 |
| Identities = 40/112 (35%), Positives = 64/112 (56%), Gaps = 9/112 (8%) | | | |
| Query: | 41 | KKAKIKFNKTQKKIVKKAREYAKSGHMSKDSIIEKLKKDSKKYRQEDINFVINNLKVDYK | 100 |
| | | + ++ K K + V KA++YA + HMSK+ + +L K Y Q+ ++ + N +DY | |
| Sbjct: | 40 | QSSESKVPKEYRTAVSKAKQYASTVHMSKEELRSQLVSFDK-YSQDASDYAVENSGIDYN | 98 |
| Query: | 101 | KNALISAKIYSKTMNLSKQSIFEQLYSESPDKATHSDKFTKEESQYAIDHLK | 152 |
| | | K AL AK Y T+++S +I +QL S DKFT+EE+ YA+ +LK | |
| Sbjct: | 99 | KQALEKAKQYQDTLSMSPDAIRDQLVS--------FDKFTQEEADYAVANLK | 142 |

[12310] No corresponding DNA sequence was identified in S. pyogenes.

[12311] SEQ ID 9006 (GBS122) was expressed in E. coli as a His-fusion product. SDS-PAGE analysis of total cell extract is shown in FIG. 38 (lane 6; MW 21.9 kDa).

[12312] GBS122-His was purified as shown in FIG. 202, lane 8.

[12313] Based on this analysis, it was predicted that this protein and its epitopes, could be useful antigens for vaccines or diagnostics.

### EXAMPLE 2256

[12314] A DNA sequence (GBSx2377) was identified in S. agalactiae <SEQ ID 6975> which encodes the amino acid sequence <SEQ ID 6976>. This protein is predicted to be transposase (orfA). Analysis of this protein sequence reveals the following:

```
Possible site: 42
>>> Seems to have no N-terminal signal sequence
----- Final Results -----
                            bacterial cytoplasm --- Certainty = 0.2830(Affirmative) < succ>
                              bacterial membrane --- Certainty = 0.0000(Not Clear) < succ>
                                bacterial outside --- Certainty = 0.0000(Not Clear) < succ>
```

[12315] The protein has homology with the following sequences in the GENPEPT database.

| >GP: CAB90833 GB: AJ250837 hypothetical | | | |
|---|---|---|---|
| protein [Streptococcus dysgalactiae] | | | |
| Identities = 91/96 (94%), Positives = 93/96 (96%) | | | |
| Query: | 1 | MSRKVRRHFTDDFKQQIVDLYNVGRKRSSLIKVYELTPSTFDKWVRQAKTTGSFKSIDNL | 60 |
| | | MSRK+RRHFTDDFKQQIVDLYN GRKRSSLIK YELTPSTFDKWVRQAKTTGSFKS+DNL | |
| Sbjct: | 1 | MSRKIRRHFTDDFKQQIVDLYNAGRKRSSLIKEYELTPSTFDKWVRQAKTTGSFKSVDNL | 60 |
| Query: | 61 | TDEQRELIELRKHNKELEMQLDILKQAAVIMAQKGK | 96 |
| | | TDEQRELIELRK NKELEMQLDILKQAAVIMAQKGK | |
| Sbjct: | 61 | TDEQRELIELRKRNKELEMQLDILKQAAVIMAQKGK | 96 |

[12316] Based on this analysis, it was predicted that this protein and its epitopes, could be useful antigens for vaccines or diagnostics.

### EXAMPLE 2257

[12317] A DNA sequence (GBSx2378) was identified in S. agalactiae <SEQ ID 6977> which encodes the amino acid sequence <SEQ ID 6978>. This protein is predicted to be transposase (orfB). Analysis of this protein sequence reveals the following:

```
Possible site: 16
>>> Seems to have no N-terminal signal sequence
----- Final Results -----
                            bacterial cytoplasm --- Certainty = 0.2618(Affirmative) < succ>
                              bacterial membrane --- Certainty = 0.0000(Not Clear) < succ>
                                bacterial outside --- Certainty = 0.0000(Not Clear) < succ>
```

[12318] A related GBS nucleic acid sequence <SEQ ID 9915> which encodes amino acid sequence <SEQ ID 9916> was also identified.

[12319] A related GBS nucleic acid sequence <SEQ ID 9903> which encodes amino acid sequence <SEQ ID 9904> was also identified.

[12320] The protein has homology with the following sequences in the GENPEPT database.

| >GP: CAB90834 GB: AJ250837 putative transposase | | | |
|---|---|---|---|
| [Streptococcus dysgalactiae] | | | |
| Identities = 243/259 (93%), Positives = 250/259 (95%) | | | |
| Query: | 1 | MCRWLNMPHSSYYYQAVESVSETEFEETIKRIFLDSESRYGSRKIKICLNNEGITLSRRR | 60 |
| | | MCRWLN+P SSYYY+AVE VSE E EE+IK IFL+S++RYGSRKIKICLNNEGITLSRRR | |
| Sbjct: | 1 | MCRWLNIPRSSYYYKAVEPVSEAELEESIKAIFLESKARYGSRKIKICLNNEGITLSRRR | 60 |
| Query: | 61 | IRRIMKRLNLVSVYQKATFKPHSRGKNEAPIPNHLDRQFKQERPLQALVTDLTYVRVGNR | 120 |
| | | IRRIMKRLNLVSVYQKATFKPHSRGKNEAPIPNHLDRQFK ERPLQALVTDLTYVRVGNR | |
| Sbjct: | 61 | IRRIMKRLNLVSVYQKATFKPHSRGKNEAPIPNHLDRQFKPERPLQALVTDLTYVRVGNR | 120 |
| Query: | 121 | WAYVCLIIDLYNREIIGLSLGWHKTAELVKQAIQSIPYALTKVKMFHSDRGKEFDNQLID | 180 |
| | | WAYVCLIIDLYNREIIGLSLGWHKTAELVKQAIQSIPY LTKVKMFHSDRGKEF+NQLID | |
| Sbjct: | 121 | WAYVCLIIDLYNREIIGLSLGWHKTAELVKQAIQSIPYPLTKVKMFHSDRGKEFNNQLID | 180 |
| Query: | 181 | EILEAFGITRSLSQAGCPYDNAVAESTYRAFKIEFVYQETFQLLEELALKTKDYVHWWNY | 240 |
| | | EILEAFGITRSLSQAGCPYDNAVAESTYRAFKIEFVYQETFQ LEELALKTK YVHWWNY | |
| Sbjct: | 181 | EILEAFGITRSLSQAGCPYDNAVAESTYRAFKIEFVYQETFQSLEELALKTKAYVHWWNY | 240 |
| Query: | 241 | HRIHGSLNYQTPMTKRLIA | 259 |
| | | HRIHGSLNYQTPMTKRLIA | |
| Sbjct: | 241 | HRIHGSLNYQTPMTKRLIA | 259 |

[12321] There is also homology to SEQ ID 32.

[12322] Based on this analysis, it was predicted that this protein and its epitopes, could be useful antigens for vaccines or diagnostics.

### EXAMPLE 2258

[12323] A DNA sequence (GBSx2379) was identified in S. agalactiae <SEQ ID 6979> which encodes the amino acid sequence <SEQ ID 6980>. This protein is predicted to be pXO1-128. Analysis of this protein sequence reveals the following:

```
Possible site: 20
>>> Seems to have no N-terminal signal sequence
----- Final Results -----
                            bacterial cytoplasm --- Certainty = 0.3684(Affirmative) < succ>
                              bacterial membrane --- Certainty = 0.0000(Not Clear) < succ>
                                bacterial outside --- Certainty = 0.0000(Not Clear) < succ>
```

[12324] The protein has homology with the following sequences in the GENPEPT database.

| >GP: AAD32432 GB: AF065404 pXO1-128 [Bacillus anthracis] | | | |
|---|---|---|---|
| Identities = 45/69 (65%), Positives = 52/69 (75%) | | | |
| Query: | 17 | MKKAGKSNRVIMETLGIKNNSQIYTWMKWYENEELYRFHQGVGKQYTYGKGLEHLSEVEQ | 76 |
| | | MKK SNR IME LGIKN SQI TWMKWY ++ YRF Q VGKQY+YGKG + LSE+EQ | |
| Sbjct: | 1 | MKKESYSNRTIMEKLGIKNVSQIKTWMKWYRTDQTYRFQQPVGKQYSYGKGPKELSELEQ | 60 |
| Query: | 77 | LQLQVDLLK | 85 |
| | | L+L+ LK | |
| Sbjct: | 61 | LRLENKHLK | 69 |

[12325] No corresponding DNA sequence was identified in S. pyogenes.

[12326] Based on this analysis, it was predicted that this protein and its epitopes, could be useful antigens for vaccines or diagnostics.

### EXAMPLE 2259

[12327] A DNA sequence (GBSx2380) was identified in S. agalactiae <SEQ ID 6981> which encodes the amino acid sequence <SEQ ID 6982>. This protein is predicted to be transposase. Analysis of this protein sequence reveals the following:

```
Possible site: 25
>>> Seems to have an uncleavable N-term signal seq
----- Final Results -----
                              bacterial membrane --- Certainty = 0.0000(Not Clear) < succ>
                                bacterial outside --- Certainty = 0.0000(Not Clear) < succ>
                            bacterial cytoplasm --- Certainty = 0.0000(Not Clear) < succ>
```

[12328] The protein has no significant homology with any sequences in the GENPEPT database.

[12329] No corresponding DNA sequence was identified in S. pyogenes.

[12330] Based on this analysis, it was predicted that this protein and its epitopes, could be useful antigens for vaccines or diagnostics.

### EXAMPLE 2260

[12331] A DNA sequence (GBSx2382) was identified in S. agalactiae <SEQ ID 6985> which encodes the amino acid sequence <SEQ ID 6986>. This protein is predicted to be Lmb. Analysis of this protein sequence reveals the following:

```
Possible site: 18
>>> May be a lipoprotein
----- Final Results -----
                              bacterial membrane --- Certainty = 0.0000(Not Clear) < succ>
                                bacterial outside --- Certainty = 0.0000(Not Clear) < succ>
                            bacterial cytoplasm --- Certainty = 0.0000(Not Clear) < succ>
```

[12332] A related DNA sequence was identified in S. pyogenes <SEQ ID 1595> which encodes the amino acid sequence <SEQ ID 1596>. Analysis of this protein sequence reveals the following:

```
Possible site: 18
>>> May be a lipoprotein
----- Final Results -----
                              bacterial membrane --- Certainty = 0.0000(Not Clear) < succ>
                                bacterial outside --- Certainty = 0.0000(Not Clear) < succ>
                            bacterial cytoplasm --- Certainty = 0.0000(Not Clear) < succ>
```

[12333] An alignment of the GAS and GBS proteins is shown below.

| Identities = 302/306 (98%), Positives = 303/306 (98%) | | | |
|---|---|---|---|
| Query: | 1 | MKKVFFLMAMVVSLVMIAGCDKSANPKQPTQGMSVVTSFYPMYAMTKEVSGDLNDVRMIQ | 60 |
| | | MKK FFLMAMVVSLVMIAGCDKSANPKQPTQGMSVVTSFYPMYAMTKEVSGDLNDVRMIQ | |
| Sbjct: | 1 | MKKGFFLMAMVVSLVMIAGCDKSANPKQPTQGMSVVTSFYPMYAMTKEVSGDLNDVRMIQ | 60 |
| Query: | 61 | SGAGIHSFEPSVNDVAAIYDADLFVYHSHTLEAWARDLDPNLKKSKVNVFEASKPLTLDR | 120 |
| | | SGAGIHSFEPSVNDVAAIYDADLFVYHSHTLEAWARDLDPNLKKSKV+VFEASKPLTLDR | |
| Sbjct: | 61 | SGAGIHSFEPSVNDVAAIYDADLFVYHSHTLEAWARDLDPNLKKSKVDVFEASKPLTLDR | 120 |
| Query: | 121 | VKGLEDMEVTQGIDPATLYDPHTWTDPVLAGEEAVNIAKELGHLDPKHKDSYTKKAKAFK | 180 |
| | | VKGLEDMEVTQGIDPATLYDPHTWTDPVLAGEEAVNIAKELG LDPKHKDSYTK AKAFK | |
| Sbjct: | 121 | VKGLEDMEVTQGIDPATLYDPHTWTDPVLAGEEAVNIAKELGRLDPKHKDSYTKNAKAFK | 180 |
| Query: | 181 | KEAEQLTEEYTQKFKKVRSKTFVTQHTAFSYLAKRFGLKQLGISGISPEQEPSPRQLKEI | 240 |
| | | KEAEQLTEEYTQKFKKVRSKTFVTQHTAFSYLAKRFGLKQLGISGISPEQEPSPRQLKEI | |
| Sbjct: | 181 | KEAEQLTEEYTQKFKKVRSKTFVTQHTAFSYLAKRFGLKQLGISGISPEQEPSPRQLKEI | 240 |
| Query: | 241 | QDFVKEYNVKTIFAEDNVNPKIAHAIAKSTGAKVKTLSPLEAAPSGNKTYLENLRANLEV | 300 |
| | | QDFVKEYNVKTIFAEDNVNPKIAHAIAKSTGAKVKTLSPLEAAPSGNKTYLENLRANLEV | |
| Sbjct: | 241 | QDFVKEYNVKTIFAEDNVNPKIAHAIAKSTGAKVKTLSPLEAAPSGNKTYLENLRANLEV | 300 |
| Query: | 301 | LYQQLK | 306 |
| | | LYQQLK | |
| Sbjct: | 301 | LYQQLK | 306 |

[12334] There is also homology to SEQ ID 4.

[12335] SEQ ID 6986 (GBS189) was expressed in E. coli as a His-fusion product. SDS-PAGE analysis of total cell extract is shown in FIG. 38 (lane 2; MW 35.2 kDa).

[12336] The GBS189-His fusion product was purified (FIG. 204, lane 7) and used to immunise mice. The resulting antiserum was used for Western blot (FIG. 248A), FACS (FIG. 248B), and in the in vivo passive protection assay (Table III). These tests confirm that the protein is immunoaccessible on GBS bacteria and that it is an effective protective immunogen.

[12337] Based on this analysis, it was predicted that these proteins and their epitopes could be useful antigens for vaccines or diagnostics.

### EXAMPLE 2261

[12338] A DNA sequence (GBSx2383) was identified in S. agalactiae <SEQ ID 6987> which encodes the amino acid sequence <SEQ ID 6988>. Analysis of this protein sequence reveals the following:

```
Possible site: 46
>>> Seems to have no N-terminal signal sequence
----- Final Results -----
                            bacterial cytoplasm --- Certainty = 0.4656(Affirmative) < succ>
                              bacterial membrane --- Certainty = 0.0000(Not Clear) < succ>
                                bacterial outside --- Certainty = 0.0000(Not Clear) < succ>
```

[12339] The protein has homology with the following sequences in the GENPEPT database.

| >GP: AAB41455 GB: U34956 phosphoribosylformylglycinamidine synthase | | | |
|---|---|---|---|
| [Mycobacterium tuberculosis] | | | |
| Identities = 73/237 (30%), Positives = 112/237 (46%), Gaps = 25/237 (10%) | | | |
| Query: | 43 | GAGGVCVAIGELAD----GLEIDLDKVPLKYQGLNGTEIAISESQERMSVVVGPSDVDAF | 98 |
| | | G G+ A ELA G+ I LD VPL+ + + E+ SESQERM VV P +VDAF | |
| Sbjct: | 282 | GGAGLSCATSELASAGDGGMTIQLDSVPLRAKEMTPAEVLCSESQERMCAVVSPKNVDAF | 341 |
| Query: | 99 | IAACNKENIDAVVVATVTEKPNLVMTWNGETIVDLERCFLDTNG------VRVVVDAKVV | 152 |
| | | +A C K + A V+ VT+ L +TW+GET+VD+ + G V + | |
| Sbjct: | 342 | LAVCRKWEVLATVIGEVTDGDRLQITWHGETVVDVPPRTVAHEGPVYQRPVARPDTQDAL | 401 |
| Query: | 153 | DKDLTVPEARTTSAETLEADMLKVLSDLNHASQKGLQTIFDSSVGRSTV--NHPIGGRYQ | 210 |
| | | + D + +R + + L A +L +L + S+ + +D V +TV H GG + | |
| Sbjct: | 402 | NADRSAKLSRPVTGDELRATLLALLGSPHLCSRAFITEQYDRYVRGNTVLAEHADGGMLR | 461 |
| Query: | 211 | ITPTESSVQKLPVQYGVTTTASVMAQGYNPYIAEWSPYHGAAYAVIEATARLVATGA | 267 |
| | | I ES+ + + V + +++ PY GA A+ EA + TGA | |
| Sbjct: | 462 | I--DESTGRGIAVSTDASGRYTLL-----------DPYAGAQLALAEAYRNVAVTGA | 505 |

[12340] There is also homology to SEQ ID 982.

[12341] Based on this analysis, it was predicted that this protein and its epitopes, could be useful antigens for vaccines or diagnostics.

### EXAMPLE 2262

[12342] A DNA sequence (GBSx2384) was identified in S. agalactiae <SEQ ID 6989> which encodes the amino acid sequence <SEQ ID 6990>. This protein is predicted to be 30S ribosomal protein S11 (rpsK). Analysis of this protein sequence reveals the following:

```
Possible site: 37
>>> Seems to have no N-terminal signal sequence
----- Final Results -----
                            bacterial cytoplasm --- Certainty = 0.0598(Affirmative) < succ>
                              bacterial membrane --- Certainty = 0.0000(Not Clear) < succ>
                                bacterial outside --- Certainty = 0.0000(Not Clear) < succ>
```

[12343] A related GBS nucleic acid sequence <SEQ ID 9281> which encodes amino acid sequence <SEQ ID 9282> was also identified. A further related GBS nucleic acid sequence <SEQ ID 10919> which encodes amino acid sequence <SEQ ID 10920> was also identified.

[12344] The protein has homology with the following sequences in the GENPEPT database.

| >GP: CAB11918 GB: Z99104 ribosomal protein S11 (BS11) [Bacillus subtilis] | | | |
|---|---|---|---|
| Identities = 81/92 (88%), Positives = 87/92 (94%) | | | |
| Query: | 2 | HGNALAWSSAGALGFKGSRKSTPFAAQMAAEAAAKSAQEHGLKTVEVTVKGPGSGRESAI | 61 |
| | | HGNA++WSSAGALGF+GSRKSTPFAAQMAAE AAK + EHGLKT+EVTVKGPGSGRE+AI | |
| Sbjct: | 40 | HGNAISWSSAGALGFRGSRKSTPFAAQMAAETAAKGSIEHGLKTLEVTVKGPGSGREAAI | 99 |
| Query: | 62 | RALAAAGLEVTAIRDVTPVPHNGARPPKRRRV | 93 |
| | | RAL AAGLEVTAIRDVTPVPHNG RPPKRRRV | |
| Sbjct: | 100 | RALQAAGLEVTAIRDVTPVPHNGCRPPKRRRV | 131 |

[12345] A related DNA sequence was identified in S. pyogenes <SEQ ID 6991> which encodes the amino acid sequence <SEQ ID 6992>. Analysis of this protein sequence reveals the following:

```
Possible site: 47
>>> Seems to have no N-terminal signal sequence
----- Final Results -----
                            bacterial cytoplasm --- Certainty = 0.0945(Affirmative) < succ>
                              bacterial membrane --- Certainty = 0.0000(Not Clear) < succ>
                                bacterial outside --- Certainty = 0.0000(Not Clear) < succ>
```

[12346] An alignment of the GAS and GBS proteins is shown below.

| Identities = 92/93 (98%), Positives = 93/93 (99%) | | | |
|---|---|---|---|
| Query: | 1 | MHGNALAWSSAGALGFKGSRKSTPFAAQMAAEAAAKSAQEHGLKTVEVTVKGPGSGRESA | 60 |
| | | +HGNALAWSSAGALGFKGSRKSTPFAAQMAAEAAAKSAQEHGLKTVEVTVKGPGSGRESA | |
| Sbjct: | 35 | VHGNALAWSSAGALGFKGSRKSTPFAAQMAAEAAAKSAQEHGLKTVEVTVKGPGSGRESA | 94 |
| Query: | 61 | IRALAAAGLEVTAIRDVTPVPHNGARPPKRRRV | 93 |
| | | IRALAAAGLEVTAIRDVTPVPHNGARPPKRRRV | |
| Sbjct: | 95 | IRALAAAGLEVTAIRDVTPVPHNGARPPKRRRV | 127 |

[12347] Based on this analysis, it was predicted that these proteins and their epitopes could be useful antigens for vaccines or diagnostics.

### EXAMPLE 2263

[12348] A DNA sequence (GBSx2385) was identified in S. agalactiae <SEQ ID 6993> which encodes the amino acid sequence <SEQ ID 6994>. Analysis of this protein sequence reveals the following:

```
Possible site: 53
>>> Seems to have no N-terminal signal sequence
----- Final Results -----
                            bacterial cytoplasm --- Certainty = 0.2551(Affirmative) < succ>
                              bacterial membrane --- Certainty = 0.0000(Not Clear) < succ>
                                bacterial outside --- Certainty = 0.0000(Not Clear) < succ>
```

[12349] The protein has homology with the following sequences in the GENPEPT database.

| >GP:BAB03881 GB:AP001507 DNAdirected RHA polymerase alpha subunit | | | |
|---|---|---|---|
| [Bacillus halodurans] | | | |
| Identities = 190/314 (60%), Positives = 249/314 (78%), Gaps 2/314 (0%) | | | |
| Query: | 1 | MIEFEKPIITKIDENKD--YGRFVIEPLERGYGTTLGNSLRRVLLSSLPGAAVTSIKIDG | 58 |
| | | MIE EKP+I I+ ++D YG+FV+EPLERGYGTTLGNSLRR+LLSSLPGAAVTS++IDG | |
| Sbjct: | 1 | MIEIEKPVIETIEISEDAKYGKFVVEPLERGYGTTLGNSLRRILLSSLPGAAVTSVQIDG | 60 |
| Query: | 59 | VLHEFDTIPGVREDVMQIILNVKGLAVRSYVEDERIIELDVEGPAEITAGDILTDSDIEI | 118 |
| | | VLHEF TI GV EDV I+LN+K LA+K Y +++K +E+D +G +TAGD+ DSD+++ | |
| Sbjct: | 61 | VLHEFSTIEGVVEDVTTIVLNLKQLALKIYSDEDKTLEIDTQGEGVVTAGDLTHDSDVDV | 120 |
| Query: | 119 | VNPDHYLFTIAEGHSLKATMTVAKNRGYVPAEGNKKDDAPVGTLAVDSIYTPVKKVNYQV | 178 |
| | | +NPD ++ T+ G L+ +T + RGYVPAEGNK D+ +G + +DSIYTPV +VNYQV | |
| Sbjct: | 121 | LNPDLHIATLTTGAHLRNRITAKRGRGYVPAEGNKSDELAIGVIPIDSIYTPVSRVNYQV | 180 |
| Query: | 179 | EPARVGSNDGFDKLTIEIMTNGTIIPEDALGLSARVLIEHLNLFTDLTEVAKATEVMKET | 238 |
| | | E RVG +DKLT+++ T+G+I PE+A+L A++L EHLN+F LT+ A+ E+M E | |
| Sbjct: | 181 | ENTRVGQVTNYDKLTLDVWTDGSIRPEEAVSLGAKILTEHLNIFVGLTDQAQNAEIMVEK | 240 |
| Query: | 239 | EKVNDEKVLDRTIEELDLSVRSYNCLKRAGINTVFDLTEETEPEMMKVRNLGRKSLEEVK | 298 |
| | | E+ EKVL+ TIEELDLSVRSYNCLKRAGINTV +LT+ETE +MMKVRNLGRKSLEEV+ | |
| Sbjct: | 241 | EEDQKEKVLEMTIEELDLSVRSYNCLKRAGINTVQELTQRTEEDMMKVRNLGRKSLEEVQ | 300 |
| Query: | 299 | IKLADLGLGLENDK | 312 |
| | | KL +LGLGL+ ++ | |
| Sbjct: | 301 | EKLGELGLGLRKEE | 314 |

[12350] A related DNA sequence was identified in S. pyogenes <SEQ ID 6995> which encodes the amino acid sequence <SEQ ID 6996>. Analysis of this protein sequence reveals the following:

```
Possible site: 53
>>> Seems to have no N-terminal signal sequence
----- Final Results -----
                            bacterial cytoplasm --- Certainty = 0.2551(Affirmative) < succ>
                              bacterial membrane --- Certainty = 0.0000(Not Clear) < succ>
                                bacterial outside --- Certainty = 0.0000(Not Clear) < succ>
```

[12351] An alignment of the GAS and GBS proteins is shown below.

| Identities = 305/312 (97%), Positives = 311/312 (98%) | | | |
|---|---|---|---|
| Query: | 1 | MIEFEKPIITKIDENKDYGRFVIEPLERGYGTTLGNSLRRVLLSSLPGAAVTSIKIDGVL | 60 |
| | | MIEFEKPIITKIDENKDYGRFVIEPLERGYGTTLGNSLRRVLLSSLPGAAVTSIKIDGVL | |
| Sbjct: | 1 | MIEFEKPIITKIDENKDYGRFVIEPLERGYGTTLGNSLRRVLLSSLPGAAVTSIKIDGVL | 60 |
| Query: | 61 | HEFDTIPGVREDVMQIILNVKGLAVKSYVEDEKIIELDVEGPAEITAGDILTDSDIEIVN | 120 |
| | | HEFDTIPGVREDVMQIILNVKGLAVKSYVEDEKIIEL+VEGPAE+TAGDILTDSDIE+VN | |
| Sbjct: | 61 | HEFDTIPGVREDVMQIILNVKGLAVISYVEDEKIIELEVEGPAEVTAGDILTDSDIELVN | 120 |
| Query: | 121 | PDHYLFTIAEGHSLKATMTVAKNRGYVPAEGNKKDDAPVGTLAVDSIYTPVKKVNYQVEP | 180 |
| | | PDHYLFTIAEGHSL+ATMTVAK RGYVPAEGNEKDDAPVGTLAVDSIYTPVEKVNYQVEP | |
| Sbjct: | 121 | PDHYLFTIAEGHSLRATMTVAKKRGYVPAEGNKKODAPVGTLAVDSIYTPVKKVNYQVEP | 180 |
| Query: | 181 | ARVGSNDGFDKLTIEIMTNGTIIPEDALGLSARVLIEHLNLFTDLTEVAKATEVMKETEK | 240 |
| | | ARVGSNDGFDKLTIEIMTNGTIIPEDALGLSARVLIEHLNLFTDLTEVAKATEVMKETEK | |
| Sbjct: | 181 | ARVGSNDGFDKLTIEIMTNGTIIPEDALGLSARVLIEHLNLFTDLTEVAKATEVMKETEK | 240 |
| Query: | 241 | VNDEKVLDRTIEELDLSVRSYNCLKRAGINTVFDLTEKTEPEMMKVRNLGRKSLEEVKIK | 300 |
| | | VNDEKVLDRTIEELDLSVRSYNCLKRAGINTVFDLTEK+EPEMMKVRNLGRKSLEEVK+K | |
| Sbjct: | 241 | VNDEKVLDRTIEELDLSVRSYNCLKRAGINTVFDLTEKSEPEMMKVRNLGRKSLEEVKVK | 300 |
| Query: | 301 | LADLGLGLKNDK | 312 |
| | | LADLGLGLKNDK | |
| Sbjct: | 301 | LADLGLGLKNDK | 312 |

[12352] Based on this analysis, it was predicted that these proteins and their epitopes could be useful antigens for vaccines or diagnostics.

### EXAMPLE 2264

[12353] A DNA sequence (GBSx2386) was identified in S. agalactiae <SEQ ID 6997> which encodes the amino acid sequence <SEQ ID 6998>. This protein is predicted to be 50S ribosomal protein L17 (rplQ). Analysis of this protein sequence reveals the following:

```
Possible site: 37
>>> Seems to have no N-terminal signal sequence
----- Final Results -----
                            bacterial cytoplasm --- Certainty = 0.1609(Affirmative) < succ>
                              bacterial membrane --- Certainty = 0.0000(Not Clear) < succ>
                                bacterial outside --- Certainty = 0.0000(Not Clear) < succ>
```

[12354] The protein has homology with the following sequences in the GENPEPT database.

>GP:CAB11920 GB:Z99104 ribosomal protein L17 (BL15) [Bacillus subtilis]
Identities = 95/128 (74%), Positives = 105/128 (81%), Gaps = 8/128 (6%)

| | | | |
|---|---|---|---|
| Query: | 1 | MAYRKLGRTSSQRKANLRDLTTDLLINESIVTTEARAKEIRKTVEKMITLGKRGDLHARR | 60 |
| | | M+YRKLGRTS+QRKANLRDLTTDL+INE I TTE RAKE+R VEKMITLGKRGDLHARR | |
| Sbjct: | 1 | MSYRKLGRTSAQRKAMLRDLTTDLIINERIETTETRAKELRSVVEKMITLGKRGDLHARR | 60 |
| Query: | 61 | QAAAYVRNEIASENYDEASDKYTSTTALQRLFDDIAPRYASRNGGYTRILKTEPRRGDAA | 120 |
| | | QAAAY+RNE+A+E ++ ALQKLF DIA RY ER GGYTRI+K PRRGD A | |
| Sbjct: | 61 | QAAAYIRNEVANEENNQ--------DALQKLFSDIATRYEERQGGYTRIMKLGPRRGDGA | 112 |
| Query: | 121 | PMAIIELV | 128 |
| | | PMAIIELV | |
| Sbjct: | 113 | PMAIIELV | 120 |

[12355] A related DNA sequence was identified in S. pyogenes <SEQ ID 6999> which encodes the amino acid sequence <SEQ ID 7000>. Analysis of this protein sequence reveals the following:

```
Possible site: 37
>>> Seems to have no N-terminal signal sequence
----- Final Results -----
                            bacterial cytoplasm --- Certainty = 0.1609(Affirmative) < succ>
                              bacterial membrane --- Certainty = 0.0000(Not Clear) < succ>
                                bacterial outside --- Certainty = 0.0000(Not Clear) < succ>
```

[12356] An alignment of the GAS and GBS proteins is shown below.

| Identities = 125/128 (97%), Positives = 127/128 (98%) | | | |
|---|---|---|---|
| Query: | 1 | MAYRKLGRTSSQRKAMLRDLTTDLLINESIVTTEARAKEIRKTVEKNITLGKRGDLHARR | 60 |
| | | M+YRKLGRTSSQRKAMLRDLTTDLLINESIVTTEARAKEIRKTVEKMITLGKRGDLHARR | |
| Sbjct: | 1 | MAYRKLGRTSSQRKANLRDLTTDLLINESIVTTEARAKEIRKTVERNITLGKRGDLHARR | 60 |
| Query: | 61 | QAAAYVRNEIASENYDEASDKYTSTTALQKLFDDIAPRYAERNGGYTRILKTEPRRGDAA | 120 |
| | | QAAAYVRNEIASENYDEA+DKYTSTTALQKLF +IAPRYAERNGGYTRILKTEPRRGDAA | |
| Sbjct: | 61 | QAAAYVRNEUASENYDEATDKYTSTTALQKLFSEIAPRYAERNGGYTRILKTEPRRGDAA | 120 |
| Query: | 121 | PMAIIELV | 128 |
| | | PMAIIELV | |
| Sbjct: | 121 | PMAIIELV | 128 |

[12357] Based on this analysis, it was predicted that these proteins and their epitopes could be useful antigens for vaccines or diagnostics.

### EXAMPLE 2265

[12358] A DNA sequence (GBSx2396) was identified in S. agalactiae <SEQ ID 7001> which encodes the amino acid sequence <SEQ ID 7002>. This protein is predicted to be mercuric reductase. Analysis of this protein sequence reveals the following:

```
Possible site: 35
>>> Seems to have no N-terminal signal sequence
----- Final Results -----
                            bacterial cytoplasm --- Certainty = 0.2384(Affirmative) < succ>
                              bacterial membrane --- Certainty = 0.0000(Not Clear) < succ>
                                bacterial outside --- Certainty = 0.0000(Not Clear) < succ>
```

[12359] The protein has homology with the following sequences in the GENPEPT database.

>GP:AAA83977 GB:AF138877 mercuric reductase MerA
[Bacillus sp. RCE07]
Identities = 29/33 (87%), Positives = 32/33 (96%)

| | | | |
|---|---|---|---|
| Query: | 4 | VGLTEEQAKEKGYDVKTSVLPLXAVPRAIVNRE | 36 |
| | | VGLTE+QAKEKGY+VKTSVLPL AVPRA+VNRE | |
| Sbjct: | 520 | VGLTEQQAKEKGYEVKTSVLPLDAVPRALVNRE | 552 |

[12360] No corresponding DNA sequence was identified in S. pyogenes.

[12361] Based on this analysis, it was predicted that this protein and its epitopes, could be useful antigens for vaccines or diagnostics.

### EXAMPLE 2266

[12362] A DNA sequence (GBSx2397) was identified in S. agalactiae <SEQ ID 7003> which encodes the amino acid sequence <SEQ ID 7004>. This protein is predicted to be mercuric reductase. Analysis of this protein sequence reveals the following:

```
Possible site: 49
>>> Seems to have no N-terminal signal sequence
----- Final Results -----
                            bacterial cytoplasm --- Certainty = 0.3016(Affirmative) < succ>
                              bacterial membrane --- Certainty = 0.0000(Not Clear) < succ>
                                bacterial outside --- Certainty = 0.0000(Not Clear) < succ>
```

[12363] The protein has homology with the following sequences in the GENPEPT database.

| >GP: CAA70224 GB: Y09024 mercuric reductase [Bacillus cereus] | | | |
|---|---|---|---|
| Identities = 146/194 (75%), Positives = 175/194 (89%) | | | |
| Query: | 2 | PQISGLEKMDYLTSTTLLELKKIPKRLTVIGSGYIGMELGQLFHHLGSEITLMQRSERLL | 61 |
| | | P I GL ++DYLTST+LLELKK+PKRL VIGSGYIGMELGQLFH+LGSE+TL+QRSERLL | |
| Sbjct: | 226 | PNIPGLNEVDYLTSTSLLELKKVPKRLVVIGSGYIGMELGQLFHNLGSEVTLIQRSERLL | 285 |
| Query: | 62 | KEYDPEISESVEKALIEQGINLVKGATFERVEQSGEIKRVYVTVNGSREVIESDQLLVAT | 121 |
| | | KEYDPEISESVEK+L+EQGINLVKGAT+ER+EQ+G+IK+V+V VNG + +IE+DQLLVAT | |
| Sbjct: | 286 | KEYDPEISESVEKSLVEQGINLVKGATYERIEQNGDIKKVHVEVNGKKRIIEADQLLVAT | 345 |
| Query: | 122 | GRKPNTDSLNLSAAGVETGKNNEILINDFGQTSNEKIYAAGDVTLGPQFVYVAAYEGGII | 181 |
| | | GR PNT +LNL AAGVE G EI+I+D+ +T+N +IYAAGDVTLGPQFVYVAAY+GG+ | |
| Sbjct: | 346 | GRTPNTATLNLRAAGVEIGSRGEIIIDDYSRTTNTRIYAAGDVTLGPQFVYVAAYQGGVA | 405 |
| Query: | 182 | TDNAIGGLNKKIDL | 195 |
| | | NAIGGLNKK++L | |
| Sbjct: | 406 | APNAIGGLNKKLNL | 419 |

[12364] There is also homology to SEQ ID 1820.

[12365] Based on this analysis, it was predicted that this protein and its epitopes, could be useful antigens for vaccines or diagnostics.

### EXAMPLE 2267

[12366] A DNA sequence (GBSx2398) was identified in S. agalactiae <SEQ ID 7005> which encodes the amino acid sequence <SEQ ID 7006>. This protein is predicted to be triacylglycerol acylhydrolase. Analysis of this protein sequence reveals the following:

```
Possible site: 46
>>> Seems to have no N-terminal signal sequence
----- Final Results -----
                            bacterial cytoplasm --- Certainty = 0.3180(Affirmative) < succ>
                              bacterial membrane --- Certainty = 0.0000(Not Clear) < succ>
                                bacterial outside --- Certainty = 0.0000(Not Clear) < succ>
```

[12367] The protein has no significant homology with any sequences in the GENPEPT database.

[12368] No corresponding DNA sequence was identified in S. pyogenes.

[12369] Based on this analysis, it was predicted that this protein and its epitopes, could be useful antigens for vaccines or diagnostics.

### EXAMPLE 2268

[12370] A DNA sequence (GBSx2399) was identified in S. agalactiae <SEQ ID 7007> which encodes the amino acid sequence <SEQ ID 7008>. Analysis of this protein sequence reveals the following:

```
Possible site: 42
>>> Seems to have no N-terminal signal sequence
----- Final Results -----
                            bacterial cytoplasm --- Certainty = 0.0544(Affirmative) < succ>
                              bacterial membrane --- Certainty = 0.0000(Not Clear) < succ>
                                bacterial outside --- Certainty = 0.0000(Not Clear) < succ>
```

[12371] The protein has homology with the following sequences in the GENPEPT database.

| >GP: AAC74453 GB: AE000234 orf, hypothetical protein [Escherichia | | | |
|---|---|---|---|
| coli K12] | | | |
| Identities = 45/58 (77%), Positives = 51/58 (87%) | | | |
| Query: | 1 | MPWQNLLHAGQENLFSGLTALTAEFTVGEGKLMTHDEPCSMAPDDKHDLISGTCSHLP | 58 |
| | | +PWQNLLHAG+ENLFSGLTAL+AEFT+GEG+LM HD P APD+ DLISGTCSHLP | |
| Sbjct: | 34 | LPWQNLLHAGEENLFSGLTALSAEFTIGEGELMAHDVPLGCAPDEYDDLISGTCSHLP | 91 |

[12372] No corresponding DNA sequence was identified in S. pyogenes.

[12373] Based on this analysis, it was predicted that this protein and its epitopes, could be useful antigens for vaccines or diagnostics.

### EXAMPLE 2269

[12374] A DNA sequence (GBSx2400) was identified in S. agalactiae <SEQ ID 7009> which encodes the amino acid sequence <SEQ ID 7010>. This protein is predicted to be transposase for insertion sequence element is 5. Analysis of this protein sequence reveals the following:

```
Possible site: 48
>>> Seems to have no N-terminal signal sequence
----- Final Results -----
                            bacterial cytoplasm --- Certainty = 0.2058(Affirmative) < succ>
                              bacterial membrane --- Certainty = 0.0000(Not Clear) < succ>
                                bacterial outside --- Certainty = 0.0000(Not Clear) < succ>
```

[12375] The protein has homology with the following sequences in the GENPEPT database.

| >GP: BAB15497 GB: AK026530 unnamed protein product [Homo sapiens] | | | |
|---|---|---|---|
| Identities = 297/299 (99%), Positives = 297/299 (99%) | | | |
| Query: | 1 | MEQILPWQNMVEVIEPFYPKAGNGRRPYPLETMLRIHCMQHWYNLSDGAMEDALYEIASM | 60 |
| | | MEQILPWQNMVEVIEPFYPKAGNGRRPYPLETMLRIHCMQHWYNLSDGAMEDALYEIASM | |
| Sbjct: | 40 | MEQILPWQNMVEVIEPFYPKAGNGRRPYPLETMLRIHCMQHWYNLSDGAMEDALYEIASM | 99 |
| Query: | 61 | RLFARLSLDSALPDRTTIMNFRHLLEQHQLARQLFKTINRWLAEAGVMMTQGTLVDATII | 120 |
| | | RLFARLSLDSALPDRTTIMNFRHLLEQHQLARQLFKTINRWLAEAGVMMTQGTLVDATII | |
| Sbjct: | 100 | RLFARLSLDSALPDRTTIMNFRHLLEQHQLARQLFKTINRWLAEAGVMMTQGTLVDATII | 159 |
| Query: | 121 | EAPSSTKNKEQQRDPEMHQTKKGNQWHFGMKAHIGVDAKSGLTHSLVTTAANEHDLNQLX | 180 |
| | | EAPSSTKNKEQQRDPEMHQTKKGNQWHFGMKAHIGVDAKSGLTHSLVTTAANEHDLNQL | |
| Sbjct: | 160 | EAPSSTKNKEQQRDPEMHQTKKGNQWHFGMKAHIGVDAKSGLTHSLVTTAANEHDLNQLG | 219 |
| Query: | 181 | NLLHGEEQFVSADAXYQGAPQREELAEVDVDWLIAERPGKVRTLKQHPRKNKTAINIEYM | 240 |
| | | NLLHGEEQFVSADA YQGAPQREELAEVDVDWLIAERPGKVRTLKQHPRKNKTAINIEYM | |
| Sbjct: | 220 | NLLHGEEQFVSADAGYQGAPQREELAEVDVDWLIAERPGKVRTLKQHPRKNKTAINIEYM | 279 |
| Query: | 241 | KASIRARVEHPFRIIKRQFGFVKARYKGLLKNDNQLAMLFTLANLFRADQMIRQWERSH | 299 |
| | | KASIRARVEHPFRIIKRQFGFVKARYKGLLKNDNQLAMLFTLANLFRADQMIRQWERSH | |
| Sbjct: | 280 | KASIRARVEHPFRIIKRQFGFVKARYKGLLKNDNQLAMLFTLANLFRADQMIRQWERSH | 338 |

[12376] No corresponding DNA sequence was identified in S. pyogenes.

[12377] Based on this analysis, it was predicted that this protein and its epitopes, could be useful antigens for vaccines or diagnostics.

### EXAMPLE 2270

[12378] A DNA sequence (GBSx2401) was identified in S. agalactiae <SEQ ID 7011> which encodes the amino acid sequence <SEQ ID 7012>. Analysis of this protein sequence reveals the following:

```
Possible site: 16
>>> Seems to have a cleavable N-term signal seq.
----- Final Results -----
                                bacterial outside --- Certainty = 0.3000(Affirmative) < succ>
                              bacterial membrane --- Certainty = 0.0000(Not Clear) < succ>
                            bacterial cytoplasm --- Certainty = 0.0000(Not Clear) < succ>
```

[12379] The protein has homology with the following sequences in the GENPEPT database.

| >GP: CAB51958 GB: AL109661 putative eukaryotic-type serine/threonine | | | |
|---|---|---|---|
| protein kinase [Streptomyces coelicolor A3(2)] | | | |
| Identities = 49/169 (28%), Positives = 90/169 (52%), Gaps = 6/169 (3%) | | | |
| Query: | 23 | PTTIRVPDVSNKTVAQAKMTLENSGLKVGAIRNIESDSVSEGLVVKTDPAAGRSRREGAK | 82 |
| | | P T+++PDV+ + +A+ LE+ GL+ G + SD V+ G V+ T P +G + R G+ | |
| Sbjct: | 469 | PDTVKLPDVTGYKLDKARTLLEDEGLEPGMVTRAFSDEVARGFVISTKPGSGTTVRAGSA | 528 |
| Query: | 83 | VNLYIATPNKSFTLGNYKEHNYKDILKDLQGKGVKKSLIKVKRKINNDYTTGTILAQSLP | 142 |
| | | V L + + + + + + +L+G G+K + ++N++Y +G + A+ P | |
| Sbjct: | 529 | VAL-VVSKGSPVDVPDVTGDDLDEARAELEGAGLK--VKTADERVNSEYDSGRV-ARQTP | 584 |
| Query: | 143 | EGTSFNPDGNKKLTLTVAVNDPMI-MPDVTGMTVGEVIETLTDLGLDAD | 190 |
| | | E +G+ +TLTV+ MI +PDV G +V + + L D G + D | |
| Sbjct: | 585 | EPGGRAAEGD-TVTLTVSKGPRMIEVPDVVGDSVDDAKQKLEDAGFEVD | 632 |
| Identities = 45/161 (27%), Positives = 80/161 (48%), Gaps = 4/161 (2%) | | | |
| Query: | 27 | RVPDVSNKTVAQAKMTLENSGLKVGAIRNIESDSVSEGLVVKTDPAAGRSRREGAKVNLY | 86 |
| | | +VP + +KT AQA+ L+++GL VG +R+ SD+V G V+ TDP G R+ V+L | |
| Sbjct: | 405 | KVPPLLSKTEAQARDRLDDAGLDVGKVRHAYSDTVERGKVISTDPGVGDRIRKNDSVSLT | 464 |
| Query: | 87 | IATPNKSFTLGNYKEHNYKDILKDLQGKGVKKSLIKVKRKINNDYTTGTILAQSLPEGTS | 146 |
| | | ++ + L + + L+ +G++ + V R +++ G +++ GT+ | |
| Sbjct: | 465 | VSDGPDTVKLPDVTGYKLDKARTLLEDEGLEPGM--VTRAFSDEVARGFVISTKPGSGTT | 522 |
| Query: | 147 | FNPDGNKKLTLTVAVNDPMIMPDVTGMTVGEVIETLTDLGL | 187 |
| | | + L V+ P+ +PDVTG + E L GL | |
| Sbjct: | 523 | VR--AGSAVALVVSKGSPVDVPDVTGDDLDEARAELEGAGL | 561 |

[12380] There is also homology to SEQ ID 3026.

[12381] Based on this analysis, it was predicted that this protein and its epitopes, could be useful antigens for vaccines or diagnostics.

### EXAMPLE 2271

[12382] A DNA sequence (GBSx2402) was identified in S. agalactiae <SEQ ID 7013> which encodes the amino acid sequence <SEQ ID 7014>. Analysis of this protein sequence reveals the following:

```
Possible site: 38
>>> Seems to have an uncleavable N-term signal seq
----- Final Results -----
                              bacterial membrane --- Certainty = 0.0000(Not Clear) < succ>
                                bacterial outside --- Certainty = 0.0000(Not Clear) < succ>
                            bacterial cytoplasm --- Certainty = 0.0000(Not Clear) < succ>
```

[12383] A related GBS nucleic acid sequence <SEQ ID 9311> which encodes amino acid sequence <SEQ ID 9312> was also identified.

[12384] The protein has homology with the following sequences in the GENPEPT database.

| >GP: AAB90561 GB: AE001058 glutamine ABC transporter, ATP-binding | | | |
|---|---|---|---|
| protein (glnQ) [Archaeoglobus fulgidus] | | | |
| Identities = 142/219 (64%), Positives = 178/219 (80%) | | | |
| Query: | 1 | MDIHQGEVVVIIGPSGSGKSTFLRTMNLLEVPTKGTVTFEGIDITDKKNDIFKMREKMGM | 60 |
| | | M + +GEVVVIIGPSGSGKST LR +N LE PT G + +G+DIT+ K DI K+R+++G+ | |
| Sbjct: | 24 | MKVEKGEVVVIIGPSGSGKSTLLRCINRLEEPTSGKILLDGVDITNSKIDINKVRQRIGI | 83 |
| Query: | 61 | VFQQFNLFPNMTVLENITLSPIKTKGLSNLDAQTKAYELLEKVGLKEKANTYPASLSGGQ | 120 |
| | | VFQQFNLFP++T L+N+TL+PIK K +S +A+ LLEKVGL++KA+ YPA LSGGQ | |
| Sbjct: | 84 | VFQQFNLFPHLTALQNVTLAPIKIKKMSKREAEELGMRLLEKVGLEDKADYYPAQLSGGQ | 143 |
| Query: | 121 | QQRIAIARGLAMNPDVLLFDEPTSALDPEMVGEVLTVMQDLAKSGMTMVIVTHEMGFARE | 180 |
| | | QQR+AIAR LAMNP+V+LFDE TSALDPE+V EVL VM+ LA+ GMTMV+VTHEMGFARE | |
| Sbjct: | 144 | QQRVAIARALAMNPEVMLFDEVTSALDPELVKEVLDVMKQLARDGMTMVVVTHEMGFARE | 203 |
| Query: | 181 | VADRVIFMDAGIIVEQGAPKEVFEQTKEIRTRDFLSKVL | 219 |
| | | V DRVIFMD G+IVE+G P+++F K RTR FLS +L | |
| Sbjct: | 204 | VGDRVIFMDGGVIVEEGKPEQIFSNPKHERTRKFLSMIL | 242 |

[12385] There is also homology to SEQ ID 1186.

[12386] Based on this analysis, it was predicted that this protein and its epitopes, could be useful antigens for vaccines or diagnostics.

### EXAMPLE 2272

[12387] A DNA sequence (GBSx2403) was identified in S. agalactiae <SEQ ID 7015> which encodes the amino acid sequence <SEQ ID 7016>. This protein is predicted to be 4-hydroxy-2-oxoglutarate aldolase (kdgA). Analysis of this protein sequence reveals the following:

```
Possible site: 43
>>> Seems to have no N-terminal signal sequence
----- Final Results -----
                            bacterial cytoplasm --- Certainty = 0.1479(Affirmative) < succ>
                              bacterial membrane --- Certainty = 0.0000(Not Clear) < succ>
                                bacterial outside --- Certainty = 0.0000(Not Clear) < succ>
```

[12388] The protein has homology with the following sequences in the GENPEPT database.

| >GP: CAB14127 GB: Z99115 deoxyphosphogluconate | | | |
|---|---|---|---|
| aldolase [Bacillus subtilis] | | | |
| Identities = 21/62 (33%), Positives = 38/62 (60%), Gaps = 4/62 (6%) | | | |
| Query: | 3 | QLMQGKIVAVIRGNSQEEAFQAAQACIKGGISAIEIAYTNSKASQVIEQLVTQYTNQEQV | 62 |
| | | +L + K++AVIR ++EA Q ++ + GI A+E+ YT AS +IE + N+E + | |
| Sbjct: | 9 | RLKEAKLIAVIRSKDKQEACQQIESLLDKGIRAVEVTYTTPGASDIIE----SFRNREDI | 64 |
| Query: | 63 | VV | 64 |
| | | ++ | |
| Sbjct: | 65 | LI | 66 |

[12389] Based on this analysis, it was predicted that this protein and its epitopes, could be useful antigens for vaccines or diagnostics.

### EXAMPLE 2273

[12390] A DNA sequence (GBSx2405) was identified in S. agalactiae <SEQ ID 7017> which encodes the amino acid sequence <SEQ ID 7018>. This protein is predicted to be H repeat-associated protein (rfbQRS) (b1458). Analysis of this protein sequence reveals the following:

```
Possible site: 27
>>> Seems to have no N-terminal signal sequence
----- Final Results -----
                            bacterial cytoplasm --- Certainty = 0.0207(Affirmative) < succ>
                              bacterial membrane --- Certainty = 0.0000(Not Clear) < succ>
                                bacterial outside --- Certainty = 0.0000(Not Clear) < succ>
```

[12391] There is homology to SEQ ID 504.

[12392] Based on this analysis, it was predicted that this protein and its epitopes, could be useful antigens for vaccines or diagnostics.

### EXAMPLE 2274

[12393] A DNA sequence (GBSx2406) was identified in S. agalactiae <SEQ ID 7019> which encodes the amino acid sequence <SEQ ID 7020>. Analysis of this protein sequence reveals the following:

| Possible site: 14 | | | | |
|---|---|---|---|---|
| >>> Seems to have an uncleavable N-term signal seq | | | | |
| | INTEGRAL | Likelihood = −6.74 | Transmembrane | 2-18 (1-21) |
| | INTEGRAL | Likelihood = −3.03 | Transmembrane | 73-89 (73-92) |

```
----- Final Results -----
                              bacterial membrane --- Certainty = 0.3697(Affirmative) < succ>
                                bacterial outside --- Certainty = 0.0000(Not Clear) < succ>
                            bacterial cytoplasm --- Certainty = 0.0000(Not Clear) < succ>
```

[12394] The protein has no significant homology with any sequences in the GENPEPT database.

[12395] There is also homology to SEQ ID 3376.

[12396] Based on this analysis, it was predicted that this protein and its epitopes, could be useful antigens for vaccines or diagnostics.

### EXAMPLE 2275

[12397] A DNA sequence (GBSx2407) was identified in S. agalactiae <SEQ ID 7021> which encodes the amino acid sequence <SEQ ID 7022>. This protein is predicted to be insertion element IS1 protein InsB (insB_{—}5). Analysis of this protein sequence reveals the following:

```
Possible site: 52
>>> Seems to have no N-terminal signal sequence
----- Final Results -----
                            bacterial cytoplasm --- Certainty = 0.4280(Affirmative) < succ>
                              bacterial membrane --- Certainty = 0.0000(Not Clear) < succ>
                                bacterial outside --- Certainty = 0.0000(Not Clear) < succ>
```

[12398] No corresponding DNA sequence was identified in S. pyogenes.

[12399] Based on this analysis, it was predicted that this protein and its epitopes, could be useful antigens for vaccines or diagnostics.

### EXAMPLE 2276

[12400] A DNA sequence (GBSx2409) was identified in S. agalactiae <SEQ ID 7023> which encodes the amino acid sequence <SEQ ID 7024>. Analysis of this protein sequence reveals the following:

```
Possible site: 13
>>> Seems to have no N-terminal signal sequence
----- Final Results -----
                            bacterial cytoplasm --- Certainty = 0.3937(Affirmative) < succ>
                              bacterial membrane --- Certainty = 0.0000(Not Clear) < succ>
                                bacterial outside --- Certainty = 0.0000(Not Clear) < succ>
```

[12401] The protein has no significant homology with any sequences in the GENPEPT database.

[12402] No corresponding DNA sequence was identified in S. pyogenes.

[12403] Based on this analysis, it was predicted that this protein and its epitopes, could be useful antigens for vaccines or diagnostics.

### EXAMPLE 2277

[12404] A DNA sequence (GBSx2410) was identified in S. agalactiae <SEQ ID 7025> which encodes the amino acid sequence <SEQ ID 7026>. This protein is predicted to be triosephosphate isomerase (tpi). Analysis of this protein sequence reveals the following:

| Possible site: 53 | | | | |
|---|---|---|---|---|
| >>> Seems to have no N-terminal signal sequence | | | | |
| | INTEGRAL | Likelihood = −0.37 | Transmembrane | 35-51 (35-51) |

```
----- Final Results -----
                              bacterial membrane --- Certainty = 0.1150(Affirmative) < succ>
                                bacterial outside --- Certainty = 0.0000(Not Clear) < succ>
                            bacterial cytoplasm --- Certainty = 0.0000(Not Clear) < succ>
```

[12405] The protein has homology with the following sequences in the GENPEPT database.

| >GP: AAC43268 GB: U07640 triosephosphate isomerase [Lactococcus | | | |
|---|---|---|---|
| lactis] | | | |
| Identities = 50/75 (66%), Positives = 61/75 (80%) | | | |
| Query: | 6 | IAGNWKMNKNPEEAKAFIEAVASKLPSSELVEAGIAAPALTLSTVLEAAKGSELKIAAQN | 65 |
| | | IAGNWKMNK EA+AF+EAV + LPSS+ VE+ I APAL L+ + +GSELK+AA+N | |
| Sbjct: | 7 | IAGNWKMNKTLSEAQAFVEAVKNNLPSSDNVESVIGAPALFLAPMAYLRQGSELKLAAEN | 66 |
| Query: | 66 | SYFENSGAFTGENSP | 80 |
| | | SYFEN+GAFTGENSP | |
| Sbjct: | 67 | SYFENAGAFTGENSP | 81 |

[12406] There is also homology to SEQ ID 6838:

| Identities = 58/77 (75%), Positives = 68/77 (87%) | | | |
|---|---|---|---|
| Query: | 6 | IAGNWKMNKNPEEAKAFIEAVASKLPSSELVEAGIAAPALTLSTVLEAAKGSELKIAAQN | 65 |
| | | IAGNWKMNKNP+EAKAF+EAVASKLPS++LV+ +AAPA+ L T +EAAK S LK+AAQN | |
| Sbjct: | 7 | IAGNWKMNKNPQEAKAFVEAVASKLPSTDLVDVAVAAPAVDLVTTIEAAKDSVLKVAAQN | 66 |
| Query: | 66 | SYFENSGAFTGENSPKV | 82 |
| | | YFEN-GAFTGE SPKV | |
| Sbjct: | 67 | CYFENTGAFTGETSPKV | 83 |

[12407] Based on this analysis, it was predicted that this protein and its epitopes, could be useful antigens for vaccines or diagnostics.

### EXAMPLE 2278

[12408] A DNA sequence (GBSx2412) was identified in S. agalactiae <SEQ ID 7027> which encodes the amino acid sequence <SEQ ID 7028>. Analysis of this protein sequence reveals the following:

| Possible site: 20 | | | | |
|---|---|---|---|---|
| >>> Seems to have no N-terminal signal sequence | | | | |
| | INTEGRAL | Likelihood = −2.39 | Transmembrane | 96-112 (96-112) |

```
----- Final Results -----
                              bacterial membrane --- Certainty = 0.1956(Affirmative) < succ>
                                bacterial outside --- Certainty = 0.0000(Not Clear) < succ>
                            bacterial cytoplasm --- Certainty = 0.0000(Not Clear) < succ>
```

[12409] The protein has homology with the following sequences in the GENPEPT database.

| >GP: BAA14368 GB: D90354 surface protein antigen precursor | | | |
|---|---|---|---|
| [Streptococcus sobrinus] | | | |
| Identities = 60/129 (46%), Positives = 76/129 (58%), Gaps = 18/129 (13%) | | | |
| Query: | 3 | ISFDNSFLETVSDDSAFQADVYLQMKRIAAGQVENTYLHTVNGYVISSNTVVTHTPQPEE | 62 |
| | | ++F FL +VS DSAFQA+VYLQMKRIA G NTY++TVNG SSNTV T TP+P++ | |
| Sbjct: | 1442 | VTFKEDFLRSVSVDSAFQAEVYLQMKRIAVGTFANTYVNTVNGITYSSNTVRTSTPEPKQ | 1501 |
| Query: | 63 | PSPNQP--------TPPQPPIETIEPPVPASILPNTGEQES----LLGLIG--AGILLGT | 108 |
| | | PSP P P Q PP A LP TG+ + LLGL+ AG L | |
| Sbjct: | 1502 | PSPVDPKTTTTVVFQPRQGKAYQPAPPAGAQ-LPATGDSSNAYLPLLGLVSLTAGFSL-- | 1558 |
| Query: | 109 | AYGLKKKEE | 117 |
| | | GL++K++ | |
| Sbjct: | 1559 | -LGLRRKQD | 1566 |

[12410] No corresponding DNA sequence was identified in S. pyogenes.

[12411] Based on this analysis, it was predicted that this protein and its epitopes, could be useful antigens for vaccines or diagnostics.

### EXAMPLE 2279

[12412] A DNA sequence (GBSx2413) was identified in S. agalactiae <SEQ ID 7029> which encodes the amino acid sequence <SEQ ID 7030>. Analysis of this protein sequence reveals the following:

```
Possible site: 23
>>> Seems to have no N-terminal signal sequence
----- Final Results -----
                            bacterial cytoplasm --- Certainty = 0.3691(Affirmative) < succ>
                              bacterial membrane --- Certainty = 0.0000(Not Clear) < succ>
                                bacterial outside --- Certainty = 0.0000(Not Clear) < succ>
```

[12413] A related GBS nucleic acid sequence <SEQ ID 9359> which encodes amino acid sequence <SEQ ID 9360> was also identified.

[12414] The protein has homology with the following sequences in the GENPEPT database.

| >GP: CAB15793 GB: Z99123 phosphotransacetylase [Bacillus subtilis] | | | |
|---|---|---|---|
| Identities = 131/221 (59%), Positives = 169/221 (76%), Gaps = 2/221 (0%) | | | |
| Query: | 6 | LVDPVILGKADEVHDSLARLGFVDQDYSIIDPEQYEKFEEMKEAFVEIRKGKATMEDADR | 65 |
| | | +++P+++G +E+ L I DP YE E++ +AFVE RKGKAT E A + | |
| Sbjct: | 41 | VLNPIVIGNENEIQAKAKELNLTLGGVKIYDPHTYEGMEDLVQAFVERRKGKATEEQARK | 100 |
| Query: | 66 | LLKDVNYFGVMLVKLGLADGMVSGAIHSTADTVRPALQIIKTKPGISRTSGVFLMNRENT | 125 |
| | | L D NYFG MLV GLADG+VSGA HSTADTVRPALQIIKTK G+ +TSGVF+M R | |
| Sbjct: | 101 | ALLDENYFGTMLVYKGLADGLVSGAAHSTADTVRPALQIIKTKEGVKKTSGVFIMARG-- | 158 |
| Query: | 126 | QERYIFADCAINIDPNAQELAEIAVNTADTAKIFDIDPKIAMLSFSTKGSAKAPQAEKVQ | 185 |
| | | +E+Y+FADCAINI P++Q+LAEIA+ +A+TAK+FDI+P++AMLSFSTKGSAK+ + EKV | |
| Sbjct: | 159 | EEQYVFADCAINIAPDSQDLAEIAIESANTAKMFDIEPRVAMLSFSTKGSAKSDETEKVA | 218 |
| Query: | 186 | EAAKIAKDLSPELAVDGELQFDAAFVPETAEIKAPNSDVAG | 226 |
| | | +A KIAK+ +PEL +DGE QFDAAFVP AE KAP+S++ G | |
| Sbjct: | 219 | DAVKIAKEKAPELTLDGEFQFDAAFVPSVAEKKAPDSEIKG | 259 |

[12415] A related DNA sequence was identified in S. pyogenes <SEQ ID 7031> which encodes the amino acid sequence <SEQ ID 7032>. Analysis of this protein sequence reveals the following:

```
Possible site: 34
>>> Seems to have no N-terminal signal sequence
----- Final Results -----
                            bacterial cytoplasm --- Certainty = 0.3182(Affirmative) < succ>
                              bacterial membrane --- Certainty = 0.0000(Not Clear) < succ>
                                bacterial outside --- Certainty = 0.0000(Not Clear) < succ>
```

[12416] An alignment of the GAS and GBS proteins is shown below.

| Identities = 181/227 (79%), Positives = 211/227 (92%) | | | |
|---|---|---|---|
| Query: | 1 | MKFEGLVDPVILGKADEVHDSLARLGFVDQDYSIIDPEQYEKFEEMKEAFVEIRKGKATM | 60 |
| | | +KFEGL++P+ILG+++EV + L +LGF DQDY+II+P +Y F++MKEAFVE+RKGKAT+ | |
| Sbjct: | 38 | LKFEGLLEPIILGQSEEVRNLLTKLGFADQDYTIINPNEYADFDKMKEAFVEVRKGKATL | 97 |
| Query: | 61 | EDADRLLKDVNYFGVMLVKLGLADGMVSGAIHSTADTVRPALQIIKTKPGISRTSGVFLM | 120 |
| | | EDAD++L+DVNYFGVMLVK+GLADGMVSGAIHSTADTVRPALQIIKTKPGISRTSGVFLM | |
| Sbjct: | 98 | EDADKMLRDVNYFGVMLVKMGLADGMVSGAIHSTADTVRPALQIIKTKPGISRTSGVFLM | 157 |
| Query: | 121 | NRENTQERYIFADCAINIDPNAQELAEIAVNTADTAKIFDIDPKIAMLSFSTKGSAKAPQ | 180 |
| | | NRENT ERY+FADCAINIDP AQELAEIAVNTA+TAKIFDIDPKIAMLSFSTKGS KAPQ | |
| Sbjct: | 158 | NRENTSERYVFADCAINIDPTAQELAEIAVNTAETAKIFDIDPKIAMLSFSTKGSGKAPQ | 217 |
| Query: | 181 | AEKVQEAAKIAKDLSPELAVDGELQFDAAFVPETAEIKAPNSDVAGK | 227 |
| | | +KV+EA +IA L+P+LA+DGELQFDAAFVPETA IKAP+S VAG+ | |
| Sbjct: | 218 | VDKVREATEIATGLNPDLALDGELQFDAAFVPETAAIKAPDSAVAGQ | 264 |

[12417] Based on this analysis, it was predicted that these proteins and their epitopes could be useful antigens for vaccines or diagnostics.

### EXAMPLE 2280

[12418] A DNA sequence (GBSx2414) was identified in S. agalactiae <SEQ ID 7033> which encodes the amino acid sequence <SEQ ID 7034>. This protein is predicted to be lipopolysaccharide biosynthesis protein-related protein. Analysis of this protein sequence reveals the following:

```
Possible site: 61
>>> Seems to have no N-terminal signal sequence
----- Final Results -----
                            bacterial cytoplasm --- Certainty = 0.4076(Affirmative) < succ>
                              bacterial membrane --- Certainty = 0.0000(Not Clear) < succ>
                                bacterial outside --- Certainty = 0.0000(Not Clear) < succ>
```

[12419] The protein has homology with the following sequences in the GENPEPT database.

| >GP: AAG19110 GB: AE005009 Vng0600c [Halobacterium sp. NRC-1] | | | |
|---|---|---|---|
| Identities = 57/176 (32%), Positives = 86/176 (48%), Gaps = 20/176 (11%) | | | |
| Query: | 1 | MKVLLYLEAEEYLKKSGIGRAIKHQEKALQIAGIDYTTNPT------------------- | 41 |
| | | M+ L YLEA E L+ G+ A Q AL+ ++ P | |
| Sbjct: | 2 | MRALNYLEAAEALR-GGMVTATNQQRAALETTDVEVVETPWRAGDPVRSIGSLAAGGSCF | 60 |
| Query: | 42 | DDFDLVHMNTYGIRSWLLMSKAKKTGKKVIMHGHSTEEDFRNSFIGSNLVSPLFKWYLCR | 101 |
| | | FD+ H N G S + A++T +++H H T EDF SF GS+ ++P + YL | |
| Sbjct: | 61 | TAFDVAHCNLVGPGSVAVARHARRTDTPLVLHAHLTREDFAQSFRGSSTIAPALEPYLRW | 120 |
| Query: | 102 | FYQKADAIITPTDYSKQLIKAYGIKKPIFVLSNGIDLSRYQXSEKKESAFRHYFHL | 157 |
| | | FY +AD ++ P++Y+K +++AY + PI LSNG+DL Q E + R F L | |
| Sbjct: | 121 | FYSQADLVLCPSEYTKDVLRAYPVDAPIRQLSNGVDLESMQGYESFRADTRARFDL | 176 |

[12420] There is also homology to SEQ ID 1220.

[12421] Based on this analysis, it was predicted that this protein and its epitopes, could be useful antigens for vaccines or diagnostics.

### EXAMPLE 2281

[12422] A DNA sequence (GBSx2415) was identified in S. agalactiae <SEQ ID 7035> which encodes the amino acid sequence <SEQ ID 7036>. Analysis of this protein sequence reveals the following:

```
Possible site: 41
>>> Seems to have no N-terminal signal sequence
----- Final Results -----
                            bacterial cytoplasm --- Certainty = 0.2625(Affirmative) < succ>
                              bacterial membrane --- Certainty = 0.0000(Not Clear) < succ>
                                bacterial outside --- Certainty = 0.0000(Not Clear) < succ>
```

[12423] The protein has homology with the following sequences in the GENPEPT database.

| >GP: AAC35010 GB: AF055987 intracellular a-amylase | | | |
|---|---|---|---|
| [Streptococcus mutans] | | | |
| Identities = 27/46 (58%), Positives = 33/46 (71%) | | | |
| Query: | 1 | MEVGEIYAGKTFVDYLGNCEQEVVIGDDGWGDFLVESASISAWVPK | 46 |
| | | M +GE K FVDYL NC +EV++ D GWGDF V+ AS+SAWV K | |
| Sbjct: | 438 | MNMGEFNRNKVFVDYLNNCTEEVILDDQGWGDFPVQEASLSAWVNK | 483 |

[12424] No corresponding DNA sequence was identified in S. pyogenes.

[12425] Based on this analysis, it was predicted that this protein and its epitopes, could be useful antigens for vaccines or diagnostics.

### EXAMPLE 2282

[12426] A DNA sequence (GBSx2416) was identified in S. agalactiae <SEQ ID 7037> which encodes the amino acid sequence <SEQ ID 7038>. This protein is predicted to be RopA. Analysis of this protein sequence reveals the following:

```
Possible site: 24
>>> Seems to have no N-terminal signal sequence
----- Final Results -----
                            bacterial cytoplasm --- Certainty = 0.2082(Affirmative) < succ>
                              bacterial membrane --- Certainty = 0.0000(Not Clear) < succ>
                                bacterial outside --- Certainty = 0.0000(Not Clear) < succ>
```

[12427] There is also homology to SEQ ID 6908:

Identities = 30/35 (85%), Positives = 33/35 (93%)

| | | | |
|---|---|---|---|
| Query: | 1 | MEADQVRGLLSADMLKHDIAMKKAVDVITSSATVK | 35 |
| | | M ADQVR LLSADMLKHDIAMKKAV+VITS+A+VK | |
| Sbjct: | 422 | MPADQVRSLLSADMLKHDIAMKKAVEVITSTASVK | 456 |

[12428] Based on this analysis, it was predicted that these proteins and their epitopes could be useful antigens for vaccines or diagnostics.

### EXAMPLE 2283

[12429] A DNA sequence (GBSx2417) was identified in S. agalactiae <SEQ ID 7039> which encodes the amino acid sequence <SEQ ID 7040>. This protein is predicted to be DNA-directed RNA polymerase, subunit delta. Analysis of this protein sequence reveals the following:

```
Possible site: 54
>>> Seems to have no N-terminal signal sequence
----- Final Results -----
                            bacterial cytoplasm --- Certainty = 0.2407(Affirmative) < succ>
                              bacterial membrane --- Certainty = 0.0000(Not Clear) < succ>
                                bacterial outside --- Certainty = 0.0000(Not Clear) < succ>
```

[12430] The protein has homology with the following sequences in the GENPEPT database.

| >GP: CAB15744 GB: Z99123 RNA polymerase (delta subunit) | | | |
|---|---|---|---|
| [Bacillus subtilis] | | | |
| Identities = 62/186 (33%), Positives = 102/186 (54%), Gaps = 15/186 (8%) | | | |
| Query: | 1 | MELEVFAGQEKSELSMIEVARAILEQRGRDNEMYFSDLVNDIQTYLGKSDSAIRESLPFF | 60 |
| | | M ++ ++ +E E++++E+A + E+ + + F +L+N+I + LG + + + F | |
| Sbjct: | 1 | MGIKQYSQEELKEMALVEIAHELFEEHKKP--VPFQELLNEIASLLGVKKEELGDRIAQF | 58 |
| Query: | 61 | YSDLNTDGSFIPLGENKWGLRSWYAIDEIDEEIITLEEDEDGAPKRKKKRVNAFMDGDED | 120 |
| | | Y+DLN DG F+ L + WGLRSWY D++DEE K KKK+ ++ D D | |
| Sbjct: | 59 | YTDLNIDGRFLALSDQTWGLRSWYPYDQLDEE-------TQPTVKAKKKKAKKAVEEDLD | 111 |
| Query: | 121 | AIDYNDDDPEDEDFTEETPSLEYDEENPDDEKSEVESYDSEINEIIPDEDLDEDVEINEE | 180 |
| | | ++ + D +D D E L+ + ++ D+E + + D EI E I DED DED | |
| Sbjct: | 112 | LDEFEEIDEDDLDLDEVEEELDLEADDFDEEDLDEDDDDLEIEEDIIDED-DEDY----- | 165 |
| Query: | 181 | DDEEEE | 186 |
| | | DDEEEE | |
| Sbjct: | 166 | DDEEEE | 171 |

[12431] A related DNA sequence was identified in S. pyogenes <SEQ ID 7041> which encodes the amino acid sequence <SEQ ID 7042>. Analysis of this protein sequence reveals the following:

```
Possible site: 33
>>> Seems to have no N-terminal signal sequence
----- Final Results -----
                            bacterial cytoplasm --- Certainty = 0.2263(Affirmative) < succ>
                              bacterial membrane --- Certainty = 0.0000(Not Clear) < succ>
                                bacterial outside --- Certainty = 0.0000(Not Clear) < succ>
```

[12432] An alignment of the GAS and GBS proteins is shown below.

| Identities = 162/191 (84%), Positives = 181/191 (93%), Gaps = 1/191 (0%) | | | |
|---|---|---|---|
| Query: | 1 | MELEVFAGQEKSELSMIEVARAILEQRGRDNEMYFSDLVNDIQTYLGKSDSAIRESLPFF | 60 |
| | | ++L+VFAGQEKSELSMIEVARAILE+RGRDNEMYFSDLVN+IQ YLGKSD+ IR +LPFF | |
| Sbjct: | 12 | LKLDVFAGQEKSELSMIEVARAILEERGRDNEMYFSDLVNEIQNYLGKSDAGIRHALPFF | 71 |
| Query: | 61 | YSDLNTDGSFIPLGENKWGLRSWYAIDEIDEEIITLEEDEDGAPKRKKKRVNAFMDGDED | 120 |
| | | Y+DLNTDGSFIPLGENKWGLRSWYAIDEIDEEIITLEEDEDGA KRKKKRVNAFMDGDED | |
| Sbjct: | 72 | YTDLNTDGSFIPLGENKWGLRSWYAIDEIDEEIITLEEDEDGAQKRKKKRVNAFMDGDED | 131 |
| Query: | 121 | AIDYNDDDPEDEDFTEETPSLEYDEENPDDEKSEVESYDSEINEIIPDEDLDEDVEINEE | 180 |
| | | AIDY DDDPEDEDFTEE+ +EYDEE+PDDEKSEVESYDSE+NEIIP++D E+V+INEE | |
| Sbjct: | 132 | AIDYRDDDPEDEDFTEESAEVEYDEEDPDDEKSEVESYDSELNEIIPEDDF-EEVDINEE | 190 |
| Query: | 181 | DDEEEEEEEEV | 191 |
| | | D+E+EE+EE V | |
| Sbjct: | 191 | DEEDEEDEEPV | 201 |

[12433] Based on this analysis, it was predicted that these proteins and their epitopes could be useful antigens for vaccines or diagnostics.

### EXAMPLE 2284

[12434] A DNA sequence (GBSx2418) was identified in S. agalactiae <SEQ ID 7043> which encodes the amino acid sequence <SEQ ID 7044>. This protein is predicted to be CTP synthetase (pyrG). Analysis of this protein sequence reveals the following:

| Possible site: 23 | | | | |
|---|---|---|---|---|
| >>> Seems to have an uncleavable N-term signal seq | | | | |
| | INTEGRAL | Likelihood = −0.11 | Transmembrane | 5-21 (5-21) |

```
----- Final Results -----
                              bacterial membrane --- Certainty = 0.1044(Affirmative) < succ>
                                bacterial outside --- Certainty = 0.0000(Not Clear) < succ>
                            bacterial cytoplasm --- Certainty = 0.0000(Not Clear) < succ>
```

[12435] The protein has homology with the following sequences in the GENPEPT database.

| >GP: CAA09021 GB: AJ010153 CTP synthetase [Lactococcus lactis subsp. | | | |
|---|---|---|---|
| cremoris] (ver 2) | | | |
| Identities = 421/533 (78%), Positives = 481/533 (89%) | | | |
| Query: | 2 | TKYIFVTGGVVSSIGKGIVAASLGRLLKNRGLKVTIQKFDPYINIDPGTMSPYQHGEVYV | 61 |
| | | TKYIFVTGG SS+GKGIVAASLGRLLKNRGLKVT+QKFDPY+NIDPGTMSPYQHGEV+V | |
| Sbjct: | 3 | TKYIFVTGGGTSSMGKGIVAASLGRLLKNRGLKVTVQKFDPYLNIDPGTMSPYQHGEVFV | 62 |
| Query: | 62 | TDDGAETDLDLGHYERFIDINLNKYSNVTTGKIYSEVLKKERRGEYLGATVQVIPHVTDA | 121 |
| | | TDDGAETDLDLGHYERFIDINLNKYSNVT+GK+YSE+L+KER+GEYLGATVQ++PHVT+ | |
| Sbjct: | 63 | TDDGAETDLDLGHYERFIDINLNKYSNVTSGKVYSEILRKERKGEYLGATVQMVPHVTNM | 122 |
| Query: | 122 | LKEKIKRAATTTDSDVIITEVGGTVGDIESLPFLEALRQMKADVGSDNVMYIHTTLLPYL | 181 |
| | | LKEKIKRAATTTD+D+IITEVGGTVGD+ESLPF+EALRQMKA+VG+DNVMYIHT + +L | |
| Sbjct: | 123 | LKEKIKRAATTTDADIIITEVGGTVGDMESLPFIEALRQMKAEVGADNVMYIHTVPILHL | 182 |
| Query: | 182 | KAAGEMKTKPTQHSVKELRGLGIQPNMLVIRTEQPAGQSIKNKLAQFCDVAPEAVIESLD | 241 |
| | | +AAGE+KTK Q++ K LR GIQ NMLV+R+E P +++K+A FCDVAPEAVI+SLD | |
| Sbjct: | 183 | RAAGELKTKIAQNATKTLREYGIQANMLVLRSEVPITTEMRDKIAMFCDVAPEAVIQSLD | 242 |
| Query: | 242 | VDHIYQIPLNMQAQNMDQIVCDHLKLETPAADMTEWSAMVDKVMNLEKKVKIALVGKYVE | 301 |
| | | V+H+YQIPLN+QAQNMDQIVCDHLKL+ P ADM EWSAMVD VMNL+KKVKIALVGKYVE | |
| Sbjct: | 243 | VEHLYQIPLNLQAQNMDQIVCDHLKLDAPKADMAEWSAMVDHVMNLKKKVKIALVGKYVE | 302 |
| Query: | 302 | LPDAYLSVVEALKHSGYVNDVAIDLKWVNAAEVTEDNIKELVGDADGIIVPGGFGQRGSE | 361 |
| | | LPDAY+SV EALKH+GY +D +D+ WVNA +VT++N+ ELVGDA GIIVPGGFGQRG+E | |
| Sbjct: | 303 | LPDAYISVTEALKHAGYASDAEVDINWVNANDVTDENVAELVGDAAGIIVPGGFGQRGTE | 362 |
| Query: | 362 | GKIEAIRYARENDVPMLGVCLGMQLTCVEFARNVLNLHGANSAELDPKTPFPIIDIMRDQ | 421 |
| | | GKI AI+YARENDVPMLG+CLGMQLT VEFARNVL L GA+S ELDP+T +P+IDIMRDQ | |
| Sbjct: | 363 | GKIAAIKYARENDVPMLGICLGMQLTAVEFARNVLGLEGAHSFELDPETKYPVIDIMRDQ | 422 |
| Query: | 422 | IDIEDMGGTLRLGLYPCKLKSGSRAAAAYNNQEVVQRRHRHRYEFNTKFREQFEAAGFVF | 481 |
| | | +D+EDMGGTLRLGLYP KLK+GSRA AAYN+ EVVQRRHRHRYEFN K+RE FE AGFVF | |
| Sbjct: | 423 | VDVEDMGGTLRLGLYPAKLKNGSRAKAAYNDAEVVQRRHRHRYEFNNKYREDFEKAGFVF | 482 |
| Query: | 482 | SGVSPDNRLMEVVELPEKKFFVAAQYHPELQSRPNHAEELYTAFVTAAVENMK | 534 |
| | | SGVSPDNRL+E+VEL KKFFVA QYHPELQSRPN EELYT F+ AVEN K | |
| Sbjct: | 483 | SGVSPDNRLVEIVELSGKKFFVACQYHPELQSRPNRPEELYTEFIRVAVENSK | 535 |

[12436] A related DNA sequence was identified in S. pyogenes <SEQ ID 7045> which encodes the amino acid sequence <SEQ ID 7046>. Analysis of this protein sequence reveals the following:

| Possible site: 23 | | | | |
|---|---|---|---|---|
| >>> Seems to have an uncleavable N-term signal seq | | | | |
| | INTEGRAL | Likelihood = −0.11 | Transmembrane | 5-21 (5-21) |

```
----- Final Results -----
                              bacterial membrane --- Certainty = 0.1044(Affirmative) < succ>
                                bacterial outside --- Certainty = 0.0000(Not Clear) < succ>
                            bacterial cytoplasm --- Certainty = 0.0000(Not Clear) < succ>
```

[12437] The protein has homology with the following sequences in the databases:

| >GP: CAA09021 GB: AJ010153 CTP synthetase [Lactococcus lactis subsp. | | | |
|---|---|---|---|
| cremoris] (ver 2) | | | |
| Identities = 423/532 (79%), Positives = 483/532 (90%) | | | |
| Query: | 2 | TKYIFVTGGVVSSIGKGIVAASLGRLLKNRGLKVTIQKFDPYINIDPGTMSPYQHGEVYV | 61 |
| | | TKYIFVTGG SS+GKGIVAASLGRLLKNRGLKVT+QKFDPY+NIDPGTMSPYQHGEV+V | |
| Sbjct: | 3 | TKYIFVTGGGTSSMGKGIVAASLGRLLKNRGLKVTVQKFDPYLNIDPGTMSPYQHGEVFV | 62 |
| Query: | 62 | TDDGAETDLDLGHYERFIDINLNKYSNVTTGKIYSEVLRKERKGEYLGATVQVIPHITDA | 121 |
| | | TDDGAETDLDLGHYERFIDINLNKYSNVT+GK+YSE+LRKERKGEYLGATVQ++PH+T+ | |
| Sbjct: | 63 | TDDGAETDLDLGHYERFIDINLNKYSNVTSGKVYSEILRKERKGEYLGATVQMVPHVTNM | 122 |
| Query: | 122 | LKEKIKRAASTTDSDVIITEVGGTVGDIESLPFLEALRQMKADVGSENVMYIHTTLLPYL | 181 |
| | | LKEKIKRAA+TTD+D+IITEVGGTVGD+ESLPF+EALRQMKA+VG++NVMYIHT + +L | |
| Sbjct: | 123 | LKEKIKRAATTTDADIIITEVGGTVGDMESLPFIEALRQMKAEVGADNVMYIHTVPILHL | 182 |
| Query: | 182 | KAAGEMKTKPTQHSVKELRGLGIQPNMLVIRTEEPVEQGIKNKLAQFCDVNSEAVIESRD | 241 |
| | | +AAGE+KTK Q++ K LR GIQ NMLV+R+E P+ +++K+A FCDV EAVI+S D | |
| Sbjct: | 183 | RAAGELKTKIAQNATKTLREYGIQANMLVLRSEVPITTEMRDKIAMFCDVAPEAVIQSLD | 242 |
| Query: | 242 | VEHLYQIPLNLQAQSMDQIVCDHLKLNAPQADMTEWSAMVDKVMNLRKTTKIALVGKYVE | 301 |
| | | VEHLYQIPLNLQAQ+MDQIVCDHLKL+AP+ADM EWSAMVD VMNL+K KIALVGKYVE | |
| Sbjct: | 243 | VEHLYQIPLNLQAQNMDQIVCDHLKLDAPKADMAEWSAMVDHVMNLKKKVKIALVGKYVE | 302 |
| Query: | 302 | LPDAYLSVVEALKHSGYANDTAIDLKWVNANDVTVDNAADLLGDADGIIVPGGFGQRGTE | 361 |
| | | LPDAY+SV EALKH+GYA+D +D+ WVNANDVT +N A+L+GDA GIIVPGGFGQRGTE | |
| Sbjct: | 303 | LPDAYISVTEALKHAGYASDAEVDINWVNANDVTDENVAELVGDAAGIIVPGGFGQRGTE | 362 |
| Query: | 362 | GKIQAIRYARENDVPMLGICLGMQLTCVEFARHVLNMEGANSFELEPSTKYPIIDIMRDQ | 421 |
| | | GKI AI+YARENDVPMLGICLGMQLT VEFAR+VL +EGA+SFEL+P TKYP+IDIMRDQ | |
| Sbjct: | 363 | GKIAAIKYARENDVPMLGICLGMQLTAVEFARNVLGLEGAHSFELDPETKYPVIDIMRDQ | 422 |
| Query: | 422 | IDIEDMGGTLRLGLYPCKLKPGSKAAMAYNNQEVVQRRHRHRYEFNNKFRPEFEAAGFVF | 481 |
| | | +D+EDMGGTLRLGLYP KLK GS+A AYN+ EVVQRRHRHRYEFNNK+R +FE AGFVF | |
| Sbjct: | 423 | VDVEDMGGTLRLGLYPAKLKNGSRAKAAYNDAEVVQRRHRHRYEFNNKYREDFEKAGFVF | 482 |
| Query: | 482 | SGVSPDNRLVEIVELKEKKFFVAAQYHPELQSRPNRPEELYTAFVTAAIKNS | 533 |
| | | SGVSPDNRLVEIVEL KKFFVA QYHPELQSRPNRPEELYT F+ A++NS | |
| Sbjct: | 483 | SGVSPDNRLVEIVELSGKKFFVACQYHPELQSRPNRPEELYTEFIRVAVENS | 534 |

[12438] An alignment of the GAS and GBS proteins is shown below.

| Identities = 477/532 (89%), Positives = 503/532 (93%) | | | |
|---|---|---|---|
| Query: | 1 | MTKYIFVTGGVVSSIGKGIVAASLGRLLKNRGLKVTIQKFDPYINIDPGTMSPYQHGEVY | 60 |
| | | MTKYIFVTGGVVSSIGKGIVAASLGRLLKNRGLKVTIQKFDPYINIDPGTMSPYQHGEVY | |
| Sbjct: | 1 | MTKYIFVTGGVVSSIGKGIVAASLGRLLKNRGLKVTIQKFDPYINIDPGTMSPYQHGEVY | 60 |
| Query: | 61 | VTDDGAETDLDLGHYERFIDINLNKYSNVTTGKIYSEVLKKERRGEYLGATVQVIPHVTD | 120 |
| | | VTDDGAETDLDLGHYERFIDINLNKYSNVTTGKIYSEVL+KER+GEYLGATVQVIPH+TD | |
| Sbjct: | 61 | VTDDGAETDLDLGHYERFIDINLNKYSNVTTGKIYSEVLRKERKGEYLGATVQVIPHITD | 120 |
| Query: | 121 | ALKEKIKRAATTTDSDVIITEVGGTVGDIESLPFLEALRQMKADVGSDNVMYIHTTLLPY | 180 |
| | | ALKEKIKRAA+TTDSDVIITEVGGTVGDIESLPFLEALRQMKADVGS+NVMYIHTTLLPY | |
| Sbjct: | 121 | ALKEKIKRAASTTDSDVIITEVGGTVGDIESLPFLEALRQMKADVGSENVMYIHTTLLPY | 180 |
| Query: | 181 | LKAAGEMKTKPTQHSVKELRGLGIQPNMLVIRTEQPAGQSIKNKLAQFCDVAPEAVIESL | 240 |
| | | LKAAGEMKTKPTQHSVKELRGLGIQPNMLVIRTE+P Q IKNKLAQFCDV EAVIES | |
| Sbjct: | 181 | LKAAGEMKTKPTQHSVKELRGLGIQPNMLVIRTEEPVEQGIKNKLAQFCDVNSEAVIESR | 240 |
| Query: | 241 | DVDHIYQIPLNMQAQNMDQIVCDHLKLETPAADMTEWSAMVDKVMNLEKKVKIALVGKYV | 300 |
| | | DV+H+YQIPLN+QAQ+MDQIVCDHLKL P ADMTEWSAMVDKVMNL K KIALVGKYV | |
| Sbjct: | 241 | DVEHLYQIPLNLQAQSMDQIVCDHLKLNAPQADMTEWSAMVDKVMNLRKTTKIALVGKYV | 300 |
| Query: | 301 | ELPDAYLSVVEALKHSGYVNDVAIDLKWVNAAEVTEDNIKELVGDADGIIVPGGFGQRGS | 360 |
| | | ELPDAYLSVVEALKHSGY ND AIDLKWVNA +VT DN +L+GDADGIIVPGGFGQRG+ | |
| Sbjct: | 301 | ELPDAYLSVVEALKHSGYANDTAIDLKWVNANDVTVDNAADLLGDADGIIVPGGFGQRGT | 360 |
| Query: | 361 | EGKIEAIRYARENDVPMLGVCLGMQLTCVEFARNVLNLHGANSAELDPKTPFPIIDIMRD | 420 |
| | | EGKI+AIRYARENDVPMLG+CLGMQLTCVEFAR+VLN+ GANS EL+P T +PIIDIMRD | |
| Sbjct: | 361 | EGKIQAIRYARENDVPMLGICLGMQLTCVEFARHVLNMEGANSFELEPSTKYPIIDIMRD | 420 |
| Query: | 421 | QIDIEDMGGTLRLGLYPCKLKSGSRAAAAYNNQEVVQRRHRHRYEFNTKFREQFEAAGFV | 480 |
| | | QIDIEDMGGTLRLGLYPCKLK GS+AA AYNNQEVVQRRHRHRYEFN KFR +FEAAGFV | |
| Sbjct: | 421 | QIDIEDMGGTLRLGLYPCKLKPGSKAAMAYNNQEVVQRRHRNRYEFNNKFRPEFEAAGFV | 480 |
| Query: | 481 | FSGVSPDNRLMEVVELPEKKFFVAAQYHPELQSRPNHAEELYTAFVTAAVEN | 532 |
| | | FSGVSPDNRL+E+VEL EKKFFVAAQYHPELQSRPN EELYTAFVTAA++N | |
| Sbjct: | 481 | FSGVSPDNRLVEIVELKEKKFFVAAQYHPELQSRPNRPEELYTAFVTAAIKN | 532 |

[12439] Based on this analysis, it was predicted that these proteins and their epitopes could be useful antigens for vaccines or diagnostics.

### EXAMPLE 2285

[12440] A DNA sequence (GBSx2419) was identified in S. agalactiae <SEQ ID 7047> which encodes the amino acid sequence <SEQ ID 7048>. Analysis of this protein sequence reveals the following:

```
Possible site: 34
>>> Seems to have an uncleavable N-term signal seq
INTEGRAL Likelihood = −9.92 Transmembrane 13-29 ( 3-34)
----- Final Results -----
                            bacterial membrane --- Certainty = 0.4970(Affirmative) < succ>
                              bacterial outside --- Certainty = 0.0000(Not Clear) < succ>
                          bacterial cytoplasm --- Certainty = 0.0000(Not Clear) < succ>
```

[12441] A related GBS nucleic acid sequence <SEQ ID 9285> which encodes amino acid sequence <SEQ ID 9286> was also identified.

[12442] The protein has homology with the following sequences in the GENPEPT database.

| >GP:CAB14296 GB:Z99116 yqkD [Bacillus subtilis] | | | |
|---|---|---|---|
| Identities = 79/289 (27%), Positives = 139/289 (47%), Gaps = 8/289 (2%) | | | |
| Query: | 1 | MKKIRLSKFIKMIVVILFLISVAASFYFFHVAQVRDDKSFISNGQRKPGNSLYAYDKSFD | 60 |
| | | MKKI L+ I +V + I+ S + + D+ I + G+ ++ +SF+ | |
| Sbjct: | 1 | MKKILLA--IGALVTAVIAIGIVFSHMILFIKKKTDED--IIKRETDNGHDVF---ESFE | 53 |
| Query: | 61 | KLLKQKIEMTNQNIKQVAWYVPAVKKTHKTAVVVHGFANSKENMKAYGWLFHKLGYNVLM | 120 |
| | | ++ K + + + Y A T T ++ HG + N Y LF LG+NVL+ | |
| Sbjct: | 54 | QMEKTAFVIPSAYGYDIKGYHVAPHDTPNTIIICHGVTMNVLNSLKYMHLFLDLGWNVLI | 113 |
| Query: | 121 | PDNIAHGESHGQLIGYGWNDRENIIKWTEMIVDK-NPSSQITLFGVSMGGATVNMASGEK | 179 |
| | | D+ HG+S G+ YG+ +++++ K ++ +K N I + G SMG T ++ +G | |
| Sbjct: | 114 | YDHRRHGQSGGKTTSYGFYEKDDLNKVVSLLKNKTNHRGLIGIHGESMGAVTALLYAGAH | 173 |
| Query: | 180 | LPSQVVNIIEDCGYSSVWDELKFQAKEMYGLPAFPLLYEVSTISKIRAGFSYGQASSVEQ | 239 |
| | | I DC ++ ++L ++ + Y LP++PLL K+R G+ + S + | |
| Sbjct: | 174 | CSDGADFYIADCPFACFDEQLAYRLRAEYRLPSWPLLPIADFFLKLRGGYRAREVSPLAV | 233 |
| Query: | 240 | LKKNNLPALFIHGDKDNFVFTSMVYDNYKATAGKKELYIVKGAKHAKSF | 288 |
| | | + K P LFIH D+++P S Y+ G K LYI + +HA S+ | |
| Sbjct: | 234 | IDKIEKPVLFIHSKDDDYIPVSSTERLYEKKRGPKALYIAENGEHAMSY | 282 |

[12443] A related DNA sequence was identified in S. pyogenes <SEQ ID 7049> which encodes the amino acid sequence <SEQ ID 7050>. Analysis of this protein sequence reveals the following:

```
Possible site: 24
>>> Seems to have an uncleavable N-term signal seq
INTEGRAL Likelihood = −7.48 Transmembrane 10-26 ( 3-32)
----- Final Results -----
                            bacterial membrane --- Certainty = 0.3994(Affirmative) < succ>
                              bacterial outside --- Certainty = 0.0000(Not Clear) < succ>
                          bacterial cytoplasm --- Certainty = 0.0000(Not Clear) < succ>
```

[12444] The protein has homology with the following sequences in the databases:

>GP:CAB14296 GB:Z99116 yqkD [Bacillus subtilis]
Identities = 88/295 (29%), Positives = 145/295 (48%), Gaps = 4/295 (1%)

| | | | |
|---|---|---|---|
| Query: | 10 | LGILFLLITLISVGASFYFFHVAQIREEKSFINNKKRSTNNPLYPAEQSFDALPYEKRQL | 69 |
| | | L I L+ +I++G F H+ ++K+ + KR T+N + +SF+ + + | |
| Sbjct: | 6 | LAIGALVTAVIAIG--IVFSHMILFIKKKTDEDIIKRETDNG-HDVFESFEQMEKTAFVI | 62 |
| Query: | 70 | TNRGLKQVGWYLPAAQKTKKTAIVVHGFTNDKEDMKPYAMLFHDLGYNVLMPDNEAHGES | 129 |
| | | + + Y A T T I+ HG T + + Y LF DLG+NVL+D+ HG+S | |
| Sbjct: | 63 | PSAYGYDIKGYHVAPHDTPNTIIICHGVTMNVLNSLKYMHLFLDLGWNVLIYDHRRHGQS | 122 |
| Query: | 130 | EGNLIGYGWNDRLNVMAWTDQLI-KENPESQITLFGLSMGAATVMMASGERLPAQVTSLI | 188 |
| | | G YG+ ++ ++ L K N I + G SMGAT ++ +G I | |
| Sbjct: | 123 | GGKTTSYGFYEKDDLNKVVSLLKNETNHRGLIGIHGESMGAVTALLYAGANCSDGADFYI | 182 |
| Query: | 189 | EDCGYASVWDELKFQAKANYNLPAFPLLYEVSALSKIRAGFSYGEASSVKQLAKNKRPTL | 248 |
| | | DC +A ++L ++ +A Y LP++PLL K+R G+ E S + + K ++P L | |
| Sbjct: | 183 | ADCPFACFDEQLAYRLRAEYRLPSWPLLPIADFFLKLRGGYRAREVSPLAVIDKIEKPVL | 242 |
| Query: | 249 | FIHGDRDDFVPTRMVYDNYKATKGPKEILIVRGAKHAKSFETNPEQYQKKIAAFL | 303 |
| | | FIN DD++P Y+ +GPK + I + +HA S+ N Y+K + FL | |
| Sbjct: | 243 | FIHSKDDDYIPVSSTERLYEKKKGPKALYIAENGEHAMSYTKNRHTYRKTVQEFL | 297 |

[12445] An alignment of the GAS and GBS proteins is shown below.

| Identities = 203/294 (69%), Positives = 246/294 (83%) | | | |
|---|---|---|---|
| Query: | 1 | MKKIRLSKFIKMIVVILFLISVAASFYFFHVAQVRDDKSFISNGQRKPGNSLYAYDKSFD | 60 |
| | | MK IR++K++ ++ +++ LISV ASFYFFHVAQ+R++KSFI+N +R N LY ++SFD | |
| Sbjct: | 1 | MKTIRIAKYLGILFLLITLISVGASFYFFHVAQIREEKSFINNKKRSTNNPLYPAEQSFD | 60 |
| Query: | 61 | KLLKQKIEMTNQNIKQVAWYVPAVKKTHKTAVVVHGFANSKENMKAYGWLFNKLGYNVLN | 120 |
| | | L +K ++TN+ +KQV WY+PA +KT KTA+VVHGF N KE+NK Y LFH LGYNVLN | |
| Sbjct: | 61 | ALPYEKRQLTNRGLKQVGWYLPAAQKTRKTAIVVHGFTNDKEDNKPYANLFHDLGYNVLN | 120 |
| Query: | 121 | PDNIAHGESNGQLIGYGWNDRENIIKWTEDMVDKNPSSQITLFGVSMGGATVMMASGEKL | 180 |
| | | PDN ANGES G LIGYGWNDR N++WT+ ++ +NP SQITLFG+SMG ATVMMASGE+L | |
| Sbjct: | 121 | PDNEAHGESEGNLIGYGWNDRLNVMAWTDQLIKENPESQITLFGLSMGAATVMNASGERL | 180 |
| Query: | 181 | PSQVVNIIEOCGYSSVWDELKFQAKENYGLPAFPLLYEVSTISKIRAGFSYGQASSVEQL | 240 |
| | | P+QV ++IEDCGY+SVWDELKFQAK MY LPAFPLLYEVS +SKIRAGFSYG+ASSV+QL | |
| Sbjct: | 181 | PAQVTSLIEDCGYASVWDELKFQAKANYNLPAFPLLYEVSALSKIRAGFSYGEASSVKQL | 240 |
| Query: | 241 | KKNNLPALFIHGDKDNFVPTSMVYDNYKATAGKKELYIVKGAKHAKSFETEPEK | 294 |
| | | KN P LFIHGDKD+FVPT MVYDNYKAT G KE+ IVKGAKHAKSWET PE+ | |
| Sbjct: | 241 | AKNKRPTLFIHGDKDDFVPTKMVYDNYKATKGPKEILIVKGAKHAKSFETNPEQ | 294 |

[12446] SEQ ID 9286 (GBS662) was expressed in E. coli as a GST-fusion product. SDS-PAGE analysis of total cell extract is shown in FIG. 136 (lane 8-10; MW 63 kDa) and in FIG. 187 (lane 4; MW 63 kDa).

[12447] GBS662-GST was purified as shown in FIG. 237, lane 7.

[12448] Based on this analysis, it was predicted that these proteins and their epitopes could be useful antigens for vaccines or diagnostics.

### EXAMPLE 2286

[12449] A DNA sequence (GBSx2420) was identified in S. agalactiae <SEQ ID 7051> which encodes the amino acid sequence <SEQ ID 7052>. This protein is predicted to be aspartate—ammonia ligase (asnA). Analysis of this protein sequence reveals the following:

```
Possible site: 60
>>> Seems to have no N-terminal signal sequence
----- Final Results -----
                            bacterial cytoplasm --- Certainty = 0.2898(Affirmative) < succ>
                              bacterial membrane --- Certainty = 0.0000(Not Clear) < succ>
                                bacterial outside --- Certainty = 0.0000(Not Clear) < succ>
```

[12450] A related GBS nucleic acid sequence <SEQ ID 9309> which encodes amino acid sequence <SEQ ID 9310> was also identified.

[12451] The protein has homology with the following sequences in the GENPEPT database.

| >GP:AAC22222 GB:U32738 aspartate--ammonia ligase (asnA) | | | |
|---|---|---|---|
| [Haemophilus influenzae Rd] | | | |
| Identities = 246/300 (82%), Positives = 268/300 (89%) | | | |
| Query: | 1 | MIDKLEIVEVQGPILSQVGDGMQDNLSGIEHPVSVKVLNIPEAEFEVVHSLAKWKRHTLA | 60 |
| | | +I++L I+EVQGPILSQVG+GMQDNLSGIE V V V IP A FEVVHSLAKWKRHTLA | |
| Sbjct: | 23 | LIEQLGIIEVQGPILSQVGNGMQDNLSGIEKAVQVNVKCIPNAVFEVVHSLAKWKRHTLA | 82 |
| Query: | 61 | RFGFNEGEGLFVHMKALRPDEDSLDPTHSVYVDQWDWEKVIPDGRRNLDYLKETVEKIYK | 120 |
| | | RF F E EGLFVHMKALRPDEDSLDPTHSVYVDQWDWEKVIP+GRRN YLKETV IY+ | |
| Sbjct: | 83 | RFNFKEDEGLFVHMKALRPDEDSLDPTHSVYVDQWDWEKVIPEGRRNFAYLKETVNSIYR | 142 |
| Query: | 121 | AIRLTELAVEARFDIESILPKRITFIHTEELVEKYPDLSPKERENAIAKEYGAVFLIGIG | 180 |
| | | AIRLTELAVEARFDI SILPK+ITF+H+E+LV++YPDLS KERENAI KEYGAVFLIGIG | |
| Sbjct: | 143 | AIRLTELAVEARFDIPSILPKQITFVHSEDLVKRYPDLSSKERENAICKEYGAVFLIGIG | 202 |
| Query: | 181 | GELADGKPHDGRAPDYDDWTTPSENGFKGLNGDILVWNEQLGTAFELSSMGIRVDEDALK | 240 |
| | | G+L+DGKPNDGRAPDYDDWTT SENG+KGLNGDILVWN+QLG AFELSSMGIRVDE AL+ | |
| Sbjct: | 203 | GKLSDGKPHDGRAPDYDDWTTESENGYKGLNGDILVWNDQLGKAFELSSMGIRVDESALR | 262 |
| Query: | 241 | RQVVLTGDEDRLEFEWHKTLLRGFFPLTIGGGIGQSRLAMFLLRKXHIGEVQSSVWPKEV | 300 |
| | | QV LTGDED L+ +WH+ LL G PLTIGGGIGQSRLAM LLRK HIGEVQSSVWPKE+ | |
| Sbjct: | 263 | LQVGLTGDEDHLKMDWHQDLLNGKLPLTIGGGIGQSRLAMLLLRKKHIGEVQSSVWPKEM | 322 |

[12452] A related DNA sequence was identified in S. pyogenes <SEQ ID 7053> which encodes the amino acid sequence <SEQ ID 7054>. Analysis of this protein sequence reveals the following:

```
Possible site: 34
>>> Seems to have no N-terminal signal sequence
INTEGRAL Likelihood = −0.16 Transmembrane 189-205 ( 189-205)
----- Final Results -----
                            bacterial membrane --- Certainty = 0.1065(Affirmative) < succ>
                              bacterial outside --- Certainty = 0.0000(Not Clear) < succ>
                          bacterial cytoplasm --- Certainty = 0.0000(Not Clear) < succ>
```

[12453] The protein has homology with the following sequences in the databases:

| >GP:AAC22222 GB:U32738 aspartate--aimnonia ligase (asnA) | | | |
|---|---|---|---|
| [Haemophilus influen ae Rd] | | | |
| Identities = 255/330 (77%), Positives = 289/330 (87%) | | | |
| Query: | 1 | MKKSFIHQQEEISFVKNTFTQYLIAKLDVVEVQGPILSRVGDGMQDNLSGTENPVSVNVL | 60 |
| | | MKK+FI QQ+EISFVKNTFTQ LI +L ++EVQGPILS+VG+GMQDNLSG E V VNV | |
| Sbjct: | 1 | MKKTFILQQQEISFVKNTFTQNLIEQLGIIEVQGPILSQVGNGMQDNLSGIEKAVQVNVK | 60 |
| Query: | 61 | KIPNATFEVVNSLAKWKRHTLARFGFNEGEGLVVNMKALRPDEDSLDQTHSVYVDQWDWE | 120 |
| | | IPNA FEVVHSLAKWKRHTLARF F E EGL V+MKALRPDEDSLD THSVYVDQWDWE | |
| Sbjct: | 61 | CIPNAVFEVVHSLAKWKRHTLARFNFKEDEGLFVHMKALRPDEDSLDPTHSVYVDQWDWE | 120 |
| Query: | 121 | KVIPDGKRNLAYLKETVETIYKVIRLTELAVEARYDIEAVLPKKITFIHTEELVAKYPDL | 180 |
| | | KVIP+G+RN AYLKETV +IY+ IRLTELAVEAR+DI ++LPK+ITF+H+E+LV +YPDL | |
| Sbjct: | 121 | KVIPEGRRNFAYLKETVNSIYRAIRLTELAVEARFDIPSILPKQITFVHSEDLVKRYPDL | 180 |
| Query: | 181 | TPKERENAITKEFGAVFLIGIGGVLPDGKPHDGRAPDYDDWTTETENGYHGLNGDILVWN | 240 |
| | | + KERENAI KE+GAVFLIGIGG L DGKPHDGPAPDYDDWTTE+ENGY GLNGDILVWN | |
| Sbjct: | 181 | SSKERENAICKEYGAVFLIGIGGKLSDGKPHDGRAPDYDDWTTESENGYKGLNGDILVWN | 240 |
| Query: | 241 | DQLGSAFELSSNGIRVDEEALKRQVEMTGDQDRLGFDWHESLLNGLFPLTIGGGIGQSRM | 300 |
| | | DQLG AFELSSNGIRVDE AL+ QV +TGD+D L DWH+ LLNG PLTIGGGIGQSR+ | |
| Sbjct: | 241 | DQLGKAFELSSNGIRVDESALRLQVGLTGDEDHLKNDWHQDLLNGKLPLTIGGGIGQSRL | 300 |
| Query: | 301 | VMFLLREQHIGEVQTSVWPQEVRDSYDNIL | 330 |
| | | M LLRK+HIGEVQ+SVWP+E+ + + NIL | |
| Sbjct: | 301 | ANLLLRKKHIGEVQSSVWPKEMLEEFSNIL | 330 |

[12454] An alignment of the GAS and GBS proteins is shown below.

| Identities = 254/303 (83%), Positives = 280/303 (91%) | | | |
|---|---|---|---|
| Query: | 1 | MIDKLEIVEVQGPILSQVGDGMQDNLSGIEHPVSVKVLNIPEAEFEVVHSLAKWKRHTLA | 60 |
| | | +I KL++VEVQGPILS+VGDGMQDNLSG E+PVSV VL IF A FEVVHSLAKWKRHTLA | |
| Sbjct: | 23 | LIAKLDVVEVQGPILSRVGDGMQDNLSGTENPVSVNVLKIPNATFEVVHSLAKWKRHTLA | 82 |
| Query: | 61 | RFGFNEGEGLFVHMKALRPDEDSLDPTHSVYVDQWDWEKVIPDGRRNLDYLKETVEKIYK | 120 |
| | | RFGFNEGEGL V+MKALRPDEDSLD THSVYVDQWDWEKVIPDG+RNL YLKETVE IYK | |
| Sbjct: | 83 | RFGFNEGEGLVVNMKALRPDEDSLDQTHSVYVDQWDWEKVIPDGKRNLAYLKETVETIYK | 142 |
| Query: | 121 | AIRLTELAVEARFDIESILPKRITFIHTEELVEKYPDLSPKERENAIAKEYGAVFLIGIG | 180 |
| | | IRLTELAVEAR+DIE++LPK+ITFIHTESLV KYPDL+PKERENAI KE+GAVFLIGIG | |
| Sbjct: | 143 | VIRLTELAVEARYDIEAVLPKKITFIHTEELVAKYPDLTPKERENAITKEFGAVFLIGIG | 202 |
| Query: | 181 | GELADGKPHDGRAPDYDDWTTPSENGFKGLNGDILVWNEQLGTAFELSSMGIRVDEDALK | 240 |
| | | G L DGKPHDGRAPDYDDWTT +ENG+ GLNGDILVWN+QLG+AFELSSMGIRVDE+ALK | |
| Sbjct: | 203 | GVLPDGKPHDGRAPDYDOWTTETENGYHGLNGDILVWNDQLGSAFELSSMGIRVDEEALK | 262 |
| Query: | 241 | RQVVLTGDEDRLEFEWHKTLLRGFFPLTIGGGIGQSRLANFLLRKXHIGEVQSSVWPKEV | 300 |
| | | RQV +TGD+DRL F+WHR+LL G FPLTIGGGIGQSR+ MFLLRK HIGEVQ+SVWP+EV | |
| Sbjct: | 263 | RQVEMTGDQDRLGFDWHKSLLNGLFFLTIGGGIGQSRNVMFLLRKQHIGEVQTSVWPQEV | 322 |
| Query: | 301 | RDT | 303 |
| | | RD+ | |
| Sbjct: | 323 | RDS | 325 |

[12455] Based on this analysis, it was predicted that these proteins and their epitopes could be useful antigens for vaccines or diagnostics.

### EXAMPLE 2287

[12456] A DNA sequence (GBSx2421) was identified in S. agalactiae <SEQ ID 7055> which encodes the amino acid sequence <SEQ ID 7056>. Analysis of this protein sequence reveals the following:

```
Possible site: 27
>>> Seems to have no N-terminal signal sequence
----- Final Results -----
                            bacterial cytoplasm --- Certainty = 0.3163(Affirmative) < succ>
                              bacterial membrane --- Certainty = 0.0000(Not Clear) < succ>
                                bacterial outside --- Certainty = 0.0000(Not Clear) < succ>
```

[12457] The protein has no significant homology with any sequences in the GENPEPT database.

[12458] No corresponding DNA sequence was identified in S. pyogenes.

[12459] Based on this analysis, it was predicted that this protein and its epitopes, could be useful antigens for vaccines or diagnostics.

### EXAMPLE 2288

[12460] A DNA sequence (GBSx2422) was identified in S. agalactiae <SEQ ID 7057> which encodes the amino acid sequence <SEQ ID 7058>. Analysis of this protein sequence reveals the following:

```
Possible site: 25
>>> Seems to have a cleavable N-term signal seq.
----- Final Results -----
                            bacterial outside --- Certainty = 0.3000(Affirmative) < succ>
                          bacterial membrane --- Certainty = 0.0000(Not Clear) < succ>
                        bacterial cytoplasm --- Certainty = 0.0000(Not Clear) < succ>
```

[12461] A related GBS nucleic acid sequence <SEQ ID 9007> which encodes amino acid sequence <SEQ ID 9008> was also identified.

[12462] The protein has homology with the following sequences in the GENPEPT database.

| >GP:AAD56628 GB:AF165218 Bta [Streptococcus pneumoniae] | | | |
|---|---|---|---|
| Identities = 30/97 (30%), Positives = 50/97 (50%), Gaps = 3/97 (3%) | | | |
| Query: | 50 | KALVSKSQQSEATIFIGRPTCQYCRAFLPKLLKSQATLHSKIYYLDSQKYKG-KRLKSFF | 108 |
| | | +A + ++ AT FIGR TC YCR F L A + IY+++S++ L++F | |
| Sbjct: | 18 | RAQEALDKKETATFFIGRKTCPYCRKFAGTLSGVVAETKAHIYFINSEEASQLNDLQAFR | 77 |
| Query: | 109 | KKHHITTVPNLAHYQQGKMTKYLVQGSQATPQQIQTW | 145 |
| | | ++ I TVP H G++ + S + Q+I+ F | |
| Sbjct: | 78 | SRYGIPTVPGFVHITDGQIN--VRCDSSMSAQEIKDF | 112 |

[12463] Based on this analysis, it was predicted that this protein and its epitopes, could be useful antigens for vaccines or diagnostics.

### EXAMPLE 2289

[12464] A DNA sequence (GBSx2423) was identified in S. agalactiae <SEQ ID 7059> which encodes the amino acid sequence <SEQ ID 7060>. Analysis of this protein sequence reveals the following:

```
Possible site: 58
>>> Seems to have no N-terminal signal sequence
----- Final Results -----
                            bacterial cytoplasm --- Certainty = 0.0735(Affirmative) < succ>
                              bacterial membrane --- Certainty = 0.0000(Not Clear) < succ>
                                bacterial outside --- Certainty = 0.0000(Not Clear) < succ>
```

[12465] A related GBS nucleic acid sequence <SEQ ID 9603> which encodes amino acid sequence <SEQ ID 9604> was also identified.

[12466] The protein has homology with the following sequences in the GENPEPT database.

| >GP: BAB06309 GB: AP001516 unknown conserved protein | | | |
|---|---|---|---|
| [Bacillus halodurans] | | | |
| Identities = 78/178 (43%), Positives = 115/178 (63%), Gaps = 3/178 (1%) | | | |
| Query: | 3 | MRVVAGTFGGRPLKTLDGKTTRPTTDKVKGAIFNMIGPFFEGGRVLDLFSGSGSLAIEAI | 62 |
| | | MRV+AG G LK + G TRPTTDKVK AIFNMIGPFF+GG LDL+ GSG L IEA+ | |
| Sbjct: | 1 | MRVIAGEQKGLTLKAVPGHKTRPTTDKVKEAIFNMIGPFFDGGIGLDLYGGSGGLGIEAL | 60 |
| Query: | 63 | SRGMDQAVLVEKDRRAQVVIQENIAMTKSPEQFQLLKMEANRALEQLTGQ---FDLVLLD | 119 |
| | | SRG+++ + V++ +RA I++N++ + ++ + +A RAL+ LT + F V LD | |
| Sbjct: | 61 | SRGVERMIFVDQQKRAIETIKQNLSHCGLEGRAEVYRNDAKRALQVLTKRGIVFAYVFLD | 120 |
| Query: | 120 | PPYAKEEIVKQIQIMDSKGLLGDDIMIACETDKSVDLPEEIASFGIWKQKIYGISKVT | 177 |
| | | PPYAK+ I + I+ + GLL + ++ CE D+ LP++I K++ YG + +T | |
| Sbjct: | 121 | PPYAKQTIKNDLAILANHGLLEEGGVVVCEHDRDTMLPDQIEYAVKHKEETYGDTMIT | 178 |

[12467] There is also homology to SEQ ID 132.

[12468] Based on this analysis, it was predicted that this protein and its epitopes, could be useful antigens for vaccines or diagnostics.

### EXAMPLE 2290

[12469] A DNA sequence (GBSx2424) was identified in S. agalactiae <SEQ ID 7061> which encodes the amino acid sequence <SEQ ID 7062>. Analysis of this protein sequence reveals the following:

```
Possible site: 14
>>> Seems to have no N-terminal signal sequence
----- Final Results -----
                            bacterial cytoplasm --- Certainty = 0.4984(Affirmative) < succ>
                              bacterial membrane --- Certainty = 0.0000(Not Clear) < succ>
                                bacterial outside --- Certainty = 0.0000(Not Clear) < succ>
```

[12470] The protein has homology with the following sequences in the GENPEPT database.

| >GP: CAB96619 GB: AJ400630 hypothetical protein | | | |
|---|---|---|---|
| [Streptococcus pneumoniae bacteriophage MM1] | | | |
| Identities = 175/254 (68%), Positives = 219/254 (85%) | | | |
| Query: | 2 | LRRHIYSMLEEHXHLQPEIKYHQKTNLRKNRVYTVFIEEKVDVILADLKLADAFFGIETG | 61 |
| | | L RH+Y ++ EI++HQ++NLRKNRVYTVF EKV L+DL LAD+FFG+ETG | |
| Sbjct: | 50 | LARHLYESFLHFYEIKSEIRHHQRSNLRKNRVYTVFTDEKVQDLLSDLHLADSFFGLETG | 109 |
| Query: | 62 | IEHSILDNDENGRAYLRGAFLSTGTVREPDSGKYQLEIFSVYLDHAQDLANLMKKFMLDA | 121 |
| | | I+ +IL ++E GRAYL GAFL+ G++R+P+SGKYQLEI SVYLDHAQ +A+L+++F+LDA | |
| Sbjct: | 110 | IDEAILSDEEAGRAYLCGAFLANGSIRDPESGKYQLEISSVYLDHAQGIASLLQQFLLDA | 169 |
| Query: | 122 | KVIEHKHGAVTYLQKAEDIMDFLIVIDAMEARDAFEEIKMIRETRNDINRANNVETANIA | 181 |
| | | KV+E K GAVTYLQ+AEDIMDFLIVI AM+ARD FE +K++RETRND+NRANN ETANIA | |
| Sbjct: | 170 | KVLERKKGAVTYLQRAEDIMDFLIVIGAMQARDDFERVKILRETRNDLNRANNAETANIA | 229 |
| Query: | 182 | RTITASMKTINNIIKIMDTIGFDALPSDLRQVAQVRVAHPDYSIQQIADSLETPLSKSGV | 241 |
| | | RT++ASMKTINNI KI D +G + LP DL++VAQ R+ HPDYSIQQ+ADSL TPL+KSGV | |
| Sbjct: | 230 | RTVSASMKTINNISKIKDIMGLENLPVDLQEVAQLRIQHPDYSIQQLADSLSTPLTKSGV | 289 |
| Query: | 242 | NHRLRKINKIADEL | 255 |
| | | NHRLRKINKIADEL | |
| Sbjct: | 290 | NHRLRKINKIADEL | 303 |

[12471] There is also homology to SEQ ID 5540:

| Identities = 186/254 (73%), Positives = 227/254 (89%) | | | |
|---|---|---|---|
| Query: | 2 | LRRHIYSMLEEHXHLQPEIKYHQKTNLRKNRVYTVFIEEKVDVILADLKLADAFFGIETG | 61 |
| | | + R+IYS++E+ + PEI+YHQKTNLRKNRVYTV++E+ V+ ILADLKLAD+FFG+ETG | |
| Sbjct: | 50 | IARYIYSLIEDAYVIVPEIRYHQKTNLRKNRVYTVYVEQGVETILADLKLADSFFGLETG | 109 |
| Query: | 62 | IEHSILDNDENGRAYLRGAFLSTGTVREPDSGKYQLEIFSVYLDHAQDLANLMKKFMLDA | 121 |
| | | IE +L +D GR+YL+GAFL+ G++R+P+SGKYQLEI+SVYLDHAQDLA LM+KFMLDA | |
| Sbjct: | 110 | IEPQVLSDDNAGRSYLKGAFLAAGSIRDPESGKYQLEIYSVYLDHAQDLAQLMQKFMLDA | 169 |
| Query: | 122 | KVIEHKHGAVTYLQKAEDIMDFLIVIDAMEARDAFEEIKMIRETRNDINRANNVETANIA | 181 |
| | | K IEHK GAVTYLQKAEDIMDFLI+I AM ++ FE IK++RE RNDINRANN ETANIA | |
| Sbjct: | 170 | KTIEHKSGAVTYLQKAEDIMDFLIIIGAMSCKEDFEAIKLLREARNDINRANNAETANIA | 229 |
| Query: | 182 | RTITASMKTINNIIKIMDTIGFDALPSDLRQVAQVRVAHPDYSIQQIADSLETPLSKSGV | 241 |
| | | +TI+ASMKTINNIIKIMDTIG ++LP +L+QVAQ+RV HPDYSIQQ+AD+LE P++KSGV | |
| Sbjct: | 230 | KTISASMKTINNIIKIMDTIGLESLPIELQQVAQLRVKHPDYSIQQVADALEFPITKSGV | 289 |
| Query: | 242 | NHRLRKINKIADEL | 255 |
| | | NHRLRKINKIAD+L | |
| Sbjct: | 290 | NHRLRKINKIADDL | 303 |

[12472] Based on this analysis, it was predicted that these proteins and their epitopes could be useful antigens for vaccines or diagnostics.

### EXAMPLE 2291

[12473] A DNA sequence (GBSx2425) was identified in S. agalactiae <SEQ ID 7063> which encodes the amino acid sequence <SEQ ID 7064>. Analysis of this protein sequence reveals the following:

```
Possible site: 14
>>> Seems to have no N-terminal signal sequence
----- Final Results -----
                            bacterial cytoplasm --- Certainty = 0.0297(Affirmative) < succ>
                              bacterial membrane --- Certainty = 0.0000(Not Clear) < succ>
                                bacterial outside --- Certainty = 0.0000(Not Clear) < succ>
```

[12474] The protein has no significant homology with any sequences in the GENPEPT database.

[12475] No corresponding DNA sequence was identified in S. pyogenes.

[12476] Based on this analysis, it was predicted that this protein and its epitopes, could be useful antigens for vaccines or diagnostics.

### EXAMPLE 2292

[12477] A DNA sequence (GBSx2428) was identified in S. agalactiae <SEQ ID 7065> which encodes the amino acid sequence <SEQ ID 7066>. Analysis of this protein sequence reveals the following:

```
Possible site: 31
>>> Seems to have no N-terminal signal sequence
----- Final Results -----
                            bacterial cytoplasm --- Certainty = 0.2706(Affirmative) < succ>
                              bacterial membrane --- Certainty = 0.0000(Not Clear) < succ>
                                bacterial outside --- Certainty = 0.0000(Not Clear) < succ>
```

[12478] The protein has homology with the following sequences in the GENPEPT database.

| >GP: CAB54571 GB: AJ006393 response regulator [Streptococcus pneumoniae] | | | |
|---|---|---|---|
| Identities = 139/190 (73%), Positives = 166/190 (87%) | | | |
| Query: | 8 | IKIVLVDDHEMVRLGLKSFLNLQADVEVIGEASNGLEGIKKALELRPDVVVMDLVMPEMD | 67 |
| | | +KI+LVDDHEMVRLGLKS+ +LQ DVEV+GEASNG +GI ALELRPDV+VMD+VMPEM+ | |
| Sbjct: | 1 | MKILLVDDHEMVRLGLKSYFDLQDDVEVVGEASNGSQGIDLALELRPDVIVMDIVMPEMN | 60 |
| Query: | 68 | GVEATLALLKDWPEAAILVLTSYLDNEKIYPVIEAGAKGYMLKTSSAAEILNAIRKVSRG | 127 |
| | | G++ATLA+LK+WPEA IL++TSYLDNEKI PV++AGAKGYMLKTSSA E+L+A+ KV+ G | |
| Sbjct: | 61 | GIDATLAILKEWPEAKILIVTSYLDNEKIMPVLDAGAKGYMLKTSSADELLHAVSKVAAG | 120 |
| Query: | 128 | EQAIENEVDKKIKAHDKCPALHEGLTARERDILNLLAKGYDNQRIADELFISLKTVKTHV | 187 |
| | | E AIE EV KK++ H LHE LTARERD+L L+AKGY+NQRIAD+LFISLKTVKTHV | |
| Sbjct: | 121 | ELAIEQEVSKKVEYHRNHMELHEELTARERDVLQLIAKGYENQRIADDLFISLKTVKTHV | 180 |
| Query: | 188 | SNILGKLNGS | 197 |
| | | SNIL KL S | |
| Sbjct: | 181 | SNILAKLEVS | 190 |

[12479] There is also high homology to SEQ ID 2996:

| Identities = 158/198 (79%), Positives = 176/198 (88%), Gaps = 1/198 (0%) | | | |
|---|---|---|---|
| Query: | 5 | MDKIKIVLVDDHEMVRLGLKSFLNLQADVEVIGEASNGLEGIKKALELRPDVVVMDLVMP | 64 |
| | | M KIK++LVDDHEMVR+GLKSFLNLQAD++V+GEASNG EG+ AL L+PDV+VMDLVMP | |
| Sbjct: | 3 | MSKIKVILVDDHEMVRMGLKSFLNLQADIDVVGEASNGREGVDLALALKPDVLVMDLVMP | 62 |
| Query: | 65 | EMDGVEATLALLKDWPEAAILVLTSYLDNEKIYPVIEAGAKGYMLKTSSAAEILNAIRKV | 124 |
| | | E+ GVEATL +LK W EA +LVLTSYLDNEKIYPVI+AGAKGYMLKTSSAAEILNAIRKV | |
| Sbjct: | 63 | ELGGVEATLEVLKKWKEAKVLVLTSYLDNEKIYPVIDAGAKGYMLKTSSAAEILNAIRKV | 122 |
| Query: | 125 | SRGEQAIENEVDKKIKAHDKCPALHEGLTARERDILNLLAKGYDNQRIADELFISLKTVK | 184 |
| | | S+GE AIE EVDKKIKAHD+ P LHE LTARE DIL+LLAKGYDNQ IADELFISLKTVK | |
| Sbjct: | 123 | SKGELAIETEVDKKIKAHDQHPDLHEELTAREYDILHLLAKGYDNQTIADELFISLKTVK | 182 |
| Query: | 185 | THVSNILGKLN-GSRSNS | 201 |
| | | THVSNIL KL G R+ + | |
| Sbjct: | 183 | THVSNILAKLEVGDRTQA | 200 |

[12480] Based on this analysis, it was predicted that these proteins and their epitopes could be useful antigens for vaccines or diagnostics.

### EXAMPLE 2293

[12481] A DNA sequence (GBSx2429) was identified in S. agalactiae <SEQ ID 7067> which encodes the amino acid sequence <SEQ ID 7068>. This protein is predicted to be histidine kinase (narQ). Analysis of this protein sequence reveals the following:

```
Possible site: 56
>>> Seems to have no N-terminal signal sequence
----- Final Results -----
                            bacterial cytoplasm --- Certainty = 0.3944(Affirmative) < succ>
                              bacterial membrane --- Certainty = 0.0000(Not Clear) < succ>
                                bacterial outside --- Certainty = 0.0000(Not Clear) < succ>
```

[12482] The protein has homology with the following sequences in the GENPEPT database.

| >GP: CAB54570 GB: AJ006393 histidine kinase [Streptococcus pneumoniae] | | | |
|---|---|---|---|
| Identities = 32/55 (58%), Positives = 49/55 (88%) | | | |
| Query: | 1 | MIDNGIGFDMDSVYDLSYGLKNIEDRVEDLAGNLQLLSQPGKGVAMDIRLPLVNQ | 55 |
| | | ++DNGIGF + S+ DLSYGL+NI++RVED+AG +QLL+ P +G+A+DIR+PL+++ | |
| Sbjct: | 276 | VVDNGIGFQLGSLDDLSYGLRNIKERVEDMAGTVQLLTAPKQGLAVDIRIPLLDK | 330 |

[12483] There is also homology to SEQ ID 2992:

| Identities = 44/59 (74%), Positives = 51/59 (85%) | | | |
|---|---|---|---|
| Query: | 1 | MIDNGIGFDMDSVYDLSYGLKNIEDRVEDLAGNLQLLSQPGKGVAMDIRLPLVNQSEDK | 59 |
| | | MID+G+GFDMD V DLSYGLKNIEDRV DLAGNL L+SQ GKGV+MDIRLP+V +D+ | |
| Sbjct: | 276 | MIDDGVGFDMDQVRDLSYGLKNIEDRVNDLAGNLHLISQKGKGVSMDIRLPIVKGDDDE | 334 |

[12484] Based on this analysis, it was predicted that these proteins and their epitopes could be useful antigens for vaccines or diagnostics.

### EXAMPLE 2294

[12485] A DNA sequence (GBSx2430) was identified in S. agalactiae <SEQ ID 7069> which encodes the amino acid sequence <SEQ ID 7070>. This protein is predicted to be RfbQRSO155-1. Analysis of this protein sequence reveals the following:

```
Possible site: 41
>>> Seems to have no N-terminal signal sequence
----- Final Results -----
                            bacterial cytoplasm --- Certainty = 0.1120(Affirmative) < succ>
                              bacterial membrane --- Certainty = 0.0000(Not Clear) < succ>
                                bacterial outside --- Certainty = 0.0000(Not Clear) < succ>
```

[12486] There is also homology to SEQ ID 7072:

| Identities = 171/172 (99%), Positives = 172/172 (99%) | | | |
|---|---|---|---|
| Query: | 1 | MGQVAVEEKSNEIVAIPQLLRTIDIRKSIVTIDAMGTQTAIVDTIIKGKADYCLAVKGNQ | 60 |
| | | +GQVAVEEKSNEIVAIPQLLRTIDIRKSIVTIDAMGTQTAIVDTIIKGKADYCLAVKGNQ | |
| Sbjct: | 143 | LGQVAVEEKSNEIVAIPQLLRTIDIRKSIVTIDAMGTQTAIVDTIIKGKADYCLAVKGNQ | 202 |
| Query: | 61 | ETLYDDIALYFSDVNLLEELQENAQYYQTVEKSRGQIEVREYWVSSDIKWLCQNHPKWHK | 120 |
| | | ETLYDDIALYFSDVNLLEELQENAQYYQTVEKSRGQIEVREYWVSSDIKWLCQNHPKWHK | |
| Sbjct: | 203 | ETLYDDIALYFSDVNLLEELQENAQYYQTVEKSRGQIEVREYWVSSDIKWLCQNHPKWHK | 262 |
| Query: | 121 | LRGIGMTRNTIDKDGQLSQENRYFIFSFKPDVLTFANCVRGHWQIESMHWLL | 172 |
| | | LRGIGMTRNTIDKDGQLSQENRYFIFSFKPDVLTFANCVRGHWQIESMHWLL | |
| Sbjct: | 263 | LRGIGMTRNTIDKDGQLSQENRYFIFSFKPDVLTFANCVRGHWQIESMHWLL | 314 |

[12487] Based on this analysis, it was predicted that these proteins and their epitopes could be useful antigens for vaccines or diagnostics.

### EXAMPLE 2295

[12488] A DNA sequence (GBSx2431) was identified in S. agalactiae <SEQ ID 7073> which encodes the amino acid sequence <SEQ ID 7074>. This protein is predicted to be translation initiation factor if-3 homolog dsg (infC). Analysis of this protein sequence reveals the following:

```
Possible site: 42
>>> Seems to have no N-terminal signal sequence
----- Final Results -----
                            bacterial cytoplasm --- Certainty = 0.1787(Affirmative) < succ>
                              bacterial membrane --- Certainty = 0.0000(Not Clear) < succ>
                                bacterial outside --- Certainty = 0.0000(Not Clear) < succ>
```

[12489] The protein has homology with the following sequences in the GENPEPT database.

| >GP: CAA68920 GB: Y07640 translation initiation factor, IF3 | | | |
|---|---|---|---|
| [Listeria monocytogenes] | | | |
| Identities = 112/169 (66%), Positives = 134/169 (79%) | | | |
| Query: | 7 | KDLFINDEIRVREVRLVGLEGEQLGIKPLSEAQAIADDANVDLVLIQPQATPPVAKIMDY | 66 |
| | | KD+ +ND IR REVRL+ +GEQLG+K +A IA+ AN+DLVL+ P A PPVA+IMDY | |
| Sbjct: | 3 | KDMLVNDGIRAREVRLIDQDGEQLGVKSKIDALQIAEKANLDLVLVAPTAKPPVARIMDY | 62 |
| Query: | 67 | GKFKFEYQKKQKEQRKKQSVVTVKEVRLSPVIDKGDFETKLRNGRKFLEKGNKVKVSIRF | 126 |
| | | GKF+FE QKK KE RK Q V+ +KEVRLSP ID+ DF+TKLRN RKFLEKG+KVK SIRF | |
| Sbjct: | 63 | GKFRFEQQKKDKEARKNQKVIVMKEVRLSPTIDEHDFDTKLRNARKFLEKGDKVKCSIRF | 122 |
| Query: | 127 | KGRMITHKEIGAKVLAEFAEATQDIAIIEQRAKMDGRQMFMQLAPIPDK | 175 |
| | | KGR ITHKEIG KVL FA+A +D+ IEQR KMDGR MF+ LAP+ +K | |
| Sbjct: | 123 | KGRAITHKEIGQKVLDRFAKACEDLCTIEQRPKMDGRSMFLVLAPLHEK | 171 |

[12490] A related DNA sequence was identified in S. pyogenes <SEQ ID 7075> which encodes the amino acid sequence <SEQ ID 7076>. Analysis of this protein sequence reveals the following:

```
Possible site: 42
>>> Seems to have no N-terminal signal sequence
----- Final Results -----
                            bacterial cytoplasm --- Certainty = 0.2247(Affirmative) < succ>
                              bacterial membrane --- Certainty = 0.0000(Not Clear) < succ>
                                bacterial outside --- Certainty = 0.0000(Not Clear) < succ>
```

[12491] An alignment of the GAS and GBS proteins is shown below.

| Identities = 167/176 (94%), Positives = 173/176 (97%) | | | |
|---|---|---|---|
| Query: | 1 | MKIIAKKDLFINDEIRVREVRLVGLEGEQLGIKPLSEAQAIADDANVDLVLIQPQATPPV | 60 |
| | | +KIIAKKDLFINDEIRVREVRLVGLEGEQLGIKPLSEAQ++AD +NVDLVLIQPQA PPV | |
| Sbjct: | 1 | VKIIAKKDLFINDEIRVREVRLVGLEGEQLGIKPLSEAQSLADASNVDLVLIQPQAVPPV | 60 |
| Query: | 61 | AKIMDYGKFKFEYQKKQKEQRKKQSVVTVKEVRLSPVIDKGDFETKLRNGRKFLEKGNKV | 120 |
| | | AK+MDYGKFKFEYQKKQKEQRKKQSVVTVKEVRLSPVIDKGDFETKLRNGRKFLEKGNKV | |
| Sbjct: | 61 | AKLMDYGKFKFEYQKKQKEQRKKQSVVTVKEVRLSPVIDKGDFETKLRNGRKFLEKGNKV | 120 |
| Query: | 121 | KVSIRFKGRMITHKEIGAKVLAEFAEATQDIAIIEQRAKMDGRQMFMQLAPIPDKK | 176 |
| | | KVSIRFKGRMITHKEIGAKVLA+FAEATQDIAIIEQRAKNDGRQMFMQLAPI DKK | |
| Sbjct: | 121 | KVSIRFKGRMITHKEIGAKVLADFAEATQDIAIIEQRAKMDGRQMFMQLAPISDKK | 176 |

[12492] Based on this analysis, it was predicted that these proteins and their epitopes could be useful antigens for vaccines or diagnostics.

### EXAMPLE 2296

[12493] A DNA sequence (GBSx2432) was identified in S. agalactiae <SEQ ID 7077> which encodes the amino acid sequence <SEQ ID 7078>. Analysis of this protein sequence reveals the following:

```
Possible site: 57
>>> Seems to have no N-terminal signal sequence
----- Final Results -----
                            bacterial cytoplasm --- Certainty = 0.1807(Affirmative) < succ>
                              bacterial membrane --- Certainty = 0.0000(Not Clear) < succ>
                                bacterial outside --- Certainty = 0.0000(Not Clear) < succ>
```

[12494] The protein has homology with the following sequences in the GENPEPT database.

| >GP: AAC45308 GB: U81957 RNA polymerase beta′ subunit [Streptococcus gordonii] | | | |
|---|---|---|---|
| Identities = 262/286 (91%), Positives = 276/286 (95%) | | | |
| Query: | 1 | MAAKVVKAGVEEVXIRSVFTCNTRHGVCRHCYGINLATGDAVEVGEAVGTIAAQSIGEPG | 60 |
| | | MA +VV AGV EV IRSV TCNTRHGVCRHCYGINLATGDAVEVGEAVGTIAAQSIGEPG | |
| Sbjct: | 122 | MARQVVNAGVTEVTIRSVLTCNTRHGVCRHCYGINLATGDAVEVGEAVGTIAAQSIGEPG | 181 |
| Query: | 61 | TQLTMRTFHTGGVASNTDITQGLPRIQEIFEARNPKGEAVITEVKGEVVAIEEDSSTRTK | 120 |
| | | TQLTMRTFHTGGVAS++DITQGLFR+QEIFEARNPKGEAVITEVKGEV AIEED+STRTK | |
| Sbjct: | 182 | TQLTMRTFHTGGVASSSDITQGLPRVQEIFEARNPKGEAVITEVKGEVTAIEEDASTRTK | 241 |
| Query: | 121 | KVFVKGQTGEGEYVVPFTARMKVEVGDEVARGAALTEGSIQPKRLLEVRDTLSVETYLLA | 180 |
| | | KVFVKGQTGEGEYVVPFTARMKVEVGD+V+RGAALTEGSIQPK LL VRD LSVETYLLA | |
| Sbjct: | 242 | KVFVKGQTGEGEYVVPFTARMKVEVGDQVSRGAALTEGSIQPKHLLAVRDVLSVETYLLA | 301 |
| Query: | 181 | EVQKVYRSQGVEIGDKHVEVMVRQMLRKVRVMDPGDTDLLPGTLMDISDFTDANKDIVIS | 240 |
| | | EVQKVYRSQGVEIGDKH+EVMVRQM+RKVRVMDPGDTDLL GTLMDI+DFTDAN+D+VIS | |
| Sbjct: | 302 | EVQKVYRSQGVEIGDKHIEVMVRQMIRKVRVMDPGDTDLLMGTLMDITDFTDANRDVVIS | 361 |
| Query: | 241 | GGIPATSRPVLMGITKASLETNSFLSAASFQETTRVLTDAAIRGKK | 286 |
| | | GG+PAT+RPVLMGITKASLETNSFLSAASFQETTRVLTDAAIRGKK | |
| Sbjct: | 362 | GGVPATARPVLMGITKASLETNSFLSAASFQETTRVLTDAAIRGKK | 407 |

[12495] There is also homology to SEQ ID 384.

[12496] Based on this analysis, it was predicted that this protein and its epitopes, could be useful antigens for vaccines or diagnostics.

### EXAMPLE 2297

[12497] A DNA sequence (GBSx2434) was identified in S. agalactiae <SEQ ID 7079> which encodes the amino acid sequence <SEQ ID 7080>. Analysis of this protein sequence reveals the following:

```
Possible site: 24
>>> Seems to have no N-terminal signal sequence
----- Final Results -----
                            bacterial cytoplasm --- Certainty = 0.0352(Affirmative) < succ>
                              bacterial membrane --- Certainty = 0.0000(Not Clear) < succ>
                                bacterial outside --- Certainty = 0.0000(Not Clear) < succ>
```

[12498] The protein has no significant homology with any sequences in the GENPEPT database.

[12499] No corresponding DNA sequence was identified in S. pyogenes.

[12500] Based on this analysis, it was predicted that this protein and its epitopes, could be useful antigens for vaccines or diagnostics.

### EXAMPLE 2298

[12501] A DNA sequence (GBSx2435) was identified in S. agalactiae <SEQ ID 7081> which encodes the amino acid sequence <SEQ ID 7082>. This protein is predicted to be acetoin dehydrogenase (TPP-dependent) beta chain (pdhB). Analysis of this protein sequence reveals the following:

```
Possible site: 47
>>> Seems to have no N-terminal signal sequence
----- Final Results -----
                            bacterial cytoplasm --- Certainty = 0.0266(Affirmative) < succ>
                              bacterial membrane --- Certainty = 0.0000(Not Clear) < succ>
                                bacterial outside --- Certainty = 0.0000(Not Clear) < succ>
```

[12502] The protein has homology with the following sequences in the GENPEPT database.

| >GP: BAB04496 GB: AP001509 acetoin dehydrogenase (TPP-dependent) beta | | | |
|---|---|---|---|
| chain [Bacillus halodurans] | | | |
| Identities = 37/57 (64%), Positives = 50/57 (86%) | | | |
| Query: | 1 | MLEEFGAKRVRDTPISEAAIAGSAIGAAQTGLRPIVDLTFMDFVTIAMDAIVDDCIR | 57 |
| | | M+EEFG++RVR+TPISEAAI+G+AIGAA TG+RPI++L F DF+TIAMD +V+ + | |
| Sbjct: | 44 | MIEEFGSERVRNTPISEAAISGTAIGAALTGMRPILELQFSDFITIAMDNMVNQAAK | 100 |

[12503] There is also homology to SEQ ID 4272.

[12504] Based on this analysis, it was predicted that this protein and its epitopes, could be useful antigens for vaccines or diagnostics.

### EXAMPLE 2299

[12505] A DNA sequence (GBSx2436) was identified in S. agalactiae <SEQ ID 7083> which encodes the amino acid sequence <SEQ ID 7084>. This protein is predicted to be Structural protein. Analysis of this protein sequence reveals the following:

```
Possible site: 30
>>> Seems to have no N-terminal signal sequence
----- Final Results -----
                            bacterial cytoplasm --- Certainty = 0.3015(Affirmative) < succ>
                              bacterial membrane --- Certainty = 0.0000(Not Clear) < succ>
                                bacterial outside --- Certainty = 0.0000(Not Clear) < succ>
```

[12506] The protein has homology with the following sequences in the GENPEPT database.

| >GP: AAB18706 GB: U38906 Structural protein [Bacteriophage rlt] | | | |
|---|---|---|---|
| Identities = 57/127 (44%), Positives = 83/127 (64%) | | | |
| Query: | 5 | IKAGTLFKPELVTEIMSKVKGHSTLAKLSGQTPIPFNGVEQFVFNLDGNAQIVGEGEQKL | 64 |
| | | + GTLF P LVT+++SKV G S++A+LS Q PIPFNG + F F +D +V E +K | |
| Sbjct: | 3 | LNKGTLFDPTLVTDLISKVAGKSSIARLSAQKPIPFNGEKVFTFTMDSEIDVVAESGKKT | 62 |
| Query: | 65 | GNTAKVTSKIIKPLKFVYQARMTDEFKYASEEKRLNFLKHYADGFAKKMAEAFDIAAIHG | 124 |
| | | + + + P+K Y AR++DEF YAS+E+++N L+ + DGFAKK+A D+ A HG | |
| Sbjct: | 63 | HGGVTLAPQTMVPIKVEYGARISDEFMYASDEEKINILQEFNDGFAKKVARGIDLMAFHG | 122 |
| Query: | 125 | LEPRTMT | 131 |
| | | + PR T | |
| Sbjct: | 123 | VNPRLGT | 129 |

[12507] Based on this analysis, it was predicted that this protein and its epitopes, could be useful antigens for vaccines or diagnostics.

### EXAMPLE 2300

[12508] A DNA sequence (GBSx2439) was identified in S. agalactiae <SEQ ID 7085> which encodes the amino acid sequence <SEQ ID 7086>. This protein is predicted to be surface protein Rib. Analysis of this protein sequence reveals the following:

```
Possible site: 24
>>> Seems to have no N-terminal signal sequence
----- Final Results -----
                            bacterial cytoplasm --- Certainty = 0.1892(Affirmative) < succ>
                              bacterial membrane --- Certainty = 0.0000(Not Clear) < succ>
                                bacterial outside --- Certainty = 0.0000(Not Clear) < succ>
```

[12509] No corresponding DNA sequence was identified in S. pyogenes.

[12510] Based on this analysis, it was predicted that this protein and its epitopes, could be useful antigens for vaccines or diagnostics.

### EXAMPLE 2301

[12511] A DNA sequence (GBSx2440) was identified in S. agalactiae <SEQ ID 7087> which encodes the amino acid sequence <SEQ ID 7088>. Analysis of this protein sequence reveals the following:

```
Possible site: 39
>>> Seems to have no N-terminal signal sequence
----- Final Results -----
                            bacterial cytoplasm --- Certainty = 0.2227(Affirmative) < succ>
                              bacterial membrane --- Certainty = 0.0000(Not Clear) < succ>
                                bacterial outside --- Certainty = 0.0000(Not Clear) < succ>
```

[12512] Based on this analysis, it was predicted that this protein and its epitopes, could be useful antigens for vaccines or diagnostics.

### EXAMPLE 2302

[12513] A DNA sequence (GBSx2441) was identified in S. agalactiae <SEQ ID 7089> which encodes the amino acid sequence <SEQ ID 7090>. This protein is predicted to be integrase. Analysis of this protein sequence reveals the following:

```
Possible site: 37
>>> Seems to have no N-terminal signal sequence
----- Final Results -----
                            bacterial cytoplasm --- Certainty = 0.2948(Affirmative) < succ>
                              bacterial membrane --- Certainty = 0.0000(Not Clear) < succ>
                                bacterial outside --- Certainty = 0.0000(Not Clear) < succ>
```

[12514] A related GBS nucleic acid sequence <SEQ ID 9319> which encodes amino acid sequence <SEQ ID 9320> was also identified.

[12515] The protein has homology with the following sequences in the GENPEPT database.

| >GP: CAB96616 GB: AJ400629 integrase [Streptococcus pneumoniae | | | |
|---|---|---|---|
| bacteriophage MM1] | | | |
| Identities = 84/238 (35%), Positives = 137/238 (57%), | | | |
| Gaps = 8/238 (3%) | | | |
| Query: | 1 | MTLDKNSSQAQKKAGLILQEKIEDRLAIRNHSEMTYGELKKEYLKQWIPTVKDSTKRGYL | 60 |
| | | +T++K + QA+ +A ++LQEKI +L+ + +T+ E+ + K W TVK+STK | |
| Sbjct: | 30 | VTMEKKTPQARNQAAILLQEKINKKLSTKQVESITFEEIYNLFYKSWAQTVKESTKHNCK | 89 |
| Query: | 61 | VSDSHIATVLPDDTIINKLTKRDIRLIIDKLLKHNSYHVTHKCRKRLHAIFSYAIQMDYM | 120 |
| | | D + V+P DTI+ L +R ++ I+K+++ N Y K R RL IF+YA+Q Y+ | |
| Sbjct: | 90 | SVDKKMKEVIPSDTILANLDRRFLQEAIEKIIESNGYITAKKVRHRLRGIFNYAVQYSYI | 149 |
| Query: | 121 | TSNPTENVLVP-KPK--DDYKPEKVLYLTSNEV---YDLCNRMIDNDEQTLADIVLFMFL | 174 |
| | | +N + +P KPK ++ + ++ +LT E+ D+ NR Q AD+VL + L | |
| Sbjct: | 150 | ENNEVDYTTIPQKPKTLEELEKKRNNFLTMQEIKALVDVLNRR--EYHQKYADMVLVLTL | 207 |
| Query: | 175 | TGVRYGELSCLTYDKIDFENKEILINATYDFNTRXITTTKTKKSTRKISVSDNILDIV | 232 |
| | | TG+RYGEL+ L IDFEN +I I +D + T KT S R I VS+++++ + | |
| Sbjct: | 208 | TGMRYGELTALQLKNIDFENNKIEITGNFDSVNKIKTLPKTTNSIRTIKVSESVIEAI | 265 |

[12516] There is also homology to SEQ ID 578.

[12517] Based on this analysis, it was predicted that this protein and its epitopes, could be useful antigens for vaccines or diagnostics.

### EXAMPLE 2303

[12518] A DNA sequence (GBSx2444) was identified in S. agalactiae <SEQ ID 7091> which encodes the amino acid sequence <SEQ ID 7092>. Analysis of this protein sequence reveals the following:

```
Possible site: 50
>>> Seems to have no N-terminal signal sequence
----- Final Results -----
                            bacterial cytoplasm --- Certainty = 0.2518(Aftirmative) < succ>
                              bacterial membrane --- Certainty = 0.0000 (Not Clear) < succ>
                                bacterial outside --- Certainty = 0.0000 (Not Clear) < succ>
```

[12519] The protein has no significant homology with any sequences in the GENPEPT database.

[12520] There is also homology to SEQ ID 4212:

| Identities = 92/144 (63%), Positives = 118/144 (81%), Gaps = 1/144 (0%) | | | |
|---|---|---|---|
| Query: | 1 | MPKYSLFELENGRRRLLASAGELQKGNELALPTQFMKFLYLASRYNESKGKPEEIEKKQE | 60 |
| | | +PKYSLFELENGR+R+LASAGELQKGNELALP++++ FLYLAS Y + KG PE+ E+KQ | |
| Sbjct: | 1198 | LPKYSLFELENGRKRMLASAGELQKGNELALPSKYVNFLYLASHYEKLKGSPEDNEQKQL | 1257 |
| Query: | 61 | FVNQHVSYFDDILQLINDFSKRVILADANLEKINKLYQDNKENISVDELANNIINLFTFT | 120 |
| | | FV QH Y D+I++ I++FSKRVILADANL+K+ Y +++ + E A NII+LFT T | |
| Sbjct: | 1258 | FVEQHKHYLDEIIEQISEFSKRVILADANLDKVLSAYNKHRDK-PIREQAENIIHLFTLT | 1316 |
| Query: | 121 | SLGAPAAFKFFDKIVDRKRYTSTQ | 144 |
| | | +LGAPAAFK+FD +DRKRYTST+ | |
| Sbjct: | 1317 | NLGAPAAFKYFDTTIDRKRYTSTK | 1340 |

[12521] Based on this analysis, it was predicted that this protein and its epitopes, could be useful antigens for vaccines or diagnostics.

### EXAMPLE 2304

[12522] A DNA sequence (GBSx2445) was identified in S. agalactiae <SEQ ID 7093> which encodes the amino acid sequence <SEQ ID 7094>. This protein is predicted to be 0. Analysis of this protein sequence reveals the following:

| Possible site: 48 | | | | |
|---|---|---|---|---|
| >>> Seems to have no N-terminal signal sequence | | | | |
| | INTEGRAL | Likelihood = −4.57 | Transmembrane | 239-255 (236-256) |

```
----- Final Results -----
                              bacterial membrane --- Certainty = 0.2826(Affirmative) < succ>
                                bacterial outside --- Certainty = 0.0000(Not Clear) < succ>
                            bacterial cytoplasm --- Certainty = 0.0000(Not Clear) < succ>
```

[12523] The protein has homology with the following sequences in the GENPEPT database.

| >GP: CAB15253 GB: Z99120 similar to opine catabolism [Bacillus subtilis] | | | |
|---|---|---|---|
| Identities = 88/257 (34%), Positives = 129/257 (49%), Gaps = 11/257 (4%) | | | |
| Query: | 1 | MARLGADFYSKLVTDLQKDGFETKFYQQTGVFLLKKDESQLESLFALADKRRLESPLIGD | 60 |
| | | +A+ GA +Y L+ L+KDG Y++ G + D S+L+ + A KRR ++P IGD | |
| Sbjct: | 61 | LAKGGARYYKDLIHQLEKDGESDTGYKRVGAISIHTDASKLDKMEERAYKRREDAPEIGD | 120 |
| Query: | 61 | LQILNKSEANTHFPEL-DGYEQLLYASGGARVEGADLTRILLEAS---GVNVIKDEVHF- | 115 |
| | | + L+ SE FP L DGYE ++ SG ARV G L R LL A+ G VIK | |
| Sbjct: | 121 | ITRLSASETKKLFPILADGYES-VHISGAARVNGRALCRSLLSAAEKRGATVIKGNASLL | 179 |
| Query: | 116 | ----TITDNGFRVQGIDFDKLVLASGAWLAKILDEHNYQVDVRPQKGQLRDYYFSNINTG | 171 |
| | | T+T + D +++ +GAW +IL V QK Q+ + ++ +TG | |
| Sbjct: | 180 | FENGTVTGVQTDTKQFAADAVIVTAGAWANEILKPLGIHFQVSFQKAQIMHFEMTDADTG | 239 |
| Query: | 172 | KYPVVMPEGELDIIPFDNGKVSVGASHENDMAF-DLNIDFKVLDKFEEQAIGYFPQLKKQ | 230 |
| | | +PVVMP + I+ FDNG++ GA+HEND DL + + +A+ P L | |
| Sbjct: | 240 | SWPVVMPPSDQYILSFDNGRIVAGATHENDAGLDDLRVTAGGQHEVLSKALAVAPGLADA | 299 |
| Query: | 231 | IRLLKRVEFVPIQVIFL | 247 |
| | | + RV F P FL | |
| Sbjct: | 300 | AAVETRVGFRPFTPGFL | 316 |

[12524] There is also homology to SEQ ID 2656.

[12525] Based on this analysis, it was predicted that this protein and its epitopes, could be useful antigens for vaccines or diagnostics.

### EXAMPLE 2305

[12526] A DNA sequence (GBSx2446) was identified in S. agalactiae <SEQ ID 7095> which encodes the amino acid sequence <SEQ ID 7096>. Analysis of this protein sequence reveals the following:

```
Possible site: 60
>>> Seems to have no N-terminal signal sequence
----- Final Results -----
                            bacterial cytoplasm --- Certainty = 0.2572(Affirmative) < succ>
                              bacterial membrane --- Certainty = 0.0000(Not Clear) < succ>
                                bacterial outside --- Certainty = 0.0000(Not Clear) < succ>
```

[12527] A related GBS nucleic acid sequence <SEQ ID 9315> which encodes amino acid sequence <SEQ ID 9316> was also identified.

[12528] The protein has homology with the following sequences in the GENPEPT database.

| >GP: AAC00337 GB: AF008220 YtqI [Bacillus subtilis] | | | |
|---|---|---|---|
| Identities = 119/256 (46%), Positives = 174/256 (67%), Gaps = 3/256 (1%) | | | |
| Query: | 6 | QILDKIKEYDTIIIHRHMRPDPDALGSQIGLRDIIRHNFPKKKVLATGFDEPTLAWIAKM | 65 |
| | | +++ I YDTII+HRH+RPDPDA GSQ GL +I+R +P+K + A G EP+L+++ + | |
| Sbjct: | 4 | ELIRTISLYDTIILHRHVRPDPDAYGSQCGLTEILRETYPEKNIFAVGTPEPSLSFLYSL | 63 |
| Query: | 66 | DQVTDQDYQGALVVVTDTANTPRIDDERYKKGDFLIKIDHHPNDEVYGDLSYVDTNASSA | 125 |
| | | D+V ++ Y+GALV+V DTAN RIDD+RY G L+KIDHHPN++ YGDL +VDT+ASS | |
| Sbjct: | 64 | DEVDNETYEGALVIVCDTANQERIDDQRYPSGAKLMKIDHHPNEDPYGDLLWVDTSASSV | 123 |
| Query: | 126 | SEIVTDFAL---SCDLLLSTSAARVLYNGIVGDTGRFLYPATTSKTLKIASKLREFDFDF | 182 |
| | | SE++ + L L+T AA ++Y GIVGDTGRFL+P TT KTLK A +L ++ F | |
| Sbjct: | 124 | SEMIYELYLEGKEHGWKLNTKAAELIYAGIVGDTGRFLFPNTTEKTLKYAGELIQYPFSS | 183 |
| Query: | 183 | SAMARQMDSFPFKIAKLQGFIFEQLKIDKNGAACVTLTQEDLKRFDVTDAETAAIVGVPG | 242 |
| | | S + Q+ + KL GFIF+ + + +NGAA V + ++ L++F T +E + +VG G | |
| Sbjct: | 184 | SELFNQLYETKLNVVKLNGFIFQNVSLSENGAASVFIKKDTLEKFGTTASEASQLVGTLG | 243 |
| Query: | 243 | KIDIVESWAIFVKQSD | 258 |
| | | I + +W FV++ D | |
| Sbjct: | 244 | NISGIRAWVFFVEEDD | 259 |

[12529] A related DNA sequence was identified in S. pyogenes <SEQ ID 7097> which encodes the amino acid sequence <SEQ ID 7098>. Analysis of this protein sequence reveals the following:

```
Possible site: 61
>>> Seems to have no N-terminal signal sequence
----- Final Results -----
                            bacterial cytoplasm --- Certainty = 0.2584(Affirmative) < succ>
                              bacterial membrane --- Certainty = 0.0000(Not Clear) < succ>
                                bacterial outside --- Certainty = 0.0000(Not Clear) < succ>
```

[12530] An alignment of the GAS and GBS proteins is shown below.

| Identities = 180/256 (70%), Positives = 215/256 (83%) | | | |
|---|---|---|---|
| Query: | 4 | FQQILDKIKEYDTIIIHRHMRPDPDALGSQIGLRDIIRHNFPKKKVLATGFDEPTLAWIA | 63 |
| | | F+ ILDKIK + TIIIHRH PDPDALGSQ GL++II NFP KKVL TGFDEP+LAWI+ | |
| Sbjct: | 5 | FETILDKIKAHQTIIIHRHQNPDPDALGSQAGLKEIIAQNFPDKKVLMTGFDEPSLAWIS | 64 |
| Query: | 64 | KMDQVTDQDYQGALVVVTDTANTPRIDDERYKKGDFLIKIDHHPNDEVYGDLSYVDTNAS | 123 |
| | | +MDQVTD+DY+ ALV++TDTAN PRIDDERY G LIKIDHHPND+VYGD YVDT+AS | |
| Sbjct: | 65 | QMDQVTDKDYKEALVIITDTANRPRIDDERYTLGKCLIKIDHHPNDDVYGDFYYVDTSAS | 124 |
| Query: | 124 | SASEIVTDFALSCDLLLSTSAARVLYNGIVGDTGRFLYPATTSKTLKIASKLREFDFDFS | 183 |
| | | SASEI+ DFA S +L LS AA++LY GIVGDTGRFLY +TTSKTL IAS+LR F+FDF+ | |
| Sbjct: | 125 | SASEIIADFAFSQNLTLSDKAAKLLYTGIVGDTGRFLYASTTSKTLSIASQLRHFEFDFA | 184 |
| Query: | 184 | AMARQMDSFPFKIAKLQGFIFEQLKIDKNGAACVTLTQEDLKRFDVTDAETAAIVGVPGK | 243 |
| | | A++RQMDSFP KIAELQ ++FE L ID++GAA V ++QE LK FDVT AE++AIV PGK | |
| Sbjct: | 185 | AISRQMDSFPLKIAKLQSYVFEHLTIDESGAAYVLVSQETLKHFDVTLAESSAIVCAPGK | 244 |
| Query: | 244 | IDIVESWAIFVKQSDG | 259 |
| | | ID V++WAIFV+ +DG | |
| Sbjct: | 245 | IDNVQAWAIFVELTDG | 260 |

[12531] Based on this analysis, it was predicted that these proteins and their epitopes could be useful antigens for vaccines or diagnostics.

### EXAMPLE 2306

[12532] A DNA sequence (GBSx2447) was identified in S. agalactiae <SEQ ID 7099> which encodes the amino acid sequence <SEQ ID 7100>. Analysis of this protein sequence reveals the following:

```
Possible site: 26
>>> Seems to have no N-terminal signal sequence
----- Final Results -----
                            bacterial cytoplasm --- Certainty = 0.1846(Affirmative) < succ>
                              bacterial membrane --- Certainty = 0.0000(Not Clear) < succ>
                                bacterial outside --- Certainty = 0.0000(Not Clear) < succ>
```

[12533] The protein has homology with the following sequences in the GENPEPT database.

| >GP: CAB42949 GB: AL049863 putative adenosine deaminase [Streptomyces | | | |
|---|---|---|---|
| coelicolor A3(2)] | | | |
| Identities = 123/343 (35%), Positives = 175/343 (50%), | | | |
| Gaps = 26/343 (7%) | | | |
| Query: | 6 | LKELAKAELHCHLDGSLSLPAIRKLANMADIILPSSDK-ELRKYVIAPAQTESLVDYLKT | 64 |
| | | L+ L KA LH HLDG L + +LA LP++D EL + A + LV Y+ T | |
| Sbjct: | 11 | LRRLPKAVLHDHLDGGLRPATVVELARSVGHTLPTTDPDELAAWYYEAANSGDLVRYIAT | 70 |
| Query: | 65 | FEFIRPLLQTKEALRFAAYDVARQAALENVIYIEIRFAPELSMDKGLTASDTVLAVLEGL | 124 |
| | | FE ++Q +E L AA + A + V+Y E+R+APEL+ GL+ + V V EGL | |
| Sbjct: | 71 | FEHTLAVMQNREGLLRAAEEYVLDLAADGVVYGEVRYAPELNTRGGLSMREVVETVQEGL | 130 |
| Query: | 125 | ADAQKEFNIVAR-----ALVCGMRQSSHKTTKDIIKHIVDLA----PKGLVGFDFAGDEF | 175 |
| | | A + L+CGMR D ++ DLA G+VGFD AG E | |
| Sbjct: | 131 | ATGMAKAAAAGTPVRVGTLLCGMRMF------DRVREAADLAVAFRDAGVVGFDIAGAED | 184 |
| Query: | 176 | SYPTDSLVDLIQEVKRSGYPMTLHAGECGCAKHIADSLNL-GIKRMGHVTALT------- | 227 |
| | | +P +D + ++R P T+HAGE I +L + G +R+GH +T | |
| Sbjct: | 185 | GFPPADHLDAFEHLRRENVPFTIHAGEAHGLPSIHQALQVCGAQRIGHGVRITDDIPDLA | 244 |
| Query: | 228 | -GQRDLIKRFVEEDAVA-EMCLTSNLQTKAASSIQSFPYQELYDAGGKITINTDNRTVSD | 285 |
| | | G+ + +V + +A EMC TSNLQT AA+SI P L D G ++T+NTDNR VS | |
| Sbjct: | 245 | AGKLGRLAAWVRDRRIALEMCPTSNLQTGAATSIAEHPITALKDLGFRVTLNTDNRLVSG | 304 |
| Query: | 286 | TNLTKEYSLFVTYFGTKIEDFLVFNQNAVKASFTSDSEKDTLL | 328 |
| | | T +T+E SL V G +ED NA+K++F E+ L+ | |
| Sbjct: | 305 | TTMTREMSLLVEQAGWSVEDLRTVTVNALKSAFVPFDERTALI | 347 |

[12534] No corresponding DNA sequence was identified in S. pyogenes.

[12535] Based on this analysis, it was predicted that this protein and its epitopes, could be useful antigens for vaccines or diagnostics.

### EXAMPLE 2307

[12536] A DNA sequence (GBSx2448) was identified in S. agalactiae <SEQ ID 7101> which encodes the amino acid sequence <SEQ ID 7102>. Analysis of this protein sequence reveals the following:

```
Possible site: 18
>>> Seems to have no N-terminal signal sequence
----- Final Results -----
                            bacterial cytoplasm --- Certainty = 0.2042(Affirmative) < succ>
                              bacterial membrane --- Certainty = 0.0000(Not Clear) < succ>
                                bacterial outside --- Certainty = 0.0000(Not Clear) < succ>
```

[12537] A related GBS nucleic acid sequence <SEQ ID 9639> which encodes amino acid sequence <SEQ ID 9640> was also identified.

[12538] The protein has homology with the following sequences in the GENPEPT database.

| >GP: CAB13290 GB: Z99111 similar to | | | |
|---|---|---|---|
| sulfite reductase [Bacillus subtilis] | | | |
| Identities = 63/146 (43%), Positives = 87/146 (59%), | | | |
| Gaps = 1/146 (0%) | | | |
| Query: | 5 | MALAKIVYASMTGNTEEIADIVADKLRDLGLDVEVEECTMVDAAD-FEDADIAIVATYTY | 63 |
| | | MA +VYA+M+GNTE +AD++ L++ +V+ E +D A F D D I+ TYT+ | |
| Sbjct: | 1 | MAKILLVYATMSGNTEAMADLIEKGLQEALAEVDRFEAMDIDDAQLFTDYDHVIMGTYTW | 60 |
| Query: | 64 | GDGDLPDEIVDFYEDLAEVDLSGKVYGVVGSGDTFYDYFCKSVDEFEAQFALTGAQKGAD | 123 |
| | | GDGDLPDE +D ED+ E+D SGK V GSGDT Y++FC +VD EA+ G | |
| Sbjct: | 61 | GDGDLPDEFLDLVEDMEEIDFSGKTCAVFGSGDTAYEFFCGAVDTLEAKIKERGGDIVLP | 120 |
| Query: | 124 | CVKVDLAAEDEDIENLEAFAEEIASK | 149 |
| | | VK++ E E+ E L F + A K | |
| Sbjct: | 121 | SVKIENNPEGEEEEELINFGRQFAKK | 146 |

[12539] A related DNA sequence was identified in S. pyogenes <SEQ ID 7103> which encodes the amino acid sequence <SEQ ID 7104>. Analysis of this protein sequence reveals the following:

```
Possible site: 14
>>> Seems to have no N-terminal signal sequence
----- Final Results -----
                            bacterial cytoplasm --- Certainty = 0.1641(Affirmative) < succ>
                              bacterial membrane --- Certainty = 0.0000(Not Clear) < succ>
                                bacterial outside --- Certainty = 0.0000(Not Clear) < succ>
```

[12540] An alignment of the GAS and GBS proteins is shown below.

| Identities = 116/147 (78%), Positives = 136/147 (91%) | | | |
|---|---|---|---|
| Query: | 5 | MALAKIVYASMTGNTEEIADIVADKLRDLGLDVEVEECTMVDAADFEDADIAIVATYTYG | 64 |
| | | MALAKIVYASMTGNTEEIADIVA+KL++LG DV+++ECT VDA++FE+ADIA+VATYTYG | |
| Sbjct: | 1 | MALAKIVYASMTGNTEEIADIVANKLQELGHDVDIDECTTVDASEFENADIAVVATYTYG | 60 |
| Query: | 65 | DGDLPDEIVDFYEDLAEVDLSGKVYGVVGSGDTFYDYFCKSVDEFEAQFALTGAQKGADC | 124 |
| | | DGDLPDEIVDFYEDL ++DL GK+YGVVGSGDTFYDYFCKSVD+F QFALTGA KGA+ | |
| Sbjct: | 61 | DGDLPDEIVDFYEDLQDLDLEGKIYGVVGSGDTFYDYFCKSVDDFSEQFALTGAIKGAEP | 120 |
| Query: | 125 | VKVDLAAEDEDIENLEAFAEEIASKLN | 151 |
| | | VKVDLAAEDEDI+ LEAFAE+++ +N | |
| Sbjct: | 121 | VKVDLAAEDEDIDRLEAFAEQLSQAVN | 147 |

[12541] Based on this analysis, it was predicted that these proteins and their epitopes could be useful antigens for vaccines or diagnostics.

### EXAMPLE 2308

[12542] A DNA sequence (GBSx2449) was identified in S. agalactiae <SEQ ID 7105> which encodes the amino acid sequence <SEQ ID 7106>. Analysis of this protein sequence reveals the following:

```
Possible site: 33
>>> Seems to have no N-terminal signal sequence
----- Final Results -----
                            bacterial cytoplasm --- Certainty = 0.3568(Affirmative) < succ>
                              bacterial membrane --- Certainty = 0.0000(Not Clear) < succ>
                                bacterial outside --- Certainty = 0.0000(Not Clear) < succ>
```

[12543] The protein has homology with the following sequences in the GENPEPT database.

| >GP:AAB98234 GB:U67480 chorismate mutase/prephenate dehydratase | | | |
|---|---|---|---|
| (pheA) (Methanococcus jannaschii] | | | |
| Identities = 26/85 (30%), Positives = 46/85 (53%), Gaps = 1/85 (1%) | | | |
| Query: | 2 | ELEEIRQEIDEIDQQLVSLLETRMGLILEVIAFKKKHRLPVLDMNRENEVLNNVLKKVQN | 61 |
| | | +L EIR++IDEID +++L+ R L +V K + +P+ D RE + + + K + | |
| Sbjct: | 4 | KLAEIRKKIDEIDNKILKLIAERNSLAKDVAEIKNQLGIPINDPEREKYIYDRIRKLCKE | 63 |
| Query: | 62 | HQFDDVIRATFKDIMTE-SRVYQKE | 85 |
| | | H D+ I I+ E ++ QK+ | |
| Sbjct: | 64 | HNVDENIGIKIFQILIEHNRALQKQ | 88 |

[12544] There is also homology to SEQ ID 1568.

[12545] Based on this analysis, it was predicted that this protein and its epitopes, could be useful antigens for vaccines or diagnostics.

### EXAMPLE 2309

[12546] A DNA sequence (GBSx2450) was identified in S. agalactiae <SEQ ID 7107> which encodes the amino acid sequence <SEQ ID 7108>. This protein is predicted to be a minor structural protein. Analysis of this protein sequence reveals the following:

```
Possible site: 23
>>> Seems to have no N-terminal signal sequence
----- Final Results -----
                            bacterial cytoplasm --- Certainty = 0.1828(Affirmative) < succ>
                              bacterial membrane --- Certainty = 0.0000(Not Clear) < succ>
                                bacterial outside --- Certainty = 0.0000(Not Clear) < succ>
```

[12547] The protein has homology with the following sequences in the GENPEPT database.

>GP:AAC34413 GB:AF158600 putative minor structural protein
[Streptococcus thermophilus bacteriophage Sfill]
Identities = 39/65 (60%), Positives = 54/65 (83%)

| | | | |
|---|---|---|---|
| Query: | 1 | MEVETDSQEVLMSTGLKDLKAHAYPAITYEVDGYVDLELGDVVRIQDDGYEPPLILTARV | 60 |
| | | ME++TDS++VL+ST L++L+ YPAITYEVDG++DL++GD V+IQD G+ P L+L ARV | |
| Sbjct: | 707 | MEIDTDSEDVLISTALRNLRKFCYPAITYEVDGFLDLDIGDTVKIQDTGFSPMLMLEARV | 766 |
| Query: | 61 | VEQDI | 65 |
| | | EQ I | |
| Sbjct: | 767 | SEQQI | 771 |

[12548] No corresponding DNA sequence was identified in S. pyogenes.

[12549] Based on this analysis, it was predicted that this protein and its epitopes, could be useful antigens for vaccines or diagnostics.

### EXAMPLE 2310

[12550] A DNA sequence (GBSx2451) was identified in S. agalactiae <SEQ ID 7109> which encodes the amino acid sequence <SEQ ID 7110>. This protein is predicted to be phosphomethylpyrimidine kinase (thiD). Analysis of this protein sequence reveals the following:

```
Possible site: 45
>>> Seems to have no N-terminal signal sequence
----- Final Results -----
                            bacterial cytoplasm --- Certainty = 0.2051(Affirmative) < succ>
                              bacterial membrane --- Certainty = 0.0000(Not Clear) < succ>
                                bacterial outside --- Certainty = 0.0000(Not Clear) < succ>
```

[12551] The protein has homology with the following sequences in the GENPEPT database.

>GP:AAC22074 GB:U32725 phosphomethylpyrimidine kinase (thiD)
[Haemophiius influenzae Rd]
Identities = 29/78 (37%), Positives = 48/78 (61%), Gaps = 2/78 (2%)

| | | | |
|---|---|---|---|
| Query: | 4 | RNVLAISGNDIFSGGGLHADLATYVVNKLHGFVAVTCLTANSDKG-FEVIPIEASILKQQ | 62 |
| | | + VL I+G+D G G+ ADL T+ + + G A+T +TA + G F++ PI ++ Q | |
| Sbjct: | 5 | KQVLTIAGSDSGGGAGIQADLKTFQMRGVFGTSAITAVTAQNTLGVFDIHPIPLKTIQAQ | 64 |
| Query: | 63 | LESLK-DVEFGSIKLGLL | 79 |
| | | LE++K D + S K+G+L | |
| Sbjct: | 65 | LEAVKNDFQIASCKIGML | 82 |

[12552] There is also homology to SEQ ID 4408.

[12553] Based on this analysis, it was predicted that this protein and its epitopes, could be useful antigens for vaccines or diagnostics.

### EXAMPLE 2311

[12554] A DNA sequence (GBSx2452) was identified in S. agalactiae <SEQ ID 7111> which encodes the amino acid sequence <SEQ ID 7112>. Analysis of this protein sequence reveals the following:

```
Possible site: 57
>>> Seems to have no N-terminal signal sequence
INTEGRAL Likelihood = −7.43 Transmembrane 109-125 ( 102-129)
INTEGRAL Likelihood = −1.28 Transmembrane 84-100 ( 84-100)
----- Final Results -----
                            bacterial membrane --- Certainty = 0.3972(Affirmative) < succ>
                              bacterial outside --- Certainty = 0.0000(Not Clear) < succ>
                          bacterial cytoplasm --- Certainty = 0.0000(Not Clear) < succ>
```

[12555] The protein has homology with the following sequences in the GENPEPT database.

| >GP:CAA22372 GB:AL034446 putative transmembrane protein | | | |
|---|---|---|---|
| [Streptomyces coelicolor A3(2)] | | | |
| Identities = 25/93 (26%), Positives = 43/93 (45%), Gaps = 1/93 (1%) | | | |
| Query: | 62 | SASVEILCRGWLLPVSATKYSKIVSVSISSIFFGLLHSANNNVSLISIFNLCL-FGLFLS | 120 |
| | | +A+ E++ RG L + +++ ++ + FGL+H N +L + + G L+ | |
| Sbjct: | 143 | AATEEVVFRGVLFRIIEENIGTYLALGLTGLVFGLMHLLNEDATLWGALAIAIEAGFMLA | 202 |
| Query: | 121 | LYVILKGNIWGACGIHGAWNCVQGSVFGIEVSG | 153 |
| | | N+W G+H WN G VF VSG | |
| Sbjct: | 203 | AAYAATRNLWLTIGVHFGWNFAAGGVFSTVVSG | 235 |

[12556] No corresponding DNA sequence was identified in S. pyogenes.

[12557] Based on this analysis, it was predicted that this protein and its epitopes, could be useful antigens for vaccines or diagnostics.

### EXAMPLE 2312

[12558] A DNA sequence (GBSx2453) was identified in S. agalactiae <SEQ ID 7113> which encodes the amino acid sequence <SEQ ID 7114>. This protein is predicted to be pppL protein. Analysis of this protein sequence reveals the following:

```
Possible site: 45
>>> Seems to have no N-terminal signal sequence
----- Final Results -----
                            bacterial cytoplasm --- Certainty = 0.5796(Affirmative) < succ>
                              bacterial membrane --- Certainty = 0.0000(Not Clear) < succ>
                                bacterial outside --- Certainty = 0.0000(Not Clear) < succ>
```

[12559] The protein has homology with the following sequences in the GENPEPT database.

| >GP:CAA1O712 GB:AJ132604 pppL protein [Lactococcus lactis] | | | |
|---|---|---|---|
| Identities = 38/64 (59%), Positives = 51/64 (79%) | | | |
| Query: | 1 | MEISLLTDIGQRRSNNQDFINQFENKAGVPLIILADGMGGHRAGNIASEMTVTDLGSDWA | 60 |
| | | ME S+L+DIG +RS NQD++ + N+AG L +LADGMGGH+AGN+AS++TV DLG W+ | |
| Sbjct: | 1 | MEYSILSDIGSKRSTNQDYVGTYVNRAGYQLFLLADGMGGHKAGNVASKLTVEDLGKLWS | 60 |
| Query: | 61 | ETDF | 64 |
| | | ET F | |
| Sbjct: | 61 | ETFF | 64 |

[12560] There is also homology to SEQ ID 3022:

| Identities = 58/74 (78%), Positives = 69/74 (92%) | | | |
|---|---|---|---|
| Query: | 1 | MEISLLTDIGQRRSNNQDFINQFENKAGVPLIILADGMGGHRAGNIASEMTVTDLGSDWA | 60 |
| | | M+ISL TDIGQ+RSNNQDFIN+F+NK G+ L+ILADGMGGHRAGNIASEMTVTDLG +W | |
| Sbjct: | 1 | MKISLKTDIGQKRSNNQDFINKFDNKKGITLVILADGMGGHRAGNIASEMTVTDLGREWV | 60 |
| Query: | 61 | ETDFSELSEIRDWM | 74 |
| | | +TDF+ELS+IRDW+ | |
| Sbjct: | 61 | KTDFTELSQIRDWL | 74 |

[12561] Based on this analysis, it was predicted that this protein and its epitopes, could be useful antigens for vaccines or diagnostics.

### EXAMPLE 2313

[12562] A DNA sequence (GBSx2454) was identified in S. agalactiae <SEQ ID 7115> which encodes the amino acid sequence <SEQ ID 7116>. This protein is predicted to be sunL protein. Analysis of this protein sequence reveals the following:

```
Possible site: 25
>>> Seems to have no N-terminal signal sequence
----- Final Results -----
                            bacterial cytoplasm --- Certainty = 0.1631(Affirmative) < succ>
                              bacterial membrane --- Certainty = 0.0000(Not Clear) < succ>
                                bacterial outside --- Certainty = 0.0000(Not Clear) < succ>
```

[12563] The protein has homology with the following sequences in the GENPEPT database.

| >GP: CAA10711 GB: AJ132604 sunL protein [Lactococcus lactis] | | | |
|---|---|---|---|
| Identities = 48/81 (59%), Positives = 67/81 (82%) | | | |
| Query: | 1 | MSILSSVCQTLRKGGIITYSTCTIFEEENFQVIEKFLENHPNFEQVELSHTQEDIVKRGC | 60 |
| | | + IL+S ++L+K GI+ YSTCTIF+EENF V+ +FLENHPNFEQVE+S+ + +++K GC | |
| Sbjct: | 342 | LEILNSASKSLKKSGIMVYSTCTIFDEENFDVVHEFLENHPNFEQVEISNEKPEVIKEGC | 401 |
| Query: | 61 | ISISPEQYHTDGFFIGQVKRI | 81 |
| | | + I+PE YHTDGFFI + K+I | |
| Sbjct: | 402 | LFITPEMYHTDGFFIAKFKKI | 422 |

[12564] There is also homology to SEQ ID 3018:

| Identities = 64/82 (78%), Positives = 74/82 (90%) | | | |
|---|---|---|---|
| Query: | 1 | MSILSSVCQTLRKGGIITYSTCTIFEEENFQVIEKFLENHPNFEQVELSHTQEDIVKRGC | 60 |
| | | + ILSSVCQTLRKGGIITYSTCTIF+EEN QVIE FL++HPNFEQV+L+HTQ DIVK G | |
| Sbjct: | 359 | LEILSSVCQTLRKGGIITYSTCTIFDEENRQVIEAFLQSHPNFEQVKLNHTQADIVKDGY | 418 |
| Query: | 61 | ISISPEQYHTDGFFIGQVKRIL | 82 |
| | | + I+PEQY TDGFFIGQV+R+L | |
| Sbjct: | 419 | LIITPEQYQTDGFFIGQVRRVL | 440 |

[12565] Based on this analysis, it was predicted that this protein and its epitopes, could be useful antigens for vaccines or diagnostics.

### EXAMPLE 2314

[12566] A DNA sequence (GBSx2455) was identified in S. agalactiae <SEQ ID 7117> which encodes the amino acid sequence <SEQ ID 7118>. This protein is predicted to be PTS permease for mannose subunit IIPMan. Analysis of this protein sequence reveals the following:

| Possible site: 53 | | | | |
|---|---|---|---|---|
| >>> Seems to have no N-terminal signal sequence | | | | |
| | INTEGRAL | Likelihood = −9.18 | Transmembrane | 32-48 (30-58) |
| | INTEGRAL | Likelihood = −8.07 | Transmembrane | 127-143 (122-146) |
| | INTEGRAL | Likelihood = −2.07 | Transmembrane | 56-72 (56-72) |
| | INTEGRAL | Likelihood = −1.44 | Transmembrane | 87-103 (86-103) |
| | INTEGRAL | Likelihood = −0.53 | Transmembrane | 105-121 (105-121) |

```
----- Final Results -----
                              bacterial membrane --- Certainty = 0.4673(Affirmative) < succ>
                                bacterial outside --- Certainty = 0.0000(Not Clear) < succ>
                            bacterial cytoplasm --- Certainty = 0.0000(Not Clear) < succ>
```

[12567] The protein has homology with the following sequences in the GENPEPT database.

| >GP: AAF81084 GB: AF228498 AgaW [Escherichia coli] | | | |
|---|---|---|---|
| Identities = 38/122 (31%), Positives = 68/122 (55%), Gaps = 7/122 (5%) | | | |
| Query: | 25 | KVPETKSIIRLTALAFLVCSILVVELVSMRELISSISFIGILVGSGPVNSFVHHIPQNLM | 84 |
| | | ++P T + L A +L L+++ +F+ I G+ + + +PQ L+ | |
| Sbjct: | 126 | RMPRTPILAALNACNYLA-------LLALGNFYFLCAFLPIYFGAEHAKTIIDVLPQRLI | 178 |
| Query: | 85 | NGLSAAGGLLPAVGFAMLMKLLWTNKLAVFYLLGFVLTAYLKLPAVAVAALGAVICVISS | 144 |
| | | +GL AGG++PA+GFA+L+K++ N +++LGFV A+LKLP +A+A + +I | |
| Sbjct: | 179 | DGLGVAGGIMPAIGFAVLLKIMMKNVYIPYFILGFVAAAWLKLPVLAIACPALAMALIDL | 238 |
| Query: | 145 | QR | 146 |
| | | R | |
| Sbjct: | 239 | LR | 240 |

[12568] There is also homology to SEQ ID 1636:

| Identities = 104/109 (95%), Positives = 108/109 (98%) | | | |
|---|---|---|---|
| Query: | 56 | LISSISFIGILVGSGPVNSFVHHIPQNLMNGLSAAGGLLPAVGFAMLMKLLWTNKLAVFY | 115 |
| | | +I+SISFIGILVGSGPVN+FV HIPQNLMNGLSAAGGLLPAVGFAMLMKLLWTNKLAVFY | |
| Sbjct: | 149 | IIASISFIGILVGSGPVNAFVEHIPQNLMNGLSAAGGLLPAVGFAMLMKLLWTNKLAVFY | 208 |
| Query: | 116 | LLGFVLTAYLKLPAVAVAALGAVICVISSQRDIELDAITRGAISKQTTF | 164 |
| | | LLGFVLTAYLKLPAVAVAALGAVICVISSQRD+ELDAITRGAISKQTTF | |
| Sbjct: | 209 | LLGFVLTAYLKLPAVAVAALGAVICVISSQRDLELDAITRGAISKQTTF | 257 |

[12569] Based on this analysis, it was predicted that this protein and its epitopes, could be useful antigens for vaccines or diagnostics.

### EXAMPLE 2315

[12570] A DNA sequence (GBSx2456) was identified in S. agalactiae <SEQ ID 7119> which encodes the amino acid sequence <SEQ ID 7120>. Analysis of this protein sequence reveals the following:

| Possible site: 50 | | | | |
|---|---|---|---|---|
| >>> Seems to have a cleavable N-term signal seq. | | | | |
| | INTEGRAL | Likelihood = −8.12 | Transmembrane | 121-137 (118-144) |
| | INTEGRAL | Likelihood = −5.52 | Transmembrane | 91-107 (89-111) |
| | INTEGRAL | Likelihood = −5.20 | Transmembrane | 166-182 (162-192) |

```
----- Final Results -----
                              bacterial membrane --- Certainty = 0.4248(Affirmative) < succ>
                                bacterial outside --- Certainty = 0.0000(Not Clear) < succ>
                            bacterial cytoplasm --- Certainty = 0.0000(Not Clear) < succ>
```

[12571] The protein has homology with the following sequences in the GENPEPT database.

| >GP: CAB15963 GB: Z99124 phosphotransferase system (PTS) | | | |
|---|---|---|---|
| beta-glucoside-specific enzyme IIABC component [Bacillus subtilis] | | | |
| Identities = 76/201 (37%), Positives = 122/201 (59%), Gaps = 3/201 (1%) | | | |
| Query: | 1 | MIKALLALLLVFKILTPSSQTYILLNLFADGVFYFLPILIAITAAQKLKANPILALGTVV | 60 |
| | | MIK L+AL + F + SQ +++L DG FYFLP+L+A++AA+K +NP +A | |
| Sbjct: | 121 | MIKGLVALAVTFGWMAEKSQVHVILTAVGDGAFYFLPLLLAMSAARKFGSNPYVAAAIAA | 180 |
| Query: | 61 | MLLHPNWANLVASGKPVSLFHTIPFTLTNYASSVIPIILIICVQAYIEKYLKQIIPKSLR | 120 |
| | | +LHP+ L+ +GKP+S F +P T Y+S+VIPI+L I + +Y+EK++ + SL+ | |
| Sbjct: | 181 | AILHPDLTALLGAGKPIS-FIGLPVTAATYSSTVIPILLSIWIASYVEKWIDRFTHASLK | 239 |
| Query: | 121 | LVLVPMLIFLSMGILSFSILGPMGTIAGQYLAVIFTFLSKYASW-APAFLVGAFAPILIM | 179 |
| | | L++VP L + L+ +GP+G I G+YL+ +L +A A FL G F+ ++IM | |
| Sbjct: | 240 | LIVVPTFTLLIVVPLTLITVGPLGAILGEYLSSGVNYLFDHAGLVAMIFLAGTFS-LIIM | 298 |
| Query: | 180 | FGVHSGIAALGITQLAKLGVD | 200 |
| | | G+H + I +A+ G D | |
| Sbjct: | 299 | TGMHYAFVPIMINNIAQNGHD | 319 |

[12572] There is also homology to SEQ ID 2884.

[12573] Based on this analysis, it was predicted that this protein and its epitopes, could be useful antigens for vaccines or diagnostics.

### EXAMPLE 2316

[12574] A DNA sequence (GBSx2457) was identified in S. agalactiae <SEQ ID 7121> which encodes the amino acid sequence <SEQ ID 7122>. This protein is predicted to be glucose kinase. Analysis of this protein sequence reveals the following:

```
Possible site: 54
>>> Seems to have no N-terminal signal sequence
----- Final Results -----
                            bacterial cytoplasm --- Certainty = 0.1180(Affirmative) < succ>
                              bacterial membrane --- Certainty = 0.0000(Not Clear) < succ>
                                bacterial outside --- Certainty = 0.0000(Not Clear) < succ>
```

[12575] The protein has homology with the following sequences in the GENPEPT database.

| >GP: CAB14416 GB: Z99116 glucose kinase [Bacillus subtilis] | | | |
|---|---|---|---|
| Identities = 32/57 (56%), Positives = 41/57 (71%) | | | |
| Query: | 1 | MVIGGGVSAAGEFLRSRVEKYFVTFAFPQVKKSTKIKIAELGNDAGIIGAASLANQQ | 57 |
| | | +V+GGGVS AGE LRS+VEK F AFP+ ++ I IA LGNDAG+IG A +A + | |
| Sbjct: | 258 | IVLGGGVSRAGELLRSKVEKTFRKCAFPRAAQAADISIAALGNDAGVIGGAWIAKNE | 314 |

[12576] There is also homology to SEQ ID 198. An alignment of the GAS and GBS proteins is shown below:

| Identities = 50/56 (89%), Positives = 53/56 (94%) | | | |
|---|---|---|---|
| Query: | 1 | MVIGGGVSAAGEFLRSRVEKYFVTFAFPQVKKSTKIKIAELGNDAGIIGAASLANQ | 56 |
| | | +VIGGGVSAAGEFLRSR+EKYFVTF FPQV+ STKIKIAELGNDAGIIGAASLA Q | |
| Sbjct: | 264 | VVIGGGVSAAGEFLRSRIEKYFVTFTFPQVRYSTKIKIAELGNDAGIIGAASLARQ | 319 |

[12577] Based on this analysis, it was predicted that these proteins and their epitopes could be useful antigens for vaccines or diagnostics.

### EXAMPLE 2317

[12578] A DNA sequence (GBSx2458) was identified in S. agalactiae <SEQ ID 7123> which encodes the amino acid sequence <SEQ ID 7124>. Analysis of this protein sequence reveals the following:

```
Possible site: 19
>>> Seems to have a cleavable N-term signal seq.
----- Final Results -----
                                bacterial outside --- Certainty = 0.3000(Affirmative) < succ>
                              bacterial membrane --- Certainty = 0.0000(Not Clear) < succ>
                            bacterial cytoplasm --- Certainty = 0.0000(Not Clear) < succ>
```

[12579] The protein has homology with the following sequences in the GENPEPT database.

| >GP: CAB14385 GB: Z99116 similar to hypothetical proteins [Bacillus subtilis] | | | |
|---|---|---|---|
| Identities = 37/86 (43%), Positives = 51/86 (59%) | | | |
| Query: | 3 | MSVILIIVILLAFVAWASWNYWRVRRAAKFLDNESFQKEMSRGQLIDIREAGAFHRKHIL | 62 |
| | | MS +++++I AF+ + +Y +R K L E F+ + QLID+RE F HIL | |
| Sbjct: | 1 | MSNMIVLIIFPAFIIYMIASYVYQQRIMKTLTEEEFRAGYRKAQLIDVREPNEFEGGHIL | 60 |
| Query: | 63 | GARNIPASQFKVALSALRKDKPVLLY | 88 |
| | | GARNIP SQ K + +R DKPV LY | |
| Sbjct: | 61 | GARNIPLSQLKQRKNEIRTDKPVYLY | 86 |

[12580] There is also homology to SEQ ID 202. An alignment of the GAS and GBS proteins is shown below:

| Identities = 51/108 (47%), Positives = 70/108 (64%) | | | |
|---|---|---|---|
| Query: | 1 | MDMSVILIIVILLAFVAWASWNYWRVRRAAKFLDNESFQKEMSRGQLIDIREAGAFHRKH | 60 |
| | | M +++ ++L+ V + +WNY+ R+ AK +DNE+F+ M +GQLID+RE AF KH | |
| Sbjct: | 1 | MSPITLILWLLLVGIVGYYTWNYFSFRKMAKQVDNETFKDVMRQGQLIDLREPAAFRTKH | 60 |
| Query: | 61 | ILGARNIPASQFKVALSALRKDKPVLLYDASRGQSIPRIVLLLRKERF | 108 |
| | | ILGARN PA QF A+ LRKDKPVL+Y+ R Q V L+K F | |
| Sbjct: | 61 | ILGARNFPAQQFDAAIKGLRKDKPVLIYENMRPQYRVPAVKKLKKAGF | 108 |

[12581] Based on this analysis, it was predicted that these proteins and their epitopes could be useful antigens for vaccines or diagnostics.

### EXAMPLE 2318

[12582] A DNA sequence (GBSx2459) was identified in S. agalactiae <SEQ ID 7125> which encodes the amino acid sequence <SEQ ID 7126>. This protein is predicted to be surface protein Rib. Analysis of this protein sequence reveals the following:

```
Possible site: 24
<<< Seems to have no N-terminal signal sequence
----- Final Results -----
                            bacterial cytoplasm --- Certainty = 0.1892(Affirmative) < succ>
                              bacterial membrane --- Certainty = 0.0000(Not Clear) < succ>
                                bacterial outside --- Certainty = 0.0000(Not Clear) < succ>
```

[12583] No corresponding DNA sequence was identified in S. pyogenes.

[12584] Based on this analysis, it was predicted that this protein and its epitopes, could be useful antigens for vaccines or diagnostics.

### EXAMPLE 2319

[12585] A DNA sequence (GBSx2460) was identified in S. agalactiae <SEQ ID 7127> which encodes the amino acid sequence <SEQ ID 7128>. Analysis of this protein sequence reveals the following:

```
Possible site: 18
>>> Seems to have no N-terminal signal sequence
----- Final Results -----
                            bacterial cytoplasm --- Certainty = 0.3522(Affirmative) < succ>
                              bacterial membrane --- Certainty = 0.0000(Not Clear) < succ>
                                bacterial outside --- Certainty = 0.0000(Not Clear) < succ>
```

[12586] The protein has no significant homology with any sequences in the GENPEPT database.

[12587] No corresponding DNA sequence was identified in S. pyogenes.

[12588] Based on this analysis, it was predicted that this protein and its epitopes, could be useful antigens for vaccines or diagnostics.

### EXAMPLE 2320

[12589] A DNA sequence (GBSx2461) was identified in S. agalactiae <SEQ ID 7129> which encodes the amino acid sequence <SEQ ID 7130>. Analysis of this protein sequence reveals the following:

```
Possible site: 25
>>> Seems to have no N-terminal signal sequence
----- Final Results -----
                            bacterial cytoplasm --- Certainty = 0.2770(Affirmative) < succ>
                              bacterial membrane --- Certainty = 0.0000(Not Clear) < succ>
                                bacterial outside --- Certainty = 0.0000(Not Clear) < succ>
```

[12590] The protein has homology with the following sequences in the GENPEPT database.

| >GP: AAB18708 GB: U38906 ORF33 [Bacteriophage r1t] | | | |
|---|---|---|---|
| Identities = 56/85 (65%), Positives = 66/85 (76%), Gaps = 1/85 (1%) | | | |
| Query: | 1 | MTNFATTDDVILLWRQLSVDEIKRAEALLETVSDTLRLEASKVGKNLDEMILETP-YFAT | 59 |
| | | M FAT DD+ +LWR L DE +RAE LLE VSD+LR EA KVG++L MI E P YFA+ | |
| Sbjct: | 1 | MNPFATVDDLTMLWRPLKGDEKERAEKLLEIVSDSLREEADKVGRDLYAMIAEKPSYFAS | 60 |
| Query: | 60 | VLKSVTVDIVARTLMTATQGEPMSQ | 84 |
| | | V+KSVTVDIVARTLMT+T EPM+Q | |
| Sbjct: | 61 | VVKSVTVDIVARTLMTSTDQEPMTQ | 85 |

[12591] There is also homology to SEQ ID 1432.

[12592] Based on this analysis, it was predicted that this protein and its epitopes, could be useful antigens for vaccines or diagnostics.

### EXAMPLE 2321

[12593] A DNA sequence (GBSx2462) was identified in S. agalactiae <SEQ ID 7131> which encodes the amino acid sequence <SEQ ID 7132>. This protein is predicted to be regulatory protein TypA (typA). Analysis of this protein sequence reveals the following:

```
Possible site: 41
>>> Seems to have no N-terminal signal sequence
----- Final Results -----
                            bacterial cytoplasm --- Certainty = 0.2238(Affirmative) < succ>
                              bacterial membrane --- Certainty = 0.0000(Not Clear) < succ>
                                bacterial outside --- Certainty = 0.0000(Not Clear) < succ>
```

[12594] The protein has homology with the following sequences in the GENPEPT database.

| >GP: BAB06351 GB: AP001516 GTP-binding protein TypA/BipA (tyrosine | | | |
|---|---|---|---|
| phosphorylated protein A) [Bacillus halodurans] | | | |
| Identities = 175/237 (73%), Positives = 204/237 (85%), Gaps = 1/237 (0%) | | | |
| Query: | 1 | MEDIFVGETVTPTDAIEPLPVLRIDEPTLQMTFLVNNSPFAGREGKWITSRKVEERLLAE | 60 |
| | | ME+I VGETV P D +PLP+LRIDEPTLQMTFLVNNSPFAGREGK +TSRK+EERL AE | |
| Sbjct: | 281 | MEEINVGETVCPVDHQDPLPILRIDEPTLQMTFLVNNSPFAGREGKHVTSRKLEERLRAE | 340 |
| Query: | 61 | LQTDVSLRVDPTDSPDKWTVSGRGELHLSILIETMRREGYELQVSRPEVIIKEIDGVQCE | 120 |
| | | L+TDVSLRV+ TDSPD W VSGRGELHLSILIE MRREGYELQVS+PEVII+EIDGVQCE | |
| Sbjct: | 341 | LETDVSLRVENTDSPDMWVVSGRGELHLSILIENMRREGYELQVSKPEVIIREIDGVQCE | 400 |
| Query: | 121 | PFERVQIDTPEEYQGAIIQSLSERKGDMLDMQMVGNGQTRLIFLIPARGLIGYSTEFLSM | 180 |
| | | P ERVQID PEEY GA+++SL ERKG+ML+M G+GQ RL F++PARGLIGY+TEFLS | |
| Sbjct: | 401 | PVERVQIDVPEEYTGAVMESLGERKGEMLNMTNTGSGQVRLEFMVPARGLIGYTTEFLSQ | 460 |
| Query: | 181 | TRGYGIMNHTFDQYLPVVQGEIGGRHRGALVSIENGKATTYSIMRIEERGNLSFVNP | 237 |
| | | TRGYGI+NH+FD Y PV G++GGR +G LVS+E GKAT Y I+++E+RG + FV P | |
| Sbjct: | 461 | TRGYGIINHSFDSYQPVTPGQVGGRRQGVLVSMETGKATQYGIIQVEDRGTI-FVEP | 516 |

[12595] There is also homology to SEQ ID 206. An alignment of the GAS and GBS proteins is shown below:

| Identities = 228/237 (96%), Positives = 233/237 (98%), Gaps = 1/237 (0%) | | | |
|---|---|---|---|
| Query: | 1 | MEDIFVGETVTPTDAIEPLPVLRIDEPTLQMTFLVNNSPFAGREGKWITSRKVEERLLAE | 60 |
| | | MEDIFVGET+TPTD +E LP+LRIDEPTLQMTFLVNNSPFAGREGKWITSRKVEERLLAE | |
| Sbjct: | 284 | MEDIFVGETITPTDCVEALPILRIDEPTLQMTFLVNNSPFAGREGKWITSRKVEERLLAE | 343 |
| Query: | 61 | LQTDVSLRVDPTDSPDKWTVSGRGELHLSILIETMRREGYELQVSRPEVIIKEIDGVQCE | 120 |
| | | LQTDVSLRVDPTDSPDKWTVSGRGELHLSILIETMRREGYELQVSRPEVIIKEIDGV+CE | |
| Sbjct: | 344 | LQTDVSLRVDPTDSPDKWTVSGRGELHLSILIETMRREGYELQVSRPEVIIKEIDGVKCE | 403 |
| Query: | 121 | PFERVQIDTPEEYQGAIIQSLSERKGDMLDMQMVGNGQTRLIFLIPARGLIGYSTEFLSM | 180 |
| | | PFERVQIDTPEEYQGAIIQSLSERKGDMLDMQMVGNGQTRLIFLIPARGLIGYSTEFLSM | |
| Sbjct: | 404 | PFERVQIDTPEEYQGAIIQSLSERKGDMLDMQMVGNGQTRLIFLIPARGLIGYSTEFLSM | 463 |
| Query: | 181 | TRGYGIMNHTFDQYLPVVQGEIGGRHRGALVSIENGKATTYSIMRIEERGNLSFVNP | 237 |
| | | TRGYGIMNHTFDQYLPVVQGEIGGRHRGALVSIENGKATTYSIMRIEERG + FVNP | |
| Sbjct: | 464 | TRGYGIMNHTFDQYLPVVQGEIGGRHRGALVSIENGKATTYSIMRIEERGTI-FVNP | 519 |

[12596] Based on this analysis, it was predicted that these proteins and their epitopes could be useful antigens for vaccines or diagnostics.

### EXAMPLE 2322

[12597] A DNA sequence (GBSx2464) was identified in S. agalactiae <SEQ ID 7133> which encodes the amino acid sequence <SEQ ID 7134>. This protein is predicted to be pseudouridine synthase family 1 protein (rluB). Analysis of this protein sequence reveals the following:

```
Possible site: 34
>>> Seems to have no N-terminal signal sequence
----- Final Results -----
                            bacterial cytoplasm --- Certainty = 0.1950(Affirmative) < succ>
                              bacterial membrane --- Certainty = 0.0000(Not Clear) < succ>
                                bacterial outside --- Certainty = 0.0000(Not Clear) < succ>
```

[12598] The protein has homology with the following sequences in the GENPEPT database.

| >GP: CAB14248 GB: Z99116 similar to hypothetical proteins [Bacillus subtilis] | | | |
|---|---|---|---|
| Identities = 59/105 (56%), Positives = 85/105 (80%) | | | |
| Query: | 5 | VKERIYPVGRLDWDTTGLLILTNDGDFTDKMIHPRNEIDKVYLARVKGIATKENLRPLTR | 64 |
| | | + +RIYP+GRLD+DT+GLL+LTNDG+F +K++HP+ EIDK Y+A+VKGI KE LR L R | |
| Sbjct: | 91 | IPQRIYPIGRLDYDTSGLLLLTNDGEFANKLMHPKYEIDKTYVAKVKGIPPKELLRKLER | 150 |
| Query: | 65 | GVVIDGKKTKPARYTIIKVDHEKNRSVVELTIHEGRNHQVKKMFE | 109 |
| | | G+ ++ KT PA+ ++ +D +K S+++LTIHEGRN QV++MFE | |
| Sbjct: | 151 | GIRLEEGKTAPAKAKLLSLDKKKQTSIIQLTIHEGRNRQVRRMFE | 195 |

[12599] There is also homology to SEQ ID 4728:

| Identities = 96/109 (88%), Positives = 106/109 (97%) | | | |
|---|---|---|---|
| Query: | 1 | MLPQVKERIYPVGRLDWDTTGLLILTNDGDFTDKMIHPRNEIDKVYLARVKGIATKENLR | 60 |
| | | +LPQVKERIYPVGRLDWDT+G+LILTNDGDFTD MIHPRNEIDKVYLARVKGIATKENLR | |
| Sbjct: | 94 | LLPQVKERIYPVGRLDWDTSGVLILTNDGDFTDTMIHPRNEIDKVYLARVKGIATKENLR | 153 |
| Query: | 61 | PLTRGVVIDGKKTKPARYTIIKVDHEKNRSVVELTIHEGRNHQVKKMFE | 109 |
| | | PLTRG+VIDGKKTKPARY I++V+ +K+RS+VELTIHEGRNHQVKKMFE | |
| Sbjct: | 154 | PLTRGIVIDGKKTKPARYNIVRVEADKSRSIVELTIHEGRNHQVKKMFE | 202 |

[12600] Based on this analysis, it was predicted that these proteins and their epitopes could be useful antigens for vaccines or diagnostics.

### EXAMPLE 2323

[12601] A DNA sequence (GBSx2466) was identified in S. agalactiae <SEQ ID 7135> which encodes the amino acid sequence <SEQ ID 7136>. This protein is predicted to be L-ribulose 5-phosphate 4-epimerase. Analysis of this protein sequence reveals the following:

```
Possible site: 19
>>> Seems to have no N-terminal signal sequence
----- Final Results -----
                            bacterial cytoplasm --- Certainty = 0.2827(Affirmative) < succ>
                              bacterial membrane --- Certainty = 0.0000(Not Clear) < succ>
                                bacterial outside --- Certainty = 0.0000(Not Clear) < succ>
```

[12602] The protein has homology with the following sequences in the GENPEPT database.

| >GP: AAD45716 GB: AF160811 L-ribulose 5-phosphate 4-epimerase | | | |
|---|---|---|---|
| [Bacillus stearothermophilus] | | | |
| Identities = 68/103 (66%), Positives = 82/103 (79%) | | | |
| Query: | 2 | QEMRERVCEANKSLPVHSLVKFTWGNVSEVDREAGLIVIKPSGVDYDQLTPENMVVTDLE | 61 |
| | | +E+++ V EAN LP + LV FTWGNVS +DRE GL+VIKPSGV YD+LT ++MVV DL | |
| Sbjct: | 3 | EELKQAVLEANLQLPQYRLVTFTWGNVSGIDRERGLVVIKPSGVAYDKLTIDDMVVVDLT | 62 |
| Query: | 62 | GNIVEGDLNPSSDLPTHVQLYKAWPEVGGIVHTHSTEAVGWAQ | 104 |
| | | GN+VEGDL PSSD PTH+ LYK +P +GGIVHTHST A WAQ | |
| Sbjct: | 63 | GNVVEGDLKPSSDTPTHLWLYKQFPGIGGIVHTHSTWATVWAQ | 105 |

[12603] There is also homology to SEQ ID 4600:

| Identities = 93/103 (90%), Positives = 96/103 (92%) | | | |
|---|---|---|---|
| Query: | 2 | QEMRERVCEANKSLPVHSLVKFTWGNVSEVDREAGLIVIKPSGVDYDQLTPENMVVTDLE | 61 |
| | | QEMRERVC ANKSLP H LVKFTWGNVSEV RE G IVIKPSGVDYD LTPENMVVTDL+ | |
| Sbjct: | 6 | QEMRERVCAANKSLPQHGLVKFTWGNVSEVCRELGRIVIKPSGVDYDLLTPENMVVTDLD | 65 |
| Query: | 62 | GNIVEGDLNPSSDLPTHVQLYKAWPEVGGIVHTHSTEAVGWAQ | 104 |
| | | GN+VEGDLNPSSDLPTHV+LYKAWPEVGGIVHTHSTEAVGWAQ | |
| Sbjct: | 66 | GNVVEGDLNPSSDLPTHVELYKAWPEVGGIVHTHSTEAVGWAQ | 108 |

[12604] Based on this analysis, it was predicted that these proteins and their epitopes could be useful antigens for vaccines or diagnostics.

### EXAMPLE 2324

[12605] A DNA sequence (GBSx2467) was identified in S. agalactiae <SEQ ID 7137> which encodes the amino acid sequence <SEQ ID 7138>. Analysis of this protein sequence reveals the following:

```
Possible site: 20
>>> Seems to have no N-terminal signal sequence
----- Final Results -----
                            bacterial cytoplasm --- Certainty = 0.3452(Affirmative) < succ>
                              bacterial membrane --- Certainty = 0.0000(Not Clear) < succ>
                                bacterial outside --- Certainty = 0.0000(Not Clear) < succ>
```

[12606] The protein has homology with the following sequences in the GENPEPT database.

| >GP: AAG05712 GB: AE004658 hypothetical protein [Pseudomonas aeruginosa] | | | |
|---|---|---|---|
| Identities = 141/200 (70%), Positives = 162/200 (80%), Gaps = 1/200 (0%) | | | |
| Query: | 10 | LSLGTDYETLANRFRPIFREISAGNVEREKARALPYEPIEWLKKAGFGAVRVPSEYGGAG | 69 |
| | | LS G DYE LA RFRPIF I+ G VERE+ R LP+E I WLK+AGFGAVRVP E+GGAG | |
| Sbjct: | 14 | LSEGADYELLAQRFRPIFARIAEGAVERERQRELPHEAIAWLKQAGFGAVRVPREHGGAG | 73 |
| Query: | 70 | ASIGQLFQLLIELAEADSNIPQALRAHFAFVEDRLNAPPGVDRDTWFARFVAGDLVGNGW | 129 |
| | | AS+ QL QLLIELAEADSNI QALR HFAFVEDRLNA PG RD W RFV GDLVG W | |
| Sbjct: | 74 | ASLPQLVQLLIELAEADSNITQALRGHFAFVEDRLNAEPGPGRDRWLRRFVEGDLVGCAW | 133 |
| Query: | 130 | TEVGTVKIGDVITKVSAQGDG-FVLNGTKFYSTGSIFADWIDVYAQRADNGADVIAVVNA | 188 |
| | | TEVG+V++G+V+T+VS + DG +V+NG+K+YSTGS+F+DWID+YAQR D GADVIA + | |
| Sbjct: | 134 | TEVGSVRLGEVLTRVSRKDDGRWVVNGSKYYSTGSLFSDWIDLYAQRDDTGADVIAAIRT | 193 |
| Query: | 189 | RHAGVRHSDDWDGFGQRTTG | 208 |
| | | GVR SDDWDGFGQRTTG | |
| Sbjct: | 194 | DQPGVRQSDDWDGFGQRTTG | 213 |

[12607] No corresponding DNA sequence was identified in S. pyogenes.

[12608] Based on this analysis, it was predicted that this protein and its epitopes, could be useful antigens for vaccines or diagnostics.

### EXAMPLE 2325

[12609] A DNA sequence (GBSx2468) was identified in S. agalactiae <SEQ ID 7139> which encodes the amino acid sequence <SEQ ID 7140>. Analysis of this protein sequence reveals the following:

```
Possible site: 15
>>> Seems to have no N-terminal signal sequence
----- Final Results -----
                            bacterial cytoplasm --- Certainty = 0.1919(Affirmative) < succ>
                              bacterial membrane --- Certainty = 0.0000(Not Clear) < succ>
                                bacterial outside --- Certainty = 0.0000(Not Clear) < succ>
```

[12610] The protein has no significant homology with any sequences in the GENPEPT database.

[12611] No corresponding DNA sequence was identified in S. pyogenes.

[12612] Based on this analysis, it was predicted that this protein and its epitopes, could be useful antigens for vaccines or diagnostics.

### EXAMPLE 2326

[12613] A DNA sequence (GBSx2474) was identified in S. agalactiae <SEQ ID 7141> which encodes the amino acid sequence <SEQ ID 7142>. Analysis of this protein sequence reveals the following:

```
Possible site: 39
>>> Seems to have no N-terminal signal sequence
----- Final Results -----
                            bacterial cytoplasm --- Certainty = 0.2978(Affirmative) < succ>
                              bacterial membrane --- Certainty = 0.0000(Not Clear) < succ>
                                bacterial outside --- Certainty = 0.0000(Not Clear) < succ>
```

[12614] The protein has no significant homology with any sequences in the GENPEPT database.

[12615] No corresponding DNA sequence was identified in S. pyogenes.

[12616] Based on this analysis, it was predicted that this protein and its epitopes, could be useful antigens for vaccines or diagnostics.

### EXAMPLE 2327

[12617] A DNA sequence (GBSx2476) was identified in S. agalactiae <SEQ ID 7143> which encodes the amino acid sequence <SEQ ID 7144>. Analysis of this protein sequence reveals the following:

```
Possible site: 61
>>> Seems to have no N-terminal signal sequence
----- Final Results -----
                            bacterial cytoplasm --- Certainty = 0.5402(Affirmative) < succ>
                              bacterial membrane --- Certainty = 0.0000(Not Clear) < succ>
                                bacterial outside --- Certainty = 0.0000(Not Clear) < succ>
```

[12618] The protein has no significant homology with any sequences in the GENPEPT database.

[12619] No corresponding DNA sequence was identified in S. pyogenes.

[12620] Based on this analysis, it was predicted that this protein and its epitopes, could be useful antigens for vaccines or diagnostics.

### EXAMPLE 2328

[12621] A DNA sequence (GBSx2477) was identified in S. agalactiae <SEQ ID 7145> which encodes the amino acid sequence <SEQ ID 7146>. This protein is predicted to be mercuric reductase. Analysis of this protein sequence reveals the following:

```
Possible site: 49
>>> Seems to have no N-terminal signal sequence
----- Final Results -----
                            bacterial cytoplasm --- Certainty = 0.2755(Affirmative) < succ>
                              bacterial membrane --- Certainty = 0.0000(Not Clear) < succ>
                                bacterial outside --- Certainty = 0.0000(Not Clear) < succ>
```

[12622] The protein has homology with the following sequences in the GENPEPT database.

| >GP: CAA70224 GB: Y09024 mercuric reductase [Bacillus cereus] | | | |
|---|---|---|---|
| Identities = 190/247 (76%), Positives = 225/247 (90%) | | | |
| Query: | 1 | MELGQLFHHLGSEITLMQRSERLLKEYDPEISESVEKALIEQGINLVKGATFERVEQSGE | 60 |
| | | MELGQLFH+LGSE+TL+QRSERLLKEYDPEISESVEK+L+EQGINLVKGAT+ER+EQ+G+ | |
| Sbjct: | 262 | MELGQLFHNLGSEVTLIQRSERLLKEYDPEISESVEKSLVEQGINLVKGATYERIEQNGD | 321 |
| Query: | 61 | IKRVYVTVNGSREVIESDQLLVATGRKPNTDSLNLSAAGVETGKNNEILINDFGQTSNEK | 120 |
| | | IK+V+V VNG + +IE+DQLLVATGR PNT +LNL AAGVE G EI+I+D+ +T+N + | |
| Sbjct: | 322 | IKKVHVEVNGKKRIIEADQLLVATGRTPNTATLNLRAAGVEIGSRGEIIIDDYSRTTNTR | 381 |
| Query: | 121 | IYAAGDVTLGPQFVYVAAYEGGIITDNAIGGLNKKIDLSVVPAVTFTNPTVATVGLTEEQ | 180 |
| | | IYAAGDVTLGPQFVYVAAY+GG+ NAIGGLNKK++L VVP VTFT P +ATVGLTE+Q | |
| Sbjct: | 382 | IYAAGDVTLGPQFVYVAAYQGGVAAPNAIGGLNKKLNLEVVPGVTFTAPAIATVGLTEQQ | 441 |
| Query: | 181 | AKEKGYDVKTSVLPLGAVPRAIVNRETTGVFKLVADAETLKVLGVHIVSENAGDVIYAAS | 240 |
| | | AKE GY+VKTSVLPL AVPRA+VNRETTGVFKLVAD++T+KVLG H+V+ENAGDVIYAA+ | |
| Sbjct: | 442 | AKENGYEVKTSVLPLDAVPRALVNRETTGVFKLVADSKTMKVLGAHVVAENAGDVIYAAT | 501 |
| Query: | 241 | LAVKFGL | 247 |
| | | LAVKFGL | |
| Sbjct: | 502 | LAVKFGL | 508 |

[12623] There is also homology to SEQ ID 1820.

[12624] Based on this analysis, it was predicted that this protein and its epitopes, could be useful antigens for vaccines or diagnostics.

### EXAMPLE 2329

[12625] A DNA sequence (GBSx2478) was identified in S. agalactiae <SEQ ID 7147> which encodes the amino acid sequence <SEQ ID 7148>. Analysis of this protein sequence reveals the following:

```
Possible site: 30
>>> Seems to have no N-terminal signal sequence
----- Final Results -----
                            bacterial cytoplasm --- Certainty = 0.3642(Affirmative) < succ>
                              bacterial membrane --- Certainty = 0.0000(Not Clear) < succ>
                                bacterial outside --- Certainty = 0.0000(Not Clear) < succ>
```

[12626] The protein has no significant homology with any sequences in the GENPEPT database.

[12627] No corresponding DNA sequence was identified in S. pyogenes.

[12628] Based on this analysis, it was predicted that this protein and its epitopes, could be useful antigens for vaccines or diagnostics.

### EXAMPLE 2330

[12629] A DNA sequence (GBSx2479) was identified in S. agalactiae <SEQ ID 7149> which encodes the amino acid sequence <SEQ ID 7150>. This protein is predicted to be surface protein Rib. Analysis of this protein sequence reveals the following:

```
Possible site: 61
>>> Seems to have no N-terminal signal sequence
----- Final Results -----
                            bacterial cytoplasm --- Certainty = 0.1936(Affirmative) < succ>
                              bacterial membrane --- Certainty = 0.0000(Not Clear) < succ>
                                bacterial outside --- Certainty = 0.0000(Not Clear) < succ>
```

[12630] No corresponding DNA sequence was identified in S. pyogenes.

[12631] Based on this analysis, it was predicted that this protein and its epitopes, could be useful antigens for vaccines or diagnostics.

### EXAMPLE 2331

[12632] A DNA sequence (GBSx2480) was identified in S. agalactiae <SEQ ID 7151> which encodes the amino acid sequence <SEQ ID 7152>. This protein is predicted to be Nra. Analysis of this protein sequence reveals the following:

```
Possible site: 36
>>> Seems to have no N-terminal signal sequence
----- Final Results -----
                            bacterial cytoplasm --- Certainty = 0.1510(Affirmative) < succ>
                              bacterial membrane --- Certainty = 0.0000(Not Clear) < succ>
                                bacterial outside --- Certainty = 0.0000(Not Clear) < succ>
```

[12633] A related GBS nucleic acid sequence <SEQ ID 9383> which encodes amino acid sequence <SEQ ID 9384> was also identified.

[12634] The protein has no significant homology with any sequences in the GENPEPT database.

[12635] A related DNA sequence was identified in S. pyogenes <SEQ ID 7153> which encodes the amino acid sequence <SEQ ID 7154>. Analysis of this protein sequence reveals the following:

| Possible site: 16 | | | | |
|---|---|---|---|---|
| >>> Seems to have no N-terminal signal sequence | | | | |
| | INTEGRAL | Likelihood = −0.64 | Transmembrane | 22-38 (22-38) |

```
----- Final Results -----
                              bacterial membrane --- Certainty = 0.1256(Affirmative) < succ>
                                bacterial outside --- Certainty = 0.0000(Not Clear) < succ>
                            bacterial cytoplasm --- Certainty = 0.0000(Not Clear) < succ>
```

[12636] An alignment of the GAS and GBS proteins is shown below.

| Identities = 42/157 (26%), Positives = 78/157 (48%), Gaps = 2/157 (1%) | | | |
|---|---|---|---|
| Query: | 71 | LLGREFIDSQHFKDINAYFLRHFICYCYYFIPDFYFLNTSRLSY--SKDLYHLLDKGLAD | 128 |
| | | LLG ++S FK I F R FI +PD + + R +K Y+ L + + | |
| Sbjct: | 8 | LLGNNILNSLPFKRILVSFSRLFISNLQVLLPDIHLFHYLRRQQKRNKSFYNTLKTIVEE | 67 |
| Query: | 129 | IFNLKGGNLTFSKHETVLLTMQLSNLIETFLAPLSVYVISSSNIRLQTYQVMLNQYFTSK | 188 |
| | | + +G + +L T+QL L++T+L P+ VY+++++ L L+ YF | |
| Sbjct: | 68 | WMSAEGIVGKLPSYHLLLFTIQLEELLKTYLPPIPVYLLTNNTAALDLMTNALSIYFPPA | 127 |
| Query: | 189 | IAEFFFVNYQTTQIDEKLLKKADIIIAERRYISSLKN | 225 |
| | | IA VN + + + +K +IIA+R+Y++ +++ | |
| Sbjct: | 128 | IATVMPVNVEIIPFKDIVKEKQSVIIADRQYLNLIQH | 164 |

[12637] Based on this analysis, it was predicted that these proteins and their epitopes could be useful antigens for vaccines or diagnostics.

### EXAMPLE 2332

[12638] A DNA sequence (GBSx2481) was identified in S. agalactiae <SEQ ID 7155> which encodes the amino acid sequence <SEQ ID 7156>. Analysis of this protein sequence reveals the following:

```
Possible site: 20
>>> Seems to have no N-terminal signal sequence
----- Final Results -----
                            bacterial cytoplasm --- Certainty = 0.1383(Affirmative) < succ>
                              bacterial membrane --- Certainty = 0.0000(Not Clear) < succ>
                                bacterial outside --- Certainty = 0.0000(Not Clear) < succ>
```

[12639] The protein has no significant homology with any sequences in the GENPEPT database.

[12640] No corresponding DNA sequence was identified in S. pyogenes.

[12641] Based on this analysis, it was predicted that this protein and its epitopes, could be useful antigens for vaccines or diagnostics.

### EXAMPLE 2333

[12642] A DNA sequence (GBSx2482) was identified in S. agalactiae <SEQ ID 7157> which encodes the amino acid sequence <SEQ ID 7158>. Analysis of this protein sequence reveals the following:

```
Possible site: 60
>>> Seems to have no N-terminal signal sequence
----- Final Results -----
                            bacterial cytoplasm --- Certainty = 0.4145(Affirmative) < succ>
                              bacterial membrane --- Certainty = 0.0000(Not Clear) < succ>
                                bacterial outside --- Certainty = 0.0000(Not Clear) < succ>
```

[12643] The protein has no significant homology with any sequences in the GENPEPT database.

[12644] No corresponding DNA sequence was identified in S. pyogenes.

[12645] Based on this analysis, it was predicted that this protein and its epitopes, could be useful antigens for vaccines or diagnostics.

### EXAMPLE 2334

[12646] A DNA sequence (GBSx2484) was identified in S. agalactiae <SEQ ID 7159> which encodes the amino acid sequence <SEQ ID 7160>. Analysis of this protein sequence reveals the following:

| Possible site: 57 | | | | |
|---|---|---|---|---|
| >>> Seems to have no N-terminal signal sequence | | | | |
| | INTEGRAL | Likelihood = −2.02 | Transmembrane | 34-50 (34-50) |

```
----- Final Results -----
                              bacterial membrane --- Certainty = 0.1808(Affirmative) < succ>
                                bacterial outside --- Certainty = 0.0000(Not Clear) < succ>
                            bacterial cytoplasm --- Certainty = 0.0000(Not Clear) < succ>
```

[12647] The protein has no significant homology with any sequences in the GENPEPT database.

[12648] No corresponding DNA sequence was identified in S. pyogenes.

[12649] Based on this analysis, it was predicted that this protein and its epitopes, could be useful antigens for vaccines or diagnostics.

### EXAMPLE 2335

[12650] A DNA sequence (GBSx2485) was identified in S. agalactiae <SEQ ID 7161> which encodes the amino acid sequence <SEQ ID 7162>. Analysis of this protein sequence reveals the following:

```
Possible site: 49
>>> Seems to have no N-terminal signal sequence
----- Final Results -----
                            bacterial cytoplasm --- Certainty = 0.3488(Affirmative) < succ>
                              bacterial membrane --- Certainty = 0.0000(Not Clear) < succ>
                                bacterial outside --- Certainty = 0.0000(Not Clear) < succ>
```

[12651] The protein has homology with the following sequences in the GENPEPT database.

| >GP: CAB52002 GB: AL109663 hypothetical protein [Streptomyces | | | |
|---|---|---|---|
| coelicolor A3(2)] | | | |
| Identities = 61/141 (43%), Positives = 86/141 (60%), Gaps = 2/141 (1%) | | | |
| Query: | 3 | TYFDNFLKTNQAYADLHGTAHLPIKPKTKVAIVTCMDSRLHVAQALGLALGDAHILRNAG | 62 |
| | | T D ++ N+ YA + +P +VA+V CMD+RL + ALGL LGD H +RNAG | |
| Sbjct: | 5 | TVTDRLVEANERYAAAFADPGMDARPVQRVAVVACMDARLDLHAALGLKLGDCHTIRNAG | 64 |
| Query: | 63 | GRVTDDVLRSLVISQQQLGTREIVVLHHTDCGAQTFTNEAFAAQLQRDLGVDMHGHDFLP | 122 |
| | | G VTDDV+RSL ISQ+ LGTR + ++HHT CG +T T E F L+ ++G | |
| Sbjct: | 65 | GVVTDDVIRSLTISQRALGTRSVALIHHTGCGMETITEE-FRHDLELEVG-QRPAWAVEA | 122 |
| Query: | 123 | FNDIEESVREDVAKLHASPFL | 143 |
| | | F D ++ VR+ + ++ SPFL | |
| Sbjct: | 123 | FRDADQDVRQSIERVRTSPFL | 143 |

[12652] A related DNA sequence was identified in S. pyogenes <SEQ ID 6469> which encodes the amino acid sequence <SEQ ID 6470>. Analysis of this protein sequence reveals the following:

```
Possible site: 20
>>> Seems to have no N-terminal signal sequence
----- Final Results -----
                            bacterial cytoplasm --- Certainty = 0.2295(Affirmative) < succ>
                              bacterial membrane --- Certainty = 0.0000(Not Clear) < succ>
                                bacterial outside --- Certainty = 0.0000(Not Clear) < succ>
```

[12653] An alignment of the GAS and GBS proteins is shown below.

| Identities = 109/146 (74%), Positives = 128/146 (87%) | | | |
|---|---|---|---|
| Query: | 1 | MTTYFDNFLKTNQAYADLHGTAHLPIKPKTKVAIVTCMDSRLHVAQALGLALGDAHILRN | 60 |
| | | + +YF++F+ NQAY LHGTAHLP+KPKTKVAIVTCMDSRLHVAQALGLALGDAHILRN | |
| Sbjct: | 1 | LMSYFEHFMAANQAYVALHGTAHLPLKPKTKVAIVTCMDSRLHVAQALGLALGDAHILRN | 60 |
| Query: | 61 | AGGRVTDDVLRSLVISQQQLGTREIVVLHHTDCGAQTFTNEAFAAQLQRDLGVDMHGHDF | 120 |
| | | AGGRVT+D++RSLVISQQQ+GTREIVVLHHTDCGAQTFTNE FA + LGVD+ G DF | |
| Sbjct: | 61 | AGGRVTEDMIRSLVISQQQMGTREIVVLHHTDCGAQTFTNEGFAKHIHEHLGVDVSGQDF | 120 |
| Query: | 121 | LPFNDIEESVREDVAKLHASPFLREE | 146 |
| | | LPF D+E+SVRED+AK+ AS + ++ | |
| Sbjct: | 121 | LPFQDVEDSVREDMAKIRASSLISDD | 146 |

[12654] Based on this analysis, it was predicted that these proteins and their epitopes could be useful antigens for vaccines or diagnostics.

### EXAMPLE 2336

[12655] A DNA sequence (GBSx2486) was identified in S. agalactiae <SEQ ID 7163> which encodes the amino acid sequence <SEQ ID 7164>. Analysis of this protein sequence reveals the following:

```
Possible site: 26
>>> Seems to have no N-terminal signal sequence
----- Final Results -----
                            bacterial cytoplasm --- Certainty = 0.0932(Affirmative) < succ>
                              bacterial membrane --- Certainty = 0.0000(Not Clear) < succ>
                                bacterial outside --- Certainty = 0.0000(Not Clear) < succ>
```

[12656] The protein has homology with the following sequences in the GENPEPT database.

>GP: AAG08811 GB: AE004955
phosphoribosylaminoimidazole carboxylase,
catalytic subunit [Pseudomonas aeruginosa]
Identities = 20/27 (74%), Positives = 26/27 (96%)

| | | | |
|---|---|---|---|
| Query: | 1 | MFKHAEEARGRGIKIIIAGAGGAAHLP | 27 |
| | | +F++AEEA GRG+++IIAGAGGAAHLP | |
| Sbjct: | 46 | LFQYAEEAEGRGLEVIIAGAGGAAHLP | 72 |

[12657] There is also homology to SEQ ID 910:

Identities = 27/27 (100%), Positives = 27/27
(100%)

| | | | |
|---|---|---|---|
| Query: | 1 | MFKHAEEARGRGIKIIIAGAGGAAHLP | 27 |
| | | MFKHAEEARGRGIKIIIAGAGGAAHLP | |
| Sbjct: | 87 | MFKHAEEARGRGIKIIIAGAGGAAHLP | 113 |

[12658] Based on this analysis, it was predicted that these proteins and their epitopes could be useful antigens for vaccines or diagnostics.

### EXAMPLE 2337

[12659] A DNA sequence (GBSx2488) was identified in S. agalactiae <SEQ ID 7165> which encodes the amino acid sequence <SEQ ID 7166>. Analysis of this protein sequence reveals the following:

| Possible site: 43 | | | | |
|---|---|---|---|---|
| >>> Seems to have an uncleavable N-term signal seq | | | | |
| | INTEGRAL | Likelihood = −6.85 | Transmembrane | 58-74 (53-80) |
| | INTEGRAL | Likelihood = −5.79 | Transmembrane | 103-119 (101-122) |

```
----- Final Results -----
                              bacterial membrane --- Certainty = 0.3739(Affirmative) < succ>
                                bacterial outside --- Certainty = 0.0000(Not Clear) < succ>
                            bacterial cytoplasm --- Certainty = 0.0000(Not Clear) < succ>
```

[12660] There is also homology to SEQ IDs 880 and 9278.

[12661] Based on this analysis, it was predicted that this protein and its epitopes, could be useful antigens for vaccines or diagnostics.

### EXAMPLE 2338

[12662] A DNA sequence (GBSx2489) was identified in S. agalactiae <SEQ ID 7167> which encodes the amino acid sequence <SEQ ID 7168>. This protein is predicted to be short chain alcohol dehydrogenase. Analysis of this protein sequence reveals the following:

```
Possible site: 16
>>> Seems to have no N-terminal signal sequence
----- Final Results -----
                            bacterial cytoplasm --- Certainty = 0.1742(Affirmative) < succ>
                              bacterial membrane --- Certainty = 0.0000(Not Clear) < succ>
                                bacterial outside --- Certainty = 0.0000(Not Clear) < succ>
```

[12663] A related GBS nucleic acid sequence <SEQ ID 9357> which encodes amino acid sequence <SEQ ID 9358> was also identified.

[12664] The protein has homology with the following sequences in the GENPEPT database.

| >GP: AAD06605 GB: AE001530 putative oxidoreductase [Helicobacter | | | |
|---|---|---|---|
| pylori J99] | | | |
| Identities = 68/94 (72%), Positives = 79/94 (83%) | | | |
| Query: | 4 | IDLLVNNAGLALGLDKSYEADFGDWMTMINTNVVGLIYLTRCILPKMVEVNRGLIINLGS | 63 |
| | | ID L+NNAGLALGL+K+YE + DW MI+TN+ GL++LTR ILP M+E ++G IINLGS | |
| Sbjct: | 76 | IDALINNAGLALGLNKAYECELDDWEVMIDTNIKGLLHLTRLILPSMIEHDQGTIINLGS | 135 |
| Query: | 64 | XAGTIPYPGANVYGASKAFVKQFSLNLRADLAGT | 97 |
| | | AGT YPG NVYGASKAFVKQFSLNLRADLAGT | |
| Sbjct: | 136 | IAGTYAYPGGNVYGASKAFVKQFSLNLRADLAGT | 169 |

[12665] A related DNA sequence was identified in S. pyogenes <SEQ ID 7169> which encodes the amino acid sequence <SEQ ID 7170>. Analysis of this protein sequence reveals the following:

```
Possible site: 18
>>> Seems to have an uncleavable N-term signal seq
----- Final Results -----
                              bacterial membrane --- Certainty = 0.0000(Not Clear) < succ>
                                bacterial outside --- Certainty = 0.0000(Not Clear) < succ>
                            bacterial cytoplasm --- Certainty = 0.0000(Not Clear) < succ>
```

[12666] A related sequence was also identified in GAS <SEQ ID 9121> which encodes the amino acid sequence <SEQ ID 9122>. Analysis of this protein sequence reveals the following:

```
Possible site: 12
>>> Seems to have an uncleavable N-term signal seq
----- Final Results -----
                              bacterial membrane --- Certainty = 0.0000(Not Clear) < succ>
                                bacterial outside --- Certainty = 0.0000(Not Clear) < succ>
                            bacterial cytoplasm --- Certainty = 0.0000(Not Clear) < succ>
```

[12667] An alignment of the GAS and GBS proteins is shown below.

| Identities = 78/96 (81%), Positives = 87/96 (90%) | | | |
|---|---|---|---|
| Query: | 2 | QSIDLLVNNAGLALGLDKSYEADFGDWMTMINTNVVGLIYLTRCILPKMVEVNRGLIINL | 61 |
| | | Q I +LVNNAGLALGLDK+YEADF +WMTMINTN+VGLIYLTR +LP MV + G+IINL | |
| Sbjct: | 82 | QDITILVNNAGLALGLDKAYEADFENWMTMINTNIVGLIYLTRQLLPHMVSKDDGIIINL | 141 |
| Query: | 62 | GSXAGTIPYPGANVYGASKAFVKQFSLNLRADLAGT | 97 |
| | | GS AGTIPYPGAN+YGASKAFVKQFSLNLRADLAG+ | |
| Sbjct: | 142 | GSTAGTIPYPGANIYGASKAFVKQFSLNLRADLAGS | 177 |

[12668] Based on this analysis, it was predicted that these proteins and their epitopes could be useful antigens for vaccines or diagnostics.

### EXAMPLE 2339

[12669] A DNA sequence (GBSx2492) was identified in S. agalactiae <SEQ ID 7171> which encodes the amino acid sequence <SEQ ID 7172>. This protein is predicted to be mercuric reductase. Analysis of this protein sequence reveals the following:

```
Possible site: 53
>>> Seems to have no N-terminal signal sequence
----- Final Results -----
                            bacterial cytoplasm --- Certainty = 0.2115(Affirmative) < succ>
                              bacterial membrane --- Certainty = 0.0000(Not Clear) < succ>
                                bacterial outside --- Certainty = 0.0000(Not Clear) < succ>
```

[12670] The protein has homology with the following sequences in the GENPEPT database.

| >GP: CAC14663 GB: Y10855 mercuric reductase [Bacillus licheniformis] | | | |
|---|---|---|---|
| Identities = 68/104 (65%), Positives = 82/104 (78%) | | | |
| Query: | 1 | MNKFKVNISGMTCTGCEKHVESALEKIGAKNIESSYRRGEAVFELPDDIEVESAIKAIDE | 60 |
| | | M K++VN+ GMTCTGCE+HV ALE +GAK IE YRRGEAVFELP+ +EVE+A KAI E | |
| Sbjct: | 1 | MKKYRVNVQGMTCTGCEEHVAVALENMGAKRIEVDYRRGEAVFELPNGLEVETAKKAIAE | 60 |
| Query: | 61 | ANYQAGEIEEVSSLENVALINEDNYDLLIIGSGAAAFSSAIKAI | 104 |
| | | A YQ GE EEV S E + L +E +YD +IIGSG AAFSSAI+A+ | |
| Sbjct: | 61 | AKYQPGEAEEVQSQELIQLGDEGDYDYIIIGSGGAAFSSAIEAV | 104 |

[12671] No corresponding DNA sequence was identified in S. pyogenes.

[12672] Based on this analysis, it was predicted that this protein and its epitopes, could be useful antigens for vaccines or diagnostics.

### EXAMPLE 2340

[12673] A DNA sequence (GBSx2494) was identified in S. agalactiae <SEQ ID 7173> which encodes the amino acid sequence <SEQ ID 7174>. Analysis of this protein sequence reveals the following:

```
Possible site: 58
>>> Seems to have no N-terminal signal sequence
----- Final Results -----
                            bacterial cytoplasm --- Certainty = 0.3341(Affirmative) < succ>
                              bacterial membrane --- Certainty = 0.0000(Not Clear) < succ>
                                bacterial outside --- Certainty = 0.0000(Not Clear) < succ>
```

[12674] The protein has no significant homology with any sequences in the GENPEPT database.

[12675] No corresponding DNA sequence was identified in S. pyogenes.

[12676] Based on this analysis, it was predicted that this protein and its epitopes, could be useful antigens for vaccines or diagnostics.

### EXAMPLE 2341

[12677] A DNA sequence (GBSx2495) was identified in S. agalactiae <SEQ ID 7175> which encodes the amino acid sequence <SEQ ID 7176>. Analysis of this protein sequence reveals the following:

```
Possible site: 31
>>> Seems to have no N-terminal signal sequence
----- Final Results -----
                            bacterial cytoplasm --- Certainty = 0.4989(Affirmative) < succ>
                              bacterial membrane --- Certainty = 0.0000(Not Clear) < succ>
                                bacterial outside --- Certainty = 0.0000(Not Clear) < succ>
```

[12678] The protein has no significant homology with any sequences in the GENPEPT database.

[12679] No corresponding DNA sequence was identified in S. pyogenes.

[12680] Based on this analysis, it was predicted that this protein and its epitopes, could be useful antigens for vaccines or diagnostics.

### EXAMPLE 2342

[12681] A DNA sequence (GBSx2496) was identified in S. agalactiae <SEQ ID 7177> which encodes the amino acid sequence <SEQ ID 7178>. Analysis of this protein sequence reveals the following:

```
Possible site: 30
>>> Seems to have no N-terminal signal sequence
----- Final Results -----
                            bacterial cytoplasm --- Certainty = 0.2569(Affirmative) < succ>
                              bacterial membrane --- Certainty = 0.0000(Not Clear) < succ>
                                bacterial outside --- Certainty = 0.0000(Not Clear) < succ>
```

[12682] Based on this analysis, it was predicted that this protein and its epitopes, could be useful antigens for vaccines or diagnostics.

### EXAMPLE 2343

[12683] A DNA sequence (GBSx2497) was identified in S. agalactiae <SEQ ID 7179> which encodes the amino acid sequence <SEQ ID 7180>. This protein is predicted to be DNA polymerase III alpha subunit (dnaE). Analysis of this protein sequence reveals the following:

```
Possible site: 60
>>> Seems to have no N-terminal signal sequence
----- Final Results -----
                            bacterial cytoplasm --- Certainty = 0.3124(Affirmative) < succ>
                              bacterial membrane --- Certainty = 0.0000(Not Clear) < succ>
                                bacterial outside --- Certainty = 0.0000(Not Clear) < succ>
```

[12684] A related DNA sequence was identified in S. pyogenes <SEQ ID 4095> which encodes the amino acid sequence <SEQ ID 4096>. Analysis of this protein sequence reveals the following:

```
Possible site: 36
>>> Seems to have no N-terminal signal sequence
----- Final Results -----
                            bacterial cytoplasm --- Certainty = 0.2600(Affirmative) < succ>
                              bacterial membrane --- Certainty = 0.0000(Not Clear) < succ>
                                bacterial outside --- Certainty = 0.0000(Not Clear) < succ>
```

[12685] An alignment of the GAS and GBS proteins is shown below.

| Identities = 186/237 (78%), Positives = 214/237 (89%) | | | |
|---|---|---|---|
| Query: | 10 | DPVKHNLIFERFLNEERYSMPDIDIDLPDIYRGEFLRYVRNRYGSMHSAQIVTFSTFGAK | 69 |
| | | DPV+H+L+FERFLN+ERYSMPDIDIDLPDIYR EFLRYVRNRYGS HSAQIVTFSTFG K | |
| Sbjct: | 321 | DPVQHDLLFERFLNKERYSMPDIDIDLPDIYRSEFLRYVRNRYGSDHSAQIVTFSTFGPK | 380 |
| Query: | 70 | QAIRDVFKRFGASEYELTNITKKIHFRDNLTSVYNRNLAFRQIIDSKIEYQKAYDIAKRI | 129 |
| | | QAIRDVFKRFG EYELTN+TKKI F+D+L +VY ++++FRQ+I+S+ E+QKA+ IAKRI | |
| Sbjct: | 381 | QAIRDVFKRFGVPEYELTNLTKKIGFKDSLATVYEKSISFRQVINSRTEFQKAFAIAKRI | 440 |
| Query: | 130 | EGNPRQTSIHAAGVVMSDDLLTDHIPLKNGEDMMITQYDASSVEDNGLLKMDFLGLRNLT | 189 |
| | | EGNPRQTSIHAAG+VMSDD LT+HIPLK+G+DMMITQYDA +VE NGLLKMDFLGLRNLT | |
| Sbjct: | 441 | EGNPRQTSIHAAGIVMSDDALTNHIPLKSGDDMMITQYDAHAVEANGLLKMDFLGLRNLT | 500 |
| Query: | 190 | FVQKMKEKVDKDYGISIQLETIDLEDKETLKLFAAGQTKGIFQFEQSGAINLLRRIR | 246 |
| | | FVQKM+EKV KDYG I + IDLED +TL LFA G TKGIFQFEQ+GAINLL+RI+ | |
| Sbjct: | 501 | FVQKMQEKVAKDYGCQIDITAIDLEDPQTLALFAKGDTKGIFQFEQNGAINLLKRIK | 557 |

[12686] Based on this analysis, it was predicted that these proteins and their epitopes could be useful antigens for vaccines or diagnostics.

### EXAMPLE 2344

[12687] A DNA sequence (GBSx2498) was identified in S. agalactiae <SEQ ID 7181> which encodes the amino acid sequence <SEQ ID 7182>. This protein is predicted to be a methylase. Analysis of this protein sequence reveals the following:

```
Possible site: 60
>>> Seems to have no N-terminal signal sequence
----- Final Results -----
                            bacterial cytoplasm --- Certainty = 0.2121(Affirmative) < succ>
                              bacterial membrane --- Certainty = 0.0000(Not Clear) < succ>
                                bacterial outside --- Certainty = 0.0000(Not Clear) < succ>
```

[12688] The protein has homology with the following sequences in the GENPEPT database.

| >GP: AAG21729 GB: AF116907 putative methylase [Corynebacterium hoagii] | | | |
|---|---|---|---|
| Identities = 48/160 (30%), Positives = 85/160 (53%), Gaps = 6/160 (3%) | | | |
| Query: | 97 | EPDDSENGHNDTDLEETDNQIPEEEVVETIPEIPVTDFYFPEDLTDFYPKTARDKVETNI | 156 |
| | | EP+ + E + + ++E +P TDF D+ P A+ +V NI | |
| Sbjct: | 1236 | EPEAPTQPEAASAAETAEPAVEQQEPRAGPQSVPATDFALGTDV--HVPSGAKARVRANI | 1293 |
| Query: | 157 | VAIRLVKNLEVEHRNASPSEQELLAKYVGWGGLANEFFDD---YNPKFSKEREELKSLVT | 213 |
| | | A RLV L+ + R A+ EQ +LA++ GWG + E FD+ + +++ ER L L+ | |
| Sbjct: | 1294 | AAARLVLELDEQQRPATAEEQAVLAQWSGWGAVP-EVFDNRSKFLSEWADERAALLDLLG | 1352 |
| Query: | 214 | DKEYSDMKQSSLTAYYTDPSLIRQMWGIVERDGFTGWQIL | 253 |
| | | +K +S ++++L A+YTDP+++ ++W V+R G +L | |
| Sbjct: | 1353 | EKGFSQARETTLNAHYTDPAIVGELWRAVQRAGLPDGALL | 1392 |

[12689] No corresponding DNA sequence was identified in S. pyogenes.

[12690] Based on this analysis, it was predicted that this protein and its epitopes, could be useful antigens for vaccines or diagnostics.

### EXAMPLE 2345

[12691] A DNA sequence (GBSx2499) was identified in S. agalactiae <SEQ ID 7183> which encodes the amino acid sequence <SEQ ID 7184>. Analysis of this protein sequence reveals the following:

```
Possible site: 34
>>> Seems to have no N-terminal signal sequence
----- Final Results -----
                            bacterial cytoplasm --- Certainty = 0.1111(Affirmative) < succ>
                              bacterial membrane --- Certainty = 0.0000(Not Clear) < succ>
                                bacterial outside --- Certainty = 0.0000(Not Clear) < succ>
```

[12692] The protein has no significant homology with any sequences in the GENPEPT database.

[12693] No corresponding DNA sequence was identified in S. pyogenes.

[12694] Based on this analysis, it was predicted that this protein and its epitopes, could be useful antigens for vaccines or diagnostics.

### EXAMPLE 2346

[12695] A DNA sequence (GBSx2501) was identified in S. agalactiae <SEQ ID 7185> which encodes the amino acid sequence <SEQ ID 7186>. Analysis of this protein sequence reveals the following:

```
Possible site: 39
>>> Seems to have no N-terminal signal sequence
----- Final Results -----
                            bacterial cytoplasm --- Certainty = 0.4752(Affirmative) < succ>
                              bacterial membrane --- Certainty = 0.0000(Not Clear) < succ>
                                bacterial outside --- Certainty = 0.0000(Not Clear) < succ>
```

[12696] The protein has homology with the following sequences in the GENPEPT database.

| >GP: CAA61516 GB: X89232 DNA-directed RNA polymerase [Pediococcus | | | |
|---|---|---|---|
| acidilactici] | | | |
| Identities = 48/53 (90%), Positives = 52/53 (97%) | | | |
| Query: | 5 | KKPETINYRTLKPEREGLFDEVIFGPTKDWECACGKYKRIRYKGIICDRCGVE | 57 |
| | | KKPETINYRTLKPE++GLFDE IFGPTKD+ECACGKYKRIRYKGI+CDRCGVE | |
| Sbjct: | 29 | KKPETINYRTLKPEKDGLFDERIFGPTKDYECACGKYKRIRYKGIVCDRCGVE | 81 |

[12697] There is also homology to SEQ ID 384.

[12698] Based on this analysis, it was predicted that these proteins and their epitopes could be useful antigens for vaccines or diagnostics.

### EXAMPLE 2347

[12699] A DNA sequence (GBSx2502) was identified in S. agalactiae <SEQ ID 7187> which encodes the amino acid sequence <SEQ ID 7188>. Analysis of this protein sequence reveals the following:

```
Possible site: 22
>>> Seems to have no N-terminal signal sequence
----- Final Results -----
                            bacterial cytoplasm --- Certainty = 0.3080(Affirmative) < succ>
                              bacterial membrane --- Certainty = 0.0000(Not Clear) < succ>
                                bacterial outside --- Certainty = 0.0000(Not Clear) < succ>
```

[12700] The protein has homology with the following sequences in the GENPEPT database.

| >GP: AAC00282 GB: AF008220 YtlR [Bacillus subtilis] | | | |
|---|---|---|---|
| Identities = 61/216 (28%), Positives = 98/216 (45%), Gaps = 28/216 (12%) | | | |
| Query: | 8 | IPCTYYPVGSGNDFARALKIPNL---------KETLTAIQTERLKEINCFIYDKGLIL-- | 56 |
| | | I ++ P G+ NDF+R I + K LT +T L +N F+ DK IL | |
| Sbjct: | 86 | IELSFVPAGAYNDFSRGFSIKKIDLIQEIKKVKRPLT--RTFHLGSVN-FLQDKSQILYF | 142 |
| Query: | 57 | -NSLDLGFAAYVVWKASNSKIKNILNRYRLGKITYIVIAIKSLLHSSK------VQVLVE | 109 |
| | | N + +GF AYV KA ++ + RL + Y + S LH+S + E | |
| Sbjct: | 143 | MNHIGIGFDAYVNKKAMEFPLRRVFLFLRLRFLVYPL----SHLHASATFKPFTLACTTE | 198 |
| Query: | 110 | GETGQQIKLNDLYFFALANNTYFGGGITIWPKASALTAELDMVYAKGHTFLKRLSILLSL | 169 |
| | | ET + +D++F ++N+ ++GGG+ P A+ D+V + FLK+ +L + | |
| Sbjct: | 199 | DETRE---FHDVWFAVVSNHPFYGGGMKAAPLANPREKTFDIVIVENQPFLKKYWLLCLM | 255 |
| Query: | 170 | VFKRHTTSKSIKHQTFKAMTVYFPKNSLIEIDGEIV | 205 |
| | | F +HT + K +T Y DGEI+ | |
| Sbjct: | 256 | AFGKHTKMDGVTMFKAKDITFYTKDKIPFHADGEIM | 291 |

[12701] No corresponding DNA sequence was identified in S. pyogenes.

[12702] Based on this analysis, it was predicted that this protein and its epitopes, could be useful antigens for vaccines or diagnostics.

### EXAMPLE 2348

[12703] A DNA sequence (GBSx2503) was identified in S. agalactiae <SEQ ID 7189> which encodes the amino acid sequence <SEQ ID 7190>. This protein is predicted to be protease subunit HflC (hflC). Analysis of this protein sequence reveals the following:

```
Possible site: 18
>>> Seems to have no N-terminal signal sequence
----- Final Results -----
                            bacterial cytoplasm --- Certainty = 0.1809(Affirmative) < succ>
                              bacterial membrane --- Certainty = 0.0000(Not Clear) < succ>
                                bacterial outside --- Certainty = 0.0000(Not Clear) < succ>
```

[12704] The protein has homology with the following sequences in the GENPEPT database.

| >GP: AAG08326 GB: AE004907 protease subunit HflC [Pseudomonas aeruginosa] | | | |
|---|---|---|---|
| Identities = 182/202 (90%), Positives = 194/202 (95%) | | | |
| Query: | 1 | MSQTERAVLLQFGKVVQTDVKPGLHVKVPYVNQVRKFDGRLLTLDAPTQRFLTLEKKAVM | 60 |
| | | + QTERAV+L+FG+VV++DVKPGLH K+PYVNQVRKFD RLLTLDAPTQRFLTLEKKAVM | |
| Sbjct: | 26 | VQQTERAVMLRFGRVVESDVKPGLHFKIPYVNQVRKFDARLLTLDAPTQRFLTLEKKAVM | 85 |
| Query: | 61 | VDAYAKWRVKDAERFYTATSGLKQIADERLSRRLESGLRDQFGKRTLHEVVSGERDALMA | 120 |
| | | VDAYAKWRV DAERFYTATSGLKQIADERLSRRLE+GLRDQFGKRTLHEVVSGERDALM | |
| Sbjct: | 86 | VDAYAKWRVADAERFYTATSGLKQIADERLSRRLEAGLRDQFGKRTLHEVVSGERDALMG | 145 |
| Query: | 121 | DITGSLNRMAEKELGIEVLDVRVKAIDLPKEVNRSVFERMSTEREREAREHRAKGNELGE | 180 |
| | | DIT SLNRMA+KELGIEV+DVRVKAIDLPKEVNRSVFERMSTEREREAREHRAKG EL E | |
| Sbjct: | 146 | DITASLNRMAQKELGIEVIDVRVKAIDLPKEVNRSVFERMSTEREREAREHRAKGRELAE | 205 |
| Query: | 181 | GIRADADRQRRVLLAEAYRESE | 202 |
| | | GIRADADRQRRV++AEAYRESE | |
| Sbjct: | 206 | GIRADADRQRRVIVAEAYRESE | 227 |

[12705] No corresponding DNA sequence was identified in S. pyogenes.

[12706] Based on this analysis, it was predicted that this protein and its epitopes, could be useful antigens for vaccines or diagnostics.

### EXAMPLE 2349

[12707] A DNA sequence (GBSx2504) was identified in S. agalactiae <SEQ ID 7191> which encodes the amino acid sequence <SEQ ID 7192>. Analysis of this protein sequence reveals the following:

```
Possible site: 24
>>> Seems to have an uncleavable N-term signal seq
----- Final Results -----
                              bacterial membrane --- Certainty = 0.0000(Not Clear) < succ>
                                bacterial outside --- Certainty = 0.0000(Not Clear) < succ>
                            bacterial cytoplasm --- Certainty = 0.0000(Not Clear) < succ>
```

[12708] The protein has no significant homology with any sequences in the GENPEPT database.

[12709] No corresponding DNA sequence was identified in S. pyogenes.

[12710] Based on this analysis, it was predicted that this protein and its epitopes, could be useful antigens for vaccines or diagnostics.

### EXAMPLE 2350

[12711] A DNA sequence (GBSx2505) was identified in S. agalactiae <SEQ ID 7193> which encodes the amino acid sequence. <SEQ ID 7194>. This protein is predicted to be ABC transporter (ATP-binding; daunorubicin resistance). Analysis of this protein sequence reveals the following:

```
Possible site: 56
>>> Seems to have no N-terminal signal sequence
----- Final Results -----
                            bacterial cytoplasm --- Certainty = 0.1846(Affirmative) < succ>
                              bacterial membrane --- Certainty = 0.0000(Not Clear) < succ>
                                bacterial outside --- Certainty = 0.0000(Not Clear) < succ>
```

[12712] The protein has homology with the following sequences in the GENPEPT database.

| >GP: CAB15892 GB: Z99123 similar to ABC transporter | | | |
|---|---|---|---|
| (ATP-binding protein) [Bacillus subtilis] | | | |
| Identities = 88/231 (38%), Positives = 132/231 (57%), | | | |
| Gaps = 13/231 (5%) | | | |
| Query: | 10 | QVIGYLPDVPKFYDYMTAQEYLQLC---AGLAQNKTSLPIADLLEQVGLADN-QQRISTY | 65 |
| | | ++IGYLP P FY +MTA E+L +GL++ K I ++LE VGL + +RI Y | |
| Sbjct: | 69 | RLIGYLPQYPAFYSWMTANEFLTFAGRLSGLSKRKCQEKIGEMLEFVGLHEAAHKRIGGY | 128 |
| Query: | 66 | SRGMKQRLGLAQALIHXXKILICDEPTSALDPQGRQEILSIISQLRGQKTVIFSTHILSD | 125 |
| | | S GMKQRLGLAQAL+H K LI DEP SALDP GR E+L ++ +L+ V+FSTH+L D | |
| Sbjct: | 129 | SGGMKQRLGLAQALLHKPKFLILDEPVSALDPTGRFEVLDMMRELKKHMAVLFSTHVLHD | 188 |
| Query: | 126 | VEKVCDQVLILTKSGIH---NLEDLRDKASASVNQLNLLIKVSDNEAQKLALRFPLNQKD | 182 |
| | | E+VCDQV+I+ I L++L+ + +V L++ K+ +K + + + | |
| Sbjct: | 189 | AEQVCDQVVIMKNGEISWKGELQELKQQQQTNVFTLSVKEKLEGWLEEKPYVSAIVYKNP | 248 |
| Query: | 183 | QYYKVHLELSEANNREQALASFYRYLVEQEITPYFIELLEDSLEDFYLEVI | 233 |
| | | + EL + + L+ + + +T E +SLED YL+V+ | |
| Sbjct: | 249 | S--QAVFELPDIHAGRSLLSD----CIRKGLTVTRFEQKTESLEDVYLKVV | 293 |

[12713] There is also homology to SEQ ID 686.

[12714] Based on this analysis, it was predicted that this protein and its epitopes, could be useful antigens for vaccines or diagnostics.

### EXAMPLE 2351

[12715] A DNA sequence (GBSx2506) was identified in S. agalactiae <SEQ ID 7195> which encodes the amino acid sequence <SEQ ID 7196>. Analysis of this protein sequence reveals the following:

```
Possible site: 52
>>> Seems to have no N-terminal signal sequence
----- Final Results -----
                            bacterial cytoplasm --- Certainty = 0.0679(Affirmative) < succ>
                              bacterial membrane --- Certainty = 0.0000(Not Clear) < succ>
                                bacterial outside --- Certainty = 0.0000(Not Clear) < succ>
```

[12716] The protein has homology with glycine-rich cell wall proteins (e.g. GB:AL161589—the glycine-rich cell wall protein from Arabidopsis thaliania) and to SEQ ID 6882.

[12717] Based on this analysis, it was predicted that this protein and its epitopes, could be useful antigens for vaccines or diagnostics.

### EXAMPLE 2352

[12718] A DNA sequence (GBSx2507) was identified in S. agalactiae <SEQ ID 7197> which encodes the amino acid sequence <SEQ ID 7198>. Analysis of this protein sequence reveals the following:

```
Possible site: 35
>>> Seems to have no N-terminal signal sequence
----- Final Results -----
                            bacterial cytoplasm --- Certainty = 0.2890(Affirmative) < succ>
                              bacterial membrane --- Certainty = 0.0000(Not Clear) < succ>
                                bacterial outside --- Certainty = 0.0000(Not Clear) < succ>
```

[12719] The protein has no significant homology with any sequences in the GENPEPT database.

[12720] No corresponding DNA sequence was identified in S. pyogenes.

[12721] Based on this analysis, it was predicted that this protein and its epitopes, could be useful antigens for vaccines or diagnostics.

### EXAMPLE 2353

[12722] A DNA sequence (GBSx2508) was identified in S. agalactiae <SEQ ID 7199> which encodes the amino acid sequence <SEQ ID 7200>. Analysis of this protein sequence reveals the following:

```
Possible site: 60
>>> Seems to have no N-terminal signal sequence
----- Final Results -----
                            bacterial cytoplasm --- Certainty = 0.2410(Affirmative) < succ>
                              bacterial membrane --- Certainty = 0.0000(Not Clear) < succ>
                                bacterial outside --- Certainty = 0.0000(Not Clear) < succ>
```

[12723] A related GBS nucleic acid sequence <SEQ ID 9329> which encodes amino acid sequence <SEQ ID 9330> was also identified.

[12724] The protein has no significant homology with any sequences in the GENPEPT database.

[12725] No corresponding DNA sequence was identified in S. pyogenes.

[12726] SEQ ID 9330 (GBS678) was expressed in E. coli as a His-fusion product. SDS-PAGE analysis of total cell extract is shown in FIG. 163 (lane 18; MW 53 kDa), FIG. 164 (lane 2 & 3; MW 53 kDa) and FIG. 188 (lane 7; MW 53 kDa). Purified protein is shown in FIG. 242, lanes 6 & 7.

[12727] Based on this analysis, it was predicted that this protein and its epitopes, could be useful antigens for vaccines or diagnostics.

### EXAMPLE 2354

[12728] A DNA sequence (GBSx2509) was identified in S. agalactiae <SEQ ID 7201> which encodes the amino acid sequence <SEQ ID 7202>. This protein is predicted to be surface protein Rib. Analysis of this protein sequence reveals the following:

```
Possible site: 24
>>> Seems to have no N-terminal signal sequence
----- Final Results -----
                            bacterial cytoplasm --- Certainty = 0.2025(Affirmative) < succ>
                              bacterial membrane --- Certainty = 0.0000(Not Clear) < succ>
                                bacterial outside --- Certainty = 0.0000(Not Clear) < succ>
```

[12729] No corresponding DNA sequence was identified in S. pyogenes.

[12730] Based on this analysis, it was predicted that this protein and its epitopes, could be useful antigens for vaccines or diagnostics.

### EXAMPLE 2355

[12731] A DNA sequence (GBSx2510) was identified in S. agalactiae <SEQ ID 7203> which encodes the amino acid sequence <SEQ ID 7204>. This protein is predicted to be surface protein Rib. Analysis of this protein sequence reveals the following:

```
Possible site: 24
>>> Seems to have no N-terminal signal sequence
----- Final Results -----
                            bacterial cytoplasm --- Certainty = 0.1892(Affirmative) < succ>
                              bacterial membrane --- Certainty = 0.0000(Not Clear) < succ>
                                bacterial outside --- Certainty = 0.0000(Not Clear) < succ>
```

[12732] No corresponding DNA sequence was identified in S. pyogenes.

[12733] Based on this analysis, it was predicted that this protein and its epitopes, could be useful antigens for vaccines or diagnostics.

### EXAMPLE 2356

[12734] A DNA sequence (GBSx2511) was identified in S. agalactiae <SEQ ID 7205> which encodes the amino acid sequence <SEQ ID 7206>. This protein is predicted to be surface protein Rib. Analysis of this protein sequence reveals the following:

```
Possible site: 24
>>> Seems to have no N-terminal signal sequence
----- Final Results -----
                            bacterial cytoplasm --- Certainty = 0.1892(Affirmative) < succ>
                              bacterial membrane --- Certainty = 0.0000(Not Clear) < succ>
                                bacterial outside --- Certainty = 0.0000(Not Clear) < succ>
```

[12735] No corresponding DNA sequence was identified in S. pyogenes.

[12736] Based on this analysis, it was predicted that this protein and its epitopes, could be useful antigens for vaccines or diagnostics.

### EXAMPLE 2357

[12737] A DNA sequence (GBSx2512) was identified in S. agalactiae <SEQ ID 7207> which encodes the amino acid sequence <SEQ ID 7208>. Analysis of this protein sequence reveals the following:

```
Possible site: 28
>>> Seems to have no N-terminal signal sequence
----- Final Results -----
                            bacterial cytoplasm --- Certainty = 0.0999(Affirmative) < succ>
                              bacterial membrane --- Certainty = 0.0000(Not Clear) < succ>
                                bacterial outside --- Certainty = 0.0000(Not Clear) < succ>
```

[12738] The protein has no significant homology with any sequences in the GENPEPT database.

[12739] No corresponding DNA sequence was identified in S. pyogenes.

[12740] Based on this analysis, it was predicted that this protein and its epitopes, could be useful antigens for vaccines or diagnostics.

### EXAMPLE 2358

[12741] A DNA sequence (GBSx2514) was identified in S. agalactiae <SEQ ID 7209> which encodes the amino acid sequence <SEQ ID 7210>. This protein is predicted to be surface protein Rib. Analysis of this protein sequence reveals the following:

```
Possible site: 24
>>> Seems to have no N-terminal signal sequence
----- Final Results -----
                            bacterial cytoplasm --- Certainty = 0.1892(Affirmative) < succ>
                              bacterial membrane --- Certainty = 0.0000(Not Clear) < succ>
                                bacterial outside --- Certainty = 0.0000(Not Clear) < succ>
```

[12742] No corresponding DNA sequence was identified in S. pyogenes.

[12743] Based on this analysis, it was predicted that this protein and its epitopes, could be useful antigens for vaccines or diagnostics.

### EXAMPLE 2359

[12744] A DNA sequence (GBSx2515) was identified in S. agalactiae <SEQ ID 7211> which encodes the amino acid sequence <SEQ ID 7212>. Analysis of this protein sequence reveals the following:

```
Possible site: 19
>>> Seems to have no N-terminal signal sequence
----- Final Results -----
                            bacterial cytoplasm --- Certainty = 0.2041(Affirmative) < succ>
                              bacterial membrane --- Certainty = 0.0000(Not Clear) < succ>
                                bacterial outside --- Certainty = 0.0000(Not Clear) < succ>
```

[12745] The protein has no significant homology with any sequences in the GENPEPT database.

[12746] No corresponding DNA sequence was identified in S. pyogenes.

[12747] Based on this analysis, it was predicted that this protein and its epitopes, could be useful antigens for vaccines or diagnostics.

### EXAMPLE 2360

[12748] A DNA sequence (GBSx2516) was identified in S. agalactiae <SEQ ID 7213> which encodes the amino acid sequence <SEQ ID 7214>. This protein is predicted to be 30S ribosomal protein S6 (rpsF). Analysis of this protein sequence reveals the following:

```
Possible site: 51
>>> Seems to have no N-terminal signal sequence
----- Final Results -----
                            bacterial cytoplasm --- Certainty = 0.3607(Affirmative) < succ>
                              bacterial membrane --- Certainty = 0.0000(Not Clear) < succ>
                                bacterial outside --- Certainty = 0.0000(Not Clear) < succ>
```

[12749] A related GBS nucleic acid sequence <SEQ ID 9423> which encodes amino acid sequence <SEQ ID 9424> was also identified.

[12750] The protein has homology with the following sequences in the GENPEPT database.

| >GP: CAB16128 GB: Z99124 ribosomal protein S6 (BS9) [Bacillus subtilis] | | | |
|---|---|---|---|
| Identities = 41/72 (56%), Positives = 58/72 (79%), Gaps = 1/72 (1%) | | | |
| Query: | 1 | MVARFDSILSDNGATVVESKDWEKRRLAYEIQDFTEGLYHIVNVEAEDAVALNEFDRLSK | 60 |
| | | ++ RF+++L+ NGA + +KDW KRRLAYEI DF +G Y IVNV++ DA A+ EFDRL+K | |
| Sbjct: | 22 | VIERFNNVLTSNGAEITGTKDWGKRRLAYEINDFRDGFYQIVNVQS-DAAAVQEFDRLAK | 80 |
| Query: | 61 | INGDILRHMIVK | 72 |
| | | I+ DI+RH++VK | |
| Sbjct: | 81 | ISDDIIRHIVVK | 92 |

[12751] A related DNA sequence was identified in S. pyogenes <SEQ ID 7215> which encodes the amino acid sequence <SEQ ID 7216>. Analysis of this protein sequence reveals the following:

```
Possible site: 40
>>> Seems to have no N-terminal signal sequence
----- Final Results -----
                            bacterial cytoplasm --- Certainty = 0.2720(Affirmative) < succ>
                              bacterial membrane --- Certainty = 0.0000(Not Clear) < succ>
                                bacterial outside --- Certainty = 0.0000(Not Clear) < succ>
```

[12752] An alignment of the GAS and GBS proteins is shown below.

| Identities = 66/74 (89%), Positives = 70/74 (94%) | | | |
|---|---|---|---|
| Query: | 1 | MVARFDSILSDNGATVVESKDWEKRRLAYEIQDFTEGLYHIVNVEAEDAVALNEFDRLSK | 60 |
| | | +VARFDSIL+DNGATVVESKDWEKRRLAYEI DF EGLYHIVN+EA DA ALNEFDRLSK | |
| Sbjct: | 22 | LVARFDSILTDNGATVVESKDWEKRRLAYEINDFREGLYHIVNLEATDAAALNEFDRLSK | 81 |
| Query: | 61 | INGDILRHMIVKVD | 74 |
| | | INGDILRHMIVK+D | |
| Sbjct: | 82 | INGDILRHMIVKLD | 95 |

[12753] Based on this analysis, it was predicted that these proteins and their epitopes could be useful antigens for vaccines or diagnostics.

### EXAMPLE 2361

[12754] A DNA sequence (GBSx2518) was identified in S. agalactiae <SEQ ID 7219> which encodes the amino acid sequence <SEQ ID 7220>. This protein is predicted to be surface protein Rib. Analysis of this protein sequence reveals the following:

```
Possible site: 49
>>> Seems to have no N-terminal signal sequence
----- Final Results -----
                            bacterial cytoplasm --- Certainty = 0.5289(Affirmative) < succ>
                              bacterial membrane --- Certainty = 0.0000(Not Clear) < succ>
                                bacterial outside --- Certainty = 0.0000(Not Clear) < succ>
```

[12755] No corresponding DNA sequence was identified in S. pyogenes.

[12756] Based on this analysis, it was predicted that this protein and its epitopes, could be useful antigens for vaccines or diagnostics.

### EXAMPLE 2362

[12757] A DNA sequence (GASx1R) was identified in S. pyogenes <SEQ ID 7221> which encodes the amino acid sequence <SEQ ID 7222>. Analysis of this protein sequence reveals the following:

```
Possible site: 33
>>> Seems to have an uncleavable N-term signal seq
----- Final Results -----
                              bacterial membrane --- Certainty = 0.0000(Not Clear) < succ>
                                bacterial outside --- Certainty = 0.0000(Not Clear) < succ>
                            bacterial cytoplasm --- Certainty = 0.0000(Not Clear) < succ>
```

[12758] No corresponding DNA sequence was identified in S. agalactiae.

[12759] The protein has no significant homology with any sequences in the GENPEPT database.

[12760] Based on this analysis, it was predicted that this GAS-specific protein and its epitopes, could be useful antigens for vaccines or diagnostics.

### EXAMPLE 2363

[12761] A DNA sequence (GASx5R) was identified in S. pyogenes <SEQ ID 7223> which encodes the amino acid sequence <SEQ ID 7224>. Analysis of this protein sequence reveals the following:

```
Possible site: 20
>>> Seems to have an uncleavable N-term signal seq
----- Final Results -----
                              bacterial membrane --- Certainty = 0.0000(Not Clear) < succ>
                                bacterial outside --- Certainty = 0.0000(Not Clear) < succ>
                            bacterial cytoplasm --- Certainty = 0.0000(Not Clear) < succ>
```

[12762] No corresponding DNA sequence was identified in S. agalactiae.

[12763] The protein has no significant homology with any sequences in the GENPEPT database.

[12764] Based on this analysis, it was predicted that this GAS-specific protein and its epitopes, could be useful antigens for vaccines or diagnostics.

### EXAMPLE 2364

[12765] A DNA sequence (GASx11) was identified in S. pyogenes <SEQ ID 7225> which encodes the amino acid sequence <SEQ ID 7226>. Analysis of this protein sequence reveals the following:

```
Possible site: 22
>>> Seems to have no N-terminal signal sequence
----- Final Results -----
                            bacterial cytoplasm --- Certainty = 0.2614(Affirmative) < succ>
                              bacterial membrane --- Certainty = 0.0000(Not Clear) < succ>
                                bacterial outside --- Certainty = 0.0000(Not Clear) < succ>
```

[12766] No corresponding DNA sequence was identified in S. agalactiae.

[12767] The protein has no significant homology with any sequences in the GENPEPT database.

[12768] Based on this analysis, it was predicted that this GAS-specific protein and its epitopes, could be useful antigens for vaccines or diagnostics.

### EXAMPLE 2365

[12769] A DNA sequence (GASx17) was identified in S. pyogenes <SEQ ID 7227> which encodes the amino acid sequence <SEQ ID 7228>. Analysis of this protein sequence reveals the following:

```
Possible site: 30
>>> Seems to have no N-terminal signal sequence
----- Final Results -----
                            bacterial cytoplasm --- Certainty = 0.2849(Affirmative) < succ>
                              bacterial membrane --- Certainty = 0.0000(Not Clear) < succ>
                                bacterial outside --- Certainty = 0.0000(Not Clear) < succ>
```

[12770] No corresponding DNA sequence was identified in S. agalactiae.

[12771] The protein has no significant homology with any sequences in the GENPEPT database.

[12772] Based on this analysis, it was predicted that this GAS-specific protein and its epitopes, could be useful antigens for vaccines or diagnostics.

### EXAMPLE 2366

[12773] A DNA sequence (GASx18) was identified in S. pyogenes <SEQ ID 7229> which encodes the amino acid sequence <SEQ ID 7230>. Analysis of this protein sequence reveals the following:

```
Possible site: 30
>>> Seems to have no N-terminal signal sequence
----- Final Results -----
                            bacterial cytoplasm --- Certainty = 0.2099(Affirmative) < succ>
                              bacterial membrane --- Certainty = 0.0000(Not Clear) < succ>
                                bacterial outside --- Certainty = 0.0000(Not Clear) < succ>
```

[12774] No corresponding DNA sequence was identified in S. agalactiae.

[12775] The protein has no significant homology with any sequences in the GENPEPT database.

[12776] Based on this analysis, it was predicted that this GAS-specific protein and its epitopes, could be useful antigens for vaccines or diagnostics.

### EXAMPLE 2367

[12777] A DNA sequence (GASx34) was identified in S. pyogenes <SEQ ID 7231> which encodes the amino acid sequence <SEQ ID 7232>. Analysis of this protein sequence reveals the following:

```
Possible site: 54
>>> Seems to have no N-terminal signal sequence
----- Final Results -----
                            bacterial cytoplasm --- Certainty = 0.0801(Affirmative) < succ>
                              bacterial membrane --- Certainty = 0.0000(Not Clear) < succ>
                                bacterial outside --- Certainty = 0.0000(Not Clear) < succ>
```

[12778] No corresponding DNA sequence was identified in S. agalactiae.

[12779] The protein has no significant homology with any sequences in the GENPEPT database.

[12780] Based on this analysis, it was predicted that this GAS-specific protein and its epitopes, could be useful antigens for vaccines or diagnostics.

### EXAMPLE 2368

[12781] A DNA sequence (GASx38) was identified in S. pyogenes <SEQ ID 7233> which encodes the amino acid sequence <SEQ ID 7234>. Analysis of this protein sequence reveals the following:

```
Possible site: 18
>>> Seems to have an uncleavable N-term signal seq
----- Final Results -----
                              bacterial membrane --- Certainty = 0.0000(Not Clear) < succ>
                                bacterial outside --- Certainty = 0.0000(Not Clear) < succ>
                            bacterial cytoplasm --- Certainty = 0.0000(Not Clear) < succ>
```

[12782] No corresponding DNA sequence was identified in S. agalactiae.

[12783] The protein has homology with the following sequences in the GENPEPT database:

| >GP: CAB12617 GB: Z99108 similar to protein-tyrosine phosphatase | | | |
|---|---|---|---|
| [Bacillus subtilis] | | | |
| Identities = 57/155 (36%), Positives = 88/155 (56%), Gaps = 12/155 (7%) | | | |
| Query: | 1 | MKKVCFVCLGNICRSPMAEFVMKSIVS----SDVMMIESRATSDWEHGNPIHSGTQSILK | 56 |
| | | M V FVCLGNICRSPMAE + + + + + +S W GNP H GTQ IL+ | |
| Sbjct: | 1 | MISVLFVCLGNICRSPMAEAIFRDLAAKKGLEGKIKADSAGIGGWHIGNPPHEGTQEILR | 60 |
| Query: | 57 | TYQINYDITKCSKQITITDFNTFDYIIGMDSDNVKNLKEMSQHQWDSKIYLFRE------ | 110 |
| | | I++D ++Q++ D + FDYII MD++N+ +L+ M+ + S I + | |
| Sbjct: | 61 | REGISFD-GMLARQVSEQDLDDFDYIIAMDAENIGSLRSMAGFKNTSHIKRLLDYVEDSD | 119 |
| Query: | 111 | -GGVPDPWYTNDFEETYQLVRKGCQDWLSRLMSKE | 144 |
| | | VPDP+YT +FEE QL++ GC+ L+ + ++ | |
| Sbjct: | 120 | LADVPDPYYTGNFEEVCQLIKTGCEQLLASIQKEK | 154 |

[12784] Based on this analysis, it was predicted that this GAS-specific protein and its epitopes, could be useful antigens for vaccines or diagnostics.

### EXAMPLE 2369

[12785] A DNA sequence (GASx42R) was identified in S. pyogenes <SEQ ID 7235> which encodes the amino acid sequence <SEQ ID 7236>. Analysis of this protein sequence reveals the following:

```
Possible site: 14
>>> Seems to have no N-terminal signal sequence
----- Final Results -----
                            bacterial cytoplasm --- Certainty = 0.4753(Affirmative) < succ>
                              bacterial membrane --- Certainty = 0.0000(Not Clear) < succ>
                                bacterial outside --- Certainty = 0.0000(Not Clear) < succ>
```

[12786] No corresponding DNA sequence was identified in S. agalactiae.

[12787] The protein has no significant homology with any sequences in the GENPEPT database.

[12788] Based on this analysis, it was predicted that this GAS-specific protein and its epitopes, could be useful antigens for vaccines or diagnostics.

### EXAMPLE 2370

[12789] A DNA sequence (GASx47R) was identified in S. pyogenes <SEQ ID 7237> which encodes the amino acid sequence <SEQ ID 7238>. Analysis of this protein sequence reveals the following:

```
Possible site: 58
>>> Seems to have no N-terminal signal sequence
----- Final Results -----
                            bacterial cytoplasm --- Certainty = 0.2014(Affirmative) < succ>
                              bacterial membrane --- Certainty = 0.0000(Not Clear) < succ>
                                bacterial outside --- Certainty = 0.0000(Not Clear) < succ>
```

[12790] No corresponding DNA sequence was identified in S. agalactiae.

[12791] The protein has no significant homology with any sequences in the GENPEPT database.

[12792] Based on this analysis, it was predicted that this GAS-specific protein and its epitopes, could be useful antigens for vaccines or diagnostics.

### EXAMPLE 2371

[12793] A DNA sequence (GASx53R) was identified in S. pyogenes <SEQ ID 7239> which encodes the amino acid sequence <SEQ ID 7240>. Analysis of this protein sequence reveals the following:

| Possible site: 45 | | | | |
|---|---|---|---|---|
| >>> Seems to have no N-terminal signal sequence | | | | |
| | INTEGRAL | Likelihood = −0.11 | Transmembrane | 56-72 (56-72) |

```
----- Final Results -----
                              bacterial membrane --- Certainty = 0.1044(Affirmative) < succ>
                                bacterial outside --- Certainty = 0.0000(Not Clear) < succ>
                            bacterial cytoplasm --- Certainty = 0.0000(Not Clear) < succ>
```

[12794] No corresponding DNA sequence was identified in S. agalactiae.

[12795] The protein has no significant homology with any sequences in the GENPEPT database.

[12796] Based on this analysis, it was predicted that this GAS-specific protein and its epitopes, could be useful antigens for vaccines or diagnostics.

### EXAMPLE 2372

[12797] A DNA sequence (GASx67R) was identified in S. pyogenes <SEQ ID 7241> which encodes the amino acid sequence <SEQ ID 7242>. Analysis of this protein sequence reveals the following:

```
Possible site: 39
>>> Seems to have no N-terminal signal sequence
----- Final Results -----
                            bacterial cytoplasm --- Certainty = 0.1610(Affirmative) < succ>
                              bacterial membrane --- Certainty = 0.0000(Not Clear) < succ>
                                bacterial outside --- Certainty = 0.0000(Not Clear) < succ>
```

[12798] No corresponding DNA sequence was identified in S. agalactiae.

[12799] The protein has no significant homology with any sequences in the GENPEPT database.

[12800] Based on this analysis, it was predicted that this GAS-specific protein and its epitopes, could be useful antigens for vaccines or diagnostics.

### EXAMPLE 2373

[12801] A DNA sequence (GASx75) was identified in S. pyogenes <SEQ ID 7243> which encodes the amino acid sequence <SEQ ID 7244>. Analysis of this protein sequence reveals the following:

```
Possible site: 31
>>> Seems to have no N-terminal signal sequence
----- Final Results -----
                            bacterial cytoplasm --- Certainty = 0.2803(Affirmative) < succ>
                              bacterial membrane --- Certainty = 0.0000(Not Clear) < succ>
                                bacterial outside --- Certainty = 0.0000(Not Clear) < succ>
```

[12802] No corresponding DNA sequence was identified in S. agalactiae.

[12803] The protein has homology with the following sequences in the GENPEPT database:

>GP: CAA41942 GB: X59250 ribosomal
protein B [Lactococcus lactis]
Identities = 37/38 (97%), Positives = 37/38 (97%)

| | | | |
|---|---|---|---|
| Query: | 1 | MKVRPSVKPICEYCKVIRRNGRVMVICPTNPKHKQRQG | 38 |
| | | MKVRPSVKPICEYCKVIRRNGRVMVICP NPKHKQRQG | |
| Sbjct: | 1 | MKVRPSVKPICEYCKVIRRNGRVMVICPANPKHKQRQG | 38 |

[12804] Based on this analysis, it was predicted that this GAS-specific protein and its epitopes, could be useful antigens for vaccines or diagnostics.

### EXAMPLE 2374

[12805] A DNA sequence (GASx76) was identified in S. pyogenes <SEQ ID 7245> which encodes the amino acid sequence <SEQ ID 7246>. Analysis of this protein sequence reveals the following:

```
Possible site: 35
>>> Seems to have no N-terminal signal sequence
----- Final Results -----
                            bacterial cytoplasm --- Certainty = 0.0824(Affirmative) < succ>
                              bacterial membrane --- Certainty = 0.0000(Not Clear) < succ>
                                bacterial outside --- Certainty = 0.0000(Not Clear) < succ>
```

[12806] No corresponding DNA sequence was identified in S. agalactiae.

[12807] The protein has homology with the following sequences in the GENPEPT database:

| >GP: AAB06824 GB: L47971 ribosomal protein S13 [Bacillus subtilis] | | | |
|---|---|---|---|
| Identities = 86/121 (71%), Positives = 103/121 (85%) | | | |
| Query: | 1 | MARIAGVDIPNDKRVVISLTYVYGIGLATSKKILAAAGISEDIRVKDLTSDQEDAIRREV | 60 |
| | | MARIAGVDIP DKRVVISLTY++GIG T++++L AG+SED RV+DLT ++ IR + | |
| Sbjct: | 1 | MARIAGVDIPRDKRVVISLTYIFGIGRTTAQQVLKEAGVSEDTRVRDLTEEELGKIRDII | 60 |
| Query: | 61 | DAIKVEGDLRREVNMNIKRLMEIGSYRGIRHRRGLPVRGQNTKNNARTRKGKAVAIAGKKK | 121 |
| | | D +KVEGDLRREV++NIKRL+EIGSYRGIRHRRGLPVRGQN+KNNARTRKG +A KKK | |
| Sbjct: | 61 | DKLKVEGDLRREVSLNIKRLIEIGSYRGIRHRRGLPVRGQNSKNNARTRKGPRRTVANKKK | 121 |

[12808] Based on this analysis, it was predicted that this GAS-specific protein and its epitopes, could be useful antigens for vaccines or diagnostics.

### EXAMPLE 2375

[12809] A DNA sequence (GASx81R) was identified in S. pyogenes <SEQ ID 7247> which encodes the amino acid sequence <SEQ ID 7248>. Analysis of this protein sequence reveals the following:

```
Possible site: 21
>>> Seems to have no N-terminal signal sequence
----- Final Results -----
                            bacterial cytoplasm --- Certainty = 0.1842(Affirmative) < succ>
                              bacterial membrane --- Certainty = 0.0000(Not Clear) < succ>
                                bacterial outside --- Certainty = 0.0000(Not Clear) < succ>
```

[12810] No corresponding DNA sequence was identified in S. agalactiae.

[12811] The protein has no significant homology with any sequences in the GENPEPT database.

[12812] Based on this analysis, it was predicted that this GAS-specific protein and its epitopes, could be useful antigens for vaccines or diagnostics.

### EXAMPLE 2376

[12813] A DNA sequence (GASx82) was identified in S. pyogenes <SEQ ID 7249> which encodes the amino acid sequence <SEQ ID 7250>. Analysis of this protein sequence reveals the following:

```
Possible site: 59
>>> Seems to have no N-terminal signal sequence
----- Final Results -----
                            bacterial cytoplasm --- Certainty = 0.3613(Affirmative) < succ>
                              bacterial membrane --- Certainty = 0.0000(Not Clear) < succ>
                                bacterial outside --- Certainty = 0.0000(Not Clear) < succ>
```

[12814] No corresponding DNA sequence was identified in S. agalactiae.

[12815] The protein has no significant homology with any sequences in the GENPEPT database.

[12816] Based on this analysis, it was predicted that this GAS-specific protein and its epitopes, could be useful antigens for vaccines or diagnostics.

### EXAMPLE 2377

[12817] A DNA sequence (GASx83) was identified in S. pyogenes <SEQ ID 7251> which encodes the amino acid sequence <SEQ ID 7252>. Analysis of this protein sequence reveals the following:

```
Possible site: 51
>>> Seems to have no N-terminal signal sequence
----- Final Results -----
                            bacterial cytoplasm --- Certainty = 0.1141(Affirmative) < succ>
                              bacterial membrane --- Certainty = 0.0000(Not Clear) < succ>
                                bacterial outside --- Certainty = 0.0000(Not Clear) < succ>
```

[12818] No corresponding DNA sequence was identified in S. agalactiae.

[12819] The protein has no significant homology with any sequences in the GENPEPT database.

[12820] Based on this analysis, it was predicted that this GAS-specific protein and its epitopes, could be useful antigens for vaccines or diagnostics.

### EXAMPLE 2378

[12821] A DNA sequence (GASx85) was identified in S. pyogenes <SEQ ID 7253> which encodes the amino acid sequence <SEQ ID 7254>. Analysis of this protein sequence reveals the following:

```
Possible site: 16
>>> Seems to have no N-terminal signal sequence
----- Final Results -----
                            bacterial cytoplasm --- Certainty = 0.2280(Affirmative) < succ>
                              bacterial membrane --- Certainty = 0.0000(Not Clear) < succ>
                                bacterial outside --- Certainty = 0.0000(Not Clear) < succ>
```

[12822] No corresponding DNA sequence was identified in S. agalactiae.

[12823] The protein has no significant homology with any sequences in the GENPEPT database.

[12824] Based on this analysis, it was predicted that this GAS-specific protein and its epitopes, could be useful antigens for vaccines or diagnostics.

### EXAMPLE 2379

[12825] A DNA sequence (GASx89R) was identified in S. pyogenes <SEQ ID 7255> which encodes the amino acid sequence <SEQ ID 7256>. Analysis of this protein sequence reveals the following:

```
Possible site: 44
>>> Seems to have no N-terminal signal sequence
----- Final Results -----
                            bacterial cytoplasm --- Certainty = 0.3040(Affirmative) < succ>
                              bacterial membrane --- Certainty = 0.0000(Not Clear) < succ>
                                bacterial outside --- Certainty = 0.0000(Not Clear) < succ>
```

[12826] No corresponding DNA sequence was identified in S. agalactiae.

[12827] The protein has no significant homology with any sequences in the GENPEPT database.

[12828] Based on this analysis, it was predicted that this GAS-specific protein and its epitopes, could be useful antigens for vaccines or diagnostics.

### EXAMPLE 2380

[12829] A DNA sequence (GASx102) was identified in S. pyogenes <SEQ ID 7257> which encodes the amino acid sequence <SEQ ID 7258>. Analysis of this protein sequence reveals the following:

| Possible site: 33 | | | | |
|---|---|---|---|---|
| >>> Seems to have an uncleavable N-term signal seq | | | | |
| | INTEGRAL | Likelihood = −13.75 | Transmembrane | 21-37 (12-41) |

```
----- Final Results -----
                              bacterial membrane --- Certainty = 0.6498(Affirmative) < succ>
                                bacterial outside --- Certainty = 0.0000(Not Clear) < succ>
                            bacterial cytoplasm --- Certainty = 0.0000(Not Clear) < succ>
```

[12830] No corresponding DNA sequence was identified in S. agalactiae.

[12831] The protein has homology with the following sequences in the GENPEPT database:

| >GP: AAC45312 GB: U81957 ComYC [Streptococcus gordonii] | | | |
|---|---|---|---|
| Identities = 59/104 (56%), Positives = 85/104 (81%), Gaps = 1/104 (0%) | | | |
| Query: | 6 | NNLRHKKLKGFTLLEMLLVILVISVLMLLFVPNLSKQKDRVTETGNAAVVKLVENQAELY | 65 |
| | | N L+ ++K FTL+EML+V+L+ISVLMLLFVPNL+KQK+ V++TGNAAVVK+VE+QAELY | |
| Sbjct: | 2 | NKLKKLRVKAFTLVEMLVVLLIISVLMLLFVPNLTKQKEAVSDTGNAAVVKVVESQAELY | 61 |
| Query: | 66 | EL-SQGSKPSLSQLKADGSITEKQEKAYQDYYDKHKNEKARLSN | 108 |
| | | EL + G + +LS+L A G+I++KQ +Y+ YY K+ +E ++N | |
| Sbjct: | 62 | ELKNTGDQATLSKLVAAGNISQKQADSYKAYYGKNNSETQAVAN | 105 |

[12832] Based on this analysis, it was predicted that this GAS-specific protein and its epitopes, could be useful antigens for vaccines or diagnostics.

### EXAMPLE 2381

[12833] A DNA sequence (GASx103) was identified in S. pyogenes <SEQ ID 7259> which encodes the amino acid sequence <SEQ ID 7260>. Analysis of this protein sequence reveals the following:

```
Possible site: 24
>>> Seems to have a cleavable N-term signal seq.
----- Final Results -----
                                bacterial outside --- Certainty = 0.3000(Affirmative) < succ>
                              bacterial membrane --- Certainty = 0.0000(Not Clear) < succ>
                            bacterial cytoplasm --- Certainty = 0.0000(Not Clear) < succ>
```

[12834] No corresponding DNA sequence was identified in S. agalactiae.

[12835] The protein has homology with the following sequences in the GENPEPT database:

| >GP: AAC23740 GB: AF052207 competence protein [Streptococcus pneumoniae] | | | |
|---|---|---|---|
| Identities = 52/131 (39%), Positives = 76/131 (57%) | | | |
| Query: | 8 | IKAFTLLETLLSLSVMSFIILGLSVPVTKSYQKVEEHLFFSHFEHLYRHQQKLAILQQKQ | 67 |
| | | IKAFT+LE+LL L ++S + LGLS V ++ VEE +FF FE LYR QK ++ Q++ | |
| Sbjct: | 2 | IKAFTMLESLLVLGLVSILALGLSGSVQSTFSAVEEQIFFMEFEELYRETQKRSVASQQK | 61 |
| Query: | 68 | RVLDISSTKIVTEGNSLTVPKSITVNHPYRLVIDQMGGNHSLAKIIFDMTDRRFKYQFYL | 127 |
| | | L++ I LTVPK I + D+ GGN SLAK+ F + +YQ YL | |
| Sbjct: | 62 | TSLNLDGQMISNGSQKLTVPKGIQAPSGQSITFDRAGGNSSLAKVEFQTSKGAIRYQLYL | 121 |
| Query: | 128 | GSGNYQKTSQS | 138 |
| | | G+G ++ ++ | |
| Sbjct: | 122 | GNGKIKRIKET | 132 |

[12836] Based on this analysis, it was predicted that this GAS-specific protein and its epitopes, could be useful antigens for vaccines or diagnostics.

### EXAMPLE 2382

[12837] A DNA sequence (GASx104) was identified in S. pyogenes <SEQ ID 7261> which encodes the amino acid sequence <SEQ ID 7262>. Analysis of this protein sequence reveals the following:

```
Possible site: 23
>>> Seems to have a cleavable N-term signal seq.
----- Final Results -----
                                bacterial outside --- Certainty = 0.3000(Affirmative) < succ>
                              bacterial membrane --- Certainty = 0.0000(Not Clear) < succ>
                            bacterial cytoplasm --- Certainty = 0.0000(Not Clear) < succ>
```

[12838] No corresponding DNA sequence was identified in S. agalactiae.

[12839] The protein has no significant homology with any sequences in the GENPEPT database.

[12840] Based on this analysis, it was predicted that this GAS-specific protein and its epitopes, could be useful antigens for vaccines or diagnostics.

### EXAMPLE 2383

[12841] A DNA sequence (GASx109) was identified in S. pyogenes <SEQ ID 7265> which encodes the amino acid sequence <SEQ ID 7266>. Analysis of this protein sequence reveals the following:

| Possible site: 45 | | | | |
|---|---|---|---|---|
| >>> Seems to have no N-terminal signal sequence | | | | |
| | INTEGRAL | Likelihood = −10.51 | Transmembrane | 37-53 (28-58) |
| | INTEGRAL | Likelihood = −3.56 | Transmembrane | 61-77 (60-77) |

```
----- Final Results -----
                              bacterial membrane --- Certainty = 0.5203(Affirmative) < succ>
                                bacterial outside --- Certainty = 0.0000(Not Clear) < succ>
                            bacterial cytoplasm --- Certainty = 0.0000(Not Clear) < succ>
```

[12842] No corresponding DNA sequence was identified in S. agalactiae.

[12843] The protein has no significant homology with any sequences in the GENPEPT database.

[12844] Based on this analysis, it was predicted that this GAS-specific protein and its epitopes, could be useful antigens for vaccines or diagnostics.

### EXAMPLE 2384

[12845] A DNA sequence (GASx115R) was identified in S. pyogenes <SEQ ID 7267> which encodes the amino acid sequence <SEQ ID 7268>. Analysis of this protein sequence reveals the following:

| Possible site: 18 | | | | |
|---|---|---|---|---|
| >>> Seems to have an uncleavable N-term signal seq | | | | |
| | INTEGRAL | Likelihood = −11.09 | Transmembrane | 20-36 (13-40) |

```
----- Final Results -----
                              bacterial membrane --- Certainty = 0.5437(Affirmative) < succ>
                                bacterial outside --- Certainty = 0.0000(Not Clear) < succ>
                            bacterial cytoplasm --- Certainty = 0.0000(Not Clear) < succ>
```

[12846] No corresponding DNA sequence was identified in S. agalactiae.

[12847] The protein has no significant homology with any sequences in the GENPEPT database.

[12848] Based on this analysis, it was predicted that this GAS-specific protein and its epitopes, could be useful antigens for vaccines or diagnostics.

### EXAMPLE 2385

[12849] A DNA sequence (GASx124) was identified in S. pyogenes <SEQ ID 7269> which encodes the amino acid sequence <SEQ ID 7270>. Analysis of this protein sequence reveals the following:

| Possible site: 52 | | | | |
|---|---|---|---|---|
| >>> Seems to have no N-terminal signal sequence | | | | |
| | INTEGRAL | Likelihood = −8.17 | Transmembrane | 31-47 (29-59) |
| | INTEGRAL | Likelihood = −5.63 | Transmembrane | 737-753 (734-756) |

```
----- Final Results -----
                              bacterial membrane --- Certainty = 0.4270(Affirmative) < succ>
                                bacterial outside --- Certainty = 0.0000(Not Clear) < succ>
                            bacterial cytoplasm --- Certainty = 0.0000(Not Clear) < succ>
```

[12850] No corresponding DNA sequence was identified in S. agalactiae.

[12851] The protein has homology with the following sequences in the GENPEPT database:

| >GP: AAC97148 GB: U49397 Cpa [Streptococcus pyogenes] | | | |
|---|---|---|---|
| Identities = 401/737 (54%), Positives = 517/737 (69%), Gaps = 25/737 (3%) | | | |
| Query: | 25 | SKNSKR--FTVTLVGVFLMIFALVTSMVGAKTVFGLVESSTPNAINPDSSSEYRWYGYES | 82 |
| | | S N+KR T+ L+ VFL AL+ + + FG E S PN S +Y WYGY+S | |
| Sbjct: | 11 | SANNKRRQTTIGLLKVFLTFVALIGIVGFSIRAFGAEEQSVPN--RQSSIQDYPWYGYDS | 68 |
| Query: | 83 | YVRGHPYYKQFRVAHDLRVNLEGSRSYQVYCFNLKKAFPLGSDSSVKKWYKKHDGISTKF | 142 |
| | | Y +G+P Y + H+L+VNLEGS+ YQ YCFNL K FP SDS +WYKK +G + F | |
| Sbjct: | 69 | YPKGYPDYSPLKTYHNLKVNLEGSKDYQAYCFNLTKHFPSKSDSVRSQWYKKLEGTNENF | 128 |
| Query: | 143 | EDYAMSPRITGDELNQKLRAVMYNGHPQNANGIMEGLEPLNAIRVTQEAVWYYSDNAPIS | 202 |
| | | A PRI +L Q + ++YNG+P N NGIM+G++PLNAI VTQ A+W Y+D+A I | |
| Sbjct: | 129 | IKLADKPRIEDGQLQQNILRILYNGYPNNRNGIMKGIDPLNAILVTQNAIW-YTDSAQI- | 186 |
| Query: | 203 | NPDESFKRESESNLVSTSQLSLMRQALKQLIDPNLATKMPKQVPDDFQLSIFESEDKGDK | 262 |
| | | NPDESFK E+ SN ++ QL LMR+ALK+LIDPNL +K + P ++L++FES D | |
| Sbjct: | 187 | NPDESFKTEARSNGINDQQLGLMRKALKELIDPNLGSKYSNKTPSGYRLNVFESHD---- | 242 |
| Query: | 263 | YNKGYQNLLSGGLVPTKPPTPGDPPMPPNQPQTTSVLIRKYAIGDYSKLLEGATLQLTGD | 322 |
| | | K +QNLLS VP PP PG+ PP + + TSV+IRKYA GD SKLLEGATL+L+ | |
| Sbjct: | 243 | --KPFQNLLSAEYVPDTPPKPGEE--PPAKTEKTSVIIRKYAEGD-SKLLEGATLKLSQI | 297 |
| Query: | 323 | NVNSFQARVFSSNDIGERIELSDGTYTLTELNSPAGYSIAEPITFKVEAGKVYTI-IDGK | 381 |
| | | + FQ + F SN +GE +EL +GTYTLTE +SP GY IAEPI F+VE KV+ + DG | |
| Sbjct: | 298 | EGSGFQEKDFQSNSLGETVELPNGTYTLTETSSPDGYKIAEPIKFRVENKKVFIVQKDGS | 357 |
| Query: | 382 | QIENPNKEIVEPYSVEAYNDFEEFSVLT-TQNYAKFYYAKNKNGSSQVVYCFNADLKSPP | 440 |
| | | Q+ENPNKE+ EPYSVEAYNDF + VL+ Y KFYYA NK+ SSQVVYCFNADL SPP | |
| Sbjct: | 358 | QVENPNKEVAEPYSVEAYNDFMDEEVLSGFTPYGKFYYATNKDKSSQVVYCFNADLHSPP | 417 |
| Query: | 441 | DSEDGGKTMTPDFTT-GEVKYTHIAGRDLFKYTVKPRDTDPDTFLKHIKKVIEKGYREKG | 499 |
| | | DS D G+T+ PD +T EVKYTH AG DLFKY ++PRDT+P+ FLKHIKKVIEKGY++KG | |
| Sbjct: | 418 | DSYDSGETINPDTSTMKEVKYTHTAGSDLFKYALRPRDTNPEDFLKHIKKVIEKGYKKKG | 477 |
| Query: | 500 | QAIEYSGLTETQLRAATQLAIYYFTDSAELDKDKL----KDYHGFGDMNDSTLAVAKILV | 555 |
| | | + Y+GLTETQ RAATQLAIYYFTDSA+L K K YHGF M++ TLAV K L+ | |
| Sbjct: | 478 | DS--YNGLTETQFRAATQLAIYYFTDSADLKTLKTYNNGKGYHGFESMDEKTLAVTKELI | 535 |
| Query: | 556 | EYAQDSNPPQLTDLDFFIPNNNKYQSLIGTQWHPEDLVDIIRMEDKK-EVIPVTHNLTLR | 614 |
| | | YAQ+ + PQLT+LDFF+PNN+K QSLIGT+ HP+DLVD+IRMEDKK EVIPVTH+LT++ | |
| Sbjct: | 536 | TYAQNGSAPQLTNLDFFVPNNSKDQSLIGTECHPDDLVDVIRMEDKKQEVIPVTHSLTVK | 595 |
| Query: | 615 | KTVTGLAGDRTKDFHFEIELKNNKQELLSQTVKTDKTNLEFKDGKATINLKHGESLTLQG | 674 |
| | | KTV G GD+TK F FE+ELK+ + + T+KT+ +L KDGK + NLKHG+++ ++G | |
| Sbjct: | 596 | KTVVGELGDKTKGFQFELELKDKTGQPIVNTLKTNNQDLVAKDGKYSFNLKHGDTIRIEG | 655 |
| Query: | 675 | LPEGYSYLVKETDSEGYKVKVNSQEVANATVSKTGITSDETLAFENNKEPVVPTGVDQKI | 734 |
| | | LP GYSY +KE +++ Y V V+++ A IT D+ + FEN K+ V PTG+ | |
| Sbjct: | 656 | LPTGYSYTLKEAEAKDYIVTVDNKVSQEAQSVGKDITEDKKVTFENRKDLVPPTGLTTDG | 715 |
| Query: | 735 | NGYLALIVIAGISLGIW | 751 |
| | | YL L+++ + L +W | |
| Sbjct: | 716 | AIYLWLLLLVPLGLLVW | 732 |

[12852] Based on this analysis, it was predicted that this GAS-specific protein and its epitopes, could be useful antigens for vaccines or diagnostics.

### EXAMPLE 2386

[12853] A DNA sequence (GASx125R) was identified in S. pyogenes <SEQ ID 7271> which encodes the amino acid sequence <SEQ ID 7272>. Analysis of this protein sequence reveals the following:

```
Possible site: 40
>>> Seems to have no N-terminal signal sequence
----- Final Results -----
                            bacterial cytoplasm --- Certainty = 0.2604(Affirmative) < succ>
                              bacterial membrane --- Certainty = 0.0000(Not Clear) < succ>
                                bacterial outside --- Certainty = 0.0000(Not Clear) < succ>
```

[12854] No corresponding DNA sequence was identified in S. agalactiae.

[12855] The protein has no significant homology with any sequences in the GENPEPT database.

[12856] Based on this analysis, it was predicted that this GAS-specific protein and its epitopes, could be useful antigens for vaccines or diagnostics.

### EXAMPLE 2387

[12857] A DNA sequence (GASx126) was identified in S. pyogenes <SEQ ID 7273> which encodes the amino acid sequence <SEQ ID 7274>. Analysis of this protein sequence reveals the following:

```
Possible site: 14
>>> Seems to have no N-terminal signal sequence
----- Final Results -----
                            bacterial cytoplasm --- Certainty = 0.1537(Affirmative) < succ>
                              bacterial membrane --- Certainty = 0.0000(Not Clear) < succ>
                                bacterial outside --- Certainty = 0.0000(Not Clear) < succ>
```

[12858] No corresponding DNA sequence was identified in S. agalactiae.

[12859] The protein has homology with the following sequences in the GENPEPT database:

| >GP: AAC97149 GB: U49397 LepA [Streptococcus pyogenes] | | | |
|---|---|---|---|
| Identities = 59/132 (44%), Positives = 84/132 (62%), Gaps = 5/132 (3%) | | | |
| Query: | 1 | MIIKRNDMAPSVKAGDAILFYRLSQTYKVEEAVVYEDSKTSITKVGRIIAQAGDEVDLTE | 60 |
| | | MII NDM+P++ AGD +L+YRL+ + + VVYE T KVGRI AQAGDEV+ T+ | |
| Sbjct: | 42 | MIINTNDMSPALSAGDGVLYYRLADRSHINDVVVYEVDNT--LKVGRIAAQAGDEVNFTQ | 99 |
| Query: | 61 | QGELKINGHIQNEG---LTFIKSREANYPYRIADNSYLILNDYYSQESENYLQDAIAKDA | 117 |
| | | +G L INGH + LT+ S N+PY++ +Y ILNDY + ++ A+ + | |
| Sbjct: | 100 | EGGLLINGHPPEKEVPYLTYPHSSGPNFPYKVPTGTYFILNDYREERLDSRYYGALPINQ | 159 |
| Query: | 118 | IKGTINTLIRLR | 129 |
| | | IKG I+TL+R+R | |
| Sbjct: | 160 | IKGKISTLLRVR | 171 |

[12860] Based on this analysis, it was predicted that this GAS-specific protein and its epitopes, could be useful antigens for vaccines or diagnostics.

### EXAMPLE 2388

[12861] A DNA sequence (GASx127) was identified in S. pyogenes <SEQ ID 7275> which encodes the amino acid sequence <SEQ ID 7276>. Analysis of this protein sequence reveals the following:

| Possible site: 17 | | | | |
|---|---|---|---|---|
| >>> Seems to have a cleavable N-term signal seq. | | | | |
| | INTEGRAL | Likelihood = −3.93 | Transmembrane | 312-328 (311-337) |

```
----- Final Results -----
                              bacterial membrane --- Certainty = 0.2572(Affirmative) < succ>
                                bacterial outside --- Certainty = 0.0000(Not Clear) < succ>
                            bacterial cytoplasm --- Certainty = 0.0000(Not Clear) < succ>
```

[12862] No corresponding DNA sequence was identified in S. agalactiae.

[12863] The protein has homology with the following sequences in the GENPEPT database:

| >GP: AAC97152 GB: U49397 unknown [Streptococcus pyogenes] | | | |
|---|---|---|---|
| Identities = 125/355 (35%), Positives = 191/355 (53%), Gaps = 26/355 (7%) | | | |
| Query: | 1 | MKLRHLLLTGAALTSFA-----ATTVHGET--VVNGAKLTVTKNL-DLVNSNALIPNTDF | 52 |
| | | MK LLL A L + + + ET V++G+ L V K + N L+P D+ | |
| Sbjct: | 1 | MKKNKLLLATAILATALGMASMSQNIKAETAGVIDGSTLVVKKTFPSYTDDNVLMPKADY | 60 |
| Query: | 53 | TFKIEPDTTVN---EDGNKFK-GVALNTPMTK-VTYTNSDKGGSNTKTAEFDFSEVTFEK | 107 |
| | | +FK+E D +DG K GV TK + Y+NSDK + K+ F+F+ V F | |
| Sbjct: | 61 | SFKVEADDNAKGKTKDGLDIKPGVIDGLENTKTIRYSNSDKITAKEKSVNFEFANVKFPG | 120 |
| Query: | 108 | PGVYYYKVTEEKIDKVPGVSYDTTSYTVQVHVLWNEEQQKPVATYIVGYKEGS--KVPIQ | 165 |
| | | GVY Y V E +K G++YD+ +TV V+V+ N+E YIV + G K P+ | |
| Sbjct: | 121 | VGVYRYTVAEVNGNKA-GITYDSQQWTVDVYVV-NKEGGGFEVKYIVSTEVGQSEKKPVL | 178 |
| Query: | 166 | FKNSLDSTTLTVKKKVSGTGGDRSKDFNFGLTLKANQYYKASEKVMIEKTTKGGQAPVQT | 225 |
| | | FKNS D+T+L ++K+V+G G+ + F+F L L N+ + EK + +GG+ | |
| Sbjct: | 179 | FKNSFDTTSLKIEKQVTGNTGEHQRLFSFTLLLTPNECF---EKGQVVNILQGGETK--- | 232 |
| Query: | 226 | EASIDQLYHFTLKDGESIKVTNLPVGVDYVVTEDDYKSEKYTTNVEVSPQDGAVKNIAGN | 285 |
| | | + I + Y FTLKD S+ ++ LPVG++Y +TE+D + Y T+ + + + G | |
| Sbjct: | 233 | KVVIGEEYSFTLKDKGSVTLSQLPVGIEYKLTEEDVTKDGYKTSATLKDGEQSSTYELGK | 292 |
| Query: | 286 | STEQETSTDKDMTITFTNKKDFEVPTGVAMTVAPYIALGIVAVGGALYFVKKKNA | 340 |
| | | + + S D+ I TNK+D +VPTGV T+AP+ L IVA+GG +Y K+K A | |
| Sbjct: | 293 | DHKTDKSADE---IVVTNKRDTQVPTGVVGTLAPFAVLSIVAIGGVIYITKRKKA | 344 |

[12864] Based on this analysis, it was predicted that this GAS-specific protein and its epitopes, could be useful antigens for vaccines or diagnostics.

### EXAMPLE 2389

[12865] A DNA sequence (GASx128) was identified in S. pyogenes <SEQ ID 7277> which encodes the amino acid sequence <SEQ ID 7278>. Analysis of this protein sequence reveals the following:

```
Possible site: 44
>>> Seems to have a cleavable N-term signal seq.
----- Final Results -----
                                bacterial outside --- Certainty = 0.3000(Affirmative) < succ>
                              bacterial membrane --- Certainty = 0.0000(Not Clear) < succ>
                            bacterial cytoplasm --- Certainty = 0.0000(Not Clear) < succ>
```

[12866] No corresponding DNA sequence was identified in S. agalactiae.

[12867] The protein has homology with the following sequences in the GENPEPT database:

| >GP: AAC97152 GB: U49397 unknown [Streptococcus pyogenes] | | | |
|---|---|---|---|
| Identities = 115/240 (47%), Positives = 178/240 (73%), Gaps = 3/240 (1%) | | | |
| Query: | 1 | MIVRLIKLLDKLINVIVLCFFFLCLLIAALGIYDALTVYQGANATNYQQYKKKGVQ--FD | 58 |
| | | M++ ++++++K I+ ++L F + L +A G++D+ +YQ A+A+N++++K Q F+ | |
| Sbjct: | 351 | MMMTIVQVINKAIDTLILIFCLVVLFLAGFGLWDSYHLYQQADASNFKKFKTAQQQPKFE | 410 |
| Query: | 59 | DLLAINSDVMAWLTVKGTHIDYPIVQGENNLEYINKSVEGEYSLSGSVFLDYRNKVTFED | 118 |
| | | DLLA+N DV+ WL + GTHIDYP+VQG+ NLEYINK+V+G ++SGS+FLD RN F D | |
| Sbjct: | 411 | DLLALNEDVIGWLNIPGTHIDYPLVQGKTNLEYINKAVDGSVAMSGSLFLDTRNHNDFTD | 470 |
| Query: | 119 | KYSLIYAHHMAGNVMFGELPNFRKKSFFNKHKEFSIETKTKQKLKINIFACIQTDAFDSL | 178 |
| | | YSLIY HHMAGN MFGE+P F KK+FFNKH + IETK ++KL + IFAC++TDAFD L | |
| Sbjct: | 471 | DYSLIYGHHMAGNAMFGEIPKFLKKNFFNKHNKAIIETKERKKLTVTIFACLKTDAFDQL | 530 |
| Query: | 179 | LFNPIDV-DISSKNEFLNHIKQKSVQYREILTTNESRFVALSTCEDMTTDGRIIVIGQIE | 237 |
| | | +FNP + + + + +++I ++S Q++ + + ++FVA STCE+ +TD R+IV+G I+ | |
| Sbjct: | 531 | VFNPNAITNQDQQRQLVDYISKRSKQFKPVKLKHHTKFVAFSTCENFSTDNRVIVVGTIQ | 590 |

[12868] Based on this analysis, it was predicted that this GAS-specific protein and its epitopes, could be useful antigens for vaccines or diagnostics.

### EXAMPLE 2390

[12869] A DNA sequence (GASx129) was identified in S. pyogenes <SEQ ID 7279> which encodes the amino acid sequence <SEQ ID 7280>. Analysis of this protein sequence reveals the following:

| Possible site: 26 | | | | |
|---|---|---|---|---|
| >>> Seems to have an uncleavable N-term signal seq | | | | |
| | INTEGRAL | Likelihood = −6.05 | Transmembrane | 5-21 (4-22) |
| | INTEGRAL | Likelihood = −5.04 | Transmembrane | 191-207 (186-209) |

```
----- Final Results -----
                              bacterial membrane --- Certainty = 0.3421(Affirmative) < succ>
                                bacterial outside --- Certainty = 0.0000(Not Clear) < succ>
                            bacterial --- cytoplasm Certainty = 0.0000(Not Clear) < succ>
LPXTG motif: 181-186
```

[12870] No corresponding DNA sequence was identified in S. agalactiae.

| >GP: AAC97151 GB: U49397 unknown [Streptococcus pyogenes] | | | |
|---|---|---|---|
| Identities = 64/213 (30%), Positives = 106/213 (49%), Gaps = 20/213 (9%) | | | |
| Query: | 1 | MKKSILRILAIGYLLMSFCLLDSVEAENLTASINIEVINQVDVATNKQSSDIDETFMFVI | 60 |
| | | M+K + ++ +L +V A++ T +I V N ++ A + F + | |
| Sbjct: | 1 | MRKYWKMLFSVVMMLTMLAFNQTVLAKDSTVQTSISVENVLERAGDSTP------FSIAL | 54 |
| Query: | 61 | EALDKESPLPNSVTTSVKGNGKTSFEQLTFSEVGQYHYKIHQLLGKNSQYHYDETVYEVV | 120 |
| | | E++D + ++ G+GK SF L F+ VGQY Y+++Q +N Y D TV++V+ | |
| Sbjct: | 55 | ESIDAMKTIEE---ITIAGSGKASFSPLNFTTVGQYTYRVYQKPSQNKDYQADTTVFDVL | 111 |
| Query: | 121 | IYVLYNEQSGALETNLVSNKLGETEKSELIFKQEYSEKTPEPHQPDTTEKEKPQKKRNGI | 180 |
| | | +YV Y+E G L ++S + G+ EKS + FK + K P QPD + | |
| Sbjct: | 112 | VYVTYDE-DGTLVAKVISRRAGDEEKSAITFKPKRLVKPIPPRQPDIPKTP--------- | 161 |
| Query: | 181 | LPSTGEMVSYVSALGIVLVATITLYSIYKKLKT | 213 |
| | | LP GE+ S + L IVL+ + L + KKLK+ | |
| Sbjct: | 162 | LPLAGEVKSLLGILSIVLLGLLVLLYV-KKLKS | 193 |

[12871] Based on this analysis, it was predicted that this GAS-specific protein and its epitopes, could be useful antigens for vaccines or diagnostics.

### EXAMPLE 2391

[12872] A DNA sequence (GASx130R) was identified in S. pyogenes <SEQ ID 7281> which encodes the amino acid sequence <SEQ ID 7282>. Analysis of this protein sequence reveals the following:

```
Possible site: 57
>>> Seems to have no N-terminal signal sequence
----- Final Results -----
                            bacterial cytoplasm --- Certainty = 0.1614(Affirmative) < succ>
                              bacterial membrane --- Certainty = 0.0000(Not Clear) < succ>
                                bacterial outside --- Certainty = 0.0000(Not Clear) < succ>
```

[12873] No corresponding DNA sequence was identified in S. agalactiae.

[12874] The protein has homology with the following sequences in the GENPEPT database:

| >GP: CAB54046 GB: AJ245436 hypothetical protein, 57.8 kD [Pseudomonas | | | |
|---|---|---|---|
| putida] | | | |
| Identities = 128/388 (32%), Positives = 204/388 (51%), Gaps = 21/388 (5%) | | | |
| Query: | 4 | IGSVVQRQELVFIPAQLKRINHVQHAYKCQTCSDNSLSDKIIKAPVPKAPLAHSLGSASI | 63 |
| | | IG V Q L +P Q++ I HV+ Y C+ C ++ A P + S+ S S+ | |
| Sbjct: | 126 | IGEEVSEQ-LEIVPMQIRVIKHVRKVYGCRDCESAPVT-----ADKPAQMIEKSMASPSV | 179 |
| Query: | 64 | IAHTVHQKFTLKVPNYRQEEDWNKLGLSISRKEIANWHIKSSQYYFEPLYDLLRDILLSQ | 123 |
| | | +A + K+ +P +R E+ + G+ I R+ +A W I+ S++ F+PL +L+R+ LL+ | |
| Sbjct: | 180 | LAMLLTTKYVDGLPLHRFEKVLGRHGIDIPRQTLARWVIQCSEH-FQPLLNLMRESLLNS | 238 |
| Query: | 124 | EVIHADETSYRVLESD----TQLTYYWTFLSGKHEKKGITLYHHDKRRSGLVTQEVLGDY | 179 |
| | | +IH DET +VL+ + ++ W G ++ + L+ + R+ V +L Y | |
| Sbjct: | 239 | RIIHCDETRVQVLKEPGREPSSQSWMWVQTGGPPDRP-VILFDYATSRAQEVPVRLLDGY | 297 |
| Query: | 180 | SGYVHCDMHGAYRQL---EHAKLVGCWAHVRRKFFEATPKQAD-KTSLGRKGLVYCDKLF | 235 |
| | | GYV D + Y L + + +GCWAH RRKF EA Q KT L +KL+ | |
| Sbjct: | 298 | RGYVMTDDYAGYNALAAQDGLERLGCWAHARRKFVEAQKVQPKGKTGRADIALNLINKLY | 357 |
| Query: | 236 | ALEAEWCELPPQERLVKRKEILTPLMTTFFDWCR--EQVVLSGSKLGLAIAYSLKHERTF | 293 |
| | | +E + + ++R V R E PL+T +W + V + + LG AI Y + | |
| Sbjct: | 358 | GVERDLKDSDDEDRKVARMERSLPLLTQLKNWVEKTQPQVTTQNALGKAIGYLASNWSKL | 417 |
| Query: | 294 | RTVLEDGHIVLSNNMAERAIKSLVMGRKNWLFSQSFEGAKAAAIIMSLLETAKRHGLNSE | 353 |
| | | +E G++ + NN AERAI+ V+GRKNWLFS + +GA A+A + SL+ETAK +G | |
| Sbjct: | 418 | ERYVEHGYLPMDNNAAERAIRPFVIGRKNWLFSDTPKGATASAQLYSLVETAKANGQEPY | 477 |
| Query: | 354 | KYISYLLDRLPNEETLAKREVLEAYLPW | 381 |
| | | ++ + L+RLP ++ E EA LPW | |
| Sbjct: | 478 | AWLRHALERLPQACSV--EDYEALLPW | 502 |

[12875] Based on this analysis, it was predicted that this GAS-specific protein and its epitopes, could be useful antigens for vaccines or diagnostics.

### EXAMPLE 2392

[12876] A DNA sequence (GASx131R) was identified in S. pyogenes <SEQ ID 7283> which encodes the amino acid sequence <SEQ ID 7284>. Analysis of this protein sequence reveals the following:

```
Possible site: 37
>>> Seems to have no N-terminal signal sequence
----- Final Results -----
                            bacterial cytoplasm --- Certainty = 0.4465(Affirmative) < succ>
                              bacterial membrane --- Certainty = 0.0000(Not Clear) < succ>
                                bacterial outside --- Certainty = 0.0000(Not Clear) < succ>
```

[12877] No corresponding DNA sequence was identified in S. agalactiae.

[12878] The protein has no significant homology with any sequences in the GENPEPT database.

[12879] Based on this analysis, it was predicted that this GAS-specific protein and its epitopes, could be useful antigens for vaccines or diagnostics.

### EXAMPLE 2393

[12880] A DNA sequence (GASx132R) was identified in S. pyogenes <SEQ ID 7285> which encodes the amino acid sequence <SEQ ID 7286>. Analysis of this protein sequence reveals the following:

```
Possible site: 46
>>> Seems to have no N-terminal signal sequence
----- Final Results -----
                            bacterial cytoplasm --- Certainty = 0.1529(Affirmative) < succ>
                              bacterial membrane --- Certainty = 0.0000(Not Clear) < succ>
                                bacterial outside --- Certainty = 0.0000(Not Clear) < succ>
```

[12881] No corresponding DNA sequence was identified in S. agalactiae.

[12882] The protein has homology with the following sequences in the GENPEPT database:

| >GP: BAA84885 GB: AB024946 orf50 [Escherichia coli] | | | |
|---|---|---|---|
| Identities = 37/91 (40%), Positives = 53/91 (57%) | | | |
| Query: | 10 | QVYLVCGKTDMRQGIDSLAYLVKSQHELDLFSGAVYLFCGGRRDRFKALYWDGQGFWLLY | 69 |
| | | +++LV G TDMR G + LA V++ + D FSG +++F G R D+ K L+ D G L | |
| Sbjct: | 9 | RIWLVAGITDMRNGFNGLASKVQNVLKDDPFSGHLFIFRGRRGDQIKVLWADSDGLCLFT | 68 |
| Query: | 70 | KRFENGKLAWPRNRDEVKCLTAVQVDWLMKG | 100 |
| | | KR E G+ WP RD LT Q+ L++G | |
| Sbjct: | 69 | KRLERGRFVWPVTRDGKVHLTPAQLSMLLEG | 99 |

[12883] Based on this analysis, it was predicted that this GAS-specific protein and its epitopes, could be useful antigens for vaccines or diagnostics.

### EXAMPLE 2394

[12884] A DNA sequence (GASx133R) was identified in S. pyogenes <SEQ ID 7287> which encodes the amino acid sequence <SEQ ID 7288>. Analysis of this protein sequence reveals the following:

```
Possible site: 18
>>> Seems to have no N-terminal signal sequence
----- Final Results -----
                            bacterial cytoplasm --- Certainty = 0.1979(Affirmative) < succ>
                              bacterial membrane --- Certainty = 0.0000(Not Clear) < succ>
                                bacterial outside --- Certainty = 0.0000(Not Clear) < succ>
```

[12885] No corresponding DNA sequence was identified in S. agalactiae.

[12886] The protein has no significant homology with any sequences in the GENPEPT database.

[12887] Based on this analysis, it was predicted that this GAS-specific protein and its epitopes, could be useful antigens for vaccines or diagnostics.

### EXAMPLE 2395

[12888] A DNA sequence (GASx135R) was identified in S. pyogenes <SEQ ID 7289> which encodes the amino acid sequence <SEQ ID 7290>. Analysis of this protein sequence reveals the following:

```
Possible site: 20
>>> Seems to have a cleavable N-term signal seq.
----- Final Results -----
                                bacterial outside --- Certainty = 0.3000(Affirmative) < succ>
                              bacterial membrane --- Certainty = 0.0000(Not Clear) < succ>
                            bacterial cytoplasm --- Certainty = 0.0000(Not Clear) < succ>
```

[12889] No corresponding DNA sequence was identified in S. agalactiae.

[12890] The protein has no significant homology with any sequences in the GENPEPT database.

[12891] Based on this analysis, it was predicted that this GAS-specific protein and its epitopes, could be useful antigens for vaccines or diagnostics.

### EXAMPLE 2396

[12892] A DNA sequence (GASx136) was identified in S. pyogenes <SEQ ID 7291> which encodes the amino acid sequence <SEQ ID 7292>. Analysis of this protein sequence reveals the following:

| Possible site: 54 | | | | |
|---|---|---|---|---|
| >>> Seems to have no N-terminal signal sequence | | | | |
| | INTEGRAL | Likelihood = −11.73 | Transmembrane | 222-238 (212-242) |
| | INTEGRAL | Likelihood = −10.88 | Transmembrane | 37-53 (32-57) |
| | INTEGRAL | Likelihood = −9.87 | Transmembrane | 462-478 (456-478) |
| | INTEGRAL | Likelihood = −4.25 | Transmembrane | 119-135 (117-137) |
| | INTEGRAL | Likelihood = −2.60 | Transmembrane | 308-324 (306-324) |
| | INTEGRAL | Likelihood = −1.28 | Transmembrane | 164-180 (164-180) |
| | INTEGRAL | Likelihood = −0.06 | Transmembrane | 137-153 (137-153) |
| | INTEGRAL | Likelihood = −0.06 | Transmembrane | 343-359 (343-359) |

```
----- Final Results -----
                              bacterial membrane --- Certainty = 0.5692(Affirmative) < succ>
                                bacterial outside --- Certainty = 0.0000(Not Clear) < succ>
                            bacterial cytoplasm --- Certainty = 0.0000(Not Clear) < succ>
```

[12893] No corresponding DNA sequence was identified in S. agalactiae.

[12894] The protein has homology with the following sequences in the GENPEPT database:

| >GP: BAB04077 GB: AP001508 short-chain fatty acids transporter | | | |
|---|---|---|---|
| [Bacillus halodurans] | | | |
| Identities = 158/465 (33%), Positives = 248/465 (52%), Gaps = 41/465 (8%) | | | |
| Query: | 15 | IKTKKRFMDRYIDGFMKWMPESLFICFILTFLVVTMSVLMTDSPFIGTEKTGGIIYGWVN | 74 |
| | | I R M RY+ P+ +LTFLV +S++ T+S T T I+ W | |
| Sbjct: | 5 | ISLSNRLMQRYL-------PDPFLFVVLLTFLVFALSLIFTES----TPLT--IVQYWGE | 51 |
| Query: | 75 | GFWGLLSFAMQMTILLATGNAVASSPPAHKMFKSLAKLPQTRTQIFIFSIVVGSIFGFLH | 134 |
| | | GFWGLLSF+MQM ++L TG+ +ASSP K +LA LP + Q + VV + F++ | |
| Sbjct: | 52 | GFWGLLSFSMQMVLVLVTGHVLASSPLFKKGLGALAGLPASPGQAILLVTVVSLVASFIN | 111 |
| Query: | 135 | WGLGMMVAIVFGKELLVQARQKGIKVHTPLFVATLFFTFLPATSGLSGAAVLYSATPDYL | 194 |
| | | WG G+++ +F KEL +K V L +A+ + F+ GLSG+ L ATPD+ | |
| Sbjct: | 112 | WGFGLVIGALFAKELA----KKVDNVDYRLLIASAYSGFMIWHGGLSGSVPLTIATPDHF | 167 |
| Query: | 195 | RNSVADAYKQVVPESVPLTESVL---NLPFISLLVVCMLVPLCFALLAHPKDETKIME-- | 249 |
| | | + +P +E++ NL + L + +PL L+ K +T ++ | |
| Sbjct: | 168 | AQDMIGV--------IPTSETIFAPYNLAIVFALFIA--IPLANRLMMPGKSDTVTVDRS | 217 |
| Query: | 250 | -LDDEIYHHSLDTASHVVIARNTPAEKMNASRLVMYLVGGAIVSYSLYHFSVVGLSGLDL | 308 |
| | | LDD L AS + + TP++++ SR++ LVG + + Y+F+ G L+L | |
| Sbjct: | 218 | LLDDG---RDLQAAS-LELEAMTPSDRLENSRMISLLVGVLGLVFLGYYFATNGFE-LNL | 272 |
| Query: | 309 | NCFNFLFLGLGLLLCGQQGPEYYGSLFKDGVMSSWGLVLQFPFYAGIFGIIQSTGLGLEI | 368 |
| | | + N LFL LG+L G P+ + V + G+++QFPFYAG+ GI+ S+GL + | |
| Sbjct: | 273 | DIVNSLFLFLGILFHGT--PKLFLKAVTSAVKGASGIIIQFPFYAGLMGIMVSSGLATVM | 330 |
| Query: | 369 | SHFFVAISNGTTWPVFAYLYSALLNIAVPSGGSKFVIEAPYIVPATIEVGNDLGKILQAY | 428 |
| | | S FV+ SN T+P+F +L + ++N+ VPSGG ++ ++AP ++ A +G K A | |
| Sbjct: | 331 | SEAFVSFSNEVTFPLFVFLSAGIVNVFVPSGGGQWAVQAPVVLEAAQSLGVPAAKAAMAV | 390 |
| Query: | 429 | QLGDATTNLIVPFWALSYLSNFKLKFNQIVAYTIPCVLVVTGIAI | 473 |
| | | GDA TN+I PFWAL L+ LK I+ + + +LVV+G+ I | |
| Sbjct: | 391 | AWGDAWTNMIQPFWALPALAIAGLKAKDIMGFCV-MILVVSGVVI | 434 |

[12895] Based on this analysis, it was predicted that this GAS-specific protein and its epitopes, could be useful antigens for vaccines or diagnostics.

### EXAMPLE 2397

[12896] A DNA sequence (GASx137R) was identified in S. pyogenes <SEQ ID 7293> which encodes the amino acid sequence <SEQ ID 7294>. Analysis of this protein sequence reveals the following:

```
Possible site: 58
>>> Seems to have no N-terminal signal sequence
----- Final Results -----
                            bacterial cytoplasm --- Certainty = 0.2591(Affirmative) < succ>
                              bacterial membrane --- Certainty = 0.0000(Not Clear) < succ>
                                bacterial outside --- Certainty = 0.0000(Not Clear) < succ>
```

[12897] No corresponding DNA sequence was identified in S. agalactiae.

[12898] The protein has homology with the following sequences in the GENPEPT database:

| >GP: AAC22434 GB: U32761 transcriptional regulator | | | |
|---|---|---|---|
| [Haemophilus influenzae Rd] | | | |
| Identities = 37/107 (34%), Positives = 56/107 (51%), Gaps = 1/107 (0%) | | | |
| Query: | 21 | LHRQNLVTFDKTFMINHQLTTLFEEANSLPVVKCYSASWDFLLNCTRYS-SYLTILPRPI | 79 |
| | | LH+Q + FD+TFMI+H L FE N P + S+ WDFLL+ + + LTILP P+ | |
| Sbjct: | 205 | LHQQKMAIFDQTFMIHHHLKEAFERNNCYPDIVLDSSCWDFLLSAVKTNKELLTILPLPM | 264 |
| Query: | 80 | THFAHMDGLVEVQLTEHPKWEVVLASLKHNKTSHLKHYIKHTILDYF | 126 |
| | | H + ++ W+V L + +HL+ YI +L+ F | |
| Sbjct: | 265 | AELYHSKEFLCRKIESPVPWKVTLCRQRKTVYTHLEEYIFDKLLEAF | 311 |

[12899] Based on this analysis, it was predicted that this GAS-specific protein and its epitopes, could be useful antigens for vaccines or diagnostics.

### EXAMPLE 2398

[12900] A DNA sequence (GASx140) was identified in S. pyogenes <SEQ ID 7295> which encodes the amino acid sequence <SEQ ID 7296>. Analysis of this protein sequence reveals the following:

```
Possible site: 50
>>> Seems to have no N-terminal signal sequence
----- Final Results -----
                            bacterial cytoplasm --- Certainty = 0.3351(Affirmative) < succ>
                              bacterial membrane --- Certainty = 0.0000(Not Clear) < succ>
                                bacterial outside --- Certainty = 0.0000(Not Clear) < succ>
```

[12901] No corresponding DNA sequence was identified in S. agalactiae.

[12902] The protein has homology with the following sequences in the GENPEPT database:

| !GB: U32761 acetate CoA-transferase, alpha subunit [H . . . 215 4e−55 | | | |
|---|---|---|---|
| Identities = 105/213 (49%), Positives = 146/213 (68%) | | | |
| Query: | 22 | ENKRIAIAEAISHIKDGDTIMVGGFMANGTPEALIDALVDKGTKDLTLICNDAGFVDRGV | 81 |
| | | + K + + +A +DG TIMVGGFM GTP L++AL++ G +DLTLI ND FVD G+ | |
| Sbjct: | 2 | KTKLMTLQDATGFFRDGMTIMVGGFMGIGTPSRLVEALLESGVRDLTLIANDTAFVDTGI | 61 |
| Query: | 82 | GKMVANHQFKTIYATHIGLNKEAGRQMTAGETTIELIPQGTFAEKIRIGAYGIGGFYTPT | 141 |
| | | G ++ N + + + A+HIG N E GR+M +GE + L+PQGT E+IR G G+GGF TPT | |
| Sbjct: | 62 | GPLIVNGRVRKVIASHIGTNPETGRRMISGEMDVVLVPQGTLIEQIRCGGAGLGGFLTPT | 121 |
| Query: | 142 | GVGTLVAEGKETKTIKGKTYLLEYPFEADVALIFANQADEMGNLQYSGSENNFNQLMAAC | 201 |
| | | GVGT+V EGK+T T+ GKT+LLE P AD+ALI A++ D +GNL Y S NFN L+A | |
| Sbjct: | 122 | GVGTVVEEGKQTLTLDGKTWLLERPLRADLALIRAHRCDTLGNLTYQLSARNFNPLIALA | 181 |
| Query: | 202 | AKTTIVQAREIVPVGTIQPECVHTPHIFVDYIV | 234 |
| | | A T+V+ E+V G +QP+ + TP +D+I+ | |
| Sbjct: | 182 | ADITLVEPDELVETGELQPDHIVTPGAVIDHII | 214 |
| | | subunit (EC 2.8.3.—). [Escherichia coli] | |

[12903] Based on this analysis, it was predicted that this GAS-specific protein and its epitopes, could be useful antigens for vaccines or diagnostics.

### EXAMPLE 2399

[12904] A DNA sequence (GASx141) was identified in S. pyogenes <SEQ ID 7297> which encodes the amino acid sequence <SEQ ID 7298>. Analysis of this protein sequence reveals the following:

```
Possible site: 41
>>> Seems to have no N-terminal signal sequence
----- Final Results -----
                            bacterial cytoplasm --- Certainty = 0.4941(Affirmative) < succ>
                              bacterial membrane --- Certainty = 0.0000(Not Clear) < succ>
                                bacterial outside --- Certainty = 0.0000(Not Clear) < succ>
```

[12905] No corresponding DNA sequence was identified in S. agalactiae.

[12906] The protein has homology with the following sequences in the GENPEPT database:

| >GP:AAF12248 GB:AE001862 CoA transferase, subunit B [Deinococcus radiodurans] | | | |
|---|---|---|---|
| Identities = 114/203 (56%), Positives = 158/203 (77%), Gaps = 3/203 (1%) | | | |
| Query: | 11 | QNRIAKRVAKELEDGTLVNLGIGLPTKVANFVPEEMTVYFQSENGFIGLGP--KSDDPNS | 68 |
| | | ++ +A R A+EL+DG VNLGIGLPT VAN +P M+V+ QSENG +G+GP D+ + | |
| Sbjct: | 5 | RDEMAARAAQELQDGYYVNLGIGLPTLVANHIPAGMSVWLQSENGLLGIGPFPTEDEVDP | 64 |
| Query: | 69 | TIVNAGGQPVTVYPGAAFENSADSFGIIRGGHVDLTVLGALEIAENGDIANYLIPGKMVP | 128 |
| | | ++NAG Q VT PGA+FF+SADSF +IRGGHV+L +LGA++++E GD+AN++IPGKMV | |
| Sbjct: | 65 | DLINAGKQTVTALPGASFFSSADSFAMIRGGHVNLAILGAMQVSETGDLANWMIPGKMVK | 124 |
| Query: | 129 | GMGGANDLLVGAKKVIVANEHTNKG-KHKLLKECTLPLTAKGVVDLIITEMGVFKVTPDG | 187 |
| | | GMGGANDL+ G ++V+V MEH KG HK+L+ECTLPLT +GVVD IIT++GV VTP G | |
| Sbjct: | 125 | GMGGANDLVAGVQRVVVLMEHVAKGDAHKILRECTLPLTGQGVVDRIITDLGVLDVTPQG | 184 |
| Query: | 188 | IQVIEISEGFTFDEVQAATGVPL | 210 |
| | | ++++E++ G T DE++ TG + | |
| Sbjct: | 185 | LKLVELAPGVTLDELRQKTGADI | 207 |

[12907] Based on this analysis, it was predicted that this GAS-specific protein and its epitopes, could be useful antigens for vaccines or diagnostics.

### EXAMPLE 2400

[12908] A DNA sequence (GASx144) was identified in S. pyogenes <SEQ ID 7299> which encodes the amino acid sequence <SEQ ID 7300>. Analysis of this protein sequence reveals the following:

```
Possible site: 39
>>> Seems to have no N-terminal signal sequence
----- Final Result -----
                            bacterial cytoplasm --- Certainty = 0.3227(Affirmative) < succ>
                              bacterial membrane --- Certainty = 0.0000(Not Clear) < succ>
                                bacterial outside --- Certainty = 0.0000(Not Clear) < succ>
```

[12909] No corresponding DNA sequence was identified in S. agalactiae.

[12910] The protein has homology with the following sequences in the GENPEPT database:

| >GP:BAA29948 GB:AP000003 137aa long hypothetical protein | | | |
|---|---|---|---|
| [Pyrococcus horikoshii] | | | |
| Identities = 49/113 (43%), Positives = 71/113 (62%), Gaps = 1/113 (0%) | | | |
| Query: | 5 | PEPMGPYSTYTIEGHFLYTAGQLPLNPVTGQLSDG-FEAQCRQVFVNLQSILAEQKLDLN | 63 |
| | | P+P+GPYS G+FL+ AGQ+P++P TG++ G + Q RQV N+++IL LN | |
| Sbjct: | 22 | PKPIGPYSQAIKAGNFLFIAGQIPIDPKTGEIVKGDIKDQTRQVLENIKAILEAAGYSLN | 81 |
| Query: | 64 | HIYKLNVYLTDVTNVEILNHVMTDLFEEPYPVRTAVQVSALPLQALIEVEAVA | 116 |
| | | + K+ VYL D+ + +N V + F E P R AV+VS LP LIE+EA+A | |
| Sbjct: | 82 | DVIKVTVYLKDMNDFAKMNEVYAEYFGESKPARVAVEVSRLPKDVLIEIEAIA | 134 |

[12911] Based on this analysis, it was predicted that this GAS-specific protein and its epitopes, could be useful antigens for vaccines or diagnostics.

### EXAMPLE 2401

[12912] A DNA sequence (GASx146) was identified in S. pyogenes <SEQ ID 7301> which encodes the amino acid sequence <SEQ ID 7302>. Analysis of this protein sequence reveals the following:

```
Possible site: 16
>>> Seems to have no N-terminal signal sequence
----- Final Results -----
                            bacterial cytoplasm --- Certainty = 0.1238(Affirmative) < succ>
                              bacterial membrane --- Certainty = 0.0000(Not Clear) < succ>
                                bacterial outside --- Certainty = 0.0000(Not Clear) < succ>
```

[12913] No corresponding DNA sequence was identified in S. agalactiae.

[12914] The protein has no significant homology with any sequences in the GENPEPT database.

[12915] Based on this analysis, it was predicted that this GAS-specific protein and its epitopes, could be useful antigens for vaccines or diagnostics.

### EXAMPLE 2402

[12916] A DNA sequence (GASx147) was identified in S. pyogenes <SEQ ID 7303> which encodes the amino acid sequence <SEQ ID 7304>. Analysis of this protein sequence reveals the following:

```
Possible site: 30
>>> Seems to have no N-terminal signal sequence
INTEGRAL Likelihood = −11.46 Transmembrane 456-472 ( 452-481)
INTEGRAL Likelihood = −8.17 Transmembrane 603-619 ( 595-623)
INTEGRAL Likelihood = −6.85 Transmembrane 495-511 ( 491-518)
INTEGRAL Likelihood = −5.31 Transmembrane 420-436 ( 418-443)
INTEGRAL Likelihood = −4.99 Transmembrane 396-412 ( 392-413)
INTEGRAL Likelihood = −1.59 Transmembrane 522-538 ( 522-538)
INTEGRAL Likelihood = −0.64 Transmembrane 577-593 ( 577-593)
INTEGRAL Likelihood = −0.43 Transmembrane 377-393 ( 377-393)
----- Final Results -----
                            bacterial membrane --- Certainty = 0.5585(Affirmative) < succ>
                              bacterial outside --- Certainty = 0.0000CNot Clear) < succ>
                          bacterial cytoplasm --- Certainty = 0.0000(Not Clear) < succ>
```

[12917] No corresponding DNA sequence was identified in S. agalactiae.

[12918] The protein has homology with the following sequences in the GENPEPT database:

| >GP:BAA04270 GB:D17462 Na+ -ATPase subunit I [Enterococcus hirae] | | | |
|---|---|---|---|
| Identities = 232/681 (34%), Positives = 370/681 (54%), Gaps = 40/681 (5%) | | | |
| Query: | 1 | MAISQMKKLANVFEKDYLDLVLKTLQQSQLVEVRDMKQLKH---WQDAFNKGNVKLPQIV | 57 |
| | | MA+++M+K+ ++ +K +++L+ +Q VE+RD+ Q W + F P+++ | |
| Sbjct: | 1 | MAVTKMEKVTLISDKKNREILLQAVQGLHAVEIRDLFQESENNQWVETF----FPEPEMI | 56 |
| Query: | 58 | QYDLTHQKPLLDDEALQYLLQSQQELENGLASLSAFLPPIGKLTALRQ--KTPSLSFKQF | 115 |
| | | D K L Y L + + F+ G+ + +Q K LS | |
| Sbjct: | 57 | DKDKELAK-------LSYKLTD-------IRTAIQFIEHHGEKSQKKQHLKRRELSLDTL | 102 |
| Query: | 116 | EERHRQQAAQTALKNMSQKIERLEQLQSKIDQLTEYCQELEKWRSLTVLPQDLAQFHFLS | 175 |
| | | E+ + ++A L+ + E+ EQL + QL + L W++L + P+ | |
| Sbjct: | 103 | EKNYSEEAFSKKLEEVLLLKEQWEQLVOERQQLEDQENWLLNWQNLDLAPKAFDS-QMTK | 161 |
| Query: | 176 | ARVGTIPSTANNHFYHQLKQHKGLFIEEVYH----TEFEYGLVLFWQAQOTIHLQKYQFK | 231 |
| | | +GT+ + F ++ + ++EE+ T F Y ++ +++ +Y F | |
| Sbjct: | 162 | LVIGTVNAKNAESFKAEVAEINEAYLEEINSSPTTTYFAYIVLRADESRMEEIASRYGFV | 221 |
| Query: | 232 | PLLYKEQLLPSEQLRINKELLTNWLAEKDSLLKELRQSQKILAQLQVEIDYVLSQYQRQQ | 291 |
| | | Y + P +QL K+ L ++ L + + + + L++ +R+ | |
| Sbjct: | 222 | KEDYLYEGTPQQQLVAAKQSLQEIKDQQKKLSSAIGACSGYIKDFEWTEEIFLARSEREA | 281 |
| Query: | 292 | TKKQLLGTRHLIALEGWIEADSVNQLKGLMTKTLGDMFYLDSYDVTPDDW--EDVPIKLR | 349 |
| | | K +++ T +LI ++GW++ + +L ++ L ++D D+ E+VP KL+ | |
| Sbjct: | 282 | IKDRIIHTPYLILIQGWVDHEEKQELIHMLQNILASEEVYLTFDEPTDNEIAEEVPTKLK | 341 |
| Query: | 350 | NHRYIAPFELVTEMYALPKYQEKDPTPFLAPLYLTFFGMMVADLGYGLLLYAVTLAALVF | 409 |
| | | NH +APFE++TEMY+LPKY+E DPTP++ P YL FFGMMVAD+GYGLL++ | |
| Sbjct: | 342 | NHPIVAPFEHLTEMYSLPKYEEVDPTPWMNPFYLVFFGMMVADIGYGLLMFLGAFLLQKL | 401 |
| Query: | 410 | FNLQKTSKRLVTFFNILAISVAIWGLIYGSFFG---------FDLPVALLSTKTDVITIL | 460 |
| | | L + +R FF ILAI IWG IY SFFG LP +LST DV TIL | |
| Sbjct: | 402 | VVLPRGMQRFAKFFEILAIPSIIWGFIYSSFFGAALPKEIFGIHLPFPILSTTDDVNTIL | 461 |
| Query: | 461 | VVSLLFGFVTLIEGLLLGAWQQVHMKAYATAYTSSLAWTFILLGLLLFILGKNVSGLAYL | 520 |
| | | ++S++FG + ++ GL + A + ++ KAY A AW +ILLG++L +LG | |
| Sbjct: | 462 | ILSVIFGLIQILVGLFIAAKEHIKRKAYVDAVNDGFAWQWILLGIILILLGTNTLKNNAF | 521 |
| Query: | 521 | SVIGKWLALGNAFGILVVSLLKSKSLL-GLGSGLYNLYGISSYLSDLVSFTRLMALGLSG | 579 |
| | | +G LA+ +A IL++ + +S S G+ G YNLYG++ Y+ DLVS+TRLMALG+SG | |
| Sbjct: | 522 | VYLGGALAVLSAVCILIIPVFQSSSKAKGIAKGAYNLYGLTGYIGDLVSYTRLMALGISG | 581 |
| Query: | 580 | ASIGAAFNMIVGIFPPVTRFTVGIFIFILLHAINIFLSMLSGYVHGARLIFVEFFGKFYE | 639 |
| | | SI AAFNM+V PP RF+VGI + I+L A+N+FL++LS YVHGARL +VEFFGKFY | |
| Sbjct: | 582 | GSIAAAFNMLVAFMPPAARFSVGILLIIVLQALNHFLTLLSAYVHGARLQYVEFFGKFYT | 641 |
| Query: | 640 | GGGKAFNPLKLADNYVNVNEE | 660 |
| | | GGG++F PLK + YVN+N + | |
| Sbjct: | 642 | GGGRSFKPLKTVEKYVNINHK | 662 |

[12919] Based on this analysis, it was predicted that this GAS-specific protein and its epitopes, could be useful antigens for vaccines or diagnostics.

### EXAMPLE 2403

[12920] A DNA sequence (GASx148) was identified in S. pyogenes <SEQ ID 7305> which encodes the amino acid sequence <SEQ ID 7306>. Analysis of this protein sequence reveals the following:

```
Possible site: 40
>>> Seems to have no N-terminal signal sequence
INTEGRAL Likelihood = −7.80 Transmembrane 28-44 ( 21-51)
INTEGRAL Likelihood = −6.85 Transmembrane 148-164 ( 146-170)
INTEGRAL Likelihood = −2.81 Transmembrane 105-121 ( 105-123)
----- Final Results -----
                            bacterial membrane --- Certainty = 0.4121(Affirmative) < succ>
                              bacterial outside --- Certainty = 0.0000(Not Clear) < succ>
                          bacterial cytoplasm --- Certainty = 0.0000(Not Clear) < succ>
```

[12921] No corresponding DNA sequence was identified in S. agalactiae.

[12922] The protein has homology with the following sequences in the GENPEPT database:

>GP:BAA03841 GB:D16334 Na+-ATPase K subunit [Enterococcus hirae]
Identities = 85/150 (56%), Positives = 107/150 (70%)

| | | | |
|---|---|---|---|
| Query: | 20 | HYFTAHGGVFFAALGIVLAVALSGMGSAYGVGKGGQAAAALLKEEPEKFTSALILQLLPG | 79 |
| | | + T +GG+ FA L + A SG+GSA GVG G+AAAAL +PEKF ALILQLLPG | |
| Sbjct: | 4 | YLITQNGGMVFAVLAMATATIFSGIGSAKGVGMTGEAAAALTTSQPEKFGQALILQLLPG | 63 |
| Query: | 80 | SQGIYGFAIGILIWMKLTPELSVNQGLAYFLVSLPIAIVGYFSAKHQGNVSVAGMQILAK | 139 |
| | | +QG+YGF I LI++ L ++SV QGL + SLPIA G FS QG V+ AG+QILAK | |
| Sbjct: | 64 | TQGLYGFVIAFLIFINLGSDMSVVQGLNFLGASLPIAFTGLFSGIAQGKVAAAGIQILAK | 123 |
| Query: | 140 | RPKDFNKGVILAAMVETYAILAFVVSFILL | 169 |
| | | +P+ KG+I AAMVETYAIL FV+SF+L+ | |
| Sbjct: | 124 | KPEHATKGIIFAAMVETYAILGFVISFLLV | 153 |

[12923] Based on this analysis, it was predicted that this GAS-specific protein and its epitopes, could be useful antigens for vaccines or diagnostics.

### EXAMPLE 2404

[12924] A DNA sequence (GASx149) was identified in S. pyogenes <SEQ ID 7307> which encodes the amino acid sequence <SEQ ID 7308>. Analysis of this protein sequence reveals the following:

```
Possible site: 55
>>> Seems to have no N-terminal signal sequence
----- Final Results-----
                            bacterial cytoplasm --- Certainty = 0.4510(Affirmative) < succ>
                              bacterial membrane --- Certainty = 0.0000(Not Clear) < succ>
                                bacterial outside --- Certainty = 0.0000(Not Clear) < succ>
```

[12925] No corresponding DNA sequence was identified in S. agalactiae.

[12926] The protein has homology with the following sequences in the GENPEPT database:

| >GP:BAA04272 GB:017462 Na+ -ATPase subunit E [Enterococcus hirae] | | | |
|---|---|---|---|
| Identities = 43/193 (22%), Positives = 95/193 (48%), Gaps = 2/193 (1%) | | | |
| Query: | 1 | VNDITQLRQNVLEIAHQEGQQCLKIATDSLDTDFEERQQQGLHDLKAERQKELKALEQQF | 60 |
| | | V+ I ++ + E A E ++ +D F+ ++ Q D + ++ +L+ +E+ + | |
| Sbjct: | 3 | VDAIDKIITQINETAQLERASFEEMKRKEIDQKFEVKKWQIEADFQKEKASKLEEIERSY | 62 |
| Query: | 61 | QVAQQQLKNQERQALLALKQDSIKELFEASLEKMTNFSKEEELAFLKQVLSEYP-EQPLQ | 119 |
| | | + + + K Q +Q +L KQ+ ++ LF + ++ N KEE+LA +KQ++ P + | |
| Sbjct: | 63 | RQLRNKQKMQVKQEILNAKQEVLQRLFTEATLQLENEPKEEQLALMKQMIQTLPINGTAR | 122 |
| Query: | 120 | VTFGEKTGQKFSSYDCAELRLAFPQLSYNQELIPQ-EAGFLVSLDQVDDNYLYRYLLESV | 178 |
| | | + GEK+ + AE P ++ + +AG ++ + N+L+ +L++ + | |
| Sbjct: | 123 | LIPGEKSADILTPAVIAEWNEELPFELIREDFTSRAQAGLIIDDAGIQYNFLFSHLIEEI | 182 |
| Query: | 179 | LKEESSRIIDMLF | 191 |
| | | + S+ I LF | |
| Sbjct: | 183 | QETMSAEIAKELF | 195 |

[12927] Based on this analysis, it was predicted that this GAS-specific protein and its epitopes, could be useful antigens for vaccines or diagnostics.

### EXAMPLE 2405

[12928] A DNA sequence (GASx150) was identified in S. pyogenes <SEQ ID 7309> which encodes the amino acid sequence <SEQ ID 7310>. Analysis of this protein sequence reveals the following:

```
Possible site: 30
>>> Seems to have no N-terminal signal sequence
----- Final Results -----
                            bacterial cytoplasm --- Certainty = 0.3095(Affirmative) < succ>
                              bacterial membrane --- Certainty = 0.0000(Not Clear) < succ>
                                bacterial outside --- Certainty = 0.0000(Not Clear) < succ>
```

[12929] No corresponding DNA sequence was identified in S. agalactiae.

[12930] The protein has homology with the following sequences in the GENPEPT database:

| >GP: BAA04273 GB: D17462 Na+-ATPase subunit C [Enterococcus hirae] | | | |
|---|---|---|---|
| Identities = 94/326 (28%), Positives = 167/326 (50%), Gaps = 5/326 (1%) | | | |
| Query: | 6 | ELNTTISVKEKELLTKEQFDKLLQAPNTTTLARLLHQSVYHLTVDDLNDLDRLESILMAE | 65 |
| | | ELN I +E EL++K+ F++++Q + +L +L ++Y + D D D E+ L E | |
| Sbjct: | 5 | ELNPLIRGRELELISKDTFEQMIQTDSIDSLGEILQSTIYQPYIYDGFDKD-FEANLSQE | 63 |
| Query: | 66 | LTKTYRWAFAETPQPDIVQLFTLRYTYHNVKVLLKAKASQADLSHLLLPIGDKPLVALEH | 125 |
| | | +K ++W P+P+IV ++T+RYT+HN+KVL KA+ + +L HL + G L L+ | |
| Sbjct: | 64 | RSKLFQWLKESAPEPEIVWIYTMRYTFHNLKVLTKAEITGQNLDHLYIHDGFYSLEVLKD | 123 |
| Query: | 126 | LIRTMTSDEFPKEVVTEIQSIWAEYQDYQDIRVLEIGTDLAYFKALKQIAQRLEDPVFQQ | 185 |
| | | I T S E P ++ I+ + ++ ++ +++ D + +++ ++L P + | |
| Sbjct: | 124 | AIHTQVSVELPDSLMDYIREVHEYCEESTILQGIDVIYDRCFLTEQRRLGEQLGYPELLE | 183 |
| Query: | 186 | AVLIVIDLYNLITVRRAKSQNKPISFMMQLLSDEASRPSKTFITLEDDKDLMTWFENVTP | 245 |
| | | ++ IDL N+ T R Q++ FM ++S S P T ++ ++ ++ + + | |
| Sbjct: | 184 | EIIAFIDLTNITTTARGILQHRSAGFMTTVISSSGSIPKDTLLSFVRG-EMASFTQFLLT | 242 |
| Query: | 246 | DSYMTALKPYSEKLRQGTLQTTELEYLVDECLYHLFAKAKYQVDGPYVLARFLLAKSFEV | 305 |
| | | Y LK + + + + LE L D+ L + A+ Q GP L FL AK E | |
| Sbjct: | 243 | TDYSELLK---QVIHEEQIDLVSLEQLKDDYLSSFYQVAQTQAFGPLPLLAFLNAKEVES | 299 |
| Query: | 306 | KNLRLLAAALANDLPKERVIERMRPI | 331 |
| | | KNLRLL N E++ ERMR + | |
| Sbjct: | 300 | KNLRLLIIGKRNHFSLEQLKERMRQV | 325 |

[12931] Based on this analysis, it was predicted that this GAS-specific protein and its epitopes, could be useful antigens for vaccines or diagnostics.

### EXAMPLE 2406

[12932] A DNA sequence (GASx151) was identified in S. pyogenes <SEQ ID 7311> which encodes the amino acid sequence <SEQ ID 7312>. Analysis of this protein sequence reveals the following:

```
Possible Site: 29
>>> Seems to have no N-terminal signal sequence
----- Final Results -----
                            bacterial cytoplasm --- Certainty = 0.0484(Affirmative) < succ>
                              bacterial membrane --- Certainty = 0.0000(Not Clear) < succ>
                                bacterial outside --- Certainty = 0.0000(Not Clear) < succ>
```

[12933] No corresponding DNA sequence was identified in S. agalactiae.

[12934] The protein has homology with the following sequences in the GENPEPT database:

| >GP: BAA04274 GB: D17462 Na+-ATPase subunit G [Enterococcus hirae] | | | |
|---|---|---|---|
| Identities = 45/101 (44%), Positives = 65/101 (63%) | | | |
| Query: | 6 | YKVGVIGNRDVILPFQMIGFQTFPVIKPQDAINQLRQLAMEDFGIIYITEDIAAAIPEAL | 65 |
| | | YK+GV+G++D + PF++ GF + + ++A ++G+IYITE A +PE + | |
| Sbjct: | 3 | YKIGVVGDKDSVSPFRLFGFDVQHGTTKTEIRKTIDEMAKNEYGVIYITEQCANLVPETI | 62 |
| Query: | 66 | THYDNQVLPAVIPLPTHQGAQGIGLSRIQAMVEKAVGQNIL | 106 |
| | | Y Q+ PA+I +P+HQG GIGL IQ VEKAVGQNIL | |
| Sbjct: | 63 | ERYKGQLTPAIILIPSHQGTLGIGLEEIQNSVEKAVGQNIL | 103 |

[12935] Based on this analysis, it was predicted that this GAS-specific protein and its epitopes, could be useful antigens for vaccines or diagnostics.

### EXAMPLE 2407

[12936] A DNA sequence (GASx152R) was identified in S. pyogenes <SEQ ID 7313> which encodes the amino acid sequence <SEQ ID 7314>. Analysis of this protein sequence reveals the following:

```
Possible site: 21
>>> Seems to have no N-terminal signal sequence
----- Final Results -----
                            bacterial cytoplasm --- Certainty = 0.1048(Affirmative) < succ>
                              bacterial membrane --- Certainty = 0.0000(Not Clear) < succ>
                                bacterial outside --- Certainty = 0.0000(Not Clear) < succ>
```

[12937] No corresponding DNA sequence was identified in S. agalactiae.

[12938] The protein has no significant homology with any sequences in the GENPEPT database.

[12939] Based on this analysis, it was predicted that this GAS-specific protein and its epitopes, could be useful antigens for vaccines or diagnostics.

### EXAMPLE 2408

[12940] A DNA sequence (GASx156) was identified in S. pyogenes <SEQ ID 7315> which encodes the amino acid sequence <SEQ ID 7316>:
[12941] EYSIIPQLKETIHYIELKLEEAERASLVRIMKITS

[12942] Analysis of this protein sequence reveals the following:

```
Possible site: 16
>>> Seems to have no N-terminal signal sequence
----- Final Results -----
                            bacterial cytoplasm --- Certainty = 0.5026(Affirmative) < succ>
                              bacterial membrane --- Certainty = 0.0000(Not Clear) < succ>
                                bacterial outside --- Certainty = 0.0000(Not Clear) < succ>
```

[12943] No corresponding DNA sequence was identified in S. agalactiae.

[12944] The protein has homology with the following sequences in the GENPEPT database:

| >GP: BAA04277 GB: D17462 Na+-ATPase subunit D [Enterococcus hirae] | | | |
|---|---|---|---|
| Identities = 119/201 (59%), Positives = 151/201 (74%), Gaps = 2/201 (0%) | | | |
| Query: | 10 | RLNVKPTRMELSNLKNRLKTATRGHKLLKDKRDELMRRFVDLIRENNELRQTIEKELAAN | 69 |
| | | RLNV PTRMEL+ LK +L TATRGHKLLKDK+DELMR+F+ LIR+NNELRQ IEKE | |
| Sbjct: | 2 | RLNVNPTRMELTRLKKQLTTATRGHKLLKDKQDELMRQFILLIRKNNELRQAIEKETQTA | 61 |
| Query: | 70 | MKEFVLAKASENSLMVEELFAVPVHEVTLWIDIENIMSVNVPKFHVQSNTAREQEQGEFA | 129 |
| | | MK+FVLAK++ ++EL A+P V++ + +NIMSV VP + Q + + E | |
| Sbjct: | 62 | MKDFVLAKSTVEEAFIDELLALPAENVSISVVEKNIMSVKVPLMNFQYDETLNETPLE-- | 119 |
| Query: | 130 | YSYLSSNSEMDNTIQKTKELLEKLLRLAEVEKTCQLMADDIEKTRRRVNGLEYSIIPQLK | 189 |
| | | Y YL SN+E+D +I +LL KLL+LAEVEKTCQLMA++IEKTRRRVN LEY IPQL+ | |
| Sbjct: | 120 | YGYLHSNAELDRSIDGFTQLLPKLLKLAEVEKTCQLMAEEIEKTRRRVNALEYMTIPQLE | 179 |
| Query: | 190 | ETIHYIELKLEEAERASLVRI | 210 |
| | | ETI+YI++KLEE ERA + R+ | |
| Sbjct: | 180 | ETIYYIKMKLEENERAEVTRL | 200 |

[12945] Based on this analysis, it was predicted that this GAS-specific protein and its epitopes, could be useful antigens for vaccines or diagnostics.

### EXAMPLE 2409

[12946] A DNA sequence (GASx161R) was identified in S. pyogenes <SEQ ID 7317> which encodes the amino acid sequence <SEQ ID 7318>. Analysis of this protein sequence reveals the following:

```
Possible site: 27
>>> Seems to have an uncleavable N-term signal seq
----- Final Results -----
                              bacterial membrane --- Certainty = 0.0000(Not Clear) < succ>
                                bacterial outside --- Certainty = 0.0000(Not Clear) < succ>
                            bacterial cytoplasm --- Certainty = 0.0000(Not Clear) < succ>
```

[12947] No corresponding DNA sequence was identified in S. agalactiae.

[12948] The protein has no significant homology with any sequences in the GENPEPT database.

[12949] Based on this analysis, it was predicted that this GAS-specific protein and its epitopes, could be useful antigens for vaccines or diagnostics.

### EXAMPLE 2410

[12950] A DNA sequence (GASx164) was identified in S. pyogenes <SEQ ID 7319> which encodes the amino acid sequence <SEQ ID 7320>. Analysis of this protein sequence reveals the following:

| Possible site: 36 | | | | |
|---|---|---|---|---|
| >>> Seems to have no N-terminal signal sequence | | | | |
| | INTEGRAL | Likelihood = −1.06 | Transmembrane | 9-25 (9-25) |

```
----- Final Results -----
                              bacterial membrane --- Certainty = 0.1426(Affirmative) < succ>
                                bacterial outside --- Certainty = 0.0000(Not Clear) < succ>
                            bacterial cytoplasm --- Certainty = 0.0000(Not Clear) < succ>
```

[12951] A related sequence was also identified <SEQ ID 9091> which encodes the amino acid sequence <SEQ ID 9092>. Analysis of this protein sequence reveals the following:

```
Possible cleavage site: 33
>>> Seems to have a cleavable N-term signal seq.
----- Final Results -----
                                bacterial outside --- Certainty = 0.300(Affirmative) < succ>
                              bacterial membrane --- Certainty = 0.000(Not Clear) < succ>
                            bacterial cytoplasm --- Certainty = 0.000(Not Clear) < succ>
```

[12952] No corresponding DNA sequence was identified in S. agalactiae.

[12953] Based on this analysis, it was predicted that this GAS-specific protein and its epitopes, could be useful antigens for vaccines or diagnostics.

### EXAMPLE 2411

[12954] A DNA sequence (GASx165) was identified in S. pyogenes <SEQ ID 7321> which encodes the amino acid sequence <SEQ ID 7322>. Analysis of this protein sequence reveals the following:

```
Possible site: 59
>>> Seems to have no N-terminal signal sequence
----- Final Results -----
                            bacterial cytoplasm --- Certainty = 0.2251(Affirmative) < succ>
                              bacterial membrane --- Certainty = 0.0000(Not Clear) < succ>
                                bacterial outside --- Certainty = 0.0000(Not Clear) < succ>
```

[12955] No corresponding DNA sequence was identified in S. agalactiae.

[12956] The protein has no significant homology with any sequences in the GENPEPT database.

[12957] Based on this analysis, it was predicted that this GAS-specific protein and its epitopes, could be useful antigens for vaccines or diagnostics.

### EXAMPLE 2412

[12958] A DNA sequence (GASx166) was identified in S. pyogenes <SEQ ID 7323> which encodes the amino acid sequence <SEQ ID 7324>. Analysis of this protein sequence reveals the following:

```
Possible site: 34
>>> Seems to have a cleavable N-term signal seq.
----- Final Results -----
                                bacterial outside --- Certainty = 0.3000(Affirmative) < succ>
                              bacterial membrane --- Certainty = 0.0000(Not Clear) < succ>
                            bacterial cytoplasm --- Certainty = 0.0000(Not Clear) < succ>
```

[12959] No corresponding DNA sequence was identified in S. agalactiae.

[12960] Based on this analysis, it was predicted that this GAS-specific protein and its epitopes, could be useful antigens for vaccines or diagnostics.

### EXAMPLE 2413

[12961] A DNA sequence (GASx167) was identified in S. pyogenes <SEQ ID 7325> which encodes the amino acid sequence <SEQ ID 7326>. Analysis of this protein sequence reveals the following:

```
Possible site: 31
>>> Seems to have a cleavable N-term signal seq.
----- Final Results -----
                                bacterial outside --- Certainty = 0.3000(Affirmative) < succ>
                              bacterial membrane --- Certainty = 0.0000(Not Clear) < succ>
                            bacterial cytoplasm --- Certainty = 0.0000(Not Clear) < succ>
```

[12962] No corresponding DNA sequence was identified in S. agalactiae.

[12963] The protein has no significant homology with any sequences in the GENPEPT database.

[12964] Based on this analysis, it was predicted that this GAS-specific protein and its epitopes, could be useful antigens for vaccines or diagnostics.

### EXAMPLE 2414

[12965] A DNA sequence (GASx168R) was identified in S. pyogenes <SEQ ID 7327> which encodes the amino acid sequence <SEQ ID 7328>. Analysis of this protein sequence reveals the following:

```
Possible site: 22
>>> Seems to have a cleavable N-term signal seq.
----- Final Results -----
                                bacterial outside --- Certainty = 0.3000(Affirmative) < succ>
                              bacterial membrane --- Certainty = 0.0000(Not Clear) < succ>
                            bacterial cytoplasm --- Certainty = 0.0000(Not Clear) < succ>
```

[12966] No corresponding DNA sequence was identified in S. agalactiae.

[12967] The protein has no significant homology with any sequences in the GENPEPT database.

[12968] Based on this analysis, it was predicted that this GAS-specific protein and its epitopes, could be useful antigens for vaccines or diagnostics.

### EXAMPLE 2415

[12969] A DNA sequence (GASx169R) was identified in S. pyogenes <SEQ ID 7329> which encodes the amino acid sequence <SEQ ID 7330>. Analysis of this protein sequence reveals the following:

```
Possible site: 31
>>> Seems to have a cleavable N-term signal seq.
----- Final Results -----
                                bacterial outside --- Certainty = 0.3000(Affirmative) < succ>
                              bacterial membrane --- Certainty = 0.0000(Not Clear) < succ>
                            bacterial cytoplasm --- Certainty = 0.0000(Not Clear) < succ>
```

[12970] No corresponding DNA sequence was identified in S. agalactiae.

[12971] The protein has no significant homology with any sequences in the GENPEPT database.

[12972] Based on this analysis, it was predicted that this GAS-specific protein and its epitopes, could be useful antigens for vaccines or diagnostics.

### EXAMPLE 2416

[12973] A DNA sequence (GASx170) was identified in S. pyogenes <SEQ ID 7331> which encodes the amino acid sequence <SEQ ID 7332>. Analysis of this protein sequence reveals the following:

| Possible site: 61 | | | | |
|---|---|---|---|---|
| >>> Seems to have no N-terminal signal sequence | | | | |
| | INTEGRAL | Likelihood = −2.34 | Transmembrane | 154-170 (153-170) |
| | INTEGRAL | Likelihood = −1.12 | Transmembrane | 20-36 (19-36) |
| | INTEGRAL | Likelihood = −0.69 | Transmembrane | 52-68 (52-68) |
| | INTEGRAL | Likelihood = −0.53 | Transmembrane | 399-415 (399-415) |

```
----- Final Results -----
                              bacterial membrane --- Certainty = 0.1935(Affirmative) < succ>
                                bacterial outside --- Certainty = 0.0000(Not Clear) < succ>
                            bacterial cytoplasm --- Certainty = 0.0000(Not Clear) < succ>
```

[12974] No corresponding DNA sequence was identified in S. agalactiae.

[12975] The protein has homology with the following sequences in the GENPEPT database:

| >GP: BAB05347 GB: AP001512 cystathionine beta-lyase | | | |
|---|---|---|---|
| [Bacillus halodurans] | | | |
| Identities = 200/384 (52%), Positives = 262/384 (68%), | | | |
| Gaps = 3/384 (0%) | | | |
| Query: | 79 | IAEVYEMRENTTLLHGYTVIDEFTGAASVPIYQTSTFHNSELYCPSQKHLYTRFSNPTTE | 138 |
| | | ++E Y ++ T LLH +D+ TGA SVPI STFH + + + Y+R NPT + | |
| Sbjct: | 1 | MSEQYSLQ--TKLLHNEHKVDQATGAVSVPIQHASTFHQFD-FDTFGTYDYSRSGNPTRD | 57 |
| Query: | 139 | ALEDGLACLEKATYAVAYASGMAAISTVLMLLKAGDHVIFPLEVYGGTCQFATAILPNYQ | 198 |
| | | ALE +A LE + A+ASGMAAIST MLL GDHV+ +VYGGT + T +L | |
| Sbjct: | 58 | ALEAAIAELEGGNHGFAFASGMAAISTAFMLLSKGDHVVLTKDVYGGTFRLVTEVLTRLG | 117 |
| Query: | 199 | IETSFVDMADLATVKASIRPNTRMIYLETPSNPLLKICDISELVQLAKAYGVLTVADNTF | 258 |
| | | IE +FVDM +LA V A+IRPNTR++Y+ETPSNP L I DI +V LAK + LT DNTF | |
| Sbjct: | 118 | IEHTFVDMTNLAEVAAAIRPNTRVLYMETPSNPTLNITDIRGVVSLAKEHECLTFLDNTF | 177 |
| Query: | 259 | MTSLYQEPLAMGVDIVVESVTKFINGHSDVVAGLAATNNEAIYNQLKLFQKNFGAIVGVE | 318 |
| | | +T Q PL +GVD+V+ S TKFI GHSDVVAGLA T NE + +L Q +FGAI+GV+ | |
| Sbjct: | 178 | LTPALQRPLELGVDVVLHSATKFIGGHSDVVAGLAVTKNEELGKKLAFLQNSFGAILGVQ | 237 |
| Query: | 319 | DAWLILRGMKTMGIRMEQAVKNAQQLANYLAKHPKVLKVHYPGLDSHPNHDTHLQQAKNG | 378 |
| | | D WL+LRG+KT+ +RME K AQQ+A +L P+V +V+YPGL HP H+ +QA+ | |
| Sbjct: | 238 | DVWLVLRGLKTLHVRMEHGEKGAQQIAEWLQGVPEVKRVYYPGLKDHPGHELQKRQAEGF | 297 |
| Query: | 379 | GAVLSFELASKEELMTFTHRIQLPILAVSLGGVESILSHPATMSHACLSPQARLEQGVVD | 438 |
| | | GAVLSFEL ++E + F ++LP+ AVSLG VESILS+PA MSHA + + R +G+ D | |
| Sbjct: | 298 | GAVLSFELENEEAVRRFVEHVKLPVFAVSLGAVESILSYPAKMSHAAMPKEEREARGIRD | 357 |
| Query: | 439 | GLLRLSCGVENIEDLLADFEQALA | 462 |
| | | GLLRLS G+E E+L+ADF+ A A | |
| Sbjct: | 358 | GLLRLSVGLEKPEELMADFKAAFA | 381 |

[12976] Based on this analysis, it was predicted that this GAS-specific protein and its epitopes, could be useful antigens for vaccines or diagnostics.

### EXAMPLE 2417

[12977] A DNA sequence (GASx178) was identified in S. pyogenes <SEQ ID 7333> which encodes the amino acid sequence <SEQ ID 7334>. Analysis of this protein sequence reveals the following:

```
Possible site: 21
>>> Seems to have no N-terminal signal sequence
----- Final Results -----
                            bacterial cytoplasm --- Certainty = 0.1492(Affirmative) < succ>
                              bacterial membrane --- Certainty = 0.0000(Not Clear) < succ>
                                bacterial outside --- Certainty = 0.0000(Not Clear) < succ>
```

[12978] No corresponding DNA sequence was identified in S. agalactiae.

[12979] The protein has no significant homology with any sequences in the GENPEPT database.

[12980] Based on this analysis, it was predicted that this GAS-specific protein and its epitopes, could be useful antigens for vaccines or diagnostics.

### EXAMPLE 2418

[12981] A DNA sequence (GASx182) was identified in S. pyogenes <SEQ ID 7335> which encodes the amino acid sequence <SEQ ID 7336>. Analysis of this protein sequence reveals the following:

```
Possible site: 22
>>> Seems to have no N-terminal signal sequence
----- Final Results -----
                            bacterial cytoplasm --- Certainty = 0.2584(Affirmative) < succ>
                              bacterial membrane --- Certainty = 0.0000(Not Clear) < succ>
                                bacterial outside --- Certainty = 0.0000(Not Clear) < succ>
```

[12982] No corresponding DNA sequence was identified in S. agalactiae.

[12983] The protein has no significant homology with any sequences in the GENPEPT database.

[12984] Based on this analysis, it was predicted that this GAS-specific protein and its epitopes, could be useful antigens for vaccines or diagnostics.

### EXAMPLE 2419

[12985] A DNA sequence (GASx187) was identified in S. pyogenes <SEQ ID 7337> which encodes the amino acid sequence <SEQ ID 7338>. Analysis of this protein sequence reveals the following:

```
Possible site: 61
>>> Seems to have no N-terminal signal sequence
----- Final Results -----
                            bacterial cytoplasm --- Certainty = 0.2084(Affirmative) < succ>
                              bacterial membrane --- Certainty = 0.0000(Not Clear) < succ>
                                bacterial outside --- Certainty = 0.0000(Not Clear) < succ>
```

[12986] No corresponding DNA sequence was identified in S. agalactiae.

[12987] Based on this analysis, it was predicted that this GAS-specific protein and its epitopes, could be useful antigens for vaccines or diagnostics.

### EXAMPLE 2420

[12988] A DNA sequence (GASx188) was identified in S. pyogenes <SEQ ID 7339> which encodes the amino acid sequence <SEQ ID 7340>. Analysis of this protein sequence reveals the following:

```
Possible site: 34
>>> Seems to have no N-terminal signal sequence
----- Final Results -----
                            bacterial cytoplasm --- Certainty = 0.2060(Affirmative) < succ>
                              bacterial membrane --- Certainty = 0.0000(Not Clear) < succ>
                                bacterial outside --- Certainty = 0.0000(Not Clear) < succ>
```

[12989] No corresponding DNA sequence was identified in S. agalactiae.

[12990] The protein has homology with the following sequences in the GENPEPT database:

| >GP: AAG05515 GB: AE004640 conserved hypothetical protein | | | |
|---|---|---|---|
| [Pseudomonas aeruginosa] | | | |
| Identities = 140/442 (31%), Positives = 208/442 (46%), | | | |
| Gaps = 73/442 (16%) | | | |
| Query: | 2 | KKYLNQNVYDALIERLHFLFNDFPIVYISFSGGKDSGLLLNILLDFRDKYYPDREIG--- | 58 |
| | | K Y + +V+ A + RL +F +F V ++FSGGKDS + L + LD RE+G | |
| Sbjct: | 4 | KHYQDADVHAATLSRLRLVFRNFERVCVAFSGGKDSSVTLQLALDVA------RELGRSP | 57 |
| Query: | 59 | --VFHQDFEAQYSLTTKYVQETFTSLEGRKKVSLYWVCLPMATRTALSSYEMFWYPWDDK | 116 |
| | | V D E QY T +V E GR V +WVCLP+ R A S E +W W+ | |
| Sbjct: | 58 | VDVLFIDLEGQYQATIDHVSEML----GRPDVRPWWVCLPLNLRNASSLEEPYWCCWEPG | 113 |
| Query: | 117 | TEDIWVRPMPSQDYVINLENNSITTYRYKMNQEDLAKQFGRWYKQIHGNQKTVCILGNRA | 176 |
| | | E WVRP+P Q VI+ + YRY+M E+ F W + + T ++G R+ | |
| Sbjct: | 114 | AEADWVRPLPKQRGVIS-DPAFFPFYRYRMEFEEFVAGFNAWLAR---EEPTAFLVGIRS | 169 |
| Query: | 177 | SESLHRYSGFINKKYGYQKEC------------WITKQFKDVWTAS--PLYDWSVEDIWH | 222 |
| | | ESL+RY K+ K+C W + + S P+YDW ED+W | |
| Sbjct: | 170 | DESLNRYLAV--KRRSRAKQCAWTPPGGSAPLAWSARDRANPQAVSFFPIYDWRFEDLWR | 227 |
| Query: | 223 | AYYKFSYSYNELYDLFYKAGLKPSQMRVASPFQDYAVDSLNLYRIIDQETWVKLLGRVQG | 282 |
| | | Y+YN LYD Y+AG+ SQMR+ P+ D L+L+ I+ TW K++ RV G | |
| Sbjct: | 228 | CVADHGYAYNRLYDQMYRAGVPFSQMRICQPYGDDQRKGLDLFHRIEPRTWFKVVRRVAG | 287 |
| Query: | 283 | VNFSNIYGRTKAMGYK-SIALPKGH-SWKSYTQFLLSTLPVRLRNNYVRKFNKSIDFWHK | 340 |
| | | N+ Y R + +GY+ + LP +W+ Y+QFLL ++P LR Y R+ + I +W + | |
| Sbjct: | 288 | ANYGARYCRQRFLGYRGGLGLPPSFGTWREYSQFLLRSMPPPLRGIYQRRIERFILWWKQ | 347 |
| Query: | 341 | TGGGLAEETINELIEKGYRIARNGISNYTSFKHSRVIFLDQ-IPDDTDDIVTTKDIPSWK | 399 |
| | | LA I+ D IP + + PSW+ | |
| Sbjct: | 348 | HDYPLA------------------------------IWPDAGIP----ALENRRKQPSWR | 373 |
| Query: | 400 | RMCFCILKNDHICRTMGFGLTR | 421 |
| | | R+ +LK D + R++ FG ++ | |
| Sbjct: | 374 | RIALSLLKQD-MARSLSFGFSQ | 394 |

[12991] Based on this analysis, it was predicted that this GAS-specific protein and its epitopes, could be useful antigens for vaccines or diagnostics.

### EXAMPLE 2421

[12992] A DNA sequence (GASx189) was identified in S. pyogenes <SEQ ID 7341> which encodes the amino acid sequence <SEQ ID 7342>. Analysis of this protein sequence reveals the following:

```
Possible site: 45
>>> Seems to have no N-terminal signal sequence
----- Final Results -----
                            bacterial cytoplasm --- Certainty = 0.4121(Affirmative) < succ>
                              bacterial membrane --- Certainty = 0.0000(Not Clear) < succ>
                                bacterial outside --- Certainty = 0.0000(Not Clear) < succ>
```

[12993] No corresponding DNA sequence was identified in S. agalactiae.

[12994] The protein has homology with the following sequences in the GENPEPT database:

| >GP: AAC73702 GB: AE000165 orf, hypothetical protein | | | |
|---|---|---|---|
| [Escherichia coli] | | | |
| Identities = 79/162 (48%), Positives = 110/162 (67%), Gaps = 1/162 (0%) | | | |
| Query: | 7 | PVYEIKSIPIEKISPNDYNPNSVAPPEMKLLYDSIKSDGYTMPIVCYYDKEEDRYSIVDG | 66 |
| | | PV + + ++ PNDYNPN+VAPPE KLL SI+ DG+T PIV + +++ IVDG | |
| Sbjct: | 46 | PVDCVLWVKNSQLMPNDYNPNNVAPPEKKLLQKSIEIDGFTQPIVVTHT-DKNAMEIVDG | 104 |
| Query: | 67 | FHRYRIMLDYSDIYERESGRLPVSVIDKSLDYRMASTIRHNRARGSHDVDLMSQIVKDLH | 126 |
| | | FHR+ I S + R G LPV+ ++ + + R+A+TIRHNRARG H + MS+IV++L | |
| Sbjct: | 105 | FHRHEIGKGSSSLKLRLKGYLPVTCLEGTRNQRIAATIRHNRARGRHQITAMSEIVRELS | 164 |
| Query: | 127 | ECGRSDNWIAKHLGMDKDEILRLKQITGLASLFKDHEFNQSW | 168 |
| | | + G DN I K LGMD DE+LRLKQI GL LF D +++++W | |
| Sbjct: | 165 | QLGWDDNKIGKELGMDSDEVLRLKQINGLQELFADRQYSRAW | 206 |

[12995] Based on this analysis, it was predicted that this GAS-specific protein and its epitopes, could be useful antigens for vaccines or diagnostics.

### EXAMPLE 2422

[12996] A repeated DNA sequence (GASx192R) was identified in S. pyogenes <SEQ ID 7343> which encodes the amino acid sequence <SEQ ID 7344>. Analysis of this protein sequence reveals the following:

```
Possible site: 13
>>> Seems to have no N-terminal signal sequence
----- Final Results -----
                            bacterial cytoplasm --- Certainty = 0.4301(Affirmative) < succ>
                              bacterial membrane --- Certainty = 0.0000(Not Clear) < succ>
                                bacterial outside --- Certainty = 0.0000(Not Clear) < succ>
```

[12997] No corresponding DNA sequence was identified in S. agalactiae.

[12998] The protein has homology with the following sequences in the GENPEPT database:

>GP: CAA63509 GB: X92946 transposase
[Lactococcus lactis]
Identities = 23/36 (63%), Positives = 28/36 (76%)

| | | | |
|---|---|---|---|
| Query: | 1 | MQDKLVTEAFNQAYNREKPKEGVIVHTDQGSQYTGA | 36 |
| | | MQDKLV + F QA +E P+ G+IVHTDQGSQYT + | |
| Sbjct: | 134 | MQDKLVRDCFLQACGKEHPQPGLIVHTDQGSQYTSS | 169 |

[12999] Based on this analysis, it was predicted that this GAS-specific protein and its epitopes, could be useful antigens for vaccines or diagnostics.

### EXAMPLE 2423

[13000] A DNA sequence (GASx194R) was identified in S. pyogenes <SEQ ID 7345> which encodes the amino acid sequence <SEQ ID 7346>. Analysis of this protein sequence reveals the following:

```
Possible site: 26
>>> Seems to have an uncleavable N-term signal seq
----- Final Results -----
                              bacterial membrane --- Certainty = 0.0000(Not Clear) < succ>
                                bacterial outside --- Certainty = 0.0000(Not Clear) < succ>
                            bacterial cytoplasm --- Certainty = 0.0000(Not Clear) < succ>
```

[13001] No corresponding DNA sequence was identified in S. agalactiae.

[13002] The protein has homology with the following sequences in the GENPEPT database:

| >GP: CAA63508 GB: X92946 hypothetical protein | | | |
|---|---|---|---|
| [Lactococcus lactis] | | | |
| Identities = 64/96 (66%), Positives = 78/96 (80%) | | | |
| Query: | 1 | MPRKTFDKAFKLSAVKLILEEEQSVKMVSSTLEIHPNSLYQWIQEYEKYGESAFPGHGSA | 60 |
| | | M R+ FDK FK SAVKLILEE SVK VS LE+H NSLY+W+QE E+YGESAFPG+G+A | |
| Sbjct: | 1 | MARRKFDKQFKNSAVKLILEEGYSVKEVSQELEVHANSLYRWVQEVEEYGESAFPGNGTA | 60 |
| Query: | 61 | LRHAQFETKKLEKEHKLLQEELALLKKFQVFLKPNR | 96 |
| | | L +AQ + K LEKE++ LQEEL LLKKF+VFLK ++ | |
| Sbjct: | 61 | LANAQHKIKLLEKENRYLQEELELLKKFRVFLKRSK | 96 |

[13003] Based on this analysis, it was predicted that this GAS-specific protein and its epitopes, could be useful antigens for vaccines or diagnostics.

### EXAMPLE 2424

[13004] A DNA sequence (GASx195R) was identified in S. pyogenes <SEQ ID 7347> which encodes the amino acid sequence <SEQ ID 7348>. Analysis of this protein sequence reveals the following:

| Possible site: 13 | | | | |
|---|---|---|---|---|
| >>> Seems to have a cleavable N-term signal seq. | | | | |
| | INTEGRAL | Likelihood = −11.30 | Transmembrane | 179-195 (173-201) |
| | INTEGRAL | Likelihood = −8.86 | Transmembrane | 229-245 (224-254) |
| | INTEGRAL | Likelihood = −8.39 | Transmembrane | 289-305 (280-307) |
| | INTEGRAL | Likelihood = −8.23 | Transmembrane | 417-433 (410-435) |
| | INTEGRAL | Likelihood = −5.89 | Transmembrane | 324-340 (323-349) |
| | INTEGRAL | Likelihood = −4.73 | Transmembrane | 260-276 (256-278) |
| | INTEGRAL | Likelihood = −4.51 | Transmembrane | 96-112 (91-113) |
| | INTEGRAL | Likelihood = −4.25 | Transmembrane | 24-40 (20-43) |
| | INTEGRAL | Likelihood = −2.44 | Transmembrane | 344-360 (342-360) |

```
----- Final Results -----
                              bacterial membrane --- Certainty = 0.5522(Affirmative) < succ>
                                bacterial outside --- Certainty = 0.0000(Not Clear) < succ>
                            bacterial cytoplasm --- Certainty = 0.0000(Not Clear) < succ>
```

[13005] No corresponding DNA sequence was identified in S. agalactiae.

[13006] The protein has homology with the following sequences in the GENPEPT database:

| >GP: CAB75191 GB: AL139075 putative integral membrane protein | | | |
|---|---|---|---|
| [Campylobacter jejuni] | | | |
| Identities = 177/430 (41%), Positives = 274/430 (63%), | | | |
| Gaps = 8/430 (1%) | | | |
| Query: | 5 | IIISAIALAIGIGYRTKINIGLLAIAFSYLIATTLMGLSPKELLHFWPTSLFFTIFSVSL | 64 |
| | | +IIS+I +AI +GY T+ N+G+ A+ F+Y+I M L+PK+++ FWP S+FF IF+VSL | |
| Sbjct: | 6 | LIISSIIVAIILGYITRHNVGIFAMIFAYIIGAFFMDLAPKKIIAFWPISIFFVIFAVSL | 65 |
| Query: | 65 | FYNVATTNGTLDVLAQHILYRTRTHPNALYMILYLIATLLSALGAGFFTTMAVCCPLAIT | 124 |
| | | FYN AT NGTL+ LA H++YR HP L ++++++ +++ALGAGF+T +A PL | |
| Sbjct: | 66 | FYNFATVNGTLEKLAGHLMYRFANHPYLLPFVIFVVSAIIAALGAGFYTVLAFMAPLTFL | 125 |
| Query: | 125 | LCQKADKHPLIGAQAVNWGASGGANLITSGSGIVFQGLFKQMGWE-EQAFSLGNHIFIVS | 183 |
| | | LC K + GA A+N+GA GGAN ITS SGI+F+GL + G E +AF+ + IF + | |
| Sbjct: | 126 | LCDKIGLSKIAGAMAINYGALGGANFITSQSGIIFRGLMENSGIEANEAFANSSIIFAFT | 185 |
| Query: | 184 | IIYPLIVLLLLSCYIRYSKGRTNSSLT-IDQPPVLSKVQRQTTLLMISSMVLVWLFPLLL | 242 |
| | | II P++VL + ++ + N ++ I +P Q+ T +LM +V+V +FP+L | |
| Sbjct: | 186 | IILPIVVL----SFFVFNAFKNNIKISVISKPDPFDYKQKTTLILMFMMIVVVLIFPVLN | 241 |
| Query: | 243 | LIFPNIAWIATYRQTFDIGFVSILMVCLALRLKLGKQEAILAKVPWAIIIMLCGMSLLMS | 302 |
| | | +IFP+ I+ + + DI ++++ V +AL LKL ++ ++A +PW +IM+CG+ +L+S | |
| Sbjct: | 242 | IIFPHNETISYFNKKIDIAMIAMIFVAIALFLKLADEKQVVALIPWGTLIMICGVGMLIS | 301 |
| Query: | 303 | LAVKSGLVTLIGHLITTTIPHFWLPLFFCVIAGVMSLFSSTLSVVAPTLFPIIATISAQS | 362 |
| | | +AV++G + L L+ I ++PL C IA MSLFSSTL VV P LFPI+ +I+A S | |
| Sbjct: | 302 | IAVEAGAIKLFSDLVENEINVIFIPLIMCAIAAFMSLFSSTLGVVTPALFPIVPSIAASS | 361 |
| Query: | 363 | PHIDIRLLTTATIIGALSTNISPFSSAGSLIQLSLPHIEERSLAFKKQILLGVPISLSLA | 422 |
| | | + LL + ++GA ++ ISPFSS GSLI S P + L FK ++ VPI A | |
| Sbjct: | 362 | -GLSEALLFSCIVVGAQASAISPFSSGGSLILGSCPDKYKEKL-FKDLLIKAVPIGFIAA | 419 |
| Query: | 423 | LLTIWILMLL | 432 |
| | | +L I+ + | |
| Sbjct: | 420 | ILATIIMSFI | 429 |

[13007] Based on this analysis, it was predicted that this GAS-specific protein and its epitopes, could be useful antigens for vaccines or diagnostics.

### EXAMPLE 2425

[13008] A DNA sequence (GASx196) was identified in S. pyogenes <SEQ ID 7349> which encodes the amino acid sequence <SEQ ID 7350>. Analysis of this protein sequence reveals the following:

```
Possible site: 57
>>> Seems to have no N-terminal signal sequence
----- Final Results -----
                            bacterial cytoplasm --- Certainty = 0.0563(Affirmative) < succ>
                              bacterial membrane --- Certainty = 0.0000(Not Clear) < succ>
                                bacterial outside --- Certainty = 0.0000(Not Clear) < succ>
```

[13009] No corresponding DNA sequence was identified in S. agalactiae.

[13010] The protein has homology with the following sequences in the GENPEPT database:

| >GP: AAC45128 GB: U65510 nicotinate-nucleotide pyrophosphorylase | | | |
|---|---|---|---|
| [Rhodospirillum rubrum] | | | |
| Identities = 116/277 (41%), Positives = 170/277 (60%), | | | |
| Gaps = 4/277 (1%) | | | |
| Query: | 17 | LTPFQIDDTLKAALREDV-HSEDYSTNAIFDHHGQAKVSLFAKEAGVLAGLTVFQRVFTL | 75 |
| | | L+PF ID+ ++ AL ED+ + D ++ A +A A++ G+LAGL + F L | |
| Sbjct: | 10 | LSPFAIDEAVRRALAEDLGRAGDITSTATIPAATRAHARFVARQPGILAGLGCARSAFAL | 69 |
| Query: | 76 | FDTEVTFQNPHQFKDGDRLTSGDLVLEIIGSVRSLLTCERVALNFLQHLSGIASMTAAYV | 135 |
| | | D VTF P +DG + +G V E+ G+ R++L ER ALNFL HLSGIA+ T + | |
| Sbjct: | 70 | LDDTVTFTTP--LEDGAEIAAGQTVAEVAGAARTILAAERTALNFLGHLSGIATRTRRFG | 127 |
| Query: | 136 | EALGDDRIKVFDTRKTTPNLRLFEKYAVRVGGGYNHRFNLSDAIMLKDNHIAAVGSVQKA | 195 |
| | | +A+ R ++ TRKTTP LR EKYAVR GGG NHRF L DA+++KDNHIA G V A | |
| Sbjct: | 128 | DAIAHTRARLTCTRKTTPGLRGLEKYAVRCGGGSNHRFGLDDAVLIKDNHIAVAGGVSAA | 187 |
| Query: | 196 | IAQARAYAPFVKMVEVEVESL-AAAEEAAAAGVDIIMLDNMSLEQIEQAITLIAGRSRIE | 254 |
| | | +++ARA + +E+EV++L AE A G ++++LDNM + +A+ ++AGR E | |
| Sbjct: | 188 | LSRARAGVGHMVRIEIEVDTLEQLAEVLAVGGAEVVLLDNMDAPTLTRAVDMVAGRLVTE | 247 |
| Query: | 255 | CSGNIDMTTISRFRGLAIDYVSSGSLTHSAKSLDFSM | 291 |
| | | SG + + TI+ +DY+S G+LTHS +LD + | |
| Sbjct: | 248 | ASGGVSLDTIAALAESGVDYISVGALTHSVTTLDIGL | 284 |

[13011] Based on this analysis, it was predicted that this GAS-specific protein and its epitopes, could be useful antigens for vaccines or diagnostics.

### EXAMPLE 2426

[13012] A DNA sequence (GASx199) was identified in S. pyogenes <SEQ ID 7351> which encodes the amino acid sequence <SEQ ID 7352>. Analysis of this protein sequence reveals the following:

```
Possible site: 25
>>> Seems to have no N-terminal signal sequence
----- Final Results -----
                            bacterial cytoplasm --- Certainty = 0.1649(Affirmative) < succ>
                              bacterial membrane --- Certainty = 0.0000(Not Clear) < succ>
                                bacterial outside --- Certainty = 0.0000(Not Clear) < succ>
```

[13013] No corresponding DNA sequence was identified in S. agalactiae.

[13014] The protein has no significant homology with any sequences in the GENPEPT database.

[13015] Based on this analysis, it was predicted that this GAS-specific protein and its epitopes, could be useful antigens for vaccines or diagnostics.

### EXAMPLE 2427

[13016] A DNA sequence (GASx201) was identified in S. pyogenes <SEQ ID 7353> which encodes the amino acid sequence <SEQ ID 7354>. Analysis of this protein sequence reveals the following:

```
Possible site: 19
>>> Seems to have an uncleavable N-term signal seq
----- Final Results -----
                              bacterial membrane --- Certainty = 0.0000(Not Clear) < succ>
                                bacterial outside --- Certainty = 0.0000(Not Clear) < succ>
                            bacterial cytoplasm --- Certainty = 0.0000(Not Clear) < succ>
```

[13017] No corresponding DNA sequence was identified in S. agalactiae.

[13018] The protein has no significant homology with any sequences in the GENPEPT database.

[13019] Based on this analysis, it was predicted that this GAS-specific protein and its epitopes, could be useful antigens for vaccines or diagnostics.

### EXAMPLE 2428

[13020] A DNA sequence (GASx203) was identified in S. pyogenes <SEQ ID 7355> which encodes the amino acid sequence <SEQ ID 7356>. Analysis of this protein sequence reveals the following:

```
Possible site: 37
>>> Seems to have a cleavable N-term signal seq.
----- Final Results -----
                                bacterial outside --- Certainty = 0.3000(Affirmative) < succ>
                              bacterial membrane --- Certainty = 0.0000(Not Clear) < succ>
                            bacterial cytoplasm --- Certainty = 0.0000(Not Clear) < succ>
```

[13021] No corresponding DNA sequence was identified in S. agalactiae.

[13022] The protein has no significant homology with any sequences in the GENPEPT database.

[13023] Based on this analysis, it was predicted that this GAS-specific protein and its epitopes, could be useful antigens for vaccines or diagnostics.

### EXAMPLE 2429

[13024] A DNA sequence (GASx210) was identified in S. pyogenes <SEQ ID 7357> which encodes the amino acid sequence <SEQ ID 7358>. Analysis of this protein sequence reveals the following:

```
Possible site: 29
>>> Seems to have an uncleavable N-term signal seq
----- Final Results -----
                              bacterial membrane --- Certainty = 0.0000(Not Clear) < succ>
                                bacterial outside --- Certainty = 0.0000(Not Clear) < succ>
                            bacterial cytoplasm --- Certainty = 0.0000(Not Clear) < succ>
```

[13025] No corresponding DNA sequence was identified in S. agalactiae.

[13026] The protein has no significant homology with any sequences in the GENPEPT database.

[13027] Based on this analysis, it was predicted that this GAS-specific protein and its epitopes, could be useful antigens for vaccines or diagnostics.

### EXAMPLE 2430

[13028] A DNA sequence (GASx211) was identified in S. pyogenes <SEQ ID 7359> which encodes the amino acid sequence <SEQ ID 7360>. Analysis of this protein sequence reveals the following:

```
Possible site: 24
>>> Seems to have a cleavable N-term signal seq.
----- Final Results -----
                                bacterial outside --- Certainty = 0.3000(Affirmative) < succ>
                              bacterial membrane --- Certainty = 0.0000(Not Clear) < succ>
                            bacterial cytoplasm --- Certainty = 0.0000(Not Clear) < succ>
```

[13029] No corresponding DNA sequence was identified in S. agalactiae.

[13030] Based on this analysis, it was predicted that this GAS-specific protein and its epitopes, could be useful antigens for vaccines or diagnostics.

### EXAMPLE 2431

[13031] A DNA sequence (GASx213) was identified in S. pyogenes <SEQ ID 7361> which encodes the amino acid sequence <SEQ ID 7362>. Analysis of this protein sequence reveals the following:

```
Possible site: 14
>>> Seems to have no N-terminal signal sequence
----- Final Results -----
                            bacterial cytoplasm --- Certainty = 0.4430(Affirmative) < succ>
                              bacterial membrane --- Certainty = 0.0000(Not Clear) < succ>
                                bacterial outside --- Certainty = 0.0000(Not Clear) < succ>
```

[13032] No corresponding DNA sequence was identified in S. agalactiae.

[13033] The protein has no significant homology with any sequences in the GENPEPT database.

[13034] Based on this analysis, it was predicted that this GAS-specific protein and its epitopes, could be useful antigens for vaccines or diagnostics.

### EXAMPLE 2432

[13035] A DNA sequence (GASx219) was identified in S. pyogenes <SEQ ID 7363> which encodes the amino acid sequence <SEQ ID 7364>. Analysis of this protein sequence reveals the following:

```
Possible site: 15
>>> Seems to have an uncleavable N-term signal seq
----- Final Results -----
                              bacterial membrane --- Certainty = 0.0000(Not Clear) < succ>
                                bacterial outside --- Certainty = 0.0000(Not Clear) < succ>
                            bacterial cytoplasm --- Certainty = 0.0000(Not Clear) < succ>
```

[13036] No corresponding DNA sequence was identified in S. agalactiae.

[13037] The protein has no significant homology with any sequences in the GENPEPT database.

[13038] Based on this analysis, it was predicted that this GAS-specific protein and its epitopes, could be useful antigens for vaccines or diagnostics.

### EXAMPLE 2433

[13039] A DNA sequence (GASx220) was identified in S. pyogenes <SEQ ID 7365> which encodes the amino acid sequence <SEQ ID 7366>. Analysis of this protein sequence reveals the following:

```
Possible site: 24
>>> Seems to have no N-terminal signal sequence
----- Final Results -----
                            bacterial cytoplasm --- Certainty = 0.0530(Affirmative) < succ>
                              bacterial membrane --- Certainty = 0.0000(Not Clear) < succ>
                                bacterial outside --- Certainty = 0.0000(Not Clear) < succ>
```

[13040] No corresponding DNA sequence was identified in S. agalactiae.

[13041] The protein has no significant homology with any sequences in the GENPEPT database.

[13042] Based on this analysis, it was predicted that this GAS-specific protein and its epitopes, could be useful antigens for vaccines or diagnostics.

### EXAMPLE 2434

[13043] A DNA sequence (GASx231R) was identified in S. pyogenes <SEQ ID 7367> which encodes the amino acid sequence <SEQ ID 7368>. Analysis of this protein sequence reveals the following:

```
Possible site: 30
>>> Seems to have an uncleavable N-term signal seq
----- Final Results -----
                              bacterial membrane --- Certainty = 0.0000(Not Clear) < succ>
                                bacterial outside --- Certainty = 0.0000(Not Clear) < succ>
                            bacterial cytoplasm --- Certainty = 0.0000(Not Clear) < succ>
```

[13044] No corresponding DNA sequence was identified in S. agalactiae.

[13045] The protein has no significant homology with any sequences in the GENPEPT database.

[13046] Based on this analysis, it was predicted that this GAS-specific protein and its epitopes, could be useful antigens for vaccines or diagnostics.

### EXAMPLE 2435

[13047] A DNA sequence (GASx237) was identified in S. pyogenes <SEQ ID 7369> which encodes the amino acid sequence <SEQ ID 7370>. Analysis of this protein sequence reveals the following:

```
Possible site: 52
>>> Seems to have no N-terminal signal sequence
----- Final Results -----
                            bacterial cytoplasm --- Certainty = 0.4961(Affirmative) < succ>
                              bacterial membrane --- Certainty = 0.00000(Not Clear) < succ>
                                bacterial outside --- Certainty = 0.0000(Not Clear) < succ>
```

[13048] No corresponding DNA sequence was identified in S. agalactiae.

[13049] The protein has homology with the following sequences in the GENPEPT database:

| >GP: CAB49143 GB: AJ248283 hypothetical protein | | | |
|---|---|---|---|
| [Pyrococcus abyssi] | | | |
| Identities = 79/229 (34%), Positives = 131/229 (56%), | | | |
| Gaps = 11/229 (4%) | | | |
| Query: | 18 | MRFTIDQNMQFPLVEIDLEHGGSVYLQQGSMVYHTENVTLNTKLNGKGSGLGKLVGAIGR | 77 |
| | | M + I+ F L+E++L G +V + G+MVY V++ TK G L+GA+ R | |
| Sbjct: | 1 | MEYRIEHRPSFSLLEVNLREGEAVQAEAGAMVYMDPTVSIETKARGG------LLGALKR | 54 |
| Query: | 78 | SMVSGESMFITQAMSNGDGKLALAPNTPGQIVALELGEKQYRLNDGAFLALDGSAQYKME | 137 |
| | | S++ GES F+ + G G++ AP PG I++LEL Y GAFL ++ | |
| Sbjct: | 55 | SVLGGESFFMN--VFRGPGRVGFAPGYPGDIISLELNGTLYA-QSGAFLVASEGIDIDVK | 111 |
| Query: | 138 | RQNIGKALFGGQGGLFVMTTEGLGTLLANSFGSIKKITLDGGTMTIDNAHVVAWSRELDY | 197 |
| | | GK +FG +G +F++ +G G + +S+G+I+KITL G ++ +D H+VA++ +D+ | |
| Sbjct: | 112 | FGG-GKTIFGREG-VFLLELKGKGIVFLSSYGAIEKITLRGESVIVDTGHMVAFTEGIDF | 169 |
| Query: | 198 | DIHLENGFMQSIGTGEGVVNTFRGHGEIYIQSLNLEQFAGTLKRYLPTS | 246 |
| | | I G ++ +GEG+V F GHG++YIQ+ +L+ F + +LP S | |
| Sbjct: | 170 | RIRKIGGLKATLFSGEGLVFEFSGHGDVYIQTRSLDGFLSWILPHLPKS | 218 |

[13050] Based on this analysis, it was predicted that this GAS-specific protein and its epitopes, could be useful antigens for vaccines or diagnostics.

### EXAMPLE 2436

[13051] A DNA sequence (GASx240R) was identified in S. pyogenes <SEQ ID 7371> which encodes the amino acid sequence <SEQ ID 7372>. Analysis of this protein sequence reveals the following:

```
Possible site: 35
>>> Seems to have no N-terminal signal sequence
----- Final Results -----
                            bacterial cytoplasm --- Certainty = 0.2745(Affirmative) < succ>
                              bacterial membrane --- Certainty = 0.0000(Not Clear) < succ>
                                bacterial outside --- Certainty = 0.0000(Not Clear) < succ>
```

[13052] No corresponding DNA sequence was identified in S. agalactiae.

[13053] The protein has no significant homology with any sequences in the GENPEPT database.

[13054] Based on this analysis, it was predicted that this GAS-specific protein and its epitopes, could be useful antigens for vaccines or diagnostics.

### EXAMPLE 2437

[13055] A DNA sequence (GASx241) was identified in S. pyogenes <SEQ ID 7373> which encodes the amino acid sequence <SEQ ID 7374>. Analysis of this protein sequence reveals the following:

| Possible site: 21 | | | | |
|---|---|---|---|---|
| >>> Seems to have an uncleavable N-term signal seq | | | | |
| | INTEGRAL | Likelihood = −10.14 | Transmembrane | 196-212 (187-215) |
| | INTEGRAL | Likelihood = −8.01 | Transmembrane | 160-176 (156-179) |
| | INTEGRAL | Likelihood = −5.89 | Transmembrane | 116-132 (110-134) |
| | INTEGRAL | Likelihood = −4.57 | Transmembrane | 74-90 (73-97) |
| | INTEGRAL | Likelihood = −2.66 | Transmembrane | 51-67 (50-68) |
| | INTEGRAL | Likelihood = −2.60 | Transmembrane | 8-24 (7-27) |
| | INTEGRAL | Likelihood = −1.28 | Transmembrane | 344-360 (344-360) |
| | INTEGRAL | Likelihood = −0.22 | Transmembrane | 30-46 (30-46) |

```
----- Final Results -----
                              bacterial membrane --- Certainty = 0.5055(Affirmative) < succ>
                                bacterial outside --- Certainty = 0.0000(Not Clear) < succ>
                            bacterial cytoplasm --- Certainty = 0.0000(Not Clear) < succ>
```

[13056] No corresponding DNA sequence was identified in S. agalactiae.

[13057] The protein has homology with the following sequences in the GENPEPT database:

| >GP: CAC10175 GB: AJ278302 histidine kinase | | | |
|---|---|---|---|
| [Streptococcus pneumoniae] | | | |
| Identities = 136/449 (30%), Positives = 234/449 (51%), | | | |
| Gaps = 26/449 (5%) | | | |
| Query: | 8 | FLLLSIIVYYMTKIYIFSFLSDITLP---VWKQLTI-LALALFFNQFPYLS-----PLLI | 58 |
| | | ++LL +V + KI IF + I+L ++K + LA+ F Y+ + | |
| Sbjct: | 5 | WILLYTLVTHGLKIVIFFKVDGISLTFERIFKAFLFKILLAVVFGMLGYMVGNVYLSYFM | 64 |
| Query: | 59 | DPL----LFLVVLRQETKQLFSLKALFLAVAPSVLVDLLSRFMGTIVIPYLFLSSGIYLG | 114 |
| | | +PL L ++LR+ K+L LF + P +LV+L R + V+P FL G | |
| Sbjct: | 65 | EPLYGIGLSFLLLRELPKKLL----LFYGLFPMILVNLFYRGVSYFVLP--FLGQGQVYD | 118 |
| Query: | 115 | HIIFDLLAYLLIFPSFAIINYMIGKDYKMIC-QSGYSKRSHNFYQTLLMFVLVYYVDIFV | 173 |
| | | F L ++IF F + ++ DY + G + T + +++ Y + | |
| Sbjct: | 119 | DYSFIWLC-IIIFNFFISLAFLKWLDYDFTSLRKGILDKDFQKSLTQINWIMGAYYLVIQ | 177 |
| Query: | 174 | ILGFTDPFLHFHHSLFVPTPYKLLFLMFILLLVYLLSYFNHSSKEYLKNELRREQQAYMT | 233 |
| | | L + + + + T L+ + ++L + ++ + K+ L L +EQ | |
| Sbjct: | 178 | NLSYFE----YEQGIQSTTVRHLILVFYLLFFMGIIKKLDTYLKDKLHERLNQEQDLRYR | 233 |
| Query: | 234 | NLEIYGKHLEKLYRDVRAFQSDYLSRIERLGQAIKSESITQIQDIYAQTVHEANDYWDDK | 293 |
| | | +E Y +H+E+LY++VR+F+ DY + + L I+ E + QI++IY + ++++ D | |
| Sbjct: | 234 | EMERYSRHIEELYKEVRSFRHDYTNLLTSLRLGIEEEDMEQIKEIYDSVLKDSSEKLQDN | 293 |
| Query: | 294 | HYNISKLRKINISSIKSLLSAKIISAEKSGIDLNVEVPDNIKETYIPELDLLLLMSIFCD | 353 |
| | | Y++ +L + ++KSLL+ K I A I NVEVP+ I+ + LD L ++SI CD | |
| Sbjct: | 294 | KYDLGRLVNVRDRALKSLLAGKFIKARDKNIVFNVEVPEEIQVEGVSLLDFLTVVSILCD | 353 |
| Query: | 354 | NAIEAALEAQQPHMSIAYFLLGDYQMFVVTNTTKKK-VDINKIFEEGYSSKGSERGIGLS | 412 |
| | | NAIEA++EA QPH+SIA+F G + F++ N+ K++ +DI++IF G SSKG ERG+GL | |
| Sbjct: | 354 | NAIEASVEACQPHVSIAFFKNGAQETFIIENSIKEEGIDISEIFSFGASSKGEERGVGLY | 413 |
| Query: | 413 | NAQRILKKYPYLSLRTKSFDKEFSQTLTM | 441 |
| | | +I++ +P SL T D F Q LT+ | |
| Sbjct: | 414 | TVMKIVESHPNTSLNTTCQDHVFRQVLTV | 442 |

[13058] Based on this analysis, it was predicted that this GAS-specific protein and its epitopes, could be useful antigens for vaccines or diagnostics.

### EXAMPLE 2438

[13059] A DNA sequence (GASx242R) was identified in S. pyogenes <SEQ ID 7375> which encodes the amino acid sequence <SEQ ID 7376>. Analysis of this protein sequence reveals the following:

```
Possible site: 26
>>> Seems to have no N-terminal signal sequence
----- Final Results -----
                            bacterial cytoplasm --- Certainty = 0.4165(Affirmative) < succ>
                              bacterial membrane --- Certainty = 0.0000(Not Clear) < succ>
                                bacterial outside --- Certainty = 0.0000(Not Clear) < succ>
```

[13060] No corresponding DNA sequence was identified in S. agalactiae.

[13061] The protein has no significant homology with any sequences in the GENPEPT database.

[13062] Based on this analysis, it was predicted that this GAS-specific protein and its epitopes, could be useful antigens for vaccines or diagnostics.

### EXAMPLE 2439

[13063] A DNA sequence (GASx243) was identified in S. pyogenes <SEQ ID 7377> which encodes the amino acid sequence <SEQ ID 7378>. Analysis of this protein sequence reveals the following:

| Possible site: 26 | | | | |
|---|---|---|---|---|
| >>> Seems to have an uncleavable N-term signal seq | | | | |
| | INTEGRAL | Likelihood = −11.09 | Transmembrane | 188-204 (182-208) |
| | INTEGRAL | Likelihood = −7.17 | Transmembrane | 52-68 (47-69) |
| | INTEGRAL | Likelihood = −4.73 | Transmembrane | 119-135 (114-142) |
| | INTEGRAL | Likelihood = −4.62 | Transmembrane | 83-99 (77-107) |
| | INTEGRAL | Likelihood = −1.86 | Transmembrane | 328-344 (328-345) |
| | INTEGRAL | Likelihood = −1.65 | Transmembrane | 7-23 (6-23) |
| | INTEGRAL | Likelihood = −0.22 | Transmembrane | 35-51 (35-51) |

```
----- Final Results -----
                              bacterial membrane --- Certainty = 0.5437(Affirmative) < succ>
                                bacterial outside --- Certainty = 0.0000(Not Clear) < succ>
                            bacterial cytoplasm --- Certainty = 0.0000(Not Clear) < succ>
```

[13064] No corresponding DNA sequence was identified in S. agalactiae.

[13065] The protein has homology with the following sequences in the GENPEPT database:

| >GP: CAC10175 GB: AJ278302 histidine kinase [Streptococcus pneumoniae] | | | |
|---|---|---|---|
| Identities = 123/438 (28%), Positives = 229/438 (52%), Gaps = 49/438 (11%) | | | |
| Query: | 20 | VIFAKVSAIKLSWKRVS-------IIGISFVIANMIFDKVIL---IDQLFFIIVSLL--- | 66 |
| | | VIF KV I L+++R+ ++ + F + + V L ++ L+ I +S L | |
| Sbjct: | 19 | VIFFKVDGISLTFERIFKAFLFKILLAVVFGMLGYMVGNVYLSYFMEPLYGIGLSFLLLR | 78 |
| Query: | 67 | SAPKKKLFEHMFNGFFTILIVELLFRVIGSFFLPAVLGFSIGQINNNLKLLELCYLFVLP | 126 |
| | | PKK L +F G F +++V L +R + F LP + GQ+ ++ + LC + + | |
| Sbjct: | 79 | ELPKKLL---LFYGLFPMILVNLFYRGVSYFVLPFL---GQGQVYDDYSFIWLC-IIIFN | 131 |
| Query: | 127 | IFYLFSYIFSIDL---SLIRFISEDKMKKWVFWMNTAMFSYYFFAHFLVTVQSGFLALYF | 183 |
| | | F +++ +D SL + I + +K + +N M +YY L YF | |
| Sbjct: | 132 | FFISLAFLKWLDYDFTSLRKGILDKDFQKSLTQINWIMGAYYLVIQNLS---------YF | 182 |
| Query: | 184 | QY---------RSILVFIYLAIFIWVIVKLDRFAKDQLSQKLTQAQNERIAYLENYNQSI | 234 |
| | | +Y R +++ YL F+ +I KLD + KD+L ++L Q Q+ R +E Y++ I | |
| Sbjct: | 183 | EYEQGIQSTTVRHLILVFYLLFFMGIIKKLDTYLKDKLHERLNQEQDLRYREMERYSRHI | 242 |
| Query: | 235 | EQLYREIRTVKHDSENILISLKDSIDSGDIDLITRVYDTVIQQSATSMMRTNYEISSLDN | 294 |
| | | E+LY+E+R+ +HD N+L SL+ I+ D++ I +YD+V++ S+ + Y++ L N | |
| Sbjct: | 243 | EELYKEVRSFRHDYTNLLTSLRLGIEEEDMEQIKEIYDSVLKDSSEKLQDNKYDLGRLVN | 302 |
| Query: | 295 | IKEAVIRSIMNSKLLEAQYLGIELYIEIPDVIDHLPIKLIDLIVLFTGLVDNAIETAKGS | 354 |
| | | +++ ++S++ K ++A+ I +E+P+ I + L+D + + + L DNAIE + + | |
| Sbjct: | 303 | VRDRALKSLLAGKFIKARDKNIVFNVEVPEEIQVEGVSLLDFLTVVSILCDNAIEASVEA | 362 |
| Query: | 355 | RRPFLSIAYFKQDNKQLFIIENSTKTNRVDIAKRFDAQQQNSAH--------FLTVLDSY | 406 |
| | | +P +SIA+FK ++ FIIENS K +DI++ F + + +++S+ | |
| Sbjct: | 363 | CQPHVSIAFFKNGAQETFIIENSIKEEGIDISEIFSFGASSKGEERGVGLYTVMKIVESH | 422 |
| Query: | 407 | PQITLSTKSDHYRLRQLL | 424 |
| | | P +L+T + RQ+L | |
| Sbjct: | 423 | PNTSLNTTCQDHVFRQVL | 440 |

[13066] Based on this analysis, it was predicted that this GAS-specific protein and its epitopes, could be useful antigens for vaccines or diagnostics.

### EXAMPLE 2440

[13067] A DNA sequence (GASx248) was identified in S. pyogenes <SEQ ID 7379> which encodes the amino acid sequence <SEQ ID 7380>. Analysis of this protein sequence reveals the following:

```
Possible site: 32
>>> Seems to have no N-terminal signal sequence
----- Final Results -----
                            bacterial cytoplasm --- Certainty = 0.5665(Affirmative) < succ>
                              bacterial membrane --- Certainty = 0.0000(Not Clear) < succ>
                                bacterial outside --- Certainty = 0.0000(Not Clear) < succ>
```

[13068] No corresponding DNA sequence was identified in S. agalactiae.

[13069] The protein has no significant homology with any sequences in the GENPEPT database.

[13070] Based on this analysis, it was predicted that this GAS-specific protein and its epitopes, could be useful antigens for vaccines or diagnostics.

### EXAMPLE 2441

[13071] A DNA sequence (GASx255) was identified in S. pyogenes <SEQ ID 7381> which encodes the amino acid sequence <SEQ ID 7382>. Analysis of this protein sequence reveals the following:

```
Possible site: 19
>>> Seems to have no N-terminal signal sequence
----- Final Results -----
                            bacterial cytoplasm --- Certainty = 0.1437(Affirmative) < succ>
                              bacterial membrane --- Certainty = 0.000(Not Clear) < succ>
                                bacterial outside --- Certainty = 0.0000(Not Clear) < succ>
```

[13072] No corresponding DNA sequence was identified in S. agalactiae.

[13073] The protein has no significant homology with any sequences in the GENPEPT database.

[13074] Based on this analysis, it was predicted that this GAS-specific protein and its epitopes, could be useful antigens for vaccines or diagnostics.

### EXAMPLE 2442

[13075] A DNA sequence (GASx270R) was identified in S. pyogenes <SEQ ID 7383> which encodes the amino acid sequence <SEQ ID 7384>. Analysis of this protein sequence reveals the following:

| Possible site: 21 | | | | |
|---|---|---|---|---|
| >>> Seems to have no N-terminal signal sequence | | | | |
| | INTEGRAL | Likelihood = −5.89 | Transmembrane | 20-36 (17-36) |

```
----- Final Results -----
                              bacterial membrane --- Certainty = 0.3357(Affirmative) < succ>
                                bacterial outside --- Certainty = 0.0000(Not Clear) < succ>
                            bacterial cytoplasm --- Certainty = 0.0000(Not Clear) < succ>
```

[13076] No corresponding DNA sequence was identified in S. agalactiae.

[13077] The protein has no significant homology with any sequences in the GENPEPT database.

[13078] Based on this analysis, it was predicted that this GAS-specific protein and its epitopes, could be useful antigens for vaccines or diagnostics.

### EXAMPLE 2443

[13079] A DNA sequence (GASx272) was identified in S. pyogenes <SEQ ID 7385> which encodes the amino acid sequence <SEQ ID 7386>. Analysis of this protein sequence reveals the following:

```
Possible site: 58
>>> Seems to have no N-terminal signal sequence
----- Final Results -----
                            bacterial cytoplasm --- Certainty = 0.2488(Affirmative) < succ>
                              bacterial membrane --- Certainty = 0.0000(Not Clear) < succ>
                                bacterial outside --- Certainty = 0.0000(Not Clear) < succ>
```

[13080] No corresponding DNA sequence was identified in S. agalactiae.

[13081] The protein has homology with the following sequences in the GENPEPT database:

| >GP: CAB11887 GB: Z99104 ribosomal protein S7 (BS7) [Bacillus subtilis] | | | |
|---|---|---|---|
| Identities = 117/156 (75%), Positives = 139/156 (89%) | | | |
| Query: | 1 | MSRKNQAPKREVLPDPLYNSKIVTRLINRVMLDGKRGTAATIVYDAFNAIKEATGNDALE | 60 |
| | | M RK KR+VLPDP+YNSK+V+RLIN++M+DGK+G TI+Y +F+ IKE TGNDA+E | |
| Sbjct: | 1 | MPRKGPVAKRDVLPDPIYNSKLVSRLINKMMIDGKKGKPQTILYKSFDIIKERTGNDAME | 60 |
| Query: | 61 | VFETAMDNIMPVLEVRARRVGGSNYQVPVEVRPERRTTLGLRWLVNASRARGEHTMKDRL | 120 |
| | | VFE A+ NIMPVLEV+ARRVGG+NYQVPVEVRPERRTTLGLRWLVN +R RGE TM++RL | |
| Sbjct: | 61 | VFEQALKNIMPVLEVKARRVGGANYQVPVEVRPERRTTLGLRWLVNYARLRGEKTMEERL | 120 |
| Query: | 121 | AKEIMDAANNTGASVKKREDTHKMAEANRAFAHFRW | 156 |
| | | A EI+DAANNTGA+VKKREDTHKMAEAN+AFAH+RW | |
| Sbjct: | 121 | ANEILDAANNTGAAVKKREDTHKMAEANKAFAHYRW | 156 |

[13082] Based on this analysis, it was predicted that this GAS-specific protein and its epitopes, could be useful antigens for vaccines or diagnostics.

### EXAMPLE 2444

[13083] A DNA sequence (GASx274) was identified in S. pyogenes <SEQ ID 7387> which encodes the amino acid sequence <SEQ ID 7388>. Analysis of this protein sequence reveals the following:

```
Possible site: 61
>>> Seems to have an uncleavable N-term signal seq
----- Final Results -----
                              bacterial membrane --- Certainty = 0.0000(Not Clear) < succ>
                                bacterial outside --- Certainty = 0.0000(Not Clear) < succ>
                            bacterial cytoplasm --- Certainty = 0.0000(Not Clear) < succ>
```

[13084] A related sequence was also identified in GAS <SEQ ID 9095> which encodes the amino acid sequence <SEQ ID 9096>. Analysis of this protein sequence reveals the following:

```
Possible cleavage site: 52
>>> Seems to have no N-terminal signal sequence
----- Final Results -----
                            bacterial cytoplasm --- Certainty = 0.291(Affirmative) < succ>
                              bacterial membrane --- Certainty = 0.000(Not Clear) < succ>
                                bacterial outside --- Certainty = 0.000(Not Clear) < succ>
```

[13085] No corresponding DNA sequence was identified in S. agalactiae.

[13086] Based on this analysis, it was predicted that this GAS-specific protein and its epitopes, could be useful antigens for vaccines or diagnostics.

### EXAMPLE 2445

[13087] A DNA sequence (GASx275R) was identified in S. pyogenes <SEQ ID 7389> which encodes the amino acid sequence <SEQ ID 7390>. Analysis of this protein sequence reveals the following:

```
Possible site: 16
>>> Seems to have no N-terminal signal sequence
----- Final Results -----
                            bacterial cytoplasm --- Certainty = 0.5664(Affirmative) < succ>
                              bacterial membrane --- Certainty = 0.0000(Not Clear) < succ>
                                bacterial outside --- Certainty = 0.0000(Not Clear) < succ>
```

[13088] No corresponding DNA sequence was identified in S. agalactiae.

[13089] The protein has no significant homology with any sequences in the GENPEPT database.

[13090] Based on this analysis, it was predicted that this GAS-specific protein and its epitopes, could be useful antigens for vaccines or diagnostics.

### EXAMPLE 2446

[13091] A DNA sequence (GASx283) was identified in S. pyogenes <SEQ ID 7391> which encodes the amino acid sequence <SEQ ID 7392>. Analysis of this protein sequence reveals the following:

```
Possible site: 18
>>> Seems to have no N-terminal signal sequence
----- Final Results -----
                            bacterial cytoplasm --- Certainty = 0.0724(Affirmative) < succ>
                              bacterial membrane --- Certainty = 0.0000(Not Clear) < succ>
                                bacterial outside --- Certainty = 0.0000(Not Clear) < succ>
```

[13092] No corresponding DNA sequence was identified in S. agalactiae.

[13093] The protein has no significant homology with any sequences in the GENPEPT database.

[13094] Based on this analysis, it was predicted that this GAS-specific protein and its epitopes, could be useful antigens for vaccines or diagnostics.

### EXAMPLE 2447

[13095] A DNA sequence (GASx298) was identified in S. pyogenes <SEQ ID 7393> which encodes the amino acid sequence <SEQ ID 7394>. Analysis of this protein sequence reveals the following:

```
Possible site: 25
>>> Seems to have no N-terminal signal sequence
----- Final Results -----
                            bacterial cytoplasm --- Certainty = 0.2840(Affirmative) < succ>
                              bacterial membrane --- Certainty = 0.0000(Not Clear) < succ>
                                bacterial outside --- Certainty = 0.0000(Not Clear) < succ>
```

[13096] No corresponding DNA sequence was identified in S. agalactiae.

[13097] The protein has no significant homology with any sequences in the GENPEPT database.

[13098] Based on this analysis, it was predicted that this GAS-specific protein and its epitopes, could be useful antigens for vaccines or diagnostics.

### EXAMPLE 2448

[13099] A DNA sequence (GASx300) was identified in S. pyogenes <SEQ ID 7395> which encodes the amino acid sequence <SEQ ID 7396>. Analysis of this protein sequence reveals the following:

| Possible site: 18 | | | | |
|---|---|---|---|---|
| >>> Seems to have an uncleavable N-term signal seq | | | | |
| | INTEGRAL | Likelihood = −1.91 | Transmembrane | 4-20 (4-20) |

```
----- Final Results -----
                              bacterial membrane --- Certainty = 0.1765(Affirmative) < succ>
                                bacterial outside --- Certainty = 0.0000(Not Clear) < succ>
                            bacterial cytoplasm --- Certainty = 0.0000(Not Clear) < succ>
```

[13100] No corresponding DNA sequence was identified in S. agalactiae.

[13101] The protein has no significant homology with any sequences in the GENPEPT database.

[13102] Based on this analysis, it was predicted that this GAS-specific protein and its epitopes, could be useful antigens for vaccines or diagnostics.

### EXAMPLE 2449

[13103] A DNA sequence (GASx301) was identified in S. pyogenes <SEQ ID 7397> which encodes the amino acid sequence <SEQ ID 7398>. Analysis of this protein sequence reveals the following:

```
Possible site: 33
>>> Seems to have no N-terminal signal sequence
----- Final Results -----
                            bacterial cytoplasm --- Certainty = 0.4884(Affirmative) < succ>
                              bacterial membrane --- Certainty = 0.0000(Not Clear) < succ>
                                bacterial outside --- Certainty = 0.0000(Not Clear) < succ>
```

[13104] No corresponding DNA sequence was identified in S. agalactiae.

[13105] The protein has no significant homology with any sequences in the GENPEPT database.

[13106] Based on this analysis, it was predicted that this GAS-specific protein and its epitopes, could be useful antigens for vaccines or diagnostics.

### EXAMPLE 2450

[13107] A repeated DNA sequence (GASx302) was identified in S. pyogenes <SEQ ID 7399> which encodes the amino acid sequence <SEQ ID 7400>. Analysis of this protein sequence reveals the following:

```
Possible site: 22
>>> Seems to have no N-terminal signal sequence
----- Final Results -----
                            bacterial cytoplasm --- Certainty = 0.2581(Affirmative) < succ>
                              bacterial membrane --- Certainty = 0.0000(Not Clear) < succ>
                                bacterial outside --- Certainty = 0.0000(Not Clear) < succ>
```

[13108] No corresponding DNA sequence was identified in S. agalactiae.

[13109] The protein has no significant homology with any sequences in the GENPEPT database.

[13110] Based on this analysis, it was predicted that this GAS-specific protein and its epitopes, could be useful antigens for vaccines or diagnostics.

### EXAMPLE 2451

[13111] A DNA sequence (GASx316) was identified in S. pyogenes <SEQ ID 7401> which encodes the amino acid sequence <SEQ ID 7402>. Analysis of this protein sequence reveals the following:

| Possible site: 18 | | | | |
|---|---|---|---|---|
| >>> Seems to have no N-terminal signal sequence | | | | |
| | INTEGRAL | Likelihood = −0.80 | Transmembrane | 23-39 (22-39) |

```
----- Final Results -----
                              bacterial membrane --- Certainty = 0.1319(Affirmative) < succ>
                                bacterial outside --- Certainty = 0.0000(Not Clear) < succ>
                            bacterial cytoplasm --- Certainty = 0.0000(Not Clear) < succ>
```

[13112] No corresponding DNA sequence was identified in S. agalactiae.

[13113] The protein has no significant homology with any sequences in the GENPEPT database.

[13114] Based on this analysis, it was predicted that this GAS-specific protein and its epitopes, could be useful antigens for vaccines or diagnostics.

### EXAMPLE 2452

[13115] A DNA sequence (GASx323R) was identified in S. pyogenes <SEQ ID 7403> which encodes the amino acid sequence <SEQ ID 7404>. Analysis of this protein sequence reveals the following:

```
Possible site: 28
>>> Seems to have no N-terminal signal sequence
----- Final Results -----
                            bacterial cytoplasm --- Certainty = 0.0005(Affirmative) < succ>
                              bacterial membrane --- Certainty = 0.0000(Not Clear) < succ>
                                bacterial outside --- Certainty = 0.0000(Not Clear) < succ>
```

[13116] No corresponding DNA sequence was identified in S. agalactiae.

[13117] The protein has no significant homology with any sequences in the GENPEPT database.

[13118] Based on this analysis, it was predicted that this GAS-specific protein and its epitopes, could be useful antigens for vaccines or diagnostics.

### EXAMPLE 2453

[13119] A DNA sequence (GASx334) was identified in S. pyogenes <SEQ ID 7405> which encodes the amino acid sequence <SEQ ID 7406>. Analysis of this protein sequence reveals the following:

```
Possible site: 17
>>> Seems to have a cleavable N-term signal seq.
----- Final Results -----
                                bacterial outside --- Certainty = 0.3000(Affirmative) < succ>
                              bacterial membrane --- Certainty = 0.0000(Not Clear) < succ>
                            bacterial cytoplasm --- Certainty = 0.0000(Not Clear) < succ>
```

[13120] No corresponding DNA sequence was identified in S. agalactiae.

[13121] The protein has no significant homology with any sequences in the GENPEPT database.

[13122] Based on this analysis, it was predicted that this GAS-specific protein and its epitopes, could be useful antigens for vaccines or diagnostics.

### EXAMPLE 2454

[13123] A DNA sequence (GASx336) was identified in S. pyogenes <SEQ ID 7407> which encodes the amino acid sequence <SEQ ID 7408>. Analysis of this protein sequence reveals the following:

```
Possible site: 31
>>> Seems to have no N-terminal signal sequence
----- Final Results -----
                            bacterial cytoplasm --- Certainty = 0.3379(Affirmative) < succ>
                              bacterial membrane --- Certainty = 0.0000(Not Clear) < succ>
                                bacterial outside --- Certainty = 0.0000(Not Clear) < succ>
```

[13124] No corresponding DNA sequence was identified in S. agalactiae.

[13125] The protein has no significant homology with any sequences in the GENPEPT database.

[13126] Based on this analysis, it was predicted that this GAS-specific protein and its epitopes, could be useful antigens for vaccines or diagnostics.

### EXAMPLE 2455

[13127] A DNA sequence (GASx361R) was identified in S. pyogenes <SEQ ID 7409> which encodes the amino acid sequence <SEQ ID 7410>. Analysis of this protein sequence reveals the following:

```
Possible site: 22
>>> Seems to have no N-terminal signal sequence
----- Final Results -----
                            bacterial cytoplasm --- Certainty = 0.2807(Affirmative) < succ>
                              bacterial membrane --- Certainty = 0.0000(Not Clear) < succ>
                                bacterial outside --- Certainty = 0.0000(Not Clear) < succ>
```

[13128] No corresponding DNA sequence was identified in S. agalactiae.

[13129] The protein has no significant homology with any sequences in the GENPEPT database.

[13130] Based on this analysis, it was predicted that this GAS-specific protein and its epitopes, could be useful antigens for vaccines or diagnostics.

### EXAMPLE 2456

[13131] A DNA sequence (GASx387) was identified in S. pyogenes <SEQ ID 7411> which encodes the amino acid sequence <SEQ ID 7412>. Analysis of this protein sequence reveals the following:

```
Possible site: 16
>>> Seems to have no N-terminal signal sequence
----- Final Results -----
                            bacterial cytoplasm --- Certainty = 0.2740(Affirmative) < succ>
                              bacterial membrane --- Certainty = 0.0000(Not Clear) < succ>
                                bacterial outside --- Certainty = 0.0000(Not Clear) < succ>
```

[13132] No corresponding DNA sequence was identified in S. agalactiae.

[13133] The protein has no significant homology with any sequences in the GENPEPT database.

[13134] Based on this analysis, it was predicted that this GAS-specific protein and its epitopes, could be useful antigens for vaccines or diagnostics.

### EXAMPLE 2457

[13135] A DNA sequence (GASx389) was identified in S. pyogenes <SEQ ID 7413> which encodes the amino acid sequence <SEQ ID 7414>. Analysis of this protein sequence reveals the following:

```
Possible site: 21
>>> Seems to have no N-terminal signal sequence
----- Final Results -----
                            bacterial cytoplasm --- Certainty = 0.0744(Affirmative) < succ>
                              bacterial membrane --- Certainty = 0.0000(Not Clear) < succ>
                                bacterial outside --- Certainty = 0.0000(Not Clear) < succ>
```

[13136] No corresponding DNA sequence was identified in S. agalactiae.

[13137] The protein has no significant homology with any sequences in the GENPEPT database.

[13138] Based on this analysis, it was predicted that this GAS-specific protein and its epitopes, could be useful antigens for vaccines or diagnostics.

### EXAMPLE 2458

[13139] A DNA sequence (GASx392) was identified in S. pyogenes <SEQ ID 7415> which encodes the amino acid sequence <SEQ ID 7416>. Analysis of this protein sequence reveals the following:

```
Possible site: 29
>>> Seems to have no N-terminal signal sequence
----- Final Results -----
                            bacterial cytoplasm --- Certainty = 0.2162(Affirmative) < succ>
                              bacterial membrane --- Certainty = 0.0000(Not Clear) < succ>
                                bacterial outside --- Certainty = 0.0000(Not Clear) < succ>
```

[13140] No corresponding DNA sequence was identified in S. agalactiae.

[13141] The protein has no significant homology with any sequences in the GENPEPT database.

[13142] Based on this analysis, it was predicted that this GAS-specific protein and its epitopes, could be useful antigens for vaccines or diagnostics.

### EXAMPLE 2459

[13143] A DNA sequence (GASx393R) was identified in S. pyogenes <SEQ ID 7417> which encodes the amino acid sequence <SEQ ID 7418>. Analysis of this protein sequence reveals the following:

```
Possible site: 18
>>> Seems to have no N-terminal signal sequence
----- Final Results -----
                            bacterial cytoplasm --- Certainty = 0.2520(Affirmative) < succ>
                              bacterial membrane --- Certainty = 0.0000(Not Clear) < succ>
                                bacterial outside --- Certainty = 0.0000(Not Clear) < succ>
```

[13144] No corresponding DNA sequence was identified in S. agalactiae.

[13145] The protein has no significant homology with any sequences in the GENPEPT database.

[13146] Based on this analysis, it was predicted that this GAS-specific protein and its epitopes, could be useful antigens for vaccines or diagnostics.

### EXAMPLE 2460

[13147] A DNA sequence (GASx395) was identified in S. pyogenes <SEQ ID 7419> which encodes the amino acid sequence <SEQ ID 7420>. Analysis of this protein sequence reveals the following:

```
Possible site: 16
>>> Seems to have no N-terminal signal sequence
----- Final Results -----
                            bacterial cytoplasm --- Certainty = 0.2590(Affirmative) < succ>
                              bacterial membrane --- Certainty = 0.0000(Not Clear) < succ>
                                bacterial outside --- Certainty = 0.0000(Not Clear) < succ>
```

[13148] No corresponding DNA sequence was identified in S. agalactiae.

[13149] The protein has no significant homology with any sequences in the GENPEPT database.

[13150] Based on this analysis, it was predicted that this GAS-specific protein and its epitopes, could be useful antigens for vaccines or diagnostics.

### EXAMPLE 2461

[13151] A DNA sequence (GASx396) was identified in S. pyogenes <SEQ ID 7421> which encodes the amino acid sequence <SEQ ID 7422>. Analysis of this protein sequence reveals the following:

```
Possible site: 41
>>> Seems to have an uncleavable N-term signal seq
----- Final Results -----
                              bacterial membrane --- Certainty = 0.0000(Not Clear) < succ>
                                bacterial outside --- Certainty = 0.0000(Not Clear) < succ>
                            bacterial cytoplasm --- Certainty = 0.0000(Not Clear) < succ>
```

[13152] No corresponding DNA sequence was identified in S. agalactiae.

[13153] The protein has homology with the following sequences in the GENPEPT database:

| >GP: CAB13373 GB: Z99111 similar to hypothetical proteins [Bacillus subtilis] | | | |
|---|---|---|---|
| Identities = 23/88 (26%), Positives = 52/88 (58%) | | | |
| Query: | 4 | KQERIGLVVYLYYNRDARKLSKFGDLYYHSKRSRYLIIYINKNDLDTKLEEMRRLKCVKD | 63 |
| | | + R G+VVYL+ + ++ L KFG+++Y SKR +Y+++Y + + ++ ++++ VK | |
| Sbjct: | 2 | ENRRQGMVVYLHSLKQSKMLRKFGNVHYVSKRLKYVVLYCDMDQIEKTMDKIASYSFVKK | 61 |
| Query: | 64 | IRPSAFDDIDRQFVGNLHRDETNNHQKG | 91 |
| | | + PS + +F L + + +++ G | |
| Sbjct: | 62 | VEPSYKPFLKLEFESKLDKAKEYDYKIG | 89 |

[13154] Based on this analysis, it was predicted that this GAS-specific protein and its epitopes, could be useful antigens for vaccines or diagnostics.

### EXAMPLE 2462

[13155] A DNA sequence (GASx400) was identified in S. pyogenes <SEQ ID 7423> which encodes the amino acid sequence <SEQ ID 7424>. Analysis of this protein sequence reveals the following:

```
Possible site: 13
>>> Seems to have no N-terminal signal sequence
----- Final Results -----
                            bacterial cytoplasm --- Certainty = 0.2010(Affirmative) < succ>
                              bacterial membrane --- Certainty = 0.0000(Not Clear) < succ>
                                bacterial outside --- Certainty = 0.0000(Not Clear) < succ>
```

[13156] No corresponding DNA sequence was identified in S. agalactiae.

[13157] The protein has no significant homology with any sequences in the GENPEPT database.

[13158] Based on this analysis, it was predicted that this GAS-specific protein and its epitopes, could be useful antigens for vaccines or diagnostics.

### EXAMPLE 2463

[13159] A DNA sequence (GASx401) was identified in S. pyogenes <SEQ ID 7425> which encodes the amino acid sequence <SEQ ID 7426>. Analysis of this protein sequence reveals the following:

```
Possible site: 17
>>> Seems to have no N-terminal signal sequence
----- Final Results -----
                            bacterial cytoplasm --- Certainty = 0.1176(Affirmative) < succ>
                              bacterial membrane --- Certainty = 0.0000(Not Clear) < succ>
                                bacterial outside --- Certainty = 0.0000(Not Clear) < succ>
```

[13160] No corresponding DNA sequence was identified in S. agalactiae.

[13161] The protein has no significant homology with any sequences in the GENPEPT database.

[13162] Based on this analysis, it was predicted that this GAS-specific protein and its epitopes, could be useful antigens for vaccines or diagnostics.

### EXAMPLE 2464

[13163] A DNA sequence (GASx402) was identified in S. pyogenes <SEQ ID 7427> which encodes the amino acid sequence <SEQ ID 7428>. Analysis of this protein sequence reveals the following:

```
Possible site: 16
>>> Seems to have no N-terminal signal sequence
----- Final Results -----
                            bacterial cytoplasm --- Certainty = 0.2938(Affirmative) < succ>
                              bacterial membrane --- Certainty = 0.0000(Not Clear) < succ>
                                bacterial outside --- Certainty = 0.0000(Not Clear) < succ>
```

[13164] No corresponding DNA sequence was identified in S. agalactiae.

[13165] The protein has no significant homology with any sequences in the GENPEPT database.

[13166] Based on this analysis, it was predicted that this GAS-specific protein and its epitopes, could be useful antigens for vaccines or diagnostics.

### EXAMPLE 2465

[13167] A DNA sequence (GASx403R) was identified in S. pyogenes <SEQ ID 7429> which encodes the amino acid sequence <SEQ ID 7430>. Analysis of this protein sequence reveals the following:

```
Possible site: 21
>>> Seems to have a cleavable N-term signal seq.
----- Final Results -----
                                bacterial outside --- Certainty = 0.3000(Affirmative) < succ>
                              bacterial membrane --- Certainty = 0.0000(Not Clear) < succ>
                            bacterial cytoplasm --- Certainty = 0.0000(Not Clear) < succ>
```

[13168] No corresponding DNA sequence was identified in S. agalactiae.

[13169] The protein has no significant homology with any sequences in the GENPEPT database.

[13170] Based on this analysis, it was predicted that this GAS-specific protein and its epitopes, could be useful antigens for vaccines or diagnostics.

### EXAMPLE 2466

[13171] A DNA sequence (GASx406) was identified in S. pyogenes <SEQ ID 7431> which encodes the amino acid sequence <SEQ ID 7432>. Analysis of this protein sequence reveals the following:

| Possible site: 31 | | | | |
|---|---|---|---|---|
| >>> Seems to have an uncleavable N-term signal seq | | | | |
| | INTEGRAL | Likelihood = −12.26 | Transmembrane | 15-31 (4-36) |
| | INTEGRAL | Likelihood = −6.64 | Transmembrane | 96-112 (94-115) |

```
----- Final Results -----
                              bacterial membrane --- Certainty = 0.5904(Affirmative) < succ>
                                bacterial outside --- Certainty = 0.0000(Not Clear) < succ>
                            bacterial cytoplasm --- Certainty = 0.0000(Not Clear) < succ>
```

[13172] No corresponding DNA sequence was identified in S. agalactiae.

[13173] The protein has no significant homology with any sequences in the GENPEPT database.

[13174] Based on this analysis, it was predicted that this GAS-specific protein and its epitopes, could be useful antigens for vaccines or diagnostics.

### EXAMPLE 2467

[13175] A DNA sequence (GASx408R) was identified in S. pyogenes <SEQ ID 7433> which encodes the amino acid sequence <SEQ ID 7434>. Analysis of this protein sequence reveals the following:

| Possible site: 19 | | | | |
|---|---|---|---|---|
| >>> Seems to have no N-terminal signal sequence | | | | |
| | INTEGRAL | Likelihood = −2.23 | Transmembrane | 17-33 (15-34) |
| | INTEGRAL | Likelihood = −0.85 | Transmembrane | 38-54 (38-54) |

```
----- Final Results -----
                              bacterial membrane --- Certainty = 0.1893(Affirmative) < succ>
                                bacterial outside --- Certainty = 0.0000(Not Clear) < succ>
                            bacterial cytoplasm --- Certainty = 0.0000(Not Clear) < succ>
```

[13176] No corresponding DNA sequence was identified in S. agalactiae.

[13177] The protein has no significant homology with any sequences in the GENPEPT database.

[13178] Based on this analysis, it was predicted that this GAS-specific protein and its epitopes, could be useful antigens for vaccines or diagnostics.

### EXAMPLE 2468

[13179] A DNA sequence (GASx412) was identified in S. pyogenes <SEQ ID 7435> which encodes the amino acid sequence <SEQ ID 7436>. Analysis of this protein sequence reveals the following:

| Possible site: 13 | | | | |
|---|---|---|---|---|
| >>> Seems to have an uncleavable N-term signal seq | | | | |
| | INTEGRAL | Likelihood = −6.53 | Transmembrane | 5-21 (4-23) |

```
----- Final Results -----
                              bacterial membrane --- Certainty = 0.3612(Affirmative) < succ>
                                bacterial outside --- Certainty = 0.0000(Not Clear) < succ>
                            bacterial cytoplasm --- Certainty = 0.0000(Not Clear) < succ>
```

[13180] No corresponding DNA sequence was identified in S. agalactiae.

[13181] The protein has no significant homology with any sequences in the GENPEPT database.

[13182] Based on this analysis, it was predicted that this GAS-specific protein and its epitopes, could be useful antigens for vaccines or diagnostics.

### EXAMPLE 2469

[13183] A DNA sequence (GASx413) was identified in S. pyogenes <SEQ ID 7437> which encodes the amino acid sequence <SEQ ID 7438>. Analysis of this protein sequence reveals the following:

```
Possible site: 56
>>> Seems to have no N-terminal signal sequence
----- Final Results -----
                            bacterial cytoplasm --- Certainty = 0.3422(Affirmative) < succ>
                              bacterial membrane --- Certainty = 0.0000(Not Clear) < succ>
                                bacterial outside --- Certainty = 0.0000(Not Clear) < succ>
```

[13184] No corresponding DNA sequence was identified in S. agalactiae.

[13185] The protein has homology with the following sequences in the GENPEPT database:

| >GP: CAA68903 GB: Y07622 lactate oxidase [Streptococcus iniae] | | | |
|---|---|---|---|
| Identities = 328/392 (83%), Positives = 359/392 (90%), Gaps = 4/392 (1%) | | | |
| Query: | 3 | MAQKTVITEETTDFVMDFKTSSAEGNVDFINVFDLEKMAQQVIPKGAFGYIASGAGDTFT | 62 |
| | | M K+ + TT ++FKTSSAEG+VDF+NVFDLEKMAQ+VIPKGAFGYIASGAGDTFT | |
| Sbjct: | 1 | MENKSEMINATT---IEFKTSSAEGSVDFVNVFDLEKMAQKVIPKGAFGYIASGAGDTFT | 57 |
| Query: | 63 | LHENIRSFNHKLIVPHSLKGVENPSTEITFDGDYLTSPLILAPVAAHKLANEQGEVASAK | 122 |
| | | LHENIRSFNHKLI PH LKGVENPSTEITF GD L SP+ILAPVAAHKLANEQGE+ASAK | |
| Sbjct: | 58 | LHENIRSFNHKLI-PHGLKGVENPSTEITFIGDKLASPIILAPVAAHKLANEQGEIASAK | 116 |
| Query: | 123 | GLKEFGSIYTTSSYSTTDLPEISAALGGTPHWFQFYYSKDDGINRNIMDRVKAQGCKAIV | 182 |
| | | G+KEFG+IYTTSSYSTTDLPEIS LG +PHWFQFYYSKDDGINR+IMDR+KA+G K+IV | |
| Sbjct: | 117 | GVKEFGTIYTTSSYSTTDLPEISQTLGDSPHWFQFYYSKDDGINRHIMDRLKAEGVKSIV | 176 |
| Query: | 183 | LTADATVGGNREVDRRNGFVFPVGMPIVQEYLPDGAGKTMDYVYKSAKQALTSKDIEYIA | 242 |
| | | LT DATVGGNREVD+RNGFVFPVGMPIVQEYLP+GAGKTMDYVYK+ KQAL+ KD+EYIA | |
| Sbjct: | 177 | LTVDATVGGNREVDKRNGFVFPVGMPIVQEYLPNGAGKTMDYVYKATKQALSPKDVEYIA | 236 |
| Query: | 243 | TYSGLPVYVKGPQCAEDTLRALDAGASGIWVTNHGGRQLDGGPAAFDSLQEVAEAVDQKV | 302 |
| | | YSGLPVYVKGPQCAED RAL+AGASGIWVTNHGGRQLDGGPAAFDSLQEVAE+VD++V | |
| Sbjct: | 237 | QYSGLPVYVKGPQCAEDAFRALEAGASGIWVTNHGGRQLDGGPAAFDSLQEVAESVDRRV | 296 |
| Query: | 303 | PIVFDSGIRRGQHIFKALASGADLVALGRPAIYGLAMGGSIGTRQVFEKLNDELKMVMQL | 362 |
| | | PIVFDSG+RRGQH+FKALASGADLVALGRP IYGLAMGGS+GTRQVFEK+NDELKMVMQL | |
| Sbjct: | 297 | PIVFDSGVRRGQHVFKALASGADLVALGRPVIYGLAMGGSVGTRQVFEKINDELKMVMQL | 356 |
| Query: | 363 | AGTQTIQDVKAFNLRHNPYDSSIPFDQNALRL | 394 |
| | | AGTQTI DVK F LRHNPYDSSIPF ++ | |
| Sbjct: | 357 | AGTQTIDDVKHFKLRHNPYDSSIPFSPKCFKI | 388 |

[13186] Based on this analysis, it was predicted that this GAS-specific protein and its epitopes, could be useful antigens for vaccines or diagnostics.

### EXAMPLE 2470

[13187] A DNA sequence (GASx414) was identified in S. pyogenes <SEQ ID 7439> which encodes the amino acid sequence <SEQ ID 7440>. Analysis of this protein sequence reveals the following:

```
Possible site: 32
>>> Seems to have no N-terminal signal sequence
----- Final Results -----
                            bacterial cytoplasm --- Certainty = 0.0682(Affirmative) < succ>
                              bacterial membrane --- Certainty = 0.0000(Not Clear) < succ>
                                bacterial outside --- Certainty = 0.0000(Not Clear) < succ>
```

[13188] No corresponding DNA sequence was identified in S. agalactiae.

[13189] The protein has no significant homology with any sequences in the GENPEPT database.

[13190] Based on this analysis, it was predicted that this GAS-specific protein and its epitopes, could be useful antigens for vaccines or diagnostics.

### EXAMPLE 2471

[13191] A DNA sequence (GASx417R) was identified in S. pyogenes <SEQ ID 7441> which encodes the amino acid sequence <SEQ ID 7442>. Analysis of this protein sequence reveals the following:

```
Possible site: 34
>>> Seems to have no N-terminal signal sequence
----- Final Results -----
                            bacterial cytoplasm --- Certainty = 0.1765(Affirmative) < succ>
                              bacterial membrane --- Certainty = 0.0000(Not Clear) < succ>
                                bacterial outside --- Certainty = 0.0000(Not Clear) < succ>
```

[13192] No corresponding DNA sequence was identified in S. agalactiae.

[13193] The protein has no significant homology with any sequences in the GENPEPT database.

[13194] Based on this analysis, it was predicted that this GAS-specific protein and its epitopes, could be useful antigens for vaccines or diagnostics.

### EXAMPLE 2472

[13195] A DNA sequence (GASx418) was identified in S. pyogenes <SEQ ID 7443> which encodes the amino acid sequence <SEQ ID 7444>. Analysis of this protein sequence reveals the following:

```
Possible site: 32
>>> Seems to have no N-terminal signal sequence
----- Final Results -----
                            bacterial cytoplasm --- Certainty = 0.2532(Affirmative) < succ>
                              bacterial membrane --- Certainty = 0.0000(Not Clear) < succ>
                                bacterial outside --- Certainty = 0.0000(Not Clear) < succ>
```

[13196] No corresponding DNA sequence was identified in S. agalactiae.

[13197] The protein has no significant homology with any sequences in the GENPEPT database.

[13198] Based on this analysis, it was predicted that this GAS-specific protein and its epitopes, could be useful antigens for vaccines or diagnostics.

### EXAMPLE 2473

[13199] A DNA sequence (GASx419) was identified in S. pyogenes <SEQ ID 7445> which encodes the amino acid sequence <SEQ ID 7446>. Analysis of this protein sequence reveals the following:

```
Possible site: 28
>>> Seems to have no N-terminal signal sequence
----- Final Results -----
                            bacterial cytoplasm --- Certainty = 0.3082(Affirmative) < succ>
                              bacterial membrane --- Certainty = 0.0000(Not Clear) < succ>
                                bacterial outside --- Certainty = 0.0000(Not Clear) < succ>
```

[13200] No corresponding DNA sequence was identified in S. agalactiae.

[13201] The protein has no significant homology with any sequences in the GENPEPT database.

[13202] Based on this analysis, it was predicted that this GAS-specific protein and its epitopes, could be useful antigens for vaccines or diagnostics.

### EXAMPLE 2474

[13203] A DNA sequence (GASx423) was identified in S. pyogenes <SEQ ID 7447> which encodes the amino acid sequence <SEQ ID 7448>. Analysis of this protein sequence reveals the following:

| Possible site: 52 | | | | |
|---|---|---|---|---|
| >>> Seems to have an uncleavable N-term signal seq | | | | |
| | INTEGRAL | Likelihood = −2.18 | Transmembrane | 14-30 (13-31) |

```
----- Final Results -----
                              bacterial membrane --- Certainty = 0.1871(Affirmative) < succ>
                                bacterial outside --- Certainty = 0.0000 (Not Clear) < succ>
                            bacterial cytoplasm --- Certainty = 0.0000 (Not Clear) < succ>
```

[13204] No corresponding DNA sequence was identified in S. agalactiae.

[13205] The protein has no significant homology with any sequences in the GENPEPT database.

[13206] Based on this analysis, it was predicted that this GAS-specific protein and its epitopes, could be useful antigens for vaccines or diagnostics.

### EXAMPLE 2475

[13207] A DNA sequence (GASx427R) was identified in S-pyogenes <SEQ ID 7449> which encodes the amino acid sequence <SEQ ID 7450>. Analysis of this protein sequence reveals the following:

| Possible site: 25 | | | | |
|---|---|---|---|---|
| >>> Seems to have an uncleavable N-term signal seq | | | | |
| | INTEGRAL | Likelihood = −1.17 | Transmembrane | 13-29 (10-29) |

```
----- Final Results -----
                              bacterial membrane --- Certainty = 0.1468(Affirmative) < succ>
                                bacterial outside --- Certainty = 0.0000(Not Clear) < succ>
                            bacterial cytoplasm --- Certainty = 0.0000(Not Clear) < succ>
```

[13208] A related sequence was also identified in GAS <SEQ ID 9105> which encodes the amino acid sequence <SEQ ID 9106>. Analysis of this protein sequence reveals the following:

| Possible site: 20 | | | | |
|---|---|---|---|---|
| >>> Seems to have an uncleavable N-term signal seq | | | | |
| | INTEGRAL | Likelihood = −1.17 | Transmembrane | 8-24 |

```
----- Final Results -----
                              bacterial membrane --- Certainty = 0.1470(Affirmative) < succ>
                                bacterial outside --- Certainty = 0.0000(Not Clear) < succ>
                            bacterial cytoplasm --- Certainty = 0.0000(Not Clear) < succ>
```

[13209] No corresponding DNA sequence was identified in S. agalactiae.

[13210] The protein has homology with the following sequences in the GENPEPT database:

| >GP: AAA26616 GB: M63917 epidermal cell differentiation inhibitor | | | |
|---|---|---|---|
| [Staphylococcus aureus] | | | |
| Identities = 58/195 (29%), Positives = 106/195 (53%), Gaps = 13/195 (6%) | | | |
| Query: | 67 | RWGKGLI----YPRAEQEAMAAYTCQQAGPINTSLDKAKGELSQLTPELRDQVAQLDAAT | 122 |
| | | +WG LI Y ++ A+ YT + + IN L A G++++L +D+V +LD++ | |
| Sbjct: | 49 | KWGNKLIKQAKYSSDDKIALYEYT-KDSSKINGPLRLAGGDINKLDSTTQDKVRRLDSSI | 107 |
| Query: | 123 | HRLVIPWNIVVYRYVYETFLRDI-GVSHADLTSYYR--NHQFDPHILCKIK--LGTR-YT | 176 |
| | | + P ++ VYR + +L I G ++ DL + N Q+D +++ K+ + +R Y | |
| Sbjct: | 108 | SKSTTPESVYVYRLLNLDYLTSIVGFTNEDLYKLQQTNNGQYDENLVRKLNNVMNSRIYR | 167 |
| Query: | 177 | KHSFMSTTALKNGAMTHRPVEVRICVKKGAKAAFV--EPYSAVPSEVELLFPRGCQLEVV | 234 |
| | | + + ST + A+ RP+E+R+ + KG KAA++ + +A + E+L PRG + V | |
| Sbjct: | 168 | EDGYSSTQLVSGAAVGGRPIELRLELPKGTKAAYLNSKDLTAYYGQQEVLLPRGTEYAVG | 227 |
| Query: | 235 | GAYVSQDQKKLHIEA | 249 |
| | | +S D+KK+ I A | |
| Sbjct: | 228 | SVELSNDKKKIIITA | 242 |

[13211] Based on this analysis, it was predicted that this GAS-specific protein and its epitopes, could be useful antigens for vaccines or diagnostics.

### EXAMPLE 2476

[13212] A DNA sequence (GASx428) was identified in S. pyogenes <SEQ ID 7451> which encodes the amino acid sequence <SEQ ID 7452>. Analysis of this protein sequence reveals the following:

```
Possible site: 14
>>> Seems to have no N-terminal signal sequence
----- Final Results -----
                            bacterial cytoplasm --- Certainty = 0.3817(Affirmative) < succ>
                              bacterial membrane --- Certainty = 0.0000(Not Clear) < succ>
                                bacterial outside --- Certainty = 0.0000(Not Clear) < succ>
```

[13213] No corresponding DNA sequence was identified in S. agalactiae.

[13214] The protein has no significant homology with any sequences in the GENPEPT database.

[13215] Based on this analysis, it was predicted that this GAS-specific protein and its epitopes, could be useful antigens for vaccines or diagnostics.

### EXAMPLE 2477

[13216] A DNA sequence (GASx429) was identified in S. pyogenes <SEQ ID 7453> which encodes the amino acid sequence <SEQ ID 7454>. Analysis of this protein sequence reveals the following:

```
Possible site: 32
>>> Seems to have a cleavable N-term signal seq.
----- Final Results -----
                                bacterial outside --- Certainty = 0.3000(Affirmative) < succ>
                              bacterial membrane --- Certainty = 0.0000(Not Clear) < succ>
                            bacterial cytoplasm --- Certainty = 0.0000(Not Clear) < succ>
```

[13217] No corresponding DNA sequence was identified in S. agalactiae.

[13218] The protein has no significant homology with any sequences in the GENPEPT database.

[13219] Based on this analysis, it was predicted that this GAS-specific protein and its epitopes, could be useful antigens for vaccines or diagnostics.

### EXAMPLE 2478

[13220] A DNA sequence (GASx431) was identified in S. pyogenes <SEQ ID 7455> which encodes the amino acid sequence <SEQ ID 7456>. Analysis of this protein sequence reveals the following:

| Possible site: 43 | | | | |
|---|---|---|---|---|
| >>> Seems to have an uncleavable N-term signal seq | | | | |
| | INTEGRAL | Likelihood = −8.60 | Transmembrane | 68-84 (66-90) |
| | INTEGRAL | Likelihood = −6.85 | Transmembrane | 22-38 (16-42) |
| | INTEGRAL | Likelihood = −3.29 | Transmembrane | 44-60 (43-61) |

```
----- Final Results -----
                              bacterial membrane --- Certainty = 0.4439(Affirmative) < succ>
                                bacterial outside --- Certainty = 0.0000(Not Clear) < succ>
                            bacterial cytoplasm --- Certainty = 0.0000(Not Clear) < succ>
```

[13221] No corresponding DNA sequence was identified in S. agalactiae.

[13222] The protein has no significant homology with any sequences in the GENPEPT database.

[13223] Based on this analysis, it was predicted that this GAS-specific protein and its epitopes, could be useful antigens for vaccines or diagnostics.

### EXAMPLE 2479

[13224] A DNA sequence (GASx432R) was identified in S. pyogenes <SEQ ID 7457> which encodes the amino acid sequence <SEQ ID 7458>. Analysis of this protein sequence reveals the following:

```
Possible site: 22
>>> Seems to have a cleavable N-term signal seq.
----- Final Results -----
                                bacterial outside --- Certainty = 0.3000(Affirmative) < succ>
                              bacterial membrane --- Certainty = 0.0000(Not Clear) < succ>
                            bacterial cytoplasm --- Certainty = 0.0000(Not Clear) < succ>
```

[13225] No corresponding DNA sequence was identified in S. agalactiae.

[13226] The protein has no significant homology with any sequences in the GENPEPT database.

[13227] Based on this analysis, it was predicted that this GAS-specific protein and its epitopes, could be useful antigens for vaccines or diagnostics.

### EXAMPLE 2480

[13228] A DNA sequence (GASx434) was identified in S. pyogenes <SEQ ID 7459> which encodes the amino acid sequence <SEQ ID 7460>. Analysis of this protein sequence reveals the following:

```
Possible site: 24
>>> Seems to have a cleavable N-term signal seq.
----- Final Results -----
                                bacterial outside --- Certainty = 0.3000(Affirmative) < succ>
                              bacterial membrane --- Certainty = 0.0000(Not Clear) < succ>
                            bacterial cytoplasm --- Certainty = 0.0000(Not Clear) < succ>
```

[13229] No corresponding DNA sequence was identified in S. agalactiae.

[13230] The protein has no significant homology with any sequences in the GENPEPT database.

[13231] Based on this analysis, it was predicted that this GAS-specific protein and its epitopes, could be useful antigens for vaccines or diagnostics.

### EXAMPLE 2481

[13232] A DNA sequence (GASx435R) was identified in S. pyogenes <SEQ ID 7461> which encodes the amino acid sequence <SEQ ID 7462>. Analysis of this protein sequence reveals the following:

| Possible site: 25 | | | | |
|---|---|---|---|---|
| >>> Seems to have an uncleavable N-term signal seq | | | | |
| | INTEGRAL | Likelihood = −2.50 | Transmembrane | 4-20 (3-21) |

```
----- Final Results -----
                              bacterial membrane --- Certainty = 0.1999(Affirmative) < succ>
                                bacterial outside --- Certainty = 0.0000(Not Clear) < succ>
                            bacterial cytoplasm --- Certainty = 0.0000(Not Clear) < succ>
```

[13233] No corresponding DNA sequence was identified in S. agalactiae.

[13234] The protein has homology with the following sequences in the GENPEPT database:

| >GP: AAB59092 GB: M97157 pyrogenic exotoxin C [Streptococcus pyogenes] | | | |
|---|---|---|---|
| Identities = 110/229 (48%), Positives = 150/229 (65%), Gaps = 4/229 (1%) | | | |
| Query: | 4 | IIKTIILVIIIFHGYGS--VKSDSE-NIKDVKLQLNYAYEIIPVDYTNCNIDYLTTHDFY | 60 |
| | | IIK + ++ +I S +KSDS+ +I +VK L YAY I P DY +C +++ TTH | |
| Sbjct: | 6 | IIKIVFIITVILISTISPIIKSDSKKDISNVKSDLLYAYTITPYDYKDCRVNFSTTHTLN | 65 |
| Query: | 61 | IDISSYKKKNFSVDSEVESYITTKFTKNQKVNIFGLPYIFTRYDVYYIYGGVTPSVNSNS | 120 |
| | | ID Y+ K++ + SE+ + KF ++ V++FGL YI + YIYGG+TP+ N N | |
| Sbjct: | 66 | IDTQKYRGKDYYISSEMSYEASQKFKRDDHVDVFGLFYILNSHTGEYIYGGITPAQN-NK | 124 |
| Query: | 121 | ENSKIVGNLLIDGVQQKTLINPIKIDKPIFTIQEFDFKIRQYLMQTYKIYDPNSPYIKGQ | 180 |
| | | N K++GNL I G Q+ L N I ++K I T QE DFKIR YLM YKIYD SPY+ G+ | |
| Sbjct: | 125 | VNHKLLGNLFISGESQQNLNNKIILEKDIVTFQEIDFKIRKYLMDNYKIYDATSPYVSGR | 184 |
| Query: | 181 | LEIAINGNKHESFNLYDATSSSTRSDIFKKYKDNKTINMKDFSHFDIYL | 229 |
| | | +EI KHE +L+D+ + TRSDIF KYKDN+ INMK+FSHFDIYL | |
| Sbjct: | 185 | IEIGTKDGKHEQIDLFDSPNEGTRSDIFAKYKDNRIINMKNFSHFDIYL | 233 |

[13235] Based on this analysis, it was predicted that this GAS-specific protein and its epitopes, could be useful antigens for vaccines or diagnostics.

### EXAMPLE 2482

[13236] A DNA sequence (GASx436R) was identified in S. pyogenes <SEQ ID 7463> which encodes the amino acid sequence <SEQ ID 7464>. Analysis of this protein sequence reveals the following:

```
Possible site: 22
>>> Seems to have a cleavable N-term signal seq.
----- Final Results -----
                                bacterial outside --- Certainty = 0.3000(Affirmative) < succ>
                              bacterial membrane --- Certainty = 0.0000(Not Clear) < succ>
                            bacterial cytoplasm --- Certainty = 0.0000(Not Clear) < succ>
```

[13237] No corresponding DNA sequence was identified in S. agalactiae.

[13238] The protein has no significant homology with any sequences in the GENPEPT database.

[13239] Based on this analysis, it was predicted that this GAS-specific protein and its epitopes, could be useful antigens for vaccines or diagnostics.

### EXAMPLE 2483

[13240] A DNA sequence (GASx446) was identified in S. pyogenes <SEQ ID 7465> which encodes the amino acid sequence <SEQ ID 7466>. Analysis of this protein sequence reveals the following:

```
Possible site: 20
>>> Seems to have a cleavable N-term signal seq.
----- Final Results -----
                            bacterial outside --- Certainty = 0.3000(Affirmative) < succ>
                          bacterial membrane --- Certainty = 0.0000(Not Clear) < succ>
                        bacterial cytoplasm --- Certainty = 0.0000(Not Clear) < succ>
```

[13241] No corresponding DNA sequence was identified in S. agalactiae.

[13242] The protein has no significant homology with any sequences in the GENPEPT database.

[13243] Based on this analysis, it was predicted that this GAS-specific protein and its epitopes, could be useful antigens for vaccines or diagnostics.

### EXAMPLE 2484

[13244] A DNA sequence (GASx449) was identified in S. pyogenes <SEQ ID 7467> which encodes the amino acid sequence <SEQ ID 7468>. Analysis of this protein sequence reveals the following:

```
Possible site: 15
>>> Seems to have an uncleavable N-term signal seq
      INTEGRAL Likelihood = −3.82 Transmembrane 3 − 19 (1 − 20)
----- Final Results -----
                            bacterial membrane --- Certainty = 0.2529(Affirmative) < succ>
                              bacterial outside --- Certainty = 0.0000(Not Clear) < succ>
                          bacterial cytoplasm --- Certainty = 0.0000(Not Clear) < succ>
```

[13245] No corresponding DNA sequence was identified in S. agalactiae.

[13246] The protein has no significant homology with any sequences in the GENPEPT database.

[13247] Based on this analysis, it was predicted that this GAS-specific protein and its epitopes, could be useful antigens for vaccines or diagnostics.

### EXAMPLE 2485

[13248] A DNA sequence (GASx450R) was identified in S. pyogenes <SEQ ID 7469> which encodes the amino acid sequence <SEQ ID 7470>. Analysis of this protein sequence reveals the following:

```
Possible site: 30
>>> Seems to have an uncleavable N-term signal seq
      INTEGRAL Likelihood = −1.44 Transmembrane 21 − 37 (19 − 37)
----- Final Results -----
                            bacterial membrane --- Certainty = 0.1574(Affirmative) < succ>
                              bacterial outside --- Certainty = 0.0000(Not Clear) < succ>
                          bacterial cytoplasm --- Certainty = 0.0000(Not Clear) < succ>
```

[13249] No corresponding DNA sequence was identified in S. agalactiae.

[13250] The protein has no significant homology with any sequences in the GENPEPT database.

[13251] Based on this analysis, it was predicted that this GAS-specific protein and its epitopes, could be useful antigens for vaccines or diagnostics.

### EXAMPLE 2486

[13252] A DNA sequence (GASx457R) was identified in S. pyogenes <SEQ ID 7471> which encodes the amino acid sequence <SEQ ID 7472>. Analysis of this protein sequence reveals the following:

| Possible site: 19 | | | | | |
|---|---|---|---|---|---|
| >>> Seems to have a cleavable N-term signal seq. | | | | | |
| | INTEGRAL | Likelihood = −15.34 | Transmembrane | 64 − 80 | (57 − 86) |
| | INTEGRAL | Likelihood = −13.43 | Transmembrane | 97 − 113 | (91 − 116) |
| | INTEGRAL | Likelihood = −5.57 | Transmembrane | 38 − 54 | (32 − 56) |

```
----- Final Results -----
                            bacterial membrane --- Certainty = 0.7135(Affirmative) < succ>
                              bacterial outside --- Certainty = 0.0000(Not Clear) < succ>
                          bacterial cytoplasm --- Certainty = 0.0000(Not Clear) < succ>
```

[13253] No corresponding DNA sequence was identified in S. agalactiae.

[13254] The protein has no significant homology with any sequences in the GENPEPT database.

[13255] Based on this analysis, it was predicted that this GAS-specific protein and its epitopes, could be useful antigens for vaccines or diagnostics.

### EXAMPLE 2487

[13256] A DNA sequence (GASx476R) was identified in S. pyogenes <SEQ ID 7473> which encodes the amino acid sequence <SEQ ID 7474>. Analysis of this protein sequence reveals the following:

```
Possible site: 31
>>> Seems to have no N-terminal signal sequence
----- Final Results -----
                            bacterial cytoplasm --- Certainty = 0.3013(Affirmative) < succ>
                              bacterial membrane --- Certainty = 0.0000(Not Clear) < succ>
                                bacterial outside --- Certainty = 0.0000(Not Clear) < succ>
```

[13257] No corresponding DNA sequence was identified in S. agalactiae.

[13258] The protein has no significant homology with any sequences in the GENPEPT database.

[13259] Based on this analysis, it was predicted that this GAS-specific protein and its epitopes, could be useful antigens for vaccines or diagnostics.

### EXAMPLE 2488

[13260] A DNA sequence (GASx477) was identified in S. pyogenes <SEQ ID 7475> which encodes the amino acid sequence <SEQ ID 7476>. Analysis of this protein sequence reveals the following:

```
Possible site: 57
>>> Seems to have no N-terminal signal sequence
----- Final Results -----
                            bacterial cytoplasm --- Certainty = 0.1022(Affirmative) < succ>
                              bacterial membrane --- Certainty = 0.0000(Not Clear) < succ>
                                bacterial outside --- Certainty = 0.0000(Not Clear) < succ>
```

[13261] No corresponding DNA sequence was identified in S. agalactiae.

[13262] The protein has homology with the following sequences in the GENPEPT database:

| >GP:CAC03521 GB:AJ276410 BlpJ protein [Streptococcus pneumoniae] | | | |
|---|---|---|---|
| Identities = 47/77 (61%), Positives = 59/77 (76%) | | | |
| Query: | 1 | MIKFAEEIQKEELFHIIGGYSATDCKNHLIGGITSGAIAGGVGAGMATLGVGGVAGAFAG | 60 |
| | | M+ E + E L + GGYS+TDC+N LI G+T+G I GG GAG+ATLGV G+AGAF G | |
| Sbjct: | 5 | MLSQLEVMDTEMLAKVEGGYSSTDCQNALITGVTTGIITGGTGAGLATLGVAGLAGAFVG | 64 |
| Query: | 61 | AHVGAIAGGLTCVGGML | 77 |
| | | AH+GAI GGLTC+GGM+ | |
| Sbjct: | 65 | AHIGAIGGGLTCLGGMV | 81 |

[13263] Based on this analysis, it was predicted that this GAS-specific protein and its epitopes, could be useful antigens for vaccines or diagnostics.

### EXAMPLE 2489

[13264] A DNA sequence (GASx478) was identified in S. pyogenes <SEQ ID 7477> which encodes the amino acid sequence <SEQ ID 7478>. Analysis of this protein sequence reveals the following:

| Possible site: 45 | | | | | |
|---|---|---|---|---|---|
| >>> Seems to have no N-terminal signal sequence | | | | | |
| | INTEGRAL | Likelihood = −2.07 | Transmembrane | 42 − 58 | (41 − 58) |
| | INTEGRAL | Likelihood = −1.59 | Transmembrane | 22 − 38 | (22 − 38) |

```
----- Final Results -----
                            bacterial membrane --- Certainty = 0.1829(Affirmative) < succ>
                              bacterial outside --- Certainty = 0.0000(Not Clear) < succ>
                          bacterial cytoplasm --- Certainty = 0.0000(Not Clear) < succ>
```

[13265] No corresponding DNA sequence was identified in S. agalactiae.

[13266] The protein has homology with the following sequences in the GENPEPT database:

| >GP:CAC03520 GB:AJ276410 BlpI protein [Streptococcus pneumoniae] | | | |
|---|---|---|---|
| Identities = 35/56 (62%), Positives = 44/56 (78%) | | | |
| Query: | 1 | MDNFLELQFEELVNISGGKGNIGSAIGGCLGGMLIAAAGGPITGGAAAFVCVASGI | 56 |
| | | M+ F + EEL +SGG+GN+GSAIGGC+G +L+AAA GPITGGAA +CV SGI | |
| Sbjct: | 6 | MEQFSVMDNEELEIVSGGRGNLGSAIGGCIGAVLLAAATGPITGGAATLICVGSGI | 61 |

[13267] Based on this analysis, it was predicted that this GAS-specific protein and its epitopes, could be useful antigens for vaccines or diagnostics.

### EXAMPLE 2490

[13268] A DNA sequence (GASx482) was identified in S. pyogenes <SEQ ID 7479> which encodes the amino acid sequence <SEQ ID 7480>. Analysis of this protein sequence reveals the following:

```
Possible site: 14
>>> Seems to have an uncleavable N-term signal seq
      INTEGRAL Likelihood = −0.43 Transmembrane 61 − 77 (61 − 79)
----- Final Results -----
                            bacterial membrane --- Certainty = 0.1171(Affirmative) < succ>
                              bacterial outside --- Certainty = 0.0000(Not Clear) < succ>
                          bacterial cytoplasm --- Certainty = 0.0000(Not Clear) < succ>
```

[13269] No corresponding DNA sequence was identified in S. agalactiae.

[13270] The protein has homology with the following sequences in the GENPEPT database:

| >GP:CAC03524 GB:AJ276410 BlpM protein [Streptococcus pneumoniae] | | | |
|---|---|---|---|
| Identities = 22/52 (42%), Positives = 30/52 (57%) | | | |
| Query: | 29 | MEIKKLETFHQMTIEKLAKVEGGKNNWQANVSGVIAAGSAGAAIGFPVCGVA | 80 |
| | | M+ K +E FH+M I L+ +EGGKNNWQ NV A G +G +C + | |
| Sbjct: | 1 | MDTKIMEQFHEMDITMLSSIEGGKNNWQTNVLEGGGAAFGGWGLGTAICAAS | 52 |

[13271] Based on this analysis, it was predicted that this GAS-specific protein and its epitopes, could be useful antigens for vaccines or diagnostics.

### EXAMPLE 2491

[13272] A DNA sequence (GASx483) was identified in S. pyogenes <SEQ ID 7481> which encodes the amino acid sequence <SEQ ID 7482>. Analysis of this protein sequence reveals the following:

```
Possible site: 58
>>> Seems to have no N-terminal signal sequence
----- Final Results -----
                            bacterial cytoplasm --- Certainty = 0.1832(Affirmative) < succ>
                              bacterial membrane --- Certainty = 0.0000(Not Clear) < succ>
                                bacterial outside --- Certainty = 0.0000(Not Clear) < succ>
```

[13273] No corresponding DNA sequence was identified in S. agalactiae.

[13274] The protein has no significant homology with any sequences in the GENPEPT database.

[13275] Based on this analysis, it was predicted that this GAS-specific protein and its epitopes, could be useful antigens for vaccines or diagnostics.

### EXAMPLE 2492

[13276] A DNA sequence (GASx484) was identified in S. pyogenes <SEQ ID 7483> which encodes the amino acid sequence <SEQ ID 7484>. Analysis of this protein sequence reveals the following:

```
Possible site: 21
>>> Seems to have a cleavable N-term signal seq.
----- Final Results -----
                            bacterial outside --- Certainty = 0.3000(Affirmative) < succ>
                          bacterial membrane --- Certainty = 0.0000(Not Clear) < succ>
                        bacterial cytoplasm --- Certainty = 0.0000(Not Clear) < succ>
```

[13277] No corresponding DNA sequence was identified in S. agalactiae.

[13278] The protein has no significant homology with any sequences in the GENPEPT database.

[13279] Based on this analysis, it was predicted that this GAS-specific protein and its epitopes, could be useful antigens for vaccines or diagnostics.

### EXAMPLE 2493

[13280] A DNA sequence (GASx485) was identified in S. pyogenes <SEQ ID 7485> which encodes the amino acid sequence <SEQ ID 7486>. Analysis of this protein sequence reveals the following:

```
Possible site: 32
>>> Seems to have no N-terminal signal sequence
----- Final Results -----
                            bacterial cytoplasm --- Certainty = 0.1037(Affirmative) < succ>
                              bacterial membrane --- Certainty = 0.0000(Not Clear) < succ>
                                bacterial outside --- Certainty = 0.0000(Not Clear) < succ>
```

[13281] No corresponding DNA sequence was identified in S. agalactiae.

[13282] The protein has no significant homology with any sequences in the GENPEPT database.

[13283] Based on this analysis, it was predicted that this GAS-specific protein and its epitopes, could be useful antigens for vaccines or diagnostics.

### EXAMPLE 2494

[13284] A DNA sequence (GASx487) was identified in S. pyogenes <SEQ ID 7487> which encodes the amino acid sequence <SEQ ID 7488>. Analysis of this protein sequence reveals the following:

```
Possible site: 50
>>> Seems to have no N-terminal signal sequence
----- Final Results -----
                            bacterial cytoplasm --- Certainty = 0.1086(Affirmative) < succ>
                              bacterial membrane --- Certainty = 0.0000(Not Clear) < succ>
                                bacterial outside --- Certainty = 0.0000(Not Clear) < succ>
```

[13285] No corresponding DNA sequence was identified in S. agalactiae.

[13286] The protein has no significant homology with any sequences in the GENPEPT database.

[13287] Based on this analysis, it was predicted that this GAS-specific protein and its epitopes, could be useful antigens for vaccines or diagnostics.

### EXAMPLE 2495

[13288] A DNA sequence (GASx488) was identified in S. pyogenes <SEQ ID 7489> which encodes the amino acid sequence <SEQ ID 7490>. Analysis of this protein sequence reveals the following:

```
Possible site: 22
>>> Seems to have no N-terminal signal sequence
----- Final Results -----
                            bacterial cytoplasm --- Certainty = 0.2176(Affirmative) < succ>
                              bacterial membrane --- Certainty = 0.0000(Not Clear) < succ>
                                bacterial outside --- Certainty = 0.0000(Not Clear) < succ>
```

[13289] No corresponding DNA sequence was identified in S. agalactiae.

[13290] The protein has no significant homology with any sequences in the GENPEPT database.

[13291] Based on this analysis, it was predicted that this GAS-specific protein and its epitopes, could be useful antigens for vaccines or diagnostics.

### EXAMPLE 2496

[13292] A DNA sequence (GASx489R) was identified in S. pyogenes <SEQ ID 7491> which encodes the amino acid sequence <SEQ ID 7492>. Analysis of this protein sequence reveals the following:

```
Possible site: 22
>>> Seems to have an uncleavable N-term signal seq
----- Final Results -----
                            bacterial membrane --- Certainty = 0.0000(Not Clear) < succ>
                              bacterial outside --- Certainty = 0.0000(Not Clear) < succ>
                          bacterial cytoplasm --- Certainty = 0.0000(Not Clear) < succ>
```

[13293] No corresponding DNA sequence was identified in S. agalactiae.

[13294] The protein has no significant homology with any sequences in the GENPEPT database.

[13295] Based on this analysis, it was predicted that this GAS-specific protein and its epitopes, could be useful antigens for vaccines or diagnostics.

### EXAMPLE 2497

[13296] A DNA sequence (GASx490) was identified in S. pyogenes <SEQ ID 7493> which encodes the amino acid sequence <SEQ ID 7494>. Analysis of this protein sequence reveals the following:

```
Possible site: 24
>>> Seems to have no N-terminal signal sequence
----- Final Results -----
                            bacterial cytoplasm --- Certainty = 0.2547(Affirmative) < succ>
                              bacterial membrane --- Certainty = 0.0000(Not Clear) < succ>
                                bacterial outside --- Certainty = 0.0000(Not Clear) < succ>
```

[13297] No corresponding DNA sequence was identified in S. agalactiae.

[13298] The protein has no significant homology with any sequences in the GENPEPT database.

[13299] Based on this analysis, it was predicted that this GAS-specific protein and its epitopes, could be useful antigens for vaccines or diagnostics.

### EXAMPLE 2498

[13300] A DNA sequence (GASx491R) was identified in S. pyogenes <SEQ ID 7495> which encodes the amino acid sequence <SEQ ID 7496>. Analysis of this protein sequence reveals the following:

```
Possible site: 22
>>> Seems to have an uncleavable N-term signal seq
      INTEGRAL Likelihood = −10.24 Transmembrane 6 − 22 (3 − 28)
----- Final Results -----
                            bacterial membrane --- Certainty = 0.5097(Affirmative) < succ>
                              bacterial outside --- Certainty = 0.0000(Not Clear) < succ>
                          bacterial cytoplasm --- Certainty = 0.0000(Not Clear) < succ>
```

[13301] No corresponding DNA sequence was identified in S. agalactiae.

[13302] The protein has no significant homology with any sequences in the GENPEPT database.

[13303] Based on this analysis, it was predicted that this GAS-specific protein and its epitopes, could be useful antigens for vaccines or diagnostics.

### EXAMPLE 2499

[13304] A DNA sequence (GASx492) was identified in S. pyogenes <SEQ ID 7497> which encodes the amino acid sequence <SEQ ID 7498>. Analysis of this protein sequence reveals the following:

```
Possible site: 27
>>> Seems to have an uncleavable N-term signal seq
----- Final Results -----
                            bacterial membrane --- Certainty = 0.0000(Not Clear) < succ>
                              bacterial outside --- Certainty = 0.0000(Not Clear) < succ>
                          bacterial cytoplasm --- Certainty = 0.0000(Not Clear) < succ>
```

[13305] No corresponding DNA sequence was identified in S. agalactiae.

[13306] The protein has no significant homology with any sequences in the GENPEPT database.

[13307] Based on this analysis, it was predicted that this GAS-specific protein and its epitopes, could be useful antigens for vaccines or diagnostics.

### EXAMPLE 2500

[13308] A DNA sequence (GASx493) was identified in S. pyogenes <SEQ ID 7499> which encodes the amino acid sequence <SEQ ID 7500>. Analysis of this protein sequence reveals the following:

```
Possible site: 19
>>> Seems to have no N-terminal signal sequence
      INTEGRAL Likelihood = −0.69 Transmembrane 21 − 37 (21 − 37)
----- Final Results -----
                            bacterial membrane --- Certainty = 0.1277(Affirmative) < succ>
                              bacterial outside --- Certainty = 0.0000(Not Clear) < succ>
                          bacterial cytoplasm --- Certainty = 0.0000(Not Clear) < succ>
```

[13309] No corresponding DNA sequence was identified in S. agalactiae.

[13310] The protein has no significant homology with any sequences in the GENPEPT database.

[13311] Based on this analysis, it was predicted that this GAS-specific protein and its epitopes, could be useful antigens for vaccines or diagnostics.

### EXAMPLE 2501

[13312] A DNA sequence (GASx495R) was identified in S. pyogenes <SEQ ID 7501> which encodes the amino acid sequence <SEQ ID 7502>. Analysis of this protein sequence reveals the following:

```
Possible site: 28
>>> Seems to have no N-terminal signal sequence
----- Final Results -----
                            bacterial cytoplasm --- Certainty = 0.2891(Affirmative) < succ>
                              bacterial membrane --- Certainty = 0.0000(Not Clear) < succ>
                                bacterial outside --- Certainty = 0.0000(Not Clear) < succ>
```

[13313] No corresponding DNA sequence was identified in S. agalactiae.

[13314] The protein has no significant homology with any sequences in the GENPEPT database.

[13315] Based on this analysis, it was predicted that this GAS-specific protein and its epitopes, could be useful antigens for vaccines or diagnostics.

### EXAMPLE 2502

[13316] A DNA sequence (GASx499R) was identified in S. pyogenes <SEQ ID 7503> which encodes the amino acid sequence <SEQ ID 7504>. Analysis of this protein sequence reveals the following:

```
Possible site: 15
>>> Seems to have an uncleavable N-term signal seq
      INTEGRAL Likelihood = −2.50 Transmembrane 3 − 19 (1 − 20)
----- Final Results -----
                            bacterial membrane --- Certainty = 0.1999(Affirmative) < succ>
                              bacterial outside --- Certainty = 0.0000(Not Clear) < succ>
                          bacterial cytoplasm --- Certainty = 0.0000(Not Clear) < succ>
```

[13317] No corresponding DNA sequence was identified in S. agalactiae.

[13318] The protein has no significant homology with any sequences in the GENPEPT database.

[13319] Based on this analysis, it was predicted that this GAS-specific protein and its epitopes, could be useful antigens for vaccines or diagnostics.

### EXAMPLE 2503

[13320] A DNA sequence (GASx500) was identified in S. pyogenes <SEQ ID 7505> which encodes the amino acid sequence <SEQ ID 7506>. Analysis of this protein sequence reveals the following:

```
Possible site: 54
>>> Seems to have an uncleavable N-term signal seq
----- Final Results -----
                            bacterial membrane --- Certainty = 0.0000(Not Clear) < succ>
                              bacterial outside --- Certainty = 0.0000(Not Clear) < succ>
                          bacterial cytoplasm --- Certainty = 0.0000(Not Clear) < succ>
```

[13321] No corresponding DNA sequence was identified in S. agalactiae.

[13322] The protein has homology with the following sequences in the GENPEPT database:

| >GP: AAC77220 GB: AE000497 orf, hypothetical protein [Escherichia | | | |
|---|---|---|---|
| coli] | | | |
| Identities = 262/480 (54%), Positives = 338/480 (69%), Gaps = 5/480 (1%) | | | |
| Query: | 18 | GMLNRHGLIAGATGTGKTVTLKVLAEQLSLAGVPVFLADIKGDLSNLTKAGEVTDKLAAR | 77 |
| | | GM NRHGLI GATGTGKTVTL+ LAE LS GVPVF+AD+KGDL+ + +AG V++KL AR | |
| Sbjct: | 20 | GMANRHGLITGATGTGKTVTLQKLAESLSEIGVPVFMADVKGDLTGVAQAGTVSEKLLAR | 79 |
| Query: | 78 | LATIGVSDYQPQAFPVRMWDVFGQNGQPLRTTISELGPMMLSRLLNLNDTQTGVLNIVFK | 137 |
| | | L IGV+D+QP A PV +WD+FG+ G P+R T+S+LGP++L+RLLNLND Q+GVLNI+F+ | |
| Sbjct: | 80 | LKNIGVNDWQPHANPVVVWDIFGEKGHPVRATVSDLGPLLLARLLNLNDVQSGVLNIIFR | 139 |
| Query: | 138 | IADEKGWLLIDLKDLQAILKEVGDHASDYSSHYGNIAKQSIGAIQRSLLTLEQEGAHQFF | 197 |
| | | IAD++G LL+D KDL+AI + +GD+A + + YGNI+ S+GAIQR LL+LEQ+GA FF | |
| Sbjct: | 140 | IADDQGLLLLDFKDLRAITQYIGDNAKSFQNQYGNISSASVGAIQRGLLSLEQQGAAHFF | 199 |
| Query: | 198 | GEPALDVADLMQLDVASGYGAINILSATKLFQSPTLYTTFLLWLLSELYKLLPEVGDLDK | 257 |
| | | GEP LD+ D M+ D A+G G INILSA KL+Q P LY LLW+LSELY+ LPE GDL+K | |
| Sbjct: | 200 | GEPMLDIKDWMRTD-ANGKGVINILSAEKLYQMPKLYAASLLWMLSELYEQLPEAGDLEK | 258 |
| Query: | 258 | PKMVFFFDEAHLLFKDAPKVFLEKVEQIVRLIRSKGVGIFFVTQNPLDLPETVLAQLGNR | 317 |
| | | PK+VFFFDEAHLLF DAP+V L+K+EQ++RLIRSKGVG++FV+QNP D+P+ VL QLGNR | |
| Sbjct: | 259 | PKLVFFFDEAHLLFNDAPQVLLDKIEQVIRLIRSKGVGVWFVSQNPSDIPDNVLGQLGNR | 318 |
| Query: | 318 | IQHAFRAYTPKEQKAVRVAADTFRQNPDLDVARVITELEVGEALISVLNDKGQPSIVERA | 377 |
| | | +QHA RA+TPK+QKAV+ AA T R NP D + I EL GEALIS L+ KG PS+VERA | |
| Sbjct: | 319 | VQHALRAFTPKDQKAVKAAAQTMRANPAFDTEKAIQELGTGEALISFLDAKGSPSVVERA | 378 |
| Query: | 378 | YIMPPKSSFAVLSEIESQQLVQSSPFASKYSQSIDRESAYEKLAAKVLEDNRLAQEAIAT | 437 |
| | | ++ P S ++E E L+ SP KY +DRESAYE L K + + Q | |
| Sbjct: | 379 | MVIAPCSRMGPVTEDERNGLINHSPVYGKYEDEVDRESAYEML-QKGFQASTEQQNNPPA | 437 |
| Query: | 438 | AQREKEAKEAIKAQAATKKANRRSVGRSHKTVVEKATDAFISTTVRTIGRELVRGLLGSL | 497 |
| | | +E + I K + + R + ++VRG+LGSL | |
| Sbjct: | 438 | KGKEVAVDDGILGGLKDILFGTTGPRGGKK---DGVVQTMAKSAARQVTNQIVRGMLGSL | 494 |

[13323] Based on this analysis, it was predicted that this GAS-specific protein and its epitopes, could be useful antigens for vaccines or diagnostics.

### EXAMPLE 2504

[13324] A DNA sequence (GASx502) was identified in S. pyogenes <SEQ ID 7507> which encodes the amino acid sequence <SEQ ID 7508>. Analysis of this protein sequence reveals the following:

| Possible site: 49 | | | | |
|---|---|---|---|---|
| >>> Seems to have an uncleavable N-term signal seq | | | | |
| | INTEGRAL | Likelihood = −13.59 | Transmembrane | 59-75 (52-77) |
| | INTEGRAL | Likelihood = −9.34 | Transmembrane | 4-20 (1-24) |

```
----- Final Results -----
                              bacterial membrane --- Certainty = 0.6434(Affirmative) < succ>
                                bacterial outside --- Certainty = 0.0000(Not Clear) < succ>
                            bacterial cytoplasm --- Certainty = 0.0000(Not Clear) < succ>
```

[13325] No corresponding DNA sequence was identified in S. agalactiae.

[13326] The protein has homology with the following sequences in the GENPEPT database:

| >GP: CAB15368 GB: Z99121 yvaL [Bacillus subtilis] | | | |
|---|---|---|---|
| Identities = 28/72 (38%), Positives = 44/72 (60%), Gaps = 2/72 (2%) | | | |
| Query: | 1 | MYNLLLTILLVLSGLLEIAIFMQPQKNPSSNVFDSSGSEALFERTKARGFEAFMQRFTAV | 60 |
| | | M+ +L+T+L+++S L I + +Q K+ + S G+E LF + KARG + + R T V | |
| Sbjct: | 1 | MHAVLITLLVIVSIALIIVVLLQSSKSAGLSGAISGGAEQLFGKQKARGLDLILHRITVV | 60 |
| Query: | 61 | L--VFFWLAIAL | 70 |
| | | L +FF L IAL | |
| Sbjct: | 61 | LAVLFFVLTIAL | 72 |

[13327] Based on this analysis, it was predicted that this GAS-specific protein and its epitopes, could be useful antigens for vaccines or diagnostics.

### EXAMPLE 2505

[13328] A DNA sequence (GASx505) was identified in S. pyogenes <SEQ ID 7509> which encodes the amino acid sequence <SEQ ID 7510>. Analysis of this protein sequence reveals the following:

| Possible site: 45 | | | | |
|---|---|---|---|---|
| >>> Seems to have no N-terminal signal sequence | | | | |
| | INTEGRAL | Likelihood = −1.44 | Transmembrane | 140-156 (138-156) |

```
----- Final Results -----
                              bacterial membrane --- Certainty = 0.1574(Affirmative) < succ>
                                bacterial outside --- Certainty = 0.0000(Not Clear) < succ>
                            bacterial cytoplasm --- Certainty = 0.0000(Not Clear) < succ>
```

[13329] No corresponding DNA sequence was identified in S. agalactiae.

[13330] The protein has homology with the following sequences in the GENPEPT database:

| >GP: AAF09704 GB: AE001874 glutamine cyclotransferase | | | |
|---|---|---|---|
| [Deinococcus radiodurans] | | | |
| Identities = 81/229 (35%), Positives = 128/229 (55%), Gaps = 10/229 (4%) | | | |
| Query: | 16 | YSYDSNLYTQGLEQLNNNHILLSAGRYGFSKVGVYDL--TQEIFSEKIAFP-DTVFAEGL | 72 |
| | | Y +D +TQGL+ L H L S G+ G S + V +L + ++S +A F EG | |
| Sbjct: | 54 | YPHDRAAFTQGLQYLGGGHYLESTGQVGESDLRVSELRGAKVLWSTPLAQALPQAFGEGS | 113 |
| Query: | 73 | TVVEDYFWLLTYKEGVAYKFDKATCNCLGAYPFEGDGWGLAYDKENQCLWMTSGNAFLQK | 132 |
| | | T + + LT+++GVA +D T G + ++G+GWGL D ++ L M++G + L | |
| Sbjct: | 114 | TQLGSTVYQLTWQDGVALTYDARTFKETGRHRYQGEGWGLTSDGKS--LIMSNGTSTLVW | 171 |
| Query: | 133 | RDPKDFALLDTVLVAIESVPISMLNELEYVDGYLYANIWQTNTIVKLQPDSGKVVATYDI | 192 |
| | | RDPK FA +V V + P+ LNELEYV G +YAN+W T+ I ++ P +GKV+ D+ | |
| Sbjct: | 172 | RDPKTFAAQRSVQVTDQGQPVRNLNELEYVQGSVYANVWLTDRIARIHPQTGKVLTWIDV | 231 |
| Query: | 193 | SPLLKALNLDKSHYPDL----NVLNGIAHLDQQ-RFLITGKLYPLMLEV | 236 |
| | | S L + ++ + +V NGIA + ++ L+TGK +P + EV | |
| Sbjct: | 232 | SDLTREVSAAATKQGQALTFDDVPNGIAFIPERGTLLLTGKRWPTLFEV | 280 |

[13331] Based on this analysis, it was predicted that this GAS-specific protein and its epitopes, could be useful antigens for vaccines or diagnostics.

### EXAMPLE 2506

[13332] A DNA sequence (GASx506R) was identified in S. pyogenes <SEQ ID 7511> which encodes the amino acid sequence <SEQ ID 7512>. Analysis of this protein sequence reveals the following:

```
Possible site: 33
>>> Seems to have no N-terminal signal sequence
----- Final Results -----
                            bacterial cytoplasm --- Certainty = 0.2800(Affirmative) < succ>
                              bacterial membrane --- Certainty = 0.0000(Not Clear) < succ>
                                bacterial outside --- Certainty = 0.0000(Not Clear) < succ>
```

[13333] No corresponding DNA sequence was identified in S. agalactiae.

[13334] Based on this analysis, it was predicted that this GAS-specific protein and its epitopes, could be useful antigens for vaccines or diagnostics.

### EXAMPLE 2507

[13335] A DNA sequence (GASx507R) was identified in S. pyogenes <SEQ ID 7513> which encodes the amino acid sequence <SEQ ID 7514>. Analysis of this protein sequence reveals the following:

| Possible site: 53 | | | | |
|---|---|---|---|---|
| >>> Seems to have a cleavable N-term signal seq. | | | | |
| | INTEGRAL | Likelihood = −10.51 | Transmembrane | 103-119 (97-124) |
| | INTEGRAL | Likelihood = −9.13 | Transmembrane | 126-142 (122-145) |
| | INTEGRAL | Likelihood = −8.65 | Transmembrane | 290-306 (286-307) |
| | INTEGRAL | Likelihood = −7.17 | Transmembrane | 200-216 (198-228) |
| | INTEGRAL | Likelihood = −7.06 | Transmembrane | 58-74 (54-82) |
| | INTEGRAL | Likelihood = −3.19 | Transmembrane | 223-239 (220-242) |
| | INTEGRAL | Likelihood = −2.81 | Transmembrane | 244-260 (244-261) |
| | INTEGRAL | Likelihood = −2.71 | Transmembrane | 174-190 (169-191) |

```
----- Final Results -----
                              bacterial membrane --- Certainty = 0.5203(Affirmative) < succ>
                                bacterial outside --- Certainty = 0.0000(Not Clear) < succ>
                            bacterial cytoplasm --- Certainty = 0.0000(Not Clear) < succ>
```

[13336] No corresponding DNA sequence was identified in S. agalactiae.

[13337] The protein has homology with the following sequences in the GENPEPT database:

| >GP: CAB56669 GB: AL121596 putative membrane protein [Streptomyces | | | |
|---|---|---|---|
| coelicolor A3(2)] | | | |
| Identities = 119/322 (36%), Positives = 182/322 (55%), Gaps = 24/322 (7%) | | | |
| Query: | 9 | LETIYILIGLQLFHTAYCTFKDKTNPVYFGTALFWGLLGVTFV------------GGAFL | 56 |
| | | +E +Y LIGL A D++NP + +A FWGLLG+TF GG L | |
| Sbjct: | 4 | VEWLYWLIGLVFVVMAVQMAMDRSNPKRWTSAAFWGLLGLTFPYGTGVANATAGNGGWTL | 63 |
| Query: | 57 | PNKVIGFIVIVLALLTLFKQVRIGTLPAFNEQKAEESAHRIGNWIFLPVMLMAMISLLLA | 116 |
| | | P + +G V+ L +L F + G ++ E +A R+GN IF+P + + +++++ A | |
| Sbjct: | 64 | PAEPLGVAVLALIVLAGFNFLGKGVPVTTTGEQREAAAARLGNKIFVPALTIPLVAIVCA | 123 |
| Query: | 117 | LILPDFSKSAIGIAGILA---------TIAILIITKQKPSALLAENNRMNQQVSTSGILP | 167 |
| | | +L + G A +L + +L+ ++K S + M + + ++ +LP | |
| Sbjct: | 124 | SVLDESGLFETGKATLLGLGLGCVAALVVGMLVTGEKKLSVPIHSGRSMLEAMGSALLLP | 183 |
| Query: | 168 | QLLGALGAIFAAAGVGDVIASLIREIVPADSRFFGVLAYVLGMVIFTMIMGNAFAAFTVI | 227 |
| | | QLL LG+IFAAAGVGD + ++ +++P DS++F VLAY +GM +FT+IMGNAFAAF V+ | |
| Sbjct: | 184 | QLLAVLGSIFAAAGVGDQVGDIMNKVLPDDSKYFAVLAYCVGMFLFTVIMGNAFAAFPVM | 243 |
| Query: | 228 | TTGIGVPFVFAL--GADPIIAGALAMTAGFCGTLLTPMAANFNALPVALMEIKDRNAVIK | 285 |
| | | T IG P + G +P + A+ M AGF GTL TPMAANFN +P L+E+KD+ IK | |
| Sbjct: | 244 | TAAIGWPVLIQQMHGNEPAVL-AIGMLAGFAGTLCTPMAANFNIVPATLLELKDQYGPIK | 302 |
| Query: | 286 | KQAPIALVLIISHIALMYLLAY | 307 |
| | | Q P + L+ +M L A+ | |
| Sbjct: | 303 | AQLPTGIALLGCCTVIMALFAF | 324 |

[13338] Based on this analysis, it was predicted that this GAS-specific protein and its epitopes, could be useful antigens for vaccines or diagnostics.

### EXAMPLE 2508

[13339] A DNA sequence (GASx508R) was identified in S. pyogenes <SEQ ID 7515> which encodes the amino acid sequence <SEQ ID 7516>. Analysis of this protein sequence reveals the following:

| Possible site: 61 | | | | |
|---|---|---|---|---|
| >>> Seems to have an uncleavable N-term signal seq | | | | |
| | INTEGRAL | Likelihood = −12.15 | Transmembrane | 212-228 (208-235) |
| | INTEGRAL | Likelihood = −8.81 | Transmembrane | 23-39 (17-64) |
| | INTEGRAL | Likelihood = −7.43 | Transmembrane | 45-61 (40-64) |
| | INTEGRAL | Likelihood = −1.49 | Transmembrane | 114-130 (114-130) |
| | INTEGRAL | Likelihood = −1.49 | Transmembrane | 3-19 (3-20) |
| | INTEGRAL | Likelihood = −1.49 | Transmembrane | 76-92 (76-92) |

```
----- Final Results -----
                              bacterial membrane --- Certainty = 0.5861(Affirmative) < succ>
                                bacterial outside --- Certainty = 0.0000(Not Clear) < succ>
                            bacterial cytoplasm --- Certainty = 0.0000(Not Clear) < succ>
```

[13340] No corresponding DNA sequence was identified in S. agalactiae.

| >GP: CAB56670 GB: AL121596 possible integral membrane protein | | | |
|---|---|---|---|
| [Streptomyces coelicolor A3(2)] | | | |
| Identities = 77/220 (35%), Positives = 138/220 (62%), Gaps = 2/220 (0%) | | | |
| Query: | 23 | IKLIGIVIIVLGFILKCDAIATVVVAGLVTALVSGISFIDFLDILGKEFTNQRLLTIFFI | 82 |
| | | I L+G+V+++LGF+ + + + V VAG+VT L+ ++ ++ L G+ F + R +T++ I | |
| Sbjct: | 2 | IVLLGVVVVILGFVTRRNPVLVVGVAGIVTGLLGKMNPLEVLAAFGRSFADSRSVTVYAI | 61 |
| Query: | 83 | TLPLIGLSETYGLKHRATQLIQRVQALTVGRLLTLYLIIRELAGLFSIR-LGGHPQFVRP | 141 |
| | | LP+IGL E YGL+ +A LI R+ L+ GR LT+YL++R++ F + +GG Q VRP | |
| Sbjct: | 62 | VLPVIGLLERYGLREQARHLIGRLGKLSAGRFLTVYLLVRQVTAAFGLNSIGGPAQTVRP | 121 |
| Query: | 142 | LIQPMGEAAAKANIGEELTDAEKDDIKAMAAANENFGNFFAQNTFVGAGGVLLIAGTLEQ | 201 |
| | | L+ PM EAAA+ + G +L D ++ +++ +A+ + G FF ++ F+ G +LLI G + | |
| Sbjct: | 122 | LVAPMAEAAAERSTGAKLPDKLREKVRSYSASADTVGVFFGEDCFIAIGSILLITGFVNS | 181 |
| Query: | 202 | LGY-DGNQAKIAFSSILIAIISIIIVAIYNYLFEKKMERQ | 240 |
| | | + D ++A +I +A+ + +I L +K++ER+ | |
| Sbjct: | 182 | TYHQDIEPTQLALWAIPLAVCAFLIHGARLLLMDKQLERE | 221 |

[13341] Based on this analysis, it was predicted that this GAS-specific protein and its epitopes, could be useful antigens for vaccines or diagnostics.

### EXAMPLE 2509

[13342] A DNA sequence (GASx520) was identified in S. pyogenes <SEQ ID 7517> which encodes the amino acid sequence <SEQ ID 7518>. Analysis of this protein sequence reveals the following:

```
Possible site: 13
>>> Seems to have no N-terminal signal sequence
----- Final Results -----
                            bacterial cytoplasm --- Certainty = 0.2652(Affirmative) < succ>
                              bacterial membrane --- Certainty = 0.0000(Not Clear) < succ>
                                bacterial outside --- Certainty = 0.0000(Not Clear) < succ>
```

[13343] No corresponding DNA sequence was identified in S. agalactiae.

[13344] The protein has no significant homology with any sequences in the GENPEPT database.

[13345] Based on this analysis, it was predicted that this GAS-specific protein and its epitopes, could be useful antigens for vaccines or diagnostics.

### EXAMPLE 2510

[13346] A DNA sequence (GASx522R) was identified in S. pyogenes <SEQ ID 7519> which encodes the amino acid sequence <SEQ ID 7520>. Analysis of this protein sequence reveals the following:

```
Possible site: 21
>>> Seems to have an uncleavable N-term signal seq
----- Final Results -----
                              bacterial membrane --- Certainty = 0.0000(Not Clear) < succ>
                                bacterial outside --- Certainty = 0.0000(Not Clear) < succ>
                            bacterial cytoplasm --- Certainty = 0.0000(Not Clear) < succ>
```

[13347] No corresponding DNA sequence was identified in S. agalactiae.

[13348] The protein has no significant homology with any sequences in the GENPEPT database.

[13349] Based on this analysis, it was predicted that this GAS-specific protein and its epitopes, could be useful antigens for vaccines or diagnostics.

### EXAMPLE 2511

[13350] A DNA sequence (GASx523) was identified in S. pyogenes <SEQ ID 7521> which encodes the amino acid sequence <SEQ ID 7522>. Analysis of this protein sequence reveals the following:

```
Possible site: 22
>>> Seems to have no N-terminal signal sequence
----- Final Results -----
                            bacterial cytoplasm --- Certainty = 0.2133(Affirmative) < succ>
                              bacterial membrane --- Certainty = 0.0000(Not Clear) < succ>
                                bacterial outside --- Certainty = 0.0000(Not Clear) < succ>
```

[13351] No corresponding DNA sequence was identified in S. agalactiae.

[13352] The protein has no significant homology with any sequences in the GENPEPT database.

[13353] Based on this analysis, it was predicted that this GAS-specific protein and its epitopes, could be useful antigens for vaccines or diagnostics.

### EXAMPLE 2512

[13354] A DNA sequence (GASx525) was identified in S. pyogenes <SEQ ID 7523> which encodes the amino acid sequence <SEQ ID 7524>. Analysis of this protein sequence reveals the following:

```
Possible site: 14
>>> Seems to have no N-terminal signal sequence
----- Final Results -----
                            bacterial cytoplasm --- Certainty = 0.2364(Affirmative) < succ>
                              bacterial membrane --- Certainty = 0.0000(Not Clear) < succ>
                                bacterial outside --- Certainty = 0.0000(Not Clear) < succ>
```

[13355] No corresponding DNA sequence was identified in S. agalactiae.

[13356] The protein has no significant homology with any sequences in the GENPEPT database.

[13357] Based on this analysis, it was predicted that this GAS-specific protein and its epitopes, could be useful antigens for vaccines or diagnostics.

### EXAMPLE 2513

[13358] A DNA sequence (GASx535) was identified in S. pyogenes <SEQ ID 7525> which encodes the amino acid sequence <SEQ ID 7526>. Analysis of this protein sequence reveals the following:

```
Possible site: 47
>>> Seems to have no N-terminal signal sequence
----- Final Results -----
                            bacterial cytoplasm --- Certainty = 0.4223(Affirmative) < succ>
                              bacterial membrane --- Certainty = 0.0000(Not Clear) < succ>
                                bacterial outside --- Certainty = 0.0000(Not Clear) < succ>
```

[13359] No corresponding DNA sequence was identified in S. agalactiae.

[13360] The protein has no significant homology with any sequences in the GENPEPT database.

[13361] Based on this analysis, it was predicted that this GAS-specific protein and its epitopes, could be useful antigens for vaccines or diagnostics.

### EXAMPLE 2514

[13362] A DNA sequence (GASx536) was identified in S. pyogenes <SEQ ID 7527> which encodes the amino acid sequence <SEQ ID 7528>. Analysis of this protein sequence reveals the following:

```
Possible site: 59
>>> Seems to have no N-terminal signal sequence
----- Final Results -----
                            bacterial cytoplasm --- Certainty = 0.1102(Affirmative) < succ>
                              bacterial membrane --- Certainty = 0.0000(Not Clear) < succ>
                                bacterial outside --- Certainty = 0.0000(Not Clear) < succ>
```

[13363] No corresponding DNA sequence was identified in S. agalactiae.

[13364] The protein has homology with the following sequences in the GENPEPT database:

| >GP: AAB85515 GB: AE000874 conserved protein [Methanobacterium | | | |
|---|---|---|---|
| thermoautotrophicum] | | | |
| Identities = 82/236 (34%), Positives = 132/236 (55%), Gaps = 11/236 (4%) | | | |
| Query: | 9 | MNLSIFGLKNIPYLKEGDSIEKLIEESIKTSEFFIEDNDVLCIASKVVSIAEGQVMSLNE | 68 |
| | | M +S+ G++ +P + GD I LI ++ + D D++ IA +VS AEG ++SL E | |
| Sbjct: | 1 | MGISLIGVEGMPLVGAGDDIAYLIISALNEGGEDLLDGDIIVIAETIVSKAEGNIISLEE | 60 |
| Query: | 69 | IQVSDVAKEIHRNIPRKDPRIIEIMLNLVNRDLSRLDIKKNYIGCRLENGLKLTSGGIDR | 128 |
| | | I+ S A +I KDP ++E +L + + ++I +G + GID | |
| Sbjct: | 61 | IKPSPEALDIAERTG-KDPSLVEAILG---ESSEIIRVGHDFIVSETRHGFVCANAGIDE | 116 |
| Query: | 129 | KSVDEVFL--LPNNPDASAKRISEYLKKSLGKNVAVVITDSDGREDKRGATQVAIGIYGI | 186 |
| | | +VD+ LP +PD SA++I L+++ G+ +AV+I+D+ GR + GA VA+G+ G+ | |
| Sbjct: | 117 | SNVDDGLATPLPRDPDGSAEKILRTLQEATGRELAVIISDTQGRPFREGAVGVAVGVAGL | 176 |
| Query: | 187 | HPL--RKTEVIDSQGETIKFQEETLCDMIAACAGLVMGQRGTGIPAVLIRGLDYKW | 240 |
| | | P+ RK E D G +++ + D +AA A LVMGQ G+PAV+IRG Y W | |
| Sbjct: | 177 | SPIWDRKGE-RDLYGRSLETTRVAVADELAAAASLVMGQADEGVPAVIIRG--YPW | 229 |

[13365] Based on this analysis, it was predicted that this GAS-specific protein and its epitopes, could be useful antigens for vaccines or diagnostics.

### EXAMPLE 2515

[13366] A DNA sequence (GASx537) was identified in S. pyogenes <SEQ ID 7529> which encodes the amino acid sequence <SEQ ID 7530>. Analysis of this protein sequence reveals the following:

| Possible site: 50 | | | | |
|---|---|---|---|---|
| >>> Seems to have no N-terminal signal sequence | | | | |
| | INTEGRAL | Likelihood = −1.12 | Transmembrane | 174-190 (174-190) |

```
----- Final Results -----
                              bacterial membrane --- Certainty = 0.1447(Affirmative) < succ>
                                bacterial outside --- Certainty = 0.0000(Not Clear) < succ>
                            bacterial cytoplasm --- Certainty = 0.0000(Not Clear) < succ>
```

[13367] No corresponding DNA sequence was identified in S. agalactiae.

[13368] The protein has no significant homology with any sequences in the GENPEPT database.

[13369] Based on this analysis, it was predicted that this GAS-specific protein and its epitopes, could be useful antigens for vaccines or diagnostics.

### EXAMPLE 2516

[13370] A DNA sequence (GASx538) was identified in S. pyogenes <SEQ ID 7531> which encodes the amino acid sequence <SEQ ID 7532>. Analysis of this protein sequence reveals the following:

```
Possible site: 32
>>> Seems to have no N-terminal signal sequence
----- Final Results -----
                            bacterial cytoplasm --- Certainty = 0.3852(Affirmative) < succ>
                              bacterial membrane --- Certainty = 0.0000(Not Clear) < succ>
                                bacterial outside --- Certainty = 0.0000(Not Clear) < succ>
```

[13371] No corresponding DNA sequence was identified in S. agalactiae.

[13372] The protein has homology with the following sequences in the GENPEPT database:

| >GP: AAB99212 GB: U67562 conserved hypothetical protein [Methanococcus | | | |
|---|---|---|---|
| jannaschii] | | | |
| Identities = 129/387 (33%), Positives = 208/387 (53%), | | | |
| Gaps = 44/387 (11%) | | | |
| Query: | 18 | EVVERKGLGHPDTLADGIAEQIEIDYSLYCLDKFGVIPHHNFDKIIIRGGHSVQDFGGSD | 77 |
| | | E+VERKGLGHPD++ DGIAE + ++KFG I HHN D++ + GGH+ FGG | |
| Sbjct: | 20 | EIVERKGLGHPDSICDGIAESVSRALCKMYMEKFGTILHHNTDQVELVGGHAYPKFGGGV | 79 |
| Query: | 78 | FIEPIKIIFLGRASKKCFNS------SIPLFKIQKKAATKYLNRILPNLDVENYVEFETL | 131 |
| | | + PI I+ GRA+ + + +P+ KAA +YL ++L N+DV+ V + | |
| Sbjct: | 80 | MVSPIYILLSGRATMEILDKEKNEVIKLPVGTTAVKAAKEYLKKVLRNVDVDKDVIID-- | 137 |
| Query: | 132 | TSDFTTKTNWFSPEAIEDLP-EYLDVPKANDTATMISYWPLTISEELALMIEGYFYKLD- | 189 |
| | | + S + ++ + +VP ANDT+ + Y PL+ +E L L E + + | |
| Sbjct: | 138 | -----CRIGQGSMDLVDVFERQKNEVPLANDTSFGVGYAPLSTTERLVLETERFLNSDEL | 192 |
| Query: | 190 | KNELPTPRFTKMGGDIKVMVVRNDLEYSIRINFPLISKFFNNDIESQLYVDKHVEKIKKY | 249 |
| | | KNE+P +G DIKVM +R + ++ I ++ ++ N IE V +EK++K | |
| Sbjct: | 193 | KNEIPA-----VGEDIKVMGLREGKKITLTIAMAVVDRYVKN-IEEYKEV---IEKVRKK | 243 |
| Query: | 250 | IEQKYKNIS--FSIDYH-----------YYLTTTGSCIDFGEEGAVGRGNKTHGIISSFR | 296 |
| | | +E K I+ + ++ H YLT TG+ + G++G+VGRGN+ +G+I+ FR | |
| Sbjct: | 244 | VEDLAKKIADGYEVEIHINTADDYERESVYLTVTGTSAEMGDDGSVGRGNRVNGLITPFR | 303 |
| Query: | 297 | PNTMEAPAGKNCTYFVGKVWGFLSDTIAKEIYEAFNT-PCQIIMQLNIGSKLYRPTHLFI | 355 |
| | | P +MEA +GKN VGK++ L++ IA +I + C + + IG + P L I | |
| Sbjct: | 304 | PMSMEAASGKNPVNHVGKIYNILANLIANDIAKLEGVKECYVRILSQIGKPINEPKALDI | 363 |
| Query: | 356 | Q--TEESVD----QERVLEIVNRHLNN | 376 |
| | | + TE+S D + + EI N+ L+N | |
| Sbjct: | 364 | EIITEDSYDIKDIEPKAKEIANKWLDN | 390 |

[13373] Based on this analysis, it was predicted that this GAS-specific protein and its epitopes, could be useful antigens for vaccines or diagnostics.

### EXAMPLE 2517

[13374] A DNA sequence (GASx539) was identified in S. pyogenes <SEQ ID 7533> which encodes the amino acid sequence <SEQ ID 7534>. Analysis of this protein sequence reveals the following:

```
Possible site: 17
>>> Seems to have no N-terminal signal sequence
----- Final Results -----
                            bacterial cytoplasm --- Certainty = 0.1436(Affirmative) < succ>
                              bacterial membrane --- Certainty = 0.0000(Not Clear) < succ>
                                bacterial outside --- Certainty = 0.0000(Not Clear) < succ>
```

[13375] No corresponding DNA sequence was identified in S. agalactiae.

[13376] The protein has no significant homology with any sequences in the GENPEPT database.

[13377] Based on this analysis, it was predicted that this GAS-specific protein and its epitopes, could be useful antigens for vaccines or diagnostics.

### EXAMPLE 2518

[13378] A DNA sequence (GASx540) was identified in S. pyogenes <SEQ ID 7535> which encodes the amino acid sequence <SEQ ID 7536>. Analysis of this protein sequence reveals the following:

```
Possible site: 45
>>> Seems to have no N-terminal signal sequence
----- Final Results -----
                            bacterial cytoplasm --- Certainty = 0.3956(Affirmative) < succ>
                              bacterial membrane --- Certainty = 0.0000(Not Clear) < succ>
                                bacterial outside --- Certainty = 0.0000(Not Clear) < succ>
```

[13379] No corresponding DNA sequence was identified in S. agalactiae.

[13380] The protein has homology with the following sequences in the GENPEPT database:

| >GP: AAD36304 GB: AE001779 conserved hypothetical protein | | | |
|---|---|---|---|
| [Thermotoga maritima] | | | |
| Identities = 105/353 (29%), Positives = 173/353 (48%), | | | |
| Gaps = 46/353 (13%) | | | |
| Query: | 3 | VIGIPTLNEADNISRLVKQIDEYAVNL-GKEIIIINSDSKSTDGTPQIFLETKTYNT-KV | 60 |
| | | V+GIP+ N A+ IS + + + V+ + +I+NSD S DGT + F+ET T+ K | |
| Sbjct: | 106 | VVGIPSYNNAETISHVARTAAQGIVDFFDGDGMIVNSDGGSADGTRERFMETDTFGLPKE | 165 |
| Query: | 61 | SIVSEA-KGKGYNVRNIFEYAINHVPNFSGLILIDGDVVSMKKMWLEKMFIAIESGN-DL | 118 |
| | | S V E GKG +R I E+A+ + ++ +D D+ S+K W+E++ + G D | |
| Sbjct: | 166 | SFVYEGLPGKGSAMRAIMEFALKQ--DAEAVVFLDADLRSVKPWWVERLAGPVLKGEADY | 223 |
| Query: | 119 | IIPNYARKSFEGNATNHFIYPMLVKIFKRDMPYQCISGDFGFSRGLIKDLTLKCN--WHK | 176 |
| | | + P Y R F+G TN+ +PM ++ + + Q I GDFG R L++ K W+ | |
| Sbjct: | 224 | VTPFYLRHRFDGTITNNVCFPMTAVLYGKKVR-QPIGGDFGVGRKLLEIYLGKPKEIWNT | 282 |
| Query: | 177 | YTLGYGIDIFLTLTAILKSYKIKEIDLQSKIH--KKSFEKIEKIFLEVSQSFFETINDNS | 234 |
| | | +GIDI++T TAI +S ++ + L +K+H K + ++ +FL+V + FE + | |
| Sbjct: | 283 | DVARFGIDIWMTTTAINESGRVVQAALGTKVHDVKDPGKHLKGMFLQVVGTLFELV---- | 338 |
| Query: | 235 | LNQDKLRLNINFESHSRQFIKSSDI------------LSSNDIENLKLRALFLLQEEKQY | 282 |
| | | I +E+ ++ K D+ S DI NLK A L+E + | |
| Sbjct: | 339 | ---------ITYENVWKEIWKIEDVPIYGETPQEEVPSMSIDIGNLKKLARETLEEVEYI | 389 |
| Query: | 283 | LHG-LSEVEWDGI--LSNTINNIYRYSSEEHSL-------YLLPLYLLRVYNY | 325 |
| | | G LSEV+ G LS+ ++ +YR + + LLP Y R + | |
| Sbjct: | 390 | DRGILSEVKESGTLSLSSWVDTLYRSAVQYRKTRDKKVVENLLPFYFARTARF | 442 |

[13381] Based on this analysis, it was predicted that this GAS-specific protein and its epitopes, could be useful antigens for vaccines or diagnostics.

### EXAMPLE 2519

[13382] A DNA sequence (GASx542) was identified in S. pyogenes <SEQ ID 7537> which encodes the amino acid sequence <SEQ ID 7538>. Analysis of this protein sequence reveals the following:

| Possible site: 20 | | | | |
|---|---|---|---|---|
| >>> Seems to have an uncleavable N-term signal seq | | | | |
| | INTEGRAL | Likelihood = −5.31 | Transmembrane | 3-19 (1-21) |

```
----- Final Results -----
                              bacterial membrane --- Certainty = 0.3123(Affirmative) < succ>
                                bacterial outside --- Certainty = 0.0000(Not Clear) < succ>
                            bacterial cytoplasm --- Certainty = 0.0000(Not Clear) < succ>
```

[13383] No corresponding DNA sequence was identified in S. agalactiae.

| >GP: BAB07427 GB: AP001519 nucleotide sugar dehydrogenase | | | |
|---|---|---|---|
| [Bacillus halodurans] | | | |
| Identities = 184/388 (47%), Positives = 274/388 (70%), Gaps = 3/388 (0%) | | | |
| Query: | 1 | MKITVVGIGYVGLSIGLLLAKEHDVTFFDIDNKKIDLINKRQSPLKEAAINKLLC-KAKN | 59 |
| | | M IT+ G GYVGLS +LLA+ +DV +DI +K+D+IN R+SP+ + I + L K N | |
| Sbjct: | 1 | MNITIAGTGYVGLSNAVLLAQHNDVIAYDIVQEKVDMINNRKSPIVDREIEEFLATKELN | 60 |
| Query: | 60 | INATSSEELAYKDATFIILSLPTNL--KFNKLDTSIIEISVSNILKINKKATIVIKSTVP | 117 |
| | | + AT+ +E A+KDA F+++S PTN + N DTS +E +S++L IN A +VIKST+P | |
| Sbjct: | 61 | LTATTDKEKAFKDAQFVVISTPTNYDPEKNYFDTSSVEAVISDVLSINPNAVMVIKSTIP | 120 |
| Query: | 118 | IGFTEYLRNRFHYNDIIFSPEFLREGSTIHDQLYPSRTIVGNESRNSQLFLDILTDISVE | 177 |
| | | +G+T + RF+ +IIFSPEFLREGS ++D L+PSR +VG ++ +++F +L +++ | |
| Sbjct: | 121 | VGYTREVNERFNTKNIIFSPEFLREGSALYDNLHPSRIVVGERTQRAKIFAALLVQGAIK | 180 |
| Query: | 178 | KDSPSLLVGSSEAEAIKLFSNAYLAQKIAFFNELDTFAEMQNLDSKKIIEAMGYDQRIGN | 237 |
| | | ++ L S+EAEAIKLF+N YLA ++AFFNELD++AE++ LD+K+II+ +G D RIG | |
| Sbjct: | 181 | ENIDVLFTDSTEAEAIKLFANTYLAMRVAFFNELDSYAELKGLDAKQIIDGVGLDPRIGT | 240 |
| Query: | 238 | SHNNPSFGFGGYCLPKDIKQLEYHFKEIPAPIITSISESNLLRKIHIAKMILNSSAKTIG | 297 |
| | | +NNPSFG+GGYCLPKD KQL +F+++P II +I ++N RK H+A MIL K +G | |
| Sbjct: | 241 | HYNNPSFGYGGYCLPKDTKQLLANFEDVPNNIIGAIVDANDTRKDHVANMILKREPKVVG | 300 |
| Query: | 298 | IYRINSKKDSDNCRESSTIDVAKLLKSSGKDVIIFEPLINQKKFLGCPLSNDFNEFIKYS | 357 |
| | | IYR+ K SDN R+S+ +DV L ++G +V+++EP ++ +F G + DF EF K S | |
| Sbjct: | 301 | IYRLTMKTGSDNFRQSAILDVMTRLNNAGAEVVVYEPALDATEFDGSKVIEDFAEFKKMS | 360 |
| Query: | 358 | DIIVANRIDDALRKCNSKVFTRDIFQYD | 385 |
| | | D+IVANR+ D L++ KV+TRD++ D | |
| Sbjct: | 361 | DVIVANRLSDDLKEVAEKVYTRDLYTRD | 388 |

[13384] Based on this analysis, it was predicted that this GAS-specific protein and its epitopes, could be useful antigens for vaccines or diagnostics.

### EXAMPLE 2520

[13385] A DNA sequence (GASx544R) was identified in S. pyogenes <SEQ ID 7539> which encodes the amino acid sequence <SEQ ID 7540>. Analysis of this protein sequence reveals the following:

| Possible site: 34 | | | | |
|---|---|---|---|---|
| >>> Seems to have no N-terminal signal sequence | | | | |
| | INTEGRAL | Likelihood = −0.06 | Transmembrane | 46-62 (46-62) |

```
----- Final Results -----
                              bacterial membrane --- Certainty = 0.1022(Affirmative) < succ>
                                bacterial outside --- Certainty = 0.0000(Not Clear) < succ>
                            bacterial cytoplasm --- Certainty = 0.0000(Not Clear) < succ>
```

[13386] No corresponding DNA sequence was identified in S. agalactiae.

[13387] The protein has no significant homology with any sequences in the GENPEPT database.

[13388] Based on this analysis, it was predicted that this GAS-specific protein and its epitopes, could be useful antigens for vaccines or diagnostics.

### EXAMPLE 2521

[13389] A DNA sequence (GASx545R) was identified in S. pyogenes <SEQ ID 7541> which encodes the amino acid sequence <SEQ ID 7542>. Analysis of this protein sequence reveals the following:

| Possible site: 58 | | | | |
|---|---|---|---|---|
| >>> Seems to have no N-terminal signal sequence | | | | |
| | INTEGRAL | Likelihood = −1.49 | Transmembrane | 186-202 (186-203) |

```
----- Final Results -----
                              bacterial membrane --- Certainty = 0.1595(Affirmative) < succ>
                                bacterial outside --- Certainty = 0.0000(Not Clear) < succ>
                            bacterial cytoplasm --- Certainty = 0.0000(Not Clear) < succ>
```

[13390] No corresponding DNA sequence was identified in S. agalactiae.

[13391] The protein has no significant homology with any sequences in the GENPEPT database.

[13392] Based on this analysis, it was predicted that this GAS-specific protein and its epitopes, could be useful antigens for vaccines or diagnostics.

### EXAMPLE 2522

[13393] A DNA sequence (GASx546R) was identified in S. pyogenes <SEQ ID 7543> which encodes the amino acid sequence <SEQ ID 7544>. Analysis of this protein sequence reveals the following:

```
Possible site: 47
>>> Seems to have no N-terminal signal sequence
----- Final Results -----
                            bacterial cytoplasm --- Certainty = 0.2422(Affirmative) < succ>
                              bacterial membrane --- Certainty = 0.0000(Not Clear) < succ>
                                bacterial outside --- Certainty = 0.0000(Not Clear) < succ>
```

[13394] No corresponding DNA sequence was identified in S. agalactiae.

[13395] The protein has no significant homology with any sequences in the GENPEPT database.

[13396] Based on this analysis, it was predicted that this GAS-specific protein and its epitopes, could be useful antigens for vaccines or diagnostics.

### EXAMPLE 2523

[13397] A DNA sequence (GASx547R) was identified in S. pyogenes <SEQ ID 7545> which encodes the amino acid sequence <SEQ ID 7546>. Analysis of this protein sequence reveals the following:

```
Possible site: 60
>>> Seems to have no N-terminal signal sequence
----- Final Results -----
                            bacterial cytoplasm --- Certainty = 0.1612(Affirmative) < succ>
                              bacterial membrane --- Certainty = 0.0000(Not Clear) < succ>
                                bacterial outside --- Certainty = 0.0000(Not Clear) < succ>
```

[13398] No corresponding DNA sequence was identified in S. agalactiae.

[13399] The protein has no significant homology with any sequences in the GENPEPT database.

[13400] Based on this analysis, it was predicted that this GAS-specific protein and its epitopes, could be useful antigens for vaccines or diagnostics.

### EXAMPLE 2524

[13401] A DNA sequence (GASx548) was identified in S. pyogenes <SEQ ID 7547> which encodes the amino acid sequence <SEQ ID 7548>. Analysis of this protein sequence reveals the following:

```
Possible site: 44
>>> Seems to have no N-terminal signal sequence
----- Final Results -----
                            bacterial cytoplasm --- Certainty = 0.5156(Affirmative) < succ>
                              bacterial membrane --- Certainty = 0.0000(Not Clear) < succ>
                                bacterial outside --- Certainty = 0.0000(Not Clear) < succ>
```

[13402] No corresponding DNA sequence was identified in S. agalactiae.

[13403] The protein has no significant homology with any sequences in the GENPEPT database.

[13404] Based on this analysis, it was predicted that this GAS-specific protein and its epitopes, could be useful antigens for vaccines or diagnostics.

### EXAMPLE 2525

[13405] A DNA sequence (GASx549R) was identified in S. pyogenes <SEQ ID 7549> which encodes the amino acid sequence <SEQ ID 7550>. Analysis of this protein sequence reveals the following:

```
Possible site: 21
>>> Seems to have a cleavable N-term signal seq.
----- Final Results -----
                                bacterial outside --- Certainty = 0.3000(Affirmative) < succ>
                              bacterial membrane --- Certainty = 0.0000(Not Clear) < succ>
                            bacterial cytoplasm --- Certainty = 0.0000(Not Clear) < succ>
```

[13406] No corresponding DNA sequence was identified in S. agalactiae.

[13407] The protein has no significant homology with any sequences in the GENPEPT database.

[13408] Based on this analysis, it was predicted that this GAS-specific protein and its epitopes, could be useful antigens for vaccines or diagnostics.

### EXAMPLE 2526

[13409] A DNA sequence (GASx552) was identified in S. pyogenes <SEQ ID 7551> which encodes the amino acid sequence <SEQ ID 7552>. Analysis of this protein sequence reveals the following:

| Possible site: 15 | | | | |
|---|---|---|---|---|
| >>> Seems to have no N-terminal signal sequence | | | | |
| | INTEGRAL | Likelihood = −0.59 | Transmembrane | 83-99 (83-99) |

```
----- Final Results -----
                              bacterial membrane --- Certainty = 0.1235(Affirmative) < succ>
                                bacterial outside --- Certainty = 0.0000(Not Clear) < succ>
                            bacterial cytoplasm --- Certainty = 0.0000(Not Clear) < succ>
```

[13410] No corresponding DNA sequence was identified in S. agalactiae.

[13411] The protein has no significant homology with any sequences in the GENPEPT database.

[13412] Based on this analysis, it was predicted that this GAS-specific protein and its epitopes, could be useful antigens for vaccines or diagnostics.

### EXAMPLE 2527

[13413] A DNA sequence (GASx553) was identified in S. pyogenes <SEQ ID 7553> which encodes the amino acid sequence <SEQ ID 7554>. Analysis of this protein sequence reveals the following:

```
Possible site: 49
>>> Seems to have no N-terminal signal sequence
----- Final Results -----
                            bacterial cytoplasm --- Certainty = 0.2781(Affirmative) < succ>
                              bacterial membrane --- Certainty = 0.0000(Not Clear) < succ>
                                bacterial outside --- Certainty = 0.0000(Not Clear) < succ>
```

[13414] No corresponding DNA sequence was identified in S. agalactiae.

[13415] The protein has no significant homology with any sequences in the GENPEPT database.

[13416] Based on this analysis, it was predicted that this GAS-specific protein and its epitopes, could be useful antigens for vaccines or diagnostics.

### EXAMPLE 2528

[13417] A DNA sequence (GASx554) was identified in S. pyogenes <SEQ ID 7555> which encodes the amino acid sequence <SEQ ID 7556>. Analysis of this protein sequence reveals the following:

```
Possible site: 18
>>> Seems to have no N-terminal signal sequence
----- Final Results -----
                            bacterial cytoplasm --- Certainty = 0.2792(Affirmative) < succ>
                              bacterial membrane --- Certainty = 0.0000(Not Clear) < succ>
                                bacterial outside --- Certainty = 0.0000(Not Clear) < succ>
```

[13418] No corresponding DNA sequence was identified in S. agalactiae.

[13419] The protein has no significant homology with any sequences in the GENPEPT database.

[13420] Based on this analysis, it was predicted that this GAS-specific protein and its epitopes, could be useful antigens for vaccines or diagnostics.

### EXAMPLE 2529

[13421] A DNA sequence (GASx555) was identified in S. pyogenes <SEQ ID 7557> which encodes the amino acid sequence <SEQ ID 7558>. Analysis of this protein sequence reveals the following:

| Possible site: 35 | | | | |
|---|---|---|---|---|
| >>> Seems to have no N-terminal signal sequence | | | | |
| | INTEGRAL | Likelihood = −0.00 | Transmembrane | 49-65 (49-65) |

```
----- Final Results -----
                              bacterial membrane --- Certainty = 0.1001(Affirmative) < succ>
                                bacterial outside --- Certainty = 0.0000(Not Clear) < succ>
                            bacterial cytoplasm --- Certainty = 0.0000(Not Clear) < succ>
```

[13422] No corresponding DNA sequence was identified in S. agalactiae.

[13423] The protein has homology with the following sequences in the GENPEPT database:

| >GP: BAA36631 GB: AB016282 ORF25 [bacteriophage phi-105] | | | |
|---|---|---|---|
| Identities = 43/118 (36%), Positives = 69/118 (58%), | | | |
| Gaps = 2/118 (1%) | | | |
| Query: | 3 | LLDLIGRKRARDKPQNSYEGQDFSYLFG--RTTSGENVDEFKTMQTTAVYACVRVLAEAV | 60 |
| | | LL+ + KR+ +FG +T SGE V E ++ ++ACV VL++ + | |
| Sbjct: | 2 | LLERMFEKRSGSSDHEDGFNNILLNMFGGRKTASGERVSESNSLVQPDIFACVNVLSDDI | 61 |
| Query: | 61 | ASLPIHIYERTENGKEKKLDHPLYFLLHDEPNPEMSSFIFRETIMSHLLIWGNAYVQI | 118 |
| | | A LPIH Y+RT+ G E+K +H ++ PNP M++F +++ +M+H+L WGNAY I | |
| Sbjct: | 62 | AKLPIHTYKRTDGGIERKPEHKSAHAVYARPNPYMTAFTWKKLMMTHVLTWGNAYSYI | 119 |

[13424] Based on this analysis, it was predicted that this GAS-specific protein and its epitopes, could be useful antigens for vaccines or diagnostics.

### EXAMPLE 2530

[13425] A DNA sequence (GASx556) was identified in S. pyogenes <SEQ ID 7559> which encodes the amino acid sequence <SEQ ID 7560>. Analysis of this protein sequence reveals the following:

```
Possible site: 43
>>> Seems to have no N-terminal signal sequence
----- Final Results -----
                            bacterial Cytoplasm --- Certainty = 0.2055(Affirmative) < succ>
                              bacterial membrane --- Certainty = 0.0000(Not Clear) < succ>
                                bacterial outside --- Certainty = 0.0000(Not Clear) < succ>
```

[13426] No corresponding DNA sequence was identified in S. agalactiae.

[13427] The protein has no significant homology with any sequences in the GENPEPT database.

[13428] Based on this analysis, it was predicted that this GAS-specific protein and its epitopes, could be useful antigens for vaccines or diagnostics.

### EXAMPLE 2531

[13429] A DNA sequence (GASx557) was identified in S. pyogenes <SEQ ID 7561> which encodes the amino acid sequence <SEQ ID 7562>. Analysis of this protein sequence reveals the following:

```
Possible site: 50
>>> Seems to have no N-terminal signal sequence
----- Final Results -----
                            bacterial cytoplasm --- Certainty = 0.1696(Affirmative) < succ>
                              bacterial membrane --- Certainty = 0.0000(Not Clear) < succ>
                                bacterial outside --- Certainty = 0.0000(Not Clear) < succ>
```

[13430] No corresponding DNA sequence was identified in S. agalactiae.

[13431] The protein has no significant homology with any sequences in the GENPEPT database.

[13432] Based on this analysis, it was predicted that this GAS-specific protein and its epitopes, could be useful antigens for vaccines or diagnostics.

### EXAMPLE 2532

[13433] A DNA sequence (GASx559) was identified in S. pyogenes <SEQ ID 7563> which encodes the amino acid sequence <SEQ ID 7564>. Analysis of this protein sequence reveals the following:

```
Possible site: 51
>>> Seems to have no N-terminal signal sequence
----- Final Results -----
                            bacterial cytoplasm --- Certainty = 0.1556(Affirmative) < succ>
                              bacterial membrane --- Certainty = 0.0000(Not Clear) < succ>
                                bacterial outside --- Certainty = 0.0000(Not Clear) < succ>
```

[13434] No corresponding DNA sequence was identified in S. agalactiae.

[13435] The protein has homology with the following sequences in the GENPEPT database:

| >GP: CAB15798 GB: Z99123 alternate gene name: ipa-83d [Bacillus subtilis] | | | |
|---|---|---|---|
| Identities = 70/263 (26%), Positives = 121/263 (45%), Gaps = 25/263 (9%) | | | |
| Query: | 68 | KTIEQIKELK--YSIDAVACWDEALTHIADDISKELGLNPISSLDSQSFRFKDRMRMVCE | 125 |
| | | + +EQI ++ + DA+ +E + LGL +++ R K++MR | |
| Sbjct: | 87 | EVVEQIVKVAEMFGADAITTNNELFIAPMAKACERLGLRGAGVQAAENARDKNKMRDAFN | 146 |
| Query: | 126 | AGGLKMPKYKIINQFSDTNKIINW-KYPLIVKPTSFLASIGVKKVYNFSELQQAVSQMLN | 184 |
| | | G+K K K + D + PLI+KPT +SIGV + + + +++ + | |
| Sbjct: | 147 | KAGVKSIKNKRVTTLEDFRAALEEIGTPLILKPTYLASSIGVTLITDTETAEDEFNRVND | 206 |
| Query: | 185 | VKFPVYIASGVYELGELYNLEPRVLVEEFIDGE-----------EY-SLESVVRNGIYTP | 232 |
| | | + + V E + EEF+ GE +Y S+E ++ +G Y P | |
| Sbjct: | 207 | YLKSINVPKAV-------TFEAPFIAEEFLQGEYGDWYQTEGYSDYISIEGIMADGEYFP | 259 |
| Query: | 233 | LGITKKIVDEKLFMDEIGHIFPSNLNKEEKSRVYSWAEKLHQILQLNHITTHTEFRIGRN | 292 |
| | | + I K ++ E HI PS L++E K ++ A+K ++ L L + THTE ++ +N | |
| Sbjct: | 260 | IAIHDKT--PQIGFTETSHITPSILDEEAKKKIVEAAKKANEGLGLQNCATHTEIKLMKN | 317 |
| Query: | 293 | GDIILIEIGARIGG-DCIPNLMK | 314 |
| | | + LIE AR G + IPN+ K | |
| Sbjct: | 318 | REPGLIESAARFAGWNMIPNIKK | 340 |

[13436] Based on this analysis, it was predicted that this GAS-specific protein and its epitopes, could be useful antigens for vaccines or diagnostics.

### EXAMPLE 2533

[13437] A DNA sequence (GASx561) was identified in S. pyogenes <SEQ ID 7565> which encodes the amino acid sequence <SEQ ID 7566>. Analysis of this protein sequence reveals the following:

```
Possible site: 55
>>> Seems to have no N-terminal signal sequence
----- Final Results -----
                            bacterial cytoplasm --- Certainty = 0.2602(Affirmative) < succ>
                              bacterial membrane --- Certainty = 0.0000(Not Clear) < succ>
                                bacterial outside --- Certainty = 0.0000(Not Clear) < succ>
```

[13438] No corresponding DNA sequence was identified in S. agalactiae.

[13439] The protein has no significant homology with any sequences in the GENPEPT database.

[13440] Based on this analysis, it was predicted that this GAS-specific protein and its epitopes, could be useful antigens for vaccines or diagnostics.

### EXAMPLE 2534

[13441] A DNA sequence (GASx562) was identified in S. pyogenes <SEQ ID 7567> which encodes the amino acid sequence <SEQ ID 7568>. Analysis of this protein sequence reveals the following:

```
Possible site: 34
>>> Seems to have no N-terminal signal sequence
----- Final Results -----
                              bacterial membrane --- Certainty = 0.0000(Not Clear) < succ>
                                bacterial outside --- Certainty = 0.0000(Not Clear) < succ>
                            bacterial cytoplasm --- Certainty = 0.0000(Not Clear) < succ>
```

[13442] No corresponding DNA sequence was identified in S. agalactiae.

[13443] The protein has homology with the following sequences in the GENPEPT database:

| >GP: AAD06696 GB: AE001539 HISTIDYL-TRNA SYNTHETASE [Helicobacter | | | |
|---|---|---|---|
| pylori J99] | | | |
| Identities = 75/309 (24%), Positives = 129/309 (41%), Gaps = 35/309 (11%) | | | |
| Query: | 11 | KGYRRQFNQILLGAWGIESAYVDAEIIVATWRGLQRFKGIKVE--FIQLSNKNIFDVLEK | 68 |
| | | KG R+F Q G ES DAEII L K + +E + ++++ I + + + | |
| Sbjct: | 115 | KGRYREFTQCDFDFIGSESLVCDAEIIQVIIASL---KALDLEDFCVSINHRKILNGICE | 171 |
| Query: | 69 | DLSKKLRFEDISIEAILGKYLCNNDIEIIKCLYEKDKINMELLISLISKISNKLVKQEFI | 128 |
| | | E + I L K N E +K + D ++ L+ ++ N L EF | |
| Sbjct: | 172 | YFGIAQVNEVLRIVDKLEKIGLNGVEEELKKECDLDSNTIKDLLEMVQIKQNDLSHAEFF | 231 |
| Query: | 129 | -KVLVLYEYVKNFLP----VDCIYFSLS------NLY--------GTGHYSSMNYKIFIR | 169 |
| | | K+ L +Y +N ++ +Y L NLY G G+Y+ + Y+ + | |
| Sbjct: | 232 | EKIAYLKDYNENLKKGIQDLERLYQLLGDLQISQNLYKIDFSIARGLGYYTGIVYETTLN | 291 |
| Query: | 170 | TKSGDIFDIADGGRIDDMVSKFNKVNVLGVCMGIGTTVLSQEI-------EYEIEDRIMI | 222 |
| | | + + GGR D + F+K N+ GV IG L + E + +++I | |
| Sbjct: | 292 | DMKS-LGSVCSGGRYDHLTKNFSKENLQGVGASIGIDRLIVALSEMQLLDERSTQAKVLI | 350 |
| Query: | 223 | LVEKIDVKIYKNCLELANKLSGYHCSVFEFPYKKIKKFFKHELYSRHHYIIVRLDGSMEY | 282 |
| | | + Y N L + + SG V+ +KIKK F + + H ++ V G E+ | |
| Sbjct: | 351 | ACMHEEYFSYANRLAESLRQSGIFSEVYP-EAQKIKKPFSYANHKGHEFVAV--IGEEEF | 407 |
| Query: | 283 | RFSSVALKN | 291 |
| | | + +++LKN | |
| Sbjct: | 408 | KSETLSLKN | 416 |

[13444] Based on this analysis, it was predicted that this GAS-specific protein and its epitopes, could be useful antigens for vaccines or diagnostics.

### EXAMPLE 2535

[13445] A DNA sequence (GASx564) was identified in S. pyogenes <SEQ ID 7569> which encodes the amino acid sequence <SEQ ID 7570>. Analysis of this protein sequence reveals the following:

```
Possible site: 56
>>> Seems to have no N-terminal signal sequence
----- Final Results -----
                            bacterial cytoplasm --- Certainty = 0.1264(Affirmative) < succ>
                              bacterial membrane --- Certainty = 0.0000(Not Clear) < succ>
                                bacterial outside --- Certainty = 0.0000(Not Clear) < succ>
```

[13446] No corresponding DNA sequence was identified in S. agalactiae.

[13447] The protein has no significant homology with any sequences in the GENPEPT database.

[13448] Based on this analysis, it was predicted that this GAS-specific protein and its epitopes, could be useful antigens for vaccines or diagnostics.

### EXAMPLE 2536

[13449] A DNA sequence (GASx576) was identified in S. pyogenes <SEQ ID 7571> which encodes the amino acid sequence <SEQ ID 7572>. Analysis of this protein sequence reveals the following:

```
Possible site: 60
>>> Seems to have a cleavable N-term signal seq.
----- Final Results -----
                                bacterial outside --- Certainty = 0.3000(Affirmative) < succ>
                              bacterial membrane --- Certainty = 0.0000(Not Clear) < succ>
                            bacterial cytoplasm --- Certainty = 0.0000(Not Clear) < succ>
```

[13450] No corresponding DNA sequence was identified in S. agalactiae.

[13451] The protein has no significant homology with any sequences in the GENPEPT database.

[13452] Based on this analysis, it was predicted that this GAS-specific protein and its epitopes, could be useful antigens for vaccines or diagnostics.

### EXAMPLE 2537

[13453] A DNA sequence (GASx577R) was identified in S. pyogenes <SEQ ID 7573> which encodes the amino acid sequence <SEQ ID 7574>. Analysis of this protein sequence reveals the following:

| Possible site: 17 | | | | |
|---|---|---|---|---|
| >>> Seems to have no N-terminal signal sequence | | | | |
| | INTEGRAL | Likelihood = −2.60 | Transmembrane | 2-18 (1-18) |

```
----- Final Results -----
                              bacterial membrane --- Certainty = 0.2041(Affirmative) < succ>
                                bacterial outside --- Certainty = 0.0000(Not Clear) < succ>
                            bacterial cytoplasm --- Certainty = 0.0000(Not Clear) < succ>
```

[13454] No corresponding DNA sequence was identified in S. agalactiae.

[13455] The protein has no significant homology with any sequences in the GENPEPT database.

[13456] Based on this analysis, it was predicted that this GAS-specific protein and its epitopes, could be useful antigens for vaccines or diagnostics.

### EXAMPLE 2538

[13457] A DNA sequence (GASx579) was identified in S. pyogenes <SEQ ID 7575> which encodes the amino acid sequence <SEQ ID 7576>. Analysis of this protein sequence reveals the following:

```
Possible site: 13
>>> Seems to have no N-terminal signal sequence
----- Final Results -----
                            bacterial cytoplasm --- Certainty = 0.3161(Affirmative) < succ>
                              bacterial membrane --- Certainty = 0.0000(Not Clear) < succ>
                                bacterial outside --- Certainty = 0.0000(Not Clear) < succ>
```

[13458] No corresponding DNA sequence was identified in S. agalactiae.

[13459] The protein has homology with the following sequences in the GENPEPT database:

| >GP: CAB12286 GB: Z99106 similar to hypothetical proteins | | | |
|---|---|---|---|
| [Bacillus subtilis] | | | |
| Identities = 62/140 (44%), Positives = 88/140 (62%), Gaps = 3/140 (2%) | | | |
| Query: | 3 | LTNYVQEVSLADFGKPLHHKAYWNKRLKTTGGRFFPKDGHLDFNPRMLEEHGELIFRKIV | 62 |
| | | L +++S F KP H+A +N RLKTTGGR+ +++ N + L EHG I+ | |
| Sbjct: | 6 | LQKLTEDISETYFKKPFRHQALFNDRLKTTGGRYLLTSHNIELNRKYLIEHGREELIGII | 65 |
| Query: | 63 | RHELCHYHLYFEGRGYHHKDRDFKDLLAQVNGLRY---VPTSSKSKTNHHYSCQTCGQVY | 119 |
| | | +HELCHYHL+ EG+GY H+DRDF+ LL QVN R+ + +++K + Y C TCGQ Y | |
| Sbjct: | 66 | KHELCHYHLHLEGKGYKHRDRDFRMLLQQVNAPRFCTPLKKKAENKKTYMYICTTCGQQY | 125 |
| Query: | 120 | QRKRRINLAKYVCGNCHGKL | 139 |
| | | +KR +N +Y CG C GK+ | |
| Sbjct: | 126 | IKKRAMNPDRYRCGKCRGKI | 145 |

[13460] Based on this analysis, it was predicted that this GAS-specific protein and its epitopes, could be useful antigens for vaccines or diagnostics.

### EXAMPLE 2539

[13461] A DNA sequence (GASx587R) was identified in S. pyogenes <SEQ ID 7577> which encodes the amino acid sequence <SEQ ID 7578>. Analysis of this protein sequence reveals the following:

| Possible site: 53 | | | | |
|---|---|---|---|---|
| >>> Seems to have no N-terminal signal sequence | | | | |
| | INTEGRAL | Likelihood = −10.40 | Transmembrane | 46-62 (39-89) |
| | INTEGRAL | Likelihood = −5.36 | Transmembrane | 65-81 (63-89) |

```
----- Final Results -----
                              bacterial membrane --- Certainty = 0.5161(Affirmative) < succ>
                                bacterial outside --- Certainty = 0.0000(Not Clear) < succ>
                            bacterial cytoplasm --- Certainty = 0.0000(Not Clear) < succ>
```

[13462] No corresponding DNA sequence was identified in S. agalactiae.

[13463] The protein has no significant homology with any sequences in the GENPEPT database.

[13464] Based on this analysis, it was predicted that this GAS-specific protein and its epitopes, could be useful antigens for vaccines or diagnostics.

### EXAMPLE 2540

[13465] A DNA sequence (GASx590R) was identified in S. pyogenes <SEQ ID 7579> which encodes the amino acid sequence <SEQ ID 7580>. Analysis of this protein sequence reveals the following:

```
Possible site: 35
>>> Seems to have no N-terminal signal sequence
----- Final Results -----
                            bacterial cytoplasm --- Certainty = 0.2036(Affirmative) < succ>
                              bacterial membrane --- Certainty = 0.0000(Not Clear) < succ>
                                bacterial outside --- Certainty = 0.0000(Not Clear) < succ>
```

[13466] No corresponding DNA sequence was identified in S. agalactiae.

[13467] The protein has no significant homology with any sequences in the GENPEPT database.

[13468] Based on this analysis, it was predicted that this GAS-specific protein and its epitopes, could be useful antigens for vaccines or diagnostics.

### EXAMPLE 2541

[13469] A DNA sequence (GASx592R) was identified in S. pyogenes <SEQ ID 7581> which encodes the amino acid sequence <SEQ ID 7582>. Analysis of this protein sequence reveals the following:

| Possible site: 23 | | | | |
|---|---|---|---|---|
| >>> Seems to have a cleavable N-term signal seq. | | | | |
| | INTEGRAL | Likelihood = −4.62 | Transmembrane | 25-41 (24-43) |

```
----- Final Results -----
                              bacterial membrane --- Certainty = 0.2848(Affirmative) < succ>
                                bacterial outside --- Certainty = 0.0000(Not Clear) < succ>
                            bacterial cytoplasm --- Certainty = 0.0000(Not Clear) < succ>
```

[13470] No corresponding DNA sequence was identified in S. agalactiae.

[13471] The protein has no significant homology with any sequences in the GENPEPT database.

[13472] Based on this analysis, it was predicted that this GAS-specific protein and its epitopes, could be useful antigens for vaccines or diagnostics.

### EXAMPLE 2542

[13473] A DNA sequence (GASx600) was identified in S. pyogenes <SEQ ID 7583> which encodes the amino acid sequence <SEQ ID 7584>. Analysis of this protein sequence reveals the following:

| Possible site: 24 | | | | |
|---|---|---|---|---|
| >>> Seems to have an uncleavable N-term signal seq | | | | |
| | INTEGRAL | Likelihood = −2.18 | Transmembrane | 3-19(2-19) |

```
----- Final Results -----
                              bacterial membrane --- Certainty = 0.1871(Affirmative) < succ>
                                bacterial outside --- Certainty = 0.0000(Not Clear) < succ>
                            bacterial cytoplasm --- Certainty = 0.0000(Not Clear) < succ>
```

[13474] No corresponding DNA sequence was identified in S. agalactiae.

[13475] The protein has no significant homology with any sequences in the GENPEPT database.

[13476] Based on this analysis, it was predicted that this GAS-specific protein and its epitopes, could be useful antigens for vaccines or diagnostics.

### EXAMPLE 2543

[13477] A DNA sequence (GASx603R) was identified in S. pyogenes <SEQ ID 7585> which encodes the amino acid sequence <SEQ ID 7586>. Analysis of this protein sequence reveals the following:

```
Possible site: 48
>>> Seems to have no N-terminal signal sequence
----- Final Results -----
                            bacterial cytoplasm --- Certainty = 0.3027(Affirmative) < succ>
                              bacterial membrane --- Certainty = 0.0000(Not Clear) < succ>
                                bacterial outside --- Certainty = 0.0000(Not Clear) < succ>
```

[13478] No corresponding DNA sequence was identified in S. agalactiae.

[13479] The protein has homology with the following sequences in the GENPEPT database:

| >GP: CAA03927 GB: AJ000109 gluthatione peroxidase [Lactococcus lactis] | | | |
|---|---|---|---|
| Identities = 79/133 (59%), Positives = 103/133 (77%) | | | |
| Query: | 1 | VVLVVNTATKCGLTPQYQALQALYDTYHDKGFEVLDFPCNQFLNQAPGDAEEINHFCSLT | 60 |
| | | VV+VVNTA+KCG TPQ++ L+ LY+TY D+G E+L FPCNQF NQ G+ EIN FC L | |
| Sbjct: | 25 | VVIVVNTASKCGFTPQFEGLEKLYETYKDQGLEILGFPCNQFANQDAGENTEINEFCQLN | 84 |
| Query: | 61 | YHTTFPRFAKIKVNGKDADPLFTWLKEEKSGPLGKRIEWNFTKFLIDQNGQVIKRYSSKT | 120 |
| | | Y TF F KIKVNGK+A PL+ +LK+E G L I+WNFTKFLID++GQVI+R++ KT | |
| Sbjct: | 85 | YGVTFTMFQKIKVNGKEAHPLYQFLKKEAKGALSGTIKWNFTKFLIDRDGQVIERFAPKT | 144 |
| Query: | 121 | DPKLIEEDLKALL | 133 |
| | | +P+ +EE++K LL | |
| Sbjct: | 145 | EPEEMEEEIKKLL | 157 |

[13480] Based on this analysis, it was predicted that this GAS-specific protein and its epitopes, could be useful antigens for vaccines or diagnostics.

### EXAMPLE 2544

[13481] A DNA sequence (GASx605) was identified in S. pyogenes <SEQ ID 7587> which encodes the amino acid sequence <SEQ ID 7588>. Analysis of this protein sequence reveals the following:

```
Possible site: 26
>>> Seems to have no N-terminal signal sequence
----- Final Results -----
                            bacterial cytoplasm --- Certainty = 0.3687(Affirmative) < succ>
                              bacterial membrane --- Certainty = 0.0000(Not Clear) < succ>
                                bacterial outside --- Certainty = 0.0000(Not Clear) < succ>
```

[13482] No corresponding DNA sequence was identified in S. agalactiae.

[13483] The protein has no significant homology with any sequences in the GENPEPT database.

[13484] Based on this analysis, it was predicted that this GAS-specific protein and its epitopes, could be useful antigens for vaccines or diagnostics.

### EXAMPLE 2545

[13485] A DNA sequence (GASx608R) was identified in S. pyogenes <SEQ ID 7589> which encodes the amino acid sequence <SEQ ID 7590>. Analysis of this protein sequence reveals the following:

```
Possible site: 17
>>> Seems to have no N-terminal signal sequence
----- Final Results -----
                            bacterial cytoplasm --- Certainty = 0.1327(Affirmative) < succ>
                              bacterial membrane --- Certainty = 0.0000(Not Clear) < succ>
                                bacterial outside --- Certainty = 0.0000(Not Clear) < succ>
```

[13486] No corresponding DNA sequence was identified in S. agalactiae.

[13487] The protein has no significant homology with any sequences in the GENPEPT database.

[13488] Based on this analysis, it was predicted that this GAS-specific protein and its epitopes, could be useful antigens for vaccines or diagnostics.

### EXAMPLE 2546

[13489] A DNA sequence (GASx616) was identified in S. pyogenes <SEQ ID 7591> which encodes the amino acid sequence <SEQ ID 7592>. Analysis of this protein sequence reveals the following:

```
Possible site: 21
>>> Seems to have no N-terminal signal sequence
----- Final Results -----
                              bacterial membrane --- Certainty = 0.0000(Not Clear) < succ>
                                bacterial outside --- Certainty = 0.0000(Not Clear) < succ>
                            bacterial cytoplasm --- Certainty = 0.0000(Not Clear) < succ>
```

[13490] No corresponding DNA sequence was identified in S. agalactiae.

[13491] The protein has no significant homology with any sequences in the GENPEPT database.

[13492] Based on this analysis, it was predicted that this GAS-specific protein and its epitopes, could be useful antigens for vaccines or diagnostics.

### EXAMPLE 2547

[13493] A DNA sequence (GASx617R) was identified in S. pyogenes <SEQ ID 7593> which encodes the amino acid sequence <SEQ ID 7594>. Analysis of this protein sequence reveals the following:

```
Possible site: 36
>>> Seems to have no N-terminal signal sequence
----- Final Results -----
                            bacterial cytoplasm --- Certainty = 0.0677(Affirmative) < succ>
                              bacterial membrane --- Certainty = 0.0000(Not Clear) < succ>
                                bacterial outside --- Certainty = 0.0000(Not Clear) < succ>
```

[13494] No corresponding DNA sequence was identified in S. agalactiae.

[13495] The protein has no significant homology with any sequences in the GENPEPT database.

[13496] Based on this analysis, it was predicted that this GAS-specific protein and its epitopes, could be useful antigens for vaccines or diagnostics.

### EXAMPLE 2548

[13497] A DNA sequence (GASx622R) was identified in S. pyogenes <SEQ ID 7595> which encodes the amino acid sequence <SEQ ID 7596>. Analysis of this protein sequence reveals the following:

| Possible site: 16 | | | | |
|---|---|---|---|---|
| >>> Seems to have an uncleavable N-term signal seq | | | | |
| | INTEGRAL | Likelihood = −7.32 | Transmembrane | 4-20 (1-26) |

```
----- Final Results -----
                              bacterial membrane --- Certainty = 0.3930(Affirmative) < succ>
                                bacterial outside --- Certainty = 0.0000(Not Clear) < succ>
                            bacterial cytoplasm --- Certainty = 0.0000(Not Clear) < succ>
```

[13498] No corresponding DNA sequence was identified in S. agalactiae.

[13499] The protein has no significant homology with any sequences in the GENPEPT database.

[13500] Based on this analysis, it was predicted that this GAS-specific protein and its epitopes, could be useful antigens for vaccines or diagnostics.

### EXAMPLE 2549

[13501] A DNA sequence (GASx632) was identified in S. pyogenes <SEQ ID 7597> which encodes the amino acid sequence <SEQ ID 7598>. Analysis of this protein sequence reveals the following:

| Possible site: 31 | | | | |
|---|---|---|---|---|
| >>> Seems to have no N-terminal signal sequence | | | | |
| | INTEGRAL | Likelihood = −3.40 | Transmembrane | 83-99 (82-102) |
| | INTEGRAL | Likelihood = −1.28 | Transmembrane | 108-124 (108-124) |

```
----- Final Results -----
                              bacterial membrane --- Certainty = 0.2359(Affirmative) < succ>
                                bacterial outside --- Certainty = 0.0000(Not Clear) < succ>
                            bacterial cytoplasm --- Certainty = 0.0000(Not Clear) < succ>
```

[13502] No corresponding DNA sequence was identified in S. agalactiae.

[13503] The protein has no significant homology with any sequences in the GENPEPT database.

[13504] Based on this analysis, it was predicted that this GAS-specific protein and its epitopes, could be useful antigens for vaccines or diagnostics.

### EXAMPLE 2550

[13505] A DNA sequence (GASx638) was identified in S. pyogenes <SEQ ID 7599> which encodes the amino acid sequence <SEQ ID 7600>. Analysis of this protein sequence reveals the following:

```
Possible site: 25
>>> Seems to have an uncleavable N-term signal seq
      INTEGRAL Likelihood = −0.64 Transmembrane 12 − 28 (12 − 28)
----- Final Results -----
                            bacterial membrane --- Certainty = 0.1256(Affirmative) < succ>
                              bacterial outside --- Certainty = 0.0000(Not Clear) < succ>
                          bacterial cytoplasm --- Certainty = 0.0000(Not Clear) < succ>
```

[13506] No corresponding DNA sequence was identified in S. agalactiae.

[13507] The protein has no significant homology with any sequences in the GENPEPT database.

[13508] Based on this analysis, it was predicted that this GAS-specific protein and its epitopes, could be useful antigens for vaccines or diagnostics.

### EXAMPLE 2551

[13509] A DNA sequence (GASx652R) was identified in S. pyogenes <SEQ ID 7601> which encodes the amino acid sequence <SEQ ID 7602>. Analysis of this protein sequence reveals the following:

```
Possible site: 16
>>> Seems to have no N-terminal signal sequence
----- Final Results -----
                            bacterial cytoplasm --- Certainty = 0.2622(Affirmative) < succ>
                              bacterial membrane --- Certainty = 0.0000(Not Clear) < succ>
                                bacterial outside --- Certainty = 0.0000(Not Clear) < succ>
```

[13510] No corresponding DNA sequence was identified in S. agalactiae.

[13511] The protein has homology with the following sequences in the GENPEPT database:

| >GP:CAA74610 GB:Y14232 hypothetical protein [Bacteriophage TP901-1] | | | |
|---|---|---|---|
| Identities = 225/485 (46%), Positives = 308/485 (63%), Gaps = 20/485 (4%) | | | |
| Query: | 2 | RKVAIYSRVSTINQAEEGYSIQGQIEALTKYCEAMEWKIYKNYSDAGFSGGKLERPAITE | 61 |
| | | +KVAIY+RVST NQAEEG+SI QI+ LTKY EAM W++ Y+DAGFSG KLERPA+ | |
| Sbjct: | 3 | KKVAIYTRVSTTNQAEEGFSIDEQIDRLTKYAEAMGWQVSDTYTDAGFSGAKLERPAMQR | 62 |
| Query: | 62 | LIEDGKNNKFDTILVYKLDRLSRNVKDTLYLVKDVFTANNIHFVSLKENIDTSSAMGNLF | 121 |
| | | LI D +N FDT+LVYKLDRLSR+V+DTLYLVKDVFT N I F+SL E+IDTSSAMG+LF | |
| Sbjct: | 63 | LINDIENKAFDTVLVYKLDRLSRSVRDTLYLVKDVFTKNKIDFISLNESIDTSSAMGSLF | 122 |
| Query: | 122 | LTLLSAIAEFEREQIKERMQFGVMNRAKSGKTTAWKTPPYGYRYNKDEKTLSVNELEAAN | 181 |
| | | LT+LSAI EFERE IKERM G + RAKSGK+ W +GY +N+ L + L+A | |
| Sbjct: | 123 | LTILSAINEFERENIKERMTMGRLGRAKSGKSMMWTKTAFGYYHNRKTGILEIVPLQATI | 182 |
| Query: | 182 | VRQMFDMIISGCSIMSITNYARDN-FVGN--TWTHVKVKRILENETYKGLVKYREQTFSG | 238 |
| | | V Q+F +SG S+ + + ++ +G W++ +++ L+N Y G +K+++ F G | |
| Sbjct: | 183 | VEQIFTDYLSGISLTKLRDKLNESGHIGKDIPWSYRTLRQTLDNPVYCGYIKFKDSLFEG | 242 |
| Query: | 239 | DHQAIIDEKTYNKAQIALAHRT----DTKTNTRPFQGKYMLSHIAKCGYCGAPLKVCTGR | 294 |
| | | H+ II +TY K Q L R + N RPFQ KYMLS +A+CGYCGAPLK+ G | |
| Sbjct: | 243 | MHKPIIPYETYLKVQKELEERQQQTYERNNNPRPFQAKYMLSGMARCGYCGAPLKIVLGH | 302 |
| Query: | 295 | AKNDGTRRQTYVCVNKTESLARRSVNNYNNQKICNTGRYEKKHIEKYVIDVLYKLQHDKE | 354 |
| | | + DG+R Y C N+ + + YN+ K C++G Y+ ++E VID L Q + + | |
| Sbjct: | 303 | KRKDGSRTMKYHCANRFPR-KTKGITVYNDNKKCDSGTYDLSNLENTVIDNLIGFQENND | 361 |
| Query: | 355 | YLKKIKKDDN--IIDITPLKKEIEIIDKKINRLNDLYINDLIDLPKLKKDIEELNHLKDD | 412 |
| | | L KI +N I+D + KK+I IDKKI + +DLY+ND I + +LK + L K | |
| Sbjct: | 362 | SLLKIINGNNQPILDTSSFKKQISQIDKKIQKNSDLYLNDFITMDELKDRTDSLQAEK-- | 419 |
| Query: | 413 | YNKAIKLNYLDKKNEDSLGML------MDNLDIRKSSYDVQSRIVKQLIDRVEVTNDNID | 466 |
| | | K +K +K DS + + ++ I + SYD + +IV L+ +V+VT DN+D | |
| Sbjct: | 420 | --KLLKAKISENKFNDSTDVFELVKTQLGSIPINELSYDNKKKIVNNLVSKVDVTADNVD | 477 |
| Query: | 467 | IIFKF | 471 |
| | | IIFKF | |
| Sbjct: | 478 | IIFKF | 482 |

[13512] Based on this analysis, it was predicted that this GAS-specific protein and its epitopes, could be useful antigens for vaccines or diagnostics.

### EXAMPLE 2552

[13513] A DNA sequence (GASx653R) was identified in S. pyogenes <SEQ ID 7603> which encodes the amino acid sequence <SEQ ID 7604>. Analysis of this protein sequence reveals the following:

```
Possible site: 48
>>> Seems to have no N-terminal signal sequence
      INTEGRAL Likelihood = −1.22 Transmembrane 86 − 102 (86 − 102)
----- Final Results -----
                            bacterial membrane --- Certainty = 0.1489(Affirmative) < succ>
                              bacterial outside --- Certainty = 0.0000(Not Clear) < succ>
                          bacterial cytoplasm --- Certainty = 0.0000(Not Clear) < succ>
```

[13514] No corresponding DNA sequence was identified in S. agalactiae.

[13515] The protein has homology with the following sequences in the GENPEPT database:

| >GP:AAF12707 GB:AF066865 unknown [bacteriophage TPW22] | | | |
|---|---|---|---|
| Identities = 45/67 (67%), Positives = 53/67 (78%), Gaps = 2/67 (2%) | | | |
| Query: | 57 | EKEAVRCPKCKSTNVGFMQQGKKTFSVKKAVAGTLLIG--GTVMGFLGEKGKKQWHCNEC | 114 |
| | | +K A++CPKCKST+V FMQQGKK FSV KAV G +L G GT+ GF G+KGKKQWHCN C | |
| Sbjct: | 138 | DKHAIKCPKCKSTDVVFMQQGKKGFSVGKAVGGAVLTGGIGTLAGFAGKKGKKQWHCNNC | 197 |
| Query: | 115 | SCIFETK | 121 |
| | | +FETK | |
| Sbjct: | 198 | GRVFETK | 204 |

[13516] Based on this analysis, it was predicted that this GAS-specific protein and its epitopes, could be useful antigens for vaccines or diagnostics.

### EXAMPLE 2553

[13517] A DNA sequence (GASx655) was identified in S. pyogenes <SEQ ID 7605> which encodes the amino acid sequence <SEQ ID 7606>. Analysis of this protein sequence reveals the following:

```
Possible site: 50
>>> Seems to have no N-terminal signal sequence
----- Final Results -----
                            bacterial cytoplasm --- Certainty = 0.3956(Affirmative) < succ>
                              bacterial membrane --- Certainty = 0.0000(Not Clear) < succ>
                                bacterial outside --- Certainty = 0.0000(Not Clear) < succ>
```

[13518] No corresponding DNA sequence was identified in S. agalactiae.

[13519] The protein has homology with the following sequences in the GENPEPT database:

| >GP:CAB63661 GB:AJ251789 Cro protein [Lactobacilius casei | | | |
|---|---|---|---|
| bacteriophage A2] | | | |
| Identities = 43/76 (56%), Positives = 55/76 (71%) | | | |
| Query: | 26 | MTINLKRLKAERIASGMTQCEVAQSMGWKTRTPYAKRENGIVSIGADELAKITLIFGLPI | 85 |
| | | MT+NLKRL+AERIA GM Q E+A++MGW TR+ YAKRENGI +I A EL K+ I G | |
| Sbjct: | 1 | MTLNLKRLRAERIAKGMNQDEMAKAMGWHTRSSYAKRENGITTISATELVKMASILGYGT | 60 |
| Query: | 86 | EKIAIFFDKDVPVMER | 101 |
| | | ++ +FF +VP ER | |
| Sbjct: | 61 | NQLDLFFTNNVPDRER | 76 |

[13520] Based on this analysis, it was predicted that this GAS-specific protein and its epitopes, could be useful antigens for vaccines or diagnostics.

### EXAMPLE 2554

[13521] A DNA sequence (GASx656) was identified in S. pyogenes <SEQ ID 7607> which encodes the amino acid sequence <SEQ ID 7608>. Analysis of this protein sequence reveals the following:

```
Possible site: 34
>>> Seems to have no N-terminal signal sequence
----- Final Results -----
                            bacterial cytoplasm --- Certainty = 0.4505(Affirmative) < succ>
                              bacterial membrane --- Certainty = 0.0000(Not Clear) < succ>
                                bacterial outside --- Certainty = 0.0000(Not Clear) < succ>
```

[13522] No corresponding DNA sequence was identified in S. agalactiae.

[13523] The protein has no significant homology with any sequences in the GENPEPT database.

[13524] Based on this analysis, it was predicted that this GAS-specific protein and its epitopes, could be useful antigens for vaccines or diagnostics.

### EXAMPLE 2555

[13525] A DNA sequence (GASx657) was identified in S. pyogenes <SEQ ID 7609> which encodes the amino acid sequence <SEQ ID 7610>. Analysis of this protein sequence reveals the following:

```
Possible site: 35
>>> Seems to have no N-terminal signal sequence
----- Final Results -----
                            bacterial cytoplasm --- Certainty = 0.6593(Affirmative) < succ>
                              bacterial membrane --- Certainty = 0.0000(Not Clear) < succ>
                                bacterial outside --- Certainty = 0.0000(Not Clear) < succ>
```

[13526] No corresponding DNA sequence was identified in S. agalactiae.

[13527] The protein has no significant homology with any sequences in the GENPEPT database.

[13528] Based on this analysis, it was predicted that this GAS-specific protein and its epitopes, could be useful antigens for vaccines or diagnostics.

### EXAMPLE 2556

[13529] A DNA sequence (GASx658) was identified in S. pyogenes <SEQ ID 7611> which encodes the amino acid sequence <SEQ ID 7612>. Analysis of this protein sequence reveals the following:

```
Possible site: 32
>>> Seems to have no N-terminal signal sequence
----- Final Results -----
                            bacterial cytoplasm --- Certainty = 0.5244(Affirmative) < succ>
                              bacterial membrane --- Certainty = 0.0000(Not Clear) < succ>
                                bacterial outside --- Certainty = 0.0000 (Not Clear) < succ>
```

[13530] No corresponding DNA sequence was identified in S. agalactiae.

[13531] The protein has no significant homology with any sequences in the GENPEPT database.

[13532] Based on this analysis, it was predicted that this GAS-specific protein and its epitopes, could be useful antigens for vaccines or diagnostics.

### EXAMPLE 2557

[13533] A DNA sequence (GASx660) was identified in S. pyogenes <SEQ ID 7613> which encodes the amino acid sequence <SEQ ID 7614>. Analysis of this protein sequence reveals the following:

```
Possible site: 58
>>> Seems to have no N-terminal signal sequence
----- Final Results -----
                            bacterial cytoplasm --- Certainty = 0.1133(Affirmative) < succ>
                              bacterial membrane --- Certainty = 0.0000 (Not Clear) < succ>
                                bacterial outside --- Certainty = 0.0000 (Not Clear) < succ>
```

[13534] No corresponding DNA sequence was identified in S. agalactiae.

[13535] The protein has homology with the following sequences in the GENPEPT database:

| >GP: AAB99331 GB: U67572 purine NTPase [Methanococcus jannaschii] | | | |
|---|---|---|---|
| Identities = 71/346 (20%), Positives = 154/346 (43%), Gaps = 52/346 (15%) | | | |
| Query: | 8 | MSITINKLEIENVK-----RIKAVKIEPSATGLTIIGGNNNQGKTSVLDAIAWAL--GGN | 60 |
| | | MS+ + ++ + N K RIK K G+ I G N GK+S+ +A+ +AL G+ | |
| Sbjct: | 1 | MSMILKEIRMNNFKSHVNSRIKFEK------GIVAIIGENGSGKSSIFEAVFFALFGAGS | 54 |
| Query: | 61 | KYKPSQAMREGSQ---VPPTLKITMSNGLIVERKGKNASLKVIDPNGQ----------KG | 107 |
| | | + + +G + V ++ +N I+ + NG+ K | |
| Sbjct: | 55 | NFNYDTIITKGKKSVYVELDFEVNGNNYKIIREYDSGRGGAKLYKNGKPYATTISAVNKA | 114 |
| Query: | 108 | GQQLL----DSFVEELAI---NLPKFMDSTPKEKADVLLEIIGVGDQLAELELKEKEIYN | 160 |
| | | ++L + F+ + I + KF+ P EK + + +++G+ D+ + K EI | |
| Sbjct: | 115 | VNEILGVDRNMFLNSIYIKQGEIAKFLSLKPSEKLETVAKLLGI-DEFEKCYQKMGEIVK | 173 |
| Query: | 161 | QRHAIGVIADQKEKFAKEMTYYPDAPKQLVS-ISELIQQHQAILAKNGE-NAQKR--QNV | 216 |
| | | + + E+ E+ Y + K+L + +S+L ++++ ++ N + N K+ +++ | |
| Sbjct: | 174 | E------YEKRLERIEGELNYKENYEKELKNKMSQLEEKNKKLMEINDKLNKIKKEFEDI | 227 |
| Query: | 217 | ERIRYDYNQSILEVDRLRKLLADAEAKTNKLSEDLKIANTD------AMDLHDESTAEIE | 270 |
| | | E++ ++ L ++ L + + +++LKI D A + + E E | |
| Sbjct: | 228 | EKLFNEWENKKLLYEKFINKLEERKRALELKNQELKILEYDLNTVVEARETLNRHKDEYE | 287 |
| Query: | 271 | ANIADIDEVNRKVRANFDKDKAE-EDAKQQREQYNILTNDIESIRQ | 315 |
| | | + +DE+ RK+ + + K+ ED + +Q I+ DIE +++ | |
| Sbjct: | 288 | KYKSLVDEI-RKIESRLRELKSHYEDYLKLTKQLEIIKGDIEKLKE | 332 |

[13536] Based on this analysis, it was predicted that this GAS-specific protein and its epitopes, could be useful antigens for vaccines or diagnostics.

### EXAMPLE 2558

[13537] A DNA sequence (GASx661) was identified in S. pyogenes <SEQ ID 7615> which encodes the amino acid sequence <SEQ ID 7616>. Analysis of this protein sequence reveals the following:

```
Possible site: 28
>>> Seems to have no N-terminal signal sequence
----- Final Results -----
                            bacterial cytoplasm --- Certainty = 0.1559(Affirmative) < succ>
                              bacterial membrane --- Certainty = 0.0000(Not Clear) < succ>
                                bacterial outside --- Certainty = 0.0000(Not Clear) < succ>
```

[13538] No corresponding DNA sequence was identified in S. agalactiae.

[13539] The protein has no significant homology with any sequences in the GENPEPT database.

[13540] Based on this analysis, it was predicted that this GAS-specific protein and its epitopes, could be useful antigens for vaccines or diagnostics.

### EXAMPLE 2559

[13541] A DNA sequence (GASx662) was identified in S. pyogenes <SEQ ID 7617> which encodes the amino acid sequence <SEQ ID 7618>. Analysis of this protein sequence reveals the following:

```
Possible site: 52
>>> Seems to have no N-terminal signal sequence
----- Final Results -----
                            bacterial cytoplasm --- Certainty = 0.3292(Affirmative) < succ>
                              bacterial membrane --- Certainty = 0.0000(Not Clear) < succ>
                                bacterial outside --- Certainty = 0.0000(Not Clear) < succ>
```

[13542] No corresponding DNA sequence was identified in S. agalactiae.

[13543] The protein has no significant homology with any sequences in the GENPEPT database.

[13544] Based on this analysis, it was predicted that this GAS-specific protein and its epitopes, could be useful antigens for vaccines or diagnostics.

### EXAMPLE 2560

[13545] A DNA sequence (GASx663) was identified in S. pyogenes <SEQ ID 7619> which encodes the amino acid sequence <SEQ ID 7620>. Analysis of this protein sequence reveals the following:

```
Possible site: 15
>>> Seems to have no N-terminal signal sequence
----- Final Results -----
                            bacterial cytoplasm --- Certainty = 0.4867(Affirmative) < succ>
                              bacterial membrane --- Certainty = 0.0000(Not Clear) < succ>
                                bacterial outside --- Certainty = 0.0000(Not Clear) < succ>
```

[13546] No corresponding DNA sequence was identified in S. agalactiae.

[13547] The protein has no significant homology with any sequences in the GENPEPT database.

[13548] Based on this analysis, it was predicted that this GAS-specific protein and its epitopes, could be useful antigens for vaccines or diagnostics.

### EXAMPLE 2561

[13549] A DNA sequence (GASx664) was identified in S. pyogenes <SEQ ID 7621> which encodes the amino acid sequence <SEQ ID 7622>. Analysis of this protein sequence reveals the following:

```
Possible site: 46
>>> Seems to have no N-terminal signal sequence
----- Final Results -----
                            bacterial cytoplasm --- Certainty = 0.2141(Affirmative) < succ>
                              bacterial membrane --- Certainty = 0.0000(Not Clear) < succ>
                                bacterial outside --- Certainty = 0.0000(Not Clear) < succ>
```

[13550] No corresponding DNA sequence was identified in S. agalactiae.

[13551] The protein has no significant homology with any sequences in the GENPEPT database.

[13552] Based on this analysis, it was predicted that this GAS-specific protein and its epitopes, could be useful antigens for vaccines or diagnostics.

### EXAMPLE 2562

[13553] A DNA sequence (GASx667) was identified in S. pyogenes <SEQ ID 7623> which encodes the amino acid sequence <SEQ ID 7624>. Analysis of this protein sequence reveals the following:

```
Possible site: 59
>>> Seems to have no N-terminal signal sequence
----- Final Results -----
                            bacterial cytoplasm --- Certainty = 0.2614(Affirmative) < succ>
                              bacterial membrane --- Certainty = 0.0000(Not Clear) < succ>
                                bacterial outside --- Certainty = 0.0000(Not Clear) < succ>
```

[13554] No corresponding DNA sequence was identified in S. agalactiae.

[13555] The protein has homology with the following sequences in the GENPEPT database:

| >GP: AAF80834 GB: AF165214 Orf78 [Pseudomonas phage D3] | | | |
|---|---|---|---|
| Identities = 68/200 (34%), Positives = 109/200 (54%), Gaps = 10/200 (5%) | | | |
| Query: | 12 | GLRFGSLTVINRNRNNSKGGNARWNCLCDCGNKTVVI-GSKLRSGYTKSCGCARKNDNAK | 70 |
| | | GLR G + V ++ G + W C CDCGN+ ++ G+ +R+ T SCGC+R + | |
| Sbjct: | 8 | GLRVGKVVV--EAFSHCAGKASHWVCRCDCGNRVIMRRGNLMRNRTTTSCGCSRFSH--- | 62 |
| Query: | 71 | GYSSTRLYRIWKGMMNRCYNHKNDNYKYYGGKGISICDEWLTFINFRTWSLSNGYKESLT | 130 |
| | | G + T Y W M++RC N N Y Y G+GI++C+ W+TF NF G + T | |
| Sbjct: | 63 | GMTGTPTYSSWSNMIDRCTNPSNKRYVDYQGRGITVCERWMTFANFLA---DMGERPDAT | 119 |
| Query: | 131 | -IDRINPKGNYTPLNCRWVSMKMQQNNKTNNRYLSYLGQEYTIAEFSEKLNVTYWTVINQ | 189 |
| | | +DRI+ Y NCRW + Q NN N ++ YLG+ T+++++ +L + T+ ++ | |
| Sbjct: | 120 | SLDRIDNDAGYFKENCRWATALEQMNNTRRNTFVEYLGRRQTVSQWAGQLGIPECTLRSR | 179 |
| Query: | 190 | LKLGWSVERIVEEARMKNDR | 209 |
| | | L GWS+E +++ K R | |
| Sbjct: | 180 | LNRGWSIEDAMQKPISKQRR | 199 |

[13556] Based on this analysis, it was predicted that this GAS-specific protein and its epitopes, could be useful antigens for vaccines or diagnostics.

### EXAMPLE 2563

[13557] A DNA sequence (GASx668) was identified in S. pyogenes <SEQ ID 7625> which encodes the amino acid sequence <SEQ ID 7626>. Analysis of this protein sequence reveals the following:

```
Possible site: 41
>>> Seems to have no N-terminal signal sequence
----- Final Results -----
                            bacterial cytoplasm --- Certainty = 0.1476(Affirmative) < succ>
                              bacterial membrane --- Certainty = 0.0000(Not Clear) < succ>
                                bacterial outside --- Certainty = 0.0000(Not Clear) < succ>
```

[13558] No corresponding DNA sequence was identified in S. agalactiae.

[13559] The protein has homology with the following sequences in the GENPEPT database:

| >GP: CAB75598 GB: AJ271879 putative DNA helicase [uncultured | | | |
|---|---|---|---|
| eubacterium] | | | |
| Identities = 42/168 (25%), Positives = 75/168 (44%), Gaps = 7/168 (4%) | | | |
| Query: | 374 | IAGPSKAGKSFALIELSIALAEGQKWLG-WQCEQGKVLYVNLELDRPSALHRFKDVYDAM | 432 |
| | | + P AGKS ++L+ +A G LG + G V+Y+ E D P+A+H A | |
| Sbjct: | 35 | LVSPGGAGKSMLALQLAAQIAGGPDLLGVGELPTGPVIYLPAE-DPPTAIHHRLHALGAH | 93 |
| Query: | 433 | GLPPANVANIDIWNLRGKTVPMDKLAPKLIRRSLKKNYQA---VIIDPIYKVLTGDENSA | 489 |
| | | A D ++ + + +LK+ + +I+D + + +EN++ | |
| Sbjct: | 94 | LSAEERQAVADGLLIQPLIGSLPNIMASNWFEALKRAAEGRRLMILDTLRRFHIEEENAS | 153 |
| Query: | 490 | DQMAHFTNQFDKVATELGCSVIYCHHHSKGS--QGGKKSMDRASGSGV | 535 |
| | | MA + + +A + GCS+++ HH SKG+ G + GS V | |
| Sbjct: | 154 | GPMAQVIGRMEAIAADTGCSIVFLHHASKGATMMGAGDQQQASRGSSV | 201 |

[13560] Based on this analysis, it was predicted that this GAS-specific protein and its epitopes, could be useful antigens for vaccines or diagnostics.

### EXAMPLE 2564

[13561] A DNA sequence (GASx669) was identified in S. pyogenes <SEQ ID 7627> which encodes the amino acid sequence <SEQ ID 7628>. Analysis of this protein sequence reveals the following:

```
Possible site: 56
>>> Seems to have no N-terminal signal sequence
----- Final Results -----
                            bacterial cytoplasm --- Certainty = 0.2555(Affirmative) < succ>
                              bacterial membrane --- Certainty = 0.0000(Not Clear) < succ>
                                bacterial outside --- Certainty = 0.0000(Not Clear) < succ>
```

[13562] No corresponding DNA sequence was identified in S. agalactiae.

[13563] The protein has no significant homology with any sequences in the GENPEPT database.

[13564] Based on this analysis, it was predicted that this GAS-specific protein and its epitopes, could be useful antigens for vaccines or diagnostics.

### EXAMPLE 2565

[13565] A DNA sequence (GASx670) was identified in S. pyogenes <SEQ ID 7629> which encodes the amino acid sequence <SEQ ID 7630>. Analysis of this protein sequence reveals the following:

```
Possible Site: 54
>>> Seems to have no N-terminal signal sequence
----- Final Results -----
                            bacterial cytoplasm --- Certainty = 0.2921(Affirmative) < succ>
                              bacterial membrane --- Certainty = 0.0000(Not Clear) < succ>
                                bacterial outside --- Certainty = 0.0000(Not Clear) < succ>
```

[13566] No corresponding DNA sequence was identified in S. agalactiae.

[13567] The protein has homology with the following sequences in the GENPEPT database:

| >GP: AAF74082 GB: AF212845 ORF129 [Lactococcus lactis bacteriophage | | | |
|---|---|---|---|
| u136] | | | |
| Identities = 36/108 (33%), Positives = 63/108 (58%), Gaps = 1/108 (0%) | | | |
| Query: | 8 | IEFFLPMDKIPTTTHQQKKVTVINGKPHFYEPESLKNARDKFTSLLAQHVPPSKLDGPIR | 67 |
| | | ++F +DK+PTT QQK + + GK FY+ KN K + + + + P++ | |
| Sbjct: | 1 | MKFEFELDKMPTT-QQQKGIKKVKGKLQFYDRRGTKNYSLKAQLMKNKPKECWEKNVPLK | 59 |
| Query: | 68 | LTVKWLFPKIKGSTNGQYKTTKPDTDNLQKLLKDCMTELGFWNDDAQV | 115 |
| | | L+V + + + Q+KT++PD DNL K L+D MT+L +++DD+Q+ | |
| Sbjct: | 60 | LSVTFFYAIKQKKRWWQWKTSRPDLDNLMKNLQDYMTKLRYYSDDSQI | 107 |

[13568] Based on this analysis, it was predicted that this GAS-specific protein and its epitopes, could be useful antigens for vaccines or diagnostics.

### EXAMPLE 2566

[13569] A DNA sequence (GASx671) was identified in S. pyogenes <SEQ ID 7631> which encodes the amino acid sequence <SEQ ID 7632>. Analysis of this protein sequence reveals the following:

```
Possible site: 33
>>> Seems to have no N-terminal signal sequence
----- Final Results -----
                            bacterial cytoplasm --- Certainty = 0.4294(Affirmative) < succ>
                              bacterial membrane --- Certainty = 0.0000(Not Clear) < succ>
                                bacterial outside --- Certainty = 0.0000(Not Clear) < succ>
```

[13570] No corresponding DNA sequence was identified in S. agalactiae.

[13571] The protein has no significant homology with any sequences in the GENPEPT database.

[13572] Based on this analysis, it was predicted that this GAS-specific protein and its epitopes, could be useful antigens for vaccines or diagnostics.

### EXAMPLE 2567

[13573] A DNA sequence (GASx672R) was identified in S. pyogenes <SEQ ID 7633> which encodes the amino acid sequence <SEQ ID 7634>. Analysis of this protein sequence reveals the following:

| Possible site: 15 | | | | |
|---|---|---|---|---|
| >>> Seems to have a cleavable N-term signal seq. | | | | |
| | INTEGRAL | Likelihood = −6.37 | Transmembrane | 106-122 (104-125) |

```
----- Final Results -----
                              bacterial membrane --- Certainty = 0.3548(Affirmative) < succ>
                                bacterial outside --- Certainty = 0.0000(Not Clear) < succ>
                            bacterial cytoplasm --- Certainty = 0.0000(Not Clear) < succ>
```

[13574] No corresponding DNA sequence was identified in S. agalactiae.

[13575] The protein has no significant homology with any sequences in the GENPEPT database.

[13576] Based on this analysis, it was predicted that this GAS-specific protein and its epitopes, could be useful antigens for vaccines or diagnostics.

### EXAMPLE 2568

[13577] A DNA sequence (GASx673) was identified in S. pyogenes <SEQ ID 7635> which encodes the amino acid sequence <SEQ ID 7636>. Analysis of this protein sequence reveals the following:

```
Possible site: 56
>>> Seems to have no N-terminal signal sequence
----- Final Results -----
                            bacterial cytoplasm --- Certainty = 0.4781(Affirmative) < succ>
                              bacterial membrane --- Certainty = 0.0000(Not Clear) < succ>
                                bacterial outside --- Certainty = 0.0000(Not Clear) < succ>
```

[13578] No corresponding DNA sequence was identified in S. agalactiae.

[13579] The protein has homology with the following sequences in the GENPEPT database:

| >GP: AAB18697 GB: U38906 ORF22 [Bacteriophage rlt] | | | |
|---|---|---|---|
| Identities = 78/207 (37%), Positives = 123/207 (58%), Gaps = 2/207 (0%) | | | |
| Query: | 28 | EIHRILGIDEVYKAPKRLTDILFDKDSREDIFRQFLKYETDVSYDWFMQYFEEEQADRKN | 87 |
| | | + + +L +DE R+ +++FDK RE+ + + L D+ D+F YF A | |
| Sbjct: | 7 | QFYDMLNVDEHMNFTNRIQELVFDKKGREEFYSKILNIHHDMGVDFFRDYFMAHSAVSA- | 65 |
| Query: | 88 | KKQDFTPKSVSTLLSKIISGNQYYEVA-VGTGGILIQAWQEQRLNDSPFTYRPSKYWYHV | 146 |
| | | K Q +TP + L + ++ G+ ++ GTG ++IQ WQ+ R+N F Y PS YWY | |
| Sbjct: | 66 | KGQHYTPDELGKLTALLVGGSGGADLTGAGTGTLIIQKWQDDRMNTDFFNYLPSNYWYQA | 125 |
| Query: | 147 | EELSDKAVPFLLFNMSIRGINGVVVHGDSLTRQVKNIYFLQNTKDDMLSFSDINVMPRTQ | 206 |
| | | ELSD+A+ FL+ +IRG+NGVV+HGD+L VK +YF+QN+ ++ + FS+INV+P ++ | |
| Sbjct: | 126 | LELSDEAISFLIHAFAIRGMNGVVIHGDALEMAVKQVYFIQNSANNPIGFSEINVIPHSK | 185 |
| Query: | 207 | DIEREFNVKEWIGDGIEHIENPLIEWI | 233 |
| | | D + EW IEHIE+ +WI | |
| Sbjct: | 186 | DAMEFLGIHEWTEQAIEHIESKFPDWI | 212 |

[13580] Based on this analysis, it was predicted that this GAS-specific protein and its epitopes, could be useful antigens for vaccines or diagnostics.

### EXAMPLE 2569

[13581] A DNA sequence (GASx674) was identified in S. pyogenes <SEQ ID 7637> which encodes the amino acid sequence <SEQ ID 7638>. Analysis of this protein sequence reveals the following:

| Possible site: 51 | | | | |
|---|---|---|---|---|
| >>> Seems to have no N-terminal signal sequence | | | | |
| | INTEGRAL | Likelihood = −0.00 | Transmembrane | 122-138 (122-138) |

```
----- Final Results -----
                              bacterial membrane --- Certainty = 0.1001(Affirmative) < succ>
                                bacterial outside --- Certainty = 0.0000(Not Clear) < succ>
                            bacterial cytoplasm --- Certainty = 0.0000(Not Clear) < succ>
```

[13582] No corresponding DNA sequence was identified in S. agalactiae.

[13583] The protein has homology with the following sequences in the GENPEPT database:

| >GP: AAF63071 GB: AF158600 gp137 [Streptococcus thermophilus | | | |
|---|---|---|---|
| bacteriophage Sfi11] | | | |
| Identities = 66/135 (48%), Positives = 89/135 (65%), Gaps = 2/135 (1%) | | | |
| Query: | 5 | PEIDIQKTKSNAKRKLREYPRWRRIANDVDTQKVTATYSFEPRQSHGVPSKPVERLALNR | 64 |
| | | PEID + T KRKLREYPRWR IA+D QK+T ++F PR G +KPVE +A+ R | |
| Sbjct: | 4 | PEIDEKATLKRCKRKLREYPRWREIAHDSAEQKITQEFTFMPRG--GGVNKPVENIAVRR | 61 |
| Query: | 65 | VSAEQELDAIEQAVSMILEPERRRILYDKYLAPYKKADKVIYTELCMSESFYYDTLDIAL | 124 |
| | | V A EL+AIEQAV+ + P+ RRIL +KYLA K + I + + + + L+ ++ | |
| Sbjct: | 62 | VDALNELEAIEQAVNGLYRPDYRRILIEKYLAYPPKPNWQIAQSIGFERTAFQELLNNSI | 121 |
| Query: | 125 | LAFAELYREGVLLVE | 139 |
| | | LAFAELYR+G L+VE | |
| Sbjct: | 122 | LAFAELYRDGRLIVE | 136 |

[13584] Based on this analysis, it was predicted that this GAS-specific protein and its epitopes, could be useful antigens for vaccines or diagnostics.

### EXAMPLE 2570

[13585] A DNA sequence (GASx675) was identified in S. pyogenes <SEQ ID 7639> which encodes the amino acid sequence <SEQ ID 7640>. Analysis of this protein sequence reveals the following:

```
Possible site: 41
>>> Seems to have no N-terminal signal sequence
----- Final Results -----
                            bacterial cytoplasm --- Certainty = 0.1865(Affirmative) < succ>
                              bacterial membrane --- Certainty = 0.0000(Not Clear) < succ>
                                bacterial outside --- Certainty = 0.0000(Not Clear) < succ>
```

[13586] No corresponding DNA sequence was identified in S. agalactiae.

[13587] The protein has no significant homology with any sequences in the GENPEPT database.

[13588] Based on this analysis, it was predicted that this GAS-specific protein and its epitopes, could be useful antigens for vaccines or diagnostics.

### EXAMPLE 2571

[13589] A DNA sequence (GASx676) was identified in S. pyogenes <SEQ ID 7641> which encodes the amino acid sequence <SEQ ID 7642>. Analysis of this protein sequence reveals the following:

```
Possible site: 31
>>> Seems to have no N-terminal signal sequence
----- Final Results -----
                            bacterial cytoplasm --- Certainty = 0.4870(Affirmative) < succ>
                              bacterial membrane --- Certainty = 0.0000(Not Clear) < succ>
                                bacterial outside --- Certainty = 0.0000(Not Clear) < succ>
```

[13590] No corresponding DNA sequence was identified in S. agalactiae.

[13591] The protein has homology with the following sequences in the GENPEPT database:

| >GP:BAB07254 GB:AP001519 unknown [Bacillus halodurans] | | | |
|---|---|---|---|
| Identities = 194/451 (43%), Positives = 262/451 (58%), Gaps = 69/451 (15%) | | | |
| Query: | 1 | MEFVDKKLSEITPYKNNPRNNDEAVGPVAE----SIKEFGFKVPIVV-DKNGEIVNGHTR | 55 |
| | | + V+KK+ ++ P + NPR + + P E SI+EFG PIV ++ G +V GH R | |
| Sbjct: | 3 | IRIVNKKIDDLVPAEYNPRLDLQPGDPEYEKLKRSIEEFGLVEPIVFNERTGRVVGGHQR | 62 |
| Query: | 56 | YKAAQKLGLETVPVIVADDLSEEQIKAFRLADNKV-GEIAVWDLDLLNEELNDILDLDMS | 114 |
| | | K ++LG E VPV V D L + KA +A NK+ G+ + L L EEL+ L+D++ | |
| Sbjct: | 63 | LKILRELGWEEVPVSVVD-LDDHHEKALNVALNKIEGDWDNFKLKELLEELDSGL-IDVT | 120 |
| Query: | 115 | AFGFDVLDNLDDL-----IEDEKDL--DDF----TGTVPDEPKSKLGDIYQLGSHKLMCG | 163 |
| | | GFD + ++DL +EDE ++ DDF +EP +K GD++ LG H L+ G | |
| Sbjct: | 121 | LTGFDE-EEIEDLMTQFFVEDENEIKEDDFDPDEVAEEIEEPITKPGDLWHLGRHFLLVG | 179 |
| Query: | 164 | DSTNGADVKKLMNGELADLLLTDPPYNVAYEGKTKDSLTIKNDSMDNDSFRQFLVNAFSS | 223 |
| | | DST DVK+LM E AD++ TDPPYNV YEG T + IKND+M++ F QFL +AF + | |
| Sbjct: | 180 | DSTKIEDVKRLMGNEKADMIFTDPPYNVDYEGAT--GMKIKNDNMEDSEFYQFLFDAFVA | 237 |
| Query: | 224 | ANEVMKPGAVFYIWHADSEGYNFRGACFDIGWTVRQCLIWNKNSMVLGRQDYHWKHEPCL | 283 |
| | | +V K G Y+ HADSEG FR A D G+ ++QCLIW KNS+VLGRQDYHW+HEP L | |
| Sbjct: | 238 | MYQVTKEGGPIYVCHADSEGLTFRKAFQDSGFLLKQCLIWVKNSLVLGRQDYHWRHEPIL | 297 |
| Query: | 284 | YGWKDGAGHLWASDRKQTSVID-------------------------------------- | 305 |
| | | YGWK GA H W RKQ++VI+ | |
| Sbjct: | 298 | YGWKPGAAHKWYGGRKQSTVIEDPVDLAITPKVDHVLLTFNNGISSTVVKVPSYEIIHDG | 357 |
| Query: | 306 | ---------YEKPQRNGVHPTMKPVGLFDYQIKNNTKGSDIVLDLFGGSGTTLIACESNG | 356 |
| | | E+P+RN HPTMKP+ L I+N++K + VLD FGGSG+TLIACE G | |
| Sbjct: | 358 | SDEGMTTWRIERPKRNADHPTMKPIALCARAIQNSSKPGERVLDPFGGSGSTLIACEQTG | 417 |
| Query: | 357 | RHARLMEYDPKYVDVIIKRWEELTGESVIQL | 387 |
| | | R +MEYDP Y +VII+RWEE TG++ ++L | |
| Sbjct: | 418 | RICHMMEYDPVYAEVIIRRWEEWTGQNAVKL | 448 |

[13592] Based on this analysis, it was predicted that this GAS-specific protein and its epitopes, could be useful antigens for vaccines or diagnostics.

### EXAMPLE 2572

[13593] A DNA sequence (GASx677) was identified in S. pyogenes <SEQ ID 7643> which encodes the amino acid sequence <SEQ ID 7644>. Analysis of this protein sequence reveals the following:

```
Possible site: 54
>>> Seems to have no N-terminal signal sequence
----- Final Results -----
                            bacterial cytoplasm --- Certainty = 0.4744(Affirmative) < succ>
                              bacterial membrane --- Certainty = 0.0000(Not Clear) < succ>
                                bacterial outside --- Certainty = 0.0000(Not Clear) < succ>
```

[13594] No corresponding DNA sequence was identified in S. agalactiae.

[13595] The protein has no significant homology with any sequences in the GENPEPT database.

[13596] Based on this analysis, it was predicted that this GAS-specific protein and its epitopes, could be useful antigens for vaccines or diagnostics.

### EXAMPLE 2573

[13597] A DNA sequence (GASx678) was identified in S. pyogenes <SEQ ID 7645> which encodes the amino acid sequence <SEQ ID 7646>. Analysis of this protein sequence reveals the following:

```
Possible site: 31
>>> Seems to have no N-terminal signal sequence
      INTEGRAL Likelihood = −0.27 Transmembrane 90 − 106 (90 − 106)
----- Final Results -----
                            bacterial membrane --- Certainty = 0.1107(Affirmative) < succ>
                              bacterial outside --- Certainty = 0.0000(Not Clear) < succ>
                          bacterial cytoplasm --- Certainty = 0.0000(Not Clear) < succ>
```

[13598] No corresponding DNA sequence was identified in S. agalactiae.

[13599] The protein has no significant homology with any sequences in the GENPEPT database.

[13600] Based on this analysis, it was predicted that this GAS-specific protein and its epitopes, could be useful antigens for vaccines or diagnostics.

### EXAMPLE 2574

[13601] A DNA sequence (GASx679) was identified in S. pyogenes <SEQ ID 7647> which encodes the amino acid sequence <SEQ ID 7648>. Analysis of this protein sequence reveals the following:

```
Possible site: 19
>>> Seems to have no N-terminal signal sequence
----- Final Results -----
                            bacterial cytoplasm --- Certainty = 0.3408(Affirmative) < succ>
                              bacterial membrane --- Certainty = 0.0000(Not Clear) < succ>
                                bacterial outside --- Certainty = 0.0000(Not Clear) < succ>
```

[13602] No corresponding DNA sequence was identified in S. agalactiae.

[13603] The protein has homology with the following sequences in the GENPEPT database:

| >GP:CAA66734 GB:X98106 minor capsid protein [Bacteriophage phigle] | | | |
|---|---|---|---|
| Identities = 213/494 (43%), Positives = 323/494 (65%), Gaps = 19/494 (3%) | | | |
| Query: | 1 | MGVIQKIKNLVTRSKYVM-TTQSLTNITDHPKIAISKLEYDRITTNLKYYKSDWDSVLYL | 59 |
| | | MG+IQ+IK+L + T SL+ ITD P+I+I EY RI T+L YY + Y | |
| Sbjct: | 1 | MGLIQRIKDLFWKGAAATGVTGSLSKITDDPRISIDPDEYVRIQTDLDYYSDKLQYIHYQ | 60 |
| Query: | 60 | NTDGETKKRDLNHLPIARTAAKKIASLVFNEQAEIKV-DDDAANEFISETLKNDRFNKNF | 118 |
| | | +DG KKR N + +A+TAA++IAS+VFNE+AEI V D++ A++F++ L+++ F F | |
| Sbjct: | 61 | ASDGIKKKRLKNTINMAKTAARRIASVVFNEKAEIHVKDNNEADKFLNDVLEDNDFKNKF | 120 |
| Query: | 119 | ERYLESCLALGGLAMRPYVDGDKVRVAFVQAPVFLPLQSNTQDVSSAAVVIKSVKTINGK | 178 |
| | | E LE +ALGG AMRPY+DG+ +++A+V+A F PLQSNT D+S AA+ ++ +T + + | |
| Sbjct: | 121 | EEALEKGVALGGFAMRPYIDGNHIKIAWVRADQFYPLQSNTNDISEAAIASRTQRTESNQ | 180 |
| Query: | 179 | EVYYTLIEFHEWQSSDDYVISNELYRSDDKAKVGSRVPLS--EVYKDLKDEAKVTDVTRP | 236 |
| | | YYTL+EFH+WQ + Y I+NELY+SD VG++VPLS VYK+L + ++ + RP | |
| Sbjct: | 181 | TKYYTLLEFHQWQDNGSYQITNELYKSDSPDIVGNQVPLSTLPVYKELAPQVTISGLQRP | 240 |
| Query: | 237 | IFTYLKTPGMNNKDINSPLGLSIFDNAKTTIDFINTTYDEFMWEVKMGQRRVAVPESLTA | 296 |
| | | +F Y KTPG NN +I SPLGL + DNAK +D IN T+D+F+WE+++GQ+ +AV + | |
| Sbjct: | 241 | LFAYFKTPGANNINIESPLGLGVVDNAKHVLDDINDTHDQFIWEIRLGQKHIAVQPGMLR | 300 |
| Query: | 297 | LTVRTADGDVVPRPRFESDQNVYIRMGGRDLDSSAIQDLTTPIRADDYIKAINEGLSLFE | 356 |
| | | D +P F+++QNVY+ + D + ++D+TTPIR Y AI+ + FE | |
| Sbjt: | 301 | F-------DDEHKPTFDTEQNVYVGVLSDDNNGLGVKDMTTPIRTVQYKDAIDHFIKEFE | 353 |
| Query: | 357 | MQIGVSAGLFSFDGKSMKTATEIVSENSDTYQMRNSIVTLVEQSLKELVISIFEIAKAYD | 416 |
| | | +QIG+S G FS+ +KTATE+VS NS TYQ R+S +T+VE+++ EL SIFE+A A | |
| Sbjct: | 354 | VQIGLSTGTFSYSNDGVKTATEVVSNNSMTYQTRSSYLTMVEKAIDELCQSIFELANAGA | 413 |
| Query: | 417 | LYQSEVP--SMDNISISL------DDGVFTDRDAELDYWIKVVNAGFGTREMAIQKVLNV | 468 |
| | | L+ P ++D+ S L DDGVF ++D +L+ KV+ G +++ +Q+ + | |
| Sbjct: | 414 | LFDDGKPLFTLDSASQPLDIECHFDDGVFVNKDKQLEEDAKVLAIGALSKQTFLQRNYGM | 473 |
| Query: | 469 | TEEKAQEIAAEINT | 482 |
| | | T+E+A E A+I + | |
| Sbjct: | 474 | TDEQAAEELAKIQS | 487 |

[13604] Based on this analysis, it was predicted that this GAS-specific protein and its epitopes, could be useful antigens for vaccines or diagnostics.

### EXAMPLE 2575

[13605] A DNA sequence (GASx680) was identified in S. pyogenes <SEQ ID 7649> which encodes the amino acid sequence <SEQ ID 7650>. Analysis of this protein sequence reveals the following:

```
Possible site: 48
>>> Seems to have no N-terminal signal sequence
----- Final Results -----
                            bacterial cytoplasm --- Certainty = 0.1840(Affirmative) < succ>
                              bacterial membrane --- Certainty = 0.0000(Not Clear) < succ>
                                bacterial outside --- Certainty = 0.0000(Not Clear) < succ>
```

[13606] No corresponding DNA sequence was identified in S. agalactiae.

[13607] The protein has homology with the following sequences in the GENPEPT database:

| >GP:CAB53790 GB:AJ242593 gp4 [Bacteriophage A118] | | | |
|---|---|---|---|
| Identities = 114/385 (29%), Positives = 187/385 (47%), Gaps = 23/385 (5%) | | | |
| Query: | 8 | LNDEQLLLEASQLSDMYHQLTLDLFDQVIERIKARGSASLADNPYLWQANKLHDVGLLNA | 67 |
| | | L QL L + D+Y L +LF ++ R+K + + S AND WQ KL+ V L+ | |
| Sbjct: | 3 | LTPRQLDLFVQPIVDVYTGLENELFTLIVRRLKTKKNIS-ADNVLAWQIEKLNQVHALDQ | 61 |
| Query: | 68 | DNIKLIAKYSGIAEAQLRYIIKNEGFKIYKNTSEQLEEALGRESGV-------NSTIQDD | 120 |
| | | I+ I+K SG++ +L ++K+ G+ K + E+G TI D | |
| Sbjct: | 62 | QMIERISKASGVSAKKLFSVVKDAGYSDLKQVDNYFSKLA--EAGAVLPLVSDGQTIVDK | 119 |
| Query: | 121 | LSNYARQAIDDVHNLTNTTLPFSVIGAYQGIIQDAVAGVVTGLKTPDQAINQTVIKWFKK | 180 |
| | | + + + + N T+ Y II + V+ GLKT QA+ +TV K+ + | |
| Sbjct: | 120 | VMRSYFKLAESNYKRINQTMLSQARQIYSDIIHETTQSVLAGLKTHRQALAETVTKFAEN | 179 |
| Query: | 181 | GFYGFTDKAGRKWRADSYARTVINTTTWRVFNEAKEAPAREFGIDTFYYSKKATAREMCA | 240 |
| | | G DKA ++W ++Y RTV TT V+N ++ E+G+D S+ AR C+ | |
| Sbjct: | 180 | GVPALVDKANKRWTPEAYVRTVTRTTVNSVYNSVEDERMNEYGVDLVRISQHVGARPTCS | 239 |
| Query: | 241 | PLQHQIV---TTGEAREEGGIKILALSD----YGHGEPDGCLGINCKHTKTPFVVGVNSK | 293 |
| | | +Q +++ + E R + G K +++ YG+G DG G NC+H + F+ G+N | |
| Sbjct: | 240 | IVQGKVICLLSVEETRSKYGNKYMSIYSPELRYGYG--DGIFGCNCRHHRFAFIEGINIA | 297 |
| Query: | 294 | PELPEHLKNITPAQAKANANAQAKQRAIERSIRKSKELLHVAKQLGDKELIRQYQSDVRS | 353 |
| | | P+ E I + K +QR +ER IR +K L A++LGD+ +++ + VR+ | |
| Sbjct: | 298 | PDESE---LIDEEENKRVYALSQQQRLMERDIRAAKRKLSAAEELGDELAVKKAKQAVRT | 354 |
| Query: | 354 | KQDALNYLINNNAFLHRNQAREKRY | 378 |
| | | KQ L + + L R +REK Y | |
| Sbjct: | 355 | KQSKLRAFVKTHN-LTRQYSREKVY | 378 |

[13608] Based on this analysis, it was predicted that this GAS-specific protein and its epitopes, could be useful antigens for vaccines or diagnostics.

### EXAMPLE 2576

[13609] A DNA sequence (GASx681) was identified in S. pyogenes <SEQ ID 7651> which encodes the amino acid sequence <SEQ ID 7652>. Analysis of this protein sequence reveals the following:

```
Possible site: 31
>>> Seems to have no N-terminal signal sequence
----- Final Results -----
                            bacterial cytoplasm --- Certainty = 0.2756(Affirmative) < succ>
                              bacterial membrane --- Certainty = 0.0000(Not Clear) < succ>
                                bacterial outside --- Certainty = 0.0000(Not Clear) < succ>
```

[13610] No corresponding DNA sequence was identified in S. agalactiae.

[13611] The protein has no significant homology with any sequences in the GENPEPT database.

[13612] Based on this analysis, it was predicted that this GAS-specific protein and its epitopes, could be useful antigens for vaccines or diagnostics.

### EXAMPLE 2577

[13613] A DNA sequence (GASx682) was identified in S. pyogenes <SEQ ID 7653> which encodes the amino acid sequence <SEQ ID 7654>:

TLDNQSVIKAIGDTVDYIKKNYKRKWGK

[13614] Analysis of this protein sequence reveals the following:

```
Possible site: 25
>>> Seems to have a cleavable N-term signal seq.
----- Final Results -----
                            bacterial outside --- Certainty = 0.3000(Affirmative) < succ>
                          bacterial membrane --- Certainty = 0.0000(Not Clear) < succ>
                        bacterial cytoplasm --- Certainty = 0.0000(Not Clear) < succ>
```

[13615] No corresponding DNA sequence was identified in S. agalactiae.

[13616] The protein has no significant homology with any sequences in the GENPEPT database.

[13617] Based on this analysis, it was predicted that this GAS-specific protein and its epitopes, could be useful antigens for vaccines or diagnostics.

### EXAMPLE 2578

[13618] A DNA sequence (GASx683) was identified in S. pyogenes <SEQ ID 7655> which encodes the amino acid sequence <SEQ ID 7656>. Analysis of this protein sequence reveals the following:

```
Possible site: 60
>>> Seems to have no N-terminal signal sequence
----- Final Results -----
                            bacterial cytoplasm --- Certainty = 0.5288(Affirmative) < succ>
                              bacterial membrane --- Certainty = 0.0000(Not Clear) < succ>
                                bacterial outside --- Certainty = 0.0000(Not Clear) < succ>
```

[13619] No corresponding DNA sequence was identified in S. agalactiae.

[13620] The protein has no significant homology with any sequences in the GENPEPT database.

[13621] Based on this analysis, it was predicted that this GAS-specific protein and its epitopes, could be useful antigens for vaccines or diagnostics.

### EXAMPLE 2579

[13622] A DNA sequence (GASx685) was identified in S. pyogenes <SEQ ID 7657> which encodes the amino acid sequence <SEQ ID 7658>:

GATEVGANRVVSGVYGEVLGVQIVRSRKCPKGTAYMVRKGALRIMLKRNT
MVETDRDITKAINQIVANKHYGVYLYKAEKAVKITLRDAAKK

[13623] Analysis of this protein sequence reveals the following:

```
Possible site: 18
>>> Seems to have no N-terminal signal sequence
----- Final Results -----
                            bacterial cytoplasm --- Certainty = 0.1750(Affirmative) < succ>
                              bacterial membrane --- Certainty = 0.0000(Not Clear) < succ>
                                bacterial outside --- Certainty = 0.0000(Not Clear) < succ>
```

[13624] No corresponding DNA sequence was identified in S. agalactiae.

[13625] The protein has homology with the following sequences in the GENPEPT database:

| >GP:CAA59185 GB:X84706 major head protein [Bacteriophage B1] | | | |
|---|---|---|---|
| Identities = 138/270 (51%), Positives = 186/270 (68%), Gaps = 6/270 (2%) | | | |
| Query: | 1 | MAVGTTKMAQMLDPEVLADMIDAEVGKAIRFAPLAEVDTTLEGQPGTTLTVPK-WDYIGD | 59 |
| | | M+ T +A +++PEVLA ++ E+ KA+RFAPLA+VDTTL+GQPG TL P + YIGD | |
| Sbjct: | 1 | MSKQKTTLADLVNPEVLATIVSYELNKALRFAPLAQVDTTLQGQPGNTLKFPDPFTYIGD | 60 |
| Query: | 60 | AEDVAEGEAIPMTQLGFKKTTMTIKKAGKGVEITDEAILSGYGDPVGQAAKQIVEAIDHK | 119 |
| | | A DVAEG I + ++G ++TIKKA KG EITDEA LSGYGDP+G++ KQ+ ++ +K | |
| Sbjct: | 61 | AADVAEGGEISLDKIGTTTKSVTIKKAAKGTEITDEAALSGYGDPIGESNKQLGLSLANK | 120 |
| Query: | 120 | VDADVLDALSKSTQTVEATATVDGVSKALDIFNDEDDAETVIVMNPADASTLRLDAAKEW | 179 |
| | | VD D+L A ++QTV A VDGV ALDIFNDED V+++NP DA+ +R DA + | |
| Sbjct: | 121 | VDDDLLSAAKTTSQTVSTKANVDGVQAALDIFNDEDAQAYVLIVNPKDAAKIRKDANAKN | 180 |
| Query: | 180 | LGATEVGANRVVSGVYGEVLGVQIVRSRKCPKGTAYMVR----KGALRIMLKRNTMVETD | 235 |
| | | +G +EVGAN +++G Y +VLG QIVRS+K +G+A M + AL+++LKR VETD | |
| Sbjct: | 181 | IG-SEVGANALINGTYADVLGAQIVRSKKLAEGSALMFKIVSNSPALKLVLKRGVQVETD | 239 |
| Query: | 236 | RDITKAINQIVANKHYGVYLYKAEKAVKIT | 265 |
| | | RDI I A++HY YLY K V IT | |
| Sbjct: | 240 | RDIVTKTTVITADEHYAAYLYDLTKVVNIT | 269 |

[13626] Based on this analysis, it was predicted that this GAS-specific protein and its epitopes, could be useful antigens for vaccines or diagnostics.

### EXAMPLE 2580

[13627] A DNA sequence (GASx686) was identified in S. pyogenes <SEQ ID 7659> which encodes the amino acid sequence <SEQ ID 7660>. Analysis of this protein sequence reveals the following:

```
Possible site: 35
>>> Seems to have an uncleavable N-term signal seq
----- Final Results -----
                            bacterial membrane --- Certainty = 0.0000(Not Clear) < succ>
                              bacterial outside --- Certainty = 0.0000(Not Clear) < succ>
                          bacterial cytoplasm --- Certainty = 0.0000(Not Clear) < succ>
```

[13628] No corresponding DNA sequence was identified in S. agalactiae.

[13629] The protein has no significant homology with any sequences in the GENPEPT database.

[13630] Based on this analysis, it was predicted that this GAS-specific protein and its epitopes, could be useful antigens for vaccines or diagnostics.

### EXAMPLE 2581

[13631] A DNA sequence (GASx687) was identified in S. pyogenes <SEQ ID 7661> which encodes the amino acid sequence <SEQ ID 7662>. Analysis of this protein sequence reveals the following:

```
Possible site: 54
>>> Seems to have no N-terminal signal sequence
----- Final Results -----
                            bacterial cytoplasm --- Certainty = 0.2942(Affirmative) < succ>
                              bacterial membrane --- Certainty = 0.0000(Not Clear) < succ>
                                bacterial outside --- Certainty = 0.0000(Not Clear) < succ>
```

[13632] No corresponding DNA sequence was identified in S. agalactiae.

[13633] The protein has no significant homology with any sequences in the GENPEPT database.

[13634] Based on this analysis, it was predicted that this GAS-specific protein and its epitopes, could be useful antigens for vaccines or diagnostics.

### EXAMPLE 2582

[13635] A DNA sequence (GASx688) was identified in S. pyogenes <SEQ ID 7663> which encodes the amino acid sequence <SEQ ID 7664>. Analysis of this protein sequence reveals the following:

```
Possible site: 21
>>> Seems to have no N-terminal signal sequence
----- Final Results -----
                            bacterial cytoplasm --- Certainty = 0.2844(Affirmative) < succ>
                              bacterial membrane --- Certainty = 0.0000(Not Clear) < succ>
                                bacterial outside --- Certainty = 0.0000(Not Clear) < succ>
```

[13636] No corresponding DNA sequence was identified in S. agalactiae.

[13637] The protein has homology with the following sequences in the GENPEPT database:

| >GP:AAC00538 GB:L02496 unknown protein [Bacteriophage LL-H] | | | |
|---|---|---|---|
| Identities = 35/86 (40%), Positives = 48/86 (55%), Gaps = 6/86 (6%) | | | |
| Query: | 24 | KLIMNNQVMMSMNPYVPYRDGALRGSSRANSVGVTWSGPHARAQFYGGAYNKYKSFKFKK | 83 |
| | | +L + NQ+ M YVP R G LR S N G+ ++ +ARAQFYG + + | |
| Sbjct: | 20 | RLQVLNQMHQDMEQYVPKRAGFLRSQSFVNDTGIHYTAKYARAQFYGFV----NGHRVRN | 75 |
| Query: | 84 | YTTPGTGKRWDKRALANATIVKDWEK | 109 |
| | | Y+TPGTG+RWD + A A DW+K | |
| Sbjct: | 76 | YSTPGTGRRWDLK--AKAVYKADWQK | 99 |

[13638] Based on this analysis, it was predicted that this GAS-specific protein and its epitopes, could be useful antigens for vaccines or diagnostics.

### EXAMPLE 2583

[13639] A DNA sequence (GASx689) was identified in S. pyogenes <SEQ ID 7665> which encodes the amino acid sequence <SEQ ID 7666>. Analysis of this protein sequence reveals the following:

```
Possible site: 45
>>> Seems to have no N-terminal signal sequence
----- Final Results -----
                            bacterial cytoplasm --- Certainty = 0.2892(Affirmative) < succ>
                              bacterial membrane --- Certainty = 0.0000(Not Clear) < succ>
                                bacterial outside --- Certainty = 0.0000(Not Clear) < succ>
```

[13640] No corresponding DNA sequence was identified in S. agalactiae.

[13641] The protein has homology with the following sequences in the GENPEPT database:

| >GP:CAA66741 GB:X98106 minor capsid protein [Bacteriophage phigle] | | | |
|---|---|---|---|
| Identities = 36/109 (33%), Positives = 64/109 (58%), Gaps = 2/109 (1%) | | | |
| Query: | 17 | DLGIKPRLDYLTRQEDLAIYPMPGGKVNNEYMDGTREISLPFEIAIKTKNQELASTVMWT | 76 |
| | | +L +K L YLT + L++YP+PG +V +E G ++ + +E+ ++TKNQ+ A+T +W | |
| Sbjct: | 16 | NLPMKCTLGYLTAADSLSLYPLPGSRVLDEDYAGNQQWQMNYEVGMRTKNQQQANTTLWL | 75 |
| Query: | 77 | INSALSNFDL-KLPSLNHSYTFISLDVE-KPFLNDLSDQGFYIYVLDIT | 123 |
| | | ++ AL L S N S+ F SL + +P +++ QG+ Y L + | |
| Sbjct: | 76 | VSQALDVLTADDLVSSNGSFEFESLTINGQPSISEQDTQGYSTYQLSFS | 124 |

[13642] Based on this analysis, it was predicted that this GAS-specific protein and its epitopes, could be useful antigens for vaccines or diagnostics.

### EXAMPLE 2584

[13643] A DNA sequence (GASx690) was identified in S. pyogenes <SEQ ID 7667> which encodes the amino acid sequence <SEQ ID 7668>. Analysis of this protein sequence reveals the following:

```
Possible site: 18
>>> Seems to have no N-terminal signal sequence
----- Final Results -----
                            bacterial cytoplasm --- Certainty = 0.1626(Affirmative) < succ>
                              bacterial membrane --- Certainty = 0.0000(Not Clear) < succ>
                                bacterial outside --- Certainty = 0.0000(Not Clear) < succ>
```

[13644] No corresponding DNA sequence was identified in S. agalactiae.

[13645] The protein has homology with the following sequences in the GENPEPT database:

| >GP:CAB53798 GB:AJ242593 major tail shaft protein [Bacteriophage A118] | | | |
|---|---|---|---|
| Identities = 54/133 (40%), Positives = 77/133 (57%), Gaps = 9/133 (6%) | | | |
| Query: | 1 | MRQKNALRGHFIAPYVKGEEKTEVTKEKLLELARWIKDISDDTDEKTEDEAYYDGDGTEE | 60 |
| | | MR KNA + +A V G + + + L++WI ++SDD + TE++ YDGDG E+ | |
| Sbjct: | 1 | MRIKNAKTKYSVAEIVAGAGEPDWKR-----LSKWITNVSDDGSDNTEEQGDYDGDGNEK | 55 |
| Query: | 61 | TTVVGVKGAYTFEGTYDPEDKAQAHIASLKYKLGDERKVWHLIVSADGKTQWLGVATVTE | 120 |
| | | T V+G AYTFEGT+D ED+AQ I + K + + R + I D +T +G ATV+E | |
| Sbjct: | 56 | TVVLGYSEAYTFEGTHDREDEAQNLIVA-KRRTPENRSIMFKIEIPDTETA-IGKATVSE | 113 |
| Query: | 121 | I--IAGSGAAARF | 131 |
| | | I AG G A F | |
| Sbjct: | 114 | IKGSAGGGDATEF | 126 |

[13646] Based on this analysis, it was predicted that this GAS-specific protein and its epitopes, could be useful antigens for vaccines or diagnostics.

### EXAMPLE 2585

[13647] A DNA sequence (GASx691) was identified in S. pyogenes <SEQ ID 7669> which encodes the amino acid sequence <SEQ ID 7670>. Analysis of this protein sequence reveals the following:

```
Possible site: 17
>>> Seems to have no N-terminal signal sequence
----- Final Results -----
                            bacterial cytoplasm --- Certainty = 0.3521(Affirmative) < succ>
                              bacterial membrane --- Certainty = 0.0000(Not Clear) < succ>
                                bacterial outside --- Certainty = 0.0000(Not Clear) < succ>
```

[13648] No corresponding DNA sequence was identified in S. agalactiae.

[13649] The protein has no significant homology with any sequences in the GENPEPT database.

[13650] Based on this analysis, it was predicted that this GAS-specific protein and its epitopes, could be useful antigens for vaccines or diagnostics.

### EXAMPLE 2586

[13651] A DNA sequence (GASx692) was identified in S. pyogenes <SEQ ID 7671> which encodes the amino acid sequence <SEQ ID 7672>. Analysis of this protein sequence reveals the following:

```
Possible site: 61
>>> Seems to have no N-terminal signal sequence
----- Final Results -----
                            bacterial cytoplasm --- Certainty = 0.3438(Affirmative) < succ>
                              bacterial membrane --- Certainty = 0.0000(Not Clear) < succ>
                                bacterial outside --- Certainty = 0.0000(Not Clear) < succ>
```

[13652] No corresponding DNA sequence was identified in S. agalactiae.

[13653] The protein has homology with the following sequences in the GENPEPT database:

| >GP:CAB53801 GB:AJ242593 gp15 [Bacteriophage A118] | | | |
|---|---|---|---|
| Identities = 67/191 (35%), Positives = 110/191 (57%), Gaps = 17/191 (8%) | | | |
| Query: | 11 | FEFRGEIYPIDLSFNKVLDVFDVIDDDFLNEAEKCFLCLDILLDRTDLPFTYAVD----- | 65 |
| | | +E+ G+ Y +DL+F+ VL V D+ +D+ L++ + L +D+L D+P+ + + | |
| Sbjct: | 12 | YEYEGKEYKLDLAFDNVLRVIDLTEDNSLSDVFRANLAIDVLF-ADDMPWPRSNEEDEYA | 70 |
| Query: | 66 | -------LWVYIKTNFIDAERPEKPQLDIKGNPMPVVKEKEDNKKVI---DLSLDAEFIY | 115 |
| | | + + I TN+I E + DI GN MP D+ + I L+ DA++IY | |
| Sbjct: | 71 | NIEEKSLVLIDIFTNYIVKENDDGLLYDIDGNKMPSATNNNDDAEEIASYSLTQDADYIY | 130 |
| Query: | 116 | ASFRQAYQINLLKEQNRLSWIEFKALLNALPDDTVMQRIIAIRQWE-DDGEGSKKYRDNM | 174 |
| | | ASF Q Y I+LL + ++ W +F+ALL +L DDT ++ II IRQ E G+G++K R+ + | |
| Sbjct: | 131 | ASFLQDYNIDLLDSRGKMHWYKFRALLESLRDDTTIKTIIGIRQAELPSGKGTEKERNEL | 190 |
| Query: | 175 | RKLKAKYSLDE | 185 |
| | | KLK +Y L + | |
| Sbjct: | 191 | IKLKNRYKLKD | 201 |

[13654] Based on this analysis, it was predicted that this GAS-specific protein and its epitopes, could be useful antigens for vaccines or diagnostics.

### EXAMPLE 2587

[13655] A DNA sequence (GASx694) was identified in S. pyogenes <SEQ ID 7673> which encodes the amino acid sequence <SEQ ID 7674>. Analysis of this protein sequence reveals the following:

```
Possible site: 29
>>> Seems to have no N-terminal signal sequence
----- Final Results -----
                            bacterial cytoplasm --- Certainty = 0.4143(Affirmative) < succ>
                              bacterial membrane --- Certainty = 0.0000(Not Clear) < succ>
                                bacterial outside --- Certainty = 0.0000(Not Clear) < succ>
```

[13656] No corresponding DNA sequence was identified in S. agalactiae.

[13657] The protein has homology with the following sequences in the GENPEPT database:

| >GP:AAG18639 GB:AY007505 unknown [Streptococcus mitis] | | | |
|---|---|---|---|
| Identities = 48/157 (30%), Positives = 85/157 (53%), Gaps = 10/157 (6%) | | | |
| Query: | 86 | DLELSWEPDYIYKATHITPFSIKEVLRNFGRLKINFLIHPIKYLKTGKQEVPLVNG-GTL | 144 |
| | | +LE S+ P+ ++ A H S K + +LKI + P +Y KT E NG GT+ | |
| Sbjct: | 81 | ELEFSYHPESVFYA-HFLTASYKPFGNHAWQLKIKLNMQPFRYQKTVNPES--YNGPGTI | 137 |
| Query: | 145 | QNPGNVQAKPILKIKGTGNGILTINDFETGLENVQSELVIDMERHLVYKDVLSAWDNIVR | 204 |
| | | NPG + ++PI++++G G+ +TI ET NV+++ ID + +++ +A + | |
| Sbjct: | 138 | NNPGTIYSEPIIEVQGDGDVSITIGR-ETMYLNVKTKATIDCRQG--RQNIYNATGAVQN | 194 |
| Query: | 205 | TERHRMPLFDV--GQNKISWTGS-FTITAVPNWGVKV | 238 |
| | | T R R F++ G++ I++TG+ + PNW K+ | |
| Sbjct: | 195 | TLRKRGGFFEIPTGRSGITFTGNVLRLIIRPNWRYKI | 231 |

[13658] Based on this analysis, it was predicted that this GAS-specific protein and its epitopes, could be useful antigens for vaccines or diagnostics.

### EXAMPLE 2588

[13659] A DNA sequence (GASx695R) was identified in S. pyogenes <SEQ ID 7675> which encodes the amino acid sequence <SEQ ID 7676>. Analysis of this protein sequence reveals the following:

```
Possible site: 15
>>> Seems to have no N-terminal signal sequence
      INTEGRAL Likelihood = −2.60 Transmembrane 15 − 31 (15 − 31)
----- Final Results -----
                            bacterial membrane --- Certainty = 0.2041(Affirmative) < succ>
                              bacterial outside --- Certainty = 0.0000(Not Clear) < succ>
                          bacterial cytoplasm --- Certainty = 0.0000(Not Clear) < succ>
```

[13660] No corresponding DNA sequence was identified in S. agalactiae.

[13661] The protein has no significant homology with any sequences in the GENPEPT database.

[13662] Based on this analysis, it was predicted that this GAS-specific protein and its epitopes, could be useful antigens for vaccines or diagnostics.

### EXAMPLE 2589

[13663] A DNA sequence (GASx697) was identified in S. pyogenes <SEQ ID 7677> which encodes the amino acid sequence <SEQ ID 7678>. Analysis of this protein sequence reveals the following:

```
Possible site: 22
>>> Seems to have no N-terminal signal sequence
----- Final Results -----
                            bacterial cytoplasm --- Certainty = 0.3348(Affirmative) < succ>
                              bacterial membrane --- Certainty = 0.0000(Not Clear) < succ>
                                bacterial outside --- Certainty = 0.0000(Not Clear) < succ>
```

[13664] No corresponding DNA sequence was identified in S. agalactiae.

[13665] The protein has homology with the following sequences in the GENPEPT database:

| >GP:AAA86895 GB:U28144 hyaluronidase [Streptococcus pyogenes] | | | |
|---|---|---|---|
| Identities = 326/337 (96%), Positives = 329/337 (96%) | | | |
| Query: | 1 | MSENIPLRVQFKRMKAAEWARSDVILLESEIGFETDTGFARAGDGHNRFSDLGYISPLDY | 60 |
| | | MSENIPLRVQFKRMKAAEWARSDVILLESEIGFETDTGFARAGDGHNRFSDLGYISPLDY | |
| Sbjct: | 1 | MSENIPLRVQFKRMKAAEWARSDVILLESEIGFETDTGFARAGDGHNRFSDLGYISPLDY | 60 |
| Query: | 61 | NLLTNKPNIDGLATKVETAQKLQQKADKETVYTKAESKQELDKKLNLKGGVMTGQLKFKP | 120 |
| | | NLLTNKPNIDGLATKVETAQKLQQKADKETVYTKAESKQELDKKLNLKGGVMTGQLKFKP | |
| Sbjct: | 61 | NLLTNKPNIDGLATKVETAQKLQQKADKETVYTKAESKQELDKKLNLKGGVMTGQLKFKP | 120 |
| Query: | 121 | AATVAYSSSTGGAVNIDLSSTRGAGVVVYSDNDTSDGPLMSLRTGKETFNQSALFVDYKG | 180 |
| | | AATVAYSSSTGGAVNIDLSSTRGAGVVVYSDNDTSDGPLMSLRTGKETFNQSALFVDYKG | |
| Sbjct: | 121 | AATVAYSSSTGGAVNIDLSSTRGAGVVVYSDNDTSDGPLMSLRTGKETFNQSALFVDYKG | 180 |
| Query: | 181 | TTNAVNIAMRQPTTPNFSSALNITSGNENGSAMQLRGSEKALGTLKITHENPSIGADYDK | 240 |
| | | TTNAVNIAMR TTPNFSSALNITSGNENGSAMQLRGSEKALGTLKITHENPSIGADYDK | |
| Sbjct: | 181 | TTNAVNIAMRHATTPNFSSALNITSGNENGSAMQLRGSEKALGTLKITHENPSIGADYDK | 240 |
| Query: | 241 | NAAALSIDIVKKTNGAGTAAQGIYINSTSGTTGKLLRIRNLSDDKFYVKSDGGFYAKETS | 300 |
| | | NAA + + K+ NGAGTAAQGIYINSTSGTTGKLLRIRNLSDDKFYVKSDGGFYAKETS | |
| Sbjct: | 241 | NAARYPLILSKRQNGAGTAAQGIYINSTSGTTGKLLRIRNLSDDKFYVKSDGGFYAKETS | 300 |
| Query: | 301 | QIDGNLKLKDPTANDHAATKAYVDKAISELKKLILKK | 337 |
| | | QIDGNLKLKDPTANDHAATKAYVDKAISELKKLILKK | |
| Sbjct: | 301 | QIDGNLKLKDPTANDHAATKAYVDKAISELKKLILKK | 337 |

[13666] Based on this analysis, it was predicted that this GAS-specific protein and its epitopes, could be useful antigens for vaccines or diagnostics.

### EXAMPLE 2590

[13667] A DNA sequence (GASx698) was identified in S. pyogenes <SEQ ID 7679> which encodes the amino acid sequence <SEQ ID 7680>. Analysis of this protein sequence reveals the following:

```
Possible site: 17
>>> Seems to have no N-terminal signal sequence
----- Final Results -----
                            bacterial cytoplasm --- Certainty = 0.4208(Affirmative) < succ>
                              bacterial membrane --- Certainty = 0.0000(Not Clear) < succ>
                                bacterial outside --- Certainty = 0.0000(Not Clear) < succ>
RGD motif 54-56
```

[13668] No corresponding DNA sequence was identified in S. agalactiae.

[13669] The protein has homology with the following sequences in the GENPEPT database:

| >GP: AAA98102 GB: M19348 ORF [Streptococcus pyogenes phage H4489A] | | | |
|---|---|---|---|
| Identities = 250/648 (38%), Positives = 351/648 (53%), Gaps = 75/648 (11%) | | | |
| Query: | 1 | MSRDPTLILDESNLVIGKDGRVHYTFTTEDDNPKVRLASKCLGTAHFNQLMIERGDQATS | 60 |
| | | MSRDPT ++E +L DGR + TF + + VRL S CLG +L +E + | |
| Sbjct: | 1 | MSRDPTYTINEHDLSFA-DGRFYVTFKADKSSETVRLNSSCLGNTIIKKLQVEDDNTMHD | 59 |
| Query: | 61 | YVAPVVVEGTGNPTGLFKDLKEISLELTDTANSQLWSKIKLTNRGMLQEYYDGKIKTEIV | 120 |
| | | +V P V T GL + +KE+ L+L D S LW KIK N+ ML EY + ++ + I | |
| Sbjct: | 60 | FVKPKVT--TQQAFGLAQQVKELDLQLKDP-KSDLWGKIKFNNKAMLVEYANKEMSSAIA | 116 |
| Query: | 121 | NSARGVATRISEDTDKKLALINDTIDGIRREYRDADRKLSASYQAGIEGLKATMANDKIG | 180 |
| | | SA + ++ D++ + T++GI++ + | |
| Sbjct: | 117 | QSAEQILLQVKSIDDERYSKFEQTLNGIKQTVKSES------------------------ | 152 |
| Query: | 181 | LQAEIKASAQGLSQKYDDELRKLSAKITTTSSGTTEAYESKLAGLRAEFTRSNQGTRTEL | 240 |
| | | ++++ L+ +D + L K + S T ++ S+L G + L | |
| Sbjct: | 153 | ----VESARTQLASMFDSRISGLDGKYSRLSQ-TIDSLSSRLD--------DGVGNYSTL | 199 |
| Query: | 241 | ESQISGLRAVQQSTASQISQEIRDREGAVSRVQQSLESYQRRMQDAEENYSSLTHTVRGL | 300 |
| | | ++SG I + + VSR+ Q+ + Q ++ +A +NYSSL+ TV+GL | |
| Sbjct: | 200 | SQKVSG-----------IDLRVSNAANDVSRLSQTAQGLQSQITNANQNYSSLSQTVQGL | 248 |
| Query: | 301 | QSDVGSPTGKIQSRLTQLAGQIEQRVTRDGVMSIISGAGDSIKLAIQKAGGINAKMSGNE | 360 |
| | | Q+ V SR+ QL+ I +VT+ V + I+ + D I AI+ + KM+G+E | |
| Sbjct: | 249 | QTTVRDNQSNATSRINQLSDLISTKVTKGDVETTIAQSYDKIAFAIRDKLPAS-KMTGSE | 307 |
| Query: | 361 | IIASINLNSYGVTIAGKHAILDGNTTVNGTFTTKIAEAIKIRADQIIAGTIDAARIRVIN | 420 |
| | | IISAINL+ GV I GK+I LDGN+ ++ K A + A +I G ++A+RI | |
| Sbjct: | 308 | IISAINLDRSGVKITGKNITLDGNSYISNA-VIKDAHIANMDAGKINTGYLNASRIAAEA | 366 |
| Query: | 421 | LNASSIVGLDANFIK--AKIGY---------------AIT---DLLEGKVIKARNGAMLI | 460 |
| | | + I A F K A GY A+T + G V+ A NGA | |
| Sbjct: | 367 | ITGDKIKMDYAFFNKLTANEGYFRTLFAKNIFTTSVQAVTTSASKITGGVLSATNGASRW | 426 |
| Query: | 461 | DLNTAKMDFNSDATINFNSKNNALVRKDGTHTAFVHFSNATPKGYTGSALYASIGITSSG | 520 |
| | | DLN+A +DFN DATINFNSKNNALVRK GT+TAFVHFSNATPKGY GSALYASIGITSSG | |
| Sbjct: | 427 | DLNSANIDFNRDATINFNSKNNALVRKSGTNTAFVHFSNATPKGYRGSALYASIGITSSG | 486 |
| Query: | 521 | DGVNSASSGRFAGLRSFRYATGYNHTAAVDQTEIYGDNVLVVDDFNITRGFKFRPDKMQK | 580 |
| | | DG++SASSGRF G+R FRYA G HTA VDQ EIYGD+++ DDFNI RGFK RP M K | |
| Sbjct: | 487 | DGIDSASSGRFCGVRFFRYAEGLQHTAKVDQAEIYGDDIVFSDDFNIDRGFKMRPSLMPK | 546 |
| Query: | 581 | MLDMNDLYAAVVALGRCWGHLANVGWNTAHSNFTSAVNRELNNYITKI | 628 |
| | | M+D+N +Y A++ALGRCW H N W+ + + SA+ E N +I + | |
| Sbjct: | 547 | MVDLNKMYQAILALGRCWLHANNTAWSW-NFDTRSAIIAEYNAHINNL | 593 |

[13670] Based on this analysis, it was predicted that this GAS-specific protein and its epitopes, could be useful antigens for vaccines or diagnostics.

### EXAMPLE 2591

[13671] A DNA sequence (GASx699) was identified in S. pyogenes <SEQ ID 7681> which encodes the amino acid sequence <SEQ ID 7682>. Analysis of this protein sequence reveals the following:

```
Possible site: 36
>>> Seems to have no N-terminal signal sequence
----- Final Results -----
                            bacterial cytoplasm --- Certainty = 0.3323(Affirmative) < succ>
                              bacterial membrane --- Certainty = 0.0000(Not Clear) < succ>
                                bacterial outside --- Certainty = 0.0000(Not Clear) < succ>
```

[13672] No corresponding DNA sequence was identified in S. agalactiae.

[13673] The protein has no significant homology with any sequences in the GENPEPT database.

[13674] Based on this analysis, it was predicted that this GAS-specific protein and its epitopes, could be useful antigens for vaccines or diagnostics.

### EXAMPLE 2592

[13675] A DNA sequence (GASx701) was identified in S. pyogenes <SEQ ID 7683> which encodes the amino acid sequence <SEQ ID 7684>. Analysis of this protein sequence reveals the following:

```
Possible site: 20
>>> Seems to have no N-terminal signal sequence
----- Final Results -----
                            bacterial cytoplasm --- Certainty = 0.1017(Affirmative) < succ>
                              bacterial membrane --- Certainty = 0.0000(Not Clear) < succ>
                                bacterial outside --- Certainty = 0.0000(Not Clear) < succ>
```

[13676] No corresponding DNA sequence was identified in S. agalactiae.

[13677] The protein has no significant homology with any sequences in the GENPEPT database.

[13678] Based on this analysis, it was predicted that this GAS-specific protein and its epitopes, could be useful antigens for vaccines or diagnostics.

### EXAMPLE 2593

[13679] A DNA sequence (GASx702) was identified in S. pyogenes <SEQ ID 7685> which encodes the amino acid sequence <SEQ ID 7686>. Analysis of this protein sequence reveals the following:

```
Possible site: 27
>>> Seems to have an uncleavable N-term signal seq
      INTEGRAL Likelihood = −3.03 Transmembrane 2-18 ( 1-23)
----- Final Results -----
                              bacterial membrane --- Certainty = 0.2211(Affirmative) < succ>
                                bacterial outside --- Certainty = 0.0000(Not Clear) < succ>
                            bacterial cytoplasm --- Certainty = 0.0000(Not Clear) < succ>
```

[13680] No corresponding DNA sequence was identified in S. agalactiae.

[13681] The protein has no significant homology with any sequences in the GENPEPT database.

[13682] Based on this analysis, it was predicted that this GAS-specific protein and its epitopes, could be useful antigens for vaccines or diagnostics.

### EXAMPLE 2594

[13683] A DNA sequence (GASx703) was identified in S. pyogenes <SEQ ID 7687> which encodes the amino acid sequence <SEQ ID 7688>. Analysis of this protein sequence reveals the following:

```
Possible site: 25
>>> Seems to have a cleavable N-term signal seq.
      INTEGRAL Likelihood = −3.45 Transmembrane 36-52 ( 36-55)
----- Final Results -----
                              bacterial membrane --- Certainty = 0.2381(Affirmative) < succ>
                                bacterial outside --- Certainty = 0.0000(Not Clear) < succ>
                            bacterial cytoplasm --- Certainty = 0.0000(Not Clear) < succ>
```

[13684] No corresponding DNA sequence was identified in S. agalactiae.

[13685] The protein has homology with the following sequences in the GENPEPT database:

| >GP: AAC39287 GB: AF115103 orf87 gp [Streptococcus thermophilus | | | |
|---|---|---|---|
| bacteriophage Sfi21] | | | |
| Identities = 43/73 (58%), Positives = 61/73 (82%) | | | |
| Query: | 1 | MINLKLRLQNKVTLMAILGAIFLLAQQLGIKLPSNIADIANTAVTLLVLLGVVTDPTTKG | 60 |
| | | MIN KLRLQNK TL+A++ A+FL+ QQ G+ +P+NI + NT V +LV+LG++TDPTTKG | |
| Sbjct: | 8 | MINFKLRLQNKATLVALISAVFLMLQQFGLHVPNNIQEGINTLVGILVILGIITDPTTKG | 67 |
| Query: | 61 | LSDSEQALTYHEP | 73 |
| | | ++DSE+AL+Y +P | |
| Sbjct: | 68 | IADSERALSYIQP | 80 |

[13686] Based on this analysis, it was predicted that this GAS-specific protein and its epitopes, could be useful antigens for vaccines or diagnostics.

### EXAMPLE 2595

[13687] A DNA sequence (GASx707R) was identified in S. pyogenes <SEQ ID 7689> which encodes the amino acid sequence <SEQ ID 7690>. Analysis of this protein sequence reveals the following:

```
Possible site: 22
>>> Seems to have an uncleavable N-term signal seq
      INTEGRAL Likelihood = −10.35 Transmembrane 9-25 ( 1-27)
----- Final Results -----
                              bacterial membrane --- Certainty = 0.5140(Affirmative) < succ>
                                bacterial outside --- Certainty = 0.0000(Not Clear) < succ>
                            bacterial cytoplasm --- Certainty = 0.0000(Not Clear) < succ>
```

[13688] No corresponding DNA sequence was identified in S. agalactiae.

[13689] Based on this analysis, it was predicted that this GAS-specific protein and its epitopes, could be useful antigens for vaccines or diagnostics.

### EXAMPLE 2596

[13690] A DNA sequence (GASx714R) was identified in S. pyogenes <SEQ ID 7691> which encodes the amino acid sequence <SEQ ID 7692>. Analysis of this protein sequence reveals the following:

```
Possible site: 26
>>> Seems to have no N-terminal signal sequence
----- Final Results -----
                            bacterial cytoplasm --- Certainty = 0.1401(Affirmative) < succ>
                              bacterial membrane --- Certainty = 0.0000(Not Clear) < succ>
                                bacterial outside --- Certainty = 0.0000(Not Clear) < succ>
```

[13691] No corresponding DNA sequence was identified in S. agalactiae.

[13692] The protein has no significant homology with any sequences in the GENPEPT database.

[13693] Based on this analysis, it was predicted that this GAS-specific protein and its epitopes, could be useful antigens for vaccines or diagnostics.

### EXAMPLE 2597

[13694] A DNA sequence (GASx715) was identified in S. pyogenes <SEQ ID 7693> which encodes the amino acid sequence <SEQ ID 7694>. Analysis of this protein sequence reveals the following:

```
Possible site: 20
>>> Seems to have no N-terminal signal sequence
----- Final Results -----
                            bacterial cytoplasm --- Certainty = 0.0417(Affirmative) < succ>
                              bacterial membrane --- Certainty = 0.0000(Not Clear) < succ>
                                bacterial outside --- Certainty = 0.0000(Not Clear) < succ>
```

[13695] No corresponding DNA sequence was identified in S. agalactiae.

[13696] The protein has no significant homology with any sequences in the GENPEPT database.

[13697] Based on this analysis, it was predicted that this GAS-specific protein and its epitopes, could be useful antigens for vaccines or diagnostics.

### EXAMPLE 2598

[13698] A DNA sequence (GASx726) was identified in S. pyogenes <SEQ ID 7695> which encodes the amino acid sequence <SEQ ID 7696>. Analysis of this protein sequence reveals the following:

```
Possible site: 33
>>> Seems to have no N-terminal signal sequence
      INTEGRAL Likelihood = −1.17 Transmembrane 18-34 ( 18-35)
----- Final Results -----
                              bacterial membrane --- Certainty = 0.1468(Affirmative) < succ>
                                bacterial outside --- Certainty = 0.0000(Not Clear) < succ>
                            bacterial cytoplasm --- Certainty = 0.0000(Not Clear) < succ>
```

[13699] No corresponding DNA sequence was identified in S. agalactiae.

[13700] The protein has no significant homology with any sequences in the GENPEPT database.

[13701] Based on this analysis, it was predicted that this GAS-specific protein and its epitopes, could be useful antigens for vaccines or diagnostics.

### EXAMPLE 2599

[13702] A DNA sequence (GASx728R) was identified in S. pyogenes <SEQ ID 7697> which encodes the amino acid sequence <SEQ ID 7698>. Analysis of this protein sequence reveals the following:

```
Possible site: 29
>>> Seems to have no N-terminal signal sequence
----- Final Results -----
                            bacterial cytoplasm --- Certainty = 0.1795(Affirmative) < succ>
                              bacterial membrane --- Certainty = 0.0000(Not Clear) < succ>
                                bacterial outside --- Certainty = 0.0000(Not Clear) < succ>
```

[13703] No corresponding DNA sequence was identified in S. agalactiae.

[13704] The protein has homology with the following sequences in the GENPEPT database:

| >GP: AAF61314 GB: U96166 unknown [Streptococcus cristatus] | | | |
|---|---|---|---|
| Identities = 149/194 (76%), Positives = 162/194 (82%) | | | |
| Query: | 1 | LSAIIRQSTSKRISDKRGIYLVEKLVSLAKQSYFTVTKTSPMIEEVRYYAKELLRLSERR | 60 |
| | | L IIRQSTSKRIS+KR YL +KL+ LAKQS+ V KTSPM+EEVRYYA+ELLRLSERR | |
| Sbjct: | 56 | LYEIIRQSTSKRISEKRIAYLTDKLIKLAKQSFCAVKKTSPMLEEVRYYAQELLRLSERR | 115 |
| Query: | 61 | QAIFDKMVASAQPLPEDKILRSIPSIVETTATSIIGELGAIRRFQSANQINAFIGIDFRH | 120 |
| | | Q + + MVA AQPLPE ILRSIP I ETTATSIIGELG I RFQS NQ NAFIGID RH | |
| Sbjct: | 116 | QVVLNDMVALAQPLPEYDILRSIPGIAETTATSIIGELGDIHRFQSTNQFNAFIGIDLRH | 175 |
| Query: | 121 | YESGNYLAQEHITKRGNPYAPKILFKCIDHIAFASHTNPCHIADFYEKRKRQSQTASTKP | 180 |
| | | YES N+LA+EHITKRGNPYA KILFKCIH+IA ASHTNPCHIADFYEKRKRQS ASTKP | |
| Sbjct: | 176 | YESRNFLAKEHITKRGNPYARKILFKCIHNIASASHTNPCHIADFYEKRKRQSTIASTKP | 235 |
| Query: | 181 | HTIASRHCLVRQCF | 194 |
| | | TIAS H L+R + | |
| Sbjct: | 236 | LTIASIHRLIRTMY | 249 |

[13705] Based on this analysis, it was predicted that this GAS-specific protein and its epitopes, could be useful antigens for vaccines or diagnostics.

### EXAMPLE 2600

[13706] A DNA sequence (GASx729R) was identified in S. pyogenes <SEQ ID 7699> which encodes the amino acid sequence <SEQ ID 7700>. Analysis of this protein sequence reveals the following:

```
Possible site: 28
>>> Seems to have no N-terminal signal sequence
----- Final Results -----
                            bacterial cytoplasm --- Certainty = 0.2363(Affirmative) < succ>
                              bacterial membrane --- Certainty = 0.0000(Not Clear) < succ>
                                bacterial outside --- Certainty = 0.0000(Not Clear) < succ>
```

[13707] No corresponding DNA sequence was identified in S. agalactiae.

[13708] The protein has no significant homology with any sequences in the GENPEPT database.

[13709] Based on this analysis, it was predicted that this GAS-specific protein and its epitopes, could be useful antigens for vaccines or diagnostics.

### EXAMPLE 2601

[13710] A DNA sequence (GASx730R) was identified in S. pyogenes <SEQ ID 7701> which encodes the amino acid sequence <SEQ ID 7702>. Analysis of this protein sequence reveals the following:

```
Possible site: 25
>>> Seems to have an uncleavable N-term signal seq
----- Final Results -----
                              bacterial membrane --- Certainty = 0.0000(Not Clear) < succ>
                                bacterial outside --- Certainty = 0.0000(Not Clear) < succ>
                            bacterial cytoplasm --- Certainty = 0.0000(Not Clear) < succ>
```

[13711] No corresponding DNA sequence was identified in S. agalactiae.

[13712] The protein has no significant homology with any sequences in the GENPEPT database.

[13713] Based on this analysis, it was predicted that this GAS-specific protein and its epitopes, could be useful antigens for vaccines or diagnostics.

### EXAMPLE 2602

[13714] A DNA sequence (GASx734) was identified in S. pyogenes <SEQ ID 7703> which encodes the amino acid sequence <SEQ ID 7704>. Analysis of this protein sequence reveals the following:

```
Possible site: 52
>>> Seems to have no N-terminal signal sequence
----- Final Results -----
                            bacterial cytoplasm --- Certainty = 0.4001(Affirmative) < succ>
                              bacterial membrane --- Certainty = 0.0000(Not Clear) < succ>
                                bacterial outside --- Certainty = 0.0000(Not Clear) < succ>
```

[13715] No corresponding DNA sequence was identified in S. agalactiae.

[13716] Based on this analysis, it was predicted that this GAS-specific protein and its epitopes, could be useful antigens for vaccines or diagnostics.

### EXAMPLE 2603

[13717] A DNA sequence (GASx735) was identified in S. pyogenes <SEQ ID 7705> which encodes the amino acid sequence <SEQ ID 7706>. Analysis of this protein sequence reveals the following:

```
Possible site: 55
>>> Seems to have no N-terminal signal sequence
      INTEGRAL Likelihood = −3.66 Transmembrane 276-292 ( 274-292)
----- Final Results -----
                              bacterial membrane --- Certainty = 0.2466(Affirmative) < succ>
                                bacterial outside --- Certainty = 0.0000(Not Clear) < succ>
                            bacterial cytoplasm --- Certainty = 0.0000(Not Clear) < succ>
```

[13718] No corresponding DNA sequence was identified in S. agalactiae.

[13719] Based on this analysis, it was predicted that this GAS-specific protein and its epitopes, could be useful antigens for vaccines or diagnostics.

### EXAMPLE 2604

[13720] A DNA sequence (GASx736) was identified in S. pyogenes <SEQ ID 7707> which encodes the amino acid sequence <SEQ ID 7708>. Analysis of this protein sequence reveals the following:

```
Possible site: 33
>>> Seems to have no N-terminal signal sequence
---- Final Results ----
                          bacterial cytoplasm --- Certainty = 0.3998(Affirmative) < succ>
                            bacterial membrane --- Certainty = 0.0000(Not Clear) < succ>
                              bacterial outside --- Certainty = 0.0000(Not Clear) < succ>
```

[13721] No corresponding DNA sequence was identified in S. agalactiae.

[13722] The protein has no significant homology with any sequences in the GENPEPT database.

[13723] Based on this analysis, it was predicted that this GAS-specific protein and its epitopes, could be useful antigens for vaccines or diagnostics.

### EXAMPLE 2605

[13724] A DNA sequence (GASx737) was identified in S. pyogenes <SEQ ID 7709> which encodes the amino acid sequence <SEQ ID 7710>. Analysis of this protein sequence reveals the following:

```
Possible site: 60
>>> Seems to have a cleavable N-term signal seq.
      INTEGRAL Likelihood = −12.74 Transmembrane 77-93 ( 69-99)
      INTEGRAL Likelihood = −4.14 Transmembrane 152-168 ( 151-170)
      INTEGRAL Likelihood = −1.17 Transmembrane 196-212 ( 194-212)
----- Final Results -----
                              bacterial membrane --- Certainty = 0.6095(Affirmative) < succ>
                                bacterial outside --- Certainty = 0.0000(Not Clear) < succ>
                            bacterial cytoplasm --- Certainty = 0.0000(Not Clear) < succ>
```

[13725] No corresponding DNA sequence was identified in S. agalactiae.

[13726] The protein has no significant homology with any sequences in the GENPEPT database.

[13727] Based on this analysis, it was predicted that this GAS-specific protein and its epitopes, could be useful antigens for vaccines or diagnostics.

### EXAMPLE 2606

[13728] A DNA sequence (GASx738) was identified in S. pyogenes <SEQ ID 7711> which encodes the amino acid sequence <SEQ ID 7712>. Analysis of this protein sequence reveals the following:

```
Possible site: 37
>>> Seems to have a cleavable N-term signal seq.
      INTEGRAL Likelihood = −13.16 Transmembrane 44-60 ( 39-71)
      INTEGRAL Likelihood = −10.24 Transmembrane 94-110 ( 81-114)
      INTEGRAL Likelihood = −7.64 Transmembrane 185-201 ( 179-207)
      INTEGRAL Likelihood = −7.48 Transmembrane 132-148 ( 130-158)
      INTEGRAL Likelihood = −2.76 Transmenibrane 208-224 ( 204-225)
      INTEGRAL Likelihood = −0.06 Transmernbrane 153-169 ( 152-169)
----- Final Results -----
                              bacterial membrane --- Certainty = 0.6265(Affirmative) < succ>
                                bacterial outside --- Certainty = 0.0000(Not Clear) < succ>
                            bacterial cytoplasm --- Certainty = 0.0000(Not Clear) < succ>
```

[13729] No corresponding DNA sequence was identified in S. agalactiae.

[13730] The protein has no significant homology with any sequences in the GENPEPT database.

[13731] Based on this analysis, it was predicted that this GAS-specific protein and its epitopes, could be useful antigens for vaccines or diagnostics.

### EXAMPLE 2607

[13732] A DNA sequence (GASx742) was identified in S. pyogenes <SEQ ID 7713> which encodes the amino acid sequence <SEQ ID 7714>. Analysis of this protein sequence reveals the following:

```
Possible site: 22
>>> Seems to have an uncleavable N-term signal seq
      INTEGRAL Likelihood = −7.80 Transmembrane 887-903 ( 882-906)
      INTEGRAL Likelihood = −4.88 Transmembrane 6-22 ( 5-23)
----- Final Results -----
                              bacterial membrane --- Certainty = 0.4121(Affirmative) < succ>
                                bacterial outside --- Certainty = 0.0000(Not Clear) < succ>
                            bacterial cytoplasm --- Certainty = 0.0000(Not Clear) < succ>
LPXTG motif: 877-881
```

[13733] No corresponding DNA sequence was identified in S. agalactiae.

[13734] The protein has homology with the following sequences in the GENPEPT database:

| >GP: CAB46409 GB: AL096743 putative large secreted protein | | | |
|---|---|---|---|
| [Streptomyces coelicolor A3(2)] | | | |
| Identities = 231/599 (38%), Positives = 329/599 (54%), Gaps = 43/599 (7%) | | | |
| Query: | 278 | TSSNSDASSRNIVKIGEIQGASHTSPLLKKAVTVEQVVVTYL---DDSTHFYVQDLNGDG | 334 |
| | | T +++ +++ V+I ++QG++ SP + VT +VT + S F++QD D | |
| Sbjct: | 28 | TPAHAASAAAGPVRIHDVQGSTRLSPYAGEQVTDVAGIVTGVRGYGSSKGFWMQDPLPDA | 87 |
| Query: | 335 | DLATSDGIRVFAKNA-KVQVGDVLTISGEVEEFFGRGYEERKQTDLTITQIVAKAVTK-T | 392 |
| | | D ATS+G+ VF A +V VGD +T+SG V E+ G Q+ +T+I VT + | |
| Sbjct: | 88 | DPATSEGVFVFTSRAPEVAVGDAVTVSGTVSEYVPGGTSSGNQS---LTEITRPTVTVVS | 144 |
| Query: | 393 | GTAQVPSPLVLGKDRIAPANIIDNDGLR-------VFDPEEDAIDYWESMEGMLVAVDDA | 445 |
| | | G +P+ + + A + DG P A+DY+ES+EGM V V DA | |
| Sbjct: | 145 | GGNAIPAATTVSARSVPRAYAPEGDGAANGSVNALPLRPGTYALDYYESLEGMNVRVADA | 204 |
| Query: | 446 | KILGPMKN-KEIYVLPGSSTRPLNNSGGVLLPANSYNTDVIPVLFKKGKQI----IKAGD | 500 |
| | | +++G E++V P G V + NT + + GK GD | |
| Sbjct: | 205 | RVVGASDPYTELWVTVKPWENPNRRGGTVYGSYDDQNTGRLQIQ-SLGKPADFPAADVGD | 263 |
| Query: | 501 | SYKGRLAGPVSYS-YGNYKVFVDDSKNMPSLMDGHLKPEKTNLQKDLSKLSIASYNIENF | 559 |
| | | + G AGP+ Y+ YG Y + + + +L G + E T Q +L++A+YN+EN | |
| Sbjct: | 264 | TLAGTTAGPLDYNQYGGYTLVASE---IGALESGGTERESTRRQS-ARELAVATYNVENL | 319 |
| Query: | 560 | SANPSSTKDEKVKRIAESFIHDLNAPDIIGLIEVQDNNGPTDDGTTDATQSAQRLIDAIK | 619 |
| | | +PS D+ AE+ +H L +PDI+ L E+QDNNG TDDGT A + RLIDAI | |
| Sbjct: | 320 | --DPS---DDTFTAHAETIVHRLKSPDIVSLEEIQDNNGATDDGTVAADATVGRLIDAIV | 374 |
| Query: | 620 | KLGGPTYRYVDIAPENNVDGGQPGGNIRTGFLYQPERVSLSDKPKGGARDA--LTWVNGE | 434 |
| | | GGP Y + I P + DGGQPGGNIR FL+ PERVS +D+ G A A + V G+ | |
| Sbjct: | 375 | AAGGPRYDWRGIDPVDKADGGQPGGNIRQAFLFNPERVSFTDRAGGDATTATGVRKVRGK | 434 |
| Query: | 678 | --LNLSVGRIDPTNAAWKDVRKSLAAEFIFQGRKVVVVANHLNSKRGDNALYGCVQPVTF | 735 |
| | | L S GR+DP N AW+D RK LA EF+F+GR V VVANH NSK GD L QP + | |
| Sbjct: | 435 | AALTHSPGRVDPANEAWEDSRKPLAGEFVFRGRTVFVVANHFNSKGGDQGLTAQYQPPSR | 494 |
| Query: | 736 | KSEQQRHVLANMLAQFAKE--QAKHQANIVMLGDFNDFEFTKTIQLIE-EGDMVNLVSRH | 792 |
| | | SE +RH A ++ F KE A+ A++V LGD NDFEF++T +++E +G + + V | |
| Sbjct: | 495 | GSETQRHAQAKVVNTFVKEILAAQKNADVVALGDINDFEFSRTARILEGDGALWSAVKSL | 554 |
| Query: | 793 | DISDRYSYFHQGNNQTLDNILVSRHLL--DHYEFDMVHVNSPFMEAHGRASDHDPLLLQ | 849 |
| | | S+RYSY +QGN+Q LD ILVS + H +D VHVN+ F H + SDHDP +L+ | |
| Sbjct: | 555 | PRSERYSYVYQGNSQVLDQILVSPSVRRGGHLSYDSVHVNAEF---HDQISDHDPQVLR | 610 |

[13735] Based on this analysis, it was predicted that this GAS-specific protein and its epitopes, could be useful antigens for vaccines or diagnostics.

### EXAMPLE 2608

[13736] A DNA sequence (GASx743) was identified in S. pyogenes <SEQ ID 7715> which encodes the amino acid sequence <SEQ ID 7716>. Analysis of this protein sequence reveals the following:

```
Possible site: 22
>>> Seems to have no N-terminal signal sequence
----- Final Results -----
                            bacterial cytoplasm --- Certainty = 0.2437(Affirmative) < succ>
                              bacterial membrane --- Certainty = 0.0000(Not Clear) < succ>
                                bacterial outside --- Certainty = 0.0000(Not Clear) < succ>
```

[13737] No corresponding DNA sequence was identified in S. agalactiae.

[13738] The protein has no significant homology with any sequences in the GENPEPT database.

[13739] Based on this analysis, it was predicted that this GAS-specific protein and its epitopes, could be useful antigens for vaccines or diagnostics.

### EXAMPLE 2609

[13740] A DNA sequence (GASx756) was identified in S. pyogenes <SEQ ID 7717> which encodes the amino acid sequence <SEQ ID 7718>. Analysis of this protein sequence reveals the following:

```
Possible site: 18
>>> Seems to have no N-terminal signal sequence
      INTEGRAL Likelihood = −4.30 Transmembrane 10-26 ( 8-27)
      INTEGRAL Likelihood = −3.08 Transmembrane 51-67 ( 50-67)
----- Final Results -----
                              bacterial membrane --- Certainty = 0.2720(Affirmative) < succ>
                                bacterial outside --- Certainty = 0.0000(Not Clear) < succ>
                            bacterial cytoplasm --- Certainty = 0.0000(Not Clear) < succ>
```

[13741] No corresponding DNA sequence was identified in S. agalactiae.

[13742] The protein has no significant homology with any sequences in the GENPEPT database.

[13743] Based on this analysis, it was predicted that this GAS-specific protein and its epitopes, could be useful antigens for vaccines or diagnostics.

### EXAMPLE 2610

[13744] A repeated DNA sequence (GASx758) was identified in S. pyogenes <SEQ ID 7719> which encodes the amino acid sequence <SEQ ID 7720>. Analysis of this protein sequence reveals the following:

```
Possible site: 22
>>> Seems to have a cleavable N-term signal seq.
----- Final Results -----
                                bacterial outside --- Certainty = 0.3000(Affirmative) < succ>
                              bacterial membrane --- Certainty = 0.0000(Not Clear) < succ>
                            bacterial cytoplasm --- Certainty = 0.0000(Not Clear) < succ>
```

[13745] No corresponding DNA sequence was identified in S. agalactiae.

[13746] The protein has homology with the following sequences in the GENPEPT database:

| >GP: CAA38133 GB: X54225 7 kDa protein [Streptococcus pneumoniae] | | | |
|---|---|---|---|
| Identities = 31/61 (50%), Positives = 41/61 (66%) | | | |
| Query: | 1 | MTNGLKYVLEQMLLLFIIAALACLFLAIGLMIGYSFMGDGQSPWHILSMDKWAELVNKFT | 60 |
| | | M YV++++LL+I+ L L L IGLM+GY +G GQ PW ILS KW EL++KFT | |
| Sbjct: | 3 | MNKKSSYVVKRLLLVIIVLILGTLALGIGLMVGYGILGKGQDPWAILSPAKWQELIHKFT | 62 |
| Query: | 61 | G | 61 |
| | | G | |
| Sbjct: | 63 | G | 63 |

[13747] Based on this analysis, it was predicted that this GAS-specific protein and its epitopes, could be useful antigens for vaccines or diagnostics.

### EXAMPLE 2611

[13748] A DNA sequence (GASx764) was identified in S. pyogenes <SEQ ID 7721> which encodes the amino acid sequence <SEQ ID 7722>. Analysis of this protein sequence reveals the following:

```
Possible site: 58
>>> Seems to have no N-terminal signal sequence
      INTEGRAL Likelihood = −3.98 Transmembrane 47-63 ( 46-67)
----- Final Results -----
                              bacterial membrane --- Certainty = 0.2593(Affirmative) < succ>
                                bacterial outside --- Certainty = 0.0000(Not Clear) < succ>
                            bacterial cytoplasm --- Certainty = 0.0000(Not Clear) < succ>
```

[13749] A related sequence was also identified in GAS <SEQ ID 9149> which encodes the amino acid sequence <SEQ ID 9150>. Analysis of this protein sequence reveals the following:

```
Possible site: 53
        >>> Seems to have no N-terminal signal sequence
INTEGRAL Likelihood = −3.98 Transmembrane 35-51 ( 34-55)
----- Final Results -----
                              bacterial membrane --- Certainty = 0.2593(Affirmative) < succ>
                                bacterial outside --- Certainty = 0.0000(Not Clear) < succ>
                            bacterial cytoplasm --- Certainty = 0.0000(Not Clear) < succ>
```

[13750] No corresponding DNA sequence was identified in S. agalactiae.

[13751] The protein has no significant homology with any sequences in the GENPEPT database.

[13752] Based on this analysis, it was predicted that this GAS-specific protein and its epitopes, could be useful antigens for vaccines or diagnostics.

### EXAMPLE 2612

[13753] A DNA sequence (GASx783) was identified in S. pyogenes <SEQ ID 7723> which encodes the amino acid sequence <SEQ ID 7724>. Analysis of this protein sequence reveals the following:

```
Possible site: 43
>>> Seems to have no N-terminal signal sequence
      INTEGRAL Likelihood = −13.16 Transmembrane 142-158 ( 132-167)
      INTEGRAL Likelihood = −12.26 Transmembrane 113-129 ( 101-140)
      INTEGRAL Likelihood = −10.24 Transmembrane 238-254 ( 233-260)
      INTEGRAL Likelihood = −2.76 Tramsmembrane 34-50 ( 34-51)
----- Final Results -----
                              bacterial membrane --- Certainty = 0.6265(Affirmative) < succ>
                                bacterial outside --- Certainty = 0.0000(Not Clear) < succ>
                            bacterial cytoplasm --- Certainty = 0.0000(Not Clear) < succ>
```

[13754] No corresponding DNA sequence was identified in S. agalactiae.

[13755] The protein has homology with the following sequences in the GENPEPT database:

| >GP: BAA32091 GB: AB010970 ABC-transporter [Streptococcus mutans] | | | |
|---|---|---|---|
| Identities = 173/269 (64%), Positives = 214/269 (79%), Gaps = 2/269 (0%) | | | |
| Query: | 1 | MNFLTKKNRILLREMVKTDFKLRYQGSAIGYLWSILKPLMMFTIMYLVFIRFLRLGGNVP | 60 |
| | | M+F ++KNRILL+E++KTDFKLRYQGSAIGYLWSILKPLM+F IMY+VF+RFL LGG+VP | |
| Sbjct: | 1 | MDFFSRKNRILLKELIKTDFKLRYQGSAIGYLWSILKPLMLFAIMYIVFVRFLPLGGDVP | 60 |
| Query: | 61 | HFPVALLLANVIWSFFSEATSMGMVSIVSRGDLLRKLNFSKHIIVFSAVLGALINFLINL | 120 |
| | | H+PVALLL LVIW+FF E T MGMVS+V+RGDLLRKLNFSK IVFSAV GA INF IN+ | |
| Sbjct: | 61 | HWPVALLLGNVIWTFFQETTMMGMVSVVTRGDLLRKNLFSKQTIVFSAVSGAAINFGINV | 120 |
| Query: | 121 | VVVLIFALINGVTIS--GYAYLSLFLFIELVVLVLGIALLLSNVFVYYRDLAQVWEVLLQ | 178 |
| | | +VVLIFAL+NGFT + +L + LF+EL++ GIA +LS ++V YRD+ VWEV+LQ | |
| Sbjct: | 121 | IVVLIFALLNGVTFTFRWNLFLLIPLFLELLLGSTGIAFILSTLYVRYRDIGPVWEVILQ | 180 |
| Query: | 179 | AGMYATPIIYPITFVLDSHPLAAKLLMLNPVAQMIQDFRYLLIDRANVTIWQMSTNWFYI | 238 |
| | | G Y TPIIY +T++ + AKLL+L+P+AQ+IQD R++LID ANVTIWQM + | |
| Sbjct: | 181 | GGFYGTPIIYSLTYIARRSVVGAKLLLLSPIAQIIQDMRHILIDPANVTIWQMINHKSIA | 240 |
| Query: | 239 | VIPYLVPFVILFIGIFVFKKNADRFAEII | 267 |
| | | VIPYLVP + IG++VF++NA +FAEII | |
| Sbjct: | 241 | VIPYLVPIFVFIIGFLVFNYNAKKFAEII | 269 |

[13756] Based on this analysis, it was predicted that this GAS-specific protein and its epitopes, could be useful antigens for vaccines or diagnostics.

### EXAMPLE 2613

[13757] A DNA sequence (GASx786) was identified in S. pyogenes <SEQ ID 7725> which encodes the amino acid sequence <SEQ ID 7726>. Analysis of this protein sequence reveals the following:

```
Possible site: 32
>>> Seems to have no N-terminal signal sequence
----- Final Results -----
                            bacterial cytoplasm --- Certainty = 0.3828(Affirmative) < succ>
                              bacterial membrane --- Certainty = 0.0000(Not Clear) < succ>
                                bacterial outside --- Certainty = 0.0000(Not Clear) < succ>
```

[13758] No corresponding DNA sequence was identified in S. agalactiae.

[13759] The protein has homology with the following sequences in the GENPEPT database:

| >GP: BAA32094 GB: AB010970 rgpFc [Streptococcus mutans] | | | |
|---|---|---|---|
| Identities = 381/582 (65%), Positives = 475/582 (81%), Gaps = 1/582 (0%) | | | |
| Query: | 1 | MNRILLYVHFNKYNKISAHVYYQLEQMRSLFSKIVFISNSKVSHEDLKRLKNHCLIDEFL | 60 |
| | | M R+LLYVHFNKYN++S+HV YQL QMRSLFSK++FISNS+V+ D+K L+ LID+F+ | |
| Sbjct: | 1 | MKRLLLYVHFNKYNRVSSHVVYQLTQMRSLFSKVIFISNSQVADADVKMLREKHLIDDFI | 60 |
| Query: | 61 | QRKNKGFDFSAWHDGLIIMGFDKLEEFDSLTIMNDTCFGPIWEMAPYFENFEEKETVDFW | 120 |
| | | QR+N GFDF+AW DG++ +GFD+L +DS+T MNDTCFGP+WEM ++ FE K TVDFW | |
| Sbjct: | 61 | QRQNSGFDFAAWRDGMVFVGFDELVTYDSVTTMNDTCFGPLWEMYSIYQEFETKTTVDFW | 120 |
| Query: | 121 | GITNNRGTKAFKEHVQSYFMTFKNQVIQNKVFQQFWQSIIEYENVQEVIQHYETQLTSIL | 180 |
| | | G+TNNR TK+F+EH+QSYF++FK V+++ F+ FW++I EY++VQ+VI YET++T+ L | |
| Sbjct: | 121 | GLTNNRATKSFREHIQSYFISFKASVLRSTAFRDFWENIKEYQDVQKVIDQYETKVTTTL | 180 |
| Query: | 181 | LNEGFSYQTVFDTRKAESSFMPHPDFSYYNPTAILKHHVPFIKVKAIDANQHIAPYLLNL | 240 |
| | | L+ GF Y VFDT K ++S M H DFSYYNPTAIL H VPFIKVKAID NQHI PYLLN | |
| Sbjct: | 181 | LDAGFQYDVVFDTTKEDASHMLHADFSYYNPTAILNHRVPFIKVKAIDNNQHITPYLLND | 240 |
| Query: | 241 | IRETTNYPIDLIVSHMSQISLPDTKYLLSQKYLNCQRLAKQTCQKVAVHLHVFYVDLLDE | 300 |
| | | I++ + YPIDLIVSHMS+I+ PD YLL KY+ + QKVAVHLHVFYVDLL+E | |
| Sbjct: | 241 | IQKNSTYPIDLIVSHMSEINYPDFSYLLGHKYVKKRERVDLKNQKVAVHLHVFYVDLLEE | 300 |
| Query: | 301 | FLTAFENWNFHYDLFITTDSDIKRKEIKEILQRKGKTADIRVTGNRGRDIYPMLLLKDKL | 360 |
| | | FLTAF+ ++F YDLFITTDSD K+ EI+EIL G+ A + VTGN GRD+ PML LK+ L | |
| Sbjct: | 301 | FLTAFKQFHFSYDLFITTDSDDKKAEIEEILSANGQEAQVFVTGNIGRDVLPMLKLKNYL | 360 |
| Query: | 361 | SQYDYIGHFHTKKSKEADFWAGESWRKELIDMLVKPADSILSAFETD-DIGIIIADIPSF | 419 |
| | | S YD++GHFHTKKSKEADFWAG+SWR+ELIDMLVKPAD+IL+ + + IG++IAD+P+F | |
| Sbjct: | 361 | SAYDFVGHFHTKKSKEADFWAGQSWREELIDMLVKPADNILAQLQQNPKIGLVIADMPTF | 420 |
| Query: | 420 | FRFNKIVNAWNEHLIAQEMMSLWRKMDVKKQIDFQAMDTFVMSYGTFVWFKYDALKSLFD | 479 |
| | | FR+NKIV+AWNEHLIA EM +LW+KM + K+IDF A TFVMSYGTFVWFKYDALK LFD | |
| Sbjct: | 421 | FRYNKIVDAWNEHLIAPEMNTLWQKMGMTKKIDFNAFHTFVMSYGTFVWFKYDALKPLFD | 480 |
| Query: | 480 | LELTQNDIPSEPLPQNSILHAIERLLVYIAWGDSYDFRIVKNPYELTPFIDNKLLNLRED | 539 |
| | | L LT +D+P EPLPQNSILHAIERLL+YIAW + YDFRI KNP +LTPFIDNKLLN R + | |
| Sbjct: | 481 | LNLTDDDVPEEPLPQNSILHAIERLLIYIAWNEHYDFRISKNPVDLTPFIDNKLLNERGN | 540 |
| Query: | 540 | EGAHTYVNFNQMGGIKGALKYIIVGPAKAMKYIFLRLMEKLK | 581 |
| | | +T+V+FN MGGIKGA KYI +GPA+A+KYI R ++K+K | |
| Sbjct: | 541 | SAPNTFVDFNYMGGIKGAFKYIFIGPARAVKYILKRSLQKIK | 582 |

[13760] Based on this analysis, it was predicted that this GAS-specific protein and its epitopes, could be useful antigens for vaccines or diagnostics.

### EXAMPLE 2614

[13761] A DNA sequence (GASx787) was identified in S. pyogenes <SEQ ID 7727> which encodes the amino acid sequence <SEQ ID 7728>. Analysis of this protein sequence reveals the following:

| Possible site: 33 | | | |
|---|---|---|---|
| >>> Seems to have a cleavable N-term signal seq. | | | |
| INTEGRAL | Likelihood = −15.66 | Transmembrane | 202-218 (191-224) |
| INTEGRAL | Likelihood = −10.03 | Transmembrane | 340-356 (335-365) |
| INTEGRAL | Likelihood = −9.08 | Transmembrane | 270-286 (263-289) |
| INTEGRAL | Likelihood = −8.60 | Transmembrane | 124-140 (118-145) |
| INTEGRAL | Likelihood = −4.94 | Transmembrane | 377-393 (375-395) |
| INTEGRAL | Likelihood = −3.29 | Transmembrane | 291-307 (290-311) |
| INTEGRAL | Likelihood = −2.87 | Transmembrane | 160-176 (159-180) |
| INTEGRAL | Likelihood = −2.66 | Transmembrane | 50-66 (48-66) |
| INTEGRAL | Likelihood = −1.28 | Transmembrane | 77-93 (76-93) |
| INTEGRAL | Likelihood = −0.69 | Transmembrane | 229-245 (229-245) |

----- Final Results -----
bacterial membrane --- Certainty = 0.7262 (Affirmative) < succ>
bacterial outside --- Certainty = 0.0000 (Not Clear) < succ>
bacterial cytoplasm --- Certainty = 0.0000 (Not Clear) < succ>

[13762] No corresponding DNA sequence was identified in S. agalactiae.

[13763] The protein has homology with the following sequences in the GENPEPT database:

| >GP: BAA32095 GB: AB010970 ORF7 [Streptococcus mutans] | | | |
|---|---|---|---|
| Identities = 374/775 (48%), Positives = 525/775 (67%), Gaps = 7/775 (0%) | | | |
| Query: | 53 | VSFVGYIISLIGLSYYLSRQVSRQLFLKTSFIVISYLIVSYWVQITQHLNDKRFDIWSLT | 112 |
| | | V V Y++S++GLS+YLS+ + + F++ Y+++SY++ +T+ LN++ F IW L | |
| Sbjct: | 30 | VCLVIYVLSILGLSFYLSKNLKKTFFIELLLGYGLYIVISYFLAVTRELNNESFKIWDLA | 89 |
| Query: | 113 | KNQFYQFQALPSLLIILV----MATLIKILAAYFAIEKDRFGLL-GYQGNTFSVALILAV | 167 |
| | | KN F+Q LP+L++I+ + LI++ + + LL + F + ++ | |
| Sbjct: | 90 | KNHFFQPYFLPTLVLIIACTFALNYLIRVKMKRSHLSRKMTLLLENFSETEFLLTGLIVS | 149 |
| Query: | 168 | VPINDIHLLKLISSRFSELVTAGNSQIALLKISGLLIVLLVIFATIIYVVLNALKHLKSN | 227 |
| | | ++D +KL+ + +LL + LL L++F+ I+ NA + +K N | |
| Sbjct: | 150 | FILSDTLYVKLLQESLRAYYHKPLAYESLLFLYTLLT--LILFSVIVEACFNAYRSIKLN | 207 |
| Query: | 228 | KPSFSVAATTSLFLALVFNYTFQYGVKGDEALLGYYVFPGATLFQIVAITLVALLAYVIT | 287 |
| | | +P+ S+A +SL A +FNY FQYG+K D LLG Y+ PGAT +QI+ +T Y+I | |
| Sbjct: | 208 | RPNLSLAFVSSLLFATIFNYAFQYGLKNDADLLGKYIVPGATAYQILVLTAAGFFLYLII | 267 |
| Query: | 288 | NRYWPTTFFLLILGTIISVVNDLKESMRSEPLLVTDFVWLQELGLVTSFVKKSVIVEMVV | 347 |
| | | NRY TF ++ILG+II+VVN LK MR+EPLLVTDF W+ + L+ V ++I ++ | |
| Sbjct: | 268 | NRYLLVTFLIVILGSIITVVNVLKVGMRNEPLLVTDFAWVTNIRLLARSVNANIIFSTLL | 327 |
| Query: | 348 | GLAICIVVAWYLHGRVLAGKLFMSPVKRASAVLGLFIVSCSMLIPFSYEKEGKILSGLPI | 407 |
| | | LA I++ +L R+L GK+ + + + + ++ S+ I F EK KI++G+P+ | |
| Sbjct: | 328 | ILAALILLYLFLRKRLLQGKITENYRLKVGLISSICLLGFSIFIIFRNEKGSKIVNGIPV | 387 |
| Query: | 408 | ISALNNDNDINWLGFSTNARYKSLAYVWTRQVTKKIMEKPTNYSQETIASIAQKYQKLAE | 467 |
| | | IS +NN DI + GF +NA YKSL YVWT+QVTK IM+KP++YS+E I +A+KY +A | |
| Sbjct: | 388 | ISQVNNWVDIGYQGFYSNASYKSLMYVWTKQVTKSIMDKPSDYSKERILKLAKKYNNVAN | 447 |
| Query: | 468 | DINKDRKNNIADQTVIYLLSESLSDPDRVSNVTVSHDVLPNIKAIKNSTTAGLMQSDSYG | 527 |
| | | INK R NI++QTVIY+LSES SDPDRV V +S DV+PNIK IK TT+GLM SD YG | |
| Sbjct: | 448 | KINKVRTENISNQTVIYILSESFSDPDRVQGVNLSRDVIPNIKQIKEKTTSGLMHSDGYG | 507 |
| Query: | 528 | GGTANMEFQTLTSLPFYNFSSSVSVLYSEVFPKMAKPHTISEFYQGKNRIAMHPASANNF | 587 |
| | | GGTANMEFQ+LT LP+YNF+SSVS LY+EV P M+ +IS ++ KNR+ +HP+SA+N+ | |
| Sbjct: | 508 | GGTANMEFQSLTGLPYYNFNSSVSTLYTEVVPDMSVFPSISNQFKSKNRVVIHPSSASNY | 567 |
| Query: | 588 | NRKTVYSNLGFSKFLALSGSKDKFKNIENVGLLTSDKTVYNNILSLINPSESQFFSVITM | 647 |
| | | +RK VY L F F+A SG+ DK + E VGL SDKT Y NIL INPS+SQFFSV+TM | |
| Sbjct: | 568 | SRKYVYDKLKFPTFVASSGTSDKITHSEKVGLNVSDKTTYQNILDKINPSQSQFFSVMTM | 627 |
| Query: | 648 | QNHIPWSSDYPEEIVAEGKNFTEEENHNLTSYARLLSFTDKETRAFLEKLTQINKPITVV | 707 |
| | | QNH+PW+SD P ++VA GK +T++EN +L+SYARLL++TDKET+ FL +L+Q+ +TVV | |
| Sbjct: | 628 | QNHVPWASDEPSDVVATGKGYTKDENGSLSSYARLLTYTDKETKDFLAQLSQLKHKVTVV | 687 |
| Query: | 708 | FYGDHLPGLYPDSAFNKHIENKYLTDYFIWSNGTNEKKNHPLINSSDFTAALFEHTDSKV | 767 |
| | | FYGDHLPGLYP+SAF K +++Y TDYFIWSN + NH +NSSDFTA L EHT+SKV | |
| Sbjct: | 688 | FYGDHLPGLYPESAFKKDPDSQYQTDYFIWSNYNTKTLNHSYVNSSDFTAELLEHTNSKV | 747 |
| Query: | 768 | SPYYALLTEVLNKASVDKSPDSPEVKAIQNDLKNIQYDVTIGKGYLLKHKTFFKI | 822 |
| | | SPYYALLTEVL+ +V + E K I NDLK IQYD+T+GKGY+ +K FF I | |
| Sbjct: | 748 | SPYYALLTEVLDNTTVGHGKLTKEQKEIANDLKLIQYDITVGKGYIRNYKGFFDI | 802 |

[13764] Based on this analysis, it was predicted that this GAS-specific protein and its epitopes, could be useful antigens for vaccines or diagnostics.

### EXAMPLE 2615

[13765] A DNA sequence (GASx789R) was identified in S. pyogenes <SEQ ID 7729> which encodes the amino acid sequence <SEQ ID 7730>. Analysis of this protein sequence reveals the following:

| Possible site: 13 | | | |
|---|---|---|---|
| >>> Seems to have no N-terminal signal sequence | | | |
| INTEGRAL | Likelihood = −1.06 | Transmembrane | 42-58 (42-58) |

----- Final Results -----
bacterial membrane --- Certainty = 0.1426 (Affirmative) < succ>
bacterial outside --- Certainty = 0.0000 (Not Clear) < succ>
bacterial cytoplasm --- Certainty = 0.0000 (Not Clear) < succ>

[13766] No corresponding DNA sequence was identified in S. agalactiae.

[13767] The protein has no significant homology with any sequences in the GENPEPT database.

[13768] Based on this analysis, it was predicted that this GAS-specific protein and its epitopes, could be useful antigens for vaccines or diagnostics.

### EXAMPLE 2616

[13769] A DNA sequence (GASx790) was identified in S. pyogenes <SEQ ID 7731> which encodes the amino acid sequence <SEQ ID 7732>. Analysis of this protein sequence reveals the following:

Possible site: 24
>>> Seems to have a cleavable N-term signal seq.
----- Final Results -----
bacterial outside --- Certainty = 0.3000 (Affirmative) < succ>
bacterial membrane --- Certainty = 0.0000 (Not Clear) < succ>
bacterial cytoplasm --- Certainty = 0.0000 (Not Clear) < succ>

[13770] No corresponding DNA sequence was identified in S. agalactiae.

[13771] The protein has no significant homology with any sequences in the GENPEPT database.

[13772] Based on this analysis, it was predicted that this GAS-specific protein and its epitopes, could be useful antigens for vaccines or diagnostics.

### EXAMPLE 2617

[13773] A DNA sequence (GASx791) was identified in S. pyogenes <SEQ ID 7733> which encodes the amino acid sequence <SEQ ID 7734>. Analysis of this protein sequence reveals the following:

| Possible site: 48 | | | |
|---|---|---|---|
| >>> Seems to have a cleavable N-term signal seq. | | | |
| INTEGRAL | Likelihood = −12.42 | Transmembrane | 166-182 (157-188) |
| INTEGRAL | Likelihood = −7.32 | Transmembrane | 85-101 (79-104) |
| INTEGRAL | Likelihood = −6.90 | Transmembrane | 397-413 (386-417) |
| INTEGRAL | Likelihood = −6.05 | Transmembrane | 253-269 (252-273) |
| INTEGRAL | Likelihood = −5.26 | Transmembrane | 301-317 (293-325) |
| INTEGRAL | Likelihood = −3.35 | Transmembrane | 363-379 (362-379) |
| INTEGRAL | Likelihood = −3.24 | Transmembrane | 335-351 (335-351) |

----- Final Results -----
bacterial membrane --- Certainty = 0.5967 (Affirmative) < succ>
bacterial outside --- Certainty = 0.0000 (Not Clear) < succ>
bacterial cytoplasm --- Certainty = 0.0000 (Not Clear) < succ>

[13774] No corresponding DNA sequence was identified in S. agalactiae.

[13775] The protein has homology with the following sequences in the GENPEPT database:

| >GP: AAA64645 GB: U10927 CapF [Staphylococcus aureus] | | | |
|---|---|---|---|
| Identities = 97/419 (23%), Positives = 186/419 (44%), Gaps = 40/419 (9%) | | | |
| Query: | 12 | FLWNMLGSLSTAVISVILLMVVTRLLTSADSDIYAFAYSFANMMVVVGLFQVRNYQATDI | 71 |
| | | F + + ++ +A+ ++L+V+ RL T D Y +A + + ++R+ T | |
| Sbjct: | 5 | FNYMFVANILSALCKFLILLVIVRLGTPEDVGRYNYALVITAPIFLFISLKIRSVIVT-- | 62 |
| Query: | 72 | NEKYSFSQYLVARLMTCLLMLAITVIYLTLTKTDSYKSTIVFLVCFYRSTDAFSDLYQGM | 131 |
| | | N+KYS ++Y+ A L ++ L I++ + T + +v + + ++ G+ | |
| Sbjct: | 63 | NDKYSPNEYISAILSLNIITLIFVAIFVYVLGNGDL--TTILIVSLIKLFENIKEVPYGI | 120 |
| Query: | 132 | FQQHERLDIAGKSLAYRNTLIFMVYTAIILYSKNLTLALVAVCIVSLVFIMYYDIGHSKK | 191 |
| | | +Q++E L + G S+ N L +++ I +S NL +AL+ + I + D + K | |
| Sbjct: | 121 | YQKNESLKLLGISMGIYNILSLILFYIIYSFSHNLNMALLFLVISCIFSFAIIDRWYLSK | 180 |
| Query: | 192 | FQKLMFSELLSNISFQNSLKLLKESF----PLFLNGFLIIYIYTQPKYAIELMTTLGEVA | 247 |
| | | + + + + N++ KE F PL + L P+ +E + G+ | |
| Sbjct: | 181 | YYNI-------KLHYNNNIAKFKEIFILTIPLAFSSALGSLNTGIPRIVLENL--FGKYT | 231 |
| Query: | 248 | LGS-QTIFNILFMPAFVMNLLILFFRPHITQMAIALIRGQIK-EFNKIQVQLFAYLGVF- | 304 |
| | | LG TI +L + N + F P + + L + + K EF K+ ++ ++G+F | |
| Sbjct: | 232 | LGIFSTIAYVLVIGGLFANSISQVFLPKLRK----LYKDEKKIEFEKLTRKM-VFIGIFI | 286 |
| Query: | 305 | SLIALVGSGLFGIPFLSILYG-----TNLTDYWVDF-MLIMLGGSIGSFATVIDNILTAM | 358 |
| | | + +++ S G LS+L+G N+ + F +L +L G + | |
| Sbjct: | 287 | GMCSVILSLFLGEALLSLLFGKEYGENNIILIILSFGLLFILSGIFLGTTIIATGKYNVN | 346 |
| Query: | 359 | RKQQLLLIPYTGGFLISLLITNLFVMKYHILGAALSFLITMLVWLGLSIMIYLFIMNRF | 417 |
| | | K L+L+ F I L+ + L + KY +LGAAL+ I+ V L I Y F F | |
| Sbjct: | 347 | YKISLILL-----FCI-LIFSFLLIPKYSLLGAALTITISQFVAL---ISYYYFYKRIF | 396 |

[13776] Based on this analysis, it was predicted that this GAS-specific protein and its epitopes, could be useful antigens for vaccines or diagnostics.

### EXAMPLE 2618

[13777] A DNA sequence (GASx792) was identified in S. pyogenes <SEQ ID 7735> which encodes the amino acid sequence <SEQ ID 7736>. Analysis of this protein sequence reveals the following:

| Possible site: 36 | | | |
|---|---|---|---|
| >>> Seems to have no N-terminal signal sequence | | | |
| INTEGRAL | Likelihood = −10.03 | Transmembrane | 64-80 (60-84) |
| INTEGRAL | Likelihood = −9.66 | Transmembrane | 43-59 (37-63) |
| INTEGRAL | Likelihood = −8.70 | Transmembrane | 232-248 (229-251) |
| INTEGRAL | Likelihood = −8.28 | Transmembrane | 410-426 (402-432) |
| INTEGRAL | Likelihood = −6.21 | Transmembrane | 298-314 (296-322) |
| INTEGRAL | Likelihood = −6.21 | Transmembrane | 478-494 (471-496) |
| INTEGRAL | Likelihood = −5.04 | Transmembrane | 265-281 (256-288) |
| INTEGRAL | Likelihood = −3.29 | Transmembrane | 380-396 (378-397) |
| INTEGRAL | Likelihood = −2.92 | Transmembrane | 210-226 (209-227) |
| INTEGRAL | Likelihood = −2.60 | Transmembrane | 187-203 (187-204) |
| INTEGRAL | Likelihood = −2.50 | Transmembrane | 442-458 (439-458) |
| INTEGRAL | Likelihood = −1.65 | Transmembrane | 18-34 (18-35) |
| INTEGRAL | Likelihood = −1.38 | Transmembrane | 165-181 (165-181) |

----- Final Results -----
bacterial membrane --- Certainty = 0.5012 (Affirmative) < succ>
bacterial outside --- Certainty = 0.0000 (Not Clear) < succ>
bacterial cytoplasm --- Certainty = 0.0000 (Not Clear) < succ>

[13778] No corresponding DNA sequence was identified in S. agalactiae.

[13779] The protein has homology with the following sequences in the GENPEPT database:

| >GP: BAA19642 GB: AB002668 unnamed protein product [Actinobacillus | | | |
|---|---|---|---|
| actinomycetemcomitans] | | | |
| Identities = 116/459 (25%), Positives = 207/459 (44%), Gaps = 60/459 | | | |
| (13%) | | | |
| Query: | 69 | FILVFGTISAIISPINDIPDEYVHYSRTVYISEGDINLTNNNKKLRISKDVDKLI----- | 123 |
| | | FIL F I II+P PDE+ H+ R IS G I ++ K + K + K++ | |
| Sbjct: | 16 | FILTF-IIGVIITPPYQSPDEFYHFQRGYAISNGQIIPSSTEK---LDKAMMKMLSIYEG | 71 |
| Query: | 124 | ----KQSGKTFITSNLKATKHSTREYSYPYIKGTNAYYSFSYIPQALGILVGNALDLPIL | 179 |
| | | ++ T N +EY TN Y+ Y+PQALG +G+ LDL + | |
| Sbjct: | 72 | IPYRSENKVTHFLENEAQNVAWEKEYILDESANTNVYFPLIYLPQALGSFLGSTLDLSLY | 131 |
| Query: | 180 | LTYYFGRLCN-LISYAMLAFIAIKLSGSFKQVIAVVTLLPMNIYLAASFNQDGFAIGLVL | 238 |
| | | YY ++ L+S A+L F +++ S + ++ LPM ++ S N D ++ | |
| Sbjct: | 132 | NMYYLAKIFTLLVSIAILYFASVQYRLSIP--VLLILSLPMTMFQMGSTNPDS-----II | 184 |
| Query: | 239 | VTIGLFI-NLLSSKDKSNYNTKFFLYLVLCGLL------VLSKFTYFLLVCLPLFIPNEK | 291 |
| | | ++ +FI +LL+ SNYN F + C LL------V KF +L+ LP FI + | |
| Sbjct: | 185 | FSLSVFIGSLLARGLDSNYN---FTHKDFCKLLFSIFLCVTVKFNMLVLLLLPFFISKRR | 241 |
| Query: | 292 | FGKNTKLVILKKLGGLLLIFLFAAMWFRLYGQVKTPYVADFLKEV----NVSQQVKNMLE | 347 |
| | | ++ + + + +L + A K + +F + ++ + KN L | |
| Sbjct: | 242 | EIRHGSMYSIFIIILSILWIVLAMKLTEAQSHFKEGALHNFSYYIFHMDDLFEIFKNTLN | 301 |
| Query: | 348 | SPIVYSSIIIRHMVINLINMNNIFQFGA-LSYGITNLFPLYVCFFFFVYISNASKITINI | 406 |
| | | + Y ++R + L ++ F L +G T+L + F++I N K+ I | |
| Sbjct: | 302 | --LTYLKSLLRMFLGVLGWVDTKFTINEYLFFGSTSLLA-----YIFLFIHNLYKLKYVI | 354 |
| Query: | 407 | VEKM--GIIFVISAIIGATVLAMYLTWTPVGSSTVLGVQSRYLIGIIPLVLLLFSS---- | 460 |
| | | V + G++F+ + I + +T+ +G++ ++GVQ RY IP++L++FSS | |
| Sbjct: | 355 | VSVLLVGVVFLFTHFI------LLITYNEIGTTQIVGVQGRY---FIPIMLIIFSSFILK | 405 |
| Query: | 461 | QQQKFKQIEDILSDKLAIHVSLLFILAMLM--STIFRYY | 497 |
| | | + +K + I + + LFI + + + + RYY | |
| Sbjct: | 406 | KSEKTSNNKTISKYFIIVPFLFLFISSFITINTLVSRYY | 444 |

[13780] Based on this analysis, it was predicted that this GAS-specific protein and its epitopes, could be useful antigens for vaccines or diagnostics.

### EXAMPLE 2619

[13781] A DNA sequence (GASx797) was identified in S. pyogenes <SEQ ID 7737> which encodes the amino acid sequence <SEQ ID 7738>. Analysis of this protein sequence reveals the following:

Possible site: 49
>>> Seems to have no N-terminal signal sequence
----- Final Results -----
bacterial cytoplasm --- Certainty = 0.1491 (Affirmative) < succ>
bacterial membrane --- Certainty = 0.0000 (Not Clear) < succ>
bacterial outside --- Certainty = 0.0000 (Not Clear) < succ>

[13782] No corresponding DNA sequence was identified in S. agalactiae.

[13783] The protein has homology with the following sequences in the GENPEPT database:

| >GP: AAC83961 GB: L47648 cytidine monophosphate kinase | | | |
|---|---|---|---|
| [Bacillus subtilis] | | | |
| Identities = 116/220 (52%), Positives = 156/220 (70%), Gaps = 1/220 (0%) | | | |
| Query: | 2 | KAIKIAIDGPASSGKSTVAKIIAKNLGYTYLDTGAMYRSATYIALTHGYTGKEVALILEE | 61 |
| | | K + IAIDGPA++GKSTVAKI+A+ Y Y+DTGAMYR+ TY AL + + E | |
| Sbjct: | 3 | KKLSIAIDGPAAAGKSTVAKIVAEKKSYIYIDTGAMYRAITYAALQENVDLTDEEKLAEL | 62 |
| Query: | 62 | LEKNPIFFKKAKDGSQLVFLGDEDVTLAIRQNDVTNNVSWISALPEIREELVHQQRRIAQ | 121 |
| | | L++ I KDG Q VF+ DVT AIR ++++N VS + +REE+V +Q+++ + | |
| Sbjct: | 63 | LKRTDIELITTKDG-QKVFVNGTDVTEAIRTDEISNQVSIAAKHRSVREEMVKRQQQLGE | 121 |
| Query: | 122 | AGGIIMDGRDIGTVVLPDAELKIFLVASVEERAERRYKENLEKGIESDFETLKEEIAARD | 181 |
| | | GG++MDGRDIGT VLP+AE+KIFL+ASVEERA+RRY+EN++KG + ++ETL EEIA RD | |
| Sbjct: | 122 | KGGVVMDGRDIGTHVLPNAEVKIFLLASVEERAKRRYEENVKKGFDVNYETLIEEIARRD | 181 |
| Query: | 182 | YKDSHRKVSPLKAAEDALIFDTTGVSIDGVVQFIQEKAEK | 221 |
| | | DS R+VSPL+ AEDAL DTT +SI V I E E+ | |
| Sbjct: | 182 | KLDSEREVSPLRKAEDALEIDTTSLSIQEVADKILEAVEQ | 221 |

[13784] Based on this analysis, it was predicted that this GAS-specific protein and its epitopes, could be useful antigens for vaccines or diagnostics.

### EXAMPLE 2620

[13785] A DNA sequence (GASx799) was identified in S. pyogenes <SEQ ID 7739> which encodes the amino acid sequence <SEQ ID 7740>. Analysis of this protein sequence reveals the following:

Possible site: 29
>>> Seems to have no N-terminal signal sequence
----- Final Results -----
bacterial cytoplasm --- Certainty = 0.4324 (Affirmative) < succ>
bacterial membrane --- Certainty = 0.0000 (Not Clear) < succ>
bacterial outside --- Certainty = 0.0000 (Not Clear) < succ>

[13786] No corresponding DNA sequence was identified in S. agalactiae.

[13787] The protein has homology with the following sequences in the GENPEPT database:

| >GP: CAA34313 GB: X16188 ribosomal protein L35 (AA 1-66) [Bacillus | | | |
|---|---|---|---|
| stearothermophilus] | | | |
| Identities = 46/65 (70%), Positives = 51/65 (77%) | | | |
| Query: | 1 | MPKQKTHRASAKRFKRTGSGGLKRFRAFTSHRFHGKTKKQRRHLRKAGLVSSGDFKRIKA | 60 |
| | | MPK KTHR SAKRFK+T SG LKR A+TSH F KTKKQ+RHLRKA LVS GDFKRI+ | |
| Sbjct: | 1 | MPKMKTHRGSAKRFKKTASGKLKRGHAYTSHLFANKTKKQKRHLRKATLVSPGDFKRIRQ | 60 |
| Query: | 61 | MVTGL | 65 |
| | | M+ L | |
| Sbjct: | 61 | MLDNL | 65 |

[13788] Based on this analysis, it was predicted that this GAS-specific protein and its epitopes, could be useful antigens for vaccines or diagnostics.

### EXAMPLE 2621

[13789] A DNA sequence (GASx806R) was identified in S. pyogenes <SEQ ID 7741> which encodes the amino acid sequence <SEQ ID 7742>. Analysis of this protein sequence reveals the following:

Possible site: 16
>>> Seems to have no N-terminal signal sequence
----- Final Results -----
bacterial cytoplasm --- Certainty = 0.5361 (Affirmative) < succ>
bacterial membrane --- Certainty = 0.0000 (Not Clear) < succ>
bacterial outside --- Certainty = 0.0000 (Not Clear) < succ>

[13790] No corresponding DNA sequence was identified in S. agalactiae.

[13791] The protein has no significant homology with any sequences in the GENPEPT database.

[13792] Based on this analysis, it was predicted that this GAS-specific protein and its epitopes, could be useful antigens for vaccines or diagnostics.

### EXAMPLE 2622

[13793] A DNA sequence (GASx809R) was identified in S. pyogenes <SEQ ID 7743> which encodes the amino acid sequence <SEQ ID 7744>. Analysis of this protein sequence reveals the following:

| Possible site: 52 | | | |
|---|---|---|---|
| >>> Seems to have no N-terminal signal sequence | | | |
| INTEGRAL | Likelihood = −8.81 | Transmembrane | 33-49 (28-53) |

----- Final Results -----
bacterial membrane --- Certainty = 0.4524 (Affirmative) < succ>
bacterial outside --- Certainty = 0.0000 (Not Clear) < succ>
bacterial cytoplasm --- Certainty = 0.0000 (Not Clear) < succ>

[13794] No corresponding DNA sequence was identified in S. agalactiae.

[13795] The protein has no significant homology with any sequences in the GENPEPT database.

[13796] Based on this analysis, it was predicted that this GAS-specific protein and its epitopes, could be useful antigens for vaccines or diagnostics.

### EXAMPLE 2623

[13797] A DNA sequence (GASx814R) was identified in S. pyogenes <SEQ ID 7745> which encodes the amino acid sequence <SEQ ID 7746>. Analysis of this protein sequence reveals the following:

Possible site: 33
>>> Seems to have no N-terminal signal sequence
----- Final Results -----
bacterial cytoplasm --- Certainty = 0.0206 (Affirmative) < succ>
bacterial membrane --- Certainty = 0.0000 (Not Clear) < succ>
bacterial outside --- Certainty = 0.0000 (Not Clear) < succ>

[13798] No corresponding DNA sequence was identified in S. agalactiae.

[13799] The protein has no significant homology with any sequences in the GENPEPT database.

[13800] Based on this analysis, it was predicted that this GAS-specific protein and its epitopes, could be useful antigens for vaccines or diagnostics.

### EXAMPLE 2624

[13801] A DNA sequence (GASx817) was identified in S. pyogenes <SEQ ID 7747> which encodes the amino acid sequence <SEQ ID 7748>. Analysis of this protein sequence reveals the following:

| Possible site: 13 | | | |
|---|---|---|---|
| >>> Seems to have an uncleavable N-term signal seq | | | |
| INTEGRAL | Likelihood = −1.49 | Transmembrane | 16-32 (15-32) |

----- Final Results -----
bacterial membrane --- Certainty = 0.1595 (Affirmative) < succ>
bacterial outside --- Certainty = 0.0000 (Not Clear) < succ>
bacterial cytoplasm --- Certainty = 0.0000 (Not Clear) < succ>

[13802] No corresponding DNA sequence was identified in S. agalactiae.

[13803] The protein has no significant homology with any sequences in the GENPEPT database.

[13804] Based on this analysis, it was predicted that this GAS-specific protein and its epitopes, could be useful antigens for vaccines or diagnostics.

### EXAMPLE 2625

[13805] A DNA sequence (GASx820) was identified in S. pyogenes <SEQ ID 7749> which encodes the amino acid sequence <SEQ ID 7750>. Analysis of this protein sequence reveals the following:

| Possible site: 31 | | | |
|---|---|---|---|
| >>> Seems to have an uncleavable N-term signal seq | | | |
| INTEGRAL | Likelihood = −7.11 | Transmembrane | 62-78 (59-81) |
| INTEGRAL | Likelihood = −6.00 | Transmembrane | 128-144 (123-147) |
| INTEGRAL | Likelihood = −2.50 | Transmembrane | 5-21 (3-26) |

----- Final Results -----
bacterial membrane --- Certainty = 0.3845 (Affirmative) < succ>
bacterial outside --- Certainty = 0.0000 (Not Clear) < succ>
bacterial cytoplasm --- Certainty = 0.0000 (Not Clear) < succ>

[13806] No corresponding DNA sequence was identified in S. agalactiae.

[13807] The protein has homology with the following sequences in the GENPEPT database:

| >GP: AAA26653 GB: M83994 prolipoprotein signal peptidase | | | |
|---|---|---|---|
| [Staphylococcus aureus] | | | |
| Identities = 57/153 (37%), Positives = 96/153 (62%), Gaps = 6/153 (3%) | | | |
| Query: | 1 | MKKRLFVLSLILL----VALDQLSKFWIVSHIALGEVKPFIPGIVSLTYLQNNGAAFSIL | 56 |
| | | M K+ F+ + IL+ V DQ++K+ I + + +G+ IP +++T +NNGAA+ IL | |
| Sbjct: | 1 | MHKKYFIGTSILIAVFVVIFDQVTKYIIATTMKIGDSFEVIPHFLNITSHRNNGAAWGIL | 60 |
| Query: | 57 | QDQQWFFVVITVLVIGYAIYYLATHPHLNIWKQLALLLIISGGIGNFIDRLRLAYVIDMI | 116 |
| | | + FF +IT++++ +Y+ N++ Q+A+ L+ +G +GNFIDR+ V+D I | |
| Sbjct: | 61 | SGKMTFFFIITIIILIALVYFFIKDAQYNLFMQVAISLLFAGALGNFIDRILTGEVVDFI | 120 |
| Query: | 117 | HLDF--VDFAIFNVADSYLTVGVILLLICLWKE | 147 |
| | | + DF IFN+ADS LT+GVIL++I L K+ | |
| Sbjct: | 121 | DTNIFGYDFPIFNIADSSLTIGVILIIIALLKD | 153 |

[13808] Based on this analysis, it was predicted that this GAS-specific protein and its epitopes, could be useful antigens for vaccines or diagnostics.

### EXAMPLE 2626

[13809] A DNA sequence (GASx822R) was identified in S. pyogenes <SEQ ID 7751> which encodes the amino acid sequence <SEQ ID 7752>. Analysis of this protein sequence reveals the following:

Possible site: 33
>>> Seems to have no N-terminal signal sequence
----- Final Results -----
bacterial cytoplasm --- Certainty = 0.2638 (Affirmative) < succ>
bacterial membrane --- Certainty = 0.0000 (Not Clear) < succ>
bacterial outside --- Certainty = 0.0000 (Not Clear) < succ>

[13810] No corresponding DNA sequence was identified in S. agalactiae.

[13811] The protein has no significant homology with any sequences in the GENPEPT database.

[13812] Based on this analysis, it was predicted that this GAS-specific protein and its epitopes, could be useful antigens for vaccines or diagnostics.

### EXAMPLE 2627

[13813] A DNA sequence (GASx823R) was identified in S. pyogenes <SEQ ID 7753> which encodes the amino acid sequence <SEQ ID 7754>. Analysis of this protein sequence reveals the following:

Possible site: 45
>>> Seems to have no N-terminal signal sequence
----- Final Results -----
bacterial cytoplasm --- Certainty = 0.3452 (Affirmative) < succ>
bacterial membrane --- Certainty = 0.0000 (Not Clear) < succ>
bacterial outside --- Certainty = 0.0000 (Not Clear) < succ>

[13814] No corresponding DNA sequence was identified in S. agalactiae.

[13815] The protein has no significant homology with any sequences in the GENPEPT database.

[13816] Based on this analysis, it was predicted that this GAS-specific protein and its epitopes, could be useful antigens for vaccines or diagnostics.

### EXAMPLE 2628

[13817] A DNA sequence (GASx828) was identified in S. pyogenes <SEQ ID 7755> which encodes the amino acid sequence <SEQ ID 7756>. Analysis of this protein sequence reveals the following:

Possible site: 21
>>> Seems to have an uncleavable N-term signal seq
----- Final Results -----
bacterial membrane --- Certainty = 0.0000 (Not Clear) < succ>
bacterial outside --- Certainty = 0.0000 (Not Clear) < succ>
bacterial cytoplasm --- Certainty = 0.0000 (Not Clear) < succ>

[13818] No corresponding DNA sequence was identified in S. agalactiae.

[13819] The protein has no significant homology with any sequences in the GENPEPT database.

[13820] Based on this analysis, it was predicted that this GAS-specific protein and its epitopes, could be useful antigens for vaccines or diagnostics.

### EXAMPLE 2629

[13821] A DNA sequence (GASx836) was identified in S. pyogenes <SEQ ID 7757> which encodes the amino acid sequence <SEQ ID 7758>. Analysis of this protein sequence reveals the following:

Possible site: 18
>>> Seems to have no N-terminal signal sequence
----- Final Results -----
bacterial cytoplasm --- Certainty = 0.4333 (Affirmative) < succ>
bacterial membrane --- Certainty = 0.0000 (Not Clear) < succ>
bacterial outside --- Certainty = 0.0000 (Not Clear) < succ>

[13822] No corresponding DNA sequence was identified in S. agalactiae.

[13823] The protein has no significant homology with any sequences in the GENPEPT database.

[13824] Based on this analysis, it was predicted that this GAS-specific protein and its epitopes, could be useful antigens for vaccines or diagnostics.

### EXAMPLE 2630

[13825] A DNA sequence (GASx853R) was identified in S. pyogenes <SEQ ID 7759> which encodes the amino acid sequence <SEQ ID 7760>. Analysis of this protein sequence reveals the following:

Possible site: 14
>>> Seems to have no N-terminal signal sequence
----- Final Results -----
bacterial cytoplasm --- Certainty = 0.4906 (Affirmative) < succ>
bacterial membrane --- Certainty = 0.0000 (Not Clear) < succ>
bacterial outside --- Certainty = 0.0000 (Not Clear) < succ>

[13826] No corresponding DNA sequence was identified in S. agalactiae.

[13827] The protein has no significant homology with any sequences in the GENPEPT database.

[13828] Based on this analysis, it was predicted that this GAS-specific protein and its epitopes, could be useful antigens for vaccines or diagnostics.

### EXAMPLE 2631

[13829] A DNA sequence (GASx854R) was identified in S. pyogenes <SEQ ID 7761> which encodes the amino acid sequence <SEQ ID 7762>. Analysis of this protein sequence reveals the following:

Possible site: 43
>>> Seems to have no N-terminal signal sequence
----- Final Results -----
bacterial cytoplasm --- Certainty = 0.3989 (Affirmative) < succ>
bacterial membrane --- Certainty = 0.0000 (Not Clear) < succ>
bacterial outside --- Certainty = 0.0000 (Not Clear) < succ>

[13830] A related sequence was also identified in GAS <SEQ ID 9147> which encodes the amino acid sequence <SEQ ID 9148>. Analysis of this protein sequence reveals the following:

Possible site: 42
>>> Seems to have no N-terminal signal sequence
----- Final Results -----
bacterial cytoplasm --- Certainty = 0.399 (Affirmative) < succ>
bacterial membrane --- Certainty = 0.000 (Not Clear) < succ>
bacterial outside --- Certainty = 0.000 (Not Clear) < succ>

[13831] No corresponding DNA sequence was identified in S. agalactiae.

[13832] The protein has homology with the following sequences in the GENPEPT database:

| >GP: AAB59092 GB: M97157 pyrogenic exotoxin C [Streptococcus pyogenes] | | | |
|---|---|---|---|
| Identities = 39/67 (58%), Positives = 53/67 (78%) | | | |
| Query: | 1 | LMESKEIYLTKSPYIRGSLEIHSKNRKHEKINLYDAKPNSTRSDVFKKYKDNKTINMKDF | 60 |
| | | LM++ +IY SPY+ G +EI +K+ KHE+I+L+D+ TRSD+F KYKDN+ INMK+F | |
| Sbjct: | 167 | LMDNYKIYDATSPYVSGRIEIGTKDGKHEQIDLFDSPNEGTRSDIFAKYKDNRIINMKNF | 226 |
| Query: | 61 | SHFDIYL | 67 |
| | | SHFDIYL | |
| Sbjct: | 227 | SHFDIYL | 233 |

[13833] Based on this analysis, it was predicted that this GAS-specific protein and its epitopes, could be useful antigens for vaccines or diagnostics.

### EXAMPLE 2632

[13834] A DNA sequence (GASx855R) was identified in S. pyogenes <SEQ ID 7763> which encodes the amino acid sequence <SEQ ID 7764>. Analysis of this protein sequence reveals the following:

Possible site: 33
>>> Seems to have a cleavable N-term signal seq.
----- Final Results -----
bacterial outside --- Certainty = 0.3000 (Affirmative) < succ>
bacterial membrane --- Certainty = 0.0000 (Not Clear) < succ>
bacterial cytoplasm --- Certainty = 0.0000 (Not Clear) < succ>

[13835] No corresponding DNA sequence was identified in S. agalactiae.

[13836] The protein has no significant homology with any sequences in the GENPEPT database.

[13837] Based on this analysis, it was predicted that this GAS-specific protein and its epitopes, could be useful antigens for vaccines or diagnostics.

### EXAMPLE 2633

[13838] A DNA sequence (GASx856) was identified in S. pyogenes <SEQ ID 7765> which encodes the amino acid sequence <SEQ ID 7766>. Analysis of this protein sequence reveals the following:

Possible site: 26
>>> Seems to have no N-terminal signal sequence
----- Final Results -----
bacterial cytoplasm --- Certainty = 0.4145 (Affirmative) < succ>
bacterial membrane --- Certainty = 0.0000 (Not Clear) < succ>
bacterial outside --- Certainty = 0.0000 (Not Clear) < succ>

[13839] No corresponding DNA sequence was identified in S. agalactiae.

[13840] The protein has no significant homology with any sequences in the GENPEPT database.

[13841] Based on this analysis, it was predicted that this GAS-specific protein and its epitopes, could be useful antigens for vaccines or diagnostics.

### EXAMPLE 2634

[13842] A DNA sequence (GASx862) was identified in S. pyogenes <SEQ ID 7767> which encodes the amino acid sequence <SEQ ID 7768>. Analysis of this protein sequence reveals the following:

Possible site: 19
>>> Seems to have no N-terminal signal sequence
----- Final Results -----
bacterial cytoplasm --- Certainty = 0.6285 (Affirmative) < succ>
bacterial membrane --- Certainty = 0.0000 (Not Clear) < succ>
bacterial outside --- Certainty = 0.0000 (Not Clear) < succ>

[13843] No corresponding DNA sequence was identified in S. agalactiae.

[13844] The protein has no significant homology with any sequences in the GENPEPT database.

[13845] Based on this analysis, it was predicted that this GAS-specific protein and its epitopes, could be useful antigens for vaccines or diagnostics.

### EXAMPLE 2635

[13846] A DNA sequence (GASx863) was identified in S. pyogenes <SEQ ID 7769> which encodes the amino acid sequence <SEQ ID 7770>. Analysis of this protein sequence reveals the following:

Possible site: 51
>>> Seems to have no N-terminal signal sequence
----- Final Results -----
bacterial membrane --- Certainty = 0.0000 (Not Clear) < succ>
bacterial outside --- Certainty = 0.0000 (Not Clear) < succ>
bacterial cytoplasm --- Certainty = 0.0000 (Not Clear) < succ>

[13847] No corresponding DNA sequence was identified in S. agalactiae.

[13848] The protein has no significant homology with any sequences in the GENPEPT database.

[13849] Based on this analysis, it was predicted that this GAS-specific protein and its epitopes, could be useful antigens for vaccines or diagnostics.

### EXAMPLE 2636

[13850] A DNA sequence (GASx878) was identified in S. pyogenes <SEQ ID 7771> which encodes the amino acid sequence <SEQ ID 7772>. Analysis of this protein sequence reveals the following:

Possible site: 21
>>> Seems to have a cleavable N-term signal seq.
----- Final Results -----
bacterial outside --- Certainty = 0.3000 (Affirmative) < succ>
bacterial membrane --- Certainty = 0.0000 (Not Clear) < succ>
bacterial cytoplasm --- Certainty = 0.0000 (Not Clear) < succ>

[13851] No corresponding DNA sequence was identified in S. agalactiae.

[13852] The protein has no significant homology with any sequences in the GENPEPT database.

[13853] Based on this analysis, it was predicted that this GAS-specific protein and its epitopes, could be useful antigens for vaccines or diagnostics.

### EXAMPLE 2637

[13854] A DNA sequence (GASx887R) was identified in S. pyogenes <SEQ ID 7773> which encodes the amino acid sequence <SEQ ID 7774>. Analysis of this protein sequence reveals the following:

Possible site: 20
>>> Seems to have no N-terminal signal sequence
----- Final Results -----
bacterial cytoplasm --- Certainty = 0.1911 (Affirmative) < succ>
bacterial membrane --- Certainty = 0.0000 (Not Clear) < succ>
bacterial outside --- Certainty = 0.0000 (Not Clear) < succ>

[13855] No corresponding DNA sequence was identified in S. agalactiae.

[13856] The protein has no significant homology with any sequences in the GENPEPT database.

[13857] Based on this analysis, it was predicted that this GAS-specific protein and its epitopes, could be useful antigens for vaccines or diagnostics.

### EXAMPLE 2638

[13858] A DNA sequence (GASx910) was identified in S. pyogenes <SEQ ID 7775> which encodes the amino acid sequence <SEQ ID 7776>. Analysis of this protein sequence reveals the following:

Possible site: 20
>>> Seems to have no N-terminal signal sequence
----- Final Results -----
bacterial cytoplasm --- Certainty = 0.4511 (Affirmative) < succ>
bacterial membrane --- Certainty = 0.0000 (Not Clear) < succ>
bacterial outside --- Certainty = 0.0000 (Not Clear) < succ>

[13859] No corresponding DNA sequence was identified in S. agalactiae.

[13860] The protein has no significant homology with any sequences in the GENPEPT database.

[13861] Based on this analysis, it was predicted that this GAS-specific protein and its epitopes, could be useful antigens for vaccines or diagnostics.

### EXAMPLE 2639

[13862] A DNA sequence (GASx911) was identified in S. pyogenes <SEQ ID 7777> which encodes the amino acid sequence <SEQ ID 7778>. Analysis of this protein sequence reveals the following:

Possible site: 52
>>> Seems to have no N-terminal signal sequence
----- Final Results -----
bacterial cytoplasm --- Certainty = 0.2993 (Affirmative) < succ>
bacterial membrane --- Certainty = 0.0000 (Not Clear) < succ>
bacterial outside --- Certainty = 0.0000 (Not Clear) < succ>

[13863] No corresponding DNA sequence was identified in S. agalactiae.

[13864] The protein has homology with the following sequences in the GENPEPT database:

| >GP: AAC74707 GB: AE000259 glutathionine S-transferase [Escherichia | | | |
|---|---|---|---|
| coli] | | | |
| Identities = 29/137 (21%), Positives = 61/137 (44%), Gaps = 9/137 (6%) | | | |
| Query: | 1 | LPFIAKQTLKSQLIPQDNLLAESRFNEIMDFLTGDFPLVFRPMINPHRYTISQDNQALEK | 60 |
| | | + ++A QL+ N ++ + E ++++ + F P+ P E+ | |
| Sbjct: | 70 | MQYLADSVPDRQLLAPVNSISRYKTIEWLNYIATELHKGFTPLFRP---------DTPEE | 120 |
| Query: | 61 | VKQASYKRMDIAMTHLDSLIGESGHVYRDQQTIADAYAYAMALWSQKTPKSYENYPHLAA | 120 |
| | | K +++ + +++ + + + + TIADAY + + W+ + E H+AA | |
| Sbjct: | 121 | YKPTVRAQLEKKLQYVNEALKDEHWICGQRFTIADAYLFTVLRWAYAVKLNLEGLEHIAA | 180 |
| Query: | 121 | FMAKMVEDSAVQQVLNA | 137 |
| | | FM +M E VQ L+A | |
| Sbjct: | 181 | FMQRMAERPEVQDALSA | 197 |

[13865] Based on this analysis, it was predicted that this GAS-specific protein and its epitopes, could be useful antigens for vaccines or diagnostics.

### EXAMPLE 2640

[13866] A DNA sequence (GASx932R) was identified in S. pyogenes <SEQ ID 7779> which encodes the amino acid sequence <SEQ ID 7780>. Analysis of this protein sequence reveals the following:

Possible site: 14
>>> Seems to have no N-terminal signal sequence
----- Final Results -----
bacterial cytoplasm --- Certainty = 0.4081 (Affirmative) < succ>
bacterial membrane --- Certainty = 0.0000 (Not Clear) < succ>
bacterial outside --- Certainty = 0.0000 (Not Clear) < succ>

[13867] No corresponding DNA sequence was identified in S. agalactiae.

[13868] The protein has no significant homology with any sequences in the GENPEPT database.

[13869] Based on this analysis, it was predicted that this GAS-specific protein and its epitopes, could be useful antigens for vaccines or diagnostics.

### EXAMPLE 2641

[13870] A DNA sequence (GASx935) was identified in S. pyogenes <SEQ ID 7781> which encodes the amino acid sequence <SEQ ID 7782>. Analysis of this protein sequence reveals the following:

Possible site: 45
>>> Seems to have no N-terminal signal sequence
----- Final Results -----
bacterial cytoplasm --- Certainty = 0.6304 (Affirmative) < succ>
bacterial membrane --- Certainty = 0.0000 (Not Clear) < succ>
bacterial outside --- Certainty = 0.0000 (Not Clear) < succ>

[13871] No corresponding DNA sequence was identified in S. agalactiae.

[13872] The protein has no significant homology with any sequences in the GENPEPT database.

[13873] Based on this analysis, it was predicted that this GAS-specific protein and its epitopes, could be useful antigens for vaccines or diagnostics.

### EXAMPLE 2642

[13874] A DNA sequence (GASx937) was identified in S. pyogenes <SEQ ID 7783> which encodes the amino acid sequence <SEQ ID 7784>. Analysis of this protein sequence reveals the following:

Possible site: 34
>>> Seems to have no N-terminal signal sequence
----- Final Results -----
bacterial cytoplasm --- Certainty = 0.3503 (Affirmative) < succ>
bacterial membrane --- Certainty = 0.0000 (Not Clear) < succ>
bacterial outside --- Certainty = 0.0000 (Not Clear) < succ>

[13875] No corresponding DNA sequence was identified in S. agalactiae.

[13876] The protein has no significant homology with any sequences in the GENPEPT database.

[13877] Based on this analysis, it was predicted that this GAS-specific protein and its epitopes, could be useful antigens for vaccines or diagnostics.

### EXAMPLE 2643

[13878] A DNA sequence (GASx938R) was identified in S. pyogenes <SEQ ID 7785> which encodes the amino acid sequence <SEQ ID 7786>. Analysis of this protein sequence reveals the following:

Possible site: 27
>>> Seems to have no N-terminal signal sequence
----- Final Results -----
bacterial cytoplasm --- Certainty = 0.2884 (Affirmative) < succ>
bacterial membrane --- Certainty = 0.0000 (Not Clear) < succ>
bacterial outside --- Certainty = 0.0000 (Not Clear) < succ>

[13879] No corresponding DNA sequence was identified in S. agalactiae.

[13880] The protein has no significant homology with any sequences in the GENPEPT database.

[13881] Based on this analysis, it was predicted that this GAS-specific protein and its epitopes, could be useful antigens for vaccines or diagnostics.

### EXAMPLE 2644

[13882] A DNA sequence (GASx939) was identified in S. pyogenes <SEQ ID 7787> which encodes the amino acid sequence <SEQ ID 7788>. Analysis of this protein sequence reveals the following:

Possible site: 50
>>> Seems to have no N-terminal signal sequence
----- Final Results -----
bacterial cytoplasm --- Certainty = 0.2771 (Affirmative) < succ>
bacterial membrane --- Certainty = 0.0000 (Not Clear) < succ>
bacterial outside --- Certainty = 0.0000 (Not Clear) < succ>

[13883] No corresponding DNA sequence was identified in S. agalactiae.

[13884] The protein has no significant homology with any sequences in the GENPEPT database.

[13885] Based on this analysis, it was predicted that this GAS-specific protein and its epitopes, could be useful antigens for vaccines or diagnostics.

### EXAMPLE 2645

[13886] A DNA sequence (GASx941) was identified in S. pyogenes <SEQ ID 7789> which encodes the amino acid sequence <SEQ ID 7790>. Analysis of this protein sequence reveals the following:

Possible site: 29
>>> Seems to have no N-terminal signal sequence
----- Final Results -----
bacterial cytoplasm --- Certainty = 0.2257 (Affirmative) < succ>
bacterial membrane --- Certainty = 0.0000 (Not Clear) < succ>
bacterial outside --- Certainty = 0.0000 (Not Clear) < succ>

[13887] No corresponding DNA sequence was identified in S. agalactiae.

[13888] The protein has no significant homology with any sequences in the GENPEPT database.

[13889] Based on this analysis, it was predicted that this GAS-specific protein and its epitopes, could be useful antigens for vaccines or diagnostics.

### EXAMPLE 2646

[13890] A DNA sequence (GASx942R) was identified in S. pyogenes <SEQ ID 7791> which encodes the amino acid sequence <SEQ ID 7792>. Analysis of this protein sequence reveals the following:

Possible site: 23
>>> Seems to have no N-terminal signal sequence
----- Final Results -----
bacterial cytoplasm --- Certainty = 0.3255 (Affirmative) < succ>
bacterial membrane --- Certainty = 0.0000 (Not Clear) < succ>
bacterial outside --- Certainty = 0.0000 (Not Clear) < succ>

[13891] No corresponding DNA sequence was identified in S. agalactiae.

[13892] The protein has homology with the following sequences in the GENPEPT database:

| >GP: AAB91582 GB: AF242881 ymh [Agrobacterium tumefaciens] (ver 2) | | | |
|---|---|---|---|
| Identities = 75/223 (33%), Positives = 116/223 (51%), Gaps = 2/223 (0%) | | | |
| Query: | 38 | DQNSGFNKHKRVHNLVSDILNRTQNTDNIKLVIEYVCNPLRYINEVSIFEQLRTAINIPL | 97 |
| | | D + K R++N + N + +I I P R+ + FE +R +N L | |
| Sbjct: | 39 | DTDPQMTKRHRLYNAFASDQNSRKQRTHIIAFIRKAMKPERFARDSERFEPMRLNLNRAL | 98 |
| Query: | 98 | SLKGLIVSDSGQIVTTTTSKTLSEAKKRFETLDSRLKELKVHPHVLKFCTQELLQENYFH | 157 |
| | | + GL V SG++ ++TLS+A +R L + L VHP VL+FC +ELL +NYFH | |
| Sbjct: | 99 | AFAGLAVKASGELAAVDAAETLSQATRRALELRADLTSRGVHPDVLRFCREELLVDNYFH | 158 |
| Query: | 158 | AVFEASKGVFHRIRLLTGSAMDSASLIDQCFKPGEPIVIINGNKLQTLDEQSEYKGLKNL | 217 |
| | | AV EA K V +IR TG D A L+D+ F P++ I N+LQ+ E+ E +G NL | |
| Sbjct: | 159 | AVLEAVKSVADKIRQRTGLTDDGAVLVDRAFSGDAPMLAI--NELQSESEKGEQRGFSNL | 216 |
| Query: | 218 | LLAIAHLYRNSKAHKLKYYNPDNLNDALTALTLMSLAHNLLDS | 260 |
| | | + ++RN+ AH + + + DA ++ SL H +D+ | |
| Sbjct: | 217 | VKGTFSMFRNTTAHAPRIHWQMSKEDAEDLFSMFSLMHRRIDA | 259 |

[13893] Based on this analysis, it was predicted that this GAS-specific protein and its epitopes, could be useful antigens for vaccines or diagnostics.

### EXAMPLE 2647

[13894] A DNA sequence (GASx943R) was identified in S. pyogenes <SEQ ID 7793> which encodes the amino acid sequence <SEQ ID 7794>. Analysis of this protein sequence reveals the following:

Possible site: 30
>>> Seems to have no N-terminal signal sequence
----- Final Results -----
bacterial cytoplasm --- Certainty = 0.1526 (Affirmative) < succ>
bacterial membrane --- Certainty = 0.0000 (Not Clear) < succ>
bacterial outside --- Certainty = 0.0000 (Not Clear) < succ>

[13895] No corresponding DNA sequence was identified in S. agalactiae.

[13896] The protein has no significant homology with any sequences in the GENPEPT database.

[13897] Based on this analysis, it was predicted that this GAS-specific protein and its epitopes, could be useful antigens for vaccines or diagnostics.

### EXAMPLE 2648

[13898] A DNA sequence (GASx944) was identified in S. pyogenes <SEQ ID 7795> which encodes the amino acid sequence <SEQ ID 7796>. Analysis of this protein sequence reveals the following:

Possible site: 19
>>> Seems to have no N-terminal signal sequence
----- Final Results -----
bacterial cytoplasm --- Certainty = 0.1427 (Affirmative) < succ>
bacterial membrane --- Certainty = 0.0000 (Not Clear) < succ>
bacterial outside --- Certainty = 0.0000 (Not Clear) < succ>

[13899] No corresponding DNA sequence was identified in S. agalactiae.

[13900] The protein has no significant homology with any sequences in the GENPEPT database.

[13901] Based on this analysis, it was predicted that this GAS-specific protein and its epitopes, could be useful antigens for vaccines or diagnostics.

### EXAMPLE 2649

[13902] A DNA sequence (GASx945) was identified in S. pyogenes <SEQ ID 7797> which encodes the amino acid sequence <SEQ ID 7798>. Analysis of this protein sequence reveals the following:

Possible site: 13
>>> Seems to have no N-terminal signal sequence
----- Final Results -----
bacterial cytoplasm --- Certainty = 0.2578 (Affirmative) < succ>
bacterial membrane --- Certainty = 0.0000 (Not Clear) < succ>
bacterial outside --- Certainty = 0.0000 (Not Clear) < succ>

[13903] No corresponding DNA sequence was identified in S. agalactiae.

[13904] The protein has homology with the following sequences in the GENPEPT database:

| >GP: AAC98430 GB: L29324 excisionase [Streptococcus pneumoniae] | | | |
|---|---|---|---|
| Identities = 23/54 (42%), Positives = 40/54 (73%) | | | |
| Query: | 1 | LIQQWEGLTVATAKQWATEMRDHPDFKQFVLNPTHRIVFIDYEGFKLFVQWKSR | 54 |
| | | ++++W+GL T +W EMR++ F +V+NPTH++VFI+ EGF+ F++WK + | |
| Sbjct: | 21 | ILKRWDGLNKYTLNRWIKEMRENRTFSMYVINPTHKLVFINLEGFESFLRWKQK | 74 |

[13905] Based on this analysis, it was predicted that this GAS-specific protein and its epitopes, could be useful antigens for vaccines or diagnostics.

### EXAMPLE 2650

[13906] A DNA sequence (GASx946) was identified in S. pyogenes <SEQ ID 7799> which encodes the amino acid sequence <SEQ ID 7800>. Analysis of this protein sequence reveals the following:

| Possible site: 16 | | | |
|---|---|---|---|
| >>> Seems to have an uncleavable N-term signal seq | | | |
| INTEGRAL | Likelihood = −4.99 | Transmembrane | 3-19 (1-23) |

----- Final Results -----
bacterial membrane --- Certainty = 0.2996 (Affirmative) < succ>
bacterial outside --- Certainty = 0.0000 (Not Clear) < succ>
bacterial cytoplasm --- Certainty = 0.0000 (Not Clear) < succ>

[13907] No corresponding DNA sequence was identified in S. agalactiae.

[13908] The protein has no significant homology with any sequences in the GENPEPT database.

[13909] Based on this analysis, it was predicted that this GAS-specific protein and its epitopes, could be useful antigens for vaccines or diagnostics.

### EXAMPLE 2651

[13910] A DNA sequence (GASx950) was identified in S. pyogenes <SEQ ID 7801> which encodes the amino acid sequence <SEQ ID 7802>. Analysis of this protein sequence reveals the following:

Possible site: 51
>>> Seems to have no N-terminal signal sequence
----- Final Results -----
bacterial cytoplasm --- Certainty = 0.2211 (Affirmative) < succ>
bacterial membrane --- Certainty = 0.0000 (Not Clear) < succ>
bacterial outside --- Certainty = 0.0000 (Not Clear) < succ>

[13911] No corresponding DNA sequence was identified in S. agalactiae.

[13912] The protein has no significant homology with any sequences in the GENPEPT database.

[13913] Based on this analysis, it was predicted that this GAS-specific protein and its epitopes, could be useful antigens for vaccines or diagnostics.

### EXAMPLE 2652

[13914] A DNA sequence (GASx951) was identified in S. pyogenes <SEQ ID 7803> which encodes the amino acid sequence <SEQ ID 7804>. Analysis of this protein sequence reveals the following:

Possible site: 30
>>> Seems to have no N-terminal signal sequence
----- Final Results -----
bacterial cytoplasm --- Certainty = 0.4258 (Affirmative) < succ>
bacterial membrane --- Certainty = 0.0000 (Not Clear) < succ>
bacterial outside --- Certainty = 0.0000 (Not Clear) < succ>

[13915] No corresponding DNA sequence was identified in S. agalactiae.

[13916] The protein has no significant homology with any sequences in the GENPEPT database.

[13917] Based on this analysis, it was predicted that this GAS-specific protein and its epitopes, could be useful antigens for vaccines or diagnostics.

### EXAMPLE 2653

[13918] A DNA sequence (GASx952) was identified in S. pyogenes <SEQ ID 7805> which encodes the amino acid sequence <SEQ ID 7806>. Analysis of this protein sequence reveals the following:

Possible site: 46
>>> Seems to have no N-terminal signal sequence
----- Final Results -----
bacterial cytoplasm --- Certainty = 0.2476 (Affirmative) < succ>
bacterial membrane --- Certainty = 0.0000 (Not Clear) < succ>
bacterial outside --- Certainty = 0.0000 (Not Clear) < succ>

[13919] No corresponding DNA sequence was identified in S. agalactiae.

[13920] The protein has homology with the following sequences in the GENPEPT database:

| >GP: AAF74110 GB: AF212847 ORF245 [Lactococcus lactis bacteriophage | | | |
|---|---|---|---|
| ul36.2] | | | |
| Identities = 82/265 (30%), Positives = 128/265 (47%), Gaps = 27/265 (10%) | | | |
| Query: | 1 | MANQLSTQQVKRDITTDPTLLTGADIKKYFDPQNLLSEKQVGQALALCKGRNLNPFANEV | 60 |
| | | MAN+L V L IK+Y D S+ ++ + LCK N+NPF EV | |
| Sbjct: | 1 | MANELGIFSVDN--------LNMTTIKQYLDGGGKASDAELVLLINLCKQNNMNPFMKEV | 52 |
| Query: | 61 | YIVAYKNNSGTDFSLIVSKEAFMKRAERCEGYDGFEAGITVM-RNGEMVEIEGSLKLPDD | 119 |
| | | Y + Y N ++VS++ + KRA + + G E G+ V+ ++G + EG+ K + | |
| Sbjct: | 53 | YFIKYGNQPA---QIVVSRDFYRKRAFQNPNFVGIEVGVIVLNKDGVLEHNEGTFKTHEQ | 109 |
| Query: | 120 | VLIGGWAIVYRKDRSHRYKVTVDFNEYVKLDKYGNPRSTWKSMPGTMIRKTALVQTLREA | 179 |
| | | L+G WA V+ K+ V V ++EYV++ K G+P W + P TM+ K A Q LR A | |
| Sbjct: | 110 | ELVGAWARVHLKNTEIPVYVAVSYDEYVQM-KDGHPNKMWTNKPCTMLGKVAESQALRMA | 168 |
| Query: | 180 | FPDELGNMYTDIDGGDTFDAIKDVTPQETQEEVRARK---MAQIEQYKQEQ--TQKQTQK | 234 |
| | | FP E Y + + + P++ EV K AQIE + +E +K + | |
| Sbjct: | 169 | FPAEFSGTYGEEEYPE---------PEKEPREVNGVKEPDRAQIESFDKEDYAAKKIEEL | 219 |
| Query: | 235 | ADTSYPVDEVSEHTDDPVQGELLDG | 259 |
| | | + + P EV E T + + E L+G | |
| Sbjct: | 220 | KEKAQPQKEVVEETGEVIDEEPLEG | 244 |

[13921] Based on this analysis, it was predicted that this GAS-specific protein and its epitopes, could be useful antigens for vaccines or diagnostics.

### EXAMPLE 2654

[13922] A DNA sequence (GASx953) was identified in S. pyogenes <SEQ ID 7807> which encodes the amino acid sequence <SEQ ID 7808>. Analysis of this protein sequence reveals the following:

Possible site: 13
>>> Seems to have no N-terminal signal sequence
----- Final Results -----
bacterial cytoplasm --- Certainty = 0.3413 (Affirmative) < succ>
bacterial membrane --- Certainty = 0.0000 (Not Clear) < succ>
bacterial outside --- Certainty = 0.0000 (Not Clear) < succ>

[13923] No corresponding DNA sequence was identified in S. agalactiae.

[13924] The protein has homology with the following sequences in the GENPEPT database:

| >GP: AAF74111 GB: AF212847 ORF364 [Lactococcus lactis bacteriophage | | | |
|---|---|---|---|
| u136.2] | | | |
| Identities = 67/222 (30%), Positives = 120/222 (53%), Gaps = 3/222 (1%) | | | |
| Query: | 1 | MQELQLKVTQAQVEIIDREKFEQNINEVVAKYQNYAVTAGTIKDDKQVLADLRKLKKQLS | 60 |
| | | ++++++ A + I++ EKF+ +IN+VVA+Y + + + D++ A L KL ++ | |
| Sbjct: | 19 | VKDIEIDFKPAIINILEEEKFKASINQVVAEYTGHVPSVENLTVDRKTRASLNKLITKIE | 78 |
| Query: | 61 | DERIKVKKELSKPADDIDGYIKQASKPLDDTIDKIATDVKEFEDHQKALRLDTVKSYLSN | 120 |
| | | R ++KK ++ P + +G+ K+A P++ I+ I +K+ E QK R V L | |
| Sbjct: | 79 | TRRKEIKKSINVPYAEFEGWYKKAIAPMEKVIETIDAGIKKIEAEQKESRKKVVHELLVE | 138 |
| Query: | 121 | KASEYMLDPRIFDEKAMEYTKAGNFMADGVTLKKVTMKSLEDLVTFEYQKEQEVEKAKAT | 180 |
| | | ++ +D RIF+ ++ K+ NF + + KK + S+ ++ E QK E + AK + | |
| Sbjct: | 139 | LTTDTEVDSRIFENFVDDWAKSSNF--NDIKPKKQLIDSITYVIDGEKQKIAEYKSAKQS | 196 |
| Query: | 181 | ISGQCAEYGMTDQPYIRMLKE-MTLVEVLGQIKADYLAEKQK | 221 |
| | | IS C +T PYIRML T+ E++ I D L EKQ+ | |
| Sbjct: | 197 | ISDFCFGNNITSTPYIRMLDSGKTVSEIMAVITEDVLFEKQR | 238 |

[13925] Based on this analysis, it was predicted that this GAS-specific protein and its epitopes, could be useful antigens for vaccines or diagnostics.

### EXAMPLE 2655

[13926] A DNA sequence (GASx954) was identified in S. pyogenes <SEQ ID 7809> which encodes the amino acid sequence <SEQ ID 7810>. Analysis of this protein sequence reveals the following:

Possible site: 56
>>> Seems to have no N-terminal signal sequence
----- Final Results -----
bacterial cytoplasm --- Certainty = 0.3884 (Affirmative) < succ>
bacterial membrane --- Certainty = 0.0000 (Not Clear) < succ>
bacterial outside --- Certainty = 0.0000 (Not Clear) < succ>

[13927] No corresponding DNA sequence was identified in S. agalactiae.

[13928] The protein has no significant homology with any sequences in the GENPEPT database.

[13929] Based on this analysis, it was predicted that this GAS-specific protein and its epitopes, could be useful antigens for vaccines or diagnostics.

### EXAMPLE 2656

[13930] A DNA sequence (GASx955) was identified in S. pyogenes <SEQ ID 7811> which encodes the amino acid sequence <SEQ ID 7812>. Analysis of this protein sequence reveals the following:

Possible site: 34
>>> Seems to have no N-terminal signal sequence
----- Final Results -----
bacterial cytoplasm --- Certainty = 0.1777 (Affirmative) < succ>
bacterial membrane --- Certainty = 0.0000 (Not Clear) < succ>
bacterial outside --- Certainty = 0.0000 (Not Clear) < succ>

[13931] No corresponding DNA sequence was identified in S. agalactiae.

[13932] The protein has no significant homology with any sequences in the GENPEPT database.

[13933] Based on this analysis, it was predicted that this GAS-specific protein and its epitopes, could be useful antigens for vaccines or diagnostics.

### EXAMPLE 2657

[13934] A DNA sequence (GASx956) was identified in S. pyogenes <SEQ ID 7813> which encodes the amino acid sequence <SEQ ID 7814>. Analysis of this protein sequence reveals the following:

| Possible site: 16 | | | |
|---|---|---|---|
| >>> Seems to have no N-terminal signal sequence | | | |
| INTEGRAL | Likelihood = −2.44 | Transmembrane | 82-98 (81-98) |

----- Final Results -----
bacterial membrane --- Certainty = 0.1977 (Affirmative) < succ>
bacterial outside --- Certainty = 0.0000 (Not Clear) < succ>
bacterial cytoplasm --- Certainty = 0.0000 (Not Clear) < succ>

[13935] No corresponding DNA sequence was identified in S. agalactiae.

[13936] The protein has no significant homology with any sequences in the GENPEPT database.

[13937] Based on this analysis, it was predicted that this GAS-specific protein and its epitopes, could be useful antigens for vaccines or diagnostics.

### EXAMPLE 2658

[13938] A DNA sequence (GASx958) was identified in S. pyogenes <SEQ ID 7815> which encodes the amino acid sequence <SEQ ID 7816>. Analysis of this protein sequence reveals the following:

Possible site: 34
>>> Seems to have no N-terminal signal sequence
----- Final Results -----
bacterial cytoplasm --- Certainty = 0.3673 (Affirmative) < succ>
bacterial membrane --- Certainty = 0.0000 (Not Clear) < succ>
bacterial outside --- Certainty = 0.0000 (Not Clear) < succ>

[13939] No corresponding DNA sequence was identified in S. agalactiae.

[13940] The protein has no significant homology with any sequences in the GENPEPT database.

[13941] Based on this analysis, it was predicted that this GAS-specific protein and its epitopes, could be useful antigens for vaccines or diagnostics.

### EXAMPLE 2659

[13942] A DNA sequence (GASx960) was identified in S. pyogenes <SEQ ID 7817> which encodes the amino acid sequence <SEQ ID 7818>. Analysis of this protein sequence reveals the following:

Possible site: 36
>>> Seems to have no N-terminal signal sequence
----- Final Results -----
bacterial cytoplasm --- Certainty = 0.1852 (Affirmative) < succ>
bacterial membrane --- Certainty = 0.0000 (Not Clear) < succ>
bacterial outside --- Certainty = 0.0000 (Not Clear) < succ>

[13943] No corresponding DNA sequence was identified in S. agalactiae.

[13944] The protein has no significant homology with any sequences in the GENPEPT database.

[13945] Based on this analysis, it was predicted that this GAS-specific protein and its epitopes, could be useful antigens for vaccines or diagnostics.

### EXAMPLE 2660

[13946] A DNA sequence (GASx961) was identified in S-pyogenes <SEQ ID 7819> which encodes the amino acid sequence <SEQ ID 7820>. Analysis of this protein sequence reveals the following:

Possible site: 45
>>> Seems to have no N-terminal signal sequence
----- Final Results -----
bacterial cytoplasm --- Certainty = 0.7380(Affirmative) < succ>
bacterial membrane --- Certainty = 0.0000(Not Clear) < succ>
bacterial outside --- Certainty = 0.0000(Not Clear) < succ>

[13947] No corresponding DNA sequence was identified in S. agalactiae.

[13948] The protein has homology with the following sequences in the GENPEPT database:

| >GP: AAFE3071 GB: AF158600 gp137 [Streptococcus thermophilus | | | |
|---|---|---|---|
| bacteriophage Sfill] | | | |
| Identities = 67/136 (49%), Positives = 97/136 (71%), Gaps = 2/136 (1%) | | | |
| Query: | 5 | PEIDIQKTKSNAKRKLREYPRWRRIANDVDTQKVTATYSFEPRQPHGTPSKPVERLALNR | 64 |
| | | PEID + T KRKLREYPRWR IA+D QK+T ++F PR G +KPVE +A+ R | |
| Sbjct: | 4 | PEIDEKATLKRCKRKLREYPRWREIAHDSAEQKITQEFTFMPRG--GGVNKPVENIAVRR | 61 |
| Query: | 65 | VSAEQELDTIERAVNGIFDPEYRLILIDKYLLTYPKTDCDIYTKLGYEKSQYYNMLDNAL | 124 |
| | | V A EL+ IE+AVNG++ P+YR ILI+KYL PK + I +G+E++ + +L+N++ | |
| Sbjct: | 62 | VDALNELEAIEQAVNGLYRPDYRRILIEKYLAYPPKPNWQIAQSIGFERTAFQELLNNSI | 121 |
| Query: | 125 | LSFSELYKEGMLLVEK | 140 |
| | | L+F+ELY++G L+VE+ | |
| Sbjct: | 122 | LAFAELYRDGRLIVER | 137 |

[13949] Based on this analysis, it was predicted that this GAS-specific protein and its epitopes, could be useful antigens for vaccines or diagnostics.

### EXAMPLE 2661

[13950] A DNA sequence (GASx962) was identified in S. pyogenes <SEQ ID 7821> which encodes the amino acid sequence <SEQ ID 7822>. Analysis of this protein sequence reveals the following:

Possible site: 16
>>> Seems to have no N-terminal signal sequence
----- Final Results -----
bacterial cytoplasm --- Certainty = 0.3375 (Affirmative) < succ>
bacterial membrane --- Certainty = 0.0000 (Not Clear) < succ>
bacterial outside --- Certainty = 0.0000 (Not Clear) < succ>

[13951] No corresponding DNA sequence was identified in S. agalactiae.

[13952] The protein has no significant homology with any sequences in the GENPEPT database.

[13953] Based on this analysis, it was predicted that this GAS-specific protein and its epitopes, could be useful antigens for vaccines or diagnostics.

### EXAMPLE 2662

[13954] A DNA sequence (GASx963R) was identified in S. pyogenes <SEQ ID 7823> which encodes the amino acid sequence <SEQ ID 7824>. Analysis of this protein sequence reveals the following:

Possible site: 48
>>> Seems to have an uncleavable N-term signal seq
----- Final Results -----
bacterial membrane --- Certainty = 0.0000 (Not Clear) < succ>
bacterial outside --- Certainty = 0.0000 (Not Clear) < succ>
bacterial cytoplasm --- Certainty = 0.0000 (Not Clear) < succ>

[13955] No corresponding DNA sequence was identified in S. agalactiae.

[13956] The protein has no significant homology with any sequences in the GENPEPT database.

[13957] Based on this analysis, it was predicted that this GAS-specific protein and its epitopes, could be useful antigens for vaccines or diagnostics.

### EXAMPLE 2663

[13958] A DNA sequence (GASx964) was identified in S. pyogenes <SEQ ID 7825> which encodes the amino acid sequence <SEQ ID 7826>. Analysis of this protein sequence reveals the following:

| Possible site: 51 | | | |
|---|---|---|---|
| >>> Seems to have a cleavable N-term signal seq. | | | |
| INTEGRAL | Likelihood = −6.16 | Transmembrane | 90-106 (89-111) |
| INTEGRAL | Likelihood = −5.52 | Transmembrane | 131-147 (129-150) |
| INTEGRAL | Likelihood = −0.43 | Transmembrane | 53-69 (52-69) |

----- Final Results -----
bacterial membrane --- Certainty = 0.3463 (Affirmative) < succ>
bacterial outside --- Certainty = 0.0000 (Not Clear) < succ>
bacterial cytoplasm --- Certainty = 0.0000 (Not Clear) < succ>

[13959] No corresponding DNA sequence was identified in S. agalactiae.

[13960] The protein has no significant homology with any sequences in the GENPEPT database.

[13961] Based on this analysis, it was predicted that this GAS-specific protein and its epitopes, could be useful antigens for vaccines or diagnostics.

### EXAMPLE 2664

[13962] A DNA sequence (GASx965) was identified in S. pyogenes <SEQ ID 7827> which encodes the amino acid sequence <SEQ ID 7828>. Analysis of this protein sequence reveals the following:

Possible site: 15
>>> Seems to have no N-terminal signal sequence
----- Final Results -----
bacterial cytoplasm --- Certainty = 0.3944 (Affirmative) < succ>
bacterial membrane --- Certainty = 0.0000 (Not Clear) < succ>
bacterial outside --- Certainty = 0.0000 (Not Clear) < succ>

[13963] No corresponding DNA sequence was identified in S. agalactiae.

[13964] The protein has homology with the following sequences in the GENPEPT database:

| >GP: CAA66779 GB: X98106 Rorf172 [Bacteriophage phigle] | | | |
|---|---|---|---|
| Identities = 36/82 (43%), Positives = 52/82 (62%), Gaps = 3/82 (3%) | | | |
| Query: | 18 | ELTEKQQRFVDKYITTFNATESAKQAGYSEKSAYSQGQRLLKNVEIQKAMKERFLEAKDT | 77 |
| | | +LT KQQ+F D+YI + NA ++A++AGYS++SA S GQ L +I++ + ER + | |
| Sbjct: | 4 | KLTPKQQKFADEYIKSGNAADAARKAGYSKRSARSVGQENLTKPDIKQYIDERM---DEI | 60 |
| Query: | 78 | KGDRIQDVAETLEQDTSIARGE | 99 |
| | | RI D E +E T IARGE | |
| Sbjct: | 61 | ASKRIMDATEAVELLTRIARGE | 82 |

[13965] Based on this analysis, it was predicted that this GAS-specific protein and its epitopes, could be useful antigens for vaccines or diagnostics.

### EXAMPLE 2665

[13966] A DNA sequence (GASx966) was identified in S. pyogenes <SEQ ID 7829> which encodes the amino acid sequence <SEQ ID 7830>. Analysis of this protein sequence reveals the following:

Possible site: 36
>>> Seems to have no N-terminal signal sequence
----- Final Results -----
bacterial cytoplasm --- Certainty = 0.2389 (Affirmative) < succ>
bacterial membrane --- Certainty = 0.0000 (Not Clear) < succ>
bacterial outside --- Certainty = 0.0000 (Not Clear) < succ>

[13967] No corresponding DNA sequence was identified in S. agalactiae.

[13968] The protein has homology with the following sequences in the GENPEPT database:

| >GP: CAB13115 GB: Z99110 PBSX defective prophage terminase (large | | | |
|---|---|---|---|
| subunit) [Bacillus subtilis] | | | |
| Identities = 117/417 (28%), Positives = 195/417 (46%), Gaps = 33/417 (7%) | | | |
| Query: | 31 | YRVVKGSRGSKKSKTTALNFIVRLLKYPWANLLVIRRYSNTNKQSTYTDFKWACNQLKVT | 90 |
| | | Y+ + G GS KS TAL +++LLK LVIR +T++ ST+ F+ +L +T | |
| Sbjct: | 21 | YQFLVGGYGSSKSYHTALKIVLKLLKEK-RTALVIREVFDTHRDSTFALFQEVIEELGLT | 79 |
| Query: | 91 | HLFKFNESLPEITVKATGQKILFRGLDDELKITSITVDVGALCWAWFEEAYQIETEDKFS | 150 |
| | | S ++ G +I+F+G+D+ K+ S V + W EE +++ E | |
| Sbjct: | 80 | KAVASLSSPLQLRFH-NGSRIMFKGMDNPAKLKS----VHNISLIWIEECSEVKYEG--- | 131 |
| Query: | 151 | TVVESIRGSLDAPDFFKQITVTFNPWSERHWLKRVFFDEETKR | 193 |
| | | + + G L P+ + T NP +W R FF +E K+ | |
| Sbjct: | 132 | --FKELIGRLRHPELKLHMICTTNPVGTSNWTYRHFFRDERKKRFVLDDSELYEKRTIVK | 189 |
| Query: | 194 | ADTFSGTTTFRVNEWLDDVDKRRYEDLYKTNPRRARIVCDGEWGVAEGLVFDNFEVVDFD | 253 |
| | | DT+ +T N +L + ++ + L + +P RI G +GV V FEV+ D | |
| Sbjct: | 190 | GDTYYHHSTANDNLFLPESYVKQLDGLKEYDPDLYRIARKGRFGVNGIRVLPQFEVLPHD | 249 |
| Query: | 254 | -VEKTIQRVKET--SAGMDFGFTQDPTTLICVAVDLANKELWLYNEHYQKAMLTDHIVKM | 310 |
| | | V+K I + + GMDFGF + ++ +AVD K L++Y E+YQ M D + | |
| Sbjct: | 250 | QVKKCIAAISKPIFRTGMDFGFEESYNAVVRLAVDPEKKYLYIYWEYYQNKMTDDRTAEE | 309 |
| Query: | 311 | IRDKNLHRSYIAGDSAEKRLIAEIKSKGVSGIVPSIKGKGSIMQGIQFMQGF-KIYIHPS | 369 |
| | | +R+ + I DSAE + I + +G +V + K GS +Q + ++ F KI+ | |
| Sbjct: | 310 | LREFIETQELIKADSAEPKSIQYFRQQGFR-MVGARKFPGSRLQYTKKVKRFKKIFCSDR | 368 |
| Query: | 370 | CEHTIEEFNTYTFKQDKEGNWLNEPIDKNNHVIDAIRYALEKYHIRSNESNQFEVLR | 426 |
| | | CE+ I E T T+ +DK G + + + H +AI YAL+ Y + + + +R | |
| Sbjct: | 369 | CENVIYELETLTYAKDKNGALIEDEFTIDPHTLSAIWYALDDYEVADMKETAHKRMR | 425 |

[13969] Based on this analysis, it was predicted that this GAS-specific protein and its epitopes, could be useful antigens for vaccines or diagnostics.

### EXAMPLE 2666

[13970] A DNA sequence (GASx967) was identified in S. pyogenes <SEQ ID 7831> which encodes the amino acid sequence <SEQ ID 7832>. Analysis of this protein sequence reveals the following:

Possible site: 32
>>> Seems to have no N-terminal signal sequence
----- Final Results -----
bacterial cytoplasm --- Certainty = 0.4899 (Affirmative) < succ>
bacterial membrane --- Certainty = 0.0000 (Not Clear) < succ>
bacterial outside --- Certainty = 0.0000 (Not Clear) < succ>

[13971] No corresponding DNA sequence was identified in S. agalactiae.

[13972] The protein has homology with the following sequences in the GENPEPT database:

| >GP: AAC34397 GB: AF158600 gp502 [Streptococcus thermophilus | | | |
|---|---|---|---|
| bacteriophage Sfill] | | | |
| Identities = 67/114 (58%), Positives = 83/114 (72%) | | | |
| Query: | 6 | FRDSTGKTKTLEFRFHREARMRYQAESLESLLTEKYKLLREMIEHHDKVQKPRIQELLDY | 65 |
| | | F DSTG+ L RFHRE+R+RY+A++LE L+ ++LL+ I HH Q PRIQELLDY | |
| Sbjct: | 7 | FTDSTGQDLVLNLRFHRESRIRYRADNLEELMVNNWELLKNFINHHKLRQAPRIQELLDY | 66 |
| Query: | 66 | AEGNNHTISEIGRRKDDDMADVRAVHNYGKYISTLKQGYLVGNPIRVEYIDGTE | 119 |
| | | A G NH + + GRRKD++MAD RAVHNYG+ IS K GYL GNPIRVEY D + | |
| Sbjct: | 67 | ARGENHDVLKSGRRKDNEMADKRAVHNYGRMISKFKTGYLAGNPIRVEYDDNED | 120 |

[13973] Based on this analysis, it was predicted that this GAS-specific protein and its epitopes, could be useful antigens for vaccines or diagnostics.

### EXAMPLE 2667

[13974] A DNA sequence (GASx968) was identified in S. pyogenes <SEQ ID 7833> which encodes the amino acid sequence <SEQ ID 7834>. Analysis of this protein sequence reveals the following:

Possible site: 34
>>> Seems to have no N-terminal signal sequence
----- Final Results -----
bacterial cytoplasm --- Certainty = 0.4007 (Affirmative) < succ>
bacterial membrane --- Certainty = 0.0000 (Not Clear) < succ>
bacterial outside --- Certainty = 0.0000 (Not Clear) < succ>

[13975] No corresponding DNA sequence was identified in S. agalactiae.

[13976] The protein has homology with the following sequences in the GENPEPT database:

| >GP: AAC34397 GB: AF158600 gp502 [Streptococcus thermophilus | | | |
|---|---|---|---|
| bacteriophage Sfi11] | | | |
| Identities = 172/319 (53%), Positives = 227/319 (70%), Gaps = 9/319 (2%) | | | |
| Query: | 1 | LIYRSMDDKTEVVRLDPREVFVIYQNNLEQSSLAGVRYYNKNQLDGTTKIVELYTDNKIL | 60 |
| | | +IYRS D+T + RL P E FVIY N+LE +S+A VRYYN+ L +VE+YT+ I | |
| Sbjct: | 157 | VIYRSEYDETRIKRLSPLETFVIYDNSLEDNSIAAVRYYNRGTLQNAKDVVEIYTNQHIY | 216 |
| Query: | 61 | KFEYDGDLTPIGETSSHAFGSVPITEYLNTDDGMGDYETELSLIDLYDAAQSDTANYMQD | 120 |
| | | + I T HAFG+VPITE+LN DG+GDYETEL LIDLYD+A+SDTAN+M D | |
| Sbjct: | 217 | TLDASDSFNEISVTP-HAFGTVPITEFLNNADGIGDYETELYLIDLYDSAESDTANHMSD | 275 |
| Query: | 121 | LSDAILAIIGRVSFPGYVDTAEKAIEYLRKMRKARLLNLEPPVDQDGREGSVDAKYLYKQ | 180 |
| | | ++DAILAI G ++ P + ++ M++ RL+ L+PP DG+EG+V A+YL K | |
| Sbjct: | 276 | MADAILAIYGDLALPQGMQASD--------MKRTRLMQLKPPKSADGKEGTVKAEYLTKS | 327 |
| Query: | 181 | YDVQGTEAYKNRIVSDIHKFTNTPDMTDSKFAGQQSGEALKWKVFGLDQERVDMQALFEQ | 240 |
| | | YDV G EAYK R+ DIH FTNTPDM+D+ F+G SGEALK+K+FGLDQ+RVD Q+F Q | |
| Sbjct: | 328 | YDVSGAEAYKTRLNKDIHVFTNTPDMSDNHFSGNASGEALKYKLFGLDQDRVDTQSQFTQ | 387 |
| Query: | 241 | SLKRRYKLIARVSQLLKEIDDFDISKLKITFTPNLPKSLQEKIEAFKALGGELSQETAMA | 300 |
| | | LKRRY+L AR+ L+ E DFD S+LKITFTPNLPKSL E++ LGG++SQETA++ | |
| Sbjct: | 388 | GLKRRYRLAARIGSLVNEFKDFDESRLKITFTPNLPKSLYEQVSILNDLGGQVSQETALS | 447 |
| Query: | 301 | ITDIVEDAKKEISLINSES | 319 |
| | | ++ +VE+ +E+ IN ES | |
| Sbjct: | 448 | LSGLVENPTEELDKINEES | 466 |

[13977] Based on this analysis, it was predicted that this GAS-specific protein and its epitopes, could be useful antigens for vaccines or diagnostics.

### EXAMPLE 2668

[13978] A DNA sequence (GASx969) was identified in S. pyogenes <SEQ ID 7835> which encodes the amino acid sequence <SEQ ID 7836>. Analysis of this protein sequence reveals the following:

Possible site: 21
>>> Seems to have no N-terminal signal sequence
----- Final Results -----
bacterial cytoplasm --- Certainty = 0.5307 (Affirmative) < succ>
bacterial membrane --- Certainty = 0.0000 (Not Clear) < succ>
bacterial outside --- Certainty = 0.0000 (Not Clear) < succ>

[13979] No corresponding DNA sequence was identified in S. agalactiae.

[13980] The protein has homology with the following sequences in the GENPEPT database:

| >GP: AAC79543 GB: U88974 ORF28 [Streptococcus thermophilus temperate | | | |
|---|---|---|---|
| bacteriophage O1205] | | | |
| Identities = 118/309 (38%), Positives = 183/309 (59%), Gaps = 18/309 (5%) | | | |
| Query: | 8 | YWRDRIKKEMDAK-EADDISLEQSMKQLHDYHFRNIEKEIESFYQRYADKEKIDLSEARK | 66 |
| | | YW R +E +A + + ++ ++ L++ + KE++++ Q+YA+K + +S+A++ | |
| Sbjct: | 3 | YWSKRTLREREASIKKGEAEFKKELEALYNLQLSQLRKELDAYIQKYANKNGLSVSDAKR | 62 |
| Query: | 67 | RASELDISAYQKKAKELVAKAEKLRREGKIVTRDDFTHQENADMSIYNLAMKTNALELLR | 126 |
| | | +A D+ A++ KAK VA DF+ + N ++ YN +M ELL | |
| Sbjct: | 63 | KADSFDVKAFETKAKRYVADK-------------DFSPKANRELQDYNFSMSVGRQELLI | 109 |
| Query: | 127 | LNIDLEMQELANGEHKLTKKFLDEGYRKETEFQAGLLGLSVASQASVKSLADAVINANFK | 186 |
| | | ++LE+ L+ E +LT +L GY+ E + LL +V S +++ A +NANF+ | |
| Sbjct: | 110 | QELELELLALSESERQLTNDYLTNGYKSEV-VRESLLDQTVPSGKTLEKYMKAAVNANFE | 168 |
| Query: | 187 | GAKWSDNIWDRQDKLRSIISQSVQSAILKGKNGLTIARDIRREFDVSASYAKRLAITEHA | 246 |
| | | GA+WS+ IW RQ++LR I+ V A+++G+NGLTIAR IR+ D S + A+RLAITEHA | |
| Sbjct: | 169 | GAEWSERIWKRQEQLRKIVKTEVTRALIRGENGLTIARRIRKHMDASRTEAERLAITEHA | 228 |
| Query: | 247 | RVQMEVGRLSMAENGFAMFDILPEPKACDVCKDIAKH---GPYHLDKWRIGENSPPFHPY | 303 |
| | | RVQ M ENGF F ++PE +ACD+CKDI K P + IG N+PP HPY | |
| Sbjct: | 229 | RVQTLAQESIMKENGFEHFKLMPESRACDICKDIGKETEKNPVKIADMEIGTNAPPIHPY | 288 |
| Query: | 304 | CRCAIVGVD | 312 |
| | | CRCA+V V+ | |
| Sbjct: | 289 | CRCAVVEVE | 297 |

[13981] Based on this analysis, it was predicted that this GAS-specific protein and its epitopes, could be useful antigens for vaccines or diagnostics.

### EXAMPLE 2669

[13982] A DNA sequence (GASx970) was identified in S. pyogenes <SEQ ID 7837> which encodes the amino acid sequence <SEQ ID 7838>. Analysis of this protein sequence reveals the following:

Possible site: 15
>>> Seems to have no N-terminal signal sequence
----- Final Results -----
bacterial cytoplasm --- Certainty = 0.2091 (Affirmative) < succ>
bacterial membrane --- Certainty = 0.0000 (Not Clear) < succ>
bacterial outside --- Certainty = 0.0000 (Not Clear) < succ>

[13983] No corresponding DNA sequence was identified in S. agalactiae.

[13984] The protein has no significant homology with any sequences in the GENPEPT database.

[13985] Based on this analysis, it was predicted that this GAS-specific protein and its epitopes, could be useful antigens for vaccines or diagnostics.

### EXAMPLE 2670

[13986] A DNA sequence (GASx971) was identified in S. pyogenes <SEQ ID 7839> which encodes the amino acid sequence <SEQ ID 7840>. Analysis of this protein sequence reveals the following:

Possible site: 28
>>> Seems to have a cleavable N-term signal seq.
----- Final Results -----
bacterial outside --- Certainty = 0.3000 (Affirmative) < succ>
bacterial membrane --- Certainty = 0.0000 (Not Clear) < succ>
bacterial cytoplasm --- Certainty = 0.0000 (Not Clear) < succ>

[13987] No corresponding DNA sequence was identified in S. agalactiae.

[13988] The protein has no significant homology with any sequences in the GENPEPT database.

[13989] Based on this analysis, it was predicted that this GAS-specific protein and its epitopes, could be useful antigens for vaccines or diagnostics.

### EXAMPLE 2671

[13990] A DNA sequence (GASx972) was identified in S. pyogenes <SEQ ID 7841> which encodes the amino acid sequence <SEQ ID 7842>. Analysis of this protein sequence reveals the following:

Possible site: 46
>>> Seems to have no N-terminal signal sequence
----- Final Results -----
bacterial cytoplasm --- Certainty = 0.3226 (Affirnative) < succ>
bacterial membrane --- Certainty = 0.0000 (Not Clear) < succ>
bacterial outside --- Certainty = 0.0000 (Not Clear) < succ>

[13991] No corresponding DNA sequence was identified in S. agalactiae.

[13992] The protein has no significant homology with any sequences in the GENPEPT database.

[13993] Based on this analysis, it was predicted that this GAS-specific protein and its epitopes, could be useful antigens for vaccines or diagnostics.

### EXAMPLE 2672

[13994] A DNA sequence (GASx973) was identified in S. pyogenes <SEQ ID 7843> which encodes the amino acid sequence <SEQ ID 7844>. Analysis of this protein sequence reveals the following:

Possible site: 29
>>> Seems to have no N-terminal signal sequence
----- Final Results -----
bacterial cytoplasm --- Certainty = 0.1830 (Affirmative) < succ>
bacterial membrane --- Certainty = 0.0000 (Not Clear) < succ>
bacterial outside --- Certainty = 0.0000 (Not Clear) < succ>

[13995] No corresponding DNA sequence was identified in S. agalactiae.

[13996] The protein has no significant homology with any sequences in the GENPEPT database.

[13997] Based on this analysis, it was predicted that this GAS-specific protein and its epitopes, could be useful antigens for vaccines or diagnostics.

### EXAMPLE 2673

[13998] A DNA sequence (GASx975) was identified in S. pyogenes <SEQ ID 7845> which encodes the amino acid sequence <SEQ ID 7846>. Analysis of this protein sequence reveals the following:

Possible site: 45
>>> Seems to have no N-terminal signal sequence
----- Final Results -----
bacterial cytoplasm --- Certainty = 0.4757 (Affirmative) < succ>
bacterial membrane --- Certainty = 0.0000 (Not Clear) < succ>
bacterial outside --- Certainty = 0.0000 (Not Clear) < succ>

[13999] No corresponding DNA sequence was identified in S. agalactiae.

[14000] The protein has homology with the following sequences in the GENPEPT database:

| >GP: BAB07248 GB: AP001519 unknown [Bacillus halodurans] | | | |
|---|---|---|---|
| Identities = 46/134 (34%), Positives = 73/134 (54%) | | | |
| Query: | 23 | KQPQDEKKYTDADVDAIIDKKFAKWKSEQEAEKSEAKKMAKMNEKEKADYEKQKLLDELQ | 82 |
| | | K + E+ +T +V+ I+ + A+ ++E EA+K+AKMN ++K +YE +KL E + | |
| Sbjct: | 66 | KPNKTERLFTQEEVNRIVKDRLARALKDKEEAIKEAEKLAKMNAEQKREYELEKLRRENE | 125 |
| Query: | 83 | ELKNDKTRNELTAVARQMFAESEINVNDDVLGLVVTLDAEQTKANVTTLANAFAKVIADD | 142 |
| | | +LK + R EL A +M E+ I +DDVL VV DAEQT+ V T + K+ | |
| Sbjct: | 126 | QLKKAQMRYELGREATKMLGEAGIMADDDVLSFVVRDDAEQTQEAVKTFISLVDKLADMR | 185 |
| Query: | 143 | RKALVRQTTPSTGG | 156 |
| | | K ++ P G | |
| Sbjct: | 186 | MKEKLKGRPPKKDG | 199 |

[14001] Based on this analysis, it was predicted that this GAS-specific protein and its epitopes, could be useful antigens for vaccines or diagnostics.

### EXAMPLE 2674

[14002] A DNA sequence (GASx976) was identified in S. pyogenes <SEQ ID 7847> which encodes the amino acid sequence <SEQ ID 7848>. Analysis of this protein sequence reveals the following:

Possible site: 24
>>> Seems to have no N-terminal signal sequence
----- Final Results -----
bacterial cytoplasm --- Certainty = 0.2478 (Affirmative) < succ>
bacterial membrane --- Certainty = 0.0000 (Not Clear) < succ>
bacterial outside --- Certainty = 0.0000 (Not Clear) < succ>

[14003] No corresponding DNA sequence was identified in S. agalactiae.

[14004] The protein has homology with the following sequences in the GENPEPT database:

| >GP: AAC79545 GB: U88974 ORF30 [Streptococcus thermophilus temperate | | | |
|---|---|---|---|
| bacteriophage O1205] | | | |
| Identities = 43/119 (36%), Positives = 66/119 (55%), Gaps = 16/119 (13%) | | | |
| Query: | 9 | SKEILHNLDYEAISVTLDSNKIG-----KKVVPAGTILAGKDKSIFEDRKQKVETVTNEE | 63 |
| | | + I+ +L Y+A+S T+DS+ G KK + AGT++AG SIF+DR + V | |
| Sbjct: | 9 | TSNIVRSLPYKAVSATVDSSYPGVLVDGKKYIKAGTLVAGNGGSIFDDRTKSV------- | 61 |
| Query: | 64 | VSTKEYVDGILLTDVDLTNGDAVGSCVYRGTINADKLADSSVAENYDDLEEVLPHIVFI | 122 |
| | | V K +GI+L DVDLT + V S +Y G + DK+ + D +++ LP + FI | |
| Sbjct: | 62 | VENKTEPEGIVLYDVDLTIDNTV-SVLYAGEVYKDKVNGGDIT---DTVKKALPLVKFI | 116 |

[14005] Based on this analysis, it was predicted that this GAS-specific protein and its epitopes, could be useful antigens for vaccines or diagnostics.

### EXAMPLE 2675

[14006] A DNA sequence (GASx978) was identified in S. pyogenes <SEQ ID 7849> which encodes the amino acid sequence <SEQ ID 7850>. Analysis of this protein sequence reveals the following:

Possible site: 60
>>> Seems to have no N-terminal signal sequence
----- Final Results -----
bacterial cytoplasm --- Certainty = 0.4138 (Affirmative) < succ>
bacterial membrane --- Certainty = 0.0000 (Not Clear) < succ>
bacterial outside --- Certainty = 0.0000 (Not Clear) < succ>

[14007] No corresponding DNA sequence was identified in S. agalactiae.

[14008] The protein has homology with the following sequences in the GENPEPT database:

| >GP: AAC79546 GB: U88974 ORF31 [Streptococcus thermophilus temperate | | | |
|---|---|---|---|
| bacteriophage O1205] | | | |
| Identities = 195/343 (56%), Positives = 256/343 (73%), Gaps = 1/343 (0%) | | | |
| Query: | 1 | MALIHEIITSENIKGFYNAKNENVENTLGEKAFPPKQQLGLKLSFIKGAAGKPVTLKAAA | 60 |
| | | M LI++ +T+ NI G++NA ENV +TLGE FP ++QLG KLS+IKGA+G+ V LKAAA | |
| Sbjct: | 1 | MGLIYDKVTASNIAGYFNALQENVSSTLGESIFPARKQLGTKLSYIKGASGQSVALKAAA | 60 |
| Query: | 61 | FDTKVPLRDRMAVELIDEEMPFFKEAMLVKEADRQQLNMLAQTKNNELIDTILASIYNDQ | 120 |
| | | FDT V +RDR++ E+ DE+MPFFKEAMLVKE DRQQLN++ + N L++TI+A I+ND | |
| Sbjct: | 61 | FDTNVTIRDRVSAEMHDEQMPFFKEAMLVKENDRQQLNLVKDSGNAVLVNTIVAGIFNDN | 120 |
| Query: | 121 | ATLIAGAKARLEAMRMEVLSKGKIHIQSNGVMKDIDYGLAEDQTTKPDAKWDSAGTATPL | 180 |
| | | TL+ GA+ARLEAMRM+VL+ GKI S+GV KDIDYG+ D + W G ATPL | |
| Sbjct: | 121 | LTLVNGARARLEAMRMQVLATGKIAFTSDGVNKDIDYGVKPDHKKQVSKSWAEPG-ATPL | 179 |
| Query: | 181 | KDIEKAIEKMAERGFVPEAIIMNSKTFSLIKNAESTLDVVKPMAPNGAAVTKRDLNTYLE | 240 |
| | | D+E AIE E G PE +MN+KTF LI+ A ST+ V+KP+A +G+AVTK +L Y+ | |
| Sbjct: | 180 | ADLEDAIETARELGLNPERAVMNAKTFGLIRKAASTVKVIKPLAGDGSAVTKAELENYIA | 239 |
| Query: | 241 | DELQIKVILKDGMFVGDDGESRKYFPDGFATLVPNGNLGYTVFGTTPEQSDLLGGEATDA | 300 |
| | | D + ++L++G + D GE K++PDG TL+PNG LG TVFGTTPE+SDL +A | |
| Sbjct: | 240 | DNFGVSIVLENGTYRNDKGEVSKFYPDGHLTLIPNGPLGNTVFGTTPEESDLFADNTVNA | 299 |
| Query: | 301 | NVSIVETGIAITTTKTTDPVNVQTKVSMIALPSFERLEEVHII | 343 |
| | | V IV+ GIA+TTTKTTDPVNVQTKVSM+ALPSFERL++V+++ | |
| Sbjct: | 300 | EVEIVDNGIAVTTTKTTDPVNVQTKVSMVALPSFERLDDVYML | 342 |

[14009] Based on this analysis, it was predicted that this GAS-specific protein and its epitopes, could be useful antigens for vaccines or diagnostics.

### EXAMPLE 2676

[14010] A DNA sequence (GASx979) was identified in S. pyogenes <SEQ ID 7851> which encodes the amino acid sequence <SEQ ID 7852>. Analysis of this protein sequence reveals the following:

Possible site: 46
>>> Seems to have no N-terminal signal sequence
----- Final Results -----
bacterial cytoplasm --- Certainty = 0.3319 (Affirmative) < succ>
bacterial membrane --- Certainty = 0.0000 (Not Clear) < succ>
bacterial outside --- Certainty = 0.0000 (Not Clear) < succ>

[14011] No corresponding DNA sequence was identified in S. agalactiae.

[14012] The protein has no significant homology with any sequences in the GENPEPT database.

[14013] Based on this analysis, it was predicted that this GAS-specific protein and its epitopes, could be useful antigens for vaccines or diagnostics.

### EXAMPLE 2677

[14014] A DNA sequence (GASx980) was identified in S. pyogenes <SEQ ID 7853> which encodes the amino acid sequence <SEQ ID 7854>. Analysis of this protein sequence reveals the following:

Possible site: 55
>>> Seems to have no N-terminal signal sequence
----- Final Results -----
bacterial cytoplasm --- Certainty = 0.2385 (Affirmative) < succ>
bacterial membrane --- Certainty = 0.0000 (Not Clear) < succ>
bacterial outside --- Certainty = 0.0000 (Not Clear) < succ>

[14015] No corresponding DNA sequence was identified in S. agalactiae.

[14016] The protein has homology with the following sequences in the GENPEPT database:

| >GP: AAC34404 GB: AF158600 gp113 [Streptococcus thermophilus | | | |
|---|---|---|---|
| bacteriophage Sfill] | | | |
| Identities = 53/109 (48%), Positives = 79/109 (71%), Gaps = 4/109 (3%) | | | |
| Query: | 11 | IVKNVKLDLGIEDDNQDQLLEMLLNRITDHFKANYGVLEIDNAFSFVLEDCLIARFNRRG | 70 |
| | | +++NV +DL I DDN LL +LL RI +HFKA YGV E+D+ +F+ EDCL+ RFNRRG | |
| Sbjct: | 9 | VIQNVSVDLNINDDN---LLGILLERIVNHFKAEYGVDEVDDNLAFIFEDCLVKRFNRRG | 65 |
| Query: | 71 | SERAKTEEVEGHKTTYYDHLNEFEPYDAMIMAKLNLIKDKSRKGGLYFL | 119 |
| | | +E A++E ++GH +YYD+ NEF+PYD M+ +L ++++G + FL | |
| Sbjct: | 66 | AEGARSESIDGHSMSYYDNENEFDPYDNMLQ-RLYGTSGQAKEGEVLFL | 113 |

[14017] Based on this analysis, it was predicted that this GAS-specific protein and its epitopes, could be useful antigens for vaccines or diagnostics.

### EXAMPLE 2678

[14018] A DNA sequence (GASx981) was identified in S. pyogenes <SEQ ID 7855> which encodes the amino acid sequence <SEQ ID 7856>. Analysis of this protein sequence reveals the following:

Possible site: 49
>>> Seems to have no N-terminal signal sequence
----- Final Results -----
bacterial cytoplasm --- Certainty = 0.5714 (Affirmative) < succ>
bacterial membrane --- Certainty = 0.0000 (Not Clear) < succ>
bacterial outside --- Certainty = 0.0000 (Not Clear) < succ>

[14019] No corresponding DNA sequence was identified in S. agalactiae.

[14020] The protein has homology with the following sequences in the GENPEPT database:

| >GP: CAA59188 GB: X84706 b3 [Bacteriophage B1] | | | |
|---|---|---|---|
| Identities = 28/82 (34%), Positives = 49/82 (59%), Gaps = 2/82 (2%) | | | |
| Query: | 1 | MRYADRVTFVKTT-DEQYNPDLGEYTHTEVISITKPCFVMDMGMEKSVQIFGDYQKDRKV | 59 |
| | | +RY D VTF+K + D Y+PDLGE+ E + D+G ++SV++FGD +K KV | |
| Sbjct: | 1 | LRYLDEVTFIKESPDSHYDPDLGEWVEKEPTRTVFSANITDIGTDRSVEVFGDIKKGAKV | 60 |
| Query: | 60 | IYLKQPYT-KAFDYCEYEGRRY | 80 |
| | | + + + +DY E++ +++ | |
| Sbjct: | 61 | MRMMPLFNMPKYDYIEFDNKKW | 82 |

[14021] Based on this analysis, it was predicted that this GAS-specific protein and its epitopes, could be useful antigens for vaccines or diagnostics.

### EXAMPLE 2679

[14022] A DNA sequence (GASx982) was identified in S. pyogenes <SEQ ID 7857> which encodes the amino acid sequence <SEQ ID 7858>. Analysis of this protein sequence reveals the following:

Possible site: 14
>>> Seems to have no N-terminal signal sequence
----- Final Results -----
bacterial cytoplasm --- Certainty = 0.2509 (Affirmative) < succ>
bacterial membrane --- Certainty = 0.0000 (Not Clear) < succ>
bacterial outside --- Certainty = 0.0000 (Not Clear) < succ>

[14023] No corresponding DNA sequence was identified in S. agalactiae.

[14024] The protein has homology with the following sequences in the GENPEPT database:

| >GP: AAC34406 GB: AF158600 gp114 [Streptococcus thermophilus | | | |
|---|---|---|---|
| bacteriophage Sfill] | | | |
| Identities = 44/103 (42%), Positives = 65/103 (62%), Gaps = 5/103 (4%) | | | |
| Query: | 17 | GLKKKLELIIKKDAVKK---IVRDNGTQLQRKMINKAVFTKGYSTGATRRSITMQIGDGG | 73 |
| | | GL + + ++K + +K ++R G++L+ +N+A F KGYSTGATRRSIT+Q+ | |
| Sbjct: | 8 | GLDEMAQSLLKNASPEKRSKVLRKYGSKLKEAAVNRAQFNKGYSTGATRRSITLQVESDK | 67 |
| Query: | 74 | LSVKVKPGTHYAGYLERGTRLMSKQPFVLPALKEQKVKFRKDL | 116 |
| | | +V+ T Y+GYLE GTR M QPF+ PAL E K ++L | |
| Sbjct: | 68 | ATVEAL--TSYSGYLEVGTRKMEAQPFMKPALDEVAPKMVEEL | 108 |

[14025] Based on this analysis, it was predicted that this GAS-specific protein and its epitopes, could be useful antigens for vaccines or diagnostics.

### EXAMPLE 2680

[14026] A DNA sequence (GASx983) was identified in S. pyogenes <SEQ ID 7859> which encodes the amino acid sequence <SEQ ID 7860>. Analysis of this protein sequence reveals the following:

Possible site: 45
>>> Seems to have no N-terminal signal sequence
----- Final Results -----
bacterial cytoplasm --- Certainty = 0.3098 (Affirmative) < succ>
bacterial membrane --- Certainty = 0.0000 (Not Clear) < succ>
bacterial outside --- Certainty = 0.0000 (Not Clear) < succ>

[14027] No corresponding DNA sequence was identified in S. agalactiae.

[14028] The protein has homology with the following sequences in the GENPEPT database:

| >GP: AAA32612 GB: L31366 putative [Bacteriophage Tuc2009] | | | |
|---|---|---|---|
| Identities = 88/129 (68%), Positives = 108/129 (83%) | | | |
| Query: | 1 | MIKTRDQSIFDEMFKRIQSLGFKVYDYKPMTEVPYPFVEMESTDAEYIPNKDDIKGSVEL | 60 |
| | | MIKTRDQSIFDE+FKRIQ+LG+ VYDYKPM EV YPFVE+E+T + NK DIKG+V L | |
| Sbjct: | 1 | MIKTRDQSIFDELFKRIQALGYTVYDYKPMNEVGYPFVELENTQTIHEANKTDIKGTVSL | 60 |
| Query: | 61 | MLSVWGVQKKRKQVSDMASAIFSQALTVESSDVFRWSLNTRQSSIQMLDDTTTVTPLKRA | 120 |
| | | LSVWG+QKKRK+VSDMAS IF+QAL + ++D + W+LN++ S+IQMLDDTTT TPLKRA | |
| Sbjct: | 61 | SLSVWGLQKKRKEVSDMASNIFNQALNISATDGYSWALNSQASTIQMLDDTTTHTPLKRA | 120 |
| Query: | 121 | IVTLRFNLR | 129 |
| | | ++ L F LR | |
| Sbjct: | 121 | LINLEFRLR | 129 |

[14029] Based on this analysis, it was predicted that this GAS-specific protein and its epitopes, could be useful antigens for vaccines or diagnostics.

### EXAMPLE 2681

[14030] A DNA sequence (GASx984R) was identified in S. pyogenes <SEQ ID 7861> which encodes the amino acid sequence <SEQ ID 7862>. Analysis of this protein sequence reveals the following:

Possible site: 36
>>> Seems to have no N-terminal signal sequence
----- Final Results -----
bacterial cytoplasm --- Certainty = 0.1736 (Affirmative) < succ>
bacterial membrane --- Certainty = 0.0000 (Not Clear) < succ>
bacterial outside --- Certainty = 0.0000 (Not Clear) < succ>

[14031] No corresponding DNA sequence was identified in S. agalactiae.

[14032] The protein has no significant homology with any sequences in the GENPEPT database.

[14033] Based on this analysis, it was predicted that this GAS-specific protein and its epitopes, could be useful antigens for vaccines or diagnostics.

### EXAMPLE 2682

[14034] A DNA sequence (GASx985) was identified in S. pyogenes <SEQ ID 7863> which encodes the amino acid sequence <SEQ ID 7864>. Analysis of this protein sequence reveals the following:

Possible site: 27
>>> Seems to have no N-terminal signal sequence
----- Final Results -----
bacterial membrane --- Certainty = 0.0000 (Not Clear) < succ>
bacterial outside --- Certainty = 0.0000 (Not Clear) < succ>
bacterial cytoplasm --- Certainty = 0.0000 (Not Clear) < succ>

[14035] No corresponding DNA sequence was identified in S. agalactiae.

[14036] The protein has homology with the following sequences in the GENPEPT database:

| >GP: AAA32613 GB: L31366 structural protein [Bacteriophage Tuc2009] | | | |
|---|---|---|---|
| Identities = 81/185 (43%), Positives = 111/185 (59%), Gaps = 22/185 (11%) | | | |
| Query: | 4 | QLEAKQGIHSILLFRLLKEASSEAATKLAFQTEHEVGKSRDVDGQKTKDGIIQSVGALEY | 63 |
| | | +L AKQG ILL+RLL +A+ EAA KLAFQTEH K+RD + TKDG I S+ A+EY | |
| Sbjct: | 3 | ELTAKQGKDIILLYRLLSKATKEAAWKLAFQTEHSNEKTRDYNTTATKDGTIGSLAAIEY | 62 |
| Query: | 64 | DFKATSILAKGDVLAAKLEKAMENGELVEIWDIDLEETSKNGDSDNKLANVWGIDKNGTN | 123 |
| | | ATSI A GD +++KA ++GE++++W+ID E | |
| Sbjct: | 63 | SLSATSIAANGDPHLDEMDKAFDDGEIIDVWEIDKAEKG--------------------- | 101 |
| Query: | 124 | RGNGKYLATYYQGYISSFSAKKNAEENIEIEMEFAINGVGQKGFATLTDAQKAAVQYAFK | 183 |
| | | +GKY A Y + Y++SFS + N+E+ +E+ +EF + G QKG ATLT+ Q VQY FK | |
| Sbjct: | 102 | -SDGKYKAKYLRAYLTSFSYEPNSEDALELSLEFGVFGKPQKGQATLTEEQANVVQYVFK | 160 |
| Query: | 184 | DTTKG | 188 |
| | | DT G | |
| Sbjct: | 161 | DTVAG | 165 |

[14037] Based on this analysis, it was predicted that this GAS-specific protein and its epitopes, could be useful antigens for vaccines or diagnostics.

### EXAMPLE 2683

[14038] A DNA sequence (GASx986) was identified in S. pyogenes <SEQ ID 7865> which encodes the amino acid sequence <SEQ ID 7866>. Analysis of this protein sequence reveals the following:

Possible site: 55
>>> Seems to have no N-terminal signal sequence
----- Final Results -----
bacterial cytoplasm --- Certainty = 0.2273 (Affirmative) < succ>
bacterial membrane --- Certainty = 0.0000 (Not Clear) < succ>
bacterial outside --- Certainty = 0.0000 (Not Clear) < succ>

[14039] No corresponding DNA sequence was identified in S. agalactiae.

[14040] The protein has homology with the following sequences in the GENPEPT database:

| >GP: CAA59192 GB: X84706 a2 [Bacteriophage B1] | | | |
|---|---|---|---|
| Identities = 54/111 (48%), Positives = 72/111 (64%), Gaps = 1/111 (0%) | | | |
| Query: | 1 | MQLEIKGKTHNVKFGTRFVAEMDKNHIAERQGFKFGAGLQSSV-PFLIDHSVVTLAEVIY | 59 |
| | | M+L IKGK + KFG +FV E+DKN + E+ G FG L + P L ++ TL+ V++ | |
| Sbjct: | 1 | MELTIKGKQVHFKFGVKFVRELDKNLVIEQNGVSFGLALAVKIIPELEMANIATLSNVLF | 60 |
| Query: | 60 | TGTITEPPRPSLNDIYDYIDEVEDIEKLFDDVLDELRQSNASKLFMAQVEK | 110 |
| | | G TE P+ S DI D+IDE EDIEKLFDDVL E+ +SN KL A++ K | |
| Sbjct: | 61 | LGNRTETPKLSQGDIDDFIDECEDIEKLFDDVLKEITESNTGKLIKAKMTK | 111 |

[14041] Based on this analysis, it was predicted that this GAS-specific protein and its epitopes, could be useful antigens for vaccines or diagnostics.

### EXAMPLE 2684

[14042] A DNA sequence (GASx987) was identified in S. pyogenes <SEQ ID 7867> which encodes the amino acid sequence <SEQ ID 7868>. Analysis of this protein sequence reveals the following:

Possible site: 36
>>> Seems to have no N-terminal signal sequence
----- Final Results -----
bacterial cytoplasm --- Certainty = 0.2735 (Affirmative) < succ>
bacterial membrane --- Certainty = 0.0000 (Not Clear) < succ>
bacterial outside --- Certainty = 0.0000 (Not Clear) < succ>

[14043] No corresponding DNA sequence was identified in S. agalactiae.

[14044] The protein has homology with the following sequences in the GENPEPT database:

| >GP: CAA59193 GB: X84706 c2 [Bacteriophage B1] | | | |
|---|---|---|---|
| Identities = 40/111 (36%), Positives = 57/111 (51%), Gaps = 10/111 (9%) | | | |
| Query: | 2 | IVLNCIRYLGMTDINEIGRLTLYEYDLLMTGKALAAVDESHKAHKQAWINHQVTATKLVG | 61 |
| | | +++ +R G+ D++ R+T+ EY + L +DE ++QAW N QV ATK G | |
| Sbjct: | 15 | MMIRFLRCFGIQDLSVFERMTIREYSIRSIAFQLRTLDEEEFIYEQAWANWQVQATKQQG | 74 |
| Query: | 62 | GKKNKKEVPVYKKFKDFFD---YEEEIRKI-TQEIDEGYDKKGMDLLLKAN | 108 |
| | | K P+Y FK FFD E EI I + E D K +DL+ KAN | |
| Sbjct: | 75 | KK------PLYPTFKKFFDKKKLENEILGIESPENKFKKDNKLIDLMKKAN | 119 |

[14045] Based on this analysis, it was predicted that this GAS-specific protein and its epitopes, could be useful antigens for vaccines or diagnostics.

### EXAMPLE 2685

[14046] A DNA sequence (GASx989) was identified in S. pyogenes <SEQ ID 7869> which encodes the amino acid sequence <SEQ ID 7870>. Analysis of this protein sequence reveals the following:

Possible site: 60
>>> Seems to have no N-terminal signal sequence
----- Final Results -----
bacterial cytoplasm --- Certainty = 0.2869 (Affirmative) < succ>
bacterial membrane --- Certainty = 0.0000 (Not Clear) < succ>
bacterial outside --- Certainty = 0.0000 (Not Clear) < succ>

[14047] No corresponding DNA sequence was identified in S. agalactiae.

[14048] The protein has homology with the following sequences in the GENPEPT database:

| >GP: CAA66560 GB: X97918 gene 19.1 [Bacteriophage SPP1] | | | |
|---|---|---|---|
| Identities = 66/232 (28%), Positives = 106/232 (45%), Gaps = 12/232 (5%) | | | |
| Query: | 38 | FRTLTVSGRDVVDLEHQTTSVLGRNGEYFHNATVEVRKLEIKAKISGKDNKS-MRLQYEK | 96 |
| | | F V GR V +E ++ G +G ++ R+LE+ A + G ++ +R + E | |
| Sbjct: | 24 | FLVQEVRGRSVYSIEMGKRTIAGVDGGVITTESLPARELEVDAIVFGDGTETDLRRRIEY | 83 |
| Query: | 97 | LNKLIVSHNQVFLSFSDEPDRNYLGIFKSKDVPEEVSNEQIIGLTFICYNPFK-----MS | 151 |
| | | LN L+ V ++FSDEP R Y G ++ +E + L F C +P K + | |
| Sbjct: | 84 | LNFLLHRDTDVPITFSDEPSRTYYGRYEFATEGDEKGGFHKVTLNFYCQDPLKYGPEVTT | 143 |
| Query: | 152 | DVKTKKGTSIQNGGLFQTKPIITLNLSSPTKEIKLLHVESQKYIRLT----GTYTTDEIK | 207 |
| | | DV T T ++N GL T P I S+ E ++ ++ ++ G T D + | |
| Sbjct: | 144 | DV-TTASTPVKNTGLAVTNPTIRCVFSTSATEYEMQLLDGSTVVKFLKVKYGFNTGDTLV | 202 |
| Query: | 208 | IDMATGKITQNGRNILGDLDMINSRYFELLPGNNTLQCANAAITAEFREVYL | 259 |
| | | ID +T NG++I+ L +I S + +L P NT A T F E +L | |
| Sbjct: | 203 | IDCHERSVTLNGQDIMPAL-LIQSDWIQLKPQVNTYLKATQPSTIVFTEKFL | 253 |

[14049] Based on this analysis, it was predicted that this GAS-specific protein and its epitopes, could be useful antigens for vaccines or diagnostics.

### EXAMPLE 2686

[14050] A DNA sequence (GASx990) was identified in S. pyogenes <SEQ ID 7871> which encodes the amino acid sequence <SEQ ID 7872>. Analysis of this protein sequence reveals the following:

Possible site: 22
>>> Seems to have no N-terminal signal sequence
----- Final Results -----
bacterial cytoplasm --- Certainty = 0.2861 (Affirmative) < succ>
bacterial membrane --- Certainty = 0.0000 (Not Clear) < succ>
bacterial outside --- Certainty = 0.0000 (Not Clear) < succ>

[14051] No corresponding DNA sequence was identified in S. agalactiae.

[14052] The protein has homology with the following sequences in the GENPEPT database:

| >GP: BAB04681 GB: AP001510 unknown conserved protein in others | | | |
|---|---|---|---|
| [Bacillus halodurans] | | | |
| Identities = 116/449 (25%), Positives = 198/449 (43%), Gaps = 79/449 (17%) | | | |
| Query: | 2 | IYLFDKLERLVATVG-TDDLLSWHFKVKNNDWDQASFEVPVDYDVEPFVYFGFFNYDPHQ | 60 |
| | | +++FD+ ++L+ T+ + L+ F+ + N F ++ E + + HQ | |
| Sbjct: | 4 | LFIFDREDQLLTTLTESTGLVRALFREELNRVPNQPFAFTIEASSEEAKHV----IEEHQ | 59 |
| Query: | 61 | -----KEDVFKLFKVIDYNLEDSKFYKG------LDKAESDLDTIAIIKDKRFRQSSADA | 109 |
| | | KE +LF + + LED G + A +L I++ Q + +A | |
| Sbjct: | 60 | VVFRDKEGDLRLFVIKE--LEDVDGLDGPQTTAICEPAFMELAEHMIVEQSVVNQPAHEA | 117 |
| Query: | 110 | CIDGALEGTGYQVGKVEGITNVRTLSYYYISPRAALIKIVEAFNCEFNVRYTF-INNKIT | 168 |
| | | ++ AL+GT + G VE T + Y+S A+ I+ + +F TF N+IT | |
| Sbjct: | 118 | -LNVALQGTRW-TGSVEVNLGNATEHFSYVSAIEAVWNILVTWGGDFKDVVTFNAENRIT | 175 |
| Query: | 169 | SRYIDLKKRFGKPTGKQFEHGNNLLKVVYEESTDDIVTCLIGRGKGEEIQHEEAEPKDVE | 228 |
| | | S I + +R G GK+FE +N+ + + VT L GRG +Q E E + | |
| Sbjct: | 176 | SHQIKIVQRRGVDRGKRFEIDHNI-EQIERTILSYPVTALYGRGAS--LQGENGE----D | 228 |
| Query: | 229 | GHLPQEERRQGYGRRIEFTDVVWSVEKGDPIDKPAGQNFVALDSAREEYGLSQNGELKHR | 288 |
| | | G L +F +V W G P+DKP GQ +V A ++YG NG+L HR | |
| Sbjct: | 229 | GSL-------------DFGEVEWRKSAGAPVDKPKGQLWVGDPEALQKYGRKHNGQLLHR | 275 |
| Query: | 289 | WGVFVNEEIEDKTELLKATWEELQRLSIPIRIYKAEILDIGPETWKGDSVAIIYDEVKIA | 348 |
| | | G+F N IED ELL+ TWE+LQ+ S P Y+ + +++ + | |
| Sbjct: | 276 | EGIFQNTNIEDPEELLEKTWEQLQKSSKPEVHYRLSVR LFEHIS-- | 319 |
| Query: | 349 | FETRVDEIDIDKLNFNRSVVTLGDYSVVQNR------ESRSRKEAVQ-NMIDESLETITD | 401 |
| | | + +LGD ++ +R E +SR A++ +++D + + | |
| Sbjct: | 320 | -------------GYEHEQASLGDTAIAIDRQFSRPIEIQSRIIAIEYDLVDIDGTGMVE | 366 |
| Query: | 402 | LGMTFQEFLQGIEKRIETGKKEMEDNWRK | 430 |
| | | +G L G+++R+E +E+E N K | |
| Sbjct: | 367 | MGQFLS--LNGMDERLERIIEEIEKNQGK | 393 |

[14053] Based on this analysis, it was predicted that this GAS-specific protein and its epitopes, could be useful antigens for vaccines or diagnostics.

### EXAMPLE 2687

[14054] A DNA sequence (GASx991) was identified in S. pyogenes <SEQ ID 7873> which encodes the amino acid sequence <SEQ ID 7874>. Analysis of this protein sequence reveals the following:

Possible site: 50
>>> Seems to have no N-terminal signal sequence
----- Final Results -----
bacterial cytoplasm --- Certainty = 0.2584 (Affirmative) < succ>
bacterial membrane --- Certainty = 0.0000 (Not Clear) < succ>
bacterial outside --- Certainty = 0.0000 (Not Clear) < succ>

[14055] No corresponding DNA sequence was identified in S. agalactiae.

[14056] The protein has homology with the following sequences in the GENPEPT database:

| >GP: AAA98101 GB: M19348 hyaluronidase [Streptococcus pyogenes phage | | | |
|---|---|---|---|
| H4489A] | | | |
| Identities = 314/371 (84%), Positives = 338/371 (90%), Gaps = 1/371 (0%) | | | |
| Query: | 1 | MAENIPLRVQFKRMKAAEWASSDVVLLEGEIGFETDTGFAKFGDGQNTFSKLKYLTGPKG | 60 |
| | | M ENIPLRVQFKRM A EWA SDV+LLEGEIGFETDTGFAKFGDGQNTFSKLKYLTGPKG | |
| Sbjct: | 1 | MTENIPLRVQFKRMSADEWARSDVILLEGEIGFETDTGFAKFGDGQNTFSKLKYLTGPKG | 60 |
| Query: | 61 | PKGDTGLQGKTGGTGSRGPAGKPGTTDYDQLQNKPDLGAFAQKEETNSKITKLESSKADK | 120 |
| | | PKGDTGLQGKTGGTG RGPAGKPGTTDYDQLQNKPDLGAFAQKEETNSKITKLESSKADK | |
| Sbjct: | 61 | PKGDTGLQGKTGGTGPRGPAGKPGTTDYDQLQNKPDLGAFAQKEETNSKITKLESSKADK | 120 |
| Query: | 121 | NAVYLKAESNAKLDEKLNLKGGVMTGQLQFKPN-SGIKPSSSVGGAINIDMSKSEGAAMV | 179 |
| | | +AVY KAES +LD+KL+L GG++TGQLQFFCPN SGIKPSSSVGGAINIDMSKSEGAAMV | |
| Sbjct: | 121 | SAVYSKAESKIELDKKLSLTGGIVTGQLQFKPNKSGIKPSSSVGGAINIDMSKSEGAAMV | 180 |
| Query: | 180 | MYTNKDTTDGPLMILRSNKDTFDQSVQFVDYKGTTNAVNIVMRQPTTPNFSSALNITSAN | 239 |
| | | MYTNKDTTDGPLMILRS+KDTFDQS QFVDY G TNAVNIVMRQP+ PNFSSALNITSAN | |
| Sbjct: | 181 | MYTNKDTTDGPLMILRSDKDTFDQSAQFVDYSGKTNAVNIVMRQPSAPNFSSALNITSAN | 240 |
| Query: | 240 | EGGSAMQIRGVEKALGTLKITHENPSVDKEYDKNAAALSIDIVKKQKGGKGTAAQGIYIN | 299 |
| | | EGGSAMQIRGVEKALGTLKITHENP+V+ +YD+NAAALSIDIVKKQKGGKGTAAQGIYIN | |
| Sbjct: | 241 | EGGSAMQIRGVEKALGTLKITHENPNVEAKYDENAAALSIDIVKKQKGGKGTAAQGIYIN | 300 |
| Query: | 300 | STSGTTGKLLRIRNLNDDKFYVKPDGGFYAKETSQIDGNLKLKDPIANDHAATKAYVDGE | 359 |
| | | STSGT GK+LRIRN N+DKFYV PDGGF++ S + GNL +KDP + HAATK YVD + | |
| Sbjct: | 301 | STSGTAGKMLRIRNKNEDKFYVGPDGGFHSGANSTVAGNLTVKDPTSGKHAATKDYVDEK | 360 |
| Query: | 360 | VEKLKALLAAK | 370 |
| | | + +LK L+ K | |
| Sbjct: | 361 | IAELKKLILKK | 371 |

[14057] Based on this analysis, it was predicted that this GAS-specific protein and its epitopes, could be useful antigens for vaccines or diagnostics.

### EXAMPLE 2688

[14058] A DNA sequence (GASx993) was identified in S. pyogenes <SEQ ID 7875> which encodes the amino acid sequence <SEQ ID 7876>. Analysis of this protein sequence reveals the following:

Possible site: 29
>>> Seems to have no N-terminal signal sequence
----- Final Results -----
bacterial cytoplasm --- Certainty = 0.1358 (Affirmative) < succ>
bacterial membrane --- Certainty = 0.0000 (Not Clear) < succ>
bacterial outside --- Certainty = 0.0000 (Not Clear) < succ>

[14059] No corresponding DNA sequence was identified in S. agalactiae.

[14060] The protein has no significant homology with any sequences in the GENPEPT database.

[14061] Based on this analysis, it was predicted that this GAS-specific protein and its epitopes, could be useful antigens for vaccines or diagnostics.

### EXAMPLE 2689

[14062] A DNA sequence (GASx995) was identified in S. pyogenes <SEQ ID 7877> which encodes the amino acid sequence <SEQ ID 7878>. Analysis of this protein sequence reveals the following:

Possible site: 22
>>> Seems to have no N-terminal signal sequence
----- Final Results -----
bacterial cytoplasm --- Certainty = 0.0855 (Affirmative) < succ>
bacterial membrane --- Certainty = 0.0000 (Not Clear) < succ>
bacterial outside --- Certainty = 0.0000 (Not Clear) < succ>

[14063] No corresponding DNA sequence was identified in S. agalactiae.

[14064] The protein has homology with the following sequences in the GENPEPT database:

| >GP: AAC34418 GB: AF158600 gp149 [Streptococcus thermophilus | | | |
|---|---|---|---|
| bacteriophage Sfill] | | | |
| Identities = 27/95 (28%), Positives = 50/95 (52%), Gaps = 2/95 (2%) | | | |
| Query: | 9 | KYPQLDGTGAVASTHIIIAAEDGAVIPQLIKQDLTSTNDTEIIKAALEEFKKSEYVEIAM | 68 |
| | | K + D +GA +T +I+ DGA +P + + ++TE++K ALE + + + A | |
| Sbjct: | 26 | KSKEYDASGAAYATKVILKNRDGAYVPVFLPVEKIDLSNTELLKEALEVIYQENFPQRAE | 85 |
| Query: | 69 | GEAVQKVDDLEKISQETAKTAKTAQTAAGLAKVSA | 103 |
| | | E ++D EKI + A + K +T A + + S+ | |
| Sbjct: | 86 | NEKFNELD--EKIKEYEALSKKATETIAKMEEASS | 118 |

[14065] Based on this analysis, it was predicted that this GAS-specific protein and its epitopes, could be useful antigens for vaccines or diagnostics.

### EXAMPLE 2690

[14066] A DNA sequence (GASx996) was identified in S. pyogenes <SEQ ID 7879> which encodes the amino acid sequence <SEQ ID 7880>. Analysis of this protein sequence reveals the following:

| Possible site: 22 | | | |
|---|---|---|---|
| >>> Seems to have an uncleavable N-term signal seq | | | |
| INTEGRAL | Likelihood = −4.62 | Transmembrane | 9-25 (7-26) |

----- Final Results -----
bacterial membrane --- Certainty = 0.2848 (Affirmative) < succ>
bacterial outside --- Certainty = 0.0000 (Not Clear) < succ>
bacterial cytoplasm --- Certainty = 0.0000 (Not Clear) < succ>

[14067] No corresponding DNA sequence was identified in S. agalactiae.

[14068] The protein has no significant homology with any sequences in the GENPEPT database.

[14069] Based on this analysis, it was predicted that this GAS-specific protein and its epitopes, could be useful antigens for vaccines or diagnostics.

### EXAMPLE 2691

[14070] A DNA sequence (GASx997) was identified in S. pyogenes <SEQ ID 7881> which encodes the amino acid sequence <SEQ ID 7882>. Analysis of this protein sequence reveals the following:

| Possible site: 41 | | | |
|---|---|---|---|
| >>> Seems to have no N-terminal signal sequence | | | |
| INTEGRAL | Likelihood = −3.66 | Transmembrane | 38-54 (35-55) |

----- Final Results -----
bacterial membrane --- Certainty = 0.2466 (Affirmative) < succ>
bacterial outside --- Certainty = 0.0000 (Not Clear) < succ>
bacterial cytoplasm --- Certainty = 0.0000 (Not Clear) < succ>

[14071] No corresponding DNA sequence was identified in S. agalactiae.

[14072] The protein has no significant homology with any sequences in the GENPEPT database.

[14073] Based on this analysis, it was predicted that this GAS-specific protein and its epitopes, could be useful antigens for vaccines or diagnostics.

### EXAMPLE 2692

[14074] A DNA sequence (GASx998R) was identified in S. pyogenes <SEQ ID 7883> which encodes the amino acid sequence <SEQ ID 7884>. Analysis of this protein sequence reveals the following:

| Possible site: 27 | | | |
|---|---|---|---|
| >>> Seems to have no N-terminal signal sequence | | | |
| INTEGRAL | Likelihood = −9.87 | Transmembrane | 47-63 (41-72) |

----- Final Results -----
bacterial membrane --- Certainty = 0.4949 (Affirmative) < succ>
bacterial outside --- Certainty = 0.0000 (Not Clear) < succ>
bacterial cytoplasm --- Certainty = 0.0000 (Not Clear) < succ>

[14075] No corresponding DNA sequence was identified in S. agalactiae.

[14076] The protein has no significant homology with any sequences in the GENPEPT database.

[14077] Based on this analysis, it was predicted that this GAS-specific protein and its epitopes, could be useful antigens for vaccines or diagnostics.

### EXAMPLE 2693

[14078] A DNA sequence (GASx999) was identified in S. pyogenes <SEQ ID 7885> which encodes the amino acid sequence <SEQ ID 7886>. Analysis of this protein sequence reveals the following:

Possible site: 24
>>> Seems to have a cleavable N-term signal seq.
----- Final Results -----
bacterial outside --- Certainty = 0.3000 (Affirmative) < succ>
bacterial membrane --- Certainty = 0.0000 (Not Clear) < succ>
bacterial cytoplasm --- Certainty = 0.0000 (Not Clear) < succ>

[14079] No corresponding DNA sequence was identified in S. agalactiae.

[14080] The protein has no significant homology with any sequences in the GENPEPT database.

[14081] Based on this analysis, it was predicted that this GAS-specific protein and its epitopes, could be useful antigens for vaccines or diagnostics.

### EXAMPLE 2694

[14082] A DNA sequence (GASx1001) was identified in S. pyogenes <SEQ ID 7887> which encodes the amino acid sequence <SEQ ID 7888>. Analysis of this protein sequence reveals the following:

| Possible site: 22 | | | |
|---|---|---|---|
| >>> Seems to have an uncleavable N-term signal seq | | | |
| INTEGRAL | Likelihood = −10.51 | Transmembrane | 18-34 (16-34) |

----- Final Results -----
bacterial membrane --- Certainty = 0.5203 (Affirmative) < succ>
bacterial outside --- Certainty = 0.0000 (Not Clear) < succ>
bacterial cytoplasm --- Certainty = 0.0000 (Not Clear) < succ>

[14083] No corresponding DNA sequence was identified in S. agalactiae.

[14084] The protein has no significant homology with any sequences in the GENPEPT database.

[14085] Based on this analysis, it was predicted that this GAS-specific protein and its epitopes, could be useful antigens for vaccines or diagnostics.

### EXAMPLE 2695

[14086] A DNA sequence (GASx1002) was identified in S. pyogenes <SEQ ID 7889> which encodes the amino acid sequence <SEQ ID 7890>. Analysis of this protein sequence reveals the following:

| Possible site: 32 | | | |
|---|---|---|---|
| >>> Seems to have an uncleavable N-term signal seq | | | |
| INTEGRAL | Likelihood = −3.61 | Transmembrane | 12-28 (11-33) |

----- Final Results -----
bacterial membrane --- Certainty = 0.2444 (Affirmative) < succ>
bacterial outside --- Certainty = 0.0000 (Not Clear) < succ>
bacterial cytoplasm --- Certainty = 0.0000 (Not Clear) < succ>

[14087] No corresponding DNA sequence was identified in S. agalactiae.

[14088] The protein is similar to AF186180 from S. equi.

[14089] Based on this analysis, it was predicted that this GAS-specific protein and its epitopes, could be useful antigens for vaccines or diagnostics.

### EXAMPLE 2696

[14090] A DNA sequence (GASx1003) was identified in S. pyogenes <SEQ ID 7891> which encodes the amino acid sequence <SEQ ID 7892>. Analysis of this protein sequence reveals the following:

Possible site: 32
>>> Seems to have a cleavable N-term signal seq.
----- Final Results -----
bacterial outside --- Certainty = 0.3000 (Affirmative) < succ>
bacterial membrane --- Certainty = 0.0000 (Not Clear) < succ>
bacterial cytoplasm --- Certainty = 0.0000 (Not Clear) < succ>

[14091] No corresponding DNA sequence was identified in S. agalactiae.

[14092] The protein is similar to SeeH from S. equi:

| >GP: AAF72809 GB: AF186180 SeeH [Streptococcus equi] Length = 236 | | | |
|---|---|---|---|
| Identities = 233/236 (98%), Positives = 234/236 (98%) | | | |
| Query: | 1 | MRYNCRYSHIDKKIYSMIICLSFLLYSNVVQANSYNTTNRHNLESLYKHDSNLIEADSIK | 60 |
| | | MRYNCRYSHIDKKIYSMIICLSFLLYSNVVQANSYNTTNRHNLESLYKHDSNLIEADSIK | |
| Sbjct: | 1 | MRYNCRYSHIDKKIYSMIICLSFLLYSNVVQANSYNTTNRHNLESLYKHDSNLIEADSIK | 60 |
| Query: | 61 | NSPDIVTSHMLKYSVKDKNLSVFFEKDWISQEFKDKEVDIYALSAQEVCECPGKRYEAFG | 120 |
| | | NSPDIVTSHMLKYSVKDKNLSVFFEKDWISQEFKDKEVDIYALSAQE CECPGKRYEAFG | |
| Sbjct: | 61 | NSPDIVTSHMLKYSVKDKNLSVFFEKDWISQEFKDKEVDIYALSAQEACECPGKRYEAFG | 120 |
| Query: | 121 | GITLTNSEKKEIKVPVNVWDKSKQQPPMFITVNKPKVTAQEVDIKVRKLLIKKYDIYNNR | 180 |
| | | GITLTNSEKKEIKVP+NVWDKSKQ PPMFITVNKPKVTAQEVDIKVRKLLIKKYDIYNNR | |
| Sbjct: | 121 | GITLTNSEKKEIKVPINVWDKSKQHPPMFITVNKPKVTAQEVDIKVRKLLIKKYDIYNNR | 180 |
| Query: | 181 | EQKYSKGTVTLDLNSGKDIVFDLYYFGNGDFNSMLKIYSNNERIDSTQFHVDVSIS | 236 |
| | | EQKYSKGTVTLDLNSGKDIVFDLYYFGNGDFNSMLKIYSNNERIDSTQFHVDVSIS | |
| Sbjct: | 181 | EQKYSKGTVTLDLNSGKDIVFDLYYFGNGDFNSMLKIYSNNERIDSTQFHVDVSIS | 236 |

[14093] There is also homology to a S. aureus enterotoxin:

| >GP: AAA19777 GB: U11702 enterotoxin H [Staphylococcus aureus] | | | |
|---|---|---|---|
| Identities = 70/215 (32%), positives = 108/215 (49%), Gaps = 19/215 (8%) | | | |
| Query: | 27 | SNVVQANSYNTTNRHNLESLYKHDSNLIEADSI-KNSPDIVTSHMLKYSVKDKNLSVFFE | 85 |
| | | +++ AN+Y N ++ K D E D I +N D +K++ D | |
| Sbjct: | 34 | TDLALANAYGQYNHPFIKENIKSDEISGEKDLIFRNQGDSGNDLRVKFATAD-------- | 85 |
| Query: | 86 | KDWISQEFKDKEVDIYALSAQEVCECPGKRYEA--FGGITLTNSEK--KEIKVPVNVWDK | 141 |
| | | ++Q+FK+K VDIY S CE + +GG TL NSEK +E + NVW | |
| Sbjct: | 86 | ---LAQKFKNKNVDIYGASFYYKCEKISENISECLYGGTTL-NSEKLAQERVIGANVWVD | 141 |
| Query: | 142 | SKQQPPMFITVNKPKVTAQEVDIKVRKLLIKKYDIYNNREQKYSKGTVTLDLNSGKDIVF | 201 |
| | | Q+ I NK VT QE+DIK+RK+L KY IY ++ + SKG + D+ + +D F | |
| Sbjct: | 142 | GIQKETELIRTNKKNVTLQELDIKIRKILSDKYKIY-YKDSEISKGLIEFDMKTPRDYSF | 200 |
| Query: | 202 | DLYYFGNGDFNSMLKIYSNNERIDSTQF-HVDVSI | 235 |
| | | D+Y + + KIY +N+ + S H+DV++ | |
| Sbjct: | 201 | DIYDLKGENDYEIDKIYEDNKTLKSDDISHIDVNL | 235 |
| >GP: AAC26661 GB: AF064774 extracellular enterotoxin type I precursor | | | |
| [Staphylococcus aureus] | | | |
| Identities = 68/214 (31%), Positives = 109/214 (50%), Gaps = 27/214 (12%) | | | |
| Query: | 42 | NLESLY-KHDSNLIEADSIKNSPDIVTSHMLKYSVKDKNLSVFFEKDWIS-QEFKDKEVD | 99 |
| | | NL + Y KHD ++ + KN P ++ L++S +L + +W +FK K++D | |
| Sbjct: | 32 | NLRNFYTKHDYIDLKGVTDKNLP---IANQLEFSTGTNDL-ISESNNWDEISKFKGKKLD | 87 |
| Query: | 100 | IYALSAQEVCECPGKRYEAFGGITLTNSEKKEI-KVPVNVWDKSKQQPPMF--ITVNKPK | 156 |
| | | I+ + C K +GG TL+ K+P+N+W K + I NK | |
| Sbjct: | 88 | IFGIDYNGPC----KSKYMYGGATLSGQYLNSARKIPINLWVNGKHKTISTDKIATNKKL | 143 |
| Query: | 157 | VTAQEVDIKVRKLLIKKYDIYNNRE--------------QKYSKGTVTLDLNSGKDIVFD | 202 |
| | | VTAQE+D+K+R+ L ++Y+IY + ++ G V LN+ K +D | |
| Sbjct: | 144 | VTAQEIDVKLRRYLQEEYNIYGHNNTGKGKEYGYKSKFYSGFNNGKVLFHLNNEKSFSYD | 203 |
| Query: | 203 | LYYFGNGDFNSMLKIYSNNERIDSTQFHVDVSIS | 236 |
| | | L+Y G+G S LKIY +N+ I+S +FH+DV IS | |
| Sbjct: | 204 | LFYTGDGLPVSFLKIYEDNKIIESEKFHLDVEIS | 237 |
| >GP: AAC28968 GB: U93688 enterotoxin [Staphylococcus aureus] | | | |
| Identities = 70/244 (28%), Positives = 127/244 (51%), Gaps = 27/244 (11%) | | | |
| Query: | 12 | KKIYSMIICLSFLLYSNVVQANSYNTTNRHNLESLYKHDSNLIEADSIKNSPDIVTSHML | 71 |
| | | KK+ S+++ ++ ++ A++ NL + Y + ++ +K++ D ++ L | |
| Sbjct: | 2 | KKLISILL-INIIILGVSNNASAQGDIGIDNLRNFYTK-KDFVDLKDVKDN-DTPIANQL | 58 |
| Query: | 72 | KYSVKDKNLSVFFEKDWIS-QEFKDKEVDIYALSAQEVCECPGKRYEAFGGITLTNSE-K | 129 |
| | | ++S + +L + KD+ FK K++D++ +S C +Y +GG+T TN | |
| Sbjct: | 59 | QFSNESYDL-ISESKDFNKFSNFKGKKLDVFGISYNGQCNT---KY-IYGGVTATNEYLD | 113 |
| Query: | 130 | KEIKVPVNVW--DKSKQQPPMFITVNKPKVTAQEVDIKVRKLLIKKYDIYNNREQK---- | 183 |
| | | K +P+N+W K ++ NK VTAQE+D+K+RK L ++Y+IY + K | |
| Sbjct: | 114 | KSRNIPINIWINGNHKTISTNKVSTNKKLVTAQEIDVKLRKYLQEEYNIYGHNGTKKGEE | 173 |
| Query: | 184 | ----------YSKGTVTLDLNSGKDIVFDLYYFG-NGDFNSMLKIYSNNERIDSTQFHVD | 232 |
| | | ++ G VT LN+ +DL+Y G +G S LKIY +N+ ++S +FH+D | |
| Sbjct: | 174 | YGHKSKFYSGFNIGKVTFHLNNNDTFSYDLFYTGDDGLPKSFLKIYEDNKTVESEKFHLD | 233 |
| Query: | 233 | VSIS | 236 |
| | | V IS | |
| Sbjct: | 234 | VDIS | 237 |

[14094] Based on this analysis, it was predicted that this GAS-specific protein and its epitopes, could be useful antigens for vaccines or diagnostics.

### EXAMPLE 2697

[14095] A DNA sequence (GASx1004R) was identified in S. pyogenes <SEQ ID 7893> which encodes the amino acid sequence <SEQ ID 7894>. Analysis of this protein sequence reveals the following:

| Possible site: 29 | | | | |
|---|---|---|---|---|
| >>> Seems to have an uncleavable N-term signal seq | | | | |
| | INTEGRAL | Likelihood = −2.18 | Transmembrane | 12-28 (12-28) |

```
----- Final Results -----
                              bacterial membrane --- Certainty = 0.1871(Affirmative) < succ>
                                bacterial outside --- Certainty = 0.0000(Not Clear) < succ>
                            bacterial cytoplasm --- Certainty = 0.0000(Not Clear) < succ>
```

[14096] No corresponding DNA sequence was identified in S. agalactiae.

[14097] The protein has no significant homology with any sequences in the GENPEPT database.

[14098] Based on this analysis, it was predicted that this GAS-specific protein and its epitopes, could be useful antigens for vaccines or diagnostics.

### EXAMPLE 2698

[14099] A DNA sequence (GASx1009) was identified in S. pyogenes <SEQ ID 7895> which encodes the amino acid sequence <SEQ ID 7896>. Analysis of this protein sequence reveals the following:

```
Possible site: 34
>>> Seems to have no N-terminal signal sequence
----- Final Results -----
                            bacterial cytoplasm --- Certainty = 0.6391(Affirmative) < succ>
                              bacterial membrane --- Certainty = 0.0000(Not Clear) < succ>
                                bacterial outside --- Certainty = 0.0000(Not Clear) < succ>
```

[14100] No corresponding DNA sequence was identified in S. agalactiae.

[14101] The protein has no significant homology with any sequences in the GENPEPT database.

[14102] Based on this analysis, it was predicted that this GAS-specific protein and its epitopes, could be useful antigens for vaccines or diagnostics.

### EXAMPLE 2699

[14103] A DNA sequence (GASx1010) was identified in S. pyogenes <SEQ ID 7897> which encodes the amino acid sequence <SEQ ID 7898>. Analysis of this protein sequence reveals the following:

```
Possible site: 50
>>> Seems to have no N-terminal signal sequence
----- Final Results -----
                            bacterial cytoplasm --- Certainty = 0.4528(Affirmative) < succ>
                              bacterial membrane --- Certainty = 0.0000(Not Clear) < succ>
                                bacterial outside --- Certainty = 0.0000(Not Clear) < succ>
```

[14104] No corresponding DNA sequence was identified in S. agalactiae.

[14105] The protein has no significant homology with any sequences in the GENPEPT database.

[14106] Based on this analysis, it was predicted that this GAS-specific protein and its epitopes, could be useful antigens for vaccines or diagnostics.

### EXAMPLE 2700

[14107] A DNA sequence (GASx1024) was identified in S. pyogenes <SEQ ID 7899> which encodes the amino acid sequence <SEQ ID 7900>. Analysis of this protein sequence reveals the following:

```
Possible site: 22
>>> Seems to have an uncleavable N-term signal seq
----- Final Results -----
                              bacterial membrane --- Certainty = 0.0000(Not Clear) < succ>
                                bacterial outside --- Certainty = 0.0000(Not Clear) < succ>
                            bacterial cytoplasm --- Certainty = 0.0000(Not Clear) < succ>
```

[14108] No corresponding DNA sequence was identified in S. agalactiae.

[14109] The protein has no significant homology with any sequences in the GENPEPT database.

[14110] Based on this analysis, it was predicted that this GAS-specific protein and its epitopes, could be useful antigens for vaccines or diagnostics.

### EXAMPLE 2701

[14111] A DNA sequence (GASx1033) was identified in S. pyogenes <SEQ ID 7901> which encodes the amino acid sequence <SEQ ID 7902>. Analysis of this protein sequence reveals the following:

```
Possible site: 20
>>> Seems to have no N-terminal signal sequence
----- Final Results -----
                            bacterial cytoplasm --- Certainty = 0.1652(Affirmative) < succ>
                              bacterial membrane --- Certainty = 0.0000(Not Clear) < succ>
                                bacterial outside --- Certainty = 0.0000(Not Clear) < succ>
```

[14112] No corresponding DNA sequence was identified in S. agalactiae.

[14113] The protein has no significant homology with any sequences in the GENPEPT database.

[14114] Based on this analysis, it was predicted that this GAS-specific protein and its epitopes, could be useful antigens for vaccines or diagnostics.

### EXAMPLE 2702

[14115] A DNA sequence (GASx1039) was identified in S. pyogenes <SEQ ID 7903> which encodes the amino acid sequence <SEQ ID 7904>. Analysis of this protein sequence reveals the following:

| Possible site: 22 | | | | |
|---|---|---|---|---|
| >>> Seems to have no N-terminal signal sequence | | | | |
| | INTEGRAL | Likelihood = −1.06 | Transmembrane | 15-31 (15-31) |

```
----- Final Results -----
                              bacterial membrane --- Certainty = 0.1426(Affirmative) < succ>
                                bacterial outside --- Certainty = 0.0000(Not Clear) < succ>
                            bacterial cytoplasm --- Certainty = 0.0000(Not Clear) < succ>
```

[14116] No corresponding DNA sequence was identified in S. agalactiae.

[14117] The protein has no significant homology with any sequences in the GENPEPT database.

[14118] Based on this analysis, it was predicted that this GAS-specific protein and its epitopes, could be useful antigens for vaccines or diagnostics.

### EXAMPLE 2703

[14119] A DNA sequence (GASx1058) was identified in S. pyogenes <SEQ ID 7905> which encodes the amino acid sequence <SEQ ID 7906>. Analysis of this protein sequence reveals the following:

```
Possible site: 60
>>> Seems to have no N-terminal signal sequence
----- Final Results -----
                            bacterial cytoplasm --- Certainty = 0.5484(Affirmative) < succ>
                              bacterial membrane --- Certainty = 0.0000(Not Clear) < succ>
                                bacterial outside --- Certainty = 0.0000(Not Clear) < succ>
```

[14120] No corresponding DNA sequence was identified in S. agalactiae.

[14121] The protein has no significant homology with any sequences in the GENPEPT database.

[14122] Based on this analysis, it was predicted that this GAS-specific protein and its epitopes, could be useful antigens for vaccines or diagnostics.

### EXAMPLE 2704

[14123] A DNA sequence (GASx1077) was identified in S. pyogenes <SEQ ID 7907> which encodes the amino acid sequence <SEQ ID 7908>. Analysis of this protein sequence reveals the following:

```
Possible site: 31
>>> Seems to have no N-terminal signal sequence
----- Final Results -----
                            bacterial cytoplasm --- Certainty = 0.4848(Affirmative) < succ>
                              bacterial membrane --- Certainty = 0.0000(Not Clear) < succ>
                                bacterial outside --- Certainty = 0.0000(Not Clear) < succ>
```

[14124] No corresponding DNA sequence was identified in S. agalactiae.

[14125] Based on this analysis, it was predicted that this GAS-specific protein and its epitopes, could be useful antigens for vaccines or diagnostics.

### EXAMPLE 2705

[14126] A DNA sequence (GASx1080) was identified in S. pyogenes <SEQ ID 7909> which encodes the amino acid sequence <SEQ ID 7910>. Analysis of this protein sequence reveals the following:

| Possible site: 40 | | | | |
|---|---|---|---|---|
| >>> Seems to have an uncleavable N-term signal seq | | | | |
| | INTEGRAL | Likelihood = −12.42 | Transmembrane | 107-123 (93-133) |
| | INTEGRAL | Likelihood = −11.20 | Transmembrane | 20-36 (14-44) |
| | INTEGRAL | Likelihood = −8.39 | Transmembrane | 226-242 (218-246) |
| | INTEGRAL | Likelihood = −5.52 | Transmembrane | 129-145 (126-148) |
| | INTEGRAL | Likelihood = −4.46 | Transmembrane | 160-176 (159-183) |
| | INTEGRAL | Likelihood = −1.44 | Transmembrane | 55-71 (55-72) |

```
----- Final Results -----
                              bacterial membrane --- Certainty = 0.5967(Affirmative) < succ>
                                bacterial outside --- Certainty = 0.0000(Not Clear) < succ>
                            bacterial cytoplasm --- Certainty = 0.0000(Not Clear) < succ>
```

[14127] No corresponding DNA sequence was identified in S. agalactiae.

[14128] Based on this analysis, it was predicted that this GAS-specific protein and its epitopes, could be useful antigens for vaccines or diagnostics.

### EXAMPLE 2706

[14129] A DNA sequence (GASx1081) was identified in S. pyogenes <SEQ ID 7911> which encodes the amino acid sequence <SEQ ID 7912>. Analysis of this protein sequence reveals the following:

| Possible site: 34 | | | | |
|---|---|---|---|---|
| >>> Seems to have a cleavable N-term signal seq. | | | | |
| | INTEGRAL | Likelihood = −13.00 | Transmembrane | 103-119 (91-129) |
| | INTEGRAL | Likelihood = −11.46 | Transmembrane | 208-224 (203-230) |
| | INTEGRAL | Likelihood = −8.28 | Transmembrane | 54-70 (46-71) |
| | INTEGRAL | Likelihood = −5.79 | Transmembrane | 160-176 (155-181) |
| | INTEGRAL | Likelihood = −4.25 | Transmembrane | 127-143 (125-149) |

```
----- Final Results -----
                              bacterial membrane --- Certainty = 0.6201(Affirmative) < succ>
                                bacterial outside --- Certainty = 0.0000(Not Clear) < succ>
                            bacterial cytoplasm --- Certainty = 0.0000(Not Clear) < succ>
```

[14130] No corresponding DNA sequence was identified in S. agalactiae.

[14131] Based on this analysis, it was predicted that this GAS-specific protein and its epitopes, could be useful antigens for vaccines or diagnostics.

### EXAMPLE 2707

[14132] A DNA sequence (GASx1089) was identified in S. pyogenes <SEQ ID 7913> which encodes the amino acid sequence <SEQ ID 7914>. Analysis of this protein sequence reveals the following:

```
Possible site: 37
>>> Seems to have no N-terminal signal sequence
----- Final Results -----
                            bacterial cytoplasm --- Certainty = 0.2999(Affirmative) < succ>
                              bacterial membrane --- Certainty = 0.0000(Not Clear) < succ>
                                bacterial outside --- Certainty = 0.0000(Not Clear) < succ>
```

[14133] No corresponding DNA sequence was identified in S. agalactiae.

[14134] The protein has no significant homology with any sequences in the GENPEPT database.

[14135] Based on this analysis, it was predicted that this GAS-specific protein and its epitopes, could be useful antigens for vaccines or diagnostics.

### EXAMPLE 2708

[14136] A DNA sequence (GASx1109) was identified in S. pyogenes <SEQ ID 7915> which encodes the amino acid sequence <SEQ ID 7916>. Analysis of this protein sequence reveals the following:

Possible site: 27
>>> Seems to have no N-terminal signal sequence
----- Final Results -----
bacterial cytoplasm --- Certainty = 0.1270 (Affirmative) < succ>
bacterial membrane --- Certainty = 0.0000 (Not Clear) < succ>
bacterial outside --- Certainty = 0.0000 (Not Clear) < succ>

[14137] No corresponding DNA sequence was identified in S. agalactiae.

[14138] The protein has no significant homology with any sequences in the GENPEPT database.

[14139] Based on this analysis, it was predicted that this GAS-specific protein and its epitopes, could be useful antigens for vaccines or diagnostics.

### EXAMPLE 2709

[14140] A DNA sequence (GASx1114R) was identified in S. pyogenes <SEQ ID 7917> which encodes the amino acid sequence <SEQ ID 7918>. Analysis of this protein sequence reveals the following:

Possible site: 19
>>> Seems to have no N-terminal signal sequence
----- Final Results -----
bacterial cytoplasm --- Certainty = 0.4021 (Affirmative) < succ>
bacterial membrane --- Certainty = 0.0000 (Not Clear) < succ>
bacterial outside --- Certainty = 0.0000 (Not Clear) < succ>

[14141] No corresponding DNA sequence was identified in S. agalactiae.

[14142] The protein has no significant homology with any sequences in the GENPEPT database.

[14143] Based on this analysis, it was predicted that this GAS-specific protein and its epitopes, could be useful antigens for vaccines or diagnostics.

### EXAMPLE 2710

[14144] A DNA sequence (GASx1149) was identified in S. pyogenes <SEQ ID 7919> which encodes the amino acid sequence <SEQ ID 7920>. Analysis of this protein sequence reveals the following:

| Possible site: 28 | | | |
|---|---|---|---|
| >>> Seems to have an uncleavable N-term signal seq | | | |
| INTEGRAL | Likelihood = −1.70 | Transmembrane | 12-28 (12-29) |

----- Final Results -----
bacterial membrane --- Certainty = 0.1680 (Affirmative) < succ>
bacterial outside --- Certainty = 0.0000 (Not Clear) < succ>
bacterial cytoplasm --- Certainty = 0.0000 (Not Clear) < succ>

[14145] No corresponding DNA sequence was identified in S. agalactiae.

[14146] The protein has no significant homology with any sequences in the GENPEPT database.

[14147] Based on this analysis, it was predicted that this GAS-specific protein and its epitopes, could be useful antigens for vaccines or diagnostics.

### EXAMPLE 2711

[14148] A DNA sequence (GASx1150) was identified in S. pyogenes <SEQ ID 7921> which encodes the amino acid sequence <SEQ ID 7922>. Analysis of this protein sequence reveals the following:

Possible site: 22
>>> Seems to have a cleavable N-term signal seq.
----- Final Results -----
bacterial outside --- Certainty = 0.3000 (Affirmative) < succ>
bacterial membrane --- Certainty = 0.0000 (Not Clear) < succ>
bacterial cytoplasm --- Certainty = 0.0000 (Not Clear) < succ>

[14149] No corresponding DNA sequence was identified in S. agalactiae.

[14150] The protein has no significant homology with any sequences in the GENPEPT database.

[14151] Based on this analysis, it was predicted that this GAS-specific protein and its epitopes, could be useful antigens for vaccines or diagnostics.

### EXAMPLE 2712

[14152] A DNA sequence (GASx1160) was identified in S. pyogenes <SEQ ID 7923> which encodes the amino acid sequence <SEQ ID 7924>. Analysis of this protein sequence reveals the following:

| Possible site: 17 | | | |
|---|---|---|---|
| >>> Seems to have no N-terminal signal sequence | | | |
| INTEGRAL | Likelihood = −3.19 | Transmembrane | 15-31 (15-31) |

----- Final Results -----
bacterial membrane --- Certainty = 0.2275 (Affirmative) < succ>
bacterial outside --- Certainty = 0.0000 (Not Clear) < succ>
bacterial cytoplasm --- Certainty = 0.0000 (Not Clear) < succ>

[14153] No corresponding DNA sequence was identified in S. agalactiae.

[14154] The protein has no significant homology with any sequences in the GENPEPT database.

[14155] Based on this analysis, it was predicted that this GAS-specific protein and its epitopes, could be useful antigens for vaccines or diagnostics.

### EXAMPLE 2713

[14156] A DNA sequence (GASx1167) was identified in S. pyogenes <SEQ ID 7925> which encodes the amino acid sequence <SEQ ID 7926>. Analysis of this protein sequence reveals the following:

Possible site: 16
>>> Seems to have no N-terminal signal sequence
----- Final Results -----
bacterial cytoplasm --- Certainty = 0.1404 (Affirmative) < succ>
bacterial membrane --- Certainty = 0.0000 (Not Clear) < succ>
bacterial outside --- Certainty = 0.0000 (Not Clear) < succ>

[14157] No corresponding DNA sequence was identified in S. agalactiae.

[14158] The protein has homology with the following sequences in the GENPEPT database:

| >GP: AAB99233 GB: U67563 oxaloacetate decarboxylase alpha chain (oadA) | | | |
|---|---|---|---|
| [Methanococcus jannaschii] | | | |
| Identities = 250/453 (55%), Positives = 325/453 (71%), Gaps = 7/453 (1%) | | | |
| Query: | 13 | VAITETVLRDGHQSLMATRLSIEDMLPVLTILDKIGYYSLECWGGATFDACIRFLNEDPW | 72 |
| | | V I +T RD QSL+ATR+ EDMLP+ +D++G+YS+E WGGATFDACIR+LNEDPW | |
| Sbjct: | 2 | VKIVDTTFRDAQQSLIATRMRTEDMLPIAEKMDEVGFYSMEVWGGATFDACIRYLNEDPW | 61 |
| Query: | 73 | ERLRTLKKGLPNTRLQMLLRGQNLLGYRHYADDIVDKFISLSAQNGIDVFRIFDALNDPR | 132 |
| | | ERLR LKK + NT LQMLLRGQNL+GYRHY DDIV+KF+ + +NGID+FRIFDALND R | |
| Sbjct: | 62 | ERLRALKKRIQNTPLQMLLRGQNLVGYRHYPDDIVEKFVIKAHENGIDIFRIFDALNDVR | 121 |
| Query: | 133 | NIQQALRAVKKTGKEAQLCIAYTTSPVHTLNYYLSLVKELVEMGADSICIKDMAGILTPK | 192 |
| | | N++ A++ KK G E Q I YT SPVHT++ Y+ L K+L EMG DSICIKDMAG+LTP | |
| Sbjct: | 122 | NMETAIKTAKKVGAEVQGAICYTISPVHTIDQYVELAKKLEEMGCDSICIKDMAGLLTPY | 181 |
| Query: | 193 | AAKELVSGIKAMTNLPLIVHTHATSGISQMTYLAAVEAGADRIDTALSPFSEGTSQPATE | 252 |
| | | ELV +K +LP+ VH+H TSG++ MTYL +EAGAD +D A+SPF+ GTSQP TE | |
| Sbjct: | 182 | EGYELVKRLKEEISLPIDVHSHCTSGLAPMTYLKVIEAGADMVDCAISPFAMGTSQPPTE | 241 |
| Query: | 253 | SMYLALKEASYDITLDETLLEQAANHLRQARQKYLADGILDPSLLFPDPRTLQYQVPGGM | 312 |
| | | S+ +ALK YD LD LL + ++ + R+KY + P D R L YQVPGGM | |
| Sbjct: | 242 | SIVVALKGTKYDTGLDLKLLNEIRDYFMKVREKYKM--LFSPISQIVDARVLVYQVPGGM | 299 |
| Query: | 313 | LSNMLSQLKQANAESKLEEVLAEVPRVRKDLGYPPLVTPLSQMVGTQAAMNVILGKPYQM | 372 |
| | | LSN++SQLK+ A K EEVL E+PRVRKDLGYPPLVTP SQ+VGTQA +NV+ + Y++ | |
| Sbjct: | 300 | LSNLVSQLKEQGALDKFEEVLQEIPRVRKDLGYPPLVTPTSQIVGTQAVLNVLTEERYKI | 359 |
| Query: | 373 | VSKEIKQYLAGDYGKTPAPVNEDLKRSQI--GSAPVTTNRPADQLSPEFEVLK--AEVAD | 428 |
| | | ++ E+ Y+ G YGK PAP+N +L + + G P+T RPAD L PE+E +K AE | |
| Sbjct: | 360 | ITNEVVNYVKGFYGKPPAPINPELLKRVLDEGEKPITC-RPADLLPPEWEKVKKEAEEKG | 418 |
| Query: | 429 | LAQTDEDVLTYALFPSVAKPFLTTKYQTDDVIK | 461 |
| | | + + +ED+LTYAL+P +A FL + + + + K | |
| Sbjct: | 419 | IVKKEEDILTYALYPQIAVKFLRGELKAEPIPK | 451 |

[14159] Based on this analysis, it was predicted that this GAS-specific protein and its epitopes, could be useful antigens for vaccines or diagnostics.

### EXAMPLE 2714

[14160] A DNA sequence (GASx1168) was identified in S. pyogenes <SEQ ID 7927> which encodes the amino acid sequence <SEQ ID 7928>. Analysis of this protein sequence reveals the following:

| Possible site: 38 | | | |
|---|---|---|---|
| >>> Seems to have an uncleavable N-term signal seq | | | |
| INTEGRAL | Likelihood = −7.11 | Transmembrane | 16-32 (2-34) |

----- Final Results -----
bacterial membrane --- Certainty = 0.3845 (Affirmative) < succ>
bacterial outside --- Certainty = 0.0000 (Not Clear) < succ>
bacterial cytoplasm --- Certainty = 0.0000 (Not Clear) < succ>

[14161] No corresponding DNA sequence was identified in S. agalactiae.

[14162] The protein has no significant homology with any sequences in the GENPEPT database.

[14163] Based on this analysis, it was predicted that this GAS-specific protein and its epitopes, could be useful antigens for vaccines or diagnostics.

### EXAMPLE 2715

[14164] A DNA sequence (GASx1170) was identified in S. pyogenes <SEQ ID 7929> which encodes the amino acid sequence <SEQ ID 7930>. Analysis of this protein sequence reveals the following:

| Possible site: 51 | | | |
|---|---|---|---|
| >>> Seems to have no N-terminal signal sequence | | | |
| INTEGRAL | Likelihood = −7.06 | Transmembrane | 211-227 (208-238) |
| INTEGRAL | Likelihood = −5.84 | Transmembrane | 117-133 (110-136) |
| INTEGRAL | Likelihood = −5.36 | Transmembrane | 256-272 (253-274) |
| INTEGRAL | Likelihood = −4.67 | Transmembrane | 44-60 (41-64) |
| INTEGRAL | Likelihood = −4.19 | Transmembrane | 287-303 (287-306) |
| INTEGRAL | Likelihood = −3.77 | Transmembrane | 358-374 (357-375) |
| INTEGRAL | Likelihood = −2.18 | Transmembrane | 20-36 (16-38) |
| INTEGRAL | Likelihood = −0.85 | Transmembrane | 90-106 (90-106) |
| INTEGRAL | Likelihood = −0.53 | Transmembrane | 165-181 (164-181) |

----- Final Results -----
bacterial membrane --- Certainty = 0.3824 (Affirmative) < succ>
bacterial outside --- Certainty = 0.0000 (Not Clear) < succ>
bacterial cytoplasm --- Certainty = 0.0000 (Not Clear) < succ>

[14165] No corresponding DNA sequence was identified in S. agalactiae.

[14166] The protein has homology with the following sequences in the GENPEPT database:

| >GP: CAA05140 GB: AJ002015 methylmalonyl-CoA decarboxylase, | | | |
|---|---|---|---|
| beta-subunit [Propionigenium modestum] | | | |
| Identities = 231/395 (58%), Positives = 293/395 (73%), Gaps = 19/395 (4%) | | | |
| Query: | 1 | MLDVLNQMVQSSGLAHLTVNNLIMICLASFFLYLGIKKEYEPYLMVPIAFGILLVNLPMA | 60 |
| | | ML + S+G L + ++IM+ +A FLYL I KE+EP L+VPI+FGILL NLP A | |
| Sbjct: | 1 | MLQAILDFYHSTGFYGLNMGSIIMMLVACVFLYLAIAKEFEPLLLVPISFGILLTNLPFA | 60 |
| Query: | 61 | GLMDHP---------ANG---------NPGGLLYYLYKGTSLGIYPPLIFLCLGASTDFG | 102 |
| | | G+M P A+G PGGLLYYL++G LGI+PPLIFL +GA TDFG | |
| Sbjct: | 61 | GMMAEPLLEVHEKLSASGAHLYTAHTAEPGGLLYYLFQGDHLGIFPPLIFLGVGAMTDFG | 120 |
| Query: | 103 | PLIANPKTILLGGAAQVGIFLAFFLAIMLGM-TPQEAASVGIIGGADGPTAIYVTTKLAP | 161 |
| | | PLI+NPK++LLG AAQ GIF+ FF AI G+ T QEAAS+GIIGGADGPTAI++++KLAP | |
| Sbjct: | 121 | PLISNPKSLLLGAAAQFGIFVTFFGAIASGLFTAQEAASIGIIGGADGPTAIFLSSKLAP | 180 |
| Query: | 162 | DLLSTIALAAYSYMALVPIIQPPIIKLLTTKAERQVKMTQARTVSQKEKIIFPIMVTIFV | 221 |
| | | L+ IA+AAYSYMALVPIIQPPI+ LT++ ER++KM+Q R VS++EKIIFPI+VTI V | |
| Sbjct: | 181 | HLMGPIAVAAYSYMALVPIIQPPIMTALTSETERKIKMSQLRLVSKREKIIFPIVVTILV | 240 |
| Query: | 222 | SLLVPSATTLVGCLMLGNLVREIKIVPKIVENLQQVVMFCITIILGLTVGAKANGDLFLS | 281 |
| | | SL+VP A TLVG LMLGN RE +V ++ + + ++ ITI LG+TVGA A + FL | |
| Sbjct: | 241 | SLIVPPAATLVGMLMLGNLFRECGVVGRLEDTAKNALINIITIFLGVTVGATATAEAFLK | 300 |
| Query: | 282 | ATTLKIIALGLIAFAAGTAGGVLMGKVMYYLSGNKVNPMIGAAGVSAVPMAARVVQKIGQ | 341 |
| | | TL I+ LG++AF GT GVL+ K M LS +NP++G+AGVSAVPMAARV Q +GQ | |
| Sbjct: | 301 | VETLAILGLGIVAFGIGTGSGVLLAKFMNKLSKEPINPLLGSAGVSAVPMAARVSQVVGQ | 360 |
| Query: | 342 | EEDPSNFLLMHANGPNVAGVIGSAIASGALLAFFG | 376 |
| | | + DP+NFLLMHAMGPNVAGVIGSA+++G LL+ FG | |
| Sbjct: | 361 | KADPTNFLLMHAMGPNVAGVIGSAVSAGVLLSLFG | 395 |

[14167] Based on this analysis, it was predicted that this GAS-specific protein and its epitopes, could be useful antigens for vaccines or diagnostics.

### EXAMPLE 2716

[14168] A DNA sequence (GASx1171R) was identified in S. pyogenes <SEQ ID 7931> which encodes the amino acid sequence <SEQ ID 7932>. Analysis of this protein sequence reveals the following:

Possible site: 16
>>> Seems to have no N-terminal signal sequence
----- Final Results -----
bacterial cytoplasm --- Certainty = 0.0851 (Affirmative) < succ>
bacterial membrane --- Certainty = 0.0000 (Not Clear) < succ>
bacterial outside --- Certainty = 0.0000 (Not Clear) < succ>

[14169] No corresponding DNA sequence was identified in S. agalactiae.

[14170] The protein has homology with the following sequences in the GENPEPT database:

| >GP: AAF93965 GB: AE004165 citG protein [Vibrio cholerae] | | | |
|---|---|---|---|
| Identities = 100/287 (34%), Positives = 154/287 (52%), Gaps = 12/287 (4%) | | | |
| Query: | 9 | ISQLALKALLYEVSLSPKPGLVDRFDNGAHDDMSFITFIDSMIALSPFFQAYIETGFAYA | 68 |
| | | + LA A++ EV L+PKPGLVD +NGAH DM TFI S A++P+ +++ G+ A | |
| Sbjct: | 32 | VGHLAYHAMMLEVHLTPKPGLVDTANNGAHRDMDLNTFIASAEAIAPYLHSFVSAGWESA | 91 |
| Query: | 69 | KEEPLLLFNRLRQLGQKAEETMFCATQGINTHKGLNFSMALLLGATGAYLARTPHLMTDL | 128 |
| | | L + LR +G +AE+ MF ATQG+NTHKG+ F + L+ G+ G A | |
| Sbjct: | 92 | GNPAAQLLSALRPIGIEAEQAMFAATQGVNTHKGMIFILGLICGSVGWLKANQ------- | 144 |
| Query: | 129 | GRFSKEDTLAICRLVKPMTAHLIQTDLGHLNTKKEFTYGEQLFVTYGIKGPRGEASEGFT | 188 |
| | | K D I ++ L+ +L + T GE+++ YG+ G RGEA+ G | |
| Sbjct: | 145 | ---LKIDAQHTGETIRQACQFLVIDELKAKRDCEPETAGERIYRQYGLTGARGEAASGLA | 201 |
| Query: | 189 | TLTDHALPYFRQMISQN-DPETSQLRLLVYLMSIVEDGNLIHRGGIEAWKGVKAD-MRLL | 246 |
| | | + HALP ++ +++ E + L+ LM+ D NL+ RGG+ V+ +LL | |
| Sbjct: | 202 | MVMIQHALPAYQACLTKGASTEQALWHTLLVLMANNNDSNLVSRGGLAGLHFVQEQAQQLL | 261 |
| Query: | 247 | LQQDLSTTDLRLALSSYNQCLINQHLSPGGAADLLALTFYFAFLEKL | 293 |
| | | + ++ AL++ + LI +HLSPGG+ADLLA T+ L +L | |
| Sbjct: | 262 | AKGGFLYQEIEQALTALDSVLIEKHLSPGGSADLLAATWLIYELVQL | 308 |

[14171] Based on this analysis, it was predicted that this GAS-specific protein and its epitopes, could be useful antigens for vaccines or diagnostics.

### EXAMPLE 2717

[14172] A DNA sequence (GASx1172R) was identified in S. pyogenes <SEQ ID 7933> which encodes the amino acid sequence <SEQ ID 7934>. Analysis of this protein sequence reveals the following:

Possible site: 23
>>> Seems to have no N-terminal signal sequence
----- Final Results -----
bacterial cytoplasm --- Certainty = 0.2501 (Affirmative) < succ>
bacterial membrane --- Certainty = 0.0000 (Not Clear) < succ>
bacterial outside --- Certainty = 0.0000 (Not Clear) < succ>

[14173] No corresponding DNA sequence was identified in S. agalactiae.

[14174] The protein has homology with the following sequences in the GENPEPT database:

| >GP: CAB12389 GB: Z99107 similar to transcriptional regulator (GntR | | | |
|---|---|---|---|
| family) [Bacillus subtilis] | | | |
| Identities = 60/205 (29%), Positives = 99/205 (48%), Gaps = 3/205 (1%) | | | |
| Query: | 19 | PLKIAFYNALKKTIILRQIPVGSRINEKEFSIALNISRTPIRYALGLLSEEHLVEHIPKK | 78 |
| | | P + FYN LKK I G RINE + + + +SR+PIR A+ LL ++ L++ + | |
| Sbjct: | 11 | PYYLQFYNQLKKMIFNGTFKPGERINETQLAKSFGVSRSPIREAMRLLEKDGLLKADDRN | 70 |
| Query: | 79 | GIIVKGVSIKDACEIFEIRKALETLATVQAMHLMTEEDFKVMHNLLEDCETFI--AEDDT | 136 |
| | | G + ++ KD EI++IR LE LA + EE+ ++ LE+ E I +DT | |
| Sbjct: | 71 | GFSITSLTAKDVDEIYKIRIPLEQLAVELVIDEADEEELTILEKQLEETEKAIHNGTEDT | 130 |
| Query: | 137 | NRILDNFNAFNNLIYSYSQMVRLKEIVTELQAYLVYFRKISISSVERRKRALSEHWMIYR | 196 |
| | | I N F+ L+ +S LK ++ + + + R ++ + R + L EH I+ | |
| Sbjct: | 131 | EIIRLN-QKFHELLVDFSHNRHLKNLLEHVNDLIHFCRILNYTGDHRAETILREHRRIFE | 189 |
| Query: | 197 | GMKNKDHEQITLITHEHLNSSLEFI | 221 |
| | | +K K+ E H N E + | |
| Sbjct: | 190 | EVKKKNKEAAKQHVLAHFNHDCEHL | 214 |

[14175] Based on this analysis, it was predicted that this GAS-specific protein and its epitopes, could be useful antigens for vaccines or diagnostics.

### EXAMPLE 2718

[14176] A DNA sequence (GASx1173R) was identified in S. pyogenes <SEQ ID 7935> which encodes the amino acid sequence <SEQ ID 7936>. Analysis of this protein sequence reveals the following:

| Possible site: 16 | | | |
|---|---|---|---|
| >>> Seems to have a cleavable N-term signal seq. | | | |
| INTEGRAL | Likelihood = −10.99 | Transmembrane | 450-466 (445-473) |
| INTEGRAL | Likelihood = −9.61 | Transmembrane | 33-49 (30-55) |
| INTEGRAL | Likelihood = −8.55 | Transmembrane | 326-342 (321-346) |
| INTEGRAL | Likelihood = −7.01 | Transmembrane | 288-304 (286-311) |
| INTEGRAL | Likelihood = −6.79 | Transmembrane | 95-111 (88-114) |
| INTEGRAL | Likelihood = −4.99 | Transmembrane | 265-281 (264-285) |
| INTEGRAL | Likelihood = −4.62 | Transmembrane | 208-224 (204-228) |
| INTEGRAL | Likelihood = −3.13 | Transmembrane | 126-142 (126-145) |
| INTEGRAL | Likelihood = −2.81 | Transmembrane | 366-382 (365-383) |
| INTEGRAL | Likelihood = −2.34 | Transmembrane | 419-435 (417-438) |

----- Final Results -----
bacterial membrane --- Certainty = 0.5394 (Affirmative) < succ>
bacterial outside --- Certainty = 0.0000 (Not Clear) < succ>
bacterial cytoplasm --- Certainty = 0.0000 (Not Clear) < succ>

[14177] A related sequence was also identified in GAS <SEQ ID 9169> which encodes the amino acid sequence <SEQ ID 9170>. Analysis of this protein sequence reveals the following:

| Possible cleavage site: 39 | | | |
|---|---|---|---|
| >>> Seems to have a cleavable N-term signal seq. | | | |
| INTEGRAL | Likelihood = −10.99 | Transmembrane | 443-459 (438-466) |
| INTEGRAL | Likelihood = −8.55 | Transmembrane | 319-335 (314-339) |
| INTEGRAL | Likelihood = −7.01 | Transmembrane | 281-297 (279-304) |
| INTEGRAL | Likelihood = −6.79 | Transmembrane | 88-104 (81-107) |
| INTEGRAL | Likelihood = −4.99 | Transmembrane | 258-274 (257-278) |
| INTEGRAL | Likelihood = −4.62 | Transmembrane | 201-217 (197-221) |
| INTEGRAL | Likelihood = −3.13 | Transmembrane | 119-135 (119-138) |
| INTEGRAL | Likelihood = −2.81 | Transmembrane | 359-375 (358-376) |
| INTEGRAL | Likelihood = −2.34 | Transmembrane | 412-428 (410-431) |

----- Final Results -----
bacterial membrane --- Certainty = 0.539 (Affirmative) < succ>
bacterial outside --- Certainty = 0.0000 (Not Clear) < succ>
bacterial cytoplasm --- Certainty = 0.0000 (Not Clear) < succ>

[14178] No corresponding DNA sequence was identified in S. agalactiae.

[14179] The protein has homology with the following sequences in the GENPEPT database:

| >GP: AAG08853 GB: AE004959 probable citrate transporter | | | |
|---|---|---|---|
| [Pseudomonas aeruginosa] | | | |
| Identities = 199/468 (42%), Positives = 296/468 (62%), Gaps = 41/468 (8%) | | | |
| Query: | 9 | LLTMLAYAMIIVFMYVVMKKKMTPFTALVMIPLIMTIAVILTGSADFNADAKFVAFVGDG | 68 |
| | | +LT+LA+AM+ FM+++M K+++ AL+++P +AF G | |
| Sbjct: | 1 | MLTLLAFAMVATFMFLIMTKRLSALIALILVP---------------------IAFALIG | 39 |
| Query: | 69 | GIAKDLTAIGPMVMYGINNTAKTGIMLLFAILFFSVMLDAGLFDPITEKMIRFAKGDPMK | 128 |
| | | G A L GPM++ GI A TG+ML+FAIL+F++M+D+GLFDP K++R KGDP+K | |
| Sbjct: | 40 | GFAAGL---GPMMLDGIRTLAPTGVMLMFAILYFAIMIDSGLFDPAVRKILRLVKGDPLK | 96 |
| Query: | 129 | VLIATAVVAAAVSLNGDGTTTTLICCSAFLPIYKKLDMKIMNLGVLIILQNTIMNLLPWG | 188 |
| | | V + TA +A VSL+GDG+TT +IC +A LP+Y +L M + + LI+L + ++N+ PWG | |
| Sbjct: | 97 | VSLGTAALAMIVSLDGDGSTTYMICVAAVLPLYSRLGMSPLVMACLIMLSSGVLNMTPWG | 156 |
| Query: | 189 | GPTARAMSVLGVGP-EILGYLAPGMILSLL--YVICWVAPSMGRKERARLGVIDL--SEE | 243 |
| | | GPTARA S L V P +I + P MI LL + I W+ G++ERARLG + L E | |
| Sbjct: | 157 | GPTARAASALHVDPADIFVPMIPAMIAGLLAIFAIAWI---YGKRERARLGELHLPTDHE | 213 |
| Query: | 244 | DMRQLTDITDPDTLFIRRPKNFVFNAILTIGLITWLVAGSFNKSIAMAPLLLFAVGTCIA | 303 |
| | | D+ +++ P+ RRPK FNAILT+ L+ L+AG + M L + A G IA | |
| Sbjct: | 214 | DLAEISVSQYPEA---RRPKLLWFNAILTVVLMATLIAGL----LPMPVLFMIAFG--IA | 264 |
| Query: | 304 | LMVNYPVLKDQSKRIGDNAGDAVQVVILVFAAGIFMGLFQGSGMASALAQSFATIIPKQL | 363 |
| | | ++VNYP +++Q KRIG +A + + VV L+FAAG+F G+ G+GM A+++S +IP L | |
| Sbjct: | 265 | MIVNYPCIQEQKKRIGAHAENILAVVSLIFAAGVFTGILSGTGMVDAMSKSLLAVIPPAL | 324 |
| Query: | 364 | AGFWGLVIALVSAPGTFFISNDGFYYGILPVLAEAGAEYGFSNMAMALASLMGQAFHLLS | 423 |
| | | + + ALVS P TFF+SND FYYG+LP+L +A AEYG + + MA AS++GQ HLLS | |
| Sbjct: | 325 | GPYLATITALVSMPFTFFMSNDAFYYGVLPILTQAAAEYGITPVEMARASIVGQPVHLLS | 384 |
| Query: | 424 | PLVAFIYLLLRLTGLDMGEWQKEAAKYALIIFVIFVVTIIAMGQMPLY | 471 |
| | | PLV YLL+ L +D G+ Q+ K+A+++ + + + +G PL+ | |
| Sbjct: | 385 | PLVPSTYLLVGLAKIDFGDHQRFTLKWAVLVCLAILAMALLLGLFPLF | 432 |

[14180] Based on this analysis, it was predicted that this GAS-specific protein and its epitopes, could be useful antigens for vaccines or diagnostics.

### EXAMPLE 2719

[14181] A DNA sequence (GASx1174) was identified in S. pyogenes <SEQ ID 7937> which encodes the amino acid sequence <SEQ ID 7938>. Analysis of this protein sequence reveals the following:

Possible site: 57
>>> Seems to have no N-terminal signal sequence
----- Final Results -----
bacterial cytoplasm --- Certainty = 0.3948 (Affirmative) < succ>
bacterial membrane --- Certainty = 0.0000 (Not Clear) < succ>
bacterial outside --- Certainty = 0.0000 (Not Clear) < succ>

[14182] No corresponding DNA sequence was identified in S. agalactiae.

[14183] The protein has no significant homology with any sequences in the GENPEPT database.

[14184] Based on this analysis, it was predicted that this GAS-specific protein and its epitopes, could be useful antigens for vaccines or diagnostics.

### EXAMPLE 2720

[14185] A DNA sequence (GASx1175) was identified in S. pyogenes <SEQ ID 7939> which encodes the amino acid sequence <SEQ ID 7940>. Analysis of this protein sequence reveals the following:

Possible site: 39
>>> Seems to have no N-terminal signal sequence
----- Final Results -----
bacterial cytoplasm --- Certainty = 0.3519 (Affirmative) < succ>
bacterial membrane --- Certainty = 0.0000 (Not Clear) < succ>
bacterial outside --- Certainty = 0.0000 (Not Clear) < succ>

[14186] No corresponding DNA sequence was identified in S. agalactiae.

[14187] The protein has no significant homology with any sequences in the GENPEPT database.

[14188] Based on this analysis, it was predicted that this GAS-specific protein and its epitopes, could be useful antigens for vaccines or diagnostics.

### EXAMPLE 2721

[14189] A DNA sequence (GASx1177) was identified in S. pyogenes <SEQ ID 7941> which encodes the amino acid sequence <SEQ ID 7942>. Analysis of this protein sequence reveals the following:

| Possible site: 60 | | | |
|---|---|---|---|
| >>> Seems to have an uncleavable N-term signal seq | | | |
| INTEGRAL | Likelihood = −9.24 | Transmembrane | 115-131 (105-137) |
| INTEGRAL | Likelihood = −8.92 | Transmembrane | 208-224 (204-238) |
| INTEGRAL | Likelihood = −7.80 | Transmembrane | 282-298 (273-303) |
| INTEGRAL | Likelihood = −4.94 | Transmembrane | 85-101 (75-102) |
| INTEGRAL | Likelihood = −4.04 | Transmembrane | 10-26 (3-32) |
| INTEGRAL | Likelihood = −3.61 | Transmembrane | 255-271 (253-271) |

----- Final Results -----
bacterial membrane --- Certainty = 0.4694 (Affirmative) < succ>
bacterial outside --- Certainty = 0.0000 (Not Clear) < succ>
bacterial cytoplasm --- Certainty = 0.0000 (Not Clear) < succ>

[14190] No corresponding DNA sequence was identified in S. agalactiae.

[14191] The protein has homology with the following sequences in the GENPEPT database:

| >GP: AAB89172 GB: AE000960 oxaloacetate decarboxylase, sodium ion pump | | | |
|---|---|---|---|
| subunit (oadB) [Archaeoglobus fulgidus] | | | |
| Identities = 190/354 (53%), Positives = 255/354 (71%), Gaps = 8/354 (2%) | | | |
| Query: | 16 | IVMMVIGALLMYLGIKKEYEPTLLVPMGLGTILVNFPGSGVLTQVVNGVEQEGVFEALFN | 75 |
| | | +VM+ +G LL+YLGI K+ EP LLVP+G+G ILVN PG G+ E+ +F+ | |
| Sbjct: | 5 | LVMIGVGLLLVYLGIVKKMEPLLLVPIGIGAILVNIPGGGL-------AEEGSIFDLFLK | 57 |
| Query: | 76 | FGIGTELFPLLIFIGIGAMIDFGPLLQNPFMLLFGDAAQFGIFFVVVVAVLAGFDIKEAA | 135 |
| | | + I TE+ PLLIF+G+GA+ DF PLL NP L G AAQ GIF ++ A+ GF +EAA | |
| Sbjct: | 58 | YLIHTEIVPLLIFLGLGALTDFSPLLANPKTFLLGAAAQIGIFAALIAALFLGFTPQEAA | 117 |
| Query: | 136 | SIGIIGAADGPTSIFVANQLAKDLLGPITVAAYSYMALVPIIQPFAIKLVTTKKERRIRM | 195 |
| | | SIGIIG ADGPT+I+ LA LL VAAYSYM+LVPIIQP IK +T+ +ER+I+M | |
| Sbjct: | 118 | SIGIIGGADGPTTIYTTTILAPHLLAATAVAAYSYMSLVPIIQPPIIKALTSSRERKIKM | 177 |
| Query: | 196 | TYKAENVSQMTKILFPIIITLVAGFIAPISLPLVGFLMFGNLLRECGVLDRLSQTAQNEL | 255 |
| | | + VS+ KILFPI +++GF+AP +LPLVG LM GNL RE GV DRL++ A EL | |
| Sbjct: | 178 | R-QLRIVSKKEKILFPIATIIISGFLAPKALPLVGMLMTGNLFRESGVTDRLAKGASEEL | 236 |
| Query: | 256 | VNIISILLGLTISIKMQADLFLNVQTLLIIVFGLLAFIMDSIGGVMFAKFLNLFRKEKIN | 315 |
| | | +NI++I+LGL++ M+A+ FL +TLL++ G++AF + GGV+ AK +NLF KEKIN | |
| Sbjct: | 237 | MNIMTIILGLSVGSTMRAESFLTQKTLLVLALGVVAFAAATAGGVLLAKVMNLFLKEKIN | 296 |
| Query: | 316 | PMIGAAGISAFPMSSRVIQKMATDEDPQNFILMYAVGANVSGQIASVIAGGLLL | 369 |
| | | PMIGAAG+SA PMS+RV+Q++A +EDP N ILM+A+G NV+G I S +A G+L+ | |
| Sbjct: | 297 | PMIGAAGVSAVPMSARVVQRLAIEEDPHNHILMHAMGPNVAGVIGSAVAAGVLI | 350 |

[14192] Based on this analysis, it was predicted that this GAS-specific protein and its epitopes, could be useful antigens for vaccines or diagnostics.

### EXAMPLE 2722

[14193] A DNA sequence (GASx1178) was identified in S. pyogenes <SEQ ID 7943> which encodes the amino acid sequence <SEQ ID 7944>. Analysis of this protein sequence reveals the following:

| Possible site: 16 | | | |
|---|---|---|---|
| >>> Seems to have no N-terminal signal sequence | | | |
| INTEGRAL | Likelihood = −9.50 | Transmembrane | 21-37 (8-43) |

----- Final Results -----
bacterial membrane --- Certainty = 0.4800 (Affirmative) < succ>
bacterial outside --- Certainty = 0.0000 (Not Clear) < succ>
bacterial cytoplasm --- Certainty = 0.0000 (Not Clear) < succ>

[14194] No corresponding DNA sequence was identified in S. agalactiae.

[14195] The protein has no significant homology with any sequences in the GENPEPT database.

[14196] Based on this analysis, it was predicted that this GAS-specific protein and its epitopes, could be useful antigens for vaccines or diagnostics.

### EXAMPLE 2723

[14197] A DNA sequence (GASx1179) was identified in S. pyogenes <SEQ ID 7945> which encodes the amino acid sequence <SEQ ID 7946>. Analysis of this protein sequence reveals the following:

Possible site: 60
>>> Seems to have no N-terminal signal sequence
----- Final Results -----
bacterial cytoplasm --- Certainty = 0.1906 (Affirmative) < succ>
bacterial membrane --- Certainty = 0.0000 (Not Clear) < succ>
bacterial outside --- Certainty = 0.0000 (Not Clear) < succ>

[14198] No corresponding DNA sequence was identified in S. agalactiae.

[14199] The protein has homology with the following sequences in the GENPEPT database:

| >GP: AAF93961 GB: AE004165 citrate lyase, gamma subunit [Vibrio cholerae] | | | |
|---|---|---|---|
| Identities = 46/97 (47%), Positives = 64/97 (65%) | | | |
| Query: | 1 | MDIKQTAVAGSLESSDLMITVSPNDEQTITITLDSSVEKQFGNHIRQLIHQTLVNLKVTA | 60 |
| | | M I A AG+LESSDL + + PN++ I + LDS+VE+QFG+ IRQ++ TL ++V | |
| Sbjct: | 1 | MKIAHPAFAGTLESSDLQVRIEPNNDGGIELVLDSTVEQQFGHAIRQVVLHTLDAMQVRD | 60 |
| Query: | 61 | AKVEAVDKGALDCTIQARTIAAVHRAAGIDQYDWKEI | 97 |
| | | A V DKGALDC I+AR AAV RA + +W ++ | |
| Sbjct: | 61 | ALVTIEDKGALDCVIRARVQAAVMRACDVQNIEWSQL | 97 |

[14200] Based on this analysis, it was predicted that this GAS-specific protein and its epitopes, could be useful antigens for vaccines or diagnostics.

### EXAMPLE 2724

[14201] A DNA sequence (GASx1181) was identified in S. pyogenes <SEQ ID 7947> which encodes the amino acid sequence <SEQ ID 7948>. Analysis of this protein sequence reveals the following:

| Possible site: 16 | | | |
|---|---|---|---|
| >>> Seems to have no N-terminal signal sequence | | | |
| INTEGRAL | Likelihood = −1.65 | Transmembrane | 74-90 (74-90) |

----- Final Results -----
bacterial membrane --- Certainty = 0.1659 (Affirmative) < succ>
bacterial outside --- Certainty = 0.0000 (Not Clear) < succ>
bacterial cytoplasm --- Certainty = 0.0000 (Not Clear) < succ>

[14202] No corresponding DNA sequence was identified in S. agalactiae.

[14203] The protein has homology with the following sequences in the GENPEPT database:

| >GP: CAA71632 GB: Y10621 CILB, citryl-CoA lyase beta subunit | | | |
|---|---|---|---|
| [Leuconostoc mesenteroides] | | | |
| Identities = 187/293 (63%), Positives = 237/293 (80%), Gaps = 1/293 (0%) | | | |
| Query: | 2 | ERLRRTMMFVPGANAAMLRDAPLFGADSIMFDLEDSVSLKEKDTSRALVHFALKTFDYSS | 61 |
| | | ERLRRTMNFVPG N AM++DA +FGADSIMFDLED+VSL EKD++R LV+ AL+T DY S | |
| Sbjct: | 4 | ERLRRTMMFVPGNNPAMVKDAGIFGADSIMFDLEDAVSLAEKDSARYLVYEALQTVDYGS | 63 |
| Query: | 62 | VETVVRVNGLDS-CGALDIEAVVLAGVNVIRLPKTETAQDIIDVEAVIERVERENSIEVG | 120 |
| | | E VVR+NGLD+ DI+A+V AG++VIRLPK ETA + ++E++I E+E VG | |
| Sbjct: | 64 | SELVVRINGLDTPFYKNDIKAMVKAGIDVIRLPKVETAAMMHELESLITDAEKEFGRPVG | 123 |
| Query: | 121 | RTRMMAAIESAEGVLNAREIAKASKRLIGIALGAEDYVTNMKTRRYPDGQELFFARSMIL | 180 |
| | | T MMAAIESA GV+NA EIA AS R+IGIAL AEDY T+MKT RYPDGQEL +AR++IL | |
| Sbjct: | 124 | TTHMMAAIESALGVVNAVEIANASDRMIGIALSAEDYTTDMKTHRYPDGQELLYARNVIL | 183 |
| Query: | 181 | HAARAAGIAAIDTVYSDVNNTEGFQNEVRMIKQLGFDGKSVINPRQIPLVNEIYTPTKKE | 240 |
| | | HAARAAGIAA DTV++++N+ EGF E ++I QLGFDGKS+INPRQI +VN++Y PT+KE | |
| Sbjct: | 184 | HAARAAGIAAFDTVFTNLNDEEGFYRETQLIHQLGFDGKSLINPRQIEMVNKVYAPTEKE | 243 |
| Query: | 241 | IDHAKQVIWAIREAESKGSGVISLNGKMVDKPIVERAERVIALATAAGVLSEE | 293 |
| | | I++A+ VI AI EA+ KGSGVIS+NG+MVD+P+V RA+RV+ LA A ++ E | |
| Sbjct: | 244 | INNAQNVIAAIEEAKQKGSGVISMNGQMVDRPVVLRAQRVMKLANANHLVDSE | 296 |

[14204] Based on this analysis, it was predicted that this GAS-specific protein and its epitopes, could be useful antigens for vaccines or diagnostics.

### EXAMPLE 2725

[14205] A DNA sequence (GASx1182) was identified in S. pyogenes <SEQ ID 7949> which encodes the amino acid sequence <SEQ ID 7950>. Analysis of this protein sequence reveals the following:

Possible site: 55
>>> Seems to have no N-terminal signal sequence
----- Final Results -----
bacterial cytoplasm --- Certainty = 0.3554 (Affirmative) < succ>
bacterial membrane --- Certainty = 0.0000 (Not Clear) < succ>
bacterial outside --- Certainty = 0.0000 (Not Clear) < succ>

[14206] No corresponding DNA sequence was identified in S. agalactiae.

[14207] The protein has homology with the following sequences in the GENPEPT database:

| >GP: CAA71633 GB: Y10621 CILA, citrate CoA-transferase alpha subunit | | | |
|---|---|---|---|
| [Leuconostoc mesenteroides] | | | |
| Identities = 294/511 (57%), Positives = 378/511 (73%), Gaps = 7/511 (1%) | | | |
| Query: | 4 | NKLGRDIPQPYADQY--GVFEGELANIKQYDESSRRIKPVKPGDSKLLGSVREAIEKTGL | 61 |
| | | NK+ D+P +Q VFE + +++ G+SK+ S+ + + T L | |
| Sbjct: | 3 | NRVNIDVPDAILEQLDDSVFESTNYGNPEIQRVGPKVRATT-GESKVQSSIDDVLSNT-L | 60 |
| Query: | 62 | TDGMTISFHHHFREGDFIMNMVLEEIAKMGIKNLSIAPSSIANV-HEPLIDHIKNGVVTN | 120 |
| | | DGMTISFHHHFREGDF+ N V+ +I MG +NL++APSS+ NV ++ +I+ IK GVVTN | |
| Sbjct: | 61 | KDGMTISFHHHFREGDFVFNKVMRKIIDMGYQNLTLAPSSLTNVMNDIVIEAIKKGVVTN | 120 |
| Query: | 121 | ITSSGLRDKVGAAISEGLMENPVVIRSHGGRARAIASGDIHIDVAFLGAPSSDAYGNVNG | 180 |
| | | ITSSG+R +G A+S G+++NPV+ RSHG RARAI SG+I IDVAFLG P+SD GN NG | |
| Sbjct: | 121 | ITSSGMRGTLGDAVSHGILKNPVIFRSHGARARAIESGEIKIDVAFLGVPNSDEMGNANG | 180 |
| Query: | 181 | TKGKATCGSLGYAMIDAKYADQVVILTDNLVPYPNTPISIPQTDVDYVVTVDAIGDPQGI | 240 |
| | | G A GSLGYA+IDA+YAD++V++TD ++PYPNTP SI QT VDYVV VD +GDP I | |
| Sbjct: | 181 | MNGDAAFGSLGYALIDAQYADKLVLITDTIMPYPNTPASIKQTQVDYVVKVDKVGDPDKI | 240 |
| Query: | 241 | AKGATRFTKNPKELLIAEYAAKVITNSPYFKEGFSFQTGTGGASLAVTRFMREAMIKENI | 300 |
| | | GATRFTK+PKEL IA+ VI NS YFK FSFQTG+GGA+LAVTRF+REAM+ +NI | |
| Sbjct: | 241 | GSGATRFTKDPKELKIAKTVNDVIVNSKYFKNDFSFQTGSGGAALAVTRFLREAMMAQNI | 300 |
| Query: | 301 | KASFALGGITNAMVELLEEELVEKILDVQDFDHPSAVSLGKHAEHYEIDANMYASPLSKG | 360 |
| | | ASFALGGIT V+LL E LV +++DVQDFD +A S+ EIDA+ YA P +KG | |
| Sbjct: | 301 | MASFALGGITKPTVDLLNEGLVNRVMDVQDFDKGAASSMKLSPNQQEIDASWYADPANKG | 360 |
| Query: | 361 | AVINQLDTCILSALEVDTNFNVNVMTGSDGVIRGASGGHCDTAFAAKMSLVISPLIRGRI | 420 |
| | | A++++LD ILSALEVDTNFNVNVM+GSDGVIRGA GGH D A AK++++ PL+RGRI | |
| Sbjct: | 361 | AMVDKLDVAILSALEVDTNFNVNVMSGSDGVIRGAIGGHQDAA-TAKLTIISVPLVRGRI | 419 |
| Query: | 421 | PTFVDEVNTVITPGTSVDVIVTEVGIAINPNRQDLVDHFKSL-NVPQFSIEELKEKAYAI | 479 |
| | | T V +VNTVITPG S+DV+VTEVGIAINP R DLV+ K + +P +SIEEL++KA I | |
| Sbjct: | 420 | ATIVPKVNTVITPGDSIDVVVTEVGIAINPKRTDLVEQLKQVPGLPIYSIEELQQKAEKI | 479 |
| Query: | 480 | VGTPERIQYGDKVVALIEYRDGSLMDVVYNV | 510 |
| | | VG P +++ D+VVA+ EYRDGS++D++ V | |
| Sbjct: | 480 | VGQPAPLKFTDRVVAVAEYRDGSVIDIIKEV | 510 |

[14208] Based on this analysis, it was predicted that this GAS-specific protein and its epitopes, could be useful antigens for vaccines or diagnostics.

### EXAMPLE 2726

[14209] A DNA sequence (GASx1183) was identified in S. pyogenes <SEQ ID 7951> which encodes the amino acid sequence <SEQ ID 7952>. Analysis of this protein sequence reveals the following:

Possible site: 13
>>> Seems to have a cleavable N-term signal seq.
----- Final Results -----
bacterial outside --- Certainty = 0.3000 (Affirmative) < succ>
bacterial membrane --- Certainty = 0.0000 (Not Clear) < succ>
bacterial cytoplasm --- Certainty = 0.0000 (Not Clear) < succ>

[14210] No corresponding DNA sequence was identified in S. agalactiae.

[14211] The protein has homology with the following sequences in the GENPEPT database:

| >GP: CAA71634 GB: Y10621 CILG, hypothetical protein [Leuconostoc | | | |
|---|---|---|---|
| mesenteroides] | | | |
| Identities = 65/176 (36%), Positives = 97/176 (54%), Gaps = 3/176 (1%) | | | |
| Query: | 21 | DTYFSGEAIQLSDMLRAREERALRQLHLLKEYPEGSLLSVTMNIPGPIKTSPKLLEAFDI | 80 |
| | | D + GE + L +L RE R Q L+ +P + SV +N+PGPIKTSPKL F I | |
| Sbjct: | 2 | DYFEGGERLNLMQVLDNREWREKYQKQLMASFPTAVITSVKLNLPGPIKTSPKLQSVFQI | 61 |
| Query: | 81 | VIKAIQTALADDKICYQLRLL-PTTGYEYYLITSLPSRDLKLKMIALETELPIGRLMDLD | 139 |
| | | +I + D +I + + TG + + +TS + +K MI E +GRL+DLD | |
| Sbjct: | 62 | IINDLNPVFKDLQIIKEASFVDQITGPDIFFVTSGCLKLVKQIMITFEESHLLGRLLDLD | 121 |
| Query: | 140 | VLVLQNDLPHSISRTVLGGSPRQCFICSKEAKVCGRLRKHSVEEMQTAISKLLHSF | 195 |
| | | V+ D +SR LG +PR+C +C K+AK C + HS+ E + I+K+LH+F | |
| Sbjct: | 122 | VMCQNAD--KQLSREELGFAPRKCLLCGKDAKTCIKEGNHSLAEGYSQINKMLHNF | 175 |

[14212] Based on this analysis, it was predicted that this GAS-specific protein and its epitopes, could be useful antigens for vaccines or diagnostics.

### EXAMPLE 2727

[14213] A DNA sequence (GASx1184) was identified in S. pyogenes <SEQ ID 7953> which encodes the amino acid sequence <SEQ ID 7954>. Analysis of this protein sequence reveals the following:

Possible site: 58
>>> Seems to have no N-terminal signal sequence
----- Final Results -----
bacterial cytoplasm --- Certainty = 0.3730 (Affirmative) < succ>
bacterial membrane --- Certainty = 0.0000 (Not Clear) < succ>
bacterial outside --- Certainty = 0.0000 (Not Clear) < succ>

[14214] No corresponding DNA sequence was identified in S. agalactiae.

[14215] The protein has homology with the following sequences in the GENPEPT database:

| >GP: AAB99233 GB: U67563 oxaloacetate decarboxylase alpha chain (oadA) | | | |
|---|---|---|---|
| [Methanococcus jannaschii] | | | |
| Identities = 245/441 (55%), Positives = 336/441 (75%), Gaps = 5/441 (1%) | | | |
| Query: | 10 | IRITETVLRDGQQSQIATRMTTKEMIPILETLDNAGYHALEMWGGATFDSCLRFLNEDPW | 69 |
| | | ++I +T RD QQS IATRM T++M+PI E +D G++++E+WGGATFD+C+R+LNEDPW | |
| Sbjct: | 2 | VKIVDTTFRDAQQSLIATRMRTEDMLPIAEKMDEVGFYSMEVWGGATFDACIRYLNEDPW | 61 |
| Query: | 70 | ERLRAIRKAVKKTKLQMLLRGQNLLGYRNYADDVVRSFIQKSIENGIDIVRIFDALNDPR | 129 |
| | | ERLRA++K ++ T LQMLLRGQNL+GYR+Y DD+V F+ K+ ENGIDI RIFDALND R | |
| Sbjct: | 62 | ERLRALKKRIQNTPLQMLLRGQNLVGYRHYPDDIVEKFVIKAHENGIDIFRIFDALNDVR | 121 |
| Query: | 130 | NLQTAVSATKKFGGHAQVAISYTTSPVHTIDYFVELAKAYQAIGADSICIKDMAGVLTPE | 189 |
| | | N++TA+ KK G Q AI YT SPVHTID +VELAK + +G DSICIKDMAG+LTP | |
| Sbjct: | 122 | NMETAIKTAKKVGAEVQGAICYTISPVHTIDQYVELAKKLEEMGCDSICIKDMAGLLTPY | 181 |
| Query: | 190 | IGYQLVKCIKENTTIPLEVHTHATSGISEMTYLKVAEAGADIIDTAISSFSGGTSQPATE | 249 |
| | | GY+LVK +KE ++P++VH+H TSG++ MTYLKV EAGAD++D AIS F+ GTSQP TE | |
| Sbjct: | 182 | EGYELVKRLKEEISLPIDVHSHCTSGLAPMTYLKVIEAGADMVDCAISPFAMGTSQPPTE | 241 |
| Query: | 250 | SMAIALTDLGFDTGLDMQEVAKVAEYFNTIRDHYREIGILNPKVKDTEPKTLIYQVPGGM | 309 |
| | | S+ +AL +DTGLD++ + ++ +YF +R+ Y+ + +P + + + L+YQVPGGM | |
| Sbjct: | 242 | SIVVALKGTKYDTGLDLKLLNEIRDYFMKVREKYKM--LFSPISQIVDARVLVYQVPGGM | 299 |
| Query: | 310 | LSNLLSQLTEQGLTDKYEEVLAEVPKVRADLGYPPLVTPLSQMVGTQALMNIISGERYKV | 369 |
| | | LSNL+SQL EQG DK+EEVL E+P+VR DLGYPPLVTP SQ+VGTQA++N+++ ERYK+ | |
| Sbjct: | 300 | LSNLVSQLKEQGALDKFEEVLQEIPRVRKDLGYPPLVTPTSQIVGTQAVLNVLTEERYKI | 359 |
| Query: | 370 | VPNEIKDYVRGLYGQSPAPLAEGIKEKIIGD-EAVITCRPADLIEPQMIYLRDEIAP--Y | 426 |
| | | + NE+ +YV+G YG+ PAP+ + ++++ + E ITCRPADL+ P+ ++ E | |
| Sbjct: | 360 | ITNEVVNYVKGFYGKPPAPINPELLKRVLDEGEKPITCRPADLLPPEWEKVKKEAEEKGI | 419 |
| Query: | 427 | AHSEEDVLSYASFPQQARDFL | 447 |
| | | EED+L+YA +PQ A FL | |
| Sbjct: | 420 | VKKEEDILTYALYPQIAVKFL | 440 |

[14216] Based on this analysis, it was predicted that this GAS-specific protein and its epitopes, could be useful antigens for vaccines or diagnostics.

### EXAMPLE 2728

[14217] A DNA sequence (GASx1185R) was identified in S. pyogenes <SEQ ID 7955> which encodes the amino acid sequence <SEQ ID 7956>. Analysis of this protein sequence reveals the following:

Possible site: 40
>>> Seems to have no N-terminal signal sequence
----- Final Results -----
bacterial cytoplasm --- Certainty = 0.2497 (Affirmative) < succ>
bacterial membrane --- Certainty = 0.0000 (Not Clear) < succ>
bacterial outside --- Certainty = 0.0000 (Not Clear) < succ>

[14218] No corresponding DNA sequence was identified in S. agalactiae.

[14219] The protein has homology with the following sequences in the GENPEPT database:

| >GP: AAF93960 GB: AE004165 citrate (pro-3S)-lyase ligase | | | |
|---|---|---|---|
| [Vibrio cholerae] | | | |
| Identities = 118/336 (35%), Positives = 183/336 (54%), Gaps = 5/336 (1%) | | | |
| Query: | 4 | YTISKVFPSDKTTMASVKNLLHQEGIRLDAHLDYTCAIMNAQNDVIATGSYFGNSLRCLC | 63 |
| | | YT S+V ++T + +K L Q + +D +++ + N +IA G G+ L+ + | |
| Sbjct: | 10 | YTFSRVSTKNRTKLLQIKEFLCQHQLTVDDDVEHF-VVAYGTNQIIACGGIAGHVLKSIA | 68 |
| Query: | 64 | VSSAYQGEGLLNRIVSHLIDEEYALGNYHLFVYTKTSSAAFFKDLGFTEIVHIDNHISFL | 123 |
| | | VS A QG G ++++ L + Y +G + LF++TK ++ F+ GF + ++ HI+ L | |
| Sbjct: | 69 | VSPALQGTGFALKLMTELTNFAYEMGRFSLFLFTKPANIDLFRQCGFFLVDKVEPHIALL | 128 |
| Query: | 124 | ENKKTGFQDYLMTLNKPEQTPGKVAAIVINANPFTLGHQFLVEKAARENDWVHLFMVSED | 183 |
| | | EN Y L + + K+ +IV+NANPFTLGHQ+L+E+A + DWVHLF+V + | |
| Sbjct: | 129 | ENSPNRLSVYCKQLQLLKMSGRKIGSIVMNANPFTLGHQYLIEQACEQCDWVHLFVVKAE | 188 |
| Query: | 184 | RSLIPFSVRKRLIQEGLAHLDNVIYHETGPYLISQATFPAYFQKEDNDVIKSQALLDTAI | 243 |
| | | ++ R +I+ G HL N+ H Y+IS+ATFP+YF K+ V +S LD +I | |
| Sbjct: | 189 | NKDFSYADRMAMIKAGSKHLLNLTIHSGSDYIISRATFPSYFIKDQQVVNQSHTALDLSI | 248 |
| Query: | 244 | FL-KIAQTLQITKRYVGEEPTSRVTAIYNEIM---AEQLQQAGILLDILPRKAINQQQDP | 299 |
| | | F IA L IT R+VG EP VT YN+ M E+ A + ++ + Q P | |
| Sbjct: | 249 | FRHSIAPALGITHRFVGSEPICTVTRHYNQAMRRWLEEAHDASAPIQVVEIERSQQASQP | 308 |
| Query: | 300 | ISASTARQALKDNDWDLLAKLLPKTSLDYFCSLKAQ | 335 |
| | | ISAS R LK + +A L+PKT+ Y C A+ | |
| Sbjct: | 309 | ISASRVRYLLKQFGFAAIADLVPKTTYSYLCQHYAE | 344 |

[14220] Based on this analysis, it was predicted that this GAS-specific protein and its epitopes, could be useful antigens for vaccines or diagnostics.

### EXAMPLE 2729

[14221] A DNA sequence (GASx1187) was identified in S. pyogenes <SEQ ID 7957> which encodes the amino acid sequence <SEQ ID 7958>. Analysis of this protein sequence reveals the following:

```
Possible site: 30
>>> Seems to have no N-terminal signal sequence
----- Final Results -----
                            bacterial cytoplasm --- Certainty = 0.4790(Affirmative) < succ>
                              bacterial membrane --- Certainty = 0.0000(Not Clear) < succ>
                                bacterial outside --- Certainty = 0.0000(Not Clear) < succ>
```

[14222] No corresponding DNA sequence was identified in S. agalactiae.

[14223] The protein has no significant homology with any sequences in the GENPEPT database.

[14224] Based on this analysis, it was predicted that this GAS-specific protein and its epitopes, could be useful antigens for vaccines or diagnostics.

### EXAMPLE 2730

[14225] A DNA sequence (GASx1188R) was identified in S. pyogenes <SEQ ID 7959> which encodes the amino acid sequence <SEQ ID 7960>. Analysis of this protein sequence reveals the following:

```
Possible site: 21
>>> Seems to have no N-terminal signal sequence
----- Final Results -----
                            bacterial cytoplasm --- Certainty = 0.3956(Affirmative) < succ>
                              bacterial membrane --- Certainty = 0.0000(Not Clear) < succ>
                                bacterial outside --- Certainty = 0.0000(Not Clear) < succ>
```

[14226] No corresponding DNA sequence was identified in S. agalactiae.

[14227] The protein has no significant homology with any sequences in the GENPEPT database.

[14228] Based on this analysis, it was predicted that this GAS-specific protein and its epitopes, could be useful antigens for vaccines or diagnostics.

### EXAMPLE 2731

[14229] A DNA sequence (GASx1190) was identified in S. pyogenes <SEQ ID 7961> which encodes the amino acid sequence <SEQ ID 7962>. Analysis of this protein sequence reveals the following:

```
Possible site: 14
>>> Seems to have no N-terminal signal sequence
----- Final Results -----
                            bacterial cytoplasm --- Certainty = 0.1274(Affirmative) < succ>
                              bacterial membrane --- Certainty = 0.0000(Not Clear) < succ>
                                bacterial outside --- Certainty = 0.0000(Not Clear) < succ>
```

[14230] No corresponding DNA sequence was identified in S. agalactiae.

[14231] The protein has no significant homology with any sequences in the GENPEPT database.

[14232] Based on this analysis, it was predicted that this GAS-specific protein and its epitopes, could be useful antigens for vaccines or diagnostics.

### EXAMPLE 2732

[14233] A DNA sequence (GASx1196R) was identified in S. pyogenes <SEQ ID 7963> which encodes the amino acid sequence <SEQ ID 7964>. Analysis of this protein sequence reveals the following:

```
Possible site: 33
>>> Seems to have a cleavable N-term signal seq.
----- Final Results -----
                                bacterial outside --- Certainty = 0.3000(Affirmative) < succ>
                              bacterial membrane --- Certainty = 0.0000(Not Clear) < succ>
                            bacterial cytoplasm --- Certainty = 0.0000(Not Clear) < succ>
```

[14234] No corresponding DNA sequence was identified in S. agalactiae.

[14235] The protein has no significant homology with any sequences in the GENPEPT database.

[14236] Based on this analysis, it was predicted that this GAS-specific protein and its epitopes, could be useful antigens for vaccines or diagnostics.

### EXAMPLE 2733

[14237] A DNA sequence (GASx1211) was identified in S. pyogenes <SEQ ID 7965> which encodes the amino acid sequence <SEQ ID 7966>. Analysis of this protein sequence reveals the following:

```
Possible site: 15
>>> Seems to have no N-terminal signal sequence
----- Final Results -----
                            bacterial cytoplasm --- Certainty = 0.1850(Affirmative) < succ>
                              bacterial membrane --- Certainty = 0.0000(Not Clear) < succ>
                                bacterial outside --- Certainty = 0.0000(Not Clear) < succ>
```

[14238] No corresponding DNA sequence was identified in S. agalactiae.

[14239] The protein has no significant homology with any sequences in the GENPEPT database.

[14240] Based on this analysis, it was predicted that this GAS-specific protein and its epitopes, could be useful antigens for vaccines or diagnostics.

### EXAMPLE 2734

[14241] A DNA sequence (GASx1219R) was identified in S. pyogenes <SEQ ID 7967> which encodes the amino acid sequence <SEQ ID 7968>. Analysis of this protein sequence reveals the following:

```
Possible site: 15
>>> Seems to have no N-terminal signal sequence
----- Final Results -----
                            bacterial cytoplasm --- Certainty = 0.2284(Affirmative) < succ>
                              bacterial membrane --- Certainty = 0.0000(Not Clear) < succ>
                                bacterial outside --- Certainty = 0.0000(Not Clear) < succ>
```

[14242] No corresponding DNA sequence was identified in S. agalactiae.

[14243] The protein has no significant homology with any sequences in the GENPEPT database.

[14244] Based on this analysis, it was predicted that this GAS-specific protein and its epitopes, could be useful antigens for vaccines or diagnostics.

### EXAMPLE 2735

[14245] A DNA sequence (GASx1225) was identified in S. pyogenes <SEQ ID 7969> which encodes the amino acid sequence <SEQ ID 7970>. Analysis of this protein sequence reveals the following:

```
Possible site: 27
>>> Seems to have no N-terminal signal sequence
----- Final Results -----
                            bacterial cytoplasm --- Certainty = 0.2062(Affirmative) < succ>
                              bacterial membrane --- Certainty = 0.0000(Not Clear) < succ>
                                bacterial outside --- Certainty = 0.0000(Not Clear) < succ>
```

[14246] No corresponding DNA sequence was identified in S. agalactiae.

[14247] The protein has no significant homology with any sequences in the GENPEPT database.

[14248] Based on this analysis, it was predicted that this GAS-specific protein and its epitopes, could be useful antigens for vaccines or diagnostics.

### EXAMPLE 2736

[14249] A DNA sequence (GASx1229) was identified in S. pyogenes <SEQ ID 7971> which encodes the amino acid sequence <SEQ ID 7972>. Analysis of this protein sequence reveals the following:

```
Possible site: 15
>>> Seems to have no N-terminal signal sequence
----- Final Results -----
                            bacterial cytoplasm --- Certainty = 0.2755(Affirmative) < succ>
                              bacterial membrane --- Certainty = 0.0000(Not Clear) < succ>
                                bacterial outside --- Certainty = 0.0000(Not Clear) < succ>
```

[14250] No corresponding DNA sequence was identified in S. agalactiae.

[14251] The protein has no significant homology with any sequences in the GENPEPT database.

[14252] Based on this analysis, it was predicted that this GAS-specific protein and its epitopes, could be useful antigens for vaccines or diagnostics.

### EXAMPLE 2737

[14253] A DNA sequence (GASx1247R) was identified in S. pyogenes <SEQ ID 7973> which encodes the amino acid sequence <SEQ ID 7974>. Analysis of this protein sequence reveals the following:

| Possible site: 31 | | | | |
|---|---|---|---|---|
| >>> Seems to have a cleavable N-term signal seq. | | | | |
| | INTEGRAL | Likelihood = −6.32 | Transmembrane | 55-71 (53-81) |
| | INTEGRAL | Likelihood = −6.00 | Transmembrane | 74-90 (72-95) |
| | INTEGRAL | Likelihood = −2.18 | Transmembrane | 95-111 (95-111) |
| | INTEGRAL | Likelihood = −1.54 | Transmembrane | 124-140 (123-141) |

```
----- Final Results -----
                              bacterial membrane --- Certainty = 0.3527(Affirmative) < succ>
                                bacterial outside --- Certainty = 0.0000(Not Clear) < succ>
                              bacterial cytoplasm --- Certainty = 0.0000(Not Clear) < succ>
```

[14254] No corresponding DNA sequence was identified in S. agalactiae.

[14255] The protein has homology with the following sequences in the GENPEPT database:

| >GP: CAB14326 GB: Z99116 yqjA [Bacillus subtilis] | | | |
|---|---|---|---|
| Identities = 97/306 (31%), Positives = 154/306 (49%) | | | |
| Query: | 6 | RTLKMTLATIVAILIAYQLHLDYAMSAGIIALLSVLDTRKSSLVVARNRLLSFFLAFGIA | 65 |
| | | RT+K L T +AI I+ LHL SAGII +L + T+K SL + R + LA + | |
| Sbjct: | 7 | RTIKTALGTALAIYISQLLHLQNFASAGIITILCIQITQKRSLQASWARFWACCLAIAFS | 66 |
| Query: | 66 | MMCFSLFGFTTVGFMCYLLIIIPLLYHFQIEAGLVPITVLVTHLIAKKSIALPILSNEFM | 125 |
| | | + F L G+ LLI IP+ +I G+V +V++ HL I + NE | |
| Sbjct: | 67 | YLFFELIGYHPFVIGALLLIFIPITVLLKINEGIVTSSVIILHLYMSGGITPTFIWNEVQ | 126 |
| Query: | 126 | LFFVGTSVALLFNAYMGPQDQQIRYYHQKVESDLKGILYRFESFLLEGKGQNEGLLIKNL | 185 |
| | | L VG VALL N YM D+++ Y +K+E + I E +LL G+ G I | |
| Sbjct: | 127 | LITVGIGVALLMNLYMPSLDRKLIAYRKKIEDNFAVIFAEIERYLLTGEQDWSGKEIPET | 186 |
| Query: | 186 | DKILDEALKLVYRERHNQLFQQTNYQVHYFEMRRQQNRLLGQMAINVNTLMRQSKESILL | 245 |
| | | +++ EA L YR+ N + + N HYF+MR +Q ++ ++ V ++ + ++ | |
| Sbjct: | 187 | HQLITEAKNLAYRDVQNHILRYENLHYHYFKMREKQFEIIERLLPKVTSISITVDQGKMI | 246 |
| Query: | 246 | SHLFHETACQLSEQNPALTLIDDIEQLLETFRHGDLPQTREEFERRAVLFQLLQDLERFI | 305 |
| | | + H+ + N A + + + + F LP TREEFE RA LF LL ++E+++ | |
| Sbjct: | 247 | AEFIHDLREAIHPGNTAYKFLKRLADMRKEFEEMPLPATREEFEARAALFHLLGEMEQYL | 306 |
| Query: | 306 | LLKVEF | 311 |
| | | ++K F | |
| Sbjct: | 307 | VIKSYF | 312 |

[14256] Based on this analysis, it was predicted that this GAS-specific protein and its epitopes, could be useful antigens for vaccines or diagnostics.

### EXAMPLE 2738

[14257] A DNA sequence (GASx1261) was identified in S. pyogenes <SEQ ID 7975> which encodes the amino acid sequence <SEQ ID 7976>. Analysis of this protein sequence reveals the following:

```
Possible site: 15
>>> Seems to have no N-terminal signal sequence
----- Final Results -----
                            bacterial cytoplasm --- Certainty = 0.6082(Affirmative) < succ>
                              bacterial membrane --- Certainty = 0.0000(Not Clear) < succ>
                                bacterial outside --- Certainty = 0.0000(Not Clear) < succ>
```

[14258] No corresponding DNA sequence was identified in S. agalactiae.

[14259] The protein has no significant homology with any sequences in the GENPEPT database.

[14260] Based on this analysis, it was predicted that this GAS-specific protein and its epitopes, could be useful antigens for vaccines or diagnostics.

### EXAMPLE 2739

[14261] A DNA sequence (GASx1262R) was identified in S. pyogenes <SEQ ID 7977> which encodes the amino acid sequence <SEQ ID 7978>. Analysis of this protein sequence reveals the following:

| Possible site: 51 | | | | |
|---|---|---|---|---|
| >>> Seems to have no N-terminal signal sequence | | | | |
| | INTEGRAL | Likelihood = −7.06 | Transmembrane | 38-54 (37-55) |

```
----- Final Results -----
                              bacterial membrane --- Certainty = 0.3824(Affirmative) < succ>
                                bacterial outside --- Certainty = 0.0000(Not Clear) < succ>
                            bacterial cytoplasm --- Certainty = 0.0000(Not Clear) < succ>
```

[14262] No corresponding DNA sequence was identified in S. agalactiae.

[14263] The protein has no significant homology with any sequences in the GENPEPT database.

[14264] Based on this analysis, it was predicted that this GAS-specific protein and its epitopes, could be useful antigens for vaccines or diagnostics.

### EXAMPLE 2740

[14265] A DNA sequence (GASx1265R) was identified in S. pyogenes <SEQ ID 7979> which encodes the amino acid sequence <SEQ ID 7980>. Analysis of this protein sequence reveals the following:

```
Possible site: 25
>>> Seems to have a cleavable N-term signal seq.
----- Final Results -----
                                bacterial outside --- Certainty = 0.3000(Affirmative) < succ>
                              bacterial membrane --- Certainty = 0.0000(Not Clear) < succ>
                            bacterial cytoplasm --- Certainty = 0.0000(Not Clear) < succ>
```

[14266] No corresponding DNA sequence was identified in S. agalactiae.

[14267] Based on this analysis, it was predicted that this GAS-specific protein and its epitopes, could be useful antigens for vaccines or diagnostics.

### EXAMPLE 2741

[14268] A DNA sequence (GASx1270) was identified in S. pyogenes <SEQ ID 7981> which encodes the amino acid sequence <SEQ ID 7982>. Analysis of this protein sequence reveals the following:

```
Possible site: 36
>>> Seems to have no N-terminal signal sequence
----- Final Results -----
                            bacterial cytoplasm --- Certainty = 0.4063(Affirmative) < succ>
                              bacterial membrane --- Certainty = 0.0000(Not Clear) < succ>
                                bacterial outside --- Certainty = 0.0000(Not Clear) < succ>
```

[14269] No corresponding DNA sequence was identified in S. agalactiae.

[14270] The protein has no significant homology with any sequences in the GENPEPT database.

[14271] Based on this analysis, it was predicted that this GAS-specific protein and its epitopes, could be useful antigens for vaccines or diagnostics.

### EXAMPLE 2742

[14272] A DNA sequence (GASx1290R) was identified in S. pyogenes <SEQ ID 7983> which encodes the amino acid sequence <SEQ ID 7984>. Analysis of this protein sequence reveals the following:

| Possible site: 26 | | | | |
|---|---|---|---|---|
| >>> Seems to have no N-terminal signal sequence | | | | |
| | INTEGRAL | Likelihood = −12.37 | Transmembrane | 180-196 (172-207) |
| | INTEGRAL | Likelihood = −10.19 | Transmembrane | 34-50 (30-53) |
| | INTEGRAL | Likelihood = −4.09 | Transmembrane | 233-249 (232-250) |

```
----- Final Results -----
                              bacterial membrane --- Certainty = 0.5946(Affirmative) < succ>
                                bacterial outside --- Certainty = 0.0000(Not Clear) < succ>
                            bacterial cytoplasm --- Certainty = 0.0000(Not Clear) < succ>
```

[14273] No corresponding DNA sequence was identified in S. agalactiae.

[14274] The protein has homology with the following sequences in the GENPEPT database:

| >GP: AAB88010 GB: L21856 MalA [Streptococcus pneumoniae] | | | |
|---|---|---|---|
| Identities = 66/237 (27%), Positives = 105/237 (43%), Gaps = 28/237 (11%) | | | |
| Query: | 45 | MIPVTLHYANMTTYPLERIVTKSLSPITDKTYQALTQGKIEKD---TFQGQSLIRRD--- | 98 |
| | | M+P+ + ++ TYPLE + P+TDK Q L++ D T+ G + | |
| Sbjct: | 1 | MVPIAIQNSSQETYPLETFIDNVYEPLTDKVVQDLSEHATIVDGTLTYTGTASQAPSVVI | 60 |
| Query: | 99 | GELVLAVLPTKVDLEQLASESTRQIIVTKKEWRFVTPDGKEL-RAHVRGQQQSLADLTTV | 157 |
| | | G + LP + L T +++++K + KEL R R Q T | |
| Sbjct: | 61 | GPSQIKELPKDLQLHF----DTNELVISK--------ESKELTRISYRAIQ------TEG | 102 |
| Query: | 158 | KAVKDFVNQQWY---DSNKASVLGFLLLTFVLMVCVGTLIVIGLGAFFLTLTKRSRLFMI | 214 |
| | | KD + Q + +N+ + FL+L + + IV L +TK+SRLF | |
| Sbjct: | 103 | FKSKDSLTQAFIRLVPTNRVYISLFLVLGASFLFGLNFFIVSLGACLLLYITKKSRLFSF | 162 |
| Query: | 215 | RNFSEGLGLMVNCLAWPSLLAIALSFFIQDPVLIMNCQVFGTLLMLTWVFYKTQFRD | 271 |
| | | R F E ++NCL P+L+ + L F Q+ ++ Q +L L +FYKT FRD | |
| Sbjct: | 163 | RTFKECYHFILNCLGLPTLITLILGLFGQNMTTLITVQNILFVLYLVTIFYKTHFRD | 219 |

[14275] Based on this analysis, it was predicted that this GAS-specific protein and its epitopes, could be useful antigens for vaccines or diagnostics.

### EXAMPLE 2743

[14276] A DNA sequence (GASx1294) was identified in S. pyogenes <SEQ ID 7985> which encodes the amino acid sequence <SEQ ID 7986>. Analysis of this protein sequence reveals the following:

```
Possible site: 18
>>> Seems to have no N-terminal signal sequence
----- Final Results -----
                            bacterial cytoplasm --- Certainty = 0.2104(Affirmative) < succ>
                              bacterial membrane --- Certainty = 0.0000(Not Clear) < succ>
                                bacterial outside --- Certainty = 0.0000(Not Clear) < succ>
```

[14277] No corresponding DNA sequence was identified in S. agalactiae.

[14278] The protein has no significant homology with any sequences in the GENPEPT database.

[14279] Based on this analysis, it was predicted that this GAS-specific protein and its epitopes, could be useful antigens for vaccines or diagnostics.

### EXAMPLE 2744

[14280] A DNA sequence (GASx1303R) was identified in S. pyogenes <SEQ ID 7987> which encodes the amino acid sequence <SEQ ID 7988>. Analysis of this protein sequence reveals the following:

| Possible site: 38 | | | | |
|---|---|---|---|---|
| >>> Seems to have an uncleavable N-term signal seq | | | | |
| | INTEGRAL | Likelihood = −8.07 | Transmembrane | 13-29 (8-38) |

```
----- Final Results -----
                              bacterial membrane --- Certainty = 0.4227(Affirmative) < succ>
                                bacterial outside --- Certainty = 0.0000(Not Clear) < succ>
                            bacterial cytoplasm --- Certainty = 0.0000(Not Clear) < succ>
```

[14281] No corresponding DNA sequence was identified in S. agalactiae.

[14282] The protein has no significant homology with any sequences in the GENPEPT database.

[14283] Based on this analysis, it was predicted that this GAS-specific protein and its epitopes, could be useful antigens for vaccines or diagnostics.

### EXAMPLE 2745

[14284] A DNA sequence (GASx1307R) was identified in S. pyogenes <SEQ ID 7989> which encodes the amino acid sequence <SEQ ID 7990>. Analysis of this protein sequence reveals the following:

```
Possible site: 19
>>> Seems to have a cleavable N-term signal seq.
----- Final Results -----
                                bacterial outside --- Certainty = 0.3000(Affirmative) < succ>
                              bacterial membrane --- Certainty = 0.0000(Not Clear) < succ>
                            bacterial cytoplasm --- Certainty = 0.0000(Not Clear) < succ>
```

[14285] No corresponding DNA sequence was identified in S. agalactiae.

[14286] The protein has no significant homology with any sequences in the GENPEPT database.

[14287] Based on this analysis, it was predicted that this GAS-specific protein and its epitopes, could be useful antigens for vaccines or diagnostics.

### EXAMPLE 2746

[14288] A DNA sequence (GASx1312R) was identified in S. pyogenes <SEQ ID 7991> which encodes the amino acid sequence <SEQ ID 7992>. Analysis of this protein sequence reveals the following:

```
Possible site: 21
>>> Seems to have no N-terminal signal sequence
----- Final Results -----
                            bacterial cytoplasm --- Certainty = 0.1996(Affirmative) < succ>
                              bacterial membrane --- Certainty = 0.0000(Not Clear) < succ>
                                bacterial outside --- Certainty = 0.0000(Not Clear) < succ>
```

[14289] No corresponding DNA sequence was identified in S. agalactiae.

[14290] The protein has no significant homology with any sequences in the GENPEPT database.

[14291] Based on this analysis, it was predicted that this GAS-specific protein and its epitopes, could be useful antigens for vaccines or diagnostics.

### EXAMPLE 2747

[14292] A DNA sequence (GASx1316R) was identified in S. pyogenes <SEQ ID 7993> which encodes the amino acid sequence <SEQ ID 7994>. Analysis of this protein sequence reveals the following:

```
Possible site: 58
>>> Seems to have no N-terminal signal sequence
----- Final Results -----
                            bacterial cytoplasm --- Certainty = 0.3504(Affirmative) < succ>
                              bacterial membrane --- Certainty = 0.0000(Not Clear) < succ>
                                bacterial outside --- Certainty = 0.0000(Not Clear) < succ>
RGD motif: 271-273
```

[14293] No corresponding DNA sequence was identified in S. agalactiae.

[14294] The protein has homology with the following sequences in the GENPEPT database:

| >GP: AAC66321 GB: AE000792 outer surface protein, putative | | | |
|---|---|---|---|
| [Borrelia burgdorferi] | | | |
| Identities = 127/365 (34%), Positives = 195/365 (52%), Gaps = 14/365 (3%) | | | |
| Query: | 1 | MVDLGFSLYPERYDVTKSKAYIDLCHSYGAKRLFMSLLQLAPADHQMFHCYAELIAYANQ | 60 |
| | | M ++G S+YP K Y++ +G ++F SLL + + F + EL++ AN+ | |
| Sbjct: | 1 | MKEIGISIYPNVSPKNKIIKYLEKSAHFGFTQVFTSLLYI---NGNEFDIFKELLSIANK | 57 |
| Query: | 61 | LGIRVIADVSPSFISQAGWSDQLIERA------HAFGLAGLRLDEALPLAEIVTLTRNPF | 114 |
| | | G++ I DVSP + G + G +RLD E +T N | |
| Sbjct: | 58 | NGMKPIIDVSPEIFKELGIDLSNLRNCPKLDYFKKLGAWAIRLDNTFTGIEESLMTFNDS | 117 |
| Query: | 115 | GLKIELNMSTDKQLLMSLLATDAERSNIIGCHNFYPHEFTGLSWQHFKDMSRFYHEHDIE | 174 |
| | | LKI+LN+S + + +++ N++GCHNFYPH++TGLS FK+ ++ + + I | |
| Sbjct: | 118 | DLKIQLNISNINKHIDTIMYFKPNIKNLLGCHNFYPHKYTGLSRNFFKETTKIFKHYSIP | 177 |
| Query: | 175 | TAAFITAQSASE-GPWLLAEGLPTVEDHRHLPIGLQVELMKAIGTIDNILISNQFISEEE | 233 |
| | | TAAFI++ +A E EG+PT+E HR I Q + + G ID +LISN F SE E | |
| Sbjct: | 178 | TAAFISSNNAEECARGKEKEGVPTLESHRSKDIETQAKDLFKEG-IDTVLISNCFPSETE | 236 |
| Query: | 234 | LAACTQALARPVTTIKVRPIIDLTEVEEQII-GYPHCYRGDVSDYVIRSTMPRLVYAQES | 292 |
| | | L ++ + R + +K D VE++II H RGD++ Y IRSTMPR+ Y + | |
| Sbjct: | 237 | LKKVSK-VNRNILELKADLNPDANSVEKEIILENLHFNRGDINSYRIRSTMPRVYYNNKK | 295 |
| Query: | 293 | IAPRDQSKEVKRGSIIIDNDRYHRYKGELQIALKNFTVSSKANVVAEVREDYLSLLDDLR | 352 |
| | | P E+K+G I+ID+ Y Y GELQIALK+ + NVV ++ D + LL+ + | |
| Sbjct: | 296 | F-PVHSPNEIKKGDILIDSSEYLGYTGELQIALKDTPNNGLVNVVGKIINDEIYLLEKIE | 354 |
| Query: | 353 | PWQEF | 357 |
| | | PW++F | |
| Sbjct: | 355 | PWEKF | 359 |

[14295] Based on this analysis, it was predicted that this GAS-specific protein and its epitopes, could be useful antigens for vaccines or diagnostics.

### EXAMPLE 2748

[14296] A DNA sequence (GASx1319) was identified in S. pyogenes <SEQ ID 7995> which encodes the amino acid sequence <SEQ ID 7996>. Analysis of this protein sequence reveals the following:

| Possible Site: 34 | | | |
|---|---|---|---|
| >>> Seems to have no N-terminal signal sequence | | | |
| INTEGRAL | Likelihood = −9.50 | Transmembrane | 127-143 (125-151) |
| INTEGRAL | Likelihood = −7.43 | Transmembrane | 17-33 (15-36) |
| INTEGRAL | Likelihood = −5.68 | Transmembrane | 39-55 (36-57) |
| INTEGRAL | Likelihood = −1.86 | Transmembrane | 60-76 (59-77) |
| INTEGRAL | Likelihood = −0.59 | Transmembrane | 85-101 (85-101) |

----- Final Results -----
bacterial membrane --- Certainty = 0.4800 (Affirmative) < succ>
bacterial outside --- Certainty = 0.0000 (Not Clear) < succ>
bacterial cytoplasm --- Certainty = 0.0000 (Not Clear) < succ>

[14297] No corresponding DNA sequence was identified in S. agalactiae.

[14298] The protein has no significant homology with any sequences in the GENPEPT database.

[14299] Based on this analysis, it was predicted that this GAS-specific protein and its epitopes, could be useful antigens for vaccines or diagnostics.

### EXAMPLE 2749

[14300] A DNA sequence (GASx1320) was identified in S. pyogenes <SEQ ID 7997> which encodes the amino acid sequence <SEQ ID 7998>. Analysis of this protein sequence reveals the following:

| Possible site: 45 | | | |
|---|---|---|---|
| >>> Seems to have no N-terminal signal sequence | | | |
| INTEGRAL | Likelihood = −1.81 | Transmembrane | 35-51 (35-51) |

----- Final Results -----
bacterial membrane --- Certainty = 0.1723 (Affirmative) < succ>
bacterial outside --- Certainty = 0.0000 (Not Clear) < succ>
bacterial cytoplasm --- Certainty = 0.0000 (Not Clear) < succ>

[14301] No corresponding DNA sequence was identified in S. agalactiae.

[14302] The protein has no significant homology with any sequences in the GENPEPT database.

[14303] Based on this analysis, it was predicted that this GAS-specific protein and its epitopes, could be useful antigens for vaccines or diagnostics.

### EXAMPLE 2750

[14304] A DNA sequence (GASx1321) was identified in S. pyogenes <SEQ ID 7999> which encodes the amino acid sequence <SEQ ID 8000>. Analysis of this protein sequence reveals the following:

Possible site: 29
>>> Seems to have an uncleavable N-term signal seq
----- Final Results -----
bacterial membrane --- Certainty = 0.0000 (Not Clear) < succ>
bacterial outside --- Certainty = 0.0000 (Not Clear) < succ>
bacterial cytoplasm --- Certainty = 0.0000 (Not Clear) < succ>

[14305] No corresponding DNA sequence was identified in S. agalactiae.

[14306] The protein has no significant homology with any sequences in the GENPEPT database.

[14307] Based on this analysis, it was predicted that this GAS-specific protein and its epitopes, could be useful antigens for vaccines or diagnostics.

### EXAMPLE 2751

[14308] A DNA sequence (GASx1329) was identified in S. pyogenes <SEQ ID 8001> which encodes the amino acid sequence <SEQ ID 8002>. Analysis of this protein sequence reveals the following:

| Possible site: 44 | | | |
|---|---|---|---|
| >>> Seems to have no N-terminal signal sequence | | | |
| INTEGRAL | Likelihood = −1.28 | Transmembrane | 64-80 (64-80) |

----- Final Results -----
bacterial membrane --- Certainty = 0.1510 (Affirmative) < succ>
bacterial outside --- Certainty = 0.0000 (Not Clear) < succ>
bacterial cytoplasm --- Certainty = 0.0000 (Not Clear) < succ>

[14309] No corresponding DNA sequence was identified in S. agalactiae.

[14310] The protein has no significant homology with any sequences in the GENPEPT database.

[14311] Based on this analysis, it was predicted that this GAS-specific protein and its epitopes, could be useful antigens for vaccines or diagnostics.

### EXAMPLE 2752

[14312] A DNA sequence (GASx1332R) was identified in S. pyogenes <SEQ ID 8003> which encodes the amino acid sequence <SEQ ID 8004>. Analysis of this protein sequence reveals the following:

Possible site: 37
>>> Seems to have an uncleavable N-term signal seq
----- Final Results -----
bacterial membrane --- Certainty = 0.0000 (Not Clear) < succ>
bacterial outside --- Certainty = 0.0000 (Not Clear) < succ>
bacterial cytoplasm --- Certainty = 0.0000 (Not Clear) < succ>

[14313] No corresponding DNA sequence was identified in S. agalactiae.

[14314] The protein has no significant homology with any sequences in the GENPEPT database.

[14315] Based on this analysis, it was predicted that this GAS-specific protein and its epitopes, could be useful antigens for vaccines or diagnostics.

### EXAMPLE 2753

[14316] A DNA sequence (GASx1333) was identified in S. pyogenes <SEQ ID 8005> which encodes the amino acid sequence <SEQ ID 8006>. Analysis of this protein sequence reveals the following:

Possible site: 29
>>> Seems to have an uncleavable N-term signal seq
----- Final Results -----
bacterial membrane --- Certainty = 0.0000 (Not Clear) < succ>
bacterial outside --- Certainty = 0.0000 (Not Clear) < succ>
bacterial cytoplasm --- Certainty = 0.0000 (Not Clear) < succ>

[14317] No corresponding DNA sequence was identified in S. agalactiae.

[14318] The protein has no significant homology with any sequences in the GENPEPT database.

[14319] Based on this analysis, it was predicted that this GAS-specific protein and its epitopes, could be useful antigens for vaccines or diagnostics.

### EXAMPLE 2754

[14320] A DNA sequence (GASx1335R) was identified in S. pyogenes <SEQ ID 8007> which encodes the amino acid sequence <SEQ ID 8008>. Analysis of this protein sequence reveals the following:

Possible site: 37
>>> Seems to have an uncleavable N-term signal seq
----- Final Results -----
bacterial membrane --- Certainty = 0.0000 (Not Clear) < succ>
bacterial outside --- Certainty = 0.0000 (Not Clear) < succ>
bacterial cytoplasm --- Certainty = 0.0000 (Not Clear) < succ>

[14321] No corresponding DNA sequence was identified in S. agalactiae.

[14322] The protein has homology with the following sequences in the GENPEPT database:

| >GP: AAF96047 GB: AE004354 uridine phosphorylase [Vibrio cholerae] | | | |
|---|---|---|---|
| Identities = 46/167 (27%), Positives = 72/167 (42%), Gaps = 12/167 (7%) | | | |
| Query: | 8 | GVKEMISTGTCGVLVP-IAENRFLVPVKALRDEGTSYHYVAPSRYIDIDPKMLRLIEKTL | 66 |
| | | G K ++ G+ G + I ++ A+RDEG S Y+ + +++ +++ L | |
| Sbjct: | 79 | GAKAIVRVGSAGAMQSEIGLGELILVEGAVRDEGGSKAYIGAAYPAYSSFELVVEMQRFL | 138 |
| Query: | 67 | LAQGLAYQEVITWSTDGFYR-ETKEKVAHRQEEGCSVVEMECSALAAVAQLRG-----IL | 120 |
| | | Q + I S D FY E E + +G +ME SAL V +LRG +L | |
| Sbjct: | 139 | AEQSVPIHRGIVRSHDSFYTDEEAELCRYWHRKGILAADMETSALLTVGRLRGLQVASVL | 198 |
| Query: | 121 | WGQLLFTADTLADVEVY---DQRNWGADSFSFALHLCLEVLNTLEKD | 164 |
| | | +L+ D A V Y DQR + + A L LN L+ D | |
| Sbjct: | 199 | NNVVLYEQDVQAGVNQYVNADQRMMQGE--TLAARAALHALNALKFD | 243 |

[14323] Based on this analysis, it was predicted that this GAS-specific protein and its epitopes, could be useful antigens for vaccines or diagnostics.

### EXAMPLE 2755

[14324] A DNA sequence (GASx1353) was identified in S. pyogenes <SEQ ID 8009> which encodes the amino acid sequence <SEQ ID 8010>. Analysis of this protein sequence reveals the following:

| Possible site: 42 | | | |
|---|---|---|---|
| >>> Seems to have a cleavable N-term signal seq. | | | |
| INTEGRAL | Likelihood = −5.79 | Transmembrane | 241-257 (234-260) |
| INTEGRAL | Likelihood = −5.15 | Transmembrane | 44-60 (43-65) |
| INTEGRAL | Likelihood = −4.78 | Transmembrane | 74-90 (72-92) |

----- Final Results -----
bacterial membrane --- Certainty = 0.3314 (Affirmative) < succ>
bacterial outside --- Certainty = 0.0000 (Not Clear) < succ>
bacterial cytoplasm --- Certainty = 0.0000 (Not Clear) < succ>

[14325] No corresponding DNA sequence was identified in S. agalactiae.

[14326] The protein has no significant homology with any sequences in the GENPEPT database.

[14327] Based on this analysis, it was predicted that this GAS-specific protein and its epitopes, could be useful antigens for vaccines or diagnostics.

### EXAMPLE 2756

[14328] A DNA sequence (GASx1354R) was identified in S. pyogenes <SEQ ID 8011> which encodes the amino acid sequence <SEQ ID 8012>. Analysis of this protein sequence reveals the following:

| Possible site: 55 | | | |
|---|---|---|---|
| >>> Seems to have a cleavable N-term signal seq. | | | |
| INTEGRAL | Likelihood = −3.45 | Transmembrane | 68-84 (65-86) |

----- Final Results -----
bacterial membrane --- Certainty = 0.2381 (Affirmative) < succ>
bacterial outside --- Certainty = 0.0000 (Not Clear) < succ>
bacterial cytoplasm --- Certainty = 0.0000 (Not Clear) < succ>

[14329] No corresponding DNA sequence was identified in S. agalactiae.

[14330] The protein has homology with the following sequences in the GENPEPT database:

| >GP: CAB83831 GB: AL162753 putative integral membrane protein | | | |
|---|---|---|---|
| [Neisseria meningitidis] | | | |
| Identities = 31/72 (43%), Positives = 46/72 (63%), Gaps = 6/72 (8%) | | | |
| Query: | 17 | FVIYAFDKRKAIKKKRRISERKLLVITVLFGGF-GALLAAKKYHHKTRKWYFVI----TC | 71 |
| | | F +Y DKR+A++ KRRI E +LL + LFGG+ GA L ++ + HKT K FV+ T | |
| Sbjct: | 38 | FALYGIDKRRAVRGKRRIPEHRLL-LPALFGGWAGAYLGSRIFRHKTAKKRFVVLFRLTV | 96 |
| Query: | 72 | YTSILLTLLVTY | 83 |
| | | ++L TL++ Y | |
| Sbjct: | 97 | SGNVLATLILIY | 108 |

[14331] Based on this analysis, it was predicted that this GAS-specific protein and its epitopes, could be useful antigens for vaccines or diagnostics.

### EXAMPLE 2757

[14332] A DNA sequence (GASx1363R) was identified in S. pyogenes <SEQ ID 8013> which encodes the amino acid sequence <SEQ ID 8014>. Analysis of this protein sequence reveals the following:

Possible Site: 21
>>> Seems to have an uncleavable N-term signal seq
----- Final Results -----
bacterial membrane --- Certainty = 0.0000 (Not Clear) < succ>
bacterial outside --- Certainty = 0.0000 (Not Clear) < succ>
bacterial cytoplasm --- Certainty = 0.0000 (Not Clear) < succ>

[14333] No corresponding DNA sequence was identified in S. agalactiae.

[14334] The protein has no significant homology with any sequences in the GENPEPT database.

[14335] Based on this analysis, it was predicted that this GAS-specific protein and its epitopes, could be useful antigens for vaccines or diagnostics.

### EXAMPLE 2758

[14336] A DNA sequence (GASx1367) was identified in S. pyogenes <SEQ ID 8015> which encodes the amino acid sequence <SEQ ID 8016>. Analysis of this protein sequence reveals the following:

Possible site: 31
>>> Seems to have an uncleavable N-term signal seq
----- Final Results -----
bacterial membrane --- Certainty = 0.0000 (Not Clear) < succ>
bacterial outside --- Certainty = 0.0000 (Not Clear) < succ>
bacterial cytoplasm --- Certainty = 0.0000 (Not Clear) < succ>

[14337] No corresponding DNA sequence was identified in S. agalactiae.

[14338] The protein has homology with the following sequences in the GENPEPT database:

| >GP: CAA63508 GB: X92946 hypothetical protein [Lactococcus lactis] | | | |
|---|---|---|---|
| Identities = 64/96 (66%), Positives = 77/96 (79%) | | | |
| Query: | 1 | MPRKTFDKAFKLSAVKLILEEEQPVKMVSSTLEIHPNSLYQWIQEYEKYGESAFPGHGSA | 60 |
| | | M R+ FDK FK SAVKLILEE VK VS LE+H NSLY+W+QE E+YGESAFPG+G+A | |
| Sbjct: | 1 | MARRKEDKQFKNSAVKLILEEGYSVKEVSQELEVHANSLYRWVQEVEEYGESAFPGNGTA | 60 |
| Query: | 61 | LRHAQFKTKKLEKEHKLLQEELALLKKFQVFLKPNR | 96 |
| | | L +AQ K K LEKE++ LQEEL LLKKF+VFLK ++ | |
| Sbjct: | 61 | LANAQHKIKLLEKENRYLQEELELLKKFRVFLKRSK | 96 |

[14339] Based on this analysis, it was predicted that this GAS-specific protein and its epitopes, could be useful antigens for vaccines or diagnostics.

### EXAMPLE 2759

[14340] A DNA sequence (GASx1374R) was identified in S. pyogenes <SEQ ID 8017> which encodes the amino acid sequence <SEQ ID 8018>. Analysis of this protein sequence reveals the following:

Possible site: 39
>>> Seems to have no N-terminal signal sequence
----- Final Results -----
bacterial cytoplasm --- Certainty = 0.2585 (Affirmative) < succ>
bacterial membrane --- Certainty = 0.0000 (Not Clear) < succ>
bacterial outside --- Certainty = 0.0000 (Not Clear) < succ>

[14341] No corresponding DNA sequence was identified in S. agalactiae.

[14342] The protein has no significant homology with any sequences in the GENPEPT database.

[14343] Based on this analysis, it was predicted that this GAS-specific protein and its epitopes, could be useful antigens for vaccines or diagnostics.

### EXAMPLE 2760

[14344] A DNA sequence (GASx1382R) was identified in S. pyogenes <SEQ ID 8019> which encodes the amino acid sequence <SEQ ID 8020>. Analysis of this protein sequence reveals the following:

| Possible site: 14 | | | |
|---|---|---|---|
| >>> Seems to have an uncleavable N-term signal seq | | | |
| INTEGRAL | Likelihood = −2.39 | Transmembrane | 3-19 (3-19) |

----- Final Results -----
bacterial membrane --- Certainty = 0.1956 (Affirmative) < succ>
bacterial outside --- Certainty = 0.0000 (Not Clear) < succ>
bacterial cytoplasm --- Certainty = 0.0000 (Not Clear) < succ>

[14345] No corresponding DNA sequence was identified in S. agalactiae.

[14346] The protein has no significant homology with any sequences in the GENPEPT database.

[14347] Based on this analysis, it was predicted that this GAS-specific protein and its epitopes, could be useful antigens for vaccines or diagnostics.

### EXAMPLE 2761

[14348] A DNA sequence (GASx1391R) was identified in S. pyogenes <SEQ ID 8021> which encodes the amino acid sequence <SEQ ID 8022>. Analysis of this protein sequence reveals the following:

Possible site: 22
>>> May be a lipoprotein
----- Final Results -----
bacterial membrane --- Certainty = 0.0000 (Not Clear) < succ>
bacterial outside --- Certainty = 0.0000 (Not Clear) < succ>
bacterial cytoplasm --- Certainty = 0.0000 (Not Clear) < succ>

[14349] No corresponding DNA sequence was identified in S. agalactiae.

[14350] The protein has no significant homology with any sequences in the GENPEPT database.

[14351] Based on this analysis, it was predicted that this GAS-specific protein and its epitopes, could be useful antigens for vaccines or diagnostics.

### EXAMPLE 2762

[14352] A DNA sequence (GASx1404) was identified in S. pyogenes <SEQ ID 8023> which encodes the amino acid sequence <SEQ ID 8024>. Analysis of this protein sequence reveals the following:

Possible site: 32
>>> Seems to have no N-terminal signal sequence
----- Final Results -----
bacterial cytoplasm --- Certainty = 0.3046 (Affirmative) < succ>
bacterial membrane --- Certainty = 0.0000 (Not Clear) < succ>
bacterial outside --- Certainty = 0.0000 (Not Clear) < succ>

[14353] No corresponding DNA sequence was identified in S. agalactiae.

[14354] The protein has no significant homology with any sequences in the GENPEPT database.

[14355] Based on this analysis, it was predicted that this GAS-specific protein and its epitopes, could be useful antigens for vaccines or diagnostics.

### EXAMPLE 2763

[14356] A DNA sequence (GASx1412R) was identified in S. pyogenes <SEQ ID 8025> which encodes the amino acid sequence <SEQ ID 8026>. Analysis of this protein sequence reveals the following:

Possible site: 20
>>> Seems to have no N-terminal signal sequence
----- Final Results -----
bacterial cytoplasm --- Certainty = 0.1590 (Affirmative) < succ>
bacterial membrane --- Certainty = 0.0000 (Not Clear) < succ>
bacterial outside --- Certainty = 0.0000 (Not Clear) < succ>

[14357] No corresponding DNA sequence was identified in S. agalactiae.

[14358] The protein has no significant homology with any sequences in the GENPEPT database.

[14359] Based on this analysis, it was predicted that this GAS-specific protein and its epitopes, could be useful antigens for vaccines or diagnostics.

### EXAMPLE 2764

[14360] A DNA sequence (GASx1414R) was identified in S. pyogenes <SEQ ID 8027> which encodes the amino acid sequence <SEQ ID 8028>. Analysis of this protein sequence reveals the following:

Possible site: 24
>>> Seems to have no N-terminal signal sequence
----- Final Results -----
bacterial cytoplasm --- Certainty = 0.2816 (Affirmative) < succ>
bacterial membrane --- Certainty = 0.0000 (Not Clear) < succ>
bacterial outside --- Certainty = 0.0000 (Not Clear) < succ>

[14361] No corresponding DNA sequence was identified in S. agalactiae.

[14362] The protein has no significant homology with any sequences in the GENPEPT database.

[14363] Based on this analysis, it was predicted that this GAS-specific protein and its epitopes, could be useful antigens for vaccines or diagnostics.

### EXAMPLE 2765

[14364] A DNA sequence (GASx1416) was identified in S. pyogenes <SEQ ID 8029> which encodes the amino acid sequence <SEQ ID 8030>. Analysis of this protein sequence reveals the following:

Possible site: 34
>>> Seems to have no N-terminal signal sequence
----- Final Results -----
bacterial cytoplasm --- Certainty = 0.1744 (Affirmative) < succ>
bacterial membrane --- Certainty = 0.0000 (Not Clear) < succ>
bacterial outside --- Certainty = 0.0000 (Not Clear) < succ>

[14365] No corresponding DNA sequence was identified in S. agalactiae.

[14366] The protein has no significant homology with any sequences in the GENPEPT database.

[14367] Based on this analysis, it was predicted that this GAS-specific protein and its epitopes, could be useful antigens for vaccines or diagnostics.

### EXAMPLE 2766

[14368] A DNA sequence (GASx1417) was identified in S. pyogenes <SEQ ID 8031> which encodes the amino acid sequence <SEQ ID 8032>. Analysis of this protein sequence reveals the following:

Possible site: 13
>>> Seems to have no N-terminal signal sequence
----- Final Results -----
bacterial cytoplasm --- Certainty = 0.3771 (Affirmative) < succ>
bacterial membrane --- Certainty = 0.0000 (Not Clear) < succ>
bacterial outside --- Certainty = 0.0000 (Not Clear) < succ>

[14369] No corresponding DNA sequence was identified in S. agalactiae.

[14370] The protein has no significant homology with any sequences in the GENPEPT database.

[14371] Based on this analysis, it was predicted that this GAS-specific protein and its epitopes, could be useful antigens for vaccines or diagnostics.

### EXAMPLE 2767

[14372] A DNA sequence (GASx1419R) was identified in S. pyogenes <SEQ ID 8033> which encodes the amino acid sequence <SEQ ID 8034>. Analysis of this protein sequence reveals the following:

| Possible site: 13 | | | |
|---|---|---|---|
| >>> Seems to have an uncleavable N-term signal seq | | | |
| INTEGRAL | Likelihood = −10.93 | Transmembrane | 4-20 (1-25) |

----- Final Results -----
bacterial membrane --- Certainty = 0.5373 (Affirmative) < succ>
bacterial outside --- Certainty = 0.0000 (Not Clear) < succ>
bacterial cytoplasm --- Certainty = 0.0000 (Not Clear) < succ>

[14373] No corresponding DNA sequence was identified in S. agalactiae.

[14374] The protein has no significant homology with any sequences in the GENPEPT database.

[14375] Based on this analysis, it was predicted that this GAS-specific protein and its epitopes, could be useful antigens for vaccines or diagnostics.

### EXAMPLE 2768

[14376] A DNA sequence (GASx1423) was identified in S. pyogenes <SEQ ID 8035> which encodes the amino acid sequence <SEQ ID 8036>. Analysis of this protein sequence reveals the following:

| Possible site: 39 | | | |
|---|---|---|---|
| >>> Seems to have no N-terminal signal sequence | | | |
| INTEGRAL | Likelihood = −8.97 | Transmembrane | 30-46 (25-49) |
| INTEGRAL | Likelihood = −7.80 | Transmembrane | 52-68 (50-72) |
| INTEGRAL | Likelihood = −6.95 | Transmembrane | 129-145 (125-146) |

----- Final Results -----
bacterial membrane --- Certainty = 0.4588 (Affirmative) < succ>
bacterial outside --- Certainty = 0.0000 (Not Clear) < succ>
bacterial cytoplasm --- Certainty = 0.0000 (Not Clear) < succ>

[14377] No corresponding DNA sequence was identified in S. agalactiae.

[14378] The protein has no significant homology with any sequences in the GENPEPT database.

[14379] Based on this analysis, it was predicted that this GAS-specific protein and its epitopes, could be useful antigens for vaccines or diagnostics.

### EXAMPLE 2769

[14380] A DNA sequence (GASx1426R) was identified in S. pyogenes <SEQ ID 8037> which encodes the amino acid sequence <SEQ ID 8038>. Analysis of this protein sequence reveals the following:

| Possible site: 25 | | | |
|---|---|---|---|
| >>> Seems to have a cleavable N-term signal seq. | | | |
| INTEGRAL | Likelihood = −3.45 | Transmembrane | 36-52 (36-55) |

----- Final Results -----
bacterial membrane --- Certainty = 0.2381 (Affirmative) < succ>
bacterial outside --- Certainty = 0.0000 (Not Clear) < succ>
bacterial cytoplasm --- Certainty = 0.0000 (Not Clear) < succ>

[14381] No corresponding DNA sequence was identified in S. agalactiae.

[14382] The protein has homology with the following sequences in the GENPEPT database:

| >GP: AAC39287 GB: AF115103 orf87 gp [Streptococcus thermophilus | | | |
|---|---|---|---|
| bacteriophage Sfi21] | | | |
| Identities = 43/73 (58%), Positives = 61/73 (82%) | | | |
| Query: | 1 | MINLKLRLQNKVTLMAILGAIFLLAQQLGIKLPSNIADIANTAVTLLVLLGVVTDPTTKG | 60 |
| | | MIN KLRLQNK TL+A++ A+FL+ QQ G+ +P+NI + NT V +LV+LG++TDPTTKG | |
| Sbjct: | 8 | MINFKLRLQNKATLVALISAVFLMLQQFGLHVPNNIQEGINTLVGILVILGIITDPTTKG | 67 |
| Query: | 61 | LSDSEQALTYHEP | 73 |
| | | ++DSE+AL+Y +P | |
| Sbjct: | 68 | IADSERALSYIQP | 80 |

[14383] Based on this analysis, it was predicted that this GAS-specific protein and its epitopes, could be useful antigens for vaccines or diagnostics.

### EXAMPLE 2770

[14384] A DNA sequence (GASx1427R) was identified in S. pyogenes <SEQ ID 8039> which encodes the amino acid sequence <SEQ ID 8040>. Analysis of this protein sequence reveals the following:

| Possible site: 27 | | | |
|---|---|---|---|
| >>> Seems to have an uncleavable N-term signal seq | | | |
| INTEGRAL | Likelihood = −3.03 | Transmembrane | 2-18 (1-23) |

----- Final Results -----
bacterial membrane --- Certainty = 0.2211 (Affirmative) < succ>
bacterial outside --- Certainty = 0.0000 (Not Clear) < succ>
bacterial cytoplasm --- Certainty = 0.0000 (Not Clear) < succ>

[14385] No corresponding DNA sequence was identified in S. agalactiae.

[14386] The protein has no significant homology with any sequences in the GENPEPT database.

[14387] Based on this analysis, it was predicted that this GAS-specific protein and its epitopes, could be useful antigens for vaccines or diagnostics.

### EXAMPLE 2771

[14388] A DNA sequence (GASx1428R) was identified in S. pyogenes <SEQ ID 8041> which encodes the amino acid sequence <SEQ ID 8042>. Analysis of this protein sequence reveals the following:

Possible site: 20
>>> Seems to have no N-terminal signal sequence
----- Final Results -----
bacterial cytoplasm --- Certainty = 0.1017 (Affirmative) < succ>
bacterial membrane --- Certainty = 0.0000 (Not Clear) < succ>
bacterial outside --- Certainty = 0.0000 (Not Clear) < succ>

[14389] No corresponding DNA sequence was identified in S. agalactiae.

[14390] The protein has no significant homology with any sequences in the GENPEPT database.

[14391] Based on this analysis, it was predicted that this GAS-specific protein and its epitopes, could be useful antigens for vaccines or diagnostics.

### EXAMPLE 2772

[14392] A DNA sequence (GASx1429R) was identified in S. pyogenes <SEQ ID 8043> which encodes the amino acid sequence <SEQ ID 8044>. Analysis of this protein sequence reveals the following:

Possible site: 46
>>> Seems to have no N-terminal signal sequence
----- Final Results -----
bacterial cytoplasm --- Certainty = 0.3097 (Affirmative) < succ>
bacterial membrane --- Certainty = 0.0000 (Not Clear) < succ>
bacterial outside --- Certainty = 0.0000 (Not Clear) < succ>

[14393] No corresponding DNA sequence was identified in S. agalactiae.

[14394] The protein has no significant homology with any sequences in the GENPEPT database.

[14395] Based on this analysis, it was predicted that this GAS-specific protein and its epitopes, could be useful antigens for vaccines or diagnostics.

### EXAMPLE 2773

[14396] A DNA sequence (GASx1431R) was identified in S. pyogenes <SEQ ID 8045> which encodes the amino acid sequence <SEQ ID 8046>. Analysis of this protein sequence reveals the following:

Possible site: 50
>>> Seems to have no N-terminal signal sequence
----- Final Results -----
bacterial cytoplasm --- Certainty = 0.2584 (Affirmative) < succ>
bacterial membrane --- Certainty = 0.0000 (Not Clear) < succ>
bacterial outside --- Certainty = 0.0000 (Not Clear) < succ>

[14397] No corresponding DNA sequence was identified in S. agalactiae.

[14398] The protein has homology with the following sequences in the GENPEPT database:

| >GP: AAA98101 GB: M19348 hyaluronidase [Streptococcus pyogenes phage | | | |
|---|---|---|---|
| H4489A] | | | |
| Identities = 337/371 (90%), Positives = 351/371 (93%), Gaps = 1/371 (0%) | | | |
| Query: | 1 | MAENIPLRVQFKRMKAAEWASSDVVLLEGEIGFETDTGFAKFGDGQNTFSKLKYLTGPKG | 60 |
| | | M ENIPLRVQFKRM A EWA SDV+LLEGEIGFETDTGFAKFGDGQNTFSKLKYLTGPKG | |
| Sbjct: | 1 | MTENIPLRVQFKRMSADEWARSDVILLEGEIGFETDTGFAKFGDGQNTFSKLKYLTGPKG | 60 |
| Query: | 61 | PKGDTGLQGKTGGTGSRGPAGKPGTTDYDQLQNKPDLGAFAQKEETNSKITKLESSKADK | 120 |
| | | PKGDTGLQGKTGGTG RGPAGKPGTTDYDQLQNKPDLGAFAQKEETNSKITKLESSKADK | |
| Sbjct: | 61 | PKGDTGLQGKTGGTGPRGPAGKPGTTDYDQLQNKPDLGAFAQKEETNSKITKLESSKADK | 120 |
| Query: | 121 | NAVYLKAESNAKLDEKLNLKGGVMTGQLQFKPN-SGIKPSSSVGGAINIDMSKSEGAAMV | 179 |
| | | +AVY KAES +LD+KL+L GG++TGQLQFKPN SGIKPSSSVGGAINIDMSKSEGAAMV | |
| Sbjct: | 121 | SAVYSKAESKIELDKKLSLTGGIVTGQLQFKPNKSGIKPSSSVGGAINIDMSKSEGAAMV | 180 |
| Query: | 180 | MYTNKDTTDGPLMILRSNKDTFDQSVQFVDYKGTTNAVNIVMRQPTTPNFSSALNITSAN | 239 |
| | | MYTNKDTTDGPLMILRS+KDTFDQS QFVDY G TNAVNIVMRQP+ PNFSSALNITSAN | |
| Sbjct: | 181 | MYTNKDTTDGPLMILRSDKDTFDQSAQFVDYSGKTNAVNIVMRQPSAPNFSSALNITSAN | 240 |
| Query: | 240 | EGGSAMQIRGVEKALGTLKITHENPSVDKEYDENAAALSIDIVKKQKGGKGTAAQGIYIN | 299 |
| | | EGGSAMQIRGVEKALGTLKITHENP+V+ +YDENAAALSIDIVKKQKGGKGTAAQGIYIN | |
| Sbjct: | 241 | EGGSAMQIRGVEKALGTLKITHENPNVEAKYDENAAALSIDIVKKQKGGKGTAAQGIYIN | 300 |
| Query: | 300 | STSGTAGKMLRIRNKNKDKFYVGPDGDFWSCASSIVDGNLTVKDPTSGKHAATKDYVDEK | 359 |
| | | STSGTAGKMLRIRNKN+DKFYVGPDG F S A+S V GNLTVKDPTSGKHAATKDYVDEK | |
| Sbjct: | 301 | STSGTAGKMLRIRNKNEDKFYVGPDGGFHSGANSTVAGNLTVKDPTSGKHAATKDYVDEK | 360 |
| Query: | 360 | IAELKKLILKK | 370 |
| | | IAELKKLILKK | |
| Sbjct: | 361 | IAELKKLILKK | 371 |

[14399] Based on this analysis, it was predicted that this GAS-specific protein and its epitopes, could be useful antigens for vaccines or diagnostics.

### EXAMPLE 2774

[14400] A DNA sequence (GASx1438R) was identified in S. pyogenes <SEQ ID 8047> which encodes the amino acid sequence <SEQ ID 8048>. Analysis of this protein sequence reveals the following:

Possible site: 55
>>> Seems to have no N-terminal signal sequence
----- Final Results -----
bacterial cytoplasm --- Certainty = 0.1892 (Affirmative) < succ>
bacterial membrane --- Certainty = 0.0000 (Not Clear) < succ>
bacterial outside --- Certainty = 0.0000 (Not Clear) < succ>

[14401] A related DNA sequence <SEQ ID 10439> was identified in GBS which encodes amino acid sequence <SEQ ID 10440>.

[14402] No corresponding DNA sequence was identified in S. agalactiae.

[14403] The protein has homology with the following sequences in the GENPEPT database:

| >GP: AAB18711 GB: U38906 ORF36 [Bacteriophage rlt] | | | |
|---|---|---|---|
| Identities = 70/111 (63%), Positives = 88/111 (79%) | | | |
| Query: | 1 | LIEVIIKKYLDEHLDVPSFFEHQKDEPARFIILEKTSGAKQNHLLSSTFAFQSYAESLYE | 60 |
| | | +IE+IIK +LD HL V SF E + + P +I+ EKT +K NHLLSSTFAFQSYA S+YE | |
| Sbjct: | 1 | MIEIIIKNFLDTHLSVSSFLEKKGEMPLSYILFEKTGSSKSNHLLSSTFAFQSYAPSMYE | 60 |
| Query: | 61 | AALLNDKVKQVIEQLDVLPQVSGVHLNADYNFTDTATKRYRYQAVFDINHY | 111 |
| | | AA LN+++K+V+E+L L ++S V LN+DYNFTDT TK YRYQAVFDINHY | |
| Sbjct: | 61 | AAKLNEQLKEVVERLIELNEISNVSLNSDYNFTDTETKEYRYQAVFDINHY | 111 |

[14404] Based on this analysis, it was predicted that this GAS-specific protein and its epitopes, could be useful antigens for vaccines or diagnostics.

### EXAMPLE 2775

[14405] A DNA sequence (GASx1442R) was identified in S. pyogenes <SEQ ID 8049> which encodes the amino acid sequence <SEQ ID 8050>. Analysis of this protein sequence reveals the following:

```
Possible site: 55
>>> Seems to have no N-terminal signal sequence
----- Final Results -----
                            bacterial cytoplasm --- Certainty = 0.1241(Affirmative) < succ>
                              bacterial membrane --- Certainty = 0.0000(Not Clear) < succ>
                                bacterial outside --- Certainty = 0.0000(Not Clear) < succ>
```

[14406] No corresponding DNA sequence was identified in S. agalactiae.

[14407] The protein has no significant homology with any sequences in the GENPEPT database.

[14408] Based on this analysis, it was predicted that this GAS-specific protein and its epitopes, could be useful antigens for vaccines or diagnostics.

### EXAMPLE 2776

[14409] A DNA sequence (GASx1444R) was identified in S. pyogenes <SEQ ID 8051> which encodes the amino acid sequence <SEQ ID 8052>. Analysis of this protein sequence reveals the following:

```
Possible site: 42
>>> Seems to have no N-terminal signal sequence
----- Final Results -----
                            bacterial cytoplasm --- Certainty = 0.4547(Affirmative) < succ>
                              bacterial membrane --- Certainty = 0.0000(Not Clear) < succ>
                                bacterial outside --- Certainty = 0.0000(Not Clear) < succ>
```

[14410] No corresponding DNA sequence was identified in S. agalactiae.

[14411] The protein has no significant homology with any sequences in the GENPEPT database.

[14412] Based on this analysis, it was predicted that this GAS-specific protein and its epitopes, could be useful antigens for vaccines or diagnostics.

### EXAMPLE 2777

[14413] A DNA sequence (GASx1447R) was identified in S. pyogenes <SEQ ID 8053> which encodes the amino acid sequence <SEQ ID 8054>. Analysis of this protein sequence reveals the following:

```
Possible site: 25
>>> Seems to have a cleavable N-term signal seq.
----- Final Results -----
                                bacterial outside --- Certainty = 0.3000(Affirmative) < succ>
                              bacterial membrane --- Certainty = 0.0000(Not Clear) < succ>
                            bacterial cytoplasm --- Certainty = 0.0000(Not Clear) < succ>
```

[14414] No corresponding DNA sequence was identified in S. agalactiae.

[14415] The protein has no significant homology with any sequences in the GENPEPT database.

[14416] Based on this analysis, it was predicted that this GAS-specific protein and its epitopes, could be useful antigens for vaccines or diagnostics.

### EXAMPLE 2778

[14417] A DNA sequence (GASx1448R) was identified in S. pyogenes <SEQ ID 8055> which encodes the amino acid sequence <SEQ ID 8056>. Analysis of this protein sequence reveals the following:

```
Possible site: 20
>>> Seems to have no N-terminal signal sequence
----- Final Results -----
                            bacterial cytoplasm --- Certainty = 0.3221(Affirmative) < succ>
                              bacterial membrane --- Certainty = 0.0000(Not Clear) < succ>
                                bacterial outside --- Certainty = 0.0000(Not Clear) < succ>
```

[14418] No corresponding DNA sequence was identified in S. agalactiae.

[14419] The protein has no significant homology with any sequences in the GENPEPT database.

[14420] Based on this analysis, it was predicted that this GAS-specific protein and its epitopes, could be useful antigens for vaccines or diagnostics.

### EXAMPLE 2779

[14421] A DNA sequence (GASx1449R) was identified in S. pyogenes <SEQ ID 8057> which encodes the amino acid sequence <SEQ ID 8058>. Analysis of this protein sequence reveals the following:

```
Possible site: 19
>>> Seems to have no N-terminal signal sequence
----- Final Results -----
                            bacterial cytoplasm --- Certainty = 0.6356(Affirmative) < succ>
                              bacterial membrane --- Certainty = 0.0000(Not Clear) < succ>
                                bacterial outside --- Certainty = 0.0000(Not Clear) < succ>
```

[14422] No corresponding DNA sequence was identified in S. agalactiae.

[14423] The protein has no significant homology with any sequences in the GENPEPT database.

[14424] Based on this analysis, it was predicted that this GAS-specific protein and its epitopes, could be useful antigens for vaccines or diagnostics.

### EXAMPLE 2780

[14425] A DNA sequence (GASx1453R) was identified in S. pyogenes <SEQ ID 8059> which encodes the amino acid sequence <SEQ ID 8060>. Analysis of this protein sequence reveals the following:

```
Possible site: 13
>>> Seems to have no N-terminal signal sequence
----- Final Results -----
                            bacterial cytoplasm --- Certainty = 0.2869(Affirmative) < succ>
                              bacterial membrane --- Certainty = 0.0000(Not Clear) < succ>
                                bacterial outside --- Certainty = 0.0000(Not Clear) < succ>
```

[14426] No corresponding DNA sequence was identified in S. agalactiae.

[14427] The protein has no significant homology with any sequences in the GENPEPT database.

[14428] Based on this analysis, it was predicted that this GAS-specific protein and its epitopes, could be useful antigens for vaccines or diagnostics.

### EXAMPLE 2781

[14429] A DNA sequence (GASx1455R) was identified in S. pyogenes <SEQ ID 8061> which encodes the amino acid sequence <SEQ ID 8062>. Analysis of this protein sequence reveals the following:

```
Possible site: 40
>>> Seems to have no N-terminal signal sequence
----- Final Results -----
                            bacterial cytoplasm --- Certainty = 0.1787(Affirmative) < succ>
                              bacterial membrane --- Certainty = 0.0000(Not Clear) < succ>
                                bacterial outside --- Certainty = 0.0000(Not Clear) < succ>
```

[14430] No corresponding DNA sequence was identified in S. agalactiae.

[14431] The protein has homology with the following sequences in the GENPEPT database:

| >GP: AAF43512 GB: AF145054 ORF19 [Streptococcus thermophilus | | | |
|---|---|---|---|
| bacteriophage 7201] | | | |
| Identities = 47/126 (37%), Positives = 86/126 (67%), Gaps = 2/126 (1%) | | | |
| Query: | 8 | LKDLRNLDLYIASLIRRRDKIEASLL--SSPKWSSDKVNGGIKRKQDDVYVELIATAKDI | 65 |
| | | ++ ++ LD YI S I + ++E+ L +S +D V GG ++ +DD+YVELI +++ | |
| Sbjct: | 7 | IQQIKALDRYIESQIEQIKRLESQALKVTSGSMHTDMVQGGKRKGKDDIYVELITAREEV | 66 |
| Query: | 66 | EKKTAEAIRKQRELQNLIDSLENTDSQTILSMVYIDKMTRWQVIDELNCSESTYFRLLRV | 125 |
| | | E+ TAEAI+++ E + I ++E+ D++++L MVYID+++ WQ+ D++ S++TY+ LR | |
| Sbjct: | 67 | ERFTAEAIKQKLEFRRQIANIEDIDARSLLQMVYIDQLSIWQICDKMGISKATYYVKLRQ | 126 |
| Query: | 126 | ATKELN | 131 |
| | | A K L+ | |
| Sbjct: | 127 | AEKYLD | 132 |

[14432] Based on this analysis, it was predicted that this GAS-specific protein and its epitopes, could be useful antigens for vaccines or diagnostics.

### EXAMPLE 2782

[14433] A DNA sequence (GASx1456R) was identified in S. pyogenes <SEQ ID 8063> which encodes the amino acid sequence <SEQ ID 8064>. Analysis of this protein sequence reveals the following:

```
Possible site: 34
>>> Seems to have no N-terminal signal sequence
----- Final Results -----
                            bacterial cytoplasm --- Certainty = 0.2883(Affirmative) < succ>
                              bacterial membrane --- Certainty = 0.0000(Not Clear) < succ>
                                bacterial outside --- Certainty = 0.0000(Not Clear) < succ>
```

[14434] No corresponding DNA sequence was identified in S. agalactiae.

[14435] The protein has homology with the following sequences in the GENPEPT database:

| >GP: AAB18697 GB: U38906 ORF22 [Bacteriophage rlt] | | | |
|---|---|---|---|
| Identities = 78/207 (37%), Positives = 123/207 (58%), Gaps = 2/207 (0%) | | | |
| Query: | 6 | EIHRILGIDEVYKAPKRLTDILFDKDSREDIFRQFLKYETDVSYDWFMQYFEEEQADRKN | 65 |
| | | + + +L +DE R+ +++FDK RE+ + + L D+ D+F YF A | |
| Sbjct: | 7 | QFYDMLNVDEHMNFTNRIQELVFDKKGREEFYSKILNIHHDMGVDFFRDYFMAHSAVSA- | 65 |
| Query: | 66 | KKQDFTPKSVSTLLSKIISGNQYYEVA-VGTGGILIQAWQEQRLNDSPFTYRPSKYWYHV | 124 |
| | | K Q +TP + L + ++ G+ ++ GTG ++IQ WQ+ R+N F Y PS YWY | |
| Sbjct: | 66 | KGQHYTPDELGKLTALLVGGSGGADLTGAGTGTLIIQKWQDDRMNTDFFNYLPSNYWYQA | 125 |
| Query: | 125 | EELSDKAVPFLLFNMSIRGINGVVVHGDSLTRQVKNIYFLQNTKDDMLSFSDINVMPRTQ | 184 |
| | | ELSD+A+ FL+ +IRG+NGVV+HGD+L VK +YF+QN+ ++ + FS+INV+P ++ | |
| Sbjct: | 126 | LELSDEAISFLIHAFAIRGMNGVVIHGDALEMAVKQVYFIQNSANNPIGFSEINVIPHSK | 185 |
| Query: | 185 | DIEREFNVKEWIGDGIEHIENPLIEWI | 211 |
| | | D + EW IEHIE+ +WI | |
| Sbjct: | 186 | DAMEFLGIHEWTEQAIEHIESKFPDWI | 212 |

[14436] Based on this analysis, it was predicted that this GAS-specific protein and its epitopes, could be useful antigens for vaccines or diagnostics.

### EXAMPLE 2783

[14437] A DNA sequence (GASx1459R) was identified in S. pyogenes <SEQ ID 8065> which encodes the amino acid sequence <SEQ ID 8066>. Analysis of this protein sequence reveals the following:

| Possible site: 16 | | | | |
|---|---|---|---|---|
| >>> Seems to have no N-terminal signal sequence | | | | |
| | INTEGRAL | Likelihood = −2.44 | Transmembrane | 82-98 (81-98) |

```
----- Final Results -----
                              bacterial membrane --- Certainty = 0.1977(Affirmative) < succ>
                                bacterial outside --- Certainty = 0.0000(Not Clear) < succ>
                            bacterial cytoplasm --- Certainty = 0.0000(Not Clear) < succ>
```

[14438] No corresponding DNA sequence was identified in S. agalactiae.

[14439] The protein has no significant homology with any sequences in the GENPEPT database.

[14440] Based on this analysis, it was predicted that this GAS-specific protein and its epitopes, could be useful antigens for vaccines or diagnostics.

### EXAMPLE 2784

[14441] A DNA sequence (GASx1460R) was identified in S. pyogenes <SEQ ID 8067> which encodes the amino acid sequence <SEQ ID 8068>. Analysis of this protein sequence reveals the following:

```
Possible site: 55
>>> Seems to have no N-terminal signal sequence
----- Final Results -----
                            bacterial cytoplasm --- Certainty = 0.3368(Affirmative) < succ>
                              bacterial membrane --- Certainty = 0.0000(Not Clear) < succ>
                                bacterial outside --- Certainty = 0.0000(Not Clear) < succ>
```

[14442] No corresponding DNA sequence was identified in S. agalactiae.

[14443] The protein has no significant homology with any sequences in the GENPEPT database.

[14444] Based on this analysis, it was predicted that this GAS-specific protein and its epitopes, could be useful antigens for vaccines or diagnostics.

### EXAMPLE 2785

[14445] A DNA sequence (GASx1461R) was identified in S. pyogenes <SEQ ID 8069> which encodes the amino acid sequence <SEQ ID 8070>. Analysis of this protein sequence reveals the following:

```
Possible site: 61
>>> Seems to have no N-terminal signal sequence
----- Final Results -----
                            bacterial cytoplasm --- Certainty = 0.2834(Affirmative) < succ>
                              bacterial membrane --- Certainty = 0.0000(Not Clear) < succ>
                                bacterial outside --- Certainty = 0.0000(Not Clear) < succ>
```

[14446] No corresponding DNA sequence was identified in S. agalactiae.

[14447] The protein has no significant homology with any sequences in the GENPEPT database.

[14448] Based on this analysis, it was predicted that this GAS-specific protein and its epitopes, could be useful antigens for vaccines or diagnostics.

### EXAMPLE 2786

[14449] A DNA sequence (GASx1462R) was identified in S. pyogenes <SEQ ID 8071> which encodes the amino acid sequence <SEQ ID 8072>. Analysis of this protein sequence reveals the following:

```
Possible site: 27
>>> Seems to have no N-terminal signal sequence
----- Final Results -----
                            bacterial cytoplasm --- Certainty = 0.3531(Affirmative) < succ>
                              bacterial membrane --- Certainty = 0.0000(Not Clear) < succ>
                                bacterial outside --- Certainty = 0.0000(Not Clear) < succ>
```

[14450] No corresponding DNA sequence was identified in S. agalactiae.

[14451] The protein has no significant homology with any sequences in the GENPEPT database.

[14452] Based on this analysis, it was predicted that this GAS-specific protein and its epitopes, could be useful antigens for vaccines or diagnostics.

### EXAMPLE 2787

[14453] A DNA sequence (GASx1463R) was identified in S. pyogenes <SEQ ID 8073> which encodes the amino acid sequence <SEQ ID 8074>. Analysis of this protein sequence reveals the following:

```
Possible site: 58
>>> Seems to have no N-terminal signal sequence
----- Final Results -----
                            bacterial cytoplasm --- Certainty = 0.2483(Affirmative) < succ>
                              bacterial membrane --- Certainty = 0.0000(Not Clear) < succ>
                                bacterial outside --- Certainty = 0.0000(Not Clear) < succ>
```

[14454] No corresponding DNA sequence was identified in S. agalactiae.

[14455] The protein has homology with the following sequences in the GENPEPT database:

| >GP: CAB14569 GB: Z99117 similar to phage-related protein [Bacillus | | | |
|---|---|---|---|
| subtilis] | | | |
| Identities = 98/252 (38%), Positives = 152/252 (59%); Gaps = 29/252 (11%) | | | |
| Query: | 16 | SPAVKNRIEQVVGARAEQFTTSLLSIISNNNLLAKATSESIMGAAMKAAVLNLPIEPSLG | 75 |
| | | SP+V R E+V+G RA QFT S+LS+ ++ +L K S++ +AM AA L+LPI+ +LG | |
| Sbjct: | 33 | SPSVIKRFEEVLGKRATQFTASILSLYNSEQMLQKTDPMSVISSAMVAATLDLPIDKNLG | 92 |
| Query: | 76 | FAYVVPYNRNYKDGNRWITVNEAQFQIGYRGLIQLAQRSGQVRNIEHGIIYEEEFLGYDK | 135 |
| | | +A++VPY +AQFQ+GY+G IQLA R+GQ ++I I+E E ++ | |
| Sbjct: | 93 | YAWIVPYG------------GKAQFQLGYKGYIQLALRTGQYKSINCIPIHEGELQKWNP | 140 |
| Query: | 136 | IRGQLKLTGDYVDSGVVKGYFASLELISGFYKMIFWPKEKVYEHAKKYSKTFDKKTGDFK | 195 |
| | | + ++++ + +S V GY A ELI+GF K ++W K +V +H KK+SK+ DF | |
| Sbjct: | 141 | LTEEIEIDFEKRESDAVIGYAAYFELINGFRKTVYWTKAQVEKHKKKFSKS------DF- | 193 |
| Query: | 196 | PGTPWATEFDPMAIKTLLKELLSKYAPLSVEMQDA-LEADNADSTIVIPKDVTPQETNSL | 254 |
| | | W ++D MA+KT+LK +LSK+ LSVEMQ A +E D I D+T + +S | |
| Sbjct: | 194 | ---GWKNDWDAMALKTVLKAVLSKWGILSVEMQKAVIEEDETRERI----DITNEADSS- | 245 |
| Query: | 255 | DDLIGTQNEKKD | 266 |
| | | ++I ++ KD | |
| Sbjct: | 246 | -EIIDSEPSNKD | 256 |

[14456] Based on this analysis, it was predicted that this GAS-specific protein and its epitopes, could be useful antigens for vaccines or diagnostics.

### EXAMPLE 2788

[14457] A DNA sequence (GASx1464R) was identified in S. pyogenes <SEQ ID 8075> which encodes the amino acid sequence <SEQ ID 8076>. Analysis of this protein sequence reveals the following:

```
Possible site: 30
>>> Seems to have no N-terminal signal sequence
----- Final Results -----
                            bacterial cytoplasm --- Certainty = 0.4258(Affirmative) < succ>
                              bacterial membrane --- Certainty = 0.0000(Not Clear) < succ>
                                bacterial outside --- Certainty = 0.0000(Not Clear) < succ>
```

[14458] No corresponding DNA sequence was identified in S. agalactiae.

[14459] The protein has no significant homology with any sequences in the GENPEPT database.

[14460] Based on this analysis, it was predicted that this GAS-specific protein and its epitopes, could be useful antigens for vaccines or diagnostics.

### EXAMPLE 2789

[14461] A DNA sequence (GASx1465R) was identified in S. pyogenes <SEQ ID 8077> which encodes the amino acid sequence <SEQ ID 8078>. Analysis of this protein sequence reveals the following:

```
Possible site: 51
>>> Seems to have no N-terminal signal sequence
----- Final Results -----
                            bacterial cytoplasm --- Certainty = 0.2045(Affirmative) < succ>
                              bacterial membrane --- Certainty = 0.0000(Not Clear) < succ>
                                bacterial outside --- Certainty = 0.0000(Not Clear) < succ>
```

[14462] No corresponding DNA sequence was identified in S. agalactiae.

[14463] The protein has no significant homology with any sequences in the GENPEPT database.

[14464] Based on this analysis, it was predicted that this GAS-specific protein and its epitopes, could be useful antigens for vaccines or diagnostics.

### EXAMPLE 2790

[14465] A DNA sequence (GASx1469R) was identified in S. pyogenes <SEQ ID 8079> which encodes the amino acid sequence <SEQ ID 8080>. Analysis of this protein sequence reveals the following:

```
Possible site: 19
>>> Seems to have a cleavable N-term signal seq.
----- Final Results -----
                                bacterial outside --- Certainty = 0.3000(Affirmative) < succ>
                              bacterial membrane --- Certainty = 0.0000(Not Clear) < succ>
                            bacterial cytoplasm --- Certainty = 0.0000(Not Clear) < succ>
```

[14466] No corresponding DNA sequence was identified in S. agalactiae.

[14467] The protein has no significant homology with any sequences in the GENPEPT database.

[14468] Based on this analysis, it was predicted that this GAS-specific protein and its epitopes, could be useful antigens for vaccines or diagnostics.

### EXAMPLE 2791

[14469] A DNA sequence (GASx1470R) was identified in S. pyogenes <SEQ ID 8081> which encodes the amino acid sequence <SEQ ID 8082>. Analysis of this protein sequence reveals the following:

Possible site: 37
>>> Seems to have no N-terminal signal sequence
----- Final Results -----
bacterial cytoplasm --- Certainty = 0.3577 (Affirmative) < succ>
bacterial membrane --- Certainty = 0.0000 (Not Clear) < succ>
bacterial outside --- Certainty = 0.0000 (Not Clear) < succ>

[14470] No corresponding DNA sequence was identified in S. agalactiae.

[14471] The protein has homology with the following sequences in the GENPEPT database:

| >GP: AAC98430 GB: L29324 excisionase [Streptococcus pneumoniae] | | | |
|---|---|---|---|
| Identities = 23/56 (41%), Positives = 41/56 (73%) | | | |
| Query: | 23 | KHLIQQWEGLTVATAKQWATEMRDHPDFKQFVLNPTHRIVFIDYKGFKLFVQWKSR | 78 |
| | | K ++++W+GL T +W EMR++ F +V+NPTH++VFI+ +GF+ F++WK + | |
| Sbjct: | 19 | KGILKRWDGLNKYTLNRWIKEMRENRTFSMYVINPTHKLVFINLEGFESFLRWKQK | 74 |

[14472] Based on this analysis, it was predicted that this GAS-specific protein and its epitopes, could be useful antigens for vaccines or diagnostics.

### EXAMPLE 2792

[14473] A DNA sequence (GASx1473) was identified in S. pyogenes <SEQ ID 8083> which encodes the amino acid sequence <SEQ ID 8084>. Analysis of this protein sequence reveals the following:

Possible site: 27
>>> Seems to have no N-terminal signal sequence
----- Final Results -----
bacterial cytoplasm --- Certainty = 0.2725 (Affirmative) < succ>
bacterial membrane --- Certainty = 0.0000 (Not Clear) < succ>
bacterial outside --- Certainty = 0.0000 (Not Clear) < succ>

[14474] No corresponding DNA sequence was identified in S. agalactiae.

[14475] The protein has no significant homology with any sequences in the GENPEPT database.

[14476] Based on this analysis, it was predicted that this GAS-specific protein and its epitopes, could be useful antigens for vaccines or diagnostics.

### EXAMPLE 2793

[14477] A DNA sequence (GASx1476) was identified in S. pyogenes <SEQ ID 8085> which encodes the amino acid sequence <SEQ ID 8086>. Analysis of this protein sequence reveals the following:

Possible site: 23
>>> Seems to have no N-terminal signal sequence
----- Final Results -----
bacterial cytoplasm --- Certainty = 0.1422 (Affirmative) < succ>
bacterial membrane --- Certainty = 0.0000 (Not Clear) < succ>
bacterial outside --- Certainty = 0.0000 (Not Clear) < succ>

[14478] No corresponding DNA sequence was identified in S. agalactiae.

[14479] The protein has no significant homology with any sequences in the GENPEPT database.

[14480] Based on this analysis, it was predicted that this GAS-specific protein and its epitopes, could be useful antigens for vaccines or diagnostics.

### EXAMPLE 2794

[14481] A DNA sequence (GASx1480R) was identified in S. pyogenes <SEQ ID 8087> which encodes the amino acid sequence <SEQ ID 8088>. Analysis of this protein sequence reveals the following:

| Possible site: 25 | | | |
|---|---|---|---|
| >>> Seems to have a cleavable N-term signal seq. | | | |
| INTEGRAL | Likelihood = −4.04 | Transmembrane | 291-307 (290-309) |

----- Final Results -----
bacterial membrane --- Certainty = 0.2614 (Affirmative) < succ>
bacterial outside --- Certainty = 0.0000 (Not Clear) < succ>
bacterial cytoplasm --- Certainty = 0.0000 (Not Clear) < succ>

[14482] No corresponding DNA sequence was identified in S. agalactiae.

[14483] The protein has no significant homology with any sequences in the GENPEPT database.

[14484] Based on this analysis, it was predicted that this GAS-specific protein and its epitopes, could be useful antigens for vaccines or diagnostics.

### EXAMPLE 2795

[14485] A DNA sequence (GASx1489R) was identified in S. pyogenes <SEQ ID 8089> which encodes the amino acid sequence <SEQ ID 8090>. Analysis of this protein sequence reveals the following:

Possible site: 23
>>> Seems to have no N-terminal signal sequence
----- Final Results -----
bacterial cytoplasm --- Certainty = 0.2278 (Affirmative) < succ>
bacterial membrane --- Certainty = 0.0000 (Not Clear) < succ>
bacterial outside --- Certainty = 0.0000 (Not Clear) < succ>

[14486] No corresponding DNA sequence was identified in S. agalactiae.

[14487] The protein has no significant homology with any sequences in the GENPEPT database.

[14488] Based on this analysis, it was predicted that this GAS-specific protein and its epitopes, could be useful antigens for vaccines or diagnostics.

### EXAMPLE 2796

[14489] A DNA sequence (GASx1490R) was identified in S. pyogenes <SEQ ID 8091> which encodes the amino acid sequence <SEQ ID 8092>:

SFITSVLAFRKLLKCEGIDLYLMYGDLMTCFEQLLTQLKDWTDVYFNYDE
SGYGRLRDQKAAQFFKKNGIAVHTYQDHYLHGSQEIINQSGQPYKVFTPY
YRIWQNYPKETPIKVELSQGRWLNLETPDDVLRTVESFKDEKYQDVATFD
EASKQLNRFIQDQLAAYHANRDFPAQLGTSRLSPFLRIGAIGIRTVYHAV
RQAPNSLGQATFLKELAWRDFYNMVYVAYPDQKTQPIQKAFSQIEWVNNP
DWFQLWKEGKTGYPIVDAAMLQLQKTGWMHNRLRMIVASFLTKDLLCDWR
LGEQYFQQQLIDYDAASNIGGWQWAASTGTDAVPYFRIFNPVTQGKRFDP
KGEFIKAYLPQLEHVPEKYLHEPWKMPKNLQESVSCIIGTDYPQPIVDHA
KQREQAIAKYEWAKEKAKIE

[14490] Analysis of this protein sequence reveals the following:

Possible site: 33
>>> Seems to have an uncleavable N-term signal seq
----- Final Results -----
bacterial membrane --- Certainty = 0.0000 (Not Clear) < succ>
bacterial outside --- Certainty = 0.0000 (Not Clear) < succ>
bacterial cytoplasm --- Certainty = 0.0000 (Not Clear) < succ>

[14491] No corresponding DNA sequence was identified in S. agalactiae.

[14492] The protein has homology with the following sequences in the GENPEPT database:

| >GP: AAA22361 GB: M94110 DNA photolyase [Bacillus firmus] | | | |
|---|---|---|---|
| Identities = 175/338 (51%), Positives = 228/338 (66%), Gaps = 6/338 (1%) | | | |
| Query: | 145 | EIINQSGQPYKVFTPYYRIWQNYPKETP--IKVELSQGRWLNLETPDDVLRTVES--FKD | 200 |
| | | +++ + G PYKVFTPYY+ W K TP IK ++ G PD T+ + K | |
| Sbjct: | 2 | QVLKKDGTPYKVFTPYYKAWAKERKRTPAVIKRDVLLGSVHKGTAPDREAETLFNNLIKK | 61 |
| Query: | 201 | EKYQDVATFDE-ASKQLNRFIQDQLAAYHANRDFPAQLGTSRLSPFLRIGAIGIRTVY-H | 258 |
| | | Y A +E A K+L F + +L+ Y ANRDFP+ GTSRLSP+++ GA+ R++Y H | |
| Sbjct: | 62 | CSYDWSAIGEEHAIKRLQMFTKKRLSGYKANRDFPSITGTSRLSPYIKTGAVSSRSIYYH | 121 |
| Query: | 259 | AVRQAPNSLGQATFLKELAWRDFYNMVYVAYPDQKTQPIQKAFSQIEWVNNPDWFQLWKE | 318 |
| | | + +S TFLKELAWRDFY MV+ PD K + I + + ++ W ++ D WK | |
| Sbjct: | 122 | ILNAEADSYSAETFLKELAWRDFYRMVHFYEPDCKDREIMEGYRELNWSHDQDDLTSWKR | 181 |
| Query: | 319 | GKTGYPIVDAAMLQLQKTGWMHNRLRMIVASFLTKDLLCDWRLGEQYFQQQLIDYDAASN | 378 |
| | | G+TG+PIVDA M QL GWMHNRLRMI ASFLTKDLL DWRLGE+YF++ LIDYD +SN | |
| Sbjct: | 182 | GETGFPIVDAGMRQLLNEGWMHNRLRMITASFLTKDLLIDWRLGERYFERMLIDYDPSSN | 241 |
| Query: | 379 | IGGWQWAASTGTDAVPYFRIFNPVTQGKRFDPKGEFIKAYLPQLEHVPEKYLHEPWKMPK | 438 |
| | | IGGWQWAAS GTDAVPYFRIFNPVTQ KRFD G +I+ Y+P+L HVP+ Y+HEPWKM + | |
| Sbjct: | 242 | IGGWQWAASVGTDAVPYFRIFNPVTQSKRFDENGTYIRTYIPELNHVPDHYIHEPWKMSE | 301 |
| Query: | 439 | NLQESVSCIIGTDYPQPIVDHAKQREQAIAKYEWAKEK | 476 |
| | | Q C + DYP PIVDH+KQR++A++ ++ E+ | |
| Sbjct: | 302 | EEQVKYKCRLDEDYPLPIVDHSKQRKKALSFFKGDDEE | 339 |

[14493] Based on this analysis, it was predicted that this GAS-specific protein and its epitopes, could be useful antigens for vaccines or diagnostics.

### EXAMPLE 2797

[14494] A DNA sequence (GASx1493R) was identified in S. pyogenes <SEQ ID 8093> which encodes the amino acid sequence <SEQ ID 8094>. Analysis of this protein sequence reveals the following:

Possible site: 39
>>> Seems to have no N-terminal signal sequence
----- Final Results -----
bacterial cytoplasm --- Certainty = 0.2748 (Affirmative) < succ>
bacterial membrane --- Certainty = 0.0000 (Not Clear) < succ>
bacterial outside --- Certainty = 0.0000 (Not Clear) < succ>

[14495] No corresponding DNA sequence was identified in S. agalactiae.

[14496] The protein has no significant homology with any sequences in the GENPEPT database.

[14497] Based on this analysis, it was predicted that this GAS-specific protein and its epitopes, could be useful antigens for vaccines or diagnostics.

### EXAMPLE 2798

[14498] A DNA sequence (GASx1501R) was identified in S. pyogenes <SEQ ID 8095> which encodes the amino acid sequence <SEQ ID 8096>. Analysis of this protein sequence reveals the following:

| Possible site: 31 | | | |
|---|---|---|---|
| >>> Seems to have a cleavable N-term signal seq. | | | |
| INTEGRAL | Likelihood = −7.27 | Transmembrane | 64-80 (53-83) |

----- Final Results -----
bacterial membrane --- Certainty = 0.3909 (Affirmative) < succ>
bacterial outside --- Certainty = 0.0000 (Not Clear) < succ>
bacterial cytoplasm --- Certainty = 0.0000 (Not Clear) < succ>

[14499] No corresponding DNA sequence was identified in S. agalactiae.

[14500] The protein has homology with the following sequences in the GENPEPT database:

| >GP: AAC95443 GB: AF068901 YlmG [Streptococcus pneumoniae] | | | |
|---|---|---|---|
| Identities = 35/81 (43%), Positives = 58/81 (71%) | | | |
| Query: | 1 | MILILSILLRLIKVYTYLLIAYALMSWFPGAYDSKIGRLISGIVEPILKPFRAFNLQFAG | 60 |
| | | MI ++ ++ + +Y+ +L+A+A+MSWFPGAY+S +GR I +V+P+L P + LQ AG | |
| Sbjct: | 1 | MIFLIRMIYNAVDIYSLILVAFAVMSWFPGAYESSLGRWIVALVKPVLAPLQRLPLQIAG | 60 |
| Query: | 61 | LDFTIFVVIISLNFLAQVLVR | 81 |
| | | LD +++V I+ + FL + LVR | |
| Sbjct: | 61 | LDLSVWVAIVLVRFLGENLVR | 81 |

[14501] Based on this analysis, it was predicted that this GAS-specific protein and its epitopes, could be useful antigens for vaccines or diagnostics.

### EXAMPLE 2799

[14502] A DNA sequence (GASx1502) was identified in S. pyogenes <SEQ ID 8097> which encodes the amino acid sequence <SEQ ID 8098>. Analysis of this protein sequence reveals the following:

| Possible site: 25 | | | |
|---|---|---|---|
| >>> Seems to have no N-terminal signal sequence | | | |
| INTEGRAL | Likelihood = −2.39 | Transmembrane | 17-33 (17-33) |

----- Final Results -----
bacterial membrane --- Certainty = 0.1956 (Affirmative) < succ>
bacterial outside --- Certainty = 0.0000 (Not Clear) < succ>
bacterial cytoplasm --- Certainty = 0.0000 (Not Clear) < succ>

[14503] No corresponding DNA sequence was identified in S. agalactiae.

[14504] The protein has no significant homology with any sequences in the GENPEPT database.

[14505] Based on this analysis, it was predicted that this GAS-specific protein and its epitopes, could be useful antigens for vaccines or diagnostics.

### EXAMPLE 2800

[14506] A DNA sequence (GASx1507) was identified in S. pyogenes <SEQ ID 8099> which encodes the amino acid sequence <SEQ ID 8100>. Analysis of this protein sequence reveals the following:

Possible site: 23
>>> Seems to have no N-terminal signal sequence
----- Final Results -----
bacterial cytoplasm --- Certainty = 0.0865 (Affirmative) < succ>
bacterial membrane --- Certainty = 0.0000 (Not Clear) < succ>
bacterial outside --- Certainty = 0.0000 (Not Clear) < succ>

[14507] No corresponding DNA sequence was identified in S. agalactiae.

[14508] The protein has no significant homology with any sequences in the GENPEPT database.

[14509] Based on this analysis, it was predicted that this GAS-specific protein and its epitopes, could be useful antigens for vaccines or diagnostics.

### EXAMPLE 2801

[14510] A DNA sequence (GASx1511R) was identified in S. pyogenes <SEQ ID 8101> which encodes the amino acid sequence <SEQ ID 8102>. Analysis of this protein sequence reveals the following:

| Possible site: 47 | | | |
|---|---|---|---|
| >>> Seems to have an uncleavable N-term signal seq | | | |
| INTEGRAL | Likelihood = −11.83 | Transmembrane | 31-47 (22-53) |
| INTEGRAL | Likelihood = −0.96 | Transmembrane | 2-18 (1-18) |

----- Final Results -----
bacterial membrane --- Certainty = 0.5734 (Affirmative) < succ>
bacterial outside --- Certainty = 0.0000 (Not Clear) < succ>
bacterial cytoplasm --- Certainty = 0.0000 (Not Clear) < succ>

[14511] No corresponding DNA sequence was identified in S. agalactiae.

[14512] The protein has no significant homology with any sequences in the GENPEPT database.

[14513] Based on this analysis, it was predicted that this GAS-specific protein and its epitopes, could be useful antigens for vaccines or diagnostics.

### EXAMPLE 2802

[14514] A DNA sequence (GASx1516R) was identified in S. pyogenes <SEQ ID 8103> which encodes the amino acid sequence <SEQ ID 8104>. Analysis of this protein sequence reveals the following:

Possible site: 42
>>> Seems to have no N-terminal signal sequence
----- Final Results -----
bacterial cytoplasm --- Certainty = 0.2729 (Affirmative) < succ>
bacterial membrane --- Certainty = 0.0000 (Not Clear) < succ>
bacterial outside --- Certainty = 0.0000 (Not Clear) < succ>

[14515] No corresponding DNA sequence was identified in S. agalactiae.

[14516] The protein has homology with the following sequences in the GENPEPT database:

| >GP: BAA96472 GB: AB036428 Dpr [Streptococcus mutans] | | | |
|---|---|---|---|
| Identities = 132/175 (75%), Positives = 153/175 (87%) | | | |
| Query: | 1 | MTNTLVENIYASVTHNISKKEASKNEKTKAVLNQAVADLSVAASIVHQVHWYMRGPGFLY | 60 |
| | | MTNT+ ENIYAS+ H + KKE S NEKTKAVLNQAVADLS AASIVHQVHWYMRG GFLY | |
| Sbjct: | 1 | MTNTITENIYASIIHQVEKKENSGNEKTKAVLNQAVADLSKAASIVHQVHWYMRGSGFLY | 60 |
| Query: | 61 | LHPKMDELLDSLNANLDEMSERLITIGGAPYSTLAEFSKHSKLDEAKGTYDKTVAQHLAR | 120 |
| | | LHPKMDEL+D+LN +LDE+SERLITIGGAP+STL EF ++S+L+E GT+DK++ HL R | |
| Sbjct: | 61 | LHPKMDELMDALNGHLDEISERLITIGGAPFSTLKEFDENSRLEETVGTWDKSITDHLKR | 120 |
| Query: | 121 | LVEVYLYLSSLYQVGLDITDEEGDAGTNDLFTAAKTEAEKTIWMLQAERGQGPAL | 175 |
| | | LV+VY YLSSLYQVGLD+TDEE DA +ND+FTAA+TEA+KTIWMLQAE GQ P L | |
| Sbjct: | 121 | LVQVYDYLSSLYQVGLDVTDEEDDAVSNDIFTAAQTEAQKTIWMLQAELGQAPGL | 175 |

[14517] Based on this analysis, it was predicted that this GAS-specific protein and its epitopes, could be useful antigens for vaccines or diagnostics.

### EXAMPLE 2803

[14518] A DNA sequence (GASx1517) was identified in S. pyogenes <SEQ ID 8105> which encodes the amino acid sequence <SEQ ID 8106>. Analysis of this protein sequence reveals the following:

| Possible site: 46 | | | |
|---|---|---|---|
| >>> Seems to have an uncleavable N-term signal seq | | | |
| INTEGRAL | Likelihood = −6.32 | Transmembrane | 109-125 (106-126) |
| INTEGRAL | Likelihood = −5.26 | Transmembrane | 63-79 (61-81) |
| INTEGRAL | Likelihood = −5.20 | Transmembrane | 154-170 (151-176) |
| INTEGRAL | Likelihood = −4.14 | Transmembrane | 189-205 (189-205) |
| INTEGRAL | Likelihood = −3.50 | Transmembrane | 130-146 (127-147) |
| INTEGRAL | Likelihood = −2.92 | Transmembrane | 6-22 (1-24) |
| INTEGRAL | Likelihood = −2.23 | Transmembrane | 83-99 (83-101) |

----- Final Results -----
bacterial membrane --- Certainty = 0.3527 (Affirmative) < succ>
bacterial outside --- Certainty = 0.0000 (Not Clear) < succ>
bacterial cytoplasm --- Certainty = 0.0000 (Not Clear) < succ>

[14519] No corresponding DNA sequence was identified in S. agalactiae.

[14520] The protein has homology with the following sequences in the GENPEPT database:

| >GP: BAA96471 GB: AB036428 type IV prepilin peptidase homologue | | | |
|---|---|---|---|
| [Streptococcus mutans] | | | |
| Identities = 55/127 (43%), Positives = 78/127 (61%), Gaps = 3/127 (2%) | | | |
| Query: | 83 | VSASYCYLLLFSLLFSLFDWRSQEYPFILWLFSFVSLLLFYSINYLSLILLLLGLLAHLR | 142 |
| | | ++ S LL +L SL+D + Q YP LW+ L+ Y +N +SLIL L G+ A L+ | |
| Sbjct: | 91 | LTTSQVCLLFMGVLLSLYDLQDQSYPLTLWIGFTFLLMFIYPLNLISLILFLFGIFAALK | 150 |
| Query: | 143 | PFSIGAGDFFYLASLALVLDLTSLIWLIQLASLAGITACLLLGIKRIP--FIPYLSFGLF | 200 |
| | | +IG+GDFFYLA+LAL L+L +IW+IQ+ASL GI LL + P F+P+L G | |
| Sbjct: | 151 | NINIGSGDFFYLATLALSLNLQQIIWIIQIASLLGILYSLLFQKHKEPFAFVPFLFLG-H | 209 |
| Query: | 201 | WIVLLEH | 207 |
| | | I++ H | |
| Sbjct: | 210 | LIIIFSH | 216 |

[14521] Based on this analysis, it was predicted that this GAS-specific protein and its epitopes, could be useful antigens for vaccines or diagnostics.

### EXAMPLE 2804

[14522] A DNA sequence (GASx1538R) was identified in S. pyogenes <SEQ ID 8107> which encodes the amino acid sequence <SEQ ID 8108>. Analysis of this protein sequence reveals the following:

Possible site: 15
>>> Seems to have no N-terminal signal sequence
----- Final Results -----
bacterial cytoplasm --- Certainty = 0.1186 (Affirmative) < succ>
bacterial membrane --- Certainty = 0.0000 (Not Clear) < succ>
bacterial outside --- Certainty = 0.0000 (Not Clear) < succ>

[14523] No corresponding DNA sequence was identified in S. agalactiae.

[14524] The protein has no significant homology with any sequences in the GENPEPT database.

[14525] Based on this analysis, it was predicted that this GAS-specific protein and its epitopes, could be useful antigens for vaccines or diagnostics.

### EXAMPLE 2805

[14526] A DNA sequence (GASx1539R) was identified in S. pyogenes <SEQ ID 8109> which encodes the amino acid sequence <SEQ ID 8110>. Analysis of this protein sequence reveals the following:

| Possible site: 34 | | | |
|---|---|---|---|
| >>> Seems to have an uncleavable N-term signal seq | | | |
| INTEGRAL | Likelihood = −11.73 | Transmembrane | 6-22 (3-32) |

----- Final Results -----
bacterial membrane --- Certainty = 0.5692 (Affirmative) < succ>
bacterial outside --- Certainty = 0.0000 (Not Clear) < succ>
bacterial cytoplasm --- Certainty = 0.0000 (Not Clear) < succ>

[14527] No corresponding DNA sequence was identified in S. agalactiae.

[14528] The protein has homology with the following sequences in the GENPEPT database:

| >GP: AAF31453 GB: AF221126 putative histidine kinase | | | |
|---|---|---|---|
| [Streptococcus pneumoniae] | | | |
| Identities = 141/301 (46%), Positives = 210/301 (68%), Gaps = 7/301 (2%) | | | |
| Query: | 1 | MKRYPLLVQLISYVFVIVIALITTLGLLYYQTSSRNIRQLIERDTRQSIRQSSQFIDAYI | 60 |
| | | MKR LLV+++ +F++ + L+ +G YYQ+SS I IE +++ +I Q+S FI +YI | |
| Sbjct: | 1 | MKRSSLLVRMVISIFLVFLILLALVGTFYYQSSSSAIEATIEGNSQTTISQTSHFIQSYI | 60 |
| Query: | 61 | KPLKETTSVLAKNTEIQAFASQIHQENDKQVLQLMKMVLATNSDLQAAVLVTKDGRTVST | 120 |
| | | K L+ T++ L + T++ A+A Q+ + + L +L ++ DL+ VLVTK G+ +ST | |
| Sbjct: | 61 | KKLETTSTGLTQQTDVLAYAENPSQDKVEGIRDLFLTILKSDKDLKTVVLVTKSGQVIST | 120 |
| Query: | 121 | NSQLTMKTSSDMMAEPWYKAAIDRQAMPILTPARQLSLSSKKEWVVSVTQEVVDRAGHNL | 180 |
| | | + + MKTSSDMMAE WY+ AI + AMP+LTPAR+ S +WV+SVTQE+VD G NL | |
| Sbjct: | 121 | DDSVQMKTSSDMMAEDWYQKAIHQGAMPVLTPARK----SDSQWVISVTQELVDAKGANL | 176 |
| Query: | 181 | GVLRLDIAYPTIKASLDQLQLGRQGFAFIVNDKHEFVYHPKKSVYSSSKEMAAMKPYLAI | 240 |
| | | GVLRLDI+Y T++A L+QLQLG+QGFAFI+N+ HEFVYHP+ +VYSSS +M AMKPY+ | |
| Sbjct: | 177 | GVLRLDISYETLEAYLNQLQLGQQGFAFIINENHEFVYHPQHTVYSSSSKMEAMKPYIDT | 236 |
| Query: | 241 | QNGYTKDKTSFVYQKLIPNSQWTLVGVASLDQLHRVQRQIFWSFSWNRASTLSDLWLCNCL | 301 |
| | | GYT S+V Q+ I + WT++GV+SL++L +V+ Q+ W+ ++++ L +C CL | |
| Sbjct: | 237 | GQGYTPGHKSYVSQEKIAGTDWTVLGVSSLEKLDQVRSQLLWTL---LGASVTSLLVCLCL | 294 |

[14529] Based on this analysis, it was predicted that this GAS-specific protein and its epitopes, could be useful antigens for vaccines or diagnostics.

### EXAMPLE 2806

[14530] A DNA sequence (GASx1542R) was identified in S. pyogenes <SEQ ID 8111> which encodes the amino acid sequence <SEQ ID 8112>. Analysis of this protein sequence reveals the following:

Possible site: 39
>>> May be a lipoprotein
----- Final Results -----
bacterial membrane --- Certainty = 0.0000 (Not Clear) < succ>
bacterial outside --- Certainty = 0.0000 (Not Clear) < succ>
bacterial cytoplasm --- Certainty = 0.0000 (Not Clear) < succ>

[14531] No corresponding DNA sequence was identified in S. agalactiae.

[14532] The protein has homology with the following sequences in the GENPEPT database:

| >GP: AAC23101 GB: U32823 conserved hypothetical protein | | | |
|---|---|---|---|
| [Haemophilus influenzae Rd] | | | |
| Identities = 56/128 (43%), Positives = 87/128 (67%) | | | |
| Query: | 73 | DFELKGIDGKTYRLSEFKGKKVYLKFWASWCSICLSTLADTEDLAKMSDKDYVVLTVVSP | 132 |
| | | D +LK ++ + LS++KGK VY+K WASWC ICL+ LA+ +DL+ D+++ V+T+VSP | |
| Sbjct: | 24 | DVQLKDLNNQPVTLSQYKGKPVYVKMWASWCPICLAGLAEIDDLSAEKDRNFEVITIVSP | 83 |
| Query: | 133 | GHQGEKSEADFKKWFQGTDYKDLPVLLDPDGKLLEAYGVRSYPTEVFIGSDGVLAKKHIG | 192 |
| | | H+GEK ADF +W++G +YK++ VLLD G++++ VR YP +F+ SD L K G | |
| Sbjct: | 84 | DHKGEKDTADFIEWYKGLEYKNITVLLDEKGEIIDKARVRGYPFNLFLDSDLNLKKTVPG | 143 |
| Query: | 193 | YAKKSDIK | 200 |
| | | + I+ | |
| Sbjct: | 144 | HLGAEQIR | 151 |

[14533] Based on this analysis, it was predicted that this GAS-specific protein and its epitopes, could be useful antigens for vaccines or diagnostics.

### EXAMPLE 2807

[14534] A DNA sequence (GASx1543R) was identified in S. pyogenes <SEQ ID 8113> which encodes the amino acid sequence <SEQ ID 8114>. Analysis of this protein sequence reveals the following:

| Possible site: 13 | | | |
|---|---|---|---|
| >>> Seems to have a cleavable N-term signal seq. | | | |
| INTEGRAL | Likelihood = −7.75 | Transmembrane | 171-187 (169-191) |
| INTEGRAL | Likelihood = −6.26 | Transmembrane | 205-221 (203-232) |
| INTEGRAL | Likelihood = −5.73 | Transmembrane | 56-72 (54-81) |
| INTEGRAL | Likelihood = −5.36 | Transmembrane | 92-108 (91-113) |
| INTEGRAL | Likelihood = −3.45 | Transmembrane | 20-36 (14-39) |
| INTEGRAL | Likelihood = −1.17 | Transmembrane | 147-163 (144-163) |

----- Final Results -----
bacterial membrane --- Certainty = 0.4100 (Affirmative) < succ>
bacterial outside --- Certainty = 0.0000 (Not Clear) < succ>
bacterial cytoplasm --- Certainty = 0.0000 (Not Clear) < succ>

[14535] No corresponding DNA sequence was identified in S. agalactiae.

[14536] The protein has homology with the following sequences in the GENPEPT database:

| >GP: AAC23102 GB: U32823 cytochrome C-type biogenesis protein | | | |
|---|---|---|---|
| [Haemophilus influenzae Rd] | | | |
| Identities = 106/224 (47%), Positives = 138/224 (61%), Gaps = 16/224 (7%) | | | |
| Query: | 6 | VLMVSVFGAGLLSFFSPCIFPVLPVYLGILLDADDSKTITIFGKKLYWYGIVKTLAFIFG | 65 |
| | | +L+ +VF AGL SF SPCIFP++P+Y GIL GKK ++ T FI G | |
| Sbjct: | 6 | LLIGTVFLAGLASFLSPCIFPIIPIYFGILSKG---------GKK-----VLNTFLFILG | 51 |
| Query: | 66 | LSTIFVILGYGAGFLGNILYAVWFRYLLGALVIILGIHQMGLITIKSLQFQKSLTFHNNK | 125 |
| | | LS FV LG+ GFLGNIL++ R + G +VIILGIHQ+G+ I L+ K + + | |
| Sbjct: | 52 | LSLTFVSLGFSFGFLGNILFSNTTRIIAGVIVIILGIHQLGIFKIGLLERTKLVEIKTSG | 111 |
| Query: | 126 | NRNGLFNAFILGLTFSFGWTPCVGPVLSSVLALVASGGNGAWQGGVLMIIYTLGLGIPFL | 185 |
| | | L AF+LGLTFS GWTPC+GP+L+SVLAL G+ A G +M +Y LGL PF+ | |
| Sbjct: | 112 | KSTAL-EAFVLGLTFSLGWTPCIGPILASVLALSGDEGS-ALYGASMMFVYVLGLATPFV | 169 |
| Query: | 186 | LISFASGIVLKQFNKLKPHILLLKKVGGVLIIVMGILLMTGTLN | 229 |
| | | L SF S +LK+ L H+ K GG+LIIVMGILL+T + | |
| Sbjct: | 170 | LFSFFSDSLLKRAKGLNKHLDKFKIGGGILIIVMGILLITNNFS | 213 |

[14537] Based on this analysis, it was predicted that this GAS-specific protein and its epitopes, could be useful antigens for vaccines or diagnostics.

### EXAMPLE 2808

[14538] A DNA sequence (GASx1544) was identified in S. pyogenes <SEQ ID 8115> which encodes the amino acid sequence <SEQ ID 8116>. Analysis of this protein sequence reveals the following:

Possible site: 25
>>> Seems to have no N-terminal signal sequence
----- Final Results -----
bacterial cytoplasm --- Certainty = 0.1493 (Affirmative) < succ>
bacterial membrane --- Certainty = 0.0000 (Not Clear) < succ>
bacterial outside --- Certainty = 0.0000 (Not Clear) < succ>

[14539] No corresponding DNA sequence was identified in S. agalactiae.

[14540] The protein has no significant homology with any sequences in the GENPEPT database.

[14541] Based on this analysis, it was predicted that this GAS-specific protein and its epitopes, could be useful antigens for vaccines or diagnostics.

### EXAMPLE 2809

[14542] A DNA sequence (GASx1546R) was identified in S. pyogenes <SEQ ID 8117> which encodes the amino acid sequence <SEQ ID 8118>. Analysis of this protein sequence reveals the following:

Possible site: 46
>>> Seems to have no N-terminal signal sequence
----- Final Results -----
bacterial cytoplasm --- Certainty = 0.4658 (Affirmative) < succ>
bacterial membrane --- Certainty = 0.0000 (Not Clear) < succ>
bacterial outside --- Certainty = 0.0000 (Not Clear) < succ>

[14543] No corresponding DNA sequence was identified in S. agalactiae.

[14544] The protein has homology with the following sequences in the GENPEPT database:

| >GP: BAB04061 GB: AP001508 unknown conserved protein in others | | | |
|---|---|---|---|
| [Bacillus halodurans] | | | |
| Identities = 48/89 (53%), Positives = 61/89 (67%) | | | |
| Query: | 1 | MMVLVTYDVNTETPAGRKRLRHVAKLCVDYGQRVQNSVFECSVTPAEFVDIKHRLTQIID | 60 |
| | | M+VL+TYDV T + G KRLR VAK C +YGQRVQNSVFEC V + +K LT +ID | |
| Sbjct: | 1 | MLVLITYDVQTSSMGGTKRLRKVAKACQNYGQRVQNSVFECIVDSTQLTSLKLELTSLID | 60 |
| Query: | 61 | EKTDSIRFYLLGKNWQRRVETLGKSDSYD | 89 |
| | | E+ DS+R Y LG N++ +VE +G S D | |
| Sbjct: | 61 | EEKDSLRIYRLGNNYKTKVEHIGARPSID | 89 |

[14545] Based on this analysis, it was predicted that this GAS-specific protein and its epitopes, could be useful antigens for vaccines or diagnostics.

### EXAMPLE 2810

[14546] A DNA sequence (GASx1547R) was identified in S. pyogenes <SEQ ID 8119> which encodes the amino acid sequence <SEQ ID 8120>. Analysis of this protein sequence reveals the following:

| Possible site: 57 | | | |
|---|---|---|---|
| >>> Seems to have no N-terminal signal sequence | | | |
| INTEGRAL | Likelihood = −1.70 | Transmembrane | 44-60 (43-60) |

----- Final Results -----
bacterial membrane --- Certainty = 0.1680 (Affirmative) < succ>
bacterial outside --- Certainty = 0.0000 (Not Clear) < succ>
bacterial cytoplasm --- Certainty = 0.0000 (Not Clear) < succ>
RGD motif: 330-332

[14547] No corresponding DNA sequence was identified in S. agalactiae.

[14548] The protein has homology with the following sequences in the GENPEPT database:

| >GP: BAB04060 GB: AP001508 unknown conserved protein in others | | | |
|---|---|---|---|
| [Bacillus halodurans] | | | |
| Identities = 162/341 (47%), Positives = 231/341 (67%), Gaps = 1/341 (0%) | | | |
| Query: | 1 | MKKLLNTLYLTQEDFYVTKEGDNIVIKQEGKVLKRFPFRIIDGIVCFSYLGVSSALVKLC | 60 |
| | | MKKLLNTLY+TQ D Y++ +GDN+V+ +E + L R P ++ IV F Y G S AL+ C | |
| Sbjct: | 1 | MKKLLNTLYVTQPDTYLSLDGDNVVLLKEQEKLGRLPLHNLEAIVGFGYT>FEATURESALMGYC | 60 |
| Query: | 61 | TENQINLSFHTPQGRFCGRYIGSTNGNVLLRREHYRLSDRE-ESLEYAKRFILAKISNSR | 119 |
| | | E I+++F T GRF R +G + GNV+LR+ YR+S+ + ES + A+ FI K+ NS+ | |
| Sbjct: | 61 | AERNISITFLTKNGRFLARVVGESRGNVVLRKTQYRISENDQESTKIARNFITGKVYNSK | 120 |
| Query: | 120 | KYLLRFKRDHRQQIDTKLFEAVNDELIWALEMVQAADNKDSLRGIEGQAANQYFRIFNDL | 179 |
| | | L R R+H +++ + F+A + L ++ ++ D+ +SLRG EGQAA Y ++F+ + | |
| Sbjct: | 121 | WMLERMTREHPLRVNVEQFKATSQLLSVMNQEIRNCDSLESLRGWEGQAAINYNKVFDQM | 180 |
| Query: | 180 | VLTDKKTFYFQGRSKRPPLDCVNALLSFGYSLLTFECQSALEAVGLDSYVGFFHTDRPGR | 239 |
| | | +L K+ F F GRS+RPP D VNA+LSF Y+LL + +ALE VGLD+YVGF H DRPGR | |
| Sbjct: | 181 | ILQQKEEFAFHGRSRRPPKDNVNAMLSFAYTLLANDVAAALETVGLDAYVGFMHQDRPGR | 240 |
| Query: | 240 | ASLALDLVEEFRSYIVDRFVFSLINKGQLQKKHFEVKENGSILLTENGRAIFIDLWQKRK | 299 |
| | | ASLALDL+EE R DRFV SLIN+ ++ F KENG++L+T+ R F+ WQ +K | |
| Sbjct: | 241 | ASLALDLMEELRGLYADRFVLSLINRKEMTADGFYKKENGAVLMTDEARKTFLKAWQTKK | 300 |
| Query: | 300 | HTEVEHPFTKEKVKLMLLPYVQAQLLAKAIRGDLESYPPFM | 340 |
| | | ++ HP+ EK+ L+PYVQA LLA+ +RGDL+ YPPF+ | |
| Sbjct: | 301 | QEKITHPYLGEKMSWGLVPYVQALLLARFLRGDLDEYPPFL | 341 |

[14549] Based on this analysis, it was predicted that this GAS-specific protein and its epitopes, could be useful antigens for vaccines or diagnostics.

### EXAMPLE 2811

[14550] A DNA sequence (GASx1548R) was identified in S. pyogenes <SEQ ID 8121> which encodes the amino acid sequence <SEQ ID 8122>. Analysis of this protein sequence reveals the following:

Possible site: 49
>>> Seems to have no N-terminal signal sequence
----- Final Results -----
bacterial cytoplasm --- Certainty = 0.2247 (Affirmative) < succ>
bacterial membrane --- Certainty = 0.0000 (Not Clear) < succ>
bacterial outside --- Certainty = 0.0000 (Not Clear) < succ>

[14551] No corresponding DNA sequence was identified in S. agalactiae.

[14552] The protein has homology with the following sequences in the GENPEPT database:

| >GP: BAB04059 GB: AP001508 unknown [Bacillus halodurans] | | | |
|---|---|---|---|
| Identities = 90/169 (53%), Positives = 111/169 (65%), Gaps = 1/169 (0%) | | | |
| Query: | 45 | LHTKADNPYIKEKRKELLVSRAMPISSAELGLSGIMDVVEFYKDDQGVSLRGKRGKWLPK | 104 |
| | | +H KAD P++KEKR L RAMPI S L +SGI DVVEF +D +G+ L G G + | |
| Sbjct: | 1 | MHKKADQPFMKEKRGSKLTVRAMPIQSKNLQISGICDVVEFVQDSEGIELSGVSGSYKAF | 60 |
| Query: | 105 | VVEYKRGKPKKDTRDIVQLVAQTMCLEETLDCDINEGCLYYHSVNQRVIVPMTSALRQEV | 164 |
| | | VEYKRGKPKK DIVQLVAQ MCLEE L C I++G L+Y+ + RV VP+T ALR +V | |
| Sbjct: | 61 | PVEYKRGKPKKGDEDIVQLVAQAMCLEEMLVCRIDKGYLFYNEIKHRVEVPITDALRDKV | 120 |
| Query: | 165 | KELAAEMHEVYQSQMLPKAAYFKNCQLCSLVDICKPRLSKKTRSVSRYI | 213 |
| | | ++A EMH Y+++ PK C CSL IC P+L K RSV RYI | |
| Sbjct: | 121 | VQMAKEMHHYYENRHTPKVKTGPFCNNCSLQSICLPKLMNK-RSVKRYI | 168 |

[14553] Based on this analysis, it was predicted that this GAS-specific protein and its epitopes, could be useful antigens for vaccines or diagnostics.

### EXAMPLE 2812

[14554] A DNA sequence (GASx1549R) was identified in S. pyogenes <SEQ ID 8123> which encodes the amino acid sequence <SEQ ID 8124>. Analysis of this protein sequence reveals the following:

Possible site: 26
>>> Seems to have no N-terminal signal sequence
----- Final Results -----
bacterial cytoplasm --- Certainty = 0.1399 (Affirmative) < succ>
bacterial membrane --- Certainty = 0.0000 (Not Clear) < succ>
bacterial outside --- Certainty = 0.0000 (Not Clear) < succ>

[14555] No corresponding DNA sequence was identified in S. agalactiae.

[14556] The protein has homology with the following sequences in the GENPEPT database:

| >GP: BAB04058 GB: AP001508 unknown conserved protein in others | | | |
|---|---|---|---|
| [Bacillus halodurans] | | | |
| Identities = 148/290 (51%), Positives = 190/290 (65%), Gaps = 19/290 (6%) | | | |
| Query: | 6 | MLEHKIDFMVTLEVKEANANGDPLNGNMPRTDAKGYGVMSDVSIKRKIRNRLQDMGKSIF | 65 |
| | | +L+HKIDF V L V +AN NGDPLNGN PR + G+G +SDV+IKRKIRNRL DM + IF | |
| Sbjct: | 3 | ILDHKIDFAVILSVTKANPNGDPLNGNRPRQNYDGHGEISDVAIKRKIRNRLLDMEEPIF | 62 |
| Query: | 66 | VQANERIEDDFRSLEKRFSQH----FTAKTPDKEIEEKANAL---WFDVRAFGQVFTYLK | 118 |
| | | VQ+++R D F+SL R + K + ++E A W DVR+FGQVF + | |
| Sbjct: | 63 | VQSDDRKADSFKSLRDRADSNPELAKMLKAKNASVDEFAKIACQEWMDVRSFGQVFAFKG | 122 |
| Query: | 119 | K--SIGVRGPVSISMAKSLEPIVISSLQITRSTNGMEAKNNSGRSSDTMGTKHFVDYGVY | 176 |
| | | S+GVRGPVSI A S++PI I S QIT+S N + RSSDTMG KH VD+GVY | |
| Sbjct: | 123 | SNLSVGVRGPVSIHTATSIDPIDIVSTQITKSVNSVTGDK---RSSDTMGMKHRVDFGVY | 179 |
| Query: | 177 | VLKGSINAYFAEKTGFSQEDAEAIKEVLVSLFENDASSARPEGSMRVCEVFWFTHSSKLG | 236 |
| | | V KGSIN AEKTGF+ EDAE IK L++LFEND+SSARP+GSM V +V+W+ HSSKLG | |
| Sbjct: | 180 | VFKGSINTQLAEKTGFTNEDAEKIKRALITLFENDSSSARPDGSMEVHKVYWWEHSSKLG | 239 |
| Query: | 237 | NVSSARVFDLLEYHQSIEEKSTYDAYQIHLNQEKLAKYEAKGLTLEILEG | 286 |
| | | SSA+V L+ + ++D Y + L YE GL +E+++G | |
| Sbjct: | 240 | QYSSAKVHRSLKIESKTDTPKSFDDYAVEL-------YELDGLGVEVIDG | 282 |

[14557] Based on this analysis, it was predicted that this GAS-specific protein and its epitopes, could be useful antigens for vaccines or diagnostics.

### EXAMPLE 2813

[14558] A DNA sequence (GASx1550R) was identified in S. pyogenes <SEQ ID 8125> which encodes the amino acid sequence <SEQ ID 8126>. Analysis of this protein sequence reveals the following:

Possible site: 43
>>> Seems to have no N-terminal signal sequence
----- Final Results -----
bacterial cytoplasm --- Certainty = 0.2882 (Affirmative) < succ>
bacterial membrane --- Certainty = 0.0000 (Not Clear) < succ>
bacterial outside --- Certainty = 0.0000 (Not Clear) < succ>

[14559] No corresponding DNA sequence was identified in S. agalactiae.

[14560] The protein has homology with the following sequences in the GENPEPT database:

| >GP: BAB04057 GB: AP001508 unknown [Bacillus halodurans] | | | |
|---|---|---|---|
| Identities = 176/671 (26%), Positives = 311/671 (46%), | | | |
| Gaps = 87/671 (12%) | | | |
| Query: | 1 | MDFFTSLLKTYEKAELADLVDHQKR--NNEPVLLPIYHTSLKSNGKNIISVKLDKDGQFH | 58 |
| | | M + L +TYE A L + K+ + E LLPI HT+ ++ I V LD+DG F | |
| Sbjct: | 1 | MSWLLHLYETYE-ANLDQVGKTVKKGEDREYTLLPISHTTQNAH----IEVTLDEDGDFL | 55 |
| Query: | 59 | KAEFMADKQMIIFPVTADSVARSGSHPAPHPLVDKFAYYSAEM----GQIQ------YDS | 108 |
| | | +A+ + K+ + P T ++ +RSGS AP+PL DK +Y + + G+I+ +D+ | |
| Sbjct: | 56 | RAKALT-KESTLIPCTEEAASRSGSKVAPYPLHDKLSYVAGDFVKYGGKIKNQDDAPFDT | 114 |
| Query: | 109 | FHKQLNNWID--YCEEGDVKKFLTFVQQFILKPEFLTLILDSLIGPDYQHNQLKVTFCDA | 166 |
| | | + K L W + Y E VK T++++ L + + + L NQ + + | |
| Sbjct: | 115 | YIKNLGEWANSPYATE-KVKCIYTYLKKGRLIEDLVDAGVLKL-----DENQQLIEKWEK | 168 |
| Query: | 167 | TGKEKLIDLSACFLEFSIDQ------FQGFKNESVSTF---KALHQSYISFVEANRENLG | 217 |
| | | +E L + A F + DQ F F ES+ K + S+ISF | |
| Sbjct: | 169 | RYEELLGEKPAIFSSGATDQASAFVRFNVFHPESIDDVWKDKEMFDSFISFYNDKLGEED | 228 |
| Query: | 218 | ICNISGREEQLTDKH----RGLMGNAKIISVS-NKREAYKGRFREREDVFSVGYETSEKI | 272 |
| | | IC ++G T++H R AK+IS + N ++GRF+ + + YE S+K | |
| Sbjct: | 229 | ICFVTGNRLPSTERHANKIRHAADKAKLISANDNSGFTFRGRFKTSREAVGISYEVSQKA | 288 |
| Query: | 273 | HLMLKYLLENKNTSTWLGSSQYLINWFSDD-LTNDSRLDIVSPIFDDGLEEDDDDDTPPV | 331 |
| | | H LK+L+ ++ S + + W +D+ L + D V + E + D DT + | |
| Sbjct: | 289 | HNALKWLIHRQSKSI---DDRVFLVWSNDNSLVPNPDEDAVDIMKHANRELERDPDTGQI | 345 |
| Query: | 332 | ITLATEDNKRIGKSFIKGQKLFANDATY----YVAILNKTSNGRIALKYFRQLQASQLLT | 387 |
| | | A E K IG + +D Y ++ +L+ + GR+A+ Y+R L L | |
| Sbjct: | 346 | F--AGEVKKAIGG--------YRSDLNYQPEVHILVLDSATTGRMAVLYYRSLNKELYLN | 395 |
| Query: | 388 | NLNKWQETYSWESRSKFGKSRLRT----PTFHDILNVSYGVDRDRFLELDNDNFKSDQIQ | 443 |
| | | L W ++ +WE R + + + P DI +YG ++ D ++ | |
| Sbjct: | 396 | RLEAWHDSCAWEHRYRRDEKEFISFYGAPATKDIAFAAYGPRA-------SEKVIKDLME | 448 |
| Query: | 444 | KLVASLIDGKPMPQSIVKKL---GNNVKERHRYRKHWYQVEQVCLAILHK---QNGEEFS | 497 |
| | | +++ ++DG+ +P+ IV+ +N R+ W + + A++ K + EE+ | |
| Sbjct: | 449 | RMLPCIVDGRRVPKDIVRSAFQRASNPVSMERWE--WEKTLSITCALIRKMHIEQKEEWG | 506 |
| Query: | 498 | PMLDHTNQNRSYLFGRLLAIFELIETLRYGLDGNNNDRITNAERYWTAYTGQPTKLMMLL | 557 |
| | | LD ++ +RSYLFGRLLA+ +++E G G + R TNA RY +Y+ P + + | |
| Sbjct: | 507 | VPLDKSSTDRSYLFGRLLAVADVLER---GALGKDETRATNAIRYMNSYSKNPGRTWKTI | 563 |
| Query: | 558 | ENKIKPYEEPLKLNRRGSWMKLEKEKEEILELLNPLLETETMEKPLDYRFIFGYYAEKNY | 617 |
| | | + ++PY+ KL + ++ L K +EI + P + PL +++ G+Y+++ | |
| Sbjct: | 564 | QESLQPYQ--AKLGTKATY--LSKLVDEIGDQFEP---GDFNNNPLTEQYLLGFYSQRRE | 616 |
| Query: | 618 | YYTKQNTEVTE | 628 |
| | | Y K+ E + | |
| Sbjct: | 617 | LYKKKEEETNQ | 627 |

[14561] Based on this analysis, it was predicted that this GAS-specific protein and its epitopes, could be useful antigens for vaccines or diagnostics.

### EXAMPLE 2814

[14562] A DNA sequence (GASx1551R) was identified in S. pyogenes <SEQ ID 8127> which encodes the amino acid sequence <SEQ ID 8128>. Analysis of this protein sequence reveals the following:

Possible site: 33
>>> Seems to have no N-terminal signal sequence
----- Final Results -----
bacterial cytoplasm --- Certainty = 0.3035 (Affirmative) < succ>
bacterial membrane --- Certainty = 0.0000 (Not Clear) < succ>
bacterial outside --- Certainty = 0.0000 (Not Clear) < succ>

[14563] No corresponding DNA sequence was identified in S. agalactiae.

[14564] The protein has homology with the following sequences in the GENPEPT database:

| >GP: BAB04056 GB: AP001508 unknown [Bacillus halodurans] | | | |
|---|---|---|---|
| Identities = 90/218 (41%), Positives = 127/218 (57%), Gaps = 7/218 (3%) | | | |
| Query: | 13 | GQRALFTNPATKGGSERSSYSVPTRQALNGIVDAIYYKPTFTNIVTEVKVINQIQTELQG | 72 |
| | | G ALFT+P TK G E+ SYSVPT QAL GI ++IY+KPT ++ E++V+ IQ E +G | |
| Sbjct: | 11 | GDYALFTDPLTKIGGEKLSYSVPTYQALKGIAESIYWKPTIVFVIDELRVMKPIQMESKG | 70 |
| Query: | 73 | VRALLHDYSADLSYVSYLSDVVYLIKFHFVWNEDRKDLNSDRLPAKHEAIMERSIRKGGR | 132 |
| | | VR + + L++ +YL DV Y +K HF +N R DL DR KH +I++RS++ GGR | |
| Sbjct: | 71 | VRPIEYGGGNTLAHYTYLKDVHYQVKAHFEFNLHRPDLAFDRNEGKHYSILQRSLKAGGR | 130 |
| Query: | 133 | RDVFLGTRECLGLVDDISQEEYETTVSYYNGV-NIDLGIMFHSFAYPKDK-KTPLKSYFT | 190 |
| | | RD+FLG REC G V + E+ + +Y+G LG M H F YP + + L | |
| Sbjct: | 131 | RDIFLGARECQGYV---APCEFGSGDGFYDGQGKYHLGTMVHGFNYPDETGQHQLDVRLW | 187 |
| Query: | 191 | KTVMKNGVITFKAQSECDIVNTLSSYAFKA--PEEIKS | 226 |
| | | VM+NG I F +C IV + K P+ ++S | |
| Sbjct: | 188 | SAVMENGYIQFPRPEDCPIVRPVKEMEPKIFNPDNVQS | 225 |

[14565] Based on this analysis, it was predicted that this GAS-specific protein and its epitopes, could be useful antigens for vaccines or diagnostics.

### EXAMPLE 2815

[14566] A DNA sequence (GASx1552R) was identified in S. pyogenes <SEQ ID 8129> which encodes the amino acid sequence <SEQ ID 8130>. Analysis of this protein sequence reveals the following:

Possible site: 53
>>> Seems to have no N-terminal signal sequence
----- Final Results -----
bacterial cytoplasm --- Certainty = 0.2770 (Affirmative) < succ>
bacterial membrane --- Certainty = 0.0000 (Not Clear) < succ>
bacterial outside --- Certainty = 0.0000 (Not Clear) < succ>

[14567] No corresponding DNA sequence was identified in S. agalactiae.

[14568] The protein has homology with the following sequences in the GENPEPT database:

| >GP: BAB04055 GB: AP001508 unknown conserved protein in others | | | |
|---|---|---|---|
| [Bacillus halodurans] | | | |
| Identities = 252/836 (30%), Positives = 404/836 (48%), | | | |
| Gaps = 90/836 (10%) | | | |
| Query: | 3 | MILAHYDCKKDKKQSLDEHLWHVACSSRQEASIIGQGDVLFLIGLYHDLGKADRTFQD-- | 60 |
| | | M +AH Q+L EHL V C + + + V L GL HDLGK F+D | |
| Sbjct: | 1 | MYIAHIREVDKVIQTLKEHLCGVQCLAETFGAKLRLQHVAGLAGLLHDLGKYTNEFKDYI | 60 |
| Query: | 61 | -------KLLNNPNRHVDHSYAGAKYLCSIIGPHLKNRGVDKNERMTFNEMVGYVISAHH | 113 |
| | | +L VDHS AG + L + L +R +E++ E+VG I +HH | |
| Sbjct: | 61 | YKAVFEPELAEKKRGQVDHSTAGGRLLYQM----LHDRENSFHEKL-LAEVVGNAIISHH | 115 |
| Query: | 114 | GMYDLCYYFDDAEYYGFNKFKNRINRDLDGYHYHEDIKGYALKLEKKLCDYGYK-DLREL | 172 |
| | | +Y N + R L+ +++ Y +E+ + + +L | |
| Sbjct: | 116 | SNLQ--------DYISPTIESNFLTRVLE-----KELPEYESAVERFFQEVMTEAELARY | 162 |
| Query: | 173 | IDKAFDNYQQAMSSLNWQDKSEWDYYQSCMVRLYLSLLKNADILDTVNAYGLKISPMDKT | 232 |
| | | + KA D +Q + Q Y SC++ +AD +T + + + T | |
| Sbjct: | 163 | VAKAVDEIKQFTDNSPTQSFFLTKYIFSCLI--------DADRTNT-RMFDEQAREEEPT | 213 |
| Query: | 233 | ERSFLKHSYLAAIEQKYASFGQPNNQ---LNTIRTEIAERVKERGKRDSKGIYRLDLPTG | 289 |
| | | + L Y + AS + ++ +N +R+ ++E+ + R S GIY L +PTG | |
| Sbjct: | 214 | QPQQLFEHYHQQLLNHLASLKESDSAQKPINVLRSAMSEQCESFAMRPS-GIYTLSIPTG | 272 |
| Query: | 290 | AGKTNLSMRYAFHQLVHHDKSRFFYITPFLSVLEQNASEIRKVTGD-LGVLEHHSNVVKQ | 348 |
| | | GKT S+RYA ++K R YI PF +++EQNA E+R + GD +LEHHSNVV+ | |
| Sbjct: | 273 | GGKTLASLRYALKHAQEYNKQRIIYIVPFTTIIEQNAQEVRNILGDDENILEHHSNVVED | 332 |
| Query: | 349 | ANEDDDDKDSLLSA-----YLSDSWDSQVVLTSMVQFFQTLFKTKSANLRRFSSLINSVV | 403 |
| | | + D+ +D +++ D+WD ++ T++VQF + + N RR +L +SV+ | |
| Sbjct: | 333 | SENGDEQEDGVITKKERLRLARDNWDRPIIFTTLVQFLNVFYAKGNRNTRRLHNLSHSVL | 392 |
| Query: | 404 | ILDEVQSLPIEVTTLFNLTMNFLNKVMDTTIVLCTATQPAYDSSEIDHRICYGGNLGELA | 463 |
| | | I DEVQ +P + +LFN +NFL + +I+LCTATQP ++ + H + + | |
| Sbjct: | 393 | IFDEVQKVPTKCVSLFNEALNFLKEFAHCSILLCTATQPTLEN--VKHSLLKDRD----G | 446 |
| Query: | 464 | EIVELTIEEKQIFSRTELRKFDDSDQKVHLTDVINLILGEE---NSVLAIFNTKKTVHNC | 520 |
| | | EIV+ E + F R E+ D +DQ + + + E S L I NTKK V + | |
| Sbjct: | 447 | EIVQNLTEVSEAFKRVEI--LDKTDQPMTNERLAEWVRDEAPSWGSTLIILNTKKVVKDL | 504 |
| Query: | 521 | YTMLKDMTDRPVYQLSTNMCAQHRLDLIAKIKTELQNNIPIICISTQLIEAGVDVDFHRV | 580 |
| | | Y L+ PV+ LST+MCA HR D + +I+ L+ P IC++TQLIEAGVDV F V | |
| Sbjct: | 505 | YEKLEG-GPLPVFHLSTSMCAAHRKDQLDEIRALLKEGTPFICVTTQLIEAGVDVSFKCV | 563 |
| Query: | 581 | IRSYSGIDSIVQAAGRCNREGKRDKGQVTLVNLTNEEENISRLTEIKTKKEATESILHKI | 640 |
| | | IRS +G+DSI QAAGRCNR G+ V +++ + EE +S+L EI+ +E ++L + | |
| Sbjct: | 564 | IRSLAGLDSIAQAAGRCNRHGEEQLQYVYVID--HAEETLSKLKEIEVGQEIAGNVLARF | 621 |
| Query: | 641 | GSPIDISTLN-------RDFFEYYYANNQGLMDYPLED-----NLSIYDYLSLNIYQTAN | 688 |
| | | + N R++F YYY+ ++Y +++ + + N Y T | |
| Sbjct: | 622 | KKKAEKYEGNLLSQAAMREYFRYYYSKMDANLNYFVKEVDKDMTKLLMSHAVENSYVTYY | 681 |
| Query: | 689 | KKFKGK-----LKQAFKTAGAKMNLINNDMIGILVPYGEAEKKLAYLEELGVSHFLSAKD | 743 |
| | | +K G L ++KTA +I+ + +VPYGE + +A L S + | |
| Sbjct: | 682 | QKNTGTHFPLLLNGSYKTAADHFRVIDQNTTSAIVPYGEGQDIIAQLN--------SGEW | 733 |
| Query: | 744 | YQTIKSLLKELQPFTVNV--RENDPLFE--TTKSYLNGQILVLTSEYYDTERGVKY | 795 |
| | | + +LK+ Q +TVN+ +E D L + +L+G + L +Y + GV + | |
| Sbjct: | 734 | VDDLSKVLKKAQQYTVNLYSQEIDQLKKEGAIVMHLDGMVYELKESWYSHQYGVDF | 789 |

[14569] Based on this analysis, it was predicted that this GAS-specific protein and its epitopes, could be useful antigens for vaccines or diagnostics.

### EXAMPLE 2816

[14570] A DNA sequence (GASx1558) was identified in S. pyogenes <SEQ ID 8131> which encodes the amino acid sequence <SEQ ID 8132>. Analysis of this protein sequence reveals the following:

Possible site: 16
>>> Seems to have no N-terminal signal sequence
----- Final Results -----
bacterial cytoplasm --- Certainty = 0.1050 (Affirmative) < succ>
bacterial membrane --- Certainty = 0.0000 (Not Clear) < succ>
bacterial outside --- Certainty = 0.0000 (Not Clear) < succ>

[14571] No corresponding DNA sequence was identified in S. agalactiae.

[14572] The protein has no significant homology with any sequences in the GENPEPT database.

[14573] Based on this analysis, it was predicted that this GAS-specific protein and its epitopes, could be useful antigens for vaccines or diagnostics.

### EXAMPLE 2817

[14574] A DNA sequence (GASx1563) was identified in S. pyogenes <SEQ ID 8133> which encodes the amino acid sequence <SEQ ID 8134>. Analysis of this protein sequence reveals the following:

Possible site: 27
>>> Seems to have no N-terminal signal sequence
----- Final Results -----
bacterial cytoplasm --- Certainty = 0.1872 (Affirmative) < succ>
bacterial membrane --- Certainty = 0.0000 (Not Clear) < succ>
bacterial outside --- Certainty = 0.0000 (Not Clear) < succ>

[14575] No corresponding DNA sequence was identified in S. agalactiae.

[14576] The protein has no significant homology with any sequences in the GENPEPT database.

[14577] Based on this analysis, it was predicted that this GAS-specific protein and its epitopes, could be useful antigens for vaccines or diagnostics.

### EXAMPLE 2818

[14578] A DNA sequence (GASx1564R) was identified in S. pyogenes <SEQ ID 8135> which encodes the amino acid sequence <SEQ ID 8136>. Analysis of this protein sequence reveals the following:

Possible site: 32
>>> Seems to have no N-terminal signal sequence
----- Final Results -----
bacterial cytoplasm --- Certainty = 0.2173 (Affirmative) < succ>
bacterial membrane --- Certainty = 0.0000 (Not Clear) < succ>
bacterial outside --- Certainty = 0.0000 (Not Clear) < succ>

[14579] No corresponding DNA sequence was identified in S. agalactiae.

[14580] The protein has no significant homology with any sequences in the GENPEPT database.

[14581] Based on this analysis, it was predicted that this GAS-specific protein and its epitopes, could be useful antigens for vaccines or diagnostics.

### EXAMPLE 2819

[14582] A DNA sequence (GASx1566R) was identified in S. pyogenes <SEQ ID 8137> which encodes the amino acid sequence <SEQ ID 8138>. Analysis of this protein sequence reveals the following:

Possible site: 43
>>> Seems to have no N-terminal signal sequence
----- Final Results -----
bacterial cytoplasm --- Certainty = 0.3486 (Affirmative) < succ>
bacterial membrane --- Certainty = 0.0000 (Not Clear) < succ>
bacterial outside --- Certainty = 0.0000 (Not Clear) < succ>

[14583] Based on this analysis, it was predicted that this GAS-specific protein and its epitopes, could be useful antigens for vaccines or diagnostics.

### EXAMPLE 2820

[14584] A DNA sequence (GASx1568) was identified in S. pyogenes <SEQ ID 8139> which encodes the amino acid sequence <SEQ ID 8140>. Analysis of this protein sequence reveals the following:

Possible site: 26
>>> Seems to have no N-terminal signal sequence
----- Final Results -----
bacterial cytoplasm --- Certainty = 0.2711 (Affirmative) < succ>
bacterial membrane --- Certainty = 0.0000 (Not Clear) < succ>
bacterial outside --- Certainty = 0.0000 (Not Clear) < succ>

[14585] No corresponding DNA sequence was identified in S. agalactiae.

[14586] The protein has no significant homology with any sequences in the GENPEPT database.

[14587] Based on this analysis, it was predicted that this GAS-specific protein and its epitopes, could be useful antigens for vaccines or diagnostics.

### EXAMPLE 2821

[14588] A DNA sequence (GASx1569) was identified in S. pyogenes <SEQ ID 8141> which encodes the amino acid sequence <SEQ ID 8142>. Analysis of this protein sequence reveals the following:

Possible site: 27
>>> Seems to have an uncleavable N-term signal seq
----- Final Results -----
bacterial membrane --- Certainty = 0.0000 (Not Clear) < succ>
bacterial outside --- Certainty = 0.0000 (Not Clear) < succ>
bacterial cytoplasm --- Certainty = 0.0000 (Not Clear) < succ>

[14589] No corresponding DNA sequence was identified in S. agalactiae.

[14590] The protein has no significant homology with any sequences in the GENPEPT database.

[14591] Based on this analysis, it was predicted that this GAS-specific protein and its epitopes, could be useful antigens for vaccines or diagnostics.

### EXAMPLE 2822

[14592] A DNA sequence (GASx1576R) was identified in S. pyogenes <SEQ ID 8143> which encodes the amino acid sequence <SEQ ID 8144>. Analysis of this protein sequence reveals the following:

Possible site: 28
>>> Seems to have no N-terminal signal sequence
----- Final Results -----
bacterial cytoplasm --- Certainty = 0.4042 (Affirmative) < succ>
bacterial membrane --- Certainty = 0.0000 (Not Clear) < succ>
bacterial outside --- Certainty = 0.0000 (Not Clear) < succ>

[14593] No corresponding DNA sequence was identified in S. agalactiae.

[14594] The protein has no significant homology with any sequences in the GENPEPT database.

[14595] Based on this analysis, it was predicted that this GAS-specific protein and its epitopes, could be useful antigens for vaccines or diagnostics.

### EXAMPLE 2823

[14596] A DNA sequence (GASx1577R) was identified in S. pyogenes <SEQ ID 8145> which encodes the amino acid sequence <SEQ ID 8146>. Analysis of this protein sequence reveals the following:

Possible site: 21
>>> Seems to have no N-terminal signal sequence
----- Final Results -----
bacterial cytoplasm --- Certainty = 0.3342 (Affirmative) < succ>
bacterial membrane --- Certainty = 0.0000 (Not Clear) < succ>
bacterial outside --- Certainty = 0.0000 (Not Clear) < succ>

[14597] No corresponding DNA sequence was identified in S. agalactiae.

[14598] The protein has homology with the following sequences in the GENPEPT database:

| >GP: BAB04515 GB: AP001509 unknown [Bacillus halodurans] | | | |
|---|---|---|---|
| Identities = 36/104 (34%), Positives = 55/104 (52%) | | | |
| Query: | 2 | HMGAWNTGNNKILYTQESVTDDMIAKRDQSIKDAKESPILGFTVDTKVIKTELSNISNVM | 61 |
| | | +M ++ GN IL E D + + A SP LGF D+ ++TE++ ISNV | |
| Sbjct: | 392 | NMPSFAIGNQLILKLYEDDPQDKWEAFEAFNESAIPSPALGFYFDSNPVRTEIAAISNVT | 451 |
| Query: | 62 | NRYKASINTGTVDPDEALPKLLADLKGAGWDKVQKEVQKQLDDF | 105 |
| | | + + ++ G VDP+E LP L AG KV E+Q+Q D++ | |
| Sbjct: | 452 | SEFSPALLKGAVDPEEYLPLFNDKLNEAGLQKVIDEMQRQFDEW | 495 |

[14599] Based on this analysis, it was predicted that this GAS-specific protein and its epitopes, could be useful antigens for vaccines or diagnostics.

### EXAMPLE 2824

[14600] A DNA sequence (GASx1578R) was identified in S. pyogenes <SEQ ID 8147> which encodes the amino acid sequence <SEQ ID 8148>. Analysis of this protein sequence reveals the following:

Possible site: 27
>>> May be a lipoprotein
----- Final Results -----
bacterial membrane --- Certainty = 0.0000 (Not Clear) < succ>
bacterial outside --- Certainty = 0.0000 (Not Clear) < succ>
bacterial cytoplasm --- Certainty = 0.0000 (Not Clear) < succ>

[14601] No corresponding DNA sequence was identified in S. agalactiae.

[14602] The protein has homology with the following sequences in the GENPEPT database:

| >GP: BAB04515 GB: AP001509 unknown [Bacillus halodurans] | | | |
|---|---|---|---|
| Identities = 134/346 (38%), Positives = 206/346 (58%), Gaps = 10/346 (2%) | | | |
| Query: | 21 | AACESKSASKDSDVKLLMYQVGDKPDNFDELMTIANKRIKEKTGATVDLQYIGWGDWDDK | 80 |
| | | +A E+++ D V L Y +G + + +M N +EK ATVDL+ + WG++D++ | |
| Sbjct: | 42 | SANETEATDLDH-VTLTWYMIGTPQPDLELVMEEVNAYTEEKINATVDLRMLDWGEYDER | 100 |
| Query: | 81 | MSTIIASGENYDIAF----ANNYVVNAQKGAFADLTTLMPKYAKKTYKNLDPAYIKGNTI | 136 |
| | | M I SGE YDIAF ANNY +NA++GAF +L L+ ++ ++ + +DPA+++G + | |
| Sbjct: | 101 | MQVITTSGEAYDIAFTSSWANNYALNARRGAFLELNDLLDEHGQEMKELIDPAFLEGAQV | 160 |
| Query: | 137 | DGKLYAFPVDANVYAQQMLSFNKELVDKYGLDISNIKSYADAENVLKQFHEKEPNTAAFA | 196 |
| | | DGKLYA P + V Q +LSFN ELV+K+ LD+S++ S AD E +L E+E + A | |
| Sbjct: | 161 | DGKLYAVPTNKEVGQQAVLSFNNELVEKHNLDLSSVHSLADLEPLLAVIKEEESDVTPIA | 220 |
| Query: | 197 | IGQVFSMSGDYDYPLTKTQPFAVKIDEGKPTIINQYEDESFKNNLRLMHKWYKEGLIPTD | 256 |
| | | F +D L + PFA +++ +IN+YE++ L+ MH +YK+G I D | |
| Sbjct: | 221 | ---TFDAYLPFDSILQEEMPFAFRLEGNTNEVINKYEEDITMETLKTMHDYYKKGYIRPD | 277 |
| Query: | 257 | AATNTEGYPLEGNTWFMREETQGPMDYGDTILTNAAGKDIVSRPLTKPLKTTSQAQMANF | 316 |
| | | AAT+T+ +PLE WF+R+E P Y + I T AG +I +RPL +P + + | |
| Sbjct: | 278 | AATSTDSWPLETPNWFVRKELYQP--YAELIWTRTAGYEIATRPLHEPYIFNNSVTGSNQ | 335 |
| Query: | 317 | VVSSVSKNKEKAVEVLSLLNSDPELLNGLVYGVEGKAWEKIGDKKI | 362 |
| | | +S+ SKN E+A+ L+LLNSDP L N L G+EG +E++ D I | |
| Sbjct: | 336 | AISATSKNPERAMMFLNLLNSDPYLRNLLDKGIEGVHYEELEDGTI | 381 |

[14603] Based on this analysis, it was predicted that this GAS-specific protein and its epitopes, could be useful antigens for vaccines or diagnostics.

### EXAMPLE 2825

[14604] A DNA sequence (GASx1582) was identified in S. pyogenes <SEQ ID 8149> which encodes the amino acid sequence <SEQ ID 8150>. Analysis of this protein sequence reveals the following:

Possible site: 34
>>> Seems to have no N-terminal signal sequence
----- Final Results -----
bacterial cytoplasm --- Certainty = 0.0454 (Affirmative) < succ>
bacterial membrane --- Certainty = 0.0000 (Not Clear) < succ>
bacterial outside --- Certainty = 0.0000 (Not Clear) < succ>

[14605] No corresponding DNA sequence was identified in S. agalactiae.

[14606] The protein has no significant homology with any sequences in the GENPEPT database.

[14607] Based on this analysis, it was predicted that this GAS-specific protein and its epitopes, could be useful antigens for vaccines or diagnostics.

### EXAMPLE 2826

[14608] A DNA sequence (GASx1584R) was identified in S. pyogenes <SEQ ID 8151> which encodes the amino acid sequence <SEQ ID 8152>. Analysis of this protein sequence reveals the following:

Possible site: 41
>>> Seems to have no N-terminal signal sequence
----- Final Results -----
bacterial cytoplasm --- Certainty = 0.3105 (Affirmative) < succ>
bacterial membrane --- Certainty = 0.0000 (Not Clear) < succ>
bacterial outside --- Certainty = 0.0000 (Not Clear) < succ>
RGD motif: 3-5

[14609] No corresponding DNA sequence was identified in S. agalactiae.

[14610] The protein has homology with the following sequences in the GENPEPT database:

| >GP: AAG21428 GB: AF307332 meningioma-expressed antigen 5s splice | | | |
|---|---|---|---|
| variant [Homo sapiens] | | | |
| Identities = 94/271 (34%), Positives = 148/271 (53%), Gaps = 14/271 (5%) | | | |
| Query: | 120 | GIIEGFYGTPWTREERLDCLRFIGNKRMNTYMYAPKDDDYQRKLWRDLYPEDWVTYFKEL | 179 |
| | | G++EGFYG PW E+R + R + +NTY+YAPKDD R WR++Y + L | |
| Sbjct: | 63 | GVVEGFYGRPWVMEQRKELFRRLQKWELNTYLYAPKDDYKHRMFWREMYSVEEAEQLMTL | 122 |
| Query: | 180 | LAVAKEEGLDFWYMISPGLDFDYTKEADYQLLYQKLQQLLALGVCHFGLLLDDIDYQIVD | 239 |
| | | ++ A+E ++F Y ISPGLD ++ + L +KL Q+ G F LL DDID+ + | |
| Sbjct: | 123 | ISAAREYEIEFIYAISPGLDITFSNPKEVSTLKRKLDQVSQFGCRSFALLFDDIDHNMCA | |
| Query: | 240 | AVERRFKKTAYAQAHLATEVHHFLNQQHAAPELVICPTE------YDNHHDSIYLQELSE | 293 |
| | | A + F A+AQ + E++ +L + + CPTE Y N S YL+ + E | |
| Sbjct: | 183 | ADKEVFSSFAHAQVSITNEIYQYLGEPET---FLFCPTEYCGTFCYPNVSQSPYLRTVGE | 239 |
| Query: | 294 | RIPKEVAFFWTGPSTLASQISQADIETMAAVYQRPIIIWDNIPVNDYQKDPERLFLTPFA | 353 |
| | | ++ + WTGP ++ +I IE ++ + +R +IWDNI NDY D +RLFL P+ | |
| Sbjct: | 240 | KLLPGIEVLWTGPKVVSKEIPVESIEEVSKIIKRAPVIWDNIHANDY--DQKRLFLGPYK | 297 |
| Query: | 354 | NRSPFLCQPDYQVKGIVSNPMISWELSKLTL | 384 |
| | | RS L ++KG+++NP +E + + + | |
| Sbjct: | 298 | GRSTELIP---RLKGVLTNPNCEFEANYVAI | 325 |

[14611] Based on this analysis, it was predicted that this GAS-specific protein and its epitopes, could be useful antigens for vaccines or diagnostics.

### EXAMPLE 2827

[14612] A DNA sequence (GASx1585R) was identified in S. pyogenes <SEQ ID 8153> which encodes the amino acid sequence <SEQ ID 8154>. Analysis of this protein sequence reveals the following:

Possible site: 24
>>> Seems to have no N-terminal signal sequence
----- Final Results -----
bacterial cytoplasm --- Certainty = 0.4469 (Affirmative) < succ>
bacterial membrane --- Certainty = 0.0000 (Not Clear) < succ>
bacterial outside --- Certainty = 0.0000 (Not Clear) < succ>

[14613] No corresponding DNA sequence was identified in S. agalactiae.

[14614] The protein has no significant homology with any sequences in the GENPEPT database.

[14615] Based on this analysis, it was predicted that this GAS-specific protein and its epitopes, could be useful antigens for vaccines or diagnostics.

### EXAMPLE 2828

[14616] A DNA sequence (GASx1587) was identified in S. pyogenes <SEQ ID 8155> which encodes the amino acid sequence <SEQ ID 8156>. Analysis of this protein sequence reveals the following:

```
Possible site: 47
>>> Seems to have no N-terminal signal sequence
----- Final Results -----
                            bacterial cytoplasm --- Certainty = 0.3082(Affirmative) < succ>
                              bacterial membrane --- Certainty = 0.0000(Not Clear) < succ>
                                bacterial outside --- Certainty = 0.0000(Not Clear) < succ>
```

[14617] No corresponding DNA sequence was identified in S. agalactiae.

[14618] The protein has homology with the following sequences in the GENPEPT database:

| >GP: BAB04509 GB: AP001509 unknown conserved protein in others | | | |
|---|---|---|---|
| [Bacillus halodurans] | | | |
| Identities = 221/425 (52%), Positives = 296/425 (69%), Gaps = 4/425 (0%) | | | |
| Query: | 12 | RPIPTSVSQFMAKVESLCGDQHPDWALNFKTSFTNTLETTLKTYEDGTSFLLTGDIPAMW | 71 |
| | | + IP S+ +A+V++ D L F+ F NT TT++ E GT F++TGDIPAMW | |
| Sbjct: | 4 | KKIPRSLQAIIAQVKAHYADDQELQTL-FEQCFLNTYLTTIQEDEQGT-FVVTGDIPAMW | 61 |
| Query: | 72 | LRDSTAQMKPYLFLAKEDEEIRKIIAGLVKRQFRYICIDPYANAFNEEANEKGHQTDHTQ | 131 |
| | | LRDS+AQ++PYL + KED ++ ++I G+++RQ+RYI DPYANAFN+ AN++GHQ D T+ | |
| Sbjct: | 62 | LRDSSAQVRPYLTVVKEDADMARMIKGVIERQWRYILHDPYANAFNQTANKQGHQQDRTE | 121 |
| Query: | 132 | MNPWIWERKYEIDCLCYPIQLAYLLYRETGSTDQFNDDFHRGVELILDLWTVEQDH-AQS | 190 |
| | | M+P +WERKYE+D LCYPIQLAYL ++ TG + +E I +W +EQDH A+S | |
| Sbjct: | 122 | MSPLVWERKYELDSLCYPIQLAYLYWKATGDDSVLQPTLKQVLETIYRIWKIEQDHEAKS | 181 |
| Query: | 191 | PYLFERDTWRKEDTLTHAGKGSPVAPTGMTWSGFRPSDDACQYGYLIPSNMFAVVVLSYL | 250 |
| | | Y FERD R DTL GKG PTGMTWSGFRPSDDAC YGYLIP+NMFAVVV +Y | |
| Sbjct: | 182 | SYSFERDDCRVSDTLLRKGKGGYSVPTGMTWSGFRPSDDACLYGYLIPANMFAVVVSNYA | 241 |
| Query: | 251 | EDLYNNLFHNEPVATRAKQLKEAIQSGIADHALVQNSKGETIYAYEVDGLGQFSIMDDAN | 310 |
| | | +L + +A ++L+ I+ GI + + + IY YE DG G+ ++MDDAN | |
| Sbjct: | 242 | VELLTAM-EEIKLAEEFRELEADIRQGIGQYGKMDHPVYGEIYVYETDGNGRVNLMDDAN | 300 |
| Query: | 311 | IPSLLAAPYLGFCTKDDPIYLATRRTILSQENPYYYQGNAAAGIGSSHTPENYIWHIALA | 370 |
| | | +PSLLA PYLG+ T DDP+Y TRR ILS++NPYYY+G+ A G+GS HTP++Y+WHI+LA | |
| Sbjct: | 301 | VPSLLAIPYLGYTTADDPVYQNTRRFILSRDNPYYYEGSYAKGVGSPHTPDHYVWHISLA | 360 |
| Query: | 371 | LQGLTALDQDSKKEMLDLLVATDAGTHLMHEGFDVNDPYQYTREWFSWANMMFCELLLDY | 430 |
| | | +QG+TA+D KK+++ + T A T+ MHEGFDV+ P QYTR WF+WAN MF E LL | |
| Sbjct: | 361 | IQGMTAIDSKEKKQIVAMFKQTHADTYFMHEGFDVDRPEQYTRSWFAWANSMFSEFLLSE | 420 |
| Query: | 431 | LGFSI | 435 |
| | | G + | |
| Sbjct: | 421 | AGIYV | 425 |

[14619] Based on this analysis, it was predicted that this GAS-specific protein and its epitopes, could be useful antigens for vaccines or diagnostics.

### EXAMPLE 2829

[14620] A DNA sequence (GASx1588) was identified in S. pyogenes <SEQ ID 8157> which encodes the amino acid sequence <SEQ ID 8158>. Analysis of this protein sequence reveals the following:

```
Possible site: 21
>>> Seems to have no N-terminal signal sequence
----- Final Results -----
                            bacterial cytoplasm --- Certainty = 0.5250(Affirmative) < succ>
                              bacterial membrane --- Certainty = 0.0000(Not Clear) < succ>
                                bacterial outside --- Certainty = 0.0000(Not Clear) < succ>
```

[14621] No corresponding DNA sequence was identified in S. agalactiae.

[14622] The protein has homology with the following sequences in the GENPEPT database:

| >GP: BAB04508 GB: AP001509 unknown conserved protein in others | | | |
|---|---|---|---|
| (divided) [Bacillus halodurans] | | | |
| Identities = 312/737 (42%), Positives = 426/737 (57%), Gaps = 21/737 (2%) | | | |
| Query: | 123 | FPDTFGNMGQTPQLMLKAGLQAAAFGRGIRPTGFNNQVDTSEKYSSQFSEISWQGPDNSR | 182 |
| | | FPDTFG GQ PQL+ +AG++AA FGRG+ PTGFNNQV + YSS FSE+ W+ PD S+ | |
| Sbjct: | 4 | FPDTFGIYGQAPQLLAQAGIRAAVFGRGVTPTGFNNQVQHDD-YSSPFSELIWEAPDGSQ | 62 |
| Query: | 183 | ILGLLFANWYSNGNEIPTTEAEARLFWDKKLADAERFASTKHLLMMNGCDHQPVQLDVTK | 242 |
| | | ++G+L ANWYSNGNEIPT E EA+ FW KKL DAERFAST LL MNGCDHQPVQ DVT+ | |
| Sbjct: | 63 | VIGILLANWYSNGNEIPTDEDEAQTFWVKKLRDAERFASTSQLLFMNGCDHQPVQKDVTQ | 122 |
| Query: | 243 | AIALANQLYPDYEFVHSCFEDYLADLADDLPENLSTVQGEITSQETDGWYTLANTASARI | 302 |
| | | AI +A L+PD F HS F DYL + ++LP+ L + GE+ +Q+TDGW TL NTASARI | |
| Sbjct: | 123 | AIKVAETLFPDVAFKHSNFHDYLTQIKEELPKELQKITGELRNQKTDGWSTLVNTASARI | 182 |
| Query: | 303 | YLKQANTRVSRQLENITEPLAAMAYEVTSTYPHDQLRYAWKTLMQNHPHDSICGCSVDSV | 362 |
| | | YLKQAN R L N+ EP+ + + D Y WK LM+NHPHDSICGCS+D+V | |
| Sbjct: | 183 | YLKQANDRCQTLLTNVLEPMCLLV--ENKSLHRDFSEYYWKLLMENHPHDSICGCSIDAV | 240 |
| Query: | 363 | HREMMTRFEKAYEVGHYLAKEAAKQIADAIDTRDFPMDSQPFVLFNTSGHSKTSVAELSL | 422 |
| | | HREM TRFEK E K+IA I+T ++ P V+ T+G S V + | |
| Sbjct: | 241 | HREMKTRFEKVEAGATTFIAEQGKEIAAQINTLHDSEEAIPLVVLKTNGTSGKRVVRHKV | 300 |
| Query: | 423 | TWKKYHFGQRFPKEVYQEAQEYLARLSQSFQIIDTSGQVRPEAEILGTSIAFDYDLPKRS | 482 |
| | | KK +F + ++ + L + ++ + E+ + F YDLP+ | |
| Sbjct: | 301 | AMKKIYFDEM----DFRHIPDRLKEIVMPTYRLEFPNKGSVPIEVQDAGVRFGYDLPRDG | 356 |
| Query: | 483 | FREPYFAIKVRLRLPITLPAMSWKTLALKLG------NETTPSETVSLYDDSNQCLENGF | 536 |
| | | FR PY+A L +T S L + G + T + + D S LEN | |
| Sbjct: | 357 | FRRPYYA----RELEVTFSYDSDLYLGYECGFLVPVEEKQTEARKELIGDPSMNTLENEA | 412 |
| Query: | 537 | LKVMIQTDGRLTITDKQSGLIYQDLLRFEDCGDIGNEYISRQPNHDQPFYADQGTIKLNI | 596 |
| | | +KVMI +G +I DK +G Y+ L +ED GDIGNEY+ + + + + + I | |
| Sbjct: | 413 | MKVMIHRNGSYSILDKTTGFEYRHLGIYEDVGDIGNEYMFKASSDGVRYTTEACEASIRI | 472 |
| Query: | 597 | ISNTAQVAELEIQQTFAIPISADKLLQAEMEAVIDITERQARRSQEKAELTLTTLIRMEK | 656 |
| | | I N + A +EI QT ++P +AD+ L+ E E ++ +R+A RS+E+ ++TL T + +E+ | |
| Sbjct: | 473 | IENNSLCATVEICQTLSVPAAADERLKEEQERLVWHPDRKAGRSKERTDITLRTELTLEQ | 532 |
| Query: | 657 | NNPRLQFTTRFDNQMTNHRLRVLFPTHLKTDHHLADSIFETVKRPNHPDATFWKNPSNPQ | 716 |
| | | L+ DN +HR+R LFP +H ADSI+E V+RPN PD W+NP+ | |
| Sbjct: | 533 | GAKGLKVNVNIDNTAKDHRMRALFPVERARGNHYADSIYEIVERPNTPDPK-WQNPAFDH | 591 |
| Query: | 717 | HQECFVSLFDGENGVTIGNYGLNEYEILPDTNTIAITLLRSVGEMGDWGYFPTPEAQCLG | 776 |
| | | H + VSL +GE G+TI GL+EYEI+ D +IA+TLLRSVGE+GDWG F TPEAQC G | |
| Sbjct: | 592 | HMQRLVSLDNGEYGLTIATKGLHEYEIVSD--SIAVTLLRSVGELGDWGLFETPEAQCFG | 649 |
| Query: | 777 | KHSLSYSFESITKQTQFAS-YWRAQEGQVPVITTQTNQHEGTLAAEYSYLTGTNDQVALT | 835 |
| | | ++ + A+ Y A + V QT Q G L + + + + LT | |
| Sbjct: | 650 | QNEAQFVLLPHKGDVLSANVYVAAYDDPVEPTVIQTEQSMGPLPHATNLFQWSGEGLVLT | 709 |
| Query: | 836 | AFKRRLADNALITRSYN | 852 |
| | | A K + +I R +N | |
| Sbjct: | 710 | ACKPTMDGRGMILRWFN | 726 |

[14623] Based on this analysis, it was predicted that this GAS-specific protein and its epitopes, could be useful antigens for vaccines or diagnostics.

### EXAMPLE 2830

[14624] A DNA sequence (GASx1589R) was identified in S. pyogenes <SEQ ID 8159> which encodes the amino acid sequence <SEQ ID 8160>. Analysis of this protein sequence reveals the following:

| Possible site: 31 | | | | |
|---|---|---|---|---|
| >>> Seems to have a cleavable N-term signal seq. | | | | |
| | INTEGRAL | Likelihood = −11.30 | Transmembrane | 203-219 (195-221) |
| | INTEGRAL | Likelihood = −8.17 | Transmembrane | 61-77 (59-82) |
| | INTEGRAL | Likelihood = −3.98 | Transmembrane | 107-123 (107-124) |
| | INTEGRAL | Likelihood = −3.40 | Transmembrane | 39-55 (38-58) |
| | INTEGRAL | Likelihood = −2.34 | Transmembrane | 129-145 (126-145) |
| | INTEGRAL | Likelihood = −2.07 | Transmembrane | 89-105 (87-105) |

```
----- Final Results -----
                              bacterial membrane --- Certainty = 0.5522(Affirmative) < succ>
                                bacterial outside --- Certainty = 0.0000(Not Clear) < succ>
                            bacterial cytoplasm --- Certainty = 0.0000(Not Clear) < succ>
```

[14625] No corresponding DNA sequence was identified in S. agalactiae.

[14626] The protein has homology with the following sequences in the GENPEPT database:

| >GP: CAC10175 GB: AJ278302 histidine kinase [Streptococcus pneumoniae] | | | |
|---|---|---|---|
| Identities = 114/432 (26%), Positives = 219/432 (50%), Gaps = 10/432 (2%) | | | |
| Query: | 21 | LTLKLFSFVSAIPLRLKNIFYLSLSMVLFQVVFWAFFPDHFILDVVMLAQF---LFFALI | 77 |
| | | L + +F V I L + IF L +L VVF +++ V L+ F L+ + | |
| Sbjct: | 16 | LKIVIFFKVDGISLTFERIFKAFLFKILLAVVFGML---GYMVGNVYLSYFMEPLYGIGL | 72 |
| Query: | 78 | ALYYGKSIKAKFLMFYAFFPLVSISLVKRFIVFFVMPLFGMPYSVVKHNTLLIYSITCFS | 137 |
| | | + + + K L+FY FP++ ++L R + +FV+P G V + + I F+ | |
| Sbjct: | 73 | SFLLLRELPKKLLLFYGLFPMILVNLFYRGVSYFVLPFLGQG-QVYDDYSFIWLCIIIFN | 131 |
| Query: | 138 | IFLIYRCIQVFHFDFSTWRQYFQSHRASKLLVFTNSSMALYYLCVQGIDVMSPSLSGLAT | 197 |
| | | F+ ++ +DF++ R+ K L N M YYL +Q + G+ + | |
| Sbjct: | 132 | FFISLAFLKWLDYDFTSLRKGILDKDFQKSLTQINWIMGAYYLVIQNLSYFEYQ-QGIQS | 190 |
| Query: | 198 | TTARSIIVLFYFILFLTLLIHLERYVKQNSIEAIVQQKE--YRELINYSQHLGLLYQDIQ | 255 |
| | | TT R +I++FY + F+ ++ L+ Y+K E + Q+++ YRE+ YS+H+ LY++++ | |
| Sbjct: | 191 | TTVRHLILVFYLLFFMGIIKKLDTYLKDKLHERLNQEQDLRYREMERYSRHIEELYKEVR | 250 |
| Query: | 256 | ELRRLLTTVSSRLKIGIEQNDISIVRLTYEGILNAEKNNAKDDRLDLTCLDKLQVEAIRH | 315 |
| | | R T + + L++GIE+ D+ ++ Y+ +L +D++ DL L ++ A++ | |
| Sbjct: | 251 | SFRHDYTNLLTSLRLGIEEEDMEQIKEIYDSVLKDSSEKLQDNKYDLGRLVNVRDRALKS | 310 |
| Query: | 316 | IVLAKLIEAKNKKLKVEVSIPNCIATFFLEVVDFTKLLSFLLDNAIEMSLETKQPCLSIA | 375 |
| | | ++ K I+A++K + V +P I + ++DF ++S L DNAIE S+E QP +SIA | |
| Sbjct: | 311 | LLAGKFIKARDKNIVFNVEVPEEIQVEGVSLLDFLTVVSILCDNAIEASVEACQPHVSIA | 370 |
| Query: | 376 | FLDQNHKLVIVIQSSTKQGQDDSQSVFAIPALKKRDDWQFDLRNVTTILNRYDYLTISSQ | 435 |
| | | F + +I++S K+ D +F+ A K ++ L V I+ + ++++ | |
| Sbjct: | 371 | FFKNGAQETFIIENSIKEEGIDISEIFSFGASSKGEERGVGLYTVMKIVESHPNTSLNTT | 430 |
| Query: | 436 | IHDGILTQLIEI | 447 |
| | | D + Q++ + | |
| Sbjct: | 431 | CQDHVFRQVLTV | 442 |

[14627] Based on this analysis, it was predicted that this GAS-specific protein and its epitopes, could be useful antigens for vaccines or diagnostics.

### EXAMPLE 2831

[14628] A DNA sequence (GASx1593R) was identified in S. pyogenes <SEQ ID 8161> which encodes the amino acid sequence <SEQ ID 8162>. Analysis of this protein sequence reveals the following:

| Possible site: 25 | | | | |
|---|---|---|---|---|
| >>> Seems to have an uncleavable N-term signal seq | | | | |
| | INTEGRAL | Likelihood = −1.28 | Transmembrane | 2-18 (1-18) |

```
----- Final Results -----
                              bacterial membrane --- Certainty = 0.1510(Affirmative) < succ>
                                bacterial outside --- Certainty = 0.0000(Not Clear) < succ>
                            bacterial cytoplasm --- Certainty = 0.0000(Not Clear) < succ>
```

[14629] No corresponding DNA sequence was identified in S. agalactiae.

[14630] The protein has no significant homology with any sequences in the GENPEPT database.

[14631] Based on this analysis, it was predicted that this GAS-specific protein and its epitopes, could be useful antigens for vaccines or diagnostics.

### EXAMPLE 2832

[14632] A DNA sequence (GASx1594) was identified in S. pyogenes <SEQ ID 8163> which encodes the amino acid sequence <SEQ ID 8164>. Analysis of this protein sequence reveals the following:

| Possible site: 61 | | | | |
|---|---|---|---|---|
| >>> Seems to have no N-terminal signal sequence | | | | |
| | INTEGRAL | Likelihood = −3.93 | Transmembrane | 76-92 (76-92) |

```
----- Final Results -----
                              bacterial membrane --- Certainty = 0.2572(Affirmative) < succ>
                                bacterial outside --- Certainty = 0.0000(Not Clear) < succ>
                            bacterial cytoplasm --- Certainty = 0.0000(Not Clear) < succ>
```

[14633] No corresponding DNA sequence was identified in S. agalactiae.

[14634] The protein has homology with the following sequences in the GENPEPT database:

| >GP: AAF61313 GB: U96166 unknown [Streptococcus cristatus] | | | |
|---|---|---|---|
| Identities = 31/66 (46%), Positives = 40/66 (59%), Gaps = 2/66 (3%) | | | |
| Query: | 14 | LLGRILSKYVGRLTSCIENETTKIRNHSRQNDTIGLNHLLGNLKTVHNPEIILKTINVYS | 73 |
| | | + G +SK + + E K+ ++ ND IG N LLG+LKTVHNPEII + VYS | |
| Sbjct: | 30 | VFGMDVSKTSSEVAILVNGE--KVHGYTILNDAIGFNRLLGDLKTVHNPEIIFEATGVYS | 87 |
| Query: | 74 | RRLQVF | 79 |
| | | RRLQ F | |
| Sbjct: | 88 | RRLQAF | 93 |

[14635] Based on this analysis, it was predicted that this GAS-specific protein and its epitopes, could be useful antigens for vaccines or diagnostics.

### EXAMPLE 2833

[14636] A DNA sequence (GASx1598) was identified in S. pyogenes <SEQ ID 8165> which encodes the amino acid sequence <SEQ ID 8166>. Analysis of this protein sequence reveals the following:

```
Possible site: 14
>>> Seems to have no N-terminal signal sequence
----- Final Results -----
                            bacterial cytoplasm --- Certainty = 0.2117(Affirmative) < succ>
                              bacterial membrane --- Certainty = 0.0000(Not Clear) < succ>
                                bacterial outside --- Certainty = 0.0000(Not Clear) < succ>
```

[14637] No corresponding DNA sequence was identified in S. agalactiae.

[14638] The protein has no significant homology with any sequences in the GENPEPT database.

[14639] Based on this analysis, it was predicted that this GAS-specific protein and its epitopes, could be useful antigens for vaccines or diagnostics.

### EXAMPLE 2834

[14640] A DNA sequence (GASx1608) was identified in S. pyogenes <SEQ ID 8167> which encodes the amino acid sequence <SEQ ID 8168>. Analysis of this protein sequence reveals the following:

```
Possible site: 16
>>> Seems to have an uncleavable N-term signal seq
----- Final Results -----
                              bacterial membrane --- Certainty = 0.0000(Not Clear) < succ>
                                bacterial outside --- Certainty = 0.0000(Not Clear) < succ>
                            bacterial cytoplasm --- Certainty = 0.000(Not Clear) < succ>
```

[14641] No corresponding DNA sequence was identified in S. agalactiae.

[14642] The protein has no significant homology with any sequences in the GENPEPT database.

[14643] Based on this analysis, it was predicted that this GAS-specific protein and its epitopes, could be useful antigens for vaccines or diagnostics.

### EXAMPLE 2835

[14644] A DNA sequence (GASx1619) was identified in S. pyogenes <SEQ ID 8169> which encodes the amino acid sequence <SEQ ID 8170>. Analysis of this protein sequence reveals the following:

```
Possible site: 36
>>> Seems to have no N-terminal signal sequence
----- Final Results -----
                            bacterial cytoplasm --- Certainty = 0.2916(Affirmative) < succ>
                              bacterial membrane --- Certainty = 0.0000(Not Clear) < succ>
                                bacterial outside --- Certainty = 0.0000(Not Clear) < succ>
```

[14645] No corresponding DNA sequence was identified in S. agalactiae.

[14646] The protein has no significant homology with any sequences in the GENPEPT database.

[14647] Based on this analysis, it was predicted that this GAS-specific protein and its epitopes, could be useful antigens for vaccines or diagnostics.

### EXAMPLE 2836

[14648] A DNA sequence (GASx1621) was identified in S. pyogenes <SEQ ID 8171> which encodes the amino acid sequence <SEQ ID 8172>. Analysis of this protein sequence reveals the following:

```
Possible site: 33
>>> Seems to have no N-terminal signal sequence
----- Final Results -----
                            bacterial cytoplasm --- Certainty = 0.1899(Affirmative) < succ>
                              bacterial membrane --- Certainty = 0.0000(Not Clear) < succ>
                                bacterial outside --- Certainty = 0.0000(Not Clear) < succ>
```

[14649] No corresponding DNA sequence was identified in S. agalactiae.

[14650] The protein has homology with the following sequences in the GENPEPT database:

| alpha subunit [Escherichia coli] | | | |
|---|---|---|---|
| Identities = 110/211 (52%), Positives = 153/211 (72%) | | | |
| Query: | 7 | KEITIKEAVAHVKDGDTIMVGGFMTNGTPEKLIDALVEKGVKDLTLICNDAGFPDKGVGK | 66 |
| | | K +T+++A +DG TIMVGGFM GTP +L++AL+E GV+DLTLI ND F D G+G | |
| Sbjct: | 4 | KLMTLQDATGFFRDGMTIMVGGFMGIGTPSRLVEALLESGVRDLTLIANDTAFVDTGIGP | 63 |
| Query: | 67 | MVANKQFSTIIASHIGLNREAGRQMTEGETVIDLVPQGTLAERIRSGGFGLGGFLTPTGI | 126 |
| | | ++ N + +IASHIG N E GR+M GE + LVPQGTL E+IR GG GLGGFLTPTG+ | |
| Sbjct: | 64 | LIVNGRVRKVIASHIGTNPETGRRMISGEMDVVLVPQGTLIEQIRCGGAGLGGFLTPTGV | 123 |
| Query: | 127 | GTEVAKGKEVITIDGKDYLLEKPLKADVALIFANKADKNGNLQYAGSENNFNHVMAANAK | 186 |
| | | GT V +GK+ +T+DGK +LLE+PL+AD+ALI A++ D GNL Y S NFN ++A A | |
| Sbjct: | 124 | GTVVEEGKQTLTLDGKTWLLERPLRADLALIRAHRCDTLGNLTYQLSARNFNPLIALAAD | 183 |
| Query: | 187 | TTIVEAREIVDVGQMDPNFVHTPGIFVNYLV | 217 |
| | | T+VE E+V+ G++ P+ + TPG +++++ | |
| Sbjct: | 184 | ITLVEPDELVETGELQPDHIVTPGAVIDHII | 214 |

[14651] Based on this analysis, it was predicted that this GAS-specific protein and its epitopes, could be useful antigens for vaccines or diagnostics.

### EXAMPLE 2837

[14652] A DNA sequence (GASx1622) was identified in S. pyogenes <SEQ ID 8173> which encodes the amino acid sequence <SEQ ID 8174>. Analysis of this protein sequence reveals the following:

```
Possible site: 44
>>> Seems to have no N-terminal signal sequence
----- Final Results -----
                            bacterial cytoplasm --- Certainty = 0.4668(Affirmative) < succ>
                              bacterial membrane --- Certainty = 0.0000(Not Clear) < succ>
                                bacterial outside --- Certainty = 0.0000(Not Clear) < succ>
```

[14653] No corresponding DNA sequence was identified in S. agalactiae.

[14654] The protein has homology with the following sequences in the GENPEPT database:

| >GP: AAD54948 GB: AF157306 acetoacetate:butyrate/acetate coenzyme A | | | |
|---|---|---|---|
| transferase [Clostridium beijerinckii] | | | |
| Identities = 121/214 (56%), Positives = 161/214 (74%), Gaps = 5/214 (2%) | | | |
| Query: | 7 | VLSKEEIQTRIAKRVAQELEHNTLVNLGIGLPTKVANYIPEGVTITLQSENGFVGLTGLT | 66 |
| | | VL+KE I AKRVA+EL+ LVNLGIGLPT VANY+P+ + IT +SENG VG+ + | |
| Sbjct: | 6 | VLAKEII----AKRVAKELKKGQLVNLGIGLPTLVANYVPKEMNITFESENGMVGMAQMA | 61 |
| Query: | 67 | DD-HYDPTIVNAGGQPVSIAPGGAFFDSSTSFGIIRGGHVAATVLGALQVDKEASIANYL | 125 |
| | | DP I+NAGG+ V++ P GAFFDSSTSF +IRGGHV VLGAL+VD+E ++AN++ | |
| Sbjct: | 62 | SSGENDPDIINAGGEYVTLLPQGAFFDSSTSFALIRGGHVDVAVLGALEVDEEGNLANWI | 121 |
| Query: | 126 | IPGKMVPGMGGAMDLLVGAKKVIVAMEHTNKGKAKILDKCTLPLTAQNVVNLIITEMGVF | 185 |
| | | +P K+VPGMGGAMDL +GAKK+IVAM+HT KGK KI+ KCTLPLTA+ V+LI+TE+ V | |
| Sbjct: | 122 | VPNKIVPGMGGAMDLAIGAKKIIVAMQHTGKGKPKIVKKCTLPLTAKAQVDLIVTELCVI | 181 |
| Query: | 186 | EYQDEGLCALEINPDYTFEDVQNVTEVTLIDKTN | 219 |
| | | + ++GL EI+ D T ++++ +T+ LI N | |
| Sbjct: | 182 | DVTNDGLLFREIHKDTTIDEIKFLTDADLIIPDN | 215 |

[14655] Based on this analysis, it was predicted that this GAS-specific protein and its epitopes, could be useful antigens for vaccines or diagnostics.

### EXAMPLE 2838

[14656] A DNA sequence (GASx1628R) was identified in S. pyogenes <SEQ ID 8175> which encodes the amino acid sequence <SEQ ID 8176>. Analysis of this protein sequence reveals the following:

```
Possible site: 17
>>> Seems to have no N-terminal signal sequence
----- Final Results -----
                            bacterial cytoplasm --- Certainty = 0.1243(Affirmative) < succ>
                              bacterial membrane --- Certainty = 0.0000(Not Clear) < succ>
                                bacterial outside --- Certainty = 0.0000(Not Clear) < succ>
```

[14657] No corresponding DNA sequence was identified in S. agalactiae.

[14658] The protein has no significant homology with any sequences in the GENPEPT database.

[14659] Based on this analysis, it was predicted that this GAS-specific protein and its epitopes, could be useful antigens for vaccines or diagnostics.

### EXAMPLE 2839

[14660] A DNA sequence (GASx1639R) was identified in S. pyogenes <SEQ ID 8177> which encodes the amino acid sequence <SEQ ID 8178>. Analysis of this protein sequence reveals the following:

| Possible site: 34 | | | | |
|---|---|---|---|---|
| >>> Seems to have an uncleavable N-term signal seq | | | | |
| | INTEGRAL | Likelihood = −8.65 | Transmembrane | 55-71 (44-73) |
| | INTEGRAL | Likelihood = −7.64 | Transmembrane | 13-29 (5-31) |

```
----- Final Results -----
                              bacterial membrane --- Certainty = 0.4461(Affirmative) < succ>
                                bacterial outside --- Certainty = 0.0000(Not Clear) < succ>
                            bacterial cytoplasm --- Certainty = 0.0000(Not Clear) < succ>
```

[14661] No corresponding DNA sequence was identified in S. agalactiae.

[14662] The protein has no significant homology with any sequences in the GENPEPT database.

[14663] Based on this analysis, it was predicted that this GAS-specific protein and its epitopes, could be useful antigens for vaccines or diagnostics.

### EXAMPLE 2840

[14664] A DNA sequence (GASx1643) was identified in S. pyogenes <SEQ ID 8179> which encodes the amino acid sequence <SEQ ID 8180>. Analysis of this protein sequence reveals the following:

Possible site: 35
>>> Seems to have no N-terminal signal sequence
----- Final Results -----
bacterial cytoplasm --- Certainty = 0.0766 (Affirmative) < succ>
bacterial membrane --- Certainty = 0.0000 (Not Clear) < succ>
bacterial outside --- Certainty = 0.0000 (Not Clear) < succ>

[14665] No corresponding DNA sequence was identified in S. agalactiae.

[14666] The protein has no significant homology with any sequences in the GENPEPT database.

[14667] Based on this analysis, it was predicted that this GAS-specific protein and its epitopes, could be useful antigens for vaccines or diagnostics.

### EXAMPLE 2841

[14668] A DNA sequence (GASx1645R) was identified in S. pyogenes <SEQ ID 8181> which encodes the amino acid sequence <SEQ ID 8182>. Analysis of this protein sequence reveals the following:

Possible site: 18
>>> Seems to have a cleavable N-term signal seq.
----- Final Results -----
bacterial outside --- Certainty = 0.3000 (Affirmative) < succ>
bacterial membrane --- Certainty = 0.0000 (Not Clear) < succ>
bacterial cytoplasm --- Certainty = 0.0000 (Not Clear) < succ>

[14669] No corresponding DNA sequence was identified in S. agalactiae.

[14670] The protein has no significant homology with any sequences in the GENPEPT database.

[14671] Based on this analysis, it was predicted that this GAS-specific protein and its epitopes, could be useful antigens for vaccines or diagnostics.

### EXAMPLE 2842

[14672] A DNA sequence (GASx1649R) was identified in S. pyogenes <SEQ ID 8183> which encodes the amino acid sequence <SEQ ID 8184>. Analysis of this protein sequence reveals the following:

Possible site: 24
>>> Seems to have no N-terminal signal sequence
----- Final Results -----
bacterial cytoplasm --- Certainty = 0.0931 (Affirmative) < succ>
bacterial membrane --- Certainty = 0.0000 (Not Clear) < succ>
bacterial outside --- Certainty = 0.0000 (Not Clear) < succ>

[14673] No corresponding DNA sequence was identified in S. agalactiae.

[14674] The protein has no significant homology with any sequences in the GENPEPT database.

[14675] Based on this analysis, it was predicted that this GAS-specific protein and its epitopes, could be useful antigens for vaccines or diagnostics.

### EXAMPLE 2843

[14676] A DNA sequence (GASx1650) was identified in S. pyogenes <SEQ ID 8185> which encodes the amino acid sequence <SEQ ID 8186>. Analysis of this protein sequence reveals the following:

Possible site: 14
>>> Seems to have no N-terminal signal sequence
----- Final Results -----
bacterial cytoplasm --- Certainty = 0.5678 (Affirmative) < succ>
bacterial membrane --- Certainty = 0.0000 (Not Clear) < succ>
bacterial outside --- Certainty = 0.0000 (Not Clear) < succ>

[14677] No corresponding DNA sequence was identified in S. agalactiae.

[14678] The protein has no significant homology with any sequences in the GENPEPT database.

[14679] Based on this analysis, it was predicted that this GAS-specific protein and its epitopes, could be useful antigens for vaccines or diagnostics.

### EXAMPLE 2844

[14680] A DNA sequence (GASx1651R) was identified in S. pyogenes <SEQ ID 8187> which encodes the amino acid sequence <SEQ ID 8188>. Analysis of this protein sequence reveals the following:

Possible site: 40
>>> Seems to have no N-terminal signal sequence
----- Final Results -----
bacterial cytoplasm --- Certainty = 0.2761 (Affirmative) < succ>
bacterial membrane --- Certainty = 0.0000 (Not Clear) < succ>
bacterial outside --- Certainty = 0.0000 (Not Clear) < succ>

[14681] No corresponding DNA sequence was identified in S. agalactiae.

[14682] The protein has no significant homology with any sequences in the GENPEPT database.

[14683] Based on this analysis, it was predicted that this GAS-specific protein and its epitopes, could be useful antigens for vaccines or diagnostics.

### EXAMPLE 2845

[14684] A DNA sequence (GASx1667R) was identified in S. pyogenes <SEQ ID 8189> which encodes the amino acid sequence <SEQ ID 8190>. Analysis of this protein sequence reveals the following:

Possible site: 33
>>> Seems to have no N-terminal signal sequence
----- Final Results -----
bacterial cytoplasm --- Certainty = 0.2967 (Affirmative) < succ>
bacterial membrane --- Certainty = 0.0000 (Not Clear) < succ>
bacterial outside --- Certainty = 0.0000 (Not Clear) < succ>

[14685] No corresponding DNA sequence was identified in S. agalactiae.

[14686] The protein has no significant homology with any sequences in the GENPEPT database.

[14687] Based on this analysis, it was predicted that this GAS-specific protein and its epitopes, could be useful antigens for vaccines or diagnostics.

### EXAMPLE 2846

[14688] A DNA sequence (GASx1672) was identified in S. pyogenes <SEQ ID 8191> which encodes the amino acid sequence <SEQ ID 8192>. Analysis of this protein sequence reveals the following:

| Possible site: 24 | | | |
|---|---|---|---|
| >>> Seems to have an uncleavable N-term signal seq | | | |
| INTEGRAL | Likelihood = −3.82 | Transmembrane | 3-19 (1-20) |

----- Final Results -----
bacterial membrane --- Certainty = 0.2529 (Affirmative) < succ>
bacterial outside --- Certainty = 0.0000 (Not Clear) < succ>
bacterial cytoplasm --- Certainty = 0.0000 (Not Clear) < succ>

[14689] No corresponding DNA sequence was identified in S. agalactiae.

[14690] The protein has no significant homology with any sequences in the GENPEPT database.

[14691] Based on this analysis, it was predicted that this GAS-specific protein and its epitopes, could be useful antigens for vaccines or diagnostics.

### EXAMPLE 2847

[14692] A DNA sequence (GASx1673R) was identified in S. pyogenes <SEQ ID 8193> which encodes the amino acid sequence <SEQ ID 8194>. Analysis of this protein sequence reveals the following:

| Possible site: 38 | | | |
|---|---|---|---|
| >>> Seems to have no N-terminal signal sequence | | | |
| INTEGRAL | Likelihood = −8.86 | Transmembrane | 51-67 (47-75) |
| INTEGRAL | Likelihood = −5.20 | Transmembrane | 27-43 (24-45) |
| INTEGRAL | Likelihood = −3.66 | Transmembrane | 112-128 (112-131) |

----- Final Results -----
bacterial membrane --- Certainty = 0.4545 (Affirmative) < succ>
bacterial outside --- Certainty = 0.0000 (Not Clear) < succ>
bacterial cytoplasm --- Certainty = 0.0000 (Not Clear) < succ>

[14693] No corresponding DNA sequence was identified in S. agalactiae.

[14694] The protein has homology with the following sequences in the GENPEPT database:

| >GP: AAF41294 GB: AE002440 conserved hypothetical protein [Neisseria | | | |
|---|---|---|---|
| meningitidis MC58] | | | |
| Identities = 61/148 (41%), Positives = 96/148 (64%) | | | |
| Query: | 1 | LKKSITNEKAILAQGGQEFGAQNTKFLTLLHIMIYVFAVIEALLKQIKFDGISFLGLLLM | 60 |
| | | L SI +EKA++A+G +++G N+ L +H + Y+ + L F+GIS +G L + | |
| Sbjct: | 19 | LAVSIKHEKALIAKGAKQYGKTNSTLLAAVHTLYYLACFVWVWLSDTAFNGISLIGTLTV | 78 |
| Query: | 61 | LLSVAVLYEVTRILGDIWTVKLMLAKDHKYVDHWLFKTIKHPNYFLNIAPELVGIALLCH | 120 |
| | | + S +L + + LG+IWTVK+ + +H+ WLFKT +HPNYFLNI PEL+GIALLC | |
| Sbjct: | 79 | MASFVILSLIIKQLGEIWTVKIYILPNHQINRSWLFKTFRHPNYFLNIIPELIGIALLCQ | 138 |
| Query: | 121 | AKITAMLLFPCYIVVIYLRIREENKLLA | 148 |
| | | A ++ P Y++V++ RIR+E + +A | |
| Sbjct: | 139 | AWYVLLIGLPIYLLVLFKRIRQEEQAMA | 166 |

[14695] A related GBS gene <SEQ ID 9009> and protein <SEQ ID 9010> were also identified. Analysis of this protein sequence reveals the following:

| Lipop: Possible site: −1 Crend: 0 | | | |
|---|---|---|---|
| McG: Discrim Score: 5.86 | | | |
| GvH: Signal Score (−7.5): 0.14 | | | |
| Possible site: 60 | | | |
| >>> Seems to have a cleavable N-term signal seq. | | | |
| ALOM program | count: 2 | value: −8.23 | threshold: 0.0 |

| | | | |
|---|---|---|---|
| INTEGRAL | Likelihood = −8.23 | Transmembrane | 69-85 (64-89) |
| INTEGRAL | Likelihood = −3.29 | Transmembrane | 142-158 (140-159) |

| | | |
|---|---|---|
| PERIPHERAL | Likelihood = 1.70 | 123 |

modified ALOM score: 2.15
*** Reasoning Step: 3
----- Final Results -----
bacterial membrane --- Certainty = 0.4291 (Affirmative) < succ>
bacterial outside --- Certainty = 0.0000 (Not Clear) < succ>
bacterial cytoplasm --- Certainty = 0.0000 (Not Clear) < succ>

[14696] The protein has homology with the following sequences in the databases:

[chemical structure]

[14697] Based on this analysis, it was predicted that these proteins and their epitopes could be useful antigens for vaccines or diagnostics.

### EXAMPLE 2848

[14698] A DNA sequence (GASx1674R) was identified in S. pyogenes <SEQ ID 8195> which encodes the amino acid sequence <SEQ ID 8196>. Analysis of this protein sequence reveals the following:

```
Possible site: 23
>>> Seems to have no N-terminal signal sequence
----- Final Results -----
                            bacterial cytoplasm --- Certainty = 0.3098(Affirmative) < succ>
                              bacterial membrane --- Certainty = 0.0000(Not Clear) < succ>
                                bacterial outside --- Certainty = 0.0000(Not Clear) < succ>
```

[14699] No corresponding DNA sequence was identified in S. agalactiae.

[14700] The protein has no significant homology with any sequences in the GENPEPT database.

[14701] Based on this analysis, it was predicted that this GAS-specific protein and its epitopes, could be useful antigens for vaccines or diagnostics.

### EXAMPLE 2849

[14702] A DNA sequence (GASx1677R) was identified in S. pyogenes <SEQ ID 8197> which encodes the amino acid sequence <SEQ ID 8198>. Analysis of this protein sequence reveals the following:

| Possible site: 33 | | | | |
|---|---|---|---|---|
| >>> Seems to have no N-terminal signal sequence | | | | |
| | INTEGRAL | Likelihood = −8.86 | Transmembrane | 254-270 (248-280) |
| | INTEGRAL | Likelihood = −7.01 | Transmembrane | 303-319 (296-322) |
| | INTEGRAL | Likelihood = −2.39 | Transmembrane | 74-90 (74-91) |
| | INTEGRAL | Likelihood = −1.91 | Transmembrane | 201-217 (199-217) |
| | INTEGRAL | Likelihood = −1.91 | Transmembrane | 223-239 (220-240) |
| | INTEGRAL | Likelihood = −1.65 | Transmembrane | 118-134 (115-135) |
| | INTEGRAL | Likelihood = −1.49 | Transmembrane | 56-72 (55-72) |
| | INTEGRAL | Likelihood = −0.32 | Transmembrane | 13-29 (13-30) |

```
----- Final Results -----
                              bacterial membrane --- Certainty = 0.4545(Affirmative) < succ>
                                bacterial outside --- Certainty = 0.0000(Not Clear) < succ>
                            bacterial cytoplasm --- Certainty = 0.0000(Not Clear) < succ>
```

[14703] No corresponding DNA sequence was identified in S. agalactiae.

[14704] The protein has homology with the following sequences in the GENPEPT database:

| >GP: BAB05126 GB: AP001511 unknown conserved protein | | | |
|---|---|---|---|
| [Bacillus halodurans] | | | |
| Identities = 249/534 (46%), Positives = 380/534 (70%) | | | |
| Query: | 12 | QDIAFHFFGGLGLFLFSIKYMGDGLQQAAGDKLRYYIDKYTSNPFFGILVGIAMSALIQS | 71 |
| | | Q + F FFGGLG+FLF IKYMGDGLQ+ AG++LR +DK+T+NP G+L GI ++ L+Q+ | |
| Sbjct: | 6 | QTLLFMFFGGLGIFLFGIKYMGDGLQKVAGERLRDLLDKFTTNPLMGVLAGIVVTVLLQT | 65 |
| Query: | 72 | SSGVTVITVGLVSAGLLNLRQAIGIVMGANIGTTITSFLIGFKLGDYALPMIFIGAACLF | 131 |
| | | S+G TV+T+GLV+AG + L+QAIG++MGANIGTT+T+F+IG K+ +YALP+I +GAA +F | |
| Sbjct: | 66 | STGTTVLTIGLVNAGFMTLKQAIGVIMGANIGTTVTAFIIGIKISEYALPIIAVGAALIF | 125 |
| Query: | 132 | FTSNKKLNNFGRIIFGVGGIFFSLNLMGDAMDPLKSVSAFQNYLATLGDKPFQGVFIGTA | 191 |
| | | F NKK+NN G++IFG G +F+ LN MG+ ++PL+ + AF + ++ + P GV IGT | |
| Sbjct: | 126 | FIKNKKVNNIGQVIFGFGTLFYGLNTMGEGLNPLRELQAFADLTVSMSENPLLGVLIGTI | 185 |
| Query: | 192 | LTMLIQSSAAIIGILQGLFSGGLLTLQGAIPILLGSNIGTCITAVLAAIGSNIAAKRVAA | 251 |
| | | T +QSS+A IG+LQ L+ G + L A+P+L G NIGT ITAVLAAIG+++AAKR A | |
| Sbjct: | 186 | FTAAVQSSSASIGLLQQLYDQGAMDLFAALPVLFGDNIGTTITAVLAAIGASVAAKRAAL | 245 |
| Query: | 252 | AHVLFNLIGTIIFMIILVPFTSLMLWLQSKLSLTPEMTIAFSHGSFNITNTILLIPFISL | 311 |
| | | HV+FNLIGTII +II++PFT + +L +L MTIAF+HG FN++NTI+ PFI + | |
| Sbjct: | 246 | THVIFNLIGTIIVLIIIIPFTHFIAYLAEVFALNRPMTIAFAHGIFNVSNTIIQFPFIGI | 305 |
| Query: | 312 | LAMIVTRLIPGEDEVVKYEALYLDRLLITQAPSIALGNAHKELVHLASYAIQAFEASYSY | 371 |
| | | LA+IVT+L+PG+D ++Y+A +LD + +P+IALG A +E++ +A ++ + Y | |
| Sbjct: | 306 | LAIIVTKLVPGDDFYIEYKAKHLDPRFVGSSPAIALGQAKQEVLRMAEFSEKGLLEVSKY | 365 |
| Query: | 372 | IMTADGKFGEKVKRYERAVDTIDEELTTYLVDISNEALSPSENEVLAGILDSSRDLERIG | 431 |
| | | + K E ++E A++ +D ++T YL+ IS+ +LS ++++ ++D+ RD+ERIG | |
| Sbjct: | 366 | MENGQKKHAEMAVQFEDAINNLDRKITEYLISISSRSLSAQDSKMHGMLMDTVRDIERIG | 425 |
| Query: | 432 | DHSESLGILIEGIISKQIGFSISARQELTEMYQLTHCLTLDAIRAIVDSDTDLAQTIVTR | 491 |
| | | DH E++ L + + ++ S A +L EM+ LTH +AI ++ D + A++++ + | |
| Sbjct: | 426 | DHIENIVELKDYQKANKVKISEKALHDLQEMFDLTHSTLTEAIMSLETGDLEAARSVIEK | 485 |
| Query: | 492 | HKEIEEKERRLRKTHIKRLNCGECTAQAGINFIDIISHYTRITDHALNLAEKVL | 545 |
| | | + I++ ER+LRK HI R+N G CT AGI F+DI+S+ RI DH++N+AE V+ | |
| Sbjct: | 486 | EEHIDQMERKLRKQHIIRVNEGNCTGAAGIVFVDIVSNLERIGDHSVNIAEAVI | 539 |

[14705] Based on this analysis, it was predicted that this GAS-specific protein and its epitopes, could be useful antigens for vaccines or diagnostics.

### EXAMPLE 2850

[14706] A DNA sequence (GASx1678R) was identified in S. pyogenes <SEQ ID 8199> which encodes the amino acid sequence <SEQ ID 8200>. Analysis of this protein sequence reveals the following:

```
Possible site: 48
>>> Seems to have no N-terminal signal sequence
----- Final Results -----
                            bacterial cytoplasm --- Certainty = 0.2940(Affirmative) < succ>
                              bacterial membrane --- Certainty = 0.0000(Not Clear) < succ>
                                bacterial outside --- Certainty = 0.0000(Not Clear) < succ>
```

[14707] No corresponding DNA sequence was identified in S. agalactiae.

[14708] The protein has no significant homology with any sequences in the GENPEPT database.

[14709] Based on this analysis, it was predicted that this GAS-specific protein and its epitopes, could be useful antigens for vaccines or diagnostics.

### EXAMPLE 2851

[14710] A DNA sequence (GASx1685R) was identified in S. pyogenes <SEQ ID 8201> which encodes the amino acid sequence <SEQ ID 8202>. Analysis of this protein sequence reveals the following:

| Possible site: 22 | | | | |
|---|---|---|---|---|
| >>> Seems to have an uncleavable N-term signal seq | | | | |
| | INTEGRAL | Likelihood = −7.11 | Transmembrane | 13-29 (9-31) |

```
----- Final Results -----
                              bacterial membrane --- Certainty = 0.3845(Affirmative) < succ>
                                bacterial outside --- Certainty = 0.0000(Not Clear) < succ>
                            bacterial cytoplasm --- Certainty = 0.0000(Not Clear) < succ>
```

[14711] No corresponding DNA sequence was identified in S. agalactiae.

[14712] The protein has no significant homology with any sequences in the GENPEPT database.

[14713] Based on this analysis, it was predicted that this GAS-specific protein and its epitopes, could be useful antigens for vaccines or diagnostics.

### EXAMPLE 2852

[14714] A DNA sequence (GASx1695R) was identified in S. pyogenes <SEQ ID 8203> which encodes the amino acid sequence <SEQ ID 8204>. Analysis of this protein sequence reveals the following:

```
Possible site: 15
>>> Seems to have no N-terminal signal sequence
----- Final Results -----
                            bacterial cytoplasm --- Certainty = 0.1357(Affirmative) < succ>
                              bacterial membrane --- Certainty = 0.0000(Not Clear) < succ>
                                bacterial outside --- Certainty = 0.0000(Not Clear) < succ>
```

[14715] No corresponding DNA sequence was identified in S. agalactiae.

[14716] The protein has no significant homology with any sequences in the GENPEPT database.

[14717] Based on this analysis, it was predicted that this GAS-specific protein and its epitopes, could be useful antigens for vaccines or diagnostics.

### EXAMPLE 2853

[14718] A DNA sequence (GASx1698) was identified in S. pyogenes <SEQ ID 8205> which encodes the amino acid sequence <SEQ ID 8206>. Analysis of this protein sequence reveals the following:

```
Possible site: 33
>>> Seems to have no N-terminal signal sequence
----- Final Results -----
                            bacterial cytoplasm --- Certainty = 0.1970(Affirmative) < succ>
                              bacterial membrane --- Certainty = 0.0000(Not Clear) < succ>
                                bacterial outside --- Certainty = 0.0000(Not Clear) < succ>
```

[14719] No corresponding DNA sequence was identified in S. agalactiae.

[14720] The protein has no significant homology with any sequences in the GENPEPT database.

[14721] Based on this analysis, it was predicted that this GAS-specific protein and its epitopes, could be useful antigens for vaccines or diagnostics.

### EXAMPLE 2854

[14722] A DNA sequence (GASx1713) was identified in S. pyogenes <SEQ ID 8207> which encodes the amino acid sequence <SEQ ID 8208>. Analysis of this protein sequence reveals the following:

```
Possible site: 44
>>> Seems to have no N-terminal signal sequence
----- Final Results -----
                            bacterial cytoplasm --- Certainty = 0.3092(Affirmative) < succ>
                              bacterial membrane --- Certainty = 0.0000(Not Clear) < succ>
                                bacterial outside --- Certainty = 0.0000(Not Clear) < succ>
```

[14723] No corresponding DNA sequence was identified in S. agalactiae.

[14724] The protein has no significant homology with any sequences in the GENPEPT database.

[14725] Based on this analysis, it was predicted that this GAS-specific protein and its epitopes, could be useful antigens for vaccines or diagnostics.

### EXAMPLE 2855

[14726] A DNA sequence (GASx1737) was identified in S. pyogenes <SEQ ID 8209> which encodes the amino acid sequence <SEQ ID 8210>. Analysis of this protein sequence reveals the following:

```
Possible site: 13
>>> Seems to have no N-terminal signal sequence
----- Final Results -----
                            bacterial cytoplasm --- Certainty = 0.1878(Affirmative) < succ>
                              bacterial membrane --- Certainty = 0.0000(Not Clear) < succ>
                                bacterial outside --- Certainty = 0.0000(Not Clear) < succ>
```

[14727] No corresponding DNA sequence was identified in S. agalactiae.

[14728] The protein has no significant homology with any sequences in the GENPEPT database.

[14729] Based on this analysis, it was predicted that this GAS-specific protein and its epitopes, could be useful antigens for vaccines or diagnostics.

### EXAMPLE 2856

[14730] A DNA sequence (GASx1748R) was identified in S. pyogenes <SEQ ID 8211> which encodes the amino acid sequence <SEQ ID 8212>. Analysis of this protein sequence reveals the following:

```
Possible site: 23
>>> Seems to have no N-terminal signal sequence
----- Final Results -----
                            bacterial cytoplasm --- Certainty = 0.2841(Affirmative) < succ>
                              bacterial membrane --- Certainty = 0.0000(Not Clear) < succ>
                                bacterial outside --- Certainty = 0.0000(Not Clear) < succ>
```

[14731] No corresponding DNA sequence was identified in S. agalactiae.

[14732] The protein has no significant homology with any sequences in the GENPEPT database.

[14733] Based on this analysis, it was predicted that this GAS-specific protein and its epitopes, could be useful antigens for vaccines or diagnostics.

### EXAMPLE 2857

[14734] A DNA sequence (GASx1750R) was identified in S. pyogenes <SEQ ID 8213> which encodes the amino acid sequence <SEQ ID 8214>. Analysis of this protein sequence reveals the following:

| Possible site: 59 | | | | |
|---|---|---|---|---|
| >>> Seems to have no N-terminal signal sequence | | | | |
| | INTEGRAL | Likelihood = −1.22 | Transmembrane | 18-34 (18-34) |

```
----- Final Results -----
                              bacterial membrane --- Certainty = 0.1489(Affirmative) < succ>
                                bacterial outside --- Certainty = 0.0000(Not Clear) < succ>
                            bacterial cytoplasm --- Certainty = 0.0000(Not Clear) < succ>
```

[14735] No corresponding DNA sequence was identified in S. agalactiae.

[14736] The protein has no significant homology with any sequences in the GENPEPT database.

[14737] Based on this analysis, it was predicted that this GAS-specific protein and its epitopes, could be useful antigens for vaccines or diagnostics.

### EXAMPLE 2858

[14738] A DNA sequence (GASx1754) was identified in S. pyogenes <SEQ ID 8215> which encodes the amino acid sequence <SEQ ID 8216>. Analysis of this protein sequence reveals the following:

```
Possible site: 44
>>> Seems to have an uncleavable N-term signal seq
----- Final Results -----
                              bacterial membrane --- Certainty = 0.0000(Not Clear) < succ>
                                bacterial outside --- Certainty = 0.0000(Not Clear) < succ>
                            bacterial cytoplasm --- Certainty = 0.0000(Not Clear) < succ>
```

[14739] No corresponding DNA sequence was identified in S. agalactiae.

[14740] The protein has no significant homology with any sequences in the GENPEPT database.

[14741] Based on this analysis, it was predicted that this GAS-specific protein and its epitopes, could be useful antigens for vaccines or diagnostics.

### EXAMPLE 2859

[14742] A DNA sequence (GASx1759) was identified in S. pyogenes <SEQ ID 8217> which encodes the amino acid sequence <SEQ ID 8218>. Analysis of this protein sequence reveals the following:

```
Possible site: 36
>>> Seems to have no N-terminal signal sequence
----- Final Results -----
                            bacterial cytoplasm --- Certainty = 0.1534(Affirmative) < succ>
                              bacterial membrane --- Certainty = 0.0000(Not Clear) < succ>
                                bacterial outside --- Certainty = 0.0000(Not Clear) < succ>
```

[14743] No corresponding DNA sequence was identified in S. agalactiae.

[14744] The protein has no significant homology with any sequences in the GENPEPT database.

[14745] Based on this analysis, it was predicted that this GAS-specific protein and its epitopes, could be useful antigens for vaccines or diagnostics.

### EXAMPLE 2860

[14746] A DNA sequence (GASx1764R) was identified in S. pyogenes <SEQ ID 8219> which encodes the amino acid sequence <SEQ ID 8220>. Analysis of this protein sequence reveals the following:

| Possible site: 29 | | | | |
|---|---|---|---|---|
| >>> Seems to have a cleavable N-term signal seq. | | | | |
| | INTEGRAL | Likelihood = −6.74 | Transmembrane | 90-106 (87-121) |
| | INTEGRAL | Likelihood = −4.57 | Transmembrane | 210-226 (205-229) |
| | INTEGRAL | Likelihood = −4.19 | Transmembrane | 43-59 (42-62) |
| | INTEGRAL | Likelihood = −3.77 | Transmembrane | 137-153 (137-155) |

```
----- Final Results -----
                              bacterial membrane --- Certainty = 0.3697(Affirmative) < succ>
                                bacterial outside --- Certainty = 0.0000(Not Clear) < succ>
                            bacterial cytoplasm --- Certainty = 0.0000(Not Clear) < succ>
```

[14747] No corresponding DNA sequence was identified in S. agalactiae.

[14748] The protein has no significant homology with any sequences in the GENPEPT database.

[14749] Based on this analysis, it was predicted that this GAS-specific protein and its epitopes, could be useful antigens for vaccines or diagnostics.

### EXAMPLE 2861

[14750] A DNA sequence (GASx1768R) was identified in S. pyogenes <SEQ ID 8221> which encodes the amino acid sequence <SEQ ID 8222>. Analysis of this protein sequence reveals the following:

| Possible site: 17 | | | | |
|---|---|---|---|---|
| >>> Seems to have an uncleavable N-term signal seq | | | | |
| | INTEGRAL | Likelihood = −12.37 | Transmembrane | 26-42 (17-47) |
| | INTEGRAL | Likelihood = −7.54 | Transmembrane | 53-69 (46-73) |
| | INTEGRAL | Likelihood = −3.29 | Transmembrane | 209-225 (209-225) |
| | INTEGRAL | Likelihood = −2.13 | Transmembrane | 82-98 (82-98) |
| | INTEGRAL | Likelihood = −1.65 | Transmembrane | 9-25 (9-25) |
| | INTEGRAL | Likelihood = −0.85 | Transmembrane | 117-133 (117-134) |

```
----- Final Results -----
                              bacterial membrane --- Certainty = 0.5946(Affirmative) < succ>
                                bacterial outside --- Certainty = 0.0000(Not Clear) < succ>
                            bacterial cytoplasm --- Certainty = 0.0000(Not Clear) < succ>
```

[14751] No corresponding DNA sequence was identified in S. agalactiae.

[14752] The protein has homology with the following sequences in the GENPEPT database:

| >GP: AAB84959 GB: AE000829 conserved protein [Methanobacterium | | | |
|---|---|---|---|
| thermoautotrophicum] | | | |
| Identities = 54/192 (28%), Positives = 90/192 (46%), Gaps = 6/192 (3%) | | | |
| Query: | 7 | TKLLLLVLANACFFFRVDGFLEFIIVIFLLLLLSALNKKKLA--FKLAVVYLLMIGLSVI | 64 |
| | | +KL ++V A F D L I+ + L++ + A F ++ ++ L++I | |
| Sbjct: | 32 | SKLTVVVSATLLSTFISDLTLLIIMGVIFTALIAHSGSLRFAAPFLSFIILFWLVSLAII | 91 |
| Query: | 65 | PLSIFPSYLDHLLSFVSIAGRLVFPSLLAGLITIKTTTIYELVHGLRKWRFPEVWLLTLA | 124 |
| | | + S H + F+S+ F AGL TT +L LR R P + TL | |
| Sbjct: | 92 | MVL---SGNPHTMGFLSLFFARFFIISAAGLSFAFTTEPQKLAESLRSVRIPGEIVFTLT | 148 |
| Query: | 125 | VMCRFIPMIRQECCVIHRSLKIRGIILTKWSILIRPKQYLEYLMVPLLLSLIRSSQELTI | 184 |
| | | V R+IP + E I SLK+R L+ SI+ RP L++P+++ ++ S E+ I | |
| Sbjct: | 149 | VALRYIPALAVEASSIWDSLKLR-TSLSGSSIIRRPSLLYRGLIIPMIIRTVKISDEVAI | 207 |
| Query: | 185 | ASLTKGLAVNKG | 196 |
| | | A+ T+G +G | |
| Sbjct: | 208 | AAETRGFNPREG | 219 |

[14753] Based on this analysis, it was predicted that this GAS-specific protein and its epitopes, could be useful antigens for vaccines or diagnostics.

### EXAMPLE 2862

[14754] A DNA sequence (GASx1769R) was identified in S. pyogenes <SEQ ID 8223> which encodes the amino acid sequence <SEQ ID 8224>. Analysis of this protein sequence reveals the following:

| Possible site: 16 | | | | |
|---|---|---|---|---|
| >>> Seems to have a cleavable N-term signal seq. | | | | |
| | INTEGRAL | Likelihood = −7.32 | Transmembrane | 164-180 (158-186) |
| | INTEGRAL | Likelihood = −4.67 | Transmembrane | 85-101 (84-105) |
| | INTEGRAL | Likelihood = −3.03 | Transmembrane | 42-58 (42-61) |
| | INTEGRAL | Likelihood = −2.76 | Transmembrane | 118-134 (117-134) |
| | INTEGRAL | Likelihood = −2.07 | Transmembrane | 64-80 (64-82) |
| | INTEGRAL | Likelihood = −1.22 | Transmembrane | 18-34 (17-34) |

```
----- Final Results -----
                              bacterial membrane --- Certainty = 0.3930(Affirmative) < succ>
                                bacterial outside --- Certainty = 0.0000(Not Clear) < succ>
                            bacterial cytoplasm --- Certainty = 0.0000(Not Clear) < succ>
```

[14755] No corresponding DNA sequence was identified in S. agalactiae.

[14756] The protein has no significant homology with any sequences in the GENPEPT database.

[14757] Based on this analysis, it was predicted that this GAS-specific protein and its epitopes, could be useful antigens for vaccines or diagnostics.

### EXAMPLE 2863

[14758] A DNA sequence (GASx1776R) was identified in S. pyogenes <SEQ ID 8225> which encodes the amino acid sequence <SEQ ID 8226>. Analysis of this protein sequence reveals the following:

| Possible site: 21 | | | | |
|---|---|---|---|---|
| >>> Seems to have an uncleavable N-term signal seq | | | | |
| | INTEGRAL | Likelihood = −6.37 | Transmembrane | 4-20 (1-22) |
| | INTEGRAL | Likelihood = −0.43 | Transmembrane | 261-277 (261-278) |

```
----- Final Results -----
                              bacterial membrane --- Certainty = 0.3548(Affirmative) < succ>
                                bacterial outside --- Certainty = 0.0000(Not Clear) < succ>
                            bacterial cytoplasm --- Certainty = 0.0000(Not Clear) < succ>
```

[14759] No corresponding DNA sequence was identified in S. agalactiae.

[14760] The protein has no significant homology with any sequences in the GENPEPT database.

[14761] Based on this analysis, it was predicted that this GAS-specific protein and its epitopes, could be useful antigens for vaccines or diagnostics.

### EXAMPLE 2864

[14762] A DNA sequence (GASx1777R) was identified in S. pyogenes <SEQ ID 8227> which encodes the amino acid sequence <SEQ ID 8228>. Analysis of this protein sequence reveals the following:

| Possible site: 24 | | | | |
|---|---|---|---|---|
| >>> Seems to have no N-terminal signal sequence | | | | |
| | INTEGRAL | Likelihood = −8.17 | Transmembrane | 1217-1233 (1215-1235) |

```
----- Final Results -----
                              bacterial membrane --- Certainty = 0.4270(Affirmative) < succ>
                                bacterial outside --- Certainty = 0.0000(Not Clear) < succ>
                            bacterial cytoplasm --- Certainty = 0.0000(Not Clear) < succ>
```

[14763] No corresponding DNA sequence was identified in S. agalactiae.

[14764] The protein has homology with the following sequences in the GENPEPT database:

| >GP: AAF53254 GB: AE003639 CG16974 gene product | | | |
|---|---|---|---|
| [Drosophila melanogaster] | | | |
| Identities = 84/238 (35%), Positives = 133/238 (55%), | | | |
| Gaps = 10/238 (4%) | | | |
| Query: | 516 | LRLDHYELTDISLL--KHAKNITELHLDGNQITEIPKELFSQMKQLRFLNLRSNHLTYLD | 573 |
| | | L + L++ SLL ++ K + ELHLD +++T +P+ ++ +LR LNL N LT L | |
| Sbjct: | 232 | LEMSGNRLSNCSLLNLQYMKQLQELHLDRSELTYLPQRFLGELSELRMLNLSQNLLTELP | 291 |
| Query: | 574 | KDTFKSNAQLRELYLSSNFIHSLEGGLFQSLHHLEQLDLSKNRIGRLCDNPFEGLSRLTS | 633 |
| | | +D F +L LYLS N + L LFQ+ L+ LDLS NR+ DN F +L | |
| Sbjct: | 292 | RDIFVGALKLERLYLSGNRLSVLPFMLFQTAADLQVLDLSDNRLLSFPDNFFARNGQLRQ | 351 |
| Query: | 634 | LGFAENSLEEIPEKALEPLTSLNFIDLSQNNLALLP-KTIEKLRALSTIVASRNHITRID | 692 |
| | | L N L+ I + +L L L +DLSQN+L+++ K E L L + S N++T + | |
| Sbjct: | 352 | LHLQRNQLKSIGKHSLYSLRELRQLDLSQNSLSVIDRKAFESLDHLLALNVSGNNLTLLS | 411 |
| Query: | 693 | NISFKNLPKLSVLDLSTNEISNLPNGIFKQNNQL-------TKLDFFNNLLTQVEESV | 743 |
| | | +I F++L L LDLS N+ LP+G+F++ L T ++ F+N +++ +ES+ | |
| Sbjct: | 412 | SIIFQSLHALRQLDLSRNQFKQLPSGLFQRQRSLVLLRIDETPIEQFSNWISRYDESL | 469 |

[14765] Based on this analysis, it was predicted that this GAS-specific protein and its epitopes, could be useful antigens for vaccines or diagnostics.

### EXAMPLE 2865

[14766] A DNA sequence (GASx1778R) was identified in S. pyogenes <SEQ ID 8229> which encodes the amino acid sequence <SEQ ID 8230>. Analysis of this protein sequence reveals the following:

```
Possible site: 39
>>> Seems to have no N-terminal signal sequence
----- Final Results -----
                            bacterial cytoplasm --- Certainty = 0.1067(Affirmative) < succ>
                              bacterial membrane --- Certainty = 0.0000(Not Clear) < succ>
                                bacterial outside --- Certainty = 0.0000(Not Clear) < succ>
```

[14767] No corresponding DNA sequence was identified in S. agalactiae.

[14768] The protein has no significant homology with any sequences in the GENPEPT database.

[14769] Based on this analysis, it was predicted that this GAS-specific protein and its epitopes, could be useful antigens for vaccines or diagnostics.

### EXAMPLE 2866

[14770] A DNA sequence (GASx1779) was identified in S. pyogenes <SEQ ID 8231> which encodes the amino acid sequence <SEQ ID 8232>. Analysis of this protein sequence reveals the following:

```
Possible site: 17
>>> Seems to have no N-terminal signal sequence
----- Final Results -----
                            bacterial cytoplasm --- Certainty = 0.1885(Affirmative) < succ>
                              bacterial membrane --- Certainty = 0.0000(Not Clear) < succ>
                                bacterial outside --- Certainty = 0.0000(Not Clear) < succ>
```

[14771] No corresponding DNA sequence was identified in S. agalactiae.

[14772] The protein has no significant homology with any sequences in the GENPEPT database.

[14773] Based on this analysis, it was predicted that this GAS-specific protein and its epitopes, could be useful antigens for vaccines or diagnostics.

### EXAMPLE 2867

[14774] A DNA sequence (GASx1786R) was identified in S. pyogenes <SEQ ID 8233> which encodes the amino acid sequence <SEQ ID 8234>. Analysis of this protein sequence reveals the following:

```
Possible site: 19
>>> Seems to have no N-terminal signal sequence
----- Final Results -----
                            bacterial cytoplasm --- Certainty = 0.0612(Affirmative) < succ>
                              bacterial membrane --- Certainty = 0.0000(Not Clear) < succ>
                                bacterial outside --- Certainty = 0.0000(Not Clear) < succ>
```

[14775] No corresponding DNA sequence was identified in S. agalactiae.

[14776] The protein has no significant homology with any sequences in the GENPEPT database.

[14777] Based on this analysis, it was predicted that this GAS-specific protein and its epitopes, could be useful antigens for vaccines or diagnostics.

### EXAMPLE 2868

[14778] A DNA sequence (GASx1790) was identified in S. pyogenes <SEQ ID 8235> which encodes the amino acid sequence <SEQ ID 8236>. Analysis of this protein sequence reveals the following:

```
Possible site: 13
>>> Seems to have a cleavable N-term signal seq.
----- Final Results -----
                                bacterial outside --- Certainty = 0.3000(Affirmative) < succ>
                              bacterial membrane --- Certainty = 0.0000(Not Clear) < succ>
                            bacterial cytoplasm --- Certainty = 0.0000(Not Clear) < succ>
```

[14779] No corresponding DNA sequence was identified in S. agalactiae.

[14780] The protein has no significant homology with any sequences in the GENPEPT database.

[14781] Based on this analysis, it was predicted that this GAS-specific protein and its epitopes, could be useful antigens for vaccines or diagnostics.

### EXAMPLE 2869

[14782] A DNA sequence (GASx1791R) was identified in S. pyogenes <SEQ ID 8237> which encodes the amino acid sequence <SEQ ID 8238>. Analysis of this protein sequence reveals the following:

| Possible site: 43 | | | | |
|---|---|---|---|---|
| >>> Seems to have no N-terminal signal sequence | | | | |
| | INTEGRAL | Likelihood = −0.90 | Transmembrane | 28-44 (28-44) |

```
----- Final Results -----
                              bacterial membrane --- Certainty = 0.1362(Affirmative) < succ>
                                bacterial outside --- Certainty = 0.0000(Not Clear) < succ>
                            bacterial cytoplasm --- Certainty = 0.0000(Not Clear) < succ>
```

[14783] A related sequence was also identified in GAS <SEQ ID 9155> which encodes the amino acid sequence <SEQ ID 9156>. Analysis of this protein sequence reveals the following:

Possible site: 25
>>> Seems to have a cleavable N-term signal seq.
----- Final Results -----
bacterial outside --- Certainty = 0.300 (Affirmative) < succ>
bacterial membrane --- Certainty = 0.000 (Not Clear) < succ>
bacterial cytoplasm --- Certainty = 0.000 (Not Clear) < succ>

[14784] No corresponding DNA sequence was identified in S. agalactiae.

[14785] The protein has homology with the following sequences in the GENPEPT database:

| >GP: AAA24923 GB: L06331 endoglycosidase [Chryseobacterium | | | |
|---|---|---|---|
| meningosepticum] | | | |
| Identities = 105/322 (32%), Positives = 153/322 (46%), | | | |
| Gaps = 53/322 (16%) | | | |
| Query: | 106 | ADKQAQELAKMKIPEKIPMKPLHGSLYGGYFRTWHDKTSDPTEKDKVNSMGELPKEVDLA | 165 |
| | | A K ++ + + I K + GY+RTW D T + SM LP +D+ | |
| Sbjct: | 37 | AQKSGVTVSAVNLSNLIAYKNSDHQISAGYYRTWRDSA---TASGNLPSMRWLPDSLDMV | 93 |
| Query: | 166 | FIFHDWTKDYSLFWKELATKHVPKLNKQGTRVIRTIPWRFLAGGDNSGIAEDTSKYPNTP | 225 |
| | | +F D+T + +W L T +VP L+K+GT+VI T+ G NS T+ | |
| Sbjct: | 94 | MVFPDYTPPENAYWNTLKTNYVPYLHKRGTKVIITL------GDLNSA----TTTGGQDS | 143 |
| Query: | 226 | EGNKALAKAIVDEYVYKYNLDGLDVDVEHDSIPKVDKKEDTAGVERSIQVFEEIGKLIGP | 285 |
| | | G + AK I D++V +YNLDG+D+D+E A + + + + + K GP | |
| Sbjct: | 144 | IGYSSWAKGIYDKWVGEYNLDGIDIDIE--------SSPSGATLTKFVAATKALSKYFGP | 195 |
| Query: | 286 | KGVDKSRLFIMDSTYMADKNP--LIERGAPYINLLLVQVYGSQGEKGGWEPVSNRPEKTM | 343 |
| | | K + F+ D+ ++NP + AP N + +Q YG R + | |
| Sbjct: | 196 | KS-GTGKTFVYDT----NQNPTNFFIQTAPRYNYVFLQAYG-------------RSTTNL | 237 |
| Query: | 344 | EERWQGYSKYIRPEQYMIGFSFYEENAQEGNLWYDINSRKDEDKANGINTDITGTRAERY | 403 |
| | | Y+ YI +Q++ GFSFYEEN GN W D+ + NG TG RA Y | |
| Sbjct: | 238 | TTVSGLYAPYISMKQFLPGFSFYEENGYPGNYWNDVRYPQ-----NG-----TG-RAYDY | 286 |
| Query: | 404 | ARWQPKTGGVKGGIFSYAIDRD | 425 |
| | | ARWQP T G KGG+FSYAI+RD | |
| Sbjct: | 287 | ARWQPAT-GKKGGVFSYAIERD | 307 |

[14786] Based on this analysis, it was predicted that this GAS-specific protein and its epitopes, could be useful antigens for vaccines or diagnostics.

### EXAMPLE 2870

[14787] A DNA sequence (GASx1803) was identified in S. pyogenes <SEQ ID 8239> which encodes the amino acid sequence <SEQ ID 8240>. Analysis of this protein sequence reveals the following:

Possible Site: 20
>>> Seems to have no N-terminal signal sequence
----- Final Results -----
bacterial cytoplasm --- Certainty = 0.2099 (Affirmative) < succ>
bacterial membrane --- Certainty = 0.0000 (Not Clear) < succ>
bacterial outside --- Certainty = 0.0000 (Not Clear) < succ>

[14788] No corresponding DNA sequence was identified in S. agalactiae.

[14789] The protein has no significant homology with any sequences in the GENPEPT database.

[14790] Based on this analysis, it was predicted that this GAS-specific protein and its epitopes, could be useful antigens for vaccines or diagnostics.

### EXAMPLE 2871

[14791] A DNA sequence (GASx1806R) was identified in S. pyogenes <SEQ ID 8241> which encodes the amino acid sequence <SEQ ID 8242>. Analysis of this protein sequence reveals the following:

Possible site: 54
>>> Seems to have no N-terminal signal sequence
----- Final Results -----
bacterial cytoplasm --- Certainty = 0.2706 (Affirmative) < succ>
bacterial membrane --- Certainty = 0.0000 (Not Clear) < succ>
bacterial outside --- Certainty = 0.0000 (Not Clear) < succ>

[14792] No corresponding DNA sequence was identified in S. agalactiae.

[14793] The protein has homology with the following sequences in the GENPEPT database:

| >GP: CAB16126 GB: Z99124 ribosomal protein S18 [Bacillus subtilis] | | | |
|---|---|---|---|
| Identities = 51/77 (66%), Positives = 63/77 (81%) | | | |
| Query: | 1 | MAQQRRGGFKRRKKVDFIAANKIEYVDYKDTELLSRFVSERGKILPRRVTGTSAKNQRKV | 60 |
| | | MA RRGG +R+KV + +N I ++DYKD +LL +FVSERGKILPRRVTGT+AK QRK+ | |
| Sbjct: | 3 | MAGGRRGGRAKRRKVCYFTSNGITHIDYKDVDLLKKFVSERGKILPRRVTGTNAKYQRKL | 62 |
| Query: | 61 | TTAIKRARVMALMPYVN | 77 |
| | | T AIKRAR MAL+PYV+ | |
| Sbjct: | 63 | TAAIKRARQMALLPYVS | 79 |

[14794] Based on this analysis, it was predicted that this GAS-specific protein and its epitopes, could be useful antigens for vaccines or diagnostics.

### EXAMPLE 2872

[14795] A DNA sequence (GASx1809R) was identified in S. pyogenes <SEQ ID 8243> which encodes the amino acid sequence <SEQ ID 8244>. Analysis of this protein sequence reveals the following:

| Possible site: 60 | | | |
|---|---|---|---|
| >>> Seems to have an uncleavable N-term signal seq | | | |
| INTEGRAL | Likelihood = −7.59 | Transmembrane | 70-86 (66-92) |
| INTEGRAL | Likelihood = −6.42 | Transmembrane | 13-29 (8-33) |
| INTEGRAL | Likelihood = −5.68 | Transmembrane | 48-64 (43-69) |

----- Final Results -----
bacterial membrane --- Certainty = 0.4036 (Affirmative) < succ>
bacterial outside --- Certainty = 0.0000 (Not Clear) < succ>
bacterial cytoplasm --- Certainty = 0.0000 (Not Clear) < succ>

[14796] No corresponding DNA sequence was identified in S. agalactiae.

[14797] The protein has no significant homology with any sequences in the GENPEPT database.

[14798] Based on this analysis, it was predicted that this GAS-specific protein and its epitopes, could be useful antigens for vaccines or diagnostics.

### EXAMPLE 2873

[14799] A DNA sequence (GASx1813R) was identified in S. pyogenes <SEQ ID 8245> which encodes the amino acid sequence <SEQ ID 8246>. Analysis of this protein sequence reveals the following:

| Possible site: 56 | | | |
|---|---|---|---|
| >>> Seems to have a cleavable N-term signal seq. | | | |
| INTEGRAL | Likelihood = −10.51 | Transmembrane | 127-143 (113-147) |
| INTEGRAL | Likelihood = −10.46 | Transmembrane | 151-167 (149-167) |
| INTEGRAL | Likelihood = −4.41 | Transmembrane | 59-75 (57-77) |

----- Final Results -----
bacterial membrane --- Certainty = 0.5203(Affirmative) < succ>
bacterial outside --- Certainty = 0.0000(Not Clear) < succ>
bacterial cytoplasm --- Certainty = 0.0000(Not Clear) < succ>

[14800] No corresponding DNA sequence was identified in S. agalactiae.

[14801] The protein has homology with the following sequences in the GENPEPT database:

| >GP: AAB98363 GB: U67490 lipoprotein B (lppB) [Methanococcus | | | |
|---|---|---|---|
| jannaschii] | | | |
| Identities = 43/143 (30%), Positives = 68/143 (47%), Gaps = 7/143 (4%) | | | |
| Query: | 25 | LLNVLLKIITGVMY--ILYPSFLIFTLWQGMTFQLWLRLLIIPAVGFIALSYIRKRFDFP | 82 |
| | | + + ++ II+ Y I S +IF + +L L + + F +L Y+ P | |
| Sbjct: | 181 | IFDAIMPIISKTAYPLIAITSLIIFIKNRKFGMKLIFALFLAFMIAF-SLKYLVNE---P | 236 |
| Query: | 83 | RPYEKWNIKPLIDKDTKGRSMPSRHVFSATMISMCLLRYYVYFGIVCLILSALLAICRVI | 142 |
| | | RPY + L+ + S PS H A ++ LL Y GI+ L + ++A RV | |
| Sbjct: | 237 | RPYLVLDNVHLLCNEGNEPSFPSGHTTLAFTLATSLLFYSKKLGILFLSWAIIVAYSRVY | 296 |
| Query: | 143 | AGIHYPKDVIVGYLIGLMLGLCL | 165 |
| | | G+HYP DV+ G +IG+ G CL | |
| Sbjct: | 297 | VGVHYPLDVLAGMIIGIFCG-CL | 318 |

[14802] A related GBS gene <SEQ ID 9011> and protein <SEQ ID 9012> were also identified. Analysis of this protein sequence reveals the following:

| Lipop: Possible site: −1 Crend: 9 | | | |
|---|---|---|---|
| McG: Discrim Score: 3.19 | | | |
| GvH: Signal Score (−7.5): −2.18 | | | |
| Possible site: 55 | | | |
| >>> Seems to have a cleavable N-term signal seq. | | | |
| ALOM program | Count: 3 | value: −11.78 | threshold: 0.0 |

| | | | |
|---|---|---|---|
| INTEGRAL | Likelihood = −11.78 | Transmembrane | 126-142 (112-147) |
| INTEGRAL | Likelihood = −11.30 | Transmembrane | 150-166 (147-166) |
| INTEGRAL | Likelihood = −4.41 | Transmembrane | 58-74 (56-76) |

| | | |
|---|---|---|
| PERIPHERAL | Likelihood = 3.29 | 107 |

modified ALOM score: 2.86
*** Reasoning Step: 3
----- Final Results -----
bacterial membrane --- Certainty = 0.5713 (Affirmative) < succ>
bacterial outside --- Certainty = 0.0000 (Not Clear) < succ>
bacterial cytoplasm --- Certainty = 0.0000 (Not Clear) < succ>

[14803] The protein has homology with the following sequences in the databases:

[chemical structure]

[14804] Based on this analysis, it was predicted that these proteins and their epitopes could be useful antigens for vaccines or diagnostics.

### EXAMPLE 2874

[14805] A DNA sequence (GASx1815R) was identified in S. pyogenes <SEQ ID 8247> which encodes the amino acid sequence <SEQ ID 8248>. Analysis of this protein sequence reveals the following:

```
Possible site: 15
>>> Seems to have no N-terminal signal sequence
----- Final Results -----
                            bacterial cytoplasm --- Certainty = 0.0888(Affirmative) < succ>
                              bacterial membrane --- Certainty = 0.0000(Not Clear) < succ>
                                bacterial outside --- Certainty = 0.0000(Not Clear) < succ>
```

[14806] No corresponding DNA sequence was identified in S. agalactiae.

[14807] The protein has no significant homology with any sequences in the GENPEPT database.

[14808] Based on this analysis, it was predicted that this GAS-specific protein and its epitopes, could be useful antigens for vaccines or diagnostics.

### EXAMPLE 2875

[14809] A DNA sequence (GASx1825R) was identified in S. pyogenes <SEQ ID 8249> which encodes the amino acid sequence <SEQ ID 8250>. Analysis of this protein sequence reveals the following:

| Possible site: 30 | | | | |
|---|---|---|---|---|
| >>> Seems to have no N-terminal signal sequence | | | | |
| | INTEGRAL | Likelihood = −0.16 | Transmembrane | 7-23 (7-23) |

```
----- Final Results -----
                              bacterial membrane --- Certainty = 0.1065(Affirmative) < succ>
                                bacterial outside --- Certainty = 0.0000(Not Clear) < succ>
                            bacterial cytoplasm --- Certainty = 0.0000(Not Clear) < succ>
```

[14810] No corresponding DNA sequence was identified in S. agalactiae.

[14811] The protein has no significant homology with any sequences in the GENPEPT database.

[14812] Based on this analysis, it was predicted that this GAS-specific protein and its epitopes, could be useful antigens for vaccines or diagnostics.

### EXAMPLE 2876

[14813] A DNA sequence (GASx1832) was identified in S. pyogenes <SEQ ID 8251> which encodes the amino acid sequence <SEQ ID 8252>. Analysis of this protein sequence reveals the following:

```
Possible site: 26
>>> Seems to have no N-terminal signal sequence
----- Final Results -----
                            bacterial cytoplasm --- Certainty = 0.0918(Affirmative) < succ>
                              bacterial membrane --- Certainty = 0.0000(Not Clear) < succ>
                                bacterial outside --- Certainty = 0.0000(Not Clear) < succ>
```

[14814] No corresponding DNA sequence was identified in S. agalactiae.

[14815] The protein has no significant homology with any sequences in the GENPEPT database.

[14816] Based on this analysis, it was predicted that this GAS-specific protein and its epitopes, could be useful antigens for vaccines or diagnostics.

### EXAMPLE 2877

[14817] A DNA sequence (GASx1836R) was identified in S. pyogenes <SEQ ID 8253> which encodes the amino acid sequence <SEQ ID 8254>. Analysis of this protein sequence reveals the following:

```
Possible site: 22
>>> Seems to have no N-terminal signal sequence
----- Final Results -----
                            bacterial cytoplasm --- Certainty = 0.4084(Affirmative) < succ>
                              bacterial membrane --- Certainty = 0.0000(Not Clear) < succ>
                                bacterial outside --- Certainty = 0.0000(Not Clear) < succ>
```

[14818] No corresponding DNA sequence was identified in S. agalactiae.

[14819] The protein has no significant homology with any sequences in the GENPEPT database.

[14820] Based on this analysis, it was predicted that this GAS-specific protein and its epitopes, could be useful antigens for vaccines or diagnostics.

### EXAMPLE 2878

[14821] A DNA sequence (GASx1864R) was identified in S. pyogenes <SEQ ID 8255> which encodes the amino acid sequence <SEQ ID 8256>. Analysis of this protein sequence reveals the following:

```
Possible site: 21
>>> Seems to have no N-terminal signal sequence
----- Final Results -----
                            bacterial cytoplasm --- Certainty = 0.5280(Affirmative) < succ>
                              bacterial membrane --- Certainty = 0.0000(Not Clear) < succ>
                                bacterial outside --- Certainty = 0.0000(Not Clear) < succ>
```

[14822] No corresponding DNA sequence was identified in S. agalactiae.

[14823] The protein has homology with the following sequences in the GENPEPT database:

| >GP: AAC36810 GB: L12244 ribosomal protein L28 [Bacillus subtilis] | | | |
|---|---|---|---|
| Identities = 45/62 (72%), Positives = 52/62 (83%) | | | |
| Query: | 1 | MAKVCYFTGRKTVSGNNRSHAMNQTKRTVKPNLQKVTILVDGKPKKVWASARALKSGKVE | 60 |
| | | MA+ C TG+KT +GNNRSHAMN +KRT NLQKV ILV+GKPKKV+ SARALKSGKVE | |
| Sbjct: | 1 | MARKCVITGKKTTAGNNRSHAMNASKRTWGANLQKVRILVNGKPKKVYVSARALKSGKVE | 60 |
| Query: | 61 | RI | 62 |
| | | R+ | |
| Sbjct: | 61 | RV | 62 |

[14824] Based on this analysis, it was predicted that this GAS-specific protein and its epitopes, could be useful antigens for vaccines or diagnostics.

### EXAMPLE 2879

[14825] A DNA sequence (GASx1869) was identified in S. pyogenes <SEQ ID 8257> which encodes the amino acid sequence <SEQ ID 8258>. Analysis of this protein sequence reveals the following:

```
Possible site: 19
>>> Seems to have no N-terminal signal sequence
----- Final Results -----
                            bacterial cytoplasm --- Certainty = 0.1858(Affirmative) < succ>
                              bacterial membrane --- Certainty = 0.0000(Not Clear) < succ>
                                bacterial outside --- Certainty = 0.0000(Not Clear) < succ>
```

[14826] No corresponding DNA sequence was identified in S. agalactiae.

[14827] The protein has no significant homology with any sequences in the GENPEPT database.

[14828] Based on this analysis, it was predicted that this GAS-specific protein and its epitopes, could be useful antigens for vaccines or diagnostics.

### EXAMPLE 2880

[14829] A DNA sequence (GASx1881) was identified in S. pyogenes <SEQ ID 8259> which encodes the amino acid sequence <SEQ ID 8260>. Analysis of this protein sequence reveals the following:

```
Possible site: 29
>>> Seems to have no N-terminal signal sequence
----- Final Results -----
                            bacterial cytoplasm --- Certainty = 0.2752(Affirmative) < succ>
                              bacterial membrane --- Certainty = 0.0000(Not Clear) < succ>
                                bacterial outside --- Certainty = 0.0000(Not Clear) < succ>
RGD motif 136-138
```

[14830] No corresponding DNA sequence was identified in S. agalactiae.

[14831] The protein has homology with the following sequences in the GENPEPT database:

| >GP: AAF04356 GB: AF177167 type IC restriction subunit | | | |
|---|---|---|---|
| [Streptococcus thermophilus] | | | |
| Identities = 358/1047 (34%), Positives = 571/1047 (54%), | | | |
| Gaps = 91/1047 (8%) | | | |
| Query: | 7 | TELELEKELIHLLETGESQWTYRKELKTEDALWDNFFKILAQNNTQYLNEEPLTASEKEQ | 66 |
| | | +E +E + I +L E+QWTYR +LK+E+ALW NF L + N L E+PLT E +Q | |
| Sbjct: | 4 | SEQMIENQFIQILSEKENQWTYRPDLKSEEALWQNFRSHLNRINLAVLGEQPLTDKEFKQ | 63 |
| Query: | 67 | IKNQLNFVNY--YEAAKWLAGENGIAKVQVQREDAKLGTIRLEVVKADNVAGGTSVYEIA | 124 |
| | | +K + + + + A++WL GENG+A++ ++RED K + LE + +++GGTS YE+ | |
| Sbjct: | 64 | VKVEFSRLTGTPFLASQWLRGENGVAQILLEREDGK--RVTLEAFRNKDISGGTSSYEVV | 121 |
| Query: | 125 | NQVAFSGSRDRRGDVTLLINGLPMIQIELKSQNHQ--CIEAFNQVKKYDKEGQFRGIFST | 182 |
| | | +QV SR RGDV+LLINGLP+I IELK ++ + ++A+ Q+++Y ++G F+GI++T | |
| Sbjct: | 122 | HQVVPDSSRVDRGDVSLLINGLPIIHIELKKESAKDGFMQAYYQIQRYAEDGFFKGIYAT | 181 |
| Query: | 183 | LQMFVVSNKTDTRYIAAAKENKLNP-----NFLTQWVDQNNKPQKDLFAFAKEVLSIPRA | 237 |
| | | Q+ V+SNK DTRY A E+ FL W ++N+ DLF F + VL IP A | |
| Sbjct: | 182 | TQIMVISNKVDTRYFARPSEDTAEAYARMKKFLFNWRTEDNQTVSDLFDFTRTVLRIPDA | 241 |
| Query: | 238 | HQMVMTYSVIDDDKKA---LILLRPYQIHAIEAVAEASRHRKSGYIWHTTGSGKTLTSYK | 294 |
| | | H+++ Y+++ DD+K L+ LRPYQIHAI + + + + G+IWH TGSGKT+TS+ | |
| Sbjct: | 242 | HELISQYTILVDDQKNQKFLMALRPYQIHAIRKIRQKAAQHEGGFIWHATGSGKTITSFV | 301 |
| Query: | 295 | VARNILQIP-AVEKSIFVIDRKDLDNQTASAFQSYA---------QNDIFD--VDETEDT | 342 |
| | | + + Q V++++ V+DR DLD QT F +A +N + + + ++ | |
| Sbjct: | 302 | ATKLLAQNAIGVDRTVMVVDRTDLDAQTQDEFTKFASEYHTGQTTENSVANTLIVGIKNQ | 361 |
| Query: | 343 | RQLIKNLESS--DRRVVVTTIQKLNAMISQMESYDTPKFKKLKERLAHLNVVFVVDECHR | 400 |
| | | +QL +NL SS + ++VTTIQKL+A + + K E+L ++VF+VDE HR | |
| Sbjct: | 362 | KQLAQNLLSSKNNNTILVTTIQKLSAAMRSAQQESEEKGSNQFEKLRQEHIVFIVDEAHR | 421 |
| Query: | 401 | AVTPERQRYLTNTFRNSRWYGFTGTPIFVENKRAQLGDLAQTTEQQYGKCLHQYTVKEAI | 460 |
| | | AV+ E + + NS W+G TGTPIF ENK+ + G A+TT QQYG LH YT+K A+ | |
| Sbjct: | 422 | AVSDEEMKRIKKILPNSTWFGLTGTPIFEENKKQENGTFARTTSQQYGPLLHSYTIKNAM | 481 |
| Query: | 461 | HDKAVLGFQVEYKTTIPD--------------MPEDS------IPEEAYDHEEHMLAVLD | 500 |
| | | D AVLGFQVEY + I + +P+D+ +P E Y+ +EH+ +L | |
| Sbjct: | 482 | DDGAVLGFQVEYHSLISEEDQEVIVTQLNKGKLPDDALQQEKLLPTELYETDEHIRTMLQ | 541 |
| Query: | 501 | SIINQSR--KKLGFNNGIGQTFEGLLTVKSIARAQAYYDLMKKVKAGETDLVISKKVKEK | 558 |
| | | I N+ KK NG T +LT SIA+A+ Y ++K++K T L+ ++ E+ | |
| Sbjct: | 542 | KIFNRRSVVKKFKVKNGF-PTMSAILTTHSIAQAKHIYRILKEMKDNGT-LLNGRQFDER | 599 |
| Query: | 559 | L----PDFPKVAITYSITENDNASISRQDKMTKNLEDYNHLFGTNFTIDNLQGYNRDLND | 614 |
| | | DFP+VAIT+S + + D++ + +++Y F + D + YN+++N | |
| Sbjct: | 600 | HQLIDKDFPRVAITFSTNPDQLEKNEQDDELVEIMKEYEKQFDASPYQDE-KLYNQNINK | 658 |
| Query: | 615 | RLARKKDKFKDRHEQLDLVIVVDRLLTGFDAPCLSTIFIDRQPMKPQHIIQAFSRTNRIF | 674 |
| | | RLARK+ +++ + LD VIVVDRLLTGFD+P + T++IDR+ M Q ++QAFSRTNRI+ | |
| Sbjct: | 659 | RLARKEKQYQSDGQWLDFVIVVDRLLTGFDSPTIQTLYIDRE-MNYQKLLQAFSRTNRIY | 717 |
| Query: | 675 | ESRKHYGQVVTFQTPLRFKEAVDKALSLYSNGGEN-DVLAP-SWEEEKARFFEKVTVLKN | 732 |
| | | + K G +V+F+ P +E V L+SN +N D L P +EE K F E T+ K | |
| Sbjct: | 718 | -TGKDSGLIVSFRKPFTMRENVRNTFRLFSNEKQNFDQLIPKEYEEVKKEFIECSTLYKQ | 776 |
| Query: | 733 | IVPDPDAFPTIESAQTAFLKQYAKAFQAFDKLFASVQVYSDFNETLLSEVGLSDEVIDTY | 792 |
| | | D P A + Y K +++ L + Q DF E SEV E + Y | |
| Sbjct: | 777 | SEADLSDNPNDLKTMIAQVSAYQKLEKSYKALRSYDQYEEDFEE--FSEV---VEQLPQY | 831 |
| Query: | 793 | KGTYQNVIAEIRKRRED--------DEAIPEINIDYELESVQMDDINYHYILTLIQAFVD | 844 |
| | | +G +N+ +I++ ED ++ + EI +L + D ++ YI L++A | |
| Sbjct: | 832 | QGKTENIKTKIKEMIEDEGHPEEDFEKLLQEIAFSSQLNATHKDVVDSFYINQLLKAIQL | 891 |
| Query: | 845 | QEQEALQERLNDNPMDQYIQDLAKSNPAMADSLAELWQDIQKEPKAYEGKSIVYELDNLI | 904 |
| | | E A+++ + + Q + K + D L ++I + + I | |
| Sbjct: | 892 | NEAGAVEK--FEKEIQQKDPQIQKMYHTLKDQLVNTTEEI----------DVAQLKETSI | 939 |
| Query: | 905 | GDKIQRAIKHFADQWKADPDKLAFVATNYHSANSTKQVGMSTLKE-SLDYQAYKEKQGDS | 963 |
| | | ++IQR ++ A+++ D L Y S T L +L + ++ K G+ | |
| Sbjct: | 940 | QNEIQRQLQKEAEEFGLSFDFLQSAMNEYQSDKKTIPYLTHLLDSMTLSKEEFEAKTGE- | 998 |
| Query: | 964 | AMNKLKYKSQFERELVQFIRDQIQPLK | 990 |
| | | K + +++ E +Q +Q+Q K | |
| Sbjct: | 999 | ---KYRRRTKVLEERLQQNFEQLQKWK | 1022 |

[14832] Based on this analysis, it was predicted that this GAS-specific protein and its epitopes, could be useful antigens for vaccines or diagnostics.

### EXAMPLE 2881

[14833] A DNA sequence (GASx1882) was identified in S. pyogenes <SEQ ID 8261> which encodes the amino acid sequence <SEQ ID 8262>. Analysis of this protein sequence reveals the following:

```
Possible site: 39
>>> Seems to have no N-terminal signal sequence
----- Final Results -----
                            bacterial cytoplasm --- Certainty = 0.3653(Affirmative) < succ>
                              bacterial membrane --- Certainty = 0.0000(Not Clear) < succ>
                                bacterial outside --- Certainty = 0.0000(Not Clear) < succ>
```

[14834] No corresponding DNA sequence was identified in S. agalactiae.

[14835] The protein has homology with the following sequences in the GENPEPT database:

| >GP: AAB53491 GB: U35629 unknown [Lactococcus lactis subsp. lactis] | | | |
|---|---|---|---|
| Identities = 141/241 (58%), Positives = 178/241 (73%) | | | |
| Query: | 3 | KSKQPQYRFDGFEGEWEEKELGDIVQITMGQSPSSQNYTTNPSDYILVQGNADIKNGYVF | 62 |
| | | K K P+ RF GF EWE ++LGD V+I MGQSP+S+NYT +P+DYILVQGNAD+KNG V | |
| Sbjct: | 13 | KKKVPELRFKGFTDEWELRKLGDEVRIVMGQSPNSENYTDDPNDYILVQGNADMKNGRVL | 72 |
| Query: | 63 | PRVWTTQITKQADKGDIILSVRAPVGDVGKTNYHVIIGRGVAAIKGNEFIFQILKYLKEI | 122 |
| | | PRVWTTQ+TKQA+K D+ILSVRAPVGD+GKT Y V+IGRGVAAIKGNEFIFQ L +K | |
| Sbjct: | 73 | PRVWTTQVTKQAEKDDLILSVRAPVGDIGKTAYDVVIGRGVAAIKGNEFIFQNLGKMKSD | 132 |
| Query: | 123 | GYWKRISTGSTFDSISSSDIKYAKIQIPSLPEQEAIGELFQMVDQLIQLQDQKLATLKEQ | 182 |
| | | GYW R STGSTF+SI+S+DIK A I +P++ EQ+ IG F+ +D I L +KL LKEQ | |
| Sbjct: | 133 | GYWTRYSTGSTFESINSTDIKEAIISVPAIEEQDKIGSFFKQLDNTIALHQRKLDLLKEQ | 192 |
| Query: | 183 | KQTFLRKMFPAQGQKVPEIRLQGFKGEWEEKKLREVSTHRSGTAIEKYFDSEGEFKVISIG | 243 |
| | | K+ FL+KMFP G KVPE+R GF +WEE+KL +++ +G G++ + G | |
| Sbjct: | 193 | KKGFLQKMFPKNGAKVPELRFAGFADDWEERKLGDITKISTGKLDANAMVENGKYDFYTSG | 253 |

[14836] Based on this analysis, it was predicted that this GAS-specific protein and its epitopes, could be useful antigens for vaccines or diagnostics.

### EXAMPLE 2882

[14837] A DNA sequence (GASx1883) was identified in S. pyogenes <SEQ ID 8263> which encodes the amino acid sequence <SEQ ID 8264>. Analysis of this protein sequence reveals the following:

```
Possible site: 61
>>> Seems to have no N-terminal signal sequence
----- Final Results -----
                            bacterial cytoplasm --- Certainty = 0.4318(Affirmative) < succ>
                              bacterial membrane --- Certainty = 0.0000(Not Clear) < succ>
                                bacterial outside --- Certainty = 0.0000(Not Clear) < succ>
```

[14838] No corresponding DNA sequence was identified in S. agalactiae.

[14839] The protein has homology with the following sequences in the GENPEPT database:

| >GP: AAF04357 GB: AF177167 type IC modification | | | |
|---|---|---|---|
| subunit [Streptococcus thermophilus] | | | |
| Identities = 293/523 (56%), Positives = 377/523 (72%), | | | |
| Gaps = 6/523 (1%) | | | |
| Query: | 6 | TSLRQALWHSADQLRGQMDANDYKNYLLGLIFYKHLSDKLLLAVCDNLEKHFNTFTEAQK | 65 |
| | | TSL Q LW SAD LRG+MDA++YKNYLLGLIFYK+LSDK L V + +TF E | |
| Sbjct: | 3 | TSLNQQLWASADILRGKMDASEYKNYLLGLIFYKYLSDKQLREVYEQENGKTDTFPERST | 62 |
| Query: | 66 | I---FEDAYQDEGLKDDLISVVTGDLGYFIEPTLTFEKLIQDVYHNTFQLESLAQGFRDI | 122 |
| | | + F + Y+++ KDDLI + GYFI+P F + F L L GF ++ | |
| Sbjct: | 63 | LYAGFMEWYEED--KDDLIENIQPRQGYFIQPDRLFYHYRIKADNYEFNLTDLQAGFNEL | 120 |
| Query: | 123 | EQSGEDFENLFEDIDLYSKKLGSTPQKQNQTISNVMKTLNEIDFEAVDGDTLGDAYEYLI | 182 |
| | | E+ GE+F LF DIDL S KLGS Q++N TI+ V++ L+EID +GD +GDAYEYLI | |
| Sbjct: | 121 | ERQGEEFSGLFSDIDLNSTKLGSNAQQRNVTITEVLRALDEIDLFEHNGDVIGDAYEYLI | 180 |
| Query: | 183 | GEFASESGKKAGEFYTPQAVSHLMTQIVFLGREDQKGMTLYDPAMGSGSLLLNAKKYSNQ | 242 |
| | | G FA+ +GKKAGEFYTPQAVS +M++I +G+E + +YDPAMGSGSL+LN ++Y | |
| Sbjct: | 181 | GMFAAGAGKKAGEFYTPQAVSRIMSEITSIGQESRVPFHIYDPAMGSGSLMLNIRRYLIH | 240 |
| Query: | 243 | SDTVSYYGQEINTSTYNLARMNMMLHGVAIENQHLSNADTLDADWPTDEPINFDGVLMNP | 302 |
| | | + V Y+GQE+NT+T+NLARMN++LHGV E +L+N DTLDADWP++EP FD V+MNP | |
| Sbjct: | 241 | PNQVHYHGQELNTTTFNLARMNLILHGVDKERMNLNNGDTLDADWPSEEPYQFDSVVMNP | 300 |
| Query: | 303 | PYSLKWSATAGFLTDPRFSSYGVLAPKSKADFAFLLHGFYHLKNTGTMAIVLPHGVLFRG | 362 |
| | | PYS KWSA FL+DPRF +G LAPKSKADFAFLLHGFYHLK +GTM IVLPHGVLFRG | |
| Sbjct: | 301 | PYSAKWSAADKFLSDPRFERFGKLAPKSKADFAFLLHGFYHLKESGTMGIVLPHGVLFRG | 360 |
| Query: | 363 | AAEGKIRQKLLEQGAIDTIIGLPSNIFYNTSIPTTIIILKKNRTNKDVFFIDASKEFDKG | 422 |
| | | AEG IRQ LLE GAID +IGLP+NIF+ TSIPTT+IILKKNR+ +DV FIDAS++F+K | |
| Sbjct: | 361 | GAEGTIRQALLEMGAIDAVIGLPANIFFGTSIPTTVIILKKNRSRRDVLFIDASQDFEKQ | 420 |
| Query: | 423 | KNQNTMTDNHIKKILDAYKSRDNSDKFSYLASFDEIIENDYNLNIPRYVDTFEEVPVKPL | 482 |
| | | KNQN + D HI KI+ YK R++ ++++++ASFDEI END+NLNIPRYVDTFEE L | |
| Sbjct: | 421 | KNQNVLLDEHIDKIVSTYKKREDIERYAHVASFDEIQENDFNLNIPRYVDTFEEEEPVDL | 480 |
| Query: | 483 | PELAKQLSDIDQEIAKTNAKLDQLMKQLVGTTKEAQDELDTFR | 525 |
| | | E+ L I++E+ + L L+ ++E Q +++ R | |
| Sbjct: | 481 | VEVNTNLLKINEELVQQEQTLLSLINDF-SESEENQAMIESMR | 522 |

[14840] Based on this analysis, it was predicted that this GAS-specific protein and its epitopes, could be useful antigens for vaccines or diagnostics.

### EXAMPLE 2883

[14841] A DNA sequence (GASx1886R) was identified in S. pyogenes <SEQ ID 8265> which encodes the amino acid sequence <SEQ ID 8266>. Analysis of this protein sequence reveals the following:

| Possible site: 59 | | | | |
|---|---|---|---|---|
| >>> Seems to have an uncleavable N-term signal seq | | | | |
| | INTEGRAL | Likelihood = −8.17 | Transmembrane | 155-171 (147-173) |
| | INTEGRAL | Likelihood = −7.22 | Transmembrane | 14-30 (11-33) |
| | INTEGRAL | Likelihood = −7.17 | Transmembrane | 182-198 (179-205) |
| | INTEGRAL | Likelihood = −5.68 | Transmembrane | 132-148 (128-152) |
| | INTEGRAL | Likelihood = −4.14 | Transmembrane | 46-62 (43-62) |
| | INTEGRAL | Likelihood = −3.50 | Transmembrane | 73-89 (73-90) |
| | INTEGRAL | Likelihood = −0.96 | Transmembrane | 95-111 (95-111) |

```
----- Final Results -----
                              bacterial membrane --- Certainty = 0.4270(Affirmative) < succ>
                                bacterial outside --- Certainty = 0.0000(Not Clear) < succ>
                            bacterial cytoplasm --- Certainty = 0.0000(Not Clear) < succ>
```

[14842] No corresponding DNA sequence was identified in S. agalactiae.

[14843] The protein has no significant homology with any sequences in the GENPEPT database.

[14844] Based on this analysis, it was predicted that this GAS-specific protein and its epitopes, could be useful antigens for vaccines or diagnostics.

### EXAMPLE 2884

[14845] A DNA sequence (GASx1890R) was identified in S. pyogenes <SEQ ID 8267> which encodes the amino acid sequence <SEQ ID 8268>. Analysis of this protein sequence reveals the following:

```
Possible site: 58
>>> Seems to have no N-terminal signal sequence
----- Final Results -----
                            bacterial cytoplasm --- Certainty = 0.4757(Affirmative) < succ>
                              bacterial membrane --- Certainty = 0.0000(Not Clear) < succ>
                                bacterial outside --- Certainty = 0.0000(Not Clear) < succ>
RGD motif 339-341
```

[14846] No corresponding DNA sequence was identified in S. agalactiae.

[14847] The protein has homology with the following sequences in the GENPEPT database:

| >GP: AAA62650 GB: L37110 clyM [Plasmid pAD1] | | | |
|---|---|---|---|
| Identities = 127/492 (25%), Positives = 230/492 (45%), | | | |
| Gaps = 30/492 (6%) | | | |
| Query: | 46 | KLFYSEFENQLFETIMFLSMKTLVLDINHFSKEIENK----SEAYEQYIQQ-IREENGIN | 100 |
| | | K F L + ++ L+ KTLVLD++ F K K S+ + Y+++ + I | |
| Sbjct: | 135 | KEFIINLLENLTQELIHLTSKTLVLDLHTFKKNEPLKGNDSSKRFIYYLKKRFNSKKDII | 194 |
| Query: | 101 | HFFDRYPYLLKQINKEVGLIEESYSLLFDRFLEDLSEIKSCFNI-SEPLSNVAFSLGDSH | 159 |
| | | F+ YP L++ + ++ + R EDL I++CFNI S L++++ S GDSH | |
| Sbjct: | 195 | AFYTCYPELMRITVVRMRYFLDNTKQMLIRVTEDLPSIQNCFNIQSSELNSISESQGDSH | 254 |
| Query: | 160 | SKKQTVVKIAFKE-KSVYYKPKSYHSHSILLELTSLLKSSNIPSFSLPKSLVKADYCWQL | 218 |
| | | S+ +TV + F + K + YKPK +S + L + L + K + + Y ++ | |
| Sbjct: | 255 | SRGKTVSTLTFSDGKKIVYKPK-INSENKLRDFFEFLNKELEADIYIVKKVTRNTYFYEE | 313 |
| Query: | 219 | GVAYTSSNK-DEVAKIYFKYGVLAAFSEIFSITDLHMENVIVSGGDLYLIDVETFFQRKL | 277 |
| | | + N +EV K Y +YG L + +F++TDLH EN+I G +ID ETFFQ+ + | |
| Sbjct: | 314 | YIDNIEINNIEEVKKYYERYGKLIGIAFLFNVTDLHYENIIAHGEYPVIIDNETFFQQNI | 373 |
| Query: | 278 | NVQNQNFEGITVDTYQRIYETSLSNGLFP---VQFEKNSAPNVSGISRKGGKRQKGKYEL | 334 |
| | | ++ N TVD + ++ + GL P ++ + +S +S K Q +++ | |
| Sbjct: | 374 | PIEFGN--SATVDAKYKYLDSIMVTGLVPYLAMKDKSDSKDEGVNLSALNFKEQSVPFKI | 431 |
| Query: | 335 | I---NKNRGDLKLVKVDYFQEDRFNIPTLNGKVVEPLDYANEIISGFRECYIFLLSQRSK | 391 |
| | | + N +++ + + N P +N + + + Y I++G + + + K | |
| Sbjct: | 432 | LKIKNTFTDEMRFEYQTHIMDTAKNTPIMNNEKISFISYEKYIVTGMKSILMKAKDSKKK | 491 |
| Query: | 392 | IKEIV-EGFPELKSRVPFRNTSDYGKFLQASTNPKYLFS----EKKRKNLFSILYETKHI | 446 |
| | | I + L R R T Y L+ S +P + EK N+++ Y+ K + | |
| Sbjct: | 492 | ILAYINNNLQNLIVRNVIRPTQRYADMLEFSYHPNCFSNAIEREKVLHNMWAYPYKNKKV | 551 |
| Query: | 447 | EHFIVDNEIKDLMNGDIP-YFSMDTRGNVYNSVGTLIGNLGDTTSL---FDSITILNDER | 502 |
| | | H+ E DL++GDIP +++ ++ ++ S G L+ + ++L + I L DE | |
| Sbjct: | 552 | VHY----EFSDLIDGDIPIFYNNISKTSLIASDGCLVEDFYQESALNRCLNKINDLCDED | 607 |
| Query: | 503 | LKFTCELLEIVL | 514 |
| | | + LEI L | |
| Sbjct: | 608 | ISIQTVWLEIAL | 619 |

[14848] Based on this analysis, it was predicted that this GAS-specific protein and its epitopes, could be useful antigens for vaccines or diagnostics.

### EXAMPLE 2885

[14849] A DNA sequence (GASx1891R) was identified in S. pyogenes <SEQ ID 8269> which encodes the amino acid sequence <SEQ ID 8270>. Analysis of this protein sequence reveals the following:

```
Possible site: 40
>>> Seems to have no N-terminal signal sequence
----- Final Results -----
                            bacterial cytoplasm --- Certainty = 0.3487(Affirmative) < succ>
                              bacterial membrane --- Certainty = 0.0000(Not Clear) < succ>
                                bacterial outside --- Certainty = 0.0000(Not Clear) < succ>
```

[14850] No corresponding DNA sequence was identified in S. agalactiae.

[14851] The protein has homology with the following sequences in the GENPEPT database:

| >GP: AAA02867 GB: L07740 salivaricin | | | |
|---|---|---|---|
| A [Streptococcus salivarius] | | | |
| Identities = 46/51 (90%), Positives = 48/51 (93%) | | | |
| Query: | 1 | MSFMKNSKDILTNAIEEVSEKELMEVAGGKKGSGWFATITDDCPNSVFVCC | 51 |
| | | M+ MKNSKDIL NAIEEVSEKELMEVAGGK+GSGW ATITDDCPNSVFVCC | |
| Sbjct: | 1 | MNAMKNSKDILNNAIEEVSEKELMEVAGGKRGSGWIATITDDCPNSVFVCC | 51 |

[14852] Based on this analysis, it was predicted that this GAS-specific protein and its epitopes, could be useful antigens for vaccines or diagnostics.

### EXAMPLE 2886

[14853] A DNA sequence (GASx1901R) was identified in S. pyogenes <SEQ ID 8271> which encodes the amino acid sequence <SEQ ID 8272>. Analysis of this protein sequence reveals the following:

| Possible site: 13 | | | | |
|---|---|---|---|---|
| >>> Seems to have no N-terminal signal sequence | | | | |
| | INTEGRAL | Likelihood = −1.59 | Transmembrane | 3-19 (1-20) |

```
----- Final Results -----
                              bacterial membrane --- Certainty = 0.1638(Affirmative) < succ>
                                bacterial outside --- Certainty = 0.0000(Not Clear) < succ>
                            bacterial cytoplasm --- Certainty = 0.0000(Not Clear) < succ>
```

[14854] No corresponding DNA sequence was identified in S. agalactiae.

[14855] The protein has no significant homology with any sequences in the GENPEPT database.

[14856] Based on this analysis, it was predicted that this GAS-specific protein and its epitopes, could be useful antigens for vaccines or diagnostics.

### EXAMPLE 2887

[14857] A DNA sequence (GASx1905R) was identified in S. pyogenes <SEQ ID 8273> which encodes the amino acid sequence <SEQ ID 8274>. Analysis of this protein sequence reveals the following:

| Possible site: 25 | | | | |
|---|---|---|---|---|
| >>> Seems to have an uncleavable N-term signal seq | | | | |
| | INTEGRAL | Likelihood = −0.48 | Transmembrane | 38-54 (37-54) |

```
----- Final Results -----
                              bacterial membrane --- Certainty = 0.1192(Affirmative) < succ>
                                bacterial outside --- Certainty = 0.0000(Not Clear) < succ>
                            bacterial cytoplasm --- Certainty = 0.0000(Not Clear) < succ>
```

[14858] No corresponding DNA sequence was identified in S. agalactiae.

[14859] The protein has no significant homology with any sequences in the GENPEPT database.

[14860] Based on this analysis, it was predicted that this GAS-specific protein and its epitopes, could be useful antigens for vaccines or diagnostics.

### EXAMPLE 2888

[14861] A DNA sequence (GASx1911R) was identified in S. pyogenes <SEQ ID 8275> which encodes the amino acid sequence <SEQ ID 8276>. Analysis of this protein sequence reveals the following:

| Possible site: 30 | | | | |
|---|---|---|---|---|
| >>> Seems to have no N-terminal signal sequence | | | | |
| | INTEGRAL | Likelihood = −10.40 | Transmembrane | 27-43 (22-48) |
| | INTEGRAL | Likelihood = −9.82 | Transmembrane | 52-68 (50-74) |
| | INTEGRAL | Likelihood = −7.27 | Transmembrane | 113-129 (111-134) |
| | INTEGRAL | Likelihood = −1.97 | Transmembrane | 137-153 (135-153) |

```
----- Final Results -----
                              bacterial membrane --- Certainty = 0.5161(Affirmative) < succ>
                                bacterial outside --- Certainty = 0.0000(Not Clear) < succ>
                            bacterial cytoplasm --- Certainty = 0.0000(Not Clear) < succ>
```

[14862] No corresponding DNA sequence was identified in S. agalactiae.

[14863] The protein has no significant homology with any sequences in the GENPEPT database.

[14864] Based on this analysis, it was predicted that this GAS-specific protein and its epitopes, could be useful antigens for vaccines or diagnostics.

### EXAMPLE 2889

[14865] A DNA sequence (GASx1915R) was identified in S. pyogenes <SEQ ID 8277> which encodes the amino acid sequence <SEQ ID 8278>. Analysis of this protein sequence reveals the following:

| Possible site: 31 | | | | |
|---|---|---|---|---|
| >>> Seems to have a cleavable N-term signal seq. | | | | |
| | INTEGRAL | Likelihood = −10.77 | Transmembrane | 242-258 (238-262) |

```
----- Final Results -----
                              bacterial membrane --- Certainty = 0.5310(Affirmative) < succ>
                                bacterial outside --- Certainty = 0.0000(Not Clear) < succ>
                            bacterial cytoplasm --- Certainty = 0.0000(Not Clear) < succ>
```

[14866] No corresponding DNA sequence was identified in S. agalactiae.

[14867] The protein has no significant homology with any sequences in the GENPEPT database.

[14868] Based on this analysis, it was predicted that this GAS-specific protein and its epitopes, could be useful antigens for vaccines or diagnostics.

### EXAMPLE 2890

[14869] A DNA sequence (GASx1918R) was identified in S. pyogenes <SEQ ID 8279> which encodes the amino acid sequence <SEQ ID 8280>. Analysis of this protein sequence reveals the following:

| Possible site: 38 | | | | |
|---|---|---|---|---|
| >>> Seems to have a cleavable N-term signal seq. | | | | |
| | INTEGRAL | Likelihood = −7.32 | Transmembrane | 40-56 (39-60) |

```
----- Final Results -----
                              bacterial membrane --- Certainty = 0.3930(Affirmative) < succ>
                                bacterial outside --- Certainty = 0.0000(Not Clear) < succ>
                            bacterial cytoplasm --- Certainty = 0.0000(Not Clear) < succ>
```

[14870] No corresponding DNA sequence was identified in S. agalactiae.

[14871] The protein has no significant homology with any sequences in the GENPEPT database.

[14872] Based on this analysis, it was predicted that this GAS-specific protein and its epitopes, could be useful antigens for vaccines or diagnostics.

### EXAMPLE 2891

[14873] A DNA sequence (GASx1923R) was identified in S. pyogenes <SEQ ID 8281> which encodes the amino acid sequence <SEQ ID 8282>. Analysis of this protein sequence reveals the following:

| Possible site: 42 | | | | |
|---|---|---|---|---|
| >>> Seems to have an uncleavable N-term signal seq | | | | |
| | INTEGRAL | Likelihood = −12.26 | Transmembrane | 20-36 (13-42) |

```
----- Final Results -----
                              bacterial membrane --- Certainty = 0.5904(Affirmative) < succ>
                                bacterial outside --- Certainty = 0.0000(Not Clear) < succ>
                            bacterial cytoplasm --- Certainty = 0.0000(Not Clear) < succ>
```

[14874] No corresponding DNA sequence was identified in S. agalactiae.

[14875] The protein has no significant homology with any sequences in the GENPEPT database.

[14876] Based on this analysis, it was predicted that this GAS-specific protein and its epitopes, could be useful antigens for vaccines or diagnostics.

### EXAMPLE 2892

[14877] A DNA sequence (GASx1926) was identified in S. pyogenes <SEQ ID 8283> which encodes the amino acid sequence <SEQ ID 8284>. Analysis of this protein sequence reveals the following:

```
Possible site: 24
>>> Seems to have no N-terminal signal sequence
----- Final Results -----
                            bacterial cytoplasm --- Certainty = 0.2322(Affirmative) < succ>
                              bacterial membrane --- Certainty = 0.0000(Not Clear) < succ>
                                bacterial outside --- Certainty = 0.0000(Not Clear) < succ>
```

[14878] No corresponding DNA sequence was identified in S. agalactiae.

[14879] The protein has no significant homology with any sequences in the GENPEPT database.

[14880] Based on this analysis, it was predicted that this GAS-specific protein and its epitopes, could be useful antigens for vaccines or diagnostics.

### EXAMPLE 2893

[14881] A DNA sequence (GASx1928R) was identified in S. pyogenes <SEQ ID 8285> which encodes the amino acid sequence <SEQ ID 8286>. Analysis of this protein sequence reveals the following:

```
Possible site: 13
>>> Seems to have no N-terminal signal sequence
----- Final Results -----
                            bacterial cytoplasm --- Certainty = 0.3395(Affirmative) < succ>
                              bacterial membrane --- Certainty = 0.0000(Not Clear) < succ>
                                bacterial outside --- Certainty = 0.0000(Not Clear) < succ>
```

[14882] No corresponding DNA sequence was identified in S. agalactiae.

[14883] The protein has no significant homology with any sequences in the GENPEPT database.

[14884] Based on this analysis, it was predicted that this GAS-specific protein and its epitopes, could be useful antigens for vaccines or diagnostics.

### EXAMPLE 2894

[14885] A DNA sequence (GASx1929R) was identified in S. pyogenes <SEQ ID 8287> which encodes the amino acid sequence <SEQ ID 8288>. Analysis of this protein sequence reveals the following:

| Possible site: 16 | | | | |
|---|---|---|---|---|
| >>> Seems to have an uncleavable N-term signal seq | | | | |
| | INTEGRAL | Likelihood = −1.86 | Transmembrane | 17-33 (15-33) |

```
----- Final Results -----
                              bacterial membrane --- Certainty = 0.1744(Affirmative) < succ>
                                bacterial outside --- Certainty = 0.0000(Not Clear) < succ>
                            bacterial cytoplasm --- Certainty = 0.0000(Not Clear) < succ>
```

[14886] No corresponding DNA sequence was identified in S. agalactiae.

[14887] The protein has no significant homology with any sequences in the GENPEPT database.

[14888] Based on this analysis, it was predicted that this GAS-specific protein and its epitopes, could be useful antigens for vaccines or diagnostics.

### EXAMPLE 2895

[14889] A DNA sequence (GASx1931R) was identified in S. pyogenes <SEQ ID 8289> which encodes the amino acid sequence <SEQ ID 8290>. Analysis of this protein sequence reveals the following:

```
Possible site: 31
>>> Seems to have no N-terminal signal sequence
----- Final Results -----
                            bacterial cytoplasm --- Certainty = 0.0551(Affirmative) < succ>
                              bacterial membrane --- Certainty = 0.0000(Not Clear) < succ>
                                bacterial outside --- Certainty = 0.0000(Not Clear) < succ>
```

[14890] No corresponding DNA sequence was identified in S. agalactiae.

[14891] The protein has no significant homology with any sequences in the GENPEPT database.

[14892] Based on this analysis, it was predicted that this GAS-specific protein and its epitopes, could be useful antigens for vaccines or diagnostics.

### EXAMPLE 2896

[14893] A DNA sequence (GASx1941R) was identified in S. pyogenes <SEQ ID 8291> which encodes the amino acid sequence <SEQ ID 8292>. Analysis of this protein sequence reveals the following:

```
Possible site: 16
>>> Seems to have no N-terminal signal sequence
----- Final Results -----
                            bacterial cytoplasm --- Certainty = 0.2377(Affirmative) < succ>
                              bacterial membrane --- Certainty = 0.0000(Not Clear) < succ>
                                bacterial outside --- Certainty = 0.0000(Not Clear) < succ>
```

[14894] No corresponding DNA sequence was identified in S. agalactiae.

[14895] The protein has no significant homology with any sequences in the GENPEPT database.

[14896] Based on this analysis, it was predicted that this GAS-specific protein and its epitopes, could be useful antigens for vaccines or diagnostics.

### EXAMPLE 2897

[14897] A DNA sequence (GASx1949) was identified in S. pyogenes <SEQ ID 8293> which encodes the amino acid sequence <SEQ ID 8294>. Analysis of this protein sequence reveals the following:

```
Possible site: 29
>>> Seems to have no N-terminal signal sequence
----- Final Results -----
                            bacterial cytoplasm --- Certainty = 0.0262(Affirmative) < succ>
                              bacterial membrane --- Certainty = 0.0000(Not Clear) < succ>
                                bacterial outside --- Certainty = 0.0000(Not Clear) < succ>
```

[14898] No corresponding DNA sequence was identified in S. agalactiae.

[14899] The protein has no significant homology with any sequences in the GENPEPT database.

[14900] Based on this analysis, it was predicted that this GAS-specific protein and its epitopes, could be useful antigens for vaccines or diagnostics.

### EXAMPLE 2898

[14901] A DNA sequence (GASx1951R) was identified in S. pyogenes <SEQ ID 8295> which encodes the amino acid sequence <SEQ ID 8296>. Analysis of this protein sequence reveals the following:

```
Possible site: 45
>>> Seems to have no N-terminal signal sequence
----- Final Results -----
                            bacterial cytoplasm --- Certainty = 0.1330(Affirmative) < succ>
                              bacterial membrane --- Certainty = 0.0000(Not Clear) < succ>
                                bacterial outside --- Certainty = 0.0000(Not Clear) < succ>
```

[14902] No corresponding DNA sequence was identified in S. agalactiae.

[14903] The protein has no significant homology with any sequences in the GENPEPT database.

[14904] Based on this analysis, it was predicted that this GAS-specific protein and its epitopes, could be useful antigens for vaccines or diagnostics.

### EXAMPLE 2899

[14905] A DNA sequence (GASx1953) was identified in S. pyogenes <SEQ ID 8297> which encodes the amino acid sequence <SEQ ID 8298>. Analysis of this protein sequence reveals the following:

```
Possible site: 15
>>> Seems to have a cleavable N-term signal seq.
----- Final Results -----
                                bacterial outside --- Certainty = 0.3000(Affirmative) < succ>
                              bacterial membrane --- Certainty = 0.0000(Not Clear) < succ>
                            bacterial cytoplasm --- Certainty = 0.0000(Not Clear) < succ>
```

[14906] No corresponding DNA sequence was identified in S. agalactiae.

[14907] Based on this analysis, it was predicted that this GAS-specific protein and its epitopes, could be useful antigens for vaccines or diagnostics.

### EXAMPLE 2900

[14908] A DNA sequence (GASx1957) was identified in S. pyogenes <SEQ ID 8299> which encodes the amino acid sequence <SEQ ID 8300>. Analysis of this protein sequence reveals the following:

```
Possible site: 26
>>> Seems to have no N-terminal signal sequence
----- Final Results -----
                            bacterial cytoplasm --- Certainty = 0.2409(Affirmative) < succ>
                              bacterial membrane --- Certainty = 0.0000(Not Clear) < succ>
                                bacterial outside --- Certainty = 0.0000(Not Clear) < succ>
```

[14909] No corresponding DNA sequence was identified in S. agalactiae.

[14910] The protein has no significant homology with any sequences in the GENPEPT database.

[14911] Based on this analysis, it was predicted that this GAS-specific protein and its epitopes, could be useful antigens for vaccines or diagnostics.

### EXAMPLE 2901

[14912] A DNA sequence (GASx1969) was identified in S. pyogenes <SEQ ID 8301> which encodes the amino acid sequence <SEQ ID 8302>. Analysis of this protein sequence reveals the following:

| Possible site: 14 | | | | |
|---|---|---|---|---|
| >>> Seems to have an uncleavable N-term signal seq | | | | |
| | INTEGRAL | Likelihood = −2.28 | Transmembrane | 7-23 (7-23) |

```
----- Final Results -----
                              bacterial membrane --- Certainty = 0.1914(Affirmative) < succ>
                                bacterial outside --- Certainty = 0.0000(Not Clear) < succ>
                            bacterial cytoplasm --- Certainty = 0.0000(Not Clear) < succ>
```

[14913] No corresponding DNA sequence was identified in S. agalactiae.

[14914] Based on this analysis, it was predicted that this GAS-specific protein and its epitopes, could be useful antigens for vaccines or diagnostics.

### EXAMPLE 2902

[14915] A DNA sequence (GASx1971R) was identified in S. pyogenes <SEQ ID 8303> which encodes the amino acid sequence <SEQ ID 8304>. Analysis of this protein sequence reveals the following:

```
Possible site: 21
>>> Seems to have no N-terminal signal sequence
----- Final Results -----
                            bacterial cytoplasm --- Certainty = 0.1545(Affirmative) < succ>
                              bacterial membrane --- Certainty = 0.0000(Not Clear) < succ>
                                bacterial outside --- Certainty = 0.0000(Not Clear) < succ>
```

[14916] No corresponding DNA sequence was identified in S. agalactiae.

[14917] The protein has no significant homology with any sequences in the GENPEPT database.

[14918] Based on this analysis, it was predicted that this GAS-specific protein and its epitopes, could be useful antigens for vaccines or diagnostics.

### EXAMPLE 2903

[14919] A DNA sequence (GASx1973) was identified in S. pyogenes <SEQ ID 8305> which encodes the amino acid sequence <SEQ ID 8306>. Analysis of this protein sequence reveals the following:

| Possible site: 49 | | | | |
|---|---|---|---|---|
| >>> Seems to have no N-terminal signal sequence | | | | |
| | INTEGRAL | Likelihood = −2.44 | Transmembrane | 31-47 (31-48) |

```
----- Final Results -----
                              bacterial membrane --- Certainty = 0.1977(Affirmative) < succ>
                                bacterial outside --- Certainty = 0.0000(Not Clear) < succ>
                            bacterial cytoplasm --- Certainty = 0.0000(Not Clear) < succ>
```

[14920] No corresponding DNA sequence was identified in S. agalactiae.

[14921] The protein has homology with the following sequences in the GENPEPT database:

| >GP: CAB51744 GB: AJ245405 speX [Streptococcus pyogenes] | | | |
|---|---|---|---|
| Identities = 236/256 (92%), Positives = 243/256 (94%) | | | |
| Query: | 3 | MIISFESVILKHNKIITPEKRLFMKKTKLIFSFTSIFIAIISRPVFGLEVDNNSLLRNIY | 62 |
| | | MIISFESVILKHNKIITPEKRLFMKKTKLIFSFTSIFIAIISRPVFGLEVDNNSLLRNIY | |
| Sbjct: | 1 | MIISFESVILKHNKIITPEKRLFMKKTKLIFSFTSIFIAIISRPVFGLEVDNNSLLRNIY | 60 |
| Query: | 63 | STIVYEYSDTVIDFKTSHNLVTKKLDVRDARDFFINSEMDEYAANDFKDGDKIAMFSVPF | 122 |
| | | STIVYEYSD VIDFKTSHNLVTKKLDVRDARDFFINSEMDEYAANDFK GDKIA+FSVPF | |
| Sbjct: | 61 | STIVYEYSDIVIDFKTSHNLVTKKLDVRDARDFFINSEMDEYAANDFKTGDKIAVFSVPF | 120 |
| Query: | 123 | DWNYLSEGKVIAYTYGGMTPYQEEPMSKNIPVNLWINRKQIPVPYNQISTNKTTVTAQEI | 182 |
| | | DWNYLS+GKV AYTYGG+TPYQ+ K VNLWIN KQI VPYN+ISTNKTTVTAQEI | |
| Sbjct: | 121 | DWNYLSKGKVTAYTYGGITPYQKLQYLKISLVNLWINGKQISVPYNEISTNKTTVTAQEI | 180 |
| Query: | 183 | DLKVRKFLISQHQLYSSGSSYKSGKLVFHTNDNSDKYSLDLFYVGYRDKESIFKVYKDNK | 242 |
| | | DLKVRKFLI+QHQLYSSGSSYKSG+LVFHTNDNSDKYS DLFYVGYRDKESIFKVYKDNK | |
| Sbjct: | 181 | DLKVRKFLIAQHQLYSSGSSYKSGRLVFHTNDNSDKYSFDLFYVGYRDKESIFKVYKDNK | 240 |
| Query: | 243 | SFNIDKIGHLDIEIDS | 258 |
| | | SFNIDKIGHLDIEIDS | |
| Sbjct: | 241 | SFNIDKIGHLDIEIDS | 256 |

[14922] Based on this analysis, it was predicted that this GAS-specific protein and its epitopes, could be useful antigens for vaccines or diagnostics.

### EXAMPLE 2904

[14923] A DNA sequence (GASx1974R) was identified in S. pyogenes <SEQ ID 8307> which encodes the amino acid sequence <SEQ ID 8308>. Analysis of this protein sequence reveals the following:

```
Possible site: 53
>>> Seems to have no N-terminal signal sequence
----- Final Results -----
                            bacterial cytoplasm --- Certainty = 0.2022(Affirmative) < succ>
                              bacterial membrane --- Certainty = 0.0000(Not Clear) < succ>
                                bacterial outside --- Certainty = 0.0000(Not Clear) < succ>
```

[14924] No corresponding DNA sequence was identified in S. agalactiae.

[14925] The protein has no significant homology with any sequences in the GENPEPT database.

[14926] Based on this analysis, it was predicted that this GAS-specific protein and its epitopes, could be useful antigens for vaccines or diagnostics.

### EXAMPLE 2905

[14927] A DNA sequence (GASx1983) was identified in S. pyogenes <SEQ ID 8309> which encodes the amino acid sequence <SEQ ID 8310>. Analysis of this protein sequence reveals the following:

```
Possible site: 14
>>> Seems to have no N-terminal signal sequence
----- Final Results -----
                            bacterial cytoplasm --- Certainty = 0.0989(Affirmative) < succ>
                              bacterial membrane --- Certainty = 0.0000(Not Clear) < succ>
                                bacterial outside --- Certainty = 0.0000(Not Clear) < succ>
```

[14928] No corresponding DNA sequence was identified in S. agalactiae.

[14929] The protein has no significant homology with any sequences in the GENPEPT database.

[14930] Based on this analysis, it was predicted that this GAS-specific protein and its epitopes, could be useful antigens for vaccines or diagnostics.

### EXAMPLE 2906

[14931] A DNA sequence (GASx1987) was identified in S-pyogenes <SEQ ID 8311> which encodes the amino acid sequence <SEQ ID 8312>. Analysis of this protein sequence reveals the following:

```
Possible site: 34
>>> Seems to have no N-terminal signal sequence
----- Final Results -----
                            bacterial cytoplasm --- Certainty = 0.2389(Affirmative) < succ>
                              bacterial membrane --- Certainty = 0.0000(Not Clear) < succ>
                                bacterial outside --- Certainty = 0.0000(Not Clear) < succ>
```

[14932] No corresponding DNA sequence was identified in S. agalactiae.

[14933] Based on this analysis, it was predicted that this GAS-specific protein and its epitopes, could be useful antigens for vaccines or diagnostics.

### EXAMPLE 2907

[14934] A DNA sequence (GASx1988) was identified in S. pyogenes <SEQ ID 8313> which encodes the amino acid sequence <SEQ ID 8314>. Analysis of this protein sequence reveals the following:

```
Possible site: 48
>>> Seems to have no N-terminal signal sequence
----- Final Results -----
                            bacterial cytoplasm --- Certainty = 0.5904(Affirmative) < succ>
                              bacterial membrane --- Certainty = 0.0000(Not Clear) < succ>
                                bacterial outside --- Certainty = 0.0000(Not Clear) < succ>
```

[14935] No corresponding DNA sequence was identified in S. agalactiae.

[14936] The protein has homology with the following sequences in the GENPEPT database:

>GP: BAB16031 GB: AB030747 transposase
[Streptococcus pyogenes]
Identities = 22/24 (91%), Positives = 23/24 (95%)

| | | | |
|---|---|---|---|
| Query: | 1 | LERLFGTAKEYHNLCYTREKGKSK | 24 |
| | | +ERLFGTAKEYHNL YTREKGKSK | |
| Sbjct: | 399 | IERLFGTAKEYHNLRYTREKGKSK | 422 |

[14937] Based on this analysis, it was predicted that this GAS-specific protein and its epitopes, could be useful antigens for vaccines or diagnostics.

### EXAMPLE 2908

[14938] A DNA sequence (GASx1990R) was identified in S. pyogenes <SEQ ID 8315> which encodes the amino acid sequence <SEQ ID 8316>. Analysis of this protein sequence reveals the following:

```
Possible site: 32
>>> Seems to have a cleavable N-term signal seq.
----- Final Results -----
                                bacterial outside --- Certainty = 0.3000(Affirmative) < succ>
                              bacterial membrane --- Certainty = 0.0000(Not Clear) < succ>
                            bacterial cytoplasm --- Certainty = 0.0000(Not Clear) < succ>
```

[14939] No corresponding DNA sequence was identified in S. agalactiae.

[14940] Based on this analysis, it was predicted that this GAS-specific protein and its epitopes, could be useful antigens for vaccines or diagnostics.

### EXAMPLE 2909

[14941] A DNA sequence (GASx1991) was identified in S. pyogenes <SEQ ID 8317> which encodes the amino acid sequence <SEQ ID 8318>. Analysis of this protein sequence reveals the following:

| Possible site: 53 | | | | |
|---|---|---|---|---|
| >>> Seems to have an uncleavable N-term signal seq | | | | |
| | INTEGRAL | Likelihood = −0.16 | Transmembrane | 2-18 (1-18) |

```
----- Final Results -----
                              bacterial membrane --- Certainty = 0.1065(Affirmative) < succ>
                                bacterial outside --- Certainty = 0.0000(Not Clear) < succ>
                            bacterial cytoplasm --- Certainty = 0.0000(Not Clear) < succ>
```

[14942] No corresponding DNA sequence was identified in S. agalactiae.

[14943] The protein has no significant homology with any sequences in the GENPEPT database.

[14944] Based on this analysis, it was predicted that this GAS-specific protein and its epitopes, could be useful antigens for vaccines or diagnostics.

### EXAMPLE 2910

[14945] A DNA sequence (GASx1994) was identified in S. pyogenes <SEQ ID 8319> which encodes the amino acid sequence <SEQ ID 8320>. Analysis of this protein sequence reveals the following:

| Possible site: 40 | | | | |
|---|---|---|---|---|
| >>> Seems to have no N-terminal signal sequence | | | | |
| | INTEGRAL | Likelihood = −1.44 | Transmembrane | 28-44 (28-44) |

```
----- Final Results -----
                              bacterial membrane --- Certainty = 0.1574(Affirmative) < succ>
                                bacterial outside --- Certainty = 0.0000(Not Clear) < succ>
                            bacterial cytoplasm --- Certainty = 0.0000(Not Clear) < succ>
```

[14946] No corresponding DNA sequence was identified in S. agalactiae.

[14947] The protein has no significant homology with any sequences in the GENPEPT database.

[14948] Based on this analysis, it was predicted that this GAS-specific protein and its epitopes, could be useful antigens for vaccines or diagnostics.

### EXAMPLE 2911

[14949] A DNA sequence (GASx1996) was identified in S. pyogenes <SEQ ID 8321> which encodes the amino acid sequence <SEQ ID 8322>. Analysis of this protein sequence reveals the following:

```
Possible site: 13
>>> Seems to have no N-terminal signal sequence
----- Final Results -----
                            bacterial cytoplasm --- Certainty = 0.1076(Affirmative) < succ>
                              bacterial membrane --- Certainty = 0.0000(Not Clear) < succ>
                                bacterial outside --- Certainty = 0.0000(Not Clear) < succ>
```

[14950] No corresponding DNA sequence was identified in S. agalactiae.

[14951] The protein has no significant homology with any sequences in the GENPEPT database.

[14952] Based on this analysis, it was predicted that this GAS-specific protein and its epitopes, could be useful antigens for vaccines or diagnostics.

### EXAMPLE 2912

[14953] A DNA sequence (GASx1997R) was identified in S. pyogenes <SEQ ID 8323> which encodes the amino acid sequence <SEQ ID 8324>. Analysis of this protein sequence reveals the following:

| Possible site: 61 | | | | |
|---|---|---|---|---|
| >>> Seems to have no N-terminal signal sequence | | | | |
| | INTEGRAL | Likelihood = −7.96 | Transmembrane | 53-69 (49-75) |
| | INTEGRAL | Likelihood = −2.34 | Transmembrane | 24-40 (24-43) |

```
----- Final Results -----
                              bacterial membrane --- Certainty = 0.4185(Affirmative) < succ>
                                bacterial outside --- Certainty = 0.0000(Not Clear) < succ>
                            bacterial cytoplasm --- Certainty = 0.0000(Not Clear) < succ>
```

[14954] No corresponding DNA sequence was identified in S. agalactiae.

[14955] Based on this analysis, it was predicted that this GAS-specific protein and its epitopes, could be useful antigens for vaccines or diagnostics.

### EXAMPLE 2913

[14956] A DNA sequence (GASx2007R) was identified in S. pyogenes <SEQ ID 8325> which encodes the amino acid sequence <SEQ ID 8326>. Analysis of this protein sequence reveals the following:

| Possible site: 55 | | | | |
|---|---|---|---|---|
| >>> Seems to have no N-terminal signal sequence | | | | |
| | INTEGRAL | Likelihood = −6.64 | Transmembrane | 46-62 (43-65) |

```
----- Final Results -----
                              bacterial membrane --- Certainty = 0.3654(Affirmative) < succ>
                                bacterial outside --- Certainty = 0.0000(Not Clear) < succ>
                            bacterial cytoplasm --- Certainty = 0.0000(Not Clear) < succ>
```

[14957] No corresponding DNA sequence was identified in S. agalactiae.

[14958] The protein has homology with the following sequences in the GENPEPT database:

| >GP: AAB97959 GB: U96166 ATP-binding cassette lipoprotein | | | |
|---|---|---|---|
| [Streptococcus cristatus] | | | |
| Identities = 37/60 (61%), Positives = 42/60 (69%), Gaps = 1/60 (1%) | | | |
| Query: | 59 | FLTACGTKKDSKKEEVKEIKMSDIKDDAVSKKTKVVDGEEVTEYTTKDGNVIQIPAGNEE | 118 |
| | | FL ACG+K KE + + K D K DAV +KTK VDG+EVTEYT DGNVIQIPA EE | |
| Sbjct: | 12 | FLAACGSKNADNKE-ISDGKKVDFKKDAVDQKTKTVDGKEVTEYTMPDGNVIQIPADGEE | 70 |

[14959] Based on this analysis, it was predicted that this GAS-specific protein and its epitopes, could be useful antigens for vaccines or diagnostics.

### EXAMPLE 2914

[14960] A DNA sequence (GASx2009) was identified in S. pyogenes <SEQ ID 8327> which encodes the amino acid sequence <SEQ ID 8328>. Analysis of this protein sequence reveals the following:

```
Possible site: 41
>>> Seems to have no N-terminal signal sequence
----- Final Results -----
                            bacterial cytoplasm --- Certainty = 0.1246(Affirmative) < succ>
                              bacterial membrane --- Certainty = 0.0000(Not Clear) < succ>
                                bacterial outside --- Certainty = 0.0000(Not Clear) < succ>
```

[14961] No corresponding DNA sequence was identified in S. agalactiae.

[14962] The protein has no significant homology with any sequences in the GENPEPT database.

[14963] Based on this analysis, it was predicted that this GAS-specific protein and its epitopes, could be useful antigens for vaccines or diagnostics.

### EXAMPLE 2915

[14964] A DNA sequence (GASx2010) was identified in S. pyogenes <SEQ ID 8329> which encodes the amino acid sequence <SEQ ID 8330>. Analysis of this protein sequence reveals the following:

```
Possible site: 17
>>> Seems to have no N-terminal signal sequence
----- Final Results -----
                            bacterial cytoplasm --- Certainty = 0.2549(Affirmative) < succ>
                              bacterial membrane --- Certainty = 0.0000(Not Clear) < succ>
                                bacterial outside --- Certainty = 0.0000(Not Clear) < succ>
```

[14965] No corresponding DNA sequence was identified in S. agalactiae.

[14966] The protein has no significant homology with any sequences in the GENPEPT database.

[14967] Based on this analysis, it was predicted that this GAS-specific protein and its epitopes, could be useful antigens for vaccines or diagnostics.

### EXAMPLE 2916

[14968] A DNA sequence (GASx2012R) was identified in S. pyogenes <SEQ ID 8331> which encodes the amino acid sequence <SEQ ID 8332>. Analysis of this protein sequence reveals the following:

```
Possible site: 28
>>> Seems to have no N-terminal signal sequence
----- Final Results -----
                            bacterial cytoplasm --- Certainty = 0.3307(Affirmative) < succ>
                              bacterial membrane --- Certainty = 0.0000(Not Clear) < succ>
                                bacterial outside --- Certainty = 0.0000(Not Clear) < succ>
```

[14969] No corresponding DNA sequence was identified in S. agalactiae.

[14970] The protein has homology with the following sequences in the GENPEPT database:

| >GP: AAA27007 GB: L26141 pyrogenic exotoxin B [Streptococcus pyogenes] | | | |
|---|---|---|---|
| Identities = 40/102 (39%), Positives = 57/102 (55%), Gaps = 7/102 (6%) | | | |
| Query: | 2 | EMHFVRTEPEARRIAETFCAENTQTKTPMRVQQLSYPSDTDHSGGEL-----YIYALSPA | 56 |
| | | + +F R E EA+ A TF ++ K R + D + GGEL YIY +S | |
| Sbjct: | 28 | DQNFARNEKEAKDSAITFIQKSAAIKAGARSAE-DIKLDKVNLGGELSGSNMYIYNISTG | 86 |
| Query: | 57 | GFIIVSGDTRAHTILGYSFDNNLDLN-HDNVRSMIEAYQKQI | 97 |
| | | GF+IVSGD R+ ILGYS + D+N +N+ S +E+Y +QI | |
| Sbjct: | 87 | GFVIVSGDKRSPEILGYSTSGSFDVNGKENIASFMESYVEQI | 128 |

[14971] Based on this analysis, it was predicted that this GAS-specific protein and its epitopes, could be useful antigens for vaccines or diagnostics.

### EXAMPLE 2917

[14972] A DNA sequence (GASx2013R) was identified in S. pyogenes <SEQ ID 8333> which encodes the amino acid sequence <SEQ ID 8334>. Analysis of this protein sequence reveals the following:

```
Possible site: 22
>>> Seems to have a cleavable N-term signal seq.
----- Final Results -----
                                bacterial outside --- Certainty = 0.3000(Affirmative) < succ>
                              bacterial membrane --- Certainty = 0.0000(Not Clear) < succ>
                            bacterial cytoplasm --- Certainty = 0.0000(Not Clear) < succ>
```

[14973] No corresponding DNA sequence was identified in S. agalactiae.

[14974] Based on this analysis, it was predicted that this GAS-specific protein and its epitopes, could be useful antigens for vaccines or diagnostics.

### EXAMPLE 2918

[14975] A DNA sequence (GASx2014R) was identified in S. pyogenes <SEQ ID 8335> which encodes the amino acid sequence <SEQ ID 8336>. Analysis of this protein sequence reveals the following:

```
Possible site: 44
>>> Seems to have no N-terminal signal sequence
----- Final Results -----
                            bacterial cytoplasm --- Certainty = 0.1392(Affirmative) < succ>
                              bacterial membrane --- Certainty = 0.0000(Not Clear) < succ>
                                bacterial outside --- Certainty = 0.0000(Not Clear) < succ>
```

[14976] No corresponding DNA sequence was identified in S. agalactiae.

[14977] The protein has no significant homology with any sequences in the GENPEPT database.

[14978] Based on this analysis, it was predicted that this GAS-specific protein and its epitopes, could be useful antigens for vaccines or diagnostics.

### EXAMPLE 2919

[14979] A DNA sequence (GASx2015) was identified in S. pyogenes <SEQ ID 8337> which encodes the amino acid sequence <SEQ ID 8338>. Analysis of this protein sequence reveals the following:

| Possible site: 35 | | | | |
|---|---|---|---|---|
| >>> Seems to have an uncleavable N-term signal seq | | | | |
| | INTEGRAL | Likelihood = −1.75 | Transmembrane | 18-34 (17-37) |

```
----- Final Results -----
                              bacterial membrane --- Certainty = 0.1702(Affirmative) < succ>
                                bacterial outside --- Certainty = 0.0000(Not Clear) < succ>
                            bacterial cytoplasm --- Certainty = 0.0000(Not Clear) < succ>
```

[14980] No corresponding DNA sequence was identified in S. agalactiae.

[14981] The protein has no significant homology with any sequences in the GENPEPT database.

[14982] Based on this analysis, it was predicted that this GAS-specific protein and its epitopes, could be useful antigens for vaccines or diagnostics.

### EXAMPLE 2920

[14983] A DNA sequence (GASx2018) was identified in S. pyogenes <SEQ ID 8339> which encodes the amino acid sequence <SEQ ID 8340>. Analysis of this protein sequence reveals the following:

| Possible site: 29 | | | | |
|---|---|---|---|---|
| >>> Seems to have no N-terminal signal sequence | | | | |
| | INTEGRAL | Likelihood = −5.84 | Transmembrane | 23-39 (22-40) |

```
----- Final Results -----
                              bacterial membrane --- Certainty = 0.3336(Affirmative) < succ>
                                bacterial outside --- Certainty = 0.0000(Not Clear) < succ>
                            bacterial cytoplasm --- Certainty = 0.0000(Not Clear) < succ>
```

[14984] No corresponding DNA sequence was identified in S. agalactiae.

[14985] The protein has no significant homology with any sequences in the GENPEPT database.

[14986] Based on this analysis, it was predicted that this GAS-specific protein and its epitopes, could be useful antigens for vaccines or diagnostics.

### EXAMPLE 2921

[14987] A DNA sequence (GASx2019) was identified in S. pyogenes <SEQ ID 8341> which encodes the amino acid sequence <SEQ ID 8342>. Analysis of this protein sequence reveals the following:

```
Possible site: 26
>>> Seems to have no N-terminal signal sequence
----- Final Results -----
                            bacterial cytoplasm --- Certainty = 0.0669(Affirmative) < succ>
                              bacterial membrane --- Certainty = 0.0000(Not Clear) < succ>
                                bacterial outside --- Certainty = 0.0000(Not Clear) < succ>
```

[14988] No corresponding DNA sequence was identified in S. agalactiae.

[14989] The protein has homology with the following sequences in the GENPEPT database:

| >GP: AAC98898 GB: AW023179 low temperature requirement C protein | | | |
|---|---|---|---|
| [Listeria monocytogenes] | | | |
| Identities = 95/144 (65%), Positives = 117/144 (80%) | | | |
| Query: | 15 | LAERGVSLEAIAELVLFLQNDYIPNLTMAECLESVEAVLAKREVQNAIITGVELDKLAEA | 74 |
| | | L ERGV ++ IAELVLFLQ Y P L + C ++VE VL KREVQNA++TG++LD +AE | |
| Sbjct: | 16 | LIERGVEIDDIAELVLFLQQKYHPGLELDICRQNVEHVLRKREVQNAVLTGIQLDVMAEK | 75 |
| Query: | 75 | NQLSEPLLSILKTDQGLYGIDEILALSIVNLYGSIGFTNYGYLDKTKPGIVDKLNHKDGY | 134 |
| | | +L +PL +I+ D+GLYG+DEILALSIVN+YGSIGFTNYGY+DK KPGI+ KLN DG | |
| Sbjct: | 76 | GELVQPLQNIISADEGLYGVDEILALSIVNVYGSIGFTNYGYIDKVKPGILAKLNEHDGI | 135 |
| Query: | 135 | SCHTFLDDIVSAIAAAAASRIAHN | 158 |
| | | + HTFLDDIV AIAAAAASR+AH+ | |
| Sbjct: | 136 | AVHTFLDDIVGAIAAAAASRLAHS | 159 |

[14990] Based on this analysis, it was predicted that this GAS-specific protein and its epitopes, could be useful antigens for vaccines or diagnostics.

### EXAMPLE 2922

[14991] A DNA sequence (GASx2030) was identified in S. pyogenes <SEQ ID 8343> which encodes the amino acid sequence <SEQ ID 8344>. Analysis of this protein sequence reveals the following:

```
Possible site: 18
>>> Seems to have no N-terminal signal sequence
----- Final Results -----
                            bacterial cytoplasm --- Certainty = 0.0320(Affirmative) < succ>
                              bacterial membrane --- Certainty = 0.0000(Not Clear) < succ>
                                bacterial outside --- Certainty = 0.0000(Not Clear) < succ>
```

[14992] No corresponding DNA sequence was identified in S. agalactiae.

[14993] The protein has no significant homology with any sequences in the GENPEPT database.

[14994] Based on this analysis, it was predicted that this GAS-specific protein and its epitopes, could be useful antigens for vaccines or diagnostics.

### EXAMPLE 2923

[14995] A DNA sequence (GASx2031) was identified in S. pyogenes <SEQ ID 8345> which encodes the amino acid sequence <SEQ ID 8346>. Analysis of this protein sequence reveals the following:

```
Possible site: 24
>>> Seems to have no N-terminal signal sequence
----- Final Results -----
                            bacterial cytoplasm --- Certainty = 0.0583(Affirmative) < succ>
                              bacterial membrane --- Certainty = 0.0000(Not Clear) < succ>
                                bacterial outside --- Certainty = 0.0000(Not Clear) < succ>
```

[14996] No corresponding DNA sequence was identified in S. agalactiae.

[14997] The protein has no significant homology with any sequences in the GENPEPT database.

[14998] Based on this analysis, it was predicted that this GAS-specific protein and its epitopes, could be useful antigens for vaccines or diagnostics.

### EXAMPLE 2924

[14999] A DNA sequence (GASx2032R) was identified in S. pyogenes <SEQ ID 8347> which encodes the amino acid sequence <SEQ ID 8348>. Analysis of this protein sequence reveals the following:

| Possible site: 53 | | | | |
|---|---|---|---|---|
| >>> Seems to have no N-terminal signal sequence | | | | |
| | INTEGRAL | Likelihood = −2.76 | Transmembrane | 27-43 (26-43) |

```
----- Final Results -----
                              bacterial membrane --- Certainty = 0.2105(Affirmative) < succ>
                                bacterial outside --- Certainty = 0.0000(Not Clear) < succ>
                            bacterial cytoplasm --- Certainty = 0.0000(Not Clear) < succ>
```

[15000] No corresponding DNA sequence was identified in S. agalactiae.

[15001] The protein has no significant homology with any sequences in the GENPEPT database.

[15002] Based on this analysis, it was predicted that this GAS-specific protein and its epitopes, could be useful antigens for vaccines or diagnostics.

[15003] A related GBS gene <SEQ ID 8467> and protein <SEQ ID 8468> were also identified. Analysis of this protein sequence reveals the following:

| Lipop: Possible site: −1 Crend: 10 | | | |
|---|---|---|---|
| McG: Discrim Score: −11.19 | | | |
| GvH: Signal Score (−7.5): −4.94 | | | |
| Possible site: 49 | | | |
| >>> Seems to have no N-terminal signal sequence | | | |
| ALOM program | count: 1 | value: −4.19 | threshold: 0.0 |

| | | | |
|---|---|---|---|
| INTEGRAL | Likelihood = −4.19 | Transmembrane | 25-41 (25-42) |

| | | |
|---|---|---|
| PERIPHERAL | Likelihood = 13.26 | 41 |

modified ALOM score: 1.34
*** Reasoning Step: 3
----- Final Results -----
bacterial membrane --- Certainty = 0.2678 (Affirmative) < succ>
bacterial outside --- Certainty = 0.0000 (Not Clear) < succ>
bacterial cytoplasm --- Certainty = 0.0000 (Not Clear) < succ>

[15004] The protein has homology with the following sequences in the databases:

[chemical structure]

[15005] SEQ ID 8468 (GBS396) was expressed in E. coli as a GST-fusion product. SDS-PAGE analysis of total cell extract is shown in FIG. 83 (lane 9; MW 35 kDa).

[15006] GBS396-GST was purified as shown in FIG. 217, lane 8.

### EXAMPLE 2925

[15007] A DNA sequence (GASx2034R) was identified in S. pyogenes <SEQ ID 8349> which encodes the amino acid sequence <SEQ ID 8350>. Analysis of the protein sequence reveals the following:

| Possible site: 21 | | | |
|---|---|---|---|
| >>> Seems to have no N-terminal signal sequence | | | |
| INTEGRAL | Likelihood = −0.59 | Transmembrane | 53-69 (53-70) |

----- Final Results -----
bacterial membrane --- Certainty = 0.1235 (Affirmative) < succ>
bacterial outside --- Certainty = 0.0000 (Not Clear) < succ>
bacterial cytoplasm --- Certainty = 0.0000 (Not Clear) < succ>

[15008] No corresponding DNA sequence was identified in S. agalactiae.

[15009] The protein has no significant homology with any sequences in the GENPEPT database.

[15010] Based on this analysis, it was predicted that this GAS-specific protein and its epitopes, could be useful antigens for vaccines or diagnostics.

### EXAMPLE 2926

[15011] A DNA sequence (GASx2035) was identified in S. pyogenes <SEQ ID 8351> which encodes the amino acid sequence <SEQ ID 8352>. Analysis of this protein sequence reveals the following:

Possible site: 39
>>> Seems to have no N-terminal signal sequence
----- Final Results -----
bacterial cytoplasm --- Certainty = 0.2928 (Affirmative) < succ>
bacterial membrane --- Certainty = 0.0000 (Not Clear) < succ>
bacterial outside --- Certainty = 0.0000 (Not Clear) < succ>

[15012] No corresponding DNA sequence was identified in S. agalactiae.

[15013] The protein has no significant homology with any sequences in the GENPEPT database.

[15014] Based on this analysis, it was predicted that this GAS-specific protein and its epitopes, could be useful antigens for vaccines or diagnostics.

### EXAMPLE 2927

[15015] A DNA sequence (GASx2042R) was identified in S. pyogenes <SEQ ID 8353> which encodes the amino acid sequence <SEQ ID 8354>. Analysis of this protein sequence reveals the following:

Possible site: 44
>>> Seems to have no N-terminal signal sequence
----- Final Results -----
bacterial cytoplasm --- Certainty = 0.2547 (Affirmative) < succ>
bacterial membrane --- Certainty = 0.0000 (Not Clear) < succ>
bacterial outside --- Certainty = 0.0000 (Not Clear) < succ>

[15016] No corresponding DNA sequence was identified in S. agalactiae.

[15017] The protein has no significant homology with any sequences in the GENPEPT database.

[15018] Based on this analysis, it was predicted that this GAS-specific protein and its epitopes, could be useful antigens for vaccines or diagnostics.

### EXAMPLE 2928

[15019] A DNA sequence (GASx2043) was identified in S. pyogenes <SEQ ID 8355> which encodes the amino acid sequence <SEQ ID 8356>. Analysis of this protein sequence reveals the following:

Possible site: 26
>>> Seems to have no N-terminal signal sequence
----- Final Results -----
bacterial cytoplasm --- Certainty = 0.3289 (Affirmative) < succ>
bacterial membrane --- Certainty = 0.0000 (Not Clear) < succ>
bacterial outside --- Certainty = 0.0000 (Not Clear) < succ>

[15020] No corresponding DNA sequence was identified in S. agalactiae.

[15021] The protein has no significant homology with any sequences in the GENPEPT database.

[15022] Based on this analysis, it was predicted that this GAS-specific protein and its epitopes, could be useful antigens for vaccines or diagnostics.

### EXAMPLE 2929

[15023] A DNA sequence (GASx2049) was identified in S. pyogenes <SEQ ID 8357> which encodes the amino acid sequence <SEQ ID 8358>. Analysis of this protein sequence reveals the following:

Possible site: 13
>>> Seems to have no N-terminal signal sequence
----- Final Results -----
bacterial cytoplasm --- Certainty = 0.4014 (Affirmative) < succ>
bacterial membrane --- Certainty = 0.0000 (Not Clear) < succ>
bacterial outside --- Certainty = 0.0000 (Not Clear) < succ>

[15024] No corresponding DNA sequence was identified in S. agalactiae.

[15025] The protein has no significant homology with any sequences in the GENPEPT database.

[15026] Based on this analysis, it was predicted that this GAS-specific protein and its epitopes, could be useful antigens for vaccines or diagnostics.

### EXAMPLE 2930

[15027] A DNA sequence (GASx2052) was identified in S. pyogenes <SEQ ID 8359> which encodes the amino acid sequence <SEQ ID 8360>. Analysis of this protein sequence reveals the following:

Possible site: 40
>>> Seems to have a cleavable N-term signal seq.
----- Final Results -----
bacterial outside --- Certainty = 0.3000 (Affirmative) < succ>
bacterial membrane --- Certainty = 0.0000 (Not Clear) < succ>
bacterial cytoplasm --- Certainty = 0.0000 (Not Clear) < succ>

[15028] No corresponding DNA sequence was identified in S. agalactiae.

[15029] The protein has no significant homology with any sequences in the GENPEPT database.

[15030] Based on this analysis, it was predicted that this GAS-specific protein and its epitopes, could be useful antigens for vaccines or diagnostics.

### EXAMPLE 2931

[15031] A DNA sequence (GASx2055R) was identified in S. pyogenes <SEQ ID 8361> which encodes the amino acid sequence <SEQ ID 8362>. Analysis of this protein sequence reveals the following:

Possible site: 32
>>> Seems to have no N-terminal signal sequence
----- Final Results -----
bacterial cytoplasm --- Certainty = 0.3048 (Affirmative) < succ>
bacterial membrane --- Certainty = 0.0000 (Not Clear) < succ>
bacterial outside --- Certainty = 0.0000 (Not Clear) < succ>

[15032] No corresponding DNA sequence was identified in S. agalactiae.

[15033] The protein has homology with the following sequences in the GENPEPT database:

| >GP: BAB05703 GB: AP001513 imidazolonepropionase | | | |
|---|---|---|---|
| (imidazolone-5-propionate hydrolase) [Bacillus halodurans] | | | |
| Identities = 203/416 (48%), Positives = 278/416 (66%), Gaps = 4/416 (0%) | | | |
| Query: | 11 | DVLLTHFNQLFCLNDPGHPLTGQEMKKATIVEDGYIAIKDGLIVALGSGEPDAELVGTQT | 70 |
| | | D LL + QL + G P G+EM + ++E + I+DG + +G+ Q | |
| Sbjct: | 6 | DTLLVNIGQLLPMESKG-PKRGKEMSELQLLEHAALGIRDGKVAFIGTMVEADTFTANQM | 64 |
| Query: | 71 | IMRSYKGKIATPGIIDCHTHLVYGGSREHEFAKKLAGVSYLDILAQGGGILSTVRATRSA | 130 |
| | | I +GK+ TPG++D HTHL++GGSREHE A K GV YL+IL GGGIL+TV ATR+A | |
| Sbjct: | 65 | I--DCQGKLVTPGLVDPHTHLIFGGSREHEMALKQQGVPYLEILKNGGGILATVEATRAA | 122 |
| Query: | 131 | SFDNLYQKSKRLLDYMLLHGVTTVEAKSGYGLDWETEKRQLDVVAALEKDHPIDLVSTFM | 190 |
| | | S + L K+ L+ ML +GVTT+EAKSGYGLD ETE +QL A+ + HPID+VSTF+ | |
| Sbjct: | 123 | SEEELITKAICHLNRMLSYGVTTIEAKSGYGLDRETEWKQLRAAKAVGEQHPIDIVSTFL | 182 |
| Query: | 191 | AAHAIPEEYKGNPKAYLDVIIKDMLPVVKEENLAEFCDIFCEKNVFTADESRYLLSKAKE | 250 |
| | | AHAIP ++ +P +LD + DML +KE+NLAEF DIF E VFT ++SR L KAKE | |
| Sbjct: | 183 | GAHAIPTSHRNDPDRFLDEMA-DMLGEIKEQNLAEFVDIFTETGVFTVEQSRTFLQKAKE | 241 |
| Query: | 251 | MGFKLRIHADEIASIGGVDVAAELSAVSAEHLMMITDDGIAKLIGAGVIGNLLPATTFSL | 310 |
| | | GF L++HADEI +GG ++A EL A+SA+HL+ +D GI K+ AG I LLP TTF L | |
| Sbjct: | 242 | RGFGLKLHADEIDPLGGAELAGELGAISADHLVGASDQGIQKMAAAGTIACLLPGTTFYL | 301 |
| Query: | 311 | MEDTYAPARKMIDAGMAITLSTDSNPGSCPTANMQFVMQLGCFMLRLTPIEVLNAVTINA | 370 |
| | | +DTYA AR MID G+A+T+STD NPGS PT N+Q +M + L++TP E+ +AVT+N | |
| Sbjct: | 302 | GKDTYARARDMIDQGLAVTISTDFNPGSSPTENLQLIMSIAALRLKMTPEEIWHAVTVNG | 361 |
| Query: | 371 | AYSVNRQERVGSLTVGKEADIAIFDAPNIDYPFYFFATNLIHQVYKKGQLTVDRGR | 426 |
| | | A+++ R + G L VG+ AD+ ++DA N Y Y + N +H V+KKG++ +R R | |
| Sbjct: | 362 | AHAIGRGDTAGQLAVGRAADVVVWDAKNYYYVPYHYGVNHVHSVWKKGEVVYERRR | 417 |

[15034] Based on this analysis, it was predicted that this GAS-specific protein and its epitopes, could be useful antigens for vaccines or diagnostics.

### EXAMPLE 2932

[15035] A DNA sequence (GASx2056) was identified in S. pyogenes <SEQ ID 8363> which encodes the amino acid sequence <SEQ ID 8364>. Analysis of this protein sequence reveals the following:

```
Possible site: 14
>>> Seems to have no N-terminal signal sequence
----- Final Results -----
                            bacterial cytoplasm --- Certainty = 0.1847(Affirmative) < succ>
                              bacterial membrane --- Certainty = 0.0000(Not Clear) < succ>
                                bacterial outside --- Certainty = 0.0000(Not Clear) < succ>
```

[15036] No corresponding DNA sequence was identified in S. agalactiae.

[15037] The protein has homology with the following sequences in the GENPEPT database:

| >GP: CAB61139 GB: AL132952 predicted using Genefinder~cDNA EST | | | |
|---|---|---|---|
| yk155e6.3 comes from this gene~cDNA EST yk155e6.5 comes | | | |
| from this gene~cDNA EST yk156d6.5 comes from this | | | |
| gene~cDNA EST yk259b10.3 comes fr | | | |
| Identities = 302/649 (46%), Positives = 419/649 (64%), Gaps = 17/649 (2%) | | | |
| Query: | 29 | EGIRRAPDRGFRLTQAQTEIALKNALRYVPTKFHEEVIPEFLEELKTRGRIYGYRFRPKD | 88 |
| | | + + AP R LTQ + +A++NALRY+P + H + EF EEL T G IYGYRF P | |
| Sbjct: | 85 | KNVAHAPKRPCNLTQTEKMLAVRNALRYIPKEHHVLLATEFAEELNTYGHIYGYRFMPNF | 144 |
| Query: | 89 | RIYGKPIDEYKGNCTAAKAMQVMIDNNLSFEIALYPYELVTYGETGSVCANWMQYCLIKK | 148 |
| | | ++ P+ E +C A A+ +MI NNL +A +P ELVTYG G V +NW+Q+ L+ + | |
| Sbjct: | 145 | DLFAPPVSEIGAHCEQASAIILMILNNLDKRVAQFPQELVTYGGNGQVFSNWIQFRLVLR | 204 |
| Query: | 149 | YLEVMTDEQTLVVESGHPVGLFKSKPEAPRVIITNGLLVGEYDNMKDWEIAEEMGVTNYG | 208 |
| | | YL MTD QTLV+ SGHP+GLF S P++PR+ +TNG+++ Y + ++ +GVT YG | |
| Sbjct: | 205 | YLYTMTDHQTLVLYSGHPLGLFPSTPDSPRMTVTNGMMIPSYSTKELYDKYFALGVTQYG | 264 |
| Query: | 209 | QMTAGGWMYIGPQGIVHGTFNTLLNAGRLKLGVADDGDLTGKLFISSGLGGMSGAQGKAA | 268 |
| | | QMTAG + YIGPQGIVHGT T+LNAGR ++G+ L GK+F+++GLGGMSGAQ KAA | |
| Sbjct: | 265 | QMTAGSFCYIGPQGIVHGTTITVLNAGR-RMGL---DSLAGKVFVTAGLGGMSGAQPKAA | 320 |
| Query: | 269 | EIAKAVAIIAEVDQSRIKTRHSQGWISQIAESPEEALQLAQKAIDAKESTSIAYHGNIVD | 328 |
| | | +IA + +IAE+ + + RH QGW+ ++ EE + ++ + KE+ SI Y GN+VD | |
| Sbjct: | 321 | KIAGCIGVIAEISDTALLKRHQQGWLDVYSKDLEEIVNWIKEYREKKEAISIGYLGNVVD | 380 |
| Query: | 329 | LLE-YVNDKQIHVDLLSDQTSCHNVYDGGYCPVGISFDERTRLLAEDKDTFHQMVDDTLA | 387 |
| | | L E + + V+L SDQTS HN + GG+ P G++F++ +++ D F ++V ++L | |
| Sbjct: | 381 | LWERLAEEPECLVELGSDQTSLHNPFLGGFYPAGLTFEQSNQMMTSDPVKFKKLVQNSLI | 440 |
| Query: | 388 | RHFEAIKTLTENGTYFFDYGNAFMKSVYDSGITEISKNGRNDKDGFIWPSYVEDIMGPML | 447 |
| | | R AI + G YF+DYGNAF+ +G + ++ ++DK F +PSY++DIMG + | |
| Sbjct: | 441 | RQIAAIDKIAAKGMYFWDYGNAFLLECQRAGANLLREDAQDDK-SFRYPSYMQDIMGD-I | 498 |
| Query: | 448 | FDYGYGPFRWVCLSGNHDDLVATDKAAMEAIDPDR--------RYQDRDNYNWIRDAEKN | 499 |
| | | F G+GPFRWVC SG +DL TD+ A + ID + + Q DN WI +AEKN | |
| Sbjct: | 499 | FSMGFGPFRWVCTSGKPEDLRLTDQTACKIIDELKDTDVPEYVKQQYLDNKKWIEEAEKN | 558 |
| Query: | 500 | QLVVGTQARILYQDCIGRVTIALKFNELVRKGKI-GPVMIGRDHHDVSGTDSPFRETSNI | 558 |
| | | +LVVG+QARILY D GRV +A FNELV+ GK+ ++I RDHHDVSGTDSPFRETSN+ | |
| Sbjct: | 559 | KLVVGSQARILYSDRAGRVALASAFNELVKSGKVSAAIVISRDHHDVSGTDSPFRETSNV | 618 |
| Query: | 559 | KDGSNVTCDMAVQCYAGNAARGMSLVALHNGGGTGIGKAINGGFGLVLDGSERIDEIIKS | 618 |
| | | DGS T DMAVQ G++ RG + VALHNGGG G G INGGFG+VLDGS + | |
| Sbjct: | 619 | YDGSAFTADMAVQNCIGDSFRGATWVALHNGGGVGWGDVINGGFGIVLDGSSDAARRAEG | 678 |
| Query: | 619 | AIAWDTMGGVARRNWARNEHAIETAIEYNRLHAGTDHITIPYLADDDLV | 667 |
| | | + WD GV RR+W+ N A E AI+ +T+P AD++L+ | |
| Sbjct: | 679 | MLNWDVPNGVTRRSWSGNAKAQE-AIQRAEKQVDGLRVTLPVEADEELL | 726 |

[15038] Based on this analysis, it was predicted that this GAS-specific protein and its epitopes, could be useful antigens for vaccines or diagnostics.

### EXAMPLE 2933

[15039] A DNA sequence (GASx2057) was identified in S. pyogenes <SEQ ID 8365> which encodes the amino acid sequence <SEQ ID 8366>. Analysis of this protein sequence reveals the following:

```
Possible site: 44
>>> Seems to have no N-terminal signal sequence
----- Final Results -----
                            bacterial cytoplasm --- Certainty = 0.1887(Affirmative) < succ>
                              bacterial membrane --- Certainty = 0.0000(Not Clear) < succ>
                                bacterial outside --- Certainty = 0.0000(Not Clear) < succ>
```

[15040] No corresponding DNA sequence was identified in S. agalactiae.

[15041] The protein has homology with the following sequences in the GENPEPT database:

| >GP: AAD35925 GB: AE001751 | | | |
|---|---|---|---|
| formiminotransferase- | | | |
| cyclodeaminase/formiminotetrahydrofolate cyclodeaminase, | | | |
| putative [Thermotoga maritima] | | | |
| Identities = 160/296 (54%), Positives = 214/296 (72%), Gaps = 2/296 (0%) | | | |
| Query: | 3 | KIVECIPNFSEGQNQAVIDGLVATAKSIPGVTLLDYSSDASHNRSVFTLVGDDQSIQEAA | 62 |
| | | K++E +PNFSEG+ + V++ +VA AK V +LD+S DA HNRSV TLVG+ +++ A | |
| Sbjct: | 2 | KLIESVPNFSEGRRKEVVEKIVAEAKKYDRVWVLDWSMDADHNRSVITLVGEPENLINAL | 61 |
| Query: | 63 | FQLVKYASENIDMTKHHGEHPRMGATDVCPFVPIKDITTQECVEISKQVAERINRELGIP | 122 |
| | | F + K A+E ID+ H G+HPRMGA DV P VP+ + T +ECVE SK + RI ELGIP | |
| Sbjct: | 62 | FDMTKKAAELIDLRNHTGQHPRMGAADVIPLVPLYNTTMEECVEYSKILGRRIGEELGIP | 121 |
| Query: | 123 | IFLYEDSATRPERQNLAKVRKGQFEGMPEKLLEEDWAPDYGDRKIHPTAGVTAVGARMPL | 182 |
| | | ++LYE SATRPERQNLA +RKG+FEG EK+ + W PD+G ++HPTAGVTAVGAR L | |
| Sbjct: | 122 | VYLYEKSATRPERQNLADIRKGEFEGFFEKIKDPLWKPDFGPDRVHPTAGVTAVGAREFL | 181 |
| Query: | 183 | VAFNVNLDTDNIDIAHKIAKIIRGSGGGYKYCKAIGVMLEDRHIAQVSMNMVNFEKCSLY | 242 |
| | | +AFNVNL T ++ IA KIA+ IR S GG +Y KAIGV L+ R + QVS+N+ N +K LY | |
| Sbjct: | 182 | IAFNVNLGTRDVKIAEKIARAIRFSSGGLRYVKAIGVDLKGRGVVQVSINITNHKKTPLY | 241 |
| Query: | 243 | RTFETIKFEARRYGVNVIGSEVIGLAPAKALIDVAEYYLQVEDFDYHKQILENHLL | 298 |
| | | R FE IK EA RYGV V+GSE++GL P ++L+ YYL+ + K+++E++LL | |
| Sbjct: | 242 | RVFELIKMEAERYGVPVLGSEIVGLFPLESLLKTVSYYLRTD--LNAKKVIESNLL | 295 |

[15042] Based on this analysis, it was predicted that this GAS-specific protein and its epitopes, could be useful antigens for vaccines or diagnostics.

### EXAMPLE 2934

[15043] A DNA sequence (GASx2058) was identified in S. pyogenes <SEQ ID 8367> which encodes the amino acid sequence <SEQ ID 8368>. Analysis of this protein sequence reveals the following:

```
Possible site: 31
>>> Seems to have no N-terminal signal sequence
----- Final Results -----
                            bacterial cytoplasm --- Certainty = 0.2776(Affirmative) < succ>
                              bacterial membrane --- Certainty = 0.0000(Not Clear) < succ>
                                bacterial outside --- Certainty = 0.0000(Not Clear) < succ>
```

[15044] No corresponding DNA sequence was identified in S. agalactiae.

[15045] The protein has homology with the following sequences in the GENPEPT database:

| >GP: AAA62653 GB: L33465 methenyl tetrahydrofolate cyclohydrolase | | | |
|---|---|---|---|
| [Methylobacterium extorquens] | | | |
| Identities = 79/198 (39%), Positives = 112/198 (55%) | | | |
| Query: | 7 | SLTDFAKVLGSDAPAPGGGSAAALSGANGISLTKMVCELTLGKKKYADYQDIITEIHAKS | 66 |
| | | ++ F L S AP PGGG AAA+SGA G +L MVC LT+GKKKY + + + ++ KS | |
| Sbjct: | 6 | TIETFLDGLASSAPTPGGGGAAAISGAMGAALVSMVCNLTIGKKKYVEVEADLMQVLEKS | 65 |
| Query: | 67 | TALQASLLAAIDKDTEAFNLVSAVFDMPKETDEDKAARRTAMQKALKTAAQSPFEMMTLM | 126 |
| | | L+ +L I D EAF+ V + +PK TDE+KAAR +Q+ALKTA P + | |
| Sbjct: | 66 | EGLRRTLTGMIADDVEAFDAVMGAYGLPKNTDEEKAARAAKIQEALKTATDVPLACCRVC | 125 |
| Query: | 127 | VEALEITATAVGKSNTNAASDLGVAALNLKAGLQGAWLNVLINLSGIKDEDFVTDYRQKG | 186 |
| | | E +++ K N N SD GVA L+ AGL+ A LNV +N G+ D F + ++ | |
| Sbjct: | 126 | REVIDLAEIVAEKGNLNVISDAGVAVLSAYAGLRSAALNVYVNAKGLDDRAFAEERLKEL | 185 |
| Query: | 187 | QALLDKGCHLADDIYTKI | 204 |
| | | + LL + L + IY + | |
| Sbjct: | 186 | EGLLAEAGALNERIYETV | 203 |

[15046] Based on this analysis, it was predicted that this GAS-specific protein and its epitopes, could be useful antigens for vaccines or diagnostics.

### EXAMPLE 2935

[15047] A DNA sequence (GASx2061) was identified in S. pyogenes <SEQ ID 8369> which encodes the amino acid sequence <SEQ ID 8370>. Analysis of this protein sequence reveals the following:

```
Possible site: 22
>>> Seems to have no N-terminal signal sequence
----- Final Results -----
                            bacterial cytoplasm --- Certainty = 0.3924(Affirmative) < succ>
                              bacterial membrane --- Certainty = 0.0000(Not Clear) < succ>
                                bacterial outside --- Certainty = 0.0000(Not Clear) < succ>
```

[15048] No corresponding DNA sequence was identified in S. agalactiae.

[15049] The protein has no significant homology with any sequences in the GENPEPT database.

[15050] Based on this analysis, it was predicted that this GAS-specific protein and its epitopes, could be useful antigens for vaccines or diagnostics.

### EXAMPLE 2936

[15051] A DNA sequence (GASx2063) was identified in S. pyogenes <SEQ ID 8371> which encodes the amino acid sequence <SEQ ID 8372>. Analysis of this protein sequence reveals the following:

| Possible site: 57 | | | | |
|---|---|---|---|---|
| >>> Seems to have an uncleavable N-term signal seq | | | | |
| | INTEGRAL | Likelihood = −1.06 | Transmembrane | 231-247 (231-247) |
| | INTEGRAL | Likelihood = −0.53 | Transmembrane | 2-18 (1-18) |

```
----- Final Results -----
                              bacterial membrane --- Certainty = 0.1426(Affirmative) < succ>
                                bacterial outside --- Certainty = 0.0000(Not Clear) < succ>
                            bacterial cytoplasm --- Certainty = 0.0000(Not Clear) < succ>
```

[15052] No corresponding DNA sequence was identified in S. agalactiae.

[15053] The protein has homology with the following sequences in the GENPEPT database:

| >GP: CAB15971 GB: Z99124 histidase [Bacillus subtilis] | | | |
|---|---|---|---|
| Identities = 236/477 (49%), Positives = 321/477 (66%), Gaps = 2/477 (0%) | | | |
| Query: | 42 | VINLDGESLTIEDVIAIARQGVACHIDDSAIEAVNASRKIVDDIVSEKRVVYGVTTGFGS | 101 |
| | | ++ LDG SLT DV + + ++E V SR V+ IV +++ +YG+ TGFG | |
| Sbjct: | 1 | MVTLDGSSLTTADVARVLFDFEEAAASEESMERVKKSRAAVERIVRDEKTIYGINTGFGK | 60 |
| Query: | 102 | LCNVSISPEDTVQLQENLIRTHASGFGDPLPEDAVRAIMLIRINSLVKGYSGIRLSTIEK | 161 |
| | | +V I ED+ LQ NLI +HA G GDP PE RA++L+R N+L+KG+SG+R IE+ | |
| Sbjct: | 61 | FSDVLIQKEDSAALQLNLILSHACGVGDPFPECVSRAMLLLRANALLKGFSGVRAELIEQ | 120 |
| Query: | 162 | LLELLNKGVHPYIPEKGSLGASGDLAPLAHMVLPMLGLGKAYYKGELLSGQEALDKAGID | 221 |
| | | LL LNK VHP IP++GSLGASGDLAPL+H+ L ++G G+ +++GE + L KAGI | |
| Sbjct: | 121 | LLAFLNKRVHPVIPQQGSLGASGDLAPLSHLALALIGQGEVFFEGERMPAMTGLKKAGIQ | 180 |
| Query: | 222 | KISLAAKEGLALINGTTVLTAVGALATYDAIQLLKLSDLAGALSLEVHNGITSPFEENLH | 281 |
| | | ++L +KEGLALINGT +TA+G +A +A +L ++ +L++E GI F+E++H | |
| Sbjct: | 181 | PVTLTSKEGLALINGTQAMTAMGVVAYIEAEKLAYQTERIASLTIEGLQGIIDAFDEDIH | 240 |
| Query: | 282 | TIRPQSGQLATARNIRNLLEGSQNTTVATQSRVQDPYTLRCMPQIHGASKDSIAYVKSKV | 341 |
| | | R Q+ A IR L S TT + RVQD Y+LRC+PQ+HGA+ ++ YVK K+ | |
| Sbjct: | 241 | LARGYQEQIDVAERIRFYLSDSGLTTSQGELRVQDAYSLRCIPQVHGATWQTLGYVKEKL | 300 |
| Query: | 342 | DIEINSVTDNPIICKDG-HVISGGNFHGEPMAQPFDFLGIAISEIGNVSERRVERLVNSQ | 400 |
| | | +IE+N+ TDNP+I DG VISGGNFHG+P+A DFL IAISE+ N++ERR+ERLVN Q | |
| Sbjct: | 301 | EIEMNAATDNPLIFNDGDKVISGGNFHGQPIAFAMDFLKIAISELANIAERRIERLVNPQ | 360 |
| Query: | 401 | LSKLPSFLVKYPGLNSGFMITQYACASLASENKVLAHPASVDSIPSCENQEDFVSMGTTA | 460 |
| | | L+ LP FL +PGL SG MI QYA ASL SENK LAHPASVDSIPS NQED VSMGT A | |
| Sbjct: | 361 | LNDLPPFLSPHPGLQSGAMIMQYAAASLVSENKTLAHPASVDSIPSSANQEDHVSMGTIA | 420 |
| Query: | 461 | ARKAFEILKNSRRIVATEIMAACQALDLKPENHELGKGTKVAYDLFRKEVNFIEHDK | 517 |
| | | AR A++++ N+RR++A E + A QA++ + H TK + RK V I+ D+ | |
| Sbjct: | 421 | ARHAYQVIANTRRVIAIEAICALQAVEYRGIEH-AASYTKQLFQEMRKVVPSIQQDR | 476 |

[15054] Based on this analysis, it was predicted that this GAS-specific protein and its epitopes, could be useful antigens for vaccines or diagnostics.

### EXAMPLE 2937

[15055] A DNA sequence (GASx2064) was identified in S. pyogenes <SEQ ID 8373> which encodes the amino acid sequence <SEQ ID 8374>. Analysis of this protein sequence reveals the following:

```
Possible site: 44
>>> Seems to have no N-terminal signal sequence
----- Final Results -----
                            bacterial cytoplasm --- Certainty = 0.4483(Affirmative) < succ>
                              bacterial membrane --- Certainty = 0.0000(Not Clear) < succ>
                                bacterial outside --- Certainty = 0.0000(Not Clear) < succ>
```

[15056] No corresponding DNA sequence was identified in S. agalactiae.

[15057] The protein has homology with the following sequences in the GENPEPT database:

| >GP: AAG06563 GB: AE004741 probable arginase family protein | | | |
|---|---|---|---|
| [Pseudomonas aeruginosa] | | | |
| Identities = 99/275 (36%), Positives = 147/275 (53%), Gaps = 9/275 (3%) | | | |
| Query: | 53 | LIGFKSDKGVYINNGRVGAVESPAAIRTQLAKFPWHLGNQVMVYDVGNIDGPNRSLEQLQ | 112 |
| | | L+GF SD+GV N GR GA P A+R LA WH G Q +YD G+I + LE Q | |
| Sbjct: | 42 | LLGFASDEGVRRNQGRQGARHGPPALRRALANLAWH-GEQA-IYDAGDIVAGD-DLEAAQ | 98 |
| Query: | 113 | NSLSKAIKRMCDLNLKPIVLGGGHETAYGHYLGLRQSLSPSDDL---AVINMDAHFDLRP | 169 |
| | | ++ + + + + LGGGHE AY + GL + LS + L ++N DAHFDLR | |
| Sbjct: | 99 | ECYAQRVADLLACGHRVVGLGGGHEIAYASFAGLARHLSRHERLPRIGILNFDAHFDLRH | 158 |
| Query: | 170 | YDQTGPNSGTGFRQMFDDAVADKRLFKYFVLGIQEHNNNLFLFDFVAKSKGIQFLTGQDI | 229 |
| | | ++ +SGT FRQ+ + A F Y LGI +N LFD A+ G+++L + + | |
| Sbjct: | 159 | AERA--SSGTPFRQIAELCQASDWPFAYCCLGISRLSNTAALFD-QAQRLGVRYLLDRQL | 215 |
| Query: | 230 | YQMGHQKVCRAIDRFLEGQERVYLTIDMDCFSVGAAPGVSAIQSLGVDPNLAVLVLQHIA | 289 |
| | | ++ +D FL+ + +YLT+ +D APGVSA + GV+ + +++ | |
| Sbjct: | 216 | QPWNLERSEAFLDGFLQSVDHLYLTVCLDVLPAAQAPGVSAPSAHGVEMPVVEHLVRRAK | 275 |
| Query: | 290 | ASGKLVGFDVVEVSPPHDIDNHTANLAATFIFYLV | 324 |
| | | ASGKL D+ E++P D D TA +AA + LV | |
| Sbjct: | 276 | ASGKLRLADIAELNPQLDSDQRTARIAARLVDSLV | 310 |

[15058] Based on this analysis, it was predicted that this GAS-specific protein and its epitopes, could be useful antigens for vaccines or diagnostics.

### EXAMPLE 2938

[15059] A DNA sequence (GASx2065R) was identified in S. pyogenes <SEQ ID 8375> which encodes the amino acid sequence <SEQ ID 8376>. Analysis of this protein sequence reveals the following:

| Possible site: 27 | | | | |
|---|---|---|---|---|
| >>> Seems to have no N-terminal signal sequence | | | | |
| | INTEGRAL | Likelihood = −0.37 | Transmembrane | 375-391 (375-392) |

```
----- Final Results -----
                              bacterial membrane --- Certainty = 0.1150(Affirmative) < succ>
                                bacterial outside --- Certainty = 0.0000(Not Clear) < succ>
                            bacterial cytoplasm --- Certainty = 0.0000(Not Clear) < succ>
```

[15060] No corresponding DNA sequence was identified in S. agalactiae.

[15061] The protein has homology with the following sequences in the GENPEPT database:

| >GP: CAB37582 GB: AL035569 putative regulatory protein [Streptomyces | | | |
|---|---|---|---|
| coelicolor A3(2)] | | | |
| Identities = 95/437 (21%), Positives = 177/437 (39%), Gaps = 28/437 (6%) | | | |
| Query: | 271 | EVGALLLIGDTGIGKRTLARQVLANQTQTFQIVTAKCFREEAMDSL--LPWRNILDGLGD | 328 |
| | | E ALLL G+ G+GK L + A + +V E D L P+ L L | |
| Sbjct: | 95 | EPQALLLGGEAGVGKTRLVEEFAAAADRRGAVVALGGCVEIGADGLPFAPFSTALRALRR | 154 |
| Query: | 329 | LVIQNRLLTTKAWKAALKRCFP-VATIFQEDNNQPFIKDHTSLLVSFIVDILQHLAEIKA | 387 |
| | | + + + L R P +A ++ + L +L+ +A | |
| Sbjct: | 155 | HLPEELAAAAAGQEEELARLLPELAEGTPVTGGGRHDEESMARLFELTARLLERVAARHT | 214 |
| Query: | 388 | LVILIEDCHWMDEDSLTLLQRVMNQLVHYPIAFVLT-------KHLGTTPELGLCLNALM | 440 |
| | | +V+++ED HW D + L+ ++ L + + T + P L L+ L | |
| Sbjct: | 215 | VVLVLEDLHWADASTRHLIAYLLRTLRTGRLVVLATYRSDDIHRRHPLRPLLAE-LDRLR | 273 |
| Query: | 441 | SQGRLESICLEPFNRQESLVYINSQLGSQPVTAEEMEHLYQASQGNPFFLSEYTQALLRH | 500 |
| | | + RLE L F R E I L +P +++ +++ S GN FF+ E A R | |
| Sbjct: | 274 | TVRRLE---LGRFTRDEVGRQIAGILAHEP-DQLQVDEIFERSDGNAFFVEELAVA-ARV | 328 |
| Query: | 501 | EKFVPLTPAIKAKLGLKLANLSSRDDALLNYLSCCRRPIPLNTLAQLMLLPLEEVIEMVD | 560 |
| | | LT +++ L +++ L + ++ + LA + L +++IE + | |
| Sbjct: | 329 | GSCTGLTDSLRDLLLVRVEALPESAQRVARIVAEGGSTVEYRLLAAVARLAEDDLIEALR | 388 |
| Query: | 561 | NLGHYYILVEESVGEEVLISFRQRIIQLYSYDRLSLSKRRLLHGQIAKRLEDLLPILTPS | 620 |
| | | + + IL+ G+ FR +++ D L +R L+ + A+ L D P L P+ | |
| Sbjct: | 389 | SAVNANILLPAPDGDG--YRFRHSLVREAVGDDLLPGERSRLNRRYAEAL-DADPTLVPA | 445 |
| Query: | 621 | PHLLDDIAYHYQESRQVIKALEYNLNYLDATLPFQHELFPIYSKSIGSLEKSDRDHQRLM | 680 |
| | | + +A ++ + KAL LDA++ + YS+ + LE++ L | |
| Sbjct: | 446 | AERVMRLASYWYHAHAPAKALP---AVLDASVEARRR--HAYSEQLRLLERA----MELW | 496 |
| Query: | 681 | EEQFDKIRQSIADLELT | 697 |
| | | + D +R ++ ++ T | |
| Sbjct: | 497 | DSAPDDVRATLRPVDCT | 513 |

[15062] Based on this analysis, it was predicted that this GAS-specific protein and its epitopes, could be useful antigens for vaccines or diagnostics.

### EXAMPLE 2939

[15063] A DNA sequence (GASx2072) was identified in S. pyogenes <SEQ ID 8377> which encodes the amino acid sequence <SEQ ID 8378>. Analysis of this protein sequence reveals the following:

```
Possible site: 14
>>> Seems to have no N-terminal signal sequence
----- Final Results -----
                            bacterial cytoplasm --- Certainty = 0.3702(Affirmative) < succ>
                              bacterial membrane --- Certainty = 0.0000(Not Clear) < succ>
                                bacterial outside --- Certainty = 0.0000(Not Clear) < succ>
```

[15064] No corresponding DNA sequence was identified in S. agalactiae.

[15065] The protein has no significant homology with any sequences in the GENPEPT database.

[15066] Based on this analysis, it was predicted that this GAS-specific protein and its epitopes, could be useful antigens for vaccines or diagnostics.

### EXAMPLE 2940

[15067] A DNA sequence (GASx2074R) was identified in S. pyogenes <SEQ ID 8379> which encodes the amino acid sequence <SEQ ID 8380>. Analysis of this protein sequence reveals the following:

| Possible site: 37 | | | | |
|---|---|---|---|---|
| >>> Seems to have no N-terminal signal sequence | | | | |
| | INTEGRAL | Likelihood = −0.90 | Transmembrane | 21-37 (21-38) |

```
----- Final Results -----
                              bacterial membrane --- Certainty = 0.1362(Affirmative) < succ>
                                bacterial outside --- Certainty = 0.0000(Not Clear) < succ>
                            bacterial cytoplasm --- Certainty = 0.0000(Not Clear) < succ>
```

[15068] No corresponding DNA sequence was identified in S. agalactiae.

[15069] The protein has no significant homology with any sequences in the GENPEPT database.

[15070] Based on this analysis, it was predicted that this GAS-specific protein and its epitopes, could be useful antigens for vaccines or diagnostics.

### EXAMPLE 2941

[15071] A DNA sequence (GASx2075R) was identified in S. pyogenes <SEQ ID 8381> which encodes the amino acid sequence <SEQ ID 8382>. Analysis of this protein sequence reveals the following:

```
Possible site: 25
>>> Seems to have no N-terminal signal sequence
----- Final Results -----
                            bacterial cytoplasm --- Certainty = 0.3545(Affirmative) < succ>
                              bacterial membrane --- Certainty = 0.0000(Not Clear) < succ>
                                bacterial outside --- Certainty = 0.0000(Not Clear) < succ>
```

[15072] No corresponding DNA sequence was identified in S. agalactiae.

[15073] The protein has no significant homology with any sequences in the GENPEPT database.

[15074] Based on this analysis, it was predicted that this GAS-specific protein and its epitopes, could be useful antigens for vaccines or diagnostics.

### EXAMPLE 2942

[15075] A DNA sequence (GASx2076R) was identified in S. pyogenes <SEQ ID 8383> which encodes the amino acid sequence <SEQ ID 8384>. Analysis of this protein sequence reveals the following:

```
Possible site: 34
>>> Seems to have no N-terminal signal sequence
----- Final Results -----
                            bacterial cytoplasm --- Certainty = 0.2340(Affirmative) < succ>
                              bacterial membrane --- Certainty = 0.0000(Not Clear) < succ>
                                bacterial outside --- Certainty = 0.0000(Not Clear) < succ>
```

[15076] No corresponding DNA sequence was identified in S. agalactiae.

[15077] The protein has homology with the following sequences in the GENPEPT database:

| >GP: AAC44494 GB: U44893 orf108; unknown function [Butyrivibrio | | | |
|---|---|---|---|
| fibrisolvens] | | | |
| Identities = 42/75 (56%), Positives = 55/75 (73%) | | | |
| Query: | 1 | LLKGTLRFGQLKSSIGSVSQKVLTAQLRAMEADGLVHREVYAEVPPRVEYSLTETGLSLA | 60 |
| | | LL RF +LK+++ +SQKVLT LR+ME DG++ R VY EVPPRVEYSL+E G S+ | |
| Sbjct: | 31 | LLVRPWRFNELKNNLEGISQKVLTDSLRSMEEDGIITRTVYPEVPPRVEYSLSELGESMR | 90 |
| Query: | 61 | PVIEAMSDWGQTYQE | 75 |
| | | P+I+AM WG Y+E | |
| Sbjct: | 91 | PIIKAMEQWGTEYKE | 105 |

[15078] Based on this analysis, it was predicted that this GAS-specific protein and its epitopes, could be useful antigens for vaccines or diagnostics.

### EXAMPLE 2943

[15079] A DNA sequence (GASx2097) was identified in S. pyogenes <SEQ ID 8385> which encodes the amino acid sequence <SEQ ID 8386>. Analysis of this protein sequence reveals the following:

| Possible site: 40 | | | | |
|---|---|---|---|---|
| >>> Seems to have no N-terminal signal sequence | | | | |
| | INTEGRAL | Likelihood = −3.40 | Transmembrane | 26-42 (23-44) |

```
----- Final Results -----
                              bacterial membrane --- Certainty = 0.2359(Affirmative) < succ>
                                bacterial outside --- Certainty = 0.0000(Not Clear) < succ>
                            bacterial cytoplasm --- Certainty = 0.0000(Not Clear) < succ>
```

[15080] No corresponding DNA sequence was identified in S. agalactiae.

[15081] The protein has no significant homology with any sequences in the GENPEPT database.

[15082] Based on this analysis, it was predicted that this GAS-specific protein and its epitopes, could be useful antigens for vaccines or diagnostics.

### EXAMPLE 2944

[15083] A DNA sequence (GASx2098) was identified in S. pyogenes <SEQ ID 8387> which encodes the amino acid sequence <SEQ ID 8388>. Analysis of this protein sequence reveals the following:

```
Possible site: 20
>>> Seems to have no N-terminal signal sequence
----- Final Results -----
                            bacterial cytoplasm --- Certainty = 0.1385(Affirmative) < succ>
                              bacterial membrane --- Certainty = 0.0000(Not Clear) < succ>
                                bacterial outside --- Certainty = 0.0000(Not Clear) < succ>
```

[15084] No corresponding DNA sequence was identified in S. agalactiae.

[15085] The protein has no significant homology with any sequences in the GENPEPT database.

[15086] Based on this analysis, it was predicted that this GAS-specific protein and its epitopes, could be useful antigens for vaccines or diagnostics.

### EXAMPLE 2945

[15087] A DNA sequence (GASx2100) was identified in S. pyogenes <SEQ ID 8389> which encodes the amino acid sequence <SEQ ID 8390>. Analysis of this protein sequence reveals the following:

```
Possible site: 23
>>> Seems to have no N-terminal signal sequence
----- Final Results -----
                            bacterial cytoplasm --- Certainty = 0.2138(Affirmative) < succ>
                              bacterial membrane --- Certainty = 0.0000(Not Clear) < succ>
                                bacterial outside --- Certainty = 0.0000(Not Clear) < succ>
```

[15088] No corresponding DNA sequence was identified in S. agalactiae.

[15089] The protein has homology with the following sequences in the GENPEPT database:

| >GP: AAA98589 GB: L44593 ORF79; putative [Lactococcus lactis phage | | | |
|---|---|---|---|
| BK5-T] | | | |
| Identities = 34/62 (54%), Positives = 44/62 (70%) | | | |
| Query: | 3 | QITLKAARINAGYTLKQVAGAVGKNPQTISKYEKDSSDISLGLLQKLSSLYGVTIDNLFL | 62 |
| | | +I LKAAR NA ++ K+VA VGKN QTI YEKDS++I + L KL+ +Y ID +FL | |
| Sbjct: | 8 | KIKLKAARTNADFSAKEVAEIVGKNYQTILSYEKDSTEIPMSLAIKLAEIYDYPIDFIFL | 67 |
| Query: | 63 | GK | 64 |
| | | GK | |
| Sbjct: | 68 | GK | 69 |

[15090] Based on this analysis, it was predicted that this GAS-specific protein and its epitopes, could be useful antigens for vaccines or diagnostics.

### EXAMPLE 2946

[15091] A DNA sequence (GASx2103) was identified in S. pyogenes <SEQ ID 8391> which encodes the amino acid sequence <SEQ ID 8392>. Analysis of this protein sequence reveals the following:

```
Possible site: 39
>>> Seems to have no N-terminal signal sequence
----- Final Results -----
                            bacterial cytoplasm --- Certainty = 0.3316(Affirmative) < succ>
                              bacterial membrane --- Certainty = 0.0000(Not Clear) < succ>
                                bacterial outside --- Certainty = 0.0000(Not Clear) < succ>
```

[15092] No corresponding DNA sequence was identified in S. agalactiae.

[15093] The protein has no significant homology with any sequences in the GENPEPT database.

[15094] Based on this analysis, it was predicted that this GAS-specific protein and its epitopes, could be useful antigens for vaccines or diagnostics.

### EXAMPLE 2947

[15095] A DNA sequence (GASx2104) was identified in S. pyogenes <SEQ ID 8393> which encodes the amino acid sequence <SEQ ID 8394>. Analysis of this protein sequence reveals the following:

```
Possible site: 55
>>> Seems to have no N-terminal signal sequence
----- Final Results -----
                            bacterial cytoplasm --- Certainty = 0.4371(Affirmative) < succ>
                              bacterial membrane --- Certainty = 0.0000(Not Clear) < succ>
                                bacterial outside --- Certainty = 0.0000(Not Clear) < succ>
```

[15096] No corresponding DNA sequence was identified in S. agalactiae.

[15097] The protein has no significant homology with any sequences in the GENPEPT database.

[15098] Based on this analysis, it was predicted that this GAS-specific protein and its epitopes, could be useful antigens for vaccines or diagnostics.

### EXAMPLE 2948

[15099] A DNA sequence (GASx2105) was identified in S. pyogenes <SEQ ID 8395> which encodes the amino acid sequence <SEQ ID 8396>. Analysis of this protein sequence reveals the following:

```
Possible site: 40
>>> Seems to have no N-terminal signal sequence
----- Final Results -----
                            bacterial cytoplasm --- Certainty = 0.2263(Affirmative) < succ>
                              bacterial membrane --- Certainty = 0.0000(Not Clear) < succ>
                                bacterial outside --- Certainty = 0.0000(Not Clear) < succ>
```

[15100] No corresponding DNA sequence was identified in S. agalactiae.

[15101] The protein has no significant homology with any sequences in the GENPEPT database.

[15102] Based on this analysis, it was predicted that this GAS-specific protein and its epitopes, could be useful antigens for vaccines or diagnostics.

### EXAMPLE 2949

[15103] A DNA sequence (GASx2106) was identified in S. pyogenes <SEQ ID 8397> which encodes the amino acid sequence <SEQ ID 8398>. Analysis of this protein sequence reveals the following:

| Possible site: 32 | | | | |
|---|---|---|---|---|
| >>> Seems to have an uncleavable N-term signal seq | | | | |
| | INTEGRAL | Likelihood = −6.42 | Transmembrane | 9-25 (6-29) |

```
----- Final Results -----
                              bacterial membrane --- Certainty = 0.3569(Affirmative) < succ>
                                bacterial outside --- Certainty = 0.0000(Not Clear) < succ>
                            bacterial cytoplasm --- Certainty = 0.0000(Not Clear) < succ>
```

[15104] No corresponding DNA sequence was identified in S. agalactiae.

[15105] The protein has no significant homology with any sequences in the GENPEPT database.

[15106] Based on this analysis, it was predicted that this GAS-specific protein and its epitopes, could be useful antigens for vaccines or diagnostics.

### EXAMPLE 2950

[15107] A DNA sequence (GASx2107) was identified in S. pyogenes <SEQ ID 8399> which encodes the amino acid sequence <SEQ ID 8400>. Analysis of this protein sequence reveals the following:

```
Possible site: 25
>>> Seems to have no N-terminal signal sequence
----- Final Results -----
                            bacterial cytoplasm --- Certainty = 0.1355(Affirmative) < succ>
                              bacterial membrane --- Certainty = 0.0000(Not Clear) < succ>
                                bacterial outside --- Certainty = 0.0000(Not Clear) < succ>
```

[15108] No corresponding DNA sequence was identified in S. agalactiae.

[15109] The protein has no significant homology with any sequences in the GENPEPT database.

[15110] Based on this analysis, it was predicted that this GAS-specific protein and its epitopes, could be useful antigens for vaccines or diagnostics.

### EXAMPLE 2951

[15111] A DNA sequence (GASx2108) was identified in S. pyogenes <SEQ ID 8401> which encodes the amino acid sequence <SEQ ID 8402>. Analysis of this protein sequence reveals the following:

```
Possible site: 26
>>> Seems to have no N-terminal signal sequence
----- Final Results -----
                            bacterial cytoplasm --- Certainty = 0.3050(Affirmative) < succ>
                              bacterial membrane --- Certainty = 0.0000(Not Clear) < succ>
                                bacterial outside --- Certainty = 0.0000(Not Clear) < succ>
```

[15112] No corresponding DNA sequence was identified in S. agalactiae.

[15113] The protein has no significant homology with any sequences in the GENPEPT database.

[15114] Based on this analysis, it was predicted that this GAS-specific protein and its epitopes, could be useful antigens for vaccines or diagnostics.

### EXAMPLE 2952

[15115] A DNA sequence (GASx2109) was identified in S. pyogenes <SEQ ID 8403> which encodes the amino acid sequence <SEQ ID 8404>. Analysis of this protein sequence reveals the following:

```
Possible site: 13
>>> Seems to have no N-terminal signal sequence
----- Final Results -----
                            bacterial cytoplasm --- Certainty = 0.3628(Affirmative) < succ>
                              bacterial membrane --- Certainty = 0.0000(Not Clear) < succ>
                                bacterial outside --- Certainty = 0.0000(Not Clear) < succ>
```

[15116] No corresponding DNA sequence was identified in S. agalactiae.

[15117] The protein has homology with the following sequences in the GENPEPT database:

| >GP: CAB46557 GB: AJ242479 putative replication protein | | | |
|---|---|---|---|
| [Streptococcus thermophilus] | | | |
| Identities = 143/242 (59%), Positives = 180/242 (74%), | | | |
| Gaps = 2/242 (0%) | | | |
| Query: | 1 | MAIYEARGFSSYLY--PYKGPLEPFDYIAQFRPLKPPEDIDIEEYKRTQAPYCLSGKVTA | 58 |
| | | MAIYE+RGF + L+ +PF ++A FRP+K P+ DI ++KR APYC+SG+V | |
| Sbjct: | 1 | MAIYESRGFGNILHLNNSNASKDPFKFVATFRPMKVPQGEDIADFKRYHAPYCISGEVKQ | 60 |
| Query: | 59 | EKNGSYKRNNASLVYRDLIFLDYDEIETGVNLPKIVSQTLWEYSYIIYPTIKHTPEKPRY | 118 |
| | | +++G+YKRNNASL+YRDLIFLDYD++E + P+ VS L YSY+IYPTIKHT EKPRY | |
| Sbjct: | 61 | DEDGNYKRNNASLLYRDLIFLDYDKLEASTDFPRAVSNALNGYSYVIYPTIKHTAEKPRY | 120 |
| Query: | 119 | RLVMKPSDVMTEATYKQVVKEIADKIGLPFDLASLTWSQLQGLPVTTGDPEDYQRYVNHG | 178 |
| | | RLV+KP+D M E TYK +EIADKIGLPFD +SLTWSQLQGLPVTTGDPE Y+R VN G | |
| Sbjct: | 121 | RLVVKPTDKMDEQTYKATAQEIADKIGLPFDDSSLTWSQLQGLPVTTGDPEKYERIVNRG | 180 |
| Query: | 179 | LDYPVPKNGSTPNRQVVTTYTPRPRSQRSITMRVIDTLFNGFGNEGGRNVALTKFVGLLF | 238 |
| | | YPV + +TPR +S+TMRV+DTL NGFG+EGGRN+ +T+FVGLL | |
| Sbjct: | 181 | RCYPVANPNTVKANHSPNYHTPRQSGDKSLTMRVVDTLLNGFGDEGGRNIEVTRFVGLLL | 240 |
| Query: | 239 | NK | 240 |
| | | +K | |
| Sbjct: | 241 | SK | 242 |

[15118] Based on this analysis, it was predicted that this GAS-specific protein and its epitopes, could be useful antigens for vaccines or diagnostics.

### EXAMPLE 2953

[15119] A DNA sequence (GASx2110) was identified in S. pyogenes <SEQ ID 8405> which encodes the amino acid sequence <SEQ ID 8406>. Analysis of this protein sequence reveals the following:

```
Possible site: 28
>>> Seems to have no N-terminal signal sequence
----- Final Results -----
                            bacterial cytoplasm --- Certainty = 0.5215(Affirmative) < succ>
                              bacterial membrane --- Certainty = 0.0000(Not Clear) < succ>
                                bacterial outside --- Certainty = 0.0000(Not Clear) < succ>
```

[15120] No corresponding DNA sequence was identified in S. agalactiae.

[15121] The protein has homology with the following sequences in the GENPEPT database:

| >GP: CAB46558 GB: AJ242479 putative DNA primase | | | |
|---|---|---|---|
| [Streptococcus thermophilus] | | | |
| Identities = 274/548 (50%), Positives = 363/548 (66%), Gaps = 17/548 (3%) | | | |
| Query: | 17 | DLKNLENEITEARE------NEDKYFSTFKGVRGQLIKECQEMKDEAFKIAYDGVMADSK | 70 |
| | | DL LE E E+++ +ED Y TFK +R Q I ++ K+ A++ YD M + K | |
| Sbjct: | 8 | DLTKLEEEYNESKKEASTLFDEDGYLKTFKDIRKQFINILEQKKEIAYQKGYDLYMNNPK | 67 |
| Query: | 71 | HLENVKAGRLTEVQHE-------ELAKEKGQEASEKALPKTPLGVAIMLKHYLRFIRVKP | 123 |
| | | L + E E E AK++G++A + A PKTPL A LK Y+RFIR++P | |
| Sbjct: | 68 | VLLKLAKAEKDEENGELIRKTVIEDAKKEGEKAKKNATPKTPLECAEFLKKYIRFIRIRP | 127 |
| Query: | 124 | EAQGQKAPLYFFHPDHGVWLEDNEFLQDLISVIFPNATEKQAFDTLYKIARQSQLKEIQR | 183 |
| | | + +G++ F G++LED+EFL DL+ I PN TE+ D LYKIA LK+ Q | |
| Sbjct: | 128 | KGKGRERLYTFTRQILGIYLEDDEFLHDLMVTIHPNNTERLGNDALYKIAHSVPLKDKQE | 187 |
| Query: | 184 | EYTVIGNQLYNYKTGQFEELTPDITVTRKIKTGYNKKAKEPTIKGWKPTAWLLELFDGDA | 243 |
| | | Y V+G +LYN +TG+F + P I VTRK++ GYN A EP I GWKPT WL LF+GD | |
| Sbjct: | 188 | NYVVVGGELYNNETGEFTQFDPRIIVTRKVRMGYNPDATEPIIDGWKPTVWLKGLFNGDR | 247 |
| Query: | 244 | ELYNLAIQIIKASITGQSLQKIFWLFGEGGTGKGTFQQLLINLVGMDNVASLKITELAKS | 303 |
| | | + Y+LAIQII+A+ITG++L+ IFWL+GEGGTGKGTFQ LL NLVG +NVAS EI + A | |
| Sbjct: | 248 | DSYDLAIQIIRATITGKTLENIFWLYGEGGTGKGTFQTLLENLVGSENVASFKI-DGASG | 306 |
| Query: | 304 | RFTTSILLGKSIVIGDDIQKDAVIKDTSDIFSLATGDIMTIEDKGKRPYSIRLNMTVVQS | 363 |
| | | +F TSIL+GK++VIGDDIQKD VIKDTS +FSLATGD + IEDKGKRPY+ R MTVVQS | |
| Sbjct: | 307 | KFDTSILIGKTVVIGDDIQKDVVIKDTSVVFSLATGDPIRIEDKGKRPYTTRKRMTVVQS | 366 |
| Query: | 364 | SNGLPRMNGDKSAIDRRFRILPFTKVFKGKPNKAIRNDYINRKEVLEYLLKLAIETPITD | 423 |
| | | SNG PRMN D+ AI+RRFR+L F+++ KGK +K I+NDY+ RKEVLEY +KLAIETP D | |
| Sbjct: | 367 | SNGFPRMNADQKAINRRFRVLTFSEL-KGKADKRIKNDYVGRKEVLEYFVKLAIETPFRD | 425 |
| Query: | 424 | INPKASIEILEEHHKEMNPVIDFVSKFFTDE-LTSEFIPNSFVYHVWKGFLEYYDIKQ-I | 481 |
| | | +NP+ SIE L+E +KEMNPV DFV +FF DE + ++PN +V+ +K + E + | |
| Sbjct: | 426 | VNPQKSIEFLDEAYKEMNPVADFVDRFFNDEVIKCNYVPNGYVFECFKAYCEKNQNRNYF | 485 |
| Query: | 482 | KSERGLHKEIKSNLPEGFEAGQKVIPVGRQLHTGFYPKEDLPLFASASYANGRASPEKRK | 541 |
| | | + R LHK+IK LP+ F + I G++ + F P + +Y NGR E ++ | |
| Sbjct: | 486 | LNSRTLHKQIKKILPKTFRPKEVTIKKGQKFYEEFNPHLVSNPWHFDAYDNGRNKKEDQQ | 545 |
| Query: | 542 | KPKNERGY | 549 |
| | | K ERGY | |
| Sbjct: | 546 | DAKKERGY | 553 |

[15122] Based on this analysis, it was predicted that this GAS-specific protein and its epitopes, could be useful antigens for vaccines or diagnostics.

### EXAMPLE 2954

[15123] A DNA sequence (GASx2111) was identified in S. pyogenes <SEQ ID 8407> which encodes the amino acid sequence <SEQ ID 8408>. Analysis of this protein sequence reveals the following:

```
Possible site: 41
>>> Seems to have no N-terminal signal sequence
----- Final Results -----
                            bacterial cytoplasm --- Certainty = 0.0994(Affirmative) < succ>
                              bacterial membrane --- Certainty = 0.0000(Not Clear) < succ>
                                bacterial outside --- Certainty = 0.0000(Not Clear) < succ>
```

[15124] No corresponding DNA sequence was identified in S. agalactiae.

[15125] The protein has no significant homology with any sequences in the GENPEPT database.

[15126] Based on this analysis, it was predicted that this GAS-specific protein and its epitopes, could be useful antigens for vaccines or diagnostics.

### EXAMPLE 2955

[15127] A DNA sequence (GASx2112) was identified in S. pyogenes <SEQ ID 8409> which encodes the amino acid sequence <SEQ ID 8410>. Analysis of this protein sequence reveals the following:

```
Possible site: 54
>>> Seems to have no N-terminal signal sequence
----- Final Results -----
                            bacterial cytoplasm --- Certainty = 0.3058(Affirmative) < succ>
                              bacterial membrane --- Certainty = 0.0000(Not Clear) < succ>
                                bacterial outside --- Certainty = 0.0000(Not Clear) < succ>
```

[15128] No corresponding DNA sequence was identified in S. agalactiae.

[15129] The protein has no significant homology with any sequences in the GENPEPT database.

[15130] Based on this analysis, it was predicted that this GAS-specific protein and its epitopes, could be useful antigens for vaccines or diagnostics.

### EXAMPLE 2956

[15131] A DNA sequence (GASx2114) was identified in S. pyogenes <SEQ ID 8411> which encodes the amino acid sequence <SEQ ID 8412>. Analysis of this protein sequence reveals the following:

```
Possible site: 37
>>> Seems to have no N-terminal signal sequence
----- Final Results -----
                            bacterial cytoplasm --- Certainty = 0.2815(Affirmative) < succ>
                              bacterial membrane --- Certainty = 0.0000(Not Clear) < succ>
                                bacterial outside --- Certainty = 0.0000(Not Clear) < succ>
```

[15132] No corresponding DNA sequence was identified in S. agalactiae.

[15133] The protein has no significant homology with any sequences in the GENPEPT database.

[15134] Based on this analysis, it was predicted that this GAS-specific protein and its epitopes, could be useful antigens for vaccines or diagnostics.

### EXAMPLE 2957

[15135] A DNA sequence (GASx2115R) was identified in S. pyogenes <SEQ ID 8413> which encodes the amino acid sequence <SEQ ID 8414>. Analysis of this protein sequence reveals the following:

```
Possible site: 27
>>> Seems to have an uncleavable N-term signal seq
----- Final Results -----
                              bacterial membrane --- Certainty = 0.0000(Not Clear) < succ>
                                bacterial outside --- Certainty = 0.0000(Not Clear) < succ>
                            bacterial cytoplasm --- Certainty = 0.0000(Not Clear) < succ>
```

[15136] No corresponding DNA sequence was identified in S. agalactiae.

[15137] The protein has no significant homology with any sequences in the GENPEPT database.

[15138] Based on this analysis, it was predicted that this GAS-specific protein and its epitopes, could be useful antigens for vaccines or diagnostics.

### EXAMPLE 2958

[15139] A DNA sequence (GASx2116) was identified in S. pyogenes <SEQ ID 8415> which encodes the amino acid sequence <SEQ ID 8416>. Analysis of this protein sequence reveals the following:

```
Possible site: 56
>>> Seems to have no N-terminal signal sequence
----- Final Results -----
                            bacterial cytoplasm --- Certainty = 0.4213(Affirmative) < succ>
                              bacterial membrane --- Certainty = 0.0000(Not Clear) < succ>
                                bacterial outside --- Certainty = 0.0000(Not Clear) < succ>
```

[15140] No corresponding DNA sequence was identified in S. agalactiae.

[15141] The protein has no significant homology with any sequences in the GENPEPT database.

[15142] Based on this analysis, it was predicted that this GAS-specific protein and its epitopes, could be useful antigens for vaccines or diagnostics.

### EXAMPLE 2959

[15143] A DNA sequence (GASx2117) was identified in S. pyogenes <SEQ ID 8417> which encodes the amino acid sequence <SEQ ID 8418>. Analysis of this protein sequence reveals the following:

```
Possible site: 20
>>> Seems to have no N-terminal signal sequence
----- Final Results -----
                            bacterial cytoplasm --- Certainty = 0.3091(Affirmative) < succ>
                              bacterial membrane --- Certainty = 0.0000(Not Clear) < succ>
                                bacterial outside --- Certainty = 0.0000(Not Clear) < succ>
```

[15144] No corresponding DNA sequence was identified in S. agalactiae.

[15145] The protein has no significant homology with any sequences in the GENPEPT database.

[15146] Based on this analysis, it was predicted that this GAS-specific protein and its epitopes, could be useful antigens for vaccines or diagnostics.

### EXAMPLE 2960

[15147] A DNA sequence (GASx2118) was identified in S. pyogenes <SEQ ID 8419> which encodes the amino acid sequence <SEQ ID 8420>. Analysis of this protein sequence reveals the following:

```
Possible site: 41
>>> Seems to have an uncleavable N-term signal seq
----- Final Results -----
                              bacterial membrane --- Certainty = 0.0000(Not Clear) < succ>
                                bacterial outside --- Certainty = 0.0000(Not Clear) < succ>
                            bacterial cytoplasm --- Certainty = 0.0000(Not Clear) < succ>
```

[15148] No corresponding DNA sequence was identified in S. agalactiae.

[15149] The protein has no significant homology with any sequences in the GENPEPT database.

[15150] Based on this analysis, it was predicted that this GAS-specific protein and its epitopes, could be useful antigens for vaccines or diagnostics.

### EXAMPLE 2961

[15151] A DNA sequence (GASx2119) was identified in S. pyogenes <SEQ ID 8421> which encodes the amino acid sequence <SEQ ID 8422>. Analysis of this protein sequence reveals the following:

```
Possible site: 22
>>> Seems to have no N-terminal signal sequence
----- Final Results -----
                            bacterial cytoplasm --- Certainty = 0.2531(Affirmative) < succ>
                              bacterial membrane --- Certainty = 0.0000(Not Clear) < succ>
                                bacterial outside --- Certainty = 0.0000(Not Clear) < succ>
```

[15152] No corresponding DNA sequence was identified in S. agalactiae.

[15153] The protein has homology with the following sequences in the GENPEPT database:

| >GP: AAF63071 GB: AF158600 gp137 [Streptococcus thermophilus | | | |
|---|---|---|---|
| bacteriophage Sfi11] | | | |
| Identities = 41/121 (33%), Positives = 65/121 (52%), Gaps = 3/121 (2%) | | | |
| Query: | 4 | KNAIRKLKEFHRWQRIAN-SLDLTYTELYQFDIEYHPTRR--KHLEISRECALEELDAIR | 60 |
| | | K RKL+E+ RW+ IA+ S + T+ + F + +++ + R AL EL+AI | |
| Sbjct: | 13 | KRCKRKLREYPRWREIAHDSAEQKITQEFTFMPRGGGVNKPVENIAVRRVDALNELEAIE | 72 |
| Query: | 61 | YAINQLSKVEYRQILIECYLISEEKTQQDIMEELNGSQSWYYESKKRALLEFVEFYRDGAL | 121 |
| | | A+N L + +YR+ILIE YL K I + + ++ + E ++L F E YRDG L | |
| Sbjct: | 73 | QAVNGLYRPDYRRILIEKYLAYPPKPNWQIAQSIGFERTAFQELLNNSILAFAELYRDGRL | 133 |

[15154] Based on this analysis, it was predicted that this GAS-specific protein and its epitopes, could be useful antigens for vaccines or diagnostics.

### EXAMPLE 2962

[15155] A DNA sequence (GASx2120) was identified in S. pyogenes <SEQ ID 8423> which encodes the amino acid sequence <SEQ ID 8424>. Analysis of this protein sequence reveals the following:

Possible site: 24
>>> Seems to have no N-terminal signal sequence
----- Final Results -----
bacterial cytoplasm --- Certainty = 0.2666 (Affirmative) < succ>
bacterial membrane --- Certainty = 0.0000 (Not Clear) < succ>
bacterial outside --- Certainty = 0.0000 (Not Clear) < succ>

[15156] No corresponding DNA sequence was identified in S. agalactiae.

[15157] The protein has no significant homology with any sequences in the GENPEPT database.

[15158] Based on this analysis, it was predicted that this GAS-specific protein and its epitopes, could be useful antigens for vaccines or diagnostics.

### EXAMPLE 2963

[15159] A DNA sequence (GASx21121) was identified in S. pyogenes <SEQ ID 8425> which encodes the amino acid sequence <SEQ ID 8426>. Analysis of this protein sequence reveals the following:

Possible site: 30
>>> Seems to have a cleavable N-term signal seq.
----- Final Results -----
bacterial outside --- Certainty = 0.3000 (Affirmative) < succ>
bacterial membrane --- Certainty = 0.0000 (Not Clear) < succ>
bacterial cytoplasm --- Certainty = 0.0000 (Not Clear) < succ>

[15160] No corresponding DNA sequence was identified in S. agalactiae.

[15161] The protein has no significant homology with any sequences in the GENPEPT database.

[15162] Based on this analysis, it was predicted that this GAS-specific protein and its epitopes, could be useful antigens for vaccines or diagnostics.

### EXAMPLE 2964

[15163] A DNA sequence (GASx2123R) was identified in S. pyogenes <SEQ ID 8427> which encodes the amino acid sequence <SEQ ID 8428>. Analysis of this protein sequence reveals the following:

Possible site: 21
>>> Seems to have no N-terminal signal sequence
----- Final Results -----
bacterial cytoplasm --- Certainty = 0.3441 (Affirmative) < succ>
bacterial membrane --- Certainty = 0.0000 (Not Clear) < succ>
bacterial outside --- Certainty = 0.0000 (Not Clear) < succ>

[15164] No corresponding DNA sequence was identified in S. agalactiae.

[15165] The protein has no significant homology with any sequences in the GENPEPT database.

[15166] Based on this analysis, it was predicted that this GAS-specific protein and its epitopes, could be useful antigens for vaccines or diagnostics.

### EXAMPLE 2965

[15167] A DNA sequence (GASx2132) was identified in S. pyogenes <SEQ ID 8429> which encodes the amino acid sequence <SEQ ID 8430>. Analysis of this protein sequence reveals the following:

Possible site: 31
>>> Seems to have an uncleavable N-term signal seq
----- Final Results -----
bacterial membrane --- Certainty = 0.0000 (Not Clear) < succ>
bacterial outside --- Certainty = 0.0000 (Not Clear) < succ>
bacterial cytoplasm --- Certainty = 0.0000 (Not Clear) < succ>

[15168] No corresponding DNA sequence was identified in S. agalactiae.

[15169] The protein has no significant homology with any sequences in the GENPEPT database.

[15170] Based on this analysis, it was predicted that this GAS-specific protein and its epitopes, could be useful antigens for vaccines or diagnostics.

### EXAMPLE 2966

[15171] A DNA sequence (GASx2136) was identified in S. pyogenes <SEQ ID 8431> which encodes the amino acid sequence <SEQ ID 8432>. Analysis of this protein sequence reveals the following:

| Possible site: 30 | | | |
|---|---|---|---|
| >>> Seems to have no N-terminal signal sequence | | | |
| INTEGRAL | Likelihood = −3.19 | Transmembrane | 57-73 (54-78) |

----- Final Results -----
bacterial membrane --- Certainty = 0.2275 (Affirmative) < succ>
bacterial outside --- Certainty = 0.0000 (Not Clear) < succ>
bacterial cytoplasm --- Certainty = 0.0000 (Not Clear) < succ>

[15172] No corresponding DNA sequence was identified in S. agalactiae.

[15173] The protein has homology with the following sequences in the GENPEPT database:

| >GP: AAB18271 GB: U74623 CadX [Staphylococcus lugdunensis] | | | |
|---|---|---|---|
| Identities = 50/110 (45%), Positives = 76/110 (68%) | | | |
| Query: | 11 | MKKDSICQVGVINQQNVTTATNYLEKEKVQKSLRILSKFTDNKQINIIFYLLAVEELCVC | 70 |
| | | M ++ C V +++ V A ++LE +K +K L IL K D K++ II L+ +ELCVC | |
| Sbjct: | 1 | MSYENACDVICVHEDKVNNALSFLEDDKSKKLLNILEKICDEKKLKIILSLIKEDELCVC | 60 |
| Query: | 71 | DIACLLNLSMASASHHLRKLANQNILDTRREGKIIYYFIKDEEIRDFFNQ | 120 |
| | | DI+ +L +S+AS SHHLR L ++LD ++GK+ YYFIKD+EIR+FF++ | |
| Sbjct: | 61 | DISLILKMSVASTSHHLRLLYKNDVLDFYKKGKMAYYFIKDDEIREFFSK | 110 |

[15174] Based on this analysis, it was predicted that this GAS-specific protein and its epitopes, could be useful antigens for vaccines or diagnostics.

### EXAMPLE 2967

[15175] A DNA sequence (GASx2137) was identified in S. pyogenes <SEQ ID 8433> which encodes the amino acid sequence <SEQ ID 8434>. Analysis of this protein sequence reveals the following:

Possible site: 49
>>> Seems to have no N-terminal signal sequence
----- Final Results -----
bacterial cytoplasm --- Certainty = 0.4582 (Affirmative) < succ>
bacterial membrane --- Certainty = 0.0000 (Not Clear) < succ>
bacterial outside --- Certainty = 0.0000 (Not Clear) < succ>

[15176] No corresponding DNA sequence was identified in S. agalactiae.

[15177] The protein has no significant homology with any sequences in the GENPEPT database.

[15178] Based on this analysis, it was predicted that this GAS-specific protein and its epitopes, could be useful antigens for vaccines or diagnostics.

### EXAMPLE 2968

[15179] A DNA sequence (GASx2139) was identified in S. pyogenes <SEQ ID 8435> which encodes the amino acid sequence <SEQ ID 8436>. Analysis of this protein sequence reveals the following:

| Possible site: 28 | | | |
|---|---|---|---|
| >>> Seems to have a cleavable N-term signal seq. | | | |
| INTEGRAL | Likelihood = −5.89 | Transmembrane | 63-79 (54-80) |

----- Final Results -----
bacterial membrane --- Certainty = 0.3357 (Affirmative) < succ>
bacterial outside --- Certainty = 0.0000 (Not Clear) < succ>
bacterial cytoplasm --- Certainty = 0.0000 (Not Clear) < succ>

[15180] No corresponding DNA sequence was identified in S. agalactiae.

[15181] The protein has no significant homology with any sequences in the GENPEPT database.

[15182] Based on this analysis, it was predicted that this GAS-specific protein and its epitopes, could be useful antigens for vaccines or diagnostics.

### EXAMPLE 2969

[15183] A DNA sequence (GASx2141R) was identified in S. pyogenes <SEQ ID 8437> which encodes the amino acid sequence <SEQ ID 8438>. Analysis of this protein sequence reveals the following:

Possible site: 19
>>> Seems to have no N-terminal signal sequence
----- Final Results -----
bacterial cytoplasm --- Certainty = 0.4663 (Affirmative) < succ>
bacterial membrane --- Certainty = 0.0000 (Not Clear) < succ>
bacterial outside --- Certainty = 0.0000 (Not Clear) < succ>

[15184] No corresponding DNA sequence was identified in S. agalactiae.

[15185] The protein has no significant homology with any sequences in the GENPEPT database.

[15186] Based on this analysis, it was predicted that this GAS-specific protein and its epitopes, could be useful antigens for vaccines or diagnostics.

### EXAMPLE 2970

[15187] A DNA sequence (GASx2142) was identified in S. pyogenes <SEQ ID 8439> which encodes the amino acid sequence <SEQ ID 8440>. Analysis of this protein sequence reveals the following:

| Possible site: 29 | | | |
|---|---|---|---|
| >>> Seems to have a cleavable N-term signal seq. | | | |
| INTEGRAL | Likelihood = −10.08 | Transmembrane | 143-159 (135-165) |
| INTEGRAL | Likelihood = −7.64 | Transmembrane | 53-69 (49-79) |
| INTEGRAL | Likelihood = −7.17 | Transmembrane | 252-268 (248-275) |
| INTEGRAL | Likelihood = −6.74 | Transmembrane | 186-202 (183-208) |
| INTEGRAL | Likelihood = −5.63 | Transmembrane | 220-236 (218-240) |
| INTEGRAL | Likelihood = −5.26 | Transmembrane | 116-132 (115-136) |
| INTEGRAL | Likelihood = −2.02 | Transmembrane | 85-101 (85-101) |
| INTEGRAL | Likelihood = −0.64 | Transmembrane | 165-181 (165-181) |

----- Final Results -----
bacterial membrane --- Certainty = 0.5034 (Affirmative) < succ>
bacterial outside --- Certainty = 0.0000 (Not Clear) < succ>
bacterial cytoplasm --- Certainty = 0.0000 (Not Clear) < succ>

[15188] No corresponding DNA sequence was identified in S. agalactiae.

[15189] The protein has homology with the following sequences in the GENPEPT database:

| >GP: AAD35257 GB: AE001701 conserved hypothetical protein | | | |
|---|---|---|---|
| [Thermotoga maritima] | | | |
| Identities = 81/275 (29%), Positives = 137/275 (49%), Gaps = 29/275 (10%) | | | |
| Query: | 9 | FKGMIIALGFILPGVSGGVLAAILGIYERMISFLAHMRDNFIENVLFFLPVGIG---GIL | 65 |
| | | F G+++ + ++PGVSGG +A ++G+YE++I + ++ +PVG G G+ | |
| Sbjct: | 7 | FSGVLMGIANVVPGVSGGTIAVLMGVYEKLIESVNSFFHGNSRSLKVLIPVGAGVLVGVF | 66 |
| Query: | 66 | GIALFSFPVEFLLKHYQVSVLWGFAGAIVGTIPSLIKESTKQSQRDKADWLWLVLTFVIS | 125 |
| | | GIA F +E L Y V + F G I I S +K TK+ K + + FV+ | |
| Sbjct: | 67 | GIARF---LEIFLSKYPVPTHFFFLGLI---IVSFVK--TKEYFSIKP----VNIFFVLL | 114 |
| Query: | 126 | GLGLYFLNDLIG--TLPANFLTFILAGALIALGVLVPGLSPSNLLLILGLYGPMLIGFKS | 183 |
| | | G+ L F+ G T + +L G + A ++VPG+S S +LLI G+Y +L | |
| Sbjct: | 115 | GMFLIFMLHFSGETTAKESMFLLVLGGFVAATAMVVPGISGSLILLIFGVYDHVLYLVSH | 174 |
| Query: | 184 | LDLLGTFLPIAIGGVLAILAFSKSMDYALQHHHSKVYHFIIGIVLSSTLLILIPNSSSPE | 243 |
| | | L ++G L +IG V IL K M++ L+ + Y FI G++L+S L ++P + | |
| Sbjct: | 175 | L-IIGELLIFSIGVVAGILVSVKIMNFLLKRFREETYSFIGGMILAS-LYEVLPKKMNTN | 232 |
| Query: | 244 | SISYSHAGILTWLMAFVLFALGIWLGLWMSQLEEK | 278 |
| | | + L + + L + LG ++ +E+K | |
| Sbjct: | 233 | VV----------LPSVLSLVLSLTLGFFLLYIEKK | 257 |

[15190] Based on this analysis, it was predicted that this GAS-specific protein and its epitopes, could be useful antigens for vaccines or diagnostics.

### EXAMPLE 2971

[15191] A DNA sequence (GASx2143R) was identified in S. pyogenes <SEQ ID 8441> which encodes the amino acid sequence <SEQ ID 8442>. Analysis of this protein sequence reveals the following:

Possible site: 20
>>> Seems to have no N-terminal signal sequence
----- Final Results -----
bacterial cytoplasm --- Certainty = 0.3964 (Affirmative) < succ>
bacterial membrane --- Certainty = 0.0000 (Not Clear) < succ>
bacterial outside --- Certainty = 0.0000 (Not Clear) < succ>

[15192] No corresponding DNA sequence was identified in S. agalactiae.

[15193] The protein has homology with the following sequences in the GENPEPT database:

| >GP: BAB05000 GB: AP001511 unknown conserved protein in others | | | |
|---|---|---|---|
| [Bacillus halodurans] | | | |
| Identities = 28/78 (35%), Positives = 37/78 (46%) | | | |
| Query: | 44 | EVDKVFIVPLRQLLFTDPVYYRLEVTPIETTDFPFDRIRNGKYYQFSQEYRSIPFYENLE | 103 |
| | | EVD VF VP+ + P YR+ V FP +RI N YQ S + FY | |
| Sbjct: | 127 | EVDHVFTVPIDHFISHPPEQYRINVHFEPGAGFPIERIANQSAYQKSTRQITESFYYYQS | 186 |
| Query: | 104 | ETIWGMTAQFTKCLTDIL | 121 |
| | | IWG+TA+ + + IL | |
| Sbjct: | 187 | YVIWGLTAKILRHVITIL | 204 |

[15194] Based on this analysis, it was predicted that this GAS-specific protein and its epitopes, could be useful antigens for vaccines or diagnostics.

### EXAMPLE 2972

[15195] A DNA sequence (GASx2144R) was identified in S. pyogenes <SEQ ID 8443> which encodes the amino acid sequence <SEQ ID 8444>. Analysis of this protein sequence reveals the following:

Possible site: 17
>>> Seems to have no N-terminal signal sequence
----- Final Results -----
bacterial cytoplasm --- Certainty = 0.4761 (Affirmative) < succ>
bacterial membrane --- Certainty = 0.0000 (Not Clear) < succ>
bacterial outside --- Certainty = 0.0000 (Not Clear) < succ>

[15196] No corresponding DNA sequence was identified in S. agalactiae.

[15197] The protein has no significant homology with any sequences in the GENPEPT database.

[15198] Based on this analysis, it was predicted that this GAS-specific protein and its epitopes, could be useful antigens for vaccines or diagnostics.

### EXAMPLE 2973

[15199] A DNA sequence (GASx2145) was identified in S. pyogenes <SEQ ID 8445> which encodes the amino acid sequence <SEQ ID 8446>. Analysis of this protein sequence reveals the following:

| Possible site: 25 | | | |
|---|---|---|---|
| >>> Seems to have an uncleavable N-term signal seq | | | |
| INTEGRAL | Likelihood = −4.09 | Transmembrane | 2-18 (1-19) |

----- Final Results -----
bacterial membrane --- Certainty = 0.2635 (Affirmative) < succ>
bacterial outside --- Certainty = 0.0000 (Not Clear) < succ>
bacterial cytoplasm --- Certainty = 0.0000 (Not Clear) < succ>

[15200] No corresponding DNA sequence was identified in S. agalactiae.

[15201] The protein has homology with the following sequences in the GENPEPT database:

| >GP: CAA49519 GB: X69895 X [Bacillus sphaericus] | | | |
|---|---|---|---|
| Identities = 40/97 (41%), Positives = 57/97 (58%), Gaps = 5/97 (5%) | | | |
| Query: | 10 | IEFLILAIVEKNDSYGYDISQTIKLVAN----IKESTLYPILKKLEKAGFLTTYSQE-HQ | 64 |
| | | ++ +IL ++ + D YGY+ISQ I N IKE+TLY + ++LEK + Y + | |
| Sbjct: | 11 | LDSIILRLILEKDRYGYEISQEISNRTNNSFQIKEATLYAVFQRLEKKEVIEAYYGDVSD | 70 |
| Query: | 65 | GRKRKYYAVTSSGRAQLIFLKKEWQSYKFALDGIIEG | 101 |
| | | G KRKYY +TS G+A L L KEW K +D +EG | |
| Sbjct: | 71 | GGKRKYYRITSLGKAYLSELVKEWAEVKEIIDLFMEG | 107 |

[15202] Based on this analysis, it was predicted that this GAS-specific protein and its epitopes, could be useful antigens for vaccines or diagnostics.

### EXAMPLE 2974

[15203] A DNA sequence (GASx2146) was identified in S. pyogenes <SEQ ID 8447> which encodes the amino acid sequence <SEQ ID 8448>. Analysis of this protein sequence reveals the following:

| Possible site: 56 | | | |
|---|---|---|---|
| >>> Seems to have no N-terminal signal sequence | | | |
| INTEGRAL | Likelihood = −14.75 | Transmembrane | 97-113 (77-143) |
| INTEGRAL | Likelihood = −6.85 | Transmembrane | 116-132 (114-143) |
| INTEGRAL | Likelihood = −5.68 | Transmernbrane | 156-172 (149-175) |
| INTEGRAL | Likelihood = −5.47 | Transmembrane | 79-95 (77-96) |

----- Final Results -----
bacterial membrane --- Certainty = 0.6901 (Affirmative) < succ>
bacterial outside --- Certainty = 0.0000 (Not Clear) < succ>
bacterial cytoplasm --- Certainty = 0.0000 (Not Clear) < succ>

[15204] No corresponding DNA sequence was identified in S. agalactiae.

[15205] The protein has no significant homology with any sequences in the GENPEPT database.

[15206] Based on this analysis, it was predicted that this GAS-specific protein and its epitopes, could be useful antigens for vaccines or diagnostics.

### EXAMPLE 2975

[15207] A DNA sequence (GASx2147) was identified in S. pyogenes <SEQ ID 8449> which encodes the amino acid sequence <SEQ ID 8450>. Analysis of this protein sequence reveals the following:

| Possible site: 31 | | | |
|---|---|---|---|
| >>> Seems to have an uncleavable N-term signal seq | | | |
| INTEGRAL | Likelihood = −7.11 | Transmembrane | 8-24 (6-30) |

----- Final Results -----
bacterial membrane --- Certainty = 0.3845 (Affirmative) < succ>
bacterial outside --- Certainty = 0.0000 (Not Clear) < succ>
bacterial cytoplasm --- Certainty = 0.0000 (Not Clear) < succ>

[15208] No corresponding DNA sequence was identified in S. agalactiae.

[15209] The protein has homology with the following sequences in the GENPEPT database:

| >GP: AAF04457 GB: AF078161 lacunin [Manduca sexta] | | | |
|---|---|---|---|
| Identities = 68/310 (21%), Positives = 117/310 (36%), Gaps = 12/310 (3%) | | | |
| Query: | 55 | DIDSSASTITVETGPVQRPTVTYYTHPKLIDPIVTTVTGKTLSLSQTPKDVVITGGIEIL | 114 |
| | | DI+ + ++ + E+ T++ T + TT T T +S T + I + | |
| Sbjct: | 1004 | DIEGTTASGSTESTFTDETTMSKVTEESSVAEEETTKTTITEEVSGTSESASINSDKTTM | 1063 |
| Query: | 115 | GFTLNNSRQEKNYRSIT--ITVPEKTSLNEVKASNVPHTTLSNLT--VQDMQFDGNLTLL | 170 |
| | | ++ + IT +TV E+TS TT+S ++ + T | |
| Sbjct: | 1064 | TTLSEDTGKTSVSEEITTEMTVTEETSETSPTEGTSDKTTMSTVSEETESSSVTEETTTE | 1123 |
| Query: | 171 | HTKVKKATITGMLEATKSQLTNLELKADYSFSNLTDSSVE-NGTISLGNGQLTTKDTTLK | 229 |
| | | T V+ AT E T S T + ++ S +++ E T + T T+ K | |
| Sbjct: | 1124 | TTVVENATDISSTEVTASDKTTMTTMSEESEKTTEEATTEITVTKEVTESSSTETATSDK | 1183 |
| Query: | 230 | AVNIQSLHPGGIE-AERTTLENVTFTVSKSKEEEENDYYDNDAIFTAHALTLKGTNTITG | 288 |
| | | ++ S G AE +T E VT T + EE T+ +T+K T T | |
| Sbjct: | 1184 | TISTLSEETGKTSVAEESTTEKVTETTVTTMPEETGK------TITSEEITIKTTVTEEP | 1237 |
| Query: | 289 | GDIDVDITLTKAKAIAYRARTENGKVSLGSQLTPAKIGKESTSDVISYVAENKAATGNLT | 348 |
| | | D+ +T K A E GK S+ + T E++++ S A T T | |
| Sbjct: | 1238 | TDVGSSEAITSDKTTVSTASEETGKYSVSEEETVKTTVAEASTEPSSTEAITSDKTKMST | 1297 |
| Query: | 349 | VNLNKGDITI | 358 |
| | | ++ G ++ | |
| Sbjct: | 1298 | ISEETGKTSV | 1307 |

[15210] Based on this analysis, it was predicted that this GAS-specific protein and its epitopes, could be useful antigens for vaccines or diagnostics.

### EXAMPLE 2976

[15211] A DNA sequence (GASx2148R) was identified in S. pyogenes <SEQ ID 8451> which encodes the amino acid sequence <SEQ ID 8452>. Analysis of this protein sequence reveals the following:

Possible Site: 28
>>> Seems to have an uncleavable N-term signal seq
----- Final Results -----
bacterial membrane --- Certainty = 0.0000 (Not Clear) < succ>
bacterial outside --- Certainty = 0.0000 (Not Clear) < succ>
bacterial cytoplasm --- Certainty = 0.0000 (Not Clear) < succ>

[15212] No corresponding DNA sequence was identified in S. agalactiae.

[15213] The protein has no significant homology with any sequences in the GENPEPT database.

[15214] Based on this analysis, it was predicted that this GAS-specific protein and its epitopes, could be useful antigens for vaccines or diagnostics.

### EXAMPLE 2977

[15215] A DNA sequence (GASx2160) was identified in S. pyogenes <SEQ ID 8453> which encodes the amino acid sequence <SEQ ID 8454>. Analysis of this protein sequence reveals the following:

Possible site: 29
>>> Seems to have no N-terminal signal sequence
----- Final Results -----
bacterial cytoplasm --- Certainty = 0.1630 (Affirmative) < succ>
bacterial membrane --- Certainty = 0.0000 (Not Clear) < succ>
bacterial outside --- Certainty = 0.0000 (Not Clear) < succ>

[15216] No corresponding DNA sequence was identified in S. agalactiae.

[15217] The protein has no significant homology with any sequences in the GENPEPT database.

[15218] Based on this analysis, it was predicted that this GAS-specific protein and its epitopes, could be useful antigens for vaccines or diagnostics.

### EXAMPLE 2978

[15219] A DNA sequence (GASx2170R) was identified in S. pyogenes <SEQ ID 8455> which encodes the amino acid sequence <SEQ ID 8456>. Analysis of this protein sequence reveals the following:

| Possible site: 37 | | | |
|---|---|---|---|
| >>> Seems to have no N-terminal signal sequence | | | |
| INTEGRAL | Likelihood = −13.32 | Transmembrane | 181-197 (175-203) |

----- Final Results -----
bacterial membrane --- Certainty = 0.6328 (Affirmative) < succ>
bacterial outside --- Certainty = 0.0000 (Not Clear) < succ>
bacterial cytoplasm --- Certainty = 0.0000 (Not Clear) < succ>

[15220] No corresponding DNA sequence was identified in S. agalactiae.

[15221] Based on this analysis, it was predicted that this GAS-specific protein and its epitopes, could be useful antigens for vaccines or diagnostics.

### EXAMPLE 2979

[15222] A DNA sequence (GASx2174) was identified in S. pyogenes <SEQ ID 8457> which encodes the amino acid sequence <SEQ ID 8458>. Analysis of this protein sequence reveals the following:

| Possible site: 28 | | | |
|---|---|---|---|
| >>> Seems to have an uncleavable N-term signal seq | | | |
| INTEGRAL | Likelihood = −2.39 | Transmembrane | 3-19 (3-19) |

----- Final Results -----
bacterial membrane --- Certainty = 0.1956 (Affirmative) < succ>
bacterial outside --- Certainty = 0.0000 (Not Clear) < succ>
bacterial cytoplasm --- Certainty = 0.0000 (Not Clear) < succ>

[15223] No corresponding DNA sequence was identified in S. agalactiae.

[15224] Based on this analysis, it was predicted that this GAS-specific protein and its epitopes, could be useful antigens for vaccines or diagnostics.

### EXAMPLE 2980

[15225] A DNA sequence (GASx2181R) was identified in S. pyogenes <SEQ ID 8459> which encodes the amino acid sequence <SEQ ID 8460>. Analysis of this protein sequence reveals the following:

Possible site: 24
>>> Seems to have no N-terminal signal sequence
----- Final Results -----
bacterial cytoplasm --- Certainty = 0.3751 (Affirmative) < succ>
bacterial membrane --- Certainty = 0.0000 (Not Clear) < succ>
bacterial outside --- Certainty = 0.0000 (Not Clear) < succ>

[15226] No corresponding DNA sequence was identified in S. agalactiae.

[15227] The protein has no significant homology with any sequences in the GENPEPT database.

[15228] Based on this analysis, it was predicted that this GAS-specific protein and its epitopes, could be useful antigens for vaccines or diagnostics.

### EXAMPLE 2981

[15229] A DNA sequence (GASx2185R) was identified in S. pyogenes <SEQ ID 8461> which encodes the amino acid sequence <SEQ ID 8462>. Analysis of this protein sequence reveals the following:

| Possible site: 26 | | | |
|---|---|---|---|
| >>> Seems to have no N-terminal signal sequence | | | |
| INTEGRAL | Likelihood = −0.90 | Transmembrane | 18-34 (18-34) |

----- Final Results -----
bacterial membrane --- Certainty = 0.1362 (Affirmative) < succ>
bacterial outside --- Certainty = 0.0000 (Not Clear) < succ>
bacterial cytoplasm --- Certainty = 0.0000 (Not Clear) < succ>

[15230] No corresponding DNA sequence was identified in S. agalactiae.

[15231] The protein has no significant homology with any sequences in the GENPEPT database.

[15232] Based on this analysis, it was predicted that this GAS-specific protein and its epitopes, could be useful antigens for vaccines or diagnostics.

### EXAMPLE 2982

[15233] A DNA sequence (GASx2186R) was identified in S. pyogenes <SEQ ID 8463> which encodes the amino acid sequence <SEQ ID 8464>. Analysis of this protein sequence reveals the following:

Possible site: 61
>>> Seems to have no N-terminal signal sequence
----- Final Results -----
bacterial cytoplasm --- Certainty = 0.4803 (Affirmative) < succ>
bacterial membrane --- Certainty = 0.0000 (Not Clear) < succ>
bacterial outside --- Certainty = 0.0000 (Not Clear) < succ>

[15234] No corresponding DNA sequence was identified in S. agalactiae.

[15235] The protein has homology with the following sequences in the GENPEPT database:

| >GP: CAA78948 GB: Z17279 transposase [Streptococcus salivarius] | | | |
|---|---|---|---|
| Identities = 48/77 (62%), Positives = 55/77 (71%), Gaps = 1/77 (1%) | | | |
| Query: | 1 | VSMKPIDLSKMVSIRKRSKKVMKTNKKTLGKSIEERPEYINDRSEFGHWEIDLALGKKTK | 60 |
| | | + +K IDL + V IRK+ K T KK LGKSIEERPE IN+RS FG WEID LG KT | |
| Sbjct: | 150 | LEIKVIDLPRAVRIRKKFTKRPST-KKHLGKSIEERPEEINNRSRFGDWEIDSVLGGKTI | 208 |
| Query: | 61 | SEAVMLTLVERQTRYAL | 77 |
| | | E +LTLVERQTRYA+ | |
| Sbjct: | 209 | GEPSILTLVERQTRYAV | 225 |

[15236] Based on this analysis, it was predicted that this GAS-specific protein and its epitopes, could be useful antigens for vaccines or diagnostics.

### EXAMPLE 2983

[15237] A DNA sequence (GASx2187R) was identified in S. pyogenes <SEQ ID 8465> which encodes the amino acid sequence <SEQ ID 8466>. Analysis of this protein sequence reveals the following:

Possible site: 50
>>> Seems to have no N-terminal signal sequence
----- Final Results -----
bacterial cytoplasm --- Certainty = 0.3287 (Affirmative) < succ>
bacterial membrane --- Certainty = 0.0000 (Not Clear) < succ>
bacterial outside --- Certainty = 0.0000 (Not Clear) < succ>

[15238] No corresponding DNA sequence was identified in S. agalactiae.

[15239] The protein has homology with the following sequences in the GENPEPT database:

| >GP: CAA78948 GB: Z17279 transposase [Streptococcus salivarius] | | | |
|---|---|---|---|
| Identities = 48/87 (55%), Positives = 57/87 (65%) | | | |
| Query: | 1 | MNMSNINSTRKSSYSHLSATERGEIAAYLKMGKKPVEIARLLGSHRSTICREIKRGSVDQ | 60 |
| | | MNMS ST SY HLS ERGEI AYL +G KP EIAR LG +RSTI REI RGS+ Q | |
| Sbjct: | 1 | MNMSTNYSTTNQSYKHLSEAERGEIEAYLSVGLKPAEIARRLGRNRSTITREINRGSITQ | 60 |
| Query: | 61 | VKDKNGKQTFFNAYFADSRQRVYETNR | 87 |
| | | VK NG++ ++ Y+AD+ Y R | |
| Sbjct: | 61 | VKKVNGQKVYYQHYYADAAHNRYRHAR | 87 |

[15240] Based on this analysis, it was predicted that this GAS-specific protein and its epitopes, could be useful antigens for vaccines or diagnostics.

### EXAMPLE 2984

[15241] A DNA sequence <SEQ ID 9013> was identified in S. agalactiae which encodes amino acid sequence <SEQ ID 9014>. Analysis of the amino acid sequence reveals the following:

| Lipop: Possible site: −1 Crend: 3 | | | |
|---|---|---|---|
| McG: Discrim Score: 10.50 | | | |
| GvH: Signal Score (−7.5): −5.2 | | | |
| Possible site: 40 | | | |
| >>> Seems to have an uncleavable N-term signal seq | | | |
| ALOM program | count: 4 | value: −12.26 | threshold: 0.0 |

| | | | |
|---|---|---|---|
| INTEGRAL | Likelihood = −12.26 | Transmembrane | 98-114 (94-116) |
| INTEGRAL | Likelihood = −8.17 | Transmembrane | 5-21 (1-27) |
| INTEGRAL | Likelihood = −6.95 | Transmembrane | 62-78 (57-80) |
| INTEGRAL | Likelihood = −5.84 | Transmembrane | 37-53 (30-55) |

| | | |
|---|---|---|
| PERIPHERAL | Likelihood = 17.35 | 81 |

modified ALOM score: 2.95
*** Reasoning Step: 3
----- Final Results -----
bacterial membrane --- Certainty = 0.5904 (Affirmative) < succ>
bacterial outside --- Certainty = 0.0000 (Not Clear) < succ>
bacterial cytoplasm --- Certainty = 0.0000 (Not Clear) < succ>

[15242] The protein has homology with the following sequences in the databases:

[chemical structure]

[15243] Based on this analysis, it is predicted that this protein from S. agalactiae, and its epitopes, could be useful antigens for vaccines and/or diagnostics.

### EXAMPLE 2985

[15244] A DNA sequence <SEQ ID 9015> was identified in S. agalactiae which encodes amino acid sequence <SEQ ID 9016>. Analysis of the amino acid sequence reveals the following:

| Lipop: Possible site: −1 Crend: 10 | | | |
|---|---|---|---|
| McG: Discrim Score: 13.20 | | | |
| GvH: Signal Score (−7.5): −2.08 | | | |
| Possible site: 34 | | | |
| >>> Seems to have a cleavable N-term signal seq. | | | |
| ALOM program | count: 0 | value: 10.45 | threshold: 0.0 |

| | | |
|---|---|---|
| PERIPHERAL | Likelihood = 10.45 | 36 |

modified ALOM score: −2.59
*** Reasoning Step: 3
----- Final Results -----
bacterial outside --- Certainty = 0.3000 (Affirmative) < succ>
bacterial membrane --- Certainty = 0.0000 (Not Clear) < succ>
bacterial cytoplasm --- Certainty = 0.0000 (Not Clear) < succ>

[15245] The protein has homology with the following sequences in the databases:

[chemical structure]

[15246] A related DNA sequence <SEQ ID 10507> was identified in GBS which encodes amino acid sequence <SEQ ID 10508>.

[15247] SEQ ID 9016 (GBS168) was expressed in E. coli as a His-fusion product. SDS-PAGE analysis of total cell extract is shown in FIG. 33 (lane 9; MW 7.6 kDa) and in FIG. 34 (lane 5; MW 7.6 kDa). It was also expressed in E. coli as a GST-fusion product. SDS-PAGE analysis of total cell extract is shown in FIG. 42 (lane 2; MW 32.6 kDa).

[15248] Based on this analysis, it is predicted that this protein from S. agalactiae, and its epitopes, could be useful antigens for vacc

### EXAMPLE 2986

[15249] A DNA sequence <SEQ ID 9017> was identified in S. agalactiae which encodes amino acid sequence <SEQ ID 9018>. Analysis of the amino acid sequence reveals the following:

| Lipop: Possible site: −1 Crend: 8 | | | |
|---|---|---|---|
| McG: Discrim Score: −2.85 | | | |
| GvH: Signal Score (−7.5): −5.7 | | | |
| Possible site: 21 | | | |
| >>> Seems to have no N-terminal signal sequence | | | |
| ALOM program | count: 0 | value: 5.25 | threshold: 0.0 |

| | | |
|---|---|---|
| PERIPHERAL | Likelihood = 5.25 | 103 |

modified ALOM score: −1.55
*** Reasoning Step: 3
----- Final Results -----
bacterial cytoplasm --- Certainty = 0.1210 (Affirmative) < succ>
bacterial membrane --- Certainty = 0.0000 (Not Clear) < succ>
bacterial outside --- Certainty = 0.0000 (Not Clear) < succ>

[15250] The protein has homology with the following sequences in the databases:

[chemical structure]

[15251] SEQ ID 9018 (GBS45) was expressed in E. coli as a His-fusion product. SDS-PAGE analysis of total cell extract is shown in FIG. 8 (lane 4; MW 18.6 kDa).

[15252] The GBS45-His fusion product was purified (FIG. 97A; see also FIG. 191, lane 5) and used to immunise mice (lane 1 product; 20 μg/mouse). The resulting antiserum was used for Western blot (FIG. 97B), FACS (FIG. 97C), and in the in vivo passive protection assay (Table III). These tests confirm that the protein is immunoaccessible on GBS bacteria and that it is an effective protective immunogen.

[15253] Based on this analysis, it is predicted that this protein from S. agalactiae, and its epitopes, could be useful antigens for vaccines and/or diagnostics.

### EXAMPLE 2987

[15254] A DNA sequence <SEQ ID 9019> was identified in S. agalactiae which encodes amino acid sequence <SEQ ID 9020>. Analysis of the amino acid sequence reveals the following:

| Lipop: Possible site: −1 Crend: 3 | | | |
|---|---|---|---|
| McG: Discrim Score: 6.84 | | | |
| GvH: Signal Score (−7.5): 2.98 | | | |
| Possible site: 25 | | | |
| >>> Seems to have a cleavable N-term signal seq. | | | |
| ALOM program | Count: 0 | value: 13.69 | threshold: 0.0 |

| | | |
|---|---|---|
| PERIPHERAL | Likelihood = 13.69 | 77 |

modified ALOM score: −3.24
*** Reasoning Step: 3
----- Final Results -----
bacterial outside --- Certainty = 0.3000 (Affirmative) < succ>
bacterial membrane --- Certainty = 0.0000 (Not Clear) < succ>
bacterial cytoplasm --- Certainty = 0.0000 (Not Clear)

[15255] A DNA sequence <SEQ ID 10337> was identified in GBS which encodes amino acid sequence <SEQ ID 10338>. This protein and its epitopes could be useful antigens for vaccines and/or diagnostics.

[15256] SEQ ID 9020 (GBS55) was expressed in E. coli as a His-fusion product. SDS-PAGE analysis of total cell extract is shown in FIG. 17 (lane 7; MW 11.3 kDa). It was also expressed in E. coli as a GST-fusion product. SDS-PAGE analysis of total cell extract is shown in FIG. 33 (lane 5; MW 36.3 kDa).

[15257] GBS55-GST was purified as shown in FIG. 197, lane 5.

[15258] GBS671 was expressed in E. coli as a His-fusion product. SDS-PAGE analysis of total cell extract is shown in FIG. 161 (lane 24; MW 12 kDa) and in FIG. 188 (lane 2; MW 12 kDa). Purified protein is shown in FIG. 242, lane 3.

[15259] Based on this analysis, it is predicted that this protein from S. agalactiae, and its epitopes, could be useful antigens for vaccines and/or diagnostics.

### EXAMPLE 2988

[15260] A DNA sequence <SEQ ID 9021> was identified in S. agalactiae which encodes amino acid sequence <SEQ ID 9022>. Analysis of the amino acid sequence reveals the following:

| Lipop Possible site: −1 Crend: 3 | | | |
|---|---|---|---|
| McG: Discrim Score: −14.35 | | | |
| GvH: Signal Score (−7.5): −2.12 | | | |
| Possible site: 44 | | | |
| >>> Seems to have no N-terminal signal sequence | | | |
| ALOM program | count: 4 | value: −13.90 | threshold: 0.0 |

| | | | |
|---|---|---|---|
| INTEGRAL | Likelihood = −13.90 | Transmembrane | 101-117 (92-126) |
| INTEGRAL | Likelihood = −7.64 | Transmembrane | 130-146 (125-148) |
| INTEGRAL | Likelihood = −6.64 | Transmembrane | 24-40 (20-45) |
| INTEGRAL | Likelihood = −2.44 | Transmembrane | 55-71 (55-75) |

| | | |
|---|---|---|
| PERIPHERAL | Likelihood = 17.40 | 2 |

modified ALOM score: 3.28
*** Reasoning Step: 3
----- Final Results -----
bacterial membrane --- Certainty = 0.6562 (Affirmative) < succ>
bacterial outside --- Certainty = 0.0000 (Not Clear) < succ>
bacterial cytoplasm --- Certainty = 0.0000 (Not Clear) < succ>

[15261] SEQ ID 9022 (GBS215) was expressed in E. coli as a GST-fusion product. SDS-PAGE analysis of total cell extract is shown in FIG. 175 (lane 10; MW 45 kDa).

[15262] Based on this analysis, it is predicted that this protein from S. agalactiae, and its epitopes, could be useful antigens for vaccines and/or diagnostics.

### EXAMPLE 2989

[15263] A DNA sequence <SEQ ID 9023> was identified in S. agalactiae which encodes amino acid sequence <SEQ ID 9024>. Analysis of the amino acid sequence reveals the following:

| Lipop Possible site: −1 Crend: 0 | | | |
|---|---|---|---|
| McG: Discrim Score: 11.66 | | | |
| GvH: Signal Score (−7.5): −5.3 | | | |
| Possible site: 61 | | | |
| >>> Seems to have an uncleavable N-term signal seq | | | |
| ALOM program | count: 2 | value: −14.12 | threshold: 0.0 |

| | | | |
|---|---|---|---|
| INTEGRAL | Likelihood = −14.12 | Transmembrane | 13-29 (5-35) |
| INTEGRAL | Likelihood = −8.17 | Transmembrane | 44-60 (39-65) |

| | | |
|---|---|---|
| PERIPHERAL | Likelihood = 39.00 | 29 |

modified ALOM score: 3.32
*** Reasoning Step: 3
----- Final Results -----
bacterial membrane --- Certainty = 0.6647 (Affirmative) < succ>
bacterial outside --- Certainty = 0.0000 (Not Clear) < succ>
bacterial cytoplasm --- Certainty = 0.0000 (Not Clear) < succ>

[15264] SEQ ID 9024 (GBS217) was expressed in E. coli as a GST-fusion product. SDS-PAGE analysis of total cell extract is shown in FIG. 85 (lane 2; MW 36.1 kDa) and in FIG. 156 (lane 1 & 3; MW 36 kDa).

[15265] GBS217-GST was purified as shown in FIG. 224, lane 5-6.

[15266] Based on this analysis, it is predicted that this protein from S. agalactiae, and its epitopes, could be useful antigens for vaccines and/or diagnostics.

### EXAMPLE 2990

[15267] A DNA sequence <SEQ ID 9025> was identified in S. agalactiae which encodes amino acid sequence <SEQ ID 9026>. Analysis of the amino acid sequence reveals the following:

| Lipop Possible site: −1 Crend: 10 | | | |
|---|---|---|---|
| McG: Discrim Score: 8.20 | | | |
| GvH: Signal Score (−7.5): −3.7 | | | |
| Possible site: 33 | | | |
| >>> Seems to have an uncleavable N-term signal seq | | | |
| ALOM program | count: 4 | value: −9.98 | threshold: 0.0 |

| | | | |
|---|---|---|---|
| INTEGRAL | Likelihood = −9.98 | Transmembrane | 22-38 (12-43) |
| INTEGRAL | Likelihood = −7.80 | Transmembrane | 61-77 (56-85) |
| INTEGRAL | Likelihood = −5.20 | Transmembrane | 121-137 (117-148) |
| INTEGRAL | Likelihood = −2.97 | Transmembrane | 99-115 (98-119) |

| | | |
|---|---|---|
| PERIPHERAL | Likelihood = 10.77 | 5 |

modified ALOM score: 2.50
*** Reasoning Step: 3
----- Final Results -----
bacterial membrane --- Certainty = 0.4991 (Affirmative) < succ>
bacterial outside --- Certainty = 0.0000 (Not Clear) < succ>
bacterial cytoplasm --- Certainty = 0.0000 (Not Clear) < succ>

[15268] A related DNA sequence <SEQ ID 10701> was identified in GBS which encodes amino acid sequence <SEQ ID 10702>.

[15269] Based on this analysis, it is predicted that this protein from S. agalactiae, and its epitopes, could be useful antigens for vaccines and/or diagnostics.

### EXAMPLE 2991

[15270] A DNA sequence <SEQ ID 9027> was identified in S. agalactiae which encodes amino acid sequence <SEQ ID 9028>. Analysis of the amino acid sequence reveals the following:

| Lipop Possible site: −1 Crend: 7 | | | |
|---|---|---|---|
| McG: Discrim Score: 10.61 | | | |
| GvH: Signal Score (−7.5): −4.21 | | | |
| Possible site: 51 | | | |
| >>> Seems to have an uncleavable N-term signal seq | | | |
| ALOM program | count: 3 | value: −10.99 | threshold: 0.0 |

| | | | |
|---|---|---|---|
| INTEGRAL | Likelihood = −10.99 | Transmembrane | 38-54 (33-61) |
| INTEGRAL | Likelihood = −8.01 | Transmembrane | 5-21 (1-26) |
| INTEGRAL | Likelihood = −7.01 | Transmembrane | 65-81 (60-87) |

| | | |
|---|---|---|
| PERIPHERAL | Likelihood = 13.85 | 99 |

modified ALOM score: 2.70
*** Reasoning Step: 3
----- Final Results -----
bacterial membrane --- Certainty = 0.5394 (Affirmative) < succ>
bacterial outside --- Certainty = 0.0000 (Not Clear) < succ>
bacterial cytoplasm --- Certainty = 0.0000 (Not Clear) < succ>

[15271] Based on this analysis, it is predicted that this protein from S. agalactiae, and its epitopes, could be useful antigens for vaccines and/or diagnostics.

### EXAMPLE 2992

[15272] A DNA sequence <SEQ ID 9029> was identified in S. agalactiae which encodes amino acid sequence <SEQ ID 9030>. Analysis of the amino acid sequence reveals the following:

| Lipop Possible site: −1 Crend: 10 | | | |
|---|---|---|---|
| McG: Discrim Score: −21.39 | | | |
| GvH: Signal Score (−7.5): −1.85 | | | |
| Possible site: 57 | | | |
| >>> Seems to have no N-terminal signal sequence | | | |
| ALOM program | count: 1 | value: −8.44 | threshold: 0.0 |

| | | | |
|---|---|---|---|
| INTEGRAL | Likelihood = −8.44 | Transmembrane | 38-54 (36-59) |

| | | |
|---|---|---|
| PERIPHERAL | Likelihood = 19.10 | 18 |

modified ALOM score: 2.19
*** Reasoning Step: 3
----- Final Results -----
bacterial membrane --- Certainty = 0.4376 (Affirmative) < succ>
bacterial outside --- Certainty = 0.0000 (Not Clear) < succ>
bacterial cytoplasm --- Certainty = 0.0000 (Not Clear) < succ>

[15273] Based on this analysis, it is predicted that this protein from S. agalactiae, and its epitopes, could be useful antigens for vaccines and/or diagnostics.

### EXAMPLE 2993

[15274] A DNA sequence <SEQ ID 9031> was identified in S. agalactiae which encodes amino acid sequence <SEQ ID 9032>. Analysis of the amino acid sequence reveals the following:

| Lipop Possible site: −1 Crend: 5 | | | |
|---|---|---|---|
| McG: Discrim Score: 12.87 | | | |
| GvH: Signal Score (−7.5): −3.57 | | | |
| Possible site: 41 | | | |
| >>> Seems to have an uncleavable N-term signal seq | | | |
| ALOM program | count: 4 | value: −10.30 | threshold: 0.0 |

| | | | |
|---|---|---|---|
| INTEGRAL | Likelihood = −10.30 | Transmembrane | 69-85 (63-98) |
| INTEGRAL | Likelihood = −8.65 | Transmembrane | 4-20 (1-29) |
| INTEGRAL | Likelihood = −2.07 | Transmembrane | 96-112 (95-118) |

| | | |
|---|---|---|
| PERIPHERAL | Likelihood = 9.71 | 113 |

modified ALOM score: 2.56
*** Reasoning Step: 3
----- Final Results -----
bacterial membrane --- Certainty = 0.5118 (Affirmative) < succ>
bacterial outside --- Certainty = 0.0000 (Not Clear) < succ>
bacterial cytoplasm --- Certainty = 0.0000 (Not Clear) < succ>

[15275] The protein has homology with the following sequences in the databases:

[chemical structure]

[15276] Based on this analysis, it is predicted that this protein from S. agalactiae, and its epitopes, could be useful antigens for vaccines and/or diagnostics.

### EXAMPLE 2994

[15277] A DNA sequence <SEQ ID 9033> was identified in S. agalactiae which encodes amino acid sequence <SEQ ID 9034>. Analysis of the amino acid sequence reveals the following:

| Lipop Possible site: −1 Crend: 9 | | | |
|---|---|---|---|
| McG: Discrim Score: 3.25 | | | |
| GvH: Signal Score (−7.5): −3.39 | | | |
| Possible site: 59 | | | |
| >>> Seems to have an uncleavable N-term signal seq | | | |
| ALOM program | count: 4 | value: −6.64 | threshold: 0.0 |

| | | | |
|---|---|---|---|
| INTEGRAL | Likelihood = −6.64 | Transmembrane | 46-62 (43-64) |
| INTEGRAL | Likelihood = −5.15 | Transmembrane | 17-33 (15-34) |

| | | |
|---|---|---|
| PERIPHERAL | Likelihood = 11.03 | 100 |

modified ALOM score: 1.83
*** Reasoning Step: 3
----- Final Results -----
bacterial membrane --- Certainty = 0.3654 (Affirmative) < succ>
bacterial outside --- Certainty = 0.0000 (Not Clear) < succ>
bacterial cytoplasm --- Certainty = 0.0000 (Not Clear) < succ>

[15278] The protein has homology with the following sequences in the databases:

[chemical structure]

[15279] SEQ ID 9034 (GBS283) was expressed in E. coli as a GST-fusion product. SDS-PAGE analysis of total cell extract is shown in FIG. 63 (lane 8; MW 67.6 kDa).

[15280] Based on this analysis, it is predicted that this protein from S. agalactiae, and its epitopes, could be useful antigens for vaccines and/or diagnostics.

### EXAMPLE 2995

[15281] A DNA sequence <SEQ ID 9035> was identified in S. agalactiae which encodes amino acid sequence <SEQ ID 9036>. Analysis of the amino acid sequence reveals the following:

| Lipop Possible Site: −1 Crend: 2 | | | |
|---|---|---|---|
| SRCFLG: 0 | | | |
| McG: Length of UR: 22 | | | |
| Peak Value of UR: 3.86 | | | |
| Net Charge of CR: 2 | | | |
| McG: Discrim Score: 16.84 | | | |
| GvH: Signal Score (−7.5): −4.38 | | | |
| Possible site: 21 | | | |
| >>> Seems to have an uncleavable N-term signal seq | | | |
| Amino Acid Composition: calculated from 1 | | | |
| ALOM program | count: 1 | value: −12.37 | threshold: 0.0 |

| | | | |
|---|---|---|---|
| INTEGRAL | Likelihood = −12.37 | Transmembrane | 7-23 (1-26) |

| | | |
|---|---|---|
| PERIPHERAL | Likelihood = 12.84 | 64 |

modified ALOM score: 2.97
icm1 HYPID: 7 CFP: 0.595
*** Reasoning Step: 3
----- Final Results -----
bacterial membrane --- Certainty = 0.5946 (Affirmative) < succ>
bacterial outside --- Certainty = 0.0000 (Not Clear) < succ>
bacterial cytoplasm --- Certainty = 0.0000 (Not Clear) < succ>

[15282] SEQ ID 9036 (GBS286) was expressed in E. coli as a His-fusion product. SDS-PAGE analysis of total cell extract is shown in FIG. 52 (lane 11; MW 16.4 kDa). It was also expressed in E. coli as a GST-fusion product. SDS-PAGE analysis of total cell extract is shown in FIG. 59 (lane 2; MW 41.3 kDa) and in FIG. 63 (lane 9; MW 41.4 kDa).

[15283] The GBS286-GST fusion product was purified (FIG. 210, lane 9; FIG. 225, lane 9) and used to immunise mice. The resulting antiserum was used for FACS (FIG. 274), which confirmed that the protein is immunoaccessible on GBS bacteria.

[15284] GBS668 was expressed in E. coli as a GST-fusion product. SDS-PAGE analysis of total cell extract is shown in FIG. 139 (lane 2-4; MW 43.5 kDa) and in FIG. 187 (lane 6; MW 43 kDa). It was also expressed in E. coli as a His-fusion product. SDS-PAGE analysis of total cell extract is shown in FIG. 139 (lane 6 & 7; MW 18.6 kDa) and in FIG. 179 (lane 12; MW 19 kDa).

[15285] GBS668-GST was purified as shown in FIG. 237 (lane 10). GBS668-His was purified as shown in FIG. 231 (lanes 5 & 6).

[15286] GBS673 was expressed in E. coli as a His-fusion product. SDS-PAGE analysis of total cell extract is shown in FIG. 161 (lane 8-10; MW 17 kDa) and in FIG. 188 (lane 4; MW 17 kDa). It was also expressed in E. coli as a GST-fusion product. SDS-PAGE analysis of total cell extract is shown in FIG. 162 (lane 8; MW 41.5 kDa) and in FIG. 239 (lane 7; MW 41 kDa). Purified GBS673-His is shown in FIG. 242, lane 5. Purified GBS673-GST is shown in FIG. 246, lane 2.

[15287] Based on this analysis, it is predicted that this protein from S. agalactiae, and its epitopes, could be useful antigens for vaccines and/or diagnostics.

### EXAMPLE 2996

[15288] A DNA sequence <SEQ ID 9037> was identified in S. agalactiae which encodes amino acid sequence <SEQ ID 9038>. Analysis of the amino acid sequence reveals the following:

| Lipop: Possible site: −1 Crend: 6 | | | |
|---|---|---|---|
| McG: Discrim Score: −18.42 | | | |
| GvH: Signal Score (−7.5): −6.16 | | | |
| Possible site: 57 | | | |
| >>> Seems to have no N-terminal signal sequence | | | |
| ALOM program | count: 2 | value: −8.49 | threshold: 0.0 |

| | | | |
|---|---|---|---|
| INTEGRAL | Likelihood = −8.49 | Transmembrane | 51-67 (44-95) |
| INTEGRAL | Likelihood = −3.08 | Transmembrane | 70-86 (68-95) |

| | | |
|---|---|---|
| PERIPHERAL | Likelihood = 12.89 | 32 |

modified ALOM score: 2.20
*** Reasoning Step: 3
----- Final Results -----
bacterial membrane --- Certainty = 0.4397 (Affirmative) < succ>
bacterial outside --- Certainty = 0.0000 (Not Clear) < succ>
bacterial cytoplasm --- Certainty = 0.0000 (Not Clear) < succ>

[15289] SEQ ID 9038 (GBS386) was expressed in E. coli as a His-fusion product. SDS-PAGE analysis of total cell extract is shown in FIG. 70 (lane 2; MW 14 kDa). It was also expressed in E. coli as a GST-fusion product. SDS-PAGE analysis of total cell extract is shown in FIG. 72 (lane 8; MW 39.5 kDa).

[15290] GBS386-GST was purified as shown in FIG. 213, lane 8.

[15291] Based on this analysis, it is predicted that this protein from S. agalactiae, and its epitopes, could be useful antigens for vaccines and/or diagnostics.

### EXAMPLE 2997

[15292] A DNA sequence <SEQ ID 9039> was identified in S. agalactiae which encodes amino acid sequence <SEQ ID 9040>. Analysis of the amino acid sequence reveals the following:

| Lipop: Possible site: −1 Crend: 8 | | | |
|---|---|---|---|
| McG: Discrim Score: −15.47 | | | |
| GvH: Signal Score (−7.5): −6.21 | | | |
| Possible site: 14 | | | |
| >>> Seems to have no N-terminal signal sequence | | | |
| ALOM program | count: 2 | value: −3.61 | threshold: 0.0 |

| | | | |
|---|---|---|---|
| INTEGRAL | Likelihood = −3.61 | Transmembrane | 94-110 (94-111) |
| INTEGRAL | Likelihood = −1.70 | Transmembrane | 75-91 (75-91) |

| | | |
|---|---|---|
| PERIPHERAL | Likelihood = 5.94 | 139 |

modified ALOM score: 1.22
*** Reasoning Step: 3
----- Final Results -----
bacterial membrane --- Certainty = 0.2444 (Affirmative) < succ>
bacterial outside --- Certainty = 0.0000 (Not Clear) < succ>
bacterial cytoplasm --- Certainty = 0.0000 (Not Clear) < succ>

[15293] The protein has homology with the following sequences in the databases:

[chemical structure]

[15294] SEQ ID 9040 (GBS388) was expressed in E. coli as a His-fusion product. SDS-PAGE analysis of total cell extract is shown in FIG. 70 (lane 3; MW 21 kDa). It was also expressed in E. coli as a GST-fusion product. SDS-PAGE analysis of total cell extract is shown in FIG. 72 (lane 9; MW 45.6 kDa).

[15295] The GBS388-GST fusion product was purified (FIG. 213, lane 10) and used to immunise mice. The resulting antiserum was used for FACS (FIG. 311), which confirmed that the protein is immunoaccessible on GBS bacteria.

[15296] Based on this analysis, it is predicted that this protein from S. agalactiae, and its epitopes, could be useful antigens for vaccines and/or diagnostics.

### EXAMPLE 2998

[15297] A DNA sequence <SEQ ID 9041> was identified in S. agalactiae which encodes amino acid sequence <SEQ ID 9042>. Analysis of the amino acid sequence reveals the following:

| Lipop: Possible site: −1 Crend: 9 | | | |
|---|---|---|---|
| McG: Discrim Score: −11.81 | | | |
| GvH: Signal Score (−7.5): −7.49 | | | |
| Possible site: 25 | | | |
| >>> Seems to have no N-terminal signal sequence | | | |
| ALOM program | count: 1 | value: −5.68 | threshold: 0.0 |

| | | | |
|---|---|---|---|
| INTEGRAL | Likelihood = −5.68 | Transmembrane | 78-94 (77-95) |

| | | |
|---|---|---|
| PERIPHERAL | Likelihood = 4.61 | 134 |

modified ALOM score: 1.64
*** Reasoning Step: 3
----- Final Results -----
bacterial membrane --- Certainty = 0.3272 (Affirmative) < succ>
bacterial outside --- Certainty = 0.0000 (Not Clear) < succ>
bacterial cytoplasm --- Certainty = 0.0000 (Not Clear) < succ>

[15298] The protein has homology with the following sequences in the databases:

[chemical structure]

[15299] A related DNA sequence <SEQ ID 10589> was identified in GBS which encodes amino acid sequence <SEQ ID 10590>.

[15300] SEQ ID 9042 (GBS408) was expressed in E. coli as a His-fusion product. SDS-PAGE analysis of total cell extract is shown in FIG. 76 (lane 6; MW 20.4 kDa). It was also expressed in E. coli as a GST-fusion product. SDS-PAGE analysis of total cell extract is shown in FIG. 171 (lane 5; MW 45.3 kDa).

[15301] GBS408-GST was purified as shown in FIG. 218, lane 9.

[15302] Based on this analysis, it is predicted that this protein from S. agalactiae, and its epitopes, could be useful antigens for vaccines and/or diagnostics.

### EXAMPLE 2999

[15303] A DNA sequence <SEQ ID 9043> was identified in S. agalactiae which encodes amino acid sequence <SEQ ID 9044>. Analysis of the amino acid sequence reveals the following:

| Lipop: Possible site: −1 Crend: 9 | | | |
|---|---|---|---|
| McG: Discrim Score: −9.62 | | | |
| GvH: Signal Score (−7.5): −4.84 | | | |
| Possible site: 61 | | | |
| >>> Seems to have no N-terminal signal sequence | | | |
| ALOM program | count: 2 | value: −11.09 | threshold: 0.0 |

| | | | |
|---|---|---|---|
| INTEGRAL | Likelihood = −11.09 | Transmembrane | 45-61 (37-72) |
| INTEGRAL | Likelihood = −8.60 | Transmembrane | 76-92 (70-97) |

| | | |
|---|---|---|
| PERIPHERAL | Likelihood = 11.62 | 95 |

modified ALOM score: 2.72
*** Reasoning Step: 3
----- Final Results -----
bacterial membrane --- Certainty = 0.5437 (Affirmative) < succ>
bacterial outside --- Certainty = 0.0000 (Not Clear) < succ>
bacterial cytoplasm --- Certainty = 0.0000 (Not Clear) < succ>

[15304] The protein has homology with the following sequences in the databases:

[chemical structure]

[15305] SEQ ID 9044 (GBS411) was expressed in E. coli as a His-fusion product. SDS-PAGE analysis of total cell extract is shown in FIG. 78 (lane 2; MW 16 kDa).

[15306] Based on this analysis, it is predicted that this protein from S. agalactiae, and its epitopes, could be useful antigens for vaccines and/or diagnostics.

### EXAMPLE 3000

[15307] A DNA sequence <SEQ ID 9045> was identified in S. agalactiae which encodes amino acid sequence <SEQ ID 9046>. Analysis of the amino acid sequence reveals the following:

| Lipop: Possible site: −1 Crend: 6 | | | |
|---|---|---|---|
| McG: Discrim Score: −17.94 | | | |
| GvH: Signal Score (−7.5): −4.63 | | | |
| Possible site: 45 | | | |
| >>> Seems to have no N-terminal signal sequence | | | |
| ALOM program | count: 1 | value: −6.10 | threshold: 0.0 |

| | | | |
|---|---|---|---|
| INTEGRAL | Likelihood = −6.10 | Transmembrane | 31-47 (26-49) |

| | | |
|---|---|---|
| PERIPHERAL | Likelihood = 15.33 | 3 |

modified ALOM score: 1.72
*** Reasoning Step: 3
----- Final Results -----
bacterial membrane --- Certainty = 0.3442 (Affirmative) < succ>
bacterial outside --- Certainty = 0.0000 (Not Clear) < succ>
bacterial cytoplasm --- Certainty = 0.0000 (Not Clear) < succ>

[15308] The protein has homology with the following sequences in the databases:

[chemical structure]

[15309] SEQ ID 9046 (GBS412) was expressed in E. coli as a GST-fusion product. SDS-PAGE analysis of total cell extract is shown in FIG. 171 (lane 6; MW 36 kDa). Purified GBS412-GST is shown in FIG. 218, lane 10-11.

[15310] Based on this analysis, it is predicted that this protein from S. agalactiae, and its epitopes, could be useful antigens for vaccines and/or diagnostics.

### EXAMPLE 3001

[15311] A DNA sequence <SEQ ID 9047> was identified in S. agalactiae which encodes amino acid sequence <SEQ ID 9048>. Analysis of the amino acid sequence reveals the following:

| Lipop: Possible site: −1 Crend: 0 | | | |
|---|---|---|---|
| McG: Discrim Score: 3.67 | | | |
| GvH: Signal Score (−7.5): −3.62 | | | |
| Possible site: 41 | | | |
| >>> Seems to have an uncleavable N-term signal seq | | | |
| ALOM program | count: 5 | value: −7.27 | threshold: 0.0 |

| | | | |
|---|---|---|---|
| INTEGRAL | Likelihood = −7.27 | Transmembrane | 48-64 (32-68) |
| INTEGRAL | Likelihood = −6.26 | Transmembrane | 87-103 (85-105) |
| INTEGRAL | Likelihood = −6.21 | Transmembrane | 29-45 (26-46) |
| INTEGRAL | Likelihood = −3.29 | Transmembrane | 110-126 (109-130) |
| INTEGRAL | Likelihood = −2.87 | Transmembrane | 2-18 (1-18) |

| | | |
|---|---|---|
| PERIPHERAL | Likelihood = 4.24 | 66 |

modified ALOM score: 1.95
*** Reasoning Step: 3
----- Final Results -----
bacterial membrane --- Certainty = 0.3909 (Affirmative) < succ>
bacterial outside --- Certainty = 0.0000 (Not Clear) < succ>
bacterial cytoplasm --- Certainty = 0.0000 (Not Clear) < succ>

[15312] The protein has homology with the following sequences in the databases:

[chemical structure]

[15313] Based on this analysis, it is predicted that this protein from S. agalactiae, and its epitopes, could be useful antigens for vaccines and/or diagnostics.

### EXAMPLE 3002

[15314] A DNA sequence <SEQ ID 9049> was identified in S. agalactiae which encodes amino acid sequence <SEQ ID 9050>. Analysis of the amino acid sequence reveals the following:

| Lipop: Possible site: −1 Crend: 2 | | | |
|---|---|---|---|
| McG: Discrim Score: 10.43 | | | |
| GvH: Signal Score (−7.5): −4.39 | | | |
| Possible site: 54 | | | |
| >>> Seems to have an uncleavable N-term signal seq | | | |
| ALOM program | count: 4 | value: −10.30 | threshold: 0.0 |

| | | | |
|---|---|---|---|
| INTEGRAL | Likelihood = −10.30 | Transmembrane | 62-78 (59-84) |
| INTEGRAL | Likelihood = −6.10 | Transmembrane | 4-20 (1-22) |
| INTEGRAL | Likelihood = −4.25 | Transmembrane | 128-144 (123-145) |
| INTEGRAL | Likelihood = −3.13 | Transmembrane | 88-104 (87-104) |

| | | |
|---|---|---|
| PERIPHERAL | Likelihood = 2.01 | 109 |

modified ALOM score: 2.56
*** Reasoning Step: 3
----- Final Results -----
bacterial membrane --- Certainty = 0.5118 (Affirmative) < succ>
bacterial outside --- Certainty = 0.0000 (Not Clear) < succ>
bacterial cytoplasm --- Certainty = 0.0000 (Not Clear) < succ>

[15315] The protein has homology with the following sequences in the databases:

[chemical structure]

[15316] There is also homology to SEQ ID 7750.

[15317] Based on this analysis, it is predicted that this protein from S. agalactiae, and its epitopes, could be useful antigens for vacc

### EXAMPLE 3003

[15318] A DNA sequence <SEQ ID 9051> was identified in S. agalactiae which encodes amino acid sequence <SEQ ID 9052>. Analysis of the amino acid sequence reveals the following:

| Lipop: Possible site: −1 Crend: 7 | | | |
|---|---|---|---|
| McG: Discrim Score: 13.24 | | | |
| GvH: Signal Score (−7.5): −2.18 | | | |
| Possible site: 19 | | | |
| >>> Seems to have a cleavable N-term signal seq. | | | |
| ALOM program | count: 0 | value: 2.01 | threshold: 0.0 |

| | |
|---|---|
| PERIPHERAL | Likelihood = 2.01 21 |

modified ALOM score: −0.90
*** Reasoning Step: 3
----- Final Results -----
bacterial outside --- Certainty = 0.3000 (Affirmative) < succ>
bacterial membrane --- Certainty = 0.0000 (Not Clear) < succ>
bacterial cytoplasm --- Certainty = 0.0000 (Not Clear) < succ>

[15319] The protein has no homology with any sequences in the databases.

[15320] SEQ ID 9052 (GBS138) was expressed in E. coli as a His-fusion product. SDS-PAGE analysis of total cell extract is shown in FIG. 19 (lane 2; MW 15 kDa) GBS672 was expressed in E. coli as a His-fusion product. SDS-PAGE analysis of total cell extract is shown in FIG. 161 (lane 5-7; MW 15 kDa) and in FIG. 188 (lane 3; MW 15 kDa). Purified protein is shown in FIG. 242, lane 4.

[15321] Based on this analysis, it is predicted that this protein from S. agalactiae, and its epitopes, could be useful antigens for vaccines and/or diagnostics.

### EXAMPLE 3004

[15322] A DNA sequence <SEQ ID 9053> was identified in S. agalactiae which encodes amino acid sequence <SEQ ID 9054>. Analysis of the amino acid sequence reveals the following:

```
Lipop: Possible site: −1 Crend: 8
McG: Discrim Score: 18.01
GvH: Signal Score (−7.5): −2.35
          Possible site: 26
>>> Seems to have a cleavable N-term signal seq.
ALOM program count: 0 value: 14.80 threshold: 0.0
      PERIPHERAL Likelihood = 14.80 51
modified ALOM score: −3.46
*** Reasoning Step: 3
----- Final Results -----
                                bacterial outside --- Certainty = 0.3000(Affirmative) < succ>
                              bacterial membrane --- Certainty = 0.0000(Not Clear) < succ>
                            bacterial cytoplasm --- Certainty = 0.0000(Not Clear) < succ>
```

[15323] SEQ ID 9054 (GBS143) was expressed in E. coli as a GST-fusion product. SDS-PAGE analysis of total cell extract is shown in FIG. 23 (lane 2; MW 33.5 kDa).

[15324] Based on this analysis, it is predicted that this protein from S. agalactiae, and its epitopes, could be useful antigens for vaccines and/or diagnostics.

### EXAMPLE 3005

[15325] A DNA sequence <SEQ ID 9055> was identified in S. agalactiae which encodes amino acid sequence <SEQ ID 9056>. Analysis of the amino acid sequence reveals the following:

| Lipop Possible site: −1 Crend: 0 | | | | |
|---|---|---|---|---|
| McG: Discrim Score: 7.43 | | | | |
| GvH: Signal Score (−7.5): −6.25 | | | | |
| Possible site: 41 | | | | |
| >>> Seems to have an uncleavable N-term signal seq | | | | |
| ALOM program count: 1 value: −10.77 threshold: 0.0 | | | | |
| | INTEGRAL | Likelihood = −10.77 | Transmembrane | 2-18 (1-20) |
| | PERIPHERAL | Likelihood = 5.14 | 29 | |

```
modified ALOM score: 2.65
*** Reasoning Step: 3
----- Final Results -----
                              bacterial membrane --- Certainty = 0.5310(Affirmative) < succ>
                                bacterial outside --- Certainty = 0.0000(Not Clear) < succ>
                            bacterial cytoplasm --- Certainty = 0.0000(Not Clear) < succ>
```

[15326] SEQ ID 9056 (GBS229) was expressed in E. coli as a GST-fusion product. SDS-PAGE analysis of total cell extract is shown in FIG. 55 (lane 3; MW 35.9 kDa).

[15327] GBS229-GST was purified as shown in FIG. 206, lane 5.

[15328] Based on this analysis, it is predicted that this protein from S. agalactiae, and its epitopes, could be useful antigens for vaccines and/or diagnostics.

### EXAMPLE 3006

[15329] A DNA sequence <SEQ ID 9183> was identified in GAS which encodes amino acid sequence <SEQ ID 9184>. Analysis of the amino acid sequence reveals the following:

```
Possible site: 29
>>> Seems to have a cleavable N-term signal seq.
----- Final Results -----
                                bacterial outside --- Certainty = 0.3000(Affirmative) < succ>
                              bacterial membrane --- Certainty = 0.0000(Not Clear) < succ>
                            bacterial cytoplasm --- Certainty = 0.0000(Not Clear) < succ>
```

[15330] Based on this analysis, it is predicted that this GAS protein, and its epitopes, could be useful antigens for vaccines and/or diagnostics.

### EXAMPLE 3007

[15331] A DNA sequence <SEQ ID 9185> was identified in GAS which encodes amino acid sequence <SEQ ID 9186>. Analysis of the amino acid sequence reveals the following:

```
Possible site: 28
>>> Seems to have a cleavable N-term signal seq.
----- Final Results -----
                                bacterial outside --- Certainty = 0.3000(Affirmative) < succ>
                              bacterial membrane --- Certainty = 0.0000(Not Clear) < succ>
                            bacterial cytoplasm --- Certainty = 0.0000(Not Clear) < succ>
```

[15332] Based on this analysis, it is predicted that this GAS protein, and its epitopes, could be useful antigens for vaccines and/or diagnostics.

### EXAMPLE 3008

[15333] A DNA sequence <SEQ ID 9187> was identified in GAS which encodes amino acid sequence <SEQ ID 9188>. Analysis of the amino acid sequence reveals the following:

| Possible site: 36 | | | | |
|---|---|---|---|---|
| >>> Seems to have no N-terminal signal sequence | | | | |
| | INTEGRAL | Likelihood = −1.70 | Transmembrane | 850-866 (850-866) |
| | INTEGRAL | Likelihood = −1.22 | Transmembrane | 15-31 (15-31) |

```
----- Final Results -----
                              bacterial membrane --- Certainty = 0.1680(Affirmative) < succ>
                                bacterial outside --- Certainty = 0.0000(Not Clear) < succ>
                            bacterial cytoplasm --- Certainty = 0.0000(Not Clear) < succ>
```

[15334] Based on this analysis, it is predicted that this GAS protein, and its epitopes, could be useful antigens for vaccines and/or diagnostics.

### EXAMPLE 3009

[15335] A DNA sequence <SEQ ID 9189> was identified in GAS which encodes amino acid sequence <SEQ ID 9190>. Analysis of the amino acid sequence reveals the following:

| LPXTG motif: 259-263 | | | | |
|---|---|---|---|---|
| Possible site: 13 | | | | |
| >>> Seems to have no N-terminal signal sequence | | | | |
| | INTEGRAL | Likelihood = −3.93 | Transmembrane | 270-286 (268-288) |

```
----- Final Results -----
                              bacterial membrane --- Certainty = 0.2572(Affirmative) < succ>
                                bacterial outside --- Certainty = 0.0000(Not Clear) < succ>
                            bacterial cytoplasm --- Certainty = 0.0000(Not Clear) < succ>
```

[15336] Based on this analysis, it is predicted that this GAS protein, and its epitopes, could be useful antigens for vaccines and/or diagnostics.

### EXAMPLE 3010

[15337] A DNA sequence <SEQ ID 9191> was identified in GAS which encodes amino acid sequence <SEQ ID 9192>. Analysis of the amino acid sequence reveals the following:

```
Possible site: 21
>>> May be a lipoprotein
----- Final Results -----
                              bacterial membrane --- Certainty = 0.0000(Not Clear) < succ>
                                bacterial outside --- Certainty = 0.0000(Not Clear) < succ>
                            bacterial cytoplasm --- Certainty = 0.0000(Not Clear) < succ>
```

[15338] Based on this analysis, it is predicted that this GAS protein, and its epitopes, could be useful antigens for vaccines and/or diagnostics.

### EXAMPLE 3011

[15339] A DNA sequence <SEQ ID 9193> was identified in GAS which encodes amino acid sequence <SEQ ID 9194>. Analysis of the amino acid sequence reveals the following:

```
Possible site: 29
>>> May be a lipoprotein
----- Final Results -----
                              bacterial membrane --- Certainty = 0.0000(Not Clear) < succ>
                                bacterial outside --- Certainty = 0.0000(Not Clear) < succ>
                            bacterial cytoplasm --- Certainty = 0.0000(Not Clear) < succ>
```

[15340] Based on this analysis, it is predicted that this GAS protein, and its epitopes, could be useful antigens for vaccines and/or diagnostics.

### EXAMPLE 3012

[15341] A DNA sequence <SEQ ID 9195> was identified in GAS which encodes amino acid sequence <SEQ ID 9196>. Analysis of the amino acid sequence reveals the following:

```
Possible site: 34
>>> Seems to have a cleavable N-term signal seq.
----- Final Results -----
                                bacterial outside --- Certainty = 0.3000(Affirmative) < succ>
                              bacterial membrane --- Certainty = 0.0000(Not Clear) < succ>
                            bacterial cytoplasm --- Certainty = 0.0000(Not Clear) < succ>
```

[15342] Based on this analysis, it is predicted that this GAS protein, and its epitopes, could be useful antigens for vaccines and/or diagnostics.

### EXAMPLE 3013

[15343] A DNA sequence <SEQ ID 9197> was identified in GAS which encodes amino acid sequence <SEQ ID 9198>. Analysis of the amino acid sequence reveals the following:

| Possible site: 13 | | | | |
|---|---|---|---|---|
| >>> Seems to have no N-terminal signal sequence | | | | |
| | INTEGRAL | Likelihood = −3.50 | Transmembrane | 346-362 (343-366) |
| | INTEGRAL | Likelihood = −2.97 | Transmembrane | 177-193 (176-195) |

```
----- Final Results -----
                              bacterial membrane --- Certainty = 0.2402(Affirmative) < succ>
                                bacterial outside --- Certainty = 0.0000(Not Clear) < succ>
                            bacterial cytoplasm --- Certainty = 0.0000(Not Clear) < succ>
```

[15344] Based on this analysis, it is predicted that this GAS protein, and its epitopes, could be useful antigens for vaccines and/or diagnostics.

### EXAMPLE 3014

[15345] A DNA sequence <SEQ ID 9199> was identified in GAS which encodes amino acid sequence <SEQ ID 9200>. Analysis of the amino acid sequence reveals the following:

| Possible site: 19 | | | | |
|---|---|---|---|---|
| >>> Seems to have no N-terminal signal sequence | | | | |
| | INTEGRAL | Likelihood = −1.33 | Transmembrane | 24-40 (24-40) |

```
----- Final Results -----
                              bacterial membrane --- Certainty = 0.1532(Affirmative) < succ>
                                bacterial outside --- Certainty = 0.0000(Not Clear) < succ>
                            bacterial cytoplasm --- Certainty = 0.0000(Not Clear) < succ>
```

[15346] Based on this analysis, it is predicted that this GAS protein, and its epitopes, could be useful antigens for vaccines and/or diagnostics.

### EXAMPLE 3015

[15347] A DNA sequence <SEQ ID 9201> was identified in GAS which encodes amino acid sequence <SEQ ID 9202>. Analysis of the amino acid sequence reveals the following:

| Possible site: 33 | | | | |
|---|---|---|---|---|
| >>> Seems to have a cleavable N-term signal seq. | | | | |
| | INTEGRAL | Likelihood = −6.00 | Transmembrane | 194-210 (192-214) |

```
----- Final Results -----
                              bacterial membrane --- Certainty = 0.3399(Affirmative) < succ>
                                bacterial outside --- Certainty = 0.0000(Not Clear) < succ>
                            bacterial cytoplasm --- Certainty = 0.0000(Not Clear) < succ>
LPXTG motif: 183-187
```

[15348] Based on this analysis, it is predicted that this GAS protein, and its epitopes, could be useful antigens for vaccines and/or diagnostics.

### EXAMPLE 3016

[15349] A DNA sequence <SEQ ID 9203> was identified in GAS which encodes amino acid sequence <SEQ ID 9204>. Analysis of the amino acid sequence reveals the following:

| Possible site: 32 | | | | |
|---|---|---|---|---|
| >>> Seems to have an uncleavable N-term signal seq | | | | |
| | INTEGRAL | Likelihood = −11.25 | Transmembrane | 9-25 (4-28) |

```
----- Final Results -----
                              bacterial membrane --- Certainty = 0.5501(Affirmative) < succ>
                                bacterial outside --- Certainty = 0.0000(Not Clear) < succ>
                            bacterial cytoplasm --- Certainty = 0.0000(Not Clear) < succ>
```

[15350] Based on this analysis, it is predicted that this GAS protein, and its epitopes, could be useful antigens for vaccines and/or diagnostics.

### EXAMPLE 3017

[15351] A DNA sequence <SEQ ID 9205> was identified in GAS which encodes amino acid sequence <SEQ ID 9206>. Analysis of the amino acid sequence reveals the following:

| Possible site: 37 | | | | |
|---|---|---|---|---|
| >>> Seems to have no N-terminal signal sequence | | | | |
| | INTEGRAL | Likelihood = −3.03 | Transmembrane | 462-478 (460-479) |
| | INTEGRAL | Likelihood = −0.90 | Transmembrane | 18-34 (18-34) |

```
----- Final Results -----
                              bacterial membrane --- Certainty = 0.2211(Affirmative) < succ>
                                bacterial outside --- Certainty = 0.0000(Not Clear) < succ>
                            bacterial cytoplasm --- Certainty = 0.0000(Not Clear) < succ>
LPXTG motif: 450-454
```

[15352] Based on this analysis, it is predicted that this GAS protein, and its epitopes, could be useful antigens for vaccines and/or diagnostics.

### EXAMPLE 3018

[15353] A DNA sequence <SEQ ID 9207> was identified in GAS which encodes amino acid sequence <SEQ ID 9208>. Analysis of the amino acid sequence reveals the following:

| Possible site: 26 | | | | |
|---|---|---|---|---|
| >>> Seems to have an uncleavable N-term signal seq | | | | |
| | INTEGRAL | Likelihood = −2.60 | Transmembrane | 15-31 (12-32) |

```
----- Final Results -----
                              bacterial membrane --- Certainty = 0.2041(Affirmative) < succ>
                                bacterial outside --- Certainty = 0.0000(Not Clear) < succ>
                            bacterial cytoplasm --- Certainty = 0.0000(Not Clear) < succ>
```

[15354] Based on this analysis, it is predicted that this GAS protein, and its epitopes, could be useful antigens for vaccines and/or diagnostics.

### EXAMPLE 3019

[15355] A DNA sequence <SEQ ID 9209> was identified in GAS which encodes amino acid sequence <SEQ ID 9210>. Analysis of the amino acid sequence reveals the following:

| Possible site: 28 | | | | |
|---|---|---|---|---|
| >>> Seems to have no N-terminal signal sequence | | | | |
| | INTEGRAL | Likelihood = −1.38 | Transmembrane | 16-32 (16-32) |

```
----- Final Results -----
                              bacterial membrane --- Certainty = 0.1553(Affirmative) < succ>
                                bacterial outside --- Certainty = 0.0000(Not Clear) < succ>
                            bacterial cytoplasm --- Certainty = 0.0000(Not Clear) < succ>
```

[15356] Based on this analysis, it is predicted that this GAS protein, and its epitopes, could be useful antigens for vaccines and/or diagnostics.

### EXAMPLE 3020

[15357] A DNA sequence <SEQ ID 9211> was identified in GAS which encodes amino acid sequence <SEQ ID 9212>. Analysis of the amino acid sequence reveals the following:

```
Possible cleavage site: 24
>>> Seems to have a cleavable N-term signal seq.
----- Final Results -----
                                bacterial outside --- Certainty = 0.300(Affirmative) < succ>
                              bacterial membrane --- Certainty = 0.000(Not Clear) < succ>
                            bacterial cytoplasm --- Certainty = 0.000(Not Clear) < succ>
```

[15358] Based on this analysis, it is predicted that this GAS protein, and its epitopes, could be useful antigens for vaccines and/or diagnostics.

### EXAMPLE 3021

[15359] A DNA sequence <SEQ ID 9213> was identified in GAS which encodes amino acid sequence <SEQ ID 9214>. Analysis of the amino acid sequence reveals the following:

```
Possible cleavage site: 23
>>> May be a lipoprotein
----- Final Results -----
                              bacterial membrane --- Certainty = 0.000(Not Clear) < succ>
                                bacterial outside --- Certainty = 0.000(Not Clear) < succ>
                            bacterial cytoplasm --- Certainty = 0.000(Not Clear) < succ>
```

[15360] Based on this analysis, it is predicted that this GAS protein, and its epitopes, could be useful antigens for vaccines and/or diagnostics.

### EXAMPLE 3022

[15361] A DNA sequence <SEQ ID 9215> was identified in GAS which encodes amino acid sequence <SEQ ID 9216>. Analysis of the amino acid sequence reveals the following:

| Possible site: 19 | | | | |
|---|---|---|---|---|
| >>> Seems to have an uncleavable N-term signal seq | | | | |
| | INTEGRAL | Likelihood = −2.76 | Transmembrane | 3-19 (2-20) |

```
----- Final Results -----
                              bacterial membrane --- Certainty = 0.2105(Affirmative) < succ>
                                bacterial outside --- Certainty = 0.0000(Not Clear) < succ>
                            bacterial cytoplasm --- Certainty = 0.0000(Not Clear) < succ>
RGD motif: 396-398
```

[15362] Based on this analysis, it is predicted that this GAS protein, and its epitopes, could be useful antigens for vaccines and/or diagnostics.

### EXAMPLE 3023

[15363] A DNA sequence <SEQ ID 9217> was identified in GAS which encodes amino acid sequence <SEQ ID 9218>. Analysis of the amino acid sequence reveals the following:

| Possible site: 18 | | | | |
|---|---|---|---|---|
| >>> Seems to have no N-terminal signal sequence | | | | |
| | INTEGRAL | Likelihood = −0.80 | Transmembrane | 251-267 (251-267) |
| | INTEGRAL | Likelihood = −0.75 | Transmembrane | 179-195 (179-195) |

```
----- Final Results -----
                              bacterial membrane --- Certainty = 0.1319(Affirmative) < succ>
                                bacterial outside --- Certainty = 0.0000(Not Clear) < succ>
                            bacterial cytoplasm --- Certainty = 0.0000(Not Clear) < succ>
```

[15364] Based on this analysis, it is predicted that this GAS protein, and its epitopes, could be useful antigens for vaccines and/or diagnostics.

### EXAMPLE 3024

[15365] A DNA sequence <SEQ ID 9219> was identified in GAS which encodes amino acid sequence <SEQ ID 9220>. Analysis of the amino acid sequence reveals the following:

| Possible site: 39 | | | | |
|---|---|---|---|---|
| >>> Seems to have no N-terminal signal sequence | | | | |
| | INTEGRAL | Likelihood = −1.22 | Transmembrane | 52-68 (51-68) |

```
----- Final Results -----
                              bacterial membrane --- Certainty = 0.1489(Affirmative) < succ>
                                bacterial outside --- Certainty = 0.0000(Not Clear) < succ>
                            bacterial cytoplasm --- Certainty = 0.0000(Not Clear) < succ>
```

[15366] Based on this analysis, it is predicted that this GAS protein, and its epitopes, could be useful antigens for vaccines and/or diagnostics.

### EXAMPLE 3025

[15367] A DNA sequence <SEQ ID 9221> was identified in GAS which encodes amino acid sequence <SEQ ID 9222>. Analysis of the amino acid sequence reveals the following:

| Possible site: 52 | | | | |
|---|---|---|---|---|
| >>> Seems to have an uncleavable N-term signal seq | | | | |
| | INTEGRAL | Likelihood = −12.58 | Transmembrane | 39-55 (32-86) |
| | INTEGRAL | Likelihood = −9.55 | Transmembrane | 60-76 (56-86) |

```
----- Final Results -----
                              bacterial membrane --- Certainty = 0.6031(Affirmative) < succ>
                                bacterial outside --- Certainty = 0.0000(Not Clear) < succ>
                            bacterial cytoplasm --- Certainty = 0.0000(Not Clear) < succ>
```

[15368] Based on this analysis, it is predicted that this GAS protein, and its epitopes, could be useful antigens for vaccines and/or diagnostics.

### EXAMPLE 3026

[15369] A DNA sequence <SEQ ID 9223> was identified in GAS which encodes amino acid sequence <SEQ ID 9224>. Analysis of the amino acid sequence reveals the following:

```
Possible site: 18
>>> Seems to have an uncleavable N-term signal seq
----- Final Results -----
                              bacterial membrane --- Certainty = 0.0000(Not Clear) < succ>
                                bacterial outside --- Certainty = 0.0000(Not Clear) < succ>
                            bacterial cytoplasm --- Certainty = 0.0000(Not Clear) < succ>
```

[15370] Based on this analysis, it is predicted that this GAS protein, and its epitopes, could be useful antigens for vaccines and/or diagnostics.

### EXAMPLE 3027

[15371] A DNA sequence <SEQ ID 9225> was identified in GAS which encodes amino acid sequence <SEQ ID 9226>. Analysis of the amino acid sequence reveals the following:

```
Possible site: 26
>>> Seems to have an uncleavable N-term signal seq
----- Final Results -----
                              bacterial membrane --- Certainty = 0.0000(Not Clear) < succ>
                                bacterial outside --- Certainty = 0.0000(Not Clear) < succ>
                            bacterial cytoplasm --- Certainty = 0.0000(Not Clear) < succ>
```

[15372] Based on this analysis, it is predicted that this GAS protein, and its epitopes, could be useful antigens for vaccines and/or diagnostics.

### EXAMPLE 3028

[15373] A DNA sequence <SEQ ID 9227> was identified in GAS which encodes amino acid sequence <SEQ ID 9228>. Analysis of the amino acid sequence reveals the following:

| Possible site: 33 | | | | |
|---|---|---|---|---|
| >>> Seems to have an uncleavable N-term signal seq | | | | |
| | INTEGRAL | Likelihood = −8.44 | Transmembrane | 18-34 (13-40) |
| | INTEGRAL | Likelihood = −7.86 | Transmembrane | 59-75 (54-79) |

```
----- Final Results -----
                              bacterial membrane --- Certainty = 0.4376(Affirmative) < succ>
                                bacterial outside --- Certainty = 0.0000(Not Clear) < succ>
                            bacterial cytoplasm --- Certainty = 0.0000(Not Clear) < succ>
```

[15374] Based on this analysis, it is predicted that this GAS protein, and its epitopes, could be useful antigens for vaccines and/or diagnostics.

### EXAMPLE 3029

[15375] A DNA sequence <SEQ ID 9229> was identified in GAS which encodes amino acid sequence <SEQ ID 9230>. Analysis of the amino acid sequence reveals the following:

```
Possible site: 27
>>> Seems to have a cleavable N-term signal seq.
----- Final Results -----
                                bacterial outside --- Certainty = 0.3000(Affirmative) < succ>
                              bacterial membrane --- Certainty = 0.0000(Not Clear) < succ>
                            bacterial cytoplasm --- Certainty = 0.0000(Not Clear) < succ>
```

[15376] Based on this analysis, it is predicted that this GAS protein, and its epitopes, could be useful antigens for vaccines and/or diagnostics.

### EXAMPLE 3030

[15377] A DNA sequence <SEQ ID 9231> was identified in GAS which encodes amino acid sequence <SEQ ID 9232>. Analysis of the amino acid sequence reveals the following:

```
Possible site: 24
>>> Seems to have an uncleavable N-term signal seq
----- Final Results -----
                              bacterial membrane --- Certainty = 0.0000(Not Clear) < succ>
                                bacterial outside --- Certainty = 0.0000(Not Clear) < succ>
                            bacterial cytoplasm --- Certainty = 0.0000(Not Clear) < succ>
```

[15378] Based on this analysis, it is predicted that this GAS protein, and its epitopes, could be useful antigens for vaccines and/or diagnostics.

### EXAMPLE 3031

[15379] A DNA sequence <SEQ ID 9233> was identified in GAS which encodes amino acid sequence <SEQ ID 9234>. Analysis of the amino acid sequence reveals the following:

| Possible site: 49 | | | | |
|---|---|---|---|---|
| >>> Seems to have a cleavable N-term signal seq. | | | | |
| | INTEGRAL | Likelihood = −9.87 | Transmembrane | 58-74 (53-81) |

```
----- Final Results -----
                              bacterial membrane --- Certainty = 0.4949(Affirmative) < succ>
                                bacterial outside --- Certainty = 0.0000(Not Clear) < succ>
                            bacterial cytoplasm --- Certainty = 0.0000(Not Clear) < succ>
```

[15380] Based on this analysis, it is predicted that this GAS protein, and its epitopes, could be useful antigens for vaccines and/or diagnostics.

### EXAMPLE 3032

[15381] A DNA sequence <SEQ ID 9235> was identified in GAS which encodes amino acid sequence <SEQ ID 9236>. Analysis of the amino acid sequence reveals the following:

| Possible site: 16 | | | | |
|---|---|---|---|---|
| >>> Seems to have no N-terminal signal sequence | | | | |
| | INTEGRAL | Likelihood = −0.06 | Transmembrane | 92-108 (92-108) |

```
----- Final Results -----
                              bacterial membrane --- Certainty = 0.1022(Affirmative) < succ>
                                bacterial outside --- Certainty = 0.0000(Not Clear) < succ>
                            bacterial cytoplasm --- Certainty = 0.0000(Not Clear) < succ>
```

[15382] Based on this analysis, it is predicted that this GAS protein, and its epitopes, could be useful antigens for vaccines and/or diagnostics.

### EXAMPLE 3033

[15383] A DNA sequence <SEQ ID 9237> was identified in GAS which encodes amino acid sequence <SEQ ID 9238>. Analysis of the amino acid sequence reveals the following:

| Possible site: 40 | | | | |
|---|---|---|---|---|
| >>> Seems to have no N-terminal signal sequence | | | | |
| | INTEGRAL | Likelihood = −1.38 | Transmembrane | 18-34 (18-34) |

```
----- Final Results -----
                              bacterial membrane --- Certainty = 0.1553(Affirmative) < succ>
                                bacterial outside --- Certainty = 0.0000(Not Clear) < succ>
                            bacterial cytoplasm --- Certainty = 0.0000(Not Clear) < succ>
```

[15384] Based on this analysis, it is predicted that this GAS protein, and its epitopes, could be useful antigens for vaccines and/or diagnostics.

### EXAMPLE 3034

[15385] A DNA sequence <SEQ ID 9239> was identified in GAS which encodes amino acid sequence <SEQ ID 9240>. Analysis of the amino acid sequence reveals the following:

```
Possible site: 19
>>> Seems to have an uncleavable N-term signal seq
----- Final Results -----
                              bacterial membrane --- Certainty = 0.0000(Not Clear) < succ>
                                bacterial outside --- Certainty = 0.0000(Not Clear) < succ>
                            bacterial cytoplasm --- Certainty = 0.0000(Not Clear) < succ>
```

[15386] Based on this analysis, it is predicted that this GAS protein, and its epitopes, could be useful antigens for vaccines and/or diagnostics.

### EXAMPLE 3035

[15387] A DNA sequence <SEQ ID 9241> was identified in GAS which encodes amino acid sequence <SEQ ID 9242>. Analysis of the amino acid sequence reveals the following:

| Possible site: 57 | | | | |
|---|---|---|---|---|
| >>> Seems to have no N-terminal signal sequence | | | | |
| | INTEGRAL | Likelihood = −1.01 | Transmembrane | 155-171 (154-171) |

```
----- Final Results -----
                              bacterial membrane --- Certainty = 0.1404(Affirmative) < succ>
                                bacterial outside --- Certainty = 0.0000(Not Clear) < succ>
                            bacterial cytoplasm --- Certainty = 0.0000(Not Clear) < succ>
```

[15388] Based on this analysis, it is predicted that this GAS protein, and its epitopes, could be useful antigens for vaccines and/or diagnostics.

### EXAMPLE 3036

[15389] A DNA sequence <SEQ ID 9243> was identified in GAS which encodes amino acid sequence <SEQ ID 9244>. Analysis of the amino acid sequence reveals the following:

| Possible site: 28 | | | | |
|---|---|---|---|---|
| >>> Seems to have a cleavable N-term signal seq. | | | | |
| | INTEGRAL | Likelihood = −4.25 | Transmembrane | 113-129 (111-131) |

```
----- Final Results -----
                              bacterial membrane --- Certainty = 0.2699(Affirmative) < succ>
                                bacterial outside --- Certainty = 0.0000(Not Clear) < succ>
                            bacterial cytoplasm --- Certainty = 0.0000(Not Clear) < succ>
```

[15390] Based on this analysis, it is predicted that this GAS protein, and its epitopes, could be useful antigens for vaccines and/or diagnostics.

### EXAMPLE 3037

[15391] A DNA sequence <SEQ ID 9245> was identified in GAS which encodes amino acid sequence <SEQ ID 9246>. Analysis of the amino acid sequence reveals the following:

| Possible site: 56 | | | | |
|---|---|---|---|---|
| >>> Seems to have no N-terminal signal sequence | | | | |
| | INTEGRAL | Likelihood = −0.69 | Transmembrane | 110-126 (110-126) |

```
----- Final Results -----
                              bacterial membrane --- Certainty = 0.1277(Affirmative) < succ>
                                bacterial outside --- Certainty = 0.0000(Not Clear) < succ>
                            bacterial cytoplasm --- Certainty = 0.0000(Not Clear) < succ>
```

[15392] Based on this analysis, it is predicted that this GAS protein, and its epitopes, could be useful antigens for vaccines and/or diagnostics.

### EXAMPLE 3038

[15393] A DNA sequence <SEQ ID 9247> was identified in GAS which encodes amino acid sequence <SEQ ID 9248>. Analysis of the amino acid sequence reveals the following:

| Possible site: 58 | | | | |
|---|---|---|---|---|
| >>> Seems to have no N-terminal signal sequence | | | | |
| | INTEGRAL | Likelihood = −1.28 | Transmembrane | 130-146 (128-146) |

```
----- Final Results -----
                              bacterial membrane --- Certainty = 0.1510(Affirmative) < succ>
                                bacterial outside --- Certainty = 0.0000(Not Clear) < succ>
                            bacterial cytoplasm --- Certainty = 0.0000(Not Clear) < succ>
```

[15394] Based on this analysis, it is predicted that this GAS protein, and its epitopes, could be useful antigens for vaccines and/or diagnostics.

### EXAMPLE 3039

[15395] A DNA sequence <SEQ ID 9249> was identified in GAS which encodes amino acid sequence <SEQ ID 9250>. Analysis of the amino acid sequence reveals the following:

| Possible site: 39 | | | | |
|---|---|---|---|---|
| >>> Seems to have no N-terminal signal sequence | | | | |
| | INTEGRAL | Likelihood = −4.57 | Transmembrane | 74-90 (72-92) |
| | INTEGRAL | Likelihood = −3.13 | Transmembrane | 169-185 (166-185) |
| | INTEGRAL | Likelihood = −3.13 | Transmembrane | 28-44 (27-44) |

```
----- Final Results -----
                              bacterial membrane --- Certainty = 0.2826(Affirmative) < succ>
                                bacterial outside --- Certainty = 0.0000(Not Clear) < succ>
                            bacterial cytoplasm --- Certainty = 0.0000(Not Clear) < succ>
```

[15396] Based on this analysis, it is predicted that this GAS protein, and its epitopes, could be useful antigens for vaccines and/or diagnostics.

### EXAMPLE 3040

[15397] A DNA sequence <SEQ ID 9251> was identified in GAS which encodes amino acid sequence <SEQ ID 9252>. Analysis of the amino acid sequence reveals the following:

| Possible cleavage site: 56 | | | | |
|---|---|---|---|---|
| >>> Seems to have a cleavable N-term signal seq. | | | | |
| | INTEGRAL | Likelihood = −12.21 | Transmembrane | 93-109 (87-114) |
| | INTEGRAL | Likelihood = −8.65 | Transmembrane | 227-243 (226-243) |

```
----- Final Results -----
                              bacterial membrane --- Certainty = 0.588(Affirmative) < succ>
                                bacterial outside --- Certainty = 0.0000(Not Clear) < succ>
                            bacterial cytoplasm --- Certainty = 0.0000(Not Clear) < succ>
```

[15398] Based on this analysis, it is predicted that this GAS protein, and its epitopes, could be useful antigens for vaccines and/or diagnostics.

### EXAMPLE 3041

[15399] A DNA sequence <SEQ ID 9253> was identified in GAS which encodes amino acid sequence <SEQ ID 9254>. Analysis of the amino acid sequence reveals the following:

| Possible site: 45 | | | | |
|---|---|---|---|---|
| >>> Seems to have an uncleavable N-term signal seq | | | | |
| | INTEGRAL | Likelihood = −6.53 | Transmembrane | 73-89 (70-94) |
| | INTEGRAL | Likelihood = −4.41 | Transmembrane | 32-48 (30-51) |
| | INTEGRAL | Likelihood = −2.55 | Transmembrane | 10-26 (10-26) |
| | INTEGRAL | Likelihood = −2.39 | Transmembrane | 106-122 (104-123) |
| | INTEGRAL | Likelihood = −1.75 | Transmembrane | 153-169 (152-169) |

```
----- Final Results -----
                              bacterial membrane --- Certainty = 0.3612(Affirmative) < succ>
                                bacterial outside --- Certainty = 0.0000(Not Clear) < succ>
                            bacterial cytoplasm --- Certainty = 0.0000(Not Clear) < succ>
```

[15400] Based on this analysis, it is predicted that this GAS protein, and its epitopes, could be useful antigens for vaccines and/or diagnostics.

### EXAMPLE 3042

[15401] A DNA sequence <SEQ ID 9255> was identified in GAS which encodes amino acid sequence <SEQ ID 9256>. Analysis of the amino acid sequence reveals the following:

| Possible site: 44 | | | | |
|---|---|---|---|---|
| >>> Seems to have no N-terminal signal sequence | | | | |
| | INTEGRAL | Likelihood = −11.68 | Transmembrane | 25-41 (15-46) |
| | INTEGRAL | Likelihood = −9.24 | Transmembrane | 255-271 (248-276) |
| | INTEGRAL | Likelihood = −7.59 | Transmembrane | 82-98 (79-100) |
| | INTEGRAL | Likelihood = −4.30 | Transmembrane | 115-131 (113-135) |
| | INTEGRAL | Likelihood = −0.11 | Transmembrane | 148-164 (148-164) |

```
----- Final Results -----
                              bacterial membrane --- Certainty = 0.5670(Affirmative) < succ>
                                bacterial outside --- Certainty = 0.0000(Not Clear) < succ>
                            bacterial cytoplasm --- Certainty = 0.0000(Not Clear) < succ>
```

[15402] Based on this analysis, it is predicted that this GAS protein, and its epitopes, could be useful antigens for vaccines and/or diagnostics.

### EXAMPLE 3043

[15403] A DNA sequence <SEQ ID 9257> was identified in GAS which encodes amino acid sequence <SEQ ID 9258>. Analysis of the amino acid sequence reveals the following:

| Possible site: 51 | | | | |
|---|---|---|---|---|
| >>> Seems to have no N-terminal signal sequence | | | | |
| | INTEGRAL | Likelihood = −11.04 | Transmembrane | 137-153 (126-160) |
| | INTEGRAL | Likelihood = −10.56 | Transmembrane | 36-52 (29-58) |
| | INTEGRAL | Likelihood = −10.08 | Transmembrane | 407-423 (399-426) |
| | INTEGRAL | Likelihood = −4.94 | Transmembrane | 230-246 (228-250) |
| | INTEGRAL | Likelihood = −4.83 | Transmembrane | 79-95 (77-98) |
| | INTEGRAL | Likelihood = −4.35 | Transmembrane | 202-218 (201-220) |
| | INTEGRAL | Likelihood = −1.12 | Transmembrane | 293-309 (293-309) |

```
----- Final Results -----
                              bacterial membrane --- Certainty = 0.5416(Affirmative) < succ>
                                bacterial outside --- Certainty = 0.0000(Not Clear) < succ>
                            bacterial cytoplasm --- Certainty = 0.0000(Not Clear) < succ>
```

[15404] Based on this analysis, it is predicted that this GAS protein, and its epitopes, could be useful antigens for vaccines and/or diagnostics.

### EXAMPLE 3044

[15405] A DNA sequence <SEQ ID 9259> was identified in GAS which encodes amino acid sequence <SEQ ID 9260>. Analysis of the amino acid sequence reveals the following:

| Possible site: 31 | | | | |
|---|---|---|---|---|
| >>> Seems to have no N-terminal signal sequence | | | | |
| | INTEGRAL | Likelihood = −2.76 | Transmembrane | 137-153 (137-154) |

```
----- Final Results -----
                              bacterial membrane --- Certainty = 0.2105(Affirmative) < succ>
                                bacterial outside --- Certainty = 0.0000(Not Clear) < succ>
                            bacterial cytoplasm --- Certainty = 0.0000(Not Clear) < succ>
```

[15406] Based on this analysis, it is predicted that this GAS protein, and its epitopes, could be useful antigens for vaccines and/or diagnostics.

### EXAMPLE 3045

[15407] A DNA sequence <SEQ ID 9261> was identified in GAS which encodes amino acid sequence <SEQ ID 9262>. Analysis of the amino acid sequence reveals the following:

| Possible site: 36 | | | | |
|---|---|---|---|---|
| >>> Seems to have no N-terminal signal sequence | | | | |
| | INTEGRAL | Likelihood = −7.91 | Transmembrane | 238-254 (236-264) |
| | INTEGRAL | Likelihood = −6.16 | Transmembrane | 69-85 (65-89) |
| | INTEGRAL | Likelihood = −6.00 | Transmembrane | 136-152 (134-155) |
| | INTEGRAL | Likelihood = −4.73 | Transmembrane | 29-45 (21-48) |
| | INTEGRAL | Likelihood = −2.97 | Transmembrane | 194-210 (193-220) |

```
----- Final Results -----
                              bacterial membrane --- Certainty = 0.4163(Affirmative) < succ>
                                bacterial outside --- Certainty = 0.0000(Not Clear) < succ>
                            bacterial cytoplasm --- Certainty = 0.0000(Not Clear) < succ>
```

[15408] Based on this analysis, it is predicted that this GAS protein, and its epitopes, could be useful antigens for vaccines and/or diagnostics.

### EXAMPLE 3046

[15409] A DNA sequence <SEQ ID 9263> was identified in GAS which encodes amino acid sequence <SEQ ID 9264>. Analysis of the amino acid sequence reveals the following:

| Possible site: 39 | | | | |
|---|---|---|---|---|
| >>> Seems to have a cleavable N-term signal seq. | | | | |
| | INTEGRAL | Likelihood = −9.87 | Transmembrane | 574-590 (568-601) |
| | INTEGRAL | Likelihood = −9.18 | Transmembrane | 243-259 (238-262) |
| | INTEGRAL | Likelihood = −7.11 | Transmembrane | 66-82 (65-87) |
| | INTEGRAL | Likelihood = −1.28 | Transmembrane | 270-286 (270-287) |

```
----- Final Results -----
                              bacterial membrane --- Certainty = 0.4949(Affirmative) < succ>
                                bacterial outside --- Certainty = 0.0000(Not Clear) < succ>
                            bacterial cytoplasm --- Certainty = 0.0000(Not Clear) < succ>
```

[15410] Based on this analysis, it is predicted that this GAS protein, and its epitopes, could be useful antigens for vaccines and/or diagnostics.

### EXAMPLE 3047

[15411] A DNA sequence <SEQ ID 9265> was identified in GAS which encodes amino acid sequence <SEQ ID 9266>. Analysis of the amino acid sequence reveals the following:

| Possible site: 33 | | | | |
|---|---|---|---|---|
| >>> Seems to have no N-terminal signal sequence | | | | |
| | INTEGRAL | Likelihood = −7.91 | Transmembrane | 98-114 (92-124) |
| | INTEGRAL | Likelihood = −6.21 | Transmembrane | 19-35 (14-37) |
| | INTEGRAL | Likelihood = −5.36 | Transmembrane | 170-186 (169-189) |
| | INTEGRAL | Likelihood = −5.15 | Transmembrane | 147-163 (136-167) |
| | INTEGRAL | Likelihood = −1.12 | Transmembrane | 77-93 (77-93) |

```
----- Final Results -----
                              bacterial membrane --- Certainty = 0.4163(Affirmative) < succ>
                                bacterial outside --- Certainty = 0.0000(Not Clear) < succ>
                            bacterial cytoplasm --- Certainty = 0.0000(Not Clear) < succ>
```

[15412] Based on this analysis, it is predicted that this GAS protein, and its epitopes, could be useful antigens for vaccines and/or diagnostics.

### EXAMPLE 3048

[15413] A DNA sequence <SEQ ID 9267> was identified in GAS which encodes amino acid sequence <SEQ ID 9268>. Analysis of the amino acid sequence reveals the following:

| Possible site: 47 | | | | |
|---|---|---|---|---|
| >>> Seems to have no N-terminal signal sequence | | | | |
| | INTEGRAL | Likelihood = −11.94 | Transmembrane | 27-43 (19-51) |
| | INTEGRAL | Likelihood = −4.83 | Transmembrane | 152-168 (151-171) |
| | INTEGRAL | Likelihood = −4.09 | Transmembrane | 277-293 (276-294) |
| | INTEGRAL | Likelihood = −3.82 | Transmembrane | 195-211 (193-217) |
| | INTEGRAL | Likelihood = −2.50 | Transmembrane | 120-136 (120-137) |
| | INTEGRAL | Likelihood = −0.64 | Transmembrane | 81-97 (81-98) |

```
----- Final Results -----
                              bacterial membrane --- Certainty = 0.5776(Affirmative) < succ>
                                bacterial outside --- Certainty = 0.0000(Not Clear) < succ>
                            bacterial cytoplasm --- Certainty = 0.0000(Not Clear) < succ>
```

[15414] Based on this analysis, it is predicted that this GAS protein, and its epitopes, could be useful antigens for vaccines and/or diagnostics.

### EXAMPLE 3049

[15415] A DNA sequence <SEQ ID 9269> was identified in GAS which encodes amino acid sequence <SEQ ID 9270>. Analysis of the amino acid sequence reveals the following:

| Possible site: 36 | | | | |
|---|---|---|---|---|
| >>> Seems to have no N-terminal signal sequence | | | | |
| | INTEGRAL | Likelihood = −8.49 | Transmembrane | 27-43 (14-50) |
| | INTEGRAL | Likelihood = −8.17 | Transmembrane | 58-74 (52-79) |
| | INTEGRAL | Likelihood = −7.38 | Transmembrane | 165-181 (161-193) |
| | INTEGRAL | Likelihood = −3.66 | Transmembrane | 247-263 (246-270) |
| | INTEGRAL | Likelihood = −1.54 | Transmembrane | 134-150 (134-150) |

```
----- Final Results -----
                              bacterial membrane --- Certainty = 0.440(Affirmative) < succ>
                                bacterial outside --- Certainty = 0.0000(Not Clear) < succ>
                            bacterial cytoplasm --- Certainty = 0.0000(Not Clear) < succ>
```

[15416] Based on this analysis, it is predicted that this GAS protein, and its epitopes, could be useful antigens for vaccines and/or diagnostics.

### EXAMPLE 3050

[15417] A DNA sequence <SEQ ID 9271> was identified in GAS which encodes amino acid sequence <SEQ ID 9272>. Analysis of the amino acid sequence reveals the following:

| Possible site: 55 | | | | |
|---|---|---|---|---|
| >>> Seems to have no N-terminal signal sequence | | | | |
| | INTEGRAL | Likelihood = −14.75 | Transmembrane | 389-405 (377-413) |
| | INTEGRAL | Likelihood = −8.44 | Transmembrane | 31-47 (29-54) |
| | INTEGRAL | Likelihood = −7.17 | Transmembrane | 181-197 (179-205) |
| | INTEGRAL | Likelihood = −7.01 | Transmembrane | 339-355 (326-360) |
| | INTEGRAL | Likelihood = −6.58 | Transmembrane | 105-121 (102-124) |
| | INTEGRAL | Likelihood = −5.36 | Transmembrane | 225-241 (222-244) |
| | INTEGRAL | Likelihood = −0.43 | Transmembrane | 139-155 (139-155) |
| | INTEGRAL | Likelihood = −0.16 | Transmembrane | 283-299 (282-300) |

```
----- Final Results -----
                              bacterial membrane --- Certainty = 0.6901(Affirmative) < succ>
                                bacterial outside --- Certainty = 0.0000(Not Clear) < succ>
                            bacterial cytoplasm --- Certainty = 0.0000(Not Clear) < succ>
```

[15418] Based on this analysis, it is predicted that this GAS protein, and its epitopes, could be useful antigens for vaccines and/or diagnostics.

### EXAMPLE 3051

[15419] A DNA sequence <SEQ ID 9273> was identified in GAS which encodes amino acid sequence <SEQ ID 9274>. Analysis of the amino acid sequence reveals the following:

| Possible cleavage site: 25 | | | | |
|---|---|---|---|---|
| >>> Seems to have a cleavable N-term signal seq. | | | | |
| | INTEGRAL | Likelihood = −5.31 | Transmembrane | 155-171 (154-174) |
| | INTEGRAL | Likelihood = −3.50 | Transmembrane | 111-127 (110-128) |
| | INTEGRAL | Likelihood = −2.07 | Transmembrane | 80-96 (78-96) |
| | INTEGRAL | Likelihood = −0.90 | Transmembrane | 57-73 (57-74) |

```
----- Final Results -----
                              bacterial membrane --- Certainty = 0.312(Affirmative) < succ>
                                bacterial outside --- Certainty = 0.0000(Not Clear) < succ>
                            bacterial cytoplasm --- Certainty = 0.0000(Not Clear) < succ>
```

[15420] Based on this analysis, it is predicted that this GAS protein, and its epitopes, could be useful antigens for vaccines and/or diagnostics.

### EXAMPLE 3052

[15421] A DNA sequence <SEQ ID 9275> was identified in GAS which encodes amino acid sequence <SEQ ID 9276>. Analysis of the amino acid sequence reveals the following:

| Possible site: 27 | | | | |
|---|---|---|---|---|
| >>> Seems to have an uncleavable N-term signal seq | | | | |
| | INTEGRAL | Likelihood = −3.93 | Transmembrane | 463-479 (461-480) |

```
----- Final Results -----
                              bacterial membrane --- Certainty = 0.2572(Affirmative) < succ>
                                bacterial outside --- Certainty = 0.0000(Not Clear) < succ>
                            bacterial cytoplasm --- Certainty = 0.0000(Not Clear) < succ>
```

[15422] Based on this analysis, it is predicted that this GAS protein, and its epitopes, could be useful antigens for vaccines and/or diagnostics.

### EXAMPLE 3053

[15423] A DNA sequence <SEQ ID 8741> was identified in GBS which encodes amino acid sequence <SEQ ID 8742>. This protein and its epitopes could be useful antigens for vaccines and/or diagnostics.

### EXAMPLE 3054

[15424] A DNA sequence <SEQ ID 8685> was identified in GBS which encodes amino acid sequence <SEQ ID 8686>. This protein and its epitopes could be useful antigens for vaccines and/or diagnostics.

### EXAMPLE 3055

[15425] A DNA sequence <SEQ ID 10303> was identified in GBS which encodes amino acid sequence <SEQ ID 10304>. This protein and its epitopes could be useful antigens for vaccines and/or diagnostics.

### EXAMPLE 3056

[15426] A DNA sequence <SEQ ID 10305> was identified in GBS which encodes amino acid sequence <SEQ ID 10306>. This protein and its epitopes could be useful antigens for vaccines and/or diagnostics.

### EXAMPLE 3057

[15427] A DNA sequence <SEQ ID 10307> was identified in GBS which encodes amino acid sequence <SEQ ID 10308>. This protein and its epitopes could be useful antigens for vaccines and/or diagnostics.

### EXAMPLE 3058

[15428] A DNA sequence <SEQ ID 10309> was identified in GBS which encodes amino acid sequence <SEQ ID 10310>. This protein and its epitopes could be useful antigens for vaccines and/or diagnostics.

### EXAMPLE 3059

[15429] A DNA sequence <SEQ ID 10311> was identified in GBS which encodes amino acid sequence <SEQ ID 10312>. This protein and its epitopes could be useful antigens for vaccines and/or diagnostics.

### EXAMPLE 3060

[15430] A DNA sequence <SEQ ID 10313> was identified in GBS which encodes amino acid sequence <SEQ ID 10314>. This protein and its epitopes could be useful antigens for vaccines and/or diagnostics.

### EXAMPLE 3061

[15431] A DNA sequence <SEQ ID 10315> was identified in GBS which encodes amino acid sequence <SEQ ID 10316>. This protein and its epitopes could be useful antigens for vaccines and/or diagnostics.

### EXAMPLE 3062

[15432] A DNA sequence <SEQ ID 10317> was identified in GBS which encodes amino acid sequence <SEQ ID 10318>. This protein and its epitopes could be useful antigens for vaccines and/or diagnostics.

### EXAMPLE 3063

[15433] A repeated DNA sequence <SEQ ID 10319> was identified in GBS which encodes amino acid sequence <SEQ ID 10320>. This protein and its epitopes could be useful antigens for vaccines and/or diagnostics.

### EXAMPLE 3064

[15434] A DNA sequence <SEQ ID 10321> was identified in GBS which encodes amino acid sequence <SEQ ID 10322>. This protein and its epitopes could be useful antigens for vaccines and/or diagnostics.

### EXAMPLE 3065

[15435] A DNA sequence <SEQ ID 10323> was identified in GBS which encodes amino acid sequence <SEQ ID 10324>. This protein and its epitopes could be useful antigens for vaccines and/or diagnostics.

### EXAMPLE 3066

[15436] A DNA sequence <SEQ ID 10325> was identified in GBS which encodes amino acid sequence <SEQ ID 10326>. This protein and its epitopes could be useful antigens for vaccines and/or diagnostics.

### EXAMPLE 3067

[15437] A DNA sequence <SEQ ID 10327> was identified in GBS which encodes amino acid sequence <SEQ ID 10328>. This protein and its epitopes could be useful antigens for vaccines and/or diagnostics.

### EXAMPLE 3068

[15438] A DNA sequence <SEQ ID 10329> was identified in GBS which encodes amino acid sequence <SEQ ID 10330>. This protein and its epitopes could be useful antigens for vaccines and/or diagnostics.

### EXAMPLE 3069

[15439] A DNA sequence <SEQ ID 10331> was identified in GBS which encodes amino acid sequence <SEQ ID 10332>. This protein and its epitopes could be useful antigens for vaccines and/or diagnostics.

### EXAMPLE 3070

[15440] A DNA sequence <SEQ ID 10333> was identified in GBS which encodes amino acid sequence <SEQ ID 10334>. This protein and its epitopes could be useful antigens for vaccines and/or diagnostics.

### EXAMPLE 3071

[15441] A DNA sequence <SEQ ID 10335> was identified in GBS which encodes amino acid sequence <SEQ ID 10336>. This protein and its epitopes could be useful antigens for vaccines and/or diagnostics.

### EXAMPLE 3072

[15442] A DNA sequence <SEQ ID 10339> was identified in GBS which encodes amino acid sequence <SEQ ID 10340>. This protein and its epitopes could be useful antigens for vaccines and/or diagnostics.

### EXAMPLE 3073

[15443] A DNA sequence <SEQ ID 10341> was identified in GBS which encodes amino acid sequence <SEQ ID 10342>. This protein and its epitopes could be useful antigens for vaccines and/or diagnostics.

### EXAMPLE 3074

[15444] A DNA sequence <SEQ ID 10343> was identified in GBS which encodes amino acid sequence <SEQ ID 10344>. This protein and its epitopes could be useful antigens for vaccines and/or diagnostics.

### EXAMPLE 3075

[15445] A DNA sequence <SEQ ID 10345> was identified in GBS which encodes amino acid sequence <SEQ ID 10346>. This protein and its epitopes could be useful antigens for vaccines and/or diagnostics.

### EXAMPLE 3076

[15446] A DNA sequence <SEQ ID 10347> was identified in GBS which encodes amino acid sequence <SEQ ID 10348>. This protein and its epitopes could be useful antigens for vaccines and/or diagnostics.

### EXAMPLE 3077

[15447] A DNA sequence <SEQ ID 10349> was identified in GBS which encodes amino acid sequence <SEQ ID 10350>. This protein and its epitopes could be useful antigens for vaccines and/or diagnostics.

### EXAMPLE 3078

[15448] A DNA sequence <SEQ ID 10351> was identified in GBS which encodes amino acid sequence <SEQ ID 10352>. This protein and its epitopes could be useful antigens for vaccines and/or diagnostics.

### EXAMPLE 3079

[15449] A DNA sequence <SEQ ID 10353> was identified in GBS which encodes amino acid sequence <SEQ ID 10354>. This protein and its epitopes could be useful antigens for vaccines and/or diagnostics.

### EXAMPLE 3080

[15450] A DNA sequence <SEQ ID 10355> was identified in GBS which encodes amino acid sequence <SEQ ID 10356>. This protein and its epitopes could be useful antigens for vaccines and/or diagnostics.

### EXAMPLE 3081

[15451] A DNA sequence <SEQ ID 10357> was identified in GBS which encodes amino acid sequence <SEQ ID 10358>. This protein and its epitopes could be useful antigens for vaccines and/or diagnostics.

### EXAMPLE 3082

[15452] A DNA sequence <SEQ ID 10359> was identified in GBS which encodes amino acid sequence <SEQ ID 10360>. This protein and its epitopes could be useful antigens for vaccines and/or diagnostics.

### EXAMPLE 3083

[15453] A DNA sequence <SEQ ID 10361> was identified in GBS which encodes amino acid sequence <SEQ ID 10362>. This protein and its epitopes could be useful antigens for vaccines and/or diagnostics.

### EXAMPLE 3084

[15454] A DNA sequence <SEQ ID 10363> was identified in GBS which encodes amino acid sequence <SEQ ID 10364>. This protein and its epitopes could be useful antigens for vaccines and/or diagnostics.

### EXAMPLE 3085

[15455] A DNA sequence <SEQ ID 10365> was identified in GBS which encodes amino acid sequence <SEQ ID 10366>. This protein and its epitopes could be useful antigens for vaccines and/or diagnostics.

### EXAMPLE 3086

[15456] A DNA sequence <SEQ ID 10367> was identified in GBS which encodes amino acid sequence <SEQ ID 10368>. This protein and its epitopes could be useful antigens for vaccines and/or diagnostics.

### EXAMPLE 3087

[15457] A DNA sequence <SEQ ID 10369> was identified in GBS which encodes amino acid sequence <SEQ ID 10370>. This protein and its epitopes could be useful antigens for vaccines and/or diagnostics.

### EXAMPLE 3088

[15458] A DNA sequence <SEQ ID 10371> was identified in GBS which encodes amino acid sequence <SEQ ID 10372>. This protein and its epitopes could be useful antigens for vaccines and/or diagnostics.

### EXAMPLE 3089

[15459] A DNA sequence <SEQ ID 10373> was identified in GBS which encodes amino acid sequence <SEQ ID 10374>. This protein and its epitopes could be useful antigens for vaccines and/or diagnostics.

### EXAMPLE 3090

[15460] A DNA sequence <SEQ ID 10375> was identified in GBS which encodes amino acid sequence <SEQ ID 10376>. This protein and its epitopes could be useful antigens for vaccines and/or diagnostics.

### EXAMPLE 3091

[15461] A DNA sequence <SEQ ID 10377> was identified in GBS which encodes amino acid sequence <SEQ ID 10378>. This protein and its epitopes could be useful antigens for vaccines and/or diagnostics.

### EXAMPLE 3092

[15462] A DNA sequence <SEQ ID 10379> was identified in GBS which encodes amino acid sequence <SEQ ID 10380>. This protein and its epitopes could be useful antigens for vaccines and/or diagnostics.

### EXAMPLE 3093

[15463] A DNA sequence <SEQ ID 10381> was identified in GBS which encodes amino acid sequence <SEQ ID 10382>. This protein and its epitopes could be useful antigens for vaccines and/or diagnostics.

### EXAMPLE 3094

[15464] A DNA sequence <SEQ ID 10383> was identified in GBS which encodes amino acid sequence <SEQ ID 10384>. This protein and its epitopes could be useful antigens for vaccines and/or diagnostics.

### EXAMPLE 3095

[15465] A DNA sequence <SEQ ID 10385> was identified in GBS which encodes amino acid sequence <SEQ ID 10386>. This protein and its epitopes could be useful antigens for vaccines and/or diagnostics.

### EXAMPLE 3096

[15466] A DNA sequence <SEQ ID 10387> was identified in GBS which encodes amino acid sequence <SEQ ID 10388>. This protein and its epitopes could be useful antigens for vaccines and/or diagnostics.

### EXAMPLE 3097

[15467] A DNA sequence <SEQ ID 10389> was identified in GBS which encodes amino acid sequence <SEQ ID 10390>. This protein and its epitopes could be useful antigens for vaccines and/or diagnostics.

### EXAMPLE 3098

[15468] A DNA sequence <SEQ ID 10391> was identified in GBS which encodes amino acid sequence <SEQ ID 10392>. This protein and its epitopes could be useful antigens for vaccines and/or diagnostics.

### EXAMPLE 3099

[15469] A DNA sequence <SEQ ID 10393> was identified in GBS which encodes amino acid sequence <SEQ ID 10394>. This protein and its epitopes could be useful antigens for vaccines and/or diagnostics.

### EXAMPLE 3100

[15470] A DNA sequence <SEQ ID 10395> was identified in GBS which encodes amino acid sequence <SEQ ID 10396>. This protein and its epitopes could be useful antigens for vaccines and/or diagnostics.

### EXAMPLE 3101

[15471] A DNA sequence <SEQ ID 10397> was identified in GBS which encodes amino acid sequence <SEQ ID 10398>. This protein and its epitopes could be useful antigens for vaccines and/or diagnostics.

### EXAMPLE 3102

[15472] A DNA sequence <SEQ ID 10399> was identified in GBS which encodes amino acid sequence <SEQ ID 10400>. This protein and its epitopes could be useful antigens for vaccines and/or diagnostics.

### EXAMPLE 3103

[15473] A DNA sequence <SEQ ID 10401> was identified in GBS which encodes amino acid sequence <SEQ ID 10402>. This protein and its epitopes could be useful antigens for vaccines and/or diagnostics.

### EXAMPLE 3104

[15474] A DNA sequence <SEQ ID 10403> was identified in GBS which encodes amino acid sequence <SEQ ID 10404>. This protein and its epitopes could be useful antigens for vaccines and/or diagnostics.

### EXAMPLE 3105

[15475] A DNA sequence <SEQ ID 10405> was identified in GBS which encodes amino acid sequence <SEQ ID 10406>. This protein and its epitopes could be useful antigens for vaccines and/or diagnostics.

### EXAMPLE 3106

[15476] A DNA sequence <SEQ ID 10407> was identified in GBS which encodes amino acid sequence <SEQ ID 10408>. This protein and its epitopes could be useful antigens for vaccines and/or diagnostics.

### EXAMPLE 3107

[15477] A DNA sequence <SEQ ID 10409> was identified in GBS which encodes amino acid sequence <SEQ ID 10410>. This protein and its epitopes could be useful antigens for vaccines and/or diagnostics.

### EXAMPLE 3108

[15478] A DNA sequence <SEQ ID 10411> was identified in GBS which encodes amino acid sequence <SEQ ID 10412>. This protein and its epitopes could be useful antigens for vaccines and/or diagnostics.

### EXAMPLE 3109

[15479] A DNA sequence <SEQ ID 10413> was identified in GBS which encodes amino acid sequence <SEQ ID 10414>. This protein and its epitopes could be useful antigens for vaccines and/or diagnostics.

### EXAMPLE 3110

[15480] A DNA sequence <SEQ ID 10415> was identified in GBS which encodes amino acid sequence <SEQ ID 10416>. This protein and its epitopes could be useful antigens for vaccines and/or diagnostics.

### EXAMPLE 3111

[15481] A DNA sequence <SEQ ID 10417> was identified in GBS which encodes amino acid sequence <SEQ ID 10418>. This protein and its epitopes could be useful antigens for vaccines and/or diagnostics.

### EXAMPLE 3112

[15482] A DNA sequence <SEQ ID 10419> was identified in GBS which encodes amino acid sequence <SEQ ID 10420>. This protein and its epitopes could be useful antigens for vaccines and/or diagnostics.

### EXAMPLE 3113

[15483] A DNA sequence <SEQ ID 10421> was identified in GBS which encodes amino acid sequence <SEQ ID 10422>. This protein and its epitopes could be useful antigens for vaccines and/or diagnostics.

### EXAMPLE 3114

[15484] A DNA sequence <SEQ ID 10423> was identified in GBS which encodes amino acid sequence <SEQ ID 10424>. This protein and its epitopes could be useful antigens for vaccines and/or diagnostics.

### EXAMPLE 3115

[15485] A DNA sequence <SEQ ID 10425> was identified in GBS which encodes amino acid sequence <SEQ ID 10426>. This protein and its epitopes could be useful antigens for vaccines and/or diagnostics.

### EXAMPLE 3116

[15486] A DNA sequence <SEQ ID 10427> was identified in GBS which encodes amino acid sequence <SEQ ID 10428>. This protein and its epitopes could be useful antigens for vaccines and/or diagnostics.

### EXAMPLE 3117

[15487] A DNA sequence <SEQ ID 10429> was identified in GBS which encodes amino acid sequence <SEQ ID 10430>. This protein and its epitopes could be useful antigens for vaccines and/or diagnostics.

### EXAMPLE 3118

[15488] A DNA sequence <SEQ ID 10431> was identified in GBS which encodes amino acid sequence <SEQ ID 10432>. This protein and its epitopes could be useful antigens for vaccines and/or diagnostics.

### EXAMPLE 3119

[15489] A DNA sequence <SEQ ID 10433> was identified in GBS which encodes amino acid sequence <SEQ ID 10434>. This protein and its epitopes could be useful antigens for vaccines and/or diagnostics.

### EXAMPLE 3120

[15490] A DNA sequence <SEQ ID 10435> was identified in GBS which encodes amino acid sequence <SEQ ID 10436>. This protein and its epitopes could be useful antigens for vaccines and/or diagnostics.

### EXAMPLE 3121

[15491] A DNA sequence <SEQ ID 10437> was identified in GBS which encodes amino acid sequence <SEQ ID 10438>. This protein and its epitopes could be useful antigens for vaccines and/or diagnostics.

### EXAMPLE 3122

[15492] A DNA sequence <SEQ ID 10441> was identified in GBS which encodes amino acid sequence <SEQ ID 10442>. This protein and its epitopes could be useful antigens for vaccines and/or diagnostics.

### EXAMPLE 3123

[15493] A DNA sequence <SEQ ID 10443> was identified in GBS which encodes amino acid sequence <SEQ ID 10444>. This protein and its epitopes could be useful antigens for vaccines and/or diagnostics.

### EXAMPLE 3124

[15494] A DNA sequence <SEQ ID 10445> was identified in GBS which encodes amino acid sequence <SEQ ID 10446>. This protein and its epitopes could be useful antigens for vaccines and/or diagnostics.

### EXAMPLE 3125

[15495] A DNA sequence <SEQ ID 10447> was identified in GBS which encodes amino acid sequence <SEQ ID 10448>. This protein and its epitopes could be useful antigens for vaccines and/or diagnostics.

### EXAMPLE 3126

[15496] A DNA sequence <SEQ ID 10449> was identified in GBS which encodes amino acid sequence <SEQ ID 10450>. This protein and its epitopes could be useful antigens for vaccines and/or diagnostics.

### EXAMPLE 3127

[15497] A DNA sequence <SEQ ID 10451> was identified in GBS which encodes amino acid sequence <SEQ ID 10452>. This protein and its epitopes could be useful antigens for vaccines and/or diagnostics.

### EXAMPLE 3128

[15498] A DNA sequence <SEQ ID 10453> was identified in GBS which encodes amino acid sequence <SEQ ID 10454>. This protein and its epitopes could be useful antigens for vaccines and/or diagnostics.

### EXAMPLE 3129

[15499] A DNA sequence <SEQ ID 10455> was identified in GBS which encodes amino acid sequence <SEQ ID 10456>. This protein and its epitopes could be useful antigens for vaccines and/or diagnostics.

### EXAMPLE 3130

[15500] A DNA sequence <SEQ ID 10457> was identified in GBS which encodes amino acid sequence <SEQ ID 10458>. This protein and its epitopes could be useful antigens for vaccines and/or diagnostics. A related GBS nucleic acid sequence <SEQ ID 10907> which encodes amino acid sequence <SEQ ID 10908> was also identified.

### EXAMPLE 3131

[15501] A DNA sequence <SEQ ID 10459> was identified in GBS which encodes amino acid sequence <SEQ ID 10460>. This protein and its epitopes could be useful antigens for vaccines and/or diagnostics.

### EXAMPLE 3132

[15502] A DNA sequence <SEQ ID 10461> was identified in GBS which encodes amino acid sequence <SEQ ID 10462>. This protein and its epitopes could be useful antigens for vaccines and/or diagnostics.

### EXAMPLE 3133

[15503] A DNA sequence <SEQ ID 10463> was identified in GBS which encodes amino acid sequence <SEQ ID 10464>. This protein and its epitopes could be useful antigens for vaccines and/or diagnostics.

### EXAMPLE 3134

[15504] A DNA sequence <SEQ ID 10465> was identified in GBS which encodes amino acid sequence <SEQ ID 10466>. This protein and its epitopes could be useful antigens for vaccines and/or diagnostics.

### EXAMPLE 3135

[15505] A DNA sequence <SEQ ID 10467> was identified in GBS which encodes amino acid sequence <SEQ ID 10468>. This protein and its epitopes could be useful antigens for vaccines and/or diagnostics.

### EXAMPLE 3136

[15506] A DNA sequence <SEQ ID 10469> was identified in GBS which encodes amino acid sequence <SEQ ID 10470>. This protein and its epitopes could be useful antigens for vaccines and/or diagnostics.

### EXAMPLE 3137

[15507] A DNA sequence <SEQ ID 10471> was identified in GBS which encodes amino acid sequence <SEQ ID 10472>. This protein and its epitopes could be useful antigens for vaccines and/or diagnostics.

### EXAMPLE 3138

[15508] A DNA sequence <SEQ ID 10473> was identified in GBS which encodes amino acid sequence <SEQ ID 10474>. This protein and its epitopes could be useful antigens for vaccines and/or diagnostics.

### EXAMPLE 3139

[15509] A DNA sequence <SEQ ID 10475> was identified in GBS which encodes amino acid sequence <SEQ ID 10476>. This protein and its epitopes could be useful antigens for vaccines and/or diagnostics.

### EXAMPLE 3140

[15510] A DNA sequence <SEQ ID 10477> was identified in GBS which encodes amino acid sequence <SEQ ID 10478>. This protein and its epitopes could be useful antigens for vaccines and/or diagnostics.

### EXAMPLE 3141

[15511] A DNA sequence <SEQ ID 10479> was identified in GBS which encodes amino acid sequence <SEQ ID 10480>. This protein and its epitopes could be useful antigens for vaccines and/or diagnostics.

### EXAMPLE 3142

[15512] A DNA sequence <SEQ ID 10481> was identified in GBS which encodes amino acid sequence <SEQ ID 10482>. This protein and its epitopes could be useful antigens for vaccines and/or diagnostics.

### EXAMPLE 3143

[15513] A DNA sequence <SEQ ID 10483> was identified in GBS which encodes amino acid sequence <SEQ ID 10484>. This protein and its epitopes could be useful antigens for vaccines and/or diagnostics.

### EXAMPLE 3144

[15514] A DNA sequence <SEQ ID 10485> was identified in GBS which encodes amino acid sequence <SEQ ID 10486>. This protein and its epitopes could be useful antigens for vaccines and/or diagnostics.

### EXAMPLE 3145

[15515] A DNA sequence <SEQ ID 10487> was identified in GBS which encodes amino acid sequence <SEQ ID 10488>. This protein and its epitopes could be useful antigens for vaccines and/or diagnostics.

### EXAMPLE 3146

[15516] A DNA sequence <SEQ ID 10489> was identified in GBS which encodes amino acid sequence <SEQ ID 10490>. This protein and its epitopes could be useful antigens for vaccines and/or diagnostics.

### EXAMPLE 3147

[15517] A DNA sequence <SEQ ID 10491> was identified in GBS which encodes amino acid sequence <SEQ ID 10492>. This protein and its epitopes could be useful antigens for vaccines and/or diagnostics.

### EXAMPLE 3148

[15518] A DNA sequence <SEQ ID 10493> was identified in GBS which encodes amino acid sequence <SEQ ID 10494>. This protein and its epitopes could be useful antigens for vaccines and/or diagnostics.

### EXAMPLE 3149

[15519] A DNA sequence <SEQ ID 10495> was identified in GBS which encodes amino acid sequence <SEQ ID 10496>. This protein and its epitopes could be useful antigens for vaccines and/or diagnostics.

### EXAMPLE 3150

[15520] A DNA sequence <SEQ ID 10497> was identified in GBS which encodes amino acid sequence <SEQ ID 10498>. This protein and its epitopes could be useful antigens for vaccines and/or diagnostics.

### EXAMPLE 3151

[15521] A DNA sequence <SEQ ID 10499> was identified in GBS which encodes amino acid sequence <SEQ ID 10500>. This protein and its epitopes could be useful antigens for vaccines and/or diagnostics.

### EXAMPLE 3152

[15522] A DNA sequence <SEQ ID 10501> was identified in GBS which encodes amino acid sequence <SEQ ID 10502>. This protein and its epitopes could be useful antigens for vaccines and/or diagnostics.

### EXAMPLE 3153

[15523] A DNA sequence <SEQ ID 10503> was identified in GBS which encodes amino acid sequence <SEQ ID 10504>. This protein and its epitopes could be useful antigens for vaccines and/or diagnostics.

### EXAMPLE 3154

[15524] A DNA sequence <SEQ ID 10505> was identified in GBS which encodes amino acid sequence <SEQ ID 10506>. This protein and its epitopes could be useful antigens for vaccines and/or diagnostics.

### EXAMPLE 3155

[15525] A DNA sequence <SEQ ID 10509> was identified in GBS which encodes amino acid sequence <SEQ ID 10510>. This protein and its epitopes could be useful antigens for vaccines and/or diagnostics.

### EXAMPLE 3156

[15526] A DNA sequence <SEQ ID 10511> was identified in GBS which encodes amino acid sequence <SEQ ID 10512>. This protein and its epitopes could be useful antigens for vaccines and/or diagnostics.

### EXAMPLE 3157

[15527] A DNA sequence <SEQ ID 10513> was identified in GBS which encodes amino acid sequence <SEQ ID 10514>. This protein and its epitopes could be useful antigens for vaccines and/or diagnostics.

### EXAMPLE 3158

[15528] A DNA sequence <SEQ ID 10515> was identified in GBS which encodes amino acid sequence <SEQ ID 10516>. This protein and its epitopes could be useful antigens for vaccines and/or diagnostics.

### EXAMPLE 3159

[15529] A DNA sequence <SEQ ID 10517> was identified in GBS which encodes amino acid sequence <SEQ ID 10518>. This protein and its epitopes could be useful antigens for vaccines and/or diagnostics.

### EXAMPLE 3160

[15530] A DNA sequence <SEQ ID 10519> was identified in GBS which encodes amino acid sequence <SEQ ID 10520>. This protein and its epitopes could be useful antigens for vaccines and/or diagnostics.

### EXAMPLE 3161

[15531] A DNA sequence <SEQ ID 10521> was identified in GBS which encodes amino acid sequence <SEQ ID 10522>. This protein and its epitopes could be useful antigens for vaccines and/or diagnostics.

### EXAMPLE 3162

[15532] A DNA sequence <SEQ ID 10523> was identified in GBS which encodes amino acid sequence <SEQ ID 10524>. This protein and its epitopes could be useful antigens for vaccines and/or diagnostics.

### EXAMPLE 3163

[15533] A DNA sequence <SEQ ID 10525> was identified in GBS which encodes amino acid sequence <SEQ ID 10526>. This protein and its epitopes could be useful antigens for vaccines and/or diagnostics.

### EXAMPLE 3164

[15534] A DNA sequence <SEQ ID 10527> was identified in GBS which encodes amino acid sequence <SEQ ID 10528>. This protein and its epitopes could be useful antigens for vaccines and/or diagnostics.

### EXAMPLE 3165

[15535] A DNA sequence <SEQ ID 10529> was identified in GBS which encodes amino acid sequence <SEQ ID 10530>. This protein and its epitopes could be useful antigens for vaccines and/or diagnostics.

### EXAMPLE 3166

[15536] A DNA sequence <SEQ ID 10531> was identified in GBS which encodes amino acid sequence <SEQ ID 10532>. This protein and its epitopes could be useful antigens for vaccines and/or diagnostics.

### EXAMPLE 3167

[15537] A DNA sequence <SEQ ID 10533> was identified in GBS which encodes amino acid sequence <SEQ ID 10534>. This protein and its epitopes could be useful antigens for vaccines and/or diagnostics.

### EXAMPLE 3168

[15538] A DNA sequence <SEQ ID 10535> was identified in GBS which encodes amino acid sequence <SEQ ID 10536>. This protein and its epitopes could be useful antigens for vaccines and/or diagnostics.

### EXAMPLE 3169

[15539] A DNA sequence <SEQ ID 10537> was identified in GBS which encodes amino acid sequence <SEQ ID 10538>. This protein and its epitopes could be useful antigens for vaccines and/or diagnostics.

### EXAMPLE 3170

[15540] A DNA sequence <SEQ ID 10539> was identified in GBS which encodes amino acid sequence <SEQ ID 10540>. This protein and its epitopes could be useful antigens for vaccines and/or diagnostics.

### EXAMPLE 3171

[15541] A DNA sequence <SEQ ID 10541> was identified in GBS which encodes amino acid sequence <SEQ ID 10542>. This protein and its epitopes could be useful antigens for vaccines and/or diagnostics.

### EXAMPLE 3172

[15542] A DNA sequence <SEQ ID 10543> was identified in GBS which encodes amino acid sequence <SEQ ID 10544>. This protein and its epitopes could be useful antigens for vaccines and/or diagnostics.

### EXAMPLE 3173

[15543] A DNA sequence <SEQ ID 10545> was identified in GBS which encodes amino acid sequence <SEQ ID 10546>. This protein and its epitopes could be useful antigens for vaccines and/or diagnostics.

[15544] SEQ ID 10546 (GBS665) was expressed in E. coli as a GST-fusion product. SDS-PAGE analysis of total cell extract is shown in FIG. 137 (lane 8-10; MW 41 kDa) and in FIG. 187 (lane 5; MW 41 kDa). It was also was expressed in E. coli as a His-fusion product. SDS-PAGE analysis of total cell extract is shown in FIG. 137 (lane 11 & 12; MW 16.1 kDa), in FIG. 141 (lane 4; MW 16 kDa) and in FIG. 179 (lane 6; MW 16 kDa). Purified GBS665-GST is shown in FIG. 243, lane 4.

[15545] GBS665-His was purified as shown in FIG. 230, lane 7-8.

### EXAMPLE 3174

[15546] A DNA sequence <SEQ ID 10547> was identified in GBS which encodes amino acid sequence <SEQ ID 10548>. This protein and its epitopes could be useful antigens for vaccines and/or diagnostics. A related GBS nucleic acid sequence <SEQ ID 10909> which encodes amino acid sequence <SEQ ID 10910> was also identified.

### EXAMPLE 3175

[15547] A DNA sequence <SEQ ID 10549> was identified in GBS which encodes amino acid sequence <SEQ ID 10550>. This protein and its epitopes could be useful antigens for vaccines and/or diagnostics.

### EXAMPLE 3176

[15548] A DNA sequence <SEQ ID 10551> was identified in GBS which encodes amino acid sequence <SEQ ID 10552>. This protein and its epitopes could be useful antigens for vaccines and/or diagnostics.

### EXAMPLE 3177

[15549] A DNA sequence <SEQ ID 10553> was identified in GBS which encodes amino acid sequence <SEQ ID 10554>. This protein and its epitopes could be useful antigens for vaccines and/or diagnostics.

### EXAMPLE 3178

[15550] A DNA sequence <SEQ ID 10555> was identified in GBS which encodes amino acid sequence <SEQ ID 10556>. This protein and its epitopes could be useful antigens for vaccines and/or diagnostics.

### EXAMPLE 3179

[15551] A DNA sequence <SEQ ID 10557> was identified in GBS which encodes amino acid sequence <SEQ ID 10558>. This protein and its epitopes could be useful antigens for vaccines and/or diagnostics.

### EXAMPLE 3180

[15552] A DNA sequence <SEQ ID 10559> was identified in GBS which encodes amino acid sequence <SEQ ID 10560>. This protein and its epitopes could be useful antigens for vaccines and/or diagnostics.

### EXAMPLE 3181

[15553] A DNA sequence <SEQ ID 10561> was identified in GBS which encodes amino acid sequence <SEQ ID 10562>. This protein and its epitopes could be useful antigens for vaccines and/or diagnostics.

### EXAMPLE 3182

[15554] A DNA sequence <SEQ ID 10563> was identified in GBS which encodes amino acid sequence <SEQ ID 10564>. This protein and its epitopes could be useful antigens for vaccines and/or diagnostics.

### EXAMPLE 3183

[15555] A DNA sequence <SEQ ID 10565> was identified in GBS which encodes amino acid sequence <SEQ ID 10566>. This protein and its epitopes could be useful antigens for vaccines and/or diagnostics.

### EXAMPLE 3184

[15556] A DNA sequence <SEQ ID 10567> was identified in GBS which encodes amino acid sequence <SEQ ID 10568>. This protein and its epitopes could be useful antigens for vaccines and/or diagnostics.

### EXAMPLE 3185

[15557] A DNA sequence <SEQ ID 10569> was identified in GBS which encodes amino acid sequence <SEQ ID 10570>. This protein and its epitopes could be useful antigens for vaccines and/or diagnostics.

### EXAMPLE 3186

[15558] A DNA sequence <SEQ ID 10571> was identified in GBS which encodes amino acid sequence <SEQ ID 10572>. This protein and its epitopes could be useful antigens for vaccines and/or diagnostics.

### EXAMPLE 3187

[15559] A DNA sequence <SEQ ID 10573> was identified in GBS which encodes amino acid sequence <SEQ ID 10574>. This protein and its epitopes could be useful antigens for vaccines and/or diagnostics.

### EXAMPLE 3188

[15560] A DNA sequence <SEQ ID 10575> was identified in GBS which encodes amino acid sequence <SEQ ID 10576>. This protein and its epitopes could be useful antigens for vaccines and/or diagnostics.

### EXAMPLE 3189

[15561] A DNA sequence <SEQ ID 10577> was identified in GBS which encodes amino acid sequence <SEQ ID 10578>. This protein and its epitopes could be useful antigens for vaccines and/or diagnostics.

### EXAMPLE 3190

[15562] A DNA sequence <SEQ ID 10579> was identified in GBS which encodes amino acid sequence <SEQ ID 10580>. This protein and its epitopes could be useful antigens for vaccines and/or diagnostics.

### EXAMPLE 3191

[15563] A DNA sequence <SEQ ID 10581> was identified in GBS which encodes amino acid sequence <SEQ ID 10582>. This protein and its epitopes could be useful antigens for vaccines and/or diagnostics.

### EXAMPLE 3192

[15564] A DNA sequence <SEQ ID 10583> was identified in GBS which encodes amino acid sequence <SEQ ID 10584>. This protein and its epitopes could be useful antigens for vaccines and/or diagnostics.

### EXAMPLE 3193

[15565] A DNA sequence <SEQ ID 10585> was identified in GBS which encodes amino acid sequence <SEQ ID 10586>. This protein and its epitopes could be useful antigens for vaccines and/or diagnostics.

### EXAMPLE 3194

[15566] A DNA sequence <SEQ ID 10587> was identified in GBS which encodes amino acid sequence <SEQ ID 10588>. This protein and its epitopes could be useful antigens for vaccines and/or diagnostics.

### EXAMPLE 3195

[15567] A DNA sequence <SEQ ID 10591> was identified in GBS which encodes amino acid sequence <SEQ ID 10592>. This protein and its epitopes could be useful antigens for vaccines and/or diagnostics.

### EXAMPLE 3196

[15568] A DNA sequence <SEQ ID 10593> was identified in GBS which encodes amino acid sequence <SEQ ID 10594>. This protein and its epitopes could be useful antigens for vaccines and/or diagnostics.

### EXAMPLE 3197

[15569] A DNA sequence <SEQ ID 10595> was identified in GBS which encodes amino acid sequence <SEQ ID 10596>. This protein and its epitopes could be useful antigens for vaccines and/or diagnostics.

### EXAMPLE 3198

[15570] A DNA sequence <SEQ ID 10597> was identified in GBS which encodes amino acid sequence <SEQ ID 10598>. This protein and its epitopes could be useful antigens for vaccines and/or diagnostics. A related GBS nucleic acid sequence <SEQ ID 10797> which encodes amino acid sequence <SEQ ID 10798> was also identified.

### EXAMPLE 3199

[15571] A DNA sequence <SEQ ID 10599> was identified in GBS which encodes amino acid sequence <SEQ ID 10600>. This protein and its epitopes could be useful antigens for vaccines and/or diagnostics.

### EXAMPLE 3200

[15572] A DNA sequence <SEQ ID 10601> was identified in GBS which encodes amino acid sequence <SEQ ID 10602>. This protein and its epitopes could be useful antigens for vaccines and/or diagnostics.

### EXAMPLE 3201

[15573] A DNA sequence <SEQ ID 10603> was identified in GBS which encodes amino acid sequence <SEQ ID 10604>. This protein and its epitopes could be useful antigens for vaccines and/or diagnostics.

### EXAMPLE 3202

[15574] A DNA sequence <SEQ ID 10605> was identified in GBS which encodes amino acid sequence <SEQ ID 10606>. This protein and its epitopes could be useful antigens for vaccines and/or diagnostics.

### EXAMPLE 3203

[15575] A DNA sequence <SEQ ID 10607> was identified in GBS which encodes amino acid sequence <SEQ ID 10608>. This protein and its epitopes could be useful antigens for vaccines and/or diagnostics.

### EXAMPLE 3204

[15576] A DNA sequence <SEQ ID 10609> was identified in GBS which encodes amino acid sequence <SEQ ID 10610>. This protein and its epitopes could be useful antigens for vaccines and/or diagnostics.

### EXAMPLE 3205

[15577] A DNA sequence <SEQ ID 10611> was identified in GBS which encodes amino acid sequence <SEQ ID 10612>. This protein and its epitopes could be useful antigens for vaccines and/or diagnostics.

### EXAMPLE 3206

[15578] A DNA sequence <SEQ ID 10613> was identified in GBS which encodes amino acid sequence <SEQ ID 10614>. This protein and its epitopes could be useful antigens for vaccines and/or diagnostics.

### EXAMPLE 3207

[15579] A DNA sequence <SEQ ID 10615> was identified in GBS which encodes amino acid sequence <SEQ ID 10616>. This protein and its epitopes could be useful antigens for vaccines and/or diagnostics.

### EXAMPLE 3208

[15580] A DNA sequence <SEQ ID 10617> was identified in GBS which encodes amino acid sequence <SEQ ID 10618>. This protein and its epitopes could be useful antigens for vaccines and/or diagnostics.

### EXAMPLE 3209

[15581] A DNA sequence <SEQ ID 10619> was identified in GBS which encodes amino acid sequence <SEQ ID 10620>. This protein and its epitopes could be useful antigens for vaccines and/or diagnostics.

### EXAMPLE 3210

[15582] A DNA sequence <SEQ ID 10621> was identified in GBS which encodes amino acid sequence <SEQ ID 10622>. This protein and its epitopes could be useful antigens for vaccines and/or diagnostics.

### EXAMPLE 3211

[15583] A DNA sequence <SEQ ID 10623> was identified in GBS which encodes amino acid sequence <SEQ ID 10624>. This protein and its epitopes could be useful antigens for vaccines and/or diagnostics.

### EXAMPLE 3212

[15584] A DNA sequence <SEQ ID 10625> was identified in GBS which encodes amino acid sequence <SEQ ID 10626>. This protein and its epitopes could be useful antigens for vaccines and/or diagnostics.

### EXAMPLE 3213

[15585] A DNA sequence <SEQ ID 10627> was identified in GBS which encodes amino acid sequence <SEQ ID 10628>. This protein and its epitopes could be useful antigens for vaccines and/or diagnostics.

### EXAMPLE 3214

[15586] A DNA sequence <SEQ ID 10629> was identified in GBS which encodes amino acid sequence <SEQ ID 10630>. This protein and its epitopes could be useful antigens for vaccines and/or diagnostics.

### EXAMPLE 3215

[15587] A DNA sequence <SEQ ID 10631> was identified in GBS which encodes amino acid sequence <SEQ ID 10632>. This protein and its epitopes could be useful antigens for vaccines and/or diagnostics.

### EXAMPLE 3216

[15588] A DNA sequence <SEQ ID 10633> was identified in GBS which encodes amino acid sequence <SEQ ID 10634>. This protein and its epitopes could be useful antigens for vaccines and/or diagnostics. A related GBS nucleic acid sequence <SEQ ID 10939> which encodes amino acid sequence <SEQ ID 10940> was also identified.

[15589] SEQ ID 10634 (GBS675) was expressed in E. coli as a GST-fusion product. SDS-PAGE analysis of total cell extract is shown in FIG. 162 (lane 14 & 15; MW 56 kDa). It was also expressed in E. coli as a His-fusion product. SDS-PAGE analysis of total cell extract is shown in FIG. 163 (lane 2; MW 31 kDa) and in FIG. 188 (lane 5; MW 31 kDa).

[15590] Purified GBS675-His is shown in FIG. 240, lane 7-8.

### EXAMPLE 3217

[15591] A DNA sequence <SEQ ID 10635> was identified in GBS which encodes amino acid sequence <SEQ ID 10636>. This protein and its epitopes could be useful antigens for vaccines and/or diagnostics.

### EXAMPLE 3218

[15592] A DNA sequence <SEQ ID 10637> was identified in GBS which encodes amino acid sequence <SEQ ID 10638>. This protein and its epitopes could be useful antigens for vaccines and/or diagnostics.

### EXAMPLE 3219

[15593] A DNA sequence <SEQ ID 10639> was identified in GBS which encodes amino acid sequence <SEQ ID 10640>. This protein and its epitopes could be useful antigens for vaccines and/or diagnostics.

### EXAMPLE 3220

[15594] A DNA sequence <SEQ ID 10641> was identified in GBS which encodes amino acid sequence <SEQ ID 10642>. This protein and its epitopes could be useful antigens for vaccines and/or diagnostics.

### EXAMPLE 3221

[15595] A DNA sequence <SEQ ID 10643> was identified in GBS which encodes amino acid sequence <SEQ ID 10644>. This protein and its epitopes could be useful antigens for vaccines and/or diagnostics.

### EXAMPLE 3222

[15596] A DNA sequence <SEQ ID 10645> was identified in GBS which encodes amino acid sequence <SEQ ID 10646>. This protein and its epitopes could be useful antigens for vaccines and/or diagnostics.

### EXAMPLE 3223

[15597] A DNA sequence <SEQ ID 10647> was identified in GBS which encodes amino acid sequence <SEQ ID 10648>. This protein and its epitopes could be useful antigens for vaccines and/or diagnostics.

### EXAMPLE 3224

[15598] A DNA sequence <SEQ ID 10649> was identified in GBS which encodes amino acid sequence <SEQ ID 10650>. This protein and its epitopes could be useful antigens for vaccines and/or diagnostics.

### EXAMPLE 3225

[15599] A DNA sequence <SEQ ID 10651> was identified in GBS which encodes amino acid sequence <SEQ ID 10652>. This protein and its epitopes could be useful antigens for vaccines and/or diagnostics.

### EXAMPLE 3226

[15600] A DNA sequence <SEQ ID 10653> was identified in GBS which encodes amino acid sequence <SEQ ID 10654>. This protein and its epitopes could be useful antigens for vaccines and/or diagnostics.

### EXAMPLE 3227

[15601] A DNA sequence <SEQ ID 10655> was identified in GBS which encodes amino acid sequence <SEQ ID 10656>. This protein and its epitopes could be useful antigens for vaccines and/or diagnostics.

### EXAMPLE 3228

[15602] A DNA sequence <SEQ ID 10657> was identified in GBS which encodes amino acid sequence <SEQ ID 10658>. This protein and its epitopes could be useful antigens for vaccines and/or diagnostics.

### EXAMPLE 3229

[15603] A DNA sequence <SEQ ID 10659> was identified in GBS which encodes amino acid sequence <SEQ ID 10660>. This protein and its epitopes could be useful antigens for vaccines and/or diagnostics.

### EXAMPLE 3230

[15604] A DNA sequence <SEQ ID 10661> was identified in GBS which encodes amino acid sequence <SEQ ID 10662>. This protein and its epitopes could be useful antigens for vaccines and/or diagnostics.

### EXAMPLE 3231

[15605] A DNA sequence <SEQ ID 10663> was identified in GBS which encodes amino acid sequence <SEQ ID 10664>. This protein and its epitopes could be useful antigens for vaccines and/or diagnostics.

### EXAMPLE 3232

[15606] A DNA sequence <SEQ ID 10665> was identified in GBS which encodes amino acid sequence <SEQ ID 10666>. This protein and its epitopes could be useful antigens for vaccines and/or diagnostics. A related GBS nucleic acid sequence <SEQ ID 10917> which encodes amino acid sequence <SEQ ID 10918> was also identified.

[15607] A DNA sequence <SEQ ID 10667> was identified in GBS which encodes amino acid sequence <SEQ ID 10668>. This protein and its epitopes could be useful antigens for vaccines and/or diagnostics.

### EXAMPLE 3233

[15608] A DNA sequence <SEQ ID 10669> was identified in GBS which encodes amino acid sequence <SEQ ID 10670>. This protein and its epitopes could be useful antigens for vaccines and/or diagnostics.

### EXAMPLE 3234

[15609] A DNA sequence <SEQ ID 10671> was identified in GBS which encodes amino acid sequence <SEQ ID 10672>. This protein and its epitopes could be useful antigens for vaccines and/or diagnostics.

### EXAMPLE 3235

[15610] A DNA sequence <SEQ ID 10673> was identified in GBS which encodes amino acid sequence <SEQ ID 10674>. This protein and its epitopes could be useful antigens for vaccines and/or diagnostics.

### EXAMPLE 3236

[15611] A DNA sequence <SEQ ID 10675> was identified in GBS which encodes amino acid sequence <SEQ ID 10676>. This protein and its epitopes could be useful antigens for vaccines and/or diagnostics.

### EXAMPLE 3237

[15612] A DNA sequence <SEQ ID 10677> was identified in GBS which encodes amino acid sequence <SEQ ID 10678>. This protein and its epitopes could be useful antigens for vaccines and/or diagnostics.

### EXAMPLE 3238

[15613] A DNA sequence <SEQ ID 10679> was identified in GBS which encodes amino acid sequence <SEQ ID 10680>. This protein and its epitopes could be useful antigens for vaccines and/or diagnostics.

### EXAMPLE 3239

[15614] A DNA sequence <SEQ ID 10681> was identified in GBS which encodes amino acid sequence <SEQ ID 10682>. This protein and its epitopes could be useful antigens for vaccines and/or diagnostics.

### EXAMPLE 3240

[15615] A DNA sequence <SEQ ID 10683> was identified in GBS which encodes amino acid sequence <SEQ ID 10684>. This protein and its epitopes could be useful antigens for vaccines and/or diagnostics.

### EXAMPLE 3241

[15616] A DNA sequence <SEQ ID 10685> was identified in GBS which encodes amino acid sequence <SEQ ID 10686>. This protein and its epitopes could be useful antigens for vaccines and/or diagnostics.

### EXAMPLE 3242

[15617] A DNA sequence <SEQ ID 10687> was identified in GBS which encodes amino acid sequence <SEQ ID 10688>. This protein and its epitopes could be useful antigens for vaccines and/or diagnostics.

### EXAMPLE 3243

[15618] A DNA sequence <SEQ ID 10689> was identified in GBS which encodes amino acid sequence <SEQ ID 10690>. This protein and its epitopes could be useful antigens for vaccines and/or diagnostics.

### EXAMPLE 3244

[15619] A DNA sequence <SEQ ID 10691> was identified in GBS which encodes amino acid sequence <SEQ ID 10692>. This protein and its epitopes could be useful antigens for vaccines and/or diagnostics.

[15620] SEQ ID 10692 (GBS676) was expressed in E. coli as a GST-fusion product. SDS-PAGE analysis of total cell extract is shown in FIG. 163 (lane 3-5; MW 66 kDa) and in FIG. 239 (lane 8; MW 66 kDa). It was also expressed in E. coli as a His-fusion product. SDS-PAGE analysis of total cell extract is shown in FIG. 163 (lane 7 & 8; MW 41 kDa) and in FIG. 188 (lane 6; MW 41 kDa). Purified GBS676-His is shown in FIG. 240, lane 4-5. Purified GBS676-GST is shown in FIG. 246, lanes 10 & 11.

### EXAMPLE 3245

[15621] A DNA sequence <SEQ ID 10693> was identified in GBS which encodes amino acid sequence <SEQ ID 10694>. This protein and its epitopes could be useful antigens for vaccines and/or diagnostics.

### EXAMPLE 3246

[15622] A DNA sequence <SEQ ID 10695> was identified in GBS which encodes amino acid sequence <SEQ ID 10696>. This protein and its epitopes could be useful antigens for vaccines and/or diagnostics.

### EXAMPLE 3247

[15623] A DNA sequence <SEQ ID 10697> was identified in GBS which encodes amino acid sequence <SEQ ID 10698>. This protein and its epitopes could be useful antigens for vaccines and/or diagnostics.

### EXAMPLE 3248

[15624] A DNA sequence <SEQ ID 10699> was identified in GBS which encodes amino acid sequence <SEQ ID 10700>. This protein and its epitopes could be useful antigens for vaccines and/or diagnostics.

### EXAMPLE 3249

[15625] A DNA sequence <SEQ ID 10703> was identified in GBS which encodes amino acid sequence <SEQ ID 10704>. This protein and its epitopes could be useful antigens for vaccines and/or diagnostics.

### EXAMPLE 3250

[15626] A DNA sequence <SEQ ID 10705> was identified in GBS which encodes amino acid sequence <SEQ ID 10706>. This protein and its epitopes could be useful antigens for vaccines and/or diagnostics.

### EXAMPLE 3251

[15627] A DNA sequence <SEQ ID 10707> was identified in GBS which encodes amino acid sequence <SEQ ID 10708>. This protein and its epitopes could be useful antigens for vaccines and/or diagnostics.

### EXAMPLE 3252

[15628] A DNA sequence <SEQ ID 10709> was identified in GBS which encodes amino acid sequence <SEQ ID 10710>. This protein and its epitopes could be useful antigens for vaccines and/or diagnostics. A related GBS nucleic acid sequence <SEQ ID 10803> which encodes amino acid sequence <SEQ ID 10804> was also identified.

### EXAMPLE 3253

[15629] A DNA sequence <SEQ ID 10711> was identified in GBS which encodes amino acid sequence <SEQ ID 10712>. This protein and its epitopes could be useful antigens for vaccines and/or diagnostics. A related GBS nucleic acid sequence <SEQ ID 10913> which encodes amino acid sequence <SEQ ID 10914> was also identified.

### EXAMPLE 3254

[15630] A DNA sequence <SEQ ID 10713> was identified in GBS which encodes amino acid sequence <SEQ ID 10714>. This protein and its epitopes could be useful antigens for vaccines and/or diagnostics.

### EXAMPLE 3255

[15631] A DNA sequence <SEQ ID 10715> was identified in GBS which encodes amino acid sequence <SEQ ID 10716>. This protein and its epitopes could be useful antigens for vaccines and/or diagnostics.

### EXAMPLE 3256

[15632] A DNA sequence <SEQ ID 10717> was identified in GBS which encodes amino acid sequence <SEQ ID 10718>. This protein and its epitopes could be useful antigens for vaccines and/or diagnostics.

### EXAMPLE 3257

[15633] A DNA sequence <SEQ ID 10719> was identified in GBS which encodes amino acid sequence <SEQ ID 10720>. This protein and its epitopes could be useful antigens for vaccines and/or diagnostics.

### EXAMPLE 3258

[15634] A DNA sequence <SEQ ID 10721> was identified in GBS which encodes amino acid sequence <SEQ ID 10722>. This protein and its epitopes could be useful antigens for vaccines and/or diagnostics.

### EXAMPLE 3259

[15635] A DNA sequence <SEQ ID 10723> was identified in GBS which encodes amino acid sequence <SEQ ID 10724>. This protein and its epitopes could be useful antigens for vaccines and/or diagnostics.

### EXAMPLE 3260

[15636] A DNA sequence <SEQ ID 10725> was identified in GBS which encodes amino acid sequence <SEQ ID 10726>. This protein and its epitopes could be useful antigens for vaccines and/or diagnostics.

### EXAMPLE 3261

[15637] A DNA sequence <SEQ ID 10727> was identified in GBS which encodes amino acid sequence <SEQ ID 10728>. This protein and its epitopes could be useful antigens for vaccines and/or diagnostics.

### EXAMPLE 3262

[15638] A DNA sequence <SEQ ID 10729> was identified in GBS which encodes amino acid sequence <SEQ ID 10730>. This protein and its epitopes could be useful antigens for vaccines and/or diagnostics.

[15639] SEQ ID 10730 (GBS670) was expressed in E. coli as a GST-fusion product. SDS-PAGE analysis of total cell extract is shown in FIG. 140 (lane 24; MW 45.3 kDa). It was also expressed in E. coli as a His-fusion product. SDS-PAGE analysis of total cell extract is shown in FIG. 140 (lane 5-7; MW 20.4 kDa) and in FIG. 179 (lane 10; MW 20 kDa).

[15640] GBS670-His was purified as shown in FIG. 230, lane 9-10.

### EXAMPLE 3263

[15641] A DNA sequence <SEQ ID 10731> was identified in GBS which encodes amino acid sequence <SEQ ID 10732>. This protein and its epitopes could be useful antigens for vaccines and/or diagnostics.

### EXAMPLE 3264

[15642] A DNA sequence <SEQ ID 10733> was identified in GBS which encodes amino acid sequence <SEQ ID 10734>. This protein and its epitopes could be useful antigens for vaccines and/or diagnostics.

### EXAMPLE 3265

[15643] A DNA sequence <SEQ ID 10735> was identified in GBS which encodes amino acid sequence <SEQ ID 10736>. This protein and its epitopes could be useful antigens for vaccines and/or diagnostics.

### EXAMPLE 3266

[15644] A DNA sequence <SEQ ID 10737> was identified in GBS which encodes amino acid sequence <SEQ ID 10738>. This protein and its epitopes could be useful antigens for vaccines and/or diagnostics.

### EXAMPLE 3267

[15645] A DNA sequence <SEQ ID 10739> was identified in GBS which encodes amino acid sequence <SEQ ID 10740>. This protein and its epitopes could be useful antigens for vaccines and/or diagnostics.

### EXAMPLE 3268

[15646] A DNA sequence <SEQ ID 10741> was identified in GBS which encodes amino acid sequence <SEQ ID 10742>. This protein and its epitopes could be useful antigens for vaccines and/or diagnostics.

### EXAMPLE 3269

[15647] A DNA sequence <SEQ ID 10743> was identified in GBS which encodes amino acid sequence <SEQ ID 10744>. This protein and its epitopes could be useful antigens for vaccines and/or diagnostics.

### EXAMPLE 3270

[15648] A DNA sequence <SEQ ID 10745> was identified in GBS which encodes amino acid sequence <SEQ ID 10746>. This protein and its epitopes could be useful antigens for vaccines and/or diagnostics.

### EXAMPLE 3271

[15649] A DNA sequence <SEQ ID 10747> was identified in GBS which encodes amino acid sequence <SEQ ID 10748>. This protein and its epitopes could be useful antigens for vaccines and/or diagnostics.

### EXAMPLE 3272

[15650] A DNA sequence <SEQ ID 10749> was identified in GBS which encodes amino acid sequence <SEQ ID 10750>. This protein and its epitopes could be useful antigens for vaccines and/or diagnostics.

### EXAMPLE 3273

[15651] A DNA sequence <SEQ ID 10751> was identified in GBS which encodes amino acid sequence <SEQ ID 10752>. This protein and its epitopes could be useful antigens for vaccines and/or diagnostics.

### EXAMPLE 3274

[15652] A DNA sequence <SEQ ID 10753> was identified in GBS which encodes amino acid sequence <SEQ ID 10754>. This protein and its epitopes could be useful antigens for vaccines and/or diagnostics.

### EXAMPLE 3275

[15653] A DNA sequence <SEQ ID 10755> was identified in GBS which encodes amino acid sequence <SEQ ID 10756>. This protein and its epitopes could be useful antigens for vaccines and/or diagnostics.

### EXAMPLE 3276

[15654] A DNA sequence <SEQ ID 10757> was identified in GBS which encodes amino acid sequence <SEQ ID 10758>. This protein and its epitopes could be useful antigens for vaccines and/or diagnostics.

### EXAMPLE 3277

[15655] A DNA sequence <SEQ ID 10759> was identified in GBS which encodes amino acid sequence <SEQ ID 10760>. This protein and its epitopes could be useful antigens for vaccines and/or diagnostics.

### EXAMPLE 3278

[15656] A DNA sequence <SEQ ID 10761> was identified in GBS which encodes amino acid sequence <SEQ ID 10762>. This protein and its epitopes could be useful antigens for vaccines and/or diagnostics.

### EXAMPLE 3279

[15657] A DNA sequence <SEQ ID 10763> was identified in GBS which encodes amino acid sequence <SEQ ID 10764>. This protein and its epitopes could be useful antigens for vaccines and/or diagnostics.

### EXAMPLE 3280

[15658] A DNA sequence <SEQ ID 10765> was identified in GBS which encodes amino acid sequence <SEQ ID 10766>. This protein and its epitopes could be useful antigens for vaccines and/or diagnostics.

### EXAMPLE 3281

[15659] A DNA sequence <SEQ ID 10767> was identified in GBS which encodes amino acid sequence <SEQ ID 10768>. This protein and its epitopes could be useful antigens for vaccines and/or diagnostics.

### EXAMPLE 3282

[15660] A DNA sequence <SEQ ID 10769> was identified in GBS which encodes amino acid sequence <SEQ ID 10770>. This protein and its epitopes could be useful antigens for vaccines and/or diagnostics.

### EXAMPLE 3283

[15661] A DNA sequence <SEQ ID 10771> was identified in GBS which encodes amino acid sequence <SEQ ID 10772>. This protein and its epitopes could be useful antigens for vaccines and/or diagnostics.

### EXAMPLE 3284

[15662] A repeated DNA sequence <SEQ ID 10791> was identified in GBS which encodes amino acid sequence <SEQ ID 10792>. This protein and its epitopes could be useful antigens for vaccines and/or diagnostics.

### EXAMPLE 3285

[15663] A DNA sequence <SEQ ID 10805> was identified in GBS which encodes amino acid sequence <SEQ ID 10806>. This protein and its epitopes could be useful antigens for vaccines and/or diagnostics.

### EXAMPLE 3286

[15664] A DNA sequence <SEQ ID 10807> was identified in GBS which encodes amino acid sequence <SEQ ID 10808>. This protein and its epitopes could be useful antigens for vaccines and/or diagnostics.

### EXAMPLE 3287

[15665] A DNA sequence <SEQ ID 10809> was identified in GBS which encodes amino acid sequence <SEQ ID 10810>. This protein and its epitopes could be useful antigens for vaccines and/or diagnostics.

### EXAMPLE 3288

[15666] A DNA sequence <SEQ ID 10811> was identified in GBS which encodes amino acid sequence <SEQ ID 10812>. This protein and its epitopes could be useful antigens for vaccines and/or diagnostics.

### EXAMPLE 3289

[15667] A DNA sequence <SEQ ID 10813> was identified in GBS which encodes amino acid sequence <SEQ ID 10814>. This protein and its epitopes could be useful antigens for vaccines and/or diagnostics.

### EXAMPLE 3290

[15668] A DNA sequence <SEQ ID 10815> was identified in GBS which encodes amino acid sequence <SEQ ID 10816>. This protein and its epitopes could be useful antigens for vaccines and/or diagnostics.

### EXAMPLE 3291

[15669] A DNA sequence <SEQ ID 10817> was identified in GBS which encodes amino acid sequence <SEQ ID 10818>. This protein and its epitopes could be useful antigens for vaccines and/or diagnostics.

### EXAMPLE 3292

[15670] A DNA sequence <SEQ ID 10819> was identified in GBS which encodes amino acid sequence <SEQ ID 10820>. This protein and its epitopes could be useful antigens for vaccines and/or diagnostics.

### EXAMPLE 3293

[15671] A DNA sequence <SEQ ID 10821> was identified in GBS which encodes amino acid sequence <SEQ ID 10822>. This protein and its epitopes could be useful antigens for vaccines and/or diagnostics.

### EXAMPLE 3294

[15672] A DNA sequence <SEQ ID 10823> was identified in GBS which encodes amino acid sequence <SEQ ID 10824>. This protein and its epitopes could be useful antigens for vaccines and/or diagnostics.

### EXAMPLE 3295

[15673] A DNA sequence <SEQ ID 10825> was identified in GBS which encodes amino acid sequence <SEQ ID 10826>. This protein and its epitopes could be useful antigens for vaccines and/or diagnostics.

### EXAMPLE 3296

[15674] A DNA sequence <SEQ ID 10827> was identified in GBS which encodes amino acid sequence <SEQ ID 10828>. This protein and its epitopes could be useful antigens for vaccines and/or diagnostics.

### EXAMPLE 3297

[15675] A DNA sequence <SEQ ID 10829> was identified in GBS which encodes amino acid sequence <SEQ ID 10830>. This protein and its epitopes could be useful antigens for vaccines and/or diagnostics.

### EXAMPLE 3298

[15676] A DNA sequence <SEQ ID 10831> was identified in GBS which encodes amino acid sequence <SEQ ID 10832>. This protein and its epitopes could be useful antigens for vaccines and/or diagnostics.

### EXAMPLE 3299

[15677] A DNA sequence <SEQ ID 10833> was identified in GBS which encodes amino acid sequence <SEQ ID 10834>. This protein and its epitopes could be useful antigens for vaccines and/or diagnostics.

### EXAMPLE 3300

[15678] A DNA sequence <SEQ ID 10835> was identified in GBS which encodes amino acid sequence <SEQ ID 10836>. This protein and its epitopes could be useful antigens for vaccines and/or diagnostics.

### EXAMPLE 3301

[15679] A DNA sequence <SEQ ID 10837> was identified in GBS which encodes amino acid sequence <SEQ ID 10838>. This protein and its epitopes could be useful antigens for vaccines and/or diagnostics.

### EXAMPLE 3302

[15680] A DNA sequence <SEQ ID 10839> was identified in GBS which encodes amino acid sequence <SEQ ID 10840>. This protein and its epitopes could be useful antigens for vaccines and/or diagnostics.

### EXAMPLE 3303

[15681] A DNA sequence <SEQ ID 10841> was identified in GBS which encodes amino acid sequence <SEQ ID 10842>. This protein and its epitopes could be useful antigens for vaccines and/or diagnostics.

### EXAMPLE 3304

[15682] A DNA sequence <SEQ ID 10843> was identified in GBS which encodes amino acid sequence <SEQ ID 10844>. This protein and its epitopes could be useful antigens for vaccines and/or diagnostics.

### EXAMPLE 3305

[15683] A DNA sequence <SEQ ID 10845> was identified in GBS which encodes amino acid sequence <SEQ ID 10846>. This protein and its epitopes could be useful antigens for vaccines and/or diagnostics.

### EXAMPLE 3306

[15684] A DNA sequence <SEQ ID 10847> was identified in GBS which encodes amino acid sequence <SEQ ID 10848>. This protein and its epitopes could be useful antigens for vaccines and/or diagnostics.

### EXAMPLE 3307

[15685] A DNA sequence <SEQ ID 10849> was identified in GBS which encodes amino acid sequence <SEQ ID 10850>. This protein and its epitopes could be useful antigens for vaccines and/or diagnostics.

### EXAMPLE 3308

[15686] A DNA sequence <SEQ ID 10851> was identified in GBS which encodes amino acid sequence <SEQ ID 10852>. This protein and its epitopes could be useful antigens for vaccines and/or diagnostics.

### EXAMPLE 3309

[15687] A DNA sequence <SEQ ID 10853> was identified in GBS which encodes amino acid sequence <SEQ ID 10854>. Related sequences are <SEQ ID 10855>, <SEQ ID 10856>, <SEQ ID 10857>, <SEQ ID 10858>, <SEQ ID 10859>, <SEQ ID 10860>, <SEQ ID 10861>, <SEQ ID 10862>, <SEQ ID 10863>, <SEQ ID 10864>, <SEQ ID 10865> and <SEQ ID 10866>. These proteins and their epitopes could be useful antigens for vaccines and/or diagnostics.

### EXAMPLE 3310

[15688] A DNA sequence <SEQ ID 10867> was identified in GBS which encodes amino acid sequence <SEQ ID 10868>. This protein and its epitopes could be useful antigens for vaccines and/or diagnostics.

### EXAMPLE 3311

[15689] A DNA sequence <SEQ ID 10869> was identified in GBS which encodes amino acid sequence <SEQ ID 10870>. This protein and its epitopes could be useful antigens for vaccines and/or diagnostics.

### EXAMPLE 3312

[15690] A DNA sequence <SEQ ID 10871> was identified in GBS which encodes amino acid sequence <SEQ ID 10872>. This protein and its epitopes could be useful antigens for vaccines and/or diagnostics.

### EXAMPLE 3313

[15691] A DNA sequence <SEQ ID 10873> was identified in GBS which encodes amino acid sequence <SEQ ID 10874>. This protein and its epitopes could be useful antigens for vaccines and/or diagnostics.

### EXAMPLE 3314

[15692] A DNA sequence <SEQ ID 10875> was identified in GBS which encodes amino acid sequence <SEQ ID 10876>. This protein and its epitopes could be useful antigens for vaccines and/or diagnostics.

### EXAMPLE 3315

[15693] A DNA sequence <SEQ ID 10877> was identified in GBS which encodes amino acid sequence <SEQ ID 10878>. This protein and its epitopes could be useful antigens for vaccines and/or diagnostics.

### EXAMPLE 3316

[15694] A DNA sequence <SEQ ID 10879> was identified in GBS which encodes amino acid sequence <SEQ ID 10880>. This protein and its epitopes could be useful antigens for vaccines and/or diagnostics.

### EXAMPLE 3317

[15695] A DNA sequence <SEQ ID 10881> was identified in GBS which encodes amino acid sequence <SEQ ID 10882>. This protein and its epitopes could be useful antigens for vaccines and/or diagnostics.

### EXAMPLE 3318

[15696] A DNA sequence <SEQ ID 10883> was identified in GBS which encodes amino acid sequence <SEQ ID 10884>. This protein and its epitopes could be useful antigens for vaccines and/or diagnostics.

### EXAMPLE 3319

[15697] A DNA sequence <SEQ ID 10885> was identified in GBS which encodes amino acid sequence <SEQ ID 10886>. This protein and its epitopes could be useful antigens for vaccines and/or diagnostics.

### EXAMPLE 3320

[15698] A DNA sequence <SEQ ID 10887> was identified in GBS which encodes amino acid sequence <SEQ ID 10888>. This protein and its epitopes could be useful antigens for vaccines and/or diagnostics.

### EXAMPLE 3321

[15699] A DNA sequence <SEQ ID 10889> was identified in GBS which encodes amino acid sequence <SEQ ID 10890>. This protein and its epitopes could be useful antigens for vaccines and/or diagnostics.

### EXAMPLE 3322

[15700] A DNA sequence <SEQ ID 10891> was identified in GBS which encodes amino acid sequence <SEQ ID 10892>. This protein and its epitopes could be useful antigens for vaccines and/or diagnostics.

### EXAMPLE 3323

[15701] A DNA sequence <SEQ ID 10893> was identified in GBS which encodes amino acid sequence <SEQ ID 10894>. This protein and its epitopes could be useful antigens for vaccines and/or diagnostics.

### EXAMPLE 3324

[15702] A DNA sequence <SEQ ID 10895> was identified in GBS which encodes amino acid sequence <SEQ ID 10896>. This protein and its epitopes could be useful antigens for vaccines and/or diagnostics.

### EXAMPLE 3325

[15703] A DNA sequence <SEQ ID 10897> was identified in GBS which encodes amino acid sequence <SEQ ID 10898>. This protein and its epitopes could be useful antigens for vaccines and/or diagnostics.

### EXAMPLE 3326

[15704] A DNA sequence <SEQ ID 10899> was identified in GBS which encodes amino acid sequence <SEQ ID 10900>. This protein and its epitopes could be useful antigens for vaccines and/or diagnostics.

### EXAMPLE 3327

[15705] A DNA sequence <SEQ ID 10901> was identified in GBS which encodes amino acid sequence <SEQ ID 10902>. This protein and its epitopes could be useful antigens for vaccines and/or diagnostics.

### EXAMPLE 3328

[15706] A DNA sequence <SEQ ID 10903> was identified in GBS which encodes amino acid sequence <SEQ ID 10904>. This protein and its epitopes could be useful antigens for vaccines and/or diagnostics.

### EXAMPLE 3329

[15707] Seven rRNA genes were identified in S. agalactiae. These are SEQ IDs 12018 to 12024. These rRNA genes are particularly useful for diagnostic purposes and for phlyogenetic studies. An alignment of the rRNA sequences is shown below:

| | |
|---|---|
| 12023 | ------------------------------------TTTCGAGTCAAAGTCATCAGCGTT |
| 12024 | ------------------------------------------------------------ |
| 12019 | -----TCCAATCATACTTAATTTCACTAATATCTGGATTTTGACATATTCAGTTAATTCT |
| 12021 | . . . ATCGAATTGAACGGACTCAATTTGGTTGTTATGTAATTTT--ACATAATCTATGATTTCT |
| 12020 | ------------------------------------------------------------ |
| 12018 | ------------------------------------------------------------ |
| 12022 | ----------------------------CTTCTTTGTTTTCTTTAGAGATATTAACTGTA |
| 12023 | TACTGTTACGGCAGCAGTTCCAAGAGTTACTCCACTCACAAGGACTGCTGATAATATTCT |
| 12024 | ------------------------------------------------------------ |
| 12019 | TTTTCATGCTTTTTGAGATAAGCTACTTGTTCTTTTTTTATTACTTTTTTACCTTTCTTT |
| 12021 | TGCTCATGCTCTTTGAGATAGGCTAATTGTTCTTTTTTTGTCATTTTTTTATCTTTCTTC |
| 12020 | ------------------------------------------------------------ |
| 12018 | ------------------------------------------------------------ |
| 12022 | CCCACTTTGGGCGTTAAAATACCTAAAGTAGCCTTTATTAAAGTTGATTTAGCAGCCCCA |
| 12023 | TTTTTTCATTTTTATTAAACTACTCCTTTAC--GATAAGACATTAAATATTTTACCAAAA |
| 12024 | ------------------------------------------------------------ |
| 12019 | ACTGCTGACTGTTTGCTATTTTTTACTTCGTTTGACTGACTTTTAGATTCACTATTCATT |
| 12021 | ACTTCTGATTGCTTGCTATTTTTTACTTCGTTTGACTGAATTTTATGTTCACTATTCATT |
| 12020 | ------------------------------------------------------------ |
| 12018 | ----------------------------CTTT-GATACAATATTATCAAAATTATATTAA |
| 12022 | TTTTCACCTGTTAAGGTAACAAACTCCCCACT-GTCTAAATGGTAATTAACCCCTTCCAG |
| 12023 | AATTCACGAAATTATATTACGTCATTGTTACATTTATATTTGAAATCAACTATTTCTAAA |
| 12024 | ------------------------------------------------------------ |
| 12019 | TGACAGCCTGCTAGTAACATCCCAATAATAGATATGGGAATTAACCATTTTACATATTTT |
| 12021 | TGACAGCCTCCAAGTATCATCCCAAAAATTGATATGGGAATTAACCATTTTATATATTTT |
| 12020 | ------------------------------------------------------------ |
| 12018 | CGGTAAAGATATTGTTAAAGACCAAACTTGGATTATCAATCGT----TATCAAGAAATTA |
| 12022 | CA-CAGGATCGCTATCGTACTGAAAAGTAAGACCACTAACTGTAATATATCGCATGATTA |
| 12023 | TGAACCATAATCAAATCTAGAAAACGATAACCTTCTTCTATTCACTCT---ATCAATATA |
| 12024 | ------------------------------------------------------------ |
| 12019 | TTCAACATGCTCTCTTTTCTTAGAAAATAAACTTCCCATGTCAAGTATCTAATAAAAATA |
| 12021 | CTCATCATGTTCTCTTTTCTTAGAATATAAATTTTATATATCAAGTATATAATGAAATTA |
| 12020 | ------------------------------------------------------------ |
| 12018 | TTAGTG---ATTTGTCTTTAGGAAGCACTA--------TTGCAGAAGA---AATTACTCG |
| 12022 | CCCTTCT--AATTCTCTAGAGAAAAGATCAAGAAAACGTTCTAAAACG---ACCTTTTCG |
| 12023 | ATTACTCCATAGTGAAACTAAAAGAGAAATAAAAAAAGAGTATAATTACTCTTAAAATTA |
| 12024 | ------------------------------------------------------------ |
| 12019 | ATTATTATTTACCAGTATGTTAAAACTAATATTAGTATAACAAA-TTTTCACGAGTTTAA |
| 12021 | ACTATTATTCACCAACATTATAAAATTAATTTTAGTATAACAAAATTTTCACGTATTTTT |
| 12020 | ----------ATCAAAAAAACATGACCAGTATGAATTAAAGCAACGTATAATCAATGCCT |
| 12018 | CTCTAT--AGAGCAGCTAGCTTCACTTCCCATAGAAAATAATCAGTTTTTAT-ATGAT-- |
| 12022 | TCCTTTGAAAAATGATTTACTAATCTTCCGTAAACCCCTAACGTATTGTCATGATGATGT |
| 12023 | TAATATTTACGGAGAATAAGGGATTCGAACCCTTGCGCCAGTTACCCGACCTAACGATTT |
| 12024 | ------------------------------------------------------------ |
| 12019 | TT--TTTTAGTCGTAACATATACACTGAAAAATCTTATTATTTTATACTACCTATCTATC |
| 12021 | ATAGTTTTAGTCTTAACATGTAAACAGAAA------A---------------------TC |
| 12020 | TAATGCGTAAAGGATACCAGTACGAAGATA----------------------------TC |
| 12018 | ---TGTTTTTTAGCAGCCGGTGAAGATA-------------------ACAACGCAAAGTT |
| 12022 | GTGTGTTCATCTGCAATGGGTTTAGCAAGT----TCA---------GATAACTCAAAATA |
| 12023 | AGCAAACCGTCCTCTTCAGCCTCTTGAG--TAATTCTCCAAATTAATATTAATGGGCACG |
| 12024 | ------------------------------------------------------------ |
| 12019 | ATTCACAAACACTTTTATTACTTCAGAACCTATGACATTTAGGAGTCCTCTTTGAATTTC |
| 12021 | ATTTGTATA-----T----------------------TTTAAATGCCCTAATTAAATT-- |
| 12020 | AAAAGTGC------T----------------------TTAAGAGAATATTTATAAGAT-- |
| 12018 | AGTTGCA-ACGTTTTTTAATCAAAATGA--CATTCCTGCAAGATATGTTCATCCAAACGA |
| 12022 | AGTAATACGAGCATCTTTAGAATCTTTA--TTCGCTTTCAACATATCCTGAGA-AATTAA |
| 12023 | AGTGGACTCGAACCACCGACCTCACGCTTATCAGGCGTGCGCTCTAACCACCTGAGCTAC |
| 12024 | ------------------------------------------------------------ |
| 12019 | ATTTAAATGTTGAGTCTCCACTAACTCTTGAAAAATTTCCTTATTATTTCTGCTTGTTTT |
| 12021 | ------------------------------AATAATT-----AATATTTATTATTATATA |
| 12020 | ------------------------------AATAACTCTCAGACGATGTATT-TTACAGA |
| 12018 | AGCAGGAATTATTGTAACTAAAGAACCATG--TAATGCACGAATTATT--CCAG----GA |
| 12022 | ACTTTTTACTGCTTTAGTTACAGCTGCCTGACTAATATTTAACTTCTTAGCTAAATCAGA |
| 12023 | GCGCCCAAGCAAATGCTTGGTTTTACTTTTATGTAAAGTAAGCGGGTGACGAGAATCGA- |
| 12024 | ------------------------------------------------------------ |
| 12019 | AAACCTTCTATAACGATTGCAATAATGAAAAACAAATATAAGTAATTTTCAGTAACTTTT |
| 12021 | AATTCTTCTACAATGA----------AAAAAATAAATATAT--A-TTACAAGTAACATT- |
| 12020 | AAAT----TATGATAA-----A----CTATAACAGACGTAT--AAATTGTAGAAAGTTG- |
| 12018 | AGTTATGATAAGATTGA------GAACTTATGTCTATACAATGAGGTTCTTGTTATCCCT |
| 12022 | ATTTGTCAACTGCTCTT------GTGATAAAAGCATCAGAATGTGTTCTTGCGTATTAGT |
| 12023 | -ACTCGCGACAACAGCTTGGAAGGCTGTAGTTTTACCACTAAACTACACCCGCTAAAAAC |
| 12024 | ------------------------------------------------------------ |
| 12019 | TCTCAAAATTACCAGCACAATACAAAAAAGACAAGGCTTCTAAACCTTGTCTTTATAAAT |
| 12021 | --TCACAATAAATTATCTAGTAGAAAAAAGACAAGGTTTAGAAACCTTGTCTTTATAAGT |
| 12020 | ----GTAGGCTATGAGATTACCTAAAGAAGGCGACTTTATTACAATTCAAAGTTACAAAC |
| 12018 | GGATTT---------TTTGG--AGTCACAGAAGATAAC-CAAATTTGTACCTTTTCAAGA |
| 12022 | CAATTTAA-CATCACTTTGACAAGTACCAAACAATAATTCATGTTGATTTTCTGCTTTAA |
| 12023 | TTATATAATAAATGGCGCGAGACGGAATCGAACCGCCGACACATGGAGCTTCAATCCATT |
| 12024 | ------------------------------------------------------------ |
| 12019 | ATACCGGCGGCCGGGGTCGAACCGGCACGTCCGTGAGGACACTGGATTTTGAGTCCAGCG |
| 12021 | ATACCGGCGGCCGGGGTCGAACCGGCACGTCCGTGAGGACACTGGATTTTGAGTCCAGCG |
| 12020 | ATGATGGTAGTTTACACCGAACTTG-----GCGTGACACCA-TGGTATTAAAAACAACCG |
| 12018 | GGGGGATCTGACATTACTGGATC--------CCTAATTGC--------AGCAGGCATAAA |
| 12022 | GCAAGATTTGAC-TCACTAAATGG-------TCTAATTTTTGTTCTAAAACTGTCATATA |
| 12023 | GCTCTACCAACTGAGCTACCGAGCCTATTGCGGGAGCAGGATTTGAACCTACGACCTTCG |
| 12024 | ------------------------------------------------------------ |
| 12019 | CGTCTGCCAATTCCGCCACGCCGGCTATCTTAAAACTGGGGTAGCTGGATTCGA--ACCA |
| 12021 | CGTCTGCCAATTCCGCCACGCCGGCTATCTTAAAACTGGGGTAGCTGGATTCGA--ACCA |
| 12020 | AAAATGCC--CTCATTGGTGTTAATGATCAT---ACTTTAGTAACAGAAAATGATGGTCG |
| 12018 | AGCAGACCT-TTATGAGAACTTCACAGATGT----TGATGGTATATTTGCAGCACATCCA |
| 12022 | TACCT-CTT-TTTTGTTAACCAGTAAATTATATCACGAAGATATAGAAGAATCAATCATA |
| 12023 | GGTTA-TGAGCCCGACGAGCTACCTAGCTGCTCCA-------TCCCGCGATATCTTTAAA |
| 12024 | ------------------------------------------------------------ |
| 12019 | ACGCA-TGAGGGAGTCAAAGTCCCTTGCCTTACCG-------CTTGGCTATACCCCATGA |
| 12021 | ACGCA-TGAGGGAGTCAAAGTCCCTTGCCTTACCG-------CTTGGCTATACCCCATGA |
| 12020 | ACGC--TGGGTGACACGAGAGCC--TGCAATA---------------GTATACTTTCATA |
| 12018 | GGT-------GTAGTTAAGAACCCTCACGCTA----------TCCCTGAGCTTACTTATA |
| 12022 | GATAGGTGAAGAAGATAAAACCTTTTATCTCAACAACCTAACTTTATAAACTTCTTTGCA |
| 12023 | GGA---------GGATGTGGGATTCGAACCCACGCACGCTTTTACAC--GCCTGACGGTT |
| 12024 | ------------------------------------------------------------ |
| 12019 | AAAGGCG-----AGTGATGGGAATCGAACCCACGAATGTCAGAGCCACAATCTGATGTGT |
| 12021 | AAAGGCG-----AGTGATGGGAATCGAACCCACGAATGTCAGAGCCACAATCTGATGTGT |
| 12020 | AAA---------AATACTGG---T------TT--AACATTATCGCTA-----TGATACGT |
| 12018 | AAGA--------AATGCGTGAATTAGCCTATGCGGGTTTTTCGGTTT-TACATGATGAA- |
| 12022 | AAAACCTTTCATACTATTAAAAACACGATCAGCTTTTTTCTCTGTAG-AACACATTGAAA |
| 12023 | TTCAAGACCGTTCCCTTCAGCCGGACTTGGGTAATCCTCCATATAACAAAAAATATGGAC |
| 12024 | ------------------------------------------------------------ |
| 12019 | TAACCACTTCACCACACCCGCCATATTAGAAAAAACACGGGCAGTAGGAATCGAACCCAC |
| 12021 | TAACCACTTCACCACACCCGCCATATTAGAAAAAACACGGGCAGTAGGAATCGAACCCAC |
| 12020 | GAAACTGGTGTCTCCTACTATTGTAATCTAGCAAGT-----CCGTATATCTTGGACCC-- |
| 12018 | --------GCTTTACTTCCTGCCTATCGTGGCAGAATCCCTCTTGTTATTAAAAATAC-- |
| 12022 | AAACAGTTGGTCCACTTCCTGTC-ATTAATGCAACATCGGCTCCAGAATTTAACATAC-- |
| 12023 | CTTGTAGGACTCGAACCTACGACCGCTCGGTTATGAGCCGAGTGCTCTAACCAGTTGAGC |
| 12024 | ------------------------------------------------------------ |
| 12019 | ACTGAAGGTTTTGGAGACCTTAGTTCTACCTTTAAACTATGCCCGTTTACTATGGAGAGA |
| 12021 | ACTGAAGGTTTTGGAGACCTTAGTTCTACCTTTAAACTATGCCCGTTTACTATGGAGAGA |
| 12020 | --TGAAGCACTCAAGTATATTGACTATGACCTTGATGTCAAAGTATTTGCAGATGGTGAA |
| 12018 | ----AAA----TAATCCCCAACAGCCTGGTACAAAAATAGTTTTAAAGCATACTCGTAG- |
| 12022 | ----GTTCTTTTATTGTACTTATAACTGGATTTTTAGTAATTGTAATATCCTCGAGTGAA |
| 12023 | TAAAGGTCCAAAGTCTCAATAAAATAAATAGCGGCGGAGGGGATCGAACCCCCGACCTCC |
| 12024 | ------------------------------------------------------------ |
| 12019 | GAGGGATTCGAACCCCCGAACCCGAAGGAGCGGATTTACAGTCCGCCGCGTTTAGCCTCT |
| 12021 | GAGGGATTCGAACCCCCGAACCCGAAGGAGCGGATTTACAGTCCGCCGCGTTTAGCCTCT |
| 12020 | AAAAGACTACTAGATGTGGACGAATATGAACAGCATAAAGYTCAGATGAACT--ATCCTA |
| 12018 | --TAACATAGCAGTAACTGG-GATCGCT--TCTGATAGCCGTTTTGCTAGCATAAACGTA |
| 12022 | TTTCCCATAGATTTGACCATTAACTGATAATCTGATGACAAAATAGCAGACTTTAATAAA |
| 12023 | CGGGTATG-AACCGGACGCTCTAGCCAGCT--GAGCTACACCGCCATAAAAATATATCCA |
| 12024 | ------------------------------------------------------------ |
| 12019 | TCGCTATC-TCTCCTAAGGTATAAATGGCGCGAGACGGAATCGAACCGCCGACACATGGA |
| 12021 | TCGCTATC-TCTCCTAAGGTATAAATGGCGCGAGACGGAATCGAACCGCCGACACATGGA |
| 12020 | CCGATATT-GATTATATATTAAAGGAAAATGTAAAAATATTGGTAGAATGGATAAATGAG |
| 12018 | TCTAAAT--ACTTAATGAATAGA---GAAGTAGGTTTCGGCCGAAAAG----TACTACAA |
| 12022 | TCAATATCAACTCTACTTATAGACTTACAATCAATATCTCTAAAAATGGATTTAGTTGAA |
| 12023 | TCGGGAAGACAGGATTCGAACCTGCGACACCTTGGTCCCAAACCAAGTACTCTACCAAGC |
| 12024 | ------------------------------------------------------------ |
| 12019 | GCTTCAATCCATTGCTCTACCAACTGAGCTACCGAGCCTATTGCGGGAGCAGGATTTGAA |
| 12021 | GCTTCAATCCATTGCTCTACCAACTGAGCTACCGAGCCTATTGCGGGAGCAGGATTTGAA |
| 12020 | AATAAAGGCCCCTTTTC-ATCATC--ATATATCAA-TATCTGGTATAAACGGTA------ |
| 12018 | ATTTTAGAG---GATTTAAATATT---AGTTTTGAACATATGCCAACTGGCATAGATGAT |
| 12022 | ATACCAAAATCCGGCTTAACCAGA---ACTATCCAACATGGTCTCAATGTCGGTAAGGGT |
| 12023 | TGAGCTACTTCCCGAAAAATATGCAC--CCTAGAGGAGTCGAACCTCTAACCGCCTGATT |
| 12024 | ------------------------------------------------------------ |
| 12019 | CCTACGACCTTCGGGTTATGAGCCCG--ACGAGCTACCTAGCTGCTCCATCCCGCGATAT |
| 12021 | CCTACGACCTTCGGGTTATGAGCCCG--ACGAGCTACCTAGCTGCTCCATCCCGCGATAT |
| 12020 | --------CCTTGAATTGAAA-------AAGCGCTAACTAAC-ACACTAAATAGTG-TGT |
| 12018 | CTATCCATTGT---CTTACGTGAAA---AAGAATTGACACCAATCAAAGAACAAGAAATC |
| 12022 | TTAACAATTTCACCTTTACCTAATACTAACGAACATCCCCCACCAAGACAATAAGGAACA |
| 12023 | CGTAGTCAG---GTACTCTATCCAGTTGAGCTAAGGGTGCTAAATATTATA-----TGCC |
| 12024 | ------------------------------------------------------------ |
| 12019 | CTTTAAAGGAGGATGTGGGATTCGAACCCACGCACGCTTTTACACGCCTGACG--GTTTT |
| 12021 | CTTTAAAGGAGGATGTGGGATTCGAACCCACGCACGCTTTTACACGCCTGACG--GTTTT |
| 12020 | TTTTATTA----ATATCAAATTTAATTACA---ATACTATTGCAAAAATAT----ATACT |
| 12018 | TTAAATTACCTAACTCGTAAACTAGAAGTAG--ATTACGTTGACATCCAA---------- |
| 12022 | TC--ACTACC-AATTTTAAAACCAATAGCAACCATTTCGTCATAGTCCATTTGAAGATTC |
| 12023 | GAGGACCGGAATC----GAACCGGTACGATGTTTACCATCGCAGGATTTTAAGTCCTGTG |
| 12024 | ------------------------------------------------------------ |
| 12019 | CAAGACCGTTCCCTTCAGCCGGACTTGGGTAATCCTCCATATAACAAAAAATAGTCCGTA |
| 12021 | CAAGACCGTTCCCTTCAGCCGGACTTGGGTAATCCTCCATATAACAAAAAATAGTCCGTA |
| 12020 | TAAAATAAA-------AAAAGTAGAAAGATCACTTTCTACTTTTTTAAGAATAGTCCGTA |
| 12018 | CACAATCTATC-------TACAATCGTAATTGTAGGTGAAA-ATATGAAAAGTCAGATTG |
| 12022 | CATAATCGATT-------AAGAGCTCTTATTGTAGCAGCAGCATCAGTAGAACCACCCCC |
| 12023 | CGTCTGCCAGTTCCGCCACCCCGGCCTCTAACAAGCGAACGACGGGGTTCGAACCCGCGA |
| 12024 | ------------------------------------------------------------ |
| 12019 | CGGGATTCGAACCCGTGTTACCGCCGTGAAAAGGCGGTGTCTTAACCCCTTGACCAACGG |
| 12021 | CGGGATTCGAACCCGTGTTACCGCCGTGAAAAGGCGGTGTCTTAACCCCTTGACCAACGG |
| 12020 | CGGGATTCGAACCCGTGTTACCGCCGTGAAAAGGCGGTGTCTTAACCCCTTGACCAACGG |
| 12018 | GAGTCACTGCAACAGCGACACAAGCCTTATC------AAGAGAAAAA-----ATCAATAT |
| 12022 | CAGTC-CTGCACAGACAGGAATGGATTTTTCTAATCTAATATGAACACCTTTATTAATAC |
| 12023 | -CCCTCACCTT-----GGCAAGGTGATGTTCTACCACTGAACTACGTTCGCACTAAAGAC |
| 12024 | ------------------------------------------------------------ |
| 12019 | -ACCATATTCTTGATGGGCACGAGTGGACTCGAACCACCGACCTCACGCTTATCAGGCGT |
| 12021 | -ACCATATTCTTGATGGGCACGAGTGGACTCGAACCACCGACCTCACGCTTATCAGGCGT |
| 12020 | -ACCATATTCTTGATGGGCACGAGTGGACTCGAACCACCGACCTCACGCTTATCAGGCGT |
| 12018 | CACCATGAT-----ATCACA-----AGGTTCAAGCGAA--GTCTCCATTATGT------- |
| 12022 | CATATTGATTTTTGATTATATCTGCAGCTTTAAACACATCATTATCATTATTTAAAGGCA |
| 12023 | ACTATTTATCCTATAAAATTGTAATGCCGGC----------------------------- |
| 12024 | ------TATCCTATAAAATTGTAATGCCGGC----------------------------- |
| 12019 | GCGCTCTAACCACCTGAGCTACGCGCCCAAAATAACTTCTAAAATTATAAAGTTAATGCC |
| 12021 | GCGCTCTAACCACCTGAGCTACGCGCCCAAG-------CTA------------------- |
| 12020 | GCGCTCTAACCACCTGAGCTACGCGCCCAAG-------CTA------------------- |
| 12018 | --TCGTTATAAACAGTAAGGATGAAAAAAGAG------------------------CTAT |
| 12022 | TTTTGCTACTATCAGAATCGATAACAATACAAT-----CTT---------------CCTT |
| | ** * |
| 12023 | ---TACATGACTTGAACACGCGACCCTCTGATTACAAATCAGATGCTCTACCAACTGAGC |
| 12024 | ---TACATGACTTGAACACGCGACCCTCTGATTACAAATCAGATGCTCTACCAACTGAGC |
| 12019 | GGCTACATGACTTGAACACGCGACCCTCTGATTACAAATCAGATGCTCTACCAACTGAGC |
| 12021 | --TTGCTTGGTTT-----T--TACTTTCTTATA-------A------------------- |
| 12020 | --TTGCTTGGTTT-----T--TACTTTCTTATA-------------------A------- |
| 12018 | TAAAGCACTATATGAA-ACAT--TCTTCCAAA--AATAGTACCTATTACACTACTTACAC |
| 12022 | TAGCTCAGAAATGGTA-ACGTAGTCATTAAGATCAATACTAACCATAATCATAGCTAATT |
| | * * |
| 12023 | TAAGCCGGCAATCTACTAATGCGGGTGAAGGGACTTGAACCCCCACGCCGTTAAGCGCCA |
| 12024 | TAAGCCGGCAATCTACTAATGCGGGTGAAGGGACTTGAACCCCCACGCCGTTAAGCGCCA |
| 12019 | TAAGCCGGCAATCTACTAATGCGGGTGAAGGGACTTGAACCCCCACGCCGTTAAGCGCCA |
| 12021 | ---------AG-----TAAAGCGGGTGACGAGAATCGAACTC------------------ |
| 12020 | ---------AG-----TAAAGCGGGTGACGAGAATCGAACTC------------------ |
| 12018 | TATTAGATAGATAA--CAAATCGTCCT-----AAGTAAGCTTA-------CTTAGGACGA |
| 12022 | CATGATAACCATCGT-CACATCGTCCTTTAATATCTAATCCTAAATTAAGTTTGGCAGGA |
| | * ** * * * |
| 12023 | GATCCTAAATCTGGTGCGTCTGCCAATTCCGCCACACCCGCATTTCTAAATGACCCGTAC |
| 12024 | GATCCTAAATCTGGTGCGTCTGCCAATTCCGCCACACCCGCATTTCTAAATGACCCGTAC |
| 12019 | GATCCTAAATCTGGTGCGTCTGCCAATTCCGCCACACCCGCATTTCTAAATGACCCGTAC |
| 12021 | ------------------------------GCGACAACAGC------------------- |
| 12020 | ------------------------------GCGACAACAGC------------------- |
| 12018 | TTTT----ATTTAGAACATAGGATAGTTTTTCCACTTTTAATCGTAA-------CCACTT |
| 12022 | GCTT----TCTCAAAAATTTTCATAAAACCTCCCTAATAAAATATAGAA-T-ATCCATAT |
| | * |
| 12023 | TGGGCTCGAACCAGTGACCCATTGATTAAAAGTCAATTGCTCTACCAACTGAGCTAACGA |
| 12024 | TGGGCTCGAACCAGTGACCCATTGATTAAAAGTCAATTGCTCTACCAACTGAGCTAACGA |
| 12019 | TGGGCTCGAACCAGTGACCCATTGATTAAAAGTCAATTGCTCTACCAACTGAGCTAACGA |
| 12021 | --------------T-----------TGGAAGGCTGTAGTTTTACCA-CTAAACTA---- |
| 12020 | -------------------------TTGGAAGGCTGTAGTTTTACCA-CTAAACTA---- |
| 12018 | GGTATCA------GTGACA----AATTCGGA--CAATTAAGATGTTAGCCAATCTTAAGG |
| 12022 | TATAACATAACAAATGACA----AATTCGGA--CAATTAAGATGCTAGCCAATCTTAAGG |
| | * * * * * * * * ** |
| 12023 | GTCTACGGTCCCGACGGGAATCGAACCCGCGATCTTCGCCGTGACAGGGCGACGTGATAA |
| 12024 | GTCTACGGTCCCGACGGGAATCGAACCCGCGATCTTCGCCGTGACAGGGCGACGTGATAA |
| 12019 | GTCTACGGTCCCGACGGGAATCGAACCCGCGATCTTCGCCGTGACAGGGCGACGTGATAA |
| 12021 | --------------------------------------------CACC------------ |
| 12020 | --------------------------------------------CACC------------ |
| 12018 | ATA-ATAATTCCAATAAAAA--------------------AAGGCTAACCAAAGTTAGTC |
| 12022 | ATA-ATAATTCCAATAAAAA--------------------AAGGCTAACCAAAGTTAGTC |
| | * |
| 12023 | CCGCTACACTACGGGACCTATGGGAGTTAACGGGATCGAACCGCTGACCCTCTGCTTGTA |
| 12024 | CCGCTACACTACGGGACCTATGGGAGTTAACGGGATCGAACCGCTGACCCTCTGCTTGTA |
| 12019 | CCGCTACACTACGGGACCTATGGGAGTTAACGGGATCGAACCGCTGACCCTCTGCTTGTA |
| 12021 | -CGCT-----------TCTATGGGAGTTAACGGGATCGAACCGCTGACCCTCTGCTTGTA |
| 12020 | -CGCT-----------TCTATGGGAGTTAACGGGATCGAACCGCTGACCCTCTGCTTGTA |
| 12018 | TCCCTTTA--------TCTACTCCGCCAGTAGGACTCGAACCTACGACATCATGATTAAC |
| 12022 | TCCCTTTA--------TCTACTCCGCCAGTAGGACTCGAACCTACGACATCATGATTAAC |
| | * ** *** ** ******* *** ** ** |
| 12023 | AGGCAGATGCT-CTCCCAGCTGAGCTAAACTCCCTTT--GCTAAGCGACTACCTTATCTC |
| 12024 | AGGCAGATGCT-CTCCCAGCTGAGCTAAACTCCCTTT--GCTAAGCGACTACCTTATCTC |
| 12019 | AGGCAGATGCT-CTCCCAGCTGAGCTAAACTCCCTTT--GCTAAGCGACTACCTTATCTC |
| 12021 | AGGCAGATGCT-CTCCCAGCTGAGCTAAACTCCCTTT--GCTAAGCGACTACCTTATCTC |
| 12020 | AGGCAGATGCT-CTCCCAGCTGAGCTAAACTCCCTTT--GCTAAGCGACTACCTTATCTC |
| 12018 | AGTCATGCGCTACTACCAACTGAGCTATGGCGGATTATAGCTAAGCGACTACCTTATCTC |
| 12022 | AGTCATGCGCTACTACCAACTGAGCTATGGCGGATTATAGCTAAGCGACTACCTTATCTC |
| | ** ** *** ** *** ******** ** ********************* |
| 12023 | ACAGGGGGCAACCCCCAACTACTTCCGGCGTTCTAGGGCTTAACTTCTGTGTTCGGCATG |
| 12024 | ACAGGGGGCAACCCCCAACTACTTCCGGCGTTCTAGGGCTTAACTTCTGTGTTCGGCATG |
| 12019 | ACAGGGGGCAACCCCCAACTACTTCCGGCGTTCTAGGGCTTAACTTCTGTGTTCGGCATG |
| 12021 | ACAGGGGGCAACCCCCAACTACTTCCGGCGTTCTAGGGCTTAACTTCTGTGTTCGGCATG |
| 12020 | ACAGGGGGCAACCCCCAACTACTTCCGGCGTTCTAGGGCTTAACTTCTGTGTTCGGCATG |
| 12018 | ACAGGGGGCAACCCCCAACTACTTCCGGCGTTCTAGGGCTTAACTTCTGTGTTCGGCATG |
| 12022 | ACAGGGGGCAACCCCCAACTACTTCCGGCGTTCTAGGGCTTAACTTCTGTGTTCGGCATG |
| | ************************************************************ |
| 12023 | AGAACAGGTGTATCTCCTAGGCAATTATCACTTAACTATTGAGCCTTATTCACTCAAAAT |
| 12024 | AGAACAGGTGTATCTCCTAGGCAATTATCACTTAACTATTGAGCCTTATTCACTCAAAAT |
| 12019 | AGAACAGGTGTATCTCCTAGGCAATTATCACTTAACTATTGAGCCTTATTCACTCAAAAT |
| 12021 | AGAACAGGTGTATCTCCTAGGCAATTATCACTTAACTATTGAGCCTTATTCACTCAAAAT |
| 12020 | AGAACAGGTGTATCTCCTAGGCAATTATCACTTAACTATTGAGCCTTATTCACTCAAAAT |
| 12018 | AGAACAGGTGTATCTCCTAGGCAATTATCACTTAACTATTGAGCCTTATTCACTCAAAAT |
| 12022 | AGAACAGGTGTATCTCCTAGGCAATTATCACTTAACTATTGAGCCTTATTCACTCAAAAT |
| | ************************************************************ |
| 12023 | TGAATATCTATAGTCTAACAAGAAACCGTAACGTTGTCAATATCTCTTTTTGGATAAGTC |
| 12024 | TGAATATCTATAGTCTAACAAGAAACCGTAACGTTGTCAATATCTCTTTTTGGATAAGTC |
| 12019 | TGAATATCTATAGTCTAACAAGAAACCGTAACGTTGTCAATATCTCTTTTTGGATAAGTC |
| 12021 | TGAATATCTATAGTCTAACAAGAAACCGTAACGTTGTCAATATCTCTTTTTGGATAAGTC |
| 12020 | TGAATATCTATAGTCTAACAAGAAACCGTAACGTTGTCAATATCTCTTTTTGGATAAGTC |
| 12018 | TGAATATCTATAGTCTAACAAGAAACCGTAACGTTGTCAATATCTCTTTTTGGATAAGTC |
| 12022 | TGAATATCTATAGTCTAACAAGAAACCGTAACGTTGTCAATATCTCTTTTTGGATAAGTC |
| | ************************************************************ |
| 12023 | CTCGAGCTATTAGTATTAGTCCGCTAAATGTGTCACCACAATTACACTCCTAACCTATCT |
| 12024 | CTCGAGCTATTAGTATTAGTCCGCTAAATGTGTCACCACAATTACACTCCTAACCTATCT |
| 12019 | CTCGAGCTATTAGTATTAGTCCGCTAAATGTGTCACCACAATTACACTCCTAACCTATCT |
| 12021 | CTCGAGCTATTAGTATTAGTCCGCTAAATGTGTCACCACAATTACACTCCTAACCTATCT |
| 12020 | CTCGAGCTATTAGTATTAGTCCGCTAAATGTGTCACCACAATTACACTCCTAACCTATCT |
| 12018 | CTCGAGCTATTAGTATTAGTCCGCTAAATGTGTCACCACAATTACACTCCTAACCTATCT |
| 12022 | CTCGAGCTATTAGTATTAGTCCGCTAAATGTGTCACCACAATTACACTCCTAACCTATCT |
| | ************************************************************ |
| 12023 | ACCTGATCATCTCTCAGGGCTCTTACTGATATAAAATCATGGGAAATCTCATCTTGAGGT |
| 12024 | ACCTGATCATCTCTCAGGGCTCTTACTGATATAAAATCATGGGAAATCTCATCTTGAGGT |
| 12019 | ACCTGATCATCTCTCAGGGCTCTTACTGATATAAAATCATGGGAAATCTCATCTTGAGGT |
| 12021 | ACCTGATCATCTCTCAGGGCTCTTACTGATATAAAATCATGGGAAATCTCATCTTGAGGT |
| 12020 | ACCTGATCATCTCTCAGGGCTCTTACTGATATAAAATCATGGGAAATCTCATCTTGAGGT |
| 12018 | ACCTGATCATCTCTCAGGGCTCTTACTGATATAAAATCATGGGAAATCTCATCTTGAGGT |
| 12022 | ACCTGATCATCTCTCAGGGCTCTTACTGATATAAAATCATGGGAAATCTCATCTTGAGGT |
| | ************************************************************ |
| 12023 | GGGCTTCGCACTTAGATGCTTTCAGCGCTTATCCCTTCCCTACATAGCTACCCAGCGATG |
| 12024 | GGGCTTCGCACTTAGATGCTTTCAGCGCTTATCCCTTCCCTACATAGCTACCCAGCGATG |
| 12019 | GGGCTTCGCACTTAGATGCTTTCAGCGCTTATCCCTTCCCTACATAGCTACCCAGCGATG |
| 12021 | GGGCTTCGCACTTAGATGCTTTCAGCGCTTATCCCTTCCCTACATAGCTACCCAGCGATG |
| 12020 | GGGCTTCGCACTTAGATGCTTTCAGCGCTTATCCCTTCCCTACATAGCTACCCAGCGATG |
| 12018 | GGGCTTCGCACTTAGATGCTTTCAGCGCTTATCCCTTCCCTACATAGCTACCCAGCGATG |
| 12022 | GGGCTTCGCACTTAGATGCTTTCAGCGCTTATCCCTTCCCTACATAGCTACCCAGCGATG |
| | ************************************************************ |
| 12023 | CCTTTGGCAAGACAACTGGTACACCAGCGGTAAGTCCACTCTGGTCCTCTCGTACTAGGA |
| 12024 | CCTTTGGCAAGACAACTGGTACACCAGCGGTAAGTCCACTCTGGTCCTCTCGTACTAGGA |
| 12019 | CCTTTGGCAAGACAACTGGTACACCAGCGGTAAGTCCACTCTGGTCCTCTCGTACTAGGA |
| 12021 | CCTTTGGCAAGACAACTGGTACACCAGCGGTAAGTCCACTCTGGTCCTCTCGTACTAGGA |
| 12020 | CCTTTGGCAAGACAACTGGTACACCAGCGGTAAGTCCACTCTGGTCCTCTCGTACTAGGA |
| 12018 | CCTTTGGCAAGACAACTGGTACACCAGCGGTAAGTCCACTCTGGTCCTCTCGTACTAGGA |
| 12022 | CCTTTGGCAAGACAACTGGTACACCAGCGGTAAGTCCACTCTGGTCCTCTCGTACTAGGA |
| | ************************************************************ |
| 12023 | GCAGATCCTCTCAAATTTCCTACGCCCGCGACGGATAGGGACCGAACTGTCTCACGACGT |
| 12024 | GCAGATCCTCTCAAATTTCCTACGCCCGCGACGGATAGGGACCGAACTGTCTCACGACGT |
| 12019 | GCAGATCCTCTCAAATTTCCTACGCCCGCGACGGATAGGGACCGAACTGTCTCACGACGT |
| 12021 | GCAGATCCTCTCAAATTTCCTACGCCCGCGACGGATAGGGACCGAACTGTCTCACGACGT |
| 12020 | GCAGATCCTCTCAAATTTCCTACGCCCGCGACGGATAGGGACCGAACTGTCTCACGACGT |
| 12018 | GCAGATCCTCTCAAATTTCCTACGCCCGCGACGGATAGGGACCGAACTGTCTCACGACGT |
| 12022 | GCAGATCCTCTCAAATTTCCTACGCCCGCGACGGATAGGGACCGAACTGTCTCACGACGT |
| | ************************************************************ |
| 12023 | TCTGAACCCAGCTCGCGTGCCGCTTTAATGGGCGAACAGCCCAACCCTTGGGACCGACTA |
| 12024 | TCTGAACCCAGCTCGCGTGCCGCTTTAATGGGCGAACAGCCCAACCCTTGGGACCGACTA |
| 12019 | TCTGAACCCAGCTCGCGTGCCGCTTTAATGGGCGAACAGCCCAACCCTTGGGACCGACTA |
| 12021 | TCTGAACCCAGCTCGCGTGCCGCTTTAATGGGCGAACAGCCCAACCCTTGGGACCGACTA |
| 12020 | TCTGAACCCAGCTCGCGTGCCGCTTTAATGGGCGAACAGCCCAACCCTTGGGACCGACTA |
| 12018 | TCTGAACCCAGCTCGCGTGCCGCTTTAATGGGCGAACAGCCCAACCCTTGGGACCGACTA |
| 12022 | TCTGAACCCAGCTCGCGTGCCGCTTTAATGGGCGAACAGCCCAACCCTTGGGACCGACTA |
| | ************************************************************ |
| 12023 | CAGCCCCAGGATGCGACGAGCCGACATCGAGGTGCCAAACCTCCCCGTCGATGTGAACTC |
| 12024 | CAGCCCCAGGATGCGACGAGCCGACATCGAGGTGCCAAACCTCCCCGTCGATGTGAACTC |
| 12019 | CAGCCCCAGGATGCGACGAGCCGACATCGAGGTGCCAAACCTCCCCGTCGATGTGAACTC |
| 12021 | CAGCCCCAGGATGCGACGAGCCGACATCGAGGTGCCAAACCTCCCCGTCGATGTGAACTC |
| 12020 | CAGCCCCAGGATGCGACGAGCCGACATCGAGGTGCCAAACCTCCCCGTCGATGTGAACTC |
| 12018 | CAGCCCCAGGATGCGACGAGCCGACATCGAGGTGCCAAACCTCCCCGTCGATGTGAACTC |
| 12022 | CAGCCCCAGGATGCGACGAGCCGACATCGAGGTGCCAAACCTCCCCGTCGATGTGAACTC |
| | ************************************************************ |
| 12023 | TTGGGGGAGATAAGCCTGTTATCCCCAGGGTAGCTTTTATCCGTTGAGCGATGGCCCTTC |
| 12024 | TTGGGGGAGATAAGCCTGTTATCCCCAGGGTAGCTTTTATCCGTTGAGCGATGGCCCTTC |
| 12019 | TTGGGGGAGATAAGCCTGTTATCCCCAGGGTAGCTTTTATCCGTTGAGCGATGGCCCTTC |
| 12021 | TTGGGGGAGATAAGCCTGTTATCCCCAGGGTAGCTTTTATCCGTTGAGCGATGGCCCTTC |
| 12020 | TTGGGGGAGATAAGCCTGTTATCCCCAGGGTAGCTTTTATCCGTTGAGCGATGGCCCTTC |
| 12018 | TTGGGGGAGATAAGCCTGTTATCCCCAGGGTAGCTTTTATCCGTTGAGCGATGGCCCTTC |
| 12022 | TTGGGGGAGATAAGCCTGTTATCCCCAGGGTAGCTTTTATCCGTTGAGCGATGGCCCTTC |
| | ************************************************************ |
| 12023 | CATACGGAACCACCGGATCACTAAGCCCGACTTTCGTCCCTGCTCGAGTTGTAGCTCTCG |
| 12024 | CATACGGAACCACCGGATCACTAAGCCCGACTTTCGTCCCTGCTCGAGTTGTAGCTCTCG |
| 12019 | CATACGGAACCACCGGATCACTAAGCCCGACTTTCGTCCCTGCTCGAGTTGTAGCTCTCG |
| 12021 | CATACGGAACCACCGGATCACTAAGCCCGACTTTCGTCCCTGCTCGAGTTGTAGCTCTCG |
| 12020 | CATACGGAACCACCGGATCACTAAGCCCGACTTTCGTCCCTGCTCGAGTTGTAGCTCTCG |
| 12018 | CATACGGAACCACCGGATCACTAAGCCCGACTTTCGTCCCTGCTCGAGTTGTAGCTCTCG |
| 12022 | CATACGGAACCACCGGATCACTAAGCCCGACTTTCGTCCCTGCTCGAGTTGTAGCTCTCG |
| | ************************************************************ |
| 12023 | CAGTCAAGCTCCCTTATACCTTTACACTCTACGACTGATTTCCAACCAGTCTGAGGGAAC |
| 12024 | CAGTCAAGCTCCCTTATACCTTTACACTCTACGACTGATTTCCAACCAGTCTGAGGGAAC |
| 12019 | CAGTCAAGCTCCCTTATACCTTTACACTCTACGACTGATTTCCAACCAGTCTGAGGGAAC |
| 12021 | CAGTCAAGCTCCCTTATACCTTTACACTCTACGACTGATTTCCAACCAGTCTGAGGGAAC |
| 12020 | CAGTCAAGCTCCCTTATACCTTTACACTCTACGACTGATTTCCAACCAGTCTGAGGGAAC |
| 12018 | CAGTCAAGCTCCCTTATACCTTTACACTCTACGACTGATTTCCAACCAGTCTGAGGGAAC |
| 12022 | CAGTCAAGCTCCCTTATACCTTTACACTCTACGACTGATTTCCAACCAGTCTGAGGGAAC |
| | ************************************************************ |
| 12023 | CTTTGGGCGCCTCCGTTACCTTTTAGGAGGCGACCGCCCCAGTCAAACTGCCCGTCAGAC |
| 12024 | CTTTGGGCGCCTCCGTTACCTTTTAGGAGGCGACCGCCCCAGTCAAACTGCCCGTCAGAC |
| 12019 | CTTTGGGCGCCTCCGTTACCTTTTAGGAGGCGACCGCCCCAGTCAAACTGCCCGTCAGAC |
| 12021 | CTTTGGGCGCCTCCGTTACCTTTTAGGAGGCGACCGCCCCAGTCAAACTGCCCGTCAGAC |
| 12020 | CTTTGGGCGCCTCCGTTACCTTTTAGGAGGCGACCGCCCCAGTCAAACTGCCCGTCAGAC |
| 12018 | CTTTGGGCGCCTCCGTTACCTTTTAGGAGGCGACCGCCCCAGTCAAACTGCCCGTCAGAC |
| 12022 | CTTTGGGCGCCTCCGTTACCTTTTAGGAGGCGACCGCCCCAGTCAAACTGCCCGTCAGAC |
| | ************************************************************ |
| 12023 | ACTGTCTCCGATAGGGATTGCCTATCTGGGTTAGAGTAGCCATAACACAAGGGTAGTATC |
| 12024 | ACTGTCTCCGATAGGGATTGCCTATCTGGGTTAGAGTAGCCATAACACAAGGGTAGTATC |
| 12019 | ACTGTCTCCGATAGGGATTGCCTATCTGGGTTAGAGTAGCCATAACACAAGGGTAGTATC |
| 12021 | ACTGTCTCCGATAGGGATTGCCTATCTGGGTTAGAGTAGCCATAACACAAGGGTAGTATC |
| 12020 | ACTGTCTCCGATAGGGATTGCCTATCTGGGTTAGAGTAGCCATAACACAAGGGTAGTATC |
| 12018 | ACTGTCTCCGATAGGGATTGCCTATCTGGGTTAGAGTAGCCATAACACAAGGGTAGTATC |
| 12022 | ACTGTCTCCGATAGGGATTGCCTATCTGGGTTAGAGTAGCCATAACACAAGGGTAGTATC |
| | ************************************************************ |
| 12023 | CCAACAACGCCTCAAACGAAACTGGCGTCCCGTTATCATAGGCTCCTACCTATCCTGTAC |
| 12024 | CCAACAACGCCTCAAACGAAACTGGCGTCCCGTTATCATAGGCTCCTACCTATCCTGTAC |
| 12019 | CCAACAACGCCTCAAACGAAACTGGCGTCCCGTTATCATAGGCTCCTACCTATCCTGTAC |
| 12021 | CCAACAACGCCTCAAACGAAACTGGCGTCCCGTTATCATAGGCTCCTACCTATCCTGTAC |
| 12020 | CCAACAACGCCTCAAACGAAACTGGCGTCCCGTTATCATAGGCTCCTACCTATCCTGTAC |
| 12018 | CCAACAACGCCTCAAACGAAACTGGCGTCCCGTTATCATAGGCTCCTACCTATCCTGTAC |
| 12022 | CCAACAACGCCTCAAACGAAACTGGCGTCCCGTTATCATAGGCTCCTACCTATCCTGTAC |
| | ************************************************************ |
| 12023 | ATGTGGTACAGATACTCAATATCAAACTGCAGTAAAGCTCCATGGGGTCTTTCCGTCCTG |
| 12024 | ATGTGGTACAGATACTCAATATCAAACTGCAGTAAAGCTCCATGGGGTCTTTCCGTCCTG |
| 12019 | ATGTGGTACAGATACTCAATATCAAACTGCAGTAAAGCTCCATGGGGTCTTTCCGTCCTG |
| 12021 | ATGTGGTACAGATACTCAATATCAAACTGCAGTAAAGCTCCATGGGGTCTTTCCGTCCTG |
| 12020 | ATGTGGTACAGATACTCAATATCAAACTGCAGTAAAGCTCCATGGGGTCTTTCCGTCCTG |
| 12018 | ATGTGGTACAGATACTCAATATCAAACTGCAGTAAAGCTCCATGGGGTCTTTCCGTCCTG |
| 12022 | ATGTGGTACAGATACTCAATATCAAACTGCAGTAAAGCTCCATGGGGTCTTTCCGTCCTG |
| | ************************************************************ |
| 12023 | TCGCGGGTAACCTGCATCTTCACAGGTACTAAAATTTCACCGAGTCTCTCGTTGAGACAG |
| 12024 | TCGCGGGTAACCTGCATCTTCACAGGTACTAAAATTTCACCGAGTCTCTCGTTGAGACAG |
| 12019 | TCGCGGGTAACCTGCATCTTCACAGGTACTAAAATTTCACCGAGTCTCTCGTTGAGACAG |
| 12021 | TCGCGGGTAACCTGCATCTTCACAGGTACTAAAATTTCACCGAGTCTCTCGTTGAGACAG |
| 12020 | TCGCGGGTAACCTGCATCTTCACAGGTACTAAAATTTCACCGAGTCTCTCGTTGAGACAG |
| 12018 | TCGCGGGTAACCTGCATCTTCACAGGTACTAAAATTTCACCGAGTCTCTCGTTGAGACAG |
| 12022 | TCGCGGGTAACCTGCATCTTCACAGGTACTAAAATTTCACCGAGTCTCTCGTTGAGACAG |
| | ************************************************************ |
| 12023 | TGCCCAAATCATTACGCCTTTCGTGCGGGTCGGAACTTACCCGACAAGGAATTTCGCTAC |
| 12024 | TGCCCAAATCATTACGCCTTTCGTGCGGGTCGGAACTTACCCGACAAGGAATTTCGCTAC |
| 12019 | TGCCCAAATCATTACGCCTTTCGTGCGGGTCGGAACTTACCCGACAAGGAATTTCGCTAC |
| 12021 | TGCCCAAATCATTACGCCTTTCGTGCGGGTCGGAACTTACCCGACAAGGAATTTCGCTAC |
| 12020 | TGCCCAAATCATTACGCCTTTCGTGCGGGTCGGAACTTACCCGACAAGGAATTTCGCTAC |
| 12018 | TGCCCAAATCATTACGCCTTTCGTGCGGGTCGGAACTTACCCGACAAGGAATTTCGCTAC |
| 12022 | TGCCCAAATCATTACGCCTTTCGTGCGGGTCGGAACTTACCCGACAAGGAATTTCGCTAC |
| | ************************************************************ |
| 12023 | CTTAGGACCGTTATAGTTACGGCCGCCGTTTACTGGGGCTTCAATTCATACCTTCGCTTA |
| 12024 | CTTAGGACCGTTATAGTTACGGCCGCCGTTTACTGGGGCTTCAATTCATACCTTCGCTTA |
| 12019 | CTTAGGACCGTTATAGTTACGGCCGCCGTTTACTGGGGCTTCAATTCATACCTTCGCTTA |
| 12021 | CTTAGGACCGTTATAGTTACGGCCGCCGTTTACTGGGGCTTCAATTCATACCTTCGCTTA |
| 12020 | CTTAGGACCGTTATAGTTACGGCCGCCGTTTACTGGGGCTTCAATTCATACCTTCGCTTA |
| 12018 | CTTAGGACCGTTATAGTTACGGCCGCCGTTTACTGGGGCTTCAATTCATACCTTCGCTTA |
| 12022 | CTTAGGACCGTTATAGTTACGGCCGCCGTTTACTGGGGCTTCAATTCATACCTTCGCTTA |
| | ************************************************************ |
| 12023 | CGCTAAGCACTCCTCTTAACCTTCCAGCACCGGGCAGGCGTCACCCCCTATACATCATCT |
| 12024 | CGCTAAGCACTCCTCTTAACCTTCCAGCACCGGGCAGGCGTCACCCCCTATACATCATCT |
| 12019 | CGCTAAGCACTCCTCTTAACCTTCCAGCACCGGGCAGGCGTCACCCCCTATACATCATCT |
| 12021 | CGCTAAGCACTCCTCTTAACCTTCCAGCACCGGGCAGGCGTCACCCCCTATACATCATCT |
| 12020 | CGCTAAGCACTCCTCTTAACCTTCCAGCACCGGGCAGGCGTCACCCCCTATACATCATCT |
| 12018 | CGCTAAGCACTCCTCTTAACCTTCCAGCACCGGGCAGGCGTCACCCCCTATACATCATCT |
| 12022 | CGCTAAGCACTCCTCTTAACCTTCCAGCACCGGGCAGGCGTCACCCCCTATACATCATCT |
| | ************************************************************ |
| 12023 | TACGATTTAGCAGAGAGCTGTGTTTTTGATAAACAGTTGCTTGGGCCTATTCACTGCGGC |
| 12024 | TACGATTTAGCAGAGAGCTGTGTTTTTGATAAACAGTTGCTTGGGCCTATTCACTGCGGC |
| 12019 | TACGATTTAGCAGAGAGCTGTGTTTTTGATAAACAGTTGCTTGGGCCTATTCACTGCGGC |
| 12021 | TACGATTTAGCAGAGAGCTGTGTTTTTGATAAACAGTTGCTTGGGCCTATTCACTGCGGC |
| 12020 | TACGATTTAGCAGAGAGCTGTGTTTTTGATAAACAGTTGCTTGGGCCTATTCACTGCGGC |
| 12018 | TACGATTTAGCAGAGAGCTGTGTTTTTGATAAACAGTTGCTTGGGCCTATTCACTGCGGC |
| 12022 | TACGATTTAGCAGAGAGCTGTGTTTTTGATAAACAGTTGCTTGGGCCTATTCACTGCGGC |
| | ************************************************************ |
| 12023 | TGATCTAAAATCAGCGCCCCTTCTCCCGAAGTTACGGGGCCATTTTGCCGAGTTCCTTAA |
| 12024 | TGATCTAAAATCAGCGCCCCTTCTCCCGAAGTTACGGGGCCATTTTGCCGAGTTCCTTAA |
| 12019 | TGATCTAAAATCAGCGCCCCTTCTCCCGAAGTTACGGGGCCATTTTGCCGAGTTCCTTAA |
| 12021 | TGATCTAAAATCAGCGCCCCTTCTCCCGAAGTTACGGGGCCATTTTGCCGAGTTCCTTAA |
| 12020 | TGATCTAAAATCAGCGCCCCTTCTCCCGAAGTTACGGGGCCATTTTGCCGAGTTCCTTAA |
| 12018 | TGATCTAAAATCAGCGCCCCTTCTCCCGAAGTTACGGGGCCATTTTGCCGAGTTCCTTAA |
| 12022 | TGATCTAAAATCAGCGCCCCTTCTCCCGAAGTTACGGGGCCATTTTGCCGAGTTCCTTAA |
| | ************************************************************ |
| 12023 | CGAGAGTTCTCTCGCTCACCTGAGGCTACTCGCCTCGACTACCTGTGTCGGTTTGCGGTA |
| 12024 | CGAGAGTTCTCTCGCTCACCTGAGGCTACTCGCCTCGACTACCTGTGTCGGTTTGCGGTA |
| 12019 | CGAGAGTTCTCTCGCTCACCTGAGGCTACTCGCCTCGACTACCTGTGTCGGTTTGCGGTA |
| 12021 | CGAGAGTTCTCTCGCTCACCTGAGGCTACTCGCCTCGACTACCTGTGTCGGTTTGCGGTA |
| 12020 | CGAGAGTTCTCTCGCTCACMTGAGGCTACTCGCCTCGACTACCTGTGTCGGTTTGCGGTA |
| 12018 | CGAGAGTTCTCTCGCTCACCTGAGGCTACTCGCCTCGACTACCTGTGTCGGTTTGCGGTA |
| 12022 | CGAGAGTTCTCTCGCTCACCTGAGGCTACTCGCCTCGACTACCTGTGTCGGTTTGCGGTA |
| | ******************* **************************************** |
| 12023 | CGGGTAGAGTATATGTATCGCTAGAAGCTTTTCTTGGCAGTGTGACATCACTAACTTCGC |
| 12024 | CGGGTAGAGTATATGTATCGCTAGAAGCTTTTCTTGGCAGTGTGACATCACTAACTTCGC |
| 12019 | CGGGTAGAGTATATGTATCGCTAGAAGCTTTTCTTGGCAGTGTGACATCACTAACTTCGC |
| 12021 | CGGGTAGAGTATATGTATCGCTAGAAGCTTTTCTTGGCAGTGTGACATCACTAACTTCGC |
| 12020 | CGGGTAGAGTATATGTATCGCTAGAAGCTTTTCTTGGCAGTGTGACATCACTAACTTCGC |
| 12018 | CGGGTAGAGTATATGTATCGCTAGAAGCTTTTCTTGGCAGTGTGACATCACTAACTTCGC |
| 12022 | CGGGTAGAGTATATGTATCGCTAGAAGCTTTTCTTGGCAGTGTGACATCACTAACTTCGC |
| | ************************************************************ |
| 12023 | TACTAAACTTCGCTCCTCGTCACAGCTCAATGTTAAAGATATAAGCATTTGACTCATATC |
| 12024 | TACTAAACTTCGCTCCTCGTCACAGCTCAATGTTAAAGATATAAGCATTTGACTCATATC |
| 12019 | TACTAAACTTCGCTCCTCGTCACAGCTCAATGTTAAAGATATAAGCATTTGACTCATATC |
| 12021 | TACTAAACTTCGCTCCTCGTCACAGCTCAATGTTAAAGATATAAGCATTTGACTCATATC |
| 12020 | TACTAAACTTCGCTCCTCGTCACAGCTCAATGTTAAAGATATAAGCATTTGACTCATATC |
| 12018 | TACTAAACTTCGCTCCTCGTCACAGCTCAATGTTAAAGATATAAGCATTTGACTCATATC |
| 12022 | TACTAAACTTCGCTCCTCGTCACAGCTCAATGTTAAAGATATAAGCATTTGACTCATATC |
| | ************************************************************ |
| 12023 | ACACCTCACTGTTTGACCAGACACTTCCAATCGTCTGGTTTAGTTAGCCTACTGCGTCCC |
| 12024 | ACACCTCACTGTTTGACCAGACACTTCCAATCGTCTGGTTTAGTTAGCCTACTGCGTCCC |
| 12019 | ACACCTCACTGTTTGACCAGACACTTCCAATCGTCTGGTTTAGTTAGCCTACTGCGTCCC |
| 12021 | ACACCTCACTGTTTGACCAGACACTTCCAATCGTCTGGTTTAGTTAGCCTACTGCGTCCC |
| 12020 | ACACCTCACTGTTTGACCAGACACTTCCAATCGTCTGGTTTAGTTAGCCTACTGCGTCCC |
| 12018 | ACACCTCACTGTTTGACCAGACACTTCCAATCGTCTGGTTTAGTTAGCCTACTGCGTCCC |
| 12022 | ACACCTCACTGTTTGACCAGACACTTCCAATCGTCTGGTTTAGTTAGCCTACTGCGTCCC |
| | ************************************************************ |
| 12023 | TCCATCACTATATACTCTAGTACAGGAATATCAACCTGTTGTCCATCGGATACACCTTTC |
| 12024 | TCCATCACTATATACTCTAGTACAGGAATATCAACCTGTTGTCCATCGGATACACCTTTC |
| 12019 | TCCATCACTATATACTCTAGTACAGGAATATCAACCTGTTGTCCATCGGATACACCTTTC |
| 12021 | TCCATCACTATATACTCTAGTACAGGAATATCAACCTGTTGTCCATCGGATACACCTTTC |
| 12020 | TCCATCACTATATACTCTAGTACAGGAATATCAACCTGTTGTCCATCGGATACACCTTTC |
| 12018 | TCCATCACTATATACTCTAGTACAGGAATATCAACCTGTTGTCCATCGGATACACCTTTC |
| 12022 | TCCATCACTATATACTCTAGTACAGGAATATCAACCTGTTGTCCATCGGATACACCTTTC |
| | ************************************************************ |
| 12023 | GGTCTCTCCTTAGGTCCCGACTAACCCAGGGCGGACGAGCCTTCCCCTGGAAACCTTAGT |
| 12024 | GGTCTCTCCTTAGGTCCCGACTAACCCAGGGCGGACGAGCCTTCCCCTGGAAACCTTAGT |
| 12019 | GGTCTCTCCTTAGGTCCCGACTAACCCAGGGCGGACGAGCCTTCCCCTGGAAACCTTAGT |
| 12021 | GGTCTCTCCTTAGGTCCCGACTAACCCAGGGCGGACGAGCCTTCCCCTGGAAACCTTAGT |
| 12020 | GGTCTCTCCTTAGGTCCCGACTAACCCAGGGCGGACGAGCCTTCCCCTGGAAACCTTAGT |
| 12018 | GGTCTCTCCTTAGGTCCCGACTAACCCAGGGCGGACGAGCCTTCCCCTGGAAACCTTAGT |
| 12022 | GGTCTCTCCTTAGGTCCCGACTAACCCAGGGCGGACGAGCCTTCCCCTGGAAACCTTAGT |
| | ************************************************************ |
| 12023 | CTTACGGTGGACAGGATTCTCACCTGTCTTGCGCTACTCATACCGGCATTCTCACTTCTA |
| 12024 | CTTACGGTGGACAGGATTCTCACCTGTCTTGCGCTACTCATACCGGCATTCTCACTTCTA |
| 12019 | CTTACGGTGGACAGGATTCTCACCTGTCTTGCGCTACTCATACCGGCATTCTCACTTCTA |
| 12021 | CTTACGGTGGACAGGATTCTCACCTGTCTTGCGCTACTCATACCGGCATTCTCACTTCTA |
| 12020 | CTTACGGTGGACAGGATTCTCACCTGTCTTGCGCTACTCATACCGGCATTCTCACTTCTA |
| 12018 | CTTACGGTGGACAGGATTCTCACCTGTCTTGCGCTACTCATACCGGCATTCTCACTTCTA |
| 12022 | CTTACGGTGGACAGGATTCTCACCTGTCTTGCGCTACTCATACCGGCATTCTCACTTCTA |
| | ************************************************************ |
| 12023 | TGCGTTCCAGCGCTCCTCACGGTACACCTTCTTCACACATAGAACGCTCTCCTACCATGA |
| 12024 | TGCGTTCCAGCGCTCCTCACGGTACACCTTCTTCACACATAGAACGCTCTCCTACCATGA |
| 12019 | TGCGTTCCAGCGCTCCTCACGGTACACCTTCTTCACACATAGAACGCTCTCCTACCATGA |
| 12021 | TGCGTTCCAGCGCTCCTCACGGTACACCTTCTTCACACATAGAACGCTCTCCTACCATGA |
| 12020 | TGCGTTCCAGCGCTCCTCACGGTACACCTTCTTCACACATAGAACGCTCTCCTACCATGA |
| 12018 | TGCGTTCCAGCGCTCCTCACGGTACACCTTCTTCACACATAGAACGCTCTCCTACCATGA |
| 12022 | TGCGTTCCAGCGCTCCTCACGGTACACCTTCTTCACACATAGAACGCTCTCCTACCATGA |
| | ************************************************************ |
| 12023 | CACTTTTGTGTCATCCACAGCTTCGGTAATATGTTTTAGCCCCGGTACATTTTCGGCGCA |
| 12024 | CACTTTTGTGTCATCCACAGCTTCGGTAATATGTTTTAGCCCCGGTACATTTTCGGCGCA |
| 12019 | CACTTTTGTGTCATCCACAGCTTCGGTAATATGTTTTAGCCCCGGTACATTTTCGGCGCA |
| 12021 | CACTTTTGTGTCATCCACAGCTTCGGTAATATGTTTTAGCCCCGGTACATTTTCGGCGCA |
| 12020 | CACTTTTGTGTCATCCACAGCTTCGGTAATATGTTTTAGCCCCGGTACATTTTCGGCGCA |
| 12018 | CACTTTTGTGTCATCCACAGCTTCGGTAATATGTTTTAGCCCCGGTACATTTTCGGCGCA |
| 12022 | CACTTTTGTGTCATCCACAGCTTCGGTAATATGTTTTAGCCCCGGTACATTTTCGGCGCA |
| | ************************************************************ |
| 12023 | GGGTCACTCGACTAGTGAGCTATTACGCACTCTTTGAATGAATAGCTGCTTCTAAGCTAA |
| 12024 | GGGTCACTCGACTAGTGAGCTATTACGCACTCTTTGAATGAATAGCTGCTTCTAAGCTAA |
| 12019 | GGGTCACTCGACTAGTGAGCTATTACGCACTCTTTGAATGAATAGCTGCTTCTAAGCTAA |
| 12021 | GGGTCACTCGACTAGTGAGCTATTACGCACTCTTTGAATGAATAGCTGCTTCTAAGCTAA |
| 12020 | GGGTCACTCGACTAGTGAGCTATTACGCACTCTTTGAATGAATAGCTGCTTCTAAGCTAA |
| 12018 | GGGTCACTCGACTAGTGAGCTATTACGCACTCTTTGAATGAATAGCTGCTTCTAAGCTAA |
| 12022 | GGGTCACTCGACTAGTGAGCTATTACGCACTCTTTGAATGAATAGCTGCTTCTAAGCTAA |
| | ************************************************************ |
| 12023 | CATCCTAGTTGTCTGTGCAACCCCACATCCTTTTCCACTTAACATATATTTTGGGACCTT |
| 12024 | CATCCTAGTTGTCTGTGCAACCCCACATCCTTTTCCACTTAACATATATTTTGGGACCTT |
| 12019 | CATCCTAGTTGTCTGTGCAACCCCACATCCTTTTCCACTTAACATATATTTTGGGACCTT |
| 12021 | CATCCTAGTTGTCTGTGCAACCCCACATCCTTTTCCACTTAACATATATTTTGGGACCTT |
| 12020 | CATCCTAGTTGTCTGTGCAACCCCACATCCTTTTCCACTTAACATATATTTTGGGACCTT |
| 12018 | CATCCTAGTTGTCTGTGCAACCCCACATCCTTTTCCACTTAACATATATTTTGGGACCTT |
| 12022 | CATCCTAGTTGTCTGTGCAACCCCACATCCTTTTCCACTTAACATATATTTTGGGACCTT |
| | ************************************************************ |
| 12023 | AGCTGGTGGTCTGGGCTGTTTCCCTTTCGACTACGGATCTTAGCACTCGCAGTCTGACTG |
| 12024 | AGCTGGTGGTCTGGGCTGTTTCCCTTTCGACTACGGATCTTAGCACTCGCAGTCTGACTG |
| 12019 | AGCTGGTGGTCTGGGCTGTTTCCCTTTCGACTACGGATCTTAGCACTCGCAGTCTGACTG |
| 12021 | AGCTGGTGGTCTGGGCTGTTTCCCTTTCGACTACGGATCTTAGCACTCGCAGTCTGACTG |
| 12020 | AGCTGGTGGTCTGGGCTGTTTCCCTTTCGACTACGGATCTTAGCACTCGCAGTCTGACTG |
| 12018 | AGCTGGTGGTCTGGGCTGTTTCCCTTTCGACTACGGATCTTAGCACTCGCAGTCTGACTG |
| 12022 | AGCTGGTGGTCTGGGCTGTTTCCCTTTCGACTACGGATCTTAGCACTCGCAGTCTGACTG |
| | ************************************************************ |
| 12023 | CCGATTATATCTCGTTGGCATTCGGAGTTTATCTGAGATTGGTAATCCGGGATGGACCCC |
| 12024 | CCGATTATATCTCGTTGGCATTCGGAGTTTATCTGAGATTGGTAATCCGGGATGGACCCC |
| 12019 | CCGATTATATCTCGTTGGCATTCGGAGTTTATCTGAGATTGGTAATCCGGGATGGACCCC |
| 12021 | CCGATTATATCTCGTTGGCATTCGGAGTTTATCTGAGATTGGTAATCCGGGATGGACCCC |
| 12020 | CCGATTATATCTCGTTGGCATTCGGAGTTTATCTGAGATTGGTAATCCGGGATGGACCCC |
| 12018 | CCGATTATATCTCGTTGGCATTCGGAGTTTATCTGAGATTGGTAATCCGGGATGGACCCC |
| 12022 | CCGATTATATCTCGTTGGCATTCGGAGTTTATCTGAGATTGGTAATCCGGGATGGACCCC |
| | ************************************************************ |
| 12023 | TCACCCAAACAGTGCTCTACCTCCAAGAGACTTAACATCGACGCTAGCCCTAAAGCTATT |
| 12024 | TCACCCAAACAGTGCTCTACCTCCAAGAGACTTAACATCGACGCTAGCCCTAAAGCTATT |
| 12019 | TCACCCAAACAGTGCTCTACCTCCAAGAGACTTAACATCGACGCTAGCCCTAAAGCTATT |
| 12021 | TCACCCAAACAGTGCTCTACCTCCAAGAGACTTAACATCGACGCTAGCCCTAAAGCTATT |
| 12020 | TCACCCAAACAGTGCTCTACCTCCAAGAGACTTAACATCGACGCTAGCCCTAAAGCTATT |
| 12018 | TCACCCAAACAGTGCTCTACCTCCAAGAGACTTAACATCGACGCTAGCCCTAAAGCTATT |
| 12022 | TCACCCAAACAGTGCTCTACCTCCAAGAGACTTAACATCGACGCTAGCCCTAAAGCTATT |
| | ************************************************************ |
| 12023 | TCGGAGAGAACCAGCTATCTCCAAGTTCGTTTGGAATTTCTCCGCTACCCACAAGTCATC |
| 12024 | TCGGAGAGAACCAGCTATCTCCAAGTTCGTTTGGAATTTCTCCGCTACCCACAAGTCATC |
| 12019 | TCGGAGAGAACCAGCTATCTCCAAGTTCGTTTGGAATTTCTCCGCTACCCACAAGTCATC |
| 12021 | TCGGAGAGAACCAGCTATCTCCAAGTTCGTTTGGAATTTCTCCGCTACCCACAAGTCATC |
| 12020 | TCGGAGAGAACCAGCTATCTCCAAGTTCGTTTGGAATTTCTCCGCTACCCACAAGTCATC |
| 12018 | TCGGAGAGAACCAGCTATCTCCAAGTTCGTTTGGAATTTCTCCGCTACCCACAAGTCATC |
| 12022 | TCGGAGAGAACCAGCTATCTCCAAGTTCGTTTGGAATTTCTCCGCTACCCACAAGTCATC |
| | ************************************************************ |
| 12023 | CAAGCACTTTTCAACGTGCCCTGGTTCGGTCCTCCAGTGAGTTTTACCTCACCTTCAACC |
| 12024 | CAAGCACTTTTCAACGTGCCCTGGTTCGGTCCTCCAGTGAGTTTTACCTCACCTTCAACC |
| 12019 | CAAGCACTTTTCAACGTGCCCTGGTTCGGTCCTCCAGTGAGTTTTACCTCACCTTCAACC |
| 12021 | CAAGCACTTTTCAACGTGCCCTGGTTCGGTCCTCCAGTGAGTTTTACCTCACCTTCAACC |
| 12020 | CAAGCACTTTTCAACGTGCCCTGGTTCGGTCCTCCAGTGAGTTTTACCTCACCTTCAACC |
| 12018 | CAAGCACTTTTCAACGTGCCCTGGTTCGGTCCTCCAGTGAGTTTTACCTCACCTTCAACC |
| 12022 | CAAGCACTTTTCAACGTGCCCTGGTTCGGTCCTCCAGTGAGTTTTACCTCACCTTCAACC |
| | ************************************************************ |
| 12023 | TGCTCATGGGTAGGTCACATGGTTTCGGGTCTACAACATGATACTATGACGCCCTATTAA |
| 12024 | TGCTCATGGGTAGGTCACATGGTTTCGGGTCTACAACATGATACTATGACGCCCTATTAA |
| 12019 | TGCTCATGGGTAGGTCACATGGTTTCGGGTCTACAACATGATACTATGACGCCCTATTAA |
| 12021 | TGCTCATGGGTAGGTCACATGGTTTCGGGTCTACAACATGATACTATGACGCCCTATTAA |
| 12020 | TGCTCATGGGTAGGTCACATGGTTTCGGGTCTACAACATGATACTATGACGCCCTATTAA |
| 12018 | TGCTCATGGGTAGGTCACATGGTTTCGGGTCTACAACATGATACTATGACGCCCTATTAA |
| 12022 | TGCTCATGGGTAGGTCACATGGTTTCGGGTCTACAACATGATACTATGACGCCCTATTAA |
| | ************************************************************ |
| 12023 | GACTCGGTTTCCCTACGGCTCCGTCTCTTCAACTTAACCTCGCATCATATCGTAACTCGC |
| 12024 | GACTCGGTTTCCCTACGGCTCCGTCTCTTCAACTTAACCTCGCATCATATCGTAACTCGC |
| 12019 | GACTCGGTTTCCCTACGGCTCCGTCTCTTCAACTTAACCTCGCATCATATCGTAACTCGC |
| 12021 | GACTCGGTTTCCCTACGGCTCCGTCTCTTCAACTTAACCTCGCATCATATCGTAACTCGC |
| 12020 | GACTCGGTTTCCCTACGGCTCCGTCTCTTCAACTTAACCTCGCATCATATCGTAACTCGC |
| 12018 | GACTCGGTTTCCCTACGGCTCCGTCTCTTCAACTTAACCTCGCATCATATCGTAACTCGC |
| 12022 | GACTCGGTTTCCCTACGGCTCCGTCTCTTCAACTTAACCTCGCATCATATCGTAACTCGC |
| | ************************************************************ |
| 12023 | CGGTTCATTCTACAAAAGGCACGCTCTCACCCATTAACGGGCTCGAACTTGTTGTAGGCA |
| 12024 | CGGTTCATTCTACAAAAGGCACGCTCTCACCCATTAACGGGCTCGAACTTGTTGTAGGCA |
| 12019 | CGGTTCATTCTACAAAAGGCACGCTCTCACCCATTAACGGGCTCGAACTTGTTGTAGGCA |
| 12021 | CGGTTCATTCTACAAAAGGCACGCTCTCACCCATTAACGGGCTCGAACTTGTTGTAGGCA |
| 12020 | CGGTTCATTCTACAAAAGGCACGCTCTCACCCATTAACGGGCTCGAACTTGTTGTAGGCA |
| 12018 | CGGTTCATTCTACAAAAGGCACGCTCTCACCCATTAACGGGCTCGAACTTGTTGTAGGCA |
| 12022 | CGGTTCATTCTACAAAAGGCACGCTCTCACCCATTAACGGGCTCGAACTTGTTGTAGGCA |
| | ************************************************************ |
| 12023 | CACGGTTTCAGGTTCTATTTCACTCCCCTCCCGGGGTGCTTTTCACCTTTCCCTCACGGT |
| 12024 | CACGGTTTCAGGTTCTATTTCACTCCCCTCCCGGGGTGCTTTTCACCTTTCCCTCACGGT |
| 12019 | CACGGTTTCAGGTTCTATTTCACTCCCCTCCCGGGGTGCTTTTCACCTTTCCCTCACGGT |
| 12021 | CACGGTTTCAGGTTCTATTTCACTCCCCTCCCGGGGTGCTTTTCACCTTTCCCTCACGGT |
| 12020 | CACGGTTTCAGGTTCTATTTCACTCCCCTCCCGGGGTGCTTTTCACCTTTCCCTCACGGT |
| 12018 | CACGGTTTCAGGTTCTATTTCACTCCCCTCCCGGGGTGCTTTTCACCTTTCCCTCACGGT |
| 12022 | CACGGTTTCAGGTTCTATTTCACTCCCCTCCCGGGGTGCTTTTCACCTTTCCCTCACGGT |
| | ************************************************************ |
| 12023 | ACTGGTTCACTATCGGTCACTAGAGAGTATTTAGGGTTGGGAGATGGTCCTCCCAGATTC |
| 12024 | ACTGGTTCACTATCGGTCACTAGAGAGTATTTAGGGTTGGGAGATGGTCCTCCCAGATTC |
| 12019 | ACTGGTTCACTATCGGTCACTAGAGAGTATTTAGGGTTGGGAGATGGTCCTCCCAGATTC |
| 12021 | ACTGGTTCACTATCGGTCACTAGAGAGTATTTAGGGTTGGGAGATGGTCCTCCCAGATTC |
| 12020 | ACTGGTTCACTATCGGTCACTAGAGAGTATTTAGGGTTGGGAGATGGTCCTCCCAGATTC |
| 12018 | ACTGGTTCACTATCGGTCACTAGAGAGTATTTAGGGTTGGGAGATGGTCCTCCCAGATTC |
| 12022 | ACTGGTTCACTATCGGTCACTAGAGAGTATTTAGGGTTGGGAGATGGTCCTCCCAGATTC |
| | ************************************************************ |
| 12023 | CGACGAGATTTCGCGTGTCTCGCCGTACTCAGGATACTGCTAAGGTTAATCTATCATTTT |
| 12024 | CGACGAGATTTCGCGTGTCTCGCCGTACTCAGGATACTGCTAAGGTTAATCTATCATTTT |
| 12019 | CGACGAGATTTCGCGTGTCTCGCCGTACTCAGGATACTGCTAAGGTTAATCTATCATTTT |
| 12021 | CGACGAGATTTCGCGTGTCTCGCCGTACTCAGGATACTGCTAAGGTTAATCTATCATTTT |
| 12020 | CGACGAGATTTCGCGTGTCTCGCCGTACTCAGGATACTGCTAAGGTTAATCTATCATTTT |
| 12018 | CGACGAGATTTCGCGTGTCTCGCCGTACTCAGGATACTGCTAAGGTTAATCTATCATTTT |
| 12022 | CGACGAGATTTCGCGTGTCTCGCCGTACTCAGGATACTGCTAAGGTTAATCTATCATTTT |
| | ************************************************************ |
| 12023 | AAATACGAGGCTGTTACTCTCTTTGGCTTACCTTCCCAGGTAATTCTTCTATAATGATTA |
| 12024 | AAATACGAGGCTGTTACTCTCTTTGGCTTACCTTCCCAGGTAATTCTTCTATAATGATTA |
| 12019 | AAATACGAGGCTGTTACTCTCTTTGGCTTACCTTCCCAGGTAATTCTTCTATAATGATTA |
| 12021 | AAATACGAGGCTGTTACTCTCTTTGGCTTACCTTCCCAGGTAATTCTTCTATAATGATTA |
| 12020 | AAATACGAGGCTGTTACTCTCTTTGGCTTACCTTCCCAGGTAATTCTTCTATAATGATTA |
| 12018 | AAATACGAGGCTGTTACTCTCTTTGGCTTACCTTCCCAGGTAATTCTTCTATAATGATTA |
| 12022 | AAATACGAGGCTGTTACTCTCTTTGGCTTACCTTCCCAGGTAATTCTTCTATAATGATTA |
| | ************************************************************ |
| 12023 | ATCCTATATCGCAGTCCTACAACCCCGAAGTGTAAACACTTCGGTTTGCCCTCCTGCCGT |
| 12024 | ATCCTATATCGCAGTCCTACAACCCCGAAGTGTAAACACTTCGGTTTGCCCTCCTGCCGT |
| 12019 | ATCCTATATCGCAGTCCTACAACCCCGAAGTGTAAACACTTCGGTTTGCCCTCCTGCCGT |
| 12021 | ATCCTATATCGCAGTCCTACAACCCCGAAGTGTAAACACTTCGGTTTGCCCTCCTGCCGT |
| 12020 | ATCCTATATCGCAGTCCTACAACCCCGAAGTGTAAACACTTCGGTTTGCCCTCCTGCCGT |
| 12018 | ATCCTATATCGCAGTCCTACAACCCCGAAGTGTAAACACTTCGGTTTGCCCTCCTGCCGT |
| 12022 | ATCCTATATCGCAGTCCTACAACCCCGAAGTGTAAACACTTCGGTTTGCCCTCCTGCCGT |
| | ************************************************************ |
| 12023 | TTCGCTCGCCGCTACTAAGGCAATCGCTTTTGCTTTCTCTTCCTGCAGCTACTTAGATGT |
| 12024 | TTCGCTCGCCGCTACTAAGGCAATCGCTTTTGCTTTCTCTTCCTGCAGCTACTTAGATGT |
| 12019 | TTCGCTCGCCGCTACTAAGGCAATCGCTTTTGCTTTCTCTTCCTGCAGCTACTTAGATGT |
| 12021 | TTCGCTCGCCGCTACTAAGGCAATCGCTTTTGCTTTCTCTTCCTGCAGCTACTTAGATGT |
| 12020 | TTCGCTCGCCGCTACTAAGGCAATCGCTTTTGCTTTCTCTTCCTGCAGCTACTTAGATGT |
| 12018 | TTCGCTCGCCGCTACTAAGGCAATCGCTTTTGCTTTCTCTTCCTGCAGCTACTTAGATGT |
| 12022 | TTCGCTCGCCGCTACTAAGGCAATCGCTTTTGCTTTCTCTTCCTGCAGCTACTTAGATGT |
| | ************************************************************ |
| 12023 | TTCAGTTCACTGCGTCTTCCTTCTCATATCCTTAACAGATATGGATACTAGTCATTAACT |
| 12024 | TTCAGTTCACTGCGTCTTCCTTCTCATATCCTTAACAGATATGGATACTAGTCATTAACT |
| 12019 | TTCAGTTCACTGCGTCTTCCTTCTCATATCCTTAACAGATATGGATACTAGTCATTAACT |
| 12021 | TTCAGTTCACTGCGTCTTCCTTCTCATATCCTTAACAGATATGGATACTAGTCATTAACT |
| 12020 | TTCAGTTCACTGCGTCTTCCTTCTCATATCCTTAACAGATATGGATACTAGTCATTAACT |
| 12018 | TTCAGTTCACTGCGTCTTCCTTCTCATATCCTTAACAGATATGGATACTAGTCATTAACT |
| 12022 | TTCAGTTCACTGCGTCTTCCTTCTCATATCCTTAACAGATATGGATACTAGTCATTAACT |
| | ************************************************************ |
| 12023 | AGTGGGTTCCCCCATTCGGACATCTCTGGATCAGCGCTTACTTACAGCTCCCCAAAGCAT |
| 12024 | AGTGGGTTCCCCCATTCGGACATCTCTGGATCAGCGCTTACTTACAGCTCCCCAAAGCAT |
| 12019 | AGTGGGTTCCCCCATTCGGACATCTCTGGATCAGCGCTTACTTACAGCTCCCCAAAGCAT |
| 12021 | AGTGGGTTCCCCCATTCGGACATCTCTGGATCAGCGCTTACTTACAGCTCCCCAAAGCAT |
| 12020 | AGTGGGTTCCCCCATTCGGACATCTCTGGATCAGCGCTTACTTACAGCTCCCCAAAGCAT |
| 12018 | AGTGGGTTCCCCCATTCGGACATCTCTGGATCAGCGCTTACTTACAGCTCCCCAAAGCAT |
| 12022 | AGTGGGTTCCCCCATTCGGACATCTCTGGATCAGCGCTTACTTACAGCTCCCCAAAGCAT |
| | ************************************************************ |
| 12023 | TTCGTCGTTAGTCACGTCCTTCTTCGGCTTCTAGTGCCAAGGCATCCACCGTGCGCCCTT |
| 12024 | TTCGTCGTTAGTCACGTCCTTCTTCGGCTTCTAGTGCCAAGGCATCCACCGTGCGCCCTT |
| 12019 | TTCGTCGTTAGTCACGTCCTTCTTCGGCTTCTAGTGCCAAGGCATCCACCGTGCGCCCTT |
| 12021 | TTCGTCGTTAGTCACGTCCTTCTTCGGCTTCTAGTGCCAAGGCATCCACCGTGCGCCCTT |
| 12020 | TTCGTCGTTAGTCACGTCCTTCTTCGGCTTCTAGTGCCAAGGCATCCACCGTGCGCCCTT |
| 12018 | TTCGTCGTTAGTCACGTCCTTCTTCGGCTTCTAGTGCCAAGGCATCCACCGTGCGCCCTT |
| 12022 | TTCGTCGTTAGTCACGTCCTTCTTCGGCTTCTAGTGCCAAGGCATCCACCGTGCGCCCTT |
| | ************************************************************ |
| 12023 | ATTAACTTAACCTTATTAACCTAGTTTCTTTAAAACTAGAAAACTCATTAAATATTCACA |
| 12024 | ATTAACTTAACCTTATTAACCTAGTTTCTTTAAAACTAGAAAACTCATTAAATATTCACA |
| 12019 | ATTAACTTAACCTTATTAACCTAGTTTCTTTAAAACTAGAAAACTCATTAAATATTCACA |
| 12021 | ATTAACTTAACCTTATTAACCTAGTTTCTTTAAAACTAGAAAACTCATTAAATATTCACA |
| 12020 | ATTAACTTAACCTTATTAACCTAGTTTCTTTAAAACTAGAAAACTCATTAAATATTCACA |
| 12018 | ATTAACTTAACCTTATTAACCTAGTTTCTTTAAAACTAGAAAACTCATTAAATATTCACA |
| 12022 | ATTAACTTAACCTTATTAACCTAGTTTCTTTAAAACTAGAAAACTCATTAAATATTCACA |
| | ************************************************************ |
| 12023 | GCGTTTTCGGTTTATTTTCTTGTTACTTTCTACAATCTATTTCTAGATCGTGGAATTTGA |
| 12024 | GCGTTTTCGGTTTATTTTCTTGTTACTTTCTACAATCTATTTCTAGATCGTGGAATTTGA |
| 12019 | GCGTTTTCGGTTTATTTTCTTGTTACTTTCTACAATCTATTTCTAGATCGTGGAATTTGA |
| 12021 | GCGTTTTCGGTTTATTTTCTTGTTACTTTCTACAATCTATTTCTAGATCGTGGAATTTGA |
| 12020 | GCGTTTTCGGTTTATTTTCTTGTTACTTTCTACAATCTATTTCTAGATCGTGGAATTTGA |
| 12018 | GCGTTTTCGGTTTATTTTCTTGTTACTTTCTACAATCTATTTCTAGATCGTGGAATTTGA |
| 12022 | GCGTTTTCGGTTTATTTTCTTGTTACTTTCTACAATCTATTTCTAGATCGTGGAATTTGA |
| | ************************************************************ |
| 12023 | TATAGATATTCAATTTTCAATGAACAATTTGAACCTTTCGATTCAATGGAGCCTAGCGGG |
| 12024 | TATAGATATTCAATTTTCAATGAACAATTTGAACCTTTCGATTCAATGGAGCCTAGCGGG |
| 12019 | TATAGATATTCAATTTTCAATGAACAATTTGAACCTTTCGATTCAATGGAGCCTAGCGGG |
| 12021 | TATAGATATTCAATTTTCAATGAACAATTTGAACCTTTCGATTCAATGGAGCCTAGCGGG |
| 12020 | TATAGATATTCAATTTTCAATGAACAATTTGAACCTTTCGATTCAATGGAGCCTAGCGGG |
| 12018 | TATAGATATTCAATTTTCAATGAACAATTTGAACCTTTCGATTCAATGGAGCCTAGCGGG |
| 12022 | TATAGATATTCAATTTTCAATGAACAATTTGAACCTTTCGATTCAATGGAGCCTAGCGGG |
| | ************************************************************ |
| 12023 | ATCGAACCGCTGACCTCCTGCGTGCAAAGCAGGCGCTCTCCCAGCTGAGCTAAGGCCCCA |
| 12024 | ATCGAACCGCTGACCTCCTGCGTGCAAAGCAGGCGCTCTCCCAGCTGAGCTAAGGCCCCA |
| 12019 | ATCGAACCGCTGACCTCCTGCGTGCAAAGCAGGCGCTCTCCCAGCTGAGCTAAGGCCCCA |
| 12021 | ATCGAACCGCTGACCTCCTGCGTGCAAAGCAGGCGCTCTCCCAGCTGAGCTAAGGCCCCA |
| 12020 | ATCGAACCGCTGACCTCCTGCGTGCAAAGCAGGCGCTCTCCCAGCTGAGCTAAGGCCCCA |
| 12018 | ATCGAACCGCTGACCTCCTGCGTGCAAAGCAGGCGCTCTCCCAGCTGAGCTAAGGCCCCA |
| 12022 | ATCGAACCGCTGACCTCCTGCGTGCAAAGCAGGCGCTCTCCCAGCTGAGCTAAGGCCCCA |
| | ************************************************************ |
| 12023 | CAAGACCTCTCAAAACTAAACAAGACGCAAATGGCAGGTTTCCTTATCCTTAGAAAGGAG |
| 12024 | CAAGACCTCTCAAAACTAAACAAGACGCAAATGGCAGGTTTCCTTATCCTTAGAAAGGAG |
| 12019 | CAAGACCTCTCAAAACTAAACAAGACGCAAATGGCAGGTTTCCTTATCCTTAGAAAGGAG |
| 12021 | CAAGACCTCTCAAAACTAAACAAGACGCAAATGGCAGGTTTCCTTATCCTTAGAAAGGAG |
| 12020 | CAAGACCTCTCAAAACTAAACAAGACGCAAATGGCAGGTTTCCTTATCCTTAGAAAGGAG |
| 12018 | CAAGACCTCTCAAAACTAAACAAGACGCAAATGGCAGGTTTCCTTATCCTTAGAAAGGAG |
| 12022 | CAAGACCTCTCAAAACTAAACAAGACGCAAATGGCAGGTTTCCTTATCCTTAGAAAGGAG |
| | ************************************************************ |
| 12023 | GTGATCCAGCCGCACCTTCCGATACGGCTACCTTGTTACGACTTCACCCCAATCATCTAT |
| 12024 | GTGATCCAGCCGCACCTTCCGATACGGCTACCTTGTTACGACTTCACCCCAATCATCTAT |
| 12019 | GTGATCCAGCCGCACCTTCCGATACGGCTACCTTGTTACGACTTCACCCCAATCATCTAT |
| 12021 | GTGATCCAGCCGCACCTTCCGATACGGCTACCTTGTTACGACTTCACCCCAATCATCTAT |
| 12020 | GTGATCCAGCCGCACCTTCCGATACGGCTACCTTGTTACGACTTCACCCCAATCATCTAT |
| 12018 | GTGATCCAGCCGCACCTTCCGATACGGCTACCTTGTTACGACTTCACCCCAATCATCTAT |
| 12022 | GTGATCCAGCCGCACCTTCCGATACGGCTACCTTGTTACGACTTCACCCCAATCATCTAT |
| | ************************************************************ |
| 12023 | CCCACCTTAGGCGGCTGGCTCCTAAAAGGTTACCTCACCGACTTCGGGTGTTACAAACTC |
| 12024 | CCCACCTTAGGCGGCTGGCTCCTAAAAGGTTACCTCACCGACTTCGGGTGTTACAAACTC |
| 12019 | CCCACCTTAGGCGGCTGGCTCCTAAAAGGTTACCTCACCGACTTCGGGTGTTACAAACTC |
| 12021 | CCCACCTTAGGCGGCTGGCTCCTAAAAGGTTACCTCACCGACTTCGGGTGTTACAAACTC |
| 12020 | CCCACCTTAGGCGGCTGGCTCCTAAAAGGTTACCTCACCGACTTCGGGTGTTACAAACTC |
| 12018 | CCCACCTTAGGCGGCTGGCTCCTAAAAGGTTACCTCACCGACTTCGGGTGTTACAAACTC |
| 12022 | CCCACCTTAGGCGGCTGGCTCCTAAAAGGTTACCTCACCGACTTCGGGTGTTACAAACTC |
| | ************************************************************ |
| 12023 | TCGTGGTGTGACGGGCGGTGTGTACAAGGCCCGGGAACGTATTCACCGCGGCGTGCTGAT |
| 12024 | TCGTGGTGTGACGGGCGGTGTGTACAAGGCCCGGGAACGTATTCACCGCGGCGTGCTGAT |
| 12019 | TCGTGGTGTGACGGGCGGTGTGTACAAGGCCCGGGAACGTATTCACCGCGGCGTGCTGAT |
| 12021 | TCGTGGTGTGACGGGCGGTGTGTACAAGGCCCGGGAACGTATTCACCGCGGCGTGCTGAT |
| 12020 | TCGTGGTGTGACGGGCGGTGTGTACAAGGCCCGGGAACGTATTCACCGCGGCGTGCTGAT |
| 12018 | TCGTGGTGTGACGGGCGGTGTGTACAAGGCCCGGGAACGTATTCACCGCGGCGTGCTGAT |
| 12022 | TCGTGGTGTGACGGGCGGTGTGTACAAGGCCCGGGAACGTATTCACCGCGGCGTGCTGAT |
| | ************************************************************ |
| 12023 | CCGCGATTACTAGCGATTCCGACTTCATGTAGGCGAGTTGCAGCCTACAATCCGAACTGA |
| 12024 | CCGCGATTACTAGCGATTCCGACTTCATGTAGGCGAGTTGCAGCCTACAATCCGAACTGA |
| 12019 | CCGCGATTACTAGCGATTCCGACTTCATGTAGGCGAGTTGCAGCCTACAATCCGAACTGA |
| 12021 | CCGCGATTACTAGCGATTCCGACTTCATGTAGGCGAGTTGCAGCCTACAATCCGAACTGA |
| 12020 | CCGCGATTACTAGCGATTCCGACTTCATGTAGGCGAGTTGCAGCCTACAATCCGAACTGA |
| 12018 | CCGCGATTACTAGCGATTCCGACTTCATGTAGGCGAGTTGCAGCCTACAATCCGAACTGA |
| 12022 | CCGCGATTACTAGCGATTCCGACTTCATGTAGGCGAGTTGCAGCCTACAATCCGAACTGA |
| | ************************************************************ |
| 12023 | GATTGGCTTTAAGAGATTAGCTTGCCGTCACCGGCTTGCGACTCGTTGTACCAACCATTG |
| 12024 | GATTGGCTTTAAGAGATTAGCTTGCCGTCACCGGCTTGCGACTCGTTGTACCAACCATTG |
| 12019 | GATTGGCTTTAAGAGATTAGCTTGCCGTCACCGGCTTGCGACTCGTTGTACCAACCATTG |
| 12021 | GATTGGCTTTAAGAGATTAGCTTGCCGTCACCGGCTTGCGACTCGTTGTACCAACCATTG |
| 12020 | GATTGGCTTTAAGAGATTAGCTTGCCGTCACCGGCTTGCGACTCGTTGTACCAACCATTG |
| 12018 | GATTGGCTTTAAGAGATTAGCTTGCCGTCACCGGCTTGCGACTCGTTGTACCAACCATTG |
| 12022 | GATTGGCTTTAAGAGATTAGCTTGCCGTCACCGGCTTGCGACTCGTTGTACCAACCATTG |
| | ************************************************************ |
| 12023 | TAGCACGTGTGTAGCCCAGGTCATAAGGGGCATGATGATTTGACGTCATCCCCACCTTCC |
| 12024 | TAGCACGTGTGTAGCCCAGGTCATAAGGGGCATGATGATTTGACGTCATCCCCACCTTCC |
| 12019 | TAGCACGTGTGTAGCCCAGGTCATAAGGGGCATGATGATTTGACGTCATCCCCACCTTCC |
| 12021 | TAGCACGTGTGTAGCCCAGGTCATAAGGGGCATGATGATTTGACGTCATCCCCACCTTCC |
| 12020 | TAGCACGTGTGTAGCCCAGGTCATAAGGGGCATGATGATTTGACGTCATCCCCACCTTCC |
| 12018 | TAGCACGTGTGTAGCCCAGGTCATAAGGGGCATGATGATTTGACGTCATCCCCACCTTCC |
| 12022 | TAGCACGTGTGTAGCCCAGGTCATAAGGGGCATGATGATTTGACGTCATCCCCACCTTCC |
| | ************************************************************ |
| 12023 | TCCGGTTTATTACCGGCAGTCTCGCTAGAGTGCCCAACTTAATGATGGCAACTAACAATA |
| 12024 | TCCGGTTTATTACCGGCAGTCTCGCTAGAGTGCCCAACTTAATGATGGCAACTAACAATA |
| 12019 | TCCGGTTTATTACCGGCAGTCTCGCTAGAGTGCCCAACTTAATGATGGCAACTAACAATA |
| 12021 | TCCGGTTTATTACCGGCAGTCTCGCTAGAGTGCCCAACTTAATGATGGCAACTAACAATA |
| 12020 | TCCGGTTTATTACCGGCAGTCTCGCTAGAGTGCCCAACTTAATGATGGCAACTAACAATA |
| 12018 | TCCGGTTTATTACCGGCAGTCTCGCTAGAGTGCCCAACTTAATGATGGCAACTAACAATA |
| 12022 | TCCGGTTTATTACCGGCAGTCTCGCTAGAGTGCCCAACTTAATGATGGCAACTAACAATA |
| | ************************************************************ |
| 12023 | GGGGTTGCGCTCGTTGCGGGACTTAACCCAACATCTCACGACACGAGCTGACGACAACCA |
| 12024 | GGGGTTGCGCTCGTTGCGGGACTTAACCCAACATCTCACGACACGAGCTGACGACAACCA |
| 12019 | GGGGTTGCGCTCGTTGCGGGACTTAACCCAACATCTCACGACACGAGCTGACGACAACCA |
| 12021 | GGGGTTGCGCTCGTTGCGGGACTTAACCCAACATCTCACGACACGAGCTGACGACAACCA |
| 12020 | GGGGTTGCGCTCGTTGCGGGACTTAACCCAACATCTCACGACACGAGCTGACGACAACCA |
| 12018 | GGGGTTGCGCTCGTTGCGGGACTTAACCCAACATCTCACGACACGAGCTGACGACAACCA |
| 12022 | GGGGTTGCGCTCGTTGCGGGACTTAACCCAACATCTCACGACACGAGCTGACGACAACCA |
| | ************************************************************ |
| 12023 | TGCACCACCTGTCACTTCTGCTCCGAAGAGAAAGCCTATCTCTAGGCCGGTCAGAAGGAT |
| 12024 | TGCACCACCTGTCACTTCTGCTCCGAAGAGAAAGCCTATCTCTAGGCCGGTCAGAAGGAT |
| 12019 | TGCACCACCTGTCACTTCTGCTCCGAAGAGAAAGCCTATCTCTAGGCCGGTCAGAAGGAT |
| 12021 | TGCACCACCTGTCACTTCTGCTCCGAAGAGAAAGCCTATCTCTAGGCCGGTCAGAAGGAT |
| 12020 | TGCACCACCTGTCACTTCTGCTCCGAAGAGAAAGCCTATCTCTAGGCCGGTCAGAAGGAT |
| 12018 | TGCACCACCTGTCACTTCTGCTCCGAAGAGAAAGCCTATCTCTAGGCCGGTCAGAAGGAT |
| 12022 | TGCACCACCTGTCACTTCTGCTCCGAAGAGAAAGCCTATCTCTAGGCCGGTCAGAAGGAT |
| | ************************************************************ |
| 12023 | GTCAAGACCTGGTAAGGTTCTTCGCGTTGCTTCGAATTAAACCACATGCTCCACCGCTTG |
| 12024 | GTCAAGACCTGGTAAGGTTCTTCGCGTTGCTTCGAATTAAACCACATGCTCCACCGCTTG |
| 12019 | GTCAAGACCTGGTAAGGTTCTTCGCGTTGCTTCGAATTAAACCACATGCTCCACCGCTTG |
| 12021 | GTCAAGACCTGGTAAGGTTCTTCGCGTTGCTTCGAATTAAACCACATGCTCCACCGCTTG |
| 12020 | GTCAAGACCTGGTAAGGTTCTTCGCGTTGCTTCGAATTAAACCACATGCTCCACCGCTTG |
| 12018 | GTCAAGACCTGGTAAGGTTCTTCGCGTTGCTTCGAATTAAACCACATGCTCCACCGCTTG |
| 12022 | GTCAAGACCTGGTAAGGTTCTTCGCGTTGCTTCGAATTAAACCACATGCTCCACCGCTTG |
| | ************************************************************ |
| 12023 | TGCGGGCCCCCGTCAATTCCTTTGAGTTTCAACCTTGCGGTCGTACTCCCCAGGCGGAGT |
| 12024 | TGCGGGCCCCCGTCAATTCCTTTGAGTTTCAACCTTGCGGTCGTACTCCCCAGGCGGAGT |
| 12019 | TGCGGGCCCCCGTCAATTCCTTTGAGTTTCAACCTTGCGGTCGTACTCCCCAGGCGGAGT |
| 12021 | TGCGGGCCCCCGTCAATTCCTTTGAGTTTCAACCTTGCGGTCGTACTCCCCAGGCGGAGT |
| 12020 | TGCGGGCCCCCGTCAATTCCTTTGAGTTTCAACCTTGCGGTCGTACTCCCCAGGCGGAGT |
| 12018 | TGCGGGCCCCCGTCAATTCCTTTGAGTTTCAACCTTGCGGTCGTACTCCCCAGGCGGAGT |
| 12022 | TGCGGGCCCCCGTCAATTCCTTTGAGTTTCAACCTTGCGGTCGTACTCCCCAGGCGGAGT |
| | ************************************************************ |
| 12023 | GCTTAATGCGTTAGCTGCGGCACTAAGCCCCGGAAAGGGCCTAACACCTAGCACTCATCG |
| 12024 | GCTTAATGCGTTAGCTGCGGCACTAAGCCCCGGAAAGGGCCTAACACCTAGCACTCATCG |
| 12019 | GCTTAATGCGTTAGCTGCGGCACTAAGCCCCGGAAAGGGCCTAACACCTAGCACTCATCG |
| 12021 | GCTTAATGCGTTAGCTGCGGCACTAAGCCCCGGAAAGGGCCTAACACCTAGCACTCATCG |
| 12020 | GCTTAATGCGTTAGCTGCGGCACTAAGCCCCGGAAAGGGCCTAACACCTAGCACTCATCG |
| 12018 | GCTTAATGCGTTAGCTGCGGCACTAAGCCCCGGAAAGGGCCTAACACCTAGCACTCATCG |
| 12022 | GCTTAATGCGTTAGCTGCGGCACTAAGCCCCGGAAAGGGCCTAACACCTAGCACTCATCG |
| | ************************************************************ |
| 12023 | TTTACGGCGTGGACTACCAGGGTATCTAATCCTGTTTGCTCCCCACGCTTTCGAGCCTCA |
| 12024 | TTTACGGCGTGGACTACCAGGGTATCTAATCCTGTTTGCTCCCCACGCTTTCGAGCCTCA |
| 12019 | TTTACGGCGTGGACTACCAGGGTATCTAATCCTGTTTGCTCCCCACGCTTTCGAGCCTCA |
| 12021 | TTTACGGCGTGGACTACCAGGGTATCTAATCCTGTTTGCTCCCCACGCTTTCGAGCCTCA |
| 12020 | TTTACGGCGTGGACTACCAGGGTATCTAATCCTGTTTGCTCCCCACGCTTTCGAGCCTCA |
| 12018 | TTTACGGCGTGGACTACCAGGGTATCTAATCCTGTTTGCTCCCCACGCTTTCGAGCCTCA |
| 12022 | TTTACGGCGTGGACTACCAGGGTATCTAATCCTGTTTGCTCCCCACGCTTTCGAGCCTCA |
| | ************************************************************ |
| 12023 | GCGTCAGTTACAGACCAGAGAGCCGCTTTCGCCACCGGTGTTCCTCCATATATCTACGCA |
| 12024 | GCGTCAGTTACAGACCAGAGAGCCGCTTTCGCCACCGGTGTTCCTCCATATATCTACGCA |
| 12019 | GCGTCAGTTACAGACCAGAGAGCCGCTTTCGCCACCGGTGTTCCTCCATATATCTACGCA |
| 12021 | GCGTCAGTTACAGACCAGAGAGCCGCTTTCGCCACCGGTGTTCCTCCATATATCTACGCA |
| 12020 | GCGTCAGTTACAGACCAGAGAGCCGCTTTCGCCACCGGTGTTCCTCCATATATCTACGCA |
| 12018 | GCGTCAGTTACAGACCAGAGAGCCGCTTTCGCCACCGGTGTTCCTCCATATATCTACGCA |
| 12022 | GCGTCAGTTACAGACCAGAGAGCCGCTTTCGCCACCGGTGTTCCTCCATATATCTACGCA |
| | ************************************************************ |
| 12023 | TTTCACCGCTACACATGGAATTCCACTCTCCCCTTCTGCACTCAAGTCCTCCAGTTTCCA |
| 12024 | TTTCACCGCTACACATGGAATTCCACTCTCCCCTTCTGCACTCAAGTCCTCCAGTTTCCA |
| 12019 | TTTCACCGCTACACATGGAATTCCACTCTCCCCTTCTGCACTCAAGTCCTCCAGTTTCCA |
| 12021 | TTTCACCGCTACACATGGAATTCCACTCTCCCCTTCTGCACTCAAGTCCTCCAGTTTCCA |
| 12020 | TTTCACCGCTACACATGGAATTCCACTCTCCCCTTCTGCACTCAAGTCCTCCAGTTTCCA |
| 12018 | TTTCACCGCTACACATGGAATTCCACTCTCCCCTTCTGCACTCAAGTCCTCCAGTTTCCA |
| 12022 | TTTCACCGCTACACATGGAATTCCACTCTCCCCTTCTGCACTCAAGTCCTCCAGTTTCCA |
| | ************************************************************ |
| 12023 | AAGCGTACAATGGTTAAGCCACTGCCTTTAACTTCAGACTTAAAGAACCGCCTGCGCTCG |
| 12024 | AAGCGTACAATGGTTAAGCCACTGCCTTTAACTTCAGACTTAAAGAACCGCCTGCGCTCG |
| 12019 | AAGCGTACAATGGTTAAGCCACTGCCTTTAACTTCAGACTTAAAGAACCGCCTGCGCTCG |
| 12021 | AAGCGTACAATGGTTAAGCCACTGCCTTTAACTTCAGACTTAAAGAACCGCCTGCGCTCG |
| 12020 | AAGCGTACAATGGTTAAGCCACTGCCTTTAACTTCAGACTTAAAGAACCGCCTGCGCTCG |
| 12018 | AAGCGTACAATGGTTAAGCCACTGCCTTTAACTTCAGACTTAAAGAACCGCCTGCGCTCG |
| 12022 | AAGCGTACAATGGTTAAGCCACTGCCTTTAACTTCAGACTTAAAGAACCGCCTGCGCTCG |
| | ************************************************************ |
| 12023 | CTTTACGCCCAATAAATCCGGACAACGCTCGGGACCTACGTATTACCGCGGCTGCTGGCA |
| 12024 | CTTTACGCCCAATAAATCCGGACAACGCTCGGGACCTACGTATTACCGCGGCTGCTGGCA |
| 12019 | CTTTACGCCCAATAAATCCGGACAACGCTCGGGACCTACGTATTACCGCGGCTGCTGGCA |
| 12021 | CTTTACGCCCAATAAATCCGGACAACGCTCGGGACCTACGTATTACCGCGGCTGCTGGCA |
| 12020 | CTTTACGCCCAATAAATCCGGACAACGCTCGGGACCTACGTATTACCGCGGCTGCTGGCA |
| 12018 | CTTTACGCCCAATAAATCCGGACAACGCTCGGGACCTACGTATTACCGCGGCTGCTGGCA |
| 12022 | CTTTACGCCCAATAAATCCGGACAACGCTCGGGACCTACGTATTACCGCGGCTGCTGGCA |
| | ************************************************************ |
| 12023 | CGTAGTTAGCCGTCCCTTTCTGGTTAGTTACCGTCACTTGGTAGATTTTCCACTCCTACC |
| 12024 | CGTAGTTAGCCGTCCCTTTCTGGTTAGTTACCGTCACTTGGTAGATTTTCCACTCCTACC |
| 12019 | CGTAGTTAGCCGTCCCTTTCTGGTTAGTTACCGTCACTTGGTAGATTTTCCACTCCTACC |
| 12021 | CGTAGTTAGCCGTCCCTTTCTGGTTAGTTACCGTCACTTGGTAGATTTTCCACTCCTACC |
| 12020 | CGTAGTTAGCCGTCCCTTTCTGGTTAGTTACCGTCACTTGGTAGATTTTCCACTCCTACC |
| 12018 | CGTAGTTAGCCGTCCCTTTCTGGTTAGTTACCGTCACTTGGTAGATTTTCCACTCCTACC |
| 12022 | CGTAGTTAGCCGTCCCTTTCTGGTTAGTTACCGTCACTTGGTAGATTTTCCACTCCTACC |
| | ************************************************************ |
| 12023 | AACGTTCTTCTCTAACAACAGAGCTTTACGATCCGAAAACCTTCTTCACTCACGCGGCGT |
| 12024 | AACGTTCTTCTCTAACAACAGAGCTTTACGATCCGAAAACCTTCTTCACTCACGCGGCGT |
| 12019 | AACGTTCTTCTCTAACAACAGAGCTTTACGATCCGAAAACCTTCTTCACTCACGCGGCGT |
| 12021 | AACGTTCTTCTCTAACAACAGAGCTTTACGATCCGAAAACCTTCTTCACTCACGCGGCGT |
| 12020 | AACGTTCTTCTCTAACAACAGAGCTTTACGATCCGAAAACCTTCTTCACTCACGCGGCGT |
| 12018 | AACGTTCTTCTCTAACAACAGAGCTTTACGATCCGAAAACCTTCTTCACTCACGCGGCGT |
| 12022 | AACGTTCTTCTCTAACAACAGAGCTTTACGATCCGAAAACCTTCTTCACTCACGCGGCGT |
| | ************************************************************ |
| 12023 | TGCTCGGTCAGACTTCCGTCCATTGCCGAAGATTCCCTACTGCTGCCTCCCGTAGGAGTC |
| 12024 | TGCTCGGTCAGACTTCCGTCCATTGCCGAAGATTCCCTACTGCTGCCTCCCGTAGGAGTC |
| 12019 | TGCTCGGTCAGACTTCCGTCCATTGCCGAAGATTCCCTACTGCTGCCTCCCGTAGGAGTC |
| 12021 | TGCTCGGTCAGACTTCCGTCCATTGCCGAAGATTCCCTACTGCTGCCTCCCGTAGGAGTC |
| 12020 | TGCTCGGTCAGACTTCCGTCCATTGCCGAAGATTCCCTACTGCTGCCTCCCGTAGGAGTC |
| 12018 | TGCTCGGTCAGACTTCCGTCCATTGCCGAAGATTCCCTACTGCTGCCTCCCGTAGGAGTC |
| 12022 | TGCTCGGTCAGACTTCCGTCCATTGCCGAAGATTCCCTACTGCTGCCTCCCGTAGGAGTC |
| | ************************************************************ |
| 12023 | TGGGCCGTGTCTCAGTCCCAGTGTGGCCGATCACCCTCTCAGGTCGGCTATGTATCGTCG |
| 12024 | TGGGCCGTGTCTCAGTCCCAGTGTGGCCGATCACCCTCTCAGGTCGGCTATGTATCGTCG |
| 12019 | TGGGCCGTGTCTCAGTCCCAGTGTGGCCGATCACCCTCTCAGGTCGGCTATGTATCGTCG |
| 12021 | TGGGCCGTGTCTCAGTCCCAGTGTGGCCGATCACCCTCTCAGGTCGGCTATGTATCGTCG |
| 12020 | TGGGCCGTGTCTCAGTCCCAGTGTGGCCGATCACCCTCTCAGGTCGGCTATGTATCGTCG |
| 12018 | TGGGCCGTGTCTCAGTCCCAGTGTGGCCGATCACCCTCTCAGGTCGGCTATGTATCGTCG |
| 12022 | TGGGCCGTGTCTCAGTCCCAGTGTGGCCGATCACCCTCTCAGGTCGGCTATGTATCGTCG |
| | ************************************************************ |
| 12023 | CCTTGGTGAGCCTTTACCTCACCAACTAGCTAATACAACGCAGGTCCATCTCACAGTGAA |
| 12024 | CCTTGGTGAGCCTTTACCTCACCAACTAGCTAATACAACGCAGGTCCATCTCACAGTGAA |
| 12019 | CCTTGGTGAGCCTTTACCTCACCAACTAGCTAATACAACGCAGGTCCATCTCACAGTGAA |
| 12021 | CCTTGGTGAGCCTTTACCTCACCAACTAGCTAATACAACGCAGGTCCATCTCACAGTGAA |
| 12020 | CCTTGGTGAGCCTTTACCTCACCAACTAGCTAATACAACGCAGGTCCATCTCACAGTGAA |
| 12018 | CCTTGGTGAGCCTTTACCTCACCAACTAGCTAATACAACGCAGGTCCATCTCACAGTGAA |
| 12022 | CCTTGGTGAGCCTTTACCTCACCAACTAGCTAATACAACGCAGGTCCATCTCACAGTGAA |
| | ************************************************************ |
| 12023 | GCAATTGCTCCTTTTAAATAACTAACATGTGTTAATTACTCTTATGCGGTATTAGCTATC |
| 12024 | GCAATTGCTCCTTTTAAATAACTAACATGTGTTAATTACTCTTATGCGGTATTAGCTATC |
| 12019 | GCAATTGCTCCTTTTAAATAACTAACATGTGTTAATTACTCTTATGCGGTATTAGCTATC |
| 12021 | GCAATTGCTCCTTTTAAATAACTAACATGTGTTAATTACTCTTATGCGGTATTAGCTATC |
| 12020 | GCAATTGCTCCTTTTAAATAACTAACATGTGTTAATTACTCTTATGCGGTATTAGCTATC |
| 12018 | GCAATTGCTCCTTTTAAATAACTAACATGTGTTAATTACTCTTATGCGGTATTAGCTATC |
| 12022 | GCAATTGCTCCTTTTAAATAACTAACATGTGTTAATTACTCTTATGCGGTATTAGCTATC |
| | ************************************************************ |
| 12023 | GTTTCCAATAGTTATCCCCCGCTATGAGGCAGGTTACCTACGCGTTACTCACCCGTTCGC |
| 12024 | GTTTCCAATAGTTATCCCCCGCTATGAGGCAGGTTACCTACGCGTTACTCACCCGTTCGC |
| 12019 | GTTTCCAATAGTTATCCCCCGCTATGAGGCAGGTTACCTACGCGTTACTCACCCGTTCGC |
| 12021 | GTTTCCAATAGTTATCCCCCGCTATGAGGCAGGTTACCTACGCGTTACTCACCCGTTCGC |
| 12020 | GTTTCCAATAGTTATCCCCCGCTATGAGGCAGGTTACCTACGCGTTACTCACCCGTTCGC |
| 12018 | GTTTCCAATAGTTATCCCCCGCTATGAGGCAGGTTACCTACGCGTTACTCACCCGTTCGC |
| 12022 | GTTTCCAATAGTTATCCCCCGCTATGAGGCAGGTTACCTACGCGTTACTCACCCGTTCGC |
| | ************************************************************ |
| 12023 | AACTCATCAGTCTAGTGTAAACACCAAACCTCAGCGTTCTACTTGCATGTATTAGGCACG |
| 12024 | AACTCATCAGTCTAGTGTAAACACCAAACCTCAGCGTTCTACTTGCATGTATTAGGCACG |
| 12019 | AACTCATCAGTCTAGTGTAAACACCAAACCTCAGCGTTCTACTTGCATGTATTAGGCACG |
| 12021 | AACTCATCAGTCTAGTGTAAACACCAAACCTCAGCGTTCTACTTGCATGTATTAGGCACG |
| 12020 | AACTCATCAGTCTAGTGTAAACACCAAACCTCAGCGTTCTACTTGCATGTATTAGGCACG |
| 12018 | AACTCATCAGTCTAGTGTAAACACCAAACCTCAGCGTTCTACTTGCATGTATTAGGCACG |
| 12022 | AACTCATCAGTCTAGTGTAAACACCAAACCTCAGCGTTCTACTTGCATGTATTAGGCACG |
| | ************************************************************ |
| 12023 | CCGCCAGCGTTCGTCCTGAGCCAGGATCAAACTCTCATTAAAAGTTTGAGCTTTGCTCTT |
| 12024 | CCGCCAGCGTTCGTCCTGAGCCAGGATCAAACTCTCATTAAAAGTTTGAGCTTTGCTCTT |
| 12019 | CCGCCAGCGTTCGTCCTGAGCCAGGATCAAACTCTCATTAAAAGTTTGAGCTTTGCTCTT |
| 12021 | CCGCCAGCGTTCGTCCTGAGCCAGGATCAAACTCTCATTAAAAGTTTGAGCTTTGCTCTT |
| 12020 | CCGCCAGCGTTCGTCCTGAGCCAGGATCAAACTCTCATTAAAAGTTTGAGCTTTGCTCTT |
| 12018 | CCGCCAGCGTTCGTCCTGAGCCAGGATCAAACTCTCATTAAAAGTTTGAGCTTTGCTCTT |
| 12022 | CCGCCAGCGTTCGTCCTGAGCCAGGATCAAACTCTCATTAAAAGTTTGAGCTTTGCTCTT |
| | ************************************************************ |
| 12023 | TTCTGTCTCGCTGACAGATTTATTGTTTTTT-GTCATTGACGGATTTACAATGTAAATCC |
| 12024 | TTCTGTCTCGCTGACAGATTTATTGTTTTTTTGTCATTGACGGATTTACAATGTAAATCC |
| 12019 | TTCTGTCTCGCTGACAGATTTATTGTTTTTT-GTCATTGACGGATTTACAATGTAAATCC |
| 12021 | TTCTGTCTCGCTGACAGATTTATTGTTTTTTTGTCATTGACGGATTTACAATGTAAATCC |
| 12020 | TTCTGTCTCGCTGACAGATTTATTGTTTTTTTGTCATTGACGGATTTACAATGTAAATCC |
| 12018 | TTCTGTCTCGCTGACAGATTTATTGTTTTTT-GTCATTGACGGATTTACAATGTAAATCC |
| 12022 | TTCTGTCTCGCTGACAGATTTATTGTTTTTT-GTCATTGACGGATTTACAATGTAAATCC |
| | ******************************* **************************** |
| 12023 | ACCCTGCACATTCGTTCGTCTTGTTCAGTTTTCAAAGGTCTAATGATATATCATAAAAAT |
| 12024 | ACCCTGCACATTCGTTCGTCTTGTTCAGTTTTCAAAGGTCTTTGCCTCTCTTGAGACAAC |
| 12019 | ACCCTGCACATTCGTTCGTCTTGTTCAGTTTTCAAAGGTCTTTGCCTCTCTTGAGACAAC |
| 12021 | ACCCTGCACATTCGTTCGTCTTGTTCAGTTTTCAAAGGTCTTTGCCTCTCTTGAGACAAC |
| 12020 | ACCCTGCACATTCGTTCGTCTTGTTCAGTTTTCAAAGGTCTTTGCCTCTCTTGAGACAAC |
| 12018 | ACCCTGCACATTCGTTCATCTTGTTCAGTTTTCAAAGGTCTTTGCCTCTCTTGAGACAAC |
| 12022 | ACCCTGCACATTCGTTCGTCTTGTTCAGTTTTCAAAGGTCTTTGCCTCTCTTGAGACAAC |
| | ***************** *********************** * * * * ** |
| 12023 | ATATCCATCGGGAAGACAGGATTCGAACCTG-CGACACCTTGGTCCCAAACCAAGTACTC |
| 12024 | TTCTATATTCTAGCAAACTTATTCTGCTTTGTCAACTACTTTTTTTTAAGTTGTTAACTA |
| 12019 | TTCTATATTCTAGCAAACTTATTCTGCTTTGTCAACTACTTT-TTTTAAGTTGTTAACTA |
| 12021 | TTCTATATTCTAGCAAACTTATTCTGCTTTGTCAACTACTTT-TTTTAAGTTGTTAACTA |
| 12020 | TTCTATATTCTAGCAAACTTATTCTGCTTTGTCAACTACTTT-TTTTAAGTTGTTAACTA |
| 12018 | TTCTATATTCTAGCAAACTTATTCTGCTTTGTCAACTACTTT-TTTTAAGTTGTTTATAA |
| 12022 | TTCTATATTCTAGCAAACTTATTCTGCTTTGTCAACTACTTT-TTTTAAGTTGTTAACTA |
| | * * ** * **** ** * ** *** * ** * |
| 12023 | TACCAAGCTG--A-GCTACT-TCCCGAAAAA---TATGCACC---CTAGAGGAGTCGAAC |
| 12024 | CGCGTTACTAGAA-GCTGCTCTCTCGAGACAACTTATTCATTATACTAAATATTTCTACT |
| 12019 | CGCGCTAATAGAA-ACTGCTCTCTCGAGACAACTTATTCATTATACTAAATATTTCTACT |
| 12021 | CGCGCTAATAGAA-ACTGCTCTCTCGAGACAACTTATTTAGTTTACTACATCATCTCTTA |
| 12020 | CGCGCTAATAGAA-ACTGCTCTCTCGAGACAACTTATTTAGTTTACTACATCATCTCTTA |
| 12018 | AATGATAATACAATATTAGGTTCGCTTAAGAACTCATTTAGTATACTATAATTTTTTATT |
| 12022 | CGCGCTAATAGAA-ACTGCTCTCTCGAGACAACTTATTTAGTTTACTACATCATCTCTTA |
| | * * * ** * * * ** * *** * |
| 12023 | CTCTAACCGCCTGATTCGTA-GTCAGGTACTCTATCC-------AGTTGA----GCTAAG |
| 12024 | TCCTGTCAATACTATTTTTGCATTTTTTCTTTTATTTTTAAA-AAGTTAATATTATTTAT |
| 12019 | TCCTGTCAATACTATTTTTGTA---TTTTATAAATTTAGTAT-AGACATAACTATTCCTC |
| 12021 | CTTTGTCAACTCTTTTTTCATACT-TTTTCTACATTTTCTGA-AAATGTAGATCAGGCTC |
| 12020 | CTTTGTCAACTCTTTTTTCATACT-TTTTCTACATTTTCTGA-AAATGTAGATAGAGCGC |
| 12018 | TGTTGTCAATAGGTTTTAAAAA-----------AATCTCAGAGAAAACCCTGAGATTTTT |
| 12022 | CTTTGTCAACTCTTTTTTCATACT-TTTTCTACATTTTCTGAAAAAAGTTTCCTGTTGGC |
| | * * ** * |
| 12023 | GGTGCTAAAT--------ATTATATGCCGA-------GGACCGGAATC-------G---A |
| 12024 | AGTAACTAAC--------CTTCTATACTTGTTGA-ATGGATAGCATTT-------T---T |
| 12019 | TATATTCAATTAAGAGAAATTATATAACCACTATTGAGAAATGTAGTC-------T---A |
| 12021 | AA-GCTTAAC---GATTCTTTTTAAAATCATTA-----AATTTTAAAA-------C---A |
| 12020 | AAGAAAAAAAGAGGTCTCACCTCTTTTTATTTCTTAGTAACTACTACA-------A---A |
| 12018 | TAAATT--ATGTTACAAAGTT--AATTTCCTT-----TAGCTTCAATT---------AAA |
| 12022 | TAACACCAATAACATAGAGTTTAAAATTCCATAC--CTAAATTTATTTTATTAGTAAAAA |
| | * |
| 12023 | ACCGGTACGATGTTTACC-A--TCGCAGGATTTTAAGTCCTGTGCGTCTGC--CAGTTCC |
| 12024 | ACCGTTGTCATGTTCAT--A--TTTCATCTTCTTAATTCACAAATTTAAACTTCATCTTC |
| 12019 | GCGATTAAATTCTTTGCTCA--TCGAA-AATATCCAATAAATATAATAATGCATAAAACG |
| 12021 | AATTTCAGACATGTTGC------CAAA-GTTTTGATATTATTACTATAAT--ATAGTTTG |
| 12020 | TCTATTAGGATCGTTACCTT--CAGAATAACTTTCAACACCCTCTATAGT-TGCAATTGT |
| 12018 | CCTAGTTCGCCATCTTCACG-CTTGTAAAGGACATTTGTCGTATTATCTTCTGCATCT-- |
| 12022 | AATAAAAGATGGGCTAGCCATCTTTTATAATATTTGTTTTTTATATTCTTCAGCTTCTTG |
| | * * |
| 12023 | G-CCA--------CCCCGGCCTCTAACAAGCGAACGACGGGGTTCGAA-CCCGCGACCCT |
| 12024 | A-TAAAAAATACCCTTCAAATTTTATCTAAATTTGAAGGGTATTTGAAATTTATAAAGTT |
| 12019 | C-CTGCTTACGAAATATAAACAAA-ATTGTTTGCAT--TTCGTAAACAAGCGTTACCTAT |
| 12021 | T-AGAGGAGAATAATATGGGCCAA-GAACCTATCAT--CGAATATCAAAATAT----CAA |
| 12020 | T-TTATGAACAGTTTTTCGCTCACTGTTACTCATAGGATCCATATGGTAAGGTTCATTAG |
| 12018 | --GTATAGATAAAGAAATCATGACCTAAAAGTTCCATTTGCAACAATGCTTCCTCAACAT |
| 12022 | GGGTGTAGATAAAACAAA-ATGACCAGGGGTAATCTCGTGCATTTGACGTTCTTGTCCGT |
| 12023 | CAC--CTTGGCAAGGTGATGTTCTACCACTGAACTACGT-TCGCACTAAAGACACTATT- |
| 12024 | CTT--TAAAAATATATGATGACTTATTTTTTATCTTCTTCTTGCATTTTTTCTTTGATTT |
| 12019 | TTA--ACAATATATGATGAGTGTTCCCGCTGAGAATAATTCTCAGCGGTAGACCAGAGCT |
| 12021 | TAA--AGTGTATGGGGAAAATGTTGCGGTTGAAGACA----TTAACCTTAAAATTTACCC |
| 12020 | TCT--CTAAAACACGCCTAGCTATTTTTTTAGAAAAA----TCAATTAAAGTTTCTGTAC |
| 12018 | CCA--TTGGTTTTAGATTAACATTCTTAGTACGTACAAT--T-CTTTGGCTTACTGCTTC |
| 12022 | CTTGCTCAATAGCTGGATTATACGGCTGGTGAACACGTT--GACGTTCACTCTCCGGATC |
| | * |
| 12023 | ------------------------------------------------------------ |
| 12024 | CATCGTATGATAACGCTCTTGCTTTATCTTCA---TCATTTTCTGTCTCAGGCATTTTAC |
| 12019 | AGACTAAGAATCGATTGATTCCATCATCATAACACTCAACAAAATTGATAAAAATTATAC |
| 12021 | TGGT---GATTTTGTTTGTTTCATCGGTA-------CGAGTGGATCAGGTAAAACAACAT |
| 12020 | GATGCTCAACGTAGTCATGGACATTAATGGA----TACTGAAAAACTCTTAGAAAAGCGG |
| 12018 | TTCATCTGGCTCAGCC-----TCAAATTCTGTTGTGAAAAC---TTGACTTGCTGGAATC |
| 12022 | TGGTTCTGGAATAGCTGATAATAGACTCTTCGTATAAGGGTGGATTGGATTGTTATAAAC |
| 12023 | ------------------------------------------------------------ |
| 12024 | CTGTCTCAAAAATCGATTTAATCTGAGCAGCATCAA-----GAGTCTCATATTTTAAGAG |
| 12019 | TAATTCA-ATAATTGCCATTGGGGCAGCATCGCCAC--GGCGTGGTTCTGT-TTTAAGAA |
| 12021 | TAATGCGTATGGTTAACCATATGTTAAAACCAACAA--ATGGTACTCTATTATTTAAGGG |
| 12020 | TCATGAAGATAATT----TTGTGCTAACAACTGCAACGATTTTAATACTTT-TCCATGAT |
| 12018 | TTTTCACGATATT--------TTTTCGCAATTTTA--------GTTTTATT-TTTACGA- |
| 12022 | ATCATCAGATGTTC---CAACTTCTAACAGTTTCCCCCAATGCATAACACC-GATACGAT |
| 12023 | ------------------------------------------------------------ |
| 12024 | GGCTTCTGCAATTAATTTATGAGTATCACGGTTTTCGTTGATAATATCAGCTGCC--TTA |
| 12019 | TACGAGTGTATCCTCCG--TTACGTTCAGCATAACGAGGTGCGATGTCGTC-AAA--AAG |
| 12021 | AAAAGATATTTCTACTA--TTAACCCCATTGAATTAAGACGCAGAATTG---GAT--ATG |
| 12020 | AACCAATGATGCGCCCAGCTTCTGGCGTTTCTATTTGGAGATTTATTTGTC-GCT--TAC |
| 12018 | ---------ATTTGAC------GCTCAATTTT-----ATCAACAACTAAGTCAAT----- |
| 12022 | CTGAAATGTATTTTACC--ATAGACAAATCATGTGCGATAAACAAATAAGTCAATCCTTG |
| 12023 | ------------------------------------------------------------ |
| 12024 | TTACGTGCTTCATTAAGAAGGTGACGAACTTCATCATCAATAAGTTGTGCAGTTTGAGCA |
| 12019 | TTTTTGAAGAGCTGTTGTTGATGTAT-ATTT-ATCAGAAGCTTCATCATAGTTTTCTGAT |
| 12021 | TTATCCAAAACATTGGTTTAATGCCTCATATGACCATTTACGAAAATATAGTTCT-TGTA |
| 12020 | TTGTCGTAG--TTTCTATTGTTGCAT-CTAAATCCATCTCATAGATGATATTTTC----A |
| 12018 | TGACCCATACATATCTTGTGAAACATCTTCTGCTCGTAAAGTAATAGAATCTATTAAG-- |
| 12022 | TTCTCTTTGCAATTTTTGCATTAAATTAACAACTTGTGCTTGGATTGAAACATCTAAGGC |
| 12023 | ------------------------------------------------------------ |
| 12024 | GAATATGATTTTTCAGGTGACATTTGACCA--GCCATCATTGCGTGGTTGCCTTCGTATT |
| 12019 | GCAATTTCATTACGTACATAAGCAGCAGCT--TGACGACGAGCATGTAAATCACCACGTT |
| 12021 | CCAAAATTATTGAAATGGTCAGAAGAAGCT--AAAAGA-GCTAAAGCAAGGGAACTTATT |
| 12020 | ACGTATTTAGTCACCTGAGCAGCTGCTACT--TCAATATTAGGAAGTAGGTCAATTTTTT |
| 12018 | ----ATTGTTACTTCAACTTTTGCGGTCTT---CTCTCTGTATACTTTGAGGTTGACTCT |
| 12022 | AGATATTGGTTCATCAGCAATGATAAATTTAGGCTCTACTGCTAAAGCACGTGCAATCCC |
| 12023 | ------------------------------------------------------------ |
| 12024 | GAACTGGTCCAAGTTTCTCGCTCATACCATATTCAGTTACCATAGCGCGGGCCATAGCAG |
| 12019 | TACCTAGAGTAATCATTTTTTCAACTGTTTTACGGATTTCTTTAGCACGTGCTTCAGTAG |
| 12021 | AAATTAGTTGAATTACCCGAAGAA-TATTTGGATCGCTACCCTAGTGAGTTGTCTGGCGG |
| 12020 | CAATAGCTTCACTTGTAGTTACAACGTTTTTATCATCAATTTTTGGAAGT--TCTGGTTG |
| 12018 | AGTATCTAATTCTTGTGCTTC-----ATTAAAGTATTTTTCAACTTTAGAGAGTTTGGTC |
| 12022 | GATACGTTGTCGTTGTCCACCTGAAAATTCATGCGGATAACGTGTTAAATGATCTTTATT |
| 12023 | ------------------------------------------------------------ |
| 12024 | TGGCTTGTTCGAAGTCATTTGAGGCACCTGTTGTCTGAGCGTTGAAAATAATTTCTTCCG |
| 12019 | TTACAATTGATTCGTTGATAAGAAGATCGGTTGTCAAATCA--CGAAGCATTGCCTTACG |
| 12021 | TCAGCAACAACGTATCGGTGTCATTCGCGCTCTTGCAGCAGACCAAGATATTATTTTAAT |
| 12020 | T----GATACGTCTTCTTTTTCAAGCGT-TTCATCAACCTCCTCTATATATTCTTCCACC |
| 12018 | TCAACATACTCA--CGAATAGCTTCTG----TTACTTCGATGTTTTCACCACGAAT-ACT |
| 12022 | TAACCCTACAAGATCTAATAGGGCCTGAACTTTACTATCACGATCTGATTTTGATTTAGC |
| 12023 | ------------------------------------------------------------ |
| 12024 | CTACACGTCCTCCCATAAGACCTGCTAATTGCTCTTTCATATCATCTTTTGAAAGAAGCA |
| 12019 | TTGTGAGCTAGT-------GCGTCCTAGTTTACGGTAAGCCATTATGTCCTCCTATTTTA |
| 12021 | GGATGAGCCTTTT-----GGAGCTCTGGATCCTATTACTAGAGAAGGTATTCAAGACTTA |
| 12020 | ACATCTACGCTA-------GACGGTACATTCTTAATATTTTTTAACG--CTACCGATTCA |
| 12018 | GTATTTAATCAT----ATGAGTACCTCTTTCTTGCGTTGTTAACGCTTTCTATACTCTTA |
| 12022 | TAATTTATGTAT----ATCTAAACCT-TCTGCTACGATATCACGAATCTTCATACGGCCG |
| 12023 | ------------------------------------------------------------ |
| 12024 | TTTGATCTTCTTTAGGT----AAAGCAATCATATATCCACCTGCACGACCACGTGGTACG |
| 12019 | TTTATCGTTTTTTAATC----CAAGACCTAGATCGGCAAGTTTGATTTTAACTTCTTCAA |
| 12021 | GTCAAGTCTCTTCAGG------AAGAAATGGG--GAAAACTATCATCTTAGTTACT-CAT |
| 12020 | TTAATATCAGTTACTT----------CGTCGGT-GATACCTTCTATTTCAACTTTTGCTG |
| 12018 | TTATAACC-GCTT-----TCATGAAAA--------------------------------- |
| 12022 | TTTAAGCTAGCCTGAGGATCCTGAAAAATCATCTGAGCGTCTTTACGAAAACTATGTAAT |
| 12023 | ------------------------------------------------------------ |
| 12024 | ATAGTAACTTTATGAACAACTCGCGCATTTGAAAGAATCAAACCGACAATTGTGTGCCCA |
| 12019 | GACTCTTACGTCCTAAGTTTCGGACTTTCATCATTTCAGGCTCAGTTTTTTCTG-TTAAA |
| 12021 | GA---T-ATGGATGAAGCCCTCAAGTT--AGCAACAAAAATT--ATTGTTATGG-ACAAT |
| 12020 | GC---TTTTTACCAAAGCCCAAAAAACCTTTTTTCTCACGTGATACAACTTTTATATGTG |
| 12018 | ------------------------------------------------------------ |
| 12022 | GCTTTACCTTTCAGATGTGAGATCACTTCTCCATTAAAGGTAATTTCTCCATCAGAAATA |
| 12023 | ------------------------------------------------------------ |
| 12024 | GCTTCATGGTAAGCAACCATAGCTCTTTCTCTTTCAGAAATAGTACGATCTTTTTTAGAA |
| 12019 | TCAAATACTGTATTAATTCCAGCACGTTTTAAACAGTTATATGAGCGCACTGACAAATCA |
| 12021 | GGTAAAATGGTCCAAGAAGGGACACCCAATGATCTCTTACATCATCCTGCTA-------- |
| 12020 | CCCTCAATCGTGAAATGTTTAACTCTTGTAGTCCTTTTTCAATAGCTTCTTCTACAGTCG |
| 12018 | ------------------------------------------------------------ |
| 12022 | TCATAAAGTTTTAAAATTGAACGTCCAACGGTTGTCTTTCCTGATCCAGATTCCCCAACT |
| 12023 | ------------------------------------------------------------ |
| 12024 | GGACCAGCAATTACACGGTCTTCTGCTTCATCAATATCTGAAGCATCAATAACTTTTTTA |
| 12019 | AGTTCCTCAATTGTCCGGTCAAGCACTTTCTCATCGTTCACTTTCTCTGTTTCCTTCATT |
| 12021 | ------------------------------------------------------------ |
| 12020 | CTCCTGTAAATAATACC------------------------------------------- |
| 12018 | ------------------------------------------------------------ |
| 12022 | AATCCAAACACTTCACCTTCATAAATGTCAAAACTAACATTATCAATTGCTCTCACTTCA |
| 12023 | ------------------------------------------------------------ |
| 12024 | TTTCGTCGCGCAGCAACTAAAGCAGCTTCATTGAGAACATTCTCCAAATCAGCACCAACA |
| 12019 | ACTTCAGTTGCTTTAGCAACCTCTGTTAAATCAGTAAACAAGTTTAAGTGTTCAATTAAG |
| 12021 | ------------------------------------------------------------ |
| 12020 | ------------------------------------------------------------ |
| 12018 | ------------------------------------------------------------ |
| 12022 | TTAGCTTTTCCTTTATTGAAGGTCAAAGAAACATTTTTGACTTCAACTAATTTTTTTCGA |
| 12023 | ------------------------------------------------------------ |
| 12024 | AATCCTGGGGTTTGTTGAGCTACTACTTTTAAGTCAACATTATCTGCTAATGGTTTATTT . . . |
| 12019 | ACGCGAGCTGAAAGACCAAGAGCATCCTCAGGAATGA----------------------- |
| 12021 | ------------------------------------------------------------ |
| 12020 | ------------------------------------------------------------ |
| 12018 | ------------------------------------------------------------ |
| 12022 | TTTTCAGTCATTAGGCT------------------------------------------- |

[15708] It will be understood that the invention has been described by way of example only and modifications may be made whilst remaining within the scope and spirit of the invention.

TABLE I
THEROETICAL MOLECULAR WEIGHTS FOR GBS PROTEINS

| | exp ct d mol. weight (dalton) | | |
|---|---|---|---|
| GBS # | GST-fusion | His-fusion | Native |
| 1 | 78425 | 53460 | 49720 |
| 2 | 40035 | 15070 | 11330 |
| 3 | 90305 | 65340 | 61600 |
| 4 | 43115 | 18150 | 14410 |
| 5 | 158835 | 133870 | 130130 |
| 6 | 39265 | 14300 | 10560 |
| 7 | 44985 | 20020 | 16280 |
| 8 | 56315 | 31350 | 27610 |
| 9 | 50265 | 25300 | 21560 |
| 10 | 96465 | 71500 | 67760 |
| 11 | 91515 | 66550 | 62810 |
| 11d | 85905 | 60940 | 57200 |
| 12 | 64455 | 39490 | 35750 |
| 13 | 40475 | 15510 | 11770 |
| 14 | 33325 | 8360 | 4620 |
| 15 | 44765 | 19800 | 16060 |
| 16 | 73475 | 48510 | 44770 |
| 17 | 46745 | 21780 | 18040 |
| 18 | 54335 | 29370 | 25630 |
| 19 | 46085 | 21120 | 17380 |
| 20 | 47625 | 22660 | 18920 |
| 21 | 56535 | 31570 | 27830 |
| 21 long | 66435 | 41470 | 37730 |
| 22 | 60055 | 35090 | 31350 |
| 23 | 60165 | 35200 | 31460 |
| 24 | 58405 | 33440 | 29700 |
| 25 | 50265 | 25300 | 21560 |
| 26 | 118245 | 93280 | 89540 |
| 28 | 63795 | 38830 | 35090 |
| 29 | 50595 | 25630 | 21890 |
| 30 | 44215 | 19250 | 15510 |
| 31 | 63795 | 38830 | 35090 |
| 31d | 58735 | 33770 | 30030 |
| 32 | 40585 | 15620 | 11880 |
| 33 | 71495 | 46530 | 42790 |
| 34 | 69295 | 44330 | 40590 |
| 35 | 56535 | 31570 | 27830 |
| 36 | 59065 | 34100 | 30360 |
| 37 | 46965 | 22000 | 18260 |
| 38 | 61815 | 36850 | 33110 |
| 39 | 65225 | 40260 | 36520 |
| 41 | 75235 | 50270 | 46530 |
| 42 | 46745 | 21780 | 18040 |
| 43 | 58955 | 33990 | 30250 |
| 44 | 52355 | 27390 | 23650 |
| 45 | 43555 | 18590 | 14850 |
| 46 | 59835 | 34870 | 31130 |
| 47 | 84255 | 59290 | 55550 |
| 48 | 86455 | 61490 | 57750 |
| 48d | 106695 | 81730 | 77990 |
| 49 | 59615 | 34650 | 30910 |
| 50 | 94155 | 69190 | 65450 |
| 51 | 47075 | 22110 | 18370 |
| 52 | 55435 | 30470 | 26730 |
| 53 | 110215 | 85250 | 81510 |
| 54 | 73365 | 48400 | 44660 |
| 55 | 36295 | 11330 | 7590 |
| 56 | 34865 | 9900 | 6160 |
| 57 | 51145 | 26180 | 22440 |
| 58 | 128805 | 103840 | 100100 |
| 59 | 99215 | 74250 | 70510 |
| 60 | 63575 | 38610 | 34870 |
| 61 | 68085 | 43120 | 39380 |
| 62 | 105485 | 80520 | 76780 |
| 63 | 64125 | 39160 | 35420 |
| 64 | 112745 | 87780 | 84040 |
| 65 | 72485 | 47520 | 43780 |
| 66 | 49715 | 24750 | 21010 |
| 67 | 120335 | 95370 | 91630 |
| 68 | 131225 | 106260 | 102520 |
| 68d | 103065 | 78100 | 74360 |
| 69 | 53895 | 28930 | 25190 |
| 70 | 74465 | 49500 | 45760 |
| 70d | 59725 | 34760 | 31020 |
| 71 | 56755 | 31790 | 28050 |
| 72 | 75565 | 50600 | 46860 |
| 73 | 72815 | 47850 | 44110 |
| 74 | 131225 | 106260 | 102520 |
| 74d | 95475 | 70510 | 66770 |
| 75 | 114725 | 89760 | 86020 |
| 76 | 198875 | 173910 | 170170 |
| 77 | 78535 | 53570 | 49830 |
| 78 | 48835 | 23870 | 20130 |
| 79 | 58185 | 33220 | 29480 |
| 79d | 50815 | 25850 | 22110 |
| 80 | 81835 | 56870 | 53130 |
| 81 | 89205 | 64240 | 60500 |
| 82 | 40475 | 15510 | 11770 |
| 83 | 62585 | 37620 | 33880 |
| 84 | 122645 | 97680 | 93940 |
| 85 | 70175 | 45210 | 41470 |
| 86 | 84035 | 59070 | 55330 |
| 87 | 44435 | 19470 | 15730 |
| 88 | 73365 | 48400 | 44660 |
| 89 | 143325 | 118360 | 114620 |
| 90 | 93495 | 68530 | 64790 |
| 91 | 88325 | 63360 | 59620 |
| 92 | 193595 | 168630 | 164890 |
| 93 | 95585 | 70620 | 66880 |
| 94 | 77435 | 52470 | 48730 |
| 95 | 60605 | 35640 | 31900 |
| 96 | 57195 | 32230 | 28490 |
| 97 | 138375 | 113410 | 109670 |
| 98 | 82055 | 57090 | 53350 |
| 99 | 60715 | 35750 | 32010 |
| 100 | 53015 | 28050 | 24310 |
| 101 | 59395 | 34430 | 30690 |
| 102 | 40695 | 15730 | 11990 |
| 103 | 56975 | 32010 | 28270 |
| 104 | 120005 | 95040 | 91300 |
| 105 | 179735 | 154770 | 151030 |
| 105dNterm | 127265 | 102300 | 98560 |
| 105dCterm | 81285 | 56320 | 52580 |
| 106 | 85795 | 60830 | 57090 |
| 107 | 89535 | 64570 | 60830 |
| 108 | 64565 | 39600 | 35860 |
| 109 | 75125 | 50160 | 46420 |
| 109d | 70725 | 45760 | 42020 |
| 110 | 53895 | 28930 | 25190 |
| 111/190 | 60165 | 35200 | 31460 |
| 112 | 63905 | 38940 | 35200 |
| 113 | 59175 | 34210 | 30470 |
| 114 | 51915 | 26950 | 23210 |
| 115 | 98225 | 73260 | 69520 |
| 116 | 73475 | 48510 | 44770 |
| 117 | 47515 | 22550 | 18810 |
| 118 | 42235 | 17270 | 13530 |
| 119 | 109225 | 84260 | 80520 |
| 120 | 71385 | 46420 | 42680 |
| 121 | 65115 | 40150 | 36410 |
| 122 | 46855 | 21890 | 18150 |
| 123 | 68305 | 43340 | 39600 |
| 124 | 54115 | 29150 | 25410 |
| 125 | 57305 | 32340 | 28600 |
| 126 | 56865 | 31900 | 28160 |
| 127 | 80845 | 55880 | 52140 |
| 128 | 39925 | 14960 | 11220 |
| 129 | 43775 | 18810 | 15070 |
| 130 | 82275 | 57310 | 53570 |
| 130d | 63245 | 38280 | 34540 |
| 131 | 89755 | 64790 | 61050 |
| 132 | 49055 | 24090 | 20350 |
| 133 | 54445 | 29480 | 25740 |
| 134 | 42015 | 17050 | 13310 |
| 135 | 65225 | 40260 | 36520 |
| 136 | 54885 | 29920 | 26180 |
| 137 | 63465 | 38500 | 34760 |
| 138 | 40145 | 15180 | 11440 |
| 139 | 38165 | 13200 | 9460 |
| 140 | 43445 | 18480 | 14740 |
| 141 | 49935 | 24970 | 21230 |
| 142 | 79745 | 54780 | 51040 |
| 143 | 33545 | 8580 | 4840 |
| 144 | 49165 | 24200 | 20460 |
| 145 | 63025 | 38060 | 34320 |
| 146 | 107025 | 82060 | 78320 |
| 147 | 156965 | 132000 | 128260 |
| 148 | 41905 | 16940 | 13200 |
| 149 | 62365 | 37400 | 33660 |
| 150 | 54665 | 29700 | 25960 |
| 151 | 50412 | 25447 | 21707 |
| 151L | 50045 | 25080 | 21340 |
| 152 | 45535 | 20570 | 16830 |
| 153 | 46965 | 22000 | 18260 |
| 154 | 101525 | 76560 | 72820 |
| 155 | 62585 | 37620 | 33880 |
| 156 | 61265 | 36300 | 32560 |
| 157 | 74025 | 49060 | 45320 |
| 158 | 52025 | 27060 | 23320 |
| 159 | 41025 | 16060 | 12320 |
| 160 | 82825 | 57860 | 54120 |
| 161 | 95365 | 70400 | 66660 |
| 162 | 42015 | 17050 | 13310 |
| 163 | 69405 | 44440 | 40700 |
| 164 | 42345 | 17380 | 13640 |
| 165 | 43555 | 18590 | 14850 |
| 166 | 38055 | 13090 | 9350 |
| 167 | 50375 | 25410 | 21670 |
| 168 | 32555 | 7590 | 3850 |
| 169 | 43445 | 18480 | 14740 |
| 170 | 64015 | 39050 | 35310 |
| 170d | 59945 | 34980 | 31240 |
| 171 | 49825 | 24860 | 21120 |
| 172 | 62365 | 37400 | 33660 |
| 173 | 96795 | 71830 | 68090 |
| 174 | 45095 | 20130 | 16390 |
| 175 | 59175 | 34210 | 30470 |
| 176 | 55435 | 30470 | 26730 |
| 177 | 66215 | 41250 | 37510 |
| 178 | 62365 | 37400 | 33660 |
| 179 | 58515 | 33550 | 29810 |
| 180 | 37615 | 12650 | 8910 |
| 181 | 63685 | 38720 | 34980 |
| 182 | 90085 | 65120 | 61380 |
| 182d | 87225 | 62260 | 58520 |
| 183 | 57855 | 32890 | 29150 |
| 184 | 46415 | 21450 | 17710 |
| 185 | 40695 | 15730 | 11990 |
| 186 | 85685 | 60720 | 56980 |
| 187 | 56205 | 31240 | 27500 |
| 188 | 61595 | 36630 | 32890 |
| 189 | 60165 | 35200 | 31460 |
| 191 | 116705 | 91740 | 88000 |
| 192 | 69625 | 44660 | 40920 |
| 193 | 98005 | 73040 | 69300 |
| 194 | 49385 | 24420 | 20680 |
| 195 | 81065 | 56100 | 52360 |
| 195L | 147615 | 122650 | 118910 |
| 195L N-term | 91405 | 66440 | 62700 |
| 196 | 69515 | 44550 | 40810 |
| 197 | 99325 | 74360 | 70620 |
| 198 | 73805 | 48840 | 45100 |
| 199 | 158285 | 133320 | 129580 |
| 200 | 132325 | 107360 | 103620 |
| 201 | 74538 | 49573 | 45833 |
| 202 | 157295 | 132330 | 128590 |
| 203 | 61705 | 36740 | 33000 |
| 204 | 39705 | 14740 | 11000 |
| 205 | 55985 | 31020 | 27280 |
| 206 | 56645 | 31680 | 27940 |
| 207 | 44765 | 19800 | 16060 |
| 208 | 59725 | 34760 | 31020 |
| 209 | 62145 | 37180 | 33440 |
| 209d | 56425 | 31460 | 27720 |
| 210 | 60935 | 35970 | 32230 |
| 210d | 53675 | 28710 | 24970 |
| 211 | 64895 | 39930 | 36190 |
| 212 | 60825 | 35860 | 32120 |
| 213 | 45205 | 20240 | 16500 |
| 214 | 38935 | 13970 | 10230 |
| 215 | 45205 | 20240 | 16500 |
| 216 | 91515 | 66550 | 62810 |
| 217 | 36075 | 11110 | 7370 |
| 218 | 81065 | 56100 | 52360 |
| 219 | 56535 | 31570 | 27830 |
| 220 | 54555 | 29590 | 25850 |
| 220 | 50155 | 25190 | 21450 |
| 221 | 41465 | 16500 | 12760 |
| 222 | 47405 | 22440 | 18700 |
| 223 | 42895 | 17930 | 14190 |
| 224 | 45865 | 20900 | 17160 |
| 225 | 56645 | 31680 | 27940 |
| 226 | 44875 | 19910 | 16170 |
| 227 | 46195 | 21230 | 17490 |
| 228 | 46525 | 21560 | 17820 |
| 229 | 35855 | 10890 | 7150 |
| 230 | 51915 | 26950 | 23210 |
| 231 | 60935 | 35970 | 32230 |
| 231d | 58735 | 33770 | 30030 |
| 232 | 41795 | 16830 | 13090 |
| 233 | 35635 | 10670 | 6930 |
| 234 | 43115 | 18150 | 14410 |
| 235 | 58295 | 33330 | 29590 |
| 235d | 48395 | 23430 | 19690 |
| 236 | 46525 | 21560 | 17820 |
| 237 | 44215 | 19250 | 15510 |
| 238 | 59725 | 34760 | 31020 |
| 239 | 63905 | 38940 | 35200 |
| 240 | 51475 | 26510 | 22770 |
| 241 | 45095 | 20130 | 16390 |
| 242 | 43225 | 18260 | 14520 |
| 243 | 119455 | 94490 | 90750 |
| 244 | 48065 | 23100 | 19360 |
| 245 | 48615 | 23650 | 19910 |
| 246 | 49605 | 24640 | 20900 |
| 246d | 45975 | 21010 | 17270 |
| 247 | 58955 | 33990 | 30250 |
| 248 | 92505 | 67540 | 63800 |
| 248d | 70835 | 45870 | 42130 |
| 249 | 103835 | 78870 | 75130 |
| 250 | 136505 | 111540 | 107800 |
| 251 | 52135 | 27170 | 23430 |
| 252 | 51695 | 26730 | 22990 |
| 253 | 74245 | 49280 | 45540 |
| 254 | 59615 | 34650 | 30910 |
| 255 | 69075 | 44110 | 40370 |
| 256 | 47845 | 22880 | 19140 |
| 257 | 60495 | 35530 | 31790 |
| 258 | 67975 | 43010 | 39270 |
| 259 | 79415 | 54450 | 50710 |
| 260 | 48175 | 23210 | 19470 |
| 261 | 55765 | 30800 | 27060 |
| 262 | 75345 | 50380 | 46640 |
| 263 | 63465 | 38500 | 34760 |
| 264 | 47185 | 22220 | 18480 |
| 265 | 56315 | 31350 | 27610 |
| 266 | 51365 | 26400 | 22660 |
| 267 | 88655 | 63690 | 59950 |
| 268 | 50265 | 25300 | 21560 |
| 269 | 60495 | 35530 | 31790 |
| 270 | 59285 | 34320 | 30580 |
| 271 | 56315 | 31350 | 27610 |
| 272 | 118355 | 93390 | 89650 |
| 272d | 98885 | 73920 | 70180 |
| 273 | 70945 | 45980 | 42240 |
| 274 | 56205 | 31240 | 27500 |
| 275 | 47515 | 22550 | 18810 |
| 276 | 147945 | 122980 | 119240 |
| 277 | 87005 | 62040 | 58300 |
| 277d | 75675 | 50710 | 46970 |
| 278 | 52245 | 27280 | 23540 |
| 279 | 79415 | 54450 | 50710 |
| 280 | 88655 | 63690 | 59950 |
| 281 | 74465 | 49500 | 45760 |
| 281d | 71495 | 46530 | 42790 |
| 282 | 44765 | 19800 | 16060 |
| 283 | 20240 | 16500 | |
| 284 | 67645 | 42680 | 38940 |
| 285 | 57525 | 32560 | 28820 |
| 286 | 41355 | 16390 | 12650 |
| 287 | 61045 | 36080 | 32340 |
| 287d | 57085 | 32120 | 28380 |
| 288 | 53675 | 28710 | 24970 |
| 288d | 51035 | 26070 | 22330 |
| 289 | 65005 | 40040 | 36300 |
| 289 long | 71825 | 46860 | 43120 |
| 290 | 47405 | 22440 | 18700 |
| 291 | 63795 | 38830 | 35090 |
| 292 | 103505 | 78540 | 74800 |
| 293 | 115935 | 90970 | 87230 |
| 293d N-term | 73805 | 48840 | 45100 |
| 293d C-term | 70835 | 45870 | 42130 |
| 294 | 75785 | 50820 | 47080 |
| 295 | 89425 | 64460 | 60720 |
| 296 | 60385 | 35420 | 31680 |
| 297 | 100205 | 75240 | 71500 |
| 298 | 54335 | 29370 | 25630 |
| 299 | 62255 | 37290 | 33550 |
| 300 | 130895 | 105930 | 102190 |
| 301 | 54885 | 29920 | 26180 |
| 302 | 80075 | 55110 | 51370 |
| 303 | 53235 | 28270 | 24530 |
| 304 | 75125 | 50160 | 46420 |
| 305 | 78645 | 53680 | 49940 |
| 306 | 67975 | 43010 | 39270 |
| 307 | 86675 | 61710 | 57970 |
| 308 | 59285 | 34320 | 30580 |
| 309 | 62695 | 37730 | 33990 |
| 310 | 58845 | 33880 | 30140 |
| 311 | 76445 | 51480 | 47740 |
| 312 | 64785 | 39820 | 36080 |
| 313 | 65995 | 41030 | 37290 |
| 314 | 52135 | 27170 | 23430 |
| 315 | 51695 | 26730 | 22990 |
| 316 | 41795 | 16830 | 13090 |
| 317 | 179295 | 154330 | 150590 |
| 317d N-term | 115935 | 90970 | 87230 |
| 317d C-term | 92160 | 67402 | 63360 |
| 318 | 70065 | 45100 | 41360 |
| 319 | 61925 | 36960 | 33220 |
| 320 | 57965 | 33000 | 29260 |
| 321 | 83705 | 58740 | 55000 |
| 322 | 76628 | 51663 | 47923 |
| 323 | 86345 | 61380 | 57640 |
| 324 | 86345 | 61380 | 57640 |
| 325 | 82605 | 57640 | 53900 |
| 326 | 91515 | 66550 | 62810 |
| 326L | 172695 | 147730 | 143990 |
| 326L N-term | 113955 | 88990 | 85250 |
| 327 | 279175 | 254210 | 250470 |
| 327d N-term | 139915 | 114950 | 111210 |
| 327d C-term | 167965 | 143000 | 139260 |
| 328 | 97602 | 72637 | 68897 |
| 329 | 113955 | 88990 | 85250 |
| 330 | 83595 | 58630 | 54890 |
| 331 | 60825 | 35860 | 32120 |
| 332 | 75675 | 50710 | 46970 |
| 333 | 63465 | 38500 | 34760 |
| 333d | 57965 | 33000 | 29260 |
| 334 | 38275 | 13310 | 9570 |
| 335 | 43555 | 18590 | 14850 |
| 336 | 67645 | 42680 | 38940 |
| 337 | 75235 | 50270 | 46530 |
| 338 | 54995 | 30030 | 26290 |
| 339 | 76665 | 51700 | 47960 |
| 339d | 72925 | 47960 | 44220 |
| 340 | 86565 | 61600 | 57860 |
| 341 | 38385 | 13420 | 9680 |
| 342 | 61595 | 36630 | 32890 |
| 343 | 60385 | 35420 | 31680 |
| 344 | 55875 | 30910 | 27170 |
| 345 | 40585 | 15620 | 11880 |
| 346 | 53895 | 28930 | 25190 |
| 347 | 55325 | 30360 | 26620 |
| 348 | 58405 | 33440 | 29700 |
| 349 | 98335 | 73370 | 69630 |
| 350 | 53895 | 28930 | 25190 |
| 351 | 82165 | 57200 | 53460 |
| 352 | 111315 | 86350 | 82610 |
| 352d | 105485 | 80520 | 76780 |
| 353 | 55325 | 30360 | 26620 |
| 354 | 42345 | 17380 | 13640 |
| 355 | 52135 | 27170 | 23430 |
| 356 | 59065 | 34100 | 30360 |
| 357 | 40255 | 15290 | 11550 |
| 358 | 60495 | 35530 | 31790 |
| 359 | 78865 | 53900 | 50160 |
| 360 | 73695 | 48730 | 44990 |
| 361 | 109005 | 84040 | 80300 |
| 362 | 125945 | 100980 | 97240 |
| 362d N-tem | 63355 | 38390 | 34650 |
| 362d C-term | 91295 | 66330 | 62590 |
| 363 | 53125 | 28160 | 24420 |
| 364 | 75015 | 50050 | 46310 |
| 365 | 102075 | 77110 | 73370 |
| 366 | 68415 | 43450 | 39710 |
| 367 | 76885 | 51920 | 48180 |
| 368 | 44765 | 19800 | 16060 |
| 369 | 142115 | 117150 | 113410 |
| 370 | 94595 | 69630 | 65890 |
| 371 | 65555 | 40590 | 36850 |
| 372 | 55105 | 30140 | 26400 |
| 373 | 50265 | 25300 | 21560 |
| 374 | 57525 | 32560 | 28820 |
| 375 | 66875 | 41910 | 38170 |
| 376 | 48065 | 23100 | 19360 |
| 377 | 73805 | 48840 | 45100 |
| 378 | 58955 | 33990 | 30250 |
| 379 | 68855 | 43890 | 40150 |
| 380 | 47405 | 22440 | 18700 |
| 381 | 66875 | 41910 | 38170 |
| 382 | 50815 | 25850 | 22110 |
| 383 | 57085 | 32120 | 28380 |
| 384 | 77985 | 53020 | 49280 |
| 385 | 75675 | 50710 | 46970 |
| 386 | 39485 | 14520 | 10780 |
| 387 | 54555 | 29590 | 25850 |
| 388 | 45645 | 20680 | 16940 |
| 389 | 43005 | 18040 | 14300 |
| 390 | 62255 | 37290 | 33550 |
| 391 | 54775 | 29810 | 26070 |
| 392 | 71385 | 46420 | 42680 |
| 393 | 55765 | 30800 | 27060 |
| 394 | 59725 | 34760 | 31020 |
| 395 | 72375 | 47410 | 43670 |
| 396 | 34865 | 9900 | 6160 |
| 397 | 113625 | 88660 | 84920 |
| 397d | 100865 | 3740 | 72160 |
| 398 | 56755 | 31790 | 28050 |
| 399 | 55435 | 30470 | 26730 |
| 400 | 74135 | 49170 | 45430 |
| 401 | 59395 | 34430 | 30690 |
| 402 | 78095 | 53130 | 49390 |
| 403 | 64455 | 39490 | 35750 |
| 404 | 61595 | 36630 | 32890 |
| 405 | 45975 | 21010 | 17270 |
| 406 | 36955 | 11990 | 8250 |
| 407 | 82715 | 57750 | 54010 |
| 407d | 71715 | 46750 | 43010 |
| 408 | 45315 | 20350 | 16610 |
| 409 | 70395 | 45430 | 41690 |
| 409d | 59600 | 34842 | 30800 |
| 410 | 62475 | 37510 | 33770 |
| 411 | 41355 | 16390 | 12650 |
| 412 | 35965 | 11000 | 7260 |
| 413 | 59175 | 34210 | 30470 |
| 414 | 50375 | 25410 | 21670 |
| 415 | 46195 | 21230 | 17490 |
| 416 | 42455 | 17490 | 13750 |
| 417 | 77985 | 53020 | 49280 |
| 418 | 42125 | 17160 | 13420 |
| 419 | 47515 | 22550 | 18810 |
| 420 | 67755 | 42790 | 39050 |
| 421 | 62915 | 37950 | 34210 |
| 422 | 60165 | 35200 | 31460 |
| 423 | 74245 | 49280 | 45540 |
| 424 | 89975 | 65010 | 61270 |
| 424 | 77325 | 52360 | 48620 |
| 425 | 116045 | 91080 | 87340 |
| 426 | 83815 | 58850 | 55110 |
| 427 | 41135 | 16170 | 12430 |
| 428 | 55325 | 30360 | 26620 |
| 429 | 59175 | 34210 | 30470 |
| 430 | 53785 | 28820 | 25080 |
| 431 | 54005 | 29040 | 25300 |
| 432 | 65665 | 40700 | 36960 |
| 433 | 40915 | 15950 | 12210 |
| 434 | 44545 | 19580 | 15840 |
| 642 | 91845 | 66880 | 63140 |
| 643 | 78975 | 54010 | 50270 |
| 644 | 49605 | 24640 | 20900 |
| 645 | 59725 | 34760 | 31020 |
| 646 | 61595 | 36630 | 32890 |
| 647 | 55875 | 30910 | 27170 |
| 648 | 59835 | 34870 | 31130 |
| 649 | 76115 | 51150 | 47410 |
| 650 | 51475 | 26510 | 22770 |
| 651 | 53345 | 28380 | 24640 |
| 652 | 49715 | 24750 | 21010 |
| 653 | 44655 | 19690 | 15950 |
| 654 | 51255 | 26290 | 22550 |
| 655 | 65995 | 41030 | 37290 |
| 656 | 57525 | 32560 | 28820 |
| 657 | 62805 | 37840 | 34100 |
| 658 | 60165 | 35200 | 31460 |
| 659 | 60275 | 35310 | 31570 |
| 660 | 71495 | 46530 | 42790 |
| 661 | 60605 | 35640 | 31900 |
| 662 | 62695 | 37730 | 33990 |
| 663 | 89535 | 64570 | 60830 |
| 664 | 45315 | 20350 | 16610 |
| 665 | 41135 | 16170 | 12430 |
| 666 | 47075 | 22110 | 18370 |
| 667 | 53162 | 28197 | 24457 |
| 668 | 43555 | 18590 | 14850 |
| 669 | 48505 | 23540 | 19800 |
| 670 | 45315 | 20350 | 16610 |
| 671 | 36940 | 12182 | 8140 |
| 672 | 40130 | 15372 | 11330 |
| 673 | 41450 | 16692 | 12650 |
| 674 | 45300 | 20542 | 16500 |
| 675 | 55970 | 31212 | 27170 |
| 676 | 65650 | 40892 | 36850 |
| 677 | 54320 | 29562 | 25520 |
| 678 | 77750 | 52992 | 48950 |
| 679 | 60480 | 35722 | 31680 |
| 680 | 64440 | 39682 | 35640 |
| 681 | 93040 | 68282 | 64240 |
| 682 | 84790 | 60032 | 55990 |
| 683 | 15950 | 44655 | 19690 |
| 684 | 11880 | 40585 | 15620 |
| 685 | 16280 | 44985 | 20020 |
| 686 | 21340 | 50045 | 25080 |
| 687 | 9350 | 38055 | 13090 |
| 689 | 55105 | 3740 | 26400 |

TABLE II

PRIMERS USED TO AMPLIFY GBSnnn PROTEINS
Forward primers begin 5′-GGGGACAAGTTTGTACAAAAAAGCAGGC-3′ and
continue with the sequences indicated in the table below;
reverse primers begin
5′-GGGGACCACTTTGTACAAGAAAGCTGGGTT-3′ and
continue with the sequences indicated in the table.
The primers for GBS1 are thus:
Fwd: GGGGACAAGTTTGTACAAAAAAGCAGGCTCTCAATCTCATATTGTTTCAG
Rev: GGGGACCACTTTGTACAAGAAAGCTGGGTTATTTTTAGACATCATAGACA
The full forward primer sequences are given in the
sequence listing as SEQ IDs 10968-11492. The reverse
primer sequences are SEQ IDs 11493-12017.

| | | |
|---|---|---|
| GBS | Forward | Reverse |

| | | |
|---|---|---|
| 1 | TCTCAATCTCATATTGTTTCAG | ATTTTTAGACATCATAGACA |
| 2 | TCTAATTACATTATTACATTTTTG | GGGAATGCCTACAAA |
| 3 | TCTGATACTAGTTCAGGAATATC | TTTTTTACTATACTTTTTGT |
| 4 | TCTGATACAAGTGATAAGAATACT | TTCCTTTTTAGGCTTACT |
| 5 | TCTATTTTTCTTCATAGTCCAC | ATTAGCTTCATTTGTCAG |
| 6 | TCTGAATGGGTGTTATTAACTC | AGTTTCTTCTTTAAAATCAT |
| 7 | TCTACAAATTCTTATTTTAGCAA | CTCTGAAGCTGTAAAACC |
| 8 | TCTGTATCAGTTCAGGCGT | TTTATCAATGTTTGAAACG |
| 9 | TCTGCTGCTCTAGGACAAC | TAGTAAATCAAGTTTTTGCA |
| 10 | TCTTTTGTTGTTGCCTTATT | ATCCCTTCTATTTTCGA |
| 11 | TCTCCACCTATGGAACGT | ATGTAGTGACGTTTCTGTG |
| 11d | TCTCAGAAAGTCTATCGGG | ATGTAGTGACGTTTCTGTG |
| 12 | TCTAGTGAGAAGAAAGCAAAT | ATTGGGTGTAAGCATT |
| 13 | TCTTCTTGGAATTATTGGAG | CTTAACTCTACCCGTCC |
| 14 | TCTGCAATGATTGTAACCAT | TTTTCTCTTATTAAAGAATT |
| 15 | TCTGCATCTTATACCGTGAA | ATACCAGCCGTTACTATT |
| 16 | TCTGCCGAGAAGGATAAA | TTTAGCTGCTTTTTTAATG |
| 17 | TCTGTTTATAAAGTTATTCAAAA | AAATACTACATTTACAGGTG |
| 18 | TCTAAGCCTAACAGTCAACA | TTGGTTATTCTCCTTTAAT |
| 19 | TCTGATGATAACTTTGAAATGC | ATTATATTTTTGGATATTTC |
| 20 | TCTGCAGTGATTGCAAGTC | GGGCTTTTTCTTAAAAA |
| 21 | TGTGCTGCATCAAAC | GTTGGCATCCCTTTT |
| 21 Long + A527 | TGTGCTGCATCAAAC | CTTTTGATGGGATTGG |
| 22 | TGTACTAAACAAAGCCAG | TTGATTTAACGATTTGA |
| 23 | TGTCAATAACCGATAC | TTTATCTCCTCTAAAATAATG |
| 24 | TGCTCAAATGATTCAT | CTTTGATAAGTCAGACCA |
| 25 | TCTAAAAGTTCACAAGTTACTACT | GTAACCCCAAGCTGAT |
| 26 | TCTAGTCATTATTCCATAAAATT | TGATTTTGCAATATCAA |
| 28 | TCTAATCATATGCTGATTGAG | TTTTTGTAATTTAAGTACTAA |
| 29 | TCAGTTTGGATGTTAAC | TTCTTTTATATTAAGAGCTT |
| 30 | TCAACAAATGCAGATG | ATTCGGATAAATGTAGC |
| 31 | TGTTTTGTCATTATTGATAG | TCCATTTTTATCCTCAC |
| 31d | TCTCTAACTTGGTTTTTATTAGA | TCCATTTTTATCCTCAC |
| 32 | TCTGGTTTAAAAGTGACTGAA | ATGACCTCTACTTTCCA |
| 33 | TCTCATCATTTAGGTAAGGAA | CTTGTAATCACTTGGAC |
| 34 | TCTGTTAGTAATCGCTACAATC | ATTAATCATGGTATTGGT |
| 35 | TCTAATCAAGAAGTTTCAGC | CCATTGTGGAATATCA |
| 36 | TCTCGAGTTTTAGCGGATA | TTTGTAAAGCAGTTCTT |
| 37 | TCTGTATTATTTTACCAATCACA | ATCATTCATATGATCTCTAGA |
| 38 | TTAGGAGTGGTAGTTCAT | ATTTTGATTGATTCTACTC |
| 39 | TTTTTATTGTTAGTATTAGC | TTTTGTTTTTTTCAAATA |
| 41 | TCTGTTTATCTAGCGGTTAGA | ATCTTCAACGTCCTCC |
| 42 | TATAACAGTTTAGTTAGAAGTC | AAAGTCAAAGGAAACTT |
| 43 | TTTAAAGGGTTTACATATT | TTCTTTATCTAATTTATAATAG |
| 44 | TTTAATACAATTGGTCG | TTGCAATGTTTTTTCT |
| 45 | TCTATGGAAAAAATTAGGATT | TAAACTTTGGATAATCTGT |
| 46 | TCTAGAGATGAGCAAGAAATA | GTTGAAATTTTGATATGA |
| 47 | TCTCAACAGATAGGTCTTTATAA | CTCCTTTACTATATAGCTAACT |
| 48 | TTTCTCTATAATTACTTCAAT | TTGTTTGTGAAGTAAAAC |
| 49 | TCTAATAAGGCATTATTAGAGG | TGATAATATCTCCATATTTT |
| 50 | TCTACACATTTAGTTGACTTAAC | GCATTGGCGCCATA |
| 51 | TCTAGTAAACAACACATTTATCTA | TTCTACACGACTTTTATTC |
| 52 | TCTCAAGAAACTCATCAGTTG | AAGACCTCCTCGAGAT |
| 53 | TCTGCAGAAGACATTGTTACA | TGTTTTTTCTTTCTGTTG |
| 54 | TATAATTTTTCGACTAATGA | TGGATTAGTTTGACCTG |
| 55 | TCTGACACAGTGTCTTATCCT | TTTATCGTAAGCACTTAGG |
| 56 | TCTGTGGAGCAAGTGGCCA | CTCCTTCCAGGCATCG |
| 57 | TCTCAAGAACTAAGTAACTTTGA | GTAAAAGTATCTTAAATAGTCA |
| 58 | TCTACTGAAACGTTTGAAGG | TGCCATTCCTCCTCT |
| 59 | TCTGATGAAGCAACAACTAA | TGTTACCTTTTTATTTTCT |
| 60 | TCTAATAAAGATAATCAAAAAACT | TTTTTCATGCGATTGA |
| 61 | TGTTTCTTTTTTATTCCA | GAGACGTTTCTTATACCTT |
| 62 | TATTACTTTGATGGTAGTTT | TGTACCATATGTTCTCTCT |
| 63 | TCTGTTCAATCATTAGCAAA | AAAAGTTGGACTACTTTC |
| 64 | TTTAAAGGTAATAAGAAGTTG | TCGTTTTCCACCC |
| 64d | TCTAGTCAAGTTGACTCTGTTA | TCGTTTTCCACCC |
| 65 | TCTCAAAACCAGGTGACTG | ATTTGGGTAAATATAGTAAA |
| 66 | TTAAGATTTTATAACAACGA | TTTACGACTAACCTCAAC |
| 67 | TCTAATGTTTTAGGGGAAA | AATTCCTTTTGGTGG |
| 68 | TCCCAAAAGACTTTTG | GGCAGAATACACCTTC |
| 68d | TCCCAAAAGACTTTTG | GGCTGACGTCGACGCA |
| 69 | TCTAAAGTTTTAGCCTTTGA | AACTCTCTTAATATATTCTTCT |
| 70 | TCTGAAATGGCTTTAG | GTCTTTTTCAATATTCTGT |
| 70d | TCTACTAACTTATTGAGTAGAATCA | GTCTTTTTCAATATTCTGT |
| 71 | TGTAGCTCAAAATCTCAT | CTTCTCCTTAGGAGTAACG |
| 72 | TCTAGTTTATCTATTAAAGATGCC | ATTATTATCAATTAATAACTCTT |
| 73 | TCTATCAAAGAGGCGGTAA | GTCAAACATACTTCCAAA |
| 74 | TCTAAAGAGGATAAAAAGCTAG | TTTCGTCGTATAAGCA |
| 74d | TCTAGTGTTTCAGGTAGTAGTG | TTTCGTCGTATAAGCA |
| 75 | TCTAAAAAATTAAAACACTCAA | TGTCCTCATTTTTTCAG |
| 76 | TCTGATGAAGTTACAACTTCAG | AATACTTGCTGGAACAG |
| 77 | TTATTCCAAAGTAAAATAAA | GTCTTTCTTCAATTTTGG |
| 78 | TCTCATAACCATCACTCAGAACACATGT | GTCGTGATTTTTATGAGT |
| 79 | TCTCCCAAGAATAGGATAAA | CCCAAACTGGCATAAC |
| 79d | TCTAGTCAGTATGAGTCACAGA | CCCAAACTGGCATAAC |
| 80 | TCTGCAGAAGTGTCACAAGA | TGAAGGACGTTTGTTG |
| 81 | TCTTTTGATGGATTTTT | TTTTTTTAGTTTAAGGCTA |
| 82 | TCTACAAATGAAAAACGAAC | GTCCACCTTCCGAT |
| 83 | TCTGAAATTAAACTCAAAAATATT | AACATTGTTTTTCCTTTC |
| 84 | TCTCATACTCAAGAACACAAAA | ATGGTGATGATGACCT |
| 85 | TCTCCTAAGAAGAAATCAGATAC | ATTAACATTTTGAGGGT |
| 86 | TCTGCAGAACTAACTCTTTTAA | TTTTGCAAAATCAACA |
| 87 | TCTGCGGATACATATAATAACTA | GAATAAATAACTGTATTTTTT |
| 88 | TCTTACCAAAAAATGACG | ATTTTCATTAATTTCCTCT |
| 89 | TCTGAAGAGCTTACCAAAAC | GATAGCTAATTGGTCTGT |
| 90 | TCTAGATATACAAATGGAAATTT | TAAAAGATGAGCTTCTCG |
| 91 | TCTAAAAAAGGACAAGTAAATG | AATTTCAATATAGCGACG |
| 92 | TCTGATTCTGTCATAAATAAGC | CTTGTTTGTCTTTACCTT |
| 93 | TCTGAATTTTCACGAGAAA | ATTATCCTTCAAAGCTG |
| 94 | TACCAATTAGGTAGCTATAA | TGTGTCATATAATGTAACCA |
| 95 | TCTGTTAATACAAAAACACTTCT | TGATCTTAATTTTCGAG |
| 96 | TCTGGTCAGTCTAAAAATGAAG | CCAAACAGGTTGATCT |
| 97 | TCTAGCCAGGAGGTATATG | ATTTACATCAGACTGTGAC |
| 98 | TCTGAAACTATTAATCCAGAAA | TTTATGGCCAATAACA |
| 99 | TCTACAAGTATGAACCATCAA | TTTTTTAGTAGTTGTCAATT |
| 100 | TCTAAGGGGCCAAAAGTAG | GTAAGCTGAATTTTCGA |
| 101 | TCTATTACTTTAGAAAAATTTATAGA | ACGAGAGTGGTTATTGG |
| 102 | TCTGCCTTTTACTTTGGCA | TTTCTTCACTCTTTCTAGAG |
| 103 | TCTATTTTTTCCTTGATCAT | CGGCCAGTTTTTTCTT |
| 104 | TCTGGTGAAACCCAAGATA | AACACCTGGTGGGCGT |
| 105 | TTAACAATTCATGGACC | ACTATTTCTAATTGCTCTG |
| 105d | TTAACAATTCATGGACC | TGGTCCCGGTGCGCCA |
| 105d | TCTCAAGGACCTCCCGGTG | ACTATTTCTAATTGCTCTG |
| 106 | TCTCAAAATCAAAATTCACA | CTTAGCAGATTCATCCC |
| 107 | TCTCTGGAGCCTTTTATTT | TTTACTATTTGAAAATTGG |
| 108 | TCTGGTAATCGTTCAGATAAG | TTTCATAGGAACTTGTATT |
| 109 | TCTATCCAGCAGATCAACT | GTCCACACCTGCGACT |
| 109d | TCTAAACGGGTTCGCTATG | GTCCACACCTGCGACT |
| 110 | TCTGTAAAATTAGTATTCGCAC | TTTACCTAAGTAATATTCTGA |
| 111.19 | TCTGTTAGCGTTGATAAGGC | TCCCCGTCTTTTTTGT |
| 112 | TCTACAATTAAAAATCTCACTG | GTCGTAATCATAAAAGCC |
| 113 | TCTAGTAAAATCAAAATTGTAACG | TTCATAACGAACCATAAC |
| 114 | TCTAATCTTTTAATTATGGGTT | TTTGAGTTCTAGCAACG |
| 115 | TTTCAATACTATTTAAAAGG | TTTTTTATCTTCTTCTTGC |
| 116 | TCTACCGAGGAGCCATTAA | TTTTAAAACCTGGTAAAC |
| 117 | TCTGAACAATCACAAAAAACA | TCAGCTCGTACTGTTT |
| 118 | TCTATGGTGACGGTGCTGG | GTCCTCCTCAATTGGT |
| 119 | TCTAGTCAGCCGGTAGGGG | CTCTTTTATACGCGATG |
| 120 | TCTGGTGGAGCATTTGCTA | GTTATTTGCTCGTTGTT |
| 121 | TCTAATAAAGATAATCAAAAAACT | TTTCTCAAATGTTTTCAT |
| 122 | TCTGCTGCCACCAAGAAAG | TTTCAAATGATCTACAGC |
| 123 | TCTACAACAAATGTAATGGC | GGCTAGTGTCTGTCCG |
| 124 | TCAATGAATTTTTCATTT | ACCATCTATTTTTACCCC |
| 125 | TCTACAAAATATCAGCGAATG | AGAACCCGCACTCTCA |
| 126 | TCTACTAAGCAAGCAATGTC | GAACGCAACGGCTGCT |
| 127 | TCTACAAAAGAATATCAAAATTAT | TTTCATATCAAAAACTATCG |
| 128 | TCGACTAATTCGTTAAA | TTCTTTATCTCTTAATGCTT |
| 129 | TTTGAAATAGTATTGGAAA | CACAACAGTTATTTTTTCA |
| 130 | TCTATATTTTCTATTTTTTATTATGT | AGGCCCTTCTGAGTAG |
| 130d | TCTAAAAAACAACTTCACAAC | AGGCCCTTCTGAGTAG |
| 131 | TCTAAAACAGATATTGAAATAGC | AAATAATCCAATGGCTG |
| 132 | TCTATTAAATATTATCATTTGCA | CTTTTCAAGCTTTTTCC |
| 133 | TCTGCTTTACGGAACCTTG | AAAATGATCAGTTTGAGG |
| 134 | TCTACTATTTCTCAACAACAATAC | TTTTTGGCTTAAGAAAG |
| 135 | TCTGAAAAAAAGAGTAGTTCAAC | CTTACGATACATTTTAAATTG |
| 136 | TCTAATCAATTATCAGAAATCA | TTCTTTTTTTACTTTAGCG |
| 137 | TCTCAAGAGTATAAAACAAAAGAG | CCATTGCAATCCAGCA |
| 138 | TCTGCTGTATTTACACTCGTC | ATGTTTATGGCTTGCT |
| 139 | TCTGGCGGCAAGATAAAAT | TTTTTGATAAATCCCC |
| 140 | TCTGATGGGTTAAAGAATAATG | ATATGTGTATTCATCCTTT |
| 141 | TCTGATGTTGTAATTAGTGGAG | TACTTCTATTTTTCCATCTG |
| 142 | TTCGAATTAAGAGAAAGA | GTAATGCAATAAATCAAAA |
| 143 | TCTAGCTTTTTAGTGATTTCA | GGATTTTAGTTTCGCA |
| 144 | TATACGCATAGTGGAAC | CCCATTGATTTCGTCG |
| 145 | TCTGTTATTATCAGGGGCG | TACCTCTTTCAATACCAC |
| 146 | TCTGTTAGTCGTTCTCCGA | ATTACCGTTAGGTACTGTA |
| 147 | TCTGAGGAGCAAGAATTAAA | GGTATGGTTAACAGAATC |
| 148 | TCTATTCTAACAAAAGCAAGT | ATATACCCTAGACTTTTTGA |
| 149 | TCTAGTGGGCGTTCATGGA | AGGAGTTTTATTGATGATAT |
| 150 | TCTGATACCCCTAATCAACTA | AAATGATTGTGGAAAAA |
| 151 | TGCAGGAGCTGTCCGC | ATCAAAGAAGTTGACATTG |
| 151 Long | TCTGTCCGCATTGGTAAAG | ATCAAAGAAGTTGACATTG |
| 152 | TCTAACTGCTTAGAAAATGAA | GTTAGATAAATTAACCAGTG |
| 153 | TCTAACAACTCCAGCA | CCCTTTGCTTCGTTGT |
| 154 | TCTGGAAAGGTCAGTGCAG | TTCCACAAGTCCGATT |
| 155 | TCTATTTTATTTTCAGATGAAC | TTGTTTGATTCGTCCT |
| 156 | TCTGCATCAGATGTTCAGA | ACTACCAAACTGCTGG |
| 157 | TCTAGTGACGTTGACAAATA | TTGTGTATTTTTAGTTAGGT |
| 158 | TCTATGACCATTTACTTCAATA | GTGGATAAAATTCGAAA |
| 159 | TCTCAAACTATTTTGACGC | CAGACTGACTAGGAGCT |
| 160 | TCTGATGAATATCTACGTGTCG | GACTTGTAATTGATTCGC |
| 161 | TCTGATGAGGTGGACTATAACA | GAAGGCACCACCACCT |
| 162 | TCTATTTTCTTGCTCTTAGTTG | GTTGTATAGATGAGTTAATCTG |
| 163 | TCTGAAACTGTCATTCAACTTG | ACGGTTTTTAAAGAATG |
| 164 | TATTTTTTAACAACAAAAAA | TTTTTCTTTATCTTCTGTG |
| 165 | TCTCCAATTTTTATTGGTTT | CGATTTTGTAAGAGCTT |
| 166 | TCTGCATCTTATACCGTGAA | CGACGAAGCTATTTCT |
| 167 | TCTACAATTTATATTGCTTGG | TAAGGCTTGCATTTTG |
| 168 | TCTGTTGGATTGATGTTGG | TTTTCCTAAAAATTTTCC |
| 169 | TGGAAACAAATCACAG | GGCATCTCCTAGCTTT |
| 170 | TCTGCAATAGTTTTTACTTTTTT | TGATAAAGGTAGTTCTACAC |
| 170d | TCTGGTTCTTATCATTTAACAA | TGATAAAGGTAGTTCTACAC |
| 171 | TCTGCTAGACCCAAACAGT | TTTTAGATGTTTTTGTGG |
| 172 | TACACTCATATTGTTGAAAA | ATGATTGATAATTTTAAGC |
| 173 | TCTAATAGTACTGAGACAAGTGC | TGCTTTTTGATATGCC |
| 174 | TCTGCTTATGTCGTCAATTT | TAAAATAAAGTTCAGAAAAG |
| 175 | TCTGAATTACCTTCGTTTATC | TTTCTCCCTTGACTTTC |
| 176 | TCTAAACATCCGATACTTAATG | CTTTTTCTCAGATGCTT |
| 177 | TCTAATTATCCTTTTGCGA | GACATTGAAACGGAAT |
| 178 | TCTGGACTACGCGGAGTAT | TTTTATCAATGATGTTGA |
| 179 | TCTGCTATTGGAGCAGCTG | CATATGACGCAAACGC |
| 180 | TCTGATAAAGAAGGGATAGAGG | AGCCTCTTTTCTTGTT |
| 181 | TCTAAAGAAAAATCACAAACTG | ACGATTATCAACAAAGTT |
| 182 | TCTCAAAATAATAAAAAAGTAAAA | CATTCTTTTAAATACAAATC |
| 182d | TCTCAAAATAATAAAAAAGTAAAA | GGGTTTGAAGTTTTC |
| 183 | TCAAATGGTCAATCTAGC | TTTAACTTTAATTACTGGAAT |
| 184 | TCTAAGGATTCAAAAATCCC | TTTTTTAATAAGCTTCGA |
| 185 | TCTGGGCAACCATCTACAT | TTTTTTGTAAACTTCCTG |
| 186 | TCTCATTCACAGGATAGCA | CTTAGATACATTGTTTTTTTC |
| 187 | TCTGGACGAGGAGAAGTATC | CTTTCTTTTCTTACTTGC |
| 188 | TCACAATCTTCTCAAAA | TTTATTATTTTTAATACTTGAA |
| 189 | TCTGATAAGTCAGCAAACCC | CTTCAACTGTTGATAGAGC |
| 191 | TCTATCACGACATTACAGACT | TCCTTTAGCAGGAGCT |
| 192 | TCTAGATATTTAACTGCTGGT | GTTATACATGTTGTCTGAAG |
| 193 | TCTATAAAATATCAAGATGATTTT | CCAAATAATAACACGTTT |
| 194 | TTAGAAGTCAGAGAGCAG | GCTATCCCTTTCCAAT |
| 195 | TCTATTATGGAGACGGGTA | TGTATTTTTAATTTGTTTTC |
| 195L | TCTTTGAATAATAAAGGTGTCG | TGTATTTTTAATTTGTTTTC |
| 195LN | TCTTTGAATAATAAAGGTGTCG | CAAACTTTTAACATTTAATG |
| 196 | TCTATTTCCTCAAATTTTTACG | ATAGTGTAAGCTACCAGC |
| 197 | TCTAATTTTTATAAGCTCTTG | GTCATCATATTCCTGAAA |
| 198 | TCTGCGCTTAAAGAATTAA | TGTTCGGCGTAAGATT |
| 199 | TTTTTAAAAGAAATTGAAA | ATTGGTCATTTCTTGAG |
| 200 | TTTCGTAAATATAATTTTGA | AACAGATTTATTGGTTGG |
| 201 | TCTAGCGATACCTTTAATTTT | AGACTCATCAACTTTTTCT |
| 202 | TCTATGCTGATTAAGTCGC | GAACCCTGAAGGGTAG |
| 203 | TGTGGTAAAACTGGACT | CCAATTGTATTTTTCAAC |
| 204 | TCTAAGACAGGAGCACCCGT | ATTTATACTACCTGTTGAATC |
| 205 | TGCGAGTCAATTGAGC | TTTAAATTTGTAGTCTTTAATA |
| 206 | TCTACAAATACTTTGAAAAAAGA | CTCTTTTACTTTTCCAAAA |
| 207 | TCTAATTTATTTAAACGTTCCT | CCCTCCCTTAAGAGAA |
| 208 | TCTAAAAAGCGGCTAGTCA | TTGACGATGTTGCATC |
| 209 | TCTGGACAAAAATCAAAAATA | TTTCGAATTATTGTGACT |
| 209d | TCTGGACAAAAATCAAAAATA | GTATTGTTGTTGCCTG |
| 210 | TCTGGAGGAAAATTTCAGAA | TTTTTGATTTCCCTTTC |
| 210d | TCTACCTCATATCCTTTTATTT | TTTATAGTGTGTTTGCAA |
| 211 | TGTGGACATCGTGGTG | TTTGCTAGGAACTTTGA |
| 212 | TCTAAGACTAAAAAAATCATCA | TGATTCAATTCCTTTTC |
| 213 | TCTAAACACACCAGTAAAGAA | TTTTTCCTCTACTTTCTTA |
| 214 | TCTAAAAATAAAAAAATCTTATTT | TTTGCTCACCTCCACA |
| 215 | TTAATAAAAGGATTATTGTCA | CAATAACTTCTGTAAAATAAA |
| 216 | TCTGCTCGTTTAATACCACA | TTCACCCTTAAAATAATT |
| 217 | TCTAACACTAACATCCCTAGC | TGCATTTTTCCCTTCT |
| 218 | TCTAGAGGGAAGGTTATTTAC | CTCCAGTAAAGTATTAGTATTT |
| 219 | TCTATCAATAAAGTAACAGCTCA | GTGAGGTTTTGGTAATT |
| 220 | TCTAGAACACTATTTAGAATGATAT | TGCATATAAGTTTTTTAGC |
| 220d | TACTATGCGAATCACAG | TGCATATAAGTTTTTTAGC |
| 221 | TCTAGTTTAGCATTGCAAAT | CTCATCTAAAGTGCTATCC |
| 222 | TCTACATTTTATAAAAAGACGG | CTCGTATTTAGGCAACT |
| 223 | TCTAAGAAAATACGAAGCTATAC | ATTGGATATGCCATAAA |
| 224 | TCTGGAGGAAATGAAATATTA | GACTTTTTGATGTTTACTTT |
| 225 | TCTGGTATGTCTAATAAGGAAAT | TTCTTTACTATAAACATCTTCA |
| 226 | TCTAACAAACTTATTACAGAAAA | AGCATTTAAAGTGAATGT |
| 227 | TCTGTTTCATATGAAAAAGTCC | GTTAGTCTCTTCAAGATCA |
| 228 | TCTAGTAGAGGTATTTTTTTACAA | AAGACCTACCGCCCAA |
| 229 | TCTGAACGTCGGGTAAGTC | TACTTCTTTCTCTTTCAATT |
| 230 | TTTTTAATCGATTTTATTT | CTTAGTGTTCCGATATGA |
| 231 | TCATTAATATTCTTACGGT | TCTTGTTTTAAGAGCAGA |
| 231d | TCTTTATACGTTGTTAAACA | TCTTGTTTTAAGAGCAGA |
| 232 | TGGCTAAGTAAGCATGAG | ATCATGTTTTCCCTCAA |
| 233 | TTCCCAGCTAGCTGTC | ATCTGATATATCCGTTTTAT |
| 234 | TCTATAGAAATTGCTGTATTAATT | TTTTTTGTCTCCTTTTTTA |
| 235 | TCTATTCGATTTCTTATTCTTG | AAAGACACGATAAACATAAG |
| 235d | TCTGACTCAACCACAGTCTC | AAAGACACGATAAACATAAG |
| 236 | TCTGCAGACCTTACAAGTCA | ATTTGCAACTTCTTGTATA |
| 237 | TCTATTGTATTTGCTATTGCA | TTTAAAAGTATCCTTAAATAAG |
| 238 | TCTGATATTTTTTCAGCTATTGA | CTTCCTCCTCAATAGTTG |
| 239 | TCTGTTAGTGCTGCTATTGAA | TTCTCCTCCCCCATTA |
| 240 | TCTAAGAAGCTTACTTTTATTTG | ATCCAAACGAGTGAAAT |
| 241 | TCAAAAGGATATTCAAGA | AGGTGTTGTTGTATTTTC |
| 242 | TCTCATAATATATTAAGATTTTTAGG | CTTTCTAAGTTTATTAAACATA |
| 243 | TCTATTCTTGGTCAAGATGT | GGCATCTGTTACCTTG |
| 244 | TCTCATGAAAATGTTAAAAAAG | AAACAACTCCATTATTTTT |
| 245 | TCTAAGTCAACGGTAACAAA | TAAACGTTGAAGAGCAT |
| 246 | AGGAAACGTTTTTCCT | CTTATCATATCTTGTTAAATCA |
| 246d | TCTAACCATAAGGGAAAAGTA | CTTATCATATCTTGTTAAATCA |
| 247 | TCTGCTAAACAATTAATTGGT | TTGCCATGGGTTATAG |
| 248 | TCTTTGATGGTGTTGTTATTC | AGAATTAAAATTTTCATGC |
| 248d | TCTAAAACTTATTTGTCAAATG | AGAATTAAAATTTTCATGC |
| 249 | TGGGCTTACCATACTG | TTTTTTAGATGTTTTATGTG |
| 250 | TCTGGCCTTAATCTTAAGC | CTCTTTTACTTTAGCTTCA |
| 251 | TCTCAATATTTTTTGAAACAAG | TTTCAAACTCCAGCCA |
| 252 | TTTATTTCAGGTTATATCAA | GGAGTGCCTTTCTACT |
| 253 | TCTGAAAATTGGAAGTTTGC | TTCATATCGTAAAGCATC |
| 254 | TCTATTGAAAAGGGAGTTG | ATCGTCAACCTTAACG |
| 255 | TCTATTGTTGGTAGAGAAATCA | TTTTACTTGACGTCTCAC |
| 256 | TATCATGTAAAAATGATCA | GTCTTCCATTAATATTCCC |
| 257 | TCTGATTTTTTATACAAAGGAGG | CCAATTATTTTGAAAGTTC |
| 258 | TCTGAACGTTATACAGATAAAATG | ATTTTTTTGAATAATATAATCC |
| 259 | TCTCTTTCTCGTAAAAAAGAG | TTTATTATCAGAAAAGGC |
| 260 | TCTACTCTTGTCTTAGTTGTTTAT | ATTCAAAAAATTTTTCAA |
| 261 | TCTATAAAGAAAGCTGAAAATC | CGAAACGTCAGGTAAA |
| 262 | TCTATAAAAAATGCTATAGCATA | ACTTATTTTTGATAATATTTCTT |
| 263 | TCTCAGCCTTCTAAACTACTTC | ATCAGCATTTCTACGAA |
| 264 | TCTGATTTGTTTAGCATGTTG | ATGTAGACTCCTAATGATTT |
| 265 | TCTCTTGCTTCCCTGATTT | TTTACTGTTCCTTTCGC |
| 266 | TCTCATCAATCAAATCATTATC | GAGATTAATTTGATTATATTTT |
| 267 | TCTATCTTTATTATCGGACAA | AACATCATTTCCTCCC |
| 268 | TCTAAAGAATTTATTAAAGAATGG | GTTGATAGTTCCAAAACG |
| 269 | TCTGCAGATGATGGTGGTT | TAAATGTGTTCCTACTAAATT |
| 270 | TTAAATGATGCAATAACAA | CATCAATAGCCGAGCTG |
| 271 | TTGCTGGATTATCCTC | TTTATTTTCCAAATGACA |
| 272 | TCTGTATTTATGGCAAATAAGA | TTCACTCGGAGTTGGAG |
| 272d | TCTATGAGTTCTCTGGAAGTT | TTCACTCGGAGTTGGAG |
| 273 | TCTGGTGTCCTCAACTCTG | AATGTAAATGACAAAGGTA |
| 274 | TCTGTTCATGATTTTGGTGA | GTTTTTTAATGGTTTGC |
| 275 | TCTGGGGTTTGGTTTTATA | TTTATCATAAGCATCTAGAC |
| 276 | TCTCAATCAGACATTAAAGCA | CTGATCTCTTGTTGATGC |
| 277 | TCTATTTGGAGGGGGGAAA | AAGCAGGGGAGCAATA |
| 277d | TCTACCAAATTTGACTGGG | AAGCAGGGGAGCAATA |
| 278 | TCTGTTACGTTTTTCTTAT | CTGAGCAACACCTGTC |
| 279 | TCTAAAAAGAAAAGTTTAATTAGC | GGCAATTTTGTGGCAA |
| 280 | TTTGATTTTTTTAAGAAAA | TTGCTTAGTTAATGGCT |
| 281 | TCTAAGAAATTAATTATAGGTATTT | AGGCGTTGAATATAATTC |
| 281d | TCTGGTTTTTCGTTTTTGA | AGGCGTTGAATATAATC |
| 282 | TCTCTATTCTCAGATGAAACAA | CTTTTCAACTCCAAACA |
| 283 | TCTGTTAAATTAAAATCGTACTG | GAGTTGTCTTTTTTTGTC |
| 284 | TCTATGCAACGATTAGGAC | GCAATCACAATTGACAT |
| 285 | TTAGGTGAAAGCAAATC | CTTTGTCTGCTTCACTT |
| 286 | TCTGGAGGATTTTATATGAAAG | TTGTATCTTCTCCTGACC |
| 287 | TCTGCACACACACCTACTAGT | TTGGTTAATCGTCTTG |
| 287d | TCTAACAATCGTTCAAAGC | TTGGTTAATCGTCTTG |
| 288 | TCTAAAAAGTTTTTAAAAGTTTT | TTTAGTTACTTTCATAAATGG |
| 288d | TGGAATAATCATCAGTCA | TTTAGTTACTTTCATAAATGG |
| 289 | TCTCAATCTAAAGGGCAAA | ATATAATTCCTCTAAAACTAGC |
| 289L | TCTCAATCTAAAGGGCAAA | CCACTTCAAATTAACTAAC |
| 290 | TATTACTTATCAAAAGAAAAGG | ATTCCTTGAACACGAA |
| 291 | TCTCAAGTATTAAATGACAATGG | GTGCCATTCATTCTCT |
| 292 | TTGAATCGTAAAAAAAGG | TTGTCCTGTGAACTGTG |
| 293 | TCTATGGGTCTAGCAACAA | AGGGTTTATTTGTTGAAG |
| 293d N-term | TCTATGGGTCTAGCAACAA | TCCTGATTTATCCACTG |
| 293d C-term | TCTGTTACAGCTAAACACGG | AGGGTTTATTTGTTGAAG |
| 294 | TCTGGTCATTTTAGTGAAAAA | CAAAATACCTAAGCTAGC |
| 295 | TCTAGCGACATAAAAATCAT | ACGAACTTCCATAACC |
| 296 | TCTAAAGGTATTATTTTAGCG | GGCTTCTCCAATCAAA |
| 297 | TCTATTCAGATTGGCAAATT | TTGAGTTAATGGATTGTT |
| 298 | TCTACTAAATTTATTGTTGATTCA | TAGCGTTATTTCACTGTG |
| 299 | TTTGAAATACTTAAACCTG | TTTCTCCGCCCAGTCA |
| 300 | TCTGCTTCTACAAATAATGTTTC | CCGTTTATTCTTTCTACTG |
| 301 | TCTGTAATTAATATTGAGCAAGC | CATATCTGTTGCATCAAT |
| 302 | TCTGAAATCAACACTGAAATAG | AACTGGCTTTTTAGTCAG |
| 303 | TCTACAAGGCATATAAAAATTTC | TTTATTATTTAATTCTTCAATA |
| 304 | TCTAACGAAATCAAATGCCC | GTCTTTTAGAGCATCGA |
| 305 | TCTGGACGAGTAATGAAAACA | CTCTCCTCTAAGACTTTCG |
| 306 | TCTGGGAAAAAAATTGTTTT | TCCTTTTGTTACTTTTGC |
| 307 | TCTAAATTTACAGAACTTAACTTAT | TTTATCGCCTTTGTTG |
| 308 | ATGACACAGATGAATTTTA | ATGTTCAGGTTCTCCG |
| 309 | TTGCAACTTGGAATTG | TTCCATTATCTTCAAGTTA |
| 310 | TCTGCTAAAGAGAGGGTAGAT | CTCTTCTTCATTTTTCTA |
| 311 | TCAATTATTACTGATGTTTAC | TTTTTTTAAGTTGTAGAATG |
| 312 | TCTACTGCAACTAAACAACAT | GTTTTTTGATGCTTCTTG |
| 313 | TCTAAACGTATTGCTGTTTTA | TTTACTACTTTGGTTGGC |
| 314 | TCTAAATTTTATCTTGTTAGACAC | GTGTGTCATTTTGACCT |
| 315 | TCTATAGGGGATTATTCAGTAA | TCCTTCAAGATCATTTAA |
| 316 | TCTACTGAACGAACATTCGA | ACCTCCTTTTCTTTCATT |
| 317 | TCTAATAAGCCATATTCAATAG | ATCTTCTCCTAACTTACCC |
| 317d N-term | TCTAATAAGCCATATTCAATAG | ACTAGCTAGATTCTTAACGC |
| 317d C-term | TCTGACTTGAATGGCAATAT | ATCTTCTCCTAACTTACCC |
| 318 | TCTATTGATTTTATTTCTATTG | GCCTCTTTCTCCAAAT |
| 319 | TTAAAACATTTTGGTAGTAA | ATGTCCTGTTATATCTTCTT |
| 320 | TCTACTATTTATGACCAAATTG | GCGTTGAATAATGGTT |
| 321 | TCTAAAAATAAAAAAGATCAGTT | TATTTCTTTAGTTTCTTCAA |
| 322 | TCTCAAGAAACAGATACGACG | TAATAAAAATTATATAAGAACCT |
| 323 | TCTGGTAATGAGTCAAAGAAC | TTCTGTCTTATAAGCATAAG |
| 324 | TCTGGAAGTAAATCAGCTTC | TTTTTTATAAGCATGTGTA |
| 325 | TCTGCTTGGCAACTTGTTC | ATGAGACATAAGGTCTTG |
| 326 | TCTGGCATCTCAGACTTACC | GTTGGAGCTCCTACTG |
| 326L | TCTAAATTCAAATCTGGGG | GTTGGAGCTCCTACTG |
| 326L N-term | TCTAAATTCAAATCTGGGG | CATTTCTTTGGTTAAAGC |
| 327 | TCTGGAGGGAAAATGAATC | TATCTCGAGTGCTATTTG |
| 327d N-term | TCTGGAGGGAAAATGAATC | CTCTTCATCGACATAGTAA |
| 327d C-term | TCTGGCAACTTCAAAGCAT | TATCTCGAGTGCTATTTG |
| 328 | TCTGACCAAGTCGGTGTCC | ATTTTACAGTAGTGGAGTTT |
| 329 | TCTAAATCAAAGACCTCTTCTA | TGTCCTCATTTTTTCA |
| 330 | TCTAATAAACGCGTAAAAATC | TTTAACAGTACGAACACG |
| 331 | TCTACCAGAACAGTAGCAAT | CCCCCTGTTTTTAAAAT |
| 332 | TCTACAAAAAACCTGTTATTAA | ACCCTCATATGATTCC |
| 333 | TCTATTGATATACAAAAAATAAAA | TTTAAAATAATGATACATCTC |
| 333d | TCTGGATCATTGAGGGCAA | TTTAAAATAATGATACATCTC |
| 334 | TCTAATTTAGTAAAAGTGAATAGTG | TAACCCCGTCTCAACA |
| 335 | TCTGAAGAAGAAAAATATTTTGA | TATTTTCGTTTTCTCAAA |
| 336 | TCTCAGGTTGAAGTTGACTTA | TTTCTCCAAATAATCTCTC |
| 337 | TCTGAAACAGATTCGTTTGTA | CCTATTTTAGTTTTAGAAGA |
| 338 | TCTGCTATAATAGACAAAAAG | GAAATCATAGCTTCCC |
| 339 | TCGAAACCGATTAAGAT | ACCTTTTACTTTTGGTAGT |
| 339d | TCTCAAGTCATGCGCTATG | ACCTTTTACTTTTGGTAGT |
| 340 | TCTGGATTTCTCTATAATTACTTC | TTGTTTGTGAAGTAAAACG |
| 341 | TCTGGAAAACCATTGTTAAC | TAATTTAAAAATTGCATAAA |
| 342 | TCTCAGAAAATTGAAGGTATT | TTTCGTTACCATATCTAGA |
| 343 | TCTGAAATGCAAGTTCAAA | TAAATCATGGAAACTAGC |
| 344 | TCTGCACAACGCAGAATGT | AAAGCCCAACCTTCCG |
| 345 | TCTAAAAACCTGAATTGGG | GTTTCCACGTCCTTTC |
| 346 | TCTAATAAAATAGCTAATACAGAAG | AAGTTTATTCAAATCTGG |
| 347 | TCTATTGATATTCATTCTCATATC | AATGTAATGGTTTTTTAATA |
| 348 | TCTACTGGATCTAAAAAATTAGC | AGCTAAAATACCTAACCAG |
| 349 | TCTAAAGATCGCTTATATAATAAA | ATTTTTTAAACGACTCAT |
| 350 | TCTGCAAAAGATATAATTAAGGTT | AGCGGAACGGTGAATA |
| 351 | TCAGAAGATCAAAAACA | ATAATCTAAACTATCAGCTCT |
| 352 | TCTACTTTTTTTAAAAAGCTAAA | ATCTCCTATTGTAATTTTGA |
| 352d | TCTGGTACAGATAGTAAATTTGG | ATCTCCTATTGTAATTTTGA |
| 353 | TCTACAATGTTAAAAATTGAAA | CACCTCTTTTGTCAGA |
| 354 | TCTATTAAAGAACTAAAAGAATTT | TTTGTTAGCGAGTAAGTC |
| 355 | TCTCGCTCACTACCTT | TTTATCATCCTCCTTAATAA |
| 356 | TCTAAATTCTATATTATTGATGATG | AAACGTTTTACTCTGTAAAA |
| 357 | TTGGAACATTTTTATATTAT | AAATAAGAATGTTAAAAGAGC |
| 358 | TTTTATACAATTGAAGAGC | TTCCCCAAAAATTTCT |
| 359 | TCAAGAAATAATTACGGT | ACGCAGTCCCATTTTC |
| 360 | TCTATAATGAAGGCGGTCT | CTGGCATGAGGTCTCA |
| 361 | TCTAGCGTATATGTTAGTGGA | CCTTTTTTCAATAATAGC |
| 362 | TCTACTAAACCACAGGGGG | ATCTTTAATCTTACCATCC |
| 362d N-term | TCTACTAAACCACAGGGGG | TGCTGCTACTGCAATG |
| 362 C-term | TCTGGTAATGAAGGAAATATCAC | ATCTTTAATCTTACCATCC |
| 363 | TCTCTCGAATTAAAAAATATTG | TAAATTCCTTTGTTGTAATA |
| 364 | TCTAACTATATGGGTATGGGC | ACCATCAGTTGTCACC |
| 365 | TCTGGAACTGCTACATATAGTAGG | TATTGACCAGTGCACG |
| 366 | TGGCTTGACATTATTTT | TTTTTTTGAATTTGTAAAAG |
| 367 | TCTAAGAAATTAAAAATATTCCC | AGAGATTATTTTTATTTTAAAT |
| 368 | TCTAAAATCATTATTCAACGT | TTTATTTTTAGTATCTAAAACG |
| 369 | TCTAGTAGAATGATTCCAGG | TTTAGAAACTCCAAGTATCTC |
| 370 | TCTACCGAATTTAATGACG | GTTAATTTGACTATTGATATATT |
| 371 | TCTAAAGATAGATATATTTTAGCAG | TAAACTCTCAAAAGCTAAAC |
| 372 | TCAGAAAAATATTCCACT | ACGTTCTTCTCTGGCT |
| 373 | TCTGAAATTGGTCAGCAAA | ACTTAAATGGAACAACC |
| 374 | TCTAAGTTCGAAAATATAATATATG | TTTGCCTAAAAAATTAGG |
| 375 | TCTGAAAAAGAAACTATTTTAAGT | GGCTTTCCTCCCTTCA |
| 376 | TCTAAAGAAAAGAAAAATTTGG | TTCATCTTTTTCAATATCA |
| 377 | TCTGGTAATAAACTGATGTATCA | GTGAGAGTGTCTTTGTTT |
| 378 | TCTGAAGATCAACTCACTATATTT | CAGATTTTTAGCTACTTGTC |
| 379 | TCTCAAATTACCCGAGAAG | TCTAGAGCGCTTTATAAG |
| 380 | TCTCTTAAAAGATTACTTACTGAAG | TTTTCTAATAGTTAGAAGCC |
| 381 | TCTCTTGGGATAGCTCACA | TTTTAAATGTGCAGAGA |
| 382 | TCTATAAAGTTTAAATTATTTTTTAA | ATTTATAATTTCCTTGGG |
| 383 | TCTATTTTACAGACGAATATACTAT | TCTATAATATCTCTCTAAAGTGA |
| 384 | TCTAGAATAATTGTTGTCGG | CCTCGCTAACATATCAC |
| 385 | TCTAATGTAAAAAAACGC | AGCTCTTACAGTCTTGC |
| 386 | TCTCTAGTATCAAAGGAGAAAGC | TTGTCTGAGTGACCAA |
| 387 | TCTGGTATGTTGTTAGCA | ATAATATGAAATATGTTGTTCA |
| 388 | TCTCTTATGATAATAAATTCATTCG | TCCGCAGAGTAAAAAA |
| 389 | TCTATGAATAGTGAACATAAAATT | TTCATAAATGTGCCAA |
| 390 | TCTAGGGAAACTTACTGGA | TTCATCTCTGCTCACC |
| 391 | TCTAAAAAAGTCATCGATTTAA | TTCTCCTTCAGCTTTTA |
| 392 | TCTATTACATATGATTTCACAAG | GTCATTTTTTCTAAAGTTTG |
| 393 | TCTAATAAATCTTGGTTGAGAA | TTTTTGTAGTTGTTTCAAT |
| 394 | TCTCCTATGTTGTCTGTTGG | TTTCATTAGATAACTATTCAGC |
| 395 | TCTACTTATCAAAAAACAGTTG | TATAGACTGAAGATAATTAATTAA |
| 396 | TTTGTCAAAGGGATTT | AAATCGATTAATCAAGTC |
| 397 | TCTAAATTATTTGATAAGTTTATAGA | TCTAAAGTAGTCCTTTAGACTA |
| 397d | TCTAAAACTGCTACAGTTAG | TCTAAAGTAGTCCTTTAGACTA |
| 398 | TATTTAGAACAATTAAAAGAGG | TTTGTCCATAATCATTTC |
| 399 | TCTAAAGTTTTAGTAGTTGATGAT | GGTAGATATGCCTAACATT |
| 400 | TCTAAAATAGTTGAAGGCG | GTTTCCTTCCAAAAAA |
| 401 | TCTGGAATTGAATTTAAAAATG | TCCATGCTTAATAGCC |
| 402 | TCTGGAAAATATTTTGGTACAG | ATCTAAACCAATTTCTGTAC |
| 403 | TCTGAGGTTAGAATGGTAACTC | GTCCACAAAAACGTCT |
| 404 | TCTAAAATAGATGACCTAAGAAA | TAGATGTTCTACGGAGAA |
| 405 | TTGAAAATTCAGTATTATCA | AAAGATGGCAAGCCAT |
| 406 | TCTGATAAAAATAATTTAGAAGACT | TCTCTCTCCACACCATA |
| 407 | TCTAAAATTGACATGAGGAA | CTTACCTCCTGTGGCT |
| 407d | TCTAAAATTGACATGAGGAA | CTTTTGTTGGTTACCTC |
| 408 | TCTAACCACTTACTTAACCTCA | TATTGTTAAATATGATGAAATG |
| 409 | TCTAAGGTAGTAGTAGCTATTGAT | ATGATTATACAAATTGATTAAT |
| 409d | TCTACTGAAGAGAGAAATCCT | ATGATTATACAAATTGATTAAT |
| 410 | TCTGCTTTATTATCAGTTATTGTC | TCCCTCTTCCTTGACA |
| 411 | TCTAAAGACTATATTAACAGAATATT | AACGTTTTTGAGCTTT |
| 412 | TCTGGATTTTTTGCACAGC | TTTTGTCTTAAACGTTCT |
| 413 | TCTATTGTTGGTGAACAAGA | TTTAGATAGTCTAGCCATTT |
| 414 | TTAAATCAATATTTTCTGC | ACGGCTTGGGGCAGAG |
| 415 | TCTGAGCGAATTCCTGTTC | TACCATTATCCGTGCT |
| 416 | TCTGAAGTCATTCGTGAACA | ACTATTAAACTCCAATGTTA |
| 417 | TCAAAACAATATGATTATATC | GCGCATTGTAACAAAT |
| 418 | TCTAGCAAGCCTAATGTTG | TTTTGGTAAAAGGTCTG |
| 419 | TCTGATTTAAATAATTACATCGC | TCCTGGAAAGTTCATC |
| 420 | TCTAAACGTGAATTACTACTCG | TAGTTTATCTAAAGCGTTC |
| 421 | TCTATACGCCAGTTTTTAAG | TTTATGTATAGAAACAGCAG |
| 422 | TTTTCGAGCGATTTTG | AATGTACATAACAATAGAGAGC |
| 423 | TCTGTAACCAAAGTTGAAGAG | CAACGATCCCAAGAAC |
| 424 | TCTATGAAAGATTTTATTGAATG | GCCATTCTTACCTCCT |
| 424d | TCTATGAAAGATTTTATTGAATG | ACGTTTTTTCTGACCG |
| 425 | TCTATAGCCTTTAATAGTTTATTT | TATAAAATAAATTTGAAGATCT |
| 426 | TCTD440ACAGTTTATAATATAAACCATG | ATCATCTTGTACCAACTC |
| 427 | TATTCTTTTGAAGAACTTTT | GCCAATAAATTCACGG |
| 428 | TCTATAAAAATTTTGATCCC | AGTCTGTTTTTTAACAAAAG |
| 429 | TCTAATCATTCCATTGAATC | TGGTTTTAGAACAACTTTA |
| 430 | TTACAAAAAAAATATCGG | AATTAAGCTGAAAATGAC |
| 431 | TCTGCGGCTCAATTAGCTG | ATTATATTCTTTTAATTTGTCA |
| 432 | TCTCGTACCTTCAAACCAG | CTTACGACGTCCTGGA |
| 433 | TCTATTAAAGCAACTTTTACTC | GTGTGTCATGACTACTGTAC |
| 434 | TCAATTTTTCAGACAACA | TGAGTAGAGCACAAGC |
| 642 | TCTAGAAAACGTAATGATACATT | GAAACGAATACGTTCTT |
| 643 | TCTGATTGTCAAATTACACCA | ACTACCTACCGTTTTCAC |
| 644 | TCTATTTTTCGTGGTGATAA | TTTGATGGTAACAGTCG |
| 645 | TTTTTTAATATTGAATATCAC | AGAAAGGCGCTCTTCT |
| 646 | TCTAAGGGAGTCCAATATATG | TATCTTTAATAAAGCCCTA |
| 647 | TCTCGTCGCATGAATACCA | CATCCCATAAATTTGTT |
| 648 | TCTATAGAATTTTCAGGGC | CAAGACATTTCTTAAAGC |
| 649 | TCTGCTACTCACTCTAACTCAG | TTTTGTTTTAGCGATG |
| 650 | TGCTCTTCTTCAAATACT | TTTTAAACCATGCTGT |
| 651 | TCTCTAACACCATTTACAAAAG | TTTGTAAAGACCTTCTTT |
| 652 | TCTCAACAAGGTATTATGGATA | TTCCTCGTTTATTAATTT |
| 653 | TCTAAAATTTTAGGTACACCA | AAAGAAAAGATGTGCC |
| 654 | TCTGGAAAAATGGTTAAGAA | CTGTGCAGGCTCAAAT |
| 655 | TCTAAATTCGTCCGAACCGT | AATTGTCCAGTCTAAGTTA |
| 656 | TCTGGTCTTCCAACGCAGC | ATTTAGTGTTATTTCTCCTG |
| 657 | TGCTCAGGTAAAACAT | TTTTTTAAGTGATGATGAA |
| 658 | TCTGAAAGCAAATCTTTGC | CTTTGTCTGCTTCACTT |
| 659 | TGTGCTAATTGGATTG | TTTTGGGGTTACTTTAC |
| 660 | TGTGGAAATGTCGGAG | TTTTGCTGAAATAATGTT |
| 661 | TGTCAGTCAAACCACA | ATCATACGAATGCAAC |
| 662 | TCTGCTAGTTTTTATTTTTTCC | TTTTTCATATTTTTTCAAA |
| 663 | TGTGGAAGTAAATCAGC | ATTATTTTTATAAGCATGTG |
| 664 | TCTGTTAAATTAAAATCGTTACTG | GAGTTGTCTTTTTTTGTC |
| 665 | TCTATTGCTGGTCCTAGTG | GATAAGCACTTTCCTTAA |
| 666 | TTATTTTTTGGAAATTGG | GCCTAAAAACCAATCA |
| 667 | TCTGCTGTATTTACACTCGTC | ATGTTTATGGCTTGCT |
| 668 | TTTTATATGAAAGAACAACA | TTGTATCTTCTCCTGACC |
| 669 | TCAATTATTATTGGGTTAA | ATATACCCTAGACTTTTTGA |
| 670 | TCTCCTAAATTAACCCTAGTCT | GGCTTTAAAGTTCGATA |
| 671 | TCTAGTCTTGCGAAGGCAG | TTTATCGTAAGCACTTAGG |
| 672 | TCTGTATTTACACTCGTCTTACA | ATGTTTATGGCTTGCTT |
| 673 | TCTGGAGGATTTTATATGAAAG | TTGTATCTTCTCCTGACC |
| 674 | TCTGTTAAATTAAAATCGTTACTG | GAGTTGTCTTTTTTTGTCT |
| 675 | TCTGGTTCATCAGACAAACA | TTCAACTTGATTGCCA |
| 676 | TCTGTAGTTAAAGTTGGTATTAACG | TTTTGCAATTTTTGC |
| 677 | TCTGTATTAGAAGTACATGCTGA | TTTTAATGCTGTTTGAA |
| 678 | TCTGAGACACCAGTAATGGC | TTTTTTAGCTAAGGCTG |
| 679 | TCTGCTAACAAGCAGGATC | TTTTGCTAAACCTTCTG |
| 680 | TCTAATAAGTCCAGTAACTCTAAG | ATTCATATTAACACGATGC |
| 681 | TCTGCTTTTGATGTAATTATGC | TTTGCGTTTTGGAGGG |
| 682 | TCTATTAACTATGAGGTTAAAGC | TGCACCTTGATGGCGA |
| 683 | TCTGTAATTGTTGAACTTAGTTTG | CCATAATATTTGATGCTG |
| 684 | TCTCTTAGGAAGTATAAGCAAA | TTCTAATCCTACAGCATG |
| 685 | TCTAAAATTTGTCTGGTTGG | AAAAATTCCTCCTAAATTAA |
| 686 | TCTGACTTTTATGATATCAATCTT | AAAGTTTTGACTATTACTGATAG |
| 687 | TATGCTATTATGCAAAAAG | TGGGGGAGATAGTTATG |
| 688 | TCTGCAATCGTTTCAGCAG | TTGACAGAAAGCTAATTG |

TABLE III
RESULTS FOR in vivo GBS CHALLENGE

% survival

| GBS # | Pre-immune | Post-immune |
|---|---|---|
| 1 | 18.7 | 22.2 |
| 4gst | 19.4 | 37.2 |
| 4his | 25.0 | 75.0 |
| 8 | 14.3 | 42.1 |
| 10 | 29.1 | 36.0 |
| 15 | 30.0 | 60.9 |
| 16 | 33.3 | 53.8 |
| 18 | 29.4 | 50.0 |
| 21 | 5.9 | 10.0 |
| 22 | 36.8 | 63.1 |
| 24 | 38.5 | 41.4 |
| 25 | 28.6 | 85.7 |
| 32 | 20.0 | 25.0 |
| 35 | 0.0 | 17.6 |
| 45 | 26.7 | 37.5 |
| 48 | 20.0 | 25.0 |
| 52 | 14.2 | 17.3 |
| 53 | 23.8 | 29.2 |
| 54 | 22.7 | 44.0 |
| 55 | 50.0 | 52.9 |
| 57 | 33.3 | 55.6 |
| 58 | 6.7 | 11.8 |
| 62 | 15.8 | 36.4 |
| 63 | 21.4 | 42.9 |
| 65 | 3.7 | 23.3 |
| 67 | 23.5 | 27.8 |
| 71 | 13.3 | 26.7 |
| 73 | 28.6 | 39.1 |
| 80 | 38.8 | 56.5 |
| 84 | 33.3 | 37.5 |
| 85 | 30.8 | 62.5 |
| 90 | 14.3 | 22.7 |
| 94 | 25.0 | 30.0 |
| 95 | 16.7 | 23.1 |
| 98 | 5.9 | 11.1 |
| 100 | 26.9 | 42.9 |
| 103 | 16.7 | 52.9 |
| 106 | 10.0 | 18.2 |
| 110 | 11.1 | 30.0 |
| 113 | 17.6 | 29.4 |
| 114 | 40.0 | 52.2 |
| 117 | 27.8 | 36.8 |
| 119 | 36.4 | 52.2 |
| 139 | 23.1 | 26.7 |
| 150 | 21.6 | 44.4 |
| 153 | 25.0 | 30.0 |
| 155 | 22.6 | 36.8 |
| 157 | 14.3 | 31.8 |
| 158 | 22.6 | 40.0 |
| 163 | 29.6 | 37.9 |
| 164 | 25.0 | 43.8 |
| 173 | 17.9 | 38.7 |
| 176 | 20.0 | 38.9 |
| 177 | 21.7 | 33.3 |
| 181 | 5.0 | 21.7 |
| 186 | 41.2 | 52.6 |
| 188 | 11.8 | 23.5 |
| 189 | 21.4 | 31.6 |
| 195 | 32.1 | 64.7 |
| 206 | 33.3 | 50.0 |
| 211 | 30.8 | 33.3 |
| 232 | 50.0 | 57.1 |
| 233 | 34.8 | 55.2 |
| 236 | 57.1 | 70.6 |
| 243 | 46.7 | 52.9 |
| 263 | 15.4 | 35.7 |
| 273 | 61.5 | 75.0 |
| 276 | 23.8 | 44.4 |
| 296 | 25.0 | 28.6 |
| 297 | 13.3 | 23.5 |
| 298 | 20.0 | 22.2 |
| 302 | 30.0 | 52.2 |
| 304 | 33.3 | 40.9 |
| 305 | 42.1 | 70.0 |
| 316 | 38.5 | 42.9 |
| 318 | 7.1 | 15.8 |

TABLE IV
COMPARISON OF GBSnnn NUMBERING AND SEQ ID NUMBER

| GBS numbering | Sequence listing |
|---|---|
| GBS1 | SEQ ID 3532 & 8736 |
| GBS2 | SEQ ID 4530 & 8818 |
| GBS3 | SEQ ID 6266 & 8958 |
| GBS4 | SEQ ID 2 & 8786 |
| GBS5 | SEQ ID 2598 & 8674 |
| GBS6 | SEQ ID 398 & 8496 |
| GBS7 | SEQ ID 8790 & 9798 |
| GBS8 | SEQ ID 8694 |
| GBS9 | SEQ ID 4540 & 8822 |
| GBS10 | SEQ ID 8718 |
| GBS11 | SEQ ID 5884 & 8930 |
| GBS12 | SEQ ID 8764 & 9692 |
| GBS13 | SEQ ID 8484 |
| GBS14 | SEQ ID 5406 & 8892 |
| GBS15 | SEQ ID 4 & 8710 |
| GBS16 | SEQ ID 944 & 8538 |
| GBS17 | SEQ ID 1770 & 8602 |
| GBS18 | SEQ ID 6860 & 9002 |
| GBS19 | SEQ ID 4422 & 8812 |
| GBS20 | SEQ ID 308 & 8488 |
| GBS21 | SEQ ID 8762 |
| GBS22 | SEQ ID 8584 |
| GBS23 | SEQ ID 8512 |
| GBS24 | SEQ ID 1694 & 8598 |
| GBS25 | SEQ ID 3180 & 8714 |
| GBS26 | SEQ ID 8820 |
| GBS27 | SEQ ID 8774 |
| GBS28 | SEQ ID 8738 |
| GBS29 | SEQ ID 8744 |
| GBS30 | SEQ ID 8860 |
| GBS31 | SEQ ID 8702 |
| GBS32 | SEQ ID 8910 & 10142 |
| GBS33 | SEQ ID 5734 & 8912 |
| GBS34 | SEQ ID 5750 & 8916 |
| GBS35 | SEQ ID 8908 |
| GBS36 | SEQ ID 8542 |
| GBS37 | SEQ ID 8564 |
| GBS38 | SEQ ID 2122 & 8642 |
| GBS39 | SEQ ID 8480 |
| GBS40 | SEQ ID 8654 |
| GBS41 | SEQ ID 1176 & 8562 |
| GBS42 | SEQ ID 4856 & 8850 |
| GBS43 | SEQ ID 672 & 8520 |
| GBS44 | SEQ ID 9000 |
| GBS45 | SEQ ID 9018 |
| GBS46 | SEQ ID 1834 & 8608 |
| GBS47 | SEQ ID 8588 |
| GBS48 | SEQ ID 8594 & 8596 |
| GBS49 | SEQ ID 8494 & 9490 |
| GBS50 | SEQ ID 1236 & 8566 |
| GBS51 | SEQ ID 5410 |
| GBS52 | SEQ ID 3920 |
| GBS53 | SEQ ID 8586 |
| GBS54 | SEQ ID 3442 |
| GBS55 | SEQ ID 9020 & 10338 |
| GBS56 | SEQ ID 2510 & 8668 |
| GBS57 | SEQ ID 8854 |
| GBS58 | SEQ ID 8664 |
| GBS59 | SEQ ID 3744 |
| GBS60 | SEQ ID 8760 |
| GBS61 | SEQ ID 8776 |
| GBS62 | SEQ ID 2244 |
| GBS63 | SEQ ID 390 |
| GBS64 | SEQ ID 374 |
| GBS65 | SEQ ID 8544 |
| GBS66 | SEQ ID 3028 |
| GBS67 | SEQ ID 3746 |
| GBS68 | SEQ ID 4012 |
| GBS69 | SEQ ID 4916 |
| GBS70 | SEQ ID 3718 |
| GBS71 | SEQ ID 8906 |
| GBS72 | SEQ ID 1348 |
| GBS73 | SEQ ID 220 |
| GBS74 | SEQ ID 5872 |
| GBS75 | SEQ ID 8926 |
| GBS76 | SEQ ID 5862 |
| GBS77 | SEQ ID 3256 |
| GBS78 | SEQ ID 3262 |
| GBS79 | SEQ ID 3264 |
| GBS80 | SEQ ID 8780 |
| GBS81 | SEQ ID 2706 |
| GBS82 | SEQ ID 2898 |
| GBS83 | SEQ ID 8772 |
| GBS84 | SEQ ID 4182 |
| GBS85 | SEQ ID 216 |
| GBS86 | SEQ ID 2978 |
| GBS87 | SEQ ID 3452 |
| GBS88 | SEQ ID 5694 |
| GBS89 | SEQ ID 2682 |
| GBS90 | SEQ ID 8476 |
| GBS91 | SEQ ID 8938 |
| GBS92 | SEQ ID 8964 & 10238 |
| GBS93 | SEQ ID 2848 |
| GBS94 | SEQ ID 1592 |
| GBS95 | SEQ ID 2224 |
| GBS96 | SEQ ID 2130 |
| GBS97 | SEQ ID 800 |
| GBS98 | SEQ ID 8746 |
| GBS99 | SEQ ID 4240 |
| GBS100 | SEQ ID 8782 |
| GBS101 | SEQ ID 6902 |
| GBS102 | SEQ ID 6894 |
| GBS103 | SEQ ID 6 |
| GBS104 | SEQ ID 8778 |
| GBS105 | SEQ ID 1400 |
| GBS106 | SEQ ID 8502 |
| GBS107 | SEQ ID 6026 |
| GBS108 | SEQ ID 8532 |
| GBS109 | SEQ ID 4116 |
| GBS110 | SEQ ID 6832 |
| GBS111 | SEQ ID 8842 |
| GBS112 | SEQ ID 8904 |
| GBS113 | SEQ ID 300 |
| GBS114 | SEQ ID 8968 |
| GBS115 | SEQ ID 5164 |
| GBS116 | SEQ ID 5152 |
| GBS117 | SEQ ID 8962 |
| GBS118 | SEQ ID 2508 |
| GBS119 | SEQ ID 8814 |
| GBS120 | SEQ ID 8874 |
| GBS121 | SEQ ID 3826 |
| GBS122 | SEQ ID 9006 |
| GBS123 | SEQ ID 6310 |
| GBS124 | SEQ ID 260 |
| GBS125 | SEQ ID 3872 |
| GBS126 | SEQ ID 6736 |
| GBS127 | SEQ ID 8816 |
| GBS128 | SEQ ID 752 |
| GBS129 | SEQ ID 8990 |
| GBS130 | SEQ ID 9004 |
| GBS131 | SEQ ID 6198 |
| GBS132 | SEQ ID 8730 |
| GBS133 | SEQ ID 474 |
| GBS134 | SEQ ID 9008 |
| GBS135 | SEQ ID 8882 |
| GBS136 | SEQ ID 1188 |
| GBS137 | SEQ ID 3960 |
| GBS138 | SEQ ID 9052 |
| GBS139 | SEQ ID 884 |
| GBS140 | SEQ ID 8632 |
| GBS141 | SEQ ID 1768 |
| GBS142 | SEQ ID 8600 |
| GBS143 | SEQ ID 9054 |
| GBS144 | SEQ ID 2238 |
| GBS145 | SEQ ID 8700 |
| GBS146 | SEQ ID 8696 |
| GBS147 | SEQ ID 8526 |
| GBS148 | SEQ ID 9010 |
| GBS149 | SEQ ID 8732 |
| GBS150 | SEQ ID 3736 |
| GBS151 | SEQ ID 3188 |
| GBS152 | SEQ ID 3952 |
| GBS153 | SEQ ID 3904 |
| GBS154 | SEQ ID 4024 |
| GBS155 | SEQ ID 8796 |
| GBS156 | SEQ ID 4646 |
| GBS157 | SEQ ID 4812 |
| GBS158 | SEQ ID 5504 |
| GBS159 | SEQ ID 8628 |
| GBS160 | SEQ ID 8924 |
| GBS161 | SEQ ID 8922 |
| GBS162 | SEQ ID 168 |
| GBS163 | SEQ ID 224 |
| GBS164 | SEQ ID 1102 |
| GBS165 | SEQ ID 3672 |
| GBS166 | SEQ ID 8712 |
| GBS167 | SEQ ID 4214 |
| GBS168 | SEQ ID 9016 |
| GBS169 | SEQ ID 4346 |
| GBS170 | SEQ ID 8982 |
| GBS171 | SEQ ID 6720 |
| GBS172 | SEQ ID 6704 |
| GBS173 | SEQ ID 8788 |
| GBS174 | SEQ ID 6150 |
| GBS175 | SEQ ID 62 |
| GBS176 | SEQ ID 8478 |
| GBS177 | SEQ ID 8876 |
| GBS178 | SEQ ID 6078 |
| GBS179 | SEQ ID 8848 |
| GBS180 | SEQ ID 3062 |
| GBS181 | SEQ ID 1924 |
| GBS182 | SEQ ID 3774 |
| GBS183 | SEQ ID 4796 |
| GBS184 | SEQ ID 1978 |
| GBS185 | SEQ ID 1046 |
| GBS186 | SEQ ID 8470 |
| GBS187 | SEQ ID 844 |
| GBS188 | SEQ ID 3410 |
| GBS189 | SEQ ID 6986 |
| GBS190 | SEQ ID 8842 |
| GBS191 | SEQ ID 1814 |
| GBS192 | SEQ ID 8618 |
| GBS193 | SEQ ID 2382 |
| GBS194 | SEQ ID 3912 |
| GBS195 | SEQ ID 8 |
| GBS196 | SEQ ID 4944 |
| GBS197 | SEQ ID 5486 |
| GBS198 | SEQ ID 8896 |
| GBS199 | SEQ ID 1162 |
| GBS200 | SEQ ID 8936 |
| GBS201 | SEQ ID 4550 |
| GBS202 | SEQ ID 8666 |
| GBS203 | SEQ ID 6478 |
| GBS204 | SEQ ID 1996 |
| GBS205 | SEQ ID 18 |
| GBS206 | SEQ ID 8552 |
| GBS207 | SEQ ID 3822 |
| GBS208 | SEQ ID 3916 |
| GBS209 | SEQ ID 3918 |
| GBS210 | SEQ ID 3738 |
| GBS211 | SEQ ID 4680 |
| GBS212 | SEQ ID 8750 |
| GBS213 | SEQ ID 8500 |
| GBS214 | SEQ ID 8498 |
| GBS215 | SEQ ID 9022 |
| GBS216 | SEQ ID 8606 |
| GBS217 | SEQ ID 9024 |
| GBS218 | SEQ ID 8652 |
| GBS219 | SEQ ID 8646 |
| GBS220 | SEQ ID 2730 |
| GBS221 | SEQ ID 9028 |
| GBS222 | SEQ ID 3842 |
| GBS223 | SEQ ID 8794 |
| GBS224 | SEQ ID 9026 |
| GBS225 | SEQ ID 8834 |
| GBS226 | SEQ ID 4966 |
| GBS227 | SEQ ID 5030 |
| GBS228 | SEQ ID 5050 |
| GBS229 | SEQ ID 9056 |
| GBS230 | SEQ ID 1296 |
| GBS231 | SEQ ID 5810 |
| GBS232 | SEQ ID 5830 |
| GBS233 | SEQ ID 4722 |
| GBS234 | SEQ ID 1106 |
| GBS235 | SEQ ID 8560 |
| GBS236 | SEQ ID 6162 |
| GBS237 | SEQ ID 8706 |
| GBS238 | SEQ ID 4246 |
| GBS239 | SEQ ID 8980 |
| GBS240 | SEQ ID 8986 |
| GBS241 | SEQ ID 9030 |
| GBS242 | SEQ ID 9032 |
| GBS243 | SEQ ID 8678 |
| GBS244 | SEQ ID 6554 |
| GBS245 | SEQ ID 8994 |
| GBS246 | SEQ ID 6864 |
| GBS247 | SEQ ID 8856 |
| GBS248 | SEQ ID 454 |
| GBS249 | SEQ ID 8620 |
| GBS250 | SEQ ID 8634 |
| GBS251 | SEQ ID 2258 |
| GBS252 | SEQ ID 8648 |
| GBS253 | SEQ ID 2526 |
| GBS254 | SEQ ID 2710 |
| GBS255 | SEQ ID 2966 |
| GBS256 | SEQ ID 3424 |
| GBS257 | SEQ ID 3550 |
| GBS258 | SEQ ID 3752 |
| GBS259 | SEQ ID 8756 |
| GBS260 | SEQ ID 4162 |
| GBS261 | SEQ ID 1530 |
| GBS262 | SEQ ID 8572 |
| GBS263 | SEQ ID 1616 |
| GBS264 | SEQ ID 8824 |
| GBS265 | SEQ ID 4554 |
| GBS266 | SEQ ID 4652 |
| GBS267 | SEQ ID 4980 |
| GBS268 | SEQ ID 5038 |
| GBS269 | SEQ ID 5534 |
| GBS270 | SEQ ID 1998 |
| GBS271 | SEQ ID 8570 |
| GBS272 | SEQ ID 22 |
| GBS273 | SEQ ID 5994 |
| GBS274 | SEQ ID 774 |
| GBS275 | SEQ ID 2308 |
| GBS276 | SEQ ID 8942 |
| GBS277 | SEQ ID 8954 |
| GBS278 | SEQ ID 8524 |
| GBS279 | SEQ ID 6292 |
| GBS280 | SEQ ID 6254 |
| GBS281 | SEQ ID 4458 |
| GBS282 | SEQ ID 4444 |
| GBS283 | SEQ ID 9034 |
| GBS284 | SEQ ID 6456 & 8974 |
| GBS285 | SEQ ID 8802 |
| GBS286 | SEQ ID 9036 |
| GBS287 | SEQ ID 5354 |
| GBS288 | SEQ ID 5374 |
| GBS289 | SEQ ID 8616 |
| GBS290 | SEQ ID 8680 |
| GBS291 | SEQ ID 8530 |
| GBS292 | SEQ ID 8998 |
| GBS293 | SEQ ID 8582 |
| GBS294 | SEQ ID 8604 |
| GBS295 | SEQ ID 2722 |
| GBS296 | SEQ ID 2658 |
| GBS297 | SEQ ID 3024 |
| GBS298 | SEQ ID 8704 |
| GBS299 | SEQ ID 3268 |
| GBS300 | SEQ ID 4170 |
| GBS301 | SEQ ID 8576 |
| GBS302 | SEQ ID 8670 |
| GBS303 | SEQ ID 8554 |
| GBS304 | SEQ ID 5846 |
| GBS305 | SEQ ID 208 |
| GBS306 | SEQ ID 212 |
| GBS307 | SEQ ID 8992 |
| GBS308 | SEQ ID 8880 |
| GBS309 | SEQ ID 3386 |
| GBS310 | SEQ ID 286 |
| GBS311 | SEQ ID 3964 |
| GBS312 | SEQ ID 4660 |
| GBS313 | SEQ ID 4090 |
| GBS314 | SEQ ID 8556 |
| GBS315 | SEQ ID 1766 |
| GBS316 | SEQ ID 2000 |
| GBS317 | SEQ ID 4210 |
| GBS318 | SEQ ID 8548 |
| GBS319 | SEQ ID 892 |
| GBS320 | SEQ ID 916 |
| GBS321 | SEQ ID 8846 |
| GBS322 | SEQ ID 8540 |
| GBS323 | SEQ ID 2102 |
| GBS324 | SEQ ID 8490 |
| GBS325 | SEQ ID 8900 |
| GBS326 | SEQ ID 8630 |
| GBS327 | SEQ ID 5856 |
| GBS328 | SEQ ID 6016 |
| GBS329 | SEQ ID 8928 |
| GBS330 | SEQ ID 8792 |
| GBS331 | SEQ ID 922 |
| GBS332 | SEQ ID 1004 |
| GBS333 | SEQ ID 1786 |
| GBS334 | SEQ ID 1784 |
| GBS335 | SEQ ID 1782 |
| GBS336 | SEQ ID 1886 |
| GBS337 | SEQ ID 2010 |
| GBS338 | SEQ ID 8638 |
| GBS339 | SEQ ID 2080 |
| GBS340 | SEQ ID 8594 & 8596 |
| GBS341 | SEQ ID 2280 |
| GBS342 | SEQ ID 2266 |
| GBS343 | SEQ ID 8644 |
| GBS344 | SEQ ID 8662 |
| GBS345 | SEQ ID 2442 |
| GBS346 | SEQ ID 2768 |
| GBS347 | SEQ ID 2766 |
| GBS348 | SEQ ID 8658 |
| GBS349 | SEQ ID 2360 |
| GBS350 | SEQ ID 8698 |
| GBS351 | SEQ ID 2970 |
| GBS352 | SEQ ID 8692 |
| GBS353 | SEQ ID 3454 |
| GBS354 | SEQ ID 8754 |
| GBS355 | SEQ ID 8752 |
| GBS356 | SEQ ID 8724 |
| GBS357 | SEQ ID 8720 |
| GBS358 | SEQ ID 3184 |
| GBS359 | SEQ ID 3948 |
| GBS360 | SEQ ID 3926 |
| GBS361 | SEQ ID 8770 |
| GBS362 | SEQ ID 8768 |
| GBS363 | SEQ ID 3816 |
| GBS364 | SEQ ID 1452 |
| GBS365 | SEQ ID 1398 |
| GBS366 | SEQ ID 8574 |
| GBS367 | SEQ ID 1340 |
| GBS368 | SEQ ID 1598 |
| GBS369 | SEQ ID 4822 |
| GBS370 | SEQ ID 8844 |
| GBS371 | SEQ ID 4926 |
| GBS372 | SEQ ID 4956 |
| GBS373 | SEQ ID 5062 |
| GBS374 | SEQ ID 8878 |
| GBS375 | SEQ ID 326 |
| GBS376 | SEQ ID 5380 |
| GBS377 | SEQ ID 5468 |
| GBS378 | SEQ ID 5570 |
| GBS379 | SEQ ID 8918 |
| GBS380 | SEQ ID 156 |
| GBS381 | SEQ ID 8934 |
| GBS382 | SEQ ID 8610 |
| GBS383 | SEQ ID 4738 |
| GBS384 | SEQ ID 8836 |
| GBS385 | SEQ ID 1094 |
| GBS386 | SEQ ID 9038 |
| GBS387 | SEQ ID 8558 |
| GBS388 | SEQ ID 9040 |
| GBS389 | SEQ ID 8516 |
| GBS390 | SEQ ID 8952 |
| GBS391 | SEQ ID 8522 |
| GBS392 | SEQ ID 6220 |
| GBS393 | SEQ ID 8966 |
| GBS394 | SEQ ID 8960 |
| GBS395 | SEQ ID 6276 |
| GBS396 | SEQ ID 8468 |
| GBS397 | SEQ ID 6262 |
| GBS398 | SEQ ID 8806 |
| GBS399 | SEQ ID 1960 |
| GBS400 | SEQ ID 3154 |
| GBS401 | SEQ ID 3170 |
| GBS402 | SEQ ID 4236 |
| GBS403 | SEQ ID 8798 |
| GBS404 | SEQ ID 8800 |
| GBS405 | SEQ ID 8508 |
| GBS406 | SEQ ID 8506 |
| GBS407 | SEQ ID 6484 |
| GBS408 | SEQ ID 9042 |
| GBS409 | SEQ ID 6678 |
| GBS410 | SEQ ID 4064 |
| GBS411 | SEQ ID 9044 |
| GBS412 | SEQ ID 9046 |
| GBS413 | SEQ ID 272 |
| GBS414 | SEQ ID 8946 |
| GBS415 | SEQ ID 8944 |
| GBS416 | SEQ ID 6044 |
| GBS417 | SEQ ID 1874 |
| GBS418 | SEQ ID 5146 |
| GBS419 | SEQ ID 2638 |
| GBS420 | SEQ ID 2104 |
| GBS421 | SEQ ID 2108 |
| GBS422 | SEQ ID 714 |
| GBS423 | SEQ ID 6884 |
| GBS424 | SEQ ID 4874 |
| GBS425 | SEQ ID 3978 |
| GBS426 | SEQ ID 3976 |
| GBS427 | SEQ ID 6958 |
| GBS428 | SEQ ID 3398 |
| GBS429 | SEQ ID 3402 |
| GBS430 | SEQ ID 8840 |
| GBS431 | SEQ ID 8902 |
| GBS432 | SEQ ID 8534 |
| GBS433 | SEQ ID 2558 |
| GBS434 | SEQ ID 8590 |
| GBS435 | SEQ ID 484 |
| GBS436 | SEQ ID 8472 |
| GBS437 | SEQ ID 466 |
| GBS438 | SEQ ID 362 |
| GBS439 | SEQ ID 900 |
| GBS440 | SEQ ID 8536 |
| GBS441 | SEQ ID 936 |
| GBS442 | SEQ ID 940 |
| GBS443 | SEQ ID 998 |
| GBS444 | SEQ ID 1776 |
| GBS445 | SEQ ID 8634 |
| GBS446 | SEQ ID 2048 |
| GBS447 | SEQ ID 1654 |
| GBS448 | SEQ ID 8592 |
| GBS449 | SEQ ID 1634 |
| GBS450 | SEQ ID 1630 |
| GBS451 | SEQ ID 2098 |
| GBS452 | SEQ ID 2062 |
| GBS453 | SEQ ID 8636 |
| GBS454 | SEQ ID 1734 |
| GBS455 | SEQ ID 1690 |
| GBS456 | SEQ ID 1684 |
| GBS457 | SEQ ID 8656 |
| GBS458 | SEQ ID 8650 |
| GBS459 | SEQ ID 2152 |
| GBS460 | SEQ ID 2148 |
| GBS461 | SEQ ID 2394 |
| GBS462 | SEQ ID 2778 |
| GBS463 | SEQ ID 8688 |
| GBS464 | SEQ ID 8684 |
| GBS465 | SEQ ID 8682 |
| GBS466 | SEQ ID 2694 |
| GBS467 | SEQ ID 2350 |
| GBS468 | SEQ ID 8660 |
| GBS469 | SEQ ID 2998 |
| GBS470 | SEQ ID 2988 |
| GBS471 | SEQ ID 2924 |
| GBS472 | SEQ ID 2910 |
| GBS473 | SEQ ID 2882 |
| GBS474 | SEQ ID 2878 |
| GBS475 | SEQ ID 2856 |
| GBS476 | SEQ ID 8690 |
| GBS477 | SEQ ID 3112 |
| GBS478 | SEQ ID 3432 |
| GBS479 | SEQ ID 3460 |
| GBS480 | SEQ ID 3504 |
| GBS481 | SEQ ID 8734 |
| GBS482 | SEQ ID 8740 |
| GBS483 | SEQ ID 3606 |
| GBS484 | SEQ ID 3562 |
| GBS485 | SEQ ID 3552 |
| GBS486 | SEQ ID 3762 |
| GBS487 | SEQ ID 3756 |
| GBS488 | SEQ ID 3732 |
| GBS489 | SEQ ID 3730 |
| GBS490 | SEQ ID 3704 |
| GBS491 | SEQ ID 3698 |
| GBS492 | SEQ ID 3252 |
| GBS493 | SEQ ID 3244 |
| GBS494 | SEQ ID 3238 |
| GBS495 | SEQ ID 8722 |
| GBS496 | SEQ ID 8716 |
| GBS497 | SEQ ID 3876 |
| GBS498 | SEQ ID 3858 |
| GBS499 | SEQ ID 8758 |
| GBS500 | SEQ ID 4022 |
| GBS501 | SEQ ID 4106 |
| GBS502 | SEQ ID 1406 |
| GBS503 | SEQ ID 8580 |
| GBS504 | SEQ ID 4578 |
| GBS505 | SEQ ID 4566 |
| GBS506 | SEQ ID 8832 |
| GBS507 | SEQ ID 8830 |
| GBS508 | SEQ ID 4644 |
| GBS509 | SEQ ID 8828 |
| GBS510 | SEQ ID 8826 |
| GBS511 | SEQ ID 4892 |
| GBS512 | SEQ ID 4970 |
| GBS513 | SEQ ID 4974 |
| GBS514 | SEQ ID 8862 |
| GBS515 | SEQ ID 8864 |
| GBS516 | SEQ ID 8866 |
| GBS517 | SEQ ID 8868 |
| GBS518 | SEQ ID 9012 |
| GBS519 | SEQ ID 5068 |
| GBS520 | SEQ ID 8870 |
| GBS521 | SEQ ID 5228 |
| GBS522 | SEQ ID 322 |
| GBS523 | SEQ ID 8492 |
| GBS524 | SEQ ID 8894 |
| GBS525 | SEQ ID 5430 |
| GBS526 | SEQ ID 5414 |
| GBS527 | SEQ ID 5524 |
| GBS528 | SEQ ID 8898 |
| GBS529 | SEQ ID 5670 |
| GBS530 | SEQ ID 5630 |
| GBS531 | SEQ ID 5588 |
| GBS532 | SEQ ID 1324 |
| GBS533 | SEQ ID 8914 |
| GBS534 | SEQ ID 8550 |
| GBS535 | SEQ ID 8568 |
| GBS536 | SEQ ID 1288 |
| GBS537 | SEQ ID 5798 |
| GBS538 | SEQ ID 8920 |
| GBS539 | SEQ ID 158 |
| GBS540 | SEQ ID 8482 |
| GBS541 | SEQ ID 184 |
| GBS542 | SEQ ID 9048 |
| GBS543 | SEQ ID 8932 |
| GBS544 | SEQ ID 5880 |
| GBS545 | SEQ ID 44 |
| GBS546 | SEQ ID 9014 |
| GBS547 | SEQ ID 12 |
| GBS548 | SEQ ID 8614 |
| GBS549 | SEQ ID 8612 |
| GBS550 | SEQ ID 4720 |
| GBS551 | SEQ ID 4710 |
| GBS552 | SEQ ID 1086 |
| GBS553 | SEQ ID 1088 |
| GBS554 | SEQ ID 1138 |
| GBS555 | SEQ ID 8748 |
| GBS556 | SEQ ID 5968 |
| GBS557 | SEQ ID 774 |
| GBS558 | SEQ ID 1192 |
| GBS559 | SEQ ID 1196 |
| GBS560 | SEQ ID 1268 |
| GBS561 | SEQ ID 8518 |
| GBS562 | SEQ ID 8676 |
| GBS563 | SEQ ID 2296 |
| GBS564 | SEQ ID 2300 |
| GBS565 | SEQ ID 8950 |
| GBS566 | SEQ ID 694 |
| GBS567 | SEQ ID 680 |
| GBS568 | SEQ ID 6300 |
| GBS569 | SEQ ID 8956 |
| GBS570 | SEQ ID 8972 |
| GBS571 | SEQ ID 8970 |
| GBS572 | SEQ ID 3300 |
| GBS573 | SEQ ID 3304 |
| GBS574 | SEQ ID 8726 |
| GBS575 | SEQ ID 8810 |
| GBS576 | SEQ ID 4418 |
| GBS577 | SEQ ID 8808 |
| GBS578 | SEQ ID 4382 |
| GBS579 | SEQ ID 4378 |
| GBS580 | SEQ ID 1932 |
| GBS581 | SEQ ID 8622 |
| GBS582 | SEQ ID 8624 |
| GBS583 | SEQ ID 1962 |
| GBS584 | SEQ ID 8708 |
| GBS585 | SEQ ID 8672 |
| GBS586 | SEQ ID 6444 |
| GBS587 | SEQ ID 8976 |
| GBS588 | SEQ ID 8804 |
| GBS589 | SEQ ID 8514 |
| GBS590 | SEQ ID 8510 |
| GBS591 | SEQ ID 630 |
| GBS592 | SEQ ID 8504 |
| GBS593 | SEQ ID 514 |
| GBS594 | SEQ ID 8978 |
| GBS595 | SEQ ID 6738 |
| GBS596 | SEQ ID 6712 |
| GBS597 | SEQ ID 6686 |
| GBS598 | SEQ ID 6674 |
| GBS599 | SEQ ID 6662 |
| GBS600 | SEQ ID 8988 |
| GBS601 | SEQ ID 8578 |
| GBS602 | SEQ ID 8948 |
| GBS603 | SEQ ID 6132 |
| GBS604 | SEQ ID 5282 |
| GBS605 | SEQ ID 5302 |
| GBS606 | SEQ ID 8884 |
| GBS607 | SEQ ID 5314 |
| GBS608 | SEQ ID 8886 |
| GBS609 | SEQ ID 8888 |
| GBS610 | SEQ ID 8890 |
| GBS611 | SEQ ID 6028 |
| GBS612 | SEQ ID 8474 |
| GBS613 | SEQ ID 5092 |
| GBS614 | SEQ ID 8872 |
| GBS615 | SEQ ID 6052 |
| GBS616 | SEQ ID 8940 |
| GBS617 | SEQ ID 1824 |
| GBS618 | SEQ ID 6600 |
| GBS619 | SEQ ID 6608 |
| GBS620 | SEQ ID 6620 |
| GBS621 | SEQ ID 864 |
| GBS622 | SEQ ID 8640 |
| GBS623 | SEQ ID 8996 |
| GBS624 | SEQ ID 9050 |
| GBS625 | SEQ ID 2812 |
| GBS626 | SEQ ID 8858 |
| GBS627 | SEQ ID 8852 |
| GBS628 | SEQ ID 8784 |
| GBS629 | SEQ ID 6950 |
| GBS630 | SEQ ID 4502 |
| GBS631 | SEQ ID 4492 |
| GBS632 | SEQ ID 4488 |
| GBS633 | SEQ ID 8728 |
| GBS634 | SEQ ID 3066 |
| GBS635 | SEQ ID 8838 |
| GBS636 | SEQ ID 4772 |
| GBS637 | SEQ ID 8626 |
| GBS638 | SEQ ID 8984 |
| GBS639 | SEQ ID 8546 |
| GBS640 | SEQ ID 6780 |
| GBS641 | SEQ ID 900 |
| GBS642 | 1312 |
| GBS643 | 1772 |
| GBS644 | 1956 |
| GBS645 | 2726 |
| GBS646 | 3348 |
| GBS647 | 3770 |
| GBS648 | 4934 |
| GBS649 | 5076 |
| GBS650 | 5446 |
| GBS651 | 5602 |
| GBS652 | 5610 |
| GBS653 | 5760 |
| GBS654 | 6096 |
| GBS655 | 6656 |
| GBS656 | 9324 |
| GBS657 | 10782 |
| GBS658 | 8802 |
| GBS659 | 9344 |
| GBS660 | 9410 |
| GBS661 | 9428 |
| GBS662 | 9286 |
| GBS663 | 9294 |
| GBS664 | 9034 |
| GBS665 | 10546 |
| GBS666 | 10610 |
| GBS667 | 9052 |
| GBS668 | 9036 |
| GBS669 | 9010 |
| GBS670 | 10730 |
| GBS671 | 9020 |
| GBS672 | 9052 |
| GBS673 | 9036 |
| GBS674 | 9034 |
| GBS675 | 10634 |
| GBS676 | 10692 |
| GBS677 | 10746 |
| GBS678 | 9330 |
| GBS679 | 9404 |
| GBS680 | 6668 |
| GBS681 | 4264 |
| GBS682 | 6762 |
| GBS683 | 9290 |
| GBS684 | 9614 |
| GBS685 | 10454 |
| GBS686 | 2774 |
| GBS687 | 4620 |
| GBS688 | 10224 |

TABLE V
NUCLEOTIDES DELETED IN EXPRESSION OF GBSnnn PROTEINS

| GBS | Deleted nucleotides |
|---|---|
| 11d | 1-153 |
| 31d | 1-129 |
| 64d | 1-165 |
| 68d | 2029-2796 |
| 70d | 1-402 |
| 74d | 1-975 |
| 79d | 1-201 |
| 105dN | 2689-4119 |
| 105dC | 1-2688 |
| 105d | 1-2688 |
| 109d | 1-120 |
| 130d | 1-518 |
| 170d | 1-111 |
| 182d | 1596-1674 |
| 195C | 1-1710 |
| 195N | 1711-3243 |
| 209d | 757-912 |
| 210d | 1-99 & 777-879 |
| 220d | 1-120 |
| 231d | 1-54 |
| 235d | 1-270 |
| 246d | 1-75 |
| 248d | 1-591 |
| 272d | 1-531 |
| 277d | 1-318 |
| 281d | 1-54 |
| 287d | 1-108 |
| 288d | 1-72 |
| 293C | 1-1229 |
| 293N | 1230-2379 |
| 317N | 1729-4107 |
| 317C | 1-2379 |
| 326N | 1707-2652 |
| 326dN | 2326-3927 |
| 327N | 3034-6831 |
| 327C | 1-3033 |
| 333d | 1-150 |
| 339d | 1-111 |
| 352d | 1-158 |
| 362N | 1707-2652 |
| 362C | 1-1706 |
| 397d | 1-348 |
| 399d | 1-111 |
| 407d | 1174-1473 |
| 409d | 1-297 |
| 424d | 1327-1671 |

TABLE VI
PREDICTED FUNCTIONS FOR CERTAIN SEQ IDs

| SEQ ID | Function |
|---|---|
| 6 | manganese ABC transporter, ATP-binding protein (psaB) |
| 12 | iron (chelated) ABC transporter, permease protein (psaC) |
| 18 | peptidyl-prolyl cis-trans isomerase, cyclophilin-type |
| 26 | chorismate binding enzyme (pabB) |
| 30 | probable transposase (insertion sequence IS861) |
| 42 | peptidase, M20/M25/M40 family |
| 44 | drug transporter |
| 50 | ribosomal protein L11 (rplK) |
| 54 | ribosomal protein L1 (rplA) |
| 62 | peptide ABC transporter, permease protein |
| 66 | peptide ABC transporter, permease protein |
| 78 | uridylate kinase (pyrH) |
| 84 | ribosome recycling factor (frr) |
| 104 | PhoH family protein (phoH) |
| 110 | MutT/nudix family protein superfamily |
| 116 | tetracenomycin polyketide synthesis O-methyltransferase TcmP |
| 134 | phosphopantetheine adenylyltransferase (coaD) |
| 140 | PDZ domain protein |
| 144 | 5-nucleotidase family protein |
| 156 | VanZF-related protein |
| 158 | ABC transporter, ATP-binding/permease protein |
| 162 | ABC transporter, ATP-binding/permease protein |
| 168 | BioY family protein |
| 180 | acetyl-CoA acetyltransferase |
| 188 | endonuclease III (nth) |
| 196 | glucokinase (gki) |
| 200 | rhodanese family protein |
| 204 | elongation factor Tu family protein (typA) |
| 212 | UDP-N-acetylglucosamine-N-acetylmuramyl-(pentapeptide) pyrophosphoryl- |
| 216 | cell division protein DivlB |
| 220 | cell division protein FtsA (ftsA) |
| 224 | cell division protein FtsZ (ftsZ) |
| 236 | ylmH protein (ylmH) |
| 240 | cell division protein DivIVA (divIVA) |
| 244 | isoleucyl-tRNA synthetase (ileS) |
| 252 | MutT/nudix family protein |
| 256 | ATP-dependent Clp protease, ATP-binding subunit ClpE (clpE) |
| 268 | methylenetetrahydrofolate dehydrogenase/methenyltetrahydrofolate cycloh |
| 274 | exodeoxyribonuclease VII, large subunit (xseA) |
| 278 | exodeoxyribonuclease VII, small subunit (xseB) |
| 282 | geranyltranstransferase (ispA) |
| 286 | hemolysin A |
| 290 | transcriptional repressor |
| 296 | DNA repair protein RecN (recN) |
| 300 | degV family protein (degV) |
| 322 | peptide ABC transporter, permease protein (oppC) |
| 326 | peptide ABC transporter, ATP-binding protein (oppD) |
| 328 | peptide ABC transporter, ATP-binding protein (oppF) |
| 348 | 4-diphosphocytidyl-2C-methyl-D-erythritol kinase (ispE) |
| 352 | adc operon repressor AdcR (adcR) |
| 356 | zinc ABC transporter, ATP-binding protein (adcC) |
| 370 | tyrosyl-tRNA synthetase (tyrS) |
| 374 | penicillin-binding protein 1B (pbp1B) |
| 378 | DNA-directed RNA polymerase, beta subunit (rpoB) |
| 382 | dna-directed ma polymerase beta' chain |
| 390 | competence protein CglA (cglA) |
| 406 | acetate kinase (ackA) |
| 410 | transcriptional regulator |
| 418 | pyrroline-5-carboxylate reductase (proC) |
| 422 | glutamyl-aminopeptidase (pepA) |
| 432 | thioredoxin family protein |
| 436 | tRNA binding domain protein (pheT) |
| 440 | methyltransferase |
| 442 | single-strand DNA-binding protein, authentic point mutation (ssbB) |
| 454 | GAF domain protein (lytS) |
| 466 | lrgB protein (lrgB) |
| 474 | oligopeptide ABC transporter, permease protein |
| 476 | peptide ABC transporter, ATP-binding protein |
| 480 | peptide ABC transporter, ATP-binding protein (oppF) |
| 484 | PTS system, IIABC components (treB) |
| 488 | alpha amylase family protein (treC) |
| 494 | transcriptional regulator, BglG family |
| 506 | transcriptional regulator, BglG family |
| 508 | PTS system, IIB component |
| 514 | PTS system, IIC component |
| 518 | transketolase, N-terminal subunit (tktA) |
| 528 | ribosomal protein S15 (rpsO) |
| 546 | cysteinyl-tRNA synthetase (cysS) |
| 554 | RNA methyltransferase, TrmH family, group 3 |
| 562 | DegV family protein (degV) |
| 572 | ribosomal protein S9 (rpsl) |
| 576 | integrase, phage family |
| 580 | transcriptional regulator |
| 596 | recombination protein |
| 626 | transcriptional regulator MutR |
| 630 | transporter |
| 640 | amino acid ABC transporter, permease protein (opuBB) |
| 642 | glycine betaine/L-proline transport ATP binding subunit (proV) |
| 654 | lectin, alpha subunit precursor |
| 662 | transcriptional regulator |
| 664 | acetyltransferase, GNAT family |
| 666 | acetyltransferase, GNAT family (rimJ) |
| 670 | acetyltransferase, GNAT family |
| 676 | transcriptional regulator, tetR family domain protein |
| 680 | ABC transporter efflux protein, DrrB family |
| 690 | IS1381, transposase OrfA/OrfB, truncation |
| 714 | magnesium transporter, CorA family |
| 718 | oxidoreductase, Gfo/ldh/MocA family |
| 722 | valyl-tRNA synthetase (valS) |
| 730 | acetyltransferase, GNAT family |
| 746 | methyltransferase |
| 750 | bacteriophage L54a, integrase |
| 754 | DNA-damage-inducible protein J |
| 774 | cation efflux system protein |
| 778 | oxidoreductase, aldo/keto reductase family |
| 784 | alcohol dehydrogenase, zinc-containing |
| 790 | 3-oxoadipate enol-lactone hydrolase/4-carboxymuconolactone decarboxylas |
| 804 | ribonucleoside-diphosphate reductase, alpha subunit (nrdE) |
| 808 | nrdI protein (nrdI) |
| 812 | Ribonucleotide reductases |
| 824 | elaA protein (elaA) |
| 828 | RNA methyltransferase, TrmA family |
| 832 | RecX family protein |
| 840 | -identity (jag) |
| 844 | membrane protein, 60 kDa (yidC) |
| 856 | UTP-glucose-1-phosphate uridylyltransferase (galU) |
| 864 | rhomboid family protein |
| 884 | MORN motif family |
| 892 | transcriptional regulator |
| 896 | adenylosuccinate lyase (purB) |
| 908 | phosphoribosylaminoimidazole carboxylase, catalytic subunit (purE) |
| 912 | phosphoribosylamine--glycine ligase (purD) |
| 916 | phosphosugar-binding transcriptional regulator |
| 920 | acetyl xylan esterase |
| 922 | ROK family protein (gki) |
| 926 | N-acetylneuraminate lyase (nanA) |
| 936 | sugar ABC transporter, permease protein |
| 940 | sugar ABC transporter, permease protein (msmF) |
| 952 | LysM domain protein, authentic frameshift |
| 956 | zoocin A endopeptidase |
| 958 | phosphoribosylaminoimidazolecarboxamide formyltransferase/IMP cyclohydr |
| 962 | acetyltransferase, GNAT family family |
| 964 | phosphoribosylglycinamide formyltransferase (purN) |
| 968 | phosphoribosylformylglycinamidine cyclo-ligase (purM) |
| 972 | amidophosphoribosyltransferase (purF) |
| 980 | phosphoribosylformylglycinamidine synthase |
| 984 | phosphoribosylaminoimidazole-succinocarboxamide synthase (purC) |
| 1042 | oligoendopeptidase F (pepF) |
| 1060 | ebsC protein |
| 1068 | hydrolase, haloacid dehalogenase-like family |
| 1076 | riboflavin synthase, beta subunit (ribH) |
| 1082 | riboflavin biosynthesis protein RibD (ribD) |
| 1086 | Mn2+/Fe2+ transporter, NRAMP family |
| 1094 | peptidase, U32 family |
| 1116 | HPr(Ser) kinase/phosphatase (hprK) |
| 1130 | oxidoreductase |
| 1148 | signal recognition particle-docking protein FtsY (ftsY) |
| 1152 | Cof family protein |
| 1156 | Cof family protein |
| 1172 | vicX protein (vicX) |
| 1176 | sensory box sensor histidine kinase (vicK) |
| 1180 | DNA-binding response regulator (vicR) |
| 1184 | amino acid ABC transporter, ATP-binding protein |
| 1188 | amino acid ABC transporter, amino acid-binding protein (fliY) |
| 1192 | amino acid ABC transporter, permease protein |
| 1196 | amino acid ABC transporter, permease protein |
| 1208 | DNA-binding response regulator (vicR) |
| 1210 | threonyl-tRNA synthetase (thrS) |
| 1214 | glycosyl transferase, group 1 |
| 1218 | glycosyl transferase, group 1 (cpoA) |
| 1222 | alpha-amylase (amy) |
| 1230 | proline dipeptidase (pepQ) |
| 1238 | haloacid dehalogenase-like hydrolase superfamily |
| 1244 | mannonate dehydratase (uxuA) |
| 1248 | glucuronate isomerase |
| 1254 | transcriptional regulator, GntR family |
| 1268 | sodiumgalactoside symporter family protein |
| 1270 | D-isomer specific 2-hydroxyacid dehydrogenase family protein |
| 1282 | transcriptional regulator, LysR family |
| 1290 | ABC transporter, ATP-binding protein (potA) |
| 1296 | DedA family protein |
| 1308 | MutT/nudix family protein family |
| 1310 | phosphoserine phosphatase SerB (serB) |
| 1312 | septation ring formation regulator EzrA |
| 1320 | hydrolase, haloacid dehalogenase-like family (gph) |
| 1340 | sensor histidine kinase (vncS) |
| 1348 | transmembrane protein Vexp3 (vex3) |
| 1352 | ABC transporter, ATP-binding protein (vex2) |
| 1358 | transmembrane protein Vexp1 (vex1) |
| 1366 | transposase |
| 1374 | integrase, phage family |
| 1390 | holin 2 |
| 1398 | minor structural protein |
| 1400 | host specificity protein |
| 1404 | minor structural protein |
| 1406 | PblA |
| 1486 | homeobox protein drg11 |
| 1488 | reverse transcriptase |
| 1496 | p22 erf-like protein |
| 1498 | gp157 |
| 1500 | tropomyosin 2 |
| 1512 | gp49 homologous |
| 1526 | transcriptional regulator-related protein |
| 1566 | chorismate mutase |
| 1572 | PTS system component |
| 1576 | PTS system, IIB component |
| 1580 | PTS system IIA component |
| 1584 | lactose phosphotransferase system repressor (lacR) |
| 1594 | adhesion lipoprotein (lmb) |
| 1602 | GTP pyrophosphokinase (relA) |
| 1606 | 2′,3′-cyclic-nucleotide 2′-phosphodiesterase (cpdB) |
| 1616 | iron ABC transporter, iron-binding protein |
| 1620 | DNA-binding response regulator |
| 1630 | PTS system component |
| 1634 | PTS system component (manM) |
| 1638 | PTS system component (manL) |
| 1642 | PTS system component |
| 1658 | response regulator BlpR (blpR) |
| 1676 | phosphate transport system regulatory protein PhoU |
| 1680 | phosphate ABC transporter, ATP-binding protein (pstB) |
| 1684 | phosphate ABC transporter, permease protein (pstA) |
| 1690 | phosphate ABC transporter, permease protein (pstC) |
| 1694 | probable hemolysin precursor |
| 1704 | ribosomal protein L11 methyltransferase (prmA) |
| 1710 | transcriptional regulator, MerR family (skgA) |
| 1714 | acetyltransferase, GNAT family |
| 1716 | MutT/nudix family protein |
| 1722 | spermidine N1-acetyltransferase |
| 1726 | ATPase, AAA family |
| 1736 | ABC transporter domain protein |
| 1738 | Helix-turn-helix domain protein |
| 1748 | integrase, phage family |
| 1756 | Helix-turn-helix domain protein |
| 1762 | bacteriophage L54a, integrase |
| 1768 | LPXTG-motif cell wall anchor domain protein |
| 1776 | membrane protein |
| 1778 | conjugal transfer protein |
| 1780 | IS1381, transposase OrfA/OrfB, truncation |
| 1802 | transcriptional regulator (rstR-1) |
| 1806 | transcriptional regulator |
| 1808 | FtsK/SpoIIIE family protein |
| 1814 | aggregation substance |
| 1818 | mercuric reductase |
| 1822 | transcriptional regulator, MerR family |
| 1824 | Mn2+/Fe2+ transporter, NRAMP family |
| 1830 | ABC transporter, ATP-binding protein (epiF) |
| 1848 | Helix-turn-helix domain protein |
| 1850 | type 2 phosphatidic acid phosphatase(PAP2), family |
| 1858 | Abortive infection protein family |
| 1868 | aminotransferase, class-V |
| 1874 | glutathione reductase (gor) |
| 1882 | chorismate synthase (aroC) |
| 1886 | 3-dehydroquinate synthase (aroB) |
| 1900 | sulfatase family protein |
| 1914 | ABC transporter, ATP-binding protein |
| 1920 | smf protein (Smffamily) |
| 1924 | transferrin receptor |
| 1928 | iron compound ABC transporter, ATP-binding protein |
| 1932 | iron compound ABC transporter, permease protein |
| 1942 | acetyltransferase, CysE/LacA/LpxA/NodL family |
| 1952 | GTP-binding protein |
| 1958 | carbon starvation protein A |
| 1960 | response regulator (lytR) |
| 1962 | GAF domain protein (lytS) |
| 2000 | extracellular protein |
| 2004 | diarrheal toxin (yukA) |
| 2024 | carbamoyl-phosphate synthase, large subunit (carB) |
| 2028 | carbamoyl-phosphate synthase, small subunit (carA) |
| 2032 | aspartate carbamoyltransferase (pyrB) |
| 2036 | dihydroorotase, multifunctional complex type (pyrC) |
| 2040 | orotate phosphoribosyltransferase (pyrE) |
| 2048 | membrane protein |
| 2062 | phosphate ABC transporter, permease protein (pstA-2) |
| 2064 | phosphate ABC transporter, ATP-binding protein (pstB) |
| 2070 | phosphate transport system regulatory protein PhoU |
| 2072 | aminopeptidase N (pepN) |
| 2076 | DNA-binding response regulator (arlR) |
| 2080 | sensor histidine kinase (arlS) |
| 2088 | signal recognition particle protein (ffh) |
| 2102 | peptide ABC transporter, peptide-binding protein |
| 2104 | integrase/recombinase, phage integrase family |
| 2108 | sensor histidine kinase |
| 2112 | DNA-binding response regulator (vicR) |
| 2118 | ABC transporter, ATP-binding protein |
| 2122 | nisin-resistance protein |
| 2130 | lipoprotein |
| 2136 | gid protein (gid) |
| 2140 | transcriptional regulator, GntR family |
| 2142 | GMP synthase (guaA) |
| 2152 | branched-chain amino acid ABC transporter, permease protein (livM) |
| 2154 | branched-chain amino acid ABC transporter, ATP-binding protein (livG) |
| 2156 | branched-chain amino acid ABC transporter, ATP-binding protein (livF) |
| 2160 | acetoin utilization protein AcuB |
| 2174 | DNA polymerase III, delta prime subunit (holB) |
| 2186 | copper homeostasis protein (cutC) |
| 2190 | phosphoserine aminotransferase (serC) |
| 2202 | methylated-DNA--protein-cysteine S-methyltransferase (ogt) |
| 2208 | exodeoxyribonuclease III (xth) |
| 2214 | PTS system, IIC component |
| 2224 | tellurite resistance protein TehB (tehB) |
| 2246 | icaA protein |
| 2250 | acetyltransferase, GNAT family |
| 2258 | oxidoreductase, short chain dehydrogenase/reductase family (fabG) |
| 2266 | oxidoreductase, Gfo/Idh/MocA family family |
| 2268 | glyoxalase family protein |
| 2272 | UDP-N-acetylglucosamine pyrophosphorylase (glmU) |
| 2276 | MutT/nudix family protein |
| 2284 | 5-methylthioadenosine/S-adenosylhomocysteine nucleosidase (mtf) |
| 2296 | phosphatidate cytidylyltransferase (cdsA) |
| 2300 | membrane-associated zinc metalloprotease |
| 2308 | autolysin (flgJ) |
| 2312 | DNA polymerase III, alpha subunit, Gram-positive type |
| 2320 | nitroreductase family protein superfamily |
| 2326 | 4-hydroxy-2-oxoglutarate aldolase/2-deydro-3-deoxyphosphogluconate aldo |
| 2328 | carbohydrate kinase, PfkB family |
| 2336 | oxidoreductase, short chain dehydrogenase/reductase family (fabG) |
| 2338 | PTS system, IIA component (manL) |
| 2342 | glucuronyl hydrolase |
| 2346 | PTS system, IIB component (manL) |
| 2350 | PTS system, IIC component (manM) |
| 2364 | sugar binding transcriptional regulator RegR (regR) |
| 2368 | polypeptide deformylase (def) |
| 2380 | oxidoreductase, Gfo/Idh/MocA family |
| 2382 | endopeptidase O (pepO) |
| 2394 | Na+/H+ antiporter |
| 2404 | transcriptional regulator |
| 2410 | replication initiation protein RepRC |
| 2412 | bacteriophage L54a, antirepressor |
| 2416 | e11 |
| 2422 | replicative DNA helicase (dnaB) |
| 2432 | GTP-binding protein |
| 2440 | arpR protein |
| 2444 | gene 17 protein |
| 2458 | integrase/recombinase, phage integrase family |
| 2468 | bacteriophage L54a, phage D3 terminase |
| 2472 | protease |
| 2500 | PblB |
| 2504 | sensor histidine kinase |
| 2514 | N-acetylmuramoyl-L-alanine amidase |
| 2518 | KH domain protein |
| 2522 | ribosomal protein S16 (rpsP) |
| 2526 | permease |
| 2528 | ABC transporter, ATP-binding protein |
| 2538 | carbamoyl-phosphate synthase, large subunit |
| 2540 | carbamoyl-phosphate synthase, small subunit (carA) |
| 2550 | transcriptional regulator, LysR family |
| 2554 | ribosomal protein L27 (rpmA) |
| 2562 | ribosomal protein L21 (rplU) |
| 2572 | glycerophosphoryl diester phosphodiesterase |
| 2582 | nitroreductase family protein |
| 2586 | dipeptidase (pepV) |
| 2614 | GTP-binding protein HflX (hflX) |
| 2618 | galactose-1-phosphate uridylyltransferase (galT) |
| 2626 | oxidoreductase, short chain dehydrogenase/reductase family |
| 2630 | single-stranded-DNA-specific exonuclease RecJ (recJ) |
| 2638 | adenine phosphoribosyltransferase (apt) |
| 2646 | Bcl-2 family protein |
| 2654 | oxidoreductase, DadA family protein |
| 2658 | glucose-1-phosphate thymidylyltransferase (rfbA) |
| 2664 | dTDP-4-dehydrorhamnose 3,5-epimerase (rfbC) |
| 2682 | hyaluronidase |
| 2686 | mutator MutT protein (mutX) |
| 2690 | MutT/nudix family protein |
| 2694 | membrane protein |
| 2702 | acetolactate synthase (ilvK) |
| 2706 | adherence and virulence protein A (pavA) |
| 2714 | ABC transporter, permease protein (rbsC) |
| 2722 | metallo-beta-lactamase superfamily protein |
| 2734 | ribose 5-phosphate isomerase (rpiA) |
| 2738 | phosphopentomutase (deoB) |
| 2742 | purine nucleoside phosphorylase, family 2 (deoD) |
| 2750 | purine nucleoside phosphorylase (deoD) |
| 2762 | capsular polysaccharide biosynthesis protein Cps4A (cps4A) |
| 2768 | cpsb protein |
| 2770 | cpsc protein |
| 2772 | CpsE |
| 2774 | CpsF |
| 2776 | CpsVG |
| 2778 | CpsVH |
| 2780 | CpsVM |
| 2782 | CpsVN |
| 2784 | glycosyl transferase domain protein |
| 2786 | glycosyl transferase, family 2/glycosyl transferase family 8 |
| 2790 | CpsVK |
| 2794 | CpsL |
| 2796 | neuB protein |
| 2798 | UDP-N-acetylglucosamine 2-epimerase |
| 2800 | hexapeptide transferase family protein |
| 2802 | NeuA |
| 2808 | uracil-DNA glycosylase (ung) |
| 2818 | DNA topoisomerase IV, B subunit (parE) |
| 2822 | DNA topoisomerase IV, A subunit (parC) |
| 2826 | branched-chain amino acid aminotransferase (ilvE) |
| 2842 | glycerol kinase (glpK) |
| 2848 | aerobic glycerol-3-phosphate dehydrogenase (glpD) |
| 2874 | ABC transporter, ATP-binding protein |
| 2882 | PTS system component (bglP) |
| 2886 | glutamate 5-kinase (proB) |
| 2890 | gamma-glutamyl phosphate reductase (proA) |
| 2898 | cell division protein FtsL (ftsL) |
| 2904 | penicillin-binding protein 2X (pbpX) |
| 2910 | phospho-N-acetylmuramoyl-pentapeptide-transferase (mraY) |
| 2914 | ATP-dependent RNA helicase, DEAD/DEAH box family (deaD) |
| 2918 | ABC transporter, substrate-binding protein |
| 2924 | amino acid ABC transporter, permease protein |
| 2928 | amino acid ABC transporter, ATP-binding protein |
| 2932 | thioredoxin reductase (trxB) |
| 2940 | NAD+ synthetase (nadE) |
| 2944 | aminopeptidase C (pepC) |
| 2952 | recombination protein U (recU) |
| 2966 | Uncharacterized protein family UPF0020 family |
| 2974 | autoinducer-2 production protein LuxS (luxS) |
| 2978 | KH domain protein |
| 2986 | ABC transporter, ATP-binding protein |
| 2994 | DNA-binding response regulator (vraR) |
| 3000 | guanylate kinase (gmk) |
| 3004 | DNA-directed RNA polymerase, omega subunit |
| 3008 | primosomal protein N (priA) |
| 3012 | methionyl-tRNA formyltransferase (fmt) |
| 3016 | Sun protein (sun) |
| 3020 | protein phosphatase 2C |
| 3032 | sensor histidine kinase |
| 3034 | DNA-binding response regulator (vraR) |
| 3036 | cof family protein/peptidyl-prolyl cis-trans isomerase, cyclophilin typ |
| 3040 | S1 RNA binding domain protein (rpsA) |
| 3044 | pyruvate formate-lyase-activating enzyme |
| 3062 | PTS system, IIB component (celA) |
| 3066 | PTS system, cellobiose-specific IIC component (celB) |
| 3068 | formate acetyltransferase (pfl) |
| 3072 | transaldolase |
| 3080 | cysteine synthase A (cysK) |
| 3088 | comF operon protein 1 (comFA) |
| 3092 | competence protein ComF |
| 3096 | ribosomal subunit interface protein (yfiA) |
| 3104 | tryptophanyl-tRNA synthetase (trpS) |
| 3108 | carbamate kinase (arcC) |
| 3116 | ornithine carbamoyltransferase (argF) |
| 3124 | arginine deiminase (arcA) |
| 3134 | transcriptional regulator, Crp/Fnr family |
| 3138 | inosine-5′-monophosphate dehydrogenase (guaB) |
| 3140 | MutR |
| 3142 | transporter |
| 3146 | recF protein (recF) |
| 3158 | peptidase, M16 family |
| 3166 | ABC transporter, ATP-binding protein |
| 3170 | ABC transporter, ATP-binding protein |
| 3178 | LysM domain protein (lytN) |
| 3180 | immunodominant antigen A (isaA) |
| 3184 | L-serine dehydratase, iron-sulfur-dependent, alpha subunit (sdhA) |
| 3188 | L-serine dehydratase, iron-sulfur-dependent, beta subunit (sdhB) |
| 3202 | DHH subfamily 1 protein |
| 3206 | ribosomal protein L9 (rplI) |
| 3210 | replicative DNA helicase (dnaB) |
| 3216 | ribosomal protein S4 (rpsD) |
| 3224 | transcriptional regulator, TetR family |
| 3236 | membrane protein |
| 3238 | choline transporter (proWX) |
| 3240 | glycine betaine/L-proline transport ATP binding subunit (proV) |
| 3242 | DNA-binding response regulator |
| 3244 | Histidine kinase-, DNA gyrase B-, phytochrome-like ATPase family |
| 3246 | ornithine carbamoyltransferase (argF) |
| 3248 | carbamate kinase (arcC) |
| 3252 | membrane protein |
| 3256 | sensory box histidine kinase VicK |
| 3258 | DNA-binding response regulator |
| 3268 | Helix-turn-helix domain protein |
| 3278 | integrase |
| 3284 | ribosomal protein L33 (rpmG) |
| 3288 | ribosomal protein L32 (rpmF) |
| 3300 | YitT family protein |
| 3304 | YitT family protein |
| 3320 | DNA mismatch repair protein MutS (mutS) |
| 3324 | cold-shock domain family protein-related protein |
| 3336 | drug transporter |
| 3340 | Holliday junction DNA helicase RuvA (ruvA) |
| 3352 | recA protein (recA) |
| 3386 | oxidoreductase, Gfo/Idh/MocA family |
| 3390 | acetyltransferase, GNAT family |
| 3394 | anaerobic ribonucleoside-triphosphate reductase activating protein (nrd |
| 3412 | ABC transporter, permease protein (rbsC) |
| 3414 | ABC transporter, ATP-binding protein (nrtC) |
| 3416 | PTS system, mannose-specific IIAB components (manL) |
| 3420 | Cof family protein |
| 3432 | xanthine/uracil permease family protein |
| 3440 | acetyltransferase, GNAT family |
| 3442 | transcriptional regulator (cps4A) |
| 3448 | HIT family protein (hit) |
| 3460 | ABC transporter, permease protein |
| 3472 | Uncharacterized BCR, YhbC family COG0779 superfamily |
| 3484 | ribosomal protein L7A family |
| 3496 | esterase |
| 3500 | transcriptional repressor, CopY (copY) |
| 3504 | cation-transporting ATPase, E1-E2 family |
| 3508 | cation-binding protein-related protein |
| 3520 | DNA polymerase I (polA) |
| 3534 | DNA-binding response regulator (saeR) |
| 3536 | sensor histidine kinase (saeS) |
| 3562 | drug resistance transporter, EmrB/QacA subfamily |
| 3566 | peptidase M24 family protein |
| 3570 | peptidase M24 family protein (pepQ) |
| 3572 | cytidine/deoxycytidylate deaminase family protein |
| 3584 | translation elongation factor P (efp) |
| 3592 | N utilization substance protein B (nusB) |
| 3596 | sugar-binding transcriptional regulator, LacI family (scrR) |
| 3600 | sucrose-6-phosphate dehydrogenase (scrB) |
| 3606 | PTS system IIABC components (scrA) |
| 3610 | fructokinase (scrK) |
| 3614 | mannose-6-phosphate isomerase, class I (manA) |
| 3622 | phospho-2-dehydro-3-deoxyheptonate aldolase (aroH) |
| 3626 | holo-(acyl-carrier-protein) synthase (acpS) |
| 3630 | alanine racemase (alr) |
| 3634 | autolysin (usp45) |
| 3636 | ATP-dependent DNA helicase RecG (recG) |
| 3642 | shikimate 5-dehydrogenase (aroE) |
| 3652 | Cof family protein |
| 3668 | ferredoxin-related protein |
| 3676 | peptidase t (pepT) |
| 3684 | UDP-N-acetylmuramoylalanyl-D-glutamate-2,6-diaminopimelate ligase (mur |
| 3692 | iron compound ABC transporter, substrate-binding protein |
| 3698 | FecCD transport family protein (sirB) |
| 3704 | iron compound ABC transporter, permease protein (sirB) |
| 3710 | inorganic pyrophosphatase, manganese-dependent (ppaC) |
| 3714 | pyruvate formate-lyase-activating enzyme (pflA) |
| 3718 | CBS domain protein |
| 3730 | acid phosphatase |
| 3736 | LPXTG-motif cell wall anchor domain protein |
| 3738 | LPXTG-site transpeptidase family protein |
| 3742 | LPXTG-site transpeptidase family protein |
| 3744 | cell wall surface anchor family protein |
| 3746 | cell wall surface anchor family protein |
| 3752 | glycosyl transferase, group 1 family protein domain protein |
| 3754 | EpsQ protein |
| 3756 | polysaccharide extrusion protein |
| 3768 | dTDP-glucose 4-6-dehydratase |
| 3782 | glycosyl transferas domain protein |
| 3788 | dTDP-4-dehydrorhamnose reductase (rfbD) |
| 3796 | RNA polymerase sigma-70 factor (rpoD) |
| 3802 | DNA primase (dnaG) |
| 3816 | ABC transporter, ATP-binding protein Vexp2 (vex2) |
| 3818 | permease |
| 3820 | transmembrane protein Vexp3 |
| 3822 | transmembrane protein Vexp3 |
| 3832 | endopeptidase O (pepO) |
| 3834 | endopeptidase O (pepO) |
| 3840 | serine protease, subtilase family |
| 3842 | exotoxin 2 |
| 3844 | CylK |
| 3854 | glycine cleavage system T protein |
| 3856 | CylE |
| 3858 | ABC transporter homolog CylB |
| 3862 | acyl carrier protein homolog AcpC (acpP) |
| 3864 | 3-oxoacyl-(acyl-carrier-protein) reductase (fabG) |
| 3868 | CylD |
| 3876 | membrane protein |
| 3912 | LPXTG-site transpeptidase family protein |
| 3916 | LPXTG-site transpeptidase family protein |
| 3918 | LPXTG-site transpeptidase family protein |
| 3920 | LPXTG-motif cell wall anchor domain protein |
| 3928 | chaperonin, 33 kDa (hslO) |
| 3932 | Tn5252, Orf 10 protein |
| 3934 | transposase OrfAB, subunit B |
| 3948 | psr protein |
| 3952 | shikimate kinase (aroK) |
| 3964 | enolase (eno) |
| 3972 | MutT/nudix family protein |
| 3976 | glycosyl transferase, group 1 |
| 3978 | preprotein translocase, SecA subunit (secA) |
| 3986 | preprotein translocase SecY family protein |
| 3990 | glycosyl transferase, family 8 |
| 3992 | glycosyl transferase, family 2 |
| 3998 | glycosyl transferase, family 8 |
| 4000 | glycosyl transferase, family 2/glycosyl transferase family 8 |
| 4002 | glycosyl transferase, family 8 |
| 4012 | LPXTG-motif cell wall anchor domain protein (clfB) |
| 4016 | transcriptional regulator |
| 4018 | excinuclease ABC, B subunit (uvrB) |
| 4022 | Abortive infection protein family |
| 4024 | amino acid ABC transporter, amino acid-binding protein/permease protein |
| 4026 | amino acid ABC transporter, ATP-binding protein |
| 4034 | GTP-binding protein, GTP1/Obg family (obg) |
| 4042 | aminopeptidase PepS (pepS) |
| 4050 | ribosomal small subunit pseudouridine synthase A (rsuA) |
| 4060 | lactoylglutathione lyase (gloA) |
| 4064 | glycosyl transferase family protein |
| 4072 | alkylphosphonate utilization operon protein PhnA (phnA) |
| 4078 | glucosamine--fructose-6-phosphate aminotransferase (isomerizing) (glmS) |
| 4090 | Phosphofructokinase |
| 4094 | DNA polymerase III, alpha subunit (dnaE) |
| 4098 | transcriptional regulator, GntR family |
| 4102 | ABC transporter, ATP-binding protein |
| 4106 | ABC transporter, ATP-binding protein |
| 4116 | FtsK/SpoIIIE family protein |
| 4122 | Helix-turn-helix domain protein |
| 4152 | Helix-turn-helix domain protein |
| 4158 | excisionase |
| 4160 | transposase |
| 4166 | chloramphenicol acetyltransferase (cat) |
| 4174 | PilB-related protein |
| 4178 | acetyltransferase |
| 4182 | Leucine Rich Repeat domain protein |
| 4190 | nucleoside diphosphate kinase (ndk) |
| 4206 | Protein of unknown function superfamily |
| 4218 | hydrolase, haloacid dehalogenase-like family (pho2) |
| 4226 | oxygen-independent coproporphyrinogen III oxidase |
| 4236 | phosphoglucomutase/phosphomannomutase family protein (femD) |
| 4240 | Gram-positive signal peptide, YSIRK family domain protein |
| 4256 | cobyric acid synthase (cobQ) |
| 4260 | lipoate-protein ligase A (lplA) |
| 4264 | branched-chain alpha-keto acid dehydrogenase E3 component, lipoamide de |
| 4266 | pyruvate dehydrogenase complex, E2 component, dihydrolipoamide acetyltr |
| 4270 | pyruvate dehydrogenase complex, E1 component, pyruvate dehydrogenase be |
| 4286 | magnesium transporter, CorA family |
| 4294 | exonuclease RexB (rexB) |
| 4302 | phenylalanyl-tRNA synthetase, beta subunit (pheT) |
| 4324 | ATP synthase F1, epsilon subunit (atpC) |
| 4328 | ATP synthase F1, beta subunit (atpD) |
| 4332 | ATP synthase F1, gamma subunit (atpG) |
| 4338 | ATP synthase F1, alpha subunit (atpA) |
| 4342 | ATP synthase F1, delta subunit (atpH) |
| 4346 | ATP synthase F0, B subunit (atpF) |
| 4350 | ATP synthase, F0 subunit A (atpB) |
| 4354 | proton-translocating ATPase, c subunit-related protein |
| 4360 | glycogen synthase (glgA) |
| 4362 | glycogen biosynthesis protein GlgD (glgD) |
| 4366 | 1,4-alpha-glucan branching enzyme (glgB) |
| 4368 | pullulanase |
| 4382 | ribonuclease BN |
| 4396 | acetyltransferase, GNAT family |
| 4398 | UDP-N-acetylglucosamine 1-carboxyvinyltransferase (murA) |
| 4402 | thiamine-phosphate pyrophosphorylase (thiE) |
| 4406 | phosphomethylpyrimidine kinase (thiD) |
| 4410 | transcriptional regulator, Deg family (tenA) |
| 4414 | ABC transporter, ATP-binding protein |
| 4426 | S-adenosylmethionine synthetase (metK) |
| 4440 | DNA polymerase III, gamma and tau subunits (dnaX) |
| 4444 | GAF domain protein |
| 4448 | uridine kinase (udk) |
| 4452 | ATP-dependent RNA helicase, DEAD/DEAH box family |
| 4458 | peptidoglycan GlcNAc deacetylase (pgdA) |
| 4462 | glyceraldehyde-3-phosphate dehydrogenase, NADP-dependent (gapN) |
| 4466 | phosphoenolpyruvate-protein phosphotransferase (ptsI) |
| 4470 | phosphocarrier protein hpr |
| 4474 | NrdH-redoxin-related protein |
| 4478 | ribonucleoside-diphosphate reductase 2, alpha subunit (nrdE) |
| 4498 | glycosyl transferase, family 8 |
| 4504 | alanyl-tRNA synthetase (alaS) |
| 4512 | alkyl hydroperoxide reductase, subunit F (ahpF) |
| 4516 | alkyl hydroperoxide reductase, subunit C (ahpC) |
| 4520 | ribosomal protein S2 (rpsB) |
| 4524 | translation elongation factor Ts (tsf) |
| 4532 | transcriptional regulator CtsR (ctsR) |
| 4536 | ATP-dependent Clp protease, ATP-binding subunit (clpC) |
| 4540 | deoxynucleoside kinase |
| 4544 | NifR3/Smm1 family protein |
| 4548 | chaperonin, 33 kDa (hslO) |
| 4558 | glutamate--cysteine ligase (gshA) |
| 4562 | Helix-turn-helix domain, fis-type protein |
| 4566 | perfringolysin O regulator protein (pfoR) |
| 4570 | adenylosuccinate synthetase (purA) |
| 4578 | SgaT protein (sgaT) |
| 4582 | PTS system, IIB component (sgaT) |
| 4586 | PTS system, IIA component (mtlA) |
| 4590 | hexulose-6-phosphate synthase |
| 4594 | hexulose-6-phosphate isomerase |
| 4598 | L-ribulose-5-phosphate 4-epimerase (araD) |
| 4606 | sugar binding transcriptional regulator RegR |
| 4610 | D-isomer specific 2-hydroxyacid dehydrogenase family protein (serA) |
| 4622 | transcriptional regulator, BglG family |
| 4632 | glycine betaine/L-proline transport ATP binding subunit (proV) |
| 4636 | amino acid ABC transporter, permease protein |
| 4644 | Na+/H+ exchanger family protein (kefB) |
| 4648 | glyoxylase family protein |
| 4652 | LPXTG-site transpeptidase family protein |
| 4656 | DNA gyrase, A subunit (gyrA) |
| 4660 | L-lactate dehydrogenase (ldh) |
| 4664 | NADH oxidase (nox) |
| 4680 | lipoprotein (bmpD) |
| 4690 | pantothenate kinase (coaA) |
| 4694 | ribosomal protein S20 (rpsT) |
| 4698 | amino acid ABC transporter, amino acid-binding protein (aatB) |
| 4702 | amino acid ABC transporter, ATP-binding protein |
| 4726 | ribosomal large subunit pseudouridine synthase B (rluB) |
| 4734 | Uncharacterized ACR, COG1354 |
| 4738 | integrase/recombinase, phage integrase family (xerD) |
| 4742 | CBS domain protein |
| 4746 | phosphoesterase |
| 4750 | HAM1 protein |
| 4768 | transcriptional regulator, biotin repressor family |
| 4792 | amino acid ABC transproter, permease protein |
| 4796 | amino acid ABC transporter, substrate-binding protein |
| 4798 | 6-aminohexanoate-cyclic-dimer hydrolase |
| 4800 | transcription elongation factor GreA (greA) |
| 4804 | Uncharacterized BCR, YceG family COG1559 |
| 4812 | UDP-N-acetylmuramate--alanine ligase (murC) |
| 4822 | Snf2 family protein |
| 4828 | GTP-binding protein (b2511) |
| 4832 | primosomal protein Dnal (dnal) |
| 4844 | sensor histidine kinase (arlS) |
| 4846 | DNA-binding response regulator (arlR) |
| 4852 | heat shock protein HtpX (htpX) |
| 4870 | potassium uptake protein, Trk family |
| 4874 | ABC transporter, ATP-binding protein |
| 4888 | phosphoglycerate kinase (pgk) |
| 4896 | transcriptional regulator, MerR family |
| 4900 | glutamine synthetase, type I (glnA) |
| 4904 | secreted 45 kd protein (usp45) |
| 4908 | metallo-beta-lactamase superfamily protein |
| 4916 | glycoprotease family protein |
| 4926 | glycoprotease family protein (gcp) |
| 4938 | ribosomal protein S14p/S29e (rpsN) |
| 4952 | exonuclease (dnaQ) |
| 4956 | transcriptional regulator, merR family |
| 4958 | cyclopropane-fatty-acyl-phospholipid synthase (cfa) |
| 4970 | 1,4-dihydroxy-2-naphthoate octaprenyltransferase (menA) |
| 4972 | pyridine nucleotide-disulphide oxidoreductase (ndh) |
| 4974 | cytochrome d oxidase, subunit I (cydA) |
| 4976 | cytochrome d ubiquinol oxidase, subunit II (cydB) |
| 4980 | transport ATP-binding protein CydD |
| 4988 | polyprenyl synthetase (ispB) |
| 4990 | X-pro dipeptidyl-peptidase (pepX) |
| 4998 | drug transporter |
| 5002 | universal stress protein family |
| 5004 | glycerol uptake facilitator protein (glpF) |
| 5012 | cppA protein (cppA) |
| 5034 | exodeoxyribonuclease V, alpha subunit (recD) |
| 5038 | Signal peptidase I |
| 5042 | ribonuclease HIII (rnhC) |
| 5062 | transcriptional regulator |
| 5068 | maltose ABC transporter, permease protein (malD) |
| 5072 | maltose ABC transporter, permease protein (malC) |
| 5088 | ABC transporter, ATP-binding protein |
| 5092 | ABC transporter, permease protein |
| 5106 | spspoJ protein (spo0J) |
| 5114 | DNA polymerase III, beta subunit (dnaN) |
| 5118 | Diacylglycerol kinase catalytic domain (presumed) protein |
| 5138 | transcription-repair coupling factor (mfd) |
| 5142 | S4 domain protein |
| 5156 | MesJ/Ycf62 family protein |
| 5160 | hypoxanthine phosphoribosyltransferase (hpt) |
| 5164 | cell division protein FtsH (ftsH) |
| 5172 | hydrolase, haloacid dehalogenase-like family (b2690) |
| 5178 | transcriptional regulator, MarR family |
| 5182 | 3-oxoacyl-(acyl-carrier-protein) synthase III (fabH) |
| 5190 | enoyl-(acyl-carrier-protein) reductase (fabK) |
| 5194 | malonyl CoA-acyl carrier protein transacylase (fabD) |
| 5198 | 3-oxoacyl-[acyl-carrier protein] reductase (fabG) |
| 5200 | 3-oxoacyl-(acyl-carrier-protein) synthase II (fabF) |
| 5202 | acetyl-CoA carboxylase, biotin carboxyl carrier protein (accB) |
| 5206 | (3R)-hydroxymyristoyl-(acyl-carrier-protein) dehydratase (fabZ) |
| 5210 | acetyl-CoA carboxylase, biotin carboxylase (accC) |
| 5214 | acetyl-CoA carboxylase, carboxyl transferase, beta subunit (accD) |
| 5218 | acetyl-CoA carboxylase, carboxyl transferase, alpha subunit (accA) |
| 5224 | seryl-tRNA synthetase (serS) |
| 5234 | PTS system, mannose-specific IID component |
| 5246 | ribosomal large subunit pseudouridine synthase, RluD subfamily (rluD) |
| 5254 | GTP pyrophosphokinase (relA) |
| 5266 | ribose-phosphate pyrophosphokinase (prsA) |
| 5270 | aminotransferase, class-V |
| 5274 | DNA-binding protein |
| 5282 | Domain of unknown function |
| 5290 | platelet activating factor |
| 5296 | transcriptional regulator, AraC family |
| 5302 | voltage-gated chloride channel family protein |
| 5318 | spermidine/putrescine ABC transporter, ATP-binding protein (potA) |
| 5320 | UDP-N-acetylenolpyruvoylglucosamine reductase (murB) |
| 5324 | bifunctional folate synthesis protein (folK) |
| 5328 | dihydroneopterin aldolase (folB) |
| 5332 | dihydropteroate synthase (folP) |
| 5336 | GTP cyclohydrolase I (folE) |
| 5344 | rarD protein (rarD) |
| 5348 | homoserine kinase (thrB) |
| 5354 | Polysaccharide deacetylase family (icaB) |
| 5362 | osmoprotectant transporter, BCCT family (opuD) |
| 5384 | thiol peroxidase (psaD) |
| 5388 | hydrolase |
| 5390 | transcriptional regulator, GntR family |
| 5402 | gls24 protein |
| 5424 | uncharacterized domain 1 |
| 5440 | cation efflux family protein |
| 5454 | dihydroorotate dehydrogenase A (pyrDa) |
| 5458 | beta-lactam resistance factor (fibB) |
| 5462 | beta-lactam resistance factor (fibA) |
| 5474 | HD domain protein |
| 5482 | cation-transporting ATPase, E1-E2 family |
| 5486 | fructose-1,6-bisphosphatase (fbp) |
| 5488 | iron-sulfur cluster-binding protein |
| 5492 | peptide chain release factor 2 (prfB) |
| 5496 | cell division ABC transporter, ATP-binding protein FtsE (ftsE) |
| 5504 | carboxymethylenebutenolidase-related protein |
| 5506 | metallo-beta-lactamase superfamily protein |
| 5514 | DNA polymerase III, epsilon subunit/ATP-dependent helicase DinG |
| 5520 | asparaginyl-tRNA synthetase (asnS) |
| 5526 | inosine-uridine preferring nucleoside hydrolase (iunH) |
| 5528 | general stress protein 170 |
| 5534 | Uncharacterised protein family superfamily |
| 5538 | Uncharacterized BCR, COG1481 |
| 5546 | zinc ABC transporter, zinc-binding adhesion liprotein (adcA) |
| 5560 | isochorismatase family protein (entB) |
| 5566 | 3-hydroxybutyryl-CoA dehydrogenase |
| 5572 | pyruvate phosphate dikinase (ppdK) |
| 5574 | glutamyl-tRNA(Gln) amidotransferase, C subunit (gatC) |
| 5580 | glutamyl-tRNA(Gln) amidotransferase, A subunit (gatA) |
| 5594 | GTP-binding protein |
| 5612 | iojap-related protein |
| 5626 | transcriptional regulator SkgA (skgA) |
| 5630 | glycerol uptake facilitator protein (glpF) |
| 5634 | dihydroxyacetone kinase family protein |
| 5638 | dihydroxyacetone kinase family protein |
| 5640 | transcriptional regulator, tetR family |
| 5646 | dihydroxyacetone kinase family protein |
| 5654 | glutamine amidotransferase, class I |
| 5666 | peptidase, M20/M25/M40 family |
| 5668 | ABC transporter, ATP-binding protein |
| 5686 | pur operon repressor (purR) |
| 5690 | cmp-binding-factor 1 (cbf1) |
| 5694 | competence-induced protein Ccs50 (ccs50) |
| 5702 | ribulose-phosphate 3-epimerase (rpe) |
| 5710 | rRNA (guanine-N1-)-methyltransferase (rrmA) |
| 5712 | dimethyladenosine transferase (ksgA) |
| 5718 | primase-related protein |
| 5726 | endosome-associated protein |
| 5728 | CG17785 gene product |
| 5734 | dltD protein (dltD) |
| 5738 | D-alanyl carrier protein-related protein |
| 5742 | dltB protein (dltB) |
| 5754 | DNA-binding response regulator (arlR) |
| 5756 | ribosomal protein L34 (rpmH) |
| 5766 | penicillin-binding protein 4 (pbp4) |
| 5770 | intein-containing protein |
| 5774 | NifU family protein |
| 5778 | aminotransferase, class-V |
| 5782 | Uncharacterized protein family (UPF0051) family |
| 5786 | ABC transporter, ATP-binding protein |
| 5790 | glycosyl transferase domain protein (llm) |
| 5794 | transcriptional regulator MecA (mecA) |
| 5798 | undecaprenol kinase |
| 5806 | amino acid ABC transporter, amino acid-binding protein/permease protein |
| 5808 | amino acid ABC transporter, ATP-binding protein |
| 5834 | riboflavin biosynthesis protein RibF (ribF) |
| 5850 | type I restriction-modification system, S subunit |
| 5860 | lipoprotein |
| 5862 | aggregation substance |
| 5866 | ID479 |
| 5896 | type II DNA modification methyltransferase Spn5252IP (spn5252IMP) |
| 5916 | ribosomal protein L10 (rplJ) |
| 5922 | ATP-dependent Clp protease, ATP-binding subunit ClpC (clpC) |
| 5926 | homocysteine S-methyltransferase (mmuM) |
| 5932 | transcriptional regulator, TetR family |
| 5938 | GTP-binding protein (cgpA) |
| 5952 | thymidylate synthase (thyA) |
| 5956 | condensing enzyme, FabH-related |
| 5960 | hydroxymethylglutaryl-CoA reductase, degradative |
| 5974 | gene_idK21C13.21~pir∥T04769~strong similarity to unknown protein, put |
| 5976 | FMN-dependent dehydrogenase family protein |
| 5980 | phosphomevalonate kinase |
| 5986 | diphosphomevalonate decarboxylase (mvaD) |
| 5990 | mevalonate kinase (mvk) |
| 5994 | Histidine kinase-, DNA gyrase B-, phytochrome-like ATPase family (PhoR1 |
| 6002 | GTP pyrophosphokinase (relA) |
| 6006 | transposase for insertion sequence element is904 |
| 6016 | 5′-nucleotidase family |
| 6018 | polypeptide deformylase (def) |
| 6022 | NADP-specific glutamate dehydrogenase (gdhA) |
| 6026 | ABC transporter, ATP-binding/permease protein |
| 6028 | ABC transporter, ATP-binding/permease protein |
| 6030 | acetyltransferase, GNAT family family |
| 6032 | ABC transporter, ATP-binding protein |
| 6040 | degV family protein (degV) |
| 6056 | carbohydrate kinase, PfkB family (fruB) |
| 6064 | beta-lactam resistance factor (fibB) |
| 6070 | 2-dehydropantoate 2-reductase |
| 6076 | PTS system component |
| 6078 | pyridine nucleotide-disulphide oxidoreductase family protein (trxB) |
| 6082 | tRNA (guanine-N1)-methyltransferase (trmD) |
| 6092 | c5a peptidase precursor |
| 6100 | ParA |
| 6102 | transposase family protein (orfA) |
| 6116 | Tn5252, relaxase |
| 6120 | Tn5252, Orf 10 protein |
| 6124 | mercuric reductase |
| 6126 | transcriptional regulator, MerR family |
| 6132 | cation transport ATPase, E1-E2 family |
| 6138 | cation-transporting ATPase, E1-E2 family |
| 6140 | cation-transporting ATPase, E1-E2 family |
| 6144 | cation-transporting ATPase, E1-E2 family |
| 6146 | transcriptional repressor, CopY (copY) |
| 6150 | cadmium resistance transporter |
| 6158 | membrane protein |
| 6162 | flavoprotein (dfp) |
| 6170 | lipoate-protein ligase A |
| 6174 | FMN oxidoreductase (nemA) |
| 6178 | Bacterial luciferase superfamily |
| 6182 | glycine cleavage system H protein (gcvH) |
| 6186 | Domain of unknown function |
| 6194 | lipoate-protein ligase A (lplA) |
| 6198 | formate-tetrahydrofolate ligase (fhs) |
| 6202 | cardiolipin synthetase (cls) |
| 6220 | aminotransferase, class II (aspB) |
| 6222 | RNA methyltransferase, TrmH family, group 2 |
| 6232 | 60 kda chaperonin |
| 6242 | purine nucleoside phosphorylase (deoD) |
| 6248 | deoxyribose-phosphate aldolase (deoC) |
| 6254 | Lyme disease proteins of unknown function |
| 6258 | ribosomal large subunit pseudouridine synthase, RluD subfamily (rluD) |
| 6262 | penicillin-binding protein 2A (pbp2A) |
| 6266 | pathenogenicity protein |
| 6268 | transcription antitermination protein NusG (nusG) |
| 6272 | glycosyl transferase, family 8 |
| 6276 | glycosyl transferase, family 8 |
| 6284 | sugar transporter family protein |
| 6292 | sensory box histidine kinase |
| 6306 | homocysteine S-methyltransferase (metH) |
| 6310 | glycerol dehydrogenase |
| 6312 | DNA topology modulation protein FlaR |
| 6316 | translation initiation factor IF-1 (infA) |
| 6320 | adenylate kinase (adk) |
| 6326 | ribosomal protein L15 (rplO) |
| 6330 | ribosomal protein L30 (rpmD) |
| 6336 | ribosomal protein S5 (rpsE) |
| 6344 | ribosomal protein L6 (rplF) |
| 6348 | ribosomal protein S8 (rpsH) |
| 6352 | ribosomal protein S14 (rpsN) |
| 6356 | ribosomal protein L5 (rplE) |
| 6360 | ribosomal protein L24 (rplX) |
| 6366 | ribosomal protein L14 (rplN) |
| 6368 | ribosomal protein S17 (rpsQ) |
| 6372 | ribosomal protein L29 (rpmC) |
| 6374 | ribosomal protein L16 (rplP) |
| 6378 | ribosomal protein S3 (rpsC) |
| 6382 | ribosomal protein L22 (rplV) |
| 6386 | ribosomal protein S19 (rpsS) |
| 6390 | ribosomal protein L2 (rplB) |
| 6394 | ribosomal protein L23 (rplW) |
| 6398 | ribosomal protein L4/L1 family (rplD) |
| 6402 | ribosomal protein L3 (rplC) |
| 6408 | ribosomal protein S10 (rpsJ) |
| 6414 | MATE efflux family protein |
| 6418 | threonine synthase (thrC) |
| 6428 | Uncharacterized BCR, COG1636 superfamily |
| 6436 | 4-alpha-glucanotransferase (malQ) |
| 6440 | glycogen phosphorylase family protein (malP) |
| 6444 | glycerol-3-phosphate transporter (glpT) |
| 6452 | rhodanese family protein |
| 6458 | ammonium transporter |
| 6464 | DNA repair protein RadA (radA) |
| 6472 | oxidoreductase, pyridine nucleotide-disulfide, class I |
| 6478 | ribose ABC transporter, periplasmic D-ribose-binding protein (rbsB) |
| 6484 | ribose ABC transporter, ATP-binding protein (rbsA) |
| 6486 | ribose ABC transporter protein (rbsD) |
| 6488 | ribokinase (rbsK) |
| 6498 | ABC transporter, ATP-binding protein |
| 6502 | DNA-binding response regulator (vicR) |
| 6506 | argininosuccinate synthase (argG) |
| 6508 | argininosuccinate lyase (argH) |
| 6514 | bacteriophage L54a, repressor protein |
| 6528 | soluble transducer HtrXIII |
| 6542 | probable transposase (insertion sequence IS861) |
| 6544 | ABC transporter, ATP-binding/permease protein |
| 6550 | ABC transporter, ATP-binding/permease protein |
| 6560 | Serine hydroxymethyltransferase |
| 6568 | HemK protein (hemK) |
| 6572 | peptide chain release factor 1 (prfA) |
| 6576 | thymidine kinases |
| 6580 | 4-oxalocrotonate tautomerase (dmpI) |
| 6588 | oxidoreductase |
| 6594 | oxidoreductase |
| 6600 | formate/nitrite transporter family protein |
| 6608 | xanthine permease (pbuX) |
| 6612 | xanthine phosphoribosyltransferase (xpt) |
| 6616 | guanosine monophosphate reductase (guaC) |
| 6620 | drug resistance transporter, EmrB/QacA subfamily |
| 6622 | oxidoreductase |
| 6624 | Kup system potassium uptake protein (kup) |
| 6636 | O-methyltransferase |
| 6642 | oligoendopeptidase F (pepF) |
| 6646 | competence protein CoiA (coiA) |
| 6650 | major facilitator superfamily protein superfamily |
| 6652 | ribosomal small subunit pseudouridine synthase A (rsuA) |
| 6658 | glucosamine-6-phosphate isomerase (nagB) |
| 6662 | nodulin-related protein, truncation |
| 6664 | S-adenosylmethioninetRNA ribosyltransferase-isomerase (queA) |
| 6674 | permease, GntP family |
| 6684 | 6-phospho-beta-glucosidase (bglA) |
| 6686 | PTS system, beta-glucosides-specific IIABC components |
| 6688 | transcription antiterminator Lict (licT) |
| 6704 | esterase |
| 6706 | sugar-binding transcriptional repressor, Lacl family |
| 6708 | hydrolase, haloacid dehalogenase-like family |
| 6712 | DNA internalization-related competence protein CamEC/Rec2 |
| 6716 | competence protein CelA (celA) |
| 6720 | acyltransferase family protein |
| 6732 | ATP-dependent RNA helicase DeaD (deaD) |
| 6736 | lipoprotein, YaeC family |
| 6738 | ABC transporter, permease protein |
| 6752 | diacylglycerol kinase (dgkA) |
| 6768 | formamidopyrimidine-DNA glycosylase (mutM) |
| 6776 | epidermin immunity protein F |
| 6788 | glycyl-tRNA synthetase, beta subunit (glyS) |
| 6790 | acyl carrier protein phosphodiesterase |
| 6800 | SsrA-binding protein (smpB) |
| 6822 | D-alanine--D-alanine ligase |
| 6824 | recombination protein RecR (recR) |
| 6830 | penicillin-binding protein 2b |
| 6832 | phosphoglycerate mutase (gpmA) |
| 6836 | triosephosphate isomerase (tpiA) |
| 6856 | phosphoglycerate mutase family protein |
| 6860 | D-alanyl-D-alanine carboxypeptidase family |
| 6864 | autolysin |
| 6868 | heat-inducible transcription repressor HrcA (hrcA) |
| 6872 | heat shock protein GrpE (grpE) |
| 6876 | chaperone protein dnak |
| 6880 | dnaJ protein (dnaJ) |
| 6884 | transcriptional regulator, gntR family domain protein |
| 6888 | tRNA pseudouridine synthase A (truA) |
| 6892 | phosphomethylpyrimidine kinase (thiD) |
| 6910 | galactose-6-phosphate isomerase, LacA subunit (lacA) |
| 6922 | tagatose 1,6-diphosphate aldolase (lacD) |
| 6932 | sugar ABC transporter, ATP-binding protein (msmK) |
| 6936 | glucan 1,6-alpha-glucosidase (dexB) |
| 6940 | UDP-glucose 4-epimerase (galE) |
| 6942 | response regulator (citB) |
| 6950 | citrate carrier protein (citS) |
| 6954 | malate oxidoreductase (tme) |
| 6958 | bacterocin transport accessory protein |
| 6976 | transposase family protein (orfA) |
| 6980 | pXO1-128 |
| 6986 | adhesion lipoprotein (lmb) |
| 6994 | DNA-directed RNA polymerase, alpha subunit (rpoA) |
| 6998 | ribosomal protein L17 (rplQ) |
| 7040 | probable dna-directed rna polymerase delta subunit |
| 7044 | CTP synthase (pyrG) |
| 7058 | bacteriocin transport accessory protein |
| 7074 | translation initiation factor IF-3 (infC) |
| 7100 | adenosine deaminase |
| 8468 | preprotein translocase, SecE subunit |
| 8476 | antigen, 67 kDa |
| 8486 | Lipase/Acylhydrolase |
| 8492 | peptide ABC transporter, permease protein (oppB) |
| 8494 | competence protein CglB (cglB) |
| 8502 | peptide ABC transporter, peptide-binding protein |
| 8504 | oxidoreductase |
| 8510 | amino acid ABC transporter, permease protein (opuBB) |
| 8522 | abc transporter atp-binding protein ybhf |
| 8530 | glycerol-3-phosphate dehydrogenase (NAD(P)+) (gpsA) |
| 8538 | sugar ABC transporter, sugar-binding protein |
| 8544 | secreted 45 kd protein (usp45) |
| 8556 | phosphoglycerate mutase family protein |
| 8566 | glycosyl hydrolase, family 3 |
| 8576 | N-acetylmuramoyl-L-alanine amidase |
| 8596 | sensory box histidine kinase (withHAMPandPASd) |
| 8608 | aminoglycoside 6-adenylyltransferase |
| 8622 | iron compound ABC transporter, permease protein (sirB) |
| 8636 | phosphate ABC transporter, permease protein (pstC-2) |
| 8650 | branched-chain amino acid transport system II carrier protein (brnQ) |
| 8658 | PTS system, IID component |
| 8662 | replisome organiser-related protein |
| 8674 | alkaline amylopullulanase |
| 8676 | exfoliative toxin A |
| 8690 | glycerol uptake facilitator protein (glpF) |
| 8698 | ABC transporter, ATP-binding protein |
| 8706 | CDP-diacylglycerol--glycerol-3-phosphate 3-phosphatidyltransferase (pgs |
| 8708 | cobalt transport protein |
| 8730 | integral membrane protein |
| 8734 | yadS protein |
| 8736 | cell wall surface anchor family protein |
| 8748 | polysaccharide biosynthesis protein |
| 8752 | glycosyl transferase domain protein |
| 8764 | endopeptidase O |
| 8770 | beta-ketoacyl-acyl carrier protein synthase II |
| 8772 | ABC transporter, ATP-binding protein |
| 8776 | penicillin-binding protein |
| 8778 | cell wall surface anchor family protein |
| 8780 | cell wall surface anchor family protein |
| 8786 | LPXTG-motif cell wall anchor domain protein |
| 8788 | 6-aminohexanoate-cyclic-dimer hydrolase |
| 8796 | NLP/P60 family protein |
| 8802 | DNA/RNA non-specific endonuclease |
| 8806 | hydroxyethylthiazole kinase (thiM) |
| 8826 | PTS system component |
| 8832 | sugar ABC transporter, permease protein |
| 8836 | potassium uptake protein, Trk family (trkA) |
| 8850 | lemA protein (lemA) |
| 8856 | cobalt transport protein |
| 8882 | spermidine/putrescine ABC transporter, spermidine/putrescine-binding pr |
| 8884 | spermidine/putrescine ABC transporter, permease protein (potC) |
| 8906 | ABC transporter, substrate-binding protein |
| 8908 | lipoprotein |
| 8916 | sensor histidine kinase |
| 8930 | TrsK-like protein (traK) |
| 8936 | R5 protein |
| 8962 | chromosome assembly protein homolog |
| 8978 | ribose ABC transporter, permease protein (rbsC) |
| 8980 | permease |
| 8982 | sensor histidine kinase (arlS) |
| 8986 | hydrolase, haloacid dehalogenase-like family (gph) |
| 8994 | dephospho-CoA kinase |
| 8996 | oxalateformate antiporter |
| 9004 | sensory box protein |
| 9006 | host cell surface-exposed lipoprotein |
| 9012 | PAP2 family protein |
| 9034 | GtrA family protein |
| 9050 | lipoprotein signal peptidase (lspA) |
| 9280 | alcohol dehydrogenase, zinc-containing (adh) |
| 9284 | trigger factor (tig) |
| 9290 | fructose-bisphosphate aldolase (fba) |
| 9292 | DAK2 domain protein |
| 9296 | oligopeptide ABC transporter, permease protein |
| 9298 | N-acetylglucosamine-6-phosphate deacetylase (nagA) |
| 9300 | transcriptional regulator, DeoR family (lacR) |
| 9302 | PTS system, mannose-specific IIC component (manM) |
| 9306 | Phosphoglucose isomerase |
| 9310 | aspartate--ammonia ligase (asnA) |
| 9312 | amino acid ABC transporter, ATP-binding protein |
| 9314 | DNA-binding protein HU (hup) |
| 9316 | DHH subfamily 1 protein |
| 9318 | chloride channel |
| 9320 | integrase (int) |
| 9324 | DNA/RNA non-specific endonuclease |
| 9326 | PTS system component |
| 9328 | cell division protein, FtsW/RodA/SpoVE family (ftsW) |
| 9330 | LPXTG-motif cell wall anchor domain protein |
| 9332 | peptide chain release factor 3 (prfC) |
| 9334 | ABC transporter, ATP-binding protein |
| 9336 | superoxide dismutase [mn-fe] |
| 9340 | phenylalanyl-tRNA synthetase, alpha subunit (pheS) |
| 9342 | amino acid ABC transporter, permease protein |
| 9344 | phosphate ABC transporter, phosphate-binding protein (pstS) |
| 9346 | NOL1/NOP2/sun family protein (sun) |
| 9348 | Abortive infection protein family |
| 9350 | permease |
| 9352 | N-acetylmuramoyl-L-alanine amidase domain protein (usp45) |
| 9354 | ABC transporter, ATP-binding protein |
| 9356 | phosphoglucomutase (pgm) |
| 9358 | oxidoreductase, short chain dehydrogenase/reductase family |
| 9360 | phosphate acetyltransferase |
| 9362 | gls24 protein |
| 9364 | ribosomal protein S1 (rpsA) |
| 9368 | dTDP-glucose 4,6-dehydratase (rfbB) |
| 9370 | excinuclease ABC, C subunit (uvrC) |
| 9372 | MATE efflux family protein |
| 9378 | amino acid permease (rocE) |
| 9380 | DNA-binding response regulator TrcR (trcR) |
| 9382 | 16S rRNA processing protein RimM (rimM) |
| 9384 | transcriptional regulator |
| 9388 | ribosomal protein L20 (rplT) |
| 9394 | sugar-binding transcriptional repressor, Lacl family (malR) |
| 9396 | proton/peptide symporter family protein |
| 9398 | amino acid permease |
| 9400 | exoribonuclease, VacB/Rnb family (vacB) |
| 9402 | multi-drug resistance efflux pump (pmrA) |
| 9404 | adhesion lipoprotein (psaA) |
| 9406 | iron-dependent transcriptional regulator (sirR) |
| 9410 | branched-chain amino acid ABC transporter, amino acid-binding protein ( |
| 9412 | amino acid permease |
| 9414 | SpoU rRNA Methylase family protein |
| 9416 | sodium/dicarboxylate symporter (gltP-2) |
| 9418 | branched-chain amino acid transport system II carrier protein (brnQ) |
| 9420 | alcohol dehydrogenase, zinc-containing |
| 9422 | aminotransferase, class I (aspB) |
| 9424 | ribosomal protein S6 (rpsF) |
| 9426 | A/G-specific adenine glycosylase (mutY) |
| 9428 | acid phosphatase (olpA) |
| 9430 | ribosomal protein S12 (rpsL) |
| 9434 | microcin immunity protein MccF (mccF-1) |
| 9436 | undecaprenyl diphosphate synthase (uppS) |
| 9438 | preprotein translocase, YajC subunit (yajC) |
| 9440 | chaperonin, 10 kDa (groES) |
| 9444 | YitT family protein |
| 9446 | seine protease (htrA) |
| 9448 | ribose-phosphate pyrophosphokinase (prsA) |
| 9450 | aromatic amino acid aminotransferase (araT) |
| 9452 | Recombination protein O (recO) |
| 9454 | Abortive infection protein family |
| 9456 | fatty acid/phospholipid synthesis protein PlsX (plsX) |
| 9458 | acyl carrier protein (acpP) |
| 9462 | phosphoribosylaminoimidazole carboxylase, ATPase subunit (purK) |
| 9464 | alcohol dehydrogenase, iron-containing |
| 9466 | ribosomal protein L18 (rplR) |
| 9468 | preprotein translocase, SecY subunit |
| 9470 | transcriptional regulator ComX1 (comX1) |
| 9472 | deoxyuridine 5′-triphosphate nucleotidohydrolase (dut) |
| 9478 | sugar-binding transcriptional regulator, Lacl family (rbsR) |
| 9480 | SPFH domain/Band 7 family |
| 9488 | zinc ABC transporter, permease protein (adcB) |
| 9492 | abortive infection protein |
| 9494 | hydrolase, haloacid dehalogenase-like family |
| 9496 | response regulator (lytT) |
| 9500 | transketolase, C-terminal subunit |
| 9502 | polyribonucleotide nucleotidyltransferase (pnp) |
| 9504 | serine O-acetyltransferase (cysE) |
| 9508 | ribosomal protein L13 (rplM) |
| 9510 | replication initiation protein |
| 9518 | amino acid ABC transporter, amino acid-binding protein |
| 9522 | glycyl-tRNA synthetase, alpha subunit (glyQ) |
| 9524 | NADH oxidase |
| 9528 | transketolase (tkt) |
| 9534 | penicillin-binding protein 1A (pbp1A) |
| 9536 | cell division protein DivIVA (divIVA) |
| 9538 | sensor histidine kinase |
| 9540 | serine/threonine protein kinase (pknB) |
| 9542 | transcriptional regulator |
| 9544 | PTS system, IIA component (lacF) |
| 9546 | glycerol dehydrogenase (gldA) |
| 9548 | aspartate kinase (thrA) |
| 9550 | enoyl-CoA hydratase/isomerase family protein |
| 9552 | acyl carrier protein (acpP) |
| 9564 | ABC transporter, ATP-binding protein |
| 9566 | N utilization substance protein A (nusA) |
| 9568 | ribosome-binding factor A (rbfA) |
| 9570 | Cof family protein |
| 9572 | CoA binding domain protein (b0965) |
| 9574 | transcriptional regulator, Fur family |
| 9578 | queuine tRNA-ribosyltransferase (tgt) |
| 9580 | ribonuclease P protein component (rnpA) |
| 9582 | serine protease, subtilase family |
| 9584 | glycosyl transferase domain protein |
| 9586 | transcriptional activator, AraC family |
| 9588 | transcriptional regulator, TetR family |
| 9590 | transcriptional regulator, AraC family |
| 9594 | surface protein Rib |
| 9596 | transposase, mutator family |
| 9600 | acetyltransferase, GNAT family |
| 9602 | Transposase, Mutator family |
| 9606 | UDP-sugar hydrolase |
| 9610 | anthranilate synthase component II (trpG) |
| 9612 | biotin synthetase (bioB) |
| 9616 | UDP-N-acetylmuramoylalanine--D-glutamate ligase (murD) |
| 9618 | ylmF protein (ylmF) |
| 9620 | amino acid ABC transporter, permease protein |
| 9622 | phosphoglucomutase (pgm) |
| 9624 | YjeF-related protein, C-terminus |
| 9626 | FemAB family protein (fibA) |
| 9628 | Cof family protein |
| 9630 | cell division ABC transporter, permease protein FtsX (ftsX) |
| 9632 | oxidoreductase, short-chain dehydrogenase/reductase family (fabG) |
| 9634 | aspartate aminotransferase (aspC) |
| 9638 | ribosomal protein L31 (rpmE) |
| 9640 | nrdI protein (nrdI) |
| 9642 | ribosomal protein L19 (rplS) |
| 9644 | bacteriophage L54a, repressor protein |
| 9646 | bacteriophage L54a, antirepressor |
| 9652 | single-strand binding protein (ssb) |
| 9660 | pneumococcal surface protein A |
| 9666 | DNA-binding response regulator (vncR) |
| 9668 | transposase OrfAB, subunit B |
| 9670 | cell division protein, FtsW/RodA/SpoVE family (rodA) |
| 9672 | DNA gyrase, B subunit (gyrB) |
| 9674 | 3-phosphoshikimate 1-carboxyvinyltransferase (aroA) |
| 9676 | RNA methyltransferase, TrmA family |
| 9680 | transcriptional regulator, AraC family |
| 9682 | ABC transporter, ATP-binding protein |
| 9690 | CylJ |
| 9696 | permease |
| 9698 | regulatory protein |
| 9700 | carbohydrate kinase, pfkB family |
| 9702 | beta-glucuronidase |
| 9704 | 2-deydro-3-deoxyphosphogluconate aldolase/4-hydroxy-2-oxoglutarate aldo |
| 9706 | 3-oxoacyl-(acyl-carrier-protein) reductase |
| 9708 | catabolite control protein A (ccpA) |
| 9712 | ribonuclease III (rnc) |
| 9714 | SMC family, C-terminal domain family |
| 9718 | S1 RNA binding domain protein |
| 9722 | prolipoprotein diacylglyceryl transferase (lgt) |
| 9724 | riboflavin synthase, alpha subunit (ribE) |
| 9726 | 3,4-dihydroxy-2-butanone 4-phosphate synthase/GTP cyclohydrolase II (ri |
| 9728 | lysyl-tRNA synthetase (lysS) |
| 9734 | Transposase subfamily |
| 9738 | translation elongation factor Tu (tuf) |
| 9740 | UDP-N-acetylmuramoylalanyl-D-glutamyl-2,6-diaminopimelate--D-alanyl-D-a |
| 9746 | Glutathione S-transferases domain protein |
| 9754 | Ribonucleotide reductases |
| 9756 | biotin--acetyl-CoA-carboxylase ligase |
| 9760 | Uncharacterized protein family SNZ family |
| 9762 | methionine aminopeptidase, type I (map) |
| 9764 | DNA ligase, NAD-dependent (ligA) |
| 9766 | glucose-1-phosphate adenylyltransferase (glgC) |
| 9768 | UDP-N-acetylglucosamine 1-carboxyvinyltransferase (murA) |
| 9770 | acetyltransferase, GNAT family |
| 9772 | exonuclease RexA (rexA) |
| 9774 | tRNA modification GTPase TrmE (trmE) |
| 9776 | ABC transporter, ATP-binding protein |
| 9778 | pyruvate dehydrogenase complex, E1 component, pyruvate dehydrogenase al |
| 9782 | Mur ligase family protein |
| 9786 | HD domain protein |
| 9788 | translation elongation factor G (fusA) |
| 9796 | pyruvate kinase (pyk) |
| 9798 | Signal peptidase I |
| 9802 | cytidine deaminase (cdd) |
| 9804 | sugar ABC transporter, ATP-binding protein |
| 9806 | sugar ABC transporter, permease protein |
| 9808 | acetyltransferase, GNAT family |
| 9810 | ABC transporter, permease protein |
| 9812 | SatD |
| 9814 | Helix-turn-helix domain, fis-type protein |
| 9816 | phosphate ABC transporter, ATP-binding protein (pstB-1) |
| 9818 | tRNA pseudouridine synthase B (truB) |
| 9820 | Acetyltransferase (GNAT) family |
| 9822 | DNA topoisomerase I (topA) |
| 9824 | ribonuclease HII (rnhB) |
| 9830 | orotidine 5′-phosphate decarboxylase (pyrF) |
| 9832 | aspartate-semialdehyde dehydrogenase (asd) |
| 9836 | pantothenate metabolism flavoprotein (dfp) |
| 9840 | Sua5/YciO/YrdC/YwlC family protein |
| 9844 | thiamine biosynthesis protein ApbE |
| 9846 | Domain of unknown function |
| 9848 | DNA repair protein RadC (radC) |
| 9850 | glycosyl hydrolase, family 1 (bglA) |
| 9852 | Cof family protein (b0844) |
| 9854 | spermidine/putrescine ABC transporter, permease protein (potH) |
| 9856 | folylpolyglutamate synthase (folC) |
| 9858 | homoserine dehydrogenase (hom) |
| 9860 | succinate-semialdehyde dehydrogenase (gabD-1) |
| 9862 | membrane protein |
| 9864 | ATP-dependent DNA helicase PcrA (pcrA) |
| 9866 | uracil permease (uraA) |
| 9868 | sodiumalanine symporter family protein |
| 9878 | capsular polysaccharide biosynthesis protein Cps4B (cps4B) |
| 9880 | transcriptional regulator, LysR family |
| 9882 | CpslaS |
| 9884 | chloride channel protein |
| 9886 | tributyrin esterase (estA) |
| 9888 | ABC transporter, ATP-binding protein (potA) |
| 9890 | alpha-acetolactate decarboxylase (budA) |
| 9892 | TPR domain protein |
| 9896 | metallo-beta-lactamase superfamily protein |
| 9898 | tRNA delta(2)-isopentenylpyrophosphate transferase (miaA) |
| 9902 | glycerophosphoryl diester phosphodiesterase |
| 9904 | transposase OrfAB, subunit B |
| 9906 | IS3-Spn1, transposase |
| 9908 | transposase OrfAB, subunit B (orfB) |
| 9910 | reverse transcriptase |
| 9916 | transposase OrfAB, subunit B |
| 9918 | integrase, phage family (int) |
| 9920 | transcription regulator |
| 9922 | TnpA |
| 9926 | structural gene for ultraviolet resistance (uvra) |
| 9930 | Helicases conserved C-terminal domain protein |
| 9932 | abortive infection bacteriophage resistance protein (abiEi) |
| 9944 | ribosomal protein L7/L12 (rplL) |
| 9948 | ATP-dependent Clp protease, ATP-binding subunit ClpX (clpX) |
| 9950 | dihydrofolate reductase (folA) |
| 9952 | hemolysin |
| 9954 | transcriptional regulator, MarR family |
| 9958 | polyA polymerase family protein |
| 9960 | PTS system, fructose specific IIABC components (fruA-1) |
| 9962 | lactose phosphotransferase system repressor (lacR) |
| 9964 | choline binding protein D (cbpD) |
| 9968 | pyrimidine operon regulatory protein (pyrR) |
| 9970 | ribosomal large subunit pseudouridine synthase D (rluD) |
| 9972 | thiamine biosynthesis protein ThiI (thiI) |
| 9974 | 3-dehydroquinate dehydratase, type I (aroD) |
| 9976 | iron compound ABC transporter, ATP-binding protein (fepC) |
| 9980 | transcriptional regulator |
| 9982 | glycosyl transferase domain protein |
| 9984 | Cps9H |
| 9988 | 4-diphosphocytidyl-2C-methyl-D-erythritol synthase (ispD) |
| 9990 | licD1 protein (licD1) |
| 9996 | large conductance mechanosensitive channel protein (mscL) |
| 10000 | maltose ABC transporter, maltose-binding protein |
| 10004 | nucleotide sugar synthetase-like protein |
| 10006 | transcriptional regulator |
| 10008 | oxidoreductase, aldo/keto reductase family |
| 10010 | NAD(P)H-flavin oxidoreductase |
| 10016 | transcriptional regulator MutR |
| 10018 | GTP-binding protein Era (era) |
| 10022 | peptide methionine sulfoxide reductase (msrA) |
| 10026 | peptide ABC transporter, ATP-binding protein |
| 10028 | peptide ABC transporter, ATP-binding protein (amiE) |
| 10030 | peptide ABC transporter, peptide-binding protein |
| 10032 | transposase, IS30 family |
| 10034 | transcriptional regulator, LysR family |
| 10036 | spoE family protein (ftsK) |
| 10044 | methionyl-tRNA synthetase (metG) |
| 10046 | D-isomer specific 2-hydroxyacid dehydrogenase family protein (serA) |
| 10048 | acetyltransferase, GNAT family |
| 10050 | phosphoserine aminotransferase (serC) |
| 10054 | thymidylate kinase (tmk) |
| 10060 | branched-chain amino acid ABC transporter, permease protein (livH) |
| 10062 | ATP-dependent Clp protease, proteolytic subunit ClpP (clpP) |
| 10064 | uracil phosphoribosyltransferase (upp) |
| 10066 | potassium uptake protein, Trk family (trkH) |
| 10068 | glutamate racemase (murI) |
| 10070 | membrane protein |
| 10072 | HD domain protein |
| 10074 | Acylphosphatase |
| 10076 | spoIllJ family protein |
| 10078 | acetyltransferase, GNAT family |
| 10080 | glucose-inhibited division protein B (gidB) |
| 10082 | potassium uptake protein, Trk family |
| 10084 | ABC transporter, permease protein |
| 10088 | isochorismatase family protein |
| 10092 | haloacid dehalogenase-like hydrolase superfamily |
| 10094 | membrane protein |
| 10096 | glutamyl-tRNA(Gln) amidotransferase, B subunit (gatB) |
| 10098 | CBS domain protein protein |
| 10100 | transcriptional regulator (codY) |
| 10102 | universal stress protein family |
| 10104 | L-asparaginase (ansA) |
| 10106 | oxidoreductase, aldo/keto reductase 2 family |
| 10108 | preprotein translocase, SecA subunit (secA) |
| 10112 | excinuclease ABC, A subunit (uvrA) |
| 10114 | magnesium transporter, CorA family (corA) |
| 10116 | thioredoxin (trx) |
| 10118 | MutS2 family protein (mutS2) |
| 10122 | DNA-damage inducible protein P (dinP) |
| 10124 | formate acetyltransferase (pfl) |
| 10126 | transcriptional regulator, Crp family |
| 10128 | transport ATP-binding protein CydC |
| 10138 | ribosomal-protein-alanine acetyltransferase (rimI) |
| 10140 | hydrolase |
| 10144 | D-alanine-activating enzyme (dltA) |
| 10148 | carbohydrate kinase, FGGY family |
| 10150 | transaldolase |
| 10160 | Helix-turn-helix domain protein |
| 10164 | single-strand binding protein (ssb) |
| 10166 | type II DNA modification methyltransferase Spn5252IP (spn5252IMP) |
| 10174 | integrase, phage family |
| 10178 | Cyclic nucleotide-binding domain protein |
| 10180 | transcriptional regulator, MarR family |
| 10182 | prolyl-tRNA synthetase (proS) |
| 10184 | leucine-rich protein |
| 10186 | lacX protein, truncation (lacX) |
| 10188 | tagatose-6-phosphate kinase (lacC) |
| 10190 | galactose-6-phosphate isomerase, LacB subunit (lacB) |
| 10192 | neuraminidase |
| 10198 | Histidine kinase-, DNA gyrase B-, phytochrome-like ATPase domain protei |
| 10200 | ABC transporter, ATP-binding protein |
| 10202 | PTS system, IIABC components (ptsG) |
| 10204 | phosphate regulon response regulator PhoB (phoB) |
| 10212 | Uncharacterized ACR, COG2161 subfamily |
| 10216 | abortive phage resistance protein |
| 10222 | TnpA |
| 10226 | acetyltransferase, GNAT family |
| 10230 | ABC transporter domain protein |
| 10234 | 5-methyltetrahydropteroyltriglutamate--homocysteine methyltransferase ( |
| 10236 | branched-chain amino acid transport protein AzlC (azlC) |
| 10240 | DNA-binding response regulator (srrA) |
| 10242 | leucyl-tRNA synthetase (leuS) |
| 10246 | NupC family protein |
| 10248 | transcriptional regulator, GntR family |
| 10252 | glyoxalase family protein |
| 10254 | anaerobic ribonucleoside-triphosphate reductase (nrdD) |
| 10256 | competence-induced protein Ccs4 |
| 10262 | competence/damage-inducible protein CinA (cinA) |
| 10264 | DNA-3-methyladenine glycosylase I (tag) |
| 10268 | DNA mismatch repair protein HexB (hexB) |
| 10270 | arginine repressor (argR) |
| 10272 | arginyl-tRNA synthetase (argS) |
| 10274 | aspartyl-tRNA synthetase (aspS) |
| 10276 | histidyl-tRNA synthetase (hisS) |
| 10280 | AGR_pAT_51p |
| 10286 | hydrolase, alpha/beta hydrolase fold family |
| 10288 | phage infection protein |
| 10290 | Glucose inhibited division protein A (gidA) |
| 10292 | tRNA (5-methylaminomethyl-2-thiouridylate)-methyltransferase (trmU) |
| 10296 | arginine/ornithine antiporter (arcD) |
| 10298 | chromosomal replication initiator protein DnaA (dnaA) |
| 10302 | peptidyl-tRNA hydrolase (pth) |
| 10310 | phosphotyrosine protein phosphatase |
| 10316 | ribosomal protein L36 (rpmJ) |
| 10318 | ribosomal protein S13/S18 (rpsM) |
| 10328 | L-lactate dehydrogenase (ldh) |
| 10330 | ribosomal protein L28 (rpmB) |
| 10362 | RNA polymerase sigma-70 factor, ECF subfamily |
| 10384 | BioY family protein |
| 10386 | AtsA/ElaC family protein |
| 10388 | cytidine/deoxycytidylate deaminase family protein |
| 10394 | phosphorylase, Pnp/Udp family |
| 10396 | transcriptional regulator, MerR family |
| 10402 | methyltransferase (ubiE) |
| 10412 | type IV prepilin peptidase |
| 10416 | ylmG protein (ylmG) |
| 10444 | transposase OrfAB, subunit B |
| 10446 | IS150-like transposase |
| 10452 | Bacterial regulatory proteins, tetR family domain protein |
| 10454 | cell wall surface anchor family protein, authentic frameshift (clfB) |
| 10456 | transposase OrfAB, subunit A (orfA) |
| 10460 | chaperonin, 33 kDa (hslO) |
| 10472 | (3R)-hydroxymyristoyl-(acyl-carrier-protein) dehydratase (fabZ) |
| 10482 | sprT protein |
| 10490 | transcriptional regulator, MarR family |
| 10498 | transcriptional regulator |
| 10504 | glycogen biosynthesis protein GlgD (glgD) |
| 10536 | ribonucleoside-diphosphate reductase, alpha subunit, truncation (nrdD) |
| 10538 | LPXTG-motif cell wall anchor domain |
| 10550 | membrane protein |
| 10554 | arsenate reductase (arsC) |
| 10564 | transposase, authentic frameshift |
| 10570 | transposase OrfAB, subunit A (orfA) |
| 10574 | Tn5252, Orf 9 protein |
| 10580 | IS3-Spn1, transposase |
| 10584 | transcriptional regulator, ArsR family |
| 10628 | ribosomal protein L35 (rpml) |
| 10630 | cytidylate kinase (cmk) |
| 10636 | MutT/nudix family protein |
| 10644 | preprotein translocase, SecG subunit |
| 10680 | ribosomal protein S18 (rpsR) |
| 10682 | single-strand binding protein (ssb) |
| 10692 | glyceraldehyde 3-phosphate dehydrogenase (gap) |
| 10694 | translation elongation factor G (fusA) |
| 10696 | ribosomal protein S7 (rpsG) |
| 10704 | phosphinothricin N-acetyltransferase (pat) |
| 10730 | nrdI protein (nrdI) |
| 10732 | accessory gene regulator protein C (blpH) |
| 10744 | rhodanese family protein (pspE) |
| 10746 | cAMP factor |
| 10758 | competence/damage-inducible protein CinA (cinA) |
| 10770 | transcriptional regulator, ArgR family (argR) |
| 10772 | FliP family family |
| 10794 | peptide ABC transporter, peptide-binding protein |
| 10800 | ribosomal protein S21 (rpsU) |
| 10802 | transposase, IS30 family |
| 10816 | mucin 2 precursor, intestinal |
| 10854 | SV40-transformed marker protein pG1-related protein |
| 10856 | SV40-transformed marker protein pG1-related protein |
| 10858 | SV40-transformed marker protein pG1-related protein |
| 10860 | SV40-transformed marker protein pG1-related protein |
| 10862 | SV40-transformed marker protein pG1-related protein |
| 10864 | SV40-transformed marker protein pG1-related protein |
| 10866 | SV40-transformed marker protein pG1-related protein |
| 10910 | transcriptional regulator |
| 10920 | ribosomal protein S11 (rpsK) |
| 10922 | elaA protein |
| 10926 | 5-formyltetrahydrofolate cyclo-ligase family protein |
| 10938 | inositol monophosphatase family protein |
| 10940 | amino acid ABC transporter, amino acid-binding protein (artI) |
| 10944 | Holliday junction DNA helicase RuvB (ruvB) |
| 10946 | D-alanyl-D-alanine carboxypeptidase (dacA) |
| 10948 | lipoprotein (bmpD) |
| 10950 | peptidase, U32 family family |
| 10952 | protease maturation protein |
| 10954 | glutamyl-tRNA synthetase (gltX) |
| 10956 | GTP-binding protein LepA (lepA) |
| 10960 | translation initiation factor if-2 |
| 10962 | phosphoenolpyruvate carboxylase (ppc) |
| 10964 | calcium E1-E2-type ATPase |
| 10966 | serine protease, subtilase family |

The application's sequence listing, which the Patent Office published only in electronic form, follows.

SEQUENCE LISTING (12024 sequences)

SEQ ID NO: 1 - DNA, 576 bp, Streptococcus agalactiae
atgaaagtgaaaaataagattttaacgatggtagcacttactgtcttaacatgtgctacttattcatcaatcggttatgctgatacaagtgataagaatactgacacgagtgtcgtgactacgaccttatctgaggagaaaagatcagatgaactagaccagtctagtactggttcttcttctgaaaatgaatcgagttcatcaagtgaaccagaaacaaatccgtcaactaatccacctacaacagaaccatcgcaaccctcacctagtgaagagaacaagcctgatggtagaacgaagacagaaattggcaataataaggatatttctagtggaacaaaagtattaatttcagaagatagtattaagaattttagtaaagcaagtagtgatcaagaagaagtggatcgcgatgaatcatcatcttcaaaagcaaatgatgggaaaaaaggccacagtaagcctaaaaaggaacttcctaaaacaggagatagccactcagatactgtaatagcatctacgggagggattattctgttatcattaagtttttacaataagaaaatgaaactttat

SEQ ID NO: 2 - protein, 192 aa, Streptococcus agalactiae
MKVKNKILTMVALTVLTCATYSSIGYADTSDKNTDTSVVTTTLSEEKRSDELDQSSTGSSSENESSSSSEPETNPSTNPPTTEPSQPSPSEENKPDGRTKTEIGNNKDISSGTKVLISEDSIKNFSKASSDQEEVDRDESSSSKANDGKKGHSKPKKELPKTGDSHSDTVIASTGGIILLSLSFYNKKMKLY

SEQ ID NO: 3 - DNA, 537 bp, Streptococcus agalactiae
atgtcaataacctcggttaaaaaatcaaaaccatttaaattaggagtggcaggtcttttagtgggtgcttcattagctttaccactttcagtaagcgcagcatcttataccgtgaaatcaggtgataccttatcagctattgctaaaaatcataaaactacggtacaagagttagtgtctctcaatagtatcagtaacgctgatgtcatcagtataggtgatgttttaaaattggataattctacagctagtcaagcagaagcaaaatctcaaccaacaattgaaaattcaatgaattcttcatcaaatttgagttcaagtgattcagccgcaaaagaagaaatagctcgtcgtgaatcaaatggtagttatactgcacagaatggacaatattatggaagatatcaactgtctcaatcttacctaaatggcgacttatctcctgaaaatcaagaaaaagtagcggacaattatgtggtttctcgttacggatcttggtcggcagcgctatcattttggaatagtaacggctggtat

SEQ ID NO: 4 - protein, 179 aa, Streptococcus agalactiae
MSITSVKKSKPFKLGVAGLLVGASLALPLSVSAASYTVKSGDTLSAIAKNHKTTVQELVSLNSISNADVISIGDVLKLDNSTASQAEAKSQPTIENSMNSSSNLSSSDSAAKEEIARRESNGSYTAQNGQYYGRYQLSQSYLNGDLSPENQEKVADNYVVSRYGSWSAALSFWNSNGWY

SEQ ID NO: 5 - DNA, 837 bp, Streptococcus agalactiae
atgaataagaaaaaaatacttaccggactttctttttttctggtaagtcttcttttatcttttgggattttttccttgatcattccaaaatcaaatcctaaattaacaaaaaaagacttcctaacaaagaaagttatcccacttaactatgttgctcttggagattctctgaccgaaggtgtgggcgatacaacctctcaaggtggttttgttccactgctatcagaatcactccataatcgatactcttaccaagtgacttctgttaattatggtgtgtctgggaatactagtcaacaaattttaaaacgtatgacgacagatcctcaaatcgaaaaagatttagagaaagctgatttattgacgctaactgttggtggtaatgatgtcttggctgttattcgtaaagagctcagtcatttatcactaaattcctttgagaaaccagcagaagcatataaggaacgtttgaaagaaatccttgcaaaagcaagacaagataatcctaaattgcctatttatgttttaggcatttataatcctttttacctaaactttccacaattaactaaaatgcaaaccgttattgataattggaataaagctacaaaagaagtagttgatgcttcagaaaatgtttattttgtcccaattaatgaccgcctttataagggaataaatggtaaagagggtattacagagtcatcaaatagtcaggcaagtatcactaatgatgctctctttactggagaccattttcatcccaataatattggctatcaaatcatgtctaacgccgttatggagaaaataaatgaaacaagaaaaaactggccg

SEQ ID NO: 6 - protein, 279 aa, Streptococcus agalactiae
MNKKKILTGLSFFLVSLLLSFGIFSLIIPKSNPKLTKKDFLTKKVIPLNYVALGDSLTEGVGDTTSQGGFVPLLSESLHNRYSYQVTSVNYGVSGNTSQQILKRMTTDPQIEKDLEKADLLTLTVGGNDVLAVIRKELSHLSLNSFEKPAEAYKERLKEILAKARQDNPKLPIYVLGIYNPFYLNFPQLTKMQTVIDNWNKATKEVVDASENVYFVPINDRLYKGINGKEGITESSNSQASITNDALFTGDHFHPNNIGYQIMSNAVMEKINETRKNWP

SEQ ID NO: 7 - DNA, 1536 bp, Streptococcus agalactiae
ttgattatggagacgggtagtgtaagtaagaaagttcaacaacttcctttaagtcctagattatctaaaaataagcatatgagggatatgctacttactatgcaaaaagattcagcgtattacgaaacaagtgacagtctagtccttcgaattaatctcactgcagatactaaacttaattttaatgctgttaaaggagcgagtgctcttactgaaaatatgatgatgagacagtttgcagttgctggaccacaagatgatcctgttagtgaacataaatacccatcagtatttctcttaactcctgccttattggaaactgctagtgaggcaactctaaatggtaaggaaatcacagcatctggtattatcggtcacatcaaggatggtgataaaagcaagcatgttgaagtcaaaatggtgaatgaaaatggagacatgctaggaacccctgttattattcaaggtaaagacttgactaatcgaacaaaaccattaatgagtggacgtagagtactttatgccggtaaacaatatgagttccgggctaaattaccacttagtcgttttaacacttggattagggttgaagtggtaacagaagcaggagagaaagcaagtattgttcgtcgcatgttctttgaccaatcagttccagagcttaacacagcagttgctaaacgtgatttgacttctgatactgctcttatccacatcgttgccaaagatgactctctaaaactaaaattatatcaagatgattcattacttgaatctgttgataaaaccggtctttatagttttagaaatggtgtagaaatcactaaagatatgacagtaccactagaatttggagataatattattaagttatctgctgttgacttatcaaattatcgtcgtaatgagacccttcatatctatagaaaccgttttgatgttaaagcaagccaaatgacagctgacaaaggagctaaagtaactgtggatatgttgatgaagcacttagttgttccagaaatggcaggagcttatacattaacaatcgacgaagctccaaacacaaatgaatcaggaatgttaacaaacgctaaagtatcgattcattatgtaaatggtggtgttgataaagttgatgttccgattaaagtagttgacttagaagctattcgtaaagctgaagaagcacgtaaagctgaagaagcacgtaaagctgaagaagcacgtaaagctgaagagggacataaaacccaagaagcacctatagttgaagaaggctacaaggttaataacgttcatcaaactgatactacagttaaagcgtctgatttaccaaagactaagacagtttccgcagttcatatggctagaacagacaataaacagataacttcacatcagacacatgttgaaaaacaaattaaaaatacattgccatccactggtgacagcaaacgtggttattatatcactggaatggctatcgttatgctgagtgtattatttagtttagctaaaaagtttaaaagcaaatat

SEQ ID NO: 8 - protein, 512 aa, Streptococcus agalactiae
LIMETGSVSKKVQQLPLSPRLSKNKHMRDMLLTMQKDSAYYETSDSLVLRINLTADTKLNFNAVKGASALTENMMMRQFAVAGPQDDPVSEHKYPSVFLLTPALLETASEATLNGKEITASGIIGHIKDGDKSKHVEVKMVNENGDMLGTPVIIQGKDLTNRTKPLMSGRRVLYAGKQYEFRAKLPLSRFNTWIRVEVVTEAGEKASIVRRMFFDQSVPELNTAVAKRDLTSDTALIHIVAKDDSLKLKLYQDDSLLESVDKTGLYSFRNGVEITKDMTVPLEFGDNIIKLSAVDLSNYRRNETLHIYRNRFDVKASQMTADKGAKVTVDMLMKHLVVPEMAGAYTLTIDEAPNTNESGMLTNAKVSIHYVNGGVDKVDVPIKVVDLEAIRKAEEARKAEEARKAEEARKAEEGHKTQEAPIVEEGYKVNNVHQTDTTVKASDLPKTKTVSAVHMARTDNKQITSHQTHVEKQIKNTLPSTGDSKRGYYITGMAIVMLSVLFSLAKKFKSKY

SEQ ID NO: 9 - DNA, 96 bp, Streptococcus agalactiae
atgttaacaaaatcatcaataaataatgataaaaagaaactctcattcccattgattttgctaaaacaggatcaaaagaagtcaataataattctt

SEQ ID NO: 10 - protein, 32 aa, Streptococcus agalactiae
MLTKSSINNDKKKLSFPLILLKQDQKKSIIIL

SEQ ID NO: 11 - DNA, 831 bp, Streptococcus agalactiae
atgtttacgaaattttttgaaggcttattgacttatcattttttgcaaaatgcttttataactgcaattgtgattggtattgtagcgggtgcagtaggctgttttattatcttgcgctcaatgtctttgatgggtgatgctatttctcacgctgttctaccaggtgttgctatatcttttattttagggattaacttttttataggtgctattgtctttggtttgttgtcttcgattatcattacttatattaaagaaaatagtgtcataaaaggagatactgctattggaattactttttcgtcctttttagccttaggtatcattttaattggacttgctaatagtacaactgacctctttcatattctttttgggaatattttggcagtacaagatagtgataaatatatgactattattgtgggattaattgtactgactctgattactatcttctttaaagaattattattgacttcttttgatcctgttttagcaaaatcaatgggaatgagagtttctttttatcattatttattgatgattttgttaacattagttgcagtaacagctatgcagagtgtgggaacaatattgatcgtagcacttttaattacaccagctgcaacagcatatctttatgttaaaagtctcagaacaatgttgtttttatcatctgcattaggagcagtagcatctgttctggggttatatatcggttatacatttaatattgccgcaggatcaagtattgttttaacatctacttttatgtttttacttgctttcctattttctcctaaacaaagtttgtttaaaaagaaacaa

SEQ ID NO: 12 - protein, 277 aa, Streptococcus agalactiae
MFTKFFEGLLTYHFLQNAFITAIVIGIVAGAVGCFIILRSMSLMGDAISHAVLPGVAISFILGINFFIGAIVFGLLSSIIITYIKENSVIKGDTAIGITFSSFLALGIILIGLANSTTDLFHILFGNILAVQDSDKYMTIIVGLIVLTLITIFFKELLLTSFDPVLAKSMGMRVSFYHYLLMILLTLVAVTAMQSVGTILIVALLITPAATAYLYVKSLRTMLFLSSALGAVASVLGLYIGYTFNIAAGSSIVLTSTFMFLLAFLFSPKQSLFKKKQ

SEQ ID NO: 13 - DNA, 852 bp, Streptococcus pyogenes
atgtctatgaaattttttgagggcttgatgtcataccactttttacaaaatgcactgataacggctgtagtcattggtatcgtctcaggtgctgtagggtgttttattatccttaggtcaatgtctcttatgggtgatgccatctcacacgctgttttaccaggggttgctttgtcatttattttaggagtcaatttttttattggagcgattatttttgggttattagcttctgttattattacttatatcaaggaaaactctgtcattaaaggagatacggctattggtatcacctttagctcttttttggcactgggagtcatcttgataggggtagccaatagttcgacggacttatttcatattttgtttgggaatattttagctgtgcaagatagcgataagtggattactattggtgtttcgatttttgttttagtggttattagtctctttttcaaagaactattattaacatcatttgatcctatcttagccaaatcaatgggtgtgaaggtcaatgcgtatcattatttgttgatggtcctattaactttagtggctgttacggcgatgcaaagcgtgggtactatcttgattgttgccttattgattacgccagcagcgacagcttatttatatgctaatagcttaaaagtaatgttagtgatgtcatctttactaggcgctttagcatcggttttagggctttatttgggctatacctttaatgttgccgcagggtcaagtatcgtactgacttctgcgatgatgtttttgatcagtttctttgtttcacccaagcaaggctaccttaaaagatggatgcaaaaaaaagaaaaaacacct

SEQ ID NO: 14 - protein, 284 aa, Streptococcus pyogenes
MSMKFFEGLMSYHFLQNALITAVVIGIVSGAVGCFIILRSMSLMGDAISHAVLPGVALSFILGVNFFIGAIIFGLLASVIITYIKENSVIKGDTAIGITFSSFLALGVILIGVANSSTDLFHILFGNILAVQDSDKWITIGVSIFVLVVISLFFKELLLTSFDPILAKSMGVKVNAYHYLLMVLLTLVAVTAMQSVGTILIVALLITPAATAYLYANSLKVMLVMSSLLGALASVLGLYLGYTFNVAAGSSIVLTSAMMFLISFFVSPKQGYLKRWMQKKEKTP

SEQ ID NO: 15 - DNA, 123 bp, Streptococcus agalactiae
gtgaccctaatggagacgggaccggtggaaaatctatatggaatagcaaagataaaaagaaagattctggaaatggttttgttaatgaaatatccccttacctctacaatatcaggggaagtt

SEQ ID NO: 16 - protein, 41 aa, Streptococcus agalactiae
MTLMETGPVENLYGIAKIKRKILEMVLLMKYPLTSTISGEV

SEQ ID NO: 17 - DNA, 801 bp, Streptococcus agalactiae
atgaaaaaaattatttatcttggtttagcctgtgtcagtatattaactttaagtggttgcgagtcaattgagcgttctctaaaaggagaccgttatgttgaccaaaaactagctgaaaactcttcaaaggaagctactgaacaactaaacaaaaaaactaagcaagccttaaaagctgataaaaaagcttttcctcaattggacaaggctgttgccaaaaacgaggcacaagtgcttataaaaacctctaaaggtgatataaatatcaagttatttccaaaatatgctcctttagctgttgaaaattttctaacacatgcaaaagaaggatactataatgggttaagtttccacagagttatcaaagattttatgatacaatctggtgaccctaatggagacgggaccggtggaaaatctatatggaatagcaaagataaaaagaaagattctggaaatggttttgttaatgaaatatccccttacctctacaatatcaggggaagtttagcaatggcaaatgctggagctgatactaatggcagccaattctttatcaatcaaagccagcaagatcattccaaacaactgtcagataaaaaagttcctaaggtgattattaaagcctattcagagggaggaaatccaagtttagatggtggttataccgtctttggacaagtaatctctggcatggaaactgtggataaaattgcttcggtagaagttacaaaatcagatcaaccaaaagaaaaaattactattacaagtatcaaagttattaaagactacaaatttaaa

SEQ ID NO: 18 - protein, 267 aa, Streptococcus agalactiae
MKKIIYLGLACVSILTLSGCESIERSLKGDRYVDQKLAENSSKEATEQLNKKTKQALKADKKAFPQLDKAVAKNEAQVLIKTSKGDINIKLFPKYAPLAVENFLTHAKEGYYNGLSFHRVIKDFMIQSGDPNGDGTGGKSIWNSKDKKKDSGNGFVNEISPYLYNIRGSLAMANAGADTNGSQFFINQSQQDHSKQLSDKKVPKVIIKAYSEGGNPSLDGGYTVFGQVISGMETVDKIASVEVTKSDQPKEKITITSIKVIKDYKFK

SEQ ID NO: 19 - DNA, 804 bp, Streptococcus pyogenes
atgaaaaaattattatctctcagtttagtagccattagtttacttaatttgagtgcttgtgaatctgttgaccgcgctataaaaggcgataaatacattgatgaaaaaactgccaaagaagaaagcgaagcagcttctaaagcctatgaagaaagcattcaaaaagctctcaaagctgatgctagccaatttccacaactaaccaaagaagtcggcaaagaagaagctaaggtcgtaatgaggacaagtcaaggggacattacccttaagttattcccaaaatatgctcccttagctgttgagaacttcctcacccatgctaaaaaaggctactatgataaccttaccttccatcgtgtgatcaacgactttatgattcaatcaggtgaccccaaaggagatggcacaggtggtgaatcgatttggaaaggcaaggatcctaaaaaagatgctggcaatggctttgtcaacgaaatctctccatttttatatcatattcgcggtgctcttgccatggcaaatgctggtgctaatactaacggtagccaattttatatcaaccaaaacaagaaaaatcaaagcaagggattatcaagtaccaactacccaaaacctatcatctctgcctatgagcatggcggcaatccaagcttagatggcggttatactgtatttggtcaagtcattgatggtatggatgttgtcgataaaattgccgctacttctatcaaccaaaatgataaaccagaacaagacattacgattacctcaattgacattgtcaaagattatcgctttaaaaac

SEQ ID NO: 20 - protein, 268 aa, Streptococcus pyogenes
MKKLLSLSLVAISLLNLSACESVDRAIKGDKYIDEKTAKEESEAASKAYEESIQKALKADASQFPQLTKEVGKEEAKVVMRTSQGDITLKLFPKYAPLAVENFLTHAKKGYYDNLTFHRVINDFMIQSGDPKGDGTGGESIWKGKDPKKDAGNGFVNEISPFLYHIRGALAMANAGANTNGSQFYINQNKKNQSKGLSSTNYPKPIISAYEHGGNPSLDGGYTVFGQVIDGMDVVDKIAATSINQNDKPEQDITITSIDIVKDYRFKN

SEQ ID NO: 21 - DNA, 2448 bp, Streptococcus agalactiae
atggtatttatggcaaataagaaaaaaacaaaaggaaagaaaaccagaagacctactaaggcagaaatagagcgtcaaagagctattcaaaggatgattactgctcttgttttaacaattattctcttctttggtattatcagattaggtatttttggtattacagtctataacgtcatccgttttatggtaggtagcttggcttacttatttattgcggcaactttaatctacctttatttctttaaatggttgcgaaagaaagatagcttagtagcaggttttttgatagcttctttaggattattgattgagtggcatgcttaccttttctcaatgcctattttgaaagataaagaaattttgcgttcaactgctcgattaattgtgtctgatttaatgcaatttaaaatcactgtttttgccggtggaggtatgttgggtgctttgatttacaagccaattgcttttctcttttctaatattggtgcctatatgattggtgttctcttcatcattttgggtctctttttaatgagttctctggaagtttatgacatcgtcgaatttattagagcttttaaaaataaagtggcagagaagcacgagcaaaataaaaaggagcgttttgctaagcgagagatgaaaaaagcaatcgctgaacaagagcgcatagagcgtcaaaaagctgaagaagaagcttatttagcttcggttaatgtagaccctgaaacgggtgagattctagaggatcaagctgaggacaatttggatgatgcgctaccacctgaggtaagtgaaacatcaactccggtatttgagccagagatccttgcttatgagacatcgcctcaaaatgatcctttaccagtagagccgacaatttatttagaagactatgattcgccgattcctaatatgagagaaaatgatgaggaaatggtttatgatttagatgatgatgtagatgatagtgatatagaaaatgtcgactttacacctaaaacgacactggtttataaattaccaacgatagatttatttgcaccagataagcctaaaaatcaatccaaagaaaaggatttagtccgaaagaatatcagagttttagaagaaacatttagaagttttggtatcgatgtaaaagtagaacgtgctgaaattggaccatcagttactaaatatgaaattaaaccagcagttggagttcgtgtgaatcgtatttcaaatctatctgacgacctagctcttgctcttgcagcaaaagatgtgcgtatagaaacaccaattcctggaaaatcattaataggtattgaagttcctaactcagaaattgcaacggtttctttccgcgaactttgggaacaatctgatgccaatcctgaaaaccttttagaagtaccactaggaaaagctgttaacggcaatgctcgcagttttaacttagctagaatgccgcatcttttggtagctggttcaactggttcaggtaaatctgtggcagttaatggaattatttcaagtattttgatgaaggcacgtccagatcaagttaagtttatgatgattgatcccaaaatggttgaattatctgtttataatgatattccacatttattaatccctgttgtaaccaatccgcgtaaagcaagtaaggcactccaaaaagttgttgatgaaatggaaaatcgatacgagttatttagcaaaattggtgtgcgtaatatagcaggttataatacaaaggttgaagagtttaatgcttcctctgagcaaaaacaaatacctttgcctttaatcgttgtcattgtagatgaattggctgacttgatgatggttgctagtaaagaagttgaagatgctattattcgtttggggcaaaaagcacgtgctgcaggtatccatatgattcttgcaactcaacgtccatccgtagatgttatttctggtttgattaaagcaaatgttccgtcgcgtattgcatttgctgtttcaagtggtactgatagccgtacgatccttgatgaaaatggtgctgaaaagctcttgggacggggtgacatgctctttaagcctattgatgagaatcatccagtacgactacaaggttcctttatttcagatgatgatgttgaaaggatcgttggttttatcaaagaccaagccgaggctgactatgatgatgcctttgatcctggagaagtatctgaaacagataacggctctggtggtggcggcggagtacctgaaagtgatcctctttttgaagaagccaagggactcgttttagagacgcaaaaagcaagtgcctcaatgattcaacgccgattgtctgttggtttcaatagagcaacaagactaatggaagaattagaagcagcgggggttattggtccagcagaaggaaccaagccacgaaaagttttaatgactccaactccgagtgaa

SEQ ID NO: 22 - protein, 816 aa, Streptococcus agalactiae
MVFMANKKKTKGKKTRRPTKAEIERQRAIQRMITALVLTIILFFGIIRLGIFGITVYNVIRFMVGSLAYLFIAATLIYLYFFKWLRKKDSLVAGFLIASLGLLIEWHAYLFSMPILKDKEILRSTARLIVSDLMQFKITVFAGGGMLGALIYKPIAFLFSNIGAYMIGVLFIILGLFLMSSLEVYDIVEFIRAFKNKVAEKHEQNKKERFAKREMKKAIAEQERIERQKAEEEAYLASVNVDPETGEILEDQAEDNLDDALPPEVSETSTPVFEPEILAYETSPQNDPLPVEPTIYLEDYDSPIPNMRENDEEMVYDLDDDVDDSDIENVDFTPKTTLVYKLPTIDLFAPDKPKNQSKEKDLVRKNIRVLEETFRSFGIDVKVERAEIGPSVTKYEIKPAVGVRVNRISNLSDDLALALAAKDVRIETPIPGKSLIGIEVPNSEIATVSFRELWEQSDANPENLLEVPLGKAVNGNARSFNLARMPHLLVAGSTGSGKSVAVNGIISSILMKARPDQVKFMMIDPKMVELSVYNDIPHLLIPVVTNPRKASKALQKVVDEMENRYELFSKIGVRNIAGYNTKVEEFNASSEQKQIPLPLIVVIVDELADLMMVASKEVEDAIIRLGQKARAAGIHMILATQRPSVDVISGLIKANVPSRIAFAVSSGTDSRTILDENGAEKLLGRGDMLFKPIDENHPVRLQGSFISDDDVERIVGFIKDQAEADYDDAFDPGEVSETDNGSGGGGGVPESDPLFEEAKGLVLETQKASASMIQRRLSVGFNRATRLMEELEAAGVIGPAEGTKPRKVLMTPTPSE

SEQ ID NO: 23 - DNA, 2403 bp, Streptococcus agalactiae
atggttaaaagaaatcaaagaaaaaaaagtgcgcctaagaagcgtttaacaaaagcagaagtggaaaagcaacgtgccattaagaggatgattttatctgttttaatggctttgttgcttatttttgcgatgcttcgcttgggcgtctttggtgtgacaacttataatatgattcgttttttggtgggtagtttagcctatccgtttatgtttgcctggttaatttacttattttgttttaaatggttacggcaaaaagatggaatgattgcgggagttgttattgcctttttgggattgctagttgagtggcacgccttcttatttgcgatgcctaggatgcttgatcaagatatttttctaggcactgctcggctaattacaagagatttactagccctgcgcgtgactgaatttgttggtggaggaatgcttggtgcattactttataaacccatagcctttttattttcgaatatcggctcttactttattggttttttgtttatcttattaggattatttctaatgacgccttgggatatctatgatgtgagtcactttgtgaaagaggctgttgataaactagcagtggcttatcaggaaaataaagaaaagcggttcatcaaacgagaagagcaccgcttacaagctgaaaaagaggctttagagaaacaagcacaagaggaagaaaaacgtctagcagaattgacggttgatcctgagacgggagagattgttgaggatagtcagtctcaagtcagctatgatttggctgaggatatgacaaaagaaccagagattcttgcttatgatagtcacctcaaagacgatgagacaagcttatttgatcaagaagacttggcttacgctcatgaggaaattggggcttatgactctttatctgctttagcatcttctgaagatgagatggatatggatgaacctgttgaagttgatttcacaccaaaaacccatcttctttataaacttccaacgatagatttatttgcaccagataagcccaaaaaccagtccaaagagaaaaacttagtccgcaaaaatatcaaggtgcttgaagataccttccaaagttttgggattgatgtcaaggtagagcgagcagaaatcgggccttccgtcaccaaatatgaaatcaagccagctgtcggggtccgagttaatcgtatttcaaatcttgctgatgatttggcacttgctctggctgctaaagatgttcgtattgaagcaccaattcctggaaaatccttaataggtattgaagttcctaactcagaaattgcaacggtttctttccgcgaactttgggaacaatctgatgccaatcctgaaaaccttttagaagtaccactaggtaaagctgttaatggcaatgcgcgcagttttaacttagctagaatgccgcatcttttggtagctggttcaactggttcaggtaaatctgtggcagttaatggcattatttcaagtattttgatgaaggcacgtccagatcaagttaagtttatgatgattgaccccaaaatggttgaattatctgtttataatgatattccacatttattaatcccagttgtaaccaatccgcgtaaagccagtaaggcactccaaaaagtggttgatgagatggaaaaccgctacgagttatttagtaaaattggtgtgcgtaatatagcaggttataatacaaaggttgaagagtttaatgcttcttctgagcaaaaacaaataccgttgcctttaatcgttgtcattgtagatgaattggctgacttgatgatggtggctagtaaagaagttgaagatgctattattcgtttgggacaaaaagcacgtgctgcaggtatccatatgattcttgcaactcaacgtccctctgtagatgttatttctggtttgattaaagcaaatgttccgtcgcgtatggcatttgctgtttcaagtggtactgatagccgtacgatccttgatgaaaatggtgctgaaaagctcttgggacggggtgatatgctctttaagccgattgatgaaaatcaccctgttcgcttgcaagggtctttcatctcagatgatgatgtggagcgtattgtcaactttatcaaagaccaaactgaagcggattatgatgacgcctttgatcctggtgaagttagcgacaatgatcctggtttttctggaaatggcggagctgctgaaggtgatcctctttttgaagaagcaaaagccttggtcttagaaacacaaaaagctagtgcctcaatgattcaaaggcgtttgtcggttggatttaatcgtgccacgcgcttgatggatgaattggaagaagcaggtgttatcggtccagcagaaggaaccaagcctcgtaaggtattgcagacaaac

SEQ ID NO: 24 - protein, 801 aa, Streptococcus agalactiae
MVKRNQRKKSAPKKRLTKAEVEKQRAIKRMILSVLMALLLIFAMLRLGVFGVTTYNMIRFLVGSLAYPFMFAWLIYLFCFKWLRQKDGMIAGVVIAFLGLLVEWHAFLFAMPRMLDQDIFLGTARLITRDLLALRVTEFVGGGMLGALLYKPIAFLFSNIGSYFIGFLFILLGLFLMTPWDIYDVSHFVKEAVDKLAVAYQENKEKRFIKREEHRLQAEKEALEKQAQEEEKRLAELTVDPETGEIVEDSQSQVSYDLAEDMTKEPEILAYDSHLKDDETSLFDQEDLAYAHEEIGAYDSLSALASSEDEMDMDEPVEVDFTPKTHLLYKLPTIDLFAPDKPKNQSKEKNLVRKNIKVLEDTFQSFGIDVKVERAEIGPSVTKYEIKPAVGVRVNRISNLADDLALALAAKDVRIEAPIPGKSLIGIEVPNSEIATVSFRELWEQSDANPENLLEVPLGKAVNGNARSFNLARMPHLLVAGSTGSGKSVAVNGIISSILMKARPDQVKFMMIDPKMVELSVYNDIPHLLIPVVTNPRKASKALQKVVDEMENRYELFSKIGVRNIAGYNTKVEEFNASSEQKQIPLPLIVVIVDELADLMMVASKEVEDAIIRLGQKARAAGIHMILATQRPSVDVISGLIKANVPSRMAFAVSSGTDSRTILDENGAEKLLGRGDMLFKPIDENHPVRLQGSFISDDDVERIVNFIKDQTEADYDDAFDPGEVSDNDPGFSGNGGAAEGDPLFEEAKALVLETQKASASMIQRRLSVGFNRATRLMDELEEAGVIGPAEGTKPRKVLQTN

SEQ ID NO: 25 - DNA, 1713 bp, Streptococcus agalactiae
atgcatattgagactgttattgatttcaaagaattaggaaaaagatatcgttttaaaaatcctacaaaagaattaatagctgatactttagaacaagtcttagaagtgataaaagaagttgattattatcaatctcaaaattattatgttgttggttatttatcttatgaagcatctgctgcttttgattcacattttaaagtttctcaacagaagttggctggagaacatctagcttattttacagtacataaagattgtgagaacgaagcttttcctttaagttatgaaaatgttagattagcagataattggactgctaatgtttctgagcaagaatatcaagaggcaattgctaatattaaaggacaaattagacaaggaaatacttatcaagtaaattatacactagagcttagccaacaattatgctcggatccctttagtgtttatgaacgcctaatggtagaacaaggagcaggatataatgcttatattgcctacgacgataaaaggattttatctgtaagcccggaattgttctttaagaagaaggatgaagtcttaacaactagaccaatgaagggaacaagcgctagaaagcctacttatcaagaagatgtggcggagcgagattggttggcaaatgatcctaaaaatcgttctgaaaatatgatgattgttgatttattaagaaacgatatgggccgtatctgtgatgttggaacagttaaggtaaaaaaactatgtcaagtggagcagtatgcaactgtgtggcaaatgacatcaactattgaaggagttttatcgccagaagtgacacttatgtctatttttcaagctctatatccttgtggatctatcactggagctcctaagatatcaacaatggctattattaatgagttggaaaaacggccaagaggtatttattgtgggacgataggactttgcatgccagacggacaagctatttttaacgttcctattcgcacagtacaaatgaaaggtcaacaagcctattacggcgttggtggaggtattacgtgggagagccagacagattctgaatatgaagaaacccgtcaaaaatcagctgttttaacacgtgtcaatccaaaatttcaattaataactacaggaagagtgactgaaaataaacttcttttctctcaacaacatgtcgagagattagttgaatcagcgtcttattttgcttattcttttgataaaagtaaattcgaaagggaactgaaaaaataccttcatcagctagatgagaaggattaccgcttgaaaataatgcttgataaaactggtaaggtaacgtttgaggtaaaacaactagtgaatttatcaaaaaagtttttaacggcagaggtggtcgtacaagactaccctattaaattatccccgtttacttattttaaaacttcttatcgcccacatattattgaaggtcagaatgaaaagatatttgtatctcctgaggggttgctattggaaacaagtattgggaatattgttttagaaaaaaatggaaggtttttaaccccagatttatcagaaggagggttgaatgggatttatcgtcgtcatctccttaaaaaccaaaaagtaattgaagcaccactaactttaaaagatttagaatcagccgatgctatatacgcctgtaatgctgttagagggctttatcctctaaacctaaag

SEQ ID NO: 26 - protein, 571 aa, Streptococcus agalactiae
MHIETVIDFKELGKRYRFKNPTKELIADTLEQVLEVIKEVDYYQSQNYYVVGYLSYEASAAFDSHFKVSQQKLAGEHLAYFTVHKDCENEAFPLSYENVRLADNWTANVSEQEYQEAIANIKGQIRQGNTYQVNYTLELSQQLCSDPFSVYERLMVEQGAGYNAYIAYDDKRILSVSPELFFKKKDEVLTTRPMKGTSARKPTYQEDVAERDWLANDPKNRSENMMIVDLLRNDMGRICDVGTVKVKKLCQVEQYATVWQMTSTIEGVLSPEVTLMSIFQALYPCGSITGAPKISTMAIINELEKRPRGIYCGTIGLCMPDGQAIFNVPIRTVQMKGQQAYYGVGGGITWESQTDSEYEETRQKSAVLTRVNPKFQLITTGRVTENKLLFSQQHVERLVESASYFAYSFDKSKFERELKKYLHQLDEKDYRLKIMLDKTGKVTFEVKQLVNLSKKFLTAEVVVQDYPIKLSPFTYFKTSYRPHIIEGQNEKIFVSPEGLLLETSIGNIVLEKNGRFLTPDLSEGGLNGIYRRHLLKNQKVIEAPLTLKDLESADAIYACNAVRGLYPLNLK

SEQ ID NO: 27 - DNA, 1761 bp, Streptococcus pyogenes
ttgggtatgcatagaaaaactattattgatttcaaagagctcgggcaacgctatctttttgatgagccattagtagaattggtagccaagtccttagatcaggtcggtccagtcattgaaaaagtacaacactaccaacagctgggctattacgtggtgggctatctcagttatgaagcagctgctttttttgacaatgccctacaaacccataatgacagactaggcaacgagtaccttgcctattttacagtgcacaaaacctgtcaaaaaaaagacctacctcttgattatgacagcattactatccctaaccaatgggtcagcgcaactcaaaaagaagcctatcaaaaagccattgaaaccattcaccgtgagatgcaacagggcaatacttatcaggttaactacacccttcaattaactcaggaactcaatgcagctgatagtttagccatttacaataaactcgtcgttgaacaggctgctggctacaatgcctacatcgcccatgatgagtttgccgttatttcagctagtcctgaattgttctttaaacaagagggcaacaggttaactactaggcctatgaaaggcaccaccaaacgaggggttaatagctggctggatcaacaagaacatgactggctccaagctgacgggaaaaaccgttctgaaaacatgatgattgtggatttgctccgcaatgacatggggaaaatttgccaaacaggcagtgttcgtgttgataggctctgtgaggtcgagcgatactctaccgtctggcaaatgacctcaactattgttggtgacctcaaagcggactgtgacctgatagacattctcaaagctctctttccttgtggctctatcacaggggcaccaaaagtctccaccatggcaattatcacatctctggagccaaaaccaagggggatttattgtggaagtattggcatttgcctacctgatggtcgccgtttcttcaatgttcccattagaaccatccagctcagtcataatcaagctacttatggtgtcggaggcggcatcacttggcaaagcaagtgggaagacgaatacgaggaagtccatcaaaaaacagcttttctctatcggcacaaacaaatctttgacctcaaaacaaccgccaaggtggaacacaaaaaaatagccttccttgagcaacacctcaatcgccttaaagaagcagccacttattttgcttacccttataatgaaaaagctttgcagaaacaactgtcaacctatttggaaaataagaataatgctgcctaccgtttgatgattcgtttatccaaagatggaaagattagcctctctgatcaacccttggaacctttgtcagccgattttctgacagctcaactctctttacagaaaaaggacgtgacagcttcgccttttacctactttaagaccagctaccggcctcatattgagcaaaaatcttatgaacagctattctataaccaagcggggcaattattggaaacgtccattggcaatctctttgttcagctgggtcagaccctctacacaccaccagtggctgtggggattttaccaggactttttcgccaagaactgctagctactggtcaagctcaggaaaaagaggtgacactagctgatttaaaagaggctagcgctatttttggaggaaatgctgtccgtggcctttatcctctcaaccttgagcttactcaccttgatgccctcttagctaagagtcaagcc

SEQ ID NO: 28 - protein, 587 aa, Streptococcus pyogenes
LGMHRKTIIDFKELGQRYLFDEPLVELVAKSLDQVGPVIEKVQHYQQLGYYVVGYLSYEAAAFFDNALQTHNDRLGNEYLAYFTVHKTCQKKDLPLDYDSITIPNQWVSATQKEAYQKAIETIHREMQQGNTYQVNYTLQLTQELNAADSLAIYNKLVVEQAAGYNAYIAHDEFAVISASPELFFKQEGNRLTTRPMKGTTKRGVNSWLDQQEHDWLQADGKNRSENMMIVDLLRNDMGKICQTGSVRVDRLCEVERYSTVWQMTSTIVGDLKADCDLIDILKALFPCGSITGAPKVSTMAIITSLEPKPRGIYCGSIGICLPDGRRFFNVPIRTIQLSHNQATYGVGGGITWQSKWEDEYEEVHQKTAFLYRHKQIFDLKTTAKVEHKKIAFLEQHLNRLKEAATYFAYPYNEKALQKQLSTYLENKNNAAYRLMIRLSKDGKISLSDQPLEPLSADFLTAQLSLQKKDVTASPFTYFKTSYRPHIEQKSYEQLFYNQAGQLLETSIGNLFVQLGQTLYTPPVAVGILPGLFRQELLATGQAQEKEVTLADLKEASAIFGGNAVRGLYPLNLELTHLDALLAKSQA

SEQ ID NO: 29 - DNA, 831 bp, Streptococcus agalactiae
atggtcacaggaggattccgactagacctcttacttgagataactaagatagctcgtgcaacttactattatcaactaaagaaactgaataaaccaaataaagacaaagcaatcaaatctgacattcaatccatttatgatgaacatagaggaaactatggctatcgtcggatttatttagaactgcgaaatcgtggctttgtcatcaaccacaaaagggtgcaaggcttgatgaaaagtatgggcttgactgctcgtattcgtcgtaagcgcaagtatgcctcttacaaaggtgaggttggtaagaaggctgataacctgattcaacgccagtttgaggggtcgaagccctatgagaagtgctataccgatgtgacggagtttgctttacctgaagggaaactttatctatcgcctgttcttgatggctataacagtgagataattgattttaccctgtctcggtctcctgacttgaaacaggttcaaaccatgcttgagagggcttttcctgcggcttcatacagcgaaaccattctccacagcgaccaaggctggcagtaccagcacaagtcctaccatcaatttctggaggacaaaggcattcgtccttctatgtcacggaaggggaacagtcctgacaacggtatgatggaatctttctttgggattctaaaatctgagatgttctatggcttggagaagtcttacaaatcacttgatgaccttgagcaagctatcacagattacattttttactacaacaacaagcgaatcaaagcaaaactaaaaggacttagtcctgtgcaatacagaactaaatccttcact

SEQ ID NO: 30 - protein, 277 aa, Streptococcus agalactiae
MVTGGFRLDLLLEITKIARATYYYQLKKLNKPNKDKAIKSDIQSIYDEHRGNYGYRRIYLELRNRGFVINHKRVQGLMKSMGLTARIRRKRKYASYKGEVGKKADNLIQRQFEGSKPYEKCYTDVTEFALPEGKLYLSPVLDGYNSEIIDFTLSRSPDLKQVQTMLERAFPAASYSETILHSDQGWQYQHKSYHQFLEDKGIRPSMSRKGNSPDNGMMESFFGILKSEMFYGLEKSYKSLDDLEQAITDYIFYYNNKRIKAKLKGLSPVQYRTKSFT

SEQ ID NO: 31 - DNA, 804 bp, Streptococcus pyogenes
atgctacttgaaatccttgatttatcacgctccacctattactatcaagtgaagcgactagctcaaggagataaggatatagaactaaagcatgtgattcgagagatttatgatgagcataaaggtaattacggttatcgtcggattcatatggagttgcgtaaccgaggatttgtggtcaatcataagaaagttcaacgtctcatgaaagtcatgggcttagcagcccgcattcgtcggaagcgcaagtattcttcttacaaaggagaggttggtaagaaggctgataatctgattaaacgtcacttcgaaggctctaaaccttacgaaaaatgttacactgatgtgacggagttggccttacctgaaggaaaactctacttatcacctgttcttgatggctataacagtgagattattgatttcactctatctcggtctcctaacttgaaacaggttcaaaccatgcttgagaagacttttccagcagattcatacagcggaactattcttcatagtgaccaggggtggcaataccaacaccagtcctaccatgattttttagagtctaaaggtattctggcatccatgtcccgcaaagggaatagtccggataacggcatgatggaatccttctttggcattctcaaatctgaaatgttttatggactcgagacaacttatcaatcacttgacaagcttgaagaagctattacagattacattttttactacaacaacaaacgaattaaagcaaaactaaaaggatttagtcctgtccaatacagaactaaatcctttcaa

SEQ ID NO: 32 - protein, 268 aa, Streptococcus pyogenes
MLLEILDLSRSTYYYQVKRLAQGDKDIELKHVIREIYDEHKGNYGYRRIHMELRNRGFVVNHKKVQRLMKVMGLAARIRRKRKYSSYKGEVGKKADNLIKRHFEGSKPYEKCYTDVTELALPEGKLYLSPVLDGYNSEIIDFTLSRSPNLKQVQTMLEKTFPADSYSGTILHSDQGWQYQHQSYHDFLESKGILASMSRKGNSPDNGMMESFFGILKSEMFYGLETTYQSLDKLEEAITDYIFYYNNKRIKAKLKGFSPVQYRTKSFQ

SEQ ID NO: 33 - DNA, 534 bp, Streptococcus agalactiae
atgaaattaagttatgaagataaactagaaatatacgagttaagaaagatcgggatgtcctggtctcagattagtcaacgatatgatgttcgtatctcgaatcttaaatacatgataaaactcatggatcggtatggtgtagaaatcgtcgaaaaaggtagaaatgagtattatccacctgaattaaagcaggaaatgatagataaagtcttgattcatggttgttctcaactctctgtttctcttgattatgctctctctaattgttctatactcacaaattggctttcccaatttaagaaaaatggttatactattgttgagaaaacaagagggagaccgagtaaaatgggacgtaagcgtaagaaaacttgggaagaaatgacagagctcgagcgacttcaggaagaaaatgagcgcttgagaacggagaatgcctttctaaaaaagttgagggatttgcgcttgagggacgaagccttacagagcgaacggcagaaacaattagagaaatggtcacaggaggattccgac

SEQ ID NO: 34 - protein, 178 aa, Streptococcus agalactiae
MKLSYEDKLEIYELRKIGMSWSQISQRYDVRISNLKYMIKLMDRYGVEIVEKGRNEYYPPELKQEMIDKVLIHGCSQLSVSLDYALSNCSILTNWLSQFKKNGYTIVEKTRGRPSKMGRKRKKTWEEMTELERLQEENERLRTENAFLKKLRDLRLRDEALQSERQKQLEKWSQEDSD

SEQ ID NO: 35 - DNA, 513 bp, Streptococcus pyogenes
atgaaatttaatcaagaaacgaaagttaagatttatgagttacggcaaatgggagagtccattaaatccatatcaaaaaagtttgatatggcagaatccgatctcaaatatatgattcgcttgattgataggtatggggtaaccattgttcaaaaatgtaagaatcattattattctccagaactgaagcaagagataataaataaagtcctgattgacggccaatctcagaaacaaacatccttagattatgctttaccaacttctagtatgctctcaaggtggatagcgcaatacaagaaaaacggttatactattcttgaaaaaccaagagggagaccgagtaagatggggcgtaaacgtaagaaaaatttggaagagatgacagaggttgaacgtcttcagaaggaattagaataccctagagcggagaatgctgtgctaaaaaagctgagagaataccgcttgagggacgaagcaaaactcaaagagcaacagaaatcattcaagcat

SEQ ID NO: 36 - protein, 171 aa, Streptococcus pyogenes
MKFNQETKVKIYELRQMGESIKSISKKFDMAESDLKYMIRLIDRYGVTIVQKCKNHYYSPELKQEIINKVLIDGQSQKQTSLDYALPTSSMLSRWIAQYKKNGYTILEKPRGRPSKMGRKRKKNLEEMTEVERLQKELEYPRAENAVLKKLREYRLRDEAKLKEQQKSFKH

SEQ ID NO: 37 - DNA, 903 bp, Streptococcus agalactiae
ttgaaaaatcaacaaaaattaatgtatctagagagtatcgagctatactcaaacatcactaaagccgctgcacacctttttatttctcaaccttacctaagcaaagtgatcaagcaattagaaaatgagttagaaataaaactcatccagagccaaggacaccaaacctttttaacttatgctggacagagatatctattctacctaaaagaaattgatatgattgagcgtcaaatggccaaagaactatatctcatccgttctgataaaaaaggagaaatcacacttgggattaactctggcttagcaagttctattctggcaaatgtacttcccaaatttaacttggagcacccagaaatttctgtcaaattactcgaaaacaatcaaaatatttctgaacaattggtagcgagtggtgatattgacctagctgttgggatggctcctatcctttataaagatggaattgcatcaaccactatttaccgcgacgaattgtttttaatgatacctaccaccagccaactctacaacgctgaaaaacgtggacagattattccttttgaatatcctatttcagttctagacaatgaacctcttatcctaacaccattagagtacggaattggcaaaacaattgcacaattctatgagcttcatcacatgtcattaaatcagatgattacaactagtaccgttcctacagcagctagcctatctttgtcagggatgggagcaacatttgttccacaaactctcattcatcgctatttggataaagagtgcaatgtctaccattttcataagaataagttattttcagagtacattatgatttataaaaaagatgttgaattatctggaattgctctcctactttataaagcttttttaaccaag

SEQ ID NO: 38 - protein, 301 aa, Streptococcus agalactiae
MKNQQKLMYLESIELYSNITKAAAHLFISQPYLSKVIKQLENELEIKLIQSQGHQTFLTYAGQRYLFYLKEIDMIERQMAKELYLIRSDKKGEITLGINSGLASSILANVLPKFNLEHPEISVKLLENNQNISEQLVASGDIDLAVGMAPILYKDGIASTTIYRDELFLMIPTTSQLYNAEKRGQIIPFEYPISVLDNEPLILTPLEYGIGKTIAQFYELHHMSLNQMITTSTVPTAASLSLSGMGATFVPQTLIHRYLDKECNVYHFHKNKLFSEYIMIYKKDVELSGIALLLYKAFLTK

SEQ ID NO: 39 - DNA, 918 bp, Streptococcus pyogenes
ttgataagacaaggagaatcctatttggatattaaacaaattcgttattttatcgcaatcgttgaaaatcattttaacttgagccaggcggcggaactgttgtatgtgtcgcagccgacacttagcatgatgatcaatgattttgaaaaaagagaaaatgttaagctcttcaaacgaaaaagaggtcgtattattgggttaacctatcttggtgataattattataaggacgctcaaaaggttctcagtctctatgatgacatgtttttgaaattgcatgatcacagtaaagggttaaagggaagtatcaatattggtattcctcctcttattttatcagttgttttctcagaagtaatgccaaaactgattttagaaaatccggggattcaattcaatgttaaggagattggtgcttaccaactaaaaaatgaactactcgtgggaaatgttgacgtcgcagtcttgttatccccaacaggcatcgctgataatttggttgagacttatgaaatccagagatcagaattatctgtatgcctgtctccacgccatcgtttagcttccaaaaaagttattcagtgggaagatttaacagatgaacaacttgccctatttgatcctagtttcatggttcaccatttagtgcttgaagcttgcgagcgtcaccaagtcagacctaatattattttgacgtcctcttcctgggattttatgcttaattctaccaagattaatcacaacgtcttaactatttgtcccaaacctattacagaattataccaattaaaggacattaagtgtattccaatggaacgtcccatttcttggcgtgttgtcttaacacgcctccggaaaaaaagttattctgaaatagaagcctacatcatggacgacttgctacagtctttttttaag

SEQ ID NO: 40 - protein, 306 aa, Streptococcus pyogenes
LIRQGESYLDIKQIRYFIAIVENHFNLSQAAELLYVSQPTLSMMINDFEKRENVKLFKRKRGRIIGLTYLGDNYYKDAQKVLSLYDDMFLKLHDHSKGLKGSINIGIPPLILSVVFSEVMPKLILENPGIQFNVKEIGAYQLKNELLVGNVDVAVLLSPTGIADNLVETYEIQRSELSVCLSPRHRLASKKVIQWEDLTDEQLALFDPSFMVHHLVLEACERHQVRPNIILTSSSWDFMLNSTKINHNVLTICPKPITELYQLKDIKCIPMERPISWRVVLTRLRKKSYSEIEAYIMDDLLQSFFK

SEQ ID NO: 41 - DNA, 1212 bp, Streptococcus agalactiae
atggccaatgcatctttgcgacatcaattatttgaaaaacttgaccaaaaatgtgatcaaatggttgctattcgtcgctatttacatgaaaatcccgaattatcatttaaagagacaaaaacagcagcttatatttcagatttttataaaggtaaggactgtcatgttcagacacaatttggtggtatgaatggcgtcgtagttgatatctatggtgataaagcgacagataagcccatcaaacacattgctttgagagccgactttgatgctcttccaattcaggaagagacagggctttcttttgcttcaaaaacagcgggcgtcatgcatgcttgtggacatgatgcccatacagcttatttattgattttggctgagagcttgattgaattaaaatcagaattttcaggtcatatccgtatcttacatcaaccggctgaagaggtgccaccaggcggagcaaaagcaatgattgaagcaggatgtttagatggcattgatgctgtccttggtatccatgttatgtcaacgatggaagagggaacggtacaatatcacgcaggtcccattcaaacagggcgtgccacttttaaagttattttgcaaggtaagggtggacatggttccatgccacatcgtgcaaatgatacaattgttgcagcttctagttttgttatggcagcgcaaacgattgtcagtcgtcgagttaatccatttgacacagcagtagttactatcggatcttttgatggtaaaggttctgctaatgtgatcaaagatagtgtaaccttagaaggtgatgtgcgcgtgatgtctgaagagacacgaggtgttgttgaggaggaatttaagcgtattctagatggaatagcacaaacttatggtgttagttatcagttagactatcagaatgattatcctgttttagttaataacagtgaagtgacacagaaagttgcaaatagtttaaaatctgttgctataaaagaaattttagatgtcattgattgcgaccctcaaacgccgtctgaagattttgcctattatgctcaaacaatcccagcttgcttcttctatgttggagcacatgaagaggggcaaccatattacccacatcatcatccaaaattccaaattgcagaatcatcattgatggtatctgctaaatcaatggcaacagcagcgcttgctatgcttgtagaaggagaa

SEQ ID NO: 42 - protein, 404 aa, Streptococcus agalactiae
MANASLRHQLFEKLDQKCDQMVAIRRYLHENPELSFKETKTAAYISDFYKGKDCHVQTQFGGMNGVVVDIYGDKATDKPIKHIALRADFDALPIQEETGLSFASKTAGVMHACGHDAHTAYLLILAESLIELKSEFSGHIRILHQPAEEVPPGGAKAMIEAGCLDGIDAVLGIHVMSTMEEGTVQYHAGPIQTGRATFKVILQGKGGHGSMPHRANDTIVAASSFVMAAQTIVSRRVNPFDTAVVTIGSFDGKGSANVIKDSVTLEGDVRVMSEETRGVVEEEFKRILDGIAQTYGVSYQLDYQNDYPVLVNNSEVTQKVANSLKSVAIKEILDVIDCDPQTPSEDFAYYAQTIPACFFYVGAHEEGQPYYPHHHPKFQIAESSLMVSAKSMATAALAMLVEGE

SEQ ID NO: 43 - DNA, 1380 bp, Streptococcus agalactiae
atgttaacgacaaaggaaaatttcaaaggaaataacaaattattggtgggaattgtactcgctgtactatcattttggttatttgcacagtctattttaaacatgggaccagatgttcagtcatcattaggtatttcatctggtgcaatggatattggtgtctcaagtacggcattgttttcaggtttatttattgttgtaactggtggtttagcagataaacttggtcgagttaaatttacttttattggtctttgcttaaatattattggttctctactaattgttttagctaatggagcagtgctatttattatgggacgtatttttcaaggattggcagcagcttttattatgccatcaacaatggccttggttaaaacgtactatgatggtaaagatagacaacgtgcagttagtttctggtcaatcggatcgtggggtggctcaggtctatgttcttattttggtggagcggtggcaagtactctaggttggcgttatgtctttatcttttcaatcatcgcatcagtagttagttttctattaattttaggaaccccagaaagtaaaaatgttggacaaaaaactcactttgattaccttggtttaattatttttattatttcaatgttatcgttaaatattgggatatctatggctcaggaacatggattgatgaacgttattccattgagtctttttacagtgatgcttattggatttgttctgttttattatgttgaaacacgtaaatctaatagttttattgactttcatctgtttgaaaatcgattttacttaggtgcgacaatatcaaatttcttactgaatgcagttgcaggaactctgattgttattaatacttacatgcaacaaggtcgccagctaacaccaaaggttgcaggtgaaatgtctttaggctatttggtttgtgtactaattgctatccgagttggtgagaaaattttacaacgttttggtgcccgtaagccaatgcttttgggagctatgagtacatttgttgggatatttttaatgactttggtcaatattcaaggacctttgtatcttgtgttagtctttgttggttatgctttatttggaacaggcttggggatctatgcgacaccatcaacagatacagctatttctagtattcctaatgaaaaagtaggttctgcatctggaatttacaaaatggcaagttcactaggtggtgcaattggtgtagcaacttcaattgcgatttatcatgctttttctggtaatgcagattttcacaaagcagctttgtgtggattaattttaaacctagttttttgtagtctatcgatcttatcaattctttttgttatccctaagaaaattgaggataaa

SEQ ID NO: 44 - protein, 460 aa, Streptococcus agalactiae
MLTTKENFKGNNKLLVGIVLAVLSFWLFAQSILNMGPDVQSSLGISSGAMDIGVSSTALFSGLFIVVTGGLADKLGRVKFTFIGLCLNIIGSLLIVLANGAVLFIMGRIFQGLAAAFIMPSTMALVKTYYDGKDRQRAVSFWSIGSWGGSGLCSYFGGAVASTLGWRYVFIFSIIASVVSFLLILGTPESKNVGQKTHFDYLGLIIFIISMLSLNIGISMAQEHGLMNVIPLSLFTVMLIGFVLFYYVETRKSNSFIDFHLFENRFYLGATISNFLLNAVAGTLIVINTYMQQGRQLTPKVAGEMSLGYLVCVLIAIRVGEKILQRFGARKPMLLGAMSTFVGIFLMTLVNIQGPLYLVLVFVGYALFGTGLGIYATPSTDTAISSIPNEKVGSASGIYKMASSLGGAIGVATSIAIYHAFSGNADFHKAALCGLILNLVFCSLSILSILFVIPKKIEDK

SEQ ID NO: 45 - DNA, 1365 bp, Streptococcus pyogenes
atgtcacatcatcaacaaaccgtttcaaaacaaacaattatggcgattatcgccatagcactcattggtttttcaggaattttgtctgaaaccagtatgaatgtcaccttcccgacactgatgtcagtctatcagttacccttaaatagcttgcaatggatgacgaccatttatttactagcagtggcgattatgatgaccacttcggctacactgaaaaaaaatgtgcgggaaagacccctcttttttatggccacaggtctttttacatttggcaccatcttggccgttctgacccagtcctttgcgatcatgttgctagcccgcatttttcaaggcattggtactggtctggtaatgcctcagatgtttaatattattttagagcgtgtcccaatgcataaggtaggtctatttatgggatttgctggtcttattattagcttagcacctgcttttgggcctacttatgggggctttatgattagccattttagttggcaatggatttttatctgtatactccctgtaccactgattgcaggtattctagcttattattacctcgaagattctccagtaagcgaaaaagtaccctttgactggttggcatttattgcactatcgattagcttaacttctgccttattagctattactagtctagaaaacggcagtgttaatttgtattacttagggctttttattctcagctttatcctcttcctctacaagaatctcacagctaagcaaccctttcttgatattcgcattctcaaaattccctctctaacctttggcctgattcccttttttgtcttccagctgattaatttaggcataaattttctaacgccaaactttattgtcatggaaaagattgctaatagttctcaagctggtatggtgttactacctggtaccttactcggagctctactagcacctgcttttggtaaactttatgatcaaaaaggagcaagactttcgctttatttaggaaatgccttatttagtttatcattgattattatgacacttcaaacaagacattttatgcttttaccattcactcttttatatattttattcacgtttgggcgtaacatgggctttaataatagcttagccacggctattcgagaattgcctgccgagaaaaatgccgatgccacggccatttttcagatgatgcagcaatttgctggcgctctaggaactgctatggcatcactgatagcaaatagtcaagcagaattcacaagcggtgtccagtctgtctaccttctctttactatttttgctctacttgattttatctttttctttgctatgttttaccatttagggaaaaaaggattagcc

SEQ ID NO: 46 - protein, 455 aa, Streptococcus pyogenes
MSHHQQTVSKQTIMAIIAIALIGFSGILSETSMNVTFPTLMSVYQLPLNSLQWMTTIYLLAVAIMMTTSATLKKNVRERPLFFMATGLFTFGTILAVLTQSFAIMLLARIFQGIGTGLVMPQMFNIILERVPMHKVGLFMGFAGLIISLAPAFGPTYGGFMISHFSWQWIFICILPVPLIAGILAYYYLEDSPVSEKVPFDWLAFIALSISLTSALLAITSLENGSVNLYYLGLFILSFILFLYKNLTAKQPFLDIRILKIPSLTFGLIPFFVFQLINLGINFLTPNFIVMEKIANSSQAGMVLLPGTLLGALLAPAFGKLYDQKGARLSLYLGNALFSLSLIIMTLQTRHFMLLPFTLLYILFTFGRNMGFNNSLATAIRELPAEKNADATAIFQMMQQFAGALGTAMASLIANSQAEFTSGVQSVYLLFTIFALLDFIFFFAMFYHLGKKGLA

SEQ ID NO: 47 - DNA, 615 bp, Streptococcus agalactiae
  misc_feature (1)..(615): n = a, c, g, or t
atgagtttatccatcatgacaaaacacaaacacctaactctcttagaccgtaatgacatccaatctggtttggatagaggagaaacctttaaagccatcgggcttaatctactgaaacaccctactactatcgcaaaagaagtcaaacgaaataagcaactaagagaatcaaccaaagactgcctagactgtccgctactaagaaaagctccctatgtttgtaatgggtgtccaaagaggaggatcaactgtggttacaagaagaccttctatcttgctaagcaagctcaaagaaactatgaaaaacttttagttgaatctagagaaggaatccctttgaacaaagagaccttctggaaaatagatagagtgctttctaatggggtcaagaagggccaacgtatctatcatatcctcaaaaccaacgatctagaagtgagttcttcaaccgtttatcgacacatcaagaaaggctacctatccatcacaccaatcgacctacccagagctgtgaagttcaaaaaaaggcgaaagagcacactccctcctattccaaaagcgattaaagaagggcgacggtacgaggattttatagaacacataacnnnnnttaat

SEQ ID NO: 48 - protein, 205 aa, Streptococcus agalactiae
  MISC_FEATURE (1)..(205): Xaa = Any Amino Acid
MSLSIMTKHKHLTLLDRNDIQSGLDRGETFKAIGLNLLKHPTTIAKEVKRNKQLRESTKDCLDCPLLRKAPYVCNGCPKRRINCGYKKTFYLAKQAQRNYEKLLVESREGIPLNKETFWKIDRVLSNGVKKGQRIYHILKTNDLEVSSSTVYRHIKKGYLSITPIDLPRAVKFKKRRKSTLPPIPKAIKEGRRYEDFIEHITXXN

SEQ ID NO: 49 - DNA, 423 bp, Streptococcus agalactiae
atggctaaaaaagttgaaaaacttgtaaaacttcaaattcctgctggtaaagcaactccagctccaccagttggaccagcacttggtcaagcaggaatcaacatcatgggattcactaaagagtttaacgctcgtacagctgatcaagctggtatgattattccagttgttatctcagtatatgaagacaaatcatttgatttcatcactaaaacaccaccagctgctgttcttttgaaaaaagctgcaggtgttgaaaaaggatcaggtgaacctaacaaaactaaagttgcaacaattactcgtgcgcaagtacaagaaattgctgaaactaaaatgccagatttaaacgctgcaaaccttgagtctgcaatgcgtatgatcgaaggtactgctcgttctatgggattcactgttactgac

SEQ ID NO: 50 - protein, 141 aa, Streptococcus agalactiae
MAKKVEKLVKLQIPAGKATPAPPVGPALGQAGINIMGFTKEFNARTADQAGMIIPVVISVYEDKSFDFITKTPPAAVLLKKAAGVEKGSGEPNKTKVATITRAQVQEIAETKMPDLNAANLESAMRMIEGTARSMGFTVTD

SEQ ID NO: 51 - DNA, 495 bp, Streptococcus pyogenes
atgcaatattgcatatctgtgggaggtaaaaatctcaattaccgccaaaaccacaacaggaggatttttaaaatggctaaaaaagtcgaaaaacttgtaaaacttcaaatccctgctggtaaagctacaccagctccaccagttggaccagctcttggtcaagcaggtatcaacatcatgggcttcactaaagaatttaacgctcgtacagctgatcaagctggtatgatcatcccagttgttatctcagtttatgaagacaaatcatttgatttcatcactaaaacaccaccagctgctgttcttttgaaaaaagctgcaggtgttgaaaaaggatcaggtacacctaacactactaaggttgcgacagttactcgtgcacaagtacaagaaattgctgaaactaagatgccagatttgaacgctgcaaacattgaagctgcaatgcgtatgatcgaaggtactgctcgttctatgggattcactgttactgac

SEQ ID NO: 52 - protein, 165 aa, Streptococcus pyogenes
MQYCISVGGKNLNYRQNHNRRIFKMAKKVEKLVKLQIPAGKATPAPPVGPALGQAGINIMGFTKEFNARTADQAGMIIPVVISVYEDKSFDFITKTPPAAVLLKKAAGVEKGSGTPNTTKVATVTRAQVQEIAETKMPDLNAANIEAAMRMIEGTARSMGFTVTD

SEQ ID NO: 53 - DNA, 687 bp, Streptococcus agalactiae
atggctaaaaaaagtaaaaacttacgtgctgctcttgagaaaattgatagcactaaagcatacagcgtagaagaagctgtagctcttgcaaaagaaactaactttgctaaatttgatgcaactgttgaagtttcttataaccttaacattgacgttaaaaaagctgaccaacaaatccgtggtgctatggttttaccagcaggtactggtaaaacttcacgtgttcttgtttttgctcgtggtgctaaagctgaagaagctaaagcagcaggtgcagactttgtcggtgaagatgacttagttgctaaaatccaaggtggatggcttgactttgatgttgttatcgcaacaccagatatgatggcacttgttggacgtcttggacgtgtccttggacctcgtaacttgatgccaaaccctaaaactggtacagtaactatggacgttgctaaagcagttgaagagtctaaaggtggtaaaattacttaccgtgctgataaagcaggtaacgtccaagcccttattggtaaagtttcatttgatgatgctaaattagttgataacttcaaagcatttaatgatgttattgttaaagctaaaccagctactgcaaaaggaacttacatcacaaacctttcaattacaacaacacaaggtgttggtatcaaagttgatcctaactcactt

SEQ ID NO: 54 - protein, 229 aa, Streptococcus agalactiae
MAKKSKNLRAALEKIDSTKAYSVEEAVALAKETNFAKFDATVEVSYNLNIDVKKADQQIRGAMVLPAGTGKTSRVLVFARGAKAEEAKAAGADFVGEDDLVAKIQGGWLDFDVVIATPDMMALVGRLGRVLGPRNLMPNPKTGTVTMDVAKAVEESKGGKITYRADKAGNVQALIGKVSFDDAKLVDNFKAFNDVIVKAKPATAKGTYITNLSITTTQGVGIKVDPNSL

SEQ ID NO: 55 - DNA, 687 bp, Streptococcus pyogenes
atggctaaaaaaagcaaacaaatgcgtgctgcacttgaaaaagtagatagcacaaaagcgtacagtgtagaagaagctgtagcattagtaaaagaaacgaacttcgcaaaatttgatgcgtctgttgaagttgcttacaacttgaacattgacgttcgtaaagcagaccaacaaatccgtggcgcaatggtattgccaaacggaactggtaaaacacaacgtgttcttgtttttgcacgtggtgcaaaagctgaagaagcaaaagcagctggtgcagacttcgtaggtgaagacgaccttgttgcaaaaatcaatggtggatggcttgactttgacgttgttatcgcaacgccagacatgatggctatcgtaggtcgtcttggacgtgtccttggacctcgtaacttgatgccaaaccctaaaactggtacagtaacgatggatgttgctaaagccgttgaagagtctaaaggtggtaaaatcacttaccgtgctgacaaagcaggtaatgttcaagctcttattggtaaagtttcatttgatgctgacaaattggttgaaaacttcaaagccttccacgatgtaatggctaaagctaaacctgcaacagctaaaggaacttacatggcaaacgtctcaatcacatcaacacaaggtgttggtatcaaggttgatcctaactcactt

SEQ ID NO: 56 - protein, 229 aa, Streptococcus pyogenes
MAKKSKQMRAALEKVDSTKAYSVEEAVALVKETNFAKFDASVEVAYNLNIDVRKADQQIRGAMVLPNGTGKTQRVLVFARGAKAEEAKAAGADFVGEDDLVAKINGGWLDFDVVIATPDMMAIVGRLGRVLGPRNLMPNPKTGTVTMDVAKAVEESKGGKITYRADKAGNVQALIGKVSFDADKLVENFKAFHDVMAKAKPATAKGTYMANVSITSTQGVGIKVDPNSL

SEQ ID NO: 57 - DNA, 1623 bp, Streptococcus agalactiae
ttggtaaaaatgagacgtaacatattattgagcattacttgtttattgatggtgactctgactgcatgccattcacaggatagcaaaagtcataaactaaacagtgataaactcacgcttgcttggggagaagactttggtgatgttaatccgcatcgctataaccctgatcagtttgttatccaggatatggtttatgaggggttggtacgatatggtgacaatgggaaaattgaaccagctttagcgaaaagctggagcattagtcaagatggaaaaacctacacttttaaattgagaaatgctaaatattctgatggcagtaactttaatgctgcgaatgtcaaacgtaattttgatagtattttttcgaagtctaatagaggtaatcataattggtttaatttaacgaatcaattggaaaattatcgtgccttgaatcaaagtacttttgaaattaaactgaaacaagcttatagtgctactttatatgatctctctatgattcgaccaattcgctttttatctgatagcgctttccctaaaggtgatgatacaactaagaagaatgtaaaaaaaccaattggaacgggtcaatgggttgtgaaaagtaaaaagcaaaatgaatatattaccttcaaacgtaatgagaattactggggaaagaaaccaaaattaaaagaagtaaccgtaaaagttatacccgatgctcagacgcgtgctttagcattcgaatcaggtgacgttgatttgatctatgggaatggcattattggtttagacacttttgcccaatatacgaaggacaagaaatatgtcacagctatttctcaacctatgtcaacaagacttttgttgctaaatgctaaggaaagtattttccaagataaaaaagttcgtcaggcaatgaatcatgctattgacaaggtttctattgctaagaacacctttagaggaacagaaaagccagcagacactattttttcaaaatcaacatctcactcagatgctaagttaaatccttatagctataatgttgataaagcaaatcagctattggatcaagctggttggaagatgggaaaagataaggttcgtgaaaaagatggtaaaactctaaccttacgtcttccttatatcgccactaaggcaactgataaagacctggtaacttatttccaaggagaatggcgtaaaatcggtattaatgtttctcttattgctatggaagaagatgattattgggctaatgctaaaaagggtaattttgatatgatgttaacctattcttggggagcaccatgggaccctcatgcttggatgtcggcattaactgccaaggcagatcatggacatccagaaaatatagctttagaaaatctagcaactaaaactgaaatggatagacttattaagtcagctctagtagatcctaaggaagaaaatgttgatagagactataagaaggttcttgaattattgcatgatgaggctgtatatatcccattaacttatcaatcggtgatttctgtttataggaaaggtgattttaaaaccatgcgttttgcgccagaagaaaattcattcccattacgctatatagaaaaaaacaatgtatctaag

SEQ ID NO: 58 - protein, 541 aa, Streptococcus agalactiae
MVKMRRNILLSITCLLMVTLTACHSQDSKSHKLNSDKLTLAWGEDFGDVNPHRYNPDQFVIQDMVYEGLVRYGDNGKIEPALAKSWSISQDGKTYTFKLRNAKYSDGSNFNAANVKRNFDSIFSKSNRGNHNWFNLTNQLENYRALNQSTFEIKLKQAYSATLYDLSMIRPIRFLSDSAFPKGDDTTKKNVKKPIGTGQWVVKSKKQNEYITFKRNENYWGKKPKLKEVTVKVIPDAQTRALAFESGDVDLIYGNGIIGLDTFAQYTKDKKYVTAISQPMSTRLLLLNAKESIFQDKKVRQAMNHAIDKVSIAKNTFRGTEKPADTIFSKSTSHSDAKLNPYSYNVDKANQLLDQAGWKMGKDKVREKDGKTLTLRLPYIATKATDKDLVTYFQGEWRKIGINVSLIAMEEDDYWANAKKGNFDMMLTYSWGAPWDPHAWMSALTAKADHGHPENIALENLATKTEMDRLIKSALVDPKEENVDRDYKKVLELLHDEAVYIPLTYQSVISVYRKGDFKTMRFAPEENSFPLRYIEKNNVSK

SEQ ID NO: 59 - DNA, 1632 bp, Streptococcus pyogenes
ttgattgtgtcaaaatacctaaaatacttctctattatcacgttatttttgactgggcttattttagttgcatgtcaacaacaaaagcctcaaacaaaagaacgtcagcgcaaacaacgtccaaaagacgaacttgtcgtttctatgggggcaaagctccctcatgaattcgatccaaaggaccgttatggagtccacaatgaagggaatatcactcatagcactctattgaaacgttctcctgaactagatataaaaggagagcttgctaaaacataccatctctctgaagatgggctgacttggtcgtttgacttgcatgatgattttaaattctcaaatggtgagcctgttactgctgatgatgttaagtttacttatgatatgttgaaagcagatggaaaggcttgggatctaaccttcattaagaacgttgaagtagttgggaaaaatcaggtcaatatccatttgactgaggcgcattcgacatttacagcacagttgactgaaatcccaatcgtccctaaaaaacattacaatgataagtataagagcaatcctatcggttcaggaccttacatggtaaaagaatataaggctggagaacaagctatttttgttcgtaacccttattggcatgggaaaaaaccatactttaaaaaatggacttgggtcttacttgatgaaaacacagcactagcagctttagaatctggtgatgttgatatgatctacgcaacgccagaacttgctgataaaaaagtcaaaggcacccgcctccttgatattccatcaaatgatgtgcgcggcttatcattaccttatgtgaaaaagggcgtcatcactgattctcctgatggttatcctgtaggaaatgatgtcactagtgatccagcaatccgaaaagccttgactattggtttaaataggcaaaaagttctcgatacggttttaaatggttatggtaaaccagcttattcaattattgataaaacaccattttggaatccaaaaacagccattaaagataataaagtagctaaagctaagcaattattgacaaaagcgggatggaaagaacaagcagacggtagccgtaaaaaaggtgaccttgatgcagcgtttgatctgtactaccctactaatgatcaattgcgagcgaacttagccgttgaagtagcagagcaagccaaggccctagggattactattaaactcaaagctagtaactgggatgaaatggcaacgaagtcacatgactcagccttactttatgccggaggacgtcatcacgcgcagcaattttatgaatcgcatcatccaagcctagcagggaaaggttggaccaatattacgttttataacaatcctaccgtgactaagtaccttgacaaagcaatgacatcttctgaccttgataaagctaacgaatattggaagttagcgcagtgggatggcaaaacaggtgcttctactcttggagatttgccaaatgtatggttggtgagccttaaccatacttatattggtgataaacgtatcaatgtaggtaaacaaggcgtccacagtcatggtcatgattggtcattattgactaacattgccgagtggacttgggatgaatcaactaag

SEQ ID NO: 60 - protein, 544 aa, Streptococcus pyogenes
LIVSKYLKYFSIITLFLTGLILVACQQQKPQTKERQRKQRPKDELVVSMGAKLPHEFDPKDRYGVHNEGNITHSTLLKRSPELDIKGELAKTYHLSEDGLTWSFDLHDDFKFSNGEPVTADDVKFTYDMLKADGKAWDLTFIKNVEVVGKNQVNIHLTEAHSTFTAQLTEIPIVPKKHYNDKYKSNPIGSGPYMVKEYKAGEQAIFVRNPYWHGKKPYFKKWTWVLLDENTALAALESGDVDMIYATPELADKKVKGTRLLDIPSNDVRGLSLPYVKKGVITDSPDGYPVGNDVTSDPAIRKALTIGLNRQKVLDTVLNGYGKPAYSIIDKTPFWNPKTAIKDNKVAKAKQLLTKAGWKEQADGSRKKGDLDAAFDLYYPTNDQLRANLAVEVAEQAKALGITIKLKASNWDEMATKSHDSALLYAGGRHHAQQFYESHHPSLAGKGWTNITFYNNPTVTKYLDKAMTSSDLDKANEYWKLAQWDGKTGASTLGDLPNVWLVSLNHTYIGDKRINVGKQGVHSHGHDWSLLTNIAEWTWDESTK

SEQ ID NO: 61 - DNA, 942 bp, Streptococcus agalactiae
atgtatctaagtagttcgatcatcaaaaaaatattgtcagcttttttggcattgtttttcatatcacttctaacatttattcttatcaaactatcaacagttaattcagcagaaaattaccttcgtttatcaaaaataagtgttagtccagaagcgctaaaagaagcagagcactatttaggtttagataagccattatggaagcagtactggctgtggttccaaaaagcattaacaggagattttggatattcttatgtgctcaggttgccagtattagatttggttttacaacggtttttggctactttatttttaggcacgagtgccttcttgctaattgttaccatttctaccccgttaggtgtgtgggctggcttacatgaatctgctcggagtgatcacttgattcgatttttgagtttttctagtgtgtctatgccaaatttttgggttgcttacttgttgatgctgctattttcggcaaaattaaatcttctgcctgtttcaggaggtaacgatttacaaagtttaattttgccaagtattaccttaagtttttctaccgtaggtcaatacatagcccttattcgaaaagctattagtcaagaaaatagaagtttaaatgtggaaaatgcccgattaagaggagtaaaagaacgttatattgtcacacatcacctccttagaaatgccttacctgcgataatgacagcacttagcttgacttgggtttacttattaacaggatcaattattgttgaagaaattttttcatggaatggaataggacgtttatttgtgaccagtctaagaacttcagatcttccagtaatacaagcttgtatgctaatttttggaaccttatttttagctaataattttatgacacagtgttttatgaattgggttgatcctcggttacgaaagtcaagggagaaa

SEQ ID NO: 62 - protein, 314 aa, Streptococcus agalactiae
MYLSSSIIKKILSAFLALFFISLLTFILIKLSTVNSAENYLRLSKISVSPEALKEAEHYLGLDKPLWKQYWLWFQKALTGDFGYSYVLRLPVLDLVLQRFLATLFLGTSAFLLIVTISTPLGVWAGLHESARSDHLIRFLSFSSVSMPNFWVAYLLMLLFSAKLNLLPVSGGNDLQSLILPSITLSFSTVGQYIALIRKAISQENRSLNVENARLRGVKERYIVTHHLLRNALPAIMTALSLTWVYLLTGSIIVEEIFSWNGIGRLFVTSLRTSDLPVIQACMLIFGTLFLANNFMTQCFMNWVDPRLRKSREK

SEQ ID NO: 63 - DNA, 975 bp, Streptococcus pyogenes
gtgaaacgtactaccattattatcatctggaaaatcatcagatgtgtcacgcttatttttggggtatctgttttgaccttcgttttgttaaaacaatctccagtagatccagtcatggcaagtgtcaattatgacacatcactaacccctgctcagtacaaagcgattgctcaccactatggcttggataagccagctctagtccaatattttatttggttgaaaaatgtgatacagggagatttagggacctcgctcgtttatcggcaacctgttagtgatattattagatcacgggcaggtgcttctttcatacttatgggactctcttggatcttatcgggtcttattggatttatcttaggaacgttatccgctttccatcaagggaaattacttgaccgagttgtcaggtggttttcataccttcagatatcagtaccaacgttttggattggactcatttttttattaatcttttctgtccagctggggtggttcccgattggtatttcttccccgataggcactttgagtcaagatattacgttagctgatcgagttaagcaccttatgttacctgttttcacgctaagtattctaggcattgccaatgtcacccttcatacgagaactaaaatgatgtcggtgctttctagtgaatatgtcttatttgccagagcgcgtggggaaacacagtggcaaatttttaaacatcattgccttagaaatgctatcgtaccagctattacactgcatttttcctattttggagaattgtttggaggatctgttcttgctgagcaagttttctcatatcctggcttagggtctaccctcactgaagcaggacttaaaagtgatacaccgctccttctagctattgtgatgatagggacattatttgtttttgcgggcaatcttattgcggatattttaaatagcatcatcaatccacagttaaggagaaaagta

SEQ ID NO: 64 - protein, 325 aa, Streptococcus pyogenes
VKRTTIIIIWKIIRCVTLIFGVSVLTFVLLKQSPVDPVMASVNYDTSLTPAQYKAIAHHYGLDKPALVQYFIWLKNVIQGDLGTSLVYRQPVSDIIRSRAGASFILMGLSWILSGLIGFILGTLSAFHQGKLLDRVVRWFSYLQISVPTFWIGLIFLLIFSVQLGWFPIGISSPIGTLSQDITLADRVKHLMLPVFTLSILGIANVTLHTRTKMMSVLSSEYVLFARARGETQWQIFKHHCLRNAIVPAITLHFSYFGELFGGSVLAEQVFSYPGLGSTLTEAGLKSDTPLLLAIVMIGTLFVFAGNLIADILNSIINPQLRRKV

SEQ ID NO: 65 - DNA, 765 bp, Streptococcus agalactiae
ttgttagtgattagtgccatttttgcccctattctatctagctttgatccacaatacgtagatttatcacaaaaattattggctcccaataatgttcatttgttagggactgaccaattgggtagagatgtattatctcgcttgctttatggtgctagatattcactgtttttagctattattattagcttattggaattaacgattggtatgtttgtgggtcttattgttggttggtatcaaggaaagttagaaaacctctttttatggatagctaatattattttagcttttccgagctttttgctctctcttgcaaccgtgggaatcttaggtcatggtctagggaatttaatttttgcaattgtctttgtggaatgggtttactatgctaaattaatgaccaatttagttaagagtgcaaaaaaagagccttatgtgataaatgcgcaaattatgggactttcagtctggcatattttaagaaaacatatttttccttttgtgtatcagccaatcctcgttatggtccttatgaatataggaaatattattttaatgatttctggcttttctttcttagggattggtgtgcaacctaatgtcacagaatggggaatgatgttgcacgatgctagaggatattttaggacagctacttggatgatgttatctcctggaattgcgatttttttaacagtattttcctttaatactttaggcgatgccatagataaaaaagattggaaacgacaatggaacagt

SEQ ID NO: 66 - protein, 255 aa, Streptococcus agalactiae
MLVISAIFAPILSSFDPQYVDLSQKLLAPNNVHLLGTDQLGRDVLSRLLYGARYSLFLAIIISLLELTIGMFVGLIVGWYQGKLENLFLWIANIILAFPSFLLSLATVGILGHGLGNLIFAIVFVEWVYYAKLMTNLVKSAKKEPYVINAQIMGLSVWHILRKHIFPFVYQPILVMVLMNIGNIILMISGFSFLGIGVQPNVTEWGMMLHDARGYFRTATWMMLSPGIAIFLTVFSFNTLGDAIDKKDWKRQWNS

SEQ ID NO: 67 - DNA, 819 bp, Streptococcus pyogenes
atgatattgaaacgtcgaacgatggttttatggcaactgggtatcgccatttctctcattcttagtattctagccttaaacctttatttctataggacgcctttggaaaccaatgcagctttacgcaacctcgctccttccttaaaccatctttttgggacagatggtttaggtagggatatgtttgtcagaacgattaaagggctttatttctctttacaagtcggcttattaggcgcccttatgggagtctttcttgcgaccgtttttggagtgcttgcaggtctaggaaatagccttattgataaaataatagcctggttggttgatttgtttattggtatgcctcatttgatttttatgattctcatttcttttgttgttgggaaaggggctcaaggggttatcattgcaacagctgttacccattggccctctctagcaaggcttatccgcaatgaagtctatgatctaaagaataaagcctttgtccagctctctaaaagcatgggaaaaacgccttattatattgtgaggcatcatatcctgcctttgattgcttctcaaattttcattgggtttatcctcttatttccgcacgtcatcttgcatgaagcatccatgactttcttaggatttggcctttctgccgaacaaccttcggttggtatcattttgtcagaggcagctaagcatatctctcttggcaattggtggttggtgatttttccaggcctttatcttattttggttgtcaatgcctttgatactatcggagaatctttaaagaaactcttttaccctcaaacggatcatttt

SEQ ID NO: 68 - protein, 273 aa, Streptococcus pyogenes
MILKRRTMVLWQLGIAISLILSILALNLYFYRTPLETNAALRNLAPSLNHLFGTDGLGRDMFVRTIKGLYFSLQVGLLGALMGVFLATVFGVLAGLGNSLIDKIIAWLVDLFIGMPHLIFMILISFVVGKGAQGVIIATAVTHWPSLARLIRNEVYDLKNKAFVQLSKSMGKTPYYIVRHHILPLIASQIFIGFILLFPHVILHEASMTFLGFGLSAEQPSVGIILSEAAKHISLGNWWLVIFPGLYLILVVNAFDTIGESLKKLFYPQTDHF

SEQ ID NO: 69 - DNA, 798 bp, Streptococcus agalactiae
ttggaaacgacaatggaacagttagaaataagaaaattgtcattacagataggagaggtccctgtactaagagattttagttgtaaaatagatatgggagaatcgctaactattattggtgagagtggttcagggaaaaccctcttggcaaaattattggttggtcacattccacaaggtatgacagttagaggaaacatattttttaagggagttgatttaggtaaactaactgtaaagcagtggcagaaattaaggggacgagatattgcctatttagtgcaaaatcccatgtctatgtttaatccttttcaaaaaattgaagcgcatattttggaaacaatccttagtcatgagaaatgttcaaagagagtagccttatctaaagcgttagaatggatgaaacgtttaaatttagatgatgcgatatccctgttaaaaaaatacccttttgagcttagtggaggaatgctacaaagaattatgttagccactatattatctcttgatcctcaggtaatcatattagatgagccgacctcagcggttgattgtcataattgttctactatatcagctattttgcaggaattgcaaaataatggaaaaaccttgattactgtaacgcatgattatcagttagctagagacctggggggacaattattagttataagtgagggagaagttgttgaacagggacaaacccaagctattttaagcaatcctcaacataactatacgaaagcactgacagtgcaaatggagtatgaaggagatattcttaatgttggtttg

SEQ ID NO: 70 - protein, 266 aa, Streptococcus agalactiae
METTMEQLEIRKLSLQIGEVPVLRDFSCKIDMGESLTIIGESGSGKTLLAKLLVGHIPQGMTVRGNIFFKGVDLGKLTVKQWQKLRGRDIAYLVQNPMSMFNPFQKIEAHILETILSHEKCSKRVALSKALEWMKRLNLDDAISLLKKYPFELSGGMLQRIMLATILSLDPQVIILDEPTSAVDCHNCSTISAILQELQNNGKTLITVTHDYQLARDLGGQLLVISEGEVVEQGQTQAILSNPQHNYTKALTVQMEYEGDILNVGL

SEQ ID NO: 71 - DNA, 1068 bp, Streptococcus pyogenes
atgacaaaagaaaataatgtaatcttaactgccaaagatgtggtggtagaatttgatgtgcgtgatcgtgttttaacagctatccgtaacgtctcactggaacttgttgaaggagaagtccttgcttttgtaggggaatcaggctcaggtaaatctgttttaacaaagacctttacagggatgttggagtctaatggacgcattgctaatggttcaattgtctatcgtgggcaagaattgacagatttaaaaacaaataaagagtgggcaaagattcgcggctcaaaaatcgcaacgattttccaagacccaatgaccagtcttagtcccattaaaactatcggtagccaaatcacagaagtgattattaagcaccaaaaagtaagtcatgccaaagctaaagaaatggcccttgattacatgaataaagtgggtatcccaaatgccaaaaaacgctttgaagattacccatttgagtattcaggaggaatgcgtcaacgtattgttatcgctattgctttagcttgtcgcccagatattcttatctgtgatgagccaacaacagcccttgatgtgactattcaagctcaaatcgttgagttattgaagtcgcttcaacgagaatatcatttcaccattatctttattacgcacgatttaggtgttgtggcaagcattgcagataaagtggctgtcatgtatgcaggagaaattgttgaatttggaacagtcgaagagattttctatgatccaagacacccctatacatggagtttgctgtctagcttaccgcagttggcagatgaatctggtgaactttacgctattccaggaacgcctccatcactttattcaccaattatcggagatgcctttgcacttcgctcagaatatgctatggttttagactttgaaaaagcacctccggcgattaacgtatctgagactcattgggccaaaacatggcttttacacccagaggctccaaaagttcaaaaaccagaagtcattcaagatttgcatcaaaaaatcttaagaaaaatgtcacaacaggaggaaggaaatgtc

SEQ ID NO: 72 - protein, 356 aa, Streptococcus pyogenes
MTKENNVILTAKDVVVEFDVRDRVLTAIRNVSLELVEGEVLAFVGESGSGKSVLTKTFTGMLESNGRIANGSIVYRGQELTDLKTNKEWAKIRGSKIATIFQDPMTSLSPIKTIGSQITEVIIKHQKVSHAKAKEMALDYMNKVGIPNAKKRFEDYPFEYSGGMRQRIVIAIALACRPDILICDEPTTALDVTIQAQIVELLKSLQREYHFTIIFITHDLGVVASIADKVAVMYAGEIVEFGTVEEIFYDPRHPYTWSLLSSLPQLADESGELYAIPGTPPSLYSPIIGDAFALRSEYAMVLDFEKAPPAINVSETHWAKTWLLHPEAPKVQKPEVIQDLHQKILRKMSQQEEGNV

SEQ ID NO: 73 - DNA, 696 bp, Streptococcus agalactiae
atgaaggagatattcttaatgttggtttgtaatcatgtcggaaaaacatttggacgacaagaggttttaaaggactgtcattttcatcttaaaagaggagaaataattggtataatgggtaaaagtggcagtggtaaaagtagccttgcccgactcattataggactagatagtcctacttgtggttcgatatattttcaaggaaaaatttacacacctaaagatggtaaggcgcagattatccttgtttttcaagatgcgcttagttcggtcaatccatattttagtattgaggaaattttgaatgaagctttttatggaaaaaaaacaacttttgaattatgtcaaatattagaagcggtgggtttagatggaacttatctaaaatataaagctagacaacttagtggtggtcagctacagagagtttgtatcgctagagctttactcttaaagcctaaaattattatttttgatgaatccttaagtggattagacccagtaactcaaattaaaatgctacgtttattacaaaaaataaaacgccgttatgaattaagttttataatgatttctcatgaccctaaaatttgtcaagctatctgtaaccgggtctttctgataaaaaatggttatttagtagaagataatgaattcttgaagagagcgtgttctactaactgtttgaccaatctc

SEQ ID NO: 74 - protein, 232 aa, Streptococcus agalactiae
MKEIFLMLVCNHVGKTFGRQEVLKDCHFHLKRGEIIGIMGKSGSGKSSLARLIIGLDSPTCGSIYFQGKIYTPKDGKAQIILVFQDALSSVNPYFSIEEILNEAFYGKKTTFELCQILEAVGLDGTYLKYKARQLSGGQLQRVCIARALLLKPKIIIFDESLSGLDPVTQIKMLRLLQKIKRRYELSFIMISHDPKICQAICNRVFLIKNGYLVEDNEFLKRACSTNCLTNL

SEQ ID NO: 75 - DNA, 1062 bp, Streptococcus pyogenes
atgaatgaagcaataattcaattagatcatattgatattaccttccgtcaaaaaaaacgggttatcgaagctgttaaagatgtcacggttcatatcaatcaaggagatatttatggcattgttgggtattcaggtgccgggaaatcaactcttgtgcgtgtgattaacctgctacaggcaccaacaaacgggaaaatcactgttgatggggatgtgacttttgaccaggggaaaattcaattgtcagctgatgcccttcgccaaaaacgacgtgatattggtatgatcttccaacatttcaatttgatggcccaaaaaacagccaaagaaaatgtagcatttgcgctccgtcattcgtcgttaagtaagactgagaaagaacacaaagttatcgaactgctagaacttgtaggtttatcagagcgagcagataactaccctgcccagttatcgggtgggcaaaaacaaagggtggctattgcgcgtgctctagctaacgatccaaaaattttgatttcagatgaggccacatcagcactagatccaaaaaccactaaacaaattttggcgctcttgcaagaattaaaccgcaaacttggccttaccattgttatgattactcatgaaatgcaaattgttaaggatatttgtaatcgtgttgctgttatgcaaaatggtgttttgattgaagaaggttctgtccttgatatcttttcaaatccaaaagaagccttgacacaggaatttatcacaacagctacagggattgatgaggctttagaaaaaattaaccaacaagacattgttaaacatttgcctgcaaatgcccttctagctcagttgaaatatgcaggaacttctacggatgagcctctacttaatagcatttaccgtcagtttgaagtgacagctaatattttgtatggcaatattgagattttagatcatattccagttggtgacatgattgttgtcttggaagggcaagctgaaaatattcttgcggctgagaaagccttgcatgaagctggtgttgatgttagtattttaaagagaggagcc

SEQ ID NO: 76 - protein, 354 aa, Streptococcus pyogenes
MNEAIIQLDHIDITFRQKKRVIEAVKDVTVHINQGDIYGIVGYSGAGKSTLVRVINLLQAPTNGKITVDGDVTFDQGKIQLSADALRQKRRDIGMIFQHFNLMAQKTAKENVAFALRHSSLSKTEKEHKVIELLELVGLSERADNYPAQLSGGQKQRVAIARALANDPKILISDEATSALDPKTTKQILALLQELNRKLGLTIVMITHEMQIVKDICNRVAVMQNGVLIEEGSVLDIFSNPKEALTQEFITTATGIDEALEKINQQDIVKHLPANALLAQLKYAGTSTDEPLLNSIYRQFEVTANILYGNIEILDHIPVGDMIVVLEGQAENILAAEKALHEAGVDVSILKRGA

SEQ ID NO: 77 - DNA, 726 bp, Streptococcus agalactiae
gtggaacctaaatatcaacgtatattaattaagttatctggtgaagcattggcgggagataagggtgtcggtattgacattcctaccgttcaatctattgcaaaagaaattgccgaagtacacaattcaggtgttcaaatagcgcttgtcattggtggaggtaatctttggcgtggagaacctgcagcagaagcagggatggatcgtgttcaagctgattatacagggatgttagggacagtaatgaatgctcttgtaatggctgatagccttcaacaatatggggtagatactagagttcaaacagctattccaatgcaaactgttgctgagccttacgtacgtggtcgtgctttacgtcatctagagaagaatcgtattgttgtctttggagcgggtattggttcgccttatttctcaactgatacaacagcagcgcttcgtgctgctgagattgaggcagaagcaattttaatggctaaaaatggagtagatggtgtttataatgctgatccaaagaaagatgccaatgctgtcaaatttgatgaattaactcacgttgaagtaataaaacgagggttaaaaatcatggatgcaaccgcatcaactatttcaatggataatgatattgaccttgttgttttcaatatgaatgagactggtaatattaagcgtgttgttcttggagaacaaatcggaacaactgtttcaaacaaagcatctgaa

SEQ ID NO: 78 - protein, 242 aa, Streptococcus agalactiae
MEPKYQRILIKLSGEALAGDKGVGIDIPTVQSIAKEIAEVHNSGVQIALVIGGGNLWRGEPAAEAGMDRVQADYTGMLGTVMNALVMADSLQQYGVDTRVQTAIPMQTVAEPYVRGRALRHLEKNRIVVFGAGIGSPYFSTDTTAALRAAEIEAEAILMAKNGVDGVYNADPKKDANAVKFDELTHVEVIKRGLKIMDATASTISMDNDIDLVVFNMNETGNIKRVVLGEQIGTTVSNKASE

SEQ ID NO: 79 - DNA, 726 bp, Streptococcus pyogenes
gtggaacctaaatatcaacgtatattaattaagttatctggtgaagcattagcaggtgaaaaaggagttggcattgacattccaactgttcaggctattgcaaaagaaattgccgaagttcatgtgtcgggagtacagatcgctcttgttattggtggaggcaatctctggcgtggagagcctgcagcagacgctggaatggaccgtgttcaggctgattacactggcatgcttggaacggtgatgaatgccctagtcatggctgatagtcttcaacattatggtgttgatacccgtgtgcaaacagctattcctatgcaaaatgtagcagaaccttatattcgcggacgtgccttgcgccatctagaaaaaaatcggattgttgtttttggagctggtattggctcgccttatttttcaacagacaccaccgcggcactgcgtgctgctgagattgaagcagatgctattttaatggcaaaaaatggtgtggatggggtctataatgctgatcctaaaaaagatgctaatgcggttaaatttgatgaattaacacatggtgaagtgatcaaacgtggtctcaaaatcatggatgcaacggcatcgaccttatcgatggataacgatattgatttggtggttttcaatatgaatgaagctggcaatattcaacgtgttgtctttggagaacatattggaactactgtatcaaataaagtttgtgac

SEQ ID NO: 80 - protein, 242 aa, Streptococcus pyogenes
VEPKYQRILIKLSGEALAGEKGVGIDIPTVQAIAKEIAEVHVSGVQIALVIGGGNLWRGEPAADAGMDRVQADYTGMLGTVMNALVMADSLQHYGVDTRVQTAIPMQNVAEPYIRGRALRHLEKNRIVVFGAGIGSPYFSTDTTAALRAAEIEADAILMAKNGVDGVYNADPKKDANAVKFDELTHGEVIKRGLKIMDATASTLSMDNDIDLVVFNMNEAGNIQRVVFGEHIGTTVSNKVCD

SEQ ID NO: 81 - DNA, 93 bp, Streptococcus agalactiae
ttgattgatgatttatcaaatggtgaaattaaaagaacacgagcttcaggtacagtaatagaagctaattggttaaggggggttggcgctcca

SEQ ID NO: 82 - protein, 31 aa, Streptococcus agalactiae
MIDDLSNGEIKRTRASGTVIEANWLRGVGAP

SEQ ID NO: 83 - DNA, 555 bp, Streptococcus agalactiae
atgactaaggaaatcgttacaaaagctcaagagcgttttgagcaatcacaccaaagtttatcaagagaatttgcagggattcgtgcaggacgtgctaatgctagcttgcttgatcgtattcaagttgagtattatggagcgccaaccccccttaaccaattagcttctattactgtacctgaagctcgtgttcttttaatttcaccatttgataaatcatcaatcaaagatattgagcgtgctattaacgaatcagatttaggtattaatcctgcaaatgatggttcagttattcgtcttgttattccagctttgacagaagaaacacgtcgtgatttagctaaagaagtgaaaaaagtcggagaaaatgctaagattgctatccgtaatattcgccgtgatgctatggatgaagctaagaagcaagaaaagaataaagaaattacagaagatgacttgaaatctcttgaaaaagatattcaaaaggctactgatgatgctgtaaaacatattgatgagatgactgctaataaagaaaaagaattgttggaagtt

SEQ ID NO: 84 - protein, 185 aa, Streptococcus agalactiae
MTKEIVTKAQERFEQSHQSLSREFAGIRAGRANASLLDRIQVEYYGAPTPLNQLASITVPEARVLLISPFDKSSIKDIERAINESDLGINPANDGSVIRLVIPALTEETRRDLAKEVKKVGENAKIAIRNIRRDAMDEAKKQEKNKEITEDDLKSLEKDIQKATDDAVKHIDEMTANKEKELLEV

SEQ ID NO: 85 - DNA, 555 bp, Streptococcus pyogenes
atggcaaatgcaattattgaaactgcaaaagaacgttttgcacaatcccatcagtctttatcacgtgaatatgccagcattcgtgcgggtcgtgccaacgctagtcttttagaccgtatccaagttgattattacggggcaccgacaccattaaatcaattggcttcaatcactgtaccagaagcgcgtgtcttattgatctcgccttttgataaatcttctatcaaagatatcgagcgcgctcttaacgcatcagatttaggcattacacctgctaacgatggctctgtcattcgtttggttattccagctttgaccgaagaaacacgtaaagaattagccaaagaagtgaaaaaagttggtgaaaatgctaaaattgcaatccgtaatatccgccgcgatgctatggatgatgctaaaaagcaagaaaaagcaaaagaaatcactgaagatgagttaaaaacacttgagaaagatatccaaaaagcaaccgatgatgctatcaaagaaattgaccgcatgacggctgaaaaagaaaaagaattgctctcagtg

SEQ ID NO: 86 - protein, 185 aa, Streptococcus pyogenes
MANAIIETAKERFAQSHQSLSREYASIRAGRANASLLDRIQVDYYGAPTPLNQLASITVPEARVLLISPFDKSSIKDIERALNASDLGITPANDGSVIRLVIPALTEETRKELAKEVKKVGENAKIAIRNIRRDAMDDAKKQEKAKEITEDELKTLEKDIQKATDDAIKEIDRMTAEKEKELLSV

SEQ ID NO: 87 - DNA, 942 bp, Streptococcus agalactiae
ttggcaagtaataaaatgattatggaggtaactgatagaatcaaaaccagatggatttggtttgtcggttacctttttaaaaggagaaaaatgaatacattattagcgacagtcataacaggcttagtaactgatgaaaacaaagatttttactttatccaaaaagatggctttacctttgcattatcaaagtcagaaggagagcatcacattggtgaaatggttaaaggattcgcctatacagatatgcaacaaaaagcacgtcttacaactaaagaaacatttgcgactcgagatcattatggttgggggacagttactgaggtacgtaaagacttgggagtatttcttgatactggtcttccagataagcaagtggttgtttctttggatgttcttcctgaattgaaagaactttggcctaaaaaaggtgatcgcctctacgtttgcttagatgttgataaaaaagatcgtctctgggctctccctgcagatcctgaagtgtttcaacgaatggcaacccctgcatataacaatatgcaaaatcaaaattggccagcaatcgtttatcgcttaaaattgtcaggaacttttgtttatctaccagaaaataatatgctcggctttattcaccctagtgaacgttacagtgaacctcgtttagggcaagtgctggatgcacgagttattggcttcagagaagttgatagaaccttaaatttatcattaaagcctcgttcttttgaaatgttagaaaatgacgcacaaatgattttaacgtatttagaaagtaacggaggattcatgactttaaatgataaatcttctccagaggaaattaaagctacttttggaatttccaaaggtcagtttaaaaaagcacttggaggactcatgaaagctaaaaagatcaaacaagatcagctaggtacagaattatta

SEQ ID NO: 88 - protein, 314 aa, Streptococcus agalactiae
MASNKMIMEVTDRIKTRWIWFVGYLFKRRKMNTLLATVITGLVTDENKDFYFIQKDGFTFALSKSEGEHHIGEMVKGFAYTDMQQKARLTTKETFATRDHYGWGTVTEVRKDLGVFLDTGLPDKQVVVSLDVLPELKELWPKKGDRLYVCLDVDKKDRLWALPADPEVFQRMATPAYNNMQNQNWPAIVYRLKLSGTFVYLPENNMLGFIHPSERYSEPRLGQVLDARVIGFREVDRTLNLSLKPRSFEMLENDAQMILTYLESNGGFMTLNDKSSPEEIKATFGISKGQFKKALGGLMKAKKIKQDQLGTELL

SEQ ID NO: 89 - DNA, 855 bp, Streptococcus pyogenes
atgaatgatttactagcaacagtcattactgggcttattaaagaagaaaacgctaatgactattttatccacaaagaagggtttacctttaccttgtctaaagcagaaggagaacgccagattggtgatatggtcacaggctttgcctatacagacatagagcaaaaggcacgtctcacaaccaaagagatccgttcaacacggacaagttatggctggggggaagtgacagaggttcgtcgtgacctaggcgtttttgtcgatacaggaattccaaataaagaaattgtggtttctttggacgtgttgcctgagatgaaagaactatggcctaaaaaaggggataaactttacattcgtttggatgtggataaaaaagaccgtatttggggacttccagcagagcctgaggtctttcaaaagatggctagccctgcttacaataacatgcaaaatcaacattggccagcaattgtttaccgcctaaaattaacaggaacgtttgtttacctgcctgaaaacaacatgttgggctttattcactcaagtgaacgctacgcagaaccgcgcttaggtcaggttttagatgcccgtgtgattgggtttagagaggtcgatcgtaccttgaatttatcgttgaaaccacgttcttttgagatgttggagaatgacgctcagatgattgttacttatctggaagccaatggtggtttcatgactttaaatgacaaatcaagtccagaagagattaaagcaagctttggtatttcaaaaggccagtttaaaaaagccttgggtggattgatgaaagctaaacgtatcaaacaagacgccacaggaactgaattaatagga

SEQ ID NO: 90 - protein, 285 aa, Streptococcus pyogenes
MNDLLATVITGLIKEENANDYFIHKEGFTFTLSKAEGERQIGDMVTGFAYTDIEQKARLTTKEIRSTRTSYGWGEVTEVRRDLGVFVDTGIPNKEIVVSLDVLPEMKELWPKKGDKLYIRLDVDKKDRIWGLPAEPEVFQKMASPAYNNMQNQHWPAIVYRLKLTGTFVYLPENNMLGFIHSSERYAEPRLGQVLDARVIGFREVDRTLNLSLKPRSFEMLENDAQMIVTYLEANGGFMTLNDKSSPEEIKASFGISKGQFKKALGGLMKAKRIKQDATGTELIG

SEQ ID NO: 91 - DNA, 555 bp, Streptococcus agalactiae
ttggctttttttgttataatgtatctattaaaaagaatggagaacgatatggaacgtgcgatttttgctggaggttgtttttggtgtatggtacaaccatttgaagaattagatggtattgaatctgttttatctggatacactggaggacatgttgagaatccaacttataaagaagtttgtagtaaaactactggacatacagaagctgttgaaattatttttaatcctgaaaaaatctcttatgcagatttagttgagttatattgggcacaaacagatccaacagacgcttttggtcagtttgaagatcgtggggataattatcgtcctgtcatcttttatgagaatgaagagcaacgtcagattgctcaaaaatcaaaagataagctacaagcttcgggtagatttgatagaccaattgtaaccagcattgagcctgctgatactttttacccagcagaagactatcatcaagcattctatcggactaaccctgctcgttacgccttgagtagtgccagaagacatgcatttctagaggagaactggcat

SEQ ID NO: 92 - protein, 185 aa, Streptococcus agalactiae
MAFFVIMYLLKRMENDMERAIFAGGCFWCMVQPFEELDGIESVLSGYTGGHVENPTYKEVCSKTTGHTEAVEIIFNPEKISYADLVELYWAQTDPTDAFGQFEDRGDNYRPVIFYENEEQRQIAQKSKDKLQASGRFDRPIVTSIEPADTFYPAEDYHQAFYRTNPARYALSSARRHAFLEENWH

SEQ ID NO: 93 - DNA, 507 bp, Streptococcus pyogenes
atggaaagagccatttttgcaggaggttgtttctggtgtatggtgcaaccttttgaggagcaagcaggtattttgtcagtcagaagtggctacacaggtgggcatctcccaaatcctagctatgaacaagtttgtgccaaaacaacaggacatacagaagctgttgaaattatttttgaccctaagcaaatcgcttataaagatttggtagagctctattggacgcagacggatccaacagacgcctttgggcaatttgaagatcgtggggacaactaccgtcctgtcatttactacacaacggaaagacaaaaagaaattgcagagcaatcaaaagcaaacttgcaagcttcaggacgttttgaccaacccattgtcaccactattgaaccagcagagccattttatctcgcagaggattatcaccaaggattttataaaaagaatcccaagcggtatgcacaaagcagtgctattcgtcatcagtttttagaggagaattggtca

SEQ ID NO: 94 - protein, 169 aa, Streptococcus pyogenes
MERAIFAGGCFWCMVQPFEEQAGILSVRSGYTGGHLPNPSYEQVCAKTTGHTEAVEIIFDPKQIAYKDLVELYWTQTDPTDAFGQFEDRGDNYRPVIYYTTERQKEIAEQSKANLQASGRFDQPIVTTIEPAEPFYLAEDYHQGFYKKNPKRYAQSSAIRHQFLEENWS

SEQ ID NO: 95 - DNA, 213 bp, Streptococcus agalactiae
ttgagaaaatcattttacagttggttgatgacacaaagaaatccaaaatcaaatgaaccagtagcaatcctagcagattacgcttttgatgaaaccacttttccaaaacatagttcggattttgaaacagttagtcgctatttagaagatgaggccagtttttcctttaatttaacagattttgatgatatttgggaagattatctcaatcat

SEQ ID NO: 96 - protein, 71 aa, Streptococcus agalactiae
MRKSFYSWLMTQRNPKSNEPVAILADYAFDETTFPKHSSDFETVSRYLEDEASFSFNLTDFDDIWEDYLNH

SEQ ID NO: 97 - DNA, 219 bp, Streptococcus pyogenes
ttggtcatgagaaaatcattttacagctggctgatgacacaacgtaaccctaaatcaaatgaacctgtggcgattttagcagatttggtgtttgatgacaccacttttccaaagcataccaatgattttgaactcattagtcggtatctagaagatcaagctagtttttcctttaatttaggtcaatttgatgaaatctgggaagattatctagcacat

SEQ ID NO: 98 - protein, 73 aa, Streptococcus pyogenes
LVMRKSFYSWLMTQRNPKSNEPVAILADLVFDDTTFPKHTNDFELISRYLEDQASFSFNLGQFDEIWEDYLAH

SEQ ID NO: 99 - DNA, 1776 bp, Streptococcus agalactiae
ttgtttatgagatatacaaatggaaattttgaagcctttgcaagacctcgaaaacctgaaggtgtggataaaaaatccgcttatattgttggttctggtttagcaggattagctgccgctgtctttttaatacgtgacggtcaaatggatggtcaacgtattcatatttttgaagaactacctctttctggaggatcacttgacggtgtcaaacgacctgatatcggttttgtaacgcgtggtggtcgtgaaatggaaaatcacttcgaatgtatgtgggatatgtaccgttccatcccctctctcgaagttccagatgcttcttatctagatgaattttattggcttgacaaggatgatcccaattcatctaactgtcgcctcattcataaacaggggaatcgcttagaatctgatggtgattttacactcggaacacattccaaagagttagttaagctagtcatggagactgaagagtctttaggtgctaagacgattgaagaagttttttcaaaagaattttttgaaagtaatttttggacttattggggtactatgtttgcctttgagaaatggcattcagcgattgaaatgcgtcgatatgctatgcgctttatccatcatattggtggtctgcctgatttcacttcattaaaatttaataaatataatcaatatgattctatggtgaaaccaatcatcagttatttagagtctcataatgtagatgttcaatttgatagcaaggtaactaatatctccgtagactttaagaacggtcagaagcttgcaaaagctattcatctcacagttggtggtgaagcaaaaacaattgatcttactccaaatgattttgtttttgtaacgaatggttctatcactgaaagtacgaactatggtagtcatgatactgtagctaaacctaataccgatttgggaggttcttggaatctttgggaaaacttagctgctcaatctgatgaatttggacatcctaaagtcttctacaaagatattccaaaagagtcatggtttgtttctgctactgcaacaataaaagatccagctattgaaccttatatagagcgtttaacacatcgtgacctccatgatggtaaagtaaataccggaggcattgttacagttacagattctaattggatgatgagttttgctatccatcgccaaccgcatttcaaagagcaaaaggaaaatgaaacaattgtttggatttatggactctattcaaatgtggaaggtaattatattaaaaaaccaattgaagaatgtactggtcgagaaatcacagaagagtggttatatcacttaggtgttcctgaaatgaagattcatgatttatctgataaacaatatgtaagtacagttcctgtttatatgccttacattactagttatttcatgcctcgagttaaaggtgaccgaccagatgttatcccacaaggatctgttaacctagccttcattggtaattttgcagaatctccatccagagatacagtatttacaacggaatattctattagaactgctatggaagctgtttatactttcttaaatattgaacgtggtgttccagaagtctttaattcagcatttgatattcgtgtcttgttgcaatctttatactatctcaatgataagaaatctgttgaagatatggatttaccaatacctgccttaatgcgtaaagtaggcatgaaaaaaattagaggaacttatttagaagaattacttcgagaagctcatctttta

SEQ ID NO: 100 - protein, 592 aa, Streptococcus agalactiae
MFMRYTNGNFEAFARPRKPEGVDKKSAYIVGSGLAGLAAAVFLIRDGQMDGQRIHIFEELPLSGGSLDGVKRPDIGFVTRGGREMENHFECMWDMYRSIPSLEVPDASYLDEFYWLDKDDPNSSNCRLIHKQGNRLESDGDFTLGTHSKELVKLVMETEESLGAKTIEEVFSKEFFESNFWTYWGTMFAFEKWHSAIEMRRYAMRFIHHIGGLPDFTSLKFNKYNQYDSMVKPIISYLESHNVDVQFDSKVTNISVDFKNGQKLAKAIHLTVGGEAKTIDLTPNDFVFVTNGSITESTNYGSHDTVAKPNTDLGGSWNLWENLAAQSDEFGHPKVFYKDIPKESWFVSATATIKDPAIEPYIERLTHRDLHDGKVNTGGIVTVTDSNWMMSFAIHRQPHFKEQKENETIVWIYGLYSNVEGNYIKKPIEECTGREITEEWLYHLGVPEMKIHDLSDKQYVSTVPVYMPYITSYFMPRVKGDRPDVIPQGSVNLAFIGNFAESPSRDTVFTTEYSIRTAMEAVYTFLNIERGVPEVFNSAFDIRVLLQSLYYLNDKKSVEDMDLPIPALMRKVGMKKIRGTYLEELLREAHLL

SEQ ID NO: 101 - DNA, 1812 bp, Streptococcus pyogenes
gtgatgatatcactttgcttgactattcaaggaggtcttgaaatgtattatactagtggtaattacgaagcttttgcaacacctcgaaaacccgaaggggtagatcagaaatcagcttatattgttggtactggtttagctggtttagcagcagctgttttccttattcgcgatgggcatatggctggggaacgcattcatctgtttgaggaattgcctttagcaggtggttctttagatggtattgaaaagcctcatcttggttttgtgacccgtggtggtcgtgagatggaaaatcattttgagtgtatgtgggacatgtatcggtctattccctcactggaaattcccggtgcgtcttatttagatgaattttattggttggataaggatgatcctaactcatccaactgtcgtttgattcacaagagaggaaatcgtgtggatgatgacggccagtatacgctcggtaaacagtcaaaagaattaatccatttaatcatgaagacagaagaatctctaggagaccaaaccattgaagagttcttctcagaagatttctttaagagtaatttttgggtgtattgggcaaccatgtttgcttttgaaaaatggcattctgctgtagaaatgcgacgctatgcgatgaggtttatccaccatattgatggtttgccagatttcacctccctcaagttcaacaaatataaccaatatgactctatggtcaaaccgattattgcttacctagaatcacacgacgttgacatccaatttgacacaaaagtcactgatattcaggtggagcaaacagctggtaaaaaggtagcaaaaaccatccatatgacggtgtctggggaggctaaggcgattgagctaacacctgatgatttggtttttgtgaccaatggttctattactgaaagcagcacatacggtagtcatcacgaagtggctaagccaaccaaagcgttaggtggttcttggaatttatgggaaaatctagctgctcaatcagatgattttggtcatcctaaagtgttttaccaggacttgcctgctgaaagctggtttgtgtctgctacagcaaccataaaacacccagctatcgagccttatatagaacgtttgacccaccgtgacttgcacgatggcaaagtgaacactggcggcatcatcactattacagattctaactggatgatgagctttgccattcaccgtcaacctcattttaaagaacaaaaagaaaatgagaccactgtctggatttacggtctttattccaatagtgagggcaattacgtccacaagaaaattgaggagtgtacaggtcaagaaatcacagaagaatggttgtaccaccttggggtacctgttgataaaatcaaggacttagcgagtcaggactatatcaatacagttcctgtttacatgccttatattacgagttactttatgccacgcgtcaaaggagaccgtccgaaagttatcccagatggttcagtcaacttggcctttattggtaactttgcggaatctccatctcgagatacggtctttacgactgagtattctattcgtactgccatggaagcagtgtatagcttcttgaatgtggaacgaggcatcccagaagtctttaattcagcctatgatattcgtgaattgctcaaagccttttattaccttaatgataaaaaggcaatcaaggatatggatttgccaattcctgcactgattgagaaaatcggacataaaaaaatcaaggatacctttatcgaagaattgctcaaagatgctaatcttatg

SEQ ID NO: 102 - protein, 604 aa, Streptococcus pyogenes
VMISLCLTIQGGLEMYYTSGNYEAFATPRKPEGVDQKSAYIVGTGLAGLAAAVFLIRDGHMAGERIHLFEELPLAGGSLDGIEKPHLGFVTRGGREMENHFECMWDMYRSIPSLEIPGASYLDEFYWLDKDDPNSSNCRLIHKRGNRVDDDGQYTLGKQSKELIHLIMKTEESLGDQTIEEFFSEDFFKSNFWVYWATMFAFEKWHSAVEMRRYAMRFIHHIDGLPDFTSLKFNKYNQYDSMVKPIIAYLESHDVDIQFDTKVTDIQVEQTAGKKVAKTIHMTVSGEAKAIELTPDDLVFVTNGSITESSTYGSHHEVAKPTKALGGSWNLWENLAAQSDDFGHPKVFYQDLPAESWFVSATATIKHPAIEPYIERLTHRDLHDGKVNTGGIITITDSNWMMSFAIHRQPHFKEQKENETTVWIYGLYSNSEGNYVHKKIEECTGQEITEEWLYHLGVPVDKIKDLASQDYINTVPVYMPYITSYFMPRVKGDRPKVIPDGSVNLAFIGNFAESPSRDTVFTTEYSIRTAMEAVYSFLNVERGIPEVFNSAYDIRELLKAFYYLNDKKAIKDMDLPIPALIEKIGHKKIKDTFIEELLKDANLM

SEQ ID NO: 103 - DNA, 1035 bp, Streptococcus agalactiae
atgaaattttgttataatgtagtcacttactgtacgaaaaggaagaataatttgcaagaatactctatcgaaattactttacaacatccagatgatatgatgtcactctttggcagcaatgagcgccatttaaaattaatcgaagaaaatttagatgttatcattcatgctagaactgaacgtgttcaggtattaggtgactctgaagaagcagtagaaaccgctcggttaaccattgaagcattattagtgcttgttaaccgcgggatgactgtgaatacttcagatgttgtaacagccttatccatggcacaaaatggttcaattgataaattcgttgccctttatgaggaagaaattattaaggatagctatggtaagcctatccgtgttaagactttagggcaaaaaatatacgttgatagcgttaaaaatcatgatgttgtttttggtattgggcctgctggaacgggaaaaacttttttagcagtcactctagcagtaacggcactaaagcgtggtcaagttaaacgaataatcttaacgagaccagcggttgaagctggtgaaagccttggtttcttgcctggagatctcaaagagaaagttgatccttatttgagaccagtttatgatgccctatatcaaattttaggtaaagagcaaacaagtcgcttaatggagcgtgaaatcatcgaaattgctccattggcttacatgcgtggtcgtactttagatgatgcatttgtcatattagatgaagcgcaaaacaccactataatgcaaatgaaaatgttcctaacacgtcttggcttcaattctaaaatgattgtaaatggcgatgttagccaaattgacttaccaaagaatgttaaatctggtttgattgatgctgttgagaaattacgaaatatcaaaaagattgactttattcatttatcagcaaaggatgttgtaagacaccctgtcgttgctgaaataataaatgcttattcagattcagaaagtagtcacaagctacaatctgataaggac

SEQ ID NO: 104 - protein, 345 aa, Streptococcus agalactiae
MKFCYNVVTYCTKRKNNLQEYSIEITLQHPDDMMSLFGSNERHLKLIEENLDVIIHARTERVQVLGDSEEAVETARLTIEALLVLVNRGMTVNTSDVVTALSMAQNGSIDKFVALYEEEIIKDSYGKPIRVKTLGQKIYVDSVKNHDVVFGIGPAGTGKTFLAVTLAVTALKRGQVKRIILTRPAVEAGESLGFLPGDLKEKVDPYLRPVYDALYQILGKEQTSRLMEREIIEIAPLAYMRGRTLDDAFVILDEAQNTTIMQMKMFLTRLGFNSKMIVNGDVSQIDLPKNVKSGLIDAVEKLRNIKKIDFIHLSAKDVVRHPVVAEIINAYSDSESSHKLQSDKD

SEQ ID NO: 105 - DNA, 1050 bp, Streptococcus pyogenes
ttgcaagagtattctattgacattaccttaacccatcctgatgatgttttagctctttttggtagcaacgagcgtcatttgaagctaatagaagctcatttaggagttattgttcacgcaagaaccgagcgagtccaagtgattggtgatgatgaagaagctgtggaattggctcgattgaccatcaaagccctactggttctagtgggtcgtggcatggtggtcaacacatcagatgtggtgacagctttatctatggcagaatctcatcagattgaccaatttatggcgctttatgaagaagaaatcattaaagataactatggtaaggcaatacgagtcaaaacattaggtcaaaaaacctatgttgatagtgtcaaacgtcatgatgtggtttttggtgtaggacctgcagggacaggtaaaaccttcttagctgttacgcttgcagtcactgctctgaaaagaggacaggtaaagcgtattattttgacgcgtcctgcggtagaagctggcgaaagcctaggttttttaccaggcgatttgaaagaaaaggtggatccttacctcagacctgtttacgatgccctttatcacattttaggcaaggaacaaaccacacgcctgatggaacgagatgtgattgagattgctccgttagcttatatgcgaggtcgtactctggatgacgcttttgttatcttagatgaggctcaaaacacgaccatcatgcaaatgaagatgtttttgacccgtcttggttttaattctaaaatgattgtcaatggagatacgagtcagattgacctccctcgaaatgtcaagtctggtttgattgatgctactcagaaattacaaggcattaaacagattgattttgtctatttctctgctaaggatgttgtccgacatcctgttgtggctgatattatcaaggcttatgaaacgtcctcagaggagatgaaggacttactaaaacctaaggctagtgacgttgaagctgattaccagccaggcttgacaaaataccctgtgatcggtcaagagcac

SEQ ID NO: 106 - protein, 350 aa, Streptococcus pyogenes
LQEYSIDITLTHPDDVLALFGSNERHLKLIEAHLGVIVHARTERVQVIGDDEEAVELARLTIKALLVLVGRGMVVNTSDVVTALSMAESHQIDQFMALYEEEIIKDNYGKAIRVKTLGQKTYVDSVKRHDVVFGVGPAGTGKTFLAVTLAVTALKRGQVKRIILTRPAVEAGESLGFLPGDLKEKVDPYLRPVYDALYHILGKEQTTRLMERDVIEIAPLAYMRGRTLDDAFVILDEAQNTTIMQMKMFLTRLGFNSKMIVNGDTSQIDLPRNVKSGLIDATQKLQGIKQIDFVYFSAKDVVRHPVVADIIKAYETSSEEMKDLLKPKASDVEADYQPGLTKYPVIGQEH

SEQ ID NO: 107 - DNA, 801 bp, Streptococcus agalactiae
atggaccatttcacaaaactctggcaagatttctctaaacttccaaatgttgttgctatagcactcggaggctcacgctctggtgacagttttgaccaatcttccgattatgatttgtatgtttattgtgcagcaactcctgatatcactagtcgtaaacgtatccttaacaagcactgtcattacattgaacttaacaatcattactgggagcttgaagataatggtactttaaacgacggaactgatattgatattctctatcgtaacatagataactttttatcagacttagaagatgtcgttgaacaccacaattctcgaattggatacactacttgtttttggcataacctcatcaattgccaaatactctatgatcctgaaaatcaattacaatcactcaaagagagattcgaagtttcttatcccagtcagttacaaaaacaaattatcattcaaaatcgtaacttattaactggcaagcttccctcttacgataaacaaattataaaagcccttaaacgccaagactttgttagtactcaccatagaactactgctttcttagattcctactttgatattatttttgcacttaataagttgacacatcctggcgaaaaaagaatgatttcctatgctaagaagaatgctacattgcttcctaaacatttcgaagaaaatatcattaaactatgtcatcacaactccaacgaacacactgttaaagaaacattaaacgatataataatgcatctcgacgtcatgcttaaagaaaattttcaacactttataggt

SEQ ID NO: 108 - protein, 267 aa, Streptococcus agalactiae
MDHFTKLWQDFSKLPNVVAIALGGSRSGDSFDQSSDYDLYVYCAATPDITSRKRILNKHCHYIELNNHYWELEDNGTLNDGTDIDILYRNIDNFLSDLEDVVEHHNSRIGYTTCFWHNLINCQILYDPENQLQSLKERFEVSYPSQLQKQIIIQNRNLLTGKLPSYDKQIIKALKRQDFVSTHHRTTAFLDSYFDIIFALNKLTHPGEKRMISYAKKNATLLPKHFEENIIKLCHHNSNEHTVKETLNDIIMHLDVMLKENFQHFIG

SEQ ID NO: 109 - DNA, 474 bp, Streptococcus agalactiae
atgaaacaagattatatttcctacattaggtcaaaagttggacatgagactatctttttaacatattctggtggtattttgacagatggtaagggacgtgtcttactccaattaagagctgataagaattcttggggaattattggtggatgtatggagttaggtgagtcatcagtagatacattgaaaagagaatttttcgaagaaactggattgagagtggaaccaatcagactgttaaatgtttatactaactttcaagactcttatcccaatggcgataaagcacaaaccgtcggttttatttatgaagtaagctgtccaaaaccagttaatatagaaggttttcataatgaggaaacattgcaattggactatttttctaaagaagacgtcaaaaatattacgatcgtaaatgaacaacaccaattaattttagatgaatatttttcacaaacattccaaatggggcgt

SEQ ID NO: 110 - protein, 158 aa, Streptococcus agalactiae
MKQDYISYIRSKVGHETIFLTYSGGILTDGKGRVLLQLRADKNSWGIIGGCMELGESSVDTLKREFFEETGLRVEPIRLLNVYTNFQDSYPNGDKAQTVGFIYEVSCPKPVNIEGFHNEETLQLDYFSKEDVKNITIVNEQHQLILDEYFSQTFQMGR

SEQ ID NO: 111 - DNA, 519 bp, Streptococcus pyogenes
ttggctataatgagaaagaatactaacatagtaaagcgagatcatatgccacaagactacatttcttatatccgctccaaagttgggcatgataagattattcttaactttgctggtgggattttgaccaatgatgacggcaaggtgctgatgcagctgcgtggtgataagaaaacctggactattcctggtggcactatggaactgggtgagagctctttagagacttgcaaacgtgagttcttagaggaaaccggaattgaggttgaagctgttcgcttactgaatgtttacactcattttgaggaagtttatcccaacggtgatgctgttcagactattgtctttatctatgaactaacggctgtttctgatatggctattgataactttcataatgaggaaacgctcaagttacaatttttctctcatgaggagatagcagagttagagagtgtctcagccaaacatcgcctgatgttagaggaatattttagtgatagctttgctatggggcat

SEQ ID NO: 112 - protein, 173 aa, Streptococcus pyogenes
LAIMRKNTNIVKRDHMPQDYISYIRSKVGHDKIILNFAGGILTNDDGKVLMQLRGDKKTWTIPGGTMELGESSLETCKREFLEETGIEVEAVRLLNVYTHFEEVYPNGDAVQTIVFIYELTAVSDMAIDNFHNEETLKLQFFSHEEIAELESVSAKHRLMLEEYFSDSFAMGH

SEQ ID NO: 113 - DNA, 117 bp, Streptococcus agalactiae
gtgactgtttttttagaaagcataagaagtacagaaaaagaaaattatggaatatttgatggtggggatatgctttacttacggtattggaatgatatacttaaagaaatccagttt

SEQ ID NO: 114 - protein, 39 aa, Streptococcus agalactiae
MTVFLESIRSTEKENYGIFDGGDMLYLRYWNDILKEIQF

SEQ ID NO: 115 - DNA, 804 bp, Streptococcus agalactiae
atgaagataacattacacggcgttgctgaaacgttattaatcaccttatatattagggctaaagatgcgatggctaaacatccgatacttaatgatcaaaaatccttagcaattgttgaacagatagaatatgattttgataaattcgataattcagaagcttctttttatgcaacattagctagaattcgcgttatggatagagaaatcaaaaaatttattagagaaaatccaaatagtcaaatcctttcaattggttgtggacttgatacaaggtttgaaagagtcgataatggacaaattaggtggtataaccttgatttgccagaggttatggagataagaaaattattttttgaagagcatgaaagagttactaatatagcaaaatcagccctagatgaaacttggacacgggaggtaaatccccaaaatgccccttttctaatcgtgtcagaaggtgttttaatgtttctaaaagaagatgacgtagagacttttcttcatatcctgacaaattcatttagccaatttatggcacaatttgatttgtgtcataaggaaatgattaataaaggaaagcaacatgatacagtaaagtatatggatacagaatttcagtttggtatcacagatggtcatgagattgtggatttagaccctaaattaaagcaaataaatctgattaactttacagatgagatgagcaaatttgagttaggcacacttcgctctttacttccaacaattcgtaaatttaataattgtttaggtgtgtacgaatataaagcatctgagaaaaag

SEQ ID NO: 116 - protein, 268 aa, Streptococcus agalactiae
MKITLHGVAETLLITLYIRAKDAMAKHPILNDQKSLAIVEQIEYDFDKFDNSEASFYATLARIRVMDREIKKFIRENPNSQILSIGCGLDTRFERVDNGQIRWYNLDLPEVMEIRKLFFEEHERVTNIAKSALDETWTREVNPQNAPFLIVSEGVLMFLKEDDVETFLHILTNSFSQFMAQFDLCHKEMINKGKQHDTVKYMDTEFQFGITDGHEIVDLDPKLKQINLINFTDEMSKFELGTLRSLLPTIRKFNNCLGVYEYKASEKK

SEQ ID NO: 117 - DNA, 495 bp, Streptococcus agalactiae
atgtacgttgaaatgattgatgaaactggacaagtttcagaagatatcaaaaagcaaactcttgatttgttagagtttgcagcacaaaaaacaggtaaagagaataaagaaatggctgtaacgtttgtcactaatgaacgtagccatgaattgaatttagagtatcgagataccgatcgtccgactgatgttatcagtttagaatataagcctgaggttgatatttcttttgatgaagaagatctggctgaaaatcctgaacttgctgagatgctagaagattttgattcttatattggtgaactttttatttctattgataaagctaaagaacaagcagaagagtacggtcactcttatgaacgtgaaatgggttttttagctgtacatggttttttgcatattaacggttatgatcattatacacccgaagaagaaaaagagatgttcagcttacaggaagaaattttaactgcttatggacttaaacgacaa

SEQ ID NO: 118 - protein, 165 aa, Streptococcus agalactiae
MYVEMIDETGQVSEDIKKQTLDLLEFAAQKTGKENKEMAVTFVTNERSHELNLEYRDTDRPTDVISLEYKPEVDISFDEEDLAENPELAEMLEDFDSYIGELFISIDKAKEQAEEYGHSYEREMGFLAVHGFLHINGYDHYTPEEEKEMFSLQEEILTAYGLKRQ

SEQ ID NO: 119 - DNA, 546 bp, Streptococcus pyogenes
gtgcccaacataccaaatgaggtgggcagcccttccctaacaattaaccttatgtatatcgagatgattgacgaaacgggacaagtttcgcaagagattatggagcaaacacttgatttgctcaattttgctgctcaaaagacgggcaaagaagaaaaagaaatgtctgtgacctttgtgaccaatgaaagaagtcatgaactcaacttagaataccgagatactgatcgtccaacagatgtgatttctctagaatataagccagaaacgcctattttatttagtcaagaggatttggctgctgatcctagtttggcagagatgatggcagagtttgatgcttatattggcgaattgtttatttctattgacaaggcgcgtgagcagtcccaagaatatgggcactcttttgagcgtgaaatgggatttttggctgttcatggattcttacatattaatgggtatgatcactacacccttgaagaagaaaaagagatgtttaccttacaggaagagattttgactgcttatggccttacacgacaa

SEQ ID NO: 120 - protein, 182 aa, Streptococcus pyogenes
VPNIPNEVGSPSLTINLMYIEMIDETGQVSQEIMEQTLDLLNFAAQKTGKEEKEMSVTFVTNERSHELNLEYRDTDRPTDVISLEYKPETPILFSQEDLAADPSLAEMMAEFDAYIGELFISIDKAREQSQEYGHSFEREMGFLAVHGFLHINGYDHYTLEEEKEMFTLQEEILTAYGLTRQ

SEQ ID NO: 121 - DNA, 708 bp, Streptococcus agalactiae
atgtcagaaaatcctgatgcctatattattcgtagtcaaaatttgcataatcaggatttcccaagtaacctcaaagctattgctagggcgggtgcaggaacaaataatattcctattgaagaggcaagtgcacagggaatagtcgtgtttaataccccaggtgcaaatgctaatgctgtaaaagaagcggtcattgctgccttattactttcagctcgtgattatttaggagctaaccgatgggttaatactctaactggaacagatattcccaaacaaattgaagcaggaaagaaagcttttgctggtaatgaaattgcaggaaaaaaattgggagttatcggccttggtgccattggagctagaattgcgaatgatgctagacgcttaggaatgacagttcttggttatgatccctatgtttcaattgaaacagcttggaatatttcaagccatgttcaaagggttaaagagattaaggatatttttgaaacttgtgactatatcacaattcatgttcccttaacaaatgaaactaagcatacttttgatgcgaaagctttttcaatcatgaaaaaaggaactacgattatcaactttgctcgtgcagaattagtcaataaccaagagctatttgaagcgatagaaactggtgttgtcaagcgctatattactgattttggagacaaagaattattaaaccaaaag

SEQ ID NO: 122 - protein, 236 aa, Streptococcus agalactiae
MSENPDAYIIRSQNLHNQDFPSNLKAIARAGAGTNNIPIEEASAQGIVVFNTPGANANAVKEAVIAALLLSARDYLGANRWVNTLTGTDIPKQIEAGKKAFAGNEIAGKKLGVIGLGAIGARIANDARRLGMTVLGYDPYVSIETAWNISSHVQRVKEIKDIFETCDYITIHVPLTNETKHTFDAKAFSIMKKGTTIINFARAELVNNQELFEAIETGVVKRYITDFGDKELLNQK

SEQ ID NO: 123 - DNA, 993 bp, Streptococcus pyogenes
ttgatgaaattaaaattatataatgttagaggcgaagaagcagtcttagcaaaaaaatgggctgatgacaatgggattgagatttccttgacggagtctcccttaactcctgaaacggttaaagaagctgaaggctttgacgggattgccaatgcccaaattggtcctttagatgatgcgatttatcctctcttaaaggaaatggggattaaacaaatcgctcagcacagtgctagtgtcgatatgtataaccttgatttggccaccgaaaatgacattattatcacaaatgttcctagctattctccagaatccattgcagaatttacggttactattgtccttaatttaattcgtcatgtggagttgattcgtgaaaatgttaaaaaacaaaatttcacttggggactccctatccgcggccgtgttttaggtgatatgacagttgcgattatcggaactggacgtattggtctagctactgctaaaatctttaaaggttttggctgcaaggtcgttggatatgatatttaccaaagcgatgctgccaaagctgtcttggactataaggaatctgtagaagaagcgattaaagatgctgatcttgtttccttacacatgccaccaactgcagagaacacacaccttttcaattctgatttatttaaatcattcaaaaaaggggctattttgatgaatatggcgcgtggtgccgtcattgagacgcaagatttactggatgctttggatgcaggcttactgagcggagctggtattgacacttacgaatttgaaggaccttatatacctaagaattttgaaggtcaagaaattacagattcactatttaaagctttgattaaccatcctaaggttatttatacacctcatgcagcttattatactgatgaagccgttaaaaacctagttgaaggtgcccttaatgctacagtagagattatcaaaactgggacaacgacaactcgtgttaac

SEQ ID NO: 124 - protein, 331 aa, Streptococcus pyogenes
LMKLKLYNVRGEEAVLAKKWADDNGIEISLTESPLTPETVKEAEGFDGIANAQIGPLDDAIYPLLKEMGIKQIAQHSASVDMYNLDLATENDIIITNVPSYSPESIAEFTVTIVLNLIRHVELIRENVKKQNFTWGLPIRGRVLGDMTVAIIGTGRIGLATAKIFKGFGCKVVGYDIYQSDAAKAVLDYKESVEEAIKDADLVSLHMPPTAENTHLFNSDLFKSFKKGAILMNMARGAVIETQDLLDALDAGLLSGAGIDTYEFEGPYIPKNFEGQEITDSLFKALINHPKVIYTPHAAYYTDEAVKNLVEGALNATVEIIKTGTTTTRVN

SEQ ID NO: 125 - DNA, 159 bp, Streptococcus agalactiae
  misc_feature (1)..(159): n = a, c, g, or t
atgcttttcatgagagataatttagattctttgattcagcctgttattgatgagatggctaaacattatcaatggtctgatcaagacaaaactttctatgaagaagaattacatgagactctaaaagacaatgacttggcagctttgaannnnnttaat

SEQ ID NO: 126 - protein, 53 aa, Streptococcus agalactiae
  MISC_FEATURE (1)..(53): Xaa = Any Amino Acid
MLFMRDNLDSLIQPVIDEMAKHYQWSDQDKTFYEEELHETLKDNDLAALXXXN

SEQ ID NO: 127 - DNA, 1836 bp, Streptococcus pyogenes
atggaattttcaagagaaacaagacgcttagctctccaaaaaatgcaagaaagagatttagacctactgattattgggggaggtattacgggtgctggtgtggcacttcaggcggcagctagtggcctagatacgggtctgattgagatgcaagattttgctcaaggaacctctagccgttcaaccaaattggttcacggggggcttcgttacttgaaacaatttgatgtggaggtggtttcagatacggtgtcagagcgggctgtggtgcaacaaattgcaccccacattccaaaaccagaccctatgttattacctgtttatgacgaacctggcagtacctttagcatgttccgtttgaaggtcgctatggatttgtatgatcttttagcaggcgtgtccaatacgccagcggccaacaaggtgttaaccaaagaagaagtcttaaaacgagaaccagacttaaaacaagaaggcttgcttggtggtggggtttaccttgatttccgcaataatgacgcaaggcttgttattgaaaatatcaaacgagctaatcgtgatggggctcttattgctagtcatgtgaaagcagaagatttcttgctagatgacaatggtaagattattggtgtgaaggcgcgtgatctgctgtcagatcaagaaatcattatcaaggctaaattagtcatcaacaccacaggtccatggagtgatgagattcgtcaattctctcataagggacaaccgattcatcaaatgcgccctacaaaaggggtgcatctggtagtggaccgtcaaaaattaccagtgtctcaacctgtctatgttgacacagggttaaatgatggtcgtatggtctttgtcttgccacgtgaggaaaaaacttattttggaacaacggacacggactacactggagacttggagcacccacaagttactcaagaagatgtggattatttgttaggcgttgtcaataaccgctttccaaatgccaacgtgaccattgatgatattgaaagcagttgggctggtcttcgccccttgttatcaggtaatagtgcttctgactacaatggtggcaacagcggtaaagtcagtgatgatagttttgatcacttggttgatactgtcaaagcctatattaaccacgaagatagccgagaagctgttgaaaaagctattaagcaggttgaaaccagcacatctgaaaaagaattggatccgtctgcagtgtcacgaggttcaagttttgagcgtgatgagaatggactctttaccttggcaggtggtaagattaccgactatcgcaaaatggctgaaggagcattgacagggattattcaaatcctcaaagaagagtttggcaaatccttcaagcttatcaattcaaaaacctatcctgtttcaggaggtgaaatcaatccagccaatgtagattcggaaatagaagcctatgctcaattaggaactcttagtggtctttcgatggatgatgctaggtatttggcaaacctttatggttctaatgcgccaaaagtctttgccttaactcgtcaattaacagcagctgaagggttaagtttagctgaaaccttgtccttacattatgcgatggattatgaaatggctcttaaaccgacagattatttcttgagaagaacaaatcacctcttatttatgcgagatagcctagatgctttgattgacccagtgattaatgaaatggctaaacattttgaatggtctgatcaggaaagagtggcacaagaagacgatcttcgtcgcgtgattgcagacaatgatttgagtgccttaaaaggccatcaggagggt

SEQ ID NO: 128 - protein, 612 aa, Streptococcus pyogenes
MEFSRETRRLALQKMQERDLDLLIIGGGITGAGVALQAAASGLDTGLIEMQDFAQGTSSRSTKLVHGGLRYLKQFDVEVVSDTVSERAVVQQIAPHIPKPDPMLLPVYDEPGSTFSMFRLKVAMDLYDLLAGVSNTPAANKVLTKEEVLKREPDLKQEGLLGGGVYLDFRNNDARLVIENIKRANRDGALIASHVKAEDFLLDDNGKIIGVKARDLLSDQEIIIKAKLVINTTGPWSDEIRQFSHKGQPIHQMRPTKGVHLVVDRQKLPVSQPVYVDTGLNDGRMVFVLPREEKTYFGTTDTDYTGDLEHPQVTQEDVDYLLGVVNNRFPNANVTIDDIESSWAGLRPLLSGNSASDYNGGNSGKVSDDSFDHLVDTVKAYINHEDSREAVEKAIKQVETSTSEKELDPSAVSRGSSFERDENGLFTLAGGKITDYRKMAEGALTGIIQILKEEFGKSFKLINSKTYPVSGGEINPANVDSEIEAYAQLGTLSGLSMDDARYLANLYGSNAPKVFALTRQLTAAEGLSLAETLSLHYAMDYEMALKPTDYFLRRTNHLLFMRDSLDALIDPVINEMAKHFEWSDQERVAQEDDLRRVIADNDLSALKGHQEG

SEQ ID NO: 129 - DNA, 489 bp, Streptococcus agalactiae
atggttcgtacaactcgtccaacaactgataaggttaaaggcgctatttttaatatgattggtcctttttttgaaggtggtcgtgttttagaccttttttctggcagtggtagcttagctattgaggcgatctcaaggggaatggaccaagctgtcctagttgaaaaagataggcgtgcgcaggtcgttattcaagaaaatattgcaatgactaagagtccggagcaatttcaattattaaaaatggaagccaaccgtgctttagaacaattaacgggacaatttgatttggtcttgttggacccgccatatgctaaggaagaaattgtaaagcaaatccaaatcatggatagcaagggtttattaggcgatgatatcatgattgcttgtgaaacggacaaatcagttgatttacctgaagaaattgcttcttttgggatatggaaacagaaaatttatggcatttctaaagtaacggtctacgttcgt

SEQ ID NO: 130 - protein, 163 aa, Streptococcus agalactiae
MVRTTRPTTDKVKGAIFNMIGPFFEGGRVLDLFSGSGSLAIEAISRGMDQAVLVEKDRRAQVVIQENIAMTKSPEQFQLLKMEANRALEQLTGQFDLVLLDPPYAKEEIVKQIQIMDSKGLLGDDIMIACETDKSVDLPEEIASFGIWKQKIYGISKVTVYVR

SEQ ID NO: 131 - DNA, 537 bp, Streptococcus pyogenes
atgagagttgtatcaggtgaatttggtgggcgtcctttaaagacgctcgatggaaagataacacgccctacttcagacaaagttagaggtgcgatttttaatatgataggaccttactttaatggtggtcgtgttttagatttgtttgcaggttcaggtggattagccattgaggctgtttctcgtgggatgtctgctgcagttttggttgagaagaatcgtaaagcgcaagctattattcaagacaatattataatgactaaagctgagaatcggtttaccttgttaaaaatggaagctgagcgagctattgattgcttgactggtcgatttgacttagtctttttagaccctccttatgccaaagaaacaattgtggcaactattgaagctttagcagctaaaaacttattgagtgaacaggttatggttgtctgtgagacagataaaacagtcttgttgccaaaagagattgcaacgttaggtatttggaaagaaaaaatttatggaattagtaaggtaacagtttatgttaac

SEQ ID NO: 132 - protein, 179 aa, Streptococcus pyogenes
MRVVSGEFGGRPLKTLDGKITRPTSDKVRGAIFNMIGPYFNGGRVLDLFAGSGGLAIEAVSRGMSAAVLVEKNRKAQAIIQDNIIMTKAENRFTLLKMEAERAIDCLTGRFDLVFLDPPYAKETIVATIEALAAKNLLSEQVMVVCETDKTVLLPKEIATLGIWKEKIYGISKVTVYVN

SEQ ID NO: 133 - DNA, 483 bp, Streptococcus agalactiae
atgacaaagaaagctttatttacaggttcatttgatcctgttactaatggacatttagatattattgagcgcgccagctatctatttgatcatgtttacattgggttattttataaccttgagaagcaaggttacttttcgattgagtgccgtaaaaaaatgttagaagaagctatccgtcagtttaagaatgtttcagttttagtggcgcaagatagactggctgttgacttagcaagggaagtgggagcaaaatattttgttcgaggtctgcgtaatagccaggattttgattatgaagccaatttggagttttttaataaacagttggcagatgatattgagacagtttatttatcaacgtcgccatctttgagtccgatatcatctagtcgcatccgtgaattgatacattttaaggcttctgtgaagccttttgttccaaagagtgttgttagagaagtggagaaaatgagtgaagaa

SEQ ID NO: 134 - protein, 161 aa, Streptococcus agalactiae
MTKKALFTGSFDPVTNGHLDIIERASYLFDHVYIGLFYNLEKQGYFSIECRKKMLEEAIRQFKNVSVLVAQDRLAVDLAREVGAKYFVRGLRNSQDFDYEANLEFFNKQLADDIETVYLSTSPSLSPISSSRIRELIHFKASVKPFVPKSVVREVEKMSEE

SEQ ID NO: 135 - DNA, 489 bp, Streptococcus pyogenes
atgttaactaaaataggactttatacagggtcatttgatcctgttacaaacggtcatctcgatattgttaaacgggcaagtggcctatttgatcaaatatatgttgggatttttgataatcctaccaaaaaaagctattttaaactagaagttcgtaaagcaatgcttactcaagctctggctgattttacaaatgtaattgtagtaacttcgcacgaacgtttagctattgatgtagctaaagaattacgagtaactcacttgattagaggcttgcgaaatgcaactgactttgagtatgaagaaaatttggaatattttaatcaccttttagctccaaatattgaaaccgtctatttgatatcaagaaataaatggcaggcccttagctctagtcgtgtgagagagctaattcattttcagtcttccttagaaggtttggttcctcagtcggttattgctcaagtggagaaaatgaatgaaaagact

SEQ ID NO: 136 - protein, 163 aa, Streptococcus pyogenes
MLTKIGLYTGSFDPVTNGHLDIVKRASGLFDQIYVGIFDNPTKKSYFKLEVRKAMLTQALADFTNVIVVTSHERLAIDVAKELRVTHLIRGLRNATDFEYEENLEYFNHLLAPNIETVYLISRNKWQALSSSRVRELIHFQSSLEGLVPQSVIAQVEKMNEKT

SEQ ID NO: 137 - DNA, 141 bp, Streptococcus agalactiae
ttggatctctattcttcactcattttctccacttctctaacaacactctttggaacaaaaggcttcacagaagccttaaaatgtatcaattcacggatgcgactagatgatatcggactcaaagatggcgacgttgataaa

SEQ ID NO: 138 - protein, 47 aa, Streptococcus agalactiae
MDLYSSLIFSTSLTTLFGTKGFTEALKCINSRMRLDDIGLKDGDVDK

SEQ ID NO: 139 - DNA, 1071 bp, Streptococcus agalactiae
gtgaagaatagagatccaaaaagaaaacataaaagtttactaggtctgcttaaatggtggattataggttttgcttttttattgttagtattagcaagccttgtagtgagactaccttattatttggaaatgccaggtggagcttatgatatccgttcggtattgaaagtgaataaaaaggctgataaagctaagggttcgtacaattttgtagcggtatctgtcagtcaagcaacgccagctcaggttctttatgcttggttaactccttttacagaattatctagtaaagaggagacaacaggtggctttagtaatgacgattatctcagaattaatcaattctacatggagacttctcaaaatgagtccatctatcaagctttaaagttagctaataagcaagtatctcttacttataaaggagtttatgtgcttaacttagctaaaaattcgacatttaaagatagattacatttagctgatacagtcacaggagttaatggcaaaagtttcaaaaattcttctcaacttatcaaatatgttgcagctcttcatctaggtgataaagtaaaggtacaatacacaagtcaaggtaaaaagaaagaatcagttggtaaagttattaaactatcaaacggtaaaaatggtattggtatcggtttgacagaccatacagaagtattatctgatgttcctgtggactttaatactgaaggtgttggaggaccaagtgcaggtttaatgtttactttagcgatttacgaccaattggttaaagaagatttacgtaaaggacgtaagattgcaggtactggtactattgagcaaaatgggcatgttggcgatattggtggagcaggtttgaaagttgtttcagcggctaaaaaaggaatggatattttctttgttcctaataatccgatcgataaaaatgctaaaaaaggcaaaacaaaggttcagacgaattatcaagaggcaaaagcagcagctaagcgattaggtacgaagatgaaaattgtaccagttcaaaatgttcagcaagctattgattatttgaaaaaaacaaaa

SEQ ID NO: 140 - protein, 357 aa, Streptococcus agalactiae
MKNRDPKRKHKSLLGLLKWWIIGFAFLLLVLASLVVRLPYYLEMPGGAYDIRSVLKVNKKADKAKGSYNFVAVSVSQATPAQVLYAWLTPFTELSSKEETTGGFSNDDYLRINQFYMETSQNESIYQALKLANKQVSLTYKGVYVLNLAKNSTFKDRLHLADTVTGVNGKSFKNSSQLIKYVAALHLGDKVKVQYTSQGKKKESVGKVIKLSNGKNGIGIGLTDHTEVLSDVPVDFNTEGVGGPSAGLMFTLAIYDQLVKEDLRKGRKIAGTGTIEQNGHVGDIGGAGLKVVSAAKKGMDIFFVPNNPIDKNAKKGKTKVQTNYQEAKAAAKRLGTKMKIVPVQNVQQAIDYLKKTK

SEQ ID NO: 141 - DNA, 1035 bp, Streptococcus pyogenes
atgaaaagacttaaaaaaatcaaatggtggttagtgggtctgctagctttaatctctttgttgctagcgttattttttccgctaccttattatattgaaatgcctggaggcgcttacgatattcggactgtcttacaagtcaatggcaaagaagacaaacgaaaaggagcttaccagtttgttgcagtgggcattagtcgtgccagcctcgctcagctattatatgcttggctgacaccgtttactgaaattagtacagcagaagatacaacaggcggatacagcgatgctgatttccttcgaattaatcaattttacatggaaacatcacaaaatgcagctatttatcaagctttatccttagctggaaaaccagttacattagattataaaggcgtatatgttttagacgtaaacaacgaatctacttttaaaggaacgctacacttagcagatactgtaacaggtgtaaatggtaaacagtttactagttcagcagaacttattgactatgtttctcacctaaaactaggggatgaagttacggttcagtttacgagtgataataagcctaaaaaaggagttggccgtattatcaaactgaaaaatgggaaaaatgggattggcattgccttgactgatcatacaagtgtcaattcagaagacacagtgatctttagtactaaaggagtaggaggacctagtgctggtctaatgtttactcttgatatatatgatcaaataactaaagaagatttacgcaagggccgtacaattgcaggtacaggaactattggcaaggatggcgaagtaggagatattggtggtgcaggtcttaaagtagttgcagcagctgaagctggtgcagatatattttttgttccgaataatcctgttgataaggaaattaaaaaagttaatccaaatgctataagtaattacgaagaagccaaacgggcagccaaacgactaaagaccaaaatgaagattgttcctgttacgactgttcaagaggcactggtttatcttcgcaaa

SEQ ID NO: 142 - protein, 345 aa, Streptococcus pyogenes
MKRLKKIKWWLVGLLALISLLLALFFPLPYYIEMPGGAYDIRTVLQVNGKEDKRKGAYQFVAVGISRASLAQLLYAWLTPFTEISTAEDTTGGYSDADFLRINQFYMETSQNAAIYQALSLAGKPVTLDYKGVYVLDVNNESTFKGTLHLADTVTGVNGKQFTSSAELIDYVSHLKLGDEVTVQFTSDNKPKKGVGRIIKLKNGKNGIGIALTDHTSVNSEDTVIFSTKGVGGPSAGLMFTLDIYDQITKEDLRKGRTIAGTGTIGKDGEVGDIGGAGLKVVAAAEAGADIFFVPNNPVDKEIKKVNPNAISNYEEAKRAAKRLKTKMKIVPVTTVQEALVYLRK

SEQ ID NO: 143 - DNA, 822 bp, Streptococcus agalactiae
atgacagagcttataagaatactacatttaaatgatctgcactctcattttgagaattttcctaaggtaaaacgattttttcatgacaatcaagcgcagccaatagagacgatttcacttgacttgggggataatattgataaaagccatcctttgacagaagcaagctcgggaaaggctaatgtccaattgatgaatgaactgggtattgagcttgctactattggtaataatgaaggagttggtttatccaaaaaagacttggaccaagtctacaaagattcagattttacggttattgttggcaatctaaaagataacataatcgaaccgagttgggcaaaaccttacattatttatgagacgcagcaaggaactaagcttgcctttttagcttatacttttccttattataaaacctatgaacctaatgggtggacgatagaagatccaattgactgtcttaaatgccatttacaaataaatgagataaaagaggcaaattgtcgcattttgatgagtcatttaggtattcgttttgatacaaggattgctcaagaattttcagaaattgaccttattataggtgcacatacacaccatttatttgaggaaggggagctaattaacggtacatatcttgcagcagctggtaaatatggtcgctttgttgggagtattgatataacttttgataatcatacactaaaagatattttaatctcaacatgtgatacaaaacaactaactggttatccttcggacagtgactggctaagaagattgagtcagaaggtaaagaacagcttagaaaagaaagtt

SEQ ID NO: 144 - protein, 274 aa, Streptococcus agalactiae
MTELIRILHLNDLHSHFENFPKVKRFFHDNQAQPIETISLDLGDNIDKSHPLTEASSGKANVQLMNELGIELATIGNNEGVGLSKKDLDQVYKDSDFTVIVGNLKDNIIEPSWAKPYIIYETQQGTKLAFLAYTFPYYKTYEPNGWTIEDPIDCLKCHLQINEIKEANCRILMSHLGIRFDTRIAQEFSEIDLIIGAHTHHLFEEGELINGTYLAAAGKYGRFVGSIDITFDNHTLKDILISTCDTKQLTGYPSDSDWLRRLSQKVKNSLEKKV

SEQ ID NO: 145 - DNA, 441 bp, Streptococcus agalactiae
atggatgcgatgctgttttacgcaggtgcagatgttgctattatcaattctggcttaattgttcagccatttgaaaaagacttttcgaggaaaaatctccacgaatcattacctcatcaaatgcgcctcgctaaattgacagtgagtagtcaagaacttttagagatttatgaaactatttatcaacaaggtcaatttttagcgcaacaaaagattcatggtatgggctttcgtggcaagtgctttggagaagttttacattcgggatttgattacaaaaatggaaaaatagtgtataatgagaaagatattgatgccaaagaagaagtgattcttgtaatcgttgatcagtattattttgcatcgtattttgagtgtttaaaaacgaaaaaagtagacttgcttttcctgaattactcagagatgtggcagcagattatt

SEQ ID NO: 146 - protein, 147 aa, Streptococcus agalactiae
MDAMLFYAGADVAIINSGLIVQPFEKDFSRKNLHESLPHQMRLAKLTVSSQELLEIYETIYQQGQFLAQQKIHGMGFRGKCFGEVLHSGFDYKNGKIVYNEKDIDAKEEVILVIVDQYYFASYFECLKTKKVDLLFLNYSEMWQQII

SEQ ID NO: 147 - DNA, 576 bp, Streptococcus agalactiae
atgcgaaaagaagtgacaccagagatgcttaactataataagtatcctggcccacagttcattcactttgaaaatatcgttaaaagtgatgatattgaatttcaacttgttattaatgaaaaatcagcttttgatgtgactgtctttggacaacgtttttctgagattttattaaaatatgattttatcgttggcgattggggtaacgagcagttgaggctaagaggcttttacaaagatgctagtacaattagaaaaaatagccggatttcacgtttagaagattatattaaagagtattgtaactttggttgtgcttattttgtgttggagaatccaaatcctagagatattaaatttgatgatgaaagacctcataagcgtcgtaagtcaagatccaaatcacaatcatcaaagtcacaaactagaaataatcgttcccagtcaaatgccaatgctcattttacaagtaaaaagcgtaaagacacaaaacgccgtcaagaacgtcatattaaagaagagcaagataaggaaatgacctctgcaaagcagcattttgttattcgtaagaaaaaa

SEQ ID NO: 148 - protein, 192 aa, Streptococcus agalactiae
MRKEVTPEMLNYNKYPGPQFIHFENIVKSDDIEFQLVINEKSAFDVTVFGQRFSEILLKYDFIVGDWGNEQLRLRGFYKDASTIRKNSRISRLEDYIKEYCNFGCAYFVLENPNPRDIKFDDERPHKRRKSRSKSQSSKSQTRNNRSQSNANAHFTSKKRKDTKRRQERHIKEEQDKEMTSAKQHFVIRKKK

SEQ ID NO: 149 - DNA, 642 bp, Streptococcus pyogenes
atggatttttcagaaaggtgtcaaatgaaaaaagaaatttcgccagaaatgtacaactataataaatttccaggtcccaaatttattcattttgaagagcaagttaaggctgaaggcattgatttgttactcttagaagatgttaagaacgcttttgatacgactagctttggtcaacgttatacagaagttctcctaaagtatgactatattgttggcgattggggaaatgaacagcttcgtcttaaagggttttataaggatagtgacgatatcaagaaaacgaatcgcatctcacgtttagaagattatattaaagaattttgcaattttggttgtgcttattttgttttagaaaatcttcatccacaagatattaaatttgaagaggagcgccaaccaagacgaaagaaatcacctaaatcaaaatcaaatcgtcgcaagccaaactattcaaatcagcagcccgcaacacctaagagcaaatcgaagcgggcatcaaaagaaaagcaacctgaaaaccaagcgtttaccagtcaaaaacgtcgaagtaatactaagcataaagaaaagtcaaaacgtaatcagactagtcaacttaataccaaaattagtcattttatcatcagaaagaaagataaa

SEQ ID NO: 150 - protein, 214 aa, Streptococcus pyogenes
MDFSERCQMKKEISPEMYNYNKFPGPKFIHFEEQVKAEGIDLLLLEDVKNAFDTTSFGQRYTEVLLKYDYIVGDWGNEQLRLKGFYKDSDDIKKTNRISRLEDYIKEFCNFGCAYFVLENLHPQDIKFEEERQPRRKKSPKSKSNRRKPNYSNQQPATPKSKSKRASKEKQPENQAFTSQKRRSNTKHKEKSKRNQTSQLNTKISHFIIRKKDK

SEQ ID NO: 151 - DNA, 1122 bp, Streptococcus agalactiae
atgaagaaagaaaatattatgcctaaaaaaactgatacacccgcctataaaccctctatttatagcttaactcgcgatgaactaatagcttgggctattgaacatggagaaaagaaattccgtgcttcacaaatctgggactggctctataaaaagcgtgtgcaaagcttcgatgaaatgactaacatttccaaagattttattgcacttttgaacgagaattttgttgttaatcctctaaaacaacgtattgttcaagaatctgctgatggaactgttaaatacctttttgaattacctgatggcatgctgattgagacggttttgatgcgtcaacattatggtttatcagtatgtgtaacgactcaagttggttgtaacattggttgcactttctgtgcaagtggtttaataaagaaacaacgtgatcttaacaatggcgaaatcactgctcaaattatgcttgttcaaaaatattttgatgaacgtggacaaggtgagcgcgttagtcacattgtggtcatgggaataggtgaaccctttgataactataccaatgtattaaaattcttgcgtacagttaatgatgataatggattagctattggtgcacgtcacattacagtgtctacttcaggtttagcacataaaattcgtgaatttgcaaatgaaggtgtacaagttaacttagcagtatctcttcatgctccaaataacgatttacgatcaagtatcatgcgtattaatcgttctttccctcttgaaaagttgtttgcggctattgaatattatattgagacgactaaccgtcgtgtaacatttgagtatattatgttaaatggtgtcaacgataccccagaaaatgctcaagagttagcagatttaacgaaaaagattcgcaaattatcttatgtcaatttaattccttacaatcctgtctcagaacatgaccagtatagtcgtagtcctaaagagcgtgtagaagctttctatgacgttttgaagaaaaatggagttaactgtgttgttcgtcaagaacatggtacggacattgatgcagcttgcgggcaattacgttcaaacacaatgaaacgcgatcgtcaaaaagcgaaggtagggcag

SEQ ID NO: 152 - protein, 374 aa, Streptococcus agalactiae
MKKENIMPKKTDTPAYKPSIYSLTRDELIAWAIEHGEKKFRASQIWDWLYKKRVQSFDEMTNISKDFIALLNENFVVNPLKQRIVQESADGTVKYLFELPDGMLIETVLMRQHYGLSVCVTTQVGCNIGCTFCASGLIKKQRDLNNGEITAQIMLVQKYFDERGQGERVSHIVVMGIGEPFDNYTNVLKFLRTVNDDNGLAIGARHITVSTSGLAHKIREFANEGVQVNLAVSLHAPNNDLRSSIMRINRSFPLEKLFAAIEYYIETTNRRVTFEYIMLNGVNDTPENAQELADLTKKIRKLSYVNLIPYNPVSEHDQYSRSPKERVEAFYDVLKKNGVNCVVRQEHGTDIDAACGQLRSNTMKRDRQKAKVGQ

SEQ ID NO: 153 - DNA, 1077 bp, Streptococcus pyogenes
atgaaaccatcgatttatagcttaacacgcgatgaactgatcgcgtgggcagttgaacgcggccaaaaacagtttagagctactcaaatttgggattggctctataaaaaaagagttcaatcttttgaggagatgacgaatatttctaaagattttgtttctattttaaatgatagtttctgtgtcaatcctttaaaacagcgagttgtacaagagtcagctgatggtacagtaaaatatttatttgaactgcccgatggtatgttaattgaaacagttttaatgcgtcaacattatggtcattctgtttgtgtgacgactcaagttggctgtaacattggctgtactttttgtgctagtggattgatcaaaaagcaacgtgatctaaacagtggggaaattacagctcaaatcatgttagtccaaaaatattttgacgatagaaagcaaggtgagcgggttagccatgttgtcgtaatgggcattggtgaaccttttgataattacaaaaatgtcatgtgctttcttcgcgtcatcaacgatgataatggcttagcaattggtgcccgtcatattacagtctctacctcagggttagctcacaagattcgggattttgcaaacgagggagtacaggttaacttagcagtctcgttgcatgcaccaaataatgatttacgttcaagtattatgcgagtaaatcgctcttttccgcttgaaaagctcttttcagctatagaatactatattgaaaaaacgaatcgtcgtgtcacttttgaatacattatgctaaatgaagttaacgatagcattaagcaagctcaagaattagcagacttaactaaaactattcgtaagttatcttatgttaacttgattccgtataatcctgtttcagaacatgatcagtatagtagaagtcctaaagagcgagttctagcgttttatgatgtgctaaagaaaaatggagttaactgtgtggtgcgtcaagagcacggaacagatattgatgcagcctgtggccagttacgttctaaaacgatgaaaaaagatcgcgaaaaggttacagcgacaaaa

SEQ ID NO: 154 - protein, 359 aa, Streptococcus pyogenes
MKPSIYSLTRDELIAWAVERGQKQFRATQIWDWLYKKRVQSFEEMTNISKDFVSILNDSFCVNPLKQRVVQESADGTVKYLFELPDGMLIETVLMRQHYGHSVCVTTQVGCNIGCTFCASGLIKKQRDLNSGEITAQIMLVQKYFDDRKQGERVSHVVVMGIGEPFDNYKNVMCFLRVINDDNGLAIGARHITVSTSGLAHKIRDFANEGVQVNLAVSLHAPNNDLRSSIMRVNRSFPLEKLFSAIEYYIEKTNRRVTFEYIMLNEVNDSIKQAQELADLTKTIRKLSYVNLIPYNPVSEHDQYSRSPKERVLAFYDVLKKNGVNCVVRQEHGTDIDAACGQLRSKTMKKDREKVTATK

SEQ ID NO: 155 - DNA, 513 bp, Streptococcus agalactiae
atgcttaaaagattacttactgaagatggggaattgacaaagattagtcgtcgtttcgtttggatgttagtgattatctattgtcttattattgtcaggatgtgttttgggcctcaaattatgattgagggggtatcaactccgaatgttcagcgcttcggaagaattgtagctcttttagtaccatttaattcttttcgtagtttagatcagctaactagctttaaagagattttttgggttattggtcaaaatgtagtgaatattttactgctgtttcctctcattatagggttactatccctaaagccaagtttacggaaatataaaagcgttatattacttgctttcttgatgtctattttcatagagtgtactcaagttgttttagatattttaatagatgctaatcgggtttttgaaatcgacgatctatggacaaataccttaggcggtcctttcgccctatggacttatcgaaacataaaaggttggcttctaactattagaaaa

SEQ ID NO: 156 - protein, 171 aa, Streptococcus agalactiae
MLKRLLTEDGELTKISRRFVWMLVIIYCLIIVRMCFGPQIMIEGVSTPNVQRFGRIVALLVPFNSFRSLDQLTSFKEIFWVIGQNVVNILLLFPLIIGLLSLKPSLRKYKSVILLAFLMSIFIECTQVVLDILIDANRVFEIDDLWTNTLGGPFALWTYRNIKGWLLTIRK

SEQ ID NO: 157 - DNA, 1743 bp, Streptococcus agalactiae
atgtctattataaaaaatttgtggtggttttttaaggaagaaaagaagcgctatcttattggaattttgtcattaagtttggttgcggtgttaaatcttatccctcctaaaatcatgggatcagttattgatgctattacaactggaaaattaacaagaccacaattgctctggaatttattaggtttggttttgtcagctttagctatgtatgggctgcgttatatttggcgtatgtatattttagggacttcttacaaattgggtcaagttgtcagataccgtttatttgaacattttacaaaaatgtctccttctttttatcagaaatatcgtacaggtgatttaatggcgcacgcgaccaacgacatcaattctctaacacgtcttgcaggaggaggagttatgtcagcagtggatgcctctatcacagcattagtaacgcttatcaccatgttctttactatttcgtggcaaatgacattaattgcggttatccctttgcccttaatggccttagcaactagtaaattggggcgaaaaacccatgaaaccttcaaagaatctcaggcagccttttcagaattaaataataaagtgcaagaaagtgtctctggcgtcaaagtgactaaatcatttggttatcaagaacaagaaattgcttcttttcaagaggttaatcagatgactttcgtgaagaacatgcggaccatgacttatgatgtcatgtttgatcctttagttcttctttttataggtgcctcctacgtattaacattggctatgggagcttttatgatttcaaaaggtcaagttactgttggtgacttggtaacatttgtgacgtatttagatatgttggtatggcccttgatggcgattggtttcttgttcaatatggtacagcgtggtagtgtttcttataaccgtattaatagcctacttgagcaagaatcggatataactgaccctttaaatcctatcagacctgttgtcaatggaacattaagatatgatattgatttctttagatacgacaatgaagaaaccttagccgatattcatttcaccttagaaaaaggtcaaaccttaggtttggtaggtcaaacgggatcagggaagacaagtcttattaagttattgctacgtgaacatgatgtgactcagggaaaaattactttaaataaacatgatatacgtgattatcgattgtctgagttacgtcaactaatcggttatgttcctcaagatcagtttttatttgctaccagtattttagaaaatgttcgctttggaaatccaactctatctatcaatgctgttaaaaaagcaactaaattggctcatgtttacgatgacattaaacagatgccagcaggatttgagactctaattggagaaaaaggagtctcattatctggtggacaaaaacaaaggattgcgatgagtcgtgccatgattttagatccagatattcttattttggatgattctctatcagcagtggacgctaaaacggaacatgccattattgaaaatcttaaaacgaatcgtcaagggaaatcgactattatttcagcacatcgattatcagctgttgtgcacgcagaccttatcttagttatgcaagacggcagagtcatcgagcgaggtcagcatcaagagttgctaaataaaggtggttggtatgctgaaacgtatgcctcacagcaattagaaatggaggaagcatttgatgaagtc

SEQ ID NO: 158 - protein, 581 aa, Streptococcus agalactiae
MSIIKNLWWFFKEEKKRYLIGILSLSLVAVLNLIPPKIMGSVIDAITTGKLTRPQLLWNLLGLVLSALAMYGLRYIWRMYILGTSYKLGQVVRYRLFEHFTKMSPSFYQKYRTGDLMAHATNDINSLTRLAGGGVMSAVDASITALVTLITMFFTISWQMTLIAVIPLPLMALATSKLGRKTHETFKESQAAFSELNNKVQESVSGVKVTKSFGYQEQEIASFQEVNQMTFVKNMRTMTYDVMFDPLVLLFIGASYVLTLAMGAFMISKGQVTVGDLVTFVTYLDMLVWPLMAIGFLFNMVQRGSVSYNRINSLLEQESDITDPLNPIRPVVNGTLRYDIDFFRYDNEETLADIHFTLEKGQTLGLVGQTGSGKTSLIKLLLREHDVTQGKITLNKHDIRDYRLSELRQLIGYVPQDQFLFATSILENVRFGNPTLSINAVKKATKLAHVYDDIKQMPAGFETLIGEKGVSLSGGQKQRIAMSRAMILDPDILILDDSLSAVDAKTEHAIIENLKTNRQGKSTIISAHRLSAVVHADLILVMQDGRVIERGQHQELLNKGGWYAETYASQQLEMEEAFDEV

SEQ ID NO: 159 - DNA, 1785 bp, Streptococcus pyogenes
gtgatgaaaacagcacgttttttctggttttattttaaacgctatcgtttctcatttactgtcattgctgttgccgttatcttagcaacttatttacaagtaaaagctcctgtcttcttaggagagtccttgactgagttgggaaaaatcggtcaggcttattacgttgctaagatgagtggccagacacattttagccctgatttatcagcttttaatgccgtgatgtttaagcttttgatgacttatttctttactgttttagctaatctaatatatagtttcttacttacacgtgttgtctcacattcgactaaccgcatgcgcaagggcttatttggtaaattagaacgtttaaccgtcgccttttttgaccgccataaagatggggagattctttctcgtttcacgagtgatttggataatattcaaaactcgctgaaccaatccttgattcaagtggtgactaatattgccctttacatcggcctggtctggatgatgtttaggcaagatagccgtttagctttgttaaccatcgcatcaaccccagttgctctcatttttttagtgattaacatccgtttggcaagaaaatacaccaatatccaacagcaagaagtcagtgctttaaatgcttttatggatgaaaccatttcaggacaaaaggctattattgtacaaggtgtccaagaagatacgatgacagcctttttaaagcataatgaaagggttcgacaagccaccttcaaacgccgtctgttctcaggacaattatttccagtcatgaatggaatgagccttattaacacggctatcgtgatttttgtcggttcaacaattgtcctcagtgacaaatctatgccagcagcggcagcgcttggtttagtggttacttttgtacaatattcccagcaatattaccaacccatgatgcaaatcgcgtctagttggggagaattgcagctggcctttaccggtgctcaccgtattcaagaaatgtttgatgaaaccgaagaagttcgtccacaaaatgcaccagcgttcaccagcttaaaagaagcagtggcgattaaccacgtcgattttgggtatcttcctgggcaaaaagttttatcagatgtgtcaatcgttgcacccaagggcaaaatgattgccgtggttggaccgacaggttctggaaagaccactattatgaacttgattaaccgtttctacgatgtggatgcaggttcgattacctttgatggccgtgatattcgtgactacgatttggatagtcttcgtcaaaaggtagggattgtgttgcaagagtcagttcttttttcaggaaccattacggataatattcgttttggtgatcagaccattagtcaagacatggttgaaactgctgcgcgtgcgacccatattcatgactttatcatgtccttaccaaaagggtacaatacctatgtctcagatgatgacaatgtcttttcaacaggtcaaaagcagttgatttctattgctaggacgctactgactgaccctgaagtgttgattttggatgaggccacttcaaatgttgatacggttaccgaaagtaaaattcaacgggccatggaagctatcgtggcaggtcgaactagctttgtcattgctcaccgcctcaaaaccattttaaatgccgatcacattattgtgttgaaagatggcaaggtcattgagcaaggaaatcatcatgagctattgcatcaaaaaggcttttatgccgaattgtatcacaatcaatttgtctttgaa

SEQ ID NO: 160 - protein, 595 aa, Streptococcus pyogenes
VMKTARFFWFYFKRYRFSFTVIAVAVILATYLQVKAPVFLGESLTELGKIGQAYYVAKMSGQTHFSPDLSAFNAVMFKLLMTYFFTVLANLIYSFLLTRVVSHSTNRMRKGLFGKLERLTVAFFDRHKDGEILSRFTSDLDNIQNSLNQSLIQVVTNIALYIGLVWMMFRQDSRLALLTIASTPVALIFLVINIRLARKYTNIQQQEVSALNAFMDETISGQKAIIVQGVQEDTMTAFLKHNERVRQATFKRRLFSGQLFPVMNGMSLINTAIVIFVGSTIVLSDKSMPAAAALGLVVTFVQYSQQYYQPMMQIASSWGELQLAFTGAHRIQEMFDETEEVRPQNAPAFTSLKEAVAINHVDFGYLPGQKVLSDVSIVAPKGKMIAVVGPTGSGKTTIMNLINRFYDVDAGSITFDGRDIRDYDLDSLRQKVGIVLQESVLFSGTITDNIRFGDQTISQDMVETAARATHIHDFIMSLPKGYNTYVSDDDNVFSTGQKQLISIARTLLTDPEVLILDEATSNVDTVTESKIQRAMEAIVAGRTSFVIAHRLKTILNADHIIVLKDGKVIEQGNHHELLHQKGFYAELYHNQFVFE

SEQ ID NO: 161 - DNA, 1740 bp, Streptococcus agalactiae
ttgatgaagtctaatcaatggcaagtctttaagagattaatctcctatttacgcccttataaatggtttacagtattagctctatctctcttattgttgacgactgttgttaaaaatattattcctttaattgcttcacattttattgatcactatctgacaaatgttaatcaaacagcagttcttattttagtgggatattattcaatgtatgtcttgcagaccttaattcaatattttgggaatctcttttttgcgcgtgtttcttatagtattgttagagatattcgtagagatgcttttgctaatatggaaaggcttggcatgtcttattttgataggacaccggcaggatctatagtgtcacgtattactaatgatactgaagcaatatctgatatgttttcgggtattttatcgagttttatctcggcgatatttatttttacagttactctgtacactatgttgatgctagacattaaactaacaggacttgtcgctcttttattacctgttatctttatattagtgaatgtctatcggaaaaaatcagtcactgtcattgctaaaacgagaagtttacttagtgatatcaacagtaaattatcagaaagtattgaaggaattcgcattgtacaggcttttggtcaagaagagcgcttgaagactgaatttgaggaaattaacaaagagcatgttgtgtatgccaatcgttctatggctcttgatagtctcttcttaagaccggcgatgtctcttttaaaactcctagcatatgctgttcttatggcttattttggatttacaggagttaaaggaggtcttacggcaggattgatgtatgcttttattcagtacgttaatcgtctctttgaccctttaattgaagtaacgcaaaatttttcaaccttacaaacatcaatggtatcagcagggcgtgtgtttgatttgattgatgaaacaggttttgaaccaagccaaaaaaatacagaagcttttgtgagagaaggaaatatcgaatttaaaaatgtatcattctcatatgatggaaaaaaacaaatccttgataatgtttcttttagtgttaaaaaaggtgaaacgattgcttttgtaggagcgacaggttctggaaaatcatctattattaatgtctttatgaggttttacgaatttcaatctggacaagttttattagatgggaaggatattagggattactcacaagaacaattgcgaaagaatattggactcgtcttacaagacccctttttatatcatggcactattaaatctaatatcaaaatgtaccaagacatcaccgatcaagaggtacaggacgcagcagagtttgttgatgctgatcaatttattcagaagttgccagataagtacgatgcagctgtttcagaacgtgggtcaagtttttcgactggacaacgccaactattggcgtttgccagaactgtggctagtaaacctaaaattttaatcttagatgaagcgacagcaaatattgattcggaaacagagcagattgtacaagattcgttagcaaaaatgcgtcaaggtcgaacaacaattgccattgctcaccgcttatcaaccattcaagatgctaattgtatctatgttcttgatagaggaaagataattgaaagtgggaatcacgagtctttattagacctaaaagggacttattatcgtatgtaccaattacaagctggcatgatggaggtc

SEQ ID NO: 162 - protein, 580 aa, Streptococcus agalactiae
MMKSNQWQVFKRLISYLRPYKWFTVLALSLLLLTTVVKNIIPLIASHFIDHYLTNVNQTAVLILVGYYSMYVLQTLIQYFGNLFFARVSYSIVRDIRRDAFANMERLGMSYFDRTPAGSIVSRITNDTEAISDMFSGILSSFISAIFIFTVTLYTMLMLDIKLTGLVALLLPVIFILVNVYRKKSVTVIAKTRSLLSDINSKLSESIEGIRIVQAFGQEERLKTEFEEINKEHVVYANRSMALDSLFLRPAMSLLKLLAYAVLMAYFGFTGVKGGLTAGLMYAFIQYVNRLFDPLIEVTQNFSTLQTSMVSAGRVFDLIDETGFEPSQKNTEAFVREGNIEFKNVSFSYDGKKQILDNVSFSVKKGETIAFVGATGSGKSSIINVFMRFYEFQSGQVLLDGKDIRDYSQEQLRKNIGLVLQDPFLYHGTIKSNIKMYQDITDQEVQDAAEFVDADQFIQKLPDKYDAAVSERGSSFSTGQRQLLAFARTVASKPKILILDEATANIDSETEQIVQDSLAKMRQGRTTIAIAHRLSTIQDANCIYVLDRGKIIESGNHESLLDLKGTYYRMYQLQAGMMEV

SEQ ID NO: 163 - DNA, 603 bp, Streptococcus agalactiae
gtgtataatgaggtcaaagtgcaaggaaaggtctataaaatgttactattggtagataattacgattcttttacctataatttaaagcaatatttaagtgtctataaagaggtattcgtcataaaaaatgatgttcctaacctttttttattagctgagagcgcagaagccatcgtcttatcacctggaccaggacacccaaaggatgctgggaaaatggtagaattaatcaatcagtttataggaaagaaacctattctaggtatctgtttggggcatcaagcgcttgccgagtgcttgggtgggcgattaaatttagcaaatcacgttatgcatggtaaacaaagttgggtaacaataaacgaccatactagtttgtttaagggaattgatagtccaacccaagttatgcgttatcattcattggtagtgactgatttaccagagaatattgctgttattgcacgatcaaatgaggataatgaaatcatggcattccattgccccagcttaaaggtatatgcgatgcagtttcatcctgagtcaatcgggagtattgatggaatgaaaatgattgaaaactttttgacgttaattaatgac

SEQ ID NO: 164 - protein, 201 aa, Streptococcus agalactiae
MYNEVKVQGKVYKMLLLVDNYDSFTYNLKQYLSVYKEVFVIKNDVPNLFLLAESAEAIVLSPGPGHPKDAGKMVELINQFIGKKPILGICLGHQALAECLGGRLNLANHVMHGKQSWVTINDHTSLFKGIDSPTQVMRYHSLVVTDLPENIAVIARSNEDNEIMAFHCPSLKVYAMQFHPESIGSIDGMKMIENFLTLIND

SEQ ID NO: 165 - DNA, 564 bp, Streptococcus pyogenes
atgatactcttaattgataattacgattcatttacctacaacctcgcccaatatttaagtgaatttgacgagacgattgtcttgtataaccaagacccaaacttatatgacatggccaaaaaagctaacgctctagtcctctcacctggtcctggttggcccaaggaagccaaccaaatgccaaaactcattcaagacttttaccaaacaaaacctatcttaggagtgtgtctgggacaccaagctatcgctgaaactttagggggaaccttacgcttggccaaacgcgtcatgcatgggagacaaagcaccattgaaacgcaaggccctgctagtctttttcgctccctgccacaagagatcaccgtcatgcgctaccattccatcgttgtggatcagttaccaaaaggttttagcgtaaccgctagagactgtgacgatcaagaaatcatggcatttgaacaccacaccctgccactttttgggctacaatttcacccagaaagcatcggaactcctgatggcatgaccatgattgccaacttcatcgcagccattccccgt

SEQ ID NO: 166 - protein, 188 aa, Streptococcus pyogenes
MILLIDNYDSFTYNLAQYLSEFDETIVLYNQDPNLYDMAKKANALVLSPGPGWPKEANQMPKLIQDFYQTKPILGVCLGHQAIAETLGGTLRLAKRVMHGRQSTIETQGPASLFRSLPQEITVMRYHSIVVDQLPKGFSVTARDCDDQEIMAFEHHTLPLFGLQFHPESIGTPDGMTMIANFIAAIPR

SEQ ID NO: 167 - DNA, 537 bp, Streptococcus agalactiae
atgaaaacaagaacaactacctatattgcactcatggttgcactacttattgttttaggttttatcccagggatcccattaggtttcattccagtcccaattgttttacaaaatcttggtgttatgctggcaggtgctctgcttggtagtaggaagggtttcctagctgtggctattttcttgctcttagttgctattggtgcaccatttttaccaggaggacggtcaggtctcgtaacgctgtttgggccaacagcaggctatctgctgacttatccatttgcagctttttttatcggcctagggcttgagaaagtgaaaacaacaaaactctgggttcaattccttattatttggatatttggcgtactattgattgatatttgtggtagcatcgttctttcctttcaaacttctctacccttaactaaatcactattttctaaccttatttttattcctggggataccttaaaagcatccatttgcttgattatttatcgtaaatttgcaaacagattaactcatctatacaac

SEQ ID NO: 168 - protein, 179 aa, Streptococcus agalactiae
MKTRTTTYIALMVALLIVLGFIPGIPLGFIPVPIVLQNLGVMLAGALLGSRKGFLAVAIFLLLVAIGAPFLPGGRSGLVTLFGPTAGYLLTYPFAAFFIGLGLEKVKTTKLWVQFLIIWIFGVLLIDICGSIVLSFQTSLPLTKSLFSNLIFIPGDTLKASICLIIYRKFANRLTHLYN

SEQ ID NO: 169 - DNA, 537 bp, Streptococcus pyogenes
atgtttacaaccaaagaacttgttaaggtggctatgatgaccactttgattattattttaggctttattcctgctatcccgctaggctttatcccagtccctattgttttacaaaacttaggtgtcatgttggctggattgatgctgggtggtaaaaagggaaccttatctgttttcttatttttagtgattggccttttcttacctgttttctcaggctcaagaacaaccattccagtattgatggggccatctgctggctatgttattgcctaccttcttgtgcctattgtcttttcattactttaccgcaattggttctcaaaaagcacgccattagcattcctagctcttttaatctcaggagttgtactggttgatgttctgggtgctatctggttgtcagcctacactggcatgtctcttgtgacatcgcttttatcaaacttggtctttattccaggagataccatcaaagcaatcattgcgaccattatcgctgttaaatacaaagatagttttttgaatacaaaacag

SEQ ID NO: 170 - protein, 179 aa, Streptococcus pyogenes
MFTTKELVKVAMMTTLIIILGFIPAIPLGFIPVPIVLQNLGVMLAGLMLGGKKGTLSVFLFLVIGLFLPVFSGSRTTIPVLMGPSAGYVIAYLLVPIVFSLLYRNWFSKSTPLAFLALLISGVVLVDVLGAIWLSAYTGMSLVTSLLSNLVFIPGDTIKAIIATIIAVKYKDSFLNTKQ

SEQ ID NO: 171 - DNA, 120 bp, Streptococcus agalactiae
gtgactaatgattcaaaattctcaaaatggacctctcgtccagcgcttaatcttaattccttgaaaggaaaaacaaaacgcaacatggccataatttttaagcatttaatgggagtcaaa

SEQ ID NO: 172 - protein, 40 aa, Streptococcus agalactiae
MTNDSKFSKWTSRPALNLNSLKGKTKRNMAIIFKHLMGVK

SEQ ID NO: 173 - DNA, 1023 bp, Streptococcus agalactiae
atgctattattaatttcgttaaaggaggctatcatgtcatttcaaacaaattatatccatttggctgacgaaatattatctggaaagactagcatttcttatgaacaagcgctggaaattctaaatagcgatgagaactggtgggaaatctacgctgctgccttataccttaaaaatcaagttagccgaaataatattcgccttaacgttttattaagtgctaagcaaggactttgtgcagaaaattgtggttactgttctcaatctaaagaaagcactgctgacattgataaatttggtctgcttcctcaaaatgtcattctaaaacaggctattgtcgctcatcaaaatggtgctagcgtcttttgtattgcgatgagtggaactaagcctagcaagagagaaattgagcagttatgtcaagtcatccctgaaatcaaaaaaagcctccctctagaaatatgccttaccgctggttttttggatagagaacaacttcatcagctaaaacaagcaggaattgaccgtatcaatcataatctcaacacccccgaagaaaactaccccaacattgcaacgacgcatagcttcaaagatcgttgtgatactttagaaagaattcacaatgaagacattgatgtttgttctggattcatttgtggtatgggagagagcgatgaggggctcatcacattagctttcagactaaaagagctggacccctattctatccctgtcaattttttacttgctgttgaaggaacacctcttggaaaatataactatttgactcccattaaatgcttaaaaattatggccatgttgcgttttgtttttcctttcaaggaattaagattaagcgctggacgagaggtccattttgagaattttgaatcattagtcaccttacttgttgactcaacttttttgggaaattacctaacagagggcggtcgcaatcaacataccgatattgaattcttggaaaaattacaactaaatcatactaaaaaggaattaatt

SEQ ID NO: 174 - protein, 341 aa, Streptococcus agalactiae
MLLLISLKEAIMSFQTNYIHLADEILSGKTSISYEQALEILNSDENWWEIYAAALYLKNQVSRNNIRLNVLLSAKQGLCAENCGYCSQSKESTADIDKFGLLPQNVILKQAIVAHQNGASVFCIAMSGTKPSKREIEQLCQVIPEIKKSLPLEICLTAGFLDREQLHQLKQAGIDRINHNLNTPEENYPNIATTHSFKDRCDTLERIHNEDIDVCSGFICGMGESDEGLITLAFRLKELDPYSIPVNFLLAVEGTPLGKYNYLTPIKCLKIMAMLRFVFPFKELRLSAGREVHFENFESLVTLLVDSTFLGNYLTEGGRNQHTDIEFLEKLQLNHTKKELI

SEQ ID NO: 175 - DNA, 528 bp, Streptococcus agalactiae
atgatatactggtcttatattttgacgggagataagatgaaaaaactatttaaaaaagcgatagctatgtgccgagatttgccgcttaattttgtaattgttgaacttagtttgtatcaaagagaggatggctcatctgataatattaaatggatttctaagagaattcttgaggtaacggtaactgatcagcaatggatttaccatttgaggatgcttaatttaccaaaacttaagccaatgtcactagcatccagtgactgtcctgcaagggaagagaaggctagtcttatttcaatagaagaatgtcaaaaattcactagcttagtgcgagataaaaatccttttcaccaaggggaagcagctattgtgcctgcggctctattattggaaaaaataatggaagttagaaaaggaaaaataaaggagattcatttgacttttttatctccagtaagggtgaatcaagaattctcagtgcaagtagtggataacacagtgattatttttcagcatcaaatattatgg

SEQ ID NO: 176 - protein, 176 aa, Streptococcus agalactiae
MIYWSYILTGDKMKKLFKKAIAMCRDLPLNFVIVELSLYQREDGSSDNIKWISKRILEVTVTDQQWIYHLRMLNLPKLKPMSLASSDCPAREEKASLISIEECQKFTSLVRDKNPFHQGEAAIVPAALLLEKIMEVRKGKIKEIHLTFLSPVRVNQEFSVQVVDNTVIIFQHQILW

SEQ ID NO: 177 - DNA, 99 bp, Streptococcus agalactiae
ttgtttaatgcacgatgctgctgcatttctaacgcttcagagtcagaaaacagaattccggattgttcacattgtagaagtagcaggagatcccaagct

SEQ ID NO: 178 - protein, 33 aa, Streptococcus agalactiae
MFNARCCCISNASESENRIPDCSHCRSSRRSQA

SEQ ID NO: 179 - DNA, 1113 bp, Streptococcus agalactiae
atgaagaatagagatgtttatattggttttgggctacgaacacctatcggtataaaagggaagcaatttaaacattaccgtccagaacttttaggagcacaccttttaaatcaaataaaaaaaatagaatcagaatctaacattgatagtattatttgtgggaacacagttggtactgggggcaatattggtcgtttgatgactcttttttctgattatgaatcctatattccagtacaaacgattgatatgcagtgtgcttcatcaagttctgccttgttttttggttatctaaaaatcagtaccggtattaatgaaaaagttcttgttggggggattgaaagtagttctcttcaacctatgagacgttatgctaaagaagataatcgtaacggagaatatacagttgctcagttttctcctgactcttatgctgaaactgtaatgttagaaggggcccagagagtctgtcaaaaatatggttttagaagagaaatgttagataaattggcattcttgagccataaacgcgccttaacagctaaacaaggtggctatttagaagaggtaatcttaccaatggaagggatgcgagatcaaggcgttagaaaactaaaagaaacattttttcaaaaattaccaagattgatggaaaattcacctttgctcactattggaaatgtttgtttaatgcacgatgctgctgcatttctaacgcttcagagtcagaaaacagaattccggattgttcacattgtagaagtagcaggagatcccaagcttagtccagaattggttcacacggctacggaaaaactattaacagaaactcatactaaaatatcggattatgatgcaattgaatggaatgaaccatttgcagcgattgatgctctatttaatcattattatcctgaagagagagaaaaattcaatatttttggagggacattagcttacggacacccttatgcctgctcaggaattattaatatccttcatcttatgcaggcattaaaatataaaaataaacctatgggtctaactgccattgcaggggcaggaggagtcggaatggccatatcaatagagtacttaggagttaagaatgct

SEQ ID NO: 180 - protein, 371 aa, Streptococcus agalactiae
MKNRDVYIGFGLRTPIGIKGKQFKHYRPELLGAHLLNQIKKIESESNIDSIICGNTVGTGGNIGRLMTLFSDYESYIPVQTIDMQCASSSSALFFGYLKISTGINEKVLVGGIESSSLQPMRRYAKEDNRNGEYTVAQFSPDSYAETVMLEGAQRVCQKYGFRREMLDKLAFLSHKRALTAKQGGYLEEVILPMEGMRDQGVRKLKETFFQKLPRLMENSPLLTIGNVCLMHDAAAFLTLQSQKTEFRIVHIVEVAGDPKLSPELVHTATEKLLTETHTKISDYDAIEWNEPFAAIDALFNHYYPEEREKFNIFGGTLAYGHPYACSGIINILHLMQALKYKNKPMGLTAIAGAGGVGMAISIEYLGVKNA

SEQ ID NO: 181 - DNA, 1146 bp, Streptococcus pyogenes
atgacggatgtttatattgctgcaggccttagaacccctatcggtttagtagggaaacaatttgctaaagaacaaccagaaatccttggagcaaagctcatcaacgctttacaaaataagtatccagttcccattgaccaagtgatttgtggcaataccgtcggaacgggtggtaatattgggcgcttgatgaccctgtattctcatttaggagaatctgtctctgctttgacggttgatatgcagtgtgcatcagctggtgcagctctttccgtgggttatgctaaaatcaaggcaggtatggcaagcaaccttttagtgggagggattgaaagcagctccttacaacctgaatcggtatatgcttcagctgattggcgccaaggagcctacaaggtagctcagttttctccagatagtatcagcccttttgcgatgattgaaggggcagaacgagtggcaagagagcatggctttacaaaggagtatttgaatcactggacattgagaagtcatcaaaaggctagttattgccaggagcaagccctgttagctgatcttattctagacctgtcaggagccagtgatcaaggtattcgaccgcgcttgtcaagtaaggtgttgtcaaaggtaccccctatcttaggagaaggtcacgtgattagtgcagccaatgcctgcctaacccatgatgctgctgcctttttacagctaagtagtcagccttcagcttttaaactgattgatgtggtagaagtagcaggagacccacagcgtagccctttaatggtgattaaggctagtcaagtccttttggaaaaacatggtctagggatggcagatatgacagcgattgaatggaacgaagcctttgccgttattgatggtctatttgaaacccattatccagatttattggaccgctataatatatttggtggtgcattagcttatggtcatccctatggtgcctcagcagccattataatattgcacttaatgagggctttagagattaaaaatggacgctatggaatagctgctatagcagcagctggtggccaagggtttgctgttttactaaaatatcataaggagtttagtcatgctgacaaagctagaatattgggcaaagcaatgcccaaa

SEQ ID NO: 182 - protein, 382 aa, Streptococcus pyogenes
MTDVYIAAGLRTPIGLVGKQFAKEQPEILGAKLINALQNKYPVPIDQVICGNTVGTGGNIGRLMTLYSHLGESVSALTVDMQCASAGAALSVGYAKIKAGMASNLLVGGIESSSLQPESVYASADWRQGAYKVAQFSPDSISPFAMIEGAERVAREHGFTKEYLNHWTLRSHQKASYCQEQALLADLILDLSGASDQGIRPRLSSKVLSKVPPILGEGHVISAANACLTHDAAAFLQLSSQPSAFKLIDVVEVAGDPQRSPLMVIKASQVLLEKHGLGMADMTAIEWNEAFAVIDGLFETHYPDLLDRYNIFGGALAYGHPYGASAAIIILHLMRALEIKNGRYGIAAIAAAGGQGFAVLLKYHKEFSHADKARILGKAMPK

SEQ ID NO: 183 - DNA, 1227 bp, Streptococcus agalactiae
atgcttgaatcattgaaaacgatagttaaaaccaatagcgataaaaagttatttgatggtgatttacaggtcagttatggagaattttataacttagtaagacaagatatggcgtcacaagacaataggaaacatgtgattagcacacactctctgcttaaccaattagtaagatttgtttcaaagttatgtcaaaaagctcttcctattatttgtaaacctaaccttactcataatgaaataagtcgattagaaaaagaagtgcagtatgctcctcaactagctgattttggtgttctttcttctgggactacagctgatgctaaactattgtggaggagcttcacttcgtggtctgatttttttagcattcagaatgcttatttttcggtcacttccaatagcaaactgtttattcaaggtgatttttcatttactggtaacttaaatttagcgctatcccttttattactggggggaacacttgttgtcacacagaaaaattctgtaaaatactggcagactttatgggaaaaaactggtgtaacgcatctatatctgctccctagttatctcaagttagtggaacaatatagcaaggagactgcgttagacaataaaactattattacctcttcgcaatatgtctctgactcattactggaaggtttatatagaaagcatcctaaagtgtcagtgaaaatcttctatggtgctagtgagctcaattatgtgtcatggtacgatggtcgtgatatccgagataagccacagtatgttggagaaatcgttccaaatgtagctgttaggattaaagagggaagaatttttgtaaaaacaccgtatagtatctgtggcctttcaagtgaatattgtgctggtgattatggtgaactgatagatggcaaattatatctatttggccgtggtggtgattggtgcaatcaatcgggcattaagctctatttacctagattaatcgaaaaaataaaaacatgcccttatatcaaggatgcagtagcatttacaaaagagagtcaaagtcatggacaagagtcacattgctgtattgttttaattgaaaatcagatgcaacaagagtgtttgaagtggttatcggaacattttgaaaagaagtatgggtttaagcattatcatattgtatctaaaattcctttgatgccatctggaaaaattgattatcaacaactcaaaagacagttagca

SEQ ID NO: 184 - protein, 409 aa, Streptococcus agalactiae
MLESLKTIVKTNSDKKLFDGDLQVSYGEFYNLVRQDMASQDNRKHVISTHSLLNQLVRFVSKLCQKALPIICKPNLTHNEISRLEKEVQYAPQLADFGVLSSGTTADAKLLWRSFTSWSDFFSIQNAYFSVTSNSKLFIQGDFSFTGNLNLALSLLLLGGTLVVTQKNSVKYWQTLWEKTGVTHLYLLPSYLKLVEQYSKETALDNKTIITSSQYVSDSLLEGLYRKHPKVSVKIFYGASELNYVSWYDGRDIRDKPQYVGEIVPNVAVRIKEGRIFVKTPYSICGLSSEYCAGDYGELIDGKLYLFGRGGDWCNQSGIKLYLPRLIEKIKTCPYIKDAVAFTKESQSHGQESHCCIVLIENQMQQECLKWLSEHFEKKYGFKHYHIVSKIPLMPSGKIDYQQLKRQLA

SEQ ID NO: 185 - DNA, 1245 bp, Streptococcus pyogenes
atgctgacaaagctagaatattgggcaaagcaatgcccaaataaaaaagctatcgtagccgatcagataagcttgacttatcaagagctatggcaagcggttttaataaaggatcagacaataaaagacagtgtaccatatatcatcagtcatagtcgctatcttaatcagttactctcttttttacgaggattaaaagaaggcagttgtcctatcattttacaccctaatatctcaggtacatttcagcagcaaataaaacacgtcgatggtgagcttcttaaaaaagctgattttgctgttttgagttcgggaacaactggcaaagcaaaattattttggcgtcgtctatcaacttggacgagactttttgattatcaaaataaggtgtttggtatgactggtaatagttgtctattcttacatggtagttttagttttactggcaatcttaacttagcattagctcaactatgggccgggggatgtctggttttaagccaaaagctgtctttgaaaacgtggttaagcttatggcaagcaaaaaaggtgagtcacctttaccttttaccgacctacctaaatcgcttgctaccttatttgactaagaacaacatgactgcgactcacttattgacctcttcgcaaatgatatcacaagaattactaagacattattacaaaaaatttcctcagcttgaaattgtcattttctacggggctagtgaattatcttttataacgtggtgtaatggcagagctgctgtcaaaattaatggtttggtaggacagccctttcctgatgtgtctatcagtttcaaagataaggaaatttttgtagagactccttatagtgtagaaggaatgtcacaaccatacagtgtttcagacttaggaaaaatgagcccagcgggtttaattttagaagggcgacaagatgactgggttaatcaacgaggagtgaaatgccacctgcctagcctagttgaactcgctcaccaagcgccaaacgtcaaagaagcgcacgctttaaagataggaaaaggagaaaacgaaaccctaatattagtattagttttgactaagaaggattgcctagcacctattaaagactttttagctctttatttaaactctggacaacttcccaagtactatcttgtgattgattgtttgcctttaaaagataatggtaaaattaatcgagaagttcttttaaataaaatacccaaacagtggcttagt

SEQ ID NO: 186 - protein, 415 aa, Streptococcus pyogenes
MLTKLEYWAKQCPNKKAIVADQISLTYQELWQAVLIKDQTIKDSVPYIISHSRYLNQLLSFLRGLKEGSCPIILHPNISGTFQQQIKHVDGELLKKADFAVLSSGTTGKAKLFWRRLSTWTRLFDYQNKVFGMTGNSCLFLHGSFSFTGNLNLALAQLWAGGCLVLSQKLSLKTWLSLWQAKKVSHLYLLPTYLNRLLPYLTKNNMTATHLLTSSQMISQELLRHYYKKFPQLEIVIFYGASELSFITWCNGRAAVKINGLVGQPFPDVSISFKDKEIFVETPYSVEGMSQPYSVSDLGKMSPAGLILEGRQDDWVNQRGVKCHLPSLVELAHQAPNVKEAHALKIGKGENETLILVLVLTKKDCLAPIKDFLALYLNSGQLPKYYLVIDCLPLKDNGKINREVLLNKIPKQWLS

SEQ ID NO: 187 - DNA, 630 bp, Streptococcus agalactiae
atgttatcaaaagcaaaatcacgatatattatccgtgagattattaagttatttccagatgctaaacctagcttagactttactaatgtctttgagcttttggtagctgtaatgctatcagctcaaacaactgatgcagctgttaataaagttacacccgccctttttgaacgctttccaaatcctttagttttggcacaagctgatcccaaagagattgaaccctatatttctaaaattgggctttaccgtaataaagctcgattcttaaatcaatgcgctaaacaattgatagagcattttgatggaaaagtcccccgaactcgtcaagagctagaaagtttggctggcgttggaaggaaaacggctaacgtggtcatgagtgttggatttggtattccggcttttgccgtagatactcatgtcactcggatttgtaaacaccaccagatttgcaaacagtcggcttctccactggaaattgagaaacgagtcatggaggttttaccaccagaagagtggctagctgcacatcaatccatgatttattttggtcgtgcaatttgtcatcctaaaaatccaaaatgcgaccagtacccacaactttatcactttcctgataatttaaag

SEQ ID NO: 188 - protein, 210 aa, Streptococcus agalactiae
MLSKAKSRYIIREIIKLFPDAKPSLDFTNVFELLVAVMLSAQTTDAAVNKVTPALFERFPNPLVLAQADPKEIEPYISKIGLYRNKARFLNQCAKQLIEHFDGKVPRTRQELESLAGVGRKTANVVMSVGFGIPAFAVDTHVTRICKHHQICKQSASPLEIEKRVMEVLPPEEWLAAHQSMIYFGRAICHPKNPKCDQYPQLYHFPDNLK

SEQ ID NO: 189 - DNA, 654 bp, Streptococcus pyogenes
atgagaattggaaaagcaagattagcaaaagtcctgaccatcattggtcaaatgtttcctgaggctaagggagagttagactgggaaacaccttttcaattgttgattgcggtgattttatcagctcaaacgacagataaggccgtcaataaggtaactcctggactatggcagtcttatccagaaatagaagacttagcttttgctgaactttctgatgttgaaaatgctctgagaacgattggactctataaaaataaggccaaaaatatcattaaaactgctcaggctattcgtgatgattttaagggtcaagtgccaaaaacccacaaagagcttgaaagtttaccgggtgttggccgaaaaacagccaatgtggtgctggcagaggtttatggtgttccagctattgcggttgatactcatgtggctagagtctcaaagaggctcaatatttcatcgccagatgccgatgtcaagcagattgaagcagatttgatggctaaaattccaaagaaagattggattattactcaccatcgattgattttttttggacgctaccattgtttagccaaaaaaccaaaatgtgagatttgtcccgttcagtcttactgcaagtactatcaagatacttatggaaaatcgaaagcc

SEQ ID NO: 190 - protein, 218 aa, Streptococcus pyogenes
MRIGKARLAKVLTIIGQMFPEAKGELDWETPFQLLIAVILSAQTTDKAVNKVTPGLWQSYPEIEDLAFAELSDVENALRTIGLYKNKAKNIIKTAQAIRDDFKGQVPKTHKELESLPGVGRKTANVVLAEVYGVPAIAVDTHVARVSKRLNISSPDADVKQIEADLMAKIPKKDWIITHHRLIFFGRYHCLAKKPKCEICPVQSYCKYYQDTYGKSKA

SEQ ID NO: 191 - DNA, 207 bp, Streptococcus agalactiae
atgaaagttttattcgatgtgcagaatcttttgaaaaaatttggtatttatgtttatattggtaaacgtctttatgatatcgaagttatgaagattgaattgcaacgtctctacgataatggtctgataagtagagatgattatttaaaagcagaactgattttaagaagagagcacagactagaattggagaaggaaaataaaaaa

SEQ ID NO: 192 - protein, 69 aa, Streptococcus agalactiae
MKVLFDVQNLLKKFGIYVYIGKRLYDIEVMKIELQRLYDNGLISRDDYLKAELILRREHRLELEKENKK

SEQ ID NO: 193 - DNA, 219 bp, Streptococcus pyogenes
ttgctaaaatctacttatatgaaaacactatatgatgtgcaacaattgctaaaaaactttggcatttttgtttaccttggcaaacgtctttatgatattgaaatgatgaagattgaacttcagcgtctctatgatagcggcttattggataagagggattacttaaatgcggagttaattttgcgacgtgagcatagattagaattggaaaaagaagga

SEQ ID NO: 194 - protein, 73 aa, Streptococcus pyogenes
LLKSTYMKTLYDVQQLLKNFGIFVYLGKRLYDIEMMKIELQRLYDSGLLDKRDYLNAELILRREHRLELEKEG

SEQ ID NO: 195 - DNA, 966 bp, Streptococcus agalactiae
atgagtaagaaattattgggaattgacctcggaggaacgaccattaaatttggtatcttgacgcttgagggagaagtacaagaaaaatgggcaattgagaccaatactttagaaaacggaagacatatcgtttctgatatcgttgaatctctcaaacatcgtttgagcctctatggattaacaaaagatgactttctcggtatcggtatgggttctccaggagctgttgatagaactagtaaaacagtaacaggtgcttttaatctaaattgggctgatactcaagaagtaggttcagttattgaaaaagaagttggaattccattttttattgataacgatgctaatgttgcagcacttggtgaacgctgggtaggtgctggtgccaataatcccgacgttgttttcgtaaccctcggaacaggagtaggtggaggtgttatcgcagatggtaacctcatccatggtgttgcaggagcaggtggagaaattgggcatatgattgttgatccagaaaatggatttacgtgcacatgtggtaacaaaggctgccttgagacagttgcatcagcgacaggtgttgttagagtagcacgtcaactcgcagaacaatatgagggttcgtctgccattaaagcagcgattgacaacggtgatactgttacaagtaaagatatttttatagcagcagaagatggggataaatttgctaattctgttgttgaacgtgtatcacgttaccttggactggcagcagctaatatttcaaatattttaaaccctgattctgtggttattggtggcggtgtctcagcagcaggtgaatttttacgtagtcgcgttgagaaatactttgtcacatttgctttcccacaagttaaaaagtcaactaaaattaagattgctgaactaggtaatgatgctggtattattggtgcagcaagcttagccaatcaacaagcaagt

SEQ ID NO: 196 - protein, 322 aa, Streptococcus agalactiae
MSKKLLGIDLGGTTIKFGILTLEGEVQEKWAIETNTLENGRHIVSDIVESLKHRLSLYGLTKDDFLGIGMGSPGAVDRTSKTVTGAFNLNWADTQEVGSVIEKEVGIPFFIDNDANVAALGERWVGAGANNPDVVFVTLGTGVGGGVIADGNLIHGVAGAGGEIGHMIVDPENGFTCTCGNKGCLETVASATGVVRVARQLAEQYEGSSAIKAAIDNGDTVTSKDIFIAAEDGDKFANSVVERVSRYLGLAAANISNILNPDSVVIGGGVSAAGEFLRSRVEKYFVTFAFPQVKKSTKIKIAELGNDAGIIGAASLANQQAS

SEQ ID NO: 197 - DNA, 969 bp, Streptococcus pyogenes
atgagtcaaaaattactggggattgatttaggtggtaccaccattaaatttggaattttaacagcagcaggagaagtccaagaaaaatgggcaattgagactaatattttagaaggaggcaaacatattgtccctgatatcatcgcttccatcaaacatcgcttagacttgtatggtctaagcagtgctgactttgtgggaattggtatgggatcaccaggagcggttgaccgtgatactaatacagttactggggcattcaaccttaattggaaagaaacccaagaagtcggttccgttgttgaaaaagaattgggcattccttttgccattgacaatgatgccaatgtggctgcccttggtgaacgttgggtaggtgctggtgaaaataacccagatgtcgtcttcatgacacttggaacaggtgtcggtggaggcattattgctgatggtaacttgattcatggtgttgcaggagcaggtggtgaaatcggccacatgattgttgagccagaaaatggctttgcttgtacttgtggctcacacggctgtttggaaacagtagcttcagcaacaggagttgtcaaagtggcacgtttactggcagaagcctacgaaggggattcagccatcaaagcagctattgacaatggtgaaggtgttaccagtaaagacattttcatggcggctgaagcaggggattcctttgctgattctgttgtggaaaaggttggttactaccttggccttgcttcagcaaatatttccaatatcttgaatccagactcagtggttatcggtgggggtgtgtcagcagcaggagaatttctacgctcacgtattgaaaaatactttgtgaccttcactttcccacaagtgaggtattcaactaaaattaagattgcagaacttggcaatgatgctggaattatcggtgcagctagccttgctcgacaatttatcacaaaa

SEQ ID NO: 198 - protein, 323 aa, Streptococcus pyogenes
MSQKLLGIDLGGTTIKFGILTAAGEVQEKWAIETNILEGGKHIVPDIIASIKHRLDLYGLSSADFVGIGMGSPGAVDRDTNTVTGAFNLNWKETQEVGSVVEKELGIPFAIDNDANVAALGERWVGAGENNPDVVFMTLGTGVGGGIIADGNLIHGVAGAGGEIGHMIVEPENGFACTCGSHGCLETVASATGVVKVARLLAEAYEGDSAIKAAIDNGEGVTSKDIFMAAEAGDSFADSVVEKVGYYLGLASANISNILNPDSVVIGGGVSAAGEFLRSRIEKYFVTFTFPQVRYSTKIKIAELGNDAGIIGAASLARQFITK

SEQ ID NO: 199 - DNA, 378 bp, Streptococcus agalactiae
atggatatgtctgttattttaattattgttattcttctggcttttgttgcttgggcatcttggaattattggagggttcgtagggcagctaaatttttagataacgagtcttttcaaaaagaaatgtcacgaggacagttaattgatatccgagaagctggtgcttttcatagaaagcatattctcggagcacgtaacattccagcaagtcaatttaaagttgccttatcggctttgcgcaaagataaacctgtcctcttatatgacgcaagccgtggtcaatctattccaaggattgttttgttactcagaaaagaaggttttaatcaactttacgtgttaaaggacggtttcaattactggacgggtagagttaag

SEQ ID NO: 200 - protein, 126 aa, Streptococcus agalactiae
MDMSVILIIVILLAFVAWASWNYWRVRRAAKFLDNESFQKEMSRGQLIDIREAGAFHRKHILGARNIPASQFKVALSALRKDKPVLLYDASRGQSIPRIVLLLRKEGFNQLYVLKDGFNYWTGRVK

SEQ ID NO: 201 - DNA, 387 bp, Streptococcus pyogenes
atgtctccaatcacacttatcttatggttacttcttgtcggcattgttggttattatacatggaactatttctcttttcgaaaaatggcaaagcaggttgataacgagacttttaaagacgtgatgcgtcaaggtcaattgattgatttacgagagccagcggcttttagaactaagcatattttaggagctcgaaattttccagcgcaacaatttgatgctgctattaagggactacgcaaggacaaacctgttcttatttacgaaaatatgcgtccccagtaccgtgtgcctgcggtcaaaaaacttaaaaaagctggctttgaagacgtttatgtcttaaaagacggtattgattattgggatggcaaagttaaacaaacaacc

SEQ ID NO: 202 - protein, 129 aa, Streptococcus pyogenes
MSPITLILWLLLVGIVGYYTWNYFSFRKMAKQVDNETFKDVMRQGQLIDLREPAAFRTKHILGARNFPAQQFDAAIKGLRKDKPVLIYENMRPQYRVPAVKKLKKAGFEDVYVLKDGIDYWDGKVKQTT

SEQ ID NO: 203 - DNA, 1839 bp, Streptococcus agalactiae
atgacaaatttaagaacagatatccgtaacgttgcgatcattgcccacgttgaccacggtaaaacaactctcgttgatgaattattaaaacaatcacatactcttgatgagcgtaaagagcttgaagaacgtgcaatggattcaaatgatatcgaaaaagaacgtggtatcaccattcttgcaaaaaatacagccgtagcatacaacgatgttcgtatcaatattatggacacacctggtcacgcggactttggtggtgaagttgagcgtattatgaaaatggttgatggtgttgttttagtcgttgatgcctacgaaggaacaatgccacaaacacgttttgttttgaagaaagctcttgaacaaaacttaattccaatcgttgttgtaaataaaattgataagccgtcagctcgtccatcagaggttgttgatgaagttcttgaactatttattgagctcggtgctgatgatgatcaactagatttccctgttgtttatgcttcagctatcaatggaacatcttcaatgtcagatgatccttcagatcaagaaaaaacaatggcaccgatttttgatactatcattgatcacattccagccccagttgacaactcggaagaaccacttcaattccaagtttctcttcttgattacaatgattttgtaggacgtattggtattggacgtgttttccgcgggactgtcaaagttggagatcaagttactctttcaaaacttgatggtacaactaaaaacttccgcgtaacaaaactttttggtttctttggacttgaacgtaaagaaatccaagaggctaaagcgggtgatttaatcgctgtttctggtatggaagatatcttcgttggtgagacagtaactccgacagatgctattgaaccactaccagttttacgtattgacgagccaacacttcaaatgactttcttggtgaataattcaccatttgcaggtcgcgaaggtaaatggattacgtcacgtaaggttgaagaacgtcttttagcagaattacaaacagacgtttctttacgtgttgacccaacagattcgccagataaatggacggtttcagggcgtggagaattacatttatctatccttattgaaacaatgcgtcgtgagggatatgaacttcaagtatcacgtccagaagttatcatcaaagaaattgatggtgttcaatgcgagccgtttgagcgtgttcaaattgatactccagaagaatatcagggtgctattatccaaagtttgtcagagcgtaaaggtgatatgcttgatatgcagatggttggtaatggtcaaacgcgtttgattttcttgattcctgcacgtggtttgattggttattcaacagagtttctttcaatgacacgtggatatggtatcatgaatcatacttttgaccagtatctaccggttgttcaaggagaaattggtggtcgtcatcgtggtgccttggtttctattgaaaatggtaaagcaactacatattcaattatgcgtattgaagaacgtgggactatctttgtaaatccaggtatagaagtttatgaaggaatgattgttggtgagaattctcgtgataatgacctcggagtcaatattacaactgctaaacaaatgacaaatgtccgttcagcaactaaagatcaaactgcagtcatcaagacgcctcgtatccttactttagaagagtcacttgaatttttagcagatgatgagtacatggaagtaactcctgagtctattcgtcttcgtaaacaaattttaaataaagcagcacgtgacaaagctaataaaaagaaaaaatcagctgaa

SEQ ID NO: 204 - protein, 613 aa, Streptococcus agalactiae
MTNLRTDIRNVAIIAHVDHGKTTLVDELLKQSHTLDERKELEERAMDSNDIEKERGITILAKNTAVAYNDVRINIMDTPGHADFGGEVERIMKMVDGVVLVVDAYEGTMPQTRFVLKKALEQNLIPIVVVNKIDKPSARPSEVVDEVLELFIELGADDDQLDFPVVYASAINGTSSMSDDPSDQEKTMAPIFDTIIDHIPAPVDNSEEPLQFQVSLLDYNDFVGRIGIGRVFRGTVKVGDQVTLSKLDGTTKNFRVTKLFGFFGLERKEIQEAKAGDLIAVSGMEDIFVGETVTPTDAIEPLPVLRIDEPTLQMTFLVNNSPFAGREGKWITSRKVEERLLAELQTDVSLRVDPTDSPDKWTVSGRGELHLSILIETMRREGYELQVSRPEVIIKEIDGVQCEPFERVQIDTPEEYQGAIIQSLSERKGDMLDMQMVGNGQTRLIFLIPARGLIGYSTEFLSMTRGYGIMNHTFDQYLPVVQGEIGGRHRGALVSIENGKATTYSIMRIEERGTIFVNPGIEVYEGMIVGENSRDNDLGVNITTAKQMTNVRSATKDQTAVIKTPRILTLEESLEFLADDEYMEVTPESIRLRKQILNKAARDKANKKKKSAE

SEQ ID NO: 205 - DNA, 1839 bp, Streptococcus pyogenes
atgactaacttaagaaacgatatccgtaacgtagcgattattgcccacgttgaccacggaaaaacaacacttgtagatgaattattaaaacaatcccatactcttgatgagcgtaaagagcttcaagagcgtgccatggattccaatgaccttgaaaaagaacgtgggattacaatccttgcgaaaaatacggcagtagcctataacgatgttcgtattaacatcatggataccccaggacacgcggacttcggtggtgaagttgaacgtatcatgaaaatggttgacggggttgttcttgttgtggatgcctacgaaggaacaatgccccagacgcgtttcgtattgaaaaaagcacttgagcaaaaccttatcccgatcgttgtggtgaacaagattgacaaaccttcagctcgtccagcagaagttgtagatgaagtgcttgaattattcatcgaacttggtgccgatgatgagcaattggaattcccagttgtttacgcatcagctattaatggaacatcatcattatcagatgaccctgctgaccaagagcatactatggcaccgatctttgatacgattattgatcatattccagcgccagttgataattcagatgagcctttgcaattccaagtgtcacttttggactacaacgatttcgtaggtcgtatcggtatcggtcgtgttttccgtggtactgttaaagtgggtgaccaagtaactctttcaaaacttgatggtaccactaaaaacttccgtgttacaaaactgtttggtttcttcggtttggaacgtcgtgaaattcaagaagctaaagcaggtgacttgattgctgtttcaggtatggaagatatctttgttggagaaaccattacaccaactgactgtgtggaagctctgccaattcttcgtattgatgagccaacacttcagatgactttcttggtcaataactctccttttgcaggtcgtgaaggtaaatggatcacgtcacgtaaggttgaagaacgtcttttagcagaattgcaaacagacgtgtcacttcgtgttgacccaacagattcgccagataaatggacggtttcagggcgtggagaattgcatttatctatcctcattgaaaccatgcgccgtgaaggctatgaacttcaagtatcacgtccagaagttatcatcaaagaaattgatggtgtcaaatgtgaaccgtttgagcgtgttcaaattgatacaccagaagaatatcagggtgcaatcatccagtctctttcagaacgtaaaggggatatgcttgatatgcagatggttggtaatggtcaaacgcgtttgattttcttgattcctgcacgtggtttgattggttattcaacagagtttctttcaatgacacgtggatatggtatcatgaatcatacttttgatcagtatctaccggttgttcaaggagaaatcggtggccgtcatcgtggtgccttggtttctattgaaaatgggaaagcaacgacatattcaatcatgcgtattgaagaacgtggaactatctttgtcaatccaggtacagaagtttacgaagggatgattgttggtgaaaactcacgtgataacgaccttggtgttaacattacaacagctaagcaaatgacaaatgtccgttcagcgactaaagatcaaactgcagttatcaagacgcctcgtatcctaacgcttgaagaatcattagagttcttgaatgacgacgaatacatggaagtaacgccagaatctatccgcttgcgtaaacaaatcttgaataaagctgcgcgtgataaagctaataaaaagaaaaaatcagccgaa

SEQ ID NO: 206 - protein, 613 aa, Streptococcus pyogenes
MTNLRNDIRNVAIIAHVDHGKTTLVDELLKQSHTLDERKELQERAMDSNDLEKERGITILAKNTAVAYNDVRINIMDTPGHADFGGEVERIMKMVDGVVLVVDAYEGTMPQTRFVLKKALEQNLIPIVVVNKIDKPSARPAEVVDEVLELFIELGADDEQLEFPVVYASAINGTSSLSDDPADQEHTMAPIFDTIIDHIPAPVDNSDEPLQFQVSLLDYNDFVGRIGIGRVFRGTVKVGDQVTLSKLDGTTKNFRVTKLFGFFGLERREIQEAKAGDLIAVSGMEDIFVGETITPTDCVEALPILRIDEPTLQMTFLVNNSPFAGREGKWITSRKVEERLLAELQTDVSLRVDPTDSPDKWTVSGRGELHLSILIETMRREGYELQVSRPEVIIKEIDGVKCEPFERVQIDTPEEYQGAIIQSLSERKGDMLDMQMVGNGQTRLIFLIPARGLIGYSTEFLSMTRGYGIMNHTFDQYLPVVQGEIGGRHRGALVSIENGKATTYSIMRIEERGTIFVNPGTEVYEGMIVGENSRDNDLGVNITTAKQMTNVRSATKDQTAVIKTPRILTLEESLEFLNDDEYMEVTPESIRLRKQILNKAARDKANKKKKSAE

SEQ ID NO: 207 - DNA, 1365 bp, Streptococcus agalactiae
atgggacgagtaatgaaaacaataacaacatttgaaaataaaaaagttttagtccttggtttagcacgatctggagaagctgctgcacgtttgttagctaagttaggagcaatagtgacagttaatgatggcaaaccatttgatgaaaatccaacagcacagtctttgttggaagagggtattaaagtggtttgtggtagtcatcctttagaattgttagatgaggatttttgttacatgattaaaaatccaggaataccttataacaatcctatggtcaaaaaagcattagaaaaacaaatccctgttttgactgaagtggaattagcatacttagtttcagaatctcagctaataggtattacaggctctaacgggaaaacgacaacgacaacgatgattgcagaagtcttaaatgctggaggtcagagaggtttgttagctgggaatatcggctttcctgctagtgaagttgttcaggctgcgaatgataaagatactctagttatggaattatcaagttttcagctaatgggagttaaggaatttcgtcctcatattgcagtaattactaatttaatgccaactcatttagattatcatgggtcttttgaagattatgttgctgcaaaatggaatatccaaaatcaaatgtcttcatctgattttttggtacttaattttaatcaaggtatttctaaagagttagctaaaactactaaagcaacaatcgttcctttctctactacggaaaaagttgatggtgcttacgtacaagacaagcaacttttctataaaggggagaatattatgtcagtagatgacattggtgtcccaggaagccataacgtagagaatgctctagcaactattgcggttgctaaactggctggtatcagtaatcaagttattagagaaactttaagcaattttggaggtgttaaacaccgcttgcaatcactcggtaaggttcatggtattagtttctataacgacagcaagtcaactaatatattggcaactcaaaaagcattatctggctttgataatactaaagttatcctaattgcaggaggtcttgatcgcggtaatgagtttgatgaattgataccagatatcactggacttaaacatatggttgttttaggggaatcggcatctcgagtaaaacgtgctgcacaaaaagcaggagtaacttatagcgatgctttagatgttagagatgcggtacataaagcttatgaggtggcacaacagggcgatgttatcttgctaagtcctgcaaatgcatcatgggacatgtataagaatttcgaagtccgtggtgatgaattcattgatactttcgaaagtcttagaggagag

SEQ ID NO: 208 - protein, 455 aa, Streptococcus agalactiae
MGRVMKTITTFENKKVLVLGLARSGEAAARLLAKLGAIVTVNDGKPFDENPTAQSLLEEGIKVVCGSHPLELLDEDFCYMIKNPGIPYNNPMVKKALEKQIPVLTEVELAYLVSESQLIGITGSNGKTTTTTMIAEVLNAGGQRGLLAGNIGFPASEVVQAANDKDTLVMELSSFQLMGVKEFRPHIAVITNLMPTHLDYHGSFEDYVAAKWNIQNQMSSSDFLVLNFNQGISKELAKTTKATIVPFSTTEKVDGAYVQDKQLFYKGENIMSVDDIGVPGSHNVENALATIAVAKLAGISNQVIRETLSNFGGVKHRLQSLGKVHGISFYNDSKSTNILATQKALSGFDNTKVILIAGGLDRGNEFDELIPDITGLKHMVVLGESASRVKRAAQKAGVTYSDALDVRDAVHKAYEVAQQGDVILLSPANASWDMYKNFEVRGDEFIDTFESLRGE

SEQ ID NO: 209 - DNA, 1356 bp, Streptococcus pyogenes
atgaaagtgataagtaattttcaaaacaaaaaaatattaatattggggttagccaaatcgggcgaagcagcagcaaaattattgaccaaacttggtgctttagtgactgttaatgatagtaaaccatttgaccaaaatccagcggcacaagccttgttggaagaggggattaaggtcatttgtggtagccacccagtagaattattagatgagaactttgagtacatggttaaaaaccctgggattccttatgataatcctatggttaaacgcgcccttgcaaaggaaattcccatcttgactgaagtagaattggcttatttcgtatctgaagcgcctattatcgggattacaggatcaaacgggaagacaaccacaacgacaatgattgccgatgttttgaatgctggcgggcaatctgcactcttatctggaaacattggttatcctgcttcaaaagttgttcaaaaagcaattgctggtgatactttggtgatggaattgtcctcttttcaattagtgggagtgaatgcttttcgccctcatattgctgtcatcactaatttaatgccgactcacctggactatcatggcagttttgaggattatgttgctgctaaatggatgattcaagctcagatgacagaatcagactaccttattttaaatgctaatcaagagatttcagcaactctagctaagaccaccaaagcaacagtgattcctttttcaactcaaaaagtggttgatggagcttatctgaaggatggaatactctattttaaagaacaggcgattatagctgcaactgacttaggtgtcccaggtagccacaacattgaaaatgccctagcaactattgcagttgccaagttatctggtattgctgatgatattattgcccagtgcctttcacattttggaggcgttaaacatcgtttgcaacgggttggtcaaatcaaagatattaccttctacaatgacagtaagtcaaccaatattttagccactcaaaaagctttatcaggttttgataacagtcgcttgattttgattgctggcggtctagatcgtggcaatgaatttgacgatttggtgccagaccttttaggacttaagcagatgattattttgggagaatccgcagagcgtatgaagcgagctgctaacaaagcagaggtctcttatcttgaagctagaaatgtggcagaagcaacagagcttgcttttaagctggcccaaacaggcgatactatcttgcttagcccagccaatgctagctgggatatgtatcctaattttgaggttcgtggggatgaatttttggcaacctttgattgtttaagaggagatgcc

SEQ ID NO: 210 - protein, 452 aa, Streptococcus pyogenes
MKVISNFQNKKILILGLAKSGEAAAKLLTKLGALVTVNDSKPFDQNPAAQALLEEGIKVICGSHPVELLDENFEYMVKNPGIPYDNPMVKRALAKEIPILTEVELAYFVSEAPIIGITGSNGKTTTTTMIADVLNAGGQSALLSGNIGYPASKVVQKAIAGDTLVMELSSFQLVGVNAFRPHIAVITNLMPTHLDYHGSFEDYVAAKWMIQAQMTESDYLILNANQEISATLAKTTKATVIPFSTQKVVDGAYLKDGILYFKEQAIIAATDLGVPGSHNIENALATIAVAKLSGIADDIIAQCLSHFGGVKHRLQRVGQIKDITFYNDSKSTNILATQKALSGFDNSRLILIAGGLDRGNEFDDLVPDLLGLKQMIILGESAERMKRAANKAEVSYLEARNVAEATELAFKLAQTGDTILLSPANASWDMYPNFEVRGDEFLATFDCLRGDA

SEQ ID NO: 211 - DNA, 1074 bp, Streptococcus agalactiae
atggggaaaaaaattgtttttacaggtggtggtacggtaggtcatgtaacactaaacctaatattaatccccaaatttatcaaagatggttgggaagtacattatattggtgataaaaatggcatagaacatgaacaaattaatcagtctggacttgatatcacatttcactctatagctactgggaaactacgtcgctatttttcatggcaaaatatgttagatgtctttaaagtaggggttggcgttcttcaatcgattgctattattgctaaacttagaccccaagccttattttcaaaagggggatttgtttcagtacctcctgtagtagctgcacgcctattaaaagttcctgtttttgttcatgaatcagatttatcaatggggttagcaaataagattgcttataaatttgcgactattatgtatacgacttttgaacaatctaaagatttaatcaaaactaagcatattggtgctgtaacaaaagtcatggattgtaaaaagtcgtttgaaaatactgacttaactagtataaaagaagccttcgatccaaacctaaagaccttactatttattggaggatcagcaggtgcaaaagtattcaatgattttattactcaaacacctgagctggaagaaaaatataatgttatcaatatttcaggcgattcttctctcaatcgattgaagaagaacctttatcgcgtggattatgttacagacctttatcagcctttaatgaatttagcagatgtggttgttacacgaggtggctctaatactatttttgaattagtagctatgaaaaaacttcatcttattatccctcttggacgtgaagcgagccgaggtgaccaattagagaatgctgcttattttgaagaaaagggctacgcattgcagttaccagaatctgaattaaacataaatacacttgagaaacagataaatttattaatttctaacagtgagagttacgaaaaaaacatgtcacaatcatctgaaataaaatctcaagatgaattttatcaattattaattgatgatatggcaaaagtaacaaaagga

SEQ ID NO: 212 - protein, 358 aa, Streptococcus agalactiae
MGKKIVFTGGGTVGHVTLNLILIPKFIKDGWEVHYIGDKNGIEHEQINQSGLDITFHSIATGKLRRYFSWQNMLDVFKVGVGVLQSIAIIAKLRPQALFSKGGFVSVPPVVAARLLKVPVFVHESDLSMGLANKIAYKFATIMYTTFEQSKDLIKTKHIGAVTKVMDCKKSFENTDLTSIKEAFDPNLKTLLFIGGSAGAKVFNDFITQTPELEEKYNVINISGDSSLNRLKKNLYRVDYVTDLYQPLMNLADVVVTRGGSNTIFELVAMKKLHLIIPLGREASRGDQLENAAYFEEKGYALQLPESELNINTLEKQINLLISNSESYEKNMSQSSEIKSQDEFYQLLIDDMAKVTKG

SEQ ID NO: 213 - DNA, 1101 bp, Streptococcus pyogenes
ttgtttaagaggagatgcctaatgcctaagaagattttatttacaggtggtggaactgtaggtcatgtcaccttgaacctcattctcataccaaaatttatcaaggacggttgggaagtacattatattggtgataaaaatggcattgaacatacagaaattgaaaagtcaggccttgacgtgacctttcatgctatcgcgacaggcaagcttagacgctatttttcatggcaaaatctagctgatgtttttaaggttgcacttggcctcctacagtctctctttattgttgccaagcttcgccctcaagcccttttttccaaaggtggttttgtctcagtaccgccagttgtggctgctaaattgcttggtaaaccagtctttattcatgaatcagatcggtcaatgggactagcaaacaagattgcctacaaatttgcaactaccatgtataccacttttgagcaggaagaccagttgtctaaagttaaacaccttggagcggtgacaaaggttttcaaagatgccaaccaaatgcctgaatcaactcagttagaggcggtgaaagagtattttagtagagacctaaaaaccctcttgtttattggtggttcggcaggggcgcatgtgtttaatcagtttattagtgatcatccagaattgaagcaacgttataatatcatcaatattacaggagaccctcaccttaatgaattgagttctcatctgtatcgagtagattatgttaccgatctctaccaacctttgatggcgatggctgaccttgtagtgacaagagggggctctaatacactttttgagctactggcaatggctaagctacacctcatcgttcctcttggtaaagaagctagccgtggcgatcagttagaaaatgccacttattttgagaagaggggctacgctaaacaattacaggaacctgatttaactttgcataattttgatcaggcaatggctgatttgtttgaacatcaggctgattatgaggctactatgttggcaactaaggagattcagtcaccggacttcttttatgaccttttgagagctgatattagctccgcgattaaggagaag

SEQ ID NO: 214 - protein, 367 aa, Streptococcus pyogenes
LFKRRCLMPKKILFTGGGTVGHVTLNLILIPKFIKDGWEVHYIGDKNGIEHTEIEKSGLDVTFHAIATGKLRRYFSWQNLADVFKVALGLLQSLFIVAKLRPQALFSKGGFVSVPPVVAAKLLGKPVFIHESDRSMGLANKIAYKFATTMYTTFEQEDQLSKVKHLGAVTKVFKDANQMPESTQLEAVKEYFSRDLKTLLFIGGSAGAHVFNQFISDHPELKQRYNIINITGDPHLNELSSHLYRVDYVTDLYQPLMAMADLVVTRGGSNTLFELLAMAKLHLIVPLGKEASRGDQLENATYFEKRGYAKQLQEPDLTLHNFDQAMADLFEHQADYEATMLATKEIQSPDFFYDLLRADISSAIKEK

SEQ ID NO: 215 - DNA, 1134 bp, Streptococcus agalactiae
atgcctaagaagaaatcagataccccagaaaaagaagaagttgtcttaacggaatggcaaaagcgtaaccttgaatttttaaaaaaacgcaaagaagatgaagaagaacaaaaacgtattaacgaaaaattacgcttagataaaagaagtaaattaaatatttcttctcctgaagaacctcaaaatactactaaaattaagaagcttcattttccaaagatttcaagacctaagattgaaaagaaacagaaaaaagaaaaaatagtcaacagcttagccaaaactaatcgcattagaactgcacctatatttgtagtagcattcctagtcattttagtttccgttttcctactaactccttttagtaagcaaaaaacaataacagttagtggaaatcagcatacacctgatgatattttgatagagaaaacgaatattcaaaaaaacgattatttcttttctttaatttttaaacataaagctattgaacaacgtttagctgcagaagatgtatgggtaaaaacagctcagatgacttatcaatttcccaataagtttcatattcaagttcaagaaaataagattattgcatatgcacatacaaagcaaggatatcaacctgtcttggaaactggaaaaaaggctgatcctgtaaatagttcagagctaccaaagcacttcttaacaattaaccttgataaggaagatagtattaagctattaattaaagatttaaaggctttagaccctgatttaataagtgagattcaggtgataagtttagctgattctaaaacgacacctgacctcctgctgttagatatgcacgatggaaatagtattagaataccattatctaaatttaaagaaagacttcctttttacaaacaaattaagaagaaccttaaggaaccttctattgttgatatggaagtgggagtttacacaacaacaaataccattgaatcaacccctgttaaagcagaagatacaaaaaataaatcaactgataaaacacaaacacaaaatggtcaggttgcggaaaatagtcaaggacaaacaaataactcaaatactaatcaacaaggacaacagatagcaacagagcaggcacctaaccctcaaaatgttaat

SEQ ID NO: 216 - protein, 378 aa, Streptococcus agalactiae
MPKKKSDTPEKEEVVLTEWQKRNLEFLKKRKEDEEEQKRINEKLRLDKRSKLNISSPEEPQNTTKIKKLHFPKISRPKIEKKQKKEKIVNSLAKTNRIRTAPIFVVAFLVILVSVFLLTPFSKQKTITVSGNQHTPDDILIEKTNIQKNDYFFSLIFKHKAIEQRLAAEDVWVKTAQMTYQFPNKFHIQVQENKIIAYAHTKQGYQPVLETGKKADPVNSSELPKHFLTINLDKEDSIKLLIKDLKALDPDLISEIQVISLADSKTTPDLLLLDMHDGNSIRIPLSKFKERLPFYKQIKKNLKEPSIVDMEVGVYTTTNTIESTPVKAEDTKNKSTDKTQTQNGQVAENSQGQTNNSNTNQQGQQIATEQAPNPQNVN

SEQ ID NO: 217 - DNA, 1146 bp, Streptococcus pyogenes
atggcaaaagataaagagaaacaaagtgatgacaagctcgttttgacagagtggcaaaagcgtaacattgaatttttaaagaaaaagaagcagcaagctgaggaagaaaaaaaactcaaagagaaattattgagtgataaaaaagcgcagcagcaagctcaaaatgcttctgaagcggttgagcttaaaactgatgagaaaactgatagtcaggaaattgagtcagaaacgacgtcaaaacctaaaaaaaccaaaaaagttagacaacccaaggaaaaaagcgcgacacaaatcgcttttcaaaaatccttgcctgttcttttgggggcgctcttactcatggcggtgtctatttttatgatcactccttatagcaaaaagaaagagttttctgtaagaggaaaccatcaaacgaaccttgacgaattaatcaaagctagcaaagtcaaagcatctgactattggttaacgctgttaacttcgcctggtcagtatgaacgaccgattcttcgtactattccatgggtgaaatctgtacatctctcttaccaatttcctaatcactttctatttaacgttattgaatttgaaatcatcgcttatgcacaagttgaaaacggttttcagcctattttggagaatggaaaacgtgtggacaaggtcagggcatcagaactaccgaaatctttcttgattcttaatttaaaagatgagaaagcgatccaacagttagttaagcaattaacgacattacctaaaaaattagtcaagaatatcaagtcagtgtctcttgcaaattccaaaacgacagcggatttactacttattgaaatgcatgacggtaatgtagttagagtaccgcagtcacaactcacattgaaacttccctattatcaaaaattgaaaaaaaaccttgaaaatgatagtatagtggatatggaagtgggaatttatactacaacacaggagattgaaaatcaacctgaagttcctcttacgcctgaacaaaacgcagctgataaagaaggagataagcctggtgaacatcaggaacagacagacaatgattcagaaacgccagcaaatcagagtagtcctcagcaaacaccaccatccccagaaacggtcctcgaacaggcccatggc

SEQ ID NO: 218 - protein, 382 aa, Streptococcus pyogenes
MAKDKEKQSDDKLVLTEWQKRNIEFLKKKKQQAEEEKKLKEKLLSDKKAQQQAQNASEAVELKTDEKTDSQEIESETTSKPKKTKKVRQPKEKSATQIAFQKSLPVLLGALLLMAVSIFMITPYSKKKEFSVRGNHQTNLDELIKASKVKASDYWLTLLTSPGQYERPILRTIPWVKSVHLSYQFPNHFLFNVIEFEIIAYAQVENGFQPILENGKRVDKVRASELPKSFLILNLKDEKAIQQLVKQLTTLPKKLVKNIKSVSLANSKTTADLLLIEMHDGNVVRVPQSQLTLKLPYYQKLKKNLENDSIVDMEVGIYTTTQEIENQPEVPLTPEQNAADKEGDKPGEHQEQTDNDSETPANQSSPQQTPPSPETVLEQAHG

SEQ ID NO: 219 - DNA, 1371 bp, Streptococcus agalactiae
atggctagaaatggcttttttactggtttggatataggaacaagctcgattaaagttttagttgcagaatttattgcaaatgaaatgaatgtaattggggttagcaacgtccctagttccggtgtaaaagatggtataattattgatattgaggcagcagcaactgcaatcaaagaggcggtaaaacaagctgaggagaaagcaggcatcaccattgacaaaatcaatgttggattaccagcaaatcttctccaaattgaaccaactcaaggaatgattcctgttcctaatgaatcaaaagaaattaaggatgaagatgtcgaaagtgttgttaaatcagcattgactaaaagcattactcctgaaagagaagttatttcattgattccgcttgaattcattgtagatggtttccaagggattagagaccctagagggatgatggggattcgccttgagatgcgtggtcttatctatactggaccaacaactatccttcataatcttcgtaaaactgttgaacgagcaggtataaaagtagagcatgttgtgatcgcccctctagccttagcaaaatcagttctaaacgaaggtgaacgtgagtttggtgcaactgtgattgatatgggaggcggacaaacaacagtcgcttctatgcgtaatcaagaattgcaatatactaatatttattctgaaggtagcgattatgttaccaaagatatttctaaagtgctacgtacaacagtagaaatcgccgaagcattgaaattcaactttggacaagctaatgttgaagaagcaagtacttctgatacagttcaagttaatgttgttggtaacgaggaacctgttgaaattacagaaagctatctttcgcaaattatttcaggacgtattcgtcaaattttagaacatgtcaaacaagacttgggtagaggtcgtttacttgatttacctggtggtattattcttgttggaggtggtgcaattatgccaggagttgtcgaggttgctcaacaaatttttggaactagagttaaattgcacgttccaaaccaagtaggtattcgcaatccaatgtttgctaatgttattagtatcgttgattatgtaggaatgatgtcagaagttgacattatcgcacaacatgctgtaactggcgacgaaatgctaagacataaaccagtcgactttgattataaagaaaaaacaaatacaatgtcgacaatgccttattctgagccgttaacctcttctatggaagattctaatttagaaccaatccgagcaagagaaaacgctcaagagcctactgagcctaaagctaatattggtgagcgcatcagaggaatttttggaagtatgtttgac

SEQ ID NO: 220 - protein, 457 aa, Streptococcus agalactiae
MARNGFFTGLDIGTSSIKVLVAEFIANEMNVIGVSNVPSSGVKDGIIIDIEAAATAIKEAVKQAEEKAGITIDKINVGLPANLLQIEPTQGMIPVPNESKEIKDEDVESVVKSALTKSITPEREVISLIPLEFIVDGFQGIRDPRGMMGIRLEMRGLIYTGPTTILHNLRKTVERAGIKVEHVVIAPLALAKSVLNEGEREFGATVIDMGGGQTTVASMRNQELQYTNIYSEGSDYVTKDISKVLRTTVEIAEALKFNFGQANVEEASTSDTVQVNVVGNEEPVEITESYLSQIISGRIRQILEHVKQDLGRGRLLDLPGGIILVGGGAIMPGVVEVAQQIFGTRVKLHVPNQVGIRNPMFANVISIVDYVGMMSEVDIIAQHAVTGDEMLRHKPVDFDYKEKTNTMSTMPYSEPLTSSMEDSNLEPIRARENAQEPTEPKANIGERIRGIFGSMFD

SEQ ID NO: 221 - DNA, 1335 bp, Streptococcus pyogenes
ttggacattggaacaagctcgataaaagttttagtagcagaatttatttctggtgagatgaacgtcattggtgttagtaatgttccaagtaccggcgtaaaagatggcataataatcgatatagaggcagctgcgactgccatcaaaactgcggtagaacaagcagaagaaaaagcagggatgacaattgaaaaggttaatgttgggctaccggcaaaccttcttcaaattgaaccaacacaaggaatgattcctgtcccaagtgagtctaaagagataaaagatgaggatgttgatagcgttgttaaatcggctttaacaaaaagtatcacaccagaacgagaggttatctctttagttccagaagagttcattgtggatggctttcagggcattcgagatccacgtggtatgatggggattagattagagatgcgcgggcttatttatactggaccaagcaccattttacataatctgcgtaaaacggtagaaagagcaggcattaaagttgaaaacatcattatttctccgttagctatggctaaaaccattttaaacgaaggtgagcgcgagtttggagctactgtaattgatatgggaggtggacagacaactgtcgcttctatgcgagcacaagaattgcagtataccaatatatatgccgaaggcggcgaatacattactaaagatatatcaaaagtattaaaaacgtctttggctattgcagaagcacttaagtttaattttggtcaagcggagatatcagaagctagtataactgaaacagtaaaagttgatgtggtaggtagtgaagagcctgttgaggtaactgaacgttatttatctgaaattatttcagcgcgtattcgtcatattttagatcgtgtgaagcaagatttggaaagaggtcgtttactagacttaccaggaggcattgttttgattggtggcggtgcaatcatgcctggagtggtagaaattgcacaagaaatctttggagtaactgtaaagctccatgttccaaaccaagtcggtattagaaatccaatgttttcaaacgttatcagtttggtagaatatgttggtatgatgtctgaagtagacgttttagcacaaactgcagtttcaggagaagaacttttgcgacgcaagcctatcgatttcagtggccaagaatcttatttaccagattatgatgattcaagaagaccagaatcgaccattggctatgaacaacaagcgtcacaaacagcatatgattcacaagttccgagtgatcctaaacaaaaaatttcagaacgtgttcgtggcatatttgggagtatgtttgat

SEQ ID NO: 222 - protein, 445 aa, Streptococcus pyogenes
LDIGTSSIKVLVAEFISGEMNVIGVSNVPSTGVKDGIIIDIEAAATAIKTAVEQAEEKAGMTIEKVNVGLPANLLQIEPTQGMIPVPSESKEIKDEDVDSVVKSALTKSITPEREVISLVPEEFIVDGFQGIRDPRGMMGIRLEMRGLIYTGPSTILHNLRKTVERAGIKVENIIISPLAMAKTILNEGEREFGATVIDMGGGQTTVASMRAQELQYTNIYAEGGEYITKDISKVLKTSLAIAEALKFNFGQAEISEASITETVKVDVVGSEEPVEVTERYLSEIISARIRHILDRVKQDLERGRLLDLPGGIVLIGGGAIMPGVVEIAQEIFGVTVKLHVPNQVGIRNPMFSNVISLVEYVGMMSEVDVLAQTAVSGEELLRRKPIDFSGQESYLPDYDDSRRPESTIGYEQQASQTAYDSQVPSDPKQKISERVRGIFGSMFD

SEQ ID NO: 223 - DNA, 1278 bp, Streptococcus agalactiae
atggtattttcatttgatacagcatcagtacaaggtgcagttattaaagttattggtgttggaggcggtggcggtaacgctattaaccgcatgattgacgaaggtgtcgctggcgttgagtttattgcagcaaatactgatattcaagccttaagtagctcaaaagctgaaactgtcattcaacttggtccaaaattaactcgcggacttggtgcaggaggacaacctgaagttggtcgtaaagcagctgaagaaagtgaagaagttttaacagaagcacttactggcgctgatatggtatttatcacagcaggtatggggggcggatctggtacaggtgcggctccagttattgcacgtattgcaaagagtttaggagcacttacagtagcggtcatcacacgtccttttggctttgagggtaataaacgttctaacttcgctatcgaaggtattcaagaattaagagaacaagttgatacactgcttatcatttcaaataataatcttcttgaaattgtagataagaagacaccattgcttgaagctcttagtgaagcagataatgttttacgtcaaggtgttcaaggtattacggatttgattactaacccaggtttaattaaccttgactttgcagatgttaaaacagttatggcaaataaaggtaatgcactgatgggaattggtatcggttctggtgaggaacgtattactgaagctgctcgaaaagcaatttattcaccacttcttgaaacaacgattgatggagcagaagacgttattgtcaatgttaccggcggtatggatatgacacttactgaagcagaggaagcatcagagattgttagccaagcagcaggtaaaggtgtcaatatttggttaggtacttcaattgacatggatatgaaagacgaaatccgcgtaacagttgttgcaacaggtgtacgtaaagataaaactaatcaagtatctggttttacaacatcagctccaactaatcaagcaccttcagaacgtcaaagtacttcaaattcaaactttgatcgtcgtggcaactttgatatgacagagtctcgcgaaatgccaactcaacaaaatcagcctcatgcacaaaatcagcaacaaagttctgcttttggtaattgggaccttcgtcgtgataatatttcacgtccgacagaaggtgaacttgatagcaagttgtctatgtcaacgttttcagaaaatgatgatatggatgatgaacttgaaacacctccattctttaaaaaccgt

SEQ ID NO: 224 - protein, 426 aa, Streptococcus agalactiae
MVFSFDTASVQGAVIKVIGVGGGGGNAINRMIDEGVAGVEFIAANTDIQALSSSKAETVIQLGPKLTRGLGAGGQPEVGRKAAEESEEVLTEALTGADMVFITAGMGGGSGTGAAPVIARIAKSLGALTVAVITRPFGFEGNKRSNFAIEGIQELREQVDTLLIISNNNLLEIVDKKTPLLEALSEADNVLRQGVQGITDLITNPGLINLDFADVKTVMANKGNALMGIGIGSGEERITEAARKAIYSPLLETTIDGAEDVIVNVTGGMDMTLTEAEEASEIVSQAAGKGVNIWLGTSIDMDMKDEIRVTVVATGVRKDKTNQVSGFTTSAPTNQAPSERQSTSNSNFDRRGNFDMTESREMPTQQNQPHAQNQQQSSAFGNWDLRRDNISRPTEGELDSKLSMSTFSENDDMDDELETPPFFKNR

SEQ ID NO: 225 - DNA, 1317 bp, Streptococcus pyogenes
atggcattttcatttgatactgcatcaattcaaggtgcaattataaaagtaattggagtcggcggaggtggcggaaatgccattaatcgtatgattgatgaaggtgttgctggtgtcgagttcatcgcagcaaacacagacattcaggcattaagctcatcaaaagctgaaacggttattcaactaggccctaaattaactcgtggacttggtgctggaggacaacctgaagtaggacgtaaagctgctgaagaaagcgaagaaattttaacagaagctcttacaggagcggacatggtatttattactgccggtatgggtggtggctctgggacaggggctgcaccggttattgctcgtatcgctaaaagtttgggagccttgacagtagctgttgttactcgcccgtttggttttgaaggtaacaaacgtggtaattttgctattgaaggtatcgaagaactacgtgaacaagttgatactttgttaattatttcaaataataaccttcttgagattgttgataaaaagacacctttattagaagcacttagtgaagctgataatgttttacgccagggagttcaagggataaccgacttaattactagtcctggccttatcaatctcgattttgccgacgtgaaaacagttatggcaaataaagggaatgccttgatggggattgggattggctctggagaagagcgcattgttgaggcggcgcgtaaggcaatctattcacccctattagaaacgactattgatggtgcacaagacgttattgtgaacgttacaggaggtctcgacatgacacttacagaagctgaagaagcctctgaaattgttgggcaagctgctggtcaaggcgttaacatttggttaggaacatctattgatgatactatgaaagatgacatccgtgtgactgttgtagcaactggagtgcgccaagaaaaagccgaacaagtttcaggttttcgtcagcctaggacttttacccaaaccaacgcgcagcaagtagcgggtgcacaatatgcatcagatcaagcaaaacagtcggttcaaccagggtttgatcgtcgctcaaattttgattttgacatgggggagtctcgcgagataccaagtgcacaaaaggtaatttctaatcataatcaaaatcaaggttctgcttttggaaattgggatttgagacgtgataatatttctcgtccaacagaaggtgaattggataaccatcttaatatgtcaacgttctcagctaacgatgacagtgatgatgaattagaaacgcctccattctttaaaaaccgt

SEQ ID NO: 226 - protein, 439 aa, Streptococcus pyogenes
MAFSFDTASIQGAIIKVIGVGGGGGNAINRMIDEGVAGVEFIAANTDIQALSSSKAETVIQLGPKLTRGLGAGGQPEVGRKAAEESEEILTEALTGADMVFITAGMGGGSGTGAAPVIARIAKSLGALTVAVVTRPFGFEGNKRGNFAIEGIEELREQVDTLLIISNNNLLEIVDKKTPLLEALSEADNVLRQGVQGITDLITSPGLINLDFADVKTVMANKGNALMGIGIGSGEERIVEAARKAIYSPLLETTIDGAQDVIVNVTGGLDMTLTEAEEASEIVGQAAGQGVNIWLGTSIDDTMKDDIRVTVVATGVRQEKAEQVSGFRQPRTFTQTNAQQVAGAQYASDQAKQSVQPGFDRRSNFDFDMGESREIPSAQKVISNHNQNQGSAFGNWDLRRDNISRPTEGELDNHLNMSTFSANDDSDDELETPPFFKNR

SEQ ID NO: 227 - DNA, 672 bp, Streptococcus agalactiae
atgatgaatttacaagaaaataaaacagcgatttttgacaatgttagtaaattagcactaaaagcaggtcgcgctcatgaatcagttcatatcgtagctgtaacaaaatatgttaactgtcaaacaacagaagcgcttattagaacaggtgttaatcatatcggtgaaaatcgtgttgataaatttcttgaaaaatatcaagcattaaaagatgaaaagcttacatggcatctcattggtagtttacaacgtcgaaaagttaaagatgtcattaattatgttgattattttcatgctttagattctgttaagttagcagctgagattcaaaaacatgctcaaaaactaattaaatgttttctacaagttaatatatcacgagaagacagtaagcatggttttactattgagcaaatagatgatgcactgaacttaatttctcggtacgataaaattgaacttatcggcatcatgactatggctcccttaaaagcaactaaagaggaaatatcatcaatttttgaagagactgagagtcttaggaaaaggcttcaagctaggaacatagaacgaatgccgtttacagaattaagcatgggcatgagtagagattatgatattgctattcaaaatggatcaacatttgtaaggataggaacttcattctttaaa

SEQ ID NO: 228 - protein, 224 aa, Streptococcus agalactiae
MMNLQENKTAIFDNVSKLALKAGRAHESVHIVAVTKYVNCQTTEALIRTGVNHIGENRVDKFLEKYQALKDEKLTWHLIGSLQRRKVKDVINYVDYFHALDSVKLAAEIQKHAQKLIKCFLQVNISREDSKHGFTIEQIDDALNLISRYDKIELIGIMTMAPLKATKEEISSIFEETESLRKRLQARNIERMPFTELSMGMSRDYDIAIQNGSTFVRIGTSFFK

SEQ ID NO: 229 - DNA, 669 bp, Streptococcus pyogenes
atggatttactgacaaataaaaagaaaatttttgagactatccgcttatctacagaggcagcaaataggactaatgatagtgtttcagttattgctgtaacaaaatatgtggatagtacaattgcaggtcagcttatcgaagcaggaattgagcacattgccgaaaaccgtgttgataaatttcttgaaaagtatgatgcgttaaagtatatgccagtaaagtggcatttaattggtaccttacaacgtcgtaaagtcaaggaagttatcaattatgttgattattttcacgctctagattctgtgagattagctttggaaatcaacaagagagctgaccatcctgtgaagtgttttctacaagttaatatttctaaagaagagagtaaacatggttttaacatttctgagattgatgaagcgattggagaaataggtaagatggagaagatacagttagttggtttaatgactatggcaccagcaaatgccagtaaagaaagtattataactatttttcgacaagcaaatcaattaagaaaaaacttgcagttaaaaaaaagaaagaatatgccttttacagaattgagcatgggcatgagtaacgattatccaattgctattcaagaaggctcaacttttattcggattggtagagctttctttcac

SEQ ID NO: 230 - protein, 223 aa, Streptococcus pyogenes
MDLLTNKKKIFETIRLSTEAANRTNDSVSVIAVTKYVDSTIAGQLIEAGIEHIAENRVDKFLEKYDALKYMPVKWHLIGTLQRRKVKEVINYVDYFHALDSVRLALEINKRADHPVKCFLQVNISKEESKHGFNISEIDEAIGEIGKMEKIQLVGLMTMAPANASKESIITIFRQANQLRKNLQLKKRKNMPFTELSMGMSNDYPIAIQEGSTFIRIGRAFFH

SEQ ID NO: 231 - DNA, 615 bp, Streptococcus agalactiae
atggaggggaatatggcattaaaagatagatttgacaaaattatttcttattttgacactgacgatgtaagtgaaaatgaagtacacgaagtacaagagagaacttcagtgcaaagagattccagagcagctacagcacaggaagcttctcagcgtagtcatatgactaactccgcagaggaagagatgattggtagtcgtccgagaacttatacctatgatcctaatcgtcaggagagacaaagggtacagagagacaatgcttatcagcaagctactcctagggttcaaaataaagactcagttcgacaacagagagaacaagtaacaattgctctgaagtatccccgtaagtatgaggatgcacaagaaattgttgatttacttatcgttaatgaatgtgtcttgattgattttcaatatatgcttgatgcgcaagcacgacgttgcttggattatattgatggtgcaagtagagtattatatggttcattacaaaaggttgggagttcaatgtttctattaacaccagccaatgttatggttgatattgaggagatgaatattccaaagactggtcaagagacgagttttgattttgatatgaagagacga

SEQ ID NO: 232 - protein, 205 aa, Streptococcus agalactiae
MEGNMALKDRFDKIISYFDTDDVSENEVHEVQERTSVQRDSRAATAQEASQRSHMTNSAEEEMIGSRPRTYTYDPNRQERQRVQRDNAYQQATPRVQNKDSVRQQREQVTIALKYPRKYEDAQEIVDLLIVNECVLIDFQYMLDAQARRCLDYIDGASRVLYGSLQKVGSSMFLLTPANVMVDIEEMNIPKTGQETSFDFDMKRR

SEQ ID NO: 233 - DNA, 666 bp, Streptococcus pyogenes
atggagaataagatggcttttaaagatacatttaacaagatgatttcttattttgacacggatgaggttaacgaagttgaagaagatgttgcagcatcaactgataacgttattccaagatcacaacaatcagtcagagcaagtagtcatccaaaacaagaacctagaaacaatcacgtacaacaagatcatcaagcgagatcccaagaacagacaaggtcacaaatgcatccaaaacatggcacttctgaacgctattatcagcagtctcagccaaaagaaggccatgaaatggttgacagaagaaaacggatgagcacttctagtattgcaaatcgccgtgagcagtatcaacaatcaacttgttcagatcaaacaactattgccttaaagtatcctcgtaaatatgaggatgctcaagaaattgtggatcttttaatagttaatgaatgcgttttgattgattttcagtttatgctagatgctcaggctagacggtgtttagattttattgatggtgctagtaaagtgctctatggtagcttacaaaaggtcggctcttcaatgtacttactggctccgtcaaatgtatccgtcaatatagaagaaatgactatcccacatactacacaagatattggctttgattttgatatgaaaaggcgg

SEQ ID NO: 234 - protein, 222 aa, Streptococcus pyogenes
MENKMAFKDTFNKMISYFDTDEVNEVEEDVAASTDNVIPRSQQSVRASSHPKQEPRNNHVQQDHQARSQEQTRSQMHPKHGTSERYYQQSQPKEGHEMVDRRKRMSTSSIANRREQYQQSTCSDQTTIALKYPRKYEDAQEIVDLLIVNECVLIDFQFMLDAQARRCLDFIDGASKVLYGSLQKVGSSMYLLAPSNVSVNIEEMTIPHTTQDIGFDFDMKRR

SEQ ID NO: 235 - DNA, 786 bp, Streptococcus agalactiae
atgacgttagatgatatttatcagcattttcgaccagaagagtatgcgtttatccataaaatagaccatttagctcaatatgtcgaaaacacctattcgtttattaccactgaatttctaaatcctagggaatttaaaatactcgaaagtgttctagagaggcgaggtagtcattattacacttctggtcagtattttcaaacagaatatgttaaagtaataatagcaccggaatactatcagttagatatggctgattttaaccttagcctaattgaaataaagtataatgctaaatttaatcaccttacccatgctaaaattatgggaactttactgaattacttaggtgtaaaacgatcaattttaggggatatcctagttgaagaaggctgtgctcaggttttggtcgatagtcaaatgacaaatcaccttgttcattcagttacaaaaattggaactgctagtgtacaattagctgaagttcccttgtccaaacttctaactcccaaacaagatattcaaaaactaactgttattgcttccagtttacgtcttgataaaattttagcaacgattttaaagatttcacgaacacagtcgacgaaattgattgaggcagataaagtcaaggtcaattatgcaaccgtcaatcgagtttctgaacaattagtagagggggatttgattagtgttagaggatatggtcgatttacgttgaaccataacctagggttaactaaaaatcaaaaatataagttagaagtagacaaaatgatacataac

SEQ ID NO: 236 - protein, 262 aa, Streptococcus agalactiae
MTLDDIYQHFRPEEYAFIHKIDHLAQYVENTYSFITTEFLNPREFKILESVLERRGSHYYTSGQYFQTEYVKVIIAPEYYQLDMADFNLSLIEIKYNAKFNHLTHAKIMGTLLNYLGVKRSILGDILVEEGCAQVLVDSQMTNHLVHSVTKIGTASVQLAEVPLSKLLTPKQDIQKLTVIASSLRLDKILATILKISRTQSTKLIEADKVKVNYATVNRVSEQLVEGDLISVRGYGRFTLNHNLGLTKNQKYKLEVDKMIHN

SEQ ID NO: 237 - DNA, 789 bp, Streptococcus pyogenes
atggttagtcatagtaagatttatcagcattttcaccaagaagaatatccttttattgatagaatgtctgatatgattaatagagttgaagattactatcttttagaagttactgagtttttaaatcctagagaagtgatgattttaaaaagtttgattgctttaacagatctaaaaatgttcgtatcaacagattactacccaagcgaatatggtcgtgtcattattgcacctggttactatgacttagaacaaagtgattttcaaatagctttagtagagataagttatcaggcaaagtttaatcagttgacacatagtcaaattttaggaactttaattaatgaattaggagtaaagcgaaatttatttggagatgtttttgttgaaatgggatatgcccagctcatgattaagcgggagttattggattattttttaggaacaattactaaaatagctaaaactagtgtgaaattaagagaagttaactttgatcagttaattaggtctattgataacagccagaccctggatattctagtttctagttttcgattagatggtgtagttgctactatcttaaaaaaatctcgaacgcaagttatagcattaattgaagcaaataagattaaggtaaactatcgagttgctaataaagcttcagataatctagtcataggggatatggtgagtatcagaggtcacgggcgttttactcttttagcagataatggagtgaccaaacatggcaaacaaaaaataacactaagtaaaatgatacataaa

SEQ ID NO: 238 - protein, 263 aa, Streptococcus pyogenes
MVSHSKIYQHFHQEEYPFIDRMSDMINRVEDYYLLEVTEFLNPREVMILKSLIALTDLKMFVSTDYYPSEYGRVIIAPGYYDLEQSDFQIALVEISYQAKFNQLTHSQILGTLINELGVKRNLFGDVFVEMGYAQLMIKRELLDYFLGTITKIAKTSVKLREVNFDQLIRSIDNSQTLDILVSSFRLDGVVATILKKSRTQVIALIEANKIKVNYRVANKASDNLVIGDMVSIRGHGRFTLLADNGVTKHGKQKITLSKMIHK

SEQ ID NO: 239 - DNA, 768 bp, Streptococcus agalactiae
atgccacttacagcacttgaaattaaagataaaacattttcatcaaaatttcgcggttatagcgaagaagaagttaatgaatttttagagattgttgttgacgattacgaggacttgattagacgtaatcgtgagcaagagcaatacattaaagatttagaagagaaaatcgcttacttcaacgaaatgaaggaatcgttaagtcaatcagttattttagctcaagaaactgctgagcgtgtgaaaatttcagcacaggatgaagcatctaacctaatggggaaagctacatttgatgctcaacatttaattgatgaggctaaattaaaagcaaatcaaatccttcgagatgcgacagatgatgctaagcgtgttgctatagaaacagaagatttgaaacgtcaatcacgtgttttccaccaacgtttgctttctgagttagaagggcagctaaaattagctaactcatctgcttgggaagaattgttgaaaccaacagctatttatcttcaaaattctgatgcttctttcaaagaagttgttgaaaaagttcttgatgaagatgatgctttaccagtggtggatgacactgagtcatttgatgctactcgtcaattctcaccagatgaaatggaagaattacagcgtcgtgttgaagaaagtaacaaacaacttgaagagtcaggtttattagatactaataatttccaaatggaagaaccgatcaatttaggtgaaactcaaacttttaaattaaatattgaagat

SEQ ID NO: 240 - protein, 256 aa, Streptococcus agalactiae
MPLTALEIKDKTFSSKFRGYSEEEVNEFLEIVVDDYEDLIRRNREQEQYIKDLEEKIAYFNEMKESLSQSVILAQETAERVKISAQDEASNLMGKATFDAQHLIDEAKLKANQILRDATDDAKRVAIETEDLKRQSRVFHQRLLSELEGQLKLANSSAWEELLKPTAIYLQNSDASFKEVVEKVLDEDDALPVVDDTESFDATRQFSPDEMEELQRRVEESNKQLEESGLLDTNNFQMEEPINLGETQTFKLNIED

SEQ ID NO: 241 - DNA, 756 bp, Streptococcus pyogenes
atggcacttacaacgctagaaattaaagataaaacttttaagacaaaattccgaggatactgtgaagaagaagtcaatgaattccttgatattgttgttgatgattacgaagctcttgtacgtaaaaatcgtgataacgaagcaagaattaaagatcttgaagaaaaattatcttactttgatgaaatgaaagagtcacttagccagtctgtaatcttagctcaagaaacagctgaaaaagtgaaagcaacggctaatgcggaagcaacaaacttggttagtaaagcgacttatgatgctcagcatttattagatgaatctaaagctaaagccaatcaaatgttgcgtgatgcaactgatgaggctaagcgagttgcgattgaaacagaagaactaaagcgtcaaacacgtgtgttccaccaacgtttaatctcatctattgagtcacaattaagcttatcaaattcacctgaatgggatgaactgctacaaccgactgcaatctatcttcaaaattctgacgatgcttttaaggaagtcgtgaagaccgttcttaatgaagacattcctgaatctgatgatagtgcctcttttgatgcaacacgtcagtttactccagaagagttagaagaattgcaacgtcgtgttgatgaaagcaataaggagttagaggcttaccaacttgactctcaatctgattctacgactgagccagaggtaaatctcagtgaaacacaaacgtttaaattaaatatc

SEQ ID NO: 242 - protein, 252 aa, Streptococcus pyogenes
MALTTLEIKDKTFKTKFRGYCEEEVNEFLDIVVDDYEALVRKNRDNEARIKDLEEKLSYFDEMKESLSQSVILAQETAEKVKATANAEATNLVSKATYDAQHLLDESKAKANQMLRDATDEAKRVAIETEELKRQTRVFHQRLISSIESQLSLSNSPEWDELLQPTAIYLQNSDDAFKEVVKTVLNEDIPESDDSASFDATRQFTPEELEELQRRVDESNKELEAYQLDSQSDSTTEPEVNLSETQTFKLNI

SEQ ID NO: 243 - DNA, 2790 bp, Streptococcus agalactiae
atgaaattaaaagaaaccttgaatttaggacaaacagcttttccaatgcgtgcagggcttccaaataaggaacctcaatggcaagaagcatgggatcaagctgacatttataaaaaacgtcaagcattgaatgaaggaaaaccagcctttcaccttcatgacggacctccctatgctaatgggaatattcatgtaggacatgcactaaataaaatttcgaaagacattattgtacgttcaaaatcaatgtcaggttttcgagctccttatgtgcctggttgggatactcatggactcccaattgagcaagtattagctaaaaaaggggttaaacgtaaagaaatggacttggctgaataccttgaaatgtgtcgtgattatgctctcagccaagttgacaaacaacgtgatgattttaaacgtctgggcgtttctgccgattgggaaaatccttatattacactaacaccagattatgaagcagatcaagtacgtgttttcggtgctatggcagataaaggatatatctatcgtggtgctaaaccagtgtattggtcatggtcatcagagtctgcccttgctgaggctgaaatcgaatatcatgatattgattcgacatcactctactatgccaataaagttaaagatggtaagggaattcttgatacagatacctatatcgtcgtttggacgacaacaccatttactgtaacagcttcacgcggtttaacagtaggaccagatatggagtatgttgtagttgtaccagtaggtagtgagcgtaaataccttcttgcagaggttcttgtagatagtctcgctgctaagtttggctgggaaaactttgaaattgtgactcatcacactggtaaagaacttaatcacattgttacagaacatccatgggatacagaagtagaagagttggttatccttggagaccatgttacaacagattctggtacaggtattgtccacacggctcctggttttggtgaagatgactataacgttggtattgctaatggacttgatgttgtagttaccgtagatagtcgtggtttgatgatggaaaatgctggtcctgattttgaaggtcaattctatgacaaagtaacaccacttgtaaaagaaaaattgggagatcttcttttagccagcgaagttatcaaccactcatatccatttgactggcgtacgaaaaagccaatcatttggcgtgcggttccacaatggtttgcctctgtttcgaaattccgtcaagaaatcctcgatgaaattgaaaagacaaatttccaacctgagtggggtaaaaaacgtctttataacatgatccgtgaccgtggcgactgggtaatctcacgtcaacgtgcttggggtgttccacttccaattttttatgcagaagatggtacagctatcatgacaaaagaagtgactgatcacgttgcagatttatttgctgaatacggctcaatcgtttggtggcaacgtgatgctaaggaccttctaccagcaggttatactcatccaggttcacctaatggtctctttgagaaagaaacagacatcatggatgtttggtttgattctggttcatcatggaatggggtaatgaatgctcgtgaaaacctttcctatccagcagatctttatcttgaaggttctgatcaataccgtggttggttcaactcatcactaattacatcagttgctgttaatggtcacgctccatacaaagcagtcttatctcaaggttttgtacttgatggtaaaggtgagaaaatgtctaaatctctaggaaatacaattcttcctagtgatgttgaaaaacaatttggtgcggaaatcttgcgtctgtgggtaacttctgttgactcaagtaatgatgttcgtatttcaatggatatcttaaaacaaacatcagaaacttatcgtaagatcaggaatacattgcgtttcttgattgcaaatacttccgattttaatcctaaacaagatgcagtagcctatgaaaatttaggtgccgttgatcgttatatgactattaaatttaatcaagttgtggatacaatcaacaaagcttatgctgcttatgattttatggcaatttataaagctgtcgttaacttcgtaacagttgatctatcagcattttaccttgattttgcaaaagatgtggtttacattgaagcggctaacagtccagaacgacgtcgtatgcaaactgttttctatgatattttagttaaacttacaaaacttttgactccgattctaccacatactgctgaagaaatttggtcatacctcgaacatgaggaggaggagtttgttcaattagcagaaatgcctgttgcacagacattctctggtcaagaagaaattcttgaagagtggtcagcattcatgacgttacgaacacaagctcaaaaagctctcgaagaagcacgtaacgctaaagttattggtaaatctctagaagcacatttaacaatttatgctagtcaagaagtgaaaacgttattaacagcgttaaatagcgatattgcactcttgatgattgtctcacaattaacaattgctgatgaagcagacaaaccagctgactcagtatcatttgaaggtgttgcatttactgttgaacacgctgaaggtgaagtctgcgaacgctcacgccgtattgatccaaccacaaagatgcgttcgtatggtgtagctgtttgtgatgctagtgcagcaattattgagcaatattatcctgaagcagtagctcaaggttttgaagct

SEQ ID NO: 244 - protein, 930 aa, Streptococcus agalactiae
MKLKETLNLGQTAFPMRAGLPNKEPQWQEAWDQADIYKKRQALNEGKPAFHLHDGPPYANGNIHVGHALNKISKDIIVRSKSMSGFRAPYVPGWDTHGLPIEQVLAKKGVKRKEMDLAEYLEMCRDYALSQVDKQRDDFKRLGVSADWENPYITLTPDYEADQVRVFGAMADKGYIYRGAKPVYWSWSSESALAEAEIEYHDIDSTSLYYANKVKDGKGILDTDTYIVVWTTTPFTVTASRGLTVGPDMEYVVVVPVGSERKYLLAEVLVDSLAAKFGWENFEIVTHHTGKELNHIVTEHPWDTEVEELVILGDHVTTDSGTGIVHTAPGFGEDDYNVGIANGLDVVVTVDSRGLMMENAGPDFEGQFYDKVTPLVKEKLGDLLLASEVINHSYPFDWRTKKPIIWRAVPQWFASVSKFRQEILDEIEKTNFQPEWGKKRLYNMIRDRGDWVISRQRAWGVPLPIFYAEDGTAIMTKEVTDHVADLFAEYGSIVWWQRDAKDLLPAGYTHPGSPNGLFEKETDIMDVWFDSGSSWNGVMNARENLSYPADLYLEGSDQYRGWFNSSLITSVAVNGHAPYKAVLSQGFVLDGKGEKMSKSLGNTILPSDVEKQFGAEILRLWVTSVDSSNDVRISMDILKQTSETYRKIRNTLRFLIANTSDFNPKQDAVAYENLGAVDRYMTIKFNQVVDTINKAYAAYDFMAIYKAVVNFVTVDLSAFYLDFAKDVVYIEAANSPERRRMQTVFYDILVKLTKLLTPILPHTAEEIWSYLEHEEEEFVQLAEMPVAQTFSGQEEILEEWSAFMTLRTQAQKALEEARNAKVIGKSLEAHLTIYASQEVKTLLTALNSDIALLMIVSQLTIADEADKPADSVSFEGVAFTVEHAEGEVCERSRRIDPTTKMRSYGVAVCDASAAIIEQYYPEAVAQGFEA

SEQ ID NO: 245 - DNA, 2799 bp, Streptococcus pyogenes
atgaaattaaaagagacacttaatctaggaaaaacagcctttccaatgcgcgcaggtcttcctaataaagagccacaatggcaagcagcttgggaacaagcagagctttacaaaaaacgtcaagaattgaatgcaggtaagcctgcctttcatcttcatgatggacctccatacgctaacggcaatattcacgttgggcatgcccttaataaaatttcaaaagatatcattgtgcgttctaagtccatgtctggctttcaagcgccttatgtacctggttgggacacacacggccttccaatcgaacaagtcttggctaagcaaggaatcaaacgtaaggagatggatttagcagaataccttgagatgtgtcgtcaatacgctttaagtcaggttgataaacagcgagatgatttcaaacggttaggtgtttcggcagactgggaaaatccttatgtcactttggacccacagtttgaagctgatcaaattcgtgtttttggagcgatggctgaaaaaggttacatctatcgtggtgctaaacctgtttattggtcatggtcttcagaatcggccttggcagaggctgaaattgaataccatgacatcgattcaacctctttatactacgccaataaagttaaagatggtaaaggtatccttgatactaatacgtatatcgttgtttggaccacaacaccatttaccgttacagcatcacgcggtttgactgttggtcctgatatggattatcttgtggtgaaacctgctggttcagaccgtcaatatgttgtggcagaaggtcttttggatagccttgctggaaaatttggctgggaatcttttgaaactttagctagccataaaggagctgatttagagtacattgtgacagaacacccatgggatactgacgtagaagaattggttatccttggtgaccatgttacccttgagtcagggacagggattgtccacacagcaccaggttttggtgaggatgactacaatgttgggacaaaatacaaactggaagttgctgtgactgttgatgaacgtggcctaatgatggaaaatgcaggtccagatttccacggacaattttataacaaggtaacgccgattgtcattgataaacttggtgatcttttattggcacaagaagtgatcaatcactcttacccatttgactggcggacgaaaaaaccaatcatctggcgtgctgtaccgcaatggtttgcttctgtttctgatttccgtcaagatattttggatgaaattgaaaaaacaacctttcatccatcatggggtgaaacacgcctttacaatatgattcgtgatcgtggcgactgggttatttctcgtcaacgtgcttggggagttccgcttcctatcttctatgccgaagatggcacagctattatgactaaagaagtgacagatcatgtggctgatttgttccaagaaaatggatcaatcatttggtggcaaaaagaagctaaagacctattaccagagggcttcactcatccagggtcaccaaatggcgagtttacaaaagaaactgatatcatggacgtttggtttgactctggttcttcttggaatggagtcatgaatactaaagaaaatctttcctatccagcggatctatacttagaaggctctgaccagtatcgtggttggttcaattcatccttaattacatctgtggctgttaatgggcatgctccatataaggctattttatcgcaaggctttgttcttgatggtaagggcgaaaaaatgtctaaatcaaaaggcaatatcatttctcctaatgatgtggctaaacaatatggtgcagatattcttcgactttgggtagcttctgtggataccgataatgatgtccgtgtttctatggagatccttggtcaagtctctgaaacttaccgtaaaatccgtaacacccttcgcttcttgattgctaatacatctgatttcaaccctgctacggatacagtagcttatgcagatttaggaactgttgataagtacatgacaattgtctttaatcagttggtagcaacgattactgacgcttatgagcgttatgactttatggctatttacaaagcagtggtgaactttgttacggttgatttatcagccttctatcttgattttgctaaagacgttgtctatattgaagctgccaatagcttagaacgtcgtcgcatgcagacagtcttctatgatatcttggttaagattaccaagttattgacgccaatcttgcctcacactactgaagaaatctggtcttatctagagcatgagtcagaagcatttgttcaattggcagaaatgcctgtggcagaaaccttctcggctcaagaggatattttagaagcttggtcagctttcatgactttgcgtactcaagctcaaaaagctttggaagaagcgcgaaatgctaagattatcggtaaatcattggaagcccatttgaccatctacgctagtgaagaagtgaaaaccttattgactgctttagacagcgatattgctttgcttttgatcgtgtctcaattaaccattgctgacttggcagatgcgcctgcggatgcagtggcatttgaaggtgttgcctttatagtagaacatgccataggtgaagtttgtgagcgttcacgtcgcatcgacccaactactcgcatgcgttcttacaatgcatttgtctgtgatcacagcgctaaaatcattgaagaaaatttcccagaagctgtggctgaagggtttgaagagagtggcaaa

SEQ ID NO: 246 - protein, 933 aa, Streptococcus pyogenes
MKLKETLNLGKTAFPMRAGLPNKEPQWQAAWEQAELYKKRQELNAGKPAFHLHDGPPYANGNIHVGHALNKISKDIIVRSKSMSGFQAPYVPGWDTHGLPIEQVLAKQGIKRKEMDLAEYLEMCRQYALSQVDKQRDDFKRLGVSADWENPYVTLDPQFEADQIRVFGAMAEKGYIYRGAKPVYWSWSSESALAEAEIEYHDIDSTSLYYANKVKDGKGILDTNTYIVVWTTTPFTVTASRGLTVGPDMDYLVVKPAGSDRQYVVAEGLLDSLAGKFGWESFETLASHKGADLEYIVTEHPWDTDVEELVILGDHVTLESGTGIVHTAPGFGEDDYNVGTKYKLEVAVTVDERGLMMENAGPDFHGQFYNKVTPIVIDKLGDLLLAQEVINHSYPFDWRTKKPIIWRAVPQWFASVSDFRQDILDEIEKTTFHPSWGETRLYNMIRDRGDWVISRQRAWGVPLPIFYAEDGTAIMTKEVTDHVADLFQENGSIIWWQKEAKDLLPEGFTHPGSPNGEFTKETDIMDVWFDSGSSWNGVMNTKENLSYPADLYLEGSDQYRGWFNSSLITSVAVNGHAPYKAILSQGFVLDGKGEKMSKSKGNIISPNDVAKQYGADILRLWVASVDTDNDVRVSMEILGQVSETYRKIRNTLRFLIANTSDFNPATDTVAYADLGTVDKYMTIVFNQLVATITDAYERYDFMAIYKAVVNFVTVDLSAFYLDFAKDVVYIEAANSLERRRMQTVFYDILVKITKLLTPILPHTTEEIWSYLEHESEAFVQLAEMPVAETFSAQEDILEAWSAFMTLRTQAQKALEEARNAKIIGKSLEAHLTIYASEEVKTLLTALDSDIALLLIVSQLTIADLADAPADAVAFEGVAFIVEHAIGEVCERSRRIDPTTRMRSYNAFVCDHSAKIIEENFPEAVAEGFEESGK

SEQ ID NO: 247 - DNA, 300 bp, Streptococcus agalactiae
atgagactaattaatacaaccagtagtcatcctgaactagttcgaaatcaactccaaaatacagatgcaaaattagtggaagtctattcagctggcaacaccgatgtcgtttttacaaaagcacctaaacattatgaattattaatttcaaacaaatatcgtgctatcaaagatgaagaattagaagctattcgtgagttcttcttaaagcgtaaaatagatcaatctattattattcaagagcagatgaaatcactccatactgccaagttaattgaaatttcatatccaacaacagca

SEQ ID NO: 248 - protein, 100 aa, Streptococcus agalactiae
MRLINTTSSHPELVRNQLQNTDAKLVEVYSAGNTDVVFTKAPKHYELLISNKYRAIKDEELEAIREFFLKRKIDQSIIIQEQMKSLHTAKLIEISYPTTA

SEQ ID NO: 249 - DNA, 300 bp, Streptococcus pyogenes
atgagactcatcaataccactagcagtcacccagaactcatcaaaaatcagctaaaaaacaccgatgcctatttagtcgaagtatactcagcaggaaatacagatgtcatttttacccaagcaccaaaacattacgaactacttatttcaaataaataccgtgccatcaaggaggatgaacttgatatcattcgcgaattttttttaaaacgtaaaattgatcctaaaattgttattcctggacaatcaaaaacacttcacacgaataaccttattgaaatttcatttcaaacttctgta

SEQ ID NO: 250 - protein, 100 aa, Streptococcus pyogenes
MRLINTTSSHPELIKNQLKNTDAYLVEVYSAGNTDVIFTQAPKHYELLISNKYRAIKEDELDIIREFFLKRKIDPKIVIPGQSKTLHTNNLIEISFQTSV

SEQ ID NO: 251 - DNA, 453 bp, Streptococcus agalactiae
atgactaatcctactttcggtgaaaaaatagataatgtaaactataggtcacgatttggtgtctatgctattattccaaatccaactcatgataaaattattttagtacaggcacctaatggtgcttggtttcttccaggtggggaaattgaagaaaatgaaaatcacctagaagctttaactcgtgagttaattgaagaattaggttattccgcaacaattggccattactatggtcaagctgatgaatatttttactctagacaccgtgatacttactactataatcccgcctatatttatgaagttactgcctatcataaggatcaagcgccactagaagatttcaaccatctagcctggtttcctatccaagaagctaaagaaaagctaaaacgaggaagccatagatggggtgtccaagcttgggaaaaaaatcaccattctaggaaa

SEQ ID NO: 252 - protein, 151 aa, Streptococcus agalactiae
MTNPTFGEKIDNVNYRSRFGVYAIIPNPTHDKIILVQAPNGAWFLPGGEIEENENHLEALTRELIEELGYSATIGHYYGQADEYFYSRHRDTYYYNPAYIYEVTAYHKDQAPLEDFNHLAWFPIQEAKEKLKRGSHRWGVQAWEKNHHSRK

SEQ ID NO: 253 - DNA, 453 bp, Streptococcus pyogenes
atgatgattccaacatttggacataaaaatgcacataaagactatgtcacacgttacggtgtctatgctatcattcccaatcacgaacaaacaaaaattattcttgttcaagctcctaatggttcctggtttttacctggtggtgaaattgaagcaggtgaaggtcagcttcaggccctagagcgtgaactgattgaagaacttggtttttctgctactattggttcatattacggtcaggcagatgaatatttctactctcgccatcgtgatacccacttctaccatcctgcctatctttatgaagtaactgcatttcaagccgtttctaagcccttagaagattttaataacttaggttggttttctcctatcgaggcaattgctaaattaaaacgagagagccatcaatggggagtcaaggaatggcaaaaaaagcatcattctactaac

SEQ ID NO: 254 - protein, 151 aa, Streptococcus pyogenes
MMIPTFGHKNAHKDYVTRYGVYAIIPNHEQTKIILVQAPNGSWFLPGGEIEAGEGQLQALERELIEELGFSATIGSYYGQADEYFYSRHRDTHFYHPAYLYEVTAFQAVSKPLEDFNNLGWFSPIEAIAKLKRESHQWGVKEWQKKHHSTN

SEQ ID NO: 255 - DNA, 2259 bp, Streptococcus agalactiae
atgctctgtcaaaactgcaaactaaacgaatcaactattcatttgtatacaaatgttaatggaaaacaaaagcaagttgatctttgtcaaaattgctaccaaattattaaaactgaccctaataatccacttttttcaggtttaaatcatgtttcacatgcgcctggtggcatcaatcctttctttgatgatttctttggagatttaaataatttcagagcctttaatggccaagatttaccaaacactcctcctacacaatcaggaggaaaccgaggtggaggaaacggtaatggacgaaataataatcgcaaccaaactgcaactccttctcaagccaaagggattctagaagaatttggtatcaatgtcactgaaatagcccgccatggtgatattgaccctgttattggacgtgactcagaaattattcgtgttatcgaaatccttaatcgtcgtacaaaaaataatcctgtacttattggcgaacccggcgttgggaaaactgccgttgttgaaggacttgctcagaaaattgttgatggtaatgtgcctcataaacttcaaggcaaacaagttattcgtttggatgttgtgagtctagtacaaggaacgggcattcgtggtcaatttgaagaacgcatgcaaaagttgatggaagaaattcgtcaacgtcaagatgttattctattcatagatgaaattcacgaaatagttggagctggtacagctggcgaaggtagtatggatgcaggtaatattttaaaacctgcccttgcacgtggagaattacaactagtaggtgctactactctcaatgaatatcgtattatcgaaaaggacgctgccttagaacgccgtatgcaacctgtaaaagtcgatgagccttctgttgaagaaaccattactattttgaaaggtatccaaaaaaaatacgaagattatcatcatgtaaaatataataatgatgccatagaagcagctgcagtactatctaatcgttatatccaggaccgctttttacctgataaagcaatagacttattagatgaagctggttctaaaatgaacctaacactaaattttgttgatccaaaagaaattgatcaacgtctcattgaagcagaaaatttaaaagcgcaagcgactcgtgaagaagattacgaacgtgcagcttacttccgtgaccagattgcaaaatataaagaaatgcaacaacaaaaggtcgacgatcaagatacacctattattaccgaaaaaacaattgagcacatcattgaagaaaaaacgaatatccctgttggtgatttaaaagaaaaagaacaatctcaattaattaatctcgcagatgacttgaaacaacatgtgatcggccaggatgacgctgtcgttaagattgcaaaagctattcgtcgtaatcgagttggtcttggtagcccaaaccgtcctattggttcctttttatttgtaggaccaaccggcgttggtaaaactgaactttctaaacaactagcaattgagctctttggttcagctgatagtatgattcgttttgatatgtcagagtacatggaaaagcatgctgttgctaaattagtcggagcgcctccaggatacgtgggatacgaggaagctggacaattaactgaaaaggttcgtcgaaatccttactcgctcatccttctagatgaaattgaaaaagctcatcctgatgtcatgcatatgttcttgcaggtccttgatgacggtcgattaacagatggacaaggaagaactgttagttttaaagataccattatcatcatgacctcaaatgctggttctggtaaaactgaagcaagcgttggctttggtgcctcacgagaaggtagaacgaattccgtactaggtcaactaggtaacttcttcagccctgaatttatgaaccgctttgacggtattattgaattcaaggctttagataaagagaatctcctcaatatcgttgatattatgttatctgacgttaatgcacgtctcgccatcaatggtattcatctagatgtcactgataaagtgaaagaaaaattggttgatttaggttacgatcccaaaatgggagcacgtccattacgtcgtaccattcaagaacatattgaagatgctatcacagattactatcttgagaatccaagcgaaaaagaacttcgtgctattatgactagcaatggaaatatcataataaaatcttctaaaaaaactgaagaaagtacaaaaggt

SEQ ID NO: 256 - protein, 753 aa, Streptococcus agalactiae
MLCQNCKLNESTIHLYTNVNGKQKQVDLCQNCYQIIKTDPNNPLFSGLNHVSHAPGGINPFFDDFFGDLNNFRAFNGQDLPNTPPTQSGGNRGGGNGNGRNNNRNQTATPSQAKGILEEFGINVTEIARHGDIDPVIGRDSEIIRVIEILNRRTKNNPVLIGEPGVGKTAVVEGLAQKIVDGNVPHKLQGKQVIRLDVVSLVQGTGIRGQFEERMQKLMEEIRQRQDVILFIDEIHEIVGAGTAGEGSMDAGNILKPALARGELQLVGATTLNEYRIIEKDAALERRMQPVKVDEPSVEETITILKGIQKKYEDYHHVKYNNDAIEAAAVLSNRYIQDRFLPDKAIDLLDEAGSKMNLTLNFVDPKEIDQRLIEAENLKAQATREEDYERAAYFRDQIAKYKEMQQQKVDDQDTPIITEKTIEHIIEEKTNIPVGDLKEKEQSQLINLADDLKQHVIGQDDAVVKIAKAIRRNRVGLGSPNRPIGSFLFVGPTGVGKTELSKQLAIELFGSADSMIRFDMSEYMEKHAVAKLVGAPPGYVGYEEAGQLTEKVRRNPYSLILLDEIEKAHPDVMHMFLQVLDDGRLTDGQGRTVSFKDTIIIMTSNAGSGKTEASVGFGASREGRTNSVLGQLGNFFSPEFMNRFDGIIEFKALDKENLLNIVDIMLSDVNARLAINGIHLDVTDKVKEKLVDLGYDPKMGARPLRRTIQEHIEDAITDYYLENPSEKELRAIMTSNGNIIIKSSKKTEESTKG

SEQ ID NO: 257 - DNA, 2280 bp, Streptococcus pyogenes
atgctgtgtcaaaattgtaatttaaacgaatctactattcatctttatacaagtgttaatggaaaacaaagacaggttgatctctgtcaaaattgttatcaaatcatgaaatccgatcctgccaattctattttaaatggcctaaccccaggatatagagcacaagatagatccacaagtcctttctttgatgacttttttggtgatttgaataattttagagcttttggtaatcttccaaataccccacctactcaggcagggcaaaatggaaatggcggaggacgctatggtggtaactacaacggacaacgacctgctcagccacaaacaccaaatcagcaagcaaagggcttgttagaagagtttgggattaatgtcacagatattgcaagaaatggtaatattgatcctgttattggtcgtgacgaagagattacacgcgttatcgagatcctcaaccgccgtactaaaaataatcctgtgctaattggtgagcctggagttggtaaaactgctgttgtagaaggtttggctcaaaaaattattgatggtactgttcctcaaaaactccaaggcaagcaagtgattcgtcttgatgtggttagcctcgttcagggaacaggtatccgtggtcagtttgaagagcgcatgcaaaaattaatggaagaaattcgcaatcgcaaggatgtgattctctttattgatgaaattcatgagattgtcggtgctggttctgcaggagacggcaatatggatgctggtaatattttaaaaccagccttggcccgtggtgagttgcaactcgttggtgctactacattaaatgaataccgtattattgaaaaagacgctgccttagaacgacgtatgcaacccgttaaagttgatgaaccttctgttgaggaaaccatcacgattttaaaaggtatccaaccgaaatacgaagactatcatcatgtcaaatatagcccagccgctattgaagctgccgctcatttatctaaccgctatattcaagaccgttttcttcctgataaggctattgaccttctggacgaagctggttccaaaatgaatctaaccctcaactttgttgatcctaaagaaattgacaaacgtcttattgaagctgagaatctcaaggcgcaagctactcgagacgaagactatgaacgcgcagcttatttccgcgatcaaattacaaaatacaaagaaatgcaggctcaaaaagtcgatgagcaagatattcccatcattactgaaaaaaccattgaagctattgtagagcaaaaaactaatattccagttggggacttaaaagaaaaggaacagtctcaactcgtaaacttagccaatgatctgaaagcacacgtgatcgggcaagacgatgctgttgataaaatcgctaaggctattcgtcgtaaccgtgtgggattaggaactccaaatcgccctattggttctttcttattcgttggaccgactggggttggtaaaactgaattgtctaaacaactagccattgaactctttggttcgacaaacaatatgattcgctttgacatgtccgaatacatggaaaaacacgctgtcgccaaattagtcggggctcctccaggttatatcggctatgaagaagctggacagctaaccgaacaagttcgtcgcaatccatattcacttattctcttagatgaggtggaaaaagcccatcctgacgtcatgcacatgttcttacaagttcttgatgatggccgtttaacagatggtcaaggacgaacagtcagcttcaaggacaccattattatcatgacctctaatgccggaacaggtaaaagcgaagcttctgtcggatttggtgctgctagagaaggacggacaagttctgtccttggtgaattaagcaacttcttcagcccagagtttatgaatcgtttcgatggtattattgaattcaaagctttatctaaagagcatttgctgcatatcgttgatttaatgctggaagatgttaatgagcgcttaggctataatgggattcatcttgatgtgacacaaaaggtcaaagaaaaattagtagatttaggctatgatcctaaaatgggcgctcggccgctccgtcgtactattcaagattatatcgaagatgccattacagactattatttagaacacccaactgaaaaacagttacgtgcactgatgacaaacagtgaaaatatcacgattaaagctgttaaagagggagattcttttcttaacgaagagtctctcgat

SEQ ID NO: 258 - protein, 760 aa, Streptococcus pyogenes
MLCQNCNLNESTIHLYTSVNGKQRQVDLCQNCYQIMKSDPANSILNGLTPGYRAQDRSTSPFFDDFFGDLNNFRAFGNLPNTPPTQAGQNGNGGGRYGGNYNGQRPAQPQTPNQQAKGLLEEFGINVTDIARNGNIDPVIGRDEEITRVIEILNRRTKNNPVLIGEPGVGKTAVVEGLAQKIIDGTVPQKLQGKQVIRLDVVSLVQGTGIRGQFEERMQKLMEEIRNRKDVILFIDEIHEIVGAGSAGDGNMDAGNILKPALARGELQLVGATTLNEYRIIEKDAALERRMQPVKVDEPSVEETITILKGIQPKYEDYHHVKYSPAAIEAAAHLSNRYIQDRFLPDKAIDLLDEAGSKMNLTLNFVDPKEIDKRLIEAENLKAQATRDEDYERAAYFRDQITKYKEMQAQKVDEQDIPIITEKTIEAIVEQKTNIPVGDLKEKEQSQLVNLANDLKAHVIGQDDAVDKIAKAIRRNRVGLGTPNRPIGSFLFVGPTGVGKTELSKQLAIELFGSTNNMIRFDMSEYMEKHAVAKLVGAPPGYIGYEEAGQLTEQVRRNPYSLILLDEVEKAHPDVMHMFLQVLDDGRLTDGQGRTVSFKDTIIIMTSNAGTGKSEASVGFGAAREGRTSSVLGELSNFFSPEFMNRFDGIIEFKALSKEHLLHIVDLMLEDVNERLGYNGIHLDVTQKVKEKLVDLGYDPKMGARPLRRTIQDYIEDAITDYYLEHPTEKQLRALMTNSENITIKAVKEGDSFLNEESLD

SEQ ID NO: 259 - DNA, 696 bp, Streptococcus agalactiae
atgtcaatgaatttttcatttttaccacaatattggtcctattttaattatggtgtgatggtaaccattatgatttcaacatgtgttgttttttttggaactattataggtgtgttaattgctttagtaaagcgtactaatttacattttctcacaatattagctaatttctatgtatgggtatttcgtgggacaccgatggtagttcaaattatgattgctttcgcatggatgcattttaacaatttaccaacgattagctttggtgttttagatttagattttacacgacttttacctggtatcattatcatttccttaaatagtggtgcctatatttcggaaattgtacgtgcagggattgaggctgtaccatctggacaaatagaagcagcttactcgttggggattcgacctaaaaatacacttcgctatgttatcttaccccaagcttttaaaaatattttacctgctctagggaatgaatttattacaattattaaagatagtgctctccttcaaactattggtgtcatggaattatggaacggagcacaatcagttgtaacggctacttactcaccagttgcaccgttattatttgcagcattttactatttaatgttgacaacgattctctcagctttgttaaaacaaatggagaaatatcttgggaaaggggtaaaaatagatggt

SEQ ID NO: 260 - protein, 232 aa, Streptococcus agalactiae
MSMNFSFLPQYWSYFNYGVMVTIMISTCVVFFGTIIGVLIALVKRTNLHFLTILANFYVWVFRGTPMVVQIMIAFAWMHFNNLPTISFGVLDLDFTRLLPGIIIISLNSGAYISEIVRAGIEAVPSGQIEAAYSLGIRPKNTLRYVILPQAFKNILPALGNEFITIIKDSALLQTIGVMELWNGAQSVVTATYSPVAPLLFAAFYYLMLTTILSALLKQMEKYLGKGVKIDG

SEQ ID NO: 261 - DNA, 684 bp, Streptococcus pyogenes
atggatttgtcatttttgcccaaatactgggcctactttaactacggtgtacttgtcaccattatgatttcagtcagcgttgtcttttttggaacccttattggtgtcttggtaaccctgattaagcgtagtcatgtgaagccgttgacctgggtcgttaatctttacgtttggatctttcggggaacacctatggtggttcaaatcatgattgcctttgcttggatgcattttaacaatatgcctactattggttttggggttttagacttggacttttcaagactacttcctggaattattatcatttcattgaatagcggtgcttatatttcagaaattgttagagcaggtattgaggctgtaccaaaagggcaattagaagcagcttattcactaggtattcgtcctcaaaatgccatgcgttatgtgattttgcctcaggcctttaaaaatattttgccagccttaggaaatgaatttattaccattattaaggatagtgctcttttacaaaccattggagtgatggaactttggaatggtgcccaatcggtggtaacggctacttattctccaatttcccctttactggtggctgctttttactacttaatggtcacaacagtgatggcacagttattggcagtcttagaacgtcacatggcgcaaggaggtaatcat

SEQ ID NO: 262 - protein, 228 aa, Streptococcus pyogenes
MDLSFLPKYWAYFNYGVLVTIMISVSVVFFGTLIGVLVTLIKRSHVKPLTWVVNLYVWIFRGTPMVVQIMIAFAWMHFNNMPTIGFGVLDLDFSRLLPGIIIISLNSGAYISEIVRAGIEAVPKGQLEAAYSLGIRPQNAMRYVILPQAFKNILPALGNEFITIIKDSALLQTIGVMELWNGAQSVVTATYSPISPLLVAAFYYLMVTTVMAQLLAVLERHMAQGGNH

SEQ ID NO: 263 - DNA, 1701 bp, Streptococcus agalactiae
atgtctcatatgaattataaagagatttatcaagagtggttagaaaacgactcactcggtaaagatattaagtcagatttagaagctattaaaggcgatgaatctgaaattcaggatcgtttttacaaaacattagaatttggaacggcgggattgagaggtaaacttggagcaggaaccaatcgtatgaatacttatatggtggggaaagcagcacaagcattagctaatacgattattgatcatggccctgaagctattgcacgtggaattgcagttagttatgatgtccgttatcaatctaaggaatttgcagaattaacttgttccattatggcagcaaatggtattaagtcttatatttataaagggattcgcccaacaccaatgtgctcatatgctattcgtgctctaggatgtgtttcgggtgtgatgattactgctagtcataatcctcaagcttataatggttataaggcatattggaaagaaggatctcagattttagatgatattgctgatcaaattgccaatcatatggatgctataaccgattatcagcaaattaagcaaataccctttgaagaggctctggcaagtggttcggcaagttatatcgatgagagtattgaagaagcatataaaaaagaagtgcttggtttaactattaatgatactaatattgataagtcagtccgggtagtttatactcctttaaatggcgtaggaaatttacctgtgcgcgaagttttaagacgccgtggttttgaaaatgtttatgtggtacctgagcaggaaatgcccgatcctgattttacaacggttggctatccaaaccctgaagttcctaaagcatttgcctattcagaatctctaggaaagtcagttgatgcagatatcttacttgccacagatccagattgtgaccgagtagcattggaagtcaaagatagtaagggagaatatattttcttaaatggtaataagataggggcacttctttcctattatattttttcacaacgatgtgccttagggaatttgccacatcatcctgtattggtaaaatccattgtaactggtgatctatcaaaagttattgcagataaatataatattgaaactgttgaaactttaacaggatttaaaaatatttgtggaaaagctaatgaatatgatatctcaaaggataaaacttatctctttggctatgaagaaagtattggtttttgctatggcacttttgtacgtgataaagatgctgtgagtgcttcaatgatggtagtagaaatgactgcctattataaagaacgagggcaaacacttttagacgttttgcaaaccatttacgataaatttggctattacaacgagcgccaattttctcttgagttagagggtgctgaggggcaagaacgtattagtcgtattatggaggattttagacaggacccaatattacaagtaggtgagatgacattggagaattctattgatttcaaggatggttataaggattttccaaagcaaaattgtttaaaatattattttaatgagggttcatggtatgctttaaggccgtcagggacggaacctaagataaaatgttacctttatacgattggttgtacagaagcagatagtttatcgaaacttaatgcaattgagtcggcttgtcgtgctaaaatgaatagtactaaa

SEQ ID NO: 264 - protein, 567 aa, Streptococcus agalactiae
MSHMNYKEIYQEWLENDSLGKDIKSDLEAIKGDESEIQDRFYKTLEFGTAGLRGKLGAGTNRMNTYMVGKAAQALANTIIDHGPEAIARGIAVSYDVRYQSKEFAELTCSIMAANGIKSYIYKGIRPTPMCSYAIRALGCVSGVMITASHNPQAYNGYKAYWKEGSQILDDIADQIANHMDAITDYQQIKQIPFEEALASGSASYIDESIEEAYKKEVLGLTINDTNIDKSVRVVYTPLNGVGNLPVREVLRRRGFENVYVVPEQEMPDPDFTTVGYPNPEVPKAFAYSESLGKSVDADILLATDPDCDRVALEVKDSKGEYIFLNGNKIGALLSYYIFSQRCALGNLPHHPVLVKSIVTGDLSKVIADKYNIETVETLTGFKNICGKANEYDISKDKTYLFGYEESIGFCYGTFVRDKDAVSASMMVVEMTAYYKERGQTLLDVLQTIYDKFGYYNERQFSLELEGAEGQERISRIMEDFRQDPILQVGEMTLENSIDFKDGYKDFPKQNCLKYYFNEGSWYALRPSGTEPKIKCYLYTIGCTEADSLSKLNAIESACRAKMNSTK

SEQ ID NO: 265 - DNA, 1701 bp, Streptococcus pyogenes
atgagtaatatgacttacaacgaggtatatcaagaatggttgcacaataatgatcttagtgatgatattaaagcagatttagcagccataaaagacaatgaggctgagattcaagatcgtttttacaaaacacttgaatttggaacagcagggctaagaggaaaacttggagcaggcaccaatcgcatgaatacctatatggttggtaaggcagcacaagctttagctaatactattattgatcatggacctgaagcggttaaaaagggcattgcggttagttatgatgttcgctatcaatctagaacatttgcagaattaacatgctctattatggcagctaacggtattaaggcgtacctttataaagggattcggccaacaccaatgtgttcgtacgctattcgtgctttgggatgtatttctggtgttatgattacggctagtcacaatccccaagcttacaatggttacaaagcttattggcaagaaggttctcaaattttggatgacattgcggatcaaattgcacaacacatggctgcactaactcagtatcaggaaatcaaacaaatgccttttgaaaaggctctggacagtggacttgttacttatattgatgagagtattgaagaagcatataaaaaagaagtgcttggtttaacgattaatgatactgacattgataagtcagtccgagtagtctatacccctttaaatggtgttgggaatctaccagtgcgtgaggttttaagacgccgcggttttgaaaatgtttatgtggtacctgagcaggaaatgcccgatcctgattttacaacagttggctatcctaatcccgaagtccctaaaacttttgcatattcagaaaaattaggtaaggcagttgatgctgatattttgattgcaactgatccagattgtgaccgtgtggctttagaagttaaaaatgcagtcggtgactatgtttttctcaatggcaataaaatcggagcgcttttatcttactatatcttttcacaacgatttgacttaggcaatttaccggctaatcctgttttagtgaaatccattgtaacaggagacttgtcacgggctattgctagccattatggtattgaaaccgttgaaacattgactggttttaagaatatttgtggcaaggcaaacgaatatgatgtgacgaaacaaaaaaactacctgtttggttatgaagaaagtattggtttttgctatggcacttttgttcgtgacaaagacgctgttagcgcctctatgatgattgtagaaatggcagcttactacaagaaaaaagggcagaatttactagatgttttgcagactatttatgcgacatttgggtattataatgaacgtcaaattgccttggagcttgaggggatagaaggacaaaaacgcattgcgaggataatggaagatttcagacagacaccaatagctagtgttgcagagatggcgttagacaagacaattgattttattgatggctatcaagattttccaaagcaaaactgtctcaaattttatttggatgatggttcttggtatgcacttagaccatcaggaacagagcctaaaataaaattttatttatatactattggccaaacacaagaaaatagtgcaacaaaattagatgctattgaagcagcgtgtcgcacaaaaataaatcaggttaat

SEQ ID NO: 266 - protein, 567 aa, Streptococcus pyogenes
MSNMTYNEVYQEWLHNNDLSDDIKADLAAIKDNEAEIQDRFYKTLEFGTAGLRGKLGAGTNRMNTYMVGKAAQALANTIIDHGPEAVKKGIAVSYDVRYQSRTFAELTCSIMAANGIKAYLYKGIRPTPMCSYAIRALGCISGVMITASHNPQAYNGYKAYWQEGSQILDDIADQIAQHMAALTQYQEIKQMPFEKALDSGLVTYIDESIEEAYKKEVLGLTINDTDIDKSVRVVYTPLNGVGNLPVREVLRRRGFENVYVVPEQEMPDPDFTTVGYPNPEVPKTFAYSEKLGKAVDADILIATDPDCDRVALEVKNAVGDYVFLNGNKIGALLSYYIFSQRFDLGNLPANPVLVKSIVTGDLSRAIASHYGIETVETLTGFKNICGKANEYDVTKQKNYLFGYEESIGFCYGTFVRDKDAVSASMMIVEMAAYYKKKGQNLLDVLQTIYATFGYYNERQIALELEGIEGQKRIARIMEDFRQTPIASVAEMALDKTIDFIDGYQDFPKQNCLKFYLDDGSWYALRPSGTEPKIKFYLYTIGQTQENSATKLDAIEAACRTKINQVN

SEQ ID NO: 267 - DNA, 852 bp, Streptococcus agalactiae
atgactgaattaatagatggtaaagccttatcacaaaaaatgcaggctgagttagggcgaaaagttgaaaggttaaaggaacagcatggtatcatacctggtttagctgtaatccttgttggggataatccagctagccaagtgtacgttcgaaataaagaacgctctgcattagaagctggttttaaaagtgagactctacgattatctgaatccatttctcaagaagaactgattgatattatccatcaatacaatgaagataaaagtatccatggtattttagttcaacttccgttaccacaacatattaacgataaaaaaattattttagcaatagatcctaagaaagatgttgatggtttccacccaatgaatacgggtcatctttggtcaggacgaccgatgatggtaccttgtacgccagctggtattatggagatgtttagagagtaccatgtggatttagagggaaaacatgctgttatcatcggaaggtccaatattgttggtaagccaatggcacaacttctccttgataaaaacgcaacagttactttgacacattcaagaactcgaaacctttctgaggtaacaaaggaggctgatatccttattgttgcgattggtcaggggcactttgttacaaaagacttcgttaaagaaggtgctgtggtgattgatgttggtatgaatcgcgatgaaaatggtaaattgattggagacgttgtatttgaacaagtggcagaagttgctagtatgataacacctgttcctgggggcgtaggacctatgacgattacaatgcttttggaacaaacttatcaagcagctcttagaagtgtgagtcta

SEQ ID NO: 268 - protein, 284 aa, Streptococcus agalactiae
MTELIDGKALSQKMQAELGRKVERLKEQHGIIPGLAVILVGDNPASQVYVRNKERSALEAGFKSETLRLSESISQEELIDIIHQYNEDKSIHGILVQLPLPQHINDKKIILAIDPKKDVDGFHPMNTGHLWSGRPMMVPCTPAGIMEMFREYHVDLEGKHAVIIGRSNIVGKPMAQLLLDKNATVTLTHSRTRNLSEVTKEADILIVAIGQGHFVTKDFVKEGAVVIDVGMNRDENGKLIGDVVFEQVAEVASMITPVPGGVGPMTITMLLEQTYQAALRSVSL

SEQ ID NO: 269 - DNA, 858 bp, Streptococcus pyogenes
atgtcaatgacagaactaattgatggtaaagccttagctcaaaagatgcaacaagagttagcagctaaagtcaacaatctaaaacaaaaaaaaggaattgtaccaggcttagccgttattcttgtaggtgatgatcctgctagtcaggtgtatgtccgtaataaagagcgtgcagctcttactgtaggttttaaaagtgagaccgttagattatcagaattcatttgtcaagaagagcttattgcagtaatcgaacgttacaatgcagataacactattcatggtattttagtgcagctacccctgccaaatcatattaatgataaaaaaattattctcgccattgatcccaaaaaagatgtggatggttttcacccgatgaatacaggtcacctttggtcaggacgtcccttgatggttccttgtactccatcagggattatggaattgcttcgagaatataatgttaaccttgaaggtaaacatgccgtcattattggcagatcgaatatcgttggaaaaccaatggcacagctcttactggacaaaaatgcaacagtcacgttgacacattcaagaacacgtcaattagaagaagtatgtcgctgtgcagatgtgttgattgtggcaatcggacaaggtcatttcataacaaaacaatatataaaagatggtgcgatagtgattgatgtaggaatgaaccgtgatgataatggcaagctaattggagatgtggcctttgatgaggtggcagaagttgcagcgaaaatcacccctgtaccaggaggtgtcggtcctatgacgattgctatgttgctagagcaaacttatcaatctgctctccgtagtactcataaa

SEQ ID NO: 270 - protein, 286 aa, Streptococcus pyogenes
MSMTELIDGKALAQKMQQELAAKVNNLKQKKGIVPGLAVILVGDDPASQVYVRNKERAALTVGFKSETVRLSEFICQEELIAVIERYNADNTIHGILVQLPLPNHINDKKIILAIDPKKDVDGFHPMNTGHLWSGRPLMVPCTPSGIMELLREYNVNLEGKHAVIIGRSNIVGKPMAQLLLDKNATVTLTHSRTRQLEEVCRCADVLIVAIGQGHFITKQYIKDGAIVIDVGMNRDDNGKLIGDVAFDEVAEVAAKITPVPGGVGPMTIAMLLEQTYQSALRSTHK

SEQ ID NO: 271 - DNA, 834 bp, Streptococcus agalactiae
atgattgttggtgaacaagaagcgagggcgttaattaagccacgccctaaatcaagccataaaggtgattatggtagtgttcttctgataggaggtttttatccctatggaggtgctattataatggcagctttggcctgtgtcaaaactggtgcaggattagttactgtagcaacccaaagttgcaatatcccctctttgcatagtcaactaccagaggtaatggcgtttgatagtgatgattacaaatggttggaaaaatcaattgttcaaagtgatgttattgtaattggtcctggattaggagtatcagaatcatctcgaaaaattttgaaccagaccatggagaagattcaatcacatcaaagtgtcatccttgacggatcagccttgactctgttatcagaaggtgcgtttccgcaaacaaaggctaaaaatttagtgttgacacctcatcaaaaagaatgggagcgattgtcaggtatcgctgtatcgcaacagacaaaagaaaatacccaaaccgctcttaaatcttttcccaaagggacgattttagtcgctaagagttcgcatacgcgtatttttcaagatttagacgaaaaagaaattatagtaggaggtccttaccaggcgactggagggatgggggatactttgtgtggtatgattgcaggtatgttagcgcaatttaaagaagcctctcctctagataaggtatcagtgggagtttatctacattcggcaattgctcaaggattatctaaagaagcctatgttgttctaccgacaacgattagtgatgagattccaaaagaaatggctagactatctaaa

SEQ ID NO: 272 - protein, 278 aa, Streptococcus agalactiae
MIVGEQEARALIKPRPKSSHKGDYGSVLLIGGFYPYGGAIIMAALACVKTGAGLVTVATQSCNIPSLHSQLPEVMAFDSDDYKWLEKSIVQSDVIVIGPGLGVSESSRKILNQTMEKIQSHQSVILDGSALTLLSEGAFPQTKAKNLVLTPHQKEWERLSGIAVSQQTKENTQTALKSFPKGTILVAKSSHTRIFQDLDEKEIIVGGPYQATGGMGDTLCGMIAGMLAQFKEASPLDKVSVGVYLHSAIAQGLSKEAYVVLPTTISDEIPKEMARLSK

SEQ ID NO: 273 - DNA, 1338 bp, Streptococcus agalactiae
atgtcagactatttatccgtgtcgacactgactaagtatttaaaattaaaatttgacaaagacccttatttagagagggtttatttaactgggcaagtgtctaattttcgtcgtcgcccaaaccatcaatatttctctttaaaagatgataaatcagtcattcaggcgacaatgtggtcaggtcacttcaaaaaattgggttttgaattagaggaagggatgaaggttaatgtagttggccgtgttcaactttatgaaccaagcggctcctactctattattgttgaaaaagcagaaccggatggtataggagctcttgctatccaatttgaacaactaaagaagaaactctctcaagcaggttattttgatgatcgtcataagcaattaattcctcaatttgttagaaaaataggagttgtgactagtccaagtggagccgttattcgggatattattacaacagtatctcgtcgatttccaggagtggaaatattacttttccccacaaaagttcaaggagagggcgcagctcaggaaatagcacaaactattgctttagctaacgagaaaaaggatttggatctattaattgttggccgtgggggaggttctattgaggacttatgggcatttaatgaagaatgtgttgtagaagctatttttgaatctcgtcttcccgttatttctagtgtcggacatgaaactgatacaactttagcagattttgtagccgatcgcagagcagcaactccaactgcagcagctgagcttgctacaccggttactaaaattgatatcttgtcttggattactgaacgtgaaaatagaatgtatcagtctagccttcgtcttatcaggacaaaagaggagaggttgcaaaaatcaaagcaatcagttatttttaggcaaccagagcgtctatatgatggtttccttcaaaaattagataacctaaatcagcagttaacatattctatgcgtgataaactacaaacagtaagacaaaagcaaggtttgcttcatcaaaaactgcaaggcatagatttaaaacagcgtattcatatttaccaagagcgtgttgtgcaaagtagacgactattatcaagtacaatgactagtcagtatgacagcaagctagcacgttttgaaaaggctcaagatgcgcttatatcattggatagttctagaattgtagcgcgtggttacgctattatcgaaaaaaaccatactttagtatctactactaatggaataaatgaaggagatcatttgcaagttaagatgcaagatggtcttttagaagttgaggtgaaggatgtcagacaagaaaacatt

SEQ ID NO: 274 - protein, 446 aa, Streptococcus agalactiae
MSDYLSVSTLTKYLKLKFDKDPYLERVYLTGQVSNFRRRPNHQYFSLKDDKSVIQATMWSGHFKKLGFELEEGMKVNVVGRVQLYEPSGSYSIIVEKAEPDGIGALAIQFEQLKKKLSQAGYFDDRHKQLIPQFVRKIGVVTSPSGAVIRDIITTVSRRFPGVEILLFPTKVQGEGAAQEIAQTIALANEKKDLDLLIVGRGGGSIEDLWAFNEECVVEAIFESRLPVISSVGHETDTTLADFVADRRAATPTAAAELATPVTKIDILSWITERENRMYQSSLRLIRTKEERLQKSKQSVIFRQPERLYDGFLQKLDNLNQQLTYSMRDKLQTVRQKQGLLHQKLQGIDLKQRIHIYQERVVQSRRLLSSTMTSQYDSKLARFEKAQDALISLDSSRIVARGYAIIEKNHTLVSTTNGINEGDHLQVKMQDGLLEVEVKDVRQENI

SEQ ID NO: 275 - DNA, 1353 bp, Streptococcus pyogenes
gtgaaaggtggcttgatggcagattatttaaccgtcactcatttgacgaaatatttaaaattaaaatttgaccgtgacccttatttggaacgggtttatctgactggtcaagtgtccaattttcgaaaacgaccaactcatcaatatttttccttaaaagatgaaagtgctgtgattcaagccaccatgtgggcaggagtctataaaaaactaggattcgacctagaagaaggcatgaaaattaatgtaattgggcgagtccaactttatgaacctagtggctcttactctatcgtgattgaaaaggcagagccagatggtataggtgccttggctttgcagtttgaacaattaaagaaaaaattaacggcagaaggttattttgagcaaaaacacaagcagcccttgccacagtttgtatcaaaaattggggtcattacaagtcctagtggtgctgtgattcgagatattatcacaaccgtttcacggcgttttccaggggttgagattttattattcccaactaaagtacaaggtgatggagccgcccaagaagtagtggctaatattcgaagagccaatcaaagagaggatttggacttgctcattgtcggccgtggaggtggctcgatagaagacctttgggccttcaacgaggaaatagtggttcaggctatctttgaatcgcaacttccagtgatttcgagtgtgggtcatgaaacagacacgactttagcggattttgtggcagatcgcagagcagccacaccaacagcagcagcagagttagcaacgcctattacaaaaacagatcttatgtcttggatagtagagcggcaaaatcgttcctatcaggcctgcttgaggcggattaagcaacggcaagagtgggtggataaactctcgcaatctgttatttttaggcaaccagaacgattatatgatgcctacctgcaaaaaattgatcgccttagcatgaccctgatgaatacgatgaaagatcgtctgagttccgccaaagaaaacaaggttcagttggaccatgccttggccaatagtcaattacagacaaaaatcgagcgataccaagaccgtgttgctaccgctaagcgtttactgatggctaatatggctagtcaatatgatagtcagctggctcgctttgaaaaagcacaggatgctttgctatcactggatgccagccgaattatcgcccgtggttatgcaatgattgaaaaaaatcaagcactggtagcctctgtaagtcagataacaaagggtgatcagttaaccattaagatgcgtgatggacaattagatgtagaggtaaaagatgtcaaaaacgaaaacatt

SEQ ID NO: 276 - protein, 451 aa, Streptococcus pyogenes
VKGGLMADYLTVTHLTKYLKLKFDRDPYLERVYLTGQVSNFRKRPTHQYFSLKDESAVIQATMWAGVYKKLGFDLEEGMKINVIGRVQLYEPSGSYSIVIEKAEPDGIGALALQFEQLKKKLTAEGYFEQKHKQPLPQFVSKIGVITSPSGAVIRDIITTVSRRFPGVEILLFPTKVQGDGAAQEVVANIRRANQREDLDLLIVGRGGGSIEDLWAFNEEIVVQAIFESQLPVISSVGHETDTTLADFVADRRAATPTAAAELATPITKTDLMSWIVERQNRSYQACLRRIKQRQEWVDKLSQSVIFRQPERLYDAYLQKIDRLSMTLMNTMKDRLSSAKENKVQLDHALANSQLQTKIERYQDRVATAKRLLMANMASQYDSQLARFEKAQDALLSLDASRIIARGYAMIEKNQALVASVSQITKGDQLTIKMRDGQLDVEVKDVKNENI

SEQ ID NO: 277 - DNA, 213 bp, Streptococcus agalactiae
atgtcagacaagaaaacatttgaagaaaatttacaggaattagagacaattgtctcacgtttagaaacaggtgatgttgccttagaagatgccattgctgaatttcaaaaaggaatgcttatttcaaaagagttacaaagaactttaaaagaagctgaagagacgcttgtaaaagtgatgcaagctgacggaacggaagtagaaatggatact

SEQ ID NO: 278 - protein, 71 aa, Streptococcus agalactiae
MSDKKTFEENLQELETIVSRLETGDVALEDAIAEFQKGMLISKELQRTLKEAEETLVKVMQADGTEVEMDT

SEQ ID NO: 279 - DNA, 213 bp, Streptococcus pyogenes
atgtcaaaaacgaaaacatttgaagaaaatttacaagatttagagactattgtgaacaaacttgaaaatggggatgtccctttggaagaagctatttcagaatttcaaaaaggaatgcttctctcaaaagaacttcaaaagaccttacaagcggcagaaaaaacactcgtcaaagtgatgcaagctgatggcacagaagtagatatggatgat

SEQ ID NO: 280 - protein, 71 aa, Streptococcus pyogenes
MSKTKTFEENLQDLETIVNKLENGDVPLEEAISEFQKGMLLSKELQKTLQAAEKTLVKVMQADGTEVDMDD

SEQ ID NO: 281 - DNA, 873 bp, Streptococcus agalactiae
ttgatggttactattgaaaaaattgatgaagctattcatcgttattacaaacagacacatagtgtcgtttctcctgatttgattaaggctatcctctactcagttgatggaggtgggaaacgtattcgtccacgcatccttttagaaattttagagggatttggagttgaactaatagatggtcattatgatgtggctgctgctttggagatgattcacaccggctcattaatccatgatgatttaccggcgatggataatgatgattttcgtcgtggccgcttaacaaaccataaaaagtttgatgaagctacagcggttttagctggagattccctttttttagacccatttgatttagttgtaaaagctggttttaaagctgatgttactgttaggttaatagagttattgtctatgtctgcgggtagttttggcatggttggtggacaaatgttagatatgaagggagaaaacaaagttttatctattgacgatttaagcttgattcatattaataaaacgggacgcctgttagcttatccctttgttgcagcaggtattttagctgagaagtcggaagaagtaaaaggaaaactgcatcaagctggccttttaatcggtcatgcttttcaagtacgtgatgatattttagatgtgactgctagttttgaagaattggggaagacaccaaataaagacattgtagcagaaaagacaacttatccaaatttattgggtttggataagtcacaggaaatacttgatgatactttgaaaaaagctcaggcaatttttcaaaatctagagaaaaaagctaactttaatgctagaaaaataatagatataatagagggattacggttgaatggc

SEQ ID NO: 282 - protein, 291 aa, Streptococcus agalactiae
MMVTIEKIDEAIHRYYKQTHSVVSPDLIKAILYSVDGGGKRIRPRILLEILEGFGVELIDGHYDVAAALEMIHTGSLIHDDLPAMDNDDFRRGRLTNHKKFDEATAVLAGDSLFLDPFDLVVKAGFKADVTVRLIELLSMSAGSFGMVGGQMLDMKGENKVLSIDDLSLIHINKTGRLLAYPFVAAGILAEKSEEVKGKLHQAGLLIGHAFQVRDDILDVTASFEELGKTPNKDIVAEKTTYPNLLGLDKSQEILDDTLKKAQAIFQNLEKKANFNARKIIDIIEGLRLNG

SEQ ID NO: 283 - DNA, 870 bp, Streptococcus pyogenes
atggacaaattagctagaattgacgaagccattcgtcgctactataagacgactagtaacggtgtatctgaagagttgattgatgctatcttgtattctgttgacagtggtggcaagcgcattcgcccacttatcttattagagatgattgagggatttggggtatcgttacagaatgctcattttgatttggctgcagctcttgaaatgattcatacaggaagtctgattcacgatgatttgccagccatggataatgatgattaccgacgtggcagactgaccaatcacaaacaatttggagaagccacggccattttggcgggagacagcttatttttagacccctttgggttaatagctcaagctgaattaaatagtgaggttaaagtagccttaatccaagaactttccctagcttcaggaacttttggcatggttggtggtcagatgttagatatgaaaggggaaaatcaagcattaagtcttcctcagttgtcactgattcacctcaataaaaccggaaaattattagcttttccttttaaagcagcagctcttataacagaacaggctatgactgttcgtcaacaactagagcaagcgggaatgctcatcgggcacgcctttcagattagggatgatattttagacgtgacagctagctttgaagatcttggaaaaacgcctaaaaaggacttattcgcagaaaaagctacttatccaagtttactggggttagaagcctcttaccaactgctgacagagagtttagatcaggctttgacgatttttcagacactagaaagcgatgtaggctttaagcctcaaataattacaaaactgatagaagggttacgacttaatgcc

SEQ ID NO: 284 - protein, 290 aa, Streptococcus pyogenes
MDKLARIDEAIRRYYKTTSNGVSEELIDAILYSVDSGGKRIRPLILLEMIEGFGVSLQNAHFDLAAALEMIHTGSLIHDDLPAMDNDDYRRGRLTNHKQFGEATAILAGDSLFLDPFGLIAQAELNSEVKVALIQELSLASGTFGMVGGQMLDMKGENQALSLPQLSLIHLNKTGKLLAFPFKAAALITEQAMTVRQQLEQAGMLIGHAFQIRDDILDVTASFEDLGKTPKKDLFAEKATYPSLLGLEASYQLLTESLDQALTIFQTLESDVGFKPQIITKLIEGLRLNA

SEQ ID NO: 285 - DNA, 825 bp, Streptococcus agalactiae
atggctaaagagagggtagatgttcttgcctataaacagggactttttgatacacgagagcaagcgaaacgtggtgttatggcaggaatggtgattaacgttatcaatggagaacgttatgataaaccaggtgaaaaggttgcagacgatactgaattaaaactaaaaggtgaaaaactaaaatatgttagtagaggtggattgaaattagaaaaagctttacaagtttttgaaatttcagttgcagataagctaactatagatattggcgcctctacgggtggttttactgatgttatgctacaatcaggagcgcgtttagtttacgcagtagatgtaggaacaaatcaattagtttggaagttacgtcaggatcatcgtgttcgttctatggaacaatataattttaggtatgcccaaaaagaagatttcaaggagggactgcctgaatttgcatcgatagatgtctcatttatctctcttaatttgattttaccagctctaaaagaaattttagtggatggtggacaagtagtggcattaattaaaccacaatttgaagcaggtcgtgagcaaattggtaaaaatggtattgtcaaagacaagttggttcatgaaaaggttttgacaacagtgaccaatttcacgaaagattatggatatacggttaaacatcttgatttttcgcccattcaaggtggacatggaaatattgagtttttaatgcatttgcaaaagtgtcaagatccacaaaatcttgtgcttgaccaaatacaagatgttatagaaaaagcacataaggaatttaagaaaaatgaagaagag

SEQ ID NO: 286 - protein, 275 aa, Streptococcus agalactiae
MAKERVDVLAYKQGLFDTREQAKRGVMAGMVINVINGERYDKPGEKVADDTELKLKGEKLKYVSRGGLKLEKALQVFEISVADKLTIDIGASTGGFTDVMLQSGARLVYAVDVGTNQLVWKLRQDHRVRSMEQYNFRYAQKEDFKEGLPEFASIDVSFISLNLILPALKEILVDGGQVVALIKPQFEAGREQIGKNGIVKDKLVHEKVLTTVTNFTKDYGYTVKHLDFSPIQGGHGNIEFLMHLQKCQDPQNLVLDQIQDVIEKAHKEFKKNEEE

SEQ ID NO: 287 - DNA, 825 bp, Streptococcus pyogenes
atgcctaaagaaagagtagatgtgttagcctataagcaaggattatttgagaccagagagcaagctaagcgtggtgtcatggcaggcttagtggtctctgtgattaatggccaacgctatgacaagccaggtgacaaaattgacgatgggactgagttaaaacttaaaggtgaaaaactcaaatacgtcagtcgtggtggattaaaactggaaaaggggctgcacgtttttggtgtatcagttgctaatcaaattgggattgatattggcgcttcaacaggtggttttaccgatgttatgttacaagatggggccaaactagtctatgccgtcgacgttgggactaaccagttggtatggaaactcagacaagatccacgagtaagaagtatggaacagtataactttcgttatgctcagccagaagactttaatgagggacagcctgtatttgccagtattgatgtgtcctttatttctctcagcttgattttgccagccctgcataacgttttgtcagatcagggacaggttattgctctcattaaaccgcaatttgaagctgggcgcgagcagattggtaaaaaaggcatcgtcaaggacaaacagattcatgaaaaagtgattcaaaaggtcatggattttgcctcaggttacggatttacagttaagggacttgatttttctcctattcagggtggtcatggcaatatcgaatttttagctcatcttgctaagtcacagacacctgaaacgttagccccgcatttgattcagaaagttgttgccaaggcacataaggagtttgagaaacatgaaaaagag

SEQ ID NO: 288 - protein, 275 aa, Streptococcus pyogenes
MPKERVDVLAYKQGLFETREQAKRGVMAGLVVSVINGQRYDKPGDKIDDGTELKLKGEKLKYVSRGGLKLEKGLHVFGVSVANQIGIDIGASTGGFTDVMLQDGAKLVYAVDVGTNQLVWKLRQDPRVRSMEQYNFRYAQPEDFNEGQPVFASIDVSFISLSLILPALHNVLSDQGQVIALIKPQFEAGREQIGKKGIVKDKQIHEKVIQKVMDFASGYGFTVKGLDFSPIQGGHGNIEFLAHLAKSQTPETLAPHLIQKVVAKAHKEFEKHEKE

SEQ ID NO: 289 - DNA, 471 bp, Streptococcus agalactiae
atgaagaagagtgaacgtttaaatttaattaagcaaattgttcttaaccatgctgttgaaacacaacatgagttgttacgcagattggaagcttatggggtaactctaactcaagcaactatttcacgtgatatgaatgaaattggcattataaaagtgccatcagcaaaaggtcgctatatttacggtttgtcaaatgaaaacgaccctatctttacaactgctgtggcaaagcctattaaaacaagtattttatcaatatcagataagctactaggtttagagcaatttatcaatattaatgtcataccaggtaacagtcaattaattaaaaccttcataatgtcacattgtcaagaacatatttttagtttgacagctgacgataatagtctccttttgattgcaaaatcagaagcagatgctgatcacattcgtcaatcaatgattgcaatgttggagaaaaaagat

SEQ ID NO: 290 - protein, 157 aa, Streptococcus agalactiae
MKKSERLNLIKQIVLNHAVETQHELLRRLEAYGVTLTQATISRDMNEIGIIKVPSAKGRYIYGLSNENDPIFTTAVAKPIKTSILSISDKLLGLEQFININVIPGNSQLIKTFIMSHCQEHIFSLTADDNSLLLIAKSEADADHIRQSMIAMLEKKD

SEQ ID NO: 291 - DNA, 501 bp, Streptococcus pyogenes
ttgttgccaaggcacataaggagtttgagaaacatgaaaaagagtgaacgacttgaattaatcaaaaaaatggttttgacgcatccaattgagacgcaacatgacctcttaagattattggcagagcatgggttagaattaacccaggctactatttcaagagacatgaatgaaattggtatagtaaagattccttctggcagtggacgttacatctatggtctttctcaagatagtggaaaaaagatcgttcaaggacctagatcgataaagagcactattttagctgtatctgacaaaacaaaaggtttagaacaacacctctatttaaaagtcgtacctggcaatagtaaattaatcaaacgttatttattagcagatttttcaaaagctatttttagtcttattgctgatgatgatagtttattgttaattgcaaagtctccttcagaagcagatatgatacgccaagaaattttgctttggatgcagggtataacc

SEQ ID NO: 292 - protein, 167 aa, Streptococcus pyogenes
LLPRHIRSLRNMKKSERLELIKKMVLTHPIETQHDLLRLLAEHGLELTQATISRDMNEIGIVKIPSGSGRYIYGLSQDSGKKIVQGPRSIKSTILAVSDKTKGLEQHLYLKVVPGNSKLIKRYLLADFSKAIFSLIADDDSLLLIAKSPSEADMIRQEILLWMQGIT

SEQ ID NO: 293 - DNA, 123 bp, Streptococcus agalactiae
atggaagttttatcttccttacgtgaaaaagcagatttaatagctaacatcaatcgagataactctcctcctgaagccacttttaccaatggcttaaagccctctccgggattcgttgaaata

SEQ ID NO: 294 - protein, 41 aa, Streptococcus agalactiae
MEVLSSLREKADLIANINRDNSPPEATFTNGLKPSPGFVEI

SEQ ID NO: 295 - DNA, 1656 bp, Streptococcus agalactiae
atgcttttagaaatttctattaagaatttcgctattatcgaagaaatttcacttaattttgaaacaggaatgactgttttaactggtgagactggtgcagggaaatctatcattattgatgctatgaatatgatgttaggatcccgtgctagcgttgaagtgattcgccatggtgctaacaaagcagaaattgaaggatttttctctgttgaaaaaaatcaatcattagtccaattattggaagaaaatggcattgaattagcagatgaattaattattcgccgagaaatctttcaaaatgggcgcagcgttagtcgaattaatgggcaaatggtgaatttgtcaacactaaaagctgtggggcattatttggtagacatttatggtcagcatgaccaagaggaactaatgaaacctaacatgcacattctgatgttagatgaatttggtaatacagaatttaatgtcataaaagaacgttatcaaagtctttttgatgcttatcgtcagcttcgtaaacgcgtattggataagcaaaaaaatgaacaagagaataaatcacgtattgaaatgctagaatttcaaatagcagaaattgagtctgtagcccttaaatcagatgaagaccaaacgctactcaagcaacgtgataaattaatgaatcataagaatattgcagatactttgacaaatgcatatcttatgttagataacgaagagttttcaagtttatcgaatgttcgttctgcaatgaatgaccttatggctttagaagaatttgatcgagaatataaagatctttccaccaatctttcagaagcttactacgttattgaagaagttactaaacgtttaggtgacgttatcgatgatttagattttgacgctggtttactacaagaaattgaaaatagactagatgttattaacacaataacgcgaaaatatggcggtgatgtgaatgatgttttagactattttgataacattactaaagaatatagtctattgacaggtagtgaagagtcctcagatgctttagaaaaagaattaaagattttagaacacgatttgattgaatcagcaaatcaattaagtttagagcgccataagctagctaaacaattggaaaatgaaatcaaacaagaattaacagagctttatatggagaaagctgatttccaagttcaatttacaaaaggaaaatttaataaagaagggaacgaaatcgttgaattttatatttcaacgaatcccggagagggctttaagccattggtaaaagtggcttcaggaggagagttatctcgattgatgttagctattaaatctgctttttcacgtaaggaagataaaacttccattgtatttgatgaggtggatacaggagtttctggtcgcgtggcccaggctatcgctcaaaaaattcacaagattggtagtcatggacaagttttagcaatttctcatttagctcaggttattgcaatagcggattaccaatattttattgaaaaaatttccagtgactcttcaacagtttcaacggtaaggcttttaagctatgaagaacgtgtagaagaaatcgctaaaatgttggcaggaaacaatgtaacagacactgcacgtactcaagctaaagaattacttggtagt

SEQ ID NO: 296 - protein, 552 aa, Streptococcus agalactiae
MLLEISIKNFAIIEEISLNFETGMTVLTGETGAGKSIIIDAMNMMLGSRASVEVIRHGANKAEIEGFFSVEKNQSLVQLLEENGIELADELIIRREIFQNGRSVSRINGQMVNLSTLKAVGHYLVDIYGQHDQEELMKPNMHILMLDEFGNTEFNVIKERYQSLFDAYRQLRKRVLDKQKNEQENKSRIEMLEFQIAEIESVALKSDEDQTLLKQRDKLMNHKNIADTLTNAYLMLDNEEFSSLSNVRSAMNDLMALEEFDREYKDLSTNLSEAYYVIEEVTKRLGDVIDDLDFDAGLLQEIENRLDVINTITRKYGGDVNDVLDYFDNITKEYSLLTGSEESSDALEKELKILEHDLIESANQLSLERHKLAKQLENEIKQELTELYMEKADFQVQFTKGKFNKEGNEIVEFYISTNPGEGFKPLVKVASGGELSRLMLAIKSAFSRKEDKTSIVFDEVDTGVSGRVAQAIAQKIHKIGSHGQVLAISHLAQVIAIADYQYFIEKISSDSSTVSTVRLLSYEERVEEIAKMLAGNNVTDTARTQAKELLGS

SEQ ID NO: 297 - DNA, 1662 bp, Streptococcus pyogenes
gtgatgttattagaaatttctattaaaaattttgctattattgatgaaatttccctaaattttgaaaatggtatgacggttttgacgggtgaaactggagcaggaaagtctattatcattgatgctatgaatatgatgcttggtgcgcgtgctagtacagaagtgattcgtcgtggagctaataaagcagaaattgaggggttcttttcggtagatgctaccccagaactggttgcgtgtctggaatcatcaggtattgctatggaagaagaactgattattcgccgagatatctttgccaatggcagaagcgtgagccgcattaatggtcagatggttaacctagccaccttaaaacaggtcggacagtttttggtagatattcatgggcaacatgaccaagaagaattaatgcgaccacagctccaccagcaaattttggacgcttttggtgataaggcttttgagcaattgaaagagaattatcagcttatttttgatcgttataaaagcttgcgtcgccaggttattgacaaacaaaaaaatgaaaaggaacacaaagatcgtattgatatgttggcctttcagatagcagaaattgaagctgctgccttgagtcgaggtgaggacgaccggttaaatcaagaacgtgatcgcttaatgaaccacaaacaaattgctgataccctgaccaatgcctacgtcatgctagataatgacgatttttcaagtctatccaatattcgctctagcatgaatgacttactatcaattgagcagtttgattcagagtacaaagggatgtcgacttcgatttctgaagcctattatattcttgaagaagtgagcaagcaattatcagataccattgaccaactggattttgatggtgggcgattacaggaaattgaatttcgcttggatatactcaatagcttaactcgtaaatacggtggtaatgtgaatgatgtgcttgactactacgataatatcgtcaaagaataccagctattaacaggagatgacttgtcttcaggggatctagaggcagaattgaaaagcttggaaaaacaattggttgctgctgcttcggagttaagtgtctctcgccatcaattggcggagcaattagaagctgagattaaagctgaacttaaggaactttatatggaaaaagcagatttcaaagttcactttaccacatcaaaatttaatcgtgatggtaatgaaagcttggaattttacatctctactaatccaggcgaaggattcaagccccttgtcaaggtggcttctggaggagagttatcacgccttatgttagccatcaaggctgctatttctagaaaagaagataagacgagtattgtttttgatgaagtagatacaggtgtttctggtcgcgttgcgcaagccattgcccaaaaaatttataaaattgggcgacatgggcaagttctcgctatttcacacttacctcaagttattgctattgctgattatcagtattttatttctaaagaaagtaaagaagagtccaccgtttctaaggtaaggttattaactcctgaagaacgtgtggaagaaattgctagcatgattgcaggaacagatatgacacaagctgctcttacgcaggctcgtgaactacttgccaaacat

SEQ ID NO: 298 - protein, 554 aa, Streptococcus pyogenes
VMLLEISIKNFAIIDEISLNFENGMTVLTGETGAGKSIIIDAMNMMLGARASTEVIRRGANKAEIEGFFSVDATPELVACLESSGIAMEEELIIRRDIFANGRSVSRINGQMVNLATLKQVGQFLVDIHGQHDQEELMRPQLHQQILDAFGDKAFEQLKENYQLIFDRYKSLRRQVIDKQKNEKEHKDRIDMLAFQIAEIEAAALSRGEDDRLNQERDRLMNHKQIADTLTNAYVMLDNDDFSSLSNIRSSMNDLLSIEQFDSEYKGMSTSISEAYYILEEVSKQLSDTIDQLDFDGGRLQEIEFRLDILNSLTRKYGGNVNDVLDYYDNIVKEYQLLTGDDLSSGDLEAELKSLEKQLVAAASELSVSRHQLAEQLEAEIKAELKELYMEKADFKVHFTTSKFNRDGNESLEFYISTNPGEGFKPLVKVASGGELSRLMLAIKAAISRKEDKTSIVFDEVDTGVSGRVAQAIAQKIYKIGRHGQVLAISHLPQVIAIADYQYFISKESKEESTVSKVRLLTPEERVEEIASMIAGTDMTQAALTQARELLAKH

SEQ ID NO: 299 - DNA, 834 bp, Streptococcus agalactiae
atgagtaaaatcaaaattgtaacggattcttccattaccattgaaccagaacttattaaagagcttgacattacagttgttcccttgtcagttatgatagatggtaccttgtattcagacaatgacttaaaagcacaaggggaattcttgaacctaatgcgtggaagtaaggaattgccaaaaacaagtcaaccacctgtaggtgtttttgcagaaatttatgaaaaattaatgaatgaaggtgtggaacatatcattgcaattcatttaacgcatacactatcaggaactattgaagcatcacgccagggagctaatattgctggtgcagatgttacagttattgattctacttttacagaccagtgtcaaaaattccaggttgtagaagctgcgaaattagctaaagagggagctgatttagataccatcttggctcgtgtggaagaagtacgccagaagtcagaattatttattggcgtatcgacccttgaaaatttagtaaaaggtggtcgtattggacgtgtaacgggtcttctaagttcattgcttaatataaaagtaattatggagctaacaaaccatgaattagtaccgattgttaaaggtcgcggtctaaagaccttcagcaaatggttagataattttgttgaaagtgcccaaacacgaaaaattgctgaaattggcatctcctactgtggtaaagctgatatggctaataactttagagaaaaactagctgttctaggtgctcctatatccgttttagaaactggctcaatcatccaaactcatactggtgaggatgcatttgctgttatggttcgttatgaa

SEQ ID NO: 300 - protein, 278 aa, Streptococcus agalactiae
MSKIKIVTDSSITIEPELIKELDITVVPLSVMIDGTLYSDNDLKAQGEFLNLMRGSKELPKTSQPPVGVFAEIYEKLMNEGVEHIIAIHLTHTLSGTIEASRQGANIAGADVTVIDSTFTDQCQKFQVVEAAKLAKEGADLDTILARVEEVRQKSELFIGVSTLENLVKGGRIGRVTGLLSSLLNIKVIMELTNHELVPIVKGRGLKTFSKWLDNFVESAQTRKIAEIGISYCGKADMANNFREKLAVLGAPISVLETGSIIQTHTGEDAFAVMVRYE

SEQ ID NO: 301 - DNA, 849 bp, Streptococcus pyogenes
atggaaaaatacatgggaactataaaaattgttacagattcatcaataactattgaaccagaattaattaaagctttagatattactgtagtacctttatctgtcatgattgatagcaaattatattctgataatgatttaaaagaagaaggtcattttttgagccttatgaaggctagcaaatcccttcccaaaaccagtcagccaccggttggtctctttgctgaaacttacgaaaatttggtcaaaaaaggagtaactgacattgttgctattcacctctcaccagctttatcaggtactattgaagcttcccgtcagggggctgaaatcgctgaggcacctgttacagttttagattcaggatttactgatcaagccatgaaatttcaggtcgttgaggcagcaaagatggcaaaagcgggtgctagtttgaatgagattttggctgctgttcaagctatcaaatcaaaaacagagctctacattggtgtatctaccttagaaaatttagtaaaaggaggtcgtattggtcgtgtgacgggtgttttgagctcgctacttaatgtcaaagttgttatggcacttaaaaatgatgagttaaaaacgcttgtcaaaggtcgaggtaataaaacatttacgaaatggttagatagttacctcgctaaaaatagtcatcgcccgattgcagagatagctatttcttatgctggtgaagctagcctggcattaaccttaaaagaaagaatcgcagcttattacaaccactctatttcggttttagaaacaggctctatcatccaaacacatacaggagaaggagcttttgcggttatggttcgttatgaa

SEQ ID NO: 302 - protein, 283 aa, Streptococcus pyogenes
MEKYMGTIKIVTDSSITIEPELIKALDITVVPLSVMIDSKLYSDNDLKEEGHFLSLMKASKSLPKTSQPPVGLFAETYENLVKKGVTDIVAIHLSPALSGTIEASRQGAEIAEAPVTVLDSGFTDQAMKFQVVEAAKMAKAGASLNEILAAVQAIKSKTELYIGVSTLENLVKGGRIGRVTGVLSSLLNVKVVMALKNDELKTLVKGRGNKTFTKWLDSYLAKNSHRPIAEIAISYAGEASLALTLKERIAAYYNHSISVLETGSIIQTHTGEGAFAVMVRYE

SEQ ID NO: 303 - DNA, 867 bp, Streptococcus agalactiae
gtgaggatgcatttgctgttatggttcgttatgaataagaaaaaaatacttaccggactttctttttttctggtaagtcttcttttatcttttgggattttttccttgatcattccaaaatcaaatcctaaattaacaaaaaaagacttcctaacaaagaaagttatcccacttaactatgttgctcttggagattctctgaccgaaggtgtgggcgatacaacctctcaaggtggttttgttccactgctatcagaatcactccataatcgatactcttaccaagtgacttctgttaattatggtgtgtctgggaatactagtcaacaaattttaaaacgtatgacgacagatcctcaaatcgaaaaagatttagagaaagctgatttattgacgctaactgttggtggtaatgatgtcttggctgttattcgtaaagagctcagtcatttatcactaaattcctttgagaaaccagcagaagcatataaggaacgtttgaaagaaatccttgcaaaagcaagacaagataatcctaaattgcctatttatgttttaggcatttataatcctttttacctaaactttccacaattaactaaaatgcaaaccgttattgataattggaataaagctacaaaagaagtagttgatgcttcagaaaatgtttattttgtcccaattaatgaccgcctttataagggaataaatggtaaagagggtattacagagtcatcaaatagtcaggcaagtatcactaatgatgctctctttactggagaccattttcatcccaataatattggctatcaaatcatgtctaacgccgttatggagaaaataaatgaaacaagaaaaaactggccg

SEQ ID NO: 304 - protein, 289 aa, Streptococcus agalactiae
MRMHLLLWFVMNKKKILTGLSFFLVSLLLSFGIFSLIIPKSNPKLTKKDFLTKKVIPLNYVALGDSLTEGVGDTTSQGGFVPLLSESLHNRYSYQVTSVNYGVSGNTSQQILKRMTTDPQIEKDLEKADLLTLTVGGNDVLAVIRKELSHLSLNSFEKPAEAYKERLKEILAKARQDNPKLPIYVLGIYNPFYLNFPQLTKMQTVIDNWNKATKEVVDASENVYFVPINDRLYKGINGKEGITESSNSQASITNDALFTGDHFHPNNIGYQIMSNAVMEKINETRKNWP

SEQ ID NO: 305 - DNA, 858 bp, Streptococcus agalactiae
ttgcggttatggttcgttatgaataatcgtcatttatttagtgggatatttttctttgttattagtttatgtctggcctttttattgctaaatattattatccctaagtcaaattcacgtttgaaaaagagtgattttctgaaaaaagaacaagtagctatccaatatgttgctataggagattcattgacagaaggagtaggtgatctaactcatcaaggtggttttgttcctttgttaacgaatgatctcagtgaatattttaaggctaatgttaatcatcaaaattacggcgtatctggtgataccagtcaacaaattcttgataggatgataaaacaaaagcagatacagttatctttaaaaaaagcagatataatgacgttaaccgttggtggtaatgatgttatggcagttattcggaagaatttagcggatttgcaagtttctagttttagaaagccagctcgtcagtatcaaaaacgattaagacagattatcgagttagccagaaaagataataaagatcttcctatttttattttaggcatctataatccgttttatttgaattttccagaactaactgatatgcaaaaagtgattgatgactggaataccaaaactaaggaggttgttggagaatacgatcgtgtgtactttgtgccaataaatgacctcttgtataaagggataaatggacaagaaggaattgttcattcttcaggagatcaaactacaattgtcaatgatgccttgtttactggggaccattttcacccaaataatactggctatcaaatcatgtcaaatgcagtaatggagaaaattaaaaagcatgaaaaaaaaatcaaacct

SEQ ID NO: 306 - protein, 286 aa, Streptococcus agalactiae
LRLWFVMNNRHLFSGIFFFVISLCLAFLLLNIIIPKSNSRLKKSDFLKKEQVAIQYVAIGDSLTEGVGDLTHQGGFVPLLTNDLSEYFKANVNHQNYGVSGDTSQQILDRMIKQKQIQLSLKKADIMTLTVGGNDVMAVIRKNLADLQVSSFRKPARQYQKRLRQIIELARKDNKDLPIFILGIYNPFYLNFPELTDMQKVIDDWNTKTKEVVGEYDRVYFVPINDLLYKGINGQEGIVHSSGDQTTIVNDALFTGDHFHPNNTGYQIMSNAVMEKIKKHEKKIKP

SEQ ID NO: 307 - DNA, 600 bp, Streptococcus agalactiae
atgaaacaagaaaaaactggccgtaatttaaatttctggaaatgggcatttctcttattgttggcaattaacctttccttcacagcagtgattgcaagtcgcttaattcaagtacgtgagcctaatacaggaaaaatttcgactggggtacaagataaagtaaaagtaggtacttttacgaccaataagtcgcaactgaataagacaattgcactttatttaaaacaatatcaaactaagaagatgaattataagatttatgctgcttcatcttctatactatttgaaggctcttatcaattattaggttatgaagtgcctttatacatctattttgaaccttatcgtttaacaaatggcgctgttcaacttaaagtgacctcattttcagtaggaactcttccgcttccagaaaaagatgtgttacaatatataaaatcatcttataaattgccaaactttgtagatataaaacctaaaaaatcggttattaatattaatttgcaagatttaaaaaataaagaaggtatttatttgaaagcgactgcaattgatttagtaaacgataattttagtttcgatatttttaagaaaaagccc

SEQ ID NO: 308 - protein, 200 aa, Streptococcus agalactiae
MKQEKTGRNLNFWKWAFLLLLAINLSFTAVIASRLIQVREPNTGKISTGVQDKVKVGTFTTNKSQLNKTIALYLKQYQTKKMNYKIYAASSSILFEGSYQLLGYEVPLYIYFEPYRLTNGAVQLKVTSFSVGTLPLPEKDVLQYIKSSYKLPNFVDIKPKKSVININLQDLKNKEGIYLKATAIDLVNDNFSFDIFKKKP

SEQ ID NO: 309 - DNA, 585 bp, Streptococcus pyogenes
atgaaaaaaaaatcaaaccttaattggtggaagtggagcttcttatgtctgcttgcttttaataccgcctttttgatggttattgcaagtcgtctcattcaagtaagagaacctgagtcagaactgattgctaaaaaaccagttaaaaatatcaaaattggtacatttgttacaaccagagaacagcttaacgaaactgtagcaagttatcttaaagattatcagactgaaaaaatgtcttataaattttatgcgacatcttcttctattttgtttgaaggaacttatcaattattagggtatgaagtccctttatatatctattttcaacctcatcgtctagaaaatggagctgtccaactacaggtgatctctttttcagtgggaactctgccactcccagaaaaagatgttttgcagtatttgaaatcaagctacaaattgccaagctttgttaaagtgatgccaaatcaatcagctatcgttgttaatttacaagatatccaaaatgatgctaaggtttatttaaaagccaagaaaattgatttatttaatgatgaaatcagttttaacatctataagaaa

SEQ ID NO: 310 - protein, 195 aa, Streptococcus pyogenes
MKKKSNLNWWKWSFLCLLAFNTAFLMVIASRLIQVREPESELIAKKPVKNIKIGTFVTTREQLNETVASYLKDYQTEKMSYKFYATSSSILFEGTYQLLGYEVPLYIYFQPHRLENGAVQLQVISFSVGTLPLPEKDVLQYLKSSYKLPSFVKVMPNQSAIVVNLQDIQNDAKVYLKAKKIDLFNDEISFNIYKK

SEQ ID NO: 311 - DNA, 156 bp, Streptococcus agalactiae
  misc_feature (1)..(156): n = a, c, g, or t
atggctaacaaacaagatttaattgcaaaagtagcagaagctacagaattaactaaaaaagattcagcagcagcagtagatgcagtttttgcagctgtagcagattaccttgctgaaggtgaaaaagtacaattaatcggttnnnnnttaattaat

SEQ ID NO: 312 - protein, 52 aa, Streptococcus agalactiae
  MISC_FEATURE (1)..(52): Xaa = Any Amino Acid
MANKQDLIAKVAEATELTKKDSAAAVDAVFAAVADYLAEGEKVQLIGXXLIN

SEQ ID NO: 313 - DNA, 273 bp, Streptococcus pyogenes
atggctaacaaacaagatttaatcgcaaaggttgcagaagcaactgaattgactaaaaaagattcagcagcagcagttgatgccgtgttttctacaatcgaagctttccttgctgaaggtgaaaaagtacaattgatcggttttggtaacttcgaagtacgcgaacgtgcagctcgtaaaggtcgtaacccacaaactggtgcagaaattgaaattgcagcttcaaaagttccagccttcaaagctggtaaagctcttaaagacgctgttaaa

SEQ ID NO: 314 - protein, 91 aa, Streptococcus pyogenes
MANKQDLIAKVAEATELTKKDSAAAVDAVFSTIEAFLAEGEKVQLIGFGNFEVRERAARKGRNPQTGAEIEIAASKVPAFKAGKALKDAVK

SEQ ID NO: 315 - DNA, 1404 bp, Streptococcus agalactiae
ttggctactaaagtagatgtttcaaaagatggcttaacttatacagctacattacgtaaaggcttgaagtggtcagatggcagtaaacttactgcaaaggattttgtttattcatggcaacgtttagttgatcctaaaacagcttcacaatatgcttaccttgctgttgaagggcatgtgcttaatgccgataaaatcaacgaaggacaagagaaagacttgaataagctaggtgttaaggcggaaggcgatgacaaagttgttattactttatctagtccgtctccacaatttatctactaccttgcattcactaacttcatgccacaaaaacaagaagttgttgaaaaatatggaaaagattacgcaactacttcaaaaaatacagtttactcaggaccatatactgttgaaggttggaatggttcgaatggtactttcacgctgaagaaaaacaaaaattattgggacgctaaaaatgtaaaaacaaaagaagttcgcatccagactgttaaaaaaccagataccgccgttcaaatgtataaacgtggtgagttagatgcagctaatatctcaaatacttctgctatttatcaagctaataagaataataaagatgtcacagatgttctagaagcgaccactgcctatatggaatataatactactggttctgtgaaagggcttgataatgttaagattcgtcgcgccttaaacttagcaactaaccgtaaaggagttgttcaagcagccgttgatacaggctcaaaaccggcaattgcttttgcacctactggtttagccaaaacaccagatggaactgatttggcaaaatatgttgccccaggttatgaatataataaaactgaagcagcaaaactctttaaagaaggtttggctgaatcaggcttgactaagctaaaattaacaattacagcagatgctgatgctcctgctgccaaaaactctgttgactatatcaagtctacttgggaagctgctcttccaggacttactgttgaagaaaaatttgtaacctttaaacaacgcttagaagacagtagaaaacaaaactttgacatcgtagtttctctttggggtggggattatccagaaggatcaactttctacggcctctttaagtcagattcacaaaataacgatggaaaatttgctaacaaggactatgatgctgcttataacaaggcaatttctgaagatgcgatgaaaccagcagaatcagcgaaggactataaagaagcagagaaaattttatttgagcaaggtgcttataacccactctacttccgtagtggtaaaggtttacaaaatccaaaattaaaaggtgttattcgtaatactacaggtttgtcaatagactttacacatgcttataaaaataat

SEQ ID NO: 316 - protein, 468 aa, Streptococcus agalactiae
MATKVDVSKDGLTYTATLRKGLKWSDGSKLTAKDFVYSWQRLVDPKTASQYAYLAVEGHVLNADKINEGQEKDLNKLGVKAEGDDKVVITLSSPSPQFIYYLAFTNFMPQKQEVVEKYGKDYATTSKNTVYSGPYTVEGWNGSNGTFTLKKNKNYWDAKNVKTKEVRIQTVKKPDTAVQMYKRGELDAANISNTSAIYQANKNNKDVTDVLEATTAYMEYNTTGSVKGLDNVKIRRALNLATNRKGVVQAAVDTGSKPAIAFAPTGLAKTPDGTDLAKYVAPGYEYNKTEAAKLFKEGLAESGLTKLKLTITADADAPAAKNSVDYIKSTWEAALPGLTVEEKFVTFKQRLEDSRKQNFDIVVSLWGGDYPEGSTFYGLFKSDSQNNDGKFANKDYDAAYNKAISEDAMKPAESAKDYKEAEKILFEQGAYNPLYFRSGKGLQNPKLKGVIRNTTGLSIDFTHAYKNN

SEQ ID NO: 317 - DNA, 1977 bp, Streptococcus pyogenes
gtgacttttatgaagaaaagtaaatggttggcagctgtaagtgttgcgatcttgtcagtatccgctttggcagcttgtggtaataaaaatgcttcaggtggctcagaagctacaaaaacctacaagtacgtttttgttaacgatccaaaatcattggattatattttgactaatggcggtggaacgactgatgtgataacacaaatggttgatggtcttttggaaaacgatgagtatggtaatttagtaccatcacttgctaaagattggaaggtttcaaaagacggtctgacttatacttatactcttcgcgatggtgtctcttggtatacggctgatggtgaagaatatgccccagtaacagcagaagattttgtgactggtttgaagcacgcggttgacgataaatcagatgctctttacgttgttgaagattcaataaaaaacttaaaggcttaccaaaatggtgaagtagattttaaagaagttggtgtcaaagcccttgacgataaaactgttcagtatactttgaacaagcctgaaagctactggaattcaaaaacaacttatagtgtgcttttcccagttaatgcgaaatttttgaagtcaaaaggtaaagattttggtacaaccgatccatcatcaatccttgttaatggtgcttacttcttgagcgccttcacctcaaaatcatctatggaattccataaaaatgaaaactactgggatgctaagaatgttgggatagaatctgttaaattgacttactcagatggttcagacccaggttcgttctacaagaactttgacaagggtgagttcagcgttgcacgactttacccaaatgaccctacctacaaatcagctaagaaaaactatgctgataacattacttacggaatgttgactggagatatccgtcatttaacatggaatttgaaccgtacttctttcaaaaacactaagaaagaccctgcacaacaagatgccggtaagaaagctcttaacaacaaggattttcgtcaagctattcagtttgcttttgaccgagcgtcattccaagcacaaactgcaggtcaagatgccaaaacaaaagccttacgtaacatgcttgtcccaccaacatttgtgaccattggagaaagtgattttggttcagaagttgaaaaggaaatggcaaaacttggtgatgaatggaaagacgttaacttagctgatgctcaagatggtttctataatcctgaaaaagcaaaagctgagtttgcaaaagccaaagaagctttaacagctgaaggtgtaaccttcccagttcaattagattaccctgttgaccaagcaaacgcagcaactgttcaggaagcccagtctttcaaacaatctgttgaagcatctcttggtaaagagaatgtcattgtcaatgttcttgaaacagaaacatcaactcacgaagcccaaggcttctatgctgagaccccagaacaacaagactacgatatcatttcatcatggtggggaccagactatcaagatccacggacctaccttgacatcatgagtccagtaggtggtggatctgttatccaaaaacttggaatcaaagcaggtcaaaataaggatgttgtggcagctgcaggccttgatacctaccaaactcttcttgatgaagcagcagcaattacagacgacaacgatgcgcgctataaagcttacgcaaaagcacaagcctaccttacagataatgccgtagatattccagttgtggcattgggtggcactccacgagttactaaagccgttccatttagcgggggcttctcttgggcagggtctaaaggtcctctagcatataaaggaatgaaacttcaagacaaacctgtcacagtaaaacaatacgaaaaagcaaaagaaaaatggatgaaagcaaaggctaagtcaaatgcaaaatatgctgagaagttagctgatcacgttgaaaaa

SEQ ID NO: 318 - protein, 659 aa, Streptococcus agalactiae
VTFMKKSKWLAAVSVAILSVSALAACGNKNASGGSEATKTYKYVFVNDPKSLDYILTNGGGTTDVITQMVDGLLENDEYGNLVPSLAKDWKVSKDGLTYTYTLRDGVSWYTADGEEYAPVTAEDFVTGLKHAVDDKSDALYVVEDSIKNLKAYQNGEVDFKEVGVKALDDKTVQYTLNKPESYWNSKTTYSVLFPVNAKFLKSKGKDFGTTDPSSILVNGAYFLSAFTSKSSMEFHKNENYWDAKNVGIESVKLTYSDGSDPGSFYKNFDKGEFSVARLYPNDPTYKSAKKNYADNITYGMLTGDIRHLTWNLNRTSFKNTKKDPAQQDAGKKALNNKDFRQAIQFAFDRASFQAQTAGQDAKTKALRNMLVPPTFVTIGESDFGSEVEKEMAKLGDEWKDVNLADAQDGFYNPEKAKAEFAKAKEALTAEGVTFPVQLDYPVDQANAATVQEAQSFKQSVEASLGKENVIVNVLETETSTHEAQGFYAETPEQQDYDIISSWWGPDYQDPRTYLDIMSPVGGGSVIQKLGIKAGQNKDVVAAAGLDTYQTLLDEAAAITDDNDARYKAYAKAQAYLTDNAVDIPVVALGGTPRVTKAVPFSGGFSWAGSKGPLAYKGMKLQDKPVTVKQYEKAKEKWMKAKAKSNAKYAEKLADHVEK

SEQ ID NO: 319 - DNA, 948 bp, Streptococcus agalactiae
ttgctatttttagcaattctaagaaaaggaaatgatatgattaaatatattttaaagcgtgttgctattttgttagtaacgctatgggttgtcataaccctatcgttctttctgatgcagatccttccaggaacaccctacaataatccaaaactcactgaagaaatgatcgcattgcttaataaacagtatggtttagacaagcctgtatggcaacaatatttgacttacctttggaatgtacttcatggtgactttggaacgagttatcaatcagtgaatcagccagtatcacgtatgattagcttgagattaggagtttcagtacatctaggtgttcaggctctcgtatttggtgttttaggcggtattttggtaggagctatttcggcacgtcataagaatgataaagtcgatggtatcttaagtgttattgcaacgctagggatttctatgccttcatttatcattggtatcttattattagactattttggatttaagtggaacttgttgcctttatcaggttgggggactttctctcaaaccattttaccttctttagctctaggactccctacattagcatctgtttcacgcttcttccgtagtgaaatgattgaaactttaaattctgattatgtgcaactagctcgttcaaaaggtatgacaattcgtcaagtaactcgaaaacatgcttaccgtaattctatgattccaattttaactctaattggccctttggcggcgggtctgttaactggttctgcactaattgagcagattttctcgattccaggaattgggcagcagtttgttacttcgattccaacaaaagactatcctgttattatggggacaaccattgtttatgcagtaatgttgatggttgctatcttgataacagacgttgttattagtatcgtagacccacgtgttcgcttgcag

SEQ ID NO: 320 - protein, 316 aa, Streptococcus agalactiae
MLFLAILRKGNDMIKYILKRVAILLVTLWVVITLSFFLMQILPGTPYNNPKLTEEMIALLNKQYGLDKPVWQQYLTYLWNVLHGDFGTSYQSVNQPVSRMISLRLGVSVHLGVQALVFGVLGGILVGAISARHKNDKVDGILSVIATLGISMPSFIIGILLLDYFGFKWNLLPLSGWGTFSQTILPSLALGLPTLASVSRFFRSEMIETLNSDYVQLARSKGMTIRQVTRKHAYRNSMIPILTLIGPLAAGLLTGSALIEQIFSIPGIGQQFVTSIPTKDYPVIMGTTIVYAVMLMVAILITDVVISIVDPRVRLQ

SEQ ID NO: 321 - DNA, 1029 bp, Streptococcus agalactiae
atggcagataaaaacagaacatttaaacttgtaggtgcaggatcttctagcacacaagaaaaaattgaaaagcctgctctttcgtttatgcaagatgcgtggcgtcgcttgaaaaaaaacaaattagcagtagtttcactctatttattagctcttttacttactttttcgttagcctcaaatttatttgtaactcagaaggatgctaatgggtttgattcgaaaaaagtaactacatatcgcaacttaccacctaaattgagttcaaaccttcctttttggaatggtagcattaagtacgctggaaatacagaatctacagacgcttataagtctcaaaatgtccctgaaaaagttaagtatgctttaggtacagattctctagggagaagtgttgctaagcgcatcatcgtaggtattcggatttccttacttgtagctattgcagctacattcattgatttaattatcggtgttacatacggtcttgtttcaggttttgctggaggacgccttgatacattaatgcaacgtatcgtagaggtaatttcatcaattccaaacttagttatcgttacaatgttaggtttggtccttggtaacggtattacggctattattatctctattgcttttaccggatggacttctatgtctcgtcaggtaaggaatttaaccctatcatatcgagaaagagagtttgtgcttgctgcacgttcacttggggaaagtccaattaaaatagccttcaaacatattttacctaacatttctggtattatcattgtacaaattatgatgacaatcccaagtgctattatgtatgaagcggtactttcagcaatcaatttaggtgttaaaccaccgacagcttcattaggatcattgatttcagatgcacaagaaaatttacaatattatccatatcaagttatcttgccagctttagcattggtaatgatttcattggcatttattttgcttggtgatgggttgcgagatgcttttgatccaaaatctagcgatgaa

SEQ ID NO: 322 - protein, 343 aa, Streptococcus agalactiae
MADKNRTFKLVGAGSSSTQEKIEKPALSFMQDAWRRLKKNKLAVVSLYLLALLLTFSLASNLFVTQKDANGFDSKKVTTYRNLPPKLSSNLPFWNGSIKYAGNTESTDAYKSQNVPEKVKYALGTDSLGRSVAKRIIVGIRISLLVAIAATFIDLIIGVTYGLVSGFAGGRLDTLMQRIVEVISSIPNLVIVTMLGLVLGNGITAIIISIAFTGWTSMSRQVRNLTLSYREREFVLAARSLGESPIKIAFKHILPNISGIIIVQIMMTIPSAIMYEAVLSAINLGVKPPTASLGSLISDAQENLQYYPYQVILPALALVMISLAFILLGDGLRDAFDPKSSDE

SEQ ID NO: 323 - DNA, 924 bp, Streptococcus pyogenes
atggaatcgattgataaatctaaatttcgatttgttgagcgcgatagtgaagcctccgaagtgattgatacccctgcttattcttactggaaatcagtgtttcgtcagtttttttctaaaaaatctacagtctttatgctcgtaattttagtgacagtcttgatgatgagctttatttatccaatgtttgccaactacgactttaatgacgttagtaatatcaatgacttttcaaagcgttatatttggccaaatgcagagtactggtttggaaccgacaaaaatgggcaatctctgtttgatggtgtttggtatggggcacgtaattctattttaatctcagttatagcgacactaattaatatcaccattggggtagtgttaggagccatatggggagtttctaaagcatttgataaagttatgattgaaatttataacattatctcaaatatcccttctatgcttattatcattgttttgacctattcattaggtgcaggattttggaatttgattctagctttctgtatcactggatggattggtgtcgcctactccatccgtgttcaaatcttgcgttaccgtgatttagaatacaaccttgctagtcaaactttgggaacaccaatgtacaagattgctgttaagaacctcctgcctcaattggtttcagttatcatgactatgttgtcacaaatgctaccagtttatgtatcttctgaggccttcttatccttctttgggattggtttaccaaccaccactccaagtttaggacgttttattgctaattattcaagcaacttaacaacaaatgcctacctcttttggattcccttagtaacattgattttagtatcgttaccactatacattgtcggacaaaacttggctgatgccagtgacccacgttcacataga

SEQ ID NO: 324 - protein, 308 aa, Streptococcus pyogenes
MESIDKSKFRFVERDSEASEVIDTPAYSYWKSVFRQFFSKKSTVFMLVILVTVLMMSFIYPMFANYDFNDVSNINDFSKRYIWPNAEYWFGTDKNGQSLFDGVWYGARNSILISVIATLINITIGVVLGAIWGVSKAFDKVMIEIYNIISNIPSMLIIIVLTYSLGAGFWNLILAFCITGWIGVAYSIRVQILRYRDLEYNLASQTLGTPMYKIAVKNLLPQLVSVIMTMLSQMLPVYVSSEAFLSFFGIGLPTTTPSLGRFIANYSSNLTTNAYLFWIPLVTLILVSLPLYIVGQNLADASDPRSHR

SEQ ID NO: 325 - DNA, 1044 bp, Streptococcus agalactiae
atggaaaaagaaactattttaagtgttaataatcttcatgttgacttccacacatatgctggagaagtaaaagcaattcgtgatgtcaactttgaattaaaaaaaggtgagactcttgcaatcgttggtgaatctggttcaggaaaatctgtaactaccagaactttaattggtttaaatgctaaaaattcagagatatcagggaatgttcaatttaaggggcgtaaccttgttgaactatcagaagaagagtggactaaggtacgcgggaatgagatttctatgattttccaagaccctatgactagtttggatccaacgatgaaaattggcatgcaaatagcagaaccaatgatgattcatcaaaaaatttcaaaaaaggatgctttaaaattagctcttgagctaatgaaagatgtaggtatcccaaatgctgaagagcatattaatgattacccacatcagtggtctggaggaatgcgccaacgtgcggttatagcgattgctttagctgctgatcctgaaattcttattgctgatgaaccaacgactgctttagatgtaacaattcaagcacaaattttgaacttaatgaaaaaaattcaagcagaacgagactcctccattgttttcataactcatgacttaggggtcgttgcagggatggcagaccgtgtagcagttatgtatgcagggaaaattgttgaatttggaactgttgatgaagtcttttataatccacaacatccatatacttggggattattgaattcaatgccgacaaccgacacagaatcaggtagtttagagtcaattccgggaacaccaccagatttgttgaacccacctaaaggagatgcatttgcagctcgtaatgaatttgcattagatattgatcatgaagaagaaccaccgtacttcaaagtttcagaaacacatttcgctgctacatggcttttagatgaaagatcacctaaggtgcttcctccattaccgatccaaaaacgttgggaaaaatggaacgagattgaagggaggaaagcc

SEQ ID NO: 326 - protein, 348 aa, Streptococcus agalactiae
MEKETILSVNNLHVDFHTYAGEVKAIRDVNFELKKGETLAIVGESGSGKSVTTRTLIGLNAKNSEISGNVQFKGRNLVELSEEEWTKVRGNEISMIFQDPMTSLDPTMKIGMQIAEPMMIHQKISKKDALKLALELMKDVGIPNAEEHINDYPHQWSGGMRQRAVIAIALAADPEILIADEPTTALDVTIQAQILNLMKKIQAERDSSIVFITHDLGVVAGMADRVAVMYAGKIVEFGTVDEVFYNPQHPYTWGLLNSMPTTDTESGSLESIPGTPPDLLNPPKGDAFAARNEFALDIDHEEEPPYFKVSETHFAATWLLDERSPKVLPPLPIQKRWEKWNEIEGRKA

SEQ ID NO: 327 - DNA, 930 bp, Streptococcus agalactiae
atgactgaaaatcgaaaaaaattagttgaagtcaaaaatgtttctttgaccttcaataaaggaaaagctaatgaagtgagagcaattgataatgttagttttgacatttatgaaggtgaagtgtttggattagttggggaatctggatcaggaaagacaaccgttggacgttcaattttaaaactttatgatatttctgatggagaaattacctttaatggagaagtgatctcacatctgaaaggtaaagcattacatagttttcgtaaagacgctcagatgatttttcaggatcctcaggctagcttaaacggccgtatgaagattcgtgatatcgtagcagaaggtttagatatacataaattagctaaatcaaaatcagatcgtgatagtaaagttcaggccctattagatcttgtagggttaaataaagatcatttaacacgttatccgcatgaattttcaggtggacaacgacaacgtatcgggattgcacgtgctttagcagtagagcctaaatttatcattgctgatgaaccaatatctgccttagatgtttcaatccaagcacaagttgttaatttaatgcaaaaattgcaaagagaacaaggattgacttatttgtttatcgcacatgatttgtctatggtaaaatacatttcagatcgtatcggtgttatgcattgggggaaactgttagaagttggaacatctgatgatgtttataacaatccaatccacccttatacgaagagtctattatcagctattccagaaccagatccggagagtgaacgtcaacgtgttcaccagccgtataatccagctattgagcaagacggacaagaacgtcaaatgcacgagattacccctggtcattttgttttatctacaccccaagaagctgaagaatataaaaaacaaatatta

SEQ ID NO: 328 - protein, 310 aa, Streptococcus agalactiae
MTENRKKLVEVKNVSLTFNKGKANEVRAIDNVSFDIYEGEVFGLVGESGSGKTTVGRSILKLYDISDGEITFNGEVISHLKGKALHSFRKDAQMIFQDPQASLNGRMKIRDIVAEGLDIHKLAKSKSDRDSKVQALLDLVGLNKDHLTRYPHEFSGGQRQRIGIARALAVEPKFIIADEPISALDVSIQAQVVNLMQKLQREQGLTYLFIAHDLSMVKYISDRIGVMHWGKLLEVGTSDDVYNNPIHPYTKSLLSAIPEPDPESERQRVHQPYNPAIEQDGQERQMHEITPGHFVLSTPQEAEEYKKQIL

SEQ ID NO: 329 - DNA, 921 bp, Streptococcus pyogenes
atgtctgagaaattagtcgaagtaaaagacctagaaatttccttcggagaaggaaagaaaaaatttgttgcagttaaaaatgctaatttctttattaaaaaaggagaaaccttttctttagttggagaatctgggagtggtaaaacaacaattggtcgtgctattattggtttgaacgatactagttcaggtcaaattttatacgatgggaaagtaattaatggcagaaaatcaaaatcagaagccaatgagctcattcgtaaaattcaaatgattttccaagatcccgctgctagtttgaatgaacgggcaaccgttgactacatcatttcagaaggtctttataactttaatctgtttaaaacagaggaagaacgtaaagaaaaaattaagaacatgatggccgaagttggtttgctatcagagcatttgacgcgctaccctcatgaattttcaggaggtcaacgtcagcggatcggtatcgctagagccctagtaatgaaccctgaattcgttattgctgatgaaccgatttcagctttggacgtttccgttcgcgcacaggtcttgaatcttcttaaaagaatgcaagccgaaaaaggtttgacttatctcttcattgcccatgatctttcagtcgttcgctttatttcagatcgtattgcggttatccataaaggggttattgtagaagttgcagaaacagaagaactgtttaataacccaattcatccctacacccaatctttgttatcagccgtgcctatcccagatccaattttagagcgtcaaaaagaacttgttgtctatcatccagaccaacatgattatacattagataagccatcaatggttgaaatcaaaccaaatcactttgtttgggcaaaccaagcagaaattgaaaaatatcaaaaagaattg

SEQ ID NO: 330 - protein, 307 aa, Streptococcus pyogenes
MSEKLVEVKDLEISFGEGKKKFVAVKNANFFIKKGETFSLVGESGSGKTTIGRAIIGLNDTSSGQILYDGKVINGRKSKSEANELIRKIQMIFQDPAASLNERATVDYIISEGLYNFNLFKTEEERKEKIKNMMAEVGLLSEHLTRYPHEFSGGQRQRIGIARALVMNPEFVIADEPISALDVSVRAQVLNLLKRMQAEKGLTYLFIAHDLSVVRFISDRIAVIHKGVIVEVAETEELFNNPIHPYTQSLLSAVPIPDPILERQKELVVYHPDQHDYTLDKPSMVEIKPNHFVWANQAEIEKYQKEL

SEQ ID NO: 331 - DNA, 102 bp, Streptococcus agalactiae
atgacaaaaaacaataaatctgtcagcgagacagaaaagagcaaagctcaaacttttaatgagagtttgatcctggctcaggacgaacgctggcggcgtgcc

SEQ ID NO: 332 - protein, 34 aa, Streptococcus agalactiae
MTKNNKSVSETEKSKAQTFNESLILAQDERWRRA

SEQ ID NO: 333 - DNA, 141 bp, Streptococcus agalactiae
gtgacggtaactaaccagaaagggacggctaactacgtgccagcagccgcggtaatacgtaggtcccgagcgttgtccggatttattgggcgtaaagcgagcgcaggcggttctttaagtctgaagttaaaggcagtggct

SEQ ID NO: 334 - protein, 47 aa, Streptococcus agalactiae
MTVTNQKGTANYVPAAAVIRRSRALSGFIGRKASAGGSLSLKLKAVA

SEQ ID NO: 335 - DNA, 120 bp, Streptococcus agalactiae
ttgtacgctttggaaactggaggacttgagtgcagaaggggagagtggaattccatgtgtagcggtgaaatgcgtagatatatggaggaacaccggtggcgaaagcggctctctggtctg

SEQ ID NO: 336 - protein, 40 aa, Streptococcus agalactiae
MYALETGGLECRRGEWNSMCSGEMRRYMEEHRWRKRLSGL

SEQ ID NO: 337 - DNA, 105 bp, Streptococcus agalactiae
gtggcgaaagcggctctctggtctgtaactgacgctgaggctcgaaagcgtggggagcaaacaggattagataccctggtagtccacgccgtaaacgatgagtgc

SEQ ID NO: 338 - protein, 35 aa, Streptococcus agalactiae
MAKAALWSVTDAEARKRGEQTGLDTLVVHAVNDEC

SEQ ID NO: 339 - DNA, 99 bp, Streptococcus agalactiae
gtgctaggtgttaggccctttccggggcttagtgccgcagctaacgcattaagcactccgcctggggagtacgaccgcaaggttgaaactcaaaggaat

SEQ ID NO: 340 - protein, 33 aa, Streptococcus agalactiae
MLGVRPFPGLSAAANALSTPPGEYDRKVETQRN

SEQ ID NO: 341 - DNA, 99 bp, Streptococcus agalactiae
ttgaaactcaaaggaattgacgggggcccgcacaagcggtggagcatgtggtttaattcgaagcaacgcgaagaaccttaccaggtcttgacatccttc

SEQ ID NO: 342 - protein, 33 aa, Streptococcus agalactiae
MKLKGIDGGPHKRWSMWFNSKQREEPYQVLTSF

SEQ ID NO: 343 - DNA, 159 bp, Streptococcus agalactiae
ttgttagttgccatcattaagttgggcactctagcgagactgccggtaataaaccggaggaaggtggggatgacgtcaaatcatcatgccccttatgacctgggctacacacgtgctacaatggttggtacaacgagtcgcaagccggtgacggcaagc

SEQ ID NO: 344 - protein, 53 aa, Streptococcus agalactiae
MLVAIIKLGTLARLPVINRRKVGMTSNHHAPYDLGYTRATMVGTTSRKPVTAS

SEQ ID NO: 345 - DNA, 171 bp, Streptococcus agalactiae
ttgtttagttttgagaggtcttgtggggccttagctcagctgggagagcgcctgctttgcacgcaggaggtcagcggttcgatcccgctaggctccattgaatcgaaaggttcaaattgttcattgaaaattgaatatctatatcaaattccacgatctagaaatagattg

SEQ ID NO: 346 - protein, 57 aa, Streptococcus agalactiae
MFSFERSCGALAQLGERLLCTQEVSGSIPLGSIESKGSNCSLKIEYLYQIPRSRNRL

SEQ ID NO: 347 - DNA, 849 bp, Streptococcus agalactiae
atgaaaatttttgagaaagctcctgccaaacttaatttaggattagatattaaaggacgatgtgacgatggttatcatgaattagctatgattatggttagtattgatcttaatgactacgttaccatttctgagctaaaggaagattgtattgttatcgattctgatagtagcaaaatgcctttaaataatgataatgatgtgtttaaagctgcagatataatcaaaaatcaatatggtattaataaaggtgttcatattagattagaaaaatccattcctgtctgtgcaggactggggggtggttctactgatgctgctgctacaataagagctcttaatcgattatggaatcttcaaatggactatgacgaaatggttgctattggttttaaaattggtagtgatgttccttattgtcttggtgggggatgttcgttagtattaggtaaaggtgaaattgttaaacccttaccgacattgagaccatgttggatagttctggttaagccggattttggtatttcaactaaatccatttttagagatattgattgtaagtctataagtagagttgatattgatttattaaagtctgctattttgtcatcagattatcagttaatggtcaaatctatgggaaattcactcgaggatattacaattactaaaaatccagttataagtacaataaaagaacgtatgttaaattctggagccgatgttgcattaatgacaggaagtggaccaactgttttttcaatgtgttctacagagaaaaaagctgatcgtgtttttaatagtatgaaaggtttttgcaaagaagtttataaagttaggttgttgaga

SEQ ID NO: 348 - protein, 283 aa, Streptococcus agalactiae
MKIFEKAPAKLNLGLDIKGRCDDGYHELAMIMVSIDLNDYVTISELKEDCIVIDSDSSKMPLNNDNDVFKAADIIKNQYGINKGVHIRLEKSIPVCAGLGGGSTDAAATIRALNRLWNLQMDYDEMVAIGFKIGSDVPYCLGGGCSLVLGKGEIVKPLPTLRPCWIVLVKPDFGISTKSIFRDIDCKSISRVDIDLLKSAILSSDYQLMVKSMGNSLEDITITKNPVISTIKERMLNSGADVALMTGSGPTVFSMCSTEKKADRVFNSMKGFCKEVYKVRLLR

SEQ ID NO: 349 - DNA, 156 bp, Streptococcus pyogenes
atgatggatattggtataccgattggtagtgatgtgccttattgcttgctttcaggttgtgcccaagtcactggtaaaggtgaagtggtttgtcgcattttggggctgttatcgtcttgggtggttttggttaaaccagattttggtatctcgact

SEQ ID NO: 350 - protein, 52 aa, Streptococcus pyogenes
MMDIGIPIGSDVPYCLLSGCAQVTGKGEVVCRILGLLSSWVVLVKPDFGIST

SEQ ID NO: 351 - DNA, 441 bp, Streptococcus agalactiae
atgacagttttagaacaaaaattagaccatttagtgagtcaaatcttgcttaaagcagaaaatcaacatgaattattgtttggtacttgtcaaagtgatgttaaattgactaatacgcaagaacacattctgatgcttttatcacaagagcagttgacaaattctgatttagctaagaagttaaatattagtcaggcagctgtaactaaagcagtaaaaagtttaatttctcaggatatgttgaaagcgaataaagattctaaagatgctcgtattacttattttgagttatctgaacttgctaaacccattgcagatgaacacacacatcatcatgacaatacgttaggggtttacggaagattagtaaatcatttttcaaaggacgaaaaggtcgttttagaacgttttcttgatcttttctctagagaattagaaggg

SEQ ID NO: 352 - protein, 147 aa, Streptococcus agalactiae
MTVLEQKLDHLVSQILLKAENQHELLFGTCQSDVKLTNTQEHILMLLSQEQLTNSDLAKKLNISQAAVTKAVKSLISQDMLKANKDSKDARITYFELSELAKPIADEHTHHHDNTLGVYGRLVNHFSKDEKVVLERFLDLFSRELEG

SEQ ID NO: 353 - DNA, 441 bp, Streptococcus pyogenes
atggggattttagaaaaaaaacttgataacttagtaaatactattttattaaaagcagaaaatcagcatgagttattatttggagcttgtcaaagtgacgttaagcttactaatacgcaagaacatattttaatgttactatctcagcaacgtctcactaatacagatttggctaaggcattaaatattagtcaggcggcagtaactaaggctatcaagagtttggtcaaacaagacatgttagcaggaactaaggatacggttgatgctagggtgacttattttgaattaaccgagttagctaagcctattgcgtcagaacatacccatcatcatgatgaaaccttaaatgtttacaaccgtttattacaaaaattctccgcgaaagaattagagattgtagataagtttgtaacagtttttgctgaggaattagaaggg

SEQ ID NO: 354 - protein, 147 aa, Streptococcus pyogenes
MGILEKKLDNLVNTILLKAENQHELLFGACQSDVKLTNTQEHILMLLSQQRLTNTDLAKALNISQAAVTKAIKSLVKQDMLAGTKDTVDARVTYFELTELAKPIASEHTHHHDETLNVYNRLLQKFSAKELEIVDKFVTVFAEELEG

SEQ ID NO: 355 - DNA, 708 bp, Streptococcus agalactiae
atgcgatatattacagttagtggtcttacttttcagtacgatagcgatcctgtgctggaaggggttaattaccatttagacagtggggagtttgttaccttaacaggtgaaaatggggctgctaaatcaactttaataaaggctactttaggtattttaacgcccaaagtgggtacagttaatatctctaaagaaaacaaagaaggaaaaaaattacgtattgcctatttacctcaacagattgcaagttttaacgctggctttccatcgtcagtttatgaatttgtgaaatctggacgataccctagaaatggttggtttagaagactgactaaacatgatgaagaacatattagggttagtttagaagctgttggtatgtgggataatcgccataaaaagataggaagtttatctggcggtcaaaagcagagggctgtcattgctaggatgtttgcttctgatccagatatttttgtattggatgagccaacaactggtatggacgcagggactactgagaaattttatgagttaatgcatcataatgctcataagcatggtaagtctgttttgatgattactcacgatcctgatgaagtaaaggggtatgctgaccgaaatattcatcttgttaggaaccaatctttaccatggcgttgtttcaatgtccatacaaacgaaatggaggttgaatcagatgctact

SEQ ID NO: 356 - protein, 236 aa, Streptococcus agalactiae
MRYITVSGLTFQYDSDPVLEGVNYHLDSGEFVTLTGENGAAKSTLIKATLGILTPKVGTVNISKENKEGKKLRIAYLPQQIASFNAGFPSSVYEFVKSGRYPRNGWFRRLTKHDEEHIRVSLEAVGMWDNRHKKIGSLSGGQKQRAVIARMFASDPDIFVLDEPTTGMDAGTTEKFYELMHHNAHKHGKSVLMITHDPDEVKGYADRNIHLVRNQSLPWRCFNVHTNEMEVESDAT

SEQ ID NO: 357 - DNA, 717 bp, Streptococcus pyogenes
atgagatacatatcagtgaaaaatctctcctttcaatatgaaagtgagccagttttagaagggatcacttatcatttagatagtggagaatttgtcaccatgaccggtgaaaatggtgctgcaaagtcaaccttaataaaagcaaccttaggaattttacaaccaaaggctggacgagttactattgctaaaaaaaataaagacggtaaacaattaagaattgcttacttgccgcagcaagtagctagctttaacgctggttttccatccaccgtttacgagtttgtcaaatcaggtcgctacccacgtagtggttggtttagacatttgaacaaacacgatgaagagcatgtgcaagcaagcttagaagcagtcggcatgtgggaaaaccgtcataagagaattggtagtttatcaggtggtcaaaaacaacgtgtggttattgcccgtatgtttgcttctgaccctgatatttttgtgctagacgagccaacaacgggaatggatagcggtactactgataccttttatgaactgatgcaccacagtgcacatcaacatgggaaatccgttctgatgattacccatgacccagaagaagtgaaggcttatgctgatcggaacattcatttagtcagaaaccaaaaacttccttggcgttgtttcaacattcatgaagctgaaacagatgacgaaaaaggaggtcatggtcatgct

SEQ ID NO: 358 - protein, 239 aa, Streptococcus pyogenes
MRYISVKNLSFQYESEPVLEGITYHLDSGEFVTMTGENGAAKSTLIKATLGILQPKAGRVTIAKKNKDGKQLRIAYLPQQVASFNAGFPSTVYEFVKSGRYPRSGWFRHLNKHDEEHVQASLEAVGMWENRHKRIGSLSGGQKQRVVIARMFASDPDIFVLDEPTTGMDSGTTDTFYELMHHSAHQHGKSVLMITHDPEEVKAYADRNIHLVRNQKLPWRCFNIHEAETDDEKGGHGHA

SEQ ID NO: 359 - DNA, 117 bp, Streptococcus agalactiae
ttgtatacagtacgcaaatactctaatacaactgccgccaaagtaacaacgaaaatagttgaccatgtaggcgagatacctaaaacaacgcctaatgcaacaccggctaaggaaacg

SEQ ID NO: 360 - protein, 39 aa, Streptococcus agalactiae
MYTVRKYSNTTAAKVTTKIVDHVGEIPKTTPNATPAKET

SEQ ID NO: 361 - DNA, 843 bp, Streptococcus agalactiae
atgtccatacaaacgaaatggaggttgaatcagatgctacttgatatgctttcctatgattttatgcaacgagcgctcttagcagttgtggctattagtatttttgctccaattttaggcatcttcctaattttacgtcgtcagagtttgatgagtgatactttgagtcacgtttccttagccggtgttgcattaggcgttgttttaggtatctcgcctacatggtcaactattttcgttgttactttggcggcagttgtattagagtatttgcgtactgtatacaaacattatatggaaatatcaactgctatcctgatgtcgatggggttggctatatctttaatcgttatgagtaaagctcataatgttggtaatgtcagtcttgaacagtatttatttggttctattattactattgggaaggaacaagtgattgctttgtttgttattgcattaatcacttttattttaaccatcctatttattagaccaatgtatatattaacgtttgatgaggatacagcttttgtagatggattgcctgtgcgtacaatgtctattttgttcaatgttgttacaggtattgctattgcattaacaattcctgccgcaggtgctctattggtgtcaactattatggttttaccagctagtattgctatgcggttaggtcgaaattttaaaactgttatttttctgggtatgttaattggatttgtgggaatggtagctggtattttcctttcgtattattgggagacacctgctagtgcaacaataacgatgatttttattggcattttcctattagttagcttagtaggcttgcttcgcaaacgt

SEQ ID NO: 362 - protein, 281 aa, Streptococcus agalactiae
MSIQTKWRLNQMLLDMLSYDFMQRALLAVVAISIFAPILGIFLILRRQSLMSDTLSHVSLAGVALGVVLGISPTWSTIFVVTLAAVVLEYLRTVYKHYMEISTAILMSMGLAISLIVMSKAHNVGNVSLEQYLFGSIITIGKEQVIALFVIALITFILTILFIRPMYILTFDEDTAFVDGLPVRTMSILFNVVTGIAIALTIPAAGALLVSTIMVLPASIAMRLGRNFKTVIFLGMLIGFVGMVAGIFLSYYWETPASATITMIFIGIFLLVSLVGLLRKR

SEQ ID NO: 363 - DNA, 819 bp, Streptococcus pyogenes
atggtcatgcttgatattttattctatgatttcatgcaacgggcggtaatggcggtagttgccattagtatttttgctccgattttaggtattttccttattttacgtcgtcaaagtttgatgagcgatacccttagtcatgtttctttggctggggtagcgcttggggtagtccttggtatttcaccaaccatcactactattattgttgtggttttagctgctattttgttagaatacctgcgtgtagtttacaaacactacatggagatttcaacggcgattttgatgtcacttggcttggccctatctctgattattatgagtaagtcgcatagttcatcaagcatgagtttagaacaatacctttttggatcgatcatcacgattagtatggaacaagttgtcgccttgtttgctattgctgcgattattttaatcttgaccgttctcttcattagaccgatgtacattctgacctttgatgaagatactgcttttgtagatggtttgcccgttcgcttgatgtctgttctattcaatatcgtcactggggttgctattgctttgaccattccagcagcaggagcacttttggtttctaccattatggtcttgccagcaagtatcgcaatgagattgggtaaaaactttaaaacagttatcttactgggaattgtcatcggttttagcggtatgttatctggtattttcttatcttatttctttgaaacgccagctagtgccactattaccatgattttcattagtattttcctcttagttagtctaggtggaatgcttaaaaaacggttattt

SEQ ID NO: 364 - protein, 273 aa, Streptococcus pyogenes
MVMLDILFYDFMQRAVMAVVAISIFAPILGIFLILRRQSLMSDTLSHVSLAGVALGVVLGISPTITTIIVVVLAAILLEYLRVVYKHYMEISTAILMSLGLALSLIIMSKSHSSSSMSLEQYLFGSIITISMEQVVALFAIAAIILILTVLFIRPMYILTFDEDTAFVDGLPVRLMSVLFNIVTGVAIALTIPAAGALLVSTIMVLPASIAMRLGKNFKTVILLGIVIGFSGMLSGIFLSYFFETPASATITMIFISIFLLVSLGGMLKKRLF

SEQ ID NO: 365 - DNA, 501 bp, Streptococcus agalactiae
gtgactccaatatacgaaggaaataatttagtacctagccgagttgaacttcagtatgttggaattgataaacaaggaaaacttctagaaatcaaattaggcggcggcaaagaacaagttgatgaatacggcgtcacaactgttacattagaaaatacgtctccactcgcaaaaattgattacaaaactggtatgctaatcaaagaagatgggaaacaggcagaagaaggtgaagatccaaatagcgatgctgatgaaaacgaagcagctattgaaagtgcatctgatatagaagaaaatactaacactaatacttctgaatcagatacaaataatgtagctccccaaaatagaatcgtctacgttgcaaataagggtcgttcaaatacttattggtatagtttagaaaacataaaaaatgcaaataccgctaatatcgttcaaatgactgaacaagaagcgttaaatcaacacaaacatcacagcactactgaagcacaa

SEQ ID NO: 366 - protein, 167 aa, Streptococcus agalactiae
MTPIYEGNNLVPSRVELQYVGIDKQGKLLEIKLGGGKEQVDEYGVTTVTLENTSPLAKIDYKTGMLIKEDGKQAEEGEDPNSDADENEAAIESASDIEENTNTNTSESDTNNVAPQNRIVYVANKGRSNTYWYSLENIKNANTANIVQMTEQEALNQHKHHSTTEAQ

SEQ ID NO: 367 - DNA, 804 bp, Streptococcus pyogenes
atggatatgtctaaatcaaatcgtcgtacttggcaaggtttagttgttattttaatagctattctcaccacttttaccacaagtactgttacggcagccagaaaaattagaaatttccctgataccacggaaattttgttaggaacgaaggcgactgagacaccaggaatcttaccattcactggtagctaccaattagttttgggcgatcttgacaatctgcaaaggccaaccttcgcacacatccagctaaaagatcaagatgagcctaatattaaacgaaaaggacttaaattcaatcctcctggctggcataattacaaattgactgacgctaatggaaaaacaacttggttaatggaccgtggccatttagttggttaccaatttagcggcttaaatgacgagcctaaaaacctagttacaatgacaaaatatcttaatactggctttagtgacaaaaatcctttaggaatgctctattatgaaaatagattagatagctggttagctctacaccctaacttctggctagactataaagttactcctgtttatcataaaaatgagttagttcctcgccaagtagttctacagtatgttggaattgatgaaaatggagatctacttcaaattaagttaggtagtgaaaaagaaagtgtagacaactttggagtaacatcagttacattagataacgtatctcctttagctgaattggattaccaaacaggaatgatgctagattcaactcaaaacgaagaagatagtaatttagaaaccgaagagtttgaagaagcggct

SEQ ID NO: 368 - protein, 268 aa, Streptococcus pyogenes
MDMSKSNRRTWQGLVVILIAILTTFTTSTVTAARKIRNFPDTTEILLGTKATETPGILPFTGSYQLVLGDLDNLQRPTFAHIQLKDQDEPNIKRKGLKFNPPGWHNYKLTDANGKTTWLMDRGHLVGYQFSGLNDEPKNLVTMTKYLNTGFSDKNPLGMLYYENRLDSWLALHPNFWLDYKVTPVYHKNELVPRQVVLQYVGIDENGDLLQIKLGSEKESVDNFGVTSVTLDNVSPLAELDYQTGMMLDSTQNEEDSNLETEEFEEAA

SEQ ID NO: 369 - DNA, 1257 bp, Streptococcus agalactiae
atgaatatttttgatgaactcaaagaacgtggactcgtttttcagacaactgacgaagatgctttacgcaaagctcttgaagaaggttctgtctcttactatactggctacgatcctacggctgacagccttcatcttggacatttagttgctattttaacctctcgtcgcttacaacttgctggtcacaagccttatgcacttgtgggaggcgcaactggacttattggggacccttcatttaaagatgttgagcgcagtttacaaacaaagaaaactgtagttagttggggtaataaaatccgcggtcaattatctaattttctagagtttgaaacaggtgataacaaagctgtattggtaaataattatgattggttcagcaatattagtttcattgatttcttacgagatgttggtaaatattttactgtcaattatatgatgagtaaagaatctgttaaaaaacgtatcgaaacagggatttcctatactgaatttgcttatcaaattatgcaaggatatgacttttacgaattaaataagaactataatgtcactttgcaaattggtggttctgaccaatggggcaacatgactgctggaaccgaacttattagacgaaaatcaaatggtgtatctcatgttatgactgttccattgataacagattctacaggaaaaaaattcggaaaatctgaaggaaatgctgtttggcttgatgctgacaaaacctctccttatgaaatgtaccaattttggctcaatgttatggatgctgatgccgttcgcttccttaagatttttacattcctaagccttaaagaaatagaagatatacgtattcaattcgaggaagcacctcaccaacgcttagcacaaaaaacactagcacgtgaagttgtaactcttgttcatggtgaaaaagcttataaggaggccgttaatatcacggaacagctatttgctggcaatataaaaggattgtctgttaaagagctcaaacaaggtttacgtggagtaccaaattatcacgttcagacggaagataacctcaatatcatagaccttctagtcacttcaggagttgtcaattctaaacgtcaagctcgagaagatgtctccaatggagctatttatattaatggagatcgtattcaagatttagaatatactatctcagaaaatgataagcttgaaaatgaaattacagtcattcgtcgtggaaagaaaaaatactttgtattaaactttaaa

SEQ ID NO: 370 - protein, 419 aa, Streptococcus agalactiae
MNIFDELKERGLVFQTTDEDALRKALEEGSVSYYTGYDPTADSLHLGHLVAILTSRRLQLAGHKPYALVGGATGLIGDPSFKDVERSLQTKKTVVSWGNKIRGQLSNFLEFETGDNKAVLVNNYDWFSNISFIDFLRDVGKYFTVNYMMSKESVKKRIETGISYTEFAYQIMQGYDFYELNKNYNVTLQIGGSDQWGNMTAGTELIRRKSNGVSHVMTVPLITDSTGKKFGKSEGNAVWLDADKTSPYEMYQFWLNVMDADAVRFLKIFTFLSLKEIEDIRIQFEEAPHQRLAQKTLAREVVTLVHGEKAYKEAVNITEQLFAGNIKGLSVKELKQGLRGVPNYHVQTEDNLNIIDLLVTSGVVNSKRQAREDVSNGAIYINGDRIQDLEYTISENDKLENEITVIRRGKKKYFVLNFK

SEQ ID NO: 371 - DNA, 1254 bp, Streptococcus pyogenes
atgaatatttttgaagaactcaaagctcgtggcttggtctttcaaacgactgatgaacaagcccttgtcaaagcattaacagaagggcaagtatcctattataccggttatgatccaaccgctgacagccttcatctgggccatctagtggctatcttaacatctcgtcgcttgcaactagcagggcacaaaccttacgctcttgtggggggtgccacaggtttaattggtgatccttcctttaaagatgcagagcgcagccttcaaaccaaagaaacagttttggagtggagtgacaagattaaagggcagttgtctactttccttgattttgaaaatggtgataataaagcagagcttgtcaacaactacgactggttctcgcaaatcagctttattgacttcctccgtgatgtcggtaaatacttcaccgttaactacatgatgagtaaagactctgttaaaaaacgcattgaaacaggcatttcttacactgagtttgcttaccaaatcatgcagggctacgacttctacgaactcaatgacaagcataatgtaaccttacaaattggcggctctgaccagtggggtaatatgacagctggtactgaattgctccgcaaaaaggctgataaaactgggcacgtcatgactgtaccactcatcactgactcaaccgggaaaaaattcggtaaatcagaaggtaatgctgtctggcttgatgccgataagacgtctccttacgagatgtaccaattctggttaaatgtcatggatgatgatgcagtgcgtttcttgaaaatcttcaccttcttatctctagatgagattgcagaaattgaaactcaatttaatgccgctcgtcacgagcgtctcgctcaaaaaaccttggcacgcgaagtggttaccttggttcatggcgaagaagcttataaacaagctcttaacattaccgagcagttatttgctggaaacatcaaaaatctttctgccaatgaattaaaacaaggattgagcaatgtaccaaattatcacgttcaatcaatagacaatcataatattgtcgagattttagtagctgctaagatttccccatcaaaacgccaggcgcgtgaagacgtgcaaaatggagcaatctacattaacggagaccgcgttcaagatttagattaccaattaagtaatgatgataaaattgatgatcaattaaccgttattcgccgcggtaagaaaaaatacgctgttctcacttac

SEQ ID NO: 372 - protein, 418 aa, Streptococcus pyogenes
MNIFEELKARGLVFQTTDEQALVKALTEGQVSYYTGYDPTADSLHLGHLVAILTSRRLQLAGHKPYALVGGATGLIGDPSFKDAERSLQTKETVLEWSDKIKGQLSTFLDFENGDNKAELVNNYDWFSQISFIDFLRDVGKYFTVNYMMSKDSVKKRIETGISYTEFAYQIMQGYDFYELNDKHNVTLQIGGSDQWGNMTAGTELLRKKADKTGHVMTVPLITDSTGKKFGKSEGNAVWLDADKTSPYEMYQFWLNVMDDDAVRFLKIFTFLSLDEIAEIETQFNAARHERLAQKTLAREVVTLVHGEEAYKQALNITEQLFAGNIKNLSANELKQGLSNVPNYHVQSIDNHNIVEILVAAKISPSKRQAREDVQNGAIYINGDRVQDLDYQLSNDDKIDDQLTVIRRGKKKYAVLTY

SEQ ID NO: 373 - DNA, 2295 bp, Streptococcus agalactiae
atgtttaaaggtaataagaagttgaatagttctaaattaggtgattacacaccacttgaatttggttctatttttttaagaattgtaaagcttttatcagatttcatctatgttattattttactatttgttatgctcggagtaggacttgcagtagggtatcttgctagtcaagttgactctgttaaagtaccaagtaaaaatagtttagtgacacaagttaatacacttactagggtgtctaggttaacttattctgataaatcacaaatttcagagattgccactgatttacaacgtacaccagtggcaaaggatgctatatctgataatattaaaaaggctatcattgcaacagaggacgaaaatttcaatgaccataaaggtgtagttcccaaagccgtactacgtgctgcagcgggatctgttctggggtttggagagagtagcggtggttcaacgctgacacaacaattattaaagcagcaaattttgggagatgatccgtcatttaaacgcaaatcaaaagaaattatttatgctctagcattagagcgttacatggataaggattcgattttatcagattatttaaatgtatcaccgtttggtcgcaataacaaaggacagaatattgcaggtattgaagaagcagcacaagggatttttggagtttccgcaaaagatttaacaattcctcaggcagctttccttgcaggtttaccgcaaagtcctattgtatattctccttatactgcagatgcccagttgaaatcagataaagatcttagttttggtataaagcgccaaaaaaatgtgttatacaatatgtatagaacgagagctttaaccaaagatgagtacaaatcctacaaagattatgacatcaaaaaagattttatcaaacctgcagtggcgacaacaaatcatcatgattatctttactactcggcattatctgaagctcaaaaagtgatgtacaattacctcattaaaaaggataatgtttcagagcatgatttaaaaaatgatgagactagagcgacgtacagacaccgcgctattgaagagattcaacagggagggtatactattaaaactactatcaataaatctgtttatcaagccatgcaggatgctgcagctcaatacggagggttgttagatgatggtactggcaaggttcaaatgggaaatgtactaacggacaattctagtggtgctattataggatttattggtggtcgtaactatagtgagaatcaaaataaccatgcttttgatacggcacgctctccagggtcaagtattaaaccgatattaccttacggaattgctattgatcaagggatgttaggaagtggtagtgttctttcaaattatccaacgacatattcaagtggcgaaaagattatgcatgcggatgaagaaggtactgctatggttaaccttcaagagtcattggacatttcttggaacattccagctttctggacttacaagatgctacgagatcgaggcgttgatgtaaaaaactatatggagaaattagactatccaattgaaaactttggtatagaaagtttaccacttggtggtggtattgatacgtcagttgctcagcaaacaaacctttatcaaatgattgcaaatggtggtgtttatcataagcagtatatgatagaaagtatagaggatagtaatgggaaagtgatttataatcacgaaagtaaacctgtccgtgtcttttcgaaagcaacagctactatcttacagcagctattacatggaccaattaactccggaaagactacaacctttaaaaatcgcttacaaggtttaaatagtggtttagctggggtagattggattggaaaaacgggtactactaactcaacttctgatgtttggttgatgctttctacacctaaagtgactttaggtggatgggcaggacatgataataatgcctctttagcgaaattgacaggttacaataataatgctaattatatggctcacttggttaatgctattaataatgcagatggcaatacttttggtaagtcagaaaggtttagacttgatgatagcgttataaaagctaaagttcttaagtctacaggtttacagccaggtgtagtaacagtaaacggtcgtcgaatcactgttggaggtgaaagcacaacaagttattgggcaaaaaatggacctggaacgatgacctatcgttttgctattgggggaactgatagtgattatcaaaaagcttggtctactttgggtggaaaacga

SEQ ID NO: 374 - protein, 765 aa, Streptococcus agalactiae
MFKGNKKLNSSKLGDYTPLEFGSIFLRIVKLLSDFIYVIILLFVMLGVGLAVGYLASQVDSVKVPSKNSLVTQVNTLTRVSRLTYSDKSQISEIATDLQRTPVAKDAISDNIKKAIIATEDENFNDHKGVVPKAVLRAAAGSVLGFGESSGGSTLTQQLLKQQILGDDPSFKRKSKEIIYALALERYMDKDSILSDYLNVSPFGRNNKGQNIAGIEEAAQGIFGVSAKDLTIPQAAFLAGLPQSPIVYSPYTADAQLKSDKDLSFGIKRQKNVLYNMYRTRALTKDEYKSYKDYDIKKDFIKPAVATTNHHDYLYYSALSEAQKVMYNYLIKKDNVSEHDLKNDETRATYRHRAIEEIQQGGYTIKTTINKSVYQAMQDAAAQYGGLLDDGTGKVQMGNVLTDNSSGAIIGFIGGRNYSENQNNHAFDTARSPGSSIKPILPYGIAIDQGMLGSGSVLSNYPTTYSSGEKIMHADEEGTAMVNLQESLDISWNIPAFWTYKMLRDRGVDVKNYMEKLDYPIENFGIESLPLGGGIDTSVAQQTNLYQMIANGGVYHKQYMIESIEDSNGKVIYNHESKPVRVFSKATATILQQLLHGPINSGKTTTFKNRLQGLNSGLAGVDWIGKTGTTNSTSDVWLMLSTPKVTLGGWAGHDNNASLAKLTGYNNNANYMAHLVNAINNADGNTFGKSERFRLDDSVIKAKVLKSTGLQPGVVTVNGRRITVGGESTTSYWAKNGPGTMTYRFAIGGTDSDYQKAWSTLGGKR

SEQ ID NO: 375 - DNA, 2310 bp, Streptococcus pyogenes
atgaggtattttatggtgaaatggaacacgaaacaaaagcgtataagtcatcaaagattaggtctcttggatttggggccggtgctattacgtacgttgagactactgtctaactttttttatattgttatcttcctttttggaatgatgggatttggtatggcatttgggtatttggctagtcagattgaatctgttaaggtaccaagtaaagaaagtttagtcaaacaagttgaatcattaacgatgatttcgcaaatgaactattctgataatagtttaatttctactttagatacggatttacttcgaacaccagtagctaatgatgcgatttcagagaatatcaaaaaagctattgtatcaacagaagacgaacattttcaagaacataaaggtatcgtgccaaaagctgtttttcgggcaacattggcttctgtattgggatttggagaagctagtggaggttcgaccttaacacagcaattagtcaagcaacaagttttgggagacgatcccacatttaagcgcaagtctaaggagatcgtttacgctcttgccttagagcgttatatgtccaaagacaatatcttatgtgattatcttaatgtttcaccttttggccgtaacaacaagggtcaaaatattgctggtgttgaagaagctgcgcgtggcatttttggcgtttctgccaaagatttaacggtgccacaggcagcatttttggcgggtcttccgcagagtcctattgtttactctccttatttgtcaacgggacaactgaaatcagaaaaggacatggcttatggcatcaagcgtcagcaaaatgttctctttaacatgtaccgtacaggtgttctgtctaaaaaagaatacgaggactataaggcttatccgattcaaaaggattttattcaaccgggaagtgcaatagtaaataatcacgattacctttattacacggtgttagcggatgctaagaaagccatgtatagctatttgattaagcgagataaggtgtctagtcgtgacttgaaaaatgacgagactaaggctgcttatgaagagagagccttaacagaattgcaacagggtggctataccatcaccacaaccattaataagcctatttacaatgcgatgcagacagcggcagctcagtttggtggcttgttagatgatggcactggtacagttcaaatgggaaatgtcttgacagacaatgcgactggtgctgtgttaggttttgttggtggtagagattatgctctgaatcaaaataatcatgctttcaatacagttagatcgccaggttctagcattaaaccgataatcgcttatggtcctgctattgatcaaggtttaatggggagtgctagcgttttgtctaattacccaacaacttactcgagtggccaaaaaatcatgcatgctgatagtgaaggaacagccatgatgccacttcaagaggccctaaatacttcttggaacatcccagctttttggacacagaaattactgcgtgaaaaaggtgtcgatgtcgaaaattatatgacaaaaatgggttataagattgcagactactcgattgaaagtttacctctagggggcggtattgaagtctcggttgctcaacaaaccaatgcttaccaaatgctttcaaacaatggcttatatcaaaagcaatatattgtagataagattactgctagcgatggtacagtcgtttacaaacatgaaaataagccaattcgtattttttctgcagcaacagctacgattttacaagaattgttgagaggtccgattacttcaggcgctacgactactttcaagaaccgtttggcggctattaatccgtggcttgctaatgctgattggattggtaagaccggaacaactgagaattatacggatgtttggctagtcctgtctactccaaaagttactttaggcggttgggcaggacatgatgacaatacctcattagcgccattaacaggatataacaataattctaattatcttgcctatttagctaatgccattaatcaggccgatcccaatgttattggagtagggcaacgcttcaacttagatccaggagtcattaaggcgaatgtcttgaagtcaacaggtttacaaccaggaactgttaatgtcaatggacatactttttctgttggtggagaaatgaccaccagtctatggtcccaaaaaggaccgggggctatgacttaccgatttgctattggtggcacggatgccgattatcaaaaagcctgggggaacttcgggttcagaaaaaat

SEQ ID NO: 376 - protein, 770 aa, Streptococcus pyogenes
MRYFMVKWNTKQKRISHQRLGLLDLGPVLLRTLRLLSNFFYIVIFLFGMMGFGMAFGYLASQIESVKVPSKESLVKQVESLTMISQMNYSDNSLISTLDTDLLRTPVANDAISENIKKAIVSTEDEHFQEHKGIVPKAVFRATLASVLGFGEASGGSTLTQQLVKQQVLGDDPTFKRKSKEIVYALALERYMSKDNILCDYLNVSPFGRNNKGQNIAGVEEAARGIFGVSAKDLTVPQAAFLAGLPQSPIVYSPYLSTGQLKSEKDMAYGIKRQQNVLFNMYRTGVLSKKEYEDYKAYPIQKDFIQPGSAIVNNHDYLYYTVLADAKKAMYSYLIKRDKVSSRDLKNDETKAAYEERALTELQQGGYTITTTINKPIYNAMQTAAAQFGGLLDDGTGTVQMGNVLTDNATGAVLGFVGGRDYALNQNNHAFNTVRSPGSSIKPIIAYGPAIDQGLMGSASVLSNYPTTYSSGQKIMHADSEGTAMMPLQEALNTSWNIPAFWTQKLLREKGVDVENYMTKMGYKIADYSIESLPLGGGIEVSVAQQTNAYQMLSNNGLYQKQYIVDKITASDGTVVYKHENKPIRIFSAATATILQELLRGPITSGATTTFKNRLAAINPWLANADWIGKTGTTENYTDVWLVLSTPKVTLGGWAGHDDNTSLAPLTGYNNNSNYLAYLANAINQADPNVIGVGQRFNLDPGVIKANVLKSTGLQPGTVNVNGHTFSVGGEMTTSLWSQKGPGAMTYRFAIGGTDADYQKAWGNFGFRKN

SEQ ID NO: 377 - DNA, 3573 bp, Streptococcus agalactiae
ttggcaggacatgaagttcagtacggaaaacaccgtacacgtcgtagcttttcaagaattaaggaagttcttgatttaccaaacttaattgaaattcaaactgattcattccaagattttcttgatgctggcttgaaagaagtatttgaggatgtacttccaatttcaaactttacagatactatggatcttgaatttgttggttatgaattaaaagaacctaaatatactttggaagaagctcgtatccatgatgctagctactcagcacctatttttgttactttccgtttagttaataaagaaactggtgaaattaaaactcaagaagttttctttggtgattttccaattatgactgaaatgggtactttcatcatcaatggtggtgaacgtatcattgtttcacaattagtccgttctcctggtgtttactttaatgataaggtagataaaaatggaaaagttggttatgggtcaactgttatccctaaccgtggagcttggttggaacttgagacagacgcaaaagatattgcttatacacgtatcgaccgcacacgtaaaattccatttacaacactagtccgtgcacttggtttctctggagacgatgaaattgttgacatctttggtgacagtgaacttgttcgcaatactattgaaaaagacattcataaaaatccaagtgattctcgtacagatgaagcacttaaagaaatctatgaacgtcttcgtccaggtgaaccaaaaactgcagacagctcacgtagtcttttagttgcacgtttctttgatccacgtcgttatgacttagcggctgttggtcgttataagattaataaaaaactgaatcttaaaacacgcctattgaaccaaacaatcgctgaaaatttagttgatggtgaaacaggagagattcttgttgaagctggaaccgttatgacacgagatgtcattgattcaattgcagagcatatcgatggagacttaaacaagtttgtctacacaccaaatgattatgctgtagttactgaaccagttattcttcaaaaattcaaagttgttgctccaactgatccagaccgtgttgttactattgttggaaactcaaatcctgaagataaagttcgtgccttaactcctgcagatattttagcagagatgtcatacttcttaaaccttgcagagggtatcggtaaggtagatgacattgaccatttaggtaaccgtcgtattcgtgcagttggtgaattacttgcgaaccaattccgtatcggacttgctcgtatggaacgcaatgtccgcgaacgtatgtctgtacaagacaatgaagtcttgacacctcaacaaatcattaacattcgtccagtgactgccgccgttaaagaattctttggttcatcacagctgtcacaattcatggaccaacacaaccctctatcagaattgtcgcacaaacgccgtctctctgccttaggacctggtggtttgacacgtgaccgtgctggatatgaagttcgtgacgtgcactatacccactatgggcgcatgtgtccgattgaaacacctgaaggtccaaacattggtttgattaataacttatcttcatttggacacctcaataaatatggatttattcaaacaccatatcgtaaagtagatcgttctactggtgcggtaacgaacgaaattgtttggttgactgctgatgaagaagatgaatttacagttgcacaagccaactctaagcttaacgaagacggtacatttgcagaagaaatcgttatgggtcgtcatcaaggtaataaccaagagtttccttcaagcattgttgactttgttgacgtgtcacctaagcaagtagttgctgtcgcaacagcatgtattcctttcttggaaaatgatgactctaaccgtgccttgatgggtgccaacatgcaacgtcaggctgtgccattgattgatccaaaagcaccatatgttggtactggtatggagtatcaagcagcccacgattcaggtgcagctgtgattgctaaacatgatggtcgtgttattttttcagatgctgaaaaagttgaagtgcgtcgcgaagatggttctcttgatgtttatcatgttcaaaaattccgccgttcaaactcaggtactgcttataaccaacgtaccttagttaaagttggtgatctcgttgaaaaaggtgattttatcgccgacggaccatctatggaaaatggtgaaatggctcttggacaaaacccagttgttgcttatatgacttgggaaggttataacttcgaggatgccgttatcatgagtgagcgccttgtgaaagaagatgtctatacatctgttcacttggaagaattcgaatctgaaacgcgtgatacaaagcttgggcctgaagaaattactcgtgaaattccaaatgttggtgaagattcactacgtgatctcgatgaaatgggaattatccgcattggtgctgaggtaaaagaaggtgacattcttgttggtaaggtaacacctaagggtgaaaaggacttatctgctgaagaacgtctcttgcatgccatttttggtgataaatcacgtgaagttcgtgatacttcactacgtgtacctcacggtggcgatggagtagttcgtgacgttaaaatctttactcgtgcaaatggtgatgaattgcaatcaggtgttaatatgcttgtccgcgtttatatcgctcaaaaacgtaaaatcaaagtcggtgataagatggccggtcgtcacggaaacaaaggtgtcgtctcacgtattgttcctgttgaagatatgccttacttaccagatggaacgccagttgatatcatgttgaacccacttggggtgccatcacgtatgaatatcggacaagttatggagcttcatttaggtatggctgctcgtaatttaggtattcatattgcaacgccagtctttgatggggcttcttcagaagacctttgggaaactgttcaagaagcaggtatggattcagatgctaagactgttctttatgatggtcgtactggtgaaccattcgataaccgtgtgtcagttggtgtcatgtacatgatcaaacttcaccacatggttgatgataaacttcatgcccgttcagtaggaccatactcacttgttactcaacaaccacttggaggtaaagctcaatttggtggacaacgttttggtgagatggaggtttgggcgcttgaagcttatggtgcttcaaatgttcttcaagaaattttaacatacaaatctgatgatgttacaggacgtcttaaagcttatgaagctatcacaaaaggtaagccaattccaaaaccaggtgttccagaatcattccgtgttcttgtaaaagaattgcaatcacttggtcttgatatgcgtgtccttgatgaagatgacaacgaagttgaactccgtgatcttgatgaaggtgaagatgatgatgtgatgcacgttgatgaccttgaaaaagcacgtgtgaaacaagaagctgaagaaaaacaagctgaacaagtatctgaagtcgttcaagaagat

SEQ ID NO: 378 - protein, 1191 aa, Streptococcus agalactiae
MAGHEVQYGKHRTRRSFSRIKEVLDLPNLIEIQTDSFQDFLDAGLKEVFEDVLPISNFTDTMDLEFVGYELKEPKYTLEEARIHDASYSAPIFVTFRLVNKETGEIKTQEVFFGDFPIMTEMGTFIINGGERIIVSQLVRSPGVYFNDKVDKNGKVGYGSTVIPNRGAWLELETDAKDIAYTRIDRTRKIPFTTLVRALGFSGDDEIVDIFGDSELVRNTIEKDIHKNPSDSRTDEALKEIYERLRPGEPKTADSSRSLLVARFFDPRRYDLAAVGRYKINKKLNLKTRLLNQTIAENLVDGETGEILVEAGTVMTRDVIDSIAEHIDGDLNKFVYTPNDYAVVTEPVILQKFKVVAPTDPDRVVTIVGNSNPEDKVRALTPADILAEMSYFLNLAEGIGKVDDIDHLGNRRIRAVGELLANQFRIGLARMERNVRERMSVQDNEVLTPQQIINIRPVTAAVKEFFGSSQLSQFMDQHNPLSELSHKRRLSALGPGGLTRDRAGYEVRDVHYTHYGRMCPIETPEGPNIGLINNLSSFGHLNKYGFIQTPYRKVDRSTGAVTNEIVWLTADEEDEFTVAQANSKLNEDGTFAEEIVMGRHQGNNQEFPSSIVDFVDVSPKQVVAVATACIPFLENDDSNRALMGANMQRQAVPLIDPKAPYVGTGMEYQAAHDSGAAVIAKHDGRVIFSDAEKVEVRREDGSLDVYHVQKFRRSNSGTAYNQRTLVKVGDLVEKGDFIADGPSMENGEMALGQNPVVAYMTWEGYNFEDAVIMSERLVKEDVYTSVHLEEFESETRDTKLGPEEITREIPNVGEDSLRDLDEMGIIRIGAEVKEGDILVGKVTPKGEKDLSAEERLLHAIFGDKSREVRDTSLRVPHGGDGVVRDVKIFTRANGDELQSGVNMLVRVYIAQKRKIKVGDKMAGRHGNKGVVSRIVPVEDMPYLPDGTPVDIMLNPLGVPSRMNIGQVMELHLGMAARNLGIHIATPVFDGASSEDLWETVQEAGMDSDAKTVLYDGRTGEPFDNRVSVGVMYMIKLHHMVDDKLHARSVGPYSLVTQQPLGGKAQFGGQRFGEMEVWALEAYGASNVLQEILTYKSDDVTGRLKAYEAITKGKPIPKPGVPESFRVLVKELQSLGLDMRVLDEDDNEVELRDLDEGEDDDVMHVDDLEKARVKQEAEEKQAEQVSEVVQED

SEQ ID NO: 379 - DNA, 3564 bp, Streptococcus pyogenes
ttggcaggacatgaagttcgatacggaaaacaccgtacacgtcgtagcttttcaagaatcaaagaagttcttgatttaccaaatttgattgaaattcaaactgactcattccaagatttcctcgattcaggtttgaaagaagtatttgaagatgtacttcctatttcaaactttacggatactatggaacttgaatttgttggttacgaatttaaagaacctaaatatacccttgaagaagctcgtatccacgatgcaagttattctgcaccaatctttgttaccttccgtttggtcaataaagaaactggtgagattaaaactcaagaagtcttctttggtgatttcccaatcatgacggaaatgggtacctttattatcaatggtggtgaacgtatcatcgtttctcagttggtgcgttctccaggtgtttatttcaacgataaagttgataaaaacggtaaagttggttacggatcaacagtgattcctaaccgtggggcttggttggaattagagactgactcaaaagacattgcctacactcgtattgaccgtacccgtaagattccattcacaaccttggttcgtgcccttggtttctcaggtgatgatgaaattgttgatatctttggtgaaagcgaccttgttcgtaataccattgaaaaagacattcacaaaaatccaagtgattctcgtacagacgaagcccttaaagaaatttacgagcgtcttcgtccaggtgagccaaaaactgcagatagctctcgtagtcttttgattgcgcgtttctttgatgcacgtcgttacgatttggctgcggttggtcgttacaaagtgaacaaaaaacttaatatcaagactcgtcttttgaaccaaatcattgctgaaaaccttgtggatgctgaaactggcgaaattttggtagaagctggaactgagatgactcgtagcgtcatcgaatccatcgaagaacaccttgacggtgatttgaacaagtttgtttacacaccaaatgattacgctgtggttactgaaccagttgtccttcaaaagttcaaggttgtgtcaccaattgatcctgatcgtgtagtaactattgttggtaatgccaatccagatgataaggttcgtgcattgacacctgctgatattttggcagaaatgtcttacttcttgaaccttgctgaaggtcttggaaaagttgacgatattgaccacttgggtaaccgtcgtatccgtgccgttggtgaattgcttgccaaccaattccgcatcggtcttgctcgtatggagcgtaacgtgcgtgagcgtatgtctgttcaagacaacgatgtgttaacaccacaacaaatcatcaatatccgtcctgtcacagcagctgtcaaagaattcttcggttcgtctcagttgtcacagttcatggaccaacacaacccattgtcagagttgtctcacaaacgtcgtttatctgccttaggacctggtggtttgacacgtgaccgtgctggttatgaggttcgtgacgtgcattacacgcactatggccgtatgtgtccgattgaaacacctgaaggaccaaacattggtttgattaataacttgtcttcatttggacatcttaataaatatggtttcatccaaacaccttaccgtaaggttgaccgtgcgactggtacggtaactaacgagattgtttggttgactgccgacgaagaagacgaatacacagttgcacaggccaattcgaaactaaacgaagatggcacttttgctgaagaaatcgttatgggtcgtcaccaaggtaataaccaagaattttctgcaagtgttgttgatttcgttgacgtttcccctaaacaggtagttgctgttgcgacggcatgtattcctttcttggaaaacgatgactccaaccgtgccctcatgggtgccaacatgcaacgtcaggctgtgccattgattgatccaaaagcaccatatgttggtactggtatggaatatcaagctgcccatgactcaggcgctgcggtgattgctcagcaaaatggtaaagttgtcttttctgatgctgaaaaagtggaaatccgtcgtcaagatggctcgcttgatgtttaccacattaccaaattccgtcgttcaaactcaggaacagcctataaccaacgcacccttgttaaagtaggagacattgttgaaaaaggtgatttcatcgctgatggaccttctatggaaaatggtgaaatggctcttggacaaaacccagtcgttgcttacatgacttgggaaggttataactttgaggatgccgttatcatgagtgagcgccttgtgaaagaagatgtctacacatctgttcacttggaagaattcgaatctgaaacgcgtgatacaaaacttggccctgaagaaatcactcgggaaatcccaaatgttggtgaagaagccctcaaagaccttgacgaaatgggcattatccgtatcggtgctgaggttaaagaaggcgacatcttagtaggtaaagtcacacctaaaggtgaaaaagacctttctgctgaagaacgtttacttcacgccatctttggggataaatcgcgtgaagtgcgtgatacctcacttcgtgtccctcacggtggtgatggtatcgttcgtgatgtgaaaatctttacacgcgctaacggcgatgaattgcaatcaggtgttaatatgcttgtgcgtgtttacatcgctcaaaaacgtaaaatcaaggtcggagataaaatggccggtcgtcacggaaacaagggtgtcgtttcacgtattgtaccagttgaagacatgccataccttccagacggaacaccagttgacatcatgttgaaccctcttggggtgccatcacggatgaatattggtcaggttatggaacttcaccttggtatggctgctcgtaatcttggtattcacattgcaacacctgtctttgacggggcttcatcagaagacctttgggacactgttcgtgaagctggtatggatagcgatgctaagacggtcctttatgatggtcgcaccggtgaaccatttgacaaccgtgtatccgttggtgtcatgtatatgatcaaacttcaccacatggttgatgataaacttcatgcccgttctgtaggaccatactcacttgttacccaacagccacttggtggtaaagctcaatttggtggacaacgttttggtgagatggaggtttgggcccttgaagcttatggtgcatcaaatgttcttcaagaaatcttgacctacaagtcagatgacgtcacaggacgtttgaaagcctatgaagcgattactaaaggtaaaccaattccaaaaccaggtgtaccagaatccttccgtgttcttgtaaaagaattgcaatcgcttggtcttgatatgcgtgtgcttgacgaggatgataatgaagtggaacttcgtgatcttgatgaaggtgaagacgatgacattatgcatgttgacgatctcgagaaggcacgtgaaaaacaagctcaagaaactcaagaagtttctgaaacaactgacgaaaaa

SEQ ID NO: 380 - protein, 1188 aa, Streptococcus pyogenes
LAGHEVRYGKHRTRRSFSRIKEVLDLPNLIEIQTDSFQDFLDSGLKEVFEDVLPISNFTDTMELEFVGYEFKEPKYTLEEARIHDASYSAPIFVTFRLVNKETGEIKTQEVFFGDFPIMTEMGTFIINGGERIIVSQLVRSPGVYFNDKVDKNGKVGYGSTVIPNRGAWLELETDSKDIAYTRIDRTRKIPFTTLVRALGFSGDDEIVDIFGESDLVRNTIEKDIHKNPSDSRTDEALKEIYERLRPGEPKTADSSRSLLIARFFDARRYDLAAVGRYKVNKKLNIKTRLLNQIIAENLVDAETGEILVEAGTEMTRSVIESIEEHLDGDLNKFVYTPNDYAVVTEPVVLQKFKVVSPIDPDRVVTIVGNANPDDKVRALTPADILAEMSYFLNLAEGLGKVDDIDHLGNRRIRAVGELLANQFRIGLARMERNVRERMSVQDNDVLTPQQIINIRPVTAAVKEFFGSSQLSQFMDQHNPLSELSHKRRLSALGPGGLTRDRAGYEVRDVHYTHYGRMCPIETPEGPNIGLINNLSSFGHLNKYGFIQTPYRKVDRATGTVTNEIVWLTADEEDEYTVAQANSKLNEDGTFAEEIVMGRHQGNNQEFSASVVDFVDVSPKQVVAVATACIPFLENDDSNRALMGANMQRQAVPLIDPKAPYVGTGMEYQAAHDSGAAVIAQQNGKVVFSDAEKVEIRRQDGSLDVYHITKFRRSNSGTAYNQRTLVKVGDIVEKGDFIADGPSMENGEMALGQNPVVAYMTWEGYNFEDAVIMSERLVKEDVYTSVHLEEFESETRDTKLGPEEITREIPNVGEEALKDLDEMGIIRIGAEVKEGDILVGKVTPKGEKDLSAEERLLHAIFGDKSREVRDTSLRVPHGGDGIVRDVKIFTRANGDELQSGVNMLVRVYIAQKRKIKVGDKMAGRHGNKGVVSRIVPVEDMPYLPDGTPVDIMLNPLGVPSRMNIGQVMELHLGMAARNLGIHIATPVFDGASSEDLWDTVREAGMDSDAKTVLYDGRTGEPFDNRVSVGVMYMIKLHHMVDDKLHARSVGPYSLVTQQPLGGKAQFGGQRFGEMEVWALEAYGASNVLQEILTYKSDDVTGRLKAYEAITKGKPIPKPGVPESFRVLVKELQSLGLDMRVLDEDDNEVELRDLDEGEDDDIMHVDDLEKAREKQAQETQEVSETTDEK

SEQ ID NO: 381 - DNA, 3678 bp, Streptococcus agalactiae
atgatgataaatcgaagaaaggtaaaactagtggttgacgtaaatcgttttaaaagtatgcaaatcacattagcatcaccaagtaaggtccgttcatggtcttatggtgaagttaaaaaacctgaaacaatcaactaccgcacattgaaaccagaacgtgaaggactttttgatgaagttatttttggtccaacaaaagattgggaatgtgcgtgtggaaaatacaaacgtattcgttacaaaggaatcatttgtgaccgttgtggcgttgaagtaacccgtgcaaaagttcgtcgcgaacgtatgggacatatcgagttaaaagcaccagtatctcatatctggtatttcaaaggtatcccatcgcgtatggggctcacattggatatgagtcctcgtgcacttgaagaagttatttattttgcggcttatgttgttatcgatccaatggacacaccattagaaccgaagtcactccttactgagcgtgaataccgtgaaaaacttcaagagtacggttacggttcgtttgttgctaaaatgggtgctgaagccattcaagatcttcttaaacgcgttgatttagatgcagaaatcgcagttcttaaagaggagttgaaatcagcgacaggtcaaaaacgtgtgaaagcagttcgtcgtctggatgtgttagatgcctttaaaaaatctggaaataaaccagaatggatggttcttaacattttaccggttatcccaccggatcttcgtccgatggttcaattagatggtggtcgttttgcggcatcagacttgaatgacctttaccgccgtgttattaaccgtaacaatcgtttggcacgtttgttggaattaaatgctcctggcatcatcgttcaaaatgaaaaacgtatgttacaagaagctgttgatgcgcttatcgacaatggtcgtcgtggtcgtccaattaccggaccaggtagtcgtcctttgaaatcattaagccatatgcttaaaggtaaacaaggtcgtttccgccaaaacttgcttggtaaacgtgttgacttctctggacgttccgttattgctgttggtccaacactcaaaatgtaccaatgtggtgtaccacgtgaaatggctattgagctcttcaaaccttttgtaatgcgtgaaatcgttgctcgtgacctcgcagggaacgttaaagcagctaaacgtatggttgaacgtggggacgagcgtatttgggacatcttagaagaagttattaaagagcacccagtacttctaaaccgtgcacctactcttcacagattaggtatccaagcgtttgaacctgtccttattgatggtaaggcgcttcgtcttcacccacttgtatgtgaggcctacaatgctgactttgatggagaccaaatggccatccacgttccattgtctgaagaagcccaagcagaagctcgtcttttgatgcttgctgcagagcacatccttaaccctaaagatggtaagccagtcgtaacaccatctcaggacatggttttaggaaattactacctgactatggaagatgctggtcgtgaaggtgaaggcatgattttcaaagatcatgacgaagcagttatggcatatcaaaatggttatgttcatttacatacacgtgttggtatcgctgttgattcaatgccgaataagccttggacagaagagcaaaaacataaaatcatggttacaacagttggtaagattctcttcaacgatatcatgcctgaagatttaccgtacttaattgaacctaataatgcaaacttgacagaaaaaactccagataaatacttcttagagccaggtcaggatattcaagcagttattgataacttagagattaatattccctttaagaagaaaaatcttggtaatattatcgcagaaacttttaaacgtttccgtacaacagaaacttctgctttccttgaccgtttgaaggaccttggatattatcattcaacacttgctggtttgactgtgggtattgctgatatcccagttattgacaataaagctgagattattgatgcagctcaccacagagttgaagatatcaataaagccttccgtcgaggtttgatgactgaagaagatcgttatgttgctgttacaacaacatggcgtgaagctaaagaagcacttgaaaaacgtcttattgagacacaagatccaaagaaccctatcgttatgatgatggactcaggagctcgtggtaacatctcaaacttctcacaacttgccggtatgcgtggtttgatggctgctcctaacggacgtatcatggaattgccaatcttatcaaacttccgtgaaggtcttagtgttttggaaatgttcttctcaactcacggtgcgcgtaaaggtatgactgatacggcccttaagacagccgactcaggttaccttactcgtcgtttggttgacgttgcccaagatgttattattcgtgaagatgactgtggaacagaccgcggtttgacaatcacagcaattacagatggtaaagaggttactgagacacttgaagagcgtttgataggacgttatactaagaagtcaatcaaacatcctgagacaggtgaaattctcgttggtgcagataccttaattactgaagatatggctgctaaagttgttaaagcgggcgttgaggaagtaactatccgatcagtatttacatgtaacactcgccatggtgtttgtcgtcactgttacggtattaacttggcaacaggtgatgctgttgaggttggtgaagcagttggtactattgcagctcaatctatcggtgaaccagggacacagcttacaatgcgtaccttccataccggtggtgttgcttcaaatactgatattacacaaggtctcccacgtatccaagaaatctttgaagcacgtaaccctaaaggtgaggcagttattactgaagttaagggtgaagtcgttgcaattgaagaagactcttcaacacgtactaagaaagtattcgttaaaggtcagacaggtgagggagaatacgttgttccatttacagcacgtatgaaagttgaagttggtgatgaagtagctcgtggtgcggccttaactgaaggatctatccaaccaaaacgtctccttgaagttcgtgatactttatctgttgaaacgtacctacttgctgaagtacaaaaagtttaccgtagccaaggggtagaaatcggagataaacacgttgaggtaatggttcgtcaaatgctccgtaaagttcgtgtcatggatccaggagatacagatcttcttccaggtacacttatggatatttcagactttacagatgctaacaaagatattgttatttctggtggaatccctgcgacaagccgtcctgtccttatgggtattactaaggcttcccttgaaactaattcattcttatcagctgcatccttccaagaaacaacacgtgtccttacagatgctgctatccgtggtaagaaagatcacttacttggtcttaaagaaaatgttattatcggtaaaatcattccagcgggtactggtatggctcgttaccgtaatattgaaccacttgctgttaatgaagttgagattattgaaggaactcctgttgatgcagaagttacggaagtatcaacacctacaacagaagat

SEQ ID NO: 382 - protein, 1226 aa, Streptococcus agalactiae
MMINRRKVKLVVDVNRFKSMQITLASPSKVRSWSYGEVKKPETINYRTLKPEREGLFDEVIFGPTKDWECACGKYKRIRYKGIICDRCGVEVTRAKVRRERMGHIELKAPVSHIWYFKGIPSRMGLTLDMSPRALEEVIYFAAYVVIDPMDTPLEPKSLLTEREYREKLQEYGYGSFVAKMGAEAIQDLLKRVDLDAEIAVLKEELKSATGQKRVKAVRRLDVLDAFKKSGNKPEWMVLNILPVIPPDLRPMVQLDGGRFAASDLNDLYRRVINRNNRLARLLELNAPGIIVQNEKRMLQEAVDALIDNGRRGRPITGPGSRPLKSLSHMLKGKQGRFRQNLLGKRVDFSGRSVIAVGPTLKMYQCGVPREMAIELFKPFVMREIVARDLAGNVKAAKRMVERGDERIWDILEEVIKEHPVLLNRAPTLHRLGIQAFEPVLIDGKALRLHPLVCEAYNADFDGDQMAIHVPLSEEAQAEARLLMLAAEHILNPKDGKPVVTPSQDMVLGNYYLTMEDAGREGEGMIFKDHDEAVMAYQNGYVHLHTRVGIAVDSMPNKPWTEEQKHKIMVTTVGKILFNDIMPEDLPYLIEPNNANLTEKTPDKYFLEPGQDIQAVIDNLEINIPFKKKNLGNIIAETFKRFRTTETSAFLDRLKDLGYYHSTLAGLTVGIADIPVIDNKAEIIDAAHHRVEDINKAFRRGLMTEEDRYVAVTTTWREAKEALEKRLIETQDPKNPIVMMMDSGARGNISNFSQLAGMRGLMAAPNGRIMELPILSNFREGLSVLEMFFSTHGARKGMTDTALKTADSGYLTRRLVDVAQDVIIREDDCGTDRGLTITAITDGKEVTETLEERLIGRYTKKSIKHPETGEILVGADTLITEDMAAKVVKAGVEEVTIRSVFTCNTRHGVCRHCYGINLATGDAVEVGEAVGTIAAQSIGEPGTQLTMRTFHTGGVASNTDITQGLPRIQEIFEARNPKGEAVITEVKGEVVAIEEDSSTRTKKVFVKGQTGEGEYVVPFTARMKVEVGDEVARGAALTEGSIQPKRLLEVRDTLSVETYLLAEVQKVYRSQGVEIGDKHVEVMVRQMLRKVRVMDPGDTDLLPGTLMDISDFTDANKDIVISGGIPATSRPVLMGITKASLETNSFLSAASFQETTRVLTDAAIRGKKDHLLGLKENVIIGKIIPAGTGMARYRNIEPLAVNEVEIIEGTPVDAEVTEVSTPTTED

SEQ ID NO: 383 - DNA, 3639 bp, Streptococcus pyogenes
gtggttgacgtaaatcgttttaaaagtatgcaaatcacattagcctcaccaagtaaggtccgttcatggtcttatggtgaagttaaaaaacctgaaacaatcaactaccgtacattaaaaccagaacgtgaaggactctttgacgaagtcatctttggtccaacaaaagactgggaatgtgcgtgtggtaagtacaaacgtatccgttataaagggatcgtttgtgatcgctgtggggttgaggtaactcgtgctaaagtacgtcgtgaacgtatgggtcacattgagttaaaagctcctgtatcacatatctggtatttcaaagggattccatctcgtatgggattgactcttgatatgagtcctcgtgcccttgaagaagtgatctattttgcggcttatgtggtcattgatccaaaagatacaccgcttgaaccaaaatcattattaacagaacgtgaataccgtgaaaaactacaagagtatggtcatgggtcatttgtcgctaagatgggtgctgaagccattcaagatctcttgaaacgtgtggacttggcagctgaaatcgctgaattaaaagaagagttgaaatctgcttctggtcaaaaacggattaaagcagttcgtcgtttagacgtccttgatgcctttaacaaatctggaaataaaccagaatggatggttcttaacatcctgccggttattccaccagatcttcgtccgatggttcaattggatggtggtcgttttgcggcatcagacttgaatgacttgtaccgtcgtgtgattaaccgtaataaccgtttggcacgtttgttagaacttaatgcccctggcatcattgttcaaaatgaaaaacgaatgcttcaagaagccgttgatgctttgattgataatggtcgtcgtggtcgtccaatcactggaccaggaagtcgtccattgaaatcattgagccacatgcttaaaggtaaacaagggcgtttccgtcaaaacttgcttggtaaacgtgtagacttctctggacgttccgttatcgctgttggtccaacccttaaaatgtatcaatgtggtgtcccacgtgaaatggctatcgagctttttaaaccatttgtaatgcgcgaaattgttgccaaagaatatgctggtaacgttaaagccgctaaacgtatggttgaacgtggcgacgaacgcatctgggatatcttagaagaagttatcaaagaacacccagtcctacttaaccgcgcaccgactcttcacagacttggtattcaggcttttgaacccgttcttattgacggtaaggcacttcgtcttcacccacttgtgtgtgaggcctacaatgccgacttcgatggagaccaaatggccattcacgtgccactttcagaagaagcacaagctgaagctcgtcttttgatgcttgctgcagagcacatcttgaaccctaaagatggtaaaccagttgttactccatctcaggatatggttcttggtaactactatcttacgatggaagatgctggtcgcgaaggcgaaggtatgattttcaaggataaagacgaagctgtgatggcatatcgtaatggttatgctcatcttcatagtcgtgtgggtatcgctgttgacagcatgccaaacaaaccttggaaagacaatcaaagacataaaatcatggtgacaactgttggtaagattctctttaacgatatcatgccagaggaccttccttacctccaagagccaaacaatgccaacttgacagaaggaacacctgataaatacttccttgaacctggtcaagacatccaagaagtgattgatcgcttagacatcaatgtgccatttaagaagaaaaacctcggtaacatcattgcggaaaccttcaaacgtttccgtacaacagaaacatcagccttccttgaccgcttgaaagaccttggttactaccactcaacccttgctggtttgacagtgggtatcgctgacattcctgttattgataataaagctgaaatcattgatgctgctcaccatcgtgttgaagaaattaacaaagccttccgtcgtggtttgatgacagatgatgaccgttatgttgccgttacaacaacatggcgtgaagctaaagaagcccttgaaaaacgtctgattgaaacacaagatcctaagaacccaatcgttatgatgatggactcaggagctcgtggtaacatctcaaacttctcacagcttgctggtatgcgtggtttgatggctgctcctaacggacgcatcatggaacttcctatcttgtcaaacttccgtgaaggtttgagcgttttggaaatgttcttctcaacccacggtgcacgtaaagggatgaccgatacggcccttaaaacagccgactcaggttaccttactcgtcgtttggttgacgttgcccaagatgttatcattcgtgaggacgattgtggcactgatcgtggtcttcttatccgtgctattacagatggtaaagaagttaccgaaacgcttgaagagcgtcttcaaggtcgttacacacgtaaatcagtcaaacaccctgaaactggtgaagtcttgattggtgctgaccaattaatcactgaagacatggctcgtaagattgttgatgcaggtgttgaagaagtgaccattcgttctgtctttacctgtgcgactcgtcatggtgtctgccgtcactgttatggtatcaacttggcaactggtgatgctgttgaagtgggtgaagcagttggtactattgctgcccaatctatcggtgagcctggtactcagcttaccatgcgtaccttccacacgggtggtgtagcctcaaataccgatatcacccagggtcttcctcgtattcaagagatctttgaagcacgtaatcctaaaggggaagcggtcattactgaagtgaaagggaatgtcgtcgagattgaagaagatgcgtcaactcgtaccaagaaagtctacgttcaaggaaaaactggcatgggcgaatatgtcataccatttacagcacgtatgaaagttgaagttggcgacgaagttaatcgcggagctgcccttacagaagggtcaattcaaccgaaacgtctccttgaagtgcgtgataccttgtcagttgaaacgtaccttcttgcagaagtacaaaaagtttaccgtagccaaggggtagaaatcggagacaaacacgttgaggtaatggttcgccaaatgcttcgtaaagttcgtgtcatggatccaggtgatacagacctccttccaggtacacttatggatatttctgatttcacagatgctaacaaagatattgttatctctggtggtattcctgcgacatctcgtcctgttcttatgggtattactaaggcttcccttgaaaccaattccttcttatcagctgcatccttccaagaaacaactcgtgttcttacagatgctgctatccgtggtaaaaaagatcatcttcttggtcttaaagaaaatgttatcattggtaaaatcatcccagctggtactggtatggctcgttaccgtaacattgaaccacaagcgatgaatgagattgaagtgattgatcatacagaagtctcagcagaagccgtttttacagcagaagcagaa

SEQ ID NO: 384 - protein, 1213 aa, Streptococcus agalactiae
VVDVNRFKSMQITLASPSKVRSWSYGEVKKPETINYRTLKPEREGLFDEVIFGPTKDWECACGKYKRIRYKGIVCDRCGVEVTRAKVRRERMGHIELKAPVSHIWYFKGIPSRMGLTLDMSPRALEEVIYFAAYVVIDPKDTPLEPKSLLTEREYREKLQEYGHGSFVAKMGAEAIQDLLKRVDLAAEIAELKEELKSASGQKRIKAVRRLDVLDAFNKSGNKPEWMVLNILPVIPPDLRPMVQLDGGRFAASDLNDLYRRVINRNNRLARLLELNAPGIIVQNEKRMLQEAVDALIDNGRRGRPITGPGSRPLKSLSHMLKGKQGRFRQNLLGKRVDFSGRSVIAVGPTLKMYQCGVPREMAIELFKPFVMREIVAKEYAGNVKAAKRMVERGDERIWDILEEVIKEHPVLLNRAPTLHRLGIQAFEPVLIDGKALRLHPLVCEAYNADFDGDQMAIHVPLSEEAQAEARLLMLAAEHILNPKDGKPVVTPSQDMVLGNYYLTMEDAGREGEGMIFKDKDEAVMAYRNGYAHLHSRVGIAVDSMPNKPWKDNQRHKIMVTTVGKILFNDIMPEDLPYLQEPNNANLTEGTPDKYFLEPGQDIQEVIDRLDINVPFKKKNLGNIIAETFKRFRTTETSAFLDRLKDLGYYHSTLAGLTVGIADIPVIDNKAEIIDAAHHRVEEINKAFRRGLMTDDDRYVAVTTTWREAKEALEKRLIETQDPKNPIVMMMDSGARGNISNFSQLAGMRGLMAAPNGRIMELPILSNFREGLSVLEMFFSTHGARKGMTDTALKTADSGYLTRRLVDVAQDVIIREDDCGTDRGLLIRAITDGKEVTETLEERLQGRYTRKSVKHPETGEVLIGADQLITEDMARKIVDAGVEEVTIRSVFTCATRHGVCRHCYGINLATGDAVEVGEAVGTIAAQSIGEPGTQLTMRTFHTGGVASNTDITQGLPRIQEIFEARNPKGEAVITEVKGNVVEIEEDASTRTKKVYVQGKTGMGEYVIPFTARMKVEVGDEVNRGAALTEGSIQPKRLLEVRDTLSVETYLLAEVQKVYRSQGVEIGDKHVEVMVRQMLRKVRVMDPGDTDLLPGTLMDISDFTDANKDIVISGGIPATSRPVLMGITKASLETNSFLSAASFQETTRVLTDAAIRGKKDHLLGLKENVIIGKIIPAGTGMARYRNIEPQAMNEIEVIDHTEVSAEAVFTAEAE

SEQ ID NO: 385 - DNA, 363 bp, Streptococcus agalactiae
atgtatcaagttgtaaaaatgtttggtgattgggaaccatggtggtttattgaaggttgggaggaagatattactgaaattgctgagtatgataccttatcagaagctttgctctattttcaagaggagtgggataggggacaggaaaagtggccttattttcaaagtaagtctagtttgttggcaacgttttggagtataaaagaaaaacgttggtgtgaagaatgtgatgagtacctccaacagtatcattccttaatgttattgaaagaatggcaagaaattcctaaggaagaatctattgagcgatttgaagtatttaataagatagctgagttgccatcggcatgttctttaaatttg

SEQ ID NO: 386 - protein, 121 aa, Streptococcus agalactiae
MYQVVKMFGDWEPWWFIEGWEEDITEIAEYDTLSEALLYFQEEWDRGQEKWPYFQSKSSLLATFWSIKEKRWCEECDEYLQQYHSLMLLKEWQEIPKEESIERFEVFNKIAELPSACSLNL

SEQ ID NO: 387 - DNA, 363 bp, Streptococcus pyogenes
atgtatcaagtaattaaaatgtatggtgattgggagccttggtggttcatcgatggatggcaagacgatattatagatgagcaacaatttagtgactggcaagaagcgcttgattattttaatcaagaatggcagcgcatgaaagctatttttcctagttatcatagtcaaaagaatttgttagctactttttgggaaaaagaagataaaagatggtgcgaggactgtgacgaagatttgcagcagtttcattctcttttactccttaaaaataaagatattgtaccaagcaataattatatccctgaatttgaacaacgaaatgattcaccacaggtagcttatctttgcaagttaaacctt

SEQ ID NO: 388 - protein, 121 aa, Streptococcus pyogenes
MYQVIKMYGDWEPWWFIDGWQDDIIDEQQFSDWQEALDYFNQEWQRMKAIFPSYHSQKNLLATFWEKEDKRWCEDCDEDLQQFHSLLLLKNKDIVPSNNYIPEFEQRNDSPQVAYLCKLNL

SEQ ID NO: 389 - DNA, 969 bp, Streptococcus agalactiae
atggttcaatcattagcaaagcaagtcattcatcaggcagtagaagtaaatgctcaagatatttatatcattcccaaaggtgattgttatgaactctatatgcgtattgatgatgaaaggcggtttattgatgtttttgagtttaataggatggctagtcttattagtcactttaaatttgtggcaggcatgaacgttggagaaaaaagacgaagtcaattaggttcttgtgactatgaactgtcagagggaagactggtttcattacgactatcgagtgtgggagattatcgtggtcaagaatctttagttattcgtattttgtattcaggtcatcaggacttaaaatattggtttgataatataaagcaaatgaaggaagtactgggtataagagggctatatcttttttccggccctgtggggagtggtaaaacaactctcatgtatcaattagcttcagaagtatttaaaaataagcaaattatcacgattgaagatccggtagaaatcaagaatgacaagatgttacaactccaattgaatgaggatattggaatgacttatgatgctttaatcaaactgtctttacggcatcgtccagatattttaattatcggagagattagagatcaagcgacggcccgtgctgttattcgtgcaagtttaacgggagtgatggttttttctactattcatgctaaaagtattcccggagtctatgataggcttatagaattaggggttaactatcaagagttagaaaatagtctaaaattaatagcatatcaacgtttaattggaggaggaagcctaattgactttgagacaggtaattttaaaaaacactcatcagacaagtggaatagacaagtggatatcttggctgaagaaggacatatcagtaagaaacaggcacaagtcgaaaaaattatccctcaagaaacaacggaaagtagtccaactttt

SEQ ID NO: 390 - protein, 323 aa, Streptococcus agalactiae
MVQSLAKQVIHQAVEVNAQDIYIIPKGDCYELYMRIDDERRFIDVFEFNRMASLISHFKFVAGMNVGEKRRSQLGSCDYELSEGRLVSLRLSSVGDYRGQESLVIRILYSGHQDLKYWFDNIKQMKEVLGIRGLYLFSGPVGSGKTTLMYQLASEVFKNKQIITIEDPVEIKNDKMLQLQLNEDIGMTYDALIKLSLRHRPDILIIGEIRDQATARAVIRASLTGVMVFSTIHAKSIPGVYDRLIELGVNYQELENSLKLIAYQRLIGGGSLIDFETGNFKKHSSDKWNRQVDILAEEGHISKKQAQVEKIIPQETTESSPTF

SEQ ID NO: 391 - DNA, 936 bp, Streptococcus pyogenes
atggtacaagcattagcaaaagctattctagcaaaagctgaacaggttcatgcacaagatatttatattttgccaagagcagatcaatatgatctttttttacgaataggagatgaaaggagattagttgatgtttatcagagcgatcggatggctcctcttattagtcactttaaattcgttgcaggaatgatagttggtgaaaagagacgttgtcaggtgggttcatgtgattataagcttagtaaagataagcagttatctttgcgcttatctagcgtgggtgattatcgcgggcaagaaagcttagtgattcgtctgcttcatcatcaaaataaaagtgtacattattggtttgatggattgacaaaagtagccaatcaggttggcggtagagggttgtatttatttgcaggaccagttgggtctgggaagacaaccttgatgtaccagctgatttcgaattatcatcaagaagcacaggttattagtatagaagatcctgtagaaattaaaaatcaccaaattttacaattacaagtgaatgatgatattggtatgacttatgacaatttgatcaaactgtctttacgccatcgaccagatattttagttattggtgagattcgagatagtcaaacagcaagagccgttattagggctagtctaacaggtgccatggttttttcaacggttcacgctaaaagtatctcgggtgtttatgcaagattgttagaacttggtgtaacgaaagcagaactgtctaattgcttagcattaattgcttaccaaaggttacttaatggaggagcattgattgactctactcaaaacgaatttgaatattattcctcatcgaactggaatcaacaaattgatcagcttcttgaggcaggacatctcaatcccaagcaagctaagcttgaaaaaattatc

SEQ ID NO: 392 - protein, 312 aa, Streptococcus pyogenes
MVQALAKAILAKAEQVHAQDIYILPRADQYDLFLRIGDERRLVDVYQSDRMAPLISHFKFVAGMIVGEKRRCQVGSCDYKLSKDKQLSLRLSSVGDYRGQESLVIRLLHHQNKSVHYWFDGLTKVANQVGGRGLYLFAGPVGSGKTTLMYQLISNYHQEAQVISIEDPVEIKNHQILQLQVNDDIGMTYDNLIKLSLRHRPDILVIGEIRDSQTARAVIRASLTGAMVFSTVHAKSISGVYARLLELGVTKAELSNCLALIAYQRLLNGGALIDSTQNEFEYYSSSNWNQQIDQLLEAGHLNPKQAKLEKII

SEQ ID NO: 393 - DNA, 900 bp, Streptococcus agalactiae
atggtcaccttcttaaagaggagtaagttattgtctgattgttatacagatagtatgaataaggcattattagagggaaaagatttatcaaaaatgttaggagagttaggtttttctgacactgttatcacacaggttgcattagctgatttgcatggtaacatttcaaggagcctactaaagattgagtcttatttagctaatcttttgttagttagaaaaaaagtaatagaagtagctacttacccattgatattattgtcttttctggtgctaattatgattggccttaggaattatttaatgccccaattaggagaaaataattttgcaactagactgattacaaatgtgccgaatattttcttattacttttagcagttgtacttatttttagtttaatattttatattattcaaaagcgattgtcgcgcattaaagtagcttgttttttaacaacaattcccttagttggatcatatgttaagctttatttaactgcttactatgcccgtgagtggggaaatttattaagtcaaggtattgaattggaccaaattgttaaagtaatgcaaaatcagaaatccaaactttttagggaaataggatatgacatggaagaaggttttctatcaggtaaagcatttcaccaaaaagtattagactatccgtttttcttaactgagcttagtttaatgattgaatatggccaagttaaggcgaaattaggaacagagttagatatatatgctgatgagaagtgggaggatttttttacaaaattagctagagcgacccagttaatccaacccgttatttttatttttgtagctcttatcattgttatgatttatgcagcaatgctgttaccaatgtatcaaaatatggagatattatca

SEQ ID NO: 394 - protein, 300 aa, Streptococcus agalactiae
MVTFLKRSKLLSDCYTDSMNKALLEGKDLSKMLGELGFSDTVITQVALADLHGNISRSLLKIESYLANLLLVRKKVIEVATYPLILLSFLVLIMIGLRNYLMPQLGENNFATRLITNVPNIFLLLLAVVLIFSLIFYIIQKRLSRIKVACFLTTIPLVGSYVKLYLTAYYAREWGNLLSQGIELDQIVKVMQNQKSKLFREIGYDMEEGFLSGKAFHQKVLDYPFFLTELSLMIEYGQVKAKLGTELDIYADEKWEDFFTKLARATQLIQPVIFIFVALIIVMIYAAMLLPMYQNMEILS

SEQ ID NO: 395 - DNA, 1032 bp, Streptococcus pyogenes
ttgatcagcttcttgaggcaggacatctcaatcccaagcaagctaagcttgaaaaaattatctagtaaacatcagcataaattcattcaattactagctaatcttttatctacaggatttagcttcgcagaggttattgcttttttaaaaagaagccagttgcttcagctagattatgttcttaaaatggaagagtctttattaaaaggacaaggcttagcagatatgttgtcgggtttaggtttttcagatgctattcttactcaaattagtttagctgatagacacggtaatattgaaacaacattagtagcgattcaacattacttgaaccaaatggcaaggatcagacgaaaaactgttgaagttatcacctatcctcttattcttttactttttctttttgtgatgatgctagggttgagacgctatttagtccctcaattagaaactcaaaatcagataacttactttcttaaccattttcctgccttctttataggtttttgctcaggtcttattttgttgttcgggatggtatggctacgatggcgatctcaaagccgcttgaaactctatagtcggctaagccgttatccttttttaggtaaactgttaaaacaatacttaactagttattatgctagagaatggggtacgttaataggtcaaggtcttgatttgatgactattttagacattatggccattgagaaatcctcactaatgaaagaattagctgaggacatcagaatgagtctgcttgaagggcaagcctttcacattaaagtagctacctaccctttttttaaaaaagaattaagtttaatgattgaatacggtgaaatcaaatcgaaactgggggctgagttggaaatctatgcccaggaaagctgggaacaattttttagtcagctttatcaagtgacacaacttattcaaccagctatttttttagtagttgctgtgacaatcgtcatgatttatgcggcaatcctattaccaatttaccaaaatatgggaggtattttt

SEQ ID NO: 396 - protein, 344 aa, Streptococcus pyogenes
LISFLRQDISIPSKLSLKKLSSKHQHKFIQLLANLLSTGFSFAEVIAFLKRSQLLQLDYVLKMEESLLKGQGLADMLSGLGFSDAILTQISLADRHGNIETTLVAIQHYLNQMARIRRKTVEVITYPLILLLFLFVMMLGLRRYLVPQLETQNQITYFLNHFPAFFIGFCSGLILLFGMVWLRWRSQSRLKLYSRLSRYPFLGKLLKQYLTSYYAREWGTLIGQGLDLMTILDIMAIEKSSLMKELAEDIRMSLLEGQAFHIKVATYPFFKKELSLMIEYGEIKSKLGAELEIYAQESWEQFFSQLYQVTQLIQPAIFLVVAVTIVMIYAAILLPIYQNMGGIF

SEQ ID NO: 397 - DNA, 453 bp, Streptococcus agalactiae
atgaaaaatttattgttaaaatgtaaggataagaaggttaaagcatttacacttttagaatgtttggtagcattggttacaatcacaggagctttactagtttatcaaggactgacaaaattgttggctcaacagatagtagtgatgtcttcttccagtcagtctgaatgggtgttattaactcagcaactaaatgcagaatttgaaggcgctcatctggaatatttaagacagaacaaactttatttacgtaagcaagataagattgtaacctttggcaaatctaataaagatgatttccgtaagacaggttatgatggtcgaggttatcaaccaatggtttatgggttagacaattgtcaaatgagtcagaccaaaagtatggtaaaacttgttttttattttaaggacgggttaaaaaggacattttactatgattttaaagaagaaact

SEQ ID NO: 398 - protein, 151 aa, Streptococcus agalactiae
MKNLLLKCKDKKVKAFTLLECLVALVTITGALLVYQGLTKLLAQQIVVMSSSSQSEWVLLTQQLNAEFEGAHLEYLRQNKLYLRKQDKIVTFGKSNKDDFRKTGYDGRGYQPMVYGLDNCQMSQTKSMVKLVFYFKDGLKRTFYYDFKEET

SEQ ID NO: 399 - DNA, 432 bp, Streptococcus pyogenes
ttgagtaaacaattaagtaacataaaagcttttacccttctagaggcgttaatagccttactcgtgatatcagggtctttattggtttatcaaggtttgacccgaaccctccttaaacatagccattatctagcccgtcatgatcaagataattggctcttattttctcatcaattgcgagaggagttaagtggagcaaggttttacaaagtagctgataataaactatacgttgaaaaaggaaagaaagtactagcttttggccaatttaaaagtcatgattttcgaaaatcagctagtaatggaaaagggtatcaacccatgttatttggaatatcacgtagtcatattcacatagagcagtcacagatttgcattactttaaagtggaaaagtgggttagaaaggactttttattatgcctttcaagac

SEQ ID NO: 400 - protein, 144 aa, Streptococcus pyogenes
LSKQLSNIKAFTLLEALIALLVISGSLLVYQGLTRTLLKHSHYLARHDQDNWLLFSHQLREELSGARFYKVADNKLYVEKGKKVLAFGQFKSHDFRKSASNGKGYQPMLFGISRSHIHIEQSQICITLKWKSGLERTFYYAFQD

SEQ ID NO: 401 - DNA, 972 bp, Streptococcus agalactiae
atgaattttgaaaaaattgagacagcctatgagctgattttagaaaatatccaaacgattgagaaccaattaaaaactcatatttatgatgccttaattgaacagaactcttattaccttggttcaagttgtgatttagatatggttgtggtgaataaccaaaaattacgtcaacttgacttaagtcaagaagaatggcgtcgcactttccagttcatttttatcaaatctgcgcaaacagagcaattacaagctaatcatcagtttacgccagatagtattggttttatcttgttatttcttttggaagaattaacgagtcaagagacagtggatgtcttggaaattggaagtggaactgggaatttagctcagactctcctcaataacagctcgaaagagttaaattatatgggcattgaagttgatgatcttttgattgatctatcagcaagcattgctgaaattataggttctagtgcccaatttatccaagaggatgctgttagaccacaaattttgaaagaaagcgatgtaatcattagtgatttaccagttggctattatcctaatgatggtattgctaaacgatatgctgtatcaagttctaaagagcacacctatgctcaccatctattgatggagcaatctcttaaatatttgaaaaaagatggaatcgctatatttttagcacccgaaaaccttttaacaagtccacaaagtgatttgctgaaggagtggttaaaaggatatgcagatgtcattgccgttttaactctaccagaaactatttttggaagtcgtcaaaatgcgaaatctatatttgttctcaagaagcaagcagaacaaaaaccagaaacctttgtatatccgctgacagatttgcaaaatcgtgagaatatggcaaacttcattgaaaattttcaaaaatggagcagagaaaatagtcattactcaaaaaatatgataaaa

SEQ ID NO: 402 - protein, 324 aa, Streptococcus agalactiae
MNFEKIETAYELILENIQTIENQLKTHIYDALIEQNSYYLGSSCDLDMVVVNNQKLRQLDLSQEEWRRTFQFIFIKSAQTEQLQANHQFTPDSIGFILLFLLEELTSQETVDVLEIGSGTGNLAQTLLNNSSKELNYMGIEVDDLLIDLSASIAEIIGSSAQFIQEDAVRPQILKESDVIISDLPVGYYPNDGIAKRYAVSSSKEHTYAHHLLMEQSLKYLKKDGIAIFLAPENLLTSPQSDLLKEWLKGYADVIAVLTLPETIFGSRQNAKSIFVLKKQAEQKPETFVYPLTDLQNRENMANFIENFQKWSRENSHYSKNMIK

SEQ ID NO: 403 - DNA, 996 bp, Streptococcus pyogenes
gtgacacttcttttcatttcaagtgtaatttggtatgataaggttatgacttttgaaaaaattgaagaagcttatcagctgctcttagagaactgtcaactaattgaaaatgatctaaaaacacatatatacgatgccattgttgaacaaaactccttttatttaggggctgagggagctagtcctcaagttgctcaaaatagtgataaactgaaagccttgtgcctgacaaaagaagaatggcgtaaggcctaccagtttctttttattaaggcagctcagactgagcaactccaagccaaccatcagttcacaccagatgctattggcttcattctgctgtatcttttggaacaattgagtgataaagatagcttagaggtacttgagattggaagtggaacagggaacctagcccaaacccttctcaacaacacgagcaagagccttgattatgtagggattgaacttgatgatctcttgattgatctgtcagccagtattgctgagataatggattcttcagctcattttattcaagaagatgcggtaaggcctcaattactaaaagaaagtgacattgtcatcagtgacttaccagttggttattatcctaacgatgatattgccaaacggtacaaggtggctagttcagataagcatacctatgcccatcatttattaatggaacagtctttaaaatacttgaaaaaagacggttttgcgatttttctggcaccagtcaatttattgacgagccctcagagccagttgttgaaacagtggttaaaagattatgctcaggtggtgaccttgattacgctaccagattctatttttggtcatccctcaaatgccaagtccattattgtcttacaaaaacaaacagaccacccaatggaaacctttgtctatccaattcgggatttgaagcttgcagagaatattcatgattttatggaaaatttcaaaaaatggaaactgagtaatgtcaat

SEQ ID NO: 404 - protein, 332 aa, Streptococcus pyogenes
VTLLFISSVIWYDKVMTFEKIEEAYQLLLENCQLIENDLKTHIYDAIVEQNSFYLGAEGASPQVAQNSDKLKALCLTKEEWRKAYQFLFIKAAQTEQLQANHQFTPDAIGFILLYLLEQLSDKDSLEVLEIGSGTGNLAQTLLNNTSKSLDYVGIELDDLLIDLSASIAEIMDSSAHFIQEDAVRPQLLKESDIVISDLPVGYYPNDDIAKRYKVASSDKHTYAHHLLMEQSLKYLKKDGFAIFLAPVNLLTSPQSQLLKQWLKDYAQVVTLITLPDSIFGHPSNAKSIIVLQKQTDHPMETFVYPIRDLKLAENIHDFMENFKKWKLSNVN

SEQ ID NO: 405 - DNA, 1191 bp, Streptococcus agalactiae
atgtcaaaaacaatagcaattaatgctggaagttcaagtttgaaatggcaattatatgaaatgccagaggagaaagtagttgccaaagggattatcgaacgtattggtttgaaagattctatttcgactgtaaaatttgacgataaaaaagatgaacaaattttagatatcgtagatcatacccaagctgttaaaattcttttagaagatctaacaaaacatggtattatcaaagactttaatgaaattacaggtgttggtcatcgtgtcgttgctggtggtgaatattttaaagagtctgctttagtagatgataaagttgtagaacaggttgaagaattatcagctttagctccactccacaacccagcagctgcagcagggattcgtgcgtttagagaaatcttaccagatatcacgagtgtatgtgtatttgatacagccttccatacaacaatgcaacctcatacctacttatatccaatcccacaaaagtactatactgattataaagtacgtaaatacggtgcacacgggacaagccaccaatacgttgcacaagaagcagctaagcaattaggacgtcctttagaagaattaaaattaatcacagcacatgtgggtaatggtgtttctattacagcaaattatcatggacagtctattgatacatcaatgggattcacaccacttgcaggaccaatgatgggaacacgttcaggagacattgatcctgcgattatcccttatcttgtagctaatgatccagaattggaagatgcagcagctgttgttaatatgcttaacaaacaatcaggattgcttggagtatcaggaacttcaagtgatatgcgagatattgaagcaggtcttcaaagtaaagatccaaatgcagtgttagcctataatgtctttattgaccgtattaagaaatttattggacaatacttggcagtattaaatggcgcggatgctattatttttactgcaggtatgggagaaaatgcgccattaatgcgtcaagatgttatcgcaggattatcatggtttggcattgaacttgatccagaaaaaaatgtttttggttattttggagatatcacaaaaccagattcaaaagtgaaggttttagttattcctactgatgaagaattaatgattgcgcgtgacgttgagcgccttaaagctaaa

SEQ ID NO: 406 - protein, 397 aa, Streptococcus agalactiae
MSKTIAINAGSSSLKWQLYEMPEEKVVAKGIIERIGLKDSISTVKFDDKKDEQILDIVDHTQAVKILLEDLTKHGIIKDFNEITGVGHRVVAGGEYFKESALVDDKVVEQVEELSALAPLHNPAAAAGIRAFREILPDITSVCVFDTAFHTTMQPHTYLYPIPQKYYTDYKVRKYGAHGTSHQYVAQEAAKQLGRPLEELKLITAHVGNGVSITANYHGQSIDTSMGFTPLAGPMMGTRSGDIDPAIIPYLVANDPELEDAAAVVNMLNKQSGLLGVSGTSSDMRDIEAGLQSKDPNAVLAYNVFIDRIKKFIGQYLAVLNGADAIIFTAGMGENAPLMRQDVIAGLSWFGIELDPEKNVFGYFGDITKPDSKVKVLVIPTDEELMIARDVERLKAK

SEQ ID NO: 407 - DNA, 1194 bp, Streptococcus pyogenes
atgtcaaagacaattgcaattaatgcaggtagttctagtttaaaatggcaactttatcagatgccagaagaagcagtgttagcacaaggaattattgagcgtatcggtctcaaggattctatttcaacagttaagtacgatggcaaaaaagaagagcaaattcttgatattcacgatcatacagaagctgttaaaatcttattgaacgatttgattcactttggaatcattgcagcttatgatgaaattacaggagttggacaccgtgttgttgctggtggtgaacttttcaaagaatccgttgtggttaatgacaaagttcttgaacagattgaagaattatccgttttagctccacttcacaatcctggagcggcggcagggattcgtgccttccgtgatattttgccagatattaccagtgtttgtgtgtttgacacgtcatttcacactagcatggcaaagcatacttacctttacccaattcctcaaaaatattatacggactacaaggttcgtaaatatggggcgcatgggacaagtcataaatatgtagcgcaagaagctgctaaaatgcttggtcgtccattagaagaattaaaactaattactgctcatattggaaatggtgtctcaattacagctaattaccacggtaaatcagttgatacctcgatgggctttacaccacttgctggtcctatgatgggaacacgttctggtgacattgacccagctatcattccttatttaattgagcaagacccagagttaaaagacgctgctgacgttgttaatatgttaaacaaaaaatcaggtcttagtggggtgtcaggcatttctagtgatatgcgtgatatcgaggctggtttacaagaagataatccagatgctgttttagcttacaatatctttattgatcgcattaaaaaatgcattggtcaatattttgctgttttgaatggagcagatgctttggtctttacagctggtatgggtgaaaatgcaccattgatgcgtcaagatgttattggtggcttaacatggttcggaatggacattgatcctgagaaaaatgtttttggataccgtggtgacatttcaactcctgagtcaaaagtgaaggtgcttgttatctcaacagacgaagaattgtgcatcgcgcgtgacgttgaacgtttaaaaaatacaaaa

SEQ ID NO: 408 - protein, 398 aa, Streptococcus pyogenes
MSKTIAINAGSSSLKWQLYQMPEEAVLAQGIIERIGLKDSISTVKYDGKKEEQILDIHDHTEAVKILLNDLIHFGIIAAYDEITGVGHRVVAGGELFKESVVVNDKVLEQIEELSVLAPLHNPGAAAGIRAFRDILPDITSVCVFDTSFHTSMAKHTYLYPIPQKYYTDYKVRKYGAHGTSHKYVAQEAAKMLGRPLEELKLITAHIGNGVSITANYHGKSVDTSMGFTPLAGPMMGTRSGDIDPAIIPYLIEQDPELKDAADVVNMLNKKSGLSGVSGISSDMRDIEAGLQEDNPDAVLAYNIFIDRIKKCIGQYFAVLNGADALVFTAGMGENAPLMRQDVIGGLTWFGMDIDPEKNVFGYRGDISTPESKVKVLVISTDEELCIARDVERLKNTK

SEQ ID NO: 409 - DNA, 204 bp, Streptococcus agalactiae
atgaaaaattctctacaaaagttacgaaaatctaggaaattaagtcaagcagaacttgcagttgcacttggagttactaggcaaactattatttctctagaaaaagagaaatacacggcatctttggagctagcatttaagatagcgcgttattttgataaacaaattgaggaagtttttatttatacagaaagtgaaggagga

SEQ ID NO: 410 - protein, 68 aa, Streptococcus agalactiae
MKNSLQKLRKSRKLSQAELAVALGVTRQTIISLEKEKYTASLELAFKIARYFDKQIEEVFIYTESEGG

SEQ ID NO: 411 - DNA, 228 bp, Streptococcus pyogenes
atgaaggagatggcaatggaggttattcttaaaaatcggctcaaagaattacgagctagagatggaattaatcaaacggaaatggctaaactggcaggagtatcgaggcagaccatcagtctcattgagcgtaacgagtacaccccatcagttataattgccatgaaaattgcaaaggtatttcaggaaccagttgaagaggtgtttcgtctagtggaggtcgaggaa

SEQ ID NO: 412 - protein, 76 aa, Streptococcus pyogenes
MKEMAMEVILKNRLKELRARDGINQTEMAKLAGVSRQTISLIERNEYTPSVIIAMKIAKVFQEPVEEVFRLVEVEE

SEQ ID NO: 413 - DNA, 675 bp, Streptococcus agalactiae
ttggaggtttttgtgtcatttattattagaaaaggcaaaattttagctttgctaatagcatttttagttattaatcaacttgttcctatattggctgtgtggctcctaaagaatcactatcaaacgccttttactagtatattgttgattggcttagaattacttattattgctcttttcctttattatgccaaggttaaacaaataatcagatggaaagcattattgacaaggaaagcattagttactattctcttaggttggttatcattgagggttccacaaattattggttacctcattatgactatgcaaggggttaaagatacagcaaatcaaacagtaattatggaattaacaaagcaacttccactagctttgatgttaatttttgccataattggtgcccctattatggaagaaattatatttcgctatattatccctaaagaactttttgcgaaacatcaaaaatggggttttgtcatcggtactttagcttttgctcttattcattccccttctgatataggtagttttattatttatgctgggatgggtgctattttatcttttgtttattataaaactgagcacttagaatatagtataatgattcattttattaacaatgctcttgcttatagcgtgttaatcagtacaatgatgaataac

SEQ ID NO: 414 - protein, 225 aa, Streptococcus agalactiae
MEVFVSFIIRKGKILALLIAFLVINQLVPILAVWLLKNHYQTPFTSILLIGLELLIIALFLYYAKVKQIIRWKALLTRKALVTILLGWLSLRVPQIIGYLIMTMQGVKDTANQTVIMELTKQLPLALMLIFAIIGAPIMEEIIFRYIIPKELFAKHQKWGFVIGTLAFALIHSPSDIGSFIIYAGMGAILSFVYYKTEHLEYSIMIHFINNALAYSVLISTMMNN

SEQ ID NO: 415 - DNA, 693 bp, Streptococcus pyogenes
atgaaaggattcattaattatttaaaaatagcagtgctcattattctggctatggttttcaatgtccttccgatgattttattgcaaaagcaacacgatattcctatggtacttaattggggaattggtattttctacttggttattgttggaagtgtccttattgtattatggggtctttatcaagctaagcaagacacttttattaaacagcaaaaaatgagattggttgactggggttatttagcattattttggttaatcatccgtgtgatagctattgtaggtacccttgttaaccagctatggtctggtcaacaagtgagtgctaatgatgctgcaatacataccttagctagacttatcaaaggtggtttcccgctttatactgccctatttgtacttgtgatagcttttatcgctcctattatggaagaactagtctttagaggatttcctatgattgatctcttcaaaggaaaatcacttaaggtggcaggtttagtgacctctcttgtttttgctttaccacatgccaccaatagtgttgaatttatcatgtacagctgtatgggcatttttctctttgttgcctatcaaagacgaggaaacttaaaagatgctatcttgttacatatttttaataacttgattgaagtcattttgttaatgtcaataggcttaggagtcata

SEQ ID NO: 416 - protein, 231 aa, Streptococcus pyogenes
MKGFINYLKIAVLIILAMVFNVLPMILLQKQHDIPMVLNWGIGIFYLVIVGSVLIVLWGLYQAKQDTFIKQQKMRLVDWGYLALFWLIIRVIAIVGTLVNQLWSGQQVSANDAAIHTLARLIKGGFPLYTALFVLVIAFIAPIMEELVFRGFPMIDLFKGKSLKVAGLVTSLVFALPHATNSVEFIMYSCMGIFLFVAYQRRGNLKDAILLHIFNNLIEVILLMSIGLGVI

SEQ ID NO: 417 - DNA, 768 bp, Streptococcus agalactiae
atgaaaattggaattatcggcgtcggaaaaatggccagtgcaattattcaaggcctcaaacaaacccaacatgacattatcatatccggatcttgcttagagcgttcaaaagaaattgcagaaagacttgatgttacttacgccgaatctcatcagtcattaatcaatcaagctgatattatcatgttaggtattaaacctcaactatttgaaaaggttcttcttccacttgatatcacaaaaccaatcatctcaatggcagcaggaatctccttagcgcgtttaagccaattaactcgttctgatttaccattgattcgtattatgccaaatattaacgcacaaatacttcaaagttgcacagctatttgttacaacaatcatgtatcagatgagttacgacaattagccaaagaaattacggatagttttggaagtagctttgatatagcagaaaccaattttgataccttcactgctctagcaggttctagccctgcctatatctatctatttatagaagccttagctaaagcaggtgtaaaatatggatttccaaaagaacaagcactctctattgtaggacagactgtcttagcttctagtcaaaacctattacaaggacaaaatagcacctctgacttaatcgacaacatttgtagcccaggcggaactactattgctggccttttagacttagaaaaaaatggtctgacgcatagtgttatttctgccattgatgctactattgagaaagcaaaaaaactt

SEQ ID NO: 418 - protein, 256 aa, Streptococcus agalactiae
MKIGIIGVGKMASAIIQGLKQTQHDIIISGSCLERSKEIAERLDVTYAESHQSLINQADIIMLGIKPQLFEKVLLPLDITKPIISMAAGISLARLSQLTRSDLPLIRIMPNINAQILQSCTAICYNNHVSDELRQLAKEITDSFGSSFDIAETNFDTFTALAGSSPAYIYLFIEALAKAGVKYGFPKEQALSIVGQTVLASSQNLLQGQNSTSDLIDNICSPGGTTIAGLLDLEKNGLTHSVISAIDATIEKAKKL

SEQ ID NO: 419 - DNA, 768 bp, Streptococcus pyogenes
atgaaaattggcattattggtgttggcaaaatggctagcgctatcatcaaaggccttaaacaaacaccccatgaacttatcatttcaggatcatctttagaacggtccaaggaaattgcggagcagttagcactgccttatgctatgtcccaccaagaccttattgaccaggttgatcttgttattttaggcatcaagcctcaactatttgaaacggtactcaaaccgcttcacttcaaacagcctattatatctatggcagcaggcatttcccttcaacgactagcaacattcgtaggacaagaccttccgctgctacgtatcatgccaaacatgaatgcacaaattctccaaagcagtaccgctttaacgggaaatgctttggtgtcccaggaattacaagcacgtgttcgagacttaacagatagctttggtagcacatttgatattagtgaaaaggattttgacacctttaccgctttagcagggtcaagtcctgcctatatttatctctttattgaggctttggctaaggctggcgtcaagaatggcatacctaaagcaaaggcgctggagattgttactcaaacagtattggctagcgccagcaatctcaagaccagttctcaaagtccgcacgatttcattgacgctatttgtagccccggtggcacaactattgctggtctgatggagttagaacgccttggcctcacagctactgtcagctctgccattgacaaaaccatcgataaagctaaaagcttg

SEQ ID NO: 420 - protein, 256 aa, Streptococcus pyogenes
MKIGIIGVGKMASAIIKGLKQTPHELIISGSSLERSKEIAEQLALPYAMSHQDLIDQVDLVILGIKPQLFETVLKPLHFKQPIISMAAGISLQRLATFVGQDLPLLRIMPNMNAQILQSSTALTGNALVSQELQARVRDLTDSFGSTFDISEKDFDTFTALAGSSPAYIYLFIEALAKAGVKNGIPKAKALEIVTQTVLASASNLKTSSQSPHDFIDAICSPGGTTIAGLMELERLGLTATVSSAIDKTIDKAKSL

SEQ ID NO: 421 - DNA, 1065 bp, Streptococcus agalactiae
atgtcagatttatttaacaaaattaaaaccgtaactgagcttgatgggattgctggctatgaacacaatatccgcaacttccttcgtcaagaaataactcctttagttgatcaagttgagacagacggacttggtggaatttttggagttaaaaatactcatgagactaatgctcctaaagtcatggttgctgcccatatggatgaagtcggctttatggttagtcatattcagccagatggaacatttcgtgtacttgaggttggaggatggaatcccctagtagtcagctcacaacgctttaccctctacacacgttctggtgatgctattcctgttatatcaggctcagttcctcctcactttcttcgtggacaaagcggtggaacaacattacccaaaattagtgacattgtttttgatggaggattcacagataaaaatgaagctgaaagctttggcattgctcctggcgatatcattgttcctaaatctgaaaccattttaactgcaaatcaaaaacatattatgtcaaaagcttgggataatcgctatggtgtgcttatggtgaccgaattgctaaaaagcttaaaagatcaaagtcttagcaacacacttattgctggggcaaatgttcaagaagaagtcggacttcgtggcgcacatgtttcaacaactaaattcaacccagatatcttcttagctgtcgattgttccccagctggagatatttatggggaacaaggcaaaataggagagggaaccttaatccgtttttatgatcccggacatatcatgcttaaagatatgagagatttcttacttacaacagctgaagaagcaggtataaaataccaatattatgctgcaaatggtggtaccgatgctggggctgctcacctaaaaaatagtggtattccttctacaactatcggtgtctgtgcacgctacattcattctcatcaaacactctacgctatggatgattttctacaagcacaagcttaccttcaggccatcgttaacaaattagaccgctcgacggtggatattattaaaggttat

SEQ ID NO: 422 - protein, 355 aa, Streptococcus agalactiae
MSDLFNKIKTVTELDGIAGYEHNIRNFLRQEITPLVDQVETDGLGGIFGVKNTHETNAPKVMVAAHMDEVGFMVSHIQPDGTFRVLEVGGWNPLVVSSQRFTLYTRSGDAIPVISGSVPPHFLRGQSGGTTLPKISDIVFDGGFTDKNEAESFGIAPGDIIVPKSETILTANQKHIMSKAWDNRYGVLMVTELLKSLKDQSLSNTLIAGANVQEEVGLRGAHVSTTKFNPDIFLAVDCSPAGDIYGEQGKIGEGTLIRFYDPGHIMLKDMRDFLLTTAEEAGIKYQYYAANGGTDAGAAHLKNSGIPSTTIGVCARYIHSHQTLYAMDDFLQAQAYLQAIVNKLDRSTVDIIKGY

SEQ ID NO: 423 - DNA, 1065 bp, Streptococcus pyogenes
atgacagacttattctcaaaaatcaaagaagttaccgaactggatggcattgcgggctatgaacatagcgttcgtgactacctacgcaccaaaataaccccgctggttgaccgtgttgaaacagacgggcttggtggcatttttggtatcagagatagtaaagctgaaaaagccccccgtattttagtagctgcgcacatggacgaagtcggttttatggtcagtgatatcaaagttgacggaacgctacgcgtggttggtatcggtggttggaacccacttgttgtcagttcacaacggtttaccctttacacacgcactggccaagttattccccttatttcaggatcggtacctccccattttttacgtggggcaaatggctctgctagtctaccacatatcgaagatattgtgtttgatggtggctttacggataaggcagaagctgaaagatttggtattacaccgggtgatattattatccctcaatctgaaacgatcctaacagccaatcaaaaaaatattatttcaaaagcttgggacaatcgctatggcgttctcatgataacagaaatgcttgaagcgttaaaaggacaagaccttaacaacaccctaattgcaggtgctaacgttcaagaagaagttggtctgcgcggagcccacgtctcaaccaccaagttcgaccctgaactctttttcgcagtagattgttcgcctgctggtgatatttatggcaatcctggaacaatcggagatggtaccttgttgcgtttctacgacccaggccatgtcatgctcaaagatatgcgcgacttcttactgactactgctgaggaagctggtgtcaatttccaatactattgtggcaagggaggcacagatgcaggtgctgcacaccttcaaaatggtggtgtcccatcaacaaccatcggagtctgtgcacgctacattcactctcatcaaaccctctacgctatggatgatttcgtagaagcccaagccttcttacaagccattatcaaaaaactggatcgctcaaccgttgacttgattaaatgttac

SEQ ID NO: 424 - protein, 355 aa, Streptococcus pyogenes
MTDLFSKIKEVTELDGIAGYEHSVRDYLRTKITPLVDRVETDGLGGIFGIRDSKAEKAPRILVAAHMDEVGFMVSDIKVDGTLRVVGIGGWNPLVVSSQRFTLYTRTGQVIPLISGSVPPHFLRGANGSASLPHIEDIVFDGGFTDKAEAERFGITPGDIIIPQSETILTANQKNIISKAWDNRYGVLMITEMLEALKGQDLNNTLIAGANVQEEVGLRGAHVSTTKFDPELFFAVDCSPAGDIYGNPGTIGDGTLLRFYDPGHVMLKDMRDFLLTTAEEAGVNFQYYCGKGGTDAGAAHLQNGGVPSTTIGVCARYIHSHQTLYAMDDFVEAQAFLQAIIKKLDRSTVDLIKCY

SEQ ID NO: 425 - DNA, 90 bp, Streptococcus agalactiae
atggttaatcattcaaacagaaagaaaaaacatgaaagaaaaattattagtacctgctttaaattgtttgctaggtctactcttcctagg

SEQ ID NO: 426 - protein, 30 aa, Streptococcus agalactiae
MVNHSNRKKKHERKIISTCFKLFARSTLPR

SEQ ID NO: 427 - DNA, 318 bp, Streptococcus agalactiae
gtgtctaattccggggggtatggtataataacagttatgaaaaataaaaaaatcttatttgggactggccttgctggtgtgggtttactggcagctgctggttataccctaactaaaaaagtaacagattataaacgtcagcaaatcactcagaccttaagagaattttttagtcagatgggtgatattcaggtattttattttaatgaatttgaatctgatattaaaatgaccagtggtggtcttgtcttggaagatggcagaattttcgaattcatttatcgtcaaggtgttcttgattatgtggaggtgagcaaa

SEQ ID NO: 428 - protein, 106 aa, Streptococcus agalactiae
MSNSGGYGIITVMKNKKILFGTGLAGVGLLAAAGYTLTKKVTDYKRQQITQTLREFFSQMGDIQVFYFNEFESDIKMTSGGLVLEDGRIFEFIYRQGVLDYVEVSK

SEQ ID NO: 429 - DNA, 291 bp, Streptococcus pyogenes
atgagggatatgagtaaaaagaaaataggtatgatttcaggtatctttggatttagtttagctattggcctaggaatagttatcaaagattattgccaagacaggcagcgtcgacaaatgacaagggatttacgcacctttttttcacctttaggacaaatcgaagttttatatatcaatccttgtcaggtcaaacaagattatatttcaggtggggttgttatgtcaaacggcaaacagtaccaattcacctatcacagtcgacaaattagttttgaggaggacaaggga

SEQ ID NO: 430 - protein, 97 aa, Streptococcus pyogenes
MRDMSKKKIGMISGIFGFSLAIGLGIVIKDYCQDRQRRQMTRDLRTFFSPLGQIEVLYINPCQVKQDYISGGVVMSNGKQYQFTYHSRQISFEEDKG

SEQ ID NO: 431 - DNA, 321 bp, Streptococcus agalactiae
atgattttaccagaatcttatgaagaaatagcagcctatattgatagcactaagaaagttgttttcttttttacagcagattggtgtccagattgtcaatttatatatccagtaatgccatcaattgaaaaagatttctcagattttgtctttgtacgtgttaatcgtgatgactatatagaattagctcagcagtggaatatttttgggattccgagtttcgttgttgtggaaaatggtcaggaactgggtcgtttggttaataagaatcgcaaaacaaaggctgaaattactaaatttctcgctgaaattaactataaa

SEQ ID NO: 432 - protein, 107 aa, Streptococcus agalactiae
MILPESYEEIAAYIDSTKKVVFFFTADWCPDCQFIYPVMPSIEKDFSDFVFVRVNRDDYIELAQQWNIFGIPSFVVVENGQELGRLVNKNRKTKAEITKFLAEINYK

SEQ ID NO: 433 - DNA, 315 bp, Streptococcus pyogenes
atgatcagaccgacttcttatgagtcattagcgactcttattgaaaaagaagataagctggtgttattttttacggcagactggtgtccagactgtcaatttatttatcctattatgccagaaattgaagcagaacttacagatatgacttttgtttgtgttaatcgtgatcagtttatagaggtagcacaaaagtggaatatttttggtattcctagttttgtcgtgattgaaaaaggtcaggaagtagggcgtctggttaacaaaatgagaaagacaaaaactgagattatgcattttttagctgcttatcaa

SEQ ID NO: 434 - protein, 105 aa, Streptococcus pyogenes
MIRPTSYESLATLIEKEDKLVLFFTADWCPDCQFIYPIMPEIEAELTDMTFVCVNRDQFIEVAQKWNIFGIPSFVVIEKGQEVGRLVNKMRKTKTEIMHFLAAYQ

SEQ ID NO: 435 - DNA, 624 bp, Streptococcus agalactiae
atgatttttacttataatagagagcatgttggtgataccttaatggttattgttaaggatagtcaaggagctaagctagatgttgatcgtcgcggacaagtagcacgcgtctatctgcaagatagtaaagaaacagttgcttggaatatctttgaagtgtcaagtttaattgttattgagggagcaggtcaaataactttatctgatcaagatattaaaatccttaatgcagaactactgaaagaaggattcgaagactctcttgttaataatattgaacctacatttgttgtggcgcaaattaaagaaataattgatcatccagatagtgaccatttacatatctgtcaagcagaaatcaacgatgggaagacggtccaaatcgtttgtggggcacctaatgcttcagtaggtcttaaaacagttgcagctcttccaggagctatgatgccaaatggtagccttattttcccaggaaaacttcgtggagaagatagctttggaatgttatgtagtgctcgcgagttagctcttccaaatgctcctcaagtcagaggtatcattgaattatctgatcaggtaattgttggagagtctttcgacgccaataaacattggaaaaat

SEQ ID NO: 436 - protein, 208 aa, Streptococcus agalactiae
MIFTYNREHVGDTLMVIVKDSQGAKLDVDRRGQVARVYLQDSKETVAWNIFEVSSLIVIEGAGQITLSDQDIKILNAELLKEGFEDSLVNNIEPTFVVAQIKEIIDHPDSDHLHICQAEINDGKTVQIVCGAPNASVGLKTVAALPGAMMPNGSLIFPGKLRGEDSFGMLCSARELALPNAPQVRGIIELSDQVIVGESFDANKHWKN

SEQ ID NO: 437 - DNA, 624 bp, Streptococcus pyogenes
atgatttttgcatacaataaagaacaagttggcgatgtcttgatggttatcttacaagacaccaaagatatcaaacgtcaagtagaacgaaaaggcaaagtagcccgtgtttttgcagaagaaagcggcaaaacccttgcttggaatatctttgaagcgtcaagcttgattactattgaaggcaatggacagatttttttgacagacgagaaccttgcaagattaaatgcagagcttgctaaggaaggattttcagaaaggcttgaaccgattgtgggacctgtttttgtggttggtcaaattgttgagatggtggctcatccagatagcgaccatcttaatatctgccaagtggctattggtgaagatcaaacggttcaaatcgtagcgggcgcaccaaatgctgcgcttggtttaaaaacgattgttgccttaccaggtgctataatgccaaatggtagtctgattttcccaggaaaattgcgtggtgaagaaagttatggtatgatgtgctctcctcgtgagttagccttgccaaatgcaccgcaaaaacgtggcattattgaatttgatgagtcagctgtggtaggagaagcttttgacccagccaaacattggaaaggt

SEQ ID NO: 438 - protein, 208 aa, Streptococcus pyogenes
MIFAYNKEQVGDVLMVILQDTKDIKRQVERKGKVARVFAEESGKTLAWNIFEASSLITIEGNGQIFLTDENLARLNAELAKEGFSERLEPIVGPVFVVGQIVEMVAHPDSDHLNICQVAIGEDQTVQIVAGAPNAALGLKTIVALPGAIMPNGSLIFPGKLRGEESYGMMCSPRELALPNAPQKRGIIEFDESAVVGEAFDPAKHWKG

SEQ ID NO: 439 - DNA, 714 bp, Streptococcus agalactiae
atgacaaatgtaactagttataaagaaatgctggctaaaccttggggaaaaatacaatatgaaataacttttgctcaattaagccatatcaaaaatcagaacgttttagattttggagctggtttttgtctcaccgaacaacatctagcaaaagaaaacaatgtaactgctattgaacccaatcctaaactgctttacgataatcaaagtgacaatatttataaaatcctaggttcctacgaagcattaagagatttgcctgatcaaagctttgatactattatttgtcataatgttcttgaatatatagacaaacataatcatcctgcttattttgacgaattttctcgacttctaaaacccaatggagaactatctctcatcaaacataatataaccggtaaaatattacaatcagttatttttagcaatgatacctccactgcgatggaactcttaacaggagaagcaaactttaaaagtgccagttttgaccagggaaatatttataccttagaagaactaaaacaaaatacaaatttattagttgaacgttatcagggtattcgtaccttctattcattacaaccaaaccattttaaaactgaaactggttggctaaacaaaatgcttgctatcgagctaagtgttgctgacaaagctccttataaagatattgcttttttgcaacacatcacacttaaaaagtcattg

SEQ ID NO: 440 - protein, 238 aa, Streptococcus agalactiae
MTNVTSYKEMLAKPWGKIQYEITFAQLSHIKNQNVLDFGAGFCLTEQHLAKENNVTAIEPNPKLLYDNQSDNIYKILGSYEALRDLPDQSFDTIICHNVLEYIDKHNHPAYFDEFSRLLKPNGELSLIKHNITGKILQSVIFSNDTSTAMELLTGEANFKSASFDQGNIYTLEELKQNTNLLVERYQGIRTFYSLQPNHFKTETGWLNKMLAIELSVADKAPYKDIAFLQHITLKKSL

SEQ ID NO: 441 - DNA, 393 bp, Streptococcus agalactiae
atgtataataaagttattatgattgggcgtctaacagcaaagcctgagatggtaaaaacaccaactgacaagtcagtgacgcgtgcaactgttgctgttaatagacgctttaaaggaagtaatggtgagcgtgaagcagattttattaatgtggttatgtggggtcgtctagcggaaacccttgcgagctatgggacaaagggctctttaatttcaatagatggtgaattgcgtacgcgcaagtacgaaaaggatggtcaaacgcactatatcactgaagtattagcatcatcatttcagttgctagaaagccgtgcccaacgtgctatgcgtgaaaataacgtttctggtgatttgtcagatttagtattggaagaagaggagctccccttt

SEQ ID NO: 442 - protein, 131 aa, Streptococcus agalactiae
MYNKVIMIGRLTAKPEMVKTPTDKSVTRATVAVNRRFKGSNGEREADFINVVMWGRLAETLASYGTKGSLISIDGELRTRKYEKDGQTHYITEVLASSFQLLESRAQRAMRENNVSGDLSDLVLEEEELPF

SEQ ID NO: 443 - DNA, 393 bp, Streptococcus pyogenes
atgtataataaagtgatagcaatcggtcgtttggtagctaaaccagaattggtaaaaacagctacggataagcatgtagcacgtctctctttagctgttaatcgaagatttaaaaatgcttctggagagcgagaagctgattttatttcagttgttgtttggggaaagttagcagaaactctggtttcttatgctagcaaaggtagtttgatgtctattgatggcgaacttaggacccgcaagtatgataaagatgggcaagtgcattatgtgacagaagttctctgccaatcatttcaactgcttgaaagtcgtgctcagcgcgctatgagagaaaataatgttactaatgatctagttgatttagtcttagaagaagatactcttcccttt

SEQ ID NO: 444 - protein, 131 aa, Streptococcus pyogenes
MYNKVIAIGRLVAKPELVKTATDKHVARLSLAVNRRFKNASGEREADFISVVVWGKLAETLVSYASKGSLMSIDGELRTRKYDKDGQVHYVTEVLCQSFQLLESRAQRAMRENNVTNDLVDLVLEEDTLPF

SEQ ID NO: 445 - DNA, 726 bp, Streptococcus agalactiae
ttgcttttcacagaaagcaacctttttttattgaaaatagaaaggcaaacgattacaataaaggggatagaaagcaggtttaagatggaaaaagtcattatttttgatatggacggcgttattgttgattccgagtacacgtttttagataataagacagaaatgttacgtgaggagggtattgatacggacgtctcgtatcaataccagtacatggggactacttttgaattcatgtggcaagctatgaaagaggagtttggcttaccgaaaacagtaaaagagtatattgctgagatgaacagacgtcgacaagcgattgtggcgcgtgatggtgttaggcccatcaaaggagctcagcgactgattcattggttacaccaacatggctatcgcttagcagttgcgtcctcatctccaatggtagatattaagcgtaatctaaaagagttgggtgtgacagaatgctttgaatacatggttacaggagaagatgtatcgtcttctaaaccagcaccagatgtttttcttagagctgcagagcttttagatgtagaccctaaagtttgtatagttatagaagatacaagaaatgggagtttagctgctaaggcagcaggaatgtattgctttggctttgctaatcctgattatccaccgcaagatttatcaatggcagacaaggttatttcagattatcaagatatctatatttatcttccggag

SEQ ID NO: 446 - protein, 242 aa, Streptococcus agalactiae
MLFTESNLFLLKIERQTITIKGIESRFKMEKVIIFDMDGVIVDSEYTFLDNKTEMLREEGIDTDVSYQYQYMGTTFEFMWQAMKEEFGLPKTVKEYIAEMNRRRQAIVARDGVRPIKGAQRLIHWLHQHGYRLAVASSSPMVDIKRNLKELGVTECFEYMVTGEDVSSSKPAPDVFLRAAELLDVDPKVCIVIEDTRNGSLAAKAAGMYCFGFANPDYPPQDLSMADKVISDYQDIYIYLPE

SEQ ID NO: 447 - DNA, 654 bp, Streptococcus pyogenes
atgttgatgattaaaggaattatttttgatatggacggtgttttatttgatacagaacctttttatctgaggcgacgagaagatttttttaagacaaagggaattcccattgatcatttgaactctaaagattttattgggggcaatcttcaagaattatggaaagagttgttaggtaaaaatagggatgatgctatcgttaaggcaattacaactgactatgacgcttacaaacaagcgcataagcctccttatcaaaaactgttgattacagaagtgaactcttgtcttgaacagttggaaaaacaaggtattaaactggctgtggcatcaaactcgaagcgtcaggatgttttgttggcgttggagacaacgcaaataaaagattattttgaaataatcctagcgcgtgaagatgtttctagaggcaaaccttatccagatatttataataaagcagtacaaaaactaggattacaaaaaaaacaactgcttgtagtagaggacagccaaaaaggcattgctgccgccaaagcagccaatctgacagtttttgccattaccgactaccgatatggcattgatcagagtcaagctgatcacaagatagatcatttaggacaactgtgtgtaaaaatcggttgttttggatcg

SEQ ID NO: 448 - protein, 218 aa, Streptococcus pyogenes
MLMIKGIIFDMDGVLFDTEPFYLRRREDFFKTKGIPIDHLNSKDFIGGNLQELWKELLGKNRDDAIVKAITTDYDAYKQAHKPPYQKLLITEVNSCLEQLEKQGIKLAVASNSKRQDVLLALETTQIKDYFEIILAREDVSRGKPYPDIYNKAVQKLGLQKKQLLVVEDSQKGIAAAKAANLTVFAITDYRYGIDQSQADHKIDHLGQLCVKIGCFGS

SEQ ID NO: 449 - DNA, 102 bp, Streptococcus agalactiae
ttggtggacctctggttggatcaattgttggttttattggaggagttcatcgcttttttcaaggaagcttttcaggttctttctatattgtcagttcagttc

SEQ ID NO: 450 - protein, 34 aa, Streptococcus agalactiae
MVDLWLDQLLVLLEEFIAFFKEAFQVLSILSVQF

SEQ ID NO: 451 - DNA, 138 bp, Streptococcus agalactiae
gtggaacctaaactatttaaaatcatcattggaatgacaatcattttgacaagttcccatcctgtaaaaatgccaacaaatagcatctggatactttcggcaataatactaattaaaataacttggcttgttgaaggg

SEQ ID NO: 452 - protein, 46 aa, Streptococcus agalactiae
MEPKLFKIIIGMTIILTSSHPVKMPTNSIWILSAIILIKITWLVEG

SEQ ID NO: 453 - DNA, 1743 bp, Streptococcus agalactiae
atgttgatggtgttgttattccaaaggctaggaattattatgattttagcctttttattggtaaataatagttattttagacagttaattgaagagcggtctaaacgtgaaacggtagtccttgtcatcattttcggcttgtttgttattatatctaatataacaggaattgaaataaaaggggatcgaagtttggtcgagcgcccttttctaacaacgatttctcattctgactcacttgctaatacaaggactttagttattacaacggcaagtttggttggtggacctctggttggatcaattgttggttttattggaggagttcatcgcttttttcaaggaagcttttcaggttctttctatattgtcagttcagttctagtcggcattgttagcggaaagattggtgataagcttaaggaaaaccatctctacccttcaacaagccaagttattttaattagtattattgccgaaagtatccagatgctatttgttggcatttttacaggatgggaacttgtcaaaatgattgtcattccaatgatgattttaaatagtttaggttccacacttttccttgcgattttgaaaacttatttgtcaaatgaaagtcagttacgcgcagttcaaacgagagatgttcttgaattgactcgacagactctgccctaccttagacaaggtttgacaccgcaatctgctaggagcgtttgcgaaattataaagaggcatactaactttgatgctgtgggattaacagatcggtcaaacgtattagctcatattggtgttggccatgatcaccatattgcaggacaaccggtcaaaacagacttatctaaaagtgttatttttgatggcgaaccaagaattgcgcaagataaagcggcgatttcttgtccagatcacaactgtcagttaaattctgctattgtagttcctctaaaaataaatgataaaactgtgggtgccttaaaaatgtactttgcaggagataagacaatgtctgaggtggaggaaaacctagtccttggtttagcgcaaatattttcaggacaactggcaatggggataacagaggaacaaaataagttagccagtatggcagagataaaggctttacaagcacaaatcaaccctcatttcttctttaatgccattaacacaattagtgcattaatccgtattgattctgataaagcacgttatgcactgatgcagttaagtactttttttagaacaagtttgcagggtggtcaggatcgtgaggtaacgcttgagcaagaaaaatcacatgtggatgcttatatgaatgttgaaaaattacgtttccctgataaatatcagttatcttatgatattagtgcaccagaaaaaatgaagttaccaccttttggtttacaggtactggtagagaatgcagttcgacatgctttcaaagaacgtaagacggacaaccatatattggttcaaataaagccagatggtcattattattgtgtttctgttagtgacaatggacaaggaatctcagatactatcattgataaattaggtcaagaaacagttgcagagagtaagggtacaggtactgctctagttaatctaaataacaggctgaatttattatatggtagtgtaagttgccttcatttttcgagcgacaagaatggtacaaaagtttggtatcgaatacctaatagaataagggaggatgagcatgaaaattttaattct

SEQ ID NO: 454 - protein, 581 aa, Streptococcus agalactiae
MLMVLLFQRLGIIMILAFLLVNNSYFRQLIEERSKRETVVLVIIFGLFVIISNITGIEIKGDRSLVERPFLTTISHSDSLANTRTLVITTASLVGGPLVGSIVGFIGGVHRFFQGSFSGSFYIVSSVLVGIVSGKIGDKLKENHLYPSTSQVILISIIAESIQMLFVGIFTGWELVKMIVIPMMILNSLGSTLFLAILKTYLSNESQLRAVQTRDVLELTRQTLPYLRQGLTPQSARSVCEIIKRHTNFDAVGLTDRSNVLAHIGVGHDHHIAGQPVKTDLSKSVIFDGEPRIAQDKAAISCPDHNCQLNSAIVVPLKINDKTVGALKMYFAGDKTMSEVEENLVLGLAQIFSGQLAMGITEEQNKLASMAEIKALQAQINPHFFFNAINTISALIRIDSDKARYALMQLSTFFRTSLQGGQDREVTLEQEKSHVDAYMNVEKLRFPDKYQLSYDISAPEKMKLPPFGLQVLVENAVRHAFKERKTDNHILVQIKPDGHYYCVSVSDNGQGISDTIIDKLGQETVAESKGTGTALVNLNNRLNLLYGSVSCLHFSSDKNGTKVWYRIPNRIREDEHENFNS

SEQ ID NO: 455 - DNA, 723 bp, Streptococcus pyogenes
ttgacagaccttgcccaacagtttaatgcgctcttagatcaaattgatagcttgatggttgccgttgcggataaggaaaaggcgattgggcagtataggttacaagccttggctagtcagattaacccgcattttctctataacaccttggacactattatttggatggcagaatttaatgacagcaagcgcgtggtagaagtgaccaagtctctagctaagtattttcgtttggcccttaatcaggggaacgaatacattcgtttggcagatgaactggatcacgttagccaatacctctttattcaaaaacagcgctatggagacaagctaagttatgaagtgcaaggcttagatgtctacgcagactttgttattcctaagcttatcttacagcccttagtagaaaatgctatctaccatggcatcaaagaagtcgatcgcaagggcatgatcaaggttacggtatctgatacagctcagcatctgatgttgactgtttgggataatggtaaaggcattgaagactcttcactgaccaatagtcagagcttgttggctaggggaggtgtgggccttaaaaatgttgaccagcggttaaaacttcactatggtgaaggctaccacatgaccattcatagccagtcagaccagttcactgaaatacaattaagccttcctaaaatgcatgaattaatggcagacgacacacaggaaaacgag

SEQ ID NO: 456 - protein, 241 aa, Streptococcus pyogenes
LTDLAQQFNALLDQIDSLMVAVADKEKAIGQYRLQALASQINPHFLYNTLDTIIWMAEFNDSKRVVEVTKSLAKYFRLALNQGNEYIRLADELDHVSQYLFIQKQRYGDKLSYEVQGLDVYADFVIPKLILQPLVENAIYHGIKEVDRKGMIKVTVSDTAQHLMLTVWDNGKGIEDSSLTNSQSLLARGGVGLKNVDQRLKLHYGEGYHMTIHSQSDQFTEIQLSLPKMHELMADDTQENE

SEQ ID NO: 457 - DNA, 744 bp, Streptococcus agalactiae
atgagcatgaaaattttaattcttgatgatgaaatgtttgccagacaagaattatcgtttttagttgaacatagccaggaggttgacaaccctgagatttttcaggctgaggatatcagtgaagccgaaaaaatcttatttagacagcaaattgatttaatttttttagatatttcgcttagtgaagaaaatggctttactttggctaatcagttgagccaacttgcacatcccccacttgttgtttttgcgacagcttatgataactacgctgtgaaagcttttgaaagtaacgctgttgattatatcatgaaaccgtttgaacaacagcgcgttgatatggctctatcaaaagtgaagaaattgagccaactcaccactgcttcagatgtagagcaagcaatacctaaaaaagccagtgttgaattgttaaccttgacattatcagatcgcagtgttgttgttaaaatgcaagatattgttgcagctagtgttgaagatggcgaattaactgttagtacagttcagaaaacttacactattcggaagacactcaattggtttaagtcacgcgctgtagcaccatattttctccagattcatcgaaacacagtgattaatctagagatgattgaggaaattcaaccttggtttaatcatactttgttactaattatgtctaatggagagaaatttccagtaggtcgatcgtatttaaaagacctaaatgagcatttaaccatg

SEQ ID NO: 458 - protein, 248 aa, Streptococcus agalactiae
MSMKILILDDEMFARQELSFLVEHSQEVDNPEIFQAEDISEAEKILFRQQIDLIFLDISLSEENGFTLANQLSQLAHPPLVVFATAYDNYAVKAFESNAVDYIMKPFEQQRVDMALSKVKKLSQLTTASDVEQAIPKKASVELLTLTLSDRSVVVKMQDIVAASVEDGELTVSTVQKTYTIRKTLNWFKSRAVAPYFLQIHRNTVINLEMIEEIQPWFNHTLLLIMSNGEKFPVGRSYLKDLNEHLTM

SEQ ID NO: 459 - DNA, 738 bp, Streptococcus pyogenes
gtgtactcattgttaattgtagaagacgaataccttgtgcgccagggtattcgttctttggttgattttagccagttcaagattgatcgggtcaacgaagcagaaaatggccagttggcttgggacttgtttcagaaagagccttatgatattgttttgacggatatcaatatgcccaaattaaatgggattcaactagcagaactcattaaacaggaatccccccaaactcatctggtatttttgacgggctacgatgattttaactatgccttatctgctttgaaattaggggcagatgattacttgctcaaacccttttccaaggcagatgtagaagacatgttaggaaagctccggaaaaaattagaactttccaagaaaacagaaaccattcaggaattggttgagcagcctcaaaaagaagtatcagcaatagcaatggctattcatgagcggttggcagattctgatttgaccctaaaaagcttggctcagcagcttggttttagccctaattaccttagcgtcttgattaaaaaagagttagggatgccctttcaagattatctggtacaagaacggttgaaaaaagccaagcttctcttgttaaccagtaatcttaaaatctatgaaattgcagagcaggtcggttttgaggacatgaattatttttctcagcgctttaagcaactggtaggcgttaccccaagtcagtataaaaaaggaggccaggca

SEQ ID NO: 460 - protein, 246 aa, Streptococcus pyogenes
VYSLLIVEDEYLVRQGIRSLVDFSQFKIDRVNEAENGQLAWDLFQKEPYDIVLTDINMPKLNGIQLAELIKQESPQTHLVFLTGYDDFNYALSALKLGADDYLLKPFSKADVEDMLGKLRKKLELSKKTETIQELVEQPQKEVSAIAMAIHERLADSDLTLKSLAQQLGFSPNYLSVLIKKELGMPFQDYLVQERLKKAKLLLLTSNLKIYEIAEQVGFEDMNYFSQRFKQLVGVTPSQYKKGGQA

SEQ ID NO: 461 - DNA, 345 bp, Streptococcus agalactiae
gtgacactgagttctctgatagcaagtattaatcgtgcaacatatgctaccactaccaacataacaacagttgagattgtaataacagcaactagttgcaagccttcagcttttaggatatcaagattcgctgctactgatattcctgaggggacaaacataaaaccaatcatgcttatcatcaaagccccaaaagagtcaacccactctaccttgataattttagcagttagcaatacatacattagcaccaaaccaataaccgtcgttgggattggtagtgatttcggtaataacattgaaatcatttgtgaaactaatagaatagctgcatatattgacatt

SEQ ID NO: 462 - protein, 115 aa, Streptococcus agalactiae
MTLSSLIASINRATYATTTNITTVEIVITATSCKPSAFRISRFAATDIPEGTNIKPIMLIIKAPKESTHSTLIILAVSNTYISTKPITVVGIGSDFGNNIEIICETNRIAAYIDI

SEQ ID NO: 463 - DNA, 459 bp, Streptococcus agalactiae
gtgactatgaaacacaccagtaaagaaaccaaaacaaaagaagctccaatgtttattcaaatgtcaatatatgcagctattctattagtttcacaaatgatttcaatgttattaccgaaatcactaccaatcccaacgacggttattggtttggtgctaatgtatgtattgctaactgctaaaattatcaaggtagagtgggttgactcttttggggctttgatgataagcatgattggttttatgtttgtcccctcaggaatatcagtagcagcgaatcttgatatcctaaaagctgaaggcttgcaactagttgctgttattacaatctcaactgttgttatgttggtagtggtagcatatgttgcacgattaatacttgctatcagagaactcagtgtcacagatttatttaaaaagatattacctaaccactatagtaagaaagtagaggaaaaa

SEQ ID NO: 464 - protein, 153 aa, Streptococcus agalactiae
MTMKHTSKETKTKEAPMFIQMSIYAAILLVSQMISMLLPKSLPIPTTVIGLVLMYVLLTAKIIKVEWVDSFGALMISMIGFMFVPSGISVAANLDILKAEGLQLVAVITISTVVMLVVVAYVARLILAIRELSVTDLFKKILPNHYSKKVEEK

SEQ ID NO: 465 - DNA, 726 bp, Streptococcus agalactiae
atggaactcttaaaaacacccatctttggtatttgcttttctttaatactctatacgataggagaacatttatttaagaagagtaaaggtttcttccttttgcagcctcttttctttgcaatggttagtggtattgtcattctttggcttatgtcaaaaggtttaggaaccgatgttaagacattttatacacaagcttataaaccaggtggtgatttaatattttggtttttaaatccagcgacaattgcttttgcagttcctctctataagaaaaatgacgttgttaaaaaatattgggtagaaattctcagcagtttagtaatcggtatgattgtttcccttatacttatcgtcgctatttctaaaatggttgggcttagtcaagtcggaattgcttcaatgttgccacaagcagcaacaacagcaattgctcttccaataacagcagcaattggagggaacacagctgtgacagcaatggcgtgtatcttaaatgcagttattatttatgcattaggtaaaaaattagtgtcatttttccatttgaatgatagtaagattggtgcaggattaggtctagggacctctggtcatacagtcggagcagcctttgcattggaattgggagaactgcaaggtgcgatggcagctatagctgtggtggttatcggtttggtagttgatttggttattcctatctttagtcatttgattggtttgcta

SEQ ID NO: 466 - protein, 242 aa, Streptococcus agalactiae
MELLKTPIFGICFSLILYTIGEHLFKKSKGFFLLQPLFFAMVSGIVILWLMSKGLGTDVKTFYTQAYKPGGDLIFWFLNPATIAFAVPLYKKNDVVKKYWVEILSSLVIGMIVSLILIVAISKMVGLSQVGIASMLPQAATTAIALPITAAIGGNTAVTAMACILNAVIIYALGKKLVSFFHLNDSKIGAGLGLGTSGHTVGAAFALELGELQGAMAAIAVVVIGLVVDLVIPIFSHLIGLL

SEQ ID NO: 467 - DNA, 1626 bp, Streptococcus agalactiae
gtgactaaatatttgaagtacatctcttttgttgctttgtttctggcgagtatctttttagtagcttgtcaaaatcaaaattcacaaaccaaggagcgaacgcgaaaacaacgacccaaagatgaattggttgtttctatgggggcaaagcttcctcatgaattcgatccaaaggaccgttatggaatccataatgaaggtaatattactcatagcaccctattgaaacgttctcctgaactagatataaaaggagagcttgctaaaaaatataaaatctctaaggatggcttaacgtggtcgttcgacttaaatgatgattttaaattctccaatggtgagcctgttactgctgacgatgttaagtttacttatgatatgttgaaagcagatggaaaagcttgggatttgacctttattaagaatgttgaagtagttgggaaaaaccaggtaaatattcatttgactgaggcgcattcgacatttacagcacagttgacagaaatcccaatcgtccctaaaaaacattacaatgataagtataagagcaatcctatcggttcaggaccttacatggtgaaagaatataaggctggagaacaagcaatcttcgttcgaaatccctattggcacggtaaaaagccttattttaaaaagtggacttgggtattacttgatgaaaatacagcactagctgctttagaatctggtgatgttgacatgatttacgcaacgccagagcttgctagcaagaaagtcaaaggaacacgtcttctagatattgcttcaaacgacgttcgcggactgtcattgccttatgtgaagaaaggtgttgtgaaaaattcaccagacggttatccagtaggaaatgatgtcactagtgatccagcaatcagaaaagccttgactattggtttaaatagacaaaaagttctggatactgttttaaatggttatggtaaaccagcttattcaattattgatagaacaccattctggaatccaaaaacagcaattaaagataataaagtagctaaagctaagcaacttttgacaaaagctggatggaaagaacaagcagacggtagccgtaaaaaaggaaatcttaaatcggaatttgacctttactaccctactaatgatcaattacgagcaaacttagccgttgaagtagcggagcaagctaaagccttaggtattactattaaactcaaggctagtaactgggatgaaatggcaactaagtcacatgattcagccttactttatgcgggaggacgtcatcatgcgcagcaattttatgaatcacattacccaagtttagctggtaaaggttggaccaatattactttttataacaatcctactgtgactaagtaccttgacaaagcaatgacatctcctgaccttgataaagctaacaaatattggaagttagctcagtgggatggcaaaacaggtgcttccactcttggagatttaccaaatgtatggttggtgagtcttaaccatacttatattggtgataaacgtatcaatgtaggtaaacaaggtgtccatagtcatggtcatgattggtcattattgactaacattgctgaatggacttgggatgaatctgctaag

SEQ ID NO: 468 - protein, 542 aa, Streptococcus agalactiae
MTKYLKYISFVALFLASIFLVACQNQNSQTKERTRKQRPKDELVVSMGAKLPHEFDPKDRYGIHNEGNITHSTLLKRSPELDIKGELAKKYKISKDGLTWSFDLNDDFKFSNGEPVTADDVKFTYDMLKADGKAWDLTFIKNVEVVGKNQVNIHLTEAHSTFTAQLTEIPIVPKKHYNDKYKSNPIGSGPYMVKEYKAGEQAIFVRNPYWHGKKPYFKKWTWVLLDENTALAALESGDVDMIYATPELASKKVKGTRLLDIASNDVRGLSLPYVKKGVVKNSPDGYPVGNDVTSDPAIRKALTIGLNRQKVLDTVLNGYGKPAYSIIDRTPFWNPKTAIKDNKVAKAKQLLTKAGWKEQADGSRKKGNLKSEFDLYYPTNDQLRANLAVEVAEQAKALGITIKLKASNWDEMATKSHDSALLYAGGRHHAQQFYESHYPSLAGKGWTNITFYNNPTVTKYLDKAMTSPDLDKANKYWKLAQWDGKTGASTLGDLPNVWLVSLNHTYIGDKRINVGKQGVHSHGHDWSLLTNIAEWTWDESAK

SEQ ID NO: 469 - DNA, 129 bp, Streptococcus agalactiae
atgactggatcaaccggtgattgttttagtaaaataaaggtcaaaattgatactccaaaaacgagtgacaaacacctaagtatcttccagataactacagtggtaatatgtttcacagataaatctcct

SEQ ID NO: 470 - protein, 43 aa, Streptococcus agalactiae
MTGSTGDCFSKIKVKIDTPKTSDKHLSIFQITTVVICFTDKSP

SEQ ID NO: 471 - DNA, 861 bp, Streptococcus agalactiae
atggcaagtgtcaattatgacacgtcactaacccctgttcagtacaaagcgattgctcaccactatggtttggataagccagctccggtccagtattttatttggttaaaaaattttatacagggacatttagggacttcactagtttatcggcaacctgttattgatattattagatcacgggcaggtgcctctttcatacttatgggactctcctgggtcttatcgggtcttattggatttatcttaggaactttatcagctttccatcaagggaaattgcttgatcgaattgtaaggtggttttcttaccttcagatatcagtaccaactttttggattgggctcatttttttattaatcttttctgtccagctggggtggttcccgattggtatttcttccccgataggtactttgagtcaagatattacgttagctgatcgtattaagcaccttattttacctgttttcacgctaagtattctaggcattgccaatgtaactcttcatactagaactaaaatgatgtcggtactttctagtgaatatgtcttatttgccagagcgcgtggggaaacggaatggcaaatttttaaaaatcattgtcttagaaatgctatcgtaccagctattacactgcatttttcctattttggagaattgtttggaggatccgttcttgctgagcaagttttctcatatccaggactagggtctaccctaactgaagcaggacttaaaagtgatacaccgctacttctagctattgtgatgatagggacattatttgtttttgcgggcaatcttattgcggatattttaaacagcataatcaatccacagttaaggagaaaagta

SEQ ID NO: 472 - protein, 287 aa, Streptococcus agalactiae
MASVNYDTSLTPVQYKAIAHHYGLDKPAPVQYFIWLKNFIQGHLGTSLVYRQPVIDIIRSRAGASFILMGLSWVLSGLIGFILGTLSAFHQGKLLDRIVRWFSYLQISVPTFWIGLIFLLIFSVQLGWFPIGISSPIGTLSQDITLADRIKHLILPVFTLSILGIANVTLHTRTKMMSVLSSEYVLFARARGETEWQIFKNHCLRNAIVPAITLHFSYFGELFGGSVLAEQVFSYPGLGSTLTEAGLKSDTPLLLAIVMIGTLFVFAGNLIADILNSIINPQLRRKV

SEQ ID NO: 473 - DNA, 819 bp, Streptococcus agalactiae
atgatattgagacgtcgaactattgttttatggcaactgggtatcgccatttctctcattcttagtattctagccttaaatctttatttccatagtactcccttgcaaaccaatgcagctttacggaaccttgctccttcattaaaccatctttttgggacagatggtttaggtagggatatgtttgtcagaacgattaaaggactttatttctctctacaagtctgcttattaggtgcccttatgggggtcattctggcgacagtttttggagtgcttgcaggtttaggaaatagcattattgataaaataatagcatggttagttgatttgtttattggtatgcctcatttgatttttatgattctcatttcttttgttgttgggaaaggtgctcaaggggtcatcattgcaacggctgttacacattggccttctttagcaaggcttatccgcaatgaagtctatcatctaaagaataaagaatttgtccaactttctaaaagtatgggaaaaacgccttattatattgtgaggcatcatatcctgcctttgattgcttctcaaattttcattggttttatcctcttatttccacatgtcatcctacatgaagcatcaatgactttcttaggatttgggctctctgccgaacaaccttcggttggtatcattctgtcagaggcagctaagcatatctctcttggaaattggtggttggttatctttccaggactttatcttattttggttgtcaatgcatttgatactatcggagaatctttaaagaaactcttttaccctcaaactgatcatttt

SEQ ID NO: 474 - protein, 273 aa, Streptococcus agalactiae
MILRRRTIVLWQLGIAISLILSILALNLYFHSTPLQTNAALRNLAPSLNHLFGTDGLGRDMFVRTIKGLYFSLQVCLLGALMGVILATVFGVLAGLGNSIIDKIIAWLVDLFIGMPHLIFMILISFVVGKGAQGVIIATAVTHWPSLARLIRNEVYHLKNKEFVQLSKSMGKTPYYIVRHHILPLIASQIFIGFILLFPHVILHEASMTFLGFGLSAEQPSVGIILSEAAKHISLGNWWLVIFPGLYLILVVNAFDTIGESLKKLFYPQTDHF

SEQ ID NO: 475 - DNA, 801 bp, Streptococcus agalactiae
atgacagaaacattattaagcattaaagacctctccatcaccttcactcaatacggaagatttttaaaaccatttcaatcaacaccgatacaagcgctgaatttagaaattaaaaaaggtgagttattagctattataggtgctagtggttcagggaagagtttattagcacatgctattatggatattcttcctaaaaatgcatctgtaacaggagatatgatttatcgtggtcaatcactaaattctaaacgcattaaacagttgcgaggaaaagatattacgttgattccacaatcagttaattatttagatccatctacgaaagtcaaacatcaggtgcgcttaggtatctcagaaaattcaaaggctactcaagaaggattgtttcaacagtttggtttaaaagaaagtgatggtgacttgtatcctttccaactttctggcggaatgctccgacgtgttttgtttacaacgtgtattagtgataaggtttctttgattattgcggatgagcccacccctggattacatccagatgctctgcaaatggttttagaccaactacgctcctttgcagataaaggaataagcgttatatttatcactcatgatattgtagcagctagtcaaattgctgatcgtattactatttttaaagagggaaaagctattgaaacagctccagctagtttctttagcggaaatggagagcagttacaaacagaatttgctagaagtttatggcgctctctcccacagcaagaatttttgaaaggagttactcatgaccttagaggc

SEQ ID NO: 476 - protein, 267 aa, Streptococcus agalactiae
MTETLLSIKDLSITFTQYGRFLKPFQSTPIQALNLEIKKGELLAIIGASGSGKSLLAHAIMDILPKNASVTGDMIYRGQSLNSKRIKQLRGKDITLIPQSVNYLDPSTKVKHQVRLGISENSKATQEGLFQQFGLKESDGDLYPFQLSGGMLRRVLFTTCISDKVSLIIADEPTPGLHPDALQMVLDQLRSFADKGISVIFITHDIVAASQIADRITIFKEGKAIETAPASFFSGNGEQLQTEFARSLWRSLPQQEFLKGVTHDLRG

SEQ ID NO: 477 - DNA, 801 bp, Streptococcus pyogenes
atgacagaaacattattaagcattaaagacctctccatcaccttcactcaatacggaagatttttaaaaccatttcaatccacaccgatccaagcgctgaatttagaagttaaaaaaggtgagttattagctattataggtgctagtggttcaggcaagagtttattagcacatgctattatggatattcttcctaaaaatgcagctgtaacaggagatatgatttatcgtggtcaatcactaacttctaaacgcatcaaacagttgcgaggaaaagaaatgacgttgattccacaatccgttaattatttagatccatctatgaaagtcaagcatcaggtgcgcttgggtatctcagaaaatgctaaggctactcaagaaggattgtttcaacagtttggattaaaagaaagtgatggtgacttgtatcctttccaactttctggcggaatgctccgacgtgttttgtttacaacgtgtattagtgatacggtttctttgattattgcggatgagcccacccctggattacatccagatgctctgcaaatggttttagatcaactacgctcctttgcagataaaggaataagcgtcatatttatcacccatgatattgtagcagctagtcaaattgcggatcgtattactatttttaaagagggaaaagctattgaaacagccccagctagcttttttagcggaggtggggagcaattacaaacagaatttgcgagacgtttatggcgcacactccctcagcaagactttttgaaaggagttactcatgaccttagaggc

SEQ ID NO: 478 - protein, 267 aa, Streptococcus pyogenes
MTETLLSIKDLSITFTQYGRFLKPFQSTPIQALNLEVKKGELLAIIGASGSGKSLLAHAIMDILPKNAAVTGDMIYRGQSLTSKRIKQLRGKEMTLIPQSVNYLDPSMKVKHQVRLGISENAKATQEGLFQQFGLKESDGDLYPFQLSGGMLRRVLFTTCISDTVSLIIADEPTPGLHPDALQMVLDQLRSFADKGISVIFITHDIVAASQIADRITIFKEGKAIETAPASFFSGGGEQLQTEFARRLWRTLPQQDFLKGVTHDLRG

SEQ ID NO: 479 - DNA, 624 bp, Streptococcus agalactiae
atgaccttagaggctaaaaagcttggcttttatcataaaaaagatcaatggctttttaaggagattaatttagaggtagcacctggtcaagttttaggtatatttggacaaagtggttgtggaaaaactagtttatccagggtgcttgcaggttttttacatcctaaatctggtgaagtattagttgatggcagtaatttgcctagcaaagcatttagacctgtacaacttattcaacaacatcctgaaaaaacgatgaatcctttatggcctatgaaaaaaagtttggaagaagcctattacccaagtcgagatttactagatgcttttggaattcaagaaaaatggctaaatcgtcgacctagtgaactctcgggaggagaattacaacgcttttcgattgtgcgttcattacatccagagactaaataccttattgcagatgaaatgactactatgttggatagcattacacaagctagtgtatggaaaagcctgttggagattgtaaaggatagaaatttaggtctcatcgttattagtcatgatttcgctatgttagagaaactttgtaaccaatgctatatgattgaagagaatcgtatcgtatctttcaatggagat

SEQ ID NO: 480 - protein, 208 aa, Streptococcus agalactiae
MTLEAKKLGFYHKKDQWLFKEINLEVAPGQVLGIFGQSGCGKTSLSRVLAGFLHPKSGEVLVDGSNLPSKAFRPVQLIQQHPEKTMNPLWPMKKSLEEAYYPSRDLLDAFGIQEKWLNRRPSELSGGELQRFSIVRSLHPETKYLIADEMTTMLDSITQASVWKSLLEIVKDRNLGLIVISHDFAMLEKLCNQCYMIEENRIVSFNGD

SEQ ID NO: 481 - DNA, 624 bp, Streptococcus pyogenes
atgaccttagaggctaaaaagcttggcttttatcataaaaaagatcaatggctttttaaggagattgatttagaggtagcacctggtcaaatcttagggatatttggacaaagtgggtgtggaaaaacgagtttatccagagtgcttgctggttttttgcagcctaaatctggtgaagtattagttgatggcagtcatttgcctaacaaagcatttagacctgtacaacttatccaacaacatcctgaacaaaccatgaatcctttatggcctatgaaaaaaagtttggaagaagcctactatccaagtcaagatttgcgagatgcttttggcattcaagaaaaatggctaaagcgtcgtcctagtgaactctcgggaggggaattgcaacgcttttcgattgtgcgttcattacatccagagacgaaataccttattgcagatgaaatgactactatgttggatagcattacacaagctagtgtatggaaaagcctgttggagattgtaaaggatagaaatttaggtctcatcattattagtcatgagtttgatatgttagaaaaactttgtgacgcgtgctatatgattgaagagaatcgtactcaactgttcaagcatacc

SEQ ID NO: 482 - protein, 208 aa, Streptococcus pyogenes
MTLEAKKLGFYHKKDQWLFKEIDLEVAPGQILGIFGQSGCGKTSLSRVLAGFLQPKSGEVLVDGSHLPNKAFRPVQLIQQHPEQTMNPLWPMKKSLEEAYYPSQDLRDAFGIQEKWLKRRPSELSGGELQRFSIVRSLHPETKYLIADEMTTMLDSITQASVWKSLLEIVKDRNLGLIIISHEFDMLEKLCDACYMIEENRTQLFKHT

SEQ ID NO: 483 - DNA, 2028 bp, Streptococcus agalactiae
atggaacaatttaaacatgatgccaaagccttgttagaggcaattgggggtaaagaaaatattagtgcagtgacacattgtgctacacgcatgcgatttgttttgaatgacagtagtaaagctaaggtaaaggtaattgaggagttaccatcagtcaagggtacctttaccaatgctgggcaatttcaagtcattattggtaatgatgtccctattttttataatgcttttgtagccgtttctggtattgagggtgtgtctaaagaggcggcaaaatcggctgcccaaaaaaatcaaaaccctttacagcgtgtgttgacaatgctggctgaaatatttacaccgattattccagccattattgttggtggtctgatccttggttttcgtaatattttagatgccgttccatttgaatttttaggtcaaaaagttgttgatggtgtcaggcaagtagactcttctgggcatccaatttggaatactctagtagatgtttcaacgttttggagcggagtagactcttttttatggttaccaggtgaagctatatttcatttcttaccagttggtattgtatggtctgtgactcgtaagatggggactactcaaatcctcggtattgttctaggtatctgtctagtgtcgccacaattacttaatgcttattctgtagctagtacttcagcagcagacattgctaaaaattggtcttggaattttggttactttacagtacaaaaaattggttatcaagctcaagttattccagctctgttagctggtttgagcctgtcttacttagaaatcttctggagaaaacatattcctgaagttgtttcaatgatttttgtgccatttctatccttagttccagctattatcttggctcatactgtccttggacctattggttggacactaggtaaatggatttctgctatcgttcttattggattgactggtcctgtaaaatggctctttggtgctatttttggtgccctgtatgccccatttgttattactggtttgcaccacatgacaaatgctatcgatactcaactcatagcagatacaaaaacacatacaactggcctttggccgatgattgctctttcaaatattgctcagggttcagctgtactagcttattattttatgcatcgtcatgatgaaaaagaggctcaaatatcacttccagctgctatctcagcctaccttggtgttacagagccggcgctttttggtgtaaacgttaaatacatttatccatttgttgctggtatgattggttcaagtgtggcaggtcttttggcgacaacttttaatgtccaagctaactctattggtgtaggcggtcttccaggcttcctgtcaattaacgttaaatatatgggatatttctttatctgtatggcagtggctatctttattcctttatttttgacactattctttaaaaaatcaggtattttgacaaaaactgaagaggaaaaattagtacctgatgctgtcattgcttcaacaacagaaacaaaatcagcaaaagaaaaagctgtcgtatcaggtacaaagcttagtgtagtaagccctttatcaggtttagctaaaccactggatcaagctagtgatcctgtcttttcacaaggaattatggggaagggagtggttatcgatccaagtgatggagaactagtttcaccggtcgatgcgacagtttcagttcttttccctacgaaacatgctattggattgttaacatcagagggggttgagtttcttattcatattggtatggatactgttaatttagaaggaaaagggtttacctctcatgttgctcaaggtgacactgtaaaagtaggagataaactcattactttcgatattccaatgataaaagaagaaggatacattgtggaaactcctattctgattactaatcaacaagaattccgaccagaagaattgatagatttacccaaacagataaaacgtggacaagcattaatggttgccaagaaaatt

SEQ ID NO: 484 - protein, 676 aa, Streptococcus agalactiae
MEQFKHDAKALLEAIGGKENISAVTHCATRMRFVLNDSSKAKVKVIEELPSVKGTFTNAGQFQVIIGNDVPIFYNAFVAVSGIEGVSKEAAKSAAQKNQNPLQRVLTMLAEIFTPIIPAIIVGGLILGFRNILDAVPFEFLGQKVVDGVRQVDSSGHPIWNTLVDVSTFWSGVDSFLWLPGEAIFHFLPVGIVWSVTRKMGTTQILGIVLGICLVSPQLLNAYSVASTSAADIAKNWSWNFGYFTVQKIGYQAQVIPALLAGLSLSYLEIFWRKHIPEVVSMIFVPFLSLVPAIILAHTVLGPIGWTLGKWISAIVLIGLTGPVKWLFGAIFGALYAPFVITGLHHMTNAIDTQLIADTKTHTTGLWPMIALSNIAQGSAVLAYYFMHRHDEKEAQISLPAAISAYLGVTEPALFGVNVKYIYPFVAGMIGSSVAGLLATTFNVQANSIGVGGLPGFLSINVKYMGYFFICMAVAIFIPLFLTLFFKKSGILTKTEEEKLVPDAVIASTTETKSAKEKAVVSGTKLSVVSPLSGLAKPLDQASDPVFSQGIMGKGVVIDPSDGELVSPVDATVSVLFPTKHAIGLLTSEGVEFLIHIGMDTVNLEGKGFTSHVAQGDTVKVGDKLITFDIPMIKEEGYIVETPILITNQQEFRPEELIDLPKQIKRGQALMVAKKI

SEQ ID NO: 485 - DNA, 2022 bp, Streptococcus pyogenes
atgggaaaatttgaacaggatgctaagagtcttctaactgctattggtggtaaagaaaacatcaaggttgtcacacactgtgcaacgcgtatgcgttttgttttgaatgataataataaggcaaatgtcaaagagattgaaaaaatctctgtagttaaagggacatttaccaatgctgggcagtttcaggtaatcattggtaatgatgttccagttttttataatgactttacagctgtttctagtattgaaggggtgtctaaagaagctgccaaatcagcagctaaaagtaatcaaaatgccttacaacgggtgatgaccatgttggctgagattttcacacctattattccggcgattattgttggggggcttattttaggtttccgtaatattttggagagtgtgccttttgaatttcttgggcagcaggtcgaaaaagggaaattagtttttgatgcagctggggatcctgtttggaatacgattgtgagggtatctcctttctggtcaggggttaaccatttcttgtggttaccaggggaagctattttccacttcttaccagttgggattacttggtctgtgacgcgtaagatgggaaccactcaaattttagggattgtccttggtatctgtttggtgtcaccacaattattgaatgcctatgcggtggcaggaacgcctgctgctgagattgccaaaaactgggtttgggattttggtttctttaccattaatcgtattgggtatcaggcacaggttattccagcccttttagctggtctgtcccttgcttatcttgaaattttctggcgtaaacggattccagaagtggtttcaatgatttttgtgccattcctttctttgattccagctttgattttagcgcatacggtattggggccaatcggttggactattggtaaagggatttcctttgttgtgttagctggattgactggtcctgttaaatggctattcggtgctatctttggtgccttgtatgctccgctagttattactggtttacatcacatgacaaatgccattgatacccaattaattgctgatactgcaactcgtacaactggtttgtggccaatgattgctctttcaaatatcgctcaagggtcagccgtttttgcttactatttaatgaatcgtcatgaagaacgtgaggctgaaatatcgcttcctgcagcaatttctgcttaccttggggtaactgagcctgccttatttggggttaatgttaaatacgtttatccctttgtagccggaatgattggctcaggtattgcgggtctcttatcaacaacctttaatgttcaggcaaattctattggtgttggtggtttaccaggtttcatggctatcaatgtgaagtacatgattccattcttcatctgtatggcagtagccattgtggtgccgatgtttttaaccttctttttccgtaaatcacatatcatgactaagacagaagatgaagctaaactacctgagacacccgtttcggatgctcctgtagcaactgctccacataagactatgcaaggaacagttatcactttaacaagccctttaacgggtgaagttaaagcgttgtctgaagctgttgatcctgtctttgcacagggagttatgggccaaggtgctcttcttcaaccgacagaaggggtgttagtagcgccttgtgatgctgaagtatcggtcttgttcccaactaaacacgctatttgtttggtgacgactgaaggtttggaattattgatgcatattggcatggatacggttaacttagatggtcaaggatttgaagctttggtgaagcaaggtgatcaggttaaggctggacaaacattgattcaatttgatatagcagcaatttctgaagctggatacgccactgaaacgcctcttgtggtgactaatcaagatgtttttacggtaactgttgaaggtagtttaccgcgtcagattaaggttaatgataagttagcagtagcggtgaaaaag

SEQ ID NO: 486 - protein, 674 aa, Streptococcus pyogenes
MGKFEQDAKSLLTAIGGKENIKVVTHCATRMRFVLNDNNKANVKEIEKISVVKGTFTNAGQFQVIIGNDVPVFYNDFTAVSSIEGVSKEAAKSAAKSNQNALQRVMTMLAEIFTPIIPAIIVGGLILGFRNILESVPFEFLGQQVEKGKLVFDAAGDPVWNTIVRVSPFWSGVNHFLWLPGEAIFHFLPVGITWSVTRKMGTTQILGIVLGICLVSPQLLNAYAVAGTPAAEIAKNWVWDFGFFTINRIGYQAQVIPALLAGLSLAYLEIFWRKRIPEVVSMIFVPFLSLIPALILAHTVLGPIGWTIGKGISFVVLAGLTGPVKWLFGAIFGALYAPLVITGLHHMTNAIDTQLIADTATRTTGLWPMIALSNIAQGSAVFAYYLMNRHEEREAEISLPAAISAYLGVTEPALFGVNVKYVYPFVAGMIGSGIAGLLSTTFNVQANSIGVGGLPGFMAINVKYMIPFFICMAVAIVVPMFLTFFFRKSHIMTKTEDEAKLPETPVSDAPVATAPHKTMQGTVITLTSPLTGEVKALSEAVDPVFAQGVMGQGALLQPTEGVLVAPCDAEVSVLFPTKHAICLVTTEGLELLMHIGMDTVNLDGQGFEALVKQGDQVKAGQTLIQFDIAAISEAGYATETPLVVTNQDVFTVTVEGSLPRQIKVNDKLAVAVKK

SEQ ID NO: 487 - DNA, 1623 bp, Streptococcus agalactiae
atgacgattgataaacgtaaagttgtctatcaaatttatccaaaatcatacaaagacacaactggtaatggggttggtgatcttcgtggtattatcgaaaaattaccctatttagcagaacttggtattgatatggtttggctcaacccattttatccaagtccacaacgagataatggatatgatatctctgattatacagctattaaccctgattttggaacgatggacgattttgaagaaatgattgaggtgggacgtcaataccgtatagattttatgcttgatatggtgcttaatcattgttcaatagaacatgagtggtttaaaaaagcacttgcaggagatcgctactatcaagatttctttatcttacgtgataatccaacagattgggtatctaaatttggtggaaatgcttgggcaccatttggtgatacagggaagtattatcttcatctttttgatatcactcaagctgaccttaattggcgcaatgccgatgttcgcaaggaactttttaaagttgtcaatttttggcgtgataaaggggttaaaggttttcgatttgatgtgattaatttaattgggaaagatgagatacttgagaactgcccaattaatgatggaaaaccagcttatactgatcgtccaataacacatgattatctcaagatgttgaataatgctagttttggacaagatgattccttcatgacagttggtgaaatgtcttcaacgacaattgcaaattgcattctttacactgcaccagaacgtgaagagttatccatggcttttaattttcaccacctcaaagtagattataaagatgggcaaaagtggaccattatggcttttgattttcctgcattacgtgaccttttccatagttggggcgaagggatgagcgaaggaaatggttggaatgctttattctataataatcatgaccaaccgcgagcattaaatcgttttgtagacgtgaaacgttttcgaaatgaaggagcaaccatgttagcagcatctatccacttatcgcgtggtactccttatatatatatgggtgaagaaatcggaatgcttgatcccgattacagttctatggatgattatgtggatattgagagtttgaatgcctaccaaataatgcttgatgaaggcaagtcacaagaagaggcatttagcattattcgagcgaaatctcgagacaattctcgagtaccaatgcaatgggatgatagtacgaatgcaggtttttctgaaggcgctccatggttgaaagtaggaaaatcatataaagaaatcaatgtcgcaaaggagaaaacagggctgatatttactttctatcaagagttgataaggctacgtaaacaactgccaataatagctgacgggaattataaagcagctttcaaagataatgaaaaagtatatgcttttgaacgccatcttgataaggaaaaacttcttgttttaaataatttctttgctgagaaagttaagataaaattaccggagaattatctccaaggacaagttcttctatcaaattataaggatgttactcttgatgaaacggttactttgcaaccttatcaaactttagctatcttagtgtca

SEQ ID NO: 488 - protein, 541 aa, Streptococcus agalactiae
MTIDKRKVVYQIYPKSYKDTTGNGVGDLRGIIEKLPYLAELGIDMVWLNPFYPSPQRDNGYDISDYTAINPDFGTMDDFEEMIEVGRQYRIDFMLDMVLNHCSIEHEWFKKALAGDRYYQDFFILRDNPTDWVSKFGGNAWAPFGDTGKYYLHLFDITQADLNWRNADVRKELFKVVNFWRDKGVKGFRFDVINLIGKDEILENCPINDGKPAYTDRPITHDYLKMLNNASFGQDDSFMTVGEMSSTTIANCILYTAPEREELSMAFNFHHLKVDYKDGQKWTIMAFDFPALRDLFHSWGEGMSEGNGWNALFYNNHDQPRALNRFVDVKRFRNEGATMLAASIHLSRGTPYIYMGEEIGMLDPDYSSMDDYVDIESLNAYQIMLDEGKSQEEAFSIIRAKSRDNSRVPMQWDDSTNAGFSEGAPWLKVGKSYKEINVAKEKTGLIFTFYQELIRLRKQLPIIADGNYKAAFKDNEKVYAFERHLDKEKLLVLNNFFAEKVKIKLPENYLQGQVLLSNYKDVTLDETVTLQPYQTLAILVS

SEQ ID NO: 489 - DNA, 1626 bp, Streptococcus pyogenes
atgacaattgataaaaagaaagtcgtctatcaaatttacccaaaatcctataaggacacgactggaaatggtgtgggagacttgctagggatcattgataaattgccttacttacaagaactaggaatagatatgatttggttgaaccctttctaccctagtccacaacgagacaatggctatgatgtttcagattatacggcggtcaaccctgattttggaacaatggctgattttgaaaatttggtaaaagctgctaaggagcatcagattgagttaatgttggacatggttttgaatcactgttccacagaccacgagtggttccaaaaagctttagcaggagacccttattatcaggatttctttatcttgagagatcagccgactgattgggtttccaaatttggtgggaatgcttgggcgccttttggagatacaggcaaatactacttacacttgtttgatgtgacacaggctgacttgaattggcggaacccacatgttcgtgaggaattggctaaagtggttaatttttggcgagataaaggagtgaaggggttccgttttgatgtgattaacctgattgggaaagatgaagagctggtggattgtccggtcaatgatggtaagccagcttatacggatcgtcctattactcacacttatcttcatgatctcaatcaagccagttttggtcaggatgattcgtttatgacagtaggggaaatgtctgcaacgactattgacaactgtcttttatacacggctcccgaacgtgaggagctatccatggcttttaatttccaccatctaaaagttgattatgagaacggtcagaaatggactattatggcttttgattttgcagcgctgcgagacttattccatgcttggggtgaaggcatgagtcagggcaatgggtggaatgccttgttctacaataaccatgatcaaccacgtgccctgaatcgttttgttgatgtaacacatttccgaaacgaaggtgcgacgatgttagcagcttccatccatttgtcacgaggaacgccttacatttatatgggtgaggagattggcatgcttgatccagactttgatagtatggatgattatgtggatgtggaaagtctcaatgcttactcaagcttattagtctcaggtaaaagtgcagaagaagcctttgccattatcaaggccaagtcaagggacaatgccagaacaccaatgcaatgggatgctagtgaacatgctggctttacgactggtaagccttggttagaggttggcaaatcttatcgagacatcaatgtcgaaacagaaaaagagggacgtatttttcctttctaccaacgcttgattgctttgcggaaggaactccctattattgctgaaggggactatcgggctgcttttaaagatagtcaggctgtctatgcctttgaacgccatttaggtgaccagtgtttgcttgttctcaatcatttctatgctgatgaggtcgaactggaattacctccacgttatcaacatggacaggtcttaatcagcaactatgagaaagtttctatttgtgaaaaagtgatactgaaaccttatcagacacttgctatcttagctgataac

SEQ ID NO: 490 - protein, 542 aa, Streptococcus pyogenes
MTIDKKKVVYQIYPKSYKDTTGNGVGDLLGIIDKLPYLQELGIDMIWLNPFYPSPQRDNGYDVSDYTAVNPDFGTMADFENLVKAAKEHQIELMLDMVLNHCSTDHEWFQKALAGDPYYQDFFILRDQPTDWVSKFGGNAWAPFGDTGKYYLHLFDVTQADLNWRNPHVREELAKVVNFWRDKGVKGFRFDVINLIGKDEELVDCPVNDGKPAYTDRPITHTYLHDLNQASFGQDDSFMTVGEMSATTIDNCLLYTAPEREELSMAFNFHHLKVDYENGQKWTIMAFDFAALRDLFHAWGEGMSQGNGWNALFYNNHDQPRALNRFVDVTHFRNEGATMLAASIHLSRGTPYIYMGEEIGMLDPDFDSMDDYVDVESLNAYSSLLVSGKSAEEAFAIIKAKSRDNARTPMQWDASEHAGFTTGKPWLEVGKSYRDINVETEKEGRIFPFYQRLIALRKELPIIAEGDYRAAFKDSQAVYAFERHLGDQCLLVLNHFYADEVELELPPRYQHGQVLISNYEKVSICEKVILKPYQTLAILADN

SEQ ID NO: 491 - DNA, 144 bp, Streptococcus agalactiae
gtgctgcttgtggaaaggaatcttgctctagattttgcaatttctttcttttttctttactctataacaatagcccaaattcattcaattgatagtagtgccagattgggctcaaatgacctagaaaaatgtaaacggttacta

SEQ ID NO: 492 - protein, 48 aa, Streptococcus agalactiae
MLLVERNLALDFAISFFFLYSITIAQIHSIDSSARLGSNDLEKCKRLL

SEQ ID NO: 493 - DNA, 1917 bp, Streptococcus agalactiae
atggttgataataagactgttgtgataatgttggtatttttagctcggaaaaatctttccttgtatgagttaacagtgcaaacaaagttttcaataaaagttatcatagagcaaattaactatctcaatagttttttagcaaaaaatcacctaccagctattgctcactctgctggacgttatcagttattaggagatgaaaaagagcatgataaaattgtctccttattagaagctgagcaattttacctaacccaggaagaaagggtatgtctgatttacctttatagcttttgccgaagagagtttgtctccaatgtgcattatcaagattttttgaaagtaagtaagaatactactttatcagatatcaagatgctacgttctaaattagcaaaaagaggtatctcactcacttatacaagagcaaagggatatagtctagtaggagatgagatggataagcatcaagttgcttttcagatgataactcaactactagaatctcccattggtttttggtctttgaattatatcttgtcttcttggaaattcgctctctcatatgagaagttagaaaagacggtagaatatttctatgaatcttttcaactttctccaatacaagataggcttgagaaatctttatattttatcattttaatactgtgtcgttatcaaaggtcagtagatcgtgttttgcagggttctcctattgtttctgaacaattaaaagagttaacgactattattgtgactaatttaagtcaggatatttccttatctaaaccattagatcagaaagaaaaagattatattaccttgatcttatctggctgttttgaaggtgagggaactaaagatgatgatttctttgaagcattggcaaaagcaatcgttgatgagatggaaactgtttcacttcttaatttttccaataaagaagagttattacaaggtctgaagcgtcatattattccagcttatttccgattgaaatatggtttaactggcgatagtggttatacacaaaatattaaagagcattacagtgatttatttctattggttaaaaaggcactacgtcctttggaagagcaagtaggattaatacccgatagtgaaatttcttacttcgtgattcactttggaggctatcttagacaatcaggtggtacacaatcaatgtcttataaagctttgatactctgtccaaacggcgttagttcatccttagtgattaaggaaaaattgcgtggattatttcctcaaattcattttcatcgtgtctctaaaattgagcagctgaaactgattgacaatcaaacttacgatatggtcttttctactatatttgtagaaacaaaaaaacctaattatctagtttcgctgatgatgacagcagagcaagtacaacagctcaaagaactggttatttcagattttcccaaggcttgccttgacgatttccaacttgatcaattaatagcaactataaaaaaatacgctcatgttcattgtgaagaggaattaaaattggctttgaggacaatggtaaaacaagatatacttagaaaggatgtgaggcccttgttgcaccaacttataacagaggaaacttatcagacaagttctgaacaaatgaattggaaagaggcaattcgtttagcggcaaaacccttgttagcttctggaaaaattacggaaagttacccagaagctatgattgaaaaagtcgaagagtttggtccttttatcaatcttggtaaaggtattgctattccacatgccagaccagaagatggggtaaactctgtcggtatgtcaatgcttgttttggaacagccacgccgtacgcatgaaaactttctcttcatccttttgtgcccggacatcaattttgaaaagattcctttt

SEQ ID NO: 494 - protein, 639 aa, Streptococcus agalactiae
MVDNKTVVIMLVFLARKNLSLYELTVQTKFSIKVIIEQINYLNSFLAKNHLPAIAHSAGRYQLLGDEKEHDKIVSLLEAEQFYLTQEERVCLIYLYSFCRREFVSNVHYQDFLKVSKNTTLSDIKMLRSKLAKRGISLTYTRAKGYSLVGDEMDKHQVAFQMITQLLESPIGFWSLNYILSSWKFALSYEKLEKTVEYFYESFQLSPIQDRLEKSLYFIILILCRYQRSVDRVLQGSPIVSEQLKELTTIIVTNLSQDISLSKPLDQKEKDYITLILSGCFEGEGTKDDDFFEALAKAIVDEMETVSLLNFSNKEELLQGLKRHIIPAYFRLKYGLTGDSGYTQNIKEHYSDLFLLVKKALRPLEEQVGLIPDSEISYFVIHFGGYLRQSGGTQSMSYKALILCPNGVSSSLVIKEKLRGLFPQIHFHRVSKIEQLKLIDNQTYDMVFSTIFVETKKPNYLVSLMMTAEQVQQLKELVISDFPKACLDDFQLDQLIATIKKYAHVHCEEELKLALRTMVKQDILRKDVRPLLHQLITEETYQTSSEQMNWKEAIRLAAKPLLASGKITESYPEAMIEKVEEFGPFINLGKGIAIPHARPEDGVNSVGMSMLVLEQPRRTHENFLFILLCPDINFEKIPF

SEQ ID NO: 495 - DNA, 2160 bp, Streptococcus pyogenes
ttgagtccaattgcagtcaaaaatgacatgagacaattggactcaatttatcttgaaaatgaaaacgcttcattttatactgacattataggaggagatgacatgctatctcatgagctcatcagaaactatcaactcttttctaaatataaaggacattcactggaggcatttgaatccattttaaaggcaagcaaacgtcatatactggcagatattgctaaaatcaatgacacgttgtcactctatcagttaccccttattgctctggacaggcagctggtttatccgccagaccttactgaaaaggacttgttgaatcgcatgctacctaccttagacgactatctctttcaagatgagcgtctggatatgattatcatttacatcatgatggctaaagaatttatctccattaaccacttggaaagcttgttacggctcagcagaaattctgttattgctgatttaaacttggtgcgtgatcgggtacaagcttttcaggtaactttagcttacaatcgccaggatggttatttttttgaaggagaacccttagccttgcggcgtctcttagaatcagcggtcagttctcttttgcaagtcacatctggaccttgggtgttcagttacttattgcatgaacttggtttgcccgaccagaaaaaggtgatggcagcaacgttggaggaactgagcagggagaaccacttaacttttatttcggagaaattgagggatttgatttattttttctgccttctcgctcatcgaccattttcacggaacgtaagggctgaagcagtggatacttttcctttagcttcgccagctgttgaaacgatggtggaccagttattggtcaacttccccagtctaaccgaagaaaaatatttggttcaatctaggttacttggttgtatccaaggtgacttagagttagtctttcagcaacctatttatgacattatggaggaaatcatcaattcggtggcggttaacacgggattgtctatcaccgataccccagaacttcgtcagaacctatacagtcaccttttgccagcttattaccgactttactacgacattaacttgaccaatcctttgaaggaacaaatcaaacaagattatgaatctctcttttacttggtcaagcgcagcctttctcctctagaaaaacaattggggaaatcagttaatgaagatgaggttgcttattttaccattcattttgggagatggttgcaggcccctaagaagaggccaagcaatcagctggtagccttatctgtttgccctaatggcattagttcgtctctgatgttggaggcaaccttgaaggaactttttccacagctacagtttattaggattcaccagctggacaaaataaagttgttggatccagcatcctttgatttgattttttcaacagtagcttttgactgtgctaaacctgtttatgtgacgcaagctttgatgggacctgttgaaaaaatgatgttgaaaaagatggtctgtgatgactttcatcttcccttgtcagagcaattcgctttggatgatctgttgagtattattcataaacataccacgattactaataaagaaggacttgttagtgatttatcccgttacctgattggtaaccatttaacgattgaaaaaggaggtctaggactattggacttgttaacagcagattttattaggcaggctgatgctgtttcggattggcaggaagcgattcgtttggctgctcagcctttactagaacaccagatgattgaaacatcttatatcgatggcatgattgattcggtcaatgagcttggggcctatattgttttagcccctaaggtggctgttcctcatgcggcgcctgaaaaaggaacgcggcagttaggcatgtctctcttacaactaaaagaacctgtcagctttgatttgaagcaagaaggtgatccagacaagcaagtgcaattgatttttgttttgtctgctgtggattctagttcacatttgaaggctttgcaggaactgtcgttgattttagatgatgatgaacatattgagcaattaattgaggctaagaatactgaggaaataatgagtctgattagccatatgattgaaaaaggagacgaatcacatgat

SEQ ID NO: 496 - protein, 720 aa, Streptococcus pyogenes
LSPIAVKNDMRQLDSIYLENENASFYTDIIGGDDMLSHELIRNYQLFSKYKGHSLEAFESILKASKRHILADIAKINDTLSLYQLPLIALDRQLVYPPDLTEKDLLNRMLPTLDDYLFQDERLDMIIIYIMMAKEFISINHLESLLRLSRNSVIADLNLVRDRVQAFQVTLAYNRQDGYFFEGEPLALRRLLESAVSSLLQVTSGPWVFSYLLHELGLPDQKKVMAATLEELSRENHLTFISEKLRDLIYFFCLLAHRPFSRNVRAEAVDTFPLASPAVETMVDQLLVNFPSLTEEKYLVQSRLLGCIQGDLELVFQQPIYDIMEEIINSVAVNTGLSITDTPELRQNLYSHLLPAYYRLYYDINLTNPLKEQIKQDYESLFYLVKRSLSPLEKQLGKSVNEDEVAYFTIHFGRWLQAPKKRPSNQLVALSVCPNGISSSLMLEATLKELFPQLQFIRIHQLDKIKLLDPASFDLIFSTVAFDCAKPVYVTQALMGPVEKMMLKKMVCDDFHLPLSEQFALDDLLSIIHKHTTITNKEGLVSDLSRYLIGNHLTIEKGGLGLLDLLTADFIRQADAVSDWQEAIRLAAQPLLEHQMIETSYIDGMIDSVNELGAYIVLAPKVAVPHAAPEKGTRQLGMSLLQLKEPVSFDLKQEGDPDKQVQLIFVLSAVDSSSHLKALQELSLILDDDEHIEQLIEAKNTEEIMSLISHMIEKGDESHD

SEQ ID NO: 497 - DNA, 123 bp, Streptococcus agalactiae
ttggagaaagaggctaagcagatcattgatttaaaaaggaatcttttcaaaattgatgtccgggcacaaaaggatgaagagaaagttttcatgcgtacggcgtggctgttccaaaacaagcat

SEQ ID NO: 498 - protein, 41 aa, Streptococcus agalactiae
MEKEAKQIIDLKRNLFKIDVRAQKDEEKVFMRTAWLFQNKH

SEQ ID NO: 499 - DNA, 105 bp, Streptococcus pyogenes
ttggagaaagaggctaagcagatgattgatttaaaaaggaatcttttcaaaattgatgtccgggcacaaaaggatgaagagaaagttttcatgcgtacggcgtgg

SEQ ID NO: 500 - protein, 35 aa, Streptococcus pyogenes
LEKEAKQMIDLKRNLFKIDVRAQKDEEKVFMRTAW

SEQ ID NO: 501 - DNA, 1140 bp, Streptococcus agalactiae
gtgactacgatgattgattttattatttctattgatgattgcgcagttgaattggatagtcgtcaatcttggaaaattcgctaccccttatcaaccattctatttcttgtctttgtttgtcagttagctggcattgaaacctggaaggagatggaagattttattgaaatgaatgaaccattgtttgcgacctacgttgatttgagtgaaggttgtccgtctcatgataccttagagcgtgtgattagtcttgttaattcagaccgtttaaaagagcttaaagttcaatttgagcaatcattgacaagcttagatgccgttcatcaactgatttcagtggacggtaaaacgattcgaggcaatcgaggtaaaaatcagaagcctgttcatattgtaacggcttatgatgggggtcatcatcttagtttgggacaggtagcggttgaggagaaaagtaatgaaattgttgccattcctcagttattgcggacaattgatatccgtaaaagcattgtaacgatagacgcaatgggcacgcagacggctatcgttgatacgattataaaaggtaaagcagactattgcttagccgtcaaaggaaatcaagaaacactttatgatgatattgctctttattttagtgatgtcaacttattggaagaactccaagaaaatgcgcagtattatcagactgttgaaaaatctaggggacagattgaagttagagaatactgggtgtcttccgatatcaaatggttgtgtcaaaaccatcccaaatggcataagttacgtggtattgggatgactcgtaacacgattgataaggatggtcagctgagtcaagagaatcgttattttatctttagctttaagccggatgtcctcacatttgccaattgtgtacgaggtcattggcagatagagagtatgcactggttattggacgttgtttatcatgaagatcatcatcagacattggataaaagagccgcatttaacctaaatcttatccgaaaaatgtgcttatattttctcaaagtgatggtatttcctaaaaaagacctcagttatcgtcgcaaacaacggtatatttctgtccatttggaagattatttagtccaattatttggagaaagaggc

SEQ ID NO: 502 - protein, 380 aa, Streptococcus agalactiae
MTTMIDFIISIDDCAVELDSRQSWKIRYPLSTILFLVFVCQLAGIETWKEMEDFIEMNEPLFATYVDLSEGCPSHDTLERVISLVNSDRLKELKVQFEQSLTSLDAVHQLISVDGKTIRGNRGKNQKPVHIVTAYDGGHHLSLGQVAVEEKSNEIVAIPQLLRTIDIRKSIVTIDAMGTQTAIVDTIIKGKADYCLAVKGNQETLYDDIALYFSDVNLLEELQENAQYYQTVEKSRGQIEVREYWVSSDIKWLCQNHPKWHKLRGIGMTRNTIDKDGQLSQENRYFIFSFKPDVLTFANCVRGHWQIESMHWLLDVVYHEDHHQTLDKRAAFNLNLIRKMCLYFLKVMVFPKKDLSYRRKQRYISVHLEDYLVQLFGERG

SEQ ID NO: 503 - DNA, 1140 bp, Streptococcus pyogenes
gtgactacgatgattgattttattatttctattgatgattgcgcagttgaattggatagtcgtcaatcttggaaaattcgctaccccttatcaaccattctatttcttgtcttcgtttgtcagttagctggcattgaaacctggaaggagatggaagattttattgaaatgaatgaaccattgtttgcgacctacgttgatttgagtgaaggttgtccgtctcatgataccttagagcgtgtgattagtcttgttaattcagaccgtttaaaagagcttaaagttcaatttgagcaatcattgacaagcttagatgccgttcatcaactgatttcagtggacggtaaaacgattcgaggcaatcgaggtaaaaatcagaagcctgttcatattgtaacggcttatgatgggggtcatcatcttagtttgggacaggtagcggttgaggagaaaagtaatgaaattgttgccattcctcagttattgcggacaattgatatccgtaaaagcattgtaacgatagacgcaatgggcacgcagacggctatcgttgatacgattataaaaggtaaagcagactattgcttagccgtcaaaggaaatcaagaaacactttatgatgatattgctctttattttagtgatgtcaacttattggaagaactccaagaaaatgcgcagtattatcagactgttgaaaaatctaggggacagattgaagttagagaatactgggtgtcttccgatatcaaatggttgtgtcaaaaccatcccaaatggcataagttacgtggtattgggatgactcgtaacacgattgataaggatggtcagctgagtcaagagaatcgttattttatctttagctttaagccggatgtcctcacatttgccaattgtgtacgaggtcattggcagatagagagtatgcactggttattggacgttgtttatcatgaagatcatcatcagacattggataaaagagccgcatttaacctaaatcttatccgaaaaatgtgcttatattttctcaaagtgatggtatttcctaaaaaagacctcagttatcgtcgcaaacaacggtatatttctgtccatttggaagattatttagtccaattatttggagaaagaggc

SEQ ID NO: 504 - protein, 380 aa, Streptococcus pyogenes
VTTMIDFIISIDDCAVELDSRQSWKIRYPLSTILFLVFVCQLAGIETWKEMEDFIEMNEPLFATYVDLSEGCPSHDTLERVISLVNSDRLKELKVQFEQSLTSLDAVHQLISVDGKTIRGNRGKNQKPVHIVTAYDGGHHLSLGQVAVEEKSNEIVAIPQLLRTIDIRKSIVTIDAMGTQTAIVDTIIKGKADYCLAVKGNQETLYDDIALYFSDVNLLEELQENAQYYQTVEKSRGQIEVREYWVSSDIKWLCQNHPKWHKLRGIGMTRNTIDKDGQLSQENRYFIFSFKPDVLTFANCVRGHWQIESMHWLLDVVYHEDHHQTLDKRAAFNLNLIRKMCLYFLKVMVFPKKDLSYRRKQRYISVHLEDYLVQLFGERG

SEQ ID NO: 505 - DNA, 198 bp, Streptococcus agalactiae
gtggaacagcctatttatttattggatgaccccaaacaggaaatttatctcttattatgcatagcagctattgataatgaaacgcatttgaaagctctatcgcatttgacaacaatacttcgtgataataataatgttaaagctttgttagcttcacgtaggtatcaagatattgaaatgattataaaacaggaggat

SEQ ID NO: 506 - protein, 66 aa, Streptococcus agalactiae
MEQPIYLLDDPKQEIYLLLCIAAIDNETHLKALSHLTTILRDNNNVKALLASRRYQDIEMIIKQED

SEQ ID NO: 507 - DNA, 282 bp, Streptococcus agalactiae
atgttaagaattggaacagcatgtggatcaggtttaggttcaagttttatggtacaaatgaatattgagtctattttgaaggatttgggggtttctgatgttgaagttgaacattatgatttaggtggagcagatccaagtgcagcagatgtttggattgttggtcgtgatttggaggattcagctggtcacctgggggatgttcgtattttaaacagtatcattgatatggatgaattgagagaattagtgacaggtatttgccaagaaaaaggcttaatc

SEQ ID NO: 508 - protein, 94 aa, Streptococcus agalactiae
MLRIGTACGSGLGSSFMVQMNIESILKDLGVSDVEVEHYDLGGADPSAADVWIVGRDLEDSAGHLGDVRILNSIIDMDELRELVTGICQEKGLI

SEQ ID NO: 509 - DNA, 303 bp, Streptococcus pyogenes
ttgaaaaaggagacgaatcacatgattaaaattgtaacggtttgtggaaacggtattggtagtagcttgttacttcgcatgaaagtagaagctatcgcctctagtttgggtattgatgtggatgcagaatcctgtgattccaatgcggctgttggaaagggtgcagatttgtttgttaccgttaaagaatttaaagatatttttccagaggatgccaaggtttgtatcgttaaaagctataccaatcgtaaaaaaattgaagaagatttggttccggttctcaaggaaatgagtggcaaggaa

SEQ ID NO: 510 - protein, 101 aa, Streptococcus pyogenes
LKKETNHMIKIVTVCGNGIGSSLLLRMKVEAIASSLGIDVDAESCDSNAAVGKGADLFVTVKEFKDIFPEDAKVCIVKSYTNRKKIEEDLVPVLKEMSGKE

SEQ ID NO: 511 - DNA, 93 bp, Streptococcus agalactiae
atgacagtagtgccagtcacaatcatgactatcatactaaccaatccaccaacaaaacttgagataaaaccaatcaatactgcattaggtgca

SEQ ID NO: 512 - protein, 31 aa, Streptococcus agalactiae
MTVVPVTIMTIILTNPPTKLEIKPINTALGA

SEQ ID NO: 513 - DNA, 1353 bp, Streptococcus agalactiae
atgaaaggtctattggattttttagttaatattgccagcacgccagctattttagtcgccttgatagccattatcggtttagtactgcagaaaaaaggcgttcctgatattgtaaaaggtggaataaaaacatttgttggcttcttagtggtttctggaggtacagggatagtccaaaattccttgaatccatttggaaaaatgtttgaacatgcttttcatttggtgggggtagttcctaataatgaagccattgtagcagtagctcttacgaagtatggctcagcaactgctttgattatgttagcgggaatgatttttaatattttaattgctcgttttacaaaatttaaatatatttttctgacaggacatcatacattgtatatggcttgtatgattgctgttatttttgccgtagcaggctttacttcgttctcgctcatcctttttggaggtctagcgttagggattattatgagcgtatctcctgcatttgtgcaaaaatacatgattcaactgacaggtaatgataaggtggcacttgggcactttggttctttaggctattggttgagtggatttattggtggaattgttggagataaatcaaaatcaacagaagatattaaatttccaaagagtttatcatttttacgtgacagtaccgtaagtattactatctcaatggcaattatttaccttatcgttgcagtgtttgctggtgaggcttatattgcaaaagaaataagtaacggtgtcaatggtcttgtttatgccctccaactagctgggcaatttgcggcaggtgtattcgttattttagcaggtgtacgccttatcctaggtgaaattgtaccagcctttaagggaatctcagaaaaattggttccaaattcaaaaccagccttggattgtccaattgtttacccttatgcacctaatgcagtattgattggttttatctcaagttttgttggtggattggttagtatgatagtcatgattgtgactggcactactgtcattttaccaggggtcgttcctcatttcttctgtggggcaacggcaggtgttatcggtaatgcttctggtggtgtgagaggagcgactattggtgcatttgttcaaggtatcctcatcagtttcttgccgattttcttgatgcctgtactaggtggacttggtttcaaagggtcaacattctcagatgctgattttggtttgaccggtatcattcttggcgctcttaatcatgtcggcggtgcgatagctattgttattggtattgtagttatcttaattggactttttggcatttcatttgttggaaaatcaacccataaggaaggt

SEQ ID NO: 514 - protein, 451 aa, Streptococcus agalactiae
MKGLLDFLVNIASTPAILVALIAIIGLVLQKKGVPDIVKGGIKTFVGFLVVSGGTGIVQNSLNPFGKMFEHAFHLVGVVPNNEAIVAVALTKYGSATALIMLAGMIFNILIARFTKFKYIFLTGHHTLYMACMIAVIFAVAGFTSFSLILFGGLALGIIMSVSPAFVQKYMIQLTGNDKVALGHFGSLGYWLSGFIGGIVGDKSKSTEDIKFPKSLSFLRDSTVSITISMAIIYLIVAVFAGEAYIAKEISNGVNGLVYALQLAGQFAAGVFVILAGVRLILGEIVPAFKGISEKLVPNSKPALDCPIVYPYAPNAVLIGFISSFVGGLVSMIVMIVTGTTVILPGVVPHFFCGATAGVIGNASGGVRGATIGAFVQGILISFLPIFLMPVLGGLGFKGSTFSDADFGLTGIILGALNHVGGAIAIVIGIVVILIGLFGISFVGKSTHKEG

SEQ ID NO: 515 - DNA, 1233 bp, Streptococcus pyogenes
atggaagcattattatcatttattcgagatattttaaaagaacctgcatttttaatgggcttgattgcctttgcagggttggtggctttgaaaacacctgctcataaggtgttgacaggaaccttggggccgattttgggataccttatgcttgttgcaggggcgggtgttattgtgaccaatttggaccctcttgccaaactcattgagcacggttttagcatcactggcgtagtgccaaataacgaagccgtcacttctgtcgctcaaaagattctgggtgtggaaactatgtccatcttggtggttgggttattgctcaatttggcttttgctcgttttacccgcttcaaatacattttcttaacaggacatcacagcttctttatggcttgtctcttgtccgccgtgcttggagctgttggtttcaaaggaagtcttttgattatcttagatgggttcctcttgggagcttggtcagctatttcgccagccattggtcaacagtatactctgaaagtgactgacggagatgaaatcgctatgggacactttggtagtttgggctattacctttctgcctgggttggtagcaaggttggcaaagacagtaaagataccgaagaccttcagatttctgaaaaatggagtttcttgcgcaacaccaccatttcaacaggacttatcatggtgattttctacttggtggcaacagtggcttctgttttgaggaatgcttcagtagcagaagaattagcagcaggtcaaaacccatttatttttgccattaagagtggtcttacctttgcggttggtgtggcaattgtctacgccggtgttcgcatgattttggctgacttgattccagccttccaaggtattgctaacaaattaattccaaatgctattccagccgtggattgtgcggtattcttcccttatgcgccaaccgctgttatcatcggttttgcgtcaagtttcgttggtggcttacttgggatgttgattttaggagttgcaggtggtgtcctgattatcccaggtatggtgcctcatttcttctgcggtgcaacagcagagatttttggaaattcaacaggtggtcgtcgcggtgcgatgattggtgcttcgctaatggcttattactcgccttcttgccagccatgcttctacctgtacttggtaaacttggtttttcaaacacgacctttggagatgtggatttcggtgttt

SEQ ID NO: 516 - protein, 411 aa, Streptococcus pyogenes
MEALLSFIRDILKEPAFLMGLIAFAGLVALKTPAHKVLTGTLGPILGYLMLVAGAGVIVTNLDPLAKLIEHGFSITGVVPNNEAVTSVAQKILGVETMSILVVGLLLNLAFARFTRFKYIFLTGHHSFFMACLLSAVLGAVGFKGSLLIILDGFLLGAWSAISPAIGQQYTLKVTDGDEIAMGHFGSLGYYLSAWVGSKVGKDSKDTEDLQISEKWSFLRNTTISTGLIMVIFYLVATVASVLRNASVAEELAAGQNPFIFAIKSGLTFAVGVAIVYAGVRMILADLIPAFQGIANKLIPNAIPAVDCAVFFPYAPTAVIIGFASSFVGGLLGMLILGVAGGVLIIPGMVPHFFCGATAEIFGNSTGGRRGAMIGASLMAYYSPSCQPCFYLYLVNLVFQTRPLEMWISVF

SEQ ID NO: 517 - DNA, 855 bp, Streptococcus agalactiae
atgacatcaccagaagaaagatattcatctctaagacgatttgcaacggagattcgtttaaatactctagaaacgctaaaccatttaggattcggtcactatgggggtagtttatcaattgttgaggctttggctgttctgtatggtgatattatggatataaatcctgaaaaattcaaagaaagtgatcgggattatatggtcttatcaaaaggacatgctggtccagccttgtatagtacactctatttaaaaggtttttttgataaaacattccttcattcgctcaatacaaacggtaccaaactaccttcgcatcctgaccgcaatttaactcctggtatagatgtaacgacaggctcgttaggtcaaggcattagtattgcaacgggaattgcttatgctcaaaagattgagaattcaagctattatacttatactattgtaggtgatggtgaattaaatgaaggacaatgttgggaggctatacaatttgctgcgcatcatcaactgcaccatttaattgtttttgtagatgataataaaaaacaattagatggtttgacagctgatatttgtaatcctggagactttgttgctaaatttgaagcttttggatttgatgcagtacgtgtaaaaggagatgacattgaggcaattgacaaagctattaaaacttttcaagattcaaatagtgtcagaccaaaatgtattgttttagatagcatcaagggacaaggtgtgaaagagttggaggagttagcttctaatcatcatttacgaccagatttacaacaaaaaacaatgttagagcgagcgttgataagcttgagagaaagtttggaggtggtagaa

SEQ ID NO: 518 - protein, 285 aa, Streptococcus agalactiae
MTSPEERYSSLRRFATEIRLNTLETLNHLGFGHYGGSLSIVEALAVLYGDIMDINPEKFKESDRDYMVLSKGHAGPALYSTLYLKGFFDKTFLHSLNTNGTKLPSHPDRNLTPGIDVTTGSLGQGISIATGIAYAQKIENSSYYTYTIVGDGELNEGQCWEAIQFAAHHQLHHLIVFVDDNKKQLDGLTADICNPGDFVAKFEAFGFDAVRVKGDDIEAIDKAIKTFQDSNSVRPKCIVLDSIKGQGVKELEELASNHHLRPDLQQKTMLERALISLRESLEVVE

SEQ ID NO: 519 - DNA, 2187 bp, Streptococcus pyogenes
gtggccactgtgtcaacaggctctcttatattcatcgtcaaaaagaatccaccaatgatgtccaaactagtttttttctggcaaaatagagaaaaagaatttagggactttggaggattttctgaaaaaagcgtctatttttgtgatacaatagacaatagaaaacgtttaattttagttgtaataaacagagaggttttacttatgacatttgatgcaattgaccagttggcagtaaacactgtccgcaccctatcaatggatgccattcaagcggcaaattctggacacccaggacttccaatgggggcagcacctatggcctatgttctttggaatcacttcatgaacatcaatcccaaaacaagccgtaattggtcaaacagagaccgttttatcctatcagcaggtcatggaagtgccatgctttatagcttgttacacttagctggttatgatttatctgtagaagatttaaagaacttccgtcaatggggttctaaaacaccaggtcacccagaagtgaaccacacagacggtgtcgaagcaaccacaggacctcttggtcaagggatcgcaaatgccgttgggatggccatggcagaagctcatctagcagctaaatttaacaaaccaggctttgacatcgttgatcactacacatttgctttgaatggtgacggtgaccttatggaaggggtcagccaagaagcagcaagtatggcaggacatttaaaacttgggaaattggtcttgctatatgattcaaacgacatctctcttgatggtccaacctctatggctttcacagaagatgtgaaaggacgtttcgaagcttatggttggcaacatatccttgtgaaagatggaaatgatttagaagaaattgcagctgctattgaagcagctaaagctgaaactgagaaaccaaccatcatcgaagtcaaaaccattattggttttggtgccgaaaaacaaggaacttcagctgttcacggcgctcctcttggagcagaaggcattgcttttgccaaaaaagcttaccaatggactcatcaagattttgaagtgcctgctgaagtaacagagcgctttgctcaaggtcttcaagcgcgtggtgaaaaagcagaacaagcctggaatgacttgtttgcagcttatgaagcagaatatccagaattagcagcagaataccaaaaagcctttactaacgaagctgctcaagtagaacttgaagcgcacgaacttggtagttcaatggcgagtcgtgtatccagtcaacaagccatccaacaaatttcagaacaagtagcctctttctggggtgggtcagcagacctttcagcttcaaacaatactatggttaaggctgaaacagatttccaaccaggtcactacgaaggccgtaacatctggtttggcgttcgtgaatttgccatggctgcagccatgaacggtattgcccttcacggcgggacacgcgtttacggcggaaccttctttgtcttctcaaactatcttcttccagctgttcgtatggcagcgctccaaaacttgccaacagtttatgtcatgacacatgattctatcgctgtcggtgaagatgggccaacgcacgaaccaattgaacaattggcaagtgttcgctcaatgcctaacttgaacgttattcgtccagcagacggtaacgaaacaaatgctgcttggaaacgtgccattgctgaaacagatcgcccaaccatgcttgtattgacgcgtcaaaaccttccagtgcttgagggcacaaaagaattggcagaagatggtcttagcaaaggagcttatatcttgtcagaagccaaaggcgaccttgatggtatcttgattgcaacaggttcagaagtgaaactggcaatggatactcaagaagctcttgaagcagaaggcattcatgtgcgtgtcgtatctatgccatcacaaaatatctttgacgaacagtcagcagagtataaagaaagcatcctaccagcagctgtgactaaacgtctcgctatcgaagcaggttcaagctttggctgggcaaaatatgtcggcctatcaggaaaaacattgaccattgacacttggggtgcttcagctccaggaaatcgtatcttcgaagaatatggtttcactgtggcaaatgcaactgagttatacaaatcactc

SEQ ID NO: 520 - protein, 729 aa, Streptococcus pyogenes
VATVSTGSLIFIVKKNPPMMSKLVFFWQNREKEFRDFGGFSEKSVYFCDTIDNRKRLILVVINREVLLMTFDAIDQLAVNTVRTLSMDAIQAANSGHPGLPMGAAPMAYVLWNHFMNINPKTSRNWSNRDRFILSAGHGSAMLYSLLHLAGYDLSVEDLKNFRQWGSKTPGHPEVNHTDGVEATTGPLGQGIANAVGMAMAEAHLAAKFNKPGFDIVDHYTFALNGDGDLMEGVSQEAASMAGHLKLGKLVLLYDSNDISLDGPTSMAFTEDVKGRFEAYGWQHILVKDGNDLEEIAAAIEAAKAETEKPTIIEVKTIIGFGAEKQGTSAVHGAPLGAEGIAFAKKAYQWTHQDFEVPAEVTERFAQGLQARGEKAEQAWNDLFAAYEAEYPELAAEYQKAFTNEAAQVELEAHELGSSMASRVSSQQAIQQISEQVASFWGGSADLSASNNTMVKAETDFQPGHYEGRNIWFGVREFAMAAAMNGIALHGGTRVYGGTFFVFSNYLLPAVRMAALQNLPTVYVMTHDSIAVGEDGPTHEPIEQLASVRSMPNLNVIRPADGNETNAAWKRAIAETDRPTMLVLTRQNLPVLEGTKELAEDGLSKGAYILSEAKGDLDGILIATGSEVKLAMDTQEALEAEGIHVRVVSMPSQNIFDEQSAEYKESILPAAVTKRLAIEAGSSFGWAKYVGLSGKTLTIDTWGASAPGNRIFEEYGFTVANATELYKSL

SEQ ID NO: 521 - DNA, 927 bp, Streptococcus agalactiae
atgagatgttcaaccaaagaaatgaggcttgtctatcgtgatttcctccttcaagctaatcaagaaaataaacaaattaccgttttagaagccgatttgtcgagttcaatgtcaacaaatgcactggcatcagaatttggaaaacgttatattaatctaggtattatggaggctgagatggtaggccttgcagcagggctcgccattaaaggttacaagccataccttcatacttttggtcctttcgcgtcaaggcgtgtctttgatcaagtattcttatcgttaggttactcacaattatcagctacgattattggctcagatgcaggaattagcgcagaaatgaatggcggaactcatatgccttttgaagagttaggtctactaaggttaattcccaaagcgactatttttgaggttagtgatgatattcagtttgaagcaattttaaaacaaacattaagtattgatggcctaaaatacattagaactattcgtaaggcccccactgcagtttatgagggacgcgaagatttttcaaagggttttatacaattacgccagggaaaagatattactcttgtagcaagtggtattatggtttctagagcgatagaagcagccgactacctcaaagaactagggattgaggcctcagttatcgacctttttaaaattaagccccttccagaagaactgaaaccattactgatagatcaatccattgtaactattgagaatcataaccgtattggcggtatcggaagtgcattatgcgaatggcttagtatggagaaagacactactgttagtcgtatgggtattgatgagcgatttggtcaggtaggtcagatggaatatttattagaggagtatggactcgctgttaaagatatagtacagcattgcaaatcaatttataaatca

SEQ ID NO: 522 - protein, 309 aa, Streptococcus agalactiae
MRCSTKEMRLVYRDFLLQANQENKQITVLEADLSSSMSTNALASEFGKRYINLGIMEAEMVGLAAGLAIKGYKPYLHTFGPFASRRVFDQVFLSLGYSQLSATIIGSDAGISAEMNGGTHMPFEELGLLRLIPKATIFEVSDDIQFEAILKQTLSIDGLKYIRTIRKAPTAVYEGREDFSKGFIQLRQGKDITLVASGIMVSRAIEAADYLKELGIEASVIDLFKIKPLPEELKPLLIDQSIVTIENHNRIGGIGSALCEWLSMEKDTTVSRMGIDERFGQVGQMEYLLEEYGLAVKDIVQHCKSIYKS

SEQ ID NO: 523 - DNA, 159 bp, Streptococcus agalactiae
atgctagataaaattaaaacaatacctttccaagctcgcataacgaccacccctttatttttagtaaggataaaataccacaagatacttatacaaaacttaaaaatttcagaaaataacaaaaaggcaactccaatgttgcctttttgttatgattta

SEQ ID NO: 524 - protein, 53 aa, Streptococcus agalactiae
MLDKIKTIPFQARITTTPLFLVRIKYHKILIQNLKISENNKKATPMLPFCYDL

SEQ ID NO: 525 - DNA, 1152 bp, Streptococcus agalactiae
ttgacaagtttatcgctaacattcctcttatcaaccaaatttaggatacttgaaagttactttcaaggtattgaaaatatgtatttttaccacaaggtaatggctgtattttcaatgattttgcttctattgcacaaaattggtcttggacaaggcggacatggaagtgagtttgcaaagactattggcagtgcgggattatatctttttctaagtattgtttttgtagcttatttcggaaattttttaaagtatgaaatttggcgttttattcatcgctttgtttatttagcttatattttgggattggtacatacttttatgattttaggagataggatactaggaaatactttactcagtttaatcgtattaggttatgctgtcattggggttatatctggattttatattattttcctatattctagaatgcgttttcgtcgtgtagggtacgttcaaaaggttactcatcttaaccatgatacaactgagattgaaatagcaatgaagcgtccttatcgatatgactatggacaatttactttttttaaaatttatcaagctggctttgaatcagcagctcatcctttctcgatatcaggtggtcatgatagagtgatatttttaactgttaaagcttcaggagattatacgaaatccatttacaaacagctaaaagttgggacaaaaatagccttagatagagcttatggtcatatgttatttgataaagacaagaaagaacaggtttggattgcaggaggtatcggcatcactcccttcatttcatttattagagaaaatagtattttgactaagagagttgacttcttttataccttttcaaatcaagacaatttgatttatcaagatatgttagaatcctatgctaaagccaatcctaattttaaacttcacttaaataatagtagcctcaaaggaagacttgattttagtcagtctgtttttgaaggacaaccaacaatatttatgtgtgggccaactagtatgacatctacttatgctaaggtctttcggcaaaaagatgcaaagtctcgtttagtctatgaaggattttcctttagagacagttggttatccatatttctattaaaaacttttgacaaagtttattctaatttgataaaa

SEQ ID NO: 526 - protein, 384 aa, Streptococcus agalactiae
MTSLSLTFLLSTKFRILESYFQGIENMYFYHKVMAVFSMILLLLHKIGLGQGGHGSEFAKTIGSAGLYLFLSIVFVAYFGNFLKYEIWRFIHRFVYLAYILGLVHTFMILGDRILGNTLLSLIVLGYAVIGVISGFYIIFLYSRMRFRRVGYVQKVTHLNHDTTEIEIAMKRPYRYDYGQFTFFKIYQAGFESAAHPFSISGGHDRVIFLTVKASGDYTKSIYKQLKVGTKIALDRAYGHMLFDKDKKEQVWIAGGIGITPFISFIRENSILTKRVDFFYTFSNQDNLIYQDMLESYAKANPNFKLHLNNSSLKGRLDFSQSVFEGQPTIFMCGPTSMTSTYAKVFRQKDAKSRLVYEGFSFRDSWLSIFLLKTFDKVYSNLIK

SEQ ID NO: 527 - DNA, 267 bp, Streptococcus agalactiae
atggcaatctcaaaagagaaaaaaaatgaaatcattgctcaatatgcacgacacgaaggtgatacaggatcagttgaagttcaagtagcagttcttacttgggaaatcaaccaccttaacgaccacatcaaacaacacaaaaaagaccacgctacttaccgtggattgatgaaaaaaattggtcaccgtcgtaacttattagcatacctacgtcgtacagatgttaaccgttaccgtgaattgattcaatcacttggacttcgtcgt

SEQ ID NO: 528 - protein, 89 aa, Streptococcus agalactiae
MAISKEKKNEIIAQYARHEGDTGSVEVQVAVLTWEINHLNDHIKQHKKDHATYRGLMKKIGHRRNLLAYLRRTDVNRYRELIQSLGLRR

SEQ ID NO: 529 - DNA, 267 bp, Streptococcus pyogenes
atggcaatctcaaaagagaaaaaaaatgaaatcattgctcaatatgcacgtcatgaaggcgatacaggttcagttgaagttcaagtagcagttcttacttgggaaatcaaccacttgaacagccacatcaaacaacacaaaaaagaccacgctacttaccgtggattgatgaaaaaaattggtcaccgtcgtaacttgttggcatacctacgtcgtacagatgttaaccgttaccgtgagttgatccaatctcttggacttcgtcgt

SEQ ID NO: 530 - protein, 89 aa, Streptococcus pyogenes
MAISKEKKNEIIAQYARHEGDTGSVEVQVAVLTWEINHLNSHIKQHKKDHATYRGLMKKIGHRRNLLAYLRRTDVNRYRELIQSLGLRR

SEQ ID NO: 531 - DNA, 2139 bp, Streptococcus agalactiae
atggagaataatatgtcaaaacaagtctttgaaatgatttttgctggaaaaaaattagttgttgaaactggccaagtggctaaacaagcaaatggatcagttgtcgttcgttatggagattctactgtactcacagcagcagttatgtctaagaaaatgtcaacaggtgattttttcccacttcaagtcaattacgaagaaaaaatgtatgctgctgggaaatttccgggtggctttaacaaacgtgaagggcgtccaagtacggatgctaccttaacagcacgtcttattgatagaccaatccgtccgatgtttgctgagggatttcgtaacgaagtacaggtcatcaatactgttctttcatttgatgaaaatgctagcgcaccaatggctgctatgtttggttcatcattagcattatcgatttccgatattcctttcaatgggccaattgctggagttcaagttgcttatgttgatggtaattttattattaatccgacagcacaagaacaagaggcttctgcgttagaattaacggttgcaggtactaaagaagcgattaacatggttgaatctggagcgaaagaactttcagaagaaatcatgctagaggctcttcttaaaggacatgaggctgtctgtgaattaatcgcctttcaagaagagattgttactgctattggtaaagaaaaagccgaggtagaacttcttcaagttgatccagaacttcaagcagaaattattgctactcataacatagctttacaggctgcagtacaagttgaagagaaaaaggctagagaagcagctacagaagcagttaaagaagtagttataggtgaatatgaggcacgttacgctgaacatgaagaatatgatcgcattatgcgtgatgttgctgaaattttagaacaaatggaacatgcagaagttcgtcgcctcattacagaagataagattcgtcctgatggacgtcgtgtggatgagattcgtccattagacgcagagattgattttttaccacaagttcatggatcaggtctctttacacgaggacaaacccaagcattatcagtattaacgttagcacctatgggtgaagcacaaatcattgatgggctaacaccagagtataagaaacgctttatgcaccactataacttcccacaatattcagttggtgagacgggacgttatggagctgcagggcgtcgtgaaattggtcacggtgctttaggagagcgtgcattagaacaagtccttccaagattggaggagtttccgtatgctatccgactagttgcagaagttttagaatcaaacggttcatcatctcaggcttctatatgtgctggaacgcttgctcttatggcaggtggtgtgcctataaaagctccagttgctggtattgccatggggctcatatcagatggaacaaactatacagtcctcactgatattcaaggattagaagaccattttggcgatatggactttaaagttgcgggtacacgtgaagggattacagcacttcaaatggatattaaaattgaaggtattacccctcaaattttggaagaagctcttgcgcaagctaaaaaagcacgctttgaaattcttgatgtccttcatggagctatcgcagagccacgtccacaattagcaccaacggcacctaagattgatatgataaaaatcgatgttgataagattaaagttgtcatcggtaaaggtggcgaaactatcgataaaatcatcgctgaaacaggtgttaagattgatattgatgaagaaggaaatgtatctatcttctctagtgatcaggctgctattgatcgtacgaaagacattattgcaagtttagtacgtgaagcaaaagtgggagaagtttaccatgctaaagtagttcgtatcgagaaattcggtgcctttgtcaacctctttgataaaacagatgcattggtacatatttcagaaattgcatggacacgtacagcaaatgtagctgatgttcttgaaattggtgaagaagttgatgtgaaagtcatcaaaattgatgataaagggcgagttgatgcttctatgaaagcattgttaccacgtcctccaaaagctgacaatcctaaaaaggaatct

SEQ ID NO: 532 - protein, 713 aa, Streptococcus agalactiae
MENNMSKQVFEMIFAGKKLVVETGQVAKQANGSVVVRYGDSTVLTAAVMSKKMSTGDFFPLQVNYEEKMYAAGKFPGGFNKREGRPSTDATLTARLIDRPIRPMFAEGFRNEVQVINTVLSFDENASAPMAAMFGSSLALSISDIPFNGPIAGVQVAYVDGNFIINPTAQEQEASALELTVAGTKEAINMVESGAKELSEEIMLEALLKGHEAVCELIAFQEEIVTAIGKEKAEVELLQVDPELQAEIIATHNIALQAAVQVEEKKAREAATEAVKEVVIGEYEARYAEHEEYDRIMRDVAEILEQMEHAEVRRLITEDKIRPDGRRVDEIRPLDAEIDFLPQVHGSGLFTRGQTQALSVLTLAPMGEAQIIDGLTPEYKKRFMHHYNFPQYSVGETGRYGAAGRREIGHGALGERALEQVLPRLEEFPYAIRLVAEVLESNGSSSQASICAGTLALMAGGVPIKAPVAGIAMGLISDGTNYTVLTDIQGLEDHFGDMDFKVAGTREGITALQMDIKIEGITPQILEEALAQAKKARFEILDVLHGAIAEPRPQLAPTAPKIDMIKIDVDKIKVVIGKGGETIDKIIAETGVKIDIDEEGNVSIFSSDQAAIDRTKDIIASLVREAKVGEVYHAKVVRIEKFGAFVNLFDKTDALVHISEIAWTRTANVADVLEIGEEVDVKVIKIDDKGRVDASMKALLPRPPKADNPKKES

SEQ ID NO: 533 - DNA, 2130 bp, Streptococcus pyogenes
atgtcaaaacaaacctttacaacaacatttgcagggaaaccccttgttgttgaagttggtcaagtcgctaagcaagccaatggggcaaccgttgttcgttatggcgactcaactgtcctgaccgcagctgttatgtctaagaaaatggcaacgggtgatttcttcccccttcaagttaattacgaagaaaaaatgtatgccgctggtaaattcccaggaggtttcatgaaacgtgagggacgcccttcaacagatgcgaccttgacagctcgcttgattgaccgcccgattcgtcccatgtttgccgaaggttttcgtaacgaagtacaagtgattaacactgtcctttcttatgatgaaaatgctagcgctccaatggcagcgatgtttggctcatctctggccttgtcaatctcagatattccatttaatggaccgattgcaggtgttcaagttggctatattgatggcgagttcatcattaacccagataaagaacagatggaagcatcactcttagaattaactgttgctggtagcaaagaagccatcaatatggttgagtctggtgccaaagaattatcagaagacatcatgcttgaggctcttttaaaaggtcaccaagctattcaagaattaattgccttccaagaacaaatcgtagcagttgttggtaaagaaaaagctgaggttgaactgttacaggttgatgtagacttacaagctgatattgtggctaagtacaatgctcaactgcaaaaagctgttcaagttgaagagaaaaaagcgcgtgaagcagccacagaagccgttaaagaaatggttaaggctgaatacgaagagcgttacgcagaagacgaaaacctagcaaccattatgcgtgacgtggcagaaatccttgaacaaatggagcatgctgaggtgcgccgcctcattacagaagacaagattcgtcctgatggtcgtaagattgacgaaattcgtccgcttgatgctgtggttgacttcttgccaaaagtacatggatcaggtctttttacgcgcggtcaaacgcaggccttgtcagttttgactttggcaccaatgggagaaactcaaatcattgatggtctggccccagagtacaaaaaacgctttttgcatcactacaatttcccgcaatattcagttggtgaaacgggtcgttacggagctgctggtcgtcgtgaaattggacacggtgccttaggtgaacgcgctcttgaacaagtcttgccaagcttagaagagtttccttatgctattcgtttagttgccgaagttctagaatctaacggttcgtcttctcaggcttctatctgtgctgggacccttgccctaatggctggtggtgtgccgattaaagcgcctgtggcagggattgccatgggtctcatttccgatgggacgaattatacagtcttgaccgatatccaaggtcttgaagaccactttggagatatggactttaaagtggcaggaactcgtgaagggattacagcccttcaaatggatattaagattgcaggaattacccctcaaatcctagaagaagctcttgcacaagctaaaaaagctcgctttgaaatccttgatgtgattgaagcaactatcgctgaaccacgtcctgagttagccccaactgcaccgaaaattgacaccatcaagattgacgtagacaaaatcaaagtggttatcggtaaaggtggcgaaactattgacaagattattgccgaaacgggtgtcaaaattgatattgatgacgaaggaaatgtctctatctactcaagtgaccaagctgccattgaccgcactaaagaaattattgcaggtcttgttcgtgaagctaaggtaggcgaagtttaccatgctaaggttgtccgtattgagaaatttggtgcctttgtcaacctctttgacaagacagatgctcttgttcacatttctgaaattgcctggacgagaacgaccaacgtgtcagatgtccttgaagtgggtgaagacgttgatgttaaggtcattaagattgatgagaagggtcgtgtggatgcctcaatgaaagctttgattccacgcccaccaaaaccagagaaaaaagaagaaaaacatgac

SEQ ID NO: 534 - protein, 710 aa, Streptococcus pyogenes
MSKQTFTTTFAGKPLVVEVGQVAKQANGATVVRYGDSTVLTAAVMSKKMATGDFFPLQVNYEEKMYAAGKFPGGFMKREGRPSTDATLTARLIDRPIRPMFAEGFRNEVQVINTVLSYDENASAPMAAMFGSSLALSISDIPFNGPIAGVQVGYIDGEFIINPDKEQMEASLLELTVAGSKEAINMVESGAKELSEDIMLEALLKGHQAIQELIAFQEQIVAVVGKEKAEVELLQVDVDLQADIVAKYNAQLQKAVQVEEKKAREAATEAVKEMVKAEYEERYAEDENLATIMRDVAEILEQMEHAEVRRLITEDKIRPDGRKIDEIRPLDAVVDFLPKVHGSGLFTRGQTQALSVLTLAPMGETQIIDGLAPEYKKRFLHHYNFPQYSVGETGRYGAAGRREIGHGALGERALEQVLPSLEEFPYAIRLVAEVLESNGSSSQASICAGTLALMAGGVPIKAPVAGIAMGLISDGTNYTVLTDIQGLEDHFGDMDFKVAGTREGITALQMDIKIAGITPQILEEALAQAKKARFEILDVIEATIAEPRPELAPTAPKIDTIKIDVDKIKVVIGKGGETIDKIIAETGVKIDIDDEGNVSIYSSDQAAIDRTKEIIAGLVREAKVGEVYHAKVVRIEKFGAFVNLFDKTDALVHISEIAWTRTTNVSDVLEVGEDVDVKVIKIDEKGRVDASMKALIPRPPKPEKKEEKHD

SEQ ID NO: 535 - DNA, 750 bp, Streptococcus agalactiae
atgacaagtacaaacgagttagacattagattgcgtgcttttatcaatgcaccggataattttttagatagtataggtcttgtgaatgccttgcaccactctacggtttgggcaagcaaggaaccctatgctattcaagtagatggtcaagaagttgttcctgtttttacggatattactgaccttaatcatttcaaagaggagcaagaaagtgctcgagatatgttttgggagagtcgtcgtagtttagacgttcttgatgaagctatttcacatggcttagcaggattggtctataatttaaaaaaagaaggcgattttgggaactcgactattttctactgtgaagatatggtgcaatttatgaataattacaccacaatcttaaatcagttgttaaatgaagataacattgttgccgatatcatggataaaacctacttggtacctgcctttgtccatccacgtgaagaaggtagttttgaccgtcttttccctacaatgtctacccccgaaggaaaaagttatgttccagtattctcaaaccttttaagttttgaaaaatggtataaccataatgattttggtggtgcttttaggaaagcacaaggagtaattttagcctggacgattgacgatatttataaaccgcgtaatggagaaaatgagattgatgatacctttggagtagccatcaatccatttgatgaacaacaagttttagttgattggtctgatgtagaaaacgat

SEQ ID NO: 536 - protein, 250 aa, Streptococcus agalactiae
MTSTNELDIRLRAFINAPDNFLDSIGLVNALHHSTVWASKEPYAIQVDGQEVVPVFTDITDLNHFKEEQESARDMFWESRRSLDVLDEAISHGLAGLVYNLKKEGDFGNSTIFYCEDMVQFMNNYTTILNQLLNEDNIVADIMDKTYLVPAFVHPREEGSFDRLFPTMSTPEGKSYVPVFSNLLSFEKWYNHNDFGGAFRKAQGVILAWTIDDIYKPRNGENEIDDTFGVAINPFDEQQVLVDWSDVEND

SEQ ID NO: 537 - DNA, 750 bp, Streptococcus pyogenes
atgactaaatcaaatgaattagatattcgcttaagagcttttatcaatgcgcctgataactttttggatagccttgcgcttgtcaacgctttccataattttcctgtctgggctgctaaagaaccctacgtgatagaagtcgaaggtgtcaaggttacccctgtttttaccgataaggaagatatggctcgctttaaagaagaacaaaagagtgctcaaagtcagtattggctggagcgttcagctcttgcagtgctagaagaagtcattacatctggtgcagcaggtcttatctttaaccttaagaaaaagggagattttgggaattctaccattttcaaaagcagtgatatgattcaatttatgaaccattacaccactgtgttaaatacgcttatgagtgatgacaatgtggcggcagatacgatggaaaaggtttaccttgttcctgcctttgtttatcctaaagataataaccattacgaccgcctttttcctaccatgtcaacgcctgaaggaaaaagctatgttcccgccttttcaaatcttcaaagctttgcgaaatggtacaaccaagacgattttggaggccttttcaggaaagctgaaggagtgattctgacttggacgattgatgatatttatcaaccaagaaatggtgaaaacgagcttgatgaaacgttcggtgtcgccatcaatccttttgatgaccaacaaattcttgttgattggtcagaattagataagtcg

SEQ ID NO: 538 - protein, 250 aa, Streptococcus pyogenes
MTKSNELDIRLRAFINAPDNFLDSLALVNAFHNFPVWAAKEPYVIEVEGVKVTPVFTDKEDMARFKEEQKSAQSQYWLERSALAVLEEVITSGAAGLIFNLKKKGDFGNSTIFKSSDMIQFMNHYTTVLNTLMSDDNVAADTMEKVYLVPAFVYPKDNNHYDRLFPTMSTPEGKSYVPAFSNLQSFAKWYNQDDFGGLFRKAEGVILTWTIDDIYQPRNGENELDETFGVAINPFDDQQILVDWSELDKS

SEQ ID NO: 539 - DNA, 594 bp, Streptococcus agalactiae
ttgaggataactatggggtggtggaaagaaagtatagctattgtcaaagaacaagatccagctgctcgtagttctctagaagttattttaacttatccaggaataaaagctcttgcagctcataggctatctcattttttatggaatcataattttaaattgttagcacgtatgcacagtcaattttggcgtttctggacacaaattgaaattcatcccggagcgacgatttcggaaggggtttttattgaccacggttcaggattggtcattggagaaactgccattgtagagaaaggtgctatgctataccatggggttacattgggtggcacaggtaaagacaaaggcaaacgacacccaaccatacgtaaaggagcgctaatttcagcacattctcaaatcattggtccaattgaggttggagaaaatgctaaagtcggtgctgcagcagttgtccttgcagatgtgccagcagacgtaacagtagttggtgttccagctaaagttgtccgtgtccatggtcaaaaggatgatcttcaaatccgaagtattgaacatgatcgagaagaaagttattattcgtccaaactt

SEQ ID NO: 540 - protein, 198 aa, Streptococcus agalactiae
MRITMGWWKESIAIVKEQDPAARSSLEVILTYPGIKALAAHRLSHFLWNHNFKLLARMHSQFWRFWTQIEIHPGATISEGVFIDHGSGLVIGETAIVEKGAMLYHGVTLGGTGKDKGKRHPTIRKGALISAHSQIIGPIEVGENAKVGAAAVVLADVPADVTVVGVPAKVVRVHGQKDDLQIRSIEHDREESYYSSKL

SEQ ID NO: 541 - DNA, 579 bp, Streptococcus pyogenes
atgggttggtggaaagaaagtatagctattgttaaagctctagacccagctgctcgtaatagtcttgaggttatcctaacttatccaggcatcaaagccctagctgctcatcgtttgtctcattttctttggcgacatcattttaaattactagccagaatgcatagccaattttggcgattttggacacaaattgaaatccatcctggagcacaaatcgctcctggagtcttcattgaccatggtgctggtcttgttattggagagacagcaattgttgaaaaaggtgtgatgctttatcatggggtgaccctaggtggaaccggaaaagattgtggcaagcgtcatccaacggttcgacaaggtgccttaatttcggcacatgcccaagtgattggacctattgacatcggagcaaatgctaaagtaggggcagcagctgttgtgttatcagatgttcctgaagacgtgacagttgtaggtgtgccagctaagatagtacgagtgcatgggcaaaaagataatcgtcaaattcaaagtttacaaaaacaacgagaggtctcttatcagttgtcaaaa

SEQ ID NO: 542 - protein, 193 aa, Streptococcus pyogenes
MGWWKESIAIVKALDPAARNSLEVILTYPGIKALAAHRLSHFLWRHHFKLLARMHSQFWRFWTQIEIHPGAQIAPGVFIDHGAGLVIGETAIVEKGVMLYHGVTLGGTGKDCGKRHPTVRQGALISAHAQVIGPIDIGANAKVGAAAVVLSDVPEDVTVVGVPAKIVRVHGQKDNRQIQSLQKQREVSYQLSK

SEQ ID NO: 543 - DNA, 180 bp, Streptococcus agalactiae
gtgaaggattatgtaacaactcaaatattatcaatcttaggtatactagcagcagcttgtttaagctatttaaagtttgcacaaggtaaccctctcttaggaattatttgggctgcttttgttttaatgtatgttgttcgtttgtataaagcttatcaaaaacagaaaaaggaaaaacca

SEQ ID NO: 544 - protein, 60 aa, Streptococcus agalactiae
MKDYVTTQILSILGILAAACLSYLKFAQGNPLLGIIWAAFVLMYVVRLYKAYQKQKKEKP

SEQ ID NO: 545 - DNA, 1341 bp, Streptococcus agalactiae
atgataaaaatttacgacactatgactcgcagtttacaagattttatacctctcaatgaaggtaaagtcaacatgtacgtctgtgggccaacagtttataactatatacacatcgggaatgcccgcagtgtagtagcttttgatactattcgtcgttattttgagtattgtggttaccaagtcaattatatttctaactttactgatgttgatgataaaattataaaaggtgcagctgaagcaggtatggatacaaaatccttttcagataagtttatttcagcatttatggaagatgttgctgcattaggtgtcaaacctgctacaaaaaatcctcgagttattgactatatggatgagattattgattttgttaaagttttagttgataaggaatttgcctatgaagctaatggagatgtttattttagagtaagtaaatcacatcattatgcaaaattagccaataaaactttggaagatttagagattggtgcaagtggtcgtgttgatggtgaaggagagattaaagagaatcctttagattttgcactttggaaatcagctaaatctggggaagtctcatgggaaagtccttgggggaaagggcgcccagggtggcatattgaatgttctgttatggcaactgagatccttggtgatactattgatatccatggtggaggagctgatttagaatttccacatcacacgaatgagattgcacaatctgaagctaaaacaggtaagacctttgcaaattactggatgcataatggttttgttaacgttgataacgagaaaatgtctaaatctcttggtaactttattactgttcacgatatgttgaagagcgttgacggacaagtaatacgttttttcttagcgacacaacagtatcgtaaacccgtgaatttcactgaaaaggccgttcatgatgcggaagttaaccttaaatatttaaaaaatactttcaacttaccaatccaagagaatgctaatgatgaagaattagagcaatttgtgaaagcatttcaaggagcgatggatgatgattttaatacagcaaacggtattactgttatctttgaaatggcaaaatggattaattcaggacactatacttcaagagttaaggaaacctttgctgaattattagaaatttttggtattgtattccaagaggaagttcttgatgctgatattgaatctttaatagaacaacgtcaagaagcacgagctaatcgtgattttgcaactgctgatcgtattagagatgaattagcaaaacaaggaattaaattgttagatactaaggatggcgtgaggtggactcgtgat

SEQ ID NO: 546 - protein, 447 aa, Streptococcus agalactiae
MIKIYDTMTRSLQDFIPLNEGKVNMYVCGPTVYNYIHIGNARSVVAFDTIRRYFEYCGYQVNYISNFTDVDDKIIKGAAEAGMDTKSFSDKFISAFMEDVAALGVKPATKNPRVIDYMDEIIDFVKVLVDKEFAYEANGDVYFRVSKSHHYAKLANKTLEDLEIGASGRVDGEGEIKENPLDFALWKSAKSGEVSWESPWGKGRPGWHIECSVMATEILGDTIDIHGGGADLEFPHHTNEIAQSEAKTGKTFANYWMHNGFVNVDNEKMSKSLGNFITVHDMLKSVDGQVIRFFLATQQYRKPVNFTEKAVHDAEVNLKYLKNTFNLPIQENANDEELEQFVKAFQGAMDDDFNTANGITVIFEMAKWINSGHYTSRVKETFAELLEIFGIVFQEEVLDADIESLIEQRQEARANRDFATADRIRDELAKQGIKLLDTKDGVRWTRD

SEQ ID NO: 547 - DNA, 1341 bp, Streptococcus pyogenes
atgattaaaatttatgataccatgacccgttcgctccgcaagtttgtacctttgactgaaaatacagtcaatatatacgtttgtggaccgacggtctataattatattcatattggaaatgctagatcagcggtcgcttttgacaccattcgacgttattttgagtatactggctatcaggtcaattacatttccaattttaccgatgtcgatgataaaattatcaaggctgctactcaagcaggtgtttctcctaaagaattgtcagatcgctttattgcagcttttatagaagataccaaggcacttggtgttaagccagccacacaaaatcctcgtgttatggattatatagcagaaatcatttcatttgttgaaagtctcattgaaaaagattttgcttacgaagcagatggagatgtgtatttccgcgtggaaaagtcagagcattatgccaagctagctaataaaaccctgtcagaacttgaagttggagccagtggtcgaacagatgctgagacagctttaaaagaaaatccactggactttgctctttggaaatcagctaaggcaggtgaggtttcttgggatagcccctgggggtttggtcgtccaggctggcacattgaatgttctgtgatggctactgaaattcttggtgataccattgatattcatggtggcggagctgatttggaatttcctcatcataccaatgaaattgcccaatctgaggccaaaacaggcaagacttttgctaactattggatgcacaatgggtttgtcactgttgataacgaaaaaatgtccaagtcactaggtaattttgtgaccgttcatgacatgttacaaaccgttgatggtcaggttttgcgattctttcttgcgacacaacagtaccgaaaaccaattaacttcactgaaaagactattcatgatgcggaaatcaatctgaagtatcttaaaaacaccttgcaacaaccgctgacagaaactgcagatgagcaagagctaaaacagtttgtaatagctttccaagacgctatggacgatgatttcaatacagcaaatgggattaccgtcgtatttgacatggccaagtggattaattctggctcctatacagaacctgttaaaagcgcttttgagaaaatgttagctgtttttggcattatctttgaagaagaggtgcttgaggttgacattgaagccttgattgccaagcgacaagaagcacgcgcgaatcgtgattttgccacagctgatgccattcgagatcagttagcagttcaaggcatcaagctgctagataccaaagatggtgtgaggtggctgcgtgac

SEQ ID NO: 548 - protein, 447 aa, Streptococcus pyogenes
MIKIYDTMTRSLRKFVPLTENTVNIYVCGPTVYNYIHIGNARSAVAFDTIRRYFEYTGYQVNYISNFTDVDDKIIKAATQAGVSPKELSDRFIAAFIEDTKALGVKPATQNPRVMDYIAEIISFVESLIEKDFAYEADGDVYFRVEKSEHYAKLANKTLSELEVGASGRTDAETALKENPLDFALWKSAKAGEVSWDSPWGFGRPGWHIECSVMATEILGDTIDIHGGGADLEFPHHTNEIAQSEAKTGKTFANYWMHNGFVTVDNEKMSKSLGNFVTVHDMLQTVDGQVLRFFLATQQYRKPINFTEKTIHDAEINLKYLKNTLQQPLTETADEQELKQFVIAFQDAMDDDFNTANGITVVFDMAKWINSGSYTEPVKSAFEKMLAVFGIIFEEEVLEVDIEALIAKRQEARANRDFATADAIRDQLAVQGIKLLDTKDGVRWLRD

SEQ ID NO: 549 - DNA, 384 bp, Streptococcus agalactiae
gtgattgatgttcgtttgattaatggtattgctttagcttttgaaggagatgcagtttattctttgtatatccgacgccatttaattatgcagggttttaccaaacctaatcagttacatcggaaagcaacccaatatgtttctgctaatgcccaagcattgttaattaatgccatgttagaagaaaatattttaactgatgaagagcagttaatttataaacgaggacgtaatgcgaatagtcatacaaaagctaaaaatgctgatattattacctatcgtatgtctacaggttttgaggctcttatggggtacttggatatgactggtcagataaagcgcttggaaactctaatacagtggtgtattgaaaccattgaaaaa

SEQ ID NO: 550 - protein, 128 aa, Streptococcus agalactiae
MIDVRLINGIALAFEGDAVYSLYIRRHLIMQGFTKPNQLHRKATQYVSANAQALLINAMLEENILTDEEQLIYKRGRNANSHTKAKNADIITYRMSTGFEALMGYLDMTGQIKRLETLIQWCIETIEK

SEQ ID NO: 551 - DNA, 411 bp, Streptococcus pyogenes
gtgactaatccagttgatgtgaatttgattaatggcattgccctagcctttgaaggggatgcggtttattcctactatgttcgtcgtcatctcatttttcaaggtaaaacgaaacctagccagctacaccgtttagcaacgagatatgtttctgctaaggcacaagccaacttgattcaggctatgttagaagcgcagctattgaccgaaaaagaagaagacatctataagcgtggtcgcaataccaatagccatactaaagctaagaatgccgatattattacctatcgtatgtcgacaggttttgaagccattatgggttatcttgatatgatgggccaaaaagagcggttagaagaattgatcagatggtgtattgagtatgtagaaaagcaacaattgatatcctca

SEQ ID NO: 552 - protein, 137 aa, Streptococcus pyogenes
VTNPVDVNLINGIALAFEGDAVYSYYVRRHLIFQGKTKPSQLHRLATRYVSAKAQANLIQAMLEAQLLTEKEEDIYKRGRNTNSHTKAKNADIITYRMSTGFEAIMGYLDMMGQKERLEELIRWCIEYVEKQQLISS

SEQ ID NO: 553 - DNA, 753 bp, Streptococcus agalactiae
atgactatgaaagataaacaatttaaagaagaatcaagtgaccttgtctatggcttacatgctgtgacagagagtttaagagctaatactggtaataaattatacttgcaagatgacttaagaggaaagaacgttgataaagtcaaagcactagcgactgaaaaaaaagtatccatttcctggactcctaaaaaaaccttatcagacatgacaaatggtggagttcaccaaggattcgttctaaaagtttcggaatttgcctatgcggatttatcagagataatgacaaaggcagagaatgaagaaaatcctctcattttaatccttgatggtctgaccgaccctcacaacctaggttctattctacgcacagctgatgcaaccaatgtaacaggtattatcatccccaaacatcgttctgttggagtgaccccagtggtttcaaagacatctacaggagctgttgaacatgttcctattgcaagggtaactaatctcagtcaaactttggatactttaaaagataaggagttctggatatttggcactgatatgaatgggacaccatcgcataagtggaataccaaaggtaaattagccctagttattggtaatgaaggaaaaggtatttctcataatatcaaaaagcaagtagatgaaatgattacaattcccatgaatggtcatgttcagagtttaaatgccagtgtcgcagccgctattttgatgtatgaagtatttagaaaccgccta

SEQ ID NO: 554 - protein, 251 aa, Streptococcus agalactiae
MTMKDKQFKEESSDLVYGLHAVTESLRANTGNKLYLQDDLRGKNVDKVKALATEKKVSISWTPKKTLSDMTNGGVHQGFVLKVSEFAYADLSEIMTKAENEENPLILILDGLTDPHNLGSILRTADATNVTGIIIPKHRSVGVTPVVSKTSTGAVEHVPIARVTNLSQTLDTLKDKEFWIFGTDMNGTPSHKWNTKGKLALVIGNEGKGISHNIKKQVDEMITIPMNGHVQSLNASVAAAILMYEVFRNRL

SEQ ID NO: 555 - DNA, 771 bp, Streptococcus pyogenes
ttgaagcattcatggtataataaactcatggaagataaagatactattgaaacaaacgatatcgtctatggtgttcatgccgttacagaaagccttcaagcaaatacaggaaataagctttatatccaagaggatttaagaggaaagaaagtggataacatcaaaagcttagcgacacaaaaaaaggtcgctatttcatggacgcctaaaaaaaccttgtcacaaatgactgatggagctgtgcatcaaggttttgttctgagagtatcagcttttgcctatactgatgttgatgagatcctcgaaatagcagagcaagaagcaaatcctttgattcttattttagatggtctgacagatcctcataatttaggatcgattttacggacagctgatgctacaaatgtatgtggagtgattattcctaaacatcgttctgttggtgtgactccagtggtttcaaagacgtctacaggtgctgttgaacatattccgatagcgagagtaactaaccttagtcaaactctagataaattgaaagcaagaggattctggatttttggcacagacatgaatggaacaccgtctgattgctggaacactaatggtaaacttgctttagtcattggtaacgaaggtaaaggcatctctaccaatatcaaaaagcaagttgatgaaatgattacgattcctatgaatggtcacgtacagagcttaaatgctagcgtagcggcagctattctcatgtatgaagttttccgaaataggcgc

SEQ ID NO: 556 - protein, 257 aa, Streptococcus pyogenes
LKHSWYNKLMEDKDTIETNDIVYGVHAVTESLQANTGNKLYIQEDLRGKKVDNIKSLATQKKVAISWTPKKTLSQMTDGAVHQGFVLRVSAFAYTDVDEILEIAEQEANPLILILDGLTDPHNLGSILRTADATNVCGVIIPKHRSVGVTPVVSKTSTGAVEHIPIARVTNLSQTLDKLKARGFWIFGTDMNGTPSDCWNTNGKLALVIGNEGKGISTNIKKQVDEMITIPMNGHVQSLNASVAAAILMYEVFRNRR

SEQ ID NO: 557 - DNA, 516 bp, Streptococcus agalactiae
atgaaaaaacattctatcttactcgttgatggctacaatatgattgctttttggaaagatactcgacagctttttaaaagcaatcgtttagaagaggcaagggaagtattacttagaaagctaaatcattacgcacatttcgaacacattgatattatttgtgtatttgatgcacagtatgttcctggtgtacgtcaacgttatgaccaatacaaaatatccgttatctttactgaggaggacgaaactgcggatagctatattgaacgagcagcggcagaacttaatcaatctgtgttaaatttagtctccgttgctaccagtgatttaaatgaacaatggactatattttctcagggtgctttacgtgtctcggctagagaattggaacagcgtgtagcgacagtaaaatcagatttggataagatgtccagtcaaatcgatttgagtacgccaaagttaaggccgtggaatgatgaacaactaggaaaactcaaggattttttagatggtatg

SEQ ID NO: 558 - protein, 172 aa, Streptococcus agalactiae
MKKHSILLVDGYNMIAFWKDTRQLFKSNRLEEAREVLLRKLNHYAHFEHIDIICVFDAQYVPGVRQRYDQYKISVIFTEEDETADSYIERAAAELNQSVLNLVSVATSDLNEQWTIFSQGALRVSARELEQRVATVKSDLDKMSSQIDLSTPKLRPWNDEQLGKLKDFLDGM

SEQ ID NO: 559 - DNA, 516 bp, Streptococcus pyogenes
atgaaaaaacggatattattagtagatgggtataatatgattgccttttggcaatcaacccgtcagttgtttaagacaaatcagcttgatcaggcacgtaacacacttttaacaaaacttaatcattatgcccattttgagaatattaatattatttgtgtttttgatgcccaatatgtaccggggttaaggcaacgatatgaccagtattatatctcagtggtatttacagaggaagacgaaacagcagatagctacattgagcgcatggcagcagagttaaatacggctatacatatggtagaagtagctacgagtgatttaaatgaacaatggacgattttttctcaaggagctcttcgtgtcactgcaagagaattagagcaaagagttcatactgtcaaagctgatttagataaaatgtctagagatattgatctcaaaacgcctaaactgcggccttttgaccaaggacagcttattcaattgaaggattttatgtctcagttagatcga

SEQ ID NO: 560 - protein, 172 aa, Streptococcus pyogenes
MKKRILLVDGYNMIAFWQSTRQLFKTNQLDQARNTLLTKLNHYAHFENINIICVFDAQYVPGLRQRYDQYYISVVFTEEDETADSYIERMAAELNTAIHMVEVATSDLNEQWTIFSQGALRVTARELEQRVHTVKADLDKMSRDIDLKTPKLRPFDQGQLIQLKDFMSQLDR

SEQ ID NO: 561 - DNA, 858 bp, Streptococcus agalactiae
atgacttttaaaatactaacggattcgacatcggatttagatgaaaagtgggctcaagagcacaatgtcgatattataggtttaaccattgaacttgatggaaagacttatgagacagtcggagacgaaaaaattactagtgacttcttgttggagcgtatgcaagagggagcaaagcctacaacaagccaaattaacgttggtcagtttgaagaagttttttcaacctatgcagaaaatgaccatgccttgttatatttagcgctatcttcacatttatcaggcacttaccagagtgcaactattgcgcgtgagatggtcttagacaaatatcctgatgctcaaattgagattgtggatacgatggcagcttcatgtggtgagggtgtcttagcgatgttagcaactaaagagcgacaagaaggtaaatctttagaagaagtgaaacaaaaaattgaatcacttctccctaaattaaacacatactttttagttgacgatctcaaccatttaatgcgtagtggtcgcttatcaaaaggtgcagctatcattggaagtgttgctaagattaaaccattacttaagttagatagtgagggtaaattagtaccatttgccaagacaaggggccgtaaaaaaggtattaaagagattgtgactcaggcaacaaaaacactatcttatagcactttaattattgcttatagtggagagaaagattcagctcaagttatgaaagaacagttattagcagatgagcgtattgaagaagttattattcgtccattagggccagttatttcagctcatgtgggctcaggtgctttagctctattctctttaggggaagaaaaccga

SEQ ID NO: 562 - protein, 286 aa, Streptococcus agalactiae
MTFKILTDSTSDLDEKWAQEHNVDIIGLTIELDGKTYETVGDEKITSDFLLERMQEGAKPTTSQINVGQFEEVFSTYAENDHALLYLALSSHLSGTYQSATIAREMVLDKYPDAQIEIVDTMAASCGEGVLAMLATKERQEGKSLEEVKQKIESLLPKLNTYFLVDDLNHLMRSGRLSKGAAIIGSVAKIKPLLKLDSEGKLVPFAKTRGRKKGIKEIVTQATKTLSYSTLIIAYSGEKDSAQVMKEQLLADERIEEVIIRPLGPVISAHVGSGALALFSLGEENR

SEQ ID NO: 563 - DNA, 858 bp, Streptococcus pyogenes
atgacctttacaataatgacagattcaaccgctgatttgaatcaaacctgggcagaagatcatgatattgtccttataggattaacgattttgtgcgatggagaggtttatgaaacggtcggtcctaaccgtattagtagtgattaccttttgaaaaagatgaaagctggcagtcatcctcaaaccagtcagattaatgtgggagagtttgagaaggtttttcgtgaacatgctaggaacaacaaagcactgctttatcttgctttttcttcggttttatcgggtacctatcaaagcgctctaatggcacgcgatcttgttcgagaagattatcccgatgcggtgattgaaattgttgataccttggctgctgcaggaggagaaggctatctaaccattttagcagcagaagccagagatagtggcaaaaatttactggagactaaagatattgttgaagcagtgatccctcgactgcgcacctatttcttagtagatgatctttttcatttgatgcgtggtgggcgtctgtcaaaaggttcagcttttctaggcagtttagccagtatcaaacctcttttgtggattgatgaggaagggaaattggtgcccattgcaaaaattcggggacgccaaaaagccatcaaagaaatggtggctcaagtggaaaaagatattgcggattcgacggttattgtctcttatacaagcgatcagggtagtgccgaaaagttacgagaagagctgctggcgcatgaaaatattagcgatgttcttatgatgccactaggaccagttatctcagctcacgttggtcctaacaccctggcagtttttgtgattgggcaaaattcccgt

SEQ ID NO: 564 - protein, 286 aa, Streptococcus pyogenes
MTFTIMTDSTADLNQTWAEDHDIVLIGLTILCDGEVYETVGPNRISSDYLLKKMKAGSHPQTSQINVGEFEKVFREHARNNKALLYLAFSSVLSGTYQSALMARDLVREDYPDAVIEIVDTLAAAGGEGYLTILAAEARDSGKNLLETKDIVEAVIPRLRTYFLVDDLFHLMRGGRLSKGSAFLGSLASIKPLLWIDEEGKLVPIAKIRGRQKAIKEMVAQVEKDIADSTVIVSYTSDQGSAEKLREELLAHENISDVLMMPLGPVISAHVGPNTLAVFVIGQNSR

SEQ ID NO: 565 - DNA, 201 bp, Streptococcus agalactiae
ttgttgatgaaagtttttggaaaatgtttttgttgctggcgcatttgccctcataggaataactattttattgatgcttttactaggaaggttgatattgctacttatttttcaaggggagatgatgcaattttagcagttataggaatatcattgatagctatgggaatttcagtgtactaccataagtataaggacaga

SEQ ID NO: 566 - protein, 67 aa, Streptococcus agalactiae
MLMKVFGKCFCCWRICPHRNNYFIDAFTRKVDIATYFSRGDDAILAVIGISLIAMGISVYYHKYKDR

SEQ ID NO: 567 - DNA, 543 bp, Streptococcus agalactiae
ttgtttaccccatttgtaaggccccggaacctttcaaatactctcgtggaccggaacatccacacctgtaaacaaaaacgaattcgtataggagaaatcatgaacaaaacaactttcatggctaaaccaggccaagttgaacgcaaatggtacgttgttgacgcagcagatgtacctcttggacgtctttctgcagtagttgctagcgtacttcgcggaaaaaacaaaccaactttcacaccacacactgatacaggtgactttgtgattgttatcaatgctgaaaaagttaaattaactggtaaaaaagcgtcagataaaatctactacactcactcaatgtatccaggtggtttgaaacaaatctcagcaggtgaacttcgttctaaaaatgctgttcgtttgattgaaaaatcagttaaaggcatgcttccacataacactcttggacgtgcacaaggtatgaaattgaaagtatttgttggcggtgagcatacacatgctgcacaacaaccagaagtacttgatatctcaggacttatc

SEQ ID NO: 568 - protein, 181 aa, Streptococcus agalactiae
MFTPFVRPRNLSNTLVDRNIHTCKQKRIRIGEIMNKTTFMAKPGQVERKWYVVDAADVPLGRLSAVVASVLRGKNKPTFTPHTDTGDFVIVINAEKVKLTGKKASDKIYYTHSMYPGGLKQISAGELRSKNAVRLIEKSVKGMLPHNTLGRAQGMKLKVFVGGEHTHAAQQPEVLDISGLI

SEQ ID NO: 569 - DNA, 549 bp, Streptococcus pyogenes
ttgtttaccccatttgaaaggccccggaaccttccaaataccttcgatgggacggaacacccatcaccttgtaaacaaatattacgaattcgtataggagaaatcatgaacaaaacaactttcatggctaaaccaggccaagttgaacgcaaatggtacgttgttgacgcagctgatgtgccacttggacgtctttctgcagtagttgctagcgtacttcgcggaaaaaacaaaccaactttcacaccacatactgatacaggtgattttgttatcgttatcaacgctgaaaaagttaaattaactggtaaaaaagcaactgataaagtttactacactcactcaatgtacccaggtggtttgaaatcaatcactgctggtgaacttcgctctaaaaacgcagttcgcttgattgaaaaatcagttaaaggcatgcttccacataacactcttggacgtgcacaaggtatgaaattgaaagtcttcgttggcggtgagcatactcacgcagcacaacaaccagaagtacttgacatctcaggacttatc

SEQ ID NO: 570 - protein, 183 aa, Streptococcus pyogenes
LFTPFERPRNLPNTFDGTEHPSPCKQILRIRIGEIMNKTTFMAKPGQVERKWYVVDAADVPLGRLSAVVASVLRGKNKPTFTPHTDTGDFVIVINAEKVKLTGKKATDKVYYTHSMYPGGLKSITAGELRSKNAVRLIEKSVKGMLPHNTLGRAQGMKLKVFVGGEHTHAAQQPEVLDISGLI

SEQ ID NO: 571 - DNA, 390 bp, Streptococcus agalactiae
atggcacaagcacaatatgcaggtactggtcgccgtaaaaacgctgttgcacgcgttcgtttggtcccaggtactggtaaaattacaatcaataaaaaagatgtagaagagtacatcccacacgcagaccttcgtcttgttatcaaccaacctttcgcagttacttcaactcaaggttcatacgatgtttttgttaacgttgtaggtggtggatatgcaggtcaatcaggtgcgatccgtcatggtatctcacgtgcacttttagaagttgacccagatttccgcgattcattgaaacgtgctggacttcttacacgtgacgcacgtatggttgaacgtaaaaaaccaggtcttaagaaagctcgtaaagctagtcagttctcaaagcgt

SEQ ID NO: 572 - protein, 130 aa, Streptococcus agalactiae
MAQAQYAGTGRRKNAVARVRLVPGTGKITINKKDVEEYIPHADLRLVINQPFAVTSTQGSYDVFVNVVGGGYAGQSGAIRHGISRALLEVDPDFRDSLKRAGLLTRDARMVERKKPGLKKARKASQFSKR

SEQ ID NO: 573 - DNA, 390 bp, Streptococcus pyogenes
atggcacaagcacaatatgcaggtactggccgtcgtaaaaacgctgttgcacgcgttcgtttggttccaggtactggtaaaatcactgttaacaaaaaagatgtagaagaatacatcccacatgctgacttacgtttgatcatcaaccaaccttttgcagttacatcaactgaaggttcatacgacgttttcgttaacgttgttggtggtggttacggtggacaatcaggtgcgatccgtcatggtatcgctcgtgcgcttcttcaagtagacccagacttccgcgattcattgaaacgcgctggccttcttacacgtgacgcacgtatggttgaacgtaaaaaaccaggtcttaagaaagctcgtaaagcttcacaattctcaaaacgt

SEQ ID NO: 574 - protein, 130 aa, Streptococcus pyogenes
MAQAQYAGTGRRKNAVARVRLVPGTGKITVNKKDVEEYIPHADLRLIINQPFAVTSTEGSYDVFVNVVGGGYGGQSGAIRHGIARALLQVDPDFRDSLKRAGLLTRDARMVERKKPGLKKARKASQFSKR

SEQ ID NO: 575 - DNA, 1152 bp, Streptococcus agalactiae
atgtccattcacaaatacccaagcaaaaaagccaaaaatggctatttgtattttgtcaaaatctatatggtcaaagacagtcaacgtgcagaccatatcaaacgtggctttcgtactcgaaaggaagccaaagactacgaagccagactcatttatcttaaggcttcaggaaagttggaagagttcatcaaaccaactcataaaacttataacgagatattcgagaaatggtatcaagcctatcaagatatggtagagccaacaactgcttcacgtactcttgatatgtttcgacttcacattctgccagttatgggagacttacccatcagcaaaatctcccctttagactgccagaacttcatcacagataaagcaaagacctttaagaatatcaagcaaatcaagtcctatactgggaaggtctttgattttgctatcaagatgaaactgcttaagcataaccctatggcagaaatcattatgccaaaacggaaaaagacacggatagaaaactattggacggttcaagaacttcaggagttcctagccattgtccttcaggaagagccttacaaacactatgcactatttagattactagcttacagtggcttaaggaaaggcgagctatacgctcttaagtgggcagatatagactttcaaactgagacactaagtgtcgataagagcttaggacgattagacggacaggcaatcgaaaaaggcactaaaaatgatttctcagtaagaaagattaagctagatagcgaaactatttctattctgcaagaatggaaatccatcagccaaaaagaaaaggcacaactagcagttgcacctctttctatcgagcaagattttctcttcacttattgtacacggtcaggctctattgagccactacatgcagactatatcaacaacgtcctatcacggattatcagaaaacacgggttaaagaaaatcagtcctcatggttttagacatactcatgctaccttgatgattgagattggagttgacccagtcaacacagcaaaaagactggggcatgcaagtagtcaaatgaccttagatacttacagtcattcgacaactactggagaagataggtcagtcaaacaatttgcggactatctaaaagcaaaa

SEQ ID NO: 576 - protein, 384 aa, Streptococcus agalactiae
MSIHKYPSKKAKNGYLYFVKIYMVKDSQRADHIKRGFRTRKEAKDYEARLIYLKASGKLEEFIKPTHKTYNEIFEKWYQAYQDMVEPTTASRTLDMFRLHILPVMGDLPISKISPLDCQNFITDKAKTFKNIKQIKSYTGKVFDFAIKMKLLKHNPMAEIIMPKRKKTRIENYWTVQELQEFLAIVLQEEPYKHYALFRLLAYSGLRKGELYALKWADIDFQTETLSVDKSLGRLDGQAIEKGTKNDFSVRKIKLDSETISILQEWKSISQKEKAQLAVAPLSIEQDFLFTYCTRSGSIEPLHADYINNVLSRIIRKHGLKKISPHGFRHTHATLMIEIGVDPVNTAKRLGHASSQMTLDTYSHSTTTGEDRSVKQFADYLKAK

SEQ ID NO: 577 - DNA, 1161 bp, Streptococcus pyogenes
atggaaaggtttatgatcatgaaaataacagaacataagaagaaaaacggtacaatcgtttatcgtgctagtatttatctaggcattgaccaaatgacaggtaagagagtaaaaacaagcatcacaggaagaacaagaaaagaagttaatcaaaaagccaagcacgcgcagtttgacttcctatctaatggatctacaattaaaagaaaagttgtgattaaaacatttaaagaacttagtcatttatggcttgaaacctataagttaacagtaaagcctcaaacttatgatgctactgttactagacttaatcgacatattatgccaactctgggcaatatgaaggttgataagataaccgctagtgatattcaaatgctgattaatagattatctaaatattacgtcaattatactgcggtacgttcagtcatccgaaaagttctccaacaaggagtattgctagggctaatagattataactcagcaagagatattatccttccaaggaagcagccaaacgctaagaaaaaagttaagtttattgatccgtctgatttgaaatcttttttagaacatttagaaactagtcaacacaaacgctataacctttactttgatgcagttctctaccaacttttattatccactggcttgaggataggcgaagcctgtgcattagagtggggagatattgacctagaaaatggtacaatagccattaataagacttacaataaaaatttgaagtttttgagtacagctaaaacccagtcaggcaatagagtgattagtgttgataaaaagacccttagaagcctaaagctctatcaaatgagacagcgacaattatttaatgaggttggtgcgcgtgtgtcggaggtagtgtttgccacaccaacacgaaagtattttaatgcttcggttagacaaagcgctttagatactaggtgtaaggaagcagggattgaacgctttacctttcacgcttttagacacactcacgctagtttattgctgaacgctggtattagttataaggaacttcagtaccgtctaggacatgcgaatatcagcatgactttggatacctatggccatctttctaagggcaaagaaaaagaagctgttttatattatgaaaaggctatgaataattta

SEQ ID NO: 578 - protein, 387 aa, Streptococcus pyogenes
MERFMIMKITEHKKKNGTIVYRASIYLGIDQMTGKRVKTSITGRTRKEVNQKAKHAQFDFLSNGSTIKRKVVIKTFKELSHLWLETYKLTVKPQTYDATVTRLNRHIMPTLGNMKVDKITASDIQMLINRLSKYYVNYTAVRSVIRKVLQQGVLLGLIDYNSARDIILPRKQPNAKKKVKFIDPSDLKSFLEHLETSQHKRYNLYFDAVLYQLLLSTGLRIGEACALEWGDIDLENGTIAINKTYNKNLKFLSTAKTQSGNRVISVDKKTLRSLKLYQMRQRQLFNEVGARVSEVVFATPTRKYFNASVRQSALDTRCKEAGIERFTFHAFRHTHASLLLNAGISYKELQYRLGHANISMTLDTYGHLSKGKEKEAVLYYEKAMNNL

SEQ ID NO: 579 - DNA, 474 bp, Streptococcus agalactiae
atgtacaatagactaaaagaactacgaaaagacaaagggttaactcaggctgatctagctaaagtcatcaatactaatcaatctcaatatggaaaatatgaaaacggaaaaactagtcttagcatagaaaattctaaaatattagctgattttttcggtgtatctatcccttacttactagggcttgataacaattcaaaaatagcaaattcaacaatcaaagatacaaatttattaagtttttttgaacaagtcaaaaaggatatgggtcaagattatttttctactcttgaaacccttgaaaaagttagcaaaaaaactcttttcaactctcccatacgtgacagacttgaggaaattaagcaagaaaaaatcaagcttaaccagaaaattgatgaacttgaagcagaggctaaaaatcttcgaaaaactcttgataaagaagtaaaagagagattagaacttttaaaaaaa

SEQ ID NO: 580 - protein, 158 aa, Streptococcus agalactiae
MYNRLKELRKDKGLTQADLAKVINTNQSQYGKYENGKTSLSIENSKILADFFGVSIPYLLGLDNNSKIANSTIKDTNLLSFFEQVKKDMGQDYFSTLETLEKVSKKTLFNSPIRDRLEEIKQEKIKLNQKIDELEAEAKNLRKTLDKEVKERLELLKK

SEQ ID NO: 581 - DNA, 216 bp, Streptococcus pyogenes
atgtatccgcgtattaggaatttgagagaagataacgatttcactcaaaagtttgttgcaaatttactttccttctctcatgcaaattatgcaaaaattgagagaggagaggttgccttaatggcagatgttcttgtgcagttttataaactctataacgtcagtattgattatttattagggcaaacagattatccgtatcgttttcataataaa

SEQ ID NO: 582 - protein, 72 aa, Streptococcus pyogenes
MYPRIRNLREDNDFTQKFVANLLSFSHANYAKIERGEVALMADVLVQFYKLYNVSIDYLLGQTDYPYRFHNK

SEQ ID NO: 583 - DNA, 303 bp, Streptococcus agalactiae
atggcttacacactagaagaacgagaaacgattgtccgttatgatgaaatggataactgttggtattttgagagtaatgttaggaaacacattactaaaatcatgaaaactattgatagttgtcagattttaggtcaagagaaagaagacgaccgcattatatggattcatgctaaattgacaaatcttgatgattatatggtttctccatttgttcgaaaacgagttaaacgtgaaatgactgaagaacaacgagaggaagcaagaaaaagaatggcaagattacattctaagtctgaaata

SEQ ID NO: 584 - protein, 101 aa, Streptococcus agalactiae
MAYTLEERETIVRYDEMDNCWYFESNVRKHITKIMKTIDSCQILGQEKEDDRIIWIHAKLTNLDDYMVSPFVRKRVKREMTEEQREEARKRMARLHSKSEI

SEQ ID NO: 585 - DNA, 276 bp, Streptococcus agalactiae
atgacagaaggatttaccattcagctccccaaagtaactgaaaagaagttactggctcgctatgacactatggttcaaaaagcaatagaaaaagcccttgaggacaaagagctatataagcctatggttcgtatggctggcttgtgccgttttttagatgtctcaacgacaactattgtcaaatggcaaaaggcaggcatgccacatatggttattgacggagtgactctgtacgataagcgcaaggtcgctcaatggctacaacaatttgaaaga

SEQ ID NO: 586 - protein, 92 aa, Streptococcus agalactiae
MTEGFTIQLPKVTEKKLLARYDTMVQKAIEKALEDKELYKPMVRMAGLCRFLDVSTTTIVKWQKAGMPHMVIDGVTLYDKRKVAQWLQQFER

SEQ ID NO: 587 - DNA, 249 bp, Streptococcus agalactiae
ttgaaagataggaaatttggcatggataaaaataatttagaagacttgacaggaaaaaagatacttagaaatggttttggtggtcttcgtttggaatatgggacaatctttcttgatgttggattgttcacttatattgtgctgatactatcaatatttttctttttagttgaacgttggtttttgggagctttaacttttgtgttgcatgttcccttgcttctacttgggatatggtgtggagagaga

(The sequence listing continues in the following parts.)

1. A protein comprising an amino acid sequence selected from the group consisting of SEQ IDs 2, 4, 6, 8, 10, 12, 14, 16, 18, 20, 22, 24, 26, 28, 30, 32, 34, 36, 38, 40, 42, 44, 46, 48, 50, 52, 54, 56, 58, 60, 62, 64, 66, 68, 70, 72, 74, 76, 78, 80, 82, 84, 86, 88, 90, 92, 94, 96, 98, 100, 102, 104, 106, 108, 110, 112, 114, 116, 118, 120, 122, 124, 126, 128, 130, 132, 134, 136, 138, 140, 142, 144, 146, 148, 150, 152, 154, 156, 158, 160, 162, 164, 166, 168, 170, 172, 174, 176, 178, 180, 182, 184, 186, 188, 190, 192, 194, 196, 198, 200, 202, 204, 206, 208, 210, 212, 214, 216, 218, 220, 222, 224, 226, 228, 230, 232, 234, 236, 238, 240, 242, 244, 246, 248, 256, 252, 254, 256, 258, 260, 262, 264, 266, 268, 270, 272, 274, 276, 278, 280, 282, 284, 286, 288, 290, 292, 294, 296, 298, 300, 302, 304, 306, 308, 310, 312, 314, 316, 318, 320, 322, 324, 326, 328, 330, 332, 334, 336, 338, 340, 342, 344, 346, 348, 350, 352, 354, 356, 358, 360, 362, 364, 366, 368, 370, 372, 374, 376, 378, 380, 382, 384, 386, 388, 390, 392, 394, 396, 398, 400, 402, 404, 406, 408, 410, 412, 414, 416, 418, 420, 422, 424, 426, 428, 430, 432, 434, 436, 438, 440, 442, 444, 446, 448, 450, 452, 454, 456, 458, 460, 462, 464, 466, 468, 470, 472, 474, 476, 478, 480, 482, 484, 486, 488, 490, 492, 494, 496, 498, 500, 502, 504, 506, 508, 510, 512, 514, 516, 518, 520, 522, 524, 526, 528, 530, 532, 534, 536, 538, 540, 542, 544, 546, 548, 550, 552, 554, 556, 558, 560, 562, 564, 566, 568, 570, 572, 574, 576, 578, 580, 582, 584, 586, 588, 590, 592, 594, 596, 598, 600, 602, 604, 606, 608, 610, 612, 614, 616, 618, 620, 622, 624, 626, 628, 630, 632, 634, 636, 638, 640, 642, 644, 646, 648, 650, 652, 654, 656, 658, 660, 662, 664, 666, 668, 670, 672, 674, 676, 678, 680, 682, 684, 686, 688, 690, 692, 694, 696, 698, 700, 702, 704, 706, 708, 710, 712, 714, 716, 718, 720, 722, 724, 726, 728, 730, 732, 734, 736, 738, 740, 742, 744, 746, 748, 750, 752, 754, 756, 758, 760, 762, 764, 766, 768, 770, 772, 774, 776, 778, 780, 782, 784, 786, 788, 790, 792, 794, 796, 798, 800, 802, 804, 806, 808, 810, 812, 814, 816, 818, 820, 822, 824, 826, 828, 830, 832, 834, 836, 838, 840, 842, 844, 846, 848, 850, 852, 854, 856, 858, 860, 862, 864, 866, 868, 870, 872, 874, 876, 878, 880, 882, 884, 886, 888, 890, 892, 894, 896, 898, 900, 902, 904, 906, 908, 910, 912, 914, 916, 918, 920, 922, 924, 926, 928, 930, 932, 934, 936, 938, 940, 942, 944, 946, 948, 950, 952, 954, 956, 958, 960, 962, 964, 966, 968, 970, 972, 974, 976, 978, 980, 982, 984, 986, 988, 990, 992, 994, 996, 998, 1000, 1002, 1004, 1006, 1008, 1010, 1012, 1014, 1016, 1018, 1020, 1022, 1024, 1026, 1028, 1030, 1032, 1034, 1036, 1038, 1040, 1042, 1044, 1046, 1048, 1050, 1052, 1054, 1056, 1058, 1060, 1062, 1064, 1066, 1068, 1070, 1072, 1074, 1076, 1078, 1080, 1082, 1084, 1086, 1088, 1090, 1092, 1094, 1096, 1098, 1100, 1102, 1104, 1106, 1108, 1110, 1112, 1114, 1116, 1118, 1120, 1122, 1124, 1126, 1128, 1130, 1132, 1134, 1136, 1138, 1140, 1142, 1144, 1146, 1148, 1150, 1152, 1154, 1156, 1158, 1160, 1162, 1164, 1166, 1168, 1170, 1172, 1174, 1176, 1178, 1180, 1182, 1184, 1186, 1188, 1190, 1192, 1194, 1196, 1198, 1200, 1202, 1204, 1206, 1208, 1210, 1212, 1214, 1216, 1218, 1220, 1222, 1224, 1226, 1228, 1230, 1232, 1234, 1236, 1238, 1240, 1242, 1244, 1246, 1248, 1250, 1252, 1254, 1256, 1258, 1260, 1262, 1264, 1266, 1268, 1270, 1272, 1274, 1276, 1278, 1280, 1282, 1284, 1286, 1288, 1290, 1292, 1294, 1296, 1298, 1300, 1302, 1304, 1306, 1308, 1310, 1312, 1314, 1316, 1318, 1320, 1322, 1324, 1326, 1328, 1330, 1332, 1334, 1336, 1338, 1340, 1342, 1344, 1346, 1348, 1350, 1352, 1354, 1356, 1358, 1360, 1362, 1364, 1366, 1368, 1370, 1372, 1374, 1376, 1378, 1380, 1382, 1384, 1386, 1388, 1390, 1392, 1394, 1396, 1398, 1400, 1402, 1404, 1406, 1408, 1410, 1412, 1414, 1416, 1418, 1420, 1422, 1424, 1426, 1428, 1430, 1432, 1434, 1436, 1438, 1440, 1442, 1444, 1446, 1448, 1450, 1452, 1454, 1456, 1458, 1460, 1462, 1464, 1466, 1468, 1470, 1472, 1474, 1476, 1478, 1480, 1482, 1484, 1486, 1488, 1490, 1492, 1494, 1496, 1498, 1500, 1502, 1504, 1506, 1508, 1510, 1512, 1514, 1516, 1518, 1520, 1522, 1524, 1526, 1528, 1530, 1532, 1534, 1536, 1538, 1540, 1542, 1544, 1546, 1548, 1550, 1552, 1554, 1556, 1558, 1560, 1562, 1564, 1566, 1568, 1570, 1572, 1574, 1576, 1578, 1580, 1582, 1584, 1586, 1588, 1590, 1592, 1594, 1596, 1598, 1600, 1602, 1604, 1606, 1608, 1610, 1612, 1614, 1616, 1618, 1620, 1622, 1624, 1626, 1628, 1630, 1632, 1634, 1636, 1638, 1640, 1642, 1644, 1646, 1648, 1650, 1652, 1654, 1656, 1658, 1660, 1662, 1664, 1666, 1668, 1670, 1672, 1674, 1676, 1678, 1680, 1682, 1684, 1686, 1688, 1690, 1692, 1694, 1696, 1698, 1700, 1702, 1704, 1706, 1708, 1710, 1712, 1714, 1716, 1718, 1720, 1722, 1724, 1726, 1728, 1730, 1732, 1734, 1736, 1738, 1740, 1742, 1744, 1746, 1748, 1750, 1752, 1754, 1756, 1758, 1760, 1762, 1764, 1766, 1768, 1770, 1772, 1774, 1776, 1778, 1780, 1782, 1784, 1786, 1788, 1790, 1792, 1794, 1796, 1798, 1800, 1802, 1804, 1806, 1808, 1810, 1812, 1814, 1816, 1818, 1820, 1822, 1824, 1826, 1828, 1830, 1832, 1834, 1836, 1838, 1840, 1842, 1844, 1846, 1848, 1850, 1852, 1854, 1856, 1858, 1860, 1862, 1864, 1866, 1868, 1870, 1872, 1874, 1876, 1878, 1880, 1882, 1884, 1886, 1888, 1890, 1892, 1894, 1896, 1898, 1900, 1902, 1904, 1906, 1908, 1910, 1912, 1914, 1916, 1918, 1920, 1922, 1924, 1926, 1928, 1930, 1932, 1934, 1936, 1938, 1940, 1942, 1944, 1946, 1948, 1950, 1952, 1954, 1956, 1958, 1960, 1962, 1964, 1966, 1968, 1970, 1972, 1974, 1976, 1978, 1980, 1982, 1984, 1986, 1988, 1990, 1992, 1994, 1996, 1998, 2000, 2002, 2004, 2006, 2008, 2010, 2012, 2014, 2016, 2018, 2020, 2022, 2024, 2026, 2028, 2030, 2032, 2034, 2036, 2038, 2040, 2042, 2044, 2046, 2048, 2050, 2052, 2054, 2056, 2058, 2060, 2062, 2064, 2066, 2068, 2070, 2072, 2074, 2076, 2078, 2080, 2082, 2084, 2086, 2088, 2090, 2092, 2094, 2096, 2098, 2100, 2102, 2104, 2106, 2108, 2110, 2112, 2114, 2116, 2118, 2120, 2122, 2124, 2126, 2128, 2130, 2132, 2134, 2136, 2138, 2140, 2142, 2144, 2146, 2148, 2150, 2152, 2154, 2156, 2158, 2160, 2162, 2164, 2166, 2168, 2170, 2172, 2174, 2176, 2178, 2180, 2182, 2184, 2186, 2188, 2190, 2192, 2194, 2196, 2198, 2200, 2202, 2204, 2206, 2208, 2210, 2212, 2214, 2216, 2218, 2220, 2222, 2224, 2226, 2228, 2230, 2232, 2234, 2236, 2238, 2240, 2242, 2244, 2246, 2248, 2250, 2252, 2254, 2256, 2258, 2260, 2262, 2264, 2266, 2268, 2270, 2272, 2274, 2276, 2278, 2280, 2282, 2284, 2286, 2288, 2290, 2292, 2294, 2296, 2298, 2300, 2302, 2304, 2306, 2308, 2310, 2312, 2314, 2316, 2318, 2320, 2322, 2324, 2326, 2328, 2330, 2332, 2334, 2336, 2338, 2340, 2342, 2344, 2346, 2348, 2350, 2352, 2354, 2356, 2358, 2360, 2362, 2364, 2366, 2368, 2370, 2372, 2374, 2376, 2378, 2380, 2382, 2384, 2386, 2388, 2390, 2392, 2394, 2396, 2398, 2400, 2402, 2404, 2406, 2408, 2410, 2412, 2414, 2416, 2418, 2420, 2422, 2424, 2426, 2428, 2430, 2432, 2434, 2436, 2438, 2440, 2442, 2444, 2446, 2448, 2450, 2452, 2454, 2456, 2458, 2460, 2462, 2464, 2466, 2468, 2470, 2472, 2474, 2476, 2478, 2480, 2482, 2484, 2486, 2488, 2490, 2492, 2494, 2496, 2498, 2500, 2502, 2504, 2506, 2508, 2510, 2512, 2514, 2516, 2518, 2520, 2522, 2524, 2526, 2528, 2530, 2532, 2534, 2536, 2538, 2540, 2542, 2544, 2546, 2548, 2550, 2552, 2554, 2556, 2558, 2560, 2562, 2564, 2566, 2568, 2570, 2572, 2574, 2576, 2578, 2580, 2582, 2584, 2586, 2588, 2590, 2592, 2594, 2596, 2598, 2600, 2602, 2604, 2606, 2608, 2610, 2612, 2614, 2616, 2618, 2620, 2622, 2624, 2626, 2628, 2630, 2632, 2634, 2636, 2638, 2640, 2642, 2644, 2646, 2648, 2650, 2652, 2654, 2656, 2658, 2660, 2662, 2664, 2666, 2668, 2670, 2672, 2674, 2676, 2678, 2680, 2682, 2684, 2686, 2688, 2690, 2692, 2694, 2696, 2698, 2700, 2702, 2704, 2706, 2708, 2710, 2712, 2714, 2716, 2718, 2720, 2722, 2724, 2726, 2728, 2730, 2732, 2734, 2736, 2738, 2740, 2742, 2744, 2746, 2748, 2750, 2752, 2754, 2756, 2758, 2760, 2762, 2764, 2766, 2768, 2770, 2772, 2774, 2776, 2778, 2780, 2782, 2784, 2786, 2788, 2790, 2792, 2794, 2796, 2798, 2800, 2802, 2804, 2806, 2808, 2810, 2812, 2814, 2816, 2818, 2820, 2822, 2824, 2826, 2828, 2830, 2832, 2834, 2836, 2838, 2840, 2842, 2844, 2846, 2848, 2850, 2852, 2854, 2856, 2858, 2860, 2862, 2864, 2866, 2868, 2870, 2872, 2874, 2876, 2878, 2880, 2882, 2884, 2886, 2888, 2890, 2892, 2894, 2896, 2898, 2900, 2902, 2904, 2906, 2908, 2910, 2912, 2914, 2916, 2918, 2920, 2922, 2924, 2926, 2928, 2930, 2932, 2934, 2936, 2938, 2940, 2942, 2944, 2946, 2948, 2950, 2952, 2954, 2956, 2958, 2960, 2962, 2964, 2966, 2968, 2970, 2972, 2974, 2976, 2978, 2980, 2982, 2984, 2986, 2988, 2990, 2992, 2994, 2996, 2998, 3000, 3002, 3004, 3006, 3008, 3010, 3012, 3014, 3016, 3018, 3020, 3022, 3024, 3026, 3028, 3030, 3032, 3034, 3036, 3038, 3040, 3042, 3044, 3046, 3048, 3050, 3052, 3054, 3056, 3058, 3060, 3062, 3064, 3066, 3068, 3070, 3072, 3074, 3076, 3078, 3080, 3082, 3084, 3086, 3088, 3090, 3092, 3094, 3096, 3098, 3100, 3102, 3104, 3106, 3108, 3110, 3112, 3114, 3116, 3118, 3120, 3122, 3124, 3126, 3128, 3130, 3132, 3134, 3136, 3138, 3140, 3142, 3144, 3146, 3148, 3150, 3152, 3154, 3156, 3158, 3160, 3162, 3164, 3166, 3168, 3170, 3172, 3174, 3176, 3178, 3180, 3182, 3184, 3186, 3188, 3190, 3192, 3194, 3196, 3198, 3200, 3202, 3204, 3206, 3208, 3210, 3212, 3214, 3216, 3218, 3220, 3222, 3224, 3226, 3228, 3230, 3232, 3234, 3236, 3238, 3240, 3242, 3244, 3246, 3248, 3250, 3252, 3254, 3256, 3258, 3260, 3262, 3264, 3266, 3268, 3270, 3272, 3274, 3276, 3278, 3280, 3282, 3284, 3286, 3288, 3290, 3292, 3294, 3296, 3298, 3300, 3302, 3304, 3306, 3308, 3310, 3312, 3314, 3316, 3318, 3320, 3322, 3324, 3326, 3328, 3330, 3332, 3334, 3336, 3338, 3340, 3342, 3344, 3346, 3348, 3350, 3352, 3354, 3356, 3358, 3360, 3362, 3364, 3366, 3368, 3370, 3372, 3374, 3376, 3378, 3380, 3382, 3384, 3386, 3388, 3390, 3392, 3394, 3396, 3398, 3400, 3402, 3404, 3406, 3408, 3410, 3412, 3414, 3416, 3418, 3420, 3422, 3424, 3426, 3428, 3430, 3432, 3434, 3436, 3438, 3440, 3442, 3444, 3446, 3448, 3450, 3452, 3454, 3456, 3458, 3460, 3462, 3464, 3466, 3468, 3470, 3472, 3474, 3476, 3478, 3480, 3482, 3484, 3486, 3488, 3490, 3492, 3494, 3496, 3498, 3500, 3502, 3504, 3506, 3508, 3510, 3512, 3514, 3516, 3518, 3520, 3522, 3524, 3526, 3528, 3530, 3532, 3534, 3536, 3538, 3540, 3542, 3544, 3546, 3548, 3550, 3552, 3554, 3556, 3558, 3560, 3562, 3564, 3566, 3568, 3570, 3572, 3574, 3576, 3578, 3580, 3582, 3584, 3586, 3588, 3590, 3592, 3594, 3596, 3598, 3600, 3602, 3604, 3606, 3608, 3610, 3612, 3614, 3616, 3618, 3620, 3622, 3624, 3626, 3628, 3630, 3632, 3634, 3636, 3638, 3640, 3642, 3644, 3646, 3648, 3650, 3652, 3654, 3656, 3658, 3660, 3662, 3664, 3666, 3668, 3670, 3672, 3674, 3676, 3678, 3680, 3682, 3684, 3686, 3688, 3690, 3692, 3694, 3696, 3698, 3700, 3702, 3704, 3706, 3708, 3710, 3712, 3714, 3716, 3718, 3720, 3722, 3724, 3726, 3728, 3730, 3732, 3734, 3736, 3738, 3740, 3742, 3744, 3746, 3748, 3750, 3752, 3754, 3756, 3758, 3760, 3762, 3764, 3766, 3768, 3770, 3772, 3774, 3776, 3778, 3780, 3782, 3784, 3786, 3788, 3790, 3792, 3794, 3796, 3798, 3800, 3802, 3804, 3806, 3808, 3810, 3812, 3814, 3816, 3818, 3820, 3822, 3824, 3826, 3828, 3830, 3832, 3834, 3836, 3838, 3840, 3842, 3844, 3846, 3848, 3850, 3852, 3854, 3856, 3858, 3860, 3862, 3864, 3866, 3868, 3870, 3872, 3874, 3876, 3878, 3880, 3882, 3884, 3886, 3888, 3890, 3892, 3894, 3896, 3898, 3900, 3902, 3904, 3906, 3908, 3910, 3912, 3914, 3916, 3918, 3920, 3922, 3924, 3926, 3928, 3930, 3932, 3934, 3936, 3938, 3940, 3942, 3944, 3946, 3948, 3950, 3952, 3954, 3956, 3958, 3960, 3962, 3964, 3966, 3968, 3970, 3972, 3974, 3976, 3978, 3980, 3982, 3984, 3986, 3988, 3990, 3992, 3994, 3996, 3998, 4000, 4002, 4004, 4006, 4008, 4010, 4012, 4014, 4016, 4018, 4020, 4022, 4024, 4026, 4028, 4030, 4032, 4034, 4036, 4038, 4040, 4042, 4044, 4046, 4048, 4050, 4052, 4054, 4056, 4058, 4060, 4062, 4064, 4066, 4068, 4070, 4072, 4074, 4076, 4078, 4080, 4082, 4084, 4086, 4088, 4090, 4092, 4094, 4096, 4098, 4100, 4102, 4104, 4106, 4108, 4110, 4112, 4114, 4116, 4118, 4120, 4122, 4124, 4126, 4128, 4130, 4132, 4134, 4136, 4138, 4140, 4142, 4144, 4146, 4148, 4150, 4152, 4154, 4156, 4158, 4160, 4162, 4164, 4166, 4168, 4170, 4172, 4174, 4176, 4178, 4180, 4182, 4184, 4186, 4188, 4190, 4192, 4194, 4196, 4198, 4200, 4202, 4204, 4206, 4208, 4210, 4212, 4214, 4216, 4218, 4220, 4222, 4224, 4226, 4228, 4230, 4232, 4234, 4236, 4238, 4240, 4242, 4244, 4246, 4248, 4250, 4252, 4254, 4256, 4258, 4260, 4262, 4264, 4266, 4268, 4270, 4272, 4274, 4276, 4278, 4280, 4282, 4284, 4286, 4288, 4290, 4292, 4294, 4296, 4298, 4300, 4302, 4304, 4306, 4308, 4310, 4312, 4314, 4316, 4318, 4320, 4322, 4324, 4326, 4328, 4330, 4332, 4334, 4336, 4338, 4340, 4342, 4344, 4346, 4348, 4350, 4352, 4354, 4356, 4358, 4360, 4362, 4364, 4366, 4368, 4370, 4372, 4374, 4376, 4378, 4380, 4382, 4384, 4386, 4388, 4390, 4392, 4394, 4396, 4398, 4400, 4402, 4404, 4406, 4408, 4410, 4412, 4414, 4416, 4418, 4420, 4422, 4424, 4426, 4428, 4430, 4432, 4434, 4436, 4438, 4440, 4442, 4444, 4446, 4448, 4450, 4452, 4454, 4456, 4458, 4460, 4462, 4464, 4466, 4468, 4470, 4472, 4474, 4476, 4478, 4480, 4482, 4484, 4486, 4488, 4490, 4492, 4494, 4496, 4498, 4500, 4502, 4504, 4506, 4508, 4510, 4512, 4514, 4516, 4518, 4520, 4522, 4524, 4526, 4528, 4530, 4532, 4534, 4536, 4538, 4540, 4542, 4544, 4546, 4548, 4550, 4552, 4554, 4556, 4558, 4560, 4562, 4564, 4566, 4568, 4570, 4572, 4574, 4576, 4578, 4580, 4582, 4584, 4586, 4588, 4590, 4592, 4594, 4596, 4598, 4600, 4602, 4604, 4606, 4608, 4610, 4612, 4614, 4616, 4618, 4620, 4622, 4624, 4626, 4628, 4630, 4632, 4634, 4636, 4638, 4640, 4642, 4644, 4646, 4648, 4650, 4652, 4654, 4656, 4658, 4660, 4662, 4664, 4666, 4668, 4670, 4672, 4674, 4676, 4678, 4680, 4682, 4684, 4686, 4688, 4690, 4692, 4694, 4696, 4698, 4700, 4702, 4704, 4706, 4708, 4710, 4712, 4714, 4716, 4718, 4720, 4722, 4724, 4726, 4728, 4730, 4732, 4734, 4736, 4738, 4740, 4742, 4744, 4746, 4748, 4750, 4752, 4754, 4756, 4758, 4760, 4762, 4764, 4766, 4768, 4770, 4772, 4774, 4776, 4778, 4780, 4782, 4784, 4786, 4788, 4790, 4792, 4794, 4796, 4798, 4800, 4802, 4804, 4806, 4808, 4810, 4812, 4814, 4816, 4818, 4820, 4822, 4824, 4826, 4828, 4830, 4832, 4834, 4836, 4838, 4840, 4842, 4844, 4846, 4848, 4850, 4852, 4854, 4856, 4858, 4860, 4862, 4864, 4866, 4868, 4870, 4872, 4874, 4876, 4878, 4880, 4882, 4884, 4886, 4888, 4890, 4892, 4894, 4896, 4898, 4900, 4902, 4904, 4906, 4908, 4910, 4912, 4914, 4916, 4918, 4920, 4922, 4924, 4926, 4928, 4930, 4932, 4934, 4936, 4938, 4940, 4942, 4944, 4946, 4948, 4950, 4952, 4954, 4956, 4958, 4960, 4962, 4964, 4966, 4968, 4970, 4972, 4974, 4976, 4978, 4980, 4982, 4984, 4986, 4988, 4990, 4992, 4994, 4996, 4998, 5000, 5002, 5004, 5006, 5008, 5010, 5012, 5014, 5016, 5018, 5020, 5022, 5024, 5026, 5028, 5030, 5032, 5034, 5036, 5038, 5040, 5042, 5044, 5046, 5048, 5050, 5052, 5054, 5056, 5058, 5060, 5062, 5064, 5066, 5068, 5070, 5072, 5074, 5076, 5078, 5080, 5082, 5084, 5086, 5088, 5090, 5092, 5094, 5096, 5098, 5100, 5102, 5104, 5106, 5108, 5110, 5112, 5114, 5116, 5118, 5120, 5122, 5124, 5126, 5128, 5130, 5132, 5134, 5136, 5138, 5140, 5142, 5144, 5146, 5148, 5150, 5152, 5154, 5156, 5158, 5160, 5162, 5164, 5166, 5168, 5170, 5172, 5174, 5176, 5178, 5180, 5182, 5184, 5186, 5188, 5190, 5192, 5194, 5196, 5198, 5200, 5202, 5204, 5206, 5208, 5210, 5212, 5214, 5216, 5218, 5220, 5222, 5224, 5226, 5228, 5230, 5232, 5234, 5236, 5238, 5240, 5242, 5244, 5246, 5248, 5250, 5252, 5254, 5256, 5258, 5260, 5262, 5264, 5266, 5268, 5270, 5272, 5274, 5276, 5278, 5280, 5282, 5284, 5286, 5288, 5290, 5292, 5294, 5296, 5298, 5300, 5302, 5304, 5306, 5308, 5310, 5312, 5314, 5316, 5318, 5320, 5322, 5324, 5326, 5328, 5330, 5332, 5334, 5336, 5338, 5340, 5342, 5344, 5346, 5348, 5350, 5352, 5354, 5356, 5358, 5360, 5362, 5364, 5366, 5368, 5370, 5372, 5374, 5376, 5378, 5380, 5382, 5384, 5386, 5388, 5390, 5392, 5394, 5396, 5398, 5400, 5402, 5404, 5406, 5408, 5410, 5412, 5414, 5416, 5418, 5420, 5422, 5424, 5426, 5428, 5430, 5432, 5434, 5436, 5438, 5440, 5442, 5444, 5446, 5448, 5450, 5452, 5454, 5456, 5458, 5460, 5462, 5464, 5466, 5468, 5470, 5472, 5474, 5476, 5478, 5480, 5482, 5484, 5486, 5488, 5490, 5492, 5494, 5496, 5498, 5500, 5502, 5504, 5506, 5508, 5510, 5512, 5514, 5516, 5518, 5520, 5522, 5524, 5526, 5528, 5530, 5532, 5534, 5536, 5538, 5540, 5542, 5544, 5546, 5548, 5550, 5552, 5554, 5556, 5558, 5560, 5562, 5564, 5566, 5568, 5570, 5572, 5574, 5576, 5578, 5580, 5582, 5584, 5586, 5588, 5590, 5592, 5594, 5596, 5598, 5600, 5602, 5604, 5606, 5608, 5610, 5612, 5614, 5616, 5618, 5620, 5622, 5624, 5626, 5628, 5630, 5632, 5634, 5636, 5638, 5640, 5642, 5644, 5646, 5648, 5650, 5652, 5654, 5656, 5658, 5660, 5662, 5664, 5666, 5668, 5670, 5672, 5674, 5676, 5678, 5680, 5682, 5684, 5686, 5688, 5690, 5692, 5694, 5696, 5698, 5700, 5702, 5704, 5706, 5708, 5710, 5712, 5714, 5716, 5718, 5720, 5722, 5724, 5726, 5728, 5730, 5732, 5734, 5736, 5738, 5740, 5742, 5744, 5746, 5748, 5750, 5752, 5754, 5756, 5758, 5760, 5762, 5764, 5766, 5768, 5770, 5772, 5774, 5776, 5778, 5780, 5782, 5784, 5786, 5788, 5790, 5792, 5794, 5796, 5798, 5800, 5802, 5804, 5806, 5808, 5810, 5812, 5814, 5816, 5818, 5820, 5822, 5824, 5826, 5828, 5830, 5832, 5834, 5836, 5838, 5840, 5842, 5844, 5846, 5848, 5850, 5852, 5854, 5856, 5858, 5860, 5862, 5864, 5866, 5868, 5870, 5872, 5874, 5876, 5878, 5880, 5882, 5884, 5886, 5888, 5890, 5892, 5894, 5896, 5898, 5900, 5902, 5904, 5906, 5908, 5910, 5912, 5914, 5916, 5918, 5920, 5922, 5924, 5926, 5928, 5930, 5932, 5934, 5936, 5938, 5940, 5942, 5944, 5946, 5948, 5950, 5952, 5954, 5956, 5958, 5960, 5962, 5964, 5966, 5968, 5970, 5972, 5974, 5976, 5978, 5980, 5982, 5984, 5986, 5988, 5990, 5992, 5994, 5996, 5998, 6000, 6002, 6004, 6006, 6008, 6010, 6012, 6014, 6016, 6018, 6020, 6022, 6024, 6026, 6028, 6030, 6032, 6034, 6036, 6038, 6040, 6042, 6044, 6046, 6048, 6050, 6052, 6054, 6056, 6058, 6060, 6062, 6064, 6066, 6068, 6070, 6072, 6074, 6076, 6078, 6080, 6082, 6084, 6086, 6088, 6090, 6092, 6094, 6096, 6098, 6100, 6102, 6104, 6106, 6108, 6110, 6112, 6114, 6116, 6118, 6120, 6122, 6124, 6126, 6128, 6130, 6132, 6134, 6136, 6138, 6140, 6142, 6144, 6146, 6148, 6150, 6152, 6154, 6156, 6158, 6160, 6162, 6164, 6166, 6168, 6170, 6172, 6174, 6176, 6178, 6180, 6182, 6184, 6186, 6188, 6190, 6192, 6194, 6196, 6198, 6200, 6202, 6204, 6206, 6208, 6210, 6212, 6214, 6216, 6218, 6220, 6222, 6224, 6226, 6228, 6230, 6232, 6234, 6236, 6238, 6240, 6242, 6244, 6246, 6248, 6250, 6252, 6254, 6256, 6258, 6260, 6262, 6264, 6266, 6268, 6270, 6272, 6274, 6276, 6278, 6280, 6282, 6284, 6286, 6288, 6290, 6292, 6294, 6296, 6298, 6300, 6302, 6304, 6306, 6308, 6310, 6312, 6314, 6316, 6318, 6320, 6322, 6324, 6326, 6328, 6330, 6332, 6334, 6336, 6338, 6340, 6342, 6344, 6346, 6348, 6350, 6352, 6354, 6356, 6358, 6360, 6362, 6364, 6366, 6368, 6370, 6372, 6374, 6376, 6378, 6380, 6382, 6384, 6386, 6388, 6390, 6392, 6394, 6396, 6398, 6400, 6402, 6404, 6406, 6408, 6410, 6412, 6414, 6416, 6418, 6420, 6422, 6424, 6426, 6428, 6430, 6432, 6434, 6436, 6438, 6440, 6442, 6444, 6446, 6448, 6450, 6452, 6454, 6456, 6458, 6460, 6462, 6464, 6466, 6468, 6470, 6472, 6474, 6476, 6478, 6480, 6482, 6484, 6486, 6488, 6490, 6492, 6494, 6496, 6498, 6500, 6502, 6504, 6506, 6508, 6510, 6512, 6514, 6516, 6518, 6520, 6522, 6524, 6526, 6528, 6530, 6532, 6534, 6536, 6538, 6540, 6542, 6544, 6546, 6548, 6550, 6552, 6554, 6556, 6558, 6560, 6562, 6564, 6566, 6568, 6570, 6572, 6574, 6576, 6578, 6580, 6582, 6584, 6586, 6588, 6590, 6592, 6594, 6596, 6598, 6600, 6602, 6604, 6606, 6608, 6610, 6612, 6614, 6616, 6618, 6620, 6622, 6624, 6626, 6628, 6630, 6632, 6634, 6636, 6638, 6640, 6642, 6644, 6646, 6648, 6650, 6652, 6654, 6656, 6658, 6660, 6662, 6664, 6666, 6668, 6670, 6672, 6674, 6676, 6678, 6680, 6682, 6684, 6686, 6688, 6690, 6692, 6694, 6696, 6698, 6700, 6702, 6704, 6706, 6708, 6710, 6712, 6714, 6716, 6718, 6720, 6722, 6724, 6726, 6728, 6730, 6732, 6734, 6736, 6738, 6740, 6742, 6744, 6746, 6748, 6750, 6752, 6754, 6756, 6758, 6760, 6762, 6764, 6766, 6768, 6770, 6772, 6774, 6776, 6778, 6780, 6782, 6784, 6786, 6788, 6790, 6792, 6794, 6796, 6798, 6800, 6802, 6804, 6806, 6808, 6810, 6812, 6814, 6816, 6818, 6820, 6822, 6824, 6826, 6828, 6830, 6832, 6834, 6836, 6838, 6840, 6842, 6844, 6846, 6848, 6850, 6852, 6854, 6856, 6858, 6860, 6862, 6864, 6866, 6868, 6870, 6872, 6874, 6876, 6878, 6880, 6882, 6884, 6886, 6888, 6890, 6892, 6894, 6896, 6898, 6900, 6902, 6904, 6906, 6908, 6910, 6912, 6914, 6916, 6918, 6920, 6922, 6924, 6926, 6928, 6930, 6932, 6934, 6936, 6938, 6940, 6942, 6944, 6946, 6948, 6950, 6952, 6954, 6956, 6958, 6960, 6962, 6964, 6966, 6968, 6970, 6972, 6974, 6976, 6978, 6980, 6982, 6984, 6986, 6988, 6990, 6992, 6994, 6996, 6998, 7000, 7002, 7004, 7006, 7008, 7010, 7012, 7014, 7016, 7018, 7020, 7022, 7024, 7026, 7028, 7030, 7032, 7034, 7036, 7038, 7040, 7042, 7044, 7046, 7048, 7050, 7052, 7054, 7056, 7058, 7060, 7062, 7064, 7066, 7068, 7070, 7072, 7074, 7076, 7078, 7080, 7082, 7084, 7086, 7088, 7090, 7092, 7094, 7096, 7098, 7100, 7102, 7104, 7106, 7108, 7110, 7112, 7114, 7116, 7118, 7120, 7122, 7124, 7126, 7128, 7130, 7132, 7134, 7136, 7138, 7140, 7142, 7144, 7146, 7148, 7150, 7152, 7154, 7156, 7158, 7160, 7162, 7164, 7166, 7168, 7170, 7172, 7174, 7176, 7178, 7180, 7182, 7184, 7186, 7188, 7190, 7192, 7194, 7196, 7198, 7200, 7202, 7204, 7206, 7208, 7210, 7212, 7214, 7216, 7218, 7220, 7222, 7224, 7226, 7228, 7230, 7232, 7234, 7236, 7238, 7240, 7242, 7244, 7246, 7248, 7250, 7252, 7254, 7256, 7258, 7260, 7262, 7264, 7266, 7268, 7270, 7272, 7274, 7276, 7278, 7280, 7282, 7284, 7286, 7288, 7290, 7292, 7294, 7296, 7298, 7300, 7302, 7304, 7306, 7308, 7310, 7312, 7314, 7316, 7318, 7320, 7322, 7324, 7326, 7328, 7330, 7332, 7334, 7336, 7338, 7340, 7342, 7344, 7346, 7348, 7350, 7352, 7354, 7356, 7358, 7360, 7362, 7364, 7366, 7368, 7370, 7372, 7374, 7376, 7378, 7380, 7382, 7384, 7386, 7388, 7390, 7392, 7394, 7396, 7398, 7400, 7402, 7404, 7406, 7408, 7410, 7412, 7414, 7416, 7418, 7420, 7422, 7424, 7426, 7428, 7430, 7432, 7434, 7436, 7438, 7440, 7442, 7444, 7446, 7448, 7450, 7452, 7454, 7456, 7458, 7460, 7462, 7464, 7466, 7468, 7470, 7472, 7474, 7476, 7478, 7480, 7482, 7484, 7486, 7488, 7490, 7492, 7494, 7496, 7498, 7500, 7502, 7504, 7506, 7508, 7510, 7512, 7514, 7516, 7518, 7520, 7522, 7524, 7526, 7528, 7530, 7532, 7534, 7536, 7538, 7540, 7542, 7544, 7546, 7548, 7550, 7552, 7554, 7556, 7558, 7560, 7562, 7564, 7566, 7568, 7570, 7572, 7574, 7576, 7578, 7580, 7582, 7584, 7586, 7588, 7590, 7592, 7594, 7596, 7598, 7600, 7602, 7604, 7606, 7608, 7610, 7612, 7614, 7616, 7618, 7620, 7622, 7624, 7626, 7628, 7630, 7632, 7634, 7636, 7638, 7640, 7642, 7644, 7646, 7648, 7650, 7652, 7654, 7656, 7658, 7660, 7662, 7664, 7666, 7668, 7670, 7672, 7674, 7676, 7678, 7680, 7682, 7684, 7686, 7688, 7690, 7692, 7694, 7696, 7698, 7700, 7702, 7704, 7706, 7708, 7710, 7712, 7714, 7716, 7718, 7720, 7722, 7724, 7726, 7728, 7730, 7732, 7734, 7736, 7738, 7740, 7742, 7744, 7746, 7748, 7750, 7752, 7754, 7756, 7758, 7760, 7762, 7764, 7766, 7768, 7770, 7772, 7774, 7776, 7778, 7780, 7782, 7784, 7786, 7788, 7790, 7792, 7794, 7796, 7798, 7800, 7802, 7804, 7806, 7808, 7810, 7812, 7814, 7816, 7818, 7820, 7822, 7824, 7826, 7828, 7830, 7832, 7834, 7836, 7838, 7840, 7842, 7844, 7846, 7848, 7850, 7852, 7854, 7856, 7858, 7860, 7862, 7864, 7866, 7868, 7870, 7872, 7874, 7876, 7878, 7880, 7882, 7884, 7886, 7888, 7890, 7892, 7894, 7896, 7898, 7900, 7902, 7904, 7906, 7908, 7910, 7912, 7914, 7916, 7918, 7920, 7922, 7924, 7926, 7928, 7930, 7932, 7934, 7936, 7938, 7940, 7942, 7944, 7946, 7948, 7950, 7952, 7954, 7956, 7958, 7960, 7962, 7964, 7966, 7968, 7970, 7972, 7974, 7976, 7978, 7980, 7982, 7984, 7986, 7988, 7990, 7992, 7994, 7996, 7998, 8000, 8002, 8004, 8006, 8008, 8010, 8012, 8014, 8016, 8018, 8020, 8022, 8024, 8026, 8028, 8030, 8032, 8034, 8036, 8038, 8040, 8042, 8044, 8046, 8048, 8050, 8052, 8054, 8056, 8058, 8060, 8062, 8064, 8066, 8068, 8070, 8072, 8074, 8076, 8078, 8080, 8082, 8084, 8086, 8088, 8090, 8092, 8094, 8096, 8098, 8100, 8102, 8104, 8106, 8108, 8110, 8112, 8114, 8116, 8118, 8120, 8122, 8124, 8126, 8128, 8130, 8132, 8134, 8136, 8138, 8140, 8142, 8144, 8146, 8148, 8150, 8152, 8154, 8156, 8158, 8160, 8162, 8164, 8166, 8168, 8170, 8172, 8174, 8176, 8178, 8180, 8182, 8184, 8186, 8188, 8190, 8192, 8194, 8196, 8198, 8200, 8202, 8204, 8206, 8208, 8210, 8212, 8214, 8216, 8218, 8220, 8222, 8224, 8226, 8228, 8230, 8232, 8234, 8236, 8238, 8240, 8242, 8244, 8246, 8248, 8250, 8252, 8254, 8256, 8258, 8260, 8262, 8264, 8266, 8268, 8270, 8272, 8274, 8276, 8278, 8280, 8282, 8284, 8286, 8288, 8290, 8292, 8294, 8296, 8298, 8300, 8302, 8304, 8306, 8308, 8310, 8312, 8314, 8316, 8318, 8320, 8322, 8324, 8326, 8328, 8330, 8332, 8334, 8336, 8338, 8340, 8342, 8344, 8346, 8348, 8350, 8352, 8354, 8356, 8358, 8360, 8362, 8364, 8366, 8368, 8370, 8372, 8374, 8376, 8378, 8380, 8382, 8384, 8386, 8388, 8390, 8392, 8394, 8396, 8398, 8400, 8402, 8404, 8406, 8408, 8410, 8412, 8414, 8416, 8418, 8420, 8422, 8424, 8426, 8428, 8430, 8432, 8434, 8436, 8438, 8440, 8442, 8444, 8446, 8448, 8450, 8452, 8454, 8456, 8458, 8460, 8462, 8464, 8466, 8468, 8470, 8472, 8474, 8476, 8478, 8480, 8482, 8484, 8486, 8488, 8490, 8492, 8494, 8496, 8498, 8500, 8502, 8504, 8506, 8508, 8510, 8512, 8514, 8516, 8518, 8520, 8522, 8524, 8526, 8528, 8530, 8532, 8534, 8536, 8538, 8540, 8542, 8544, 8546, 8548, 8550, 8552, 8554, 8556, 8558, 8560, 8562, 8564, 8566, 8568, 8570, 8572, 8574, 8576, 8578, 8580, 8582, 8584, 8586, 8588, 8590, 8592, 8594, 8596, 8598, 8600, 8602, 8604, 8606, 8608, 8610, 8612, 8614, 8616, 8618, 8620, 8622, 8624, 8626, 8628, 8630, 8632, 8634, 8636, 8638, 8640, 8642, 8644, 8646, 8648, 8650, 8652, 8654, 8656, 8658, 8660, 8662, 8664, 8666, 8668, 8670, 8672, 8674, 8676, 8678, 8680, 8682, 8684, 8686, 8688, 8690, 8692, 8694, 8696, 8698, 8700, 8702, 8704, 8706, 8708, 8710, 8712, 8714, 8716, 8718, 8720, 8722, 8724, 8726, 8728, 8730, 8732, 8734, 8736, 8738, 8740, 8742, 8744, 8746, 8748, 8750, 8752, 8754, 8756, 8758, 8760, 8762, 8764, 8766, 8768, 8770, 8772, 8774, 8776, 8778, 8780, 8782, 8784, 8786, 8788, 8790, 8792, 8794, 8796, 8798, 8800, 8802, 8804, 8806, 8808, 8810, 8812, 8814, 8816, 8818, 8820, 8822, 8824, 8826, 8828, 8830, 8832, 8834, 8836, 8838, 8840, 8842, 8844, 8846, 8848, 8850, 8852, 8854, 8856, 8858, 8860, 8862, 8864, 8866, 8868, 8870, 8872, 8874, 8876, 8878, 8880, 8882, 8884, 8886, 8888, 8890, 8892, 8894, 8896, 8898, 8900, 8902, 8904, 8906, 8908, 8910, 8912, 8914, 8916, 8918, 8920, 8922, 8924, 8926, 8928, 8930, 8932, 8934, 8936, 8938, 8940, 8942, 8944, 8946, 8948, 8950, 8952, 8954, 8956, 8958, 8960, 8962, 8964, 8966, 8968, 8970, 8972, 8974, 8976, 8978, 8980, 8982, 8984, 8986, 8988, 8990, 8992, 8994, 8996, 8998, 9000, 9002, 9004, 9006, 9008, 9010, 9012, 9014, 9016, 9018, 9020, 9022, 9024, 9026, 9028, 9030, 9032, 9034, 9036, 9038, 9040, 9042, 9044, 9046, 9048, 9050, 9052, 9054, 9056, 9058, 9060, 9062, 9064, 9066, 9068, 9070, 9072, 9074, 9076, 9078, 9080, 9082, 9084, 9086, 9088, 9090, 9092, 9094, 9096, 9098, 9100, 9102, 9104, 9106, 9108, 9110, 9112, 9114, 9116, 9118, 9120, 9122, 9124, 9126, 9128, 9130, 9132, 9134, 9136, 9138, 9140, 9142, 9144, 9146, 9148, 9150, 9152, 9154, 9156, 9158, 9160, 9162, 9164, 9166, 9168, 9170, 9172, 9174, 9176, 9178, 9180, 9182, 9184, 9186, 9188, 9190, 9192, 9194, 9196, 9198, 9200, 9202, 9204, 9206, 9208, 9210, 9212, 9214, 9216, 9218, 9220, 9222, 9224, 9226, 9228, 9230, 9232, 9234, 9236, 9238, 9240, 9242, 9244, 9246, 9248, 9250, 9252, 9254, 9256, 9258, 9260, 9262, 9264, 9266, 9268, 9270, 9272, 9274, 9276, 9278, 9280, 9282, 9284, 9286, 9288, 9290, 9292, 9294, 9296, 9298, 9300, 9302, 9304, 9306, 9308, 9310, 9312, 9314, 9316, 9318, 9320, 9322, 9324, 9326, 9328, 9330, 9332, 9334, 9336, 9338, 9340, 9342, 9344, 9346, 9348, 9350, 9352, 9354, 9356, 9358, 9360, 9362, 9364, 9366, 9368, 9370, 9372, 9374, 9376, 9378, 9380, 9382, 9384, 9386, 9388, 9390, 9392, 9394, 9396, 9398, 9400, 9402, 9404, 9406, 9408, 9410, 9412, 9414, 9416, 9418, 9420, 9422, 9424, 9426, 9428, 9430, 9432, 9434, 9436, 9438, 9440, 9442, 9444, 9446, 9448, 9450, 9452, 9454, 9456, 9458, 9460, 9462, 9464, 9466, 9468, 9470, 9472, 9474, 9476, 9478, 9480, 9482, 9484, 9486, 9488, 9490, 9492, 9494, 9496, 9498, 9500, 9502, 9504, 9506, 9508, 9510, 9512, 9514, 9516, 9518, 9520, 9522, 9524, 9526, 9528, 9530, 9532, 9534, 9536, 9538, 9540, 9542, 9544, 9546, 9548, 9550, 9552, 9554, 9556, 9558, 9560, 9562, 9564, 9566, 9568, 9570, 9572, 9574, 9576, 9578, 9580, 9582, 9584, 9586, 9588, 9590, 9592, 9594, 9596, 9598, 9600, 9602, 9604, 9606, 9608, 9610, 9612, 9614, 9616, 9618, 9620, 9622, 9624, 9626, 9628, 9630, 9632, 9634, 9636, 9638, 9640, 9642, 9644, 9646, 9648, 9650, 9652, 9654, 9656, 9658, 9660, 9662, 9664, 9666, 9668, 9670, 9672, 9674, 9676, 9678, 9680, 9682, 9684, 9686, 9688, 9690, 9692, 9694, 9696, 9698, 9700, 9702, 9704, 9706, 9708, 9710, 9712, 9714, 9716, 9718, 9720, 9722, 9724, 9726, 9728, 9730, 9732, 9734, 9736, 9738, 9740, 9742, 9744, 9746, 9748, 9750, 9752, 9754, 9756, 9758, 9760, 9762, 9764, 9766, 9768, 9770, 9772, 9774, 9776, 9778, 9780, 9782, 9784, 9786, 9788, 9790, 9792, 9794, 9796, 9798, 9800, 9802, 9804, 9806, 9808, 9810, 9812, 9814, 9816, 9818, 9820, 9822, 9824, 9826, 9828, 9830, 9832, 9834, 9836, 9838, 9840, 9842, 9844, 9846, 9848, 9850, 9852, 9854, 9856, 9858, 9860, 9862, 9864, 9866, 9868, 9870, 9872, 9874, 9876, 9878, 9880, 9882, 9884, 9886, 9888, 9890, 9892, 9894, 9896, 9898, 9900, 9902, 9904, 9906, 9908, 9910, 9912, 9914, 9916, 9918, 9920, 9922, 9924, 9926, 9928, 9930, 9932, 9934, 9936, 9938, 9940, 9942, 9944, 9946, 9948, 9950, 9952, 9954, 9956, 9958, 9960, 9962, 9964, 9966, 9968, 9970, 9972, 9974, 9976, 9978, 9980, 9982, 9984, 9986, 9988, 9990, 9992, 9994, 9996, 9998, 10000, 10002, 10004, 10006, 10008, 10010, 10012, 10014, 10016, 10018, 10020, 10022, 10024, 10026, 10028, 10030, 10032, 10034, 10036, 10038, 10040, 10042, 10044, 10046, 10048, 10050, 10052, 10054, 10056, 10058, 10060, 10062, 10064, 10066, 10068, 10070, 10072, 10074, 10076, 10078, 10080, 10082, 10084, 10086, 10088, 10090, 10092, 10094, 10096, 10098, 10100, 10102, 10104, 10106, 10108, 10110, 10112, 10114, 10116, 10118, 10120, 10122, 10124, 10126, 10128, 10130, 10132, 10134, 10136, 10138, 10140, 10142, 10144, 10146, 10148, 10150, 10152, 10154, 10156, 10158, 10160, 10162, 10164, 10166, 10168, 10170, 10172, 10174, 10176, 10178, 10180, 10182, 10184, 10186, 10188, 10190, 10192, 10194, 10196, 10198, 10200, 10202, 10204, 10206, 10208, 10210, 10212, 10214, 10216, 10218, 10220, 10222, 10224, 10226, 10228, 10230, 10232, 10234, 10236, 10238, 10240, 10242, 10244, 10246, 10248, 10250, 10252, 10254, 10256, 10258, 10260, 10262, 10264, 10266, 10268, 10270, 10272, 10274, 10276, 10278, 10280, 10282, 10284, 10286, 10288, 10290, 10292, 10294, 10296, 10298, 10300, 10302, 10304, 10306, 10308, 10310, 10312, 10314, 10316, 10318, 10320, 10322, 10324, 10326, 10328, 10330, 10332, 10334, 10336, 10338, 10340, 10342, 10344, 10346, 10348, 10350, 10352, 10354, 10356, 10358, 10360, 10362, 10364, 10366, 10368, 10370, 10372, 10374, 10376, 10378, 10380, 10382, 10384, 10386, 10388, 10390, 10392, 10394, 10396, 10398, 10400, 10402, 10404, 10406, 10408, 10410, 10412, 10414, 10416, 10418, 10420, 10422, 10424, 10426, 10428, 10430, 10432, 10434, 10436, 10438, 10440, 10442, 10444, 10446, 10448, 10450, 10452, 10454, 10456, 10458, 10460, 10462, 10464, 10466, 10468, 10470, 10472, 10474, 10476, 10478, 10480, 10482, 10484, 10486, 10488, 10490, 10492, 10494, 10496, 10498, 10500, 10502, 10504, 10506, 10508, 10510, 10512, 10514, 10516, 10518, 10520, 10522, 10524, 10526, 10528, 10530, 10532, 10534, 10536, 10538, 10540, 10542, 10544, 10546, 10548, 10550, 10552, 10554, 10556, 10558, 10560, 10562, 10564, 10566, 10568, 10570, 10572, 10574, 10576, 10578, 10580, 10582, 10584, 10586, 10588, 10590, 10592, 10594, 10596, 10598, 10600, 10602, 10604, 10606, 10608, 10610, 10612, 10614, 10616, 10618, 10620, 10622, 10624, 10626, 10628, 10630, 10632, 10634, 10636, 10638, 10640, 10642, 10644, 10646, 10648, 10650, 10652, 10654, 10656, 10658, 10660, 10662, 10664, 10666, 10668, 10670, 10672, 10674, 10676, 10678, 10680, 10682, 10684, 10686, 10688, 10690, 10692, 10694, 10696, 10698, 10700, 10702, 10704, 10706, 10708, 10710, 10712, 10714, 10716, 10718, 10720, 10722, 10724, 10726, 10728, 10730, 10732, 10734, 10736, 10738, 10740, 10742, 10744, 10746, 10748, 10750, 10752, 10754, 10756, 10758, 10760, 10762, 10764, 10766, 10768, 10770, 10772, 10774, 10776, 10778, 10780, 10782, 10784, 10786, 10788, 10790, 10792, 10794, 10796, 10798, 10800, 10802, 10804, 10806, 10808, 10810, 10812, 10814, 10816, 10818, 10820, 10822, 10824, 10826, 10828, 10830, 10832, 10834, 10836, 10838, 10840, 10842, 10844, 10846, 10848, 10850, 10852, 10854, 10856, 10858, 10860, 10862, 10864, 10866, 10868, 10870, 10872, 10874, 10876, 10878, 10880, 10882, 10884, 10886, 10888, 10890, 10892, 10894, 10896, 10898, 10900, 10902, 10904, 10906, 10908, 10910, 10912, 10914, 10916, 10918, 10920, 10922, 10924, 10926, 10928, 10930, 10932, 10934, 10936, 10938, 10940, 10942, 10944, 10946, 10948, 10950, 10952, 10954, 10956, 10958, 10960, 10962, 10964 and 10966.

2. A protein having 50% or greater sequence identity to a protein according to claim 1.

3. A protein comprising a fragment of 7 or more consecutive amino acids from an amino acid sequence selected from the group consisting of SEQ IDs 2, 4, 6, 8, 10, 12, 14, 16, 18, 20, 22, 24, 26, 28, 30, 32, 34, 36, 38, 40, 42, 44, 46, 48, 50, 52, 54, 56, 58, 60, 62, 64, 66, 68, 70, 72, 74, 76, 78, 80, 82, 84, 86, 88, 90, 92, 94, 96, 98, 100, 102, 104, 106, 108, 110, 112, 114, 116, 118, 120, 122, 124, 126, 128, 130, 132, 134, 136, 138, 140, 142, 144, 146, 148, 150, 152, 154, 156, 158, 160, 162, 164, 166, 168, 170, 172, 174, 176, 178, 180, 182, 184, 186, 188, 190, 192, 194, 196, 198, 200, 202, 204, 206, 208, 210, 212, 214, 216, 218, 220, 222, 224, 226, 228, 230, 232, 234, 236, 238, 240, 242, 244, 246, 248, 250, 252, 254, 256, 258, 260, 262, 264, 266, 268, 270, 272, 274, 276, 278, 280, 282, 284, 286, 288, 290, 292, 294, 296, 298, 300, 302, 304, 306, 308, 310, 312, 314, 316, 318, 320, 322, 324, 326, 328, 330, 332, 334, 336, 338, 340, 342, 344, 346, 348, 350, 352, 354, 356, 358, 360, 362, 364, 366, 368, 370, 372, 374, 376, 378, 380, 382, 384, 386, 388, 390, 392, 394, 396, 398, 400, 402, 404, 406, 408, 410, 412, 414, 416, 418, 420, 422, 424, 426, 428, 430, 432, 434, 436, 438, 440, 442, 444, 446, 448, 450, 452, 454, 456, 458, 460, 462, 464, 466, 468, 470, 472, 474, 476, 478, 480, 482, 484, 486, 488, 490, 492, 494, 496, 498, 500, 502, 504, 506, 508, 510, 512, 514, 516, 518, 520, 522, 524, 526, 528, 530, 532, 534, 536, 538, 540, 542, 544, 546, 548, 550, 552, 554, 556, 558, 560, 562, 564, 566, 568, 570, 572, 574, 576, 578, 580, 582, 584, 586, 588, 590, 592, 594, 596, 598, 600, 602, 604, 606, 608, 610, 612, 614, 616, 618, 620, 622, 624, 626, 628, 630, 632, 634, 636, 638, 640, 642, 644, 646, 648, 650, 652, 654, 656, 658, 660, 662, 664, 666, 668, 670, 672, 674, 676, 678, 680, 682, 684, 686, 688, 690, 692, 694, 696, 698, 700, 702, 704, 706, 708, 710, 712, 714, 716, 718, 720, 722, 724, 726, 728, 730, 732, 734, 736, 738, 740, 742, 744, 746, 748, 750, 752, 754, 756, 758, 760, 762, 764, 766, 768, 770, 772, 774, 776, 778, 780, 782, 784, 786, 788, 790, 792, 794, 796, 798, 800, 802, 804, 806, 808, 810, 812, 814, 816, 818, 820, 822, 824, 826, 828, 830, 832, 834, 836, 838, 840, 842, 844, 846, 848, 850, 852, 854, 856, 858, 860, 862, 864, 866, 868, 870, 872, 874, 876, 878, 880, 882, 884, 886, 888, 890, 892, 894, 896, 898, 900, 902, 904, 906, 908, 910, 912, 914, 916, 918, 920, 922, 924, 926, 928, 930, 932, 934, 936, 938, 940, 942, 944, 946, 948, 950, 952, 954, 956, 958, 960, 962, 964, 966, 968, 970, 972, 974, 976, 978, 980, 982, 984, 986, 988, 990, 992, 994, 996, 998, 1000, 1002, 1004, 1006, 1008, 1010, 1012, 1014, 1016, 1018, 1020, 1022, 1024, 1026, 1028, 1030, 1032, 1034, 1036, 1038, 1040, 1042, 1044, 1046, 1048, 1050, 1052, 1054, 1056, 1058, 1060, 1062, 1064, 1066, 1068, 1070, 1072, 1074, 1076, 1078, 1080, 1082, 1084, 1086, 1088, 1090, 1092, 1094, 1096, 1098, 1100, 1102, 1104, 1106, 1108, 1110, 1112, 1114, 1116, 1118, 1120, 1122, 1124, 1126, 1128, 1130, 1132, 1134, 1136, 1138, 1140, 1142, 1144, 1146, 1148, 1150, 1152, 1154, 1156, 1158, 1160, 1162, 1164, 1166, 1168, 1170, 1172, 1174, 1176, 1178, 1180, 1182, 1184, 1186, 1188, 1190, 1192, 1194, 1196, 1198, 1200, 1202, 1204, 1206, 1208, 1210, 1212, 1214, 1216, 1218, 1220, 1222, 1224, 1226, 1228, 1230, 1232, 1234, 1236, 1238, 1240, 1242, 1244, 1246, 1248, 1250, 1252, 1254, 1256, 1258, 1260, 1262, 1264, 1266, 1268, 1270, 1272, 1274, 1276, 1278, 1280, 1282, 1284, 1286, 1288, 1290, 1292, 1294, 1296, 1298, 1300, 1302, 1304, 1306, 1308, 1310, 1312, 1314, 1316, 1318, 1320, 1322, 1324, 1326, 1328, 1330, 1332, 1334, 1336, 1338, 1340, 1342, 1344, 1346, 1348, 1350, 1352, 1354, 1356, 1358, 1360, 1362, 1364, 1366, 1368, 1370, 1372, 1374, 1376, 1378, 1380, 1382, 1384, 1386, 1388, 1390, 1392, 1394, 1396, 1398, 1400, 1402, 1404, 1406, 1408, 1410, 1412, 1414, 1416, 1418, 1420, 1422, 1424, 1426, 1428, 1430, 1432, 1434, 1436, 1438, 1440, 1442, 1444, 1446, 1448, 1450, 1452, 1454, 1456, 1458, 1460, 1462, 1464, 1466, 1468, 1470, 1472, 1474, 1476, 1478, 1480, 1482, 1484, 1486, 1488, 1490, 1492, 1494, 1496, 1498, 1500, 1502, 1504, 1506, 1508, 1510, 1512, 1514, 1516, 1518, 1520, 1522, 1524, 1526, 1528, 1530, 1532, 1534, 1536, 1538, 1540, 1542, 1544, 1546, 1548, 1550, 1552, 1554, 1556, 1558, 1560, 1562, 1564, 1566, 1568, 1570, 1572, 1574, 1576, 1578, 1580, 1582, 1584, 1586, 1588, 1590, 1592, 1594, 1596, 1598, 1600, 1602, 1604, 1606, 1608, 1610, 1612, 1614, 1616, 1618, 1620, 1622, 1624, 1626, 1628, 1630, 1632, 1634, 1636, 1638, 1640, 1642, 1644, 1646, 1648, 1650, 1652, 1654, 1656, 1658, 1660, 1662, 1664, 1666, 1668, 1670, 1672, 1674, 1676, 1678, 1680, 1682, 1684, 1686, 1688, 1690, 1692, 1694, 1696, 1698, 1700, 1702, 1704, 1706, 1708, 1710, 1712, 1714, 1716, 1718, 1720, 1722, 1724, 1726, 1728, 1730, 1732, 1734, 1736, 1738, 1740, 1742, 1744, 1746, 1748, 1750, 1752, 1754, 1756, 1758, 1760, 1762, 1764, 1766, 1768, 1770, 1772, 1774, 1776, 1778, 1780, 1782, 1784, 1786, 1788, 1790, 1792, 1794, 1796, 1798, 1800, 1802, 1804, 1806, 1808, 1810, 1812, 1814, 1816, 1818, 1820, 1822, 1824, 1826, 1828, 1830, 1832, 1834, 1836, 1838, 1840, 1842, 1844, 1846, 1848, 1850, 1852, 1854, 1856, 1858, 1860, 1862, 1864, 1866, 1868, 1870, 1872, 1874, 1876, 1878, 1880, 1882, 1884, 1886, 1888, 1890, 1892, 1894, 1896, 1898, 1900, 1902, 1904, 1906, 1908, 1910, 1912, 1914, 1916, 1918, 1920, 1922, 1924, 1926, 1928, 1930, 1932, 1934, 1936, 1938, 1940, 1942, 1944, 1946, 1948, 1950, 1952, 1954, 1956, 1958, 1960, 1962, 1964, 1966, 1968, 1970, 1972, 1974, 1976, 1978, 1980, 1982, 1984, 1986, 1988, 1990, 1992, 1994, 1996, 1998, 2000, 2002, 2004, 2006, 2008, 2010, 2012, 2014, 2016, 2018, 2020, 2022, 2024, 2026, 2028, 2030, 2032, 2034, 2036, 2038, 2040, 2042, 2044, 2046, 2048, 2050, 2052, 2054, 2056, 2058, 2060, 2062, 2064, 2066, 2068, 2070, 2072, 2074, 2076, 2078, 2080, 2082, 2084, 2086, 2088, 2090, 2092, 2094, 2096, 2098, 2100, 2102, 2104, 2106, 2108, 2110, 2112, 2114, 2116, 2118, 2120, 2122, 2124, 2126, 2128, 2130, 2132, 2134, 2136, 2138, 2140, 2142, 2144, 2146, 2148, 2150, 2152, 2154, 2156, 2158, 2160, 2162, 2164, 2166, 2168, 2170, 2172, 2174, 2176, 2178, 2180, 2182, 2184, 2186, 2188, 2190, 2192, 2194, 2196, 2198, 2200, 2202, 2204, 2206, 2208, 2210, 2212, 2214, 2216, 2218, 2220, 2222, 2224, 2226, 2228, 2230, 2232, 2234, 2236, 2238, 2240, 2242, 2244, 2246, 2248, 2250, 2252, 2254, 2256, 2258, 2260, 2262, 2264, 2266, 2268, 2270, 2272, 2274, 2276, 2278, 2280, 2282, 2284, 2286, 2288, 2290, 2292, 2294, 2296, 2298, 2300, 2302, 2304, 2306, 2308, 2310, 2312, 2314, 2316, 2318, 2320, 2322, 2324, 2326, 2328, 2330, 2332, 2334, 2336, 2338, 2340, 2342, 2344, 2346, 2348, 2350, 2352, 2354, 2356, 2358, 2360, 2362, 2364, 2366, 2368, 2370, 2372, 2374, 2376, 2378, 2380, 2382, 2384, 2386, 2388, 2390, 2392, 2394, 2396, 2398, 2400, 2402, 2404, 2406, 2408, 2410, 2412, 2414, 2416, 2418, 2420, 2422, 2424, 2426, 2428, 2430, 2432, 2434, 2436, 2438, 2440, 2442, 2444, 2446, 2448, 2450, 2452, 2454, 2456, 2458, 2460, 2462, 2464, 2466, 2468, 2470, 2472, 2474, 2476, 2478, 2480, 2482, 2484, 2486, 2488, 2490, 2492, 2494, 2496, 2498, 2500, 2502, 2504, 2506, 2508, 2510, 2512, 2514, 2516, 2518, 2520, 2522, 2524, 2526, 2528, 2530, 2532, 2534, 2536, 2538, 2540, 2542, 2544, 2546, 2548, 2550, 2552, 2554, 2556, 2558, 2560, 2562, 2564, 2566, 2568, 2570, 2572, 2574, 2576, 2578, 2580, 2582, 2584, 2586, 2588, 2590, 2592, 2594, 2596, 2598, 2600, 2602, 2604, 2606, 2608, 2610, 2612, 2614, 2616, 2618, 2620, 2622, 2624, 2626, 2628, 2630, 2632, 2634, 2636, 2638, 2640, 2642, 2644, 2646, 2648, 2650, 2652, 2654, 2656, 2658, 2660, 2662, 2664, 2666, 2668, 2670, 2672, 2674, 2676, 2678, 2680, 2682, 2684, 2686, 2688, 2690, 2692, 2694, 2696, 2698, 2700, 2702, 2704, 2706, 2708, 2710, 2712, 2714, 2716, 2718, 2720, 2722, 2724, 2726, 2728, 2730, 2732, 2734, 2736, 2738, 2740, 2742, 2744, 2746, 2748, 2750, 2752, 2754, 2756, 2758, 2760, 2762, 2764, 2766, 2768, 2770, 2772, 2774, 2776, 2778, 2780, 2782, 2784, 2786, 2788, 2790, 2792, 2794, 2796, 2798, 2800, 2802, 2804, 2806, 2808, 2810, 2812, 2814, 2816, 2818, 2820, 2822, 2824, 2826, 2828, 2830, 2832, 2834, 2836, 2838, 2840, 2842, 2844, 2846, 2848, 2850, 2852, 2854, 2856, 2858, 2860, 2862, 2864, 2866, 2868, 2870, 2872, 2874, 2876, 2878, 2880, 2882, 2884, 2886, 2888, 2890, 2892, 2894, 2896, 2898, 2900, 2902, 2904, 2906, 2908, 2910, 2912, 2914, 2916, 2918, 2920, 2922, 2924, 2926, 2928, 2930, 2932, 2934, 2936, 2938, 2940, 2942, 2944, 2946, 2948, 2950, 2952, 2954, 2956, 2958, 2960, 2962, 2964, 2966, 2968, 2970, 2972, 2974, 2976, 2978, 2980, 2982, 2984, 2986, 2988, 2990, 2992, 2994, 2996, 2998, 3000, 3002, 3004, 3006, 3008, 3010, 3012, 3014, 3016, 3018, 3020, 3022, 3024, 3026, 3028, 3030, 3032, 3034, 3036, 3038, 3040, 3042, 3044, 3046, 3048, 3050, 3052, 3054, 3056, 3058, 3060, 3062, 3064, 3066, 3068, 3070, 3072, 3074, 3076, 3078, 3080, 3082, 3084, 3086, 3088, 3090, 3092, 3094, 3096, 3098, 3100, 3102, 3104, 3106, 3108, 3110, 3112, 3114, 3116, 3118, 3120, 3122, 3124, 3126, 3128, 3130, 3132, 3134, 3136, 3138, 3140, 3142, 3144, 3146, 3148, 3150, 3152, 3154, 3156, 3158, 3160, 3162, 3164, 3166, 3168, 3170, 3172, 3174, 3176, 3178, 3180, 3182, 3184, 3186, 3188, 3190, 3192, 3194, 3196, 3198, 3200, 3202, 3204, 3206, 3208, 3210, 3212, 3214, 3216, 3218, 3220, 3222, 3224, 3226, 3228, 3230, 3232, 3234, 3236, 3238, 3240, 3242, 3244, 3246, 3248, 3250, 3252, 3254, 3256, 3258, 3260, 3262, 3264, 3266, 3268, 3270, 3272, 3274, 3276, 3278, 3280, 3282, 3284, 3286, 3288, 3290, 3292, 3294, 3296, 3298, 3300, 3302, 3304, 3306, 3308, 3310, 3312, 3314, 3316, 3318, 3320, 3322, 3324, 3326, 3328, 3330, 3332, 3334, 3336, 3338, 3340, 3342, 3344, 3346, 3348, 3350, 3352, 3354, 3356, 3358, 3360, 3362, 3364, 3366, 3368, 3370, 3372, 3374, 3376, 3378, 3380, 3382, 3384, 3386, 3388, 3390, 3392, 3394, 3396, 3398, 3400, 3402, 3404, 3406, 3408, 3410, 3412, 3414, 3416, 3418, 3420, 3422, 3424, 3426, 3428, 3430, 3432, 3434, 3436, 3438, 3440, 3442, 3444, 3446, 3448, 3450, 3452, 3454, 3456, 3458, 3460, 3462, 3464, 3466, 3468, 3470, 3472, 3474, 3476, 3478, 3480, 3482, 3484, 3486, 3488, 3490, 3492, 3494, 3496, 3498, 3500, 3502, 3504, 3506, 3508, 3510, 3512, 3514, 3516, 3518, 3520, 3522, 3524, 3526, 3528, 3530, 3532, 3534, 3536, 3538, 3540, 3542, 3544, 3546, 3548, 3550, 3552, 3554, 3556, 3558, 3560, 3562, 3564, 3566, 3568, 3570, 3572, 3574, 3576, 3578, 3580, 3582, 3584, 3586, 3588, 3590, 3592, 3594, 3596, 3598, 3600, 3602, 3604, 3606, 3608, 3610, 3612, 3614, 3616, 3618, 3620, 3622, 3624, 3626, 3628, 3630, 3632, 3634, 3636, 3638, 3640, 3642, 3644, 3646, 3648, 3650, 3652, 3654, 3656, 3658, 3660, 3662, 3664, 3666, 3668, 3670, 3672, 3674, 3676, 3678, 3680, 3682, 3684, 3686, 3688, 3690, 3692, 3694, 3696, 3698, 3700, 3702, 3704, 3706, 3708, 3710, 3712, 3714, 3716, 3718, 3720, 3722, 3724, 3726, 3728, 3730, 3732, 3734, 3736, 3738, 3740, 3742, 3744, 3746, 3748, 3750, 3752, 3754, 3756, 3758, 3760, 3762, 3764, 3766, 3768, 3770, 3772, 3774, 3776, 3778, 3780, 3782, 3784, 3786, 3788, 3790, 3792, 3794, 3796, 3798, 3800, 3802, 3804, 3806, 3808, 3810, 3812, 3814, 3816, 3818, 3820, 3822, 3824, 3826, 3828, 3830, 3832, 3834, 3836, 3838, 3840, 3842, 3844, 3846, 3848, 3850, 3852, 3854, 3856, 3858, 3860, 3862, 3864, 3866, 3868, 3870, 3872, 3874, 3876, 3878, 3880, 3882, 3884, 3886, 3888, 3890, 3892, 3894, 3896, 3898, 3900, 3902, 3904, 3906, 3908, 3910, 3912, 3914, 3916, 3918, 3920, 3922, 3924, 3926, 3928, 3930, 3932, 3934, 3936, 3938, 3940, 3942, 3944, 3946, 3948, 3950, 3952, 3954, 3956, 3958, 3960, 3962, 3964, 3966, 3968, 3970, 3972, 3974, 3976, 3978, 3980, 3982, 3984, 3986, 3988, 3990, 3992, 3994, 3996, 3998, 4000, 4002, 4004, 4006, 4008, 4010, 4012, 4014, 4016, 4018, 4020, 4022, 4024, 4026, 4028, 4030, 4032, 4034, 4036, 4038, 4040, 4042, 4044, 4046, 4048, 4050, 4052, 4054, 4056, 4058, 4060, 4062, 4064, 4066, 4068, 4070, 4072, 4074, 4076, 4078, 4080, 4082, 4084, 4086, 4088, 4090, 4092, 4094, 4096, 4098, 4100, 4102, 4104, 4106, 4108, 4110, 4112, 4114, 4116, 4118, 4120, 4122, 4124, 4126, 4128, 4130, 4132, 4134, 4136, 4138, 4140, 4142, 4144, 4146, 4148, 4150, 4152, 4154, 4156, 4158, 4160, 4162, 4164, 4166, 4168, 4170, 4172, 4174, 4176, 4178, 4180, 4182, 4184, 4186, 4188, 4190, 4192, 4194, 4196, 4198, 4200, 4202, 4204, 4206, 4208, 4210, 4212, 4214, 4216, 4218, 4220, 4222, 4224, 4226, 4228, 4230, 4232, 4234, 4236, 4238, 4240, 4242, 4244, 4246, 4248, 4250, 4252, 4254, 4256, 4258, 4260, 4262, 4264, 4266, 4268, 4270, 4272, 4274, 4276, 4278, 4280, 4282, 4284, 4286, 4288, 4290, 4292, 4294, 4296, 4298, 4300, 4302, 4304, 4306, 4308, 4310, 4312, 4314, 4316, 4318, 4320, 4322, 4324, 4326, 4328, 4330, 4332, 4334, 4336, 4338, 4340, 4342, 4344, 4346, 4348, 4350, 4352, 4354, 4356, 4358, 4360, 4362, 4364, 4366, 4368, 4370, 4372, 4374, 4376, 4378, 4380, 4382, 4384, 4386, 4388, 4390, 4392, 4394, 4396, 4398, 4400, 4402, 4404, 4406, 4408, 4410, 4412, 4414, 4416, 4418, 4420, 4422, 4424, 4426, 4428, 4430, 4432, 4434, 4436, 4438, 4440, 4442, 4444, 4446, 4448, 4450, 4452, 4454, 4456, 4458, 4460, 4462, 4464, 4466, 4468, 4470, 4472, 4474, 4476, 4478, 4480, 4482, 4484, 4486, 4488, 4490, 4492, 4494, 4496, 4498, 4500, 4502, 4504, 4506, 4508, 4510, 4512, 4514, 4516, 4518, 4520, 4522, 4524, 4526, 4528, 4530, 4532, 4534, 4536, 4538, 4540, 4542, 4544, 4546, 4548, 4550, 4552, 4554, 4556, 4558, 4560, 4562, 4564, 4566, 4568, 4570, 4572, 4574, 4576, 4578, 4580, 4582, 4584, 4586, 4588, 4590, 4592, 4594, 4596, 4598, 4600, 4602, 4604, 4606, 4608, 4610, 4612, 4614, 4616, 4618, 4620, 4622, 4624, 4626, 4628, 4630, 4632, 4634, 4636, 4638, 4640, 4642, 4644, 4646, 4648, 4650, 4652, 4654, 4656, 4658, 4660, 4662, 4664, 4666, 4668, 4670, 4672, 4674, 4676, 4678, 4680, 4682, 4684, 4686, 4688, 4690, 4692, 4694, 4696, 4698, 4700, 4702, 4704, 4706, 4708, 4710, 4712, 4714, 4716, 4718, 4720, 4722, 4724, 4726, 4728, 4730, 4732, 4734, 4736, 4738, 4740, 4742, 4744, 4746, 4748, 4750, 4752, 4754, 4756, 4758, 4760, 4762, 4764, 4766, 4768, 4770, 4772, 4774, 4776, 4778, 4780, 4782, 4784, 4786, 4788, 4790, 4792, 4794, 4796, 4798, 4800, 4802, 4804, 4806, 4808, 4810, 4812, 4814, 4816, 4818, 4820, 4822, 4824, 4826, 4828, 4830, 4832, 4834, 4836, 4838, 4840, 4842, 4844, 4846, 4848, 4850, 4852, 4854, 4856, 4858, 4860, 4862, 4864, 4866, 4868, 4870, 4872, 4874, 4876, 4878, 4880, 4882, 4884, 4886, 4888, 4890, 4892, 4894, 4896, 4898, 4900, 4902, 4904, 4906, 4908, 4910, 4912, 4914, 4916, 4918, 4920, 4922, 4924, 4926, 4928, 4930, 4932, 4934, 4936, 4938, 4940, 4942, 4944, 4946, 4948, 4950, 4952, 4954, 4956, 4958, 4960, 4962, 4964, 4966, 4968, 4970, 4972, 4974, 4976, 4978, 4980, 4982, 4984, 4986, 4988, 4990, 4992, 4994, 4996, 4998, 5000, 5002, 5004, 5006, 5008, 5010, 5012, 5014, 5016, 5018, 5020, 5022, 5024, 5026, 5028, 5030, 5032, 5034, 5036, 5038, 5040, 5042, 5044, 5046, 5048, 5050, 5052, 5054, 5056, 5058, 5060, 5062, 5064, 5066, 5068, 5070, 5072, 5074, 5076, 5078, 5080, 5082, 5084, 5086, 5088, 5090, 5092, 5094, 5096, 5098, 5100, 5102, 5104, 5106, 5108, 5110, 5112, 5114, 5116, 5118, 5120, 5122, 5124, 5126, 5128, 5130, 5132, 5134, 5136, 5138, 5140, 5142, 5144, 5146, 5148, 5150, 5152, 5154, 5156, 5158, 5160, 5162, 5164, 5166, 5168, 5170, 5172, 5174, 5176, 5178, 5180, 5182, 5184, 5186, 5188, 5190, 5192, 5194, 5196, 5198, 5200, 5202, 5204, 5206, 5208, 5210, 5212, 5214, 5216, 5218, 5220, 5222, 5224, 5226, 5228, 5230, 5232, 5234, 5236, 5238, 5240, 5242, 5244, 5246, 5248, 5250, 5252, 5254, 5256, 5258, 5260, 5262, 5264, 5266, 5268, 5270, 5272, 5274, 5276, 5278, 5280, 5282, 5284, 5286, 5288, 5290, 5292, 5294, 5296, 5298, 5300, 5302, 5304, 5306, 5308, 5310, 5312, 5314, 5316, 5318, 5320, 5322, 5324, 5326, 5328, 5330, 5332, 5334, 5336, 5338, 5340, 5342, 5344, 5346, 5348, 5350, 5352, 5354, 5356, 5358, 5360, 5362, 5364, 5366, 5368, 5370, 5372, 5374, 5376, 5378, 5380, 5382, 5384, 5386, 5388, 5390, 5392, 5394, 5396, 5398, 5400, 5402, 5404, 5406, 5408, 5410, 5412, 5414, 5416, 5418, 5420, 5422, 5424, 5426, 5428, 5430, 5432, 5434, 5436, 5438, 5440, 5442, 5444, 5446, 5448, 5450, 5452, 5454, 5456, 5458, 5460, 5462, 5464, 5466, 5468, 5470, 5472, 5474, 5476, 5478, 5480, 5482, 5484, 5486, 5488, 5490, 5492, 5494, 5496, 5498, 5500, 5502, 5504, 5506, 5508, 5510, 5512, 5514, 5516, 5518, 5520, 5522, 5524, 5526, 5528, 5530, 5532, 5534, 5536, 5538, 5540, 5542, 5544, 5546, 5548, 5550, 5552, 5554, 5556, 5558, 5560, 5562, 5564, 5566, 5568, 5570, 5572, 5574, 5576, 5578, 5580, 5582, 5584, 5586, 5588, 5590, 5592, 5594, 5596, 5598, 5600, 5602, 5604, 5606, 5608, 5610, 5612, 5614, 5616, 5618, 5620, 5622, 5624, 5626, 5628, 5630, 5632, 5634, 5636, 5638, 5640, 5642, 5644, 5646, 5648, 5650, 5652, 5654, 5656, 5658, 5660, 5662, 5664, 5666, 5668, 5670, 5672, 5674, 5676, 5678, 5680, 5682, 5684, 5686, 5688, 5690, 5692, 5694, 5696, 5698, 5700, 5702, 5704, 5706, 5708, 5710, 5712, 5714, 5716, 5718, 5720, 5722, 5724, 5726, 5728, 5730, 5732, 5734, 5736, 5738, 5740, 5742, 5744, 5746, 5748, 5750, 5752, 5754, 5756, 5758, 5760, 5762, 5764, 5766, 5768, 5770, 5772, 5774, 5776, 5778, 5780, 5782, 5784, 5786, 5788, 5790, 5792, 5794, 5796, 5798, 5800, 5802, 5804, 5806, 5808, 5810, 5812, 5814, 5816, 5818, 5820, 5822, 5824, 5826, 5828, 5830, 5832, 5834, 5836, 5838, 5840, 5842, 5844, 5846, 5848, 5850, 5852, 5854, 5856, 5858, 5860, 5862, 5864, 5866, 5868, 5870, 5872, 5874, 5876, 5878, 5880, 5882, 5884, 5886, 5888, 5890, 5892, 5894, 5896, 5898, 5900, 5902, 5904, 5906, 5908, 5910, 5912, 5914, 5916, 5918, 5920, 5922, 5924, 5926, 5928, 5930, 5932, 5934, 5936, 5938, 5940, 5942, 5944, 5946, 5948, 5950, 5952, 5954, 5956, 5958, 5960, 5962, 5964, 5966, 5968, 5970, 5972, 5974, 5976, 5978, 5980, 5982, 5984, 5986, 5988, 5990, 5992, 5994, 5996, 5998, 6000, 6002, 6004, 6006, 6008, 6010, 6012, 6014, 6016, 6018, 6020, 6022, 6024, 6026, 6028, 6030, 6032, 6034, 6036, 6038, 6040, 6042, 6044, 6046, 6048, 6050, 6052, 6054, 6056, 6058, 6060, 6062, 6064, 6066, 6068, 6070, 6072, 6074, 6076, 6078, 6080, 6082, 6084, 6086, 6088, 6090, 6092, 6094, 6096, 6098, 6100, 6102, 6104, 6106, 6108, 6110, 6112, 6114, 6116, 6118, 6120, 6122, 6124, 6126, 6128, 6130, 6132, 6134, 6136, 6138, 6140, 6142, 6144, 6146, 6148, 6150, 6152, 6154, 6156, 6158, 6160, 6162, 6164, 6166, 6168, 6170, 6172, 6174, 6176, 6178, 6180, 6182, 6184, 6186, 6188, 6190, 6192, 6194, 6196, 6198, 6200, 6202, 6204, 6206, 6208, 6210, 6212, 6214, 6216, 6218, 6220, 6222, 6224, 6226, 6228, 6230, 6232, 6234, 6236, 6238, 6240, 6242, 6244, 6246, 6248, 6250, 6252, 6254, 6256, 6258, 6260, 6262, 6264, 6266, 6268, 6270, 6272, 6274, 6276, 6278, 6280, 6282, 6284, 6286, 6288, 6290, 6292, 6294, 6296, 6298, 6300, 6302, 6304, 6306, 6308, 6310, 6312, 6314, 6316, 6318, 6320, 6322, 6324, 6326, 6328, 6330, 6332, 6334, 6336, 6338, 6340, 6342, 6344, 6346, 6348, 6350, 6352, 6354, 6356, 6358, 6360, 6362, 6364, 6366, 6368, 6370, 6372, 6374, 6376, 6378, 6380, 6382, 6384, 6386, 6388, 6390, 6392, 6394, 6396, 6398, 6400, 6402, 6404, 6406, 6408, 6410, 6412, 6414, 6416, 6418, 6420, 6422, 6424, 6426, 6428, 6430, 6432, 6434, 6436, 6438, 6440, 6442, 6444, 6446, 6448, 6450, 6452, 6454, 6456, 6458, 6460, 6462, 6464, 6466, 6468, 6470, 6472, 6474, 6476, 6478, 6480, 6482, 6484, 6486, 6488, 6490, 6492, 6494, 6496, 6498, 6500, 6502, 6504, 6506, 6508, 6510, 6512, 6514, 6516, 6518, 6520, 6522, 6524, 6526, 6528, 6530, 6532, 6534, 6536, 6538, 6540, 6542, 6544, 6546, 6548, 6550, 6552, 6554, 6556, 6558, 6560, 6562, 6564, 6566, 6568, 6570, 6572, 6574, 6576, 6578, 6580, 6582, 6584, 6586, 6588, 6590, 6592, 6594, 6596, 6598, 6600, 6602, 6604, 6606, 6608, 6610, 6612, 6614, 6616, 6618, 6620, 6622, 6624, 6626, 6628, 6630, 6632, 6634, 6636, 6638, 6640, 6642, 6644, 6646, 6648, 6650, 6652, 6654, 6656, 6658, 6660, 6662, 6664, 6666, 6668, 6670, 6672, 6674, 6676, 6678, 6680, 6682, 6684, 6686, 6688, 6690, 6692, 6694, 6696, 6698, 6700, 6702, 6704, 6706, 6708, 6710, 6712, 6714, 6716, 6718, 6720, 6722, 6724, 6726, 6728, 6730, 6732, 6734, 6736, 6738, 6740, 6742, 6744, 6746, 6748, 6750, 6752, 6754, 6756, 6758, 6760, 6762, 6764, 6766, 6768, 6770, 6772, 6774, 6776, 6778, 6780, 6782, 6784, 6786, 6788, 6790, 6792, 6794, 6796, 6798, 6800, 6802, 6804, 6806, 6808, 6810, 6812, 6814, 6816, 6818, 6820, 6822, 6824, 6826, 6828, 6830, 6832, 6834, 6836, 6838, 6840, 6842, 6844, 6846, 6848, 6850, 6852, 6854, 6856, 6858, 6860, 6862, 6864, 6866, 6868, 6870, 6872, 6874, 6876, 6878, 6880, 6882, 6884, 6886, 6888, 6890, 6892, 6894, 6896, 6898, 6900, 6902, 6904, 6906, 6908, 6910, 6912, 6914, 6916, 6918, 6920, 6922, 6924, 6926, 6928, 6930, 6932, 6934, 6936, 6938, 6940, 6942, 6944, 6946, 6948, 6950, 6952, 6954, 6956, 6958, 6960, 6962, 6964, 6966, 6968, 6970, 6972, 6974, 6976, 6978, 6980, 6982, 6984, 6986, 6988, 6990, 6992, 6994, 6996, 6998, 7000, 7002, 7004, 7006, 7008, 7010, 7012, 7014, 7016, 7018, 7020, 7022, 7024, 7026, 7028, 7030, 7032, 7034, 7036, 7038, 7040, 7042, 7044, 7046, 7048, 7050, 7052, 7054, 7056, 7058, 7060, 7062, 7064, 7066, 7068, 7070, 7072, 7074, 7076, 7078, 7080, 7082, 7084, 7086, 7088, 7090, 7092, 7094, 7096, 7098, 7100, 7102, 7104, 7106, 7108, 7110, 7112, 7114, 7116, 7118, 7120, 7122, 7124, 7126, 7128, 7130, 7132, 7134, 7136, 7138, 7140, 7142, 7144, 7146, 7148, 7150, 7152, 7154, 7156, 7158, 7160, 7162, 7164, 7166, 7168, 7170, 7172, 7174, 7176, 7178, 7180, 7182, 7184, 7186, 7188, 7190, 7192, 7194, 7196, 7198, 7200, 7202, 7204, 7206, 7208, 7210, 7212, 7214, 7216, 7218, 7220, 7222, 7224, 7226, 7228, 7230, 7232, 7234, 7236, 7238, 7240, 7242, 7244, 7246, 7248, 7250, 7252, 7254, 7256, 7258, 7260, 7262, 7264, 7266, 7268, 7270, 7272, 7274, 7276, 7278, 7280, 7282, 7284, 7286, 7288, 7290, 7292, 7294, 7296, 7298, 7300, 7302, 7304, 7306, 7308, 7310, 7312, 7314, 7316, 7318, 7320, 7322, 7324, 7326, 7328, 7330, 7332, 7334, 7336, 7338, 7340, 7342, 7344, 7346, 7348, 7350, 7352, 7354, 7356, 7358, 7360, 7362, 7364, 7366, 7368, 7370, 7372, 7374, 7376, 7378, 7380, 7382, 7384, 7386, 7388, 7390, 7392, 7394, 7396, 7398, 7400, 7402, 7404, 7406, 7408, 7410, 7412, 7414, 7416, 7418, 7420, 7422, 7424, 7426, 7428, 7430, 7432, 7434, 7436, 7438, 7440, 7442, 7444, 7446, 7448, 7450, 7452, 7454, 7456, 7458, 7460, 7462, 7464, 7466, 7468, 7470, 7472, 7474, 7476, 7478, 7480, 7482, 7484, 7486, 7488, 7490, 7492, 7494, 7496, 7498, 7500, 7502, 7504, 7506, 7508, 7510, 7512, 7514, 7516, 7518, 7520, 7522, 7524, 7526, 7528, 7530, 7532, 7534, 7536, 7538, 7540, 7542, 7544, 7546, 7548, 7550, 7552, 7554, 7556, 7558, 7560, 7562, 7564, 7566, 7568, 7570, 7572, 7574, 7576, 7578, 7580, 7582, 7584, 7586, 7588, 7590, 7592, 7594, 7596, 7598, 7600, 7602, 7604, 7606, 7608, 7610, 7612, 7614, 7616, 7618, 7620, 7622, 7624, 7626, 7628, 7630, 7632, 7634, 7636, 7638, 7640, 7642, 7644, 7646, 7648, 7650, 7652, 7654, 7656, 7658, 7660, 7662, 7664, 7666, 7668, 7670, 7672, 7674, 7676, 7678, 7680, 7682, 7684, 7686, 7688, 7690, 7692, 7694, 7696, 7698, 7700, 7702, 7704, 7706, 7708, 7710, 7712, 7714, 7716, 7718, 7720, 7722, 7724, 7726, 7728, 7730, 7732, 7734, 7736, 7738, 7740, 7742, 7744, 7746, 7748, 7750, 7752, 7754, 7756, 7758, 7760, 7762, 7764, 7766, 7768, 7770, 7772, 7774, 7776, 7778, 7780, 7782, 7784, 7786, 7788, 7790, 7792, 7794, 7796, 7798, 7800, 7802, 7804, 7806, 7808, 7810, 7812, 7814, 7816, 7818, 7820, 7822, 7824, 7826, 7828, 7830, 7832, 7834, 7836, 7838, 7840, 7842, 7844, 7846, 7848, 7850, 7852, 7854, 7856, 7858, 7860, 7862, 7864, 7866, 7868, 7870, 7872, 7874, 7876, 7878, 7880, 7882, 7884, 7886, 7888, 7890, 7892, 7894, 7896, 7898, 7900, 7902, 7904, 7906, 7908, 7910, 7912, 7914, 7916, 7918, 7920, 7922, 7924, 7926, 7928, 7930, 7932, 7934, 7936, 7938, 7940, 7942, 7944, 7946, 7948, 7950, 7952, 7954, 7956, 7958, 7960, 7962, 7964, 7966, 7968, 7970, 7972, 7974, 7976, 7978, 7980, 7982, 7984, 7986, 7988, 7990, 7992, 7994, 7996, 7998, 8000, 8002, 8004, 8006, 8008, 8010, 8012, 8014, 8016, 8018, 8020, 8022, 8024, 8026, 8028, 8030, 8032, 8034, 8036, 8038, 8040, 8042, 8044, 8046, 8048, 8050, 8052, 8054, 8056, 8058, 8060, 8062, 8064, 8066, 8068, 8070, 8072, 8074, 8076, 8078, 8080, 8082, 8084, 8086, 8088, 8090, 8092, 8094, 8096, 8098, 8100, 8102, 8104, 8106, 8108, 8110, 8112, 8114, 8116, 8118, 8120, 8122, 8124, 8126, 8128, 8130, 8132, 8134, 8136, 8138, 8140, 8142, 8144, 8146, 8148, 8150, 8152, 8154, 8156, 8158, 8160, 8162, 8164, 8166, 8168, 8170, 8172, 8174, 8176, 8178, 8180, 8182, 8184, 8186, 8188, 8190, 8192, 8194, 8196, 8198, 8200, 8202, 8204, 8206, 8208, 8210, 8212, 8214, 8216, 8218, 8220, 8222, 8224, 8226, 8228, 8230, 8232, 8234, 8236, 8238, 8240, 8242, 8244, 8246, 8248, 8250, 8252, 8254, 8256, 8258, 8260, 8262, 8264, 8266, 8268, 8270, 8272, 8274, 8276, 8278, 8280, 8282, 8284, 8286, 8288, 8290, 8292, 8294, 8296, 8298, 8300, 8302, 8304, 8306, 8308, 8310, 8312, 8314, 8316, 8318, 8320, 8322, 8324, 8326, 8328, 8330, 8332, 8334, 8336, 8338, 8340, 8342, 8344, 8346, 8348, 8350, 8352, 8354, 8356, 8358, 8360, 8362, 8364, 8366, 8368, 8370, 8372, 8374, 8376, 8378, 8380, 8382, 8384, 8386, 8388, 8390, 8392, 8394, 8396, 8398, 8400, 8402, 8404, 8406, 8408, 8410, 8412, 8414, 8416, 8418, 8420, 8422, 8424, 8426, 8428, 8430, 8432, 8434, 8436, 8438, 8440, 8442, 8444, 8446, 8448, 8450, 8452, 8454, 8456, 8458, 8460, 8462, 8464, 8466, 8468, 8470, 8472, 8474, 8476, 8478, 8480, 8482, 8484, 8486, 8488, 8490, 8492, 8494, 8496, 8498, 8500, 8502, 8504, 8506, 8508, 8510, 8512, 8514, 8516, 8518, 8520, 8522, 8524, 8526, 8528, 8530, 8532, 8534, 8536, 8538, 8540, 8542, 8544, 8546, 8548, 8550, 8552, 8554, 8556, 8558, 8560, 8562, 8564, 8566, 8568, 8570, 8572, 8574, 8576, 8578, 8580, 8582, 8584, 8586, 8588, 8590, 8592, 8594, 8596, 8598, 8600, 8602, 8604, 8606, 8608, 8610, 8612, 8614, 8616, 8618, 8620, 8622, 8624, 8626, 8628, 8630, 8632, 8634, 8636, 8638, 8640, 8642, 8644, 8646, 8648, 8650, 8652, 8654, 8656, 8658, 8660, 8662, 8664, 8666, 8668, 8670, 8672, 8674, 8676, 8678, 8680, 8682, 8684, 8686, 8688, 8690, 8692, 8694, 8696, 8698, 8700, 8702, 8704, 8706, 8708, 8710, 8712, 8714, 8716, 8718, 8720, 8722, 8724, 8726, 8728, 8730, 8732, 8734, 8736, 8738, 8740, 8742, 8744, 8746, 8748, 8750, 8752, 8754, 8756, 8758, 8760, 8762, 8764, 8766, 8768, 8770, 8772, 8774, 8776, 8778, 8780, 8782, 8784, 8786, 8788, 8790, 8792, 8794, 8796, 8798, 8800, 8802, 8804, 8806, 8808, 8810, 8812, 8814, 8816, 8818, 8820, 8822, 8824, 8826, 8828, 8830, 8832, 8834, 8836, 8838, 8840, 8842, 8844, 8846, 8848, 8850, 8852, 8854, 8856, 8858, 8860, 8862, 8864, 8866, 8868, 8870, 8872, 8874, 8876, 8878, 8880, 8882, 8884, 8886, 8888, 8890, 8892, 8894, 8896, 8898, 8900, 8902, 8904, 8906, 8908, 8910, 8912, 8914, 8916, 8918, 8920, 8922, 8924, 8926, 8928, 8930, 8932, 8934, 8936, 8938, 8940, 8942, 8944, 8946, 8948, 8950, 8952, 8954, 8956, 8958, 8960, 8962, 8964, 8966, 8968, 8970, 8972, 8974, 8976, 8978, 8980, 8982, 8984, 8986, 8988, 8990, 8992, 8994, 8996, 8998, 9000, 9002, 9004, 9006, 9008, 9010, 9012, 9014, 9016, 9018, 9020, 9022, 9024, 9026, 9028, 9030, 9032, 9034, 9036, 9038, 9040, 9042, 9044, 9046, 9048, 9050, 9052, 9054, 9056, 9058, 9060, 9062, 9064, 9066, 9068, 9070, 9072, 9074, 9076, 9078, 9080, 9082, 9084, 9086, 9088, 9090, 9092, 9094, 9096, 9098, 9100, 9102, 9104, 9106, 9108, 9110, 9112, 9114, 9116, 9118, 9120, 9122, 9124, 9126, 9128, 9130, 9132, 9134, 9136, 9138, 9140, 9142, 9144, 9146, 9148, 9150, 9152, 9154, 9156, 9158, 9160, 9162, 9164, 9166, 9168, 9170, 9172, 9174, 9176, 9178, 9180, 9182, 9184, 9186, 9188, 9190, 9192, 9194, 9196, 9198, 9200, 9202, 9204, 9206, 9208, 9210, 9212, 9214, 9216, 9218, 9220, 9222, 9224, 9226, 9228, 9230, 9232, 9234, 9236, 9238, 9240, 9242, 9244, 9246, 9248, 9250, 9252, 9254, 9256, 9258, 9260, 9262, 9264, 9266, 9268, 9270, 9272, 9274, 9276, 9278, 9280, 9282, 9284, 9286, 9288, 9290, 9292, 9294, 9296, 9298, 9300, 9302, 9304, 9306, 9308, 9310, 9312, 9314, 9316, 9318, 9320, 9322, 9324, 9326, 9328, 9330, 9332, 9334, 9336, 9338, 9340, 9342, 9344, 9346, 9348, 9350, 9352, 9354, 9356, 9358, 9360, 9362, 9364, 9366, 9368, 9370, 9372, 9374, 9376, 9378, 9380, 9382, 9384, 9386, 9388, 9390, 9392, 9394, 9396, 9398, 9400, 9402, 9404, 9406, 9408, 9410, 9412, 9414, 9416, 9418, 9420, 9422, 9424, 9426, 9428, 9430, 9432, 9434, 9436, 9438, 9440, 9442, 9444, 9446, 9448, 9450, 9452, 9454, 9456, 9458, 9460, 9462, 9464, 9466, 9468, 9470, 9472, 9474, 9476, 9478, 9480, 9482, 9484, 9486, 9488, 9490, 9492, 9494, 9496, 9498, 9500, 9502, 9504, 9506, 9508, 9510, 9512, 9514, 9516, 9518, 9520, 9522, 9524, 9526, 9528, 9530, 9532, 9534, 9536, 9538, 9540, 9542, 9544, 9546, 9548, 9550, 9552, 9554, 9556, 9558, 9560, 9562, 9564, 9566, 9568, 9570, 9572, 9574, 9576, 9578, 9580, 9582, 9584, 9586, 9588, 9590, 9592, 9594, 9596, 9598, 9600, 9602, 9604, 9606, 9608, 9610, 9612, 9614, 9616, 9618, 9620, 9622, 9624, 9626, 9628, 9630, 9632, 9634, 9636, 9638, 9640, 9642, 9644, 9646, 9648, 9650, 9652, 9654, 9656, 9658, 9660, 9662, 9664, 9666, 9668, 9670, 9672, 9674, 9676, 9678, 9680, 9682, 9684, 9686, 9688, 9690, 9692, 9694, 9696, 9698, 9700, 9702, 9704, 9706, 9708, 9710, 9712, 9714, 9716, 9718, 9720, 9722, 9724, 9726, 9728, 9730, 9732, 9734, 9736, 9738, 9740, 9742, 9744, 9746, 9748, 9750, 9752, 9754, 9756, 9758, 9760, 9762, 9764, 9766, 9768, 9770, 9772, 9774, 9776, 9778, 9780, 9782, 9784, 9786, 9788, 9790, 9792, 9794, 9796, 9798, 9800, 9802, 9804, 9806, 9808, 9810, 9812, 9814, 9816, 9818, 9820, 9822, 9824, 9826, 9828, 9830, 9832, 9834, 9836, 9838, 9840, 9842, 9844, 9846, 9848, 9850, 9852, 9854, 9856, 9858, 9860, 9862, 9864, 9866, 9868, 9870, 9872, 9874, 9876, 9878, 9880, 9882, 9884, 9886, 9888, 9890, 9892, 9894, 9896, 9898, 9900, 9902, 9904, 9906, 9908, 9910, 9912, 9914, 9916, 9918, 9920, 9922, 9924, 9926, 9928, 9930, 9932, 9934, 9936, 9938, 9940, 9942, 9944, 9946, 9948, 9950, 9952, 9954, 9956, 9958, 9960, 9962, 9964, 9966, 9968, 9970, 9972, 9974, 9976, 9978, 9980, 9982, 9984, 9986, 9988, 9990, 9992, 9994, 9996, 9998, 10000, 10002, 10004, 10006, 10008, 10010, 10012, 10014, 10016, 10018, 10020, 10022, 10024, 10026, 10028, 10030, 10032, 10034, 10036, 10038, 10040, 10042, 10044, 10046, 10048, 10050, 10052, 10054, 10056, 10058, 10060, 10062, 10064, 10066, 10068, 10070, 10072, 10074, 10076, 10078, 10080, 10082, 10084, 10086, 10088, 10090, 10092, 10094, 10096, 10098, 10100, 10102, 10104, 10106, 10108, 10110, 10112, 10114, 10116, 10118, 10120, 10122, 10124, 10126, 10128, 10130, 10132, 10134, 10136, 10138, 10140, 10142, 10144, 10146, 10148, 10150, 10152, 10154, 10156, 10158, 10160, 10162, 10164, 10166, 10168, 10170, 10172, 10174, 10176, 10178, 10180, 10182, 10184, 10186, 10188, 10190, 10192, 10194, 10196, 10198, 10200, 10202, 10204, 10206, 10208, 10210, 10212, 10214, 10216, 10218, 10220, 10222, 10224, 10226, 10228, 10230, 10232, 10234, 10236, 10238, 10240, 10242, 10244, 10246, 10248, 10250, 10252, 10254, 10256, 10258, 10260, 10262, 10264, 10266, 10268, 10270, 10272, 10274, 10276, 10278, 10280, 10282, 10284, 10286, 10288, 10290, 10292, 10294, 10296, 10298, 10300, 10302, 10304, 10306, 10308, 10310, 10312, 10314, 10316, 10318, 10320, 10322, 10324, 10326, 10328, 10330, 10332, 10334, 10336, 10338, 10340, 10342, 10344, 10346, 10348, 10350, 10352, 10354, 10356, 10358, 10360, 10362, 10364, 10366, 10368, 10370, 10372, 10374, 10376, 10378, 10380, 10382, 10384, 10386, 10388, 10390, 10392, 10394, 10396, 10398, 10400, 10402, 10404, 10406, 10408, 10410, 10412, 10414, 10416, 10418, 10420, 10422, 10424, 10426, 10428, 10430, 10432, 10434, 10436, 10438, 10440, 10442, 10444, 10446, 10448, 10450, 10452, 10454, 10456, 10458, 10460, 10462, 10464, 10466, 10468, 10470, 10472, 10474, 10476, 10478, 10480, 10482, 10484, 10486, 10488, 10490, 10492, 10494, 10496, 10498, 10500, 10502, 10504, 10506, 10508, 10510, 10512, 10514, 10516, 10518, 10520, 10522, 10524, 10526, 10528, 10530, 10532, 10534, 10536, 10538, 10540, 10542, 10544, 10546, 10548, 10550, 10552, 10554, 10556, 10558, 10560, 10562, 10564, 10566, 10568, 10570, 10572, 10574, 10576, 10578, 10580, 10582, 10584, 10586, 10588, 10590, 10592, 10594, 10596, 10598, 10600, 10602, 10604, 10606, 10608, 10610, 10612, 10614, 10616, 10618, 10620, 10622, 10624, 10626, 10628, 10630, 10632, 10634, 10636, 10638, 10640, 10642, 10644, 10646, 10648, 10650, 10652, 10654, 10656, 10658, 10660, 10662, 10664, 10666, 10668, 10670, 10672, 10674, 10676, 10678, 10680, 10682, 10684, 10686, 10688, 10690, 10692, 10694, 10696, 10698, 10700, 10702, 10704, 10706, 10708, 10710, 10712, 10714, 10716, 10718, 10720, 10722, 10724, 10726, 10728, 10730, 10732, 10734, 10736, 10738, 10740, 10742, 10744, 10746, 10748, 10750, 10752, 10754, 10756, 10758, 10760, 10762, 10764, 10766, 10768, 10770, 10772, 10774, 10776, 10778, 10780, 10782, 10784, 10786, 10788, 10790, 10792, 10794, 10796, 10798, 10800, 10802, 10804, 10806, 10808, 10810, 10812, 10814, 10816, 10818, 10820, 10822, 10824, 10826, 10828, 10830, 10832, 10834, 10836, 10838, 10840, 10842, 10844, 10846, 10848, 10850, 10852, 10854, 10856, 10858, 10860, 10862, 10864, 10866, 10868, 10870, 10872, 10874, 10876, 10878, 10880, 10882, 10884, 10886, 10888, 10890, 10892, 10894, 10896, 10898, 10900, 10902, 10904, 10906, 10908, 10910, 10912, 10914, 10916, 10918, 10920, 10922, 10924, 10926, 10928, 10930, 10932, 10934, 10936, 10938, 10940, 10942, 10944, 10946, 10948, 10950, 10952, 10954, 10956, 10958, 10960, 10962, 10964 and 10966.

4. An antibody which binds to a protein according to any one of claims 1 to 3.

5. The antibody of claim 4, wherein said antibody is a monoclonal antibody, a chimeric antibody, a humanised antibody, or a fully human antibody.

6. A nucleic acid molecule which encodes a protein according to any one of claims 1 to 3.

7. A nucleic acid molecule according to claim 6, comprising a nucleotide sequence selected from the group consisting of SEQ IDs 1, 3, 5, 7, 9, 11, 13, 15, 17, 19, 21, 23, 25, 27, 29, 31, 33, 35, 37, 39, 41, 43, 45, 47, 49, 51, 53, 55, 57, 59, 61, 63, 65, 67, 69, 71, 73, 75, 77, 79, 81, 83, 85, 87, 89, 91, 93, 95, 97, 99, 101, 103, 105, 107, 109, 111, 113, 115, 117, 119, 121, 123, 125, 127, 129, 131, 133, 135, 137, 139, 141, 143, 145, 147, 149, 151, 153, 155, 157, 159, 161, 163, 165, 167, 169, 171, 173, 175, 177, 179, 181, 183, 185, 187, 189, 191, 193, 195, 197, 199, 201, 203, 205, 207, 209, 211, 213, 215, 217, 219, 221, 223, 225, 227, 229, 231, 233, 235, 237, 239, 241, 243, 245, 247, 249, 251, 253, 255, 257, 259, 261, 263, 265, 267, 269, 271, 273, 275, 277, 279, 281, 283, 285, 287, 289, 291, 293, 295, 297, 299, 301, 303, 305, 307, 309, 311, 313, 315, 317, 319, 321, 323, 325, 327, 329, 331, 333, 335, 337, 339, 341, 343, 345, 347, 349, 351, 353, 355, 357, 359, 361, 363, 365, 367, 369, 371, 373, 375, 377, 379, 381, 383, 385, 387, 389, 391, 393, 395, 397, 399, 401, 403, 405, 407, 409, 411, 413, 415, 417, 419, 421, 423, 425, 427, 429, 431, 433, 435, 437, 439, 441, 443, 445, 447, 449, 451, 453, 455, 457, 459, 461, 463, 465, 467, 469, 471, 473, 475, 477, 479, 481, 483, 485, 487, 489, 491, 493, 495, 497, 499, 501, 503, 505, 507, 509, 511, 513, 515, 517, 519, 521, 523, 525, 527, 529, 531, 533, 535, 537, 539, 541, 543, 545, 547, 549, 551, 553, 555, 557, 559, 561, 563, 565, 567, 569, 571, 573, 575, 577, 579, 581, 583, 585, 587, 589, 591, 593, 595, 597, 599, 601, 603, 605, 607, 609, 611, 613, 615, 617, 619, 621, 623, 625, 627, 629, 631, 633, 635, 637, 639, 641, 643, 645, 647, 649, 651, 653, 655, 657, 659, 661, 663, 665, 667, 669, 671, 673, 675, 677, 679, 681, 683, 685, 687, 689, 691, 693, 695, 697, 699, 701, 703, 705, 707, 709, 711, 713, 715, 717, 719, 721, 723, 725, 727, 729, 731, 733, 735, 737, 739, 741, 743, 745, 747, 749, 751, 753, 755, 757, 759, 761, 763, 765, 767, 769, 771, 773, 775, 777, 779, 781, 783, 785, 787, 789, 791, 793, 795, 797, 799, 801, 803, 805, 807, 809, 811, 813, 815, 817, 819, 821, 823, 825, 827, 829, 831, 833, 835, 837, 839, 841, 843, 845, 847, 849, 851, 853, 855, 857, 859, 861, 863, 865, 867, 869, 871, 873, 875, 877, 879, 881, 883, 885, 887, 889, 891, 893, 895, 897, 899, 901, 903, 905, 907, 909, 911, 913, 915, 917, 919, 921, 923, 925, 927, 929, 931, 933, 935, 937, 939, 941, 943, 945, 947, 949, 951, 953, 955, 957, 959, 961, 963, 965, 967, 969, 971, 973, 975, 977, 979, 981, 983, 985, 987, 989, 991, 993, 995, 997, 999, 1001, 1003, 1005, 1007, 1009, 1011, 1013, 1015, 1017, 1019, 1021, 1023, 1025, 1027, 1029, 1031, 1033, 1035, 1037, 1039, 1041, 1043, 1045, 1047, 1049, 1051, 1053, 1055, 1057, 1059, 1061, 1063, 1065, 1067, 1069, 1071, 1073, 1075, 1077, 1079, 1081, 1083, 1085, 1087, 1089, 1091, 1093, 1095, 1097, 1099, 1101, 1103, 1105, 1107, 1109, 1111, 1113, 1115, 1117, 1119, 1121, 1123, 1125, 1127, 1129, 1131, 1133, 1135, 1137, 1139, 1141, 1143, 1145, 1147, 1149, 1151, 1153, 1155, 1157, 1159, 1161, 1163, 1165, 1167, 1169, 1171, 1173, 1175, 1177, 1179, 1181, 1183, 1185, 1187, 1189, 1191, 1193, 1195, 1197, 1199, 1201, 1203, 1205, 1207, 1209, 1211, 1213, 1215, 1217, 1219, 1221, 1223, 1225, 1227, 1229, 1231, 1233, 1235, 1237, 1239, 1241, 1243, 1245, 1247, 1249, 1251, 1253, 1255, 1257, 1259, 1261, 1263, 1265, 1267, 1269, 1271, 1273, 1275, 1277, 1279, 1281, 1283, 1285, 1287, 1289, 1291, 1293, 1295, 1297, 1299, 1301, 1303, 1305, 1307, 1309, 1311, 1313, 1315, 1317, 1319, 1321, 1323, 1325, 1327, 1329, 1331, 1333, 1335, 1337, 1339, 1341, 1343, 1345, 1347, 1349, 1351, 1353, 1355, 1357, 1359, 1361, 1363, 1365, 1367, 1369, 1371, 1373, 1375, 1377, 1379, 1381, 1383, 1385, 1387, 1389, 1391, 1393, 1395, 1397, 1399, 1401, 1403, 1405, 1407, 1409, 1411, 1413, 1415, 1417, 1419, 1421, 1423, 1425, 1427, 1429, 1431, 1433, 1435, 1437, 1439, 1441, 1443, 1445, 1447, 1449, 1451, 1453, 1455, 1457, 1459, 1461, 1463, 1465, 1467, 1469, 1471, 1473, 1475, 1477, 1479, 1481, 1483, 1485, 1487, 1489, 1491, 1493, 1495, 1497, 1499, 1501, 1503, 1505, 1507, 1509, 1511, 1513, 1515, 1517, 1519, 1521, 1523, 1525, 1527, 1529, 1531, 1533, 1535, 1537, 1539, 1541, 1543, 1545, 1547, 1549, 1551, 1553, 1555, 1557, 1559, 1561, 1563, 1565, 1567, 1569, 1571, 1573, 1575, 1577, 1579, 1581, 1583, 1585, 1587, 1589, 1591, 1593, 1595, 1597, 1599, 1601, 1603, 1605, 1607, 1609, 1611, 1613, 1615, 1617, 1619, 1621, 1623, 1625, 1627, 1629, 1631, 1633, 1635, 1637, 1639, 1641, 1643, 1645, 1647, 1649, 1651, 1653, 1655, 1657, 1659, 1661, 1663, 1665, 1667, 1669, 1671, 1673, 1675, 1677, 1679, 1681, 1683, 1685, 1687, 1689, 1691, 1693, 1695, 1697, 1699, 1701, 1703, 1705, 1707, 1709, 1711, 1713, 1715, 1717, 1719, 1721, 1723, 1725, 1727, 1729, 1731, 1733, 1735, 1737, 1739, 1741, 1743, 1745, 1747, 1749, 1751, 1753, 1755, 1757, 1759, 1761, 1763, 1765, 1767, 1769, 1771, 1773, 1775, 1777, 1779, 1781, 1783, 1785, 1787, 1789, 1791, 1793, 1795, 1797, 1799, 1801, 1803, 1805, 1807, 1809, 1811, 1813, 1815, 1817, 1819, 1821, 1823, 1825, 1827, 1829, 1831, 1833, 1835, 1837, 1839, 1841, 1843, 1845, 1847, 1849, 1851, 1853, 1855, 1857, 1859, 1861, 1863, 1865, 1867, 1869, 1871, 1873, 1875, 1877, 1879, 1881, 1883, 1885, 1887, 1889, 1891, 1893, 1895, 1897, 1899, 1901, 1903, 1905, 1907, 1909, 1911, 1913, 1915, 1917, 1919, 1921, 1923, 1925, 1927, 1929, 1931, 1933, 1935, 1937, 1939, 1941, 1943, 1945, 1947, 1949, 1951, 1953, 1955, 1957, 1959, 1961, 1963, 1965, 1967, 1969, 1971, 1973, 1975, 1977, 1979, 1981, 1983, 1985, 1987, 1989, 1991, 1993, 1995, 1997, 1999, 2001, 2003, 2005, 2007, 2009, 2011, 2013, 2015, 2017, 2019, 2021, 2023, 2025, 2027, 2029, 2031, 2033, 2035, 2037, 2039, 2041, 2043, 2045, 2047, 2049, 2051, 2053, 2055, 2057, 2059, 2061, 2063, 2065, 2067, 2069, 2071, 2073, 2075, 2077, 2079, 2081, 2083, 2085, 2087, 2089, 2091, 2093, 2095, 2097, 2099, 2101, 2103, 2105, 2107, 2109, 2111, 2113, 2115, 2117, 2119, 2121, 2123, 2125, 2127, 2129, 2131, 2133, 2135, 2137, 2139, 2141, 2143, 2145, 2147, 2149, 2151, 2153, 2155, 2157, 2159, 2161, 2163, 2165, 2167, 2169, 2171, 2173, 2175, 2177, 2179, 2181, 2183, 2185, 2187, 2189, 2191, 2193, 2195, 2197, 2199, 2201, 2203, 2205, 2207, 2209, 2211, 2213, 2215, 2217, 2219, 2221, 2223, 2225, 2227, 2229, 2231, 2233, 2235, 2237, 2239, 2241, 2243, 2245, 2247, 2249, 2251, 2253, 2255, 2257, 2259, 2261, 2263, 2265, 2267, 2269, 2271, 2273, 2275, 2277, 2279, 2281, 2283, 2285, 2287, 2289, 2291, 2293, 2295, 2297, 2299, 2301, 2303, 2305, 2307, 2309, 2311, 2313, 2315, 2317, 2319, 2321, 2323, 2325, 2327, 2329, 2331, 2333, 2335, 2337, 2339, 2341, 2343, 2345, 2347, 2349, 2351, 2353, 2355, 2357, 2359, 2361, 2363, 2365, 2367, 2369, 2371, 2373, 2375, 2377, 2379, 2381, 2383, 2385, 2387, 2389, 2391, 2393, 2395, 2397, 2399, 2401, 2403, 2405, 2407, 2409, 2411, 2413, 2415, 2417, 2419, 2421, 2423, 2425, 2427, 2429, 2431, 2433, 2435, 2437, 2439, 2441, 2443, 2445, 2447, 2449, 2451, 2453, 2455, 2457, 2459, 2461, 2463, 2465, 2467, 2469, 2471, 2473, 2475, 2477, 2479, 2481, 2483, 2485, 2487, 2489, 2491, 2493, 2495, 2497, 2499, 2501, 2503, 2505, 2507, 2509, 2511, 2513, 2515, 2517, 2519, 2521, 2523, 2525, 2527, 2529, 2531, 2533, 2535, 2537, 2539, 2541, 2543, 2545, 2547, 2549, 2551, 2553, 2555, 2557, 2559, 2561, 2563, 2565, 2567, 2569, 2571, 2573, 2575, 2577, 2579, 2581, 2583, 2585, 2587, 2589, 2591, 2593, 2595, 2597, 2599, 2601, 2603, 2605, 2607, 2609, 2611, 2613, 2615, 2617, 2619, 2621, 2623, 2625, 2627, 2629, 2631, 2633, 2635, 2637, 2639, 2641, 2643, 2645, 2647, 2649, 2651, 2653, 2655, 2657, 2659, 2661, 2663, 2665, 2667, 2669, 2671, 2673, 2675, 2677, 2679, 2681, 2683, 2685, 2687, 2689, 2691, 2693, 2695, 2697, 2699, 2701, 2703, 2705, 2707, 2709, 2711, 2713, 2715, 2717, 2719, 2721, 2723, 2725, 2727, 2729, 2731, 2733, 2735, 2737, 2739, 2741, 2743, 2745, 2747, 2749, 2751, 2753, 2755, 2757, 2759, 2761, 2763, 2765, 2767, 2769, 2771, 2773, 2775, 2777, 2779, 2781, 2783, 2785, 2787, 2789, 2791, 2793, 2795, 2797, 2799, 2801, 2803, 2805, 2807, 2809, 2811, 2813, 2815, 2817, 2819, 2821, 2823, 2825, 2827, 2829, 2831, 2833, 2835, 2837, 2839, 2841, 2843, 2845, 2847, 2849, 2851, 2853, 2855, 2857, 2859, 2861, 2863, 2865, 2867, 2869, 2871, 2873, 2875, 2877, 2879, 2881, 2883, 2885, 2887, 2889, 2891, 2893, 2895, 2897, 2899, 2901, 2903, 2905, 2907, 2909, 2911, 2913, 2915, 2917, 2919, 2921, 2923, 2925, 2927, 2929, 2931, 2933, 2935, 2937, 2939, 2941, 2943, 2945, 2947, 2949, 2951, 2953, 2955, 2957, 2959, 2961, 2963, 2965, 2967, 2969, 2971, 2973, 2975, 2977, 2979, 2981, 2983, 2985, 2987, 2989, 2991, 2993, 2995, 2997, 2999, 3001, 3003, 3005, 3007, 3009, 3011, 3013, 3015, 3017, 3019, 3021, 3023, 3025, 3027, 3029, 3031, 3033, 3035, 3037, 3039, 3041, 3043, 3045, 3047, 3049, 3051, 3053, 3055, 3057, 3059, 3061, 3063, 3065, 3067, 3069, 3071, 3073, 3075, 3077, 3079, 3081, 3083, 3085, 3087, 3089, 3091, 3093, 3095, 3097, 3099, 3101, 3103, 3105, 3107, 3109, 3111, 3113, 3115, 3117, 3119, 3121, 3123, 3125, 3127, 3129, 3131, 3133, 3135, 3137, 3139, 3141, 3143, 3145, 3147, 3149, 3151, 3153, 3155, 3157, 3159, 3161, 3163, 3165, 3167, 3169, 3171, 3173, 3175, 3177, 3179, 3181, 3183, 3185, 3187, 3189, 3191, 3193, 3195, 3197, 3199, 3201, 3203, 3205, 3207, 3209, 3211, 3213, 3215, 3217, 3219, 3221, 3223, 3225, 3227, 3229, 3231, 3233, 3235, 3237, 3239, 3241, 3243, 3245, 3247, 3249, 3251, 3253, 3255, 3257, 3259, 3261, 3263, 3265, 3267, 3269, 3271, 3273, 3275, 3277, 3279, 3281, 3283, 3285, 3287, 3289, 3291, 3293, 3295, 3297, 3299, 3301, 3303, 3305, 3307, 3309, 3311, 3313, 3315, 3317, 3319, 3321, 3323, 3325, 3327, 3329, 3331, 3333, 3335, 3337, 3339, 3341, 3343, 3345, 3347, 3349, 3351, 3353, 3355, 3357, 3359, 3361, 3363, 3365, 3367, 3369, 3371, 3373, 3375, 3377, 3379, 3381, 3383, 3385, 3387, 3389, 3391, 3393, 3395, 3397, 3399, 3401, 3403, 3405, 3407, 3409, 3411, 3413, 3415, 3417, 3419, 3421, 3423, 3425, 3427, 3429, 3431, 3433, 3435, 3437, 3439, 3441, 3443, 3445, 3447, 3449, 3451, 3453, 3455, 3457, 3459, 3461, 3463, 3465, 3467, 3469, 3471, 3473, 3475, 3477, 3479, 3481, 3483, 3485, 3487, 3489, 3491, 3493, 3495, 3497, 3499, 3501, 3503, 3505, 3507, 3509, 3511, 3513, 3515, 3517, 3519, 3521, 3523, 3525, 3527, 3529, 3531, 3533, 3535, 3537, 3539, 3541, 3543, 3545, 3547, 3549, 3551, 3553, 3555, 3557, 3559, 3561, 3563, 3565, 3567, 3569, 3571, 3573, 3575, 3577, 3579, 3581, 3583, 3585, 3587, 3589, 3591, 3593, 3595, 3597, 3599, 3601, 3603, 3605, 3607, 3609, 3611, 3613, 3615, 3617, 3619, 3621, 3623, 3625, 3627, 3629, 3631, 3633, 3635, 3637, 3639, 3641, 3643, 3645, 3647, 3649, 3651, 3653, 3655, 3657, 3659, 3661, 3663, 3665, 3667, 3669, 3671, 3673, 3675, 3677, 3679, 3681, 3683, 3685, 3687, 3689, 3691, 3693, 3695, 3697, 3699, 3701, 3703, 3705, 3707, 3709, 3711, 3713, 3715, 3717, 3719, 3721, 3723, 3725, 3727, 3729, 3731, 3733, 3735, 3737, 3739, 3741, 3743, 3745, 3747, 3749, 3751, 3753, 3755, 3757, 3759, 3761, 3763, 3765, 3767, 3769, 3771, 3773, 3775, 3777, 3779, 3781, 3783, 3785, 3787, 3789, 3791, 3793, 3795, 3797, 3799, 3801, 3803, 3805, 3807, 3809, 3811, 3813, 3815, 3817, 3819, 3821, 3823, 3825, 3827, 3829, 3831, 3833, 3835, 3837, 3839, 3841, 3843, 3845, 3847, 3849, 3851, 3853, 3855, 3857, 3859, 3861, 3863, 3865, 3867, 3869, 3871, 3873, 3875, 3877, 3879, 3881, 3883, 3885, 3887, 3889, 3891, 3893, 3895, 3897, 3899, 3901, 3903, 3905, 3907, 3909, 3911, 3913, 3915, 3917, 3919, 3921, 3923, 3925, 3927, 3929, 3931, 3933, 3935, 3937, 3939, 3941, 3943, 3945, 3947, 3949, 3951, 3953, 3955, 3957, 3959, 3961, 3963, 3965, 3967, 3969, 3971, 3973, 3975, 3977, 3979, 3981, 3983, 3985, 3987, 3989, 3991, 3993, 3995, 3997, 3999, 4001, 4003, 4005, 4007, 4009, 4011, 4013, 4015, 4017, 4019, 4021, 4023, 4025, 4027, 4029, 4031, 4033, 4035, 4037, 4039, 4041, 4043, 4045, 4047, 4049, 4051, 4053, 4055, 4057, 4059, 4061, 4063, 4065, 4067, 4069, 4071, 4073, 4075, 4077, 4079, 4081, 4083, 4085, 4087, 4089, 4091, 4093, 4095, 4097, 4099, 4101, 4103, 4105, 4107, 4109, 4111, 4113, 4115, 4117, 4119, 4121, 4123, 4125, 4127, 4129, 4131, 4133, 4135, 4137, 4139, 4141, 4143, 4145, 4147, 4149, 4151, 4153, 4155, 4157, 4159, 4161, 4163, 4165, 4167, 4169, 4171, 4173, 4175, 4177, 4179, 4181, 4183, 4185, 4187, 4189, 4191, 4193, 4195, 4197, 4199, 4201, 4203, 4205, 4207, 4209, 4211, 4213, 4215, 4217, 4219, 4221, 4223, 4225, 4227, 4229, 4231, 4233, 4235, 4237, 4239, 4241, 4243, 4245, 4247, 4249, 4251, 4253, 4255, 4257, 4259, 4261, 4263, 4265, 4267, 4269, 4271, 4273, 4275, 4277, 4279, 4281, 4283, 4285, 4287, 4289, 4291, 4293, 4295, 4297, 4299, 4301, 4303, 4305, 4307, 4309, 4311, 4313, 4315, 4317, 4319, 4321, 4323, 4325, 4327, 4329, 4331, 4333, 4335, 4337, 4339, 4341, 4343, 4345, 4347, 4349, 4351, 4353, 4355, 4357, 4359, 4361, 4363, 4365, 4367, 4369, 4371, 4373, 4375, 4377, 4379, 4381, 4383, 4385, 4387, 4389, 4391, 4393, 4395, 4397, 4399, 4401, 4403, 4405, 4407, 4409, 4411, 4413, 4415, 4417, 4419, 4421, 4423, 4425, 4427, 4429, 4431, 4433, 4435, 4437, 4439, 4441, 4443, 4445, 4447, 4449, 4451, 4453, 4455, 4457, 4459, 4461, 4463, 4465, 4467, 4469, 4471, 4473, 4475, 4477, 4479, 4481, 4483, 4485, 4487, 4489, 4491, 4493, 4495, 4497, 4499, 4501, 4503, 4505, 4507, 4509, 4511, 4513, 4515, 4517, 4519, 4521, 4523, 4525, 4527, 4529, 4531, 4533, 4535, 4537, 4539, 4541, 4543, 4545, 4547, 4549, 4551, 4553, 4555, 4557, 4559, 4561, 4563, 4565, 4567, 4569, 4571, 4573, 4575, 4577, 4579, 4581, 4583, 4585, 4587, 4589, 4591, 4593, 4595, 4597, 4599, 4601, 4603, 4605, 4607, 4609, 4611, 4613, 4615, 4617, 4619, 4621, 4623, 4625, 4627, 4629, 4631, 4633, 4635, 4637, 4639, 4641, 4643, 4645, 4647, 4649, 4651, 4653, 4655, 4657, 4659, 4661, 4663, 4665, 4667, 4669, 4671, 4673, 4675, 4677, 4679, 4681, 4683, 4685, 4687, 4689, 4691, 4693, 4695, 4697, 4699, 4701, 4703, 4705, 4707, 4709, 4711, 4713, 4715, 4717, 4719, 4721, 4723, 4725, 4727, 4729, 4731, 4733, 4735, 4737, 4739, 4741, 4743, 4745, 4747, 4749, 4751, 4753, 4755, 4757, 4759, 4761, 4763, 4765, 4767, 4769, 4771, 4773, 4775, 4777, 4779, 4781, 4783, 4785, 4787, 4789, 4791, 4793, 4795, 4797, 4799, 4801, 4803, 4805, 4807, 4809, 4811, 4813, 4815, 4817, 4819, 4821, 4823, 4825, 4827, 4829, 4831, 4833, 4835, 4837, 4839, 4841, 4843, 4845, 4847, 4849, 4851, 4853, 4855, 4857, 4859, 4861, 4863, 4865, 4867, 4869, 4871, 4873, 4875, 4877, 4879, 4881, 4883, 4885, 4887, 4889, 4891, 4893, 4895, 4897, 4899, 4901, 4903, 4905, 4907, 4909, 4911, 4913, 4915, 4917, 4919, 4921, 4923, 4925, 4927, 4929, 4931, 4933, 4935, 4937, 4939, 4941, 4943, 4945, 4947, 4949, 4951, 4953, 4955, 4957, 4959, 4961, 4963, 4965, 4967, 4969, 4971, 4973, 4975, 4977, 4979, 4981, 4983, 4985, 4987, 4989, 4991, 4993, 4995, 4997, 4999, 5001, 5003, 5005, 5007, 5009, 5011, 5013, 5015, 5017, 5019, 5021, 5023, 5025, 5027, 5029, 5031, 5033, 5035, 5037, 5039, 5041, 5043, 5045, 5047, 5049, 5051, 5053, 5055, 5057, 5059, 5061, 5063, 5065, 5067, 5069, 5071, 5073, 5075, 5077, 5079, 5081, 5083, 5085, 5087, 5089, 5091, 5093, 5095, 5097, 5099, 5101, 5103, 5105, 5107, 5109, 5111, 5113, 5115, 5117, 5119, 5121, 5123, 5125, 5127, 5129, 5131, 5133, 5135, 5137, 5139, 5141, 5143, 5145, 5147, 5149, 5151, 5153, 5155, 5157, 5159, 5161, 5163, 5165, 5167, 5169, 5171, 5173, 5175, 5177, 5179, 5181, 5183, 5185, 5187, 5189, 5191, 5193, 5195, 5197, 5199, 5201, 5203, 5205, 5207, 5209, 5211, 5213, 5215, 5217, 5219, 5221, 5223, 5225, 5227, 5229, 5231, 5233, 5235, 5237, 5239, 5241, 5243, 5245, 5247, 5249, 5251, 5253, 5255, 5257, 5259, 5261, 5263, 5265, 5267, 5269, 5271, 5273, 5275, 5277, 5279, 5281, 5283, 5285, 5287, 5289, 5291, 5293, 5295, 5297, 5299, 5301, 5303, 5305, 5307, 5309, 5311, 5313, 5315, 5317, 5319, 5321, 5323, 5325, 5327, 5329, 5331, 5333, 5335, 5337, 5339, 5341, 5343, 5345, 5347, 5349, 5351, 5353, 5355, 5357, 5359, 5361, 5363, 5365, 5367, 5369, 5371, 5373, 5375, 5377, 5379, 5381, 5383, 5385, 5387, 5389, 5391, 5393, 5395, 5397, 5399, 5401, 5403, 5405, 5407, 5409, 5411, 5413, 5415, 5417, 5419, 5421, 5423, 5425, 5427, 5429, 5431, 5433, 5435, 5437, 5439, 5441, 5443, 5445, 5447, 5449, 5451, 5453, 5455, 5457, 5459, 5461, 5463, 5465, 5467, 5469, 5471, 5473, 5475, 5477, 5479, 5481, 5483, 5485, 5487, 5489, 5491, 5493, 5495, 5497, 5499, 5501, 5503, 5505, 5507, 5509, 5511, 5513, 5515, 5517, 5519, 5521, 5523, 5525, 5527, 5529, 5531, 5533, 5535, 5537, 5539, 5541, 5543, 5545, 5547, 5549, 5551, 5553, 5555, 5557, 5559, 5561, 5563, 5565, 5567, 5569, 5571, 5573, 5575, 5577, 5579, 5581, 5583, 5585, 5587, 5589, 5591, 5593, 5595, 5597, 5599, 5601, 5603, 5605, 5607, 5609, 5611, 5613, 5615, 5617, 5619, 5621, 5623, 5625, 5627, 5629, 5631, 5633, 5635, 5637, 5639, 5641, 5643, 5645, 5647, 5649, 5651, 5653, 5655, 5657, 5659, 5661, 5663, 5665, 5667, 5669, 5671, 5673, 5675, 5677, 5679, 5681, 5683, 5685, 5687, 5689, 5691, 5693, 5695, 5697, 5699, 5701, 5703, 5705, 5707, 5709, 5711, 5713, 5715, 5717, 5719, 5721, 5723, 5725, 5727, 5729, 5731, 5733, 5735, 5737, 5739, 5741, 5743, 5745, 5747, 5749, 5751, 5753, 5755, 5757, 5759, 5761, 5763, 5765, 5767, 5769, 5771, 5773, 5775, 5777, 5779, 5781, 5783, 5785, 5787, 5789, 5791, 5793, 5795, 5797, 5799, 5801, 5803, 5805, 5807, 5809, 5811, 5813, 5815, 5817, 5819, 5821, 5823, 5825, 5827, 5829, 5831, 5833, 5835, 5837, 5839, 5841, 5843, 5845, 5847, 5849, 5851, 5853, 5855, 5857, 5859, 5861, 5863, 5865, 5867, 5869, 5871, 5873, 5875, 5877, 5879, 5881, 5883, 5885, 5887, 5889, 5891, 5893, 5895, 5897, 5899, 5901, 5903, 5905, 5907, 5909, 5911, 5913, 5915, 5917, 5919, 5921, 5923, 5925, 5927, 5929, 5931, 5933, 5935, 5937, 5939, 5941, 5943, 5945, 5947, 5949, 5951, 5953, 5955, 5957, 5959, 5961, 5963, 5965, 5967, 5969, 5971, 5973, 5975, 5977, 5979, 5981, 5983, 5985, 5987, 5989, 5991, 5993, 5995, 5997, 5999, 6001, 6003, 6005, 6007, 6009, 6011, 6013, 6015, 6017, 6019, 6021, 6023, 6025, 6027, 6029, 6031, 6033, 6035, 6037, 6039, 6041, 6043, 6045, 6047, 6049, 6051, 6053, 6055, 6057, 6059, 6061, 6063, 6065, 6067, 6069, 6071, 6073, 6075, 6077, 6079, 6081, 6083, 6085, 6087, 6089, 6091, 6093, 6095, 6097, 6099, 6101, 6103, 6105, 6107, 6109, 6111, 6113, 6115, 6117, 6119, 6121, 6123, 6125, 6127, 6129, 6131, 6133, 6135, 6137, 6139, 6141, 6143, 6145, 6147, 6149, 6151, 6153, 6155, 6157, 6159, 6161, 6163, 6165, 6167, 6169, 6171, 6173, 6175, 6177, 6179, 6181, 6183, 6185, 6187, 6189, 6191, 6193, 6195, 6197, 6199, 6201, 6203, 6205, 6207, 6209, 6211, 6213, 6215, 6217, 6219, 6221, 6223, 6225, 6227, 6229, 6231, 6233, 6235, 6237, 6239, 6241, 6243, 6245, 6247, 6249, 6251, 6253, 6255, 6257, 6259, 6261, 6263, 6265, 6267, 6269, 6271, 6273, 6275, 6277, 6279, 6281, 6283, 6285, 6287, 6289, 6291, 6293, 6295, 6297, 6299, 6301, 6303, 6305, 6307, 6309, 6311, 6313, 6315, 6317, 6319, 6321, 6323, 6325, 6327, 6329, 6331, 6333, 6335, 6337, 6339, 6341, 6343, 6345, 6347, 6349, 6351, 6353, 6355, 6357, 6359, 6361, 6363, 6365, 6367, 6369, 6371, 6373, 6375, 6377, 6379, 6381, 6383, 6385, 6387, 6389, 6391, 6393, 6395, 6397, 6399, 6401, 6403, 6405, 6407, 6409, 6411, 6413, 6415, 6417, 6419, 6421, 6423, 6425, 6427, 6429, 6431, 6433, 6435, 6437, 6439, 6441, 6443, 6445, 6447, 6449, 6451, 6453, 6455, 6457, 6459, 6461, 6463, 6465, 6467, 6469, 6471, 6473, 6475, 6477, 6479, 6481, 6483, 6485, 6487, 6489, 6491, 6493, 6495, 6497, 6499, 6501, 6503, 6505, 6507, 6509, 6511, 6513, 6515, 6517, 6519, 6521, 6523, 6525, 6527, 6529, 6531, 6533, 6535, 6537, 6539, 6541, 6543, 6545, 6547, 6549, 6551, 6553, 6555, 6557, 6559, 6561, 6563, 6565, 6567, 6569, 6571, 6573, 6575, 6577, 6579, 6581, 6583, 6585, 6587, 6589, 6591, 6593, 6595, 6597, 6599, 6601, 6603, 6605, 6607, 6609, 6611, 6613, 6615, 6617, 6619, 6621, 6623, 6625, 6627, 6629, 6631, 6633, 6635, 6637, 6639, 6641, 6643, 6645, 6647, 6649, 6651, 6653, 6655, 6657, 6659, 6661, 6663, 6665, 6667, 6669, 6671, 6673, 6675, 6677, 6679, 6681, 6683, 6685, 6687, 6689, 6691, 6693, 6695, 6697, 6699, 6701, 6703, 6705, 6707, 6709, 6711, 6713, 6715, 6717, 6719, 6721, 6723, 6725, 6727, 6729, 6731, 6733, 6735, 6737, 6739, 6741, 6743, 6745, 6747, 6749, 6751, 6753, 6755, 6757, 6759, 6761, 6763, 6765, 6767, 6769, 6771, 6773, 6775, 6777, 6779, 6781, 6783, 6785, 6787, 6789, 6791, 6793, 6795, 6797, 6799, 6801, 6803, 6805, 6807, 6809, 6811, 6813, 6815, 6817, 6819, 6821, 6823, 6825, 6827, 6829, 6831, 6833, 6835, 6837, 6839, 6841, 6843, 6845, 6847, 6849, 6851, 6853, 6855, 6857, 6859, 6861, 6863, 6865, 6867, 6869, 6871, 6873, 6875, 6877, 6879, 6881, 6883, 6885, 6887, 6889, 6891, 6893, 6895, 6897, 6899, 6901, 6903, 6905, 6907, 6909, 6911, 6913, 6915, 6917, 6919, 6921, 6923, 6925, 6927, 6929, 6931, 6933, 6935, 6937, 6939, 6941, 6943, 6945, 6947, 6949, 6951, 6953, 6955, 6957, 6959, 6961, 6963, 6965, 6967, 6969, 6971, 6973, 6975, 6977, 6979, 6981, 6983, 6985, 6987, 6989, 6991, 6993, 6995, 6997, 6999, 7001, 7003, 7005, 7007, 7009, 7011, 7013, 7015, 7017, 7019, 7021, 7023, 7025, 7027, 7029, 7031, 7033, 7035, 7037, 7039, 7041, 7043, 7045, 7047, 7049, 7051, 7053, 7055, 7057, 7059, 7061, 7063, 7065, 7067, 7069, 7071, 7073, 7075, 7077, 7079, 7081, 7083, 7085, 7087, 7089, 7091, 7093, 7095, 7097, 7099, 7101, 7103, 7105, 7107, 7109, 7111, 7113, 7115, 7117, 7119, 7121, 7123, 7125, 7127, 7129, 7131, 7133, 7135, 7137, 7139, 7141, 7143, 7145, 7147, 7149, 7151, 7153, 7155, 7157, 7159, 7161, 7163, 7165, 7167, 7169, 7171, 7173, 7175, 7177, 7179, 7181, 7183, 7185, 7187, 7189, 7191, 7193, 7195, 7197, 7199, 7201, 7203, 7205, 7207, 7209, 7211, 7213, 7215, 7217, 7219, 7221, 7223, 7225, 7227, 7229, 7231, 7233, 7235, 7237, 7239, 7241, 7243, 7245, 7247, 7249, 7251, 7253, 7255, 7257, 7259, 7261, 7263, 7265, 7267, 7269, 7271, 7273, 7275, 7277, 7279, 7281, 7283, 7285, 7287, 7289, 7291, 7293, 7295, 7297, 7299, 7301, 7303, 7305, 7307, 7309, 7311, 7313, 7315, 7317, 7319, 7321, 7323, 7325, 7327, 7329, 7331, 7333, 7335, 7337, 7339, 7341, 7343, 7345, 7347, 7349, 7351, 7353, 7355, 7357, 7359, 7361, 7363, 7365, 7367, 7369, 7371, 7373, 7375, 7377, 7379, 7381, 7383, 7385, 7387, 7389, 7391, 7393, 7395, 7397, 7399, 7401, 7403, 7405, 7407, 7409, 7411, 7413, 7415, 7417, 7419, 7421, 7423, 7425, 7427, 7429, 7431, 7433, 7435, 7437, 7439, 7441, 7443, 7445, 7447, 7449, 7451, 7453, 7455, 7457, 7459, 7461, 7463, 7465, 7467, 7469, 7471, 7473, 7475, 7477, 7479, 7481, 7483, 7485, 7487, 7489, 7491, 7493, 7495, 7497, 7499, 7501, 7503, 7505, 7507, 7509, 7511, 7513, 7515, 7517, 7519, 7521, 7523, 7525, 7527, 7529, 7531, 7533, 7535, 7537, 7539, 7541, 7543, 7545, 7547, 7549, 7551, 7553, 7555, 7557, 7559, 7561, 7563, 7565, 7567, 7569, 7571, 7573, 7575, 7577, 7579, 7581, 7583, 7585, 7587, 7589, 7591, 7593, 7595, 7597, 7599, 7601, 7603, 7605, 7607, 7609, 7611, 7613, 7615, 7617, 7619, 7621, 7623, 7625, 7627, 7629, 7631, 7633, 7635, 7637, 7639, 7641, 7643, 7645, 7647, 7649, 7651, 7653, 7655, 7657, 7659, 7661, 7663, 7665, 7667, 7669, 7671, 7673, 7675, 7677, 7679, 7681, 7683, 7685, 7687, 7689, 7691, 7693, 7695, 7697, 7699, 7701, 7703, 7705, 7707, 7709, 7711, 7713, 7715, 7717, 7719, 7721, 7723, 7725, 7727, 7729, 7731, 7733, 7735, 7737, 7739, 7741, 7743, 7745, 7747, 7749, 7751, 7753, 7755, 7757, 7759, 7761, 7763, 7765, 7767, 7769, 7771, 7773, 7775, 7777, 7779, 7781, 7783, 7785, 7787, 7789, 7791, 7793, 7795, 7797, 7799, 7801, 7803, 7805, 7807, 7809, 7811, 7813, 7815, 7817, 7819, 7821, 7823, 7825, 7827, 7829, 7831, 7833, 7835, 7837, 7839, 7841, 7843, 7845, 7847, 7849, 7851, 7853, 7855, 7857, 7859, 7861, 7863, 7865, 7867, 7869, 7871, 7873, 7875, 7877, 7879, 7881, 7883, 7885, 7887, 7889, 7891, 7893, 7895, 7897, 7899, 7901, 7903, 7905, 7907, 7909, 7911, 7913, 7915, 7917, 7919, 7921, 7923, 7925, 7927, 7929, 7931, 7933, 7935, 7937, 7939, 7941, 7943, 7945, 7947, 7949, 7951, 7953, 7955, 7957, 7959, 7961, 7963, 7965, 7967, 7969, 7971, 7973, 7975, 7977, 7979, 7981, 7983, 7985, 7987, 7989, 7991, 7993, 7995, 7997, 7999, 8001, 8003, 8005, 8007, 8009, 8011, 8013, 8015, 8017, 8019, 8021, 8023, 8025, 8027, 8029, 8031, 8033, 8035, 8037, 8039, 8041, 8043, 8045, 8047, 8049, 8051, 8053, 8055, 8057, 8059, 8061, 8063, 8065, 8067, 8069, 8071, 8073, 8075, 8077, 8079, 8081, 8083, 8085, 8087, 8089, 8091, 8093, 8095, 8097, 8099, 8101, 8103, 8105, 8107, 8109, 8111, 8113, 8115, 8117, 8119, 8121, 8123, 8125, 8127, 8129, 8131, 8133, 8135, 8137, 8139, 8141, 8143, 8145, 8147, 8149, 8151, 8153, 8155, 8157, 8159, 8161, 8163, 8165, 8167, 8169, 8171, 8173, 8175, 8177, 8179, 8181, 8183, 8185, 8187, 8189, 8191, 8193, 8195, 8197, 8199, 8201, 8203, 8205, 8207, 8209, 8211, 8213, 8215, 8217, 8219, 8221, 8223, 8225, 8227, 8229, 8231, 8233, 8235, 8237, 8239, 8241, 8243, 8245, 8247, 8249, 8251, 8253, 8255, 8257, 8259, 8261, 8263, 8265, 8267, 8269, 8271, 8273, 8275, 8277, 8279, 8281, 8283, 8285, 8287, 8289, 8291, 8293, 8295, 8297, 8299, 8301, 8303, 8305, 8307, 8309, 8311, 8313, 8315, 8317, 8319, 8321, 8323, 8325, 8327, 8329, 8331, 8333, 8335, 8337, 8339, 8341, 8343, 8345, 8347, 8349, 8351, 8353, 8355, 8357, 8359, 8361, 8363, 8365, 8367, 8369, 8371, 8373, 8375, 8377, 8379, 8381, 8383, 8385, 8387, 8389, 8391, 8393, 8395, 8397, 8399, 8401, 8403, 8405, 8407, 8409, 8411, 8413, 8415, 8417, 8419, 8421, 8423, 8425, 8427, 8429, 8431, 8433, 8435, 8437, 8439, 8441, 8443, 8445, 8447, 8449, 8451, 8453, 8455, 8457, 8459, 8461, 8463, 8465, 8467, 8469, 8471, 8473, 8475, 8477, 8479, 8481, 8483, 8485, 8487, 8489, 8491, 8493, 8495, 8497, 8499, 8501, 8503, 8505, 8507, 8509, 8511, 8513, 8515, 8517, 8519, 8521, 8523, 8525, 8527, 8529, 8531, 8533, 8535, 8537, 8539, 8541, 8543, 8545, 8547, 8549, 8551, 8553, 8555, 8557, 8559, 8561, 8563, 8565, 8567, 8569, 8571, 8573, 8575, 8577, 8579, 8581, 8583, 8585, 8587, 8589, 8591, 8593, 8595, 8597, 8599, 8601, 8603, 8605, 8607, 8609, 8611, 8613, 8615, 8617, 8619, 8621, 8623, 8625, 8627, 8629, 8631, 8633, 8635, 8637, 8639, 8641, 8643, 8645, 8647, 8649, 8651, 8653, 8655, 8657, 8659, 8661, 8663, 8665, 8667, 8669, 8671, 8673, 8675, 8677, 8679, 8681, 8683, 8685, 8687, 8689, 8691, 8693, 8695, 8697, 8699, 8701, 8703, 8705, 8707, 8709, 8711, 8713, 8715, 8717, 8719, 8721, 8723, 8725, 8727, 8729, 8731, 8733, 8735, 8737, 8739, 8741, 8743, 8745, 8747, 8749, 8751, 8753, 8755, 8757, 8759, 8761, 8763, 8765, 8767, 8769, 8771, 8773, 8775, 8777, 8779, 8781, 8783, 8785, 8787, 8789, 8791, 8793, 8795, 8797, 8799, 8801, 8803, 8805, 8807, 8809, 8811, 8813, 8815, 8817, 8819, 8821, 8823, 8825, 8827, 8829, 8831, 8833, 8835, 8837, 8839, 8841, 8843, 8845, 8847, 8849, 8851, 8853, 8855, 8857, 8859, 8861, 8863, 8865, 8867, 8869, 8871, 8873, 8875, 8877, 8879, 8881, 8883, 8885, 8887, 8889, 8891, 8893, 8895, 8897, 8899, 8901, 8903, 8905, 8907, 8909, 8911, 8913, 8915, 8917, 8919, 8921, 8923, 8925, 8927, 8929, 8931, 8933, 8935, 8937, 8939, 8941, 8943, 8945, 8947, 8949, 8951, 8953, 8955, 8957, 8959, 8961, 8963, 8965, 8967, 8969, 8971, 8973, 8975, 8977, 8979, 8981, 8983, 8985, 8987, 8989, 8991, 8993, 8995, 8997, 8999, 9001, 9003, 9005, 9007, 9009, 9011, 9013, 9015, 9017, 9019, 9021, 9023, 9025, 9027, 9029, 9031, 9033, 9035, 9037, 9039, 9041, 9043, 9045, 9047, 9049, 9051, 9053, 9055, 9057, 9059, 9061, 9063, 9065, 9067, 9069, 9071, 9073, 9075, 9077, 9079, 9081, 9083, 9085, 9087, 9089, 9091, 9093, 9095, 9097, 9099, 9101, 9103, 9105, 9107, 9109, 9111, 9113, 9115, 9117, 9119, 9121, 9123, 9125, 9127, 9129, 9131, 9133, 9135, 9137, 9139, 9141, 9143, 9145, 9147, 9149, 9151, 9153, 9155, 9157, 9159, 9161, 9163, 9165, 9167, 9169, 9171, 9173, 9175, 9177, 9179, 9181, 9183, 9185, 9187, 9189, 9191, 9193, 9195, 9197, 9199, 9201, 9203, 9205, 9207, 9209, 9211, 9213, 9215, 9217, 9219, 9221, 9223, 9225, 9227, 9229, 9231, 9233, 9235, 9237, 9239, 9241, 9243, 9245, 9247, 9249, 9251, 9253, 9255, 9257, 9259, 9261, 9263, 9265, 9267, 9269, 9271, 9273, 9275, 9277, 9279, 9281, 9283, 9285, 9287, 9289, 9291, 9293, 9295, 9297, 9299, 9301, 9303, 9305, 9307, 9309, 9311, 9313, 9315, 9317, 9319, 9321, 9323, 9325, 9327, 9329, 9331, 9333, 9335, 9337, 9339, 9341, 9343, 9345, 9347, 9349, 9351, 9353, 9355, 9357, 9359, 9361, 9363, 9365, 9367, 9369, 9371, 9373, 9375, 9377, 9379, 9381, 9383, 9385, 9387, 9389, 9391, 9393, 9395, 9397, 9399, 9401, 9403, 9405, 9407, 9409, 9411, 9413, 9415, 9417, 9419, 9421, 9423, 9425, 9427, 9429, 9431, 9433, 9435, 9437, 9439, 9441, 9443, 9445, 9447, 9449, 9451, 9453, 9455, 9457, 9459, 9461, 9463, 9465, 9467, 9469, 9471, 9473, 9475, 9477, 9479, 9481, 9483, 9485, 9487, 9489, 9491, 9493, 9495, 9497, 9499, 9501, 9503, 9505, 9507, 9509, 9511, 9513, 9515, 9517, 9519, 9521, 9523, 9525, 9527, 9529, 9531, 9533, 9535, 9537, 9539, 9541, 9543, 9545, 9547, 9549, 9551, 9553, 9555, 9557, 9559, 9561, 9563, 9565, 9567, 9569, 9571, 9573, 9575, 9577, 9579, 9581, 9583, 9585, 9587, 9589, 9591, 9593, 9595, 9597, 9599, 9601, 9603, 9605, 9607, 9609, 9611, 9613, 9615, 9617, 9619, 9621, 9623, 9625, 9627, 9629, 9631, 9633, 9635, 9637, 9639, 9641, 9643, 9645, 9647, 9649, 9651, 9653, 9655, 9657, 9659, 9661, 9663, 9665, 9667, 9669, 9671, 9673, 9675, 9677, 9679, 9681, 9683, 9685, 9687, 9689, 9691, 9693, 9695, 9697, 9699, 9701, 9703, 9705, 9707, 9709, 9711, 9713, 9715, 9717, 9719, 9721, 9723, 9725, 9727, 9729, 9731, 9733, 9735, 9737, 9739, 9741, 9743, 9745, 9747, 9749, 9751, 9753, 9755, 9757, 9759, 9761, 9763, 9765, 9767, 9769, 9771, 9773, 9775, 9777, 9779, 9781, 9783, 9785, 9787, 9789, 9791, 9793, 9795, 9797, 9799, 9801, 9803, 9805, 9807, 9809, 9811, 9813, 9815, 9817, 9819, 9821, 9823, 9825, 9827, 9829, 9831, 9833, 9835, 9837, 9839, 9841, 9843, 9845, 9847, 9849, 9851, 9853, 9855, 9857, 9859, 9861, 9863, 9865, 9867, 9869, 9871, 9873, 9875, 9877, 9879, 9881, 9883, 9885, 9887, 9889, 9891, 9893, 9895, 9897, 9899, 9901, 9903, 9905, 9907, 9909, 9911, 9913, 9915, 9917, 9919, 9921, 9923, 9925, 9927, 9929, 9931, 9933, 9935, 9937, 9939, 9941, 9943, 9945, 9947, 9949, 9951, 9953, 9955, 9957, 9959, 9961, 9963, 9965, 9967, 9969, 9971, 9973, 9975, 9977, 9979, 9981, 9983, 9985, 9987, 9989, 9991, 9993, 9995, 9997, 9999, 10001, 10003, 10005, 10007, 10009, 10011, 10013, 10015, 10017, 10019, 10021, 10023, 10025, 10027, 10029, 10031, 10033, 10035, 10037, 10039, 10041, 10043, 10045, 10047, 10049, 10051, 10053, 10055, 10057, 10059, 10061, 10063, 10065, 10067, 10069, 10071, 10073, 10075, 10077, 10079, 10081, 10083, 10085, 10087, 10089, 10091, 10093, 10095, 10097, 10099, 10101, 10103, 10105, 10107, 10109, 10111, 10113, 10115, 10117, 10119, 10121, 10123, 10125, 10127, 10129, 10131, 10133, 10135, 10137, 10139, 10141, 10143, 10145, 10147, 10149, 10151, 10153, 10155, 10157, 10159, 10161, 10163, 10165, 10167, 10169, 10171, 10173, 10175, 10177, 10179, 10181, 10183, 10185, 10187, 10189, 10191, 10193, 10195, 10197, 10199, 10201, 10203, 10205, 10207, 10209, 10211, 10213, 10215, 10217, 10219, 10221, 10223, 10225, 10227, 10229, 10231, 10233, 10235, 10237, 10239, 10241, 10243, 10245, 10247, 10249, 10251, 10253, 10255, 10257, 10259, 10261, 10263, 10265, 10267, 10269, 10271, 10273, 10275, 10277, 10279, 10281, 10283, 10285, 10287, 10289, 10291, 10293, 10295, 10297, 10299, 10301, 10303, 10305, 10307, 10309, 10311, 10313, 10315, 10317, 10319, 10321, 10323, 10325, 10327, 10329, 10331, 10333, 10335, 10337, 10339, 10341, 10343, 10345, 10347, 10349, 10351, 10353, 10355, 10357, 10359, 10361, 10363, 10365, 10367, 10369, 10371, 10373, 10375, 10377, 10379, 10381, 10383, 10385, 10387, 10389, 10391, 10393, 10395, 10397, 10399, 10401, 10403, 10405, 10407, 10409, 10411, 10413, 10415, 10417, 10419, 10421, 10423, 10425, 10427, 10429, 10431, 10433, 10435, 10437, 10439, 10441, 10443, 10445, 10447, 10449, 10451, 10453, 10455, 10457, 10459, 10461, 10463, 10465, 10467, 10469, 10471, 10473, 10475, 10477, 10479, 10481, 10483, 10485, 10487, 10489, 10491, 10493, 10495, 10497, 10499, 10501, 10503, 10505, 10507, 10509, 10511, 10513, 10515, 10517, 10519, 10521, 10523, 10525, 10527, 10529, 10531, 10533, 10535, 10537, 10539, 10541, 10543, 10545, 10547, 10549, 10551, 10553, 10555, 10557, 10559, 10561, 10563, 10565, 10567, 10569, 10571, 10573, 10575, 10577, 10579, 10581, 10583, 10585, 10587, 10589, 10591, 10593, 10595, 10597, 10599, 10601, 10603, 10605, 10607, 10609, 10611, 10613, 10615, 10617, 10619, 10621, 10623, 10625, 10627, 10629, 10631, 10633, 10635, 10637, 10639, 10641, 10643, 10645, 10647, 10649, 10651, 10653, 10655, 10657, 10659, 10661, 10663, 10665, 10667, 10669, 10671, 10673, 10675, 10677, 10679, 10681, 10683, 10685, 10687, 10689, 10691, 10693, 10695, 10697, 10699, 10701, 10703, 10705, 10707, 10709, 10711, 10713, 10715, 10717, 10719, 10721, 10723, 10725, 10727, 10729, 10731, 10733, 10735, 10737, 10739, 10741, 10743, 10745, 10747, 10749, 10751, 10753, 10755, 10757, 10759, 10761, 10763, 10765, 10767, 10769, 10771, 10773, 10775, 10777, 10779, 10781, 10783, 10785, 10787, 10789, 10791, 10793, 10795, 10797, 10799, 10801, 10803, 10805, 10807, 10809, 10811, 10813, 10815, 10817, 10819, 10821, 10823, 10825, 10827, 10829, 10831, 10833, 10835, 10837, 10839, 10841, 10843, 10845, 10847, 10849, 10851, 10853, 10855, 10857, 10859, 10861, 10863, 10865, 10867, 10869, 10871, 10873, 10875, 10877, 10879, 10881, 10883, 10885, 10887, 10889, 10891, 10893, 10895, 10897, 10899, 10901, 10903, 10905, 10907, 10909, 10911, 10913, 10915, 10917, 10919, 10921, 10923, 10925, 10927, 10929, 10931, 10933, 10935, 10937, 10939, 10941, 10943, 10945, 10947, 10949, 10951, 10953, 10955, 10957, 10959, 10961, 10963 and 10965.

8. A nucleic acid molecule comprising a nucleotide sequence selected from the group consisting of SEQ IDs 10967, 10968, 10969, 10970, 10971, 10972, 10973, 10974, 10975, 10976, 10977, 10978, 10979, 10980, 10981, 10982, 10983, 10984, 10985, 10986, 10987, 10988, 10989, 10990, 10991, 10992, 10993, 10994, 10995, 10996, 10997, 10998, 10999, 11000, 11001, 11002, 11003, 11004, 11005, 11006, 11007, 11008, 11009, 11010, 11011, 11012, 11013, 11014, 11015, 11016, 11017, 11018, 11019, 11020, 11021, 11022, 11023, 11024, 11025, 11026, 11027, 11028, 11029, 11030, 11031, 11032, 11033, 11034, 11035, 11036, 11037, 11038, 11039, 11040, 11041, 11042, 11043, 11044, 11045, 11046, 11047, 11048, 11049, 11050, 11051, 11052, 11053, 11054, 11055, 11056, 11057, 11058, 11059, 11060, 11061, 11062, 11063, 11064, 11065, 11066, 11067, 11068, 11069, 11070, 11071, 11072, 11073, 11074, 11075, 11076, 11077, 11078, 11079, 11080, 11081, 11082, 11083, 11084, 11085, 11086, 11087, 11088, 11089, 11090, 11091, 11092, 11093, 11094, 11095, 11096, 11097, 11098, 11099, 11100, 11101, 11102, 11103, 11104, 11105, 11106, 11107, 11108, 11109, 11110, 11111, 11112, 11113, 11114, 11115, 11116, 11117, 11118, 11119, 11120, 11121, 11122, 11123, 11124, 11125, 11126, 11127, 11128, 11129, 11130, 11131, 11132, 11133, 11134, 11135, 11136, 11137, 11138, 11139, 11140, 11141, 11142, 11143, 11144, 11145, 11146, 11147, 11148, 11149, 11150, 11151, 11152, 11153, 11154, 11155, 11156, 11157, 11158, 11159, 11160, 11161, 11162, 11163, 11164, 11165, 11166, 11167, 11168, 11169, 11170, 11171, 11172, 11173, 11174, 11175, 11176, 11177, 11178, 11179, 11180, 11181, 11182, 11183, 11184, 11185, 11186, 11187, 11188, 11189, 11190, 11191, 11192, 11193, 11194, 11195, 11196, 11197, 11198, 11199, 11200, 11201, 11202, 11203, 11204, 11205, 11206, 11207, 11208, 11209, 11210, 11211, 11212, 11213, 11214, 11215, 11216, 11217, 11218, 11219, 11220, 11221, 11222, 11223, 11224, 11225, 11226, 11227, 11228, 11229, 11230, 11231, 11232, 11233, 11234, 11235, 11236, 11237, 11238, 11239, 11240, 11241, 11242, 11243, 11244, 11245, 11246, 11247, 11248, 11249, 11250, 11251, 11252, 11253, 11254, 11255, 11256, 11257, 11258, 11259, 11260, 11261, 11262, 11263, 11264, 11265, 11266, 11267, 11268, 11269, 11270, 11271, 11272, 11273, 11274, 11275, 11276, 11277, 11278, 11279, 11280, 11281, 11282, 11283, 11284, 11285, 11286, 11287, 11288, 11289, 11290, 11291, 11292, 11293, 11294, 11295, 11296, 11297, 11298, 11299, 11300, 11301, 11302, 11303, 11304, 11305, 11306, 11307, 11308, 11309, 11310, 11311, 11312, 11313, 11314, 11315, 11316, 11317, 11318, 11319, 11320, 11321, 11322, 11323, 11324, 11325, 11326, 11327, 11328, 11329, 11330, 11331, 11332, 11333, 11334, 11335, 11336, 11337, 11338, 11339, 11340, 11341, 11342, 11343, 11344, 11345, 11346, 11347, 11348, 11349, 11350, 11351, 11352, 11353, 11354, 11355, 11356, 11357, 11358, 11359, 11360, 11361, 11362, 11363, 11364, 11365, 11366, 11367, 11368, 11369, 11370, 11371, 11372, 11373, 11374, 11375, 11376, 11377, 11378, 11379, 11380, 11381, 11382, 11383, 11384, 11385, 11386, 11387, 11388, 11389, 11390, 11391, 11392, 11393, 11394, 11395, 11396, 11397, 11398, 11399, 11400, 11401, 11402, 11403, 11404, 11405, 11406, 11407, 11408, 11409, 11410, 11411, 11412, 11413, 11414, 11415, 11416, 11417, 11418, 11419, 11420, 11421, 11422, 11423, 11424, 11425, 11426, 11427, 11428, 11429, 11430, 11431, 11432, 11433, 11434, 11435, 11436, 11437, 11438, 11439, 11440, 11441, 11442, 11443, 11444, 11445, 11446, 11447, 11448, 11449, 11450, 11451, 11452, 11453, 11454, 11455, 11456, 11457, 11458, 11459, 11460, 11461, 11462, 11463, 11464, 11465, 11466, 11467, 11468, 11469, 11470, 11471, 11472, 11473, 11474, 11475, 11476, 11477, 11478, 11479, 11480, 11481, 11482, 11483, 11484, 11485, 11486, 11487, 11488, 11489, 11490, 11491, 11492, 11493, 11494, 11495, 11496, 11497, 11498, 11499, 11500, 11501, 11502, 11503, 11504, 11505, 11506, 11507, 11508, 11509, 11510, 11511, 11512, 11513, 11514, 11515, 11516, 11517, 11518, 11519, 11520, 11521, 11522, 11523, 11524, 11525, 11526, 11527, 11528, 11529, 11530, 11531, 11532, 11533, 11534, 11535, 11536, 11537, 11538, 11539, 11540, 11541, 11542, 11543, 11544, 11545, 11546, 11547, 11548, 11549, 11550, 11551, 11552, 11553, 11554, 11555, 11556, 11557, 11558, 11559, 11560, 11561, 11562, 11563, 11564, 11565, 11566, 11567, 11568, 11569, 11570, 11571, 11572, 11573, 11574, 11575, 11576, 11577, 11578, 11579, 11580, 11581, 11582, 11583, 11584, 11585, 11586, 11587, 11588, 11589, 11590, 11591, 11592, 11593, 11594, 11595, 11596, 11597, 11598, 11599, 11600, 11601, 11602, 11603, 11604, 11605, 11606, 11607, 11608, 11609, 11610, 11611, 11612, 11613, 11614, 11615, 11616, 11617, 11618, 11619, 11620, 11621, 11622, 11623, 11624, 11625, 11626, 11627, 11628, 11629, 11630, 11631, 11632, 11633, 11634, 11635, 11636, 11637, 11638, 11639, 11640, 11641, 11642, 11643, 11644, 11645, 11646, 11647, 11648, 11649, 11650, 11651, 11652, 11653, 11654, 11655, 11656, 11657, 11658, 11659, 11660, 11661, 11662, 11663, 11664, 11665, 11666, 11667, 11668, 11669, 11670, 11671, 11672, 11673, 11674, 11675, 11676, 11677, 11678, 11679, 11680, 11681, 11682, 11683, 11684, 11685, 11686, 11687, 11688, 11689, 11690, 11691, 11692, 11693, 11694, 11695, 11696, 11697, 11698, 11699, 11700, 11701, 11702, 11703, 11704, 11705, 11706, 11707, 11708, 11709, 11710, 11711, 11712, 11713, 11714, 11715, 11716, 11717, 11718, 11719, 11720, 11721, 11722, 11723, 11724, 11725, 11726, 11727, 11728, 11729, 11730, 11731, 11732, 11733, 11734, 11735, 11736, 11737, 11738, 11739, 11740, 11741, 11742, 11743, 11744, 11745, 11746, 11747, 11748, 11749, 11750, 11751, 11752, 11753, 11754, 11755, 11756, 11757, 11758, 11759, 11760, 11761, 11762, 11763, 11764, 11765, 11766, 11767, 11768, 11769, 11770, 11771, 11772, 11773, 11774, 11775, 11776, 11777, 11778, 11779, 11780, 11781, 11782, 11783, 11784, 11785, 11786, 11787, 11788, 11789, 11790, 11791, 11792, 11793, 11794, 11795, 11796, 11797, 11798, 11799, 11800, 11801, 11802, 11803, 11804, 11805, 11806, 11807, 11808, 11809, 11810, 11811, 11812, 11813, 11814, 11815, 11816, 11817, 11818, 11819, 11820, 11821, 11822, 11823, 11824, 11825, 11826, 11827, 11828, 11829, 11830, 11831, 11832, 11833, 11834, 11835, 11836, 11837, 11838, 11839, 11840, 11841, 11842, 11843, 11844, 11845, 11846, 11847, 11848, 11849, 11850, 11851, 11852, 11853, 11854, 11855, 11856, 11857, 11858, 11859, 11860, 11861, 11862, 11863, 11864, 11865, 11866, 11867, 11868, 11869, 11870, 11871, 11872, 11873, 11874, 11875, 11876, 11877, 11878, 11879, 11880, 11881, 11882, 11883, 11884, 11885, 11886, 11887, 11888, 11889, 11890, 11891, 11892, 11893, 11894, 11895, 11896, 11897, 11898, 11899, 11900, 11901, 11902, 11903, 11904, 11905, 11906, 11907, 11908, 11909, 11910, 11911, 11912, 11913, 11914, 11915, 11916, 11917, 11918, 11919, 11920, 11921, 11922, 11923, 11924, 11925, 11926, 11927, 11928, 11929, 11930, 11931, 11932, 11933, 11934, 11935, 11936, 11937, 11938, 11939, 11940, 11941, 11942, 11943, 11944, 11945, 11946, 11947, 11948, 11949, 11950, 11951, 11952, 11953, 11954, 11955, 11956, 11957, 11958, 11959, 11960, 11961, 11962, 11963, 11964, 11965, 11966, 11967, 11968, 11969, 11970, 11971, 11972, 11973, 11974, 11975, 11976, 11977, 11978, 11979, 11980, 11981, 11982, 11983, 11984, 11985, 11986, 11987, 11988, 11989, 11990, 11991, 11992, 11993, 11994, 11995, 11996, 11997, 11998, 11999, 12000, 12001, 12002, 12003, 12004, 12005, 12006, 12007, 12008, 12009, 12010, 12011, 12012, 12013, 12014, 12015, 12016, 12017, 12018, 12019, 12020, 12021, 12022, 12023 and 12024.

9. A nucleic acid molecule comprising a fragment of 10 or more consecutive nucleotides from a nucleotide sequence selected from the group consisting of SEQ IDs 1, 3, 5, 7, 9, 11, 13, 15, 17, 19, 21, 23, 25, 27, 29, 31, 33, 35, 37, 39, 41, 43, 45, 47, 49, 51, 53, 55, 57, 59, 61, 63, 65, 67, 69, 71, 73, 75, 77, 79, 81, 83, 85, 87, 89, 91, 93, 95, 97, 99, 101, 103, 105, 107, 109, 111, 113, 115, 117, 119, 121, 123, 125, 127, 129, 131, 133, 135, 137, 139, 141, 143, 145, 147, 149, 151, 153, 155, 157, 159, 161, 163, 165, 167, 169, 171, 173, 175, 177, 179, 181, 183, 185, 187, 189, 191, 193, 195, 197, 199, 201, 203, 205, 207, 209, 211, 213, 215, 217, 219, 221, 223, 225, 227, 229, 231, 233, 235, 237, 239, 241, 243, 245, 247, 249, 251, 253, 255, 257, 259, 261, 263, 265, 267, 269, 271, 273, 275, 277, 279, 281, 283, 285, 287, 289, 291, 293, 295, 297, 299, 301, 303, 305, 307, 309, 311, 313, 315, 317, 319, 321, 323, 325, 327, 329, 331, 333, 335, 337, 339, 341, 343, 345, 347, 349, 351, 353, 355, 357, 359, 361, 363, 365, 367, 369, 371, 373, 375, 377, 379, 381, 383, 385, 387, 389, 391, 393, 395, 397, 399, 401, 403, 405, 407, 409, 411, 413, 415, 417, 419, 421, 423, 425, 427, 429, 431, 433, 435, 437, 439, 441, 443, 445, 447, 449, 451, 453, 455, 457, 459, 461, 463, 465, 467, 469, 471, 473, 475, 477, 479, 481, 483, 485, 487, 489, 491, 493, 495, 497, 499, 501, 503, 505, 507, 509, 511, 513, 515, 517, 519, 521, 523, 525, 527, 529, 531, 533, 535, 537, 539, 541, 543, 545, 547, 549, 551, 553, 555, 557, 559, 561, 563, 565, 567, 569, 571, 573, 575, 577, 579, 581, 583, 585, 587, 589, 591, 593, 595, 597, 599, 601, 603, 605, 607, 609, 611, 613, 615, 617, 619, 621, 623, 625, 627, 629, 631, 633, 635, 637, 639, 641, 643, 645, 647, 649, 651, 653, 655, 657, 659, 661, 663, 665, 667, 669, 671, 673, 675, 677, 679, 681, 683, 685, 687, 689, 691, 693, 695, 697, 699, 701, 703, 705, 707, 709, 711, 713, 715, 717, 719, 721, 723, 725, 727, 729, 731, 733, 735, 737, 739, 741, 743, 745, 747, 749, 751, 753, 755, 757, 759, 761, 763, 765, 767, 769, 771, 773, 775, 777, 779, 781, 783, 785, 787, 789, 791, 793, 795, 797, 799, 801, 803, 805, 807, 809, 811, 813, 815, 817, 819, 821, 823, 825, 827, 829, 831, 833, 835, 837, 839, 841, 843, 845, 847, 849, 851, 853, 855, 857, 859, 861, 863, 865, 867, 869, 871, 873, 875, 877, 879, 881, 883, 885, 887, 889, 891, 893, 895, 897, 899, 901, 903, 905, 907, 909, 911, 913, 915, 917, 919, 921, 923, 925, 927, 929, 931, 933, 935, 937, 939, 941, 943, 945, 947, 949, 951, 953, 955, 957, 959, 961, 963, 965, 967, 969, 971, 973, 975, 977, 979, 981, 983, 985, 987, 989, 991, 993, 995, 997, 999, 1001, 1003, 1005, 1007, 1009, 1011, 1013, 1015, 1017, 1019, 1021, 1023, 1025, 1027, 1029, 1031, 1033, 1035, 1037, 1039, 1041, 1043, 1045, 1047, 1049, 1051, 1053, 1055, 1057, 1059, 1061, 1063, 1065, 1067, 1069, 1071, 1073, 1075, 1077, 1079, 1081, 1083, 1085, 1087, 1089, 1091, 1093, 1095, 1097, 1099, 1101, 1103, 1105, 1107, 1109, 1111, 1113, 1115, 1117, 1119, 1121, 1123, 1125, 1127, 1129, 1131, 1133, 1135, 1137, 1139, 1141, 1143, 1145, 1147, 1149, 1151, 1153, 1155, 1157, 1159, 1161, 1163, 1165, 1167, 1169, 1171, 1173, 1175, 1177, 1179, 1181, 1183, 1185, 1187, 1189, 1191, 1193, 1195, 1197, 1199, 1201, 1203, 1205, 1207, 1209, 1211, 1213, 1215, 1217, 1219, 1221, 1223, 1225, 1227, 1229, 1231, 1233, 1235, 1237, 1239, 1241, 1243, 1245, 1247, 1249, 1251, 1253, 1255, 1257, 1259, 1261, 1263, 1265, 1267, 1269, 1271, 1273, 1275, 1277, 1279, 1281, 1283, 1285, 1287, 1289, 1291, 1293, 1295, 1297, 1299, 1301, 1303, 1305, 1307, 1309, 1311, 1313, 1315, 1317, 1319, 1321, 1323, 1325, 1327, 1329, 1331, 1333, 1335, 1337, 1339, 1341, 1343, 1345, 1347, 1349, 1351, 1353, 1355, 1357, 1359, 1361, 1363, 1365, 1367, 1369, 1371, 1373, 1375, 1377, 1379, 1381, 1383, 1385, 1387, 1389, 1391, 1393, 1395, 1397, 1399, 1401, 1403, 1405, 1407, 1409, 1411, 1413, 1415, 1417, 1419, 1421, 1423, 1425, 1427, 1429, 1431, 1433, 1435, 1437, 1439, 1441, 1443, 1445, 1447, 1449, 1451, 1453, 1455, 1457, 1459, 1461, 1463, 1465, 1467, 1469, 1471, 1473, 1475, 1477, 1479, 1481, 1483, 1485, 1487, 1489, 1491, 1493, 1495, 1497, 1499, 1501, 1503, 1505, 1507, 1509, 1511, 1513, 1515, 1517, 1519, 1521, 1523, 1525, 1527, 1529, 1531, 1533, 1535, 1537, 1539, 1541, 1543, 1545, 1547, 1549, 1551, 1553, 1555, 1557, 1559, 1561, 1563, 1565, 1567, 1569, 1571, 1573, 1575, 1577, 1579, 1581, 1583, 1585, 1587, 1589, 1591, 1593, 1595, 1597, 1599, 1601, 1603, 1605, 1607, 1609, 1611, 1613, 1615, 1617, 1619, 1621, 1623, 1625, 1627, 1629, 1631, 1633, 1635, 1637, 1639, 1641, 1643, 1645, 1647, 1649, 1651, 1653, 1655, 1657, 1659, 1661, 1663, 1665, 1667, 1669, 1671, 1673, 1675, 1677, 1679, 1681, 1683, 1685, 1687, 1689, 1691, 1693, 1695, 1697, 1699, 1701, 1703, 1705, 1707, 1709, 1711, 1713, 1715, 1717, 1719, 1721, 1723, 1725, 1727, 1729, 1731, 1733, 1735, 1737, 1739, 1741, 1743, 1745, 1747, 1749, 1751, 1753, 1755, 1757, 1759, 1761, 1763, 1765, 1767, 1769, 1771, 1773, 1775, 1777, 1779, 1781, 1783, 1785, 1787, 1789, 1791, 1793, 1795, 1797, 1799, 1801, 1803, 1805, 1807, 1809, 1811, 1813, 1815, 1817, 1819, 1821, 1823, 1825, 1827, 1829, 1831, 1833, 1835, 1837, 1839, 1841, 1843, 1845, 1847, 1849, 1851, 1853, 1855, 1857, 1859, 1861, 1863, 1865, 1867, 1869, 1871, 1873, 1875, 1877, 1879, 1881, 1883, 1885, 1887, 1889, 1891, 1893, 1895, 1897, 1899, 1901, 1903, 1905, 1907, 1909, 1911, 1913, 1915, 1917, 1919, 1921, 1923, 1925, 1927, 1929, 1931, 1933, 1935, 1937, 1939, 1941, 1943, 1945, 1947, 1949, 1951, 1953, 1955, 1957, 1959, 1961, 1963, 1965, 1967, 1969, 1971, 1973, 1975, 1977, 1979, 1981, 1983, 1985, 1987, 1989, 1991, 1993, 1995, 1997, 1999, 2001, 2003, 2005, 2007, 2009, 2011, 2013, 2015, 2017, 2019, 2021, 2023, 2025, 2027, 2029, 2031, 2033, 2035, 2037, 2039, 2041, 2043, 2045, 2047, 2049, 2051, 2053, 2055, 2057, 2059, 2061, 2063, 2065, 2067, 2069, 2071, 2073, 2075, 2077, 2079, 2081, 2083, 2085, 2087, 2089, 2091, 2093, 2095, 2097, 2099, 2101, 2103, 2105, 2107, 2109, 2111, 2113, 2115, 2117, 2119, 2121, 2123, 2125, 2127, 2129, 2131, 2133, 2135, 2137, 2139, 2141, 2143, 2145, 2147, 2149, 2151, 2153, 2155, 2157, 2159, 2161, 2163, 2165, 2167, 2169, 2171, 2173, 2175, 2177, 2179, 2181, 2183, 2185, 2187, 2189, 2191, 2193, 2195, 2197, 2199, 2201, 2203, 2205, 2207, 2209, 2211, 2213, 2215, 2217, 2219, 2221, 2223, 2225, 2227, 2229, 2231, 2233, 2235, 2237, 2239, 2241, 2243, 2245, 2247, 2249, 2251, 2253, 2255, 2257, 2259, 2261, 2263, 2265, 2267, 2269, 2271, 2273, 2275, 2277, 2279, 2281, 2283, 2285, 2287, 2289, 2291, 2293, 2295, 2297, 2299, 2301, 2303, 2305, 2307, 2309, 2311, 2313, 2315, 2317, 2319, 2321, 2323, 2325, 2327, 2329, 2331, 2333, 2335, 2337, 2339, 2341, 2343, 2345, 2347, 2349, 2351, 2353, 2355, 2357, 2359, 2361, 2363, 2365, 2367, 2369, 2371, 2373, 2375, 2377, 2379, 2381, 2383, 2385, 2387, 2389, 2391, 2393, 2395, 2397, 2399, 2401, 2403, 2405, 2407, 2409, 2411, 2413, 2415, 2417, 2419, 2421, 2423, 2425, 2427, 2429, 2431, 2433, 2435, 2437, 2439, 2441, 2443, 2445, 2447, 2449, 2451, 2453, 2455, 2457, 2459, 2461, 2463, 2465, 2467, 2469, 2471, 2473, 2475, 2477, 2479, 2481, 2483, 2485, 2487, 2489, 2491, 2493, 2495, 2497, 2499, 2501, 2503, 2505, 2507, 2509, 2511, 2513, 2515, 2517, 2519, 2521, 2523, 2525, 2527, 2529, 2531, 2533, 2535, 2537, 2539, 2541, 2543, 2545, 2547, 2549, 2551, 2553, 2555, 2557, 2559, 2561, 2563, 2565, 2567, 2569, 2571, 2573, 2575, 2577, 2579, 2581, 2583, 2585, 2587, 2589, 2591, 2593, 2595, 2597, 2599, 2601, 2603, 2605, 2607, 2609, 2611, 2613, 2615, 2617, 2619, 2621, 2623, 2625, 2627, 2629, 2631, 2633, 2635, 2637, 2639, 2641, 2643, 2645, 2647, 2649, 2651, 2653, 2655, 2657, 2659, 2661, 2663, 2665, 2667, 2669, 2671, 2673, 2675, 2677, 2679, 2681, 2683, 2685, 2687, 2689, 2691, 2693, 2695, 2697, 2699, 2701, 2703, 2705, 2707, 2709, 2711, 2713, 2715, 2717, 2719, 2721, 2723, 2725, 2727, 2729, 2731, 2733, 2735, 2737, 2739, 2741, 2743, 2745, 2747, 2749, 2751, 2753, 2755, 2757, 2759, 2761, 2763, 2765, 2767, 2769, 2771, 2773, 2775, 2777, 2779, 2781, 2783, 2785, 2787, 2789, 2791, 2793, 2795, 2797, 2799, 2801, 2803, 2805, 2807, 2809, 2811, 2813, 2815, 2817, 2819, 2821, 2823, 2825, 2827, 2829, 2831, 2833, 2835, 2837, 2839, 2841, 2843, 2845, 2847, 2849, 2851, 2853, 2855, 2857, 2859, 2861, 2863, 2865, 2867, 2869, 2871, 2873, 2875, 2877, 2879, 2881, 2883, 2885, 2887, 2889, 2891, 2893, 2895, 2897, 2899, 2901, 2903, 2905, 2907, 2909, 2911, 2913, 2915, 2917, 2919, 2921, 2923, 2925, 2927, 2929, 2931, 2933, 2935, 2937, 2939, 2941, 2943, 2945, 2947, 2949, 2951, 2953, 2955, 2957, 2959, 2961, 2963, 2965, 2967, 2969, 2971, 2973, 2975, 2977, 2979, 2981, 2983, 2985, 2987, 2989, 2991, 2993, 2995, 2997, 2999, 3001, 3003, 3005, 3007, 3009, 3011, 3013, 3015, 3017, 3019, 3021, 3023, 3025, 3027, 3029, 3031, 3033, 3035, 3037, 3039, 3041, 3043, 3045, 3047, 3049, 3051, 3053, 3055, 3057, 3059, 3061, 3063, 3065, 3067, 3069, 3071, 3073, 3075, 3077, 3079, 3081, 3083, 3085, 3087, 3089, 3091, 3093, 3095, 3097, 3099, 3101, 3103, 3105, 3107, 3109, 3111, 3113, 3115, 3117, 3119, 3121, 3123, 3125, 3127, 3129, 3131, 3133, 3135, 3137, 3139, 3141, 3143, 3145, 3147, 3149, 3151, 3153, 3155, 3157, 3159, 3161, 3163, 3165, 3167, 3169, 3171, 3173, 3175, 3177, 3179, 3181, 3183, 3185, 3187, 3189, 3191, 3193, 3195, 3197, 3199, 3201, 3203, 3205, 3207, 3209, 3211, 3213, 3215, 3217, 3219, 3221, 3223, 3225, 3227, 3229, 3231, 3233, 3235, 3237, 3239, 3241, 3243, 3245, 3247, 3249, 3251, 3253, 3255, 3257, 3259, 3261, 3263, 3265, 3267, 3269, 3271, 3273, 3275, 3277, 3279, 3281, 3283, 3285, 3287, 3289, 3291, 3293, 3295, 3297, 3299, 3301, 3303, 3305, 3307, 3309, 3311, 3313, 3315, 3317, 3319, 3321, 3323, 3325, 3327, 3329, 3331, 3333, 3335, 3337, 3339, 3341, 3343, 3345, 3347, 3349, 3351, 3353, 3355, 3357, 3359, 3361, 3363, 3365, 3367, 3369, 3371, 3373, 3375, 3377, 3379, 3381, 3383, 3385, 3387, 3389, 3391, 3393, 3395, 3397, 3399, 3401, 3403, 3405, 3407, 3409, 3411, 3413, 3415, 3417, 3419, 3421, 3423, 3425, 3427, 3429, 3431, 3433, 3435, 3437, 3439, 3441, 3443, 3445, 3447, 3449, 3451, 3453, 3455, 3457, 3459, 3461, 3463, 3465, 3467, 3469, 3471, 3473, 3475, 3477, 3479, 3481, 3483, 3485, 3487, 3489, 3491, 3493, 3495, 3497, 3499, 3501, 3503, 3505, 3507, 3509, 3511, 3513, 3515, 3517, 3519, 3521, 3523, 3525, 3527, 3529, 3531, 3533, 3535, 3537, 3539, 3541, 3543, 3545, 3547, 3549, 3551, 3553, 3555, 3557, 3559, 3561, 3563, 3565, 3567, 3569, 3571, 3573, 3575, 3577, 3579, 3581, 3583, 3585, 3587, 3589, 3591, 3593, 3595, 3597, 3599, 3601, 3603, 3605, 3607, 3609, 3611, 3613, 3615, 3617, 3619, 3621, 3623, 3625, 3627, 3629, 3631, 3633, 3635, 3637, 3639, 3641, 3643, 3645, 3647, 3649, 3651, 3653, 3655, 3657, 3659, 3661, 3663, 3665, 3667, 3669, 3671, 3673, 3675, 3677, 3679, 3681, 3683, 3685, 3687, 3689, 3691, 3693, 3695, 3697, 3699, 3701, 3703, 3705, 3707, 3709, 3711, 3713, 3715, 3717, 3719, 3721, 3723, 3725, 3727, 3729, 3731, 3733, 3735, 3737, 3739, 3741, 3743, 3745, 3747, 3749, 3751, 3753, 3755, 3757, 3759, 3761, 3763, 3765, 3767, 3769, 3771, 3773, 3775, 3777, 3779, 3781, 3783, 3785, 3787, 3789, 3791, 3793, 3795, 3797, 3799, 3801, 3803, 3805, 3807, 3809, 3811, 3813, 3815, 3817, 3819, 3821, 3823, 3825, 3827, 3829, 3831, 3833, 3835, 3837, 3839, 3841, 3843, 3845, 3847, 3849, 3851, 3853, 3855, 3857, 3859, 3861, 3863, 3865, 3867, 3869, 3871, 3873, 3875, 3877, 3879, 3881, 3883, 3885, 3887, 3889, 3891, 3893, 3895, 3897, 3899, 3901, 3903, 3905, 3907, 3909, 3911, 3913, 3915, 3917, 3919, 3921, 3923, 3925, 3927, 3929, 3931, 3933, 3935, 3937, 3939, 3941, 3943, 3945, 3947, 3949, 3951, 3953, 3955, 3957, 3959, 3961, 3963, 3965, 3967, 3969, 3971, 3973, 3975, 3977, 3979, 3981, 3983, 3985, 3987, 3989, 3991, 3993, 3995, 3997, 3999, 4001, 4003, 4005, 4007, 4009, 4011, 4013, 4015, 4017, 4019, 4021, 4023, 4025, 4027, 4029, 4031, 4033, 4035, 4037, 4039, 4041, 4043, 4045, 4047, 4049, 4051, 4053, 4055, 4057, 4059, 4061, 4063, 4065, 4067, 4069, 4071, 4073, 4075, 4077, 4079, 4081, 4083, 4085, 4087, 4089, 4091, 4093, 4095, 4097, 4099, 4101, 4103, 4105, 4107, 4109, 4111, 4113, 4115, 4117, 4119, 4121, 4123, 4125, 4127, 4129, 4131, 4133, 4135, 4137, 4139, 4141, 4143, 4145, 4147, 4149, 4151, 4153, 4155, 4157, 4159, 4161, 4163, 4165, 4167, 4169, 4171, 4173, 4175, 4177, 4179, 4181, 4183, 4185, 4187, 4189, 4191, 4193, 4195, 4197, 4199, 4201, 4203, 4205, 4207, 4209, 4211, 4213, 4215, 4217, 4219, 4221, 4223, 4225, 4227, 4229, 4231, 4233, 4235, 4237, 4239, 4241, 4243, 4245, 4247, 4249, 4251, 4253, 4255, 4257, 4259, 4261, 4263, 4265, 4267, 4269, 4271, 4273, 4275, 4277, 4279, 4281, 4283, 4285, 4287, 4289, 4291, 4293, 4295, 4297, 4299, 4301, 4303, 4305, 4307, 4309, 4311, 4313, 4315, 4317, 4319, 4321, 4323, 4325, 4327, 4329, 4331, 4333, 4335, 4337, 4339, 4341, 4343, 4345, 4347, 4349, 4351, 4353, 4355, 4357, 4359, 4361, 4363, 4365, 4367, 4369, 4371, 4373, 4375, 4377, 4379, 4381, 4383, 4385, 4387, 4389, 4391, 4393, 4395, 4397, 4399, 4401, 4403, 4405, 4407, 4409, 4411, 4413, 4415, 4417, 4419, 4421, 4423, 4425, 4427, 4429, 4431, 4433, 4435, 4437, 4439, 4441, 4443, 4445, 4447, 4449, 4451, 4453, 4455, 4457, 4459, 4461, 4463, 4465, 4467, 4469, 4471, 4473, 4475, 4477, 4479, 4481, 4483, 4485, 4487, 4489, 4491, 4493, 4495, 4497, 4499, 4501, 4503, 4505, 4507, 4509, 4511, 4513, 4515, 4517, 4519, 4521, 4523, 4525, 4527, 4529, 4531, 4533, 4535, 4537, 4539, 4541, 4543, 4545, 4547, 4549, 4551, 4553, 4555, 4557, 4559, 4561, 4563, 4565, 4567, 4569, 4571, 4573, 4575, 4577, 4579, 4581, 4583, 4585, 4587, 4589, 4591, 4593, 4595, 4597, 4599, 4601, 4603, 4605, 4607, 4609, 4611, 4613, 4615, 4617, 4619, 4621, 4623, 4625, 4627, 4629, 4631, 4633, 4635, 4637, 4639, 4641, 4643, 4645, 4647, 4649, 4651, 4653, 4655, 4657, 4659, 4661, 4663, 4665, 4667, 4669, 4671, 4673, 4675, 4677, 4679, 4681, 4683, 4685, 4687, 4689, 4691, 4693, 4695, 4697, 4699, 4701, 4703, 4705, 4707, 4709, 4711, 4713, 4715, 4717, 4719, 4721, 4723, 4725, 4727, 4729, 4731, 4733, 4735, 4737, 4739, 4741, 4743, 4745, 4747, 4749, 4751, 4753, 4755, 4757, 4759, 4761, 4763, 4765, 4767, 4769, 4771, 4773, 4775, 4777, 4779, 4781, 4783, 4785, 4787, 4789, 4791, 4793, 4795, 4797, 4799, 4801, 4803, 4805, 4807, 4809, 4811, 4813, 4815, 4817, 4819, 4821, 4823, 4825, 4827, 4829, 4831, 4833, 4835, 4837, 4839, 4841, 4843, 4845, 4847, 4849, 4851, 4853, 4855, 4857, 4859, 4861, 4863, 4865, 4867, 4869, 4871, 4873, 4875, 4877, 4879, 4881, 4883, 4885, 4887, 4889, 4891, 4893, 4895, 4897, 4899, 4901, 4903, 4905, 4907, 4909, 4911, 4913, 4915, 4917, 4919, 4921, 4923, 4925, 4927, 4929, 4931, 4933, 4935, 4937, 4939, 4941, 4943, 4945, 4947, 4949, 4951, 4953, 4955, 4957, 4959, 4961, 4963, 4965, 4967, 4969, 4971, 4973, 4975, 4977, 4979, 4981, 4983, 4985, 4987, 4989, 4991, 4993, 4995, 4997, 4999, 5001, 5003, 5005, 5007, 5009, 5011, 5013, 5015, 5017, 5019, 5021, 5023, 5025, 5027, 5029, 5031, 5033, 5035, 5037, 5039, 5041, 5043, 5045, 5047, 5049, 5051, 5053, 5055, 5057, 5059, 5061, 5063, 5065, 5067, 5069, 5071, 5073, 5075, 5077, 5079, 5081, 5083, 5085, 5087, 5089, 5091, 5093, 5095, 5097, 5099, 5101, 5103, 5105, 5107, 5109, 5111, 5113, 5115, 5117, 5119, 5121, 5123, 5125, 5127, 5129, 5131, 5133, 5135, 5137, 5139, 5141, 5143, 5145, 5147, 5149, 5151, 5153, 5155, 5157, 5159, 5161, 5163, 5165, 5167, 5169, 5171, 5173, 5175, 5177, 5179, 5181, 5183, 5185, 5187, 5189, 5191, 5193, 5195, 5197, 5199, 5201, 5203, 5205, 5207, 5209, 5211, 5213, 5215, 5217, 5219, 5221, 5223, 5225, 5227, 5229, 5231, 5233, 5235, 5237, 5239, 5241, 5243, 5245, 5247, 5249, 5251, 5253, 5255, 5257, 5259, 5261, 5263, 5265, 5267, 5269, 5271, 5273, 5275, 5277, 5279, 5281, 5283, 5285, 5287, 5289, 5291, 5293, 5295, 5297, 5299, 5301, 5303, 5305, 5307, 5309, 5311, 5313, 5315, 5317, 5319, 5321, 5323, 5325, 5327, 5329, 5331, 5333, 5335, 5337, 5339, 5341, 5343, 5345, 5347, 5349, 5351, 5353, 5355, 5357, 5359, 5361, 5363, 5365, 5367, 5369, 5371, 5373, 5375, 5377, 5379, 5381, 5383, 5385, 5387, 5389, 5391, 5393, 5395, 5397, 5399, 5401, 5403, 5405, 5407, 5409, 5411, 5413, 5415, 5417, 5419, 5421, 5423, 5425, 5427, 5429, 5431, 5433, 5435, 5437, 5439, 5441, 5443, 5445, 5447, 5449, 5451, 5453, 5455, 5457, 5459, 5461, 5463, 5465, 5467, 5469, 5471, 5473, 5475, 5477, 5479, 5481, 5483, 5485, 5487, 5489, 5491, 5493, 5495, 5497, 5499, 5501, 5503, 5505, 5507, 5509, 5511, 5513, 5515, 5517, 5519, 5521, 5523, 5525, 5527, 5529, 5531, 5533, 5535, 5537, 5539, 5541, 5543, 5545, 5547, 5549, 5551, 5553, 5555, 5557, 5559, 5561, 5563, 5565, 5567, 5569, 5571, 5573, 5575, 5577, 5579, 5581, 5583, 5585, 5587, 5589, 5591, 5593, 5595, 5597, 5599, 5601, 5603, 5605, 5607, 5609, 5611, 5613, 5615, 5617, 5619, 5621, 5623, 5625, 5627, 5629, 5631, 5633, 5635, 5637, 5639, 5641, 5643, 5645, 5647, 5649, 5651, 5653, 5655, 5657, 5659, 5661, 5663, 5665, 5667, 5669, 5671, 5673, 5675, 5677, 5679, 5681, 5683, 5685, 5687, 5689, 5691, 5693, 5695, 5697, 5699, 5701, 5703, 5705, 5707, 5709, 5711, 5713, 5715, 5717, 5719, 5721, 5723, 5725, 5727, 5729, 5731, 5733, 5735, 5737, 5739, 5741, 5743, 5745, 5747, 5749, 5751, 5753, 5755, 5757, 5759, 5761, 5763, 5765, 5767, 5769, 5771, 5773, 5775, 5777, 5779, 5781, 5783, 5785, 5787, 5789, 5791, 5793, 5795, 5797, 5799, 5801, 5803, 5805, 5807, 5809, 5811, 5813, 5815, 5817, 5819, 5821, 5823, 5825, 5827, 5829, 5831, 5833, 5835, 5837, 5839, 5841, 5843, 5845, 5847, 5849, 5851, 5853, 5855, 5857, 5859, 5861, 5863, 5865, 5867, 5869, 5871, 5873, 5875, 5877, 5879, 5881, 5883, 5885, 5887, 5889, 5891, 5893, 5895, 5897, 5899, 5901, 5903, 5905, 5907, 5909, 5911, 5913, 5915, 5917, 5919, 5921, 5923, 5925, 5927, 5929, 5931, 5933, 5935, 5937, 5939, 5941, 5943, 5945, 5947, 5949, 5951, 5953, 5955, 5957, 5959, 5961, 5963, 5965, 5967, 5969, 5971, 5973, 5975, 5977, 5979, 5981, 5983, 5985, 5987, 5989, 5991, 5993, 5995, 5997, 5999, 6001, 6003, 6005, 6007, 6009, 6011, 6013, 6015, 6017, 6019, 6021, 6023, 6025, 6027, 6029, 6031, 6033, 6035, 6037, 6039, 6041, 6043, 6045, 6047, 6049, 6051, 6053, 6055, 6057, 6059, 6061, 6063, 6065, 6067, 6069, 6071, 6073, 6075, 6077, 6079, 6081, 6083, 6085, 6087, 6089, 6091, 6093, 6095, 6097, 6099, 6101, 6103, 6105, 6107, 6109, 6111, 6113, 6115, 6117, 6119, 6121, 6123, 6125, 6127, 6129, 6131, 6133, 6135, 6137, 6139, 6141, 6143, 6145, 6147, 6149, 6151, 6153, 6155, 6157, 6159, 6161, 6163, 6165, 6167, 6169, 6171, 6173, 6175, 6177, 6179, 6181, 6183, 6185, 6187, 6189, 6191, 6193, 6195, 6197, 6199, 6201, 6203, 6205, 6207, 6209, 6211, 6213, 6215, 6217, 6219, 6221, 6223, 6225, 6227, 6229, 6231, 6233, 6235, 6237, 6239, 6241, 6243, 6245, 6247, 6249, 6251, 6253, 6255, 6257, 6259, 6261, 6263, 6265, 6267, 6269, 6271, 6273, 6275, 6277, 6279, 6281, 6283, 6285, 6287, 6289, 6291, 6293, 6295, 6297, 6299, 6301, 6303, 6305, 6307, 6309, 6311, 6313, 6315, 6317, 6319, 6321, 6323, 6325, 6327, 6329, 6331, 6333, 6335, 6337, 6339, 6341, 6343, 6345, 6347, 6349, 6351, 6353, 6355, 6357, 6359, 6361, 6363, 6365, 6367, 6369, 6371, 6373, 6375, 6377, 6379, 6381, 6383, 6385, 6387, 6389, 6391, 6393, 6395, 6397, 6399, 6401, 6403, 6405, 6407, 6409, 6411, 6413, 6415, 6417, 6419, 6421, 6423, 6425, 6427, 6429, 6431, 6433, 6435, 6437, 6439, 6441, 6443, 6445, 6447, 6449, 6451, 6453, 6455, 6457, 6459, 6461, 6463, 6465, 6467, 6469, 6471, 6473, 6475, 6477, 6479, 6481, 6483, 6485, 6487, 6489, 6491, 6493, 6495, 6497, 6499, 6501, 6503, 6505, 6507, 6509, 6511, 6513, 6515, 6517, 6519, 6521, 6523, 6525, 6527, 6529, 6531, 6533, 6535, 6537, 6539, 6541, 6543, 6545, 6547, 6549, 6551, 6553, 6555, 6557, 6559, 6561, 6563, 6565, 6567, 6569, 6571, 6573, 6575, 6577, 6579, 6581, 6583, 6585, 6587, 6589, 6591, 6593, 6595, 6597, 6599, 6601, 6603, 6605, 6607, 6609, 6611, 6613, 6615, 6617, 6619, 6621, 6623, 6625, 6627, 6629, 6631, 6633, 6635, 6637, 6639, 6641, 6643, 6645, 6647, 6649, 6651, 6653, 6655, 6657, 6659, 6661, 6663, 6665, 6667, 6669, 6671, 6673, 6675, 6677, 6679, 6681, 6683, 6685, 6687, 6689, 6691, 6693, 6695, 6697, 6699, 6701, 6703, 6705, 6707, 6709, 6711, 6713, 6715, 6717, 6719, 6721, 6723, 6725, 6727, 6729, 6731, 6733, 6735, 6737, 6739, 6741, 6743, 6745, 6747, 6749, 6751, 6753, 6755, 6757, 6759, 6761, 6763, 6765, 6767, 6769, 6771, 6773, 6775, 6777, 6779, 6781, 6783, 6785, 6787, 6789, 6791, 6793, 6795, 6797, 6799, 6801, 6803, 6805, 6807, 6809, 6811, 6813, 6815, 6817, 6819, 6821, 6823, 6825, 6827, 6829, 6831, 6833, 6835, 6837, 6839, 6841, 6843, 6845, 6847, 6849, 6851, 6853, 6855, 6857, 6859, 6861, 6863, 6865, 6867, 6869, 6871, 6873, 6875, 6877, 6879, 6881, 6883, 6885, 6887, 6889, 6891, 6893, 6895, 6897, 6899, 6901, 6903, 6905, 6907, 6909, 6911, 6913, 6915, 6917, 6919, 6921, 6923, 6925, 6927, 6929, 6931, 6933, 6935, 6937, 6939, 6941, 6943, 6945, 6947, 6949, 6951, 6953, 6955, 6957, 6959, 6961, 6963, 6965, 6967, 6969, 6971, 6973, 6975, 6977, 6979, 6981, 6983, 6985, 6987, 6989, 6991, 6993, 6995, 6997, 6999, 7001, 7003, 7005, 7007, 7009, 7011, 7013, 7015, 7017, 7019, 7021, 7023, 7025, 7027, 7029, 7031, 7033, 7035, 7037, 7039, 7041, 7043, 7045, 7047, 7049, 7051, 7053, 7055, 7057, 7059, 7061, 7063, 7065, 7067, 7069, 7071, 7073, 7075, 7077, 7079, 7081, 7083, 7085, 7087, 7089, 7091, 7093, 7095, 7097, 7099, 7101, 7103, 7105, 7107, 7109, 7111, 7113, 7115, 7117, 7119, 7121, 7123, 7125, 7127, 7129, 7131, 7133, 7135, 7137, 7139, 7141, 7143, 7145, 7147, 7149, 7151, 7153, 7155, 7157, 7159, 7161, 7163, 7165, 7167, 7169, 7171, 7173, 7175, 7177, 7179, 7181, 7183, 7185, 7187, 7189, 7191, 7193, 7195, 7197, 7199, 7201, 7203, 7205, 7207, 7209, 7211, 7213, 7215, 7217, 7219, 7221, 7223, 7225, 7227, 7229, 7231, 7233, 7235, 7237, 7239, 7241, 7243, 7245, 7247, 7249, 7251, 7253, 7255, 7257, 7259, 7261, 7263, 7265, 7267, 7269, 7271, 7273, 7275, 7277, 7279, 7281, 7283, 7285, 7287, 7289, 7291, 7293, 7295, 7297, 7299, 7301, 7303, 7305, 7307, 7309, 7311, 7313, 7315, 7317, 7319, 7321, 7323, 7325, 7327, 7329, 7331, 7333, 7335, 7337, 7339, 7341, 7343, 7345, 7347, 7349, 7351, 7353, 7355, 7357, 7359, 7361, 7363, 7365, 7367, 7369, 7371, 7373, 7375, 7377, 7379, 7381, 7383, 7385, 7387, 7389, 7391, 7393, 7395, 7397, 7399, 7401, 7403, 7405, 7407, 7409, 7411, 7413, 7415, 7417, 7419, 7421, 7423, 7425, 7427, 7429, 7431, 7433, 7435, 7437, 7439, 7441, 7443, 7445, 7447, 7449, 7451, 7453, 7455, 7457, 7459, 7461, 7463, 7465, 7467, 7469, 7471, 7473, 7475, 7477, 7479, 7481, 7483, 7485, 7487, 7489, 7491, 7493, 7495, 7497, 7499, 7501, 7503, 7505, 7507, 7509, 7511, 7513, 7515, 7517, 7519, 7521, 7523, 7525, 7527, 7529, 7531, 7533, 7535, 7537, 7539, 7541, 7543, 7545, 7547, 7549, 7551, 7553, 7555, 7557, 7559, 7561, 7563, 7565, 7567, 7569, 7571, 7573, 7575, 7577, 7579, 7581, 7583, 7585, 7587, 7589, 7591, 7593, 7595, 7597, 7599, 7601, 7603, 7605, 7607, 7609, 7611, 7613, 7615, 7617, 7619, 7621, 7623, 7625, 7627, 7629, 7631, 7633, 7635, 7637, 7639, 7641, 7643, 7645, 7647, 7649, 7651, 7653, 7655, 7657, 7659, 7661, 7663, 7665, 7667, 7669, 7671, 7673, 7675, 7677, 7679, 7681, 7683, 7685, 7687, 7689, 7691, 7693, 7695, 7697, 7699, 7701, 7703, 7705, 7707, 7709, 7711, 7713, 7715, 7717, 7719, 7721, 7723, 7725, 7727, 7729, 7731, 7733, 7735, 7737, 7739, 7741, 7743, 7745, 7747, 7749, 7751, 7753, 7755, 7757, 7759, 7761, 7763, 7765, 7767, 7769, 7771, 7773, 7775, 7777, 7779, 7781, 7783, 7785, 7787, 7789, 7791, 7793, 7795, 7797, 7799, 7801, 7803, 7805, 7807, 7809, 7811, 7813, 7815, 7817, 7819, 7821, 7823, 7825, 7827, 7829, 7831, 7833, 7835, 7837, 7839, 7841, 7843, 7845, 7847, 7849, 7851, 7853, 7855, 7857, 7859, 7861, 7863, 7865, 7867, 7869, 7871, 7873, 7875, 7877, 7879, 7881, 7883, 7885, 7887, 7889, 7891, 7893, 7895, 7897, 7899, 7901, 7903, 7905, 7907, 7909, 7911, 7913, 7915, 7917, 7919, 7921, 7923, 7925, 7927, 7929, 7931, 7933, 7935, 7937, 7939, 7941, 7943, 7945, 7947, 7949, 7951, 7953, 7955, 7957, 7959, 7961, 7963, 7965, 7967, 7969, 7971, 7973, 7975, 7977, 7979, 7981, 7983, 7985, 7987, 7989, 7991, 7993, 7995, 7997, 7999, 8001, 8003, 8005, 8007, 8009, 8011, 8013, 8015, 8017, 8019, 8021, 8023, 8025, 8027, 8029, 8031, 8033, 8035, 8037, 8039, 8041, 8043, 8045, 8047, 8049, 8051, 8053, 8055, 8057, 8059, 8061, 8063, 8065, 8067, 8069, 8071, 8073, 8075, 8077, 8079, 8081, 8083, 8085, 8087, 8089, 8091, 8093, 8095, 8097, 8099, 8101, 8103, 8105, 8107, 8109, 8111, 8113, 8115, 8117, 8119, 8121, 8123, 8125, 8127, 8129, 8131, 8133, 8135, 8137, 8139, 8141, 8143, 8145, 8147, 8149, 8151, 8153, 8155, 8157, 8159, 8161, 8163, 8165, 8167, 8169, 8171, 8173, 8175, 8177, 8179, 8181, 8183, 8185, 8187, 8189, 8191, 8193, 8195, 8197, 8199, 8201, 8203, 8205, 8207, 8209, 8211, 8213, 8215, 8217, 8219, 8221, 8223, 8225, 8227, 8229, 8231, 8233, 8235, 8237, 8239, 8241, 8243, 8245, 8247, 8249, 8251, 8253, 8255, 8257, 8259, 8261, 8263, 8265, 8267, 8269, 8271, 8273, 8275, 8277, 8279, 8281, 8283, 8285, 8287, 8289, 8291, 8293, 8295, 8297, 8299, 8301, 8303, 8305, 8307, 8309, 8311, 8313, 8315, 8317, 8319, 8321, 8323, 8325, 8327, 8329, 8331, 8333, 8335, 8337, 8339, 8341, 8343, 8345, 8347, 8349, 8351, 8353, 8355, 8357, 8359, 8361, 8363, 8365, 8367, 8369, 8371, 8373, 8375, 8377, 8379, 8381, 8383, 8385, 8387, 8389, 8391, 8393, 8395, 8397, 8399, 8401, 8403, 8405, 8407, 8409, 8411, 8413, 8415, 8417, 8419, 8421, 8423, 8425, 8427, 8429, 8431, 8433, 8435, 8437, 8439, 8441, 8443, 8445, 8447, 8449, 8451, 8453, 8455, 8457, 8459, 8461, 8463, 8465, 8467, 8469, 8471, 8473, 8475, 8477, 8479, 8481, 8483, 8485, 8487, 8489, 8491, 8493, 8495, 8497, 8499, 8501, 8503, 8505, 8507, 8509, 8511, 8513, 8515, 8517, 8519, 8521, 8523, 8525, 8527, 8529, 8531, 8533, 8535, 8537, 8539, 8541, 8543, 8545, 8547, 8549, 8551, 8553, 8555, 8557, 8559, 8561, 8563, 8565, 8567, 8569, 8571, 8573, 8575, 8577, 8579, 8581, 8583, 8585, 8587, 8589, 8591, 8593, 8595, 8597, 8599, 8601, 8603, 8605, 8607, 8609, 8611, 8613, 8615, 8617, 8619, 8621, 8623, 8625, 8627, 8629, 8631, 8633, 8635, 8637, 8639, 8641, 8643, 8645, 8647, 8649, 8651, 8653, 8655, 8657, 8659, 8661, 8663, 8665, 8667, 8669, 8671, 8673, 8675, 8677, 8679, 8681, 8683, 8685, 8687, 8689, 8691, 8693, 8695, 8697, 8699, 8701, 8703, 8705, 8707, 8709, 8711, 8713, 8715, 8717, 8719, 8721, 8723, 8725, 8727, 8729, 8731, 8733, 8735, 8737, 8739, 8741, 8743, 8745, 8747, 8749, 8751, 8753, 8755, 8757, 8759, 8761, 8763, 8765, 8767, 8769, 8771, 8773, 8775, 8777, 8779, 8781, 8783, 8785, 8787, 8789, 8791, 8793, 8795, 8797, 8799, 8801, 8803, 8805, 8807, 8809, 8811, 8813, 8815, 8817, 8819, 8821, 8823, 8825, 8827, 8829, 8831, 8833, 8835, 8837, 8839, 8841, 8843, 8845, 8847, 8849, 8851, 8853, 8855, 8857, 8859, 8861, 8863, 8865, 8867, 8869, 8871, 8873, 8875, 8877, 8879, 8881, 8883, 8885, 8887, 8889, 8891, 8893, 8895, 8897, 8899, 8901, 8903, 8905, 8907, 8909, 8911, 8913, 8915, 8917, 8919, 8921, 8923, 8925, 8927, 8929, 8931, 8933, 8935, 8937, 8939, 8941, 8943, 8945, 8947, 8949, 8951, 8953, 8955, 8957, 8959, 8961, 8963, 8965, 8967, 8969, 8971, 8973, 8975, 8977, 8979, 8981, 8983, 8985, 8987, 8989, 8991, 8993, 8995, 8997, 8999, 9001, 9003, 9005, 9007, 9009, 9011, 9013, 9015, 9017, 9019, 9021, 9023, 9025, 9027, 9029, 9031, 9033, 9035, 9037, 9039, 9041, 9043, 9045, 9047, 9049, 9051, 9053, 9055, 9057, 9059, 9061, 9063, 9065, 9067, 9069, 9071, 9073, 9075, 9077, 9079, 9081, 9083, 9085, 9087, 9089, 9091, 9093, 9095, 9097, 9099, 9101, 9103, 9105, 9107, 9109, 9111, 9113, 9115, 9117, 9119, 9121, 9123, 9125, 9127, 9129, 9131, 9133, 9135, 9137, 9139, 9141, 9143, 9145, 9147, 9149, 9151, 9153, 9155, 9157, 9159, 9161, 9163, 9165, 9167, 9169, 9171, 9173, 9175, 9177, 9179, 9181, 9183, 9185, 9187, 9189, 9191, 9193, 9195, 9197, 9199, 9201, 9203, 9205, 9207, 9209, 9211, 9213, 9215, 9217, 9219, 9221, 9223, 9225, 9227, 9229, 9231, 9233, 9235, 9237, 9239, 9241, 9243, 9245, 9247, 9249, 9251, 9253, 9255, 9257, 9259, 9261, 9263, 9265, 9267, 9269, 9271, 9273, 9275, 9277, 9279, 9281, 9283, 9285, 9287, 9289, 9291, 9293, 9295, 9297, 9299, 9301, 9303, 9305, 9307, 9309, 9311, 9313, 9315, 9317, 9319, 9321, 9323, 9325, 9327, 9329, 9331, 9333, 9335, 9337, 9339, 9341, 9343, 9345, 9347, 9349, 9351, 9353, 9355, 9357, 9359, 9361, 9363, 9365, 9367, 9369, 9371, 9373, 9375, 9377, 9379, 9381, 9383, 9385, 9387, 9389, 9391, 9393, 9395, 9397, 9399, 9401, 9403, 9405, 9407, 9409, 9411, 9413, 9415, 9417, 9419, 9421, 9423, 9425, 9427, 9429, 9431, 9433, 9435, 9437, 9439, 9441, 9443, 9445, 9447, 9449, 9451, 9453, 9455, 9457, 9459, 9461, 9463, 9465, 9467, 9469, 9471, 9473, 9475, 9477, 9479, 9481, 9483, 9485, 9487, 9489, 9491, 9493, 9495, 9497, 9499, 9501, 9503, 9505, 9507, 9509, 9511, 9513, 9515, 9517, 9519, 9521, 9523, 9525, 9527, 9529, 9531, 9533, 9535, 9537, 9539, 9541, 9543, 9545, 9547, 9549, 9551, 9553, 9555, 9557, 9559, 9561, 9563, 9565, 9567, 9569, 9571, 9573, 9575, 9577, 9579, 9581, 9583, 9585, 9587, 9589, 9591, 9593, 9595, 9597, 9599, 9601, 9603, 9605, 9607, 9609, 9611, 9613, 9615, 9617, 9619, 9621, 9623, 9625, 9627, 9629, 9631, 9633, 9635, 9637, 9639, 9641, 9643, 9645, 9647, 9649, 9651, 9653, 9655, 9657, 9659, 9661, 9663, 9665, 9667, 9669, 9671, 9673, 9675, 9677, 9679, 9681, 9683, 9685, 9687, 9689, 9691, 9693, 9695, 9697, 9699, 9701, 9703, 9705, 9707, 9709, 9711, 9713, 9715, 9717, 9719, 9721, 9723, 9725, 9727, 9729, 9731, 9733, 9735, 9737, 9739, 9741, 9743, 9745, 9747, 9749, 9751, 9753, 9755, 9757, 9759, 9761, 9763, 9765, 9767, 9769, 9771, 9773, 9775, 9777, 9779, 9781, 9783, 9785, 9787, 9789, 9791, 9793, 9795, 9797, 9799, 9801, 9803, 9805, 9807, 9809, 9811, 9813, 9815, 9817, 9819, 9821, 9823, 9825, 9827, 9829, 9831, 9833, 9835, 9837, 9839, 9841, 9843, 9845, 9847, 9849, 9851, 9853, 9855, 9857, 9859, 9861, 9863, 9865, 9867, 9869, 9871, 9873, 9875, 9877, 9879, 9881, 9883, 9885, 9887, 9889, 9891, 9893, 9895, 9897, 9899, 9901, 9903, 9905, 9907, 9909, 9911, 9913, 9915, 9917, 9919, 9921, 9923, 9925, 9927, 9929, 9931, 9933, 9935, 9937, 9939, 9941, 9943, 9945, 9947, 9949, 9951, 9953, 9955, 9957, 9959, 9961, 9963, 9965, 9967, 9969, 9971, 9973, 9975, 9977, 9979, 9981, 9983, 9985, 9987, 9989, 9991, 9993, 9995, 9997, 9999, 10001, 10003, 10005, 10007, 10009, 10011, 10013, 10015, 10017, 10019, 10021, 10023, 10025, 10027, 10029, 10031, 10033, 10035, 10037, 10039, 10041, 10043, 10045, 10047, 10049, 10051, 10053, 10055, 10057, 10059, 10061, 10063, 10065, 10067, 10069, 10071, 10073, 10075, 10077, 10079, 10081, 10083, 10085, 10087, 10089, 10091, 10093, 10095, 10097, 10099, 10101, 10103, 10105, 10107, 10109, 10111, 10113, 10115, 10117, 10119, 10121, 10123, 10125, 10127, 10129, 10131, 10133, 10135, 10137, 10139, 10141, 10143, 10145, 10147, 10149, 10151, 10153, 10155, 10157, 10159, 10161, 10163, 10165, 10167, 10169, 10171, 10173, 10175, 10177, 10179, 10181, 10183, 10185, 10187, 10189, 10191, 10193, 10195, 10197, 10199, 10201, 10203, 10205, 10207, 10209, 10211, 10213, 10215, 10217, 10219, 10221, 10223, 10225, 10227, 10229, 10231, 10233, 10235, 10237, 10239, 10241, 10243, 10245, 10247, 10249, 10251, 10253, 10255, 10257, 10259, 10261, 10263, 10265, 10267, 10269, 10271, 10273, 10275, 10277, 10279, 10281, 10283, 10285, 10287, 10289, 10291, 10293, 10295, 10297, 10299, 10301, 10303, 10305, 10307, 10309, 10311, 10313, 10315, 10317, 10319, 10321, 10323, 10325, 10327, 10329, 10331, 10333, 10335, 10337, 10339, 10341, 10343, 10345, 10347, 10349, 10351, 10353, 10355, 10357, 10359, 10361, 10363, 10365, 10367, 10369, 10371, 10373, 10375, 10377, 10379, 10381, 10383, 10385, 10387, 10389, 10391, 10393, 10395, 10397, 10399, 10401, 10403, 10405, 10407, 10409, 10411, 10413, 10415, 10417, 10419, 10421, 10423, 10425, 10427, 10429, 10431, 10433, 10435, 10437, 10439, 10441, 10443, 10445, 10447, 10449, 10451, 10453, 10455, 10457, 10459, 10461, 10463, 10465, 10467, 10469, 10471, 10473, 10475, 10477, 10479, 10481, 10483, 10485, 10487, 10489, 10491, 10493, 10495, 10497, 10499, 10501, 10503, 10505, 10507, 10509, 10511, 10513, 10515, 10517, 10519, 10521, 10523, 10525, 10527, 10529, 10531, 10533, 10535, 10537, 10539, 10541, 10543, 10545, 10547, 10549, 10551, 10553, 10555, 10557, 10559, 10561, 10563, 10565, 10567, 10569, 10571, 10573, 10575, 10577, 10579, 10581, 10583, 10585, 10587, 10589, 10591, 10593, 10595, 10597, 10599, 10601, 10603, 10605, 10607, 10609, 10611, 10613, 10615, 10617, 10619, 10621, 10623, 10625, 10627, 10629, 10631, 10633, 10635, 10637, 10639, 10641, 10643, 10645, 10647, 10649, 10651, 10653, 10655, 10657, 10659, 10661, 10663, 10665, 10667, 10669, 10671, 10673, 10675, 10677, 10679, 10681, 10683, 10685, 10687, 10689, 10691, 10693, 10695, 10697, 10699, 10701, 10703, 10705, 10707, 10709, 10711, 10713, 10715, 10717, 10719, 10721, 10723, 10725, 10727, 10729, 10731, 10733, 10735, 10737, 10739, 10741, 10743, 10745, 10747, 10749, 10751, 10753, 10755, 10757, 10759, 10761, 10763, 10765, 10767, 10769, 10771, 10773, 10775, 10777, 10779, 10781, 10783, 10785, 10787, 10789, 10791, 10793, 10795, 10797, 10799, 10801, 10803, 10805, 10807, 10809, 10811, 10813, 10815, 10817, 10819, 10821, 10823, 10825, 10827, 10829, 10831, 10833, 10835, 10837, 10839, 10841, 10843, 10845, 10847, 10849, 10851, 10853, 10855, 10857, 10859, 10861, 10863, 10865, 10867, 10869, 10871, 10873, 10875, 10877, 10879, 10881, 10883, 10885, 10887, 10889, 10891, 10893, 10895, 10897, 10899, 10901, 10903, 10905, 10907, 10909, 10911, 10913, 10915, 10917, 10919, 10921, 10923, 10925, 10927, 10929, 10931, 10933, 10935, 10937, 10939, 10941, 10943, 10945, 10947, 10949, 10951, 10953, 10955, 10957, 10959, 10961, 10963, 10965, 10967, 10968, 10969, 10970, 10971, 10972, 10973, 10974, 10975, 10976, 10977, 10978, 10979, 10980, 10981, 10982, 10983, 10984, 10985, 10986, 10987, 10988, 10989, 10990, 10991, 10992, 10993, 10994, 10995, 10996, 10997, 10998, 10999, 11000, 11001, 11002, 11003, 11004, 11005, 11006, 11007, 11008, 11009, 11010, 11011, 11012, 11013, 11014, 11015, 11016, 11017, 11018, 11019, 11020, 11021, 11022, 11023, 11024, 11025, 11026, 11027, 11028, 11029, 11030, 11031, 11032, 11033, 11034, 11035, 11036, 11037, 11038, 11039, 11040, 11041, 11042, 11043, 11044, 11045, 11046, 11047, 11048, 11049, 11050, 11051, 11052, 11053, 11054, 11055, 11056, 11057, 11058, 11059, 11060, 11061, 11062, 11063, 11064, 11065, 11066, 11067, 11068, 11069, 11070, 11071, 11072, 11073, 11074, 11075, 11076, 11077, 11078, 11079, 11080, 11081, 11082, 11083, 11084, 11085, 11086, 11087, 11088, 11089, 11090, 11091, 11092, 11093, 11094, 11095, 11096, 11097, 11098, 11099, 11100, 11101, 11102, 11103, 11104, 11105, 11106, 11107, 11108, 11109, 11110, 11111, 11112, 11113, 11114, 11115, 11116, 11117, 11118, 11119, 11120, 11121, 11122, 11123, 11124, 11125, 11126, 11127, 11128, 11129, 11130, 11131, 11132, 11133, 11134, 11135, 11136, 11137, 11138, 11139, 11140, 11141, 11142, 11143, 11144, 11145, 11146, 11147, 11148, 11149, 11150, 11151, 11152, 11153, 11154, 11155, 11156, 11157, 11158, 11159, 11160, 11161, 11162, 11163, 11164, 11165, 11166, 11167, 11168, 11169, 11170, 11171, 11172, 11173, 11174, 11175, 11176, 11177, 11178, 11179, 11180, 11181, 11182, 11183, 11184, 11185, 11186, 11187, 11188, 11189, 11190, 11191, 11192, 11193, 11194, 11195, 11196, 11197, 11198, 11199, 11200, 11201, 11202, 11203, 11204, 11205, 11206, 11207, 11208, 11209, 11210, 11211, 11212, 11213, 11214, 11215, 11216, 11217, 11218, 11219, 11220, 11221, 11222, 11223, 11224, 11225, 11226, 11227, 11228, 11229, 11230, 11231, 11232, 11233, 11234, 11235, 11236, 11237, 11238, 11239, 11240, 11241, 11242, 11243, 11244, 11245, 11246, 11247, 11248, 11249, 11250, 11251, 11252, 11253, 11254, 11255, 11256, 11257, 11258, 11259, 11260, 11261, 11262, 11263, 11264, 11265, 11266, 11267, 11268, 11269, 11270, 11271, 11272, 11273, 11274, 11275, 11276, 11277, 11278, 11279, 11280, 11281, 11282, 11283, 11284, 11285, 11286, 11287, 11288, 11289, 11290, 11291, 11292, 11293, 11294, 11295, 11296, 11297, 11298, 11299, 11300, 11301, 11302, 11303, 11304, 11305, 11306, 11307, 11308, 11309, 11310, 11311, 11312, 11313, 11314, 11315, 11316, 11317, 11318, 11319, 11320, 11321, 11322, 11323, 11324, 11325, 11326, 11327, 11328, 11329, 11330, 11331, 11332, 11333, 11334, 11335, 11336, 11337, 11338, 11339, 11340, 11341, 11342, 11343, 11344, 11345, 11346, 11347, 11348, 11349, 11350, 11351, 11352, 11353, 11354, 11355, 11356, 11357, 11358, 11359, 11360, 11361, 11362, 11363, 11364, 11365, 11366, 11367, 11368, 11369, 11370, 11371, 11372, 11373, 11374, 11375, 11376, 11377, 11378, 11379, 11380, 11381, 11382, 11383, 11384, 11385, 11386, 11387, 11388, 11389, 11390, 11391, 11392, 11393, 11394, 11395, 11396, 11397, 11398, 11399, 11400, 11401, 11402, 11403, 11404, 11405, 11406, 11407, 11408, 11409, 11410, 11411, 11412, 11413, 11414, 11415, 11416, 11417, 11418, 11419, 11420, 11421, 11422, 11423, 11424, 11425, 11426, 11427, 11428, 11429, 11430, 11431, 11432, 11433, 11434, 11435, 11436, 11437, 11438, 11439, 11440, 11441, 11442, 11443, 11444, 11445, 11446, 11447, 11448, 11449, 11450, 11451, 11452, 11453, 11454, 11455, 11456, 11457, 11458, 11459, 11460, 11461, 11462, 11463, 11464, 11465, 11466, 11467, 11468, 11469, 11470, 11471, 11472, 11473, 11474, 11475, 11476, 11477, 11478, 11479, 11480, 11481, 11482, 11483, 11484, 11485, 11486, 11487, 11488, 11489, 11490, 11491, 11492, 11493, 11494, 11495, 11496, 11497, 11498, 11499, 11500, 11501, 11502, 11503, 11504, 11505, 11506, 11507, 11508, 11509, 11510, 11511, 11512, 11513, 11514, 11515, 11516, 11517, 11518, 11519, 11520, 11521, 11522, 11523, 11524, 11525, 11526, 11527, 11528, 11529, 11530, 11531, 11532, 11533, 11534, 11535, 11536, 11537, 11538, 11539, 11540, 11541, 11542, 11543, 11544, 11545, 11546, 11547, 11548, 11549, 11550, 11551, 11552, 11553, 11554, 11555, 11556, 11557, 11558, 11559, 11560, 11561, 11562, 11563, 11564, 11565, 11566, 11567, 11568, 11569, 11570, 11571, 11572, 11573, 11574, 11575, 11576, 11577, 11578, 11579, 11580, 11581, 11582, 11583, 11584, 11585, 11586, 11587, 11588, 11589, 11590, 11591, 11592, 11593, 11594, 11595, 11596, 11597, 11598, 11599, 11600, 11601, 11602, 11603, 11604, 11605, 11606, 11607, 11608, 11609, 11610, 11611, 11612, 11613, 11614, 11615, 11616, 11617, 11618, 11619, 11620, 11621, 11622, 11623, 11624, 11625, 11626, 11627, 11628, 11629, 11630, 11631, 11632, 11633, 11634, 11635, 11636, 11637, 11638, 11639, 11640, 11641, 11642, 11643, 11644, 11645, 11646, 11647, 11648, 11649, 11650, 11651, 11652, 11653, 11654, 11655, 11656, 11657, 11658, 11659, 11660, 11661, 11662, 11663, 11664, 11665, 11666, 11667, 11668, 11669, 11670, 11671, 11672, 11673, 11674, 11675, 11676, 11677, 11678, 11679, 11680, 11681, 11682, 11683, 11684, 11685, 11686, 11687, 11688, 11689, 11690, 11691, 11692, 11693, 11694, 11695, 11696, 11697, 11698, 11699, 11700, 11701, 11702, 11703, 11704, 11705, 11706, 11707, 11708, 11709, 11710, 11711, 11712, 11713, 11714, 11715, 11716, 11717, 11718, 11719, 11720, 11721, 11722, 11723, 11724, 11725, 11726, 11727, 11728, 11729, 11730, 11731, 11732, 11733, 11734, 11735, 11736, 11737, 11738, 11739, 11740, 11741, 11742, 11743, 11744, 11745, 11746, 11747, 11748, 11749, 11750, 11751, 11752, 11753, 11754, 11755, 11756, 11757, 11758, 11759, 11760, 11761, 11762, 11763, 11764, 11765, 11766, 11767, 11768, 11769, 11770, 11771, 11772, 11773, 11774, 11775, 11776, 11777, 11778, 11779, 11780, 11781, 11782, 11783, 11784, 11785, 11786, 11787, 11788, 11789, 11790, 11791, 11792, 11793, 11794, 11795, 11796, 11797, 11798, 11799, 11800, 11801, 11802, 11803, 11804, 11805, 11806, 11807, 11808, 11809, 11810, 11811, 11812, 11813, 11814, 11815, 11816, 11817, 11818, 11819, 11820, 11821, 11822, 11823, 11824, 11825, 11826, 11827, 11828, 11829, 11830, 11831, 11832, 11833, 11834, 11835, 11836, 11837, 11838, 11839, 11840, 11841, 11842, 11843, 11844, 11845, 11846, 11847, 11848, 11849, 11850, 11851, 11852, 11853, 11854, 11855, 11856, 11857, 11858, 11859, 11860, 11861, 11862, 11863, 11864, 11865, 11866, 11867, 11868, 11869, 11870, 11871, 11872, 11873, 11874, 11875, 11876, 11877, 11878, 11879, 11880, 11881, 11882, 11883, 11884, 11885, 11886, 11887, 11888, 11889, 11890, 11891, 11892, 11893, 11894, 11895, 11896, 11897, 11898, 11899, 11900, 11901, 11902, 11903, 11904, 11905, 11906, 11907, 11908, 11909, 11910, 11911, 11912, 11913, 11914, 11915, 11916, 11917, 11918, 11919, 11920, 11921, 11922, 11923, 11924, 11925, 11926, 11927, 11928, 11929, 11930, 11931, 11932, 11933, 11934, 11935, 11936, 11937, 11938, 11939, 11940, 11941, 11942, 11943, 11944, 11945, 11946, 11947, 11948, 11949, 11950, 11951, 11952, 11953, 11954, 11955, 11956, 11957, 11958, 11959, 11960, 11961, 11962, 11963, 11964, 11965, 11966, 11967, 11968, 11969, 11970, 11971, 11972, 11973, 11974, 11975, 11976, 11977, 11978, 11979, 11980, 11981, 11982, 11983, 11984, 11985, 11986, 11987, 11988, 11989, 11990, 11991, 11992, 11993, 11994, 11995, 11996, 11997, 11998, 11999, 12000, 12001, 12002, 12003, 12004, 12005, 12006, 12007, 12008, 12009, 12010, 12011, 12012, 12013, 12014, 12015, 12016, 12017, 12018, 12019, 12020, 12021, 12022, 12023 and 12024.

10. A nucleic acid molecule comprising a nucleotide sequence complementary to a nucleic acid molecule according to any one of claims 6 to 9.

11. A nucleic acid molecule comprising a nucleotide sequences having 50% or greater sequence identity to a nucleic acid molecule according to any one of claims 6 to 10.

12. A nucleic acid molecule which can hybridise to a nucleic acid molecule according to any one of claims 6 to 11 under high stringency conditions.

13. A composition comprising a protein, a nucleic acid molecule, or an antibody according to any preceding claim.

14. A composition according to claim 13, being an immunogenic composition, a vaccine composition or a diagnostic composition.

15. A composition according to claim 13 or claim 14 for use as a pharmaceutical.

16. The use of a composition according to claim 13 in the manufacture of a medicament for the treatment or prevention of infection or disease caused by streptococcus bacteria, particularly S. agalactiae and S. pyogenes.

17. A method of treating a patient, comprising administering to the patient a therapeutically effective amount of the composition of claim 13.

18. A hybrid protein represented by the formula NH₂-A-[-X-L-]ₙ-B—COOH, wherein X is an amino acid sequence as defined in claim 1, L is an optional linker amino acid sequence, A is an optional N-terminal amino acid sequence, B is an optional C-terminal amino acid sequence, and n is an integer greater than 1.

19. A kit comprising primers for amplifying a template sequence contained within a Streptococcus nucleic acid sequence, the kit comprising a first primer and a second primer, wherein the first primer is substantially complementary to said template sequence and the second primer is substantially complementary to a complement of said template sequence, wherein the parts of said primers which have substantial complementarity define the termini of the template sequence to be amplified.

20. A kit comprising first and second single-stranded oligonucleotides which allow amplification of a Streptococcus template nucleic acid sequence contained in a single- or double-stranded nucleic acid (or mixture thereof), wherein: (a) the first oligonucleotide comprises a primer sequence which is substantially complementary to said template nucleic acid sequence; (b) the second oligonucleotide comprises a primer sequence which is substantially complementary to the complement of said template nucleic acid sequence; (c) the first oligonucleotide and/or the second oligonucleotide comprise(s) sequence which is not complementary to said template nucleic acid; and (d) said primer sequences define the termini of the template sequence to be amplified.

21. The kit of claim 20, wherein the non-complementary sequence(s) of (c) comprise a restriction site and/or a promoter sequence.

22. A computer-readable medium containing one or more of SEQ IDs 1 to 12024.

23. A process for detecting Streptococcus in a biological sample, comprising the step of contacting nucleic acid according to any of claims 6 to 12 with the biological sample under hybridising conditions.

24. The process of claim 23, wherein the process involves nucleic acid amplification.

25. A process for determining whether a compound binds to a protein according to claim 1, claim 2 or claim 3, comprising the step of contacting a test compound with a protein according to claim 1, claim 2 or claim 3 and determining whether the test compound binds to said protein.

26. A compound identified by the process of claim 25.

27. A composition comprising a protein according to claim 1, claim 2 or claim 3 and one or more of the following antigens:
a protein antigen from Helicobacter pylori;
a protein antigen from N. meningitidis serogroup B;
an outer-membrane vesicle (OMV) preparation from N. meningitidis serogroup B;
a saccharide antigen from N. meningitidis serogroup A, C, W135 and/or Y;
a saccharide antigen from Streptococcus pneumoniae;
an antigen from hepatitis A virus;
an antigen from hepatitis B virus;
an antigen from hepatitis C virus;
an antigen from Bordetella pertussis;
a diphtheria antigen;
a tetanus antigen;
a saccharide antigen from Haemophilus influenzae B.
an antigen from N. gonorrhoeae;
an antigen from Chlamydia pneumoniae;
an antigen from Chlamydia trachomatis;
an antigen from Porphyromonas gingivalis;
polio antigen(s);
rabies antigen(s);
measles, mumps and/or rubella antigens;
influenza antigen(s);
an antigen from Moraxella catarrhalis; and/or
an antigen from Staphylococcus aureus.

28. A composition comprising two or more proteins, wherein each protein is a protein according to claim 1, claim 2 or claim 3.
